(19) United States
(12) Patent Application Publication
(10) Pub. No.: US 2006/0003323 A1
(43) Pub. Date: Jan. 5, 2006

(54) Therapeutic polypeptides, nucleic acids encoding same, and methods of use

(76) Inventors: John Alsobrook, Madison, CT (US); Enrique Alvarez, Clinton, CT (US); David Anderson, Plantsville, CT (US); Ferenc Boldog, North Haven, CT (US); Stacie Casman, North Haven, CT (US); Elina Catterton, Milford, CT (US); Andrei Chapoval, Branford, CT (US); Julie Crabtree-Bokor, Gainesville, FL (US); Shlomit Edinger, New Haven, CT (US); Karen Ellerman, Branford, CT (US); Seth Ettenberg, New Haven, CT (US); Esha Gangolli, Madison, CT (US); Valerie Gerlach, Branford, CT (US); Linda Gorman, Branford, CT (US); Erik Gunther, Branford, CT (US); Xiaojia (Sasha) Guo, Branford, CT (US); Vladimir Gusev, Madison, CT (US); John Herrmann, Guilford, CT (US); Weizhen Ji, Branford, CT (US); Ramesh Kekuda, Stamford, CT (US); Li Li, Branford, CT (US); Xiaohong Liu, Branford, CT (US); John MacDougall, Hamden, CT (US); Timothy Machlachlan, Cheshire, CT (US); Uriel Malyankar, North Branford, CT (US); Amanda Mezick, Hamden, CT (US); Isabelle Millet, Milford, CT (US); Vishnu Mishra, Gainesville, FL (US); Muralidhara Padigaru, Branford, CT (US); Meera Patturajan, Branford, CT (US); Carol Pena, New Haven, CT (US); John Peyman, New Haven, CT (US); Debasish Raha, Hamden, CT (US); Luca Rastelli, Guilford, CT (US); Daniel Rieger, Branford, CT (US); Mark Rothenberg, Clinton, CT (US); Paul Sciore, North Haven, CT (US); Suresh Shenoy, Branford, CT (US); Richard Shimkets, Guilford, CT (US); Glennda Smithson, Guilford, CT (US); Kimberly Spytek, Ellington, CT (US); David Stone, Guilford, CT (US); Corine Vernet, Chernex (CH); Edward Voss, Wallingford, CT (US); Mei Zhong, Branford, CT (US); Hiahong Zhong, Guilford, CT (US)

Correspondence Address: MINTZ, LEVIN, COHN, FERRIS, GLOVSKY;AND POPEO, P.C., ONE FINANCIAL CENTER, BOSTON, MA, 02111, US

(21) Appl. No.: 10/453,372

(22) Filed: Jun. 3, 2003

Related U.S. Application Data
(63) Continuation-in-part of application No. 09/789,390, filed on Feb. 23, 2001, now abandoned.
(60) Provisional application No. 60/185,967, filed on Mar. 1, 2000.

(51) Int. Cl. C12Q 1/68

(52) U.S. Cl. 435/6

(57) ABSTRACT

Disclosed herein are nucleic acid sequences that encode novel polypeptides. Also disclosed are polypeptides encoded by these nucleic acid sequences, and antibodies that immunospecifically bind to the polypeptide, as well as derivatives, variants, mutants, or fragments of the novel polypeptide, polynucleotide, or antibody specific to the polypeptide. Vectors, host cells, antibodies and recombinant methods for producing the polypeptides and polynucleotides, as well as methods for using same are also included. The invention further discloses therapeutic, diagnostic and research methods for diagnosis, treatment, and prevention of disorders involving any one of these novel human nucleic acids and proteins.

### RELATED APPLICATIONS

[0001] This application is a continuation-in-part of U.S. Ser. No. 09/789,390, filed Feb. 23, 2001, which claims priority to U.S. Ser. No. 60/185,967, filed Mar. 1, 2000; U.S. Ser. No. 09/823,187, filed Mar. 29, 2001, which claims priority to U.S. Ser. No. 60/195,792, filed Mar. 10, 2000; U.S. Ser. No. 09/839,446, filed Mar. 19, 2001, which claims priority to U.S. Ser. No. 60/199,476, filed Mar. 25, 2000; and U.S. Ser. No. 60/199,476, filed Apr. 25, 20001; U.S. Ser. No. 09/863,776, filed May 23, 2001, which claims priority to U.S. Ser. No. 60/208,263, filed May 31, 2000; U.S. Ser. No. 09/939,398, filed Aug. 24, 2001, which claims priority to U.S. Ser. No. 60/227,800, filed Aug. 25, 2000; U.S. Ser. No. 09/964,956, filed Sep. 26, 2001, which claims priority to U.S. Ser. No. 60/236,135, filed Sep. 28, 2000; U.S. Ser. No. 10/015,115, filed Nov. 13, 2001, which claims priority to U.S. Ser. No. 60/248,153, filed Nov. 13, 2000; U.S. Ser. No. 10/028,248, filed Dec. 19, 2001, which claims priority to U.S. Ser. No. 60/285,189, filed Apr. 20, 2001; U.S. Ser. No. 10/032,189, filed Dec. 21, 2001, which claims priority to U.S. Ser. No. 60/258,171, filed Dec. 22, 2000; and U.S. Ser. No. 60/257,495, filed Dec. 21, 2000; U.S. Ser. No. 10/055,877, filed Jan. 22, 2002, which claims priority to U.S. Ser. No. 60/296,960, filed Jun. 8, 2001 and U.S. Ser. No. 60/335,669, filed Oct. 31, 2001; U.S. Ser. No. 10/072,012, filed Jan. 31, 2002, which claims priority to U.S. Ser. No. 60/265,412, filed Jan. 31, 2001; U.S. Ser. No. 10/080,334, filed Feb. 21, 2002, which claims priority to U.S. Ser. No. 60/270,220, filed Feb. 21, 2001; U.S. Ser. No. 10/093,463, filed Mar. 8, 2002, which claims priority to U.S. Ser. No. 60/277,311, filed Mar. 20, 2001; U.S. Ser. No. 10/114,153, filed Apr. 2, 2002, which claims priority to U.S. Ser. No. 60/283,678, filed Apr. 13, 2001; and U.S. Ser. No. 60/286,292, filed Apr. 25, 2001; U.S. Ser. No. 10/114,270, filed Apr. 2, 2002, which claims priority to U.S. Ser. No. 60/281,136, filed Apr. 3, 2001; U.S. Ser. No. 10/138,588, filed Apr. 1, 2002 which claims priority to U.S. Ser. No. 60/288,900, filed May 4, 2001; U.S. Ser. No. 09/783,429, filed Feb. 14, 2001; U.S. Ser. No. 09/800,198, filed Mar. 5, 2001; U.S. Ser. No. 10/023,634, filed Dec. 17, 2001; U.S. Ser. No. 10/038,854, filed Dec. 31, 2001; U.S. Ser. No. 10/051,874, filed Jan. 16, 2002; and U.S. Ser. No. 10/072,013, filed Feb. 8, 2002; and claims the benefit of U.S. Ser. No. 60/386,376, filed Jun. 6, 2002; U.S. Ser. No. 60/385,784, filed Jun. 4, 2002;U.S. Ser. No. 60/386,453, filed Jun. 6, 2002; U.S. Ser. No. 60/402,389, filed Aug. 9, 2002; U.S. Ser. No. 60/412,528, filed Sep. 20, 2002; U.S. Ser. No. 60/387,016, filed Jun. 6, 2002; U.S. Ser. No. 60/386,796, filed Jun. 7, 2002; U.S. Ser. No. 60/386,971, filed Jun. 7, 2002; U.S. Ser. No. 60/386,041, filed Jun. 5, 2002; U.S. Ser. No. 60/387,610, filed Jun. 11, 2002; U.S. Ser. No. 60/386,047, filed Jun. 5, 2002; U.S. Ser. No. 60/387,400, filed Jun. 10, 2002; U.S. Ser. No. 60/402,156, filed Aug. 9, 2002; U.S. Ser. No. 60/386,816, filed Jun. 7, 2002; U.S. Ser. No. 60/402,256, filed Aug. 9, 2002; U.S. Ser. No. 60/389,144, filed Jun. 14, 2002; U.S. Ser. No. 60/386,942, filed Jun. 7, 2002; U.S. Ser. No. 60/387,262, filed Jun. 7, 2002; U.S. Ser. No. 60/389,120, filed Jun. 14, 2002; U.S. Ser. No. 60/421,156, filed Oct. 28, 2002; U.S. Ser. No. 60/423,130, filed Nov. 1, 2002; U.S. Ser. No. 60/425,453, filed Nov. 12, 2002; U.S. Ser. No. 60/386,931, filed Jun. 7, 2002; U.S. Ser. No. 60/403,459, filed Aug. 13, 2002; U.S. Ser. No. 60/387,535, filed Jun. 10, 2002; U.S. Ser. No. 60/403,448, filed Aug. 13, 2002; U.S. Ser. No. 60/423,798, filed Nov. 5, 2002; U.S. Ser. No. 60/387,859, filed Jun. 11, 2002; U.S. Ser. No. 60/402,821, filed Aug. 12, 2002; U.S. Ser. No. 60/417,186, filed Oct. 9, 2002; U.S. Ser. No. 10/015,115, filed Nov. 13, 2001; U.S. Ser. No. 60/387,702, filed Jun. 11, 2002; U.S. Ser. No. 60/387,634, filed Jun. 11, 2002; U. S.S. N. 60/387,934, filed Jun. 12,2002; U.S. Ser. No. 60/387,696, filed Jun. 11, 2002; U.S. Ser. No. 60/390,006, filed Jun. 19, 2002; U.S. Ser. No. 60/387,668, filed Jun. 11, 2002; U.S. Ser. No. 60/402,786, filed Aug. 12, 2002; U.S. Ser. No. 60/410,084, filed Sep. 1 2, 2002 ; U.S. Ser. No. 60/420,639, filed Oct. 23, 2002; U.S. Ser. No. 60/386,864, filed Jun. 6, 2002; U.S. Ser. No. 60/401,628, filed Aug. 6, 2002; U.S. Ser. No. 60/406,182, filed Aug. 26, 2002; U.S. Ser. No. 60/387,836, filed Jun. 11, 2002; U.S. Ser. No. 60/389,729, filed Jun. 17, 2002; U.S. Ser. No. 60/388,022, filed Jun. 12, 2002; U.S. Ser. No. 60/402,816, filed Aug. 12, 2002; U.S. Ser. No. 60/412,731, filed Sep. 23, 2002; U.S. Ser. No. 60/414,954, filed Sep. 30, 2002; U.S. Ser. No. 60 /388,096, filed Jun. 12, 2002; U.S. Ser. No. 60/414,840, filed Sep. 30, 2002; U.S. Ser. No. 60/417,406, filed Oct. 9, 2002; U.S. Ser. No. 60/389,123, filed Jun. 13, 2002; U.S. Ser. No. 60/402,832, filed Aug. 12, 2002; U.S. Ser. No. 60/403,532, filed Aug. 13, 2002; U.S. Ser. No. 60/414,839, filed Sep. 30, 2002; U.S. Ser. No. 60/387,625, filed Jun. 11, 2002; U.S. Ser. No. 60/390,209, filed Jun. 19, 2002; U.S. Ser. No. 60/403,531, filed Aug. 13, 2002; U.S. Ser. No. 60/387,933, filed Jun. 12, 2002; U.S. Ser. No. 60/406,355, filed Aug. 26, 2002; U.S. Ser. No. 10/094,886, filed Mar. 7, 2002; U.S. Ser. No. 60/389,118, filed Jun. 14, 2002; U.S. Ser. No. 60/406,317, filed Aug. 13, 2002; U.S. Ser. No. 60/403,563, filed Aug. 13, 2002; U.S. Ser. No. 60/389,884, filed Jun. 18, 2002; U.S. Ser. No. 60/406,240, filed Aug. 27, 2002; U.S. Ser. No. 60/389,146, filed Jun. 14, 2002; U.S. Ser. No. 60/387,960, filed Jun. 12, 2002; U.S. Ser. No. 60/403,617, filed Aug. 15, 2002; U.S. Ser. No. 60/348,693, filed Jan. 14, 2002; U.S. Ser. No. 60/390,763, filed Jun. 21, 2002; U.S. Ser. No. 60/385,120, filed Jun. 3, 2002; U.S. Ser. No. 60/414,801, filed Sep. 30, 2002; U.S. Ser. No. 60/422,690, filed Oct. 31, 2002; U.S. Ser. No. 60/389,742, filed Jun. 17, 2002; U.S. Ser. No. 60/396,706, filed Jul. 17, 2002.

### FIELD OF THE INVENTION

[0002] The present invention relates to novel polypeptides, and the nucleic acids encoding them, having properties related to stimulation of biochemical or physiological responses in a cell, a tissue, an organ or an organism. More particularly, the novel polypeptides are gene products of novel genes, or are specified biologically active fragments or derivatives thereof. Methods of use encompass diagnostic and prognostic assay procedures as well as methods of treating diverse pathological conditions.

### BACKGROUND OF THE INVENTION

[0003] Eukaryotic cells are characterized by biochemical and physiological processes which under normal conditions are exquisitely balanced to achieve the preservation and propagation of the cells. When such cells are components of multicellular organisms such as vertebrates, or more particularly organisms such as mammals, the regulation of the biochemical and physiological processes involves intricate signaling pathways. Frequently, such signaling pathways involve extracellular signaling proteins, cellular receptors that bind the signaling proteins, and signal transducing components located within the cells.

[0004] Signaling proteins may be classified as endocrine effectors, paracrine effectors or autocrine effectors. Endocrine effectors are signaling molecules secreted by a given organ into the circulatory system, which are then transported to a distant target organ or tissue. The target cells include the receptors for the endocrine effector, and when the endocrine effector binds, a signaling cascade is induced. Paracrine effectors involve secreting cells and receptor cells in close proximity to each other, for example two different classes of cells in the same tissue or organ. One class of cells secretes the paracrine effector, which then reaches the second class of cells, for example by diffusion through the extracellular fluid. The second class of cells contains the receptors for the paracrine effector; binding of the effector results in induction of the signaling cascade that elicits the corresponding biochemical or physiological effect. Autocrine effectors are highly analogous to paracrine effectors, except that the same cell type that secretes the autocrine effector also contains the receptor. Thus the autocrine effector binds to receptors on the same cell, or on identical neighboring cells. The binding process then elicits the characteristic biochemical or physiological effect.

[0005] Signaling processes may elicit a variety of effects on cells and tissues including by way of nonlimiting example induction of cell or tissue proliferation, suppression of growth or proliferation, induction of differentiation or maturation of a cell or tissue, and suppression of differentiation or maturation of a cell or tissue.

[0006] Many pathological conditions involve dysregulation of expression of important effector proteins. In certain classes of pathologies the dysregulation is manifested as diminished or suppressed level of synthesis and secretion of protein effectors. In other classes of pathologies the dysregulation is manifested as increased or up-regulated level of synthesis and secretion of protein effectors. In a clinical setting a subject may be suspected of suffering from a condition brought on by altered or mis-regulated levels of a protein effector of interest. Therefore there is a need to assay for the level of the protein effector of interest in a biological sample from such a subject, and to compare the level with that characteristic of a nonpathological condition. There also is a need to provide the protein effector as a product of manufacture. Administration of the effector to a subject in need thereof is useful in treatment of the pathological condition. Accordingly, there is a need for a method of treatment of a pathological condition brought on by a diminished or suppressed levels of the protein effector of interest. In addition, there is a need for a method of treatment of a pathological condition brought on by a increased or up-regulated levels of the protein effector of interest.

[0007] Antibodies are multichain proteins that bind specifically to a given antigen, and bind poorly, or not at all, to substances deemed not to be cognate antigens. Antibodies are comprised of two short chains termed light chains and two long chains termed heavy chains. These chains are constituted of immunoglobulin domains, of which generally there are two classes: one variable domain per chain, one constant domain in light chains, and three or more constant domains in heavy chains. The antigen-specific portion of the immunoglobulin molecules resides in the variable domains; the variable domains of one light chain and one heavy chain associate with each other to generate the antigen-binding moiety. Antibodies that bind immunospecifically to a cognate or target antigen bind with high affinities. Accordingly, they are useful in assaying specifically for the presence of the antigen in a sample. In addition, they have the potential of inactivating the activity of the antigen.

[0008] Therefore there is a need to assay for the level of a protein effector of interest in a biological sample from such a subject, and to compare this level with that characteristic of a nonpathological condition. In particular, there is a need for such an assay based on the use of an antibody that binds immunospecifically to the antigen. There further is a need to inhibit the activity of the protein effector in cases where a pathological condition arises from elevated or excessive levels of the effector based on the use of an antibody that binds immunospecifically to the effector. Thus, there is a need for the antibody as a product of manufacture. There further is a need for a method of treatment of a pathological condition brought on by an elevated or excessive level of the protein effector of interest based on administering the antibody to the subject.

### SUMMARY OF THE INVENTION

[0009] The invention is based in part upon the discovery of isolated polypeptides including amino acid sequences selected from mature forms of the amino acid sequences selected from the group consisting of SEQ ID NO:2n, wherein n is an integer between 1 and 606. The novel nucleic acids and polypeptides are referred to herein as NOV1a, NOV1b, NOV1c, NOV1d, NOV2a, NOV2b, NOV2c, NOV2d, NOV3a, NOV3b, etc. These nucleic acids and polypeptides, as well as derivatives, homologs, analogs and fragments thereof, will hereinafter be collectively designated as “NOVX” nucleic acid or polypeptide sequences.

[0010] The invention also is based in part upon variants of a mature form of the amino acid sequence selected from the group consisting of SEQ ID NO:2n, wherein n is an integer between 1 and 606, wherein any amino acid in the mature form is changed to a different amino acid, provided that no more than 15% of the amino acid residues in the sequence of the mature form are so changed. In another embodiment, the invention includes the amino acid sequences selected from the group consisting of SEQ ID NO:2n, wherein n is an integer between 1 and 606. In another embodiment, the invention also comprises variants of the amino acid sequence selected from the group consisting of SEQ ID NO:2n, wherein n is an integer between 1 and 606 wherein any amino acid specified in the chosen sequence is changed to a different amino acid, provided that no more than 15% of the amino acid residues in the sequence are so changed. The invention also involves fragments of any of the mature forms of the amino acid sequences selected from the group consisting of SEQ ID NO:2n, wherein n is an integer between 1 and 606, or any other amino acid sequence selected from this group. The invention also comprises fragments from these groups in which up to 15% of the residues are changed.

[0011] In another embodiment, the invention encompasses polypeptides that are naturally occurring allelic variants of the sequence selected from the group consisting of SEQ ID NO:2n, wherein n is an integer between 1 and 606. These allelic variants include amino acid sequences that are the translations of nucleic acid sequences differing by a single nucleotide from nucleic acid sequences selected from the group consisting of SEQ ID NOS: 2n−1, wherein n is an integer between 1 and 606. The variant polypeptide where any amino acid changed in the chosen sequence is changed to provide a conservative substitution.

[0012] In another embodiment, the invention comprises a pharmaceutical composition involving a polypeptide with an amino acid sequence selected from the group consisting of SEQ ID NO:2n, wherein n is an integer between 1 and 606 and a pharmaceutically acceptable carrier. In another embodiment, the invention involves a kit, including, in one or more containers, this pharmaceutical composition.

[0013] In another embodiment, the invention includes the use of a therapeutic in the manufacture of a medicament for treating a syndrome associated with a human disease, the disease being selected from a pathology associated with a polypeptide with an amino acid sequence selected from the group consisting of SEQ ID NO:2n, wherein n is an integer between 1 and 606 wherein said therapeutic is the polypeptide selected from this group.

[0014] In another embodiment, the invention comprises a method for determining the presence or amount of a polypeptide with an amino acid sequence selected from the group consisting of SEQ ID NO:2n, wherein n is an integer between 1 and 606 in a sample, the method involving providing the sample; introducing the sample to an antibody that binds immunospecifically to the polypeptide; and determining the presence or amount of antibody bound to the polypeptide, thereby determining the presence or amount of polypeptide in the sample.

[0015] In another embodiment, the invention includes a method for determining the presence of or predisposition to a disease associated with altered levels of a polypeptide with an amino acid sequence selected from the group consisting of SEQ ID NO:2n, wherein n is an integer between 1 and 606 in a first mammalian subject, the method involving measuring the level of expression of the polypeptide in a sample from the first mammalian subject; and comparing the amount of the polypeptide in this sample to the amount of the polypeptide present in a control sample from a second mammalian subject known not to have, or not to be predisposed to, the disease, wherein an alteration in the expression level of the polypeptide in the first subject as compared to the control sample indicates the presence of or predisposition to the disease.

[0016] In another embodiment, the invention involves a method of identifying an agent that binds to a polypeptide with an amino acid sequence selected from the group consisting of SEQ ID NO:2n, wherein n is an integer between 1 and 606, the method including introducing the polypeptide to the agent; and determining whether the agent binds to the polypeptide. The agent could be a cellular receptor or a downstream effector.

[0017] In another embodiment, the invention involves a method for identifying a potential therapeutic agent for use in treatment of a pathology, wherein the pathology is related to aberrant expression or aberrant physiological interactions of a polypeptide with an amino acid sequence selected from the group consisting of SEQ ID NO:2n, wherein n is an integer between 1 and 606, the method including providing a cell expressing the polypeptide of the invention and having a property or function ascribable to the polypeptide; contacting the cell with a composition comprising a candidate substance; and determining whether the substance alters the property or function ascribable to the polypeptide; whereby, if an alteration observed in the presence of the substance is not observed when the cell is contacted with a composition devoid of the substance, the substance is identified as a potential therapeutic agent.

[0018] In another embodiment, the invention involves a method forscreening for a modulator of activity or of latency or predisposition to a pathology associated with a polypeptide having an amino acid sequence selected from the group consisting of SEQ ID NO:2n, wherein n is an integer between 1 and 606, the method including administering a test compound to a test animal at increased risk for a pathology associated with the polypeptide of the invention, wherein the test animal recombinantly expresses the polypeptide of the invention; measuring the activity of the polypeptide in the test animal after administering the test compound; and comparing the activity of the protein in the test animal with the activity of the polypeptide in a control animal not administered the polypeptide, wherein a change in the activity of the polypeptide in the test animal relative to the control animal indicates the test compound is a modulator of latency of, or predisposition to,. a pathology associated with the polypeptide of the invention. The recombinant test animal could express a test protein transgene or express the transgene under the control of a promoter at an increased level relative to a wild-type test animal The promoter may or may not b the native gene promoter of the transgene.

[0019] In another embodiment, the invention involves a method for modulating the activity of a polypeptide with an amino acid sequence selected from the group consisting of SEQ ID NO:2n, wherein n is an integer between 1 and 606, the method including introducing a cell sample expressing the polypeptide with a compound that binds to the polypeptide in an amount sufficient to modulate the activity of the polypeptide.

[0020] In another embodiment, the invention involves a method of treating or preventing a pathology associated with a polypeptide with an amino acid sequence selected from the group consisting of SEQ ID NO:2n, wherein n is an integer between 1 and 606, the method including administering the polypeptide to a subject in which such treatment or prevention is desired in an amount sufficient to treat or prevent the pathology in the subject. The subject could be human.

[0021] In another embodiment, the invention involves a method of treating a pathological state in a mammal, the method including administering to the mammal a polypeptide in an amount that is sufficient to alleviate the. pathological state, wherein the polypeptide is a polypeptide having an amino acid sequence at least 95% identical to a polypeptide having the amino acid sequence selected from the group consisting of SEQ ID NO:2n, wherein n is an integer between 1 and 606 or a biologically active fragment thereof.

[0022] In another embodiment, the invention involves an isolated nucleic acid molecule comprising a nucleic acid sequence encoding a polypeptide having an amino acid sequence selected from the group consisting of a mature form of the amino acid sequence given SEQ ID NO:2n, wherein n is an integer between 1 and 606; a variant of a mature form of the amino acid sequence selected from the group consisting of SEQ ID NO:2n, wherein n is an integer between 1 and 606 wherein any amino acid in the mature form of the chosen sequence is changed to a different amino acid, provided that no more than 15% of the amino acid residues in the sequence of the mature form are so changed; the amino acid sequence selected from the group consisting of SEQ ID NO:2n, wherein n is an integer between 1 and 606; a variant of the amino acid sequence selected from the group consisting of SEQ ID NO:2n, wherein n is an integer between 1 and 606, in which any amino acid specified in the chosen sequence is changed to a different amino acid, provided that no more than 15% of the amino acid residues in the sequence are so changed; a nucleic acid fragment encoding at least a portion of a polypeptide comprising the amino acid sequence selected from the group consisting of SEQ ID NO:2n, wherein n is an integer between 1 and 606 or any variant of the polypeptide wherein any amino-acid of the chosen sequence is changed to a different amino acid, provided that no more than 10% of the amino acid residues in the sequence are so changed; and the complement of any of the nucleic acid molecules.

[0023] In another embodiment, the invention comprises an isolated nucleic acid molecule having a nucleic acid sequence encoding a polypeptide comprising an amino acid sequence selected from the group consisting of a mature form of the amino acid sequence given SEQ ID NO:2n, wherein n is an integer between 1 and 606, wherein the nucleic acid molecule comprises the nucleotide sequence of a naturally occurring allelic nucleic acid variant.

[0024] In another embodiment, the invention involves an isolated nucleic acid, molecule including a nucleic acid sequence encoding a polypeptide having an amino acid sequence selected from the group consisting of a mature form of the amino acid sequence given SEQ ID NO:2n, wherein n is an integer between 1 and 606 that encodes a variant polypeptide, wherein the variant polypeptide has the polypeptide sequence of a naturally occurring polypeptide variant.

[0025] In another embodiment, the invention comprises an isolated nucleic acid molecule having a nucleic acid sequence encoding a polypeptide comprising an amino acid sequence selected from the group consisting of a mature form of the amino acid sequence given SEQ ID NO:2n, wherein n is an integer between 1 and 606, wherein the nucleic acid molecule differs by a single nucleotide from a nucleic acid sequence selected from the group consisting of SEQ. ID NOS: 2n−1, wherein n is an integer between 1 and 606.

[0026] In another embodiment, the invention includes an isolated nucleic acid molecule having a nucleic acid sequence encoding a polypeptide including an amino acid sequence selected from the group consisting of a mature form of the amino acid sequence given SEQ ID NO:2n, wherein n is an integer between 1 and 606, wherein the nucleic acid molecule comprises a nucleotide sequence selected from the group consisting of the nucleotide sequence selected from the group consisting of SEQ ID NO:2n−1, wherein n is an integer between 1 and 606; a nucleotide sequence wherein one or more nucleotides in the nucleotide sequence selected from the group consisting of SEQ ID NO:2n−1, wherein n is an integer between 1 and 606 is changed from that selected from the group consisting of the chosen sequence to a different nucleotide provided that no more than 15% of the nucleotides are so changed; a nucleic acid fragment of the sequence selected from the group consisting of SEQ ID NO:2n−1, wherein n is an integer between 1 and 606; and a nucleic acid fragment wherein one or more nucleotides in the nucleotide sequence selected from the group consisting of SEQ ID NO:2n−1, wherein n is an integer between 1 and 606 is changed from that selected from the group consisting of the chosen sequence to a different nucleotide provided that no more than 15% of the nucleotides are so changed.

[0027] In another embodiment, the invention includes an isolated nucleic acid molecule having a nucleic acid sequence encoding a polypeptide including an amino acid sequence selected from the group consisting of a mature form of the amino acid sequence given SEQ ID NO:2n, wherein n isan integer between 1 and 606, wherein the nucleic acid molecule hybridizes under stringent conditions to the nucleotide sequence selected from the group consisting of SEQ ID NO:2n−1, wherein n is an integer between 1 and 606, or a complement of the nucleotide sequence.

[0028] In another embodiment, the invention includes an isolated nucleic acid molecule having a nucleic acid sequence encoding. a polypeptide including an amino acid sequence selected from the group consisting of a mature form of the amino acid sequence given SEQ ID NO:2n, wherein n is an integer between 1 and 606, wherein the nucleic acid molecule has a nucleotide sequence in which any nucleotide specified in the coding sequence of the chosen nucleotide sequence is changed from that selected from the group consisting of the chosen sequence to a different nucleotide provided that no more than 15% of the nucleotides in the chosen coding sequence are so changed, an isolated second polynucleotide that is a complement of the first polynucleotide, or a fragment of any of them.

[0029] In another embodiment, the invention includes a vector involving the nucleic acid molecule having a nucleic acid sequence encoding a polypeptide including an amino acid sequence selected from the group consisting of a mature form of the amino acid sequence given SEQ ID NO:2n, wherein n is an integer between 1 and 606. This vector can have a promoter operably linked to the nucleic acid molecule. This vector can be located within a cell.

[0030] In another embodiment, the invention involves a method for determining the presence or amount of a nucleic acid molecule having a nucleic acid sequence encoding a polypeptide including an amino acid sequence selected from the group consisting of a mature form of the amino acid sequence given SEQ ID NO:2n, wherein n is an integer between 1 and 606 in a sample, the method including providing the sample; introducing the sample to a probe that binds to the nucleic acid molecule; and determining the presence or amount of the probe bound to the nucleic acid molecule, thereby determining the presence or amount of the nucleic acid molecule in the sample. The presence or amount of the nucleic acid molecule is used as a marker for cell or tissue type. The cell type can be cancerous.

[0031] In another embodiment, the invention involves a method for determining the presence of or predisposition for a disease associated with altered levels of a nucleic acid molecule having a nucleic acid sequence encoding a polypeptide including an amino acid sequence selected from the group consisting of a mature form of the amino acid sequence given SEQ ID NO:2n, wherein n is an integer between 1 and 606 in a first mammalian subject, the method including measuring the amount of the nucleic acid in a sample from the first mammalian subject; and comparing the amount of the nucleic acid in the sample of step (a) to the amount of the nucleic acid present in a control sample from a second mammalian subject known not to have or not be predisposed to, the disease; wherein an alteration in the level of the nucleic acid in the first subject as compared to the control sample indicates the presence of or predisposition to the disease.

[0032] The invention further provides an antibody that binds immunospecifically to a NOVX polypeptide. The NOVX antibody may be monoclonal, humanized, or a fully human antibody. Preferably, the antibody has a dissociation constant for the binding of the NOVX polypeptide to the antibody less than 1×10⁻⁹ M. More preferably, the NOVX antibody neutralizes the activity of the NOVX polypeptide.

[0033] In a further aspect, the invention provides for the use of a therapeutic in the manufacture of a medicament for treating a syndrome associated with a human disease, associated with a NOVX polypeptide. Preferably the therapeutic is a NOVX antibody.

[0034] In yet a further aspect, the invention provides a method of treating or preventing a NOVX-associated disorder, a method of treating a pathological state in a mammal, and a method of treating or preventing a pathology associated with a polypeptide by administering a NOVX antibody to a subject in an amount sufficient to treat or prevent the disorder.

[0035] Unless otherwise defined, all technical and scientific terms used herein have the same meaning as commonly understood by one of ordinary skill in the art to which this invention belongs. Although methods and materials similar or equivalent to those described herein can be used in the practice or testing of the present invention, suitable methods and materials are described below. All publications, patent applications, patents, and other references mentioned herein are incorporated by reference in their entirety. In the case of conflict, the present specification, including definitions, will control. In addition, the materials, methods, and examples are illustrative only and are not intended to be limiting.

[0036] Other features and advantages of the invention will be apparent from the following detailed description and claims.

### BRIEF DESCRIPTION OF THE DRAWINGS

[0037] FIG. 1 is a table illustrating the SAGE library data results illustrating overexpression of LIV-1 in breast carcinoma derived cells.

[0038] FIG. 2 is is a bar graph showing that antisense knockdown of LIV-1 inhibits breast carcinoma cell line T47D cell growth.

[0039] FIG. 3 is is a bar graph showing that antisense knockdown of LwV-1 has less inhibitory effect on Ovcar-4 cell growth.

[0040] FIG. 4 is is a bar graph showing RTQPCR validation of knockdown of LIV-1 expression at mRNA level in T47D breast cancer cell lines.

### DETAILED DESCRIPTION OF THE INVENTION

[0041] The present invention provides novel nucleotides and polypeptides encoded thereby. Included in the invention are the novel nucleic acid sequences, their encoded polypeptides, antibodies, and other related compounds. The sequences are collectively referred to herein as “NOVX nucleic acids” or “NOVX polynucleotides” and the corresponding encoded polypeptides are referred to as “NOVX polypeptides” or “NOVX proteins.” Unless indicated otherwise, “NOVX” is meant to refer to any of the novel sequences disclosed herein. Table A provides a summary of the NOVX nucleic acids and their encoded polypeptides.

TABLE A
Sequences and Corresponding SEQ ID Numbers

| NOVX | Internal | SEQ ID NO | SEQ ID NO | |
|---|---|---|---|---|
| Assignment | Identification | (nucleic acid) | (amino acid) | Homology |
| NOV1a | CG191083-01 | 1 | 2 | VON WILLEBRAND factor A- related protein homolog - Mus musculus |
| NOV2a | CG191745-01 | 3 | 4 | Integrin alpha-2 precursor (Platelet |
| | | | | membrane glycoprotein Ia) (GPIa) (CD49b) - Homo sapiens |
| NOV3a | CG50253-01 | 5 | 6 | Human secreted protein SCEP-39 |
| NOV3b | 250095765 | 7 | 8 | Human secreted protein SCEP-39 |
| NOV3c | 250095742 | 9 | 10 | Human secreted protein SCEP-39 |
| NOV3d | 250095779 | 11 | 12 | Human secreted protein SCEP-39 |
| NOV3e | 250095794 | 13 | 14 | Human secreted protein SCEP-39 |
| NOV3f | 250095734 | 15 | 16 | Human secreted protein SCEP-39 |
| NOV3g | 250095811 | 17 | 18 | Human secreted protein SCEP-39 |
| NOV3h | 250095799 | 19 | 20 | Human secreted protein SCEP-39 |
| NOV3i | SNP13377609 | 21 | 22 | Human secreted protein SCEP-39 |
| NOV3j | SNP13373929 | 23 | 24 | Human secreted protein SCEP-39 |
| NOV3k | SNP13380272 | 25 | 26 | Human secreted protein SCEP-39 |
| NOV3l | SNP13379745 | 27 | 28 | Human secreted protein SCEP-39 |
| NOV3m | SNP13373930 | 29 | 30 | Human secreted protein SCEP-39 |
| NOV4a | CG50377-04 | 31 | 32 | CSMD1 - Mus musculus |
| NOV4b | CG50377-01 | 33 | 34 | CSMD1 - Mus musculus |
| NOV4c | CG50377-02 | 35 | 36 | CSMD1 - Mus musculus |
| NOV4d | CG50377-03 | 37 | 38 | CSMD1 - Mus musculus |
| NOV4e | CG50377-05 | 39 | 40 | CSMD1 - Mus musculus |
| NOV4f | CG50377-06 | 41 | 42 | CSMD1 - Mus musculus |
| NOV4g | 273095147 | 43 | 44 | CSMD1 - Mus musculus |
| NOV4h | 317459653 | 45 | 46 | CSMD1 - Mus musculus |
| NOV4i | 317459612 | 47 | 48 | CSMD1 - Mus musculus |
| NOV4j | 317286331 | 49 | 50 | CSMD1 - Mus musculus |
| NOV4k | CG50377-07 | 51 | 52 | CSMD1 - Mus musculus |
| NOV4l | CG50377-08 | 53 | 54 | CSMD1 - Mus musculus |
| NOV4m | CG50377-09 | 55 | 56 | CSMD1 - Mus musculus |
| NOV4n | CG50377-10 | 57 | 58 | CSMD1 - Mus musculus |
| NOV4o | CG50377-11 | 59 | 60 | CSMD1 - Mus musculus |
| NOV4p | SNP13382457 | 61 | 62 | CSMD1 - Mus musculus |
| NOV4q | SNP13382458 | 63 | 64 | CSMD1 - Mus musculus |
| NOV5a | CG50389-04 | 65 | 66 | Interleukin 1 receptor-like 2 precursor (IL-1Rrp2) |
| | | | | (IL1R-rp2) - Homo sapiens |
| NOV5b | CG50389-06 | 67 | 68 | Interleukin 1 receptor-like 2 precursor (IL-1Rrp2) |
| | | | | (IL1R-rp2) - Homo sapiens |
| NOV5c | 257448648 | 69 | 70 | Interleukin 1 receptor-like 2 precursor (IL-1Rrp2) |
| | | | | (IL1R-rp2) - Homo sapiens |
| NOV5d | CG50389-01 | 71 | 72 | Interleukin 1 receptor-like 2 precursor (IL-1Rrp2) |
| | | | | (IL1R-rp2) - Homo sapiens |
| NOV5e | CG50389-02 | 73 | 74 | Interleukin 1 receptor-like 2 precursor (IL-1Rrp2) |
| | | | | (IL1R-rp2) - Homo sapiens |
| NOV5f | CG50389-03 | 75 | 76 | Interleukin 1 receptor-like 2 precursor (IL-1Rrp2) |
| | | | | (IL1R-rp2) - Homo sapiens |
| NOV5g | CG50389-05 | 77 | 78 | Interleukin 1 receptor-like 2 precursor (IL-1Rrp2) |
| | | | | (IL1R-rp2) - Homo sapiens |
| NOV5h | SNP13382464 | 79 | 80 | Interleukin 1 receptor-like 2 precursor (IL-1Rrp2) |
| | | | | (IL1R-rp2) - Homo sapiens |
| NOV6a | CG50391-08 | 81 | 82 | Human protease-inhibitor like protein |
| NOV6b | CG50391-09 | 83 | 84 | Human protease-inhibitor like protein |
| NOV6c | CG50391-10 | 85 | 86 | Human protease-inhibitor like protein |
| NOV6d | CG50391-01 | 87 | 88 | Human protease-inhibitor like protein |
| NOV6e | CG50391-02 | 89 | 90 | Human protease-inhibitor like protein |
| NOV6f | CG50391-03 | 91 | 92 | Human protease-inhibitor like protein |
| NOV6g | CG50391-04 | 93 | 94 | Human protease-inhibitor like protein |
| NOV6h | CG50391-05 | 95 | 96 | Human protease-inhibitor like protein |
| NOV6i | CG50391-06 | 97 | 98 | Human protease-inhibitor like protein |
| NOV6j | CG50391-07 | 99 | 100 | Human protease-inhibitor like protein |
| NOV6k | CG50391-11 | 101 | 102 | Human protease-inhibitor like protein |
| NOV6l | SNP13376336 | 103 | 104 | Human protease-inhibitor like protein |
| NOV6m | SNP13376335 | 105 | 106 | Human protease-inhibitor like protein |
| NOV6n | SNP13376334 | 107 | 108 | Human protease-inhibitor like protein |
| NOV6o | SNP13376333 | 109 | 110 | Human protease-inhibitor like protein |
| NOV6p | SNP13382488 | 111 | 112 | Human protease-inhibitor like protein |
| NOV7a | CG50426-17 | 113 | 114 | Ten-m2 - Mus musculus |
| NOV7b | CG50426-21 | 115 | 116 | Ten-m2 - Mus musculus |
| NOV7c | CG50426-15 | 117 | 118 | Ten-m2 - Mus musculus |
| NOV7d | 306276924 | 119 | 120 | Ten-m2 - Mus musculus |
| NOV7e | 306276936 | 121 | 122 | Ten-m2 - Mus musculus |
| NOV7f | 308530526 | 123 | 124 | Ten-m2 - Mus musculus |
| NOV7g | 308530589 | 125 | 126 | Ten-m2 - Mus musculus |
| NOV7h | CG50426-01 | 127 | 128 | Ten-m2 - Mus musculus |
| NOV7i | CG50426-02 | 129 | 130 | Ten-m2 - Mus musculus |
| NOV7j | CG50426-03 | 131 | 132 | Ten-m2 - Mus musculus |
| NOV7k | CG50426-04 | 133 | 134 | Ten-m2 - Mus musculus |
| NOV7l | CG50426-05 | 135 | 136 | Ten-m2 - Mus musculus |
| NOV7m | CG50426-06 | 137 | 138 | Ten-m2 - Mus musculus |
| NOV7n | CG50426-07 | 139 | 140 | Ten-m2 - Mus musculus |
| NOV7o | CG50426-08 | 141 | 142 | Ten-m2 - Mus musculus |
| NOV7p | CG50426-09 | 143 | 144 | Ten-m2 - Mus musculus |
| NOV7q | CG50426-10 | 145 | 146 | Ten-m2 - Mus musculus |
| NOV7r | CG50426-11 | 147 | 148 | Ten-m2 - Mus musculus |
| NOV7s | CG50426-12 | 149 | 150 | Ten-m2 - Mus musculus |
| NOV7t | CG50426-13 | 151 | 152 | Ten-m2 - Mus musculus |
| NOV7u | CG50426-14 | 153 | 154 | Ten-m2 - Mus musculus |
| NOV7v | CG50426-16 | 155 | 156 | Ten-m2 - Mus musculus |
| NOV7w | CG50426-18 | 157 | 158 | Ten-m2 - Mus musculus |
| NOV7x | CG50426-19 | 159 | 160 | Ten-m2 - Mus musculus |
| NOV7y | CG50426-20 | 161 | 162 | Ten-m2 - Mus musculus |
| NOV7z | CG50426-22 | 163 | 164 | Ten-m2 - Mus musculus |
| NOV7a | CG50426-23 | 165 | 166 | Ten-m2 - Mus musculus |
| NOV7b | CG50426-24 | 167 | 168 | Ten-m2 - Mus musculus |
| NOV7c | CG50426-25 | 169 | 170 | Ten-m2 - Mus musculus |
| NOV7d | SNP13375665 | 171 | 172 | Ten-m2 - Mus musculus |
| NOV7e | SNP13375213 | 173 | 174 | Ten-m2 - Mus musculus |
| NOV7f | SNP13374985 | 175 | 176 | Ten-m2 - Mus musculus |
| NOV8a | CG50646-04 | 177 | 178 | Polydom protein precursor - Mus musculus |
| NOV8b | 237582568 | 179 | 180 | Polydom protein precursor - Mus musculus |
| NOV8c | 236589434 | 181 | 182 | Polydom protein precursor - Mus musculus |
| NOV8d | 236495259 | 183 | 184 | Polydom protein precursor - Mus musculus |
| NOV8e | 236495256 | 185 | 186 | Polydom protein precursor - Mus musculus |
| NOV8f | CG50646-01 | 187 | 188 | Polydom protein precursor - Mus musculus |
| NOV8g | CG50646-02 | 189 | 190 | Polydom protein precursor - Mus musculus |
| NOV8h | CG50646-03 | 191 | 192 | Polydom protein precursor - Mus musculus |
| NOV8i | CG50646-05 | 193 | 194 | Polydom protein precursor - Mus musculus |
| NOV8j | SNP13380898 | 195 | 196 | Polydom protein precursor - Mus musculus |
| NOV8k | SNP13380899 | 197 | 198 | Polydom protein precursor - Mus musculus |
| NOV8l | SNP13374702 | 199 | 200 | Polydom protein precursor - Mus musculus |
| NOV8m | SNP13374257 | 201 | 202 | Polydom protein precursor - Mus musculus |
| NOV8n | SNP13382479 | 203 | 204 | Polydom protein precursor - Mus musculus |
| NOV8o | SNP13382480 | 205 | 206 | Polydom protein precursor - Mus musculus |
| NOV9a | CG50736-09 | 207 | 208 | CD44-like precursor FELL - Homo sapiens |
| NOV9b | 197408749 | 209 | 210 | CD44-like precursor FELL - Homo sapiens |
| NOV9c | CG50736-01 | 211 | 212 | CD44-like precursor FELL - Homo sapiens |
| NOV9d | CG50736-02 | 213 | 214 | CD44-like precursor FELL - Homo sapiens |
| NOV9e | CG50736-03 | 215 | 216 | CD44-like precursor FELL - Homo sapiens |
| NOV9f | CG50736-04 | 217 | 218 | CD44-like precursor FELL - Homo sapiens |
| NOV9g | CG50736-05 | 219 | 220 | CD44-like precursor FELL - Homo sapiens |
| NOV9h | CG50736-06 | 221 | 222 | CD44-like precursor FELL - Homo sapiens |
| NOV9i | CG50736-07 | 223 | 224 | CD44-like precursor FELL - Homo sapiens |
| NOV9j | CG50736-08 | 225 | 226 | CD44-like precursor FELL - Homo sapiens |
| NOV9k | CG50736-10 | 227 | 228 | CD44-like precursor FELL - Homo sapiens |
| NOV9l | CG50736-11 | 229 | 230 | CD44-like precursor FELL - Homo sapiens |
| NOV9m | CG50736-12 | 231 | 232 | CD44-like precursor FELL - Homo sapiens |
| NOV9n | CG50736-13 | 233 | 234 | CD44-like precursor FELL - Homo sapiens |
| NOV9o | CG50736-14 | 235 | 236 | CD44-like precursor FELL - Homo sapiens |
| NOV9p | CG50736-15 | 237 | 238 | CD44-like precursor FELL - Homo sapiens |
| NOV9q | CG50736-16 | 239 | 240 | CD44-like precursor FELL - Homo sapiens |
| NOV9r | CG50736-17 | 241 | 242 | CD44-like precursor FELL - Homo sapiens |
| NOV9s | CG50736-18 | 243 | 244 | CD44-like precursor FELL - Homo sapiens |
| NOV9t | CG50736-19 | 245 | 246 | CD44-like precursor FELL - Homo sapiens |
| NOV9u | CG50736-20 | 247 | 248 | CD44-like precursor FELL - Homo sapiens |
| NOV9v | CG50736-21 | 249 | 250 | CD44-like precursor FELL - Homo sapiens |
| NOV9w | CG50736-22 | 251 | 252 | CD44-like precursor FELL - Homo sapiens |
| NOV9x | CG50736-23 | 253 | 254 | CD44-like precursor FELL - Homo sapiens |
| NOV9y | CG50736-24 | 255 | 256 | CD44-like precursor FELL - Homo sapiens |
| NOV10a | CG50925-01 | 257 | 258 | Tumor endothelial marker 5 precursor - Homo sapiens |
| NOV10b | CG50925-08 | 259 | 260 | Tumor endothelial marker 5 precursor - Homo sapiens |
| NOV10c | 226990087 | 261 | 262 | Tumor endothelial marker 5 precursor - Homo sapiens |
| NOV10d | 320054488 | 263 | 264 | Tumor endothelial marker 5 precursor - Homo sapiens |
| NOV10e | CG50925-02 | 265 | 266 | Tumor endothelial marker 5 precursor - Homo sapiens |
| NOV10f | 248208844 | 267 | 268 | Tumor endothelial marker 5 precursor - Homo sapiens |
| NOV10g | CG50925-03 | 269 | 270 | Tumor endothelial marker 5 precursor - Homo sapiens |
| NOV10h | CG50925-04 | 271 | 272 | Tumor endothelial marker 5 precursor - Homo sapiens |
| NOV10i | CG50925-05 | 273 | 274 | Tumor endothelial marker 5 precursor - Homo sapiens |
| NOV10j | CG50925-06 | 275 | 276 | Tumor endothelial marker 5 precursor - Homo sapiens |
| NOV10k | CG50925-07 | 277 | 278 | Tumor endothelial marker 5 precursor - Homo sapiens |
| NOV10l | SNP13380040 | 279 | 280 | Tumor endothelial marker 5 precursor - Homo sapiens |
| NOV11a | CG51027-06 | 281 | 282 | Human immunoglobulin superfamily protein IGSFP-9 |
| NOV11b | 278391205 | 283 | 284 | Human immunoglobulin superfamily protein IGSFP-9 |
| NOV11c | 278391050 | 285 | 286 | Human immunoglobulin superfamily protein IGSFP-9 |
| NOV11d | 277582210 | 287 | 288 | Human immunoglobulin superfamily protein IGSFP-9 |
| NOV11e | 277582173 | 289 | 290 | Human immunoglobulin superfamily protein IGSFP-9 |
| NOV11f | CG51027-09 | 291 | 292 | Human immunoglobulin superfamily protein IGSFP-9 |
| NOV11g | 316763704 | 293 | 294 | Human immunoglobulin superfamily protein IGSFP-9 |
| NOV11h | CG51027-01 | 295 | 296 | Human immunoglobulin superfamily protein IGSFP-9 |
| NOV11i | CG51027-02 | 297 | 298 | Human immunoglobulin superfamily protein IGSFP-9 |
| NOV11j | CG51027-03 | 299 | 300 | Human immunoglobulin superfamily protein IGSFP-9 |
| NOV11k | CG51027-04 | 301 | 302 | Human immunoglobulin superfamily protein IGSFP-9 |
| NOV11l | CG51027-05 | 303 | 304 | Human immunoglobulin superfamily protein IGSFP-9 |
| NOV11m | CG51027-07 | 305 | 306 | Human immunoglobulin superfamily protein IGSFP-9 |
| NOV11n | CG51027-08 | 307 | 308 | Human immunoglobulin superfamily protein IGSFP-9 |
| NOV11o | CG51027-10 | 309 | 310 | Human immunoglobulin superfamily protein IGSFP-9 |
| NOV11p | CG51027-11 | 311 | 312 | Human immunoglobulin superfamily protein IGSFP-9 |
| NOV11q | CG51027-12 | 313 | 314 | Human immunoglobulin superfamily protein IGSFP-9 |
| NOV11r | SNP13376340 | 315 | 316 | Human immunoglobulin superfamily protein IGSFP-9 |
| NOV11s | SNP13376341 | 317 | 318 | Human immunoglobulin superfamily protein IGSFP-9 |
| NOV12a | CG51373-11 | 319 | 320 | Human G protein-coupled receptor |
| NOV12b | CG51373-10 | 321 | 322 | Human G protein-coupled receptor |
| NOV12c | CG51373-08 | 323 | 324 | Human G protein-coupled receptor |
| NOV12d | 237582097 | 325 | 326 | Human G protein-coupled receptor |
| NOV12e | 294385961 | 327 | 328 | Human G protein-coupled receptor |
| NOV12f | 294398021 | 329 | 330 | Human G protein-coupled receptor |
| NOV12g | CG51373-01 | 331 | 332 | Human G protein-coupled receptor |
| NOV12h | CG51373-02 | 333 | 334 | Human G protein-coupled receptor |
| NOV12i | CG51373-03 | 335 | 336 | Human G protein-coupled receptor |
| NOV12j | CG51373-04 | 337 | 338 | Human G protein-coupled receptor |
| NOV12k | CG51373-05 | 339 | 340 | Human G protein-coupled receptor |
| NOV12l | CG51373-06 | 341 | 342 | Human G protein-coupled receptor |
| NOV12m | CG51373-07 | 343 | 344 | Human G protein-coupled receptor |
| NOV12n | CG51373-09 | 345 | 346 | Human G protein-coupled receptor |
| NOV12o | CG51373-12 | 347 | 348 | Human G protein-coupled receptor |
| NOV12p | CG51373-13 | 349 | 350 | Human G protein-coupled receptor |
| NOV12q | CG51373-14 | 351 | 352 | Human G protein-coupled receptor |
| NOV12r | SNP13377352 | 353 | 354 | Human G protein-coupled receptor |
| NOV12s | SNP13379746 | 355 | 356 | Human G protein-coupled receptor |
| NOV12t | SNP13374859 | 357 | 358 | Human G protein-coupled receptor |
| NOV12u | SNP13374858 | 359 | 360 | Human G protein-coupled receptor |
| NOV12v | SNP13374856 | 361 | 362 | Human G protein-coupled receptor |
| NOV12w | SNP13374855 | 363 | 364 | Human G protein-coupled receptor |
| NOV12x | SNP13374854 | 365 | 366 | Human G protein-coupled receptor |
| NOV12y | SNP13374853 | 367 | 368 | Human G protein-coupled receptor |
| NOV13a | CG51622-04 | 369 | 370 | Von Ebner minor protein - Homo sapiens |
| NOV13b | CG51622-03 | 371 | 372 | Von Ebner minor protein - Homo sapiens |
| NOV13c | CG51622-05 | 373 | 374 | Von Ebner minor protein - Homo sapiens |
| NOV13d | CG51622-01 | 375 | 376 | Von Ebner minor protein - Homo sapiens |
| NOV13e | 275698370 | 377 | 378 | Von Ebner minor protein - Homo sapiens |
| NOV13f | 274054187 | 379 | 380 | Von Ebner minor protein - Homo sapiens |
| NOV13g | CG51622-02 | 381 | 382 | Von Ebner minor protein - Homo sapiens |
| NOV13h | CG51622-06 | 383 | 384 | Von Ebner minor protein - Homo sapiens |
| NOV13i | CG51622-07 | 385 | 386 | Von Ebner minor protein - Homo sapiens |
| NOV13j | CG51622-08 | 387 | 388 | Von Ebner minor protein - Homo sapiens |
| NOV13k | CG51622-09 | 389 | 390 | Von Ebner minor protein - Homo sapiens |
| NOV13l | CG51622-10 | 391 | 392 | Von Ebner minor protein - Homo sapiens |
| NOV13m | SNP13375774 | 393 | 394 | Von Ebner minor protein - Homo sapiens |
| NOV13n | SNP13375775 | 395 | 396 | Von Ebner minor protein - Homo sapiens |
| NOV14a | CG51821-01 | 397 | 398 | Sialoadhesin precursor (Sialic acid binding Ig-like lectin-1) |
| | | | | (Siglec- 1) (CD169 antigen) - Homo sapiens |
| NOV14b | 229823091 | 399 | 400 | Sialoadhesin precursor (Sialic acid binding Ig-like lectin-1) |
| | | | | (Siglec- 1) (CD169 antigen) - Homo sapiens |
| NOV14c | 229823107 | 401 | 402 | Sialoadhesin precursor (Sialic acid binding Ig-like lectin-1) |
| | | | | (Siglec- 1) (CD169 antigen) - Homo sapiens |
| NOV14d | 229823095 | 403 | 404 | Sialoadhesin precursor (Sialic acid binding Ig-like lectin-1) |
| | | | | (Siglec- 1) (CD169 antigen) - Homo sapiens |
| NOV14e | CG51821-02 | 405 | 406 | Sialoadhesin precursor (Sialic acid binding Ig-like lectin-1) |
| | | | | (Siglec- 1) (CD169 antigen) - Homo sapiens |
| NOV14f | CG51821-03 | 407 | 408 | Sialoadhesin precursor (Sialic acid binding Ig-like lectin-1) |
| | | | | (Siglec- 1) (CD169 antigen) - Homo sapiens |
| NOV14g | CG51821-04 | 409 | 410 | Sialoadhesin precursor (Sialic acid binding Ig-like lectin-1) |
| | | | | (Siglec- 1) (CD169 antigen) - Homo sapiens |
| NOV14h | SNP13382490 | 411 | 412 | Sialoadhesin precursor (Sialic acid binding Ig-like lectin-1) |
| | | | | (Siglec- 1) (CD169 antigen) - Homo sapiens |
| NOV14i | SNP13382489 | 413 | 414 | Sialoadhesin precursor (Sialic acid binding Ig-like lectin-1) |
| | | | | (Siglec- 1) (CD169 antigen) - Homo sapiens |
| NOV14j | SNP13377616 | 415 | 416 | Sialoadhesin precursor (Sialic acid binding Ig-like lectin-1) |
| | | | | (Siglec- 1) (CD169 antigen) - Homo sapiens |
| NOV14k | SNP13377617 | 417 | 418 | Sialoadhesin precursor (Sialic acid binding Ig-like lectin-1) |
| | | | | (Siglec- 1) (CD169 antigen) - Homo sapiens |
| NOV15a | CG51992-05 | 419 | 420 | CTCL tumor antigen se57-1 - Homo sapiens |
| NOV15b | CG51992-01 | 421 | 422 | CTCL tumor antigen se57-1 - Homo sapiens |
| NOV15c | CG51992-02 | 423 | 424 | CTCL tumor antigen se57-1 - Homo sapiens |
| NOV15d | CG51992-03 | 425 | 426 | CTCL tumor antigen se57-1 - Homo sapiens |
| NOV15e | CG51992-04 | 427 | 428 | CTCL tumor antigen se57-1 - Homo sapiens |
| NOV15f | SNP13382486 | 429 | 430 | CTCL tumor antigen se57-1 - Homo sapiens |
| NOV15g | SNP13382487 | 431 | 432 | CTCL tumor antigen se57-1 - Homo sapiens |
| NOV16a | CG52171-04 | 433 | 434 | Hematopoietic PBX-interacting protein - Homo sapiens |
| NOV16b | CG52171-01 | 435 | 436 | Hematopoietic PBX-interacting protein - Homo sapiens |
| NOV16c | CG52171-02 | 437 | 438 | Hematopoietic PBX-interacting protein - Homo sapiens |
| NOV16d | CG52171-03 | 439 | 440 | Hematopoietic PBX-interacting protein - Homo sapiens |
| NOV16e | CG52171-05 | 441 | 442 | Hematopoietic PBX-interacting protein - Homo sapiens |
| NOV16f | CG52171-06 | 443 | 444 | Hematopoietic PBX-interacting protein - Homo sapiens |
| NOV16g | SNP13374628 | 445 | 446 | Hematopoietic PBX-interacting protein - Homo sapiens |
| NOV16h | SNP13377329 | 447 | 448 | Hematopoietic PBX-interacting protein - Homo sapiens |
| NOV16i | SNP13374627 | 449 | 450 | Hematopoietic PBX-interacting protein - Homo sapiens |
| NOV16j | SNP13374626 | 451 | 452 | Hematopoietic PBX-interacting protein - Homo sapiens |
| NOV16k | SNP13374625 | 453 | 454 | Hematopoietic PBX-interacting protein - Homo sapiens |
| NOV16l | SNP13374624 | 455 | 456 | Hematopoietic PBX-interacting protein - Homo sapiens |
| NOV17a | CG52534-06 | 457 | 458 | Transferrin receptor protein 2 (TfR2) - Homo sapiens |
| NOV17b | CG52534-01 | 459 | 460 | Transferrin receptor protein 2 (TfR2) - Homo sapiens |
| NOV17c | CG52534-02 | 461 | 462 | Transferrin receptor protein 2 (TfR2) - Homo sapiens |
| NOV17d | CG52534-03 | 463 | 464 | Transferrin receptor protein 2 (TfR2) - Homo sapiens |
| NOV17e | CG52534-04 | 465 | 466 | Transferrin receptor protein 2 (TfR2) - Homo sapiens |
| NOV17f | CG52534-05 | 467 | 468 | Transferrin receptor protein 2 (TfR2) - Homo sapiens |
| NOV18a | CG52979-03 | 469 | 470 | G antigen family C 1 protein (Prostate-associated gene protein |
| | | | | 4) (PAGE-4) (PAGE-1) (JM27) (GAGE-9) - Homo sapiens |
| NOV18b | CG52979-01 | 471 | 472 | G antigen family C 1 protein (Prostate-associated gene protein |
| | | | | 4) (PAGE-4) (PAGE-1) (JM27) (GAGE-9) - Homo sapiens |
| NOV18c | CG52979-02 | 473 | 474 | G antigen family C 1 protein (Prostate-associated gene protein |
| | | | | 4) (PAGE-4) (PAGE-1) (JM27) (GAGE-9) - Homo sapiens |
| NOV19a | CG52988-02 | 475 | 476 | G antigen family C 1 protein (Prostate-associated gene protein |
| | | | | 4) (PAGE-4) (PAGE-1) (JM27) (GAGE-9) - Homo sapiens |
| NOV19b | CG52988-03 | 477 | 478 | G antigen family C 1 protein (Prostate-associated gene protein |
| | | | | 4) (PAGE-4) (PAGE-1) (JM27) (GAGE-9) - Homo sapiens |
| NOV19c | CG52988-04 | 479 | 480 | G antigen family C 1 protein (Prostate-associated gene protein |
| | | | | 4) (PAGE-4) (PAGE-1) (JM27) (GAGE-9) - Homo sapiens |
| NOV19d | CG52988-06 | 481 | 482 | G antigen family C 1 protein (Prostate-associated gene protein |
| | | | | 4) (PAGE-4) (PAGE-1) (JM27) (GAGE-9) - Homo sapiens |
| NOV19e | CG52988-07 | 483 | 484 | G antigen family C 1 protein (Prostate-associated gene protein |
| | | | | 4) (PAGE-4) (PAGE-1) (JM27) (GAGE-9) - Homo sapiens |
| NOV19f | CG52988-01 | 485 | 486 | G antigen family C 1 protein (Prostate-associated gene protein |
| | | | | 4) (PAGE-4) (PAGE-1) (JM27) (GAGE-9) - Homo sapiens |
| NOV19g | CG52988-05 | 487 | 488 | G antigen family C 1 protein (Prostate-associated gene protein |
| | | | | 4) (PAGE-4) (PAGE-1) (JM27) (GAGE-9) - Homo sapiens |
| NOV20a | CG53449-04 | 489 | 490 | Butyrophilin like receptor - Homo sapiens |
| NOV20b | CG53449-03 | 491 | 492 | Butyrophilin like receptor - Homo sapiens |
| NOV20c | CG53449-01 | 493 | 494 | Butyrophilin like receptor - Homo sapiens |
| NOV20d | CG53449-02 | 495 | 496 | Butyrophilin like receptor - Homo sapiens |
| NOV20e | CG53449-05 | 497 | 498 | Butyrophilin like receptor - Homo sapiens |
| NOV20f | CG53449-06 | 499 | 500 | Butyrophilin like receptor - Homo sapiens |
| NOV20g | SNP13382434 | 501 | 502 | Butyrophilin like receptor - Homo sapiens |
| NOV20h | SNP13382441 | 503 | 504 | Butyrophilin like receptor - Homo sapiens |
| NOV21a | CG53908-01 | 505 | 506 | Netrin receptor Unc5h1 - Mus musculus |
| NOV21b | CG53908-02 | 507 | 508 | Netrin receptor Unc5h1 - Mus musculus |
| NOV21c | 306075989 | 509 | 510 | Netrin receptor Unc5h1 - Mus musculus |
| NOV21d | CG53908-03 | 511 | 512 | Netrin receptor Unc5h1 - Mus musculus |
| NOV21e | CG53908-04 | 513 | 514 | Netrin receptor Unc5h1 - Mus musculus |
| NOV21f | CG53908-05 | 515 | 516 | Netrin receptor Unc5h1 - Mus musculus |
| NOV21g | CG53908-06 | 517 | 518 | Netrin receptor Unc5h1 - Mus musculus |
| NOV21h | CG53908-07 | 519 | 520 | Netrin receptor Unc5h1 - Mus musculus |
| NOV21i | SNP13382444 | 521 | 522 | Netrin receptor Unc5h1 - Mus musculus |
| NOV21j | SNP13375491 | 523 | 524 | Netrin receptor Unc5h1 - Mus musculus |
| NOV21k | SNP13375492 | 525 | 526 | Netrin receptor Unc5h1 - Mus musculus |
| NOV21l | SNP13375493 | 527 | 528 | Netrin receptor Unc5h1 - Mus musculus |
| NOV21m | SNP13375135 | 529 | 530 | Netrin receptor Unc5h1 - Mus musculus |
| NOV21n | SNP13375136 | 531 | 532 | Netrin receptor Unc5h1 - Mus musculus |
| NOV21o | SNP13375137 | 533 | 534 | Netrin receptor Unc5h1 - Mus musculus |
| NOV21p | SNP13375138 | 535 | 536 | Netrin receptor Unc5h1 - Mus musculus |
| NOV21q | SNP13375494 | 537 | 538 | Netrin receptor Unc5h1 - Mus musculus |
| NOV21r | SNP13375495 | 539 | 540 | Netrin receptor Unc5h1 - Mus musculus |
| NOV21s | SNP13375140 | 541 | 542 | Netrin receptor Unc5h1 - Mus musculus |
| NOV21t | SNP13375139 | 543 | 544 | Netrin receptor Unc5h1 - Mus musculus |
| NOV21u | SNP13375496 | 545 | 546 | Netrin receptor Unc5h1 - Mus musculus |
| NOV22a | CG53944-02 | 547 | 548 | human secreted polypeptide - Homo sapiens |
| NOV22b | CG53944-01 | 549 | 550 | human secreted polypeptide - Homo sapiens |
| NOV23a | CG54308-04 | 551 | 552 | Serpin B12 - Homo sapiens |
| NOV23b | CG54308-01 | 553 | 554 | Serpin B12 - Homo sapiens |
| NOV23c | CG54308-02 | 555 | 556 | Serpin B12 - Homo sapiens |
| NOV23d | CG54308-03 | 557 | 558 | Serpin B12 - Homo sapiens |
| NOV23e | CG54308-05 | 559 | 560 | Serpin B12 - Homo sapiens |
| NOV24a | CG54764-02 | 561 | 562 | Calgizzarin (Endothelial monocyte-activating |
| | | | | polypeptide) (EMAP) - Mus musculus |
| NOV24b | CG54764-01 | 563 | 564 | Calgizzarin (Endothelial monocyte-activating |
| | | | | polypeptide) (EMAP) - Mus musculus |
| NOV25a | CG55033-04 | 565 | 566 | Human toll like receptor like molecule 5 (TLR-L5) |
| NOV25b | CG55033-05 | 567 | 568 | Human toll like receptor like molecule 5 (TLR-L5) |
| NOV25c | CG55033-01 | 569 | 570 | Human toll like receptor like molecule 5 (TLR-L5) |
| NOV25d | 237376826 | 571 | 572 | Human toll like receptor like molecule 5 (TLR-L5) |
| NOV25e | 310658403 | 573 | 574 | Human toll like receptor like molecule 5 (TLR-L5) |
| NOV25f | 317980876 | 575 | 576 | Human toll like receptor like molecule 5 (TLR-L5) |
| NOV25g | 318018151 | 577 | 578 | Human toll like receptor like molecule 5 (TLR-L5) |
| NOV25h | 318176316 | 579 | 580 | Human toll like receptor like molecule 5 (TLR-L5) |
| NOV25i | CG55033-02 | 581 | 582 | Human toll like receptor like molecule 5 (TLR-L5) |
| NOV25j | CG55033-03 | 583 | 584 | Human toll like receptor like molecule 5 (TLR-L5) |
| NOV25k | CG55033-06 | 585 | 586 | Human toll like receptor like molecule 5 (TLR-L5) |
| NOV25l | CG55033-07 | 587 | 588 | Human toll like receptor like molecule 5 (TLR-L5) |
| NOV25m | CG55033-08 | 589 | 590 | Human toll like receptor like molecule 5 (TLR-L5) |
| NOV25n | CG55033-09 | 591 | 592 | Human toll like receptor like molecule 5 (TLR-L5) |
| NOV25o | CG55033-10 | 593 | 594 | Human toll like receptor like molecule 5 (TLR-L5) |
| NOV25p | CG55033-11 | 595 | 596 | Human toll like receptor like molecule 5 (TLR-L5) |
| NOV25q | CG55033-12 | 597 | 598 | Human toll like receptor like molecule 5 (TLR-L5) |
| NOV25r | CG55033-13 | 599 | 600 | Human toll like receptor like molecule 5 (TLR-L5) |
| NOV25s | CG55033-14 | 601 | 602 | Human toll like receptor like molecule 5 (TLR-L5) |
| NOV26a | CG55117-04 | 603 | 604 | Prominin-like protein 1 precursor |
| | | | | (Antigen AC133) (CD133 antigen) - Homo sapiens |
| NOV26b | CG55117-01 | 605 | 606 | Prominin-like protein 1 precursor |
| | | | | (Antigen AC133) (CD133 antigen) - Homo sapiens |
| NOV26c | CG55117-02 | 607 | 608 | Prominin-like protein 1 precursor |
| | | | | (Antigen AC133) (CD133 antigen) - Homo sapiens |
| NOV26d | CG55117-03 | 609 | 610 | Prominin-like protein 1 precursor |
| | | | | (Antigen AC133) (CD133 antigen) - Homo sapiens |
| NOV26e | CG55117-05 | 611 | 612 | Prominin-like protein 1 precursor |
| | | | | (Antigen AC133) (CD133 antigen) - Homo sapiens |
| NOV26f | SNP13382440 | 613 | 614 | Prominin-like protein 1 precursor |
| | | | | (Antigen AC133) (CD133 antigen) - Homo sapiens |
| NOV26g | SNP13382439 | 615 | 616 | Prominin-like protein 1 precursor |
| | | | | (Antigen AC133) (CD133 antigen) - Homo sapiens |
| NOV27a | CG55193-04 | 617 | 618 | PLVAP protein - Homo sapiens (Human), 455 aa |
| NOV27b | 214575880 | 619 | 620 | PLVAP protein - Homo sapiens (Human), 455 aa |
| NOV27c | 214458684 | 621 | 622 | PLVAP protein - Homo sapiens (Human), 455 aa |
| NOV27d | 214458688 | 623 | 624 | PLVAP protein - Homo sapiens (Human), 455 aa |
| NOV27e | CG55193-01 | 625 | 626 | PLVAP protein - Homo sapiens (Human), 455 aa |
| NOV27f | CG55193-02 | 627 | 628 | PLVAP protein - Homo sapiens (Human), 455 aa |
| NOV27g | CG55193-03 | 629 | 630 | PLVAP protein - Homo sapiens (Human), 455 aa |
| NOV27h | CG55193-05 | 631 | 632 | PLVAP protein - Homo sapiens (Human), 455 aa |
| NOV27i | CG55193-06 | 633 | 634 | PLVAP protein - Homo sapiens (Human), 455 aa |
| NOV27j | CG55193-07 | 635 | 636 | PLVAP protein - Homo sapiens (Human), 455 aa |
| NOV28a | CG55256-07 | 637 | 638 | Apolipoprotein E receptor 2 precursor - Homo sapiens |
| NOV28b | CG55256-10 | 639 | 640 | Apolipoprotein E receptor 2 precursor - Homo sapiens |
| NOV28c | 272511714 | 641 | 642 | Apolipoprotein E receptor 2 precursor - Homo sapiens |
| NOV28d | CG55256-01 | 643 | 644 | Apolipoprotein E receptor 2 precursor - Homo sapiens |
| NOV28e | CG55256-02 | 645 | 646 | Apolipoprotein E receptor 2 precursor - Homo sapiens |
| NOV28f | CG55256-03 | 647 | 648 | Apolipoprotein E receptor 2 precursor - Homo sapiens |
| NOV28g | CG55256-04 | 649 | 650 | Apolipoprotein E receptor 2 precursor - Homo sapiens |
| NOV28h | CG55256-05 | 621 | 652 | Apolipoprotein E receptor 2 precursor - Homo sapiens |
| NOV28i | CG55256-06 | 653 | 654 | Apolipoprotein E receptor 2 precursor - Homo sapiens |
| NOV28j | CG55256-08 | 655 | 656 | Apolipoprotein E receptor 2 precursor - Homo sapiens |
| NOV28k | CG55256-09 | 657 | 658 | Apolipoprotein E receptor 2 precursor - Homo sapiens |
| NOV28l | CG55256-11 | 659 | 660 | Apolipoprotein E receptor 2 precursor - Homo sapiens |
| NOV28m | SNP13382497 | 661 | 662 | Apolipoprotein E receptor 2 precursor - Homo sapiens |
| NOV28n | SNP13382498 | 663 | 664 | Apolipoprotein E receptor 2 precursor - Homo sapiens |
| NOV29a | CG55776-01 | 665 | 666 | Human osteoclast protein (OCP) |
| NOV29b | 248210167 | 667 | 668 | Human osteoclast protein (OCP) |
| NOV29c | 247679561 | 669 | 670 | Human osteoclast protein (OCP) |
| NOV29d | 248057904 | 671 | 672 | Human osteoclast protein (OCP) |
| NOV29e | 248057927 | 673 | 674 | Human osteoclast protein (OCP) |
| NOV29f | 249239821 | 675 | 676 | Human osteoclast protein (OCP) |
| NOV29g | 248057920 | 677 | 678 | Human osteoclast protein (OCP) |
| NOV29h | 247679541 | 679 | 680 | Human osteoclast protein (OCP) |
| NOV29i | 249116954 | 681 | 682 | Human osteoclast protein (OCP) |
| NOV29j | 248210155 | 683 | 684 | Human osteoclast protein (OCP) |
| NOV29k | 248213764 | 685 | 686 | Human osteoclast protein (OCP) |
| NOV29l | 248213768 | 687 | 688 | Human osteoclast protein (OCP) |
| NOV29m | 248213772 | 689 | 690 | Human osteoclast protein (OCP) |
| NOV29n | 248586774 | 691 | 692 | Human osteoclast protein (OCP) |
| NOV29o | 248586793 | 693 | 694 | Human osteoclast protein (OCP) |
| NOV29p | 248586820 | 695 | 696 | Human osteoclast protein (OCP) |
| NOV29q | 248586824 | 697 | 698 | Human osteoclast protein (OCP) |
| NOV29r | 247679817 | 699 | 700 | Human osteoclast protein (OCP) |
| NOV29s | 248210264 | 701 | 702 | Human osteoclast protein (OCP) |
| NOV29t | 248210551 | 703 | 704 | Human osteoclast protein (OCP) |
| NOV29u | 248210824 | 705 | 706 | Human osteoclast protein (OCP) |
| NOV29v | 248679541 | 707 | 708 | Human osteoclast protein (OCP) |
| NOV29w | 247679454 | 709 | 710 | Human osteoclast protein (OCP) |
| NOV29x | 314361407 | 711 | 712 | Human osteoclast protein (OCP) |
| NOV29y | 317803448 | 713 | 714 | Human osteoclast protein (OCP) |
| NOV29z | CG55776-02 | 715 | 716 | Human osteoclast protein (OCP) |
| NOV29aa | CG55776-03 | 717 | 718 | Human osteoclast protein (OCP) |
| NOV29ab | CG55776-04 | 719 | 720 | Human osteoclast protein (OCP) |
| NOV29ac | CG55776-05 | 721 | 722 | Human osteoclast protein (OCP) |
| NOV29ad | CG55776-06 | 723 | 724 | Human osteoclast protein (OCP) |
| NOV29ae | CG55776-07 | 725 | 726 | Human osteoclast protein (OCP) |
| NOV29af | CG55776-08 | 727 | 728 | Human osteoclast protein (OCP) |
| NOV29ag | CG55776-09 | 729 | 730 | Human osteoclast protein (OCP) |
| NOV29ah | SNP13376522 | 731 | 732 | Human osteoclast protein (OCP) |
| NOV29ai | SNP13377624 | 733 | 734 | Human osteoclast protein (OCP) |
| NOV29aj | SNP13377625 | 735 | 736 | Human osteoclast protein (OCP) |
| NOV29ak | SNP13376523 | 737 | 738 | Human osteoclast protein (OCP) |
| NOV29al | SNP13376524 | 739 | 740 | Human osteoclast protein (OCP) |
| NOV29am | SNP13376525 | 741 | 742 | Human osteoclast protein (OCP) |
| NOV29an | SNP13376526 | 743 | 744 | Human osteoclast protein (OCP) |
| NOV29ao | SNP13377626 | 745 | 746 | Human osteoclast protein (OCP) |
| NOV29ap | SNP13377641 | 747 | 748 | Human osteoclast protein (OCP) |
| NOV29aq | SNP13377640 | 749 | 750 | Human osteoclast protein (OCP) |
| NOV30a | CG55784-03 | 751 | 752 | NPEH2 - Homo sapiens |
| NOV30b | CG55784-01 | 753 | 754 | NPEH2 - Homo sapiens |
| NOV30c | 312000579 | 755 | 756 | NPEH2 - Homo sapiens |
| NOV30d | 311333341 | 757 | 758 | NPEH2 - Homo sapiens |
| NOV30e | 311333338 | 759 | 760 | NPEH2 - Homo sapiens |
| NOV30f | 311346885 | 761 | 762 | NPEH2 - Homo sapiens |
| NOV30g | 311333299 | 763 | 764 | NPEH2 - Homo sapiens |
| NOV30h | CG55784-02 | 765 | 766 | NPEH2 - Homo sapiens |
| NOV30i | SNP13376439 | 767 | 768 | NPEH2 - Homo sapiens |
| NOV31a | CG55790-02 | 769 | 770 | ICOS ligand precursor (B7 homolog 2) (B7-H2) (B7-like |
| | | | | protein G150) (B7-related protein-1) (B7RP-1) - Homo sapiens |
| NOV31b | 258668431 | 771 | 772 | ICOS ligand precursor (B7 homolog 2) (B7-H2) (B7-like |
| | | | | protein G150) (B7-related protein-1) (B7RP-1) - Homo sapiens |
| NOV31c | 309303509 | 773 | 774 | ICOS ligand precursor (B7 homolog 2) (B7-H2) (B7-like |
| | | | | protein G150) (B7-related protein-1) (B7RP-1) - Homo sapiens |
| NOV31d | 315925314 | 775 | 776 | ICOS ligand precursor (B7 homolog 2) (B7-H2) (B7-like |
| | | | | protein G150) (B7-related protein-1) (B7RP-1) - Homo sapiens |
| NOV31e | 315970230 | 777 | 778 | ICOS ligand precursor (B7 homolog 2) (B7-H2) (B7-like |
| | | | | protein G150) (B7-related protein-1) (B7RP-1) - Homo sapiens |
| NOV31f | CG55790-01 | 779 | 780 | ICOS ligand precursor (B7 homolog 2) (B7-H2) (B7-like |
| | | | | protein G150) (B7-related protein-1) (B7RP-1) - Homo sapiens |
| NOV31g | CG55790-03 | 781 | 782 | ICOS ligand precursor (B7 homolog 2) (B7-H2) (B7-like |
| | | | | protein G150) (B7-related protein-1) (B7RP-1) - Homo sapiens |
| NOV31h | CG55790-04 | 783 | 784 | ICOS ligand precursor (B7 homolog 2) (B7-H2) (B7-like |
| | | | | protein G150) (B7-related protein-1) (B7RP-1) - Homo sapiens |
| NOV31i | CG55790-05 | 785 | 786 | ICOS ligand precursor (B7 homolog 2) (B7-H2) (B7-like |
| | | | | protein G150) (B7-related protein-1) (B7RP-1) - Homo sapiens |
| NOV31j | CG55790-06 | 787 | 788 | ICOS ligand precursor (B7 homolog 2) (B7-H2) (B7-like |
| | | | | protein G150) (B7-related protein-1) (B7RP-1) - Homo sapiens |
| NOV31k | CQ55790-07 | 789 | 790 | ICOS ligand precursor (B7 homolog 2) (B7-H2) (B7-like |
| | | | | protein G150) (B7-related protein-1) (B7RP-1) - Homo sapiens |
| NOV31l | SNP13374852 | 791 | 792 | ICOS ligand precursor (B7 homolog 2) (B7-H2) (B7-like |
| | | | | protein G150) (B7-related protein-1) (B7RP-1) - Homo sapiens |
| NOV32a | CG55906-04 | 793 | 794 | Human breast tumour-associated protein 37 |
| NOV32b | CG55906-05 | 795 | 796 | Human breast tumour-associated protein 37 |
| NOV32c | CG55906-01 | 797 | 798 | Human breast tumour-associated protein 37 |
| NOV32d | 277901794 | 799 | 800 | Human breast tumour-associated protein 37 |
| NOV32e | CG55906-02 | 801 | 802 | Human breast tumour-associated protein 37 |
| NOV32f | 230272941 | 803 | 804 | Human breast tumour-associated protein 37 |
| NOV32g | CG55906-03 | 805 | 806 | Human breast tumour-associated protein 37 |
| NOV32h | SNP13382505 | 807 | 808 | Human breast tumour-associated protein 37 |
| NOV32i | SNP13382504 | 809 | 810 | Human breast tumour-associated protein 37 |
| NOV32j | SNP13376440 | 811 | 812 | Human breast tumour-associated protein 37 |
| NOV33a | CG55908-01 | 813 | 814 | integrin alpha-7 chain precursor - human |
| NOV33b | 253116407 | 815 | 816 | integrin alpha-7 chain precursor - human |
| NOV33c | 253116412 | 817 | 818 | integrin alpha-7 chain precursor - human |
| NOV34a | CG56077-06 | 819 | 820 | LGI4 (Leucine-rich glioma inactivated protein 4) |
| | | | | (LGI1-like protein 3) - Homo sapiens |
| NOV34b | CG56077-01 | 821 | 822 | LGI4 (Leucine-rich glioma inactivated protein 4) |
| | | | | (LGI1-like protein 3) - Homo sapiens |
| NOV34c | CG56077-02 | 823 | 824 | LGI4 (Leucine-rich glioma inactivated protein 4) |
| | | | | (LGI1-like protein 3) - Homo sapiens |
| NOV34d | CG56077-03 | 825 | 826 | LGI4 (Leucine-rich glioma inactivated protein 4) |
| | | | | (LGI1-like protein 3) - Homo sapiens |
| NOV34e | CG56077-04 | 827 | 828 | LGI4 (Leucine-rich glioma inactivated protein 4) |
| | | | | (LGI1-like protein 3) - Homo sapiens |
| NOV34f | CG56077-05 | 829 | 830 | LGI4 (Leucine-rich glioma inactivated protein 4) |
| | | | | (LGI1-like protein 3) - Homo sapiens |
| NOV34g | SNP13374715 | 831 | 832 | LGI4 (Leucine-rich glioma inactivated protein 4) |
| | | | | (LGI1-like protein 3) - Homo sapiens |
| NOV34h | SNP13374714 | 833 | 834 | LGI4 (Leucine-rich glioma inactivated protein 4) |
| | | | | (LGI1-like protein 3) - Homo sapiens |
| NOV35a | CG56110-03 | 835 | 836 | B7-H1 (PD-1-ligand precursor) - Homo sapiens |
| NOV35b | CG56110-07 | 837 | 838 | B7-H1 (PD-1-ligand precursor) - Homo sapiens |
| NOV35c | 274082305 | 839 | 840 | B7-H1 (PD-1-ligand precursor) - Homo sapiens |
| NOV35d | CG56110-01 | 841 | 842 | B7-H1 (PD-1-ligand precursor) - Homo sapiens |
| NOV35e | CG56110-02 | 843 | 844 | B7-H1 (PD-1-ligand precursor) - Homo sapiens |
| NOV35f | CG56110-04 | 845 | 846 | B7-H1 (PD-1-ligand precursor) - Homo sapiens |
| NOV35g | CG56110-05 | 847 | 848 | B7-H1 (PD-1-ligand precursor) - Homo sapiens |
| NOV35h | CG56110-06 | 849 | 850 | B7-H1 (PD-1-ligand precursor) - Homo sapiens |
| NOV36a | CG56383-02 | 851 | 852 | Prickle-like 1 (Drosophila) - Mus musculus (Mouse), 879 aa |
| NOV36b | CG56383-01 | 853 | 854 | Prickle-like 1 (Drosophila) - Mus musculus (Mouse), 879 aa |
| NOV36c | SNP13382513 | 855 | 856 | Prickle-like 1 (Drosophila) - Mus musculus (Mouse), 879 aa |
| NOV37a | CG56449-04 | 857 | 858 | MEGF6 - Homo sapiens (Human), 1246 aa |
| NOV37b | CG56449-09 | 859 | 860 | MEGF6 - Homo sapiens (Human), 1246 aa |
| NOV37c | 191887507 | 861 | 862 | MEGF6 - Homo sapiens (Human), 1246 aa |
| NOV37d | 316351371 | 863 | 864 | MEGF6 - Homo sapiens (Human), 1246 aa |
| NOV37e | 316935396 | 865 | 866 | MEGF6 - Homo sapiens (Human), 1246 aa |
| NOV37f | 317004318 | 867 | 868 | MEGF6 - Homo sapiens (Human), 1246 aa |
| NOV37g | CG56449-01 | 869 | 870 | MEGF6 - Homo sapiens (Human), 1246 aa |
| NOV37h | CG56449-02 | 871 | 872 | MEGF6 - Homo sapiens (Human), 1246 aa |
| NOV37i | CG56449-03 | 873 | 874 | MEGF6 - Homo sapiens (Human), 1246 aa |
| NOV37j | CG56449-05 | 875 | 876 | MEGF6 - Homo sapiens (Human), 1246 aa |
| NOV37k | CG56449-06 | 877 | 878 | MEGF6 - Homo sapiens (Human), 1246 aa |
| NOV37l | CG56449-07 | 879 | 880 | MEGF6 - Homo sapiens (Human), 1246 aa |
| NOV37m | CG56449-08 | 881 | 882 | MEGF6 - Homo sapiens (Human), 1246 aa |
| NOV37n | CG56449-10 | 883 | 884 | MEGF6 - Homo sapiens (Human), 1246 aa |
| NOV37o | CG56449-11 | 885 | 886 | MEGF6 - Homo sapiens (Human), 1246 aa |
| NOV37p | SNP13382514 | 887 | 888 | MEGF6 - Homo sapiens (Human), 1246 aa |
| NOV38a | CG56594-01 | 889 | 890 | Claudin-19 - Homo sapiens |
| NOV38b | 277685552 | 891 | 892 | Claudin-19 - Homo sapiens |
| NOV38c | 277685649 | 893 | 894 | Claudin-19 - Homo sapiens |
| NOV38d | 277685616 | 895 | 896 | Claudin-19 - Homo sapiens |
| NOV39a | CG56653-08 | 897 | 898 | ficolin-1 precursor |
| NOV39b | 214374274 | 899 | 900 | ficolin-1 precursor |
| NOV39c | 214374256 | 901 | 902 | ficolin-1 precursor |
| NOV39d | 214374252 | 903 | 904 | ficolin-1 precursor |
| NOV39e | 214458492 | 905 | 906 | ficolin-1 precursor |
| NOV39f | 214458488 | 907 | 908 | ficolin-1 precursor |
| NOV39g | 214374236 | 909 | 910 | ficolin-1 precursor |
| NOV39h | CG56653-01 | 911 | 912 | ficolin-1 precursor |
| NOV39i | CG56653-02 | 913 | 914 | ficolin-1 precursor |
| NOV39j | CG56653-03 | 915 | 916 | ficolin-1 precursor |
| NOV39k | CG56653-04 | 917 | 918 | ficolin-1 precursor |
| NOV39l | CG56653-05 | 919 | 920 | ficolin-1 precursor |
| NOV39m | CG56653-06 | 921 | 922 | ficolin-1 precursor |
| NOV39n | CG56653-07 | 923 | 924 | ficolin-1 precursor |
| NOV39o | CG56653-09 | 925 | 926 | ficolin-1 precursor |
| NOV39p | CG56653-10 | 927 | 928 | ficolin-1 precursor |
| NOV39q | CG56653-11 | 929 | 930 | ficolin-1 precursor |
| NOV39r | CG56653-12 | 931 | 932 | ficolin-1 precursor |
| NOV40a | CG56806-01 | 933 | 934 | Heparan sulfate 6-O-sulfotransferase 3 - Homo sapiens |
| NOV40b | 248061366 | 935 | 936 | Heparan sulfate 6-O-sulfotransferase 3 - Homo sapiens |
| NOV40c | 246837961 | 937 | 938 | Heparan sulfate 6-O-sulfotransferase 3 - Homo sapiens |
| NOV40d | 246837965 | 939 | 940 | Heparan sulfate 6-O-sulfotransferase 3 - Homo sapiens |
| NOV40e | 246837975 | 941 | 942 | Heparan sulfate 6-O-sulfotransferase 3 - Homo sapiens |
| NOV40f | 248061376 | 943 | 944 | Heparan sulfate 6-O-sulfotransferase 3 - Homo sapiens |
| NOV40g | SNP13381685 | 945 | 946 | Heparan sulfate 6-O-sulfotransferase 3 - Homo sapiens |
| NOV40h | SNP13381686 | 947 | 948 | Heparan sulfate 6-O-sulfotransferase 3 - Homo sapiens |
| NOV41a | CG56878-01 | 949 | 950 | Protein OS-9 precursor - Homo sapiens |
| NOV41b | 175070399 | 951 | 952 | Protein OS-9 precursor - Homo sapiens |
| NOV41c | 175070432 | 953 | 954 | Protein OS-9 precursor - Homo sapiens |
| NOV41d | 175070419 | 955 | 956 | Protein OS-9 precursor - Homo sapiens |
| NOV41e | 175070438 | 957 | 958 | Protein OS-9 precursor - Homo sapiens |
| NOV41f | 175070408 | 959 | 960 | Protein OS-9 precursor - Homo sapiens |
| NOV41g | CG56878-02 | 961 | 962 | Protein OS-9 precursor - Homo sapiens |
| NOV41h | CG56878-03 | 963 | 964 | Protein OS-9 precursor - Homo sapiens |
| NOV41i | CG56878-04 | 965 | 966 | Protein OS-9 precursor - Homo sapiens |
| NOV41j | SNP13382511 | 967 | 968 | Protein OS-9 precursor - Homo sapiens |
| NOV41k | SNP13382506 | 969 | 970 | Protein OS-9 precursor - Homo sapiens |
| NOV42a | CG56904-01 | 971 | 972 | secreted protein LP255(a) |
| NOV42b | 272355087 | 973 | 974 | secreted protein LP255(a) |
| NOV42c | 246862506 | 975 | 976 | secreted protein LP255(a) |
| NOV42d | CG56904-04 | 977 | 978 | secreted protein LP255(a) |
| NOV42e | 268824694 | 979 | 980 | secreted protein LP255(a) |
| NOV42f | 283146542 | 981 | 982 | secreted protein LP255(a) |
| NOV42g | 308521214 | 983 | 984 | secreted protein LP255(a) |
| NOV42h | CG56904-02 | 985 | 986 | secreted protein LP255(a) |
| NOV42i | CG56904-03 | 987 | 988 | secreted protein LP255(a) |
| NOV42j | CG56904-05 | 989 | 990 | secreted protein LP255(a) |
| NOV42k | CG56904-06 | 991 | 992 | secreted protein LP255(a) |
| NOV42l | CG56904-07 | 993 | 994 | secreted protein LP255(a) |
| NOV42m | CG56904-08 | 995 | 996 | secreted protein LP255(a) |
| NOV43a | CG56914-01 | 997 | 998 | Hemicentin - Homo sapiens |
| NOV43b | 262802367 | 999 | 1000 | Hemicentin - Homo sapiens |
| NOV43c | CG56914-02 | 1001 | 1002 | Hemicentin - Homo sapiens |
| NOV43d | CG56914-03 | 1003 | 1004 | Hemicentin - Homo sapiens |
| NOV44a | CG56959-02 | 1005 | 1006 | Synaptotagmin 10 - Rattus norvegicus |
| NOV44b | CG56959-01 | 1007 | 1008 | Synaptotagmin 10 - Rattus norvegicus |
| NOV45a | CG57111-01 | 1009 | 1010 | Protocadherin 13 - Homo sapiens (Human), 947 aa |
| NOV45b | 277726328 | 1011 | 1012 | Protocadherin 13 - Homo sapiens (Human), 947 aa |
| NOV45c | CG57111-02 | 1013 | 1014 | Protocadherin 13 - Homo sapiens (Human), 947 aa |
| NOV45d | CG57111-03 | 1015 | 1016 | Protocadherin 13 - Homo sapiens (Human), 947 aa |
| NOV45e | CG57111-04 | 1017 | 1018 | Protocadherin 13 - Homo sapiens (Human), 947 aa |
| NOV46a | CG57409-05 | 1019 | 1020 | Glycosyl-phosphatidyl-inositol-MAM - Homo sapiens |
| NOV46b | 277731446 | 1021 | 1022 | Glycosyl-phosphatidyl-inositol-MAM - Homo sapiens |
| NOV46c | CG57409-07 | 1023 | 1024 | Glycosyl-phosphatidyl-inositol-MAM - Homo sapiens |
| NOV46d | 312102874 | 1025 | 1026 | Glycosyl-phosphatidyl-inositol-MAM - Homo sapiens |
| NOV46e | 312102899 | 1027 | 1028 | Glycosyl-phosphatidyl-inositol-MAM - Homo sapiens |
| NOV46f | CG57409-01 | 1029 | 1030 | Glycosyl-phosphatidyl-inositol-MAM - Homo sapiens |
| NOV46g | CG57409-02 | 1031 | 1032 | Glycosyl-phosphatidyl-inositol-MAM - Homo sapiens |
| NOV46h | CG57409-03 | 1033 | 1034 | Glycosyl-phosphatidyl-inositol-MAM - Homo sapiens |
| NOV46i | CG57409-04 | 1035 | 1036 | Glycosyl-phosphatidyl-inositol-MAM - Homo sapiens |
| NOV46j | CG57409-06 | 1037 | 1038 | Glycosyl-phosphatidyl-inositol-MAM - Homo sapiens |
| NOV46k | CG57409-08 | 1039 | 1040 | Glycosyl-phosphatidyl-inositol-MAM - Homo sapiens |
| NOV47a | CG57448-01 | 1041 | 1042 | Human cadherin-1 (CDHN-1) protein |
| NOV47b | 247846705 | 1043 | 1044 | Human cadherin-1 (CDHN-1) protein |
| NOV47c | 247846708 | 1045 | 1046 | Human cadherin-1 (CDHN-1) protein |
| NOV47d | 237580295 | 1047 | 1048 | Human cadherin-1 (CDHN-1) protein |
| NOV47e | 237579512 | 1049 | 1050 | Human cadherin-1 (CDHN-1) protein |
| NOV47f | CG57448-02 | 1051 | 1052 | Human cadherin-1 (CDHN-1) protein |
| NOV48a | CG57574-03 | 1053 | 1054 | Tectorin beta - Homo sapiens |
| NOV48b | CG57574-01 | 1055 | 1056 | Tectorin beta - Homo sapiens |
| NOV48c | CG57574-02 | 1057 | 1058 | Tectorin beta - Homo sapiens |
| NOV48d | CG57574-04 | 1059 | 1060 | Tectorin beta - Homo sapiens |
| NOV48e | CG57574-05 | 1061 | 1062 | Tectorin beta - Homo sapiens |
| NOV49a | CG57689-01 | 1063 | 1064 | Inferred: hemicentin - Mus musculus |
| NOV50a | CG58567-01 | 1065 | 1066 | Human cadherin (CAD) protein |
| NOV50b | 220087646 | 1067 | 1068 | Human cadherin (CAD) protein |
| NOV50c | 194877960 | 1069 | 1070 | Human cadherin (CAD) protein |
| NOV50d | 192589297 | 1071 | 1072 | Human cadherin (CAD) protein |
| NOV50e | CG58567-02 | 1073 | 1074 | Human cadherin (CAD) protein |
| NOV50f | CG58567-03 | 1075 | 1076 | Human cadherin (CAD) protein |
| NOV50g | CG58567-04 | 1077 | 1078 | Human cadherin (CAD) protein |
| NOV50h | CG58567-05 | 1079 | 1080 | Human cadherin (CAD) protein |
| NOV50i | CG58567-06 | 1081 | 1082 | Human cadherin (CAD) protein |
| NOV51a | CG59534-03 | 1083 | 1084 | Membrane glycoprotein LIG-1 - Homo sapiens |
| NOV51b | CG59534-01 | 1085 | 1086 | Membrane glycoprotein LIG-1 - Homo sapiens |
| NOV51c | CG59534-02 | 1087 | 1088 | Membrane glycoprotein LIG-1 - Homo sapiens |
| NOV51d | SNP13377255 | 1089 | 1090 | Membrane glycoprotein LIG-1 - Homo sapiens |
| NOV52a | CG59584-03 | 1091 | 1092 | Ovostatin precursor (Ovomacroglobulin) - Gallus gallus |
| NOV52b | CG59584-02 | 1093 | 1094 | Ovostatin precursor (Ovomacroglobulin) - Gallus gallus |
| NOV52c | 248210405 | 1095 | 1096 | Ovostatin precursor (Ovomacroglobulin) - Gallus gallus |
| NOV52d | 248210436 | 1097 | 1098 | Ovostatin precursor (Ovomacroglobulin) - Gallus gallus |
| NOV52e | 249357737 | 1099 | 1100 | Ovostatin precursor (Ovomacroglobulin) - Gallus gallus |
| NOV52f | 248210430 | 1101 | 1102 | Ovostatin precursor (Ovomacroglobulin) - Gallus gallus |
| NOV52g | 249357755 | 1103 | 1104 | Ovostatin precursor (Ovomacroglobulin) - Gallus gallus |
| NOV52h | CG59584-01 | 1105 | 1106 | Ovostatin precursor (Ovomacroglobulin) - Gallus gallus |
| NOV53a | CG56008-01 | 1107 | 1108 | |
| NOV54a | CG59905-01 | 1109 | 1110 | CUB and sushi multiple domains 1 protein - Homo sapiens |
| NOV54b | CG59905-03 | 1111 | 1112 | CUB and sushi multiple domains 1 protein - Homo sapiens |
| NOV54c | 275631102 | 1113 | 1114 | CUB and sushi multiple domains 1 protein - Homo sapiens |
| NOV54d | CG59905-02 | 1115 | 1116 | CUB and sushi multiple domains 1 protein - Homo sapiens |
| NOV54e | SNP13382527 | 1117 | 1118 | CUB and sushi multiple domains 1 protein - Homo sapiens |
| NOV54f | SNP13382520 | 1119 | 1120 | CUB and sushi multiple domains 1 protein - Homo sapiens |
| NOV55a | CG59932-01 | 1121 | 1122 | secreted protein sequence |
| NOV56a | CG92715-01 | 1123 | 1124 | secreted protein sequence |
| NOV56b | 248576233 | 1125 | 1126 | secreted protein sequence |
| NOV56c | CG92715-02 | 1127 | 1128 | secreted protein sequence |
| NOV56d | CG92715-03 | 1129 | 1130 | secreted protein sequence |
| NOV57a | CG92813-01 | 1131 | 1132 | Cadherin-related tumor suppressor precursor (Fat protein) - |
| | | | | Drosophila melanogaster |
| NOV57b | 260500971 | 1133 | 1134 | Cadherin-related tumor suppressor precursor (Fat protein) - |
| | | | | Drosophila melanogaster |
| NOV57c | 260500961 | 1135 | 1136 | Cadherin-related tumor suppressor precursor (Fat protein) - |
| | | | | Drosophila melanogaster |
| NOV57d | 258076331 | 1137 | 1138 | Cadherin-related tumor suppressor precursor (Fat protein) - |
| | | | | Drosophila melanogaster |
| NOV57e | 258076349 | 1139 | 1140 | Cadherin-related tumor suppressor precursor (Fat protein) - |
| | | | | Drosophila melanogaster |
| NOV57f | CG92813-02 | 1141 | 1142 | Cadherin-related tumor suppressor precursor (Fat protein) - |
| | | | | Drosophila melanogaster |
| NOV58a | CG93387-05 | 1143 | 1144 | insulin-responsive sequence DNA binding protein-1 - Homo sapiens |
| NOV58b | CG93387-01 | 1145 | 1146 | insulin-responsive sequence DNA winding protein-1 - Homo sapiens |
| NOV58c | CG93387-02 | 1147 | 1148 | insulin-responsive sequence DNA binding protein-1 - Homo sapiens |
| NOV58d | CG93387-03 | 1149 | 1150 | insulin-responsive sequence DNA winding protein-1 - Homo sapiens |
| NOV58e | CG93387-04 | 1151 | 1152 | insulin-responsive sequence DNA binding protein-1 - Homo sapiens |
| NOV58f | SNP13382519 | 1153 | 1154 | insulin-responsive sequence DNA winding protein-1 - Homo sapiens |
| NOV59a | CG93871-01 | 1155 | 1156 | insulin-responsive sequence DNA binding protein-1 - Homo sapiens |
| NOV59b | CG93871-05 | 1157 | 1158 | insulin-responsive sequence DNA winding protein-1 - Homo sapiens |
| NOV59c | 198488432 | 1159 | 1160 | insulin-responsive sequence DNA binding protein-1 - Homo sapiens |
| NOV59d | 198488424 | 1161 | 1162 | insulin-responsive sequence DNA winding protein-1 - Homo sapiens |
| NOV59e | 198488428 | 1163 | 1164 | insulin-responsive sequence DNA binding protein-1 - Homo sapiens |
| NOV59f | 198488440 | 1165 | 1166 | insulin-responsive sequence DNA winding protein-1 - Homo sapiens |
| NOV59g | CG93871-02 | 1167 | 1168 | insulin-responsive sequence DNA binding protein-1 - Homo sapiens |
| NOV59h | CG93871-03 | 1169 | 1170 | insulin-responsive sequence DNA winding protein-1 - Homo sapiens |
| NOV59i | CG93871-04 | 1171 | 1172 | insulin-responsive sequence DNA binding protein-1 - Homo sapiens |
| NOV60a | CG94946-01 | 1173 | 1174 | AGRIN precursor - Homo sapiens (Human), 2026 aa |
| NOV60b | 275631590 | 1175 | 1176 | AGRIN precursor - Homo sapiens (Human), 2026 aa |
| NOV60c | 275631564 | 1177 | 1178 | AGRIN precursor - Homo sapiens (Human), 2026 aa |
| NOV60d | CG94946-02 | 1179 | 1180 | AGRIN precursor - Homo sapiens (Human), 2026 aa |
| NOV60e | CG94946-03 | 1181 | 1182 | AGRIN precursor - Homo sapiens (Human), 2026 aa |
| NOV60f | CG94946-04 | 1183 | 1184 | AGRIN precursor - Homo sapiens (Human), 2026 aa |
| NOV60g | CG94946-05 | 1185 | 1186 | AGRIN precursor - Homo sapiens (Human), 2026 aa |
| NOV60h | CG94946-06 | 1187 | 1188 | AGRIN precursor - Homo sapiens (Human), 2026 aa |
| NOV60i | CG94946-07 | 1189 | 1190 | AGRIN precursor - Homo sapiens (Human), 2026 aa |
| NOV61a | CG96384-01 | 1191 | 1192 | colon cancer antigen protein |
| NOV61b | 277580745 | 1193 | 1194 | colon cancer antigen protein |
| NOV61c | CG96384-02 | 1195 | 1196 | colon cancer antigen protein |
| NOV61d | CG96384-03 | 1197 | 1198 | colon cancer antigen protein |
| NOV61e | CG96384-04 | 1199 | 1200 | colon cancer antigen protein |
| NOV62a | CG98011-01 | 1201 | 1202 | Neuronal transmembrane protein Slitrk4 - Mus musculus |
| NOV62b | 192586956 | 1203 | 1204 | Neuronal transmembrane protein Slitrk4 - Mus musculus |
| NOV62c | 191999007 | 1205 | 1206 | Neuronal transmembrane protein Slitrk4 - Mus musculus |
| NOV62d | CG98011-02 | 1207 | 1208 | Neuronal transmembrane protein Slitrk4 - Mus musculus |
| NOV62e | CG98011-03 | 1209 | 1210 | Neuronal transmembrane protein Slitrk4 - Mus musculus |
| NOV62f | CG98011-04 | 1211 | 1212 | Neuronal transmembrane protein Slitrk4 - Mus musculus |

[0042] Table A indicates the homology of NOVX polypeptides to known protein families. Thus, the nucleic acids and polypeptides, antibodies and related compounds according to the invention corresponding to a NOVX as identified in column 1 of Table A will be useful in therapeutic and diagnostic applications implicated in, for example, pathologies and disorders associated with the known protein families identified in column 5 of Table A.

[0043] Pathologies, diseases, disorders and condition and the like that are associated with NOVX sequences include, but are not limited to: e.g., cardiomyopathy, atherosclerosis, hypertension, congenital heart defects, aortic stenosis, atrial septal defect (ASD), vascular calcification, fibrosis, atrioventricular (A-V) canal defect, ductus arteriosus, pulmonary stenosis, subaortic stenosis, ventricular septal defect (VSD), valve diseases, tuberous sclerosis, scleroderma, obesity, metabolic disturbances associated with obesity, transplantation, osteoarthritis, rheumatoid arthritis, osteochondrodysplasia, adrenoleukodystrophy, congenital adrenal hyperplasia, prostate cancer, diabetes, metabolic disorders, neoplasm; adenocarcinoma, lymphoma, uterus cancer, fertility, glomerulonephritis, hemophilia, hypercoagulation, idiopathic thrombocytopenic purpura, immunodeficiencies, psoriasis, skin disorders, graft versus host disease, AIDS, bronchial asthma, lupus, Crohn's disease; inflammatory bowel disease, ulcerative colitis, multiple sclerosis, treatment of Albright Hereditary Ostoeodystrophy, infectious disease, anorexia, cancer-associated cachexia, cancer, neurodegenerative disorders, Alzheimer's Disease, Parkinson's Disorder, immune disorders, hematopoietic disorders, and the various dyslipidemias, schizophrenia, depression, asthma, emphysema, allergies, the metabolic syndrome X and wasting disorders associated with chronic diseases and various cancers, as well as conditions such as transplantation, neuroprotection, fertility, or regeneration (in vitro and in vivo).

[0044] NOVX nucleic acids and their encoded polypeptides are useful in a variety of applications and contexts. The various NOVX nucleic acids and polypeptides according to the invention are useful as novel members of the protein families according to the presence of domains and sequence relatedness to previously described proteins. Additionally, NOVX nucleic acids and polypeptides can also be used to identify proteins that are members of the family to which the NOVX polypeptides belong.

[0045] Consistent with other known members of the family of proteins, identified in column 5 of Table A, the NOVX polypeptides of the present invention show homology to, and contain domains that are characteristic of, other members of such protein families. Details of the sequence relatedness and domain analysis for each NOVX are presented in Example A.

[0046] The NOVX nucleic acids and polypeptides can also be used to screen for molecules, which inhibit or enhance NOVX activity or function. Specifically, the nucleic acids and polypeptides according to the invention may be used as targets for the identification of small molecules that modulate or inhibit diseases associated with the protein families listed in Table A.

[0047] The NOVX nucleic acids and polypeptides are also useful for detecting specific cell types. Details of the expression analysis for each NOVX are presented in Example C. Accordingly, the NOVX nucleic acids, polypeptides, antibodies and related compounds according to the invention will have diagnostic and therapeutic applications in the detection of a variety of diseases with differential expression in normal vs. diseased tissues, e.g. detection of a variety of cancers.

[0048] Additional utilities for NOVX nucleic acids and polypeptides according to the invention are disclosed herein.

NOVX Clones

[0049] NOVX nucleic acids and their encoded polypeptides are useful in a variety of applications and contexts. The various NOVX nucleic acids and polypeptides according to the invention are useful as novel members of the protein families according to the presence of domains and sequence relatedness to previously described proteins. Additionally, NOVX nucleic acids and polypeptides can also be used to identify proteins that are members of the family to which the NOVX polypeptides belong.

[0050] The NOVX genes and their corresponding encoded proteins are useful for preventing, treating or ameliorating medical conditions, e.g., by protein or gene therapy. Pathological conditions can be diagnosed by determining the amount of the new protein in a sample or by determining the presence of mutations in the new genes. Specific uses are described for each of the NOVX genes, based on the tissues in which they are most highly expressed. Uses include developing products for the diagnosis or treatment of a variety of diseases and disorders.

[0051] The NOVX nucleic acids and proteins of the invention are useful in potential diagnostic and therapeutic applications and as a research tool. These include serving as a specific or selective nucleic acid or protein diagnostic and/or prognostic marker, wherein the presence or amount of the nucleic acid or the protein are to be assessed, as well as potential therapeutic applications such as the following: (i) a protein therapeutic, (ii) a small molecule drug target, (iii) an antibody target (therapeutic, diagnostic, drug targeting/cytotoxic antibody), (iv) a nucleic acid useful in gene therapy (gene delivery/gene ablation), and (v) a composition promoting tissue regeneration in vitro and in vivo (vi) a biological defense weapon.

[0052] In one specific embodiment, the invention includes an isolated polypeptide comprising an amino acid sequence selected from the group consisting of: (a) a mature form of the amino acid sequence selected from the group consisting of SEQ ID NO: 2n, wherein n is an integer between 1 and 606; (b) a variant of a mature form of the amino acid sequence selected from the group consisting of SEQ ID NO: 2n, wherein n is an integer between 1 and 606, wherein any amino acid in the mature form is changed to a different amino acid, provided that no more than 15% of the amino acid residues in the sequence of the mature form are so changed; (c) an amino acid sequence selected from the group consisting of SEQ ID NO: 2n, wherein n is an integer between 1 and 606; (d) a variant of the amino acid sequence selected from the group consisting of SEQ ID NO:2n, wherein n is an integer between 1 and 606 wherein any amino acid specified in the chosen sequence is changed to a different amino acid,.provided that no more than 15% of the amino acid residues in the sequence are so changed; and (e) a fragment of any of (a) through (d).

[0053] In another specific embodiment, the invention includes an isolated nucleic acid molecule comprising a nucleic acid sequence encoding a polypeptide comprising an amino acid sequence selected from the group consisting of: (a) a mature form of the amino acid sequence given SEQ ID NO: 2n, wherein n is an integer between 1 and 606; (b) a variant of a mature form of the amino acid sequence selected from the group consisting of SEQ ID NO: 2n, wherein n is an integer between 1 and 606 wherein any amino acid in the mature form of the chosen sequence is changed to a different amino acid, provided that no more than 15% of the amino acid residues in the sequence of the mature form are so changed; (c) the amino acid sequence selected from the group consisting of SEQ ID NO: 2n, wherein n is an integer between 1 and 606; (d) a variant of the amino acid sequence selected from the group consisting of SEQ ID NO: 2n, wherein n is an integer between 1 and 606, in which any amino acid specified in the chosen sequence is changed to a different amino acid, provided that no more than 15% of the amino acid residues in the sequence are so changed; (e) a nucleic acid fragment encoding at least a portion of a polypeptide comprising the amino acid sequence selected from the group consisting of SEQ ID NO: 2n, wherein n is an integer between 1 and 606 or any variant of said polypeptide wherein any amino acid of the chosen sequence is changed to a different amino acid, provided that no more than 10% of the amino acid residues in the sequence are so changed; and (f) the complement of any of said nucleic acid molecules.

[0054] In yet another specific embodiment, the invention includes an isolated nucleic acid molecule, wherein said nucleic acid molecule comprises a nucleotide sequence selected from the group consisting of: (a) the nucleotide sequence selected from the group consisting of SEQ ID NO: 2n−1, wherein n is an integer between 1 and 606; (b) a nucleotide sequence wherein one or more nucleotides in the nucleotide sequence selected from the group consisting of SEQ ID NO: 2n−1, wherein n is an integer between 1 and 606 is changed from that selected from the group consisting of the chosen sequence to a different nucleotide provided that no more than 15% of the nucleotides are so changed; (c) a nucleic acid fragment of the sequence selected from the group consisting of SEQ ID NO: 2n−1, wherein n is an integer between 1 and 606; and (d) a nucleic acid fragment wherein one or more nucleotides in the nucleotide sequence selected from the group consisting of SEQ ID NO: 2n−1, wherein n is an integer between 1 and 606 is changed from that selected from the group consisting of the chosen sequence to a different nucleotide provided that no more than 15% of the nucleotides are so changed.

NOVX Nucleic Acids and Polypeptides

[0055] One aspect of the invention pertains to isolated nucleic acid molecules that encode NOVX polypeptides or biologically active portions thereof. Also included in the invention are nucleic acid fragments sufficient for use as hybridization probes to identify NOVX-encoding nucleic acids (e.g., NOVX mRNAs) and fragments for use as PCk primers for the amplification and/or mutation of NOVX nucleic acid molecules. As used herein, the term “nucleic acid molecule” is intended to include DNA molecules (e.g., cDNA or genomic DNA), RNA molecules (e.g., mRNA), analogs of the DNA or RNA generated using nucleotide analogs, and derivatives, fragments and homologs thereof. The nucleic acid molecule may be single-stranded or double-stranded, but preferably is comprised double-stranded DNA.

[0056] A NOVX nucleic acid can encode a mature NOVX polypeptide. As used herein, a “mature” form of a polypeptide or protein disclosed in the present invention isthe product of a naturally occurring polypeptide or precursor form or proprotein. The naturally occurring polypeptide, precursor or proprotein includes, by way of nonlimiting example, the full-length gene product encoded by the corresponding gene. Alternatively, it may be defined as the polypeptide, precursor or proprotein encoded by an ORF described herein. The product “mature” form arises, by way of nonlimiting example, as a result of one or more naturally occurring processing steps that may take place within the cell (e.g., host cell) in which the gene product arises. Examples of such processing steps leading to a “mature” form of a polypeptide or protein include the cleavage of the N-terminal methionine residue encoded by the initiation codon of an ORF, or the proteolytic cleavage of a signal peptide or leader sequence. Thus a mature form arising from a precursor polypeptide or protein that has residues 1 to N, where residue 1 is the N-terminal methionine, would have residues 2 through N remaining after removal of the N-terminal methionine. Alternatively, a mature form arising from a precursor polypeptide or protein having residues 1 to N, in which an N-terminal signal sequence from residue 1 to residue M is cleaved, would have the residues from residue M+1 to residue N remaining. Further as used herein, a “mature” form of a polypeptide or protein may arise from a step of post-translational modification other than a proteolytic cleavage event. Such additional processes include, by way of non-limiting example, glycosylation, myristylation or phosphorylation. In general, a mature polypeptide or protein may result from the operation of only one of these processes, or a combination of any of them.

[0057] The term “probe”, as utilized herein, refers to nucleic acid sequences of variable length, preferably between at least about 10 nucleotides (nt), about 100 nt, or as many as approximately, e.g., 6,000 nt, depending upon the specific use. Probes are used in the detection of identical, similar, or complementary nucleic acid sequences. Longer length probes are generally obtained from a natural or recombinant source, are highly specific, and much slower to hybridize than shorter-length oligomer probes. Probes may be single-stranded or double-stranded and designed to have specificity in PCR, membrane-based hybridization technologies, or ELISA-like technologies.

[0058] The term “isolated” nucleic acid molecule, as used herein, is a nucleic acid that is separated from other nucleic acid molecules which are present in the natural source of the nucleic acid. Preferably, an “isolated” nucleic acid is free of sequences which naturally flank the nucleic acid (i.e., sequences located at the 5′- and 3′-termini of the nucleic acid) in the genomic DNA of the organism from which the nucleic acid is derived. For example, in various embodiments, the isolated NOVX nucleic acid molecules can contain less than about 5 kb, 4 kb, 3 kb, 2 kb, 1 kb, 0.5 kb or 0.1 kb of nucleotide sequences which naturally flank the nucleic acid molecule in genomic DNA of the cell/tissue from which the nuicleic acid is derived (e.g., brain, heart, liver, spleen, etc.). Moreover, an “isolated” nucleic acid molecule, such as a cDNA molecule, can be substantially free of other cellular material, or culture medium, or of chemical precursors or other chemicals.

[0059] A nucleic acid molecule of the invention, e.g., a nucleic acid molecule having the nucleotide sequence of SEQ ID NO:2n−1, wherein n is an integer between 1 and 606, or a complement of this nucleotide sequence, can be isolated using standard molecular biology techniques and the sequence information provided herein. Using all or a portion of the nucleic acid sequence of SEQ ID NO:2n−1, wherein n is an integer between 1 and 606, as a hybridization probe, NOVX molecules can be isolated using standard hybridization and cloning techniques (e.g., as described in Sambrook, et al., (eds.), MOLECULAR CLONING: A LABORATORY MANUAL 2^{nd} Ed., Cold Spring Harbor Laboratory Press, Cold Spring Harbor, N.Y., 1989; and Ausubel, et al., (eds.), CURRENT PROTOCOLS IN MOLECULAR BIOLOGY, John Wiley & Sons, New York, N.Y., 1993.) A nucleic acid of the invention can be amplified using cDNA, mRNA or alternatively, genomicDNA, as a template with appropriate oligonucleotide primers according to standard PCR amplification techniques. The nucleic acid so amplified can be cloned into an appropriate vector and characterized by DNA sequence analysis. Furthermore, oligonucleotides corresponding to NOVX nucleotide sequences can be prepared by standard synthetic techniques, e.g., using an automated DNA synthesizer.

[0060] As used herein, the term “oligonucleotide” refers to a series of linked nucleotide residues. A short oligonucleotide sequence may be based on, or designed from, a genomic or cDNA sequence and is used to amplify, confirm, or reveal the presence of an identical, similar or complementary DNA or RNA in a particular cell or tissue. Oligonucleotides comprise a nucleic acid sequence having about 10 nt, 50 nt, or 100 nt in length, preferably about 15 nt to 30 nt in length. In one embodiment of the invention, an oligonucleotide comprising a nucleic acid molecule less than 100 nt in length would further comprise at least 6 contiguous nucleotides of SEQ ID NO:2n−1, wherein n is an integer between 1 and 606, or a complement thereof. Oligonucleotides may be chemically synthesized and may also be used as probes.

[0061] In another embodiment, an isolated nucleic acid molecule of the invention comprises a nucleic acid molecule that is a complement of the nucleotide sequence shown in SEQ ID NO:2n−1, wherein n is an integer between 1 and 606, or a portion of this nucleotide sequence (e.g., a fragment that can be used as a probe or primer or a fragment encoding a biologically-active portion of a NOVX polypeptide). A nucleic acid molecule that is complementary to the nucleotide sequence of SEQ ID NO:2n−1, wherein n is an integer between 1 and 606, is one that is sufficiently complementary to the nucleotide sequence of SEQ ID NO:2n−1, wherein n is an integer between 1 and 606, that it can hydrogen bond with few or no mismatches to the nucleotide sequence shown in SEQ ID NO:2n−1, wherein n is an integer between 1 and 606, thereby forming a stable duplex.

[0062] As used herein, the term “complementary” refers to Watson-Crick or Hoogsteen base pairing between nucleotides units of a nucleic acid molecule, and the term “binding” means the physical or chemical interaction between two polypeptides or compounds or associated polypeptides or compounds or combinations thereof. Binding includes ionic, non-ionic, van der Waals, hydrophobic interactions, and the like. A physical interaction can be either direct or indirect. Indirect interactions may be through or due to the effects of another polypeptide or compound. Direct binding refers to interactions that do not take place through, or due to, the effect of another polypeptide or compound, but instead are without other substantial chemical intermediates.

[0063] A “fragment” provided herein is defined as a sequence of at least 6 (contiguous) nucleic acids or at least 4 (contiguous) amino acids, a length sufficient to allow for specific hybridization in the case of nucleic acids or for specific recognition of an epitope in the case of amino acids, and is at most some portion less than a full length sequence. Fragments may be derived from any contiguous portion of a nucleic acid or amino acid sequence of choice.

[0064] A full-length NOVX clone is identified as containing an ATG translation start codon and an in-frame stop codon. Any disclosed NOVX nucleotide sequence lacking an ATG start codon therefore encodes a truncated C-terminal fragment of the respective NOVX polypeptide, and requires that the corresponding full-length cDNA extend in the 5′ direction of the disclosed sequence. Any disclosed NOVX nucleotide sequence lacking an in-frame stop codon similarly encodes a truncated N-terminal fragment of the respective NOVX polypeptide, and requires that the corresponding full-length cDNA extend in the 3′ direction of the disclosed sequence.

[0065] A “derivative” is a nucleic acid sequence or amino acid sequence formed from the native compounds either directly, by modification or partial substitution. An “analog” is a nucleic acid sequence or amino acid sequence that has a structure similar to, but not identical to, the native compound, e.g. they differs from it in respect to certain components or side chains. Analogs may be synthetic or derived from a different evolutionary origin and may have a similar or opposite metabolic activity compared to wild type. A “homolog” is a nucleic acid sequence or amino acid sequence of a particular gene that is derived from different species.

[0066] Derivatives and analogs may be full length or other than full length. Derivatives or analogs of the nucleic acids or proteins of the invention include, but are not limited to, molecules comprising regions that are substantially homologous to the nucleic acids or proteins of the invention, in various embodiments, by at least about 70%, 80%, or 95% identity (with a preferred identity of 80-95%) over a nucleic acid or amino acid sequence of identical size or when compared to an aligned sequence in which the alignment is done by a computer homology program known in the art, or whose encoding nucleic acid is capable of hybridizing to the complement of a sequence encoding the proteins under stringent, moderately stringent, or low stringent conditions. See e.g. Ausubel, et al., CURENT PROTOCOLS IN MOLECULAR BIOLOGY, John Wiley & Sons, New York, N.Y., 1993, and below.

[0067] A “homologous nucleic acid sequence” or “homologous amino acid sequence,” or variations thereof, refer to sequences characterized by a homology at the nucleotide level or amino acid level as discussed above. Homologous nucleotide sequences include those sequences coding for isoforms of NOVX polypeptides. Isoforms can be expressed in different tissues of the same organism as a result of, for example, alternative splicing of RNA. Alternatively, isoforms can be encoded by different genes. In the invention, homologous nucleotide sequences include nucleotide sequences encoding for a NOVX polypeptide of species other than humans, including, but not limited to: vertebrates, and thus can include, e.g., frog, mouse, rat, rabbit, dog, cat cow, horse, and other organisms. Homologous nucleotide sequences also include, but are not limited to, naturally occurring allelic variations and mutations of the nucleotide sequences set forth herein. A homologous nucleotide sequence does not, however, include the exact nucleotide sequence encoding human NOVX protein. Homologous nucleic acid sequences include those nucleic acid sequences that encode conservative amino acid substitutions (see below) in SEQ ID NO:2n−1, wherein n is an integer between 1 and 606, as well as a polypeptide possessing NOVX biological activity. Various biological activities of the NOVX proteins are described below.

[0068] A NOVX polypeptide is encoded by the open reading frame (“ORF”) of a NOVX nucleic acid. An ORF corresponds to a nucleotide sequence that could potentially be translated into a polypeptide. A stretch of nucleic acids comprising an ORF is uninterrupted by a stop codon. An ORF that represents the coding sequence for a full protein begins with an ATG “start” codon and terminates with one of the three “stop” codons, namely, TAA, TAG, or TGA. For the purposes of this invention, an ORF may be any part of a coding sequence, with or without a start codon, a stop codon, or both. For an ORF to be considered as a good candidate for coding for a bonafide cellular protein, a minimum size requirement is often set, e.g., a stretch of DNA that would encode a protein of 50 amino acids or more.

[0069] The nucleotide sequences determined from the cloning of the human NOVX genes allows for the generation of probes and primers designed for use in identifying and/or cloning NOVX homologues in other cell types, e.g. from other tissues, as well as NOVX homologues from other vertebrates. The probe/primer typically comprises substantially purified oligonucleotide. The oligonucleotide typically comprises a region of nucleotide sequence that hybridizes under stringent conditions to at least about 12, 25, 50, 100, 150, 200, 250, 300, 350 or 400 consecutive sense strand nucleotide sequence of SEQ ID NO:2n−1, wherein n is an integer between 1 and 606; or an anti-sense strand nucleotide sequence of SEQ ID NO:2n−1, wherein n is an integer between 1 and 606; or of a naturally occurring mutant of SEQ ID NO:2n−1, wherein n is an integer between 1 and 606.

[0070] Probes based on the human NOVX nucleotide sequences can be used to detect transcripts or genomic sequences encoding the same or homologous proteins. In various embodiments, the probe has a detectable label attached, e.g. the label can be a radioisotope, a fluorescent compound, an enzyme, or an enzyme co-factor. Such probes can be used as a part of a diagnostic test kit for identifying cells or tissues which mis-express a NOVX protein, such as by measuring a level of a NOVX-encoding nucleic acid in a sample of cells from a subject e.g., detecting NOVX mRNA levels or determining whether a genomic NOVX gene has been mutated or deleted. “A polypeptide having a biologically-active portion of a NOVX polypeptide” refers to polypeptides exhibiting activity similar, but not necessarily identical to, an activity of a polypeptide of the invention, including mature forms, as measured in a particular biological assay, with or without dose dependency. A nucleic acid fragment encoding a “biologically-active portion of NOVX” can be prepared by isolating a portion of SEQ ID NO:2n−1, wherein n is an integer between 1 and 606, that encodes a polypeptide having a NOVX biological activity (the biological activities of the NOVX proteins are described below), expressing the encoded portion of NOVX protein (e.g., by recombinant expression in vitro) and assessing the activity of the encoded portion of NOVX.

NOVX Single Nucleotide Polymorphisms

[0071] Variant sequences are also included in this application. A variant sequence can include a single nucleotide polymorphism (SNP). A SNP can, in some instances, be referred to as a “cSNP” to denote that the nucleotide sequence containing the SNP originates as a cDNA. A SNP can arise in several ways. For example, a SNP may be due to a substitution of one nucleotide for another at the polymorphic site. Such a substitution can be either a transition or a transversion. A SNP can also arise from a deletion of a nucleotide or an insertion of a nucleotide, relative to a reference allele. In this case, the polymorphic site is a site at which one allele bears a gap with respect to a particular nucleotide in another allele. SNPs occurring within genes may result in an alteration of the amino acid encoded by the gene at the position of the SNP. Intragenic SNPs may also be silent, when a codon including a SNP encodes the same amino acid as a result of the redundancy of the genetic code. SNPs occurring outside the region of a gene, or in an intron within a gene, do not result in changes in any amino acid sequence of a protein but may result in altered regulation of the expression pattern. Examples include alteration in temporal expression, physiological response regulation, cell type expression regulation, intensity of expression, and stability of transcribed message.

[0072] SeqCalling assemblies produced by the exon linking process were selected and extended using the following criteria. Genomic clones having regions with 98% identity to all or part of the initial or extended sequence were identified by BLASTN searches using the relevant sequence to query human genomic databases. The genomic clones that resulted were selected for further analysis because this identity indicates that these clones contain the genomic locus for these SeqCalling assemblies. These sequences were analyzed for putative coding regions as well as for similarity to the known DNA and protein sequences. Programs used for these analyses include Grail, Genscan, BLAST, HMMER, FASTA, Hybrid and other relevant programs.

[0073] Some additional genomic regions may have also been identified because selected SeqCalling assemblies map to those regions. Such SeqCalling sequences may have overlapped with regions defined by homology or exon prediction. They may also be included because the location of the fragment was in the vicinity of genomic regions identified by similarity or exon prediction that had been included in the original predicted sequence. The sequence so identified was manually assembled and then may have been extended using one or more additional sequences taken from CuraGen Corporation's human SeqCalling database. SeqCalling fragments suitable for inclusion were identified by the CuraTools™ program SeqExtend or by identifying SeqCalling fragments mapping to the appropriate regions of the genomic clones analyzed.

[0074] The regions defined by the procedures described above were then manually integrated and corrected for apparent inconsistencies that may have arisen, for example, from miscalled bases in the original fragments or from discrepancies between predicted exon junctions, EST locations and regions of sequence similarity, to derive the final sequence disclosed herein. When necessary, the process to identify and analyze SeqCalling assemblies and genomic clones was reiterated to derive the full length sequence (Alderbom et al., Determination of Single Nucleotide Polymorphisms by Real-time Pyrophosphate DNA Sequencing. Genome Research. 10 (8) 1249-1265, 2000).

[0075] Variants are reported individually but any combination of all or a select subset of variants are also included as contemplated NOVX embodiments of the invention.

NOVX Nucleic Acid and Polypeptide Variants

[0076] The invention further encompasses nucleic acid molecules that differ from the nucleotide sequences of SEQ ID NO:2n−1, wherein n is an integer between 1 and 606, due to degeneracy of the genetic code and thus encode the same NOVX proteins as that encoded by the nucleotide sequences of SEQ ID NO:2n−1, wherein n is an integer between 1 and 606. In another embodiment, an isolated nucleic acid molecule of the invention has a nucleotide sequence encoding a protein having an amino acid sequence of SEQ ID NO:2n, wherein n is an integer between 1 and 606.

[0077] In addition to the human NOVX nucleotide sequences of SEQ ID NO:2n−1, wherein n is an integer between 1 and 606, it will be appreciated by those skilled in the art that DNA sequence polymorphisms that lead to changes in the amino acid sequences of the NOVX polypeptides may exist within a population (e.g., the human population). Such genetic polymorphism in the NOVX genes may exist among individuals within a population due to natural allelic variation. As used herein, the terms “gene” and “recombinant gene” refer to nucleic acid molecules comprising an open reading frame (ORF) encoding a NOVX protein, preferably a vertebrate NOVX protein. Such natural allelic variations can typically result in 1-5% variance in the nucleotide sequence of the NOVX genes. Any and all such nucleotide variations and resulting amino acid polymorphisms in the NOVX polypeptides, which are the result of natural allelic variation and that do not alter the functional activity of the NOVX polypeptides, are intended to be within the scope of the invention.

[0078] Moreover, nucleic acid molecules encoding NOVX proteins from other species, and thus that have a nucleotide sequence that differs from a human SEQ ID NO:2n−1, wherein n is an integer between 1 and 606, are intended to be within the scope of the invention. Nucleic acid molecules corresponding to natural allelic variants and homologues of the NOVX cDNAs of the invention can be isolated based on their homology to the human NOVX nucleic acids disclosed herein using the human cDNAs, or a portion thereof, as a hybridization probe according to standard hybridization techniques under stringent hybridization conditions.

[0079] Accordingly, in another embodiment, an isolated nucleic acid molecule of the invention is at least 6 nucleotides in length and hybridizes under stringent conditions to the nucleic acid molecule comprising the nucleotide sequence of SEQ ID NO:2n−1, wherein n is an integer between 1 and 606. In another embodiment, the nucleic acid is at least 10, 25, 50, 100, 250, 500, 750, 1000, 1500, or 2000 or more nucleotides in length. In yet another embodiment, an isolated nucleic acid molecule of the invention hybridizes to the coding region. As used herein, the term “hybridizes under stringent conditions” is intended to describe conditions for hybridization and washing under which nucleotide sequences at least about 65% homologous to each other typically remain hybridized to each other.

[0080] Homologs (i.e., nucleic acids encoding NOVX proteins derived from species other than human) or other related sequences (e.g., paralogs) can be obtained by low, moderate or high stringency hybridization with all or a portion of the particular human sequence as a probe using methods well known in the art for nucleic acid hybridization and cloning.

[0081] As used herein, the phrase “stringent hybridization conditions” refers to conditions under which a probe, primer or oligonucleotide will hybridize to its target sequence, but to no other sequences. Stringent conditions are sequence-dependent and will be different in different circumstances. Longer sequences hybridize specifically at higher temperatures than shorter sequences. Generally, stringent conditions are selected to be about 5 ° C lower than the thermal melting point (Tm) for the specific sequence at a defined ionic strength and pH. The Tm is the temperature (under defined ionic strength, pH and nucleic acid concentration) at which 50% of the probes complementary to the target sequence hybridize to the target sequence at equilibrium. Since the target sequences are generally present at excess, at Tm, 50% of the probes are occupied at equilibrium. Typically, stringent conditions will be those in which the salt concentration is less than about 1.0 M sodium ion, typically about 0.01 to 1.0 M sodium ion (or other salts) at pH 7.0 to 8.3 and the temperature is at least about 30° C. for short probes, primers or oligonucleotides (e.g., 10 nt to 50 nt) and at least about 60° C. for longer probes, primers and oligonucleotides. Stringent conditions may also be achieved with the addition of destabilizing agents, such as formamide.

[0082] Stringent conditions are known to those skilled in the art and can be found in Ausubel, et al., (eds.), CURRENT PROTOCOLS IN MOLECULAR BIOLOGY, John Wiley & Sons, N.Y. (1989), 6.3.1-6.3.6. Preferably, the conditions are such that sequences at least about 65%, 70%, 75%, 85%, 90%, 95%, 98%, or 99% homologous to each other typically remain hybridized to each other. A non-limiting example of stringent hybridization conditions are hybridization in a high salt buffer comprising 6×SSC, 50 mM Tris-HCl (pH 7.5), 1 mM EDTA, 0.02% PVP, 0.02% Ficoll, 0.02% BSA, and 500 mg/ml denatured salmon sperm DNA at 65° C., followed by one or more washes in 0.2×SSC, 0.01% BSA at 50° C. An isolated nucleic acid molecule of the invention that hybridizes under stringent conditions to a sequence of SEQ ID NO:2n−1, wherein n is an integer between 1 and 606, corresponds to a naturally-occurring nucleic acid molecule. As used herein, a “naturally-occurring” nucleic acid molecule refers to an RNA or DNA molecule having a nucleotide sequence that occurs in nature (e.g., encodes a natural protein).

[0083] In a second embodiment, a nucleic acid sequence that is hybridizable to the nucleic acid molecule comprising the nucleotide sequence of SEQ ID NO:2n−1, wherein n is an integer between 1 and 606, or fragments, analogs or derivatives thereof, under conditions of moderate stringency is provided. A non-limiting example of moderate stringency hybridization conditions are hybridization in 6×SSC, 5×Reinhardt's solution, 0.5% SDS and 100 mg/ml denatured salmon sperm DNA at 55° C., followed by one or more washes in 1×SSC, 0.1% SDS at 37° C. Other conditions of moderate stringency that may be used are well-known within the art. See, e.g., Ausubel. et al. (eds.), 1993, CURRENT PROTOCOLS IN MOLECULAR BIOLOGY, John Wiley & Sons, NY, and Krieger, 1990; GENE TRANSFER AND EXPRESSION, A LABORATORY MANUAL, Stockton Press, N.Y.

[0084] In a third embodiment, a nucleic acid that is hybridizable to the nucleic acid molecule comprising the nucleotide sequences of SEQ ID NO:2n−1, wherein n is an integer between 1 and 606, or fragments, analogs or derivatives thereof, under conditions of low stringency, is provided. A non-limiting example of low stringency hybridization conditions are hybridization in 35% formamide, 5×SSC, 50 mM Tris-HCl (pH 7.5), 5 mM EDTA, 0.02% PVP, 0.02% Ficoll, 0.2% BSA, 100 mg/ml denatured salmon sperm DNA, 10% (wt/vol) dextran sulfate at 40° C., followed by one or more washes in 2×SSC, 25 mM Tris-HCl (pH 7.4), 5 mM EDTA, and 0.1% SDS at 50° C. Other conditions of low stringency that may be used are well known in the art (e.g., as employed for cross-species hybridizations). See, e.g., Ausubel, et al. (eds.), 1993, CURRENT PROTOCOLS IN MOLECULAR BIOLOGY, John Wiley & Sons, NY, and Kriegler, 1990, GENE TRANSFER AND EXPRESSION, A LABORATORY MANUAL, Stockton Press, N.Y.; Shilo and Weinberg, 1981. Proc Natl Acad Sci USA 78: 6789-6792.

Conservative Mutations

[0085] In addition to naturally-occurring allelic variants of NOVX sequences that may exist in the population, the skilled artisan will further appreciate that changes can be introduced by mutation into the nucleotide sequences of SEQ ID NO:2n−1, wherein n is an integer between 1 and 606, thereby leading to changes in the amino acid sequences of the encoded NOVX protein, without altering the functional ability of that NOVX protein. For example, nucleotide substitutions leading to amino acid substitutions at “non-essential” amino acid residues can be made in the sequence of SEQ ID NO:2n, wherein n is an integer between 1 and 606. A “non-essential” amino acid residue is a residue that can be altered from the wild-type sequences of the NOVX proteins without altering their biological activity, whereas an “essential” amino acid residue is required for such biological activity. For example, amino acid residues that are conserved among the NOVX proteins of the invention are predicted to be particularly non-amenable to alteration. Amino acids for which conservative substitutions can be made are well-known within the art.

[0086] Another aspect of the invention pertains to nucleic acid molecules encoding NOVX proteins that contain changes in amino acid residues that are not essential for activity. Such NOVX proteins differ in amino acid sequence from SEQ ID NO:2n−1, wherein n is an integer between 1 and 606, yet retain biological activity. In one embodiment, the isolated nucleic acid molecule comprises a nucleotide sequence encoding a protein, wherein the protein comprises an amino acid sequence at least about 40% homologous to the amino acid sequences of SEQ ID NO:2n, wherein n is an integer between 1 and 606. Preferably, the protein encoded by the nucleic acid molecule is at least about 60% homologous to SEQ ID NO:2n, wherein n is an integer between 1 and 606; more preferably at least about 70% homologous to SEQ ID NO:2n, wherein n is an integer between 1 and 606; still more preferably at least about 80% homologous to SEQ ID NO:2n, wherein n is an integer between 1 and 606; even more preferably at least about 90% homologous to SEQ ID NO:2n, wherein n is an integer between 1 and 606; and most preferably at least about 95% homologous to SEQ ID NO:2n, wherein n is an integer between 1 and 606.

[0087] An isolated nucleic acid molecule encoding a NOVX protein homologous to the protein of SEQ ID NO:2n, wherein n is an integer between 1 and 606, can be created by introducing one or more nucleotide substitutions, additions or deletions into the nucleotide sequence of SEQ ID NO:2n−1, wherein n is an integer between 1 and 606, such that one or more amino acid substitutions, additions or deletions are introduced into the encoded protein.

[0088] Mutations can be introduced any one of SEQ ID NO:2n−1, wherein n is an integer between 1 and 606, by standard techniques, such as site-directed mutagenesis and PCR-mediated mutagenesis. Preferably, conservative amino acid substitutions are made at one or more predicted, non-essential amino acid residues. A “conservative amino acid substitution” is one in which the amino acid residue is replaced with an amino acid residue having a similar side chain. Families of amino acid residues having similar side chains have been defined within the art. These families include amino acids with basic side chains (e.g., lysine, arginine, histidine), acidic side chains (e.g., aspartic acid, glutamic acid), uncharged polar side chains (e.g., glycine, asparagine, glutamine, serine, threonine, tyrosine, cysteine), nonpolar side chains (e.g., alanine, valine, leucine, isoleucine, proline, phenylalanine, methionine, tryptophan), beta-branched side chains (e.g., threonine, valine, isoleucine) and aromatic side chains (e.g., tyrosine, phenylalanine, tryptophan, histidine). Thus, a predicted non-essential amino acid residue in the NOVX protein is replaced with another amino acid residue from the same side chain family. Alternatively, in another embodiment, mutations can be introduced randomly along all or part of a NOVX coding sequence, such as by saturation mutagenesis, and the resultant mutants can be screened for NOVX biological activity to identify mutants that retain activity. Following mutagenesis of a nucleic acid of SEQ ID NO:2n−1, wherein n is an integer between 1 and 606, the encoded protein can be expressed by any recombinant technology known in the art and the activity of the protein can be determined.

[0089] The relatedness of amino acid families may also be determined based on side chain interactions. Substituted amino acids may be fully conserved “strong” residues or fully conserved “weak” residues. The “strong” group of conserved amino acid residues may be any one of the following groups: STA, NEQK, NHQK, NDEQ, QHRK, MILV, MILF, HY, FYW, wherein the single letter amino acid codes are grouped by those amino acids that may be substituted for each other. Likewise, the “weak” group of conserved residues may be any one of the following: CSA, ATV, SAG, STNK, STPA, SGND, SNDEQK, NDEQHK, NEQHRK, HFY, wherein the letters within each group represent the single letter amino acid code.

[0090] In one embodiment, a mutant NOVX protein can be assayed for (i) the ability to form protein:protein interactions with other NOVX proteins, other cell-surface proteins, or biologically-active portions thereof, (ii) complex formation between a mutant NOVX protein and a NOVX ligand; or (iii) the ability of a mutant NOVX protein to bind to an intracellular target protein or biologically-active portion thereof; (e.g. avidin proteins).

[0091] In yet another embodiment, a mutant NOVX protein can be assayed for the ability to regulate a specific biological function (e.g., regulation of insulin release).

Interfering RNA

[0092] In one aspect of the invention, NOVX gene expression can be attenuated by RNA interference. One approach well-known in the art is short interfering RNA (siRNA) mediated gene silencing where expression products of a NOVX gene are targeted by specific double stranded NOVX derived siRNA nucleotide sequences that are complementary to at least a 19-25 nt long segment of the NOVX gene transcript, including the 5′ untranslated (UT) region, the ORF, or the 3′ UT region. See, e.g., PCT applications WO00/44895, WO99/32619, WO01/75164, WO01/92513, WO 01/29058, WO01/89304, WO02/16620, and WO02/29858, each incorporated by reference herein in their entirety. Targeted genes can be a NOVX gene, or an upstream or downstream modulator of the NOVX gene. Nonlimiting examples of upstream or downstream modulators of a NOVX gene include, e.g., a transcription factor that binds the NOVX gene promoter, a kinase or phosphatase that interacts with a NOVX polypeptide, and polypeptides involved in a NOVX regulatory pathway.

[0093] According to the methods of the present invention, NOVX gene expression is silenced using short interfering RNA. A NOVX polynucleotide according to the invention includes a siRNA polynucleotide. Such a NOVX siRNA can be obtained using a NOVX polynucleotide sequence, for example, by processing the NOVX ribopolynucleotide sequence in a cell-free system, such as but not limited to a Drosophila extract, or by transcription of recombinant double stranded NOVX RNA or by chemical synthesis of nucleotide sequences homologous to a NOVX sequence. See, e.g., Tuschl, Zamore, Lehmann, Bartel and Sharp (1999), Genes & Dev. 13: 3191-3197, incorporated herein by reference in its entirety. When synthesized, a typical 0.2 micromolar-scale RNA synthesis provides about 1 milligram of siRNA, which is sufficient for 1000 transfection experiments using a 24-well tissue culture plate format.

[0094] The most efficient silencing is generally observed with siRNA duplexes composed of a 21-nt sense strand and a 21-nt antisense strand, paired in a manner to have a 2-nt 3′ overhang. The sequence of the 2-nt 3′ overhang makes an additional small contribution to the specificity of siRNA target recognition. The contribution to specificity is localized to the unpaired nucleotide adjacent to the first paired bases. In one embodiment, the nucleotides in the 3′ overhang are ribonucleotides. In an alternative embodiment, the nucleotides in the 3′ overhang are deoxyribonucleotides. Using 2′-deoxyribonucleotides in the 3′ overhangs is as efficient as using ribonucleotides, but deoxyribonucleotides are often cheaper to synthesize and are most likely more nuclease resistant.

[0095] A contemplated recombinant expression vector of the invention comprises a NOVX DNA molecule cloned into an expression vector comprising operatively-linked regulatory sequences flanking the NOVX sequence in a manner that allows for expression (by transcription of the DNA molecule) of both strands. An RNA molecule that is antisense to NOVX mRNA is transcribed by a first promoter (e.g., a promoter sequence 3′ of the cloned DNA) and an RNA molecule that is the sense strand for the NOVX mRNA is transcribed by a second promoter (e.g., a promoter sequence 5′ of the cloned DNA). The sense and antisense strands may hybridize in vivo to generate siRNA constructs for silencing of the NOVX gene. Alternatively, two constructs can be utilized to create the sense and anti-sense strands of a siRNA construct. Finally, cloned DNA can encode a construct having secondary structure, wherein a single transcript has both the sense and complementary antisense sequences from the target gene or genes. In an example of this embodiment, a hairpin RNAi product is homologous to all or a portion of the target gene. In another example, a hairpin RNAi product is a siRNA. The regulatory sequences flanking the NOVX sequence may be identical or may be different, such that their expression may be modulated independently, or in a temporal or spatial manner.

[0096] In a specific embodiment, siRNAs are transcribed intracellularly by cloning the NOVX gene templates into a vector containing, e.g., a RNA pol III transcription unit from the smaller nuclear RNA (snRNA) U6 or the human RNase P RNA H1. One example of a vector system is the GeneSuppressor™ RNA Interference kit (commercially available from Imgenex). The U6 and H1 promoters are members of the type III class of Pol III promoters. The +1 nucleotide of the U6-like promoters is always guanosine, whereas the +1 for H1 promoters is adenosine. The termination signal for these promoters is defined by five consecutive thymidines. The transcript is typically cleaved after the second uridine. Cleavage at this position generates a 3′ UU overhang in the expressed siRNA, which is similar to the 3′ overhangs of synthetic siRNAs. Any sequence less than 400 nucleotides in length can be transcribed by these promoter, therefore they are ideally suited for the expression of around 21-nucleotide siRNAs in, e.g., an approximately 50-nucleotide RNA stem-loop transcript.

[0097] A siRNA vector appears to have an advantage over synthetic siRNAs where long term knock-down of expression is desired. Cells transfected with a siRNA expression vector would experience steady, long-term mRNA inhibition. In contrast, cells transfected with exogenous synthetic siRNAs typically recover from mRNA suppression within seven days or ten rounds of cell division. The long-term gene silencing ability of siRNA expression vectors may provide for applications in gene therapy.

[0098] In general, siRNAs are chopped from longer dsRNA by an ATP-dependent ribonuclease called DICER. DICER is a member of the RNase III family of double-stranded RNA-specific endonucleases. The siRNAs assemble with cellular proteins into an endonuclease complex. In vitro studies in Drosophila suggest that the siRNAs/protein complex (siRNP) is then transferred to a second enzyme complex, called an RNA-induced silencing complex (RISC), which contains an endoribonuclease that is distinct from DICER. RISC uses the sequence encoded by the antisense siRNA strand to find and destroy mRNAs of complementary sequence. The siRNA thus acts as a guide, restricting the ribonuclease to cleave only mRNAs complementary to one of the two siRNA strands.

[0099] A NOVX mRNA region to be targeted by siRNA is generally selected from a desired NOVX sequence beginning 50 to 100 nt downstream of the start codon. Alternatively, 5′ or 3′ UTRs and regions nearby the start codon can be used but are generally avoided, as these may be richer in regulatory protein binding sites. UTR-binding proteins andlor translation initiation complexes may interfere with binding of the siRNP or RISC endonuclease complex. An initial BLAST homology search for the selected siRNA sequence is done against an available nucleotide sequence library to ensure that only one gene is targeted. Specificity of target recognition by siRNA duplexes indicate that a single point mutation located in the paired region of an siRNA duplex is sufficient to abolish target mRNA degradation. See, Elbashir et al. 2001 EMBO J. 20(23):6877-88. Hence, consideration should be taken to accommodate SNPs, polymorphisms, allelic variants or species-specific variations when targeting a desired gene.

[0100] In one embodiment, a complete NOVX siRNA experiment includes the proper negative control. A negative control siRNA generally has the same nucleotide composition as the NOVX siRNA but lack significant sequence homology to the genome. Typically, one would scramble the nucleotide sequence of the NOVX siRNA and do a homology search to make sure it lacks homology to any other gene.

[0101] Two independent NOVX siRNA duplexes can be used to knock-down a target NOVX gene. This helps to control for specificity of the silencing effect. In addition, expression of two independent genes can be simultaneously knocked down by using equal concentrations of different NOVX siRNA duplexes, e.g., a NOVX siRNA and an siRNA for a regulator of a NOVX gene or polypeptide. Availability of siRNA-associating proteins is believed to be more limiting than target mRNA accessibility.

[0102] A targeted NOVX region is typically a sequence of two adenines (AA) and two thymidines (TT) divided by a spacer region of nineteen (N19) residues (e.g., AA(N19)TT). A desirable spacer region has a G/C-content of approximately 30% to 70%, and more preferably of about 50%. If the sequence AA(N19)TT is not present in the target sequence, an alternative target region would be AA(N21). The sequence of the NOVX sense siRNA corresponds to (N19)TT or N21, respectively. In the latter case, conversion of the 3′ end of the sense siRNA to TT can be performed if such a sequence does not naturally occur in the NOVX polynucleotide. The rationale for this sequence conversion is to generate a symmetric duplex with respect to the sequence composition of the sense and antisense 3′ overhangs. Symmetric 3′ overhangs may help to ensure that the siRNPs are formed with approximately equal ratios of sense and antisense target RNA-cleaving siRNPs. See, e.g., Elbashir, Lendeckel and Tuschl (2001). Genes & Dev. 15: 188-200, incorporated by reference herein in its entirely. The modification of the overhang of the sense sequence of the siRNA duplex is not expected to affect targeted mRNA recognition, as the antisense siRNA strand guides target recognition.

[0103] Alternatively, if the NOVX target mRNA does not contain a suitable AA(N21) sequence, one may search for the sequence NA(N21). Further, the sequence of the sense strand and antisense strand may still be synthesized as 5′ (N19)TT, as it is believed that the sequence of the 3′-most nucleotide of the antisense siRNA does not contribute to specificity. Unlike antisense or ribozyme technology, the secondary structure of the target rnRNA does not appear to have a strong effect on silencing. See, Harborth, et al. (2001) J. Cell Science 114: 4557-4565, incorporated by reference in its entirety.

[0104] Transfection of NOVX siRNA duplexes can be achieved using standard nucleic acid transfection methods, for example, OLIGOFECTAMINE Reagent (commercially available from Invitrogen). An assay for NOVX gene silencing is generally performed approximately 2 days after transfection. No NOVX gene silencing has been observed in the absence of transfection reagent, allowing for a comparative analysis of the wild-type and silenced NOVX phenotypes. In a specific embodiment, for one well of a 24-well plate, approximately 0.84 μg of the siRNA duplex is generally sufficient. Cells are typically seeded the previous day, and are transfected at about 50% confluence. The choice of cell culture media and conditions are routine to those of skill in the art, and will vary with the choice of cell type. The efficiency of transfection may depend on the cell type, but also on the passage number and the confluency of the cells. The time and the manner of formation of siRNA-liposome complexes (e.g. inversion versus vortexing) are also critical. Low transfection efficiencies are the most frequent cause of unsuccessful NOVX silencing. The efficiency of transfection needs to be carefully examined for each new cell line to be used. Preferred cell are derived from a mammal, more preferably from a rodent such as a rat or mouse, and most preferably from a human. Where used for therapeutic treatment, the cells are preferentially autologous, although non-autologous cell sources are also contemplated as within the scope of the present invention.

[0105] For a control experiment, transfection of 0.84 μg single-stranded sense NOVX siRNA will have no effect on NOVX silencing, and 0.84 μg antisense siRNA has a weak silencing effect when compared to 0.84 μg of duplex siRNAs. Control experiments again allow for a comparative analysis of the wild-type and silenced NOVX phenotypes. To control for transfection efficiency, targeting of common proteins is typically performed, for example targeting of lamin A/C or transfection of a CMV-driven EGFP-expression plasmid (e.g. commercially available from Clontech). In the above example, a determination of the fraction of lamin A/C knockdown in cells is determined the next day by such techniques as immunofluorescence, Western blot, Northern blot or other similar assays for protein expression or gene expression. Lamin A/C monoclonal antibodies may be obtained from Santa Cruz Biotechnology.

[0106] Depending on the abundance and the half life (or turnover) of the targeted NOVX polynucleotide in a cell, a knock-down phenotype may become apparent after 1 to 3 days, or even later. In cases where no NOVX knock-down phenotype is observed, depletion of the NOVX polynucleotide may be observed by immunofluorescence or Western blotting. If the NOVX polynucleotide is still abundant after 3 days, cells need to be split and transferred to a fresh 24-well plate for re-transfection. If no knock-down of the targeted protein is observed, it may be desirable to analyze whether the target mRNA (NOVX or a NOVX upstream or downstream gene) was effectively destroyed by the transfected siRNA duplex. Two days after transfection, total RNA is prepared, reverse transcribed using a target-specific primer, and PCR-amplified with a primer pair covering at least one exon-exon junction in order to control for amplification of pre-mRNAs. RT/PCR of a non-targeted mRNA is also needed as control. Effective depletion of the mRNA yet undetectable reduction of target protein may indicate that a large reservoir of stable NOVX protein may exist in the cell. Multiple transfection in sufficiently long intervals may be necessary until the target protein is finally depleted to a point where a phenotype may become apparent. If multiple transfection steps are required, cells are split 2 to 3 days after transfection. The cells may be transfected immediately after splitting.

[0107] An inventive therapeutic method of the invention contemplates administering a NOVX siRNA construct as therapy to compensate for increased or aberrant NOVX expression or activity. The NOVX ribopolynucleotide is obtained and processed into siRNA fragments, or a NOVX siRNA is synthesized, as described above. The NOVX siRNA is administered to cells or tissues using known nucleic acid transfection techniques, as described above. A NOVX siRNA specific for a NOVX gene will decrease or knockdown NOVX transcription products, which will lead to reduced NOVX polypeptide production, resulting in reduced NOVX polypeptide activity in the cells or tissues.

[0108] The present invention also encompasses a method of treating a disease or condition associated with the presence of a NOVX protein in an individual comprising administering to the individual an RNAi construct that targets the mRNA of the protein (the mRNA that encodes the protein) for degradation. A specific RNAi construct includes a siRNA or a double stranded gene transcript that is processed into siRNAs. Upon treatment, the target protein is not produced or is not produced to the extent it would be in the absence of the treatment.

[0109] Where the NOVX gene function is not correlated with a known phenotype, a control sample of cells or tissues from healthy individuals provides a reference standard for determining NOVX expression levels. Expression levels are detected using the assays described, e.g., RT-PCR, Northern blotting, Western blotting, ELISA, and the like. A subject sample of cells or tissues is taken from a mammal, preferably a human subject, suffering from a disease state. The NOVX ribopolynucleotide is used to produce siRNA constructs, that are specific for the NOVX gene product. These cells or tissues are treated by administering NOVX siRNA's to the cells or tissues by methods described for the transfection of nucleic acids into a cell or tissue, and a change in NOVX polypeptide or polynucleotide expression is observed in the subject sample relative to the control sample, using the assays described. This NOVX gene knockdown approach provides a rapid method for determination of a NOVX minus (NOVX⁻) phenotype in the treated subject sample. The NOVX- phenotype observed in the treated subject sample thus serves as a marker for monitoring the course of a disease state during treatment.

[0110] In specific embodiments, a NOVX siRNA is used in therapy. Methods for the generation and use of a NOVX siRNA are known to those skilled in the art. Example techniques are provided below.

[0111] Production of RNAs

[0112] Sense RNA (ssRNA) and antisense RNA (asRNA) of NOVX are produced using known methods such as transcription in RNA expression vectors. In the initial experiments, the sense and antisense RNA are about 500 bases in length each. The produced ssRNA and asRNA (0.5 μM) in 10 mM Tris-HCl (pH 7.5) with 20 mM NaCl were heated to 95° C. for 1 min then cooled and annealed at room temperature for 12 to 16 h. The RNAs are precipitated and resuspended in lysis buffer (below). To monitor annealing, RNAs are electrophoresed in a 2% agarose gel in TBE buffer and stained with ethidium bromide. See, e.g., Sambrook et al., Molecular Cloning. Cold Spring Harbor Laboratory Press, Plainview, N.Y. (1989).

[0113] Lysate Preparation

[0114] Untreated rabbit reticulocyte lysate (Ambion) are assembled according to the manufacturer's directions. dsRNA is incubated in the lysate at 30° C. for 10 min prior to the addition of mRNAs. Then NOVX mRNAs are added and the incubation continued for an additional 60 min. The molar ratio of double stranded RNA and MrRNA is about 200:1. The NOVX mRNA is radiolabeled (using known techniques) and its stability is monitored by gel electrophoresis.

[0115] In a parallel experiment made with the same conditions, the double stranded RNA is internally radiolabeled with a ³²P-ATP. Reactions are stopped by the addition of 2× proteinase K buffer and deproteinized as described previously (Tuschl et al., Genes Dev., 13:3191-3197 (1999)). Products are analyzed by electrophoresis in 15% or 18% polyacrylamide sequencing gels using appropriateRNA standards. By monitoring the gels for radioactivity, the natural production of 10 to 25 nt RNAs from the double stranded RNA can be determined.

[0116] The band of double stranded RNA, about 21-23 bps, is eluded. The efficacy of these 21-23 mers for suppressing NOVX transcription is assayed in vitro using the same rabbit reticulocyte assay described above using 50 nanomolar of double stranded 21-23 mer for each assay. The sequence of these 21-23 mers is then determined using standard nucleic acid sequencing techniques.

[0117] RNA Preparation 21 nt RNAs, based on the sequence determined above, are chemically synthesized using Expedite RNA phosphoramidites and thymidine phosphoramidite (Proligo, Germany). Synthetic oligonucleotides are deprotected and gel-purified (Elbashir, Lendeckel, & Tuschl, Genes & Dev. 15, 188-200 (2001)), followed by Sep-Pak C18 cartridge (Waters, Milford, Mass., USA) purification (Tuschl, et al., Biochemistry, 32:11658-11668 (1993)).

[0118] These RNAs (20 μM) single strands are incubated in annealing buffer (100 mM potassium acetate, 30 mM HEPES-KOH at pH 7.4, 2 mM magnesium acetate) for 1 min at 90° C. followed by 1 h at 37° C.

[0119] Cell Culture

[0120] A cell culture known in the art to regularly express NOVX is propagated using standard conditions. 24 hours before transfection, at approx. 80% confluency, the cells are trypsinized and diluted 1:5 with fresh medium without antibiotics (1-3×105 cells/ml) and transferred to 24-well plates (500 ml/well). Transfection is performed using a commercially available lipofection kit and NOVX expression is monitored using standard techniques with positive and negative control. A positive control is cells that naturally express NOVX while a negative control is cells that do not express NOVX. Base-paired 21 and 22 nt siRNAs with overhanging 3′ ends mediate efficient sequence-specific mRNA degradation in lysates and in cell culture. Different concentrations of siRNAs are used. An efficient concentration for suppression in vitro in mamrnmalian culture is between 25 nM to 100 nM final concentration. This indicates that siRNAs are effective at concentrations that are several orders of magnitude below the concentrations applied in conventional antisense or ribozyme gene targeting experiments.

[0121] The above method provides a way both for the deduction of NOVX siRNA sequence and the use of such siRNA for in vitro suppression. In vivo suppression may be performed using the same siRNA using well known in vivo transfection or gene therapy transfection techniques.

Antisense Nucleic Acids

[0122] Another aspect of the invention pertains to isolated antisense nucleic acid molecules that are hybridizable to or complementary to the nucleic acid molecule comprising the nucleotide sequence of SEQ ID NO:2n−1, wherein n is an integer between 1 and 606, or fragments, analogs or derivatives thereof. An “antisense” nucleic acid comprises a nucleotide sequence that is complementary to a “sense” nucleic acid encoding a protein (e.g., complementary to the coding strand of a double-stranded cDNA molecule or complementary to an mRNA sequence). In specific aspects, antisense nucleic acid molecules are provided that comprise a sequence complementary to at least about 10, 25, 50, 100, 250 or 500 nucleotides or an entire NOVX coding strand, or to only a portion thereof. Nucleic acid molecules encoding fragments, homologs, derivatives and analogs of a NOVX protein of SEQ ID NO:2n, wherein n is an integer between 1 and 606, or antisense nucleic acids complementary to a NOVX nucleic acid sequence of SEQ ID NO:2n−1, wherein n is an integer between 1 and 606, are additionally provided.

[0123] In one embodiment, an antisense nucleic acid molecule is antisense to a “coding region” of the coding strand of a nucleotide sequence encoding a NOVX protein. The term “coding region” refers to the region of the nucleotide sequence comprising codons which are translated into amino acid residues. In another embodiment, the antisense nucleic acid molecule is antisense to a “noncoding region” of the coding strand of a nucleotide sequence encoding the NOVX protein. The term “noncoding region” refers to 5′ and 3′ sequences which flank the coding region that are not translated into amino acids (i.e., also referred to as 5′ and 3′ untranslated regions).

[0124] Given the coding strand sequences encoding the NOVX protein disclosed herein, antisense nucleic acids of the invention can be designed according to the rules of Watson and Crick or Hoogsteen base pairing. The antisense nucleic acid molecule can be complementary to the entire coding region of NOVX mRNA, but more preferably is an oligonucleotide that is antisense to only a portion of the coding or noncoding region of NOVX mRNA. For example, the antisense oligonucleotide can be complementary to the region surrounding the translation start site of NOVX mRNA. An antisense oligonucleotide can be, for example, about 5, 10, 15, 20, 25, 30, 35, 40, 45 or 50 nucleotides in length. An antisense nucleic acid of the invention can be constructed using chemical synthesis or enzymatic ligation reactions using procedures known in the art. For example, an antisense nucleic acid (e.g., an antisense oligonucleotide) can be chemically synthesized using naturally-occurring nucleotides or variously modified nucleotides designed to increase the biological stability of the molecules or to increase the physical stability of the duplex formed between the antisense and sense nucleic acids (e.g., phosphorothioate derivatives and acridine substituted nucleotides can be used).

[0125] Examples of modified nucleotides that can be used to generate the antisense nucleic acid include: 5-fluorouracil, 5-bromouracil, 5-chlorouracil, 5-iodouracil, hypoxanthine, xanthine, 4-acetylcytosine, 5-carboxymethylaminomethyl-2-thiouridine, 5-(carboxyhydroxylmethyl) uracil, 5-carboxymethylaminomethyluracil, dihydrouracil, beta-D-galactosylqueosine, inosine, N6-isopentenyladenine, 1-methylguanine, 1-methylinosine, 2,2-dimethylguanine, 2-methyladenine, 2-methylguanine, 5-methoxyuracil, 3-methylcytosine, 5-methylcytosine, N6-adenine, 7-methylguanine, 5-methylaminomethyluracil, 5-methoxyaminomethyl-2-thiouracil, 2-thiouracil, 4-thiouracil, beta-D-mannosylqueosine, 5′-methoxycarboxymethyluracil, 2-methylthio-N6-isopentenyladenine, uracil-5-oxyacetic acid (v), wybutoxosine, pseudouracil, queosine, 2-thiocytosine, 5-methyl-2-thiouracil, 5-methyluracil, uracil-5-oxyacetic acid methylester, uracil-5-oxyacetic acid (v), 5-methyl-2-thiouracil, 3-(3-amino-3-N-2-carboxypropyl) uracil, (acp3)w, and 2,6-diaminopurine. Alternatively, the antisense nucleic acid can be produced biologically using an expression vector into which a nucleic acid has been subcloned in an antisense orientation (i.e., RNA transcribed from the inserted nucleic acid will be of an antisense orientation to a target nucleic acid of interest, described further in the following subsection).

[0126] The antisense nucleic acid molecules of the invention are typically administered to a subject or generated in situ such that they hybridize with or bind to cellular mRNA and/or genomic DNA encodinga NOVX protein to thereby inhibit expression of the protein (e.g., by inhibiting transcription and/or translation). The hybridization can be by conventional nucleotide complementarity to form a stable duplex, or, for example, in the case of an antisense nucleic acid molecule that binds to DNA duplexes, through specific interactions in the major groove of the double helix. An example of a route of administration of antisense nucleic acid molecules of the invention includes direct injection at a tissue site. Alternatively, antisense nucleic acid molecules can be modified to target selected cells and then administered systemically. For example, for systemic administration, antisense molecules can be modified such that they specifically bind to receptors or antigens expressed on a selected cell surface (e.g., by linking the antisense nucleic acid molecules to peptides or antibodies that bind to cell surface receptors or antigens). The antisense nucleic acid molecules can also be delivered to cells using the vectors described herein. To achieve sufficient nucleic acid molecules, vector constructs in which the antisense nucleic acid molecule is placed under the control of a strong pol II or pol III promoter are preferred.

[0127] In yet another embodiment, the antisense nucleic acid molecule of the invention is an α-anomeric nucleic acid molecule. An α-anomeric nucleic acid molecule forms specific double-stranded hybrids with complementary RNA in which, contrary to the usual β-units, the strands run parallel to each other. See, e.g., Gaultier, et al., 1987. Nucl. Acids Res. 15: 6625-6641. The antisense nucleic acid molecule can also comprise a 2′-o-methylribonucleotide (See, e.g., Inoue, et al. 1987. Nucl. Acids Res. 15: 6131-6148) or a chimeric RNA-DNA analogue (See, e.g., Inoue, et al., 1987. FEBS Lett. 215: 327-330.

[0128] Ribozymes and PNA Moieties

[0129] Nucleic acid modifications include, by way of non-limiting example, modified bases, and nucleic acids whose sugar phosphate backbones are modified or derivatized. These modifications are carried out at least in part to enhance the chemical stability of the modified nucleic acid, such that they may be used, for example, as antisense binding nucleic acids in therapeutic applications in a subject.

[0130] In one embodiment, an antisense nucleic acid of the invention is a ribozyme. Ribozymes are catalytic RNA molecules with ribonuclease activity that are capable of cleaving a single-stranded nucleic acid, such as an mRNA, to which they have a complementary region. Thus, ribozymes (e.g., hammerhead ribozymes as described in Haselhoff and Gerlach 1988. Nature 334: 585-591) can be used to catalytically cleave NOVX mRNA transcripts to thereby inhibit translation of NOVX mRNA. A ribozyme having specificity for a NOVX-encoding nucleic acid can be designed based upon the nucleotide sequence of a NOVX cDNA disclosed herein (i.e., SEQ ID NO:2n−1, wherein n is an integer between 1 and 606). For example, a derivative of a Tetrahymena L-19 IVS RNA can be constructed in which the nucleotide sequence of the active site is complementary to the nucleotide sequence to be cleaved in a NOVX-encoding mRNA. See, e.g., U.S. Pat. No. 4,987,07to Cech, et al. and U.S. Pat. No. 5,116,742 to Cech, et al. NOVX mRNA can also be used to select a catalytic RNA having a specific ribonuclease activity from a pool of RNA molecules. See, e.g., Bartel et al., (1993) Science 261:1411-1418.

[0131] Alternatively, NOVX gene expression can be inhibited by targeting nucleotide sequences complementary to the regulatory region of the NOVX nucleic acid (e.g., the NOVX promoter and/or enhancers) to form triple helical structures that prevent transcription of the NOVX gene in target cells. See, e.g., Helene, 1991. Anticancer Drug Des. 6: 569-84; Helene, et al. 1992. Ann. N.Y. Acad. Sci. 660: 27-36; Maher, 1992. Bioassays 14: 807-15.

[0132] In various embodiments, the NOVX nucleic acids can be modified at the base moiety, sugar moiety or phosphate backbone to improve, e.g., the stability, hybridization, or solubility of the molecule. For example, the deoxyribose phosphate backbone of the nucleic acids can be modified to generate peptide nucleic acids. See, e.g., Hyrup, et al., 1996. Bioorg Med Chem 4: 5-23. As used herein, the terms “peptide nucleic acids” or “PNAs” refer to nucleic acid mimics (e.g., DNA mimics) in which the deoxyribose phosphate backbone is replaced by a pseudopeptide backbone and only the four natural nucleotide bases are retained. The neutral backbone of PNAs has been shown to allow for specific hybridization to DNA and RNA under conditions of low ionic strength. The synthesis of PNA oligomer can be performed using standard solid phase peptide synthesis protocols as described in Hyrup, et al., 1996. supra; Perry-O'Keefe, et al., 1996. Proc. Natl. Acad. Sci. USA 93: 14670-14675.

[0133] PNAs of NOVX can be used in therapeutic and diagnostic applications. For example, PNAs can be used as antisense or antigene agents for sequence-specific modulation of gene expression by, e.g., inducing transcription or translation arrest or inhibiting replication. PNAs of NOVX can also be used, for example, in the analysis of single base pair mutations in a gene (e.g., PNA directed PCR clamping; as artificial restriction enzymes when used in combination with other enzymes, e.g., S₁ nucleases (See, Hyrup, et al., 1996.supra); or as probes or primers for DNA sequence and hybridization (See, Hyrup, et al., 1996, supra; Perry-O'Keefe, et al., 1996. supra).

[0134] In another embodiment, PNAs of NOVX can be modified, e.g., to enhance their stability or cellular uptake, by attaching lipophilic or other helper groups to PNA, by the formation of PNA-DNA chimeras, or by the use of liposomes or other techniques of drug delivery known in the art. nFor example, PNA-DNA chimeras of NOVX can be generated that may combine the advantageous properties of PNA and DNA. Such chimeras allow DNA recognition enzymes (e.g., RNase H and DNA polymerases) to interact with the DNA portion while the PNA portion would provide high binding affinity and specificity. PNA-DNA chimeras can be linked using linkers of appropriate lengths selected in terms of base stacking, number of bonds between the nucleotide bases, and orientation (see, Hyrup, et al., 1996. supra). The synthesis of PNA-DNA chimeras can be performed as described in Hyrup, et al., 1996. supra and Finn, et al., 1996. Nucl Acids Res 24: 3357-3363. For example, a DNA chain can be synthesized on a solid support using standard phosphoramidite coupling chemistry, and modified nucleoside analogs, e.g., 5′-(4-methoxytrityl)amino-5′-deoxy-thymidine phosphoramidite, can be used between the PNA and the 5′ end of DNA. See, e.g., Mag, et al., 1989. Nucl Acid Res 17: 5973-5988. PNA monomers are then coupled in a stepwise manner to produce a chimeric molecule with a 5′ PNA segment and a 3′ DNA segment. See, e.g., Finn, et al., 1996. supra. Alternatively, chimeric molecules can be synthesized with a 5′ DNA segment and a 3′ PNA segment. See, e.g., Petersen, et al., 1975. Bioorg. Med. Chem. Lett. 5: 1119-11124.

[0135] In other embodiments, the oligonucleotide may include other appended groups such as peptides (e.g., for targeting host cell receptors in vivo), or agents facilitating transport across the cell membrane (see, e.g., Letsinger, et al., 1989. Proc. Natl. Acad. Sci. U.S.A. 86: 6553-6556; Lemaitre, et al., 1987. Proc. Natl. Acad. Sci. 84: 648-652; PCT Publication No. WO88/09810) or the blood-brain barrier (see, e.g., PCT Publication No. WO 89/10134). In addition, oligonucleotides can be modified with hybridization triggered cleavage agents (see, e.g., Krol, et al., 1988. BioTechniques 6:958-976) or intercalating agents (see, e.g., Zon, 1988. Pharm. Res. 5: 539-549). To this end, the oligonucleotide may be conjugated to another molecule, e.g., a peptide, a hybridization triggered cross-linking agent, a transport agent, a hybridization-triggered cleavage agent, and the like.

NOVX Polypeptides

[0136] A polypeptide according to the invention includes a polypeptide including the amino acid sequence of NOVX polypeptides whose sequences are provided in any one of SEQ ID NO:2n, wherein n is an integer between 1 and 606. The invention also includes a mutant or variant protein any of whose residues may be changed from the corresponding residues shown in any one of SEQ ID NO:2n, wherein n is an integer between 1 and 606, while still encoding a protein that maintains its NOVX activities and physiological functions, or a functional fragment thereof.

[0137] In general, a NOVX variant that preserves NOVX-like function includes any variant in which residues at a particular position in the sequence have been substituted by other amino acids, and further include the possibility of inserting an additional residue or residues between two residues of the parent protein as well as the possibility of deleting one or more residues from the parent sequence. Any amino acid substitution, insertion, or deletion is encompassed by the invention. In favorable circumstances, the substitution is a conservative substitution as defined above.

[0138] One aspect of the invention pertains to isolated NOVX proteins, and biologically-active portions thereof, or derivatives, fragments, analogs or homologs thereof. Also provided are polypeptide fragments suitable for use as immunogens to raise anti-NOVX antibodies. In one embodiment, native NOVX proteins can be isolated from cells or tissue sources by an appropriate purification scheme using standard protein purification techniques. In another embodiment, NOVX proteins are produced by recombinant DNA techniques. Alternative to recombinant expression, a NOVX protein or polypeptide can be synthesized chemically using standard peptide synthesis techniques.

[0139] An “isolated” or “purified” polypeptide or protein or biologically-active portion thereof is substantially free of cellular material or other contaminating proteins from the cell or tissue source from which the NOVX protein is derived, or substantially free from chemical precursors or other chemicals when chemically synthesized. The language “substantially free of cellular material” includes preparations of NOVX proteins in which the protein is separated from cellular components of the cells from which it is isolated or recombinantly-produced. In one embodiment, the language “substantially free of cellular material” includes preparations of NOVX proteins having less than about 30% (by dry weight) of non-NOVX proteins (also referred to herein as a “contaminating protein”), more preferably less than about 20% of non-NOVX proteins, still more preferably less than about 10% of non-NOVX proteins, and most preferably less than about 5% of non-NOVX proteins. When the NOVX protein or biologically-active portion thereof is recombinantly-produced, it is also preferably substantially free of culture medium, i.e., culture medium represents less than about 20%, more preferably less than about 10%, and most preferably less than about 5% of the volume of the NOVX protein preparation.

[0140] The language “substantially free of chemical precursors or other chemicals” includes preparations of NOVX proteins in which the protein is separated from chemical precursors or other-chemicals that are involved in the synthesis of the protein. In one embodiment, the language “substantially free of chemical precursors or other chemicals” includes preparations of NOVX proteins having less than about 30% (by dry weight) of chemical precursors or non-NOVX chemicals, more preferably less than about 20% chemical precursors or non-NOVX chemicals, still more preferably less than about 10% chemical precursors or non-NOVX chemicals, and most preferably less than about 5% chemical precursors or non-NOVX chemicals.

[0141] Biologically-active portions of NOVX proteins include peptides comprising amino acid sequences sufficiently homologous to or derived from the amino acid sequences of the NOVX proteins (e.g., the amino acid sequence of SEQ ID NO:2n, wherein n is an integer between 1 and 606) that include fewer amino acids than the full-length NOVX proteins, and exhibit at least one activity of a NOVX protein. Typically, biologically-active portions comprise a domain or motif with at least one activity of the NOVX protein. A biologically-active portion of a NOVX protein can be a polypeptide which is, for example, 10, 25, 50, 100 or more amino acid residues in length.

[0142] Moreover, other biologically-active portions, in which other regions of the protein are deleted, can be prepared by recombinant techniques and evaluated for one or more of the functional activities of a native NOVX protein.

[0143] In an embodiment, the NOVX protein has an amino acid sequence of SEQ ID NO:2n, wherein n is an integer between 1 and 606. In other embodiments, the NOVX protein is substantially homologous to SEQ ID NO:2n, wherein n is an integer between 1 and 606, and retains the functional activity of the protein of SEQ ID NO:2n, wherein n is an integer between 1 and 606, yet differs in amino acid sequence due to natural allelic variation or mutagenesis, as described in detail, below. Accordingly, in another embodiment, the NOVX protein is a protein that comprises an amino acid sequence at least about 45% homologous to the amino acid sequence of SEQ ID NO:2n, wherein n is an integer between 1 and 606, and retains the functional activity of the NOVX proteins of SEQ ID NO:2n, wherein n is an integer between 1 and 606.

[0144] Determining Homology Between Two or More Sequences

[0145] To determine the percent homology of two amino acid sequences or of two nucleic acids, the sequences are aligned for optimal comparison purposes (e.g., gaps can be introduced in the sequence of a first amino acid or nucleic acid sequence for optimal alignmentwith a second amino or nucleic acid sequence). The amino acid residues or nucleotides at corresponding amino acid positions ornucleotide positions are then compared. When a position in the first sequence is occupied by the same amino acid residue or nucleotide as the corresponding position in the second sequence, then the molecules are homologous at that position (i.e., as used herein amino acid or nucleic acid “homology” is equivalent to amino acid or nucleic acid “identity”).

[0146] The nucleic acid sequence homology may be determined as the degree of identity between two sequences. The homology may be determined using computer programs known in the art, such as GAP software provided in the GCG program package. See, Needleman and Wunsch, 1970. J Mol Biol 48: 443-453. Using GCG GAP software with the following settings for nucleic acid sequence comparison: GAP creation penalty of 5.0 and GAP extension penalty of 0.3, the coding region of the analogous nucleic acid sequences referred to above exhibits a degree of identity preferably of at least 70%, 75%, 80%, 85%, 90%, 95%, 98%, or 99%, with the CDS (encoding) part of the DNA sequence of SEQ ID NO:2n−1, wherein n is an integer between 1 and 606.

[0147] The term “sequence identity” refers to the degree to which two polynucleotide or polypeptide sequences are identical on a residue-by-residue basis over a particular region of comparison. The term “percentage of sequence identity” is calculated by comparing two optimally aligned sequences over that region of comparison, determining the number of positions at which the identical nucleic acid base (e.g., A, T, C, G. U, or I, in the case of nucleic acids) occurs in both sequences to yield the number of matched positions, dividing the number of matched positions by the total number of positions in the region of comparison (i.e., the window size), and multiplying the result by 100 to yield the percentage of sequence identity. The term “substantial identity” as used herein denotes a characteristic of a polynucleotide sequence, wherein the polynucleotide comprises a sequence that has at least 80 percent sequence identity, preferably at least 85 percent identity and often 90 to 95 percent sequence identity, more usually at least 99 percent sequence identity as compared to a reference sequence over a comparison region.

[0148] Chimeric and Fusion Proteins

[0149] The invention also provides NOVX chimeric or fusion proteins. As used herein, a NOVX “chimeric protein” or “fusion protein” comprises a NOVX polypeptide operatively-linked to a non-NOVX polypeptide. An “NOVX polypeptide” refers to a polypeptide having an amino acid sequence corresponding to a NOVX protein of SEQ ID NO:2n, wherein n is an integer between 1 and 606, whereas a “non-NOVX polypeptide” refers to a polypeptide having an amino acid sequence corresponding to a protein that is not substantially homologous to the NOVX protein, e.g., a protein that is different from the NOVX protein and that is derived from the same or a different organism. Within a NOVX fusion protein the NOVX polypeptide can correspond to all or a portion of a NOVX protein. In one embodiment, a NOVX fusion protein comprises at least one biologically-active portion of a NOVX protein. In another embodiment, a NOVX fusion protein comprises at least two biologically-active portions of a NOVX protein. In yet another embodiment, a NOVX fusion protein comprises at least three biologically-active portions of a NOVX protein. Within the fusion protein, the term “operatively-linked” is intended to indicate that the NOVX polypeptide and the non-NOVX polypeptide are fused in-frame with one another. The non-NOVX polypeptide can be fused to the N-terminus or C-terminus of the NOVX polypeptide.

[0150] In one embodiment, the fusion protein is a GST-NOVX fusion protein in which the NOVX sequences are fused to the C-terminus of the GST (glutathione S-transferase) sequences. Such fusion proteins can facilitate the purification of recombinant NOVX polypeptides.

[0151] In another embodiment, the fusion protein is a NOVX protein containing a heterologous signal sequence at its N-terminus. In certain host cells (e.g., mammalian host cells), expression and/or secretion of NOVX can be increased through use of a heterologous signal sequence.

[0152] In yet another embodiment, the fusion protein is a NOVX-immunoglobulin fusion protein in which the NOVX sequences are fused to sequences derived from a member of the immunoglobulin protein family. The NOVX-immunoglobulin fusion proteins of the invention can be incorporated into pharmaceutical compositions and administered to a subject to inhibit an interaction between a NOVX ligand and a NOVX protein on the surface of a cell, to thereby suppress NOVX-mediated signal transduction in vivo. The NOVX-immunoglobulin fusion proteins can be used to affect the bioavailability of a NOVX cognate ligand. Inhibition of the NOVX ligand/NOVX interaction may be useful therapeutically for both the treatment of proliferative and differentiative disorders, as well as modulating (e.g. promoting or inhibiting) cell survival. Moreover, the NOVX-immunoglobulin fusion proteins of the invention can be used as immunogens to produce anti-NOVX antibodies in a subject, to purify NOVX ligands, and in screening assays to identify molecules that inhibit the interaction of NOVX with a NOVX ligand.

[0153] A NOVX chimeric or fusion protein of the invention can be produced by standard recombinant DNA techniques. For example, DNA fragments coding for the different polypeptide sequences are ligated together in-frame in accordance with conventional techniques, e.g., by employing blunt-ended or stagger-ended termini for ligation, restriction enzyme digestion to provide for appropriate termini, filling-in of cohesive ends as appropriate, alkaline phosphatase treatment to avoid undesirable joining, and enzymatic ligation. In another embodiment, the fusion gene can be synthesized by conventional techniques including automated DNA synthesizers. Alternatively, PCR amplification of gene fragments can be carried out using anchor primers that give rise to complementary overhangs between two consecutive gene fragments that can subsequently be annealed and reamplified to generate a chimeric gene sequence (see, e.g., Ausubel, et al. (eds.) CURRENT PROTOCOLS IN MOLECULAR BIOLOGY, John Wiley & Sons, 1992). Moreover, many expression vectors are commercially available that already encode a fusion moiety (e.g., a GST polypeptide). A NOVX-encoding nucleic acid can be cloned into such an expression vector such that the fusion moiety is linked in-frame to the NOVX protein.

[0154] NOVX Agonists and Antagonists

[0155] The invention also pertains to variants of the NOVX proteins that function as either NOVX agonists (i.e., mimetics) or as NOVX antagonists. Variants of the NOVX protein can be generated by mutagenesis (e.g., discrete point mutation or truncation of the NOVX protein). An agonist of the NOVX protein can retain substantially the same, or a subset of, the biological activities of the naturally occurring form of the NOVX protein. An antagonist of the NOVX protein can inhibit one or more of the activities of the naturally occurring form of the NOVX protein by, for example, competitively binding to a downstream or upstream member of a cellular signaling cascade which includes the NOVX protein. Thus, specific biological effects can be elicited by treatment with a variant of limited function. In one embodiment, treatment of a subject with a variant having a subset of the biological activities of the naturally occurring form of the protein has fewer side effects in a subject relative to treatment with the naturally occurring form of the NOVX proteins.

[0156] Variants of the NOVX proteins that function as either NOVX agonists (ie., mimetics) or as NOVX antagonists can be identified by screening combinatorial libraries of mutants (e.g., truncation mutants) of the NOVX proteins for NOVX protein agonist or antagonist activity. In one embodiment, a variegated library of NOVX variants is generated by combinatorial mutagenesis at the nucleic acid level and is encoded by a variegated gene library. A variegated library of NOVX variants can be produced by, for example, enzymatically ligating a mixture of synthetic oligonucleotides into gene sequences such that a degenerate set of potential NOVX sequences is expressible as individual polypeptides, or alternatively, as a set of larger fusion proteins (e.g., for phage display) containing the set of NOVX sequences therein. There are a variety of methods which can be used to produce libraries of potential NOVX variants from a degenerate oligonucleotide sequence. Chemical synthesis of a degenerate gene sequence can be performed in an automatic DNA synthesizer, and the synthetic gene then ligated into an appropriate expression vector. Use of a degenerate set of genes allows for the provision, in one mixture, of all of the sequences encoding the desired set of potential NOVX sequences. Methods for synthesizing degenerate oligonucleotides are well-known within the art. See, e.g., Narang, 1983. Tetrahedron 39: 3; Itakura, et al., 1984. Annu. Rev. Biochem. 53: 323; Itakura, et al., 1984. Science 198: 1056; Ike, et al., 1983. Nucl. Acids Res. 11: 477.

[0157] Polypeptide Libraries

[0158] In addition, libraries of fragments of the NOVX protein coding sequences can be used to generate a variegated population of NOVX fragments for screening and subsequent selection of variants of a NOVX protein. In one embodiment, a library of coding sequence fragments can be generated by treating a double stranded PCR fragment of a NOVX coding sequence with a nuclease under conditions wherein nicking occurs only about once per molecule, denaturing the double stranded DNA, renaturing the DNA to form double-stranded DNA that can include sense/antisense pairs from different nicked products, removing single stranded portions from reformed duplexes by treatment with SI nuclease, and ligating the resulting fragment library into an expression vector. By this method, expression libraries can be derived which encodes N-terminal and internal fragments of various sizes of the NOVX proteins.

[0159] Various techniques are known in the art for screening gene products of combinatorial libraries made by point mutations or truncation, and for screening cDNA libraries for gene products having a selected property. Such techniques are adaptable for rapid screening of the gene libraries generated by the combinatorial mutagenesis of NOVX proteins. The most widely used techniques, which are amenable to high throughput analysis, for screening large gene libraries typically include cloning the gene library into replicable expression vectors, transforming appropriate cells with the resulting library of vectors, and expressing the combinatorial genes under conditions in which detection of a desired activity facilitates isolation of the vector encoding the gene whose product was detected. Recursive ensemble mutagenesis (REM), a new technique that enhances the frequency of functional mutants in the libraries, can be used in combination with the screening assays to identify NOVX variants. See, e.g., Arkin and Yourvan, 1992. Proc. Natl. Acad. Sci. USA 89: 7811-7815; Delgrave, et al., 1993. Protein Engineering 6:327-331.

Anti-NOVX Antibodies

[0160] Included in the invention are antibodies to NOVX proteins, or fragments of NOVX proteins. The term “antibody” as used herein refers to immunoglobulin molecules and immunologically active portions of immunoglobulin (Ig) molecules, i.e., molecules that contain an antigen binding site that specifically binds (immunoreacts with) an antigen. Such antibodies include, but are not limited to, polyclonal, monoclonal, chimeric, single chain, F_{ab}, F_{ab′} and F_{(ab′)2} fragments, and an F_{ab} expression library. In general, antibody molecules obtained from humans relates to any of the classes IgG, IgM, IgA, IgE and IgD, which differ from one another by the nature of the heavy chain present in the molecule. Certain classes have subclasses as well, such as IgG₁, IgG₂, and others. Furthermore, in humans, the light chain may be a kappa chain or a lambda chain. Reference herein to antibodies includes a reference to all such classes, subclasses and types of human antibody species.

[0161] An isolated protein of the invention intended to serve as an antigen, or a portion or fragment thereof, can be used as an immunogen to generate antibodies that immunospecifically bind the antigen, using standard techniques for polyclonal and monoclonal antibody preparation. The full-length protein can be used or, alternatively, the ! invention provides antigenic peptide fragments of the antigen for use as immunogens. An antigenic peptide fragment comprises at least 6 amino acid residues of the amino acid sequence of the full length protein, such as an amino acid sequence of SEQ ID NO:2n, wherein n is an integer between 1 and 606, and encompasses an epitope thereof such that X an antibody raised against the peptide forms a specific immune complex with the full length protein or with any fragment that contains the epitope. Preferably, the antigenic peptide comprises at least 10 amino acid residues, or at least 15 amino acid residues, or at least 20 amino acid residues, or at least 30 amino acid residues. Preferred epitopes encompassed by the antigenic peptide are regions of the protein that are located on its surface; commonly these are hydrophilic regions.

[0162] In certain embodiments of the invention, at least one epitope encompassed by the antigenic peptide is a region of NOVX that is located on the surface of the protein, e.g., a hydrophilic region. A hydrophobicity analysis of the human NOVX protein sequence will indicate which regions of a NOVX polypeptide are particularly hydrophilic and, therefore, are likely to encode surface residues useful for targeting antibody production. As a means for targeting antibody production, hydropathy plots showing regions of hydrophilicity and hydrophobicity may be generated by any method well known in the art, including, for example, the Kyte Doolittle or the Hopp Woods methods, either with or without Fourier transformation. See, e.g., Hopp and Woods, 1981, Proc. Nat. Acad. Sci. USA 78: 3824-3828; Kyte and Doolittle 1982, J. Mol. Biol. 157: 105-142, each incorporated herein by reference in their entirety. Antibodies that are specific for one or more domains within an antigenic protein, or derivatives, fragments, analogs or homologs thereof, are also provided herein.

[0163] I The term “epitope” includes any protein determinant capable of specific binding to an immunoglobulin or T-cell receptor. Epitopic determinants usually consist of chemically active surface groupings of molecules such as amino acids or sugar side chains and usually have specific three dimensional structural characteristics, as well as specific charge characteristics. A NOVX polypeptide or a fragment thereof comprises at least one antigenic epitope. An anti-NOVX antibody of the present invention is said to specifically bind to antigen NOVX when the equilibrium binding constant (K_{D}) is ≦1 μM, preferably ≦100 nM, more preferably ≦10 nM, and most preferably ≦100 pM to about 1 pM, as measured by assays including radioligand binding assays or similar assays known to skilled artisans.

[0164] A protein of the invention, or a derivative, fragment, analog, homolog or ortholog thereof, may be utilized as an immunogen in the generation of antibodies that immunospecifically bind these protein components.

[0165] Various procedures known within the art may be used for the production of polyclonal or monoclonal antibodies directed against a protein of the invention, or against derivatives, fragments, analogs homologs or orthologs thereof (see, for example, Antibodies: A Laboratory Manual, Harlow E, and Lane D, 1988, Cold Spring Harbor Laboratory Press, Cold Spring Harbor, N.Y., incorporated herein by reference). Some of these antibodies are discussed below.

[0166] Polyclonal Antibodies

[0167] For the production of polyclonal antibodies, various suitable host animals (e.g., rabbit, goat, mouse or other mammal) may be immunized by one or more injections with the native protein, a synthetic variant thereof, or a derivative of the foregoing. An appropriate immunogenic preparation can contain, for example, the naturally occurring immunogenic protein, a chemically synthesized polypeptide representing the immunogenic protein, or a recombinantly expressed immunogenic protein. Furthermore, the protein may be conjugated to a second protein known to be immunogenic in the mammal being immunized. Examples of such immunogenic proteins include but are not limited to keyhole limpet hemocyanin, serum albumin, bovine thyroglobulin, and soybean trypsin inhibitor. The preparation can further include an adjuvant. Various adjuvants used to increase the immunological response include, but are not limited to, Freund's (complete and incomplete), mineral gels (e.g., aluminum hydroxide), surface active substances (e.g., lysolecithin, pluronic polyols, polyanions, peptides, oil emulsions, dinitrophenbl, etc.), adjuvants usable in humans such as Bacille Calmette-Guerin and Corynebacterium parvum, or similar immunostimulatory agents. Additional examples of adjuvants which can be employed include MPL-TDM adjuvant (monophosphoryl Lipid A, synthetic trehalose dicorynomycolate).

[0168] The polyclonal antibody molecules directed against the immunogenic protein can be isolated from the mammal (e.g., from the blood) and further purified by well known techniques, such as affinity chromatography using protein A or protein G, which provide primarily the IgG fraction of immune serum. Subsequently, or alternatively, the specific antigen which is the target of the immunoglobulin sought, or an epitope thereof, may be immobilized on a column to purify the immune specific antibody by immunoaffinity chromatography. Purification of immunoglobulins is discussed, for example, by D. Wilkinson (The Scientist, published by The Scientist, Inc., Philadelphia Pa., Vol. 14, No. 8 (Apr. 17, 2000), pp. 25-28).

[0169] Monoclonal Antibodies

[0170] The term “monoclonal antibody” (MAb) or “monoclonal antibody composition”, as used herein, refers to a population of antibody molecules that contain only one molecular species of antibody molecule consisting of a unique light chain gene product and a unique heavy chain gene product. In particular, the complementarity determining regions (CDRs) of the monoclonal antibody are identical in all the molecules of the population. MAbs thus contain an antigen binding site capable of immunoreacting with a particular epitope of the antigen characterized by a unique binding affinity for it.

[0171] Monoclonal antibodies can be prepared using hybridoma methods, such as those described by Kohler and Milstein, Nature, 256:495 (1975). In a hybridoma method, a mouse, hamster, or other appropriate host animal, is typically immunized with an immunizing agent to elicit lymphocytes that produce or are capable of producing antibodies that will specifically bind to the immunizing agent. Alternatively, the lymphocytes can be immunized in vitro.

[0172] The immunizing agent will typically include the protein antigen, a fragment thereof or a fusion protein thereof. Generally, either peripheral blood lymphocytes are used if cells of human origin are desired, or spleen cells-or lymph node cells are used if non-human mammalian sources are desired. The lymphocytes are then fused with an immortalized cell line using a suitable fusing agent, such as polyethylene glycol, to form a hybridoma cell (Goding, Monoclonal Antibodies: Principles and Practice, Academic Press, (1986) pp. 59-103). Immortalized cell lines are usually transformed mammalian cells, particularly myeloma cells of rodent, bovine and human origin. Usually, rat or mouse myeloma cell lines are employed. The hybridoma cells can be cultured in a suitable culture medium that preferably contains one or more substances that inhibit the growth or survival of the unfused, immortalized cells. For example, if the parental cells lack the enzyme hypoxanthine guanine phosphoribosyl transferase (HGPRT or HPRT), the culture medium for the hybridomas typically will include hypoxanthine, aminopterin, and thymidine (“HAT medium”), which substances prevent the growth of HGPRT-deficient cells.

[0173] Preferred immortalized cell lines are those that fuse efficiently, support stable high level expression of antibody by the selected antibody-producing cells, and are sensitive to a medium such as HAT medium. More preferred immortalized cell lines are murine myeloma lines, which can be obtained, for instance, from the Salk Institute Cell Distribution Center, San Diego, Calif. and the American Type Culture Collection, Manassas, Virginia. Human myeloma and mouse-human heteromyeloma cell lines also have been described for the production of human monoclonal antibodies (Kozbor, J. Immunol., 133:3001 (1984); Brodeur et al., Monoclonal Antibody Production Techniques and Applications, Marcel Dekker, Inc., New York, (1987) pp. 51-63).

[0174] The culture medium in which the hybridoma cells are cultured can then be assayed for the presence of monoclonal antibodies directed against the antigen. Preferably, the binding specificity of monoclonal antibodies produced by the hybridoma cells is determined by immunoprecipitation or by an in vitro binding assay, such as radioimmunoassay (RIA) or enzyme-linked immunoabsorbent assay (ELISA). Such techniques and assays are known in the art. The binding affinity of the monoclonal antibody can, for example, be determined by the Scatchard analysis of Munson and Pollard, Anal. Biochem., 107:220 (1980). It is an objective, especially important in therapeutic applications of monoclonal antibodies, to identify antibodies having a high degree of specificity and a high binding affinity for the target antigen.

[0175] After the desired hybridoma cells are identified, the clones can be subcloned by limiting dilution procedures and grown by standard methods (Goding,1986). Suitable culture media for this purpose include, for example, Dulbecco's Modified Eagle's Medium and RPMI-1640 medium. Altematively,the hybridoma cells can be grown in vivo as ascites in a mammal.

[0176] The monoclonal antibodies secreted by the subclones can be isolated or purified from the culture medium or ascites fluid by conventional immunoglobulin purification procedures such as, for example, protein A-Sepharose, hydroxylapatite chromatography, gel electrophoresis, dialysis, or affinity chromatography.

[0177] The monoclonal antibodies can also be made by recombinant DNA methods, such as those described in U.S. Pat. No. 4,816,567. DNA encoding the monoclonal antibodies of the invention can be readily isolated and sequenced using conventional procedures (e.g., by using oligonucleotide probes that are capable of binding specifically to genes encoding the heavy and light chains of murine antibodies). The hybridoma cells of the invention serve as a preferred source of such DNA. Once isolated, the DNA can be placed into expression vectors, which are then transfected into host cells such as simian COS cells, Chinese hamster ovary (CHO) cells, or myeloma cells that do not otherwise produce immunoglobulin protein, to obtain the synthesis of monoclonal antibodies in the recombinant host cells. The DNA also can be modified, for example, by substituting the coding sequence for human heavy and light chain constant domains in place of the homologous murine sequences (U.S. Pat. No. 4,816,567; Morrison, Nature 368, 812-13 (1994)) or by covalently joining to the immunoglobulin coding sequence all or part of the coding sequence for a non immunoglobulin polypeptide. Such a non-immunoglobulin polypeptide can be substituted for the constant domains of an antibody of the invention, or can be substituted for the variable domains of one antigen-combining site of an antibody of the invention to create a chimeric bivalent antibody.

[0178] Humanized Antibodies

[0179] The antibodies directed against the protein antigens of the invention can further comprise humanized antibodies or human antibodies. These antibodies are suitable for administration to humans without engendering an immune response by the human against the administered immunoglobulin. Humanized forms of antibodies are chimeric immunoglobulins, immunoglobulin chains or fragments thereof (such as Fv, Fab, Fab′, F(ab′)₂ or other antigen-binding subsequences of antibodies) that are principally comprised of the sequence of a human immunoglobulin, and contain minimal sequence derived from a non-human immunoglobulin. Humanization can be performed following the method of Winter and co-workers (Jones et al.;,Nature, 321:522-525 (1986); Riechmann et al., Nature, 332:323-327 (1988); Verhoeyen et al., Science, 239:1534-1536 (1988)), by substituting rodent CDRs or CDR sequences for the corresponding sequences of a human antibody. (See also U.S. Pat. No. 5,225,539.) In some instances, Fv framework residues of the human immunoglobulin are replaced by corresponding non-human residues. Humanized antibodies can also comprise residues which are found neither in the recipient antibody nor in the imported CDR or framework sequences. In general, the humanized antibody will comprise substantially all of at least one, and typically two, variable domains, in which all or substantially all of the CDR regions correspond to those of a non-human immunoglobulin and all or substantially all of the framework regions are those of a human immunoglobulin consensus sequence. The humanized antibody optimally also will comprise at least a portion of an immunoglobulin constant region (Fc), typically that of a human immunoglobulin (Jones et al., 1986; Riechmnann et al., 1988; and Presta, Curr. Op. Struct. Biol., 2:593-596 (1992)).

[0180] Human Antibodies

[0181] Fully human antibodies essentially relate to antibody molecules in which the entire sequence of both the light chain and the heavy chain, including the CDRs, arise from human genes. Such antibodies are termed “human antibodies”, or “fully human antibodies” herein. Human monoclonal antibodies can be prepared by the trioma technique; the human B-cell hybridoma technique (see Kozbor, et al., 1983 Immunol Today 4: 72) and the EBV hybridoma technique to produce human monoclonal antibodies (see Cole, et al., 1985 In: MONOCLONAL ANTIBODIES AND CANCER THERAPY, Alan R. Liss, Inc., pp. 77-96). Human monoclonal antibodies may be utilized in the practice of the present invention and may be produced by using human hybridomas (see Cote, et al., 1983. Proc Natl Acad Sci USA 80: 2026-2030) or by transforming human B-cells with Epstein Barr Virus in vitro (see Cole, et al., 1985 In: MONOCLONAL ANTIBODIES AND CANCER THERAPY, Alan R. Liss, Inc., pp. 77-96).

[0182] In addition, human antibodies can also be produced using additional techniques, including phage display libraries (Hoogenboom and Winter, J. Mol. Biol., 227:381 (1991); Marks et al., J. Mol. Biol., 222:581 (1991)). Similarly, human antibodies can be made by introducing human immunoglobulin loci into transgenic animals, e.g., mice in which the endogenous immunoglobulin genes have been partially or completely inactivated. Upon challenge, human antibody production is observed, which closely resembles that seen in humans in all respects, including gene rearrangement, assembly, and antibody repertoire. This approach is described, for example, in U.S. Pat. Nos. 5,545,807; 5,545,806; 5,569,825; 5,625,126; 5,633,425; 5,661,016, and in Marks et al. (Bio/Technology 10, 779-783 (1992)); Lonberg et al. (Nature 368 856-859 (1994)); Morrison ( Nature 368, 812-13 (1994)); Fishwild et al,( Nature Biotechnology 14, 845-51 (1996)); Neuberger (Nature Biotechnology 14, 826 (1996)); and Lonberg and Huszar (Intern. Rev. Immunol. 13 65-93 (1995)).

[0183] Human antibodies may additionally be produced using transgenic nonhuman animals which are modified so as to produce fully human antibodies rather than the animal's endogenous antibodies in response to challenge by an antigen. (See PCT publication WO94/02602). The endogenous genes encoding the heavy and light immunoglobulin chains in the nonhuman host have been incapacitated, and active loci encoding human heavy and light chain immunoglobulins are inserted into the host's genome. The human genes are incorporated, for example, using yeast artificial chromosomes containing the requisite human DNA segments. An animal which provides all the desired modifications is then obtained as progeny by crossbreeding intermediate transgenic animals containing fewer than the full complement of the modifications. The preferred embodiment of such a nonhuman animal is a mouse, and is termed the Xenomouse™ as disclosed in PCT publications WO 96/33735 and WO 96/34096. This animal produces B cells which secrete fully human immunoglobulins. The antibodies can be obtained directly from the animal after immunization with an immunogen of interest, as, for example, a preparation of a polyclonal antibody, or alternatively from immortalized B cells derived from the animal, such as hybridomas producing monoclonal antibodies. Additionally, the genes encoding the immunoglobulins with human variable regions can be recovered and expressed to obtain the antibodies directly, or can be further modified to obtain analogs of antibodies such as, for example, single chain Fv molecules.

[0184] An example of a method of producing a nonhuman host, exemplified as a mouse, lacking expression of an endogenous immunoglobulin heavy chain is disclosed in U.S. Pat. No. 5,939,598. It can be obtained by a method including deleting the J segment genes from at least one endogenous heavy chain locus in an embryonic stem cell to prevent rearrangement of the locus and to prevent formation of a transcript of a rearranged immunoglobulin heavy chain locus, the deletion being effected by a targeting vector containing a gene encoding a selectable marker; and producing from the embryonic stem cell a transgenic mouse whose somatic and germ cells contain the gene encoding the selectable marker.

[0185] A method for producing an antibody of interest, such as a human antibody, is disclosed in U.S. Pat. No. 5,916,771. It includes introducing an expression vector that contains a nucleotide sequence encoding a heavy chain into one mammalian host cell in culture, introducing an expression vector containing a nucleotide sequence encoding a light chain into another mammalian host cell, and fusing the two cells to form a hybrid cell. The hybrid cell expresses an antibody containing the heavy chain and the light chain.

[0186] In a further improvement on this procedure, a method for identifying a clinically relevant epitope on an immunogen, and a correlative method for selecting an antibody that binds immunospecifically to the relevant epitope with high affinity, are disclosed in PCT publication WO 99/53049.

[0187] F_{ab} Fragments and Single Chain Antibodies

[0188] According to the invention, techniques can be adapted for the production of single-chain antibodies specific to an antigenic protein of the invention (see e.g., U.S. Pat. No. 4,946,778). In addition, methods can be adapted for the construction of F_{ab} expression libraries (see e.g., Huse, et al., 1989 Science 246: 1275-1281) to allow rapid and effective identification of monoclonal F_{ab} fragments with the desired specificity for a protein or derivatives, fragments, analogs or homologs thereof. Antibody fragments that contain the idiotypes to a protein antigen may be produced by techniques known in the art including, but not limited to: (i) an F_{(ab′)2} fragment produced by pepsin digestion of an antibody molecule; (ii) an F_{ab} fragment generated by reducing the disulfide bridges of an F_{(ab′)2} fragment; (iii) an F_{ab} fragment generated by the treatment of the antibody molecule with papain and a reducing agent and (iv) Fᵥ fragments.

[0189] Bispecific Antibodies

[0190] Bispecific antibodies are monoclonal, preferably human or humanized, antibodies that have binding specificities for at least two different antigens. In the present case, one of the binding specificities is for an antigenic protein of the invention. The second binding target is any other antigen, and advantageously is a cell-surface protein or receptor or receptor subunit.

[0191] Methods for making bispecific antibodies are known in the art. Traditionally, the recombinant production of bispecific antibodies is based on the co-expression of two immunoglobulin heavy-chain/light-chain pairs, where the two heavy chains have different specificities (Mlstein and Cuello, Nature, 305:537-539 (1983)). Because of the random assortment of immunoglobulin heavy and light chains, these hybridomas (quadromas) produce a potential mixture of ten different antibody molecules, of which only one has the correct bispecific structure. The purification of the correct molecule is usually accomplished by affinity chromatography steps. Similar procedures are disclosed in WO 93/08829, published 13 May 1993, and in Traunecker et al., EMBO J., 10:3655-3659 (1991).

[0192] Antibody variable domains with the desired binding specificities (antibody-antigen combining sites) can be fused to immunoglobulin constant domain sequences. The fusion preferably is with an immunoglobulin heavy-chain constant domain, comprising at least part of the hinge, CH2, and CH3 regions. It is preferred to have the first heavy-chain constant region (CH1) containing the site necessary for light-chain binding present in at least one of the fusions. DNAs encoding the immunoglobulin heavy-chain fusions and, if desired, the immunoglobulin light chain, are inserted into separate expression vectors, and are co-transfected into a suitable host organism. For further details of generating bispecific antibodies see, for example, Suresh et al., Methods in Enzymology, 121:210 (1986).

[0193] According to another approach described in WO 96/27011, the interface between a pair of antibody molecules can be engineered to maximize the percentage of heterodimers which are recovered from recombinant cell culture. The preferred interface comprises at least a part of the CH3 region of an antibody constant domain. In this method, one or more small amino acid side chains from the interface of the first antibody molecule are replaced with larger side chains (e.g. tyrosine or tryptophan). Compensatory “cavities” of identical or similar size to the large side chain(s) are created on the interface of the second antibody molecule by replacing large amino acid side chains with smaller ones (e.g. alanine or threonine). This provides a mechanism for increasing the yield of the heterodimer over other unwanted end-products such as homodimers.

[0194] Bispecific antibodies can be prepared as full length antibodies or antibody fragments (e.g. F(ab′)₂ bispecific antibodies). Techniques for generating bispecific antibodies from antibody fragments have been described in the literature. For example, bispecific antibodies can be prepared using chemical linkage. Brennan et al., Science 229:81 (1985) describe a procedure wherein intact antibodies are proteolytically cleaved to generate F(ab′)₂ fragments. These fragments are reduced in the presence of the dithiol complexing agent sodium arsenite to stabilize vicinal dithiols and prevent intermolecular disulfide formation. The Fab′ fragments generated are then converted to thionitrobenzoate (TNB) derivatives. One of the Fab′-TNB derivatives is then reconverted to the Fab′-thiol by reduction with mercaptoethylamnine and is mixed with an equimolar amount of the other Fab′-TNB derivative to form the bispecific antibody. The bispecific antibodies produced can be used as agents for the selective immobilization of enzymes.

[0195] Additionally, Fab′ fragments can be directly recovered from E. coli and chemically coupled to form bispecific antibodies. Shalaby et al., J. Exp. Med. 175:217-225 (1992) describe the production of a fully humanized bispecific antibody F(ab′)₂ molecule. Each Fab′ fragment was separately secreted from E. coli and subjected to directed chemical coupling in vitro to form the bispecific antibody. The bispecific antibody thus formed was able to bind to cells overexpressing the ErbB2 receptor and normal human T cells, as well as trigger the lytic activity of human cytotoxic lymphocytes against human breast tumor targets.

[0196] Various techniques for making and isolating bispecific antibody fragments directly from recombinant cell culture have also been described. For example, bispecific antibodies have been produced using leucine zippers. Kostelny et al., J. Immunol. 148(5):1547-1553 (1992). The leucine zipper peptides from the Fos and Jun proteins were linked to the Fab′ portions of two different antibodies by gene fusion. The antibody homodimers were reduced at the hinge region to form monomers and then re-oxidized to form the antibody heterodimers. This method can also be utilized for the production of antibody homodimers. The “diabody” technology described by Hollinger et al., Proc. Natl. Acad. Sci. USA 90:6444-6448 (1993) has provided an alternative mechanism for making bispecific antibody fragments. The fragments comprise a heavy-chain variable domain (V_{H}) connected to a light-chain variable domain (V_{L}) by a linker which is too short to allow pairing between the two domains on the same chain. Accordingly, the V_{H} and V_{L} domains of one fragment are forced to pair with the complementary V_{L} and V_{H} domains of another fragment, thereby forming two antigen-binding sites. Another strategy for making bispecific antibody fragments by the use of single-chain Fv (sFv) dimers has also been reported. See, Gruber et al., J. Imunol. 152:5368 (1994).

[0197] Antibodies with more than two valencies are contemplated. For example, trispecific antibodies can be prepared. Tutt et al., J. Immunol. 147:60 (1991).

[0198] Exemplary bispecific antibodies can bind to two different epitopes, at least one of which originates in the protein antigen of the invention. Alternatively, an anti-antigenic arm of an immunoglobulinr molecule can be combined with an arm which binds to a triggering molecule on a leukocyte such as a T-cell receptor molecule (e.g. CD2, CD3, CD28, or B7), or Fc receptors for IgG (FcγR), such as FcγRI (CD64), FcγRII (CD32) and FcγRIII (CD16) so as to focus cellular defense mechanisms to the cell expressing the particular antigen. Bispecific antibodies can also be used to direct cytotoxic agents to cells which express a particular antigen. These antibodies possess an antigen-binding arm and an arm which binds a cytotoxic agent or a radionuclide chelator, such as EOTUBE, DPTA, DOTA, or TETA. Another bispecific antibody of interest binds the protein antigen described herein and further binds tissue factor (TF).

[0199] Heteroconjugate Antibodies

[0200] Heteroconjugate antibodies are also within the scope of the present invention. Heteroconjugate antibodies are composed of two covalently joined antibodies. Such antibodies have, for example, been proposed to target immune system cells to unwanted cells (U.S. Pat. No. 4,676,980), and for treatment of HIV infection (WO 91/00360; WO 92/200373; EP 03089). It is contemplated that the antibodies can be prepared in vitro using known methods in synthetic protein chemistry, including those involving crosslinking agents. For example, immunotoxins can be constructed using a disulfide exchange reaction or by forming a thioether bond. Examples of suitable reagents for this purpose include iminothiolate and methyl-4-mercaptobutyrimidate and those disclosed, for example, in U.S. Pat. No. 4,676,980.

[0201] Effector Function Engineering

[0202] It can be desirable to modify the antibody of the invention with respect to effector function, so as to enhance, e.g., the effectiveness of the antibody in treating cancer. For example, cysteine residue(s) can be introduced into the Fc region, thereby allowing interchain disulfide bond formation in this region. The homodimeric antibody thus generated can have improved internalization capability and/or increased complement-mediated cell killing and antibody-dependent cellular cytotoxicity (ADCC). See Caron et al., J. Exp Med., 176: 1191-1195 (1992) and Shopes, J. Immunol., 148: 2918-2922 (1992). Homodimeric antibodies with enhanced anti-tumor activity can also be prepared using heterobifunctional cross-linkers as described in Wolff et al. Cancer Research, 53: 2560-2565 (1993). Alternatively, an antibody can be engineered that has dual Fc regions and can thereby have enhanced complement lysis and ADCC capabilities. See Stevenson et al., Anti-Cancer Drug Design, 3: 219-230 (1989).

[0203] Immunoconjugates

[0204] The invention also pertains to immunoconjugates comprising an antibody conjugated to a cytotoxic agent such as a chemotherapeutic agent, toxin (e.g., an enzymatically active toxin of bacterial, fungal, plant, or animal origin, or fragments thereof), or a radioactive isotope (i.e., a radioconjugate).

[0205] Chemotherapeutic agents useful in the generation of such immunoconjugates have been described above. Enzymatically active toxins and fragments thereof that can be used include diphtheria A chain, nonbinding active fragments of diphtheria toxin, exotoxin A chain (from Pseudomonas aeruginosa), ricin A chain, abrin A chain, modeccin A chain, alpha-sarcin, Aleurites fordii proteins, dianthin proteins, Phytolaca americana proteins (PAPI, PAPII, and PAP-S), momordica charantia inhibitor, curcin, crotin, sapaonaria officinalis inhibitor, gelonin, mitogellin, restrictocin, phenomycin, enomycin, and the tricothecenes. A variety of radionuclides are available for the production of radioconjugated antibodies. Examples include ²¹²Bi, ¹³¹I, ¹³¹In, ⁹⁰Y, and ¹⁸⁶Re.

[0206] Conjugates of the antibody and cytotoxic agent are made using a variety of bifunctional protein-coupling agents such as N-succinimidyl-3-(2-pyridyldithiol) propionate (SPDP), iminothiolane (IT), bifunctional derivatives of imidoesters (such as dimethyl adipimidate HCL), active esters (such as disuccinimidyl suberate), aldehydes (such as glutareldehyde), bis-azido compounds (such as bis (p-azidobenzoyl) hexanediamine), bis-diazonium derivatives (such as bis-(p-diazoniumbenzoyl)-ethylenediamine), diisocyanates (such as tolyene 2,6-diisocyanate), and bis-active fluorine compounds (such as 1,5-difluoro-2,4-dinitrobenzene). For example, a ricin immunotoxin can be prepared as described in Vitetta et al., Science, 238: 1098 (1987). Carbon-14-labeled 1-isothiocyanatobenzyl-3-methyldiethylene triaminepentaacetic acid (MX-DTPA) is an exemplary chelating agent for conjugation of radionucleotide to the antibody. See WO94/11026.

[0207] In another embodiment, the antibody can be conjugated to a “receptor” (such streptavidin) for utilization in tumor pretargeting wherein the antibody-receptor conjugate is administered to the patient, followed by removal of unbound conjugate from the circulation using a clearing agent and then administration of a “ligand” (e.g., avidin) that is in turn conjugated to a cytotoxic agent.

[0208] Immunoliposomes

[0209] The antibodies disclosed herein can also be formulated as immunoliposomes. Liposomes containing the antibody are prepared by methods known in the art, such as described in Epstein et al., Proc. Natl. Acad. Sci. USA, 82: 3688 (1985); Hwang et al., Proc. Natl Acad. Sci. USA, 77: 4030 (1980); and U.S. Pat. Nos. 4,485,045 and 4,544,545. Liposomes with enhanced circulation time are disclosed in U.S. Pat. No. 5,013,556.

[0210] Particularly useful liposomes can be generated by the reverse-phase evaporation method with a lipid composition comprising phosphatidylcholine, cholesterol, and PEG-derivatized phosphatidylethanolamine (PEG-PE). Liposomes are extruded through filters of defined pore size to yield liposomes with the desired diameter. Fab′ fragments of the antibody of the present invention can be conjugated to the liposomes as described in Martin et al., J. Biol. Chem., 257: 286-288 (1982) via a disulfide-interchange reaction. A chemotherapeutic agent (such as Doxorubicin) is optionally contained within the liposome. See Gabizon et al., J. National Cancer Inst., 81(19): 1484 (1989).

[0211] Diagnostic Applications of Antibodies Directed Against the Proteins of the Invention

[0212] In one embodiment, methods for the screening of antibodies that possess the desired specificity include, but are not limited to, enzyme linked immunosorbent assay (ELISA) and other immunologically mediated techniques known within the art. In a specific embodiment, selection of antibodies that are specific to a particular domain of an NOVX protein is facilitated by generation of hybridomas that bind to the fragment of an NOVX protein possessing such a domain. Thus, antibodies that are specific for a desired domain within an NOVX protein, or derivatives, fragments, analogs or homologs thereof, are also provided herein.

[0213] Antibodies directed against a NOVX protein of the invention may be used in methods known within the art relating to the localization and/or quantitation of a NOVX protein (e.g., for use in measuring levels of the NOVX protein within appropriate physiological samples, for use in diagnostic methods, for use in imaging the protein, and the like). In a given embodiment, antibodies specific to a NOVX protein, or derivative, fragment, analog or homolog thereof, that contain the antibody derived antigen binding domain, are utilized as pharmacologically active compounds (referred to hereinafter as “Therapeutics”).

[0214] An antibody specific for a NOVX protein of the invention (e.g., a monoclonal antibody or a polyclonal antibody) can be used to isolate a NOVX polypeptide by standard techniques, such as immunoaffinity, chromatography or immunoprecipitation. An antibody to a NOVX polypeptide can facilitate the purification of a natural NOVX antigen from cells, or of a recombinantly produced NOVX antigen expressed in host cells. Moreover, such an anti-NOVX antibody can be used to detect the antigenic NOVX protein (e.g., in a cellular lysate or cell supernatant) in order to evaluate the abundance and pattern of expression of the antigenic NOVX protein. Antibodies directed against a NOVX protein can be used diagnostically to monitor protein levels in tissue as part of a clinical testing procedure, e.g., to, for example, determine the efficacy of a given treatment regimen. Detection can be facilitated by coupling (ie., physically linking) the antibody to a detectable substance. Examples of detectable substances include various enzymes, prosthetic groups, fluorescent materials, luminescent materials, bioluminescent materials, and radioactive materials. Examples of suitable enzymes include horseradish peroxidase, alkaline phosphatase, β-galactosidase, or acetylcholinesterase; examples of suitable prosthetic group complexes include streptavidin/biotin and avidin/biotin; examples of suitable fluorescent materials include umbelliferone, fluorescein, fluorescein isothiocyanate, rhodamine, dichlorotriazinylamine fluorescein, dansyl chloride or phycoerythrin; an example of a luminescent material includes luminol; examples of bioluminescent materials include luciferase, luciferin, and aequorin, and examples of suitable radioactive material include ¹²⁵I, ¹³¹I, ³⁵S or ³H.

[0215] Antibody Therapeutics

[0216] Antibodies of the invention, including polyclonal, monoclonal, humanized and fully human antibodies, may used as therapeutic agents. Such agents will generally be employed to treat or prevent a disease or pathology in a subject. An antibody preparation, preferably one having high specificity and high affinity for its target antigen, is administered to the subject and will generally have an effect due to its binding with the target. Such an effect may be one of two kinds, depending on the specific nature of the interaction between the given antibody molecule and the target antigen in question. In the first instance, administration of the antibody may abrogate or inhibit the binding of the target with an endogenous ligand to which it naturally binds. In this case, the antibody binds to the target and masks a binding site of the naturally occurring ligand, wherein the ligand serves as an effector molecule. Thus the receptor mediates a signal transduction pathway for which ligand is responsible.

[0217] Alternatively, the effect may be one in which the antibody elicits a physiological result by virtue of binding to an effector binding site on the target molecule. In this case the target, a receptor having an endogenous ligand which may be absent or defective in the disease or pathology, binds the antibody as a surrogate effector ligand, initiating a receptor-based signal transduction event by the receptor.

[0218] A therapeutically effective amount of an antibody of the invention relates generally to the amount needed to achieve a therapeutic objective. As noted above, this may be a binding interaction between the antibody and its target antigen that, in certain cases, interferes with the functioning of the target, and in other cases, promotes a physiological response. The amount required to be administered will furthermore depend on the binding affinity of the antibody for its specific antigen, and will also depend on the rate at which an administered antibody is depleted from the free volume other subject to which it is administered. Common ranges for therapeutically effective dosing of an antibody or antibody fragment of the invention may be, by way of nonlimiting example, from about 0.1 mg/kg body weight to about 50 mg/kg body weight. Common dosing frequencies may range, for example, from twice daily to once a week.

[0219] Pharmaceutical Compositions of Antibodies

[0220] Antibodies specifically binding a protein of the invention, as well as other molecules identified by the screening assays disclosed herein, can be administered for the treatment of various disorders in the form of pharmaceutical cormpositions. Principles and considerations involved in preparing such compositions, as well as guidance in the choice of components are provided, for example, in Remington: The Science And Practice Of Pharmacy 19th ed. (Alfonso R. Gennaro, et al., editors) Mack Pub. Co., Easton, Pa.: 1995; Drug Absorption Enhancement: Concepts, Possibilities, Limitations, And Trends, Harwood Academic Publishers, Langhorne, Pa., 1994; and Peptide And Protein Drug Delivery (Advances In Parenteral Sciences, Vol. 4), 1991, M. Dekker, New York.

[0221] If the antigenic protein is intracellular and whole antibodies are used as inhibitors, internalizing antibodies are preferred. However, liposomes can also be used to deliver the antibody, or an antibody fragment, into cells. Where antibody fragments are used, the smallest inhibitory fragment that specifically binds to the binding domain of the target protein is preferred. For example, based upon the variable-region sequences of an antibody, peptide molecules can be designed that retain the ability to bind the target protein sequence. Such peptides can be synthesized chemically and/or produced by recombinant DNA technology. See, e.g., Marasco et al., Proc. Natl. Acad. Sci. USA, 90: 7889-7893 (1993). The formulation herein can also contain more than one active compound as necessary for the particular indication being treated, preferably those with complementary activities that do not adversely affect each other. Alternatively, or in addition, the composition can comprise an agent that enhances its function, such as, for example, a cytotoxic agent, cytokine, chemotherapeutic agent, or growth-inhibitory agent. Such molecules are suitably present in combination in amounts that are effective for the purpose intended.

[0222] The active ingredients can also be entrapped in microcapsules prepared, for example, by coacervation techniques or by interfacial polymerization, for example, hydroxymethylcellulose or gelatin-microcapsules and poly-(methylmethacrylate) microcapsules, respectively, in colloidal drug delivery systems (for example, liposomes, albumin microspheres, microemulsions, nano-particles, and nanocapsules) or in macroemulsions.

[0223] The formulations to be used for in vivo administration must be sterile. This is readily accomplished by filtration through sterile filtration membranes.

[0224] Sustained-release preparations can be prepared. Suitable examples of sustained-release preparations include semipermeable matrices of solid hydrophobic polymers containing the antibody, which matrices are in the form of shaped articles, e.g., films, or microcapsules. Examples of sustained-release matrices include polyesters, hydrogels (for example, poly(2-hydroxyethyl-methacrylate), or poly(vinylalcohol)), polylactides (U.S. Pat. No. 3,773,919), copolymers of L-glutamic acid and γ ethyl-L-glutamate, non-degradable ethylene-vinyl acetate, degradable lactic acid-glycolic acid copolymers such as the LUPRON DEPOT™ (injectable microspheres composed of lactic acid-glycolic acid copolymer and leuprolide acetate), and poly-D-(−)-3-hydroxybutyric acid. While polymers such as ethylene-vinyl acetate and lactic acid-glycolic acid enable release of molecules for over 100 days, certain hydrogels release proteins for shorter time periods.

[0225] ELISA Assay

[0226] An agent for detecting an analyte protein is an antibody capable of binding to an analyte protein, preferably an antibody with a detectable label. Antibodies can be polyclonal, or more preferably, monoclonal. An intact antibody, or a fragment thereof (e.g., F_{ab} or F_{(ab)2}) can be used. The term “labeled”, with regard to the probe or antibody, is intended to encompass direct labeling of the probe or antibody by coupling (i.e., physically linking) a detectable substance to the probe or antibody, as well as indirect labeling of the probe or antibody by reactivity with another reagent that is directly labeled. Examples of indirect labeling include detection of a primary antibody using a fluorescently-labeled secondary antibody and end-labeling of a DNA probe with biotin such that it can be detected with fluorescently-labeled streptavidin. The term “biological sample” is intended to include tissues, cells and biological fluids isolated from a subject, as well as tissues, cells and fluids present within a subject. Included within the usage of the term “biological sample”, therefore, is blood and a fraction or component of blood including blood serum, blood plasma, or lymph. That is, the detection method of the invention can be used to detect an analyte mRNA, protein, or genomic DNA in a biological sample in vitro as well as in vivo. For example, in vitro techniques for detection of an analyte mRNA include Northern hybridizations and in situ hybridizations. In vitro techniques for detection of an analyte protein include enzyme linked immunosorbent assays (ELISAs), Western blots, immunoprecipitations, and immunofluorescence. In vitro techniques for detection of an analyte genomic DNA include Southern hybridizations. Procedures for conducting immunoassays are described, for example in “ELISA: Theory and Practice: Methods in Molecular Biology”, Vol. 42, J. R. Crowther (Ed.) Human Press, Totowa, N.J., 1995; “Immunoassay”, E. Diamandis and T. Christopoulus, Academic Press, Inc., San Diego, Calif., 1996; and “Practice and Theory of Enzyme Immunoassays”, P. Tijssen, Elsevier Science Publishers, Amsterdam, 1985. Furthermore, in vivo techniques for detection of an analyte protein include introducing into a subject a labeled anti-an analyte protein antibody. For example, the antibody can be labeled with a radioactive marker whose presence and location in a subject can be detected by standard imaging techniques.

NOVX Recombinant Expression Vectors and Host Cells

[0227] Another aspect of the invention pertains to vectors, preferably expression vectors, containing a nucleic acid encoding a NOVX protein, or derivatives, fragments, analogs or homologs thereof. As used herein, the term “vector” refers to a nucleic acid molecule capable of transporting another nucleic acid to which it has been linked. One type of vector is a “plasmid”, which refers to a circular double stranded DNA loop into which additional DNA segments can be ligated. Another type of vector is a viral vector, wherein additional DNA segments can be ligated into the viral genome. Certain vectors are capable of autonomous replication in a host cell into which they are introduced (e.g., bacterial vectors having a bacterial origin of replication and episomal mammalian vectors). Other vectors (e.g., non-episomal mammalian vectors) are integrated into the genome of a host cell upon introduction into the host cell, and thereby are replicated along with the host genome. Moreover, certain vectors are capable of directing the expression of genes to which they are operatively-linked. Such vectors are referred to herein as “expression vectors”. In general, expression vectors of utility in recombinant DNA techniques are often in the form of plasmids. In the present specification, “plasmid” and “vector” can be used interchangeably as the plasmid is the most commonly used form of vector. However, the invention is intended to include such other forms of expression vectors, such as viral vectors (e.g., replication defective retroviruses, adenoviruses and adeno-associated viruses), which serve equivalent functions.

[0228] The recombinant expression vectors of the invention comprise a nucleic acid of the invention in a form suitable for expression of the nucleic acid in a host cell, which means that the recombinant expression vectors include one or more regulatory sequences, selected on the basis of the host cells to be used for expression, that is operatively-linked to the nucleic acid sequence to be expressed. Within a recombinant expression vector, “operably-linked” is intended to mean that the nucleotide sequence of interest is linked to the regulatory sequence(s) in a manner that allows for expression of the nucleotide sequence (e.g.; in an in vitro transcription/translation system or in a host cell when the vector is introduced into the host cell).

[0229] The term “regulatory sequence” is intended to includes promoters, enhancers and other expression control elements (e.g., polyadenylation signals). Such regulatory sequences are described, for example, in Goeddel, GENE EXPRESSION TECHNOLOGY: METHODS IN ENZYMOLOGY 185, Academic Press, San Diego, Calif. (1990). Regulatory sequences include those that direct constitutive expression of a nucleotide sequence in many types of host cell and those that direct expression of the nucleotide sequence only in certain host cells (e.g., tissue-specific regulatory sequences). It will be appreciated by those skilled in the art that the design of the expression vector can depend on such factors as the choice of the host cell to be transformed, the level of expression of protein desired, etc. The expression vectors of the invention can be introduced into host cells to thereby produce proteins or peptides, including fusion proteins or peptides, encoded by nucleic acids as described herein (e.g., NOVX proteins, mutant forms of NOVX proteins, fusion proteins, etc.).

[0230] The recombinant expression vectors of the invention can be designed for expression of NOVX proteins in prokaryotic or eukaryotic cells. For example, NOVX proteins can be expressed in bacterial cells such as Escherichia coli, insect cells (using baculovirus expression vectors) yeast cells or mammalian cells. Suitable host cells are discussed further in Goeddel, GENE EXPRESSION TECHNOLOGY: METHODS IN ENZYMOLOGY 185, Academic Press, San Diego, Calif. (1990). Alternatively, the recombinant expression vector can be transcribed and translated in vitro, for example using T7 promoter regulatory sequences and 17 polymerase.

[0231] Expression of proteins in prokaryotes is most often carried out in Escherichia coli with vectors containing constitutive or inducible promoters directing the expression of either fusion or non-fusion proteins. Fusion vectors add a number of amino acids to a protein encoded therein, usually to the amino terminus of the recombinant protein. Such fusion vectors typically serve three purposes: (i) to increase expression of recombinant protein; (ii) to increase the solubility of the recombinant protein; and (iii) to aid in the purification of the recombinant protein by acting as a ligand in affinity purification. Often, in fusion expression vectors, a proteolytic cleavage site is introduced at the junction of the fusion moiety and the recombinant protein to enable separation of the recombinant protein from the fusion moiety subsequent to purification of the fusion protein. Such enzymes, and their cognate recognition sequences, include Factor Xa, thrombin and enterokinase. Typical fusion expression vectors include pGEX (Pharmacia Biotech Inc; Smith and Johnson, 1988. Gene 67: 31-40), pMAL (New England Biolabs, Beverly, Mass.) and pRIT5 (Pharmacia, Piscataway, N.J.) that fuse glutathione S-transferase (GST), maltose E binding protein, or protein A, respectively, to the target recombinant protein.

[0232] Examples of suitable inducible non-fusion E. coli expression vectors include pTrc (Amrann et al., (1988) Gene 69:301-315) and pET 11d (Studier et al., GENE EXPRESSION TECHNOLOGY: METHODS IN ENZYMOLOGY 185, Academic Press, San Diego, Calif. (1990) 60-89).

[0233] One strategy to maximize recombinant protein expression in E. coli is to express the protein in a host bacteria with an impaired capacity to proteolytically cleave the recombinant protein. See, e.g., Gottesman, GENE EXPRESSION TECHNOLOGY: METHODS IN ENZYMOLOGY 185, Academic Press, San Diego, Calif. (1990) 119-128. Another strategy is to alter the nucleic acid sequence of the nucleic acid to be inserted into an expression vector so that the individual codons for each amino acid are those preferentially utilized in E. coli (see, e.g., Wada, et al., 1992. Nucl. Acids Res. 20: 2111-2118). Such alteration of nucleic acid sequences of the invention can be carried out by standard DNA synthesis techniques.

[0234] In another embodiment, the NOVX expression vector is a yeast expression vector. Examples of vectors for expression in yeast Saccharomyces cerivisae include pYepSec1 (Baldari, et al., 1987. EMBO J. 6: 229-234), pMFa (Kurjan and Herskowitz, 1982. Cell 30: 933-943), pJRY88 (Schultz et al., 1987. Gene 54: 113-123), pYES2 (Invitrogen Corporation, San Diego, Calif.), and picZ (In Vitrogen Corp, San Diego, Calif.).

[0235] Alternatively, NOVX can be expressed in insect cells using baculovirus expression vectors. Baculovirus vectors available for expression of proteins in cultured insect cells (e.g., SF9 cells) include the pAc series (Smith, et al., 1983. Mol. Cell. Biol. 3: 2156-2165) and the pVL series (Lucklow and Summers, 1989. Virology 170: 31-39).

[0236] In yet another embodiment, a nucleic acid of the invention is expressed in mammalian cells using a mammalian expression vector. Examples of mammalian expression vectors include pCDM8 (Seed, 1987. Nature 329: 840) and pMT2PC (Kaufman, et al., 1987. EMBO J. 6: 187-195). When used in mammalian cells, the expression vector's control functions are often provided by viral regulatory elements. For example, commonly used promoters are derived from polyoma, adenovirus 2, cytomegalovirus, and simian virus 40. For other suitable expression systems for both prokaryotic and eukaryotic cells see, e.g., Chapters 16 and 17 of Sambrook, et al., MOLECULAR CLONING: A LABORATORY MANUAL. 2nd ed., Cold Spring Harbor Laboratory, Cold Spring Harbor Laboratory Press, Cold Spring Harbor, N.Y., 1989.

[0237] In another embodiment, the recombinant mammalian expression vector is capable of directing expression of the nucleic acid preferentially in a particular cell type (e.g., tissue-specific regulatory elements are used to express the nucleic acid). Tissue-specific regulatory elements are known in the art. Non-limiting examples of suitable tissue-specific promoters include the albumin promoter (liver-specific; Pinkert, et al., 1987. Genes Dev. 1: 268-277), lymphoid-specific promoters (Calame and Eaton, 1988. Adv. Immunol. 43: 235-275), in particular promoters of T cell receptors (Winoto and Baltimore, 1989. EMBO J. 8: 729-733) and immunoglobulins (Banerji, et al., 1983. Cell 33: 729-740; Queen and Baltimore, 1983. Cell 33: 741-748), neuron-specific promoters (e.g., the neurofilament promoter; Byrne and Ruddle, 1989. Proc. Natl. Acad. Sci USA 86: 5473-5477), pancreas-specific promoters (Edlund, et al., 1985. Science 230: 912-916), and mammary gland-specific promoters (e.g., milk whey promoter; U.S. Pat. No. 4,873,316 and European Application Publication No. 264,166). Developmentally-regulated promoters are also encompassed, e.g., the murine hox promoters (Kessel and Gruss, 1990. Science 249: 374-379) and the α-fetoprotein promoter (Campes and Tilghman, 1989. Genes Dev. 3: 537-546).

[0238] The invention further provides a recombinant expression vector comprising a DNA molecule of the invention cloned into the expression vector in an antisense orientation. That is, the DNA molecule is operatively-linked to a regulatory sequence in a manner that allows for expression (by transcription of the DNA molecule) of an RNA molecule that is antisense to NOVX mRNA. Regulatory sequences operatively linked to a nucleic acid cloned in the antisense orientation can be chosen that direct the continuous expression of the antisense RNA molecule in a variety of cell types, for instance viral promoters and/or enhancers, or regulatory sequences can be chosen that direct constitutive, tissue specific or cell type specific expression of antisense RNA. The antisense expression vector can be in the form of a recombinant plasrid, phagemid or attenuated virus in which antisense nucleic acids are produced under the control of a high efficiency regulatory region, the activity of which can be determined by the cell type into which the vector is introduced. For a discussion of the regulation of gene expression using antisense genes see, e.g., Weintraub, et al., “Antisense RNA as a molecular tool for genetic analysis,” Reviews—Trends in Genetics, Vol. 1(1) 1986.

[0239] Another aspect of the invention pertains to host cells into which a recombinant expression vector of the invention has been introduced. The terms “host cell” and “recombinant host cell” are used interchangeably herein. It is understood that such terms refer not only to the particular subject cell but also to the progeny or potential progeny of such a cell. Because certain modifications may occur in succeeding generations due to either mutation or environmental influences, such progeny may not, in fact, be identical to the parent cell, but are still included within the scope of the term as used herein.

[0240] A host cell can be any prokaryotic or eukaryotic cell. For example, NOVX protein can be expressed in bacterial cells such as E. coli , insect cells, yeast or mammalian cells (such as Chinese hamster ovary cells (CHO) or COS cells). Other suitable host cells are known to those skilled in the art.

[0241] Vector DNA can be introduced into prokaryotic or eukaryotic cells via conventional transformation or transfection techniques. As used herein, the terms “transformation” and “transfection” are intended to refer to a variety of art-recognized techniques for introducing foreign nucleic acid (e.g., DNA) into a host cell, including calcium phosphate or calcium chloride co-precipitation, DEAE-dextran-mediated transfection, lipofection, or electroporation. Suitable methods for transforming or transfecting host cells can be found in Sambrook, et al. (MOLECULAR CLONING: A LABORATORY MANUAL. 2nd ed., Cold Spring Harbor Laboratory, Cold Spring Harbor Laboratory Press, Cold Spring Harbor, N.Y., 1989), and other laboratory manuals.

[0242] For stable transfection of mammalian cells, it is known that, depending upon the expression vector and transfection technique used, only a small fraction of cells may integrate the foreign DNA into their genome. In order to identify and select these integrants, a gene that encodes a selectable marker (e.g., resistance to antibiotics) is generally introduced into the host cells along with the gene of interest. Various selectable markers include those that confer resistance to drugs, such as G418, hygromycin and methotrexate. Nucleic acid encoding a selectable marker can be introduced into a host cell on the same vector as that encoding NOVX or can be introduced on a separate vector. Cells stably transfected with the introduced nucleic acid can be identified by drug selection (e.g., cells that have incorporated the selectable marker gene will survive, while the other cells die).

[0243] A host cell of the invention, such as a prokaryotic or eukaryotic host cell in culture, can be used to produce (i.e., express) NOVX protein. Accordingly, the invention further provides methods for producing NOVX protein using the host cells of the invention. In one embodiment, the method comprises culturing the host cell of invention (into which a recombinant expression vector encoding NOVX protein has been introduced) in a suitable medium such that NOVX protein is produced. In another embodiment, the method further comprises isolating NOVX protein from the medium or the host cell.

Transgenic NOVX Animals

[0244] The host cells of the invention can also be used to produce non-human transgenic animals. For example, in one embodiment, a host cell of the invention is a fertilized oocyte or an embryonic stem cell into which NOVX protein-coding sequences have been introduced. Such host cells can then be used to create non-human transgenic animals in which exogenous NOVX sequences have been introduced into their genome or homologous recombinant animals in which endogenous NOVX sequences have been altered. Such animals are useful for studying the function and/or activity of NOVX protein and for identifying and/or evaluating modulators of NOVX protein activity. As used herein, a “transgenic animal” is a non-human animal, preferably a mammal, more preferably a rodent such as a rat or mouse, in which one or more of the cells of the animal. includes a transgene. Other examples of transgenic animals include non-human primates, sheep, dogs, cows, goats, chickens, amphibians, etc. A transgene is exogenous DNA that is integrated into the genome of a cell from which a transgenic animal develops and that remains in the genome of the mature animal, thereby directing the expression of an encoded gene product in one or more cell types or tissues of the transgenic animal. As used herein, a “homologous recombinant animal” is a non-human animal, preferably a mammal, more preferably a mouse, in which an endogenous NOVX gene has been altered by homologous recombination between the endogenous gene and an exogenous DNA molecule introduced into a cell of the animal, e.g., an embryonic cell of the animal, prior to development of the animal.

[0245] A transgenic animal of the invention can be created by introducing NOVX-encoding nucleic acid into the male pronuclei of a fertilized oocyte (e.g., by microinjection, retroviralinfection) and allowing the oocyte to develop in a pseudopregnant female foster animal. The human NOVX cDNA sequences, i.e., any one of SEQ ID NO:2n−1, wherein n is an integer between 1 and 606, can be introduced as a transgene into the genome of a non-human animal. Alternatively, a non-human homologue of the human NOVX gene, such as a mouse NOVX gene, can be isolated based on hybridization to the human NOVX cDNA (described further supra) and used as a transgene. Intronic sequences and polyadenylation signals can also be included in the transgene to increase the efficiency of expression of the transgene. A tissue-specific regulatory sequence(s) can be operably-linked to the NOVX transgene to direct expression of NOVX protein to particular cells. Methods for generating transgenic animals via embryo manipulation and microinjection, particularly animals such as mice, have become conventional in the art and are described, for example, in U.S. Pat. Nos. 4,736,866; 4,870,009; and 4,873,191; and Hogan, 1986. In: MANIPULATING THE MOUSE EMBRYO, Cold Spring Harbor Laboratory Press, Cold Spring Harbor, N.Y. Similar methods are used for production of other transgenic animals. A transgenic founder animal can be identified based upon the presence of the NOVX transgene in its genome and/or expression of NOVX mRNA in tissues or cells of the animals. A transgenic founder animal can then be used to breed additional animals carrying the transgene. Moreover, transgenic animals carrying a transgene-encoding NOVX protein can further be bred to other transgenic animals carrying other transgenes.

[0246] To create a homologous recombinant animal, a vector is prepared which contains at least a portion of a NOVX gene into which a deletion, addition or substitution has been introduced to thereby alter, e.g., functionally disrupt, the NOVX gene. The NOVX gene can be a human gene (e.g., the cDNA of any one of SEQ ID NO:2n−1, wherein n is an integer between 1 and 606), but more preferably, is a non-human homologue of a human NOVX gene. For example, a mouse homologue of human NOVX gene of SEQ ID NO:2n−1, wherein n is an integer between 1 and 606, can be used to construct a homologous recombination vector suitable for altering an endogenous NOVX gene in the mouse genome. In one embodiment, the vector is designed such that, upon homologous recombination, the endogenous NOVX gene is functionally disrupted (i.e., no longer encodes a functional protein; also referred to as a “knock out” vector).

[0247] Alternatively, the vector can be designed such that, upon homologous recombination, the endogenous NOVX gene is mutated or otherwise altered but still encodes functional protein (e.g., the upstream regulatory region can be altered to thereby alter the expression of the endogenous NOVX protein). In the homologous recombination vector, the altered portion of the NOVX gene is flanked at its 5′- and 3′-termini by additional nucleic acid of the NOVX gene to allow for homologous recombination to occur between the exogenous NOVX gene carried by the vector and an endogenous NOVX gene in an embryonic stem cell. The additional flanking NOVX nucleic acid is of sufficient length for successful homologous recombination with the endogenous gene. Typically, several kilobases of flanking DNA (both at the 5′- and 3′-termini) are included in the vector. See, e.g., Thomas, et al., 1987. Cell 51: 503 for a description of homologous recombination vectors. The vector is ten introduced into an embryonic stem cell line (e.g., by electroporation) and cells in which the introduced NOVX gene has homologously-recombined with the endogenous NOVX gene are selected. See, e.g., Li, et al., 1992. Cell 69: 915.

[0248] The selected cells are then injected into a blastocyst of an animal (e.g., a mouse) to form aggregation chimeras. See, e.g., Bradley, 1987. In: TERATOCARCINOMAS AND EMBRYONIC STEM CELLS: A PRACTICAL APPROACH, Robertson, ed. IRL, Oxford, pp. 113-152. A chimeric embryo can then be implanted into a suitable pseudopregnant female foster animal and the embryo brought to term. Progeny harboring the homologously-recombined DNA in their germ cells can be used to breed animals in which all cells of the animal contain the homologously-recombined DNA by germline transmission of the transgene. Methods for constructing homologous recombination vectors and homologous recombinant animals are described further in Bradley, 1991. Curr. Opin. Biotechnol. 2: 823-829; PCT International Publication Nos.: WO 90/11354; WO 91/01140; WO 92/0968; and WO 93/04169.

[0249] In another embodiment, transgenic non-humans animals can be produced that contain selected systems that allow for regulated expression of the transgene. One example of such a system is the cre/loxP recombinase system of bacteriophage P1. For a description of the cre/loxP recombinase system, See, e.g., Lakso, et al., 1992. Proc. Natl. Acad. Sci. USA 89: 6232-6236. Another example of a recombinase system is the FLP recombinase system of Saccharomyces cerevisiae. See, O'Gorman, et al., 1991. Science 251:1351-1355. If a cre/loxP recombinase system is used to regulate expression of the transgene, animals containing transgenes encoding both the Cre recombinase and a selected protein are required. Such animals can be provided through the construction of “double” transgenic animals, e.g., by mating two transgenic animals, one containing a transgene encoding a selected protein and the other containing a transgene encoding a recombinase.

[0250] Clones of the non-human transgenic animals described herein can also be produced according to the methods described in Wilmut, et al., 1997. Nature 385: 810-813. In brief, a cell (e.g., a somatic cell) from the transgenic animal can be isolated and induced to exit the growth cycle and enter G₀ phase. The quiescent cell can then be fused, e.g., through. the use of electrical pulses, to an enucleated oocyte from an animal of the same species from which the quiescent cell is isolated. The reconstructed oocyte is then cultured such that it develops to morula or blastocyte and then transferred to pseudopregnant female foster animal. The offspring borne of this female foster animal will be a clone of the animal from which the cell (e.g., the somatic cell) is isolated.

Pharmaceutical Compositions

[0251] The NOVX nucleic acid molecules, NOVX proteins, and anti-NOVX antibodies (also referred to herein as “active compounds”) of the invention, and derivatives, fragments, analogs and homologs thereof, can be incorporated into pharmaceutical compositions suitable for administration. Such compositions typically comprise the nucleic acid molecule, protein, or antibody and a pharmaceutically acceptable carrier. As used herein, “pharmaceutically acceptable carrier” is intended to include any and all solvents, dispersion media, coatings, antibacterial and antifungal agents, isotonic and absorption delaying agents, and the like, compatible with pharmaceutical administration. Suitable carriers are described in the most recent edition of Remington's Pharmaceutical Sciences, a standard reference text in the field, which is incorporated herein by reference. Preferred examples of such carriers or diluents include, but are not limited to, water, saline, finger's solutions, dextrose solution, and 5% human serum albumin. Liposomes and non-aqueous vehicles such as fixed oils may also be used. The use of such media and agents for pharmaceutically active substances is well known in the art. Except insofar as any conventional media or agent is incompatible with the active compound, use thereof in the compositions is contemplated. Supplementary active compounds can also be incorporated into the compositions.

[0252] A pharmaceutical composition of the invention is formulated to be compatible with its intended route of administration. Examples of routes of administration include parenteral, e.g., intravenous, intradermal, subcutaneous, oral (e.g., inhalation), transdermal (i.e., topical), transmucosal, and rectal administration. Solutions or suspensions used for parenteral, intradermal, or subcutaneous application can include the following components: a sterile diluent such as water for injection, saline solution, fixed oils, polyethylene glycols, glycerine, propylene glycol or other synthetic solvents; antibacterial agents such as benzyl alcohol or methyl parabens; antioxidants such as ascorbic acid or sodium bisulfite; chelating agents such as ethylenediaminetetraacetic acid (EDTA); buffers such as acetates, citrates or phosphates, and agents for the adjustment of tonicity such as sodium chloride or dextrose. The pH can be adjusted with acids or bases, such as hydrochloric acid or sodium hydroxide. The parenteral preparation can be enclosed in ampoules, disposable syringes or multiple dose vials made of glass or plastic.

[0253] Pharmaceutical compositions suitable for injectable use include sterile aqueous solutions (where water soluble) or dispersions and sterile powders for the extemporaneous preparation of sterile injectable solutions or dispersion. For intravenous administration, suitable carriers include physiological saline, bacteriostatic water, Cremophor EL™ (BASF, Parsippany, N.J.) or phosphate buffered saline (PBS). In all cases, the composition must be sterile and should be fluid to the extent that easy syringeability exists. It must be stable under the conditions of manufacture and storage and must be preserved against the contaminating action of microorganisms such as bacteria and fungi. The carrier can be a solvent or dispersion medium containing, for example, water, ethanol, polyol (for example, glycerol, propylene glycol, and liquid polyethylene glycol, and the like), and suitable mixtures thereof. The proper fluidity can be maintained, for example, by the use of a coating such as lecithin, by the maintenance of the required particle size in the case of dispersion and by the use of surfactants. Prevention of the action of microorganisms can be achieved by various antibacterial and antifungal agents, for example, parabens, chlorobutanol, phenol, ascorbic acid, thimerosal, and the like. In many cases, it will be preferable to include isotonic agents, for example, sugars, polyalcohols such as manitol, sorbitol, sodium chloride in the composition. Prolonged absorption of the injectable compositions can be brought about by including in the composition an agent which delays absorption, for example, aluminum monostearate and gelatin.

[0254] Sterile injectable solutions can be prepared by incorporating the active compound (e.g., a NOVX protein or anti-NOVX antibody) in the required amount in an appropriate solvent with one or a combination of ingredients enumerated above, as required, followed by filtered sterilization. Generally, dispersions are prepared by incorporating the active compound into a sterile vehicle that contains a basic dispersion medium and the required other ingredients from those enumerated above. In the case of sterile powders for the preparation of sterile injectable solutions, methods of preparation are vacuum drying and freeze-drying that yields a powder of the active ingredient plus any additional desired ingredient from a previously sterile-filtered solution thereof.

[0255] Oral compositions generally include an inert diluent or an edible carrier. They can be enclosed in gelatin capsules or compressed into tablets. For the purpose of oral therapeutic administration, the active compound can be incorporated with excipients and used in the form of tablets, troches, or capsules. Oral compositions can also be prepared using a fluid carrier for use as a mouthwash, wherein the compound in the fluid carrier is applied orally and swished and expectorated or swallowed. Pharmaceutically compatible binding agents, and/or adjuvant materials can be included as part of the composition. The tablets, pills, capsules, troches and the like can contain any of the following ingredients, or compounds of a similar nature: a binder such as microcrystalline cellulose, gum tragacanth or gelatin; an excipient such as starch or lactose, a disintegrating agent such as alginic acid, Primogel, or corn starch; a lubricant such as magnesium stearate or Sterotes; a glidant such as colloidal silicon dioxide; a sweetening agent such as sucrose or saccharin; or a flavoring agent such as peppermint, methyl salicylate, or orange flavoring.

[0256] For administration by inhalation, the compounds are delivered in the form of an aerosol spray from pressured container or dispenser which contains a suitable propellant, e.g., a gas such as carbon dioxide, or a nebulizer.

[0257] Systemic administration can also be by transmucosal or transdermal means. For transmucosal or transdermal administration, penetrants appropriate to the barrier to be permeated are used in the formulation. Such penetrants are generally known in the art, and include, for example, for transmucosal administration, detergents, bile salts, and fusidic acid derivatives. Transmucosal administration can be accomplished through the use of nasal sprays or suppositories. For transdermal administration, the active compounds are formulated into ointments, salves, gels, or creams as generally known in the art.

[0258] The compounds can also be prepared in the form of suppositories (e.g., with conventional suppository bases such as cocoa butter and other glycerides) or retention enemas for rectal delivery.

[0259] In one embodiment, the active compounds are prepared with carriers that will protect the compound against rapid elimination from the body, such as a controlled release formulation, including implants and microencapsulated delivery systems. Biodegradable, biocompatible polymers can be used, such as ethylene vinyl acetate, polyanhydrides, polyglycolic acid, collagen, polyorthoesters, and polylactic acid. Methods for preparation of such formulations will be apparent to those skilled in the art. The materials can also be obtained commercially from Alza Corporation and Nova Pharmaceuticals, Inc. Liposomal suspensions (including liposomes targeted to infected cells with monoclonal antibodies to viral antigens) can also be used as pharmaceutically acceptable carriers. These can be prepared according to methods known to those skilled in the art, for example, as described in U.S. Pat. No. 4,522,811.

[0260] It is especially advantageous to formulate oral or parenteral compositions in dosage unit form for ease of administration and uniformity of dosage. Dosage unit form as used herein refers to physically discrete units suited as unitary dosages for the subject to be treated; each unit containing a predetermined quantity of active compound calculated to produce the desired therapeutic effect in association with the required pharmaceutical carrier. The specification for the dosage unit forms of the invention are dictated by and directly dependent on the unique characteristics of the active compound and the particular therapeutic effect to be achieved, and the limitations inherent in the art of compounding such an active compound for the treatment of individuals.

[0261] The nucleic acid molecules of the invention can be inserted into vectors and used as gene therapy vectors. Gene therapy vectors can be delivered to a subject by, for example, intravenous injection, local administration (see, e.g., U.S. Pat. No. 5,328,470) or by stereotactic injection (see, e.g., Chen, et al., 1994. Proc. Natl. Acad. Sci. USA 91: 3054-3057). The pharmaceutical preparation of the gene therapy vector can include the gene therapy vector in an acceptable diluent, or can comprise a slow release matrix in which the gene delivery vehicle is imbedded. Alternatively, where the complete gene delivery vector can be produced intact from recombinant cells, e.g., retroviral vectors, the pharmaceutical preparation can include one or more cells that produce the gene delivery system.

[0262] The pharmaceutical compositions can be included in a container, pack, or dispenser together with instructions for administration.

Screening and Detection Methods

[0263] The isolated nucleic acid molecules of the invention can be used to express NOVX protein (e.g., via a recombinant expression vector in a host cell in gene therapy applications), to detect NOVX mRNA (e.g., in a biological sample) or a genetic lesion in a NOVX gene, and to modulate NOVX activity, as described further, below. In addition, the NOVX proteins can be used to screen drugs or compounds that modulate the NOVX protein activity or expression as well as to treat disorders characterized by insufficient or excessive production of NOVX protein or production of NOVX protein forms that have decreased or aberrant activity compared to NOVX wild-type protein (e.g.; diabetes (regulates insulin release); obesity (binds and transport lipids); metabolic disturbances associated with obesity, the metabolic syndrome X as well as anorexia and wasting disorders associated with chronic diseases and various cancers, and infectious disease(possesses anti-microbial activity) and the various dyslipidemias. In addition, the anti-NOVX antibodies of the invention can be used to detect and isolate NOVX proteins and modulate NOVX activity. In yet a further aspect, the invention can be used in methods to influence appetite, absorption of nutrients and the disposition of metabolic substrates in both a positive and negative fashion.

[0264] The invention further pertains to novel agents identified by the screening assays described herein and uses thereof for treatments as described, supra.

Screening Assays

[0265] The invention provides a method (also referred to herein as a “screening assay”) for identifying modulators, i.e., candidate or test compounds or agents (e.g., peptides, peptidomimetics, small molecules or other drugs) that bind to NOVX proteins or have a stimulatory or inhibitory effect on, e.g., NOVX protein expression or NOVX protein activity. The invention also includes compounds identified in the screening assays described herein.

[0266] In one embodiment, the invention provides assays for screening candidate or test compounds which bind to or modulate the activity of the membrane-bound form of a NOVX protein or polypeptide or biologically-active portion thereof. The test compounds of the invention can be obtained using any of the numerous approaches in combinatorial library methods known in the art, including: biological libraries; spatially addressable parallel solid phase or solution phase libraries; synthetic library methods requiring deconvolution; the “one-bead one-compound” library method; and synthetic library methods using affinity chromatography selection. The biological library approach is limited to peptide libraries, while the other four approaches are applicable to peptide, non-peptide oligomer or small molecule libraries of compounds. See, e.g., Lam, 1997. Anticancer Drug Design 12: 145.

[0267] A “small molecule” as used herein, is meant to refer to a composition that has a molecular weight of less than about 5 kD and most preferably less than about 4 kD. Small molecules can be, e.g., nucleic acids, peptides, polypeptides, peptidomimetics, carbohydrates, lipids or other organic or inorganic molecules. Libraries of chemical and/or biological mixtures, such as fungal, bacterial, or algal extracts, are klown in the art and can be screened with any of the assays of the invention.

[0268] Examples of methods for the synthesis of molecular libraries can be found in the art, for example in: DeWitt, et al., 1993. Proc. Natl. Acad. Sci. U.S.A. 90: 6909; Erb, et al., 1994. Proc. Natl. Acad. Sci. U.S.A. 91: 11422; Zuckermann, et al., 1994. J. Med. Chem. 37: 2678; Cho, et al., 1993. Science 261: 1303; Carrell, et al., 1994. Angew. Chem. Int. Ed. Engl. 33: 2059; Carell, et al., 1994. Angew. Chem. Int. Ed. Engl. 33: 2061; and Gallop, et al., 1994. J. Med. Chem. 37: 1233.

[0269] Libraries of compounds may be presented in solution (e.g., Houghten, 1992. Biotechniques 13: 412421), or on beads (Lam, 1991. Nature 354: 82-84), on chips (Fodor, 1993. Nature 364: 555-556), bacteria (Ladner, U.S. Pat. No. 5,223,409), spores (Ladner, U.S. Pat. No. 5,233,409), plasmids (Cull, et al., 1992. Proc. Natl. Acad. Sci. USA 89: 1865-1869) or on phage (Scott and Smith, 1990. Science 249: 386-390; Devlin, 1990. Science 249: 404-406; Cwirla, et al., 1990. Proc. Natl. Acad. Sci. U.S.A. 87: 6378-6382; Felici, 1991. J. Mol. Biol. 222: 301-310; Ladner, U.S. Pat. No. 5,233,409.).

[0270] In one embodiment, an assay is a cell-based assay in which a cell which expresses a membrane-bound form of NOVX protein, or atbiologically-active portion thereof, on the cell surface is contacted with a test compound and the ability of the test compound to bind to a NOVX protein determined. The cell, for example, can of mammalian origin or a yeast cell. Determining the ability of the test compound to bind to the NOVX protein can be accomplished, for example, by coupling the test compound with a radioisotope or enzymatic label such that binding of the test compound to the NOVX protein or biologically-active portion thereof can be determined by detecting the labeled compound in a complex. For example, test compounds can be labeled with 1251, ³⁵S, ¹⁴C, or ³H, either directly or indirectly, and the radioisotope detected by direct counting of radioemission or by scintillation counting. Alternatively, test compounds can be enzymatically-labeled with, for example, horseradish peroxidase, alkaline phosphatase, or luciferase, and the enzymatic label detected by determination of conversion of an appropriate substrate to product. In one embodiment, the assay comprises contacting a cell which expresses a membrane-bound form of NOVX protein, or a biologically-active portion thereof, on the cell surface with a known compound which binds NOVX to form an assay mixture, contacting the assay mixture with a test compound, and determining the ability of the test compound to interact with a NOVX protein, wherein determining the ability of the test compound to interact with a NOVX protein comprises determining the ability of the test compound to preferentially bind to NOVX protein or a biologically-active portion thereof as compared to the known compound.

[0271] In another embodiment, an assay is a cell-based assay comprising contacting a cell expressing a membrane-bound form of NOVX protein, or a biologically-active portion thereof, on the cell surface with a test compound and determining the ability of the test compound to modulate (e.g., stimulate or inhibit) the activity of the NOVX protein or biologically-active portion thereof. Determining the ability of the test compound to modulate the activity of NOVX or a biologically-active portion thereof can be accomplished, for example, by determining the ability of the NOVX protein to bind to or interact with a NOVX target molecule. As used herein, a “target molecule” is a molecule with which a NOVX protein binds or interacts in nature, for example, a molecule on the surface of a cell which expresses a NOVX interacting protein, a molecule on the surface of a second cell, a molecule in the extracellular milieu, a molecule associated with the internal surface of a cell membrane or a cytoplasmic molecule. A NOVX target molecule can be a non-NOVX molecule or a NOVX protein or polypeptide of the invention. In one embodiment, a NOVX target molecule is a component of a signal transduction pathway that facilitates transduction of an extracellular signal (e.g. a signal generated by binding of a compound to a membrane-bound NOVX molecule) through the cell membrane and into the cell. The target, for example, can be a second intercellular protein that has catalytic activity or a protein that facilitates the association of downstream signaling molecules with NOVX.

[0272] Determining the ability of the NOVX protein to bind to or interact with a NOVX target molecule can be accomplished by one of the methods described above for determining direct binding. In one embodiment, determining the ability of the NOVX protein to bind to or interact with a NOVX target molecule can be accomplished by determining the activity of the target molecule. For example, the activity of the target molecule can be determined by detecting induction of a cellular second messenger of the target (i.e. intracellular Ca²⁺, diacylglycerol, IP₃, etc.), detecting catalytic/enzymatic activity of the target an appropriate substrate, detecting the induction of a reporter gene (comprising a NOVX-responsive regulatory element operatively linked to a nucleic acid encoding a detectable marker, e.g., luciferase), or detecting a cellular response, for example, cell survival, cellular differentiation, or cell proliferation.

[0273] In yet another embodiment, an assay of the invention is a cell-free assay comprising contacting a NOVX protein or biologically-active portion thereof with a test compound and determining the ability of the test compound to bind to the NOVX protein or biologically-active portion thereof. Binding of the test compound to the NOVX protein can be determined either directly or indirectly as described above. In one such embodiment, the assay comprises contacting the NOVX protein or biologically-active portion thereof with a known compound which binds NOVX to form an assay mixture, contacting the assay mixture with a test compound, and determining the ability of the test compound to interact with a NOVX protein, wherein determining the ability of the test compound to interact with a NOVX protein comprises determining the ability of the test compound to preferentially bind to NOVX or biologically-active portion thereof as compared to the known compound.

[0274] In still another embodiment, an assay is a cell-free assay comprising contacting NOVX protein or biologically-active portion thereof with a test compound and determining the ability of the test compound to modulate (e.g. stimulate or inhibit) the activity of the NOVX protein or biologically-active portion thereof. Determining the ability of the test compound to modulate the activity of NOVX can be accomplished, for example, by determining the ability of the NOVX protein to bind to a NOVX target molecule by one of the methods described above for determining direct binding. In an alternative embodiment, determining the ability of the test compound to modulate the activity of NOVX protein can be accomplished by determining the ability of the NOVX protein further modulate a NOVX target molecule. For example, the catalytic/enzymatic activity of the target molecule on an appropriate substrate can be determined as described, supra.

[0275] In yet another embodiment, the cell-free assay comprises contacting the NOVX protein or biologically-active portion thereof with a known compound which binds NOVX protein to form an assay mixture, contacting the assay mixture with a test compound, and determining the ability of the test compound to interact with a NOVX protein, wherein determining the ability of the test compound to interact with a NOVX protein comprises determining the ability of the NOVX protein to preferentially bind to or modulate the activity of a NOVX target molecule.

[0276] The cell-free assays of the invention are amenable to use of both the soluble form or the membrane-bound form of NOVX protein. In the case of cell-free assays comprising the membrane-bound form of NOVX protein, it may be desirable to utilize a solubilizing agent such that the membrane-bound form of NOVX protein is maintained in solution. Examples of such solubilizing agents include non-ionic detergents such as n-octylglucoside, n-dodecylglucoside, n-dodecylmaltoside, octanoyl-N-methylglucaamide, decanoyl-N-methylglucarnide, Triton® X-100, Triton® X-114, Thesit®, Isotridecypoly(ethylene glycol ether)ₙ, N-dodecyl--N,N-dimethyl-3-ammonio-1-propane sulfonate, 3-(3-cholamidopropyl) dimethylamminiol-1-propane sulfonate (CHAPS), or 3-(3-cholamidopropyl)dimethylarmniniol-2-hydroxy-1-propane sulfonate (CHAPSO).

[0277] In more than one embodiment of the above assay methods of the invention, it may be desirable to immobilize either NOVX protein or its target molecule to facilitate separation of complexed from uncomplexed forms of one or both of the proteins, as well as to accommodate automation of the assay. Binding of a test compound to NOVX protein, or interaction of NOVX protein with a target molecule in the presence and absence of a candidate compound, can be accomplished in any vessel suitable for containing the reactants. Examples of such vessels include microtiter plates, test tubes, and micro-centrifuge tubes. In one embodiment, a fusion protein can be provided that adds a domain that allows one or both of the proteins to be bound to a matrix. For example, GST-NOVX fusion proteins or GST-target fusion proteins can be adsorbed onto glutathione sepharose beads (Sigma Chemical, St. Louis, Mo.) or glutathione derivatized microtiter plates, that are then combined with the test compound or the test compound and either the non-adsorbed target protein or NOVX protein, and the mixture is incubated under conditions conducive to complex formation (e.g., at physiological conditions for salt and pH). Following incubation, the beads or microtiter plate wells are washed to remove any unbound components, the matrix immobilized in the case of beads, complex determined either directly or indirectly, for example, as described, supra. Alternatively, the complexes can be dissociated from the matrix, and the level of NOVX protein binding or activity determined using standard techniques.

[0278] Other techniques for immobilizing proteins on matrices can also be used in the screening assays of the invention. For example, either the NOVX protein or its target molecule can be immobilized utilizing conjugation of biotin and streptavidin. Biotinylated NOVX protein or target molecules can be prepared from biotin-NHS (N-hydroxy-succinimide) using techniques well-known within the art (e.g., biotinylation kit, Pierce Chemicals, Rockford, Ill.), and immobilized in the wells of streptavidin-coated 96 well plates (Pierce Chemical). Alternatively, antibodies reactive with NOVX protein or target molecules, but which do not interfere with binding of the NOVX protein to its target molecule, can be derivatized to the wells of the plate, and unbound target or NOVX protein trapped in the wells by antibody conjugation. Methods for detecting such complexes, in addition to those described above for the GST-immobilized complexes, include immunodetection of complexes using antibodies reactive with the NOVX protein or target molecule, as well as enzyme-linked assays that rely on detecting an enzymatic activity associated with the NOVX protein or target molecule.

[0279] In another embodiment, modulators of NOVX protein expression are identified in a method wherein a cell is contacted with a candidate compound and the expression of NOVX mRNA or protein in the cell is determined. The level of expression of NOVX mRNA or protein in the presence of the candidate compound is compared to the level of expression of NOVX mRNA or protein in the absence of the candidate compound. The candidate compound can then be identified as a modulator of NOVX mRNA or protein expression based upon this comparison. For example, when expression of NOVX mRNA or protein is greater (i.e., statistically significantly greater) in the presence of the candidate compound than in its absence, the candidate compound is identified as a stimulator of NOVX mRNA or protein expression. Alternatively, when expression of NOVX rnRNA or protein is less (statistically significantly less) in the presence of the candidate compound than in its absence, the candidate compound is identified as an inhibitor of NOVX mRNA or protein expression. The level of NOVX mRNA or protein expression in the cells can be determined by methods described herein for detecting NOVX mRNA or protein.

[0280] In yet another aspect of the invention, the NOVX proteins can be used as “bait proteins” in a two-hybrid assay or three hybrid assay (see, e.g., U.S. Pat. No. 5,283,317; Zervos, et al., 1993. Cell 72: 223-232; Madura, et al., 1993. J. Biol. Chem. 268: 12046-12054; Bartel, et al., 1993. Biotechniques 14: 920-924; Iwabuchi, et al., 1993. Oncogene 8: 1693-1696; and Brent WO 94/10300), to identify other proteins that bind to or interact with NOVX (“NOVX-binding proteins” or “NOVX-bp”) and modulate NOVX activity. Such NOVX-binding proteins are also involved in the propagation of signals by the NOVX proteins as, for example, upstream or downstream elements of the NOVX pathway.

[0281] The two-hybrid system is based on the modular nature of most transcription factors, which consist of separable DNA-binding and activation domains. Briefly, the assay utilizes two different DNA constructs. In one construct, the gene that codes for NOVX is fused to a gene encoding the DNA binding domain of a known transcription factor (e.g., GAL-4). In the other construct, a DNA sequence, from a library of DNA sequences, that encodes an unidentified protein (“prey” or “sample”) is fused to a gene that codes for the activation domain of the known transcription factor. If the “bait” and the “prey” proteins are able to interact, in vivo, forming a NOVX-dependent complex, the DNA-binding and activation domains of the transcription factor are brought into close proximity. This proximity allows transcription of a reporter gene (e.g., LacZ) that is operably linked to a transcriptional regulatory site responsive to the transcription factor. Expression of the reporter gene can be detected and cell colonies containing the functional transcription factor can be isolated and used to obtain the cloned gene that encodes the protein which interacts with NOVX.

[0282] The invention further pertains to novel agents identified by the aforementioned screening assays and uses thereof for treatments as described herein.

Detection Assays

[0283] Portions or fragments of the cDNA sequences identified herein (and the corresponding complete gene sequences) can be used in numerous ways as polynucleotide reagents. By way of example, and not of limitation, these sequences can be used to: (i) map their respective genes on a chromosome; and, thus, locate gene regions associated with genetic disease; (ii) identify an individual from a minute biological sample (tissue typing); and (iii) aid in forensic identification of a biological sample. Some of these applications are described in the subsections, below.

[0284] Chromosome Mapping

[0285] Once the sequence (or a portion of the sequence) of a gene has been isolated, this sequence can be used to map the location of the gene on a chromosome. This process is called chromosome mapping. Accordingly, portions or fragments of the NOVX sequences of SEQ ID NO:2n−1, wherein n is an integer between 1 and 606, or fragments or derivatives thereof, can be used to map the location of the NOVX genes, respectively, on a chromosome. The mapping of the NOVX sequences to chromosomes is an important first step in correlating these sequences with genes associated with disease.

[0286] Briefly, NOVX genes can be mapped to chromosomes by preparing PCR primers (preferably 15-25 bp in length) from the NOVX sequences. Computer analysis of the NOVX, sequences can be used to rapidly select primers that do not span more than one exon in the genomic DNA, thus complicating the amplification process. These primers can then be used for PCR screening of somatic cell hybrids containing individual human chromosomes. Only those hybrids containing the human gene corresponding to the NOVX sequences will yield an amplified fragment.

[0287] Somatic cell hybrids are prepared by fusing somatic cells from different mammals (e.g., human and mouse cells). As hybrids of human and mouse cells grow and divide, they gradually lose human chromosomes in random order, but retain the mouse chromosomes. By using media in which mouse cells cannot grow, because they lack a particular enzyme, but in which human cells can, the one human chromosome that contains the gene encoding the needed enzyme will be retained. By using various media, panels of hybrid cell lines can be established. Each cell line in a panel contains either a single human chromosome or a small number of human chromosomes, and a full set of mouse chromosomes, allowing easy mapping of individual genes to specific human chromosomes. See, e.g., D'Eustachio, et al., 1983. Science 220: 919-924. Somatic cell hybrids containing only fragments of human chromosomes can also be produced by using human chromosomes with translocations and deletions.

[0288] PCR mapping of somatic cell hybrids is a rapid procedure for assigning a particular sequence to a particular chromosome. Three or more sequences can be assigned per day using a single thermal cycler. Using the NOVX sequences to design oligonucleotide primers, sub-localization can be achieved with panels of fragments from specific chromosomes.

[0289] Fluorescence in situ hybridization (FISH) of a DNA sequence to a metaphase chromosomal spread can further be used to provide a precise chromosomal location in one step. Chromosome spreads can be made using cells whose division has been blocked in metaphase by a chemical like colcemid that disrupts the mitotic spindle. The chromosomes can be treated briefly with trypsin, and then stained with Giemsa. A pattern of light and dark bands develops on each chromosome, so that the chromosomes can be identified individually. The FISH technique can be used with a DNA sequence as short as 500 or 600 bases. However, clones larger than 1,000 bases have a higher likelihood of binding to a unique chromosomal location with sufficient signal intensity for simple detection. Preferably 1,000 bases, and more preferably 2,000 bases, will suffice to get good results at a reasonable amount of time. For a review of this technique, see, Verma, et al., HUMAN CHROMOSOMES: A MANUAL OF BASIC TECHNIQUES (Pergamon Press, New York 1988).

[0290] Reagents for chromosome mapping can be used individually to mark a single chromosome or a single site on that chromosome, or panels of reagents can be used for marking multiple sites and/or multiple chromosomes. Reagents corresponding to noncoding regions of the genes actually are preferred for mapping purposes. Coding sequences are more likely to be conserved within gene families, thus increasing the chance of cross hybridizations during chromosomal mapping.

[0291] Once a sequence has been mapped to a precise chromosomal location, the physical position of the sequence on the chromosome can be correlated with genetic map data. Such data are found, e.g., in McKusick, MENDELIAN INERIANCE IN MAN, available on-line through Johns Hopkins University Welch Medical Library). The relationship between genes and disease, mapped to the same chromosomal region, can then be identified through linkage analysis (co-inheritance of physically adjacent genes), described in, e.g., Egeland, et al., 1987. Nature, 325: 783-787.

[0292] Moreover, differences in the DNA sequences between individuals affected and unaffected with a disease associated with the NOVX gene, can be determined. If a mutation is observed in some or all of the affected individuals but not in any unaffected individuals, then the mutation is likely to be the causative agent of the particular disease. Comparison of affected and unaffected individuals generally involves first looking for structural alterations in the chromosomes, such as deletions or translocations that are visible from chromosome spreads or detectable using PCR based on that DNA sequence. Ultimately, complete sequencing of genes from several individuals can be performed to confirm the presence of a mutation and to distinguish mutations from polymorphisms.

[0293] Tissue Typing

[0294] The NOVX sequences of the invention can also be used to identify individuals from minute biological samples. In this technique, an individual's genomic DNA is digested with one or more restriction enzymes, and probed on a Southern blot to yield unique bands for identification. The sequences of the invention are useful as additional DNA markers for RFLP (“restriction fragment length polymorphisms,” described in U.S. Pat. No. 5,272,057).

[0295] Furthermore, the sequences of the invention can be used to provide an alternative technique that determines the actual base-by-base DNA sequence of selected portions of an individual's genome. Thus, the NOVX sequences described herein can be used to prepare two PCR primers from the 5′- and 3′-termini of the sequences. These primers can then be used to amplify an individual's DNA and subsequently sequence it.

[0296] Panels of corresponding DNA sequences from individuals, prepared in this manner, can provide unique individual identifications, as each individual will have a unique set of such DNA sequences due to allelic differences. The sequences of the invention can be used to obtain such identification sequences from individuals and from tissue. The NOVX sequences of the invention uniquely represent portions of the human genome. Allelic variation occurs to some degree in the coding regions of these sequences, and to a greater degree in the noncoding regions. It is estimated that allelic variation between individual humans occurs with a frequency of about once per each 500 bases. Much of the allelic variation is due to single nucleotide polymorphisms (SNPs), which include restriction fragment length polymorphisms (RFLts).

[0297] Each of the sequences described herein can, to some degree, be used as a standard against which DNA from an individual can be compared for identification purposes. Because greater numbers of polymorphisms occur in the noncoding regions, fewer sequences are necessary to differentiate individuals. The noncoding sequences can comfortably provide positive individual identification with a panel of perhaps 10 to 1,000 primers that each yield a noncoding amplified sequence of 100 bases. If coding sequences, such as those of SEQ ID NO:2n−1, wherein n is an integer between 1 and 606, are used, a more appropriate number of primers for positive individual identification would be 500-2,000.

[0298] Predictive Medicine

[0299] The invention also pertains to the field of predictive medicine in which diagnostic assays, prognostic assays, pharmacogenomics, and monitoring clinical trials are used for prognostic (predictive) purposes to thereby treat an individual prophylactically. Accordingly, one aspect of the invention relates to diagnostic assays for determining NOVX protein and/or nucleic acid expression as well as NOVX activity, in the context of a biological sample (e.g., blood, serum, cells, tissue) to thereby determine whether an individual is afflicted with a disease or disorder, or is at risk of developing a disorder, associated with aberrant NOVX expression or activity. The disorders include metabolic disorders, diabetes, obesity, infectious disease, anorexia, cancer-associated cachexia, cancer, neurodegenerative disorders, Alzheimer's Disease, Parkinson's Disorder, immune disorders, and hematopoietic disorders, and the various dyslipidemias, metabolic disturbances associated with obesity, the metabolic syndrome X and wasting disorders associated with chronic diseases and various cancers. The invention also provides for prognostic (or predictive) assays for determining whether an individual is at risk of developing a disorder associated with NOVX protein, nucleic acid expression or activity. For example, mutations in a NOVX gene can be assayed in a biological sample. Such assays can be used for prognostic or predictive purpose to thereby prophylactically treat an individual prior to the onset of a disorder characterized by or associated with NOVX protein, nucleic acid expression, or biological activity.

[0300] Another aspect of the invention provides methods for determining NOVX protein, nucleic acid expression or activity in an individual to thereby select appropriate therapeutic or prophylactic agents for that individual (referred to herein as “pharmacogenomics”). Pharmacogenomics allows for the selection of agents (e.g., drugs) for therapeutic or prophylactic treatment of an individual based on the genotype of the individual (e.g., the genotype of the individual examined to determine the ability of the individual to respond to a particular agent.) Yet another aspect of the invention pertains to monitoring the influence of agents (e.g., drugs, compounds) on the expression or activity of NOVX in clinical trials.

[0301] These and other agents are described in further detail in the following sections.

[0302] Diagnostic Assays

[0303] An exemplary method for detecting the presence or absence of NOVX in a biological sample involves obtaining a biological sample from a test subject and contacting the biological sample with a compound or an agent capable of detecting NOVX protein or nucleic acid (e.g., mRNA, genomic DNA) that encodes NOVX protein such that the presence of NOVX is detected in the biological sample. An agent for detecting NOVX rnRNA or genomic DNA is a labeled nucleic acid probe capable of hybridizing to NOVX mRNA or genomic DNA. The nucleic acid probe can be, for example, a full-length NOVX nucleic acid, such as the nucleic acid of SEQ ID NO:2n−1, wherein n is an integer between 1 and 606, or a portion thereof, such as an oligonucleotide of at least 15, 30, 50, 100, 250 or 500 nucleotides in length and sufficient to specifically hybridize under stringent conditions to NOVX mRNA or genomic DNA. Other suitable probes for use in the diagnostic assays of the invention are described herein.

[0304] An agent for detecting NOVX protein is an antibody capable of binding to NOVX protein, preferably an antibody with a detectable label. Antibodies can be polyclonal, or more preferably, monoclonal. An intact antibody, or a fragment thereof (e.g., Fab or F(ab′)₂) can be used. The term “labeled”, with regard to the probe or antibody, is intended to encompass direct labeling of the probe or antibody by coupling (i.e., physically linking) a detectable substance to the probe or antibody, as well as indirect labeling of the probe or antibody by reactivity with another reagent that is directly labeled. Examples of indirect labeling include detection of a primary antibody using a fluorescently-labeled secondary antibody and end-labeling of a DNA probe with biotin such that it can be detected with flucrescently-labeled streptavidin. The term “biological sample” is intended to include tissues, cells and biological fluids isolated from a subject, as well as tissues, cells and fluids present within a subject. That is, the detection method of the invention can be used to detect NOVX mRNA, protein, or genomic DNA in a biological sample in vitro as well as in vivo. For example, in vitro techniques for detection of NOVX mRNA include Northern hybridizations and in situ hybridizations. In vitro techniques for detection of NOVX protein include enzyme linked immunosorbent assays (ELISAs), Western blots, immunoprecipitations, and immunofluorescence. In vitro techniques for detection of NOVX genomic DNA include Southern hybridizations. Furthermore, in vivo techniques for detection of NOVX protein include introducing into a subject a labeled anti-NOVX antibody. For example, the antibody can be labeled with a radioactive marker whose presence and location in a subject can be detected by standard imaging techniques.

[0305] In one embodiment, the biological sample contains protein molecules from the test subject. Alternatively, the biological sample can contain mRNA molecules from the test subject or genomic DNA molecules from the test subject. A preferred biological sample is a peripheral blood leukocyte sample isolated by conventional means from a subject.

[0306] In another embodiment, the methods further involve obtaining a control biological sample from a control subject, contacting the control sample with a compound or agent capable of detecting NOVX protein, mRNA, or genomic DNA, such that the presence of NOVX protein, mRNA or genomic DNA is detected in the biological sample, and comparing the presence of NOVX protein, mRNA or genornic DNA in the control sample with the presence of NOVX protein, mRNA or genomic DNA in the test sample.

[0307] The invention also encompasses kits for detecting the presence of NOVX in a biological sample. For example, the kit can comprise: a labeled compound or agent capable of detecting NOVX protein or mRNA in a biological sample; means for T determining the amount of NOVX in the sample; and means for comparing the amount of NOVX in the sample with a standard. The compound or agent can be packaged in a suitable container. The kit can further comprise instructions for using the kit to detect NOVX protein or nucleic acid.

[0308] Prognostic Assays

[0309] The diagnostic methods described herein can furthermore be utilized to identify subjects having or at risk of developing a disease or disorder associated with aberrant NOVX expression or activity. For example, the assays described herein, such as the preceding diagnostic assays or the following assays, can be utilized to identify a subject having or at risk of developing a disorder associated with NOVX protein, nucleic acid expression or activity. Alternatively, the prognostic assays can be utilized to identify a subject having or at risk for developing a disease or disorder. Thus, the invention provides a method for identifying a disease or disorder associated with aberrant NOVX expression or activity in which a test sample is obtained from a subject and NOVX protein or nucleic acid (e.g., mRNA, genornic DNA) is detected, wherein the presence of NOVX protein or nucleic acid is diagnostic for a subject having or at risk of developing a disease or disorder associated with aberrant NOVX expression or activity. As used herein, a “test sample” refers to a biological sample obtained from a subject of interest. For example, a test sample can be a biological fluid (e.g., serum), cell sample, or tissue.

[0310] Furthermore, the prognostic assays described herein can be used to determine whether a subject can be administered an agent (e.g., an agonist, antagonist, peptidomimetic, protein, peptide, nucleic acid, small molecule, or other drug candidate) to treat a disease or disorder associated with aberrant NOVX expression or activity. For example, such methods can be used to determine whether a subject can be effectively treated with an agent for a disorder. Thus, the invention provides methods for determining whether a subject can be effectively treated with an agent for a disorder associated with aberrant NOVX expression or activity in which a test sample is obtained and NOVX protein or nucleic acid is detected (e.g., wherein the presence of NOVX protein or nucleic acid is diagnostic for a subject that can be administered the agent to treat a disorder associated with aberrant NOVX expression or activity).

[0311] The methods of the invention can also be used to detect genetic lesions in a NOVX gene, thereby determining if a subject with the lesioned gene is at risk for a disorder characterized by aberrant cell proliferation and/or differentiation. In various embodiments, the methods include detecting, in a sample of cells from the subject, the presence or absence of a genetic lesion characterized by at least one of an alteration affecting the integrity of a gene encoding a NOVX-protein, or the misexpression of the NOVX gene. For example, such genetic lesions can be detected by ascertaining the existence of at least one of: (i) a deletion of one or more nucleotides from a NOVX gene; (ii) an addition of one or more nucleotides to a NOVX gene; (iii) a substitution of one or more nucleotides of a NOVX gene, (iv) a chromosomal rearrangement of a NOVX gene; (v) an alteration in the level of a messenger RNA transcript of a NOVX gene, (vi) aberrant modification of a NOVX gene, such as of the methylation pattern of the genomic DNA, (vii) the presence of a non-wild-type splicing pattern of a messenger RNA transcript of a NOVX gene, (viii) a non-wild-type level of a NOVX protein, (ix) allelic loss of a NOVX gene, and (x) inappropriate post-translational modification of a NOVX protein. As described herein, there are a large number of assay techniques known in the art which can be used for detecting lesions in a NOVX gene. A preferred biological sample is a peripheral blood leukocyte sample isolated by conventional means from a subject. However, any biological sample containing nucleated cells may be used, including, for example, buccal mucosal cells.

[0312] In certain embodiments, detection of the lesion involves the use of a probe/primer in a polymerase chain reaction (PCR) (see, e.g., U.S. Pat. Nos. 4,683,195 and 4,683,202), such as anchor PCR or RACE PCR, or, alternatively, in a ligation chain reaction (LCR) (see, e.g., Landegran, et al., 1988. Science 241: 1077-1080; and Nakazawa, et al., 1994. Proc. Natl. Acad. Sci. USA 91: 360-364), the latter of which can be particularly useful for detecting point mutations in the NOVX-gene (see, Abravaya, et al., 1995. Nucl. Acids Res. 23: 675-682). This method can include the steps of collecting a sample of cells from a patient, isolating nucleic acid (e.g., genomic, mRNA or both) from the cells of the sample, contacting the nucleic acid sample with one or more primers that specifically hybridize to a NOVX gene under conditions such that hybridization and amplification of the NOVX gene (if present) occurs, and detecting the presence or absence of an amplification product, or detecting the size of the amplification product and comparing the length to a control sample. It is anticipated that PCR and/or LCR may be desirable to use as a preliminary amplification step in conjunction with any of the techniques used for detecting mutations described herein.

[0313] Alternative amplification methods include: self sustained sequence replication (see, Guatelli, et al., 1990. Proc. Natl. Acad. Sci. USA 87: 1874-1878), transcriptional amplification system (see, Kwoh, et al., 1989. Proc. Natl. Acad. Sci. USA 86: 1173-1177); Qβ Replicase (see, Lizardi, et al, 1988. BioTechnology 6: 1197), or any other nucleic acid amplification method, followed by the detection of the amplified molecules using techniques well known to those of skill in the art. These detection schemes are especially useful for the detection of nucleic acid molecules if such molecules are present in very low numbers.

[0314] In an alternative embodiment, mutations in a NOVX gene from a sample cell can be identified by alterations in restriction enzyme cleavage patterns. For example, sample and control DNA is isolated, amplified (optionally), digested with one or more restriction endonucleases, and fragment length sizes are determined by gel electrophoresis and compared. Differences in fragment length sizes between sample and control DNA indicates mutations in the sample DNA. Moreover, the use of sequence specific ribozymes (see, e.g., U.S. Pat. No. 5,493,531) can be used to score for the presence of specific mutations by development or loss of a ribozyme cleavage site.

[0315] In other embodiments, genetic mutations in NOVX can be identified by hybridizing a sample and control nucleic acids, e.g., DNA or RNA, to high-density arrays containing hundreds or thousands of oligonucleotides probes. See, e.g., Cronin, et al., 1996. Human Mutation 7: 244-255; Kozal, et al., 1996. Nat. Med. 2: 753-759. For example, genetic mutations in NOVX can be identified in two dimensional arrays containing light-generated DNA probes as described in Cronin, et al., supra. Briefly, a first hybridization array of probes can be used to scan through long stretches of DNA in a sample and control to identify base changes between the sequences by making linear arrays of sequential overlapping probes. This step allows the identification of point mutations. This is followed by a second hybridization array that allows the characterization of specific mutations by using smaller, specialized probe arrays complementary to all variants or mutations detected. Each mutation array is composed of parallel probe sets, one complementary to the wild-type gene and the other complementary to the mutant gene.

[0316] In yet another embodiment, any of a variety of sequencing reactions known in the art can be used to directly sequence the NOVX gene and detect mutations by comparing the sequence of the sample NOVX with the corresponding wild-type (control) sequence. Examples of sequencing reactions include those based on techniques developed by Maxim and Gilbert, 1977. Proc. Natl. Acad. Sci. USA 74: 560 or Sanger, 1977. Proc. Natl. Acad. Sci. USA 74: 5463. It is also contemplated that any of a variety of automated sequencing procedures can be utilized when performing the diagnostic assays (see, e.g., Naeve, et al., 1995. Biotechniques 19: 448), including sequencing by mass spectrometry (see, e.g., PCT International Publication No. WO 94/16101; Cohen, et al., 1996. Adv. Chromatography 36: 127-162; and Griffin, et al., 1993. Appl. Biochem. Biotechnol. 38: 147-159).

[0317] Other methods for detecting mutations in the NOVX gene include methods in which protection from cleavage agents is used to detect mismatched bases in RNA/RNA or RNA/DNA heteroduplexes. See, e.g., Myers, et al., 1985. Science 230: 1242. In general, the art technique of “mismatch cleavage” starts by providing heteroduplexes of formed by hybridizing (labeled) RNA or DNA containing the wild-type NOVX sequence with potentially mutant RNA or DNA obtained from a tissue sample. The double-stranded duplexes are treated with an agent that cleaves single-stranded regions of the duplex such as which will exist due to basepair mismatches between the control and sample strands. For instance, RNA/DNA duplexes can be treated with RNase and DNA/DNA hybrids treated with SI nuclease to enzymatically digesting the mismatched regions. In other embodiments, either DNA/DNA or RNA/DNA duplexes can be treated with hydroxylamine or osmium tetroxide and with piperidine in order to digest mismatched regions. After digestion of the mismatched regions, the resulting material is then separated by size on denaturing polyacrylamide gels to determine the site of mutation. See, e.g., Cotton, et al., 1988. Proc. Natl. Acad. Sci. USA 85: 4397; Saleeba, et al., 1992. Methods Enzymol. 217: 286-295. In an embodiment, the control DNA or RNA can be labeled for detection.

[0318] In still another embodiment, the mismatch cleavage reaction employs one or more proteins that recognize mismatched base pairs in double-stranded DNA (so called “DNA mismatch repair” enzymes) in defined systems for detecting and mapping point mutations in NOVX cDNAs obtained from samples of cells. For example, the mutY enzyme of E. coli cleaves A at G/A mismatches and the thymidine DNA glycosylase from HeLa cells cleaves T at G/T mismatches. See, e.g., Hsu, et al., 1994. Carcinogenesis 15: 1657-1662. According to an exemplary embodiment, a probe based on a NOVX sequence, e.g., a wild-type NOVX sequence, is hybridized to a cDNA or other DNA product from a test cell(s). The duplex is treated with a DNA mismatch repair enzyme, and the cleavage products, if any, can be detected from electrophoresis protocols or the like. See, e.g., U.S. Pat. No. 5,459,039.

[0319] In other embodiments, alterations in electrophoretic mobility will be used to identify mutations in NOVX genes. For example, single strand conformation polymorphism (SSCP) may be used to detect differences in electrophoretic mobility between mutant and wild type nucleic acids. See, e.g., Orita, et al., 1989. Proc. Natl. Acad. Sci. USA: 86: 2766; Cotton, 1993. Mutat. Res. 285: 125-144; Hayashi, 1992. Genet. Anal. Tech. Appl. 9: 73-79. Single-stranded DNA fragments of sample and control NOVX nucleic acids will be denatured and allowed to renature. The secondary structure of single-stranded nucleic acids varies according to sequence, the resulting alteration in electrophoretic mobility enables the detection of even a single base change. The DNA fragments may be labeled or detected with labeled probes. The sensitivity of the assay may be enhanced by using RNA (rather than DNA), in which the secondary structure is more sensitive to a change in sequence. In one embodiment, the subject method utilizes heteroduplex analysis to separate double stranded heteroduplex molecules on the basis of changes in electrophoretic mobility. See, e.g., Keen, et al., 1991. Trends Genet. 7: 5.

[0320] In yet another embodiment, the movement of mutant or wild-type fragments in polyacrylamide gels containing a gradient of denaturant is assayed using denaturing gradient gel electrophoresis (DGGE). See, e.g., Myers, et al., 1985. Nature 313: 495. When DGGE is used as the method of analysis, DNA will be modified to insure that it does not completely denature, for example by adding a GC clamp of approximately 40 bp of high-melting GC-rich DNA by PCR. In a further embodiment, a temperature gradient is used in place of a denaturing gradient to identify differences in the mobility of control and sample DNA. See, e.g., Rosenbaum and Reissner, 1987. Biophys. Chem. 265: 12753.

[0321] Examples of other techniques for detecting point mutations include, but are not limited to, selective oligonucleotide hybridization, selective amplification, or selective primer extension. For example, oligonucleotide primers may be prepared in which the known mutation is placed centrally and then hybridized to target DNA under conditions that permit hybridization only if a perfect match is found. See, e.g., Saiki, et al., 1986. Nature 324: 163; Saiki, et al., 1989. Proc. Natl. Acad. Sci. USA 86: 6230. Such allele specific oligonucleotides are hybridized to PCR amplified target DNA or a number of different mutations when the oligonucleotides are attached to the hybridizing membrane and hybridized with labeled target DNA.

[0322] Alternatively, allele specific amplification technology that depends on selective PCR amplification may be used in conjunction with the instant invention. Oligonucleotides used as primers for specific amplification may carry the mutation of interest in the center of the molecule (so that amplification depends on differential hybridization; see, e.g., Gibbs, et al., 1989. Nucl. Acids Res. 17: 2437-2448) or at the extreme 3′-terminus of one primer where, under appropriate conditions, mismatch can prevent, or reduce polymerase extension (see, e.g., Prossner, 1993. Tibtech. 11: 238). In addition it may be desirable to introduce a novel restriction site in the region of the mutation to create cleavage-based detection. See, e.g., Gasparini, et al., 1992. Mol. Cell Probes 6: 1. It is anticipated that in certain embodiments amplification may also be performed using Taq ligase for amplification. See, e.g., Barany, 1991. Proc. Natl. Acad. Sci. USA 88: 189. In such cases, ligation will occur only if there is a perfect match at the 3′-terminus of the 5′ sequence, making it possible to detect the presence of a known mutation at a specific site by looking for the presence or absence of amplification.

[0323] The methods described herein may be performed, for example, by utilizing pre-packaged diagnostic kits comprising at least one probe nucleic acid or antibody reagent described herein, which may be conveniently used, e.g., in clinical settings to diagnose patients exhibiting symptoms or family history of a disease or illness involving a NOVX gene.

[0324] Furthermore, any cell type or tissue, preferably peripheral blood leukocytes, in which NOVX is expressed may be utilized in the prognostic assays described herein. However, any biological sample containing nucleated cells may be used, including, for example, buccal mucosal cells.

[0325] Pharmacogenonics

[0326] Agents, or modulators that have a stimulatory or inhibitory effect on NOVX activity (e.g., NOVX gene expression), as identified by a screening assay described herein can be administered to individuals to treat (prophylactically or therapeutically) disorders. The disorders include but are not limited to, e.g., those diseases, disorders and conditions listed above, and more particularly include those diseases, disorders, or conditions associated with homologs of a NOVX protein, such as those summarized in Table A.

[0327] In conjunction with such treatment, the pharmacogenomics (i.e., the study of the relationship between an individual's genotype and that individual's response to a foreign compound or drug) of the individual may be considered. Differences in metabolism of therapeutics can lead to severe toxicity or therapeutic failure by altering the relation between dose and blood concentration of the pharmacologically active drug. Thus, the pharmacogenomics of the individual permits the selection of effective agents (e.g., drugs) for prophylactic or therapeutic treatments based on a consideration of the individual's genotype. Such pharmacogenomics can further be used to determine appropriate dosages and therapeutic regimens. Accordingly, the activity of NOVX protein, expression of NOVX nucleic acid, or mutation content of NOVX genes in an individual can be determined to thereby select appropriate agent(s) for therapeutic or prophylactic treatment of the individual.

[0328] Pharmacogenomics deals with clinically significant hereditary variations in the response to drugs due to altered drug disposition and abnormal action in affected persons. See e.g., Eichelbaum, 1996. Clin. Exp. Pharmacol. Physiol., 23: 983-985; Linder, 1997. Clin. Chem., 43: 254-266. In general, two types of pharmacogenetic conditions can be differentiated. Genetic conditions transmitted as a single factor altering the way drugs act on the body (altered drug action) or genetic conditions transmitted as single factors altering the way the body acts on drugs (altered drug metabolism). These pharmacogenetic conditions can occur either as rare defects or as polymorphisms. For example, glucose-6-phosphate dehydrogenase (G6PD) deficiency is a common inherited enzymopathy in which the main clinical complication is hemolysis after ingestion of oxidant drugs (anti-malarials, sulfonamides, analgesics, nitrofurans) and consumption of fava beans.

[0329] As an illustrative embodiment, the activity of drug metabolizing enzymes is a major determinant of both the intensity and duration of drug action. The discovery of genetic polymorphisms of drug metabolizing enzymes (e.g., N-acetyltransferase 2 (NAT 2) and cytochrome pregnancy zone protein precursor enzymes CYP2D6 and CYP2C19) has provided an explanation as to why some patients do not obtain the expected drug effects or show exaggerated drug response and serious toxicity after taking the standard and safe dose of a drug. These polymorphisms are expressed in two phenotypes in the population, the extensive metabolizer (EM) and poor metabolizer (PM). The prevalence of PM is different among different populations. For example, the gene coding for CYP2D6 is highly polymorphic and several mutations have been identified in PM, which all lead to the absence of functional CYP2D6. Poor metabolizers of CYP2D6 and CYP2C19 quite frequently experience exaggerated drug response and side effects when they receive standard doses. If a metabolite is the active therapeutic moiety, PM show no therapeutic response, as demonstrated for the analgesic effect of codeine mediated by its CYP2D6-formed metabolite morphine. At the other extreme are the so called ultra-rapid metabolizers who do not respond to standard doses. Recently, the molecular basis of ultra-rapid metabolism has been identified to be due to CYP2D6 gene amplification.

[0330] Thus, the activity of NOVX protein, expression of NOVX nucleic acid, or mutation content of NOVX genes in an individual can be determined to thereby select appropriate agent(s) for therapeutic or prophylactic treatment of the individual. In addition, pharmacogenetic studies can be used to apply genotyping of polymorphic alleles encoding drug-metabolizing enzymes to the identification of an individual's drug responsiveness phenotype. This knowledge, when applied to dosing or drug selection, can avoid adverse reactions or therapeutic failure and thus enhance therapeutic or prophylactic efficiency when treating a subject with a NOVX modulator, such as a modulator identified by one of the exemplary screening assays described herein.

[0331] Monitoring of Effects During Clinical Trials

[0332] Monitoring the influence of agents (e.g., drugs, compounds) on the expression or activity of NOVX (e.g., the ability to modulate aberrant cell proliferation and/or differentiation) can be applied not only in basic drug screening, but also in clinical trials. For example, the effectiveness of an agent determined by a screening assay as described herein to increase NOVX gene expression, protein levels, or upregulate NOVX activity, can be monitored in clinical trails of subjects exhibiting decreased NOVX gene expression, protein levels, or downregulated NOVX activity. Alternatively, the effectiveness of an agent determined by a screening assay to decrease NOVX gene expression, protein levels, or downregulate NOVX activity, can be monitored in clinical trails of subjects exhibiting increased NOVX gene expression, protein levels, or upregulated NOVX activity. In such clinical trials, the expression or activity of NOVX and, preferably, other genes that have been implicated in, for example, a cellular proliferation or immune disorder can be used as a “read out” or markers of the immune responsiveness of a particular cell.

[0333] By way of example, and not of limitation, genes, including NOVX, that are modulated in cells by treatment with an agent (e.g., compound, drug or small molecule) that modulates NOVX activity (e.g., identified in a screening assay as described herein) can be identified. Thus, to study the effect of agents on cellular proliferation disorders, for example, in a clinical trial, cells can be isolated and RNA prepared and analyzed for the levels of expression of NOVX and other genes implicated in the disorder. The levels of gene expression (i.e., a gene expression pattern) can be quantified by Northern blot analysis or RT-PCR, as described herein, or alternatively by measuring the amount of protein produced, by one of the methods as described herein, or by measuring the levels of activity of NOVX or other genes. In this manner, the gene expression pattern can serve as a marker, indicative of the physiological response of the cells to the agent. Accordingly, this response state may be determined before, and at various points during, treatment of the individual with the agent.

[0334] In one embodiment, the invention provides a method for monitoring the effectiveness of treatment of a subject with an agent (e.g., an agonist, antagonist, protein, peptide, peptidomimetic, nucleic acid, small molecule, or other drug candidate identified by the screening assays described herein) comprising the steps of (i) obtaining a pre-administration sample from a subject prior to administration of the agent; (ii) detecting the level of expression of a NOVX protein, mRNA, or genomic DNA in the preadministration sample; (iii) obtaining one or more post-admninistration samples from the subject; (iv) detecting the level of expression or activity of the NOVX protein, mRNA, or genomic DNA in the post-administration samples; (v) comparing the level of expression or activity of the NOVX protein, mRNA, or genomic DNA in the pre-administration sample with the NOVX protein, mRNA, or genomic DNA in the post administration sample or samples; and (vi) altering the administration of the agent to the subject accordingly. For example, increased administration of the agent may be desirable to increase the expression or activity of NOVX to higher levels than detected, i.e., to increase the effectiveness of the agent. Alternatively, decreased administration of the agent may be desirable to decrease expression or activity of NOVX to lower levels than detected, i.e., to decrease the effectiveness of the agent.

Methods of Treatment

[0335] The invention provides for both prophylactic and therapeutic methods of treating a subject at risk of (or susceptible to) a disorder or having a disorder associated with aberrant NOVX expression or activity. The disorders include but are not limited to, e.g., those diseases, disorders and conditions listed above, and more particularly include those diseases, disorders, or conditions associated with homologs of a NOVX protein, such as those summarized in Table A.

[0336] These methods of treatment will be discussed more fully, below.

[0337] Diseases and Disorders

[0338] Diseases and disorders that are characterized by increased (relative to a subject not suffering from the disease or disorder) levels or biological activity may be treated with Therapeutics that antagonize (i.e., reduce or inhibit) activity. Therapeutics that antagonize activity may be administered in a therapeutic or prophylactic manner. Therapeutics that may be utilized include, but are not limited to: (i) an aforementioned peptide, or analogs, derivatives, fragments or homologs thereof; (ii) antibodies to an aforementioned peptide; (iii) nucleic acids encoding an aforementioned peptide; (iv) administration of antisense nucleic acid and nucleic acids that are “dysfunctional” (i.e., due to a heterologous insertion within the coding sequences of coding sequences to an aforementioned peptide) that are utilized to “knockout” endogenous function of an aforementioned peptide by homologous recombination (see, e.g., Capecchi, 1989. Science 244: 1288-1292); or (ν) modulators ( i.e., inhibitors, agonists and antagonists, including additional peptide mimetic of the invention or antibodies specific to a peptide of the invention) that alter the interaction between an aforementioned peptide and its binding partner.

[0339] Diseases and disorders that are characterized by decreased (relative to a subject not suffering from the disease or disorder) levels or biological activity may be treated with Therapeutics that increase (i.e., are agonists to) activity. Therapeutics that upregulate activity may be administered in a therapeutic or prophylactic manner. Therapeutics that may be utilized include, but are not limited to, an aforementioned peptide, or analogs, derivatives, fragments or homologs thereof; or an agonist that increases bioavailability.

[0340] Increased or decreased levels can be readily detected by quantifying peptide and/or RNA, by obtaining a patient tissue sample (e.g., from biopsy tissue) and assaying it in vitro for RNA or peptide levels, structure and/or activity of the expressed peptides (or mRNAs of an aforementioned peptide). Methods that are well-known within the art include, but are not limited to, immunoassays (e.g., by Western blot analysis, immunoprecipitation followed by sodium dodecyl sulfate (SDS) polyacrylamide gel electrophoresis, immunocytochemistry, etc.) and/or hybridization assays to detect expression of mRNAs (e.g., Northern assays, dot blots, in situ hybridization, and the like).

[0341] Prophylactic Methods

[0342] In one aspect, the invention provides a method for preventing, in a subject, a disease or condition associated with an aberrant NOVX expression or activity, by administering to the subject an agent that modulates NOVX expression or at least one NOVX activity. Subjects at risk for a disease that is caused or contributed to by aberrant NOVX expression or activity can be identified by, for example, any or a combination of diagnostic or prognostic assays as described herein. Administration of a prophylactic agent can occur prior to the manifestation of symptoms characteristic of the NOVX aberrancy, such that a disease or disorder is prevented or, alternatively, delayed in its progression. Depending upon the type of NOVX aberrancy, for example, a NOVX agonist or NOVX antagonist agent can be used for treating the subject. The appropriate agent can be determined based on screening assays described herein. The prophylactic methods of the invention are further discussed in the following subsections.

[0343] Therapeutic Methods

[0344] Another aspect of the invention pertains to methods of modulating NOVX expression or activity for therapeutic purposes. The modulatory method of the invention involves contacting a cell with an agent that modulates one or more of the activities of NOVX protein activity associated with the cell. An agent that modulates NOVX protein activity can be an agent as described herein, such as a nucleic acid or a protein, a naturally-occurring cognate ligand of a NOVX protein, a peptide, a NOVX peptidomimetic, or other small molecule. In one embodiment, the agent stimulates one or more NOVX protein activity. Examples of such stimulatory agents include active NOVX protein and a nucleic acid molecule encoding NOVX that has been introduced into the cell. In another embodiment, the agent inhibits one or more NOVX protein activity. Examples of such inhibitory agents include antisense NOVX nucleic acid molecules and anti-NOVX antibodies. These modulatory methods can be performed in vitro (e.g., by culturing the cell with the agent) or, alternatively, in vivo (e.g., by administering the agent to a subject). As such, the invention provides methods of treating an individual afflicted with a disease or disorder characterized by aberrant expression or activity of a NOVX protein or nucleic acid molecule. In one embodiment, the method involves administering an agent (e.g., an agent identified by a screening assay described herein), or combination of agents that modulates (e.g., up-regulates or down-regulates) NOVX expression or activity. In another embodiment, the method involves administering a NOVX protein or nucleic acid molecule as therapy to compensate for reduced or aberrant NOVX expression or activity.

[0345] Stimulation of NOVX activity is desirable in situations in which NOVX is abnormally downregulated and/or in which increased NOVX activity is likely to have a beneficial effect. One example of such a situation is where a subject has a disorder characterized by aberrant cell proliferation and/or differentiation (e.g., cancer or immune associated disorders). Another example of such a situation is where the subject has a gestational disease (e.g., preclampsia).

Determination of the Biological Effect of the Therapeutic

[0346] In various embodiments of the invention, suitable in vitro or in vivo assays are performed to determine the effect of a specific Therapeutic and whether its administration is indicated for treatment of the affected tissue.

[0347] In various specific embodiments, in vitro assays may be performed with representative cells of the type(s) involved in the patient's disorder, to determine if a given Therapeutic exerts the desired effect upon the cell type(s). Compounds for use in therapy may be tested in suitable animal model systems including, but not limited to rats, mice, chicken, cows, monkeys, rabbits, and the like, prior to testing in human subjects. Similarly, for in vivo testing, any of the animal model system known in the art may be used prior to administration to human subjects.

Prophylactic and Therapeutic Uses of the Compositions of the Invention

[0348] The NOVX nucleic acids and proteins of the invention are useful in potential prophylactic and therapeutic applications implicated in a variety of disorders. The disorders include but are not limited to, e.g., those diseases, disorders and conditions listed above, and more particularly include those diseases, disorders, or conditions associated with homologs of a NOVX protein, such as those summarized in Table A.

[0349] As an example, a cDNA encoding the NOVX protein of the invention may be useful in gene therapy, and the protein may be useful when administered to a subject in need thereof. By way of non-limiting example, the compositions of the invention will have efficacy for treatment of patients suffering from diseases, disorders, conditions and the like, including but not limited to those listed herein.

[0350] Both the novel nucleic acid encoding the NOVX protein, and the NOVX protein of the invention, or fragments thereof, may also be useful in diagnostic applications, wherein the presence or amount of the nucleic acid or the protein are to be assessed. A further use could be as an anti-bacterial molecule (i.e., some peptides have been found to possess anti-bacterial properties). These materials are further useful in the generation of antibodies, which immunospecifically-bind to the novel substances of the invention for use in therapeutic or diagnostic methods.

[0351] The invention will be further described in the following examples, which do not limit the scope of the invention described in the claims.

### EXAMPLES

### Example A

### Polynucleotide and Polypeptide Sequences, and Homology Data

### Example 1

[0352] The NOV1clone was analyzed, and the nucleotide and encoded polypeptide sequences are shown in Table 1A.

TABLE 1A
NOV1 Sequence Analysis

| | | |
|---|---|---|
| NOV1a, CG191083-01 | SEQ ID NO: 1 | 4494 bp |
| DNA Sequence | ORF Start: ATG at 59 | ORF Stop: TAA at 1394 |

CGAGAGCGGGAGTGAGCGAGCGAGCGAGTTGCCGAGCGCGCCCCGTCCCTCGCGCGCGATGCTCCCCT
GGACGGCGCTCGGCCTGGCCCTGAGCTTGCGGCTGGCGCTGGCGCGGAGCGGCGCAGAGCGCGGTCCA
CCAGCATCAGCCCCCCGAGGGGACCTGATGTTCCTGCTGGACAGCTCAGCCAGCGTCTCTCACTACGA
GTTCTCCCGGGTTCGGGAGTTTGTGGGGCAGCTGGTGGCTCCACTGCCCCTGGGCACCGGGGCCCTGC
GTGCCAGTCTGGTGCACGTGGGCAGTCGGCCATACACCGAGTTCCCCTTCGGCCAGCACAGCTCGGGT
GAGGCTGCCCAGGATGCGGTGCGTGCTTCTGCCCAGCGCATGGGTGACACCCACACTGGCCTGGCGCT
GGTCTATGCCAAGGAACAGCTGTTTGCTGAAGCATCAGGTGCCCGGCCAGGGGTGCCCAAAGTGCTGG
TGTGGGTGACAGATGGCGGCTCCAGCGACCCTGTGGGCCCCCCCATGCAGGAGCTCAAGGACCTGGGC
GTCACCGTGTTCATTGTCAGCACCGGCCGAGGCAACTTCCTGGAGCTGTCAGCCGCTGCCTCAGCCCC
TGCCGAGAAGCACCTGCACTTTGTGGACGTGGATGACCTGCACATCATTGTCCAAGAGCTGAGGGGCT
CCATTCTCGACGCGATGCGGCCGCAGCAGCTCCATGCCACGGAGATCACGTCCAGCGGCTTCCGCCTG
GCCTGGCCACCCCTGCTGACCGCAGACTCGGGCTACTATGTGCTGGAGCTGGTGCCCAGCGCCCAGCC
GGGGGCTGCAAGACGCCAGCAGCTGCCAGGGAACGCCACGGACTGGATCTGGGCCGGCCTCGACCCGG
ACACGGACTACGACGTGGCGCTAGTGCCTGAGTCCAACGTGCGCCTCCTGAGGCCCCAGATCCTGCGG
GTGCGCACGCGGCCCGGTGAGGCAGGGCCGGGGGCTTCGGGCCCGGAGTCGGGGGCTGGGCCGGCCCC
CACGCAGCTCGCCGCCCTCCCCGCCCCAGAGGAGGCCGGGCCAGAGCGCATCGTCATCTCCCACGCCC
GGCCGCGCAGCCTCCGCGTGAGTTGGGCCCCAGCGCTGGGCTCAGCCGCGGCGCTCGGCTACCACGTG
CAGTTCGGGCCGCTGCGGGGCGGGGAGGCGCAGCGGGTGGAGGTGCCCGCGGGCCGCAACTGCACCAC
GCTGCAGGGCCTGGCGCCGGGCACCGCCTACCTGGTGACCGTGACCGCCGCCTTCCGCTCGGGCCGCG
AGAGCGCGCTGTCCGCCAAGGCCTGCACGCCCGACGGCCCGCGCCCGCGCCCACGCCCCGTGCCCCGC
GCCCCGACCCCGGGGACCGCCAGCCGTGAGCCGTAAGCCGGCGTCCCCGCCCAGCCGAGAGGGCCGGC
GCCTACCTGAGGGCCCCTGTGTCCCGAACCCGGAGCGGAGGCGCCCAACCCGGCAGACGGGTGCAGGC
CCGGCCTTTCCCCACGCGGACTCCGCGCGACCCCGGCCCTCTCCCTGCGGCCGCAGGGCTTCCCCGCC
TGGCGCCTGCCCTCCAGGGCTGGGGCCTCGCCTGGCGGGACCCCGCAGCAGCCCCGGCCCCATCCCCC
CCCAGAGCCGGGCGTCGTGTGGGTCCGTGGGTGATAATTGAGAGCGTCAGACCCAGGACTGTTCAGGC
CAGCTTGGGTCCTGGACGTTGATAGGAAGCGGAAGGGGAATCGCGGGAAGCTGGCCCAGGTCAGGTCC
GCAAAGGCTTCTGAAGAAGAGGAAGGGCGAGTAGGGGCACCTGGACGCTGATGGTGGCCAGGATGCTC
AGCTGGCCAGGAGGGCAGCACCTGCTGGGGACGGTGGCCCTGCCTTCATGCCCAGGACACCAGCTGGG
TCCAGCTAGCAGCCACTGGGAATCAGAGGAATGGGGCAGAGCTGGCCATTCAGGACCTTGAGGACAGG
TGACCCCACCCGCCCACCGCCACTATCAGGCCCCGGGACCGCACTCACAGGAAACCTTCCGTCGTGAC
GGAGCACTTCCCAGGGGCCGCAGGGACGACACTCTCCAGGGAGGCCCCAGCAACCACACCATCTTCTT
GCTGTGAGAGGTCTCACCCCGGGCTACCTCCTGTCACTACTCACTGCCCTGGGGTCCGTGGGCAAGTT
GCCCAGGGTGGGGGTGCCTAGCCAGGTGCAGTCCCCGCCCCGCCTAGTCCTCGGCGTCACGCAATGCT
CACCTCGCCTCTTCCCCACTAACATCCCAGACTTTAAAATTCAGTAAATCAGATGTACACCGAGCCTC
CAGTCTCGCTAGGATGCTTTACTCCTCCACAAACAGCAGCCGCCGACAGGACAGCTTGTGAACGTCTC
CGCCTTTTGGGGTGTCCGGGGAGAGGAGGTGGAGCTGTCCCCTCCCAGTGTCAGGCCTCCTTGGTCCT
CATGTGCACCTTTTATTCAGAGAGCTTGGGCCCCCTTCCTTTGGAGCTGGGCCCAGGGCAGGTGGCTG
GAATGCAGAGGACAAGGGGGCTGGGGCCTCTGCAGGGCCATTCCCACCGCAGTCTCTGCCACGGCCCG
GAGCCCTGGGCCCAGGGCCACGCGGGCTCCCTCTGCTGGCAAAGCCACACCCTGCACCGCATGGGGTC
CACTGCCCCTTTCCCCACGTGGACTCTGCGTGACCCCAGGAACTGCAGCATTGAGGTGGTCTCAGTCC
CTCCCTCAGGTCTGGTGGGCATTGTGCCAGGGGCCACCTTCGGGACAGCTGGCCTTGGCACCGTCTCC
CAAGAACCCAGCTCTGTGCATCCCGTGGCCCCACCAGAAACCCAAGGCCACACCGCCCACCAGCTGGG
TGTGGTCACCATTCATGGAGGGCCGGCTGGGGCCAGGCTCACCACGCAGAGTTTGCCCTCCGGTGTGA
TGATGCATGAGACACAGTAGGCCCCCCTGCCTGTGTGTGCAGGGGGTGTCTGTGGGGGGGCCCTGCTG
GCTGGACTTTCGGTTTCTCCTGAGCTCCCCTTAGCCCCCAAGTCAGGCCACGGAGGCCTGAGTAGGAC
CCATGGGCTGTGTGTGTCACTGCAGGTGGCGTGCTCACAACTGCACTGCTGGTCGGCAGGTGGCCAGG
GTTGCAGGCCCGGGCCTCGGGCCCCACCTCCTCTGGAGGGGTAGGATCTCCTTCGTGCAGCCCCTGCC
CCCTACCCTGTTCTCCGGAGTGTTGGCAGATCTGAGCCCACGGTCACGTGAGAGGAGATGCCTCTTGC
ACACTGAGCCCAGGCCCAGCTCACGGAGCACCCTGCAGGTGGCAGCGGGGCACCAGGGGCTCATTCCT
GGTGGCCTCAGTGGCTTCTGTGGACGACTCAGACTCACATGAGAAGCTGGGAGGAGCTCCAGCTCTGC
AATCCCGAGAGGGCAGAGCGGGGGCCCTGGCCACAACCCTGCTCCCCACATACCCGTCTGGCAGAGGC
TCTGCCTCCCCTCTGCCCATCTCTGCACACCAAGGCTGAGCACAGCACAAGGCCTCACGGAGAGGGTG
AAAAGGCACTGCCGTCTCCATCTCAGTGCCAAGGAATGCCCCTTTCAGAAGCCCTCGTCTGAGAAGTG
CTGCCCCTTATGTAGCCCCAGGCATTTTAAAATCTTTGAATCTGCACCAAGTCTCAGAACAGCTCTGG
CCCCGGAGTGCTCCGTCCAGGCCGCTGTGAACCGGCTGTCCCCGCGTCTCCTCCACCTCCCCTGACAC
AATCCTGGCCCCGACTCAGTCCACCCAGGGTGCAGTGCAGAGGCTGATACCCGCCAGGACTTCCTTGC
CAAGGGCCCGGCCACGTCACAAGGCCACTGCACGCTTTTCGACATGCACCTGGAAATCGGGAAGGGCC
ATGCTGCAGTTGCTTCTAGTTGAGACGAGAAGAGCGACAAGGTTGTGATCCACGTGGCAGGTGTTCAG
AAGGCTGGGGGCGGGCAGCGCTGGGGAGAGCCCTGGGTACTTCGAGGAGACCCCGAAGGGAGGCTGCT
CCCACACCTGCGCCAGTTTCCACCCTCTCTGTGAGCAGGGCTGCGGTCACCTCCCACATCTGAAGAGA
ACCAACCTGAGGATTTCACGCTGGCTGCGTGCCAGACCAGTCCCTGACAGGTTGTGCGAGGCCCTTCG
CTGGACAGCCCATTGCTGGCCACTGGACGGAGAGGCAGAGGGGGCTGAAATTCGGGCCCATGCCTCTG
TGAGCGATGACGGAGCAACAGCTCTCCAGCACGTGAAGCTCTCCAGACAGCTGTTCGTGAGAAGCCAG
ACAGAGGCCTGGGGTCTCAGTCCAGATTTCTGGGGAGTGGGGTGTCCAAGCGTGGGCCACGCTGCTGG
GAGCCACCTAGGGAAGCAGGTCGCCTGTTTCTATAGTGACGGTAATAAACCAAGTCAATTTTCTATAA
AAAAAA

| | | | |
|---|---|---|---|
| NOV1a, CG191083-01 | SEQ ID NO: 2 | 445 aa | MW at 46803.5kD |
| Protein Sequence | | | |

MLPWTALGLALSLRLALARSGAERGPPASAPRGDLMFLLDSSASVSHYEFSRVREFVGQLVAPLPLGT
GALRASLVHVGSRPYTEFPFGQHSSGEAAQDAVRASAQRMGDTHTGLALVYAKEQLFAEASGARPGVP
KVLVWVTDGGSSDPVGPPMQELKDLGVTVFIVSTGRGNFLELSAAASAPAEKHLHFVDVDDLHIIVQE
LRGSILDAMRPQQLHATEITSSGFRLAWPPLLTADSGYYVLELVPSAQPGAARRQQLPGNATDWIWAG
LDPDTDYDVALVPESNVRLLRPQILRVRTRPGEAGPGASGPESGAGPAPTQLAALPAPEEAGPERIVI
HARPRSLRVSWAPALGSAAALGYHVQFGPLRGGEAQRVEVPAGPNCTTLQGLAPGTAYLVTVTAAFR
SGRESALSAKACTPDGPRPRPRPVPRAPTPGTASREP

[0353] Further analysis of the NOV1a protein yielded the following properties shown in Table 1B.

TABLE 1B
Protein Sequence Properties NOV1a

| | |
|---|---|
| SignalP analysis: | Cleavage site between residues 19 and 20 |
| PSORT II analysis: | |

| PSG: | a new signal peptide prediction method | |
|---|---|---|
| | N-region: | length 0; pos. chg 0; neg. chg 0 |
| | H-region: | length 13; peak value 8.36 |
| | PSG score: | 3.96 |

| | |
|---|---|
| GvH: | von Heijne's method for signal seq. recognition |
| | GvH score (threshold: −2.1): 2.40 |
| | possible cleavage site: between 18 and 19 |

>>> Seems to have a cleavable signal peptide (1 to 18)

| ALOM: | Klein et al's method for TM region allocation | |
|---|---|---|
| | Init position for calculation: 19 | |
| | Tentative number of TMS(s) for the threshold 0.5: 0 | |
| | number of TMS(s) . . . fixed | |
| | PERIPHERAL | Likelihood = 2.17 (at 60) |

| | |
|---|---|
| | ALOM score: 2.17 (number of TMSs: 0) |
| MTOP: | Prediction of membrane topology (Hartmann et al.) |
| | Center position for calculation: 9 |
| | Charge difference: 1.0 C(2.0)-N(1.0) |
| | C > N: C-terminal side will be inside |

>>>Caution: Inconsistent mtop result with signal peptide

| MITDISC: | discrimination of mitochondrial targeting seq | | | |
|---|---|---|---|---|
| | R content: | 2 | Hyd Moment(75): | 2.90 |
| | Hyd Moment(95): | 1.31 | G content: | 2 |
| | D/E content: | 1 | S/T content: | 3 |

| | |
|---|---|
| | Score: −4.22 |
| Gavel: | prediction of cleavage sites for mitochondrial preseq |
| | R-2 motif at 29 ARS\|GA |

NUCDISC: discrimination of nuclear localization signals

| | |
|---|---|
| | pat4: none |
| | pat7: none |
| | bipartite: none |
| | content of basic residues: 9.2% |
| | NLS Score: −0.47 |
| KDEL: | ER retention motif in the C-terminus: none |

ER Membrane Retention Signals: none
SKL: peroxisomal targeting signal in the C-terminus: none
PTS2: 2nd peroxisomal targeting signal: none
VAC: possible vacuolar targeting motif: none
RNA-binding motif: none
Actinin-type actin-binding motif:

type 1: none
type 2: none

NMYR: N-myristoylation pattern: none
Prenylation motif: none
memYQRL: transport motif from cell surface to Golgi: none
Tyrosines in the tail: none
Dileucine motif in the tail: none
checking 63 PROSITE DNA binding motifs: none
checking 71 PROSITE ribosomal protein motifs: none
checking 33 PROSITE prokaryotic DNA binding motifs: none

| | |
|---|---|
| NNCN: | Reinhardt's method for Cytoplasmic/Nuclear discrimination |
| | Prediction: cytoplasmic |
| | Reliability: 76.7 |
| COIL: | Lupas's algorithm to detect coiled-coil regions |
| | total: 0 residues |

Final Results (k = 9/23):

33.3%: extracellular, including cell wall
33.3%: mitochondrial
22.2%: vacuolar
11.1%: endoplasmic reticulum

>> prediction for CG191083-01 is exc (k = 9)

[0354] A search of the NOV1a protein against the Geneseq database, a proprietary database that contains sequences published in patents and patent publication, yielded several homologous proteins shown in Table 1C.

TABLE 1C
Geneseq Results for NOV1a

| | | | Identities/ | |
|---|---|---|---|---|
| | | NOV1a | Similarities | |
| Geneseq | Protein/Organism/Length | Residues/ | for the | Expect |
| Identifier | [Patent #, Date] | Match Residues | Matched Region | Value |
| ABP69674 | Human polypeptide SEQ ID NO 1721 - | 1 . . . 445 | 445/445 (100%) | 0.0 |
| | Homo sapiens, 445 aa. | 1 . . . 445 | 445/445 (100%) | |
| | [WO200270539-A2, 12-SEP-2002] | | | |
| AAE32502 | Human Willebrand Factor A domain | 1 . . . 445 | 418/445 (93%) | 0.0 |
| | related-protein (WARP) - Homo | 1 . . . 418 | 418/445 (93%) | |
| | sapiens, 418 aa. [WO200288184-A1, | | | |
| | 07-NOV-2002] | | | |
| AAE32501 | Mouse Willebrand Factor A domain | 1 . . . 445 | 324/445 (72%) | 0.0 |
| | related-protein (WARP) - Mus sp, 415 | 1 . . . 415 | 356/445 (79%) | |
| | aa. [WO200288184-A1, 07-NOV-2002] | | | |
| AAW86326 | Kidney injury associated molecule | 1 . . . 445 | 325/445 (73%) | e−179 |
| | HW059 protein - Rattus sp, 421 aa. | 7 . . . 421 | 356/445 (79%) | |
| | [WO9853071-A1, 26-NOV-1998] | | | |
| AAB42581 | Human ORFX ORF2345 polypeptide | 3 . . . 296 | 274/294 (93%) | e−150 |
| | sequence SEQ ID NO: 4690 - Homo | 10 . . . 299 | 274/294 (93%) | |
| | sapiens, 299 aa. [WO200058473-A2, | | | |
| | 05-OCT-2000] | | | |

[0355] In a BLAST search of public sequence databases, the NOV1a protein was found to have homology to the proteins shown in the BLASTP data in Table 1D.

TABLE 1D
Public BLASTP Results for NOV1a

| | | | Identities/ | |
|---|---|---|---|---|
| Protein | | NOV1a | Similarities | |
| Accession | | Residues/ | for the | Expect |
| Number | Protein/Organism/Length | Match Residues | Matched Portion | Value |
| Q8R2Z5 | Hypothetical protein (VON | 1 . . . 445 | 325/445 (73%) | e−180 |
| | WILLEBRAND factor A-related | 1 . . . 415 | 356/445 (79%) | |
| | protein homolog) - Mus musculus | | | |
| | (Mouse), 415 aa. | | | |
| Q8C0Q7 | VON WILLEBRAND factor A-related | 1 . . . 445 | 324/445 (72%) | e−180 |
| | protein homolog - Mus musculus | 1 . . . 415 | 355/445 (78%) | |
| | (Mouse), 415 aa. | | | |
| Q923K3 | Von Willebrand factor A-related | 1 . . . 445 | 324/445 (72%) | e−180 |
| | protein - Mus musculus (Mouse), | 1 . . . 415 | 356/445 (79%) | |
| | 415 aa. | | | |
| CAC39705 | Sequence 47 from Patent EP1067182 - | 1 . . . 257 | 253/257 (98%) | e−142 |
| | Homo sapiens (Human), 285 aa. | 1 . . . 257 | 254/257 (98%) | |
| Q9H6J5 | Hypothetical protein FLJ22215 - | 213 . . . 445 | 233/233 (100%) | e−134 |
| | Homo sapiens (Human), 233 aa. | 1 . . . 233 | 233/233 (100%) | |

[0356] PFam analysis predicts that the NOV1a protein contains the domains shown in the Table 1E.

TABLE 1E
Domain Analysis of NOV1a

| | | Identities/ | | |
|---|---|---|---|---|
| | | Similarities | | |
| Pfam | | for the | | |
| Domain | NOV1a Match Region | Matched Region | | Expect Value |
| vwa | 34 . . . 205 | 68/194 | (35%) | 1.5e−40 |
| | | 132/194 | (68%) | |
| fn3 | 212 . . . 287 | 22/85 | (26%) | 0.18 |
| | | 52/85 | (61%) | |
| fn3 | 332 . . . 413 | 30/85 | (35%) | 1.4e−11 |
| | | 53/85 | (62%) | |

### Example 2

[0357] The NOV2 clone was analyzed, and the nucleotide and encoded polypeptide sequences are shown in Table 2A.

TABLE 2A
NOV2 Sequence Analysis

| | | |
|---|---|---|
| Nov2a, CG191745-01 | SEQ ID NO: 3 | 3462 bp |
| DNA Sequence | ORF Start: ATG at 2 | ORF Stop: TGA at 3443 |

GATGGGGCCAGAACGGACAGGGGCCGCGCCGCTGCCGCTGCTGCTGGTGTTAGCGCTCAGTCAAGGCA
TTTTAAATTGTTGTTTGGCCTACAATGTTGGTCTCCCAGAAGCAAAAATATTTTCCGGTCCTTCAAGT
GAACAGTTTGGCTATGCAGTGCAGCAGTTTATAAATCCAAAAGGCAACTGGTTACTGGTTGGTTCACC
CTGGAGTGGCTTTCCTGAGAACCGAATGGGAGATGTGTATAAATGTCCTGTTGACCTATCCACTGCCA
CATGTGAAAAACTAAATTTGCAAACTTCAACAAGCATTCCAAATGTTACTGAGATGAAAACCAACATG
AGCCTCGGCTTGATCCTCACCAGGAACATGGGAACTGGAGGTTTTCTCACATGTGGTCCTCTGTGGGC
ACAGCAATGTGGGAATCAGTATTACACAACGGGTGTGTGTTCTGACATCAGTCCTGATTTTCAGCTCT
CAGCCAGCTTCTCACCTGCAACTCAGCCCTGCCCTTCCCTCATAGATGTTGTGGTTGTGTGTGATGAA
TCAAATAGTATTTATCCTTGGGATGCAGTAAAGAATTTTTTGGAAAAATTTGTACAAGGCCTGGATAT
AGGCCCCACAAAGACACAGGTGGGGTTAATTCAGTATGCCAATAATCCAAGAGTTGTGTTTAACTTGA
ACACATATAAAACCAAAGAAGAAATGATTGTAGCAACATCCCAGACATCCCAATATGGTGGGGACCTC
ACAAACACATTCGGAGCAATTCAATATGCAAGAAAATATGCTTATTCAGCAGCTTCTGGTGGGCGACG
AAGTGCTACGAAAGTAATGGTAGTTGTAACTGACGGTGAATCACATGATGGTTCAATGTTGAAAGCTG
TGATTGATCAATGCAACCATGACAATATACTGAGGTTTGGCATAGCAGTTCTTGGGTACTTAAACAGA
AACGCCCTTGATACTAAAAATTTAATAAAAGAAATAAAAGCAATCGCTAGTATTCCAACAGAAAGATA
CTTTTTCAATGTGTCTGATGAAGCAGCTCTACTAGAAAAGGCTGGGACATTAGGAGAACAAATTTTCA
GCATTGAAGGTACTGTTCAAGGAGGAGACAACTTTCAGATGGAAATGTCACAAGTGGGATTCAGTGCA
GATTACTCTTCTCAAAATGATATTCTGATGCTGGGTGCAGTGGGAGCTTTTGGCTGGAGTGGGACCAT
TGTCCAGAAGACATCTCATGGCCATTTGATCTTTCCTAAACAAGCCTTTGACCAAATTCTGCAGGACA
GAAATCACAGTTCATATTTAGGTTACTCTGTGGCTGCAATTTCTACTGGAGAAAGCACTCACTTTGTT
GCTGGTGCTCCTCGGGCAAATTATACCGGCCAGATAGTGCTATATAGTGTGAATGAGAATGGCAATAT
CACGGTTATTCAGGCTCACCGAGGTGACCAGATTGGCTCCTATTTTGGTAGTGTGCTGTGTTCAGTTG
ATGTGGATAAAGACACCATTACAGACGTGCTCTTGGTAGGTGCACCAATGTACATGAGTGACCTAAAG
AAAGAGGAAGGAAGAGTCTACCTGTTTACTATCAAAGAGGGCATTTTGGGTCAGCACCAATTTCTTGA
AGGCCCCGAGGGCATTGAAAACACTCGATTTGGTTCAGCAATTGCAGCTCTTTCAGACATCAACATGG
ATGGCTTTAATGATGTGATTGTTGGTTCACCACTAGAAAATCAGAATTCTGGAGCTGTATACATTTAC
AATGGTCATCAGGGCACTATCCGCACAAAGTATTCCCAGAAAATCTTGGGATCCGATGGAGCCTTTAG
GAGCCATCTCCAGTACTTTGGGAGGTCCTTGGATGGCTATGGAGATTTAAATGGGGATTCCATCACCG
ATGTGTCTATTGGTGCCTTTGGACAAGTGGTTCAACTCTGGTCACAAAGTATTGCTGATGTAGCTATA
GAAGCTTCATTCACACCAGAAAAAATCACTTTGGTCAACAAGAATGCTCAGATAATTCTCAAACTCTG
CTTCAGTGCAAAGTTCAGACCTACTAAGCAAAACAATCAAGTGGCCATTGTATATAACATCACACTTG
ATGCAGATGGATTTTCATCCAGAGTAACCTCCAGGGGGTTATTTAAAGAAAACAATGAAAGGTGCCTG
CAGAAGAATATGGTAGTAAATCAAGCACAGAGTTGCCCCGAGCACATCATTTATATACAGGAGCCCTC
TGATGTTGTCAACTCTTTGGATTTGCGTGTGGACATCAGTCTGGAAAACCCTGGCACTAGCCCTGCCC
TTGAAGCCTATTCTGAGACTGCCAAGGTCTTCAGTATTCCTTTCCACAAAGACTGTGGTGAGGACGGA
CAGCAACCAAAACAAAAGGTTAACATTTTCAGTAACGCTGAAAAATAAAAGGGAAAGTGCATACAACA
GAAGTAACATGCCAGGTGGCTGCATCTCAGAAGTCTGTTGCCTGCGATGTAGGCTACCCTGCTTTAAA
GAGAGAACAACAGGTGACTTTTACTATTAACTTTGACTTCAATCTTCAAAACCTTCAGAATCAGGCGT
ATTCCTCTCCTGTATGATGCTGAAATTCACTTAACAAAGGTAACAACAGGAAGTGTTCCAGTAAGCAT
TGCAAACAGACAAGGCTGGTGACATCAGTTGTAATGCAGATATCAATCCACTGAAAATAGGACAAACA
TCTTCTTCTGTATCTTTCAAAAGTGAAAATTTCAGGCACACCAAAGAATTGAACTGCAGAACTGCTTC
CTGTAGTAATGTTACCTGCTGGTTGAAAGACGTTCACATGAAAGGAGAATACTTTGTTAATGTGACTA
CCAGAATTTGGAACGGGACTTTCGCATCATCAACGTTCCAGACAGTACAGCTAACGGCAGCTGCAGAA
ATCAACACCTATAACCCTGAGATATATGTGATTGAAGATAACACTGTTACGATTCCCCTGATGATAAT
GAAACCTGATGAGAAAGCCGAAGTACCAACAGGAGTTATAATAGGAAGTATAATTGCTGGAATCCTTT
TGCTGTTAGCTCTGGTTGCAATTTTATGGAAGCTCGGCTTCTTCAAAAGAAAATATGAAAAGATGACC
AAAAATCCAGATGAGATTGATGAGACCACAGAGCTCAGTAGCTGAACCAGCAGACCTACCTG

| | | | |
|---|---|---|---|
| NOV2a, CG191745-01 | SEQ ID NO: 4 | 1147 aa | MW at 125495.9kD |
| Protein Sequence | | | |

MGPERTGAAPLPLLLVLALSQGILNCCLAYNVGLPEAKIFSGPSSEQFGYAVQQFINPKGNWLLVGSP
WSGFPENRMGDVYKCPVDLSTATCEKLNLQTSTSIPNVTEMKTNMSLGLILTRNMGTGGFLTCGPLWA
QQCGNQYYTTGVCSDISPDFQLSASFSPATQPCPSLIDVVVVCDESNSIYPWDAVKNFLEKFVQGLDI
GPTKTQVGLIQYANNPRVVFNLNTYKTKEEMIVATSQTSQYGGDLTNTFGAIQYARKYAYSAASGGRR
SATKVMVVVIDGESHDGSMLKAVIDQCNHDNILRFGIAVLGYLNRNALDTKNLIKEIKAIASIPTERY
FFNVSDEAALLEKAGTLGEQIFSIEGTVQGGDNFQMEMSQVGFSADYSSQNDILMLGAVGAFGWSGTI
VQKTSHGHLIFPKQAFDQILQDRNHSSYLGYSVAAISTGESTHFVAGAPRANYTGQIVLYSVNENGNI
TVIQAHRGDQIGSYFGSVLCSVDVDKDTITDVLLVGAPMYMSDLKKEEGRVYLFTIKEGILGQHQFLE
GPEGIENTRFGSAIAALSDINMDGFNDVIVGSPLENQNSGAVYIYNGHQGTIRTKYSQKILGSDGAFR
SHLQYFGRSLDGYGDLNGDSITDVSIGAFGQVVQLWSQSIADVAIEASFTPEKITLVNKNAQIILKLC
FSAKFRPTKQNNQVAIVYNITLDADGFSSRVTSRGLFKENNERCLQKNMVVNQAQSCPEHIIYIQEPS
DVVNSLDLRVDISLENPGTSPALEAYSETAKVFSIPFHKDCGEDGLCISDLVLDVRQIPAAQEQPFIV
SNQNKRLTFSVTLKNKRESAYNTGIVVDFSENLFFASFSLPVDGTEVTCQVAASQKSVACDVGYPALK
REQQVTFTINFDFNLQNLQNQASLSFQALSESQEENKADNLVNLKIPLLYDAEIHLTKVTTGSVPVSM
ATVIIHIPQYTKEKNPLMYLTGVQTDKAGDISCNADINPLKIGQTSSSVSEKSENFRHTKELNCRTAS
CSNVTCWLKDVHMKGEYFVNVTTRIWNGTFASSTFQTVQLTAAAEINTYNPEIYVIEDNTVTIPLMIM
KPDEKAEVPTGVIIGSIIAGILLLLALVAILWKLGFFKRKYEKMTKNPDEIDETTELSS

[0358] Further analysis of the NOV2a protein yielded the following properties shown in Table 2B.

TABLE 2B
Protein Sequence Properties NOV2a

| | |
|---|---|
| SignalP analysis: | Cleavage site between residues 30 and 31 |
| PSORT II analysis: | |

| PSG: | a new signal peptide prediction method | |
|---|---|---|
| | N-region: | length 5; pos. chg 1; neg. chg 1 |
| | H-region: | length 30; peak value 9.82 |
| | PSG score: | 5.42 |

| | |
|---|---|
| GvH: | von Heijne's method for signal seq. recognition |
| | GvH score (threshold: −2.1): 1.12 |
| | possible cleavage site: between 22 and 23 |

>>> Seems to have a cleavable signal peptide (1 to 22)

| ALOM: | Klein et al's method for TM region allocation | | |
|---|---|---|---|
| | Init position for calculation: 23 | | |
| | Tentative number of TMS(s) for the threshold 0.5: 2 | | |
| | Number of TMS(s) for threshold 0.5: 1 | | |
| | INTEGRAL | Likelihood = | Transmembrane 1100-1116 |
| | | −13.27 | |

| | |
|---|---|
| PERIPHERAL | Likelihood = 0.95 (at 943) |

| | |
|---|---|
| | ALOM score: −13.27 (number of TMSs: 1) |
| MTOP: | Prediction of membrane topology (Hartmann et al.) |
| | Center position for calculation: 11 |
| | Charge difference: −2.0 C(−1.0)-N(1.0) |
| | N >= C: N-terminal side will be inside |

>>> membrane topology: type 1a (cytoplasmic tail 1117 to 1147)

| MITDISC: | discrimination of mitochondrial targeting seq | | | |
|---|---|---|---|---|
| | R content: | 1 | Hyd Moment(75): | 10.10 |
| | Hyd Moment(95): | 5.95 | G content: | 4 |
| | D/E content: | 2 | S/T content: | 2 |

| | |
|---|---|
| | Score: −6.90 |
| Gavel: | prediction of cleavage sites for mitochondrial preseq |
| | R-2 motif at 15 ERT\|GA |

NUCDISC: discrimination of nuclear localization signals

| | |
|---|---|
| | pat4: none |
| | pat7: none |
| | bipartite: none |
| | content of basic residues: 7.7% |
| | NLS Score: −0.47 |
| KDEL: | ER retention motif in the C-terminus: none |

ER Membrane Retention Signals:

XXRR-like motif in the N-terminus: GPER

none
SKL: peroxisomal targeting signal in the C-terminus: none
PTS2: 2nd peroxisomal targeting signal: none
VAC: possible vacuolar targeting motif: none
RNA-binding motif: none
Actinin-type actin-binding motif:

type 1: none
type 2: none

NMYR: N-myristoylation pattern: none
Prenylation motif: none
memYQRL: transport motif from cell surface to Golgi: none
Tyrosines in the tail: 1128
Dileucine motif in the tail: none
checking 63 PROSITE DNA binding motifs: none
checking 71 PROSITE ribosomal protein motifs: none
checking 33 PROSITE prokaryotic DNA binding motifs: none

| | |
|---|---|
| NNCN: | Reinhardt's method for Cytoplasmic/Nuclear discrimination |
| | Prediction: cytoplasmic |
| | Reliability: 89 |
| COIL: | Lupas's algorithm to detect coiled-coil regions |
| | total: 0 residues |

Final Results (k = 9/23):

55.6%: endoplasmic reticulum
22.2%: Golgi
11.1%: plasma membrane
11.1%: extracellular, including cell wall

>> prediction for CG191745-01 is end (k = 9)

[0359] A search of the NOV2a protein against the Geneseq database, a proprietary database that contains sequences published in patents and patent publication, yielded several homologous proteins shown in Table 2C.

TABLE 2C
Geneseq Results for NOV2a

| | | NOV2a | Identities/ | |
|---|---|---|---|---|
| | | Residues/ | Similarities for | |
| Geneseq | Protein/Organism/Length | Match | the Matched | Expect |
| Identifier | [Patent #, Date] | Residues | Region | Value |
| AAG79775 | Alpha2 integrin - Homo sapiens, 1181 | 1 . . . 1147 | 1146/1181 (97%) | 0.0 |
| | aa. [WO2002101070-A2, 19-DEC- | 1 . . . 1181 | 1147/1181 (97%) | |
| | 2002] | | | |
| ABU03548 | Angiogenesis-associated human | 1 . . . 1147 | 1146/1181 (97%) | 0.0 |
| | protein sequence #93 - Homo | 1 . . . 1181 | 1147/1181 (97%) | |
| | sapiens, 1181 aa. [WO200279492-A2, | | | |
| | 10-OCT-2002] | | | |
| ABU03617 | Human expressed protein tag (EPT) | 1 . . . 1147 | 1146/1181 (97%) | 0.0 |
| | #283 - Homo sapiens, 1181 aa. | 1 . . . 1181 | 1147/1181 (97%) | |
| | [WO200278524-A2, 10-OCT-2002] | | | |
| ABU03616 | Human expressed protein tag (EPT) | 1 . . . 1147 | 1146/1181 (97%) | 0.0 |
| | #282 - Homo sapiens, 1181 aa. | 1 . . . 1181 | 1147/1181 (97%) | |
| | [WO200278524-A2, 10-OCT-2002] | | | |
| ABU03614 | Human expressed protein tag (EPT) | 1 . . . 1147 | 1146/1181 (97%) | 0.0 |
| | #280 - Homo sapiens, 1181 aa. | 1 . . . 1181 | 1147/1181 (97%) | |
| | [WO200278524-A2, 10-OCT-2002] | | | |

[0360] In a BLAST search of public sequence databases, the NOV2a protein was found to have homology to the proteins shown in the BLASTP data in Table 2D.

TABLE 2D
Public BLASTP Results for NOV2a

| | | NOV2a | Identities/ | | |
|---|---|---|---|---|---|
| Protein | | Residues/ | Similarities for | | |
| Accession | | Match | the Matched | | Expect |
| Number | Protein/Organism/Length | Residues | Portion | | Value |
| P17301 | Integrin alpha-2 precursor (Platelet | 1 . . . 1147 | 1146/1181 | (97%) | 0.0 |
| | membrane glycoprotein la) (GPla) | 1 . . . 1181 | 1147/1181 | (97%) | |
| | (Collagen receptor) (VLA-2 alpha | | | | |
| | chain) (CD49b) - Homo sapiens | | | | |
| | (Human), 1181 aa. | | | | |
| P53710 | Integrin alpha-2 precursor (Platelet | 12 . . . 1147 | 986/1170 | (84%) | 0.0 |
| | membrane glycoprotein la) (GPla) | 1 . . . 1170 | 1069/1170 | (91%) | |
| | (Collagen receptor) (VLA-2 alpha | | | | |
| | chain) (CD49b) - Bos taurus (Bovine), | | | | |
| | 1170 aa (fragment). | | | | |
| Q62469 | Integrin alpha-2 precursor (Platelet | 1 . . . 1147 | 945/1181 | (80%) | 0.0 |
| | membrane glycoprotein la) (GPla) | 1 . . . 1178 | 1040/1181 | (88%) | |
| | (Collagen receptor) (VLA-2 alpha | | | | |
| | chain) (CD49b) - Mus musculus | | | | |
| | (Mouse), 1178 aa. | | | | |
| P18614 | Integrin alpha-1 precursor (Laminin | 1 . . . 1131 | 471/1202 | (39%) | 0.0 |
| | and collagen receptor) (VLA-1) | 1 . . . 1176 | 678/1202 | (56%) | |
| | (CD49a) - Rattus norvegicus (Rat), | | | | |
| | 1180 aa. | | | | |
| O42094 | ALPHA1 integrin - Gallus gallus | 29 . . . 1131 | 456/1179 | (38%) | 0.0 |
| | (Chicken), 1171 aa. | 17 . . . 1167 | 671/1179 | (56%) | |

[0361] PFam analysis predicts that the NOV2a protein contains the domains shown in the Table 2E.

TABLE 2E
Domain Analysis of NOV2a

| | | Identities/ | | |
|---|---|---|---|---|
| Pfam | NOV2a | Similarities for | | Expect |
| Domain | Match Region | the Matched Region | | Value |
| vwa | 174 . . . 361 | 64/203 | (32%) | 1.1e−47 |
| | | 146/203 | (72%) | |
| FG-GAP | 491 . . . 554 | 18/64 | (28%) | 0.00012 |
| | | 52/64 | (81%) | |
| FG-GAP | 555 . . . 602 | 14/52 | (27%) | 0.00062 |
| | | 37/52 | (71%) | |
| FG-GAP | 618 . . . 661 | 14/51 | (27%) | 0.073 |
| | | 32/51 | (63%) | |
| integrin_A | 1121 . . . 1135 | 8/15 | (53%) | 0.0048 |
| | | 14/15 | (93%) | |

### Example 3

[0362] The NOV3 clone was analyzed, and the nucleotide and encoded polypeptide sequences are shown in Table 3A.

TABLE 3A
NOV3 Sequence Analysis

| | | |
|---|---|---|
| NOV3a, CG50253-01 | SEQ ID NO: 5 | 1882 bp |
| DNA Sequence | ORF Start: ATG at 243 | ORF Stop: TAA at 1851 |

GGACACTGACATGGACTGAAGGAGTAGAAAAGAAGGGAGCGGGAGGGGGCTCCGGGCGCCGCGCAGCA
GACCTACTCCGGCCGCGCGCCTCGCCGCTGTCCTCCGGGAGCGGCAGCAGTAGCCCGGGCGGCGAGGG
CTGGGGGTTCCTCGAGACTCTCAGAGGGGCGCCTCCCATCGGCGCCCACCACCCCAACCTGTTCCTCG
CGCGCCACTGCGCTGCGCCCCAGGACCCGCTGCCCAACATGGATTTTCTCCTGGCGCTGGTGCTGGTA
TCCTCGCTCTACCTGCAGGCGGCCGCCGAGTTCGACGGGAGGTGGCCCAGGCAAATAGTGTCATCGAT
TGGCCTATGTCGTTATGGTGGGAGGATTGACTGCTGCTGGGGCTGGGCTCGCCAGTCTTGGGGACAGT
GTCAGCCTGTGTGCCAACCACGATGCAAACATGGTGAATGTATCGGGCCAAACAAGTGCAAGTGTCAT
CCTGGTTATGCTGGAAAAACCTGTAATCAAGATCTAAATGAGTGTGGCCTGAAGCCCCGGCCCTGTAA
GCACAGGTGCATGAACACTTACGGCAGCTACAAGTGCTACTGTCTCAACGGATATATGCTCATGCCGG
ATGGTTCCTGCTCAAGTGCCCTGACCTGCTCCATGGCAAACTGTCAGTATGGCTGTGATGTTGTTAAA
GGACAAATACGGTGCCAGTGCCCATCCCCTGGCCTGCAGCTGGCTCCTGATGGGAGGACCTGTGTAGA
TGTTGATGAATGTGCTACAGGAAGAGCCTCCTGCCCTAGATTTAGGCAATGTGTCAACACTTTTGGGA
GCTACATCTGCAAGTGTCATAAAGGCTTCGATCTCATGTATATTGGAGGCAAATATCAATGTCATGAC
ATAGACGAATGCTCACTTGGTCAGTATCAGTGCAGCAGCTTTGCTCGATGTTATAACATACGTGGGTC
CTACAAGTGCAAATGTAAAGAAGGATACCAGGGTGATGGACTGACTTGTGTGTATATCCCAAAAGTTA
TGATTGAACCTTCAGGTCCAATTCATGTACCAAAGGGAAATGGTACCATTTTAAAGGGTGACACAGGA
AATAATAATTGGATTCCTGATGTTGGAAGTACTTGGTGGCCTCCGAAGACACCATATATTCCTCCTAT
CATTACCAACAGGCCTACTTCTAAGCCAACAACAAGACCTACACCAAAGCCAACACCAATTCCTACTC
CACCACCACCACCACCCCTGCCAACAGAGCTCAGAACACCTCTACCACCTACAACCCCAGAAAGGCCA
ACCACCGGACTGACAACTATAGCACCAGCTGCCAGTACACCTCCAGGAGGGATTACAGTTGACAACAG
GGTACAGACAGACCCTCAGAAACCCAGAGGAGATGTGTTCAGTGTTCTGGTACACAGTTGTAATTTTG
ACCATGGACTTTGTGGATGGATCAGGGAGAAAGACAATGACTTGCACTGGGAACCAATCAGGGACCCA
GCAGGTGGACAATATCTGACAGTGTCGGCAGCCAAAGCCCCAGGGGGAAAAGCTGCACGCTTGGTGCT
ACCTCTCGGCCGCCTCATGCATTCAGGGGACCTGTGCCTGTCATTCAGGCACAAGGTGACGGGGCTGC
ACTCTGGCACACTCCAGGTGTTTGTGAGAAAACACGGTGCCCACGGAGCAGCCCTGTGGGGAAGAAAT
GGTGGCCATGGCTGGAGGCAAACACAGATCACCTTGCGAGGGGCTGACATCAAGAGCGTCGTCTTCAA
AGGTGAAAAAAGGCGTGGTCACACTGGGGAGATTGGATTAGATGATGTGAGCTTGAAAAAAGGCCACT
GCTCTGAAGAACGCTAACAACTCCAGAACTAACAATGAACTCCTAA

| | | | |
|---|---|---|---|
| NOV3a, CG50253-01 | SEQ ID NO: 6 | 536 aa | MW at 58650.8kD |
| Protein Sequence | | | |

| MDFLLALVLVSSLYLQAAAEFDGRWPRQIVSSIGLCRYGGRIDCCWGWARQSWGQCQPVCQPRCKHGE | | |
|---|---|---|
| CIGPNKCKCHPGYAGKTCNQDLNECGLKPRPCKHRCMNTYGSYKCYCLNGYMLMPDGSCSSALTCSMA | | |
| NCQYGCDVVKGQIRCQCPSPGLQLAPDGRTCVDVDECATGRASCPRFRQCVNTFGSYICKCHKGFDLM | | |
| YIGGKYQCHDIDECSLGQYQCSSFARCYNIRGSYKCKCKEGYQGDGLTCVYIPKVMIEPSGPIHVPKG | | |
| NGTILKGDTGNNNWIPDVGSTWWPPKTPYIPPIITNRPTSKPTTRPTPKPTPIPTPPPPPPLPTELRT | | |
| PLPPTTPERPTTGLTTIAPAASTPPGGITVDNRVQTDPQKPRGDVFSVLVHSCNFDHGLCGWIREKDN | | |
| DLHWEPIRDPAGGQYLTVSAAKAPGGKAARLVLPLGRLMHSGDLCLSFRHKVTGLHSGTLQVFVRKHG | | |
| AHGAALWGRNGGHGWRQTQITLRGADIKSVVFKGEKRRGHTGEIGLDDVSLKKGHCSEER | | |
| NOV3b, 250095765 | SEQ ID NO: 7 | 1765 bp |
| DNA Sequence | ORF Start: at 2 | ORF Stop: end of sequence |

| CACCGGATCCATGGATTTTCTCCTGGCGCTGGTGCTGGTATCCTCGCTCTACCTGCAGGCGGCCGCCG | | | | |
|---|---|---|---|---|
| AGTTCGACGGGAGGTGGCCCAGGCAAATAGTGTCATCGATTGGCCTATGTCGTTATGGTGGGAGGATT | | | | |
| AATAGCCAGGATAAGGTGCCAGCTCAAAGCTGTGTGCCAACCACGATGCAAACATGGTGAATGTATCG | | | | |
| GGCCAAACAAGTGCAAGTGTCATCCTGGTTATGCTGGAAAAACCTGTAATCAAGATCTAAATGAGTGT | | | | |
| GGCCTGAAGCCCCGGCCCTGTAAGCACAGGTGCATGAACACTTACGGCAGCTACAAGTGCTACTGTCT | | | | |
| CAACGGATATATGCTCATGCCGGATGGTTCCTGCTCAAGTGCCCTGACCTGCTCCATGGCAAACTGTC | | | | |
| AGTATGGCTGTGATGTTGTTAAAGGACAAATACGGTGCCAGTGCCCATCCCCTGGCCTGCAGCTGGCT | | | | |
| CCTGATGGGAGGACCTGTGTAGATGTTGATGAATGTGCTACAGGAAGAGCCTCCTGCCCTAGATTTAG | | | | |
| GCAATGTGTCAACACTTTTGGGAGCTACATCTGCAAGTGTCATAAAGGCTTCGATCTCATGTATATTG | | | | |
| GAGGCAAATATCAATGTCATGACATAGACGAATGCTCACTTGGTCAGTATCAGTGCAGCAGCTTTGCT | | | | |
| CGATGTTATAACGTACGTGGGTCCTACAAGTGCAAATGTAAAGAAGGATACCAGGGTGATGGACTGAC | | | | |
| TTGTGTGTATATCCCAAAAGTTATGATTGAACCTTCAGGTCCAATTCATGTACCAAAGGGAAATGGTA | | | | |
| CCATTTTAAAGGGTGACACAGGAAATAATAATTGGATTCCTGATGTTGGAAGTACTTGGTGGCCTCCG | | | | |
| AAGACACCATATATTCCTCCTATCATTACCAACAGGCCTACTTCTAAGCCAACAACAAGACCTACACC | | | | |
| AAAGCCAACACCAATTCCTACTCCACCACCACCACCACCCCTGCCAACAGAGCTCAGAACACCTCTAC | | | | |
| CACCTACAACCCCAGAAAGGCCAACCACCGGACTGACAACTATAGCACCAGCTGCCAGTACACCTCCA | | | | |
| GGAGGGATTACAGTTGACAACAGGGTACAGACAGACCCTCAGAAACCCAGAGGAGATGTGTTCATTCC | | | | |
| ACGGCAACCTTCAAATGACTTGTTTGAAATATTTGAAATAGAAAGAGGAGTCAGTGCAGACGATGAAG | | | | |
| CAAAGGATGATCCAGGTGTTCTGGTACACAGTTGTAATTTTGACCATGGACTTTGTGGATGGATCAGG | | | | |
| GAGAAAGACAATGACTTGCACTGGGAACCAATCAGGGACCCAGCAGGTGGACAATATCTGACAGTGTC | | | | |
| GGCAGCCAAAGCCCCAGGGGGAAAAGCTGCACGCTTGGTGCTACCTCTCGGCCGCCTCATGCATTCAG | | | | |
| GGGACCTGTGCCTGTCATTCAGGCACAAGGTGACGGGGCTGCACTCTGGCACACTCCAGGTGTTTGTG | | | | |
| AGAAAACACGGTGCCCACGGAGCAGCCCTGTGGGGAAGAAATGGTGGCCATGGCTGGAGGCAAACACA | | | | |
| GATCACCTTGCGAGGGGCTGACATCAAGAGCGTCGTCTTCAAAGGTGAAAAAAGGCGTGGTCACACTG | | | | |
| GGGAGATTGGATTAGATGATGTGAGCTTGAAAAAAGGCCACTGCTCTGAAGAACGCGTCGACGGC | | | | |
| | NOV3b, 250095765 | SEQ ID NO: 8 | 1588 aa | MW at 64525.3kD |
| | Protein Sequence | | | |

| TGSMDFLLALVLVSSLYLQAAAEFDGRWPRQIVSSIGLCRYGGRIDCCWGWARQSWGQCQPFYVLRQR | | |
|---|---|---|
| IARIRCQLKAVCQPRCKHGECIGPNKCKCHPGYAGKTCNQDLNECGLKPRPCKHRCMNTYGSYKCYCL | | |
| NGYMLMPDGSCSSALTCSMANCQYGCDVVKGQIRCQCPSPGLQLAPDGRTCVDVDECATGRASCPRFR | | |
| QCVNTFGSYICKCHKGFDLMYIGGKYQCHDIDECSLGQYQCSSFARCYNVRGSYKCKCKEGYQGDGLT | | |
| CVYIPKVMIEPSGPIHVPKGNGTILKGDTGNNNWIPDVGSTWWPPKTPYIPPIITNRPTSKPTTRPTP | | |
| KPTPIPTPPPPPPLPTELRTPLPPTTPERPTTGLTTIAPAASTPPGGITVDNRVQTDPQKPRGDVFIP | | |
| RQPSNDLFEIFEIERGVSADDEAKDDPGVLVHSCNFDHGLCGWIREKDNDLHWEPIRDPAGGQYLTVS | | |
| AAKAPGGKAARLVLPLGRLMHSGDLCLSFRHKVTGLHSGTLQVFVRKHGAHGAALWGRNGGHGWRQTQ | | |
| ITLRGADIKSVVFKGEKRRGHTGEIGLDDVSLKKGHCSEERVDG | | |
| NOV3c, 250095742 | SEQ ID NO: 9 | 1627 bp |
| DNA Sequence | ORF Start: at 2 | ORF Stop: end of sequence |

| CACCGGATCCATGGATTTTCTCCTGGCGCTGGTGCTGGTATCCTCGCTCTACCTGCAGGCGGCCGCCG | | | | |
|---|---|---|---|---|
| AGTTCGACGGGAGGTGGCCCAGGCAAATAGTGTCATCGATTGGCCTATGTCGTTATGGTGGGAGGATT | | | | |
| GACTGCTGCTGGGGCTGGGCTCGCCAGTCTTGGGGACAGTGTCAGCCTGTGTGCCAACCACGATGCAA | | | | |
| ACATGGTGAATGTATCGGGCCAAACAAGTGCAAGTGTCATCCTGGTTATGCTGGAAAAACCTGTAATC | | | | |
| AAGATCTAAATGAGTGTGGCCTGAAGCCCCGGCCCTGTAAGCACAGGTGCATGAACACTTACGGCAGC | | | | |
| TACAAGTGCTACTGTCTCAACGGATATATGCTCATGCCGGATGGTTCCTGCTCAAGTGCCCTGACCTG | | | | |
| CTCCATGGCAAACTGTCAGTATGGCTGTGATGTTGTTAAAGGACAAATACGGTGCCAGTGCCCATCCC | | | | |
| CTGGCCTGCACCTGGCTCCTGATGGGAGGACCTGTGTAGATGTTGATGAATGTGCTACAGGAAGAGCC | | | | |
| TCCTGCCCTAGATTTAGGCAATGTGTCAACACTTTTGGGAGCTACATCTGCAAGTGTCATAAAGGCTT | | | | |
| CGATCTCATGTATATTGGAGGCAAATATCAATGTCATGACATAGACGAATGCTCACTTGGTCAGTATC | | | | |
| AGTGCAGCAGCTTTGCTCGATGTTATAACGTACGTGGGTCCTACAAGTGCAAATGTAAAGAAGGATAC | | | | |
| CAGGGTGATGGACTGACTTGTGTGTATATCCCAAAAGTTATGATTGAACCTTCAGGTCCAATTCATGT | | | | |
| ACCAAAGGGAAATGGTACCATTTTAAAGGGTGACACAGGAAATAATAATTGGATTCCTGATGTTGGAA | | | | |
| GTACTTGGTGGCCTCCGAAGACACCATATATTCCTCCTATCATTACCAACAGGCCTACTTCTAAGCCA | | | | |
| ACAACAAGACCTACACCAAAGCCAACACCAATTCCTACTCCACCACCACCACCACCCCTGCCAACAGA | | | | |
| GCTCAGAACACCTCTACCACCTACAACCCCAGAAAGGCCAACCACCGGACTGACAACTATAGCACCAG | | | | |
| CTGCCAGTACACCTCCAGGAGGGATTACAGTTGACAACAGGGTACAGACAGACCCTCAGAAACCCAGA | | | | |
| GGAGATGTGTTCAGTGTTCTGGTACACAGTTGTAATTTTGACCATGGACTTTGTGGATGGATCAGGGA | | | | |
| GAAAGACAATGACTTGCACTGGGAACCAATCAGGGACCCAGCAGGTGGACAATATCTGACAGTGTCGG | | | | |
| CAGCCAAAGCCCCAGGGGGAAAAGCTGCACGCTTGGTGCTACCTCTCGGCCGCCTCATGCATTCAGGG | | | | |
| GACCTGTGCCTGTCATTCAGGCACAAGGTGACGGGGCTGCACTCTGGCACACTCCAGGTGTTTGTGAG | | | | |
| AAAACACGGTGCCCACGGAGCAGCCCTGTGGGGAAGAAATGGTGGCCATGGCTGGAGGCAAACACAGA | | | | |
| TCACCTTGCGAGGGGCTGACATCAAGAGCGTCGTCTTCAAAGGTGAAAAAAGGCGTGGTCACACTGGG | | | | |
| GAGATTGGATTAGATGATGTGAGCTTGAAAAAAGGCCACTGCTCTGAAGAACGCGTCGACGGC | | | | |
| | NOV3c, 250095742 | SEQ ID NO: 10 | 542 aa | MW at 59162.3kD |
| | Protein Sequence | | | |

| TGSMDFLLALVLVSSLYLQAAAEFDGRWPRQIVSSIGLCRYGGRIDCCWGWARQSWGQCQPVCQPRCK | | |
|---|---|---|
| HGECIGPNKCKCHPGYAGKTCNQDLNECGLKPRPCKHRCMNTYGSYKCYCLNGYMLMPDGSCSSALTC | | |
| SMANCQYGCDVVKGQIRCQCPSPGLHIAPDGRTCVDVDECATGRASCPRFRQCVNTFGSYTCKCHKGF | | |
| DLMYIGGKYQCHDIDECSLGQYQCSSFARCYNVRGSYKCKCKEGYQGDGLTCVYIPKVMIEPSGPIHV | | |
| PKGNGTILKGDTGNNNWIPDVGSTWWPPKTPYIPPIITNRPTSKPTTRPTPKPTPIPTPPPPPPLPTE | | |
| LRTPLPPTTPERPTTGLTTIAPAASTPPGGITVDNRVQTDPQKPRGDVFSVLVHSCNFDHGLCGWIRE | | |
| KDNDLHWEPIRDPAGGQYLTVSAAKAPGGKAARLVLPLGRLMHSGDLCLSFRHKVTGLHSGTLQVFVR | | |
| KHGAHGAALWGRNGGHGWRQTQITLRGADIKSVVFKGEKRRGHTGEIGLDDVSLKKGHCSEERVDG | | |
| Nov3d, 250095779 | SEQ ID NO: 11 | 1765 bp |
| DNA Sequence | ORF Start: at 2 | ORF Stop: end of sequence |

| CACCGGATCCATGGATTTTCTCCTGGCGCTGGTGCTGGTATCCTCGCTCTACCTGCAGGCGGCCGCCG | | | | |
|---|---|---|---|---|
| AGTTCGACGGGAGGTGGCCCAGGCAAATAGTGTCATCGATTGGCCTATGTCGTTATGGTGGGAGGATT | | | | |
| GACTGCTGCTGGGGCTGGGCTCGCCAGTCTTGGGGACAGTGTCAGCCTTTCTACGTCTTAAGGCAGAG | | | | |
| AATAGCCAGGATAAGGTGCCAGCTCAAAGCTGTGTGCCAACCACGATGCAAACATGGTGAATGTATCG | | | | |
| GGCCAAACAAGTGCAAGTGTCATCCTGGTTATGCTGGAAAAACCTGTAATCAAGATCTAAATGAGTGT | | | | |
| CAACGGATATATGCTCATGCCGGATGGTTCCTGCTCAAGTGCCCTGACCTGCTCCATGGCAAACTGTC | | | | |
| AGTATGGCTGTGATGTTGTTAAAGGACAAATACGGTGCCAGTGCCCATCCCCTGGCCTGCACCTGGCT | | | | |
| CCTGATGGGAGGACCTGTGTAGATGTTGATGAATGTGCTACAGGAAGAGCCTCCTGCCCTAGATTTAG | | | | |
| GCAATGTGTCAACACTTTTGGGAGCTACATCTGCAAGTGTCATAAAGGCTTCGATCTCATGTATATTG | | | | |
| GAGGCAAATATCAATGTCATGACATAGACGAATGCTCACTTGGTCAGTATCAGTGCAGCAGCTTTGCT | | | | |
| CGATGTTATAACGTACGTGGGTCCTACAAGTGCAAATGTAAAGAAGGATACCAGGGTGATGGACTGAC | | | | |
| TTGTGTGTATATCCCAAAAGTTATGATTGAACCTTCAGGTCCAATTCATGTACCAAAGGGAAATGGTA | | | | |
| CCATTTTAAAGGGTGACACAGGAAATAATAATTGGATTCCTGATGTTGGAAGTACTTGGTGGCCTCCG | | | | |
| AAGACACCATATATTCCTCCTATCATTACCAACAGGCCTACTTCTAAGCCAACAACAAGACCTACACC | | | | |
| AAAGCCAACACCAATTCCTACTCCACCACCACCACCACCCCTGCCAACAGAGCTCAGAACACCTCTAC | | | | |
| CACCTACAACCCCAGAAAGGCCAACCACCGGACTGACAACTATAGCACCAGCTGCCAGTACACCTCCA | | | | |
| GGAGGGATTACAGTTGACAACAGGGTACAGACAGACCCTCAGAAACCCAGAGGAGATGTGTTCATTCC | | | | |
| ACGGCAACCTTCAAATGACTTGTTTGAAATATTTGAAATAGAAAGAGGAGTCAGTGCAGACGATGAAG | | | | |
| CAAAGGATGATCCAGGTGTTCTGGTACACAGTTGTAATTTTGACCATGGACTTTGTGGATGGATCAGG | | | | |
| GAGAAGACAATGACTTGCACTGGGAACCAATCAGGGACCCAGCAGGTGGACAATAATCTGACAGTGTC | | | | |
| GGCAGCCAAAGCCCCAGGGGGAAAAGCTGCACGCTTGGTGCTACCTCTCGGCCGCCTCATGCATTCAG | | | | |
| GGGACCTGTGCCTGTCATTCAGGCACAAGGTGACGGGGCTGCACTCTGGCACACTCCAGGTGTTTGTG | | | | |
| AGAAAACACGGTGCCCACGGAGCAGCCCTGTGGGGAAGAAATGGTGGCCATGGCTGGAGGCAAACACA | | | | |
| GATCACCTTGCGAGGGGCTGACATCAAGAGCGTCGTCTTCAAAGGTGAAAAAAGGCGTGGTCACACTG | | | | |
| GGGAGATTGGATTAGATGATGTGAGCTTGAAAAAAGGCCACTGCTCTGAAGAAACGCGTCGACGGC | | | | |
| | NOV3d, 250095779 | SEQ ID NO: 12 | 588 aa | MW at 64534.3kD |
| | Protein Sequence | | | |

| TGSMDFLLALVLVSSLYLQAAAEFDGRWPRQIVSSIGLCRYGGRIDCCWGWARQSWGQCQPFYVLRQR | | |
|---|---|---|
| IARIRCQLKAVCQPRCKHGECIGPNKCKCHPGYAGKTCNQDLNECGLKPRPCKHRCMNTYGSYKCYCL | | |
| NGYMLMPDGSCSSALTCSMANCQYGCDVVKGQIRCQCPSPGLHLAPDGRTCVDVDECATGRASCPRFR | | |
| QCVNTFGSYICKCHKGFDLMYIGGKYQCHDIDECSLGQYQCSSFARCYNVRGSYKCKCKEGYQGDGLT | | |
| CVYIPKVMIEPSGPIHVPKGNGTILKGDTGNNNWIPDVGSTWWPPKTPYIPPIITNRPTSKPTTRPTP | | |
| KPTPIPTPPPPPPLPTELRTPLPPTTPERPTTGLTTIAPAASTPPGGITVDNRVQTDPQKPRGDVFIP | | |
| RQPSNDLFEIFEIERGVSADDEAKDDPGVLVHSCNFDHGLCGWIREKDNDLHWEPIRDPAGGQYLTVS | | |
| AAKAPGGKAARLVLPLGRLMHSGDLCLSFRHKVTGLHSGTLQVFVRKHGAHGAALWGRNGGHGWRQTQ | | |
| ITLRGADIKSVVFKGEKRRGHTGEIGLDDVSLKKGHCSEERVDG | | |
| NOV3e, 250095794 | SEQ ID NO: 13 | 1657 bp |
| DNA Sequence | ORF Start: at 2 | ORF Stop: end of sequence |

| CACCGGATCCGAGTTCGACGGGAGGTGGCCCAGGCAAATAGTGTCATCGATTGGCCTATGTCGTTATG | | | | |
|---|---|---|---|---|
| GTGGGAGGATTGACTGCTGCTGGGGCTGGGCTCGCCAGTCTTGGGGACAGTGTCAGCCTGTGTGCCAA | | | | |
| CCACGATGCAAACATGGTGAATGTATCGGGCCAAACAAGTGCAAGTGTCATCCTGGTTATGCTGGAAA | | | | |
| AACCTGTAATCAAGATCTAAATGAGTGTGGCCTGAAGCCCCGGCCCTGTAAGCACAGGTGCATGAACA | | | | |
| CTTACGGCAGCTACAAGTGCTACTGTCTCAACGGATATATGCTCATGCCGGATGGTTCCTGCTCAAGT | | | | |
| GCCCTGACCTGCTCCATGGCAAACTGTCAGTATGGCTGTGATGTTGTTAAAGGACAAATACGGTGCCA | | | | |
| GTGCCCATCCCCTGGCCTGCACCTGGCTCCTGATGGGAGGACCTGTGTAGATGTTGATGAATGTGCTA | | | | |
| CAGGAAGAGCCTCCTGCCCTAGATTTAGGCAATGTGTCAACACTTTTGGGAGCTACATCTGCAAGTGT | | | | |
| CATAAAGGCTTCGATCTCATGTATATTGGAGGCAAATATCAATGTCATGACATAGACGAATGCTCACT | | | | |
| TGGTCAGTATCAGTGCAGCAGCTTTGCTCGATGTTATAACGTACGTGGGTCCTACAAGTGCAAATGTA | | | | |
| AAGAAGGATACCAGGGTGATGGACTGACTTGTGTGTATATCCCAAAAGTTATGATTGAACCTTCAGGT | | | | |
| CCAATTCATGTACCAAAGGGAAATGGTACCATTTTAAAGGGTGACACAGGAAATAATAATTGGATTCC | | | | |
| TGATGTTGGAAGTACTTGGTGGCCTCCGAAGACACCATATATTCCTCCTATCATTACCAACAGGCCTA | | | | |
| CTTCTAAGCCAACAACAAGACCTACACCAAAGCCAACACCAATTCCTACTCCACCACCACCACCACCC | | | | |
| CTGCCAACAGAGCTCAGAACACCTCTACCACCTACAACCCCAGAAAGGCCAACCACCGGACTGACAAC | | | | |
| TATAGCACCAGCTGCCAGTACACCTCCAGGAGGGATTACAGTTGACAACAGGGTACAGACAGACCCTC | | | | |
| AGAAACCCAGAGGAGATGTGTTCATTCCACGGCAACCTTCAAATGACTTGTTTGAAATATTTGAAATA | | | | |
| GAAAGAGGAGTCAGTGCAGACGATGAAGCAAAGGATGATCCAGGTGTTCTGGTACACAGTTGTAATTT | | | | |
| TGACCATGGACTTTGTGGATGGATCAGGGAGAAAGACAATGACTTGCACTGGGAACCAATCAGGGACC | | | | |
| CAGCAGGTGGACAATATCTGACAGTGTCGGCAGCCAAAGCCCCAGGGGGAAAAGCTGCACGCTTGGTG | | | | |
| CTACCTCTCGGCCGCCTCATGCATTCAGGGGACCTGTGCCTGTCATTCAGGCACAAGGTGACGGGGCT | | | | |
| GCACTCTGGCACACTCCAGGTGTTTGTGAGAAAACACGGTGCCCACGGAGCAGCCCTGTGGGGAAGAA | | | | |
| ATGGTGGCCATGGCTGGAGGCAAACACAGATCACCTTGCGAGGGGCTGACATCAAGAGCGTCGTCTTC | | | | |
| AAAGGTGAAAAAAGGCGTGGTCACACTGGGGAGATTGGATTAGATGATGTGAGCTTGAAAAAAGGCCA | | | | |
| CTGCTCTGAAGAACGCGTCGACGGC | | | | |
| | NOV3e, 250095794 | SEQ ID NO: 14 | 552 aa | MW at 60397.3kD |
| | Protein Sequence | | | |

| TGSEFDGRWPRQTVSSIGLCRYGGRIDCCWGWARQSWGQCQPVCQPRCKHGECIGPNKCKCHPGYAGK | | |
|---|---|---|
| TCNQDLNECGLKPRPCKHRCMNTYGSYKCYCLNGYMLMPDGSCSSALTCSMANCQYGCDVVKGQIRCQ | | |
| CPSPGLHLAPDGRTCVDVDECATGRASCPRFRQCVNTFGSYICKCHKGFDLMYIGGKYQCHDIDECSL | | |
| GQYQCSSFARCYNVRGSYKCKCKEGYQGDGLTCVYIPKVMIEPSGPIHVPKGNGTILKGDTGNNNWIP | | |
| DVGSTWWPPKTPYIPPITTNRPTSKPTTRPTPKPTPIPTPPPPPPLPTELRTPLPPTTPERPTTGLTT | | |
| IAPAASTPPGGITVDNRVQTDPQKPRGDVFIPRQPSNDLFEIFEIERGVSADDEAKDDPGVLVHSCNF | | |
| DHGLCGWIREKDNDLHWEPIRDPAGGQYLTVSAAKAPGGKAARLVLPLGRLMHSGDLCLSFRHKVTGL | | |
| HSGTLQVFVRKHGAHGAALWGRNGGHGWRQTQITLRGADIKSVVFKGEKRRGHTGEIGLDDVSLKKGH | | |
| CSEERVDG | | |
| NOV3f, 250095734 | SEQ ID NO: 15 | 1717 bp |
| DNA Sequence | ORF Start: at 2 | ORF Stop: end of sequence |

| CACCGGATCCATGGATTTTCTCCTGGCGCTGGTGCTGGTATCCTCGCTCTACCTGCAGGCGGCCGCCG | | | | |
|---|---|---|---|---|
| AGTTCGACGGGAGTAGGTGGCCCAGGCAAATAGTGTCATCGATTGGCCTATGTCGTTATGGTGGGAGG | | | | |
| ATTGACTGCTGCTGGGGCTGGGCTCGCCAGTCTTGGGGACAGTGTCAGCCTGTGTGCCAACCACGATG | | | | |
| CAAACATGGTGAATGTATCGGGCCAAACAAGTGCAAGTGTCATCCTGGTTATGCTGGAAAAACCTGTA | | | | |
| ATCAAGATCTAAATGAGTGTGGCCTGAAGCCCCGGCCCTGTAAGCACAGGTGCATGAACACTTACGGC | | | | |
| AGCTACAAGTGCTACTGTCTCAACGGATATATGCTCATGCCGGATGGTTCCTGCTCAAGTGCCCTGAC | | | | |
| CTGCTCCATGGCAAACTGTCAGTATGGCTGTGATGTTGTTAAAGGACAAATACGGTGCCAGTAACCAT | | | | |
| CCCCTGGCCTGCACCTGGCTCCTGATGGGAGGACCTGTGTAGATGTTGATGAATGTGCTACAGGAAGA | | | | |
| GCCTCCTGCCCTAGATTTAGGCAATGTGTCAACACTTTTGGGAGCTACATCTGCAAGTGTCATAAAGG | | | | |
| CTTCGATCTCATGTATATTGGAGGCAAATATCAATGTCATGACATAGACGAATGCTCACTTGGTCAGT | | | | |
| ATCAGTGCAGCAGCTTTGCTCGATGTTATAACGTACGTGGGTCCTACAAGTGCAAATGTAAAGAAGGA | | | | |
| TACCAGGGTGATGGACTGACTTGTGTGTATATCCCAAAAGTTATGATTGAACCTTCAGGTCCAATTCA | | | | |
| TGTACCAAAGGGAAATGGTACCATTTTAAAGGGTGACACAGGAAATAATAATTGGATTCCTGATGTTG | | | | |
| GAAGTACTTGGTGGCCTCCGAAGACACCATATATTCCTCCTATCATTACCAACAGGCCTACTTCTAAG | | | | |
| CCAACAACAAGACCTACACCAAAGCCAACACCAATTCCTACTCCACCACCACCACCACCCCTGCCAAC | | | | |
| AGAGCTCAGAACACCTCTACCACCTACAACCCCAGAAAGGCCAACCACCGGACTGACAACTATAGCAC | | | | |
| CAGCTGCCAGTACACCTCCAGGAGGGATTACAGTTGACAACAGGGTACAGACAGACCCTCAGAAACCC | | | | |
| AGAGGAGATGTGTTCATTCCACGGCAACCTTCAAATGACTTGTTTGAAATATTTGAAATAGAAAGAGG | | | | |
| AGTCAGTGCAGACGATGAAGCAAAGGATGATCCAGGTGTTCTGGTACACAGTTGTAATTTTGACCATG | | | | |
| GACTTTGTGGATGGATCAGGGAGAAAGACAATGACTTGCACTGGGAACCAATCAGGGACCCAGCAGGT | | | | |
| GGACAATATCTGACAGTGTCGGCAGCCAAAGCCCCAGGGGGAAAAGCTGCACGCTTGGTGCTACCTCT | | | | |
| CGGCCGCCTCATGCATTCAGGGGACCTGTGCCTGTCATTCAGGCACAAGGTGACGGGGCTGCACTCTG | | | | |
| GCACACTCCAGGTGTTTGTGAGAAAACACGGTGCCCACGGAGCAGCCCTGTGGGGAAGAAATGGTGGC | | | | |
| CATGGCTGGAGGCAAACACAGATCACCTTGCGAGGGGCTGACATCAAGAGCGTCGTCTTCAAAGGTGA | | | | |
| IAAGAACGCGTCGACGGC | | | | |
| | NOV3f, 250095734 | SEQ ID NO: 16 | 572 aa | MW at 62504.8kD |
| | Protein Sequence | | | |

| TGSMDFLLALVLVSSLYLQAAAEFDGSRWPRQIVSSIGLCRYGGRIDCCWGWARQSWGQCQPVCQPRC | | |
|---|---|---|
| KHGECIGPNKCKCHPGYAGKTCNQDLNECGLKPRPCKHRCMNTYGSYKCYCLNGYMLMPDGSCSSALT | | |
| CSMANCQYGCDVVKGQIRCQCPSPGLHLAPDGRTCVDVDECATGRASCPRFRQCVNTFGSYICKCHKG | | |
| FDLMYIGGKYQCHDIDECSLGQYQCSSFARCYNVRGSYKCKCKEGYQGDGLTCVYIPKVMIEPSGPIH | | |
| VPKGNGTTLKGDTGNNNWIPDVGSTWWPPKTPYTPPIITNRPTSKPTTRPTPKPTPTPTPPPPPPLPT | | |
| ELRTPLPPTTPERPTTGLTTIAPAASTPPGGITVDNRVQTDPQKPRGDVFIPRQPSNDLFEIFEIERG | | |
| VSADDEAKDDPGVLVHSCNFDHGLCGWIREKDNDLNWEPIRDPAGGQYLTVSAAKAPGGKAARLVLPL | | |
| GRLMHSGDLCLSFRBKVTGLHSGTLQVFVRKHGAHGAALWGRNGGHGWRQTQITLRGADIKSVVFKGE | | |
| KRRGHTGEIGLDDVSLKKGHCSEERVDG | | |
| NOV3g, 250095811 | SEQ ID NO: 17 | 613 bp |
| DNA Sequence | ORF Start: at 2 | ORF Stop: end of sequence |

| CACCGGATCCTGTCAGCCTGTGTGCCAACCACGATGCAAACATGGTGAATGTATCGGGCCAAACAAGT | | | | |
|---|---|---|---|---|
| GCAAGTGTCATCCTGGTTATGCTGGAAAAACCTGTAATCAAGATCTAAATGAGTGTGGCCTGAAGCCC | | | | |
| CGGCCCTGTAAGCACAGGTGCATGAACACTTACGGCAGCTACAAGTGCTACTGTCTCAACGGATATAT | | | | |
| GCTCATGCCGGATGGTTCCTGCTCAAGTGCCCTGACCTGCTCCATGGCAAACTGTCAGTATGGCTGTG | | | | |
| ATGTTGTTAAAGGACAAATACGGTGCCAGTGCCCATCCCCTGGCCTGCAGCTGGCTCCTGATGGGAGG | | | | |
| ACCTGTGTAGATGTTGATGAATGTGCTACAGGAAGAGCCTCCTGCCCTAGATTTAGGCAATGTGTCAA | | | | |
| CACTTTTGGGAGCTACATCTGCAAGTGTCATAAAGGCTTCGATCTCATGTATATTGGAGGCAAATATC | | | | |
| AATGTCATGACATAGACGAATGCTCACTTGGTCAGTATCAGTGCAGCAGCTTTGCTCGATGTTATAAC | | | | |
| GTACGTGGGTCCTACAAGTGCAAATGTAAAGAAGGATACCAGGGTGATGGACTGACTTGTGTCGACGG | | | | |
| C | | | | |
| | Nov3g, 250095811 | SEQ ID NO: 18 | 204 aa | MW at 22351 .4kD |
| | Protein Sequence | | | |

| TGSCQPVCQPRCKHGECIGPNKCKCHPGYAGKTCNQDLNECGLKPRPCKHRCMNTYGSYKCYCLNGYM | | | |
|---|---|---|---|
| LMPDGSCSSALTCSMANCQYGCDVVKGQIRCQCPSPGLQLAPDGRTCVDVDECATGRASCPRFRQCVN | | | |
| TFGSYICKCHKGFDLMYIGGKYQCHDIDECSLGQYQCSSFARCYNVRGSYKCKCKEGYQGDGLTCVDG | | | |
| | NOV3h, 250095799 | SEQ ID NO: 19 | 613 bp |
| | DNA Sequence | ORF Start: at 2 | ORF Stop: end of sequence |

| CACCGGATCCTGTCAGCCTGTGTGCCAACCACGATGCAAACATGGTGAATGTATCGGGCCAAACAAGT | | | | |
|---|---|---|---|---|
| GCAAGTGTCATCCTGGTTATGCTGGAAAAACCTGTAATCAAGATCTAAATGAGTGTGGCCTGAAGCCC | | | | |
| CGGCCCTGTAAGCACAGGTGCATGAACACTTACGGCAGCTACAAGTGCTACTGTCTCAACGGATATAT | | | | |
| GCTCATGCCGGATGGTTCCTGCTCAAGTGCCCTGACCTGCTCCATGGCAAACTGTCAGTATGGCTGTG | | | | |
| ATGTTGTTAAAGGACAAATACGGTGCCAGTGCCCATCCCCTGGCCTGCACCTGGCTCCTGATGGGAGG | | | | |
| ACCTGTGTAGATGTTGATGAATGTGCTACAGGAAGAGCCTCCTGCCCTAGATTTAGGCAATGTGTCAA | | | | |
| CACTTTTGGGAGCTACATCTGCAAGTGTCATAAAGGCTTCGATCTCATGTATATTGGAGGCAAATATC | | | | |
| AATGTCATGACATAGACGAATGCTCACTTGGTCAGTATCAGTGCAGCAGCTTTGCTCGATGTTATAAC | | | | |
| GTACGTGGGTCCTACAAGTGCAAATGTAAAGAAGGATACCAGGGTGATGGACTGACTTGTGTCGACGG | | | | |
| C | | | | |
| | NOV3h, 250095799 | SEQ ID NO: 20 | 204 aa | MW at 22360.4kD |
| | Protein Sequence | | | |

| GSCQPVCQPRCKHGECIGPNKCKCHPGYAGKTCNQDLNECGLKPRPCKHRCMNTYGSYKCYCLNGYM | | | |
|---|---|---|---|
| LMPDGSCSSALTCSMANCQYGCDWKGQIRCQCPSPGLHLAPDGRTCVDVDECATGRASCPRFRQCVN | | | |
| FGSYICKCHKGFDLMYIGGKYQCHDIDECSLGQYQCSSFARCYNVRGSYKCKCKEGYQGDGLTCVDG | | | |
| NOV3i, SNP13377609 of | SEQ ID NO: 21 | | 1882bp |
| CG50253-01, DNA Sequence | ORF Start: ATG at 243 | | ORF Stop: TAA at 1851 |
| | SNP Pos: 63 | | SNP Change: G to A |
| GGACACTGACATGGACTGAAGGAGTAGAAAAGAAGGGAGCGGGAGGGGGCTCCGGGCGCCGCACAGCA | | | |
| GACCTACTCCGGCCGCGCGCCTCGCCGCTGTCCTCCGGGAGCGGCAGCAGTAGCCCGGGCGGCGAGGG | | | |
| CTGGGGGTTCCTCGAGACTCTCAGAGGGGCGCCTCCCATCGGCGCCCACCACCCCAACCTGTTCCTCG | | | |
| CGCGCCACTGCGCTGCGCCCCAGGACCCGCTGCCCAACATGGATTTTCTCCTGGCGCTGGTGCTGGTA | | | |
| TCCTCGCTCTACCTGCAGGCGGCCGCCGAGTTCGACGGGAGGTGGCCCAGGCAAATAGTGTCATCGAT | | | |
| TGGCCTATGTCGTTATGGTGGGAGGATTGACTGCTGCTGGGGCTGGGCTCGCCAGTCTTGGGGACAGT | | | |
| GTCAGCCTGTGTGCCAACCACGATGCAAACATGGTGAATGTATCGGGCCAAACAAGTGCAAGTGTCAT | | | |
| CCTGGTTATGCTGGAAAAACCTGTAATCAAGATCTAAATGAGTGTGGCCTGAAGCCCCGGCCCTGTAA | | | |
| GCACAGGTGCATGAACACTTACGGCAGCTACAAGTGCTACTGTCTCAACGGATATATGCTCATGCCGG | | | |
| ATGGTTCCTGCTCAAGTGCCCTGACCTGCTCCATGGCAAACTGTCAGTATGGCTGTGATGTTGTTAAA | | | |
| GGACAAATACGGTGCCAGTGCCCATCCCCTGGCCTGCAGCTGGCTCCTGATGGGAGGACCTGTGTAGA | | | |
| TGTTGATGAATGTGCTACAGGAAGAGCCTCCTGCCCTAGATTTAGGCAATGTGTCAACACTTTTGGGA | | | |
| GCTACATCTGCAAGTGTCATAAAGGCTTCGATCTCATGTATATTGGAGGCAAATATCAATGTCATGAC | | | |
| ATAGACGAATGCTCACTTGGTCAGTATCAGTGCAGCAGCTTTGCTCGATGTTATAACATACGTGGGTC | | | |
| CTACAAGTGCAAATGTAAAGAAGGATACCAGGGTGATGGACTGACTTGTGTGTATATCCCAAAAGTTA | | | |
| TGATTGAACCTTCAGGTCCAATTCATGTACCAAAGGGAAATGGTACCATTTTAAAGGGTGACACAGGA | | | |
| AATAATAATTGGATTCCTGATGTTGGAAGTACTTGGTGGCCTCCGAAGACACCATATATTCCTCCTAT | | | |
| CATTACCAACAGGCCTACTTCTAAGCCAACAACAAGACCTACACCAAAGCCAACACCAATTCCTACTC | | | |
| CACCACCACCACCACCCCTGCCAACAGAGCTCAGAACACCTCTACCACCTACAACCCCAGAAAGGCCA | | | |
| ACCACCGGACTGACAACTATAGCACCAGCTGCCAGTACACCTCCAGGAGGGATTACAGTTGACAACAG | | | |
| GGTACAGACAGACCCTCAGAAACCCAGAGGAGATGTGTTCAGTGTTCTGGTACACAGTTGTAATTTTG | | | |
| ACCATGGACTTTGTGGATGGATCAGGGAGAAAGACAATGACTTGCACTGGGAACCAATCAGGGACCCA | | | |
| GCAGGTGGACAATATCTGACAGTGTCGGCAGCCAAAGCCCCAGGGGGAAAAGCTGCACGCTTGGTGCT | | | |
| ACCTCTCGGCCGCCTCATGCATTCAGGGGACCTGTGCCTGTCATTCAGGCACAAGGTGACGGGGCTGC | | | |
| ACTCTGGCACACTCCAGGTGTTTGTGAGAAAACACGGTGCCCACGGAGCAGCCCTGTGGGGAAGAAAT | | | |
| GGTGGCCATGGCTGGAGGCAAACACAGATCACCTTGCGAGGGGCTGACATCAAGAGCGTCGTCTTCAA | | | |
| AGGTGAAAAAAGGCGTGGTCACACTGGGGAGATTGGATTAGATGATGTGAGCTTGAAAAAAGGCCACT | | | |
| GCTCTGAAGAACGCTAACAACTCCAGAACTAACAATGAACTCCTAA | | | |
| NOV3i, SNP13377609 of | SEQ ID NO: 22 | 536 aa | MW at 58650.8kD |
| CG50253-01, Protein Sequence | | | SNP Change: no change |
| MDFLLALVLVSSLYLQAAAEFDGRWPRQIVSSIGLCRYGGRIDCCWGWARQSWGQCQPVCQPRCKHGE | | | |
| CIGPNKCKCHPGYAGKTCNQDLNECGLKPRPCKHRCMNTYGSYKCYCLNGYMLMPDGSCSSALTCSMA | | | |
| NCQYGCDVVKGQIRCQCPSPGLQTAPDGRTCVDVDECATGRASCPRFRQCVNTFGSYICKCHKGFDLM | | | |
| YIGGKYQCHDIDECSLGQYQCSSFARCYNIRGSYKCKCKEGYQGDGLTCVYIPKVMIEPSGPIHVPKG | | | |
| NGTILKGDTGNNNWIPDVGSTWWPPKTPYIPPIITNRPTSKPTTRPTPKPTPIPTPPPPPPLPTELRT | | | |
| PLPPTTPERPTTGLTTIAPAASTPPGGITVDNRVQTDPQKPRGDVFSVLVHSCNFDHGLCGWIREKDN | | | |
| DLHWEPIRDPAGGQYLTVSAAKAPGGKAARLVLPLGRLMHSGDLCLSFRHKVTGLHSGTLQVFVRKHG | | | |
| IAHGAALWGRNGGHGWRQTQITLRGADIKSVVFKGEKRRGHTGEIGLDDVSLKKGHCSEER | | | |
| NOV3j, SNP13373929 of | SEQ ID NO: 23 | | 1882 bp |
| CG50253-O1, DNA Sequence | ORF Start: ATG at 243 | | ORE Stop: TM at 1851 |
| | SNP Pos: 226 | | SNP Change: A to G |
| GGACACTGACATGGACTGAAGGAGTAGAAAAGAAGGGAGCGGGAGGGGGCTCCGGGCGCCGCGCAGCA | | | |
| GACCTACTCCGGCCGCGCGCCTCGCCGCTGTCCTCCGGGAGCGGCAGCAGTAGCCCGGGCGGCGAGGG | | | |
| CTGGGGGTTCCTCGAGACTCTCAGAGGGGCGCCTCCCATCGGCGCCCACCACCCCAACCTGTTCCTCG | | | |
| CGCGCCACTGCGCTGCGCCCCGGGACCCGCTGCCCAACATGGATTTTCTCCTGGCGCTGGTGCTGGTA | | | |
| TCCTCGCTCTACCTGCAGGCGGCCGCCGAGTTCGACGGGAGGTGGCCCAGGCAAATAGTGTCATCGAT | | | |
| TGGCCTATGTCGTTATGGTGGGAGGATTGACTGCTGCTGGGGCTGGGCTCAACAGTCTTAAGGACAGT | | | |
| GTCAGCCTGTGTGCCAACCACGATGCAAACATGGTGAATGTATCGGGCCAAACAAGTGCAAGTGTCAT | | | |
| CCTGGTTATGCTGGAAAAACCTGTAATCAAGATCTAAATGAGTGTGGCCTGAAGCCCCGGCCCTGTAA | | | |
| GCACAGGTGCATGAACACTTACGGCAGCTACAAGTGCTACTGTCTCAACGGATATATGCTCATGCCGG | | | |
| ATGGTTCCTGCTCAAGTGCCCTGACCTGCTCCATGGCAAACTGTCAGTATGGCTGTGATGTTGTTAAA | | | |
| GGACAAATACGGTGCCAGTGCCCATCCCCTGGCCTGCAGCTGGCTCCTGATGGGAGGACCTGTGTAGA | | | |
| TGTTGATGAATGTGCTACAGGAAGAGCCTCCTGCCCTAGATTTAGGCAATGTGTCAACACTTTTGGGA | | | |
| GCTACATCTGCAAGTGTCATAAAGGCTTCGATCTCATGTATATTGGAGGCAAATATCAATGTCATGAC | | | |
| ATAGACGAATGCTCACTTGGTCAGTATCAGTGCAGCAGCTTTGCTCGATGTTATAACATACGTGGGTC | | | |
| CTACAAGTGCAAATGTAAAGAAGGATACCAGGGTGATGGACTGACTTGTGTGTATATCCCAAAAGTTA | | | |
| TGATTGAACCTTCAGGTCCAATTCATGTACCAAAGGGAAATGGTACCATTTTAAAGGGTGACACAGGA | | | |
| AATAATAATTGGATTCCTGATGTTGGAAGTACTTGGTGGCCTCCGAAGACACCATATATTCCTCCTAT | | | |
| CATTACCAACAGGCCTACTTCTAAGCCAACAACAAGACCTACACCAAAGCCAACACCAATTCCTACTC | | | |
| CACCACCACCACCACCCCTGCCAACAGAGCTCAGAACACCTCTACCACCTACAACCCCAGAAAGGCCA | | | |
| ACCACCGGACTGACAACTATAGCACCAGCTGCCAGTACACCTCCAGGAGGGATTACAGTTGACAACAG | | | |
| GGTACAGACAGACCCTCAGAAACCCAGAGGAGATGTGTTCAGTGTTCTGGTACACAGTTGTAATTTTG | | | |
| ACCATGGACTTTGTGGATGGATCAGGGAGAAAGACAATGACTTGCACTGGGAACCAATCAGGGACCCA | | | |
| GCAGGTGGACAATATCTGACAGTGTCGGCAGCCAAAGCCCCAGGGGGAAAAGCTGCACGCTTGGTGCT | | | |
| ACCTCTCGGCCGCCTCATGCATTCAGGGGACCTGTGCCTGTCATTCAGGCACAAGGTGACGGGGCTGC | | | |
| ACTCTGGCACACTCCAGGTGTTTGTGAGAAAACACGGTGCCCACGGAGCAGCCCTGTGGGGAAGAAAT | | | |
| GGTGGCCATGGCTGGAGGCAAACACAGATCACCTTGCGAGGGGCTGACATCAAGAGCGTCGTCTTCAA | | | |
| AGGTGAAAAAAGGCGTGGTCACACTGGGGAGATTGGATTAGATGATGTGAGCTTGAAAAAAGGCCACT | | | |
| GCTCTGAAGAACGCTAACAACTCCAGAACTAACAATGAACTCCTAA | | | |
| NoV3j, SNP13373929 of | SEQ ID NO: 24 | 536 aa | 1MW at 58650.8kD |
| CG50253-01, Protein Sequence | | | SNP Change: no change |

| MDFLLALVLVSSLYLQAAAEFDGRWPRQIVSSIGLCRYGGRIDCCWGWARQSWGQCQPVCQPRCKHGE | | |
|---|---|---|
| CIGPNKCKCHPGYAGKTCNQDLNECGLKPRPCKHRCMNTYGSYKCYCLNGYMLMPDGSCSSALTCSMA | | |
| NCQYGCDVVKGQIRCQCPSPGLQLAPDGRTCVDVDECATGRASCPRFRQCVNTFGSYICKCHKGFDLM | | |
| YIGGKYQCHDIDECSLGQYQCSSFARCYNIRGSYKCKCKEGYQGDGLTCVYIPKVMIEPSGPIHVPKG | | |
| NGTILKGDTGNNNWIPDVGSTWWPPKTPYIPPIITNRPTSKPTTRPTPKPTPIPTPPPPPPLPTELRT | | |
| PLPPTTPERPTTGLTTIAPAASTPPGGITVDNRVQTDPQKPRGDVFSVLVHSCNFDHGLCGWIREKDN | | |
| DLHWEPIRDPAGGQYLTVSAAKAPGGKAARLVLPLGRLMHSGDLCLSFRHKVTGLHSGTLQVFVRKHG | | |
| AHGAALWGRNGGHGWRQTQITLRGADIKSVVFKGEKRRGHTGEIGLDDVSLKKGHCSEER | | |
| NOV3k, SNP13380272 of | SEQ ID NO: 25 | 1882 bp |
| CG50253-01, DNA Sequence | ORF Start: ATG at 243 | ORF Stop: TM at 1851 |
| | SNP Pos: 719 | SNP Change: G to C |

| GGACACTGACATGGACTGAAGGAGTAGAAAAGAAGGGAGCGGGAGGGGGCTCCGGGCGCCGCGCAGCA | | | |
|---|---|---|---|
| GACCTACTCCGGCCGCGCGCCTCGCCGCTGTCCTCCGGGAGCGGCAGCAGTAGCCCGGGCGGCGAGGG | | | |
| CTGGGGGTTCCTCGAGACTCTCAGAGGGGCGCCTCCCATCGGCGCCCACCACCCCAACCTGTTCCTCG | | | |
| CGCGCCACTGCGCTGCGCCCCAGGACCCGCTGCCCAACATGGATTTTCTCCTGGCGCTGGTGCTGGTA | | | |
| TCCTCGCTCTACCTGCAGGCGGCCGCCGAGTTCGACGGGAGGTGGCCCAGGCAAATAGTGTCATCGAT | | | |
| TGGCCTATGTCGTTATGGTGGGAGGATTGACTGCTGCTGGGGCTGGGCTCGCCAGTCTTGGGGACAGT | | | |
| GTCAGCCTGTGTGCCAACCACGATGCAAACATGGTGAATGTATCGGGCCAAACAAGTGCAAGTGTCAT | | | |
| CCTGGTTATGCTGGAAAAACCTGTAATCAAGATCTAAATGAGTGTGGCCTGAAGCCCCGGCCCTGTAA | | | |
| GCACAGGTGCATGAACACTTACGGCAGCTACAAGTGCTACTGTCTCAACGGATATATGCTCATGCCGG | | | |
| ATGGTTCCTGCTCAAGTGCCCTGACCTGCTCCATGGCAAACTGTCAGTATGGCTGTGATGTTGTTAAA | | | |
| GGACAAATACGGTGCCAGTGCCCATCCCCTGGCCTGCACCTGGCTCCTGATGGGAGGACCTGTGTAGA | | | |
| TGTTGATGAATGTGCTACAGGAAGAGCCTCCTGCCCTAGATTTAGGCAATGTGTCAACACTTTTGGGA | | | |
| GCTACATCTGCAAGTGTCATAAAGGCTTCGATCTCATGTATATTGGAGGCAAATATCAATGTCATGAC | | | |
| ATAGACGAATGCTCACTTGGTCAGTATCAGTGCAGCAGCTTTGCTCGATGTTATAACATACGTGGGTC | | | |
| CTACAAGTGCAAATGTAAAGAAGGATACCAGGGTGATGGACTGACTTGTGTGTATATCCCAAAAGTTA | | | |
| TGATTGAACCTTCAGGTCCAATTCATGTACCAAAGGGAAATGGTACCATTTTAAAGGGTGACACAGGA | | | |
| AATAATAATTGGATTCCTGATGTTGGAAGTACTTGGTGGCCTCCGAAGACACCATATATTCCTCCTAT | | | |
| CATTACCAACAGGCCTACTTCTAAGCCAACAACAAGACCTACACCAAAGCCAACACCAATTCCTACTC | | | |
| CACCACCACCACCACCCCTGCCAACAGAGCTCAGAACACCTCTACCACCTACAACCCCAGAAAGGCCA | | | |
| ACCACCGGACTGACAACTATAGCACCAGCTGCCAGTACACCTCCAGGAGGGATTACAGTTGACAACAG | | | |
| GGTACAGACAGACCCTCAGAAACCCAGAGGAGATGTGTTCAGTGTTCTGGTACACAGTTGTAATTTTG | | | |
| ACCATGGACTTTGTGGATGGATCAGGGAGAAAGACAATGACTTGCACTGGGAACCAATCAGGAACCCA | | | |
| GCAGGTGGACAATATCTGACAGTGTCGGCAGCCAAAGCCCCAGGGGGAAAAGCTGCACGCTTGGTGCT | | | |
| ACCTCTCGGCCGCCTCATGCATTCAGGGGACCTGTGCCTGTCATTCAGGCACAAGGTGACGGGGCTGC | | | |
| ACTCTGGCACACTCCAGGTGTTTGTGAGAAAACACGGTGCCCACGGAGCAGCCCTGTGGGGAAGAAAT | | | |
| GGTGGCCATGGCTGGAGGCAAACACAGATCACCTTGCGAGGGGCTGACATCAAGAGCGTCGTCTTCAA | | | |
| AGGTGAAAAAAGGCGTGGTCACACTGGGGAGATTGGATTAGATGATGTGAGCTTGAAAAAAGGCCACT | | | |
| GCTCTGAAGAACGCTAACAACTCCAGAACTAACAATGAACTCCTAA | | | |
| NOV3k, SNP13380272 of | SEQ ID NO: 26 | 536 aa | MW at 58659.8kD |
| CG50253-01, Protein Sequence | SNP Pos: 159 | SNP Change: Gln to His | |

| MDFLLALVLVSSLYLQAAAEFDGRWPRQIVSSIGLCRYGGRIDCCWGWARQSWGQCQPVCQPRCKHGE | | |
|---|---|---|
| CIGPNKCKCHPGYAGKTCNQDLNECGLKPRPCKHRCMNTYGSYKCYCLNGYMLMPDGSCSSALTCSMA | | |
| NCQYGCDVVKGQIRCQCPSPGLHLAPDGRTCVDVDECATGRASCPRFRQCVNTFGSYICKCHKGFDLM | | |
| YIGGKYQCHDIDECSLGQYQCSSFARCYNIRGSYKCKCKEGYQGDGLTCVYIPKVMIEPSGPIHVPKG | | |
| NGTILKGDTGNNNWIPDVGSTWWPPKTPYIPPIITNRPTSKPTTRPTPKPTPIPTPPPPPPLPTELRT | | |
| PLPPTTPERPTTGLTTIAPAASTPPGGITVDNRVQTDPQKPRGDVFSVLVHSCNFDHGLCGWIREKDN | | |
| DLHWEPIRDPAGGQYLTVSAAKAPGGKAARLVLPLGRLMHSGDLCLSFRHKVTGLHSGTLQVFVRKHG | | |
| AHGAALWGRNGGHGWRQTQITLRGADIKSVVFKGEKRRGHTGEIGLDDVSLKKGHCSEER | | |
| Nov3l, SNP13379745 of | SEQ ID NO: 27 | 1882 bp |
| CG50253-01, DNA Sequence | ORF Start: ATG at 243 | ORF Stop: TAA at 1851 |
| | SNP Pos: 750 | SNP Change: G to A |

| GGACACTGACATGGACTGAAGGAGTAGAAAAGAAGGGAGCGGGAGGGGGCTCCGGGCGCCGCGCAGCA | | | |
|---|---|---|---|
| GACCTACTCCGGCCGCGCGCCTCGCCGCTGTCCTCCGGGAGCGGCAGCAGTAGCCCGGGCGGCGAGGC | | | |
| CTGGGGGTTCCTCGAGACTCTCAGAGGGGCGCCTCCCATCGGCGCCCACCACCCCAACCTGTTCCTCG | | | |
| CGCGCCACTGCGCTGCGCCCCAGGACCCGCTGCCCAACATGGATTTTCTCCTGGCGCTGGTGCTGGTA | | | |
| TCCTCGCTCTACCTGCAGGCGGCCGCCGAGTTCGACGGGAGGTGGCCCAGGCAAATAGTGTCATCGAT | | | |
| TGGCCTATGTCGTTATGGTGGGAGGATTGACTGCTGCTGGGGCTGGGCTCGCCAGTCTTGGGGACAGT | | | |
| GTCAGCCTGTGTGCCAACCACGATGCAAACATGGTGAATGTATCGGGCCAAACAAGTGCAAGTGTCAT | | | |
| CCTGGTTATGCTGGAAAAACCTGTAATCAAGATCTAAATGAGTGTGGCCTGAAGCCCCGGCCCTGTAA | | | |
| GCACAGGTGCATGAACACTTACGGCAGCTACAAGTGCTACTGTCTCAACGGATATATGCTCATGCCGG | | | |
| ATGGTTCCTGCTCAAGTGCCCTGACCTGCTCCATGGCAAACTGTCAGTATGGCTGTGATGTTGTTAAA | | | |
| GGACAAATACGGTGCCAGTGCCCATCCCCTGGCCTGCAGCTGGCTCCTGATGGGAGGACCTGTGTAGA | | | |
| TATTGATGAATGTGCTACAGGAAGAGCCTCCTGCCCTAGATTTAGGCAATGTGTCAACACTTTTGGGA | | | |
| GCTACATCTGCAAGTGTCATAAAGGCTTCGATCTCATGTATATTGGAGGCAAATATCAATGTCATGAC | | | |
| ATAGACGAATGCTCACTTGGTCAGTATCAGTGCAGCAGCTTTGCTCGATGTTATAACATACGTGGGTC | | | |
| CTACAAGTGCAAATGTAAAGAAGGATACCAGGGTGATGGACTGACTTGTGTGTATATCCCAAAAGTTA | | | |
| TGATTGAACCTTCAGGTCCAATTCATGTACCAAAGGGAAATGGTACCATTTTAAAGGGTGACACAGGA | | | |
| AATAATAATTGGATTCCTGATGTTGGAAGTACTTGGTGGCCTCCGAAGACACCATATATTCCTCCTAT | | | |
| CATTACCAACAGGCCTACTTCTAAGCCAACAACAAGACCTACACCAAAGCCAACACCAATTCCTACTC | | | |
| CACCACCACCACCACCCCTGCCAACAGAGCTCAGAACACCTCTACCACCTACAACCCCAGAAAGGCCA | | | |
| ACCACCGGACTGACAACTATAGCACCAGCTGCCAGTACACCTCCAGGAGGGATTACAGTTGACAACAG | | | |
| GGTACAGACAGACCCTCAGAAACCCAGAGGAGATGTGTTCAGTGTTCTGGTACACAGTTGTAATTTTG | | | |
| ACCATGGACTTTGTGGATGGATCAGGGAGAAAGACAATGACTTGCACTGGGAACCAATCAGGGACCCA | | | |
| GCAGGTGGACAATATCTGACAGTGTCGGCAGCCAAAGCCCCAGGGGGAAAAGCTGCACGCTTGGTGCT | | | |
| ACCTCTCGGCCGCCTCATGCATTCAGGGGACCTGTGCCTGTCATTCAGGCACAAGGTGACGGGGCTGC | | | |
| ACTCTGGCACACTCCAGGTGTTTGTGAGAAAACACGGTGCCCACGGAGCAGCCCTGTGGGGAAGAAAT | | | |
| GGTGGCCATGGCTGGAGGCAAACACAGATCACCTTGCGAGGGGCTGACATCAAGAGCGTCGTCTTCAA | | | |
| AGGTGAAAAAAGGCGTGGTCACACTGGGGAGATTGGATTAGATGATGTGAGCTTGAAAAAAGGCCACT | | | |
| GCTCTGAAGAACGCTAACAACTCCAGAACTAACAATGAACTCCTAA | | | |
| NOV3l, SNP13379745 of | SEQ ID NO: 28 | 536 aa | MW at 58664.8kD |
| CG50253-01, Protein Sequence | SNP Pos: 170 | SNP Change: Val to Ile | |

| MDFLLALVLVSSLYLQAAAEFDGRWPRQIVSSIGLCRYGGRIDCCWGWARQSWGQCQPVCQPRCKHGE | | |
|---|---|---|
| CIGPNKCKCHPGYAGKTCNQDLNECGLKPRPCKHRCMNTYGSYKCYCLNGYMLMPDGSCSSALTCSMA | | |
| NCQYGCDVVKGQIRCQCPSPGLQLAPDGRTCVDIDECATGRASCPRFRQCVNTFGSYICKCHKGFDLM | | |
| YIGGKYQCHDIDECSLGQYQCSSFARCYNIRGSYKCKCKEGYQGDGLTCVYIPKVMIEPSGPIHVPKG | | |
| NGTILKGDTGNNNWIPDVGSTWWPPKTPYIPPIITNRPTSKPTTRPTPKPTPIPTPPPPPPLPTELRT | | |
| PLPPTTPERPTTGLTTIAPAASTPPGGITVDNRVQTDPQKPRGDVFSVLVHSCNFDHGLCGWIREKDN | | |
| DLNWEPIRDPAGGQYLTVSAAKAPGGKAARLVLPLGRLMHSGDLCLSFRHKVTGLHSGTLQVFVRKHG | | |
| AHGAALWGRNGGHGWRQTQITLRGADIKSVVFKGEKRRGHTGEIGLDDVSLKKGHCSEER | | |
| NOV3m, SNP13373930 of | SEQ ID NO: 29 | 1882 bp |
| CG50253-01, DNA Sequence | ORF Start: ATG at 243 | ORF Stop: TAA at 1851 |
| | SNP Pos: 942 | SNP Change: A to G |

| GGACACTGACATGGACTGAAGGAGTAGAAAAGAAGGGAGCGGGAGGGGGCTCCGGGCGCCGCGCAGCA | | | |
|---|---|---|---|
| GACCTACTCCGGCCGCGCGCCTCGCCGCTGTCCTCCGGGAGCGGCAGCAGTAGCCCGGGCGGCGAGGG | | | |
| CTGGGGGTTCCTCGAGACTCTCAGAGGGGCGCCTCCCATCGGCGCCCACCACCCCAACCTGTTCCTCG | | | |
| CGCGCCACTGCGCTGCGCCCCAGGACCCGCTGCCCAACATGGATTTTCTCCTGGCGCTGGTGCTGGTA | | | |
| TCCTCGCTCTACCTGCAGGCGGCCGCCGAGTTCGACGGGAGGTGGCCCAGGCAAATAGTGTCATCGAT | | | |
| TGGCCTATGTCGTTATGGTGGGAGGATTGACTGCTGCTGGGGCTGGGCTCGCCAGTCTTGGGGACAGT | | | |
| GTCAGCCTGTGTGCCAACCACGATGCAAACATGGTGAATGTATCGGGCCAAACAAGTGCAAGTGTCAT | | | |
| CCTGGTTATGCTGGAAAAACCTGTAATCAAGATCTAAATGAGTGTGGCCTGAAGCCCCGGCCCTGTAA | | | |
| GCACAGGTGCATGAACACTTACGGCAGCTACAAGTGCTACTGTCTCAACGGATATATGCTCATGCCGG | | | |
| ATGGTTCCTGCTCAAGTGCCCTGACCTGCTCCATGGCAAACTGTCAGTATGGCTGTGATGTTGTTAAA | | | |
| GGACAAATACGGTGCCAGTGCCCATCCCCTGGCCTGCAGCTGGCTCCTGATGGGAGGACCTGTGTAGA | | | |
| TGTTGATGAATGTGCTACAGGAAGAGCCTCCTGCCCTAGATTTAGGCAATGTGTCAACACTTTTGGGA | | | |
| GCTACATCTGCAAGTGTCATAAAGGCTTCGATCTCATGTATATTGGAGGCAAATATCAATGTCATGAC | | | |
| ATAGACGAATGCTCACTTGGTCAGTATCAGTGCAGCAGCTTTGCTCGATGTTATAACGTACGTGGGTC | | | |
| CTACAAGTGCAAATGTAAAGAAGGATACCAGGGTGATGGACTGACTTGTGTGTATATCCCAAAAGTTA | | | |
| TGATTGAACCTTCAGGTCCAATTCATGTACCAAAGGGAAATGGTACCATTTTAAAGGGTGACACAGGA | | | |
| AATAATAATTGGATTCCTGATGTTGGAAGTACTTGGTGGCCTCCGAAGACACCATATATTCCTCCTAT | | | |
| CATTACCAACAGGCCTACTTCTAAGCCAACAACAAGACCTACACCAAAGCCAACACCAATTCCTACTC | | | |
| CACCACCACCACCACCCCTGCCAACAGAGCTCAGAACACCTCTACCACCTACAACCCCAGAAAGGCCA | | | |
| ACCACCGGACTGACAACTATAGCACCAGCTGCCAGTACACCTCCAGGAGGGATTACAGTTGACAACAG | | | |
| GGTACAGACAGACCCTCAGAAACCCAGAGGAGATGTGTTCAGTGTTCTGGTACACAGTTGTAATTTTG | | | |
| ACCATGGACTTTGTGGATGGATCAGGGAGAAAGACAATGACTTGCACTGGGAACCAATCAGGGACCCA | | | |
| GCAGGTGGACAATATCTGACAGTGTCGGCAGCCAAAGCCCCAGGGGGAAAAGCTGCACGCTTGGTGCT | | | |
| ACCTCTCGGCCGCCTCATGCATTCAGGGGACCTGTGCCTGTCATTCAGGCACAAGGTGACGGGGCTGC | | | |
| ACTCTGGCACACTCCAGGTGTTTGTGAGAAAACACGGTGCCCACGGAGCAGCCCTGTGGGGAAGAAAT | | | |
| GGTGGCCATGGCTGGAGGCAAACACAGATCACCTTGCGAGGGGCTGACATCAAGAGCGTCGTCTTCAA | | | |
| AGGTGAAAAAAGGCGTGGTCACACTGGGGAGATTGGATTAGATGATGTGAGCTTGAAAAAAGGCCACT | | | |
| GCTCTGAAGAACGCTAACAACTCCAGAACTAACAATGAACTCCTAA | | | |
| NOV3m, SNP13373930 of | SEQ ID NO: 30 | 536 aa | MW at 58636.8kD |
| CG50253-01, Protein Sequence | SNP Pos: 234 | SNP Change: Ile to Val | |

| | |
|---|---|
| MDFLLALVLVSSLYLQAAAEFDGRWPRQIVSSIGLCRYGGRIDCCWGWARQSWGQCQPVCQPRCKHGE | +TL,42 |
| CIGPNKCKCHPGYAGKTCNQDLNECGLKPRPCKHRCMNTYGSYKCYCLNGYMLMPDGSCSSALTCSMA | |
| NCQYGCDVVKGQIRCQCPSPGLQLAPDGRTCVDVDECATGRASCPRFRQCVNTFGSYICKCHKGFDLM | |
| YIGGKYQCHDIDECSLGQYQCSSFARCYNVRGSYKCKCKEGYQGDGLTCVYIPKVMIEPSGPIHVPKG | |
| NGTILKGDTGNNNWIPDVGSTWWPPKTPYIPPIITNRPTSKPTTRPTPKPTPIPTPPPPPPLPTELRT | |
| PLPPTTPERPTTGLTTIAPAASTPPGGITVDNRVQTDPQKPRGDVFSVLVHSCNFDHGLCGWIREKDN | |
| DLHWEPIRDPAGGQYLTVSAAKAPGGKAARLVLPLGRLMHSGDLCLSFRHKVTGLHSGTLQVFVRKHG | |
| AHGAALWGRNGGHGWRQTQITLRGADIKSVVFKGEKRRGHTGEIGLDDVSLKKGHCSEER | |

[0363] A ClustalW comparison of the above protein sequences yields the following sequence alignment shown in Table 3B.

TABLE 3B
Comparison of the NOV3 protein sequences.

| | |
|---|---|
| NOV3a | ---MDFLLALVLVSSLYLQAAAEFDG-RWPRQIVSSIGLCRYGGRIDCCWGWARQSWGQC |
| NOV3b | TGSMDFLLALVLVSSLYLQAAAEFDG-RWPRQIVSSIGLCRYGGRIDCCWGWARQSWGQC |
| NOV3c | TGSMDFLLALVLVSSLYLQAAAEFDG-RWPRQIVSSIGLCRYGGRIDCCWGWARQSWGQC |
| NOV3d | TGSMDFLLALVLVSSLYLQAAAEFDG-RWPRQIVSSIGLCRYGGRIDCCWGWARQSWGQC |
| NOV3e | -------------------TGSEFDG-RWPRQIVSSIGLCRYGGRIDCCWGWARQSWGQC |
| NOV3f | TGSMDFLLALVLVSSLYLQAAAEFDGSRWPRQIVSSIGLCRYGGRIDCCWGWARQSWGQC |
| NOV3g | --------------------------------------------------------TGSC |
| NOV3h | --------------------------------------------------------TGSC |
| NOV3a | QP-----------------VCQPRCKHGECIGPNKCKCHPGYAGKTCNQDLNECGLKPRP |
| NOV3b | QPFYVLRQRTARIRCQLKAVCQPRCKHGECIGPNKCKCHPGYAGKTCNQDLNECGLKPRP |
| NOV3c | QP-----------------VCQPRCKHGECTGPNKCKCHPGYAGKTCNQDLNECGLKPRP |
| NOV3d | QPFYVLRQRIAPTRCQLKAVCQPRCKHGECIGPNKCKCHPGYAGKTCNQDLNECGLKPRP |
| NOV3e | QP-----------------VCQPRCKHGECIGPNKCKCHPGYAGKTCNQDLNECGLKPRP |
| NOV3f | QP-----------------VCQPRCKHGECIGPNXCKCHPGYAGKTCNQDLNECGLKPRP |
| NOV3g | QP-----------------VCQPRCKHGECIGPNKCKCHPGYAGKTCNQDLNECGLKPRP |
| NOV3h | QP-----------------VCQPRCKHGECIGPNKCKCHPGYAGKTCNQDLNECGLKPRP |
| NOV3a | CKHRCMNTYGSYKCYCLNGYMLMPDGSCSSALTCSMANCQYGCDVVKGQIRCQCPSPGLQ |
| NOV3b | CKHRCMNTYGSYKCYCLNGYMLMPDGSCSSALTCSMANCQYGCDVVKGQIRCQCPSPGLQ |
| NOV3c | CKHRCMNTYGSYKCYCLNGYMLMPDGSCSSALTCSMANCQYGCDVVKGQIRCQCPSPGLH |
| NOV3d | CKHRCMNTYGSYKCYCLNGYMLMPDGSCSSALTCSMANCQYGCDVVKGQIRCQCPSPGLH |
| NOV3e | CKHRCMNTYGSYKCYCLNGYMLMPDGSCSSALTCSMANCQYGCDVVKGQIRCQCPSPGLH |
| NOV3f | CKHRCMNTYGSYKCYCLNGYMLMPDGSCSSALTCSMANCQYGCDVVKGQIRCQCPSPGLH |
| NOV3g | CKHRCMNTYGSYKCYCLNGYMLMPDGSCSSALTCSMANCQYGCDVVKGQIRCQCPSPGLQ |
| NOV3h | CKHRCMNTYGSYKCYCLNGYMLMPDGSCSSALTCSMANCQYGCDVVKGQIRCQCPSPGLH |
| NOV3a | LAPDGRTCVDVDECATGRASCPRFRQCVNTFGSYICKCHKGFDLMYIGGKYQCHDTDECS |
| NOV3b | LAPDGRTCVDVDECATGRASCPRFRQCVNTFGSYICKCHKGFDLMYIGGKYQCHDIDECS |
| NOV3c | LAPDGRTCVDVDECATGRASCPRFRQCVNTFGSYICKCHKGFDLMYIGGKYQCHDIDECS |
| NOV3d | LAPDGRTCVDVDECATGRASCPRFRQCVNTFGSYICKCHKGFDLMYIGGKYQCHDIDECS |
| NOV3e | LAPDGRTCVDVDECATGPASCPRFRQCVNTFGSYICKCHKGFDLMYIGGKYQCHDIDECS |
| NOV3f | LAPDGRTCVDVDECATGPASCPRFRQCVNTFGSYICKCHKGFDLMYIGGKYQCHDIDECS |
| NOV3g | LAPDGRTCVDVDECATGHASCPRFRQCVNTFGSYICKCHKGFDLMYIGGKYQCHDIDECS |
| NOV3h | LAPDGRTCVDVDECATGHASCPRFRQCVNTFGSYICKCHKGFDLMYIGGKYQCHDIDECS |
| NOV3a | LGQYQCSSFARCYNIRGSYKCKCKEGYQGDGLTCVYIPKVMIEPSGPIHVPKGNGTILKG |
| NOV3b | LGQYQCSSFARCYNVRGSYKCKCKEGYQGDGLTCVYIPKVMIEPSGPIHVPKGNGTILKG |
| NOV3c | LGQYQCSSFARCYNVRGSYKCKCKEGYQGDGLTCVYIPKVMIEPSGPIHVPKGNGTILKG |
| NOV3d | LGQYQCSSFARCYNVRGSYKCKCKEGYQGDGLTCVYIPKVMIEPSGPIHVPKGNGTILKG |
| NOV3e | LGQYQCSSFARCYNVRGSYKCKCKEGYQGDGLTCVYIPKVMIEPSGPIHVPKGNGTILKG |
| NOV3f | LGQYQCSSFARCYNVRGSYKCKCKEGYQGDGLTCVYIPKVMIEPSGPIHVPKGNGTILKG |
| NOV3g | LGQYQCSSFARCYNVRGSYKCKCKEGYQGDGLTCVDG----------------------- |
| NOV3h | LGQYQCSSFARCYNVRGSYKCKCKEGYQGDGLTCVDG----------------------- |
| NOV3a | DTGNNNWIPDVGSTWWPPKTPYIPPIITNRPTSKPTTRPTPKPTPIPTPPPPPPLPTELR |
| NOV3b | DTGNNNWIPDVGSTWWPPKTPYIPPTITNRPTSKPTTRPTPKPTPIPTPPPPPPLPTELR |
| NOV3c | DTGNNNWIPDVGSTWWPPKTPYIPPIITNRPTSKPTTRPTPKPTPIPTPPPPPPLPTELR |
| NOV3d | DTGNNNWIPDVGSTWWPPKTPYIPPIITNRPTSKPTTRPTPKPTPIPTPPPPPPLPTELR |
| NOV3e | DTGNNNWIPDVGSTWWPPKTPYIPPIITNRPTSKPTTRPTPKPTPIPTPPPPPPLPTELR |
| NOV3f | DTGNNNWIPDVGSTWWPPKTPYIPPIITNRPTSKPTTRPTPKPTPIPTPPPPPPLPTELR |
| NOV3g | ------------------------------------------------------------ |
| NOV3h | ------------------------------------------------------------ |
| NOV3a | TPLPPTTPERPTTGLTTIAPAASTPPGGITVDNRVQTDPQKPRGDVFS------------ |
| NOV3b | TPLPPTTPERPTTGLTTIAPAASTPPGGITVDNRVQTDPQKPRGDVFTPRQPSNDLFEIF |
| NOV3c | TPLPPTTPERPTTGLTTIAPAASTPPGGITVDNRVQTDPQKPRGDVFS------------ |
| NOV3d | TPLPPTTPERPTTGLTTIAPAASTPPGGITVDNRVQTDPQKPRGDVFTPRQPSNDLFEIF |
| NOV3e | TPLPPTTPERPTTGLTTIAPAASTPPGGITVDNRVQTDPQKPRGDVFTPRQPSNDLFEIF |
| NOV3f | TPLPPTTPERPTTGLTTIAPAASTPPGGITVDNRVQTDPQKPRGDVFTPRQPSNDLFEIF |
| NOV3g | ------------------------------------------------------------ |
| NOV3h | ------------------------------------------------------------ |
| NOV3a | -----------------VLVHSCNFDHGLCGWIREKDNDLHWEPIPDPAGGQYLTVSAAK |
| NOV3b | EIERGVSADDEAKDDPGVLVHSCNFDHGLCGWIREKDNDLHWEPIPDPAGGQYLTVSAAK |
| NOV3c | -----------------VLVHSCNFDHGLCGWIREKDNDLHWEPIRDPAGGQYLTVSAAK |
| NOV3d | EIERGVSADDEAKDDPGVLVHSCNFDHGLCGWIREKDNDLHWEPIRDPAGGQYLTVSAAK |
| NOV3e | EIERGVSADDEAKDDPGVLVHSCNFDHGLCGWIREKDNDLHWEPIRDPAGGQYLTVSAAK |
| NOV3f | EIERGVSADDEAKDDPGVLVHSCNFDHGLCGWIREKDNDLHWEPIRDPAGGQYLTVSAAK |
| NOV3g | ------------------------------------------------------------ |
| NOV3h | ------------------------------------------------------------ |
| NOV3a | APGGKAARLVLPLGRLMHSGDLCLSFRHKVTGLHSGTLQVFVRKHGAHGAALWGRNGGHG |
| NOV3b | APGGKAARLVLPLGRLMHSGDLCLSFRHKVTGLHSGTLQVFVRKHGAHGAALWGRNGGHG |
| NOV3c | APGGKAARLVLPLGRLMHSGDLCLSFRHKVTGLHSGTLQVFVRKHGAHGAALWGRNGGHG |
| NOV3d | APGGKAARLVLPLGRLMHSGDLCLSFRHKVTGLHSGTLQVFVRKHGAHGAALWGRNGGHG |
| NOV3e | APGGKAARLVLPLGRLMHSGDLCLSFRHKVTGLHSGTLQVFVRKHGAHGAALWGRNGGHG |
| NOV3f | APGGKAARLVLPLGRLMHSGDLCLSFRHKVTGLHSGTLQVFVRKHGAHGAALWGRNGGHG |
| NOV3g | ------------------------------------------------------------ |
| NOV3h | ------------------------------------------------------------ |
| NOV3a | WRQTQITLRGADIKSVVFKGEKRRGHTGEIGLDDVSLKKGHCSEER--- |
| NOV3b | WRQTQITLRGADIKSVVFKGEKRRGHTGEIGLDDVSLKKGHCSEERVDG |
| NOV3c | WRQTQITLRGADIKSVVFKGEKRRGHTGEIGLDDVSLKKGHCSEERVDG |
| NOV3d | WRQTQITLRGADIKSVVFKGEKRRGHTGEIGLDDVSLKKGHCSEERVDG |
| NOV3e | WRQTQITLRGADIKSVVFKGEKRRGHTGEIGLDDVSLKKGHCSEERVDG |
| NOV3f | WRQTQITLRGADIKSVVFKGEKRRGHTGEIGLDDVSLKKGHCSEERVDG |
| NOV3g | ------------------------------------------------- |
| NOV3h | ------------------------------------------------- |
| NOV3a | (SEQ ID NO: 6) |
| NOV3b | (SEQ ID NO: 8) |
| NOV3c | (SEQ ID NO: 10) |
| NOV3d | (SEQ ID NO: 12) |
| NOV3e | (SEQ ID NO: 14) |
| NOV3f | (SEQ ID NO: 16) |
| NOV3g | (SEQ ID NO: 18) |
| NOV3h | (SEQ ID NO: 20) |

[0364] Further analysis of the NOV3a protein yielded the following properties shown in Table 3C.

TABLE 3C
Protein Sequence Properties NOV3a

| | |
|---|---|
| SignalP analysis: | Cleavage site between residues 20 and 21 |
| PSORT II analysis: | |

| PSG: | a new signal peptide prediction method | |
|---|---|---|
| | N-region: | length 2; pos. chg 0; neg. chg 1 |
| | H-region: | length 17; peak value 0.00 |
| | PSG score: | −4.40 |

| | |
|---|---|
| GvH: | von Heijne's method for signal seq. recognition |
| | GvH score (threshold: −2.1): −0.34 |
| | possible cleavage site: between 17 and 18 |

>>> Seems to have no N-terminal signal peptide

| ALOM: | Klein et al's method for TM region allocation | | |
|---|---|---|---|
| | Init position for calculation: 1 | | |
| | Tentative number of TMS(s) for the threshold 0.5: 1 | | |
| | Number of TMS(s) for threshold 0.5: 1 | | |
| | INTEGRAL | Likelihood = | Transmembrane 3-19 |
| | | −4.19 | |

| | |
|---|---|
| PERIPHERAL | Likelihood = 5.67 (at 439) |

| | |
|---|---|
| | ALOM score: −4.19 (number of TMSs: 1) |
| MTOP: | Prediction of membrane topology (Hartmann et al.) |
| | Center position for calculation: 10 |
| | Charge difference: 0.0 C(0.0)-N(0.0) |
| | N >= C: N-terminal side will be inside |

>>> membrane topology: type 2 (cytoplasmic tail 1 to 3)

| MITDISC: | discrimination of mitochondrial targeting seq | | | |
|---|---|---|---|---|
| | R content: | 0 | Hyd Moment(75): | 4.41 |
| | Hyd Moment(95): | 7.23 | G content: | 0 |
| | D/E content: | 2 | S/T content: | 2 |

| | |
|---|---|
| | Score: −6.55 |
| Gavel: | prediction of cleavage sites for mitochondrial preseq |
| | cleavage site motif not found |

NUCDISC: discrimination of nuclear localization signals

| | |
|---|---|
| | pat4: none |
| | pat7: none |
| | bipartite: none |
| | content of basic residues: 11.9% |
| | NLS Score: −0.47 |
| KDEL: | ER retention motif in the C-terminus: none |

ER Membrane Retention Signals: none
SKL: peroxisomal targeting signal in the C-terminus: none
PTS2: 2nd peroxisomal targeting signal: none
VAC: possible vacuolar targeting motif: none
RNA-binding motif: none
Actinin-type actin-binding motif:

type 1: none
type 2: none

NMYR: N-myristoylation pattern: none
Prenylation motif: none
memYQRL: transport motif from cell surface to Golgi: none
Tyrosines in the tail: none
Dileucine motif in the tail: none
checking 63 PROSITE DNA binding motifs: none
checking 71 PROSITE ribosomal protein motifs: none
checking 33 PROSITE prokaryotic DNA binding motifs: none

| | |
|---|---|
| NNCN: | Reinhardt's method for Cytoplasmic/Nuclear discrimination |
| | Prediction: nuclear |
| | Reliability: 89 |
| COIL: | Lupas's algorithm to detect coiled-coil regions |
| | total: 0 residues |

Final Results (k = 9/23):

```
43.5%: nuclear
26.1%: mitochondrial
  8.7%: cytoplasmic
  4.3%: plasma membrane
  4.3%: vesicles of secretory system
  4.3%: extracellular, including cell wall
  4.3%: endoplasmic reticulum
  4.3%: peroxisomal
```

>> prediction for CG50253-01 is nuc (k = 23)

[0365] A search of the NOV3a protein against the Geneseq database, a proprietary database that contains sequences published in patents and patent publication, yielded several homologous proteins shown in Table 3D.

TABLE 3D
Geneseq Results for NOV3a

| | | NOV3a | Identities/ | |
|---|---|---|---|---|
| | | Residues/ | Similarities for | |
| Geneseq | Protein/Organism/Length | Match | the Matched | Expect |
| Identifier | [Patent #, Date] | Residues | Region | Value |
| ABG70290 | Human novel polypeptide #6 - Homo | 1 . . . 536 | 536/536 (100%) | 0.0 |
| | sapiens, 536 aa. [WO200257452-A2, | 1 . . . 536 | 536/536 (100%) | |
| | 25-JUL-2002] | | | |
| ABG69659 | Human secreted protein SCEP-39 - | 1 . . . 536 | 534/566 (94%) | 0.0 |
| | Homo sapiens, 566 aa. | 1 . . . 566 | 535/566 (94%) | |
| | [WO200248337-A2, 20-JUN-2002] | | | |
| AAB70547 | Human PRO17 protein sequence SEQ | 1 . . . 536 | 532/582 (91%) | 0.0 |
| | ID NO: 34 - Homo sapiens, 582 aa. | 1 . . . 582 | 533/582 (91%) | |
| | [WO200110902-A2, 15-FEB-2001] | | | |
| AAB70549 | Clone 16467945.0.85-S261.D protein | 20 . . . 536 | 512/546 (93%) | 0.0 |
| | sequence SEQ ID NO: 82 - Homo | 1 . . . 546 | 514/546 (93%) | |
| | sapiens, 546 aa. [WO200110902-A2, | | | |
| | 15-FEB-2001] | | | |
| ABU58425 | Human PRO polypeptide #26 - Homo | 1 . . . 505 | 503/505 (99%) | 0.0 |
| | sapiens, 509 aa. [US2003027272-A1, | 1 . . . 505 | 504/505 (99%) | |
| | 06-FEB-2003] | | | |

[0366] In a BLAST search of public sequence databases, the NOV3a protein was found to have homology to the proteins shown in the BLASTP data in Table 3E.

TABLE 3E
Public BLASTP Results for NOV3a

| | | NOV3a | Identities/ | |
|---|---|---|---|---|
| Protein | | Residues/ | Similarities for | |
| Accession | | Match | the Matched | Expect |
| Number | Protein/Organism/Length | Residues | Portion | Value |
| CAC33425 | Sequence 33 from Patent | 1 . . . 536 | 532/582 (91%) | 0.0 |
| | WO0110902 - Homo sapiens | 1 . . . 582 | 533/582 (91%) | |
| | (Human), 582 aa. | | | |
| Q91V88 | POEM (NEPHRONECTIN short | 1 . . . 532 | 470/562 (83%) | 0.0 |
| | isoform) - Mus musculus (Mouse), | 1 . . . 561 | 497/562 (87%) | |
| | 561 aa. | | | |
| Q91ZD3 | Nephronectin long isoform - Mus | 1 . . . 532 | 470/579 (81%) | 0.0 |
| | musculus (Mouse), 578 aa. | 1 . . . 578 | 497/579 (85%) | |
| Q91XL5 | Nephronectin - Mus musculus | 1 . . . 532 | 470/593 (79%) | 0.0 |
| | (Mouse), 592 aa. | 1 . . . 592 | 497/593 (83%) | |
| Q923T5 | Nephronectin - Mus musculus | 1 . . . 532 | 470/610 (77%) | 0.0 |
| | (Mouse), 609 aa. | 1 . . . 609 | 497/610 (81%) | |

[0367] PFam analysis predicts that the NOV3a protein contains the domains shown in the Table 3F.

TABLE 3F
Domain Analysis of NOV3a

| | | | |
|---|---|---|---|
| | | Identities/ | |
| | | Similarities for | |
| Pfam | NOV3a | the Matched | Expect |
| Domain | Match Region | Region | Value |

| | | | | |
|---|---|---|---|---|
| C_tripleX | 54 . . . 71 | 7/18 | (39%) | 0.24 |
| | | 15/18 | (83%) | |
| EGF | 60 . . . 86 | 13/47 | (28%) | 0.13 |
| | | 23/47 | (49%) | |
| EGF | 93 . . . 127 | 15/47 | (32%) | 0.51 |
| | | 27/47 | (57%) | |
| EGF | 133 . . . 167 | 10/47 | (21%) | 0.035 |
| | | 24/47 | (51%) | |
| EGF | 218 . . . 253 | 12/47 | (26%) | 0.00011 |
| | | 28/47 | (60%) | |
| MAM | 393 . . . 534 | 48/183 | (26%) | 8.6e−27 |
| | | 98/183 | (54%) | |

### Example 4

[0368] The NOV4 clone was analyzed, and the nucleotide and encoded polypeptide sequences are shown in Table 4A.

TABLE 4A
NOV4 Sequence Analysis

| | | |
|---|---|---|
| NOV4a, CG50377-04 | SEQ ID NO: 31 | 10655 bp |
| DNA Sequence | ORF Start: at 1 | ORF Stop: TAG at 10639 |

GGCCAGAACTGCACGTTCCAACTGCACGGTCCCAATGGGACAGTTGAGAGCCCAGGGTTCCCATATGG
CTACCCCAATTACGCCAACTGCACGTGGACCATCACCGCGGAAGAGCAGCACAGAATCCAGCTTGTGT
TCCAGTCCTTTGCCCTGGAAGAGGACTTTGATGTCCTGTCGGTGTTTGATGGTCCACCCCAGCCAGAG
AATCTGCGTACGAGGCTCACAGGCTTTCAGCTGCCAGCCACCATTGTTAGTGCAGCCACCACCCTCTC
TCTGCGCCTCATCAGCGACTATGCAGTCAGTGCCCAAGGCTTCCACGCCACCTATGAAGTTCTCCCCA
GCCACACATGTGGGAACCCAGGGAGGCTGCCCAATGGCATCCAGCAGGGTTCAACCTTCAACCTCGGT
GACAAGGTCCGCTACAGCTGCAACCTTGGCTTCTTCCTGGAGGGCCACGCCGTGCTCACCTGCCACGC
TGGCTCTGAGAACAGCGCCACGTGGGACTTCCCCCTGCCTTCCTGCAGAGCTGATGATGCCTGTGGTG
GGACCCTGCGGGGCCAGAGTGGCATCATCTCCAGCCCCCACTTCCCCTCGGAGTACCATAACAATGCC
GACTGCACATGGACCATCCTGGCTGAGCTGGGGGACACCATCGCCCTGGTGTTTATTGACTTCCAGCT
GGAGGATGGTTACGACTTTCTGGAAGTCACTGGGACAGAAGGCTCCTCCCTCTGGTTCACCGGAGCCA
GCCTCCCAGCCCCCGTTATCAGCAGCAAGAACTGGCTGCGACTGCACTTCACATCGGATGGCAACCAC
CGGCAGCGCGGATTCAGTGCCCAATACCAAGTCAAGAAGCAAATTGAGTTGAAGTCTCGAGGTGTGAA
GCTGATGCCCAGCAAAGACAACAGCCAGAAGACGTCTGTGGTAACTCAGGTTGGTGTGTCCCAAGGAC
ATAATATGTGTCCAGACCCTGGCATACCCGAAAGGGGCAAAAGACTAGGCTCGGATTTCAGGTTAGGA
TCCAGCGTCCAGTTCACCTGCAACGAGGGCTATGACCTGCAAGGGTCCAAGCGGATCACCTGTATGAA
AGTGAGCGACATGTTTGCGGCCTGGAGCGACCACAGGCCAGTCTGCCGAGCCCGCATGTGTGATGCCC
ACCTTCGAGGCCCCTCGGGCATCATCACCTCCCCCAATTTCCCCATTCAGTATGACAACAATGCACAC
TGTGTGTGGATCATCACAGCACTCAACCCCTCCAAGGTAATCAAGCTCGCCTTTGAGGAGTTTGATTT
GGAGAGGGGCTATGACACCCTGACGGTCGGTGATGGTGGTCAGGATGGGGACCAGAAGACAGTTCTCT
ACATGCTGACAGGTACATCGGTCCCGGATCTCATTGTCAGCACCAATCATCAAATGTGGCTCCTCTTC
CAGACTGATGGCAGTGGCAGTTCCCTGGGATTCAAGGCTTCTTATGAAGAGATCGAGCAGGGCAGTTG
CGGTGACCCTGGCATACCTGCATATGGCCGGAGGGAAGGCTCCCGGTTTCGCCACGGTGACACACTCA
AGTTTGAGTGCCAGCCCGCCTTTGAGCTGGTGGGACAGAAGGCAATCACATGCCAAAAGAATAACCAA
TGGTCGGCTAAGAAGCCAGGCTGCGTGTGTTCCTGCTTCTTCAACTTCACCAGCCCGTCTGGGGTTGT
CCTGTCTCCCAACTACCCAGAGGACTATGGCAACCACCTCCACTGTGTCTGGCTCATCCTGGCCAGGC
CTGAGAGCCGCATCCACCTGGCCTTCAACGACATTGACGTGGAGCCTCAGTTTGATTTCCTGGTCATC
AAGGATGGGGCCACCGCCGAGGCGCCCGTCCTGGGCACCTTCTCAGGAAACCAGCTTCCCTCCTCCAT
CACAAGCAGTGGCCACGTGGCCCGTCTCGAGTTCCAGACTGACCACTCCACAGGGAAGAGGGGCTTCA
ACATCACTTTTACCAGTGAGTCCTCCAACGAGTGCCCGGATCCTGGCGTTCCAGTAAATGGCAAACGG
TTTGGGGACAGCCTCCAGCTGGGCAGCTCCATCTCCTTCCTCTGTGATGAAGGCTTCCTTGGGACTCA
GGGCTCAGAGACCATCACCTGCGTCCTGAAGGAGGGCAGCGTGGTCTGGAACAGCGCTGTGCTGCGGT
GTGAAGCTCCCTGTGGTGGTCACCTGACTTCGCCCAGCGGCACCATCCTCTCTCCGGGCTGGCCTGGC
TTCTACAAGGATGCCTTGAGCTGTGCCTGGGTGATTGAGGCCCAGCCAGGCTACCCCATCAAAATCAC
CTTCGACAGGTTCAAAACCGAGGTCAACTATGACACCCTGGAAGTACGCGATGGGCGGACTTACTCAG
CGCCCTTGATCGGGGTTTACCACGGGACCCAGGTTCCCCAGTTCCTCATCAGCACCAGCAACTACCTC
TACCTCCTCTTCTCTACCGACAAGAGTCACTCGGACATCGGCTTCCAGCTCCGCTATGAGGCTATAAC
ACTGCAGTCAGACCACTGTCTGGATCCAGGAATCCCAGTAAATGGACAGCGTCATGGGAATGACTTCT
ACGTGGGCGCGCTGGTGACCTTCAGCTGTGACTCGGGCTACACATTAAGTGACGGGGAGCCTCTGGAG
TGTGAGCCCAACTTCCAGTGGAGCCGGGCCCTGCCCAGTTGTGAAGCTCTCTGTGGTGGCTTCATTCA
AGGCTCCAGTGGGACCATCTTGTCGCCAGGTTTCCCTGACTTCTACCCCAACAACTTGAACTGCACCT
GGATTATCGAAACATCTCATGGCAAGGGTGTGTTCTTCACTTTCCACACCTTCCACCTGGAAAGTGGC
CATGACTACCTCCTCATCACTGAGAACGGCAGCTTCACCCAGCCCCTGAGGCAGCTAACTGGATCTCG
GCTGCCAGCTCCCATCAGCGCTGGGCTCTATGGCAACTTCACTGCCCAGGTCCGCTTCATCTCTGATT
TCTCCATGTCATATGAAGGATTCAACATCACCTTCTCAGAGTACGACTTGGAGCCCTGTGAGGAGCCC
GAGGTCCCAGCCTACAGCATCCGGAAGGGCTTGCAGTTTGGCGTGGGCGACACCTTGACCTTCTCCTG
CTTCCCCGGGTACCGTCTGGAGGGCACCGCCCGCATCACGTGCCTGGGGGGCAGACGGCGCCTGTGGA
GCTCGCCTCTGCCAAGGTGTGTTGCTGAGTGTGGGAATTCAGTCACAGGCACTCAGGGTACTTTGCTG
TCCCCCAACTTTCCTGTGAACTACAATAACAATCATGAATGCATCTACTCCATCCAGACCCAGCCAGG
GAAGGGAATTCAGCTGAAAGCCAGGGCATTCGAACTCTCCGAAGGAGATGTCCTCAAGGTTTATGATG
GCAACAACAACTCCGCCCGTTTGCTGGGAGTTTTTAGCCATTCTGAGATGATGGGGGTGACTTTGAAC
AGCACATCCAGCAGTCTGTGGCTTGATTTCATCACTGATGCTGAAAACACCAGCAAGGGCTTTGAACT
GCACTTTTCCAGTTTTGAACTCATCAAATGTGAGGACCCAGGAACCCCCAAGTTTGGCTACAAGGTTC
ATGATGAAGGTCATTTTGCAGGGAGCTCCGTGTCCTTCAGCTGTGACCCTGGATACAGCCTGCGGGGT
AGTGAGGAGCTGCTGTGTCTGAGTGGAGAGCGCCGGACCTGGGACCGGCCTCTGCCCACCTGTGTCGC
CGAGTGTGGAGGGACAGTGAGAGGAGAGGTGTCGGGGCAGGTGCTGTCACCCGGGTATCCAGCTCCCT
ATGAACACAATCTCAACTGCATCTGGACCATCGAAGCAGAGGCCGGCTGCACCATTGGGCTACACTTC
CTGGTGTTTGACACAGAGGAGGTTCACGACGTGCTGCGCATCTGGGATGGGCCTGTGGAGAGCGGGGT
TCTGCTGAAGGAGCTGAGTGGCCCGGCCCTGCCCAAGGACCTGCATAGCACCTTCAACTCGGTCGTCC
TGCAGTTCAGCACTGACTTCTTCACCAGCAAGCAGGGCTTTGCCATTCAATTTTCAGGTTCCACAGCA
ACGTCCTGCAATGACCCTGGGATCCCGCAGAATGGGAGTCGGAGTGGTGACAGTTGGGAAGCCGGCGA
CTCCACAGTGTTCCAGTGTGACCCTGGCTACGCGCTGCAGGGAAGTGCAGAGATCAGCTGTGTGAAGA
TCGAGAACAGGTTCTTCTGGCAGCCCAGCCCGCCAACATGCATCGCTCCCTGCGGGGGAGACCTGACA
GGACCATCTGGAGTCATCCTCTCACCAAATTACCCAGAACCCTACCCGCCAGGCAAGGAGTGTGACTG
GAAAGTGACCGTCTCACCAGACTACGTCATCGCCCTGGTATTGTTCCCCAGCTTTAACCTGGAGCCTG
GCTATGACTTCCTCCATATCTACGACGGACGGGACTCTCTCAGCCCTCTCATAGGAAGCTTCTATGGC
TCCCAGCTCCCAGGCCGCATTGAAAGCAGCAGCAACAGCCTCTTCCTCGCCTTCCGCAGCGATGCATC
TGTGAGCAATGCTGGCTTCGTCATTGACTTCCCAGAAAACCCGCGGGAGTCATGTTTTGATCCTGGTT
CCATCAAGAACGGCACACGGGTGGGGTCCGACCTGAAGCTGGGCTCCTCCGTCACCTACTACTGCCAC
GGGGGCTACGAAGTTGAGGGCACCTCGACCCTGAGCTGCATCCTGGGGCCTGATGGGAAGCCCGTGTG
GAACAATCCCCGGCCAGTCTGCACAGCCCCCTGTGGGGGACAGTATGTGGGTTCGGACGGAGTGGTCT
TGTCCCCCAACTACCCCCAGAACTACACCAGTGGACAGATCTGCTTGTATTTTGTTACTGTGCCCAAG
GACTATGGTGTGGTGTTTGGCCAGTTCGCCTTCTTTCACACGGCCCTCAACGACGTGGTGGAGGTTCA
CGACGGCCACAGCCAGCACTCGCGGCTCCTCAGCTCCCTCTCGGGCTCCCATACAGGTGAATCACTGC
CCTTGGCCACCTCCAATCAAGTTCTCATTAAGTTCAGCGCCAAAGGCCTCGCACCAGCCAGAGGCTTC
CACTTTGTCTACCAAGCGGTTCCTCGAACCAGCGCCACGCAGTGCAGCTCTGTGCCGGAACCCCGCTA
TGGCAAGAGGCTGGGCAGTGACTTCTCGGTGGGGGCCATCGTCCGCTTCGAATGCAACTCCGGCTATG
CCCTGCAGGGGTCGCCAGAGATCGAGTGCCTCCCTGTGCCTGGGGCCTTGGCCCAATGGAATGTCTCA
GCGCCCACGTGTGTGGTGCCGTGTGGAGGCAACCTCACAGAGCGCAGGGGCACCATCCTGTCCCCTGG
CTTCCCAGAGCCGTACCTCAACAGCCTCAACTGTGTGTGGAAGATCGTGGTCCCCGAAGGCGCTGGCA
TCCAGATCCAAGTTGTCAGTTTTGTGACAGAGCAGAACTGGGACTCGCTGGAAGTATTTGATGGTGCA
GATAACACTGTAACCATGCTGGGGAGTTTCTCAGGAACAACCGTGCCTGCCCTTCTGAACAGCACCTC
CAACCAGCTCTACCTTCATTTCTACTCAGATATCAGCGTATCTGCAGCTGGCTTCCACTTGGAGTACA
AAACGGTGGGCCTGAGCAGTTGTCCGGAACCTGCTGTGCCCAGTAACGGGGTGAAGACTGGCGAGCGC
TACTTGGTGAATGATGTGGTGTCTTTCCAGTGTGAGCCGGGATATGCCCTCCAGGGCCACGCCCACAT
CTCCTGCATGCCCGGAACAGTGCGGCGATGGAACTACCCTCCTCCACTCTGTATTGCACAGTGTGGGG
GAACAGTGGAGGAGATGGAGGGGGTGATCCTGAGCCCCGGCTTCCCAGGCAACTACCCCAGTAACATG
GACTGCTCCTGGAAAATAGCACTGCCCGTGGGCTTTGGAGCTCACATCCAGTTCCTGAACTTCTCCAC
CGAGCCCAACCACGACTACATAGAAATCCGGAATGGCCCCTATGAGACCAGCCGCATGATGGGAAGAT
TCAGTGGAAGCGAGCTTCCAAGCTCCCTCCTCTCCACGTCCCACGAGACCACCGTGTATTTCCACAGC
GACCACTCCCAGAATCGGCCAGGATTCAAGCTGGAGTATCAGGCCTATGAACTTCAAGAGTGCCCAGA
CCCAGAGCCCTTTGCCAATGGCATTGTGAGGGGAGCTGGCTACAACGTGGGACAATCAGTGACCTTCG
AGTGCCTCCCGGGGTATCAATTGACTGGCCACCCTGTCCTCACGTGTCAACATGGCACCAACCGGAAC
TGGGACCACCCCCTGCCCAAGTGTGAAGTCCCTTGTGGCGGGAACATCACTTCTTCCAACGGCACTGT
GTACTCCCCGGGGTTCCCTAGCCCGTACTCCAGCTCCCAGGACTGTGTCTGGCTGATCACCGTGCCCA
TTGGCCATGGCGTCCGCCTCAACCTCAGCCTGCTGCAGACAGAGCCCTCTGGAGATTTCATCACCATC
TGGGATGGGCCACAGCAAACAGCACCACGGCTCGGCGTCTTCACCCGGAGCATGGCCAAGAAAACAGT
GCAGAGTTCATCCAACCAGGTCCTGCTCAAGTTCCACCGTGATGCAGCCACAGGGGGGATCTTCGCCA
TAGCTTTCTCCGCTTATCCACTCACCAAATGCCCTCCTCCCACCATCCTCCCCAACGCCGAAGTCGTC
ACAGAGAATGAAGAATTCAATATAGGTGACATCGTACGCTACAGATGCCTCCCTGGCTTTACCTTAGT
GGGGAATGAAATTCTGACCTGCAAACTTGGAACCTACCTGCAGTTTGAAGGACCACCCCCGATATGTG
AAGTGCACTGTCCAACAAATGAGCTTCTGACAGACTCCACAGGCGTGATCCTGAGCCAGAGCTACCCT
GGAAGCTATCCCCAGTTCCAGACCTGCTCTTGGCTGGTGAGAGTGGAGCCCGACTATAACATCTCCCT
CACAGTGGAGTACTTCCTCAGCGAGAAGCAATATGATGAGTTTGAGATTTTTGATGGTCCATCAGGAC
AGAGTCCTCTGCTGAAAGCCCTCAGTGGGAATTACTCAGCTCCCCTGATTGTCACCAGCTCAAGCAAC
TCTGTGTACCTGCGTTGGTCATCTGATCACGCCTACAATCGGAAGGGCTTCAAGATCCGCTATTCAGC
CCCTTACTGCAGCCTGCCCAGGGCTCCACTCCATGGCTTCATCCTAGGCCAGACCAGCACCCAGCCCG
GGGGCTCCATCCACTTTGGCTGCAACGCCGGCTACCGCCTGGTGGGACACAGCATGGCCATCTGTACC
CGGCACCCCCAGGGCTACCACCTGTGGAGCGAAGCCATCCCTCTCTGTCAAGCTCTTTCCTGTGGGCT
TCCTGAGGCCCCCAAGAATGGAATGGTGTTTGGCAAGGAGTACACAGTGGGAACCAAGGCCATGTACA
GCTGCAGTGAAGGCTACCACCTCCAGGCAGGCGCTGAGGCCACTGCAGAGTGTCTGGACACAGGCCTA
TGGAGCAACCGCAATGTCCCACCACAGTGTGTCCCTGTGACTTGTCCTGATGTCAGTAGCATCAGCGT
GGAGCATGGCCGATGGAGGCTTATCTTTGAGACACAGTATCAGTTCCAGGCCCAGCTGATGCTCATCT
GTGACCCTGGCTACTACTATACTGGCCAAAGGGTCATCCGCTGTCAGGCCAATGGCAAATGGAGCCTC
GGGGACTCTACGCCCACCTGCCGAATCATCTCCTGTGGAGAGCTCCCGATTCCCCCCAATGGCCACCG
CATCGGAACACTGTCTGTCTACGGGGCAACAGCCATCTTCTCCTGCAATTCCGGATACACACTGGTGG
GCTCCAGGGTGCGTGAGTGCATGGCCAATGGGCTCTGGAGTGGCTCTGAAGTCCGCTGCCTTGCTGGA
CACTGTGGGACTCCTGAGCCCATTGTCAACGGACACATCAATGGGGAGAACTACAGCTACCGGGGCAG
TGTGGTGTACCAATGCAATGCTGGCTTCCGCCTGATCGGCATGTCTGTGCGCATCTGCCAGCAGGATC
ATCACTGGTCGGGCAAGACCCCTTTCTGTGTGCCAATTACCTGTGGACACCCAGGCAACCCTGTCAAC
GGCCTCACTCAGGGTAACCAGTTTAACCTCAACGATGTGGTCAAGTTTGTTTGCAACCCTGGGTATAT
GGCTGAGGGGGCTGCTAGGTCCCAATGCCTGGCCAGCGGGCAATGGAGTGACATGCTGCCCACCTGCA
GAATCATCAACTGTACAGATCCTGGACACCAAGAAAATAGTGTTCGTCAGGTCCACGCCAGCGGCCCG
CACAGGTTCAGCTTCGGCACCACTGTGTCTTACCGGTGCAACCACGGCTTCTACCTCCTGGGCACCCC
AGTGCTCAGCTGCCAGGGAGATGGCACATGGGACCGTCCCCGCCCCCAGTGTCTCCTGGTGTCCTGTG
GCCATCCGGGCTCCCCGCCTCACTCCCAGATGTCTGGAGACAGTTATACTGTGGGAGCAGTGGTGCGG
TACAGCTGCATCGGCAAGCGTACTCTGGTGGGAAACAGCACCCGCATGTGTGGGCTGGATGGACACTG
GACTGGCTCCCTCCCTCACTGCTCAGGAACCAGCGTGGGAGTTTGCGGTGACCCTGGGATCCCGGCTC
ATGGCATCCGTTTGGGGGACAGCTTTGATCCAGGCACTGTGATGCGCTTCAGCTGTGAAGCTGGCCAC
GTGCTCCGGGGATCGTCAGAGCGCACCTGTCAAGCCAATGGCTCGTGGAGCGGCTCGCAGCCTGAGTG
TGGAGTGATCTCTTGTGGGAACCCTGGGACTCCAAGTAATGCCCGAGTTGTGTTCAGTGATGGCCTGG
TTTTCTCCAGCTCTATCGTCTATGAGTGCCGGGAAGGATACTACGCCACAGGCCTGCTCAGCCGTCAC
TGCTCGGTCAATGGTACCTGGACAGGCAGTGACCCTGAGTGCCTCGTCATAAACTGTGGTGACCCTGG
GATTCCAGCCAATGGCCTTCGGCTGGGCAATGACTTCAGGTACAACAAAACTGTGACATATCAGTGTG
TCCCTGGCTATATGATGGAGTCACATAGAGTATCTGTGCTGAGCTGCACCAAGGACCGGACATGGAAT
GGAACCAAGCCCGTCTGCAAAGCTCTCATGTGCAAGCCACCTCCGCTCATCCCCAATGGGAAGGTGGT
GGGGTCTGACTTCATGTGGGGCTCAAGTGTGACTTATGCCTGCCTGGAGGGGTACCAGCTCTCCCTGC
CCGCGGTGTTCACCTGTGAGGGAAATGGGTCCTGGACCGGAGAGCTGCCTCAGTGTTTCCCTGTGTTC
TGCGGGGATCCTGGTGTCCCGTCCCGTGGGAGGAGAGAGGACCGAGGCTTCTCCTACAGGTCATCTGT
CTCCTTCTCCTGCCATCCCCCTCTGGTGCTGGTGGGCTCTCCACGCAGGTTTTGCCAGTCAGATGGGA
CATGGAGTGGCACCCAGCCCAGCTGCATAGATCCGACCCTGACCACGTGTGCGGACCCTGGTGTGCCA
CAGTTTGGGATACAGAACAATTCTCAGGGCTACCAGGTTGGAAGCACAGTCCTCTTCCGTTGTCAAAA
AGGCTACCTGCTTCAGGGCTCCACCACCAGGACCTGCCTCCCAAACCTGACCTGGAGTGGAACCCCAC
CTGACTGTGTCCCCCACCACTGCAGGCAGCCAGAGACGCCAACGCATGCCAACGTCGGGGCCCTGGAT
TTGCCCTCCATGGGCTACACGCTCATCTACTCCTGCCAGGAGGGCTTCTCCCTCAAGGGTGGCTCCGA
GCACCGCACCTGCAAGGCGGATGGCAGCTGGACAGGCAAGCCGCCCATCTGCCTGGAGGTCCGGCCCA
ATGGGAGACCCATCAACACTGCCCGGGAGCCACCGCTCACCCAAGCCTTGATTCCTGGGGATGTTTTT
GCCAAGAATTCCCTGTGGAAAGGGGCCTATGAATACCAGGGGAAGAAGCAGCCAGCCATGCTCAGAGT
GACTGGCTTCCAAGTTGCCAACAGCAAGGTCAATGCCACCATGATCGACCACAGTGGCGTGGAGCTGC
ACTTGGCTGGAACTTACAAGAAAGAAGATTTTCATCTCCTACTCCAGGTGTACCAGATTACAGGGCCT
GTGGAGATCTTTATGAATAAGTTCAAAGATGATCACTGGGCTTTAGATGGCCATGTCTCGTCAGAGTC
CTCCGGAGCCACCTTCATCTACCAAGGCTCTGTCAAGGGCCAAGGCTTTGGGCAGTTCGGCTTTCAAA
GACTGGACCTCAGGCTGCTGGAGTCAGACCCCGAGTCCATTGGCCGCCACTTTGCTTCCAACAGCAGC
TCAGTGGCAGCCGCGATCCTGGTGCCTTTCATCGCCCTCATTATTGCGGGCTTCGTGCTCTATCTCTA
CAAGCACAGGAGAAGACCCAAAGTTCCTTTCAATGGCTATGCTGGCCACGAGAACACCAATGTTCGGG
CCACATTTGAGAACCCAATGTACGACCGCAACATCCAGCCCACAGACATCATGGCCAGCGAGGCGGAG
TTCACAGTCAGCACAGTGTGCACAGCAGTATAGCCACCCGGCCTGGC

| | | | |
|---|---|---|---|
| NOV4a, CG50377-04 | SEQ ID NO: 32 | 3546 aa | MW at 385864.BkD |
| Protein Sequence | | | |

GQNCTFQLHGPNGTVESPGFPYGYPNYANCTWTITAEEQHRIQLVFQSFALEEDFDVLSVFDGPPQPE
NLRTRLTGFQLPATIVSAATTLSLRLISDYAVSAQGFHATYEVLPSHTCGNPGRLPNGIQQGSTFNLG
DKVRYSCNLGFFLEGHAVLTCHAGSENSATWDFPLPSCRADDACGGTLRGQSGIISSPHFPSEYHNNA
DCTWTILAELGDTIALVFIDFQLEDGYDFLEVTGTEGSSLWFTGASLPAPVISSKNWLRLHFTSDGNH
RQRGFSAQYQVKKQIELKSRGVKLMPSKDNSQKTSVVTQVGVSQGHNMCPDPGIPERGKRLGSDFRLG
SSVQFTCNEGYDLQGSKRITCMKVSDMFAAWSDHRPVCRAEMCDAHLRGPSGIITSPNFPIQYDNNAH
CVWIITALNPSKVIKLAFEEFDLERGYDTLTVGDGGQDGDQKTVLYMLTGTSVPDLIVSTNHQMWLLF
QTDGSGSSLGFKASYEEIEQGSCGDPGIPAYGRREGSRFRHGDTLKFECQPAFELVGQKAITCQKNNQ
WSAKKPGCVCSCFFNFTSPSGVVLSPNYPEDYGNHLHCVWLILARPESRIHLAFNDIDVEPQFDFLVI
KDGATAEAPVLGTFSGNQLPSSITSSGHVARLEFQTDHSTGKRGFNITFTSESSNECPDPGVPVNGKR
FGDSLQLGSSISFLCDEGFLGTQGSETITCVLKEGSVVWNSAVLRCEAPCGGHLTSPSGTILSPGWPG
FYKDALSCAWVIEAQPGYPIKITFDRFKTEVNYDTLEVRDGRTYSAPLIGVYHGTQVPQFLISTSNYL
YLLFSTDKSHSDIGFQLRYEAITLQSDHCLDPGIPVNGQRHGNDFYVGALVTFSCDSGYTLSDGEPLE
CEPNFQWSRALPSCEALCGGFIQGSSGTILSPGFPDFYPNNLNCTWIIETSHGKGVFFTFHTFHLESG
HDYLLITENGSFTQPLRQLTGSRLPAPISAGLYGNFTAQVRFISDFSMSYEGFNITFSEYDLEPCEEP
EVPAYSIRKGLQFGVGDTLTFSCFPGYRLEGTARITCLGGRRRLWSSPLPRCVAECGNSVTGTQGTLL
SPNFPVNYNNNHECIYSIQTQPGKGIQLKARAFELSEGDVLKVYDGNNNSARLLGVFSHSENMGVTLN
STSSSLWLDFITDAENTSKGFELHFSSFELIKCEDPGTPKFGYKVHDEGHFAGSSVSFSCDPGYSLRG
SEELLCLSGERRTWDRPLPTCVAECGGTVRGEVSGQVLSPGYPAPYEHNLNCIWTIEAEAGCTIGLHF
LVFDTEEVHDVLRIWDGPVESGVLLKELSGPALPKDLHSTFNSVVLQFSTDFFTSKQGFAIQFSGSTA
TSCNDPGIPQNGSRSGDSWEAGDSTVFQCDPGYALQGSAEISCVKIENRFFWQPSPPTCIAPCGGDLT
GPSGVILSPNYPEPYPPGKECDWKVTVSPDYVIALVLFPSFNLEPGYDFLHIYDGRDSLSPLIGSFYG
SQLPGRIESSSNSLFLAFRSDASVSNAGFVIDFPENPRESCFDPGSIKNGTRVGSDLKLGSSVTYYCH
GGYEVEGTSTLSCILGPDGKPVWNNPRPVCTAPCGGQYVGSDGVVLSPNYPQNYTSGQICLYFVTVPK
DYGVVFGQFAFFHTALNDVVEVHDGHSQHSRLLSSLSGSHTGESLPLATSNQVLIKFSAKGLAPARGF
HFVYQAVPRTSATQCSSVPEPRYGKRLGSDFSVGAIVRFECNSGYALQGSPEIECLPVPGALAQWNVS
APTCVVPCGGNLTERRGTILSPGFPEPYLNSLNCVWKIVVPEGAGIQIQVVSFVTEQNWDSLEVFDGA
DNTVTMLGSFSGTTVPALLNSTSNQLYLHFYSDISVSAAGFHLEYKTVGLSSCPEPAVPSNGVKTGER
YLVNDVVSFQCEPGYALQGHAHISCMPGTVRRWNYPPPLCIAQCGGTVEEMEGVILSPGFPGNYPSNM
DCSWKIALPVGFGAHIQFLNFSTEPNHDYIEIRNGPYETSRMMGRFSGSELPSSLLSTSHETTVYFHS
DHSQNRPGFKLEYQAYELQECPDPEPFANGIVRGAGYNVGQSVTFECLPGYQLTGHPVLTCQHGTNRN
WDHPLPKCEVPCGGNITSSNGTVYSPGFPSPYSSSQDCVWLITVPIGHGVRLNLSLLQTEPSGDFITI
WDGPQQTAPRLGVFTRSMAKKTVQSSSNQVLLKFHRDAATGGIFAIAFSAYPLTKCPPPTILPNAEVV
TENEEFNIGDIVRYRCLPGFTLVGNEILTCKLGTYLQFEGPPPICEVHCPTNELLTDSTGVILSQSYP
GSYPQFQTCSWLVRVEPDYNISLTVEYFLSEKQYDEFEIFDGPSGQSPLLKALSGNYSAPLIVTSSSN
SVYLRWSSDHAYNRKGFKIRYSAPYCSLPEAPLHGFILGQTSTQPGGSIHFGCNAGYRLVGHSMAICT
RHPQGYHLWSEAIPLCQALSCGLPEAPKNGMVFGKEYTVGTKAMYSCSEGYHLQAGAEATAECLDTGL
WSNRNVPPQCVPVTCPDVSSISVEHGRWRLIFETQYQFQAQLMLICDPGYYYTGQRVIRCQANGKWSL
GDSTPTCRIISCGELPIPPNGHRIGTLSVYGATAIFSCNSGYTLVGSRVRECMANGLWSGSEVRCLAG
HCGTPEPIVNGHINGENYSYRGSVVYQCNAGFRLIGMSVRICQQDHHWSGKTPFCVPITCGHPGNPVN
GLTQGNQFNLNDVVKFVCNPGYMAEGAARSQCLASGQWSDMLPTCRIINCTDPGHQENSVRQVHASGP
HRFSFGTTVSYRCNHGFYLLGTPVLSCQGDGTWDRPRPQCLLVSCGHPGSPPHSQMSGDSYTVGAVVR
YSCIGKRTLVGNSTRMCGLDGHWTGSLPHCSGTSVGVCGDPGIPAHGIRLGDSFDPGTVMRFSCEAGH
VLRGSSERTCQANGSWSGSQPECGVISCGNPGTPSNARVVFSDGLVFSSSIVYECREGYYATGLLSRH
CSVNGTWTGSDPECLVINCGDPGIPANGLRLGNDFRYNKTVTYQCVPGYMMESHRVSVLSCTKDRTWN
GTKPVCKALMCKPPPLIPNGKVVGSDFMWGSSVTYACLEGYQLSLPAVFTCEGNGSWTGELPQCFPVF
CGDPGVPSRGRREDRGFSYRSSVSFSCHPPLVLVGSPRRFCQSDGTWSGTQPSCIDPTLTTCADPGVP
QFGIQNNSQGYQVGSTVLFRCQKGYLLQGSTTRTCLPNLTWSGTPPDCVPHHCRQPETPTHANVGALD
LPSMGYTLIYSCQEGFSLKGGSEHRTCKADGSWTGKPPICLEVRPNGRPINTAREPPLTQALIPGDVF
AKNSLWKGAYEYQGKKQPAMLRVTGFQVANSKVNATMIDHSGVELHLAGTYKKEDFHLLLQVYQITGP
VEIFMNKFKDDHWALDGHVSSESSGATFIYQGSVKGQGFGQFGFQRLDLRLLESDPESIGRHFASNSS
SVAAAILVPFIALIIAGFVLYLYKHRRRPKVPFNGYAGHENTNVPATFENPMYDRNIQPTDIMASEAE
FTVSTVCTAV

| | | |
|---|---|---|
| NOV4b, CG50377-01 | SEQ ID NO: 33 | 10136 bp |
| DNA Sequence | ORF Start: ATG at 1 | ORF Stop: TGA at 9313 |

ATGGCGGGCGCCCCTCCCCCCGCCTTGCTGCTGCCTTGCAGTTTGATCTCAGACTGCTGTGCTAGCAA
TCAGCGACACTCCGTGGGCGTAGGACCCTCCGAGCTAGTCAAGAAGCAAATTGAGTTGAAGTCTCGAG
GTGTGAAGCTGATGCCCAGCAAAGACAACAGCCAGAAGACGTCTGTGTTAACTCAGGTTGGTGTGTCC
CAAGGACATAATATGTGTCCAGACCCTGGCATACCCGAAAGGGGCAAAAGACTAGGCTCGGATTTCAG
GTTAGGATCCAGCGTCCAGTTCACCTGCAACGAGGGCTATGACCTGCAAGGGTCCAAGCGGATCACCT
GTATGAAAGTGAGCGACATGTTTGCGGCCTGGAGCGACCACAGGCCAGTCTGCCGAGCCCGCATGTGT
GATGCCCACCTTCGAGGCCCCTCGGGCATCATCACCTCCCCCAATTTCCCCATTCAGTATGACAACAA
TGCACACTGTGTGTGGATCATCACAGCACTCAACCCCTCCAAGGTGATCAAGCTCGCCTTTGAGGAGT
TTGATTTGGAGAGGGGCTATGACACCCTGACGGTCGGTGATGGTGGTCAGGATGGGGACCAGAAGACA
GTTCTCTACATGTCTCAAAATGCCTGCAGTGACAGCCCTCACACCCCAGGCTCTCGCATCCCAGAGAG
CATGTCTGGGGACATCTGGAGGCAGAAATGGACTGTACTTGAGATCTGTCGTGACATTAGCAGTTCAG
ATGCAAGGTCAGGTTCAGTGAGGAAGTCTCCAAAGACTTCTAATGCTGTGGAACTTGTTGCTCCTGGG
ACAGAGATCGAGCAGGGCAGTTGCGGTGACCCTGGCATACCTGCATATGGCCGGAGGGAAGGCTCCCG
GTTTCACCACGGTGACACACTCAAGTTTGAGTGCCAGCCCGCCTTTGAGCTGGTGGGACAGAAGGCAA
TCACATGCCAAAAGAATAACCAATGGTCGGCTAAGAAGCCAGGCTGCGTGTTCTCCTGCTTCTTCAAC
TTCACCAGCCCGTCTGGGGTTGTCCTGTCTCCCAACTACCCAGAGGACTATGGCAACCACCTCCACTG
TGTCTGGCTCATCCTGGCCAGGCCTGAGAGCCGCATCCACCTGGCCTTCAACGACATTGACGTGGAGC
CTCAGTTTGATTTCCTGGTCATCAAGGATGGGGCCACCGCCGAGGCGCCCGTCCTGGGCACCTTCTCA
GGAAACCAGCTTCCCTCCTCCATCACAAGCAGTGGCCACGTGGCCCGTCTCGAGTTCCAGACTGACCA
CTCCACAGGGAAGAGGGGCTTCAACATCACTTTTACCACCTTCCGACACAACGAGTGCCCGGATCCTG
GCGTTCCAGTAAATGGCAAACGGTTTGGGGACAGCCTCCAGCTGGGCAGCTCCATCTCCTTCCTCTGT
GATGAAGGCTTCCTTGGGACTCAGGGCTCAGAGACCATCACCTGCGTCCTGAAGGAGGGCAGCGTGGT
CTGGAACAGCGCTGTGCTGCGGTGTGAAGCTCCCTGTGGTGGTCACCTGACTTCGCCCAGCGGCACCA
TCCTCTCTCCGGGCTGGCCTGGCTTCTACAAGGATGCCTTGAGCTGTGCCTGGGTGATTGAGGCCCAG
CCAGGCTACCCCATCAAAATCACCTTCGACAGATTCAAAACCGAGGTCAACTATGACACCCTGGAAGT
ACGCGATGGGCGGACTTACTCAGCGCCCTTGATCGGGGTTTACCACGGGACCCAGGTTCCCCAGTTCC
TCATCAGCACCAGCAACTACCTCTACCTCCTCTTCTCTACCGACAAGAGTCACTCGGACATCGGCTTC
CAGCTCCGCTATGAGACTATAACACTGCAGTCAGACCACTGTCTGGATCCAGGAATCCCAGTAAATGG
ACAGCGTCATGGGAATGACTTCTACGTGGGCGCGCTGGTGACCTTCAGCTGTGACTCGGGCTACACAT
TAAGTGACGGGGAGCCTCTGGAGTGTGAGCCCAACTTCCAGTGGAGCCGGGCCCTGCCCAGTTGTGAA
GCTCTCTGTGGTGGCTTCATTCAAGGCTCCAGTGGGACCATCTTGTCGCCAGGGTTCCCTGACTTCTA
CCCCAACAACTTGAACTGCACCTGGATTATCGAAACATCTCATGGCAAGGGTGTGTTCTTCACTTTCC
ACACCTTCCACCTGGAAAGTGGCCATGACTACCTCCTCATCACTGAGAACGGCAGCTTCACCCAGCCC
CTGAGGCAGCTAACTGGATCTCGGCTGCCAGCTCCCATCAGCGCTGGGCTCTATGGCAACTTCACTGC
CCAGGTCCGCTTCATCTCTGATTTCTCCATGTCATATGAAGGATTCAACATCACCTTCTCAGAGTACG
ACTTGGAGCCCTGTGAGGAGCCCGAGGTCCCAGCCTACAGCATCCGGAAGGGCTTGCAGTTTGGCGTG
GGCGACACCTTGACCTTCTCCTGCTTCCCCGGGTACCGTCTGGAGGGCACCGCCCGCATCACGTGCCT
GGGGGGCAGACGGCGCCTGTGGAGCTCGCCTCTGCCAAGGTGTGTTGCTGAGTGTGGGAATTCAGTCA
CAGGCACTCAGGGTACTTTGCTGTCCCCCAACTTTCCTGTGAACTACAATAACAATCATGAATGCATC
TACTCCATCCAGACCCAGCCAGGGAAGGGAATTCAGCTGAAAGCCAGGGCATTCGAACTCTCCGAAGG
AGATGTCCTCAAGGTTTATGATGGCAACAACAACTCCGCCCGTTTGCTGGGAGTTTTTAGCCATTCTG
AGATGATGGGGGTGACTTTGAACAGCACATCCAGCAGTCTGTGGCTTGATTTCATCACTGATGCTGAA
AACACCAGCAAGGGCTTTGAACTGCACTTTTCCAGCTTTGAACTCATCAAATGTGAGGACCCAGGAAC
CCCCAAGTTTGGCTACAAGGTTCATGATGAAGGTCATTTTGCAGGGAGCTCCGTGTCCTTCAGCTGTG
ACCCTGGATACAGCCTGCGGGGTAGTGAGGAGCTGCTGTGTCTGAGTGGAGAGCGCCGGACCTGGGAC
CGGCCTCTGCCCACCTGTGTCGCCGAGTGTGGAGGGACAGTGAGAGGAGAGGTGTCGGGGCAGGTGCT
GTCACCCGGGTATCCAGCTCCCTATGAACACAATCTCAACTGCATCTGGACCATCGAAGCAGAGGCCG
GCTGCACCATTGGGCTACACTTCCTGGTGTTTGACACAGAGGAGGTTCACGACGTGCTGCGCATCTGG
GATGGGCCTGTGGAGAGCGGGGTTCTGCTGAAGGAGCTGAGTGGCCCGGCCCTGCCCAAGGACCTGCA
TAGCACCTTCAACTCGGTCGTCCTGCAGTTCAGCACTGACTTCTTCACCAGCAAGCAGGGCTTTGCCA
TTCAATTTTCAGTGTCCACAGCAACGTCCTGCAATGACCCTGGGATCCCGCAGAATGGGAGTCGGAGT
GGTGACAGTTGGGAAGCCGGCGACTCCACAGTGTTCCAGTGTGACCCTGGCTACGCGCTGCAGGGAAG
TGCAGAGATCAGCTGTGTGAAGATCGAGAACAGGTTCTTCTGGCAGCCCAGCCCGCCAACATGCATCG
CTCCCTGCGGGGGAGACCTGACAGGACCATCTGGAGTCATCCTCTCACCAAATTACCCAGAACCCTAC
CCGCCAGGCAAGGAGTGTGACTGGAAAGTGACCGTCTCACCAGACTACGTCATCGCCCTGGTATTTAA
CATCTTTAACCTGGAGCCTGGCTATGACTTCCTCCATATCTACGACGGACGGGACTCTCTCAGCCCTC
TCATAGGAAGCTTCTATGGCTCCCAGCTCCCAGGCCGCATTGAAAGCAGCAGCAACAGCCTCTTCCTC
GCCTTCCGCAGCGATGCATCTGTGAGCAATGCTGGCTTCGTCATTGACTATACAGAAAACCCGCGGGA
GTCATGTTTTGATCCTGGTTCCATCAAGAACGGCACACGGGTGGGGTCCGACCTGAAGCTGGGCTCCT
CCGTCACCTACTACTGCCACGGGGGCTACGAAGTTGAGGGCACCTCGACCCTGAGCTGCATCCTGGGG
CCTGATGGGAAGCCCGTGTGGAACAATCCCCGGCCAGTCTGCACAGCCCCCTGTGGGGGACAGTATGT
GGGTTCGGACGGAGTGGTCTTGTCCCCCAACTACCCCCAGAACTACACCAGTGGACAGATCTGCTTGT
ATTTTGTTACTGTGCCCAAGGACTATGTGGTGTTTGGCCAGTTCGCCTTCTTTCACACGGCCCTCAAC
GACGTGGTGGAGGTTCACGACGGCCACAGCCAGCACTCGCGGCTCCTCAGCTCCCTCTCGGGCTCCCA
TACAGGAGAATCACTGCCCTTGGCCACCTCCAATCAAGTTCTCATTAAGTTCAGCGCCAAAGGCCTCG
CACCAGCCAGAGGCTTCCACTTTGTCTACCAAGCGGTTCCTCGAACCAGCGCCACGCAGTGCAGCTCT
GTGCCGGAACCCCGCTATGGCAAGAGGCTGGGCAGTGACTTCTCGGTGGGGGCCATCGTCCGCTTCGA
ATGCAACTCCGGCTATGCCCTGCAGGGGTCGCCAGAGATCGAGTGCCTCCCTGTGCCTGGGGCCTTGG
CCCAATGGAATGTCTCAGCGCCCACGTGTGTGGTGCCGTGTGGAGGCAACCTCACAGAGCGCAGGGGC
ACCATCCTGTCCCCTGGCTTCCCAGAGCCGTACCTCAACAGCCTCAACTGTGTGTGGAAGATCGTGGT
CCCCGAAGGCGCTGGCATCCAGATCCAAGTTGTCAGTTTTGTGACAGAGCAGAACTGGGACTCGCTGG
AAGTATTTGATGGTGCAGATAACACTGTAACCATGCTGGGGAGTTTCTCAGGAACAACCGTGCCTGCC
CTTCTGAACAGCACCTCCAACCAGCTCTACCTTCATTTCTACTCAGATATCAGCGTATCTGCAGCTGG
CTTCCACTTGGAGTACAAAACGGTGGGCCTGAGCAGTTGTCCGGAACCTGCTGTGCCCAGTAACGGGG
TGAAGACTGGCGAGCGCTACTTGGTGAATGATGTGGTGTCTTTCCAGTGTGAGCCGGGATATGCCCTC
CAGGGCCACGCCCACATCTCCTGCATGCCCGGAACAGTGCGGCGATGGAACTACCCTCCTCCACTCTG
TATTGCACAGTGTGGGGGAACAGTGGAGGAGATGGAGGGGGTGATCCTGAGCCCCGGCTTCCCAGGCA
ACTACCCCAGTAACATGGACTGCTCCTGGAAAATAGCACTGCCCGTGGGCTTTGGAGCTCACATCCAG
TTCCTGAACTTCTCCACCGAGCCCAACCACGACTACATAGAAATCCGGAATGGCCCCTATGAGACCAG
CCGCATGATGGGAAGATTCAGTGGAAGCGAGCTTCCAAGCTCCCTCCTCTCCACGTCCCACGAGACCA
CCGTGTATTTCCACAGCGACCACTCCCAGAATCGGCCAGGATTCAAGCTGGAGTATCAGGCCTATGAA
CTTCAAGAGTGCCCAGACCCAGAGCCCTTTGCCAATGGCATTGTGAGGGGAGCTGGCTACAACGTGGG
ACAATCAGTGACCTTCGAGTGCCTCCCGGGGTATCAATTGACTGGCCACCCTGTCCTCACGTGTCAAC
ATGGCACCAACCGGAACTGGGACCACCCCCTGCCCAAGTGTGAAGTCCCTTGTGGCGGGAACATCACT
TCTTCCAACGGCACTGTGTACTCCCCGGGGTTCCCTAGCCCGTACTCCAGCTCCCAGGACTGTGTCTG
GCTGATCACCGTGCCCATTGGCCATGGCGTCCGCCTCAACCTCAGCCTGCTGCAGACAGAGCCCTCTG
GAGATTTCATCACCATCTGGGATGGGCCACAGCAAACAGCACCACGGCTCGGCGTCTTCACCCGGAGC
ATGGCCAAGAAAACAGTGCAGAGTTCATCCAACCAGGTCCTGCTCAAGTTCCACCGTGATGCAGCCAC
AGGGGGGATCTTCGCCATAGCTTTCTCCGCTTATCCACTCACCAAATGCCCTCCTCCCACCATCCTCC
CCAACGCCGAAGTCGTCACAGAGAATGAAGAATTCAATATAGGTGACATCGTACGCTACAGATGCCTC
CCTGGCTTTACCTTAGTGGGGAATGAAATTCTGACCTGCAAACTTGGAACCTACCTGCAGTTTGAAGG
ACCACCCCCGATATGTGAAGTGCACTGTCCAACAAATGAGCTTCTGACAGACTCCACAGGCGTGATCC
TGAGCCAGAGCTACCCTGGAAGCTATCCCCAGTTCCAGACCTGCTCTTGGCTGGTGAGAGTGGAGCCC
GACTATAACATCTCCCTCACAGTGGAGTACTTCCTCAGCGAGAAGCAATATGATGAGTTTGAGATTTT
TGATGGTCCATCAGGACAGAGTCCTCTGCTGAAAGCCCTCAGTGGGAATTACTCAGCTCCCCTGATTG
TCACCAGCTCAAGCAACTCTGTGTACCTGCGTTGGTCATCTGATCACGCCTACAATCGGAAGGGCTTC
AAGATCCGCTATTCAGCCCCTTACTGCAGCCTGCCCAGGGCTCCACTCCATGGCTTCATCCTAGGCCA
GACCAGCACCCAGCCCGGGGGCTCCATCCACTTTGGCTGCAACGCCGGCTACCGCCTGGTGGGACACA
GCATGGCCATCTGTACCCGGCACCCCCAGGGCTACCACCTGTGGAGCGAAGCCATCCCTCTCTGTCAA
GCTCTTTCCTGTGGGCTTCCTGAGGCCCCCAAGAATGGAATGGTGTTTGGCAAGGAGTACACAGTGGG
AACCAAGGCCGTGTACAGCTGCAGTGAAGGCTACCACCTCCAGGCAGGCGCTGAGGCCACTGCAGAGT
GTCTGGACACAGGCCTATGGAGCAACCGCAATGTCCCACCACAGTGTGTCCCTGTGACTTGTCCTGAT
GTCAGTAGCATCAGCGTGGAGCATGGCCGATGGAGGCTTATCTTTGAGACACAGTATCAGTTCCAGGC
CCAGCTGATGCTCATCTGTGACCCTGGCTACTACTATACTGGCCAAAGGGTCATCCGCTGTCAGGCCA
ATGGCAAATGGAGCCTCGGGGACTCTACGCCCACCTGCCGAATCATCTCCTGTGGAGAGCTCCCGATT
CCCCCCAATGGCCACCGCATCGGAACACTGTCTGTCTACGGGGCAACAGCCATCTTCTCCTGCAATTC
CGGATACACACTGGTGGGCTCCAGGGTGCGTGAGTGCATGGCCAATGGGCTCTGGAGTGGCTCTGAAG
TCCGCTGCCTTGCTGGACACTGTGGGACTCCTGAGCCCATTGTCAACGGACACATCAATGGGGAGAAC
TACAGCTACCGGGGCAGTGTGGTGTACCAATGCAATGCTGGCTTCCGCCTGATCGGCATGTCTGTGCG
CATCTGCCAGCAGGATCATCACTGGTCGGGCAAGACCCCTTTCTGTGTGCCAATTACCTGTGGACACC
CAGGCAACCCTGTCAACGGCCTCACTCAGGGTAACCAGTTTAACCTCAACGATGTGGTCAAGTTTGTT
TGCAACCCTGGGTATATGGCTGAGGGGGCTGCTAGGTCCCAATGCCTGGCCAGCGGGCAATGGAGTGA
CATGCTGCCCACCTGCAGAATCATCAACTGTACAGATCCTGGACACCAAGAAAATAGTGTTCGTCAGG
TCCACGCCAGCGGCCCGCACAGGTTCAGCTTCGGCACCACTGTGTCTTACCGGTGCAACCACGGCTTC
TACCTCCTGGGCACCCCAGTGCTCAGCTGCCAGGGAGATGGCACATGGGACCGTCCCCGCCCCCAGTG
TCTCTTGGTGTCCTGTGGCCATCCGGGCTCCCCGCCTCACTCCCAGATGTCTGGAGACAGTTATACTG
TGGGAGCAGTGGTGCGGTACAGCTGCATCGGCAAGCGTACTCTGGTGGGAAACAGCACCCGCATGTGT
GGGCTGGATGGACACTGGACTGGCTCCCTCCCTCACTGCTCAGGAACCAGCGTGGGAGTTTGCGGTGA
CCCTGGGATCCCGGCTCATGGCATCCGTTTGGGGGACAGCTTTGATCCAGGCACTGTGATGCGCTTCA
GCTGTGAAGCTGGCCACGTGCTCCGGGGATCGTCAGAGCGCACCTGTCAAGCCAATGGCTCGTGGAGC
GGCTCGCAGCCTGAGTGTGGAGTGATCTCTTGTGGGAACCCTGGGACTCCAAGTAATGCCCGAGTTGT
GTTCAGTGATGGCCTGGTTTTCTCCAGCTCTATCGTCTATGAGTGCCGGGAAGGATACTACGCCACAG
GCCTGCTCAGCCGTCACTGCTCGGTCAATGGTACCTGGACAGGCAGTGACCCTGAGTGCCTCGTCATA
AACTGTGGTGACCCTGGGATTCCAGCCAATGGCCTTCGGCTGGGCAATGACTTCAGGTACAACAAAAC
TGTGACATATCAGTGTGTCCCTGGCTATATGATGGAGTCACATAGAGTATCTGTGCTGAGCTGCACCA
AGGACCGGACATGGAATGGAACCAAGCCCGTCTGCAAAGCTCTCATGTGCAAGCCACCTCCGCTCATC
CCCAATGGGAAGGTGGTGGGGTCTGACTTCATGTGGGGCTCAAGTGTGACTTATGCCTGCCTGGAGGG
GTACCAGCTCTCCCTGCCCGCGGTGTTCACCTGTGAGGGAAATGGGTCCTGGACCGGAGAGCTGCCTC
AGTGTTTCCCTGTGTTCTGCGGGGATCCTGGTGTCCCGTCCCGTGGGAGGAGAGAGGACCGAGGCTTC
TCCTACAGGTCATCTGTCTCCTTCTCCTGCCATCCCCCTCTGGTGCTGGTGGGCTCTCCACGCAGGTT
TTGCCAGTCAGATGGGACATGGAGTGGCACCCAGCCCAGCTGCATAGATCCGACCCTGACCACGTGTG
CGGACCCTGGTGTGCCACAGTTTGGGATACAGAACAATTCTCAGGGCTACCAGGTTGGAAGCACAGTC
CTCTTCCGTTGTCAAAAAGGCTACCTGCTTCAGGGCTCCACCACCAGGACCTGCCTCCCAAACCTGAC
CTGGAGTGGAACCCCACCTGACTGTGTCCCCCACCACTGCAGGCAGCCAGAGACGCCAACGCATGCCA
ACGTCGGGGCCCTGGATTTGCCCTCCATGGGCTACACGCTCATTACTCCTGCCAGGAGGGCTTCTCCC
TCAAGGGTGGCTCCGAGCACCGCACCTGCAAGGCGGATGGCAGCTGGACAGGCAAGCCGCCCATCTGC
CTGGAGGTCCGGCCCAGTGGGAGACCCATCAACACTGCCCGGGAGCCACCGCTCACCCAAGCCTTGAT
TCCTGGGGATGTTTTTGCCAAGAATTCCCTGTGGAAAGGGGCCTATGAATACCAGGGGAAGAAGCAGC
CAGCCATGCTCAGAGTGACTGGCTTCCAAGTTGCCAACAGCAAGGTCAATGCCACCATGATCGACCAC
AGTGGCGTGGAGCTGCACTTGGCTGGAACTTACAAGAAAGAAGATTTTCATCTCCTACTCCAGGTGTA
CCAGATTACAGGGCCTGTGGAGATCTTTATGAATAAGTTCAAAGATGATCACTGGGCTTTAGATGGCC
ATGTCTCGTCAGAGTCCTCCGGAGCCACCTTCATCTACCAAGGCTCTGTCAAGGGCCAAGGCTTTGGG
CAGTTCGGCTTTCAAAGACTGGACCTCAGGCTGCTGGAGTCAGACCCCGAGTCCATTGGCCGCCACTT
TGCTTCCAACAGCAGCTCAGTGGCAGCCGCGATCCTGGTGCCTTTCATCGCCCTCATTATTGCGGGCT
TCGTGCTCTATCTCTACAAGCACAGGAGAAGACCCAAAGTTCCTTTCAATGGCTATGCTGGCCACGAG
AACACCAATGTTCGGGCCACATTTGAGAACCCAATGTACGACCGCAACATCCAGCCCACAGACATCAT
GGCCAGCGAGGCGGAGTTCACAGTCAGCACAGTGTGCACAGCAGTATAGCCACCCGGCCTGGCCGCTT
TTTTTGCTAGGTTGAACTGGTACTCCAGCAGCCGCCGAAGCTGGACTGTACTGCTGCCATCTCAGCTC
ACTGCAACCTCCCTGCCTGATTCCCCTGCCTCAGCCTGCCGAGTGCCTGCGATTGCAGGCGCGCACCG
CCAC

| | | | |
|---|---|---|---|
| Nov4b, CG50377-01 | SEQ ID NO: 34 | 3104 aa | MW at 336746.3kD |
| Protein Sequence | | | |

MAGAPPPALLLPCSLISDCCASNQRHSVGVGPSELVKKQIELKSRGVKLMPSKDNSQKTSVLTQVGVS
QGHNMCPDPGIPERGKRLGSDFRLGSSVQFTCNEGYDLQGSKRITCMKVSDMFAAWSDHRPVCRARMC
DAHLRGPSGIITSPNFPIQYDNNAHCVWIITALNPSKVIKLAFEEFDLERGYDTLTVGDGGQDGDQKT
VLYMSQNACSDSPHTPGSRIPESMSGDIWRQKWTVLEICRDISSSDARSGSVRKSPKTSNAVELVAPG
TEIEQGSCGDPGIPAYGRREGSRFHHGDTLKFECQPAFELVGQKAITCQKNNQWSAKKPGCVFSCFFN
FTSPSGVVLSPNYPEDYGNHLHCVWLILARPESRIHLAFNDIDVEPQFDFLVIKDGATAEAPVLGTFS
GNQLPSSITSSGHVARLEFQTDHSTGKRGFNITFTTFRHNECPDPGVPVNGKRFGDSLQLGSSISFLC
DEGFLGTQGSETITCVLKEGSVVWNSAVLRCEAPCGGHLTSPSGTILSPGWPGFYKDALSCAWVIEAQ
PGYPIKITFDRFKTEVNYDTLEVRDGRTYSAPLIGVYHGTQVPQFLISTSNYLYLLFSTDKSHSDIGF
QLRYETITLQSDHCLDPGIPVNGQRHGNDFYVGALVTFSCDSGYTLSDGEPLECEPNFQWSRALPSCE
ALCGGFIQGSSGTILSPGFPDFYPNNLNCTWIIETSHGKGVFFTFHTFHLESGHDYLLITENGSFTQP
LRQLTGSRLPAPISAGLYGNFTAQVRFISDFSMSYEGFNITFSEYDLEPCEEPEVPAYSIRKGLQFGV
GDTLTFSCFPGYRLEGTARITCLGGRRRLWSSPLPRCVAECGNSVTGTQGTLLSPNFPVNYNNNHECI
YSIQTQPGKGIQLKAPAFELSEGDVLKVYDGNNNSARLLGVFSHSEMMGVTLNSTSSSLWLDFITDAE
NTSKGFELHFSSFELIKCEDPGTPKFGYKVHDEGHFAGSSVSFSCDPGYSLRGSEELLCLSGERRTWD
RPLPTCVAECGGTVRGEVSGQVLSPGYPAPYEHNLNCIWTIEAEAGCTIGLHFLVFDTEEVHDVLRIW
DGPVESGVLLKELSGPALPKDLHSTFNSVVLQFSTDFFTSKQGFAIQFSVSTATSCNDPGIPQNCSRS
GDSWEAGDSTVFQCDPGYALQGSAEISCVKIENRFFWQPSPPTCIAPCGGDLTGPSGVILSPNYPEPY
PPGKECDWKVTVSPDYVIALVFNIFNLEPGYDFLHIYDGRDSLSPLIGSFYGSQLPGRIESSSNSLFL
AFRSDASVSNAGFVIDYTENPRESCFDPGSIKNGTRVGSDLKLGSSVTYYCHGGYEVEGTSTLSCILG
PDGKPVWNNPRPVCTAPCGGQYVGSDGVVLSPNYPQNYTSGQICLYFVTVPKDYVVFGQFAFFHTALN
DVVEVHDGHSQHSRLLSSLSGSHTGESLPLATSNQVLIKFSAKGLAPARGFHFVYQAVPRTSATQCSS
VPEPRYGKRLGSDFSVGAIVRFECNSGYALQGSPEIECLPVPGALAQWNVSAPTCVVPCGGNLTERRG
TILSPGFPEPYLNSLNCVWKIVVPEGAGIQIQVVSFVTEQNWDSLEVFDGADNTVTMLGSFSGTTVPA
LLNSTSNQLYLHFYSDISVSAAGFHLEYKTVGLSSCPEPAVPSNGVKTGERYLVNDVVSFQCEPGYAL
QGHAHISCMPGTVRRWNYPPPLCIAQCGGTVEENEGVILSPGFPGNYPSNNDCSWKIALPVGFGAHIQ
FLNFSTEPNHDYIEIRNGPYETSRMMGRFSGSELPSSLLSTSHETTVYFHSDHSQNRPGFKLEYQAYE
LQECPDPEPFANGIVRGAGYNVGQSVTFECLPGYQLTGHPVLTCQHGTNRNWDHPLPKCEVPCGGNIT
SSNGTVYSPGFPSPYSSSQDCVWLITVPIGHGVRLNLSLLQTEPSGDFITIWDGPQQTAPRLGVFTRS
MAKKTVQSSSNQVLLKFHRDAATGGIFAIAFSAYPLTKCPPPTILPNAEVVTENEEFNIGDIVRYRCL
PGFTLVGNEILTCKLGTYLQFEGPPPICEVHCPTNELLTDSTGVILSQSYPGSYPQFQTCSWLVRVEP
DYNISLTVEYFLSEKQYDEFEIFDGPSGQSPLLKALSGNYSAPLIVTSSSNSVYLRWSSDHAYNRKGF
KIRYSAPYCSLPRAPLHGFILGQTSTQPGGSIHFGCNAGYRLVGHSMAICTRHPQGYHLWSEAIPLCQ
ALSCGLPEAPKNGMVFGKEYTVGTKAVYSCSEGYHLQAGAEATAECLDTGLWSNRNVPPQCVPVTCPD
VSSISVEHGRWPLIFETQYQFQAQLMLICDPGYYYTGQRVIRCQANGKWSLGDSTPTCRIISCGELPI
PPNGHRIGTLSVYGATAIFSCNSGYTLVGSRVRECMANGLWSGSEVRCLAGHCGTPEPIVNGHINGEN
YSYRGSVVYQCNAGFRLIGMSVRICQQDHHWSGKTPFCVPITCGHPGNPVNGLTQGNQFNLNDVVKFV
CNPGYMAEGAARSQCLASGQWSDMLPTCRIINCTDPGHQENSVRQVHASGPHRFSFGTTVSYRCNHGF
YLLGTPVLSCQGDGTWDRPRPQCLLVSCGHPGSPPHSQMSGDSYTVGAVVRYSCIGKRTLVGNSTRMC
GLDGHWTGSLPHCSGTSVGVCGDPGIPAHGIRLGDSFDPGTVMRFSCEAGBVLRGSSERTCQANGSWS
GSQPECGVISCGNPGTPSNARVVFSDGLVFSSSIVYECREGYYATGLLSRHCSVNGTWTGSDPECLVI
NCGDPGIPANGLRLGNDFRYNKTVTYQCVPGYMMESHRVSVLSCTKDRTWNGTKPVCKALMCKPPPLI
PNGKVVGSDFMWGSSVTYACLEGYQLSLPAVFTCEGNGSWTGELPQCFPVFCGDPGVPSRGRREDRGF
SYRSSVSFSCHPPLVLVGSPRRFCQSDGTWSGTQPSCIDPTLTTCADPGVPQFGIQNNSQGYQVGSTV
LFRCQKGYLLQGSTTRTCLPNLTWSGTPPDCVPHHCRQPETPTHANVGALDLPSMGYTLITPARRASP
SRVAPSTAPARRMAAGQASRPSAWRSGPVGDPSTLPGSHRSPKP

| | | |
|---|---|---|
| NOV4c, CG50377-02 | SEQ ID NO: 35 | 8010 bp |
| DNA Sequence | ORF Start: ATG at 1 | ORF Stop: TAG at 8008 |

ATGGCGGGCGCCCCTCCCCCCGCCTTGCTGCTGCCTTGCAGTTTGATCTCAGACTGCTGTGCTAGCAA
TCAGCGACACTCCGTGGGCGTAGGACCCTCCGAGCTAGTCAAGAAGCAAATTGAGTTGAAGTCTCGAG
GTGTGAAGCTGATGCCCAGCAAAGACAACAGCCAGAAGACGTCTGTGTTAACTCAGGTTGGTGTGTCC
CAAGGACATAATATGTGTCCAGACCCTGGCATACCCGAAAGGGGCAAAAGACTAGGCTCGGATTTCAG
GTTAGGATCCAGCGTCCAGTTCACCTGCAACGAGGGCTATGACCTGCAAGGGTCCAAGCGGATCACCT
GTATGAAAGTGAGCGACATGTTTGCGGCCTGGAGCGACCACAGGCCAGTCTGCCGAGCCCGCATGTGT
GATGCCCACCTTCGAGGCCCCTCGGGCATCATCACCTCCCCCAATTTCCCCATTCAGTATGACAACAA
TGCACACTGTGTGTGGATCATCACAGCACTCAACCCCTCCAAGGTGATCAAGCTCGCCTTTGAGGAGT
TTGATTTGGAGAGGGGCTATGACACCCTGACGGTCGGTGATGGTGGTCAGGATGGGGACCAGAAGACA
GTTCTCTACATGTCTCAAAATGCCTGCAGTGACAGCCCTCACACCCCAGGCTCTCGCATCCCAGAGAG
CATGTCTGGGGACATCTGGAGGCAGAAATGGACTGTACTTGAGATCTGTCGTGACATTAGCAGTTCAG
ATGCAAGGTCAGGTTCAGTGAGGAAGTCTCCAAAGACTTCTAATGCTGTGGAACTTGTTGCTCCTGGG
ACAGAGATCGAGCAGGGCAGTTGCGGTGACCCTGGCATACCTGCATATGGCCGGAGGGAAGGCTCCCG
GTTTCACCACGGTGACACACTCAAGTTTGAGTGCCAGCCCGCCTTTGAGCTGGTGGGACAGAAGGCAA
TCACATGCCAAAAGAATAACCAATGGTCGGCTAAGAAGCCAGGCTGCGTGTTCTCCTGCTTCTTCAAC
TTCACCAGCCCGTCTGGGGTTGTCCTGTCTCCCAACTACCCAGAGGACTATGGCAACCACCTCCACTG
TGTCTGGCTCATCCTGGCCAGGCCTGAGAGCCGCATCCACCTGGCCTTCAACGACATTGACGTGGAGC
CTCAGTTTGATTTCCTGGTCATCAAGGATGGGGCCACCGCCGAGGCGCCCGTCCTGGGCACCTTCTCA
GGAAACCAGCTTCCCTCCTCCATCACAAGCAGTGGCCACGTGGCCCGTCTCGAGTTCCAGACTGACCA
CTCCACAGGGAAGAGGGGCTTCAACATCACTTTTACCACCTTCCGACACAACGAGTGCCCGGATCCTG
GCGTTCCAGTAAATGGCAAACGGTTTGGGGACAGCCTCCAGCTGGGCAGCTCCATCTCCTTCCTCTGT
GATGAAGGCTTCCTTGGGACTCAGGGCTCAGAGACCATCACCTGCGTCCTGAAGGAGGGCAGCGTGGT
CTGGAACAGCGCTGTGCTGCGGTGTGAAGCTCCCTGTGGTGGTCACCTGACTTCGCCCAGCGGCACCA
TCCTCTCTCCGGGCTGGCCTGGCTTCTACAAGGATGCCTTGAGCTGTGCCTGGGTGATTGAGGCCCAG
CCAGGCTACCCCATCAAAATCACCTTCGACAGATTCAAAACCGAGGTCAACTATGACACCCTGGAAGT
ACGCGATGGGCGGACTTACTCAGCGCCCTTGATCGGGGTTTACCACGGGACCCAGGTTCCCCAGTTCC
TCATCAGCACCAGCAACTACCTCTACCTCCTCTTCTCTACCGACAAGAGTCACTCGGACATCGGCTTC
CAGCTCCGCTATGAGACTATAACACTGCAGTCAGACCACTGTCTGGATCCAGGAATCCCAGTAAATGG
ACAGCGTCATGGGAATGACTTCTACGTGGGCGCGCTGGTGACCTTCAGCTGTGACTCGGGCTACACAT
TAAGTGACGGGGAGCCTCTGGAGTGTGAGCCCAACTTCCAGTGGAGCCGGGCCCTGCCCAGTTGTGAA
GCTCTCTGTGGTGGCTTCATTCAAGGCTCCAGTGGGACCATCTTGTCGCCAGGGTTCCCTGACTTCTA
CCCCAACAACTTGAACTGCACCTGGATTATCGAAACATCTCATGGCAAGGGTGTGTTCTTCACTTTCC
ACACCTTCCACCTGGAAAGTGGCCATGACTACCTCCTCATCACTGAGAACGGCAGCTTCACCCAGCCC
CTGAGGCAGCTAACTGGATCTCGGCTGCCAGCTCCCATCAGCGCTGGGCTCTATGGCAACTTCACTGC
CCAGGTCCGCTTCATCTCTGATTTCTCCATGTCATATGAAGGATTCAACATCACCTTCTCAGAGTACG
ACTTGGAGCCCTGTGAGGAGCCCGAGGTCCCAGCCTACAGCATCCGGAAGGGCTTGCAGTTTGGCGTG
GGCGACACCTTGACCTTCTCCTGCTTCCCCGGGTACCGTCTGGAGGGCACCGCCCGCATCACGTGCCT
GGGGGGCAGACGGCGCCTGTGGAGCTCGCCTCTGCCAAGGTGTGTTGCTGAGTGTGGGAATTCAGTCA
CAGGCACTCAGGGTACTTTGCTGTCCCCCAACTTTCCTGTGAACTACAATAACAATCATGAATGCATC
TACTCCATCCAGACCCAGCCAGGGAAGGGAATTCAGCTGAAAGCCAGGGCATTCGAACTCTCCGAAGG
AGATGTCCTCAAGGTTTATGATGGCAACAACAACTCCGCCCGTTTGCTGGGAGTTTTTAGCCATTCTG
AGATGATGGGGGTGACTTTGAACAGCACATCCAGCAGTCTGTGGCTTGATTTCATCACTGATGCTGAA
AACACCAGCAAGGGCTTTGAACTGCACTTTTCCAGCTTTGAACTCATCAAATGTGAGGACCCAGGAAC
CCCCAAGTTTGGCTACAAGGTTCATGATGAAGGTCATTTTGCAGGGAGCTCCGTGTCCTTCAGCTGTG
ACCCTGGATACAGCCTGCGGGGTAGTGAGGAGCTGCTGTGTCTGAGTGGAGAGCGCCGGACCTGGGAC
CGGCCTCTGCCCACCTGTGTCGCCGAGTGTGGAGGGACAGTGAGAGGAGAGGTGTCGGGGCAGGTGCT
GTCACCCGGGTATCCAGCTCCCTATGAACACAATCTCAACTGCATCTGGACCATCGAAGCAGAGGCCG
GCTGCACCATTGGGCTACACTTCCTGGTGTTTGACACAGAGGAGGTTCACGACGTGCTGCGCATCTGG
GATGGGCCTGTGGAGAGCGGGGTTCTGCTGAAGGAGCTGAGTGGCCCGGCCCTGCCCAAGGACCTGCA
TAGCACCTTCAACTCGGTCGTCCTGCAGTTCAGCACTGACTTCTTCACCAGCAAGCAGGGCTTTGCCA
TTCAATTTTCAGTGTCCACAGCAACGTCCTGCAATGACCCTGGGATCCCGCAGAATGGGAGTCGGAGT
GGTGACAGTTGGGAAGCCGGCGACTCCACAGTGTTCCAGTGTGACCCTGGCTACGCGCTGCAGGGAAG
TGCAGAGATCAGCTGTGTGAAGATCGAGAACAGGTTCTTCTGGCAGCCCAGCCCGCCAACATGCATCG
CTCCCTGCGGGGGAGACCTGACAGGACCATCTGGAGTCATCCTCTCACCAAATTACCCAGAACCCTAC
CCGCCAGGCAAGGAGTGTGACTGGAAAGTGACCGTCTCACCAGACTACGTCATCGCCCTGGTATTTAA
CATCTTTAACCTGGAGCCTGGCTATGACTTCCTCCATATCTACGACGGACGGGACTCTCTCAGCCCTC
TCATAGGAAGCTTCTATGGCTCCCAGCTCCCAGGCCGCATTGAAAGCAGCAGCAACAGCCTCTTCCTC
GCCTTCCGCAGCGATGCATCTGTGAGCAATGCTGGCTTCGTCATTGACTATACAGAAAACCCGCGGGA
GTCATGTTTTGATCCTGGTTCCATCAAGAACGGCACACGGGTGGGGTCCGACCTGAAGCTGGGCTCCT
CCGTCACCTACTACTGCCACGGGGGCTACGAAGTTGAGGGCACCTCGACCCTGAGCTGCATCCTGGGG
CCTGATGGGAAGCCCGTGTGGAACAATCCCCGGCCAGTCTGCACAGCCCCCTGTGGGGGACAGTATGT
GGGTTCGGACGGAGTGGTCTTGTCCCCCAACTACCCCCAGAACTACACCAGTGGACAGATCTGCTTGT
ATTTTGTTACTGTGCCCAAGGACTATGTGGTGTTTGGCCAGTTCGCCTTCTTTCACACGGCCCTCAAC
GACGTGGTGGAGGTTCACGACGGCCACAGCCAGCACTCGCGGCTCCTCAGCTCCCTCTCGGGCTCCCA
TACAGGAGAATCACTGCCCTTGGCCACCTCCAATCAAGTTCTCATTAAGTTCAGCGCCAAAGGCCTCG
CACCAGCCAGAGGCTTCCACTTTGTCTACCAAGCGGTTCCTCGAACCAGCGCCACGCAGTGCAGCTCT
GTGCCGGAACCCCGCTATGGCAAGAGGCTGGGCAGTGACTTCTCGGTGGGGGCCATCGTCCGCTTCGA
ATGCAACTCCGGCTATGCCCTGCAGGGGTCGCCAGAGATCGAGTGCCTCCCTGTGCCTGGGGCCTTGG
CCCAATGGAATGTCTCAGCGCCCACGTGTGTGGTGCCGTGTGGAGGCAACCTCACAGAGCGCAGGGGC
ACCATCCTGTCCCCTGGCTTCCCAGAGCCGTACCTCAACAGCCTCAACTGTGTGTGGAAGATCGTGGT
CCCCGAAGGCGCTGGCATCCAGATCCAAGTTGTCAGTTTTGTGACAGAGCAGAACTGGGACTCGCTGG
AAGTATTTGATGGTGCAGATAACACTGTAACCATGCTGGGGAGTTTCTCAGGAACAACCGTGCCTGCC
CTTCTGAACAGCACCTCCAACCAGCTCTACCTTCATTTCTACTCAGATATCAGCGTATCTGCAGCTGG
CTTCCACTTGGAGTACAAAACGGTGGGCCTGAGCAGTTGTCCGGAACCTGCTGTGCCCAGTAACGGGG
TGAAGACTGGCGAGCGCTACTTGGTGAATGATGTGGTGTCTTTCCAGTGTGAGCCGGGATATGCCCTC
CAGGGCCACGCCCACATCTCCTGCATGCCCGGAACAGTGCGGCGATGGAACTACCCTCCTCCACTCTG
TATTGCACAGTGTGGGGGAACAGTGGAGGAGATGGAGGGGGTGATCCTGAGCCCCGGCTTCCCAGGCA
ACTACCCCAGTAACATGGACTGCTCCTGGAAAATAGCACTGCCCGTGGGCTTTGGAGCTCACATCCAG
TTCCTGAACTTCTCCACCGAGCCCAACCACGACTACATAGAAATCCGGAATGGCCCCTATGAGACCAG
CCGCATGATGGGAAGATTCAGTGGAAGCGAGCTTCCAAGCTCCCTCCTCTCCACGTCCCACGAGACCA
CCGTGTATTTCCACAGCGACCACTCCCAGAATCGGCCAGGATTCAAGCTGGAGTATCAGGCCTATGAA
CTTCAAGAGTGCCCAGACCCAGAGCCCTTTGCCAATGGCATTGTGAGGGGAGCTGGCTACAACGTGGG
ACAATCAGTGACCTTCGAGTGCCTCCCGGGGTATCAATTGACTGGCCACCCTGTCCTCACGTGTCAAC
ATGGCACCAACCGGAACTGGGACCACCCCCTGCCCAAGTGTGAAGTCCCTTGTGGCGGGAACATCACT
TCTTCCAACGGCACTGTGTACTCCCCGGGGTTCCCTAGCCCGTACTCCAGCTCCCAGGACTGTGTCTG
GCTGATCACCGTGCCCATTGGCCATGGCGTCCGCCTCAACCTCAGCCTGCTGCAGACAGAGCCCTCTG
GAGATTTCATCACCATCTGGGATGGGCCACAGCAAACAGCACCACGGCTCGGCGTCTTCACCCGGAGC
ATGGCCAAGAAAACAGTGCAGAGTTCATCCAACCAGGTCCTGCTCAAGTTCCACCGTGATGCAGCCAC
AGGGGGGATCTTCGCCATAGCTTTCTCCGCTTATCCACTCACCAAATGCCCTCCTCCCACCATCCTCC
CCAACGCCGAAGTCGTCACAGAGAATGAAGAATTCAATATAGGTGACATCGTACGCTACAGATGCCTC
CCTGGCTTTACCTTAGTGGGGAATGAAATTCTGACCTGCAAACTTGGAACCTACCTGCAGTTTGAAGG
ACCACCCCCGATATGTGAAGTGCACTGTCCAACAAATGAGCTTCTGACAGACTCCACAGGCGTGATCC
TGAGCCAGAGCTACCCTGGAAGCTATCCCCAGTTCCAGACCTGCTCTTGGCTGGTGAGAGTGGAGCCC
GACTATAACATCTCCCTCACAGTGGAGTACTTCCTCAGCGAGAAGCAATATGATGAGTTTGAGATTTT
TGATGGTCCATCAGGACAGAGTCCTCTGCTGAAAGCCCTCAGTGGGAATTACTCAGCTCCCCTGATTG
TCACCAGCTCAAGCAACTCTGTGTACCTGCGTTGGTCATCTGATCACGCCTACAATCGGAAGGGCTTC
AAGATCCGCTATTCAGCCCCTTACTGCAGCCTGCCCAGGGCTCCACTCCATGGCTTCATCCTAGGCCA
GACCAGCACCCAGCCCGGGGGCTCCATCCACTTTGGCTGCAACGCCGGCTACCGCCTGGTGGGACACA
GCATGGCCATCTGTACCCGGCACCCCCAGGGCTACCACCTGTGGAGCGAAGCCATCCCTCTCTGTCAA
GCTCTTTCCTGTGGGCTTCCTGAGGCCCCCAAGAATGGAATGGTGTTTGGCAAGGAGTACACAGTGGG
AACCAAGGCCATGTACAGCTGCAGTGAAGGCTACCACCTCCAGGCAGGCGCTGAGGCCACTGCAGAGT
GTCTGGACACAGGCCTATGGAGCAACCGCAATGTCCCACCACAGTGTGTCCGTGAGTCCTCGGGCAAT
GGAGGCGGGTCTGTGACTTGTCCTGATGTCAGTAGCATCAGCGTGGAGCATGGCCGATGGAGGCTTAT
CTTTGAGACACAGTATCAGTTCCAGGCCCAGCTGATGCTCATCTGTGACCCTGGCTACTACTATACTG
GCCAAAGGGTCATCCGCTGTCAGGCCAATGGCAAATGGAGCCTCGGGGACTCTACGCCCACCTGCCGA
ATCATCTCCTGTGGAGAGCTCCCGATTCCCCCCAATGGCCACCGCATCGGAACACTGTCTGTCTACGG
GGCAACAGCCATCTTCTCCTGCAATTCCGGATACACACTGGTGGGCTCCAGGGTGCGTGAGTGCATGG
CCAATGGGCTCTGGAGTGGCTCTGAAGTCCGCTGCCTTGCCACTCAGACCAAGCTCCACTCCATTTTC
TATAAGCTCCTCTTCGATGTACTCTCTTCCCCATCCCTCACCAAAGCTGGACACTGTGGGACTCCTGA
GCCCATTGTCAACGGACACATCAATGGGGAGAACTACAGCTACCGGGGCAGTGTGGTGTACCAATGCA
ATGCTGGCTTCCGCCTGATCGGCATGTCTGTGCGCATCTGCCAGCAGGATCATCACTGGTCGGGCAAG
ACCCCTTTCTGTGTGCATGTTAAGCAGCAGTTGCTGCTGCTGCTGCTGCTGTTGTGTGATGATGATGA
TGATGAAGATGATGGTAGTGGTGCAATTACCTGTGGACACCCAGGCAACCCTGTCAACGGCCTCACTC
AGGGTAACCAGTTTAACCTCAACGATGTGGTCAAGTTTGTTTGCAACCCTGGGTATATGGCTGAGGGG
GCTGCTAGGTCCCAATGCCTGGCCAGCGGGCAATGGAGTGACATGCTGCCCACCTGCAGAATCATCAA
CTGTACAGATCCTGGACACCAAGAAAATAGTGTTCGTCAGGTCCACGCCAGCGGCCCGCACAGGTTCA
GCTTCGGCACCACTGTGTCTTACCGGTGCAACCACGGCTTCTACCTCCTGGGCACCCCAGTGCTCAGC
TGCCAGGGAGATGGCACATGGGACCGTCCCCGCCCCCAGTGTCTCTGTAAGTAG

| | | | |
|---|---|---|---|
| NOV4c, CG50377-02 | SEQ ID NO: 36 | 2669 aa | MW at 290805.9kD |
| Protein Sequence | | | |

MAGAPPPALLLPCSLISDCCASNQRHSVGVGPSELVKKQIELKSRGVKLMPSKDNSQKTSVLTQVGVS
QGHNMCPDPGIPERGKRLGSDFRLGSSVQFTCNEGYDLQGSKRITCMKVSDMFAAWSDHRPVCPARMC
DAHLRGPSGIITSPNFPIQYDNNAHCVWIITALNPSKVIKLAFEEFDLERGYDTLTVGDGGQDGDQKT
VLYMSQNACSDSPHTPGSRIPESMSGDIWRQKWTVLEICRDISSSDARSGSVRKSPKTSNAVELVAPG
TEIEQGSCGDPGIPAYGRREGSRFHHGDTLKFECQPAFELVGQKAITCQKNNQWSAKKPGCVFSCFFN
FTSPSGVVLSPNYPEDYGNHLHCVWLILARPESRIHLAFNDIDVEPQFDFLVIKDGATAEAPVLGTFS
GNQLPSSITSSGHVARLEFQTDHSTGKRGFNITFTTFRHNECPDPGVPVNGKRFGDSLQLGSSISFLC
DEGFLGTQGSETITCVLKEGSVVWNSAVLRCEAPCGGHLTSPSGTILSPGWPGFYKDALSCAWVIEAQ
PGYPIKITFDRFKTEVNYDTLEVRDGRTYSAPLIGVYHGTQVPQFLISTSNYLYLLFSTDKSHSDIGF
QLRYETITLQSDHCLDPGIPVNGQRHGNDFYVGALVTFSCDSGYTLSDGEPLECEPNFQWSPALPSCE
ALCGGFIQGSSGTILSPGFPDFYPNNLNCTWIIETSHGKGVFFTFHTFHLESGHDYLLITENGSFTQP
LRQLTGSRLPAPISAGLYGNFTAQVRFISDFSMSYEGFNITFSEYDLEPCEEPEVPAYSIRKGLQFGV
GDTLTFSCFPGYRLEGTARITCLGGRRRLWSSPLPRCVAECGNSVTGTQGTLLSPNFPVNYNNNHECI
YSIQTQPGKGIQLKAPAFELSEGDVLKVYDGNNNSARLLGVFSHSENMGVTLNSTSSSLWLDFITDAE
NTSKGFELHFSSFELIKCEDPGTPKFGYKVHDEGHFAGSSVSFSCDPGYSLRGSEELLCLSGERRTWD
RPLPTCVAECGGTVRGEVSGQVLSPGYPAPYEHNLNCIWTIEAEAGCTIGLHFLVFDTEEVHDVLRIW
DGPVESGVLLKELSGPALPKDLHSTFNSVVLQFSTDFFTSKQGFAIQFSVSTATSCNDPGIPQNGSRS
GDSWEAGDSTVFQCDPGYALQGSAEISCVKIENRFFWQPSPPTCIAPCGGDLTGPSGVILSPNYPEPY
PPGKECDWKVTVSPDYVIALVFNIFNLEPGYDFLHIYDGRDSLSPLIGSFYGSQLPGRIESSSNSLFL
AFRSDASVSNAGFVIDYTENPRESCFDPGSIKNGTRVGSDLKLGSSVTYYCHGGYEVEGTSTLSCILG
PDGKPVWNNPRPVCTAPCGGQYVGSDGVVLSPNYPQNYTSGQICLYFVTVPKDYVVFGQFAFFHTALN
DVVEVHDGHSQHSRLLSSLSGSHTGESLPLATSNQVLIKFSAKGLAPARGFHFVYQAVPRTSATQCSS
VPEPRYGKRLGSDFSVGAIVRFECNSGYALQGSPEIECLPVPGAIAQWNVSAPTCVVPCGGNLTERRG
TILSPGFPEPYLNSLNCVWKIVVPEGAGIQIQVVSFVTEQNWDSLEVFDGADNTVTMLGSFSGTTVPA
LLNSTSNQLYLHFYSDISVSAAGFHLEYKTVGLSSCPEPAVPSNGVKTGERYLVNDVVSFQCEPGYAL
QGHAHISCMPGTVRRWNYPPPLCIAQCGGTVEEMEGVILSPGFPGNYPSNMDCSWKIALPVGFGAHIQ
FLNFSTEPNHDYIEIRNGPYETSRMMGRFSGSELPSSLLSTSHETTVYFHSDHSQNRPGFKLEYQAYE
LQECPDPEPFANGIVRGAGYNVGQSVTFECLPGYQLTGHPVLTCQHGTNRNWDHPLPKCEVPCGGNIT
SSNGTVYSPGFPSPYSSSQDCVWLITVPIGHGVRLNLSLLQTEPSGDFITIWDGPQQTAPRLGVFTRS
MAKKTVQSSSNQVLLKFHRDAATGGIFAIAFSAYPLTKCPPPTILPNAEVVTENEEFNIGDIVRYRCL
PGFTLVGNEILTCKLGTYLQFEGPPPICEVHCPTNELLTDSTGVILSQSYPGSYPQFQTCSWLVRVEP
DYNISLTVEYFLSEKQYDEFEIFDGPSGQSPLLKALSGNYSAPLIVTSSSNSVYLRWSSDHAYNRKGF
KIRYSAPYCSLPRAPLHGFILGQTSTQPGGSIHFGCNAGYRLVGHSMAICTRHPQGYHLWSEAIPLCQ
ALSCGLPEAPKNGMVFGKEYTVGTKAMYSCSEGYHLQAGAEATAECLDTGLWSNRNVPPQCVRESSGN
GGGSVTCPDVSSISVEHGRWRLIFETQYQFQAQLMLICDPGYYYTGQRVIRCQANGKWSLGDSTPTCR
IISCGELPIPPNGHRIGTLSVYGATAIFSCNSGYTLVGSRVRECMANGLWSGSEVRCLATQTKLHSIF
YKLLFDVLSSPSLTKAGHCGTPEPIVNGHINGENYSYRGSVVYQCNAGFRLIGMSVRICQQDHHWSGK
TPFCVHVKQQLLLLLLLLCDDDDDEDDGSGAITCGHPGNPVNGLTQGNQFNLNDVVKFVCNPGYMAEG
AARSQCLASGQWSDMLPTCRIINCTDPGHQENSVRQVHASGPHRFSFGTTVSYRCNHGFYLLGTPVLS
CQGDGTWDRPRPQCLCK

| | | |
|---|---|---|
| NOV4d, CG50377-03 | SEQ ID NO: 37 | 9951 bp |
| DNA Sequence | ORF Start: ATG at 1 | ORf Stop: TGA at 7837 |

ATGGCGGGCGCCCCTCCCCCCGCCTTGCTGCTGCCTTGCAGTTTGATCTCAGACTGCTGTGCTAGCAA
TCAGCGACACTCCGTGGGCGTAGGACCCTCCGAGCTAGTCAAGAAGCAAATTGAGTTGAAGTCTCGAG
GTGTGAAGCTGATGCCCAGCAAAGACAACAGCCAGAAGACGTCTGTGTTAACTCAGGTTGGTGTGTCC
CAAGGACATAATATGTGTCCAGACCCTGGCATACCCGAAAGGGGCAAAAGACTAGGCTCGGATTTCAG
GTTAGGATCCAGCGTCCAGTTCACCTGCAACGAGGGCTATGACCTGCAAGGGTCCAAGCGGATCACCT
GTATGAAAGTGAGCGACATGTTTGCGGCCTGGAGCGACCACAGGCCAGTCTGCCGAGCCCGCATGTGT
GATGCCCACCTTCGAGGCCCCTCGGGCATCATCACCTCCCCCAATTTCCCCATTCAGTATGACAACAA
TGCACACTGTGTGTGGATCATCACAGCACTCAACCCCTCCAAGGTGATCAAGCTCGCCTTTGAGGAGT
TTGATTTGGAGAGGGGCTATGACACCCTGACGGTCGGTGATGGTGGTCAGGATGGGGACCAGAAGACA
GTTCTCTACATGTCTCAAAATGCCTGCAGTGACAGCCCTCACACCCCAGGCTCTCGCATCCCAGAGAG
CATGTCTGGGGACATCTGGAGGCAGAAATGGACTGTACTTGAGATCTGTCGTGACATTAGCAGTTCAG
ATGCAAGGTCAGGTTCAGTGAGGAAGTCTCCAAAGACTTCTAATGCTGTGGAACTTGTTGCTCCTGGG
ACAGAGATCGAGCAGGGCAGTTGCGGTGACCCTGGCATACCTGCATATGGCCGGAGGGAAGGCTCCCG
GTTTCACCACGGTGACACACTCAAGTTTGAGTGCCAGCCCGCCTTTGAGCTGGTGGGACAGAAGGCAA
TCACATGCCAAAAGAATAACCAATGGTCGGCTAAGAAGCCAGGCTGCGTGTTCTCCTGCTTCTTCAAC
TTCACCAGCCCGTCTGGGGTTGTCCTGTCTCCCAACTACCCAGAGGACTATGGCAACCACCTCCACTG
TGTCTGGCTCATCCTGGCCAGGCCTGAGAGCCGCATCCACCTGGCCTTCAACGACATTGACGTGGAGC
CTCAGTTTGATTTCCTGGTCATCAAGGATGGGGCCACCGCCGAGGCGCCCGTCCTGGGCACCTTCTCA
GGAAACCAGCTTCCCTCCTCCATCACAAGCAGTGGCCACGTGGCCCGTCTCGAGTTCCAGACTGACCA
CTCCACAGGGAAGAGGGGCTTCAACATCACTTTTACCACCTTCCGACACAACGAGTGCCCGGATCCTG
GCGTTCCAGTAAATGGCAAACGGTTTGGGGACAGCCTCCAGCTGGGCAGCTCCATCTCCTTCCTCTGT
GATGAAGGCTTCCTTGGGACTCAGGGCTCAGAGACCATCACCTGCGTCCTGAAGGAGGGCAGCGTGGT
CTGGAACAGCGCTGTGCTGCGGTGTGAAGCTCCCTGTGGTGGTCACCTGACTTCGCCCAGCGGCACCA
TCCTCTCTCCGGGCTGGCCTGGCTTCTACAAGGATGCCTTGAGCTGTGCCTGGGTGATTGAGGCCCAG
CCAGGCTACCCCATCAAAATCACCTTCGACAGATTCAAAACCGAGGTCAACTATGACACCCTGGAAGT
ACGCGATGGGCGGACTTACTCAGCGCCCTTGATCGGGGTTTACCACGGGACCCAGGTTCCCCAGTTCC
TCATCAGCACCAGCAACTACCTCTACCTCCTCTTCTCTACCGACAAGAGTCACTCGGACATCGGCTTC
CAGCTCCGCTATGAGACTATAACACTGCAGTCAGACCACTGTCTGGATCCAGGAATCCCAGTAAATGG
ACAGCGTCATGGGAATGACTTCTACGTGGGCGCGCTGGTGACCTTCAGCTGTGACTCGGGCTACACAT
TAAGTGACGGGGAGCCTCTGGAGTGTGAGCCCAACTTCCAGTGGAGCCGGGCCCTGCCCAGTTGTGAA
GCTCTCTGTGGTGGCTTCATTCAAGGCTCCAGTGGGACCATCTTGTCGCCAGGGTTCCCTGACTTCTA
CCCCAACAACTTGAACTGCACCTGGATTATCGAAACATCTCATGGCAAGGGTGTGTTCTTCACTTTCC
ACACCTTCCACCTGGAAAGTGGCCATGACTACCTCCTCATCACTGAGAACGGCAGCTTCACCCAGCCC
CTGAGGCAGCTAACTGGATCTCGGCTGCCAGCTCCCATCAGCGCTGGGCTCTATGGCAACTTCACTGC
CCAGGTCCGCTTCATCTCTGATTTCTCCATGTCATATGAAGGATTCAACATCACCTTCTCAGAGTACG
ACTTGGAGCCCTGTGAGGAGCCCGAGGTCCCAGCCTACAGCATCCGGAAGGGCTTGCAGTTTGGCGTG
GGCGACACCTTGACCTTCTCCTGCTTCCCCGGGTACCGTCTGGAGGGCACCGCCCGCATCACGTGCCT
GGGGGGCAGACGGCGCCTGTGGAGCTCGCCTCTGCCAAGGTGTGTTGCTGAGTGTGGGAATTCAGTCA
CAGGCACTCAGGGTACTTTGCTGTCCCCCAACTTTCCTGTGAACTACAATAACAATCATGAATGCATC
TACTCCATCCAGACCCAGCCAGGGAAGGGAATTCAGCTGAAAGCCAGGGCATTCGAACTCTCCGAAGG
AGATGTCCTCAAGGTTTATGATGGCAACAACAACTCCGCCCGTTTGCTGGGAGTTTTTAGCCATTCTG
AGATGATGGGGGTGACTTTGAACAGCACATCCAGCAGTCTGTGGCTTGATTTCATCACTGATGCTGAA
AACACCAGCAAGGGCTTTGAACTGCACTTTTCCAGCTTTGAACTCATCAAATGTGAGGACCCAGGAAC
CCCCAAGTTTGGCTACAAGGTTCATGATGAAGGTCATTTTGCAGGGAGCTCCGTGTCCTTCAGCTGTG
ACCCTGGATACAGCCTGCGGGGTAGTGAGGAGCTGCTGTGTCTGAGTGGAGAGCGCCGGACCTGGGAC
CGGCCTCTGCCCACCTGTGTCGCCGAGTGTGGAGGGACAGTGAGAGGAGAGGTGTCGGGGCAGGTGCT
GTCACCCGGGTATCCAGCTCCCTATGAACACAATCTCAACTGCATCTGGACCATCGAAGCAGAGGCCG
GCTGCACCATTGGGCTACACTTCCTGGTGTTTGACACAGAGGAGGTTCACGACGTGCTGCGCATCTGG
GATGGGCCTGTGGAGAGCGGGGTTCTGCTGAAGGAGCTGAGTGGCCCGGCCCTGCCCAAGGACCTGCA
TAGCACCTTCAACTCGGTCGTCCTGCAGTTCAGCACTGACTTCTTCACCAGCAAGCAGGGCTTTGCCA
TTCAATTTTCAGTGTCCACAGCAACGTCCTGCAATGACCCTGGGATCCCGCAGAATGGGAGTCGGAGT
GGTGACAGTTGGGAAGCCGGCGACTCCACAGTGTTCCAGTGTGACCCTGGCTACGCGCTGCAGGGAAG
TGCAGAGATCAGCTGTGTGAAGATCGAGAACAGGTTCTTCTGGCAGCCCAGCCCGCCAACATGCATCG
CTCCCTGCGGGGGAGACCTGACAGGACCATCTGGAGTCATCCTCTCACCAAATTACCCAGAACCCTAC
CCGCCAGGCAAGGAGTGTGACTGGAAAGTGACCGTCTCACCAGACTACGTCATCGCCCTGGTATTTAA
CATCTTTAACCTGGAGCCTGGCTATGACTTCCTCCATATCTACGACGGACGGGACTCTCTCAGCCCTC
TCATAGGAAGCTTCTATGGCTCCCAGCTCCCAGGCCGCATTGAAAGCAGCAGCAACAGCCTCTTCCTC
GCCTTCCGCAGCGATGCATCTGTGAGCAATGCTGGCTTCGTCATTGACTATACAGAAAACCCGCGGGA
GTCATGTTTTGATCCTGGTTCCATCAAGAACGGCACACGGGTGGGGTCCGACCTGAAGCTGGGCTCCT
CCGTCACCTACTACTGCCACGGGGGCTACGAAGTTGAGGGCACCTCGACCCTGAGCTGCATCCTGGGG
CCTGATGGGAAGCCCGTGTGGAACAATCCCCGGCCAGTCTGCACAGCCCCCTGTGGGGGACAGTATGT
GGGTTCGGACGGAGTGGTCTTGTCCCCCAACTACCCCCAGAACTACACCAGTGGACAGATCTGCTTGT
ATTTTGTTACTGTGCCCAAGGACTATGTGGTGTTTGGCCAGTTCGCCTTCTTTCACACGGCCCTCAAC
GACGTGGTGGAGGTTCACGACGGCCACAGCCAGCACTCGCGGCTCCTCAGCTCCCTCTCGGGCTCCCA
TACAGGAGAATCACTGCCCTTGGCCACCTCCAATCAAGTTCTCATTAAGTTCAGCGCCAAAGGCCTCG
CACCAGCCAGAGGCTTCCACTTTGTCTACCAAGCGGTTCCTCGAACCAGCGCCACGCAGTGCAGCTCT
GTGCCGGAACCCCGCTATGGCAAGAGGCTGGGCAGTGACTTCTCGGTGGGGGCCATCGTCCGCTTCGA
ATGCAACTCCGGCTATGCCCTGCAGGGGTCGCCAGAGATCGAGTGCCTCCCTGTGCCTGGGGCCTTGG
CCCAATGGAATGTCTCAGCGCCCACGTGTGTGGTGCCGTGTGGAGGCAACCTCACAGAGCGCAGGGGC
ACCATCCTGTCCCCTGGCTTCCCAGAGCCGTACCTCAACAGCCTCAACTGTGTGTGGAAGATCGTGGT
CCCCGAAGGCGCTGGCATCCAGATCCAAGTTGTCAGTTTTGTGACAGAGCAGAACTGGGACTCGCTGG
AAGTATTTGATGGTGCAGATAACACTGTAACCATGCTGGGGAGTTTCTCAGGAACAACCGTGCCTGCC
CTTCTGAACAGCACCTCCAACCAGCTCTACCTTCATTTCTACTCAGATATCAGCGTATCTGCAGCTGG
CTTCCACTTGGAGTACAAAACGGTGGGCCTGAGCAGTTGTCCGGAACCTGCTGTGCCCAGTAACGGGG
TGAAGACTGGCGAGCGCTACTTGGTGAATGATGTGGTGTCTTTCCAGTGTGAGCCGGGATATGCCCTC
CAGGGCCACGCCCACATCTCCTGCATGCCCGGAACAGTGCGGCGATGGAACTACCCTCCTCCACTCTG
TATTGCACAGTGTGGGGGAACAGTGGAGGAGATGGAGGGGGTGATCCTGAGCCCCGGCTTCCCAGGCA
ACTACCCCAGTAACATGGACTGCTCCTGGAAAATAGCACTGCCCGTGGGCTTTGGAGCTCACATCCAG
TTCCTGAACTTCTCCACCGAGCCCAACCACGACTACATAGAAATCCGGAATGGCCCCTATGAGACCAG
CCGCATGATGGGAAGATTCAGTGGAAGCGAGCTTCCAAGCTCCCTCCTCTCCACGTCCCACGAGACCA
CCGTGTATTTCCACAGCGACCACTCCCAGAATCGGCCAGGATTCAAGCTGGAGTATCAGGCCTATGAA
CTTCAAGAGTGCCCAGACCCAGAGCCCTTTGCCAATGGCATTGTGAGGGGAGCTGGCTACAACGTGGG
ACAATCAGTGACCTTCGAGTGCCTCCCGGGGTATCAATTGACTGGCCACCCTGTCCTCACGTGTCAAC
ATGGCACCAACCGGAACTGGGACCACCCCCTGCCCAAGTGTGAAGTCCCTTGTGGCGGGAACATCACT
TCTTCCAACGGCACTGTGTACTCCCCGGGGTTCCCTAGCCCGTACTCCAGCTCCCAGGACTGTGTCTG
GCTGATCACCGTGCCCATTGGCCATGGCGTCCGCCTCAACCTCAGCCTGCTGCAGACAGAGCCCTCTG
GAGATTTCATCACCATCTGGGATGGGCCACAGCAAACAGCACCACGGCTCGGCGTCTTCACCCGGAGC
ATGGCCAAGAAAACAGTGCAGAGTTCATCCAACCAGGTCCTGCTCAAGTTCCACCGTGATGCAGCCAC
AGGGGGGATCTTCGCCATAGCTTTCTCCGCTTATCCACTCACCAAATGCCCTCCTCCCACCATCCTCC
CCAACGCCGAAGTCGTCACAGAGAATGAAGAATTCAATATAGGTGACATCGTACGCTACAGATGCCTC
CCTGGCTTTACCTTAGTGGGGAATGAAATTCTGACCTGCAAACTTGGAACCTACCTGCAGTTTGAAGG
ACCACCCCCGATATGTGAAGTGCACTGTCCAACAAATGAGCTTCTGACAGACTCCACAGGCGTGATCC
TGAGCCAGAGCTACCCTGGAAGCTATCCCCAGTTCCAGACCTGCTCTTGGCTGGTGAGAGTGGAGCCC
GACTATAACATCTCCCTCACAGTGGAGTACTTCCTCAGCGAGAAGCAATATGATGAGTTTGAGATTTT
TGATGGTCCATCAGGACAGAGTCCTCTGCTGAAAGCCCTCAGTGGGAATTACTCAGCTCCCCTGATTG
TCACCAGCTCAAGCAACTCTGTGTACCTGCGTTGGTCATCTGATCACGCCTACAATCGGAAGGGCTTC
AAGATCCGCTATTCAGCTCTTTCCTGTGGGCTTCCTGAGGCCCCCAAGAATGGAATGGTGTTTGGCAA
GGAGTACACAGTGGGAACCAAGGCCATGTACAGCTGCAGTGAAGGCTACCACCTCCAGGCAGGCGCTG
AGGCCACTGCAGAGTGTCTGGACACAGGCCTATGGAGCAACCGCAATGTCCCACCACAGTGTGTCCCT
GTGACTTGTCCTGATGTCAGTAGCATCAGCGTGGAGCATGGCCGATGGAGGCTTATCTTTGAGACACA
GTATCAGTTCCAGGCCCAGCTGATGCTCATCTGTGACCCTGGCTACTACTATACTGGCCAAAGGGTCA
TCCGCTGTCAGGCCAATGGCAAATGGAGCCTCGGGGACTCTACGCCCACCTGCCGAATCATCTCCTGT
GGAGAGCTCCCGATTCCCCCCAATGGCCACCGCATCGGAACACTGTCTGTCTACGGGGCAACAGCCAT
CTTCTCCTGCAATTCCGGATACACACTGGTGGGCTCCAGGGTGCGTGAGTGCATGGCCAATGGGCTCT
GGAGTGGCTCTGAAGTCCGCTGCCTTGCTGGACACTGTGGGACTCCTGAGCCCATTGTCAACGGACAC
ATCAATGGGGAGAACTACAGCTACCGGGGCAGTGTGGTGTACCAATGCAATGCTGGCTTCCGCCTGAT
CGGCATGTCTGTGCGCATCTGCCAGCAGGATCATCACTGGTCGGGCAAGACCCCTTTCTGTCAATTAC
CTGTGGACACCCAGGCAACCCTGTCAACGGCCTCACTCAGGGTAACCAGTTTAACCTCAACGATGTGG
TCAAGTTTGTTTGCAACCCTGGGTATATGGCTGAGGGGGCTGCTAGGTCCCAATGCCTGGCCAGCGGG
CAATGGAGTGACATGCTGCCCACCTGCAGAATCATCAACTGTACAGATCCTGGACACCAAGAAAATAG
TGTTCGTCAGGTCCACGCCAGCGGCCCGCACAGGTTCAGCTTCGGCACCACTGTGTCTTACCGGTGCA
ACCACGGCTTCTACCTCCTGGGCACCCCAGTGCTCAGCTGCCAGGGAGATGGCACATGGGACCGTCCC
CGCCCCCAGTGTCTCTGTAAGTAGTGGTGTCCTGTGGCCATCCGGGCTCCCCGCCTCACTCCCAGATG
TCTGGAGACAGTTATACTGTGGGAGCAGTGGTGCGGTACAGCTGCATCGGCAAGCGTACTCTGGTGGG
AAACAGCACCCGCATGTGTGGGCTGGATGGACACTGGACTGGCTCCCTCCCTCACTGCTCAGGAACCA
GCGTGGGAGTTTGCGGTGACCCTGGGATCCCGGCTCATGGCATCCGTTTGGGGGACAGCTTTGATCCA
GGCACTGTGATGCGCTTCAGCTGTGAAGCTGGCCACGTGCTCCGGGGATCGTCAGAGCGCACCTGTCA
AGCCAATGGCTCGTGGAGCGGCTCGCAGCCTGAGTGTGGAGTGATCTCTTGTGGGAACCCTGGGACTC
CAAGTAATGCCCGAGTTGTGTTCAGTGATGGCCTGGTTTTCTCCAGCTCTATCGTCTATGAGTGCCGQ
GAAGGATACTACGCCACAGGCCTGCTCAGCCGTCACTGCTCGGTCAATGGTACCTGGACAGGCAGTGA
CCCTGAGTGCCTCGTCATAAACTGTGGTGACCCTGGGATTCCAGCCAATGGCCTTCGGCTGGGCAATG
ACTTCAGGTACAACAAAACTGTGACATATCAGTGTGTCCCTGGCTATATGATGGAGTCACATAGAGTA
TCTGTGCTGAGCTGCACCAAGGACCGGACATGGAATGGAACCAAGCCCGTCTGCAAAGCTCTCATGTG
CAAGCCACCTCCGCTCATCCCCAATGGGAAGGTGGTGGGGTCTGACTTCATGTGGGGCTCAAGTGTGA
CTTATGCCTGCCTGGAGGGGTACCAGCTCTCCCTGCCCGCGGTGTTCACCTGTGAGGGAAATGGGTCC
TGGACCGGAGAGCTGCCTCAGTGTTTCCCTGTGTTCTGCGGGGATCCTGGTGTCCCGTCCCGTGGGAG
GAGAGAGGACCGAGGCTTCTCCTACAGGTCATCTGTCTCCTTCTCCTGCCATCCCCCTCTGGTGCTGG
TGGGCTCTCCACGCAGGTTTTGCCAGTCAGATGGGACATGGAGTGGCACCCAGCCCAGCTGCATAGAT
CCGACCCTGACCACGTGTGCGGACCCTGGTGTGCCACAGTTTGGGATACAGAACAATTCTCAGGGCTA
CCAGGTTGGAAGCACAGTCCTCTTCCGTTGTCAAAAAGGCTACCTGCTTCAGGGCTCCACCACCAGGA
CCTGCCTCCCAAACCTGACCTGGAGTGGAACCCCACCTGACTGTGTCCCCCACCACTGCAGGCAGCCA
GAGACGCCAACGCATGCCAACGTCGGGGCCCTGGATTTGCCCTCCATGGGCTACACGCTCATTACTCC
TGCCAGGAGGGCTTCTCCCTCAAGGGTGGCTCCGAGCACCGCACCTGCAAGGCGGATGGCAGCTGGAC
AGGCAAGCCGCCCATCTGCCTGGAGGTCCGGCCCAGTGGGAGACCCATCAACACTGCCCGGGAGCCAC
CGCTCACCCAAGCCTTGATTCCTGGGGATGTTTTTGCCAAGAATTCCCTGTGGAAAGGGGCCTATGAA
TACCAGGGGAAGAAGCAGCCAGCCATGCTCAGAGTGACTGGCTTCCAAGTTGCCAACAGCAAGGTCAA
TGCCACCATGATCGACCACAGTGGCGTGGAGCTGCACTTGGCTGGAACTTACAAGAAAGAAGATTTTC
ATCTCCTACTCCAGGTGTACCAGATTACAGGGCCTGTGGAGATCTTTATGAATAAGTTCAAAGATGAT
CACTGGGCTTTAGATGGCCATGTCTCGTCAGAGTCCTCCGGAGCCACCTTCATCTACCAAGGCTCTGT
CAAGGGCCAAGGCTTTGGGCAGTTCGGCTTTCAAAGACTGGACCTCAGGCTGCTGGAGTCAGACCCCG
AGTCCATTGGCCGCCACTTTGCTTCCAACAGCAGCTCAGTGGCAGCCGCGATCCTGGTGCCTTTCATC
GCCCTCATTATTGCGGGCTTCGTGCTCTATCTCTACAAGCACAGGAGAAGACCCAAAGTTCCTTTCAA
TGGCTATGCTGGCCACGAGAACACCAATGTTCGGGCCACATTTGAGAACCCAATGTACGACCGCAACA
TCCAGCCCACAGACATCATGGCCAGCGAGGCGGAGTTCACAGTCAGCACAGTGTGCACAGCAGTATAG
CCACCCGGCCTGGCCGCTTTTTTTGCTAGGTTGAACTGGTACTCCAGCAGCCGCCGAAGCTGGACTGT
ACTGCTGCCATCTCAGCTCACTGCAACCTCCCTGCCTGATTCCCCTGCCTCAGCCTGCCGAGTGCCTG
CGATTGCAGGCGCGCACCGCCAC

| | | | |
|---|---|---|---|
| NOV4d, CG50377-03 | SEQ ID NO: 38 | 2612 aa | MW at 284047.5kD |
| Protein Sequence | | | |

MAGAPPPALLLPCSLISDCCASNQRHSVGVGPSELVKKQIELKSRGVKLMPSKDNSQKTSVLTQVGVS
QGHNMCPDPGIPERGKRLGSDFRLGSSVQFTCNEGYDLQGSKRITCMKVSDMFAAWSDHRPVCRARMC
DAHLRGPSGIITSPNFPIQYDNNAHCVWIITALNPSKVIKLAFEEFDLERGYDTLTVGDGGQDGDQKT
VLYMSQNACSDSPHTPGSRIPESMSGDIWRQKWTVLEICRDISSSDARSGSVRKSPKTSNAVELVAPG
TEIEQGSCGDPGIPAYGRREGSRFHHGDTLKFECQPAFELVGQKAITCQKNNQWSAKKPGCVFSCFFN
FTSPSGVVLSPNYPEDYGNHLHCVWLILARPESRIHLAFNDIDVEPQFDFLVIKDGATAEAPVLGTFS
GNQLPSSITSSGHVARLEFQTDHSTGKRGFNITFTTFRHNECPDPGVPVNGKRFGDSLQLGSSISFLC
DEGFLGTQGSETITCVLKEGSVVWNSAVLRCEAPCGGHLTSPSGTILSPGWPGFYKDALSCAWVIEAQ
PGYPIKITFDRFKTEVNYDTLEVRDGRTYSAPLIGVYHGTQVPQFLISTSNYLYLLFSTDKSHSDIGF
QLRYETITLQSDHCLDPGIPVNGQRHGNDFYVGALVTFSCDSGYTLSDGEPLECEPNFQWSRALPSCE
ALCGGFIQGSSGTTLSPGFPDFYPNNLNCTWIIETSHGKGVFFTFHTFHLESGHDYLLITENGSFTQP
LRQLTGSRLPAPISAGLYGNFTAQVRFISDFSMSYEGFNITFSEYDLEPCEEPEVPAYSIRKGLQFGV
GDTLTFSCFPGYRLEGTARITCLGGRRRLWSSPLPRCVAECGNSVTGTQGTLLSPNFPVNYNNNHECI
YSIQTQPGKGIQLKARAFELSEGDVLKVYDGNNNSARLLGVFSHSEMMGVTLNSTSSSLWLDFITDAE
NTSKGFELHFSSFELIKCEDPGTPKFGYKVHDEGHFAGSSVSFSCDPGYSLRGSEELLCLSGERRTWD
RPLPTCVAECGGTVRGEVSGQVLSPGYPAPYEHNLNCIWTIEAEAGCTIGLHFLVFDTEEVHDVLRIW
DGPVESGVLLKELSGPALPKDLHSTFNSVVLQFSTDFFTSKQGFAIQFSVSTATSCNDPGIPQNGSRS
GDSWEAGDSTVFQCDPGYALQGSAEISCVKIENRFFWQPSPPTCIAPCGGDLTGPSGVILSPNYPEPY
PPGKECDWKVTVSPDYVIALVFNIFNLEPGYDFLHIYDGRDSLSPLIGSFYGSQLPGRIESSSNSLFL
AFRSDASVSNAGFVIDYTENPRESCFDPGSIKNGTRVGSDLKLGSSVTYYCHGGYEVEGTSTLSCILG
PDGKPVWNNPRPVCTAPCGGQYVGSDGVVLSPNYPQNYTSGQICLYFVTVPKDYVVFGQFAFFHTALN
DVVEVHDGHSQHSRLLSSLSGSHTGESLPLATSNQVLIKFSAKGLAPARGFHFVYQAVPRTSATQCSS
VPEPRYGKRLGSDFSVGAIVRFECNSGYALQGSPEIECLPVPGALAQWNVSAPTCVVPCGGNLTERRG
TILSPGFPEPYLNSLNCVWKIVVPEGAGIQIQVVSFVTEQNWDSLEVFDGADNTVTMLGSFSGTTVPA
LLNSTSNQLYLHFYSDISVSAAGFHLEYKTVGLSSCPEPAVPSNGVKTGERYLVNDVVSFQCEPGYAL
QGHAHISCMPGTVRRWNYPPPLCIAQCGGTVEEMEGVILSPGFPGNYPSNMDCSWKIALPVGFGAHIQ
FLNFSTEPNHDYIEIRNGPYETSRMMGRFSGSELPSSLLSTSHETTVYFHSDHSQNRPGFKLEYQAYE
LQECPDPEPFANGIVRGAGYNVGQSVTFECLPGYQLTGHPVLTCQHGTNRNWDHPLPKCEVPCGGNIT
SSNGTVYSPGFPSPYSSSQDCVWLITVPIGHGVRLNLSLLQTEPSGDFITIWDGPQQTAPRLGVFTRS
MAKKTVQSSSNQVLLKFHRDAATGGIFAIAFSAYPLTKCPPPTILPNAEVVTENEEFNIGDIVRYRCL
PGFTLVGNEILTCKLGTYLQFEGPPPICEVHCPTNELLTDSTGVILSQSYPGSYPQFQTCSWLVRVEP
DYNISLTVEYFLSEKQYDEFEIFDGPSGQSPLLKALSGNYSAPLIVTSSSNSVVLRWSSDHAYNRKGF
KIRYSALSCGLPEAPKNGMVFGKEYTVGTKAMYSCSEGYHLQAGAEATAECLDTGLWSNRNVPPQCVP
VTCPDVSSISVEHGRWRLIFETQYQFQAQLMLICDPGYYYTGQRVIRCQANGKWSLGDSTPTCRIISC
GELPIPPNGHRIGTLSVYGATAIFSCNSGYTLVGSRVRECMANGLWSGSEVRCLAGHCGTPEPIVNGH
INGENYSYRGSVVYQCNAGFRLIGMSVRICQQDHHWSGKTPFCQLPVDTQATLSTASLRVTSLTSTMW
SSLFATLGIWLRGLLGPNAWPAGNGVTCCPPAESSTVQILDTKKIVFVRSTPAARTGSASAPLCLTGA
TTASTSWAPQCSAAREMAHGTVPAPSVSVSSGVLWPSGLPASLPDVWRQLYCGSSGAVQLHRQAYSGG
KQHPHVWAGWTLDWLPPSLLPNQRGSLR

| | | |
|---|---|---|
| NOV4e, CG50377-05 | SEQ ID NO: 39 | 10466 bp |
| DNA Sequence | ORF Start: at 1 | ORF Stop: TAG at 10450 |

GGCCAGAACTGCACGTTCCAACTGCACGGTCCCAATGGGACAGTTGAGAGCCCAGGGTTCCCATATGG
CTACCCCAATTACGCCAACTGCACGTGGACCATCACCGCGGAAGAGCAGCACAGAATCCAGCTTGTGT
TCCAGTCCTTTGCCCTGGAAGAGGACTTTGATGTCCTGTCGGTGTTTGATGGTCCACCCCAGCCAGAG
AATCTGCGTACGAGGCTCACAGGCTTTCAGCTGCCAGCCACCATTGTTAGTGCAGCCACCACCCTCTC
TCTGCGCCTCATCAGCGACTATGCAGTCAGTGCCCAAGGCTTCCACGCCACCTATGAAGTTCTCCCCA
GCCACACATGTGGGAACCCAGGGAGGCTGCCCAATGGCATCCAGCAGGGTTCAACCTTCAACCTCGGT
GACAAGGTCCGCTACAGCTGCAACCTTGGCTTCTTCCTGGAGGGCCACGCCGTGCTCACCTGCCACGC
TGGCTCTGAGAACAGCGCCACGTGGGACTTCCCCCTGCCTTCCTGCAGAGCTGATGATGCCTGTGGTG
GGACCCTGCGGGGCCAGAGTGGCATCATCTCCAGCCCCCACTTCCCCTCGGAGTACCATAACAATGCC
GACTGCACATGGACCATCCTGGCTGAGCTGGGGGACACCATCGCCCTGGTGTTTATTGACTTCCAGCT
GGAGGATGGTTACGACTTTCTGGAAGTCACTGGGACAGAAGGCTCCTCCCTCTGGTTCACCGGAGCCA
GCCTCCCAGCCCCCGTTATCAGCAGCAAGAACTGGCTGCGACTGCACTTCACATCGGATGGCAACCAC
CGGCAGCGCGGATTCAGTGCCCAATACCAAGTCAAGAAGCAAATTGAGTTGAAGTCTCGAGGTGTGAA
GCTGATGCCCAGCAAAGACAACAGCCAGAAGACGTCTGTGGTAACTCAGGTTGGTGTGTCCCAAGGAC
ATAATATGTGTCCAGACCCTGGCATACCCGAAAGGGGCAAAAGACTAGGCTCGGATTTCAGGTTAGGA
TCCAGCGTCCAGTTCACCTGCAACGAGGGCTATGACCTGCAAGGGTCCAAGCGGATCACCTGTATGAA
AGTGAGCGACATGTTTGCGGCCTGGAGCGACCACAGGCCAGTCTGCCGAGCCCGCATGTGTGATGCCC
ACCTTCGAGGCCCCTCGGGCATCATCACCTCCCCCAATTTCCCCATTCAGTATGACAACAATGCACAC
TGTGTGTGGATCATCACAGCACTCAACCCCTCCAAGGTAATCAAGCTCGCCTTTGAGGAGTTTGATTT
GGAGAGGGGCTATGACACCCTGACGGTCGGTGATGGTGGTCAGGATGGGGACCAGAAGACAGTTCTCT
ACATGCTGACAGGTACATCGGTCCCGGATCTCATTGTCAGCACCAATCATCAAATGTGGCTCCTCTTC
CAGACTGATGGCAGTGGCAGTTCCCTGGGATTCAAGGCTTCTTATGAAGAGATCGAGCAGGGCAGTTG
CGGTGACCCTGGCATACCTGCATATGGCCGGAGGGAAGGCTCCCGGTTTCGCCACGGTGACACACTCA
AGTTTGAGTGCCAGCCCGCCTTTGAGCTGGTGGGACAGAAGGCAATCACATGCCAAAAGAATAACCAA
TGGTCGGCTAAGAAGCCAGGCTGCGTGTGTTCCTGCTTCTTCAACTTCACCAGCCCGTCTGGGGTTGT
CCTGTCTCCCAACTACCCAGAGGACTATGGCAACCACCTCCACTGTGTCTGGCTCATCCTGGCCAGGC
CTGAGAGCCGCATCCACCTGGCCTTCAACGACATTGACGTGGAGCCTCAGTTTGATTTCCTGGTCATC
AAGGATGGGGCCACCGCCGAGGCGCCCGTCCTGGGCACCTTCTCAGGAAACCAGCTTCCCTCCTCCAT
CACAAGCAGTGGCCACGTGGCCCGTCTCGAGTTCCAGACTGACCACTCCACAGGGAAGAGGGGCTTCA
ACATCACTTTTACCAGTGAGTCCTCCAACGAGTGCCCGGATCCTGGCGTTCCAGTAAATGGCAAACGG
TTTGGGGACAGCCTCCAGCTGGGCAGCTCCATCTCCTTCCTCTGTGATGAAGGCTTCCTTGGGACTCA
GGGCTCAGAGACCATCACCTGCGTCCTGAAGGAGGGCAGCGTGGTCTGGAACAGCGCTGTGCTGCGGT
GTGAAGCTCCCTGTGGTGGTCACCTGACTTCGCCCAGCGGCACCATCCTCTCTCCGGGCTGGCCTGGC
TTCTACAAGGATGCCTTGAGCTGTGCCTGGGTGATTGAGGCCCAGCCAGGCTACCCCATCAAAATCAC
CTTCGACAGGTTCAAAACCGAGGTCAACTATGACACCCTGGAAGTACGCGATGGGCGGACTTACTCAG
CGCCCTTGATCGGGGTTTACCACGGGACCCAGGTTCCCCAGTTCCTCATCAGCACCAGCAACTACCTC
TACCTCCTCTTCTCTACCGACAAGAGTCACTCGGACATCGGCTTCCAGCTCCGCTATGAGGCTATAAC
ACTGCAGTCAGACCACTGTCTGGATCCAGGAATCCCAGTAAATGGACAGCGTCATGGGAATGACTTCT
ACGTGGGCGCGCTGGTGACCTTCAGCTGTGACTCGGGCTACACATTAAGTGACGGGGAGCCTCTGGAG
TGTGAGCCCAACTTCCAGTGGAGCCGGGCCCTGCCCAGTTGTGAAGCTCTCTGTGGTGGCTTCATTCA
AGGCTCCAGTGGGACCATCTTGTCGCCAGGTTTCCCTGACTTCTACCCCAACAACTTGAACTGCACCT
GGATTATCGAAACATCTCATGGCAAGGGTGTGTTCTTCACTTTCCACACCTTCCACCTGGAAAGTGGC
CATGACTACCTCCTCATCACTGAGAACGGCAGCTTCACCCAGCCCCTGAGGCAGCTAACTGGATCTCG
GCTGCCAGCTCCCATCAGCGCTGGGCTCTATGGCAACTTCACTGCCCAGGTCCGCTTCATCTCTGATT
TCTCCATGTCATATGAAGGATTCAACATCACCTTCTCAGAGTACGACTTGGAGCCCTGTGAGGAGCCC
GAGGTCCCAGCCTACAGCATCCGGAAGGGCTTGCAGTTTGGCGTGGGCGACACCTTGACCTTCTCCTG
CTTCCCCGGGTACCGTCTGGAGGGCACCGCCCGCATCACGTGCCTGGGGGGCAGACGGCGCCTGTGGA
GCTCGCCTCTGCCAAGGTGTGTTGCTGAGTGTGGGAATTCAGTCACAGGCACTCAGGGTACTTTGCTG
TCCCCCAACTTTCCTGTGAACTACAATAACAATCATGAATGCATCTACTCCATCCAGACCCAGCCAGG
GAAGGGAATTCAGCTGAAAGCCAGGGCATTCGAACTCTCCGAAGGAGATGTCCTCAAGGTTTATGATG
GCAACAACAACTCCGCCCGTTTGCTGGGAGTTTTTAGCCATTCTGAGATGATGGGGGTGACTTTGAAC
AGCACATCCAGCAGTCTGTGGCTTGATTTCATCACTGATGCTGAAAACACCAGCAAGGGCTTTGAACT
GCACTTTTCCAGTTTTGAACTCATCAAATGTGAGGACCCAGGAACCCCCAAGTTTGGCTACAAGGTTC
ATGATGAAGGTCATTTTGCAGGGAGCTCCGTGTCCTTCAGCTGTGACCCTGGATACAGCCTGCGGGGT
AGTGAGGAGCTGCTGTGTCTGAGTGGAGAGCGCCGGACCTGGGACCGGCCTCTGCCCACCTGTGTCGC
CGAGTGTGGAGGGACAGTGAGAGGAGAGGTGTCGGGGCAGGTGCTGTCACCCGGGTATCCAGCTCCCT
ATGAACACAATCTCAACTGCATCTGGACCATCGAAGCAGAGGCCGGCTGCACCATTGGGCTACACTTC
CTGGTGTTTGACACAGAGGAGGTTCACGACGTGCTGCGCATCTGGGATGGGCCTGTGGAGAGCGGGGT
TCTGCTGAAGGAGCTGAGTGGCCCGGCCCTGCCCAAGGACCTGCATAGCACCTTCAACTCGGTCGTCC
TGCAGTTCAGCACTGACTTCTTCACCAGCAAGCAGGGCTTTGCCATTCAATTTTCAGGTTCCACAGCA
ACGTCCTGCAATGACCCTGGGATCCCGCAGAATGGGAGTCGGAGTGGTGACAGTTGGGAAGCCGGCGA
CTCCACAGTGTTCCAGTGTGACCCTGGCTACGCGCTGCAGGGAAGTGCAGAGATCAGCTGTGTGAAGA
TCGAGAACAGGTTCTTCTGGCAGCCCAGCCCGCCAACATGCATCGCTCCCTGCGGGGGAGACCTGACA
GGACCATCTGGAGTCATCCTCTCACCAAATTACCCAGAACCCTACCCGCCAGGCAAGGAGTGTGACTG
GAAAGTGACCGTCTCACCAGACTACGTCATCGCCCTGGTATTGTTCCCCAGCTTTAACCTGGAGCCTG
GCTATGACTTCCTCCATATCTACGACGGACGGGACTCTCTCAGCCCTCTCATAGGAAGCTTCTATGGC
TCCCAGCTCCCAGGCCGCATTGAAAGCAGCAGCAACAGCCTCTTCCTCGCCTTCCGCAGCGATGCATC
TGTGAGCAATGCTGGCTTCGTCATTGACTTCCCAGAAAACCCGCGGGAGTCATGTTTTGATCCTGGTT
CCATCAAGAACGGCACACGGGTGGGGTCCGACCTGAAGCTGGGCTCCTCCGTCACCTACTACTGCCAC
GGGGGCTACGAAGTTGAGGGCACCTCGACCCTGAGCTGCATCCTGGGGCCTGATGGGAAGCCCGTGTG
GAACAATCCCCGGCCAGTCTGCACAGCCCCCTGTGGGGGACAGTATGTGGGTTCGGACGGAGTGGTCT
TGTCCCCCAACTACCCCCAGAACTACACCAGTGGACAGATCTGCTTGTATTTTGTTACTGTGCCCAAG
GACTATGGTGTGGTGTTTGGCCAGTTCGCCTTCTTTCACACGGCCCTCAACGACGTGGTGGAGGTTCA
CGACGGCCACAGCCAGCACTCGCGGCTCCTCAGCTCCCTCTCGGGCTCCCATACAGGTGAATCACTGC
CCTTGGCCACCTCCAATCAAGTTCTCATTAAGTTCAGCGCCAAAGGCCTCGCACCAGCCAGAGGCTTC
CACTTTGTCTACCAAGCGGTTCCTCGAACCAGCGCCACGCAGTGCAGCTCTGTGCCGGAACCCCGCTA
TGGCAAGAGGCTGGGCAGTGACTTCTCGGTGGGGGCCATCGTCCGCTTCGAATGCAACTCCGGCTATG
CCCTGCAGGGGTCGCCAGAGATCGAGTGCCTCCCTGTGCCTGGGGCCTTGGCCCAATGGAATGTCTCA
GCGCCCACGTGTGTGGTGCCGTGTGGAGGCAACCTCACAGAGCGCAGGGGCACCATCCTGTCCCCTGG
CTTCCCAGAGCCGTACCTCAACAGCCTCAACTGTGTGTGGAAGATCGTGGTCCCCGAAGGCGCTGGCA
TCCAGATCCAAGTTGTCAGTTTTGTGACAGAGCAGAACTGGGACTCGCTGGAAGTATTTGATGGTGCA
GATAACACTGTAACCATGCTGGGGAGTTTCTCAGGAACAACCGTGCCTGCCCTTCTGAACAGCACCTC
CAACCAGCTCTACCTTCATTTCTACTCAGATATCAGCGTATCTGCAGCTGGCTTCCACTTGGAGTACA
AAACGGTGGGCCTGAGCAGTTGTCCGGAACCTGCTGTGCCCAGTAACGGGGTGAAGACTGGCGAGCGC
TACTTGGTGAATGATGTGGTGTCTTTCCAGTGTGAGCCGGGATATGCCCTCCAGGGCCACGCCCACAT
CTCCTGCATGCCCGGAACAGTGCGGCGATGGAACTACCCTCCTCCACTCTGTATTGCACAGTGTGGGG
GAACAGTGGAGGAGATGGAGGGGGTGATCCTGAGCCCCGGCTTCCCAGGCAACTACCCCAGTAACATG
GACTGCTCCTGGAAAATAGCACTGCCCGTGGGCTTTGGAGCTCACATCCAGTTCCTGAACTTCTCCAC
CGAGCCCAACCACGACTACATAGAAATCCGGAATGGCCCCTATGAGACCAGCCGCATGATGGGAAGAT
TCAGTGGAAGCGAGCTTCCAAGCTCCCTCCTCTCCACGTCCCACGAGACCACCGTGTATTTCCACAGC
GACCACTCCCAGAATCGGCCAGGATTCAAGCTGGAGTATCAGGCCTATGAACTTCAAGAGTGCCCAGA
CCCAGAGCCCTTTGCCAATGGCATTGTGAGGGGAGCTGGCTACAACGTGGGACAATCAGTGACCTTCG
AGTGCCTCCCGGGGTATCAATTGACTGGCCACCCTGTCCTCACGTGTCAACATGGCACCAACCGGAAC
TGGGACCACCCCCTGCCCAAGTGTGAAGTCCCTTGTGGCGGGAACATCACTTCTTCCAACGGCACTGT
GTACTCCCCGGGGTTCCCTAGCCCGTACTCCAGCTCCCAGGACTGTGTCTGGCTGATCACCGTGCCCA
TTGGCCATGGCGTCCGCCTCAACCTCAGCCTGCTGCAGACAGAGCCCTCTGGAGATTTCATCACCATC
TGGGATGGGCCACAGCAAACAGCACCACGGCTCGGCGTCTTCACCCGGAGCATGGCCAAGAAAACAGT
GCAGAGTTCATCCAACCAGGTCCTGCTCAAGTTCCACCGTGATGCAGCCACAGGGGGGATCTTCGCCA
TAGCTTTCTCCGCTTATCCACTCACCAAATGCCCTCCTCCCACCATCCTCCCCAACGCCGAAGTCGTC
ACAGAGAATGAAGAATTCAATATAGGTGACATCGTACGCTACAGATGCCTCCCTGGCTTTACCTTAGT
GGGGAATGAAATTCTGACCTGCAAACTTGGAACCTACCTGCAGTTTGAAGGACCACCCCCGATATGTG
AAGTGCACTGTCCAACAAATGAGCTTCTGACAGACTCCACAGGCGTGATCCTGAGCCAGAGCTACCCT
GGAAGCTATCCCCAGTTCCAGACCTGCTCTTGGCTGGTGAGAGTGGAGCCCGACTATAACATCTCCCT
CACAGTGGAGTACTTCCTCAGCGAGAAGCAATATGATGAGTTTGAGATTTTTGATGGTCCATCAGGAC
AGAGTCCTCTGCTGAAAGCCCTCAGTGGGAATTACTCAGCTCCCCTGATTGTCACCAGCTCAAGCAAC
TCTGTGTACCTGCGTTGGTCATCTGATCACGCCTACAATCGGAAGGGCTTCAAGATCCGCTATTCAGC
CCTTTCCTGTGGGCTTCCTGAGGCCCCCAAGAATGGAATGGTGTTTGGCAAGGAGTACACAGTGGGAA
CCAAGGCCATGTACAGCTGCAGTGAAGGCTACCACCTCCAGGCAGGCGCTGAGGCCACTGCAGAGTGT
CTGGACACAGGCCTATGGAGCAACCGCAATGTCCCACCACAGTGTGTCCCTGTGACTTGTCCTGATGT
CAGTAGCATCAGCGTGGAGCATGGCCGATGGAGGCTTATCTTTGAGACACAGTATCAGTTCCAGGCCC
AGCTGATGCTCATCTGTGACCCTGGCTACTACTATACTGGCCAAAGGGTCATCCGCTGTCAGGCCAAT
GGCAAATGGAGCCTCGGGGACTCTACGCCCACCTGCCGAATCATCTCCTGTGGAGAGCTCCCGATTCC
CCCCAATGGCCACCGCATCGGAACACTGTCTGTCTACGGGGCAACAGCCATCTTCTCCTGCAATTCCG
GATACACACTGGTGGGCTCCAGGGTGCGTGAGTGCATGGCCAATGGGCTCTGGAGTGGCTCTGAAGTC
CGCTGCCTTGCTGGACACTGTGGGACTCCTGAGCCCATTGTCAACGGACACATCAATGGGGAGAACTA
CAGCTACCGGGGCAGTGTGGTGTACCAATGCAATGCTGGCTTCCGCCTGATCGGCATGTCTGTGCGCA
TCTGCCAGCAGGATCATCACTGGTCGGGCAAGACCCCTTTCTGTGTGCCAATTACCTGTGGACACCCA
GGCAACCCTGTCAACGGCCTCACTCAGGGTAACCAGTTTAACCTCAACGATGTGGTCAAGTTTGTTTG
CAACCCTGGGTATATGGCTGAGGGGGCTGCTAGGTCCCAATGCCTGGCCAGCGGGCAATGGAGTGACA
TGCTGCCCACCTGCAGAATCATCAACTGTACAGATCCTGGACACCAAGAAAATAGTGTTCGTCAGGTC
CACGCCAGCGGCCCGCACAGGTTCAGCTTCGGCACCACTGTGTCTTACCGGTGCAACCACGGCTTCTA
CCTCCTGGGCACCCCAGTGCTCAGCTGCCAGGGAGATGGCACATGGGACCGTCCCCGCCCCCAGTGTC
TCCTGGTGTCCTGTGGCCATCCGGGCTCCCCGCCTCACTCCCAGATGTCTGGAGACAGTTATACTGTG
GGAGCAGTGGTGCGGTACAGCTGCATCGGCAAGCGTACTCTGGTGGGAAACAGCACCCGCATGTGTGG
GCTGGATGGACACTGGACTGGCTCCCTCCCTCACTGCTCAGGAACCAGCGTGGGAGTTTGCGGTGACC
CTGGGATCCCGGCTCATGGCATCCGTTTGGGGGACAGCTTTGATCCAGGCACTGTGATGCGCTTCAGC
TGTGAAGCTGGCCACGTGCTCCGGGGATCGTCAGAGCGCACCTGTCAAGCCAATGGCTCGTGGAGCGG
CTCGCAGCCTGAGTGTGGAGTGATCTCTTGTGGGAACCCTGGGACTCCAAGTAATGCCCGAGTTGTGT
TCAGTGATGGCCTGGTTTTCTCCAGCTCTATCGTCTATGAGTGCCGGGAAGGATACTACGCCACAGGC
CTGCTCAGCCGTCACTGCTCGGTCAATGGTACCTGGACAGGCAGTGACCCTGAGTGCCTCGTCATAAA
CTGTGGTGACCCTGGGATTCCAGCCAATGGCCTTCGGCTGGGCAATGACTTCAGGTACAACAAAACTG
TGACATATCAGTGTGTCCCTGGCTATATGATGGAGTCACATAGAGTATCTGTGCTGAGCTGCACCAAG
GACCGGACATGGAATGGAACCAAGCCCGTCTGCAAAGCTCTCATGTGCAAGCCACCTCCGCTCATCCC
CAATGGGAAGGTGGTGGGGTCTGACTTCATGTGGGGCTCAAGTGTGACTTATGCCTGCCTGGAGGGGT
ACCAGCTCTCCCTGCCCGCGGTGTTCACCTGTGAGGGAAATGGGTCCTGGACCGGAGAGCTGCCTCAG
TGTTTCCCTGTGTTCTGCGGGGATCCTGGTGTCCCGTCCCGTGGGAGGAGAGAGGACCGAGGCTTCTC
CTACAGGTCATCTGTCTCCTTCTCCTGCCATCCCCCTCTGGTGCTGGTGGGCTCTCCACGCAGGTTTT
GCCAGTCAGATGGGACATGGAGTGGCACCCAGCCCAGCTGCATAGATCCGACCCTGACCACGTGTGCG
GACCCTGGTGTGCCACAGTTTGGGATACAGAACAATTCTCAGGGCTACCAGGTTGGAAGCACAGTCCT
CTTCCGTTGTCAAAAAGGCTACCTGCTTCAGGGCTCCACCACCAGGACCTGCCTCCCAAACCTGACCT
GGAGTGGAACCCCACCTGACTGTGTCCCCCACCACTGCAGGCAGCCAGAGACGCCAACGCATGCCAAC
GTCGGGGCCCTGGATTTGCCCTCCATGGGCTACACGCTCATCTACTCCTGCCAGGAGGGCTTCTCCCT
CAAGGGTGGCTCCGAGCACCGCACCTGCAAGGCGGATGGCAGCTGGACAGGCAAGCCGCCCATCTGCC
TGGAGGTCCGGCCCAATGGGAGACCCATCAACACTGCCCGGGAGCCACCGCTCACCCAAGCCTTGATT
CCTGGGGATGTTTTTGCCAAGAATTCCCTGTGGAAAGGGGCCTATGAATACCAGGGGAAGAAGCAGCC
AGCCATGCTCAGAGTGACTGGCTTCCAAGTTGCCAACAGCAAGGTCAATGCCACCATGATCGACCACA
GTGGCGTGGAGCTGCACTTGGCTGGAACTTACAAGAAAGAAGATTTTCATCTCCTACTCCAGGTGTAC
CAGATTACAGGGCCTGTGGAGATCTTTATGAATAAGTTCAAAGATGATCACTGGGCTTTAGATGGCCA
TGTCTCGTCAGAGTCCTCCGGAGCCACCTTCATCTACCAAGGCTCTGTCAAGGGCCAAGGCTTTGGGC
AGTTCGGCTTTCAAAGACTGGACCTCAGGCTGCTGGAGTCAGACCCCGAGTCCATTGGCCGCCACTTT
GCTTCCAACAGCAGCTCAGTGGCAGCCGCGATCCTGGTGCCTTTCATCGCCCTCATTATTGCGGGCTT
CGTGCTCTATCTCTACAAGCACAGGAGAAGACCCAAAGTTCCTTTCAATGGCTATGCTGGCCACGAGA
ACACCAATGTTCGGGCCACATTTGAGAACCCAATGTACGACCGCAACATCCAGCCCACAGACATCATG
GCCAGCGAGGCGGAGTTCACAGTCAGCACAGTGTGCACAGCAGTATAGCCACCCGGCCTGGC

| | | | |
|---|---|---|---|
| NOV4e, CG50377-05 | SEQ ID NO: 40 | 3483 aa | MW at 379077.1kD |
| Protein Sequence | | | |

GQNCTFQLHGPNGTVESPGFPYGYPNYANCTWTITAEEQHRIQLVFQSFALEEDFDVLSVFDGPPQPE
NLRTRLTGFQLPATIVSAATTLSLRLISDYAVSAQGFHATYEVLPSHTCGNPGRLPNGIQQGSTFNLG
DKVRYSCNLGFFLEGHAVLTCHAGSENSATWDFPLPSCRADDACGGTLRGQSGIISSPHFPSEYHNNA
DCTWTILAELGDTIALVFIDFQLEDGYDFLEVTGTEGSSLWFTGASLPAPVISSKNWLRLHFTSDGNH
RQRGFSAQYQVKKQIELKSRGVKLMPSKDNSQKTSWTQVGVSQGHNMCPDPGIPERGKREJGSDFRLG
SSVQFTCNEGYDLQGSKRITCMKVSDMFAAWSDHRPVCEARMCDAHLRGPSGIITSPNFPIQYDNNAH
CVWIITALNPSKVIKLAFEEFDLERGYDTLTVGDGGQDGDQKTVLYMLTGTSVPDLIVSTNHQMWLLF
QTDGSGSSLGFKASYEEIEQGSCGDPGIPAYGRREGSRFRHGDTLKFECQPAFELVGQKAITCQKNNQ
WSAKKPGCVCSCFFNFTSPSGVVLSPNYPEDYGNHLHCVWLILARPESRIHLAFNDIDVEPQFDFLVI
KDGATAEAPVLGTFSGNQLPSSITSSGHVARLEFQTDHSTGKRGFNITFTSESSNECPDPGVPVNGKR
FGDSLQLGSSISFLCDEGFLGTQGSETITCVLKEGSVVWNSAVLRCEAPCGGHLTSPSGTILSPGWPG
FYKDALSCAWVIEAQPGYPIKITFDRFKTEVNYDTLEVRDGRTYSAPLIGVYHGTQVPQFLISTSNYL
YLLFSTDKSHSDIGFQLRYEAITLQSDHCLDPGIPVNGQRHGNDFYVGALVTFSCDSGYTLSDGEPLE
CEPNFQWSRALPSCEALCGGFIQGSSGTILSPGFPDFYPNNLNCTWIIETSHGKGVFFTFHTFHLESG
HDYLLITENGSFTQPLRQLTGSRLPAPISAGLYGNFTAQVRFISDFSMSYEGFNITFSEYDLEPCEEP
EVPAYSIRKGLQFGVGDTLTFSCFPGYRLEGTARITCLGGRRRLWSSPLPRCVAECGNSVTGTQGTLL
SPNFPVNYNNNHECIYSIQTQPGKGIQLKARAFELSEGDVLKVYDGNNNSARLLGVFSHSEMMGVTLN
STSSSLWLDFITDAENTSKGFELHFSSFELIKCEDPGTPKFGYKVHDEGHFAGSSVSFSCDPGYSLRG
SEELLCLSGERRTWDRPLPTCVAECGGTVRGEVSGQVLSPGYPAPYEHNLNCIWTIEAEAGCTIGLHF
LVFDTEEVHDVLRIWDGPVESGVLLKELSGPALPKDLHSTFNSVVLQFSTDFFTSKQGFAIQFSGSTA
TSCNDPGIPQNGSRSGDSWEAGDSTVFQCDPGYALQGSAEISCVKIENRFFWQPSPPTCIAPCGGDLT
GPSGVILSPNYPEPYPPGKECDWKVTVSPDYVIALVLFPSFNLEPGYDFLHIYDGRDSLSPLIGSFYG
SQLPGRIESSSNSLFLAFRSDASVSNAGFVIDFPENPRESCFDPGSIKNGTRVGSDLKLGSSVTYYCH
GGYEVEGTSTLSCILGPDGKPVWNNPRPVCTAPCGGQYVGSDGVVLSPNYPQNYTSGQICLYFVTVPK
DYGVVFGQFAFFHTALNDVVEVHDGHSQHSRLLSSLSGSHTGESLPLATSNQVLIKFSAKGLAPARGF
HFVYQAVPRTSATQCSSVPEPRYGKRLGSDFSVGAIVRFECNSGYALQGSPEIECLPVPGALAQWNVS
APTCVVPCGGNLTERRGTILSPGFPEPYLNSLNCVWKIVVPEGAGIQIQVVSFVTEQNWDSLEVFDGA
DNTVTMLGSFSGTTVPALLNSTSNQLYLHFYSDISVSAAGFHLEYKTVGLSSCPEPAVPSNGVKTGER
YLVNDVVSFQCEPGYALQGHAHISCMPGTVRRWNYPPPLCIAQCGGTVEEMEGVILSPGFPGNYPSNM
DCSWKIALPVGFGAHIQFLNFSTEPNHDYIEIRNGPYETSRMMGRFSGSELPSSLLSTSHETTVYFHS
DHSQNRPGFKLEYQAYELQECPDPEPFANGIVRGAGYNVGQSVTFECLPGYQLTGHPVLTCQHGTNRN
WDHPLPKCEVPCGGNITSSNGTVYSPGFPSPYSSSQDCVWLITVPIGHGVRLNLSLLQTEPSGDFITI
WDGPQQTAPRLGVFTRSMAKKTVQSSSNQVLLKFHRDAATGGIFAIAFSAYPLTKCPPPTILPNAEVV
TENEEFNIGDIVRYRCLPGFTLVGNEILTCKLGTYLQFEGPPPICEVHCPTNELLTDSTGVILSQSYP
GSYPQFQTCSWLVRVEPDYNISLTVEYFLSEKQYDEFEIFDGPSGQSPLLKALSGNYSAPLIVTSSSN
SVYLRWSSDHAYNRKGFKIRYSALSCGLPEAPKNGMVFGKEYTVGTKAMYSCSEGYHLQAGAEATAEC
LDTGLWSNRNVPPQCVPVTCPDVSSISVEHGRWRLIFETQYQFQAQLMLICDPGYYYTGQRVIRCQAN
GKWSLGDSTPTCRIISCGELPIPPNGHRIGTLSVYGATAIFSCNSGYTLVGSRVRECMANGLWSGSEV
RCLAGHCGTPEPIVNGHINGENYSYRGSVVYQCNAGFRLIGMSVRICQQDHHWSGKTPFCVPITCGHP
GNPVNGLTQGNQFNLNDVVKFVCNPGYMAEGAARSQCLASGQWSDMLPTCRIINCTDPGHQENSVRQV
HASGPHRFSFGTTVSYRCNHGFYLLGTPVLSCQGDGTWDRPRPQCLLVSCGHPGSPPHSQMSGDSYTV
GAVVRYSCIGKRTLVGNSTRMCGLDGHWTGSLPHCSGTSVGVCGDPGIPAHGIRLGDSFDPGTVMRFS
CEAGHVLRGSSERTCQANGSWSGSQPECGVISCGNPGTPSNARVVFSDGLVFSSSIVYECREGYYATG
LLSRHCSVNGTWTGSDPECLVINCGDPGIPANGLRLGNDFRYNKTVTYQCVPGYMMESHRVSVLSCTK
DRTWNGTKPVCKALMCKPPPLIPNGKVVGSDFMWGSSVTYACLEGYQLSLPAVFTCEGNGSWTGELPQ
CFPVFCGDPGVPSRGRREDRGFSYRSSVSFSCHPPLVLVGSPRRFCQSDGTWSGTQPSCIDPTLTTCA
DPGVPQFGIQNNSQGYQVGSTVLFRCQKGYLLQGSTTRTCLPNLTWSGTPPDCVPHHCRQPETPTHAN
VGALDLPSMGYTLIYSCQEGFSLKGGSEHRTCKADGSWTGKPPICLEVRPNGRPINTAREPPLTQALI
PGDVFAKNSLWKGAYEYQGKKQPAMLRVTGFQVANSKVNATMIDHSGVELHLAGTYKKEDFHLLLQVY
QITGPVEIFMNKFKDDHWALDGHVSSESSGATFIYQGSVKGQGFGQFGFQRLDLRLLESDPESIGRHF
ASNSSSVAAAILVPFIALIIAGFVLYLYKHRRRPKVPFNGYAGHENTNVRATFENPMYDRNIQPTDIM
ASEAEFTVSTVCTAV

| | | |
|---|---|---|
| NOV4f, CG50377-06 | SEQ ID NO: 41 | 12901 bp |
| DNA Sequence | ORF Start: ATG at 889 | ORF Stop: TAG at 10279 |

GGCCAGAACTGCACGTTCCAACTGCACGGTCCCAATGGGACAGTTGAGAGCCCAGGGTTCCCATATGG
CTACCCCAATTACGCCAACTGCACGTGGACCATCACCGCGGAAGAGCAGCACAGAATCCAGCTTGTGT
TCCAGTCCTTTGCCCTGGAAGAGGACTTTGATGTCCTGTCGGTGTTTGATGGTCCACCCCAGCCAGAG
AATCTGCGTACGAGGCTCACAGGCTTTCAGCTGCCAGCCACCATTGTTAGTGCAGCCACCACCCTCTC
TCTGCGCCTCATCAGCGACTATGCAGTCAGTGCCCAAGGCTTCCACGCCACCTATGAAGTTCTCCCCA
GCCACACATGTGGGAACCCAGGGAGGCTGCCCAATGGCATCCAGCAGGGTTCAACCTTCAACCTCGGT
GACAAGGTCCGCTACAGCTGCAACCTTGGCTTCTTCCTGGAGGGCCACGCCGTGCTCACCTGCCACGC
TGGCTCTGAGAACAGCGCCACGTGGGACTTCCCCCTGCCTTCCTGCAGAGCTGATGATGCCTGTGGTG
GGACCCTGCGGGGCCAGAGTGGCATCATCTCCAGCCCCCACTTCCCCTCGGAGTACCATAACAATGCC
GACTGCACATGGACCATCCTGGCTGAGCTGGGGGACACCATCGCCCTGGTGTTTATTGACTTCCAGCT
GGAGGATGGTTACGACTTTCTGGAAGTCACTGGGACAGAAGGCTCCTCCCTCTGGTTCACCGGAGCCA
GCCTCCCAGCCCCCGTTATCAGCAGCAAGAACTGGCTGCGACTGCACTTCACATCGGATGGCAACCAC
CGGCAGCGCGGATTCAGTGCCCAATACCAAGTCAAGAAGCAAATTGAGTTGAAGTCTCGAGGTGTGAA
GCTGATGCCCAGCAAAGACAACAGCCAGAAGACGTCTGTGGTAACTCAGGTTGGTGTGTCCCAAGGAC
ATAATATGTGTCCAGACCCTGGCATACCCGAAAGGGGCAAAAGACTAGGCTCGGATTTCAGGTTAGGA
TCCAGCGTCCAGTTCACCTGCAACGAGGGCTATGACCTGCAAGGGTCCAAGCGGATCACCTGTATGAA
AGTGAGCGACATGTTTGCGGCCTGGAGCGACCACAGGCCAGTCTGCCGAGCCCGCATGTGTGATGCCC
ACCTTCGAGGCCCCTCGGGCATCATCACCTCCCCCAATTTCCCCATTCAGTATGACAACAATGCACAC
TGTGTGTGGATCATCACAGCACTCAACCCCTCCAAGGTAATCAAGCTCGCCTTTGAGGAGTTTGATTT
GGAGAGGGGCTATGACACCCTGACGGTCGGTGATGGTGGTCAGGATGGGGACCAGAAGACAGTTCTCT
ACATGCTGACAGGTACATCGGTCCCGGATCTCATTGTCAGCACCAATCATCAAATGTGGCTCCTCTTC
CAGACTGATGGCAGTGGCAGTTCCCTGGGATTCAAGGCTTCTTATGAAGAGATCGAGCAGGGCAGTTG
CGGTGACCCTGGCATACCTGCATATGGCCGGAGGGAAGGCTCCCGGTTTCGCCACGGTGACACACTCA
AGTTTGAGTGCCAGCCCGCCTTTGAGCTGGTGGGACAGAAGGCAATCACATGCCAAAAGAATAACCAA
TGGTCGGCTAAGAAGCCAGGCTGCGTGTGTTCCTGCTTCTTCAACTTCACCAGCCCGTCTGGGGTTGT
CCTGTCTCCCAACTACCCAGAGGACTATGGCAACCACCTCCACTGTGTCTGGCTCATCCTGGCCAGGC
CTGAGAGCCGCATCCACCTGGCCTTCAACGACATTGACGTGGAGCCTCAGTTTGATTTCCTGGTCATC
AAGGATGGGGCCACCGCCGAGGCGCCCGTCCTGGGCACCTTCTCAGGAAACCAGCTTCCCTCCTCCAT
CACAAGCAGTGGCCACGTGGCCCGTCTCGAGTTCCAGACTGACCACTCCACAGGGAAGAGGGGCTTCA
ACATCACTTTTACCAGTGAGTCCTCCAACGAGTGCCCGGATCCTGGCGTTCCAGTAAATGGCAAACGG
TTTGGGGACAGCCTCCAGCTGGGCAGCTCCATCTCCTTCCTCTGTGATGAAGGCTTCCTTGGGACTCA
GGGCTCAGAGACCATCACCTGCGTCCTGAAGGAGGGCAGCGTGGTCTGGAACAGCGCTGTGCTGCGGT
GTGAAGCTCCCTGTGGTGGTCACCTGACTTCGCCCAGCGGCACCATCCTCTCTCCGGGCTGGCCTGGC
TTCTACAAGGATGCCTTGAGCTGTGCCTGGGTGATTGAGGCCCAGCCAGGCTACCCCATCAAAATCAC
CTTCGACAGGTTCAAAACCGAGGTCAACTATGACACCCTGGAAGTACGCGATGGGCGGACTTACTCAG
CGCCCTTGATCGGGGTTTACCACGGGACCCAGGTTCCCCAGTTCCTCATCAGCACCAGCAACTACCTC
TACCTCCTCTTCTCTACCGACAAGAGTCACTCGGACATCGGCTTCCAGCTCCGCTATGAGGCTATAAC
ACTGCAGTCAGACCACTGTCTGGATCCAGGAATCCCAGTAAATGGACAGCGTCATGGGAATGACTTCT
ACGTGGGCGCGCTGGTGACCTTCAGCTGTGACTCGGGCTACACATTAAGTGACGGGGAGCCTCTGGAG
TGTGAGCCCAACTTCCAGTGGAGCCGGGCCCTGCCCAGTTGTGAAGCTCTCTGTGGTGGCTTCATTCA
AGGCTCCAGTGGGACCATCTTGTCGCCAGGTTTCCCTGACTTCTACCCCAACAACTTGAACTGCACCT
GGATTATCGAAACATCTCATGGCAAGGGTGTGTTCTTCACTTTCCACACCTTCCACCTGGAAAGTGGC
CATGACTACCTCCTCATCACTGAGAACGGCAGCTTCACCCAGCCCCTGAGGCAGCTAACTGGATCTCG
GCTGCCAGCTCCCATCAGCGCTGGGCTCTATGGCAACTTCACTGCCCAGGTCCAATTCATCTCTGATT
TCTCCATGTCATATGAAGGATTCAACATCACCTTCTCAGAGTACGACTTGGAGCCCTGTGAGGAGCCC
GAGGTCCCAGCCTACAGCATCCGGAAGGGCTTGCAGTTTGGCGTGGGCGACACCTTGACCTTCTCCTG
CTTCCCCGGGTACCGTCTGGAGGGCACCGCCCGCATCACGTGCCTGGGGGGCAGACGGCGCCTGTGGA
GCTCGCCTCTGCCAAGGTGTGTTGCTGAGTGTGGGAATTCAGTCACAGGCACTCAGGGTACTTTGCTG
TCCCCCAACTTTCCTGTGAACTACAATAACAATCATGAATGCATCTACTCCATCCAGACCCAGCCAGG
GAAGGGAATTCAGCTGAAAGCCAGGGCATTCGAACTCTCCGAAGGAGATGTCCTCAAGGTTTATGATG
GCAACAACAACTCCGCCCGTTTGCTGGGAGTTTTTAGCCATTCTGAGATGATGGGGGTGACTTTGAAC
AGCACATCCAGCAGTCTGTGGCTTGATTTCATCACTGATGCTGAAAACACCAGCAAGGGCTTTGAACT
GCACTTTTCCAGTTTTGAACTCATCAAATGTGAGGACCCAGGAACCCCCAAGTTTGGCTACAAGGTTC
ATGATGAAGGTCATTTTGCAGGGAGCTCCGTGTCCTTCAGCTGTGACCCTGGATACAGCCTGCGGGGT
AGTGAGGAGCTGCTGTGTCTGAGTGGAGAGCGCCGGACCTGGGACCGGCCTCTGCCCACCTGTGTCGC
CGAGTGTGGAGGGACAGTGAGAGGAGAGGTGTCGGGGCAGGTGCTGTCACCCGGGTATCCAGCTCCCT
ATGAACACAATCTCAACTGCATCTGGACCATCGAAGCAGAGGCCGGCTGCACCATTGGGCTACACTTC
CTGGTGTTTGACACAGAGGAGGTTCACGACGTGCTGCGCATCTGGGATGGGCCTGTGGAGAGCGGGGT
TCTGCTGAAGGAGCTGAGTGGCCCGGCCCTGCCCAAGGACCTGCATAGCACCTTCAACTCGGTCGTCC
TGCAGTTCAGCACTGACTTCTTCACCAGCAAGCAGGGCTTTGCCATTCAATTTTCAGGTTCCACAGCA
ACGTCCTGCAATGACCCTGGGATCCCGCAGAATGGGAGTCGGAGTGGTGACAGTTGGGAAGCCGGCGA
CTCCACAGTGTTCCAGTGTGACCCTGGCTACGCGCTGCAGGGAAGTGCAGAGATCAGCTGTGTGAAGA
TCGAGAACAGGTTCTTCTGGCAGCCCAGCCCGCCAACATGCATCGCTCCCTGCGGGGGAGACCTGACA
GGACCATCTGGAGTCATCCTCTCACCAAATTACCCAGAACCCTACCCGCCAGGCAAGGAGTGTGACTG
GAAAGTGACCGTCTCACCAGACTACGTCATCGCCCTGGTATTGTTCCCCAGCTTTAACCTGGAGCCTG
GCTATGACTTCCTCCATATCTACGACGGACGGGACTCTCTCAGCCCTCTCATAGGAAGCTTCTATGGC
TCCCAGCTCCCAGGCCGCATTGAAAGCAGCAGCAACAGCCTCTTCCTCGCCTTCCGCAGCGATGCATC
TGTGAGCAATGCTGGCTTCGTCATTGACTTCCCAGAAAACCCGCGGGAGTCATGTTTTGATCCTGGTT
CCATCAAGAACGGCACACGGGTGGGGTCCGACCTGAAGCTGGGCTCCTCCGTCACCTACTACTGCCAC
GGGGGCTACGAAGTTGAGGGCACCTCGACCCTGAGCTGCATCCTGGGGCCTGATGGGAAGCCCGTGTG
GAACAATCCCCGGCCAGTCTGCACAGCCCCCTGTGGGGGACAGTATGTGGGTTCGGACGGAGTGGTCT
TGTCCCCCAACTACCCCCAGAACTACACCAGTGGACAGATCTGCTTGTATTTTGTTACTGTGCCCAAG
GACTATGGTGTGGTGTTTGGCCAGTTCGCCTTCTTTCACACGGCCCTCAACGACGTGGTGGAGGTTCA
CGACGGCCACAGCCAGCACTCGCGGCTCCTCAGCTCCCTCTCGGGCTCCCATACAGGTGGAGAATCAC
TGCCCTTGGCCACCTCCAATCAAGTTCTCATTAAGTTCAGCGCCAAAGGCCTCGCACCAGCCAGAGGC
TTCCACTTTGTCTACCAAGCGGTTCCTCGAACCAGCGCCACGCAGTGCAGCTCTGTGCCGGAACCCCG
CTATGGCAAGAGGCTGGGCAGTGACTTCTCGGTGGGGGCCATCGTCCGCTTCGAATGCAACTCCGGCT
ATGCCCTGCAGGGGTCGCCAGAGATCGAGTGCCTCCCTGTGCCTGGGGCCTTGGCCCAATGGAATGTC
TCAGCGCCCACGTGTGTGGTGCCGTGTGGAGGCAACCTCACAGAGCGCAGGGGCACCATCCTGTCCCC
TGGCTTCCCAGAGCCGTACCTCAACAGCCTCAACTGTGTGTGGAAGATCGTGGTCCCCGAAGGCGCTG
GCATCCAGATCCAAGTTGTCAGTTTTGTGACAGAGCAGAACTGGGACTCGCTGGAAGTATTTGATGGT
GCAGATAACACTGTAACCATGCTGGGGAGTTTCTCAGGAACAACCGTGCCTGCCCTTCTGAACAGCAC
CTCCAACCAGCTCTACCTTCATTTCTACTCAGATATCAGCGTATCTGCAGCTGGCTTCCACTTGGAGT
ACAAAACGGTGGGCCTGAGCAGTTGTCCGGAACCTGCTGTGCCCAGTAACGGGGTGAAGACTGGCGAG
CGCTACTTGGTGAATGATGTGGTGTCTTTCCAGTGTGAGCCGGGATATGCCCTCCAGGGCCACGCCCA
CATCTCCTGCATGCCCGGAACAGTGCGGCGATGGAACTACCCTCCTCCACTCTGTATTGCACAGTGTG
GGGGAACAGTGGAGGAGATGGAGGGGGTGATCCTGAGCCCCGGCTTCCCAGGCAACTACCCCAGTAAC
ATGGACTGCTCCTGGAAAATAGCACTGCCCGTGGGCTTTGGAGCTCACATCCAGTTCCTGAACTTCTC
CACCGAGCCCAACCACGACTACATAGAAATCCGGAATGGCCCCTATGAGACCAGCCGCATGATGGGAA
GATTCAGTGGAAGCGAGCTTCCAAGCTCCCTCCTCTCCACGTCCCACGAGACCACCGTGTATTTCCAC
AGCGACCACTCCCAGAATCGGCCAGGATTCAAGCTGGAGTATCAGGCCTATGAACTTCAAGAGTGCCC
AGACCCAGAGCCCTTTGCCAATGGCATTGTGAGGGGAGCTGGCTACAACGTGGGACAATCAGTGACCT
TCGAGTGCCTCCCGGGGTATCAATTGACTGGCCACCCTGTCCTCACGTGTCAACATGGCACCAACCGG
AACTGGGACCACCCCCTGCCCAAGTGTGAAGTCCCTTGTGGCGGGAACATCACTTCTTCCAACGGCAC
TGTGTACTCCCCGGGGTTCCCTAGCCCGTACTCCAGCTCCCAGGACTGTGTCTGGCTGATCACCGTGC
CCATTGGCCATGGCGTCCGCCTCAACCTCAGCCTGCTGCAGACAGAGCCCTCTGGAGATTTCATCACC
ATCTGGGATGGGCCACAGCAAACAGCACCACGGCTCGGCGTCTTCACCCGGAGCATGGCCAAGAAAAC
AGTGCAGAGTTCATCCAACCAGGTCCTGCTCAAGTTCCACCGTGATGCAGCCACAGGGGGGATCTTCG
CCATAGCTTTCTCCGCTTATCCACTCACCAAATGCCCTCCTCCCACCATCCTCCCCAACGCCGAAGTC
GTCACAGAGAATGAAGAATTCAATATAGGTGACATCGTACGCTACAGATGCCTCCCTGGCTTTACCTT
AGTGGGGAATGAAATTCTGACCTGCAAACTTGGAACCTACCTGCAGTTTGAAGGACCACCCCCGATAT
GTGAAGTGCACTGTCCAACAAATGAGCTTCTGACAGACTCCACAGGCGTGATCCTGAGCCAGAGCTAC
CCTGGAAGCTATCCCCAGTTCCAGACCTGCTCTTGGCTGGTGAGAGTGGAGCCCGACTATAACATCTC
CCTCACAGTGGAGTACTTCCTCAGCGAGAAGCAATATGATGAGTTTGAGATTTTTGATGGTCCATCAG
GACAGAGTCCTCTGCTGAAAGCCCTCAGTGGGAATTACTCAGCTCCCCTGATTGTCACCAGCTCAAGC
AACTCTGTGTACCTGCGTTGGTCATCTGATCACGCCTACAATCGGAAGGGCTTCAAGATCCGCTATTC
AGCCCCTTACTGCAGCCTGCCCAGGGCTCCACTCCATGGCTTCATCCTAGGCCAGACCAGCACCCAGC
CCGGGGGCTCCATCCACTTTGGCTGCAACGCCGGCTACCGCCTGGTGGGACACAGCATGGCCATCTGT
ACCCGGCACCCCCAGGGCTACCACCTGTGGAGCGAAGCCATCCCTCTCTGTCAAGCTCTTTCCTGTGG
GCTTCCTGAGGCCCCCAAGAATGGAATGGTGTTTGGCAAGGAGTACACAGTGGGAACCAAGGCCATGT
ACAGCTGCAGTGAAGGCTACCACCTCCAGGCAGGCGCTGAGGCCACTGCAGAGTGTCTGGACACAGGC
CTATGGAGCAACCGCAATGTCCCACCACAGTGTGTCCCTGTGACTTGTCCTGATGTCAGTAGCATCAG
CGTGGAGCATGGCCGATGGAGGCTTATCTTTGAGACACAGTATCAGTTCCAGGCCCAGCTGATGCTCA
TCTGTGACCCTGGCTACTACTATACTGGCCAAAGGGTCATCCGCTGTCAGGCCAATGGCAAATGGAGC
CTCGGGGACTCTACGCCCACCTGCCGAATCATCTCCTGTGGAGAGCTCCCGATTCCCCCCAATGGCCA
CCGCATCGGAACACTGTCTGTCTACGGGGCAACAGCCATCTTCTCCTGCAATTCCGGATACACACTGG
TGGGCTCCAGGGTGCGTGAGTGCATGGCCAATGGGCTCTGGAGTGGCTCTGAAGTCCGCTGCCTTGCT
GGACACTGTGGGACTCCTGAGCCCATTGTCAACGGACACATCAATGGGGAGAACTACAGCTACCGGGG
CAGTGTGGTGTACCAATGCAATGCTGGCTTCCGCCTGATCGGCATGTCTGTGCGCATCTGCCAGCAGG
ATCATCACTGGTCGGGCAAGACCCCTTTCTGTGTGCTGGTGTCCTGTGGCCATCCGGGCTCCCCGCCT
CACTCCCAGATGTCTGGAGACAGTTATACTGTGGGAGCAGTGGTGCGGTACAGCTGCATCGGCAAGCG
TACTCTGGTGGGAAACAGCACCCGCATGTGTGGGCTGGATGGACACTGGACTGGCTCCCTCCCTCACT
GCTCAGGAACCAGCGTGGGAGTTTGCGGTGACCCTGGGATCCCGGCTCATGGCATCCGTTTGGGGGAC
AGCTTTGATCCAGGCACTGTGATGCGCTTCAGCTGTGAAGCTGGCCACGTGCTCCGGGGATCGTCAGA
GCGCACCTGTCAAGCCAATGGCTCGTGGAGCGGCTCGCAGCCTGAGTGTGGAGTGATCTCTTGTGGGA
ACCCTGGGACTCCAAGTAATGCCCGAGTTGTGTTCAGTGATGGCCTGGTTTTCTCCAGCTCTATCGTC
TATGAGTGCCGGGAAGGATACTACGCCACAGGCCTGCTCAGCCGTCACTGCTCGGTCAATGGTACCTG
GACAGGCAGTGACCCTGAGTGCCTCGTCATAAACTGTGGTGACCCTGGGATTCCAGCCAATGGCCTTC
GGCTGGGCAATGACTTCAGGTACAACAAAACTGTGACATATCAGTGTGTCCCTGGCTATATGATGGAG
TCACATAGAGTATCTGTGCTGAGCTGCACCAAGGACCGGACATGGAATGGAACCAAGCCCGTCTGCAA
AGCTCTCATGTGCAAGCCACCTCCGCTCATCCCCAATGGGAAGGTGGTGGGGTCTGACTTCATGTGGG
GCTCAAGTGTGACTTATGCCTGCCTGGAGGGGTACCAGCTCTCCCTGCCCGCGGTGTTCACCTGTGAG
GGAAATGGGTCCTGGACCGGAGAGCTGCCTCAGTGTTTCCCTGTGTTCTGCGGGGATCCTGGTGTCCC
GTCCCGTGGGAGGAGAGAGGACCGAGGCTTCTCCTACAGGTCATCTGTCTCCTTCTCCTGCCATCCCC
CTCTGGTGCTGGTGGGCTCTCCACGCAGGTTTTGCCAGTCAGATGGGACATGGAGTGGCACCCAGCCC
AGCTGCATAGATCCGACCCTGACCACGTGTGCGGACCCTGGTGTGCCACAGTTTGGGATACAGAACAA
TTCTCAGGGCTACCAGGTTGGAAGCACAGTCCTCTTCCGTTGTCAAAAAGGCTACCTGCTTCAGGGCT
CCACCACCAGGACCTGCCTCCCAAACCTGACCTGGAGTGGAACCCCACCTGACTGTGTCCCCCACCAC
TGCAGGCAGCCAGAGACGCCAACGCATGCCAACGTCGGGGCCCTGGATTTGCCCTCCATGGGCTACAC
GCTCATCTACTCCTGCCAGGAGGGCTTCTCCCTCAAGGGTGGCTCCGAGCACCGCACCTGCAAGGCGG
ATGGCAGCTGGACAGGCAAGCCGCCCATCTGCCTGGAGGTCCGGCCCAATGGGAGACCCATCAACACT
GCCCGGGAGCCACCGCTCACCCAAGCCTTGATTCCTGGGGATGTTTTTGCCAAGAATTCCCTGTGGAA
AGGGGCCTATGAATACCAGGGGAAGAAGCAGCCAGCCATGCTCAGAGTGACTGGCTTCCAAGTTGCCA
ACAGCAAGGTCAATGCCACCATGATCGACCACAGTGGCGTGGAGCTGCACTTGGCTGGAACTTACAAG
AAAGAAGATTTTCATCTCCTACTCCAGGTGTACCAGATTACAGGGCCTGTGGAGATCTTTATGAATAA
GTTCAAAGATGATCACTGGGCTTTAGATGGCCATGTCTCGTCAGAGTCCTCCGGAGCCACCTTCATCT
ACCAAGGCTCTGTCAAGGGCCAAGGCTTTGGGCAGTTCGGCTTTCAAAGACTGGACCTCAGGCTGCTG
GAGTCAGACCCCGAGTCCATTGGCCGCCACTTTGCTTCCAACAGCAGCTCAGTGGCAGCCGCGATCCT
GGTGCCTTTCATCGCCCTCATTATTGCGGGCTTCGTGCTCTATCTCTACAAGCACAGGAGAAGACCCA
AAGTTCCTTTCAATGGCTATGCTGGCCACGAGAACACCAATGTTCGGGCCACATTTGAGAACCCAATG
TACGACCGCAACATCCAGCCCACAGACATCATGGCCAGCGAGGCGGAGTTCACAGTCAGCACAGTGTG
CACAGCAGTATAGCCACCCGGCCTGGCCGCCACCACCGCCACCGAGAGCCCCGCCTCCAGCAGCCGTT
CCCCAGGGGGCAGGAAGTAGGCTCCCCTGAGCACAGTGCCCAGTGCCCATCTTCGTTCGTCTCCTTGC
CTGTGTCTGCTACTGCTGGGACTCAGGCCCTCGCCCTGCCGCCATCTATGCCAGTTACCCTGGAGAGG
ACTCCTGCCGTGTCCTGAAAAGGCAGAAAAGGAAGAGGGGCTGCAGACAGAGGAAGAAAGTTTATGGA
TTTAAAATAGCAAAGCAACTTGTGGATCTGTGTGTGTGTGTGTGTGTGTGTGTATGGGCCTGATCACA
CACAAACACACACACCTCTCCTTCATTCACGTCCTATGGAAGAGACCATAAAGGCTTCAAAACTAGAA
GTGCGCATGAAGGATGCTTCATGCCCTGTTCCCCACACAGAGAAGAGATGAAGAGGGGGAGGTACGGT
CAGCTTTCAAAACAATATGCCCCCCGCCCATCCCATGTGTGAGGACATGGTGACTCGGTGACTGTAAC
AGTAGGACACATCCCATCATGCGGTCAGAGTGCAGAAACCCGGTCAGCGTGCAGAAACCAGCTGTCTG
CTGATGAACGGCCCATCTGCACAGCGGCAGCAAGGATTACCCCAAGGGCAGGAAAAAAGTCTTTGGAP
ATAGATTGAAAATCAGTTTCTTTATTTTTTTCAAACACTGTTTTATTGAGTTCTAAACCCAGTGGATT
AAAAAGTCATTTGGGTCCTGGGAAGCACTGGGAAAGAAGGGAGAGCCGGGGAGGATAGGGCAGGAGTC
TGGCCAGGAGCCCAAGGTCAAGTCTGGCTGTCAACTGACAAAGAGAAGAGAAGACAAGTCTGTGGCCC
AGACAGGGTGCCAAGTCTGGGGGCAGCAGCAGGGTCCTTGAGAGAACAGGGGAGCAAGCCTGCCCCAG
TACCCAAAAAACAATGGCTATCATGTACTGGGGTTATTCTCTGTGCCTGACACTTTACCTATAGTATT
TCTAGTCTGCACAATAACACCAAAATGTAGGATTTGTTATTCCCCTTTGACAGATGAGAAAACAGAAG
CCTGCAAAGGTAAAGACAGAGTTAGGAAGTGTGGAGTCAGAATGCAAACCCAGATCAGTCTGCCCCAA
AGTCCACTACACCAGCTGCCAGAAACCCTGTTCTAGAAGGGGCAGCTAAGAAGGGAGGAGCCGATGAA
ACTCTACAGTAGCACTGTGGCCAGGTCTGGAAAGCCAGGCAAGACACCTGTGTGTCCTATCTGGGTTC
TGCTGTCTCCGCGTAGGCAGCTTCGGGGCAAGGATTCAACTCCCCAGGCCTCCCACGGTTGGTGCTGG
CTCCTTGGCTCCCAGCAGCCGCTGACCATAGCCAGCAAAAGACCTGGCAGGTCCTGAATCAAAACAAC
AGAGTGGCTGAAAGTCACACCTCTCCAGCTCCTTGCGAGTGGGTTTGATTGATTTTGACAGCTATATC
ATGCTTGGGTCGTTCATGAATTCCATGAGAATTGTTGGGAAGTTCATGAGTTTAGGAATCAAAGTATA
GCATTTAGGGCCACTTTCTCTGTCCTCGGGAAGGCCCCCACAAGCTTAAGCCCCTGTATACGTGTGAC
ATGCTGGCCTCAGAGATTCATGTCACATATTGAAATAGCAAATAGAAATGTGCAGGAGCGGAGGGACA
GCGACACCTGGTTCTTAAGCAAATTCTAGATTGGAACAATTAGAAGATCTGACTGATGTTAAGAGTGG
CCAGAGGAAAGTGAGAGGCGTCCATTTCCAGCAGACACAATGGAGGCTGACAGAGGCAGGAGCCTACC
CCTGGCCACACCACCTCTGGGACACGGCACCCCCCTGGGCCTGGAGGGAGAGGGCCAATCCAGACACA
CTCACACTCTCATCTCTTTCCTTGGCTGGAAACAAGTGCAGGAAGCTCCCCTCCCAATTTCTTATGCT
CCCTTCCCCCTTACACTCCTCTCCTTCGACTGCTCCCTTCCCCCTTCTTATGCCCCTCTCAGACCACC
CAGCGGATGCCTATTCCCGCCCCCCACCCCTCCCCTGCGTCTCCTTGTAAAGTTCCATGAGATGCTCG
AGGAGCACCTGCTGGTGGGGCACCCAGCACTCTGCTGGGCATCACCCTCCGCACCCCTGACATTTCTC
TCCACCTCCAGAGGCTTGGAAGGGAACAGGGCAGATGAGGCCCTTCACCCACCATCTACAACATATAC
CCATCACCATCCCATGAGGAAAAAAAAAAAAGTAAAACAAAGACAAAAAAAATCTTTTGTACAGAGAT
ATATTTTTATTATACAAAGTTTGTACAGTACCAAAAAAGAAAAAAAAAAGGTGTAAATTTTTTTTTCA
TTATTGTAGGTAAACGGTAGTGGAAGCCTTTTTTGTAAATGTAATAAAATGTATAAATATGGTTTTCA
GAAAACATCAAGTGCTGTAAATATGTAATCTACACACCTTCTTGGCTTGTCTGCAGTATATACATTTA
ATTTATCTGTCTCTGTATATGAGGCTTCCCCCTGGGGTCCTGCATTATGGTACTTTCCTGAATTTGAA
AGCAATTTTAAATTTTTTGAATTCAAATAAAATATAAATTTTTGCATTG

| | | | |
|---|---|---|---|
| NOV4f, CG50377-06 | SEQ ID NO: 42 | 3130 aa | MW at 340344.5kD |
| Protein Sequence | | | |

MPSKDNSQKTSVVTQVGVSQGHNMCPDPGIPERGKRLGSDFRLGSSVQFTCNEGYDLQGSKRITCMKV
SDMFAAWSDHRPVCPARMCDAHLRGPSGIITSPNFPIQYDNNAHCVWIITALNPSKVIKLAFEEFDLE
RGYDTLTVGDGGQDGDQKTVLYMLTGTSVPDLIVSTNHQMWLLFQTDGSGSSLGFKASYEEIEQGSCG
DPGIPAYGRREGSRFRHGDTLKFECQPAFELVGQKAITCQKNNQWSAKKPGCVCSCFFNFTSPSGVVL
SPNYPEDYGNHLHCVWLILARPESRIHLAFNDIDVEPQFDFLVIKDGATAEAPVLGTFSGNQLPSSIT
SSGHVARLEFQTDHSTGKRGFNITFTSESSNECPDPGVPVNGKRFGDSLQLGSSISFLCDEGFLGTQG
SETITCVLKEGSVVWNSAVLRCEAPCGGHLTSPSGTILSPGWPGFYKDALSCAWVIEAQPGYPIKITF
DRFKTEVNYDTLEVPDGRTYSAPLIGVYHGTQVPQFLISTSNYLYLLFSTDKSHSDIGFQLRYEAITL
QSDHCLDPGIPVNGQRHGNDFYVGALVTFSCDSGYTLSDGEPLECEPNFQWSRALPSCEALCGGFIQG
SSGTILSPGFPDFYPNNLNCTWIIETSHGKGVFFTFHTFHLESGHDYLLITENGSFTQPLRQLTGSRL
PAPISAGLYGNFTAQVRFISDFSMSYEGFNITFSEYDLEPCEEPEVPAYSIRKGLQFGVGDTLTFSCF
PGYRLEGTARITCLGGRRRLWSSPLPRCVAECGNSVTGTQGTLLSPNFPVNYNNNHECIYSIQTQPGK
GIQLKAEAFELSEGDVLKVYDGNNNSARLLGVFSHSEMMGVTLNSTSSSLWLDFITDAENTSKGFELH
FSSFELIKCEDPGTPKFGYKVHDEGHFAGSSVSFSCDPGYSLRGSEELLCLSGERRTWDRPLPTCVAE
CGGTVRGEVSGQVLSPGYPAPYEHNLNCIWTIEAEAGCTIGLHFLVFDTEEVHDVLRIWDGPVESGVL
LKELSGPALPKDLHSTFNSVVLQFSTDFFTSKQGFAIQFSGSTATSCNDPGIPQNGSRSGDSWEAGDS
TVFQCDPGYALQGSAEISCVKIENRFFWQPSPPTCIAPCGGDLTGPSGVILSPNYPEPYPPGKECDWK
VTVSPDYVIALVLFPSFNLEPGYDFLHIYDGRDSLSPLIGSFYGSQLPGRIESSSNSLFLAFRSDASV
SNAGFVIDFPENPRESCFDPGSIKNGTRVGSDLKLGSSVTYYCHGGYEVEGTSTLSCILGPDGKPVWN
NPRPVCTAPCGGQYVGSDGVVLSPNYPQNYTSGQICLYFVTVPKDYGVVFGQFAFFHTALNDVVEVHD
GHSQHSRLLSSLSGSHTGGESLPLATSNQVLIKFSAKGLAPARGFHFVYQAVPRTSATQCSSVPEPRY
GKRLGSDFSVGAIVRFECNSGYALQGSPEIECLPVPGALAQWNVSAPTCVVPCGGNLTERRGTILSPG
FPEPYLNSLNCVWKIVVPEGAGIQIQVVSFVTEQNWDSLEVFDGADNTVTMLGSFSGTTVPALLNSTS
NQLYLHFYSDISVSAAGFHLEYKTVGLSSCPEPAVPSNGVKTGERYLVNDVVSFQCEPGYALQGHAHI
SCMPGTVRRWNYPPPLCIAQCGGTVEEMEGVILSPGFPGNYPSNMDCSWKIALPVGFGAHIQFLNFST
EPNHDYIEIRNGPYETSRMMGRFSGSELPSSLLSTSHETTVYFHSDHSQNRPGFKLEYQAYELQECPD
PEPFANGIVRGAGYNVGQSVTFECLPGYQLTGHPVLTCQHGTNRNWDHPLPKCEVPCGGNITSSNGTV
YSPGFPSPYSSSQDCVWLITVPIGHGVRLNLSLLQTEPSGDFITIWDGPQQTAPRLGVFTRSMAKKTV
QSSSNQVLLKFHRDAATGGIFAIAFSAYPLTKCPPPTILPNAEVVTENEEFNIGDIVRYRCLPGFTLV
GNEILTCKLGTYLQFEGPPPICEVHCPTNELLTDSTGVILSQSYPGSYPQFQTCSWLVRVEPDYNISL
TVEYFLSEKQYDEFEIFDGPSGQSPLLKALSGNYSAPLIVTSSSNSVYLRWSSDHAYNRKGFKIRYSA
PYCSLPRAPLHGFILGQTSTQPGGSIHFGCNAGYRLVGHSMAICTRHPQGYHLWSEAIPLCQALSCGL
PEAPKNGMVFGKEYTVGTKAMYSCSEGYHLQAGAEATAECLDTGLWSNRNVPPQCVPVTCPDVSSISV
EHGRWRLIFETQYQFQAQLMLICDPGYYYTGQRVIRCQANGKWSLGDSTPTCRIISCGELPIPPNGHR
IGTLSVYGATAIFSCNSGYTLVGSRVRECMANGLWSGSEVRCLAGHCGTPEPIVNGHINGENYSYRGS
VVYQCNAGFRLIGMSVRICQQDHHWSGKTPFCVLVSCGHPGSPPHSQMSGDSYTVGAVVRYSCIGKRT
LVGNSTRMCGLDGHWTGSLPHCSGTSVGVCGDPGIPAHGIRLGDSFDPGTVMRFSCEAGHVLRGSSER
TCQANGSWSGSQPECGVISCGNPGTPSNARVVFSDGLVFSSSIVYECREGYYATGLLSRHCSVNGTWT
GSDPECLVINCGDPGIPANGLRLGNDFRYNKTVTYQCVPGYMMESHRVSVLSCTKDRTWNGTKPVCKA
LMCKPPPLIPNGKVVGSDFMWGSSVTYACLEGYQLSLPAVFTCEGNGSWTGELPQCFPVFCGDPGVPS
RGRREDRGFSYRSSVSFSCHPPLVLVGSPRRFCQSDGTWSGTQPSCIDPTLTTCADPGVPQFGIQNNS
QGYQVGSTVLFRCQKGYLLQGSTTRTCLPNLTWSGTPPDCVPHHCRQPETPTHAINGALDLPSMGYTL
IYSCQEGFSLKGGSEHRTCKADGSWTGKPPICLEVRPNGRPINTAREPPLTQALIPGDVFAKNSLWKG
AYEYQGKKQPAMLRVTGFQVANSKVNATMIDHSGVELHLAGTYKKEDFHLLLQVYQITGPVEIFMNKF
KDDHWALDGHVSSESSGATFIYQGSVKGQGFGQFGFQRLDLRLLESDPESIGRHFASNSSSVAAAILV
PFIALIIAGFVLYLYKHRRRPKVPFNGYAGHENTNVRATFENPMYDRNIQPTDIMASEAEFTVSTVCT
AV

| | | |
|---|---|---|
| NOV4g, 273095147 | SEQ ID NO: 43 | 2329 bp |
| DNA Sequence | ORF Start: at 1 | ORF Stop: at 2329 |

AAGCTTGAGTGCCCAGACCCAGAGCCCTTTGCCAATGGCATTGTGAGGGGAGCTGGCTACAACGTGGG
ACAATCAGTGACCTTCGAGTGCCTCCCGGGGTATCAATTGACTQGCCACCCTGTCCTCACGTGTCAAC
ATGGCACCAACCGGAACTGGGACCACTCCCTGCCCAAGTGTGAAGTCCCTTGTGGCGGGAACATCACT
TCTTCCAACGGCACTGTGTACTCCCCGGGGTTCCCTAGCCCGTACTCCAGCTCCCAGGACTGTGTCTG
GCTGATCACCGTGCCCATTGGCCATGGCGTCCGCCTCAACCTCAGCCTGCTGCAGACAGAGCCCTCTG
GAGATTTCATCACCATCTGGGATGGGCCACAGCAAACAGCACCACGGCTCGGCGTCTTCACCCGGAGC
ATGGCCAAGAAAACAGTGCAGAGTTCATCCAACCAGGTCCTGCTCAAGTTCCACCGTGATGCAGCCAC
AGGGGGGATCTTCGCCATAGCTTTCTCCGCTTATCCACTCACCAAATGCCCTCCTCCCACCATCCTCC
CCAACGCCGAAGTCGTCACAGAGAATGAAGAATTCAATATAGGTGACATCGTACGCTACAGATGCCTC
CCTGGCTTTACCTTAGTGGGGAATGAAATTCTTACCTGCAAACTTGGAACCTACCTGCAGTTTGAAGG
ACCACCCCCGATATGTGAAGTGCACTGTCCAACAAATGAGCTTCTGACAGACTCCACAGGCGTGATCC
TGAGCCAGAGCTACCCTGGAAGCTATCCCCAGTTCCAGACCTGCTCTTGGCTGGTGAGAGTGGAGCCC
GACTATAACATCTCCCTCACAGTGGAGTACTTCCTCAGCGAGAAGCAATATGATGAGTTTGAGATTTT
TGATGGTCCATCAGGACAGAGTCCTCTGCTGAAAGCCCTCAGTGGGAATTACTCAGCTCCCCTGATTG
TCACCAGCTCAAGCAACTCTGTGTACCTGCGTTGGTCATCTGATCACGCCTACAATCGGAAGGGCTTC
AAGATCCGCTATTCAGCCCCTTACTGCAGCCTGCCCAGGGCTCCACTCCATGGCTTCATCCTAGGCCA
GACCAGCACCCAGCCCGGGGGCTCCATCCACTTTGGCTGCAACGCCGGCTACCGCCTGGTGGGACACA
GCATGGCCATCTGTACCCGGCACCCCCAGGGCTACCACCTGTGGAGCGAAGCCATCCCTCTCTGTCAA
GCTCTTTCCTGTGGGCTTCCTGAGGCCCCCAAGAATGGAATGGTGTTTGGCAAGGAGTACACAGTGGG
AACCAAGGCCATGTACAGCTGCAGTGAAGGCTACCACCTCCAGGCAGGCGCTGAGGCCACTGCAGAGT
GTCTGGACACAGGCCTATGGAGCAACCGCAATGTCCCACCACAGTGTGTCCCTGTGACTTGTCCTGAT
GTCAGTAGCATCAGCGTGGAGCATGGCCGATGGAGGCTTATCTTTGAGACACAGTATCAGTTCCAGGC
CCAGCTGATGCTCATCTGTGACCCTGGCTACTACTATACTGGCCAAAGGGTCATCCGCTGTCAGGCCA
ATGGCAAATGGAGCCTCGGGGACTCTACGCCCACCTGCCGAATCATCTCCTGTGGAGAGCTCCCGATT
CCCCCCAATGGCCACCGCATCGGAACACTGTCTGTCTACGGGGCAACAGCCATCTTCTCCTGCAATTC
CGGATACACACTGGTGGGCTCCAGGGTGCGTGAGTGCATGGCCAATGGGCTCTGGAGTGGCTCTGAAG
TCCGCTGCCTTGCTGGACACTGTGGGACTCCTGAGCCCATTGTCAACGGACACATCAATGGGGAGAAC
TACAGCTACCGGGGCAGTGTGGTGTACCAATGCAATGCTGGCTTCCGCCTGATCGGCATGTCTGTGCG
CATCTGCCAGCAGGATCATCACTGGTCGGGCAAGACCCCTTTCTGTGTGCCAATTACCTGTGGACACC
CAGGCAACCCTGTCAACGGCCTCACCCAGGGTAACCAGTTTAACCTCAACGATGTGGTCAAGTTTGTT
TGCAACCCTGGGTATATGGCTGAGGGGGCTGCTAGGTCCCAATGCCTGGCCAGCGGGCAGTGGAGTGA
CATGCTGCCCACCTGCAGAATCATCAACTGTACAGATCCTGGACACCAAGAAAATAGTGTTCGTCAGG
TCCACGCCAGCGGCCCGCACAGGTTCAGCTTCGGCACCACTGTGTCTTACCGGTGCAACCACGGCTTC
TACCTCCTGGGCACCCCAGTGCTCAGCTGCCAGGGAGATGGCACATGGGACCGTCCCCGCCCCCAGTG
TCTCTGTAAGGTCGACC

| | | | |
|---|---|---|---|
| NOV4g, 273095147 | SEQ ID NO: 44 | 776 aa | MW at 84741.1kD |
| Protein Sequence | | | |

KLECPDPEPFANGIVRGAGYNVGQSVTFECLPGYQLTGHPVLTCQHGTNRNWDHSLPKCEVPCGGNIT
SSNGTVYSPGFPSPYSSSQDCVWLITVPIGHGVRLNLSLLQTEPSGDFITIWDGPQQTAPRLGVFTRS
MAKKTVQSSSNQVLLKFHRDAATGGIFAIAFSAYPLTKCPPPTILPNAEVVTENEEFNIGDIVRYRCL
PGFTLVGNEILTCKLGTYLQFEGPPPICEVHCPTNELLTDSTGVILSQSYPGSYPQFQTCSWLVRVEP
DYNISLTVEYFLSEKQYDEFEIFDGPSGQSPLLKALSGNYSAPLIVTSSSNSVYLRWSSDHAYNRKGF
KIRYSAPYCSLPRAPLHGFILGQTSTQPGGSIHFGCNAGYRLVGHSMAICTRHPQGYHLWSEAIPLCQ
ALSCGLPEAPKNGMVFGKEYTVGTKAMYSCSEGYHLQAGAEATAECLDTGLWSNRNVPPQCVPVTCPD
VSSISVEHGRWRLIFETQYQFQAQLMLICDPGYYYTGQRVIRCQANGKWSLGDSTPTCRIISCGELPI
PPNGGRIGTLSVYGATAIFSCNSGYTLVGSRVRECMANGLWSGSEVRCLAGHCGTPEPIVNGHINGEN
YSYRGSVVYQCNAGFRLIGMSVRICQQDHHWSGKTPFCVPITCGHPGNPVNGLTQGNQFNLNDVVKFV
CNPGYMAEGAARSQCLASGQWSDMLPTCRIINCTDPGHQENSVRQVHASGPHRFSFGTTVSYRCNHGF
YLLGTPVLSCQGDGTWDRPRPQCLCKVD

| | | |
|---|---|---|
| Nov4h, 317459653 | SEQ ID NO: 45 | 2328 bp |
| DNA Sequence | ORF Start: at 1 | ORF Stop: end of sequence |

AAGCTTGAGTGCCCAGACCCAGAGCCCTTTGCCAATGGCATTGTGAGGGGAGCTGGCTACAACGTGGG
ACAATCAGTGACCTTCGAGTGCCTCCCGGGGTATCAATTGACTGGCCACCCTGTCCTCACGTGTCAAC
ATGGCACCAACCGGAACTGGGACCACCCCCTGCCCAAGTGTGAAGTCCCTTGTGGCGGGAACATCACT
TCTTCCAACGGCACTGTGTACTCCCCGGGGTTCCCTAGCCCGTACTCCAGCTCCCAGGACTGTGTCTG
GCTGATCACCGTGCCCATTGGCCATGGCGTCCGCCTCAACCTCAGCCTGCTGCAGACAGAGCCCTCTG
GAGATTTCATCACCATCTGGGATGGGCCACAGCAAACAGCACCACGGCTCGGCGTCTTCACCCGGAGC
ATGGCCAAGAAAACAGTGCAGAGTTCATCCAACCAGGTCCTGCTCAAGTTCCACCGTGATGCAGCCAC
AGGGGGGATCTTCGCCATAGCTTTCTCCGCTTATCCACTCACCAAATGCCCTCCTCCCACCATCCTCC
CCAACGCCGAAGTCGTCACAGAGAATGAAGAATTCAATATAGGTGACATCGTACGCTACAGATGCCTC
CCTGGCTTTACCTTAGTGGGGAATGAAATTCTGACCTGCAAACTTGGAACCTACCTGCAGTTTGAAGG
ACCACCCCCGATATGTGAAGTGCACTGTCCAACAAATGAGCTTCTGACAGACTCCACAGGCGTGATCC
TGAGCCAGAGCTACCCTGGAAGCTATCCCCAGTTCCAGACCTGCTCTTGGCTGGTGAGAGTGGAGCCC
GACTATAACATCTCCCTCACAGTGGAGTACTTCCTCAGCGAGAAGCAATATGATGAGTTTGAGATTTT
TGATGGTCCATCAGGACAGAGTCCTCTGCTGAAAGCCCTCAGTGGGAATTACTCAGCTCCCCTGATTG
TCACCAGCTCAAGCAACTCTGTGTACCTGCGTTGGTCATCTGATCACGCCTACAATCGGAAGGGCTTC
AAGATCCGCTATTCAGCCCCTTACTGCAGCCTGCCCAGGGCTCCACTCCATGGCTTCATCCTAGGCCA
GACCAGCACCCAGCCCGGGGGCTCCATCCACTTTGGCTGCAACGCCGGCTACCGCCTGGTGGGACACA
GCATGGCCATCTGTACCCGGCACCCCCAGGGCTACCACCTGTGGAGCGAAGCCATCCCTCTCTGTCAA
GCTCTTTCCTGTGGGCTTCCTGAGGCCCCCAAGAATGGAATGGTGTTTGGCAAGGAGTACACAGTGGG
AACCAAGGCCGTGTACAGCTGCAGTGAAGGCTACCACCTCCAGGCAGGCGCTGAGGCCACTGCAGAGT
GTCTGGACACAGGCCTATGGAGCAACCGCAATGTCCCACCACAGTGTGTCCCTGTGACTTGTCCTGAT
GTCAGTAGCATCAGCGTGGAGCATGGCCGATGGAGGCTTATCTTTGAGACACAGTATCAGTTCCAGGC
CCAGCTGATGCTCATCTGTGACCCTGGCTACTACTATACTGGCCAAAGGGTCATCCGCTGTCAGGCCA
ATGGCAAATGGAGCCTCGGGGACTCTACGCCCACCTGCCGAATCATCTCCTGTGGAGAGCTCCCGATT
CCCCCCAATGGCCACCGCATCGGAACACTGTCTGTCTACGGGGCAACAGCCATCTTCTCCTGCAATTC
CGGATACACACTGGTGGGCTCCAGGGTGCGTGAGTGCATGGCCAATGGGCTCTGGAGTGGCTCTGAAG
TCCGCTGCCTTGCTGGACACTGTGGGACTCCTGAGCCCATTGTCAACGGACACATCAATGGGGAGAAC
TACAGCTACCGGGGCAGTGTGGTGTACCAATGCAATGCTGGCTTCCGCCTGATCGGCATGTCTGTGCG
CATCTGCCAGCAGGATCATCACTGGTCGGGCAAGACCCCTTTCTGTGTGCCAATTACCTGTGGACACC
CAGGCAACCCTGTCAACGGCCTCACTCAGGGTAACCAGTTTAACCTCAACGATGTGGTCAAGTTTGTT
TGCAACCCTGGGTATATGGCTGAGGGGGCTGCTAGGTCCCAATGCCTGGCCAGCGGGCAATGGAGTGA
CATGCTGCCCACCTGCAGAATCATCAACTGTACAGATCCTGGACACCAAGAAAATAGTGTTCGTCAGG
TCCACGCCAGCGGCCCGCACAGGTTCAGCTTCGGCACCACTGTGTCTTACCGGTGCAACCACGGCTTC
TACCTCCTGGGCACCCCAGTGCTCAGCTGCCAGGGAGATGGCACATGGGACCGTCCCCGCCCCCAGTG
TCTCTGTAAGGTCGAC

| | | | |
|---|---|---|---|
| NOV4h, 317459653 | SEQ ID NO: 46 | 776 aa | MW at 84719.1kD |
| Protein Sequence | | | |

KLECPDPEPFANGIVRGAGYNVGQSVTFECLPGYQLTGHPVLTCQHGTNRNWDHPLPKCEVPCGGNIT
SSNGTVYSPGFPSPYSSSQDCVWLITVPIGHGVRLNLSLLQTEPSGDFITIWDGPQQTAPRLGVFTRS
MAKKTVQSSSNQVLLKFHRDAATGGIFAIAFSAYPLTKCPPPTILPNAEVVTENEEFNIGDIVRYRCL
PGFTLVGNEILTCKLGTYLQFEGPPPICEVHCPTNELLTDSTGVILSQSYPGSYPQFQTCSWLVRVEP
DYNISLTVEYFLSEKQYDEFEIFDGPSGQSPLLKALSGNYSAPLIVTSSSNSVYLRWSSDHAYNRKGF
KIRYSAPYCSLPRAPLHGFILGQTSTQPGGSIHFGCNAGYRLVGHSMAICTRHPQGYHLWSEAIPLCQ
ALSCGLPEAPKNGMVFGKEYTVGTKAVYSCSEGYHLQAGAEATAECLDTGLWSNRNVPPQCVPVTCPD
VSSISVEHGRWRLIFETQYQFQAQLMLICDPGYYYTGQRVIRCQANGKWSLGDSTPTCRIISCGELPI
PPNGHRIGTLSVYGATAIFSCNSGYTLVGSRVRECMANGLWSGSEVRCLAGHCGTPEPIVNGHINGEN
YSYRGSVVYQCNAGFRLIGMSVRICQQDHHWSGKTPFCVPITCGHPGNPVNGLTQGNQFNLNDVVKFV
CNPGYMAEGAARSQCLASGQWSDMLPTCRIINCTDPGHQENSVRQVHASGPHRFSFGTTVSYRCNHGF
YLLGTPVLSCQGDGTWDRPRPQCLCKVD

| | | |
|---|---|---|
| NOV4i, 317459612 | SEQ ID NO: 47 | 2139 bp |
| DNA Sequence | ORF Start: at 1 | ORF Stop: end of sequence |

AAGCTTGAGTGCCCAGACCCAGAGCCCTTTGCCAATGGCATTGTGAGGGGAGCTGGCTACAACGTGGG
ACAATCAGTGACCTTCGAGTGCCTCCCGGGGTATCAATTGACTGGCCACCCTGTCCTCACGTGTCAAC
ATGGCACCAACCGGAACTGGGACCACCCCCTGCCCAAGTGTGAAGTCCCTTGTGGCGGGAACATCACT
TCTTCCAACGGCACTGTGTACTCCCCGGGGTTCCCTAGCCCGTACTCCAGCTCCCAGGACTGTGTCTG
GCTGATCACCGTGCCCATTGGCCATGGCGTCCGCCTCAACCTCAGCCTGCTGCAGACAGAGCCCTCTG
GAGATTTCATCACCATCTGGGATGGGCCACAGCAAACAGCACCACGGCTCGGCGTCTTCACCCGGAGC
ATGGCCAAGAAAACAGTGCAGAGTTCATCCAACCAGGTCCTGCTCAAGTTCCACCGTGATGCAGCCAC
AGGGGGGATCTTCGCCATAGCTTTCTCCGCTTATCCACTCACCAAATGCCCTCCTCCCACCATCCTCC
CCAACGCCGAAGTCGTCACAGAGAATGAAGAATTCAATATAGGTGACATCGTACGCTACAGATGCCTC
CCTGGCTTTACCTTAGTGGGGAATGAAATTCTGACCTGCAAACTTGGAACCTACCTGCAGTTTGAAGG
ACCACCCCCGATATGTGAAGTGCACTGTCCAACAAATGAGCTTCTGACAGACTCCACAGGCGTGATCC
TGAGCCAGAGCTACCCTGGAAGCTATCCCCAGTTCCAGACCTGCTCTTGGCTGGTGAGAGTGGAGCCC
GACTATAACATCTCCCTCACAGTGGAGTACTTCCTCAGCGAGAAGCAATATGATGAGTTTGAGATTTT
TGATGGTCCATCAGGACAGAGTCCTCTGCTGAAAGCCCTCAGTGGGAATTACTCAGCTCCCCTGATTG
TCACCAGCTCAAGCAACTCTGTGTACCTGCGTTGGTCATCTGATCACGCCTACAATCGGAAGGGCTTC
AAGATCCGCTATTCAGCTCTTTCCTGTGGGCTTCCTGAGGCCCCCAAGAATGGAATGGTGTTTGGCAA
GGAGTACACAGTGGGAACCAAGGCCATGTACAGCTGCAGTGAAGGCTACCACCTCCAGGCAGGCGCTG
AGGCCACTGCAGAGTGTCTGGACACAGGCCTATGGAGCAACCGCAATGTCCCACCACAGTGTGTCCCT
GTGACTTGTCCTGATGTCAGTAGCATCAGCGTGGAGCATGGCCGATGGAGGCCTATCTTTGAGACACA
GTATCAGTTCCAGGCCCAGCTGATGCTCATCTGTGACCCTGGCTACTACTATACTGGCCAAAGGGTCA
TCCGCTGTCAGGCCAATGGCAAATGGAGCCTCGGGGACTCTACGCCCACCTGCCGAATCATCTCCTGT
GGAGAGCTCCCGATTCCCCCCAATGGCCACCGCATCGGAACACTGTCTGTCTACGGGGCAACAGCCAT
CTTCTCCTGCAATTCCGGATACACACTGGTGGGCTCCAGGGTGCGTGAGTGCATGGCCAATGGGCTCT
GGAGTGGCTCTGAAGTCCGCTGCCTTGCTGGACACTGTGGGACTCCTGAGCCCATTGTCAACGGACAC
ATCAATGGGGAGAACTACAGCTACCGGGGCAGTGTGGTGTACCAATGCAATGCTGGCTTCCGCCTGAT
CGGCATGTCTGTGCGCATCTGCCAGCAGGATCATCACTGGTCGGGCAAGACCCCTTTCTGTGTGCCAA
TTACCTGTGGACACCCAGGCAACCCTGTCAACGGCCTCACTCAGGGTAACCAGTTTAACCTCAACGAT
GTGGTCAAGTTTGTTTGCAACCCTGGGTATATGGCTGAGGGGGCTGCTAGGTCCCAATGCCTGGCCAG
CGGGCAATGGAGTGACATGCTGCCCACCTGCAGAATCATCAACTGTACAGATCCTGGACACCAAGAAA
ATAGTGTTCGTCAGGTCCACGCCAGCGGCCCGCACAGGTTCAGCTTCGGCACCACTGTGTCTTACCGG
TGCAACCACGGCTTCTACCTCCTGGGCACCCCAGTGCTCAGCTGCCAGGGAGATGGCACATGGGACCG
TCCCCGCCCCCAGTGTCTCTGTAAGGTCGAC

| | | | |
|---|---|---|---|
| NOV4i, 317459612 | SEQ ID NO: 48 | 713 aa | MW at 77947.4kD |
| Protein Sequence | | | |

KLECPDPEPFANGIVRGAGYNVGQSVTFECLPGYQLTGHPVLTCQHGTNRNWDHPLPKCEVPCGGNIT
SSNGTVYSPGFPSPYSSSQDCVWLITVPIGHGVRLNLSLLQTEPSGDFTTIWDGPQQTAPRLGVFTRS
MAKKTVQSSSNQVLLKFHRDAATGGIFAIAFSAYPLTKCPPPTILPNAEVVTENEEFNIGDIVRYRCL
PGFTLVGNEILTCKLGTYLQFEGPPPICEVHCPTNELLTDSTGVILSQSYPGSYPQFQTCSWLVRVEP
DYNISLTVEYFLSEKQYDEFEIFDGPSGQSPLLKALSGNYSAPLIVTSSSNSVYLRWSSDHAYNRKGF
KIRYSALSCGLPEAPKNGMVFGKEYTVGTKAMYSCSEGYHLQAGAEATAECLDTGLWSNRNVPPQCVP
VTCPDVSSISVEHGRWRPIFETQYQFQAQLMLICDPGYYYTGQRVIRCQANGKWSLGDSTPTCRIISC
GELPIPPNGHRIGTLSVYGATAIFSCNSGYTLVGSRVRECMANGLWSGSEVRCLAGHCGTPEPIVNGH
INGENYSYRGSVVYQCNAGFRLIGMSVRICQQDHHWSGKTPFCVPITCGHPGNPVNGLTQGNQFNLND
VVKFVCNPGYMAEGAARSQCLASGQWSDMLPTCRIINCTDPGHQENSVRQVHASGPHRFSFGTTVSYR
CNHGFYLLGTPVLSCQGDGTWDRPRPQCLCKVD

| | | |
|---|---|---|
| NOV4j, 317286331 | SEQ ID NO: 49 | 2607 bp |
| DNA Sequence | ORF Start: at 1 | ORF Stop: end of sequence |

AAGCTTTCATGTTTTGATCCTGGTTCCATCAAGAACGGCACACGGGTGGGGTCCGACCTGAAGCTGGG
CTCCTCCGTCACCTACTACTGCCACGGGGGCTACGAAGTTGAGGGCACCTCGACCCTGAGCTGCATCC
TGGGGCCTGATGGGAAGCCCGTGTGGAACAATCCCCGGCCAGTCTGCACAGCCCCCTGTGGGGGACAG
TATGTGGGTTCGGACGGAGTGGTCTTGTCCCCCAACTACCCCCAGAACTACACCAGTGGACAGATCTG
CTTGTATTTTGTTACTGTGCCCAAGGACTATGTGGTGTTTGGCCAGTTCGCCTTCTTTCACACGGCCC
TCAACGACGTGGTGGAGGTTCACGACGGCCACAGCCAGCACTCGCGGCTCCTCAGCTCCCTCTCGGGC
TCCCATACAGGAGAATCACTGCCCTTGGCCACCTCCAATCAAGTTCTCATTAAGTTCAGCGCCAAAGG
CCTCGCACCAGCCAGAGGCTTCCACTTTGTCTACCAAGCGGTTCCTCGAACCAGCGCCACGCAGTGCA
GCTCTGTGCCGGAACCCCGCTATGGCAAGAGGCTGGGCAGTGACTTCTCGGTGGGGGCCATCGTCCGC
TTCGAATGCAACTCCGGCTATGCCCTGCAGGGGTCGCCAGAGATCGAGTGCCTCCCTGTGCCTGGGGC
CTTGGCCCAATGGAATGTCTCAGCGCCCACGTGTGTGGTGCCGTGTGGAGGCAACCTCACAGAGCGCA
GGGGCACCATCCTGTCCCCTGGCTTCCCAGAGCCGTACCTCAACAGCCTCAACTGTGTGTGGAAGATC
GTGGTCCCCGAAGGCGCTGGCATCCAGATCCAAGTTGTCAGTTTTGTGACAGAGCAGAACTGGGACTC
GCTGGAAGTATTTGATGGTGCAGATAACACTGTAACCATGCTGGGGAGTTTCTCAGGAACAACCGTGC
CTGCCCTTCTGAACAGCACCTCCAACCAGCTCTACCTTCATTTCTACTCAGATATCAGCGTATCTGCA
GCTGGCTTCCACTTGGAGTACAAAACGGTGGGCCTGAGCAGTTGTCCGGAACCTGCTGTGCCCAGTAA
CGGGGTGAAGACTGGCGAGCGCTACTTGGTGAATGATGTGGTGTCTTTCCAGTGTGAGCCGGGATATG
CCCTCCAGGGCCACGCCCACATCTCCTGCATGCCCGGAACAGTGCGGCGATGGAACTACCCTCCTCCA
CTCTGTATTGCACAGTGTGGGGGAACAGTGGAGGAGATGGAGGGGGTGATCCTGAGCCCCGGCTTCCC
AGGCAACTACCCCAGTAACATGGACTGCTCCTGGAAAATAGCACTGCCCGTGGGCTTTGGAGCTCACA
TCCAGTTCCTGAACTTCTCCACCGAGCCCAACCACGACTACATAGAAATCCGGAATGGCCCCTATGAG
ACCAGCCGCATGATGGGAAGATTCAGTGGAAGCGAGCTTCCAAGCTCCCTCCTCTCCACGTCCCACGA
GACCACCGTGTATTTCCACAGCGACCACTCCCAGAATCGGCCAGGATTCAAGCTGGAGTATCAGGCCT
ATGAACTTCAAGAGTGCCCAGACCCAGAGCCCTTTGCCAATGGCATTGTGAGGGGAGCTGGCTACAAC
GTGGGACAATCAGTGACCTTCGAGTGCCTCCCGGGGTATCAATTGACTGGCCACCCTGTCCTCACGTG
TCAACATGGCACCAACCGGAACTGGGACCACCCCCTGCCCAAGTGTGAAGTCCCTTGTGGCGGGAACA
TCACTTCTTCCAACGGCACTGTGTACTCCCCGGGGTTCCCTAGCCCGTACTCCAGCTCCCAGGACTGT
GTCTGGCTGATCACCGTGCCCATTGGCCATGGCGTCCGCCTCAACCTCAGCCTGCTGCAGACAGAGCC
CTCTGGAGATTTCATCACCATCTGGGATGGGCCACAGCAAACAGCACCACGGCTCGGCGTCTTCACCC
GGAGCATGGCCAAGAAAACAGTGCAGAGTTCATCCAACCAGGTCCTGCTCAAGTTCCACCGTGATGCA
GCCACAGGGGGGATCTTCGCCATAGCTTTCTCCGCTTATCCACTCACCAAATGCCCTCCTCCCACCAT
CCTCCCCAACGCCGAAGTCGTCACAGAGAATGAAGAATTCAATATAGGTGACATCGTACGCTACAGAT
GCCTCCCTGGCTTTACCTTAGTGGGGAATGAAATTCTGACCTGCAAACTTGGAACCTACCTGCAGTTT
GAAGGACCACCCCCGATATGTGAAGTGCACTGTCCAACAAATGAGCTTCTGACAGACTCCACAGGCGT
GATCCTGAGCCAGAGCTACCCTGGAAGCTATCCCCAGTTCCAGACCTGCTCTTGGCTGGTGAGAGTGG
AGCCCGACTATAACATCTCCCTCACAGTGGAGTACTTCCTCAGCGAGAAGCAATATGATGAGTTTGAG
ATTTTTGATGGTCCATCAGGACAGAGTCCTCTGCTGAAAGCCCTCAGTGGGAATTACTCAGCTCCCCT
GATTGTCACCAGCTCAAGCAACTCTGTGTACCTGCGTTGGTCATCTGATCACGCCTACAATCGGAAGG
GCTTCAAGATCCGCTATGTCGAC

| | | | |
|---|---|---|---|
| NOVv4j, 317286331 | SEQ ID NO: 50 | 869 aa | MW at 94553.5kD |
| Protein Sequence | | | |

KLSCFDPGSIKNGTRVGSDLKLGSSVTYYCHGGYEVEGTSTLSCILGPDGKPVWNNPRPVCTAPCGGQ
YVGSDGVVLSPNYPQNYTSGQICLYFVTVPKDYVVFGQFAFFHTALNDVVEVHDGHSQHSRLLSSLSG
SHTGESLPLATSNQVLIKFSAKGLAPARGFHFVYQAVPRTSATQCSSVPEPRYGKRLGSDFSVGAIVR
FECNSGYALQGSPEIECLPVPGALAQWNVSAPTCVVPCGGNLTERRGTILSPGFPEPYLNSLNCVWKI
VVPEGAGIQIQVVSFVTEQNWDSLEVFDGADNTVTMLGSFSGTTVPALLNSTSNQLYLHFYSDISVSA
AGFHLEYKTVGLSSCPEPAVPSNGVKTGERYLVNDVVSFQCEPGYALQGHAHISCMPGTVRRWNYPPP
LCIAQCGGTVEEMEGVILSPGFPGNYPSNMDCSWKIALPVGFGAHIQFLNFSTEPNHDYIEIRNGPYE
TSRMMGRFSGSELPSSLLSTSHETTVYFHSDHSQNRPGFKLEYQAYELQECPDPEPFANGIVRGAGYN
VGQSVTFECLPGYQLTGHPVLTCQHGTNRNWDHPLPKCEVPCGGNITSSNGTVYSPGFPSPYSSSQDC
VWLITVPIGHGVRLNLSLLQTEPSGDFITIWDGPQQTAPRLGVFTRSMAKKTVQSSSNQVLLKFHRDA
ATGGIFAIAFSAYPLTKCPPPTILPNAEVVTENEEFNIGDIVRYRCLPGFTLVGNEILTCKLGTYLQF
EGPPPICEVHCPTNELLTDSTGVILSQSYPGSYPQFQTCSWLVRVEPDYNISLTVEYFLSEKQYDEFE
IFDGPSGQSPLLKALSGNYSAPLIVTSSSNSVYLRWSSDHAYNRKGFKIRYVD

| | | |
|---|---|---|
| NOV4k, CG50377-07 | SEQ ID NO: 51 | 300 bp |
| DNA Sequence | ORF Start: at 2 | ORF Stop: at 299 |

AAAGTCATCTGTCTCCTTCTCCTGCCATCCCCCTCTGGTGCTGGTGGGCTCTCCACGCAGGTTTTGCC
AGTCAGATGGGACATGGAGTGGCACCCAGCCCAGCTGCATAGATCCGACCCTGACCACGTGTGCGGAC
CCTGGTGTGCCACAGTTTGGGATACAGAACAATTCTCAGGGCTACCAGGTTGGAAGCACAGTCCTCTT
CCGTTGTCAAAAAGGCTACCTGCTTCAGGGCTCCACCACCAGGACCTGCCTCCCAAACCTGACCTGGA
GTGGAACCCCACCTGACTGTGTGCCCCA

| | | | |
|---|---|---|---|
| NOV4k, CG50377-07 | SEQ ID NO: 52 | 99 aa | MW at 10565.8kD |
| Protein Sequence | | | |

KSSVSFSCHPPLVLVGSPRRFCQSDGTWSGTQPSCIDPTLTTCADPGVPQFGIQNNSQGYQVGSTVLF
RCQKGYLLQSTTRTCLPNLTWSGTPPDCVP

| | | |
|---|---|---|
| NOV4l, CG50377-08 | SEQ ID NO: 53 | 1792 bp |
| DNA Sequence | ORF Start: at 1 | ORF Stop: at 1792 |

GCTGAGGGGGCTGCTAGGTCCCAATGCCTGGCCAGCGGGCAGTGGAGTGACATGCTGCCCACCTGCAG
AATCATCAACTGTACAGATCCTGGACACCAAGAAAATAGTGTTCGTCAGGTCCACGCCAGCGGCCCGC
ACAGGTTCAGCTTCGGCACCACTGTGTCTTACCGGTGCAACCACGGCTTCTACCTCCTGGGCACCCCA
GTGCTCAGCTGCCAGGGAGATGGCACATGGGACCGTCCCCGCCCCCAGTGTCTCTTGGTGTCCTGTGG
CCATCCGGGCTCCCCGCCTCACTCCCAGATGTCTGGAGACAGTTATACTGTGGGAGCAGTGGTGCGGT
ACAGCTGCATCGGCAAGCGTACTCTGGTGGGAAACAGCACCCGCATGTGTGGGCTGGATGGACACTGG
ACTGGCTCCCTCCCTCACTGCTCAGGAACCAGCGTGGGAGTTTGCGGTGACCCTGGGATCCCGGCTCA
TGGCATCCGTTTGGGGGACAGCTTTGATCCAGGCACTGTGATGCGCTTCAGCTGTGAAGCTGGCCACG
TGCTCCGGGGATCGTCAGAGCGCACCTGTCAAGCCAATGGCTCGTGGAGCGGCTCGCAGCCTGAGTGT
GGAGTGATCTCTTGTGGGAACCCTGGGACTCCAAGTAATGCCCGAGTTGTGTTCAGTGATGGCCTGGT
TTTCTCCAGCTCTATCGTCTATGAGTGCCGGGAAGGATACTACGCCACAGGCCTGCTCAGCCGTCACT
GCTCGGTCAATGGTACCTGGACAGGCAGTGACCCTGAGTGCCTCGTCATAAACTGTGGTGACCCTGGG
ATTCCAGCCAATGGCCTTCGGCTGGGCAATGACTTCAGGTACAACAAAACTGTGACATATCAGTGTGT
CCCTGGCTATATGATGGAGTCACATAGAGTATCTGTGCTGAGCTGCACCAAGGACCGGACATGGAATG
GAACCAAGCCCGTCTGCAAAGCTCTCATGTGCAAGCCACCTCCGCTCATCCCCAATGGGAAGGTGGTG
GGGTCTGACTTCATGTGGGGCTCAAGTGTGACTTATGCCTGCCTGGAGGGGTACCAGCTCTCCCTGCC
CGCGGTGTTCACCTGTGAGGGAAATGGGTCCTGGACCGGAGAGCTGCCTCAGTGTTTCCCTGTGTTCT
GCGGGGATCCTGGTGTCCCGTCCCGTGGGAGGAGAGAGGACCGAGGCTTCTCCTACAGGTCATCTGTC
TCCTTCTCCTGCCATCCCCCTCTGGTGCTGGTGGGCTCTCCACGCAGGTTTTGCCAGTCAGATGGGAC
ATGGAGTGGCACCCAGCCCAGCTGCATAGATCCGACCCTGACCACGTGTGCGGACCCTGGTGTGCCAC
AGTTTGGGATACAGAACAATTCTCAGGGCTACCAGGTTGGAAGCACAGTCCTCTTCCGTTGTCAAAAA
GGCTACCTGCTTCAGGGCTCCACCACCAGGACCTGCCTCCCAAACCTGACCTGGAGTGGAACCCCACC
TGACTGTGTCCCCCACCACTGCAGGCAGCCAGAGACGCCAACGCATGCCAACGTCGGGGCCCTGGATT
TGCCCTCCATGGGCTACACGCTCATCTACTCCTGCCAGGAGGGCTTCTCCCTCAAGGGTGGCTCCGAG
CACCGCACCTGCAAGGCGGATGGCAGCTGGACAGGCAAGCCGCCCATCTGCCTGGAGGTCCGGCCCAG
TGGGAGACCCATCAACATTGCCCGGGAGCCACCGCTCACCCAAGCCTTGATTCCTGGGGATGTTTTTG
CCAAGAATTCCCTGTGGAAAGGGG

| | | | |
|---|---|---|---|
| NOV4l, CG50377-08 | SEQ ID NO: 54 | 597 aa | MW at 63914.5kD |
| Protein Sequence | | | |

AEGAARSQCLASGQWSDMLPTCRIINCTDPGHQENSVRQVHASGPHRFSFGTTVSYRCNHGFYLLGTP
VLSCQGDGTWDRPRPQCLLVSCGHPGSPPHSQMSGDSYTVGAVVRYSCIGKRTLVGNSTRMCGLDGHW
TGSLPHCSGTSVGVCGDPGIPAHGIRLGDSFDPGTVMRFSCEAGHVLRGSSERTCQANGSWSGSQPEC
GVISCGNPGTPSNARVVFSDGLVFSSSIVYECREGYYATGLLSRHCSVNGTWTGSDPECLVINCGDPG
IPANGLRLGNDFRYNKTVTYQCVPGYMMESHRVSVLSCTKDRTWNGTKPVCKALNCKPPPLIPNGKVV
GSDFMWGSSVTYACLEGYQLSLPAVFTCEGNGSWTGELPQCFPVFCGDPGVPSRGRREDRGFSYRSSV
SFSCHPPLVLVGSPRRFCQSDGTWSGTQPSCIDPTLTTCADPGVPQFGIQNNSQGYQVGSTVLFRCQK
GYLLQGSTTRTCLPNLTWSGTPPDCVPHHCRQPETPTHANVGALDLPSMGYTLIYSCQEGFSLKGGSE
HRTCKADGSWTGKPPICLEVRPSGRPINIAREPPLTQALIPGDVFAKNSLWKG

| | | |
|---|---|---|
| NOV4m, CG50377-09 | SEQ ID NO: 55 | 1135 bp |
| DNA Sequence | ORF Start: ATG at 510 | ORF Stop: TAG at 1044 |

TTAAGAACCAGGTGTCGCTGTCCCTCCGCTCCTGCACATTTCTATTTGGTATTTCAATATGTGACATG
AATCTTGAGGCCAGCATGTCACACGTATACAGGGGCTTAAGCTTGTGGGGGCCTTCCCGAGGACAGAG
AAAGTGGCCCTAAATGCTATACTTTGATTCCTAAACTCATGAACTTCCCAACAATTCTCATGGAATTC
ATGAACGACCCAAGCATGATGGGACATGGAGTGGCACCCAGCCCAGCTGCATAGATCCGACCCTGACC
ACGTGTGCGGACCCTGGTGTGCCACAGTTTGGGATACAGAACAATTCTCAGGGCTACCAGGTTGGAAG
CACAGTCCTCTTCCGTTGTCAAAAAGGCTACCTGCTTCAGGGCTCCACCACCAGGACCTGCCTCCCAA
ACCTGACCTGGAGTGGAACCCCACCTGACTGTGTCCCCCACCACTGCAGGCAGCCAGAGACGCCAACG
CATGCCAACGTCGGGGCCCTGGATTTGCCCTCCATGGGCTACACGCTCATCTACTCCTGCCAGGAGGG
CTTCTCCCTCAAGGGTGGCTCCGAGCACCGCACCTGCAAGGCGGATGGCAGCTGGACAGGCAAGCCGC
CCATCTGCCTGGAGGTCCGGCCCAGTGGGAGACCCATCAACACTGCCCGGGAGCCACCGCTCACCCAA
GCCTTGATTCCTGGGGATGTTTTTGCCAAGAATTCCCTGTGGAAAGGGGCCTATGAATACCAGGGGAA
GAAGCAGCCAGCCATGCTCAGAGTGACTGGCTTCCAAGTTGCCAACAGCAAGGTCAATGCCACCATGA
TCGACCACAGTGGCGTGGAGCTGCACTTGGCTGGAACTTACAAGAAAGAAGATTTTCATCTCCTACTC
CAGGTGTACCAGATTACAGGGCCTGTGGAGATCTTTATGAATAAGTTCAAAGATGATCACTGGGCTTT
AGATGGCCATGTAAGTTCAGCAAACTCACCTCCTCCCCTGACTCCCAGATCACTGGCAGGGAAGAGGA
GGACAAAAGGGTGTGCAAACCCCTAGGATCAATCTGGCAACTTGGGAGGAGGTTTTCTGTGGGGCCCT
GCCTAGGAGCAGCAAGAGGATCCTCATCTGCTAATGAAATAGGCAAA

| | | | |
|---|---|---|---|
| NOV4m, CG50377-09 | SEQ ID NO: 56 | 178 aa | MW at 19569.2kD |
| Protein Sequence | | | |

MGYTLIYSCQEGFSLKGGSEHRTCKADGSWTGKPPICLEVRPSGRPINTAREPPLTQALIPGDVFAKN
SLWKGAYEYQGKKQPAMLRVTGFQVANSKVNATMIDHSGVELHLAGTYKKEDFHLLLQVYQITGPVEI
FMNKFKDDHWALDGHVSSANSPPPLTPRSLAGKRRTKGCANP

| | | |
|---|---|---|
| NOV4n, CG50377-10 | SEQ ID NO: 57 | 3905 bp |
| DNA Sequence | ORF Start: ATG at 427 | ORF Stop: TGA at 3079 |

GGATTTGAGAGCCTGAACTTAGCCATACACCAGATCTACCTTTGGACCGCAAAAGGGACCCAGTGCTT
CATGAAGCTGGTTTTTTTTGTTTTGTTTTGTTTTTTTTCCGTTGTTTTGTTTCGGCTTTACCAACCTG
ACTGGGTGTTTTTCAATATCCACCATTCAGACTTTCCTCAACAGCAGAGGATGTGGCAGTGGCAAAGA
CAAGGGGATGGGGGGAGACGAAAGGGAAAGGGGCCTGCATGAAAGACCATGTCTGTCTTCCTGCTGGT
GCCAGTTCCCTGAACCTCATCTTGTTGTTCAGCCCCTTACTGCAGCCTGCCCAGGGCTCCACTCCATG
GCTTCATCCTAGGCCAGACCAGCACCCAGCCCGGGGGCTCCATCCACTTTGGCTGCAACGCCGGCTAC
CGCCTGGTGGGACACAGCATGGCCATCTGTACCCGGCACCCCCAGGGCTACCACCTGTGGAGCGAAGC
CATCCCTCTCTGTCAAGCTCTTTCCTGTGGGCTTCCTGAGGCCCCCAAGAATGGAJJGGTGTTTGGCA
AGGAGTACACAGTGGGAACCAAGGCCGTGTACAGCTGCAGTGAAGGCTACCACCTCCAGGCAGGCGCT
GAGGCCACTGCAGAGTGTCTGGACACAGGCCTATGGAGCAACCGCAATGTCCCACCACAGTGTGTCCC
TGTGACTTGTCCTGATGTCAGTAGCATCAGCGTGGAGCATGGCCGATGGAGGCTTATCTTTGAGACAC
AGTATCAGTTCCAGGCCCAGCTGATGCTCATCTGTGACCCTGGCTACTACTATACTGGCCAAAGGGTC
ATCCGCTGTCAGGCCAATGGCAAATGGAGCCTCGGGGACTCTACGCCCACCTGCCGAATCATCTCCTG
TGGAGAGCTCCCGATTCCCCCCAATGGCCACCGCATCGGAACACTGTCTGTCTACGGGGCAACAGCCA
TCTTCTCCTGCAATTCCGGATACACACTGGTGGGCTCCAGGGTGCGTGAGTGCATGGCCAATGGGCTC
TGGAGTGGCTCTGAAGTCCGCTGCCTTGCTGGACACTGTGGGACTCCTGAGCCCATTGTCAACGGACA
CATCAATGGGGAGAACTACAGCTACCGGGGCAGTGTGGTGTACCAATGCAATGCTGGCTTCCGCCTGA
TCGGCATGTCTGTGCGCATCTGCCAGCAGGATCATCACTGGTCGGGCAAGACCCCTTTCTGTGTGCCA
ATTACCTGTGGACACCCAGGCAACCCTGTCAACGGCCTCACTCAGGGTAACCAGTTTAACCTCAACGA
TGTGGTCAAGTTTGTTTGCAACCCTGGGTATATGGCTGAGGGGGCTGCTAGGTCCCAATGCCTGGCCA
GCGGGCAATGGAGTGACATGCTGCCCACCTGCAGAATCATCAACTGTACAGATCCTGGACACCAAGAA
AATAGTGTTCGTCAGGTCCACGCCAGCGGCCCGCACAGGTTCAGCTTCGGCACCACTGTGTCTTACCG
GTGCNNAACCACGGCTTCTACCTCCTGGGCAACCCCAGTGCTCAGCTGCCAGGGAGATGGCACATGGG
ACCGTCCCCGCCCCCAGTGTCTCTTGGTGTCCTGTGGCCATCCGGGCTCCCCGCCTCACTCCCAGATG
TCTGGAGACAGTTATACTGTGGGAGCAGTGGTGCGGTACAGCTGCATCGGCAAGCGTACTCTGGTGGG
AAACAGCACCCGCATGTGTGGGCTGGATGGACACTGGACTGGCTCCCTCCCTCACTGCTCAGGAACCA
GCGTGGGAGTTTGCGGTGACCCTGGGATCCCGGCTCATGGCATCCGTTTGGGGGACAGCTTTGATCCA
GGCACTGTGATGCGCTTCAGCTGTGAAGCTGGCCACGTGCTCCGGGGATCGTCAGAGCGCACCTGTCA
AGCCAATGGCTCGTGGAGCGGCTCGCAGCCTGAGTGTGGAGTGATCTCTTGTGGGAACCCTGGGACTC
CAAGTAATGCCCGAGTTGTGTTCAGTGATGGCCTGGTTTTCTCCAGCTCTATCGTCTATGAGTGCCGG
GAAGGATACTACGCCACAGGCCTGCTCAGCCGTCACTGCTCGGTCAATGGTACCTGGACAGGCAGTGA
CCCTGAGTGCCTCGTCATAAACTGTGGTGACCCTGGGATTCCAGCCAATGGCCTTCGGCTGGGCAATG
ACTTCAGGTACAACAAAACTGTGACATATCAGTGTGTCCCTGGCTATATGATGGAGTCACATAGAGTA
TCTGTGCTGAGCTGCACCAAGGACCGGACATGGAATGGAACCAAGCCCGTCTGCAAAGCTCTCATGTG
CAAGCCACCTCCGCTCATCCCCAATGGGAAGGTGGTGGGGTCTGACTTCATGTGGGGCTCAAGTGTGA
CTTATGCCTGCCTGGAGGGGTACCAGCTCTCCCTGCCCGCGGTGTTCACCTGTGAGGGAAATGGGTCC
TGGACCGGAGAGCTGCCTCAGTGTTTCCCTGTGTTCTGCGGGGATCCTGGTGTCCCGTCCCGTGGGAG
GAGAGAGGACCGAGGCTTCTCCTACAGGTCATCTGTCTCCTTCTCCTGCCATCCCCCTCTGGTGCTGG
TGGGCTCTCCACGCAGGTTTTGCCAGTCAGATGGGACATGGAGTGGCACCCAGCCCAGCTGCATAGAT
CCGACCCTGACCACGTGTGCGGACCCTGGTGTGCCACAGTTTGGGATACAGAACAATTCTCAGGGCTA
CCAGGTTGGAAGCACAGTCCTCTTCCGTTGTCAAAAAGGCTACCTGCTTCAGGGCTCCACCACCAGGA
CCTGCCTCCCAAACCTGACCTGGAGTGGAACCCCACCTGACTGTGTCCCCCACCACTGCAGGCAGCCA
GAGACGCCAACGCATGCCAACGTCGGGGCCCTGGATTTGCCCTCCATGGGCTACACGCTCATTACTCC
TGCCAGGAGGGCTTCTCCCTCAAGGGTGGCTCCGAGCACCGCACCTGCAAGGCGGATGGCAGCTGGAC
AGGCAAGCCGCCCATCTGCCTGGCAGAGGTCCGGCCCAGTGGGAGACCCATCAACACTGCCCGGGAGC
CACCGCTCACCCAAGCCTTGATTCCTGGGGATGTTTTTGCCAAGAATTCCCTGTGGAAAGGGGCCTAT
GAATACCAGGGGAAGAAGCAGCCAGCCATGCTCAGAGTGACTGGCTTCCAAGTTGCCAACAGCAAGGT
CAATGCCACCATGATCGACCACAGTGGCGTGGAGCTGCACTTGGCTGGAACTTACAAGAAAGAAGATT
TTCATCTCCTACTCCAGGTGTACCAGATTACAGGGCCTGTGGAGATCTTTATGAATAAGTTCAAAGAT
GATCACTGGGCTTTAGATGGCCATGTCTCGTCAGAGTCCTCCGGAGCCACCTTCATCTACCAAGGCTC
TGTCAAGGGCCAAGGCTTTGGGCAGTTCGGCTTTCAAAGACTGGACCTCAGGCTGCTGGAGTCAGACC
CCGAGTCCATTGGCCGCCACTTTGCTTCCAACAGCAGCTCAGTGGCAGCCGCGATCCTGGTGCCTTTC
ATCGCCCTCATTATTGCGGGCTTCGTGCTCTATCTCTACAAGCACAGGAGAAGACCCAAAGTTCCTTT
CAATGGCTATGCTGGCCAcGAGAACACCAATGTTCGGGCCACATTTGAGAACCCAATGTACGACCGCA
ACATCCAGCCCACAGACATCATGGCCAGCGAGGCGGAGTTCACAGTCAGCACAGTGTGCACAGCAGTA
TAGCCACCCGGCCTGGCCGCTTTTTTTGCTAGGTTGAACTGGTACTCCAGCAGCCGCCGAAGCTGGAC
TGTACTGCTGCCATCTCAGCTCACTGCAACCTCCCTGCCTGATTCCCCTGCCTCAGCCTGCCGAGTGC
CTGCGATTGCAGGCGCGCACCGCCACNNT

| | | | |
|---|---|---|---|
| NOV4n, CG50377-10 | SEQ ID NO: 58 | 884 aa | MW at 94718.1kD |
| Protein Sequence | | | |

MAICTRHPQGYHLWSEAIPLCQALSCGLPEAPKNGMVFGKEYTVGTKAVYSCSEGYHLQAGAEATAEC
LDTGLWSNRNVPPQCVPVTCPDVSSISVEHGRWRLIFETQYQFQAQLMLICDPGYYYTGQRVIRCQAN
GKWSLGDSTPTCRIISCGELPIPPNGHRIGTLSVYGATAIFSCNSGYTLVGSRVRECMANGLWSGSEV
RCLAGHCGTPEPIVNGHINGENYSYRGSVVYQCNAGFRLIGMSVRICQQDHHWSGKTPFCVPITCGHP
GNPVNGLTQGNQFNLNDVVKFVCNPGYMAEGAARSQCLASGQWSDMLPTCRIINCTDPGHQENSVRQV
HASGPHRFSFGTTVSYRCXTTASTSWATPVLSCQGDGTWDRPRPQCLLVSCGHPGSPPHSQMSGDSYT
VGAVVRYSCIGKRTLVGNSTRMCGLDGHWTGSLPHCSGTSVGVCGDPGIPAHGTRLGDSFDPGTVMRF
SCEAGHVLRGSSERTCQANGSWSGSQPECGVISCGNPGTPSNARVVFSDGLVFSSSIVYECREGYYAT
GLLSRHCSVNGTWTGSDPECLVINCGDPGIPANGLRLGNDFRYNKTVTYQCVPGYMMESHRVSVLSCT
KDRTWNGTKPVCKALMCKPPPLIPNGKVVGSDFMWGSSVTYACLEGYQLSLPAVFTCEGNGSWTGELP
QCFPVFCGDPGVPSRGRPEDRGFSYRSSVSFSCHPPLVLVGSPRRFCQSDGTWSGTQPSCIDPTLTTC
ADPGVPQFGIQNNSQGYQVGSTVLFRCQKGYLLQGSTTRTCLPNLTWSGTPPDCVPHHCRQPETPTHA
NVGALDLPSMGYTLITPARRASPSRVAPSTAPARRMAAGQASRPSAWQRSGPVGDPSTLPGSHRSPKP

| | | |
|---|---|---|
| NOV4o, CG50377-11 | SEQ ID NO: 59 | 3896 bp |
| DNA Sequence | ORF Start: ATG at 427 | ORF Stop: TGA at 3073 |

GGATTTGAGAGCCTGAACTTAGCCATACACCAGATCTACCTTTGGACCGCAAAAGGGACCCAGTGCTT
CATGAAGCTGGTTTTTTTTGTTTTGTTTTGTTTTTTTTCCGTTGTTTTGTTTCGGCTTTACCAACCTG
ACTGGGTGTTTTTCAATATCCACCATTCAGACTTTCCTCAACAGCAGAGGATGTGGCAGTGGCAAAGA
CAAGGGGATGGGGGGAGACGAAAGGGAAAGGGGCCTGCATGAAAGACCATGTCTGTCTTCCTGCTGGT
GCCAGTTCCCTGAACCTCATCTTGTTGTTCAGCCCCTTACTGCAGCCTGCCCAGGGCTCCACTCCATG
GCTTCATCCTAGGCCAGACCAGCACCCAGCCCGGGGGCTCCATCCACTTTGGCTGCAACGCCGGCTAC
CGCCTGGTGGGACACAGCATGGCCATCTGTACCCGGCACCCCCAGGGCTACCACCTGTGGAGCGAAGC
CATCCCTCTCTGTCAAGCTCTTTCCTGTGGGCTTCCTGAGGCCCCCAAGAATGGAATGGTGTTTGGCA
AGGAGTACACAGTGGGAACCAAGGCCGTGTACAGCTGCAGTGAAGGCTACCACCTCCAGGCAGGCGCT
GAGGCCACTGCAGAGTGTCTGGACACAGGCCTATGGAGCAACCGCAATGTCCCACCACAGTGTGTCCC
TGTGACTTGTCCTGATGTCAGTAGCATCAGCGTGGAGCATGGCCGATGGAGGCTTATCTTTGAGACAC
AGTATCAGTTCCAGGCCCAGCTGATGCTCATCTGTGACCCTGGCTACTACTATACTGGCCAAAGGGTC
ATCCGCTGTCAGGCCAATGGCAAATGGAGCCTCGGGGACTCTACGCCCACCTGCCGAATCATCTCCTG
TGGAGAGCTCCCGATTCCCCCCAATGGCCACCGCATCGGAACACTGTCTGTCTACGGGGCAACAGCCA
TCTTCTCCTGCAATTCCGGATACACACTGGTGGGCTCCAGGGTGCGTGAGTGCATGGCCAATGGGCTC
TGGAGTGGCTCTGAAGTCCGCTGCCTTGCTGGACACTGTGGGACTCCTGAGCCCATTGTCAACGGACA
CATCAATGGGGAGAACTACAGCTACCGGGGCAGTGTGGTGTACCAATGCAATGCTGGCTTCCGCCTGA
TCGGCATGTCTGTGCGCATCTGCCAGCAGGATCATCACTGGTCGGGCAAGACCCCTTTCTGTGTGCCA
ATTACCTGTGGACACCCAGGCAACCCTGTCAACGGCCTCACTCAGGGTAACCAGTTTAACCTCAACGA
TGTGGTCAAGTTTGTTTGCAACCCTGGGTATATGGCTGAGGGGGCTGCTAGGTCCCAATGCCTGGCCA
GCGGGCAATGGAGTGACATGCTGCCCACCTGCAGAATCATCAACTGTACAGATCCTGGACACCAAGAA
AATAGTGTTCGTCAGGTCCACGCCAGCGGCCCGCACAGGTTCAGCTTCGGCACCACTGTGTCTTACCG
GTGCAACCACGGCTTCTACCTCCTGGGCACCCCAGTGCTCAGCTGCCAGGGAGATGGCACATGGGACC
GTCCCCGCCCCCAGTGTCTCTTGGTGTCCTGTGGCCATCCGGGCTCCCCGCCTCACTCCCAGATGTCT
GGAGACAGTTATACTGTGGGAGCAGTGGTGCGGTACAGCTGCATCGGCAAGCGTACTCTGGTGGGAAA
CAGCACCCGCATGTGTGGGCTGGATGGACACTGGACTGGCTCCCTCCCTCACTGCTCAGGAACCAGCG
TGGGAGTTTGCGGTGACCCTGGGATCCCGGCTCATGGCATCCGTTTGGGGGACAGCTTTGATCCAGGC
ACTGTGATGCGCTTCAGCTGTGAAGCTGGCCACGTGCTCCGGGGATCGTCAGAGCGCACCTGTCAAGC
CAATGGCTCGTGGAGCGGCTCGCAGCCTGAGTGTGGAGTGATCTCTTGTGGGAACCCTGGGACTCCAA
GTAATGCCCGAGTTGTGTTCAGTGATGGCCTGGTTTTCTCCAGCTCTATCGTCTATGAGTGCCGGGAA
GGATACTACGCCACAGGCCTGCTCAGCCGTCACTGCTCGGTCAATGGTACCTGGACAGGCAGTGACCC
TGAGTGCCTCGTCATAAACTGTGGTGACCCTGGGATTCCAGCCAATGGCCTTCGGCTGGGCAATGACT
TCAGGTACAACAAAACTGTGACATATCAGTGTGTCCCTGGCTATATGATGGAGTCACATAGAGTATCT
GTGCTGAGCTGCACCAAGGACCGGACATGGAATGGAACCAAGCCCGTCTGCAAAGCTCTCATGTGCAA
GCCACCTCCGCTCATCCCCAATGGGAAGGTGGTGGGGTCTGACTTCATGTGGGGCTCAAGTGTGACTT
ATGCCTGCCTGGAGGGGTACCAGCTCTCCCTGCCCGCGGTGTTCACCTGTGAGGGAAATGGGTCCTGG
ACCGGAGAGCTGCCTCAGTGTTTCCCTGTGTTCTGCGGGGATCCTGGTGTCCCGTCCCGTGGGAGGAG
AGAGGACCGAGGCTTCTCCTACAGGTCATCTGTCTCCTTCTCCTGCCATCCCCCTCTGGTGCTGGTGG
GCTCTCCACGCAGGTTTTGCCAGTCAGATGGGACATGGAGTGGCACCCAGCCCAGCTGCATAGATCCG
ACCCTGACCACGTGTGCGGACCCTGGTGTGCCACAGTTTGGGATACAGAACAATTCTCAGGGCTACCA
GGTTGGAAGCACAGTCCTCTTCCGTTGTCAAAAAGGCTACCTGCTTCAGGGCTCCACCACCAGGACCT
GCCTCCCAAACCTGACCTGGAGTGGAACCCCACCTGACTGTGTCCCCCACCACTGCAGGCAGCCAGAG
ACGCCAACGCATGCCAACGTCGGGGCCCTGGATTTGCCCTCCATGGGCTACACGCTCATTACTCCTGC
CAGGAGGGCTTCTCCCTCAAGGGTGGCTCCGAGCACCGCACCTGCAAGGCGGATGGCAGCTGGACAGG
CAAGCCGCCCATCTGCCTGGAGGTCCGGCCCAGTGGGAGACCCATCAACACTGCCCGGGAGCCACCGC
TCACCCAAGCCTTGATTCCTGGGGATGTTTTTGCCAAGAATTCCCTGTGGAAAGGGGCCTATGAATAC
CAGGGGAAGAAGCAGCCAGCCATGCTCAGAGTGACTGGCTTCCAAGTTGCCAACAGCAAGGTCAATGC
CACCATGATCGACCACAGTGGCGTGGAGCTGCACTTGGCTGGAACTTACAAGAAAGAAGATTTTCATC
TCCTACTCCAGGTGTACCAGATTACAGGGCCTGTGGAGATCTTTATGAATAAGTTCAAAGATGATCAC
TGGGCTTTAGATGGCCATGTCTCGTCAGAGTCCTCCGGAGCCACCTTCATCTACCAAGGCTCTGTCAA
GGGCCAAGGCTTTGGGCAGTTCGGCTTTCAAAGACTGGACCTCAGGCTGCTGGAGTCAGACCCCGAGT
CCATTGGCCGCCACTTTGCTTCCAACAGCAGCTCAGTGGCAGCCGCGATCCTGGTGCCTTTCATCGCC
CTCATTATTGCGGGCTTCGTGCTCTATCTCTACAAGCACAGGAGAAGACCCAAAGTTCCTTTCAATGG
CTATGCTGGCCACGAGAACACCAATGTTCGGGCCACATTTGAGAACCCAATGTACGACCGCAACATCC
AGCCCACAGACATCATGGCCAGCGAGGCGGAGTTCACAGTCAGCACAGTGTGCACAGCAGTATAGCCA
CCCGGCCTGGCCGCTTTTTTTGCTAGGTTGAACTGGTACTCCAGCAGCCGCCCAAGCTGGACTGTACT
GCTGCCATCTCAGCTCACTGCAACCTCCCTGCCTGATTCCCCTGCCTCAGCCTGCCGAGTGCCTGCGA
TTGCAGGCGCGCACCGCCAC

| | | |
|---|---|---|
| NOV4o, CG50377-11 | SEQ ID NO: 60 | 882 aa MW at 94686.1kD |
| Protein Sequence | | |

MAICTRHPQGYHLWSEAIPLCQALSCGLPEAPKNGMVFGKEYTVGTKAVYSCSEGYHLQAGAEATAEC
LDTGLWSNRNVPPQCVPVTCPDVSSISVEHGRWRLIFETQYQFQAQLMLICDPGYYYTGQRVIRCQAN
GKWSLGDSTPTCRIISCGELPIPPNGHRIGTLSVYGATAIFSCNSGYTLVGSRVRECMANGLWSGSEV
RCLAGHCGTPEPIVNGHINGENYSYRGSVVYQCNAGFRLIGMSVRICQQDHHWSGKTPFCVPITCGHP
GNPVNGLTQGNQFNLNDVVKFVCNPGYMAEGAARSQCLASGQWSDMLPTCRIINCTDPGHQENSVRQV
HASGPHRFSFGTTVSYRCNHGFYLLGTPVLSCQGDGTWDRPRPQCLLVSCGHPGSPPHSQMSGDSYTV
GAVVRYSCIGKRTLVGNSTRMCGLDGHWTGSLPHCSGTSVGVCGDPGIPAHGTRLGDSFDPGTVMRFS
CEAGHVLRGSSERTCQANGSWSGSQPECGVISCGNPGTPSNARVVFSDGLVFSSSIVYECREGYYATG
LLSRHCSVNGTWTGSDPECLVINCGDPGIPANGLRLGNDFRYNKTVTYQCVPGYMMESHRVSVLSCTK
DRTWNGTKPVCKALMCKPPPLIPNGKVVGSDFMWGSSVTYACLEGYQLSLPAVFTCEGNGSWTGELPQ
CFPVFCGDPGVPSRGRREDRGFSYRSSVSFSCHPPLVLVGSPRRFCQSDGTWSGTQPSCIDPTLTTCA
DPGVPQFGIQNNSQGYQVGSTVLFRCQKGYLLQGSTTRTCLPNLTWSGTPPDCVPHHCRQPETPTHAN
VGALDLPSMGYTLITPARRASPSRVAPSTAPARRMAAGQASRPSAWRSGPVGDPSTLPGSHRSPKP

| | | |
|---|---|---|
| NOV4p, SNP13382457 of | SEQ ID NO: 61 | 10136 bp |
| CG50377-01, DNA Sequence | ORF Start: ATG at 1 | ORF Stop: TGA at 9313 |
| | SNP Pos: 3120 | SNP Change: G to A |

ATGGCGGGCGCCCCTCCCCCCGCCTTGCTGCTGCCTTGCAGTTTGATCTCAGACTGCTGTGCTAGCAA
TCAGCGACACTCCGTGGGCGTAGGACCCTCCGAGCTAGTCAAGAAGCAAATTGAGTTGAAGTCTCGAG
GTGTGAAGCTGATGCCCAGCAAAGACAACAGCCAGAAGACGTCTGTGTTAACTCAGGTTGGTGTGTCC
CAAGGACATAATATGTGTCCAGACCCTGGCATACCCGAAAGGGGCAAAAGACTAGGCTCGGATTTCAG
GTTAGGATCCAGCGTCCAGTTCACCTGCAACGAGGGCTATGACCTGCAAGGGTCCAAGCGGATCACCT
GTATGAAAGTGAGCGACATGTTTGCGGCCTGGAGCGACCACAGGCCAGTCTGCCGAGCCCGCATGTGT
GATGCCCACCTTCGAGGCCCCTCGGGCATCATCACCTCCCCCAATTTCCCCATTCAGTATGACAACAA
TGCACACTGTGTGTGGATCATCACAGCACTCAACCCCTCCAAGGTGATCAAGCTCGCCTTTGAGGAGT
TTGATTTGGAGAGGGGCTATGACACCCTGACGGTCGGTGATGGTGGTCAGGATGGGGACCAGAAGACA
GTTCTCTACATGTCTCAAAATGCCTGCAGTGACAGCCCTCACACCCCAGGCTCTCGCATCCCAGAGAG
CATGTCTGGGGACATCTGGAGGCAGAAATGGACTGTACTTGAGATCTGTCGTGACATTAGCAGTTCAG
ATGCAAGGTCAGGTTCAGTGAGGAAGTCTCCAAAGACTTCTAATGCTGTGGAACTTGTTGCTCCTGGG
ACAGAGATCGAGCAGGGCAGTTGCGGTGACCCTGGCATACCTGCATATGGCCGGAGGGAAGGCTCCCG
GTTTCACCACGGTGACACACTCAAGTTTGAGTGCCAGCCCGCCTTTGAGCTGGTGGGACAGAAGGCAA
TCACATGCCAAAAGAATAACCAATGGTCGGCTAAGAAGCCAGGCTGCGTGTTCTCCTGCTTCTTCAAC
TTCACCAGCCCGTCTGGGGTTGTCCTGTCTCCCAACTACCCAGAGGACTATGGCAACCACCTCCACTG
TGTCTGGCTCATCCTGGCCAGGCCTGAGAGCCGCATCCACCTGGCCTTCAACGACATTGACGTGGAGC
CTCAGTTTGATTTCCTGGTCATCAAGGATGGGGCCACCGCCGAGGCGCCCGTCCTGGGCACCTTCTCA
GGAAACCAGCTTCCCTCCTCCATCACAAGCAGTGGCCACGTGGCCCGTCTCGAGTTCCAGACTGACCA
CTCCACAGGGAAGAGGGGCTTCAACATCACTTTTACCACCTTCCGACACAACGAGTGCCCGGATCCTG
GCGTTCCAGTAAATGGCAAACGGTTTGGGGACAGCCTCCAGCTGGGCAGCTCCATCTCCTTCCTCTGT
GATGAAGGCTTCCTTGGGACTCAGGGCTCAGAGACCATCACCTGCGTCCTGAAGGAGGGCAGCGTGGT
CTGGAACAGCGCTGTGCTGCGGTGTGAAGCTCCCTGTGGTGGTCACCTGACTTCGCCCAGCGGCACCA
TCCTCTCTCCGGGCTGGCCTGGCTTCTACAAGGATGCCTTGAGCTGTGCCTGGGTGATTGAGGCCCAG
CCAGGCTACCCCATCAAAATCACCTTCGACAGATTCAAAACCGAGGTCAACTATGACACCCTGGAAGT
ACGCGATGGGCGGACTTACTCAGCGCCCTTGATCGGGGTTTACCACGGGACCCAGGTTCCCCAGTTCC
TCATCAGCACCAGCAACTACCTCTACCTCCTCTTCTCTACCGACAAGAGTCACTCGGACATCGGCTTC
CAGCTCCGCTATGAGACTATAACACTGCAGTCAGACCACTGTCTGGATCCAGGAATCCCAGTAAATGG
ACAGCGTCATGGGAATGACTTCTACGTGGGCGCGCTGGTGACCTTCAGCTGTGACTCGGGCTACACAT
TAAGTGACGGGGAGCCTCTGGAGTGTGAGCCCAACTTCCAGTGGAGCCGGGCCCTGCCCAGTTGTGAA
GCTCTCTGTGGTGGCTTCATTCAAGGCTCCAGTGGGACCATCTTGTCGCCAGGGTTCCCTGACTTCTA
CCCCAACAACTTGAACTGCACCTGGATTATCGAAACATCTCATGGCAAGGGTGTGTTCTTCACTTTCC
ACACCTTCCACCTGGAAAGTGGCCATGACTACCTCCTCATCACTGAGAACGGCAGCTTCACCCAGCCC
CTGAGGCAGCTAACTGGATCTCGGCTGCCAGCTCCCATCAGCGCTGGGCTCTATGGCAACTTCACTGC
CCAGGTCCGCTTCATCTCTGATTTCTCCATGTCATATGAAGGATTCAACATCACCTTCTCAGAGTACG
ACTTGGAGCCCTGTGAGGAGCCCGAGGTCCCAGCCTACAGCATCCGGAAGGGCTTGCAGTTTGGCGTG
GGCGACACCTTGACCTTCTCCTGCTTCCCCGGGTACCGTCTGGAGGGCACCGCCCGCATCACGTGCCT
GGGGGGCAGACGGCGCCTGTGGAGCTCGCCTCTGCCAAGGTGTGTTGCTGAGTGTGGGAATTCAGTCA
CAGGCACTCAGGGTACTTTGCTGTCCCCCAACTTTCCTGTGAACTACAATAACAATCATGAATGCATC
TACTCCATCCAGACCCAGCCAGGGAAGGGAATTCAGCTGAAAGCCAGGGCATTCGAACTCTCCGAAGG
AGATGTCCTCAAGGTTTATGATGGCAACAACAACTCCGCCCGTTTGCTGGGAGTTTTTAGCCATTCTG
AGATGATGGGGGTGACTTTGAACAGCACATCCAGCAGTCTGTGGCTTGATTTCATCACTGATGCTGAA
AACACCAGCAAGGGCTTTGAACTGCACTTTTCCAGCTTTGAACTCATCAAATGTGAGGACCCAGGAAC
CCCCAAGTTTGGCTACAAGGTTCATGATGAAGGTCATTTTGCAGGGAGCTCCGTGTCCTTCAGCTGTG
ACCCTGGATACAGCCTGCGGGGTAGTGAGGAGCTGCTGTGTCTGAGTGGAGAGCGCCGGACCTGGGAC
CGGCCTCTGCCCACCTGTGTCGCCGAGTGTGGAGGGACAGTGAGAGGAGAGGTGTCGGGACAGGTGCT
GTCACCCGGGTATCCAGCTCCCTATGAACACAATCTCAACTGCATCTGGACCATCGAAGCAGAGGCCG
GCTGCACCATTGGGCTACACTTCCTGGTGTTTGACACAGAGGAGGTTCACGACGTGCTGCGCATCTGG
GATGGGCCTGTGGAGAGCGGGGTTCTGCTGAAGGAGCTGAGTGGCCCGGCCCTGCCCAAGGACCTGCA
TAGCACCTTCAACTCGGTCGTCCTGCAGTTCAGCACTGACTTCTTCACCAGCAAGCAGGGCTTTGCCA
TTCAATTTTCAGTGTCCACAGCAACGTCCTGCAATGACCCTGGGATCCCGCAGAATGGGAGTCGGAGT
GGTGACAGTTGGGAAGCCGGCGACTCCACAGTGTTCCAGTGTGACCCTGGCTACGCGCTGCAGGGAAG
TGCAGAGATCAGCTGTGTGAAGATCGAGAACAGGTTCTTCTGGCAGCCCAGCCCGCCAACATGCATCG
CTCCCTGCGGGGGAGACCTGACAGGACCATCTGGAGTCATCCTCTCACCAAATTACCCAGAACCCTAC
CCGCCAGGCAAGGAGTGTGACTGGAAAGTGACCGTCTCACCAGACTACGTCATCGCCCTGGTATTTAA
CATCTTTAACCTGGAGCCTGGCTATGACTTCCTCCATATCTACGACGGACGGGACTCTCTCAGCCCTC
TCATAGGAAGCTTCTATGGCTCCCAGCTCCCAGGCCGCATTGAAAGCAGCAGCAACAGCCTCTTCCTC
GCCTTCCGCAGCGATGCATCTGTGAGCAATGCTGGCTTCGTCATTGACTATACAGAAAACCCGCGGGA
GTCATGTTTTGATCCTGGTTCCATCAAGAACGGCACACGGGTGGGGTCCGACCTGAAGCTGGGCTCCT
CCGTCACCTACTACTGCCACGGGGGCTACGAAGTTGAGGGCACCTCGACCCTGAGCTGCATCCTGGGG
CCTGATGGGAAGCCCGTGTGGAACAATCCCCGGCCAGTCTGCACAGCCCCCTGTGGGGGACAGTATGT
GGGTTCGGACGGAGTGGTCTTGTCCCCCAACTACCCCCAGAACTACACCAGTGGACAGATCTGCTTGT
ATTTTGTTACTGTGCCCAAGGACTATGTGGTGTTTGGCCAGTTCGCCTTCTTTCACACGGCCCTCAAC
GACGTGGTGGAGGTTCACGACGGCCACAGCCAGCACTCGCGGCTCCTCAGCTCCCTCTCGGGCTCCCA
TACAGGAGAATCACTGCCCTTGGCCACCTCCAATCAAGTTCTCATTAAGTTCAGCGCCAAAGGCCTCG
CACCAGCCAGAGGCTTCCACTTTGTCTACCAAGCGGTTCCTCGAACCAGCGCCACGCAGTGCAGCTCT
GTGCCGGAACCCCGCTATGGCAAGAGGCTGGGCAGTGACTTCTCGGTGGGGGCCATCGTCCGCTTCGA
ATGCAACTCCGGCTATGCCCTGCAGGGGTCGCCAGAGATCGAGTGCCTCCCTGTGCCTGGGGCCTTGG
CCCAATGGAATGTCTCAGCGCCCACGTGTGTGGTGCCGTGTGGAGGCAACCTCACAGAGCGCAGGGGC
ACCATCCTGTCCCCTGGCTTCCCAGAGCCGTACCTCAACAGCCTCAACTGTGTGTGGAAGATCGTGGT
CCCCGAAGGCGCTGGCATCCAGATCCAAGTTGTCAGTTTTGTGACAGAGCAGAACTGGGACTCGCTGG
AAGTATTTGATGGTGCAGATAACACTGTAACCATGCTGGGGAGTTTCTCAGGAACAACCGTGCCTGCC
CTTCTGAACAGCACCTCCAACCAGCTCTACCTTCATTTCTACTCAGATATCAGCGTATCTGCAGCTGG
CTTCCACTTGGAGTACAAAACGGTGGGCCTGAGCAGTTGTCCGGAACCTGCTGTGCCCAGTAACGGGG
TGAAGACTGGCGAGCGCTACTTGGTGAATGATGTGGTGTCTTTCCAGTGTGAGCCGGGATATGCCCTC
CAGGGCCACGCCCACATCTCCTGCATGCCCGGAACAGTGCGGCGATGGAACTACCCTCCTCCACTCTG
TATTGCACAGTGTGGGGGAACAGTGGAGGAGATGGAGGGGGTGATCCTGAGCCCCGGCTTCCCAGGCA
ACTACCCCAGTAACATGGACTGCTCCTGGAAAATAGCACTGCCCGTGGGCTTTGGAGCTCACATCCAG
TTCCTGAACTTCTCCACCGAGCCCAACCACGACTACATAGAAATCCGGAATGGCCCCTATGAGACCAG
CCGCATGATGGGAAGATTCAGTGGAAGCGAGCTTCCAAGCTCCCTCCTCTCCACGTCCCACGAGACCA
CCGTGTATTTCCACAGCGACCACTCCCAGAATCGGCCAGGATTCAAGCTGGAGTATCAGGCCTATGAA
CTTCAAGAGTGCCCAGACCCAGAGCCCTTTGCCAATGGCATTGTGAGGGGAGCTGGCTACAACGTGGG
ACAATCAGTGACCTTCGAGTGCCTCCCGGGGTATCAATTGACTGGCCACCCTGTCCTCACGTGTCAAC
ATGGCACCAACCGGAACTGGGACCACCCCCTGCCCAAGTGTGAAGTCCCTTGTGGCGGGAACATCACT
TCTTCCAACGGCACTGTGTACTCCCCGGGGTTCCCTAGCCCGTACTCCAGCTCCCAGGACTGTGTCTG
GCTGATCACCGTGCCCATTGGCCATGGCGTCCGCCTCAACCTCAGCCTGCTGCAGACAGAGCCCTCTG
GAGATTTCATCACCATCTGGGATGGGCCACAGCAAACAGCACCACGGCTCGGCGTCTTCACCCGGAGC
ATGGCCAAGAAAACAGTGCAGAGTTCATCCAACCAGGTCCTGCTCAAGTTCCACCGTGATGCAGCCAC
AGGGGGGATCTTCGCCATAGCTTTCTCCGCTTATCCACTCACCAAATGCCCTCCTCCCACCATCCTCC
CCAACGCCGAAGTCGTCACAGAGAATGAAGAATTCAATATAGGTGACATCGTACGCTACAGATGCCTC
CCTGGCTTTACCTTAGTGGGGAATGAAATTCTGACCTGCAAACTTGGAACCTACCTGCAGTTTGAAGG
ACCACCCCCGATATGTGAAGTGCACTGTCCAACAAATGAGCTTCTGACAGACTCCACAGGCGTGATCC
TGAGCCAGAGCTACCCTGGAAGCTATCCCCAGTTCCAGACCTGCTCTTGGCTGGTGAGAGTGGAGCCC
GACTATAACATCTCCCTCACAGTGGAGTACTTCCTCAGCGAGAAGCAATATGATGAGTTTGAGATTTT
TGATGGTCCATCAGGACAGAGTCCTCTGCTGAAAGCCCTCAGTGGGAATTACTCAGCTCCCCTGATTG
TCACCAGCTCAAGCAACTCTGTGTACCTGCGTTGGTCATCTGATCACGCCTACAATCGGAAGGGCTTC
AAGATCCGCTATTCAGCCCCTTACTGCAGCCTGCCCAGGGCTCCACTCCATGGCTTCATCCTAGGCCA
GACCAGCACCCAGCCCGGGGGCTCCATCCACTTTGGCTGCAACGCCGGCTACCGCCTGGTGGGACACA
GCATGGCCATCTGTACCCGGCACCCCCAGGGCTACCACCTGTGGAGCGAAGCCATCCCTCTCTGTCAA
GCTCTTTCCTGTGGGCTTCCTGAGGCCCCCAAGAATGGAATGGTGTTTGGCAAGGAGTACACAGTGGG
AACCAAGGCCGTGTACAGCTGCAGTGAAGGCTACCACCTCCAGGCAGGCGCTGAGGCCACTGCAGAGT
GTCTGGACACAGGCCTATGGAGCAACCGCAATGTCCCACCACAGTGTGTCCCTGTGACTTGTCCTGAT
GTCAGTAGCATCAGCGTGGAGCATGGCCGATGGAGGCTTATCTTTGAGACACAGTATCAGTTCCAGGC
CCAGCTGATGCTCATCTGTGACCCTGGCTACTACTATACTGGCCAAAGGGTCATCCGCTGTCAGGCCA
ATGGCAAATGGAGCCTCGGGGACTCTACGCCCACCTGCCGAATCATCTCCTGTGGAGAGCTCCCGATT
CCCCCCAATGGCCACCGCATCGGAACACTGTCTGTCTACGGGGCAACAGCCATCTTCTCCTGCAATTC
CGGATACACACTGGTGGGCTCCAGGGTGCGTGAGTGCATGGCCAATGGGCTCTGGAGTGGCTCTGAAG
TCCGCTGCCTTGCTGGACACTGTGGGACTCCTGAGCCCATTGTCAACGGACACATCAATGGGGAGAAC
TACAGCTACCGGGGCAGTGTGGTGTACCAATGCAATGCTGGCTTCCGCCTGATCGGCATGTCTGTGCG
CATCTGCCAGCAGGATCATCACTGGTCGGGCAAGACCCCTTTCTGTGTGCCAATTACCTGTGGACACC
CAGGCAACCCTGTCAACGGCCTCACTCAGGGTAACCAGTTTAACCTCAACGATGTGGTCAAGTTTGTT
TGCAACCCTGGGTATATGGCTGAGGGGGCTGCTAGGTCCCAATGCCTGGCCAGCGGGCAATGGAGTGA
CATGCTGCCCACCTGCAGAATCATCAACTGTACAGATCCTGGACACCAAGAAAATAGTGTTCGTCAGG
TCCACGCCAGCGGCCCGCACAGGTTCAGCTTCGGCACCACTGTGTCTTACCGGTGCAACCACGGCTTC
TACCTCCTGGGCACCCCAGTGCTCAGCTGCCAGGGAGATGGCACATGGGACCGTCCCCGCCCCCAGTG
TCTCTTGGTGTCCTGTGGCCATCCGGGCTCCCCGCCTCACTCCCAGATGTCTGGAGACAGTTATACTG
TGGGAGCAGTGGTGCGGTACAGCTGCATCGGCAAGCGTACTCTGGTGGGAAACAGCACCCGCATGTGT
GGGCTGGATGGACACTGGACTGGCTCCCTCCCTCACTGCTCAGGAACCAGCGTGGGAGTTTGCGGTGA
CCCTGGGATCCCGGCTCATGGCATCCGTTTGGGGGACAGCTTTGATCCAGGCACTGTGATGCGCTTCA
GCTGTGAAGCTGGCCACGTGCTCCGGGGATCGTCAGAGCGCACCTGTCAAGCCAATGGCTCGTGGAGC
GGCTCGCAGCCTGAGTGTGGAGTGATCTCTTGTGGGAACCCTGGGACTCCAAGTAATGCCCGAGTTGT
GTTCAGTGATGGCCTGGTTTTCTCCAGCTCTATCGTCTATGAGTGCCGGGAAGGATACTACGCCACAG
GCCTGCTCAGCCGTCACTGCTCGGTCAATGGTACCTGGACAGGCAGTGACCCTGAGTGCCTCGTCATA
AACTGTGGTGACCCTGGGATTCCAGCCAATGGCCTTCGGCTGGGCAATGACTTCAGGTACAACAAAAC
TGTGACATATCAGTGTGTCCCTGGCTATATGATGGAGTCACATAGAGTATCTGTGCTGAGCTGCACCA
AGGACCGGACATGGAATGGAACCAAGCCCGTCTGCAAAGCTCTCATGTGCAAGCCACCTCCGCTCATC
CCCAATGGGAAGGTGGTGGGGTCTGACTTCATGTGGGGCTCAAGTGTGACTTATGCCTGCCTGGAGGG
GTACCAGCTCTCCCTGCCCGCGGTGTTCACCTGTGAGGGAAATGGGTCCTGGACCGGAGAGCTGCCTC
AGTGTTTCCCTGTGTTCTGCGGGGATCCTGGTGTCCCGTCCCGTGGGAGGAGAGAGGACCGAGGCTTC
TCCTACAGGTCATCTGTCTCCTTCTCCTGCCATCCCCCTCTGGTGCTGGTGGGCTCTCCACGCAGGTT
TTGCCAGTCAGATGGGACATGGAGTGGCACCCAGCCCAGCTGCATAGATCCGACCCTGACCACGTGTG
CGGACCCTGGTGTGCCACAGTTTGGGATACAGAACAATTCTCAGGGCTACCAGGTTGGAAGCACAGTC
CTCTTCCGTTGTCAAAAAGGCTACCTGCTTCAGGGCTCCACCACCAGGACCTGCCTCCCAAACCTGAC
CTGGAGTGGAACCCCACCTGACTGTGTCCCCCACCACTGCAGGCAGCCAGAGACGCCAACGCATGCCA
ACGTCGGGGCCCTGGATTTGCCCTCCATGGGCTACACGCTCATTACTCCTGCCAGGAGGGCTTCTCCC
TCAAGGGTGGCTCCGAGCACCGCACCTGCAAGGCGGATGGCAGCTGGACAGGCAAGCCGCCCATCTGC
CTGGAGGTCCGGCCCAGTGGGAGACCCATCAACACTGCCCGGGAGCCACCGCTCACCCAAGCCTTGAT
TCCTGGGGATGTTTTTGCCAAGAATTCCCTGTGGAAAGGGGCCTATGAATACCAGGGGAAGAAGCAGC
CAGCCATGCTCAGAGTGACTGGCTTCCAAGTTGCCAACAGCAAGGTCAATGCCACCATGATCGACCAC
AGTGGCGTGGAGCTGCACTTGGCTGGAACTTACAAGAAAGAAGATTTTCATCTCCTACTCCAGGTGTA
CCAGATTACAGGGCCTGTGGAGATCTTTATGAATAAGTTCAAAGATGATCACTGGGCTTTAGATGGCC
ATGTCTCGTCAGAGTCCTCCGGAGCCACCTTCATCTACCAAGGCTCTGTCAAGGGCCAAGGCTTTGGG
CAGTTCGGCTTTCAAAGACTGGACCTCAGGCTGCTGGAGTCAGACCCCGAGTCCATTGGCCGCCACTT
TGCTTCCAACAGCAGCTCAGTGGCAGCCGCGATCCTGGTGCCTTTCATCGCCCTCATTATTGCGGGCT
TCGTGCTCTATCTCTACAAGCACAGGAGAAGACCCAAAGTTCCTTTCAATGGCTATGCTGGCCACGAG
AACACCAATGTTCGGGCCACATTTGAGAACCCAATGTACGACCGCAACATCCAGCCCACAGACATCAT
GGCCAGCGAGGCGGAGTTCACAGTCAGCACAGTGTGCACAGCAGTATAGCCACCCGGCCTGGCCGCTT
TTTTTGCTAGGTTGAACTGGTACTCCAGCAGCCGCCGAAGCTGGACTGTACTGCTGCCATCTCAGCTC
CCAC

| | | | |
|---|---|---|---|
| NOV4p, SNP13382457 of | SEQ ID NO: 62 | 3104 aa | MW at 336746.3kD |
| CG50377-01, | SNP Pos: 1040 | | SNP Change: Gly to Gly |
| Protein Sequence | | | |

MAGAPPPALLLPCSLISDCCASNQRHSVGVGPSELVKKQIELKSRGVKLMPSKDNSQKTSVLTQVGVS
QGHNMCPDPGIPERGKRLGSDFRLGSSVQFTCNEGyDLQGSKRITCMKVSDMFAAWSDHRPVCRARMC
DAHLRGPSGIITSPNFPIQYDNNAHCVWIITALNPSKVIKLAFEEFDLERGYDTLTVGDGGQDGDQKT
VLYMSQNACSDSPHTPGSRIPESMSGDIWRQKWTVLEICRDISSSDARSGSVRKSPKTSNAVELVAPG
TEIEQGSCGDPGIPAYGRREGSRFHHGDTLKFECQPAFELVGQKAITCQKNNQWSAKKPGCVFSCFFN
FTSPSGVVLSPNYPEDYGNHLHCVWLILARPESRIHLAFNDIDVEPQFDFLVIKDGATAEAPVLGTFS
GNQLPSSITSSGHVARLEFQTDHSTGKRGFNITFTTFRHNECPDPGVPVNGKRFGDSLQLGSSISFLC
DEGFLGTQGSETITCVLKEGSVVWNSAVLRCEAPCGGHLTSPSGTILSPGWPGFYKDALSCAWVIEAQ
PGYPIKITFDRFKTEVNYDTLEVRDGRTYSAPLIGVYHGTQVPQFLISTSNYLYLLFSTDKSHSDIGF
QLRYETITLQSDHCLDPGIPVNGQRHGNDFYVGALVTFSCDSGYTLSDGEPLECEPNFQWSRALPSCE
ALCGGFIQGSSGTILSPGFPDFYPNNLNCTWIIETSHGKGVFFTFHTFHLESGHDYLLITENGSFTQP
LRQLTGSRLPAPISAGLYGNFTAQVRFISDFSMSYEGFNITFSEYDLEPCEEPEVPAYSIRKGLQFGV
GDTLTFSCFPGYRLEGTARITCLGGRRRLWSSPLPRCVAECGNSVTGTQGTLLSPNFPVNYNNNHECI
YSIQTQPGKGIQLKAPAFELSEGDVLKVYDGNNNSARLLGVFSHSEMMGVTLNSTSSSLWLDFITDAE
NTSKGFELHFSSFELIKCEDPGTPKFGYKVHDEGHFAGSSVSFSCDPGYSLRGSEELLCLSGERRTWD
RPLPTCVAECGGTVRGEVSGQVLSPGYPAPYEHNLNCIWTIEAEAGCTIGLHFLVFDTEEVHDVLRIW
DGPVESGVLLKELSGPALPKDLHSTFNSVVLQFSTDFFTSKQGFAIQFSVSTATSCNDPGIPQNGSRS
GDSWEAGDSTVFQCDPGYALQGSAEISCVKIENRFFWQPSPPTCIAPCGGDLTGPSGVILSPNYPEPY
PPGKECDWKVTVSPDYVIALVFNIFNLEPGYDFLHIYDGRDSLSPLIGSFYGSQLPGRIESSSNSLFL
AFRSDASVSNAGFVIDYTENPRESCFDPGSIKNGTRVGSDLKLGSSVTYYCHGGYEVEGTSTLSCILG
PDGKPVWNNPRPVCTAPCGGQYVGSDGVVLSPNYPQNYTSGQICLYFVTVPKDYVVFGQFAFFHTALN
DVVEVHDGHSQHSRLLSSLSGSHTGESLPLATSNQVLIKFSAKGLAPARGFHFVYQAVPRTSATQCSS
VPEPRYGKRLGSDFSVGAIVRFECNSGYALQGSPEIECLPVPGALAQWNVSAPTCVVPCGGNLTERRG
TILSPGFPEPYLNSLNCVWKIVVPEGAGIQIQVVSFVTEQNWDSLEVFDGADNTVTMLGSFSGTTVPA
LLNSTSNQLYLHFYSDISVSAAGFHLEYKTVGLSSCPEPAVPSNGVKTGERYLVNDVVSFQCEPGYAL
QGHAHISCMPGTVRRWNYPPPLCIAQCGGTVEEMEGVILSPGFPGNYPSNMDCSWKIALPVGFGAHIQ
FLNFSTEPNHDYIEIRNGPYETSRMMGRFSGSELPSSLLSTSHETTVYFHSDHSQNRPGFKLEYQAYE
LQECPDPEPFANGIVRGAGYNVGQSVTFECLPGYQLTGHPVLTCQHGTNRNWDHPLPKCEVPCGGNIT
SSNGTVYSPGFPSPYSSSQDCVWLITVPIGNGVRLNLSLLQTEPSGDFITIWDGPQQTAPRLGVFTRS
MAKKTVQSSSNQVLLKFHRDAATGGIFAIAFSAYPLTKCPPPTILPNAEVVTENEEFNIGDIVRYRCL
PGFTLVGNEILTCKLGTYLQFEGPPPICEVHCPTNELLTDSTGVILSQSYPGSYPQFQTCSWLVRVEP
DYNISLTVEYFLSEKQYDEFEIFDGPSGQSPLLKALSGNYSAPLIVTSSSNSVYLRWSSDHAYNRKGF
KIRYSAPYCSLPPAPLHGFILGQTSTQPGGSIHFGCNAGYRLVGHSMAICTRHPQGYHLWSEAIPLCQ
ALSCGLPEAPKNGMVFGKEYTVGTKAVYSCSEGYHLQAGAEATAECLDTGLWSNRNVPPQCVPVTCPD
VSSISVEHGRWRLIFETQYQFQAQLMLICDPGYYYTGQRVIRCQANGKWSLGDSTPTCRIISCGELPI
PPNGHRIGTLSVYGATAIFSCNSGYTLVGSRVRECMANGLWSGSEVRCLAGHCGTPEPIVNGHINGEN
YSYRGSVVYQCNAGFRLIGMSVRICQQDHHWSGKTPFCVPITCGHPGNPVNGLTQGNQFNLNDVVKFV
CNPGYMAEGAARSQCLASGQWSDMLPTCRIINCTDPGHQENSVRQVHASGPHRFSFGTTVSYRCNHGF
YLLGTPVLSCQGDGTWDRPRPQCLLVSCGHPGSPPHSQMSGDSYTVGAVVRYSCIGKRTLVGNSTRMC
GLDGHWTGSLPHCSGTSVGVCGDPGIPAHGIRLGDSFDPGTVMRFSCEAGHVLRGSSERTCQANGSWS
GSQPECGVISCGNPGTPSNARVVFSDGLVFSSSIVYECREGYYATGLLSRHCSVNGTWTGSDPECLVI
NCGDPGIPANGLRLGNDFRYNKTVTYQCVPGYMMESHRVSVLSCTKDRTWNGTKPVCKALMCKPPPLI
PNGKVVGSDFMWGSSVTYACLEGYQLSLPAVFTCEGNGSWTGELPQCFPVFCGDPGVPSRGRPEDRGF
SYRSSVSFSCHPPLVLVGSPRRFCQSDGTWSGTQPSCIDPTLTTCADPGVPQFGIQNNSQGYQVGSTV
LFRCQKGYLLQGSTTRTCLPNLTWSGTPPDCVPHHCRQPETPTHANVGALDLPSMGYTLITPARRASP
SRVAPSTAPARPMAAGQASRPSAWRSGPVGDPSTLPGSHRSPKP

| | | |
|---|---|---|
| NOV4q, SNP13382458 of | SEQ ID NO: 63 | 10136 bp |
| CG50377-01, DNA Sequence | ORF Start: ATG at 1 | ORF Stop: TGA at 9313 |
| | SNP Pos: 4429 | SNP Change: A to G |

ATGGCGGGCGCCCCTCCCCCCGCCTTGCTGCTGCCTTGCAGTTTGATCTCAGACTGCTGTGCTAGCAA
TCAGCGACACTCCGTGGGCGTAGGACCCTCCGAGCTAGTCAAGAAGCAAATTGAGTTGAAGTCTCGAG
GTGTGAAGCTGATGCCCAGCAAAGACAACAGCCAGAAGACGTCTGTGTTAACTCAGGTTGGTGTGTCC
CAAGGACATAATATGTGTCCAGACCCTGGCATACCCGAAAGGGGCAAAAGACTAGGCTCGGATTTCAG
GTTAGGATCCAGCGTCCAGTTCACCTGCAACGAGGGCTATGACCTGCAAGGGTCCAAGCGGATCACCT
GTATGAAAGTGAGCGACATGTTTGCGGCCTGGAGCGACCACAGGCCAGTCTGCCGAGCCCGCATGTGT
GATGCCCACCTTCGAGGCCCCTCGGGCATCATCACCTCCCCCAATTTCCCCATTCAGTATGACAACAA
TGCACACTGTGTGTGGATCATCACAGCACTCAACCCCTCCAAGGTGATCAAGCTCGCCTTTGAGGAGT
TTGATTTGGAGAGGGGCTATGACACCCTGACGGTCGGTGATGGTGGTCAGGATGGGGACCAGAAGACA
GTTCTCTACATGTCTCAAAATGCCTGCAGTGACAGCCCTCACACCCCAGGCTCTCGCATCCCAGAGAG
CATGTCTGGGGACATCTGGAGGCAGAAATGGACTGTACTTGAGATCTGTCGTGACATTAGCAGTTCAG
ATGCAAGGTCAGGTTCAGTGAGGAAGTCTCCAAAGACTTCTAATGCTGTGGAACTTGTTGCTCCTGGG
ACAGAGATCGAGCAGGGCAGTTGCGGTGACCCTGGCATACCTGCATATGGCCGGAGGGAAGGCTCCCG
GTTTCACCACGGTGACACACTCAAGTTTGAGTGCCAGCCCGCCTTTGAGCTGGTGGGACAGAAGGCAA
TCACATGCCAAAAGAATAACCAATGGTCGGCTAAGAAGCCAGGCTGCGTGTTCTCCTGCTTCTTCAAC
TTCACCAGCCCGTCTGGGGTTGTCCTGTCTCCCAACTACCCAGAGGACTATGGCAACCACCTCCACTG
TGTCTGGCTCATCCTGGCCAGGCCTGAGAGCCGCATCCACCTGGCCTTCAACGACATTGACGTGGAGC
CTCAGTTTGATTTCCTGGTCATCAAGGATGGGGCCACCGCCGAGGCGCCCGTCCTGGGCACCTTCTCA
GGAAACCAGCTTCCCTCCTCCATCACAAGCAGTGGCCACGTGGCCCGTCTCGAGTTCCAGACTGACCA
CTCCACAGGGAAGAGGGGCTTCAACATCACTTTTACCACCTTCCGACACAACGAGTGCCCGGATCCTG
GCGTTCCAGTAAATGGCAAACGGTTTGGGGACAGCCTCCAGCTGGGCAGCTCCATCTCCTTCCTCTGT
GATGAAGGCTTCCTTGGGACTCAGGGCTCAGAGACCATCACCTGCGTCCTGAAGGAGGGCAGCGTGGT
CTGGAACAGCGCTGTGCTGCGGTGTGAAGCTCCCTGTGGTGGTCACCTGACTTCGCCCAGCGGCACCA
TCCTCTCTCCGGGCTGGCCTGGCTTCTACAAGGATGCCTTGAGCTGTGCCTGGGTGATTGAGGCCCAG
CCAGGCTACCCCATCAAAATCACCTTCGACAGATTCAAAACCGAGGTCAACTATGACACCCTGGAAGT
ACGCGATGGGCGGACTTACTCAGCGCCCTTGATCGGGGTTTACCACGGGACCCAGGTTCCCCAGTTCC
TCATCAGCACCAGCAACTACCTCTACCTCCTCTTCTCTACCGACAAGAGTCACTCGGACATCGGCTTC
CAGCTCCGCTATGAGACTATAACACTGCAGTCAGACCACTGTCTGGATCCAGGAATCCCAGTAAATGG
ACAGCGTCATGGGAATGACTTCTACGTGGGCGCGCTGGTGACCTTCAGCTGTGACTCGGGCTACACAT
TAAGTGACGGGGAGCCTCTGGAGTGTGAGCCCAACTTCCAGTGGAGCCGGGCCCTGCCCAGTTGTGAA
GCTCTCTGTGGTGGCTTCATTCAAGGCTCCAGTGGGACCATCTTGTCGCCAGGGTTCCCTGACTTCTA
CCCCAACAACTTGAACTGCACCTGGATTATCGAAACATCTCATGGCAAGGGTGTGTTCTTCACTTTCC
ACACCTTCCACCTGGAAAGTGGCCATGACTACCTCCTCATCACTGAGAACGGCAGCTTCACCCAGCCC
CTGAGGCAGCTAACTGGATCTCGGCTGCCAGCTCCCATCAGCGCTGGGCTCTATGGCAACTTCACTGC
CCAGGTCCGCTTCATCTCTGATTTCTCCATGTCATATGAAGGATTCAACATCACCTTCTCAGAGTACG
ACTTGGAGCCCTGTGAGGAGCCCGAGGTCCCAGCCTACAGCATCCGGAAGGGCTTGCAGTTTGGCGTG
GGCGACACCTTGACCTTCTCCTGCTTCCCCGGGTACCGTCTGGAGGGCACCGCCCGCATCACGTGCCT
GGGGGGCAGACGGCGCCTGTGGAGCTCGCCTCTGCCAAGGTGTGTTGCTGAGTGTGGGAATTCAGTCA
CAGGCACTCAGGGTACTTTGCTGTCCCCCAACTTTCCTGTGAACTACAATAACAATCATGAATGCATC
TACTCCATCCAGACCCAGCCAGGGAAGGGAATTCAGCTGAAAGCCAGGGCATTCGAACTCTCCGAAGG
AGATGTCCTCAAGGTTTATGATGGCAACAACAACTCCGCCCGTTTGCTGGGAGTTTTTAGCCATTCTG
AGATGATGGGGGTGACTTTGAACAGCACATCCAGCAGTCTGTGGCTTGATTTCATCACTGATGCTGAA
AACACCAGCAAGGGCTTTGAACTGCACTTTTCCAGCTTTGAACTCATCAAATGTGAGGACCCAGGAAC
CCCCAAGTTTGGCTACAAGGTTCATGATGAAGGTCATTTTGCAGGGAGCTCCGTGTCCTTCAGCTGTG
ACCCTGGATACAGCCTGCGGGGTAGTGAGGAGCTGCTGTGTCTGAGTGGAGAGCGCCGGACCTGGGAC
CGGCCTCTGCCCACCTGTGTCGCCGAGTGTGGAGGGACAGTGAGAGGAGAGGTGTCGGGGCAGGTGCT
GTCACCCGGGTATCCAGCTCCCTATGAACACAATCTCAACTGCATCTGGACCATCGAAGCAGAGGCCG
GCTGCACCATTGGGCTACACTTCCTGGTGTTTGACACAGAGGAGGTTCACGACGTGCTGCGCATCTGG
GATGGGCCTGTGGAGAGCGGGGTTCTGCTGAAGGAGCTGAGTGGCCCGGCCCTGCCCAAGGACCTGCA
TAGCACCTTCAACTCGGTCGTCCTGCAGTTCAGCACTGACTTCTTCACCAGCAAGCAGGGCTTTGCCA
TTCAATTTTCAGTGTCCACAGCAACGTCCTGCAATGACCCTGGGATCCCGCAGAATGGGAGTCGGAGT
GGTGACAGTTGGGAAGCCGGCGACTCCACAGTGTTCCAGTGTGACCCTGGCTACGCGCTGCAGGGAAG
TGCAGAGATCAGCTGTGTGAAGATCGAGAACAGGTTCTTCTGGCAGCCCAGCCCGCCAACATGCATCG
CTCCCTGCGGGGGAGACCTGACAGGACCATCTGGAGTCATCCTCTCACCAAATTACCCAGAACCCTAC
CCGCCAGGCAAGGAGTGTGACTGGAAAGTGACCGTCTCACCAGACTACGTCATCGCCCTGGTATTTAA
CATCTTTAACCTGGAGCCTGGCTATGACTTCCTCCATATCTACGACGGACGGGACTCTCTCAGCCCTC
TCATAGGAAGCTTCTATGGCTCCCAGCTCCCAGGCCGCATTGAAAGCAGCAGCAACAGCCTCTTCCTC
GCCTTCCGCAGCGATGCATCTGTGAGCAATGCTGGCTTCGTCATTGACTATACAGAAAACCCGCGGGA
GTCATGTTTTGATCCTGGTTCCATCAAGAACGGCACACGGGTGGGGTCCGACCTGAAGCTGGGCTCCT
CCGTCACCTACTACTGCCACGGGGGCTACGAAGTTGAGGGCACCTCGACCCTGAGCTGCATCCTGGGG
CCTGATGGGAAGCCCGTGTGGAACAATCCCCGGCCAGTCTGCACAGCCCCCTGTGGGGGACAGTATGT
GGGTTCGGACGGAGTGGTCTTGTCCCCCAACTACCCCCAGAACTACACCAGTGGACAGATCTGCTTGT
ATTTTGTTACTGTGCCCAAGGACTATGTGGTGTTTGGCCAGTTCGCCTTCTTTCACACGGCCCTCCCA
GACGTGGTGGAGGTTCACGACGGCCACAGCCAGCACTCGCGGCTCCTCAGCTCCCTCTCGGGCTCCCA
TACAGGAGAATCACTGCCCTTGGCCACCTCCAATCAAGTTCTCATTAAGTTCAGCGCCAAAGGCCTCG
CACCAGCCGGAGGCTTCCACTTTGTCTACCAAGCGGTTCCTCGAACCAGCGCCACGCAGTGCAGCTCT
GTGCCGGAACCCCGCTATGGCAAGAGGCTGGGCAGTGACTTCTCGGTGGGGGCCATCGTCCGCTTCGA
ATGCAACTCCGGCTATGCCCTGCAGGGGTCGCCAGAGATCGAGTGCCTCCCTGTGCCTGGGGCCTTGG
CCCAATGGAATGTCTCAGCGCCCACGTGTGTGGTGCCGTGTGGAGGCAACCTCACAGAGCGCAGGGGC
ACCATCCTGTCCCCTGGCTTCCCAGAGCCGTACCTCAACAGCCTCAACTGTGTGTGGAAGATCGTGGT
CCCCGAAGGCGCTGGCATCCAGATCCAAGTTGTCAGTTTTGTGACAGAGCAGAACTGGGACTCGCTGG
AAGTATTTGATGGTGCAGATAACACTGTAACCATGCTGGGGAGTTTCTCAGGAACAACCGTGCCTGCC
CTTCTGAACAGCACCTCCAACCAGCTCTACCTTCATTTCTACTCAGATATCAGCGTATCTGCAGCTGG
CTTCCACTTGGAGTACAAAACGGTGGGCCTGAGCAGTTGTCCGGAACCTGCTGTGCCCAGTAACGGGG
TGAAGACTGGCGAGCGCTACTTGGTGAATGATGTGGTGTCTTTCCAGTGTGAGCCGGGATATGCCCTC
CAGGGCCACGCCCACATCTCCTGCATGCCCGGAACAGTGCGGCGATGGAACTACCCTCCTCCACTCTG
TATTGCACAGTGTGGGGGAACAGTGGAGGAGATGGAGGGGGTGATCCTGAGCCCCGGCTTCCCAGGCA
ACTACCCCAGTAACATGGACTGCTCCTGGAAAATAGCACTGCCCGTGGGCTTTGGAGCTCACATCCAG
TTCCTGAACTTCTCCACCGAGCCCAACCACGACTACATAGAAATCCGGAATGGCCCCTATGAGACCAG
CCGCATGATGGGAAGATTCAGTGGAAGCGAGCTTCCAAGCTCCCTCCTCTCCACGTCCCACGAGACCA
CCGTGTATTTCCACAGCGACCACTCCCAGAATCGGCCAGGATTCAAGCTGGAGTATCAGGCCTATGAA
CTTCAAGAGTGCCCAGACCCAGAGCCCTTTGCCAATGGCATTGTGAGGGGAGCTGGCTACAACGTGGG
ACAATCAGTGACCTTCGAGTGCCTCCCGGGGTATCAATTGACTGGCCACCCTGTCCTCACGTGTCAAC
ATGGCACCAACCGGAACTGGGACCACCCCCTGCCCAAGTGTGAAGTCCCTTGTGGCGGGAACATCACT
TCTTCCAACGGCACTGTGTACTCCCCGGGGTTCCCTAGCCCGTACTCCAGCTCCCAGGACTGTGTCTG
GCTGATCACCGTGCCCATTGGCCATGGCGTCCGCCTCAACCTCAGCCTGCTGCAGACAGAGCCCTCTG
GAGATTTCATCACCATCTGGGATGGGCCACAGCAAACAGCACCACGGCTCGGCGTCTTCACCCGGAGC
ATGGCCAAGAAAACAGTGCAGAGTTCATCCAACCAGGTCCTGCTCAAGTTCCACCGTGATGCAGCCAC
AGGGGGGATCTTCGCCATAGCTTTCTCCGCTTATCCACTCACCAAATGCCCTCCTCCCACCATCCTCC
CCAACGCCGAAGTCGTCACAGAGAATGAAGAATTCAATATAGGTGACATCGTACGCTACAGATGCCTC
CCTGGCTTTACCTTAGTGGGGAATGAAATTCTGACCTGCAAACTTGGAACCTACCTGCAGTTTGAAGG
ACCACCCCCGATATGTGAAGTGCACTGTCCAACAAATGAGCTTCTGACAGACTCCACAGAGGTGATCC
TGAGCCAGAGCTACCCTGGAAGCTATCCCCAGTTCCAGACCTGCTCTTGGCTGGTGAGAGTGGAGCCC
GACTATAACATCTCCCTCACAGTGGAGTACTTCCTCAGCGAGAAGCAATATGATGAGTTTGAGATTTT
TGATGGTCCATCAGGACAGAGTCCTCTGCTGAAAGCCCTCAGTGGGAATTACTCAGCTCCCCTGATTG
TCACCAGCTCAAGCAACTCTGTGTACCTGCGTTGGTCATCTGATCACGCCTACAATCGGAAGGGCTTC
AAGATCCGCTATTCAGCCCCTTACTGCAGCCTGCCCAGGGCTCCACTCCATGGCTTCATCCTAGGCCA
GACCAGCACCCAGCCCGGGGGCTCCATCCACTTTGGCTGCAACGCCGGCTACCGCCTGGTGGGACACA
GCATGGCCATCTGTACCCGGCACCCCCAGGGCTACCACCTGTGGAGCGAAGCCATCCCTCTCTGTCAA
GCTCTTTCCTGTGGGCTTCCTGAGGCCCCCAAGAATGGAATGGTGTTTGGCAAGGAGTACACAGTGGG
AACCAAGGCCGTGTACAGCTGCAGTGAAGGCTACCACCTCCAGGCAGGCGCTGAGGCCACTGCAGAGT
GTCTGGACACAGGCCTATGGAGCAACCGCAATGTCCCACCACAGTGTGTCCCTGTGACTTGTCCTGAT
GTCAGTAGCATCAGCGTGGAGCATGGCCGATGGAGGCTTATCTTTGAGACACAGTATCAGTTCCAGGC
CCAGCTGATGCTCATCTGTGACCCTGGCTACTACTATACTGGCCAAAGGGTCATCCGCTGTCAGGCCA
ATGGCAAATGGAGCCTCGGGGACTCTACGCCCACCTGCCGAATCATCTCCTGTGGAGAGCTCCCGATT
CCCCCCAATGGCCACCGCATCGGAACACTGTCTGTCTACGGGGCAACAGCCATCTTCTCCTGCAATTC
CGGATACACACTGGTGGGCTCCAGGGTGCGTGAGTGCATGGCCAATGGGCTCTGGAGTGGCTCTGAAG
TCCGCTGCCTTGCTGGACACTGTGGGACTCCTGAGCCCATTGTCAACGGACACATCAATGGGGAGAAC
TACAGCTACCGGGGCAGTGTGGTGTACCAATGCAATGCTGGCTTCCGCCTGATCGGCATGTCTGTGCG
CATCTGCCAGCAGGATCATCACTGGTCGGGCAAGACCCCTTTCTGTGTGCCAATTACCTGTGGACACC
CAGGCAACCCTGTCAACGGCCTCACTCAGGGTAACCAGTTTAACCTCAACGATGTGGTCAAGTTTGTT
TGCAACCCTGGGTATATGGCTGAGGGGGCTGCTAGGTCCCAATGCCTGGCCAGCGGGCAATGGAGTGA
CATGCTGCCCACCTGCAGAATCATCAACTGTACAGATCCTGGACACCAAGAAAATAGTGTTCGTCAGG
TCCACGCCAGCGGCCCGCACAGGTTCAGCTTCGGCACCACTGTGTCTTACCGGTGCAACCACGGCTTC
TACCTCCTGGGCACCCCAGTGCTCAGCTGCCAGGGAGATGGCACATGGGACCGTCCCCGCCCCCAGTG
TCTCTTGGTGTCCTGTGGCCATCCGGGCTCCCCGCCTCACTCCCAGATGTCTGGAGACAGTTATACTG
TGGGAGCAGTGGTGCGGTACAGCTGCATCGGCAAGCGTACTCTGGTGGGAAACAGCACCCGCATGTGT
GGGCTGGATGGACACTGGACTGGCTCCCTCCCTCACTGCTCAGGAACCAGCGTGGGAGTTTGCGGTGA
CCCTGGGATCCCGGCTCATGGCATCCGTTTGGGGGACAGCTTTGATCCAGGCACTGTGATGCGCTTCA
GCTGTGAAGCTGGCCACGTGCTCCGGGGATCGTCAGAGCGCACCTGTCAAGCCAATGGCTCGTGGAGC
GGCTCGCAGCCTGAGTGTGGAGTGATCTCTTGTGGGAACCCTGGGACTCCAAGTAATGCCCGAGTTGT
GTTCAGTGATGGCCTGGTTTTCTCCAGCTCTATCGTCTATGAGTGCCGGGAAGGATACTACGCCACAG
GCCTGCTCAGCCGTCACTGCTCGGTCAATGGTACCTGGACAGGCAGTGACCCTGAGTGCCTCGTCATA
AACTGTGGTGACCCTGGGATTCCAGCCAATGGCCTTCGGCTGGGCAATGACTTCAGGTACAACAAAAC
TGTGACATATCAGTGTGTCCCTGGCTATATGATGGAGTCACATAGAGTATCTGTGCTGAGCTGCACCA
AGGACCGGACATGGAATGGAACCAAGCCCGTCTGCAAAGCTCTCATGTGCAAGCCACCTCCGCTCATC
CCCAATGGGAAGGTGGTGGGGTCTGACTTCATGTGGGGCTCAAGTGTGACTTATGCCTGCCTGGAGGG
GTACCAGCTCTCCCTGCCCGCGGTGTTCACCTGTGAGGGAAATGGGTCCTGGACCGGAGAGCTGCCTC
AGTGTTTCCCTGTGTTCTGCGGGGATCCTGGTGTCCCGTCCCGTGGGAGGAGAGAGGACCGAGGCTTC
TCCTACAGGTCATCTGTCTCCTTCTCCTGCCATCCCCCTCTGGTGCTGGTGGGCTCTCCACGCAGGTT
TTGCCAGTCAGATGGGACATGGAGTGGCACCCAGCCCAGCTGCATAGATCCGACCCTGACCACGTGTG
CGGACCCTGGTGTGCCACAGTTTGGGATACAGAACAATTCTCAGGGCTACCAGGTTGGAAGCACAGTC
CTCTTCCGTTGTCAAAAAGGCTACCTGCTTCAGGGCTCCACCACCAGGACCTGCCTCCCAAACCTGAC
CTGGAGTGGAACCCCACCTGACTGTGTCCCCCACCACTGCAGGCAGCCAGAGACGCCAACGCATGCCA
ACGTCGGGGCCCTGGATTTGCCCTCCATGGGCTACACGCTCATTACTCCTGCCAGGAGGGCTTCTCCC
TCAAGGGTGGCTCCGAGCACCGCACCTGCAAGGCGGATGGCAGCTGGACAGGCAAGCCGCCCATCTGC
CTGGAGGTCCGGCCCAGTGGGAGACCCATCAACACTGCCCGGGAGCCACCGCTCACCCAAGCCTTGAT
TCCTGGGGATGTTTTTGCCAAGAATTCCCTGTGGAAAGGGGCCTATGAATACCAGGGGAAGAAGCAGC
CAGCCATGCTCAGAGTGACTGGCTTCCAAGTTGCCAACAGCAAGGTCAATGCCACCATGATCGACCAC
AGTGGCGTGGAGCTGCACTTGGCTGGAACTTACAAGAAAGAAGATTTTCATCTCCTACTCCAGGTGTA
CCAGATTACAGGGCCTGTGGAGATCTTTATGAATAAGTTCAAAGATGATCACTGGGCTTTAGATGGCC
ATGTCTCGTCAGAGTCCTCCGGAGCCACCTTCATCTACCAAGGCTCTGTCAAGGGCCAAGGCTTTGGG
CAGTTCGGCTTTCAAAGACTGGACCTCAGGCTGCTGGAGTCAGACCCCGAGTCCATTGGCCGCCACTT
TGCTTCCAACAGCAGCTCAGTGGCAGCCGCGATCCTGGTGCCTTTCATCGCCCTCATTATTGCGGGCT
TCGTGCTCTATCTCTACAAGCACAGGAGAAGACCCAAAGTTCCTTTCAATGGCTATGCTGGCCACGAG
AACACCAATGTTCGGGCCACATTTGAGAACCCAATGTACGACCGCAACATCCAGCCCACAGACATCAT
GGCCAGCGAGGCGGAGTTCACAGTCAGCACAGTGTGCACAGCAGTATAGCCACCCGGCCTGGCCGCTT
TTTTTGCTAGGTTGAACTGGTACTCCAGCAGCCGCCGAAGCTGGACTGTACTGCTGCCATCTCAGCTC
ACTGCAACCTCCCTGCCTGATTCCCCTGCCTCAGCCTGCCGAGTGCCTGCGATTGCAGGCGCGCACCG
CCAC

| | | | |
|---|---|---|---|
| NOV4q, SNP1 3382458 of | SEQ ID NO: 64 | 3104 aa | MW at 336647.2kD |
| CG50377-01, | SNP Pos: 1477 | SNP Change: Arg to Gly | |
| Protein Sequence | | | |

MAGAPPPALLLPCSLISDCCASNQRHSVGVGPSELVKKQIELKSRGVKLMPSKDNSQKTSVLTQVGVS
QGHNNCPDPGIPERGKRLGSDFRLGSSVQFTCNEGYDLQGSKRITCMKVSDMFAAWSDHRPVCRARMC
DAHLRGPSGIITSPNFPIQYDNNAHCVWIITALNPSKVIKLAFEEFDLERGYDTLTVGDGGQDGDQKT
VLYMSQNACSDSPHTPGSRIPESMSGDIWRQKWTVLEICRDISSSDARSGSVRKSPKTSNAVELVAPG
TEIEQGSCGDPGIPAYGRREGSRFHHGDTLKFECQPAFELVGQKAITCQKNNQWSAKKPGCVFSCFFN
FTSPSGVVLSPNYPEDYGNHLHCVWLILARPESRIHLAFNDIDVEPQFDFLVIKDGATAEAPVLGTFS
GNQLPSSITSSGHVARLEFQTDHSTGKRGFNITFTTFRHNECPDPGVPVNGKRFGDSLQLGSSISFLC
DEGFLGTQGSETITCVLKEGSVVWNSAVLRCEAPCGGHLTSPSGTILSPGWPGFYKDALSCAWVIEAQ
PGYPIKITFDRFKTEVNYDTLEVRDGRTYSAPLIGVYHGTQVPQFLISTSNYLYLLFSTDKSHSDIGF
QLRYETITLQSDHCLDPGIPVNGQRHGNDFYVGALVTFSCDSGYTLSDGEPLECEPNFQWSRALPSCE
ALCGGFIQGSSGTILSPGFPDFYPNNLNCTWIIETSHGKGVFFTFHTFHLESGHDYLLITENGSFTQP
LRQLTGSRLPAPISAGLYGNFTAQVRPISDFSMSYEGFNITFSEYDLEPCEEPEVPAYSIRKGLQFGV
GDTLTFSCFPGYRLEGTARITCLGGRRRLWSSPLPRCVAECGNSVTGTQGTLLSPNFPVNYNNNHECI
YSIQTQPGKGIQLKARAFELSEGDVLKVYDGNNNSARLLGVFSHSEMMGVTLNSTSSSLWLDFITDAE
NTSKGFELHFSSFELIKCEDPGTPKFGYKVHDEGHFAGSSVSFSCDPGYSLRGSEELLCLSGERRTWD
RPLPTCVAECGGTVRGEVSGQVLSPGYPAPYEHNLNCIWTIEAEAGCTIGLHFLVFDTEEVHDVLRIW
DGPVESGVLLKELSGPALPKDLHSTFNSVVLQFSTDFFTSKQGFAIQFSVSTATSCNDPGIPQNGSRS
GDSWEAGDSTVFQCDPGYALQGSAEISCVKIENRFFWQPSPPTCIAPCGGDLTGPSGVILSPNYPEPY
PPGKECDWKVTVSPDYVIALVFNIFNLEPGYDFLHIYDGRDSLSPLIGSFYGSQLPGRIESSSNSLFL
AFRSDASVSNAGFVIDYTENPRESCFDPGSIKNGTRVGSDLKLGSSVTYYCHGGYEVEGTSTLSCILG
PDGKPVWNNPRPVCTAPCGGQYVGSDGVVLSPNYPQNYTSGQICLYFVTVPKDYVVFGQFAFFHTALN
DVVEVHDGHSQHSRLLSSLSGSHTGESLPLATSNQVLIKFSAKGLAPAGGFHFVYQAVPRTSATQCSS
VPEPRYGKRLGSDFSVGAIVRFECNSGYALQGSPEIECLPVPGALAQWNVSAPTCVVPCGGNLTERRG
TILSPGFPEPYLNSLNCVWKIVVPEGAGIQIQVVSFVTEQNWDSLEVFDGADNTVTMLGSFSGTTVPA
LLNSTSNQLYLHFYSDISVSAAGFHLEYKTVGLSSCPEPAVPSNGVKTGERYLVNDVVSFQCEPGYAL
QGHAHISCMPGTVRRWNYPPPLCIAQCGGTVEEMEGVILSPGFPGNYPSNMDCSWKIALPVGFGAHIQ
FLNFSTEPNHDYIEIRNGPYETSRMMGRFSGSELPSSLLSTSHETTVYFHSDHSQNRPGFKLEYQAYE
LQECPDPEPFANGIVRGAGYNVGQSVTFECLPGYQLTGHPVLTCQHGTNRNWDHPLPKCEVPCGGNIT
SSNGTVYSPGFPSPYSSSQDCVWLITVPIGHGVRLNLSLLQTEPSGDFITIWDGPQQTAPRLGVFTRS
MAKKTVQSSSNQVLLKFHRDAATGGIFAIAFSAYPLTKCPPPTILPNAEVVTENEEFNIGDIVRYRCL
PGFTLVGNEILTCKLGTYLQFEGPPPICEVHCPTNELLTDSTGVILSQSYPGSYPQFQTCSWLVRVEP
DYNISLTVEYFLSEKQYDEFEIFDGPSGQSPLLKALSGNYSAPLIVTSSSNSVYLRWSSDHAYNRKGF
KIRYSAPYCSLPRAPLHGFILGQTSTQPGGSIHFGCNAGYRLVGHSMAICTRHPQGYHLWSEAIPLCQ
ALSCGLPEAPKNGMVFGKEYTVGTKAVYSCSEGYHLQAGAEATAECLDTGLWSNRNVPPQCVPVTCPD
VSSISVEHGRWRLIFETQYQFQAQLMLICDPGYYYTGQRVIRCQANGKWSLGDSTPTCRIISCGELPI
PPNGHRIGTLSVYGATAIFSCNSGYTLVGSRVRECMANGLWSGSEVRCLAGHCGTPEPIVNGHINGEN
YSYRGSVVYQCNAGFRLIGMSVRICQQDHHWSGKTPFCVPITCGHPGNPVNGLTQGNQFNLNDVVKFV
CNPGYMAEGAARSQCLASGQWSDMLPTCRIINCTDPGHQENSVRQVHASGPHRFSFGTTVSYRCNHGF
YLLGTPVLSCQGDGTWDRPRPQCLLVSCGHPGSPPHSQMSGDSYTVGAVVRYSCIGKRTLVGNSTPMC
GLDGHWTGSLPHCSGTSVGVCGDPGIPAHGIRLGDSFDPGTVMRFSCEAGHVLRGSSERTCQANGSWS
GSQPECGVISCGNPGTPSNARVVFSDGLVFSSSIVYECREGYYATGLLSRHCSVNGTWTGSDPECLVI
NCGDPGIPANGLRLGNDFRYNKTVTYQCVPGYMMESHRVSVLSCTKDRTWNGTKPVCKALMCKPPPLI
PNGKVVGSDFMWGSSVTYACLEGYQLSLPAVFTCEGNGSWTGELPQCFPVFCGDPGVPSRGRREDRGF
SYRSSVSFSCHPPLVLVGSPRRFCQSDGTWSGTQPSCIDPTLTTCADPGVPQFGIQNNSQGYQVGSTV
LFRCQKGYLLQGSTTRTCLPNLTWSGTPPDCVPHHCRQPETPTHANVGALDLPSMGYTLITPARRASP
SRVAPSTAPARRMAAGQASRPSAWRSGPVGDPSTLPGSHRSPKP

[0369] A ClustalW comparison of the above protein sequences yields the following sequence alignment shown in Table 4B.

TABLE 4B

Comparison of the NOV4 protein sequences.

| | |
|---|---|
| NOV4a | ------------------------------------------------------------ |
| NOV4b | MAGAPPPALLLPCSLISDCCASNQRHSVGVGPSELVKKQIELKSRGVKLMPSKDNSQKTS |
| NOV4c | ------------------------------------------------------------ |
| NOV4d | ------------------------------------------------------------ |
| NOV4e | ------------------------------------------------------------ |
| NOV4f | ------------------------------------------------------------ |
| NOV4g | ------------------------------------------------------------ |
| NOV4h | ------------------------------------------------------------ |
| NOV4i | ------------------------------------------------------------ |
| NOV4j | ------------------------------------------------------------ |
| NOV4k | ------------------------------------------------------------ |
| Nov4l | ------------------------------------------------------------ |
| NOV4m | ------------------------------------------------------------ |
| NOV4n | ------------------------------------------------------------ |
| NOV4o | ------------------------------------------------------------ |
| NOV4a | ------------------------------------------------------------ |
| NOV4b | VLTQVGVSQGHNMCPDPGIPERGKRLGSDFRLGSSVQFTCNEGYDLQGSKRITCMKVSDM |
| NOV4c | ------------------------------------------------------------ |
| NOV4d | ------------------------------------------------------------ |
| NOV4e | ------------------------------------------------------------ |
| NOV4f | ------------------------------------------------------------ |
| NOV4g | ------------------------------------------------------------ |
| NOV4h | ------------------------------------------------------------ |
| NOV4i | ------------------------------------------------------------ |
| NOV4j | ------------------------------------------------------------ |
| NOV4k | ------------------------------------------------------------ |
| Nov4l | ------------------------------------------------------------ |
| NOV4m | ------------------------------------------------------------ |
| NOV4n | ------------------------------------------------------------ |
| NOV4o | ------------------------------------------------------------ |
| NOV4a | ------------------------------------------------------------ |
| NOV4b | FAAWSDHRPVCRARMCDAHLRGPSGIITSPNFPIQYDNNAHCVWIITALNPSKVIKLAFE |
| NOV4c | ------------------------------------------------------------ |
| NOV4d | ------------------------------------------------------------ |
| NOV4e | ------------------------------------------------------------ |
| NOV4f | ------------------------------------------------------------ |
| NOV4g | ------------------------------------------------------------ |
| NOV4h | ------------------------------------------------------------ |
| NOV4i | ------------------------------------------------------------ |
| NOV4j | ------------------------------------------------------------ |
| NOV4k | ------------------------------------------------------------ |
| Nov4l | ------------------------------------------------------------ |
| NOV4m | ------------------------------------------------------------ |
| NOV4n | ------------------------------------------------------------ |
| NOV4o | ------------------------------------------------------------ |
| NOV4a | ------------------------------------------------------------ |
| NOV4b | EFDLERGYDTLTVGDGGQDGDQKTVLYMSQNACSDSPHTPGSRIPESMSGDIWRQKWTVL |
| NOV4c | ------------------------------------------------------------ |
| NOV4d | ------------------------------------------------------------ |
| NOV4e | ------------------------------------------------------------ |
| NOV4f | ------------------------------------------------------------ |
| NOV4g | ------------------------------------------------------------ |
| NOV4h | ------------------------------------------------------------ |
| NOV4i | ------------------------------------------------------------ |
| NOV4j | ------------------------------------------------------------ |
| NOV4k | ------------------------------------------------------------ |
| NOV4l | ------------------------------------------------------------ |
| NOV4m | ------------------------------------------------------------ |
| NOV4n | ------------------------------------------------------------ |
| NOV4o | ------------------------------------------------------------ |
| NOV4a | ------------------------------------------------------------ |
| NOV4b | EICRDISSSDARSGSVRKSPKTSNAVELVAPGTEIEQGSCGDPGIPAYGRREGSRFHHGD |
| NOV4c | ------------------------------------------------------------ |
| NOV4d | ------------------------------------------------------------ |
| NOV4e | ------------------------------------------------------------ |
| NOV4f | ------------------------------------------------------------ |
| NOV4g | ------------------------------------------------------------ |
| NOV4h | ------------------------------------------------------------ |
| NOV4i | ------------------------------------------------------------ |
| NOV4j | ------------------------------------------------------------ |
| NOV4k | ------------------------------------------------------------ |
| Nov4l | ------------------------------------------------------------ |
| NOV4m | ------------------------------------------------------------ |
| NOV4n | ------------------------------------------------------------ |
| NOV4o | ------------------------------------------------------------ |
| NOV4a | -------------------------------GQNCTFQLHGPNGTVESPGFPYGYPNYAN |
| NOV4b | TLKFECQPAFELVGQKAITCQKNNQWSAKKPGCVFSCFFNFTSPSGVVLSPNYPEDYGNH |
| NOV4c | ------------------------------------------------------------ |
| NOV4d | ------------------------------------------------------------ |
| NOV4e | -------------------------------GQNCTFQLHGPNGTVESPGFPYGYPNYAN |
| NOV4f | ------------------------------------------------------------ |
| NOV4g | ------------------------------------------------------------ |
| NOV4h | ------------------------------------------------------------ |
| NOV4i | ------------------------------------------------------------ |
| NOV4j | ------------------------------------------------------------ |
| NOV4k | ------------------------------------------------------------ |
| NOV4l | ------------------------------------------------------------ |
| NOV4m | ------------------------------------------------------------ |
| NOV4n | ------------------------------------------------------------ |
| NOV4o | ------------------------------------------------------------ |
| NOV4a | CTWTITAEEQHRIQLVFQSFALEEDFDVLSVFDGPPQPENLRTRLTGFQLPATIVSAATT |
| NOV4b | LHCVWLILARPESRIHLAFNDIDVEPQFDFLVIKDGATAEAPVLGTFSGNQLPSSITSSG |
| NOV4c | ------------------------------------------------------------ |
| NOV4d | ------------------------------------------------------------ |
| NOV4e | CTWTITAEEQHRIQLVFQSFALEEDFDVLSVFDGPPQPENLRTRLTGFQLPATIVSAATT |
| NOV4f | ------------------------------------------------------------ |
| NOV4g | ------------------------------------------------------------ |
| NOV4h | ------------------------------------------------------------ |
| NOV4i | ------------------------------------------------------------ |
| NOV4j | ------------------------------------------------------------ |
| NOV4k | ------------------------------------------------------------ |
| Nov4l | ------------------------------------------------------------ |
| NOV4m | ------------------------------------------------------------ |
| NOV4n | ------------------------------------------------------------ |
| NOV4o | ------------------------------------------------------------ |
| NOV4a | LSLPLISDYAVSAQGFHATYEVLPSHTCGNPGRLPNGIQQGSTFNLGDKVRYSCNLGFFL |
| NOV4b | NVARLEFQTDHSTGKRGFNITFTTFRHNECPDPGVPVNGKRFGDSLQLGSSISFLCDEGF |
| NOV4c | ------------------------------------------------------------ |
| NOV4d | ------------------------------------------------------------ |
| NOV4e | LSLRLISDYAVSAQGFHATYEVLPSHTCGNPGRLPNGIQQGSTFNLGDKVRYSCNLGFFL |
| NOV4f | ------------------------------------------------------------ |
| NOV4g | ------------------------------------------------------------ |
| NOV4h | ------------------------------------------------------------ |
| NOV4i | ------------------------------------------------------------ |
| NOV4j | ------------------------------------------------------------ |
| NOV4k | ------------------------------------------------------------ |
| Nov4l | ------------------------------------------------------------ |
| NOV4m | ------------------------------------------------------------ |
| NOV4n | ------------------------------------------------------------ |
| NOV4o | ------------------------------------------------------------ |
| NOV4a | EGHAVLTCHAGSENSATWDFPLPSCRADDACGGTLRGQSGIISSPHFPSEYHNNADCTWT |
| NOV4b | LGTQGSETITCVLKEGSVVWNSAVLRCEAPCGGHLTSPSGTILSPGWPGFYKDALSCAWV |
| NOV4c | ------------------------------------------------------------ |
| NOV4d | ------------------------------------------------------------ |
| NOV4e | EGHAVLTCHAGSENSATWDFPLPSCRADDACGGTLRGQSGIISSPHFPSEYHNNADCTWT |
| NOV4f | ------------------------------------------------------------ |
| NOV4g | ------------------------------------------------------------ |
| NOV4h | ------------------------------------------------------------ |
| NOV4i | ------------------------------------------------------------ |
| NOV4j | ------------------------------------------------------------ |
| NOV4k | ------------------------------------------------------------ |
| Nov4l | ------------------------------------------------------------ |
| NOV4m | ------------------------------------------------------------ |
| NOV4n | ------------------------------------------------------------ |
| NOV4o | ------------------------------------------------------------ |
| NOV4a | ILAELGDTIALVFIDFQLEDGYDFLEVTGTEGSSLWFTGASLPAPVISSKNWLRLHFTSD |
| NOV4b | IEAQPGYPIKITFDRFKTEVNYDTLEVRDGRTYSAPLIGVYHGTQVPQFLISTSNYLYLL |
| NOV4c | --------------------------------------MAGAPPPALLLPCSLISDCCAS |
| NOV4d | --------------------------------------MAGAPPPALLLPCSLISDCCAS |
| NOV4e | ILAELGDTIALVFIDFQLEDGYDFLEVTGTEGSSLWFTGASLPAPVISSKNWLRLHFTSD |
| NOV4f | ------------------------------------------------------------ |
| NOV4g | ------------------------------------------------------------ |
| NOV4h | ------------------------------------------------------------ |
| NOV4i | ------------------------------------------------------------ |
| NOV4j | ------------------------------------------------------------ |
| NOV4k | ------------------------------------------------------------ |
| NOV4l | ------------------------------------------------------------ |
| NOV4m | ------------------------------------------------------------ |
| NOV4n | ------------------------------------------------------------ |
| NOV4o | ------------------------------------------------------------ |
| NOV4a | GNHRQRGFSAQYQVKKQIELKSRGVKLMPSKDNSQKTSVVTQVGVSQGHNMCPDPGIPER |
| NOV4b | FSTDKSHSDIGFQLRYETITLQSDHCLDPGIPVNGQRHGNDFYVGALVTFSCDSGYTLSD |
| NOV4c | NQRHSVGVGPSELVKKQIELKSRGVKLMPSKDNSQKTSVLTQVGVSQGHNMCPDPGIPER |
| NOV4d | NQRHSVGVGPSELVKKQIELKSRGVKLMPSKDNSQKTSVLTQVGVSQGHNMCPDPGIPER |
| NOV4e | GNHRQRGFSAQYQVKKQIELKSRGVKLMPSKDNSQKTSVVTQVGVSQGHNMCPDPGIPER |
| NOV4f | ---------------------------MPSKDNSQKTSVVTQVGVSQGHNMCPDPGIPER |
| NOV4g | ------------------------------------------------------------ |
| NOV4h | ------------------------------------------------------------ |
| NOV4i | ------------------------------------------------------------ |
| NOV4j | ------------------------------------------------------------ |
| NOV4k | ------------------------------------------------------------ |
| Nov4l | ------------------------------------------------------------ |
| NOV4m | ------------------------------------------------------------ |
| NOV4n | ------------------------------------------------------------ |
| NOV4o | ------------------------------------------------------------ |
| NOV4a | GKRLGSDFRLGSSVQFTCNEGYDLQGSKRITCMKVSDMFAAWSDHRPVCRAPMCDAHLRC |
| NOV4b | GEPLECEPNFQWSRALPSCEALCGGFIQGSSGTILSPGFPDFYPNNLNCTWIIETSHGKG |
| NOV4c | GKRLGSDFRLGSSVQFTCNEGYDLQGSKRITCMKVSDMFAAWSDHRPVCRARMCDAHLRG |
| NOV4d | GKRLGSDFRLGSSVQFTCNEGYDLQGSKRITCMKVSDMFAAWSDHRPVCRARMCDAHLRG |
| NOV4e | GKRLGSDFRLGSSVQFTCNEGYDLQGSKRITCMKVSDMFAAWSDHRPVCRAPMCDAHLRG |
| N0V4f | GKRLGSDFRLGSSVQFTCNEGYDLQGSKRITCMKVSDMFAAWSDHRPVCRAENCDAHLRG |
| NOV4g | ------------------------------------------------------------ |
| NOV4h | ------------------------------------------------------------ |
| NOV4i | ------------------------------------------------------------ |
| NOV4j | ------------------------------------------------------------ |
| NOV4k | ------------------------------------------------------------ |
| Nov4l | ------------------------------------------------------------ |
| NOV4m | ------------------------------------------------------------ |
| NOV4n | ------------------------------------------------------------ |
| NOV4o | ------------------------------------------------------------ |
| NOV4a | PSGIITSPNFPIQYDNNAHCVWIITALNPSKVIKLAFEEFDLERGYDTLTVGDGGQDGDQ |
| NOV4b | VFFTFHTFHLESGHDYLLITENGSFTQPLRQLTGSRLPAPISAGLYGNFTAQVRFISDFS |
| NOV4c | PSGIITSPNFPIQYDNNAHCVWIITALNPSKVIKLAFEEFDLERGYDTLTVGDGGQDGDQ |
| NOV4d | PSGIITSPNFPIQYDNNAHCVWIITALNPSKVIKLAFEEFDLERGYDTLTVGDGGQDGDQ |
| NOV4e | PSGIITSPNFPIQYDNNAHCVWIITALNPSKVIKLAFEEFDLERGYDTLTVGDGGQDGDQ |
| NOV4f | PSGIITSPNFPIQYDNNAHCVWIITALNPSKVIKLAFEEFDLERGYDTLTVGDGGQDGDQ |
| NOV4g | ------------------------------------------------------------ |
| NOV4h | ------------------------------------------------------------ |
| NOV4i | ------------------------------------------------------------ |
| NOV4j | ------------------------------------------------------------ |
| NOV4k | ------------------------------------------------------------ |
| Nov4l | ------------------------------------------------------------ |
| NOV4m | ------------------------------------------------------------ |
| NOV4n | ------------------------------------------------------------ |
| NOV4o | ------------------------------------------------------------ |
| NOV4a | KTVLYMLTGTSVPDLIVSTNHQMWLLFQTDG---------------------SG------ |
| NOV4b | MSYEGFNITFSEYDLEPCEEPEVPAYSIRKGLQFGVGDTLTFSCFPGYRLEGTARITCLG |
| NOV4c | KTVLYMSQNACSDSPHTPGSRIPESMSGDIWRQKWTVLEICRDISSSDARSGSVRKSPKT |
| NOV4d | KTVLYMSQNACSDSPHTPGSRIPESMSGDIWRQKWTVLEICRDISSSDARSGSVRKSPKT |
| NOV4e | KTVLYMLTGTSVPDLIVSTNHQMWLLFQTDG----------------------------S |
| NOV4f | KTVLYMLTGTSVPDLIVSTNHQMWLLFQTDG----------------------S------ |
| NOV4g | ------------------------------------------------------------ |
| NOV4h | ------------------------------------------------------------ |
| NOV4i | ------------------------------------------------------------ |
| NOV4j | ------------------------------------------------------------ |
| NOV4k | ------------------------------------------------------------ |
| NOV4l | ------------------------------------------------------------ |
| NOV4m | ------------------------------------------------------------ |
| NOV4n | ------------------------------------------------------------ |
| NOV4o | ------------------------------------------------------------ |
| NOV4a | -SSLGFKASYEEIEQGSCGDPGIPAYGRREGSRFRHGDTLKFECQPAFELVGQKAITCQK |
| NOV4b | GRRPLWSSPLPRCVAECGNSVTGTQGTLLSPNFPVNYNNNHECIYSIQTQPGKGIQLKAR |
| NOV4c | SNAVELVAPGTEIEQGSCGDPGIPAYGRREGSRFHHGDTLKFECQPAFELVGQKAITCQK |
| NOV4d | SNAVELVAPGTEIEQGSCGDPGIPAYGRREGSRFHHGDTLKFECQPAFELVGQKAITCQK |
| NOV4e | GSSLGFKASYEEIEQGSCGDPGIPAYGRREGSRFRHGDTLKFECQPAFELVGQKAITCQK |
| NOV4f | GSSLGFKASYEEIEQGSCGDPGIPAYGRREGSRFRHGDTLKFECQPAFELVGQKAITCQK |
| NOV4g | ------------------------------------------------------------ |
| NOV4h | ------------------------------------------------------------ |
| NOV4i | ------------------------------------------------------------ |
| NOV4j | ------------------------------------------------------------ |
| NOV4k | ------------------------------------------------------------ |
| NOV4l | ------------------------------------------------------------ |
| NOV4m | ------------------------------------------------------------ |
| NOV4n | ------------------------------------------------------------ |
| NOV4o | ------------------------------------------------------------ |
| NOV4a | NNQWSAKKPGCVCSCFFNFTSPSGVVLSPNYPEDYGNHLHCVWLILARPESRIHLAFNDI |
| NOV4b | AFELSEGDVLKVYDGNNNSARLLGVFSHSEMMGVTLNSTSSSLWLDFITDAENTSKGFEL |
| NOV4c | NNQWSAKKPGCVFSCFFNFTSPSGVVLSPNYPEDYGNHLHCVWLILARPESRIHLAFNDI |
| NOV4d | NNQWSAKKPGCVFSCFFNFTSPSGVVLSPNYPEDYGNHLHCVWLILARPESRIHLAFNDI |
| NOV4e | NNQWSAKKPGCVCSCFFNFTSPSGVVLSPNYPEDYGNHLHCVWLILARPESRIHLAFNDI |
| NOV4f | NNQWSAKKPGCVCSCFFNFTSPSGVVLSPNYPEDYGNHLHCVWLILARPESRIHLAFNDI |
| NOV4g | ------------------------------------------------------------ |
| NOV4h | ------------------------------------------------------------ |
| NOV4i | ------------------------------------------------------------ |
| NOV4j | ------------------------------------------------------------ |
| NOV4k | ------------------------------------------------------------ |
| NOV4l | ------------------------------------------------------------ |
| NOV4m | ------------------------------------------------------------ |
| NOV4n | ------------------------------------------------------------ |
| NOV4o | ------------------------------------------------------------ |
| NOV4a | DVEPQFDFLVIKDGATAEAPVLGTFSGNQLPSSITSSGHVARLEFQTDHSTGKRGFNITF |
| NOV4b | HFSSFELIKCEDPGTPKFGYKVHDEGHFAGSSVSFSCDPGYSLRGSEELLCLSGERRTWD |
| NOV4c | DVEPQFDFLVIKDGATAEAPVLGTFSGNQLPSSITSSGHVARLEFQTDHSTGKRGFNITF |
| NOV4d | DVEPQFDFLVIKDGATAEAPVLGTFSGNQLPSSITSSGHVARLEFQTDHSTGKRGFNITF |
| NOV4e | DVEPQFDFLVIKDGATAEAPVLGTFSGNQLPSSITSSGHvARLEFQTDHSTGKRGFNITF |
| NOV4f | DVEPQFDFLVIKDGATAEAPVLGTFSGNQLPSSITSSGHVARLEFQTDHSTGKRGFNITF |
| NOV4g | ------------------------------------------------------------ |
| NOV4h | ------------------------------------------------------------ |
| NOV4i | ------------------------------------------------------------ |
| NOV4j | ------------------------------------------------------------ |
| NOV4k | ------------------------------------------------------------ |
| NOV4l | ------------------------------------------------------------ |
| NOV4m | ------------------------------------------------------------ |
| NOV4n | ------------------------------------------------------------ |
| NOV4o | ------------------------------------------------------------ |
| NOV4a | TSESSNECPDPGVPVNGKRFGDSLQLGSSISFLCDEGFLGTQGSETITCVLKEGSVVWNS |
| NOV4b | RPLPTCVAECGGTVRGEVSGQVLSPGYPAPYEHNLNCIWTIEAEAGCTIGLHFLVFDTEE |
| NOV4c | TTFRHNECPDPGVPVNGKRFGDSLQLGSSISFLCDEGFLGTQGSETITCVLKEGSVVWNS |
| NOV4d | TTFRHNECPDPGVPVNGKRFGDSLQLGSSISFLCDEGFLGTQGSETITCVLKEGSVVWNS |
| NOV4e | TSESSNECPDPGVPVNGKRFGDSLQLGSSISFLCDEGFLGTQGSETITCVLKEGSVVWNS |
| NOV4f | TSESSNECPDPGVPVNGKRFGDSLQLGSSISFLCDEGFLGTQGSETITCVLKEGSVVWNS |
| NOV4g | ------------------------------------------------------------ |
| NOV4h | ------------------------------------------------------------ |
| NOV4i | ------------------------------------------------------------ |
| NOV4j | ------------------------------------------------------------ |
| NOV4k | ------------------------------------------------------------ |
| Nov4l | ------------------------------------------------------------ |
| NOV4m | ------------------------------------------------------------ |
| NOV4n | ------------------------------------------------------------ |
| NOV4o | ------------------------------------------------------------ |
| NOV4a | AVLRCEAPCGGHLTSPSGTILSPGWPGFYKDALSCAWVIEAQPGYPIKITFDRFKTEVNY |
| NOV4b | VHDVLRIWDGPVESGVLLKELSGPALPKDLHSTFNSVVLQFSTDFFTSKQGFAIQFSVST |
| NOV4c | AVLRCEAPCGGHLTSPSGTILSPGWPGFYKDALSCAWVIEAQPGYPIKITFDRFKTEVNY |
| NOV4d | AVLRCEAPCGGHLTSPSGTILSPGWPGFYKDALSCAWVIEAQPGYPIKITFDRFKTEVNY |
| NOV4e | AVLRCEAPCGGHLTSPSGTILSPGWPGFYKDALSCAWVIEAQPGYPIKITFDRFKTEVNY |
| NOV4f | AVLRCEAPCGGHLTSPSGTILSPGWPGFYKDALSCAWVIEAQPGYPIKITFDRFKTEVNY |
| NOV4g | ------------------------------------------------------------ |
| NOV4h | ------------------------------------------------------------ |
| NOV4i | ------------------------------------------------------------ |
| NOV4j | ------------------------------------------------------------ |
| NOV4k | ------------------------------------------------------------ |
| NOV4l | ------------------------------------------------------------ |
| NOV4m | ------------------------------------------------------------ |
| NOV4n | ------------------------------------------------------------ |
| NOV4o | ------------------------------------------------------------ |
| NOV4a | DTLEVRDGRTYSAPLIGVYHGTQVPQFLISTSNYLYLLFSTDKSHSDIGFQLRYEAITLQ |
| NOV4b | ATSCNDPGIPQNGSRSGDSWEAGDSTVFQCDPGYALQGSAEISCVKIENRFFWQPSPPTC |
| NOV4c | DTLEVRDGRTYSAPLIGVYHGTQVPQFLISTSNYLYLLFSTDKSHSDIGFQLRYETITLQ |
| NOV4d | DTLEVRDGRTYSAPLIGVYHGTQVPQFLISTSNYLYLLFSTDKSHSDIGFQLRYETITLQ |
| NOV4e | DTLEVRDGRTYSAPLIGVYHGTQVPQFLISTSNYLYLLFSTDKSHSDIGFQLRYEAITLQ |
| NOV4f | DTLEVRDGRTYSAPLIGVYHGTQVPQFLISTSNYLYLLFSTDKSHSDIGFQLRYEAITLQ |
| NOV4g | ------------------------------------------------------------ |
| NOV4h | ------------------------------------------------------------ |
| NOV4i | ------------------------------------------------------------ |
| NOV4j | ------------------------------------------------------------ |
| NOV4k | ------------------------------------------------------------ |
| NOV4l | ------------------------------------------------------------ |
| NOV4m | ------------------------------------------------------------ |
| NOV4n | ------------------------------------------------------------ |
| NOV4o | ------------------------------------------------------------ |
| NOV4a | SDHCLDPGIPVNGQRHGNDFYVGALVTFSCDSGYTLSDGEPLECEPNFQWSRALPSCEAL |
| NOV4b | IAPCGGDLTGPSGVILSPNYPEPYPPGKECDWKVTVSPDYVIALVFNIFNLEPGYDFLHI |
| NOV4c | SDHCLDPGIPVNGQRHGNDFYVGALVTFSCDSGYTLSDGEPLECEPNFQWSRALPSCEAL |
| NOV4d | SDHCLDPGIPVNGQRHGNDFYVGALVTFSCDSGYTLSDGEPLECEPNFQWSRALPSCEAL |
| NOV4e | SDHCLDPGIPVNGQRHGNDFYVGALVTFSCDSGYTLSDGEPLECEPNFQWSRALPSCEAL |
| NOV4f | SDHCLDPGIPVNGQRHGNDFYVGALVTFSCDSGYTLSDGEPLECEPNFQWSRALPSCEAL |
| NOV4g | ------------------------------------------------------------ |
| NOV4h | ------------------------------------------------------------ |
| NOV4i | ------------------------------------------------------------ |
| NOV4j | ------------------------------------------------------------ |
| NOV4k | ------------------------------------------------------------ |
| NOV4l | ------------------------------------------------------------ |
| NOV4m | ------------------------------------------------------------ |
| NOV4n | ------------------------------------------------------------ |
| NOV4o | ------------------------------------------------------------ |
| NOV4a | CGGFIQGSSGTILSPGFPDFYPNNLNCTWIIETSHGKGVFFTFHTFHLESGHDYLLITEN |
| NOV4b | YDGRDSLSPLIGSFYGSQLPGRIESSSNSLFLAFRSDASVSNAGFVIDYTENPRESCFDP |
| NOV4c | CGGFIQGSSGTILSPGFPDFYPNNLNCTWIIETSHGKGVFFTFHTFHLESGHDYLLITEN |
| NOV4d | CGGFIQGSSGTILSPGFPDFYPNNLNCTWIIETSHGKGVFFTFHTFHLESGHDYLLITEN |
| NOV4e | CGGFIQGSSGTILSPGFPDFYPNNLNCTWITETSHGKGVFFTFHTFHLESGHDYLLITEN |
| NOV4f | CGGFIQGSSGTILSPGFPDFYPNNLNCTWIIETSHGKGVFFTFHTFHLESGHDYLLITEN |
| NOV4g | ------------------------------------------------------------ |
| NOV4h | ------------------------------------------------------------ |
| NOV4i | ------------------------------------------------------------ |
| NOV4j | ------------------------------------------------------------ |
| NOV4k | ------------------------------------------------------------ |
| NOV4l | ------------------------------------------------------------ |
| NOV4m | ------------------------------------------------------------ |
| NOV4n | ------------------------------------------------------------ |
| NOV4o | ------------------------------------------------------------ |
| NOV4a | GSFTQPLRQLTGSRLPAPISAGLYGNFTAQVRFISDFSMSYEGFNITFSEYDLEPCEEPE |
| NOV4b | GSIKNGTRVGSDLKLGSSVTYYCHGGYEVEGTSTLSCILGPDGKPVWNNPRPVCTAPCGG |
| NOV4c | GSFTQPLRQLTGSRLPAPISAGLYGNFTAQVRFISDFSMSYEGFNITFSEYDLEPCEEPE |
| NOV4d | GSFTQPLRQLTGSRLPAPISAGLYGNFTAQVRFISDFSMSYEGFNITFSEYDLEPCEEPE |
| NOV4e | GSFTQPLRQLTGSRLPAPISAGLYGNFTAQVRFISDFSMSYEGFNITFSEYDLEPCEEPE |
| NOV4f | GSFTQPLRQLTGSRLPAPISAGLYGNFTAQVRFISDFSMSYEGFNITFSEYDLEPCEEPE |
| NOV4g | ------------------------------------------------------------ |
| NOV4h | ------------------------------------------------------------ |
| NOV4i | ------------------------------------------------------------ |
| NOV4j | ------------------------------------------------------------ |
| NOV4k | ------------------------------------------------------------ |
| NOV4l | ------------------------------------------------------------ |
| NOV4m | ------------------------------------------------------------ |
| NOV4n | ------------------------------------------------------------ |
| NOV4o | ------------------------------------------------------------ |
| NOV4a | VPAYSIRKGLQFGVGDTLTFSCFPGYRLEGTARITCLGGPRRLWSSPLPRCVAECGNSVT |
| NOV4b | QYVGSDGVVLSPNYPQNYTSGQICLYFVTVPKDYVVFGQFAFFHTALNDVVEVHDGHSQH |
| NOV4c | VPAYSIRKGLQFGVGDTLTFSCFPGYRLEGTARITCLGGRRRLWSSPLPRCVAECGNSVT |
| NOV4d | VPAYSIRKGLQFGVGDTLTFSCFPGYRLEGTARITCLGGRRRLWSSPLPRCVAECGNSVT |
| NOV4e | VPAYSIRKGLQFGVGDTLTFSCFPGYRLEGTARITCLGGRRRLWSSPLPRCVAECGNSVT |
| NOV4f | VPAYSIRKGLQFGVGDTLTFSCFPGYRLEGTARITCLGGRRRLWSSPLPRCVAECGNSVT |
| NOV4g | ------------------------------------------------------------ |
| NOV4h | ------------------------------------------------------------ |
| NOV4i | ------------------------------------------------------------ |
| NOV4j | ------------------------------------------------------------ |
| NOV4k | ------------------------------------------------------------ |
| NOV4l | ------------------------------------------------------------ |
| NOV4m | ------------------------------------------------------------ |
| NOV4n | ------------------------------------------------------------ |
| NOV4o | ------------------------------------------------------------ |
| NOV4a | GTQGTLLSPNFPVNYNNNHECIYSIQTQPGKGIQLKARAFELSEGDVLKVYDGNNNSARL |
| NOV4b | SRLLSSLSGSHTGESLPLATSNQVLIKFSAKGLAPARGFHFVYQAVPRTSATQCSSVPEP |
| NOV4c | GTQGTLLSPNFPVNYNNNHECIYSIQTQPGKGIQLKARAFELSEGDVLKVYDGNNNSARL |
| NOV4d | GTQGTLLSPNFPVNYNNNHECIYSIQTQPGKGIQLKARAFELSEGDVLKVYDGNNNSARL |
| NOV4e | GTQGTLLSPNFPVNYNNNHECIYSIQTQPGKGIQLKARAFELSEGDVLKVYDGNNNSARL |
| NOV4f | GTQGTLLSPNFPVNYNNNHECIYSIQTQPGKGIQLKARAFELSEGDVLKVYDGNNNSARL |
| NOV4g | ------------------------------------------------------------ |
| NOV4h | ------------------------------------------------------------ |
| NOV4i | ------------------------------------------------------------ |
| NOV4j | ------------------------------------------------------------ |
| NOV4k | ------------------------------------------------------------ |
| Nov4l | ------------------------------------------------------------ |
| NOV4m | ------------------------------------------------------------ |
| NOV4n | ------------------------------------------------------------ |
| NOV4o | ------------------------------------------------------------ |
| NOV4a | LGVFSHSEMMGVTLNSTSSSLWLDFITDAENTSKGFELHFSSFELIKCEDPGTPKFGYKV |
| NOV4b | RYGKRLGSDFSVGATVRFECNSGYALQGSPEIECLPVPGALAQWNVSAPTCVVPCGGNLT |
| NOV4c | LGVFSHSEMMGVTLNSTSSSLWLDFITDAENTSKGFELHFSSFELIKCEDPGTPKFGYKV |
| NOV4d | LGVFSHSEMNGVTLNSTSSSLWLDFITDAENTSKGFELHFSSFELIKCEDPGTPKFGYKV |
| NOV4e | LGVFSHSEMMGVTLNSTSSSLWLDFITDAENTSKGFELHFSSFELIKCEDPGTPKFGYKV |
| NOV4f | LGVFSHSEMMGVTLNSTSSSLWLDFITDAENTSKGFELHFSSFELIKCEDPGTPKFGYKV |
| NOV4g | ------------------------------------------------------------ |
| NOV4h | ------------------------------------------------------------ |
| NOV4i | ------------------------------------------------------------ |
| NOV4j | ------------------------------------------------------------ |
| NOV4k | ------------------------------------------------------------ |
| NOV4l | ------------------------------------------------------------ |
| NOV4m | ------------------------------------------------------------ |
| NOV4n | ------------------------------------------------------------ |
| NOV4o | ------------------------------------------------------------ |
| NOV4a | HDEGHFAGSSVSFSCDPGYSLRGSEELLCLSGERRTWDRPLPTCVAECGGTVRGEVSGQV |
| NOV4b | ERRGTILSPGFPEPYLNSLNCVWKIVVPEGAGIQIQVVSFVTEQNWDSLEVFDGADNTVT |
| NOV4c | HDEGHFAGSSVSFSCDPGYSLRGSEELLCLSGERRTWDRPLPTCVAECGGTVRGEVSGQV |
| NOV4d | HDEGHFAGSSVSFSCDPGYSLRGSEELLCLSGERRTWDRPLPTCVAECGGTVRGEVSGQV |
| NOV4e | HDEGHFAGSSVSFSCDPGYSLRGSEELLCLSGERRTWDRPLPTCVAECGGTVRGEVSGQV |
| NOV4f | HDEGHFAGSSVSFSCDPGYSLRGSEELLCLSGERRTWDRPLPTCVAECGGTVRGEVSGQV |
| NOV4g | ------------------------------------------------------------ |
| NOV4h | ------------------------------------------------------------ |
| NOV4i | ------------------------------------------------------------ |
| NOV4j | ------------------------------------------------------------ |
| NOV4k | ------------------------------------------------------------ |
| Nov4l | ------------------------------------------------------------ |
| NOV4m | ------------------------------------------------------------ |
| NOV4n | ------------------------------------------------------------ |
| NOV4o | ------------------------------------------------------------ |
| NOV4a | LSPGYPAPYEHNLNCIWTIEAEAGCTIGLHFLVFDTEEVHDVLRIWDGPVESGVLLKELS |
| NOV4b | MLGSFSGTTVPALLNSTSNQLYLHFYSDISVSAAGFHLEYKTVGLSSCPEPAVPSNGVKT |
| NOV4c | LSPGYPAPYEHNLNCIWTIEAEAGCTIGLHFLVFDTEEVHDVLRIWDGPVESGVLLKELS |
| NOV4d | LSPGYPAPYEHNLNCIWTIEAEAGCTIGLHFLVFDTEEVHDVLRIWDGPVESGVLLKELS |
| NOV4e | LSPGYPAPYEHNLNCIWTIEAEAGCTIGLHFLVFDTEEVHDVLRIWDGPVESGVLLKELS |
| NOV4f | LSPGYPAPYEHNLNCIWTIEAEAGCTIGLHFLVFDTEEVHDVLRIWDGPVESGVLLKELS |
| NOV4g | ------------------------------------------------------------ |
| NOV4h | ------------------------------------------------------------ |
| NOV4i | ------------------------------------------------------------ |
| NOV4j | ------------------------------------------------------------ |
| NOV4k | ------------------------------------------------------------ |
| NOV4l | ------------------------------------------------------------ |
| NOV4m | ------------------------------------------------------------ |
| NOV4n | ------------------------------------------------------------ |
| NOV4o | ------------------------------------------------------------ |
| NOV4a | GPALPKDLHSTFNSVVLQFSTDFFTSKQGFAIQFSGSTATSCNDPGIPQNGSRSGDSWEA |
| NOV4b | GERYLVNDVVSFQCEPGYALQGHAHISCMPGTVRRWNYPPPLCIAQCGGTVEEMEGVILS |
| NOV4c | GPALPKDLHSTFNSVVLQFSTDFFTSKQGFAIQFSVSTATSCNDPGIPQNGSRSGDSWEA |
| N0V4d | GPALPKDLHSTFNSVVLQFSTDFFTSKQGFAIQFSVSTATSCNDPGIPQNGSRSGDSWEA |
| NOV4e | GPALPKDLHSTFNSVVLQFSTDFFTSKQGFAIQFSGSTATSCNDPGIPQNGSRSGDSWEA |
| NOV4f | GPALPKDLHSTFNSVVLQFSTDFFTSKQGFAIQFSGSTATSCNDPGIPQNGSRSGDSWEA |
| NOV4g | ------------------------------------------------------------ |
| NOV4h | ------------------------------------------------------------ |
| NOV4i | ------------------------------------------------------------ |
| NOV4j | ------------------------------------------------------------ |
| NOV4k | ------------------------------------------------------------ |
| Nov4l | ------------------------------------------------------------ |
| NOV4m | ------------------------------------------------------------ |
| NOV4n | ------------------------------------------------------------ |
| NOV4o | ------------------------------------------------------------ |
| NOV4a | GDSTVFQCDPGYALQGSAEISCVKIENRFFWQPSPPTCIAPCGGDLTGPSGVILSPNYPE |
| NOV4b | PGFPGNYPSNMDCSWKIALPVGFGAHIQFLNFSTEPNHDYIEIRNGPYETSRMMGRFSGS |
| NOV4c | GDSTVFQCDPGYALQGSAEISCVKIENRFFWQPSPPTCIAPCGGDLTGPSGVILSPNYPE |
| NOV4d | GDSTVFQCDPGYALQGSAEISCVKIENRFFWQPSPPTCIAPCGGDLTGPSGVILSPNYPE |
| NOV4e | GDSTVFQCDPGYALQGSAEISCVKIENRFFWQPSPPTCIAPCGGDLTGPSGVILSPNYPE |
| NOV4f | GDSTVFQCDPGYALQGSAEISCVKIENRFFWQPSPPTCIAPCGGDLTGPSGVILSPNYPE |
| NOV4g | ------------------------------------------------------------ |
| NOV4h | ------------------------------------------------------------ |
| NOV4i | ------------------------------------------------------------ |
| NOV4j | ------------------------------------------------------------ |
| NOV4k | ------------------------------------------------------------ |
| NOV4l | ------------------------------------------------------------ |
| NOV4m | ------------------------------------------------------------ |
| NOV4n | ------------------------------------------------------------ |
| NOV4o | ------------------------------------------------------------ |
| NOV4a | PYPPGKECDWKVTVSPDYVIALVLFPSFNLEPGYDFLHIYDGRDSLSPLIGSFYGSQLPG |
| NOV4b | ELPSSLLSTSHETTVYFHSDHSQNRPGFKLEYQAYELQECPDPEPFANGIVRGAGYNVGQ |
| NOV4c | PYPPGKECDWKVTVSPDYVIALVFN-IFNLEPGYDFLHIYDGRDSLSPLIGSFYGSQLPG |
| NOV4d | PYPPGKECDWKVTVSPDYVIALVFN-IFNLEPGYDFLHIYDGRDSLSPLIGSFYGSQLPG |
| NOV4e | PYPPGKECDWKVTVSPDYVIALVLFPSFNLEPGYDFLHIYDGRDSLSPLIGSFYGSQLPG |
| NOV4f | PYPPGKECDWKVTVSPDYVIALVLFPSFNLEPGYDFLHIYDGRDSLSPLIGSFYGSQLPG |
| NOV4g | ------------------------------------------------------------ |
| NOV4h | ------------------------------------------------------------ |
| NOV4i | ------------------------------------------------------------ |
| NOV4j | ------------------------------------------------------------ |
| NOV4k | ------------------------------------------------------------ |
| NOV4l | ------------------------------------------------------------ |
| NOV4m | ------------------------------------------------------------ |
| NOV4n | ------------------------------------------------------------ |
| NOV4o | ------------------------------------------------------------ |
| NOV4a | RIESSSNSLFLAFRSDASVSNAGFVIDFPENPRESCFDPGSIKNGTRVGSDLKLGSSVTY |
| NOV4b | SVTFECLPGYQLTGHPVLTCQHGTNRNWDHPLPKCEVPCGGNITSSNGTVYSPGFPSPYS |
| NOV4c | RIESSSNSLFLAFRSDASVSNAGFVIDYTENPRESCFDPGSIKNGTRVGSDLKLGSSVTY |
| NOV4d | RIESSSNSLFLAFRSDASVSNAGFVIDYTENPRESCFDPGSIKNGTRVGSDLKLGSSVTY |
| NOV4e | RIESSSNSLFLAFRSDASVSNAGFVIDFPENPRESCFDPGSIKNGTRVGSDLKLGSSVTY |
| NOV4f | RIESSSNSLFLAFRSDASVSNAGFVIDFPENPRESCFDPGSIKNGTRVGSDLKLGSSVTY |
| NOV4g | ------------------------------------------------------------ |
| NOV4h | ------------------------------------------------------------ |
| NOV4i | ------------------------------------------------------------ |
| NOV4j | --------------------------------KLSCFDPGSIKNGTRVGSDLKLGSSVTY |
| NOV4k | ------------------------------------------------------------ |
| NOV4l | ------------------------------------------------------------ |
| NOV4m | ------------------------------------------------------------ |
| NOV4n | ------------------------------------------------------------ |
| NOV4o | ------------------------------------------------------------ |
| NOV4a | YCHGGYEVEGTSTLSCILGPDGKPVWNNPRPVCTAPCGGQYVGSDGVVLSPNYPQNYTSG |
| NOV4b | SSQDCVWLITVPIGHGVRLNLSLLQTEPSGDFITIWDGPQQTAPRLGVFTRSMAKKTVQS |
| NOV4c | YCHGGYEVEGTSTLSCILGPDGKPVWNNPRPVCTAPCGGQYVGSDGVVLSPNYPQNYTSG |
| NOV4d | YCHGGYEVEGTSTLSCILGPDGKPVWNNPRPVCTAPCGGQYVGSDGVVLSPNYPQNYTSG |
| NOV4e | YCHGGYEVEGTSTLSCILGPDGKPVWNNPRPVCTAPCGGQYVGSDGVVLSPNYPQNYTSG |
| NOV4f | YCHGGYEVEGTSTLSCILGPDGKPVWNNPRPVCTAPCGGQYVGSDGVVLSPNYPQNYTSG |
| NOV4g | ------------------------------------------------------------ |
| NOV4h | ------------------------------------------------------------ |
| NOV4i | ------------------------------------------------------------ |
| NOV4j | YCHGGYEVEGTSTLSCILGPDGKPVWNNPRPVCTAPCGGQYVGSDGVVLSPNYPQNYTSG |
| NOV4k | ------------------------------------------------------------ |
| NOV4l | ------------------------------------------------------------ |
| NOV4m | ------------------------------------------------------------ |
| NOV4n | ------------------------------------------------------------ |
| NOV4o | ------------------------------------------------------------ |
| NOV4a | QICLYFVTVPKDYGVVFGQFAFFHTALNDVVEVHDGHSQHSRLLSSLSGSHTG-ESLPLA |
| NOV4b | SSNQVLLKFHRDAATGGIFAIAFSAYPLTKCPPPTILPNAEVVTENEEFNIGD-IVRYRC |
| NOV4c | QICLYFVTVPKDY-VVFGQFAFFHTALNDVVEVHDGHSQHSRLLSSLSGSHTG-ESLPLA |
| NOV4d | QICLYFVTVPKDY-VVFGQFAFFHTALNDVVEVHDGHSQHSRLLSSLSGSHTG-ESLPLA |
| NOV4e | QICLYFVTVPKDYGVVFGQFAFFHTALNDVVEVHDGHSQHSRLLSSLSGSHTG-ESLPLA |
| NOV4f | QICLYFVTVPKDYGVVFGQFAFFHTALNDVVEVHDGHSQHSRLLSSLSGSHTGGESLPLA |
| NOV4g | ------------------------------------------------------------ |
| NOV4h | ------------------------------------------------------------ |
| NOV4i | ------------------------------------------------------------ |
| NOV4j | QICLYFVTVPKDY-VVFGQFAFFHTALNDVVEVHDGHSQHSRLLSSLSGSHTG-ESLPLA |
| NOV4k | ------------------------------------------------------------ |
| Nov4l | ------------------------------------------------------------ |
| NOV4m | ------------------------------------------------------------ |
| NOV4n | ------------------------------------------------------------ |
| NOV4o | ------------------------------------------------------------ |
| NOV4a | TSNQVLIKFSAKGLAPARGFHFVYQAVPRTSATQCSSVPEPRYGKRLGSDFSVGAIVRFE |
| NOV4b | LPGFTLVGNEILTCKLGTYLQFEGPPPICEVHCPTNELLTDSTGVILSQSYPGSYPQFQT |
| NOV4c | TSNQVLIKFSAKGLAPARGFHFVYQAVPRTSATQCSSVPEPRYGKRLGSDFSVGAIVRFE |
| NOV4d | TSNQVLIKFSAKGLAPARGFHFVYQAVPRTSATQCSSVPEPRYGKRLGSDFSVGAIVRFE |
| NOV4e | TSNQVLIKFSAKGLAPARGFHFVYQAVPRTSATQCSSVPEPRYGKPLGSDFSVGAIVRFE |
| NOV4f | TSNQVLIKFSAKGLAPARGFHFVYQAVPRTSATQCSSVPEPRYGKRLGSDFSVGAIVRFE |
| NOV4g | ------------------------------------------------------------ |
| NOV4h | ------------------------------------------------------------ |
| NOV4i | ------------------------------------------------------------ |
| NOV4j | TSNQVLIKFSAKGLAPARGFHFVYQAVPRTSATQCSSVPEPRYGKRLGSDFSVGAIVRFE |
| NOV4k | ------------------------------------------------------------ |
| NOV4l | ------------------------------------------------------------ |
| NOV4m | ------------------------------------------------------------ |
| NOV4n | ------------------------------------------------------------ |
| NOV4o | ------------------------------------------------------------ |
| NOV4a | CNSGYALQGSPEIECLPVPGALAQWNVSAPTCVVPCGGNLTERRGTILSPGFPEPYLNSL |
| NOV4b | CSWLVRVEPDYNISLTVEYFLSEKQYDEFEIFDGPSGQSPLLKALSGNYSAPLIVTSSSN |
| NOV4c | CNSGYALQGSPEIECLPVPGALAQWNVSAPTCVVPCGGNLTERRGTILSPGFPEPYLNSL |
| NOV4d | CNSGYALQGSPEIECLPVPGALAQWNVSAPTCVVPCGGNLTERRGTILSPGFPEPYLNSL |
| NOV4e | CNSGYALQGSPEIECLPVPGAIAQWNVSAPTCVVPCGGNLTERRGTTLSPGFPEPYLNSL |
| NOV4f | CNSGYALQGSPEIECLPVPGALAQWNVSAPTCVVPCGGNLTERRGTILSPGFPEPYLNSL |
| NOV4h | ------------------------------------------------------------ |
| NOV4i | ------------------------------------------------------------ |
| NOV4j | CNSGYALQGSPEIECLPVPGALAQWNVSAPTCVVPCGGNLTERRGTILSPGFPEPYLNSL |
| NOV4k | ------------------------------------------------------------ |
| NOV4l | ------------------------------------------------------------ |
| NOV4m | ------------------------------------------------------------ |
| NOV4n | ------------------------------------------------------------ |
| NOV4o | ------------------------------------------------------------ |
| NOV4a | NCVWKIVVPEGAGIQIQVVSFVTEQNWDSLEVFDGADNTVTMLGSFSGTTVPALLNSTSN |
| NOV4b | SVYLRWSSDHAYNRKGFKIRYSAPYCSLPRAPLHGFILGQTSTQPGGSIHFGCNAGYRLV |
| NOV4C | NCVWKIVVPEGAGIQIQVVSFVTEQNWDSLEVFDGADNTVTMLGSFSGTTVPALLNSTSN |
| NOV4d | NCVWKIVVPEGAGIQIQVVSFVTEQNWDSLEVFDGADNTVTMLGSFSGTTVPALLNSTSN |
| NOV4e | NCVWKIVVPEGAGIQIQVVSFVTEQNWDSLEVFDGADNTVTMLGSFSGTTVPALLNSTSN |
| N0V4f | NCVWKIVVPEGAGIQIQVVSFVTEQNWDSLEVFDGADNTVTMLGSFSGTTVPALLNSTSN |
| NOV4g | ------------------------------------------------------------ |
| NOV4h | ------------------------------------------------------------ |
| NOV4i | ------------------------------------------------------------ |
| NOV4j | NCVWKIVVPEGAGIQIQVVSFVTEQNWDSLEVFDGADNTVTMLGSFSGTTVPALLNSTSN |
| NOV4k | ------------------------------------------------------------ |
| Nov41 | ------------------------------------------------------------ |
| NOV4m | ------------------------------------------------------------ |
| NOV4n | ------------------------------------------------------------ |
| NOV4o | ------------------------------------------------------------ |
| NOV4a | QLYLHFYSDISVSAAGFHLEYKTVGLSSCPEPAVPSNGVKTGERYLVNDVVSFQCEPGYA |
| NOV4b | GHSMAICTRHPQGYHLWSEAIPLCQALSCGLPEAPKNGMVFGKEYTVGTKAVYSCSEGYH |
| NOV4c | QLYLHFYSDISVSAAGFHLEYKTVGLSSCPEPAVPSNGVKTGERYLVNDVVSFQCEPGYA |
| NOV4d | QLYLHFYSDISVSAAGFHLEYKTVGLSSCPEPAVPSNGVKTGERYLVNDVVSFQCEPGYA |
| NOV4e | QLYLHFYSDISVSAAGFHLEYKTVGLSSCPEPAVPSNGVKTGERYLVNDVVSFQCEPGYA |
| NOV4f | QLYLHFYSDISVSAAGFHLEYKTVGLSSCPEPAVPSNGVKTGERYLVNDVVSFQCEPGYA |
| NOV4g | ------------------------------------------------------------ |
| NOV4h | ------------------------------------------------------------ |
| NOV4i | ------------------------------------------------------------ |
| NOV4j | QLYLHFYSDISVSAAGFHLEYKTVGLSSCPEPAVPSNGVKTGERYLVNDVVSFQCEPGYA |
| NOV4k | ------------------------------------------------------------ |
| N0V4l | ------------------------------------------------------------ |
| NOV4m | ------------------------------------------------------------ |
| NOV4n | ---MAICTRHPQGYHLWSEAIPLCQALSCGLPEAPKNGMVFGKEYTVGTKAVYSCSEGYH |
| NOV4o | ---MAICTRHPQGYHLWSEAIPLCQALSCGLPEAPKNGMVFGKEYTVGTKAVYSCSEGYH |
| NOV4a | LQGHAHISCMPGTVRRWNYPPPLCIAQCGGTVEENEGVILSPGFPGNYPSNMDCSWKIAL |
| NOV4b | LQAGAEATAECLDTGLWSNRNVPPQCVPVTCPDVSSISVEHGRWRLIFETQYQFQAQLML |
| NOV4c | LQGHAHISCMPGTVRRWNYPPPLCIAQCGGTVEEMEGVILSPGFPGNYPSNMDCSWKIAL |
| NOV4d | LQGHAHISCMPGTVRRWNYPPPLCIAQCGGTVEEMEGVILSPGFPGNYPSNMDCSWKIAL |
| NOV4e | LQGHAHISCMPGTVRRWNYPPPLCIAQCGGTVEEMEGVILSPGFPGNYPSNNDCSWKIAL |
| NOV4f | LQGHAHISCMPGTVRRWNYPPPLCIAQCGGTVEEMEGVILSPGFPGNYPSNMDCSWKIAL |
| NOV4g | ------------------------------------------------------------ |
| NOV4h | ------------------------------------------------------------ |
| NOV4i | ------------------------------------------------------------ |
| NOV4j | LQGHAHISCMPGTVRRWNYPPPLCIAQCGGTVEENEGVILSPGFPGNYPSNMDCSWKIAL |
| NOV4k | ------------------------------------------------------------ |
| NOV4l | ------------------------------------------------------------ |
| NOV4m | ------------------------------------------------------------ |
| NOV4n | LQAGAEATAECLDTGLWSNRNVPPQCVPVTCPDVSSISVEHGRWRLIFETQYQFQAQLML |
| NOV4o | LQAGAEATAECLDTGLWSNRNVPPQCVPVTCPDVSSISVEHGRWRLIFETQYQFQAQLNL |
| NOV4a | PVGFGAHIQFLNFSTEPNHDYIEIRNGP-------------YETSRMMGRFSGSELPSSL |
| NOV4b | ICDPGYYYTGQRVIRCQANGKWSLGDSTPTCRIISCDELPIPPNGHRIGTLSVYGATAIF |
| NOV4c | PVGFGAHIQFLNFSTEPNHDYIEIRNGP-------------YETSRMNGRFSGSELPSSL |
| NOV4d | PVGFGAHIQFLNFSTEPNHDYIEIRNGP-------------YETSRMMGRFSGSELPSSL |
| NOV4e | PVGFGAHIQFLNFSTEPNHDYIEIRNGP-------------YETSRMMGRFSGSELPSSL |
| NOV4f | PVGFGAHIQFLNFSTEPNHDYIEIRNGP-------------YETSPMMGRFSGSELPSSL |
| NOV4g | ------------------------------------------------------------ |
| NOV4h | ------------------------------------------------------------ |
| NOV4i | ------------------------------------------------------------ |
| NOV4j | PVGFGAHIQFLNFSTEPNHDYIEIRNGP-------------YETSRMMGRFSGSELPSSL |
| NOV4k | ------------------------------------------------------------ |
| NOV4l | ------------------------------------------------------------ |
| NOV4m | ------------------------------------------------------------ |
| NOV4n | ICDPGYYYTGQRVIRCQANGKWSLGDSTPTCRIISCGELPIPPNGHRIGTLSVYGATAIF |
| NOV4o | ICDPGYYYTGQRVIRCQANGKWSLGDSTPTCRIISCGELPIPPNGHRIGTLSVYGATAIF |
| NOV4a | LSTSHETTVYFHSDHSQNRPGFKLEYQAYELQECPDPEPFANGIVRGAGYNVGQSVTFEC |
| NOV4b | SCNSGYTLVGSRVRECMANGLWSGSEVRCLAGHCGTPEPIVNGHINGENYSYRGSVVYQC |
| NOV4c | LSTSHETTVYFHSDHSQNRPGFKLEYQAYELQECPDPEPFANGIVRGAGYNVGQSVTFEC |
| NOV4d | LSTSHETTVYFHSDHSQNRPGFKLEYQAYELQECPDPEPFANGIVRGAGYNVGQSVTFEC |
| NOV4e | LSTSHETTVYFHSDHSQNRPGFKLEYQAYELQECPDPEPFANGIVRGAGYNVGQSVTFEC |
| N0V4f | LSTSHETTVYFHSDHSQNRPGFKLEYQAYELQECPDPEPFANGIVRGAGYNVGQSVTFEC |
| NOV4g | ------------------------------KLECPDPEPFANGIVRGAGYNVGQSVTFEC |
| NOV4h | ------------------------------KLECPDPEPFANGIVRGAGYNVGQSVTFEC |
| NOV4i | ------------------------------KLECPDPEPFANGIVRGAGYNVGQSVTFEC |
| NOV4j | LSTSHETTVYFHSDHSQNRPGFKLEYQAYELQECPDPEPFANGIVRGAGYNVGQSVTFEC |
| NOV4k | ------------------------------------------------------------ |
| NOV4l | ------------------------------------------------------------ |
| NOV4m | ------------------------------------------------------------ |
| NOV4n | SCNSGYTLVGSRVRECMANGLWSGSEVRCLAGHCGTPEPIVNGHINGENYSYRGSVVYQC |
| NOV4o | SCNSGYTLVGSRVRECMANGLWSGSEVRCLAGHCGTPEPIVNGHINGENYSYRGSVVYQC |
| NOV4a | LPGYQLTGHPVLTCQHGTNRN----------WDHPLPKCEVPCGGNITSSNGTVYSPGFP |
| NOV4b | NAGFRLIGMSVRICQQDHHWSGKTPFCVPITCGHPGNPVNGLTQGNQFNLNDVVKFVCNP |
| NOV4c | LPGYQLTGHPVLTCQHGTNRN----------WDHPLPKCEVPCGGNITSSNGTVYSPGFP |
| NOV4d | LPGYQLTGHPVLTCQHGTNRN----------WDHPLPKCEVPCGGNITSSNGTVYSPGFP |
| NOV4e | LPGYQLTGHPVLTCQHGTNRN----------WDHPLPKCEVPCGGNITSSNGTVYSPGFP |
| NOV4f | LPGYQLTGHPVLTCQHGTNRN----------WDHPLPKCEVPCGGNITSSNGTVYSPGFP |
| NOV4g | LPGYQLTGHPVLTCQHGTNRN----------WDHSLPKCEVPCGGNITSSNGTVYSPGFP |
| NOV4h | LPGYQLTGHPVLTCQHGTNRN----------WDHPLPKCEVPCGGNITSSNGTVYSPGFP |
| NOV4i | LPGYQLTGHPVLTCQHGTNRN----------WDHPLPKCEVPCGGNITSSNGTVYSPGFP |
| NOV4j | LPGYQLTGHPVLTCQHGTNRN----------WDHPLPKCEVPCGGNITSSNGTVYSPGFP |
| NOV4k | ------------------------------------------------------------ |
| NOV4l | ------------------------------------------------------------ |
| NOV4m | ------------------------------------------------------------ |
| NOV4n | NAGFRLIGMSVRICQQDHHWSGKTPFCVPITCGHPGNPVNGLTQGNQFNLNDVVKFVCNP |
| NOV4o | NAGFRLIGMSVRICQQDHHWSGKTPFCVPITCGHPGNPVNGLTQGNQFNLNDVVKFVCNP |
| NOV4a | SPYSSSQDCVWLITVPIGHGVRLNLSLLQTEPSGDFITIWDGPQQTAPRLGVFTRSMAKK |
| NOV4b | GYMAEGAARSQCLASGQWSDMLPTCRIINCTDPGHQENSVRQVHASGPHRFSFGTTVSYR |
| NOV4c | SPYSSSQDCVWLITVPIGHGVRLNLSLLQTEPSGDFITIWDGPQQTAPRLGVFTRSMAKK |
| NOV4d | SPYSSSQDCVWLITVPIGHGVRLNLSLLQTEPSGDFITIWDGPQQTAPRLGVFTRSMAKK |
| NOV4e | SPYSSSQDCVWLITVPIGHGVRLNLSLLQTEPSGDFITIWDGPQQTAPRLGVFTRSMAKK |
| NOV4f | SPYSSSQDCVWLITVPIGHGVRLNLSLLQTEPSGDFITIWDGPQQTAPRLGVFTRSMAKK |
| NOV4g | SPYSSSQDCVWLITVPIGHGVRLNLSLLQTEPSGDFITIWDGPQQTAPRLGVFTRSMAKK |
| NOV4h | SPYSSSQDCVWLITVPIGHGVRLNLSLLQTEPSGDFITIWDGPQQTAPRLGVFTRSMAKK |
| NOV4i | SPYSSSQDCVWLITVPIGHGVRLNLSLLQTEPSGDFITIWDGPQQTAPRLGVFTRSMAKK |
| NOV4j | SPYSSSQDCVWLITVPIGHGVRLNLSLLQTEPSGDFITIWDGPQQTAPRLGVFTRSMAKK |
| NOV4k | ------------------------------------------------------------ |
| NOV4l | ---AEGAARSQCLASGQWSDMLPTCRIINCTDPGHQENSVRQVHASGPHRFSFGTTVSYR |
| NOV4m | ----------------------------------------------------MGYTLIYS |
| NOV4n | GYMAEGAARSQCLASGQWSDMLPTCRIINCTDPGHQENSVRQVHASGPHRFSFGTTVSYR |
| NOV4o | GYMAEGAARSQCLASGQWSDMLPTCRIINCTDPGHQENSVRQVHASGPHRFSFGTTVSYR |
| NOV4a | TVQSSSNQVLLKFHRDAATGGIFAIAFSAYPLTKCPPPTILPNAEVVTENEEFNIGDIVR |
| NOV4b | C--NHGFYLLGTPVLSCQGDGTWDRPRPQCLLVSCGHPGSPPHSQMSGDS--YTVGAVVR |
| NOV4c | TVQSSSNQVLLKFHRDAATGGIFAIAFSAYPLTKCPPPTILPNAEVVTENEEFNIGDIVR |
| NOV4d | TVQSSSNQVLLKFHRDAATGGIFAIAFSAYPLTKCPPPTILPNAEVVTENEEFNIGDIVR |
| NOV4e | TVQSSSNQVLLKFHRDAATGGIFAIAFSAYPLTKCPPPTILPNAEVVTENEEFNIGDIVR |
| NOV4f | TVQSSSNQVLLKFHRDAATGGIFAIAFSAYPLTKCPPPTILPNAEVVTENEEFNIGDIVR |
| NOV4g | TVQSSSNQVLLKFHRDAATGGIFAIAFSAYPLTKCPPPTILPNAEVVTENEEFNIGDIVR |
| NOV4h | TVQSSSNQVLLKFHRDAATGGIFAIAFSAYPLTKCPPPTILPNAEVVTENEEFNIGDIVR |
| NOV4i | TVQSSSNQVLLKFHRDAATGGIFAIAFSAYPLTKCPPPTTLPNAEVVTENEEFNIGDIVR |
| NOV4j | TVQSSSNQVLLKFHRDAATGGIFAIAFSAYPLTKCPPPTILPNAEVVTENEEFNIGDIVR |
| NOV4k | ------------------------------------------------------------ |
| NOV4l | C--NHGFYLLGTPVLSCQGDGTWDRPRPQCLLVSCGHPGSPPHSQMSGDS--YTVGAVVR |
| NOV4m | C-QEGFSLKGGSEHRTCKADGSWTGKPPICLEVR---PSGRPINTAREPP--------LT |
| NOV4n | CX-TTASTSWATPVLSCQGDGTWDRPRPQCLLVSCGHPGSPPHSQMSGDS--YTVGAVVR |
| NOV4o | C--NHGFYLLGTPVLSCQGDGTWDRPRPQCLLVSCGHPGSPPHSQMSGDS--YTVGAVVR |
| NOV4a | YRCLPGFTLVGNEILTCKLGTYLQFEGPPPICEVHCPTNELLTDSTGVILSQSYPGSYPQ |
| NOV4b | YSCIGKRTLVGNSTRMCGLDGHWTGSLPHCSGTSVGVCGDPGIPAHGIRLGDSFDPGTVM |
| NOV4c | YRCLPGFTLVGNEILTCKLGTYLQFEGPPPICEVHCPTNELLTDSTGVILSQSYPGSYPQ |
| NOV4d | YRCLPGFTLVGNEILTCKLGTYLQFEGPPPICEVHCPTNELLTDSTGVILSQSYPGSYPQ |
| NOV4e | YRCLPGFTLVGNEILTCKLGTYLQFEGPPPICEVHCPTNELLTDSTGVILSQSYPGSYPQ |
| NOV4f | YRCLPGFTLVGNEILTCKLGTYLQFEGPPPICEVHCPTNELLTDSTGVILSQSYPGSYPQ |
| NOV4g | YRCLPGFTLVGNEILTCKLGTYLQFEGPPPICEVHCPTNELLTDSTGVILSQSYPGSYPQ |
| NOV4h | YRCLPGFTLVGNEILTCKLGTYLQFEGPPPICEVHCPTNELLTDSTGVILSQSYPGSYPQ |
| NOV4i | YRCLPGFTLVGNEILTCKLGTYLQFEGPPPICEVHCPTNELLTDSTGVILSQSYPGSYPQ |
| NOV4j | YRCLPGFTLVGNEILTCKLGTYLQFEGPPPICEVHCPTNELLTDSTGVILSQSYPGSYPQ |
| NOV4k | ------------------------------------------------------------ |
| NOV4l | YSCIGKRTLVGNSTRMCGLDGHWTGSLPHCSGTSVGVCGDPGIPAHGIRLGDSFDPGTVM |
| NOV4m | QALIPGDVFAKNSLWKGAYEYQGKKQ-PAMLRVTGFQVANSKVNATMIDHSG-VELHLAG |
| NOV4n | YSCIGKRTLVGNSTRMCGLDGHWTGSLPHCSGTSVGVCGDPGIPAHGIRLGDSFDPGTVM |
| NOV4o | YSCIGKRTLVGNSTRMCGLDGHWTGSLPHCSGTSVGVCGDPGIPAHGIRLGDSFDPGTVN |
| NOV4a | FQTCSWLVRVEPDYNISLTVEYFLSEKQYDEFEIFDGPSGQSPLLKALSGNYSAPLIVTS |
| NOV4b | RFSCEAGHVLRGSSERTCQANGSWSGSQPECGVISCGNPG--------TPSNARVVFSDG |
| NOV4c | FQTCSWLVRVEPDYNISLTVEYFLSEKQYDEFEIFDGPSGQSPLLKALSGNYSAPLIVTS |
| NOV4d | FQTCSWLVRVEPDYNISLTVEYFLSEKQYDEFEIFDGPSGQSPLLKALSGNYSAPLIVTS |
| NOV4e | FQTCSWLVRVEPDYNISLTVEYFLSEKQYDEFEIFDGPSGQSPLLKALSGNYSAPLIVTS |
| NOV4f | FQTCSWLVRVEPDYNISLTVEYFLSEKQYDEFEIFDGPSGQSPLLKALSGNYSAPLIVTS |
| NOV4g | FQTCSWLVRVEPDYNISLTVEYFLSEKQYDEFEIFDGPSGQSPLLKALSGNYSAPLIVTS |
| NOV4h | FQTCSWLVRVEPDYNISLTVEYFLSEKQYDEFEIFDGPSGQSPLLKALSGNYSAPLIVTS |
| NOV4i | FQTCSWLVRVEPDYNISLTVEYFLSEKQYDEFEIFDGPSGQSPLLKALSGNYSAPLIVTS |
| NOV4j | FQTCSWLVRVEPDYNISLTVEYFLSEKQYDEFEIFDGPSGQSPLLKALSGNYSAPLIVTS |
| NOV4k | ------------------------------------------------------------ |
| NOV4l | RFSCEAGHVLRGSSERTCQANGSWSGSQPECGVISCGNPG--------TPSNARVVFSDG |
| NOV4m | TYKKEDFHLLLQVYQITGPVEIFMN-KFKDDHWALDGHVS--------SANSPPPLTPRS |
| NOV4n | RFSCEAGHVLRGSSERTCQANGSWSGSQPECGVISCGNPG--------TPSNARVVFSDG |
| NOV4o | RFSCEAGHVLRGSSERTCQANGSWSGSQPECGVISCGNPG--------TPSNARVVFSDG |
| NOV4a | SSNSVYLRWSSDHAYNRKGFKIRYSAPYCSLPRAPLHGFILGQTSTQPGGSIHFGCNAGY |
| NOV4b | LVFSSSIVYECREGYYATGLLSRHCSVNGTWTGS----------D--------------- |
| NOV4c | SSNSVYLRWSSDHAYNRKGFKIRYSAPYCSLPRAPLHGFILGQTSTQPGGSIHFGCNAGY |
| NOV4d | SSNSVYLRWSSDHAYNRKGFKIRYSALSCGLP---------------------------- |
| NOV4e | SSNSVYLRWSSDHAYNRKGFKIRYSALSCGLPEAPKNGMVFGKEYTVGTKAMYSCSEGYH |
| NOV4f | SSNSVYLRWSSDHAYNRKGFKIRYSAPYCSLPRAPLHGFILGQTSTQPGGSIHFGCNAGY |
| NOV4g | SSNSVYLRWSSDHAYNRKGFKIRYSAPYCSLPRAPLHGFILGQTSTQPGGSIHFGCNAGY |
| NOV4h | SSNSVYLRWSSDHAYNRKGFKIRYSAPYCSLPRAPLHGFILGQTSTQPGGSIHFGCNAGY |
| NOV4i | SSNSVYLRWSSDHAYNRKGFKIRYSA---------------------------------- |
| NOV4j | SSNSVYLRWSSDHAYNRKGFKIRYVD---------------------------------- |
| NOV4k | ------------------------------------------------------------ |
| NOV4l | LVFSSSIVYECREGYYATGLLSRHCSVNGTWTGS----------D--------------- |
| NOV4m | LAGKRRTKGCANP----------------------------------------------- |
| NOV4n | LVFSSSIVYECREGYYATGLLSRHCSVNGTWTGS----------D--------------- |
| NOV4o | LVFSSSIVYECREGYYATGLLSRHCSVNGTWTGS----------D--------------- |
| NOV4a | RLVGHSMAICTRHPQGYH------------------------------------------ |
| NOV4b | ------------------------------------------------------------ |
| NOV4c | RLVGHSMAICTRHPQGYH------------------------------------------ |
| NOV4d | ------------------------------------------------------------ |
| NOV4e | LQAGAEATAECLDTGLWSNRNVPPQCVPVTCPDVSSISVEHGRWRLIFETQYQFQAQLML |
| NOV4f | RLVGHSMAICTRHPQGYHLWSEAIPLCQALSCGLPEAP---------------------- |
| NOV4g | RLVGHSMAICTRHPQGYH------------------------------------------ |
| NOV4h | RLVGHSMAICTRHPQGYH------------------------------------------ |
| NOV4i | ---------LS------------------------------------------------- |
| NOV4j | ------------------------------------------------------------ |
| NOV4k | ------------------------------------------------------------ |
| NOV4l | ------------------------------------------------------------ |
| NOV4m | ------------------------------------------------------------ |
| NOV4n | ------------------------------------------------------------ |
| NOV4o | ------------------------------------------------------------ |
| NOV4a | ------------------------------------------------------------ |
| NOV4b | ------------------------------------------------------------ |
| NOV4c | ------------------------------------------------------------ |
| NOV4d | ------------------------------------------------------------ |
| NOV4e | ICDPGYYYTGQRVIRCQANGKWSLGDSTPTCRIISCGELPIPPNGHRIGTLSVYGATAIF |
| NOV4f | ------------------------------------KNGMVFGKEYTVGTKAMYSCSEGY |
| NOV4g | ------------------------------------------------------------ |
| NOV4h | ------------------------------------------------------------ |
| NOV4i | ------------------------------------------------------------ |
| NOV4j | ------------------------------------------------------------ |
| NOV4k | ------------------------------------------------------------ |
| NOV4l | ------------------------------------------------------------ |
| NOV4m | ------------------------------------------------------------ |
| NOV4n | ------------------------------------------------------------ |
| NOV4o | ------------------------------------------------------------ |
| NOV4a | ------------------------------------------------------------ |
| NOV4b | ------------------------------------------------------------ |
| NOV4c | ------------------------------------------------------------ |
| NOV4d | ------------------------------------------------------------ |
| NOV4e | SCNSGYTLVGSRVRECMANGLWSGSEVRCLAGHCGTPEPIVNGHINGENYSYRGSVTYQC |
| NOV4f | HLQAGAEATAECLDTGLWSNRNVPPQCVPVTCPDVSSISVEHGRWRLIFETQYQFQAQLM |
| NOV4g | ------------------------------------------------------------ |
| NOV4h | ------------------------------------------------------------ |
| NOV4i | ------------------------------------------------------------ |
| NOV4j | ------------------------------------------------------------ |
| NOV4k | ------------------------------------------------------------ |
| NOV4l | ------------------------------------------------------------ |
| NOV4m | ------------------------------------------------------------ |
| NOV4n | ------------------------------------------------------------ |
| NOV4o | ------------------------------------------------------------ |
| NOV4a | ------------------------------------------------------------ |
| NOV4b | ------------------------------------------------------------ |
| NOV4c | ------------------------------------------------------------ |
| NOV4d | ------------------------------------------------------------ |
| NOV4e | NAGFRLIGMSVRICQQDHHWSGKTPFCVPITCGHPGNPVNGLTQGNQFNLNDVVKFVCNP |
| N0V4f | LICDPGYYYTGQRVIRCQANGKWSLGDSTPTCRIISCGELPIPPNGHRIGTLSVYGATAI |
| NOV4g | ------------------------------------------------------------ |
| NOV4h | ------------------------------------------------------------ |
| NOV4i | ------------------------------------------------------------ |
| NOV4j | ------------------------------------------------------------ |
| NOV4k | ------------------------------------------------------------ |
| NOV4l | ------------------------------------------------------------ |
| NOV4m | ------------------------------------------------------------ |
| NOV4n | ------------------------------------------------------------ |
| NOV4o | ------------------------------------------------------------ |
| NOV4a | ------------------------------------------------------------ |
| NOV4b | ------------------------------------------------------------ |
| NOV4c | ------------------------------------------------------------ |
| NOV4d | ------------------------------------------------------------ |
| NOV4e | GYMAEGAARSQCLASGQWSDMLPTCRIINCTDPGHQENSVRQVHASGPHRFSFGTTVSYR |
| NOV4f | FSCNSGYTLVGSRVRECMANGLWSGSEVRCLAGHCGTPEPIVNGHINGENYSYRGSVVYQ |
| NOV4g | ------------------------------------------------------------ |
| NOV4h | ------------------------------------------------------------ |
| NOV4i | ------------------------------------------------------------ |
| NOV4j | ------------------------------------------------------------ |
| NOV4k | ------------------------------------------------------------ |
| NOV4l | ------------------------------------------------------------ |
| NOV4m | ------------------------------------------------------------ |
| NOV4n | ------------------------------------------------------------ |
| NOV4o | ------------------------------------------------------------ |
| NOV4a | ------------------------------------------------------------ |
| NOV4b | ------------------------------------------------------------ |
| NOV4c | ------------------------------------------------------------ |
| NOV4d | ------------------------------------------------------------ |
| NOV4e | CNHGFYLLGTPVLSCQGDGTWDRPRPQCLLVSCGHPGSPPHSQMSGDSYTVGAVVRYSCI |
| NOV4f | CNAGFRLIGMSVRICQQDHHWSGKTPFCVLVSCGHPGSPPHSQMSGDSYTVGAVVRYSCI |
| NOV4g | ------------------------------------------------------------ |
| NOV4h | ------------------------------------------------------------ |
| NOV4i | ------------------------------------------------------------ |
| NOV4j | ------------------------------------------------------------ |
| NOV4k | ------------------------------------------------------------ |
| Nov4l | ------------------------------------------------------------ |
| NOV4m | ------------------------------------------------------------ |
| NOV4n | ------------------------------------------------------------ |
| NOV4o | ------------------------------------------------------------ |
| NOV4a | ------------------------------------------------------------ |
| NOV4b | ------------------------------------------------------------ |
| NOV4c | ------------------------------------------------------------ |
| NOV4d | ------------------------------------------------------------ |
| NOV4e | GKRTLVGNSTRMCGLDGHWTGSLPHCSGTSVGVCGDPGIPAHGIRLGDSFDPGTVMRFSC |
| NOV4f | GKRTLVGNSTRMCGLDGHWTGSLPHCSGTSVGVCGDPGIPAHGIRLGDSFDPGTVMRFSC |
| NOV4g | ------------------------------------------------------------ |
| NOV4h | ------------------------------------------------------------ |
| NOV4i | ------------------------------------------------------------ |
| NOV4j | ------------------------------------------------------------ |
| NOV4k | ------------------------------------------------------------ |
| NOV4l | ------------------------------------------------------------ |
| NOV4m | ------------------------------------------------------------ |
| NOV4o | ------------------------------------------------------------ |
| NOV4a | ------------------------------------------------------------ |
| NOV4b | ------------------------------------------------------------ |
| NOV4c | ------------------------------------------------------------ |
| NOV4d | ------------------------------------------------------------ |
| NOV4e | EAGHVLRGSSERTCQANGSWSGSQPECGVISCGNPGTPSNARVVFSDGLVFSSSIVYECR |
| NOV4f | EAGHVLRGSSERTCQANGSWSGSQPECGVISCGNPGTPSNARVVFSDGLVFSSSIVYECR |
| NOV4g | ------------------------------------------------------------ |
| NOV4h | ------------------------------------------------------------ |
| NOV4i | ------------------------------------------------------------ |
| NOV4j | ------------------------------------------------------------ |
| NOV4k | ------------------------------------------------------------ |
| NOV4l | ------------------------------------------------------------ |
| NOV4m | ------------------------------------------------------------ |
| NOV4n | ------------------------------------------------------------ |
| NOV4o | ------------------------------------------------------------ |
| NOV4a | -----------------LWSEAIPLCQALSCGLPEAPKNGMVFGKEYTVGTKAMYSCSEG |
| NOV4b | -----------------------PECLVINCGDPGIPANGLRLGNDFRYNKTVTYQCVPG |
| NOV4c | -----------------LWSEAIPLCQALSCGLPEAPKNGMVFGKEYTVGTKAMYSCSEG |
| NOV4d | ----------------------------------EAPKNGMVFGKEYTVGTKAMYSCSEG |
| NOV4e | EGYYATGLLSRHCSVNGTWTGSDPECLVINCGDPGIPANGLRLGNDFRYNKTVTYQCVPG |
| NOV4f | EGYYATGLLSRHCSVNGTWTGSDPECLVINCGDPGIPANGLRLGNDFRYNKTVTYQCVPG |
| NOV4g | -----------------LWSEAIPLCQALSCGLPEAPKNGMVFGKEYTVGTKAMYSCSEG |
| NOV4h | -----------------LWSEAIPLCQALSCGLPEAPKNGMVFGKEYTVGTKAVYSCSEG |
| NOV4i | ------------------------------CGLPEAPKNGMVFGKEYTVGTKAMYSCSEG |
| NOV4j | ------------------------------------------------------------ |
| NOV4k | ------------------------------------------------------------ |
| NOV4l | -----------------------PECLVINCGDPGIPANGLRLGNDFRYNKTVTYQCVPG |
| NOV4m | ------------------------------------------------------------ |
| NOV4n | -----------------------PECLVINCGDPGIPANGLRLGNDFRYNKTVTYQCVPG |
| NOV4o | -----------------------PECLVINCGDPGIPANGLRLGNDFRYNKTVTYQCVPG |
| NOV4a | YHLQAGAEATAECLDTGLWSNRNVPPQCVP---------VTCPDVSSISVEHGRWRLIFE |
| NOV4b | YMMESHRVSVLSCTKDRThNGTKPVCKALMCK--------PPPLI--------PNGKVVG |
| NOV4c | YHLQAGAEATAECLDTGLWSNRNVPPQCVRESSGNGGGSVTCPDVSSISVEHGRWRLIFE |
| NOV4d | YHLQAGAEATAECLDTGLWSNRNVPPQCVP---------VTCPDVSSISVEHGRWRLIFE |
| NOV4e | YMMESHRVSVLSCTKDRTWNGTKPVCKALMCK--------PPPLIP--------NGKVVG |
| NOV4f | YMMESHRVSVLSCTKDRTWNGTKPVCKALMCK--------PPPLIP--------NGKVVG |
| NOV4g | YHLQAGAEATAECLDTGLWSNRNVPPQCVP---------VTCPDVSSISVEHGRWRLIFE |
| NOV4h | YHLQAGAEATAECLDTGLWSNRNVPPQCVP---------VTCPDVSSISVEHGRWRLIFE |
| NOV4i | YHLQAGAEATAECLDTGLWSNPNVPPQCVP---------VTCPDVSSISVEHGRWRPIFE |
| NOV4j | ------------------------------------------------------------ |
| NOV4k | ------------------------------------------------------------ |
| Nov4l | YMMESHRVSVLSCTKDRTWNGTKPVCKALMCK--------PPPLI--------PNGKVVG |
| NOV4m | ------------------------------------------------------------ |
| NOV4n | YMMESHRVSVLSCTKDRTWNGTKPVCKALMCK--------PPPLI--------PNGKVVG |
| NOV4o | YMMESHRVSVLSCTKDRTWNGTKPVCKALMCK--------PPPLI--------PNGKVVG |
| NOV4a | TQYQFQAQLMLICDPGYYYTGQRVIRCQANGKWSLGDSTPTCRIISCGELPIPPNGHRIG |
| NOV4b | SDFMWGSSVTYACLEGYQLSLPAVFTCEGNGSWTG--ELPQCFPVFCGDPGVPSRGRRED |
| NOV4c | TQYQFQAQLMLICDPGYYYTGQRVIRCQANGKWSLGDSTPTCRIISCGELPIPPNGHRIG |
| NOV4d | TQYQFQAQLMLICDPGYYYTGQRVIRCQMJGKWSLGDSTPTCRIISCGELPIPPNGHRIG |
| NOV4e | SDFMWGSSVTYACLEGYQLSLPAVFTCEGNGSWTG--ELPQCFPVFCGDPGVPSRGRRED |
| NOV4f | SDFMWGSSVTYACLEGYQLSLPAVFTCEGNGSWTG--ELPQCFPVFCGDPGVPSRGRRED |
| NOV4g | TQYQFQAQLMLICDPGYYYTGQRVIRCQANGKWSLGDSTPTCRIISCGELPIPPNGHRIG |
| NOV4h | TQYQFQAQLMLICDPGYYYTGQRVIRCQANGKWSLGDSTPTCRIISCGELPIPPNGHRIG |
| NOV4i | TQYQFQAQLMLICDPGYYYTGQRVIRCQANGKWSLGDSTPTCRIISCGELPIPPNGHRIG |
| NOV4j | ------------------------------------------------------------ |
| NOV4k | ------------------------------------------------------------ |
| NOV4l | SDFMWGSSVTYACLEGYQLSLPAVFTCEGNGSWTG--ELPQCFPVFCGDPGVPSRGRRED |
| NOV4m | ------------------------------------------------------------ |
| NOV4n | SDFMWGSSVTYACLEGYQLSLPAVFTCEGNGSWTG--ELPQCFPVFCGDPGVPSRGRRED |
| NOV4o | SDFMWGSSVTYACLEGYQLSLPAVFTCEGNGSWTG--ELPQCFPVFCGDPGVPSRGRRED |
| NOV4a | TLSVYGATAIFSCNSGYTLVGSRVRECMANGLWSGS------------------------ |
| NOV4b | RGFSYRSSVSFSCHPPLVLVGSPRRFCQSDGTWSGTQP---------------------S |
| NOV4c | TLSVYGATAIFSCNSGYTLVGSRVRECMANGLWSGSEVRCLATQTKLHSIFYKLLFDVLS |
| NOV4d | TLSVYGATAIFSCNSGYTLVGSRVRECMANGLWSGS------------------------ |
| NOV4e | RGFSYRSSVSFSCHPPLVLVGSPRRFCQSDGTWSGTQP---------------------S |
| NOV4f | RGFSYRSSVSFSCHPPLVLVGSPRRFCQSDGTWSGTQP---------------------S |
| NOV4g | TLSVYGATATFSCNSGYTLVGSRVRECMANGLWSGS------------------------ |
| NOV4h | TLSVYGATAIFSCNSGYTLVGSRVRECMANGLWSGS------------------------ |
| NOV4i | TLSVYGATAIFSCNSGYTLVGSRVRECMANGLWSGS------------------------ |
| NOV4j | ------------------------------------------------------------ |
| NOV4k | -----KSSVSFSCHPPLVLVGSPRLRFCQSDGTWSGTQP--------------------S |
| NOV4l | RGFSYRSSVSFSCHPPLVLVGSPRLRFCQSDGTWSGTQP--------------------- |
| NOV4m | ------------------------------------------------------------ |
| NOV4n | RGFSYRSSVSFSCHPPLVLVGSPRRFCQSDGTWSGTQP---------------------S |
| NOV4o | RGFSYRSSVSFSCHPPLVLVGSPRRFCQSDGTWSGTQP---------------------S |
| NOV4a | -EVRCLAGHCGTPEPIVNGHINGENYSYRGSVVYQCNAGFRLIGMSVRICQQDHHWSGKT |
| NOV4b | CIDPTLTTCADPGVPQFGIQNNSQGYQVGSTVLFRCQKGYLLQGSTTRTCLPNLTWSGTP |
| NOV4c | SPSLTKAGHCGTPEPIVNGHINGENYSYRGSVVYQCNAGFRLIGMSVRICQQDHHWSGKT |
| NOV4d | -EVRCLAGHCGTPEPIVNGHINGENYSYRGSVVYQCNAGFRLIGMSVRTCQQDHHWSGKT |
| NOV4e | CIDPTLTTCADPGVPQFGIQNNSQGYQVGSTVLFRCQKGYLLQGSTTRTCLPNLTWSGTP |
| NOV4f | CIDPTLTTCADPGVPQFGIQNNSQGYQVGSTVLFRCQKGYLLQGSTTRTCLPNLTWSGTP |
| NOV4g | -EVRCLAGHCGTPEPIVNGHINGENYSYRGSVVYQCNAGFRLIGMSVRTCQQDHHWSGKT |
| NOV4h | -EVRCIAGHCGTPEPIVNGHINGENYSYRGSVVYQCNAGFRLIGMSVRICQQDHHWSGKT |
| NOV4i | -EVRCLAGHCGTPEPIVNGHINGENYSYRGSVVYQCNAGFRLIGMSVRICQQDHHWSGKT |
| NOV4j | ------------------------------------------------------------ |
| NOV4k | CIDPTLTTCADPGVPQFGIQNNSQGYQVGSTVLFRCQKGYLLQGSTTRTCLPNLTWSGTP |
| NOV4l | CIDPTLTTCADPGVPQFGIQNNSQGYQVGSTVLFRCQKGYLLQGSTTRTCLPNLTWSGTP |
| NOV4m | ------------------------------------------------------------ |
| NOV4n | CIDPTLTTCADPGVPQFGIQNNSQGYQVGSTVLFRCQKGYLLQGSTTRTCLPNLTWSGTP |
| NOV4o | CIDPTLTTCADPGVPQFGIQNNSQGYQVGSTVLFRCQKGYLLQGSTTRTCLPNLTWSGTP |
| NOV4a | PFCVPITCGHPGNPVNGLTQGNQFNLNDVVKFVCNPGYMAEG--AARSQCLASGQWSDML |
| NOV4b | PDCVPHHCRQPETPTHANVGALDLPSMGYTLITPARRASPSR--VAPSTAPARRMAAGQA |
| NOV4c | PFCVHVKQQLLLLLLLLCDDD----DDE-------------------------------- |
| NOV4d | PFCQLPVDTQATLSTASLRVTS-LTSTMWSSLFATLGIWLRG--LLGPNAWPAGNGVTCC |
| NOV4e | PDCVPHHCRQPETPTHANVGALDLPSMGYTLIYSCQEGFSLKGGSEHRTCKADGSWTGKP |
| NOV4f | PDCVPHHCRQPETPTHANVGALDLPSMGYTLIYSCQEGFSLKGGSEHRTCKADGSWTGKP |
| NOV4g | PFCVPITCGHPGNPVNGLTQGNQFNLNDVVKFVCNPGYMAEG--AARSQCLASGQWSDML |
| NOV4h | PFCVPITCGHPGNPVNGLTQGNQFNLNDVVKFVCNPGYMAEG--AARSQCLASGQWSDML |
| NOV4i | PFCVPITCGHPGNPVNGLTQGNQFNLNDVVKFVCNPGYMAEG--AARSQCLASGQWSDML |
| NOV4j | ------------------------------------------------------------ |
| NOV4k | PDCVP------------------------------------------------------- |
| NOV4l | PDCVPHHCRQPETPTHANVGALDLPSMGYTLIYSCQEGFSLKGGSEHRTCKADGSWTGKP |
| NOV4m | ------------------------------------------------------------ |
| NOV4n | PDCVPHHCRQPETPTHANVGALDLPSMGYTLITPARRASPSR--VAPSTAPARRMAAGQA |
| NOV4o | PDCVPHHCRQPETPTHANVGALDLPSMGYTLITPARRASPSR--VAPSTAPARRMAAGQA |
| NOV4a | PTCRIINCTDPGHQENSVRQVHASGPHRFSFGTTVSYRCNHGFYLLGTPVLSCQGDGTWD |
| NOV4b | SRPSAWR-SGPVGDPSTLPGSHRSPKP--------------------------------- |
| NOV4c | -DDGSGAITCGHPGNPVNGLTQGNQFNLNDVVKFVCNPGYMAEGAARSQCLASGQWSDML |
| NOV4d | PPAESSTVQILDTKKIVFVRSTPAARTGSASAPLCLTGATTASTSWAPQCSAARENAHGT |
| NOV4e | PICLEVRPNGRPINTAREPPLTQALIPGDVFAKNSLWKGAYEYQGKKQPAMLRVTGFQVA |
| NOV4f | PICLEVRPNGRPINTAREPPLTQALIPGDVFAKNSLWKGAYEYQGKKQPAMLRVTGFQVA |
| NOV4g | PTCRIINCTDPGHQENSVRQVHASGPHRFSFGTTVSYRCNHGFYLLGTPVLSCQGDGTWD |
| NOV4h | PTCRIINCTDPGHQENSVRQVHASGPHRFSFGTTVSYRCNHGFYLLGTPVLSCQGDGTWD |
| NOV4i | PTCRIINCTDPGHQENSVRQVHASGPHRFSFGTTVSYRCNHGFYLLGTPVLSCQGDGTWD |
| NOV4j | ------------------------------------------------------------ |
| NOV4k | ------------------------------------------------------------ |
| Nov4l | PICLEVRPSGRPINIAREPPLTQALIPGDVFAKNSLWKG--------------------- |
| NOV4m | ------------------------------------------------------------ |
| NOV4n | SRPSAWQRSGPVGDPSTLPGSHRSPKP--------------------------------- |
| NOV4o | SRPSAWR-SGPVGDPSTLPGSHRSPKP--------------------------------- |
| NOV4a | RPRPQCLLVSCGHPGSPPHSQMSGDSYTVGAVVRYSCIGKRTLVGNSTRMCGLDGHWTGS |
| NOV4b | ------------------------------------------------------------ |
| NOV4c | PTCRIINCTDPGHQENSVRQVHASGPHRFSFGTTVSYRCNHGFYLLGTPVLSCQGDGTWD |
| NOV4d | VPAPSVSVSSGVLWPSGLPASLPDVWRQLYCGSSGAVQLHRQAYSGGKQHPHVWAGWTLD |
| NOV4e | NSKVNATMIDHSGVELHLAGTYKKEDFHLLLQVYQITGPVEIFMNKFKDDHWALDGHVSS |
| NOV4f | NSKVNATMIDHSGVELHLAGTYKKEDFHLLLQVYQITGPVEIFMNKFKDDHWALDGHVSS |
| NOV4g | RPRPQCLCKVD------------------------------------------------- |
| NOV4h | RPRPQCLCKVD------------------------------------------------- |
| NOV4i | RPRPQCLCKVD------------------------------------------------- |
| NOV4j | ------------------------------------------------------------ |
| NOV4k | ------------------------------------------------------------ |
| NOV4l | ------------------------------------------------------------ |
| NOV4m | ------------------------------------------------------------ |
| NOV4n | ------------------------------------------------------------ |
| NOV4o | ------------------------------------------------------------ |
| NOV4a | LPHCSGTSVGVCGDPGIPAHGIRLGDSFDPGTVMRFSCEAGHVLRGSSERTCQANGSWSG |
| NOV4b | ------------------------------------------------------------ |
| NOV4c | RPRPQCLCK--------------------------------------------------- |
| NOV4d | WLPPSLLRNQRGSLR--------------------------------------------- |
| NOV4e | ESSGATFIYQGSVKGQGFGQFGFQRLDLRLLESDPESIGRHFASNSSSVAAAILVPFIAL |
| NOV4f | ESSGATFIYQGSVKGQGFGQFGFQRLDLRLLESDPESIGRHFASNSSSVAAAILVPFIAL |
| NOV4g | ------------------------------------------------------------ |
| NOV4h | ------------------------------------------------------------ |
| NOV4i | ------------------------------------------------------------ |
| NOV4k | ------------------------------------------------------------ |
| NOV4l | ------------------------------------------------------------ |
| NOV4m | ------------------------------------------------------------ |
| NOV4n | ------------------------------------------------------------ |
| NOV4o | ------------------------------------------------------------ |
| NOV4a | SQPECGVISCGNPGTPSNARVVFSDGLVFSSSIVYECREGYYATGLLSRHCSVNGTWTGS |
| NOV4b | ------------------------------------------------------------ |
| NOV4c | ------------------------------------------------------------ |
| NOV4d | ------------------------------------------------------------ |
| NOV4e | IIAGFVLYLYKHRRRPKVPFNGYAGHENTNVPATFENPMYDRNIQPTDIMASEAEFTVST |
| NOV4f | IIAGFVLYLYKHRRRPKVPFNGYAGHENTNVRATFENPMYDRNIQPTDIMASEAEFTVST |
| NOV4g | ------------------------------------------------------------ |
| NOV4h | ------------------------------------------------------------ |
| NOV4i | ------------------------------------------------------------ |
| NOV4j | ------------------------------------------------------------ |
| NOV4k | ------------------------------------------------------------ |
| NOV4l | ------------------------------------------------------------ |
| NOV4m | ------------------------------------------------------------ |
| NOV4n | ------------------------------------------------------------ |
| NOV4o | ------------------------------------------------------------ |
| NOV4a | DPECLVINCGDPGIPANGLRLGNDFRYNKTVTYQCVPGYMMESHRVSVLSCTKDRTWNGT |
| NOV4b | ------------------------------------------------------------ |
| NOV4c | ------------------------------------------------------------ |
| NOV4d | ------------------------------------------------------------ |
| NOV4e | VCTAV------------------------------------------------------- |
| NOV4f | VCTAV------------------------------------------------------- |
| NOV4g | ------------------------------------------------------------ |
| NOV4h | ------------------------------------------------------------ |
| NOV4i | ------------------------------------------------------------ |
| NOV4j | ------------------------------------------------------------ |
| NOV4k | ------------------------------------------------------------ |
| Nov4l | ------------------------------------------------------------ |
| NOV4m | ------------------------------------------------------------ |
| NOV4n | ------------------------------------------------------------ |
| NOV4o | ------------------------------------------------------------ |
| NOV4a | KPVCKALMCKPPPLIPNGKVVGSDFMWGSSVTYACLEGYQLSLPAVFTCEGNGSWTGELP |
| NOV4b | ------------------------------------------------------------ |
| NOV4c | ------------------------------------------------------------ |
| NOV4d | ------------------------------------------------------------ |
| NOV4e | ------------------------------------------------------------ |
| NOV4f | ------------------------------------------------------------ |
| NOV4g | ------------------------------------------------------------ |
| NOV4h | ------------------------------------------------------------ |
| NOV4i | ------------------------------------------------------------ |
| NOV4j | ------------------------------------------------------------ |
| NOV4k | ------------------------------------------------------------ |
| NOV4l | ------------------------------------------------------------ |
| NOV4m | ------------------------------------------------------------ |
| NOV4n | ------------------------------------------------------------ |
| NOV4o | ------------------------------------------------------------ |
| NOV4a | QCFPVFCGDPGVPSRGRREDRGFSYRSSVSFSCHPPLVLVGSPRRFCQSDGTWSGTQPSC |
| NOV4b | ------------------------------------------------------------ |
| NOV4c | ------------------------------------------------------------ |
| NOV4d | ------------------------------------------------------------ |
| NOV4e | ------------------------------------------------------------ |
| NOV4f | ------------------------------------------------------------ |
| NOV4g | ------------------------------------------------------------ |
| NOV4h | ------------------------------------------------------------ |
| NOV4i | ------------------------------------------------------------ |
| NOV4j | ------------------------------------------------------------ |
| NOV4k | ------------------------------------------------------------ |
| NOV4l | ------------------------------------------------------------ |
| NOV4m | ------------------------------------------------------------ |
| NOV4n | ------------------------------------------------------------ |
| NOV4o | ------------------------------------------------------------ |
| NOV4a | IDPTLTTCADPGVPQFGIQNNSQGYQVGSTVLFRCQKGYLLQGSTTRTCLPNLTWSGTPP |
| NOV4b | ------------------------------------------------------------ |
| NOV4c | ------------------------------------------------------------ |
| NOV4d | ------------------------------------------------------------ |
| NOV4e | ------------------------------------------------------------ |
| NOV4f | ------------------------------------------------------------ |
| NOV4g | ------------------------------------------------------------ |
| NOV4h | ------------------------------------------------------------ |
| NOV4i | ------------------------------------------------------------ |
| NOV4j | ------------------------------------------------------------ |
| NOV4k | ------------------------------------------------------------ |
| NOV4l | ------------------------------------------------------------ |
| NOV4m | ------------------------------------------------------------ |
| NOV4n | ------------------------------------------------------------ |
| NOV4o | ------------------------------------------------------------ |
| NOV4a | DCVPHHCRQPETPTHANVGALDLPSMGYTLIYSCQEGFSLKGGSEHRTCKADGSWTGKPP |
| NOV4b | ------------------------------------------------------------ |
| NOV4c | ------------------------------------------------------------ |
| NOV4d | ------------------------------------------------------------ |
| NOV4e | ------------------------------------------------------------ |
| NOV4f | ------------------------------------------------------------ |
| NOV4g | ------------------------------------------------------------ |
| NOV4h | ------------------------------------------------------------ |
| NOV4i | ------------------------------------------------------------ |
| NOV4j | ------------------------------------------------------------ |
| NOV4k | ------------------------------------------------------------ |
| Nov4l | ------------------------------------------------------------ |
| NOV4m | ------------------------------------------------------------ |
| NOV4n | ------------------------------------------------------------ |
| NOV4o | ------------------------------------------------------------ |
| NOV4a | ICLEVRPNGRPINTAREPPLTQALIPGDVFAKNSLWKGAYEYQGKKQPAMLRVTGFQVAN |
| NOV4b | ------------------------------------------------------------ |
| NOV4c | ------------------------------------------------------------ |
| NOV4d | ------------------------------------------------------------ |
| NOV4e | ------------------------------------------------------------ |
| NOV4f | ------------------------------------------------------------ |
| NOV4g | ------------------------------------------------------------ |
| NOV4h | ------------------------------------------------------------ |
| NOV4i | ------------------------------------------------------------ |
| NOV4j | ------------------------------------------------------------ |
| NOV4k | ------------------------------------------------------------ |
| Nov4l | ------------------------------------------------------------ |
| NOV4m | ------------------------------------------------------------ |
| NOV4n | ------------------------------------------------------------ |
| NOV4o | ------------------------------------------------------------ |
| NOV4a | SKVNATMIDHSGVELHLAGTYKKEDFHLLLQVYQITGPVEIFMNKFKDDHWALDGHVSSE |
| NOV4b | ------------------------------------------------------------ |
| NOV4c | ------------------------------------------------------------ |
| NOV4d | ------------------------------------------------------------ |
| NOV4e | ------------------------------------------------------------ |
| NOV4f | ------------------------------------------------------------ |
| NOV4g | ------------------------------------------------------------ |
| NOV4h | ------------------------------------------------------------ |
| NOV4i | ------------------------------------------------------------ |
| NOV4j | ------------------------------------------------------------ |
| NOV4k | ------------------------------------------------------------ |
| NOV4l | ------------------------------------------------------------ |
| NOV4m | ------------------------------------------------------------ |
| NOV4n | ------------------------------------------------------------ |
| NOV4o | ------------------------------------------------------------ |
| NOV4a | SSGATFIYQGSVKGQGFGQFGFQRLDLRLLESDPESIGRBFASNSSSVAAAILVPFIALI |
| NOV4b | ------------------------------------------------------------ |
| NOV4c | ------------------------------------------------------------ |
| NOV4d | ------------------------------------------------------------ |
| NOV4e | ------------------------------------------------------------ |
| NOV4f | ------------------------------------------------------------ |
| NOV4g | ------------------------------------------------------------ |
| NOV4h | ------------------------------------------------------------ |
| NOV4i | ------------------------------------------------------------ |
| NOV4j | ------------------------------------------------------------ |
| NOV4k | ------------------------------------------------------------ |
| NOV4l | ------------------------------------------------------------ |
| NOV4m | ------------------------------------------------------------ |
| NOV4n | ------------------------------------------------------------ |
| NOV4o | ------------------------------------------------------------ |
| NOV4a | IAGFVLYLYKHRRRPKVPFNGYAGHENTNVRATFENPMYDRNIQPTDIMASEAEFTVSTV |
| NOV4b | ------------------------------------------------------------ |
| NOV4c | ------------------------------------------------------------ |
| NOV4d | ------------------------------------------------------------ |
| NOV4e | ------------------------------------------------------------ |
| NOV4g | ------------------------------------------------------------ |
| NOV4h | ------------------------------------------------------------ |
| NOV4i | ------------------------------------------------------------ |
| NOV4j | ------------------------------------------------------------ |
| NOV4k | ------------------------------------------------------------ |
| NOV4l | ------------------------------------------------------------ |
| NOV4m | ------------------------------------------------------------ |
| NOV4n | ------------------------------------------------------------ |
| NOV4o | ------------------------------------------------------------ |
| NOV4a | CTAV |
| NOV4b | ---- |
| NOV4d | ---- |
| NOV4e | ---- |
| NOV4f | ---- |
| NOV4g | ---- |
| NOV4h | ---- |
| NOV4i | ---- |
| NOV4j | ---- |
| NOV4k | ---- |
| NOV4l | ---- |
| NOV4m | ---- |
| NOV4n | ---- |
| NOV4o | ---- |
| NOV4a | (SEQ ID NO: 32) |
| NOV4b | (SEQ ID NO: 34) |
| NOV4c | (SEQ ID NO: 36) |
| NOV4d | (SEQ ID NO: 38) |
| NOV4e | (SEQ ID NO: 40) |
| NOV4f | (SEQ ID NO: 42) |
| NOV4g | (SEQ ID NO: 44) |
| NOV4h | (SEQ ID NO: 46) |
| NOV4i | (SEQ ID NO: 48) |
| NOV4j | (SEQ ID NO: 50) |
| NOV4k | (SEQ ID NO: 52) |
| NOV4l | (SEQ ID NO: 54) |
| NOV4m | (SEQ ID NO: 56) |
| NOV4n | (SEQ ID NO: 58) |
| NOV4o | (SEQ ID NO: 60) |

[0370] Further analysis of the NOV4a protein yielded the following properties shown in Table 4C.

TABLE 4C
Protein Sequence Properties NOV4a

| | |
|---|---|
| SignalP analysis: | No Known Signal Sequence Predicted |
| PSORT II analysis: | |

| PSG: | a new signal peptide prediction method | |
|---|---|---|
| | N-region: | length 0; pos. chg 0; neg. chg 0 |
| | H-region: | length 15; peak value 1.77 |
| | PSG score: | −2.63 |

| | |
|---|---|
| GvH: | von Heijne's method for signal seq. recognition |
| | GvH score (threshold: −2.1): −8.90 |
| | possible cleavage site: between 50 and 51 |

>>> Seems to have no N-terminal signal peptide

| ALOM: | Klein et al's method for TM region allocation | | |
|---|---|---|---|
| | Init position for calculation: 1 | | |
| | Tentative number of TMS(s) for the threshold 0.5: 3 | | |
| | Number of TMS(s) for threshold 0.5: 1 | | |
| | INTEGRAL | Likelihood = | Transmembrane 3472-3488 |
| | | −11.52 | |

| | |
|---|---|
| PERIPHERAL | Likelihood = 0.79 (at 1806) |

| | |
|---|---|
| | ALOM score: −11.52 (number of TMSs: 1) |
| MTOP: | Prediction of membrane topology (Hartmann et al.) |
| | Center position for calculation: 3479 |
| | Charge difference: 7.0 C(5.5)-N(−1.5) |
| | C > N: C-terminal side will be inside |

>>> Single TMS is located near the C-terminus
>>> membrane topology: type Nt (cytoplasmic tail 1 to 3471)

| MITDISC: | discrimination of mitochondrial targeting seq | | | |
|---|---|---|---|---|
| | R content: | 0 | Hyd Moment(75): | 6.28 |
| | Hyd Moment(95): | 5.99 | G content: | 3 |
| | D/E content: | 1 | S/T content: | 2 |

| | |
|---|---|
| | Score: −5.81 |
| Gavel: | prediction of cleavage sites for mitochondrial preseq |
| | cleavage site motif not found |

NUCDISC: discrimination of nuclear localization signals

| | |
|---|---|
| | pat4: KHRR (3) at 3492 |
| | pat4: HRRR (3) at 3493 |
| | pat4: RRRP (4) at 3494 |
| | pat4: RRPK (4) at 3495 |
| | pat7: PERGKRL (4) at 327 |
| | pat7: PSRGRRE (4) at 3135 |
| | bipartite: none |
| | content of basic residues: 6.9% |
| | NLS Score: 1.09 |
| KDEL: | ER retention motif in the C-terminus: none |

ER Membrane Retention Signals: none
SKL: peroxisomal targeting signal in the C-terminus: none
PTS2: 2nd peroxisomal targeting signal: none
VAC: possible vacuolar targeting motif: found
ILPN at 2237
RNA-binding motif: none
Actinin-type actin-binding motif:

type 1: none
type 2: none

NMYR: N-myristoylation pattern: GQNCTF
Prenylation motif: none
memYQRL: transport motif from cell surface to Golgi: none
Tyrosines in the tail: too long tail
Dileucine motif in the tail: found

LL at 474
LL at 818
LL at 956
LL at 1087
LL at 1141
LL at 1228
LL at 1316
LL at 1664
LL at 1854
LL at 2027
LL at 2164
LL at 2207
LL at 2298
LL at 2361
LL at 2807
LL at 2829
LL at 2988
LL at 3222
LL at 3390
LL at 3391

checking 63 PROSITE DNA binding motifs: none
checking 71 PROSITE ribosomal protein motifs: none
checking 33 PROSITE prokaryotic DNA binding motifs: none

| | |
|---|---|
| NNCN: | Reinhardt's method for Cytoplasmic/Nuclear discrimination |
| | Prediction: cytoplasmic |
| | Reliability: 70.6 |
| COIL: | Lupas's algorithm to detect coiled-coil regions |
| | total: 0 residues |

Final Results (k = 9/23):

```
34.8%: nuclear
26.1%: cytoplasmic
  8.7%: Golgi
  8.7%: mitochondrial
  8.7%: endoplasmic reticulum
  4.3%: vacuolar
  4.3%: vesicles of secretory system
  4.3%: peroxisomal
```

>> prediction for CG50377-04 is nuc (k = 23)

[0371] A search of the NOV4a protein against the Geneseq database, a proprietary database that contains sequences published in patents and patent publication, yielded several homologous proteins shown in Table 4D.

TABLE 4D
Geneseq Results for NOV4a

| | | NOV4a | Identities/ | |
|---|---|---|---|---|
| | | Residues/ | Similarities for | |
| Geneseq | Protein/Organism/Length | Match | the Matched | Expect |
| Identifier | [Patent #, Date] | Residues | Region | Value |
| ABG79168 | Human cub and sushi domain | 283 . . . 3273 | 2943/3019 (97%) | 0.0 |
| | containing protein #1 - Homo sapiens, | 36 . . . 3052 | 2958/3019 (97%) | |
| | 3104 aa. [WO200264791-A2, 22-AUG- | | | |
| | 2002] | | | |
| ABG79169 | Human cub and sushi domain | 283 . . . 2829 | 2498/2634 (94%) | 0.0 |
| | containing protein #2 - Homo sapiens, | 36 . . . 2667 | 2512/2634 (94%) | |
| | 2669 aa. [WO200264791-A2, 22-AUG- | | | |
| | 2002] | | | |
| AAE20789 | Human C3b/C4b complement receptor | 437 . . . 3546 | 2010/3110 (64%) | 0.0 |
| | like protein #2 - Homo sapiens, 3100 | 1 . . . 3100 | 2479/3110 (79%) | |
| | aa. [WO200210199-A2, 07-FEB-2002] | | | |
| AAE20901 | Human C3b/C4b complement receptor | 437 . . . 3546 | 2009/3110 (64%) | 0.0 |
| | like protein #2, alternative version - | 1 . . . 3100 | 2478/3110 (79%) | |
| | Homo sapiens, 3100 aa. | | | |
| | [WO200210199-A2, 07-FEB-2002] | | | |
| AAE20788 | Rat C3b/C4b complement receptor like | 442 . . . 3546 | 1998/3105 (64%) | 0.0 |
| | protein - Rattus rattus, 3095 aa. | 1 . . . 3095 | 2474/3105 (79%) | |
| | [WO200210199-A2, 07-FEB-2002] | | | |

[0372] In a BLAST search of public sequence databases, the NOV4a protein was found to have homology to the proteins shown in the BLASTP data in Table 4E.

TABLE 4E
Public BLASTP Results for NOV4a

| | | NOV4a | Identities/ | |
|---|---|---|---|---|
| Protein | | Residues/ | Similarities for | |
| Accession | | Match | the Matched | Expect |
| Number | Protein/Organism/Length | Residues | Portion | Value |
| Q923L3 | CSMD1 - Mus musculus (Mouse), | 1 . . . 3546 | 2301/3546 (64%) | 0.0 |
| | 3564 aa. | 29 . . . 3564 | 2835/3546 (79%) | |
| AAK73475 | CUB and sushi multiple domains 1 | 1 . . . 3546 | 2298/3548 (64%) | 0.0 |
| | protein - Homo sapiens (Human), | 29 . . . 3566 | 2830/3548 (78%) | |
| | 3566 aa. | | | |
| CAD26764 | Sequence 6 from Patent | 437 . . . 3546 | 2010/3110 (64%) | 0.0 |
| | WO0210199 - Homo sapiens | 1 . . . 3100 | 2479/3110 (79%) | |
| | (Human), 3100 aa (fragment). | | | |
| CAD26836 | Sequence 3 from Patent | 442 . . . 3546 | 1998/3105 (64%) | 0.0 |
| | WO0210199 - Rattus rattus (Black | 1 . . . 3095 | 2474/3105 (79%) | |
| | rat), 3095 aa (fragment). | | | |
| CAD26763 | Sequence 1 from Patent | 469 . . . 3546 | 1987/3078 (64%) | 0.0 |
| | WO0210199 - Homo sapiens | 2 . . . 3069 | 2451/3078 (79%) | |
| | (Human), 3069 aa. | | | |

[0373] PFam analysis predicts that the NOV4a protein contains the domains shown in the Table 4F.

TABLE 4F
Domain Analysis of NOV4a

| | | Identities/ | |
|---|---|---|---|
| | | Similarities | |
| Pfam | NOV4a Match | for the | Expect |
| Domain | Region | Matched Region | Value |
| CUB | 4 . . . 109 | 39/116 (34%) | 2e−27 |
| | | 80/116 (69%) | |
| sushi | 117 . . . 174 | 22/65 (34%) | 4.7e−10 |
| | | 46/65 (71%) | |
| CUB | 180 . . . 281 | 45/116 (39%) | 5e−28 |
| | | 79/116 (68%) | |
| sushi | 321 . . . 378 | 24/65 (37%) | 3.7e−11 |
| | | 44/65 (68%) | |
| CUB | 383 . . . 491 | 43/118 (36%) | 1.7e−30 |
| | | 84/118 (71%) | |
| sushi | 499 . . . 552 | 19/63 (30%) | 4.9e−12 |
| | | 40/63 (63%) | |
| CUB | 554 . . . 661 | 43/116 (37%) | 2e−33 |
| | | 81/116 (70%) | |
| sushi | 669 . . . 726 | 16/65 (25%) | 5.7e−08 |
| | | 39/65 (60%) | |
| CUB | 730 . . . 835 | 46/116 (40%) | 1.2e−32 |
| | | 80/116 (69%) | |
| sushi | 845 . . . 898 | 17/63 (27%) | 1.8e−08 |
| | | 36/63 (57%) | |
| CUB | 902 . . . 1009 | 40/119 (34%) | 1.7e−19 |
| | | 79/119 (66%) | |
| sushi | 1017 . . . 1072 | 21/62 (34%) | 1.8e−10 |
| | | 44/62 (71%) | |
| CUB | 1076 . . . 1181 | 34/117 (29%) | 1.6e−24 |
| | | 81/117 (69%) | |
| sushi | 1189 . . . 1245 | 17/65 (26%) | 5.1e−10 |
| | | 45/65 (69%) | |
| CUB | 1249 . . . 1355 | 42/116 (36%) | 1.1e−21 |
| | | 73/116 (63%) | |
| sushi | 1363 . . . 1419 | 20/64 (31%) | 2.1e−06 |
| | | 40/64 (62%) | |
| CUB | 1423 . . . 1529 | 54/117 (46%) | 4.2e−39 |
| | | 89/117 (76%) | |
| sushi | 1537 . . . 1594 | 21/65 (32%) | 1.2e−09 |
| | | 42/65 (65%) | |
| CUB | 1598 . . . 1704 | 40/117 (34%) | 7.9e−15 |
| | | 70/117 (60%) | |
| sushi | 1715 . . . 1772 | 18/65 (28%) | 4.5e−06 |
| | | 40/65 (62%) | |
| CUB | 1776 . . . 1881 | 42/116 (36%) | 4e−31 |
| | | 82/116 (71%) | |
| sushi | 1889 . . . 1944 | 19/64 (30%) | 1.8e−10 |
| | | 43/64 (67%) | |
| CUB | 1948 . . . 2053 | 45/116 (39%) | 1.5e−29 |
| | | 77/116 (66%) | |
| sushi | 2061 . . . 2116 | 23/64 (36%) | 7.8e−13 |
| | | 47/64 (73%) | |
| CUB | 2120 . . . 2224 | 35/116 (30%) | 6.4e−24 |
| | | 75/116 (65%) | |
| sushi | 2232 . . . 2289 | 19/65 (29%) | 1.4e−09 |
| | | 46/65 (71%) | |
| CUB | 2293 . . . 2401 | 41/117 (35%) | 5.1e−20 |
| | | 79/117 (68%) | |
| sushi | 2406 . . . 2464 | 20/65 (31%) | 4.1e−08 |
| | | 39/65 (60%) | |
| sushi | 2469 . . . 2526 | 19/65 (29%) | 6.5e−09 |
| | | 43/65 (66%) | |
| sushi | 2531 . . . 2591 | 17/67 (25%) | 5.5e−09 |
| | | 43/67 (64%) | |
| sushi | 2596 . . . 2649 | 20/63 (32%) | 5.1e−13 |
| | | 41/63 (65%) | |
| sushi | 2654 . . . 2707 | 22/63 (35%) | 2.2e−13 |
| | | 40/63 (63%) | |
| sushi | 2712 . . . 2765 | 18/63 (29%) | 1.5e−13 |
| | | 41/63 (65%) | |
| sushi | 2770 . . . 2828 | 20/67 (30%) | 3.2e−14 |
| | | 47/67 (70%) | |
| sushi | 2833 . . . 2886 | 19/63 (30%) | 1.4e−09 |
| | | 39/63 (62%) | |
| sushi | 2894 . . . 2947 | 17/63 (27%) | 2.1e−13 |
| | | 40/63 (63%) | |
| sushi | 2952 . . . 3006 | 18/63 (29%) | 5.7e−08 |
| | | 40/63 (63%) | |
| sushi | 3011 . . . 3066 | 19/65 (29%) | 6.8e−09 |
| | | 42/65 (65%) | |
| sushi | 3071 . . . 3124 | 24/63 (38%) | 4.9e−14 |
| | | 46/63 (73%) | |
| sushi | 3129 . . . 3182 | 18/63 (29%) | 3.1e−11 |
| | | 42/63 (67%) | |
| sushi | 3190 . . . 3244 | 20/63 (32%) | 3.4e−09 |
| | | 45/63 (71%) | |
| sushi | 3249 . . . 3304 | 18/64 (28%) | 6.1e−10 |
| | | 39/64 (61%) | |

### Example 5

[0374] The NOV5 clone was analyzed, and the nucleotide and encoded polypeptide sequences are shown in Table 5A.

TABLE 5A
NOV5 Sequence Analysis

| | | |
|---|---|---|
| NOV5a, CG50389-04 | SEQ ID NO: 65 | 1897 bp |
| DNA Sequence | ORF Start: ATG at 51 | ORF Stop: TAA at 1785 |

GAATTCCGCCCGCCCACGGCGGCGGGGAAATACCTAGGCATGGAAGTGGCATGACAGGGCTCGTGTCC
CTGTCATATTTTCCACTCTCCACGAGGTCCTGCGCGCTTCAATCCTGCAGGCAGCCCGGTTTGGGGAT
GTGGTCCTTGCTGCTCTGCGGGTTGTCCATCGCCCTTCCACTGTCTGTCACAGCAGATGGATGCAAGG
ACATTTTTATGAAAAATGAGATACTTTCAGCAAGCCAGCCTTTTGCTTTTAATTGTACATTCCCTCCC
ATAACATCTGGGGAAGTCAGTGTAACATGGTATAAAAATTCTAGCAAAATCCCAGTGTCCAAAATCAT
ACAGTCTAGAATTCACCAGGACGAGACTTGGATTTTGTTTCTCCCCATGGAATGGGGGGACTCAGGAG
TCTACCAATGTGTTATAAAGGGTAGAGACAGCTGTCATAGAATACATGTAAACCTAACTGTTTTTGAA
AAACATTGGTGTGACACTTCCATAGGTGGTTTACCAAATTTATCAGATGAGTACAAGCAAATATTACA
TCTTGGAAAAGATGATAGTCTCACATGTCATCTGCACTTCCCGAAGAGTTGTGTTTTGGGTCCAATAA
AGTGGTATAAAGACTGTAACGAGATTAAAGGGGAGCGGTTCACTGTTTTGGAAACCAGGCTTTTGGTG
AGCAATGTCTCGGCAGAGGACAGAGGGAACTACGCGTGTCAAGCCATACTGACACACTCAGGGAAGCA
GTACGAGGTTTTAAATGGCATCACTGTGAGCATTAGTACCACTCTGATTGTGGACTGCAATGTAACAG
ACACCAAGGATAATACAAATCTACGATGCTGGAGAGTCAATAACACTTTGGTGGATGATTACTATGAT
GAATCCAAACGAATCAGAGAAGGGGTGGAAACCCATGTCTCTTTTCGGGAACATAATTTGTACACAGT
AAACATCACCTTCTTGGAAGTGAAAATGGAAGATTATGGCCTTCCTTTCATGTGCCACGCTGGAGTGT
CAACAGCATACATTATATTACAGCTCCCAGCTCCGGATTTTCGAGCTTACTTGATAGGAGGGCTTATC
GCCTTGGTGGCTGTGGCTGTGTCTGTTGTGTACATATACAACATTTTTAAGATCGACATTGTTCTTTG
GTATCGAAGTGCCTTCCATTCTACAGAGACCATAGTAGATGGGAAGCTGTATGACGCCTATGTCTTAT
ACCCCAAGCCCCACAAGGAAAGCCAGAGGCATGCCGTGGATGCCCTGGTGTTGAATATCCTGCCCGAG
GTGTTGGAGAGACAATGTGGATATAAGTTGTTTATATTCGGCAGAGATGAATTCCCTGGACAAGCCGT
GGCCAATGTCATCGATGAAAACGTTAAGCTGTGCAGGAGGCTGATTGTCATTGTGGTCCCCGAATCGC
TGGGCTTTGGCCTGTTGAAGAACCTGTCAGAAGAACAAATCGCGGTCTACAGTGCCCTGATCCAGGAC
GGGATGAAGGTTATTCTCGTTGAGCTGGAGAAAATCGAGGACTACACAGTCATGCCAGAGTCAATTCA
GTACATCAAACAGAAGCATGGTGCCATCCGGTGGCATGGGGACTTCACGGAGCAGTCACAGTGTATGA
AGACCAAGTTTTGGAAGACAGTGAGATACCACATGCCACCCAGAAGGTGTCGGCCGTTTCCTCCGGTC
CAGCTGCTGCAGCACACACCTTGCTGCCGCACCGCAGGCCCAGAACTAGGCTCAAGAAGAAAGAAGTG
TACTCTCACGACTGGCTAAGACTTGCTGGACTGACACCTATGGCTGGAAGATGACTTGTTTTGCTCCA
TGTCTCCTCATTCCTACACCTATTTTCTGCTGCAGGATGAGGCTAGGGTTAGCATTCTAGA

| | | | |
|---|---|---|---|
| NOV5a, CG50389-04 | SEQ ID NO: 66 | 578 aa | MW at 65576.2kD |
| Protein Sequence | | | |

MTGLVSLSYFPLSTRSCALQSCRQPGLGMWSLLLCGLSIALPLSVTADGCKDIFMKNEILSASQPFAF
NCTFPPITSGEVSVTWYKNSSKIPVSKIIQSRIHQDETWILFLPMEWGDSGVYQCVIKGRDSCHRIHV
NLTVFEKHWCDTSIGGLPNLSDEYKQILHLGKDDSLTCHLHFPKSCVLGPIKWYKDCNEIKGERFTVL
ETRLLVSNVSAEDRGNYACQAILTHSGKQYEVLNGITVSISTTLIVDCNVTDTKDNTNLRCWRVNNTL
VDDYYDESKRIREGVETHVSFREHNLYTVNITFLEVKMEDYGLPFMCHAGVSTAYIILQLPAPDFRAY
LIGGLIALVAVAVSVVYIYNIFKIDIVLWYRSAFHSTETIVDGKLYDAYVLYPKPHKESQRHAVDALV
LNILPEVLERQCGYKLFIFGRDEFPGQAVANVIDENVKLCRRLIVIVVPESLGFGLLKNLSEEQIAVY
SALIQDGMKVILVELEKIEDYTVMPESIQYIKQKHGAIRWHGDFTEQSQCMKTKFWKTVRYHMPPRRC
RPFPPVQLLQHTPCCRTAGPELGSRRKKCTLTTG

| | | |
|---|---|---|
| NOV5b, CG50389-06 | SEQ ID NO: 67 | 1802 bp |
| DNA Sequence | ORF Start: ATG at 471 | ORF Stop: TAA at 1743 |

GGGATGTGGTCCTTGCTGCTCTGCGGGTTGTCCATCGCCCTTCCACTGTCTGTCACAGCAGGTACGTT
CCGTGTGTCCTCCGTTCCCAGAGGCTGCCCGAGTCCACAGGCTCCTGGCCTGTCATTGGGAGCCCCCG
GGGATCGCGTCAGCCCGAGCGCGGCTCCTTCCCCTCCCCAGACCGCCAGGCGGAGTTCCGCGGAAGAG
GAAACAGAGAACCACCAGCTCCACGTGCTCGGATGCTCAGCCCTGAATGTCGCCTTTGAGCTTGGAGA
TGGATGCAAGGACATTTTTATGAAAAATGAGATACTTTCAGCAAGCCAGCCTTTTGCTTTTAATTGTA
CATTCCCTCCCATAACATCTGGGGAAGTCAGTGTAACATGGTATAAAAATTCTAGCAAAATCCCAGTG
TCCAAAATCATACAGTCTAGAATTCACCAGGACGAGACTTGGATTTTGTTTCTCCCCATGGAATGGGG
GGACTCAGGAGTCTACCAATGTGTTATAAAGACTGTAACGAGATTAAAGGGGAGCGGTTCACTGTTTT
GGAAACCAGGCTTTTGGTGAGCAATGTCTCGGCAGAGGACAGAGGGAACTACGCGTGTCAAGCCATAC
TGACACACTCAGGGAAGCAGTACGAGGTTTTAAATGGCATCACTGTGAGCATTACAGAAAGAGCTGGA
TATGGAGGAAGTGTCCCTAAAATCATTTATCCAAAAAATCATTCAATTGAAGTACAGCTTGGTACCAC
TCTGATTGTGGACTGCAATGTAACAGACACCAAGGATAATACAAATCTACGATGCTGGAGAGTCAATA
ACACTTTGGTGGATGATTACTATGATGAATCCAAACGAATCAGAGAAGGGGTGGAAACCCATGCCTCT
TTTCGGGAACATAATTTGTACACAGTAAACATCACCTTCTTGGAAGTGAAAATGGAAGATTATGGCCT
TCCTTTCGTGTGCCACGCTGGAGTGTCCACAGCATACATTATATTACAGCTCCCAGCTCCGGATTTTC
GAGCTTACTTGATAGGAGGGCTTATCGCCTTGGTGGCTGTGGCTGTGTCTGTTGTGTACATATACAAC
ATTTTTAAGATCGACATTGTTCTTTGGTACCGAAGTGCCTTCCATTCTACAGAGACCATAGTAGATGG
GAAGCTGTATGACGCCTATGTCTTATACCCCAAGCCCCACAAGGAAAGCCAGAGGCATGCCGTGGATG
CCCTGGTGTTGAATATCCTGCCCGAGGTGTTGGAGAGACAATGTGGATATAAGTTGTTTATATTCGGC
AGAGATGAATTCCTTGGACAAGCCGTGGCCAATGTCATCGATGAAAACGTTAAGCTGTGCAGGAGGCT
GATTGTCATTGTGGTCCCCGAATCGCTGGGCTTTGGCCTGTTGAAGAACCTGTCAGAAGAACAAATCG
CGGTCTACAGTGCCCTGATCCAGGACGGGATGAAGGTTATTCTCATTGAGCTGGAGAAAATCGAGGAC
TACACAGTCATGCCAGAGTCAATTCAGTACATCAAACAGAAGCATGGTGCCATCCGGTGGCATGGGGA
CTTCACGGAGCAGTCACAGTGTATGAAGACCAAGTTTTGGAAGACAGTGAGATACCACATGCCGCCCA
GAAGGTGTCGGCCGTTTCCTCCGGTCCAGCTGCCGCAGCACACACCTTGCTACCGCACCGCAGGCCCA
GAACTAGGCTCAAGAAGAAAGAAGTGTACTCTCACGACTGGCTAAGACTTGCTGGACTGACACCTATG
GCTGGAAGATGACTTGTTTTGCTCCATGTCTCCT

| | | | |
|---|---|---|---|
| NOV5b, CG50389-06 | SEQ ID NO: 68 | 424 aa | MW at 48256.3kD |
| Protein Sequence | | | |

MGGLRSLPMCYKDCNEIKGERFTVLETRLLVSNVSAEDRGNYACQAILTHSGKQYEVLNGITVSITER
AGYGGSVPKIIYPKNHSIEVQLGTTLIVDCNVTDTKDNTNLRCWRVNNTLVDDYYDESKRIREGVETH
ASFREHNLYTVNITFLEVKMEDYGLPFVCHAGVSTAYIILQLPAPDFRAYLIGGLIALVAVAVSVVYI
YNIFKIDIVLWYRSAFHSTETIVDGKLYDAYVLYPKPHKESQRHAVDALVLNILPEVLERQCGYKLFI
FGRDEFLGQAVANVIDENVKLCRPLIVIVVPESLGFGLLKNLSEEQIAVYSALIQDGMKVILIELEKI
EDYTVMPESIQYIKQKHGAIRWHGDFTEQSQCMKTKFWKTVRYHMPPRRCRPFPPVQLPQHTPCYRTA
GPELGSRRKKCTLTTG

| | | |
|---|---|---|
| NOV5c, 257448648 | SEQ ID NO: 69 | 891 bp |
| DNA Sequence | ORF Start: at 1 | ORF Stop: end of sequence |

GGATCCGATGGATGCAAGGACATTTTTATGAAAAATGAGATACTTTCAGCAAGCCAGCCTTTTGCTTT
TAATTGTACATTCCCTCCCATAACATCTGGGGAAGTCAGTGTAACATGGTATAAAAATTCTAGCAAAA
TCCCAGTGTCCAAAATCATACAGTCTAGAATTCACCAGGACGAGACTTGGATTTTGTTTCTCCCCATG
GAATGGGGGGACTCAGGAGTCTACCAATGTGTTATAAAGGGTAGAGACAGCTGTCATAGAATACATGT
AAACCTAACTGTTTTTGAAAAACATTGGTGTGACACTTCCATAGGTGGTTTACCAAATTTATCAGATG
AGTACAAGCAAATATTACATCTTGGAAAAGATGATAGTCTCACATGTCATCTGCACTTCCCGAAGAGT
TGTGTTTTGGGTCCAATAAAGTGGTATAAGGACTGTAACGAGATTAAAGGGGAGCGGTTCACTGTTTT
GGAAACCAGGCTTTTGGTGAGCAATGTCTCGGCAGAGGACAGAGGGAACTACGCGTGTCAAGCCATAC
TGACACACTCAGGGAAGCAGTACGAGGTTTTAAATGGCATCACTGTGAGCATTAGTACCACTCTGATT
GTGGACTGCAATGTAACAGACACCAAGGATAATACAAATCTACGATGCTGGAGAGTCAATAACACTTT
GGTGGATGATTACTATGATGAATCCAAACGAATCAGAGAAGGGGTGGAAACCCATGTCTCTTTTCGGG
AACATAATTTGTACACAGTAAACATCACCTTCTTGGAAGTGAAAATGGAAGATTATGGCCTTCCTTTC
ATGTGCCACGCTGGAGTGTCCACAGCATACATTATATTACAGCTCCCAGCTCCGGATTTTCGAGCTTA
CCTCGAG

| | | | |
|---|---|---|---|
| NOV5c, 257448648 | SEQ ID NO: 70 | 297 aa | MW at 33848.1kD |
| Protein Sequence | | | |

GSDGCKDIFMKNEILSASQPFAFNCTFPPITSGEVSVTWYKNSSKIPVSKIIQSRIHQDETWILFLPM
EWGDSGVYQCVIKGRDSCHRIHVNLTVFEKHWCDTSIGGLPNLSDEYKQILHLGKDDSLTCHLHFPKS
CVLGPIKWYKDCNEIKGERFTVLETRLLVSNVSAEDRGNYACQAILTHSGKQYEVLNGITVSISTTLI
VDCNVTDTKDNTNLRCWRVNNTLVDDYYDESKRIREGVETHVSFREHNLYTVNITFLEVKMEDYGLPF
MCHAGVSTAYIILQLPAPDFRAYLE

| | | |
|---|---|---|
| NOV5d, CG50389-01 | SEQ ID NO: 71 | 1769 bp |
| DNA Sequence | ORF Start: ATG at 45 | ORF Stop: TGA at 477 |

CGCCCGCCCACGGCGGCGGGGAAATACCTAGGCATGGAAGTGGCATGACAGGGCTCGTGTCCCTGTCA
TATTTTCCACTCTCCACGAGGTCCTGCGCGCTTCAATCCTGCAGGCAGCCCGGTTTGGGGATGTGGTC
CTTGCTGCTCTGCGGGTTGTCCATCGCCCTTCCACTGTCTGTCACAGCAGATGGATGCAAGGACATTT
TTATGAAAAATGAGATACTTTCAGCAAGCCAGCCTTTTGCTTTTAATTGTACATTCCCTCCCATAACA
TCTGGGGAAGTCAGTGTAACATGGTATAAAAATTCTAGCAAAATCCCAGTGTCCAAAATCATACAGTC
TAGAATTCACCAGGACGAGACTTGGATTTTGTTTCTCCCCATGGAATGGGGGGACTCAGGAGTCTACC
AATGTGTTATAAAGACTGTAACGAGATTAAAGGGGAGCGGTTCACTGTTTTGGAAACCAGGCTTTTGG
TGAGCAATGTCTCGGCAGAGGACAGAGGGAACTACGCGTGTCAAGCCATACTGACACACTCAGGGAAC
CAGTACGAGGTTTTAAATGGCATCACTGTGAGCATTACAGAAAGAGCTGGATATGGAGGAAGTGTCCC
TAAAATCATTTATCCAAAAAATCATTCAATTGAAGTACAGCTTGGTACCACTCTGATTGTGGACTGCA
ATGTAACAGACACCAAGGATAATACAAATCTACGATGCTGGAGAGTCAATAACACTTTGGTGGATGAT
TACTATGATGAATCCAAACGAATCAGAGAAGGGGTGGAAACCCATGTCTCTTTTCGGGAACATAATTT
GTACACAGTAAACATCACCTTCTTGGAAGTGAAAATGGAAGATTATGGCCTTCCTTTCATGTGCCACG
CTGGAGTGTCCACAGCATACATTATATTACAGCTCCCAGCTCCGGATTTTCGAGCTTACTTGATAGGA
GGGCTTATCGCCTTGGTGGCTGTGGCTGTGTCTGTTGTGTACATATACAACATTTTTAAGATCGACAT
TGTTCTTTGGTATCGAAGTGCCTTCCATTCTACAGAGACCATAGTAGATGGGAAGCTGTATGACGCCT
ATGTCTTATACCCCAAGCCCCACAAGGAAAGCCAGAGGCATGCCGTGGATGCCCTGGTGTTGAATATC
CTGCCCGAGGTGTTGGAGAGACAATGTGGATATAAGTTGTTTATATTCGGCAGAGATGAATTCCCTGC
ACAAGCCGTGGCCAATGTCATCGATGAAAACGTTAAGCTGTGCAGGAGGCTGATTGTCATTGTGGTCC
CCGAATCGCTGGGCTTTGGCCTGTTGAAGAACCTGTCAGAAGAACAAATCGCGGTCTACAGTGCCCTG
ATCCAGGACGGGATGAAGGTTATTCTCATTGAGCTGGAGAAAATCGAGGACTACACAGTCATGCCAGA
GTCAATTCAGTACATCAAACAGAAGCATGGTGCCATCCGGTGGCATGGGGACTTCACGGAGCAGTCAC
AGTGTATGAAGACCAAGTTTTGGAAGACAGTGAGATACCACATGCCGCCCAGAAGGTGTCGGCCGTTT
CTCCGGTCCACGTGCCGCAGCACACACCTCTGTACCGCACCGCAGGCCCAGAACTAGGCTCAAGAAGA
AAGAAGTGTACTCTCACGACTGGCTAAGACTTGCTGGACTGACACCTATGGCTGGAAGATGACTTGTT
TTGCTCCATGTCTCCTCATTCCTACACCTATTTTCTGCTGCAGGATGAGGCTAGGGTTAGCATTCTAC
A

| | | | |
|---|---|---|---|
| NOV5d, CG50389-01 | SEQ ID NO: 72 | 144 aa | MW at 15977.5kD |
| Protein Sequence | | | |

MTGLVSLSYFPLSTRSCALQSCRQPGLGMWSLLLCGLSIALPLSVTADGCKDIFMKNEILSASQPFAF
NCTFPPITSGEVSVTWYKNSSKIPVSKIIQSRIHQDETWILFLPMEWGDSGVYQCVIKTVTRLKGSGS
LFWKPGFW

| | | |
|---|---|---|
| NOV5e, CG50389-02 | SEQ ID NO: 73 | 1769 bp |
| DNA Sequence | ORF Start: ATG at 386 | ORF Stop: TAG at 1619 |

CGCCCGCCCACGGCGGCGGGGAAATACCTAGGCATGGAAGTGGCATGACAGGGCTCGTGTCCCTGTCA
TATTTTCCACTCTCCACGAGGTCCTGCGCGCTTCAATCCTGCAGGCAGCCCGGTTTGGGGATGTGGTC
CTTGCTGCTCTGCGGGTTGTCCATCGCCCTTCCACTGTCTGTCACAGCAGATGGATGCAAGGACATTT
TTATGAAAAATGAGATACTTTCAGCAAGCCAGCCTTTTGCTTTTAATTGTACATTCCCTCCCATAACA
TCTGGGGAAGTCAGTGTAACATGGTATAAAAATTCTAGCAAAATCCCAGTGTCCAAAATCATACAGTC
TAGAATTCACCAGGACGAGACTTGGATTTTGTTTCTCCCCATGGAATGGGGGGACTCAGGAGTCTACC
AATGTGTTATAAAGACTGTAACGAGATTAAAGGGGAGCGGTTCACTGTTTTGGAAACCAGGCTTTTGG
TGAGCAATGTCTCGGCAGAGGACAGAGGGAACTACGCGTGTCAAGCCATACTGACACACTCAGGGAAG
CAGTACGAGGTTTTAAATGGCATCACTGTGAGCATTACAGAAAGAGCTGGATATGGAGGAAGTGTCCC
TAAAATCATTTATCCAAAAAATCATTCAATTGAAGTACAGCTTGGTACCACTCTGATTGTGGACTGCA
ATGTAACAGACACCAAGGATAATACAAATCTACGATGCTGGAGAGTCAATAACACTTTGGTGGATGAT
TACTATGATGAATCCAAACGAATCAGAGAAGGGGTGGAAACCCATGTCTCTTTTCGGGAACATAATTT
GTACACAGTAAACATCACCTTCTTGGAAGTGAAAATGGAAGATTATGGCCTTCCTTTCATGTGCCACG
CTGGAGTGTCCACAGCATACATTATATTACAGCTCCCAGCTCCGGATTTTCGAGCTTACTTGATAGGA
GGGCTTATCGCCTTGGTGGCTGTGGCTGTGTCTGTTGTGTACATATACAACATTTTTAAGATCGACAT
TGTTCTTTGGTATCGAAGTGCCTTCCATTCTACAGAGACCATAGTAGATGGGAAGCTGTATGACGCCT
ATGTCTTATACCCCAAGCCCCACAAGGAAAGCCAGAGGCATGCCGTGGATGCCCTGGTGTTGAATATC
CTGCCCGAGGTGTTGGAGAGACAATGTGGATATAAGTTGTTTATATTCGGCAGAGATGAATTCCCTGG
ACAAGCCGTGGCCAATGTCATCGATGAAAACGTTAAGCTGTGCAGGAGGCTGATTGTCATTGTGGTCC
CCGAATCGCTGGGCTTTGGCCTGTTGAAGAACCTGTCAGAAGAACAAATCGCGGTCTACAGTGCCCTG
ATCCAGGACGGGATGAAGGTTATTCTCATTGAGCTGGAGAAAATCGAGGACTACACAGTCATGCCAGA
GTCAATTCAGTACATCAAACAGAAGCATGGTGCCATCCGGTGGCATGGGGACTTCACGGAGCAGTCAC
AGTGTATGAAGACCAAGTTTTGGAAGACAGTGAGATACCACATGCCGCCCAGAAGGTGTCGGCCGTTT
CTCCGGTCCACGTGCCGCAGCACACACCTCTGTACCGCACCGCAGGCCCAGAACTAGGCTCAAGAAGA
AAGAAGTGTACTCTCACGACTGGCTAAGACTTGCTGGACTGACACCTATGGCTGGAAGATGACTTGTT
TTGCTCCATGTCTCCTCATTCCTACACCTATTTTCTGCTGCAGGATGAGGCTAGGGTTAGCATTCTAG
A

| | | | |
|---|---|---|---|
| NOV5e, CG50389-02 | SEQ ID NO: 74 | 411 aa | MW at 46893.7kD |
| Protein Sequence | | | |

MGGLRSLPMCYKDCNEIKGERFTVLETRLLVSNVSAEDRGNYACQAILTHSGKQYEVLNGITVSITER
AGYGGSVPKIIYPKNHSIEVQLGTTLIVDCNVTDTKDNTNLRCWRVNNTLVDDYYDESKRIREGVETH
VSFREHNLYTVNITFLEVKMEDYGLPFMCHAGVSTAYIILQLPAPDFRAYLIGGLIALVAVAVSVVYI
YNIFKIDIVLWYRSAFHSTETIVDGKLYDAYVLYPKPHKESQRHAVDALVLNILPEVLERQCGYKLFI
FGRDEFPGQAVANVIDENVKLCRRLIVIVVPESLGFGLLKNLSEEQIAVYSALIQDGMKVILIELEKI
EDYTVMPESIQYIKQKHGAIRWHGDFTEQSQCMKTKFWKTVRYHMPPRRCRPFLRSTCRSTHLCTAPQ
AQN

| | | | |
|---|---|---|---|
| NOV5f, CG50389-03 | SEQ ID NO: 75 | 1827 bp | |
| DNA Sequence | ORF Start: ATG at 65 | ORF Stop: TAA at 1715 | J |

GTCATATTTTCCACTCTCCACGAGGTCCTGCGCGCTTCAATCCTGCAGGCAGCCCGGTTTGGGGATGT
GGTCCTTGCTGCTCTGCGGGTTGTCCATCGCCCTTCCACTGTCTGTCACAGCAGATGGATGCAAGGAC
ATTTTTATGAAAAATGAGATACTTTCAGCAAGCCAGCCTTTTGCTTTTAATTGTACATTCCCTCCCAT
AACATCTGGGGAAGTCAGTGTAACATGGTATAAAAATTCTAGCAAAATCCCAGTGTCCAAAATCATAC
AGTCTAGAATTCACCAGGACGAGACTTGGATTTTGTTTCTCCCCATGGAATGGGGGGACTCAGGAGTC
TACCAATGTGTTATAAAGGGTAGAGACAGCTGTCATAGAATACATGTAAACCTAACTGTTTTTGAAAA
ACATTGGTGTGACACTTCCATAGGTGGTTTACCAAATTTATCAGATGAGTACAAGCAAATATTACATC
TTGGAAAAGATGATAGTCTCACATGTCATCTGCACTTCCCGAAGAGTTGTGTTTTGGGTCCAATAAAG
TGGTATAAAGACTGTAACGAGATTAAAGGGGAGCGGTTCACTGTTTTGGAAACCAGGCTTTTGGTGAG
CAATGTCTCGGCAGAGGACAGAGGGAACTACGCGTGTCAAGCCATACTGACACACTCAGGGAAGCAGT
ACGAGGTTTTAAATGGCATCACTGTGAGCATTAGTACCACTCTGATTGTGGACTGCAATGTAACAGAC
ACCAAGGATAATACAAATCTACGATGCTGGAGAGTCAATAACACTTTGGTGGATGATTACTATGATGA
ATCCAAACGAATCAGAGAAGGGGTGGAAACCCATGTCTCTTTTCGGGAACATAATTTGTACACAGTAA
ACATCACCTTCTTGGAAGTGAAAATGGAAGATTATGGCCTTCCTTTCATGTGCCACGCTGGAGTGTCA
ACAGCATACATTATATTACAGCTCCCAGCTCCGGATTTTCGAGCTTACTTGATAGGAGGGCTTATCGC
CTTGGTGGCTGTGGCTGTGTCTGTTGTGTACATATACAACATTTTTAAGATCGACATTGTTCTTTGGT
ATCGAAGTGCCTTCCATTCTACAGAGACCATAGTAGATGGGAAGCTGTATGACGCCTATGTCTTATAC
CCCAAGCCCCACAAGGAAAGCCAGAGGCATGCCGTGGATGCCCTGGTGTTGAATATCCTGCCCGAGGT
GTTGGAGAGACAATGTGGATATAAGTTGTTTATATTCGGCAGAGATGAATTCCCTGGACAAGCCGTGG
CCAATGTCATCGATGAAAACGTTAAGCTGTGCAGGAGGCTGATTGTCATTGTGGTCCCCGAATCGCTG
GGCTTTGGCCTGTTGAAGAACCTGTCAGAAGAACAAATCGCGGTCTACAGTGCCCTGATCCAGGACGG
GATGAAGGTTATTCTCGTTGAGCTGGAGAAAATCGAGGACTACACAGTCATGCCAGAGTCAATTCAGT
ACATCAAACAGAAGCATGGTGCCATCCGGTGGCATGGGGACTTCACGGAGCAGTCACAGTGTATGAAG
ACCAAGTTTTGGAAGACAGTGAGATACCACATGCCACCCAGAAGGTGTCGGCCGTTTCCTCCGGTCCA
GCTGCTGCAGCACACACCTTGCTGCCGCACCGCAGGCCCAGAACTAGGCTCAAGAAGAAAGAAGTGTA
CTCTCACGACTGGCTAAGACTTGCTGGACTGACACCTATGGCTGGAAGATGACTTGTTTTGCTCCATG
TCTCCTCATTCCTACACCTATTTTCTGCTGCAGGATGAGGCTAGGGTTAGCATTCTAGA

| | | | |
|---|---|---|---|
| NOV5f, CG50389-03 | SEQ ID NO: 76 | 550 aa | MW at 62620.8kD |
| Protein Sequence | | | |

MWSLLLCGLSIALPLSVTADGCKDIFMKNEILSASQPFAFNCTFPPITSGEVSVTWYKNSSKIPVSKI
IQSRIHQDETWILFLPMEWGDSGVYQCVIKGRDSCHRIHVNLTVFEKHWCDTSIGGLPNLSDEYKQIL
HLGKDDSLTCHLHFPKSCVLGPIKWYKDCNEIKGERFTVLETRLLVSNVSAEDRGNYACQAILTHSGK
QYEVLNGITVSISTTLIVDCNVTDTKDNTNLRCWRVNNTLVDDYYDESKRIREGVETHVSFREHNLYT
VNITFLEVKMEDYGLPFMCHAGVSTAYIILQLPAPDFRAYLIGGLIALVAVAVSVVYIYNIFKIDIVL
WYRSAFHSTETIVDGKLYDAYVLYPKPHKESQRHAVDALVLNILPEVLERQCGYKLFIFGRDEFPGQA
VANVIDENVKLCRRLIVIVVPESLGFGLLKNLSEEQIAVYSALIQDGMKVILVELEKIEDYTVMPESI
QYIKQKHGAIRWHGDFTEQSQCMKTKFWKTVRYHMPPRRCRPFPPVQLLQHTPCCRTAGPELGSRRKK
CTLTTG

| | | |
|---|---|---|
| NOV5g, CG50389-05 | SEQ ID NO: 77 | 1829 bp |
| DNA Sequence | ORF Start: ATG at 42 | ORF Stop: TAA at 1767 |

GGTCCTGCGCGCTTCAATCCTGCAGGCAGCCCGGTTTGGGGATGTGGTCCTTGCAGCTCTGCGGGTTG
TCCATCGCCCTTCCACTGTCTGTCACAGCAGATGGATGCAAGGACATTTTTATGAAAAATGAGATACT
TTCAGCAAGCCAGCCTTTTGCTTTTAATTGTACATTCCCTCCCATAACATCTGGGGAGGTCAGTGTAA
CATGGTATAAAAATTCTAGCAAAATCCCAGTGTCCAAAATCATACAGTCTAGAATTCACCAGGACGAG
ACTTGGATTTTGTTTCTCCCCATGGAATGGGGGGACTCAGGAGTCTACCAATGTGTTATAAAGGGTAG
AGACAGCTGTCATAGAATACATGTAAACCTAACTGTTTTTGAAAAACATTGGTGTGACACTTCCATAG
GTGGTTTACCAAATTTATCAGATGAGTACAAGCAAATATTACATCTTGGAAAAGATGATAGTCTCACA
TGTCATCTGCACTTCCCGAAGAGTTGTGTTTTGGGTCCAATAAAGTGGTATAAGGACTGTAACGAGAT
TAAAGGGGAGCGGTTCACTGTTTTGGAAACCAGGCTTTTGGTGAGCAATGTCTCGGCAGAGGACAGAG
GGAACTACGCGTGTCAAGCCATACTGACACACTCAGGGAAGCAGTACGAGGTTTTAAATGGCATCACT
GTGAGCATTACAGAAAGAGCTGGATATGGAGGAAGTGTCCCTAAATCATTTATCCAAAAAAATCATTC
AATTGAAGTACAGCTTGGTACCACTCTGATTGTGGACTGCAATGTAACAGACACCAAGGATAATACAA
ATCTACGATGCTGGAGAGTCAATAACACTTTGGTGGATGATTACTATGATGAATCCAAACGAATCAGA
GAAGGGGTGGAAACCCATGTCTCTTTTCGGGAACATAATTTGTACACAGTAAACATCACCTTCTTGGA
AGTGAAAATGGAAGATTATGGCCTTCCTTTCATGTGCCACGCTGGAGTGTCCACAGCATACATTATAT
TACAGCTCCCAGCTCCGGATTTTCGAGCTTACTTGATAGGAGGGCTTATCGCCTTGGTGGCTGTGGCT
GTGTCTGTTGTGTACATATACAACATTTTTAAGATCGACATTGTTCTTTGGTACCGAAGTGCCTTCCA
TTCTACAGAGACCATAGTAGATGGGAAGCTGTATGACGCCTATGTCTTATACCCCAAGCCCCACAAGG
AAAGCCAGAGGCATGCCGTGGATGCCCTGGTGTTGAATATCCTGCCCGAGGTGTTGGAGAGACAATGT
GGATATAAGTTGTTTATATTCGGCAGAGATGAATTCCCTGGACAAGCCGTGGCCAATGTCATCGATGA
AAACGTTAAGCTGTGCAGGAGGCTGATTGTCATTGTGGTCCCCGAATCGCTGGGCTTTGGCCTGTTGA
AGAACCTGTCAGAAGAACAAATCGCGGTCTACAGTGCCCTGATCCAGGACGGGATGAAGGTTATTCTC
ATTGAGCTGGAGAAAATCGAGGACTACACAGTCATGCCAGAGTCAATTCAGTACATCAAACAGAAGCA
TGGTGCCATCCGGTGGCATGGGGACTTCACGGAGCAGTCACAGTGTATGAAGACCAAGTTTTGGAAGA
CAGTGAGATACCACATGCCGCCCAGAAGGTGTCGGCCGTTTCCTCCGGTCCAGCTGCCGCAGCACACA
CCTTGCTACCGCACCGCAGGCCCAGAACTAGGCTCAAGAAGAAAGAAGTGTACTCTCACGACTGGCTA
AGACTTGCTGGACTGACACCTATGGCTGGAAGATGACTTGTTTTGCTCCATGTCTCCTCAT

| | | | |
|---|---|---|---|
| NOV5g, CG50389-05 | SEQ ID NO: 78 | 575 aa | MW at 65402.8kD |
| Protein Sequence | | | |

MWSLQLCGLSIALPLSVTADGCKDIFMKNEILSASQPFAFNCTFPPITSGEVSVTWYKNSSKIPVSKI
IQSRIHQDETWILFLPMEWGDSGVYQCVIKGRDSCHRIHVNLTVFEKHWCDTSIGGLPNLSDEYKQIL
HLGKDDSLTCHLHFPKSCVLGPIKWYKDCNEIKGERFTVLETRLLVSNVSAEDRGNYACQAILTHSGK
QYEVLNGITVSITERAGYGGSVPKIIYPKNHSIEVQLGTTLIVDCNVTDTKDNTNLRCWRVNNTLVDD
YYDESKRIREGVETHVSFREHNLYTVNITFLEVKMEDYGLPFMCHAGVSTAYIILQLPAPDFRAYLIG
GLIALVAVAVSVVYIYNIFKIDIVLWYRSAFHSTETIVDGKLYDAYVLYPKPHKESQRHAVDALVLNI
LPEVLERQCGYKLFIFGRDEFPGQAVANVIDENVKLCRRLIVIVVPESLGFGLLKNLSEEQIAVYSAL
IQDGMKVILIELEKIEDYTVMPESIQYIKQKHGAIRWHGDFTEQSQCMKTKFWKTVRYHMPPRRCRPF
PPVQLPQHTPCYRTAGPELGSRRKKCTLTTG

| | | |
|---|---|---|
| NOV5h, SNP13382464 of | SEQ ID NO: 79 | 1897 bp |
| CG50389-04, DNA Sequence | ORF Start: ATG at 51 | ORF Stop: TAA at 1785 |
| | SNP Pos: 1160 | SNP Change: T to C |

GAATTCCGCCCGCCCACGGCGGCGGGGAAATACCTAGGCATGGAAGTGGCATGACAGGGCTCGTGTCC
CTGTCATATTTTCCACTCTCCACGAGGTCCTGCGCGCTTCAATCCTGCAGGCAGCCCGGTTTGGGGAT
GTGGTCCTTGCTGCTCTGCGGGTTGTCCATCGCCCTTCCACTGTCTGTCACAGCAGATGGATGCAAGG
ACATTTTTATGAAAAATGAGATACTTTCAGCAAGCCAGCCTTTTGCTTTTAATTGTACATTCCCTCCC
ATAACATCTGGGGAAGTCAGTGTAACATGGTATAAAAATTCTAGCAAAATCCCAGTGTCCAAAATCAT
ACAGTCTAGAATTCACCAGGACGAGACTTGGATTTTGTTTCTCCCCATGGAJJGGGGGGACTCAGGAG
TCTACCAATGTGTTATAAAGGGTAGAGACAGCTGTCATAGAATACATGTAAACCTAACTGTTTTTGAA
AAACATTGGTGTGACACTTCCATAGGTGGTTTACCAAATTTATCAGATGAGTACAAGCAAATATTACA
TCTTGGAAAAGATGATAGTCTCACATGTCATCTGCACTTCCCGAAGAGTTGTGTTTTGGGTCCAATAA
AGTGGTATAAAGACTGTAACGAGATTAAAGGGGAGCGGTTCACTGTTTTGGAAACCAGGCTTTTGGTG
AGCAATGTCTCGGCAGAGGACAGAGGGAACTACGCGTGTCAAGCCATACTGACACACTCAGGGAAGCA
GTACGAGGTTTTAAATGGCATCACTGTGAGCATTAGTACCACTCTGATTGTGGACTGCAATGTAACAG
ACACCAAGGATAATACAAATCTACGATGCTGGAGAGTCAATAACACTTTGGTGGATGATTACTATGAT
GAATCCAAACGAATCAGAGAAGGGGTGGAAACCCATGTCTCTTTTCGGGAACATAATTTGTACACAGT
AAACATCACCTTCTTGGAAGTGAAAATGGAAGATTATGGCCTTCCTTTCATGTGCCACGCTGGAGTGT
CAACAGCATACATTATATTACAGCTCCCAGCTCCGGATTTTCGAGCTTACTTGATAGGAGGGCTTATC
GCCTTGGTGGCTGTGGCTGTGTCTGTTGTGTACATATACAACATTTTTAAGATCGACATTGTTCTTTG
GTACCGAAGTGCCTTCCATTCTACAGAGACCATAGTAGATGGGAAGCTGTATGACGCCTATGTCTTAT
ACCCCAAGCCCCACAAGGAAAGCCAGAGGCATGCCGTGGATGCCCTGGTGTTGAATATCCTGCCCGAG
GTGTTGGAGAGACAATGTGGATATAAGTTGTTTATATTCGGCAGAGATGAATTCCCTGGACAAGCCGT
GGCCAATGTCATCGATGAAAACGTTAAGCTGTGCAGGAGGCTGATTGTCATTGTGGTCCCCGAATCGC
TGGGCTTTGGCCTGTTGAAGAACCTGTCAGAAGAACAAATCGCGGTCTACAGTGCCCTGATCCAGGAC
GGGATGAAGGTTATTCTCGTTGAGCTGGAGAAAATCGAGGACTACACAGTCATGCCAGAGTCAATTCA
GTACATCAAACAGAAGCATGGTGCCATCCGGTGGCATGGGGACTTCACGGAGCAGTCACAGTGTATGA
AGACCAAGTTTTGGAAGACAGTGAGATACCACATGCCACCCAGAAGGTGTCGGCCGTTTCCTCCGGTC
CAGCTGCTGCAGCACACACCTTGCTGCCGCACCGCAGGCCCAGAACTAGGCTCAAGAAGAAAGAAGTG
TACTCTCACGACTGGCTAAGACTTGCTGGACTGACACCTATGGCTGGAAGATGACTTGTTTTGCTCCA
TGTCTCCTCATTCCTACACCTATTTTCTGCTGCAGGATGAGGCTAGGGTTAGCATTCTAGA

| | | | |
|---|---|---|---|
| NOV5h, SNP13382464 of | SEQ ID NO: 80 | 1578 aa | MW at 65576.2kD |
| CG50389-04, Protein | SNP Pos: 370 | | SNP Change: Tyr to Tyr |
| Sequence | | | |

MTGLVSLSYFPLSTRSCALQSCRQPGLGMWSLLLCGLSIALPLSVTADGCKDIFMKNEILSASQPFAF
NCTFPPITSGEVSVTWYKNSSKIPVSKIIQSRIHQDETWILFLPMEWGDSGVYQCVIKGRDSCHRIHV
NLTVFEKHWCDTSIGGLPNLSDEYKQILHLGKDDSLTCHLHFPKSCVLGPIKWYKDCNEIKGERFTVL
ETRLLVSNVSAEDRGNYACQATLTHSGKQYEVLNGITVSISTTLIVDCNVTDTKDNTNLRCWRVNNTL
VDDYYDESKRIREGVETHVSFREHNLYTVNITFLEVKMEDYGLPFMCHAGVSTAYIILQLPAPDFPAY
LIGGLIALVAVAVSVVYIYNIFKIDIVLWYRSAFHSTETIVDGKLYDAYVLYPKPHKESQRHAVDALV
LNILPEVLERQCGYKLFIFGRDEFPGQAVANVIDENVKLCRRLIVIVVPESLGFGLLKNLSEEQIAVY
SALIQDGMKSIILVELEKIEDYTVMPESIQYIKQKHGAIRWHGDFTEQSQCMKTKFWKTVRYHMPPRR
RPFPPVQLLQHTPCCRTAGPELGSRRKKCTLTTG

[0375] A ClustalW comparison of the above protein sequences yields the following sequence alignment shown in Table 5B.

TABLE 5B
Comparison of the NOV5 protein sequences.

NOV5a ------------------------------------------------------------
NOV5b ------------------------------------------------------------
NOV5c -----------------------------------------------GSDGCKDIFMKNE
NOV5d ------------------------------------------------------------
NOV5e ------------------------------------------------------------
NOV5f ------------------------------MWSLLLCGLSIALPLSVTADGCKDIFMKNE
NOV5g MWSLQLCGLSIALPLSVTADGCKDIFMKNEILSASQPFAFNCTFPPITSGEVSVTWYKNS
NOV5a ------------------------------------------------------------
NOV5b ------------------------------------------------------------
NOV5c ILSASQPFAFNCTFPPITSGEVSVTWYKNSSKIPVSKIIQSRIHQDETWILFLPMEWGDS
NOV5d ------------------------------------------------------------
NOV5e ------------------------------------------------------------
NOV5f ILSASQPFAFNCTFPPITSGEVSVTWYKNSSKIPVSKIIQSRIHQDETWILFLPMEWGDS
NOV5g SKIPVSKIIQSRIHQDETWILFLPMEWGDSGVYQCVIKGRDSCHRIHVNLTVFEKHWCDT
NOV5a -------------------------------MTGLVSLS---------------------
NOV5b -------------------------------MGGLRSLP---------------------
NOV5c GVYQCVIKGRDSCHRIHVNLTVFEKHWCDTSIGGLPNLSDEYKQILHLGKDDSLTCHLHF
NOV5d -------------------------------MTGLVSLS---------------------
NOV5e -------------------------------MGGLRSLP---------------------
NOV5f GVYQCVIKGRDSCHRIHVNLTVFEKHWCDTSIGGLPNLSDEYKQILHLGKDDSLTCHLHF
NOV5g SIGGLPNLSDEYKQILHLGKDDSLTCHLHFPKSCVLGPI---------------------
NOV5a ---------YFPLSTRSCALQ--SCRQPGLGMWSLLLCGLSIALPLSVTADGCKDIFMKN
NOV5b ---------MCYKDCNEIKGERFTVLETRLLVSNVSAEDRGNYACQAILTHSGKQYEVLN
NOV5c PKSCVLGPIKWYKDCNEIKGERFTVLETRLLVSNVSAEDRGNYACQAILTHSGKQYEVLN
NOV5d ---------YFPLSTRSCALQ--SCRQPGLGMWSLLLCGLSIALPLSVTADGCKDIFMKN
NOV5e ---------MCYKDCNEIKGERFTVLETRLLVSNVSAEDRGNYACQAILTHSGKQYEVLN
NOV5f PKSCVLGPIKWYKDCNEIKGERFTVLETRLLVSNVSAEDRGNYACQAILTHSGKQYEVLN
NOV5g ---------KWYKDCNEIKGERFTVLETRLLVSNVSAEDRGNYACQAILTHSGKQYEVLN
NOV5a EILSASQP--------------------------FAFNCTFPPITSGEVSVTWYKNSSKI
NOV5b GITVSITERAGYGGSVPKIIYPKNHSIEVQLGTTLIVDCNVTDTKDNTNLRCWRVNNTLV
NOV5c GITVSIST-------------------------TLIVDCNVTDTKDNTNLRCWRVNNTLV
NOV5d EILSASQP--------------------------FAFNCTFPPITSGEVSVTWYKNSSKI
N0V5e GITVSITERAGYGGSVPKIIYPKNHSIEVQLGTTLIVDCNVTDTKDNTNLRCWRVNNTLV
NOV5f GITVSIST-------------------------TLIVDCNVTDTKDNTNLRCWRVNNTLV
NOV5g GITVSITEPAGYGGSVPKIIYPKNHSIEVQLGTTLIVDCNVTDTKDNTNLRCWRVNNTLV
NOV5a PVSKIIQSRIHQ---------DE---T-WILFLPMEWGDSGVYQCVIKGRDSCHRIHVNL
NOV5b DDYYDESKRIREGVETHASFREHNLYTVNITFLEVKMEDYGLPFVCHAGVSTAYIILQLP
NOV5c DDYYDESKRIREGVETHVSFREHNLYTVNITFLEVKMEDYGLPFMCHAGVSTAYIILQLP
NOV5d PVSKIIQSRIHQ---------DE---T-WILFLPMEWGDSGVYQCVIK---TVTRLKGSG
NOV5e DDYYDESKRIREGVETHVSFREHNLYTVNITFLEVKMEDYGLPFMCHAGVSTAYIILQLP
NOV5f DDYYDESKRIREGVETHVSFREHNLYTVNITFLEVKMEDYGLPFMCHAGVSTAYIILQLP
NOV5g DDYYDESKRIREGVETHVSFREHNLYTVNITFLEVKMEDYGLPFMCHAGVSTAYIILQLP
NOV5a TVFEKHWCDTSIGGLPNLSDEYKQILHLGKDDSLTCHLHFPKSCVLGPIKWYKDCNEIKG
NOV5b APDFRAYLIGGLIALVAVAVSVVYIYNIFKIDIVLWYRSAFHSTETIVDGKLYDAYVLYP
NOV5c APDFRAYLE---------------------------------------------------
NOV5d SLFWKPGFW---------------------------------------------------
NOV5e APDFRAYLIGGLIALVAVAVSVVYIYNIFKIDIVLWYRSAFHSTETIVDGKLYDAYVLYP
NOV5f APDFRAYLIGGLIALVAVAVSVVYIYNIFKIDIVLWYRSAFHSTETIVDGKLYDAYVLYP
NOV5g APDFRAYLIGGLIALVAVAVSVVYIYNIFKIDIVLWYRSAFHSTETIVDGKLYDAYVLYP
NOV5a ERFTVLETRLLVSNVSAEDRGNYACQAILTHSGKQYEVLNGITVSISTTLIVDCNVTDTK
NOV5b KPHKESQRHAVDALVLNILPEVLERQCGYKLFIFGRDEFLGQAVANVIDENVKLCRRLIV
NOV5c ------------------------------------------------------------
NOV5d ------------------------------------------------------------
NOV5e KPHKESQRHAVDALVLNILPEVLERQCGYKLFIFGRDEFPGQAVANVIDENVKLCRRLIV
NOV5f KPHKESQRHAVDALVLNILPEVLERQCGYKLFIFGRDEFPGQAVANVIDENVKLCRRLIV
NOV5g KPHKESQRHAVDALVLNILPEVLERQCGYKLFIFGRDEFPGQAVANVIDENVKLCRRLIV
NOV5a DNTNLRCWRVNNTLVDDYYDESKRIREGVETHVSFREHNLYTVNITFLEVKMEDYGLPFM
NOV5b IVVPESLGFGLLKNLSEEQIAVYSALIQDGMKVILIELEKIEDYTVMPESIQYIKQKHGA
NOV5c ------------------------------------------------------------
NOV5d ------------------------------------------------------------
NOV5e IVVPESLGFGLLKNLSEEQIAVYSALIQDGMKVILIELEKIEDYTVMPESIQYIKQKHGA
NOV5f IVVPESLGFGLLKNLSEEQIAVYSALIQDGMKVILVELEKIEDYTVMPESIQYIKQKHGA
NOV5g IVVPESLGFGLLKNLSEEQIAVYSALIQDGMKVILIELEKIEDYTVMPESIQYIKQKHGA
NOV5a CHAGVSTAYIILQLPAPDFRAYLIGGLIALVAVAVSVVYIYNIFKIDIVLWYRSAFHSTE
NOV5b IRWHGDFTEQSQCMKTKFWKTVRYHMPPRRCRPFPPVQLPQHTPCYRTAGPELGSRRKKC
NOV5c ------------------------------------------------------------
NOV5d ------------------------------------------------------------
NOV5e IRWHGDFTEQSQCMKTKFWKTVRYHMPPRRCRPFLRSTCRSTHLCTAPQAQN--------
N0V5f IRWHGDFTEQSQCMKTKFWKTVRYHMPPRRCRPFPPVQLLQHTPCCRTAGPELGSRRKKC
NOV5g IRWHGDFTEQSQCMKTKFWKTVRYHMPPRRCRPFPPVQLPQHTPCYRTAGPELGSRRKKC
NOV5a TIVDGKLYDAYVLYPKPHKESQRHAVDALVLNILPEVLERQCGYKLFIFGRDEFPGQAVA
NOV5b TLTTG-------------------------------------------------------
NOV5c ------------------------------------------------------------
NOV5d ------------------------------------------------------------
NOV5e ------------------------------------------------------------
NOV5f TLTTG-------------------------------------------------------
NOV5g TLTTG-------------------------------------------------------
NOV5a NVIDENVKLCRRLIVIVVPESLGFGLLKNLSEEQIAVYSALIQDGMKVILVELEKIEDYT
NOV5b ------------------------------------------------------------
NOV5c ------------------------------------------------------------
NOV5d ------------------------------------------------------------
NOV5e ------------------------------------------------------------
NOV5f ------------------------------------------------------------
NOV5g ------------------------------------------------------------
NOV5a VMPESIQYIKQKHGAIRWHGDFTEQSQCMKTKFWKTVRYHMPPRRCRPFPPVQLLQHTPC
NOV5b ------------------------------------------------------------
NOV5c ------------------------------------------------------------
NOV5d ------------------------------------------------------------
NOV5e ------------------------------------------------------------
NOV5f ------------------------------------------------------------
NOV5g ------------------------------------------------------------
NOV5a CRTAGPELGSRRKKCTLTTG
NOV5b --------------------
NOV5c --------------------
NOV5d --------------------
NOV5e --------------------
NOV5f --------------------
NOV5g --------------------
NOV5a (SEQ ID NO: 66)
NOV5b (SEQ ID NO: 68)
NOV5c (SEQ ID NO: 70)
NOV5d (SEQ ID NO: 72)
NOV5e (SEQ ID NO: 74)
NOV5f (SEQ ID NO: 76)
NOV5g (SEQ ID NO: 78)

[0376] Further analysis of the NOV5a protein yielded the following properties shown in Table 5C.

TABLE 5C
Protein Sequence Properties NOV5a

| | |
|---|---|
| SignalP analysis: | Cleavage site between residues 48 and 49 |
| PSORT II analysis: | |

| PSG: | a new signal peptide prediction method | |
|---|---|---|
| | N-region: | length 0; pos. chg 0; neg. chg 0 |
| | H-region: | length 14; peak value 7.84 |
| | PSG score: | 3.44 |

| | |
|---|---|
| GvH: | von Heijne's method for signal seq. recognition |
| | GvH score (threshold: −2.1): 0.58 |
| | possible cleavage site: between 40 and 41 |

>>> Seems to have a cleavable signal peptide (1 to 40)

| ALOM: | Klein et al's method for TM region allocation | | |
|---|---|---|---|
| | Init position for calculation: 41 | | |
| | Tentative number of TMS(s) for the threshold 0.5: 1 | | |
| | Number of TMS(s) for threshold 0.5: 1 | | |
| | INTEGRAL | Likelihood = | Transmembrane 342-358 |
| | | −9.39 | |

| | |
|---|---|
| PERIPHERAL | Likelihood = 0.58 (at 473) |

| | |
|---|---|
| | ALOM score: −9.39 (number of TMSs: 1) |
| MTOP: | Prediction of membrane topology (Hartmann et al.) |
| | Center position for calculation: 20 |
| | Charge difference: −1.0 C(1.0)-N(2.0) |
| | N >= C: N-terminal side will be inside |

>>> membrane topology: type 1a (cytoplasmic tail 359 to 578)

| MITDISC: | discrimination of mitochondrial targeting seq | | | |
|---|---|---|---|---|
| | R content: | 2 | Hyd Moment(75): | 1.16 |
| | Hyd Moment(95): | 1.99 | G content: | 4 |
| | D/E content: | 1 | S/T content: | 11 |

| | |
|---|---|
| | Score: −2.92 |
| Gavel: | prediction of cleavage sites for mitochondrial preseq |
| | R-2 motif at 33 CRQ\|PG |

NUCDISC: discrimination of nuclear localization signals

| | |
|---|---|
| | pat4: RRKK (5) at 569 |
| | pat7: PPRRCRP (4) at 540 |
| | pat7: PRRCRPF (5) at 541 |
| | bipartite: none |
| | content of basic residues: 10.6% |
| | NLS Score: 0.62 |
| KDEL: | ER retention motif in the C-terminus: none |

ER Membrane Retention Signals: none
SKL: peroxisomal targeting signal in the C-terminus: none
PTS2: 2nd peroxisomal targeting signal: none
VAC: possible vacuolar targeting motif: none
RNA-binding motif: none
Actinin-type actin-binding motif:

type 1: none
type 2: none

NMYR: N-myristoylation pattern: none
Prenylation motif: none
memYQRL: transport motif from cell surface to Golgi: none
Tyrosines in the tail: too long tail
Dileucine motif in the tail: found

LL at 464
LL at 552

checking 63 PROSITE DNA binding motifs: none
checking 71 PROSITE ribosomal protein motifs: none
checking 33 PROSITE prokaryotic DNA binding motifs: none

| | |
|---|---|
| NNCN: | Reinhardt's method for Cytoplasmic/Nuclear discrimination |
| | Prediction: cytoplasmic |
| | Reliability: 94.1 |
| COIL: | Lupas's algorithm to detect coiled-coil regions |
| | total: 0 residues |

Final Results (k = 9/23):

55.6%: endoplasmic reticulum
22.2%: Golgi
11.1%: plasma membrane
11.1%: extracellular, including cell wall

>> prediction for CG50389-04 is end (k = 9)

[0377] A search of the NOV5a protein against the Geneseq database, a proprietary database that contains sequences published in patents and patent publication, yielded several homologous proteins shown in Table 5D.

TABLE 5D
Geneseq Results for NOV5a

| | | NOV5a | Identities/ | | |
|---|---|---|---|---|---|
| | | Residues/ | Similarities for | | |
| Geneseq | Protein/Organism/Length [Patent #, | Match | the Matched | | Expect |
| Identifier | Date] | Residues | Region | | Value |
| ABG69605 | Human NOV6c protein - Homo | 1 . . . 578 | 578/578 | (100%) | 0.0 |
| | sapiens, 578 aa. [WO200250277-A2, | 1 . . . 578 | 578/578 | (100%) | |
| | 27-JUN-2002] | | | | |
| ABG69604 | Human NOV6b protein - Homo | 29 . . . 578 | 550/550 | (100%) | 0.0 |
| | sapiens, 550 aa. [WO200250277-A2, | 1 . . . 550 | 550/550 | (100%) | |
| | 27-JUN-2002] | | | | |
| AAE16577 | Human interleukin-1 receptor DNAX | 29 . . . 547 | 517/544 | (95%) | 0.0 |
| | designation 6 (IL-1RD6) protein - Homo | 1 . . . 544 | 519/544 | (95%) | |
| | sapiens, 562 aa. [US6326472-B1, 04- | | | | |
| | DEC-2001] | | | | |
| AAE03538 | Human Interleukin-1 Type 3 receptor | 29 . . . 547 | 517/544 | (95%) | 0.0 |
| | (IL-1-3R) - Homo sapiens, 562 aa. | 1 . . . 544 | 519/544 | (95%) | |
| | [US6239268-B1, 29-MAY-2001] | | | | |
| AAE06664 | Human interleukin-1R related protein 2 | 29 . . . 547 | 517/544 | (95%) | 0.0 |
| | (IL-1R6) - Homo sapiens, 562 aa. | 1 . . . 544 | 519/544 | (95%) | |
| | [WO200157219-A2, 09-AUG-2001] | | | | |

[0378] In a BLAST search of public sequence databases, the NOV5a protein was found to have homology to the proteins shown in the BLASTP data in Table 5E.

TABLE 5E
Public BLASTP Results for NOV5a

| | | NOV5a | Identities/ | |
|---|---|---|---|---|
| Protein | | Residues/ | Similarities for | |
| Accession | | Match | the Matched | Expect |
| Number | Protein/Organism/Length | Residues | Portion | Value |
| Q9HB29 | Interleukin 1 receptor-like 2 precursor | 29 . . . 578 | 549/575 (95%) | 0.0 |
| | (IL-1Rrp2) (Interleukin-1 receptor | 1 . . . 575 | 550/575 (95%) | |
| | related protein 2) (IL1R-rp2) - Homo | | | |
| | sapiens (Human), 575 aa. | | | |
| CAC60374 | Sequence 12 from Patent WO0157219 | 29 . . . 547 | 517/544 (95%) | 0.0 |
| | - unidentified, 562 aa. | 1 . . . 544 | 519/544 (95%) | |
| Q62929 | Interleukin 1 receptor-like 2 precursor | 27 . . . 557 | 358/557 (64%) | 0.0 |
| | (Interleukin-1 receptor- related protein | 1 . . . 557 | 429/557 (76%) | |
| | 2) (IL1R-rp2) - Rattus norvegicus (Rat), | | | |
| | 561 aa. | | | |
| Q9ERS7 | Interleukin 1 receptor-like 2 precursor | 27 . . . 578 | 364/578 (62%) | 0.0 |
| | (IL-1Rrp2) - Mus musculus (Mouse), | 1 . . . 570 | 432/578 (73%) | |
| | 574 aa. | | | |
| P14778 | Interleukin-1 receptor, type I precursor | 33 . . . 553 | 224/560 (40%) | e−101 |
| | (IL-1R-1) (IL-1R-alpha) (P80) (Antigen | 7 . . . 552 | 314/560 (56%) | |
| | CD121a) - Homo sapiens (Human), 569 | | | |
| | aa. | | | |

[0379] PFam analysis predicts that the NOV5a protein contains the domains shown in the Table 5F.

TABLE 5F
Domain Analysis of NOV5a

| | | Identities/ | | |
|---|---|---|---|---|
| | | Similarities | | |
| Pfam | NOV5a Match | for the | | Expect |
| Domain | Region | Matched Region | | Value |
| ig | 63 . . . 125 | 11/64 | (17%) | 0.015 |
| | | 47/64 | (73%) | |
| ig | 167 . . . 225 | 13/60 | (22%) | 0.9 |
| | | 41/60 | (68%) | |
| TIR | 388 . . . 538 | 46/153 | (30%) | 2.8e−52 |
| | | 136/153 | (89%) | |

### Example 6.

[0380] The NOV6 clone was analyzed, and the nucleotide and encoded polypeptide sequences are shown in Table 6A.

TABLE 6A
NOV6 Sequence Analysis

| | | |
|---|---|---|
| NOV6a, CG50391-08 | SEQ ID NO: 81 | 2268 bp |
| DNA Sequence | ORF Start: ATG at 206 | ORF Stop: TGA at 1565 |

CTCTGACTGCTCCTATTGAGCTGTCTGCTCGCTGTGCCCGCTGTGCCTGCTGTGCCCGCGCTGTCGCC
GCTGCTACCGCGTCTACTGGACGCGGGAGACGCCAGCGAGCTGGTGATTGGAGCCCTGCGGAGAGCTC
AAGCGCCCAGCTCTGCCCGAGGAGCCCAGGCTGCCCCGTGAGTCCCATAGTTGCTGCAGGAGTGGAGC
CATGAGCTGCGTCCTGGGTGGTGTCATCCCCTTGGGGCTGCTGTTCCTGGTCTGCGGATCCCAAGGCT
ACCTCCTGCCCAACGTCACTCTCTTAGAGGAGCTGCTCAGCAAJJACCAGCACAACGAGTCTCACTCC
CGGGTCCGCAGAGCCATCCCCAGGGAGGACAAGGAGGAGATCCTCATGCTGCACAACAAGCTTCGGGG
CCAGGTGCAGCCTCAGGCCTCCAACATGGAGTACATGACCTGGGATGACGAACTGGAGAAGTCTGCTG
CAGCGTGGGCCAGTCAGTGCATCTGGGAGCACGGGCCCACCAGTCTGCTGGTGTCCATCGGGCAGAAC
CTGGGCGCTCACTGGGGCAGAATAGTTTGGGTCACCACCAACAAGATCGGTTGTGCTGTGAACACCTG
CCGGAAGATGACTGTCTGGGGAGAAGTTTGGGAGAACGCGGTCTACTTTGTCTGCAATTATTCTCCAA
AGGGGAACTGGATTGGAGAAGCCCCCTACAAGAATGGCCGGCCCTGCTCTGAGTGCCCACCCAGCTAT
GGAGGCAGCTGCAGGAACAACTTGTGTTACCGAGAAGAAACCTACACTCCAAAACCTGAAACGGACGA
GATGAATGAGGTGGAAACGGCTCCCATTCCTGAAGAAAACCATGTTTGGCTCCAACCGAGGGTGATGA
GACCCACCAAGCCCAAGAAAACCTCTGCGGTCAACTACATGACCCAAGTCGTCAGATGTGACACCAAG
ATGAAGGACAGGTGCAAAGGGTCCACGTGTAACAGGTACCAGTGCCCAGCAGGCTGCCTGAACCACAA
GGCGAAGATCTTTGGAAGTCTGTTCTATGAAAGCTCGTCTAGCATATGCCGCGCCGCCATCCACTACG
GGATCCTGGATGACAAGGGAGGCCTGGTGGATATCACCAGGAACGGGAAGGTCCCCTTCTTCGTGAAG
TCTGAGAGACACGGCGTGCAGTCCCTCAGCAAATACAAACCTTCCAGCTCATTCATGGTGTCAAAAGT
GAAAGTGCAGGATTTGGACTGCTACACGACCGTTGCTCAGCTGTGCCCGTTTGAAAAGCCAGCAACTC
ACTGCCCAAGAATCCATTGTCCGGCACACTGCAAAGACGAACCTTCCTACTGGGCTCCGGTGTTTGGA
ACCAACATCTATGCAGATACCTCAAGCATCTGCAAGACAGCCGTGCACGCGGGACTCATCAGCAACGA
GAGTGGGGGTGACGTGGACGTGATGCCCGTGGATAAAAAGAAGACCTACGTGGGCTCGCTCAGGAATG
GAGTTCAGTCTGAAAGCCTGGGGACTCCTCGGGATGGAAAGGCCTTCCGGATCTTTGCTGTCAGGCAG
TGAATTTCCAGCACCAGGGGAGAAGGGGCGTCTTCAGGAGGGCTTCGGGGTTTTGCTTTTATTTTTAT
TTTGTCATTGCGGGGTATATGGAGAGTCAGGAAACTTCCTTTGACTGATGTTCAGTGTCCATCACTTT
GTGGCCTGTGGGTGAGGTGACATCTCATCCCCTCACTGAAGCAACAGCATCCCAAGGTGCTCAGCCGG
ACTCCCTGGTGCCTGATCCTGCTGGGGCCCGGGGGTCTCCATCTGGACGTCCTCTCTCCTTTAGAGAT
CTGAGCTGTCTCTTAAAGGGGACAGTTGCCCAAAATGTTCCTTGCTATGTGTTCTTCTGTTGGTGGAG
GAAGTTGATTTCAACCTCCCTGCCAAAAGAACAAACCATTTGAAGCTCACAATTGTGAAGCATTCACG
GCGTCGGAAGAGGCCTTTTGAGCAAGCGCCAATGAGTTTCAGGAATGAAGTAGAAGGTAGTTATTTAA
AAATAAAAAACACAGTCCGTCCCTACCAATAGAGGAAAATGGTTTTAATGTTTGCTGGTCAGACAGAC
AAATGGGCTAGAGTAAGAGGGCTGCGGGTATGAGAGACCCCGGCTCCGCCCTGGCACGTGTCCTTGCT
GGCGGCCCGCCACAGGCCCCCTTCAATGGCCGCATTCAGGATGGCTCTATACACAGCAGTGCTGGTTT
ATGTAAAGTTCAGCAGTCACTTCA

| | | | |
|---|---|---|---|
| NOV6a, CG50391-08 | SEQ ID NO: 82 | 453 aa | MW at 50641.5kD |
| Protein Sequence | | | |

MSCVLGGVIPLGLLFLVCGSQGYLLPNVTLLEELLSKYQHNESHSRVRPAIPREDKEEILMLHNKLRG
QVQPQASNMEYMTWDDELEKSAAAWASQCIWEHGPTSLLVSIGQNLGAHWGRIVWVTTNKIGCAVNTC
RKMTVWGEVWENAVYFVCNYSPKGNWIGEAPYKNGRPCSECPPSYGGSCRNNLCYREETYTPKPETDE
MNEVETAPIPEENHVWLQPRVMRPTKPKKTSAVNYMTQVVRCDTKMKDRCKGSTCNRYQCPAGCLNHK
AKIFGSLFYESSSSICRAAIHYGILDDKGGLVDITRNGKVPFFVKSERHGVQSLSKYKPSSSFMVSKV
KVQDLDCYTTVAQLCPFEKPATHCPRIHCPAHCKDEPSYWAPVFGTNIYADTSSICKTAVHAGVISNE
SGGDVDVMPVDKKKTYVGSLRNGVQSESLGTPRDGKAFRIFAVRQ

| | | |
|---|---|---|
| NOV6b, CG50391-09 | SEQ ID NO: 83 | 2280 bp |
| DNA Sequence | ORF Start: ATG at 206 | ORF Stop: TGA at 1577 |

CTCTGACTGCTCCTATTGAGCTGTCTGCTCGCTGTGCCCGCTGTGCCTGCTGTGCCCGCGCTGTCGCC
GCTGCTACCGCGTCTACTGGACGCGGGAGACGCCAGCGAGCTGGTGATTGGAGCCCTGCGGAGAGCTC
AAGCGCCCAGCTCTGCCCGAGGACCCCAGGCTGCCCCGTGAGTCCCATAGTTGCTGCAGGAGTGGAGC
CATGAGCTGCGTCCTGGGTGGTGTCATCCCCTTGGGGCTGCTGTTCCTGGTCTGCGGATCCCAAGGCT
ACCTCCTGCCCAACGTCACTCTCTTAGAGGAGCTGCTCAGCAAATACCAGCACAACGAGTCTCACTCC
CGGGTCCGCAGAGCCATCCCCAGGGAGGACAAGGAGGAGATCCTCATGCTGCACAACAAGCTTCGGGG
CCAGGTGCAGCCTCAGGCCTCCAACATGGAGTACATGTATCGCTCTCCGGGGTTCCATGTGCAGTCCT
GGTATGACGAGGTGAAGGACTACACCTACCCCTACCCGAGCGAGTGCAACCCCTGGTGTCCAGAGAGG
TGCTCGGGGCCTATGTGCACGCACTACACACAGATAGTTTGGGCCACCACCAACAAGATCGGTTGTGC
TGTGAACACCTGCCGGAAGATGACTGTCTGGGGAGAAGTTTGGGAGAACGCGGTCTACTTTGTCTGCA
ATTATTCTCCAAAGGGGAACTGGATTGGAGAAGCCCCCTACAAGAATGGCCGGCCCTGCTCTGAGTGC
CCACCCAGCTATGGAGGCAGCTGCAGGAACAACTTGTGTTACCGAGAAGAAACCTACACTCCAAAACC
TGAAACGGACGAGATGAATGAGGTGGAAACGGCTCCCATTCCTGAAGAAAACCATGTTTGGCTCCAAC
CGAGGGTGATGAGACCCACCAAGCCCAAGAAAACCTCTGCGGTCAACTACATGACCCAAGTCGTCAGA
TGTGACACCAAGATGAAGGACAGGTGCAAAGGGTCCACGTGTAACAGGTACCAGTGCCCAGCAGGCTG
CCTGAACCACAAGGCGAAGATCTTTGGAACTCTGTTCTATGAAAGCTCGTCTAGCATATGCCGCGCCG
CCATCCACTACGGGATCCTGGATGACAAGGGAGGCCTGGTGGATATCACCAGGAACGGGAAGGTCCCC
TTCTTCGTGAAGTCTGAGAGACACGGCGTGCAGTCCCTCAGCAAATACAAACCTTCCAGCTCATTCAT
GGTGTCAAAAGTGAAAGTGCAGGATTTGGACTGCTACACGACCGTTGCTCAGCTGTGCCCGTTTGAAA
AGCCAGCAACTCACTGCCCAAGAATCCATTGTCCGGCACACTGCAAAGACGAACCTTCCTACTGGGCT
CCGGTGTTTGGAACCAACATCTATGCAGATACCTCAAGCATCTGCAAGACAGCCGTGCACGCGGGAGT
CATCAGCAACGAGAGTGGGGGTGACGTGGACGTGATGCCCGTGGATAAAAAGAAGACCTACGTGGGCT
CGCTCAGGAATGGAGTTCAGTCTGAAAGCCTGGGGACTCCTCGGGATGGAAAGGCCTTCCGGATCTTT
GCTGTCAGGCAGTGAATTTCCACCACCAGGGGAGAAGGGGCGTCTTCAGGAGGGCTTCGGGGTTTTGC
TTTTATTTTTATTTTGTCATTGCGGGGTATATGGAGAGTCAGGAAACTTCCTTTGACTGATGTTCAGT
GTCCATCACTTTGTGGCCTGTGGGTGAGGTGACATCTCATCCCCTCACTGAAGCAACAGCATCCCAAG
GTGCTCAGCCGGACTCCCTGGTGCCTGATCCTGCTGGGGCCCGGGGGTCTCCATCTGGACGTCCTCTC
TCCTTTAGAGATCTGAGCTGTCTCTTAAAGGGGACAGTTGCCCAAAATGTTCCTTGCTATGTGTTCTT
CTGTTGGTGGAGGAAGTTGATTTCAACCTCCCTGCCAAAAGAACAAACCATTTGAAGCTCACAATTGT
GAAGCATTCACGGCGTCGGAAGAGGCCTTTTGAGCAAGCGCCAATGAGTTTCAGGAATGAAGTAGAAG
GTAGTTATTTAAAAATAAAAAACACAGTCCGTCCCTACCAATAGAGGAAAATGGTTTTAATGTTTGCT
GGTCAGACAGACAAATGGGCTAGAGTAAGAGGGCTGCGGGTATGAGAGACCCCGGCTCCGCCCTGGCA
CGTGTCCTTGCTGGCGGCCCGCCACAGGCCCCCTTCAATGGCCGCATTCAGGATGGCTCTATACACAG
CAGTGCTGGTTTATGTAAAGTTCAGCAGTCACTTCA

| | | | |
|---|---|---|---|
| NOV6b, CG50391-09 | SEQ ID NO: 84 | 457 aa | MW at 51515.4kD |
| Protein Sequence | | | |

MSCVLGGVIPLGLLFLVCGSQGYLLPNVTLLEELLSKYQHNESHSRVRRAIPREDKEEILMLHNKLRG
QVQPQASNMEYMYRSPGFHVQSWYDEVKDYTYPYPSECNPWCPERCSGPMCTHYTQIVWATTNKIGCA
VNTCRKMTVWGEVWENAVYFVCNYSPKGNWIGEAPYKNGRPCSECPPSYGGSCRNNLCYREETYTPKP
ETDEMNEVETAPIPEENHVWLQPRVMRPTKPKKTSAVNYMTQVvRCDTKNKDRCKGSTCNRYQCPAGC
LNHKAKIFGTLFYESSSSICRAAIHYGILDDKGGLVDITRNGKVPFFVKSERHGVQSLSKYKPSSSFM
VSKVKVQDLDCYTTVAQLCPFEKPATHCPRIHCPAHCKDEPSYWAPVFGTNIYADTSSICKTAVHAGV
ISNESGGDVDVMPVDKKKTYVGSLRNGVQSESLGTPRDGKAFRIFAVRQ

| | | |
|---|---|---|
| NOV6c, CG50391-10 | SEQ ID NO: 85 | 2106 bp |
| DNA Sequence | ORF Start: ATG at 206 | ORF Stop: TGA at 1403 |

CTCTGACTGCTCCTATTGAGCTGTCTGCTCGCTGTGCCCGCTGTGCCTGCTGTGCCCGCGCTGTCGCC
GCTGCTACCGCGTCTACTGGACGCGGGAGACGCCAGCGAGCTGGTGATTGGAGCCCTGCGGAGAGCTC
AAGCGCCCAGCTCTGCCCGAGGAGCCCAGGCTGCCCCGTGAGTCCCATAGTTGCTGCAGGAGTGGAGC
CATGAGCTGCGTCCTGGGTGGTGTCATCCCCTTGGGGCTGCTGTTCCTGGTCTGCGGATCCCAAGGCT
ACCTCCTGCCCAACGTCACTCTCTTAGAGGAGCTGCTCAGCAAATACCAGCACAACGAGTCTCACTCC
CGGGTCCGCAGAGCCATCCCCAGGGAGGACAAGGAGGAGATCCTCATGCTGCACAACAAGCTTCGGGG
CCAGGTGCAGCCTCAGGCCTCCAACATGGAGTACATGACCTGGGATGACGAACTGGAGAAGTCTGCTG
CAGCGTGGGCCAGTCAGTGCATCTGGGAGCACGGGCCCACCAGTCTGCTGGTGTCCATCGGGCAGAAC
CTGGGCGCTCACTGGGGCAGGGGGAACTGGATTGGAGAAGCCCCCTACAAGAATGGCCGGCCCTGCTC
TGAGTGCCCACCCAGCTATGGAGGCAGCTGCAGGAACAACTTGTGTTACCGAGAAGAAACCTACACTC
CAAAACCTGAAACGGACGAGATGAATGAGGTGGAAACGGCTCCCATTCCTGAAGAAAACCATGTTTGG
CTCCAACCGAGGGTGATGAGACCCACCAAGCCCAAGAAAACCTCTGCGGTCAACTACATGACCCAAGT
CGTCAGATGTGACACCAAGATGAAGGACAGGTGCAAAGGGTCCACGTGTAACAGGTACCAGTGCCCAG
CAGGCTGCCTGAACCACAAGGCGAAGATCTTTGGAAGTCTGTTCTATGAAAGCTCGTCTAGCATATGC
CGCGCCGCCATCCACTACGGGATCCTGGATGACAAGGGAGGCCTGGTGGATATCACCAGGAACGGGAA
GGTCCCCTTCTTCGTGAAGTCTGAGAGACACGGCGTGCAGTCCCTCGTGCAGGATTTGGACTGCTACA
CGACCGTTGCTCAGCTGTGCCCGTTTGAAAAGCCAGCAACTCACTGCCCAAGAATCCATTGTCCGGCA
CACTGCAAAGACGAACCTTCCTACTGGGCTCCGGTGTTTGGAACCAACATCTATGCAGATACCTCAAG
CATCTGCAAGACAGCCGTGCACGCGGGAGTCATCAGCAACGAGAGTGGGGGTGACGTGGACGTGATGC
CCGTGGATAAAAAGAAGACCTACGTGGGCTCGCTCAGGAATGGAGTTCAGTCTGAAAGCCTGGGGACT
CCTCGGGATGGAAAGGCCTTCCGGATCTTTGCTGTCAGGCAGTGAATTTCCAGCACCAGGGGAGAAGG
GGCGTCTTCAGGAGGGCTTCGGGGTTTTGCTTTTATTTTTATTTTGTCATTGCGGGGTATATGGAGAG
TCAGGAAACTTCCTTTGACTGATGTTCAGTGTCCATCACTTTGTGGCCTGTGGGTGAGGTGACATCTC
ATCCCCTCACTGAAGCAACAGCATCCCAAGGTGCTCAGCCGGACTCCCTGGTGCCTGATCCTGCTGGG
GCCCGGGGGTCTCCATCTGGACGTCCTCTCTCCTTTAGAGATCTGAGCTGTCTCTTAAAGGGGACAGT
TGCCCAAAATGTTCCTTGCTATGTGTTCTTCTGTTGGTGGAGGAAGTTGATTTCAACCTCCCTGCCAA
AAGAACAAACCATTTGAAGCTCACAATTGTGAAGCATTCACGGCGTCGGAAGAGGCCTTTTGAGCAAC
CGCCAATGAGTTTCAGGAATGAAGTAGAAGGTAGTTATTTAAAAATAAAAAACACAGTCCGTCCCTAC
CAATAGAGGAAAATGGTTTTAATGTTTGCTGGTCAGACAGACAAATGGGCTAGAGTAAGAGGGCTGCG
GGTATGAGAGACCCCGGCTCCGCCCTGGCACGTGTCCTTGCTGGCGGCCCGCCACAGGCCCCCTTCAA
TGGCCGCATTCAGGATGGCTCTATACACAGCAGTGCTGGTTTATGTAAAGTTCAGCAGTCACTTCA

| | | | |
|---|---|---|---|
| NOV6c, CG50391-10 | SEQ ID NO: 86 | 399 aa | MW at 44463.2kD |
| Protein Sequence | | | |

MSCVLGGVIPLGLLFLVCGSQGYLLPNVTLLEELLSKYQHNESHSRVRPAIPREDKEEILMLHNKLRG
QVQPQASNMEYMTWDDELEKSAAAWASQCIWEHGPTSLLVSIGQNLGAHWGRGNWIGEAPYKNGRPCS
ECPPSYGGSCRNNLCYREETYTPKPETDEMNEVETAPIPEENHVWLQPRVMRPTKPKKTSAVNYMTQV
VRCDTKMKDRCKGSTCNRYQCPAGCLNHKAKIFGSLFYESSSSICRAAIHYGILDDKGGLVDITRNGK
VPFFVKSERHGVQSLVQDLDCYTTVAQLCPFEKPATHCPRIHCPAHCKDEPSYWAPVFGTNIYADTSS
ICKTAVHAGVISNESGGDVDVMPVDKKKTYVGSLRNGVQSESLGTPRDGKAFRIFAVRQ

| | | |
|---|---|---|
| NOV6d, CG50391-01 | SEQ ID NO: 87 | 2305 bp |
| DNA Sequence | ORF Start: ATG at 453 | ORF Stop: TGA at 1602 |

CTCTGACTGCTCCTATTGAGCTGTCTGCTCGCTGTGCCCGCTGTGCCTGCTGTGCCCGCGCTGTCGCC
GCTGCTACCGCGTCTACTGGACGCGGGAGACGCCAGCGAGCTGGTGATTGGAGCCCTGCGGAGAGCTC
AAGCGCCCAGCTCTGCCCGAGGAGCCCAGGCTGCCCCGTGAGTCCCATAGTTGCTACAGGAGTGGAGC
CATGAGCTGCGTCCTGGGTGGTGTCATCCCCTTGGGGCTGCTGTTCCTGGTCCGCGGATCCCAAGGCT
ACCTCCTGCCCAACGTCACTCTCTTAGAGGAGCTGCTCAGCAAATACCAGCACAACGAGTCTCACTCC
CGGGTCCGCAGAGCCATCCCCAGGGAGGACAAGGAGGAGATCCTCATGCTGCACAACAAGCTTCGGGG
CCAGGTGCAGCCTCAGGCCTCCAACATGGAGTACATGACCTGGGATGACGAACTGGGGCAGGTATCGC
TCTCCGGGGTTCCATGTGCAGTCCTGGTATGACGAGGTGAAGGACTACACCTACCCCTACCCGAGCGA
GTGCAACCCCTGGTGTCCAGAGAGGTGCTCGGGGCCTATGTGCACGCACTACACACAGATAGTTTGGG
CCACCACCAACAAGATCGGTTGTGCTGTGAACACCTGCCGGAAGATGACTGTCTGGGGAGAAGTTTGG
GAGAACGCGGTCTACTTTGTCTGCAATTATTCTCCAAAGGGGAACTGGATTGGAGAAGCCCCCTACAA
GAATGGCCGGCCCTGCTCTGAGTGCCCACCCAGCTATGGAGGCAGCTGCAGGAACAACTTGTGTTACC
GAGAAGAACCTACACTCCAACCTGAAACGGACGAGATGAATGAGGTGGTGGAAACGGCTCCCATTCCT
GAAGAAAACCATGTTTGGCTCCAACCGAGGGTGATGAGACCCACCAAGCCCAAGAAAACCTCTGCGGT
CAACTACATGACCCAAGTCGTCAGATGTGACACCAAGATGAAGGACAGGTGCAAAGGGTCCACGTGTA
ACAGGTACCAGTGCCCAGCAGGCTGCCTGACCACAAGGCGAGATCTTTGGAACTCTCTGTTCTATGAA
AGCTCGTCTAGCATATGCCGCGCCGCCATCCACTACGGGATCCTGGATGACAAGGGAGGCCTGGTGGA
TATCACCAGGAACGGGAAGGTCCCCTTCTTCGTGAAGTCTGAGAGACACGGCGTGCAGTCCCTCAGCA
AATACAAACCTTCCAGCTCATTCATGGTGTCAAAAGTGAAAGTGCAGGATTTGGACTGCTACACGACC
GTTGCTCAGCTGTGCCCGTTTGAAAAGCCAGCAACTCACTGCCCAAGAATCCATTGTCCGGCACACTG
CAAAGACGAACCTTCCTACTGGGCTCCGGTGTTTGGAACCAACATCTATGCAGATACCTCAAGCATCT
GCAAGACAGCCGTGCACGCGGGAGTCATCAGCAACGAGAGTGGGGGTGACGTGGACGTGATGCCCGTG
GATAAAAAGAAGACCTACGTGGGCTCGCTCAGGAATGGAGTTCAGTCTGAAAGCCTGGGGACTCCTCG
GGATGGAAAGGCCTTCCGGATCTTTGCTGTCAGGCAGTGAATTTCCAGCACCAGGGGAGAAGGGGCGT
CTTCAGGAGGGCTTCGGGGTTTTGCTTTTATTTTTATTTTGTCATTGCGGGGTATATGGAGAGTCAGG
AAACTTCCTTTGACTGATGTTCAGTGTCCATCACTTTGTGGCCTGTGGGTGAGGTGACATCTCATCCC
CTCACTGAAGCAACAGCATCCCAAGGTGCTCAGCCGGACTCCCTGGTGCCTGATCCTGCTGGGGCCCG
GGGGTCTCCATCTGGACGTCCTCTCTCCTTTAGAGATCTGAGCTGTCTCTTAAAGGGGACAGTTGCCC
AAAATGTTCCTTGCTATGTGTTCTTCTGTTGGTGGAGGAAGTTGATTTCAACCTCCCTGCCAAAAGAA
CAAACCATTTGAAGCTCACAATTGTGAAGCATTCACGGCGTCGGAAGAGGCCTTTTGAGCAAGCGCCA
ATGAGTTTCAGGAATGAAGTAGAAGGTAGTTATTTAAAAATAAAAAACACAGTCCGTCCCTACCAATA
GAGGAAAATGGTTTTAATGTTTGCTGGTCAGACAGACAAATGGGCTAGAGTAAGAGGGCTGCGGGTAT
GAGAGACCCCGGCTCCGCCCTGGCACGTGTCCTTGCTGGCGGCCCGCCACAGGCCCCCTTCAATGGCC
GCATTCAGGATGGCTCTATACACAGCAGTGCTGGTTTATGTAAAGTTCAGCAGTCACTTCA

| | | | |
|---|---|---|---|
| NOV6d, CG50391-01 | SEQ ID NO: 88 | 383 aa | MW at 43185.7kD |
| ProteinSequence | | | |

MTNWGRYRSPGFHVQSWYDEVKDYTYPYPSECNPWCPERCSGPMCTHYTQIVWATTNKIGCAVNTCRK
MTVWGEVWENAVYFVCNYSPKGNWIGEAPYKNGRPCSECPPSYGGSCRNNLCYREETYTPKPETDEMN
EVETAPIPEENHVWLQPRVMRPTKPKKTSAVNYMTQVVRCDTKMKDRCKGSTCNRYQCPAGCLNHKAK
IFGTLFYESSSSICRAAIHYGILDDKGGLVDITRNGKVPFFVKSERHGVQSLSKYKPSSSFMVSKVKV
QDLDCYTTVAQLCPFEKPATHCPRIHCPAHCKDEPSYWAPVFGTNIYADTSSICKTAVHAGVISNESG
GDVDVMPVDKKKTYVGSLRNGVQSESLGTPRDGKAFRIFAVRQ

| | | |
|---|---|---|
| NOV6e, CG50391-02 | SEQ ID NO: 89 | 1669 bp |
| DNA Sequence | ORF Start: ATG at 205 | ORF Stop: TAG at 1636 |

TCTGACTGCTCCTATTGAGCTGTCTGCTCGCTGTGCCCGCTGTGCCTGCTGTGCCCGCGCTGTCGCCC
CTGCTACCGCGTCTACTGGACGCGGGAGACGCCAGCGAGCTGGTGATTGGAGCCCTGCGGAGAGCTCA
AGCGCCCAGCTCTGCCCGAGGAGCCCAGGCTGCCCCGTGAGTCCCATAGTTGCTGCAGGAGTGGAGCC
ATGAGCTGCGTCCTGGGTGGTGTCATCCCCTTGGGGCTGCTGTTCCTGGTCTGCGGATCCCAAGGCTA
CCTCCTGCCCAACGTCACTCTCTTAGAGGAGCTGCTCAGCAAATACCAGCACAACGAGTCTCACTCCC
GGGTCCGCAGAGCCATCCCCAGGGAGGACAAGGAGGAGATCCTCATGCTGCACAACAAGCTTCGGGGC
CAGGTGCAGCCTCAGGCCTCCAACATGGAGTACATGACCTGGGATGACGAACTGGAGAAGTCTGCTGC
AGCGTGGGCCAGTCAGTGCATCTGGGAGCACGGGCCCACCGGTCTGCTGGTGTCCATCGGGCAGAACC
TGGGCGCTCACTGGGGCAGGTATCGCTCTCCGGGGTTCCATGTGCAGTCCTGGTATGACGAGGTGAAG
GACTACACCTACCCCTACCCGAGCGAGTGCAACCCCTGGTGTCCAGAGAGGTGCTCGGGGCCTATGTG
CACGCACTACACACAGATAGTTTGGGCCACCACCAACAAGATCGGTTGTGCTGTGAACACCTGCCGGA
AGATGACTGTCTGGGGAGAAGTTTGGGAGAACGCGGTCTACTTTGTCTGCAATTATTCTCCAAAGGGG
AACTGGATTGGAGAAGCCCCCTACAAGAATGGCCGGCCCTGCTCTCAGTGCCCACCCAGCTATGGAGG
CAGCTGCAGGAACAACTTGTGTTACCGAGAAGAAACCTACACTCCAAAACCTGAAACGGACGAGATGA
ATGAGGTGGAAACGGCTCCCATTCCTGAAGAAAACCATGTTTGGCTCCAACCGAGGGTGATGAGACCC
ACCAAGCCCAAGAAAACCTCTTCGGTCAACTACATGACCCAAGTCGTCTTATGTGACACCAAGATGAA
GGACAGGTGCAAAGGGTCCACGTGTAACAGGTACCAGTGCCCAGCAGGCTGCCTGAACCACAAGGCGA
AGATCTTTGGAACTCTGTTCTATGAAAGCTCGTCTAGCATATGCCGCGCCGCCATCCACTACGGGATC
CTGGATGACAAGGGAGGCCTGGTGGATATCACCAGGAACGGGAAGGTCCCCTTCTTCGTGAAGTCTGA
GAGACACGGCGTGCAGTCCCTCAGCAAATACAAACCTTCCAGCTCATTCATGGTGTCAAAAGTGAAAG
TGCAGGATTTGGACTGCTACACGACCGTTGCTCAGCTGTGCCCGTTTGAAAAGCCAGCAACTCACTGC
CCAAGAATCCATTGTCCGGCACACTGCAAAGACGAACCTTCCTACTGGGCTCCGGTGTTTGGAACCAA
CATCTATGCAGATACCTCAAGCATCTGCAAGACAGCCGTGCACGCGGGAGTCATCAGCAACGAGAGTG
GGGGTGACGTGGACGTGATGCCCGTGGATAAAAAGAAGACCTACACCTGCCCGGCAGCCGCTCGAGCC
CTATAGTGTAAACCGATTCGCAGCACACTGGCGCCGT

| | | | |
|---|---|---|---|
| NOV6e, CG50391-02 | SEQ ID NO: 90 | 477 aa | MW at 53587.7kD |
| Protein Sequence | | | |

MSCVLGGVIPLGLLFLVCGSQGYLLPNVTLLEELLSKYQHNESHSRVRRATPREDKEEILMLHNKLRG
QVQPQASNNEYMTWDDELEKSAAAWASQCIWEHGPTGLLVSIGQNLGAHWGRYRSPGFHVQSWYDEVK
DYTYPYPSECNPWCPERCSGPMCTHYTQIVWATTNKIGCAVNTCRKMTVWGEVWENAVYFVCNYSPKG
NWIGEAPYKNGRPCSQCPPSYGGSCRNNLCYREETYTPKPETDENNEVETAPIPEENHVWLQPRVMRP
TKPKKTSSVNYMTQVVLCDTKMKDRCKGSTCNRYQCPAGCLMIKAKIFGTLFYESSSSICRAAIHYGI
LDDKGGLVDITRNGKVPFFVKSERHGVQSLSKYKPSSSFMVSKVKVQDLDCYTTVAQLCPFEKPATHC
PRIHCPAHCKDEPSYWAPVFGTNTYADTSSICKTAVHAGVISNESGGDVDVMPVDKKKTYTCPAAARA
L

| | | |
|---|---|---|
| NOV6f, CG50391-03 | SEQ ID NO: 91 | 2400 bp |
| DNA Sequence | ORF Start: ATG at 206 | ORF Stop: TGA at 1697 |

CTCTGACTGCTCCTATTGAGCTGTCTGCTCGCTGTGCCCGCTGTGCCTGCTGTGCCCGCGCTGTCGCC
GCTGCTACCGCGTCTACTGGACGCGGGAGACGCCAGCGAGCTGGTGATTGGAGCCCTGCGGAGAGCTC
AAGCGCCCAGCTCTGCCCGAGGAGCCCAGGCTGCCCCGTGAGTCCCATAGTTGCTGCAGGAGTGGAGC
CATGAGCTGCGTCCTGGGTGGTGTCATCCCCTTGGGGCTGCTGTTCCTGGTCCGCGGATCCCAAGGCT
ACCTCCTGCCCAACGTCACTCTCTTAGAGGAGCTGCTCAGCAAATACCAGCACAACGAGTCTCACTCC
CGGGTCCGCAGAGCCATCCCCAGGGAGGACAAGGAGGAGATCCTCATGCTGCACAACAAGCTTCGGGG
CCAGGTGCAGCCTCAGGCCTCCAACATGGAGTACATGACCTGGGATGACGAACTGGAGAAGTCTGCTG
CAGCGTGGGCCAGTCAGTGCATCTGGGAGCACGGGCCCACCGGTCTGCTGGTGTCCATCGGGCAGAAC
CTGGGCGCTCACTGGGGCAGGTATCGCTCTCCGGGGTTCCATGTGCAGTCCTGGTATGACGAGGTGAA
GGACTACACCTACCCCTACCCGAGCGAGTGCAACCCCTGGTGTCCAGAGAGGTGCTCGGGGCCTATGT
GCACGCACTACACACAGATAGTTTGGGCCACCACCAACAAGATCGGTTGTGCTGTGAACACCTGCCGG
AAGATGACTGTCTGGGGAGAAGTTTGGGAGAACGCGGTCTACTTTGTCTGCAATTATTCTCCAAAGGG
GAACTGGATTGGAGAAGCCCCCTACAAGAATGGCCGGCCCTGCTCTGAGTGCCCACCCAGCTATGGAG
GCAGCTGCAGGAACAACTTGTGTTACCGAGAAGAAACCTACACTCCAAAACCTGAAACGGACGAGATG
AATGAGGTGGAAACGGCTCCCATTCCTGAAGAAAACCATGTTTGGCTCCAACCGAGGGTGATGAGACC
CACCAAGCCCAAGAAAACCTCTGCGGTCAACTACATGACCCAAGTCGTCAGATGTGACACCAAGATGA
AGGACAGGTGCAAAGGGTCCACGTGTAACAGGTACCAGTGCCCAGCAGGCTGCCTGAACCACAAGGCG
AAGATCTTTGGAAGTCTGTTCTATGAAAGCTCGTCTAGCATATGCCGCGCCGCCATCCACTACGGGAT
CCTGGATGACAAGGGAGGCCTGGTGGATATCACCAGGAACGGGAAGGTCCCCTTCTTCGTGAAGTCTG
AGAGACACGGCGTGCAGTCCCTCAGCAAATACAAACCTTCCAGCTCATTCATGGTGTCAAAAGTGAAA
GTGCAGGATTTGGACTGCTACACGACCGTTGCTCAGCTGTGCCCGTTTGAAAAGCCAGCAACTCACTG
CCCAAGAATCCATTGTCCGGCACACTGCAAAGACGAACCTTCCTACTGGGCTCCGGTGTTTGGAACCA
ACATCTATGCAGATACCTCAAGCATCTGCAAGACAGCCGTGCACGCGGGAGTCATCAGCAACGAGAGT
GGGGGTGACGTGGACGTGATGCCCGTGGATAAAAAGAAGACCTACGTGGGCTCGCTCAGGAATGGAGT
TCAGTCTGAAAGCCTGGGGACTCCTCGGGATGGAAAGGCCTTCCGGATCTTTGCTGTCAGGCAGTGAA
TTTCCAGCACCAGGGGAGAAGGGGCGTCTTCAGGAGGGCTTCGGGGTTTTGCTTTTATTTTTATTTTG
TCATTGCGGGGTATATGGAGAGTCAGGAAACTTCCTTTGACTGATGTTCAGTGTCCATCACTTTGTGG
CCTGTGGGTGAGGTGACATCTCATCCCCTCACTGAAGCAACAGCATCCCAAGGTGCTCAGCCGGACTC
CCTGGTGCCTGATCCTGCTGGGGCCCGGGGGTCTCCATCTGGACGTCCTCTCTCCTTTAGAGATCTGA
GCTGTCTCTTAAAGGGGACAGTTGCCCAAAATGTTCCTTGCTATGTGTTCTTCTGTTGGTGGAGGAAG
TTGATTTCAACCTCCCTGCCAAAAGAACAAACCATTTGAAGCTCACAATTGTGAAGCATTCACGGCGT
CGGAAGAGGCCTTTTGAGCAAGCGCCAATGAGTTTCAGGAATGAAGTAGAAGGTAGTTATTTAAAAAT
AAAAAACACAGTCCGTCCCTACCAATAGAGGAAAATGGTTTTAATGTTTGCTGGTCAGACAGACAAAT
GGGCTAGAGTAAGAGGGCTGCGGGTATGAGAGACCCCGGCTCCGCCCTGGCACGTGTCCTTGCTGGCG
GCCCGCCACAGGCCCCCTTCAATGGCCGCATTCAGGATGGCTCTATACACAGCAGTGCTGGTTTATGT
AAAGTTCAGCAGTCACTTCA

| | | | |
|---|---|---|---|
| NOV6f, CG50391-03 | SEQ ID NO: 92 | 497 aa | MW at 55928.2kD |
| Protein Sequence | | | |

MSCVLGGVIPLGLLFLVRGSQGYLLPNVTLLEELLSKYQHNESHSRVRRAIPREDKEEILMLHNKLRG
QVQPQASNMEYMTWDDELEKSAAAWASQCIWEHGPTGLLVSIGQNLGAHWGRYRSPGFHVQSWYDEVK
DYTYPYPSECNPWCPERCSGPMCTHYTQIVWATTNKIGCAVNTCRKMTVWGEVWENAVYFVCNYSPKG
NWIGEAPYKNGRPCSECPPSYGGSCRNNLCYREETYTPKPETDEMNEVETAPIPEENHVWLQPRVMRP
TKPKKTSAVNYMTQVVRCDTKMKDRCKGSTCNRYQCPAGCLNHKAKIFGSLFYESSSSICRAAIHYGI
LDDKGGLVDITPNGKVPFFVKSERHGVQSLSKYKPSSSFMVSKVKVQDLDCYTTVAQLCPFEKPATHC
PRIHCPAHCKDEPSYWAPVFGTNIYADTSSICKTAVHAGVISNESGGDVDVMPVDKKKTYVGSLRNGV
QSESLGTPRDGKAFRIFAVRQ

| | | |
|---|---|---|
| NOV6g, CG50391-04 | SEQ ID NO: 93 | 2403 bp |
| DNA Sequence | ORF Start: ATG at 206 | ORF Stop: TGA at 1700 |

CTCTGACTGCTCCTATTGAGCTGTCTGCTCGCTGTGCCCGCTGTGCCTGCTGTGCCCGCGCTGTCGCC
GCTGCTACCGCGTCTACTGGACGCGCGAGACGCCAGCGAGCTGGTGATTGGAGCCCTGCGGAGAGCTC
AAGCGCCCAGCTCTGCCCGAGGAGCCCAGGCTGCCCCGTGAGTCCCATAGTTGCTGCAGGAGTGGAGC
CATGAGCTGCGTCCTGGGTGGTGTCATCCCCTTGGGGCTGCTGTTCCTGGTCCGCGGATCCCAAGGCT
ACCTCCTGCCCAACGTCACTCTCTTAGAGGAGCTGCTCAGCAAATACCAGCACAACGAGTCTCACTCC
CGGGTCCGCAGAGCCATCCCCAGGGAGGACAAGGAGGAGATCCTCATGCTGCACAACAAGCTTCGGGG
CCAGGTGCAGCCTCAGGCCTCCAACATGGAGTACATGACCTGGGATGACGAACTGGAGAAGTCTGCTG
CAGCGTGGGCCAGTCAGTGCATCTGGGAGCACGGGCCCACCAGTCTGCTGGTGTCCATCGGGCAGAAC
CTGGGCGCTCACTGGGGCAGGAGGTATCGCTCTCCGGGGTTCCATGTGCAGTCCTGGTATGACGAGGT
GAAGGACTACACCTACCCCTACCCGAGCGAGTGCAACCCCTGGTGTCCAGAGAGGTGCTCGGGGCCTA
TGTGCACGCACTACACACAGATAGTTTGGGCCACCACCAACAAGATCGGTTGTGCTGTGAACACCTGC
CGGAAGATGACTGTCTGGGGAGAAGTTTGGGAGAACGCGGTCTACTTTGTCTGCAATTATTCTCCAAA
GGGGAACTGGATTGGAGAAGCCCCCTACAAGAATGGCCGGCCCTGCTCTGAGTGCCCACCCAGCTATG
GAGGCAGCTGCAGGAACAACTTGTGTTACCGAGAAGAAACCTACACTCCAAAACCTGAAACGGACGAG
ATGAATGAGGTGGAAACGGCTCCCATTCCTGAAGAAAACCATGTTTGGCTCCAACCGAGGGTGATGAG
ACCCACCAAGCCCAAGAAAACCTCTGCGGTCAACTACATGACCCAAGTCGTCAGATGTGACACCAAGA
TGAAGGACAGGTGCAAAGGGTCCACGTGTAACAGGTACCAGTGCCCAGCAGGCTGCCTGAACCACAAG
GCGAAGATCTTTGGAAGTCTGTTCTATGAAAGCTCGTCTAGCATATGCCGCGCCGCCATCCACTACGG
GATCCTGGATGACAAGGGAGGCCTGGTGGATATCACCAGGAACGGGAAGGTCCCCTTCTTCGTGAAGT
CTGAGAGACACGGCGTGCAGTCCCTCAGCAAATACAAACCTTCCAGCTCATTCATGGTGTCAAAAGTG
AAAGTGCAGGATTTGGACTGCTACACGACCGTTGCTCAGCTGTGCCCGTTTGAAAAGCCAGCAACTCA
CTGCCCAAGAATCCATTGTCCGGCACACTGCAAAGACGAACCTTCCTACTGGGCTCCGGTGTTTGGAA
CCAACATCTATGCAGATACCTCAAGCATCTGCAAGACAGCCGTGCACGCGGGAGTCATCAGCAACGAG
AGTGGGGGTGACGTGGACGTGATGCCCGTGGATAAAAAGAAGACCTACGTGGGCTCGCTCAGGAATGG
AGTTCAGTCTGAAAGCCTGGGGACTCCTCGGGATGGAAAGGCCTTCCGGATCTTTGCTGTCAGGCAGT
GAATTTCCAGCACCAGGGGAGAAGGGGCGTCTTCAGGAGGGCTTCGGGGTTTTGCTTTTATTTTTATT
TTGTCATTGCGGGGTATATGGAGAGTCAGGAAACTTCCTTTGACTGATGTTCAGTGTCCATCACTTTG
TGGCCTGTGGGTGAGGTGACATCTCATCCCCTCACTGAAGCAACAGCATCCCAAGGTGCTCAGCCGGA
CTCCCTGGTGCCTGATCCTGCTGGGGCCCGGGGGTCTCCATCTGGACGTCCTCTCTCCTTTAGAGATC
TGAGCTGTCTCTTAAAGGGGACAGTTGCCCAAAATGTTCCTTGCTATGTGTTCTTCTGTTGGTGGAGG
AAGTTGATTTCAACCTCCCTGCCAAAAGAACAAACCATTTGAAGCTCACAATTGTGAAGCATTCACGG
CGTCGGAAGAGGCCTTTTGAGCAAGCGCCAATGAGTTTCAGGAATGAAGTAGAAGGTAGTTATTTAAA
AATAAAAAACACAGTCCGTCCCTACCAATAGAGGAAAATGGTTTTAATGTTTGCTGGTCAGACAGACA
AATGGGCTAGAGTAAGAGGGCTGCGGGTATGAGAGACCCCGGCTCCGCCCTGGCACGTGTCCTTGCTG
GCGGCCCGCCACAGGCCCCCTTCAATGGCCGCATTCAGGATGGCTCTATACACAGCAGTGCTGGTTTA
TGTAAAGTTCAGCAGTCACTTCA

| | | | |
|---|---|---|---|
| NOV6g, CG50391-04 | SEQ ID NO: 94 | 498 aa | MW at 56114.4kD |
| Protein Sequence | | | |

MSCVLGGVIPLGLLFLVRGSQGYLLPNVTLLEELLSKYQHNESHSRVRRAIPREDKEEILMLHNKLRG
QVQPQASNMEYMTWDDELEKSAAAWASQCIWEHGPTSLLVSIGQNLGAHWGRRYRSPGFHVQSWYDEV
KDYTYPYPSECNPWCPERCSGPMCTHYTQIVWATTNKIGCAVNTCRKMTVWGEVWENAVYFVCNYSPK
GNWIGEAPYKNGRPCSECPPSYGGSCRNNLCYREETYTPKPETDEMNEVETAPIPEENHVWLQPRVMR
PTKPKKTSAVNYMTQVVRCDTKMKDRCKGSTCNRYQCPAGCLNHKAKIFGSLFYESSSSICRAAIHYG
ILDDKGGLVDITRNGKVPFFVKSERHGVQSLSKYKPSSSFMVSKVKVQDLDCYTTVAQLCPFEKPATH
CPRIHCPAHCKDEPSYWAPVFGTNIYADTSSICKTAVHAGVISNESGGDVDVMPVDKKKTYVGSLRNG
VQSESLGTPRDGKAFRIFAVRQ

| | | |
|---|---|---|
| NOV6h, CG50391-05 | SEQ ID NO: 95 | 2412 bp |
| DNA Sequence | ORF Start: ATG at 206 | ORF Stop: TGA at 1709 |

CTCTGACTGCTCCTATTGAGCTGTCTGCTCGCTGTGCCCGCTGTGCCTGCTGTGCCCGCGCTGTCGCC
GCTGCTACCGCGTCTACTGGACGCGGGAGACGCCAGCGAGCTGGTGATTGGAGCCCTGCGGAGAGCTC
AAGCGCCCAGCTCTGCCCGAGGAGCCCAGGCTGCCCCGTGAGTCCCATAGTTGCTGCAGGAGTGGAGC
CATGAGCTGCGTCCTGGGTGGTGTCATCCCCTTGGGGCTGCTGTTCCTGGTCCGCGGATCCCAAGGCT
ACCTCCTGCCCAACGTCACTCTCTTAGAGGAGCTGCTCAGCAAATACCAGCACAACGAGTCTCACTCC
CGGGTCCGCAGAGCCATCCCCAGGGAGGACAAGGAGGAGATCCTCATGCTGCACAACAAGCTTCGGGG
CCAGGTGCAGCCTCAGGCCTCCAACATGGAGTACATGACCTGGGATGACGAACTGGAGAAGTCTGCTG
CAGCGTGGGCCAGTCAGTGCATCTGGGAGCACGGGCCCACCGGTCTGCTGGTGTCCATCGGGCAGAAC
CTGGGCGCTCACTGGGGCAGGTATCGCTCTCCGGGGTTCCATGTGCAGTCCTGGTATGACGAGGTGAA
GGACTACACCTACCCCTACCCGAGCGAGTGCAACCCCTGGTGTCCAGAGAGGTGCTCGGGGCCCATGT
GCACGCACTACACACAGGTAACTCAGATAGTTTGGGCCACCACCAACAAGATCGGTTGTGCTGTGAAC
ACCTGCCGGAAGATGACTGTCTGGGGAGAAGTTTGGGAGAACGCGGTCTACTTTGTCTGCAATTATTC
TCCAAAGAGGGGGAACTGGATTGGAGAAGCCCCCTACAAGAATGGCCGGCCCTGCTCTGAGTGCCCAC
CCAGCTATGGAGGCAGCTGCAGGAACAACTTGTGTTACCGAGAAGAAACCTACACTCCAAAACCTGAA
ACGGACGAGATGAATGAGGTGGAAACGGCTCCCATTCCTGAAGAAAACCATGTTTGGCTCCAACCGAG
GGTGATGAGACCCACCAAGCCCAAGAAAACCTCTGCGGTCAACTACATGACCCAAGTCGTCAGATGTG
ACACCAAGATGAAGGACAGGTGCAAAGGGTCCACGTGTAACAGGTACCAGTGCCCAGCAGGCTGCCTG
AACCACAAGGCGAAGATCTTTGGAAGTCTGTTCTATGAAAGCTCGTCTAGCATATGCCGCGCCGCCAT
CCACTACGGGATCCTGGATGACAAGGGAGGCCTGGTGGATATCACCAGGAACGGGAAGGTCCCCTTCT
TCGTGAAGTCTGAGAGACACGGCGTGCAGTCCCTCAGCAAATACAAACCTTCCAGCTCATTCATGGTG
TCAAAAGTGAAAGTGCAGGATTTGGACTGCTACACGACCGTTGCTCAGCTGTGCCCGTTTGAAAAGCC
AGCAACTCACTGCCCAAGAATCCATTGTCCGGCACACTGCAAAGACGAACCTTCCTACTGGGCTCCGG
TGTTTGGAACCAACATCTATGCAGATACCTCAAGCATCTGCAAGACAGCCGTGCACGCGGGAGTCATC
AGCAACGAGAGTGGGGGTGACGTGGACGTGATGCCCGTGGATAAAAAGAAGACCTACGTGGGCTCGCT
CAGGAATGGAGTTCAGTCTGAAAGCCTGGGGACTCCTCGGGATGGAAAGGCCTTCCGGATCTTTGCTG
TCAGGCAGTGAATTTCCAGCACCAGGGGAGAAGGGGCGTCTTCAGGAGGGCTTCGGGGTTTTGCTTTT
ATTTTTATTTTGTCATTGCGGGGTATATGGAGAGTCAGGAAACTTCCTTTGACTGATGTTCAGTGTCC
ATCACTTTGTGGCCTGTGGGTGAGGTGACATCTCATCCCCTCACTGAAGCAACAGCATCCCAAGGTGC
TCAGCCGGACTCCCTGGTGCCTGATCCTGCTGGGGCCCGGGGGTCTCCATCTGGACGTCCTCTCTCCT
TTAGAGATCTGAGCTGTCTCTTAAAGGGGACAGTTGCCCAAAATGTTCCTTGCTATGTGTTCTTCTGT
TGGTGGAGGAAGTTGATTTCAACCTCCCTGCCAAAAGAACAAACCATTTGAAGCTCACAATTGTGAAG
CATTCACGGCGTCGGAAGAGGCCTTTTGAGCAAGCGCCAATGAGTTTCAGGAATGAAGTAGAAGGTAG
TTATTTAAAAATAAAAAACACAGTCCGTCCCTACCAATAGAGGAAAATGGTTTTAATGTTTGCTGGTC
AGACAGACAAATGGGCTAGAGTAAGAGGGCTGCGGGTATGAGAGACCCCGGCTCCGCCCTGGCACGTG
TCCTTGCTGGCGGCCCGCCACAGGCCCCCTTCAATGGCCGCATTCAGGATGGCTCTATACACAGCAGT
GCTGGTTTATGTAAAGTTCAGCAGTCACTTCA

| | | | |
|---|---|---|---|
| NOV6h, CG50391-05 | SEQ ID NO: 96 | 501 aa | MW at 56412.8kD |
| Protein Sequence | | | |

MSCVLGGVIPLGLLFLVRGSQGYLLPNVTLLEELLSKYQHNESHSRVRRAIPREDKEEILMLHNKLRG
QVQPQASNMEYMTWDDELEKSAAAWASQCIWEHGPTGLLVSIGQNLGAHWGRYRSPGFHVQSWYDEVK
DYTYPYPSECNPWCPERCSGPMCTHYTQVTQIVWATTNKIGCAVNTCRKMTVWGEVWENAVYFVCNYS
PKRGNWIGEAPYKNGRPCSECPPSYGGSCRNNLCYREETYTPKPETDEMNEVETAPIPEENHVWLQPR
VMRPTKPKKTSAVNYMTQVVRCDTKMKDRCKGSTCNRYQCPAGCLNHKAKIFGSLFYESSSSICRAAI
HYGILDDKGGLVDITRNGKVPFFVKSERHGVQSLSKYKPSSSFMVSKVKVQDLDCYTTVAQLCPFEKP
ATHCPRIHCPAHCKDEPSYWAPVFGTNIYADTSSICKTAVHAGVISNESGGDVDVMPVDKKKTYVGSL
RNGVQSESLGTPRDGKAFRIFAVRQ

| | | |
|---|---|---|
| NOV6i, CG50391-06 | SEQ ID NO: 97 | 1425 bp |
| DNA Sequence | ORF Start: at 1 | ORF Stop: end of sequence |

TACCTCCTGCCCAACGTCACTCTCTTAGAGGAGCTGCTCAGCAAATACCAGCACAACGAGTCTCACTC
CCGGGTCCGCAGAGCCATCCCCAGGGAGGACAAGGAGGAGATCCTCATGCTGCACAACAAGCTTCGGG
GCCAGGTGCAGCCTCAGGCCTCCAACATGGAGTACATGACCTGGGATGACGAACTGGAGAAGTCTGCT
GCAGCGTGGGCCAGTCAGTGCATCTGGGAGCACGGGCCCACCGGTCTGCTGGTGTCCATCGGGCAGAA
CCTGGGCGCTCACTGGGGCAGGTATCGCTCTCCGGGGTTCCATGTGCAGTCCTGGTATGACGAGGTGA
AGGACTACACCTACCCCTACCCGAGCGAGTGCAACCCCTGGTGTCCAGAGAGGTGCTCGGGGCCTATG
TGCACGCACTACACACAGATAGTTTGGGCCACCACCAACAAGATCGGTTGTGCTGTGAACACCTGCCG
GAAGATGACTGTCTGGGGAGAAGTTTGGGAGAACGCGGTCTACTTTGTCTGCAATTATTCTCCAAAGG
GGAACTGGATTGGAGAAGCCCCCTACAAGAATGGCCGGCCCTGCTCTGAGTGCCCACCCAGCTATGGA
GGCAGCTGCAGGAACAACTTGTGTTACCGAGAAGAAACCTACACTCCAAAACCTGAAACGGACGAGAT
GAATGAGGTGGAAACGGCTCCCATTCCTGAAGAAAACCATGTTTGGCTCCAACCGAGGGTGATGAGAC
CCACCAAGCCCAAGAAAACCTCTGCGGTCAACTACATGACCCAAGTCGTCAGATGTGACACCAAGATG
AAGGACAGGTGCAAAGGGTCCACGTGTAACAGGTACCAGTGCCCAGCAGGCTGCCTGAACCACAAGGC
GAAGATCTTTGGAACTCTGTTCTATGAAAGCTCGTCTAGCATATGCCGCGCCGCCATCCACTACGGGA
TCCTGGATGACAAGGGAGGCCTGGTGGATATCACCAGGAACGGGAAGGTCCCCTTCTTCGTGAAGTCT
GAGAGACACGGCGTGCAGTCCCTCAGCAAATACAAACCTTCCAGCTCATTCATGGTGTCAAAAGTGAA
AGTGCAGGATTTGGACTGCTACACGACCGTTGCTCAGCTGTGCCCGTTTGAAAAGCCAGCAACTCACT
GCCCAAGAATCCATTGTCCGGCACACTGCAAAGACGAACCTTCCTACTGGGCTCCGGTGTTTGGAACC
AACATCTATGCAGATACCTCAAGCATCTGCAAGACAGCTGTGCACGCGGGAGTCATCAGCAACGAGAG
TGGGGGTGACGTGGACGTGATGCCCGTGGATAAAAAGAAGACCTACGTGGGCTCGCTCAGGAATGGAG
TTCAGTCTGAAAGCCTGGGGACTCCTCGGGATGGAAAGGCCTTCCGGATCTTTGCTGTCAGGCAG

| | | | |
|---|---|---|---|
| NOV6i, CG50391-06 | SEQ ID NO: 98 | 475 aa | MW at 53743.6kD |
| Protein Sequence | | | |

YLLPNVTLLEELLSKYQHNESHSRVRPAIPREDKEEILMLHNKLRGQVQPQASNMEYMTWDDELEKSA
AAWASQCIWEHGPTGLLVSIGQNLGAHWGRYRSPGFHVQSWYDEVKDYTYPYPSECNPWCPERCSGPM
CTHYTQIVWATTNKIGCAVNTCRKMTVWGEVWENAVYFVCNYSPKGNWIGEAPYKNGRPCSECPPSYG
GSCRNNLCYREETYTPKPETDEMNEVETAPIPEENHVWLQPRVMRPTKPKKTSAVNYMTQVVRCDTKM
KDRCKGSTCNRYQCPAGCLNHKAKIFGTLFYESSSSICRAAIHYGILDDKGGLVDITRNGKVPFFVKS
ERHGVQSLSKYKPSSSFMVSKVKVQDLDCYTTVAQLCPFEKPATHCPRIHCPAHCKDEPSYWAPVFGT
NIYADTSSICKTAVHAGVISNESGGDVDVMPVDKKKTYVGSLRNGVQSESLGTPRDGKAFRIFAVRQ

| | | |
|---|---|---|
| NOV6j, CG50391-07 | SEQ ID NO: 99 | 2272 bp |
| DNA Sequence | ORF Start: ATG at 216 | ORF Stop: TGA at 1707 |

CCCAGGGCGTCTCCGGCTGCTCCCATTGAGCTGTCTGCTCGCTGTGCCCGCTGTGCCTGCTGTGCCCG
CGCTGTCGCCGCTGCTACCGCGTCTGCTGGACGCGGGAGACGCCAGCGAGCTGGTGATTGGAGCCCTG
CGGAGAGCTCAAGCGCCCAGCTCTGCCCNAGGAGCCCAGGCTGCCCCGTGAGTCCCATAGTTGCTGCA
GGAGTGGAGCCATGAGCTGCGTCCTGGGTGGTGTCATCCCCTTGGGGCTGCTGTTCCTGGTCTGCGGA
TCCCAAGGCTACCTCCTGCCCAACGTCACTCTCTTAGAGGAGCTGCTCAGCAAATACCAGCACAACGA
GTCTCACTCCCGGGTCCGCAGAGCCATCCCCAGGGAGGACAAGGAGGAGATCCTCATGCTGCACAACA
AGCTTCGGGGCCAGGTGCAGCCTCAGGCCTCCAACATGGAGTACATGACCTGGGATGACGAACTGGAG
AAGTCTGCTGCAGCGTGGGCCAGTCAGTGCATCTGGGAGCACGGGCCCACCAGTCTGCTGGTGTCCAT
CGGGCAGAACCTGGGCGCTCACTGGGGCAGGTATCGCTCTCCGGGGTTCCATGTGCAGTCCTGGTATG
ACGAGGTGAAGGACTACACCTACCCCTACCCGAGCGAGTGCAACCCCTGGTGTCCAGAGAGGTGCTCG
GGGCCTATGTGCACGCACTACACACAGATAGTTTGGGCCACCACCAACAAGATCGGTTGTGCTGTGAA
CACCTGCCGGAAGATGACTGTCTGGGGAGAAGTTTGGGAGAACGCGGTCTACTTTGTCTGCAATTATT
CTCCAAAGGGGAACTGGATTGGAGAAGCCCCCTACAAGAATGGCCGGCCCTGCTCTGAGTGCCCACCC
AGCTATGGAGGCAGCTGCAGGAACAACTTGTGTTACCGAGAAGAAACCTACACTCCAAAACCTGAAAC
GGACGAGATGAATGAGGTGGAAACGGCTCCCATTCCTGAAGAAAACCATGTTTGGCTCCAACCGAGGG
TGATGAGACCCACCAAGCCCAAGAAAACCTCTGCGGTCAACTACATGACCCAAGTCGTCAGATGTGAC
ACCAAGATGAAGGACAGGTGCAAAGGGTCCACGTGTAACAGGTACCAGTGCCCAGCAGGCTGCCTGAA
CCACAAGGCGAAGATCTTTGGAAGTCTGTTCTATGAAAGCTCGTCTAGCATATGCCGCGCCGCCATCC
ACTACGGGATCCTGGATGACAAGGGAGGCCTGGTGGATATCACCAGGAACGGGAAGGTCCCCTTCTTC
GTGAAGTCTGAGAGACACGGCGTGCAGTCCCTCAGCAAATACAAACCTTCCAGCTCATTCATGGTGTC
AAAAGTGAAAGTGCAGGATTTGGACTGCTACACGACCGTTGCTCAGCTGTGCCCGTTTGAAAAGCCAG
CAACTCACTGCCCAAGAATCCATTGTCCGGCACACTGCAAAGACGAACCTTCCTACTGGGCTCCGGTG
TTTGGAACCAACATCTATGCAGATACCTCAAGCATCTGCAAGACAGCTGTGCACGCGGGAGTCATCAG
CAACGAGAGTGGGGGTGACGTGGACGTGATGCCCGTGGATAAAAAGAAGACCTACGTGGGCTCGCTCA
GGAATGGAGTTCAGTCTGAAAGCCTGGGGACTCCTCGGGATGGAAAGGCCTTCCGGATCTTTGCTGTC
AGGCAGTGAATTTCCAGCACCAGGGGAGAAGGGGCGTCTTCAGGAGGGCTTCGGGGTTTTGCTTTTAT
TTTTATTTTGTCATTGCGGGGTATATGGAGAGTCAGGAAACTTCCTTTGACTGATGTTCAGTGTCCAT
CACTTTGTGGCCTGTGGGTGAGGTGACATCTCATCCCCTCACTGAAGCAACAGCATCCCAAGGTGCTC
AGCCGGACTCCCTGGTGCCTGATCCTGCTGGGGCCTGGGGGTCTCCATCTGGACGTCCTCTCTCCTTT
AGAGATCTGAGCTGTCTCTTAAAGGGGACAGTTGCCCAAAATGTTCCTTGCTATGTGTTCTTCTGTTG
GTGGAGGAAGTTGATTTCAACCCCCCTGCCAAAAGAACAAACCATTTGAAGCTCACAATTGTGAAGCA
TTCACGGCGTCGGAAGAGGCCTTTTGAGCAAGCGCCAATGAGTTTCAGGAATGAAGTAGAAGGTAGTT
ATTTAAAAATAAAAAACACAGTCCGTCCCTACCAATAGAGGAAAATGGTTTTAATGTTTGCTGGTCAG
ACAGACAAATGGGCTAGAGTAAGAAGGC

| | | | |
|---|---|---|---|
| NOV6j, CG50391-07 | SEQ ID NO: 100 | 497 aa | MW at 55905.2kD |
| Protein Sequence | | | |

[sequence omitted]

| | | |
|---|---|---|
| NOV6k, CG50391-11 | SEQ ID NO: 101 | 1612 bp |
| DNA Sequence | ORF Start: ATG at 31 | ORF Stop: TGA at 1522 |

GAGTCCCATAGTTGCTGCAGGAGTGGAGCCATGAGCTGCGTCCTGGGTGGTGTCATCCCCTTGGGGCT
GCTGTTCCTGGTCTGCGGATCCCAAGGCTACCTCCTGCCCAACGTCACTCTCTTAGAGGAGCTGCTCA
GCAAATACCAGCACAACGAGTCTCACTCCCGGGTCCGCAGAGCCATCCCCAGGGAGGACAAGGAGGAG
ATCCTCATGCTGCACAACAAGCTTCGGGGCCAGGTGCAGCCTCAGGCCTCCAACATGGAGTACATGAC
CTGGGATGACGAACTGGAGAAGTCTGCTGCAGCGTGGGCCAGTCAGTGCATCTGGGAGCACGGGCCCA
CCAGTCTGCTGGTGTCCATCGGGCAGAACCTGGGCGCTCACTGGGGCAGGTATCGCTCTCCGGGGTTC
CATGTGCAGTCCTGGTATGACGAGGTGAAGGACTACACCTACCCCTACCCGAGCGAGTGCAACCCCTG
GTGTCCAGAGAGGTGCTCGGGGCCCATGTGCACGCACTACACACAGATAGTTTGGGCCACCACCAACA
AGATCGGTTGTGCTGTGAACACCTGCCGGAAGATGACTGTCTGGGGAGAAGTTTGGGAGAACGCGGTC
TACTTTGTCTGCAATTATTCTCCAAAGGGGAACTGGATTGGAGAAGCCCCCTACAAGAATGGCCGGCC
CTGCTCTGAGTGCCCACCCAGCTATGGAGGCAGCTGCAGGAACAACTTGTGTTACCGAGAAGAAACCT
ACACTCCAAAACCTGAAACGGACGAGATGAATGAGGTGGGAACGGCTCCCATTCCTGAAGAAAACCAT
GTTTGGCTCCAACCGAGGGTGATGAGACCCACCAAGCCCAAGAAAACCTCTGCGGTCAACTACATGAC
CCAAGTCGTCAGATGTGACACCAAGATGAAGGACAGGTGCAAAGGGTCCACGTGTAACAGGTACCAGT
GCCCAGCAGGCTGCCTGAACCACAAGGCGAAGATCTTTGGAACTCTGTTCTATGAAAGCTCGTCTAGC
ATATGCCGCGCCGCCATCCACTACGGGATCCTGGATGACAAGGGAGGCCTGGTGGATATCACCAGGAA
CGGGAAGGTCCCCTTCTTCGTGAAGTCTGAGAGACACGGCGTGCAGTCCCTCAGCAAATACAAACCTT
CCAGCTCATTCATGGTGTCAAAAGTGAAAGTGCAGGATTTGGACTGCTACACGACCGTTGCTCAGCTG
TGCCCGTTTGAAAAGCCAGCAACTCACTGCCCAAGAATCCATTGTCCGGCACACTGCAAAGACGAACC
TTCCTACTGGGCTCCGGTGTTTGGAACCAACATCTATGCAGATACCTCAAGCATCTGCAAGACAGCCG
TGCACGCGGGAGTCATCAGCAACGAGAGTGGGGGTGACGTGGACGTGATGCCCGTGGATAAAAAGAAG
ACCTACGTGGGCTCGCTCAGGAATGGAGTTCAGTCTGAAAGCCTGGGGACTCCTCGGGATGGAAAGGC
CTTCCGGATCTTTGCTGTCAGGCAGTGAATTTCCAGCACCAGGGGAGAAGGGGCGTCTTCAGGAGGGC
TTCGGGGTTTTGCTTTTATTTTTATTTTGTCATTGCGGGGTATAGGAG

| | | | |
|---|---|---|---|
| NOV6k, CG50391-11 | SEQ ID NO: 102 | 497 aa | MW at 55847.2kD |
| Protein Sequence | | | |

MSCVLGGVIPLGLLFLVCGSQGYLLPNVTLLEELLSKYQHNESHSRVRRAIPREDKEEILMLHNKLRG
QVQPQASNMEYMTWDDELEKSAAAWASQCIWEHGPTSLLVSIGQNLGAHWGRYRSPGFHVQSWYDEVK
DYTYPYPSECNPWCPERCSGPMCTHYTQIVWATTNKIGCAVNTCRKMTVWGEVWENAVYFVCNYSPKG
NWIGEAPYKNGRPCSECPPSYGGSCRNNLCYREETYTPKPETDEMNEVGTAPIPEENHVWLQPRVMRP
TKPKKTSAVNYMTQVVRCDTKMKDRCKGSTCNRYQCPAGCLNHKAKIFGTLFYESSSSICRAATHYGI
LDDKGGLVDITRNGKVPFFVKSERHGVQSLSKYKPSSSFMVSKVKVQDLDCYTTVAQLCPFEKPATHC
PRIHCPAHCKDEPSYWAPVFGTNIYADTSSICKTAVHAGVISNESGGDVDVMPVDKKKTYVGSLRNGV
QSESLGTPRDGKAFRIFAVRQ

| | | |
|---|---|---|
| NOV6l, SNP13376336 of | SEQ ID NO: 103 | 2268 bp |
| CG50391-08, DNA Sequence | ORF Start: ATG at 206 | ORF Stop: TGA at 1565 |
| | SNP Pos: 393 | SNP Change: A to G |

CTCTGACTGCTCCTATTGAGCTGTCTGCTCGCTGTGCCCGCTGTGCCTGCTGTGCCCGCGCTGTCGCC
GCTGCTACCGCGTCTACTGGACGCGGGAGACGCCAGCGAGCTGGTGATTGGAGCCCTGCGGAGAGCTC
AAGCGCCCAGCTCTGCCCGAGGAGCCCAGGCTGCCCCGTGAGTCCCATAGTTGCTGCAGGAGTGGAGC
CATGAGCTGCGTCCTGGGTGGTGTCATCCCCTTGGGGCTGCTGTTCCTGGTCTGCGGATCCCAAGGCT
ACCTCCTGCCCAACGTCACTCTCTTAGAGGAGCTGCTCAGCAAATACCAGCACAACGAGTCTCACTCC
CGGGTCCGCAGAGCCATCCCCAGGGAGGACAAGGAGGAGATCCTCATGCTGCGCAACAAGCTTCGGGG
CCAGGTGCAGCCTCAGGCCTCCAACATGGAGTACATGACCTGGGATGACGAACTGGAGAAGTCTGCTG
CAGCGTGGGCCAGTCAGTGCATCTGGGAGCACGGGCCCACCAGTCTGCTGGTGTCCATCGGGCAGAAC
CTGGGCGCTCACTGGGGCAGAATAGTTTGGGTCACCACCAACAAGATCGGTTGTGCTGTGAACACCTG
CCGGAAGATGACTGTCTGGGGAGAAGTTTGGGAGAACGCGGTCTACTTTGTCTGCAATTATTCTCCAA
AGGGGAACTGGATTGGAGAAGCCCCCTACAAGAATGGCCGGCCCTGCTCTGAGTGCCCACCCAGCTAT
GGAGGCAGCTGCAGGAACAACTTGTGTTACCGAGAAGAAACCTACACTCCAAAACCTGAAACGGACGA
GATGAATGAGGTGGAAACGGCTCCCATTCCTGAAGAAAACCATGTTTGGCTCCAACCGAGGGTGATGA
GACCCACCAAGCCCAAGAAAACCTCTGCGGTCAACTACATGACCCAAGTCGTCAGATGTGACACCAAG
ATGAAGGACAGGTGCAAAGGGTCCACGTGTAACAGGTACCAGTGCCCAGCAGGCTGCCTGAACCACAA
GGCGAAGATCTTTGGAAGTCTGTTCTATGAAAGCTCGTCTAGCATATGCCGCGCCGCCATCCACTACG
GGATCCTGGATGACAAGGGAGGCCTGGTGGATATCACCAGGAACGGGAAGGTCCCCTTCTTCGTGAAG
TCTGAGAGACACGGCGTGCAGTCCCTCAGCAAATACAAACCTTCCAGCTCATTCATGGTGTCAAAAGT
GAAAGTGCAGGATTTGGACTGCTACACGACCGTTGCTCAGCTGTGCCCGTTTGAAAAGCCAGCAACTC
ACTGCCCAAGAATCCATTGTCCGGCACACTGCAAAGACGAACCTTCCTACTGGGCTCCGGTGTTTGGA
ACCAACATCTATGCAGATACCTCAAGCATCTGCAAGACAGCCGTGCACGCGGGAGTCATCAGCAACGA
GAGTGGGGGTGACGTGGACGTGATGCCCGTGGATAAAAAGAAGACCTACGTGGGCTCGCTCAGGAATG
GAGTTCAGTCTGAAAGCCTGGGGACTCCTCGGGATGGAAAGGCCTTCCGGATCTTTGCTGTCAGGCAG
TGAATTTCCAGCACCAGGGGAGAAGGGGCGTCTTCAGGAGGGCTTCGGGGTTTTGCTTTTATTTTTAT
TTTGTCATTGCGGGGTATATGGAGAGTCAGGAAACTTCCTTTGACTGATGTTCAGTGTCCATCACTTT
GTGGCCTGTGGGTGAGGTGACATCTCATCCCCTCACTGAAGCAACAGCATCCCAAGGTGCTCAGCCGG
ACTCCCTGGTGCCTGATCCTGCTGGGGCCCGGGGGTCTCCATCTGGACGTCCTCTCTCCTTTAGAGAT
CTGAGCTGTCTCTTAAAGGGGACAGTTGCCCAAAATGTTCCTTGCTATGTGTTCTTCTGTTGGTGGAC
GAAGTTGATTTCAACCTCCCTGCCAAAAGAACAAACCATTTGAAGCTCACAATTGTGAAGCATTCACG
GCGTCGGAAGAGGCCTTTTGAGCAAGCGCCAATGAGTTTCAGGAATGAAGTAGAAGGTAGTTATTTAA
AAATAAAAAACACAGTCCGTCCCTACCAATAGAGGAAAATGGTTTTAATGTTTGCTGGTCAGACAGAC
AAATGGGCTAGAGTAAGAGGGCTGCGGGTATGAGAGACCCCGGCTCCGCCCTGGCACGTGTCCTTGCT
GGCGGCCCGCCACAGGCCCCCTTCAATGGCCGCATTCAGGATGGCTCTATACACAGCAGTGCTGGTTT
ATGTAAAGTTCAGCAGTCACTTCA

| | | | |
|---|---|---|---|
| NOV6l, SNP13376336 of | SEQ ID NO: 104 | 453 aa | MW at 50660.5kD |
| CG50391-08, Protein | SNP Pos: 63 | | SNP Change: His to Arg |

MSCVLGGVIPLGLLFLVCGSQGYLLPNVTLLEELLSKYQHNESHSRVRRAIPREDKEEILMLRNKLRG
QVQPQASNMEYMTWDDELEKSAAAWASQCIWEHGPTSLLVSIGQNLGAHWGRIVWVTTNKIGCAVNTC
RKMTVWGEVWENAVYFVCNYSPKGNWIGEAPYKNGRPCSECPPSYGGSCRNNLCYREETYTPKPETDE
MNEVETAPIPEENHVWLQPRVMRPTKPKKTSAVNYMTQVVRCDTKMKDRCKGSTCNRYQCPAGCLNHK
AKIFGSLFYESSSSICRAAIHYGILDDKGGLVDITRNGKVPFFVKSERHGVQSLSKYKPSSSFMVSKV
KVQDLDCYTTVAQLCPFEKPATHCPRIHCPAHCKDEPSYWAPVFGTNIYADTSSICKTAVHAGVISNE
SGGDVDVMPVDKKKTYVGSLRNGVQSESLGTPRDGKAFRIFAVRQ

| | | |
|---|---|---|
| NOV6m, SNP13376335 of | SEQ ID NO: 105 | 2268 bp |
| CG50391-08, DNA Sequence | ORF Start: ATG at 206 | ORF Stop: TGA at 1565 |
| | SNP Pos: 477 | SNP Change: C to T |

CTCTGACTGCTCCTATTGAGCTGTCTGCTCGCTGTGCCCGCTGTGCCTGCTGTGCCCGCGCTGTCGCC
GCTGCTACCGCGTCTACTGGACGCGGGAGACGCCAGCGAGCTGGTGATTGGAGCCCTGCGGAGAGCTC
AAGCGCCCAGCTCTGCCCGAGGAGCCCAGGCTGCCCCGTGAGTCCCATAGTTGCTGCAGGAGTGGAGC
CATGAGCTGCGTCCTGGGTGGTGTCATCCCCTTGGGGCTGCTGTTCCTGGTCTGCGGATCCCAAGGCT
ACCTCCTGCCCAACGTCACTCTCTTAGAGGAGCTGCTCAGCAAATACCAGCACAACGAGTCTCACTCC
CGGGTCCGCAGAGCCATCCCCAGGGAGGACAAGGAGGAGATCCTCATGCTGCACAACAAGCTTCGGGG
CCAGGTGCAGCCTCAGGCCTCCAACATGGAGTACATGACCTGGGATGACGAACTGGAGAAGTCTGCTG
TAGCGTGGGCCAGTCAGTGCATCTGGGAGCACGGGCCCACCAGTCTGCTGGTGTCCATCGGGCAGAAC
CTGGGCGCTCACTGGGGCAGAATAGTTTGGGTCACCACCAACAAGATCGGTTGTGCTGTGAACACCTG
CCGGAAGATGACTGTCTGGGGAGAAGTTTGGGAGAACGCGGTCTACTTTGTCTGCAATTATTCTCCAA
AGGGGAACTGGATTGGAGAAGCCCCCTACAAGAATGGCCGGCCCTGCTCTGAGTGCCCACCCAGCTAT
GGAGGCAGCTGCAGGAACAACTTGTGTTACCGAGAAGAAACCTACACTCCAAAACCTGAAACGGACGA
GATGAATGAGGTGGAAACGGCTCCCATTCCTGAAGAAAACCATGTTTGGCTCCAACCGAGGGTGATGA
GACCCACCAAGCCCAAGAAAACCTCTGCGGTCAACTACATGACCCAAGTCGTCAGATGTGACACCAAG
ATGAAGGACAGGTGCAAAGGGTCCACGTGTAACAGGTACCAGTGCCCAGCAGGCTGCCTGAACCACAA
GGCGAAGATCTTTGGAAGTCTGTTCTATGAAAGCTCGTCTAGCATATGCCGCGCCGCCATCCACTACG
GGATCCTGGATGACAAGGGAGGCCTGGTGGATATCACCAGGAACGGGAAGGTCCCCTTCTTCGTGAAG
TCTGAGAGACACGGCGTGCAGTCCCTCAGCAAATACAAACCTTCCAGCTCATTCATGGTGTCAAAAGT
GAAAGTGCAGGATTTGGACTGCTACACGACCGTTGCTCAGCTGTGCCCGTTTGAAAAGCCAGCAACTC
ACTGCCCAAGAATCCATTGTCCGGCACACTGCAAAGACGAACCTTCCTACTGGGCTCCGGTGTTTGGA
ACCAACATCTATGCAGATACCTCAAGCATCTGCAAGACAGCCGTGCACGCGGGAGTCATCAGCAACGA
GAGTGGGGGTGACGTGGACGTGATGCCCGTGGATAAAAAGAAGACCTACGTGGGCTCGCTCAGGAATG
GAGTTCAGTCTGAAAGCCTGGGGACTCCTCGGGATGGAAAGGCCTTCCGGATCTTTGCTGTCAGGCAG
TGAATTTCCAGCACCAGGGGAGAAGGGGCGTCTTCAGGAGGGCTTCGGGGTTTTGCTTTTATTTTTAT
TTTGTCATTGCGGGGTATATGGAGAGTCAGGAAACTTCCTTTGACTGATGTTCAGTGTCCATCACTTT
GTGGCCTGTGGGTGAGGTGACATCTCATCCCCTCACTGAAGCAACAGCATCCCAAGGTGCTCAGCCGG
ACTCCCTGGTGCCTGATCCTGCTGGGGCCCGGGGGTCTCCATCTGGACGTCCTCTCTCCTTTAGAGAT
CTGAGCTGTCTCTTAAAGGGGACAGTTGCCCAAAATGTTCCTTGCTATGTGTTCTTCTGTTGGTGGAG
GAAGTTGATTTCAACCTCCCTGCCAAAAGAACAAACCATTTGAAGCTCACAATTGTGAAGCATTCACG
GCGTCGGAAGAGGCCTTTTGAGCAAGCGCCAATGAGTTTCAGGAATGAAGTAGAAGGTAGTTATTTAA
AAATAAAAAACACAGTCCGTCCCTACCAATAGAGGAAAATGGTTTTAATGTTTGCTGGTCAGACAGAC
AAATGGGCTAGAGTAAGAGGGCTGCGGGTATGAGAGACCCCGGCTCCGCCCTGGCACGTGTCCTTGCT
GGCGGCCCGCCACAGGCCCCCTTCAATGGCCGCATTCAGGATGGCTCTATACACAGCAGTGCTGGTTT
ATGTAAAGTTCAGCAGTCACTTCA

| | | | |
|---|---|---|---|
| NOV6m, SNP13376335 of | SEQ ID NO: 106 | 453 aa | MW at 50669.5kD |
| CG50391-08, Protein | SNP Pos: 91 | | SNP Change: Ala to Val |
| Sequence | | | |

MSCVLGGVIPLGLLFLVCGSQGYLLPNVTLLEELLSKYQHNESHSRVRRAIPREDKEEILMLHNKLRG
QVQPQASNMEYMTWDDELEKSAVAWASQCIWEHGPTSLLVSIGQNLGAHWGRIVWVTTNKIGCAVNTC
RKMTVWGEVWENAVYFVCNYSPKGNWIGEAPYKNGRPCSECPPSYGGSCRNNLCYREETYTPKPETDE
MNEVETAPIPEENHVWLQPRVMRPTKPKKTSAVNYMTQVVRCDTKMKDRCKGSTCNRYQCPAGCLNHK
AKIFGSLFYESSSSICRAAIHYGILDDKGGLVDITPNGKVPFFVKSERHGVQSLSKYKPSSSFMVSKV
KVQDLDCYTTVAQLCPFEKPATHCPRIHCPAHCKDEPSYWAPVFGTNIYADTSSICKTAVHAGVISNE
SGGDVDVMPVDKKKTYVGSLRNGVQSESLGTPRDGKAFRIFAVRQ

| | | |
|---|---|---|
| NOV6n, SNP13376334 of | SEQ ID NO: 107 | 2268 bp |
| CG50391-08, DNA Sequence | ORF Start: ATG at 206 | ORF Stop: TGA at 1565 |
| | SNP Pos: 798 | SNP Change: C to T |

CTCTGACTGCTCCTATTGAGCTGTCTGCTCGCTGTGCCCGCTGTGCCTGCTGTGCCCGCGCTGTCGCC
GCTGCTACCGCGTCTACTGGACGCGGGAGACGCCAGCGAGCTGGTGATTGGAGCCCTGCGGAGAGCTC
AAGCGCCCAGCTCTGCCCGAGGAGCCCAGGCTGCCCCGTGAGTCCCATAGTTGCTGCAGGAGTGGAGC
CATGAGCTGCGTCCTGGGTGGTGTCATCCCCTTGGGGCTGCTGTTCCTGGTCTGCGGATCCCAAGGCT
ACCTCCTGCCCAACGTCACTCTCTTAGAGGAGCTGCTCAGCAAATACCAGCACAACGAGTCTCACTCC
CGGGTCCGCAGAGCCATCCCCAGGGAGGACAAGGAGGAGATCCTCATGCTGCACAACAAGCTTCGGGG
CCAGGTGCAGCCTCAGGCCTCCAACATGGAGTACATGACCTGGGATGACGAACTGGAGAAGTCTGCTG
CAGCGTGGGCCAGTCAGTGCATCTGGGAGCACGGGCCCACCAGTCTGCTGGTGTCCATCGGGCAGAAC
CTGGGCGCTCACTGGGGCAGAATAGTTTGGGTCACCACCAACAAGATCGGTTGTGCTGTGAACACCTG
CCGGAAGATGACTGTCTGGGGAGAAGTTTGGGAGAACGCGGTCTACTTTGTCTGCAATTATTCTCCAA
AGGGGAACTGGATTGGAGAAGCCCCCTACAAGAATGGCCGGCCCTGCTCTGAGTGCCCACCCAGCTAT
GGAGGCAGCTGCAGGAACAACTTGTGTTACCGAGAAGAAACCTACACTCTAAAACCTGAAACGGACGA
GATGAATGAGGTGGAAACGGCTCCCATTCCTGAAGAAAACCATGTTTGGCTCCAACCGAGGGTGATGA
GACCCACCAAGCCCAAGAAAACCTCTGCGGTCAACTACATGACCCAAGTCGTCAGATGTGACACCAAG
ATGAAGGACAGGTGCAAAGGGTCCACGTGTAACAGGTACCAGTGCCCAGCAGGCTGCCTGAACCACAA
GGCGAAGATCTTTGGAAGTCTGTTCTATGAAAGCTCGTCTAGCATATGCCGCGCCGCCATCCACTACG
GGATCCTGGATGACAAGGGAGGCCTGGTGGATATCACCAGGAACGGGAAGGTCCCCTTCTTCGTGAAG
TCTGAGAGACACGGCGTGCAGTCCCTCAGCAAATACAAACCTTCCAGCTCATTCATGGTGTCAAAAGT
GAAAGTGCAGGATTTGGACTGCTACACGACCGTTGCTCAGCTGTGCCCGTTTGAAAAGCCAGCAACTC
ACTGCCCAAGAATCCATTGTCCGGCACACTGCAAAGACGAACCTTCCTACTGGGCTCCGGTGTTTGGA
ACCAACATCTATGCAGATACCTCAAGCATCTGCAAGACAGCCGTGCACGCGGGAGTCATCAGCAACGA
GAGTGGGGGTGACGTGGACGTGATGCCCGTGGATAAAAAGAAGACCTACGTGGGCTCGCTCAGGAATG
GAGTTCAGTCTGAAAGCCTGGGGACTCCTCGGGATGGAAAGGCCTTCCGGATCTTTGCTGTCAGGCAG
TGAATTTCCAGCACCAGGGGAGAAGGGGCGTCTTCAGGAGGGCTTCGGGGTTTTGCTTTTATTTTTAT
TTTGTCATTGCGGGGTATATGGAGAGTCAGGAAACTTCCTTTGACTGATGTTCAGTGTCCATCACTTT
GTGGCCTGTGGGTGAGGTGACATCTCATCCCCTCACTGAAGCAACAGCATCCCAAGGTGCTCAGCCGG
ACTCCCTGGTGCCTGATCCTGCTGGGGCCCGGGGGTCTCCATCTGGACGTCCTCTCTCCTTTAGAGAT
CTGAGCTGTCTCTTAAAGGGGACAGTTGCCCAAAATGTTCCTTGCTATGTGTTCTTCTGTTGGTGGAG
GAAGTTGATTTCAACCTCCCTGCCAAAAGAACAAACCATTTGAAGCTCACAATTGTGAAGCATTCACG
GCGTCGGAAGAGGCCTTTTGAGCAAGCGCCAATGAGTTTCAGGAATGAAGTAGAAGGTAGTTATTTAA
AAATAAAAAACACAGTCCGTCCCTACCAATAGAGGAAAATGGTTTTAATGTTTGCTGGTCAGACAGAC
AAATGGGCTAGAGTAAGAGGGCTGCGGGTATGAGAGACCCCGGCTCCGCCCTGGCACGTGTCCTTGCT
GGCGGCCCGCCACAGGCCCCCTTCAATGGCCGCATTCAGGATGGCTCTATACACAGCAGTGCTGGTTT
ATGTAAAGTTCAGCAGTCACTTCA

| | | | |
|---|---|---|---|
| NOV6n, SNP13376334 of | SEQ ID NO: 108 | 453 aa | MW at 50657.5kD |
| CG50391-08, Protein | SNP Pos: 198 | SNP Change: Pro to Leu | |
| Sequence | | | |

MSCVLGGVIPLGLLFLVCGSQGYLLPNVTLLEELLSKYQHNESHSRVRRAIPREDKEEILMLHNKLRG
QVQPQASNMEYMTWDDELEKSAAAWASQCIWEHGPTSLLVSIGQNLGAHWGRIVWVTTNKIGCAVNTC
RKMTVWGEVWENAVYFVCNYSPKGNWIGEAPYKNGRPCSECPPSYGGSCRNNLCYREETYTLKPETDE
MNEVETAPIPEENHVWLQPRVMRPTKPKKTSAVNYMTQVVRCDTKMKDRCKGSTCNRYQCPAGCLNHK
AKIFGSLFYESSSSICRAAIHYGILDDKGGLVDITRNGKVPFFVKSERHGVQSLSKYKPSSSFMVSKV
KVQDLDCYTTVAQLCPFEKPATHCPRIHCPAHCKDEPSYWAPVFGTNIYADTSSICKTAVHAGVISNE
SGGDVDVMPVDKKKTYVGSLRNGVQSESLGTPRDGKAFRIFAVRQ

| | | |
|---|---|---|
| NOV6o, SNP13376333 of | SEQ ID NO: 109 | 2268 bp |
| CG50391-08, DNA Sequence | ORF Start: ATG at 206 | ORF Stop: TGA at 1565 |
| | SNP Pos: 816 | SNP Change: A to G |

CTCTGACTGCTCCTATTGAGCTGTCTGCTCGCTGTGCCCGCTGTGCCTGCTGTGCCCGCGCTGTCGCC
GCTGCTACCGCGTCTACTGGACGCGGGAGACGCCAGCGAGCTGGTGATTGGAGCCCTGCGGAGAGCTC
AAGCGCCCAGCTCTGCCCGAGGAGCCCAGGCTGCCCCGTGAGTCCCATAGTTGCTGCAGGAGTGGAGC
CATGAGCTGCGTCCTGGGTGGTGTCATCCCCTTGGGGCTGCTGTTCCTGGTCTGCGGATCCCAAGGCT
ACCTCCTGCCCAACGTCACTCTCTTAGAGGAGCTGCTCAGCAAATACCAGCACAACGAGTCTCACTCC
CGGGTCCGCAGAGCCATCCCCAGGGAGGACAAGGAGGAGATCCTCATGCTGCACAACAAGCTTCGGGG
CCAGGTGCAGCCTCAGGCCTCCAACATGGAGTACATGACCTGGGATGACGAACTGGAGAAGTCTGCTG
CAGCGTGGGCCAGTCAGTGCATCTGGGAGCACGGGCCCACCAGTCTGCTGGTGTCCATCGGGCAGAAC
CTGGGCGCTCACTGGGGCAGAATAGTTTGGGTCACCACCAACAAGATCGGTTGTGCTGTGAACACCTG
CCGGAAGATGACTGTCTGGGGAGAAGTTTGGGAGAACGCGGTCTACTTTGTCTGCAATTATTCTCCAA
AGGGGAACTGGATTGGAGAAGCCCCCTACAAGAATGGCCGGCCCTGCTCTGAGTGCCCACCCAGCTAT
GGAGGCAGCTGCAGGAACAACTTGTGTTACCGAGAAGAAACCTACACTCCAAAACCTGAAACGGACGG
GATGAATGAGGTGGAAACGGCTCCCATTCCTGAAGAAAACCATGTTTGGCTCCAACCGAGGGTGATGA
GACCCACCAAGCCCAAGAAAACCTCTGCGGTCAACTACATGACCCAAGTCGTCAGATGTGACACCAAG
ATGAAGGACAGGTGCAAAGGGTCCACGTGTAACAGGTACCAGTGCCCAGCAGGCTGCCTGAACCACAA
GGCGAAGATCTTTGGAAGTCTGTTCTATGAAAGCTCGTCTAGCATATGCCGCGCCGCCATCCACTACG
GGATCCTGGATGACAAGGGAGGCCTGGTGGATATCACCAGGAACGGGAAGGTCCCCTTCTTCGTGAAG
TCTGAGAGACACGGCGTGCAGTCCCTCAGCA~ATACAAACCTTCCAGCTCATTCATGGTGTCAAAAGT
GAAAGTGCAGGATTTGGACTGCTACACGACCGTTGCTCAGCTGTGCCCGTTTGAAAAGCCAGCAACTC
ACTGCCCAAGAATCCATTGTCCGGCACACTGCAAAGACGAACCTTCCTACTGGGCTCCGGTGTTTGGA
ACCAACATCTATGCAGATACCTCAAGCATCTGCAAGACAGCCGTGCACGCGGGAGTCATCAGCAACGA
GAGTGGGGGTGACGTGGACGTGATGCCCGTGGATAAAAAGAAGACCTACGTGGGCTCGCTCAGGAATG
GAGTTCAGTCTGAAAGCCTGGGGACTCCTCGGGATGGAAAGGCCTTCCGGATCTTTGCTGTCAGGCAG
TGAATTTCCAGCACCAGGGGAGAAGGGGCGTCTTCAGGAGGGCTTCGGGGTTTTGCTTTTATTTTTAT
TTTGTCATTGCGGGGTATATGGAGAGTCAGGAAACTTCCTTTGACTGATGTTCAGTGTCCATCACTTT
GTGGCCTGTGGGTGAGGTGACATCTCATCCCCTCACTGAAGCAACAGCATCCCAAGGTGCTCAGCCGG
ACTCCCTGGTGCCTGATCCTGCTGGGGCCCGGGGGTCTCCATCTGGACGTCCTCTCTCCTTTAGAGAT
CTGAGCTGTCTCTTAAAGGGGACAGTTGCCCAAAATGTTCCTTGCTATGTGTTCTTCTGTTGGTGGAG
GAAGTTGATTTCAACCTCCCTGCCAAAAGAACAAACCATTTGAAGCTCACAATTGTGAAGCATTCACG
GCGTCGGAAGAGGCCTTTTGAGCAAGCGCCAATGAGTTTCAGGAATGAAGTAGAAGGTAGTTATTTAA
AAATAAAAAACACAGTCCGTCCCTACCAATAGAGGAAAATGGTTTTAATGTTTGCTGGTCAGACAGAC
AAATGGGCTAGAGTAAGAGGGCTGCGGGTATGAGAGACCCCGGCTCCGCCCTGGCACGTGTCCTTGCT
GGCGGCCCGCCACAGGCCCCCTTCAATGGCCGCATTCAGGATGGCTCTATACACAGCAGTGCTGGTTT
ATGTAAAGTTCAGCAGTCACTTCA

| | | | |
|---|---|---|---|
| NOV6o, SNP13376333 of | SEQ ID NO: 110 | 453 aa | MW at 50569.4kD |
| CG50391-08, Protein | SNP Pos: 204 | | SNP Change: Glu to Gly |
| Sequence | | | |

MSCVLGGVIPLGLLFLVCGSQGYLLPNVTLLEELLSKYQHNESHSRVRPAIPREDKEEILMLHNKLRG
QVQPQASNNEYMTWDDELEKSAAAWASQCIWEHGPTSLLVSIGQNLGAHWGRIVWVTTNKIGCAVNTC
RKMTVWGEVWENAVYFVCNYSPKGNWIGEAPYKNGRPCSECPPSYGGSCRNNLCYREETYTPKPETDG
MNEVETAPIPEENHVWLQPRVMRPTKPKKTSAVNYMTQVVRCDTKMKDRCKGSTCNRYQCPAGCLNHK
AKIFGSLFYESSSSICRAAIHYGILDDKGGLVDITRNGKVPFFVKSERHGVQSLSKYKPSSSFMVSKV
KVQDLDCYTTVAQLCPFEKPATHCPRIHCPAHCKDEPSYWAPVFGTNIYADTSSICKTAVHAGVISNE
SGGDVDVMPVDKKKTYVGSLRNGVQSESLGTPRDGKAFRIFAVRQ

| | | |
|---|---|---|
| NOV6p, SNP13382488 of | SEQ ID NO: 111 | 2268 bp |
| CG50391-08, DNA Sequence | ORF Start: ATG at 206 | ORF Stop: TGA at 1565 |
| | SNP Pos: 1402 | SNP Change: C to T |

CTCTGACTGCTCCTATTGAGCTGTCTGCTCGCTGTGCCCGCTGTGCCTGCTGTGCCCGCGCTGTCGCC
GCTGCTACCGCGTCTACTGGACGCGGGAGACGCCAGCGAGCTGGTGATTGGAGCCCTGCGGAGAGCTC
AAGCGCCCAGCTCTGCCCGAGGAGCCCAGGCTGCCCCGTGAGTCCCATAGTTGCTGCAGGAGTGGAGC
CATGAGCTGCGTCCTGGGTGGTGTCATCCCCTTGGGGCTGCTGTTCCTGGTCTGCGGATCCCAAGGCT
ACCTCCTGCCCAACGTCACTCTCTTAGAGGAGCTGCTCAGCAAATACCAGCACAACGAGTCTCACTCC
CGGGTCCGCAGAGCCATCCCCAGGGAGGACAAGGAGGAGATCCTCATGCTGCACAACAAGCTTCGGGG
CCAGGTGCAGCCTCAGGCCTCCAACATGGAGTACATGACCTGGGATGACGAACTGGAGAAGTCTGCTG
CAGCGTGGGCCAGTCAGTGCATCTGGGAGCACGGGCCCACCAGTCTGCTGGTGTCCATCGGGCAGAAC
CTGGGCGCTCACTGGGGCAGAATAGTTTGGGTCACCACCAACAAGATCGGTTGTGCTGTGAACACCTG
CCGGAAGATGACTGTCTGGGGAGAAGTTTGGGAGAACGCGGTCTACTTTGTCTGCAATTATTCTCCAA
AGGGGAACTGGATTGGAGAAGCCCCCTACAAGAATGGCCGGCCCTGCTCTGAGTGCCCACCCAGCTAT
GGAGGCAGCTGCAGGAACAACTTGTGTTACCGAGAAGAAACCTACACTCCAAAACCTGAAACGGACGA
GATGAATGAGGTGGAAACGGCTCCCATTCCTGAAGAAAACCATGTTTGGCTCCAACCGAGGGTGATGA
GACCCACCAAGCCCAAGAAAACCTCTGCGGTCAACTACATGACCCAAGTCGTCAGATGTGACACCAAG
ATGAAGGACAGGTGCAAAGGGTCCACGTGTAACAGGTACCAGTGCCCAGCAGGCTGCCTGAACCACAA
GGCGAAGATCTTTGGAAGTCTGTTCTATGAAAGCTCGTCTAGCATATGCCGCGCCGCCATCCACTACG
GGATCCTGGATGACAAGGGAGGCCTGGTGGATATCACCAGGAACGGGAAGGTCCCCTTCTTCGTGAAG
TCTGAGAGACACGGCGTGCAGTCCCTCAGCAAATACAAACCTTCCAGCTCATTCATGGTGTCAAAAGT
GAAAGTGCAGGATTTGGACTGCTACACGACCGTTGCTCAGCTGTGCCCGTTTGAAAAGCCAGCAACTC
ACTGCCCAAGAATCCATTGTCCGGCACACTGCAAAGACGAACCTTCCTACTGGGCTCCGGTGTTTGGA
ACCAACATCTATGCAGATACCTCAAGCATCTGCAAGACAGCTGTGCACGCGGGAGTCATCAGCAACGA
GAGTGGGGGTGACGTGGACGTGATGCCCGTGGATAAAAAGAAGACCTACGTGGGCTCGCTCAGGAATG
GAGTTCAGTCTGAAAGCCTGGGGACTCCTCGGGATGGAAAGGCCTTCCGGATCTTTGCTGTCAGGCAG
TGAATTTCCAGCACCAGGGGAGAAGGGGCGTCTTCAGGAGGGCTTCGGGGTTTTGCTTTTATTTTTAT
TTTGTCATTGCGGGGTATATGGAGAGTCAGGAAACTTCCTTTGACTGATGTTCAGTGTCCATCACTTT
GTGGCCTGTGGGTGAGGTGACATCTCATCCCCTCACTGAAGCAACAGCATCCCAAGGTGCTCAGCCGC
ACTCCCTGGTGCCTGATCCTGCTGGGGCCCGGGGGTCTCCATCTGGACGTCCTCTCTCCTTTAGAGAT
CTGAGCTGTCTCTTAAAGGGGACAGTTGCCCAAAATGTTCCTTGCTATGTGTTCTTCTGTTGGTGGAG
GAAGTTGATTTCAACCTCCCTGCCAAAAGAACAAACCATTTGAAGCTCACAATTGTGAAGCATTCACG
GCGTCGGAAGAGGCCTTTTGAGCAAGCGCCAATGAGTTTCAGGAATGAAGTAGAAGGTAGTTATTTAA
AAATAAAAAACACAGTCCGTCCCTACCAATAGAGGAAAATGGTTTTAATGTTTGCTGGTCAGACAGAC
AAATGGGCTAGAGTAAGAGGGCTGCGGGTATGAGAGACCCCGGCTCCGCCCTGGCACGTGTCCTTGCT
GGCGGCCCGCCACAGGCCCCCTTCAATGGCCGCATTCAGGATGGCTCTATACACAGCAGTGCTGGTTT
ATGTAAAGTTCAGCAGTCACTTCA

| | | | |
|---|---|---|---|
| NOV6p, SNP13382488 of | SEQ ID NO: 112 | 453 aa | MW at 50641.5kD |
| CG50391-08, Protein | SNP Pos: 399 | | SNP Change: Ala to Ala |
| Sequence | | | |

MSCVLGGVIPLGLLFLVCGSQGYLLPNVTLLEELLSKYQHNESHSRVRPAIPREDKEEILMLHNKLRG
QVQPQASNMEYMTWDDELEKSAAAWASQCIWEHGPTSLLVSIGQNLGAHWGRIVWVTTNKIGCAVNTC
RKMTVWGEVWENAVYFVCNYSPKGNWIGEAPYKNGRPCSECPPSYGGSCRNNLCYREETYTPKPETDE
MNEVETAPIPEENHVWLQPRVMRPTKPKKTSAVNYMTQVVRCDTKMKDRCKGSTCNRYQCPAGCLNHK
AKIFGSLFYESSSSICRAAIHYGILDDKGGLVDITRNGKVPFFVKSERHGVQSLSKYKPSSSFMVSKV
KVQDLDCYTTVAQLCPFEKPATHCPRIHCPAHCKDEPSYWAPVFGTNIYADTSSICKTAVHAGVISNE
SGGDVDVMPVDKKKTYVGSLENGVQSESLGTPPDGKAFRIFAVRQ

[0381] A ClustalW comparison of the above protein sequences yields the following sequence alignment shown in Table 6B.

TABLE 6B
Comparison of the NOV6 protein sequences.

NOV6a ----------------------------------------MSCVLGGVIPLGLLFLVCGS
NOV6b ----------------------------------------MSCVLGGVIPLGLLFLVCGS
NOV6c ----------------------------------------MSCVLGGVIPLGLLFLVCGS
NOV6d ------------------------------------------------------------
NOV6e ----------------------------------------MSCVLGGVIPLGLLFLVCGS
NOV6f ----------------------------------------MSCVLGGVIPLGLLFLVRGS
NOVGg ----------------------------------------MSCVLGGVIPLGLLFLVRGS
NOV6h ----------------------------------------MSCVLGGVIPLGLLFLVRGS
NOV6i ----------------------YLLPNVTLLEELLSKYQHNESHSRVRRAIPREDKEEIL
NOVGj ----------------------------------------MSCVLGGVIPLGLLFLVCGS
NOVGk MSCVLGGVIPLGLLFLVCGSQGYLLPNVTLLEELLSKYQHNESHSRVRRAIPREDKEEIL
NOV6a QGYLLPNVTLLEELLSKYQHNESHSRVRRAIPREDKEEILMLHNKLRGQVQPQAS-----
NOV6b QGYLLPNVTLLEELLSKYQHNESHSRVRRAIPREDKEEILMLHNKLRGQVQPQAS-----
NOV6c QGYLLPNVTLLEELLSKYQHNESHSRVRRAIPREDKEEILMLHNKLRGQVQPQAS-----
NOV6d ------------------------------------------------------M-----
NOV6e QGYLLPNVTLLEELLSKYQHNESHSRVRRAIPREDKEEILMLHNKLRGQVQPQASNMEYM
NOV6f QGYLLPNVTLLEELLSKYQHNESHSRVRRAIPREDKEEILMLHNKLRGQVQPQASNMEYM
NOV6g QGYLLPNVTLLEELLSKYQHNESHSRVRRAIPREDKEEILMLHNKLRGQVQPQAS-----
NOV6h QGYLLPNVTLLEELLSKYQHNESHSRVRRAIPREDKEEILMLHNKLRGQVQPQASNMEYM
NOV6i MLHNKLRGQVQPQASNMEYMTWDDELEKSAAAWASQCIWEHGPTGLLVSIGQNLG-----
NOV6j QGYLLPNVTLLEELLSKYQHNESHSRVRRAIPREDKEEILMLHNKLRGQVQPQASNMEYM
NOV6k MLHNKLRGQVQPQASNMEYMTWDDELEKSAAAWASQCIWEHGPTSLLVSIGQNLG-----
NOV6a ------------------------------------------N--MEYMTWDDELEKSAA
NOV6b -----------------------------------NMEYMYRSPGFHVQSWYDEVKDYTY
NOV6c ------------------------------------------N--MEYMTWDDELEKSAA
NOV6d -----------------------------------TNWGRYRSPGFHVQSWYDEVKDYTY
NOV6e TWDDELEKSAAAWASQCIWEHGPTGLLVSIGQNLGAHWGRYRSPGFHVQSWYDEVKDYTY
NOV6f TWDDELEKSAAAWASQCIWEHGPTGLLVSIGQNLGAHWGRYRSPGFHVQSWYDEVKDYTY
NOV6g ------------------------------------------N--MEYMTWDDELEKSAA
NOVGh TWDDELEKSAAAWASQCIWEHGPTGLLVSIGQNLGAHWGRYRSPGFHVQSWYDEVKDYTY
NOV6i -----------------------------------AHWGRYRSPGFHVQSWYDEVKDYTY
NOV6j TWDDELEKSAAAWASQCIWEHGPTSLLVSIGQNLGAHWGRYRSPGFHVQSWYDEVKDYTY
NOV6k -----------------------------------AHWGRYRSPGFHVQSWYDEVKDYTY
NOV6a AWASQC-----------IWEHG--PTSLLVSIGQNLGAHWGRIV----------------
NOV6b PYPSECNPWCPERCSGPMCTHY---TQIVWATTNKIGCAVNTCRKMTVWGEVWENAVYFV
NOV6c AWASQC-----------IWEHG--PTSLLVSIGQNLGAHWG-------------------
NOV6d PYPSECNPWCPERCSGPMCTHY---TQIVWATTNKIGCAVNTCRKMTVWGEVWENAVYFV
NOV6e PYPSECNPWCPERCSGPMCTHY---TQIVWATTNKIGCAVNTCRKMTVWGEVWENAVYFV
NOV6f PYPSECNPWCPERCSGPMCTHY---TQIVWATTNKIGCAVNTCRKMTVWGEVWENAVYFV
NOV6g AWASQC-----------IWEHG--PTSLLVSIGQNLGAHWGRRYRSPGFHVQSWYDEVKD
NOV6h PYPSECNPWCPERCSGPMCTHYTQVTQIVWATTNKIGCAVNTCRKMTVWGEVWENAVYFV
NOV6i PYPSECNPWCPERCSGPMCTHY---TQIVWATTNKIGCAVNTCRKMTVWGEVWENAVYFV
NOV6j PYPSECNPWCPERCSGPMCTHY---TQIVWATTNKIGCAVNTCRKMTVWGEVWENAVYFV
NOV6k PYPSECNPWCPERCSGPMCTHY---TQIVWATTNKIGCAVNTCRKMTVWGEVWENAVYFV
NOV6a -----------------------------WVTTNKIGCAVNTCRKMTVWGEVWENAVYFV
NOV6b CNYSPK------------------------------------------------------
NOV6c ------------------------------------------------------------
NOV6d CNYSPK------------------------------------------------------
NOV6e CNYSPK------------------------------------------------------
NOV6f CNYSPK------------------------------------------------------
NOV6g YTYPYPSECNPWCPERCSGPMCTHYTQIVWATTNKIGCAVNTCRKMTVWGEVWENAVYFV
NOVGh CNYSPKR-----------------------------------------------------
NOV6i CNYSPK------------------------------------------------------
NOV6j CNYSPK------------------------------------------------------
NOV6k CNYSPK------------------------------------------------------
NOV6a CNYSPKGNWIGEAPYKNGRPCSECPPSYGGSCRNNLCYREETYTPKPETDEMNEVETAPI
NOV6b ------GNWIGEAPYKNGRPCSECPPSYGGSCRNNLCYREETYTPKPETDEMNEVETAPI
NOV6c -----RGNWIGEAPYKNGRPCSECPPSYGGSCRNNLCYREETYTPKPETDEMNEVETAPI
NOV6d ------GNWIGEAPYKNGRPCSECPPSYGGSCRNNLCYREETYTPKPETDEMNEVETAPI
NOV6e ------GNWIGEAPYKNGRPCSQCPPSYGGSCRNNLCYREETYTPKPETDEMNEVETAPI
NOV6f ------GNWIGEAPYKNGRPCSECPPSYGGSCRNNLCYREETYTPKPETDEMNEVETAPI
NOV6g CNYSPKGNWIGEAPYKNGRPCSECPPSYGGSCRNNLCYREETYTPKPETDEMNEVETAPI
NOV6h ------GNWIGEAPYKNGRPCSECPPSYGGSCRNNLCYREETYTPKPETDEMNEVETAPI
NOV6i ------GNWIGEAPYKNGRPCSECPPSYGGSCRNNLCYREETYTPKPETDEMNEVETAPI
NOV6j ------GNWIGEAPYKNGRPCSECPPSYGGSCRNNLCYREETYTPKPETDEMNEVETAPI
NOV6k ------GNWIGEAPYKNGRPCSECPPSYGGSCRNNLCYREETYTPKPETDEMNEVGTAPI
NOV6a PEENHVWLQPRVMRPTKPKXTSAVNYMTQVVRCDTKMKDRCKGSTCNRYQCPAGCLNHKA
NOV6b PEENHVWLQPRVMRPTKPKXTSAVNYMTQVVRCDTKMKDRCKGSTCNRYQCPAGCLNHKA
NOV6c PEENHVWLQPRVMRPTKPKXTSAVNYMTQVVRCDTKMKDRCKGSTCNRYQCPAGCLNHKA
NOV6d PEENHVWLQPRVMRPTKPKXTSAVNYMTQVVRCDTKMKDRCKGSTCNRYQCPAGCLNHKA
NOV6e PEENHVWLQPRVMRPTKPKXTSAVNYMTQVVRCDTKMKDRCKGSTCNRYQCPAGCLNHKA
NOV6f PEENHVWLQPRVMRPTKPKXTSAVNYMTQVVRCDTKMKDRCKGSTCNRYQCPAGCLNHKA
NOV6g PEENHVWLQPRVMRPTKPKXTSAVNYMTQVVRCDTKMKDRCKGSTCNRYQCPAGCLNHKA
NOV6h PEENHVWLQPRVMRPTKPKXTSAVNYMTQVVRCDTKMKDRCKGSTCNRYQCPAGCLNHKA
NOV6i PEENHVWLQPRVMRPTKPKXTSAVNYMTQVVRCDTKMKDRCKGSTCNRYQCPAGCLNHKA
NOV6j PEENHVWLQPRVMRPTKPKXTSAVNYMTQVVRCDTKMKDRCKGSTCNRYQCPAGCLNHKA
NOV6k PEENHVWLQPRVMRPTKPKXTSAVNYMTQVVRCDTKMKDRCKGSTCNRYQCPAGCLNHKA
NOV6a KIFGSLFYESSSSICRAAIHYGILDDKGGLVDITRNGKVPFFVKSERHGVQSLSKYKPSS
NOV6b KIFGTLFYESSSSICRAAIHYGILDDKGGLVDITRNGKVPFFVKSERHGVQSLSKYKPSS
NOV6c KIFGSLFYESSSSICRAAIHYGILDDKGGLVDITRNGKVPFFVKSERHGVQSL-------
NOV6d KIFGTLFYESSSSICRAAIHYGILDDKGGLVDITRNGKVPFFVKSERHGVQSLSKYKPSS
NOV6e KIFGTLFYESSSSICRAAIHYGILDDKGGLVDITRNGKVPFFVKSERHGVQSLSKYKPSS
NOV6f KIFGTLFYESSSSICRAAIHYGILDDKGGLVDITRNGKVPFFVKSERHGVQSLSKYKPSS
NOV6g KIFGSLFYESSSSICRAAIHYGILDDKGGLVDITRNGKVPFFVKSERHGVQSLSKYKPSS
NOV6h KIFGSLFYESSSSICRAAIHYGILDDKGGLVDITRNGKVPFFVKSERHGVQSLSKYKPSS
NOV6i KIFGTLFYESSSSICRAAIHYGILDDKGGLVDITRNGKVPFFVKSERHGVQSLSKYKPSS
NOV6j KIFGSLFYESSSSICRAAIHYGILDDKGGLVDITRNGKVPFFVKSERHGVQSLSKYKPSS
NOV6k KIFGTLFYESSSSICRAAIHYGILDDKGGLVDITRNGKVPFFVKSERHGVQSLSKYKPSS
NOV6a SFMVSKVKVQDLDCYTTVAQLCPFEKPATHCPRIHCPAHCKDEPSYWAPVFGTNIYADTS
NOV6b SFMVSKVKVQDLDCYTTVAQLCPFEKPATHCPRIHCPAHCKDEPSYWAPVFGTNIYADTS
NOV6c --------VQDLDCYTTVAQLCPFEKPATHCPRIHCPAHCKDEPSYWAPVFGTNIYADTS
NOV6d SFMVSKVKVQDLDCYTTVAQLCPFEKPATHCPRIHCPAHCKDEPSYWAPVFGTNIYADTS
NOV6e SFMVSKVKVQDLDCYTTVAQLCPFEKPATHCPRIHCPAHCKDEPSYWAPVFGTNIYADTS
NOV6f SFMVSKVKVQDLDCYTTVAQLCPFEKPATHCPRIHCPAHCKDEPSYWAPVFGTNIYADTS
NOV6g SFMVSKVKVQDLDCYTTVAQLCPFEKPATHCPRIHCPAHCKDEPSYWAPVFGTNIYADTS
NOV6h SFMVSKVKVQDLDCYTTVAQLCPFEKPATHCPRIHCPAHCKDEPSYWAPVFGTNIYADTS
NOV6i SFMVSKVKVQDLDCYTTVAQLCPFEKPATHCPRIHCPAHCKDEPSYWAPVFGTNIYADTS
NOV6j SFMVSKVKVQDLDCYTTVAQLCPFEKPATHCPRIHCPAHCKDEPSYWAPVFGTNIYADTS
NOV6k SFMVSKVKVQDLDCYTTVAQLCPFEKPATHCPRIHCPAHCKDEPSYWAPVFGTNIYADTS
NOV6a SICKTAVHAGVISNESGGDVDVMPVDKKKTYVGSLRNGVQSESLGTPRDGKAFRIFAVRQ
NOV6b SICKTAVHAGVISNESGGDVDVMPVDKKKTYVGSLRNGVQSESLGTPRDGKAFRIFAVRQ
NOV6c SICKTAVHAGVISNESGGDVDVMPVDKKKTYVGSLRNGVQSESLGTPRDGKAFRIFAVRQ
NOV6d SICKTAVHAGVISNESGGDVDVMPVDKKKTYVGSLRNGVQSESLGTPRDGKAFRIFAVRQ
NOV6e SICKTAVHAGVISNESGGDVDVMPVDKKKTYTCPAAARAL--------------------
NOV6f SICKTAVHAGVISNESGGDVDVMPVDKKKTYVGSLRNGVQSESLGTPRDGKAFRIFAVRQ
NOV6g SICKTAVHAGVISNESGGDVDVMPVDKKKTYVGSLRNGVQSESLGTPRDGKAFRIFAVRQ
NOV6h SICKTAVHAGVISNESGGDVDVMPVDKKKTYVGSLRNGVQSESLGTPRDGKAFRIFAVRQ
NOV6i SICKTAVHAGVISNESGGDVDVMPVDKKKTYVGSLRNGVQSESLGTPRDGKAFRIFAVRQ
NOV6j SICKTAVHAGVISNESGGDVDVMPVDKKKTYVGSLRNGVQSESLGTPRDGKAFRIFAVRQ
NOV6k SICKTAVHAGVISNESGGDVDVMPVDKKKTYVGSLRNGVQSESLGTPRDGKAFRIFAVRQ
NOV6a (SEQ ID NO: 82)
NOV6b (SEQ ID NO: 84)
NOV6c (SEQ ID NO: 86)
NOV6d (SEQ ID NO: 88)
NOV6e (SEQ ID NO: 90)
NOV6f (SEQ ID NO: 92)
NOV6g (SEQ ID NO: 94)
NOV6h (SEQ ID NO: 96)
NOV6i (SEQ ID NO: 98)
NOV6j (SEQ ID NO: 100)
NOV6k (SEQ ID NO: 102)

[0382] Further analysis of the NOV6a protein yielded the following properties shown in Table 6C.

TABLE 6C
Protein Sequence Properties NOV6a

| | |
|---|---|
| SignalP analysis: | Cleavage site between residues 23 and 24 |
| PSORT II analysis: | |

| PSG: | a new signal peptide prediction method | |
|---|---|---|
| | N-region: | length 0; pos. chg 0; neg. chg 0 |
| | H-region: | length 31; peak value 10.73 |
| | PSG score: | 6.33 |

| | |
|---|---|
| GvH: | von Heijne's method for signal seq. recognition |
| | GvH score (threshold: −2.1): −0.72 |
| | possible cleavage site: between 22 and 23 |

>>> Seems to have a cleavable signal peptide (1 to 22)

| ALOM: | Klein et al's method for TM region allocation | |
|---|---|---|
| | Init position for calculation: 23 | |
| | Tentative number of TMS(s) for the threshold 0.5: 0 | |
| | number of TMS(s) . . . fixed | |
| | PERIPHERAL | Likelihood = 7.37 (at 106) |

| | ALOM score: 7.37 (number of TMSs: 0) | | | |
|---|---|---|---|---|
| MTOP: | Prediction of membrane topology (Hartmann et al.) | | | |
| | Center position for calculation: 11 | | | |
| | Charge difference: −1.0 C(0.0)-N(1.0) | | | |
| | N >= C: N-terminal side will be inside | | | |
| MITDISC: | discrimination of mitochondrial targeting seq | | | |
| | R content: | 0 | Hyd Moment (75): | 0.40 |
| | Hyd Moment (95): | 3.00 | G content: | 5 |
| | D/E content: | 1 | S/T content: | 3 |

| | |
|---|---|
| | Score: −7.63 |
| Gavel: | prediction of cleavage sites for mitochondrial preseq |
| | cleavage site motif not found |

NUCDISC: discrimination of nuclear localization signals

| | |
|---|---|
| | pat4: KPKK (4) at 230 |
| | pat7: PTKPKKT (4) at 228 |
| | pat7: PVDKKKT (4) at 417 |
| | bipartite: none |
| | content of basic residues: 11.9% |
| | NLS Score: 0.47 |
| KDEL: | ER retention motif in the C-terminus: none |

ER Membrane Retention Signals: none
SKL: peroxisomal targeting signal in the C-terminus: none
PTS2: 2nd peroxisomal targeting signal: none
VAC: possible vacuolar targeting motif: none
RNA-binding motif: none
Actinin-type actin-binding motif:

type 1: none
type 2: none

NMYR: N-myristoylation pattern: none
Prenylation motif: none
memYQRL: transport motif from cell surface to Golgi: none
Tyrosines in the tail: none
Dileucine motif in the tail: none
checking 63 PROSITE DNA binding motifs: none
checking 71 PROSITE ribosomal protein motifs: none
checking 33 PROSITE prokaryotic DNA binding motifs: none

| | |
|---|---|
| NNCN: | Reinhardt's method for Cytoplasmic/Nuclear |
| | discrimination |
| | Prediction: nuclear |
| | Reliability: 55.5 |
| COIL: | Lupas's algorithm to detect coiled-coil regions |
| | total: 0 residues |

Final Results (k = 9/23):

```
52.2%: nuclear
21.7%: extracellular, including cell wall
17.4%: mitochondrial
  4.3%: vacuolar
  4.3%: cytoplasmic
```

>> prediction for CG50391-08 is nuc (k = 23)

[0383] A search of the NOV6a protein against the Geneseq database, a proprietary database that contains sequences published in patents and patent publication, yielded several homologous proteins shown in Table 6D.

TABLE 6D
Geneseq Results for NOV6a

| | | NOV6a | Identities/ | |
|---|---|---|---|---|
| | | Residues/ | Similarities for | |
| Geneseq | Protein/Organism/Length [Patent #, | Match | the Matched | Expect |
| Identifier | Date] | Residues | Region | Value |
| AAU83619 | Human PRO protein, Seq ID No 56 - | 1 . . . 453 | 452/497 (90%) | 0.0 |
| | Homo sapiens, 497 aa. | 1 . . . 497 | 452/497 (90%) | |
| | [WO200208288-A2, 31-JAN-2002] | | | |
| AAO21721 | Human secreted protein SEQ ID No 63 - | 1 . . . 453 | 452/497 (90%) | 0.0 |
| | Homo sapiens, 497 aa. | 1 . . . 497 | 452/497 (90%) | |
| | [WO200238602-A2, 16-MAY-2002] | | | |
| AAB74446 | Human protease-inhibitor like protein - | 1 . . . 453 | 452/497 (90%) | 0.0 |
| | Homo sapiens, 497 aa. | 1 . . . 497 | 452/497 (90%) | |
| | [WO200121651-A2, 29-MAR-2001] | | | |
| AAE10618 | Human novel trypsin inhibitor-like | 1 . . . 453 | 451/498 (90%) | 0.0 |
| | protein, NOV-4d - Homo sapiens, 498 | 1 . . . 498 | 451/498 (90%) | |
| | aa. [WO200162928-A2, 30-AUG-2001] | | | |
| AAE10616 | Human novel trypsin inhibitor-like | 1 . . . 453 | 450/497 (90%) | 0.0 |
| | protein, NOV-4b - Homo sapiens, 497 | 1 . . . 497 | 450/497 (90%) | |
| | aa. [WO200162928-A2, 30-AUG-2001] | | | |

[0384] In a BLAST search of public sequence databases, the NOV6a protein was found to have homology to the proteins shown in the BLASTP data in Table 6E.

TABLE 6E
Public BLASTP Results for NOV6a

| | | NOV6a | Identities/ | |
|---|---|---|---|---|
| Protein | | Residues/ | Similarities for | |
| Accession | | Match | the Matched | Expect |
| Number | Protein/Organism/Length | Residues | Portion | Value |
| Q9H0B8 | Hypothetical protein - Homo | 1 . . . 453 | 451/497 (90%) | 0.0 |
| | sapiens (Human), 497 aa. | 1 . . . 497 | 452/497 (90%) | |
| CAC69820 | Sequence 20 from Patent | 1 . . . 453 | 451/498 (90%) | 0.0 |
| | WO0162928 - Homo sapiens | 1 . . . 498 | 451/498 (90%) | |
| | (Human), 498 aa. | | | |
| CAC69818 | Sequence 16 from Patent | 1 . . . 453 | 450/497 (90%) | 0.0 |
| | WO0162928 - Homo sapiens | 1 . . . 497 | 450/497 (90%) | |
| | (Human), 497 aa. | | | |
| CAC69821 | Sequence 22 from Patent | 1 . . . 453 | 450/501 (89%) | 0.0 |
| | WO0162928 - Homo sapiens | 1 . . . 501 | 450/501 (89%) | |
| | (Human), 501 aa. | | | |
| CAC69817 | Sequence 14 from Patent | 81 . . . 453 | 339/373 (90%) | 0.0 |
| | WO0162928 - Homo sapiens | 16 . . . 383 | 348/373 (92%) | |
| | (Human), 383 aa. | | | |

[0385] PFam analysis predicts that the NOV6a protein contains the domains shown in the Table 6F.

TABLE 6F
Domain Analysis of NOV6a

| | | Identities/ | |
|---|---|---|---|
| | | Similarities | |
| Pfam | NOV6a Match | for the | Expect |
| Domain | Region | Matched Region | Value |
| SCP | 60 . . . 155 | 45/167 (27%) | 7.4e−23 |
| | | 76/167 (46%) | |
| LCCL | 244 . . . 335 | 47/104 (45%) | 6.1e−49 |
| | | 84/104 (81%) | |
| LCCL | 345 . . . 444 | 55/104 (53%) | 1.6e−51 |
| | | 89/104 (86%) | |

### Example 7

[0386] The NOV7 clone was analyzed, and the nucleotide and encoded polypeptide sequences are shown in Table 7A.

TABLE 7A
NOV7 Sequence Analysis

| | | |
|---|---|---|
| NOV7a, CG50426-17 | SEQ ID NO: 113 | 8160 bp |
| DNA Sequence | ORF Start: ATG at 122 | ORF Stop: TAA at 8108 |

GGGAGTTGGAACCAGCATTAGATGAGTTGACAAAAATGCAGTTTCAGGTGGCAAAGTGACAAGTGCCA
AAACTCAGGCCTGACTTTTCTGAAAACATCAGCATTCTGCCATATCTGGAATAATGGATGTAAAGGAC
CGGCGACACCGCTCTTTGACCAGAGGACGCTGTGGCAAAGAGTGTCGCTACACAAGCTCCTCTCTGGA
CAGTGAGGACTGCCGGGTGCCCACACAGAAATCCTACAGCTCCAGTGAGACTCTGAAGGCCTATGACC
ATGACAGCAGGATGCACTATGGAAACCGAGTCACAGACCTCATCCACCGGGAGTCAGATGAGTTTCCT
AGACAAGGAACCAACTTCACCCTTGCCGAACTGGGCATCTGTGAGCCCTCCCCACACCGAAGCGGCTA
CTGCTCCGACATGGGGATCCTTCACCAGGGCTACTCCCTTAGCACAGGGTCTGACGCCGACTCCGACA
CCGAGGGAGGGATGTCTCCAGAACACGCCATCAGACTGTGGGGCAGAGGGATAAAATCCAGGCGCAGT
TCCGGCCTGTCCAGTCGTGAAAACTCGGCCCTTACCCTGACTGACTCTGACAACGAAAACAAATCAGA
TGATGAGAACGGTCGTCCCATTCCACCTACATCCTCGCCTAGTCTCCTCCCATCTGCTCAGCTGCCTA
GCTCCCATAATCCTCCACCAGTTAGCTGCCAGATGCCATTGCTAGACAGCAACACCTCCCATCAAATC
ATGGACACCAACCCTGATGAGGAATTCTCCCCCAATTCATACCTGCTCAGAGCATGCTCAGGGCCCCA
GCAAGCCTCCAGCAGTGGCCCTCCGAACCACCACAGCCAGTCGACTCTGAGGCCCCCTCTCCCACCCC
CTCACAACCACACGCTGTCCCATCACCACTCGTCCGCCAACTCCCTCAACAGGAACTCACTGACCAAT
CGGCGGAGTCAGATCCACGCCCCGGCCCCAGCGCCCAATGACCTGGCCACCACACCAGAGTCCGTTCA
GCTTCAGGACAGCTGGGTGCTAAACAGCAACGTGCCACTGGAGACCCGGCACTTCCTCTTCAAGACCT
CCTCGGGGAGCACACCCTTGTTCAGCAGCTCTTCCCCGGGATACCCTTTGACCTCAGGAACGGTTTAC
ACGCCCCCGCCCCGCCTGCTGCCCAGGAATACTTTCTCCAGGAAGGCTTTCAAGCTGAAGAAGCCCTC
CAAATACTGCAGCTGGAAATGTGCTGCCCTCTCCGCCATTGCCGCGGCCCTCCTCTTGGCTATTTTGC
TGGCGTATTTCATAGTGCCCTGGTCGTTGAAAAACAGCAGCATAGACAGTGGTGAAGCAGAAGTTGGT
CGGCGGGTAACACAAGAAGTCCCACCAGGGGTGTTTTGGAGGTCACAAATTCACATCAGTCAGCCCCA
GTTCTTAAAGTTCAACATCTCCCTCGGGAAGGACGCTCTCTTTGGTGTTTACATAAGAAGAGGACTTC
CACCATCTCATGCCCAGTATGACTTCATGGAACGTCTGGACGGGAAGGAGAAGTGGAGTGTGGTTGAG
TCTCCCAGGGAACGCCGGAGCATACAGACCTTGGTTCAGAATGAAGCCGTGTTTGTGCAGTACCTGGA
TGTGGGCCTGTGGCATCTGGCCTTCTACAATGATGGAAAAGACAAAGAGATGGTTTCCTTCAATACTG
TTGTCCTAGATTCAGTGCAGGACTGTCCACGTAACTGCCATGGGAATGGTGAATGTGTGTCCGGGGTG
TGTCACTGTTTCCCAGGATTTCTAGGAGCAGACTGTGCTAAAGCTGCCTGCCCTGTCCTGTGCAGTGG
GAATGGACAATATTCTAAAGGGACGTGCCAGTGCTACAGCGGCTGGAAAGGTGCAGAGTGCGACGTGC
CCATGAATCAGTGCATCGATCCTTCCTGCGGGGGCCACGGCTCCTGCATTGATGGGAACTGTGTCTGC
TCTGCTGGCTACAAAGGCGAGCACTGTGAGGAAGTTGATTGCTTGGATCCCACCTGCTCCAGCCACGG
AGTCTGTGTGAATGGAGAATGCCTGTGCAGCCCTGGCTGGGGTGGTCTGAACTGTGAGCTGGCGAGGG
TCCAGTGCCCAGACCAGTGCAGTGGGCATGGCACGTACCTGCCTGACACGGGCCTCTGCAGCTGCGAT
CCCAACTGGATGGGTCCCGACTGCTCTGTTGATGGCTGCCCTGACTTGTGCAACGGTAACGGGAGATG
CACACTGGGTCAGAACAGCTGGCAGTGTGTCTGCCAGACCGGCTGGAGAGGGCCCGGATGCAACGTTG
CCATGGAAACTTCCTGTGCTGATAACAAGGATAATGAGGGAGATGGCCTGGTGGATTGTTTGGACCCT
GACTGCTGCCTGCAGTCAGCCTGTCAGAACAGCCTGCTCTGCCGGGGGTCCCGGGACCCACTGGACAT
CATTCAGCAGGGCCAGACGGATTGGCCCGCAGTGAAGTCCTTCTATGACCGTATCAAGCTCTTGGCAG
GCAAGGATAGCACCCACATCATTCCTGGAGAGAACCCTTTCAACAGCAGCTTGGTTTCTCTCATCCGA
GGCCAAGTAGTAACTACAGATGGAACTCCCCTGGTCGGTGTGAACGTGTCTTTTGTCAAGTACCCAAA
ATACGGCTACACCATCACCCGCCAGGATGGCACGTTCGACCTGATCGCAAATGGAGGTGCTTCCTTGA
CTCTACACTTTGAGCGAGCCCCGTTCATGAGCCAGGAGCGCACTGTGTGGCTGCCGTGGAACAGCTTT
TACGCCATGGACACCCTGGTGATGAAGACCGAGGAGAACTCCATCCCCAGCTGTGACCTCAGTGGCTT
TGTCCGGCCTGATCCAATCATCATCTCCTCCCCACTGTCCACCTTCTTTAGTGCTGCCCCTGGGCAGA
ATCCCATCGTGCCTGAGACCCAGGTTCTTCATGAAGAAATCGAGCTCCCTGGTTCCAATGTGAAACTT
CGCTATCTGAGCTCTAGAACTGCAGGGTACAAGTCACTGCTGAAGATCACCATGACCCAGTCCACAGT
GCCCCTGAACCTCATTAGGGTTCACCTGATGGTGGCTGTCGAGGGGCATCTCTTCCAGAAGTCATTCC
AGGCTTCTCCCAACCTGGCCTCCACCTTCATCTGGGACAAGACAGATGCGTATGGCCAAAGGGTGTAT
GGACTCTCAGATGCTGTTGTGTCTGTCGGGTTTGAATATGAGACCTGTCCCAGTCTAATTCTCTGGGA
GAAAAGGACAGCCCTCCTTCAGGGATTCGAGCTGGACCCCTCCAACCTCGGTGGCTGGTCCCTAGACA
AACACCACATCCTCAATGTTAAAAGTGGAATCCTACACAAAGGCACTGGGGAAAACCAGTTCCTGACC
CAGCAGCCTGCCATCATCACCAGCATCATGGGCAATGGTCGCCGCCGGAGCATTTCCTGTCCCAGCTG
CAACGGCCTTGCTGAAGGCAACAAGCTGCTGGCCCCAGTGGCTCTGGCTGTTGGAATCGATGGGAGCC
TCTATGTGGGTGACTTCAATTACATCCGACGCATCTTTCCCTCTCGAAATGTGACCAGCATCTTGGAG
TTACGAAATAAAGAGTTTAAACATAGCAACAACCCAGCACACAAGTACTACTTGGCAGTGGACCCCGT
GTCCGGCTCGCTCTACGTGTCCGACACCAACAGCAGGAGAATCTACCGCGTCAAGTCTCTGAGTGGAA
CCAAAGACCTGGCTGGGAATTCGGAAGTTGTGGCAGGGACGGGAGAGCAGTGTCTACCCTTTGATGAA
GCCCGCTGCGGGGATGGAGGGAAGGCCATAGATGCAACCCTGATGAGCCCGAGAGGTATTGCAGTAGA
CAAGAATGGGCTCATGTACTTTGTCGATGCCACCATGATCCGGAAGGTTGACCAGAATGGAATCATCT
CCACCCTGCTGGGCTCCAATGACCTCACTGCCGTCCGGCCGCTGAGCTGTGATTCCAGCATGGATGTA
GCCCAGGTTCGTCTGGAGTGGCCAACAGACCTTGCTGTCAATCCCATGGATAACTCCTTGTATGTTCT
AGAGAACAATGTCATCCTTCGAATCACCGAGAACCACCAAGTCAGCATCATTGCGGGACGCCCCATGC
ACTGCCAAGTTCCTGGCATTGACTACTCACTCAGCAAACTAGCCATTCACTCTGCCCTGGAGTCAGCC
AGTGCCATTGCCATTTCTCACACTGGGGTCCTCTACATCACTGAGACAGATGAGAAGAAGATTAACCG
TCTACGCCAGGTAACAACCAACGGGGAGATCTGCCTTTTAGCTGGGGCAGCCTCGGACTGCGACTGCA
AAAACGATGTCAATTGCAACTGCTATTCAGGAGATGATGCCTACGCGACTGATGCCATCTTGAATTCC
CCATCATCCTTAGCTGTAGCTCCAGATGGTACCATTTACATTGCAGACCTTGGAAATATTCGGATCAG
GGCGGTCAGCAAGAACAAGCCTGTTCTTAATGCCTTCAACCAGTATGAGGCTGCATCCCCCGGAGAGC
AGGAGTTATATGTTTTCAACGCTGATGGCATCCACCAATACACTGTGAGCCTGGTGACAGGGGAGTAC
TTGTACAATTTCACATATAGTACTGACAATGATGTCACTGAATTGATTGACAATAATGGGAATTCCCT
GAAGATCCGTCGGGACAGCAGTGGCATGCCCCGTCACCTGCTCATGCCTGACAACCAGATCATCACCC
TCACCGTGGGCACCAATGGAGGCCTCAAAGTCGTGTCCACACAGAACCTGGAGCTTGGTCTCATGACC
TATGATGGCAACACTGGGCTCCTGGCCACCAAGAGCGATGAAACAGGATGGACGACTTTCTATGACTA
TGACCACGAAGGCCGCCTGACCAACGTGACGCGCCCCACGGGGGTGGTAACCAGTCTGCACCGGGAAA
TGGAGAAATCTATTACCATTGACATTGAGAACTCCAACCGTGATGATGACGTCACTGTCATCACCAAC
CTCTCTTCAGTAGAGGCCTCCTACACAGTGGTACAAGATCAAGTTCGGAACAGCTACCAGCTCTGTAA
TAATGGTACCCTGAGGGTGATGTATGCTAATGGGATGGGTATCAGCTTCCACAGCGAGCCCCATGTCC
TAGCGGGCACCATCACCCCCACCATTGGACGCTGCAACATCTCCCTGCCTATGGAGAATGGCTTAAAC
TCCATTGAGTGGCGCCTAAGAAAGGAACAGATTAAAGGCAAAGTCACCATCTTTGGCAGGAAGCTCCG
GGTCCATGGAAGAAATCTCTTGTCCATTGACTATGATCGAAATATTCGGACTGAAAAGATCTATGATG
ACCACCGGAAGTTCACCCTGAGGATCATTTATGACCAGGTGGGCCGCCCCTTCCTCTGGCTGCCCAGC
AGCGGGCTGGCAGCTGTCAACGTGTCATACTTCTTCAATGGGCGCCTGGCTGGGCTTCAGCGTGGGGC
CATGAGCGAGAGGACAGACATCGACAAGCAAGGCCGCATCGTGTCCCGCATGTTCGCTGACGGGAAAG
TGTGGAGCTACTCCTACCTTGACAAGTCCATGGTCCTCCTGCTTCAGAGCCAACGTCAGTATATATTT
GAGTATGACTCCTCTGACCGCCTCCTTGCCGTCACCATGCCCAGCGTGGCCCGGCACAGCATGTCCAC
ACACACCTCCATCGGCTACATCCGTAATATTTACAACCCGCCTGAAAGCAATGCTTCGGTCATCTTTG
ACTACAGTGATGACGGCCGCATCCTGAAGACCTCCTTTTTGGGCACCGGACGCCAGGTGTTCTACAAG
TATGGGAAACTCTCCAAGTTATCAGAGATTGTCTACGACAGTACCGCCGTCACCTTCGGGTATGACGA
GACCACTGGTGTCTTGAAGATGGTCAACCTCCAAAGTGGGGGCTTCTCCTGCACCATCAGGTACCGGA
AGATTGGCCCCCTGGTGGACAAGCAGATCTACAGGTTCTCCGAGGAAGGCATGGTCAATGCCAGGTTT
GACTACACCTATCATGACAACAGCTTCCGCATCGCAAGCATCAAGCCCGTCATAAGTGAGACTCCCCT
CCCCGTTGACCTCTACCGCTATGATGAGATTTCTGGCAAGGTGGAACACTTTGGTAAGTTTGGAGTCA
TCTATTATGACATCAACCAGATCATCACCACTGCCGTGATGACCCTCAGCAAACACTTCGACACCCAT
GGGCGGATCAAGGAGGTCCAGTATGAGATGTTCCGGTCCCTCATGTACTGGATGACGGTGCAATATGA
CAGCATGGGCAGGGTGATCAAGAGGGAGCTAAAACTGGGGCCCTATGCCAATACCACGAAGTACACCT
ATGACTACGATGGGGACGGGCAGCTCCAGAGCGTGGCCGTCAATGACCGCCCGACCTGGCGCTACAGC
TATGACCTTAATGGGAATCTCCACTTACTGAACCCAGGCAACAGTGTGCGCCTCATGCCCTTGCGCTA
TGACCTCCGGGATCGGATAACCAGACTCGGGGATGTGCAGTACAAAATTGACGACGATGGCTATCTGT
GCCAGAGAGGGTCTGACATCTTCGAATACAATTCCAAGGGCCTCCTAACAAGAGCCTACAACAAGGCC
AGCGGGTGGAGTGTCCAGTACCGCTATGATGGCGTAGGACGGCGGGCTTCCTACAAGACCAACCTGGG
CCACCACCTGCAGTACTTCTACTCTGACCTCCACAACCCGACGCGCATCACCCATGTCTACAATCACT
CCAACTCGGAGATTACCTCACTGTACTACGACCTCCAGGGCCACCTCTTTGCCATGGAGAGCAGCAGT
GGGGAGGAGTACTATGTTGCCTCTGATAACACAGGGACTCCTCTGGCTGTGTTCAGCATCAACGGCCT
CATGATCAAACAGCTGCAGTACACGGCCTATGGGGAGATTTATTATGACTCCAACCCCGACTTCCAGA
TGGTCATTGGCTTCCATGGGGGACTCTATGACCCCCTGACCAAGCTGGTCCACTTCACTCAGCGTGAT
TATGATGTGCTGGCAGGACGATGGACCTCCCCAGACTATACCATGTGGAAAAACGTGGGCAAGGAGCC
GGCCCCCTTTAACCTGTATATGTTCAAGAGCAACAATCCTCTCAGCAGTGAGCTAGATTTGAAGAACT
ACGTGACAGATGTGAAAAGCTGGCTTGTGATGTTTGGATTTCAGCTTAGCAACATCATTCCTGGCTTC
CCGAGAGCCAAAATGTATTTCGTGCCTCCTCCCTATGAATTGTCAGAGAGTCAAGCAAGTGAGAATGG
ACAGCTCATTACAGGTGTCCAACAGACAACAGAGAGACATAACCAGGCCTTCATGGCTCTGGAAGGAC
AGGTCATTACTAAAAAGCTCCACGCCAGCATCCGAGAGAAAGCAGGTCACTGGTTTGCCACCACCACG
CCCATCATTGGCAAAGGCATCATGTTTGCCATCAAAGAAGGGCGGGTGACCACGGGCGTGTCCAGCAT
CGCCAGCGAAGATAGCCGCAAGGTGGCATCTGTGCTGAACAACGCCTACTACCTGGACAAGATGCACT
ACAGCATCGAGGGCAAGGACACCCACTACTTTGTGAAGATTGGCTCAGCCGATGGCGACCTGGTCACA
CTAGGCACCACCATCGGCCGCAAGGTGCTAGAGAGCGGGGTGAACGTGACCGTGTCCCAGCCCACGCT
GCTGGTCAACGGCAGGACTCGAAGGTTCACGAACATTGAGTTCCAGTACTCCACGCTGCTGCTCAGCA
TCCGCTATGGCCTCACCCCCGACACCCTGGACGAAGAGAAGGCCCGCGTCCTGGACCAGGCGAGACAG
AGGGCCCTGGGCACGGCCTGGGCCAAGGAGCAGCAGAAAGCCAGGGACGGGAGAGAGGGGAGCCGCCT
GTGGACTGAGGGCGAGAAGCAGCAGCTTCTGAGCACCGGGCGCGTGCAAGGGTACGAGGGATATTACG
TGCTTCCCGTGGAGCAATACCCAGAGCTTGCAGACAGTAGCAGCAACATCCAGTTTTTAAGACAGAAT
GAGATGGGAAAGAGGTAACAAAATAATCTGCTGCCATTCCTTGTCTGAATGGCTCAGCAGGAGTAACT

| | | | |
|---|---|---|---|
| NOV7a, CG50426-17 | SEQ ID NO: 114 | 2662 aa | MW at 295881.9kD |
| Protein Sequence | | | |

MDVKDRRHRSLTRGRCGKECRYTSSSLDSEDCRVPTQKSYSSSETLKAYDHDSRMHYGNRVTDLIHRE
SDEFPRQGTNFTLAELGICEPSPHRSGYCSDMGILHQGYSLSTGSDADSDTEGGMSPEHAIRLWGRGI
KSRRSSGLSSRENSALTLTDSDNENKSDDENGRPIPPTSSPSLLPSAQLPSSHNPPPVSCQMPLLDSN
TSHQIMDTNPDEEFSPNSYLLRACSGPQQASSSGPPNHHSQSTLRPPLPPPHNHTLSHHHSSANSLNR
NSLTNRRSQIHAPAPAPNDLATTPESVQLQDSWVLNSNVPLETRHFLFKTSSGSTPLFSSSSPGYPLT
SGTVYTPPPRLLPRNTFSRKAFKLKKPSKYCSWKCAALSAIAAALLLAILLAYFIVPWSLKNSSIDSG
EAEVGRRVTQEVPPGVFWRSQIHISQPQFLKFNISLGKDALFGVYIRRGLPPSHAQYDFMERLDGKEK
WSVVESPRERRSIQTLVQNEAVFVQYLDVGLWHLAFYNDGKDKEMVSFNTVVLDSVQDCPRNCHGNGE
CVSGVCHCFPGFLGADCAKAACPVLCSGNGQYSKGTCQCYSGWKGAECDVPMNQCIDPSCGGHGSCID
GNCVCSAGYKGEHCEEVDCLDPTCSSHGVCVNGECLCSPGWGGLNCELARVQCPDQCSGHGTYLPDTG
LCSCDPNWMGPDCSVDGCPDLCNGNGRCTLGQNSWQCVCQTGWRGPGCNVAMETSCADNKDNEGDGLV
DCLDPDCCLQSACQNSLLCRGSRDPLDIIQQGQTDWPAVKSFYDRIKLLAGKDSTHIIPGENPFNSSL
VSLIRGQVVTTDGTPLVGVNVSFVKYPKYGYTITRQDGTFDLIANGGASLTLHFERAPFMSQERTVWL
PWNSFYAMDTLVMKTEENSIPSCDLSGFVRPDPIIISSPLSTFFSAAPGQNPIVPETQVLHEEIELPG
SNVKLRYLSSRTAGYKSLLKITMTQSTVPLNLIRVHLMVAVEGHLFQKSFQASPNLASTFIWDKTDAY
GQRVYGLSDAVVSVGFEYETCPSLILWEKRTALLQGFELDPSNLGGWSLDKHHILNVKSGILHKGTGE
NQFLTQQPAIITSIMGNGRRRSISCPSCNGLAEGNKLLAPVALAVGIDGSLYVGDFNYIRRIFPSRNV
TSILELRNKEFKHSNNPAHKYYLAVDPVSGSLYVSDTNSRRIYRVKSLSGTKDLAGNSEVVAGTGEQC
LPFDEARCGDGGKAIDATLMSPRGIAVDKNGLMYFVDATMIRKVDQNGIISTLLGSNDLTAVRPLSCD
SSMDVAQVRLEWPTDLAVNPMDNSLYVLENNVILRITENHQVSIIAGRPMHCQVPGIDYSLSKLAIHS
ALESASAIAISHTGVLYITETDEKKINRLRQVTTNGEICLLAGAASDCDCKIWVNCNCYSGDDAYATD
AILNSPSSLAVAPDGTIYIADLGNIRIEAVSKNKPVLNAFNQYEAASPGEQELYVFNADGIHQYTVSL
VTGEYLYNFTYSTDNDVTELIDNNGNSLKIRRDSSGMPRHLLMPDNQIITLTVGTNGGLKVVSTQNLE
LGLMTYDGNTGLLATKSDETGWTTFYDYDHEGRLTNVTRPTGVVTSLHREMEKSITIDIENSNRDDDV
TVITNLSSVEASYTVVQDQVRNSYQLCNNGTLRVMYANGMGISFHSEPHVLAGTITPTIGRCNISLPM
ENGLNSIEWRLRKEQIKGKVTIFGRKLRVHGRNLLSIDYDRNIRTEKIYDDHRKFTLRIIYDQVGRPF
LWLPSSGLAAVNVSYFFNGRLAGLQRGAMSERTDIDKQGRIVSRMFADGKVWSYSYLDKSMVLLLQSQ
RQYIFEYDSSDRLLAVTMPSVARHSMSTHTSIGYIRNIYNPPESNASVIFDYSDDGRILKTSFLGTGR
QVFYKYGKLSKLSEIVYDSTAVTFGYDETTGVLKMVNLQSGGFSCTIRYRKIGPLVDKQIYRFSEEGM
VNARFDYTYHDNSFRIASIKPVISETPLPVDLYRYDEISGKVEHFGKFGVIYYDINQIITTAVMTLSK
HFDTHGRIKEVQYEMFRSLMYWMTVQYDSMGRVIKRELKLGPYANTTKYTYDYDGDGQLQSVAVNDRP
TWRYSYDLNGNLHLLNPGNSVRLMPLRYDLRDRITRLGDVQYKIDDDGYLCQRGSDIFEYNSKGLLTR
AYNKASGWSVQYRYDGVGRPASYKTNLGHHLQYFYSDLHNPTRITHVYNHSNSEITSLYYDLQGHLFA
MESSSGEEYYVASDNTGTPLAVFSINGLMIKQLQYTAYGEIYYDSNPDFQMVIGFHGGLYDPLTKLVH
FTQRDYDVLAGRWTSPDYTMWKNVGKEPAPFNLYMFKSNNPLSSELDLKNYVTDVKSWLVMFGFQLSN
IIPGFPRAKMYFVPPPYELSESQASENGQLITGVQQTTERHNQAFMALEGQVITKKLHASIREKAGHW
FATTTPIIGKGIMFAIKEGRVTTGVSSIASEDSRKVASVLNNAYYLDKMHYSIEGKDTHYFVKIGSAD
GDLVTLGTTIGRKVLESGVNVTVSQPTLLVNGRTRRFTNIEFQYSTLLLSIRYGLTPDTLDEEKARVL
DQARQRALGTAWAKEQQKARDGREGSRLWTEGEKQQLLSTGRVQGYEGYYVLPVEQYPELADSSSNIQ
FLRQNEMGKR

| | | |
|---|---|---|
| NOV7b, CG50426-21 | SEQ ID NO: 115 | 9852 bp |
| DNA Sequence | ORF Start: ATG at 210 | ORF Stop: TAA at 8505 |

CCAGCATTAGATGAGTTGACAAAAATGCAGTTTCAGCTCTGAAGGTCTGAAAGATTCTGCTGCAACTA
AAGCTCTGAAGATTCTGCTACAACTATGACATCCATTTTCTCCCACTTCAGACAGGATGAATACAAGG
TGGCAAAGTGACAAGTGCCAAAACTCAGGCCTGACTTTCCTGAAAACATCAGCATTCTGCCATATCTG
GAATAATGGATGTAAAGGACCGGCGACACCGCTCTTTGACCAGAGGACGCTGTGGCAAAGAGTGTCGC
TACACAAGCTCCTCTCTGGACAGTGAGGACTGCCGGGTGCCCACACAGAAATCCTACAGCTCCAGTGA
GACTCTGAAGGCCTATGACCATGACAGCAGGATGCACTATGGAAACCGAGTCACAGACCTCATCCACC
GGGAGTCAGATGAGTTTCCTAGACAAGGAACCAACTTCACCCTTGCCGAACTGGGCATCTGTGAGCCC
TCCCCACACCGAAGCGGCTACTGCTCCGACATGGGGATCCTTCACCAGGGCTACTCCCTTAGCACAGG
GTCTGACGCCGACTCCGACACCGAGGGAGGGATGTCTCCAGAACACGCCATCAGACTGTGGGGCAGAG
GGATAAAATCCAGGCGCAGTTCCGGCCTGTCCAGTCGTGAAAACTCGGCCCTTACCCTGACTGACTCT
GACAACGAAAACAAATCAGATGATGAGAACGGTCGTCCCATTCCACCTACATCCTCGCCTAGTCTCCT
CCCATCTGCTCAGCTGCCTAGCTCCCATAATCCTCCACCAGTTAGCTGCCAGATGCCATTGCTAGACA
GCAACACCTCCCATCAAATCATGGACACCAACCCTGATGAGGAATTCTCCCCCAATTCATACCTGCTC
AGAGCATGCTCAGGGCCCCAGCAAGCCTCCAGCAGTGGCCCTCCGAACCACCACAGCCAGTCGACTCT
GAGGCCCCCTCTCCCACCCCCTCACAACCACACGCTGTCCCATCACCACTCGTCCGCCAACTCCCTCA
ACAGGAACTCACTGACCAATCGGCGGAGTCAGATCCACGCCCCGGCCCCAGCGCCCAATGACCTGGCC
ACCACACCAGAGTCCGTTCAGCTTCAGGACAGCTGGGTGCTAAACAGCAACGTGCCACTGGAGACCCG
GCACTTCCTCTTCAAGACCTCCTCGGGGAGCACACCCTTGTTCAGCAGCTCTTCCCCGGGATACCCTT
TGACCTCAGGAACGGTTTACACGCCCCCGCCCCGCCTGCTGCCCAGGAATACTTTCTCCAGGAAGGCT
TTCAAGCTGAAGAAGCCCTCCAAATACTGCAGCTGGAAATGTGCTGCCCTCTCCGCCATTGCCGCGGC
CCTCCTCTTGGCTATTTTGCTGGCGTATTTCATAGCAATGCATCTGCTCGGACTCAATTGGCAACTCC
AGCCTGCAGATGGGCACACCTTTAACAATGGGATAAGGACCGGCTTACCAGGAAACGATGATGTGGCA
ACAATGCCATCTGGAGGCAAAGTGCCCTGGTCGTTGAAAAACAGCAGCATAGACAGTGGTGAAGCAGA
AGTTGGTCGGCGGGTAACACAAGAAGTCCCACCAGGGGTGTTTTGGAGGTCACAAATTCACATCAGTC
AGCCCCAGTTCTTAAAGTTCAACATCTCCCTCGGGAAGGACGCTCTCTTTGGTGTTTACATAAGAAGA
GGACTTCCACCATCTCATGCCCAGTATGACTTCATGGAACGTCTGGACGGGAAGGAGAAGTGGAGTGT
GGTTGAGTCTCCCAGGGAACGCCGGAGCATACAGACCTTGGTTCAGAATGAAGCCGTGTTTGTGCAGT
ACCTGGATGTGGGCCTGTGGCATCTGGCCTTCTACAATGATGGAAAAGACAAAGAGATGGTTTCCTTC
AATACTGTTGTCCTAGATTCAGTGCAGGACTGTCCACGTAACTGCCATGGGAATGGTGAATGTGTGTC
CGGGGTGTGTCACTGTTTCCCAGGATTTCTAGGAGCAGACTGTGCTAAAGCTGCCTGCCCTGTCCTGT
GCAGTGGGAATGGACAATATTCTAAAGGGACGTGCCAGTGCTACAGCGGCTGGAAAGGTGCAGAGTGC
GACGTGCCCATGAATCAGTGCATCGATCCTTCCTGCGGGGGCCACGGCTCCTGCATTGATGGGAACTG
TGTCTGCTCTGCTGGCTACAAAGGCGAGCACTGTGAGGAAGTTGATTGCTTGGATCCCACCTGCTCCA
GCCACGGAGTCTGTGTGAATGGAGAATGCCTGTGCAGCCCTGGCTGGGGTGGTCTGAACTGTGAGCTG
GCGAGGGTCCAGTGCCCAGACCAGTGCAGTGGGCATGGCACGTACCTGCCTGACACGGGCCTCTGCAG
CTGCGATCCCAACTGGATGGGTCCCGACTGCTCTGTTGAAGTGTGCTCAGTAGACTGTGGCACTCACG
GCGTCTGCATCGGGGGAGCCTGCCGCTGTGAAGAGGGCTGGACAGGCGCAGCGTGTGACCAGCGCGTG
TGCCACCCCCGCTGCATTGAGCATGGGACCTGTAAAGATGGCAAATGTGAATGCCGAGAGGGCTGGAA
TGGTGAACACTGCACCATTGATGGCTGCCCTGACTTGTGCAACGGTAACGGGAGATGCACACTGGGTC
AGAACAGCTGGCAGTGTGTCTGCCAGACCGGCTGGAGAGGGCCCGGATGCAACGTTGCCATGGAAACT
TCCTGTGCTGATAACAAGGATAATGAGGGAGATGGCCTGGTGGATTGTTTGGACCCTGACTGCTGCCT
GCAGTCAGCCTGTCAGAACAGCCTGCTCTGCCGGGGGTCCCGGGACCCACTGGACATCATTCAGCAGG
GCCAGACGGATTGGCCCGCAGTGAAGTCCTTCTATGACCGTATCAAGCTCTTGGCAGGCAAGGATAGC
ACCCACATCATTCCTGGAGAGAACCCTTTCAACAGCAGCTTGGTTTCTCTCATCCGAGGCCAAGTAGT
AACTACAGATGGAACTCCCCTGGTCGGTGTGAACGTGTCTTTTGTCAAGTACCCAAAATACGGCTACA
CCATCACCCGCCAGGATGGCACGTTCGACCTGATCGCAAATGGAGGTGCTTCCTTGACTCTACACTTT
GAGCGAGCCCCGTTCATGAGCCAGGAGCGCACTGTGTGGCTGCCGTGGAACAGCTTTTACGCCATGGA
CACCCTGGTGATGAAGACCGAGGAGAACTCCATCCCCAGCTGTGACCTCAGTGGCTTTGTCCGGCCTG
ATCCAATCATCATCTCCTCCCCACTGTCCACCTTCTTTAGTGCTGCCCCTGGGCAGAATCCCATCGTG
CCTGAGACCCAGGTTCTTCATGAAGAAATCGAGCTCCCTGGTTCCAATGTGAAACTTCGCTATCTGAG
CTCTAGAACTGCAGGGTACAAGTCACTGCTGAAGATCACCATGACCCAGTCCACAGTGCCCCTGAACC
TCATTAGGGTTCACCTGATGGTGGCTGTCGAGGGGCATCTCTTCCAGAAGTCATTCCAGGCTTCTCCC
AACCTGGCCTCCACCTTCATCTGGGACAAGACAGATGCGTATGGCCAAAGGGTGTATGGACTCTCAGA
TGCTGTTGTGTCTGTCGGGTTTGAATATGAGACCTGTCCCAGTCTAATTCTCTGGGAGAAAAGGACAG
CCCTCCTTCAGGGATTCGAGCTGGACCCCTCCAACCTCGGTGGCTGGTCCCTAGACAAACACCACATC
CTCAATGTTAAAAGTGGAATCCTACACAAAGGCACTGGGGAAAACCAGTTCCTGACCCAGCAGCCTGC
CATCATCACCAGCATCATGGGCAATGGTCGCCGCCGGAGCATTTCCTGTCCCAGCTGCAACGGCCTTG
CTGAAGGCAACAAGCTGCTGGCCCCAGTGGCTCTGGCTGTTGGAATCGATGGGAGCCTCTATGTGGGT
GACTTCAATTACATCCGACGCATCTTTCCCTCTCGAAATGTGACCAGCATCTTGGAGTTACGAAATAA
AGAGTTTAAACATAGCAACAACCCAGCACACAAGTACTACTTGGCAGTGGACCCCGTGTCCGGCTCGC
TCTACGTGTCCGACACCAACAGCAGGAGAATCTACCGCGTCAAGTCTCTGAGTGGAACCAAAGACCTG
GCTGGGAATTCGGAAGTTGTGGCAGGGACGGGAGAGCAGTGTCTACCCTTTGATGAAGCCCGCTGCGG
GGATGGAGGGAAGGCCATAGATGCAACCCTGATGAGCCCGAGAGGTATTGCAGTAGACAAGAATGGGC
TCATGTACTTTGTCGATGCCACCATGATCCGGAAGGTTGACCAGAATGGAATCATCTCCACCCTGCTG
GGCTCCAATGACCTCACTGCCGTCCGGCCGCTGAGCTGTGATTCCAGCATGGATGTAGCCCAGGTTCG
TCTGGAGTGGCCAACAGACCTTGCTGTCAATCCCATGGATAACTCCTTGTATGTTCTAGAGAACAATG
TCATCCTTCGAATCACCGAGAACCACCAAGTCAGCATCATTGCGGGACGCCCCATGCACTGCCAAGTT
CCTGGCATTGACTACTCACTCAGCAAACTAGCCATTCACTCTGCCCTGGAGTCAGCCAGTGCCATTGC
CATTTCTCACACTGGGGTCCTCTACATCACTGAGACAGATGAGAAGAAGATTAACCGTCTACGCCAGG
TAACAACCAACGGGGAGATCTGCCTTTTAGCTGGGGCAGCCTCGGACTGCGACTGCAAAAACGATGTC
AATTGCAACTGCTATTCAGGAGATGATGCCTACGCGACTGATGCCATCTTGAATTCCCCATCATCCTT
AGCTGTAGCTCCAGATGGTACCATTTACATTGCAGACCTTGGAAATATTCGGATCAGGGCGGTCAGCA
AGAACAAGCCTGTTCTTAATGCCTTCAACCAGTATGAGGCTGCATCCCCCGGAGAGCAGGAGTTATAT
GTTTTCAACGCTGATGGCATCCACCAATACACTGTGAGCCTGGTGACAGGGGAGTACTTGTACAATTT
CACATATAGTACTGACAATGATGTCACTGAATTGATTGACAATAATGGGAATTCCCTGAAGATCCGTC
GGGACAGCAGTGGCATGCCCCGTCACCTGCTCATGCCTGACAACCAGATCATCACCCTCACCGTGGGC
ACCAATGGAGGCCTCAAAGTCGTGTCCACACAGAACCTGGAGCTTGGTCTCATGACCTATGATGGCAA
CACTGGGCTCCTGGCCACCAAGAGCGATGAAACAGGATGGACGACTTTCTATGACTATGACCACGAAG
GCCGCCTGACCAACGTGACGCGCCCCACGGGGGTGGTAACCAGTCTGCACCGGGAAATGGAGAAATCT
ATTACCATTGACATTGAGAACTCCAACCGTGATGATGACGTCACTGTCATCACCAACCTCTCTTCAGT
AGAGGCCTCCTACACAGTGGTACAAGATCAAGTTCGGAACAGCTACCAGCTCTGTAATAATGGTACCC
TGAGGGTGATGTATGCTAATGGGATGGGTATCAGCTTCCACAGCGAGCCCCATGTCCTAGCGGGCACC
ATCACCCCCACCATTGGACGCTGCAACATCTCCCTGCCTATGGAGAATGGCTTAAACTCCATTGAGTG
GCGCCTAAGAAAGGAACAGATTAAAGGCAAAGTCACCATCTTTGGCAGGAAGCTCCGGGTCCATGGAA
GAAATCTCTTGTCCATTGACTATGATCGAAATATTCGGACTGAAAAGATCTATGATGACCACCGGAAG
TTCACCCTGAGGATCATTTATGACCAGGTGGGCCGCCCCTTCCTCTGGCTGCCCAGCAGCGGGCTGGC
AGCTGTCAACGTGTCATACTTCTTCAATGGGCGCCTGGCTGGGCTTCAGCGTGGGGCCATGAGCGAGA
GGACAGACATCGACAAGCAAGGCCGCATCGTGTCCCGCATGTTCGCTGACGGGAAAGTGTGGAGCTAC
TCCTACCTTGACAAGTCCATGGTCCTCCTGCTTCAGAGCCAACGTCAGTATATATTTGAGTATGACTC
CTCTGACCGCCTCCTTGCCGTCACCATGCCCAGCGTGGCCCGGCACAGCATGTCCACACACACCTCCA
TCGGCTACATCCGTAATATTTACAACCCGCCTGAAAGCAATGCTTCGGTCATCTTTGACTACAGTGAT
GACGGCCGCATCCTGAAGACCTCCTTTTTGGGCACCGGACGCCAGGTGTTCTACAAGTATGGGAAACT
CTCCAAGTTATCAGAGATTGTCTACGACAGTACCGCCGTCACCTTCGGGTATGACGAGACCACTGGTG
TCTTGAAGATGGTCAACCTCCAAAGTGGGGGCTTCTCCTGCACCATCAGGTACCGGAAGATTGGCCCC
CTGGTGGACAAGCAGATCTACAGGTTCTCCGAGGAAGGCATGGTCAATGCCAGGTTTGACTACACCTA
TCATGACAACAGCTTCCGCATCGCAAGCATCAAGCCCGTCATAAGTGAGACTCCCCTCCCCGTTGACC
TCTACCGCTATGATGAGATTTCTGGCAAGGTGGAACACTTTGGTAAGTTTGGAGTCATCTATTATGAC
ATCAACCAGATCATCACCACTGCCGTGATGACCCTCAGCAAACACTTCGACACCCATGGGCGGATCAA
GGAGGTCCAGTATGAGATGTTCCGGTCCCTCATGTACTGGATGACGGTGCAATATGACAGCATGGGCA
GGGTGATCAAGAGGGAGCTAAAACTGGGGCCCTATGCCAATACCACGAAGTACACCTATGACTACGAT
GGGGACGGGCAGCTCCAGAGCGTGGCCGTCAATGACCGCCCGACCTGGCGCTACAGCTATGACCTTAA
TGGGAATCTCCACTTACTGAACCCAGGCAACAGTGTGCGCCTCATGCCCTTGCGCTATGACCTCCGGG
ATCGGATAACCAGACTCGGGGATGTGCAGTACAAAATTGACGACGATGGCTATCTGTGCCAGAGAGGG
TCTGACATCTTCGAATACAATTCCAAGGGCCTCCTAACAAGAGCCTACAACAAGGCCAGCGGGTGGAG
TGTCCAGTACCGCTATGATGGCGTAGGACGGCGGGCTTCCTACAAGACCAACCTGGGCCACCACCTGC
AGTACTTCTACTCTGACCTCCACAACCCGACGCGCATCACCCATGTCTACAATCACTCCAACTCGGAG
ATTACCTCACTGTACTACGACCTCCAGGGCCACCTCTTTGCCATGGAGAGCAGCAGTGGGGAGGAGTA
CTATGTTGCCTCTGATAACACAGGGACTCCTCTGGCTGTGTTCAGCATCAACGGCCTCATGATCAAAC
AGCTGCAGTACACGGCCTATGGGGAGATTTATTATGACTCCAACCCCGACTTCCAGATGGTCATTGGC
TTCCATGGGGGACTCTATGACCCCCTGACCAAGCTGGTCCACTTCACTCAGCGTGATTATGATGTGCT
GGCAGGACGATGGACCTCCCCAGACTATACCATGTGGAAAAACGTGGGCAAGGAGCCGGCCCCCTTTA
ACCTGTATATGTTCAAGAGCAACAATCCTCTCAGCAGTGAGCTAGATTTGAAGAACTACGTGACAGAT
GTGAAAAGCTGGCTTGTGATGTTTGGATTTCAGCTTAGCAACATCATTCCTGGCTTCCCGAGAGCCAA
AATGTATTTCGTGCCTCCTCCCTATGAATTGTCAGAGAGTCAAGCAAGTGAGAATGGACAGCTCATTA
CAGGTGTCCAACAGACAACAGAGAGACATAACCAGGCCTTCATGGCTCTGGAAGGACAGGTCATTACT
AAAAAGCTCCACGCCAGCATCCGAGAGAAAGCAGGTCACTGGTTTGCCACCACCACGCCCATCATTGG
CAAAGGCATCATGTTTGCCATCAAAGAAGGGCGGGTGACCACGGGCGTGTCCAGCATCGCCAGCGAAG
ATAGCCGCAAGGTGGCATCTGTGCTGAACAACGCCTACTACCTGGACAAGATGCACTACAGCATCGAG
GGCAAGGACACCCACTACTTTGTGAAGATTGGCTCAGCCGATGGCGACCTGGTCACACTAGGCACCAC
CATCGGCCGCAAGGTGCTAGAGAGCGGGGTGAACGTGACCGTGTCCCAGCCCACGCTGCTGGTCAACG
GCAGGACTCGAAGGTTCACGAACATTGAGTTCCAGTACTCCACGCTGCTGCTCAGCATCCGCTATGGC
CTCACCCCCGACACCCTGGACGAAGAGAAGGCCCGCGTCCTGGACCAGGCGAGACAGAGGGCCCTGGG
CACGGCCTGGGCCAAGGAGCAGCAGAAAGCCAGGGACGGGAGAGAGGGGAGCCGCCTGTGGACTGAGG
GCGAGAAGCAGCAGCTTCTGAGCACCGGGCGCGTGCAAGGGTACGAGGGATATTACGTGCTTCCCGTG
GAGCAATACCCAGAGCTTGCAGACAGTAGCAGCAACATCCAGTTTTTAAGACAGAATGAGATGGGAAA
GAGGTAACAAAATAATCTGCTGCCATTCCTTGTCTGAATGGCTCAGCAGGAGTAACTGTTATCTCCTC
TCCTAAGGAGATGAAGACCTAACAGGGGCACTGCGGCTGGGCTGCTTTAGGAGACCAAGTGGCAAGAA
AGCTCACATTTTTTGAGTTCAAATGCTACTGTCCAAGCGAGAAGTCCCTCATCCTGAAGTAGACTAAA
GCCCGGCTGAAAATTCCGAGGAAAACAAAACAAACGAATGAATGAACAGACACACACAATGTTCCAAC
TTCCCCTAAAATATGACCCACTTGTTCTGGGTCTACGCAGAAAAGAGACGCAAAGTGTCCAAAAGGAA
CAAAAGAACAAAAACGAATAAGCAAAGAAGAAAACAAACAAAAACAAAACAAAACAAACACACGGACC
GATAAACAAAGAAGCGAAGATAAGAAAGAAGGCCTCATATCCAATTACCTCACTCATTCACATGTGAG
CGACACGCAGACATCCGCGAGGGCCAGCGTCACCAGACCAGCTGCGGGACAAACCACTCAGACTGCTT
GTAGGACAAATACTTCTGACATTTTCGTTTAAGCAAATACAGGTGCATTTAAAACACGACTTTGGGGG
TGATTTGTGTGTAGCGCCTGGGGAGGGGGGATAAAAGAGGAGGAGTGAGCACTGGAAATACTTTTTAA
AGAAAAAAAAACATGAGGGAATAAAAGAAATTCCTATCAAAAATCAAAGTGAAATAATACCATCCAGC
ACTTAACTCTCAGGTCCCAACTAAGTCTGGCCTGAGCTAATTTATTTGAGCGCAGAGTGTAAAATTTA
ATTCAAAATGGTGGCTATAATCACTACAGATAAATTTCATACTCTTTTGTCTTTGGAGATTCCATTGT
GGACAGTAATACGCAGTTACAGGGTGTAGTCTGTTTAGATTCCGTAGTTCGTGGGTATCAGTTTCGGT
AGAGGTGCAGCATCGTGACACTTTTGCTAACAGGTACCACTTCTGATCACCCTGTACATACATGAGCC
GAAAGGCACAATCACTGTTTCAGATTTAAAATTATTAGTGTGTTTGTTTGGTCCAGAAACTGAGACAA
TCACATGACAGTCACCACGAGGAGAGAAAATTTAAAAAATAAAAATAAAAACAAAAAAAATTTTAAAA
ATTAAAAAAACAAAAATAAAGTCTAATAAGAACTTTGGTACAGGAACTTTTTTGTAATATACATGTAT
GAATTGTTCATCGAGTTTTTATATTAATTTTAATTTGCTGCTAAGCAAAGACTAGGGACAGGCAAAGA
TAATTTATGGCAAAGTGTTTAAATTGTTTATACATAAATAAAGTCTCTAAAACTCCTGTG

| | | | |
|---|---|---|---|
| NOV7b, CG50426-21 | SEQ ID NO: 116 | 2765 aa | MW at 306806.1kD |
| Protein Sequence | | | |

MDVKDRRHRSLTRGRCGKECRYTSSSLDSEDCRVPTQKSYSSSETLKAYDHDSRMHYGNRVTDLIHRE
SDEFPRQGTNFTLAELGICEPSPHRSGYCSDMGILHQGYSLSTGSDADSDTEGGMSPEHAIRLWGRGI
KSRRSSGLSSRENSALTLTDSDNENKSDDENGRPIPPTSSPSLLPSAQLPSSHNPPPVSCQMPLLDSN
TSHQIMDTNPDEEFSPNSYLLRACSGPQQASSSGPPNHHSQSTLRPPLPPPHNHTLSHHHSSANSLNR
NSLTNRRSQIHAPAPAPNDLATTPESVQLQDSWVLNSNVPLETRHFLFKTSSGSTPLFSSSSPGYPLT
SGIVYTPPPRLLPRNTFSRKAFKLKKPSKYCSWKCAALSAIAAALLLAILLAYFIAMHLLGLNWQLQP
ADGHTFNNGIRTGLPGNDDVATMPSGGKVPWSLKNSSIDSGEAEVGRRVTQEVPPGVFWRSQIHISQP
QFLKFNISLGKDALFGVYIRRGLPPSHAQYDFMERLDGKEKWSVVESPRERRSIQTLVQNEAVFVQYL
DVGLWHLAFYNDGKDKEMVSFNTVVLDSVQDCPRNCHGNGECVSGVCHCFPGFLGADCAKAACPVLCS
GNGQYSKGTCQCYSGWKGAECDVPMNQCIDPSCGGHGSCIDGNCVCSAGYKGEHCEEVDCLDPTCSSH
GVCVNGECLCSPGWGGLNCELARVQCPDQCSGHGTYLPDTGLCSCDPNWMGPDCSVEVCSVDCGTHGV
CIGGACRCEEGWTGAACDQRVCHPRCIEHGTCKDGKCECREGWNGEHCTIDGCPDLCNGNGRCTLGQN
SWQCVCQTGWRGPGCNVAMETSCADNKDNEGDGLVDCLDPDCCLQSACQNSLLCRGSRDPLDIIQQGQ
TDWPAVKSFYDRIKLLAGKDSTHIIPGENPFNSSLVSLIRGQVVTTDGTPLVGVNVSFVKYPKYGYTI
TRQDGTFDLIANGGASLTLHFERAPFMSQERTVWLPWNSFYAMDTLVMKTEENSIPSCDLSGFVRPDP
IIISSPLSTFFSAAPGQNPIVPETQVLHEEIELPGSNVKLRYLSSRTAGYKSLLKITMTQSTVPLNLI
RVHLMVAVEGHLFQKSFQASPNLASTFIWDKTDAYGQRVYGLSDAVVSVGFEYETCPSLILWEKRTAL
LQGFELDPSNLGGWSLDKHHILNVKSGILHKGTGENQFLTQQPAIITSIMGNGRRRSISCPSCNGLAE
GNKLLAPVALAVGIDGSLYVGDFNYIRRIFPSRNVTSILELRNKEFKHSNNPAHKYYLAVDPVSGSLY
VSDTNSRRIYRVKSLSGTKDLAGNSEVVAGTGEQCLPFDEARCGDGGKAIDATLMSPRGIAVDKNGLM
YFVDATMIRKVDQNGIISTLLGSNDLTAVRPLSCDSSMDVAQVRLEWPTDLAVNPMDNSLYVLENNVI
LRITENHQVSIIAGRPMHCQVPGIDYSLSKLAIHSALESASAIAISHTGVLYITETDEKKINRLRQVT
TNGEICLLAGAASDCDCKNDVNCNCYSGDDAYATDAILNSPSSLAVAPDGTIYIADLGNIRIRAVSKN
KPVLNAFNQYEAASPGEQELYVFNADGIHQYTVSLVTGEYLYNFTYSTDNDVTELIDNNGNSLKIRRD
SSGMPRHLLMPDNQIITLTVGTNGGLKVVSTQNLELGLMTYDGNTGLLATKSDETGWTTFYDYDHEGR
LTNVTRPTGVVTSLHREMEKSITIDIENSNRDDDVTVITNLSSVEASYTVVQDQVRNSYQLCNNGTLR
VMYANGMGISFHSEPHVLAGTITPTIGRCNISLPMENGLNSIEWRLRKEQIKGKVTIFGRKLRVHGRN
LLSIDYDRNIRTEKIYDDHRKFTLRIIYDQVGRPFLWLPSSGLAAVNVSYFFNGRLAGLQRGAMSERT
DIDKQGRIVSRMFADGKVWSYSYLDKSMVLLLQSQRQYIFEYDSSDRLLAVTMPSVARHSMSTHTSIG
YIRNIYNPPESNASVIFDYSDDGRILKTSFLGTGRQVFYKYGKLSKLSEIVYDSTAVTFGYDETTGVL
KMVNLQSGGFSCTIRYRKIGPLVDKQIYRFSEEGMVNARFDYTYHDNSFRIASIKPVISETPLPVDLY
RYDEISGKVEHFGKFGVIYYDINQIITTAVMTLSKHFDTHGRIKEVQYEMFRSLMYWMTVQYDSMGRV
IKRELKLGPYANTTKYTYDYDGDGQLQSVAVNDRPTWRYSYDLNGNLHLLNPGNSVRLMPLRYDLRDR
ITRLGDVQYKIDDDGYLCQRGSDIFEYNSKGLLTRAYNKASGWSVQYRYDGVGRRASYKTNLGHHLQY
FYSDLHNPTRITHVYNHSNSEITSLYYDLQGHLFAMESSSGEEYYVASDNTGTPLAVFSINGLMIKQL
QYTAYGEIYYDSNPDFQMVIGFHGGLYDPLTKLVHFTQRDYDVLAGRWTSPDYTMWKNVGKEPAPFNL
YMFKSNNPLSSELDLKNYVTDVKSWLVMFGFQLSNIIPGFPRAKMYFVPPPYELSESQASENGQLITG
VQQTTERHNQAFMALEGQVITKKLHASIREKAGHWFATTTPIIGKGIMFAIKEGRVTTGVSSIASEDS
RKVASVLNNAYYLDKMHYSIEGKDTHYFVKIGSADGDLVTLGTTIGRKVLESGVNVTVSQPTLLVNGR
TRRFTNIEFQYSTLLLSIRYGLTPDTLDEEKARVLDQARQRALGTAWAKEQQKARDGREGSRLWTEGE
IKQQLLSTGRVQGYEGYYVLPVEQYPELADSSSNIQFLRQNEMGKR

| | | |
|---|---|---|
| NOV7c, CG50426-15 | SEQ ID NO: 117 | 2478 bp |
| DNA Sequence | ORF Start: at 1 | ORF Stop: end of sequence |

AAAAACAGCAGCATAGACAGTGGTGAAGCAGAAGTTGGTCGGCGGGTAACACAAGAAGTCCCACCAGG
GGTGTTTTGGAGGTCACAAATTCACATCAGTCAGCCCCAGTTCTTAAAGTTCAACATCTCCCTCGGGA
AGGACGCTCTCTTTGGTGTTTACATAAGAAGAGGACTTCCACCATCTCATGCCCAGTATGACTTCATG
GAACGTCTGGACGGGAAGGAGAAGTGGAGTGTGGTTGAGTCTCCCAGGGAACGCCGGAGCATACAGAC
CTTGGTTCAGAATGAAGCCGTGTTTGTGCAGTACCTGGATGTGGGCCTGTGGCATCTGGCCTTCTACA
ATGATGGAAAAGACAAAGAGATGGTTTCCTTCAATACTGTTGTCCTAGATTCAGTGCAGGACTGTCCA
CGTAACTGCCATGGGAATGGTGAATGTGTGTCCGGGGTGTGTCACTGTTTCCCAGGATTTCTAGGAGC
AGACTGTGCTAAAGCTGCCTGCCCTGTCCTGTGCAGTGGGAATGGACAATATTCTAAAGGGACGTGCC
AGTGCTACAGCGGCTGGAAAGGTGCAGAGTGCGACGTGCCCATGAATCAGTGCATCGATCCTTCCTGC
GGGGGCCACGGCTCCTGCATTGATGGGAACTGTGTCTGCTCTGCTGGCTACAAAGGCGAGCACTGTGA
GGAAGTTGATTGCTTGGATCCCACCTGCTCCAGCCACGGAGTCTGTGTGAATGGAGAATGCCTGTGCA
GCCCTGGCTGGGGTGGTCTGAACTGTGAGCTGGCGAGGGTCCAGTGCCCAGACCAGTGCAGTGGGCAT
GGCACGTACCTGCCTGACACGGGCCTCTGCAGCTGCGATCCCAACTGGATGGGTCCCGACTGCTCTGT
TGAAGTGTGCTCAGTAGACTGTGGCACTCACGGCGTCTGCATCGGGGGAGCCTGCCGCTGTGAAGAGG
GCTGGACAGGCGCAGCGTGTGACCAGCGCGTGTGCCACCCCCGCTGCATTGAGCACGGGACCTGTAAA
GATGGCAAATGTGAATGCCGAGAGGGCTGGAATGGTGAACACTGCACCATTGGTAGGCAAACGGCAGG
CACCGAAACAGATGGCTGCCCTGACTTGTGCAACGGTAACGGGAGATGCACACTGGGTCAGAACAGCT
GGCAGTGTGTCTGCCAGACCGGCTGGAGAGGGCCCGGATGCAACGTTGCCATGGAAACTTCCTGTGCT
GATAACAAGGATAATGAGGGAGATGGCCTGGTGGATTGTTTGGACCCTGACTGCTGCCTGCAGTCAGC
CTGTCAGAACAGCCTGCTCTGCCGGGGGTCCCGGGACCCACTGGACATCATTCAGCAGGGCCAGACGG
ATTGGCCCGCAGTGAAGTCCTTCTATGACCGTATCAAGCTCTTGGCAGGCAAGGATAGCACCCACATC
ATTCCTGGAGAGAACCCTTTCAACAGCAGCTTGGTTTCTCTCATCCGAGGCCAAGTAGTAACTACAGA
TGGAACTCCCCTGGTCGGTGTGAACGTGTCTTTTGTCAAGTACCCAAAATACGGCTACACCATCACCC
GCCAGGATGGCACGTTCGACCTGATCGCAAATGGAGGTGCTTCCTTGACTCTACACTTTGAGCGAGCC
CCGTTCATGAGCCAGGAGCGCACTGTGTGGCTGCCGTGGAACAGCTTTTACGCCATGGACACCCTGGT
GATGAAGACCGAGGAGAACTCCATCCCCAGCTGTGACCTCAGTGGCTTTGTCCGGCCTGATCCAATCA
TCATCTCCTCCCCACTGTCCACCTTCTTTAGTGCTGCCCCTGGGCAGAATCCCATCGTGCCTGAGACC
CAGGTTCTTCATGAAGAAATCGAGCTCCCTGGTTCCAATGTGAAACTTCGCTATCTGAGCTCTAGAAC
TGCAGGGTACAAGTCACTGCTGAAGATCACCATGACCCAGTCCACAGTGCCCCTGAACCTCATTAGGG
TTCACCTGATGGTGGCTGTCGAGGGGCATCTCTTCCAGAAGTCATTCCAGGCTTCTCCCAACCTGGCC
TCCACCTTCATCTGGGACAAGACAGATGCGTATGGCCAAAGGGTGTATGGACTCTCAGATGCTGTTGT
GTCTGTCGGGTTTGAATATGAGACCTGTCCCAGTCTAATTCTCTGGGAGAAAAGGACAGCCCTCCTTC
AGGGATTCGAGCTGGACCCCTCCAACCTCGGTGGCTGGTCCCTAGACAAACACCACATCCTCAATGTT
AAAAGTGGAATCCTACACAAAGGCACTGGGGAAAACCAGTTCCTGACCCAGCAGCCTGCCATCATCAC
CAGCATCATGGGCAATGGTCGCCGCCGGAGCATTTCCTGTCCCAGCTGCAACGGCCTTGCTGAAGGCA
ACAAGCTGCTGGCCCCAGTGGCTCTGGCTGTTGGAATCGATGGGAGCCTCTATGTGGGTGACTTCAAT
TACATCCGACGCATCTTTCCCTCTCGAAAT

| | | | |
|---|---|---|---|
| NOV7c, CG50426-15 | SEQ ID NO: 118 | 826 aa | MW at 89833.6kD |
| Protein Sequence | | | |

KNSSIDSGEAEVGRRVTQEVPPGVFWRSQIHISQPQFLKFNISLGKDALFGVYIRRGLPPSHAQYDFM
ERLDGKEKWSVVESPRERRSIQTLVQNEAVFVQYLDVGLWHLAFYNDGKDKEMVSFNTVVLDSVQDCP
RNCHGNGECVSGVCHCFPGFLGADCAKAACPVLCSGNGQYSKGTCQCYSGWKGAECDVPMNQCIDPSC
GGHGSCIDGNCVCSAGYKGEHCEEVDCLDPTCSSHGVCVNGECLCSPGWGGLNCELARVQCPDQCSGH
GTYLPDTGLCSCDPNWMGPDCSVEVCSVDCGTHGVCIGGACRCEEGWTGAACDQRVCHPRCIEHGTCK
DGKCECREGWNGEHCTIGRQTAGTETDGCPDLCNGNGRCTLGQNSWQCVCQTGWRGPGCNVAMETSCA
DNKDNEGDGLVDCLDPDCCLQSACQNSLLCRGSRDPLDIIQQGQTDWPAVKSFYDRIKLLAGKDSTHI
IPGENPFNSSLVSLIRGQVVTTDGTPLVGVNVSFVKYPKYGYTITRQDGTFDLIANGGASLTLHFERA
PFMSQERTVWLPWNSFYAMDTLVMKTEENSIPSCDLSGFVRPDPIIISSPLSTFFSAAPGQNPIVPET
QVLHEEIELPGSNVKLRYLSSRTAGYKSLLKITMTQSTVPLNLIRVHLMVAVEGHLFQKSFQASPNLA
STFIWDKTDAYGQRVYGLSDAVVSVGFEYETCPSLILWEKRTALLQGFELDPSNLGGWSLDKHHILNV
KSGILHKGTGENQFLTQQPAIITSIMGNGRRRSISCPSCNGLAEGNKLLAPVALAVGIDGSLYVGDFN
YIRRIFPSRN

| | | |
|---|---|---|
| NOV7d, 306276924 | SEQ ID NO: 119 | 2497 bp |
| DNA Sequence | ORF Start: at 2 | ORF Stop: end of sequence |

CACCAAGCTTAAAAACAGCAGCATAGACAGTGGTGAAGCAGAAGTTGGTCGGCGGGTAACACAAGAAG
TCCCACCAGGGGTGTTTTGGAGGTCACAAATTCACATCAGTCAGCCCCAGTTCTTAAAGTTCAACATC
TCCCTCGGGAAGGACGCTCTCTTTGGTGTTTACATAAGAAGAGGACTTCCACCATCTCATGCCCAGTA
TGACTTCATGGAACGTCTGGACGGGAAGGAGAAGTGGAGTGTGGTTGAGTCTCCCAGGGAACGCCGGA
GCATACAGACCTTGGTTCAGAATGAAGCCGTGTTTGTGCAGTACCTGGATGTGGGCCTGTGGCATCTG
GCCTTCTACAATGATGGAAAAGACAAAGAGATGGTTTCCTTCAATACTGTTGTCCTAGATTCAGTGCA
GGACTGTCCACGTAACTGCCATGGGAATGGTGAATGTGTGTCCGGGGTGTGTCACTGTTTCCCAGGAT
TTCTAGGAGCAGACTGTGCTAAAGCTGCCTGCCCTGTCCTGTGCAGTGGGAATGGACAATATTCTAAA
GGGACGTGCCAGTGCTACAGCGGCTGGAAAGGTGCAGAGTGCGACGTGCCCATGAATCAGTGCATCGA
TCCTTCCTGCGGGGGCCACGGCTCCTGCATTGATGGGAACTGTGTCTGCTCTGCTGGCTACAAAGGCG
AGCACTGTGAGGAAGTTGATTGCTTGGATCCCACCTGCTCCAGCCACGGAGTCTGTGTGAATGGAGAA
TGCCTGTGCAGCCCTGGCTGGGGTGGTCTGAACTGTGAGCTGGCGAGGGTCCAGTGCCCAGACCAGTG
CAGTGGGCATGGCACGTACCTGCCTGACACGGGCCTCTGCAGCTGCGATCCCAACTGGATGGGTCCCG
ACTGCTCTGTTGAAGTGTGCTCAGTAGACTGTGGCACTCACGGCGTCTGCATCGGGGGAGCCTGCCGC
TGTGAAGAGGGCTGGACAGGCGCAGCGTGTGACCAGCGCGTGTGCCACCCCCGCTGCATTGAGCACGG
GACCTGTAAAGATGGCAAATGTGAATGCCGAGAGGGCTGGAATGGTGAACACTGCACCATTGGTAGGC
AAACGGCAGGCACCGAAACAGATGGCTGCCCTGACTTGTGCAACGGTAACGGGAGATGCACACTGGGT
CAGAACAGCTGGCAGTGTGTCTGCCAGACCGGCTGGAGAGGGCCCGGATGCAACGTTGCCATGGAAAC
TTCCTGTGCTGATAACAAGGATAATGAGGGAGATGGCCTGGTGGATTGTTTGGACCCTGACTGCTGCC
TGCAGTCAGCCTGTCAGAACAGCCTGCTCTGCCGGGGGTCCCGGGACCCACTGGACATCATTCAGCAG
GGCCAGACGGATTGGCCCGCAGTGAAGTCCTTCTATGACCGTATCAAGCTCTTGGCAGGCAAGGATAG
CACCCACATCATTCCTGGAGAGAACCCTTTCAACAGCAGCTTGGTTTCTCTCATCCGAGGCCAAGTAG
TAACTACAGATGGAACTCCCCTGGTCGGTGTGAACGTGTCTTTTGTCAAGTACCCAAAATACGGCTAC
ACCATCACCCGCCAGGATGGCACGTTCGACCTGATCGCAAATGGAGGTGCTTCCTTGACTCTACACTT
TGAGCGAGCCCCGTTCATGAGCCAGGAGCGCACTGTGTGGCTGCCGTGGAACAGCTTTTACGCCATGG
ACACCCTGGTGATGAAGACCGAGGAGAACTCCATCCCCAGCTGTGACCTCAGTGGCTTTGTCCGGCCT
GATCCAATCATCATCTCCTCCCCACTGTCCACCTTCTTTAGTGCTGCCCCTGGGCAGAATCCCATCGT
GCCTGAGACCCAGGTTCTTCATGAAGAAATCGAGCTCCCTGGTTCCAATGTGAAACTTCGCTATCTGA
GCTCTAGAACTGCAGGGTACAAGTCACTGCTGAAGATCACCATGACCCAGTCCACAGTGCCCCTGAAC
CTCATTAGGGTTCACCTGATGGTGGCTGTCGAGGGGCATCTCTTCCAGAAGTCATTCCAGGCTTCTCC
CAACCTGGCCTACACCTTCATCTGGGACAAGACAGATGCGTATGGCCAAAGGGTGTATGGACTCTCAG
ATGCTGTTGTGTCTGTCGGGTTTGAATATGAGACCTGTCCCAGTCTAATTCTCTGGGAGAAAAGGACA
GCCCTCCTTCAGGGATTCGAGCTGGACCCCTCCAACCTCGGTGGCTGGTCCCTAGACAAACACCACAT
CCTCAATGTTAAAAGTGGAATCCTACACAAAGGCACTGGGGAAAACCAGTTCCTGACCCAGCAGCCTG
CCATCATCACCAGCATCATGGGCAATGGTCGCCGCCGGAGCATTTCCTGTCCCAGCTGCAACGGCCTT
GCTGAAGGCAACAAGCTGCTGGCCCCAGTGGCTCTGGCTGTTGGAATCGATGGGAGCCTCTATGTGGG
TGACTTCAATTACATCCGACGCATCTTTCCCTCTCGAAATCTCGAGGGC

| | | | |
|---|---|---|---|
| NOV7d, 306276924 | SEQ ID NO: 120 | 832 aa | MW at 90551.4kD |
| Protein Sequence | | | |

TKLKNSSIDSGEAEVGRRVTQEVPPGVFWRSQIHISQPQFLKFNISLGKDALFGVYIRRGLPPSHAQY
DFMERLDGKEKWSVVESPRERRSIQTLVQNEAVFVQYLDVGLWHLAFYNDGKDKEMVSFNTVVLDSVQ
DCPRNCHGNGECVSGVCHCFPGFLGADCAKAACPVLCSGNGQYSKGTCQCYSGWKGAECDVPMNQCID
PSCGGHGSCIDGNCVCSAGYKGEHCEEVDCLDPTCSSHGVCVNGECLCSPGWGGLNCELARVQCPDQC
SGHGTYLPDTGLCSCDPNWMGPDCSVEVCSVDCGTHGVCIGGACRCEEGWTGAACDQRVCHPRCIEHG
TCKDGKCECREGWNGEHCTIGRQTAGTETDGCPDLCNGNGRCTLGQNSWQCVCQTGWRGPGCNVAMET
SCADNKDNEGDGLVDCLDPDCCLQSACQNSLLCRGSRDPLDIIQQGQTDWPAVKSFYDRIKLLAGKDS
THIIPGENPFNSSLVSLIRGQVVTTDGTPLVGVNVSFVKYPKYGYTITRQDGTFDLIANGGASLTLHF
ERAPFMSQERTVWLPWNSFYAMDTLVMKTEENSIPSCDLSGFVRPDPIIISSPLSTFFSAAPGQNPIV
PETQVLHEEIELPGSNVKLRYLSSRTAGYKSLLKITMTQSTVPLNLIRVHLMVAVEGHLFQKSFQASP
NLAYTFIWDKTDAYGQRVYGLSDAVVSVGFEYETCPSLILWEKRTALLQGFELDPSNLGGWSLDKHHI
LNVKSGILHKGTGENQFLTQQPAIITSIMGNGRRRSISCPSCNGLAEGNKLLAPVALAVGIDGSLYVG
DFNYIRRIFPSRNLEG

| | | |
|---|---|---|
| NOV7e, 306276936 | SEQ ID NO: 121 | 2470 bp |
| DNA Sequence | ORF Start: at 2 | ORF Stop: end of sequence |

CACCAAGCTTAAAAACAGCAGCATAGACAGTGGTGAAGCAGAAGTTGGTCGGCGGGTAACACAAGAAG
TCCCACCAGGGGTGTTTTGGAGGTCACAAATTCACATCAGTCAGCCCCAGTTCTTAAAGTTCAACATC
TCCCTCGGGAAGGACGCTCTCTTTGGTGTTTACATAAGAAGAGGACTTCCACCATCTCATGCCCAGTA
TGACTTCATGGAACGTCTGGACGGGAAGGAGAAGTGGAGTGTGGTTGAGTCTCCCAGGGAACGCCGGA
GCATACAGACCTTGGTTCAGAATGAAGCCGTGTTTGTGCAGTACCTGGATGTGGGCCTGTGGCATCTG
GCCTTCTACAATGATGGAAAAGACAAAGAGATGGTTTCCTTCAATACTGTTGTCCTAGATTCAGTGCA
GGACTGTCCACGTAACTGCCATGGGAATGGTGAATGTGTGTCCGGGGTGTGTCACTGTTTCCCAGGAT
TTCTAGGAGCAGACTGTGCTAAAGCTGCCTGCCCTGTCCTGTGCAGTGGGAATGGACAATATTCTAAA
GGGACGTGCCAGTGCTACAGCGGCTGGAAAGGTGCAGAGTGCGACGTGCCCATGAATCAGTGCATCGA
TCCTTCCTGCGGGGGCCACGGCTCCTGCATTGATGGGAACTGTGTCTGCTCTGCTGGCTACAAAGGCG
AGCACTGTGAGGAAGTTGATTGCTTGGATCCCACCTGCTCCAGCCACGGAGTCTCTGTGAATGGAGAA
TGCCTGTGCAGCCCTGGCTGGGGTGGTCTGAACTGTGAGCTGGCGAGGGTCCAGTGCCCAGACCAGTG
CAGTGGGCATGGCACGTACCTGCCTGACACGGGCCTCTGCAGCTGCGATCCCAACTGGATGGGTCCCG
ACTGCTCTGTTGAAGTGTGCTCAGTAGACTGTGGCACTCACGGCGTCTGCATCGGGGGAGCCTGCCGC
TGTGAAGAGGGCTGGACAGGCGCAGCGTGTGACCAGCGCGTGTGCCACCCCCGCTGCATTGAGCACGG
GACCTGTAAAGATGGCAAATGTGAATGCCGAGAGGGCTGGAATGGTGAACACTGCACCATTGATGGCT
GCCCTGACTTGTGCAACGGTAACGGGAGATGCACACTGGGTCAGAACAGCTGGCAGTGTGTCTGCCAG
ACCGGCTGGAGAGGGCCCGGATGCAACGTTGCCATGGAAACTTCCTGTGCTGATAACAAGGATAATGA
GGGAGATGGCCTGGTGGATTGTTTGGACCCTGACTGCTGCCTGCAGTCAGCCTGTCAGAACAGCCTGC
TCTGCCGGGGGTCCCGGGACCCACTGGACATCATTCAGCAGGGCCAGACGGATTGGCCCGCAGTGAAG
TCCTTCTATGACCGTATCAAGCTCTTGGCAGGCAAGGATAGCACCCACATCATTCCTGGAGAGAACCC
TTTCAACAGCAGCTTGGTTTCTCTCATCCGAGGCCAAGTAGTAACTACAGATGGAACTCCCCTGGTCG
GTGTGAACGTGTCTTTTGTCAAGTACCCAAAATACGGCTACACCATCACCCGCCAGGATGGCACGTTC
GACCTGATCGCAAATGGAGGTGCTTCCTTGACTCTACACTTTGAGCGAGCCCCGTTCATGAGCCAGGA
GCGCACTGTGTGGCTGCCGTGGAACAGCTTTTACGCCATGGACACCCTGGTGATGAAGACCGAGGAGA
ACTCCATCCCCAGCTGTGACCTCAGTGGCTTTGTCCGGCCTGATCCAATCATCATCTCCTCCCCACTG
TCCACCTTCTTTAGTGCTGCCCCTGGGCAGAATCCCATCGTGCCTGAGACCCAGGTTCTTCATGAAGA
AATCGAGCTCCCTGGTTCCAATGTGAAACTTCGCTATCTGAGCTCTAGAACTGCAGGGTACAAGTCAC
TGCTGAAGATCACCATGACCCAGTCCACAGTGCCCCTGAACCTCATTAGGGTTCACCTGATGGTGGCT
GTCGAGGGGCATCTCTTCCAGAAGTCATTCCAGGCTTCTCCCAACCTGGCCTACACCTTCATCTGGGA
CAAGACAGATGCGTATGGCCAAAGGGTGTATGGACTCTCAGATGCTGTTGTGTCTGTCGGGTTTGAAT
ATGAGACCTGTCCCAGTCTAATTCTCTGGGAGAAAAGGACAGCCCTCCTTCAGGGATTCGAGCTGGAC
CCCTCCAACCTCGGTGGCTGGTCCCTAGACAAACACCACATCCTCAATGTTAAAAGTGGAATCCTACA
CAAAGGCACTGGGGAAAACCAGTTCCTGACCCAGCAGCCTGCCATCATCACCAGCATCATGGGCAATG
GTCGCCGCCGGAGCATTTCCTGTCCCAGCTGCAACGGCCTTGCTGAAGGCAACAAGCTGCTGGCCCCA
GTGGCTCTGGCTGTTGGAATCGATGGGAGCCTCTATGTGGGTGACTTCAATTACATCCGACGCATCTT
TCCCTCTCGAAATCTCGAGGGC

| | | | |
|---|---|---|---|
| NOV7e, 306276936 | SEQ ID NO: 122 | 823 aa | MW at 89649.5kD |
| Protein Sequence | | | |

TKLKNSSIDSGEAEVGRRVTQEVPPGVFWRSQIHISQPQFLKFNISLGKDALFGVYIRRGLPPSHAQY
DFMERLDGKEKWSVVESPRERRSIQTLVQNEAVFVQYLDVGLWHLAFYNDGKDKEMVSFNTVVLDSVQ
DCPRNCHGNGECVSGVCHCFPGFLGADCAKAACPVLCSGNGQYSKGTCQCYSGWKGAECDVPMNQCID
PSCGGHGSCIDGNCVCSAGYKGEHCEEVDCLDPTCSSHGVCVNGECLCSPGWGGLNCELARVQCPDQC
SGHGTYLPDTGLCSCDPNWMGPDCSVEVCSVDCGTHGVCIGGACRCEEGWTGAACDQRVCHPRCIEHG
TCKDGKCECREGWNGEHCTIDGCPDLCNGNGRCTLGQNSWQCVCQTGWRGPGCNVAMETSCADNKDNE
GDGLVDCLDPDCCLQSACQNSLLCRGSRDPLDIIQQGQTDWPAVKSFYDRIKLEAGKDSTHIIPGENP
FNSSLVSLIRGQVVTTDGTPLVGVNVSFVKYPKYGYTITRQDGTFDLIANGGASLTLHFERAPFMSQE
RTVWLPWNSFYAMDTLVMXTEENSIPSCDLSGFVRPDPIIISSPLSTFFSAAPGQNPIVPETQVLHEE
IELPGSNVKLRYLSSRTAGYKSLLKITNTQSTVPLNLIRVHLMVAVEGHLFQKSFQASPNLAYTFIWD
KTDAYGQRVYGLSDAVVSVGFEYETCPSLILWEKRTALLQGFELDPSNLGGWSLDKHHILNVKSGILH
KGTGENQFLTQQPAIITSIMGNGRRRSISCPSCNGLAEGNKLLAPVALAVGIDGSLYVGDFNYIRRIF
PSRNLEG

| | | |
|---|---|---|
| NOV7f, 308530526 | SEQ ID NO: 123 | 2470 bp |
| DNA Sequence | ORF Start: at 2 | ORF Stop: end of sequence |

CACCAAGCTTAAAAACAGCAGCATAGACAGTGGTGAAGCAGAAGTTGGTCGGCGGGTAACACAAGAAG
TCCCACCAGGGGTGTTTTGGAGGTCACAAATTCACATCAGTCAGCCCCAGTTCTTAAAGTTCAACATC
TCCCTCGGGAAGGACGCTCTCTTTGGTGTTTACATAAGAAGAGGACTTCCACCATCTCATGCCCAGTA
TGACTTCATGGAACGTCTGGACGGGAAGGAGAAGTGGAGTGTGGTTGAGTCTCCCAGGGAACGCCGGA
GCATACAGACCTTGGTTCAGAATGAAGCCGTGTTTGTGCAGTACCTGGATGTGGGCCTGTGGCATCTG
GCCTTCTACAATGATGGAAAAGACAAAGAGATGGTTTCCTTCAATACTGTTGTCCTAGATTCAGTGCA
GGACTGTCCACGTAACTGCCATGGGAATGGTGAATGTGTGTCCGGGGTGTGTCACTGTTTCCCAGGAT
TTCTAGGAGCAGACTGTGCTAAAGCTGCCTGCCCTGTCCTGTGCAGTGGGAATGGACAATATTCTAAA
GGGACGTGCCAGTGCTACAGCGGCTGGAAAGGTGCAGAGTGCGACGTGCCCATGAATCAGTGCATCGA
TCCTTCCTGCGGGGGCCACGGCTCCTGCATTGATGGGAACTGTGTCTGCTCTGCTGGCTACAAAGGCG
AGCACTGTGAGGAAGTTGATTGCTTGGATCCCACCTGCTCCAGCCACGGAGTCTGTGTGAATGGAGAA
TGCCTGTGCAGCCCTGGCTGGGGTGGTCTGAACTGTGAGCTGGCGAGGGTCCAGTGCCCAGACCAGTG
CAGTGGGCATGGCACGTACCTGCCTGACACAGGCCTCTGCAGCTGCGATCCCAACTGGATGGGTCCCG
ACTGCTCTGTTGAAGTGTGCTCAGTAGACTGTGGCACTCACGGCGTCTGCATCGGGGGAGCCTGCCGC
TGTGAAGAGGGCTGGACAGGCGCAGCGTGTGACCAGCGCGTGTGCCACCCCCGCTGCATTGAGCATGG
GACCTGTAAAGATGGCAAATGTGAATGCCGAGAGGGCTGGAATGGTGAACACTGCACCATTGATGGCT
GCCCTGACTTGTGCAACGGTAACGGGAGATGCACACTGGGTCAGAACAGCTGGCAGTGTGTCTGCCAG
ACCGGCTGGAGAGGGCCCGGATGCAACGTTGCCATGGAAACTTCCTGTGCTGATAACAAGGATAATGA
GGGAGATGGCCTGGTGGATTGTTTGGACCCTGACTGCTGCCTGCAGTCAGCCTGTCAGAACAGCCTGC
TCTGCCGGGGGTCCCGGGACCCACTGGACATCATTCAGCAGGGCCAGACGGATTGGCCCGCAGTGAAG
TCCTTCTATGACCGTATCAAGCTCTTGGCAGGCAAGGATAGCACCCACATCATTCCTGGAGAGAACCC
TTTCAACAGCAGCTTGGTTTCTCTCATCCGAGGCCAAGTAGTAACTACAGATGGAACTCCCCTGGTCG
GTGTGAACGTGTCTTTTGTCAAGTACCCAAAATACGGCTACACCATCACCCGCCAGGATGGCACGTTC
GACCTGATCGCAAATGGAGGTGCTTCCTTGACTCTACACTTTGAGCGAGCCCCGTTCATGAGCCAGGA
GCGCACTGTGTGGCTGCCGTGGAACAGCTTTTACGCCATGGACACCCTGGTGATGAAGACCGAGGAGA
ACTCCATCCCCAGCTGTGACCTCAGTGGCTTTGTCCGGCCTGATCCAATCATCATCTCCTCCCCACTG
TCCACCTTCTTTAGTGCTGCCCCTGGGCAGAATCCCATCGTGCCTGAGACCCAGGTTCTTCATGAAGA
AATCGAGCTCCCTGGTTCCAATGTGAAACTTCGCTATCTGAGCTCTAGAACTGCAGGGTACAAGTCAC
TGCTGAAGATCACCATGACCCAGTCCACAGTGCCCCTGAACCTCATTAGGGTTCACCTGATGGTGGCT
GTCGAGGGGCATCTCTTCCAGAAGTCATTCCAGGCTTCTCCCAACCTGGCCTACACCTTCATCTGGGA
CAAGACAGATGCGTATGGCCAAAGGGTGTATGGACTCTCAGATGCTGTTGTGTCTGTCGGGTTTGAAT
ATGAGACCTGTCCCAGTCTAATTCTCTGGGAGAAAAGGACAGCCCTCCTTCAGGGATTCGAGCTGGAC
CCCTCCAACCTCGGTGGCTGGTCCCTAGACAAACACCACATCCTCAATGTTAAAAGTGGAATCCTACA
CAAAGGCACTGGGGAAAACCAGTTCCTGACCCAGCAGCCTGCCATCATCACCAGCATCATGGGCAATG
GTCGCCGCCGGAGCATTTCCTGTCCCAGCTGCAACGGCCTTGCTGAAGGCAACAAGCTGCTGGCCCCA
GTGGCTCTGGCTGTTGGAATCGATGGGAGCCTCTATGTGGGTGACTTCAATTACATCCGACGCATCTT
TCCCTCTCGAAATCTCGAGGGC

| | | | |
|---|---|---|---|
| NOV7f, 308530526 | SEQ ID NO: 124 | 823 aa | MW at 89649.5kD |
| Protein Sequence | | | |

TKLKNSSIDSGEAEVGRRVTQEVPPGVFWRSQIHISQPQFLKFNISLGKDALFGVYIRRGLPPSHAQY
DFMERLDGKEKWSVVESPRERRSIQTLVQNEAVFVQYLDVGLWHLAFYNDGKDKEMVSFNTVVLDSVQ
DCPRNCHGNGECVSGVCHCFPGFLGADCAKAACPVLCSGNGQYSKGTCQCYSGWKGAECDVPMNQCID
PSCGGHGSCIDGNCVCSAGYKGEHCEEVDCLDPTCSSHGVCVNGECLCSPGWGGLNCELARVQCPDQC
SGHGTYLPDTGLCSCDPNWMGPDCSVEVCSVDCGTHGVCIGGACRCEEGWTGAACDQRVCHPRCIEHG
TCKDGKCECREGWNGEHCTIDGCPDLCNGNGRCTLGQNSWQCVCQTGWRGPGCNVAMETSCADNKDNE
GDGLVDCLDPDCCLQSACQNSLLCRGSRDPLDIIQQGQTDWPAVKSFYDRIKLLAGKDSTHIIPGENP
FNSSLVSLIRGQVVTTDGTPLVGVNVSFVKYPKYGYTITRQDGTFDLIANGGASLTLHFERAPFMSQE
RTVWLPWNSFYAMDTLVMKTEENSIPSCDLSGFVRPDPIIISSPLSTFFSAAPGQNPIVPETQVLHEE
IELPGSNVKLRYLSSRTAGYKSLLKITMTQSTVPLNLIRVHLMVAVEGHLFQKSFQASPNLAYTFIWD
KTDAYGQRVYGLSDAVVSVGFEYETCPSLILWEKRTALLQGFELDPSNLGGWSLDKHHILNVKSGILH
KGTGENQFLTQQPAIITSIMGNGRRRSISCPSCNGLAEGNKLLAPVALAVGIDGSLYVGDFNYIRRIF
PSRNLEG

| | | |
|---|---|---|
| NOV7g, 308530589 | SEQ ID NO: 125 | 2284 bp |
| DNA Sequence | ORF Start: at 2 | ORF Stop: end of sequence |

CACCAAGCTTAAAAACAGCAGCATAGACAGTGGTGAAGCAGAAGTTGGTCGGCGGGTAACACAAGAAG
TCCCACCAGGGGTGTTTTGGAGGTCACAAATTCACATCAGTCAGCCCCAGTTCTTAAAGTTCAACATC
TCCCTCGGGAAGGACGCTCTCTTTGGTGTTTACATAAGAAGAGGACTTCCACCATCTCATGCCCAGTA
TGACTTCATGGAACGTCTGGACGGGAAGGAGAAGTGGAGTGTGGTTGAGTCTCCCAGGGAACGCCGGA
GCATACAGACCTTGGTTCAGAATGAAGCCGTGTTTGTGCAGTACCTGGATGTGGGCCTGTGGCATCTG
GCCTTCTACAATGATGGAAAAGACAAAGAGATGGTTTCCTTCAATACTGTTGTCCTAGATTCAGTGCA
GGACTGTCCACGTAACTGCCATGGGAATGGTGAATGTGTGTCCGGGGTGTGTCACTGTTTCCCAGGAT
TTCTAGGAGCAGACTGTGCTAAAGCTGCCTGCCCTGTCCTGTGCAGTGGGAATGGACAATATTCTAAA
GGGACGTGCCAGTGCTACAGCGGCTGGAAAGGTGCAGAGTGCGACGTGCCCATGAATCAGTGCATCGA
TCCTTCCTGCGGGGGCCACGGCTCCTGCATTGATGGGAACTGTGTCTGCTCTGCTGGCTACAAAGGCG
AGCACTGTGAGGAAGTTGATTGCTTGGATCCCACCTGCTCCAGCCACGGAGTCTGTGTGAATGGAGAA
TGCCTGTGCAGCCCTGGCTGGGGTGGTCTGAACTGTGAGCTGGCGAGGGTCCAGTGCCCAGACCAGTG
CAGTGGGCATGGCACGTACCTGCCTGACACGGGCCTCTGCAGCTGCGATCCCAACTGGATGGGTCCCG
ACTGCTCTGTTGATGGCTGCCCTGACTTGTGCAACGGTAACGGGAGATGCACACTGGGTCAGAACAGC
TGGCAGTGTGTCTGCCAGACCGGCTGGAGAGGGCCCGGATGCAACGTTGCCATGGAAACTTCCTGTGC
TGATAACAAGGATAATGAGGGAGATGGCCTGGTGGATTGTTTGGACCCTGACTGCTGCCTGCAGTCAG
CCTGTCAGAACAGCCTGCTCTGCCGGGGGTCCCGGGACCCACTGGACATCATTCAGCAGGGCCAGACG
GATTGGCCCGCAGTGAAGTCCTTCTATGACCGTATCAAGCTCTTGGCAGGCAAGGATAGCACCCACAT
CATTCCTGGAGAGAACCCTTTCAACAGCAGCTTGGTTTCTCTCATCCGAGGCCAAGTAGTAACTACAG
ATGGAACTCCCCTGGTCGGTGTGAACGTGTCTTTTGTCAAGTACCCAAAATACGGCTACACCATCACC
CGCCAGGATGGCACGTTCGACCTGATCGCAAATGGAGGTGCTTCCTTGACTCTACACTTTGAGCGAGC
CCCGTTCATGAGCCAGGAGCGCACTGTGTGGCTGCCGTGGAACAGCTTTTACGCCATGGACACCCTGG
TGATGAAGACCGAGGAGAACTCCATCCCCAGCTGTGACCTCAGTGGCTTTGTCCGGCCTGATCCAATC
ATCATCTCCTCCCCACTGTCCACCTTCTTTAGTGCTGCCCCTGGGCAGAATCCCATCGTGCCTGAGAC
CCAGGTTCTTCATGAAGAAATCGAGCTCCCTGGTTCCAATGTGAAACTTCGCTATCTGAGCTCTAGAA
CTGCAGGGTACAAGTCACTGCTGAAGATCACCATGACCCAGTCCACAGTGCCCCTGAACCTCATTAGG
GTTCACCTGATGGTGGCTGTCGAGGGGCATCTCTTCCAGAAGTCATTCCAGGCTTCTCCCAACCTGGC
CTACACCTTCATCTGGGACAAGACAGATGCGTATGGCCAAAGGGTGTATGGACTCTCAGATGCTGTTG
TGTCTGTCGGGTTTGAATATGAGACCTGTCCCAGTCTAATTCTCTGGGAGAAAAGGACAGCCCTCCTT
CAGGGATTCGAGCTGGACCCCTCCAACCTCGGTGGCTGGTCCCTAGACAAACACCACATCCTCAATGT
TAAAAGTGGAATCCTACACAAAGGCACTGGGGAAAACCAGTTCCTGACCCAGCAGCCTGCCATCATCA
CCAGCATCATGGGCAATGGTCGCCGCCGGAGCATTTCCTGTCCCAGCTGCAACGGCCTTGCTGAAGGC
AACAAGCTGCTGGCCCCAGTGGCTCTGGCTGTTGGAATCGATGGGAGCCTCTATGTGGGTGACTTCAA
TTACATCCGACGCATCTTTCCCTCTCGAAATCTCGAGGGC

| | | | |
|---|---|---|---|
| NOV7g, 308530589 | SEQ ID NO: 126 | 761 aa | MW at 83010.1kD |
| Protein Sequence | | | |

TKLKNSSIDSGEAEVGRRVTQEVPPGVFWRSQIHISQPQFLKFNISLGKDALFGVYIRRGLPPSHAQY
DFMERLDGKEKWSVVESPRERRSIQTLVQNEAVFVQYLDVGLWHLAFYNDGKDKEMVSFNTVVLDSVQ
DCPRNCHGNGECVSGVCHCFPGFLGADCAKAACPVLCSGNGQYSKGTCQCYSGWKGAECDVPMNQCID
PSCGGHGSCIDGNCVCSAGYKGEHCEEVDCLDPTCSSHGVCVNGECLCSPGWGGLNCELARVQCPDQC
SGHGTYLPDTGLCSCDPNWMGPDCSVDGCPDLCNGNGRCTLGQNSWQCVCQTGWRGPGCNVAMETSCA
DNKDNEGDGLVDCLDPDCCLQSACQNSLLCRGSRDPLDIIQQGQTDWPAVKSFYDRIKLLAGKDSTHI
IPGENPFNSSLVSLIRGQVVTTDGTPLVGVNVSFVKYPKYGYTITRQDGTFDLIANGGASLTLHFERA
PFMSQERTVWLPWNSFYAMDTLVMKTEENSIPSCDLSGFVRPDPIIISSPLSTFFSAAPGQNPIVPET
QVLHEEIELPGSNVKLRYLSSRTAGYKSLLKITMTQSTVPLNLIRVHLMVAVEGHLFQKSFQASPNLA
YTFIWDKTDAYGQRVYGLSDAVVSVGFEYETCPSLILWEKRTALLQGFELDPSNLGGWSLDKHHILNV
KSGILHKGTGENQFLTQQPAIITSIMGNGRRRSISCPSCNGLAEGNKLLAPVALAVGIDGSLYVGDFN
YIRRIFPSRNLEG

| | | |
|---|---|---|
| NOV7h, CG50426-01 | SEQ ID NO: 127 | 1431 bp |
| DNA Sequence | ORF Start: ATG at 69 | ORF Stop: TAG at 1212 |

AAAAAAGGCGGGGGGTGGACTTAGCAGTGTAATTTGAGACCGGTGGTAAGGATTGGAGCGAGCTAGAG
ATGCTGCACGCTGCTAACAAGGGAAGGAAGCCTTCAGCTGAGGCAGGTCGTCCCATTCCACCTACATC
CTCGCCTAGTCTCCTCCCATCTGCTCAGCTGCCTAGCTCCCATAATCCTCCACCAGTTAGCTGCCAGA
TGCCATTGCTAGACAGCAACACCTCCCATCAAATCATGGACACCAACCCTGATGAGGAATTCTCCCCC
AATTCATACCTGCTCAGAGCATGCTCAGGGCCCCAGCAAGCCTCCAGCAGTGGCCCTCCGAACCACCA
CAGCCAGTCGACTCTGAGGCCCCCTCTCCCACCCCCTCACAACCACACGCTGTCCCATCACCACTCGT
CCGCCAACTCCCTCAACAGGAACTCACTGACCAATCGGCGGAGTCAGATCCACGCCCCGGCCCCAGCG
CCCAATGACCTGGCCACCACACCAGAGTCCGTTCAGCTTCAGGACAGCTGGGTGCTAAACAGCAACGT
GCCACTGGAGACCCGGCACTTCCTCTTCAAGACCTCCTCGGGGAGCACACCCTTGTTCAGCAGCTCTT
CCCCGGGATACCCTTTGACCTCAGGAACGGTTTACACGCCCCCGCCCCGCCTGCTGCCCAGGAATACT
TTCTCCAGGAAGGCTTTCAAGCTGAAGAAGCCCTCCAAATACTGCAGCTGGAAATGTGCTGCCCTCTC
CGCCATTGCCGCGGCCCTCCTCTTGGCTATTTTGCTGGCGTATTTCATAGTGCCCTGGTCGTTGAAAA
ACAGCAGCATAGACAGTGGTGAAGCAGAAGTTGGTCGGCGGGTAACACAAGAAGTCCCACCAGGGGTG
TTTTGGAGGTCACAAATTCACATCAGTCAGCCCCAGTTCTTAAAGTTCAACATCTCCCTCGGGAAGGA
CGCTCTCTTTGGTGTTTACATAAGAAGAGGACTTCCACCATCTCATGCCCAGTATGACTTCATGGAAC
GTCTGGACGGGAAGGAGAAGTGGAGTGTGGTTGAGTCTCCCAGGGAACGCCGGAGCATACAGACCTTG
GTTCAGAATGAAGCCGTGTTTGTGCAGTACCTGGATGTGGGCCTGTGGCATCTGGCCTTCTACAATGA
TGGAAAAGACAAAGAGATGGTTTCCTTCAATACTGTTGTCCTAGATGGGACCATCTAGTTGCAGAAAA
ACAAGCTCAGGGCGCCCACTGATTTGACATTATGATTCAGTGCAGGACTGTCCACGTAACTGCCATGG
GAATGGTGAANTGTGTGTCCGGGGTGTGTCACTGTTTCCCAGGATTTCTAGGAGCAGACTGTGCTAAA
GACCTTCCTGCCTTGACTTTCTGCAAGACAATCATTAATAAAGCTGCTCTGTAAATACTAAAAAAAAA
ACA

| | | | |
|---|---|---|---|
| NOV7h, CG50426-01 | SEQ ID NO: 128 | 381 aa | MW at 42017.0kD |
| Protein Sequence | | | |

MLHAANKGRKPSAEAGRPIPPTSSPSLLPSAQLPSSHNPPPVSCQMPLLDSNTSHQIMDTNPDEEFSP
NSYLLHACSGPQQASSSGPPNHHSQSTLRPPLPPPHNHTLSHHHSSANSLNRNSLTNRRSQIHAPAPA
PNDLATTPESVQLQDSWVLNSNVPLETRHFLFKTSSGSTPLFSSSSPGYPLTSGTVYTPPPRLLPRNT
FSRKAFKLKKPSKYCSWKCAALSAIAAALLLAILLAYFIVPWSLKNSSIDSGEAEVGRRVTQEVPPGV
FWRSQIHISQPQFLKFNISLGKDALFGVYIRRGLPPSHAQYDFMERLDGKEKWSVVESPRERRSIQTL
VQNEAVFVQYLDVGLWHLAFYNDGKDKEMVSFNTVVLDGTI

| | | |
|---|---|---|
| NOV7i, CG50426-02 | SEQ ID NO: 129 | 1447 bp |
| DNA Sequence | ORF Start: ATG at 277 | ORF Stop: at 1447 |

GCTCCAAAGCGAGCTGGGACCGAAGACTCTAGGCTAAGTTATCTATGTAGATGGTGTCAGGGAGCGAA
GCTACTGACCGAGCTGCTGTTACATCCAGCTTTTTAATTGCCTAAGCGGTCTGGGGCTTGCTTCGTCA
TTTGGCTTTGCTGTGGAGCACTCCTGTAAAGCCAGCTGAATTGTACATCGAAGATCCACCCTTTTGGT
GGCAAAGTGACAAGTGCCAAAACTCAGGCCTGACTTTTCTGAAAACATCAGCATTCTGCCATATCTGG
AATAATGGATGTAAAGGACCGGCGACACCGCTCTTTGACCAGAGGACGCTGTGGCAAAGAGTGTCGCT
ACACAAGCTCCTCTCTGGACAGTGAGGACTGCCGGGTGCCCACACAGAAATCCTACAGCTCCAGTGAG
ACTCTGAAGGCCTATGACCATGACAGCAGGATGCACTATGGAAACCGAGTCACAGACCTCATCCACCG
GGAGTCAGATGAGTTTCCTAGACAAGGAACCAACTTCACCCTTGCCGAACTGGGCATCTGTGAGCCCT
CCCCACACCGAAGCGGCTACTGCTCCGACATGGGGATCCTTCACCAGGGCTACTCCCTTAGCACAGGG
TCTGACGCCGACTCCGACACCGAGGGAGGGATGTCTCCAGAACACGCCATCAGACTGTGGGGCAGAGG
GATAAAATCCAGGCGCAGTTCCGGCCTGTCCAGTCGTGAAAACTCGGCCCTTACCCTGACTGACTCTG
ACAACGAAAACAAATCAGATGATGAGAACGGTCGTCCCATTCCACCTACATCCTCGCCTAGTCTCCTC
CCATCTGCTCAGCTGCCTAGCTCCCATAATCCTCCACCAGTTAGCTGCCAGATGCCATTGCTAGACAG
CAACACCTCCCATCAAATCATGGACACCAACCCTGATGAGGAATTCTCCCCCAATTCATACCTGCTCA
GAGCATGCTCAGGGCCCCAGCAAGCCTCCAGCAGTGGCCCTCCGAACCACCACAGCCAGTCGACTCTG
AGGCCCCCTCTCCCACCCCCTCACAACCACACGCTGTCCCATCACCACTCGTCCGCCAACTCCCTCAA
CAGGAACTCACTGACCAATCGGCGGAGTCAGATCCACGCCCCGGCCCCAGCGCCCAATGACCTGGCCA
CCACACCAGAGTCCGTTCAGCTTCAGGACAGCTGGGTGCTAAACAGCAACGTGCCACTGGAGACCCGG
CACTTCCTCTTCAAGACCTCCTCGGGGAGCACACCCTTGTTCAGCAGCTCTTCCCCGGGATACCCTTT
GACCTCAGGAACGGTTTACACGCCCCCGCCCCGCCTGCTGCCCAGGAATACTTTCTCCAGGAAGGcTT
TCAAGCTGAAGAAGCCCTCCAAATACTGCAGCTGGAAATGTGCTGCCCTCTCCGCCATTGCCGCGGCC
CTCCTCTTGGCTATTTTGC

| | | | |
|---|---|---|---|
| NOV7i, CG50426-02 | SEQ ID NO: 130 | 390 aa | MW at 42705.6kD |
| Protein Sequence | | | |

MDVKDRPHRSLTRGRCGKECRYTSSSLDSEDCRVPTQKSYSSSETLKAYDHDSRMHYGNRVTDLIHRE
SDEFPRQGTNFTLAELGICEPSPHRSGYCSDMGILHQGYSLSTGSDADSDTEGGMSPEHAIRLWGRGI
KSRRSSGLSSRENSALTLTDSDNENKSDDENGRPIPPTSSPSLLPSAQLPSSHNPPPVSCQMPLLDSN
TSHQIMDTNPDEEFSPNSYLLPACSGPQQASSSGPPNHHSQSTLRPPLPPPHNHTLSHHHSSANSLNR
NSLTNRRSQIHAPAPAPNDLATTPESVQLQDSWVLNSNVPLETRHFLFKTSSGSTPLFSSSSPGYPLT
SGTVYTPPPRLLPRNTFSRKAFKLKKPSKYCSWKCAALSAIAAALLLAIL

| | | |
|---|---|---|
| NOV7j, CG50426-03 | SEQ ID NO: 131 | 4888 bp |
| DNA Sequence | ORF Start: ATG at 247 | ORF Stop: TGA at 1840 |

TACTCACTATAGGGCTCGAGCGGCCGCCCGGGCAGGTCCAGCATTAGATGAGTTGACAAAAATGCAGT
TTCAGCTCTGAAGGTCTGAAAGATTCTGCTGCAACTAAAGCTCTGAAGATTCTGCTACAACTATGACA
TCCATTTTCTCCCACTTCAGACAGGATGAATACAAGGTGGCAAAGTGACAAGTGCCAAAACTCAGGCC
TGACTTTCCTGAAAACATCAGCATTCTGCCATATCTGGAATAATGGATGTAAAGGACCGGCGACACCG
CTCTTTGACCAGAGGACGCTGTGGCAAAGAGTGTCGCTACACAAGCTCCTCTCTGGACAGTGAGGACT
GCCGGGTGCCCACACAGAAATCCTACAGCTCCAGTGAGACTCTGAAGGCCTATGACCATGACAGCAGG
ATGCACTATGGAAACCGAGTCACAGACCTCATCCACCGGGAGTCAGATGAGTTTCCTAGACAAGGAAC
CAACTTCACCCTTGCCGAACTGGGCATCTGTGAGCCCTCCCCACACCGAAGCGGCTACTGCTCCGACA
TGGGGATCCTTCACCAGGGCTACTCCCTTAGCACAGGGTCTGACGCCGACTCCGACACCGAGGGAGGG
ATGTCTCCAGAACACGCCATCAGACTGTGGGGCAGAGGGATAAAATCCAGGCGCAGTTCCGGCCTGTC
CAGTCGTGAAAACTCGGCCCTTACCCTGACTGACTCTGACAACGAAAACAAATCAGATGATGAGAACG
GTCGTCCCATTCCACCTACATCCTCGCCTAGTCTCCTCCCATCTGCTCAGCTGCCTAGCTCCCATAAT
CCTCCACCAGTTAGCTGCCAGATGCCATTGCTAGACAGCAACACCTCCCATCAAATCATGGACACCAA
CCCTGATGAGGAATTCTCCCCCAATTCATACCTGCTCAGAGCATGCTCAGGGCCCCAGCAAGCCTCCA
GCAGTGGCCCTCCGAACCACCACAGCCAGTCGACTCTGAGGCCCCCTCTCCCACCCCCTCACAACCAC
ACGCTGTCCCATCACCACTCGTCCGCCAACTCCCTCAACAGGAACTCACTGACCAATCGGCGGAGTCA
GATCCACGCCCCGGCCCCAGCGCCCAATGACCTGGCCACCACACCAGAGTCCGTTCAGCTTCAGGACA
GCTGGGTGCTAAACAGCAACGTGCCACTGGAGACCCGGCACTTCCTCTTCAAGACCTCCTCGGGGAGC
ACACCCTTGTTCAGCAGCTCTTCCCCGGGATACCCTTTGACCTCAGGAACGGTTTACACGCCCCCGCC
CCGCCTGCTGCCCAGGAATACTTTCTCCAGGAAGGCTTTCAAGCTGAAGAAGCCCTCCAAATACTGCA
GCTGGAAATGTGCTGCCCTCTCCGCCATTGCCGCGGCCCTCCTCTTGGCTATTTTGCTGGCGTATTTC
ATAGTGCCCTGGTCGTTGAAAAACAGCAGCATAGACAGTGGTGAAGCAGAAGTTGGTCGGCGGGTAAC
ACAAGAAGTCCCACCAGGGGTGTTTTGGAGGTCACAAATTCACATCAGTCAGCCCCAGTTCTTAAAGT
TCAACATCTCCCTCGGGAAGGACGCTCTCTTTGGTGTTTACATAAGAAGAGGACTTCCACCATCTCAT
GCCCAGTATGACTTCATGGAACGTCTGGACGGGAAGGAGAAGTGGAGTGTGGTTGAGTCTCCCAGGGA
ACGCCGGAGCATACAGACCTTGGTTCAGAATGAAGCCGTGTTTGTGCAGTACCTGGATGTGGGCCTGT
GGCATCTGGCCTTCTACAATGATGGAAAAGACAAAGAGATGGTTTCCTTCAATACTGTTGTCCTAGAT
AGCTGAGGTAGCCGGCTCTGGCCTCGGCTAGCCCAGAAAGGGGCTCCCACAGTGCAGCAGCGGGCTGA
AGGGCTCCTCAAGCGTGGCCAGAGTGGGCGCTGAGGCCGAGGAGGCACCGAGAGCGAGCGAGGGCTGC
AAGGTCTGCCAGCACGCTGTCACTTCTCACTATTTTGATTGGTATTGTGTCCGGAATTGGTGGGTTCT
TGGTCTCACTGACTTCAAGAATGAAGCCACGGACCCTCGCGTTACATCCAGCTTTTTAATTGCCTAAG
CGGTCTGGGGCTTGCTTCGTCATTTGGCTTTGCTGTGGAGCACTCCTGTAAAGCCAGCTGAATTGTAC
ATCGAAGATCCACCCTTTTGGTGGCAAAGTGACAAGTGCCAAAACTCAGGCCTGACTTTTCTGAAAAC
ATCAGCATTCTGCCATATCTGGAATAATGGATGTAAAGGACCGGCGACACCGCTCTTTGACCAGAGGA
CGCTGTGGCAAAGAGTGTCGCTACACAAGCTCCTCTCTGGACAGTGAGGACTGCCGGGTGCCCACACA
GAAATCCTACAGCTCCAGTGAGACTCTGAAGGCCTATGACCATGACAGCAGGATGCACTATGGAAACC
GAGTCACAGACCTCATCCACCGGGAGTCAGATGAGTTTCCTAGACAAGGAACCAACTTCACCCTTGCC
GAACTGGGCATCTGTGAGCCCTCCCCACACCGAAGCGGCTACTGCTCCGACATGGGGATCCTTCACCA
GGGCTACTCCCTTAGCACAGGGTCTGACGCCGACTCCGACACCGAGGGAGGGATGTCTCCAGAACACG
CCATCAGACTGTGGGGCAGAGGGATAAAATCCAGGCGCAGTTCCGGCCTGTCCAGTCGTGAAAACTCG
GCCCTTACCCTGACTGACTCTGACAACGAAAACAAATCAGATGATGAGAACGGTCGTCCCATTCCACC
TACATCCTCGCCTAGTCTCCTCCCATCTGCTCAGCTGCCTAGCTCCCATAATCCTCCACCAGTTAGCT
GCCAGATGCCATTGCTAGACAGCAACACCTCCCATCAAATCATGGACACCAACCCTGATGAGGAATTC
TCCCCCAATTCATACCTGCTCAGAGCATGCTCAGGGCCCCAGCAAGCCTCCAGCAGTGGCCCTCCGAA
CCACCACAGCCAGTCGACTCTGAGGCCCCCTCTCCCACCCCCTCACAACCACACGCTGTCCCATCACC
ACTCGTCCGCCAACTCCCTCAACAGGAACTCACTGACCAATCGGCGGAGTCAGATCCACGCCCCGGCC
CCAGCGCCCAATGACCTGGCCACCACACCAGAGTCCGTTCAGCTTCAGGACAGCTGGGTGCTAAACAG
CAACGTGCCACTGGAGACCCGGCACTTCCTCTTCAAGACCTCCTCGGGGAGCACACCCTTGTTCAGCA
GCTCTTCCCCGGGATACCCTTTGACCTCAGGAACGGTTTACACGCCCCCGCCCCGCCTGCTGCCCAGG
AATACTTTCTCCAGGAAGGCTTTCAAGCTGAAGAAGCCCTCCAAATACTGCAGCTGGAAATGTGCTGC
CCTCTCCGCCATTGCCGCGGCCCTCCTCTTGGCTATTTTGCGCTCCAAAGCGAGCTGGGACCGAAGAC
TCTAGGCTAAGTTATCTATGTAGATGGTGTCAGGGAGCGAAGCTACTGACCGAGCTGCTGTTACATCC
AGCTTTTTAATTGCCTAAGCGGTCTGGGGCTTGCTTCGTCATTTGGCTTTGCTGTGGAGCACTCCTGT
AAAGCCAGCTGAATTGTACATCGAAGATCCACCCTTTTGGTGGCAAAGTGACAAGTGCCAAAACTCAG
GCCTGACTTTTCTGAAAACATCAGCATTCTGCCATATCTGGAATAATGGATGTAAAGGACCGGCGACA
CCGCTCTTTGACCAGAGGACGCTGTGGCAAAGAGTGTCGCTACACAAGCTCCTCTCTGGACAGTGAGG
ACTGCCGGGTGCCCACACAGAAATCCTACAGCTCCAGTGAGACTCTGAAGGCCTATGACCATGACAGC
AGGATGCACTATGGAAACCGAGTCACAGACCTCATCCACCGGGAGTCAGATGAGTTTCCTAGACAAGG
AACCAACTTCACCCTTGCCGAACTGGGCATCTGTGAGCCCTCCCCACACCGAAGCGGCTACTGCTCCG
ACATGGGGATCCTTCACCAGGGCTACTCCCTTAGCACAGGGTCTGACGCCGACTCCGACACCGAGGGA
GGGATGTCTCCAGAACACGCCATCAGACTGTGGGGCAGAGGGATAAAATCCAGGCGCAGTTCCGGCCT
GTCCAGTCGTGAAAACTCGGCCCTTACCCTGACTGACTCTGACAACGAAAACAAATCAGATGATGAGA
ACGGTCGTCCCATTCCACCTACATCCTCGCCTAGTCTCCTCCCATCTGCTCAGCTGCCTAGCTCCCAT
AATCCTCCACCAGTTAGCTGCCAGATGCCATTGCTAGACAGCAACACCTCCCATCAAATCATGGACAC
CAACCCTGATGAGGAATTCTCCCCCAATTCATACCTGCTCAGAGCATGCTCAGGGCCCCAGCAAGCCT
CCAGCAGTGGCCCTCCGAACCACCACAGCCAGTCGACTCTGAGGCCCCCTCTCCCACCCCCTCACAAC
CACACGCTGTCCCATCACCACTCGTCCGCCAACTCCCTCAACAGGAACTCACTGACCAATCGGCGGAG
TCAGATCCACGCCCCGGCCCCAGCGCCCAATGACCTGGCCACCACACCAGAGTCCGTTCAGCTTCAGG
ACAGCTGGGTGCTAAACAGCAACGTGCCACTGGAGACCCGGCACTTCCTCTTCAAGACCTCCTCGGGG
AGCACACCCTTGTTCAGCAGCTCTTCCCCGGGATACCCTTTGACCTCAGGAACGGTTTACACGCCCCC
GCCCCGCCTGCTGCCCAGGAATACTTTCTCCAGGAAGGCTTTCAAGCTGAAGAAGCCCTCCAAATACT
GCAGCTGGAAATGTGCTGCCCTCTCCGCCATTGCCGCGGCCCTCCTCTTGGCTATTTTGC

| | | | |
|---|---|---|---|
| NOV7j, CG50426-03 | SEQ ID NO: 132 | 531 aa | MW at 58938.0kD |
| Protein Sequence | | | |

MDVKDRRHRSLTRGRCGKECRYTSSSLDSEDCRVPTQKSYSSSETLKAYDHDSRMHYGNRVTDLIHRE
SDEFPRQGTNFTLAELGICEPSPHRSGYCSDMGTLHQGYSLSTGSDADSDTEGGMSPEHAIRLWGRGI
KSRRSSGLSSRENSALTLTDSDNENKSDDENGRPIPPTSSPSLLPSAQLPSSHNPPPVSCQMPLLDSN
TSHQIMDTNPDEEFSPNSYLLRACSGPQQASSSGPPNHHSQSTLRPPLPPPHNHTLSHHHSSANSLNR
NSLTNRRSQIHAPAPAPNDLATTPESVQLQDSWVLNSNVPLETRHFLFKTSSGSTPLFSSSSPGYPLT
SGTVYTPPPRLLPRNTFSRKAFKLKKPSKYCSWKCAALSAIAAALLLAILLAYFIVPWSLKNSSIDSG
EAEVGRRVTQEVPPGVFWRSQIHISQPQFLKFNISLGKDALFGVYIRRGLPPSHAQYDFMERLDGKEK
WSVVESPRERRSIQTLVQNEAVFVQYLDVGLWHLAFYNDGKDKEMVSFNTVVLDS

| | | |
|---|---|---|
| NOV7k, CG50426-04 | SEQ ID NO: 133 | 1605 bp |
| DNA Sequence | ORF Start: ATG at 435 | ORF Stop: at 1605 |

AGCTGAGGTAGCCGGCTCTGGCCTCGGCTAGCCCAGAAAGGGGCTCCCACAGTGCAGCAGCGGGCTGA
AGGGCTCCTCAAGCGTGGCCAGAGTGGGCGCTGAGGCCGAGGAGGCACCGAGAGCGAGCGAGGGCTGC
AAGGTCTGCCAGCACGCTGTCACTTCTCACTATTTTGATTGGTATTGTGTCCGGAATTGGTGGGTTCT
TGGTCTCACTGACTTCAAGAATGAAGCCACGGACCCTCGCGTTACATCCAGCTTTTTAATTGCCTAAC
CGGTCTGGGGCTTGCTTCGTCATTTGGCTTTGCTGTGGAGCACTCCTGTAAAGCCAGCTGAATTGTAC
ATCGAAGATCCACCCTTTTGGTGGCAAAGTGACAAGTGCCAAAACTCAGGCCTGACTTTTCTGAAAAC
ATCAGCATTCTGCCATATCTGGAATAATGGATGTAAAGGACCGGCGACACCGCTCTTTGACCAGAGGA
CGCTGTGGCAAAGAGTGTCGCTACACAAGCTCCTCTCTGGACAGTGAGGACTGCCGGGTGCCCACACA
GAAATCCTACAGCTCCAGTGAGACTCTGAAGGCCTATGACCATGACAGCAGGATGCACTATGGAAACC
GAGTCACAGACCTCATCCACCGGGAGTCAGATGAGTTTCCTAGACAAGGAACCAACTTCACCCTTGCC
GAACTGGGCATCTGTGAGCCCTCCCCACACCGAAGCGGCTACTGCTCCGACATGGGGATCCTTCACCA
GGGCTACTCCCTTAGCACAGGGTCTGACGCCGACTCCGACACCGAGGGAGGGATGTCTCCAGAACACG
CCATCAGACTGTGGGGCAGAGGGATAAAATCCAGGCGCAGTTCCGGCCTGTCCAGTCGTGAAAACTCG
GCCCTTACCCTGACTGACTCTGACAACGAAAACAAATCAGATGATGAGAACGGTCGTCCCATTCCACC
TACATCCTCGCCTAGTCTCCTCCCATCTGCTCAGCTGCCTAGCTCCCATAATCCTCCACCAGTTAGCT
GCCAGATGCCATTGCTAGACAGCAACACCTCCCATCAAATCATGGACACCAACCCTGATGAGGAATTC
TCCCCCAATTCATACCTGCTCAGAGCATGCTCAGGGCCCCAGCAAGCCTCCAGCAGTGGCCCTCCGAA
CCACCACAGCCAGTCGACTCTGAGGCCCCCTCTCCCACCCCCTCACAACCACACGCTGTCCCATCACC
ACTCGTCCGCCAACTCCCTCAACAGGAACTCACTGACCAATCGGCGGAGTCAGATCCACGCCCCGGCC
CCAGCGCCCAATGACCTGGCCACCACACCAGAGTCCGTTCAGCTTCAGGACAGCTGGGTGCTAAACAG
CAACGTGCCACTGGAGACCCGGCACTTCCTCTTCAAGACCTCCTCGGGGAGCACACCCTTGTTCAGCA
GCTCTTCCCCGGGATACCCTTTGACCTCAGGAACGGTTTACACGCCCCCGCCCCGCCTGCTGCCCAGG
AATACTTTCTCCAGGAAGGCTTTCAAGCTGAAGAAGCCCTCCAAATACTGCAGCTGGAAATGTGCTGC
CCTCTCCGCCATTGCCGCGGCCCTCCTCTTGGCTATTTTGC

| | | | |
|---|---|---|---|
| NOV7k, CG50426-04 | SEQ ID NO: 134 | 390 aa | MW at 42705.6kD |
| Protein Sequence | | | |

MDVKDRRHRSLTRGRCGKECRYTSSSLDSEDCRVPTQKSYSSSETLKAYDHDSRMHYGNRVTDLIHRE
SDEFPRQGTNFTLAELGICEPSPHRSGYCSDMGILHQGYSLSTGSDADSDTEGGMSPEHAIRLWGRGI
KSRRSSGLSSRENSALTLTDSDNENKSDDENGRPIPPTSSPSLLPSAQLPSSHNPPPVSCQMPLLDSN
TSHQIMDTNPDEEFSPNSYLLRACSGPQQASSSGPPNHHSQSTLRPPLPPPHNHTLSHHHSSANSLNR
NSLTNRRSQIHAPAPAPNDLATTPESVQLQDSWVLNSNVPLETRHFLFKTSSGSTPLFSSSSPGYPLT
SGTVYTPPPRLLPRNTFSRKAFKLKKPSKYCSWKCAALSAIAAALLLAIL

| | | |
|---|---|---|
| NOV7l, CG50426-05 | SEQ ID NO: 135 | 9668 bp |
| DNA Sequence | ORF Start: ATG at 122 | ORF Stop: TAA at 8321 |

GGGAGTTGGAACCAGCATTAGATGAGTTGACAAAAATGCAGTTTCAGGTGGCAAAGTGACAAGTGCCA
AAACTCAGGCCTGACTTTTCTGAAAACATCAGCATTCTGCCATATCTGGAATAATGGATGTAAAGGAC
CGGCGACACCGCTCTTTGACCAGAGGACGCTGTGGCAAAGAGTGTCGCTACACAAGCTCCTCTCTGGA
CAGTGAGGACTGCCGGGTGCCCACACAGAAATCCTACAGCTCCAGTGAGACTCTGAAGGCCTATGACC
ATGACAGCAGGATGCACTATGGAAACCGAGTCACAGACCTCATCCACCGGGAGTCAGATGAGTTTCCT
AGACAAGGAACCAACTTCACCCTTGCCGAACTGGGCATCTGTGAGCCCTCCCCACACCGAAGCGGCTA
CTGCTCCGACATGGGGATCCTTCACCAGGGCTACTCCCTTAGCACAGGGTCTGACGCCGACTCCGACA
CCGAGGGAGGGATGTCTCCAGAACACGCCATCAGACTGTGGGGCAGAGGGATAAAATCCAGGCGCAGT
TCCGGCCTGTCCAGTCGTGAAAACTCGGCCCTTACCCTGACTGACTCTGACAACGAAAACAAATCAGA
TGATGAGAACGGTCGTCCCATTCCACCTACATCCTCGCCTAGTCTCCTCCCATCTGCTCAGCTGCCTA
GCTCCCATAATCCTCCACCAGTTAGCTGCCAGATGCCATTGCTAGACAGCAACACCTCCCATCAAATC
ATGGACACCAACCCTGATGAGGAATTCTCCCCCAATTCATACCTGCTCAGAGCATGCTCAGGGCCCCA
GCAAGCCTCCAGCAGTGGCCCTCCGAACCACCACAGCCAGTCGACTCTGAGGCCCCCTCTCCCACCCC
CTCACAACCACACGCTGTCCCATCACCACTCGTCCGCCAACTCCCTCAACAGGAACTCACTGACCAAT
CGGCGGAGTCAGATCCACGCCCCGGCCCCAGCGCCCAATGACCTGGCCACCACACCAGAGTCCGTTCA
GCTTCAGGACAGCTGGGTGCTAAACAGCAACGTGCCACTGGAGACCCGGCACTTCCTCTTCAAGACCT
CCTCGGGGAGCACACCCTTGTTCAGCAGCTCTTCCCCGGGATACCCTTTGACCTCAGGAACGGTTTAC
ACGCCCCCGCCCCGCCTGCTGCCCAGGAATACTTTCTCCAGGAAGGCTTTCAAGCTGAAGAAGCCCTC
CAAATACTGCAGCTGGAAATGTGCTGCCCTCTCCGCCATTGCCGCGGCCCTCCTCTTGGCTATTTTGC
TGGCGTATTTCATAGTGCCCTGGTCGTTGAAAAACAGCAGCATAGACAGTGGTGAAGCAGAAGTTGGT
CGGCGGGTAACACAAGAAGTCCCACCAGGGGTGTTTTGGAGGTCACAAATTCACATCAGTCAGCCCCA
GTTCTTAAAGTTCAACATCTCCCTCGGGAAGGACGCTCTCTTTGGTGTTTACATAAGAAGAGGACTTC
CACCATCTCATGCCCAGTATGACTTCATGGAACGTCTGGACGGGAAGGAGAAGTGGAGTGTGGTTGAG
TCTCCCAGGGAACGCCGGAGCATACAGACCTTGGTTCAGAATGAAGCCGTGTTTGTGCAGTACCTGGA
TGTGGGCCTGTGGCATCTGGCCTTCTACAATGATGGAAAAGACAAAGAGATGGTTTCCTTCAATACTG
TTGTCCTAGATTCAGTGCAGGACTGTCCACGTAACTGCCATGGGAATGGTGAATGTGTGTCCGGGGTG
TGTCACTGTTTCCCAGGATTTCTAGGAGCAGACTGTGCTAAAGCTGCCTGCCCTGTCCTGTGCAGTGG
GAATGGACAATATTCTAAAGGGACGTGCCAGTGCTACAGCGGCTGGAAAGGTGCAGAGTGCGACGTGC
CCATGAATCAGTGCATCGATCCTTCCTGCGGGGGCCACGGCTCCTGCATTGATGGGAACTGTGTCTGC
TCTGCTGGCTACAAAGGCGAGCACTGTGAGGAAGTTGATTGCTTGGATCCCACCTGCTCCAGCCACGG
AGTCTGTGTGAATGGAGAATGCCTGTGCAGCCCTGGCTGGGGTGGTCTGAACTGTGAGCTGGCGAGGG
TCCAGTGCCCAGACCAGTGCAGTGGGCATGGCACGTACCTGCCTGACACGGGCCTCTGCAGCTGCGAT
CCCAACTGGATGGGTCCCGACTGCTCTGTTGAAGTGTGCTCAGTAGACTGTGGCACTCACGGCGTCTG
CATCGGGGGAGCCTGCCGCTGTGAAGAGGGCTGGACAGGCGCAGCGTGTGACCAGCGCGTGTGCCACC
CCCGCTGCATTGAGCACGGGACCTGTAAAGATGGCAAATGTGAATGCCGAGAGGGCTGGAATGGTGAA
CACTGCACCATTGGTAGGCAAACGGCAGGCACCGAAACAGATGGCTGCCCTGACTTGTGCAACGGTAA
CGGGAGATGCACACTGGGTCAGAACAGCTGGCAGTGTGTCTGCCAGACCGGCTGGAGAGGGCCCGGAT
GCAACGTTGCCATGGAAACTTCCTGTGCTGATAACAAGGATAATGAGGGAGATGGCCTGGTGGATTGT
TTGGACCCTGACTGCTGCCTGCAGTCAGCCTGTCAGAACAGCCTGCTCTGCCGGGGGTCCCGGGACCC
ACTGGACATCATTCAGCAGGGCCAGACGGATTGGCCCGCAGTGAAGTCCTTCTATGACCGTATCAAGC
TCTTGGCAGGCAAGGATAGCACCCACATCATTCCTGGAGAGAACCCTTTCAACAGCAGCTTGGTTTCT
CTCATCCGAGGCCAAGTAGTAACTACAGATGGAACTCCCCTGGTCGGTGTGAACGTGTCTTTTGTCAA
GTACCCAAAATACGGCTACACCATCACCCGCCAGGATGGCACGTTCGACCTGATCGCAAATGGAGGTG
CTTCCTTGACTCTACACTTTGAGCGAGCCCCGTTCATGAGCCAGGAGCGCACTGTGTGGCTGCCGTGG
AACAGCTTTTACGCCATGGACACCCTGGTGATGAAGACCGAGGAGAACTCCATCCCCAGCTGTGACCT
CAGTGGCTTTGTCCGGCCTGATCCAATCATCATCTCCTCCCCACTGTCCACCTTCTTTAGTGCTGCCC
CTGGGCAGAATCCCATCGTGCCTGAGACCCAGGTTCTTCATGAAGAAATCGAGCTCCCTGGTTCCAAT
GTGAAACTTCGCTATCTGAGCTCTAGAACTGCAGGGTACAAGTCACTGCTGAAGATCACCATGACCCA
GTCCACAGTGCCCCTGAACCTCATTAGGGTTCACCTGATGGTGGCTGTCGAGGGGCATCTCTTCCAGA
AGTCATTCCAGGCTTCTCCCAACCTGGCCTCCACCTTCATCTGGGACAAGACAGATGCGTATGGCCAA
AGGGTGTATGGACTCTCAGATGCTGTTGTGTCTGTCGGGTTTGAATATGAGACCTGTCCCAGTCTAAT
TCTCTGGGAGAAAAGGACAGCCCTCCTTCAGGGATTCGAGCTGGACCCCTCCAACCTCGGTGGCTGGT
CCCTAGACAAACACCACATCCTCAATGTTAAAAGTGGAATCCTACACAAAGGCACTGGGGAAAACCAG
TTCCTGACCCAGCAGCCTGCCATCATCACCAGCATCATGGGCAATGGTCGCCGCCGGAGCATTTCCTG
TCCCAGCTGCAACGGCCTTGCTGAAGGCAACAAGCTGCTGGCCCCAGTGGCTCTGGCTGTTGGAATCG
ATGGGAGCCTCTATGTGGGTGACTTCAATTACATCCGACGCATCTTTCCCTCTCGAAATGTGACCAGC
ATCTTGGAGTTACGAAATAAAGAGTTTAAACATAGCAACAACCCAGCACACAAGTACTACTTGGCAGT
GGACCCCGTGTCCGGCTCGCTCTACGTGTCCGACACCAACAGCAGGAGAATCTACCGCGTCAAGTCTC
TGAGTGGAACCAAAGACCTGGCTGGGAATTCGGAAGTTGTGGCAGGGACGGGAGAGCAGTGTCTACCC
TTTGATGAAGCCCGCTGCGGGGATGGAGGGAAGGCCATAGATGCAACCCTGATGAGCCCGAGAGGTAT
TGCAGTAGACAAGAATGGGCTCATGTACTTTGTCGATGCCACCATGATCCGGAAGGTTGACCAGAATG
GAATCATCTCCACCCTGCTGGGCTCCAATGACCTCACTGCCGTCCGGCCGCTGAGCTGTGATTCCAGC
ATGGATGTAGCCCAGGTTCGTCTGGAGTGGCCAACAGACCTTGCTGTCAATCCCATGGATAACTCCTT
GTATGTTCTAGAGAACAATGTCATCCTTCGAATCACCGAGAACCACCAAGTCAGCATCATTGCGGGAC
GCCCCATGCACTGCCAAGTTCCTGGCATTGACTACTCACTCAGCAAACTAGCCATTCACTCTGCCCTG
GAGTCAGCCAGTGCCATTGCCATTTCTCACACTGGGGTCCTCTACATCACTGAGACAGATGAGAAGAA
GATTAACCGTCTACGCCAGGTAACAACCAACGGGGAGATCTGCCTTTTAGCTGGGGCAGCCTCGGACT
GCGACTGCAAAAACGATGTCAATTGCAACTGCTATTCAGGAGATGATGCCTACGCGACTGATGCCATC
TTGAATTCCCCATCATCCTTAGCTGTAGCTCCAGATGGTACCATTTACATTGCAGACCTTGGAAATAT
TCGGATCAGGGCGGTCAGCAAGAACAAGCCTGTTCTTAATGCCTTCAACCAGTATGAGGCTGCATCCC
CCGGAGAGCAGGAGTTATATGTTTTCAACGCTGATGGCATCCACCAATACACTGTGAGCCTGGTGACA
GGGGAGTACTTGTACAATTTCACATATAGTACTGACAATGATGTCACTGAATTGATTGACAATAATGG
GAATTCCCTGAAGATCCGTCGGGACAGCAGTGGCATGCCCCGTCACCTGCTCATGCCTGACAACCAGA
TCATCACCCTCACCGTGGGCACCAATGGAGGCCTCAAAGTCGTGTCCACACAGAACCTGGAGCTTGGT
CTCATGACCTATGATGGCAACACTGGGCTCCTGGCCACCAAGAGCGATGAAACAGGATGGACGACTTT
CTATGACTATGACCACGAAGGCCGCCTGACCAACGTGACGCGCCCCACGGGGGTGGTAACCAGTCTGC
ACCGGGAAATGGAGAAATCTATTACCATTGACATTGAGAACTCCAACCGTGATGATGACGTCACTGTC
ATCACCAACCTCTCTTCAGTAGAGGCCTCCTACACAGTGGTACAAGATCAAGTTCGGAACAGCTACCA
GCTCTGTAATAATGGTACCCTGAGGGTGATGTATGCTAATGGGATGGGTATCAGCTTCCACAGCGAGC
CCCATGTCCTAGCGGGCACCATCACCCCCACCATTGGACGCTGCAACATCTCCCTGCCTATGGAGAAT
GGCTTAAACTCCATTGAGTGGCGCCTAAGAAAGGAACAGATTAAAGGCAAAGTCACCATCTTTGGCAG
GAAGCTCCGGGTCCATGGAAGAAATCTCTTGTCCATTGACTATGATCGAAATATTCGGACTGAAAAGA
TCTATGATGACCACCGGAAGTTCACCCTGAGGATCATTTATGACCAGGTGGGCCGCCCCTTCCTCTGG
CTGCCCAGCAGCGGGCTGGCAGCTGTCAACGTGTCATACTTCTTCAATGGGCGCCTGGCTGGGCTTCA
GCGTGGGGCCATGAGCGAGAGGACAGACATCGACAAGCAAGGCCGCATCGTGTCCCGCATGTTCGCTG
ACGGGAAAGTGTGGAGCTACTCCTACCTTGACAAGTCCATGGTCCTCCTGCTTCAGAGCCAACGTCAG
TATATATTTGAGTATGACTCCTCTGACCGCCTCCTTGCCGTCACCATGCCCAGCGTGGCCCGGCACAG
CATGTCCACACACACCTCCATCGGCTACATCCGTAATATTTACAACCCGCCTGAAAGCAATGCTTCGG
TCATCTTTGACTACAGTGATGACGGCCGCATCCTGAAGACCTCCTTTTTGGGCACCGGACGCCAGGTG
TTCTACAAGTATGGGAAACTCTCCAAGTTATCAGAGATTGTCTACGACAGTACCGCCGTCACCTTCGG
GTATGACGAGACCACTGGTGTCTTGAAGATGGTCAACCTCCAAAGTGGGGGCTTCTCCTGCACCATCA
GGTACCGGAAGATTGGCCCCCTGGTGGACAAGCAGATCTACAGGTTCTCCGAGGAAGGCATGGTCAAT
GCCAGGTTTGACTACACCTATCATGACAACAGCTTCCGCATCGCAAGCATCAAGCCCGTCATAAGTGA
GACTCCCCTCCCCGTTGACCTCTACCGCTATGATGAGATTTCTGGCAAGGTGGAACACTTTGGTAAGT
TTGGAGTCATCTATTATGACATCAACCAGATCATCACCACTGCCGTGATGACCCTCAGCAAACACTTC
GACACCCATGGGCGGATCAAGGAGGTCCAGTATGAGATGTTCCGGTCCCTCATGTACTGGATGACGGT
GCAATATGACAGCATGGGCAGGGTGATCAAGAGGGAGCTAAAACTGGGGCCCTATGCCAATACCACGA
AGTACACCTATGACTACGATGGGGACGGGCAGCTCCAGAGCGTGGCCGTCAATGACCGCCCGACCTGG
CGCTACAGCTATGACCTTAATGGGAATCTCCACTTACTGAACCCAGGCAACAGTGTGCGCCTCATGCC
CTTGCGCTATGACCTCCGGGATCGGATAACCAGACTCGGGGATGTGCAGTACAAAATTGACGACGATG
GCTATCTGTGCCAGAGAGGGTCTGACATCTTCGAATACAATTCCAAGGGCCTCCTAACAAGAGCCTAC
AACAAGGCCAGCGGGTGGAGTGTCCAGTACCGCTATGATGGCGTAGGACGGCGGGCTTCCTACAAGAC
CAACCTGGGCCACCACCTGCAGTACTTCTACTCTGACCTCCACAACCCGACGCGCATCACCCATGTCT
ACAATCACTCCAACTCGGAGATTACCTCACTGTACTACGACCTCCAGGGCCACCTCTTTGCCATGGAG
AGCAGCAGTGGGGAGGAGTACTATGTTGCCTCTGATAACACAGGGACTCCTCTGGCTGTGTTCAGCAT
CAACGGCCTCATGATCAAACAGCTGCAGTACACGGCCTATGGGGAGATTTATTATGACTCCAACCCCG
ACTTCCAGATGGTCATTGGCTTCCATGGGGGACTCTATGACCCCCTGACCAAGCTGGTCCACTTCACT
CAGCGTGATTATGATGTGCTGGCAGGACGATGGACCTCCCCAGACTATACCATGTGGAAAAACGTGGG
CAAGGAGCCGGCCCCCTTTAACCTGTATATGTTCAAGAGCAACAATCCTCTCAGCAGTGAGCTAGATT
TGAAGAACTACGTGACAGATGTGAAAAGCTGGCTTGTGATGTTTGGATTTCAGCTTAGCAACATCATT
CCTGGCTTCCCGAGAGCCAAAATGTATTTCGTGCCTCCTCCCTATGAATTGTCAGAGAGTCAAGCAAG
TGAGAATGGACAGCTCATTACAGGTGTCCAACAGACAACAGAGAGACATAACCAGGCCTTCATGGCTC
TGGAAGGACAGGTCATTACTAAAAAGCTCCACGCCAGCATCCGAGAGAAAGCAGGTCACTGGTTTGCC
ACCACCACGCCCATCATTGGCAAAGGCATCATGTTTGCCATCAAAGAAGGGCGGGTGACCACGGGCGT
GTCCAGCATCGCCAGCGAAGATAGCCGCAAGGTGGCATCTGTGCTGAACAACGCCTACTACCTGGACA
AGATGCACTACAGCATCGAGGGCAAGGACACCCACTACTTTGTGAAGATTGGCTCAGCCGATGGCGAC
CTGGTCACACTAGGCACCACCATCGGCCGCAAGGTGCTAGAGAGCGGGGTGAACGTGACCGTGTCCCA
GCCCACGCTGCTGGTCAACGGCAGGACTCGAAGGTTCACGAACATTGAGTTCCAGTACTCCACGCTGC
TGCTCAGCATCCGCTATGGCCTCACCCCCGACACCCTGGACGAAGAGAAGGCCCGCGTCCTGGACCAG
GCGAGACAGAGGGCCCTGGGCACGGCCTGGGCCAAGGAGCAGCAGAAAGCCAGGGACGGGAGAGAGGG
GAGCCGCCTGTGGACTGAGGGCGAGAAGCAGCAGCTTCTGAGCACCGGGCGCGTGCAAGGGTACGAGG
GATATTACGTGCTTCCCGTGGAGCAATACCCAGAGCTTGCAGACAGTAGCAGCAACATCCAGTTTTTA
AGACAGAATGAGATGGGAAAGAGGTAACAAAATAATCTGCTGCCATTCCTTGTCTGAATGGCTCAGCA
GGAGTAACTGTTATCTCCTCTCCTAAGGAGATGAAGACCTAACAGGGGCACTGCGGCTGCGCTGCTTT
AGGAGACCAAGTGGCAAGAAAGCTCACATTTTTTGAGTTCAAATGCTACTGTCCAAGCGAGAAGTCCC
TCATCCTGAAGTAGACTAAAGCCCGGCTGAAAATTCCGAGGAAAACAAAACAAACGAATGAATGAACA
GACACACACAATGTTCCAAGTTCCCCTAAAATATGACCCACTTGTTCTGGGTCTACGCAGAAAAGAGA
CGCAAAGTGTCCAAAAGGAACAAAAGAACAAAAACGAATAAGCAAAGAAGAAAACAAACAAAAACAAA
ACAAAACAAACACACGGACCGATAAACAAAGAAGCGAAGATAAGAAAGAAGGCCTCATATCCAATTAC
CTCACTCATTCACATGTGAGCGACACGCAGACATCCGCGAGGGCCAGCGTCACCAGACCAGCTGCGGG
ACAAACCACTCAGACTGCTTGTAGGACAAATACTTCTGACATTTTCGTTTAAGCAAATACAGGTGCAT
TTAAAACACGACTTTGGGGGTGATTTGTGTGTAGCGCCTGGGGAGGGGGGATAAAAGAGGAGGAGTGA
GCACTGGAAATACTTTTTAAAGAAAAAAAAACATGAGGGAATAAAAGAAATTCCTATCAAAAATCAAA
GTGAAATAATACCATCCAGCACTTAACTCTCAGGTCCCAACTAAGTCTGGCCTGAGCTAATTTATTTG
AGCGCAGAGTGTAAAATTTAATTCAAAATGGTGGCTATAATCACTACAGATAAATTTCATACTCTTTT
GTCTTTGGAGATTCCATTGTGGACAGTAATACGCAGTTACAGGGTGTAGTCTGTTTAGATTCCGTAGT
TCGTGGGTATCAGTTTCGGTAGAGGTGCAGCATCGTGACACTTTTGCTAACAGGTACCACTTCTGATC
ACCCTGTACATACATGAGCCGAAAGGCACAATCACTGTTTCAGATTTAAAATTATTAGTGTGTTTGTT
TGGTCCAGAAACTGAGACAATCACATGACAGTCACCACGAGGAGAGAAAATTTAAAAAATAAAAATAA
AAACAAAAAAAATTTTAAAAATTAAAAAAACAAAAATAAAGTCTAATAAGAACTTTGGTACAGGAACT
TTTTTGTAATATACATGTATGAATTGTTCATCGAGTTTTTATATTAATTTTAATTTGCTGCTAAGCAA
AGACTAGGGACAGGCAAAGATAATTTATGGCAAAGTGTTTAAATTGTTTATACATAAATAAAGTCTCT
AAAACTCCTGTG

| | | | |
|---|---|---|---|
| NOV7l, CG50426-05 | SEQ ID NO: 136 | 2733 aa | MW at 303423.3kD |
| Protein Sequence | | | |

MDVKDRRHRSLTRGRCGKECRYTSSSLDSEDCRVPTQKSYSSSETLKAYDHDSRMHYGNRVTDLIHRE
SDEFPRQGTNFTLAELGICEPSPHRSGYCSDMGILHQGYSLSTGSDADSDTEGGMSPEHAIRLWGRGI
KSPRSSGLSSRENSALTLTDSDNENKSDDENGRPIPPTSSPSLLPSAQLPSSHNPPPVSCQMPLLDSN
TSHQIMDTNPDEEFSPNSYLLPACSGPQQASSSGPPNHHSQSTLRPPLPPPHNHTLSHHHSSANSLNR
NSLTNRRSQIHAPAPAPNDLATTPESVQLQDSWVLNSNVPLETRHFLFKTSSGSTPLFSSSSPGYPLT
SGTVYTPPPRLLPRNTFSRKAFKLKKPSKYCSWKCAALSAIAAALLLAILLAYFIVPWSLKNSSIDSG
EAEVGRRVTQEVPPGVFWRSQIHISQPQFLKFNISLGKDALFGVYIRRGLPPSHAQYDFMERLDGKEK
WSVVESPRERRSIQTLVQNEAVFVQYLDVGLWHLAFYNDGKDKEMVSFNTVVLDSVQDCPRNCHGNGE
CVSGVCHCFPGFLGADCAKAACPVLCSGNGQYSKGTCQCYSGWKGAECDVPMNQCIDPSCGGHGSCID
GNCVCSAGYKGEHCEEVDCLDPTCSSHGVCVNGECLCSPGWGGLNCELARVQCPDQCSGHGTYLPDTG
LCSCDPNWMGPDCSVEVCSVDCGTHGVCIGGACRCEEGWTGAACDQRVCHPRCIEHGTCKDGKCECRE
GWNGEHCTIGRQTAGTETDGCPDLCNGNGRCTLGQNSWQCVCQTGWRGPGCNVAMETSCADNKDNEGD
GLVDCLDPDCCLQSACQNSLLCRGSRDPLDIIQQGQTDWPAVKSFYDRIKLLAGKDSTHIIPGENPFN
SSLVSLIRGQVVITDGTPLVGVNVSFVKYPKYGYTITRQDGTFDLIANGGASLTLHFERAPFMSQERT
VWLPWNSFYAMDTLVMKTEENSIPSCDLSGFVRPDPIIISSPLSTFFSAAPGQNPTVPETQVLHEEIE
LPGSNVKLRYLSSRTAGYKSLLKITMTQSTVPLNLIRVHLMVAVEGHLFQKSFQASPNLASTFIWDKT
DAYGQRVYGLSDAVVSVGFEYETCPSLILWEKRTALLQGFELDPSNLGGWSLDKHHILNVKSGILHKG
TGENQFLTQQPAIITSIMGNGRRRSISCPSCNGLAEGNKLLAPVALAVGIDGSLYVGDFNYIRRIFPS
RNVTSILELRNKEFKHSNNPAHKYYLAVDPVSGSLYVSDTNSRRIYRVKSLSGTKDLAGNSEVVAGTG
EQCLPFDEARCGDGGKAIDATLMSPRGIAVDKNGLMYFVDATMIRKVDQNGIISTLLGSNDLTAVRPL
SCDSSMDVAQVRLEWPTDLAVNPMDNSLYVLENNVILRITENHQVSIIAGRPMHCQVPGIDYSLSKLA
IHSALESASAIAISHTGVLYITETDEKKINRLRQVTTNGEICLLAGAASDCDCKNDVNCNCYSGDDAY
ATDAILNSPSSLAVAPDGTIYIADLGNIRIRAVSKNKPVLNAFNQYEAASPGEQELYVFNADGIHQYT
VSLVTGEYLYNFTYSTDNDVTELIDNNGNSLKIRRDSSGMPRHLLMPDNQIITLTVGTNGGLKVVSTQ
NLELGLMTYDGNTGLLATKSDETGWTTFYDYDHEGRLTNVTRPTGVVTSLHREMEKSITIDIENSNRD
DDVTVITNLSSVEASYTVVQDQVFNSYQLCNNGTLRVMYANGMGISFHSEPHVLAGTITPTIGRCNIS
LPMENGLNSIEWRLRKEQIKGKVTIFGRKLRVHGRNLLSIDYDRNIRTEKIYDDHRKFTLRIIYDQVG
RPFLWLPSSGLAAVNVSYFFNGRLAGLQRGAMSERTDIDKQGRIVSRMFADGKVWSYSYLDKSMVLLL
QSQRQYIFEYDSSDRLLAVTMPSVARHSMSTHTSIGYIRNIYNPPESNASVIFDYSDDGRILKTSFLG
TGRQVFYKYGKLSKLSEIVYDSTAVTFGYDETTGVLKMVNLQSGGFSCTIRYRKIGPLVDKQIYRFSE
EGMVNARFDYTYHDNSFRIASIKPVISETPLPVDLYRYDEISGKVEHFGKFGVIYYDINQIITTAVMT
LSKHFDTHGRIKEVQYEMFRSLMYWMTVQYDSMGRVIKRELKLGPYANTTKYTYDYDGDGQLQSVAVN
DRPTWRYSYDLNGNLHLLNPGNSVRLMPLRYDLRDRITRLGDVQYKIDDDGYLCQRGSDIFEYNSKGL
LTRAYNKASGWSVQYRYDGVGRRASYKTNLGHHLQYFYSDLHNPTRITHVYNHSNSEITSLYYDLQGH
LFAMESSSGEEYYVASDNTGTPLAVFSINGLMIKQLQYTAYGEIYYDSNPDFQMVIGFHGGLYDPLTK
LVHFTQRDYDVLAGRWTSPDYTMWKNVGKEPAPFNLYMFKSNNPLSSELDLKNYVTDVKSWLVMFGFQ
LSNIIPGFPRAKMYFVPPPYELSESQASENGQLITGVQQTTERHNQAFMALEGQVITKKLHASIREKA
GHWFATTTPIIGKGIMFAIKEGRVTTGVSSIASEDSRKVASVLNNAYYLDKMHYSIEGKDTHYFVKIG
SADGDLVTLGTTIGRKVLESGVNVTVSQPTLLVNGRTRRFTNIEFQYSTLLLSIRYGLTPDTLDEEKA
RVLDQARQRALGTAWAKEQQKARDGREGSRLWTEGEKQQLLSTGRVQGYEGYYVLPVEQYPELADSSS
NIQFLRQNEMGKR

| | | |
|---|---|---|
| NOV7m, CG50426-06 | SEQ ID NO: 137 | 1920 bp |
| DNA Sequence | ORF Start: at 180 | ORF Stop: at 1920 |

CCAGCATTAGATGAGTTGACAAAAATGCAGTTTCAGCTCTGAAGGTCTGAAAGATTCTGCTGCAACTA
AAGCTCTGAAGATTCTGCTACAACTATGACATCCATTTTCTCCCACTTCAGACAGGATGAATACAAGC
TGGCAAAGTGACAAGTGCCAAAACTCAGGCCTGACTTTCCTGAAAACATCAGCATTCTGCCATATCTG
GAATAATGGATGTAAAGGACCGGCGACACCGCTCTTTGACCAGAGGACGCTGTGGCAAAGAGTGTCGC
TACACAAGCTCCTCTCTGGACAGTGAGGACTGCCGGGTGCCCACACAGAAATCCTACAGCTCCAGTGA
GACTCTGAAGGCCTATGACCATGACAGCAGGATGCACTATGGAAACCGAGTCACAGACCTCATCCACC
GGGAGTCAGATGAGTTTCCTAGACAAGGAACCAACTTCACCCTTGCCGAACTGGGCATCTGTGAGCCC
TCCCCACACCGAAGCGGCTACTGCTCCGACATGGGGATCCTTCACCAGGGCTACTCCCTTAGCACAGG
GTCTGACGCCGACTCCGACACCGAGGGAGGGATGTCTCCAGAACACGCCATCAGACTGTGGGGCAGAG
GGATAAAATCCAGGCGCAGTTCCGGCCTGTCCAGTCGTGAAAACTCGGCCCTTACCCTGACTGACTCT
GACAACGAAAACAAATCAGATGATGAGAACGGTCGTCCCATTCCACCTACATCCTCGCCTAGTCTCCT
CCCATCTGCTCAGCTGCCTAGCTCCCATAATCCTCCACCAGTTAGCTGCCAGATGCCATTGCTAGACA
GCAACACCTCCCATCAAATCATGGACACCAACCCTGATGAGGAATTCTCCCCCAATTCATACCTGCTC
AGAGCATGCTCAGGGCCCCAGCAAGCCTCCAGCAGTGGCCCTCCGAACCACCACAGCCAGTCGACTCT
GAGGCCCCCTCTCCCACCCCCTCACAACCACACGCTGTCCCATCACCACTCGTCCGCCAACTCCCTCA
ACAGGAACTCACTGACCAATCGGCGGAGTCAGATCCACGCCCCGGCCCCAGCGCCCAATGACCTGGCC
ACCACACCAGAGTCCGTTCAGCTTCAGGACAGCTGGGTGCTAAACAGCAACGTGCCACTGGAGACCCG
GCACTTCCTCTTCAAGACCTCCTCGGGGAGCACACCCTTGTTCAGCAGCTCTTCCCCGGGATACCCTT
TGACCTCAGGAACGGTTTACACGCCCCCGCCCCGCCTGCTGCCCAGGAATACTTTCTCCAGGAAGGCT
TTCAAGCTGAAGAAGCCCTCCAAATACTGCAGCTGGAAATGTGCTGCCCTCTCCGCCATTGCCGCGGC
CCTCCTCTTGGCTATTTTGCTGGCGTATTTCATAGTGCCCTGGTCGTTGAAAAACAGCAGCATAGACA
GTGGTGAAGCAGAAGTTGGTCGGCGGGTAACACAAGAAGTCCCACCAGGGGTGTTTTGGAGGTCACAA
ATTCACATCAGTCAGCCCCAGTTCTTAAAGTTCAACATCTCCCTCGGGAAGGACGCTCTCTTTGGTGT
TTACATAAGAAGAGGACTTCCACCATCTCATGCCCAGTATGACTTCATGGAACGTCTGGACGGGAAGG
AGAAGTGGAGTGTGGTTGAGTCTCCCAGGGAACGCCGGAGCATACAGACCTTGGTTCAGAATGAAGCC
GTGTTTGTGCAGTACCTGGATGTGGGCCTGTGGCATCTGGCCTTCTACAATGATGGAAAAGACAAAGA
GATGGTTTCCTTCAATACTGTTGTCCTAGATTCAGTGCAGGACTGTCCACGTAACTGCCATGGGAATG
GTGAATGTGTGTCCGGGGTGTGTCACTGTTTCCCAGGATTTCTAGGAGCAGACTGTGCTAAAGGTATG
TGCCGCCACTTCCCTG

| | | | |
|---|---|---|---|
| NOV7m, CG50426-06 | SEQ ID NO: 138 | 580 aa | MW at 64132.9kD |
| Protein Sequence | | | |

KHQHSAISGIMDVKDRRHRSLTRGRCGKECRYTSSSLDSEDCRVPTQKSYSSSETLKAYDHDSRMHYG
NRVTDLIHRESDEFPRQGTNFTLAELGICEPSPHRSGYCSDMGILHQGYSLSTGSDADSDTEGGMSPE
HAIRLWGRGIKSRRSSGLSSRENSALTLTDSDNENKSDDENGRPIPPTSSPSLLPSAQLPSSHNPPPV
SCQMPLLDSNTSHQIMDTNPDEEFSPNSYLLRACSGPQQASSSGPPNHHSQSTLRPPLPPPHNHTLSH
HHSSANSLNRNSLTNRRSQIHAPAPAPNDLATTPESVQLQDSWVLNSNVPLETRHFLFKTSSGSTPLF
SSSSPGYPLTSGTVYTPPPRLLPRNTFSRKAFKLKKPSKYCSWKCAALSAIAAALLLAILLAYFIVPW
SLKNSSIDSGEAEVGRRVTQEVPPGVFWRSQIHISQPQFLKFNISLGKDALFGVYIRRGLPPSHAQYD
FMERLDGKEKWSVVESPRERRSIQTLVQNEAVFVQYLDVGLWHLAFYNDGKDKEMVSFNTVVLDSVQD
CPRNCHGNGECVSGVCHCFPGFLGADCAKGMCRHFP

| | | |
|---|---|---|
| NOV7n, CG50426-07 | SEQ ID NO: 139 | 1447 bp |
| DNA Sequence | ORF Start: at 247 | ORF Stop: at 1447 |

GCTCCAAAGCGAGCTGGGACCGAAGACTCTAGGCTAAGTTATCTATGTAGATGGTGTCAGGGAGCGAA
GCTACTGACCGAGCTGCTGTTACATCCAGCTTTTTAATTGCCTAAGCGGTCTGGGGCTTGCTTCGTCA
TTTGGCTTTGCTGTGGAGCACTCCTGTAAAGCCAGCTGAATTGTACATCGAAGATCCACCCTTTTGGT
GGCAAAGTGACAAGTGCCAAAACTCAGGCCTGACTTTTCTGAAAACATCAGCATTCTGCCATATCTGG
AATAATGGATGTAAAGGACCGGCGACACCGCTCTTTGACCAGAGGACGCTGTGGCAAAQAGTGTCGCT
ACACAAGCTCCTCTCTGGACAGTGAGGACTGCCGGGTGCCCACACAGAAATCCTACAGCTCCAGTGAG
ACTCTGAAGGCCTATGACCATGACAGCAGGATGCACTATGGAAACCGAGTCACAGACCTCATCCACCG
GGAGTCAGATGAGTTTCCTAGACAAGGAACCAACTTCACCCTTGCCGAACTGGGCATCTGTGAGCCCT
CCCCACACCGAAGCGGCTACTGCTCCGACATGGGGATCCTTCACCAGGGCTACTCCCTTAGCACAGGG
TCTGACGCCGACTCCGACACCGAGGGAGGGATGTCTCCAGAACACGCCATCAGACTGTGGGGCAGAGG
GATAAAATCCAGGCGCAGTTCCGGCCTGTCCAGTCGTGAAAACTCGGCCCTTACCCTGACTGACTCTG
ACAACGAAAACAAATCAGATGATGAGAACGGTCGTCCCATTCCACCTACATCCTCGCCTAGTCTCCTC
CCATCTGCTCAGCTGCCTAGCTCCCATAATCCTCCACCAGTTAGCTGCCAGATGCCATTGCTAGACAG
CAACACCTCCCATCAAATCATGGACACCAACCCTGATGAGGAATTCTCCCCCAATTCATACCTGCTCA
GAGCATGCTCAGGGCCCCAGCAAGCCTCCAGCAGTGGCCCTCCGAACCACCACAGCCAGTCGACTCTG
AGGCCCCCTCTCCCACCCCCTCACAACCACACGCTGTCCCATCACCACTCGTCCGCCAACTCCCTCAA
CAGGAACTCACTGACCAATCGGCGGAGTCAGATCCACGCCCCGGCCCCAGCGCCCAATGACCTGGCCA
CCACACCAGAGTCCGTTCAGCTTCAGGACAGCTGGGTGCTAAACAGCAACGTGCCACTGGAGACCCGG
CACTTCCTCTTCAAGACCTCCTCGGGGAGCACACCCTTGTTCAGCAGCTCTTCCCCGGGATACCCTTT
GACCTCAGGAACGGTTTACACGCCCCCGCCCCGCCTGCTGCCCAGGAATACTTTCTCCAGGAAGGCTT
TCAAGCTGAAGAAGCCCTCCAAATACTGCAGCTGGAAATGTGCTGCCCTCTCCGCCATTGCCGCGGCC
CTCCTCTTGGCTATTTTGC

| | | | |
|---|---|---|---|
| NOV7n, CG50426-07 | SEQ ID NO: 140 | 400 aa | MW at 43764.8kD |
| Protein Sequence | | | |

KHQHSAISGIMDVKDRRHRSLTRGRCGKECRYTSSSLDSEDCRVPTQKSYSSSETLKAYDHDSRNHYG
NRVTDLIHRESDEFPRQGTNFTLAELGICEPSPHRSGYCSDMGILHQGYSLSTGSDADSDTEGGMSPE
HAIRLWGRGIKSRRSSGLSSRENSALTLTDSDNENKSDDENGRPIPPTSSPSLLPSAQLPSSHNPPPV
SCQMPLLDSNTSHQIMDTNPDEEFSPNSYLLEACSGPQQASSSGPPNHHSQSTLRPPLPPPHNHTLSH
HHSSANSLNRNSLTNRRSQIHAPAPAPNDLATTPESVQLQDSWVLNSNVPLETRHFLFKTSSGSTPLF
SSSSPGYPLTSGTVYTPPPRLLPRNTFSRKAFKLKKPSKYCSWKCAALSAIAAALLLAIL

| | | |
|---|---|---|
| NOV7o, CG50426-08 | SEQ ID NO: 141 | 9823 bp |
| DNA Sequence | ORF Start: ATG at 277 | ORF Stop: TAA at 8476 |

GCTCCAAAGCGAGCTGGGACCGAAGACTCTAGGCTAAGTTATCTATGTAGATGGTGTCAGGGAGCGAA
GCTACTGACCGAGCTGCTGTTACATCCAGCTTTTTAATTGCCTAAGCGGTCTGGGGCTTGCTTCGTCA
TTTGGCTTTGCTGTGGAGCACTCCTGTAAAGCCAGCTGAATTGTACATCGAAGATCCACCCTTTTGGT
GGCAAAGTGACAAGTGCCAAAACTCAGGCCTGACTTTTCTGAAAACATCAGCATTCTGCCATATCTGG
AATAATGGATGTAAAGGACCGGCGACACCGCTCTTTGACCAGAGGACGCTGTGGCAAAGAGTGTCGCT
ACACAAGCTCCTCTCTGGACAGTGAGGACTGCCGGGTGCCCACACAGAAATCCTACAGCTCCAGTGAG
ACTCTGAAGGCCTATGACCATGACAGCAGGATGCACTATGGAAACCGAGTCACAGACCTCATCCACCG
GGAGTCAGATGAGTTTCCTAGACAAGGAACCAACTTCACCCTTGCCGAACTGGGCATCTGTGAGCCCT
CCCCACACCGAAGCGGCTACTGCTCCGACATGGGGATCCTTCACCAGGGCTACTCCCTTAGCACAGGG
TCTGACGCCGACTCCGACACCGAGGGAGGGATGTCTCCAGAACACGCCATCAGACTGTGGGGCAGAGG
GATAAAATCCAGGCGCAGTTCCGGCCTGTCCAGTCGTGAAAACTCGGCCCTTACCCTGACTGACTCTG
ACAACGAAAACAAATCAGATGATGAGAACGGTCGTCCCATTCCACCTACATCCTCGCCTAGTCTCCTC
CCATCTGCTCAGCTGCCTAGCTCCCATAATCCTCCACCAGTTAGCTGCCAGATGCCATTGCTAGACAG
CAACACCTCCCATCAAATCATGGACACCAACCCTGATGAGGAATTCTCCCCCAATTCATACCTGCTCA
GAGCATGCTCAGGGCCCCAGCAAGCCTCCAGCAGTGGCCCTCCGAACCACCACAGCCAGTCGACTCTG
AGGCCCCCTCTCCCACCCCCTCACAACCACACGCTGTCCCATCACCACTCGTCCGCCAACTCCCTCAA
CAGGAACTCACTGACCAATCGGCGGAGTCAGATCCACGCCCCGGCCCCAGCGCCCAATGACCTGGCCA
CCACACCAGAGTCCGTTCAGCTTCAGGACAGCTGGGTGCTAAACAGCAACGTGCCACTGGAGACCCGG
CACTTCCTCTTCAAGACCTCCTCGGGGAGCACACCCTTGTTCAGCAGCTCTTCCCCGGGATACCCTTT
GACCTCAGGAACGGTTTACACGCCCCCGCCCCGCCTGCTGCCCAGGAATACTTTCTCCAGGAAGGCTT
TCAAGCTGAAGAAGCCCTCCAAATACTGCAGCTGGAAATGTGCTGCCCTCTCCGCCATTGCCGCGGCC
CTCCTCTTGGCTATTTTGCTGGCGTATTTCATAGTGCCCTGGTCGTTGAAAAACAGCAGCATAGACAG
TGGTGAAGCAGAAGTTGGTCGGCGGGTAACACAAGAAGTCCCACCAGGGGTGTTTTGGAGGTCACAAA
TTCACATCAGTCAGCCCCAGTTCTTAAAGTTCAACATCTCCCTCGGGAAGGACGCTCTCTTTGGTGTT
TACATAAGAAGAGGACTTCCACCATCTCATGCCCAGTATGACTTCATGGAACGTCTGGACGGGAAGGA
GAAGTGGAGTGTGGTTGAGTCTCCCAGGGAACGCCGGAGCATACAGACCTTGGTTCAGAATGAAGCCG
TGTTTGTGCAGTACCTGGATGTGGGCCTGTGGCATCTGGCCTTCTACAATGATGGAAAAGACAAAGAG
ATGGTTTCCTTCAATACTGTTGTCCTAGATTCAGTGCAGGACTGTCCACGTAACTGCCATGGGAATGG
TGAATGTGTGTCCGGGGTGTGTCACTGTTTCCCAGGATTTCTAGGAGCAGACTGTGCTAAAGCTGCCT
GCCCTGTCCTGTGCAGTGGGAATGGACAATATTCTAAAGGGACGTGCCAGTGCTACAGCGGCTGGAAA
GGTGCAGAGTGCGACGTGCCCATGAATCAGTGCATCGATCCTTCCTGCGGGGGCCACGGCTCCTGCAT
TGATGGGAACTGTGTCTGCTCTGCTGGCTACAAAGGCGAGCACTGTGAGGAAGTTGATTGCTTGGATC
CCACCTGCTCCAGCCACGGAGTCTGTGTGAATGGAGAATGCCTGTGCAGCCCTGGCTGGGGTGGTCTG
AACTGTGAGCTGGCGAGGGTCCAGTGCCCAGACCAGTGCAGTGGGCATGGCACGTACCTGCCTGACAC
GGGCCTCTGCAGCTGCGATCCCAACTGGATGGGTCCCGACTGCTCTGTTGAAGTGTGCTCAGTAGACT
GTGGCACTCACGGCGTCTGCATCGGGGGAGCCTGCCGCTGTGAAGAGGGCTGGACAGGCGCAGCGTGT
GACCAGCGCGTGTGCCACCCCCGCTGCATTGAGCACGGGACCTGTAAAGATGGCAAATGTGAATGCCG
AGAGGGCTGGAATGGTGAACACTGCACCATTGGTAGGCAAACGGCAGGCACCGAAACAGATGGCTGCC
CTGACTTGTGCAACGGTAACGGGAGATGCACACTGGGTCAGAACAGCTGGCAGTGTGTCTGCCAGACC
GGCTGGAGAGGGCCCGGATGCAACGTTGCCATGGAAACTTCCTGTGCTGATAACAAGGATAATGAGGG
AGATGGCCTGGTGGATTGTTTGGACCCTGACTGCTGCCTGCAGTCAGCCTGTCAGAACAGCCTGCTCT
GCCGGGGGTCCCGGGACCCACTGGACATCATTCAGCAGGGCCAGACGGATTGGCCCGCAGTGAAGTCC
TTCTATGACCGTATCAAGCTCTTGGCAGGCAAGGATAGCACCCACATCATTCCTGGAGAGAACCCTTT
CAACAGCAGCTTGGTTTCTCTCATCCGAGGCCAAGTAGTAACTACAGATGGAACTCCCCTGGTCGGTG
TGAACGTGTCTTTTGTCAAGTACCCAAAATACGGCTACACCATCACCCGCCAGGATGGCACGTTCGAC
CTGATCGCAAATGGAGGTGCTTCCTTGACTCTACACTTTGAGCGAGCCCCGTTCATGAGCCAGGAGCG
CACTGTGTGGCTGCCGTGGAACAGCTTTTACGCCATGGACACCCTGGTGATGAAGACCGAGGAGAACT
CCATCCCCAGCTGTGACCTCAGTGGCTTTGTCCGGCCTGATCCAATCATCATCTCCTCCCCACTGTCC
ACCTTCTTTAGTGCTGCCCCTGGGCAGAATCCCATCGTGCCTGAGACCCAGGTTCTTCATGAAGAAAT
CGAGCTCCCTGGTTCCAATGTGAAACTTCGCTATCTGAGCTCTAGAACTGCAGGGTACAAGTCACTGC
TGAAGATCACCATGACCCAGTCCACAGTGCCCCTGAACCTCATTAGGGTTCACCTGATGGTGGCTGTC
GAGGGGCATCTCTTCCAGAAGTCATTCCAGGCTTCTCCCAACCTGGCCTCCACCTTCATCTGGGACAA
GACAGATGCGTATGGCCAAAGGGTGTATGGACTCTCAGATGCTGTTGTGTCTGTCGGGTTTGAATATG
AGACCTGTCCCAGTCTAATTCTCTGGGAGAAAAGGACAGCCCTCCTTCAGGGATTCGAGCTGGACCCC
TCCAACCTCGGTGGCTGGTCCCTAGACAAACACCACATCCTCAATGTTAAAAGTGGAATCCTACACAA
AGGCACTGGGGAAAACCAGTTCCTGACCCAGCAGCCTGCCATCATCACCAGCATCATGGGCAATGGTC
GCCGCCGGAGCATTTCCTGTCCCAGCTGCAACGGCCTTGCTGAAGGCAACAAGCTGCTGGCCCCAGTG
GCTCTGGCTGTTGGAATCGATGGGAGCCTCTATGTGGGTGACTTCAATTACATCCGACGCATCTTTCC
CTCTCGAAATGTGACCAGCATCTTGGAGTTACGAAATAAAGAGTTTAAACATAGCAACAACCCAGCAC
ACAAGTACTACTTGGCAGTGGACCCCGTGTCCGGCTCGCTCTACGTGTCCGACACCAACAGCAGGAGA
ATCTACCGCGTCAAGTCTCTGAGTGGAACCAAAGACCTGGCTGGGAATTCGGAAGTTGTGGCAGGGAC
GGGAGAGCAGTGTCTACCCTTTGATGAAGCCCGCTGCGGGGATGGAGGGAAGGCCATAGATGCAACCC
TGATGAGCCCGAGAGGTATTGCAGTAGACAAGAATGGGCTCATGTACTTTGTCGATGCCACCATGATC
CGGAAGGTTGACCAGAATGGAATCATCTCCACCCTGCTGGGCTCCAATGACCTCACTGCCGTCCGGCC
GCTGAGCTGTGATTCCAGCATGGATGTAGCCCAGGTTCGTCTGGAGTGGCCAACAGACCTTGCTGTCA
ATCCCATGGATAACTCCTTGTATGTTCTAGAGAACAATGTCATCCTTCGAATCACCGAGAACCACCAA
GTCAGCATCATTGCGGGACGCCCCATGCACTGCCAAGTTCCTGGCATTGACTACTCACTCAGCAAACT
AGCCATTCACTCTGCCCTGGAGTCAGCCAGTGCCATTGCCATTTCTCACACTGGGGTCCTCTACATCA
CTGAGACAGATGAGAAGAAGATTAACCGTCTACGCCAGGTAACAACCAACGGGGAGATCTGCCTTTTA
GCTGGGGCAGCCTCGGACTGCGACTGCAAAAACGATGTCAATTGCAACTGCTATTCAGGAGATGATGC
CTACGCGACTGATGCCATCTTGAATTCCCCATCATCCTTAGCTGTAGCTCCAGATGGTACCATTTACA
TTGCAGACCTTGGAAATATTCGGATCAGGGCGGTCAGCAAGAACAAGCCTGTTCTTAATGCCTTCAAC
CAGTATGAGGCTGCATCCCCCGGAGAGCAGGAGTTATATGTTTTCAACGCTGATGGCATCCACCAATA
CACTGTGAGCCTGGTGACAGGGGAGTACTTGTACAATTTCACATATAGTACTGACAATGATGTCACTG
AATTGATTGACAATAATGGGAATTCCCTGAAGATCCGTCGGGACAGCAGTGGCATGCCCCGTCACCTG
CTCATGCCTGACAACCAGATCATCACCCTCACCGTGGGCACCAATGGAGGCCTCAAAGTCGTGTCCAC
ACAGAACCTGGAGCTTGGTCTCATGACCTATGATGGCAACACTGGGCTCCTGGCCACCAAGAGCGATG
AAACAGGATGGACGACTTTCTATGACTATGACCACGAAGGCCGCCTGACCAACGTGACGCGCCCCACG
GGGGTGGTAACCAGTCTGCACCGGGAAATGGAGAAATCTATTACCATTGACATTGAGAACTCCAACCG
TGATGATGACGTCACTGTCATCACCAACCTCTCTTCAGTAGAGGCCTCCTACACAGTGGTACAAGATC
AAGTTCGGAACAGCTACCAGCTCTGTAATAATGGTACCCTGAGGGTGATGTATGCTAATGGGATGGGT
ATCAGCTTCCACAGCGAGCCCCATGTCCTAGCGGGCACCATCACCCCCACCATTGGACGCTGCAACAT
CTCCCTGCCTATGGAGAATGGCTTAAACTCCATTGAGTGGCGCCTAAGAAAGGAACAGATTAAAGGCA
AAGTCACCATCTTTGGCAGGAAGCTCCGGGTCCATGGAAGAAATCTCTTGTCCATTGACTATGATCGA
AATATTCGGACTGAAAAGATCTATGATGACCACCGGAAGTTCACCCTGAGGATCATTTATGACCAGGT
GGGCCGCCCCTTCCTCTGGCTGCCCAGCAGCGGGCTGGCAGCTGTCAACGTGTCATACTTCTTCAATG
GGCGCCTGGCTGGGCTTCAGCGTGGGGCCATGAGCGAGAGGACAGACATCGACAAGCAAGGCCGCATC
GTGTCCCGCATGTTCGCTGACGGGAAAGTGTGGAGCTACTCCTACCTTGACAAGTCCATGGTCCTCCT
GCTTCAGAGCCAACGTCAGTATATATTTGAGTATGACTCCTCTGACCGCCTCCTTGCCGTCACCATGC
CCAGCGTGGCCCGGCACAGCATGTCCACACACACCTCCATCGGCTACATCCGTAATATTTACAACCCG
CCTGAAAGCAATGCTTCGGTCATCTTTGACTACAGTGATGACGGCCGCATCCTGAAGACCTCCTTTTT
GGGCACCGGACGCCAGGTGTTCTACAAGTATGGGAAACTCTCCAAGTTATCAGAGATTGTCTACGACA
GTACCGCCGTCACCTTCGGGTATGACGAGACCACTGGTGTCTTGAAGATGGTCAACCTCCAAAGTGGG
GGCTTCTCCTGCACCATCAGGTACCGGAAGATTGGCCCCCTGGTGGACAAGCAGATCTACAGGTTCTC
CGAGGAAGGCATGGTCAATGCCAGGTTTGACTACACCTATCATGACAACAGCTTCCGCATCGCAAGCA
TCAAGCCCGTCATAAGTGAGACTCCCCTCCCCGTTGACCTCTACCGCTATGATGAGATTTCTGGCAAG
GTGGAACACTTTGGTAAGTTTGGAGTCATCTATTATGACATCAACCAGATCATCACCACTGCCGTGAT
GACCCTCAGCAAACACTTCGACACCCATGGGCGGATCAAGGAGGTCCAGTATGAGATGTTCCGGTCCC
TCATGTACTGGATGACGGTGCAATATGACAGCATGGGCAGGGTGATCAAGAGGGAGCTAAAACTGGGG
CCCTATGCCAATACCACGAAGTACACCTATGACTACGATGGGGACGGGCAGCTCCAGAGCGTGGCCGT
CAATGACCGCCCGACCTGGCGCTACAGCTATGACCTTAATGGGAATCTCCACTTACTGAACCCAGGCA
ACAGTGTGCGCCTCATGCCCTTGCGCTATGACCTCCGGGATCGGATAACCAGACTCGGGGATGTGCAG
TACAAAATTGACGACGATGGCTATCTGTGCCAGAGAGGGTCTGACATCTTCGAATACAATTCCAAGGG
CCTCCTAACAAGAGCCTACAACAAGGCCAGCGGGTGGAGTGTCCAGTACCGCTATGATGGCGTAGGAC
GGCGGGCTTCCTACAAGACCAACCTGGGCCACCACCTGCAGTACTTCTACTCTGACCTCCACAACCCG
ACGCGCATCACCCATGTCTACAATCACTCCAACTCGGAGATTACCTCACTGTACTACGACCTCCAGGG
CCACCTCTTTGCCATGGAGAGCAGCAGTGGGGAGGAGTACTATGTTGCCTCTGATAACACAGGGACTC
CTCTGGCTGTGTTCAGCATCAACGGCCTCATGATCAAACAGCTGCAGTACACGGCCTATGGGGAGATT
TATTATGACTCCAACCCCGACTTCCAGATGGTCATTGGCTTCCATGGGGGACTCTATGACCCCCTGAC
CAAGCTGGTCCACTTCACTCAGCGTGATTATGATGTGCTGGCAGGACGATGGACCTCCCCAGACTATA
CCATGTGGAAAAACGTGGGCAAGGAGCCGGCCCCCTTTAACCTGTATATGTTCAAGAGCAACAATCCT
CTCAGCAGTGAGCTAGATTTGAAGAACTACGTGACAGATGTGAAAAGCTGGCTTGTGATGTTTGGATT
TCAGCTTAGCAACATCATTCCTGGCTTCCCGAGAGCCAAAATGTATTTCGTGCCTCCTCCCTATGAAT
TGTCAGAGAGTCAAGCAAGTGAGAATGGACAGCTCATTACAGGTGTCCAACAGACAACAGAGAGACAT
AACCAGGCCTTCATGGCTCTGGAAGGACAGGTCATTACTAAAAAGCTCCACGCCAGCATCCGAGAGAA
AGCAGGTCACTGGTTTGCCACCACCACGCCCATCATTGGCAAAGGCATCATGTTTGCCATCAAAGAAG
GGCGGGTGACCACGGGCGTGTCCAGCATCGCCAGCGAAGATAGCCGCAAGGTGGCATCTGTGCTGAAC
AACGCCTACTACCTGGACAAGATGCACTACAGCATCGAGGGCAAGGACACCCACTACTTTGTGAAGAT
TGGCTCAGCCGATGGCGACCTGGTCACACTAGGCACCACCATCGGCCGCAAGGTGCTAGAGAGCGGGG
TGAACGTGACCGTGTCCCAGCCCACGCTGCTGGTCAACGGCAGGACTCGAAGGTTCACGAACATTGAG
TTCCAGTACTCCACGCTGCTGCTCAGCATCCGCTATGGCCTCACCCCCGACACCCTGGACGAAGAGAA
GGCCCGCGTCCTGGACCAGGCGAGACAGAGGGCCCTGGGCACGGCCTGGGCCAAGGAGCAGCAGAAAG
CCAGGGACGGGAGAGAGGGGAGCCGCCTGTGGACTGAGGGCGAGAAGCAGCAGCTTCTGAGCACCGGG
CGCGTGCAAGGGTACGAGGGATATTACGTGCTTCCCGTGGAGCAATACCCAGAGCTTGCAGACAGTAG
CAGCAACATCCAGTTTTTAAGACAGAATGAGATGGGAAAGAGGTAACAAAATAATCTGCTGCCATTCC
TTGTCTGAATGGCTCAGCAGGAGTAACTGTTATCTCCTCTCCTAAGGAGATGAAGACCTAACAGGGGC
ACTGCGGCTGGGCTGCTTTAGGAGACCAAGTGGCAAGAAAGCTCACATTTTTTGAGTTCAAATGCTAC
TGTCCAAGCGAGAAGTCCCTCATCCTGAAGTAGACTAAAGCCCGGCTGAAAATTCCGAGGAAAACAAA
ACAAACGAATGAATGAACAGACACACACAATGTTCCAAGTTCCCCTAAAATATGACCCACTTGTTCTG
GGTCTACGCAGAAAAGAGACGCAAAGTGTCCAAAAGGAACAAAAGAACAAAAACGAATAAGCAAAGAA
GAAAACAAACAAAAACAAAACAAAACAAACACACGGACCGATAAACAAAGAAGCGAAGATAAGAAAGA
AGGCCTCATATCCAATTACCTCACTCATTCACATGTGAGCGACACGCAGACATCCGCGAGGGCCAGCG
TCACCAGACCAGCTGCGGGACAAACCACTCAGACTGCTTGTAGGACAAATACTTCTGACATTTTCGTT
TAAGCAAATACAGGTGCATTTAAAACACGACTTTGGGGGTGATTTGTGTGTAGCGCCTGGGGAGGGGG
GATAAAAGAGGAGGAGTGAGCACTGGAAATACTTTTTAAAGAAAAAAAAACATGAGGGAATAAAAGAA
ATTCCTATCAAAAATCAAAGTGAAATAATACCATCCAGCACTTAACTCTCAGGTCCCAACTAAGTCTG
GCCTGAGCTAATTTATTTGAGCGCAGAGTGTAAAATTTAATTCAAAATGGTGGCTATAATCACTACAC
ATAAATTTCATACTCTTTTGTCTTTGGAGATTCCATTGTGGACAGTAATACGCAGTTACAGGGTGTAG
TCTGTTTAGATTCCGTAGTTCGTGGGTATCAGTTTCGGTAGAGGTGCAGCATCGTGACACTTTTGCTA
ACAGGTACCACTTCTGATCACCCTGTACATACATGAGCCGAAAGGCACAATCACTGTTTCAGATTTAA
AATTATTAGTGTGTTTGTTTGGTCCAGAAACTGAGACAATCACATGACAGTCACCACGAGGAGAGAAA
ATTTAAAAAATAAAAATAAAAACAAAAAAAATTTTAAAAATTAAAAAAACAAAAATAAAGTCTAATAA
GAACTTTGGTACAGGAACTTTTTTGTAATATACATGTATGAATTGTTCATCGAGTTTTTATATTAATT
TTAATTTGCTGCTAAGCAAAGACTAGGGACAGGCAAAGATAATTTATGGCAAAGTGTTTAAATTGTTT
ATACATAAATAAAGTCTCTAAAACTCCTGTG

| | | | |
|---|---|---|---|
| NOV7o, CG50426-08 | SEQ ID NO: 142 | 2733 aa | MW at 303423.3kD |
| Protein Sequence | | | |

MDVKDRRHRSLTRGRCGKECRYTSSSLDSEDCRVPTQKSYSSSETLKAYDHDSRMHYGNRVTDLIHRE
SDEFPRQGTNFTLAELGICEPSPHRSGYCSDMGILHQGYSLSTGSDADSDTEGGMSPEHAIRLWGRGI
KSRRSSGLSSRENSALTLTDSDNENKSDDENGRPIPPTSSPSLLPSAQLPSSHNPPPVSCQMPLLDSN
TSHQIMDTNPDEEFSPNSYLLRACSGPQQASSSGPPNHHSQSTLRPPLPPPHNHTLSHHHSSANSLNR
NSLTNRRSQIHAPAPAPNDLATTPESVQLQDSWVLNSNVPLETRHFLFKTSSGSTPLFSSSSPGYPLT
SGTVYTPPPRLLPRNTFSRKAFKLKKPSKYCSWKCAALSAIAAALLLAILLAYFIVPWSLKNSSIDSG
EAEVGRRVTQEVPPGVFWRSQIHISQPQFLKFNISLGKDALFGVYIRRGLPPSHAQYDFMERLDGKEK
WSVVESPRERRSIQTLVQNEAVFVQYLDVGLWHLAFYNDGKDKEMVSFNTVVLDSVQDCPRNCHGNGE
CVSGVCHCFPGFLGADCAKAACPVLCSGNGQYSKGTCQCYSGWKGAECDVPMNQCIDPSCGGHGSCID
GNCVCSAGYKGEHCEEVDCLDPTCSSHGVCVNGECLCSPGWGGLNCELARVQCPDQCSGHGTYLPDTG
LCSCDPNWMGPDCSVEVCSVDCGTHGVCIGGACRCEEGWTGAACDQRVCHPRCIEHGTCKDGKCECRE
GWNGEHCTIGRQTAGTETDGCPDLCNGNGRCTLGQNSWQCVCQTGWRGPGCNVAMETSCADNKDNEGD
GLVDCLDPDCCLQSACQNSLLCRGSRDPLDIIQQGQTDWPAVKSFYDRIKLLAGKDSTHIIPGENPFN
SSLVSLIRGQVVTTDGTPLVGVNVSFVKYPKYGYTITRQDGTFDLIANGGASLTLHFERAPFMSQERT
VWLPWNSFYAMDTLVMKTEENSIPSCDLSGFVRPDPIIISSPLSTFFSAAPGQNPIVPETQVLHEEIE
LPGSNVKLRYLSSRTAGYKSLLKITMTQSTVPLNLIRVHLMVAVEGHLFQKSFQASPNLASTFIWDKT
DAYGQRVYGLSDAVVSVGFEYETCPSLILWEKRTALLQGFELDPSNLGGWSLDKHHILNVKSGILHKG
TGENQFLTQQPAIITSIMGNGRRRSISCPSCNGLAEGNKLLAPVALAVGIDGSLYVGDFNYIRRIFPS
RNVTSILELRNKEFKHSNNPAHKYYLAVDPVSGSLYVSDTNSRRIYRVKSLSGTKDLAGNSEVVAGTG
EQCLPFDEARCGDGGKAIDATLMSPRGIAVDKNGLMYFVDATMIRKVDQNGIISTLLGSNDLTAVRPL
SCDSSMDVAQVRLEWPTDLAVNPMDNSLYVLENNVILRITENHQVSIIAGRPMHCQVPGIDYSLSKLA
IHSALESASAIAISHTGVLYITETDEKKINRLRQVTTNGEICLLAGAASDCDCKNDVNCNCYSGDDAY
ATDAILNSPSSLAVAPDGTIYIADLGNIRIRVSKNKPXTLNAFNQYEAASPGEQELYVFNADGIHQYT
VSLVTGEYLYNFTYSTDNDVTELIDNNGNSLKIRRDSSGMPRHLLMPDNQIITLTVGTNGGLKVVSTQ
NLELGLMTYDGNTGLLATKSDETGWTTFYDYDHEGRLTNVTRPTGVVTSLHREMEKSITIDIENSNRD
DDVTVITNLSSVEASYTVVQDQVRNSYQLCNNGTLRVMYANGMGISFHSEPHVLAGTITPTIGRCNIS
LPMENGLNSIEWRLRKEQIKGKVTIFGRKLRVHGRNLLSIDYDRNIRTEKIYDDHRKFTLRIIYDQVG
RPFLWLPSSGLAAVNVSYFFNGRIAGLQRGAMSERTDIDKQGRIVSRMFADGKVWSYSYLDKSMVLLL
QSQRQYIFEYDSSDRLLAVTMPSVARHSMSTHTSIGYIRNIYNPPESNASVIFDYSDDGRILKTSFLG
TGRQVFYKYGKLSKLSEIVYDSTAVTFGYDETTGVLKMVNLQSGGFSCTIRYRKIGPLVDKQIYRFSE
EGMVNARFDYTYHDNSFRIASIKPVISETPLPVDLYRYDEISGKVEHFGKFGVIYYDINQIITTAVMT
LSKHFDTHGRIKEVQYEMFRSLMYWMTVQYDSMGRVIKRELKLGPYANTTKYTYDYDGDGQLQSVAVN
DRPTWRYSYDLNGNLHLLNPGNSVRLMPLRYDLRDRITRLGDVQYKIDDDGYLCQRGSDIFEYNSKGL
LTRAYNKASGWSVQYRYDGVGRRASYKTNLGHHLQYFYSDLHNPTRITHVYNHSNSEITSLYYDLQGH
LFAMESSSGEEYYVASDNTGTPLAVFSINGLMIKQLQYTAYGEIYYDSNPDFQMVIGFHGGLYDPLTK
LVHFTQRDYDVLAGRWTSPDYTMWKNVGKEPAPFNLYMFKSNNPLSSELDLKNYVTDVKSWLVMFGFQ
LSNIIPGFPRAKMYFVPPPYELSESQASENGQLITGVQQTTERHNQAFMALEGQVITKKLHASIREKA
GHWFATTTPIIGKGIMFAIKEGRVTTGVSSIASEDSRKVASVLNNAYYLDKMHYSIEGKDTHYFVKIG
SADGDLVTLGTTIGRKVLESGVNVTVSQPTLLVNGRTRRFTNIEFQYSTLLLSIRYGLTPDTLDEEKA
RVLDQARQRALGTAWAKEQQKARDGREGSRLWTEGEKQQLLSTGRVQGYEGYYVLPVEQYPELADSSS
NIQFLRQNEMGKR

| | | |
|---|---|---|
| Nov7p, CG50426-09 | SEQ ID NO: 143 | 1920 bp |
| DNA Sequence | ORF Start: at 180 | ORF Stop: at 1920 |

CCAGCATTAGATGAGTTGACAAAAATGCAGTTTCAGCTCTGAAGGTCTGAAAGATTCTGCTGCAACTA
AAGCTCTGAAGATTCTGCTACAACTATGACATCCATTTTCTCCCACTTCAGACAGGATGAATACAAGG
TGGCAAAGTGACAAGTGCCAAAACTCAGGCCTGACTTTCCTGAAAACATCAGCATTCTGCCATATCTG
GAATAATGGATGTAAAGGACCGGCGACACCGCTCTTTGACCAGAGGACGCTGTGGCAAAGAGTGTCGC
TACACAAGCTCCTCTCTGGACAGTGAGGACTGCCGGGTGCCCACACAGAAATCCTACAGCTCCAGTGA
GACTCTGAAGGCCTATGACCATGACAGCAGGATGCACTATGGAAACCGAGTCACAGACCTCATCCACC
GGGAGTCAGATGAGTTTCCTAGACAAGGAACCAACTTCACCCTTGCCGAACTGGGCATCTGTGAGCCC
TCCCCACACCGAAGCGGCTACTGCTCCGACATGGGGATCCTTCACCAGGGCTACTCCCTTAGCACAGG
GTCTGACGCCGACTCCGACACCGAGGGAGGGATGTCTCCAGAACACGCCATCAGACTGTGGGGCAGAG
GGATAAAATCCAGGCGCAGTTCCGGCCTGTCCAGTCGTGAAAACTCGGCCCTTACCCTGACTGACTCT
GACAACGAAAACAAATCAGATGATGAGAACGGTCGTCCCATTCCACCTACATCCTCGCCTAGTCTCCT
CCCATCTGCTCAGCTGCCTAGCTCCCATAATCCTCCACCAGTTAGCTGCCAGATGCCATTGCTAGACA
GCAACACCTCCCATCAAATCATGGACACCAACCCTGATGAGGAATTCTCCCCCAATTCATACCTGCTC
AGAGCATGCTCAGGGCCCCAGCAAGCCTCCAGCAGTGGCCCTCCGAACCACCACAGCCAGTCGACTCT
GAGGCCCCCTCTCCCACCCCCTCACAACCACACGCTGTCCCATCACCACTCGTCCGCCAACTCCCTCA
ACAGGAACTCACTGACCAATCGGCGGAGTCAGATCCACGCCCCGGCCCCAGCGCCCAATGACCTGGCC
ACCACACCAGAGTCCGTTCAGCTTCAGGACAGCTGGGTGCTAAACAGCAACGTGCCACTGGAGACCCG
GCACTTCCTCTTCAAGACCTCCTCGGGGAGCACACCCTTGTTCAGCAGCTCTTCCCCGGGATACCCTT
TGACCTCAGGAACGGTTTACACGCCCCCGCCCCGCCTGCTGCCCAGGAATACTTTCTCCAGGAAGGCT
TTCAAGCTGAAGAAGCCCTCCAAATACTGCAGCTGGAAATGTGCTGCCCTCTCCGCCATTGCCGCGGC
CCTCCTCTTGGCTATTTTGCTGGCGTATTTCATAGTGCCCTGGTCGTTGAAAAACAGCAGCATAGACA
GTGGTGAAGCAGAAGTTGGTCGGCGGGTAACACAAGAAGTCCCACCAGGGGTGTTTTGGAGGTCACAA
ATTCACATCAGTCAGCCCCAGTTCTTAAAGTTCAACATCTCCCTCGGGAAGGACGCTCTCTTTGGTGT
TTACATAAGAAGAGGACTTCCACCATCTCATGCCCAGTATGACTTCATGGAACGTCTGGACGGGAAGG
AGAAGTGGAGTGTGGTTGAGTCTCCCAGGGAACGCCGGAGCATACAGACCTTGGTTCAGAATGAAGCC
GTGTTTGTGCAGTACCTGGATGTGGGCCTGTGGCATCTGGCCTTCTACAATGATGGAAAAGACAAAGA
GATGGTTTCCTTCAATACTGTTGTCCTAGATTCAGTGCAGGACTGTCCACGTAACTGCCATGGGAATG
GTGAATGTGTGTCCGGGGTGTGTCACTGTTTCCCAGGATTTCTAGGAGCAGACTGTGCTAAAGCTGCC
TGCCCTGTCCTGTGCA

| | | | |
|---|---|---|---|
| NOV7p, CG50426-09 | SEQ ID NO: 144 | 580 aa | MW at 63961.7kD |
| Protein Sequence | | | |

KHQHSAISGIMDVKDRRHRSLTRGRCGKECRYTSSSLDSEDCRVPTQKSYSSSETLKAYDHDSPNHYG
NRVTDLIHRESDEFPRQGTNFTLAELGICEPSPHRSGYCSDMGILHQGYSLSTGSDADSDTEGGMSPE
HAIRLWGRGIKSRRSSGLSSRENSALTLTDSDNENKSDDENGRPIPPTSSPSLLPSAQLPSSHNPPPV
SCQMPLLDSNTSHQIMDTNPDEEFSPNSYLLRACSGPQQASSSGPPNHHSQSTLRPPLPPPHNHTLSH
HHSSANSLNRNSLTNRRSQIHAPAPAPNDLATTPESVQLQDSWVLNSNVPLETRHFLFKTSSGSTPLF
SSSSPGYPLTSGTVYTPPPRLLPRNTFSRKAFKLKKPSKYCSWKCAALSAIAAALLLAILLAYFIVPW
SLKNSSIDSGEAEVGRRVTQEVPPGVFWRSQIHTSQPQFLKFNISLGKDALFGVYIRRGLPPSHAQYD
FMERLDGKEKWSVVESPRERRSIQTLVQNEAVFVQYLDVGLWHLAFYNDGKDKEMVSFNTVVLDSVQD
CPRNCHGNGECVSGVCHCFPGFLGADCAKAACPVLC

| | | |
|---|---|---|
| NOV7q, CG50426-10 | SEQ ID NO: 145 | 9756 bp |
| DNA Sequence | ORF Start: ATG at 210 | ORF Stop: TAA at 8409 |

CCAGCATTAGATGAGTTGACAAAAATGCAGTTTCAGCTCTGAAGGTCTGAAAGATTCTGCTGCAACTA
AAGCTCTGAAGATTCTGCTACAACTATGACATCCATTTTCTCCCACTTCAGACAGGATGAATACAAGG
TGGCAAAGTGACAAGTGCCAAAACTCAGGCCTGACTTTTCTGAAAACATCAGCATTCTGCCATATCTG
GAATAATGGATGTAAAGGACCGGCGACACCGCTCTTTGACCAGAGGACGCTGTGGCAAAGAGTGTCGC
TACACAAGCTCCTCTCTGGACAGTGAGGACTGCCGGGTGCCCACACAGAAATCCTACAGCTCCAGTGA
GACTCTGAAGGCCTATGACCATGACAGCAGGATGCACTATGGAAACCGAGTCACAGACCTCATCCACC
GGGAGTCAGATGAGTTTCCTAGACAAGGAACCAACTTCACCCTTGCCGAACTGGGCATCTGTGAGCCC
TCCCCACACCGAAGCGGCTACTGCTCCGACATGGGGATCCTTCACCAGGGCTACTCCCTTAGCACAGG
GTCTGACGCCGACTCCGACACCGAGGGAGGGATGTCTCCAGAACACGCCATCAGACTGTGGGGCAGAG
GGATAAAATCCAGGCGCAGTTCCGGCCTGTCCAGTCGTGAAAACTCGGCCCTTACCCTGACTGACTCT
GACAACGAAAACAAATCAGATGATGAGAACGGTCGTCCCATTCCACCTACATCCTCGCCTAGTCTCCT
CCCATCTGCTCAGCTGCCTAGCTCCCATAATCCTCCACCAGTTAGCTGCCAGATGCCATTGCTAGACA
GCAACACCTCCCATCAAATCATGGACACCAACCCTGATGAGGAATTCTCCCCCAATTCATACCTGCTC
AGAGCATGCTCAGGGCCCCAGCAAGCCTCCAGCAGTGGCCCTCCGAACCACCACAGCCAGTCGACTCT
GAGGCCCCCTCTCCCACCCCCTCACAACCACACGCTGTCCCATCACCACTCGTCCGCCAACTCCCTCA
ACAGGAACTCACTGACCAATCGGCGGAGTCAGATCCACGCCCCGGCCCCAGCGCCCAATGACCTGGCC
ACCACACCAGAGTCCGTTCAGCTTCAGGACAGCTGGGTGCTAAACAGCAACGTGCCACTGGAGACCCG
GCACTTCCTCTTCAAGACCTCCTCGGGGAGCACACCCTTGTTCAGCAGCTCTTCCCCGGGATACCCTT
TGACCTCAGGAACGGTTTACACGCCCCCGCCCCGCCTGCTGCCCAGGAATACTTTCTCCAGGAAGGCT
TTCAAGCTGAAGAAGCCCTCCAAATACTGCAGCTGGAAATGTGCTGCCCTCTCCGCCATTGCCGCGGC
CCTCCTCTTGGCTATTTTGCTGGCGTATTTCATAGTGCCCTGGTCGTTGAAAAACAGCAGCATAGACA
GTGGTGAAGCAGAAGTTGGTCGGCGGGTAACACAAGAAGTCCCACCAGGGGTGTTTTGGAGGTCACAA
ATTCACATCAGTCAGCCCCAGTTCTTAAAGTTCAACATCTCCCTCGGGAAGGACGCTCTCTTTGGTGT
TTACATAAGAAGAGGACTTCCACCATCTCATGCCCAGTATGACTTCATGGAACGTCTGGACGGGAAGG
AGAAGTGGAGTGTGGTTGAGTCTCCCAGGGAACGCCGGAGCATACAGACCTTGGTTCAGAATGAAGCC
GTGTTTGTGCAGTACCTGGATGTGGGCCTGTGGCATCTGGCCTTCTACAATGATGGAAAAGACAAAGA
GATGGTTTCCTTCAATACTGTTGTCCTAGATTCAGTGCAGGACTGTCCACGTAACTGCCATGGGAATG
GTGAATGTGTGTCCGGGGTGTGTCACTGTTTCCCAGGATTTCTAGGAGCAGACTGTGCTAAAGCTGCC
TGCCCTGTCCTGTGCAGTGGGAATGGACAATATTCTAAAGGGACGTGCCAGTGCTACAGCGGCTGGAA
AGGTGCAGAGTGCGACGTGCCCATGAATCAGTGCATCGATCCTTCCTGCGGGGGCCACGGCTCCTGCA
TTGATGGGAACTGTGTCTGCTCTGCTGGCTACAAAGGCGAGCACTGTGAGGAAGTTGATTGCTTGGAT
CCCACCTGCTCCAGCCACGGAGTCTGTGTGAATGGAGAATGCCTGTGCAGCCCTGGCTGGGGTGGTCT
GAACTGTGAGCTGGCGAGGGTCCAGTGCCCAGACCAGTGCAGTGGGCATGGCACGTACCTGCCTGACA
CGGGCCTCTGCAGCTGCGATCCCAACTGGATGGGTCCCGACTGCTCTGTTGAAGTGTGCTCAGTAGAC
TGTGGCACTCACGGCGTCTGCATCGGGGGAGCCTGCCGCTGTGAAGAGGGCTGGACAGGCGCAGCGTG
TGACCAGCGCGTGTGCCACCCCCGCTGCATTGAGCACGGGACCTGTAAAGATGGCAAATGTGAATGCC
GAGAGGGCTGGAATGGTGAACACTGCACCATTGGTAGGCAAACGGCAGGCACCGAAACAGATGGCTGC
CCTGACTTGTGCAACGGTAACGGGAGATGCACACTGGGTCAGAACAGCTGGCAGTGTGTCTGCCAGAC
CGGCTGGAGAGGGCCCGGATGCAACGTTGCCATGGAAACTTCCTGTGCTGATAACAAGGATAATGAGG
GAGATGGCCTGGTGGATTGTTTGGACCCTGACTGCTGCCTGCAGTCAGCCTGTCAGAACAGCCTGCTC
TGCCGGGGGTCCCGGGACCCACTGGACATCATTCAGCAGGGCCAGACGGATTGGCCCGCAGTGAAGTC
CTTCTATGACCGTATCAAGCTCTTGGCAGGCAAGGATAGCACCCACATCATTCCTGGAGAGAACCCTT
TCAACAGCAGCTTGGTTTCTCTCATCCGAGGCCAAGTAGTAACTACAGATGGAACTCCCCTGGTCAAT
GTGAACGTGTCTTTTGTCAAGTACCCAAAATACGGCTACACCATCACCCGCCAGGATGGCACGTTCGA
CCTGATCGCAAATGGAGGTGCTTCCTTGACTCTACACTTTGAGCGAGCCCCGTTCATGAGCCAGGAGC
GCACTGTGTGGCTGCCGTGGAACAGCTTTTACGCCATGGACACCCTGGTGATGAAGACCGAGGAGAAC
TCCATCCCCAGCTGTGACCTCAGTGGCTTTGTCCGGCCTGATCCAATCATCATCTCCTCCCCACTGTC
CACCTTCTTTAGTGCTGCCCCTGGGCAGAATCCCATCGTGCCTGAGACCCAGGTTCTTCATGAAGAAA
TCGAGCTCCCTGGTTCCAATGTGAAACTTCGCTATCTGAGCTCTAGAACTGCAGGGTACAAGTCACTG
CTGAAGATCACCATGACCCAGTCCACAGTGCCCCTGAACCTCATTAGGGTTCACCTGATGGTGGCTGT
CGAGGGGCATCTCTTCCAGAAGTCATTCCAGGCTTCTCCCAACCTGGCCTCCACCTTCATCTGGGACA
AGACAGATGCGTATGGCCAAAGGGTGTATGGACTCTCAGATGCTGTTGTGTCTGTCGGGTTTGAATAT
GAGACCTGTCCCAGTCTAATTCTCTGGGAGAAAAGGACAGCCCTCCTTCAGGGATTCGAGCTGGACCC
CTCCAACCTCGGTGGCTGGTCCCTAGACAACACCACATCCTCAATGTTAAAAGTGGAAATCCTACACA
AAGGCACTGGGGAAAACCAGTTCCTGACCCAGCAGCCTGCCATCATCACCAGCATCATGGGCAATGGT
CGCCGCCGGAGCATTTCCTGTCCCAGCTGCAACGGCCTTGCTGAAGGCAACAAGCTGCTGGCCCCAGT
GGCTCTGGCTGTTGGAATCGATGGGAGCCTCTATGTGGGTGACTTCAATTACATCCGACGCATCTTTC
CCTCTCGAAATGTGACCAGCATCTTGGAGTTACGAAATAAAGAGTTTAAACATAGCAACAACCCAGCA
CACAAGTACTACTTGGCAGTGGACCCCGTGTCCGGCTCGCTCTACGTGTCCGACACCAACAGCAGGAG
AATCTACCGCGTCAAGTCTCTGAGTGGAACCAAAGACCTGGCTGGGAATTCGGAAGTTGTGGCAGGGA
CGGGAGAGCAGTGTCTACCCTTTGATGAAGCCCGCTGCGGGGATGGAGGGAAGGCCATAGATGCAACC
CTGATGAGCCCGAGAGGTATTGCAGTAGACAAGAATGGGCTCATGTACTTTGTCGATGCCACCATGAT
CCGGAAGGTTGACCAGAATGGAATCATCTCCACCCTGCTGGGCTCCAATGACCTCACTGCCGTCCGGC
CGCTGAGCTGTGATTCCAGCATGGATGTAGCCCAGGTTCGTCTGGAGTGGCCAACAGACCTTGCTGTC
AATCCCATGGATAACTCCTTGTATGTTCTAGAGAACAATGTCATCCTTCGAATCACCGAGAACCACCA
AGTCAGCATCATTGCGGGACGCCCCATGCACTGCCAAGTTCCTGGCATTGACTACTCACTCAGCAAAC
TAGCCATTCACTCTGCCCTGGAGTCAGCCAGTGCCATTGCCATTTCTCACACTGGGGTCCTCTACATC
ACTGAGACAGATGAGAAGAAGATTAACCGTCTACGCCAGGTAACAACCAACGGGGAGATCTGCCTTTT
AGCTGGGGCAGCCTCGGACTGCGACTGCAAAAACGATGTCAATTGCAACTAATATTCAGGAGATGATG
CCTACGCGACTGATGCCATCTTGAATTCCCCATCATCCTTAGCTGTAGCTCCAGATGGTACCATTTAC
ATTGCAGACCTTGGAAATATTCGGATCAGGGCGGTCAGCAAGAACAAGCCTGTTCTTAATGCCTTCAA
CCAGTATGAGGCTGCATCCCCCGGAGAGCAGGAGTTATATGTTTTCAACGCTGATGGCATCCACCAAT
ACACTGTGAGCCTGGTGACAGGGGAGTACTTGTACAATTTCACATATAGTACTGACAATGATGTCACT
GAATTGATTGACAATAATGGGAATTCCCTGAAGATCCGTCGGGACAGCAGTGGCATGCCCCGTCACCT
GCTCATGCCTGACAACCAGATCATCACCCTCACCGTGGGCACCAATGGAGGCCTCAAAGTCGTGTCCA
CACAGAACCTGGAGCTTGGTCTCATGACCTATGATGGCAACACTGGGCTCCTGGCCACCAAGAGCGAT
GAAACAGGATGGACGACTTTCTATGACTATGACCACGAAGGCCGCCTGACCAACGTGACAAGCCCCAC
GGGGGTGGTAACCAGTCTGCACCGGGAAATGGAGAAATCTATTACCATTGACATTGAGAACTCCAACC
GTGATGATGACGTCACTGTCATCACCAACCTCTCTTCAGTAGAGGCCTCCTACACAGTGGTACAAGAT
CAAGTTCGGAACAGCTACCAGCTCTGTAATAATGGTACCCTGAGGGTGATGTATGCTAATGGGATGGG
TATCAGCTTCCACAGCGAGCCCCATGTCCTAGCGGGCACCATCACCCCCACCATTGGACGCTGCAACA
TCTCCCTGCCTATGGAGAATGGCTTAAACTCCATTGAGTGGCGCCTAAGAAAGGAACAGATTAAAGGC
AAAGTCACCATCTTTGGCAGGAAGCTCCGGGTCCATGGAAGAAATCTCTTGTCCATTGACTATGATCG
AAATATTCGGACTGAAAAGATCTATGATGACCACCGGAAGTTCACCCTGAGGATCATTTATGACCAGG
TGGGCCGCCCCTTCCTCTGGCTGCCCAGCAGCGGGCTGGCAGCTGTCAACGTGTCATACTTCTTCAAT
GGGCGCCTGGCTGGGCTTCAGCGTGGGGCCATGAGCGAGAGGACAGACATCGACAAGCAAGGCCGCAT
CGTGTCCCGCATGTTCGCTGACGGGAAAGTGTGGAGCTACTCCTACCTTGACAAGTCCATGGTCCTCC
TGCTTCAGAGCCAACGTCAGTATATATTTGAGTATGACTCCTCTGACCGCCTCCTTGCCGTCACCATG
CCCAGCGTGGCCCGGCACAGCATGTCCACACACACCTCCATCGGCTACATCCGTAATATTTACAACCC
GCCTGAAAGCAATGCTTCGGTCATCTTTGACTACAGTGATGACGGCCGCATCCTGAAGACCTCCTTTT
TGGGCACCGGACGCCAGGTGTTCTACAAGTATGGGAAACTCTCCAAGTTATCAGAGATTGTCTACGAC
AGTACCGCCGTCACCTTCGGGTATGACGAGACCACTGGTGTCTTGAAGATGGTCAACCTCCAAAGTGG
GGGCTTCTCCTGCACCATCAGGTACCGGAAGATTGGCCCCCTGGTGGACAAGCAGATCTACAGGTTCT
CCGAGGAAGGCATGGTCAATGCCAGGTTTGACTACACCTATCATGACAACAGCTTCCGCATCGCAAGC
ATCAAGCCCGTCATAAGTGAGACTCCCCTCCCCGTTGACCTCTACCGCTATGATGAGATTTCTGGCAA
GGTGGAACACTTTGGTAAGTTTGGAGTCATCTATTATGACATCAACCAGATCATCACCACTGCCGTGA
TGACCCTCAGCAAACACTTCGACACCCATGGGCGGATCAAGGAGGTCCAGTATGAGATGTTCCGGTCC
CTCATGTACTGGATGACGGTGCAATATGACAGCATGGGCAGGGTGATCAAGAGGGAGCTAAAACTGGG
GCCCTATGCCAATACCACGAAGTACACCTATGACTACGATGGGGACGGGCAGCTCCAGAGCGTGGCCG
TCAATGACCGCCCGACCTGGCGCTACAGCTATGACCTTAATGGGAATCTCCACTTACTGAACCCAGGC
AACAGTGTGCGCCTCATGCCCTTGCGCTATGACCTCCGGGATCGGATAACCAGACTCGGGGATGTGCA
GTACAAAATTGACGACGATGGCTATCTGTGCCAGAGAGGGTCTGACATCTTCGAATACAATTCCAAGG
GCCTCCTAACAAGAGCCTACAACAAGGCCAGCGGGTGGAGTGTCCAGTACCGCTATGATGGCGTAGGA
CGGCGGGCTTCCTACAAGACCAACCTGGGCCACCACCTGCAGTACTTCTACTCTGACCTCCACAACCC
GACGCGCATCACCCATGTCTACAATCACTCCAACTCGGAGATTACCTCACTGTACTACGACCTCCAGG
GCCACCTCTTTGCCATGGAGAGCAGCAGTGGGGAGGAGTACTATGTTGCCTCTGATAACACAGGGACT
CCTCTGGCTGTGTTCAGCATCAACGGCCTCATGATCAAACAGCTGCAGTACACGGCCTATGGGGAGAT
TTATTATGACTCCAACCCCGACTTCCAGATGGTCATTGGCTTCCATGGGGGACTCTATGACCCCCTGA
CCAAGCTGGTCCACTTCACTCAGCGTGATTATGATGTGCTGGCAGGACGATGGACCTCCCCAGACTAT
ACCATGTGGAAAAACGTGGGCAAGGAGCCGGCCCCCTTTAACCTGTATATGTTCAAGAGCAACAATCC
TCTCAGCAGTGAGCTAGATTTGAAGAACTACGTGACAGATGTGAAAAGCTGGCTTGTGATGTTTGGAT
TTCAGCTTAGCAACATCATTCCTGGCTTCCCGAGAGCCAAAATGTATTTCGTGCCTCCTCCCTATGAA
TTGTCAGAGAGTCAAGCAAGTGAGAATGGACAGCTCATTACAGGTGTCCAACAGACAACAGAGAGACA
TAACCAGGCCTTCATGGCTCTGGAAGGACAGGTCATTACTAAAAAGCTCCACGCCAGCATCCGAGAGA
AAGCAGGTCACTGGTTTGCCACCACCACGCCCATCATTGGCAAAGGCATCATGTTTGCCATCAAAGAA
GGGCGGGTGACCACGGGCGTGTCCAGCATCGCCAGCGAAGATAGCCGCAAGGTGGCATCTGTGCTGAA
CAACGCCTACTACCTGGACAAGATGCACTACAGCATCGAGGGCAAGGACACCCACTACTTTGTGAAGA
TTGGCTCAGCCGATGGCGACCTGGTCACACTAGGCACCACCATCGGCCGCAAGGTGCTAGAGAGCGGG
GTGAACGTGACCGTGTCCCAGCCCACGCTGCTGGTCAACGGCAGGACTCGAAGGTTCACGAACATTGA
GTTCCAGTACTCCACGCTGCTGCTCAGCATCCGCTATGGCCTCACCCCCGACACCCTGGACGAAGAGA
AGGCCCGCGTCCTGGACCAGGCGAGACAGAGGGCCCTGGGCACGGCCTGGGCCAAGGAGCAGCAGAAA
GCCAGGGACGGGAGAGAGGGGAGCCGCCTGTGGACTGAGGGCGAGAAGCAGCAGCTTCTGAGCACCGG
GCGCGTGCAAGGGTACGAGGGATATTACGTGCTTCCCGTGGAGCAATACCCAGAGCTTGCAGACAGTA
GCAGCAACATCCAGTTTTTAAGACAGAATGAGATGGGAAAGAGGTAACAAAATAATCTGCTGCCATTC
CTTGTCTGAATGGCTCAGCAGGAGTAACTGTTATCTCCTCTCCTAAGGAGATGAAGACCTAACAGGGG
CACTGCGGCTGGGCTGCTTTAGGAGACCAAGTGGCAAGAAAGCTCACATTTTTTGAGTTCAAATGCTA
CTGTCCAAGCGAGAAGTCCCTCATCCTGAAGTAGACTAAAGCCCGGCTGAAAATTCCGAGGAAAACAA
AACAAACGAATGAATGAACAGACACACACAATGTTCCAAGTTCCCCTAAAATATGACCCACTTGTTCT
GGGTCTACGCAGAAAAGAGACGCAAAGTGTCCAAAAGGAACAAAAGAACAAAAACGAATAAGCAAAGA
AGAAAACAAACAAAAACAAAACAAAACAAACACACGGACCGATAAACAAAGAAGCGAAGATAAGAAAG
AAGGCCTCATATCCAATTACCTCACTCATTCACATGTGAGCGACACGCAGACATCCGCGAGGGCCAGC
GTCACCAGACCAGCTGCGGGACAAACCACTCAGACTGCTTGTAGGACAAATACTTCTGACATTTTCGT
TTAAGCAAATACAGGTGCATTTAAAACACGACTTTGGGGGTGATTTGTGTGTAGCGCCTGGGGAGGGG
GGATAAAAGAGGAGGAGTGAGCACTGGAAATACTTTTTAAAGAAAAAAAAACATGAGGGAATAAAAGA
AATTCCTATCAAAAATCAAAGTGAAATAATACCATCCAGCACTTAACTCTCAGGTCCCAACTAAGTCT
GGCCTGAGCTAATTTATTTGAGCGCAGAGTGTAAAATTTAATTCAAAATGGTGGCTATAATCACTACA
GATAAATTTCATACTCTTTTGTCTTTGGAGATTCCATTGTGGACAGTAATACGCAGTTACAGGGTGTA
GTCTGTTTAGATTCCGTAGTTCGTGGGTATCAGTTTCGGTAGAGGTGCAGCATCGTGACACTTTTGCT
AACAGGTACCACTTCTGATCACCCTGTACATACATGAGCCGAAAGGCACAATCACTGTTTCAGATTTA
AAATTATTAGTGTGTTTGTTTGGTCCAGAAACTGAGACAATCACATGACAGTCACCACGAGGAGAGAA
AATTTAAAAAATAAAAATAAAAACAAAAAAAATTTTAAAAATTAAAAAAACAAAAATAAAGTCTAATA
AGAACTTTGGTACAGGAACTTTTTTGTAATATACATGTATGAATTGTTCATCGAGTTTTTATATTAAT
TTTAATTTGCTGCTAAGCAAAGACTAGGGACAGGCAAAGATAATTTATGGCAAAGTGTTTAAATTGTT
TATACATAAATAAAGTCTCTAAAACTCCTGTG

| | | | |
|---|---|---|---|
| NOV7q, CG50426-10 | SEQ ID NO: 146 | 2733 aa | MW at 303423.3kD |
| Protein Sequence | | | |

MDVKDRRHRSLTRGRCGKECRYTSSSLDSEDCRVPTQKSYSSSETLKAYDHDSRMHYGNRVTDLIHRE
SDEFPRQGTNFTLAELGICEPSPHRSGYCSDMGILHQGYSLSTGSDADSDTEGGMSPEHAIRLWGRGI
KSRRSSGLSSRENSALTLTDSDNENKSDDENGRPIPPTSSPSLLPSAQLPSSHNPPPVSCQMPLLDSN
TSHQIMDTNPDEEFSPNSYLLRACSGPQQASSSGPPNHHSQSTLRPPLPPPHNHTLSHHHSSANSLNR
NSLTNRRSQIHAPAPAPNDLATTPESVQLQDSWVLNSNVPLETRHFLFKTSSGSTPLFSSSSPGYPLT
SGTVYTPPPRLLPRNTFSRKAFKLKKPSKYCSWKCAALSAIAAALLLAILLAYFIVPWSLKNSSIDSG
EAEVGRRVTQEVPPGVFWRSQIHISQPQFLKFNISLGKDALFGVYTRRGLPPSHAQYDFMERLDGKEK
WSVVESPRERRSIQTLVQNEAVFVQYLDVGLWHLAFYNDGKDKEMVSFNTVVLDSVQDCPRNCNGNGE
CVSGVCHCFPGFLGADCAKAACPVLCSGNGQYSKGTCQCYSGWKGAECDVPMNQCIDPSCGGHGSCID
GNCVCSAGYKGEHCEEVDCLDPTCSSHGVCVNGECLCSPGWGGLNCELARVQCPDQCSGHGTYLPDTG
LCSCDPNWMGPDCSVEVCSVDCGTHGVCIGGACRCEEGWTGAACDQRVCHPRCIENGTCKDGKCECRE
GWNGEHCTIGRQTAGTETDGCPDLCNGNGRCTLGQNSWQCVCQTGWRGPGCNVAMETSCADNKDNEGD
GLVDCLDPDCCLQSACQNSLLCRGSRDPLDIIQQGQTDWPAVKSFYDRIKLLAGKDSTHIIPGENPFN
SSLVSLIRGQVVTTDGTPLVGVNVSFVKYPKYGYTITRQDGTFDLTANGGASLTLHFERAPFMSQERT
VWLPWNSFYAMDTLVMKTEENSIPSCDLSGFVRPDPIIISSPLSTFFSAAPGQNPIVPETQVLHEEIE
LPGSNVKLRYLSSRTAGYKSLLKITMTQSTVPLNLIRVHLMVAVEGHLFQKSFQASPNLASTFIWDKT
DAYGQRVYGLSDAVVSVGFEYETCPSLILWEKRTALLQGFELDPSNLGGWSLDKHHILNVKSGILHKG
TGENQFLTQQPAIITSTMGNGRRRSISCPSCNGLAEGNKLLAPVALAVGIDGSLYVGDFNYIRRIFPS
RNVTSILELRNKEFKHSNNPAHKYYLAVDPVSGSLYVSDTNSRRIYRVKSLSGTKDLAGNSEVVAGTG
EQCLPFDEARCGDGGKAIDATLMSPRGIAVDKNGLMYFVDATMIRKVDQNGIISTLLGSNDLTAVRPL
SCDSSMDVAQVRLEWPTDLAVNPMDNSLYVLENNVILRITENHQVSIIAGRPMHCQVPGIDYSLSKLA
IHSALESASAIAISHTGVLYITETDEKKINRLRQVTTNGEICLLAGAASDCDCKNDVNCNCYSGDDAY
ATDAILNSPSSLAVAPDGTIYIADLGNIRIRAVSKNKPVLNAFNQYEAASPGEQELYVFNADGIHQYT
VSLVTGEYLYNFTYSTDNDVTELIDNNGNSLKIRRDSSGMPRHLLMPDNQITTLTVGTNGGLKVVSTQ
NLELGLMTYDGNTGLLATKSDETGWTTFYDYDHEGRLTNVTRPTGVVTSLHREMEKSITIDIENSNRD
DDVTVITNLSSVEASYTVVQDQVRNSYQLCNNGTLRVMYANGMGISFHSEPHVLAGTITPTIGRCNIS
LPMENGLNSIEWRLRKEQIKGKVTIFGRKLRVHGRNLLSIDYDRNIRTEKIYDDHRKFTLRIIYDQVG
RPFLWLPSSGLAAVNVSYFFNGRLAGLQRGAMSERTDIDKQGRIVSRMFADGKVWSYSYLDKSMVLLL
QSQRQYIFEYDSSDRLLAVTMPSVARHSMSTHTSIGYIRNIYNPPESNASVIFDYSDDGRILKTSFLG
TGRQVFYKYGKLSKLSEIVYDSTAVTFGYDETTGVLKMVNLQSGGFSCTIRYPYIGPLVDKQIYRFSE
EGMVNARFDYTYHDNSFRIASIKPVISETPLPVDLYRYDEISGKVEHFGKFGVIYYDINQIITTAVMT
LSKHFDTHGRIKEVQYEMFRSLMYWMTVQYDSMGRVIKRELKLGPYANTTKYTYDYDGDGQLQSVAVN
DRPTWRYSYDLNGNLHLLNPGNSVRLMPLRYDLRDRITRLGDVQYKIDDDGYLCQRGSDIFEYNSKGL
LTRAYNKASGWSVQYRYDGVGRRASYKTNLGHHLQYFYSDLHNPTRITHVYNHSNSEITSLYYDLQGH
LFAMESSSGEEYYVASDNTGTPLAVFSINGLMIKQLQYTAYGEIYYDSNPDFQMVTGFHGGLYDPLTK
LVHFTQRDYDVLAGRWTSPDYTMWKNVGKEPAPFNLYMFKSNNPLSSELDLKNYVTDVKSWLVMFGFQ
LSNIIPGFPRAKMYFVPPPYELSESQASENGQLITGVQQTTERHNQAFMALEGQVITKKLHASIREKA
GHWFATTTPIIGKGIMFATKEGRVTTGVSSIASEDSRKVASVLNNAYYLDKMHYSIEGKDTHYFVKIG
SADGDLVTLGTTIGRKVLESGVNVTVSQPTLLVNGRTRRFTNIEFQYSTLLLSIRYGLTPDTLDEEKA
RVLDQARQRALGTAWAKEQQKARDGREGSRLWTEGEKQQLLSTGRVQGYEGYYVLPVEQYPELADSSS
NIQFLRQNEMGKR

| | | |
|---|---|---|
| NOV7r, CG50426-11 | SEQ ID NO: 147 | 9729 bp |
| DNA Sequence | ORF Start: ATG at 210 | ORF Stop: TAA at 8382 |

CCAGCATTAGATGAGTTGACAAAAATGCAGTTTCAGCTCTGAAGGTCTGAAAGATTCTGCTGCAACTA
AAGCTCTGAAGATTCTGCTACAACTATGACATCCATTTTCTCCCACTTCAGACAGGATGAATACAAGG
TGGCAAAGTGACAAGTGCCAAAACTCAGGCCTGACTTTCCTGAAAACATCAGCATTCTGCCATATCTG
GAATAATGGATGTAAAGGACCGGCGACACCGCTCTTTGACCAGAGGACGCTGTGGCAAAGAGTGTCGC
TACACAAGCTCCTCTCTGGACAGTGAGGACTGCCGGGTGCCCACACAGAAATCCTACAGCTCCAGTGA
GACTCTGAAGGCCTATGACCATGACAGCAGGATGCACTATGGAAACCGAGTCACAGACCTCATCCACC
GGGAGTCAGATGAGTTTCCTAGACAAGGAACCAACTTCACCCTTGCCGAACTGGGCATCTGTGAGCCC
TCCCCACACCGAAGCGGCTACTGCTCCGACATGGGGATCCTTCACCAGGGCTACTCCCTTAGCACAGG
GTCTGACGCCGACTCCGACACCGAGGGAGGGATGTCTCCAGAACACGCCATCAGACTGTGGGGCAGAG
GGATAAAATCCAGGCGCAGTTCCGGCCTGTCCAGTCGTGAAAACTCGGCCCTTACCCTGACTGACTCT
GACAACGAAAACAAATCAGATGATGAGAACGGTCGTCCCATTCCACCTACATCCTCGCCTAGTCTCCT
CCCATCTGCTCAGCTGCCTAGCTCCCATAATCCTCCACCAGTTAGCTGCCAGATGCCATTGCTAGACA
GCAACACCTCCCATCAAATCATGGACACCAACCCTGATGAGGAATTCTCCCCCAATTCATACCTGCTC
AGAGCATGCTCAGGGCCCCAGCAAGCCTCCAGCAGTGGCCCTCCGAACCACCACAGCCAGTCGACTCT
GAGGCCCCCTCTCCCACCCCCTCACAACCACACGCTGTCCCATCACCACTCGTCCGCCAACTCCCTCA
ACAGGAACTCACTGACCAATCGGCGGAGTCAGATCCACGCCCCGGCCCCAGCGCCCAATGACCTGGCC
ACCACACCAGAGTCCGTTCAGCTTCAGGACAGCTGGGTGCTAAACAGCAACGTGCCACTGGAGACCCG
GCACTTCCTCTTCAAGACCTCCTCGGGGAGCACACCCTTGTTCAGCAGCTCTTCCCCGGGATACCCTT
TGACCTCAGGAACGGTTTACACGCCCCCGCCCCGCCTGCTGCCCAGGAATACTTTCTCCAGGAAGGCT
TTCAAGCTGAAGAAGCCCTCCAAATACTGCAGCTGGAAATGTGCTGCCCTCTCCGCCATTGCCGCGGC
CCTCCTCTTGGCTATTTTGCTGGCGTATTTCATAGTGCCCTGGTCGTTGAAAAACAGCAGCATAGACA
GTGGTGAAGCAGAAGTTGGTCGGCGGGTAACACAAGAAGTCCCACCAGGGGTGTTTTGGAGGTCACAA
ATTCACATCAGTCAGCCCCAGTTCTTAAAGTTCAACATCTCCCTCGGGAAGGACGCTCTCTTTGGTGT
TTACATAAGAAGAGGACTTCCACCATCTCATGCCCAGTATGACTTCATGGAACGTCTGGACGGGAAGG
AGAAGTGGAGTGTGGTTGAGTCTCCCAGGGAACGCCGGAGCATACAGACCTTGGTTCAGAATGAAGCC
GTGTTTGTGCAGTACCTGGATGTGGGCCTGTGGCATCTGGCCTTCTACAATGATGGAAAAGACAAAGA
GATGGTTTCCTTCAATACTGTTGTCCTAGATTCAGTGCAGGACTGTCCACGTAACTGCCATGGGAATG
GTGAATGTGTGTCCGGGGTGTGTCACTGTTTCCCAGGATTTCTAGGAGCAGACTGTGCTAAAGCTGCC
TGCCCTGTCCTGTGCAGTGGGAATGGACAATATTCTAAAGGGACGTGCCAGTGCTACAGCGGCTGGAA
AGGTGCAGAGTGCGACGTGCCCATGAATCAGTGCATCGATCCTTCCTGCGGGGGCCACGGCTCCTGCA
TTGATGGGAACTGTGTCTGCTCTGCTGGCTACAAAGGCGAGCACTGTGAGGAAGTTGATTGCTTGGAT
CCCACCTGCTCCAGCCACGGAGTCTGTGTGAATGGAGAATGCCTGTGCAGCCCTGGCTGGGGTGGTCT
GAACTGTGAGCTGGCGAGGGTCCAGTGCCCAGACCAGTGCAGTGGGCATGGCACGTACCTGCCTGACA
CGGGCCTCTGCAGCTGCGATCCCAACTGGATGGGTCCCGACTGCTCTGTTGAAGTGTGCTCAGTAGAC
TGTGGCACTCACGGCGTCTGCATCGGGGGAGCCTGCCGCTGTGAAGAGGGCTGGACAGGCGCAGCGTG
TGACCAGCGCGTGTGCCACCCCCGCTGCATTGAGCATGGGACCTGTAAAGATGGCAAATGTGAATGCC
GAGAGGGCTGGAATGGTGAACACTGCACCATTGATGGCTGCCCTGACTTGTGCAACGGTAACGGGAGA
TGCACACTGGGTCAGAACAGCTGGCAGTGTGTCTGCCAGACCGGCTGGAGAGGGCCCGGATGCAACGT
TGCCATGGAAACTTCCTGTGCTGATAACAAGGATAATGAGGGAGATGGCCTGGTGGATTGTTTGGACC
CTGACTGCTGCCTGCAGTCAGCCTGTCAGAACAGCCTGCTCTGCCGGGGGTCCCGGGACCCACTGGAC
ATCATTCAGCAGGGCCAGACGGATTGGCCCGCAGTGAAGTCCTTCTATGACCGTATCAAGCTCTTGGC
AGGCAAGGATAGCACCCACATCATTCCTGGAGAGAACCCTTTCAACAGCAGCTTGGTTTCTCTCATCC
GAGGCCAAGTAGTAACTACAGATGGAACTCCCCTGGTCGGTGTGAACGTGTCTTTTGTCAAGTACCCA
AAATACGGCTACACCATCACCCGCCAGGATGGCACGTTCGACCTGATCGCAAATGGAGGTGCTTCCTT
GACTCTACACTTTGAGCGAGCCCCGTTCATGAGCCAGGAGCGCACTGTGTGGCTGCCGTGGAACAGCT
TTTACGCCATGGACACCCTGGTGATGAAGACCGAGGAGAACTCCATCCCCAGCTGTGACCTCAGTGGC
TTTGTCCGGCCTGATCCAATCATCATCTCCTCCCCACTGTCCACCTTCTTTAGTGCTGCCCCTGGGCA
GAATCCCATCGTGCCTGAGACCCAGGTTCTTCATGAAGAAATCGAGCTCCCTGGTTCCAATGTGAAAC
TTCGCTATCTGAGCTCTAGAACTGCAGGGTACAAGTCACTGCTGAAGATCACCATGACCCAGTCCACA
GTGCCCCTGAACCTCATTAGGGTTCACCTGATGGTGGCTGTCGAGGGGCATCTCTTCCAGAAGTCATT
CCAGGCTTCTCCCAACCTGGCCTCCACCTTCATCTGGGACAAGACAGATGCGTATGGCCAAAGGGTGT
ATGGACTCTCAGATGCTGTTGTGTCTGTCGGGTTTGAATATGAGACCTGTCCCAGTCTAATTCTCTGG
GAGAAAAGGACAGCCCTCCTTCAGGGATTCGAGCTGGACCCCTCCAACCTCGGTGGCTGGTCCCTAGA
CAAACACCACATCCTCAATGTTAAAAGTGGAATCCTACACAAAGGCACTGGGGAAAACCAGTTCCTGA
CCCAGCAGCCTGCCATCATCACCAGCATCATGGGCAATGGTCGCCGCCGGAGCATTTCCTGTCCCAGC
TGCAACGGCCTTGCTGAAGGCAACAAGCTGCTGGCCCCAGTGGCTCTGGCTGTTGGAATCGATGGGAG
CCTCTATGTGGGTGACTTCAATTACATCCGACGCATCTTTCCCTCTCGAAATGTGACCAGCATCTTGG
AGTTACGAAATAAAGAGTTTAAACATAGCAACAACCCAGCACACAAGTACTACTTGGCAGTGGACCCC
GTGTCCGGCTCGCTCTACGTGTCCGACACCAACAGCAGGAGAATCTACCGCGTCAAGTCTCTGAGTGG
AACCAAAGACCTGGCTGGGAATTCGGAAGTTGTGGCAGGGACGGGAGAGCAGTGTCTACCCTTTGATG
AAGCCCGCTGCGGGGATGGAGGGAAGGCCATAGATGCAACCCTGATGAGCCCGAGAGGTATTGCAGTA
GACAAGAATGGGCTCATGTACTTTGTCGATGCCACCATGATCCGGAAGGTTGACCAGAATGGAATCAT
CTCCACCCTGCTGGGCTCCAATGACCTCACTGCCGTCCGGCCGCTGAGCTGTGATTCCAGCATGGATG
TAGCCCAGGTTCGTCTGGAGTGGCCAACAGACCTTGCTGTCAATCCCATGGATAACTCCTTGTATGTT
CTAGAGAACAATGTCATCCTTCGAATCACCGAGAACCACCAAGTCAGCATCATTGCGGGACGCCCCAT
GCACTGCCAAGTTCCTGGCATTGACTACTCACTCAGCAAACTAGCCATTCACTCTGCCCTGGAGTCAG
CCAGTGCCATTGCCATTTCTCACACTGGGGTCCTCTACATCACTGAGACAGATGAGAAGAAGATTAAC
CGTCTACGCCAGGTAACAACCAACGGGGAGATCTGCCTTTTAGCTGGGGCAGCCTCGGACTGCGACTG
CAAAAACGATGTCAATTGCAACTGCTATTCAGGAGATGATGCCTACGCGACTGATGCCATCTTGAATT
CCCCATCATCCTTAGCTGTAGCTCCAGATGGTACCATTTACATTGCAGACCTTGGAAATATTCGGATC
AGGGCGGTCAGCAAGAACAAGCCTGTTCTTAATGCCTTCAACCAGTATGAGGCTGCATCCCCCGGAGA
GCAGGAGTTATATGTTTTCAACGCTGATGGCATCCACCAATACACTGTGAGCCTGGTGACAGGGGAGT
ACTTGTACAATTTCACATATAGTACTGACAATGATGTCACTGAATTGATTGACAATAATGGGAATTCC
CTGAAGATCCGTCGGGACAGCAGTGGCATGCCCCGTCACCTGCTCATGCCTGACAACCAGATCATCAC
CCTCACCGTGGGCACCAATGGAGGCCTCAAAGTCGTGTCCACACAGAACCTGGAGCTTGGTCTCATGA
CCTATGATGGCAACACTGGGCTCCTGGCCACCAAGAGCGATGAAACAGGATGGACGACTTTCTATGAC
TATGACCACGAAGGCCGCCTGACCAACGTGACGCGCCCCACGGGGGTGGTAACCAGTCTGCACCGGGA
AATGGAGAAATCTATTACCATTGACATTGAGAACTCCAACCGTGATGATGACGTCACTGTCATCACCA
ACCTCTCTTCAGTAGAGGCCTCCTACACAGTGGTACAAGATCAAGTTCGGAACAGCTACCAGCTCTGT
AATAATGGTACCCTGAGGGTGATGTATGCTAATGGGATGGGTATCAGCTTCCACAGCGAGCCCCATGT
CCTAGCGGGCACCATCACCCCCACCATTGGACGCTGCAACATCTCCCTGCCTATGGAGAATGGCTTAA
ACTCCATTGAGTGGCGCCTAAGAAAGGAACAGATTAAAGGCAAAGTCACCATCTTTGGCAGGAAGCTC
CGGGTCCATGGAAGAAATCTCTTGTCCATTGACTATGATCGAAATATTCGGACTGAAAAGATCTATGA
TGACCACCGGAAGTTCACCCTGAGGATCATTTATGACCAGGTGGGCCGCCCCTTCCTCTGGCTGCCCA
GCCATGAGCGAGAGGACAGACATCGACAAGCAAGGCCGCATCGTGTCCCGCATGTTCGCTGACGGGAA
AGTGTGGAGCTACTCCTACCTTGACAAGTCCATGGTCCTCCTGCTTCAGAGCCAACGTCAGTATATAT
TTGAGTATGACTCCTCTGACCGCCTCCTTGCCGTCACCATGCCCAGCGTGGCCCGGCACAGCATGTCC
ACACACACCTCCATCGGCTACATCCGTAATATTTACAACCCGCCTGAAAGCAATGCTTCGGTCATCTT
TGACTACAGTGATGACGGCCGCATCCTGAAGACCTCCTTTTTGGGCACCGGACGCCAGGTGTTCTACA
AGTATGGGAAACTCTCCAAGTTATCAGAGATTGTCTACGACAGTACCGCCGTCACCTTCGGGTATGAC
GAGACCACTGGTGTCTTGAAGATGGTCAACCTCCAAAGTGGGGGCTTCTCCTGCACCATCAGGTACCG
GAAGATTGGCCCCCTGGTGGACAAGCAGATCTACAGGTTCTCCGAGGAAGGCATGGTCAATGCCAGGT
TTGACTACACCTATCATGACAACAGCTTCCGCATCGCAAGCATCAAGCCCGTCATAAGTGAGACTCCC
CTCCCCGTTGACCTCTACCGCTATGATGAGATTTCTGGCAAGGTGGAACACTTTGGTAAGTTTGGAGT
CATCTATTATGACATCAACCAGATCATCACCACTGCCGTGATGACCCTCAGCAAACACTTCGACACCC
ATGGGCGGATCAAGGAGGTCCAGTATGAGATGTTCCGGTCCCTCATGTACTGGATGACGGTGCAATAT
GACAGCATGGGCAGGGTGATCAAGAGGGAGCTAAAACTGGGGCCCTATGCCAATACCACGAAGTACAC
CTATGACTACGATGGGGACGGGCAGCTCCAGAGCGTGGCCGTCAATGACCGCCCGACCTGGCGCTACA
GCTATGACCTTAATGGGAATCTCCACTTACTGAACCCAGGCAACAGTGTGCGCCTCATGCCCTTGCGC
TATGACCTCCGGGATCGGATAACCAGACTCGGGGATGTGCAGTACAAAATTGACGACGATGGCTATCT
GTGCCAGAGAGGGTCTGACATCTTCGAATACAATTCCAAGGGCCTCCTAACAAGAGCCTACAACAAGG
CCAGCGGGTGGAGTGTCCAGTACCGCTATGATGGCGTAGGACGGCGGGCTTCCTACAAGACCAACCTG
GGCCACCACCTGCAGTACTTCTACTCTGACCTCCACAACCCGACGCGCATCACCCATGTCTACAATCA
CTCCAACTCGGAGATTACCTCACTGTACTACGACCTCCAGGGCCACCTCTTTGCCATGGAGAGCAGCA
GTGGGGAGGAGTACTATGTTGCCTCTGATAACACAGGGACTCCTCTGGCTGTGTTCAGCATCAACGGC
CTCATGATCAAACAGCTGCAGTACACGGCCTATGGGGAGATTTATTATGACTCCAACCCCGACTTCCA
GATGGTCATTGGCTTCCATGGGGGACTCTATGACCCCCTGACCAAGCTGGTCCACTTCACTCAGCGTG
ATTATGATGTGCTGGCAGGACGATGGACCTCCCCAGACTATACCATGTGGAAAAACGTGGGCAAGGAG
CCGGCCCCCTTTAACCTGTATATGTTCAAGAGCAACAATCCTCTCAGCAGTGAGCTAGATTTGAAGAA
CTACGTGACAGATGTGAAAAGCTGGCTTGTGATGTTTGGATTTCAGCTTAGCAACATCATTCCTGGCT
TCCCGAGAGCCAAAATGTATTTCGTGCCTCCTCCCTATGAATTGTCAGAGAGTCAAGCAAGTGAGAAT
GGACAGCTCATTACAGGTGTCCAACAGACAACAGAGAGACATAACCAGGCCTTCATGGCTCTGGAAGG
ACAGGTCATTACTAAAAAGCTCCACGCCAGCATCCGAGAGAAAGCAGGTCACTGGTTTGCCACCACCA
CGCCCATCATTGGCAAAGGCATCATGTTTGCCATCAAAGAAGGGCGGGTGACCACGGGCGTGTCCAGC
ATCGCCAGCGAAGATAGCCGCAAGGTGGCATCTGTGCTGAACAACGCCTACTACCTGGACAAGATGCA
CTACAGCATCGAGGGCAAGGACACCCACTACTTTGTGAAGATTGGCTCAGCCGATGGCGACCTGGTCA
CACTAGGCACCACCATCGGCCGCAAGGTGCTAGAGAGCGGGGTGAACGTGACCGTGTCCCAGCCCACG
CTGCTGGTCAACGGCAGGACTCGAAGGTTCACGAACATTGAGTTCCAGTACTCCACGCTGCTGCTCAG
CATCCGCTATGGCCTCACCCCCGACACCCTGGACGAAGAGAAGGCCCGCGTCCTGGACCAGGCGAGAC
AGAGGGCCCTGGGCACGGCCTGGGCCAAGGAGCAGCAGAAAGCCAGGGACGGGAGAGAGGGGAGCCGC
CTGTGGACTGAGGGCGAGAAGCAGCAGCTTCTGAGCACCGGGCGCGTGCAAGGGTACGAGGGATATTA
CGTGCTTCCCGTGGAGCAATACCCAGAGCTTGCAGACAGTAGCAGCAACATCCAGTTTTTAAGACAGA
ATGAGATGGGAAAGAGGTAACAAAATAATCTGCTGCCATTCCTTGTCTGAATGGCTCAGCAGGAGTAA
CTGTTATCTCCTCTCCTAAGGAGATGAAGACCTAACAGGGGCACTGCGGCTGGGCTGCTTTAGGAGAC
CAAGTGGCAAGAAAGCTCACATTTTTTGAGTTCAAATGCTACTGTCCAAGCGAGAAGTCCCTCATCCT
GAAGTAGACTAAAGCCCGGCTGAAAATTCCGAGGAAAACAAAACAAACGAATGAATGAACAGACACAC
ACAATGTTCCAAGTTCCCCTAAAATATGACCCACTTGTTCTGGGTCTACGCAGAAAAGAGACGCAAAG
TGTCCAAAAGGAACAAAAGAACAAAAACGAATAAGCAAAGAAGAAAACAAACAAAAACAAAACAAAAC
AAACACACGGACCGATAAACAAAGAAGCGAAGATAAGAAAGAAGGCCTCATATCCAATTACCTCACTC
ATTCACATGTGAGCGACACGCAGACATCCGCGAGGGCCAGCGTCACCAGACCAGCTGCGGGACAAACC
ACTCAGACTGCTTGTAGGACAAATACTTCTGACATTTTCGTTTAAGCAAATACAGGTGCATTTAAAAC
ACGACTTTGGGGGTGATTTGTGTGTAGCGCCTGGGGAGGGGGGATAAAAGAGGAGGAGTGAGCACTGG
AAATACTTTTTAAAGAAAAAAAAACATGAGGGAATAAAAGAAATTCCTATCAAAAATCAAAGTGAAAT
AATACCATCCAGCACTTAACTCTCAGGTCCCAACTAAGTCTGGCCTGAGCTAATTTATTTGAGCGCAG
AGTGTAAAATTTAATTCAAAATGGTGGCTATAATCACTACAGATAAATTTCATACTCTTTTGTCTTTG
GAGATTCCATTGTGGACAGTAATACGCAGTTACAGGGTGTAGTCTGTTTAGATTCCGTAGTTCGTGGG
TATCAGTTTCGGTAGAGGTGCAGCATCGTGACACTTTTGCTAACAGGTACCACTTCTGATCACCCTGT
ACATACATGAGCCGAAAGGCACAATCACTGTTTCAGATTTAAAATTATTAGTGTGTTTGTTTGGTCCA
GAAACTGAGACAATCACATGACAGTCACCACGAGGAGAGAAAATTTAAAAAATAAAAATAAAAACAAA
AAAAATTTTAAAAATTAAAAAAACAAAAATAAAGTCTAATAAGAACTTTGGTACAGGAACTTTTTTGT
AATATACATGTATGAATTGTTCATCGAGTTTTTATATTAATTTTAATTTGCTGCTAAGCAAAGACTAG
GGACAGGCAAAGATAATTTATGGCAAAGTGTTTAAATTGTTTATACATAAATAAAGTCTCTAAAACTC
CTGTG

| | | | |
|---|---|---|---|
| NOV7r, CG50426-11 | SEQ ID NO: 148 | 2724 aa | MW at 302521.3kD |
| Protein Sequence | | | |

MDVKDRRHRSLTRGRCGKECRYTSSSLDSEDCRVPTQKSYSSSETLKAYDHDSRMHYGNRVTDLIHRE
SDEFPRQGTNFTLAELGICEPSPHRSGYCSDMGILHQGYSLSTGSDADSDTEGGMSPEHAIRLWGRGI
KSRRSSGLSSRENSALTLTDSDNENKSDDENGRPIPPTSSPSLLPSAQLPSSHNPPPVSCQMPLLDSN
TSHQIMDTNPDEEFSPNSYLLRACSGPQQASSSGPPNHHSQSTLRPPLPPPHNHTLSHHHSSANSLNR
NSLTNRRSQIHAPAPAPNDLATTPESVQLQDSWVLNSNVPLETRHFLFKTSSGSTPLFSSSSPGYPLT
SGTVYTPPPRLLPRNTFSRKAFKLKKPSKYCSWKCAALSAIAAALLLAILLAYFIVPWSLKNSSIDSG
EAEVGRRVTQEVPPGVFWRSQIHISQPQFLKFNISLGKDALFGVYIRRGLPPSHAQYDFMERLDGKEK
WSVVESPRERRSIQTLVQNEAVFVQYLDVGLWHLAFYNDGKDKEMVSFNTVVLDSVQDCPRNCHGNGE
CVSGVCHCFPGFLGADCAKAACPVLCSGNGQYSKGTCQCYSGWKGAECDVPMNQCIDPSCGGHGSCID
GNCVCSAGYKGEHCEEVDCLDPTCSSHGVCVNGECLCSPGWGGLNCELARVQCPDQCSGHGTYLPDTG
LCSCDPNWMGPDCSVEVCSVDCGTHGVCIGGACRCEEGWTGAACDQRVCHPRCIEHGTCKDGKCECRE
GWNGEHCTIDGCPDLCNGNGRCTLGQNSWQCVCQTGWRGPGCNVAMETSCADNKDNEGDGLVDCLDPD
CCLQSACQNSLLCRGSRDPLDIIQQGQTDWPAVKSFYDRIKLLAGKDSTHIIPGENPFNSSLVSLIRG
QVVTTDGTPLVGVNVSFVKYPKYGYTITRQDGTFDLIANGGASLTLHFERAPFMSQERTVWLPWNSFY
AMDTLVMKTEENSIPSCDLSGFVRPDPIIISSPLSTFFSAAPGQNPIVPETQVLHEEIELPGSNVKLR
YLSSRTAGYKSLLKITMTQSTVPLNLIRVHLMVAVEGHLFQKSFQASPNLASTFIWDKTDAYGQRVYG
LSDAVVSVGFEYETCPSLILWEKRTALLQGFELDPSNLGGWSLDKHHILNVKSGILHKGTGENQFLTQ
QPAIITSIMGNGRRRSISCPSCNGLAEGNKLLAPVALAVGIDGSLYVGDFNYIRRIFPSRNVTSILEL
RNKEFKHSNNPAHKYYLAVDPVSGSLYVSDTNSRRIYRVKSLSGTKDLAGNSEVVAGTGEQCLPFDEA
RCGDGGKAIDATLMSPRGIAVDKNGLMYFVDATMIRKVDQNGIISTLLGSNDLTAVRPLSCDSSMDVA
QVRLEWPTDLAVNPMDNSLYVLENNVILRITENHQVSIIAGRPMHCQVPGIDYSLSKLAIHSALESAS
AIAISHTGVLYITETDEKKINRLRQVTTNGEICLLAGAASDCDCKNDVNCNCYSGDDAYATDAILNSP
SSLAVAPDGTIYIADLGNIRIRAVSKNKPVLNAFNQYEAASPGEQELYVFNADGIHQYTVSLVTGEYL
YNFTYSTDNDVTELIDNNGNSLKIRRDSSGMPRHLLMPDNQIITLTVGTNGGLKVVSTQNLELGLMTY
DGNTGLLATKSDETGWTTFYDYDHEGRLTNVTRPTGVVTSLHREMEKSITIDIENSNRDDDVTVITNL
SSVEASYTVVQDQVRNSYQLCNNGTLRVMYANGMGISFHSEPHVLAGTITPTIGRCNISLPMENGLNS
IEWRLRKEQIKGKVTIFGRKLRVHGRNLLSIDYDRNIRTEKIYDDHRKFTLRIIYDQVGRPFLWLPSS
GLAAVNVSYFFNGRLAGLQRGAMSERTDIDKQGRIVSRMFADGKVWSYSYLDKSMVLLLQSQRQYIFE
YDSSDRLLAVTMPSVARHSMSTHTSIGYIRNIYNPPESNASVIFDYSDDGRILKTSFLGTGRQVFYKY
GKLSKLSEIVYDSTAVTFGYDETTGVLKMVNLQSGGFSCTIRYRKIGpLVDKQIYRFSEEGMVNARFD
YTYHDNSFRIASIKPVISETPLPVDLYRYDEISGKVEHFGKFGVIYYDINQIITTAVMTLSKHFDTHG
RIKEVQYEMFRSLMYWMTVQYDSMGRVIKRELKLGPYANTTKYTYDYDGDGQLQSVAVNDRPTWRYSY
DLNGNLHLLNPGNSVRLMPLRYDLRDRITRLGDVQYKIDDDGYLCQRGSDIFEYNSKGLLTRAYNKAS
GWSVQYRYDGVGRRASYKTNLGHHLQYFYSDLHNPTRITHVYNHSNSEITSLYYDLQGHLFAMESSSG
EEYYVASDNTGTPLAVFSINGLMIKQLQYTAYGEIYYDSNPDFQMVIGFHGGLYDPLTKLVHFTQRDY
DVLAGRWTSPDYTMWKNVGKEPAPFNLYMFKSNNPLSSELDLKNYVTDVKSWLVMFGFQLSNIIPGFP
RAKMYFVPPPYELSESQASENGQLITGVQQTTERHNQAFMALEGQVITKKLHASIREKAGHWFATTTP
IIGKGIMFAIKEGRVTTGVSSIASEDSRKVASVLNNAYYLDKMHYSIEGKDTHYFVKIGSADGDLVTL
GTTIGRKVLESGVNVTVSQPTLLVNGRTRRFTNIEFQYSTLLLSIRYGLTPDTLDEEKARVLDQARQR
ALGTAWAKEQQKARDGREGSRLWTEGEKQQLLSTGRVQGYEGYYVLPVEQYPELADSSSNIQFLRQNE
MGKR

| | | |
|---|---|---|
| NOV7s, CG50426-12 | SEQ ID NO: 149 | 9826 bp |
| DNA Sequence | ORF Start: ATG at 280 | ORF Stop: TAA at 8479 |

TTTAAATCCTCATACCTTAAAGGAGATGTGTATATAAGGGAGTTGGAACCAGCATTAGATGAGTTGAC
AAAAATGCAGTTTCAGTTCTAGAGGTCTGGGAAGTCCAAGAACAAGGTGCTGGCAGATTGGATTCCCC
GTGAGGGCTTTCTTCCTGGCTTGAAGTTGGCTGCTTTCCTGCTGAGACTTCTCATGGCAGAGACTGAG
GGTGGCAAAGTGACAAGTGCCAAAACTCAGGCCTGACTTTTCTGAAAACATCAGCATTCTGCCATATC
TGGAATAATGGATGTAAAGGACCGGCGACACCGCTCTTTGACCAGAGGACGCTGTGGCAAAGAGTGTC
GCTACACAAGCTCCTCTCTGGACAGTGAGGACTGCCGGGTGCCCACACAGAAATCCTACAGCTCCAGT
GAGACTCTGAAGGCCTATGACCATGACAGCAGGATGCACTATGGAAACCGAGTCACAGACCTCATCCA
CCGGGAGTCAGATGAGTTTCCTAGACAAGGAACCAACTTCACCCTTGCCGAACTGGGCATCTGTGAGC
CCTCCCCACACCGAAGCGGCTACTGCTCCGACATGGGGATCCTTCACCAGGGCTACTCCCTTAGCACA
GGGTCTGACGCCGACTCCGACACCGAGGGAGGGATGTCTCCAGAACACGCCATCAGACTGTGGGGCAG
AGGGATAAAATCCAGGCGCAGTTCCGGCCTGTCCAGTCGTGAAAACTCGGCCCTTACCCTGACTGACT
CTGACAACGAAAACAAATCAGATGATGAGAACGGTCGTCCCATTCCACCTACATCCTCGCCTAGTCTC
CAGCAACACCTCCCATCAAATCATGGACACCAACCCTGATGAGGAATTCTCCCCCAATTCATACCTGC
TCAGAGCATGCTCAGGGCCCCAGCAAGCCTCCAGCAGTGGCCCTCCGAACCACCACAGCCAGTCGACT
CTGAGGCCCCCTCTCCCACCCCCTCACAACCACACGCTGTCCCATCACCACTCGTCCGCCAACTCCCT
CAACAGGAACTCACTGACCAATCGGCGGAGTCAGATCCACGCCCCGGCCCCAGCGCCCAATGACCTGG
CCACCACACCAGAGTCCGTTCAGCTTCAGGACAGCTGGGTGCTAAACAGCAACGTGCCACTGGAGACC
CGGCACTTCCTCTTCAAGACCTCCTCGGGGAGCACACCCTTGTTCAGCAGCTCTTCCCCGGGATACCC
TTTGACCTCAGGAACGGTTTACACGCCCCCGCCCCGCCTGCTGCCCAGGAATACTTTCTCCAGGAAGG
CTTTCAAGCTGAAGAAGCCCTCCAAATACTGCAGCTGGAAATGTGCTGCCCTCTCCGCCATTGCCGCG
GCCCTCCTCTTGGCTATTTTGCTGGCGTATTTCATAGTGCCCTGGTCGTTGAAAAACAGCAGCATAGA
CAGTGGTGAAGCAGAAGTTGGTCGGCGGGTAACACAAGAAGTCCCACCAGGGGTGTTTTGGAGGTCAC
AAATTCACATCAGTCAGCCCCAGTTCTTAAAGTTCAACATCTCCCTCGGGAAGGACGCTCTCTTTGGT
GTTTACATAAGAAGAGGACTTCCACCATCTCATGCCCAGTATGACTTCATGGAACGTCTGGACGGGAA
GGAGAAGTGGAGTGTGGTTGAGTCTCCCAGGGAACGCCGGAGCATACAGACCTTGGTTCAGAATGAAG
CCGTGTTTGTGCAGTACCTGGATGTGGGCCTGTGGCATCTGGCCTTCTACAATGATGGAAAAGACAAA
GAGATGGTTTCCTTCAATACTGTTGTCCTAGATTCAGTGCAGGACTGTCCACGTAACTGCCATGGGAA
TGGTGAATGTGTGTCCGGGGTGTGTCACTGTTTCCCAGGATTTCTAGGAGCAGACTGTGCTAAAGCTG
CCTGCCCTGTCCTGTGCAGTGGGAATGGACAATATTCTAAAGGGACGTGCCAGTGCTACAGCGGCTGG
AAAGGTGCAGAGTGCGACGTGCCCATGAATCAGTGCATCGATCCTTCCTGCGGGGGCCACGGCTCCTG
CATTGATGGGAACTGTGTCTGCTCTGCTGGCTACAAAGGCGAGCACTGTGAGGAAGTTGATTGCTTGG
ATCCCACCTGCTCCAGCCACGGAGTCTGTGTGAATGGAGAATGCCTGTGCAGCCCTAACTGGGGTGGT
CTGAACTGTGAGCTGGCGAGGGTCCAGTGCCCAGACCAGTGCAGTGGGCATGGCACGTACCTGCCTGA
CACGGGCCTCTGCAGCTGCGATCCCAACTGGATGGGTCCCGACTGCTCTGTTGAAGTGTGCTCAGTAG
ACTGTGGCACTCACGGCGTCTGCATCGGGGGAGCCTGCCGCTGTGAAGAGGGCTGGACAGGCGCAGCG
TGTGACCAGCGCGTGTGCCACCCCCGCTGCATTGAGCACGGGACCTGTAAAGATGGCAAATGTGAATG
CCGAGAGGGCTGGAATGGTGAACACTGCACCATTGGTAGGCAAACGGCAGGCACCGAAACAGATGGCT
GCCCTGACTTGTGCAACGGTAACGGGAGATGCACACTGGGTCAGAACAGCTGGCAGTGTGTCTGCCAG
ACCGGCTGGAGAGGGCCCGGATGCAACGTTGCCATGGAAACTTCCTGTGCTGATAACAAGGATAATGA
GGGAGATGGCCTGGTGGATTGTTTGGACCCTGACTGCTGCCTGCAGTCAGCCTGTCAGAACAGCCTGC
TCTGCCGGGGGTCCCGGGACCCACTGGACATCATTCAGCAGGGCCAGACGGATTGGCCCAAAGTGAAG
TCCTTCTATGACCGTATCAAGCTCTTGGCAGGCAAGGATAGCACCCACATCATTCCTGGAGAGAACCC
TTTCAACAGCAGCTTGGTTTCTCTCATCCGAGGCCAAGTAGTAACTACAGATGGAACTCCCCTGGTCG
GTGTGAACGTGTCTTTTGTCAAGTACCCAAAATACGGCTACACCATCACCCGCCAGGATGGCACGTTC
GACCTGATCGCAAATGGAGGTGCTTCCTTGACTCTACACTTTGAGCGAGCCCCGTTCATGAGCCAGGA
GCGCACTGTGTGGCTGCCGTGGAACAGCTTTTACGCCATGGACACCCTGGTGATGAAGACCGAGGAGA
ACTCCATCCCCAGCTGTGACCTCAGTGGCTTTGTCCGGCCTGATCCAATCATCATCTCCTCCCCACTG
TCCACCTTCTTTAGTGCTGCCCCTGGGCAGAATCCCATCGTGCCTGAGACCCAGGTTCTTCATGAAGA
AATCGAGCTCCCTGGTTCCAATGTGAAACTTCGCTATCTGAGCTCTAGAACTGCAGGGTACAAGTCAC
TGCTGAAGATCACCATGACCCAGTCCACAGTGCCCCTGAACCTCATTAGGGTTCACCTGATGGTGGCT
GTCGAGGGGCATCTCTTCCAGAAGTCATTCCAGGCTTCTCCCAACCTGGCCTCCACCTTCATCTGGGA
CAAGACAGATGCGTATGGCCAAAGGGTGTATGGACTCTCAGATGCTGTTGTGTCTGTCGGGTTTGAAT
ATGAGACCTGTCCCAGTCTAATTCTCTGGGAGAAAAGGACAGCCCTCCTTCAGGGATTCGAGCTGGAC
CCCTCCAACCTCGGTGGCTGGTCCCTAGACAAACACCACATCCTCAATGTTAAAAGTGGAATCCTACA
CAAAGGCACTGGGGAAAACCAGTTCCTGACCCAGCAGCCTGCCATCATCACCAGCATCATGGGCAATG
GTCGCCGCCGGAGCATTTCCTGTCCCAGCTGCAACGGCCTTGCTGAAGGCAACAAGCTGCTGGCCCCA
GTGGCTCTGGCTGTTGGAATCGATGGGAGCCTCTATGTGGGTGACTTCAATTACATCCGACGCATCTT
TCCCTCTCGAAATGTGACCAGCATCTTGGAGTTACGAAATAAAGAGTTTAAACATAGCAACAACCCAG
CACACAAGTACTACTTGGCAGTGGACCCCGTGTCCGGCTCGCTCTACGTGTCCGACACCAACAGCAGG
AGAATCTACCGCGTCAAGTCTCTGAGTGGAACCAAAGACCTGGCTGGGAATTCGGAAGTTGTGGCAGG
GACGGGAGAGCAGTGTCTACCCTTTGATGAAGCCCGCTGCGGGGATGGAGGGAAGGCCATAGATGCAA
CCCTGATGAGCCCGAGAGGTATTGCAGTAGACAAGAATGGGCTCATGTACTTTGTCGATGCCACCATG
ATCCGGAAGGTTGACCAGAATGGAATCATCTCCACCCTGCTGGGCTCCAATGACCTCACTGCCGTCCG
GCCGCTGAGCTGTGATTCCAGCATGGATGTAGCCCAGGTTCGTCTGGAGTGGCCAACAGACCTTGCTG
TCAATCCCATGGATAACTCCTTGTATGTTCTAGAGAACAATGTCATCCTTCGAATCACCGAGAACCAC
CAAGTCAGCATCATTGCGGGACGCCCCATGCACTGCCAAGTTCCTGGCATTGACTACTCACTCAGCAA
ACTAGCCATTCACTCTGCCCTGGAGTCAGCCAGTGCCATTGCCATTTCTCACACTGGGGTCCTCTACA
TCACTGAGACAGATGAGAAGAAGATTAACCGTCTACGCCAGGTAACAACCAACGGGGAGATCTGCCTT
TTAGCTGGGGCAGCCTCGGACTGCGACTGCAAAAACGATGTCAATTGCAACTGCTATTCAGGAGATGA
TGCCTACGCGACTGATGCCATCTTGAATTCCCCATCATCCTTAGCTGTAGCTCCAGATGGTACCATTT
ACATTGCAGACCTTGGAAATATTCGGATCAGGGCGGTCAGCAAGAACAAGCCTGTTCTTAATGCCTTC
AACCAGTATGAGGCTGCATCCCCCGGAGAGCAGGAGTTATATGTTTTCAACGCTGATGGCATCCACCA
ATACACTGTGAGCCTGGTGACAGGGGAGTACTTGTACAATTTCACATATAGTACTGACAATGATGTCA
CTGAATTGATTGACAATAATGGGAATTCCCTGAAGATCCGTCGGGACAGCAGTGGCATGCCCCGTCAC
CTGCTCATGCCTGACAACCAGATCATCACCCTCACCGTGGGCACCAATGGAGGCCTCAAAGTCGTGTC
CACACAGAACCTGGAGCTTGGTCTCATGACCTATGATGGCAACACTGGGCTCCTGGCCACCAAGAGCG
ATGAAACAGGATGGACGACTTTCTATGACTATGACCACGAAGGCCGCCTGACCAACGTGACGCGCCCC
ACGGGGGTGGTAACCAGTCTGCACCGGGAAATGGAGAAATCTATTACCATTGACATTGAGAACTCCAA
CCGTGATGATGACGTCACTGTCATCACCAACCTCTCTTCAGTAGAGGCCTCCTACACAGTGGTACAAG
ATCAAGTTCGGAACAGCTACCAGCTCTGTAATAATGGTACCCTGAGGGTGATGTATGCTAATGGGATG
GGTATCAGCTTCCACAGCGAGCCCCATGTCCTAGCGGGCACCATCACCCCCACCATTGGACGCTGCAA
CATCTCCCTGCCTATGGAGAATGGCTTAAACTCCATTGAGTGGCGCCTAAGAAAGGAACAGATTAAAG
GCAAAGTCACCATCTTTGGCAGGAAGCTCCGGGTCCATGGAAGAAATCTCTTGTCCATTGACTATGAT
CGAAATATTCGGACTGAAAAGATCTATGATGACCACCGGAAGTTCACCCTGAGGATCATTTATGACCA
GGTGGGCCGCCCCTTCCTCTGGCTGCCCAGCAGCGGGCTGGCAGCTGTCAACGTGTCATACTTCTTCA
ATGGGCGCCTGGCTGGGCTTCAGCGTGGGGCCATGAGCGAGAGGACAGACATCGACAAGCAAGGCCGC
ATCGTGTCCCGCATGTTCGCTGACGGGAAAGTGTGGAGCTACTCCTACCTTGACAAGTCCATGGTCCT
CCTGCTTCAGAGCCAACGTCAGTATATATTTGAGTATGACTCCTCTGACCGCCTCCTTGCCGTCACCA
TGCCCAGCGTGGCCCGGCACAGCATGTCCACACACACCTCCATCGGCTACATCCGTAATATTTACAAC
CCGCCTGAAAGCAATGCTTCGGTCATCTTTGACTACAGTGATGACGGCCGCATCCTGAAGACCTCCTT
TTTGGGCACCGGACGCCAGGTGTTCTACAAGTATGGGAAACTCTCCAAGTTATCAGAGATTGTCTACG
ACAGTACCGCCGTCACCTTCGGGTATGACGAGACCACTGGTGTCTTGAAGATGGTCAACCTCCAAAGT
GGGGGCTTCTCCTGCACCATCAGGTACCGGAAGATTGGCCCCCTGGTGGACAAGCAGATCTACAGGTT
CTCCGAGGAAGGCATGGTCAATGCCAGGTTTGACTACACCTATCATGACAACAGCTTCCGCATCGCAA
GCATCAAGCCCGTCATAAGTGAGACTCCCCTCCCCGTTGACCTCTACCGCTATGATGAGATTTCTGGC
AAGGTGGAACACTTTGGTAAGTTTGGAGTCATCTATTATGACATCAACCAGATCATCACCACTGCCGT
GATGACCCTCAGCAAACACTTCGACACCCATGGGCGGATCAAGGAGGTCCAGTATGAGATGTTCCGGT
CCCTCATGTACTGGATGACGGTGCAATATGACAGCATGGGCAGGGTGATCAAGAGGGAGCTAAAACTG
GGGCCCTATGCCAATACCACGAAGTACACCTATGACTACGATGGGGACGGGCAGCTCCAGAGCGTGGC
CGTCAATGACCGCCCGACCTGGCGCTACAGCTATGACCTTAATGGGAATCTCCACTTACTGAACCCAG
GCAACAGTGTGCGCCTCATGCCCTTGCGCTATGACCTCCGGGATCGGATAACCAGACTCGGGGATGTG
CAGTACAAAATTGACGACGATGGCTATCTGTGCCAGAGAGGGTCTGACATCTTCGAATACAATTCCAA
GGGCCTCCTAACAAGAGCCTACAACAAGGCCAGCGGGTGGAGTGTCCAGTACCGCTATGATGGCGTAG
GACGGCGGGCTTCCTACAAGACCAACCTGGGCCACCACCTGCAGTACTTCTACTCTGACCTCCACAAC
CCGACGCGCATCACCCATGTCTACAATCACTCCAACTCGGAGATTACCTCACTGTACTACGACCTCCA
GGGCCACCTCTTTGCCATGGAGAGCAGCAGTGGGGAGGAGTACTATGTTGCCTCTGATAACACAGGGA
CTCCTCTGGCTGTGTTCAGCATCAACGGCCTCATGATCAAACAGCTGCAGTACACGGCCTATGGGGAG
ATTTATTATGACTCCAACCCCGACTTCCAGATGGTCATTGGCTTCCATGGGGGACTCTATGACCCCCT
GACCAAGCTGGTCCACTTCACTCAGCGTGATTATGATGTGCTGGCAGGACGATGGACCTCCCCAGACT
ATACCATGTGGAAAAACGTGGGCAAGGAGCCGGCCCCCTTTAACCTGTATATGTTCAAGAGCAACAAT
CCTCTCAGCAGTGAGCTAGATTTGAAGAACTACGTGACAGATGTGAAAAGCTGGCTTGTGATGTTTGG
ATTTCAGCTTAGCAACATCATTCCTGGCTTCCCGAGAGCCAAAATGTATTTCGTGCCTCCTCCCTATG
AATTGTCAGAGAGTCAAGCAAGTGAGAATGGACAGCTCATTACAGGTGTCCAACAGACAACAGAGAGA
CATAACCAGGCCTTCATGGCTCTGGAAGGACAGGTCATTACTAAAAAGCTCCACGCCAGCATCCGAGA
GAAAGCAGGTCACTGGTTTGCCACCACCACGCCCATCATTGGCAAAGGCATCATGTTTGCCATCAAAG
AAGGGCGGGTGACCACGGGCGTGTCCAGCATCGCCAGCGAAGATAGCCGCAAGGTGGCATCTGTGCTG
AACAACGCCTACTACCTGGACAAGATGCACTACAGCATCGAGGGCAAGGACACCCACTACTTTGTGAA
GATTGGCTCAGCCGATGGCGACCTGGTCACACTAGGCACCACCATCGGCCGCAAGGTGCTAGAGAGCG
GGGTGAACGTGACCGTGTCCCAGCCCACGCTGCTGGTCAACGGCAGGACTCGAAGGTTCACGAACATT
GAGTTCCAGTACTCCACGCTGCTGCTCAGCATCCGCTATGGCCTCACCCCCGACACCCTGGACGAAGA
GAAGGCCCGCGTCCTGGACCAGGCGAGACAGAGGGCCCTGGGCACGGCCTGGGCCAAGGAGCAGCAGA
AAGCCAGGGACGGGAGAGAGGGGAGCCGCCTGTGGACTGAGGGCGAGAAGCAGCAGCTTCTGAGCACC
GGGCGCGTGCAAGGGTACGAGGGATATTACGTGCTTCCCGTGGAGCAATACCCAGAGCTTGCAGACAG
TAGCAGCAACATCCAGTTTTTAAGACAGAATGAGATGGGAAAGAGGTAACAAAATAATCTGCTGCCAT
TCCTTGTCTGAATGGCTCAGCAGGAGTAACTGTTATCTCCTCTCCTAAGGAGATGAAGACCTAACAGG
GGCACTGCGGCTGGGCTGCTTTAGGAGACCAAGTGGCAAGAAAGCTCACATTTTTTGAGTTCAAATGC
TACTGTCCAAGCGAGAAGTCCCTCATCCTGAAGTAGACTAAAGCCCGGCTGAAAATTCCGAGGAAAAC
AAAACAAACGAATGAATGAACAGACACACACAATGTTCCAAGTTCCCCTAAAATATGACCCACTTGTT
CTGGGTCTACGCAGAAAAGAGACGCAAAGTGTCCAAAAGGAACAAAAGAACAAAAACGAATAAGCAAA
GAAGAAAACAAACAAAAACAAAACAAAACAAACACACGGACCGATAAACAAAGAAGCGAAGATAAGAA
AGAAGGCCTCATATCCAATTACCTCACTCATTCACATGTGAGCGACACGCAGACATCCGCGAGGGCCA
GCGTCACCAGACCAGCTGCGGGACAAACCACTCAGACTGCTTGTAGGACAAATACTTCTGACATTTTC
GTTTAAGCAAATACAGGTGCATTTAAAACACGACTTTGGGGGTGATTTGTGTGTAGCGCCTGGGGAGG
GGGGATAAAAGAGGAGGAGTGAGCACTGGAAATACTTTTTAAAGAAAAAAAAACATGAGGGAATAAAA
GAAATTCCTATCAAAAATCAAAGTGAAATAATACCATCCAGCACTTAACTCTCAGGTCCCAACTAAGT
CTGGCCTGAGCTAATTTATTTGAGCGCAGAGTGTAAAATTTAATTCAAAATGGTGGCTATAATCACTA
CAGATAAATTTCATACTCTTTTGTCTTTGGAGATTCCATTGTGGACAGTAATACGCAGTTACAGGGTG
TAGTCTGTTTAGATTCCGTAGTTCGTGGGTATCAGTTTCGGTAGAGGTGCAGCATCGTGACACTTTTG
CTAACAGGTACCACTTCTGATCACCCTGTACATACATGAGCCGAAAGGCACAATCACTGTTTCAGATT
TAAAATTATTAGTGTGTTTGTTTGGTCCAGAAACTGAGACAATCACATGACAGTCACCACGAGGAGAG
AAAATTTAAAAAATAAAAATAAAAACAAAAAAAATTTTAAAAATTAAAAAAACAAAAATAAAGTCTAA
TAAGAACTTTGGTACAGGAACTTTTTTGTAATATACATGTATGAATTGTTCATCGAGTTTTTATATTA
ATTTTAATTTGCTGCTAAGCAAAGACTAGGGACAGGCAAAGATAATTTATGGCAAAGTGTTTAAATTG
TTTATACATAAATAAAGTCTCTAAAACTCCTGTG

| | | | |
|---|---|---|---|
| NOV7s, CG50426-12 | SEQ ID NO: 150 | 2733 aa | MW at 303423.3kD |
| Protein Sequence | | | |

MDVKDRRHRSLTRGRCGKECRYTSSSLDSEDCRVPTQKSYSSSETLKAYDHDSRMHYGNRVTDLIHRE
SDEFPRQGTNFTLAELGICEPSPHRSGYCSDMGILHQGYSLSTGSDADSDTEGGMSPEHAIRLWGRGI
KSRRSSGLSSRENSALTLTDSDNENKSDDENGRPIPPTSSPSLLPSAQLPSSHNPPPVSCQMPLLDSN
TSHQIMDTNPDEEFSPNSYLLRACSGPQQASSSGPPNHHSQSTLRPPLPPPHNHTLSHHHSSANSLNR
NSLTNRRSQIHAPAPAPNDLATTPESVQLQDSWVLNSNVPLETRHFLFKTSSGSTPLFSSSSPGYPLT
SGTVYTPPPRLLPRNTFSRKAFKLKKPSKYCSWKCAALSAIAAALLLAILLAYFIVPWSLKNSSIDSG
EAEVGRRVTQEVPPGVFWRSQIHISQPQFLKFNISLGKDALFGVYIRRGLPPSHAQYDFMERLDGKEK
WSVVESPRERRSIQTLVQNEAVFVQYLDVGLWHLAFYNDGKDKEMVSFNTVVLDSVQDCPRNCHGNGE
CVSGVCHCFPGFLGADCAKAACPVLCSGNGQYSKGTCQCYSGWKGAECDVPMNQCIDPSCGGHGSCID
GNCVCSAGYKGEHCEEVDCLDPTCSSHGVCVNGECLCSPGWGGLNCELARVQCPDQCSGHGTYLPDTG
LCSCDPNWNGPDCSVEVCSVDCGTHGVCIGGACRCEEGWTGAACDQRVCHPRCIEHGTCKDGKCECRE
GWNGEHCTIGRQTAGTETDGCPDLCNGNGRCTLGQNSWQCVCQTGWRGPGCNVAMETSCADNKDNEGD
GLVDCLDPDCCLQSACQNSLLCRGSRDPLDIIQQGQTDWPAVKSFYDRIKLLAGKDSTHIIPGENPFN
SSLVSLIRGQVVTTDGTPLVGVNVSFVKYPKYGYTITRQDGTFDLIANGGASLTLHFERAPFMSQERT
VWLPWNSFYAMDTLVMKTEENSIPSCDLSGFVRPDPIIISSPLSTFFSAAPGQNPIVPETQVLHEEIE
LPGSNVKLRYLSSRTAGYKSLLKITMTQSTVPLNLIRVHLMVAVEGHLFQKSFQASPNLASTFIWDKT
DAYGQRVYGLSDAVVSVGFEYETCPSLILWEKRTALLQGFELDPSNLGGWSLDKHHILNVKSGILHKG
TGENQFLTQQPAIITSIMGNGRRRSISCPSCNGLAEGNKLLAPVALAVGIDGSLYVGDFNYIRRIFPS
RNVTSILELRNKEFKHSNNPAHKYYLAVDPVSGSLYVSDTNSRRIYRVKSLSGTKDLAGNSEVVAGTG
EQCLPFDEARCGDGGKAIDATLMSPRGIAVDKNGLMYFVDATMIRKVDQNGIISTLLGSNDLTAVRPL
SCDSSMDVAQVRLEWPTDLAVNPMDNSLYVLENNVILRITENHQVSIIAGRPMHCQVPGIDYSLSKLA
IHSALESASAIAISHTGVLYITETDEKKINRLRQVTTNGEICLLAGAASDCDCKNDVNCNCYSGDDAY
ATDAILNSPSSLAVAPDGTIYIADLGNIRIRAVSKNKPVLNAYNQYEAASPGEQELYVFNADGIHQYT
VSLVTGEYLYNFTYSTDNDVTELIDNNGNSLKIRRDSSGMPRHLLMPDNQIITLTVGTNGGLKVVSTQ
NLELGLMTYDGNTGLLATKSDETGWTTFYDYDHEGRITNVTRPTGVVTSLHREMEKSITIDIENSNRD
DDVTVITNLSSVEASYTVVQDQVRNSYQLCNNGTLRVMYANGMGISFHSEPHVLAGTITPTIGRCNIS
LPMENGLNSIEWRLRKEQIKGKVTIFGRKLRVHGRNLLSIDYDRNIRTEKIYDDHRKFTLRIIYDQVG
RPFLWLPSSGLAAVNVSYFFNGRLAGLQRGAMSERTDIDKQGRIVSRMFADGKVWSYSYLDKSMVLLL
QSQRQYIFEYDSSDRLLAVTMPSVARHSMSTHTSIGYIRNIYNPPESNASVIFDYSDDGRILKTSFLG
TGRQVFYKYGKLSKLSEIVYDSTAVTFGYDETTGVLKMVNLQSGGFSCTIRYRKIGPLVDKQIYRFSE
EGMVNARFDYTYHDNSFRIASIKPVISETPLPVDLYRYDEISGKVENFGKFGVTYYDINQIITTAVMT
LSKHFDTHGRIKEVQYEMFRSLMYWMTVQYDSMGRVIKRELKLGPYANTTKYTYDYDGDGQLQSVAVN
DRPTWRYSYDLNGNLHLLNPGNSVRLMPLRYDLRDRITRLGDVQYKIDDDGYLCQRGSDIFEYNSKGL
LTRAYNKASGWSVQYRYDGVGRRASYKTNLGHHLQYFYSDLHNPTRITHVYNHSNSEITSLYYDLQGH
LFAMESSSGEEYYVASDNTGTPLAVFSINGLMIKQLQYTAYGEIYYDSNPDFQMVIGFHGGLYDPLTK
LVHFTQRDYDVLAGRWTSPDYTMWKNVGKEPAPFNLYMFKSNNPLSSELDLKNYVTDVKSWLVMFGFQ
LSNIIPGFPRAKMYFVPPPYELSESQASENGQLITGVQQTTERHNQAFMALEGQVITKKLHASIREKA
GHWFATTTPIIGKGIMFAIKEGRVTTGVSSIASEDSRKVASVLNNAYYLDKMHYSIEGKDTHYFVKIG
SADGDLVTLGTTIGRKVLESGVNVTVSQPTLLVNGRTRPFTNIEFQYSTLLLSIRYGLTPDTLDEEKA
RVLDQARQRALGTAWAKEQQKARDGREGSRLWTEGEKQQLLSTGRVQGYEGYYVLPVEQYPELADSSS
NIQFLRQNEMGKR

| | | |
|---|---|---|
| NOV7t, CG50426-13 | SEQ ID NO: 151 | 1605 bp |
| DNA Sequence | ORF Start: at 405 | ORF Stop: at 1605 |

AGCTGAGGTAGCCGGCTCTGGCCTCGGCTAGCCCAGAAAGGGGCTCCCACAGTGCAGCAGCGGGCTGA
AGGGCTCCTCAAGCGTGGCCAGAGTGGGCGCTGAGGCCGAGGAGGCACCGAGAGCGAGCGAGGGCTGC
AAGGTCTGCCAGCACGCTGTCACTTCTCACTATTTTGATTGGTATTGTGTCCGGAATTGGTGGGTTCT
TGGTCTCACTGACTTCAAGAATGAAGCCACGGACCCTCGCGTTACATCCAGCTTTTTAATTGCCTAAG
CGGTCTGGGGCTTGCTTCGTCATTTGGCTTTGCTGTGGAGCACTCCTGTAAAGCCAGCTGAATTGTAC
ATCGAAGATCCACCCTTTTGGTGGCAAAGTGACAAGTGCCAAAACTCAGGCCTGACTTTTCTGAAAAC
ATCAGCATTCTGCCATATCTGGAATAATGGATGTAAAGGACCGGCGACACCGCTCTTTGACCAGAGGA
CGCTGTGGCAAAGAGTGTCGCTACACAAGCTCCTCTCTGGACAGTGAGGACTGCCGGGTGCCCACACA
GAAATCCTACAGCTCCAGTGAGACTCTGAAGGCCTATGACCATGACAGCAGGATGCACTATGGAAACC
GAGTCACAGACCTCATCCACCGGGAGTCAGATGAGTTTCCTAGACAAGGAACCAACTTCACCCTTGCC
GAACTGGGCATCTGTGAGCCCTCCCCACACCGAAGCGGCTACTGCTCCGACATGGGGATCCTTCACCA
GGGCTACTCCCTTAGCACAGGGTCTGACGCCGACTCCGACACCGAGGGAGGGATGTCTCCAGAACACG
CCATCAGACTGTGGGGCAGAGGGATAAAATCCAGGCGCAGTTCCGGCCTGTCCAGTCGTGAAAACTCG
GCCCTTACCCTGACTGACTCTGACAACGAAAACAAATCAGATGATGAGAACGGTCGTCCCATTCCACC
TACATCCTCGCCTAGTCTCCTCCCATCTGCTCAGCTGCCTAGCTCCCATAATCCTCCACCAGTTAGCT
GCCAGATGCCATTGCTAGACAGCAACACCTCCCATCAAATCATGGACACCAACCCTGATGAGGAATTC
TCCCCCAATTCATACCTGCTCAGAGCATGCTCAGGGCCCCAGCAAGCCTCCAGCAGTGGCCCTCCGAA
CCACCACAGCCAGTCGACTCTGAGGCCCCCTCTCCCACCCCCTCACAACCACACGCTGTCCCATCACC
ACTCGTCCGCCAACTCCCTCAACAGGAACTCACTGACCAATCGGCGGAGTCAGATCCACGCCCCGGCC
CCAGCGCCCAATGACCTGGCCACCACACCAGAGTCCGTTCAGCTTCAGGACAGCTGGGTGCTAAACAG
CAACGTGCCACTGGAGACCCGGCACTTCCTCTTCAAGACCTCCTCGGGGAGCACACCCTTGTTCAGCA
GCTCTTCCCCGGGATACCCTTTGACCTCAGGAACGGTTTACACGCCCCCGCCCCGCCTGCTGCCCAGG
AATACTTTCTCCAGGAAGGCTTTCAAGCTGAAGAAGCCCTCCAAATACTGCAGCTGGAAATGTGCTGC
CCTCTCCGCCATTGCCGCGGCCCTCCTCTTGGCTATTTTGC

| | | | |
|---|---|---|---|
| NOV7t, CG50426-13 | SEQ ID NO: 152 | 400 aa | MW at 43764.8kD |
| Protein Sequence | | | |

KHQHSAISGIMDVKDRRHRSLTRGRCGKECRYTSSSLDSEDCRVPTQKSYSSSETLKAYDHDSRMHYG
NRVTDLIHRESDEFPRQGTNFTLAELGICEPSPHRSGYCSDMGILHQGYSLSTGSDADSDTEGGMSPE
HAIRLWGRGIKSRRSSGLSSRENSALTLTDSDNENKSDDENGRPIPPTSSPSLLPSAQLPSSHNPPPV
SCQMPLLDSNTSHQIMDTNPDEEFSPNSYLLRACSGPQQASSSGPPNHHSQSTLRPPLPPPHNHTLSH
HHSSANSLNRNSLTNRRSQIHAPAPAPUDLATTPESVQLQDSWVLNSNVPLETRHFLFKTSSGSTPLF
SSSSPGYPLTSGTVYTPPPRLLPRINTFSPAFKLKKPSKYCSWKCAALSAIAAALLLAIL

| | | |
|---|---|---|
| NOV7u, CG50426-14 | SEQ ID NO: 153 | 9823 bp |
| DNA Sequence | ORF Start: ATG at 277 | ORF Stop: TAA at 8476 |

GCTCCAAAGCGAGCTGGGACCGAAGACTCTAGGCTAAGTTATCTATGTAGATGGTGTCAGGGAGCGAA
GCTACTGACCGAGCTGCTGTTACATCCAGCTTTTTAATTGCCTAAGCGGTCTGGGGCTTGCTTCGTCA
TTTGGCTTTGCTGTGGAGCACTCCTGTAAAGCCAGCTGAATTGTACATCGAAGATCCACCCTTTTGGT
GGCAAAGTGACAAGTGCCAAAACTCAGGCCTGACTTTTCTGAAAACATCAGCATTCTGCCATATCTGG
AATAATGGATGTAAAGGACCGGCGACACCGCTCTTTGACCAGAGGACGCTGTGGCAAAGAGTGTCGCT
ACACAAGCTCCTCTCTGGACAGTGAGGACTGCCGGGTGCCCACACAGAAATCCTACAGCTCCAGTGAG
ACTCTGAAGGCCTATGACCATGACAGCAGGATGCACTATGGAAACCGAGTCACAGACCTCATCCACCG
GGAGTCAGATGAGTTTCCTAGACAAGGAACCAACTTCACCCTTGCCGAACTGGGCATCTGTGAGCCCT
CCCCACACCGAAGCGGCTACTGCTCCGACATGGGGATCCTTCACCAGGGCTACTCCCTTAGCACAGGG
TCTGACGCCGACTCCGACACCGAGGGAGGGATGTCTCCAGAACACGCCATCAGACTGTGGGGCAGAGG
GATAAAATCCAGGCGCAGTTCCGGCCTGTCCAGTCGTGAAAACTCGGCCCTTACCCTGACTGACTCTG
ACAACGAAAACAAATCAGATGATGAGAACGGTCGTCCCATTCCACCTACATCCTCGCCTAGTCTCCTC
CCATCTGCTCAGCTGCCTAGCTCCCATAATCCTCCACCAGTTAGCTGCCAGATGCCATTGCTAGACAG
CAACACCTCCCATCAAATCATGGACACCAACCCTGATGAGGAATTCTCCCCCAATTCATACCTGCTCA
GAGCATGCTCAGGGCCCCAGCAAGCCTCCAGCAGTGGCCCTCCGAACCACCACAGCCAGTCGACTCTG
AGGCCCCCTCTCCCACCCCCTCACAACCACACGCTGTCCCATCACCACTCGTCCGCCAACTCCCTCAA
CAGGAACTCACTGACCAATCGGCGGAGTCAGATCCACGCCCCGGCCCCAGCGCCCAATGACCTGGCCA
CCACACCAGAGTCCGTTCAGCTTCAGGACAGCTGGGTGCTAAACAGCAACGTGCCACTGGAGACCCGG
CACTTCCTCTTCAAGACCTCCTCGGGGAGCACACCCTTGTTCAGCAGCTCTTCCCCGGGATACCCTTT
GACCTCAGGAACGGTTTACACGCCCCCGCCCCGCCTGCTGCCCAGGAATACTTTCTCCAGGAAGGCTT
TCAAGCTGAAGAAGCCCTCCAAATACTGCAGCTGGAAATGTGCTGCCCTCTCCGCCATTGCCGCGGCC
CTCCTCTTGGCTATTTTGCTGGCGTATTTCATAGTGCCCTGGTCGTTGAAAAACAGCAGCATAGACAG
TGGTGAAGCAGAAGTTGGTCGGCGGGTAACACAAGAAGTCCCACCAGGGGTGTTTTGGAGGTCACAAA
TTCACATCAGTCAGCCCCAGTTCTTAAAGTTCAACATCTCCCTCGGGAAGGACGCTCTCTTTGGTGTT
TACATAAGAAGAGGACTTCCACCATCTCATGCCCAGTATGACTTCATGGAACGTCTGGACGGGAAGGA
GAAGTGGAGTGTGGTTGAGTCTCCCAGGGAACGCCGGAGCATACAGACCTTGGTTCAGAATGAAGCCG
TGTTTGTGCAGTACCTGGATGTGGGCCTGTGGCATCTGGCCTTCTACAATGATGGAAAAGACAAAGAG
ATGGTTTCCTTCAATACTGTTGTCCTAGATTCAGTGCAGGACTGTCCACGTAACTGCCATGGGAATGG
TGAATGTGTGTCCGGGGTGTGTCACTGTTTCCCAGGATTTCTAGGAGCAGACTGTGCTAAAGCTGCCT
GCCCTGTCCTGTGCAGTGGGAATGGACAATATTCTAAAGGGACGTGCCAGTGCTACAGCGGCTGGAAA
GGTGCAGAGTGCGACGTGCCCATGAATCAGTGCATCGATCCTTCCTGCGGGGGCCACGGCTCCTGCAT
TGATGGGAACTGTGTCTGCTCTGCTGGCTACAAAGGCGAGCACTGTGAGGAAGTTGATTGCTTGGATC
CCACCTGCTCCAGCCACGGAGTCTGTGTGAATGGAGAATGCCTGTGCAGCCCTGGCTGGGGTGGTCTG
AACTGTGAGCTGGCGAGGGTCCAGTGCCCAGACCAGTGCAGTGGGCATGGCACGTACCTGCCTGACAC
GGGCCTCTGCAGCTGCGATCCCAACTGGATGGGTCCCGACTGCTCTGTTGAAGTGTGCTCAGTAGACT
GTGGCACTCACGGCGTCTGCATCGGGGGAGCCTGCCGCTGTGAAGAGGGCTGGACAGGCGCAGCGTGT
GACCAGCGCGTGTGCCACCCCCGCTGCATTGAGCACGGGACCTGTAAAGATGGCAAATGTGAATGCCG
AGAGGGCTGGAATGGTGAACACTGCACCATTGGTAGGCAAACGGCAGGCACCGAAACAGATGGCTGCC
CTGACTTGTGCAACGGTAACGGGAGATGCACACTGGGTCAGAACAGCTGGCAGTGTGTCTGCCAGACC
GGCTGGAGAGGGCCCGGATGCAACGTTGCCATGGAAACTTCCTGTGCTGATAACAAGGATAATGAGGG
AGATGGCCTGGTGGATTGTTTGGACCCTGACTGCTGCCTGCAGTCAGCCTGTCAGAACAGCCTGCTCT
GCCGGGGGTCCCGGGACCCACTGGACATCATTCAGCAGGGCCAGACGGATTGGCCCGCAGTGAAGTCC
TTCTATGACCGTATCAAGCTCTTGGCAGGCAAGGATAGCACCCACATCATTCCTGGAGAGAACCCTTT
CAACAGCAGCTTGGTTTCTCTCATCCGAGGCCAAGTAGTAACTACAGATGGAACTCCCCTGGTCGGTG
TGAACGTGTCTTTTGTCAAGTACCCAAAATACGGCTACACCATCACCCGCCAGGATGGCACGTTCGAC
CTGATCGCAAATGGAGGTGCTTCCTTGACTCTACACTTTGAGCGAGCCCCGTTCATGAGCCAGGAGCG
CACTGTGTGGCTGCCGTGGAACAGCTTTTACGCCATGGACACCCTGGTGATGAAGACCGAGGAGAACT
CCATCCCCAGCTGTGACCTCAGTGGCTTTGTCCGGCCTGATCCAATCATCATCTCCTCCCCACTGTCC
ACCTTCTTTAGTGCTGCCCCTGGGCAGAATCCCATCGTGCCTGAGACCCAGGTTCTTCATGAAGAAAT
CGAGCTCCCTGGTTCCAATGTGAAACTTCGCTATCTGAGCTCTAGAACTGCAGGGTACAAGTCACTGC
TGAAGATCACCATGACCCAGTCCACAGTGCCCCTGAACCTCATTAGGGTTCACCTGATGGTGGCTGTC
GAGGGGCATCTCTTCCAGAAGTCATTCCAGGCTTCTCCCAACCTGGCCTCCACCTTCATCTGGGACAA
GACAGATGCGTATGGCCAAAGGGTGTATGGACTCTCAGATGCTGTTGTGTCTGTCGGGTTTGAATATG
AGACCTGTCCCAGTCTAATTCTCTGGGAGAAAAGGACAGCCCTCCTTCAGGGATTCGAGCTGGACCCC
TCCAACCTCGGTGGCTGGTCCCTAGACAAACACCACATCCTCAATGTTAAAAGTGGAATCCTACACAA
AGGCACTGGGGAAAACCAGTTCCTGACCCAGCAGCCTGCCATCATCACCAGCATCATGGGCAATGGTC
GCCGCCGGAGCATTTCCTGTCCCAGCTGCAACGGCCTTGCTGAAGGCAACAAGCTGCTGGCCCCAGTG
GCTCTGGCTGTTGGAATCGATGGGAGCCTCTATGTGGGTGACTTCAATTACATCCGACGCATCTTTCC
CTCTCGAAATGTGACCAGCATCTTGGAGTTACGAAATAAAGAGTTTAAACATAGCAACAACCCAGCAC
ACAAGTACTACTTGGCAGTGGACCCCGTGTCCGGCTCGCTCTACGTGTCCGACACCAACAGCAGGAGA
ATCTACCGCGTCAAGTCTCTGAGTGGAACCAAAGACCTGGCTGGGAATTCGGAAGTTGTGGCAGGGAC
GGGAGAGCAGTGTCTACCCTTTGATGAAGCCCGCTGCGGGGATGGAGGGAAGGCCATAGATGCAACCC
TGATGAGCCCGAGAGGTATTGCAGTAGACAAGAATGGGCTCATGTACTTTGTCGATGCCACCATGATC
CGGAAGGTTGACCAGAATGGAATCATCTCCACCCTGCTGGGCTCCAATGACCTCACTGCCGTCCGGCC
GCTGAGCTGTGATTCCAGCATGGATGTAGCCCAGGTTCGTCTGGAGTGGCCAACAGACCTTGCTGTCA
ATCCCATGGATAACTCCTTGTATGTTCTAGAGAACAATGTCATCCTTCGAATCACCGAGAACCACCAA
GTCAGCATCATTGCGGGACGCCCCATGCACTGCCAAGTTCCTGGCATTGACTACTCACTCAGCAAACT
AGCCATTCACTCTGCCCTGGAGTCAGCCAGTGCCATTGCCATTTCTCACACTGGGGTCCTCTACATCA
CTGAGACAGATGAGAAGAAGATTAACCGTCTACGCCAGGTAACAACCAACGGGGAGATCTGCCTTTTA
GCTGGGGCAGCCTCGGACTGCGACTGCAAAAACGATGTCAATTGCAACTGCTATTCAGGAGATGATGC
CTACGCGACTGATGCCATCTTGAATTCCCCATCATCCTTAGCTGTAGCTCCAGATGGTACCATTTACA
TTGCAGACCTTGGAAATATTCGGATCAGGGCGGTCAGCAAGAACAAGCCTGTTCTTAATGCCTTCAAC
CAGTATGAGGCTGCATCCCCCGGAGAGCAGGAGTTATATGTTTTCAACGCTGATGGCATCCACCAATA
CACTGTGAGCCTGGTGACAGGGGAGTACTTGTACAATTTCACATATAGTACTGACAATGATGTCACTG
AATTGATTGACAATAATGGGAATTCCCTGAAGATCCGTCGGGACAGCAGTGGCATGCCCCGTCACCTG
CTCATGCCTGACAACCAGATCATCACCCTCACCGTGGGCACCAATGGAGGCCTCAAAGTCGTGTCCAC
ACAGAACCTGGAGCTTGGTCTCATGACCTATGATGGCAACACTGGGCTCCTGGCCACCAAGAGCGATG
AAACAGGATGGACGACTTTCTATGACTATGACCACGAAGGCCGCCTGACCAACGTGACGCGCCCCACG
GGGGTGGTAACCAGTCTGCACCGGGAAATGGAGAAATCTATTACCATTGACATTGAGAACTCCAACCG
TGATGATGACGTCACTGTCATCACCAACCTCTCTTCAGTAGAGGCCTCCTACACAGTGGTACAAGATC
AAGTTCGGAACAGCTACCAGCTCTGTAATAATGGTACCCTGAGGGTGATGTATGCTAATGGGATGGGT
ATCAGCTTCCACAGCGAGCCCCATGTCCTAGCGGGCACCATCACCCCCACCATTGGACGCTGCAACAT
CTCCCTGCCTATGGAGAATGGCTTAAACTCCATTGAGTGGCGCCTAAGAAAGGAACAGATTAAAGGCA
AAGTCACCATCTTTGGCAGGAAGCTCCGGGTCCATGGAAGAAATCTCTTGTCCATTGACTATGATCGA
AATATTCGGACTGAAAAGATCTATGATGACCACCGGAAGTTCACCCTGAGGATCATTTATGACCAGGT
GGGCCGCCCCTTCCTCTGGCTGCCCAGCAGCGGGCTGGCAGCTGTCAACGTGTCATACTTCTTCAATG
GGCGCCTGGCTGGGCTTCAGCGTGGGGCCATGAGCGAGAGGACAGACATCGACAAGCAAGGCCGCATC
GTGTCCCGCATGTTCGCTGACGGGAAAGTGTGGAGCTACTCCTACCTTGACAAGTCCATGGTCCTCCT
GCTTCAGAGCCAACGTCAGTATATATTTGAGTATGACTCCTCTGACCGCCTCCTTGCCGTCACCATGC
CCAGCGTGGCCCGGCACAGCATGTCCACACACACCTCCATCGGCTACATCCGTAATATTTACAACCCG
CCTGAAAGCAATGCTTCGGTCATCTTTGACTACAGTGATGACGGCCGCATCCTGAAGACCTCCTTTTT
GGGCACCGGACGCCAGGTGTTCTACAAGTATGGGAAACTCTCCAAGTTATCAGAGATTGTCTACGACA
GTACCGCCGTCACCTTCGGGTATGACGAGACCACTGGTGTCTTGAAGATGGTCAACCTCCAAAGTGGG
GGCTTCTCCTGCACCATCAGGTACCGGAAGATTGGCCCCCTGGTGGACAAGCAGATCTACAGGTTCTC
CGAGGAAGGCATGGTCAATGCCAGGTTTGACTACACCTATCATGACAACAGCTTCCGCATCGCAAGCA
TCAAGCCCGTCATAAGTGAGACTCCCCTCCCCGTTGACCTCTACCGCTATGATGAGATTTCTGGCAAG
GTGGAACACTTTGGTAAGTTTGGAGTCATCTATTATGACATCAACCAGATCATCACCACTGCCGTGAT
GACCCTCAGCAAACACTTCGACACCCATGGGCGGATCAAGGAGGTCCAGTATGAGATGTTCCGGTCCC
TCATGTACTGGATGACGGTGCAATATGACAGCATGGGCAGGGTGATCAAGAGGGAGCTAAAACTGGGG
CCCTATGCCAATACCACGAAGTACACCTATGACTACGATGGGGACGGGCAGCTCCAGAGCGTGGCCGT
CAATGACCGCCCGACCTGGCGCTACAGCTATGACCTTAATGGGAATCTCCACTTACTGAACCCAGGCA
ACAGTGTGCGCCTCATGCCCTTGCGCTATGACCTCCGGGATCGGATAACCAGACTCGGGGATGTGCAG
TACAAAATTGACGACGATGGCTATCTGTGCCAGAGAGGGTCTGACATCTTCGAATACAATTCCAAGGG
CCTCCTAACAAGAGCCTACAACAAGGCCAGCGGGTGGAGTGTCCAGTACCGCTATGATGGCGTAGGAC
GGCGGGCTTCCTACAAGACCAACCTGGGCCACCACCTGCAGTACTTCTACTCTGACCTCCACAACCCG
ACGCGCATCACCCATGTCTACAATCACTCCAACTCGGAGATTACCTCACTGTACTACGACCTCCAGGG
CCACCTCTTTGCCATGGAGAGCAGCAGTGGGGAGGAGTACTATGTTGCCTCTGATAACACAGGGACTC
CTCTGGCTGTGTTCAGCATCAACGGCCTCATGATCAAACAGCTGCAGTACACGGCCTATGGGGAGATT
TATTATGACTCCAACCCCGACTTCCAGATGGTCATTGGCTTCCATGGGGGACTCTATGACCCCCTGAC
CAAGCTGGTCCACTTCACTCAGCGTGATTATGATGTGCTGGCAGGACGATGGACCTCCCCAGACTATA
CCATGTGGAAAAACGTGGGCAAGGAGCCGGCCCCCTTTAACCTGTATATGTTCAAGAGCAACAATCCT
CTCAGCAGTGAGCTAGATTTGAAGAACTACGTGACAGATGTGAAAAGCTGGCTTGTGATGTTTGGATT
TCAGCTTAGCAACATCATTCCTGGCTTCCCGAGAGCCAAAATGTATTTCGTGCCTCCTCCCTATGAAT
TGTCAGAGAGTCAAGCAAGTGAGAATGGACAGCTCATTACAGGTGTCCAACAGACAACAGAGAGACAT
AACCAGGCCTTCATGGCTCTGGAAGGACAGGTCATTACTAAAAAGCTCCACGCCAGCATCCGAGAGAA
AGCAGGTCACTGGTTTGCCACCACCACGCCCATCATTGGCAAAGGCATCATGTTTGCCATCAAAGAAG
GGCGGGTGACCACGGGCGTGTCCAGCATCGCCAGCGAAGATAGCCGCAAGGTGGCATCTGTGCTGAAC
AACGCCTACTACCTGGACAAGATGCACTACAGCATCGAGGGCAAGGACACCCACTACTTTGTGAAGAT
TGGCTCAGCCGATGGCGACCTGGTCACACTAGGCACCACCATCGGCCGCAAGGTGCTAGAGAGCGGGG
TGAACGTGACCGTGTCCCAGCCCACGCTGCTGGTCAACGGCAGGACTCGAAGGTTCACGAACATTGAG
TTCCAGTACTCCACGCTGCTGCTCAGCATCCGCTATGGCCTCACCCCCGACACCCTGGACGAAGAGAA
GGCCCGCGTCCTGGACCAGGCGAGACAGAGGGCCCTGGGCACGGCCTGGGCCAAGGAGCAGCAGAAAG
CCAGGGACGGGAGAGAGGGGAGCCGCCTGTGGACTGAGGGCGAGAAGCAGCAGCTTCTGAGCACCGGG
CGCGTGCAAGGGTACGAGGGATATTACGTGCTTCCCGTGGAGCAATACCCAGAGCTTGCAGACAGTAG
CAGCAACATCCAGTTTTTAAGACAGAATGAGATGGGAAAGAGGTAACAAAATAATCTGCTGCCATTCC
TTGTCTGAATGGCTCAGCAGGAGTAACTGTTATCTCCTCTCCTAAGGAGATGAAGACCTAACAGGGGC
ACTGCGGCTGGGCTGCTTTAGGAGACCAAGTGGCAAGAAAGCTCACATTTTTTGAGTTCAAATGCTAC
TGTCCAAGCGAGAAGTCCCTCATCCTGAAGTAGACTAAAGCCCGGCTGAAAATTCCGAGGAAAACAAA
ACAAACGAATGAATGAACAGACACACACAATGTTCCAAGTTCCCCTAAAATATGACCCACTTGTTCTG
GGTCTACGCAGAAAAGAGACGCAAAGTGTCCAAAAGGAACAAAAGAACAAAAACGAATAAGCAAAGAA
GAAAACAAACAAAAACAAAACAAAACAAACACACGGACCGATAAACAAAGAAGCGAAGATAAGAAAGA
AGGCCTCATATCCAATTACCTCACTCATTCACATGTGAGCGACACGCAGACATCCGCGAGGGCCAGCG
TCACCAGACCAGCTGCGGGACAAACCACTCAGACTGCTTGTAGGACAAATACTTCTGACATTTTCGTT
TAAGCAAATACAGGTGCATTTAAAACACGACTTTGGGGGTGATTTGTGTGTAGCGCCTGGGGAGGGGG
GATAAAAGAGGAGGAGTGAGCACTGGAAATACTTTTTAAAGAAAAAAAAACATGAGGGAATAAAAGAA
ATTCCTATCAAAAATCAAAGTGAAATAATACCATCCAGCACTTAACTCTCAGGTCCCAACTAAGTCTC
GCCTGAGCTAATTTATTTGAGCGCAGAGTGTAAAATTTAATTCAAAATGGTGGCTATAATCACTACAG
ATAAATTTCATACTCTTTTGTCTTTGGAGATTCCATTGTGGACAGTAATACGCAGTTACAGGGTGTAG
TCTGTTTAGATTCCGTAGTTCGTGGGTATCAGTTTCGGTAGAGGTGCAGCATCGTGACACTTTTGCTA
ACAGGTACCACTTCTGATCACCCTGTACATACATGAGCCGAAAGGCACAATCACTGTTTCAGATTTAA
AATTATTAGTGTGTTTGTTTGGTCCAGAAACTGAGACAATCACATGACAGTCACCACGAGGAGAGAAA
ATTTAAAAAATAAAAATAAAAACAAAAAAAATTTTAAAAATTAAAAAAACAAAAATAAAGTCTAATAA
GAACTTTGGTACAGGAACTTTTTTGTAATATACATGTATGAATTGTTCATCGAGTTTTTATATTAATT
TTAATTTGCTGCTAAGCAAAGACTAGGGACAGGCAAAGATAATTTATGGCAAAGTGTTTAAATTGTTT
ATACATAAATAAAGTCTCTAAAACTCCTGTG

| | | | |
|---|---|---|---|
| NOV7u, CG50426-14 | SEQ ID NO: 154 | 2733 aa | MW at 303423.3kD |
| Protein Sequence | | | |

MDVKDRRHRSLTRGRCGKECRYTSSSLDSEDCRVPTQKSYSSSETLKAYDHDSRMHYGNRVTDLIHRE
SDEFPRQGTNFTLAELGICEPSPHRSGYCSDMGILHQGYSLSTGSDADSDTEGGMSPEHAIRLWGRGI
KSRRSSGLSSRENSALTLTDSDNENKSDDENGRPIPPTSSPSLLPSAQLPSSHNPPPVSCQMPLLDSN
TSHQIMDTNPDEEFSPNSYLLRACSGPQQASSSGPPNHHSQSTLRPPLPPPHNHTLSHHHSSANSLNR
NSLTNRRSQIHAPAPAPNDLATTPESVQLQDSWVLNSNVPLETRHFLFKTSSGSTPLFSSSSPGYPLT
SGTVYTPPPRLLPRNTFSRKAFKLKKPSKYCSWKCAALSAIAAALLLAILLAYFIVPWSLKNSSIDSG
EAEVGRRVTQEVPPGVFWRSQIHISQPQFLKFNISLGKDALFGVYIRRGLPPSHAQYDFMERLDGKEK
WSVVESPRERRSIQTLVQNEAVFVQYLDVGLWHLAFYNDGKDKEMVSFNTVVLDSVQDCPRNCHGNGE
CVSGVCHCFPGFLGADCAKAACPVLCSGNGQYSKGTCQCYSGWKGAECDVPMNQCIDPSCGGHGSCID
GNCVCSAGYKGEHCEEVDCLDPTCSSHGVCVNGECLCSPGWGGLNCELARVQCPDQCSGHGTYLPDTG
LCSCDPNWNGPDCSVEVCSVDCGTHGVCIGGACRCEEGWTGAACDQRVCHPRCIEHGTCKDGKCECRE
GWNGEHCTIGRQTAGTETDGCPDLCNGNGRCTLGQNSWQCVCQTGWRGPGCNVAMETSCADNKDNEGD
GLVDCLDPDCCLQSACQNSLLCRGSRDPLDIIQQGQTDWPAVKSFYDRIKLLAGKDSTHIIPGENPFN
SSLVSLIRGQVVTTDGTPLVGVNVSFVKYPKYGYTITRQDGTFDLIANGGASLTLHFERAPFMSQERT
VWLPWNSFYAMDTLVMKTEENSIPSCDLSGFVRPDPIIISSPLSTFFSAAPGQNPIVPETQVLHEEIE
LPGSNVKLRYLSSRTAGYKSLLKITMTQSTVPLNLIRVHLMVAVEGHLFQKSFQASPNLASTFIWDKT
DAYGQRVYGLSDAVVSVGFEYETCPSLILWEKRTALLQGFELDPSNLGGWSLDKHHILNVKSGILHKG
TGENQFLTQQPAIITSIMGNGRRRSISCPSCNGLAEGNKLLAPVALAVGIDGSLYVGDFNYIRRIFPS
RNVTSILELRNKEFKHSNNPAHKYYLAVDPVSGSLYVSDTNSRRIYRVKSLSGTKDLAGNSEVVAGTG
EQCLPFDEARCGDGGKAIDATLMSPRGIAVDKNGLMYFVDATMIRKVDQNGIISTLLGSNDLTAVRPL
SCDSSMDVAQVRLEWPTDLAVNPMDNSLYVLENNVILRITENHQVSIIAGRPMHCQVPGIDYSLSKLA
IHSALESASAIAISHTGVLYITETDEKKINRLRQVTTNGEICLLAGAASDCDCKNDVNCNCYSGDDAY
ATDAILNSPSSLAVAPDGTIYIADLGNIRIRAVSKNKPVLNAYNQYEAASPGEQELYVFNADGIHQYT
VSLVTGEYLYNFTYSTDNDVTELIDNNGNSLKIRRDSSGMPRHLLMPDNQIITLTVGTNGGLKVVSTQ
NLELGLMTYDGNTGLLATKSDETGWTTFYDYDHEGRITNVTRPTGVVTSLHREMEKSITIDIENSNRD
DDVTVITNLSSVEASYTVVQDQVRNSYQLCNNGTLRVMYANGMGISFHSEPHVLAGTITPTIGRCNIS
LPMENGLNSIEWRLRKEQIKGKVTIFGRKLRVHGRNLLSIDYDRNIRTEKIYDDHRKFTLRIIYDQVG
RPFLWLPSSGLAAVNVSYFFNGRLAGLQRGAMSERTDIDKQGRIVSRMFADGKVWSYSYLDKSMVLLL
QSQRQYIFEYDSSDRLLAVTMPSVARHSMSTHTSIGYIRNIYNPPESNASVIFDYSDDGRILKTSFLG
TGRQVFYKYGKLSKLSEIVYDSTAVTFGYDETTGVLKMVNLQSGGFSCTIRYRKIGPLVDKQIYRFSE
EGMVNARFDYTYHDNSFRIASIKPVISETPLPVDLYRYDEISGKVENFGKFGVTYYDINQIITTAVMT
LSKHFDTHGRIKEVQYEMFRSLMYWMTVQYDSMGRVIKRELKLGPYANTTKYTYDYDGDGQLQSVAVN
DRPTWRYSYDLNGNLHLLNPGNSVRLMPLRYDLRDRITRLGDVQYKIDDDGYLCQRGSDIFEYNSKGL
LTRAYNKASGWSVQYRYDGVGRRASYKTNLGHHLQYFYSDLHNPTRITHVYNHSNSEITSLYYDLQGH
LFAMESSSGEEYYVASDNTGTPLAVFSINGLMIKQLQYTAYGEIYYDSNPDFQMVIGFHGGLYDPLTK
LVHFTQRDYDVLAGRWTSPDYTMWKNVGKEPAPFNLYMFKSNNPLSSELDLKNYVTDVKSWLVMFGFQ
LSNIIPGFPRAKMYFVPPPYELSESQASENGQLITGVQQTTERHNQAFMALEGQVITKKLHASIREKA
GHWFATTTPIIGKGIMFAIKEGRVTTGVSSIASEDSRKVASVLNNAYYLDKMHYSIEGKDTHYFVKIG
SADGDLVTLGTTIGRKVLESGVNVTVSQPTLLVNGRTRPFTNIEFQYSTLLLSIRYGLTPDTLDEEKA
RVLDQARQRALGTAWAKEQQKARDGREGSRLWTEGEKQQLLSTGRVQGYEGYYVLPVEQYPELADSSS
NIQFLRQNEMGKR

| | | |
|---|---|---|
| NOV7v, CG50426-16 | SEQ ID NO: 155 | 2478 bp |
| DNA Sequence | ORF Start: at 1 | ORF Stop: end of sequence |

AAAAACAGCAGCATAGACAGTGGTGAAGCAGAAGTTGGTCGGCGGGTAACACAAGAAGTCCCACCAGG
GGTGTTTTGGAGGTCACAAATTCACATCAGTCAGCCCCAGTTCTTAAAGTTCAACATCTCCCTCGGGA
AGGACGCTCTCTTTGGTGTTTACATAAGAAGAGGACTTCCACCATCTCATGCCCAGTATGACTTCATG
GAACGTCTGGACGGGAAGGAGAAGTGGAGTGTGGTTGAGTCTCCCAGGGAACGCCGGAGCATACAGAC
CTTGGTTCAGAATGAAGCCGTGTTTGTGCAGTACCTGGATGTGGGCCTGTGGCATCTGGCCTTCTACA
ATGATGGAAAAGACAAAGAGATGGTTTCCTTCAATACTGTTGTCCTAGATTCAGTGCAGGACTGTCCA
CGTAACTGCCATGGGAATGGTGAATGTGTGTCCGGGGTGTGTCACTGTTTCCCAGGATTTCTAGGAGC
AGACTGTGCTAAAGCTGCCTGCCCTGTCCTGTGCAGTGGGAATGGACAATATTCTAAAGGGACGTGCC
AGTGCTACAGCGGCTGGAAAGGTGCAGAGTGCGACGTGCCCATGAATCAGTGCATCGATCCTTCCTGC
GGGGGCCACGGCTCCTGCATTGATGGGAACTGTGTCTGCTCTGCTGGCTACAAAGGCGAGCACTGTGA
GGAAGTTGATTGCTTGGATCCCACCTGCTCCAGCCACGGAGTCTGTGTGAATGGAGAATGCCTGTGCA
GCCCTGGCTGGGGTGGTCTGAACTGTGAGCTGGCGAGGGTCCAGTGCCCAGACCAGTGCAGTGGGCAT
GGCACGTACCTGCCTGACACGGGCCTCTGCAGCTGCGATCCCAACTGGATGGGTCCCGACTGCTCTGT
TGAAGTGTGCTCAGTAGACTGTGGCACTCACGGCGTCTGCATCGGGGGAGCCTGCCGCTGTGAAGAGG
GCTGGACAGGCGCAGCGTGTGACCAGCGCGTGTGCCACCCCCGCTGCATTGAGCATGGGACCTGTAAA
GATGGCAAATGTGAATGCCGAGAGGGCTGGAATGGTGAACACTGCACCATTGGTAGGCAAACGGCAGG
CACCGAAACAGATGGCTGCCCTGACTTGTGCAACGGTAACGGGAGATGCACACTGGGTCAGAACAGCT
GGCAGTGTGTCTGCCAGACCGGCTGGAGAGGGCCCGGATGCAACGTTGCCATGGAAACTTCCTGTGCT
GATAACAAGGATAATGAGGGAGATGGCCTGGTGGATTGTTTGGACCCTGACTGCTGCCTGCAGTCAGC
CTGTCAGAACAGCCTGCTCTGCCGGGGGTCCCGGGACCCACTGGACATCATTCAGCAGGGCCAGACGG
ATTGGCCCGCAGTGAAGTCCTTCTATGACCGTATCAAGCTCTTGGCAGGCAAGGATAGCACCCACATC
ATTCCTGGAGAGAACCCTTTCAACAGCAGCTTGGTTTCTCTCATCCGAGGCCAAGTAGTAACTACAGA
TGGAACTCCCCTGGTCGGTGTGAACGTGTCTTTTGTCAAGTACCCAAAATACGGCTACACCATCACCC
GCCAGGATGGCACGTTCGACCTGATCGCAAATGGAGGTGCTTCCTTGACTCTACACTTTGAGCGAGCC
CCGTTCATGAGCCAGGAGCGCACTGTGTGGCTGCCGTGGAACAGCTTTTACGCCATGGACACCCTGGT
GATGAAGACCGAGGAGAACTCCATCCCCAGCTGTGACCTCAGTGGCTTTGTCCGGCCTGATCCAATCA
TCATCTCCTCCCCACTGTCCACCTTCTTTAGTGCTGCCCCTGGGCAGAATCCCATCGTGCCTGAGACC
CAGGTTCTTCATGAAGAAATCGAGCTCCCTGGTTCCAATGTGAAACTTCGCTATCTGAGCTCTAGAAC
TGCAGGGTACAAGTCACTGCTGAAGATCACCATGACCCAGTCCACAGTGCCCCTGAACCTCATTAGGG
TTCACCTGATGGTGGCTGTCGAGGGGCATCTCTTCCAGAAGTCATTCCAGGCTTCTCCCAACCTGGCC
TACACCTTCATCTGGGACAAGACAGATGCGTATGGCCAAAGGGTGTATGGACTCTCAGATGCTGTTGT
GTCTGTCGGGTTTGAATATGAGACCTGTCCCAGTCTAATTCTCTGGGAGAAAAGGACAGCCCTCCTTC
AGGGATTCGAGCTGGACCCCTCCAACCTCGGTGGCTGGTCCCTAGACAAACACCACATCCTCAATGTT
AAAAGTGGAATCCTACACAAAGGCACTGGGGAAAACCAGTTCCTGACCCAGCAGCCTGCCATCATCAC
CAGCATCATGGGCAATGGTCGTCGCCGGAGCATTTCTTGTCCCAGCTGCAACGGCCTCGCTGAAGGCA
ACAAGCTGCTGGCCCCAGTGGCTCTGGCTGTTGGAATCGATGGGAGCCTCTATGTGGGTGACTTCAAT
TACATCCGACGCATCTTTCCCTCTCGAAAT

| | | | |
|---|---|---|---|
| NOV7v, CG50426-16 | SEQ ID NO: 156 | 826 aa | MW at 89909.7kD |
| Protein Sequence | | | |

KNSSIDSGEAEVGRRVTQEVPPGVFWRSQIHISQPQFLKFNISLGKDALFGVYIRRGLPPSHAQYDFM
ERLDGKEKWSVVESPRERRSIQTLVQNEAVFVQYLDVGLWHLAFYNDGKDKEMVSFNTVVLDSVQDCP
RNCHGNGECVSGVCHCFPGFLGADCAKAACPVLCSGNGQYSKGTCQCYSGWKGAECDVPNNQCIDPSC
GGHGSCIDGNCVCSAGYKGEHCEEVDCLDPTCSSHGVCVNGECLCSPGWGGLNCELARVQCPDQCSGH
GTYLPDTGLCSCDPNWMGPDCSVEVCSVDCGTHGVCIGGACRCEEGWTGAACDQRVCHPRCIEHGTCK
DGKCECREGWNGEHCTIGRQTAGTETDGCPDLCNGNGRCTLGQNSWQCVCQTGWRGPGCNVAMETSCA
DNKDNEGDGLVDCLDPDCCLQSACQNSLLCRGSRDPLDIIQQGQTDWPAVKSFYDRIKLLAGKDSTHI
IPGENPFNSSLVSLIRGQVVTTDGTPLVGVNVSFVKYPKYGYTITRQDGTFDLIANGGASLTLHFERA
PFMSQERTVWLPWNSFYAMDTLVMKTEENSIPSCDLSGFVRPDPIIISSPLSTFFSAAPGQNPIVPET
QVLHEEIELPGSNVKLRYLSSRTAGYKSLLKITMTQSTVPLNLIRVHLMVAVEGHLFQKSFQASPNLA
YTFIWDKTDAYGQRVYGLSDAVVSVGFEYETCPSLILWEKRTALLQGFELDPSNLGGWSLDKHHILNV
KSGILHKGTGENQFLTQQPAIITSIMGNGRRRSISCPSCNGLAEGNKLLAPVALAVGIDGSLYVGDFN
YIRRIFPSRN

| | | |
|---|---|---|
| NOV7w, CG50426-18 | SEQ ID NO: 157 | 57 bp |
| DNA Sequence | ORF Start: at 1 | ORF Stop: end of sequence |

GACACGGGCCTCTGCAGCTGCGATCCCAACTGGATGGGTCCCGACTGCTCTGTTGAA

| | | | |
|---|---|---|---|
| NOV7w, CG50426-18 | SEQ ID NO: 158 | 19 aa | MW at 2029.2kD |
| Protein Sequence | | | |

DTGLCSCDPNWMGPDCSVE

| | | |
|---|---|---|
| NOV7x, CG50426-19 | SEQ ID NO: 159 | 54 bp |
| DNA Sequence | ORF Start: at 1 | ORF Stop: end of sequence |

GACCGTATCAAGCTCTTGGCAGGCAAGGATAGCACCCACATCATTCCTGGAGAG

| | | | |
|---|---|---|---|
| NOV7x, CG50426-19 | SEQ ID NO: 160 | 18 aa | MW at 1963.2kD |
| Protein Sequence | | | |

DRIKLLAGKDSTHIIPGE

| | | |
|---|---|---|
| NOV7y, CG50426-20 | SEQ ID NO: 161 | 60 bp |
| DNA Sequence | ORF Start: at 1 | ORF Stop: end of sequence |

TCTGCTGGCTACAAAGGCGAGCACTGTGAGGAAGTTGATTGCTTGGATCCCACCTGCTCC

| | | | |
|---|---|---|---|
| NOV7y, CG50426-20 | SEQ ID NO: 162 | 20 aa | MW at 2143.3kD |
| Protein Sequence | | | |

SAGYKGEHCEEVDCLDPTCS

| | | |
|---|---|---|
| NOV7z, CG50426-22 | SEQ ID NO: 163 | 540 bp |
| DNA Sequence | ORF Start: at 1 | ORF Stop: end of sequence |

AACAGCAGCATAGACAGTGGTGAAGCAGAAGTTGGTCGGCGGGTAACACAAGAAGTCCCACCAGGGGT
GTTTTGGAGGTCACAAATTCACATCAGTCAGCCCCAGTTCTTAAAGTTCAACATCTCCCTCGGGAAGG
ACGCTCTCTTTGGTGTTTACATAAGAAGAGGACTTCCACCATCTCATGCCCAGTATGACTTCATGGAA
CGTCTGGACGGGAAGGAGAAGTGGAGTGTGGTTGAGTCTCCCAGGGAACGCCGGAGCATACAGACCTT
GGTTCAGAATGAAGCCGTGTTTGTGCAGTACCTGGATGTGGGCCTGTGGCATCTGGCCTTCTACAATG
ATGGAAAAGACAAAGAGATGGTTTCCTTCAATACTGTTGTCCTAGATGATTCAGTGCAGGACTGTCCA
CGTAACTGCCATGGGAATGGTGAATGTGTGTCCGGGGTGTGTCACTGTTTCCCAGGATTTCTAGGAGC
AGACTGTGCTAAAGACCTTCCTGCCTTGACTTTCTGCAAGACAATCATTAATAAAGCTGCTCTG

| | | | |
|---|---|---|---|
| NOV7z, CG50426-22 | SEQ ID NO: 164 | 180 aa | MW at 20167.7kD |
| Protein Sequence | | | |

NSSIDSGEAEVGRRVTQEVPPGVFWRSQIHISQPQFLKFNISLGKDALFGVYIRRGLPPSHAQYDFME
RLDGKEKWSVVESPRERRSIQTLVQNEAVFVQYLDVGLWHLAFYNDGKDKENVSFNTVVLDDSVQDCP
RNCHGNGECVSGVCHCFPGFLGADCAKDLPALTFCKTIINKAAL

| | | |
|---|---|---|
| NOV7aa, CG50426-23 | SEQ ID NO: 165 | 2497 bp |
| DNA Sequence | ORF Start: at 11 | ORF Stop: at 2489 |

CACCAAGCTTAAAAACAGCAGCATAGACAGTGGTGAAGCAGAAGTTGGTCGGCGGGTAACACAAGAAG
TCCCACCAGGGGTGTTTTGGAGGTCACAAATTCACATCAGTCAGCCCCAGTTCTTAAAGTTCAACATC
TCCCTCGGGAAGGACGCTCTCTTTGGTGTTTACATAAGAAGAGGACTTCCACCATCTCATGCCCAGTA
TGACTTCATGGAACGTCTGGACGGGAAGGAGAAGTGGAGTGTGGTTGAGTCTCCCAGGGAACGCCGGA
GCATACAGACCTTGGTTCAGAATGAAGCCGTGTTTGTGCAGTACCTGGATGTGGGCCTGTGGCATCTG
GCCTTCTACAATGATGGAAAAGACAAAGAGATGGTTTCCTTCAATACTGTTGTCCTAGATTCAGTGCA
GGACTGTCCACGTAACTGCCATGGGAATGGTGAATGTGTGTCCGGGGTGTGTCACTGTTTCCCAGGAT
TTCTAGGAGCAGACTGTGCTAAAGCTGCCTGCCCTGTCCTGTGCAGTGGGAATGGACAATATTCTAAA
GGGACGTGCCAGTGCTACAGCGGCTGGAAAGGTGCAGAGTGCGACGTGCCCATGAATCAGTGCATCGA
TCCTTCCTGCGGGGGCCACGGCTCCTGCATTGATGGGAACTGTGTCTGCTCTGCTGGCTACAAAGGCG
AGCACTGTGAGGAAGTTGATTGCTTGGATCCCACCTGCTCCAGCCACGGAGTCTGTGTGAATGGAGAA
TGCCTGTGCAGCCCTGGCTGGGGTGGTCTGAACTGTGAGCTGGCGAGGGTCCAGTGCCCAGACCAGTG
CAGTGGGCATGGCACGTACCTGCCTGACACGGGCCTCTGCAGCTGCGATCCCAACTGGATGGGTCCCG
ACTGCTCTGTTGAAGTGTGCTCAGTAGACTGTGGCACTCACGGCGTCTGCATCGGGGGAGCCTGCCGC
TGTGAAGAGGGCTGGACAGGCGCAGCGTGTGACCAGCGCGTGTGCCACCCCCGCTGCATTGAGCACGG
GACCTGTAAAGATGGCAAATGTGAATGCCGAGAGGGCTGGAATGGTGAACACTGCACCATTGGTAGGC
AAACGGCAGGCACCGAAACAGATGGCTGCCCTGACTTGTGCAACGGTAACGGGAGATGCACACTGGGT
CAGAACAGCTGGCAGTGTGTCTGCCAGACCGGCTGGAGAGGGCCCGGATGCAACGTTGCCATGGAAAC
TTCCTGTGCTGATAACAAGGATAATGAGGGAGATGGCCTGGTGGATTGTTTGGACCCTGACTGCTGCC
TGCAGTCAGCCTGTCAGAACAGCCTGCTCTGCCGGGGGTCCCGGGACCCACTGGACATCATTCAGCAG
GGCCAGACGGATTGGCCCGCAGTGAAGTCCTTCTATGACCGTATCAAGCTCTTGGCAGGCAAGGATAG
CACCCACATCATTCCTGGAGAGAACCCTTTCAACAGCAGCTTGGTTTCTCTCATCCGAGGCCAAGTAG
TAACTACAGATGGAACTCCCCTGGTCGGTGTGAACGTGTCTTTTGTCAAGTACCCAAAATACGGCTAC
ACCATCACCCGCCAGGATGGCACGTTCGACCTGATCGCAAATGGAGGTGCTTCCTTGACTCTACACTT
TGAGCGAGCCCCGTTCATGAGCCAGGAGCGCACTGTGTGGCTGCCGTGGAACAGCTTTTACGCCATGG
ACACCCTGGTGATGAAGACCGAGGAGAACTCCATCCCCAGCTGTGACCTCAGTGGCTTTGTCCGGCCT
GATCCAATCATCATCTCCTCCCCACTGTCCACCTTCTTTAGTGCTGCCCCTGGGCAGAATCCCATCGT
GCCTGAGACCCAGGTTCTTCATGAAGAAATCGAGCTCCCTGGTTCCAATGTGAAACTTCGCTATCTGA
GCTCTAGAACTGCAGGGTACAAGTCACTGCTGAAGATCACCATGACCCAGTCCACAGTGCCCCTGAAC
CTCATTAGGGTTCACCTGATGGTGGCTGTCGAGGGGCATCTCTTCCAGAAGTCATTCCAGGCTTCTCC
CAACCTGGCCTACACCTTCATCTGGGACAAGACAGATGCGTATGGCCAAAGGGTGTATGGACTCTCAG
ATGCTGTTGTGTCTGTCGGGTTTGAATATGAGACCTGTCCCAGTCTAATTCTCTGGGAGAAAAGGACA
GCCCTCCTTCAGGGATTCGAGCTGGACCCCTCCAACCTCGGTGGCTGGTCCCTAGACAAACACCACAT
CCTCAATGTTAAAAGTGGAATCCTACACAAAGGCACTGGGGAAAACCAGTTCCTGACCCAGCAGCCTG
CCATCATCACCAGCATCATGGGCAATGGTCGCCGCCGGAGCATTTCCTGTCCCAGCTGCAACGGCCTT
GCTGAAGGCAACAAGCTGCTGGCCCCAGTGGCTCTGGCTGTTGGAATCGATGGGAGCCTCTATGTGGG
TGACTTCAATTACATCCGACGCATCTTTCCCTCTCGAAATCTCGAGGGC

| | | | |
|---|---|---|---|
| NOV7aa, CG50426-23 | SEQ ID NO: 166 | 826 aa | MW at 89909.7kD |
| Protein Sequence | | | |

KNSSIDSGEAEVGRRVTQEVPPGVFWRSQIHISQPQFLKFNISLGKDALFGVYIRRGLPPSHAQYDFM
ERLDGKEKWSVVESPRERRSIQTLVQNEAVFVQYLDVGLWHLAFYNDGKDKEMVSFNTVVLDSVQDCP
RNCHGNGECVSGVCHCFPGFLGADCAKAACPVLCSGNGQYSKGTCQCYSGWKGAECDVPNNQCIDPSC
GGHGSCIDGNCVCSAGYKGEHCEEVDCLDPTCSSHGVCVNGECLCSPGWGGLNCELARVQCPDQCSGH
GTYLPDTGLCSCDPNWMGPDCSVEVCSVDCGTHGVCIGGACRCEEGWTGAACDQRVCHPRCIEHGTCK
DGKCECREGWNGEHCTIGRQTAGTETDGCPDLCNGNGRCTLGQNSWQCVCQTGWRGPGCNVAMETSCA
DNKDNEGDGLVDCLDPDCCLQSACQNSLLCRGSRDPLDIIQQGQTDWPAVKSFYDRIKLLAGKDSTHI
IPGENPFNSSLVSLIRGQVVTTDGTPLVGVNVSFVKYPKYGYTITRQDGTFDLIANGGASLTLHFERA
PFMSQERTVWLPWNSFYAMDTLVMKTEENSIPSCDLSGFVRPDPIIISSPLSTFFSAAPGQNPIVPET
QVLHEEIELPGSNVKLRYLSSRTAGYKSLLKITMTQSTVPLNLIRVHLMVAVEGHLFQKSFQASPNLA
YTFIWDKTDAYGQRVYGLSDAVVSVGFEYETCPSLILWEKRTALLQGFELDPSNLGGWSLDKHHILNV
KSGILHKGTGENQFLTQQPAIITSIMGNGRRRSISCPSCNGLAEGNKLLAPVALAVGIDGSLYVGDFN
YIRRIFPSRN

| | | |
|---|---|---|
| NOV7ab, CG50426-24 | SEQ ID NO: 167 | 8575 bp |
| DNA Sequence | ORF Start: ATG at 199 | ORF Stop: TAA at 8476 |

TAAAGTACCTGTCATCTTGACAAGTGGCGGAGCGGAGGAGTCAAGGATTATAAATGATCACAGCCAGG
TCCAGCTCGCCCCGTGATTGGGCTCTCCCGCGATCTGCACCGGGGGAAGCGCATGAGAGGCCAATGAG
ACTTGAACCCTGAGCCTAAGTTGTCACCAGCAGGACTGATGTGCACACAGAAGGAATGAAGTATGGAT
GTGAAAGAACGCAGGCCTTACTGCTCCCTGACCAAGAGCAGACGAGAGAAGGAACGGCGCTACACAAA
TTCCTCCGCAGACAATGAGGAGTGCCGGGTACCCACACAGAAGTCCTACAGTTCCAGCGAGACATTGA
AAGCTTTTGATCATGATTCCTCGCGGCTGCTTTACGGCAACAGAGTGAAGGATTTGGTTCACAGAGAA
GCAGACGAGTTCACTAGACAAAGCAGGATGCACTATGGAAACCGAGTCACAGACCTCATCCACCGGGA
GTCAGATGAGTTTCCTAGACAAGGTATCCTTCACCAGGGCTACTCCCTTAGCACAGGGTCTGACGCCG
ACTCCGACACCGAGGGAGGGATGTCTCCAGAACACGCCATCAGACTGTGGGGCAGAGGGATAAAATCC
AGGCGCAGTTCCGGCCTGTCCAGTCGTGAAAACTCGGCCCTTACCCTGACTGACTCTGACAACGAAAA
CAAATCAGATGATGAGAACGGTCGTCCCATTCCACGTACATCCTCGCGTAGTCTCCTCCCATTTGTTC
AGCTGCCTAGCTCCCATAATCCTCCACCAGTTAGCTGCCAGATGCCATTGCTAGACAGCAACACCTCC
CATCAAATCATGGACACCAACCCTGATGAGGAATTCTCCCCCAATTCATACCTGCTCAGAGCATGCTC
AGGGCCCCAGCAAGCCTCCAGCAGTGGTCCTCCGAACCACCACAGCCAGTCGACTCTGAGGCCCCCTC
TCCCACCCCCTCACAACCACACGCTGTCCCATCACCACTCGTCCGCCAACTCCCTCAACAGGAACTCA
CTGACCAATCGGCGGAGTCAGATCCACGCCCCGGCCCCAGCGCCCAATGACCTGGCCACCACACCAGA
GTCCGTTCAGCTTCAGGACAGCTGGGTGCTAAACAGCAACGTGCCACTGGAGACCCGGCACTTCCTCT
TCAAGACCTCCTCGGGGAGCACACCCTTGTTCAGCAGCTCTTCCCCGGGATACCCTTTGACCTCAGGA
ACGGTTTACACGCCCCCGCCCCGCCTGCTGCCCAGGAATACTTTCTCCAGGAAGGCTTTCAAGCTGAA
GAAGCCCTCCAAATACTGCAGCTGGAAATGTGCTGCCCTCTCCGCCATTGCCGCGGCCCTCCTCTTGG
CTATTTTGCTGGCGTATTTCGCAGCAATGCATCTGCTCGGACTCAATTGGCAACTCCAGCCTGCAGAT
GGGCACACCTTTAACAATGGGATAAGGACCGGCTTACCAGGAAACGATGATGTGGCAACAATGCCATC
TGGAGGCAAAGTGCCCTGGTCGTTGAAAAACAGCAGCATAGACAGTGGTGAAGCAGAAGTTGGTCGGC
GGGTAACACAAGAAGTCCCACCAGGGGTGTTTTGGAGGTCACAAATTCACATCAGTCAGCCCCAGTTC
TTAAAGTTCAACATCTCCCTCGGGAAGGACGCTCTCTTTGGTGTTTACATAAGAAGAGGACTTCCACC
ATCTCATGCCCAGTATGACTTCATGGAACGTCTGGACGGGAAGGAGAAGTGGAGTGTGGTTGAGTCTC
CCAGGGAACGCCGGAGCATACAGACCTTGGTTCAGAATGAAGCCGTGTTTGTGCAGTACCTGGATGTG
GGCCTGTGGCATCTGGCCTTCTACAATGATGGAAAAGACAAAGAGATGGTTTCCTTCAATACTGTTGT
CCTAGATTCAGTGCAGGACTGTCCACGTAACTGCCATGGGAATGGTGAATGTGTGTCCGGGGTGTGTC
ACTGTTTCCCAGGATTTCTAGGAGCAGACTGTGCTAAAGCTGCCTGCCCTGTCCTGTGCAGTGGGAAT
GGACAATATTCTAAAGGGACGTGCCAGTGCTACAGCGGCTGGAAAGGTGCAGAGTGCGACGTGCCCAT
GAATCAGTGCATCGATCCTTCCTGCGGGGGCCACGGCTCCTGCATTGATGGGAACTGTGTCTGCTCTG
CTGGCTACAAAGGCGAGCACTGTGAGGAAGTTGATTGCTTGGATCCCACCTGCTCCAGCCACGGAGTC
TGTGTGAATGGAGAATGCCTGTGCAGCCCTGGCTGGGGTGGTCTGAACTGTGAGCTGGCGAGGGTCCA
GTGCCCAGACCAGTGCAGTGGGCATGGCACGTACCTGCCTGACACGGGCCTCTGCAGCTGCGATCCCA
ACTGGATGGGTCCCGACTGCTCTGTTGTGTGCTCAGTAGACTGTGGCACTCACGGCGTCTGCATCGGG
GGAGCCTGCCGCTGTGAAGAGGGCTGGACAGGCGCAGCGTGTGACCAGCGCGTGTGCCACCCCCGCTG
CATTGAGCACGGGACCTGTAAAGATGGCAAATGTGAATGCCGAGAGGGCTGGAATGGTGAACACTGCA
CCATTGATGGCTGCCCTGACTTGTGCAACGGTAACGGGAGATGCACACTGGGTCAGAACAGCTGGCAG
TGTGTCTGCCAGACCGGCTGGAGAGGGCCCGGATGCAACGTTGCCATGGAAACTTCCTGTGCTGATAA
CAAGGATAATGAGGGAGATGGACTCATTGACTGCATGGATCCCGATTGCTGCCTACAGAGTTCCTGCC
AGAATCAGCCCTATTGTCGGGGACTGCCGGATCCTCAGGACATCATTAGCCAAAGCCTTCAATCGCCT
TCTCAGCAAGCTGCCAAATCCTTTTATGATCGAATCAGTTTCCTTATAGGATCTGATAGCACCCATGT
TATACCTGGAGAAAGTCCTTTCAATAGCTTGGTTTCTCTCATCCGAGGCCAAGTAGTAACTACAGATG
GAACTCCCCTGGTCGGTGTGAACGTGTCTTTTGTCAAGTACCCAAAATACGGCTACACCATCACCCGC
CAGGATGGCACGTACTCCCTCTCCAGGTTCGACCTGATCGCAAATGGAGGTGCTTCCTTGACTCTACA
CTTTGAGCGAGCCCCGTTCATGAGCCAGGAGCGCACTGTGTGGCTGCCGTGGAACAGCTTTTACGCCA
TGGACACCCTGGTGATGAAGACCGAGGAGAACTCCATCCCCAGTTGTGACCTCAGTGGTTTTTGTCGG
CTTGATCCCATCATCATCTCCTCCCCTCTGTCCACTTTCTTTAGTGCTGCCCCTGGGCAGAATCCCAT
CGTGCCTGAGACCCAGGTACTTCATGAAGAAATCGAGCTCCCTGGTTCCAATGTGAAACTTCGCTATC
TGAGCTCTAGAACTGCAGGGTACAAGTCACTGCTGAAGATCACCATGACCCAGTCCACAGTGCCCCTG
AACCTCATTAGGGTTCACCTGATGGTGGCTGTCGAGGGGCATCTCTTCCAGAAGTCATTCCAGGCTTC
TCCCAACCTGGCCTACACCTTCATCTGGGACAAGACAGATGCGTATGGCCAAAGGGTGTATGGACTCT
CAGATGCTGTTGGTATGTTTTGGTTTCAAAGGACAGCCCTCCTTCAGGGATTCGAGCTGGACCCCTCC
AACCTCGGTGGCTGGTCCCTAGACAAACACCACATCCTCAATGTTAAAAGTGGTATCCTACACAAAGG
CACTGGGGAAAACCAGTTCCTGACCCAGCAGCCTGCCATCATCACCAGCATCATGGGCAATGGTCGCC
GCCGGAGCATTTCCTGTCCCAGCTGCAACGGCCTTGCTGAAGGCAACAAGCTGCTGGCCCCAGTGGCT
CTGGCTGTTGGAATCGATGGGAGCCTCTATGTGGGTGACTTCAATTACATCCGACGCATCTTTCCCTC
TCGAAATGTGACCAGCATCTTGGAGTTACGGAGAAATAAAGAGTTTAAACATAGCAACAACCCAGCAC
ACAAGTACTACTTGGCAGTGGACCCCGTGTCCGGCTCGCTCTACGTGTCCGACACCAACAGCAGGAGA
ATCTACCGCGTCAAGTCTCTGAGTGGAACCAAAGACCTGGCTGGGAATTCGGAAGTTGTGGCAGGGAC
GGGAGAGCAGTGTCTACCCTTTGATGAAGCCCGCTGCGGGGATGGAGGGAAGGCCATAGATGCAACCC
TGATGAGCCCGAGAGGTATTGCAGTAGACAAGAATGGGCTCATGTACTTTGTCGATGCCACCATGATC
CGGAAGGTTGACCAGAATGGAATCATCTCCACCCTGCTGGGCTCCAATGACCTCACTGCCGTCCGGCC
GCTGAGCTGTGATTCCAGCATGGATGTAGCCCAAGTTCGTCTGGAGTGGCCAACAGACCTTGCTGTCA
ATCCCATGGATAACTCCTTGTATGTTCTAGAGAACAATGTCATCCTTCGAATCACCGAGAACCACCAA
GTCAGCATCATTGCGGGACGCCCCATGCACTGCCAAGTTCCTGGCATTGACTACTCACTCAGCAAACT
AGCCATTCACTCTGCCCTGGAGTCAGCCAGTGCCATTGCCATTTCTCACACTGGGGTCCTCTACATCA
CTGAGACAGATGAGAAGAAGATTAACCGTCTACGCCAGGTAACAACCAACGGGGAGATCTGCCTTTTA
GCTGGGGCAGCCTCGGACTGCGACTGCAAAAACGATGTCAATTGCAACTGCTATTCAGGAGATGATGC
CTACGCGACTGATGCCATCTTGAATTCCCCATCATCCTTAGCTGTAGCTCCAGATGGTACCATTTACA
TTGCAGACCTTGGAAATATTCGGATCAGGGCGGTCAGCAAGAACAAGCCTGTTCTTAATGCCTTCAAC
CAGTATGAGGCTGCATCCCCCGGAGAGCAGGAGTTATATGTTTTCAACGCTGATGGCATCCACCAATA
CACTGTGAGCCTGGTGACAGGGGAGTACTTGTACAATTTCACATATAGTACTGACAATGATGTCACTG
AATTGATTGACAATAATGGGAATTCCCTGAAGATCCGTCGGGACAGCAGTGGCATGCCCCGTCACCTG
CTCATGCCTGACAACCAGATCATCACCCTCACCGTGGGCACCAATGGAGGCCTCAAAGTCGTGTCCAC
ACAGAACCTGGAGCTTGGTCTCATGACCTATGATGGCAACACTGGGCTCCTGGCCACCAAGAGCGATG
AAACAGGATGGACGACTTTCTATAGCTATGACCACGAAGGCCGCCTGACCAACGTGACGCGCCCCACG
GGGGTGGTAACCAGTCTGCACCGGGAAATGGAGAAATCTATTACCATTGACATTGAGAACTCCAACCG
TGATGATGACGTCACTGTCATCACCAACCTCTCTTCAGTAGAGGCCTCCTACACAGTGGTACAAGATC
AAGTTCGGAACAGCTACCAGCTCTGTAATAATGGTACCCTGAGGGTGATGTATGCTAATGGGATGGGT
ATCAGCTTCCACAGCGAGCCCCATGTCCTAGCGGGCACCATCACCCCCACCATTGGACGCTGCAACAT
CTCCCTGCCTATGGAGAATGGCTTPAACTCCATTGAGTGGCGCCTAAGAPAGGAACAGATTAAAGGCA
AAGTCACCATCTTTGGCAGGAAGCTCGAGGTCCATGGAAGAAATCTCTTGTCCATTGACTATGATCGA
AATATTCGGACTGAAAAGATCTATGATGACCACCGGAAGTTCACCCTGAGGATCATTTATGACCAGGT
GGGCCGCCCCTTCCTCTGGCTGCCCAGCAGCGGGCTGGCAGCTGTCAACGTGTCATACTTCTTCAATG
GGCGCCTGGCTGGGCTTCAGCGTGGGGCCATGAGCGAGAGGACAGACATCGACAAGCAAGGCCGCATC
GTGTCCCGCATGTTCGCTGACGGGAAAGTGTGGAGCTACTCCTACCTTGACAAGATGGTCCTCCTGCT
TCAGAGCCAACGTCAGTATATATTTGAGTATGACTCCTCTGACCGCCTCCTTGCCGTCACCATGCCCA
GCGTGGCCCGGCACAGCATGTCCACACACACCTCCATCGGCTACATCCGTAATATTTACAACCCGCCT
GAAAGCAATGCTTCGGTCATCTTTGACTACAGTGATGACGGCCGCATCCTGAAGACCTCCTTTTTGGG
CACCGGACGCCAGGTGTTCTACAAGTATGGGAAACTCTCCAAGTTATCAGAGATTGTCTACGACAGTA
CCGCCGTCACCTTCGGGTATGACGAGACCACTGGTGTCTTGAAGATGGTCAACCTCCAAAGTGGGGGC
TTCTCCTGCACCATCAGGTACCGGAAGATTGGCCCCCTGGTGGACAAGCAGATCTACAGGTTCTCCGA
GGAAGGCATGGTCAATGCCAGGTTTGACTACACCTATCATGACAACAACTTCCGCATCGCAAGCATCA
AGCCCGTCATAAGTGAGACTCCCCTCCCCGTTGACCTCTACCGCTATGATGAGATTTCTGGCAAGGTG
GAACACTTTGGTAAGTTTGGAGTCATCTATTATGACATCAACCAGATCATCACCACTGCCGTGATGAC
CCTCAGCAAACACTTCGACACCCATGGGCGGATCAAGGAGGTCCAGTATGAGATGTTCCGGTCCCTCA
TGTACTGGATGACGGTGCAATATGACAGCATGGGCAGGGTGATCAAGAGGGAGCTAAAACTGGGGCCC
TATGCCAATACCACGAAGTACACCTATGACTACGATGGGGACGGGCAGCTCCAGAGCGTGCCGGCCGT
CAATGACCGCCCGACCTGGCGCTACAGCTATGACCTTAATGGGAATCTCCACTTACTGAACCCAGGCA
ACAGTGTGCGCCTCATGCCCTTGCGCTATGACCTCCGGGATCGGATAACCAGACTCGGGGATGTGCAG
TACAAAATTGACGACGATGGCTATCTGTGCCAGAGAGGGTCTGACATCTTCGAATACAATTCCAAGGG
CCTCCTAACAAGAGCCTACAACAAGGCCAGCGGGTGGAGTGTCCAGTACCGCTATGATGGCGTAGGAC
GGCGGGCTTCCTACAAGACCAACCTGGGCCACCACCTGCAGTACTTCTACTCTGACCTCCACAACCCG
ACGCGCATCACCCATGTCTACAATCACTCCAACTCGGAGATTACCTCACTGTACTACGACCTCCAGGG
CCACCTCTTTGCCATGGAGAGCAGCAGTGGGGAGGAGTACTATGTTGCCTCTGATAACACAGGGACTC
CTCTGGCTGTGTTCAGCATCAACGGCCTCATGATCAAACAGCTGCAGTACACGGCCTATGGGGAGATT
TATTATGACTCCAACCCCGACTTCCAGATGGTCATTGGCTTCCATGGGGGACTCTATGACCCCCTGAC
CAAGCTGGTCCACTTCACTCAGCGTGATTATGATGTGCTGGCAGGACGATGGACCTCCCCAGACTATA
CCATGTGGAAAAACGTGGGCAAGGAGCCGGCCCCCTTTAACCTGTATATGTTCAAGAGCAACAATCCT
CTCAGCAGTGAGCTAGATTTGAAGAACTACGTGACAGATGTGAAAAGCTGGCTTGTGATGTTTGGATT
TCAGCTTAGCAACATCATTCCTGGCTTCCCGAGAGCCAAAATGTATTTCGTGCCTCCTCCCTATGAAT
TGTCAGAGAGTCAAGCAAGTGAGAATGGACAGCTCATCACAGGTGCCCACCAGACAACAGAGAGACAT
AACCAGGCTTTCATGGCTCTGGAAGGACAGGTCATTACTAkAAAGCTCCACGCCAGCATCCGAGAGAA
AGCAGGTCATTGGTTTGCCACCACCACGCCCATCATTGGCAAAGGCATCATGTTTGCCATCAAAGAAG
GGCGGGTGACCACGGGCGTGTCCAGCATCGCCAGCGAAGATAGCCGCAAGGTGGCATCTGTGCTGAAC
AACGCCTACTACCTGGACAAGATGCACTACAGCATCGAGGGCAAGGACACCCACTACTTTGTGAAGAT
TGGCTCAGCCGATGGCGACCTGGTCACACTAGGCACCACCATCGGCCGCAAGGTGCTAGAGAGCGGGG
TGAACGTGACCGTGTCCCAGCCCACGCTGCTGGTCAACGGCAGGACTCGAAGGTTCACGAACATTGAG
TTCCAGTACTCCACGCTGCTGCTCAGCATCCGCTATGGCCTCACCCCCGACACCCTGGACGAAGAGAA
GGCCCGCGTCCTGGACCAGGCGAGACAGAGGGCCCTGGGCACGGCCTGGGCCAAGGAGCAGCAGAAAG
CCAGGGACGGGAGAGAGGGGAGCCGCCTGTGGACTGAGGGCGAGAAGCAGCAGCTTCTGAGCACCGGG
CGCGTGCAAGGGTACGAGGGATATTACGTGCTTCCCGTGGAGCAATACCCAGAGCTTGCAGACAGTAG
CAGCAACATCCAGTTTTTAAGACAGAATGAGATGGGAAAGAGGTAACAAAATAATCTGCTGCCATTCC
TTGTCTGAATGGCTCAGCAGGAGTAACTGTTATCTCCTCTCCTAAGGAGATGAAGACCTAACAGGGGC
ACTGCGG

| | | | |
|---|---|---|---|
| NOV7ab, CG50426-24 | SEQ ID NO: 168 | 2759 aa | MW at 306902.2kD |
| Protein Sequence | | | |

MDVKERRPYCSLTKSRREKERRYTNSSADNEECRVPTQKSYSSSETLKAFDHDSSRLLYGNRVKDLVH
READEFTRQSRMHYGNRVTDLIHRESDEFPRQGILHQGYSLSTGSDADSDTEGGMSPEHAIRLWGRGI
KSRRSSGLSSRENSALTLTDSDNENKSDDENGRPIPRTSSRSLLPFVQLPSSHNPPPVSCQMPLLDSN
TSHQIMDTNPDEEFSPNSYLLRACSGPQQASSSGPPNHHSQSTLRPPLPPPHNHTLSHHHSSANSLNR
NSLTNPRSQIHAPAPAPNDLATTPESVQLQDSWVLNSNVPLETRHFLFKTSSGSTPLFSSSSPGYPLT
SGTVYTPPPRLLPRNTFSRKAFKLKKPSKYCSWKCAALSAIAAALLLAILLAYFAAMHLLGLNWQLQP
ADGHTFNNGIRTGLPGNDDVATMPSGGKVPWSLKNSSIDSGEAEVGRRVTQEVPPGVFWRSQIHISQP
QFLKFNISLGKDALFGVYIRRGLPPSHAQYDFMERLDGKEKWSVVESPRERRSIQTLVQNEAVFVQYL
DVGLWHLAFYNDGKDKEMVSFNTVVLDSVQDCPRNCHGNGECVSGVCHCFPGFLGADCAKAACPVLCS
GNGQYSKGTCQCYSGWKGAECDVPMNQCIDPSCGGHGSCIDGNCVCSAGYKGEHCEEVDCLDPTCSSH
GVCVNGECLCSPGWGGLNCELARVQCPDQCSGHGTYLPDTGLCSCDPNWMGPDCSVVCSVDCGTHGVC
IGGACRCEEGWTGAACDQRVCHPRCIEHGTCKDGKCECREGWNGEHCTIDGCPDLCNGNGRCTLGQNS
WQCVCQTGWRGPGCNVAMETSCADNKDNEGDGLIDCMDPDCCLQSSCQNQPYCRGLPDPQDIISQSLQ
SPSQQAAKSFYDRISFLIGSDSTHVIPGESPFNSLVSLIRGQVVTTDGTPLVGVNVSFVKYPKYGYTI
TRQDGTYSLSRFDLIANGGASLTLHFERAPFMSQERTVWLPWNSFYAMDTLVMKTEENSIPSCDLSGF
CRLDPIIISSPLSTFFSAAPGQNPIVPETQVLHEEIELPGSNVKLRYLSSRTAGYKSLLKITMTQSTV
PLNLIRVHLMVAVEGHLFQKSFQASPNLAYTFIWDKTDAYGQRVYGLSDAVGMFWFQRTALLQGFELD
PSNLGGWSLDKHHILNVKSGILHKGTGENQFLTQQPAIITSIMGNGRRRSISCPSCNGLAEGNKLLAP
VALAVGIDGSLYVGDFNYIRRIFPSRNVTSILELRRNKEFKHSNNPAHKYYLAVDPVSGSLYVSDTNS
RRIYRVKSLSGTKDLAGNSEVVAGTGEQCLPFDEARCGDGGKAIDATLMSPRGIAVDKNGLMYFVDAT
MIRKVDQNGIISTLLGSNDLTAVRPLSCDSSMDVAQVRLEWPTDIAVNPMDNSLYVLENNVILRITEN
HQVSIIAGRPMHCQVPGIDYSLSKLAIHSALESASAIAISHTGVLYITETDEKKINRLRQVTTNGEIC
LLAGAASDCDCKNDVNCNCYSGDDAYATDATLNSPSSLAVAPDGTIYIADLGNIRIRAVSKNKPVLNA
FNQYEAASPGEQELYVFNADGIHQYTVSLVTGEYLYNFTYSTDNDVTELIDNNGNSLKIRRDSSGMPR
HLLMPDNQIITLTVGTNGGLKVVSTQNLELGLMTYDGNTGLLATKSDETGWTTFYSYDHEGRLTNVTR
PTGVVTSLHREMEKSITIDIENSNRDDDVTVITNLSSVEASYTVVQDQVRNSYQLCNNGTLRVMYANG
MGISFHSEPHVLAGTITPTIGRCNISLPMENGLNSIEWRLRKEQIKGKVTIFGRKLEVHGRNLLSIDY
DRNIRTEKIYDDHRKFTLRIIYDQVGRPFLWLPSSGLAAVNVSYFFNGRLAGLQRGAMSERTDIDKQG
RIVSRMFADGKVWSYSYLDKMVLLLQSQRQYIFEYDSSDRLLAVTMPSVARHSMSTHTSIGYIRNIYN
PPESNASVIFDYSDDGRILKTSFLGTGRQVFYKYGKLSKLSEIVYDSTAVTFGYDETTGVLKMVNLQS
GGFSCTIRYRKIGPLVDKQIYRFSEEGMVNARFDYTYHDNSFRIASIKPVISETPLPVDLYRYDEISG
KVEHFGKFGVIYYDINQIITTAVMTLSKHFDTHGRIKEVQYEMFRSLMYWMTVQYDSMGRVIKRELKL
GPYANTTKYTYDYDGDGQLQSVPAVNDRPTWRYSYDLNGNLHLLNPGNSVRLMPLRYDLRDRITRLGD
VQYKIDDDGYLCQRGSDIFEYNSKGLLTRAYNKASGWSVQYRYDGVGRRASYKTNLGHHLQYFYSDLH
NPTRITHVYNHSNSEITSLYYDLQGHLFAMESSSGEEYYVASDNTGTPLAVFSINGLMIKQLQYTAYG
EIYYDSNPDFQMVIGFHGGLYDPLTKLVHFTQRDYDVLAGRWTSPDYTMWKNVGKEPAPFNLYMFKSN
NPLSSELDLKNYVTDVKSWLVMFGFQLSNIIPGFPRAKMYFVPPPYELSESQASENGQLITGAHQTTE
RHNQAFMALEGQVITKKLHASIREKAGHWFATTTPIIGKGIMFAIKEGRVTTGVSSIASEDSRKVASV
LNNAYYLDKMHYSIEGKDTHYFVKIGSADGDLVTLGTTIGRKVLESGVNVTVSQPTLLVNGRTRRFTN
IEFQYSTLLLSIRYGLTPDTLDEEKARVLDQARQRALGTAWAKEQQKARDGREGSRLWTEGEKQQLLS
TGRVQGYEGYYVLPVEQYPELADSSSNIQFLRQNEMGKR

| | | |
|---|---|---|
| NOV7ac, CG50426-25 | SEQ ID NO: 169 | 6999 bp |
| DNA Sequence | ORF Start: at 1 | ORF Stop: end of sequence |

AAAAACAGCAGCATAGACAGTGGTGAAGCAGAAGTTGGTCGGCGGGTAACACAAGAAGTCCCACCAGG
GGTGTTTTGGAGGTCACAAATTCACATCAGTCAGCCCCAGTTCTTAAAGTTCAACATCTCCCTCGGGA
AGGACGCTCTCTTTGGTGTTTACATAAGAAGAGGACTTCCACCATCTCATGCCCAGTATGACTTCATG
GAACGTCTGGACGGGAAGGAGAAGTGGAGTGTGGTTGAGTCTCCCAGGGAACGCCGGAGCATACAGAC
CTTGGTTCAGAATGAAGCCGTGTTTGTGCAGTACCTGGATGTGGGCCTGTGGCATCTGGCCTTCTACA
ATGATGGAAAAGACAAAGAGATGGTTTCCTTCAATACTGTTGTCCTAGATTCAGTGCAGGACTGTCCA
CGTAACTGCCATGGGAATGGTGAATGTGTGTCCGGGGTGTGTCACTGTTTCCCAGGATTTCTAGGAGC
AGACTGTGCTAAAGCTGCCTGCCCTGTCCTGTGCAGTGGGAATGGACAATATTCTAAAGGGACGTGCC
AGTGCTACAGCGGCTGGAAAGGTGCAGAGTGCGACGTGCCCATGAATCAGTGCATCGATCCTTCCTGC
GGGGGCCACGGCTCCTGCATTGATGGGAACTGTGTCTGCTCTGCTGGCTACAAAGGCGAGCACTGTGA
GGAAGTTGATTGCTTGGATCCCACCTGCTCCAGCCACGGAGTCTGTGTGAATGGAGAATGCCTGTGCA
GCCCTGGCTGGGGTGGTCTGAACTGTGAGCTGGCGAGGGTCCAGTGCCCAGACCAGTGCAGTGGGCAT
GGCACGTACCTGCCTGACACGGGCCTCTGCAGCTGCGATCCCAACTGGATGGGTCCCGACTGCTCTGT
TGAAGTGTGCTCAGTAGACTGTGGCACTCACGGCGTCTGCATCGGGGGAGCCTGCCGCTGTGAAGAGG
GCTGGACAGGCGCAGCGTGTGACCAGCGCGTGTGCCACCCCCGCTGCATTGAGCACGGGACCTGTAAA
GATGGCAAATGTGAATGCCGAGAGGGCTGGAATGGTGAACACTGCACCATTGGTAGGCAAACGGCAGG
CACCGAAACAGATGGCTGCCCTGACTTGTGCAACGGTAACGGGAGATGCACACTGGGTCAGAACAGCT
GGCAGTGTGTCTGCCAGACCGGCTGGAGAGGGCCCGGATGCAACGTTGCCATGGAAACTTCCTGTGCT
GATAACAAGGATAATGAGGGAGATGGCCTGGTGGATTGTTTGGACCCTGACTGCTGCCTGCAGTCAGC
CTGTCAGAACAGCCTGCTCTGCCGGGGGTCCCGGGACCCACTGGACATCATTCAGCAGGGCCAGACGG
ATTGGCCCGCAGTGAAGTCCTTCTATGACCGTATCAAGCTCTTGGCAGGCAAGGATAGCACCCACATC
ATTCCTGGAGAGAACCCTTTCAACAGCAGCTTGGTTTCTCTCATCCGAGGCCAAGTAGTAACTACAGA
TGGAACTCCCCTGGTCGGTGTGAACGTGTCTTTTGTCAAGTACCCAAAATACGGCTACACCATCACCC
GCCAGGATGGCACGTTCGACCTGATCGCAAATGGAGGTGCTTCCTTGACTCTACACTTTGAGCGAGCC
CCGTTCATGAGCCAGGAGCGCACTGTGTGGCTGCCGTGGAACAGCTTTTACGCCATGGACACCCTGGT
GATGAAGACCGAGGAGAACTCCATCCCCAGCTGTGACCTCAGTGGCTTTGTCCGGCCTGATCCAATCA
TCATCTCCTCCCCACTGTCCACCTTCTTTAGTGCTGCCCCTGGGCAGAATCCCATCGTGCCTGAGACC
CAGGTTCTTCATGAAGAAATCGAGCTCCCTGGTTCCAATGTGAAACTTCGCTATCTGAGCTCTAGAAC
TGCAGGGTACAAGTCACTGCTGAAGATCACCATGACCCAGTCCACAGTGCCCCTGAACCTCATTAGGG
TTCACCTGATGGTGGCTGTCGAGGGGCATCTCTTCCAGAAGTCATTCCAGGCTTCTCCCAACCTGGCC
GTCTGTCGGGTTTGAATATGAGACCTGTCCCAGTCTAATTCTCTGGGAGAAAAGGACAGCCCTCCTTC
AGGGATTCGAGCTGGACCCCTCCAACCTCGGTGGCTGGTCCCTAGACAAACACCACATCCTCAATGTT
AAAAGTGGAATCCTACACAAAGGCACTGGGGAAAACCAGTTCCTGACCCAGCAGCCTGCCATCATCAC
CAGCATCATGGGCAATGGTCGCCGCCGGAGCATTTCCTGTCCCAGCTGCAACGGCCTTGCTGAAGGCA
ACAAGCTGCTGGCCCCAGTGGCTCTGGCTGTTGGAATCGATGGGAGCCTCTATGTGGGTGACTTCAAT
TACATCCGACGCATCTTTCCCTCTCGAAATGTGACCAGCATCTTGGAGTTACGAAATAAAGAGTTTAA
ACATAGCAACAACCCAGCACACAAGTACTACTTGGCAGTGGACCCCGTGTCCGGCTCGCTCTACGTGT
CCGACACCAACAGCAGGAGAATCTACCGCGTCAAGTCTCTGAGTGGAACCAAAGACCTGGCTGGGAAT
TCGGAAGTTGTGGCAGGGACGGGAGAGCAGTGTCTACCCTTTGATGAAGCCCGCTGCGGGGATGGAGG
GAAGGCCATAGATGCAACCCTGATGAGCCCGAGAGGTATTGCAGTAGACAAGAATGGGCTCATGTACT
TTGTCGATGCCACCATGATCCGGAAGGTTGACCAGAATGGAATCATCTCCACCCTGCTGGGCTCCAAT
GACCTCACTGCCGTCCGGCCGCTGAGCTGTGATTCCAGCATGGATGTAGCCCAGGTTCGTCTGGAGTG
GCCAACAGACCTTGCTGTCAATCCCATGGATAACTCCTTGTATGTTCTAGAGAACAATGTCATCCTTC
GAATCACCGAGAACCACCAAGTCAGCATCATTGCGGGACGCCCCATGCACTGCCAAGTTCCTGGCATT
GACTACTCACTCAGCAAACTAGCCATTCACTCTGCCCTGGAGTCAGCCAGTGCCATTGCCATTTCTCA
CACTGGGGTCCTCTACATCACTGAGACAGATGAGAAGAAGATTAACCGTCTACGCCAGGTAACAACCA
ACGGGGAGATCTGCCTTTTAGCTGGGGCAGCCTCGGACTGCGACTGCAAAAACGATGTCAATTGCAAC
TGCTATTCAGGAGATGATGCCTACGCGACTGATGCCATCTTGAATTCCCCATCATCCTTAGCTGTAGC
TCCAGATGGTACCATTTACATTGCAGACCTTGGAAATATTCGGATCAGGGCGGTCAGCAAGAACAAGC
CTGTTCTTAATGCCTTCAACCAGTATGAGGCTGCATCCCCCGGAGAGCAGGAGTTATATGTTTTCAAC
GCTGATGGCATCCACCAATACACTGTGAGCCTGGTGACAGGGGAGTACTTGTACAATTTCACATATAG
TACTGACAATGATGTCACTGAATTGATTGACAATAATGGGAATTCCCTGAAGATCCGTCGGGACAGCA
GTGGCATGCCCCGTCACCTGCTCATGCCTGACAACCAGATCATCACCCTCACCGTGGGCACCAATGGA
GGCCTCAAAGTCGTGTCCACACAGAACCTGGAGCTTGGTCTCATGACCTATGATGGCAACACTGGGCT
CCTGGCCACCAAGAGCGATGAAACAGGATGGACGACTTTCTATGACTATGACCACGAAGGCCGCCTGA
CCAACGTGACGCGCCCCACGGGGGTGGTAACCAGTCTGCACCGGGAAATGGAGAAATCTATTACCATT
GACATTGAGAACTCCAACCGTGATGATGACGTCACTGTCATCACCAACCTCTCTTCAGTAGAGGCCTC
CTACACAGTGGTACAAGATCAAGTTCGGAACAGCTACCAGCTCTGTAATAATGGTACCCTGAGGGTGA
TGTATGCTAATGGGATGGGTATCAGCTTCCACAGCGAGCCCCATGTCCTAGCGGGCACCATCACCCCC
ACCATTGGACGCTGCAACATCTCCCTGCCTATGGAGAATGGCTTAAACTCCATTGAGTGGCGCCTAAG
AAAGGAACAGATTAAAGGCAAAGTCACCATCTTTGGCAGGAAGCTCCGGGTCCATGGAAGAAATCTCT
TGTCCATTGACTATGATCGAAATATTCGGACTGAAAAGATCTATGATGACCACCGGAAGTTCACCCTG
AGGATCATTTATGACCAGGTGGGCCGCCCCTTCCTCTGGCTGCCCAGCAGCGGGCTGGCAGCTGTCAA
CGTGTCATACTTCTTCAATGGGCGCCTGGCTGGGCTTCAGCGTGGGGCCATGAGCGAGAGGACAGACA
TCGACAAGCAAGGCCGCATCGTGTCCCGCATGTTCGCTGACGGGAAAGTGTGGAGCTACTCCTACCTT
GACAAGTCCATGGTCCTCCTGCTTCAGAGCCAACGTCAGTATATATTTGAGTATGACTCCTCTGACCG
CCTCCTTGCCGTCACCATGCCCAGCGTGGCCCGGCACAGCATGTCCACACACACCTCCATCGGCTACA
TCCGTAATATTTACAACCCGCCTGAAAGCAATGCTTCGGTCATCTTTGACTACAGTGATGACGGCCGC
ATCCTGAAGACCTCCTTTTTGGGCACCGGACGCCAGGTGTTCTACAAGTATGGGAAACTCTCCAAGTT
ATCAGAGATTGTCTACGACAGTACCGCCGTCACCTTCGGGTATGACGAGACCACTGGTGTCTTGAAGA
TGGTCAACCTCCAAAGTGGGGGCTTCTCCTGCACCATCAGGTACCGGAAGATTGGCCCCCTGGTGGAC
AAGCAGATCTACAGGTTCTCCGAGGAAGGCATGGTCAATGCCAGGTTTGACTACACCTATCATGACAA
CAGCTTCCGCATCGCAAGCATCAAGCCCGTCATAAGTGAGACTCCCCTCCCCGTTGACCTCTACCGCT
ATGATGAGATTTCTGGCAAGGTGGAACACTTTGGTAAGTTTGGAGTCATCTATTATGACATCAACCAG
ATCATCACCACTGCCGTGATGACCCTCAGCAAACACTTCGACACCCATGGGCGGATCAAGGAGGTCCA
GTATGAGATGTTCCGGTCCCTCATGTACTGGATGACGGTGCAATATGACAGCATGGGCAGGGTGATCA
AGAGGGAGCTAAAACTGGGGCCCTATGCCAATACCACGAAGTACACCTATGACTACGATGGGGACGGG
CAGCTCCAGAGCGTGGCCGTCAATGACCGCCCGACCTGGCGCTACAGCTATGACCTTAATGGGAATCT
CCACTTACTGAACCCAGGCAACAGTGTGCGCCTCATGCCCTTGCGCTATGACCTCCGGGATCGGATAA
CCAGACTCGGGGATGTGCAGTACAAAATTGACGACGATGGCTATCTGTGCCAGAGAGGGTCTGACATC
TTCGAATACAATTCCAAGGGCCTCCTAACAAGAGCCTACAACAAGGCCAGCGGGTGGAGTGTCCAGTA
CCGCTATGATGGCGTAGGACGGCGGGCTTCCTACAAGACCAACCTGGGCCACCACCTGCAGTACTTCT
ACTCTGACCTCCACAACCCGACGCGCATCACCCATGTCTACAATCACTCCAACTCGGAGATTACCTCA
CTGTACTACGACCTCCAGGGCCACCTCTTTGCCATGGAGAGCAGCAGTGGGGAGGAGTACTATGTTGC
CTCTGATAACACAGGGACTCCTCTGGCTGTGTTCAGCATCAACGGCCTCATGATCAAACAGCTGCAGT
ACACGGCCTATGGGGAGATTTATTATGACTCCAACCCCGACTTCCAGATGGTCATTGGCTTCCATGGG
GGACTCTATGACCCCCTGACCAAGCTGGTCCACTTCACTCAGCGTGATTATGATGTGCTGGCAGGACG
ATGGACCTCCCCAGACTATACCATGTGGAAAAACGTGGGCAAGGAGCCGGCCCCCTTTAACCTGTATA
TGTTCAAGAGCAACAATCCTCTCAGCAGTGAGCTAGATTTGAAGAACTACGTGACAGATGTGAAAAGC
TGGCTTGTGATGTTTGGATTTCAGCTTAGCAACATCATTCCTGGCTTCCCGAGAGCCAAAATGTATTT
CGTGCCTCCTCCCTATGAATTGTCAGAGAGTCAAGCAAGTGAGAATGGACAGCTCATTACAGGTGTCC
AACAGACAACAGAGAGACATAACCAGGCCTTCATGGCTCTGGAAGGACAGGTCATTACTAAAAAGCTC
CACGCCAGCATCCGAGAGAAAGCAGGTCACTGGTTTGCCACCACCACGCCCATCATTGGCAAAGGCAT
CATGTTTGCCATCAAAGAAGGGCGGGTGACCACGGGCGTGTCCAGCATCGCCAGCGAAGATAGCCGCA
AGGTGGCATCTGTGCTGAACAACGCCTACTACCTGGACAAGATGCACTACAGCATCGAGGGCAAGGAC
ACCCACTACTTTGTGAAGATTGGCTCAGCCGATGGCGACCTGGTCACACTAGGCACCACCATCGGCCG
CAAGGTGCTAGAGAGCGGGGTGAACGTGACCGTGTCCCAGCCCACGCTGCTGGTCAACGGCAGGACTC
GAAGGTTCACGAACATTGAGTTCCAGTACTCCACGCTGCTGCTCAGCATCCGCTATGGCCTCACCCCC
GACACCCTGGACGAAGAGAAGGCCCGCGTCCTGGACCAGGCGAGACAGAGGGCCCTGGGCACGGCCTG
GGCCAAGGAGCAGCAGAAAGCCAGGGACGGGAGAGAGGGGAGCCGCCTGTGGACTGAGGGCGAGAAGC
AGCAGCTTCTGAGCACCGGGCGCGTGCAAGGGTACGAGGGATATTACGTGCTTCCCGTGGAGCAATAC
CCAGAGCTTGCAGACAGTAGCAGCAACATCCAGTTTTTAAGACAGAATGAGATGGGAAAGAGG

| | | | |
|---|---|---|---|
| NOV7ac, CG50426-25 | SEQ ID NO: 170 | 2333 aa | MW at 259545.2kD |
| Protein Sequence | | | |

KNSSIDSGEAEVGRRVTQEVPPGVFWRSQIHISQPQFLKFNISLGKDALFGVYIRRGLPPSHAQYDFM
ERLDGKEKWSVVESPRERRSIQTLVQNEAVFVQYLDVGLWHLAFYNDGKDKEMVSFNTVVLDSVQDCP
RNCHGNGECVSGVCHCFPGFLGADCAKAACPVLCSGNGQYSKGTCQCYSGWKGAECDVPMNQCIDPSC
GGHGSCIDGNCVCSAGYKGEHCEEVDCLDPTCSSHGVCVNGECLCSPGWGGLNCELARVQCPDQCSGH
GTYLPDTGLCSCDPNWMGPDCSVEVCSVDCGTHGVCIGGACRCEEGWTGAACDQRVCHPRCIEHGTCK
DGKCECREGWNGEHCTIGRQTAGTETDGCPDLCNGNGRCTLGQNSWQCVCQTGWRGPGCNVAMETSCA
DNKDNEGDGLVDCLDPDCCLQSACQNSLLCRGSRDPLDIIQQGQTDWPAVKSFYDRIKLLAGKDSTHI
IPGENPFNSSLVSLIRGQVVTTDGTPLVGVNVSFVKYPKYGYTITRQDGTFDLIANGGASLTLHFERA
PFMSQERTVWLPWNSFYAMDTLVMKTEENSIPSCDLSGFVRPDPIIISSPLSTFFSAAPGQNPIVPET
QVLHEEIELPGSNVKLRYLSSRTAGYKSLLKITMTQSTVPLNLIRVHLMVAVEGHLFQKSFQASPNLA
STFIWDKTDAYGQRVYGLSDAVVSVGFEYETCPSLILWEKRTALLQGFELDPSNLGGWSLDKHHILNV
KSGILHKGTGENQFLTQQPAIITSIMGNGRRRSISCPSCNGLAEGNKLLAPVALAVGIDGSLYVGDFN
YIRRIFPSRNVTSILELRNKEFKHSNNPAHKYYLAVDPVSGSLYVSDTNSRRIYRVKSLSGTKDLAGN
SEVVAGTGEQCLPFDEARCGDGGKAIDATLMSPRGIAVDKNGLMYFVDATMIRKVDQNGIISTLLGSN
DLTAVRPLSCDSSMDVAQVRLEWPTDLAVNPMDNSLYVLENNVILRITENHQVSIIAGRPMHCQVPGI
DYSLSKLAIHSALESASAIAISHTGVLYITETDEKKINRLRQVTTNGEICLLAGAASDCDCKNDVNCN
CYSGDDAYATDAILNSPSSLAVAPDGTIYIADLGNIRIRAVSKNKPVLNAFNQYEAASPGEQELYVFN
ADGIHQYTVSLVTGEYLYNFTYSTDNDVTELIDNNGNSLKIRRDSSGMPRHLLMPDNQIITLTVGTNG
GLKVVSTQNLELGLMTYDGNTGLLATKSDETGWTTFYDYDHEGRLTNVTRPTGVVTSLHREMEKSITI
DIENSNRDDDVTVITNLSSVEASYTVVQDQVRNSYQLCNNGTLRVMYANGMGISFHSEPHVLAGTITP
TIGRCNISLPMENGLNSIEWRLRKEQIKGKVTIFGRKLRVHGRNLLSIDYDRNIRTEKIYDDHRKFTL
RIIYDQVGRPFLWLPSSGLAAVNVSYFFNGRLAGLQRGAMSERTDIDKQGRIVSRMFADGKVWSYSYL
DKSMVLLLQSQRQYIFEYDSSDRLLAVTMPSVARHSMSTHTSIGYIRNIYNPPESNASVIFDYSDDGR
ILKTSFLGTGRQVFYKYGKLSKLSEIVYDSTAVTFGYDETTGVLKMVNLQSGGFSCTIRYRKIGPLVD
KQIYRFSEEGMVNARFDYTYHDNSFRIASIKPVISETPLPVDLYRYDEISGKVEHFGKFGVIYYDINQ
IITTAVMTLSKHFDTHGRIKEVQYEMFRSLMYWMTVQYDSMGRVIKRELKLGPYANTTKYTYDYDGDG
QLQSVAVNDRPTWRYSYDLNGNLHLLNPGNSVRLMPLRYDLRDRITRLGDVQYKIDDDGYLCQRGSDI
FEYNSKGLLTRAYNKASGWSVQYRYDGVGRPASYKTNLGHHLQYFYSDLHNPTRITHVYNHSNSEITS
LYYDLQGHLFAMESSSGEEYYVASDNTGTPLAVFSINGLMIKQLQYTAYGEIYYDSNPDFQMVIGFHG
GLYDPLTKLVHFTQRDYDVLAGRWTSPDYTMWKNVGKEPAPFNLYMFKSNNPLSSELDLKNYVTDVKS
WLVMFGFQLSNIIPGFPRAKMYFVPPPYELSESQASENGQLITGVQQTTERHNQAFMALEGQVITKKL
HASIREKAGHWFATTTPIIGKGIMFAIKEGRVTTGVSSIASEDSRKVASVLNNAYYLDKMHYSIEGKD
THYFVKIGSADGDLVTLGTTIGRKVLESGVNVTVSQPTLLVNGRTRRFTNIEFQYSTLLLSIRYGLTP
DTLDEEKARVLDQARQRALGTAWAKEQQKARDGREGSRLWTEGEKQQLLSTGRVQGYEGYYVLPVEQY
PELADSSSNIQFLRQNEMGKR

| | | |
|---|---|---|
| NOV7ad, SNP13375665 of | SEQ ID NO: 171 | 2478 bp |
| 1CG50426-15, DNA Sequence | ORF Start: at 1 | ORF Stop: end of sequence |
| | SNP Pos: 799 | SNP Change: G to A |

AAAAACAGCAGCATAGACAGTGGTGAAGCAGAAGTTGGTCGGCGGGTAACACAAGAAGTCCCACCAGG
GGTGTTTTGGAGGTCACAAATTCACATCAGTCAGCCCCAGTTCTTAAAGTTCAACATCTCCCTCGGGA
AGGACGCTCTCTTTGGTGTTTACATAAGAAGAGGACTTCCACCATCTCATGCCCAGTATGACTTCATG
GAACGTCTGGACGGGAAGGAGAAGTGGAGTGTGGTTGAGTCTCCCAGGGAACGCCGGAGCATACAGAC
CTTGGTTCAGAATGAAGCCGTGTTTGTGCAGTACCTGGATGTGGGCCTGTGGCATCTGGCCTTCTACA
ATGATGGAAAAGACAAAGAGATGGTTTCCTTCAATACTGTTGTCCTAGATTCAGTGCAGGACTGTCCA
CGTAACTGCCATGGGAATGGTGAATGTGTGTCCGGGGTGTGTCACTGTTTCCCAGGATTTCTAGGAGC
AGACTGTGCTAAAGCTGCCTGCCCTGTCCTGTGCAGTGGGAATGGACAATATTCTAAAGGGACGTGCC
AGTGCTACAGCGGCTGGAAAGGTGCAGAGTGCGACGTGCCCATGAATCAGTGCATCGATCCTTCCTGC
GGGGGCCACGGCTCCTGCATTGATGGGAACTGTGTCTGCTCTGCTGGCTACAAAGGCGAGCACTGTGA
GGAAGTTGATTGCTTGGATCCCACCTGCTCCAGCCACGGAGTCTGTGTGAATGGAGAATGCCTGTGCA
GCCCTGGCTGGGGTGGTCTGAACTGTGAGCTGGCGAGGGTCCAGTGCCCAAACCAGTGCAGTGGGCAT
GGCACGTACCTGCCTGACACGGGCCTCTGCAGCTGCGATCCCAACTGGATGGGTCCCGACTGCTCTGT
TGAAGTGTGCTCAGTAGACTGTGGCACTCACGGCGTCTGCATCGGGGGAGCCTGCCGCTGTGAAGAGG
GCTGGACAGGCGCAGCGTGTGACCAGCGCGTGTGCCACCCCCGCTGCATTGAGCACGGGACCTGTAAA
GATGGCAAATGTGAATGCCGAGAGGGCTGGAATGGTGAACACTGCACCATTGGTAGGCAAACGGCAGG
CACCGAAACAGATGGCTGCCCTGACTTGTGCAACGGTAACGGGAGATGCACACTGGGTCAGAACAGCT
GGCAGTGTGTCTGCCAGACCGGCTGGAGAGGGCCCGGATGCAACGTTGCCATGGAAACTTCCTGTGCT
GATAACAAGGATAATGAGGGAGATGGCCTGGTGGATTGTTTGGACCCTGACTGCTGCCTGCAGTCAGC
CTGTCAGAACAGCCTGCTCTGCCGGGGGTCCCGGGACCCACTGGACATCATTCAGCAGGGCCAGACGG
ATTGGCCCGCAGTGAAGTCCTTCTATGACCGTATCAAGCTCTTGGCAGGCAAGGATAGCACCCACATC
ATTCCTGGAGAGAACCCTTTCAACAGCAGCTTGGTTTCTCTCATCCGAGGCCAAGTAGTAACTACAGA
TGGAACTCCCCTGGTCGGTGTGAACGTGTCTTTTGTCAAGTACCCAAAATACGGCTACACCATCACCC
GCCAGGATGGCACGTTCGACCTGATCGCAAATGGAGGTGCTTCCTTGACTCTACACTTTGAGCGAGCC
CCGTTCATGAGCCAGGAGCGCACTGTGTGGCTGCCGTGGAACAGCTTTTACGCCATGGACACCCTGGT
GATGAAGACCGAGGAGAACTCCATCCCCAGCTGTGACCTCAGTGGCTTTGTCCGGCCTGATCCAATCA
TCATCTCCTCCCCACTGTCCACCTTCTTTAGTGCTGCCCCTGGGCAGAATCCCATCGTGCCTGAGACC
CAGGTTCTTCATGAAGAAATCGAGCTCCCTGGTTCCAATGTGAAACTTCGCTATCTGAGCTCTAGAAC
TGCAGGGTACAAGTCACTGCTGAAGATCACCATGACCCAGTCCACAGTGCCCCTGAACCTCATTAGGG
TTCACCTGATGGTGGCTGTCGAGGGGCATCTCTTCCAGAAGTCATTCCAGGCTTCTCCCAACCTGGCC
TCCACCTTCATCTGGGACAAGACAGATGCGTATGGCCAAAGGGTGTATGGACTCTCAGATGCTGTTGT
GTCTGTCGGGTTTGAATATGAGACCTGTCCCAGTCTAATTCTCTGGGAGAAAAGGACAGCCCTCCTTC
AGGGATTCGAGCTGGACCCCTCCAACCTCGGTGGCTGGTCCCTAGACAAACACCACATCCTCAATGTT
AAAAGTGGAATCCTACACAAAGGCACTGGGGAAAACCAGTTCCTGACCCAGCAGCCTGCCATCATCAC
CAGCATCATGGGCAATGGTCGCCGCCGGAGCATTTCCTGTCCCAGCTGCAACGGCCTTGCTGAAGGCA
ACAAGCTGCTGGCCCCAGTGGCTCTGGCTGTTGGAATCGATGGGAGCCTCTATGTGGGTGACTTCAAT
TACATCCGACGCATCTTTCCCTCTCGAAAT

| | | | |
|---|---|---|---|
| NOV7ad, SNP13375665 of | SEQ ID NO: 172 | 826 aa | MW at 89832.6kD |
| CG50426-15, Protein | SNP Pos: 267 | SNP Change: Asp to Asn | |
| Sequence | | | |

KNSSIDSGEAEVGRRVTQEVPPGVFWRSQIHISQPQFLKFNISLGKDALFGVYIRRGLPPSHAQYDFM
ERLDGKEKWSVVESPRERRSIQTLVQNEAVFVQYLDVGLWHLAFYNDGKDKEMVSFNTVVLDSVQDCP
RNCHGNGECVSGVCHCFPGFLGADCAKAACPVLCSGNGQYSKGTCQCYSGWKGAECDVPMNQCIDPSC
GGHGSCIDGNCVCSAGYKGEHCEEVDCLDPTCSSHGVCVNGECLCSPGWGGLNCELARVQCPNQCSGH
GTYLPDTGLCSCDPNWMGPDCSVEVCSVDCGTHGVCIGGACRCEEGWTGAACDQRVCHPRCIEHGTCK
DGKCECREGWNGEHCTIGRQTAGTETDGCPDLCNGNGRCTLGQNSWQCVCQTGWRGPGCNVAMETSCA
DNKDNEGDGLVDCLDPDCCLQSACQNSLLCRGSRDPLDIIQQGQTDWPAVKSFYDRIKLLAGKDSTHI
IPGENPFNSSLVSLIRGQVVTTDGTPLVGVNVSFVKYPKYGYTITRQDGTFDLIANGGASLTLHFERA
PFMSQERTVWLPWNSFYAMDTLVMKTEENSIPSCDLSGFVRPDPIIISSPLSTFFSAAPGQNPIVPET
QVLHEEIELPGSNVKLRYLSSRTAGYKSLLKITMTQSTVPLNLIRVHLMVAVEGHLFQKSFQASPNLA
STFIWDKTDAYGQRVYGLSDAVVSVGFEYETCPSLILWEKRTALLQGFELDPSNLGGWSLDKHHILNV
KSGILHKGTGENQFLTQQPAIITSIMGNGRRRSISCPSCNGLAEGNKLLAPVALAVGIDGSLYVGDFN
YIRRIFPSRN

| | | |
|---|---|---|
| NOV7ae, SNP13375213 of | SEQ ID NO: 173 | 2478 bp |
| CG50426-15, DNA Sequence | ORF Start: at 1 | ORF Stop: end of sequence |
| | SNP Pos: 1751 | SNP Change: T to C |

AAAAACAGCAGCATAGACAGTGGTGAAGCAGAAGTTGGTCGGCGGGTAACACAAGAAGTCCCACCAGG
GGTGTTTTGGAGGTCACAAATTCACATCAGTCAGCCCCAGTTCTTAAAGTTCAACATCTCCCTCGGGA
AGGACGCTCTCTTTGGTGTTTACATAAGAAGAGGACTTCCACCATCTCATGCCCAGTATGACTTCATG
GAACGTCTGGACGGGAAGGAGAAGTGGAGTGTGGTTGAGTCTCCCAGGGAACGCCGGAGCATACAGAC
CTTGGTTCAGAATGAAGCCGTGTTTGTGCAGTACCTGGATGTGGGCCTGTGGCATCTGGCCTTCTACA
ATGATGGAAAAGACAAAGAGATGGTTTCCTTCAATACTGTTGTCCTAGATTCAGTGCAGGACTGTCCA
CGTAACTGCCATGGGAATGGTGAATGTGTGTCCGGGGTGTGTCACTGTTTCCCAGGATTTCTAGGAGC
AGACTGTGCTAAAGCTGCCTGCCCTGTCCTGTGCAGTGGGAATGGACAATATTCTAAAGGGACGTGCC
AGTGCTACAGCGGCTGGAAAGGTGCAGAGTGCGACGTGCCCATGAATCAGTGCATCGATCCTTCCTGC
GGGGGCCACGGCTCCTGCATTGATGGGAACTGTGTCTGCTCTGCTGGCTACAAAGGCGAGCACTGTGA
GGAAGTTGATTGCTTGGATCCCACCTGCTCCAGCCACGGAGTCTGTGTGAATGGAGAATGCCTGTGCA
GCCCTGGCTGGGGTGGTCTGAACTGTGAGCTGGCGAGGGTCCAGTGCCCAGACCAGTGCAGTGGGCAT
GGCACGTACCTGCCTGACACGGGCCTCTGCAGCTGCGATCCCAACTGGATGGGTCCCGACTGCTCTGT
TGAAGTGTGCTCAGTAGACTGTGGCACTCACGGCGTCTGCATCGGGGGAGCCTGCCGCTGTGAAGAGG
GCTGGACAGGCGCAGCGTGTGACCAGCGCGTGTGCCACCCCCGCTGCATTGAGCACGGGACCTGTAAA
GATGGCAAATGTGAATGCCGAGAGGGCTGGAATGGTGAACACTGCACCATTGGTAGGCAAACGGCAGG
CACCGAAACAGATGGCTGCCCTGACTTGTGCAACGGTAACGGGAGATGCACACTGGGTCAGAACAGCT
GGCAGTGTGTCTGCCAGACCGGCTGGAGAGGGCCCGGATGCAACGTTGCCATGGAAACTTCCTGTGCT
GATAACAAGGATAATGAGGGAGATGGCCTGGTGGATTGTTTGGACCCTGACTGCTGCCTGCAGTCAGC
CTGTCAGAACAGCCTGCTCTGCCGGGGGTCCCGGGACCCACTGGACATCATTCAGCAGGGCCAGACGG
ATTGGCCCGCAGTGAAGTCCTTCTATGACCGTATCAAGCTCTTGGCAGGCAAGGATAGCACCCACATC
ATTCCTGGAGAGAACCCTTTCAACAGCAGCTTGGTTTCTCTCATCCGAGGCCAAGTAGTAACTACAGA
TGGAACTCCCCTGGTCGGTGTGAACGTGTCTTTTGTCAAGTACCCAAAATACGGCTACACCATCACCC
GCCAGGATGGCACGTTCGACCTGATCGCAAATGGAGGTGCTTCCTTGACTCTACACTTTGAGCGAGCC
CCGTTCATGAGCCAGGAGCGCACTGTGTGGCTGCCGTGGAACAGCTTTTACGCCATGGACACCCTGGT
GATGAAGACCGAGGAGAACTCCATCCCCAGCTGTGACCTCAGTGGCTTTGCCCGGCCTGATCCAATCA
TCATCTCCTCCCCACTGTCCACCTTCTTTAGTGCTGCCCCTGGGCAGAATCCCATCGTGCCTGAGACC
CAGGTTCTTCATGAAGAAATCGAGCTCCCTGGTTCCAATGTGAAACTTCGCTATCTGAGCTCTAGAAC
TGCAGGGTACAAGTCACTGCTGAAGATCACCATGACCCAGTCCACAGTGCCCCTGAACCTCATTAGGG
TTCACCTGATGGTGGCTGTCGAGGGGCATCTCTTCCAGAAGTCATTCCAGGCTTCTCCCAACCTGGCC
TCCACCTTCATCTGGGACAAGACAGATGCGTATGGCCAAAGGGTGTATGGACTCTCAGATGCTGTTGT
GTCTGTCGGGTTTGAATATGAGACCTGTCCCAGTCTAATTCTCTGGGAGAAAAGGACAGCCCTCCTTC
AGGGATTCGAGCTGGACCCCTCCAACCTCGGTGGCTGGTCCCTAGACAAACACCACATCCTCAATGTT
AAAAGTGGAATCCTACACAAAGGCACTGGGGAAAACCAGTTCCTGACCCAGCAGCCTGCCATCATCAC
CAGCATCATGGGCAATGGTCGCCGCCGGAGCATTTCCTGTCCCAGCTGCAACGGCCTTGCTGAAGGCA
ACAAGCTGCTGGCCCCAGTGGCTCTGGCTGTTGGAATCGATGGGAGCCTCTATGTGGGTGACTTCAAT
TACATCCGACGCATCTTTCCCTCTCGAAAT

| | | | |
|---|---|---|---|
| NOV7ae, SNP13375213 of | SEQ ID NO: 174 | 826 aa | MW at 89805.5kD |
| CG50426-15, Protein | SNP Pos: 584 | SNP Change: Val to Ala | |
| Sequence | | | |

KNSSIDSGEAEVGRRVTQEVPPGVFWRSQIHISQPQFLKFNISLGKDALFGVYIRRGLPPSHAQYDFM
ERLDGKEKWSVVESPRERRSIQTLVQNEAVFVQYLDVGLWHLAFYNDGKDKEMVSFNTVVLDSVQDCP
RNCHGNGECVSGVCHCFPGFLGADCAKAACPVLCSGNGQYSKGTCQCYSGWKGAECDVPMNQCIDPSC
GGHGSCIDGNCVCSAGYKGEHCEEVDCLDPTCSSHGVCVNGECLCSPGWGGLNCELARVQCPDQCSGH
GTYLPDTGLCSCDPNWMGPDCSVEVCSVDCGTHGVCIGGACRCEEGWTGAACDQRVCHPRCIEHGTCK
DGKCECREGWNGEHCTIGRQTAGTETDGCPDLCNGNGRCTLGQNSWQCVCQTGWRGPGCNVAMETSCA
DNKDNEGDGLVDCLDPDCCLQSACQNSLLCRGSRDPLDIIQQGQTDWPAVKSFYDRIKLLAGKDSTHI
IPGENPFNSSLVSLIRGQVVTTDGTPLVGVNVSFVKYPKYGYTITRQDGTFDLIANGGASLTLHFERA
PFMSQERTVWLPWNSFYAMDTLVMKTEENSIPSCDLSGFARPDPIIISSPLSTFFSAAPGQNPIVPET
QVLHEEIELPGSNVKLRYLSSRTAGYKSLLKITMTQSTVPLNLIRVHLMVAVEGHLFQKSFQASPNLA
STFIWDKTDAYGQRVYGLSDAVVSVGFEYETCPSLILWEKRTALLQGFELDPSNLGGWSLDKHHILNV
KSGILHKGTGENQFLTQQPAIITSIMGNGRRRSISCPSCNGLAEGNKLLAPVALAVGIDGSLYVGDFN
YIRRIFPSRN

| | | |
|---|---|---|
| NOV7af, SNP13374985 of | SEQ ID NO: 175 | 2478 bp |
| CG50426-15, DNA Sequence | ORF Start: at 1 | ORF Stop: end of sequence |
| | SNP Pos: 2322 | SNP Change: G to A |

AAAAACAGCAGCATAGACAGTGGTGAAGCAGAAGTTGGTCGGCGGGTAACACAAGAAGTCCCACCAGG
GGTGTTTTGGAGGTCACAAATTCACATCAGTCAGCCCCAGTTCTTAAAGTTCAACATCTCCCTCGGGA
AGGACGCTCTCTTTGGTGTTTACATAAGAAGAGGACTTCCACCATCTCATGCCCAGTATGACTTCATG
GAACGTCTGGACGGGAAGGAGAAGTGGAGTGTGGTTGAGTCTCCCAGGGAACGCCGGAGCATACAGAC
CTTGGTTCAGAATGAAGCCGTGTTTGTGCAGTACCTGGATGTGGGCCTGTGGCATCTGGCCTTCTACA
ATGATGGAAAAGACAAAGAGATGGTTTCCTTCAATACTGTTGTCCTAGATTCAGTGCAGGACTGTCCA
CGTAACTGCCATGGGAATGGTGAATGTGTGTCCGGGGTGTGTCACTGTTTCCCAGGATTTCTAGGAGC
AGACTGTGCTAAAGCTGCCTGCCCTGTCCTGTGCAGTGGGAATGGACAATATTCTAAAGGGACGTGCC
AGTGCTACAGCGGCTGGAAAGGTGCAGAGTGCGACGTGCCCATGAATCAGTGCATCGATCCTTCCTGC
GGGGGCCACGGCTCCTGCATTGATGGGAACTGTGTCTGCTCTGCTGGCTACAAAGGCGAGCACTGTGA
GGAAGTTGATTGCTTGGATCCCACCTGCTCCAGCCACGGAGTCTGTGTGAATGGAGAATGCCTGTGCA
GCCCTGGCTGGGGTGGTCTGAACTGTGAGCTGGCGAGGGTCCAGTGCCCAGACCAGTGCAGTGGGCAT
GGCACGTACCTGCCTGACACGGGCCTCTGCAGCTGCGATCCCAACTGGATGGGTCCCGACTGCTCTGT
TGAAGTGTGCTCAGTAGACTGTGGCACTCACGGCGTCTGCATCGGGGGAGCCTGCCGCTGTGAAGAGG
GCTGGACAGGCGCAGCGTGTGACCAGCGCGTGTGCCACCCCCGCTGCATTGAGCACGGGACCTGTAAA
GATGGCAAATGTGAATGCCGAGAGGGCTGGAATGGTGAACACTGCACCATTGGTAGGCAAACGGCAGG
CACCGAAACAGATGGCTGCCCTGACTTGTGCAACGGTAACGGGAGATGCACACTGGGTCAGAACAGCT
GGCAGTGTGTCTGCCAGACCGGCTGGAGAGGGCCCGGATGCAACGTTGCCATGGAAACTTCCTGTGCT
GATAACAAGGATAATGAGGGAGATGGCCTGGTGGATTGTTTGGACCCTGACTGCTGCCTGCAGTCAGC
CTGTCAGAACAGCCTGCTCTGCCGGGGGTCCCGGGACCCACTGGACATCATTCAGCAGGGCCAGACGG
ATTGGCCCGCAGTGAAGTCCTTCTATGACCGTATCAAGCTCTTGGCAGGCAAGGATAGCACCCACATC
ATTCCTGGAGAGAACCCTTTCAACAGCAGCTTGGTTTCTCTCATCCGAGGCCAAGTAGTAACTACAGA
TGGAACTCCCCTGGTCGGTGTGAACGTGTCTTTTGTCAAGTACCCAAAATACGGCTACACCATCACCC
GCCAGGATGGCACGTTCGACCTGATCGCAAATGGAGGTGCTTCCTTGACTCTACACTTTGAGCGAGCC
CCGTTCATGAGCCAGGAGCGCACTGTGTGGCTGCCGTGGAACAGCTTTTACGCCATGGACACCCTGGT
GATGAAGACCGAGGAGAACTCCATCCCCAGCTGTGACCTCAGTGGCTTTGTCCGGCCTGATCCAATCA
TCATCTCCTCCCCACTGTCCACCTTCTTTAGTGCTGCCCCTGGGCAGAATCCCATCGTGCCTGAGACC
CAGGTTCTTCATGAAGAAATCGAGCTCCCTGGTTCCAATGTGAAACTTCGCTATCTGAGCTCTAGAAC
TGCAGGGTACAAGTCACTGCTGAAGATCACCATGACCCAGTCCACAGTGCCCCTGAACCTCATTAGGG
TTCACCTGATGGTGGCTGTCGAGGGGCATCTCTTCCAGAAGTCATTCCAGGCTTCTCCCAACCTGGCC
TCCACCTTCATCTGGGACAGACAGATGCGTATGGCCAAAAGGGTGTATGGACTCTCAGATGCTGTTGT
GTCTGTCGGGTTTGAATATGAGACCTGTCCCAGTCTAATTCTCTGGGAGAAAAGGACAGCCCTCCTTC
AGGGATTCGAGCTGGACCCCTCCAACCTCGGTGGCTGGTCCCTAGACAAACACCACATCCTCAATGTT
AAAAGTGGAATCCTACACAAAGGCACTGGGGAAAACCAGTTCCTGACCCAGCAGCCTGCCATCATCAC
CAGCATCATAGGCAATGGTCGCCGCCGGAGCATTTCCTGTCCCAGCTGCAACGGCCTTGCTGAAGGCA
ACAAGCTGCTGGCCCCAGTGGCTCTGGCTGTTGGAATCGATGGGAGCCTCTATGTGGGTGACTTCAAT
TACATCCGACGCATCTTTCCCTCTCGAAAT

| | | | |
|---|---|---|---|
| NOV7af, SNP13374985 of | SEQ ID NO: 176 | 826 aa | MW at 89815.5kD |
| CG50426-15, Protein | SNP Pos: 774 | | SNP Change: Met to Ile |
| Sequence | | | |

KNSSIDSGEAEVGRRVTQEVPPGVFWRSQIHISQPQFLKFNISLGKDALFGVYIRRGLPPSHAQYDFM
ERLDGKEKWSVVESPRERRSIQTLVQNEAVFVQYLDVGLWHLAFYNDGKDKEMVSFNTVVLDSVQDCP
RNCHGNGECVSGVCHCFPGFLGADCAKAACPVLCSGNGQYSKGTCQCYSGWKGAECDVPMNQCIDPSC
GGHGSCIDGNCVCSAGYKGEHCEEVDCLDPTCSSHGVCVNGECLCSPGWGGLNCELARVQCPDQCSGH
GTYLPDTGLCSCDPNWMGPDCSVEVCSVDCGTHGVCIGGACRCEEGWTGAACDQRVCHPRCIEHGTCK
DGKCECREGWNGEHCTIGRQTAGTETDGCPDLCNGNGRCTLGQNSWQCVCQTGWRGPGCNVAMETSCA
DNKDNEGDGLVDCLDPDCCLQSACQNSLLCRGSRDPLDIIQQGQTDWPAVKSFYDRIKLLAGKDSTHI
IPGENPFNSSLVSLIRGQVVTTDGTPLVGVNVSFVKYPKYGYTITRQDGTFDLIANGGASLTLHFERA
PFMSQERTVWLPWNSFYAMDTLVMKTEENSIPSCDLSGFVRPDPIIISSPLSTFFSAAPGQNPIVPET
QVLHEEIELPGSNVKLRYLSSRTAGYKSLLKITMTQSTVPLNLIRVHLMVAVEGHLFQKSFQASPNLA
STFIWDKTDAYGQRVYGLSDAVVSVGFEYETCPSLILWEKRTALLQGFELDPSNLGGWSLDKHHILNV
KSGILHKGTGENQFLTQQPAIITSIIGNGRRRSISCPSCNGLAEGNKLLAPVALAVGIDGSLYVGDFN
YIRRIFPSRN

[0387] A ClustalW comparison of the above protein sequences yields the following sequence alignment shown in Table 7B.

TABLE 7B
Comparison of the NOV7 protein sequences.

| | |
|---|---|
| NOV7a | ------------------------------------------------------------ |
| NOV7b | ------------------------------------------------------------ |
| NOV7c | ------------------------------------------------------------ |
| NOV7d | ------------------------------------------------------------ |
| NOV7e | ------------------------------------------------------------ |
| NOV7f | ------------------------------------------------------------ |
| NOV7g | ------------------------------------------------------------ |
| NOV7h | ------------------------------------------------------------ |
| NOV7i | ------------------------------------------------------------ |
| NOV7j | ------------------------------------------------------------ |
| NOV7k | ------------------------------------------------------------ |
| NOV7l | ------------------------------------------------------------ |
| NOV7m | ------------------------------------------------------------ |
| NOV7n | ------------------------------------------------------------ |
| NOV7o | ------------------------------------------------------------ |
| NOV7p | ------------------------------------------------------------ |
| NOV7q | MDVKDRRHRSLTRGRCGKECRYTSSSLDSEDCRVPTQKSYSSSETLKAYDHDSRNHYGNR |
| NOV7r | ------------------------------------------------------------ |
| NOV7s | ------------------------------------------------------------ |
| NOV7t | ------------------------------------------------------------ |
| NOV7u | ------------------------------------------------------------ |
| NOV7v | ------------------------------------------------------------ |
| NOV7w | ------------------------------------------------------------ |
| NOV7x | ------------------------------------------------------------ |
| NOV7y | ------------------------------------------------------------ |
| NOV7z | ------------------------------------------------------------ |
| NOV7aa | ------------------------------------------------------------ |
| NOV7ab | ------------------------------------------------------------ |
| NOV7ac | ------------------------------------------------------------ |
| NOV7a | ------------------------------------------------------------ |
| NOV7b | ------------------------------------------------------------ |
| NOV7c | ------------------------------------------------------------ |
| NOV7d | ------------------------------------------------------------ |
| NOV7e | ------------------------------------------------------------ |
| NOV7f | ------------------------------------------------------------ |
| NOV7g | ------------------------------------------------------------ |
| NOV7h | ------------------------------------------------------------ |
| NOV7i | ------------------------------------------------------------ |
| NOV7j | ------------------------------------------------------------ |
| NOV7k | ------------------------------------------------------------ |
| NOV7l | ------------------------------------------------------------ |
| NOV7m | ------------------------------------------------------------ |
| NOV7n | ------------------------------------------------------------ |
| NOV7O | ------------------------------------------------------------ |
| NOV7p | ------------------------------------------------------------ |
| NOV7q | VTDLIHRESDEFPRQGTNFTTAELGICEPSPHRSGYCSDMGILHQGYSLSTGSDADSDTE |
| NOV7r | ------------------------------------------------------------ |
| NOV7s | ------------------------------------------------------------ |
| NOV7t | ------------------------------------------------------------ |
| NOV7u | ------------------------------------------------------------ |
| NOV7v | ------------------------------------------------------------ |
| NOV7w | ------------------------------------------------------------ |
| NOV7x | ------------------------------------------------------------ |
| NOV7y | ------------------------------------------------------------ |
| NOV7z | ------------------------------------------------------------ |
| NOV7aa | ------------------------------------------------------------ |
| NOV7ab | ------------------------------------------------------------ |
| NOV7ac | ------------------------------------------------------------ |
| NOV7a | ------------------------------------------------------------ |
| NOV7b | --------------------------MDVKDRRHRSLTRGRCGKECRYTSSSLDSEDCRV |
| NOV7c | ------------------------------------------------------------ |
| NOV7d | ------------------------------------------------------------ |
| NOV7e | ------------------------------------------------------------ |
| NOV7f | ------------------------------------------------------------ |
| NOV7g | ------------------------------------------------------------ |
| NOV7h | ------------------------------------------------------------ |
| NOV7i | ------------------------------------------------------------ |
| NOV7j | ------------------------------------------------------------ |
| NOV7k | ------------------------------------------------------------ |
| NOV7l | ------------------------------------------------------------ |
| NOV7m | ------------------------------------------------------------ |
| NOV7n | ------------------------------------------------------------ |
| NOV7o | ------------------------------------------------------------ |
| NOV7p | ------------------------------------------------------------ |
| NOV7q | GGMSPEHAIRLWGRGIKSRRSSGLSSRENSALTLTDSDNENKSDDENGRPIPPTSSPSLL |
| NOV7r | ------------------------------------------------------------ |
| NOV7s | ------------------------------------------------------------ |
| NOV7t | ------------------------------------------------------------ |
| NOV7u | ------------------------------------------------------------ |
| NOV7v | ------------------------------------------------------------ |
| NOV7w | ------------------------------------------------------------ |
| NOV7x | ------------------------------------------------------------ |
| NOV7y | ------------------------------------------------------------ |
| NOV7z | ------------------------------------------------------------ |
| NOV7aa | ------------------------------------------------------------ |
| NOV7ab | --------------------------MDVKERRPYCSLTKSRREKERRYTNSSADNEECR |
| NOV7ac | ------------------------------------------------------------ |
| NOV7a | ------------------------------------------------------------ |
| NOV7b | PTQKSYSSSETLKAYDHDSRMHYGNRVTDLIHRESDEFPRQGTNFTLAELGICEPSPHRS |
| NOV7c | ------------------------------------------------------------ |
| NOV7d | ------------------------------------------------------------ |
| NOV7e | ------------------------------------------------------------ |
| NOV7f | ------------------------------------------------------------ |
| NOV7g | ------------------------------------------------------------ |
| NOV7h | ------------------------------------------------------------ |
| NOV7i | ------------------------------------------------------------ |
| NOV7j | ------------------------------------------------------------ |
| NOV7k | ------------------------------------------------------------ |
| NOV7l | -------MDVKDRRHRSLTRGRCGKECRYTSSSLDSEDCRVPTQKSYSSSETLKAYDHDS |
| NOV7m | ------------------------------------------------------------ |
| NOV7n | ------------------------------------------------------------ |
| NOV7o | ------------------------------------------------------------ |
| NOV7p | ------------------------------------------------------------ |
| NOV7q | PSAQLPSSHNPPPVSCQMPLLDSNTSHQIMDTNPDEEFSPNSYLLRACSGPQQASSSGPP |
| NOV7r | -------MDVKDRRHRSLTRGRCGKECRYTSSSLDSEDCRVPTQKSYSSSETLKAYDHDS |
| NOV7s | -------MDVKDRRHRSLTRGRCGKECRYTSSSLDSEDCRVPTQKSYSSSETLKAYDHDS |
| NOV7t | ------------------------------------------------------------ |
| NOV7u | -------MDVKDRRHRSLTRGRCGKECRYTSSSLDSEDCRVPTQKSYSSSETLKAYDHDS |
| NOV7v | ------------------------------------------------------------ |
| NOV7w | ------------------------------------------------------------ |
| NOV7x | ------------------------------------------------------------ |
| NOV7y | ------------------------------------------------------------ |
| NOV7z | ------------------------------------------------------------ |
| NOV7aa | ------------------------------------------------------------ |
| NOV7ab | VPTQKSYSSSETLKAFDHDSSRLLYGNRVKDLVHREADEFTRQSRMHYGNRVTDLIHRES |
| NOV7ac | ------------------------------------------------------------ |
| NOV7a | ------------------------------------------------------------ |
| NOV7b | GYCSDMGILHQGYSLSTGSDADSDTEGGMSPEHAIRLWGRGIKSRRSSGLSSRENSALTL |
| NOV7c | ------------------------------------------------------------ |
| NOV7d | ------------------------------------------------------------ |
| NOV7e | ------------------------------------------------------------ |
| NOV7f | ------------------------------------------------------------ |
| NOV7g | ------------------------------------------------------------ |
| NOV7h | ------------------------------------------------------------ |
| NOV7i | ------------------------------------------------------------ |
| NOV7j | ------------------------------------------------------------ |
| NOV7k | ------------------------------------------------------------ |
| NOV7l | RMHYGNRVTDLIHRESDEFPRQGTNFTLAELGICEPSPHRSGYCSDMGILHQGYSLSTGS |
| NOV7m | ------------------------------------------------------------ |
| NOV7n | ------------------------------------------------------------ |
| NOV7o | ----MDVKDRRHRSLTRGRCGKECRYTSSSLDSEDCRVPTQKSYSSSETLKAYDHDSRMH |
| NOV7p | ------------------------------------------------------------ |
| NOV7q | NHHSQSTLRPPLPPPHNHTLSHHHSSANSLNRNSLTNRRSQIHAPAPAPNDLATTPESVQ |
| NOV7r | RMHYGNRVTDLIHRESDEFPRQGTNFTLAELGICEPSPHRSGYCSDMGILHQGYSLSTGS |
| NOV7s | RNHYGNRVTDLIHRESDEFPRQGTNFTLAELGICEPSPHRSGYCSDMGILHQGYSLSTGS |
| NOV7t | ------------------------------------------------------------ |
| NOV7u | RMHYGNRVTDLIHRESDEFPRQGTNFTLAELGICEPSPHRSGYCSDMGILHQGYSLSTGS |
| NOV7v | ------------------------------------------------------------ |
| NOV7w | ------------------------------------------------------------ |
| NOV7x | ------------------------------------------------------------ |
| NOV7y | ------------------------------------------------------------ |
| NOV7z | ------------------------------------------------------------ |
| NOV7aa | ------------------------------------------------------------ |
| NOV7ab | DEFPRQGTLHQGYSLSTGSDADSDTEGGMSPEHAIRLWGRGIKSRRSSGLSSRENSALTL |
| NOV7ac | ------------------------------------------------------------ |
| NOV7a | ------------------MDVKDRRHRSLTRGRCGKECRYTSSSLDSEDCRVPTQKSYSS |
| NOV7b | TDSDNENKSDDENGRPIPPTSSPSLLPSAQLPSSHNPPPVSCQMPLLDSNTSHQIMDTNP |
| NOV7c | ------------------------------------------------------------ |
| NOV7d | ------------------------------------------------------------ |
| NOV7e | ------------------------------------------------------------ |
| NOV7f | ------------------------------------------------------------ |
| NOV7g | ------------------------------------------------------------ |
| NOV7h | ------------------------------------------------------------ |
| NOV7i | ------------------------------------------------------------ |
| NOV7j | ------------------------------------------------------------ |
| NOV7k | ------------------------------------------------------------ |
| NOV7l | DADSDTEGGNSPEHAIRLWGRGIKSRRSSGLSSRENSALTLTDSDNENKSDDENGRPIPP |
| NOV7m | ------------------------------------------------------------ |
| NOV7n | ------------------------------------------------------------ |
| NOV7o | YGNRVTDLIHRESDEFPRQGTNFTLAELGICEPSPHRSGYCSDMGILHQGYSLSTGSDAD |
| NOV7p | ------------------------------------------------------------ |
| NOV7q | LQDSWVLNSNVPLETRHFLFKTSSGSTPLFSSSSPGYPLTSGTVYTPPPRLLPRNTFSRK |
| NOV7r | DADSDTEGGMSPEHAIRLWGRGIKSRRSSGLSSRENSALTLTDSDNENKSDDENGRPIPP |
| NOV7s | DADSDTEGGMSPEHAIRLWGRGIKSRRSSGLSSRENSALTLTDSDNENKSDDENGRPIPP |
| NOV7t | ------------------------------------------------------------ |
| NOV7u | DADSDTEGGMSPEHAIRLWGRGIKSRRSSGLSSRENSALTLTDSDNENKSDDENGRPIPP |
| NOV7v | ------------------------------------------------------------ |
| NOV7w | ------------------------------------------------------------ |
| NOV7x | ------------------------------------------------------------ |
| NOV7y | ------------------------------------------------------------ |
| NOV7z | ------------------------------------------------------------ |
| NOV7aa | ------------------------------------------------------------ |
| NOV7ab | TDSDNENKSDDENGRPIPRTSSRSLLPFVQLPSSHNPPPVSCQMPLLDSNTSHQIMDTNP |
| NOV7ac | ------------------------------------------------------------ |
| NOV7a | SETLKAYDHDSRMHYGNRVTDLIHRESDEFPRQGTNFTLAELGICEPSPHRSGYCSDMGI |
| NOV7b | DEEFSPNSYLLRACSGPQQASSSGPPNHHSQSTLRPPLPPPHNHTLSHHHSSANSLNPNS |
| NOV7c | ----------------------------------------KNSSIDSGEAEVGRRVTQEV |
| NOV7d | -------------------------------------TKLKNSSIDSGEAEVGRRVTQEV |
| NOV7e | ------------------------------------------------------------ |
| NOV7f | ------------------------------------------------------------ |
| NOV7g | ------------------------------------------------------------ |
| NOV7h | ------------------------------------------------------------ |
| NOV7i | ------------------------------------------------------------ |
| NOV7j | ------------------------------------------------------------ |
| NOV7k | ------------------------------------------------------------ |
| NOV7l | TSSPSLLPSAQLPSSHNPPPVSCQMPLLDSNTSHQIMDTNPDEEFSPNSYLLRACSGPQQ |
| NOV7m | ------------------------------------------------------------ |
| NOV7n | ------------------------------------------------------------ |
| NOV7o | SDTEGGMSPEHAIRLWGRGIKSRRSSGLSSRBNSALTLTDSDNENKSDDENGRPIPPTSS |
| NOV7p | ------------------------------------------------------------ |
| NOV7q | AFKLKKPSKYCSWKCAALSAIAAALLLAILLAYFIVPWSLKNSSIDSGEAEVGRRVTQEV |
| NOV7r | TSSPSLLPSAQLPSSHNPPPVSCQMPLLDSNTSHQIMDTNPDEEFSPNSYLLRACSGPQQ |
| NOV7s | TSSPSLLPSAQLPSSHNPPPVSCQMPLLDSNTSHQIMDTNPDEEFSPNSYLLPACSGPQQ |
| NOV7t | ------------------------------------------------------------ |
| NOV7u | TSSPSLLPSAQLPSSHNPPPVSCQMPLLDSNTSHQIMDTNPDEEFSPNSYLLRACSGPQQ |
| NOV7v | ------------------------------------------------------------ |
| NOV7w | ------------------------------------------------------------ |
| NOV7x | ------------------------------------------------------------ |
| NOV7y | ------------------------------------------------------------ |
| NOV7z | ------------------------------------------------------------ |
| NOV7aa | ------------------------------------------------------------ |
| NOV7ab | DEEFSPNSYLLEACSGPQQASSSGPPNHHSQSTLRPPLPPPHNHTLSHHHSSANSLNPNS |
| NOV7ac | ------------------------------------------------------------ |
| NOV7a | LHQGYSLSTGSDADSDTEGGMSPEHAIRLWGRGIKSPRSSGLSSRENSALTLTDSDNENK |
| NOV7b | LTNRRSQIHAPAPAPNDLATTPESVQLQDSWVLNSNVPLETRHFLFKTSSGSTPLFSSSS |
| NOV7c | PPGVFWRSQIHISQPQFLKFNISLGKDALFGVYIRRGLPPSHAQYDFMERLDGKEKWSVV |
| NOV7d | PPGVFWRSQIHISQPQFLKFNISLGKDALFGVYIRRGLPPSHAQYDFMERLDGKEKWSVV |
| NOV7e | ------------------------------------------------------------ |
| NOV7f | ------------------------------------------------------------ |
| NOV7g | ------------------------------------------------TKLKNSSIDSGE |
| NOV7h | ------------------------------------------------------------ |
| NOV7i | ------------------------------------------------------------ |
| NOV7l | ------------------------------------------------------------ |
| NOV7k | ------------------------------------------------------------ |
| NOV7l | ASSSGPPNHHSQSTLRPPLPPPHNHTLSHHHSSANSLNRNSLTNRRSQIHAPAPAPNDLA |
| NOV7m | ------------------------------------------------------------ |
| NOV7n | ------------------------------------------------------------ |
| NOV7o | PSLLPSAQLPSSHNPPPVSCQMPLLDSNTSHQIMDTNPDEEFSPNSYLLRACSGPQQASS |
| NOV7p | ------------------------------------------------------------ |
| NOV7q | PPGVFWRSQIHISQPQFLKFNISLGKDALFGVYIRRGLPPSHAQYDFMERLDGKEKWSVV |
| NOV7r | ASSSGPPNHHSQSTLRPPLPPPHNHTLSHHHSSANSLNRNSLTNRRSQIHAPAPAPNDLA |
| NOV7s | ASSSGPPNHHSQSTLRPPLPPPHNHTLSHHHSSANSLNRNSLTNRRSQIHAPAPAPNDLA |
| NOV7t | ------------------------------------------------------------ |
| NOV7u | ASSSGPPNHHSQSTLRPPLPPPHNHTLSHHHSSANSLNRNSLTNRRSQIHAPAPAPNDLA |
| NOV7v | ------------------------------------------------------------ |
| NOV7w | ------------------------------------------------------------ |
| NOV7x | ------------------------------------------------------------ |
| NOV7y | ------------------------------------------------------------ |
| NOV7z | ------------------------------------------------------------ |
| NOV7aa | ------------------------------------------------------------ |
| NOV7ab | LTNRRSQIHAPAPAPNDLATTPESVQLQDSWVLNSNVPLETRHFLFKTSSGSTPLFSSSS |
| NOV7ac | ------------------------------------------------------------ |
| NOV7a | SDDENGRPIPPTSSPSLLPSAQLPSSHNPPPVSCQMPLLDSNTSHQIMDTNPDEEFSPNS |
| NOV7b | PGYPLTSGTVYTPPPRLLPRNTFSRKAFKLKKPSKYCSWKCAALSAIAAALLLAILLAYF |
| NOV7c | ESPRERRSIQTLVQNEAVFVQYLDVGLWHLAFYNDGKDKEMVSFNTVVLDSVQDCPRNCH |
| NOV7d | ESPRERRSIQTLVQNEAVFVQYLDVGLWHLAFYNDGKDKEMVSFNTVVLDSVQDCPRNCH |
| NOV7e | ------------------------------------------------------------ |
| NOV7f | ------------------------------------------------------------ |
| NOV7g | AEVGRRVTQEVPPGVFWRSQIHISQPQFLKFNISLGKDALFGVYIRRGLPPSHAQYDFME |
| NOV7h | ------------------------------------------------------------ |
| NOV7i | ---------------------------------------------MDVKDRRHRSLTRGR |
| NOV7j | ---------------------------------------------MDVKDRRHRSLTRGR |
| NOV7k | ---------------------------------------------MDVKDRRHRSLTRGR |
| NOV7l | TTPESVQLQDSWVLNSNVPLETRHFLFKTSSGSTPLFSSSSPGYPLTSGTVYTPPPRLLP |
| NOV7m | -----------------------------------KHQHSAISGIMDVKDRRHRSLTRGR |
| NOV7n | -----------------------------------KHQHSAISGIMDVKDRRHRSLTRGR |
| NOV7o | SGPPNHHSQSTLRPPLPPPHNHTLSHHHSSANSLNRNSLTNRRSQIHAPAPAPNDLATTP |
| NOV7p | -----------------------------------KHQHSAISGIMDVKDRRHRSLTRGR |
| NOV7q | ESPRERRSIQTLVQNEAVFVQYLDVGLWHLAFYNDGKDKEMVSFNTVVLDSVQDCPRNCH |
| NOV7r | TTPESVQLQDSWVLNSNVPLETRHFLFKTSSGSTPLFSSSSPGYPLTSGTVYTPPPRLLP |
| NOV7s | TTPESVQLQDSWVLNSNVPLETRHFLFKTSSGSTPLFSSSSPGYPLTSGTVYTPPPRLLP |
| NOV7t | -----------------------------------KHQHSAISGIMDVKDRRHRSLTRGR |
| NOV7u | TTPESVQLQDSWVLNSNVPLETRHFLFKTSSGSTPLFSSSSPGYPLTSGTVYTPPPRLLP |
| NOV7v | ------------------------------------------------------------ |
| NOV7w | ------------------------------------------------------------ |
| NOV7x | ------------------------------------------------------------ |
| NOV7y | ------------------------------------------------------------ |
| NOV7z | ------------------------------------------------------------ |
| NOV7aa | ------------------------------------------------------------ |
| NOV7ab | PGYPLTSGTVYTPPPRLLPRNTFSRKAFKLKKPSKYCSWKCAALSAIAAALLLAILLAYF |
| NOV7ac | ------------------------------------------------------------ |
| NOV7a | YLLRACSGPQQASSSGPPNHHSQSTLRPPLPPPHNHTLSHHHSSANSLNRNSLTNRRSQI |
| NOV7b | IAMHLLGLNWQLQPADGHTFNNGIRTGLPGNDDVATMPSGGKVPWSLKNSSIDSGEAEVG |
| NOV7c | GNGECVSGVCHCFPGFLGADCAKAACPVLCSGNGQYSKGTCQCYSGWKGAECDVPMNQCI |
| NOV7d | GNGECVSGVCHCFPGFLGADCAKAACPVLCSGNGQYSKGTCQCYSGWKGAECDVPMNQCI |
| NOV7e | --------------------------------------------TKLKNSSIDSGEAEVG |
| NOV7f | ------------------------------------------------------------ |
| NOV7g | RLDGKEKWSVVESPRERRSIQTLVQNEAVFVQYLDVGLWHLAFYNDGKDKEMVSFNTVVL |
| NOV7h | ------------------------------------------------------------ |
| NOV7i | CGKECRYTSSSLDSEDCRVPTQKSYSSSETLKAYDHDSRMHYGNRVTDLIHRESDEFPRQ |
| NOV7j | CGKECRYTSSSLDSEDCRVPTQKSYSSSETLKAYDHDSRMHYGNRVTDLIHRESDEFPRQ |
| NOV7k | CGKECRYTSSSLDSEDCRVPTQKSYSSSETLKAYDHDSRMHYGNRVTDLIHRESDEFPRQ |
| NOV7l | RNTFSRKAFKLKKPSKYCSWKCAALSAIAAALLLAILLAYFIVPWSLKNSSIDSGEAEVG |
| NOV7m | CGKECRYTSSSLDSEDCRVPTQKSYSSSETLKAYDHDSRMHYGNRVTDLIHRESDEFPRQ |
| NOV7n | CGKECRYTSSSLDSEDCRVPTQKSYSSSETLKAYDHDSRMHYGNRVTDLIHRESDEFPRQ |
| NOV7o | ESVQLQDSWVLNSNVPLETRHFLFKTSSGSTPLFSSSSPGYPLTSGTVYTPPPRLLPRNT |
| NOV7p | CGKECRYTSSSLDSEDCRVPTQKSYSSSETLKAYDHDSRMHYGNRVTDLIHRESDEFPRQ |
| NOV7q | GNGECVSGVCHCFPGFLGADCAKAACPVLCSGNGQYSKGTCQCYSGWKGAECDVPMNQCI |
| NOV7r | RNTFSRKAFKLKKPSKYCSWKCAALSAIAAALLLAILLAYFIVPWSLKNSSIDSGEAEVG |
| NOV7s | RNTFSRKAFKLKKPSKYCSWKCAALSAIAAALLLAILLAYFIVPWSLKNSSIDSGEAEVG |
| NOV7t | CGKECRYTSSSLDSEDCRVPTQKSYSSSETLKAYDHDSRMHYGNRVTDLIHRESDEFPRQ |
| NOV7u | RNTFSRKAFKLKKPSKYCSWKCAALSAIAAALLLAILLAYFIVPWSLKNSSIDSGEAEVG |
| NOV7v | -----------------------------------------------KNSSIDSGEAEVG |
| NOV7w | ------------------------------------------------------------ |
| NOV7x | ------------------------------------------------------------ |
| NOV7y | ------------------------------------------------------------ |
| NOV7z | ------------------------------------------------------------ |
| NOV7aa | ------------------------------------------------------------ |
| NOV7ab | AAMHLLGLNWQLQPADGHTFNNGIRTGLPGNDDVATMPSGGKVPWSLKNSSIDSGEAEVG |
| NOV7ac | -----------------------------------------------KNSSIDSGEAEVG |
| NOV7a | HAPAPAPNDLATTPESVQLQDSWVLNSNVPLETRHFLFKTSSGSTPLFSSSSPGYPLTSG |
| NOV7b | RRVTQEVPPGVFWRSQIHISQPQFLKFNISLGKDALFGVYIRRGLPPSHAQYDFMERLDG |
| NOV7c | DPSCGGHGSCIDGNCVCSAGYKGEHCEEVDCLDPTCSSHGVCVNGECLCSPGWGGLNCEL |
| NOV7d | DPSCGGHGSCIDGNCVCSAGYKGEHCEEVDCLDPTCSSHGVCVNGECLCSPGWGGLNCEL |
| NOV7e | RRVTQEVPPGVFWRSQIHISQPQFLKFNISLGKDALFGVYIRRGLPPSHAQYDFMERLDG |
| NOV7f | -----------------------------------------TKLKNSSIDSGEAEVGRRV |
| NOV7g | DSVQDCPRNCHGNGECVSGVCHCFPGFLGADCAKAACPVLCSGNGQYSKGTCQCYSGWKG |
| NOV7h | ------------------------------------------------------------ |
| NOV7i | GTNFTLAELGICEPSPHRSGYCSDMGILHQGYSLSTGSDADSDTEGGMSPEHAIRLWGRG |
| NOV7j | GTNFTLAELGICEPSPHRSGYCSDMGILHQGYSLSTGSDADSDTEGGMSPEHAIRLWGRG |
| NOV7k | GTNFTLAELGICEPSPHRSGYCSDMGILHQGYSLSTGSDADSDTEGGMSPEHAIRLWGRG |
| NOV7l | RRVTQEVPPGVFWRSQIHISQPQFLKFNISLGKDALFGVYIRRGLPPSHAQYDFMERLDG |
| NOV7m | GTNFTLAELGICEPSPHRSGYCSDMGILHQGYSLSTGSDADSDTEGGMSPEHAIRLWGRG |
| NOV7n | GTNFTLAELGICEPSPHRSGYCSDMGILHQGYSLSTGSDADSDTEGGMSPEHAIRLWGRG |
| NOV7o | FSRKAFKLKKPSKYCSWKCAALSAIAAALLLAILLAYFIVPWSLKNSSIDSGEAEVGRRV |
| NOV7p | GTNFTLAELGICEPSPHRSGYCSDMGILHQGYSLSTGSDADSDTEGGMSPEHAIRLWGRG |
| NOV7q | DPSCGGHGSCIDGNCVCSAGYKGEHCEEVDCLDPTCSSHGVCVNGECLCSPGWGGLNCEL |
| NOV7r | RRVTQEVPPGVFWRSQIHISQPQFLKFNISLGKDALFGVYIRRGLPPSHAQYDFMERLDG |
| NOV7s | RRVTQEVPPGVFWRSQIHISQPQFLKFNISLGKDALFGVYIRRGLPPSHAQYDFMERLDG |
| NOV7t | GTNFTLAELGICEPSPHRSGYCSDMGILHQGYSLSTGSDADSDTEGGMSPEHAIRLWGRG |
| NOV7u | RRVTQEVPPGVFWRSQIHISQPQFLKFNISLGKDALFGVYIRRGLPPSHAQYDFMERLDG |
| NOV7v | RRVTQEVPPGVFWRSQIHISQPQFLKFNISLGKDALFGVYIRRGLPPSHAQYDFMERLDG |
| NOV7w | ------------------------------------------------------------ |
| NOV7x | ------------------------------------------------------------ |
| NOV7y | ------------------------------------------------------------ |
| NOV7z | ------------------------------------------------------------ |
| NOV7aa | --------------------------------------------KNSSIDSGEAEVGRRV |
| NOV7ab | RRVTQEVPPGVFWRSQIHISQPQFLKFNISLGKDALFGVYIRRGLPPSHAQYDFMERLDG |
| NOV7ac | RRVTQEVPPGVFWRSQIHISQPQFLKFNISLGKDALFGVYIRRGLPPSHAQYDFMERLDG |
| NOV7a | TVYTPPPRLLPRNTFSRKAFKLKKPSKYCSWKCAALSAIAAALLLAILLAYFIVPWSLKN |
| NOV7b | KEKWSVVESPRERRSIQTLVQNEAVFVQYLDVGLWHLAFYNDGKDKEMVSFNTVVLDSVQ |
| NOV7c | ARVQCPDQCSGHGTYLPDTGLCSCDPNWMGPDCSVEVCSVDCGTHGVCIGGACRCEEGWT |
| NOV7d | ARVQCPDQCSGHGTYLPDTGLCSCDPNWMGPDCSVEVCSVDCGTHGVCIGGACRCEEGWT |
| NOV7e | KEKWSVVESPRERRSIQTLVQNEAVFVQYLDVGLWHLAFYNDGKDKEMVSFNTVVLDSVQ |
| NOV7f | TQEVPPGVFWRSQIHISQPQFLKFNISLGKDALFGVYIRRGLPPSHAQYDFMERLDGKEK |
| NOV7g | AECDVPMNQCIDPSCGGHGSCIDGNCVCSAGYKGEHCEEVDCLDPTCSSHGVCVNGECLC |
| NOV7h | -----------------MLHAANKGRKPSAEAGRPIPPTSSPSLLPSAQLPSSHNPPPVS |
| NOV7i | IKSRRSSGLSSRENSALTLTDSDNENKSDDENGRPIPPTSSPSLLPSAQLPSSHNPPPVS |
| NOV7j | IKSRRSSGLSSRENSALTLTDSDNENKSDDENGRPIPPTSSPSLLPSAQLPSSHNPPPVS |
| NOV7k | IKSRRSSGLSSRENSALTLTDSDNENKSDDENGRPIPPTSSPSLLPSAQLPSSHNPPPVS |
| NOV7l | KEKWSVVESPRERRSIQTLVQNEAVFVQYLDVGLWHLAFYNDGKDKEMVSFNTVVLDSVQ |
| NOV7m | IKSRRSSGLSSRENSALTLTDSDNENKSDDENGRPIPPTSSPSLLPSAQLPSSHNPPPVS |
| NOV7n | IKSRRSSGLSSRENSALTLTDSDNENKSDDENGRPIPPTSSPSLLPSAQLPSSHNPPPVS |
| NOV7o | TQEVPPGVFWRSQIHISQPQFLKFNISLGKDALFGVYIRRGLPPSHAQYDFMERLDGKEK |
| NOV7p | IKSRRSSGLSSRENSALTLTDSDNENKSDDENGRPIPPTSSPSLLPSAQLPSSHNPPPVS |
| NOV7q | ARVQCPDQCSGHGTYLPDTGLCSCDPNWMGPDCSVEVCSVDCGTHGVCIGGACRCEEGWT |
| NOV7r | KEKWSVVESPRERRSIQTLVQNEAVFVQYLDVGLWHLAFYNDGKDKEMVSFNTVVLDSVQ |
| NOV7s | KEKWSVVESPRERRSIQTLVQNEAVFVQYLDVGLWHLAFYNDGKDKEMVSFNTVVLDSVQ |
| NOV7t | IKSRRSSGLSSRENSALTLTDSDNENKSDDENGRPIPPTSSPSLLPSAQLPSSHNPPPVS |
| NOV7u | KEKWSVVESPRERRSIQTLVQNEAVFVQYLDVGLWHLAFYNDGKDKEMVSFNTVVLDSVQ |
| NOV7v | KEKWSVVESPRERRSIQTLVQNEAVFVQYLDVGLWHLAFYNDGKDKEMVSFNTVVLDSVQ |
| NOV7w | ------------------------------------------------------------ |
| NOV7x | ------------------------------------------------------------ |
| NOV7y | ------------------------------------------------------------ |
| NOV7z | -----------------------------------------------------------N |
| NOV7aa | TQEVPPGVFWRSQIHISQPQFLKFNISLGKDALFGVYIRRGLPPSHAQYDFMERLDGKEK |
| NOV7ab | KEKWSVVESPRERRSIQTLVQNEAVFVQYLDVGLWHLAFYNDGKDKEMVSFNTVVLDSVQ |
| NOV7ac | KEKWSVVESPRERRSIQTLVQNEAVFVQYLDVGLWHLAFYNDGKDKEMVSFNTVVLDSVQ |
| NOV7a | SSIDSGEAEVGRRVTQEVPPGVFWRSQIHISQPQFLKFNISLGKDALFGVYIRRGLPPSH |
| NOV7b | DCPRNCHGNGECVSGVCHCFPGFLGADCAKAACPVLCSGNGQYSKGTCQCYSGWKGAECD |
| NOV7c | GAACDQRVCHPRCIEHGTCKDGKCECREGWNGEHCTIGRQTAGTETDGCPDLCNGNGRCT |
| NOV7d | GAACDQRVCHPRCIEHGTCKDGKCECREGWNGEHCTIGRQTAGTETDGCPDLCNGNGRCT |
| NOV7e | DCPRNCHGNGECVSGVCHCFPGFLGADCAKAACPVLCSGNGQYSKGTCQCYSGWKGAECD |
| NOV7f | WSVVESPRERRSIQTLVQNEAVFVQYLDVGLWHLAFYNDGKDKEMVSFNTVVLDSVQDCP |
| NOV7g | SPGWGGLNCELARVQCPDQCSGHGTYLPDTGLCSCDPNWMGPDCSVDGCPDLCNGNGRCT |
| NOV7h | CQMPLLDSNTSHQIMDTNPDEEFSPNSYLLRACSGPQQASSSGPPNHHSQSTLRPPLPPP |
| NOV7i | CQMPLLDSNTSHQIMDTNPDEEFSPNSYLLRACSGPQQASSSGPPNHHSQSTLRPPLPPP |
| NOV7j | CQMPLLDSNTSHQIMDTNPDEEFSPNSYLLRACSGPQQASSSGPPNHHSQSTLRPPLPPP |
| NOV7k | CQMPLLDSNTSHQIMDTNPDEEFSPNSYLLRACSGPQQASSSGPPNHHSQSTLRPPLPPP |
| NOV7l | DCPRNCHGNGECVSGVCHCFPGFLGADCAKAACPVLCSGNGQYSKGTCQCYSGWKGAECD |
| NOV7m | CQMPLLDSNTSHQIMDTNPDEEFSPNSYLLRACSGPQQASSSGPPNHHSQSTLRPPLPPP |
| NOV7n | CQMPLLDSNTSHQIMDTNPDEEFSPNSYLLRACSGPQQASSSGPPNHHSQSTLRPPLPPP |
| NOV7o | WSVVESPRERRSIQTLVQNEAVFVQYLDVGLWHLAFYNDGKDKEMVSFNTVVLDSVQDCP |
| NOV7p | CQMPLLDSNTSHQIMDTNPDEEFSPNSYLLRACSGPQQASSSGPPNHHSQSTLRPPLPPP |
| NOV7q | GAACDQRVCHPRCIEHGTCKDGKCECREGWNGEHCTIGRQTAGTETDGCPDLCNGNGRCT |
| NOV7r | DCPRNCHGNGECVSGVCHCFPGFLGADCAKAACPVLCSGNGQYSKGTCQCYSGWKGAECD |
| NOV7s | DCPRNCHGNGECVSGVCHCFPGFLGADCAKAACPVLCSGNGQYSKGTCQCYSGWKGAECD |
| NOV7t | CQMPLLDSNTSHQIMDTNPDEEFSPNSYLLRACSGPQQASSSGPPNHHSQSTLRPPLPPP |
| NOV7u | DCPRNCHGNGECVSGVCHCFPGFLGADCAKAACPVLCSGNGQYSKGTCQCYSGWKGAECD |
| NOV7v | DCPRNCHGNGECVSGVCHCFPGFLGADCAKAACPVLCSGNGQYSKGTCQCYSGWKGAECD |
| NOV7w | ------------------------------------------------------------ |
| NOV7x | ------------------------------------------------------------ |
| NOV7y | ------------------------------------------------------------ |
| NOV7z | SSIDSGEAEVGRRVTQEVPPGVFWRSQIHISQPQFLKFNISLGKDALFGVYIRRGLPPSH |
| NOV7aa | WSVVESPRERRSIQTLVQNEAVFVQYLDVGLWHLAFYNDGKDKEMVSFNTVVLDSVQDCP |
| NOV7ab | DCPRNCHGNGECVSGVCHCFPGFLGADCAKAACPVLCSGNGQYSKGTCQCYSGWKGAECD |
| NOV7ac | DCPRNCHGNGECVSGVCHCFPGFLGADCAKAACPVLCSGNGQYSKGTCQCYSGWKGAECD |
| NOV7a | AQYDFMERLDGKEKWSVVESPRERRSIQTLVQNEAVFVQYLDVGLWHLAFYNDGKDKEMV |
| NOV7b | VPMNQCIDPSCGGHGSCIDGNCVCSAGYKGEHCEEVDCLDPTCSSHGVCVNGECLCSPGW |
| NOV7c | LGQNSWQCVCQTGWRGPGCNVAMETSCADNKDNEGDGLVDCLDPDCCLQSACQNSLLCRG |
| NOV7d | LGQNSWQCVCQTGWRGPGCNVAMETSCADNKDNEGDGLVDCLDPDCCLQSACQNSLLCRG |
| NOV7e | VPMNQCIDPSCGGHGSCIDGNCVCSAGYKGEHCEEVDCLDPTCSSHGVCVNGECLCSPGW |
| NOV7f | RNCHGNGECVSGVCHCFPGFLGADCAKAACPVLCSGNGQYSKGTCQCYSGWKGAECDVPM |
| NOV7g | LGQNSWQCVCQTGWRGPGCNVAMETSCADNKDNEGDGLVDCLDPDCCLQSACQNSLLCRG |
| NOV7h | HNHTLSHHHSSANSLNRNSLTNRRSQIHAPAPAPNDLATTPESVQLQDSWVLNSNVPLET |
| NOV7i | HNHTLSHHHSSANSLNRNSLTNRRSQIHAPAPAPNDLATTPESVQLQDSWVLNSNVPLET |
| NOV7j | HNHTLSHHHSSANSLNENSLTNRRSQIHAPAPAPNDLATTPESVQLQDSWVLNSNVPLET |
| NOV7k | HNHTLSHHHSSANSLNRNSLTNRRSQIHAPAPAPNDLATTPESVQLQDSWVLNSNVPLET |
| NOV7l | VPNNQCIDPSCGGHGSCIDGNCVCSAGYKGEHCEEVDCLDPTCSSHGVCVNGECLCSPGW |
| NOV7m | HNHTLSHHHSSANSLNRNSLTNRRSQIHAPAPAPNDLATTPESVQLQDSWVLNSNVPLET |
| NOV7n | HNHTLSHHHSSANSLNRNSLTNRRSQIHAPAPAPNDLATTPESVQLQDSWVLNSNVPLET |
| NOV7o | RNCHGNGECVSGVCHCFPGFLGADCAKAACPVLCSGNGQYSKGTCQCYSGWKGAECDVPM |
| NOV7p | HNHTLSHHHSSANSLNRNSLTNRRSQIHAPAPAPNDLATTPESVQLQDSWVLNSNVPLET |
| NOV7q | LGQNSWQCVCQTGWRGPGCNVAMETSCADNKDNEGDGLVDCLDPDCCLQSACQNSLLCRG |
| NOV7r | VPMNQCIDPSCGGHGSCIDGNCVCSAGYKGEHCEEVDCLDPTCSSHGVCVNGECLCSPGW |
| NOV7s | VPMNQCIDPSCGGHGSCIDGNCVCSAGYKGEHCEEVDCLDPTCSSHGVCVNGECLCSPGW |
| NOV7t | HNHTLSHHHSSANSLNRNSLTNRRSQIHAPAPAPNDLATTPESVQLQDSWVLNSNVPLET |
| NOV7u | VPMNQCIDPSCGGHGSCIDGNCVCSAGYKGEHCEEVDCLDPTCSSHGVCVNGECLCSPGW |
| NOV7v | VPMNQCIDPSCGGHGSCIDGNCVCSAGYKGEHCEEVDCLDPTCSSHGVCVNGECLCSPGW |
| NOV7w | ------------------------------------------------------------ |
| NOV7x | ------------------------------------------------------------ |
| NOV7y | ------------------------------------------------------------ |
| NOV7z | AQYDFMERLDGKEKWSVVESPRERRSIQTLVQNEAVFVQYLDVGLWHLAFYNDGKDKEMV |
| NOV7aa | RNCHGNGECVSGVCHCFPGFLGADCAKAACPVLCSGNGQYSKGTCQCYSGWKGAECDVPM |
| NOV7ab | VPMNQCIDPSCGGHGSCIDGNCVCSAGYKGEHCEEVDCLDPTCSSHGVCVNGECLCSPGW |
| NOV7ac | VPMNQCIDPSCGGHGSCIDGNCVCSAGYKGEHCEEVDCLDPTCSSHGVCVNGECLCSPGW |
| NOV7a | SFNTVVLDS-VQDCPRNCHGNGECVSGVCHCFPGFLGADCAKAACPVLCSGNGQYSKGTC |
| NOV7b | GGLNCELARVQCPDQCSGHGTYLPDTGLCSCDPNWMGPDCSVEVCSVDCGTHGVCIGGAC |
| NOV7c | SRDPLDIIQQGQTDWPAVKSFYDRIKLLAGKDSTHIIPGENPFNSSLVSLIRGQVVTTDG |
| NOV7d | SRDPLDIIQQGQTDWPAVKSFYDRIKLLAGKDSTHIIPGENPFNSSLVSLIRGQVVTTDG |
| NQV7e | GGLNCELARVQCPDQCSGHGTYLPDTGLCSCDPNWMGPDCSVEVCSVDCGTHGVCIGGAC |
| NOV7f | NQCIDPSCGGHGSCIDGNCVCSAGYKGEHCEEVDCLDPTCSSHGVCVNGECLCSPGWGGL |
| NOV7g | SRDPLDIIQQGQTDWPAVKSFYDRIKLLAGKDSTHIIPGENPFNSSLVSLIRGQVVTTDG |
| NOV7h | RHFLFKTSSGSTPLFSSSSPGYPLTSGTVYTPPPRLLPRNTFSRKAFKLKKPSKYCSWKC |
| NOV7i | RHFLFKTSSGSTPLFSSSSPGYPLTSGTVYTPPPRLLPRNTFSRKAFKLKKPSKYCSWKC |
| NOV7j | RHFLFKTSSGSTPLFSSSSPGYPLTSGTVYTPPPRLLPRNTFSRKAFKLKKPSKYCSWKC |
| NOV7k | RHFLFKTSSGSTPLFSSSSPGYPLTSGTVYTPPPRLLPRNTFSRKAFKLKKPSKYCSWKC |
| NOV7l | GGLNCELARVQCPDQCSGHGTYLPDTGLCSCDPNWMGPDCSVEVCSVDCGTHGVCIGGAC |
| NOV7m | RHFLFKTSSGSTPLFSSSSPGYPLTSGTVYTPPPRLLPRNTFSRKAFKLKKPSKYCSWKC |
| NOV7n | RHFLFKTSSGSTPLFSSSSPGYPLTSGTVYTPPPRLLPRNTFSRKAFKLKKPSKYCSWKC |
| NOV7o | NQCIDPSCGGHGSCIDGNCVCSAGYKGEHCEEVDCLDPTCSSHGVCVNGECLCSPGWGGL |
| NOV7p | RHFLFKTSSGSTPLFSSSSPGYPLTSGTVYTPPPRLLPRNTFSRKAFKLKKPSKYCSWKC |
| NOV7q | SRDPLDIIQQGQTDWPAVKSFYDRIKLLAGKDSTHIIPGENPFNSSLVSLIRGQVVTTDG |
| NOV7r | GGLNCELARVQCPDQCSGHGTYLPDTGLCSCDPNWMGPDCSVEVCSVDCGTHGVCIGGAC |
| NOV7s | GGLNCELARVQCPDQCSGHGTYLPDTGLCSCDPNWMGPDCSVEVCSVDCGTHGVCIGGAC |
| NOV7t | RHFLFKTSSGSTPLFSSSSPGYPLTSGTVYTPPPRLLPRNTFSRKAFKLKKPSKYCSWKC |
| NOV7u | GGLNCELARVQCPDQCSGHGTYLPDTGLCSCDPNWMGPDCSVEVCSVDCGTHGVCIGGAC |
| NOV7v | GGLNCELARVQCPDQCSGHGTYLPDTGLCSCDPNWMGPDCSVEVCSVDCGTHGVCIGGAC |
| NOV7w | ------------------------DTGLCSCDPNWMGPDCSVE----------------- |
| NOV7x | ----------------------DRIKLLAGKDSTHIIPGE-------------------- |
| NOV7y | ---------------------SAGYKGEHCEEVDCLDPTCS------------------- |
| NOV7z | SFNTVVLDDSVQDCPRNCHGNGECVSGVCHCFPGFLGADCAKDLPALTFCKTIINKAAL- |
| NOV7aa | NQCIDPSCGGHGSCIDGNCVCSAGYKGEHCEEVDCLDPTCSSHGVCVNGECLCSPGWGGL |
| NOV7ab | GGLNCELARVQCPDQCSGHGTYLPDTGLCSCDPNWMGPDCSVVCSVDCGTHGVCIGGACR |
| NOV7ac | GGLNCELARVQCPDQCSGHGTYLPDTGLCSCDPNWMGPDCSVEVCSVDCGTHGVCIGGAC |
| NOV7a | QCYSGWKGAECDVPMNQCIDPSCGGHGSCIDGNCVCSAGYKGEHCEEVDCLDPTCSSNGV |
| NOV7b | RCEEGWTGAACDQRVCHPRCIEHGTCKDGKCECREGWNGEHCTIDGCPDLCN-------- |
| NOV7c | TPLVGVNVSFVKYPKYGYTITRQDGTFDLIANGGASLTLHFERAPFMSQERTVWLPWNSF |
| NOV7d | TPLVGVNVSFVKYPKYGYTITRQDGTFDLIANGGASLTLHFERAPFMSQERTVWLPWNSF |
| NOV7e | RCEEGWTGAACDQRVCHPRCIEHGTCKDGKCECREGWNGEHCTIDGCPDLCNGNGRCTLG |
| NOV7f | NCELARVQCPDQCSGHGTYLPDTGLCSCDPNWMGPDCSVEVCSVDCGTHGVCIGGACRCE |
| NOV7g | TPLVGVNVSFVKYPKYGYTITRQDGTFDLIANGGASLTLHFERAPFMSQERTVWLPWNSF |
| NOV7h | AALSAIAAALLLAILLAYFIVPWSLKNSSIDSGEAEVGRRVTQEVPPGVFWRSQIHISQP |
| NOV7i | AALSAIAAALLLAIL--------------------------------------------- |
| NOV7j | AALSAIAAALLLAILLAYFIVPWSLKNSSIDSGEAEVGRRVTQEVPPGVFWRSQIHISQP |
| NOV7k | AALSAIAAALLLAIL--------------------------------------------- |
| NOV7l | RCEEGWTGAACDQRVCHPRCIEHGTCKDGKCECREGWNGEHCTIGRQTAGTETDGCPDLC |
| NOV7m | AALSAIAAALLLAILLAYFIVPWSLKNSSIDSGEAEVGRRVTQEVPPGVFWRSQIHISQP |
| NOV7n | AALSAIAAALLLAIL--------------------------------------------- |
| NOV7o | NCELARVQCPDQCSGHGTYLPDTGLCSCDPNWMGPDCSVEVCSVDCGTHGVCIGGACRCE |
| NOV7p | AALSAIAAALLLAILLAYFIVPWSLKNSSIDSGEAEVGRRVTQEVPPGVFWRSQIHISQP |
| NOV7q | TPLVGVNVSFVKYPKYGYTITRQDGTFDLIANGGASLTLHFERAPFMSQERTVWLPWNSF |
| NOV7r | RCEEGWTGAACDQRVCHPRCIEHGTCKDGKCECREGWNGEHCTIDGCPDLCN-------- |
| NOV7s | RCEEGWTGAACDQRVCHPRCIEHGTCKDGKCECREGWNGEHCTIGRQTAGTETDGCPDLC |
| NOV7t | AALSAIAAALLLAIL--------------------------------------------- |
| NOV7u | RCEEGWTGAACDQRVCHPRCIEHGTCKDGKCECREGWNGEHCTIGRQTAGTETDGCPDLC |
| NOV7v | RCEEGWTGAACDQRVCHPRCIEHGTCKDGKCECREGWNGEHCTIGRQTAGTETDGCPDLC |
| NOV7w | ------------------------------------------------------------ |
| NOV7x | ------------------------------------------------------------ |
| NOV7y | ------------------------------------------------------------ |
| NOV7z | ------------------------------------------------------------ |
| NOV7aa | NCELARVQCPDQCSGHGTYLPDTGLCSCDPNWMGPDCSVEVCSVDCGTHGVCIGGACRCE |
| NOV7ab | CEEGWTGAACDQRVCHPRCIEHGTCKDGKCECREGWNGEHCTIDGCPDLCNG-------- |
| NOV7ac | RCEEGWTGAACDQRVCHPRCIEHGTCKDGKCECREGWNGEHCTIGRQTAGTETDGCPDLC |
| NOV7a | CVNGECLCSPGWGGLNCELARVQCPDQCSGHGTYLPDTGLCSCDPNWMGPDCSVDGCPDL |
| NOV7b | -GNGRCTLGQNSWQCVCQTGWRGPGCNVAMETSCADNKDNEGDGLVDCLDPDCCLQSACQ |
| NOV7c | YAMDTLVMKTEENSIPSCDLSGFVRPDPIIISSPLSTFFSAAPGQNPIVPETQVLHEEIE |
| NOV7d | YAMDTLVMKTEENSIPSCDLSGFVRPDPIIISSPLSTFFSAAPGQNPIVPETQVLHEEIE |
| NOV7e | QNSWQCVCQTGWRGPGCNVAMETSCADNKDNEGDGLVDCLDPDCCLQSACQNSLLCRGSR |
| NOV7f | EGWTGAACDQRVCHPRCIEHGTCKDGKCECREGWNGEHCTIDGCPDLCNGNGRCTLGQNS |
| NOV7g | YAMDTLVMKTEENSIPSCDLSGFVRPDPIIISSPLSTFFSAAPGQNPIVPETQVLHEEIE |
| NOV7h | QFLKFNISLGKDALFGVYIRRGLPPSHAQYDFMERLDGKEKWSVVESPRERRSIQTLVQN |
| NOV7i | ------------------------------------------------------------ |
| NOV7j | QFLKFNTSLGKDALFGVYIRRGLPPSHAQYDFMERLDGKEKWSVVESPRERRSIQTLVQN |
| NOV7k | ------------------------------------------------------------ |
| NOV7l | NGNGRCTLGQNSWQCVCQTGWRGPGCNVAMETSCADNKDNEGDGLVDCLDPDCCLQSACQ |
| NOV7m | QFLKFNISLGKDALFGVYIRRGLPPSHAQYDFMERLDGKEKWSVVESPRERRSIQTLVQN |
| NOV7n | ------------------------------------------------------------ |
| NOV7o | EGWTGAACDQRVCHPRCIEHGTCKDGKCECREGWNGEHCTIGRQTAGTETDGCPDLCNGN |
| NOV7p | QFLKFNISLGKDALFGVYIRRGLPPSHAQYDFMERLDGKEKWSVVESPRERRSIQTLVQN |
| NOV7q | YAMDTLVMKTEENSIPSCDLSGFVRPDPIIISSPLSTFFSAAPGQNPIVPETQVLHEEIE |
| NOV7r | -GNGRCTLGQNSWQCVCQTGWRGPGCNVAMETSCADNKDNEGDGLVDCLDPDCCLQSACQ |
| NOV7s | NGNGRCTLGQNSWQCVCQTGWRGPGCNVAMETSCADNKDNEGDGLVDCLDPDCCLQSACQ |
| NOV7t | ------------------------------------------------------------ |
| NOV7u | NGNGRCTLGQNSWQCVCQTGWRGPGCNVAMETSCADNKDNEGDGLVDCLDPDCCLQSACQ |
| NOV7v | NGNGRCTLGQNSWQCVCQTGWRGPGCNVAMETSCADNKDNEGDGLVDCLDPDCCLQSACQ |
| NOV7w | ------------------------------------------------------------ |
| NOV7x | ------------------------------------------------------------ |
| NOV7y | ------------------------------------------------------------ |
| NOV7z | ------------------------------------------------------------ |
| NOV7aa | EGWTGAACDQRVCHPRCIEHGTCKDGKCECREGWNGEHCTIGRQTAGTETDGCPDLCNGN |
| NOV7ab | ------NGR-CTLGQNSWQCVCQTGWRGPGCNVAMETSCADNKDNEGDGLIDCMDPDCCL |
| NOV7ac | NGNGRCTLGQNSWQCVCQTGWRGPGCNVAMETSCADNKDNEGDGLVDCLDPDCCLQSACQ |
| NOV7a | CNGNGRCTLGQNSWQCVCQTGWRGPGCNVAMETSCADNKDNEGDGLVDCLDPDCCLQSAC |
| NOV7b | N----------------------------------------------------------- |
| NOV7c | L----------------------------------------------------------- |
| NOV7d | L----------------------------------------------------------- |
| NOV7e | D----------------------------------------------------------- |
| NOV7f | W----------------------------------------------------------- |
| NOV7g | L----------------------------------------------------------- |
| NOV7h | EAVFVQYLDVGLWHLAFYNDGKDKEMVSFNTVVLDGTI---------------------- |
| NOV7i | ------------------------------------------------------------ |
| NOV7j | EAVFVQYLDVGLWHLAFYNDGKDKEMVSFNTVVLDS------------------------ |
| NOV7k | ------------------------------------------------------------ |
| NOV7l | N----------------------------------------------------------- |
| NOV7m | EAVFVQYLDVGLWHLAFYNDGKDKEMVSFNTVVLDSVQDCPRNCHGNGECVSGVCHCFPG |
| NOV7n | ------------------------------------------------------------ |
| NOV7o | G----------------------------------------------------------- |
| NOV7p | EAVFVQYLDVGLWHLAFYNDGKDKEMVSFNTVVLDSVQDCPRNCHGNGECVSGVCHCFPG |
| NOV7q | L----------------------------------------------------------- |
| NOV7r | N----------------------------------------------------------- |
| NOV7s | N----------------------------------------------------------- |
| NOV7t | ------------------------------------------------------------ |
| NOV7u | N----------------------------------------------------------- |
| NOV7v | N----------------------------------------------------------- |
| NOV7w | ------------------------------------------------------------ |
| NOV7x | ------------------------------------------------------------ |
| NOV7y | ------------------------------------------------------------ |
| NOV7z | ------------------------------------------------------------ |
| NOV7aa | G----------------------------------------------------------- |
| NOV7ab | Q----------------------------------------------------------- |
| NOV7ac | N----------------------------------------------------------- |
| NOV7a | QNSLLCRGSRDPLDIIQQGQTDWPAVKSFYDRIKLLAGKDSTHIIPGENPFNSSLVSLIR |
| NOV7b | --SLLCRGSRDPLDIIQQGQTDWPAVKSFYDRIKLLAGKDSTHIIPGENPFNSSLVSLIR |
| NOV7c | --PGSNVKLRYLSSRTAGYKSLLKITMTQSTVPLNLIRVHLMVAVEGHLFQKSFQASPNL |
| NOV7d | --PGSNVKLRYLSSRTAGYKSLLKITMTQSTVPLNLIRVHLMVAVEGHLFQKSFQASPNL |
| NOV7e | --PLDIIQQGQTDWPAVKSFYDRIKLLAGKDSTHIIPGENPFNSSLVSLIRGQVVTTDGT |
| NOV7f | --QCVCQTGWRGPGCNVAMETSCADNKDNEGDGLVDCLDPDCCLQSACQNSLLCRGSRDP |
| NOV7g | --PGSNVKLRYLSSRTAGYKSLLKITMTQSTVPLNLIRVHLMVAVEGHLFQKSFQASPNL |
| NOV7h | ------------------------------------------------------------ |
| NOV7i | ------------------------------------------------------------ |
| NOV7j | ------------------------------------------------------------ |
| NOV7k | ------------------------------------------------------------ |
| NOV7l | --SLLCRGSRDPLDIIQQGQTDWPAVKSFYDRIKLLAGKDSTHIIPGENPFNSSLVSLIR |
| NOV7m | FLGADCAKGMCRHFP--------------------------------------------- |
| NOV7n | ------------------------------------------------------------ |
| NOV7o | --RCTLGQNSWQCVCQTGWRGPGCNVAMETSCADNKDNEGDGLVDCLDPDCCLQSACQNS |
| NOV7p | FLGADCAKAACPVLC--------------------------------------------- |
| NOV7q | --PGSNVKLRYLSSRTAGYKSLLKITMTQSTVPLNLIRVHLMVAVEGHLFQKSFQASPNL |
| NOV7r | --SLLCRGSRDPLDIIQQGQTDWPAVKSFYDRIKLLAGKDSTHIIPGENPFNSSLVSLIR |
| NOV7s | --SLLCRGSRDPLDIIQQGQTDWPAVKSFYDRIKLLAGKDSTHIIPGENPFNSSLVSLIR |
| NOV7t | ------------------------------------------------------------ |
| NOV7u | --SLLCRGSRDPLDIIQQGQTDWPAVKSFYDRIKLLAGKDSTHIIPGENPFNSSLVSLIR |
| NOV7v | --SLLCRGSRDPLDIIQQGQTDWPAVKSFYDRIKLLAGKDSTHIIPGENPFNSSLVSLIR |
| NOV7w | ------------------------------------------------------------ |
| NOV7x | ------------------------------------------------------------ |
| NOV7y | ------------------------------------------------------------ |
| NOV7z | ------------------------------------------------------------ |
| NOV7aa | --RCTLGQNSWQCVCQTGWRGPGCNVAMETSCADNKDNEGDGLVDCLDPDCCLQSACQNS |
| NOV7ab | --SSCQNQPyCRGLPDPQDIISQSLQSPSQQAAKSFYDRISFLIGSDSTHVIPGESPFNS |
| NOV7ac | --SLLCRGSRDPLDIIQQGQTDWPAVKSFYDRIKLLAGKDSTHIIPGENPFNSSLVSLIR |
| NOV7a | GQVVTTDGTPLVGVNVSFVKYPKYGYTITRQDGTFDLIANGGASLTLHFERAPFMSQERT |
| NOV7b | GQVVTTDGTPLVGVNVSFVKYPKYGYTITRQDGTFDLIANGGASLTLHFERAPFMSQERT |
| NOV7c | ASTFIWDKTDAYGQRVYGLSDAVVSVGFEYETCPSLILWEKRTALLQGFELDPSNLGGWS |
| NOV7d | AYTFIWDKTDAYGQRVYGLSDAVVSVGFEYETCPSLILWEKRTALLQGFELDPSNLGGWS |
| NOV7e | PLVGVNVSFVKYPKYGYTITRQDGTFDLIANGGASLTLHFERAPFMSQERTVWLPWNSFY |
| NOV7f | LDIIQQGQTDWPAVKSFYDRIKLLAGKDSTHIIPGENPFNSSLVSLIRGQVVTTDGTPLV |
| NOV7g | AYTFIWDKTDAYGQRVYGLSDAVVSVGFEYETCPSLILWEKRTALLQGFELDPSNLGGWS |
| NOV7h | ------------------------------------------------------------ |
| NOV7i | ------------------------------------------------------------ |
| NOV7j | ------------------------------------------------------------ |
| NOV7k | ------------------------------------------------------------ |
| NOV7l | GQVVTTDGTPLVGVNVSFVKYPKYGYTITRQDGTFDLIANGGASLTLHFERAPFMSQERT |
| NOV7m | ------------------------------------------------------------ |
| NOV7n | ------------------------------------------------------------ |
| NOV7o | LLCRGSRDPLDIIQQGQTDWPAVKSFYDRIKLLAGKDSTHIIPGENPFNSSLVSLIRGQV |
| NOV7p | ------------------------------------------------------------ |
| NOV7q | ASTFIWDKTDAYGQRVYGLSDAVVSVGFEYETCPSLILWEKRTALLQGFELDPSNLGGWS |
| NOV7r | GQVVTTDGTPLVGVNVSFVKYPKYGYTITRQDGTFDLIANGGASLTLHFERAPFMSQERT |
| NOV7s | GQVVTTDGTPLVGVNVSFVKYPKYGYTITRQDGTFDLIANGGASLTLHFERAPFMSQERT |
| NOV7t | ------------------------------------------------------------ |
| NOV7u | GQVVTTDGTPLVGVNVSFVKYPKYGYTITRQDGTFDLIANGGASLTLHFERAPFMSQERT |
| NOV7v | GQVVTTDGTPLVGVNVSFVKYPKYGYTITRQDGTFDLIANGGASLTLHFERAPFMSQERT |
| NOV7w | ------------------------------------------------------------ |
| NOV7x | ------------------------------------------------------------ |
| NOV7y | ------------------------------------------------------------ |
| NOV7z | ------------------------------------------------------------ |
| NOV7aa | LLCRGSRDPLDIIQQGQTDWPAVKSFYDRIKLLAGKDSTHIIPGENPFNSSLVSLIRGQV |
| NOV7ab | LVSLIRGQVVTTDGTPLVGVNVSFVKYPKYGYTITRQDGTYSLSRFDLIANGGASLTLHF |
| NOV7ac | GQVVTTDGTPLVGVNVSFVKYPKYGYTITRQDGTFDLIANGGASLTLHFERAPFMSQERT |
| NOV7a | VWLPWNSFYAMDTLVMKTEENSIPSCDLSGFVRPDPIIISSPLSTFFSAAPGQNPIVPET |
| NOV7b | VWLPWNSFYAMDTLVMKTEENSIPSCDLSGFVRPDPIIISSPLSTFFSAAPGQNPIVPET |
| NOV7c | LDKHHILNVKSGILHKGTGENQFLTQQPAIITSIMGNGRRRSISCPSCNGLAEGNKLLAP |
| NOV7d | LDKHHILNVKSGILHKGTGENQFLTQQPAIITSIMGNGRPRSISCPSCNGLAEGNKLLAP |
| NOV7e | AMDTLVMXTEENSIPSCDLSGFVRPDPIIISSPLSTFFSAAPGQNPIVPETQVLHEEIEL |
| NOV7f | GVNVSFVKYPKYGYTITRQDGTFDLIANGGASLTLHFEPAPFMSQERTVWLPWNSFYAMD |
| NOV7g | LDKHHILNVKSGILHKGTGENQFLTQQPAIITSIMGNGRRRSISCPSCNGLAEGNKLLAP |
| NOV7h | ------------------------------------------------------------ |
| NOV7i | ------------------------------------------------------------ |
| NOV7j | ------------------------------------------------------------ |
| NOV7k | ------------------------------------------------------------ |
| NOV7l | VWLPWNSFYAMDTLVMKTEENSIPSCDLSGFVRPDPIIISSPLSTFFSAAPGQNPIVPET |
| NOV7m | ------------------------------------------------------------ |
| NOV7n | ------------------------------------------------------------ |
| NOV7o | VTTDGTPLVGVNVSFVKYPKYGYTITRQDGTFDLIANGGASLTLHFERAPFMSQERTVWL |
| NOV7p | ------------------------------------------------------------ |
| NOV7q | LDKHHILNVKSGILHKGTGENQFLTQQPAIITSIMGNGRRRSISCPSCNGLAEGNKLLAP |
| NOV7r | VWLPWNSFYAMDTLVMKTEENSIPSCDLSGFVRPDPIIISSPLSTFFSAAPGQNPIVPET |
| NOV7s | VWLPWNSFYAMDTLVMKTEENSIPSCDLSGFVRPDPIIISSPLSTFFSAAPGQNPIVPET |
| NOV7t | ------------------------------------------------------------ |
| NOV7u | VWLPWNSFYAMDTLVMKTEENSIPSCDLSGFVRPDPIIISSPLSTFFSAAPGQNPIVPET |
| NOV7v | VWLPWNSFYAMDTLVMKTEENSIPSCDLSGFVRPDPIIISSPLSTFFSAAPGQNPIVPET |
| NOV7w | ------------------------------------------------------------ |
| NOV7x | ------------------------------------------------------------ |
| NOV7y | ------------------------------------------------------------ |
| NOV7z | ------------------------------------------------------------ |
| NOV7aa | VTTDGTPLVGVNVSFVKYPKYGYTITRQDGTFDLIANGGASLTLHFEPAPFMSQERTVWL |
| NOV7ab | EPAPFMSQERTVWLPWNSFYANDTLVMKTEENSIPSCDLSGFCRLDPIIISSPLSTFFSA |
| NOV7ac | VWLPWNSFYAMDTLVMKTEENSIPSCDLSGFVRPDPIIISSPLSTFFSAAPGQNPIVPET |
| NOV7a | QVLHEEIELPGSNVKLRYLSSRTAGYKSLLKITMTQSTVPLNLIRVHLMVAVEGHLFQKS |
| NOV7b | QVLHEEIELPGSNVKLRYLSSRTAGYKSLLKITMTQSTVPLNLIRVHLMVAVEGHLFQKS |
| NOV7c | VALAVGIDGSLYVGDFNYIRRIFPSRN--------------------------------- |
| NOV7d | VALAVGIDGSLYVGDFNYIRRIFPSRNLEG------------------------------ |
| NOV7e | PGSNVKLRYLSSRTAGYKSLLKITMTQSTVPLNLIRVHLMVAVEGHLFQKSFQASPNLAY |
| NOV7f | TLVMKTEENSIPSCDLSGFVRPDPIIISSPLSTFFSAAPGQNPIVFETQVLHEEIELPGS |
| NOV7g | VALAVGIDGSLYVGDFNYIRRIFPSRNLEG------------------------------ |
| NOV7h | ------------------------------------------------------------ |
| NOV7i | ------------------------------------------------------------ |
| NOV7j | ------------------------------------------------------------ |
| NOV7k | ------------------------------------------------------------ |
| NOV7l | QVLHEEIELPGSNVKLRYLSSRTAGYKSLLKITMTQSTVPLNLIRVHLMVAVEGHLFQKS |
| NOV7m | ------------------------------------------------------------ |
| NOV7n | ------------------------------------------------------------ |
| NOV7o | PWNSFYAMDTLVMKTEENSIPSCDLSGFVRPDPIIISSFLSTFFSAAPGQNPIVPETQVL |
| NOV7p | ------------------------------------------------------------ |
| NOV7q | VALAVGIDGSLYVGDFNYIRRIFPSRNVTSILELRNKEFKHSNNPAHKYYLAVDPVSGSL |
| NOV7r | QVLHEEIELPGSNVKLRYLSSRTAGYKSLLKITMTQSTVPLNLIRVHLMVAVEGHLFQKS |
| NOV7s | QVLHEEIELPGSNVKLRYLSSRTAGYKSLLKITMTQSTVPLNLIRVHLMVAVEGHLFQKS |
| NOV7t | ------------------------------------------------------------ |
| NOV7u | QVLHEEIELPGSNVKLRYLSSRTAGYKSLLKITMTQSTVPLNLIRVHLMVAVEGHLFQKS |
| NOV7v | QVLHEEIELPGSNVKLRYLSSRTAGYKSLLKITMTQSTVPLNLIRVHLMVAVEGHLFQKS |
| NOV7w | ------------------------------------------------------------ |
| NOV7x | ------------------------------------------------------------ |
| NOV7y | ------------------------------------------------------------ |
| NOV7z | ------------------------------------------------------------ |
| NOV7aa | PWNSFYAMDTLVMKTEENSIPSCDLSGFVRPDPIIISSPLSTFFSAAPGQNPIVPETQVL |
| NOV7ab | APGQNPIVPETQVLHEEIELPGSNVKLRYLSSRTAGYKSLLKITMTQSTVPLNLIRVHLM |
| NOV7ac | QVLHEEIELPGSNVKLRYLSSRTAGYKSLLKITMTQSTVPLNLIRVHLMVAVEGHLFQKS |
| NOV7a | FQASPNLASTFIWDKTDAYGQRVYGLSDAVVSVGFEYETCPSLILWEKRTALLQGFELDP |
| NOV7b | FQASPNLASTFIWDKTDAYGQRVYGLSDAVVSVGFEYETCPSLILWEKRTALLQGFELDP |
| NOV7c | ------------------------------------------------------------ |
| NOV7d | ------------------------------------------------------------ |
| NOV7e | TFIWDKTDAYGQRVYGLSDAVVSVGFEYETCPSLILWEKRTALLQGFELDPSNLGGWSLD |
| NOV7f | NVKLRYLSSRTAGYKSLLKITMTQSTVPLNLIRVHLMVAVEGHLFQKSFQASPNLAYTFI |
| NOV7g | ------------------------------------------------------------ |
| NOV7h | ------------------------------------------------------------ |
| NOV7i | ------------------------------------------------------------ |
| NOV7j | ------------------------------------------------------------ |
| NOV7k | ------------------------------------------------------------ |
| NOV7l | FQASPNLASTFIWDKTDAYGQRVYGLSDAVVSVGFEYETCPSLILWEKRTALLQGFELDP |
| NOV7m | ------------------------------------------------------------ |
| NOV7n | ------------------------------------------------------------ |
| NOV7o | HEEIELPGSNVKLRYLSSRTAGYKSLLKITMTQSTVPLNLIRVHLMVAVEGHLFQKSFQA |
| NOV7p | ------------------------------------------------------------ |
| NOV7q | YVSDTNSRRIYRVKSLSGTKDLAGNSEVVAGTGEQCLPFDEARCGDGGKAIDATLMSPRG |
| NOV7r | FQASPNLASTFIWDKTDAYGQRVYGLSDAVVSVGFEYETCPSLILWEKRTALLQGFELDP |
| NOV7s | FQASPNLASTFIWDKTDAYGQRVYGLSDAVVSVGFEYETCPSLILWEKRTALLQGFELDP |
| NOV7t | ------------------------------------------------------------ |
| NOV7u | FQASPNLASTFIWDKTDAYGQRVYGLSDAVVSVGFEYETCPSLILWEKRTALLQGFELDP |
| NOV7v | FQASPNLAYTFIWDKTDAYGQRVYGLSDAVVSVGFEYETCPSLILWEKRTALLQGFELDP |
| NOV7w | ------------------------------------------------------------ |
| NOV7x | ------------------------------------------------------------ |
| NOV7y | ------------------------------------------------------------ |
| NOV7z | ------------------------------------------------------------ |
| NOV7aa | HEEIELPGSNVKLRYLSSRTAGYKSLLKITMTQSTVPLNLTRVHLMVAVEGHLFQKSFQA |
| NOV7ab | VAVEGHLFQKSFQASPNLAYTFIWDKTDAYGQRVYGLSDAVGMFWFQRTALLQGFELDPS |
| NOV7ac | FQASPNASTFIWDKTDAYGQRVYGLSDAVVSVGFEYETCPSLILWEKRTALLQGFELDP |
| NOV7a | SNLGGWSLDKHHILNVKSGILHKGTGENQFLTQQPAITTSIMGNGRRRSISCPSCNGLAE |
| NOV7b | SNLGGWSLDKHHILNVKSGILHKGTGENQFLTQQPAIITSIMGNGRRRSISCPSCNGLAE |
| NOV7c | ------------------------------------------------------------ |
| NOV7d | ------------------------------------------------------------ |
| NOV7e | KHHILNVKSGILHKGTGENQFLTQQPAIITSIMGNGRRRSISCPSCNGLAEGNKLLAPVA |
| NOV7f | WDKTDAYGQRVYGLSDAVVSVGFEYETCPSLILWEKRTALLQGFELDPSNLGGWSLDKHH |
| NOV7g | ------------------------------------------------------------ |
| NOV7h | ------------------------------------------------------------ |
| NOV7i | ------------------------------------------------------------ |
| NOV7j | ------------------------------------------------------------ |
| NOV7k | ------------------------------------------------------------ |
| NOV7l | SNLGGWSLDKHHILNVKSGILHKGTGENQFLTQQPAIITSIMGNGRRRSISCPSCNGLAE |
| NOV7m | ------------------------------------------------------------ |
| NOV7n | ------------------------------------------------------------ |
| NOV7o | SPNLASTFIWDKTDAYGQRVYGLSDAVVSVGFEYETCPSLILWEKRTALLQGFELDPSNL |
| NOV7p | ------------------------------------------------------------ |
| NOV7q | IAVDKNGLMYFVDATMIRKVDQNGIISTLLGSNDLTAVRPLSCDSSMDVAQVRLEWPTDL |
| NOV7r | SNLGGWSLDKHHILNVKSGILHKGTGENQFLTQQPAIITSIMGNGRRRSISCPSCNGLAE |
| NOV7s | SNLGGWSLDKHHILNVKSGTLHKGTGENQFLTQQPAIITSIMGNGRRRSISCPSCNGLAE |
| NOV7t | ------------------------------------------------------------ |
| NOV7u | SNLGGWSLDKHHILNVKSGILHKGTGENQFLTQQPAIITSIMGNGRRRSISCPSCNGLAE |
| NOV7v | SNLGGWSLDKHHILNVKSGILHKGTGENQFLTQQPAIITSIMGNGRPRSISCPSCNGLAE |
| NOV7w | ------------------------------------------------------------ |
| NOV7x | ------------------------------------------------------------ |
| NOV7y | ------------------------------------------------------------ |
| NOV7z | ------------------------------------------------------------ |
| NOV7aa | SPNLAYTFIWDKTDAYGQRVYGLSDAVVSVGFEYETCPSLILWEKRTALLQGFELDPSNL |
| NOV7ab | NLGGWSLDKHHILNVKSGILHKGTGENQFLTQQPAIITSIMGNGRRRSISCPSCNGLAEG |
| NOV7ac | SNLGGWSLDKHHILNVKSGILHKGTGENQFLTQQPAIITSIMGNGRRRSISCPSCNGLAE |
| NOV7a | GNKLLAPVALAVGIDGSLYVGDFNYIRRIFPSRNVTSILELRNKEFKHSNNPAHKYYLAV |
| NOV7b | GNKLLAPVALAVGIDGSLYVGDFNYIRRIFPSRNVTSILELRNKEFKHSNNPAHKYYLAV |
| NOV7c | ------------------------------------------------------------ |
| NOV7d | ------------------------------------------------------------ |
| NOV7e | LAVGIDGSLYVGDFNYIRRIFPSRNLEG-------------------------------- |
| NOV7f | ILNVKSGILHKGTGENQFLTQQPAIITSIMGNGRRRSISCPSCNGLAEGNKLLAPVALAV |
| NOV7g | ------------------------------------------------------------ |
| NOV7h | ------------------------------------------------------------ |
| NOV7i | ------------------------------------------------------------ |
| NOV7j | ------------------------------------------------------------ |
| NOV7k | ------------------------------------------------------------ |
| NOV7l | GNKLLAPVALAVGIDGSLYVGDFNYIRRIFPSRNVTSILELRNKEFKHSNNPAHKYYLAV |
| NOV7m | ------------------------------------------------------------ |
| NOV7n | ------------------------------------------------------------ |
| NOV7o | GGWSLDKHHILNVKSGILHKGTGENQFLTQQPAIITSIMGNGRRRSISCPSCNGLAEGNK |
| NOV7p | ------------------------------------------------------------ |
| NOV7q | AVNPMDNSLYVLENNVILRITENHQVSIIAGRPMHCQVPGIDYSLSKLAIHSALESASAI |
| NOV7r | GNKLLAPVALAVGIDGSLYVGDFNYIRRIFPSR1VTSILELRNKEFKHSNNPAHKYYLAV |
| NOV7s | GNKLLAPVALAVGIDGSLYVGDFNYIRRIFPSRNVTSILELRNKEFKHSNNPAHKYYLAV |
| NOV7t | ------------------------------------------------------------ |
| NOV7u | GNKLLAPVALAVGIDGSLYVGDFNYIRRIFPSRNVTSILELRNKEFKHSNNPAHKYYLAV |
| NOV7v | GNKLLAPVALAVGIDGSLYVGDFNYIRRIFPSRN-------------------------- |
| NOV7w | ------------------------------------------------------------ |
| NOV7x | ------------------------------------------------------------ |
| NOV7y | ------------------------------------------------------------ |
| NOV7z | ------------------------------------------------------------ |
| NOV7aa | GGWSLDKHHILNVKSGILHKGTGENQFLTQQPAIITSIMGNGRRRSISCPSCNGLAEGNK |
| NOV7ab | NKLLAPVALAVGIDGSLYVGDFNYIRRIFPSRNVTSILELRRNKEFKHSNNPAHKYYLAV |
| NOV7ac | GNKLLAPVALAVGIDGSLYVGDFNYIRRIFPSRNVTSILELRNKEFKHSNNPAHKYYLAV |
| NOV7a | DPVSGSLYVSDTNSRRIYRVKSLSGTKDLAGNSEVVAGTGEQCLPFDEARCGDGGKAIDA |
| NOV7b | DPVSGSLYVSDTNSRRIYRVKSLSGTKDLAGNSEVVAGTGEQCLPFDEARCGDGGKAIDA |
| NOV7c | ------------------------------------------------------------ |
| NOV7d | ------------------------------------------------------------ |
| NOV7e | ------------------------------------------------------------ |
| NOV7f | GIDGSLYVGDFNYIRRIFPSRNLEG----------------------------------- |
| NOV7g | ------------------------------------------------------------ |
| NOV7h | ------------------------------------------------------------ |
| NOV7i | ------------------------------------------------------------ |
| NOV7j | ------------------------------------------------------------ |
| NOV7k | ------------------------------------------------------------ |
| NOV7l | DPVSGSLYVSDTNSRRIYRVKSLSGTKDLAGNSEVVAGTGEQCLPFDEARCGDGGKAIDA |
| NOV7m | ------------------------------------------------------------ |
| NOV7n | ------------------------------------------------------------ |
| NOV7o | LLAPVALAVGIDGSLYVGDFNYIRRIFPSRNVTSILELRNKEFKHSNNPAHKYYLAVDPV |
| NOV7p | ------------------------------------------------------------ |
| NOV7q | AISHTGVLYITETDEKKINRLRQVTTNGEICLLAGAASDCDCKNDVNCNCYSGDDAYATD |
| NOV7r | DPVSGSLYVSDTNSRRIYRVKSLSGTKDLAGNSEVVAGTGEQCLPFDEARCGDGGKAIDA |
| NOV7s | DPVSGSLYVSDTNSRRIYRVKSLSGTKDLAGNSEVVAGTGEQCLPFDEARCGDGGKAIDA |
| NOV7t | ------------------------------------------------------------ |
| NOV7u | DPVSGSLYVSDTNSRRIYRVKSLSGTKDLAGNSEVVAGTGEQCLPFDEARCGDGGKAIDA |
| NOV7v | ------------------------------------------------------------ |
| NOV7w | ------------------------------------------------------------ |
| NOV7x | ------------------------------------------------------------ |
| NOV7y | ------------------------------------------------------------ |
| NOV7z | ------------------------------------------------------------ |
| NOV7aa | LLAPVALAVGIDGSLYVGDFNYIRRIFPSRN----------------------------- |
| NOV7ab | DPVSGSLYVSDTNSRRIYRVKSLSGTKDLAGNSEVVAGTGEQCLPFDEARCGDGGKAIDA |
| NOV7ac | DPVSGSLYVSDTNSRRIYRVKSLSGTKDLAGNSEVVAGTGEQCLPFDEARCGDGGKAIDA |
| NOV7a | TLMSPRGIAVDKNGLMYFVDATMIRXVDQNGIISTLLGSNDLTAVRPLSCDSSMDVAQVR |
| NOV7b | TLMSPRGIAVDKNGLMYFVDATMIRKVDQNGIISTLLGSNDLTAVRPLSCDSSMDVAQVR |
| NOV7c | ------------------------------------------------------------ |
| NOV7d | ------------------------------------------------------------ |
| NOV7e | ------------------------------------------------------------ |
| NOV7f | ------------------------------------------------------------ |
| NOV7g | ------------------------------------------------------------ |
| NOV7h | ------------------------------------------------------------ |
| NOV7i | ------------------------------------------------------------ |
| NOV7j | ------------------------------------------------------------ |
| NOV7k | ------------------------------------------------------------ |
| NOV7l | TLMSPRGIAVDKNGLMYFVDATMIRKVDQNGIISTLLGSNDLTAVRPLSCDSSMDVAQVR |
| NOV7m | ------------------------------------------------------------ |
| NOV7n | ------------------------------------------------------------ |
| NOV7o | SGSLYVSDTNSRRIYRVKSLSGTKDLAGNSEVVAGTGEQCLPFDEARCGDGGKAIDATLM |
| NOV7p | ------------------------------------------------------------ |
| NOV7q | AILNSPSSLAVAPDGTIYIADLGNIRIRAVSKNKPVLNAFNQYEAASPGEQELYVFNADG |
| NOV7r | TLMSPRGIAVDKNGLMYFVDATMIRKVDQNGIISTLLGSNDLTAVRPLSCDSSMDVAQVR |
| NOV7s | TLMSPRGIAVDKNGLMYFVDATMIRKVDQNGIISTLLGSNDLTAVRPLSCDSSMDVAQVR |
| NOV7t | ------------------------------------------------------------ |
| NOV7u | TLMSPRGIAVDKNGLMYFVDATMIRKVDQNGIISTLLGSNDLTAVRPLSCDSSMDVAQVR |
| NOV7v | ------------------------------------------------------------ |
| NOV7w | ------------------------------------------------------------ |
| NOV7x | ------------------------------------------------------------ |
| NOV7y | ------------------------------------------------------------ |
| NOV7z | ------------------------------------------------------------ |
| NOV7aa | ------------------------------------------------------------ |
| NOV7ab | TLMSPRGIAVDKNGLMYFVDATMIRKVDQNGIISTLLGSNDLTAVRPLSCDSSMDVAQVR |
| NOV7ac | TLMSPRGIAVDKNGLMYFVDATMIRKVDQNGIISTLLGSNDLTAVRPLSCDSSMDVAQVR |
| NOV7a | LEWPTDLAVNPMDNSLYVLENNVILRITENHQVSIIAGRPMHCQVPGIDYSLSKIAIHSA |
| NOV7b | LEWPTDLAVNPMDNSLYVLENNVILRITENHQVSIIAGRPMHCQVPGIDYSLSKIAIHSA |
| NOV7c | ------------------------------------------------------------ |
| NOV7d | ------------------------------------------------------------ |
| NOV7e | ------------------------------------------------------------ |
| NOV7f | ------------------------------------------------------------ |
| NOV7g | ------------------------------------------------------------ |
| NOV7h | ------------------------------------------------------------ |
| NOV7i | ------------------------------------------------------------ |
| NOV7j | ------------------------------------------------------------ |
| NOV7k | ------------------------------------------------------------ |
| NOV7l | LEWPTDIAVNPMDNSLYVLENNVILRITENHQVSIIAGRPMHCQVPGIDYSLSKLAIHSA |
| NOV7m | ------------------------------------------------------------ |
| NOV7n | ------------------------------------------------------------ |
| NOV7o | SPRGIAVDKNGLMYFVDATMIRKVDQNGIISTLLGSNDLTAVRPLSCDSSMDVAQVRLEW |
| NOV7p | ------------------------------------------------------------ |
| NOV7q | IHQYTVSLVTGEYLYNFTYSTDNDVTELIDNNGNSLKIRRDSSGMPRHLLMPDNQIITLT |
| NOV7r | LEWPTDLAVNPMDNSLYVLENNVILRITENHQVSIIAGRPMHCQVPGIDYSLSKLAIHSA |
| NOV7s | LEWPTDLAVNPMDNSLYVLENNVILRITENHQVSIIAGRPMHCQVPGIDYSLSKTAIHSA |
| NOV7t | ------------------------------------------------------------ |
| NOV7u | LEWPTDLAVNPMDNSLYVLENNVILRITENHQVSIIAGRFMHCQVPGIDYSLSKLAIHSA |
| NOV7v | ------------------------------------------------------------ |
| NOV7w | ------------------------------------------------------------ |
| NOV7x | ------------------------------------------------------------ |
| NOV7y | ------------------------------------------------------------ |
| NOV7z | ------------------------------------------------------------ |
| NOV7aa | ------------------------------------------------------------ |
| NOV7ab | LEWPTDLAVNPMDNSLYVLENNVILRITENHQVSIIAGRPMHCQVPGIDYSLSKLAIHSA |
| NOV7ac | LEWPTDLAVNPMDNSLYVLENNVILRITENHQVSIIAGRPMHCQVPGIDYSLSKLAIHSA |
| NOV7a | LESASAIAISHTGVLYITETDEKKINRLRQVTTNGEICLLAGAASDCDCKNDVNCNCYSG |
| NOV7b | LESASAIAISHTGVLYITETDEKKINRLRQVTTNGEICLLAGAASDCDCKNDVNCNCYSG |
| NOV7c | ------------------------------------------------------------ |
| NOV7d | ------------------------------------------------------------ |
| NOV7e | ------------------------------------------------------------ |
| NOV7f | ------------------------------------------------------------ |
| NOV7g | ------------------------------------------------------------ |
| NOV7h | ------------------------------------------------------------ |
| NOV7i | ------------------------------------------------------------ |
| NOV7j | ------------------------------------------------------------ |
| NOV7k | ------------------------------------------------------------ |
| NOV7l | LESASAIAISHTGVLYITETDEKKINRLRQVTTNGEICLLAGAASDCDCKNDVNCNCYSG |
| NOV7m | ------------------------------------------------------------ |
| NOV7n | ------------------------------------------------------------ |
| NOV7o | PTDLAVNPMDNSLYVLENNVILRITENHQVSIIAGRPMHCQVPGIDYSLSKLAIHSALES |
| NOV7p | ------------------------------------------------------------ |
| NOV7q | VGTNGGLKVVSTQNLELGLMTYDGNTGLLATKSDETGWTTFYDYDHEGRLTNVTRPTGVV |
| NOV7r | LESASAIAISHTGVLYITETDEKKINRLRQVTTNGEICLLAGAASDCDCKNDVNCNCYSG |
| NOV7s | LESASAIAISHTGVLYITETDEKKINRLRQVTTNGEICLLAGAASDCDCKNDVNCNCYSG |
| NOV7t | ------------------------------------------------------------ |
| NOV7u | LESASAIAISHTGVLYITETDEKKINRLRQVTTNGEICLLAGAASDCDCKNDVNCNCYSG |
| NOV7v | ------------------------------------------------------------ |
| NOV7w | ------------------------------------------------------------ |
| NOV7x | ------------------------------------------------------------ |
| NOV7y | ------------------------------------------------------------ |
| NOV7z | ------------------------------------------------------------ |
| NOV7aa | ------------------------------------------------------------ |
| NOV7ab | LESASAIAISHTGVLYITETDEKKINRLRQVTTNGEICLLAGAASDCDCKNDVNCNCYSG |
| NOV7ac | LESASAIAISHTGVLYITETDEKKINRLRQVTTNGEICLLAGAASDCDCKNDVNCNCYSG |
| NOV7a | DDAYATDAILNSPSSLAVAPDGTIYIADLGNIRIRAVSKNKPVLNAFNQYEAASPGEQEL |
| NOV7b | DDAYATDAILNSPSSLAVAPDGTIYIADLGNIRIRAVSKNKPVLNAFNQYEAASPGEQEL |
| NOV7c | ------------------------------------------------------------ |
| NOV7d | ------------------------------------------------------------ |
| NOV7e | ------------------------------------------------------------ |
| NOV7f | ------------------------------------------------------------ |
| NOV7g | ------------------------------------------------------------ |
| NOV7h | ------------------------------------------------------------ |
| NOV7i | ------------------------------------------------------------ |
| NOV7j | ------------------------------------------------------------ |
| NOV7k | ------------------------------------------------------------ |
| NOV7l | DDAYATDAILNSPSSLAVAPDGTIYIADLGNIRIRAVSKNKPVLNAFNQYEAASPGEQEL |
| NOv7m | ------------------------------------------------------------ |
| NOV7n | ------------------------------------------------------------ |
| NOV7o | ASAIAISHTGVLYITETDEKKINRLRQVTTNGEICLLAGAASDCDCKNDVNCNCYSGDDA |
| NOV7p | ------------------------------------------------------------ |
| NOV7q | TSLHREMEKSITIDIENSNRDDDVTVITNLSSVEASYTVVQDQVRNSYQLCNNGTLRVMY |
| NOV7r | DDAYATDAILNSPSSLAVAPDGTIYIADLGNIRIRAVSKNKPVLNAFNQYEAASPGEQEL |
| NOV7s | DDAYATDAILNSPSSLAVAPDGTIYIADLGNIRIPAVSKNKPVLNAFNQYEAASPGEQEL |
| NOV7t | ------------------------------------------------------------ |
| NOV7u | DDAYATDAILNSPSSLAVAPDGTIYIADLGNIRIRAVSKNKPVLNAFNQYEAASPGEQEL |
| NOV7v | ------------------------------------------------------------ |
| NOV7w | ------------------------------------------------------------ |
| NOV7x | ------------------------------------------------------------ |
| NOV7y | ------------------------------------------------------------ |
| NOV7z | ------------------------------------------------------------ |
| NOV7aa | ------------------------------------------------------------ |
| NOV7ab | DDAYATDAILNSPSSLAVAPDGTIYIADLGNIRIRAVSKNKPVLNAFNQYEAASPGEQEL |
| NOV7ac | DDAYATDAILNSPSSLAVAPDGTIYIADLGNIRIRAVSKNKPVLNAFNQYEAASPGEQEL |
| NOV7a | YVFNADGIHQYTVSLVTGEYLYNFTYSTDNDVTELIDNNGNSLKIRRDSSGMPRHLLMPD |
| NOV7b | YVFNADGIHQYTVSLVTGEYLYNFTYSTDNDVTELIDNNGNSLKIRRDSSGMPRHLLMPD |
| NOV7c | ------------------------------------------------------------ |
| NOV7d | ------------------------------------------------------------ |
| NOV7e | ------------------------------------------------------------ |
| NOV7f | ------------------------------------------------------------ |
| NOV7g | ------------------------------------------------------------ |
| NOV7h | ------------------------------------------------------------ |
| NOV7i | ------------------------------------------------------------ |
| NOV7j | ------------------------------------------------------------ |
| NOV7k | ------------------------------------------------------------ |
| NOV7l | YVFNADGIHQYTVSLVTGEYLYNFTYSTDNDVTELIDNNGNSLKIRRDSSGMPRHLLMPD |
| NOV7m | ------------------------------------------------------------ |
| NOV7n | ------------------------------------------------------------ |
| NOV7o | YATDAILNSPSSLLAVAPDGTIYIADLGNIRIRAVSIKPVLNAFNQYEAASPGEQELYVF |
| NOV7p | ------------------------------------------------------------ |
| NOV7q | ANGMGISFHSEPHVLAGTITPTIGRCNISLPMENGLNSIEWRLRKEQIKGKVTIFGRKLR |
| NOV7r | YVFNADGIHQYTVSLVTGEYLYNFTYSTDNDVTELIDNNGNSLKIRRDSSGMPRHLLMPD |
| NOV7s | YVFNADGIHQYTVSLVTGEYLYNFTYSTDNDVTELIDNNGNSLKIRRDSSGMPRHLLMPD |
| NOV7t | ------------------------------------------------------------ |
| NOV7u | YVFNADGIHQYTVSLVTGEYLYNFTYSTDNDVTELIDNNGNSLKIPRDSSGMPRHLLMPD |
| NOV7v | ------------------------------------------------------------ |
| NOV7w | ------------------------------------------------------------ |
| NOV7x | ------------------------------------------------------------ |
| NOV7y | ------------------------------------------------------------ |
| NOV7z | ------------------------------------------------------------ |
| NOV7aa | ------------------------------------------------------------ |
| NOV7ab | YVFNADGIHQYTVSLVTGEYLYNFTYSTDNDVTELIDNNGNSLKIRRDSSGMPRHLLMPD |
| NOV7ac | YVFNADGIHQYTVSLVTGEYLYNFTYSTDNDVTELIDNNGNSLKIRRDSSGMPRHLLMPD |
| NOV7a | NQIITLTVGTNGGLKVVSTQNLELGLMTYDGNTGLLATKSDETGWTTFYDYDHEGRLTNV |
| NOV7b | NQIITLTVGTNGGLKVVSTQNLELGLMTYDGNTGLLATKSDETGWTTFYDYDHEGRLTNV |
| NOV7c | ------------------------------------------------------------ |
| NOV7d | ------------------------------------------------------------ |
| NOV7e | ------------------------------------------------------------ |
| NOV7f | ------------------------------------------------------------ |
| NOV7g | ------------------------------------------------------------ |
| NOV7h | ------------------------------------------------------------ |
| NOV7i | ------------------------------------------------------------ |
| NOV7j | ------------------------------------------------------------ |
| NOV7k | ------------------------------------------------------------ |
| NOV7l | NQIITLTVGTNGGLKVVSTQNLELGLMTYDGNTGLLATKSDETGWTTFYDYDHEGRLTNV |
| NOV7m | ------------------------------------------------------------ |
| NOV7n | ------------------------------------------------------------ |
| NOV7o | NADGIHQYTVSLVTGEYLYNFTYSTDNDVTELIDNNGNSLKIRRDSSGMPRHLLMPDNQI |
| NOV7p | ------------------------------------------------------------ |
| NOV7q | VHGRNLLSIDYDRNIRTEKIYDDHRKFTLRIIYDQVGRPFLWLPSSGLAAVNVSYFFNGR |
| NOV7r | NQIITLTVGTNGGLKVVSTQNLELGLMTYDGNTGLLATKSDETGWTTFYDYDHEGRLTNV |
| NOV7s | NQIITLTVGTNGGLKVVSTQNLELGLMTYDGNTGLLATKSDETGWTTFYDYDHEGRLTNV |
| NOV7t | ------------------------------------------------------------ |
| NOV7u | NQIITLTVGTNGGLKVVSTQNLELGLMTYDGNTGLLATKSDETGWTTFYDYDHEGRLTNV |
| NOV7v | ------------------------------------------------------------ |
| NOV7w | ------------------------------------------------------------ |
| NOV7x | ------------------------------------------------------------ |
| NOV7y | ------------------------------------------------------------ |
| NOV7z | ------------------------------------------------------------ |
| NOV7aa | ------------------------------------------------------------ |
| NOV7ab | NQIITLTVGTNGGLKVVSTQNLELGLMTYDGNTGLLATKSDETGWTTFYSYDHEGRLTNV |
| NOV7ac | NQIITLTVGTNGGLKVVSTQNLELGLMTYDGNTGLLATKSDETGWTTFYDYDNEGRLTNV |
| NOV7a | TRPTGVVTSLHREMEKSITIDIENSNRDDDVTVITNLSSVEASYTVVQDQVRNSYQLCNN |
| NOV7b | TRPTGVVTSLHREMEKSITIDIENSNRDDDVTVITNLSSVEASYTVVQDQVPNSYQLCNN |
| NOV7c | ------------------------------------------------------------ |
| NOV7d | ------------------------------------------------------------ |
| NOV7e | ------------------------------------------------------------ |
| NOV7f | ------------------------------------------------------------ |
| NOV7g | ------------------------------------------------------------ |
| NOV7h | ------------------------------------------------------------ |
| NOV7i | ------------------------------------------------------------ |
| NOV7j | ------------------------------------------------------------ |
| NOV7k | ------------------------------------------------------------ |
| NOV7l | TRPTGVVTSLHREMEKSITIDIENSNRDDDVTVITNLSSVEASYTVVQDQVRNSYQLCNN |
| NOV7m | ------------------------------------------------------------ |
| NOV7n | ------------------------------------------------------------ |
| NOV7o | ITLTVGTNGGLKVVSTQNLELGLMTYDGNTGLLATKSDETGWTTFYDYDHEGRLTNVTRP |
| NOV7p | ------------------------------------------------------------ |
| NOV7q | LAGLQRGANSERTDIDKQGRIVSRMFADGKVWSYSYLDKSMVLLLQSQRQYIFEYDSSDR |
| NOV7r | TRPTGVVTSLHREMEKSITIDIENSNRDDDVTVITNLSSVEASYTVVQDQVRNSYQLCNN |
| NOV7s | TRPTGVVTSLHREMEKSITIDIENSNRDDDVTVITNLSSVEASYTVVQDQVPNSYQLCNN |
| NOV7t | ------------------------------------------------------------ |
| NOV7u | TRPTGVVTSLHREMEKSITIDIENSNRDDDVTVITNLSSVEASYTWQDQVRNSYQLCNN |
| NOV7v | ------------------------------------------------------------ |
| NOV7w | ------------------------------------------------------------ |
| NOV7x | ------------------------------------------------------------ |
| NOV7y | ------------------------------------------------------------ |
| NOV7z | ------------------------------------------------------------ |
| NOV7aa | ------------------------------------------------------------ |
| NOV7ab | TRPTGVVTSLHREMEKSITIDIENSNRDDDVTVITNLSSVEASYTVVQDQVRNSYQLCNN |
| NOV7ac | TRPTGVVTSLHREMEKSITIDIENSNRDDDVTVITNLSSVEASYTVVQDQVRNSYQLCNN |
| NOV7a | GTLRVMYANGMGISFHSEPHVLAGTITPTIGRCNISLPMENGLNSIEWRLRKEQIKGKVT |
| NOV7b | GTLRVMYANGMGISFHSEPHVLAGTITPTIGRCNISLPMENGLNSIEWRLRKEQIKGKVT |
| NOV7c | ------------------------------------------------------------ |
| NOV7d | ------------------------------------------------------------ |
| NOV7e | ------------------------------------------------------------ |
| NOV7f | ------------------------------------------------------------ |
| NOV7g | ------------------------------------------------------------ |
| NOV7h | ------------------------------------------------------------ |
| NOV7i | ------------------------------------------------------------ |
| NOV7l | ------------------------------------------------------------ |
| NOV7k | ------------------------------------------------------------ |
| NOV7l | GTLRVMYANGMGISFHSEPHVLAGTITPTIGRCNISLPMENGLNSIEWRLRKEQIKGKVT |
| NOV7m | ------------------------------------------------------------ |
| NOV7n | ------------------------------------------------------------ |
| NOV7o | TGVVTSLHREMEKSITIDIENSNRDDDVTVITNLSSVEASYTVVQDQVPNSYQLCNNGTL |
| NOV7p | ------------------------------------------------------------ |
| NOV7q | LLAVTMPSVAPHSMSTHTSIGYIRNIYNPPESNASVIFDYSDDGRILKTSFLGTGRQVFY |
| NOV7r | GTLRVMYANGMGISFHSEPHVLAGTITPTIGRCNISLPMENGLNSIEWRLRKEQIKGKVT |
| NOV7s | GTLRVMYANGMGISFHSEPHVLAGTITPTIGRCNISLPMENGLNSIEWRLRKEQIKGKVT |
| NOV7t | ------------------------------------------------------------ |
| NOV7u | GTLRVMYANGMGISFHSEPHVLAGTITPTIGRCNISLPMENGLNSIEWRLRKEQIKGKVT |
| NOV7v | ------------------------------------------------------------ |
| NOV7w | ------------------------------------------------------------ |
| NOV7x | ------------------------------------------------------------ |
| NOV7y | ------------------------------------------------------------ |
| NOV7z | ------------------------------------------------------------ |
| NOV7aa | ------------------------------------------------------------ |
| NOV7ab | GTLRVMYANGMGISFHSEPHVLAGTITPTIGRCNISLPMENGLNSIEWRLRKEQIKGKVT |
| NOV7ac | GTLRVMYANGMGISFHSEPNVLAGTITPTIGRCNISLPMENGLNSIEWRLRKEQIKGKVT |
| NOV7a | IFGRKLRVHGRNLLSIDYDRNIRTEKIYDDHRKFTLRIIYDQVGRPFLWLPSSGLAAVNV |
| NOV7b | IFGRKLRVHGRNLLSIDYDRNIRTEKIYDDHRKFTLRIIYDQVGRPFLWLPSSGLAAVNV |
| NOV7c | ------------------------------------------------------------ |
| NOV7d | ------------------------------------------------------------ |
| NOV7e | ------------------------------------------------------------ |
| NOV7f | ------------------------------------------------------------ |
| NOV7g | ------------------------------------------------------------ |
| NOV7h | ------------------------------------------------------------ |
| NOV7i | ------------------------------------------------------------ |
| NOV7l | ------------------------------------------------------------ |
| NOV7k | ------------------------------------------------------------ |
| NOV7l | IFGRKLRVHGRNLLSIDYDRNIRTEKIYDDHRKFTLRIIYDQVGRPFLWLPSSGLAAVNV |
| NOV7m | ------------------------------------------------------------ |
| NOV7n | ------------------------------------------------------------ |
| NOV7o | RVMYANGMGISFHSEPHVIAGTITPTIGRCNISLPMENGLNSIEWRLRKEQIKGKVTIFG |
| NOV7p | ------------------------------------------------------------ |
| NOV7q | KYGKLSKLSEIVYDSTAVTFGYDETTGVLKMVNLQSGGFSCTIRYRKIGPLVDKQIYRFS |
| NOV7r | IFGRKLRVHGRNLLSIDYDRNIRTEKIYDDHRKFTLRIIYDQVGRPFLWLPSSGLAAVNV |
| NOV7s | IFGRKLRVHGRNLLSIDYDRNIRTEKIYDDHRKFTLRIIYDQVGRPFLWLPSSGLAAVNV |
| NOV7t | ------------------------------------------------------------ |
| NOV7u | IFGRKLRVHGRNLLSIDYDRNIRTEKIYDDHRKFTLRIIYDQVGRPFLWLPSSGLAAVNV |
| NOV7v | ------------------------------------------------------------ |
| NOV7w | ------------------------------------------------------------ |
| NOV7x | ------------------------------------------------------------ |
| NOV7y | ------------------------------------------------------------ |
| NOV7z | ------------------------------------------------------------ |
| NOV7aa | ------------------------------------------------------------ |
| NOV7ab | IFGRKLEVHGRNLLSIDYDRNIRTEKIYDDHRKFTLRIIYDQVGRPFLWLPSSGLAAVNV |
| NOV7ac | IFGRKLRVHGRNLLSIDYDRNIRTEKIYDDHRKFTLRIIYDQVGRPFLWLPSSGLAAVNV |
| NOV7a | SYFFNGRLAGLQRGAMSERTDIDKQGRIVSRMFADGKVWSYSYLDKSMVLLLQSQRQYIF |
| NOV7b | SYFFNGRLAGLQRGAMSERTDIDKQGRIVSRMFADGKVWSYSYLDKSMVLLLQSQRQYIF |
| NOV7c | ------------------------------------------------------------ |
| NOV7d | ------------------------------------------------------------ |
| NOV7e | ------------------------------------------------------------ |
| NOV7f | ------------------------------------------------------------ |
| NOV7g | ------------------------------------------------------------ |
| NOV7h | ------------------------------------------------------------ |
| NOV7i | ------------------------------------------------------------ |
| NOV7j | ------------------------------------------------------------ |
| NOV7k | ------------------------------------------------------------ |
| NOV7l | SYFFNGRLAGLQRGAMSERTDIDKQGRIVSRMFADGKVWSYSYLDKSMVLLLQSQRQYIF |
| NOV7m | ------------------------------------------------------------ |
| NOV7n | ------------------------------------------------------------ |
| NOV7o | RKLRVHGRNLLSIDYDRNIRTEKIYDDHRKFTLRIIYDQVGRPFLWLPSSGLAAVNVSYF |
| NOV7p | ------------------------------------------------------------ |
| NOV7q | EEGMVNARFDYTYHDNSFRIASIKPVISETPLPVDLYRYDEISGKVEHFGKFGVIYYDIN |
| NOV7r | SYFFNGRLAGLQRGAMSERTDIDKQGRIVSRMFADGKVWSYSYLDKSMVLLLQSQRQYIF |
| NOV7s | SYFFNGRLAGLQRGAMSERTDIDKQGRIVSRMFADGKVWSYSYLDKSMVLLLQSQRQYIF |
| NOV7t | ------------------------------------------------------------ |
| NOV7u | SYFFNGRLAGLQRGANSERTDIDKQGRIVSRNFADGKVWSYSYLDKSMVLLLQSQRQYIF |
| NOV7v | ------------------------------------------------------------ |
| NOV7w | ------------------------------------------------------------ |
| NOV7x | ------------------------------------------------------------ |
| NOV7y | ------------------------------------------------------------ |
| NOV7z | ------------------------------------------------------------ |
| NOV7aa | ------------------------------------------------------------ |
| NOV7ab | SYFFNGRLAGLQRGAMSERTDIDKQGRIVSRNFADGKVWSYSYLDKMVLLLQSQRQYIFE |
| NOV7ac | SYFFNGRLAGLQRGAMSERTDIDKQGRIVSPMFADGKVWSYSYLDKSMVLLLQSQRQYIF |
| NOV7a | EYDSSDRLLAVTMPSVARHSMSTHTSIGYIRNIYNPPESNASVIFDYSDDGRILKTSFLG |
| NOV7b | EYDSSDRLLAVTMPSVARHSMSTHTSIGYIPNIYNPPESNASVIFDYSDDGRILKTSFLG |
| NOV7c | ------------------------------------------------------------ |
| NOV7d | ------------------------------------------------------------ |
| NOV7e | ------------------------------------------------------------ |
| NOV7f | ------------------------------------------------------------ |
| NOV7g | ------------------------------------------------------------ |
| NOV7h | ------------------------------------------------------------ |
| NOV7i | ------------------------------------------------------------ |
| NOV7j | ------------------------------------------------------------ |
| NOV7k | ------------------------------------------------------------ |
| NOV7l | EYDSSDRLLAVTMPSVARHSMSTHTSIGYIRNIYNPPESNASVIFDYSDDGRILKTSFLG |
| NOV7m | ------------------------------------------------------------ |
| NOV7n | ------------------------------------------------------------ |
| NOV7o | FNGRLAGLQRGAMSERTDIDKQGRIVSRMFADGKVWSYSYLDKSMVLLLQSQRQYIFEYD |
| NOV7p | ------------------------------------------------------------ |
| NOV7q | QIITTAVMTLSKHFDTHGRIKEVQYEMFRSLMYWMTVQYDSMGRVIKRELKLGPYANTTK |
| NOV7r | EYDSSDRLLAVTMPSVARHSMSTHTSIGYIRMIYNPPESNASVIFDYSDDGRILKTSFLG |
| NOV7s | EYDSSDRLLAVTMPSVARHSMSTHTSIGYIRNIYNPPESNASVIFDYSDDGRILKTSFLG |
| NOV7t | ------------------------------------------------------------ |
| NOV7u | EYDSSDRLLAVTMPSVARHSMSTHTSIGYIRNIYNPPESNASVIFDYSDDGRILKTSFLG |
| NOV7v | ------------------------------------------------------------ |
| NOV7w | ------------------------------------------------------------ |
| NOV7x | ------------------------------------------------------------ |
| NOV7y | ------------------------------------------------------------ |
| NOV7z | ------------------------------------------------------------ |
| NOV7aa | ------------------------------------------------------------ |
| NOV7ab | YDSSDRLLAVTMPSVARHSMSTHTSIGYIRNIYNPPESNASVIFDYSDDGRILKTSFLGT |
| NOV7ac | EYDSSDRLLAVTMPSVARHSMSTHTSIGYIRNIYNPPESNASVIFDYSDDGRILKTSFLG |
| NOV7a | TGRQVFYKYGKLSKLSEIVYDSTAVTFGYDETTGVLKMVNLQSGGFSCTIRYRKIGPLVD |
| NOV7b | TGRQVFYKYGKLSKLSEIVYDSTAVTFGYDETTGVLKMVNLQSGGFSCTIRYRKIGPLVD |
| NOV7c | ------------------------------------------------------------ |
| NOV7d | ------------------------------------------------------------ |
| NOV7e | ------------------------------------------------------------ |
| NOV7f | ------------------------------------------------------------ |
| NOV7g | ------------------------------------------------------------ |
| NOV7h | ------------------------------------------------------------ |
| NOV7i | ------------------------------------------------------------ |
| NOV7j | ------------------------------------------------------------ |
| NOV7k | ------------------------------------------------------------ |
| NOV7l | TGRQVFYKYGKLSKLSEIVYDSTAVTFGYDETTGVLKMVNLQSGGFSCTIRYRKIGPLVD |
| NOV7m | ------------------------------------------------------------ |
| NOV7n | ------------------------------------------------------------ |
| NOV7o | SSDRLLAVTMPSVARHSMSTHTSIGYIRNIYNPPESNASVIFDYSDDGRILKTSFLGTGR |
| NOV7p | ------------------------------------------------------------ |
| NOV7q | YTYDYDGDGQLQSVAVNDRPTWRYSYDLNGNLHLLNPGNSVRLMPLRYDLRDRITRLGDV |
| NOV7r | TGRQVFYKYGKLSKLSEIVYDSTAVTFGYDETTGVLKMVNLQSGGFScTIRYRKIGPLVD |
| NOV7s | TGRQVFYKYGKLSKLSEIVYDSTAVTFGYDETTGVLKMVNLQSGGFSCTIRYRKIGPLVD |
| NOV7t | ------------------------------------------------------------ |
| NOV7u | TGRQVFYKYGKLSKLSEIVYDSTAVTFGYDETTGVLKMVNLQSGGFSCTIRYRKIGPLVD |
| NOV7v | ------------------------------------------------------------ |
| NOV7w | ------------------------------------------------------------ |
| NOV7x | ------------------------------------------------------------ |
| NOV7y | ------------------------------------------------------------ |
| NOV7z | ------------------------------------------------------------ |
| NOV7aa | ------------------------------------------------------------ |
| NOV7ab | GRQVFYKYGKLSKLSEIVYDSTAVTFGYDETTGVLKMVNLQSGGFSCTIRYRKIGPLVDK |
| NOV7ac | TGRQVFYKYGKLSKLSEIVYDSTAVTFGYDETTGVLKMVNLQSGGFSCTIRYRKIGPLVD |
| NOV7a | KQIYRFSEEGMVNARFDYTYHDNSFRIASIKPVISETPLPVDLYRYDEISGKVEHFGKFG |
| NOV7b | KQIYRFSEEGMVNARFDYTYHDNSFRIASIKPVISETPLPVDLYRYDEISGKVEHFGKFG |
| NOV7c | ------------------------------------------------------------ |
| NOV7d | ------------------------------------------------------------ |
| NOV7e | ------------------------------------------------------------ |
| NOV7f | ------------------------------------------------------------ |
| NOV7g | ------------------------------------------------------------ |
| NOV7h | ------------------------------------------------------------ |
| NOV7i | ------------------------------------------------------------ |
| NOV7j | ------------------------------------------------------------ |
| NOV7k | ------------------------------------------------------------ |
| NOV7l | KQIYRFSEEGMVNARFDYTYHDNSFRIASIKPVISETPLPVDLYRYDEISGKVEHFGKFG |
| NOV7m | ------------------------------------------------------------ |
| NOV7n | ------------------------------------------------------------ |
| NOV7o | QVFYKYGKLSKLSEIVYDSTAVTFGYDETTGVLKMVNLQSGGFSCTIRYRKIGPLVDKQI |
| NOV7p | ------------------------------------------------------------ |
| NOV7q | QYKIDDDGYLCQRGSDIFEYNSKGLLTRAYNKASGWSVQYRYDGVGRRASYKTNLGHHLQ |
| NOV7r | KQIYRFSEEGMVNARFDYTYHDNSFRIASIKPVISETPLPVDLYRYDEISGKVEHFGKFG |
| NOV7s | KQIYRFSEEGMVNARFDYTYHDNSFRIASIKPVISETPLPVDLYRYDEISGKVEHFGKFG |
| NOV7t | ------------------------------------------------------------ |
| NOV7u | KQIYRFSEEGMVNARFDYTYHDNSFRIASIKPVISETPLPVDLYRYDEISGKVEHFGKFG |
| NOV7v | ------------------------------------------------------------ |
| NOV7w | ------------------------------------------------------------ |
| NOV7x | ------------------------------------------------------------ |
| NOV7y | ------------------------------------------------------------ |
| NOV7z | ------------------------------------------------------------ |
| NOV7aa | ------------------------------------------------------------ |
| NOV7ab | QIYRFSEEGMVNARFDYTYHDNSFRIASIKPVISETPLPVDLYRYDEISGKVEHFGKFGV |
| NOV7ac | KQIYRFSEEGMVNARFDYTYHDNSFRIASIKPVISETPLPVDLYRYDETSGKVEHFGKFG |
| NOV7a | VIYYDINQIITTAVMTLSKHFDTHGRIKEVQYEMFRSLMYWMTVQYDSMGRVIKRELKLG |
| NOV7b | VIYYDINQIITTAVMTLSKHFDTHGRIKEVQYEMFRSLMYWMTVQYDSMGRVIKRELKLG |
| NOV7c | ------------------------------------------------------------ |
| NOV7d | ------------------------------------------------------------ |
| NOV7e | ------------------------------------------------------------ |
| NOV7f | ------------------------------------------------------------ |
| NOV7g | ------------------------------------------------------------ |
| NOV7h | ------------------------------------------------------------ |
| NOV7i | ------------------------------------------------------------ |
| NOV7j | ------------------------------------------------------------ |
| NOV7k | ------------------------------------------------------------ |
| NOV7l | VIYYDINQIITTAVMTLSKHFDTHGRIKEVQYEMFRSLMYWMTVQYDSMGRVIKRELKLG |
| NOV7m | ------------------------------------------------------------ |
| NOV7n | ------------------------------------------------------------ |
| NOV7o | YRFSEEGMVNARFDYTYHDNSFRIASIKPVISETPLPVDLYRYDEISGKVEHFGKFGVIY |
| NOV7p | ------------------------------------------------------------ |
| NOV7q | YFYSDLHNPTRITHVYNHSNSEITSLYYDLQGHLFAMESSSGEEYYVASDNTGTPLAVFS |
| NOV7r | VIYYDINQIITTAVMTLSKHFDTHGRIKEVQYEMFRSLMYWMTVQYDSMGRVIKRELKLG |
| NOV7s | VIYYDINQIITTAVMTLSKHFDTHGRIKEVQYEMFRSLMYWMTVQYDSMGRVIKRELKLG |
| NOV7t | ------------------------------------------------------------ |
| NOV7u | VIYYDINQIITTAVMTLSKHFDTHGRIKEVQYEMFRSLMYWMTVQYDSMGRVIKRELKLG |
| NOV7v | ------------------------------------------------------------ |
| NOV7w | ------------------------------------------------------------ |
| NOV7x | ------------------------------------------------------------ |
| NOV7y | ------------------------------------------------------------ |
| NOV7z | ------------------------------------------------------------ |
| NOV7aa | ------------------------------------------------------------ |
| NOV7ab | IYYDINQIITTAVMTLSKHFDTHGRIKEVQYEMFRSLMYWMTVQYDSMGRVIKRELKLGP |
| NOV7ac | VIYYDINQIITTAVMTLSKHFDTHGRIKEVQYEMFRSLMYWMTVQYDSMGRVIKRELKLG |
| NOV7a | PYANTTKYTYDYDGDGQLQSVAVNDRPTWRYSYDLNGNLHLLNPGNSVRLMPLRYDLFLR |
| NOV7b | PYANTTKYTYDYDGDGQLQSVAVNDRPTWRYSYDLNGNLHLLNPGNSVRLMPLRYDLFLR |
| NOV7c | ------------------------------------------------------------ |
| NOV7d | ------------------------------------------------------------ |
| NOV7e | ------------------------------------------------------------ |
| NOV7f | ------------------------------------------------------------ |
| NOV7g | ------------------------------------------------------------ |
| NOV7h | ------------------------------------------------------------ |
| NOV7i | ------------------------------------------------------------ |
| NOV7j | ------------------------------------------------------------ |
| NOV7k | ------------------------------------------------------------ |
| NOV7l | PYANTTKYTYDYDGDGQLQSVAVNDRPTWRYSYDLNGNLHLLNPGNSVRLMPLRYDLRDR |
| NOV7m | ------------------------------------------------------------ |
| NOV7n | ------------------------------------------------------------ |
| NOV7o | YDINQIITTAVMTLSKHFDTHGRIKEVQYEMFRSLMYWMTVQYDSMGRVIKRELKLGPYA |
| NOV7p | ------------------------------------------------------------ |
| NOV7q | INGLMIKQLQYTAYGEIYYDSNPDFQMVIGFHGGLYDPLTKLVHFTQRDYDVLAGRWTSP |
| NOV7r | PYANTTKYTYDYDGDGQLQSVAVNDRPTWRYSYDLNGNLHLLNPGNSVRLMPLRYDLRDR |
| NOV7s | PYANTTKYTYDYDGDGQLQSVAVNDRPTWRYSYDLNGNLHLLNPGNSVRLMPLRYDLRDR |
| NOV7t | ------------------------------------------------------------ |
| NOV7u | PYANTTKYTYDYDGDGQLQSVAVNDRPTWRYSYDLNGNLHLLNPGNSVRLMPLRYDLPDR |
| NOV7v | ------------------------------------------------------------ |
| NOV7w | ------------------------------------------------------------ |
| NOV7x | ------------------------------------------------------------ |
| NOV7y | ------------------------------------------------------------ |
| NOV7z | ------------------------------------------------------------ |
| NOV7aa | ------------------------------------------------------------ |
| NOV7ab | YANTTKYTYDYDGDGQLQSVPAVNDRPTWRYSYDLNGNLHLLNPGNSVRLMPLRYDLRDR |
| NOV7ac | PYANTTKYTYDYDGDGQLQSVAVNDRPTWRYSYDLNGNLHLLNPGNSVRLMPLRYDLRDR |
| NOV7a | ITRLGDVQYKIDDDGYLCQRGSDIFEYNSKGLLTRAYNKASGwSVQYRYDGVGRRASYKT |
| NOV7b | ITRLGDVQYKIDDDGYLCQRGSDIFEYNSKGLLTRAYNKASGwSVQYRYDGVGRRAsYKT |
| NOV7c | ------------------------------------------------------------ |
| NOV7d | ------------------------------------------------------------ |
| NOV7e | ------------------------------------------------------------ |
| NOV7f | ------------------------------------------------------------ |
| NOV7g | ------------------------------------------------------------ |
| NOV7h | ------------------------------------------------------------ |
| NOV7i | ------------------------------------------------------------ |
| NOV7j | ------------------------------------------------------------ |
| NOV7k | ------------------------------------------------------------ |
| NOV7l | ITRLGDVQYKIDDDGYLCQRGSDIFEYNSKGLLTRAYNKASGWSVQYRYDGVGRRASYKT |
| NOV7m | ------------------------------------------------------------ |
| NOV7n | ------------------------------------------------------------ |
| NOV7o | NTTKYTYDYDGDGQLQSVAVNDRPTWRYSYDLNGNLHLLNPGNSVRLMPLRYDLRDRITR |
| NOV7p | ------------------------------------------------------------ |
| NOV7q | DYTMWKNVGKEPAPFNLYMFKSNNPLSSELDLKNYVTDVKSWLVMFGFQLSNIIPGFPRA |
| NOV7r | ITRLGDVQYKIDDDGYLCQRGSDIFEYNSKGLLTRAYNKASGWSVQYRYDGVGRRASYKT |
| NOV7s | ITRLGDVQYKIDDDGYLCQRGSDIFEYNSKGLLTRAYNKASGWSVQYRYDGVGRRASYKT |
| NOV7t | ------------------------------------------------------------ |
| NOV7u | ITRLGDVQYKIDDDGYLCQRGSDIFEYNSKGLLTRAYNKASGWSVQYRYDGVGRRASYKT |
| NOV7v | ------------------------------------------------------------ |
| NOV7w | ------------------------------------------------------------ |
| NOV7x | ------------------------------------------------------------ |
| NOV7y | ------------------------------------------------------------ |
| NOV7z | ------------------------------------------------------------ |
| NOV7aa | ------------------------------------------------------------ |
| NOV7ab | ITRLGDVQYKIDDDGYLCQRGSDIFEYNSKGLLTRAYNKASGWSVQYRYDGVGRRASYKT |
| NOV7ac | ITRLGDVQYKIDDDGYLCQRGSDIFEYNSKGLLTRAYNKASGWSVQYRYDGVGRRASYKT |
| NOV7a | NLGHHLQYFYSDLHNPTRITHVYNHSNSEITSLYYDLQGHLFAMESSSGEEYYVASDNTG |
| NOV7b | NLGHHLQYFYSDLHNPTRITHVYNHSNSEITSLYYDLQGHLFAMESSSGEEYYVASDNTG |
| NOV7c | ------------------------------------------------------------ |
| NOV7d | ------------------------------------------------------------ |
| NOV7e | ------------------------------------------------------------ |
| NOV7f | ------------------------------------------------------------ |
| NOV7g | ------------------------------------------------------------ |
| NOV7h | ------------------------------------------------------------ |
| NOV7i | ------------------------------------------------------------ |
| NOV7j | ------------------------------------------------------------ |
| NOV7k | ------------------------------------------------------------ |
| NOV7l | NLGHHLQYFYSDLHNPTRITHVYNHSNSEITSLYYDLQGHLFAMESSSGEEYYVASDNTG |
| NOV7m | ------------------------------------------------------------ |
| NOV7n | ------------------------------------------------------------ |
| NOV7o | LGDVQYKIDDDGYLCQRGSDIFEYNSKGLLTPAYNKASGWSVQYRYDGVGRRASYKTNLG |
| NOV7p | ------------------------------------------------------------ |
| NOV7q | KMYFVPPPYELSESQASENGQLITGVQQTTERHNQAFMALEGQVITKKLHASIREKAGHW |
| NOV7r | NLGHHLQYFYSDLHNPTRITHVYNHSNSEITSLYYDLQGHLFAMESSSGEEYYVASDNTG |
| NOV7s | NLGHHLQYFYSDLHNPTRITHVYNHSNSEITSLYYDLQGHLFAMESSSGEEYYVASDNTG |
| NOV7t | ------------------------------------------------------------ |
| NOV7u | NLGHHLQYFYSDLHNPTRITHVYNHSNSEITSLYYDLQGHLFAMESSSGEEYYVASDNTG |
| NOV7v | ------------------------------------------------------------ |
| NOV7w | ------------------------------------------------------------ |
| NOV7x | ------------------------------------------------------------ |
| NOV7y | ------------------------------------------------------------ |
| NOV7z | ------------------------------------------------------------ |
| NOV7aa | ------------------------------------------------------------ |
| NOV7ab | NLGHHLQYFYSDLHNPTRITHVYNHSNSEITSLYYDLQGHLFAMESSSGEEYYVASDNTG |
| NOV7ac | NLGHHLQYFYSDLHNPTRITHVYNHSNSEITSLYYDLQGHLFAMESSSGEEYYVASDNTG |
| NOV7a | TPLAVFSINGLMIKQLQYTAYGEIYYDSNPDFQMVIGFHGGLYDPLTKLVHFTQRDYDVL |
| NOV7b | TPLAVFSINGLMIKQLQYTAYGEIYYDSNPDFQMVIGFHGGLYDPLTKLVHFTQRDYDVL |
| NOV7c | ------------------------------------------------------------ |
| NOV7d | ------------------------------------------------------------ |
| NOV7e | ------------------------------------------------------------ |
| NOV7f | ------------------------------------------------------------ |
| NOV7g | ------------------------------------------------------------ |
| NOV7h | ------------------------------------------------------------ |
| NOV7i | ------------------------------------------------------------ |
| NOV7j | ------------------------------------------------------------ |
| NOV7k | ------------------------------------------------------------ |
| NOV7l | TPLAVFSINGLMIKQLQYTAYGEIYYDSNPDFQMVIGFHGGLYDPLTKLVHFTQRDYDVL |
| NOV7m | ------------------------------------------------------------ |
| NOV7n | ------------------------------------------------------------ |
| NOV7o | HHLQYFYSDLHNPTRITHVYNHSNSEITSLYYDLQGHLFAMESSSGEEYYVASDNTGTPL |
| NOV7p | ------------------------------------------------------------ |
| NOV7q | FATTTPIIGKGIMFAIKEGRVTTGVSSIASEDSRKVASVLNNAYYLDKMHYSIEGKDTHY |
| NOV7r | TPLAVFSINGLMIKQLQYTAYGEIYYDSNPDFQMVIGFHGGLYDPLTKLVHFTQRDYDVL |
| NOV7s | TPLAVFSINGLMIKQLQYTAYGEIYYDSNPDFQMVIGFHGGLYDPLTKLVHFTQRDYDVL |
| NOV7t | ------------------------------------------------------------ |
| NOV7u | TPLAVFSINGLMIKQLQYTAYGEIYYDSNPDFQMVIGFHGGLYDPLTKLVHFTQRDYDVL |
| NOV7v | ------------------------------------------------------------ |
| NOV7w | ------------------------------------------------------------ |
| NOV7x | ------------------------------------------------------------ |
| NOV7y | ------------------------------------------------------------ |
| NOV7z | ------------------------------------------------------------ |
| NOV7aa | ------------------------------------------------------------ |
| NOV7ab | TPLAVFSINGLMIKQLQYTAYGEIYYDSNPDFQMVIGFHGGLYDPLTKLVHFTQRDYDVL |
| NOV7ac | TPLAVFSINGLMIKQLQYTAYGEIYYDSNPDFQMVIGFHGGLYDPLTKLVHFTQRDYDVL |
| NOV7a | AGRWTSPDYTMWKNVGKEPAPFNLYMFKSNNPLSSELDLKNYVTDVKSWLVMFGFQLSNI |
| NOV7b | AGRWTSPDYTMWKNVGKEPAPFNLYMFKSNNPLSSELDLKNYVTDVKSWLVMFGFQLSNI |
| NOV7c | ------------------------------------------------------------ |
| NOV7d | ------------------------------------------------------------ |
| NOV7e | ------------------------------------------------------------ |
| NOV7f | ------------------------------------------------------------ |
| NOV7g | ------------------------------------------------------------ |
| NOV7h | ------------------------------------------------------------ |
| NOV7i | ------------------------------------------------------------ |
| NOV7j | ------------------------------------------------------------ |
| NOV7k | ------------------------------------------------------------ |
| NOV7l | AGRWTSPDYTMWKNVGKEPAPFNLYMFKSNNPLSSELDLKNYVTDVKSWLVMFGFQLSNI |
| NOV7m | ------------------------------------------------------------ |
| NOV7n | ------------------------------------------------------------ |
| NOV7o | AVFSINGLMIKQLQYTAYGEIYYDSNPDFQMVIGFHGGLYDPLTKLVHFTQRDYDVLAGR |
| NOV7p | ------------------------------------------------------------ |
| NOV7q | FVKIGSADGDLVTLGTTIGRKVLESGVNVTVSQPTLLVNGRTRRFTNIEFQYSTLLLSIR |
| NOV7r | AGRWTSPDYTMWKNVGKEPAPFNLYMFKSNNPLSSELDLKNYVTDVKSWLVMFGFQLSNI |
| NOV7s | AGRWTSPDYTMWKNVGKEPAPFNLYMFKSNNPLSSELDLKNYVTDVKSWLVMFGFQLSNI |
| NOV7t | ------------------------------------------------------------ |
| NOV7u | AGRWTSPDYTMWKNVGKEPAPFNLYMFKSNNPLSSELDLKNYVTDVKSWLVMFGFQLSNI |
| NOV7v | ------------------------------------------------------------ |
| NOV7w | ------------------------------------------------------------ |
| NOV7x | ------------------------------------------------------------ |
| NOV7y | ------------------------------------------------------------ |
| NOV7z | ------------------------------------------------------------ |
| NOV7aa | ------------------------------------------------------------ |
| NOV7ab | AGRWTSPDYTMWKNVGKEPAPFNLYMFKSNNPLSSELDLKNYVTDVKSWLVMFGFQLSNI |
| NOV7ac | AGRWTSPDYTNWKNVGKEPAPFNLYMFKSNNPLSSELDLKNYVTDVKSWLVMFGFQLSNI |
| NOV7a | IPGFPRAXMYFVPPPYELSESQASENGQLITGVQQTTERHNQAFMALEGQVITKKLHASI |
| NOV7b | IPGFPRAKMYFVPPPYELSESQASENGQLITGVQQTTERHNQAFMALEGQVITKKLHASI |
| NOV7c | ------------------------------------------------------------ |
| NOV7d | ------------------------------------------------------------ |
| NOV7e | ------------------------------------------------------------ |
| NOV7f | ------------------------------------------------------------ |
| NOV7g | ------------------------------------------------------------ |
| NOV7h | ------------------------------------------------------------ |
| NOV7i | ------------------------------------------------------------ |
| NOV7j | ------------------------------------------------------------ |
| NOV7k | ------------------------------------------------------------ |
| NOV7l | IPGFPRAKMYFVPPPYELSESQASENGQLITGVQQTTERHNQAFMALEGQVITKKLHASI |
| NOV7m | ------------------------------------------------------------ |
| NOV7n | ------------------------------------------------------------ |
| NOV7o | WTSPDYTMWKNVGKEPAPFNLYMFKSNNPLSSELDLKNYVTDVKSWLVMFGFQLSNIIPG |
| NOV7p | ------------------------------------------------------------ |
| NOV7q | YGLTPDTLDEEKARVLDQARQRALGTAWAKEQQKARDGREGSRLWTEGEKQQLLSTGRVQ |
| NOV7r | IPGFPRAKMYFVPPPYELSESQASENGQLITGVQQTTERHNQAFMALEGQVITKKLHASI |
| NOV7s | IPGFPRAKMYFVPPPYELSESQASENGQLITGVQQTTERHNQAFMALEGQVITKKLHASI |
| NOV7t | ------------------------------------------------------------ |
| NOV7u | IPGFPRAXMYFVPPPYELSESQASENGQLITGVQQTTERHNQAFMALEGQVITKKLHASI |
| NOV7v | ------------------------------------------------------------ |
| NOV7w | ------------------------------------------------------------ |
| NOV7x | ------------------------------------------------------------ |
| NOV7y | ------------------------------------------------------------ |
| NOV7z | ------------------------------------------------------------ |
| NOV7aa | ------------------------------------------------------------ |
| NOV7ab | IPGFPRAKMYFVPPPYELSESQASENGQLITGAHQTTERHNQAFMALEGQVITKKLHASI |
| NOV7ac | IPGFPRAKNYFVPPPYELSESQASENGQLITGVQQTTERHNQAFMALEGQVITKKLHASI |
| NOV7a | REKAGHWFATTTPIIGKGIMFAIKEGRVTTGVSSIASEDSRKVASVLNNAYYLDKMHYSI |
| NOV7b | REKAGHWFATTTPIIGKGIMFAIKEGRVTTGVSSIASEDSRKVASVLNNAYYLDKMHYSI |
| NOV7c | ------------------------------------------------------------ |
| NOV7d | ------------------------------------------------------------ |
| NOV7e | ------------------------------------------------------------ |
| NOV7f | ------------------------------------------------------------ |
| NOV7g | ------------------------------------------------------------ |
| NOV7h | ------------------------------------------------------------ |
| NOV7i | ------------------------------------------------------------ |
| NOV7j | ------------------------------------------------------------ |
| NOV7k | ------------------------------------------------------------ |
| NOV7l | REKAGHWFATTTPIIGKGIMFAIKEGRVTTGVSSIASEDSRKVASVLNNAYYLDKMHYSI |
| NOV7m | ------------------------------------------------------------ |
| NOV7n | ------------------------------------------------------------ |
| NOV7o | FPRAKMYFVPPPYELSESQASENGQLITGVQQTTERHNQAFMALEGQVITKKLHASIREK |
| NOV7p | ------------------------------------------------------------ |
| NOV7q | GYEGYYVLPVEQYPELADSSSNIQFLRQNEMGKR-------------------------- |
| NOV7r | REKAGHWFATTTPIIGKGIMFAIKEGRVTTGVSSIASEDSRKVASVLNNAYYLDKMHYSI |
| NOV7s | REKAGHWFATTTPIIGKGIMFAIKEGRVTTGVSSIASEDSRKVASVLNNAYYLDKMHYSI |
| NOV7t | ------------------------------------------------------------ |
| NOV7u | REKAGHWFATTTPIIGKGIMFAIKEGRVTTGVSSIASEDSRKVASVLNNAYYLDKMHYSI |
| NOV7v | ------------------------------------------------------------ |
| NOV7w | ------------------------------------------------------------ |
| NOV7x | ------------------------------------------------------------ |
| NOV7y | ------------------------------------------------------------ |
| NOV7z | ------------------------------------------------------------ |
| NOV7aa | ------------------------------------------------------------ |
| NOV7ab | REKAGHWFATTTPIIGKGIMFAIKEGRVTTGVSSIASEDSRKVASVLNNAYYLDKMHYSI |
| NOV7ac | REKAGHWFATTTPIIGKGIMFAIKEGRVTTGVSSIASEDSRKVASVLNNAYYLDKMHYSI |
| NOV7a | EGKDTHYFVKIGSADGDLVTLGTTIGRYVLESGVNVTVSQPTLLVNGRTRRFTNIEFQYS |
| NOV7b | EGKDTHYFVKIGSADGDLVTLGTTIGRKVLESGVNVTVSQPTLLVNGRTRRFTNIEFQYS |
| NOV7c | ------------------------------------------------------------ |
| NOV7d | ------------------------------------------------------------ |
| NOV7e | ------------------------------------------------------------ |
| NOV7f | ------------------------------------------------------------ |
| NOV7g | ------------------------------------------------------------ |
| NOV7h | ------------------------------------------------------------ |
| NOV7i | ------------------------------------------------------------ |
| NOV7j | ------------------------------------------------------------ |
| NOV7k | ------------------------------------------------------------ |
| Nov7l | EGKDTHYFVKIGSADGDLVTLGTTIGRKVLESGVNVTVSQPTLLVNGRTRRFTNIEFQYS |
| NOV7m | ------------------------------------------------------------ |
| NOV7n | ------------------------------------------------------------ |
| NOV7o | AGHWFATTTPITGKGIMFAIKEGRVTTGVSSIASEDSRKVASVLNNAYYLDKMHYSIEGK |
| NOV7p | ------------------------------------------------------------ |
| NOV7q | ------------------------------------------------------------ |
| NOV7r | EGKDTHYFVKIGSADGDLVTLGTTIGRKVLESGVNVTVSQPTLLVNGRTRRFTNIEFQYS |
| NOV7s | EGKDTHYFVKIGSADGDLVTLGTTIGRKVLESGVNVTVSQPTLLVNGRTRRFTNIEFQYS |
| NOV7t | ------------------------------------------------------------ |
| NOV7u | EGKDTHYFVKIGSADGDLVTLGTTIGRKVLESGVNVTVSQPTLLVNGRTRRFTNIEFQYS |
| NOV7v | ------------------------------------------------------------ |
| NOV7w | ------------------------------------------------------------ |
| NOV7x | ------------------------------------------------------------ |
| NOV7y | ------------------------------------------------------------ |
| NOV7z | ------------------------------------------------------------ |
| NOV7aa | ------------------------------------------------------------ |
| NOV7ab | EGKDTHYFVKIGSADGDLVTLGTTIGRKVLESGVNVTVSQPTLLVNGRTRRFTNIEFQYS |
| NOV7ac | EGKDTHYFVKIGSADGDLVTLGTTIGRKVLESGVNVTVSQPTLLVNGRTRRFTNIEFQYS |
| NOV7a | TLLLSIRYGLTPDTLDEEKARVLDQARQRALGTAWAKEQQKARDGREGSRLWTEGEKQQL |
| NOV7b | TLLLSIRYGLTPDTLDEEKARVLDQARQRALGTAWAKEQQKARDGREGSRLWTEGEKQQL |
| NOV7c | ------------------------------------------------------------ |
| NOV7d | ------------------------------------------------------------ |
| NOV7e | ------------------------------------------------------------ |
| Nov7f | ------------------------------------------------------------ |
| NOV7g | ------------------------------------------------------------ |
| NOV7h | ------------------------------------------------------------ |
| NOV7i | ------------------------------------------------------------ |
| NOV7j | ------------------------------------------------------------ |
| NOV7k | ------------------------------------------------------------ |
| NOV7l | TLLLSIRYGLTPDTLDEEKARVLDQARQRALGTAWAKEQQKARDGREGSRLWTEGEKQQL |
| NOV7m | ------------------------------------------------------------ |
| NOV7n | ------------------------------------------------------------ |
| NOV7o | DTHYFVKIGSADGDLVTLGTTIGRKVLESGVNVTVSQPTLLVNGRTRRFTNIEFQYSTLL |
| NOV7p | ------------------------------------------------------------ |
| NOV7q | ------------------------------------------------------------ |
| NOV7r | TLLLSIRYGLTPDTLDEEKARVLDQARQRALGTAWAKEQQKARDGREGSRLWTEGEKQQL |
| NOV7s | TLLLSIRYGLTPDTLDEEKARVLDQARQRALGTAWAKEQQKARDGREGSRLWTEGEKQQL |
| NOV7t | ------------------------------------------------------------ |
| NOV7u | TLLLSIRYGLTPDTLDEEKARVLDQARQRALGTAWAKEQQKARDGREGSRLWTEGEKQQL |
| NOV7v | ------------------------------------------------------------ |
| NOV7w | ------------------------------------------------------------ |
| NOV7x | ------------------------------------------------------------ |
| NOV7y | ------------------------------------------------------------ |
| NOV7z | ------------------------------------------------------------ |
| NOV7aa | ------------------------------------------------------------ |
| NOV7ab | TLLLSIRYGLTPDTLDEEKARVLDQARQRALGTAWAKEQQKAPDGREGSRLWTEGEKQQL |
| NOV7ac | TLLLSIRYGLTPDTLDEEKARVLDQARQRALGTAWAKEQQKARDGREGSRLWTEGEKQQL |
| NOV7a | LSTGRVQGYEGYYVLPVEQYPELADSSSNIQFLRQNEMGKR------------------- |
| NOV7b | LSTGRVQGYEGYYVLPVEQYPELADSSSNIQFLRQNEMGKR------------------- |
| NOV7c | ------------------------------------------------------------ |
| NOV7d | ------------------------------------------------------------ |
| NOV7e | ------------------------------------------------------------ |
| NOV7f | ------------------------------------------------------------ |
| NOV7g | ------------------------------------------------------------ |
| NOV7h | ------------------------------------------------------------ |
| NOV7i | ------------------------------------------------------------ |
| NOV7j | ------------------------------------------------------------ |
| NOV7k | ------------------------------------------------------------ |
| NOV7l | LSTGRVQGYEGYYVLPVEQYPELADSSSNIQFLRQNEMGKR------------------- |
| NOV7m | ------------------------------------------------------------ |
| NOV7o | LSIRYGLTPDTLDEEKARVLDQARQRALGTAWAKEQQKARDGREGSRLWTEGEKQQLLST |
| NOV7p | ------------------------------------------------------------ |
| NOV7q | ------------------------------------------------------------ |
| NOV7r | LSTGRVQGYEGYYVLPVEQYPELADSSSNIQFLRQNEMGKR------------------- |
| NOV7s | LSTGRVQGYEGYYVLPVEQYPELADSSSNIQFLRQNEMGKR------------------- |
| NOV7t | ------------------------------------------------------------ |
| NOV7u | LSTGRVQGYEGYYVLPVEQYPELADSSSNIQFLRQNEMGKR------------------- |
| NOV7v | ------------------------------------------------------------ |
| NOV7w | ------------------------------------------------------------ |
| NOV7x | ------------------------------------------------------------ |
| NOV7y | ------------------------------------------------------------ |
| NOV7z | ------------------------------------------------------------ |
| NOV7aa | ------------------------------------------------------------ |
| NOV7ab | LSTGRVQGYEGYYVLPVEQYPELADSSSNIQFLRQNENGKR------------------- |
| NOV7ac | LSTGRVQGYEGYYVLPVEQYPELADSSSNIQFLRQNEMGKR------------------- |
| NOV7a | -------------------------------------- |
| NOV7b | -------------------------------------- |
| NOV7c | -------------------------------------- |
| NOV7d | -------------------------------------- |
| NOV7e | -------------------------------------- |
| NOV7f | -------------------------------------- |
| NOV7g | -------------------------------------- |
| NOV7h | -------------------------------------- |
| NOV7i | -------------------------------------- |
| NOV7j | -------------------------------------- |
| NOV7k | -------------------------------------- |
| NOV7l | -------------------------------------- |
| NOV7m | -------------------------------------- |
| NOV7n | -------------------------------------- |
| NOV7o | GRVQGYEGYYVLPVEQYPELADSSSNIQFLRQNEMGKR |
| NOV7p | -------------------------------------- |
| NOV7q | -------------------------------------- |
| NOV7r | -------------------------------------- |
| NOV7s | -------------------------------------- |
| NOV7t | -------------------------------------- |
| NOV7u | -------------------------------------- |
| NOV7v | -------------------------------------- |
| NOV7w | -------------------------------------- |
| NOV7x | -------------------------------------- |
| NOV7y | -------------------------------------- |
| NOV7z | -------------------------------------- |
| NOV7aa | -------------------------------------- |
| NOV7ab | -------------------------------------- |
| NOV7ac | -------------------------------------- |
| NOV7a | (SEQ ID NO: 114) |
| NOV7b | (SEQ ID NO: 116) |
| NOV7c | (SEQ ID NO: 118) |
| NOV7d | (SEQ ID NO: 120) |
| NOV7e | (SEQ ID NO: 122) |
| NOV7f | (SEQ ID NO: 124) |
| NOV7g | (SEQ ID NO: 126) |
| NOV7h | (SEQ ID NO: 128) |
| NOV7i | (SEQ ID NO: 130) |
| NOV7j | (SEQ ID NO: 132) |
| NOV7k | (SEQ ID NO: 134) |
| NOV7l | (SEQ ID NO: 136) |
| NOV7m | (SEQ ID NO: 138) |
| NOV7n | (SEQ ID NO: 140) |
| NOV7o | (SEQ ID NO: 142) |
| NOV7p | (SEQ ID NO: 144) |
| NOV7q | (SEQ ID NO: 146) |
| NOV7r | (SEQ ID NO: 148) |
| NOV7s | (SEQ ID NO: 150) |
| NOV7t | (SEQ ID NO: 152) |
| NOV7u | (SEQ ID NO: 154) |
| NOV7v | (SEQ ID NO: 156) |
| NOV7w | (SEQ ID NO: 158) |
| NOV7x | (SEQ ID NO: 160) |
| NOV7y | (SEQ ID NO: 162) |
| NOV7z | (SEQ ID NO: 164) |
| NOV7aa | (SEQ ID NO: 166) |
| NOV7ab | (SEQ ID NO: 168) |
| NOV7ac | (SEQ ID NO: 170) |

[0388] Further analysis of the NOV7a protein yielded the following properties shown in Table 7C.

TABLE 7C
Protein Sequence Properties NOV7a

| | |
|---|---|
| SignalP analysis: | No Known Signal Sequence Predicted |
| PSORT II analysis: | |

| PSG: | a new signal peptide prediction method | |
|---|---|---|
| | N-region: | length 9; pos. chg 4; neg. chg 2 |
| | H-region: | length 3; peak value −8.37 |
| | PSG score: | −12.77 |

| | |
|---|---|
| GvH: | von Heijne's method for signal seq. recognition |
| | GvH score (threshold: −2.1): −14.20 |
| | possible cleavage site: between 32 and 33 |

>>> Seems to have no N-terminal signal peptide

| ALOM: | Klein et al's method for TM region allocation | | |
|---|---|---|---|
| | Init position for calculation: 1 | | |
| | Tentative number of TMS(s) for the threshold 0.5: 2 | | |
| | Number of TMS(s) for threshold 0.5: 1 | | |
| | INTEGRAL | Likelihood = | Transmembrane 380-396 |
| | | −11.73 | |

| | |
|---|---|
| PERIPHERAL | Likelihood = 3.39 (at 982) |

| | |
|---|---|
| | ALOM score: −11.73 (number of TMSs: 1) |
| MTOP: | Prediction of membrane topology (Hartmann et al.) |
| | Center position for calculation: 387 |
| | Charge difference: −6.0 C(0.0)-N(6.0) |
| | N >= C: N-terminal side will be inside |

>>> membrane topology: type 2 (cytoplasmic tail 1 to 380)

| MITDISC: | discrimination of mitochondrial targeting seq | | | |
|---|---|---|---|---|
| | R content: | 0 | Hyd Moment(75): | 3.46 |
| | Hyd Moment(95): | 5.35 | G content: | 0 |
| | D/E content: | 2 | S/T content: | 0 |

| | |
|---|---|
| | Score: −7.50 |
| Gavel: | prediction of cleavage sites for mitochondrial preseq |
| | cleavage site motif not found |

NUCDISC: discrimination of nuclear localization signals

| | |
|---|---|
| | pat4: RRHR (3) at 6 |
| | pat7: PRERRSI (5) at 483 |
| | bipartite: RKEQIKGKVTIFGRKLR at 1712 |
| | content of basic residues: 9.7% |
| | NLS Score: 0.64 |
| KDEL: | ER retention motif in the C-terminus: none |

ER Membrane Retention Signals:

KKXX-like motif in the C-terminus: EMGK

SKL: peroxisomal targeting signal in the C-terminus: none
PTS2: 2nd peroxisomal targeting signal: none
VAC: possible vacuolar targeting motif: none
RNA-binding motif: none
Actinin-type actin-binding motif:

type 1: none
type 2: none

NMYR: N-myristoylation pattern: none
Prenylation motif: none
memYQRL: transport motif from cell surface to Golgi: none
Tyrosines in the tail: too long tail
Dileucine motif in the tail: found

LL at 179
LL at 200
LL at 224
LL at 351

checking 63 PROSITE DNA binding motifs: none
checking 71 PROSITE ribosomal protein motifs: none
checking 33 PROSITE prokaryotic DNA binding motifs: none

| | |
|---|---|
| NNCN: | Reinhardt's method for Cytoplasmic/Nuclear discrimination |
| | Prediction: nuclear |
| | Reliability: 70.6 |
| COIL: | Lupas's algorithm to detect coiled-coil regions |
| | total: 0 residues• |

Final Results (k = 9/23):

```
43.5%: nuclear
21.7%: mitochondrial
13.0%: cytoplasmic
  8.7%: Golgi
  4.3%: plasma membrane
  4.3%: extracellular, including cell wall
  4.3%: peroxisomal
```

>> prediction for CG50426-17 is nuc (k = 23)

[0389] A search of the NOV7a protein against the Geneseq database, a proprietary database that contains sequences published in patents and patent publication, yielded several homologous proteins shown in Table 7D.

TABLE 7D
Geneseq Results for NOV7a

| | | NOV7a | | |
|---|---|---|---|---|
| | | Residues/ | Identities/ | |
| Geneseq | Protein/Organism/Length | Match | Similarities for the | Expect |
| Identifier | [Patent #, Date] | Residues | Matched Region | Value |
| AAU08681 | Human FCTR3f polypeptide | 1 . . . 2662 | 2620/2728 (96%) | 0.0 |
| | sequence - Homo sapiens, 2724 aa. | 1 . . . 2724 | 2628/2728 (96%) | |
| | [WO200166747-A2, 13-SEP-2001] | | | |
| AAU08680 | Human FCTR3b polypeptide | 1 . . . 2662 | 2620/2737 (95%) | 0.0 |
| | sequence - Homo sapiens, 2733 aa. | 1 . . . 2733 | 2628/2737 (95%) | |
| | [WO200166747-A2, 13-SEP-2001] | | | |
| ABP53587 | Human NOV15b protein SEQ ID | 1 . . . 2662 | 1780/2799 (63%) | 0.0 |
| | NO: 38 - Homo sapiens, 2721 aa. | 1 . . . 2721 | 2156/2799 (76%) | |
| | [WO200262999-A2, 15-AUG-2002] | | | |
| ABP53586 | Human NOV15a protein SEQ ID | 1 . . . 2662 | 1779/2803 (63%) | 0.0 |
| | NO: 36 - Homo sapiens, 2725 aa. | 1 . . . 2725 | 2155/2803 (76%) | |
| | [WO200262999-A2, 15-AUG-2002] | | | |
| ABP53589 | Human NOV15d protein SEQ ID | 239 . . . 2662 | 1689/2546 (66%) | 0.0 |
| | NO: 42 - Homo sapiens, 2613 aa. | 80 . . . 2613 | 2035/2546 (79%) | |
| | [WO200262999-A2, 15-AUG-2002] | | | |

[0390] In a BLAST search of public sequence databases, the NOV7a protein was found to have homology to the proteins shown in the BLASTP data in Table 7E.

TABLE 7E
Public BLASTP Results for NOV7a

| | | NOV7a | | |
|---|---|---|---|---|
| Protein | | Residues/ | Identities/ | |
| Accession | | Match | Similarities for the | Expect |
| Number | Protein/Organism/Length | Residues | Matched Portion | Value |
| CAC88676 | Sequence 12 from Patent | 1 . . . 2662 | 2620/2728 (96%) | 0.0 |
| | WO0166747 - Homo sapiens | 1 . . . 2724 | 2628/2728 (96%) | |
| | (Human), 2724 aa. | | | |
| CAC88675 | Sequence 7 from Patent | 1 . . . 2662 | 2620/2737 (95%) | 0.0 |
| | WO0166747 - Homo sapiens | 1 . . . 2733 | 2628/2737 (95%) | |
| | (Human), 2733 aa. | | | |
| Q9WTS5 | Ten-m2 - Mus musculus (Mouse), | 1 . . . 2662 | 2582/2768 (93%) | 0.0 |
| | 2764 aa. | 1 . . . 2764 | 2611/2768 (94%) | |
| Q9R1K2 | Neurestin alpha - Rattus | 1 . . . 2662 | 2574/2769 (92%) | 0.0 |
| | norvegicus (Rat), 2765 aa. | 1 . . . 2765 | 2610/2769 (93%) | |
| Q9ULU2 | KIAA1127 protein - Homo sapiens | 590 . . . 2662 | 2029/2148 (94%) | 0.0 |
| | (Human), 2144 aa (fragment). | 1 . . . 2144 | 2037/2148 (94%) | |

[0391] PFam analysis predicts that the NOV7a protein contains the domains shown in the Table 7F.

TABLE 7F
Domain Analysis of NOV7a

| | | Identities/ | |
|---|---|---|---|
| | | Similarities | |
| Pfam | NOV7a | for the | Expect |
| Domain | Match Region | Matched Region | Value |
| EGF | 599 . . . 626 | 10/47 (21%) | 0.44 |
| | | 20/47 (43%) | |
| EGF | 631 . . . 658 | 13/47 (28%) | 0.0037 |
| | | 20/47 (43%) | |
| EGF | 698 . . . 728 | 9/47 (19%) | 0.019 |
| | | 24/47 (51%) | |
| NHL | 1302 . . . 1337 | 12/36 (33%) | 0.36 |
| | | 27/36 (75%) | |
| NHL | 1431 . . . 1458 | 12/29 (41%) | 0.00074 |
| | | 23/29 (79%) | |

### Example 8.

[0392] The NOV8 clone was analyzed, and the nucleotide and encoded polypeptide sequences are shown in Table 8A.

TABLE 8A
NOV8 Sequence Analysis

| | | |
|---|---|---|
| NOV8a, CG50646-04 | SEQ ID NO: 177 | 11158 bp |

| | | |
|---|---|---|
| DNA Sequence | ORF Start: ATG at 77 | ORF Stop: TAA at 10787 |

CAATTGGTCTAGGGTCTCCCCCATTGGAATATCCATCAGTGATGAGAAATACAACGTTTGTTGAGTTT
TCTCTAGCATGAGAAGAATTTGCGCGGCTTGCTGGGGTCTGGCGCTCGTTTCGGGCTGGGCGACCTTT
CAGCAGATGTCCCCGTCGCGCAATTTCAGCTTCCGCCTCTTCCCCGAGACCGCGCCCGGGGCCCCCGG
GAGTATCCCCGCGCCGCCCGCTCCTGGCGACGAAGCGGCGGGGAGCAGAGTGGAGCGGCTGGGCCAGG
CGTTCCGCGTGCGGCTGCTGCGGGAGCTCAGCGAGCGCCTGGAGCTTGTCTTCCTGGTGGATGATTCG
TCCAGCGTGGGCGAAGTCAACTTCCGCAGCGAGCTCATGTTCGTCCGCAAGCTGCTGTCCGACTTCCC
CGTGGTGCCCACGGCCACGCGCGTGGCCATCGTGACCTTCTCGTCCAAGAACTACGTGGTGCCGCGCG
TCGATTACATCTCCACCCGCCGCGCGCGCCAGCACAAGTGCGCGCTGCTCCTCCAAGAGATCCCTGCC
ATCTCCTACCGAGGTGGCGGCACCTACACCAAGGGCGCCTTCCAGCAAGCCGCGCAAATTCTTCTTCA
TGCTAGAGAAAACTCAACAAAAGTTGTATTTCTCATCACTGATGGATATTCCAATGGGGGAGACCCTA
GACCAATTGCAGCGTCACTGCGAGATTCAGGAGTGGAGATCTTCACTTTTGGCATATGGCAAGGGAAC
ATTCGAGAGCTGAATGACATGGCTTCCACCCCAAAGGAGGAGCACTGTTACCTGCTACACAGTTTTGA
AGAATTTGAGGCTTTAGTCGCCCTCTGTCATATGTTATTTGTAGATCTACCTTCTGGGAGTTTTATTC
AAGATGATATGGTCCACTGCTCATATCTTTGTGATGAAGGCAAGGACTGCTGTGACCGAATGGGAAGC
TGCAAATGTGGGAAACACACAGGCCATTTTGAGTGCATCTGTGAAAAGGGGTATAACGGGAAAGGTCT
GCAGTATGACTGCACAGTTTGCCCATCGGGGACATACAAACCTGAAGGCTCACCAGGAGGAATCAGCA
TGCAGAGAGGGATACAGGGCATCTGGCCAGACCTGTGAAGTTGTCCACTGCCCTGCCCTGAAGCCTCC
CGAAAATGGTTACTTTATCCAAAACACTTGCAACAACCACTTCAATGCAGCCTGTGGGGTCCGATGTC
ACCCTGGATTTGATCTTGTGGGAAGCAGCATCATCTTATGTCTACCCAATGGTTTGTGGTCCGGTTCA
GAGAGCTACTGCAGAGTAAGAACATGTCCTCATCTCCGCCAGCCGAAACATGGCCACATCAGCTGTTC
TACAAGGGAAATGTTATATAAGACAACATGTTTGGTTGCCTGTGATGAAGGGTACAGGCTAGAAGGCA
GTGATAAGCTTACTTGTCAAGGAAACAGCCAGTGGGATGGGCCAGAACCCCGGTGTGTGGAGCGCCAC
TGTTCCACCTTTCAGATGCCCAAAGATGTCATCATATCCCCCCACAACTGTGGCAAGCAGCCAGCCAA
ATTTGGGACGATCTGCTATGTAAGTTGCCGCCAAGGGTTCATTTTATCTGGAGTCAAAGAAATGCTGA
GATGTACCACTTCTGGAAAATGGAATGTCGGAGTTCAGGCAGCTGTGTGTAAAGACGTGGAGGCTCCT
CAAATCAACTGTCCTAAGGACATAGAGGCTAAGACTCTGGAACAGCAAGATTCTGCCAATGTTACCTG
GCAGATTCCAACAGCTAAAGACAACTCTGGTGAAAAGGTGTCAGTCCACGTTCATCCAGCTTTCACCC
CACCTTACCTTTTCCCAATTGGAGATGTTGCTATCGTATACACGGCAACTGACCTATCCGGCAACCAG
GCCAGCTGCATTTTCCATATCAAGGTTATTGATGCAGAACCACCTGTCATAGACTGGTGCAGATCTCC
ACCTCCCGTCCAGGTCTCGGAGAAGGTACATGCCGCAAGCTGGGATGAGCCTCAGTTCTCAGACAACT
CAGGTGCTGAATTGGTCATTACCAGAAGTCATACACAAGGAGACCTTTTCCCTCAAGGGGAGACTATA
GTACAGTATACAGCCACTGACCCCTCAGGCAATAACAGGACATGTGATATCCATATTGTCATAAAAGG
TTCTCCCTGTGAAATTCCATTCACACCTGTAAATGGGGATTTTATATGCACTCCAGATAATACTGGAG
TCAACTGTACATTAACTTGCTTGGAGGGCTATGATTTCACAGAAGGGTCTACTGACAAGTATTATTGT
GCTTATGAAGATGGCGTCTGGAAACCAACATATACCACTGAATGGCCAGACTGTGCCAGTAAGCGTTT
TGCAAACCACGGGTTCAAGTCCTTTGAGATGTTCTACAAAGCAGCTCGTTGTGATGACACAGATCTGA
TGAAGAAGTTTTCTGAAGCATTTGAGACGACCCTGGGAAAAATGGTCCCATCATTTTGTAGTGATGCA
GAGGACATTGACTGCAGACTGGAGGAGAACCTGACCAAAAAATATTGCCTAGAATATAATTATGACTA
TGAAAATGGCTTTGCAATTGGTCCAGGTGGCTGGGGTGCAGCTAATAGGCTGGATTACTCTTACGATG
ACTTCCTGGACACTGTGCAAGAAACAGCCACAAGCATCGGCAATGCCAAGTCCTCACGGATTAAAAGA
AGTGCCCCATTATCTGACTATAAAATTAAGTTAATTTTTAACATCACAGCTAGTGTGCCATTACCCGA
TGAAAGAAATGATACCCTTGAATGGGAAAATCAGCAACGACTCCTTCAGACATTGGAAACTATCACAA
GCCGACAGCAATTCATTAGAAACAAAAAAGGCTTCCCCCTTCTGCAGACCAGGCTCAGTGCTGAGAGG
GGATCGGATCCTATCAAGATGAAGAAGGGCAACTTGAGTGCAAGCTTTGCCCCTCTGGGATGTACACG
GAATATATCCATTCAAGAAACATCTCTGATTGTAAAGCTCAGTGTAAACAAGGCACCTACTCATACAG
TGGACTTGAGACTTGTGAATCGTGTCCACTGGGCACTTATCAGCCAAAATTTGGTTCCCGGAGCTGCC
TCTCGTGTCCAGAAAACACCTCAACTGTGAAAAGAGGAGCCGTGAACATTTCTGCATGTGGAGTTCCT
TGTCCAGAAGGAAAATTCTCGCGTTCTGGGTTAATGCCCTGTCACCCATGTCCTCGTGACTATTACCA
ACCTAATGCAGGGAAGGCCTTCTGCCTGGCCTGTCCCTTTTATGGAACTACCCCATTCGCTGGTTCCA
GATCCATCACAGAATGTTCAAGTTTTAGTTCAACTTTCTCAGCGGCAGAGGAAAGTGTGGTGCCCCCT
GCCTCTCTTGGACATATTAAAAAGAGGCATGAAATCAGCAGTCAGGCAAGTCATGAATGCTTCTTTAA
ATACAGGTTTAAAGTGTGAAACAGACATCGATGAGTGCAGCCCACTGCCTTGCCTCAACAATGGAGTT
TGTAAAGACCTAGTTGGGGAATTCATTTGTGAGTGCCCATCAGGTTACACAGGTAAGCACTGTGAATT
GAACATCAATGAATGTCAGTCTAATCCATGTAGAAATCAGGCCACCTGTGTGGATGAATTAAATTCAT
ACAGTTGTAAATGTCAGCCAGGATTTTCAGGCAAAAGGTGTGAAACAGGTATGTATCAACTCAGTGTT
ATTAATAACCTTAATAATGCAGTCTGTGAAGACCAGGTTGGGGGATTCTTGTGCAAATGCCCACCTGG
CCTGTAAAGACGGTGCCAATAGCTTCAGGTGCCTGTGTGCAGCTGGCTTCACAGGATCACACTGTGAA
TTGAACATCAATGAATGTCAGTCTAATCCATGTAGAAATCAGGCCACCTGTGTGGATGAATTAAATTC
ACCTGGATTTTGAAGTTTCTGGCATCTATGGATATGTCATGCTAGATGGCATGCTCCCATCTCTCCAT
GCTCTAACCTGTACCTTCTGGATGAAATCCTCTGACGACATGAACTATGGAACACCAATCTCCTATGC
AGTTGATAACGGCAGCGACAATACCTTGCTCCTGACTGATTATAACGGGTGGGTTCTTTATGTGAATG
ACAAGTACTGGTGGAGCCTGGAGGGTCTATATAAATGGGGAATTATCTGACGGTGGTACTGGCCTCTC
CATTGGCAAAGCCATACCTGGTGGCGGTGCATTAGTTCTTGGGCAAGAGCAAGACAAAAAAGGAGAGG
GGTTCAACCCGGCTGAGTCTTTTGTGGGCTCCATAAGCCAGCTCAACCTCTGGGACTATGTCCTGTCT
CCACAGCAGGTGAAGTCACTGGCTACCTCCTGCCCAGAGGAACTCAGTAAAGGAAACGTGTTAGCATG
GTCAATCTGTTCTGTGAACCAGGCTTCCAGCTGGTCGGGAACCCTGTGCAGTACTGTCTGAATCAAGG
ACAGTGGACACAACCACTCCCCCACTGTGAACGCATTCGCTGTGGGGTGCCACCTCCTTTGGAGAATG
CTATTGGGTGACTCAAGGATGTTCTGTACAGATAATGGGAGCTGGAACGGCGTTTCACCATCCTGCTT
AGATGTCGATGAGTGTGCAGTTGGATCAGATTGTAGTGAGCATGCTTCTTGCCTGAACGTAGATGGAT
CCTACATATGTTCATGTGTCCCACCGTACACAGGAGATGGGAAAAACTGTGCAGAACCTATAAAATGT
AAGGCTCCAGGAAATCCGGAAAATGGCCACTCCTCAGGTGAGATTTATACAGTAGGTGCCGAAGTCAC
ATTTTCGTGTCAGGAAGGATACCAGTTGATGGGAGTAACCAAAATCACATGTTTGGAGTCTGGAGAAT
GGAATCATCTAATACCATATTGTAAAGCTGTTTCATGTGGTAAACCGGCTATTCCAGAAAATGGTTGC
ATTGAGGAGTTAGCATTTACTTTTGGCAGCAAAGTGACATATAGGTGTAATAAAGGATATACTCTGGC
CGGTGATAAAGAATCATCCTGTCTTGCTAACAGTTCTTGGAGTCATTCCCCTCCTGTGTGTGAACCAG
TGAAGTGTTCTAGTCCGGAAAATATAAATAATGGAAAATATATTTTGAGTGGGCTTACCTACCTTTCT
ACTGCATCATATTCATGCGATACAGGATACAGCTTACAGGGCCCTTCCATTATTGAATGCACGGCTTC
TGGCATCTGGGACAGAGCGCCACCTGCCTGTCACCTCGTCTTCTGTGGAGAACCACCTGCCATCAAAG
ATGCTGTCATTACGGGGAATAACTTCACTTTCAGGAACACCGTCACTTACACTTGCAAAGAAGGCTAT
ACTCTTGCTGGTCTTGACACCATTGAATGCCTGGCCGACGGCAAGTGGAGTAGAAGTGACCAGCAGTG
CCTGGCTGTCTCCTGTGATGAGCCACCCATTGTGGACCACGCCTCTCCAGAGACTGCCCATCGGCTCT
TTGGAGACATTGCATTCTACTACTGCTCTGATGGTTACAGCCTAGCAGACAATTCCCAGCTTCTCTGC
AATGCCCAGGGCAAGTGGGTACCCCCAGAAGGTCAAGACATGCCCCGTTGTATAGCTCATTTCTGTGA
AAAACCTCCATCGGTTTCCTATAGCATCTTGGAATCTGTGAGCAAAGCAAAATTTGCAGCTGGCTCAG
TTGTGAGCTTTAAATGCATGGAAGGCTTTGTACTGAACACCTCAGCAAAGATTGAATGTATGAGAGGT
GGGCAGTGGAACCCTTCCCCCATGTCCATCCAGTGCATCCCTGTGCGGTGTGGAGAGCCACCAAGCAT
CATGAATGGCTATGCAAGTGGATCAAACTACAGTTTTGGAGCCATGGTGGCTTACAGCTGCAACAAGG
GGTTCTACATCAAAGGGGAAAAGAAGAGCACCTGCGAAGCCACAGGGCAGTGGAGTAGTCCTATACCG
ACGTGCCACCCGGTATCTTGTGGTGAACCACCTAAGGTTGAGAATGGCTTTCTGGAGCATACAACTGG
CAGGATCTTTGAGAGTGAAGTGAGGTATCAGTGTAACCCGGGCTATAAGTCAGTCGGAAGTCCTGTAT
TTGTCTGCCAAGCCAATCGCCACTGGCACAGTGAATCCCCTCTGATGTGTGTTCCTCTCGACTGTGGA
AAACCTCCCCCGATCCAGAATGGCTTCATGAAAGGAGAAAACTTTGAAGTAGGGTCCAAGGTTCAGTT
TTTCTGTAATGAGGGTTATGAGCTTGTTGGTGACAGTTCTTGGACATGTCAGAAATCTGGCAAATGGA
ATAAGAAGTCAAATCCAAAGTGCATGCCTGCCAAGTGCCCAGAGCCGCCCCTCTTGGAAAACCAGCTA
GTATTAAAGGAGTTGACCACCGAGGTAGGAGTTGTGACATTTTCCTGTAAAGAAGGGCATGTCCTGCA
AGGCCCCTCTGTCCTGAAATGCTTGCCATCCCAGCAATGGAATGACTCTTTCCCTGTTTGTAAGATTG
TTCTTTGTACCCCACCTCCCCTAATTTCCTTTGGTGTCCCCATTCCTTCTTCTGCTCTTCATTTTGGA
AGTACTGTCAAGTATTCTTGTGTAGGTGGGTTTTTCCTAAGAGGAAATTCTACCACCCTCTGCCAACC
TGATGGCACCTGGAGCTCTCCACTGCCAGAATGTGTTCCAGTAGAATGTCCCCAACCTGAGGAAATCC
CCAATGGAATCATTGATGTGCAAGGCCTTGCCTATCTCAGCACAGCTCTCTATACCTGCAAGCCAGGC
TTTGAATTGGTGGGAAATACTACCACCCTTTGTGGAGAAAATGGTCACTGGCTTGGAGGAAAACCAAC
ATGTAAAGCCATTGAGTGCCTGAAACCCAAGGAGATTTTGAATGGCAAATTCTCTTACACGGACCTAC
ACTATGGACAGACCGTTACCTACTCTTGCAACCGAGGCTTTCGGCTCGAAGGTCCCAGTGCCTTGACC
TGTTTAGAGACAGGTGATTGGGATGTAGATGCCCCATCTTGCAATGCCATCCACTGTGATTCCCCACA
ACCCATTGAAAATGGTTTTGTAGAAGGTGCAGATTACAGCTATGGTGCCATAATCATCTACAGTTGCT
TCCCTGGGTTTCAGGTGGCTGGTCATGCCATGCAGACCTGTGAAGAGTCAGGATGGTCAAGTTCCATC
CCAACATGTATGCCAATAGACTGTGGCCTCCCTCCTCATATAGATTTTGGAGACTGTACTAAACTCAA
AGATGACCAGGGATATTTTGAGCAAGAAGACGACATGATGGAAGTTCCATATGTGACTCCTCACCCTC
CTTATCATTTGGGAGCAGTGGCTAAAACCTGGGAAAATACAAAGGAGTCTCCTGCTACACATTCATCA
AACTTTCTGTATGGTACCATGGTTTCATACACCTGTAATCCAGGATATGAACTTCTGGGGAACCCTGT
GCTGATCTGCCAGGAAGATGGAACTTGGAATGGCAGTGCACCATCCTGCATTTCAATTGAATGTGACT
TGCCTACTGCTCCTGAAAATGGCTTTTTGCGTTTTACAGAGACTAGCATGGGAAGTGCTGTGCAGTAT
AGCTGTAAACCTGGACACATTCTAGCAGGCTCTGACTTAAGGCTTTGTCTAGAGAATAGAAAGTGGAG
AAGGAAGCAACTACACATACCTGAGCACGTTGTACTATGAGTGTGACCCCGGATATGTGCTGAATGGC
CTGCAGTTCACCCCCAGTCTCAGCCAATGGCCAGGTGAGAGGAGACGAGTACACATTCCAAAAAGAGA
TTGAATACACTTGCAATGAAGGGTTCTTGCTTGAGGGAGCCAGGAGTCGGGTTTGTCTTGCCAATGGA
AGTTGGAGTGGAGCCACTCCCGACTGTGTGCCTGTCAGATGTGCCACCCCGCCACAACTGGCCAATGG
GGTGACGGAAGGCCTGGACTATGGCTTCATGAAGGAAGTAACATTCCACTGTCACGAGGGCTACATCT
TGCACGGTGCTCCAAAACTCACCTGTCAGTCAGATGGCAACTGGGATGCAGAGATTCCTCTCTGTAAA
CCAGTCAACTGTGGACCTCCTGAAGATCTTGCCCATGGTTTCCCTAATGGTTTTTCCTTTATTCATGG
GGGCCATATACAGTATCAGTGCTTTCCTGGTTATAAGCTCCATGGAAATTCATCAAGAAGGTGCCTCT
CCAATGGCTCCTGGAGTGGCAGCTCACCTTCCTGCCTGCCTTGCAGATGTTCCACACCAGTAATTGAA
TATGGAACTGTCAATGGGACAGATTTTGACTGTGGAAAGGCAGCCCGGATTCAGTGCTTCAAAGGCTT
GTGAACACACTTCTTGTGGTTCTCTTCCAATGATACCAAATGCGTTCATCAGTGAGACCAGCTCTTGG
AAGGAAAATGTGATAACTTACAGCTGCAGGTCTGGATATGTCATACAAGGCAGTTCAGATCTGATTTG
TACAGAGAAAGGGGTATGGAGCCAGCCTTATCCAGTCTGTGAGCCCTTGTCCTGTGGGTCCCCACCGT
CTGTCGCCAATGCAGTGGCAACTGGAGAGGCACACACCTATGAAAGTGAAGTGAAACTCAGATGTCTG
GAAGGTTATACGATGGATACAGATACAGATACATTCACCTGTCAGAAAGATGGTCGCTGGTTCCCTGA
GAGAATCTCCTGCAGTCCTAAAAAATGTCCTCTCCCGGAAAACATAACACATATACTTGTACATGGGG
ACGATTTCAGTGTGAATAGGCAAGTTTCTGTGTCATGTGCAGAAGGGTATACCTTTGAGGGAGTTAAC
ATATCAGTATGTCAGCTTGATGGAACCTGGGAGCCACCATTCTCCGATGAATCTTGCAGTCCAGTTTC
TTGTGGGAAACCTGAAAGTCCAGAACATGGATTTGTGGTTGGCAGTAAATACACCTTTGAAAGCACAA
TTATTTATCAGTGTGAGCCTGGCTATGAACTAGAGGGGAACAGGGAACGTGTCTGCCAGGAGAACAGA
CAGTGGAGTGGAGGGGTGGCAATATGCAAAGAGACCAGGTGTGAAACTCCACTTGAATTTCTCAATGG
GAAAGCTGACATTGAAAACAGGACGACTGGACCCAACGTGGTATATTCCTGCAACAGAGGCTACAGTC
TTGAAGGGCCATCTGAGGCACACTGCACAGAAAATGGAACCTGGAGCCACCCAGTCCCTCTCTGCAAA
TGATCAGAATGTGTCCATCAAATGTAGGGAAGGTTTTCTGCTGCAGGGCCACGGCATCATTACCTGCA
GTAGAAAATGCAATTGCTCGAGGCGTACATTATCAATATGGAGACATGATCACCTACTCATGTTACAG
TGGATACATGTTGGAGGGTTTCCTGAGGAGTGTTTGTTTAGAAAATGGAACATGGACATCACCTCCTA
TTTGCAGAGCTGTCTGTCGATTTCCATGTCAGAATGGGGGCATCTGCCAACGCCCAAATGCTTGTTCC
TGTCCAGAGGGCTGGATGGGGCGCCTCTGTGAAGAACCAATCTGCATTCTTCCCTGTCTGAACGGAGG
TCGCTGTGTGGCCCCTTACCAGTGTGACTGCCCGCCTGGCTGGACGGGGTCTCGCTGTCATACAGCTG
TTTGCCAGTCTCCCTGCTTAAATGGTGGAAAATGTGTAAGACCAAACCGATGTCACTGTCTTTCTTCT
TGGACGGGACATAACTGTTCCAGGAAAAGGAGGACTGGGTTTTAACCACTGCACGACCATCTGGCTCT
CCCAAAAGCAGGATCATCTCTCCTCGGTAGTGCCTGGGCATCCTGGAACTTATGCAAAGAAAGTCCAA
CATGGTGCTGGGTCTTGTTTAGTAAACTTGTTACTTGGGGTTACTTTTTTTATTTTGTGATATATTTT
GTTATTCCTTGTGACATACTTTCTTACATGTTTCCATTTTTAAATATGCCTGTATTTTCTATATAAAA
ATTATATTAAATAGATGCTGCTCTACCCTCACAAAATGTACATATTCTGCTGTCTATTGGGAAAGTTC
CTGGTACACATTTTTATTCAGTTACTTAAAATGATTTTTCCATTAAAGTATATTTTGCTACTAAATAA
AAAAAA

NOV8a CG50646-04

| | | | |
|---|---|---|---|
| Protein sequence | SEQ ID NO: 178 | 357O aa | MW at 390012.5kD |

MRRICAACWGLALVSGWATFQQMSPSRNFSFRLFPETAPGAPGSIPAPPAPGDEAAGSRVERLGQAFR
VRLLRELSERLELVFLVDDSSSVGEVNFRSELMFVRKLLSDFPVVPTATRVAILVTFSSKNYVVPRVDY
ISTRRARQHKCALLLQEIPAISYRGGGTYTKGAFQQAAQILLHARENSTKVVFLITDGYSNGGDPRPI
AASLRDSGVEIFTFGIWQGNIRELNDMASTPKEEHCYLLHSFEEFEALVALCHMLFVDLPSGSFIQDD
MVHCSYLCDEGKDCCDRMGSCKCGKHTGHFECICEKGYNGKGLQYDCTVCPSGTYKPEGSPGGISSCI
PCPDENHTSPPGSTSPEDCVCREGYRASGQTCEVVHCPALKPPENGYFIQNTCNNHFNAACGVRCHPG
FDLVGSSIILCLPNGLWSGSESYCRVRTCPHLRQPKHGHISCSTREMLYKTTCLVACDEGYRLEGSDK
LTCQGNSQWDGPEPRCVERHCSTFQMPKDVIISPHNCGKQPAKFGTICYVSCRQGFILSGVKEMLRCT
TSGKWNVGVQAAVCKDVEAPQINCPKDIEAKTLEQQDSANVTWQIPTAKDNSGEKVSVHVHPAFTPPY
LFPIGDVAIVYTATDLSGNQASCIFHIKVIDAEPPVIDWCRSPPPVQVSEKVHAASSWEPQFSDNSGA
ELVITRSHTQGDLFPQGETIVQYTATDPSGNNRTCDIHIVIKGSPCEIPFTPVNGDFICTPDNTGVNC
TLTCLEGYDFTEGSTDKYYCAYEDGVWKPTYTTEWPDCASKRFANHGFKSFEMFYKAARCDDTDLMKK
FSEAFETTLGKMVPSFCSDAEDIDCRLEENLTKKYCLEYNYDYENGFAIGPGGWGAANRLDYSYDDFL
DTVQETATSIGNAKSSRIKRSAPLSDYKIKLIFNITASVPLPDERNDTLEWENQQRLLQTLETITNKL
KRTLNKDPMYSFQLASEILIADSNSLETKKASPFCRPGSVLRGRMCVNCPLGTYYNLEHFTCESCRIG
SYQDEEGQLECKLCPSGMYTEYIHSRNISDCKAQCKQGTYSYSGLETCESCPLGTYQPKFGSRSCLSC
PENTSTVKRGAVNISACGVPCPEGKFSRSGLMPCHPCPRDYYQPNAGKAFCLACPFYGTTPFAGSRSI
TECSSFSSTFSAAEESVVPPASLGHIKKRHEISSQASHECFFNPCHNSGTCQQLGRGYVCLCPLGYTG
LKCETDIDECSPLPCLNNGVCKDLVGEFICECPSGYTGKHCELNINECQSNPCRNQATCVDELNSYSC
KCQPGFSGKRCETGMYQLSVINNLNNAVCEDQVGGFLCKCPPGFLGTRCGKNVDECLSQPCKNGATCK
DGANSFRCLCAAGFTGSHCELNINECQSNPCRNQATCVDELNSYSCKCQPGFSGKRCETEQSTGFNLD
FEVSGIYGYVMLDGMLPSLHALTCTFWMKSSDDMNYGTPISYAVDNGSDNTLLLTDYNGWVLYVNGRE
KITNCPSVNDGRWHHIAITWTSTGGAWRVYINGELSDGGTGLSIGKAIPGGGALVLGQEQDKKGEGFN
PAESFVGSISQLNLWDYVLSPQQVKSLATSCPEELSKGNVLAWPDFLSGIVGKVKIDSKSIFCSDCPR
LGGSVPHLRTASEDLKPGSKVNLFCEPGFQLVGNPVQYCLNQGQWTQPLPHCERIRCGVPPPLENGFH
SADDFYAGSTVTYQCNNGYYLLGDSRMFCTDNGSWNGVSPSCLDVDECAVGSDCSEHASCLNVDGSYI
CSCVPPYTGDGKNCAEPIKCKAPGNPENGHSSGEIYTVGAEVTFSCQEGYQLMGVTKITCLESGEWNH
LIPYCKAVSCGKPAIPENGCIEELAFTFGSKVTYRCNKGYTLAGDKESSCLANSSWSHSPPVCEPVKC
SSPENINNGKYILSGLTYLSTASYSCDTGYSLQGPSIIECTASGIWDRAPPACHLVFCGEPPAIKDAV
ITGNNFTFRNTVTYTCKEGYTLAGLDTIECLADGKWSRSDQQCLAVSCDEPPIVDHASPETAHRLFGD
IAFYYCSDGYSLADNSQLLCNAQGKWVPPEGQDMPRCIAHFCEKPPSVSYSILESVSKAKFAAGSVVS
FKCMEGFVLNTSAKIECMRGGQWNPSPMSIQCIPVRCGEPPSIMNGYASGSNYSFGAMVAYSCNKGFY
IKGEKKSTCEATGQWSSPIPTCHPVSCGEPPKVENGFLEHTTGRIFESEVRYQCNPGYKSVGSPVFVC
QANRHWHSESPLMCVPLDCGKPPPIQNGFMKGENFEVGSKVQFFCNEGYELVGDSSWTCQKSGKWNKK
SNPKCMPAKCPEPPLLENQLVLKELTTEVGVVTFSCKEGHVLQGPSVLKCLPSQQWNDSFPVCKIVLC
TPPPLISFGVPIPSSALHFGSTVKYSCVGGFFLRGNSTTLCQPDGTWSSPLPECVPVECPQPEEIPNG
IIDVQGLAYLSTALYTCKPGFELVGNTTTLCGENGHWLGGKPTCKAIECLKPKEILNGKFSYTDLHYG
QTVTYSCNRGFRLEGPSALTCLETGDWDVDAPSCNAIHCDSPQPIENGFVEGADYSYGAIIIYSCFPG
FQVAGHAMQTCEESGWSSSIPTCMPIDCGLPPHIDFGDCTKLKDDQGYFEQEDDMMEVPYVTPHPPYH
LGAVAKTWENTKESPATHSSNFLYGTMVSYTCNPGYELLGNPVLICQEDGTWNGSAPSCISIECDLPT
APENGFLRFTETSMGSAVQYSCKPGHILAGSDLRLCLENRKWSGASPRCEAISCKKPNPVMNGSIKGS
NYTYLSTLYYECDPGYVLNGTERRTCQDDKNWDEDEPICIPVDCSSPPVSANGQVRGDEYTFQKEIEY
TCNEGFLLEGARSRVCLANGSWSGATPDCVPVRCATPPQLANGVTEGLDYGFMKEVTFHCHEGYILHG
APKLTCQSDGNWDAEIPLCKPVNCGPPEDLAHGFPNGFSFIHGGHIQYQCFPGYKLHGNSSRRCLSNG
SWSGSSPSCLPCRCSTPVIEYGTVNGTDFDCGKAARIQCFKGFKLLGLSEITCEADGQWSSGFPHCEH
TSCGSLPMIPNAFISETSSWKENVITYSCRSGYVIQGSSDLICTEKGVWSQPYPVCEPLSCGSPPSVA
NAVATGEAHTYESEVKLRCLEGYTMDTDTDTFTCQKDGRWFPERISCSPKKCPLPENITHILVHGDDF
SVNRQVSVSCAEGYTFEGVNISVCQLDGTWEPPFSDESCSPVSCGKPESPEHGFVVGSKYTFESTIIY
QCEPGYELEGNRERVCQENRQWSGGVAICKETRCETPLEFLNGKADIENRTTGPNVVYSCNRGYSLEG
PSEAHCTENGTWSHPVPLCKPNPCPVPFVIPENALLSEKEFYVDQNVSIKCREGFLLQGHGIITCNPD
ETWTQTSAKCEKISCGPPAHVENAIARGVHYQYGDMITYSCYSGYMLEGFLRSVCLENGTWTSPPICR
AVCRFPCQNGGICQRPNACSCPEGWMGRLCEEPICILPCLNGGRCVAPYQCDCPPGWTGSRCHTAVCQ
SPCLNGGKCVRPNRCHCLSSWTGHNCSRKRRTGF

| | | |
|---|---|---|
| NOV8b, 237582568 | SEQ ID NO: 179 | 2127 bp |

| | | |
|---|---|---|
| DNA Sequence | ORF Start: at 1 | ORF Stop: end of sequence |

CGGCCGTGGGCGACCTTTCAGCAGATGTCCCCGTCGCGCAATTTCAGCTTCCGCCTCTTCCCCGAGAC
CGCGCCCGGGGCCCCCGGGAGTATCCCCGCGCCGCCCGCTCCTGGCGACGAAGCGGCGGGGAGCAGAG
TGGAGCGGCTGGGCCAGGCGTTCCGGCGACGCGTGCGGCTGCTGCGGGAGCTCAGCGAGCGCCTGGAG
CTTGTCTTCCTGGTGGATGATTCGTCCAGCGTGGGCGAAGTCAACTTCCGCAGCGAGCTCATGTTCGT
CCGCAAGCTGCTGTCCGACTTCCCCGTGGTGCCCACGGCCACGCGCGTGGCCATCGTGACCTTCTCGT
CCAAGAACTACGTGGTGCCGCGCGTCGATTACATCTCCACCCGCCGCGCGCGCCAGCACAAGTGCGCG
CTGCTCCTCCAAGAGATCCCTGCCATCTCCTACCGAGGTGGCGGCACCTACACCAAGGGCGCCTTCCA
GCAAGCCGCGCAAATTCTTCTTCATGCTAGAGAAAACTCAACAAAAGTTGTATTTCTCATCACTGATG
GATATTCCAATGGGGGAGACCCTAGACCAATTGCAGCGTCACTGCGAGATTCAGGAGTGGAGATCTTC
ACTTTTGGCATATGGCAAGGGAACATTCGAGAGCTGAATGACATGGCTTCCACCCCAAAGGAGGAGCA
CTGTTACCTGCTACACAGTTTTGAAGAATTTGAGGCTTTAGCTCGCCGGGCATTGCATGAAGATCTAC
CTTCTGGGAGTTTTATTCAAGATGATATGGTCCACTGCTCATATCTTTGTGATGAAGGCAAGGACTGC
TGTGACCGAATGGGAAGCTGCAAATGTGGGACACACACAGGCCATTTTGAGTGCATCTGTGAAAAGGG
GTATTACGGGAAAGGTCTGCAGTATGAATGdACAGCTTGCCCATCGGGGACATACAAACCTGAAGCCT
CACCAGGAGGAATCAGCAGTTGCATTCCATGTCCTGATGAAAATCACACCTCTCCACCTGGAAGCACA
TCCCCTGAAGACTGTGTCTGCAGAGAGGGATACAGGGCATCTGGCCAGACCTGTGAACTTGTCCACTG
CCCTGCCCTGAAGCCTCCCGAAAATGGTTACTTTATCCAAAACACTTGCAACAACCACTTCAATGCAG
CCTGTGGGGTCCGATGTCACCCTGGATTTGATCTTGTGGGAAGCAGCATCATCTTATGTCTACCCAAT
GGTTTGTGGTCCGGTTCAGAGAGCTACTGCAGAGTAAGAACATGTCCTCATCTCCGCCAGCCGAAACA
GGTACAGACTAGAAGGCAGTGATAAGCTTACTTGTCAAGGAAACAGCCAGTGGGATGGGCCAGAACCC
CGGTGTGTGGAGCGCCACTGTTCCACCTTTCAGATGCCCAAAGATGTCATCATATCCCCCCACAACTG
TGGCAAGCAGCCAGCCAAATTTGGGACGATCTGCTATGTAAGTTGCCGCCAAGGGTTCATTTTATCTG
GAGTCAAAGAAATGCTGAGATGTACCACTTCTGGAAAATGGAATGTCGGAGTTCAGGCAGCTGTGTGT
AAAGACGTGGAGGCTCCTCAAATCAACTGTCCTAAGGACATAGAGGCTAAGACTCTGGAACAGCAAGA
TTCTGCCAATGTTACCTGGCAGATTCCAACAGCTAAAGACAACTCTGGTGAAAAGGTGTCAGTCCACG
TTCATCCAGCTTTCACCCCACCTTACCTTTTCCCAATTGGAGATGTTGCTATCGTATACACGGCAACT
GACCTATCCGGCAACCAGGCCAGCTGCATTTTCCATATCAAGGTTATTGATGCAGAACCACCTGTCAT
AGACTGGTGCAGATCTCCACCTCCCGTCCAGGTCTCGGAGAAGGTACATGCCGCAAGCTGGGATGAGC
CTCAGTTCTCAGACAACTCAGGGGCTGAATTGGTCATTACCAGAAGTCATACACAAGGAGACCTTTTC
CCTCAAGGGGAGACTATAGTACAGTATACAGCCACTGACCCCTCAGGCAATAATAGGACATGTGATAT
CCATATTGTCATACTCGAG

NOV8b, 237582568

| | | | |
|---|---|---|---|
| Protein Sequence | SEQ ID NO: 180 | 709 aa | MW at 78072.4kD |

RPWATFQQMSPSRNFSFRLFPETAPGAPGSIPAPPAPGDEAAGSRVERLGQAFRRRVRLLRELSERLE
LVFLVDDSSSVGEVNFRSELMFVRKLLSDFPVVPTATRVAIVTFSSKNYVVPRVDYISTRPARQHKCA
LLLQEIPAlSYRGGGTYTKGAFQQAAQILLHARENSTKVVFLITDGYSNGGDPRPIAASLRDSGVEIF
TFGIWQGNIRELNDMASTPKEEHCYLLHSFEEFEALARRALHEDLPSGSFIQDDMVHCSYLCDEGKDC
CDRMGSCKCGTHTGHFECICEKGYYGKGLQYECTACPSGTYKPEASPGGISSCIPCPDENHTSPPGST
SPEDCVCREGYRASGQTCELVHCPALKPPENGYFIQNTCNNHFNAACGVRCHPGFDLVGSSIILCLPN
GLWSGSESYCRVRTCPHLRQPKHGHISCSTREMLYKTTCLVACDEGYRLEGSDKLTCQGNSQWDGPEP
RCVERHCSTFQMPKDVIISPHNCGKQPAKFGTICYVSCRQGFILSGVKEMLRCTTSGKWNVGVQAAVC
KDVEAPQINCPKDIEAKTLEQQDSANVTWQIPTAKDNSGEKVSVHVHPAFTPPYLFPIGDVAIVYTAT
DLSGNQASCIFHIKVIDAEPPVIDWCRSPPPVQVSEKVHAASWDEPQFSDNSGAELVITRSHTQGDLF
PQGETIVQYTATDPSGNNRTCDIHIVILE

| | | |
|---|---|---|
| NOV8c, 236589434 | SEQ ID NO: 181 | 2127 bp |

| | | |
|---|---|---|
| DNA Sequence | ORF Start: at 1 | ORF Stop: end of sequence |

CGGCCGTGGGCGACCTTTCAGCAGATGTCCCCGTCGCGCAATTTCAGCTTCCGCCTCTTCCCCGAGAC
CGCGCCCGGGGCCCCCGGGAGTATCCCCGCGCCGCCCGCTCCTGGCGACGAAGCGGCGGGGAGCAGAG
TGGAGCGGCTGGGCCAGGCGTTCCGGCGACGCGTGCGGCTGCTGCGGGAGCTCAGCGAGCGCCTGGAG
CTTGTCTTCCTGGTGGATGATTCGTCCAGCGTGGGCGAAGTCAACTTCCGCAGCGAGCTCATGTTCGT
CCGCAAGCTGCTGTCCGACTTCCCCGTGGTGCCCACGGCCACGCGCGTGGCCATCGTGACCTTCTCGT
CCAAGAACTACGTGGTGCCGCGCGTCGATTACATCTCCACCCGCCGCGCGCGCCAGCACAAGTGCGCG
CTGCTCCTCCAAGAGATCCCTGCCATCTCCTACCGAGGTGGCGGCACCTACACCAAGGGCGCCTTCCA
GCAAGCCGCGCAAATTCTTCTTCATGCTAGAGAAAACTCAACAAAAGTTGTATCTCTCATCACTGATG
GATATTCCAATGGQGGAGACCCTAGACCAATTGCAGCGTCACTGCGAGATTCAGGAGTGGAGATCTTC
ACTTTTGGCATATGGCAAGGGAACATTCGAGAGCTGAATGACATGGCTTCCACCCCAAAGGAGGAGCA
CTGTTACCTGCTACACAGTTTTGAAGAATTTGAGGCTTTAGCTCGCCGGGCATTGCATGAAGATCTAC
CTTCTGGGAGTTTTATTCAAGATGATATGGTCCACTGCTCATATCTTTGTGATGAAGGCAAGGACTGC
TGTGACCGAATGGGAAGCTGCAAATGTGGGACACACACAGACCGTTTTGAGTGCATCTGTGAAAAGGG
GTATTACGGGAAAGGTCTGCAGTATGAATGCACAGCTTGCCCATCGGGGACATACAAACCTGAAGGCT
CACCAGGAGGAATCAGCAGTTGCATTCCATGTCCTGATGAAAATCACACCTCTCCACCTGGAAGCACA
TCCCCTGAAGACTGTGTCTGCAGAGAGGGATACAGGGCATCTGGCCAGACCTGTGAACTTGTCCACTG
CCCTGCCCTGAAGCCTCCCGAAAATGGTTACTTTATCCAAAACACTTGCAACAACCACTTCAATGCAG
CCTGTGGGGTCCGATGTCACCCTGGATTTGATCTTGTGGGAAGCAGCATCATCTTATGTCTACCCAAT
GGTTTGTGGTCCGGTTCAGAGAGCTACTGCAGAGTAAGAACATGTCCTCATCTCCGCCAGCCGAAACA
TGGCCACATCAGCTGTTCTACAAGGGAAATGTTATATAAGACAACATGTTTGGTTGCCTGTGATGAAG
GGTACAGACTAGAAGGCAGTGATAAGCTTACTTGTCAAGGAAACAGCCAGTGGGATGGGCCAGAACCC
CGGTGTGTGGAGCGCCACTGTTCCACCTTTCAGATGCCCAAAGATATCATCATATCCCCCCACAACTG
TGGCAAGCAGCCAGCCAAATTTGGGACGATCTGCTATGTAAGTTGCCGCCAAGGGTTCATTTTATCTG
GAGTCAAAGAAATGCTGAGATGTACCACTTCTGGAAAATGGAATGTAGGAGTTCAGGCAGCTGTGCGT
AAAGACGTGGAGGCTCCTCAAATCAACTGTCCTAAGGACATAGAGGCTAAGACTCTGGAACAGCAAGA
TTCCGCCAATGTTACCTGGCAGATTCCAACAGCTAAAGACAACTCTGGTGAAAAGGTGTCAGTCCACG
TTCATCCAGCTTTCACCCCACCTTACCTTTTCCCAATTGGAGATGTTGCTATCGTATACACGGCAACT
GACCTATCCGGCAACCAGGCCAGCTGCATTTTCCATATCAAGGTTATTGATGCAGAACCACCTGTCAT
AGACTGGTGCAGATCTCCACCTCCCGTCCAGGTCTCGGAGAAGGTACATGCCGCAAGCTGGGATGAGC
CTCAGTTCTCAGACAACTCAGGGGCTGAATTGGTCATTACCAGAAGTCATACACAAGGAGACCTTTTC
CCTCAAGGGGAGACTATAGTACAGTATACAGCCACTGACCCCTCAGGCAATAACAGGACATGTGATAT
CCATATTGTCATACTCGAG

NOV8c, 236589434

| | | | |
|---|---|---|---|
| Protein Sequence | SEQ ID NO: 182 | 709 aa | MW at 78142.4kD |

RPWATFQQMSPSRNFSFRLFPETAPGAPGSIPAPPAPGDEAAGSRVERLGQAFRRRVRLLRELSERLE
LVFLVDDSSSVGEVNFRSELMFVRKLLSDFPVVPTATRVAIVTFSSKNYVVPRVDYISTRRARQHKCA
LLLQEIPATSYRGGGTYTKGAFQQAAQILLHARENSTKVVSLITDGYSNGGDPRPIAASLRDSGVEIF
TFGIWQGNIRELNDMASTPKEEHCYLLHSFEEFEALARPALHEDLPSGSFIQDDMVHCSYLCDEGKDC
CDRMGSCKCGTHTDRFECICEKGYYGKGLQYECTACPSGTYKPEGSPGGISSCIPCPDENHTSPPGST
SPEDCVCREGYRASGQTCELVHCPALKPPENGYFIQNTCNNHFNAACGVRCHPGFDLVGSSIILCLPN
GLWSGSESYCRVRTCPHLRQPKHGHISCSTREMLYKTTCLVACDEGYRLEGSDKLTCQGNSQWDGPEP
RCVERHCSTFQMPKDIIISPHNCGKQPAKFGTICYVSCRQGFILSGVKEMLRCTTSGKWNVGVQAAVR
KDVEAPQINCPKDIEAKTLEQQDSANVTWQIPTAKDNSGEKVSVHVHPAFTPPYLFPIGDVAIVYTAT
DLSGNQASCIFHIKVIDAEPPVIDWCRSPPPVQVSEKVHAASWDEPQFSDNSGAELVITRSHTQGDLF
PQGETIVQYTATDPSGNNRTCDIHIVILE

| | | |
|---|---|---|
| NOV8d, 236495259 | SEQ ID NO: 183 | 2127 bp |

| | | |
|---|---|---|
| DNA Sequence | ORF Start: at 1 | ORF Stop: end of sequence |

CGGCCGTGGGCGACCTTTCAGCAGATGTCCCCGTCGCGCAATTTCAGCTTCCGCCTCTTCCCCGAGAC
CGCGCCCGGGGCCCCCGGGAGTATCCCCGCGCCGCCCGCTCCTGGCGACGAAGCGGCGGGGAGCAGAG
TGGAGCGGCTGGGCCAGGCGTTCCGGCGACGCGTGCGGCTGCTGCGGGAGCTCAGCGAGCGCCTGGAG
CTTGTCTTCCTGGTGGATGATTCGTCCAGCGTGGGCGAAGTCAACTTCCGCAGCGAGCTCATGTTCGT
CCGCAAGCTGCTGTCCGACTTCCCCGTGGTGCCCACGGCCACGCGCGTGGCCATCGTGACCTTCTCGT
CCAAGAACTACGTGGTGCCGCGCGTCGATTACATCTCCACCCGCCGCGCGCGCCAGCACAAGTGCGCG
CTGCTCCTCCAAGAGATCCCTGCCATCTCCTACCGAGGTGGCGGCACCTACATCAAGGGCGCCTTCCA
GCAAGCCGCGCAAATTCTTCTTCATGCTAGAGAAAACTCAACAAAAGTTGTATTTCTCATCACTGATG
GATATTCCAATGGGGGAGACCCTAGACCAATTGCAGCGTCACTGCGAGATTCAGGAGTGGAGATCTTC
ACTTTTGGCATATGGCAAGGGAACATTCGAGAGCTGAATGACATGGCTTCCACCCCAAAGGAGGAGCA
CTGTTACCTGCTACACAGTTTTGAAGAATTTGAGGCTTTAGCTCGCCGGGCATTGCATGAAGATCTAC
CTTCTGGGAGTTTTATTCAAGATGATATGGTCCACTGCTCATATCTTTGTGATGAAGGCAAGGACTGC
TGTGACCGAATGGGAAGCTGCAAATGTGGGACACACACAGGCCATTTTGAGTGCATCTGTGAAAAGGG
GTATTACGGGAAAGGTCTGCAGTATGAATGCACAGCTTGCCCATCGGGGACATACAAACCTGAAGGCT
CACCAGGAGGAATCAGCAGTTGCATTCCATGTCCTGATGAAAATCACACCTCTCCACCTGGAAGCACA
TCCCCTGAAGACTGTGTCTGCAGAGAGGOATACAGGGCATCTGGCCAGACCTGTGAACTTGTCCACTG
CCCTGCCCTGAAGCCTCCCGAAAATGGTTACTTTATCCAAAACACTTGCAACAACCACTTCAATGCAG
CCTGTGGGGTCCGATGTCACCCTGGATTTGATCTTGTGGGAAGCAGCATCATCTTATGTCTACCCAAT
GGTTTGTGGTCCGGTTCAGAGAGCTACTGCAGAGTAAGAACATGTCCTCATCTCCGCCAGCCGAAACA
TGGCCACATCAGCTGTTCTACAAGGGAAATGTTATATAAGACAACATGTTTGGTTGCCTGTGATGAAG
GGTACAGACTAGAAGGCAGTGATAAGCTTACTTGTCAAGGAAACAGCCAGTGGGATGGGCCAGAACCC
CGGTGTGTGGAGCGCCACTGTTCCACCTTTCAGATGCCCAAAGATGTCATCATATCCCCCCACAACTG
TGGCAAGCAGCCAGCCAAATTTGGGACGATCTGCTATGTAAGTTGCCGCCAAGGGTTCATTTTATCTG
GAGTCAAAGAAATGCTGAGATGCACCACTTCTGGAAAATGGAATGTCGGAGTTCAGGCAGCTGTGTGT
AAAGACGTGGAGGCTCCTCAAATCAACTGTCCTAAGGACATAGAGGCTAAGACTCTGGAACAGCAAGA
TTCTGCCAATGTTACCTGGCAGATTCCAACAGCTAAAGACAACTCTGGTGAAAAGGTGTCAGTCCACG
TTCATCCAGCTTTCACCCCACCTTACCTTTTCCCAATTGGAGATGTTGCTATCGTATACACGGCAACT
GACCTATCCGGCAACCAGGCCAGCTGCATTTTCCATATCAAGGTTATTGATGCAGAACCACCTGTCAT
AGACTGGTGCAGATCTCCACCTCCCGTCCAGGTCTCGGAGAAGGTACATGCCGCAAGCTGGGATGAGC
CTCAGTTCTCAGACAACTCAGGGGCCGAATTGGTCATTACCAGAAGTCATACACAAGGAGACCTTTTC
CCTCAAGGGGAGACTATAGTACAGTATACAGCCACTGACCCCTCAGGCAATAACAGGACATGTGATAT
CCATATTGTCATACTCGAG

NOV8d, 236495259

| | | | |
|---|---|---|---|
| Protein sequence | SEQ ID NO: 184 | 709 aa | MW at 78070.4kD |

RPWATFQQMSPSRNFSFRLFPETAPGAPGSIPAPPAPGDEAAGSRVERLGQAFRRRVRLLRELSERLE
LVFLVDDSSSVGEVNFRSELMFVRKLLSDFPVVPTATRVAIVTFSSKNYVVPRVDYISTRRARQHKCA
LLLQEIPAlSYRGGGTYIKGAFQQAAQILLHARENSTKVVFLITDGYSNGGDPRPIAASLRDSGVEIF
TFGIWQGNIRELNDMASTPKEEHCYLLHSFEEFEALARRALHEDLPSGSFIQDDMVHCSYLCDEGKDC
CDPMGSCKCGTHTGHFECICEKGYYGKGLQYECTACPSGTYKPEGSPGGISSCIPCPDENHTSPPGST
SPEDCVCREGYRASGQTCELVHCPALKPPENGYFIQNTCNNHFNAACGVRCHPGFDLVGSSIILCLPN
GLWSGSESYCRVRTCPHLRQPKHGHISCSTREMLYKTTCLVACDEGYRLEGSDKLTCQGNSQWDGPEP
RCVERNCSTFQMPKDVIISPHNCGKQPAKFGTICYVSCRQGFILSGVKEMLRCTTSGKWNVGVQAAVC
KDVEAPQINCPKDIEAKTLEQQDSANVTWQIPTAKDNSGEKVSVHVHPAFTPPYLFPIGDVAIVYTAT
DLSGNQASCIFHIKVIDAEPPVIDWCRSPPPVQVSEKVHAASWDEPQFSDNSGAELVITRSHTQGDLF
PQGETIVQYTATDPSGNNRTCDIHIVILE

| | | |
|---|---|---|
| NOV8e, 236495256 | SEQ ID NO: 185 | 2127 bp |

| | | |
|---|---|---|
| DNA Sequence | ORF Start: at 1 | ORF Stop: end of sequence |

CGGCCGTGGGCGACCTTTCAGCAGATGTCCCCGTCGCGCAATTTCAGCTTCCGCCTCTTCCCCGAGAC
CGCGCCCGGGGCCCCCGGGAGTATCCCCGCGCCGCCCGCTCCTGGCGACGAAACGGCGGGGAGCAGAG
TGGAGCGGCTGGGCCAGGCGTTCCGGCGACGCGTGCGGCTGCTGCGGGAGCTCAGCGAGCGCCTGGAG
CTTGTCTTCCTGGTGGATGATTCGTCCAGCGTGGGCGAAGTCAACTTCCGCAGCGAGCTCATGTTCGT
CCGCAAGCTGCTGTCCGACTTCCCCGTGGTGCCCACGGCCACGCGCGTGGCCATCGTGACCTTCTCGT
CCAAGAACTACGTGGTGCCGCGCGCCGATTACATCTCCACCCGCCGCGCGCGCCAGCACAAGTGCGCG
CTGCTCCTCCAAGAGATCCCTGCCATCTCCTACCGGGGTGGCGGCACCTACACCAAGGGCGCCTTCCA
GCAAGCCGCGCAAATTCTTCTTCATGCTAGAGAAAACTCAGCAAAAGTTGTATTTCTCATCACTGATG
GATATTCCAATGGGGGAGACCCTAGACCAATTGCAGCGTCACTGCGAGATTCAGGAGTGGAGATCTTC
ACTTTTGGCATATGGCAAGGGAACATTCGAGAGCTGAATGACATGGCTTCCACCCCAAAGGAGGAGCA
CTGTTACCTGCTACACAGTTTTGAAGAATTTGAGGCTTTAGCTCGCCGGGCATTGCATGAAGATCTAC
CTTCTGGGAGTTTTATTCAAGATGATATGGTCCACTGCTCATATCTTTGTGATGAAGGCAAGGACTGC
TGTGACCGAATGGGAAGCTGCAAATGTGGGACACACACAGGCCATTTTGAGTGCATCTGTGAAAAGGG
GTATTACGGGAAGGGTCTGCAGTATGAATGCACAGCTTGCCCATCGGGGACATACAAACCTGAAGGCT
CACCAGGAGGAATCAGCAGTTGCATTCCATGTCCTGATGAAAATCACACCTCTCCACCTGGAAGCACA
TCCCCTGAAGACTGTGTCTGCAGAGAGGGATACAGGGCATCTGGCCAGACCTGTGAACTTGTCCACTG
CCCTGCCCTGAAGCCTCCCGAAAATGGTTACTTTATCCAAAACACTTGCAACAACCACTTCAATGCAG
CCTGTGGGGTCCGATGTCACCCTGGATTTGATCTTGTGGGAAGCAGCATCATCTTATGTCTACCCAAT
GGTTTGTGGTCCGGTTCAGAGAGCTACTGCAGAGTAAGAACATGTCCTCATCTCCGCCAGCCGAAACA
TGGCCACATCAGCTGTTCTACAAGGGAAATGTTATATAAGACAACATGTTTGGTTGCCTGTGATGAAG
GGTACAGACTAGAAGGCAGTGATAAGCTTACTTGTCAAGGAAACAGCCAGTGGGATGGGCCAGAACCC
CGGTGTGTGGAGCGCCACTGTTCCACCTTTCAGATGCCCAAAGATATCATCATATCCCCCCACAACTG
TGGCAAGCAGCCAGCCAAATTTGGGACGATCTGCTATGTAAGTCGCCGCCAAGGGTTCATTTTATCTG
GAGTCAAAGAAATGCTGAGATGTACCACTTCTGGAAAATGGAATGTCGGAGTTCAGGCAGCTGTGTGT
AAAGACGTGGAGGCTCCTCAAATCAACTGTCCTAAGGACATAGAGGCTAAGACTCTGGAACAGCAAGA
TTCTGCCAATGTTACCTGGCAGATTCCAACAGCTAAAGACAACTCTGGTGAAAAGGTGTCAGTCCACG
TTCATCCAGCTTTCACCCCACCTTACCTTTTCCCAATTGGAGATGTTGCTATCGTATACACGGCAACT
GACCTATCCGGCAACCAGGCCAGCTGCATTTTCCATATCAAGGTTATTGATGCAGAACCACCTGTCAT
AGACTGGTGCAGATCTCCACCTCCCGTCCAGGTCTCGGAGAAGGTACATGCCGCAAGCTGGGATGAGC
CTCAGTTCTCAGACAACTCAGGGGCTGAATTGGTCATTACCAGAAGTCATACACAAGGAGAACTTTTC
CCTCAAGGGGAGACTATAGTACAGTATACAGCCACTGACCCCTCAGGCAATAACAGGACATGTGATAT
CCATATTGTCATACTCGAG

NOV8e, 236495256

| | | | |
|---|---|---|---|
| Protein Sequence | SEQ ID NO: 186 | 709 aa | MW at 78081.3kD |

RPWATFQQMSPSRNFSFRLFPETAPGAPGSIPAPPAPGDEAAGSRVERLGQAFRRRVRLLRELSERLE
LVFLVDDSSSVGEVNFRSELMFVRKLLSDFPVVPTATRVAIVTFSSKNYVVPRADYISTRRARQHKCA
LLLQEIPAISYRGGGTYTKGAFQQAAQILLHARENSAKVVFLITDGYSNGGDPRPIAASLRDSGVEIF
TFGIWQGNIRELNDMASTPKEEHCYLLHSFEEFEALARRALHEDLPSGSFIQDDMVHCSYLCDEGKDC
CDRMGSCKCGTHTGHFECICEKGYYGKGLQYECTACPSGTYKPEGSPGGISSCIPCPDENHTSPPGST
SPEDCVCREGYRASGQTCELVHCPALKPPENGYFIQNTCNNHFNAACGVRCHPGFDLVGSSIILCLPN
GLWSGSESYCRVRTCPHLRQPKHGHISCSTREMWYKTTCLVACDEGYPLEGSDKLTCQGNSQWDGPEP
RCVERHCSTFQMPKDIIISPHNCGKQPAKFGTICYVSRRQGFILSGVKEMLRCTTSGKWNVGVQAAVC
KDVEAPQINCPKDIEAKTLEQQDSANVTWQIPTAKDNSGEKVSVHVHPAFTPPYLFPIGDVAIVYTAT
DLSGNQASCIFHIKVIDAEPPVIDWCRSPPPVQVSEKVHAASWDEPQFSDNSGAELVITRSHTQGELF
PQGETIVQYTATDPSGNNRTCDIHIVILE

| | | |
|---|---|---|
| NOV8f, CG50646-01 | SEQ ID NO: 187 | 1952 bp |

| | | |
|---|---|---|
| DNA Sequence | ORF Start: ATG at 470 | ORF Stop: TGA at 1688 |

TTCAGGAACACCGTCACTTACACTTGCAAAGAAGGCTATACTCTTGCTGGTCTTGACACCATTGAATG
CCTGGCCGACGGCAAGTGGAGTAGAAGTGACCAGCAGTGCCTGGCTGTCTCCTGTGATGAGCCACCCA
TTGTGGACCACGCCTCTCCAGAGACTGCCCATCGGCTCTTTGGAGACATTGCATTCTACTACTGCTCT
GATGGTTACAGCCTAGCAGACAATTCCCAGCTTCTCTGCAATGCCCAGGGCAAGTGGGTACCCCCAGA
AGGTCAAGACATGCCCCGTTGTATAGCTCATTTCTGTGAAAAACCTCCATCGGTTTCCTATAGCATCT
TGGAATCTGTGAGCAAAGCAAAATTTGCAGCTGGCTCAGTTGTGAGCTTTAAATGCATGGAAGGCTTT
GTACTGAACACCTCAGCAAAGATTGAATGTATGAGAGGTGGGCAGTGGAACCCTTCCCCCCATGTCCA
TCCAGTGCATCCCTGTGCGGTGTGGAGAGCCACCAAGCATCATGAATGGCTATGCAAGTGGATCAAAC
TACAGTTTTGGAGCCATGGTGGCTTACAGCTGCAACAAGGGGTTCTACATCAAAGGGGAAAAGAAGAG
CACCTGCGAAGCCACAGGGCAGTGGAGTAGTCCTATACCGACGTGCCACCCGGTATCTTGTGGTGAAC
CACCTAAGGTTGAGAATGGCTTTCTGGAGCATACACCTGGCAGGATCTTTGAGAGTGAAGTGAGGTAT
CAGTGTAACCCGGGCTATAAGTCAGTCGGAAGTCCTGTATTTGTCTGCCAAGCCAATCGCCACTGGCA
CAGTGAATCCCCTCTGATGTGTGTTCCTCTCGACTGTGGAAAACCTCCCCCGATCCAGAATGGCTTCA
TGAAAGGAGAAAACTTTGAAGTAGGGTCCAAGGTTCAGTTTTTCTGTAATGAGGGTTATGAGCTTGTT
GGGGACAGTTCTTGGACATGTCAGAAATCTGGCAAATGGAATAAGAAGTCAAATCCAAAGTGCATGCC
TGCCAAGTGCCCAGAGCCGCCCCTCTTGGAAAACCAGCTAGTATTAAAGGAGTTGACCACCGAGGTAG
GAGTTGTGACATTTTCCTGTAAAGAAGGGCATGTCCTGCAAGGCCCCTCTGTCCTGAAATGCTTGCCA
TCCCAGCAATGGAATGACTCTTTCCCTGTTTGTAAGATTGTTCTTTGTACCCCACCTCCCCTAATTTC
CTTTGGTGTCCCCATTCCTTCTTCTGCTCTTCATTTTGGAAGTACTGTCAAGTATTCTTGTGTAGGTG
GGTTTTTCCTAAGAGGAAATTCTACCACCCTCTGCCAACCTGATGGCACCTGGAGCTCTCCACTGCCA
GAATGTGTTCCAGTAGAATGTCCCCAACCTGAGGAAATCCCCAATGGAATCATTGATGTGCAAGGCCT
TGCCTATCTCAGCACAGCTCTCTATACCTGCAAGCCAGGCTTTGAATTGGTGGGAAATACTACCACCC
TTTGTGGAGAAAATGGTCACTGGCTTGGAGGAAAACCAACATGTAAAGCCATTGAGTGCCTGAAACCC
AAGGAGATTTTGAATGGCAAATTCTCTTACACGGACCTACACTATGGACAGACCGTTACCTACTCTTG
CAACCGAGGCTTTCGGCTCGAAGGGTCCCAGTGCCTTGACCTGTTTAGAGACAGGTGATTGGGATGTA
GATGCCCCATCTTGCAATGCCATCCACTGTGATTCCCCACAACCCATTGAAAATGGTTTTGTAGAAGC
TGCAGATTACAGCTATGGTGCCATAATCATCTACAGTTGCTTCCCTGGGTTTCAGGTGGCTGGTCATC
CTCCCTCCTCATATAGATTTTGGAGACTGTACTAAACTCAAAGATGAC

NOV8f, CG50646-01

| | | | |
|---|---|---|---|
| Protein Sequence | SEQ ID NO: 188 | 406 aa | MW at 44385.5kD |

MSIQCIPVRCGEPPSIMNGYASGSNYSFGAMVAYSCNKGFYIKGEKKSTCEATGQWSSPIPTCHPVSC
GEPPKVENGFLEHTTGRIFESEVRYQCNPGYKSVGSPVFVCQANRHWHSESPLMCVPLDCGKPPPIQN
GFMKGENFEVGSKVQFFCNEGYELVGDSSWTCQKSGKWNKKSNPKCMPAKCPEPPLLENQLVLKELTT
EVGVVTFSCKEGHVLQGPSVLKCLPSQQWNDSFPVCKIVLCTPPPLISFGVPIPSSALHFGSTVKYSC
VGGFFLRGNSTTLCQPDGTWSSPLPECVPVECPQPEEIPNGIIDVQLAYLSTALYTCKPGFELVGNT
TTLCGENGHWLGGKPTCKAIECLKPKEILNGKFSYTDLHYGQTVTYSCNRGFRLEGSQCLDLFRDR

| | | |
|---|---|---|
| NOV8g, CG50646-02 | SEQ ID NO: 189 | 1709 bp |

| | | |
|---|---|---|
| DNA Sequence | ORF Start: ATG at 413 | ORF Stop: TGA at 1445 |

CAGAGTCTTGCTCTGTCTCCCAGGCTGGAGTGCAGTGGCACAATCTCAGCTCACTGCAACCTCTGCCT
CCTGGGTTCAAGTGATTCTCCTGCCTCAGCTTCCCAAATGGCTGAGATTACAGGCACATACCACCATG
CCTAGCTAATTTTTGTACAGGTTTCACCATGTTGGCCAGGCTGGTCTCGAACTCCTAACCTCAAGTGT
TCCTCCTGCCTCCGCCTCCCAAAGTGCTGGGATTGTAGGCATGAATCGTCATGCCGAGCCTAAGTTGA
CTTTCTACTATCATTTTCACTTATTTAAAAAAATAGAATGGATCTATTGGAAAAACCATAAATCATTA
TTTGCTTACTTCCTAATTGATTCATTTTAACATAGACCTTTTAGTTTTTTTCACTATCCAAGGATTTA
GTTAATGCTATCATCTGTTATACAAATCGCACTCACTTGCTTTCTTCCTGTTGCACAGCATACAACTG
GCAGGATCTTTGAGAGTGAAGTGAGGTATCAGTGTAACCCGGGCTATAAGTCAGTCGGAAGTCCTGTA
TTTGTCTGCCAAGCCAATCGCCACTGGCACAGTGAATCCCCTCTGATGTGTGTTCCTCTCGACTGTGG
AAAACCTCCCCCGATCCAGAATGGCTTCATGAAAGGAGAAAACTTTGAAGTAGGGTCCAAGGTTCAGT
TTTTCTGTAATGAGGGTTATGAGCTTGTTGGGGACAGTTCTTGGACATGTCAGAAATCTGGCAAATGG
AATAAGAAGTCAAATCCAAAGTGCATGCCTGCCAAGTGCCCAGAGCCGCCCCTCTTGGAAAACCAGCT
AGTATTAAAGGAGTTGACCACCGAGGTAGGAGTTGTGACATTTTCCTGTAAAGAAGGGCATGTCCTGC
AAGGCCCCTCTGTCCTGAAATGCTTGCCATCCCAGCAATGGAATGACTCTTTCCCTGTTTGTAAGATT
GTTCTTTGTACCCCACCTCCCCTAATTTCCTTTGGTGTCCCCATTCCTTCTTCTGCTCTTCATTTTGG
AAGTACTGTCAAGTATTCTTGTGTAGGTGGGTTTTTCCTAAGAGGAAATTCTACCACCCTCTGCCAAC
CTGATGGCACCTGGAGCTCTCCACTGCCAGAATGTGTTCCAGTAGAATGTCCCCAACCTGAGGAAATC
CCCAATGGAATCATTGATGTGCAAGGCCTTGCCTATCTCAGCACAGCTCTCTATACCTGCAAGCCAGG
CTTTGAATTGGTGGGAAATACTACCACCCTTTGTGGAGAAAATGGTCACTGGCTTGGAGGAAAACCAA
CATGTAAAGCCATTGAGTGCCTGAAACCCAAGGAGATTTTGAATGGCAAATTCTCTTACACGGACCTA
CACTATGGACAGACCGTTACCTACTCTTGCAACCGAGGCTTTCGGCTCGAAGGGTCCCAGTGCCTTGA
CCTGTTTAGAGACAGGTGATTGGGATGTAGATGCCCCATCTTGCAATGCCATCCACTGTGATTCCCCA
CAACCCATTGAAAATGGTTTTGTAGAAGGTGCAGATTACAGCTATGGTGCCATAATCATCTACAGTTG
CTTCCCTGGGTTTCAGGTGGCTGGTCATGCCATGCAGACCTGTGAAGAGTCAGGATGGTCACTCGTGC
CCCCAACATGTATGCCAATAGACTGTGGCCTCCCTCCTCATATAGATTTTGGAGACTGTACTAAACTC
AAAGATGAC

NOV8g, CG50646-02

| | | | |
|---|---|---|---|
| Protein Sequence | SEQ ID NO: 190 | 344 aa | MW at 37763.2kD |

MLSSVIQIALTCFLPVAQHTTGRIFESEVRYQCNPGYKSVGSPVFVCQANRHWHSESPLMCVPLDCGK
PPPIQNGFMKGENFEVGSKVQFFCNEGYELVGDSSWTCQKSGKWNKKSNPKCMPAKCPEPPLLENQLV
LKELTTEVGVVTFSCKEGHVLQGPSVLKCLPSQQWNDSFPVCKIVLCTPPPLISFGVPIPSSALHFGS
TVKYSCVGGFFLRGNSTTLCQPDGTWSSPLPECVPVECPQPEEIPNGIIDVQGLAYLSTALYTCKPGF
ELVGNTTTLCGENGHWLGGKPTCKAIECLKPKEILNGKFSYTDLHYGQTVTYSCNRGFRLEGSQCLDL
FRDR

| | | |
|---|---|---|
| NOV8h, CG50646-03 | SEQ ID NO: 191 | 6153 bp |

| | | |
|---|---|---|
| DNA Sequence | ORF Start: ATG at 1 | ORF Stop: TGA at 6151 |

ATGGCGGGCGCCCCTCCCCCAGCCTCGTTGCCGCCTTGCAGTTTGATCTCAGACTGCTGTGCTAGCAA
TCAGCGAGATTCCGTGGGCGTAGGACCCTCTGAGCCAGGTGTGGGATATAGTCTCGTGGTGCGCCGTT
TCTTAAGCCGGTCTGAAAAGCGCAATATTCGGGTGGGAGTGACCCGATTTTCCAGCTATACTCTTGCT
CTCCTGTGATGAGCCACCCATTGTGGACCACGCCTCTCCAGAGACTGCCCATCGGCTCTTTGGAGACA
TTGCATTCTACTACTGCTCTGATGGTTACAGCCTAGCAGACAATTCCCAGCTTCTCTGCAATGCCCAG
GGCAAGTGGGTACCCCCAGAAGGTCAAGACATGCCCCGTTGTATAGCTCATTTCTGTGAAAAACCTCC
ATCGGTTTCCTATAGCATCTTGGAATCTGTGAGCAAAGCAAAATTTGCAGCTGGCTCAGTTGTGAGCT
AACCCTTCCCCCATGTCCATCCAGTGCATCCCTGTGCGGTGTGGAGAGCCACCAAGCATCATGAATGG
TCAAAGGGGAAAAGAAGAGCACCTGCGAAGCCACAGGGCAGTGGAGTAGTCCTATACCGACGTGCCAC
CCGGTATCTTGTGGTGAACCACCTAAGGTTGAGAATGGCTTTCTGGAGCATACAACTGGCAGGATCTT
TGAGAGTGAAGTGAGGTATCAGTGTAACCCGGGCTATAAGTCAGTCGGAAGTCCTGTATTTGTCTGCC
AAGCCAATCGCCACTGGCACAGTGAATCCCCTCTGATGTGTGTTCCTCTCGACTGTGGAAAACCTCCC
CCGATCCAGAATGGCTTCATGAAAGGAGAAAACTTTGAAGTAGGGTCCAAGGGTCAGTTTTTCTGTAA
TGAAGGGTTATNGAGCTTTGTTGGGGACAGTTCTTGGACATGTCAGAAATCTGGCAAATGGAATAAGA
AGTCAAATCCAAAGTGCATGCCTGCCAAGTGCCCAGAGCCGCCCCTCTTGGAAAACCAGCTAGTATTA
AAGGAGTTGACCACCGAGGTAGGAGTTGTGACATTTTCCTGTAAAGAAAGGCATGTCCTGCAAGGCCC
CTCTGTCCTGAAATGCTTGCCATCCCAGCAATGGAATGACTCTTTCCCTGTTTGTAAGATTGTTCTTT
GTACCCCACCTCCCCTAATTTCCTTTGGTGTCCCCATTCCTTCTTCTGCTCTTCATTTTGGAAGTACT
GTCAAGTATTCTTGTGTAGGTGGGTTTTTCCTAAGAGGAAATTCTACCACCCTCTGCCAACCTGATGG
CACCTGGAGCTCTCCACTGCCAGAATGTGTTCCAGTAGAATGTCCCCAACCTGAGGAAATCCCCAATG
GAATCATTGATGTGCAAGGCCTTGCCTATCTCAGCACAGCTCTCTATACCTGCAAGCCAGGCTTTGAA
TTGGTGGGAAATACTACCACCCTTTGTGGAGAAAATGGTCACTGGCTTGGAGGAAAACCAACATGTAA
AGCCATTGAGTGCCTGAAACCCAAGGAGATTTTGAATGGCAAATTCTCTTACACGGACCTACACTATG
GACAGACCGTTACCTACTCTTGCAACCGAGGCTTTCGGCTCGAAGGTCCCAGTGCCTTGACCTGTTTA
GAGACAGGTGATTGGGATGTAGATGCCCCATCTTGCAATGCCATCCACTGTGATTCCCCACAACCCAT
TGAAAATGGTTTTGTAGAAGGTGCAGATTACAGCTATGGTGCCATAATCATCTACAGTTGCTTCCCTG
GGTTTCAGGTGGCTGGTCATGCCATGCAGACCTGTGAAGAGTCAGGATGGTCAAGTTCCATCCCAACA
TGTATGCCAATAGACTGTGGCCTCCCTCCTCATATAGATTTTGGAGACTGTACTAAACTCAAAGATGA
CCAGGGATATTTTGAGCAAGAAGACGACATGATGGAAGTTCCATATGTGACTCCTCACCCTCCTTATC
ATTTGGGAGCAGTGGCTAAAACCTGGGAAAATACAAAGGAGTCTCCTGCTACACATTCATCAAACTTT
CTGTATGGTACCATGGTTTCATACACCTGTAATCCAGGATATGAACTTCTGGGGAACCCTGTGCTGAT
CTGCCAGGAAGATGGAACTTGGAATGGCAGTGCACCATCCTGCATTTCAATTGAATGTGACTTGCCTA
CTGCTCCTGAAAATGGCTTTTTGCGTTTTACAGAGACTAGCATGGGAAGTGCTGTGCAGTATAGCTGT
AAACCTGGACACATTCTAGCAGGCTCTGACTTAAGGCTTTGTCTAGAGAATAGAAAGTGGAGTGGTGC
CTCCCCACGCTGTGAAGCCATTTCATGCAAAAAGCCAAATCCAGTCATGAATGGATCCATCAAAGGAA
GCAACTACACATACCTGAGCACGTTGTACTATGAGTGTGACCCCGGATATGTGCTGAATGGCACTGAG
AGGAGAACATGCCAGGATGACAAAAACTGGGATGAGGATGAGCCCATTTGCATTCCTGTGGACTGCAG
TTCACCCCCAGTCTCAGCCAATGGCCAGGTGAGAGGAGACGAGTACACATTCCAAAAAGAGATTGAAT
ACACTTGCAATGAAGGGTTCTTGCTTGAGGGAGCCAGGAGTCGGGTTTGTCTTGCCAATGGAAGTTGG
AGTGGAGCCACTCCCGACTGTGTGCCTGTCAGATGTGCCACCCCGCCACAACTGGCCAATGGGGTGAC
GGAAGGCCTGGACTATGGCTTCATGAAGGAAGTAACATTCCACTGTCACGAGGGCTACATCTTGCACG
GTGCTCCAAAACTCACCTGTCAGTCAGATGGCAACTGGGATGCAGAGATTCCTCTCTGTAAACCAGTC
AACTGTGGACCTCCTGAAGATCTTGCCCATGGTTTCCCTAATGGTTTTTCCTTTATTCATGGGGGCCA
TATACAGTATCAGTGCTTTCCTGGTTATAAGCTCCATGGAAATTCATCAAGAAGGTGCCTCTCCAATG
GCTCCTGGAGTGGCAGCTCACCTTCCTGCCTGCCTTGCAGATGTTCCACACCAGTAATTGAATATGGA
ACTGTCAATGGGACAGATTTTGACTGTGGAAAGGCAGCCCGGATTCAGTGCTTCAAAGGCTTCAAGCT
CCTAGGACTTTCTGAAATCACCTGTGAAGCCGATGGCCAGTGGAGCTCTGGGTTCCCCCACTGTGAAC
ACACTTCTTGTGGTTCTCTTCCAATGATACCAAATGCGTTCATCAGTGAGACCAGCTCTTGGAAGGAA
AATGTGATAACTTACAGCTGCAGGTCTGGATATGTCATACAAGGCAGTTCAGATCTGATTTGTACAGA
GAAAGGGGTATGGAGCCAGCCTTATCCAGTCTGTGAGCCCTTGTCCTGTGGGTCCCCACCGTCTGTCG
CCAATGCAGTGGCAACTGGAGAGGCACACACCTATGAAAGTGAAGTGAAACTCAGATGTCTGGAAGGT
TATACGATGGATACAGATACAGATACATTCACCTGTCAGAAAGATGGTCGCTGGTTCCCTGAGAGAAT
CTCCTGCAGTCCTAAAAAATGTCCTCTCCCGGAAAACATAACACATATACTTGTACATGGGGACGATT
TCAGTGTGAATAGGCAAGTTTCTGTGTCATGTGCAGAAGGGTATACCTTTGAGGGAGTTAACATATCA
GTATGTCAGCTTGATGGAACCTGGGAGCCACCATTCTCCGATGAATCTTGCAGTCCAGTTTCTTGTGG
GAAACCTGAAAGTCCAGAACATGGATTTGTGGTTGGCAGTAAATACACCTTTGAAAGCACAATTATTT
ATCAGTGTGAGCCTGGCTATGAACTAGAGAATTTGGCTGTGAATCCATCTGGTCCTGGACTTTTCTTG
ATCAGCAGCAGAGGGTGCAGAACAGCGGATATTGGTGAACCGCAAATGCTGCTGCCTGATCATTCCTC
TGGAAGTTTTGTCTCAGAGGAATACCCGGCCATGTGAGGTGTCAGTCCGCCCCTACTGGGGGGGGAAC
AGGGAACGTGTCTGCCAGGAGAACAGACAGTGGAGTGGAGGGGTGGCAATATGCAAAGAGACCAGGTG
TGAAACTCCACTTGAATTTCTCAATGGGAAAGCTGACATTGAAAACAGGACGACTGGACCCAACGTGG
TATATTCCTGCAACAGAGGCTACAGTCTTGAAGGGCCATCTGAGGCACACTGCACAGAAAATGGAACC
TGGAGCCACCCAGTCCCTCTCTGCAAACCAAATCCATGCCCTGTTCCTTTTGTGATTCCCGAGAATGC
TCTGCTGTCTGAAAAGGAGTTTTATGTTGATCAGAATGTGTCCATCAAATGTAGGGAAGGTTTTCTGC
TGCAGGGCCACGGCATCATTACCTGCAACCCCGACGAGACGTGGACACAGACAAGCGCCAAATGTGAA
AGAAGATATACACAACAGCCCAAGTCCCTGAATTTTCAGCTAGCAGCTTATTGCAGTATTAGAATGTT
TATTTTGCGGGGAGGGGTTCAAGATGGCCAACTAGAAACAGCTGTGGCCGGAGCCTCCCACCGAGAAG
AACAAAAACAAAAGCGAGAAAAAGCAAGGTGGTACAACGGCCCACCTGGGAGCCACATGGGGCAAGCA
GAGCTCCCACCCCCAGCCAAAGGAGGTGGACCTCCCTGCGGGAATTTCAGCAACTCCAGCCAGGGGTT
TATGAACAGACCTCTGATCTCCCTGAGATGGAGCCCCTGGGGCTCCATGTGGCCATGGTCTCCACAGA
AACAGCACAGTTTACCTGCTCTGCCAAGGGGCAGCTAGAGCGCTTTGTTAAGCGAGTCCCTGATCCCA
GAGCTCCCACCCCCAGCCAAAGGAGGTGGACCTCCCTGCGGGAATTTCAGCAACTCCAGCCAGGGGTT
TATGAACAGACCTCTGATCTCCCTGAGATGGAGCCCCTGGGGCTCCATGTGGCCATGGTCTCCACAGA
TCAGCAGGCTTAGTCCTTCCCCTGCTGGCTCTGAGGAATCCAGGCAGGCTGGACTAGTGGGATTCCCC
ACAGCACAGTTTACCTGCTCTGCCAAGGGGCAGCTAGAGCGCTTTGTTAAGCGAGTCCCTGATCCCAT
GCCTCCTGATTGGGATGAGACCCCCCCACAACAGGGGTCACGGATGAGACCCCCCCACAACAGGGGTC
ACCAGACACCTTATACAAGGGTGTTCCTGCTAGCATCAGGTCAGTGCCCCTCTGGGACAGAGCTCCCA
GAGGAAAGAGCAGGCAGCCATCTTTGCTGTTCTGCAGCGTCCGCTGGAAAAGCACAGAATTGGGCAGA
GGCTAGGATTGATGAATTGAAAGAAGTAGGCTTCAGAAAGTGGGTAATAATGAAGTTCGCTGAGCTAA
AGGAACATGTTCTAAACCAATGCAIAGACGCCAAGAACCAGGATAAAACATTACAGGATCCGTTAACC
AGAATAACCAGTTTAGAAAGGAATGTAAATGACCTGATGGAGCTGAAAAACACAACACGAGAACTTCA
CAATGCAACAACAAAACAAGGCCAACATTCFAGTTCAGGAAATCCAGAGAACCCCAGTAAGATACTCC
ATGAGAAGATCAACCCCAAGACACATAATCCTCAGGTTCTCCAAGAAATCTCATGTGGTCCACCAGCT
CACGTAGAAAATGCAATTGCTCGAGGCGTACATTATCAATATGGAGACATGATCACCTACTCATGTTA
CAGTGGATACATGTTGGAGGGTTTCCTGAGGAGTGTTTGTTTAGAAAATGGAACATGGACATCACCTC
CTATTTGCAGAGCTGTCTGTCGATTTCCATGTCAGAATGGGGGCATCTGCCAACGCCCAAATGCTTGT
TCCTGTCCAGAGGGCTGGATGGGGCGCCTCTGTGAAGAACCAATCTGCATTCTTCCCTGTCTGAACGG
AGGTCGCTGTGTGGCCCCTTACCAGTGTGACTGCCCGCCTGGCTGGACGGGGTCTCGCTGTCATACAG
GTAGGCCTCTTTCATGGTTTGTTTTCTTGGTGGCTCAGGCCCATGAAACTCCAGAGGACATTGAAGAG
TGTGACTTAGACTCAGAAGTGGTGGCAAAATGA

NOV8h, CG50646-03

| | | | |
|---|---|---|---|
| Protein Sequence | SEQ ID NO: 192 | 2050 aa | MW at 224498.2kD |

MAGAPPPASLPPCSLISDCCASNQRDSVGVGPSEPGVGYSLVVRRFLSRSEKRNIRVGVTRFSSYTLA
GLDTIECLADGKWSRSDQQCLAVSCDEPPIVDHASPETAHRLFGDIAFYYCSDGYSLADNSQLLCNAQ
GKWVPPEGQDMPRCIAHFCEKPPSVSYSILESVSKAKFAAGSVVSFKCMEGFVLNTSAKIECMRGGQW
NPSPMSIQCIPVRCGEPPSIMNGYASGSNYSFGAMVAYSCNKGFYIKGEKKSTCEATGQWSSPIPTCH
PVSCGEPPKVENGFLEHTTGRIFESEVRYQCNPGYKSVGSPVFVCQANRHWHSESPLMCVPLDCGKPP
PIQNGFMKGENFEVGSKGQFFCNEGLXSFVGDSSWTCQKSGKWNKKSNPKCMPAKCPEPPLLENQLVL
KELTTEVGVVTFSCKERHVLQGPSVLKCLPSQQWNDSFPVCKIVLCTPPPLISFGVPIPSSALHFGST
VKYSCVGGFFLRGNSTTLCQPDGTWSSPLPECVPVECPQPEEIPNGIIDVQGLAYLSTALYTCKPGFE
LVGNTTTLCGENGHWLGGKPTCKAIECLKPKEILNGKFSYTDLHYGQTVTYSCNRGFRLEGPSALTCL
ETGDWDVDAPSCNAIHCDSPQPIENGFVEGADYSYGAIIIYSCFPGFQVAGHAMQTCEESGWSSSIPT
CMPIDCGLPPHIDFGDCTKLKDDQGYFEQEDDMMEVPYVTPHPPYHLGAVAKTWENTKESPATHSSNF
LYGTMVSYTCNPGYELLGNPVLICQEDGTWNGSAPSCISIECDLPTAPENGFLRFTETSMGSAVQYSC
KPGHILAGSDLRICLENRKWSGASPRCEAISCKKPNPVMNGSIKGSNYTYLSTLYYECDPGYVLNGTE
RRTCQDDKNWDEDEPICIPVDCSSPPVSANGQVRGDEYTFQKEIEYTCNEGFLLEGARSRVCLANGSW
SGATPDCVPVRCATPPQLANGVTEGLDYGFMKEVTFHCHEGYILHGAPKLTCQSDGNWDAEIPLCKPV
NCGPPEDLAHGFPNGFSFIHGGHIQYQCFPGYKLHGNSSRRCLSNGSWSGSSPSCLPCRCSTPVIEYG
TVNGTDFDCGKAARIQCFKGFKLLGLSEITCEADGQWSSGFPHCEHTSCGSLPMIPNAFISETSSWKE
NVITYSCRSGYVIQGSSDLICTEKGVWSQPYPVCEPLSCGSPPSVANAVATGEAHTYESEVKLRCLEG
YTMDTDTDTFTCQKDGRWFPERISCSPKKCPLPENITHILVHGDDFSVNRQVSVSCAEGYTFEGVNIS
VCQLDGTWEPPFSDESCSPVSCGKPESPEHGFVVGSKYTFESTIIYQCEPGYELENLAVNPSGPGLFL
VDRTLSCRSELARGPIQTLFAWVSAAEGAEQRILVNRKCCCLIIPLEVLSQRNTRPCEVSVRPYWGGN
RERVCQENRQWSGGVAICKETRCETPLEFLNGKADIENRTTGPNVVYSCNRGYSLEGPSEAHCTENGT
WSHPVPLCKPNPCPVPFVIPENALLSEKEFYVDQNVSIKCREGFLLQGHGIITCNPDETWTQTSAKCE
RRYTQQPKSLNFQLAAYCSIRMFILRGGVQDGQLETAVAGASHREEQKQKREKARWYNGPPGSHMGQA
ELPPPAKGGGPPCGNFSNSSQGFMNRPLISLRWSPWGSMWPWSPQISRLSPSPAGSEESRQAGLVGFP
TAQFTCSAKGQLERFVKRVPDPMPPDWDETPPQQGSRMRPPHNRGHQTPYTRVFLLASGQCPSGTELP
EERAGSHLCCSAASAGKAQNWAEARIDELKEVGFRYWVIMKFAELKEHVLNQCKDAKNQDKTLQDPLT
RITSLERNVNDLMELKNTTRELHNATTKQGQHSSSGNPENPSKILHEKINPKTHNPQVLQEISCGPPA
HVENAIARGVHYQYGDMITYSCYSGYMLEGFLRSVCLENGTWTSPPICRAVCRFPCQNGGICQRPNAC
SCPEGWMGRLCEEPICILPCLNGGRCVAPYQCDCPPGWTGSRCHTGRPLSWFVFLVAQAHETPEDIEE
CDLDSEVVAK

| | | |
|---|---|---|
| NOV8i, CG50646-05 | SEQ ID NO: 193 | 11152 bp |

| | | |
|---|---|---|
| DNA Sequence | ORF Start: ATG at 77 | ORF Stop: TAA at 10781 |

CAATTGGTCTAGGGTCTCCCCCATTGGAATATCCATCAGTGATGAGAAATACAACGTTTGTTGAGTTT
TCTCTAGCATGAGAAGAATTTGCGCGGCTTGCTGGGGTCTGGCGCTCGTTTCGGGCTGGGCGACCTTT
CAGCAGATGTCCCCGTCGCGCAATTTCAGCTTCCGCCTCTTCCCCGAGACCGCGCCCGGGGCCCCCGG
GAGTATCCCCGCGCCGCCCGCTCCTGGCGACGAAGCGGCGGGGAGCAGAGTGGAGCGGCTGGGCCAGG
CGTTCCGCGTGCGGCTGCTGCGGGAGCTCAGCGAGCGCCTGGAGCTTGTCTTCCTGGTGGATGATTCG
TCCAGCGTGGGCGAAGTCAACTTCCGCAGCGAGCTCATGTTCGTCCGCAAGCTGCTGTCCGACTTCCC
CGTGGTGCCCACGGCCACGCGCGTGGCCATCGTGACCTTCTCGTCCAAGAACTACGTGGTGCCGCGCG
TCGATTACATCTCCACCCGCCGCGCGCGCCAGCACAAGTGCGCGCTGCTCCTCCAAGAGATCCCTGCC
ATCTCCTACCGAGGTGGCGGCACCTACACCAAGGGCGCCTTCCAGCAAGCCGCGCAAATTCTTCTTCA
TGCTAGAGAAAACTCAACAAAAGTTGTATTTCTCATCACTGATGGATATTCCAATGGGGGAGACCCTA
GACCAATTGCAGCGTCACTGCGAGATTCAGGAGTGGAGATCTTCACTTTTGGCATATGGCAAGGGAAC
ATTCGAGAGCTGAATGACATGGCTTCCACCCCAAAGGAGGAGCACTGTTACCTGCTACACAGTTTTGA
AGAATTTGAGGCTTTAGCTCGCCGGGCATTGCATGAAGATCTACCTTCTGGGAGTTTTATTCAAGATG
ATATGGTCCACTGCTCATATCTTTGTGATGAGGGCAAGGACTGCTGTGACCGAATGGGAAGCTGCAAA
TGTGGGACACACACAGGCCATTTTGAGTGCATCTGTGAAAAGGGGTATTACGGGAAAGGTCTGCAGTA
TGAATGCACAGCTTGCCCATCGGGGACATACAAACCTGAAGCCTCACCAGGAGGAATCAGCAGTTGCA
TTCCATGTCCCGATGAAAATCACACCTCTCCACCTGGAAGCACATCCCCTGAAGACTGTGTCTGCAGA
GAGGGATACAGGGCATCTGGCCAGACCTGTGAACTTGTCCACTGCCCTGCCCTGAAGCCTCCCGAAAA
TGGTTACTTTATCCAAAACACTTGCAACAACCACTTCAATGCAGCCTGTGGGGTCCGATGTCACCCTG
GATTTGATCTTGTGGGAAGCAGCATCATCTTATGTCTACCCAATGGTTTGTGGTCCGGTTCAGAGAGC
TACTGCAGAGTAAGAACATGTCCTCATCTCCGCCAGCCGAAACATGGCCACATCAGCTGTTCTACAAG
GGAAATGTTATATAAGACAACATGTTTGGTTGCCTGTGATGAAGGGTACAGACTAGAAGGCAGTGATA
AGCTTACTTGTCAAGGAAACAGCCAGTGGGATGGGCCAGAACCCCGGTGTGTGGAGCGCCACTGTTCC
ACCTTTCAGATGCCCAAAGATGTCATCATATCCCCCCACAACTGTGGCAAGCAGCCAGCCAAATTTGG
GACGATCTGCTATGTAAGTTGCCGCCAAGGGTTCATTTTATCTGGAGTCAAAGAAATGCTGAGATGTA
CCACTTCTGGAAAATGGAATGTCGGAGTTCAGGCAGCTGTGTGTAAAGACGTGGAGGCTCCTCAAATC
AACTGTCCTAAGGACATAGAGGCTAAGACTCTGGAACAGCAAGATTCTGCCAATGTTACCTGGCAGAT
TCCAACAGCTAAAGACAACTCTGGTGAAAAGGTGTCAGTCCGCGTTCATCCAGCTTTCACCCCACCTT
ACCTTTTCCCAATTGGAGATGTTGCTATCGTATACACGGCAACTGACCTATCCGGCAACCAGGCCAGC
TGCATTTTCCATATCAAGGTTATTGATGCAGAACCACCTGTCATAGACTGGTGCAGATCTCCACCTCC
CGTCCAGGTCTCGGAGAAGGTACATGCCGCAAGCTGGGATGAGCCTCAGTTCTCAGACAACTCAGGGG
CTGAATTGGTCATTACCAGAAGTCATACACAAGGAGACCTTTTCCCTCAAGGGGAGACTATAGTACAG
TATACAGCCACTGACCCCTCAGGTAATAACAGGATATGTGATATCCATATTGTCATGAAAGGTTCTCC
CTGTGAAATTCCATTCACACCTGTAAATGGGGATTTTATATGCACTCCAGATAATACTGGAGTCAACT
GTACATTAACTTGCTTGGAGGGCTACGATTTCACAGAAGGGTCTACTGACAAGTATTATTGTGCTTAT
GAAGATGGCGTCTGGAAACCAACATATACCACTGAATGGCCAGACTGTGCCAAAAAACGTTTTGCAAA
CCACGGGTTCAAGTCCTTTGAGATGTTCTACAAAGCAGCTCGTTGTGATGACTCAGATCTGATGAAGA
AGTTTTCTGAAGCATTTGAGACGACCCTGGGAAAAATGGTCCCATCATTTTGTAGTGATGCAGAGGAC
ATTGACTGCAGACTGGAGGAGAACCTGACCAAAAAATATTGCCTAGAATATAATTATGACTATGAAAA
TGGCTTTGCAATTGGTCCAGGTGGCTGGGGTGCAGCTAATAGGCTGGATTACTCTTACGATGACTTCC
TGGACACTGTGCAAGAAACAGCCACAAGCATCGGCAATGCCAAGTCCTCACGGATTAAAAGAAGTGCC
CCATTATCTGACTATAAAATTAAGTTAATTTTTAACATCACAGCTAGTGTGCCATTACCCGATGAAAG
AAATGATACCCTTGAATGGGAAAATCAGCAACGACTCCTTCAGACATTGGAAACTATCACAAATAAAC
TGAAAAGGACTCTCAACAAAGACCCCATGTATTCCTTTCAGCTTGCATCAGAAATACTTATAGCCGAC
AGCAATTCATTAGAAACAAAAAAGGCTTCCCCCTTCTGCAGACCAGGCTCAGTGCTGAGAGGGCGTAT
GTGTGTCAATTGCCCTTTGGGAACCTATTATAATCTGGAACATTTCACCTGTGAAAGCTGCCGGATCG
GATCCTATCAAGATGAAGAAGGGCAACTTGAGTGCAAGCTTTGCCCCTCTGGGATGTACACGGAATAT
ATCCATTCAAGAAACATCTCTGATTGTAAAGCTCAGTGTAAACAAGGCACCTACTCATACAGTGGACT
TGAGACTTGTGAATCGTGTCCACTGGGCACTTATCAGCCAAAATTTGGTTCCCGGAGCTGCCTCTCGT
GTCCAGAAAACACCTCAACTGTGAAAAGAGGAGCCGTGAACATTTCTGCATGTGGAGTTCCTTGTCCA
GAAGGAAAATTCTCGCGTTCTGGGTTAATGCCCTGTCACCCATGTCCTCGTGACTATTACCAACCTAA
TGCAGGGAAGGCCTTCTGCCTGGCCTGTCCCTTTTATGGAACTACCCCATTCGCTGGTTCCAGATCCA
TCACAGAATGTTCAAGTTTTAGTTCAACTTTCTCAGCGGCAGAGGAAAGTGTGGTGCCCCCTGCCTCT
CTTGGACATATTAAAAAGAGGCATGAAATCAGCAGTCAGGCAAGTCATGAATGCTTCTTTAACCCTTG
CCACAATAGTGGAACCTGCCAGCAACTTGGGCGTGGTTATGTTTGTCTCTGTCCACTTGGATATACAG
GTTTAAAGTGTGAAACAGACATCGATGAGTGCAGCCCACTGCCTTGCCTCAACAATGGAGTTTGTAAA
GACCTAGTTGGGGAATTCATTTGTGAGTGCCCATCAGGTTACACAGGTAAGCACTGTGAATTGAACAT
CAATGAATGTCAGTCTAATCCATGTAGAAATCAGGCCACCTGTGTGGATGAATTAAATTCATACAGTT
GTAAATGTCAGCCAGGATTTTCAGGCAAAAGGTGTGAAACAGGTATGTATCAACTCAGTGTTATTAAT
AACCTTAATAATGCAGTCTGTGAAGACCAGGTTGGGGGATTCTTGTGCAAATGCCCACCTGGATTTTT
GGGTACCCGATGTGGAAAGAACGTCGATGAGTGTCTCAGTCAGCCATGCAAAAATGGAGCTACCTGTA
AAGACGGTGCCAATAGCTTCAGGTGCCTGTGTGCAGCTGGCTTCACAGGATCACACTGTGAATTGAAC
ATCAATGAATGTCAGTCTAATCCATGTAGAAATCAGGCCACCTGTGTGGATGAATTAAATTCATACAG
TTGTAAATGTCAGCCAGGATTTTCAGGCAAAAGGTGTGAAACAGAACAGTCTACAGGCTTTAACCTGG
ATTTTGAAGTTTCTGGCATCTATGGATATGTCATGCTAGATGGCATGCTCCCATCTCTCCATGCTCTA
ACCTGTACCTTCTGGATGAAATCCTCTGACGACATGAACTATGGAACACCAATCTCCTATGCAGTTGA
TAACGGCAGCGACAATACCTTGCTCCTGACTGATTATAACGGGTGGGTTCTTTATGTGAATGGCAGGG
AAAAGATAACAAACTGTCCCTCGGTGAATGATGGCAGATGGCATCATATTGCAATCACTTGGACAAGT
ACTGGTGGAGCCTGGAGGGTCTATATAAATGGGGAATTATCTGACGGTGGTACTGGCCTCTCCATTGG
CAAAGCCATACCTGGTGGCGGTGCATTAGTTCTTGGGCAAGAGCAAGACAAAAAAGGAGAGGGGTTCA
ACCCGGCTGAGTCTTTTGTGGGCTCCATAAGCCAGCTCAACCTCTGGGACTATGTCCTGTCTCCACAG
CAGGTGAAGTCACTGGCTACCTCCTGCCCAGAGGAACTCAGTAAAGGAAACGTGTTAGCATGGCCTGA
TTTCTTGTCAGGAATTGTGGGGAAAGTGAAGATCGATTCTAAGAGCATATTTTGTTCTGATTGCCCAC
GCTTGGGAGGGTCAGTGCCTCATCTGAGAACTGCATCTGAAGATTTAAAACCAGGTTCCAAAGTCAAT
CTGTTCTGTGAACCAGGCTTCCAGCTGGTCGGGAACCCTGTGCAGTACTGTCTGAATCAAGGACAGTG
GACACAACCACTCCCCCACTGTGAACGCATTCGCTGTGGGGTGCCACCTCCTTTGGAGAATGGCTTCC
ATTCAGCCGATGACTTCTATGCTGGCAGCACAGTAACCTACCAGTGCAACAATGGCTACTATCTATTG
GGTGACTCAAGGATGTTCTGTACAGATAATGGGAGCTGGAACGGCGTTTCACCATCCTGCTTAGATGT
CGATGAGTGTGCAGTTGGATCAGATTGTAGTGAGCATGCTTCTTGCCTGAACGTAGATGGATCCTACA
TATGTTCATGTGTCCCACCGTACACAGGAGATGGGAAAAACTGTGCAGAACCTATAAAATGTAAGGCT
CCAGGAAATCCGGAAAATGGCCACTCCTCAGGTGAGATTTATACAGTAGGTGCCGAAGTCACATTTTC
GTGTCAGGAAGGATACCAGTTGATGGGAGTAACCAAAATCACATGTTTGGAGTCTGGAGAATGGAATC
ATCTAATACCATATTGTAAAGCTGTTTCATGTGGTAAACCGGCTATTCCAGAAAATGGTTGCATTGAG
GAGTTAGCATTTACTTTTGGCAGCAAAGTGACATATAGCTGTAATAAAGGATATACTCTGGCCCGTGA
TAAAGAATCATCCTGTCTTGCTAACAGTTCTTGGAGTCATTCCCCTCCTGTGTGTGAACCAGTGAAGT
GTTCTAGTCCGGAAAATATAAATAATGGAAAATATATTTTGAGTGGGCTTACCTACCTTTCTACTGCA
TCATATTCATGCGATACAGGATACAGCTTACAGGGCCCTTCCATTATTGAATGCACGGCTTCTGGCAT
CTGGGACAGAGCGCCACCTGCCTGTCACCTCGTCTTCTGTGGAGAACCACCTGCCATCAAAGATGCTG
TCATTACGGGGAATAACTTCACTTTCAGGAACACCGTCACTTACACTTGCAAAGAAGGCTATACTCTT
GCTGGTCTTGACACCATTGAATGCCTGGCCGACGGCAAGTGGAGTAGAAGTGACCAGCAGTGCCTGGC
TGTCTCCTGTGATGAGCCACCCATTGTGGACCACGCCTCTCCAGAGACTGCCCATCGGCTCTTTGGAG
ACATTGCATTCTACTACTGCTCTGATGGTTACAGCCTAGCAGACAATTCCCAGCTTCTCTGCAATGCC
CAGGGCAAGTGGGTACCCCCAGAAGGTCAAGACATGCCCCGTTGTATAGCTCATTTCTGTGAAAAACC
TCCATCGGTTTCCTATAGCATCTTGGAATCTGTGAGCAAAGCAAAATTTGCAGCTGGCTCAGTTGTGA
GCTTTAAATGCATGGAAGGCTTTGTACTGAACACCTCAGCAAAGATTGAATGTATGAGAGGTGGGCAG
TGGAACCCTTCCCCCATGTCCATCCAGTGCATCCCTGTGCGGTGTGGAGAGCCACCAAGCATCATGAA
TGGCTATGCAAGTGGATCAAACTACAGTTTTGGAGCCATGGTGGCTTACAGCTGCAACAAGGGGTTCT
ACATCAAAGGGGAAAAGAAGAGCACCTGCGAAGCCACAGGGCAGTGGAGTAGTCCTATACCGACGTGC
CACCCGGTATCTTGTGGTGAACCACCTAAGGTTGAGAATGGCTTTCTGGAGCATACAACTGGCAGGAT
CTTTGAGAGTGAAGTGAGGTATCAGTGTAACCCGGGCTATAAGTCAGTCGGAAGTCCTGTATTTGTCT
GCCAAGCCAATCGCCACTGGCACAGTGAATCCCCTCTGATGTGTGTTCCTCTCGACTGTGGAAAACCT
CCCCCGATCCAGAATGGCTTCATGAAAGGAGAAAACTTTGAAGTAGGGTCCAAGGTTCAGTTTTTCTG
TAATGAGGGTTATGAGCTTGTTGGTGACAGTTCTTGGACATGTCAGAAATCTGGCAAATGGAATAAGA
AGTCAAATCCAAAGTGCATGCCTGCCAAGTGCCCAGAGCCGCCCCTCTTGGAAAACCAGCTAGTATTA
AAGGAGTTGACCACCGAGGTAGGAGTTGTGACATTTTCCTGTAAAGAAGGGCATGTCCTGCAAGGCCC
CTCTGTCCTGAAATGCTTGCCATCCCAGCAATGGAATGACTCTTTCCCTGTTTGTAAGATTGTTCTTT
GTACCCCACCTCCCCTAATTTCCTTTGGTGTCCCCATTCCTTCTTCTGCTCTTCATTTTGGAAGTACT
GTCAAGTATTCTTGTGTAGGTGGGTTTTTCCTAAGAGGAAATTCTACCACCCTCTGCCAACCTGATGG
CACCTGGAGCTCTCCACTGCCAGAATGTGTTCCAGTAGAATGTCCCCAACCTGAGGAAATCCCCAATG
GAATCATTGATGTGCAAGGCCTTGCCTATCTCAGCACAGCTCTCTATACCTGCAAGCCAGGCTTTGAA
TTGGTGGGAAATACTACCACCCTTTGTGGAGAAAATGGTCACTGGCTTGGAGGAAAACCAACATGTAA
AGCCATTGAGTGCCTGAAACCCAAGGAGATTTTGAATGGCAAATTCTCTTACACGGACCTACACTATG
GACAGACCGTTACCTACTCTTGCAACCGAGGCTTTCGGCTCGAAGGTCCCAGTGCCTTGACCTGTTTA
GAGACAGGTGATTGGGATGTAGATGCCCCATCTTGCAATGCCATCCACTGTGATTCCCCACAACCCAT
TGAAAATGGTTTTGTAGAAGGTGCAGATTACAGCTATGGTGCCATAATCATCTACAGTTGCTTCCCTG
GGTTTCAGGTGGCTGGTCATGCCATGCAGACCTGTGAAGAGTCAGGATGGTCAAGTTCCATCCCAACA
TGTATGCCAATAGACTGTGGCCTCCCTCCTCATATAGATTTTGGAGACTGTACTAAACTCAAAGATGA
CCAGGGATATTTTGAGCAAGAAGACGACATGATGGAAGTTCCATATGTGACTCCTCACCCTCCTTATC
ATTTGGGAGCAGTGGCTAAAACCTGGGAAAATACAAAGGAGTCTCCTGCTACACATTCATCAAACTTT
CTGTATGGTACCATGGTTTCATACACCTGTAATCCAGGATATGAACTTCTGGGGAACCCTGTGCTGAT
CTGCTCCTGAAAATGGCTTTTTGCGTTTTACAGAGACTAGCATGGGAAGTGCTGTGCAGTATAGCTGT
AAACCTGGACACATTCTAGCAGGCTCTGACTTAAGGCTTTGTCTAGAGAATAGAAAGTGGAGTGGTGC
CTCCCCACGCTGTGAAGCCATTTCATGCAAAAAGCCAAATCCAGTCATGAATGGATCCATCAAAGGAA
AGGAGAACATGCCAGGATGACAAAAACTGGGATGAGGATGAGCCCATTTGCATTCCTGTGGACTGCAG
TTCACCCCCAGTCTCAGCCAATGGCCAGGTGAGAGGAGACGAGTACACATTCCAAAAAGAGATTGAAT
ACACTTGCAATGAAGGGTTCTTGCTTGAGGGAGCCAGGAGTCGGGTTTGTCTTGCCAATGGAAGTTGG
GGAAGGCCTGGACTATGGCTTCATGAAGGAAGTAACATTCCACTGTCACGAGGGCTACATCTTGCACG
GTGCTCCAAACTCACCTGTCAGTCAGATGGCCAACTGGGATGCAGAGATTCCTCTCTGTAAACCAGTC
AACTGTGGACCTCCTGAAGATCTTGCCCATGGTTTCCCTAATGGTTTTTCCTTTATTCATGGGGGCCA
TATACAGTATCAGTGCTTTCCTGGTTATAAGCTCCATGGAAATTCATCAAGAAGGTGCCTCTCCAATG
GCTCCTGGAGTGGCAGCTCACCTTCCTGCCTGCCTTGCAGATGTTCCACACCAGTAATTGAATATGGA
ACTGTCAATGGGACAGATTTTGACTGTGGAAAGGCAGCCCGGATTCAGTGCTTCAAAGGCTTCAAGCT
CCTAGGACTTTCTGAAATCACCTGTGAAGCCGATGGCCAGTGGAGCTCTGGGTTCCCCCACTGTGAAC
ACACTTCTTGTGGTTCTCTTCCAATGATACCAAATGCGTTCATCAGTGAGACCAGCTCTTGGAAGGAA
AATGTGATAACTTACAGCTGCAGGTCTGGATATGTCATACAAGGCAGTTCAGATCTGATTTGTACAGA
GAAAGGGGTATGGAGCCAGCCTTATCCAGTCTGTGAGCCCTTGTCCTGTGGGTCCCCACCGTCTGTCG
CCAATGCAGTGGCAACTGGAGAGGCACACACCTATGAAAGTGAAGTGAAACTCAGATGTCTGGAAGGT
TATACGATGGATACAGATACAGATACATTCACCTGTCAGAAAGATGGTCGCTGGTTCCCTGAGAGAAT
CTCCTGCAGTCCTAAAAAATGTCCTCTCCCGGAAAACATAACACATATACTTGTACATGGGGACGATT
TCAGTGTGAATAGGCAAGTTTCTGTGTCATGTGCAGAAGGGTATACCTTTGAGGGAGTTAACATATCA
GTATGTCAGCTTGATGGAACCTGGGAGCCACCATTCTCCGATGAATCTTGCAGTCCAGTTTCTTGTGG
GAAACCTGAAAGTCCAGAACATGGATTTGTGGTTGGCAGTAAATACACCTTTGAAAGCACAATTATTT
AGTGGAGGGGTGGCAATATGCAAAGAGACCAGGTGTGAAACTCCACTTGAATTTCTCAATGGGAAAGC
GGCCATCTGAGGCACACTGCACAGAAATGGAACCTGGAGCCACCCAGTCCCTCTCTGCAAACCAAAAT
CCATGCCCTGTTCCTTTTGTGATTCCCGAGAATGCTCTGCTGTCTGAAAAGGAGTTTTATGTTGATCA
AATGCAATTGCTCGAGGCGTACATTATCAATATGGAGACATGATCACCTACTCATGTTACAGTGGATA
CATGTTGGAGGGTTTCCTGAGGAGTGTTTGTTTAGAAAATGGAACATGGACATCACCTCCTATTTGCA
GAGCTGTCTGTCGATTTCCATGTCAGAATGGGGGCATCTGCCAACGCCCAAATGCTTGTTCCTGTCCA
GAGGGCTGGATGGGGCGCCTCTGTGAAGAACCAATCTGCATTCTTCCCTGTCTGAACGGAGGTCGCTG
TGTGGCCCCTTACCAGTGTGACTGCCCGCCTGGCTGGACGGGGTCTCGCTGTCATACAGCTGTTTGCC
AGTCTCCCTGCTTAAATGGTGGAAAATGTGTAAGACCAAACCGATGTCACTGTCTTTCTTCTTGGACG
GGACATAACTGTTCCAGGAAAAGGAGGACTGGGTTTTAACCACTGCACGACCATCTGGCTCTCCCAAA
AGCAGGATCATCTCTCCTCGGTAGTGCCTGGGCATCCTGGAACTTATGCAAAGAAAGTCCAACATGGT
GCTGGGTCTTGTTTAGTAAACTTGTTACTTGGGGTTACTTTTTTTATTTTGTGATATATTTTGTTATT
CCTTGTGACATACTTTCTTACATGTTTCCATTTTTAAATATGCCTGTATTTTCTATATAAAAATTATA
TTAAATAGATGCTGCTCTACCCTCACAAAATGTACATATTCTGCTGTCTATTGGGAAAGTTCCTGGTA
CACATTTTTATTCAGTTACTTAAAATGATTTTTCCATTAAAGTATATTTTGCTACTAAATAAAAAAAA

NOV8i, CG50646-05

| | | | |
|---|---|---|---|
| Protein Sequence | SEQ ID NO: 194 | 3568 aa | MW at 389944.3kD |

MPRICAACWGLALVSGWATFQQMSPSRNFSFRLFPETAPGAPGSIPAPPAPGDEAAGSRVERLGQAFR
VRLLRELSERLELVFLVDDSSSVGEVNFRSELMFVRKLLSDFPVVPTATRVAIVTFSSKNYVVPRVDY
ISTRRARQHKCALLLQEIPAISYRGGGTYTKGAFQQAAQILLHARENSTKVVFLITDGYSNGGDPRPI
AASLRDSGVEIFTFGIWQGNIRELNDMASTPKEEHCYLLHSFEEFEALARRALHEDLPSGSFIQDDMV
HCSYLCDEGKDCCDRMGSCKCGTHTGHFECICEKGYYGKGLQYECTACPSGTYKPEASPGGISSCIPC
PDENHTSPPGSTSPEDCVCREGYRASGQTCELVHCPALKPPENGYFIQNTCNNHFNAACGVRCHPGFD
LVGSSIILCLPNGLWSGSESYCRVRTCPHLRQPKHGHISCSTREMLYKTTCLVACDEGYPLEGSDKLT
CQGNSQWDGPEPRCVERHCSTFQMPKDVIISPHNCGKQPAKFGTICYVSCRQGFILSGVKEMLRCTTS
GKWNVGVQAAVCKDVEAPQINCPKDIEAKTLEQQDSANVTWQIPTAKDNSGEKVSVRVHPAFTPPYLF
PIGDVAIVYTATDLSGNQASCIFRIKVIDAEPPVIDWCRSPPPVQVSEKVHAASWDEPQFSDNSGAEL
VITRSHTQGDLFPQGETIVQYTATDPSGNNRICDIHIVMKGSPCEIPFTPVNGDFICTPDNTGVNCTL
TCLEGYDFTEGSTDKYYCAYEDGVWKPTYTTEWPDCAKKRFANHGFKSFEMFYKAARCDDSDLMKKFS
EAFETTLGKMVPSFCSDAEDIDCRLEENLTKKYCLEYNYDYENGFAIGPGGWGAANRLDYSYDDFLDT
VQETATSIGNAKSSRIKRSAPLSDYKIKLIFNITASVPLPDERNDTLEWENQQRLLQTLETITNKLKR
TLNKDPMYSFQLASEILIADSNSLETKKASPFCRPGSVLRGRMCVNCPLGTYYNLEHFTCESCRIGSY
QDEEGQLECKLCPSGMYTEYIRSRNISDCKAQCKQGTYSYSGLETCESCPLGTYQPKFGSRSCLSCPE
NTSTVKRGAVNISACGVPCPEGKFSRSGLMPCHPCPRDYYQPNAGKAFCLACPFYGTTPFAGSRSITE
CSSFSSTFSAAEESVVPPASLGHIKKRHEISSQASHECFFNPCHNSGTCQQLGRGYVCLCPLGYTGLK
CETDIDECSPLPCLNNGVCKDLVGEFICECPSGYTGKHCELNINECQSNPCRNQATCVDELNSYSCKC
QPGFSGKRCETGMYQLSVINNLNNAVCEDQVGGFLCKCPPGFLGTRCGKNVDECLSQPCKNGATCKDG
ANSFRCLCAAGFTGSHCELNINECQSNPCRNQATCVDELNSYSCKCQPGFSGKRCETEQSTGFNLDFE
VSGIYGYVMLDGMLPSLHALTCTFWMKSSDDMNYGTPISYAVDNGSDNTLLLTDYNGWVLYVNGREKI
TNCPSVNDGRWHHIAITWTSTGGAWRVYINGELSDGGTGLSIGKAIPGGGALVLGQEQDKKGEGFNPA
ESFVGSISQLNLWDYVLSPQQVKSLATSCPEELSKGNVLAWPDFLSGIVGKVKIDSKSIFCSDCPRLG
GSVPHLRTASEDLKPGSKVNLFCEPGFQLVGNPVQYCLNQGQWTQPLPHCERIRCGVPPPLENGFHSA
DDFYAGSTVTYQCNNGYYLLGDSRMFCTDNGSWNGVSPSCLDVDECAVGSDCSEHASCLNVDGSYICS
CVPPYTGDGKNCAEPIKCKAPGNPENGHSSGEIYTVGAEVTFSCQEGYQLMGVTKITCLESGEWNHLI
PYCKAVSCGKPAIPENGCIEELAFTFGSKVTYRCNKGYTLAGDKESSCLANSSWSHSPPVCEPVKCSS
PENINNGKYILSGLTYLSTASYSCDTGYSLQGPSIIECTASGIWDRAPPACHLVFCGEPPAIKDAVIT
GNNFTFRNTVTYTCKEGYTLAGLDTIECLADGKWSRSDQQCLAVSCDEPPIVDHASPETAHRLFGDIA
FYYCSDGYSLADNSQLLCNAQGKWVPPEGQDMPRCIAHFCEKPPSVSYSILESVSKAKFAAGSVVSFK
CMEGFVLNTSAKIECMRGGQWNPSPMSIQCIPVRCGEPPSIMNGYASGSNYSFGAMVAYSCNKGFYIK
GEKKSTCEATGQWSSPIPTCHPVSCGEPPKVENGFLEHTTGRIFESEVRYQCNPGYKSVGSPVFVCQA
NRHWHSESPLMCVPLDCGKPPPIQNGFMKGENFEVGSKVQFFCNEGYELVGDSSWTCQKSGKWNKKSN
PKCMPAKCPEPPLLENQLVLKELTTEVGVVTFSCKEGHVLQGPSVLKCLPSQQWNDSFPVCKIVLCTP
PPLISFGVPIPSSALHFGSTVKYSCVGGFFLRGNSTTLCQPDGTWSSPLPECVPVECPQPEEIPNGII
DVQGLAYLSTALYTCKPGFELVGNTTTLCGENGHWLGGKPTCKAIECLKPKEILNGKFSYTDLHYGQT
VTYSCNRGFRLEGPSALTCLETGDWDVDAPSCNAIHCDSPQPIENGFVEGADYSYGAIIIYSCFPGFQ
VAGHAMQTCEESGWSSSIPTCMPIDCGLPPHIDFGDCTKLKDDQGYFEQEDDMMEVPYVTPHPPYHLG
AVAKTWENTKESPATHSSNFLYGTMVSYTCNPGYELLGNPVLICQEDGTWNGSAPSCISIECDLPTAP
ENGFLRFTETSMGSAVQYSCKPGHILAGSDLRLCLENRKWSGASPRCEAISCKKPNPVMNGSIKGSNY
TYLSTLYYECDPGYVLNGTERRTCQDDKNWDEDEPICIPVDCSSPPVSANGQVRGDEYTFQKEIEYTC
NEGFLLEGARSRVCLANGSWSGATPDCVPVRCATPPQLANGVTEGLDYGFMKEVTFHCHEGYILRGAP
KLTCQSDGNWDAEIPLCKPVNCGPPEDLAHGFPNGFSFIHGGHIQYQCFPGYKLHGNSSRRCLSNGSW
SGSSPSCLPCRCSTPVIEYGTVNGTDFDCGKAARIQCFKGFKLLGLSEITCEADGQWSSGFPHCEHTS
CGSLPMIPNAFISETSSWKENVITYSCRSGYVIQGSSDLICTEKGVWSQPYPVCEPLSCGSPPSVANA
VATGEAHTYESEVKLRCLEGYTMDTDTDTFTCQKDGRWFPERISCSPKKCPLPENITHILVHGDDFSV
NRQVSVSCAEGYTFEGVNISVCQLDGTWEPPFSDESCSPVSCGKPESPEHGFVVGSKYTFESTIIYQC
EPGYELEGNRERVCQENRQWSGGVAICKETRCETPLEFLNGKADIENRTTGPNVVYSCNRGYSLEGPS
EAHCTENGTWSHPVPLCKPNPCPVPFVIPENALLSEKEFYVDQNVSIKCREGFLLQGHGIITCNPDET
WTQTSAKCEKISCGPPAHVENAIARGVHYQYGDMITYSCYSGYMLEGFLRSVCLENGTWTSPPICRAV
CRFPCQNGGICQRPNACSCPEGWMGRLCEEPICILPCLNGGRCVAPYQCDCPPGWTGSRCHTAVCQSP
CLNGGKCVRPNRCHCLSSWTGHNCSRKRRTGF

| | |
|---|---|
| SEQ ID NO: 195 | 11158 bp |

| | | |
|---|---|---|
| NOV8j, SNP13380898 of | ORF Start: ATG at 77 | ORF Stop: TAA at 10787 |

| | | |
|---|---|---|
| CG50646-04, DNA Sequence | SNP Pos: 1068 | SNP Change: G to C |

CAATTGGTCTAGGGTCTCCCCCATTGGAATATCCATCAGTGATGAGAAATACAACGTTTGTTGAGTTT
TCTCTAGCATGAGAAGAATTTGCGCGGCTTGCTGGGGTCTGGCGCTCGTTTCGGGCTGGGCGACCTTT
CAGCAGATGTCCCCGTCGCGCAATTTCAGCTTCCGCCTCTTCCCCGAGACCGCGCCCGGGGCCCCCGG
GAGTATCCCCGCGCCGCCCGCTCCTGGCGACGAAGCGGCGGGGAGCAGAGTGGAGCGGCTGGGCCAGG
CGTTCCGCGTGCGGCTGCTGCGGGAGCTCAGCGAGCGCCTGGAGCTTGTCTTCCTGGTGGATGATTCG
TCCAGCGTGGGCGAAGTCAACTTCCGCAGCGAGCTCATGTTCGTCCGCAAGCTGCTGTCCGACTTCCC
CGTGGTGCCCACGGCCACGCGCGTGGCCATCGTGACCTTCTCGTCCAAGAACTACGTGGTGCCGCGCG
TCGATTACATCTCCACCCGCCGCGCGCGCCAGCACAAGTGCGCGCTGCTCCTCCAAGAGATCCCTGCC
ATCTCCTACCGAGGTGGCGGCACCTACACCAAGGGCGCCTTCCAGCAAGCCGCGCAAATTCTTCTTCA
TGCTAGAGAAAACTCAACAAAAGTTGTATTTCTCATCACTGATGGATATTCCAATGGGGGAGACCCTA
GACCAATTGCAGCGTCACTGCGAGATTCAGGAGTGGAGATCTTCACTTTTGGCATATGGCAAGGGAAC
ATTCGAGAGCTGAATGACATGGCTTCCACCCCAAAGGAGGAGCACTGTTACCTGCTACACAGTTTTGA
AGAATTTGAGGCTTTAGTCGCCCTCTGTCATATGTTATTTGTAGATCTACCTTCTGGGAGTTTTATTC
AAGATGATATGGTCCACTGCTCATATCTTTGTGATGAAGGCAAGGACTGCTGTGACCGAATGGGAAGC
TGCAAATGTGGGAAACACACAGGCCATTTTGAGTGCATCTGTGAAAAGGGGTATAACGGGAAAGGTCT
GCAGTATGACTGCACAGTTTGCCCATCGGGGACATACAAACCTGAAGCCTCACCAGGAGGAATCAGCA
GTTGCATTCCATGTCCTGATGAAAATCACACCTCTCCACCTGGAAGCACATCCCCTGAAGACTGTGTC
TGCAGAGAGGGATACAGGGCATCTGGCCAGACCTGTGAAGTTGTCCACTGCCCTGCCCTGAAGCCTCC
CGAAAATGGTTACTTTATCCAAAACACTTGCAACAACCACTTCAATGCAGCCTGTGGGGTCCGATGTC
ACCCTGGATTTGATCTTGTGGGAAGCAGCATCATCTTATGTCTACCCAATGGTTTGTGGTCCGGTTCA
GAGAGCTACTGCAGAGTAAGAACATGTCCTCATCTCCGCCAGCCGAAACATGGCCACATCAGCTGTTC
TACAAGGGAAATGTTATATAAGACAACATGTTTGGTTGCCTGTGATGAAGGGTACAGGCTAGAAGGCA
GTGATAAGCTTACTTGTCAAGGAAACAGCCAGTGGGATGGGCCAGAACCCCGGTGTGTGGAGCGCCAC
TGTTCCACCTTTCAGATGCCCAAAGATGTCATCATATCCCCCCACAACTGTGGCAAGCAGCCAGCCAA
ATTTGGGACGATCTGCTATGTAAGTTGCCGCCAAGGGTTCATTTTATCTGGAGTCAAAGAAATGCTGA
CAAATCAACTGTCCTAAGGACATAGAGGCTAAGACTCTGGAACAGCAAGATTCTGCCAATGTTACCTG
GCAGATTCCAACAGCTAAAGACAACTCTGGTGAAAAGGTGTCAGTCCACGTTCATCCAGCTTTCACCC
CACCTTACCTTTTCCCAATTGGAGATGTTGCTATCGTATACACGGCAACTGACCTATCCGGCAACCAG
GCCAGCTGCATTTTCCATATCAAGGTTATTGATGCAGAACCACCTGTCATAGACTGGTGCAGATCTCC
ACCTCCCGTCCAGGTCTCGGAGAAGGTACATGCCGCAAGCTGGGATGAGCCTCAGTTCTCAGACAACT
CAGGTGCTGAATTGGTCATTACCAGAAGTCATACACAAGGAGACCTTTTCCCTCAAGGGGAGACTATA
GTACAGTATACAGCCACTGACCCCTCAGGCAATAACAGGACATGTGATATCCATATTGTCATAAAAGG
TTCTCCCTGTGAAATTCCATTCACACCTGTAAATGGGGATTTTATATGCACTCCAGATAATACTGGAG
TCAACTGTACATTAACTTGCTTGGAGGGCTATGATTTCACAGAAGGGTCTACTGACAAGTATTATTGT
GCTTATGAAGATGGCGTCTGGAAACCAACATATACCACTGAATGGCCAGACTGTGCCAGTAAGCGTTT
TGCAAACCACGGGTTCAAGTCCTTTGAGATGTTCTACAAAGCAGCTCGTTGTGATGACACAGATCTGA
TGAAGAAGTTTTCTGAAGCATTTGAGACGACCCTGGGAAAAATGGTCCCATCATTTTGTAGTGATGCA
GAGGACATTGACTGCAGACTGGAGGAGAACCTGACCAAAAAATATTGCCTAGAATATAATTATGACTA
TGAAAATGGCTTTGCAATTGGTCCAGGTGGCTGGGGTGCAGCTAATAGGCTGGATTACTCTTACGATG
ACTTCCTGGACACTGTGCAAGAAACAGCCACAAGCATCGGCAATGCCAAGTCCTCACGGATTAAAAGA
AGTGCCCCATTATCTGACTATAAAATTAAGTTAATTTTTAACATCACAGCTAGTGTGCCATTACCCGA
TGAAAGAAATGATACCCTTGAATGGGAAAATCAGCAACGACTCCTTCAGACATTGGAAACTATCACAA
ATAAACTGAAAAGGACTCTCAACAAAGACCCCATGTATTCCTTTCAGCTTGCATCAGAAATACTTATA
GCCGACAGCAATTCATTAGAAACAAAAAAGGCTTCCCCCTTCTGCAGACCAGGCTCAGTGCTGAGAGG
GCGTATGTGTGTCAATTGCCCTTTGGGAACCTATTATAATCTGGAACATTTCACCTGTGAAAGCTGCC
GGATCGGATCCTATCAAGATGAAGAAGGGCAACTTGAGTGCAAGCTTTGCCCCTCTGGGATGTACACG
GAATATATCCATTCAAGAAACATCTCTGATTGTAAAGCTCAGTGTAAACAAGGCACCTACTCATACAG
TGGACTTGAGACTTGTGAATCGTGTCCACTGGGCACTTATCAGCCAAAATTTGGTTCCCGGAGCTGCC
TCTCGTGTCCAGAAAACACCTCAACTGTGAAAAGAGGAGCCGTGAACATTTCTGCATGTGGAGTTCCT
TGTCCAGAAGGAAAATTCTCGCGTTCTGGGTTAATGCCCTGTCACCCATGTCCTCGTGACTATTACCA
ACCTAATGCAGGGAAGGCCTTCTGCCTGGCCTGTCCCTTTTATGGAACTACCCCATTCGCTGGTTCCA
GATCCATCACAGAATGTTCAAGTTTTAGTTCAACTTTCTCAGCGGCAGAGGAAAGTGTGGTGCCCCCT
GCCTCTCTTGGACATATTAAAAAGAGGCATGAAATCAGCAGTCAGGCAAGTCATGAATGCTTCTTTAA
CCCTTGCCACAATAGTGGAACCTGCCAGCAACTTGGGCGTGGTTATGTTTGTCTCTGTCCACTTGGAT
ATACAGGTTTAAAGTGTGAAACAGACATCGATGAGTGCAGCCCACTGCCTTGCCTCAACAATGGAGTT
TGTAAAGACCTAGTTGGGGAATTCATTTGTGAGTGCCCATCAGGTTACACAGGTAAGCACTGTGAATT
GAACATCAATGAATGTCAGTCTAATCCATGTAGAAATCAGGCCACCTGTGTGGATGAATTAAATTCAT
ACAGTTGTAAATGTCAGCCAGGATTTTCAGGCAAAAGGTGTGAAACAGGTATGTATCAACTCAGTGTT
ATTAATAACCTTAATAATGCAGTCTGTGAAGACCAGGTTGGGGGATTCTTGTGCAAATGCCCACCTGG
ATTTTTGGGTACCCGATGTGGAAAGAACGTCGATGAGTGTCTCAGTCAGCCATGCAAAAATGGAGCTA
CCTGTAAAGACGGTGCCAATAGCTTCAGGTGCCTGTGTGCAGCTGGCTTCACAGGATCACACTGTGAA
TTGAACATCAATGAATGTCAGTCTAATCCATGTAGAAATCAGGCCACCTGTGTGGATGAATTAAATTC
ATACAGTTGTAAATGTCAGCCAGGATTTTCAGGCAAAAGGTGTGAAACAGAACAGTCTACAGGCTTTA
ACCTGGATTTTGAAGTTTCTGGCATCTATGGATATGTCATGCTAGATGGCATGCTCCCATCTCTCCAT
GCTCTAACCTGTACCTTCTGGATGAAATCCTCTGACGACATGAACTATGGAACACCAATCTCCTATGC
AGTTGATAACGGCAGCGACAATACCTTGCTCCTGACTGATTATAACGGGTGGGTTCTTTATGTGAATG
GCAGGGAAAAGATAACAAACTGTCCCTCGGTGAATGATGGCAGATGGCATCATATTGCAATCACTTGG
ACAAGTACTGGTGGAGCCTGGAGGGTCTATATAAATGGGGAATTATCTGACGGTGGTACTGGCCTCTC
CATTGGCAAAGCCATACCTGGTGGCGGTGCATTAGTTCTTGGGCAAGAGCAAGACAAAAAAGGAGAGG
GGTTCAACCCGGCTGAGTCTTTTGTGGGCTCCATAAGCCAGCTCAACCTCTGGGACTATGTCCTGTCT
GCCTGATTTCTTGTCAGGAATTGTGGGGAAAGTGAAGATCGATTCTAAGAGCATATTTTGTTCTGATT
GCCCACGCTTGGGAGGGTCAGTGCCTCATCTGAGAACTGCATCTGAAGATTTAAAACCAGGTTCCAAA
GTCAATCTGTTCTGTGAACCAGGCTTCCAGCTGGTCGGGAACCCTGTGCAGTACTGTCTGAATCAAGG
ACAGTGGACACAACCACTCCCCCACTGTGAACGCATTCGCTGTGGGGTGCCACCTCCTTTGGAGAATG
GCTTCCATTCAGCCGATGACTTCTATGCTGGCAGCACAGTAACCTACCAGTGCAACAATGGCTACTAT
CTATTGGGTGACTCAAGGATGTTCTGTACAGATAATGGGAGCTGGAACGGCGTTTCACCATCCTGCTT
AGATGTCGATGAGTGTGCAGTTGGATCAGATTGTAGTGAGCATGCTTCTTGCCTGAACGTAGATGGAT
CCTACATATGTTCATGTGTCCCACCGTACACAGGAGATGGGAAAAACTGTGCAGAACCTATAAAATGT
AAGGCTCCAGGAATCCGGAAATCCGGCCACTCCTCAGGTGAGATTTATACAGTAGGTGCCGAAGTCAC
ATTTTCGTGTCAGGAAGGATACCAGTTGATGGGAGTAACCAAAATCACATGTTTGGAGTCTGGAGAAT
GGAATCATCTAATACCATATTGTAAAGCTGTTTCATGTGGTAAACCGGCTATTCCAGAAAATGGTTGC
ATTGAGGAGTTAGCATTTACTTTTGGCAGCAAAGTGACATATAGGTGTAATAAAGGATATACTCTGGC
CGGTGATAAAGAATCATCCTGTCTTGCTAACAGTTCTTGGAGTCATTCCCCTCCTGTGTGTGAACCAG
TGAAGTGTTCTAGTCCGGAAAATATAAATAATGGAAAATATATTTTGAGTGGGCTTACCTACCTTTCT
ACTGCATCATATTCATGCGATACAGGATACAGCTTACAGGGCCCTTCCATTATTGAATGCACGGCTTC
TGGCATCTGGGACAGAGCGCCACCTGCCTGTCACCTCGTCTTCTGTGGAGAACCACCTGCCATCAAAG
ATGCTGTCATTACGGGGAATAACTTCACTTTCAGGAACACCGTCACTTACACTTGCAAAGAAGGCTAT
ACTCTTGCTGGTCTTGACACCATTGAATGCCTGGCCGACGGCAAGTGGAGTAGAAGTGACCAGCAGTG
CCTGGCTGTCTCCTGTGATGAGCCACCCATTGTGGACCACGCCTCTCCAGAGACTGCCCATCGGCTCT
TTGGAGACATTGCATTCTACTACTGCTCTGATGGTTACAGCCTAGCAGACAATTCCCAGCTTCTCTGC
AATGCCCAGGGCAAGTGGGTACCCCCAGAAGGTCAAGACATGCCCCGTTGTATAGCTCATTTCTGTGA
AAAACCTCCATCGGTTTCCTATAGCATCTTGGAATCTGTGAGCAAAGCAAAATTTGCAGCTGGCTCAG
TTGTGAGCTTTAAATGCATGGAAGGCTTTGTACTGAACACCTCAGGLAAGATTGAATGTATGAGAGGT
GGGCAGTGGAACCCTTCCCCCATGTCCATCCAGTGCATCCCTGTGCGGTGTGGAGAGCCACCAAGCAT
CATGAATGGCTATGCAAGTGGATCAAACTACAGTTTTGGAGCCATGGTGGCTTACAGCTGCAACAAGG
GGTTCTACATCAAAGGGGAAAAGAAGAGCACCTGCGAAGCCACAGGGCAGTGGAGTAGTCCTATACCG
ACGTGCCACCCGGTATCTTGTGGTGAACCACCTAAGGTTGAGAATGGCTTTCTGGAGCATACAACTGG
CAGGATCTTTGAGAGTGAAGTGAGGTATCAGTGTAACCCGGGCTATAAGTCAGTCGGAAGTCCTGTAT
TTGTCTGCCAAGCCAATCGCCACTGGCACAGTGAATCCCCTCTGATGTGTGTTCCTCTCGACTGTGGA
AAACCTCCCCCGATCCAGAATGGCTTCATGAAAGGAGALAACTTTGAAGTAGGGTCCAAGGTTCAGTT
TTTCTGTAATGAGGGTTATGAGCTTGTTGGTGACAGTTCTTGGACATGTCAGAAATCTGGCAAATGGA
ATAAGAAGTCAAATCCAAAGTGCATGCCTGCCAAGTGCCCAGAGCCGCCCCTCTTGGAAAACCAGCTA
GTATTAAAGGAGTTGACCACCGAGGTAGGAGTTGTGACATTTTCCTGTAAAGAAGGGCATGTCCTGCA
AGGCCCCTCTGTCCTGAAATGCTTGCCATCCCAGCAATGGAATGACTCTTTCCCTGTTTGTAAGATTG
TTCTTTGTACCCCACCTCCCCTAATTTCCTTTGGTGTCCCCATTCCTTCTTCTGCTCTTCATTTTGGA
AGTACTGTCAAGTATTCTTGTGTAGGTGGGTTTTTCCTAAGAGGAAATTCTACCACCCTCTGCCAACC
TGATGGCACCTGGAGCTCTCCACTGCCAGAATGTGTTCCAGTAGAATGTCCCCAACCTGAGGAAATCC
CCAATGGAATCATTGATGTGCAAGGCCTTGCCTATCTCAGCACAGCTCTCTATACCTGCAAGCCAGGC
TTTGAATTGGTGGGAAATACTACCACCCTTTGTGGAGAAAATGGTCACTGGCTTGGAGGAAAACCAAC
ATGTAAAGCCATTGAGTGCCTGAAACCCAAGGAGATTTTGAATGGCAAATTCTCTTACACGGACCTAC
ACTATGGACAGACCGTTACCTACTCTTGCAACCGAGGCTTTCGGCTCGAAGGTCCCAGTGCCTTGACC
TGTTTAGAGACAGGTGATTGGGATGTAGATGCCCCATCTTGCAATGCCATCCACTGTGATTCCCCACA
ACCCATTGAAAATGGTTTTGTAGAAGGTGCAGATTACAGCTATGGTGCCATAATCATCTACAGTTGCT
TCCCTGGGTTTCAGGTGGCTGGTCATGCCATGCAGACCTGTGAAGAGTCAGGATGGTCAAGTTCCATC
CCAACATGTATGCCAATAGACTGTGGCCTCCCTCCTCATATAGATTTTGGAGACTGTACTAAACTCAA
AGATGACCAGGGATATTTTGAGCAAGAAGACGACATGATGGAAGTTCCATATGTGACTCCTCACCCTC
CTTATCATTTGGGAGCAGTGGCTAAAACCTGGGAAAATACAAAGGAGTCTCCTGCTACACATTCATCA
AACTTTCTGTATGGTACCATGGTTTCATACACCTGTAATCCAGGATATGAACTTCTGGGGAACCCTGT
GCTGATCTGCCAGGAAGATGGAACTTGGAATGGCAGTGCACCATCCTGCATTTCAATTGAATGTGACT
TGCCTACTGCTCCTGAAAATGGCTTTTTGCGTTTTACAGAGACTAGCATGGGAAGTGCTGTGCAGTAT
AGCTGTAAACCTGGACACATTCTAGCAGGCTCTGACTTAAGGCTTTGTCTAGAGAATAGAAAGTGGAG
TGGTGCCTCCCCACGCTGTGAAGCCATTTCATGCAAAAAGCCAAATCCAGTCATGAATGGATCCATCA
AAGGAAGCAACTACACATACCTGAGCACGTTGTACTATGAGTGTGACCCCGGATATGTGCTGAATGGC
ACTGAGAGGAGAACATGCCAGGATGACAAAAACTGGGATGAGGATGAGCCCATTTGCATTCCTGTGGA
CTGCAGTTCACCCCCAGTCTCAGCCAATGGCCAGGTGAGAGGAGACGAGTACACATTCCAAAAAGAGA
TTGAATACACTTGCAATGAAGGGTTCTTGCTTGAGGGAGCCAGGAGTCGGGTTTGTCTTGCCAATGGA
AGTTGGAGTGGAGCCACTCCCGACTGTGTGCCTGTCAGATGTGCCACCCCGCCACAACTGGCCAATGG
GGTGACGGAAGGCCTGGACTATGGCTTCATGAAGGAAGTAACATTCCACTGTCACGAGGGCTACATCT
TGCACGGTGCTCCAAACTCACCTGTCAGTCAGATGGCAACTGGGATGCAGAGATTCCTCTCTGTAAAA
CCAGTCAACTGTGGACCTCCTGAAGATCTTGCCCATGGTTTCCCTAATGGTTTTTCCTTTATTCATGG
GGGCCATATACAGTATCAGTGCTTTCCTGGTTATAAGCTCCATGGAAATTCATCAAGAAGGTGCCTCT
CCAATGGCTCCTGGAGTGGCAGCTCACCTTCCTGCCTGCCTTGCAGATGTTCCACACCAGTAATTGAA
TATGGAACTGTCAATGGGACAGATTTTGACTGTGGAAAGGCAGCCCGGATTCAGTGCTTCAAAGGCTT
CAAGCTCCTAGGACTTTCTGAAATCACCTGTGAAGCCGATGGCCAGTGGAGCTCTGGGTTCCCCCACT
GTGAACACACTTCTTGTGGTTCTCTTCCAATGATACCAAATGCGTTCATCAGTGAGACCAGCTCTTGG
AAGGAAAATGTGATAACTTACAGCTGCAGGTCTGGATATGTCATACAAGGCAGTTCAGATCTGATTTG
TACAGAGAAAGGGGTATGGAGCCAGCCTTATCCAGTCTGTGAGCCCTTGTCCTGTGGGTCCCCACCGT
CTGTCGCCAATGCAGTGGCAACTGGAGAGGCACACACCTATGAAAGTGAAGTGAAACTCAGATGTCTG
GAAGGTTATACGATGGATACAGATACAGATACATTCACCTGTCAGAAAGATGGTCGCTGGTTCCCTGA
GAGAATCTCCTGCAGTCCTAAAAAATGTCCTCTCCCGGAAAACATAACACATATACTTGTACATGGGG
ACGATTTCAGTGTGAATAGGCAAGTTTCTGTGTCATGTGCAGAAGGGTATACCTTTGAGGGAGTTAAC
ATATCAGTATGTCAGCTTGATGGAACCTGGGAGCACCATTCTCCGATGCAGTCTTGCAGTCCAGTTTC
TTGTGGGAAACCTGAAAGTCCAGAACATGGATTTGTGGTTGGCAGTAAATACACCTTTGAAAGCACAA
TTATTTATCAGTGTGAGCCTGGCTATGAACTAGAGGGGAACAGGGAACGTGTCTGCCAGGAGAACAGA
CAGTGGAGTGGAGGGGTGGCAATATGCAAAGAGACCAGGTGTGAAACTCCACTTGAATTTCTCAATGG
GAAAGCTGACATTGAAAACAGGACGACTGGACCCAACGTGGTATATTCCTGCAACAGAGGCTACAGTC
TTGAAGGGCCATCTGAGGCACACTGCACAGAAAATGGAACCTGGAGCCACCCAGTCCCTCTCTGCAAA
CCAAATCCATGCCCTGTTCCTTTTGTGATTCCCGAGAATGCTCTGCTGTCTGAAAAGGAGTTTTATGT
TGATCAGAATGTGTCCATCAAATGTAGGGAAGGTTTTCTGCTGCAGGGCCACGGCATCATTACCTGCA
ACCCCGACGAGACGTGGACACAGACAAGCGCCAAATGTGAAAAAATCTCATGTGGTCCACCAGCTCAC
GTAGAAAATGCAATTGCTCGAGGCGTACATTATCAATATGGAGACATGATCACCTACTCATGTTACAG
TGGATACATGTTGGAGGGTTTCCTGAGGAGTGTTTGTTTAGAAAATGGAACATGGACATCACCTCCTA
TTTGCAGAGCTGTCTGTCGATTTCCATGTCAGAATGGGGGCATCTGCCAACGCCCAAATGCTTGTTCC
TGTCCAGAGGGCTGGATGGGGCGCCTCTGTGAAGAACCAATCTGCATTCTTCCCTGTCTGAACGGAGG
TCGCTGTGTGGCCCCTTACCAGTGTGACTGCCCGCCTGGCTGGACGGGGTCTCGCTGTCATACAGCTG
TTTGCCAGTCTCCCTGCTTAAATGGTGGAAAATGTGTAAGACCAAACCGATGTCACTGTCTTTCTTCT
TGGACGGGACATAACTGTTCCAGGAAAAGGAGGACTGGGTTTTAACCACTGCACGACCATCTGGCTCT
CCCAAAAGCAGGATCATCTCTCCTCGGTAGTGCCTGGGCATCCTGGAACTTATGCAAAGAAAGTCCAA
CATGGTGCTGGGTCTTGTTTAGTAAACTTGTTACTTGGGGTTACTTTTTTTATTTTGTGATATATTTT
ATTATATTAAATAGATGCTGCTCTACCCTCACAAAATGTACATATTCTGCTGTCTATTGGGAAAGTTC
CTGGTACACATTTTTATTCAGTTACTTAAAATGATTTTTCCATTAAAGTATATTTTGCTACTAAATAA
AAAAAA

NOV8j, SNP13380898 of

| | | |
|---|---|---|
| CG50646-04, Protein | SEQ ID NO: 196 | MW at 390026.5kD |

| | | | |
|---|---|---|---|
| Sequence | SNP Pos: 331 | 3570 aa | SNP Change: Gly to Ala |

MRRICAACWGLALVSGWATFQQMSPSRNFSFRLFPETAPGAPGSIPAPPAPGDEAAGSRVERLGQAFR
VRLLRELSERLELVFLVDDSSSVGEVNFRSELMFVRKLLSDFPVVPTATRVAIVTFSSKNYVVPRVDY
ISTRRARQHKCALLLQEIPAlSYRGGGTYTKGAFQQAAQILLHARENSTKVVFLITDGYSNGGDPRPI
AASLRDSGVEIFTFGIWQGNIRELNDMASTPKEEHCYLLHSFEEFEALVALCHMLFVDLPSGSFIQDD
MVHCSYLCDEGKDCCDRMGSCKCGKHTGHFECICEKGYNGKGLQYDCTVCPSGTYKPEASPGGISSCI
PCPDENHTSPPGSTSPEDCVCREGYFASGQTCEVVHCPALKPPENGYFIQNTCNNHFNAACGVRCHPG
FDLVGSSIILCLPNGLWSGSESYCRVRTCPHLRQPKHGHISCSTREMLYKTTCLVACDEGYPLEGSDK
LTCQGNSQWDGPEPRCVERHCSTFQMPKDVIISPHNCGKQPAKFGTICYVSCRQGFILSGVKEMLRCT
TSGWNNVGVQAAVCKDVEAPQINCPKDIEAKTLEQQDSANVTWQIPTAKDNSGEKVSVHVHPAFTPPY
LFPIGDVAIVYTATDLSGNQASCIFHIKVIDAEPPVIDWCRSPPPVQVSEKVHAASWDEPQFSDNSGA
ELVITRSHTQGDLFPQGETIVQYTATDPSGNNRTCDIHIVIKGSPCEIPFTPVNGDFICTPDNTGVNC
TLTCLEGYDFTEGSTDKYYCAYEDGVWKPTYTTEWPDCASKRFANHGFKSFEMFYKAARCDDTDLMKK
FSEAFETTLGKMVPSFCSDAEDIDCRLEENLTKKYCLEYNYDYENGFAIGPGGWGAANRLDYSFDDFL
DTVQETATSIGNAKSSRIKRSAPLSDYKIKLIFNITASVPLPDERNDTLEWENQQRLLQTLETITNKL
KRTLNKDPMYSFQLASEILIADSNSLETKKASPFCRPGSVLRGRMCVNCPLGTYYNLEHFTCESCRIG
SYQDEEGQLECKLCPSGMYTEYIHSRNISDCKAQCKQGTYSYSGLETCESCPLGTYQPKFGSRSCLSC
PENTSTVKRGAVNISACGVPCPEGKFSRSGLMPCHPCPRDYYQPNAGKAFCLACPFYGTTPFAGSRSI
TECSSFSSTFSAAEESVVPPASLGHIKKRHEISSQASHECFFNPCHNSGTCQQLGRGYVCLCPLGYTG
LKCETDIDECSPLPCLNNGVCKDLVGEFICECPSGYTGKHCELNINECQSNPCRNQATCVDELNSYSC
KCQPGFSGKRCETGMYQLSVINNLNNAVCEDQVGGFLCKCPPGFLGTRCGKNVDECLSQPCKNGATCK
DGANSFRCLCAAGFTGSHCELNINECQSNPCRNQATCVDELNSYSCKCQPGFSGKRCETEQSTGFNLD
FEVSGIYGYVMLDGMLPSLHAITCTFWMKSSDDMNYGTPISYAVDNGSDNTLLLTDYNGWVLYVNGRE
KITNCPSVNDGRWHHIAITWTSTGGAWRVYINGELSDGGTGLSIGKAIPGGGALVLGQEQDKKGEGFN
PAESFVGSISQLNLWDYVLSPQQVKSLATSCPEELSKGNVLAWPDFLSGIVGKVKIDSKSIFCSDCPR
LGGSVPHLRTASEDLKPGSKVNLFCEPGFQLVGNPVQYCLNQGQWTQPLPHCERIRCGVPPPLENGFH
SADDFYAGSTVTYQCNNGYYLLGDSRMFCTDNGSWNGVSPSCLDVDECAVGSDCSEHASCLNVDGSYI
CSCVPPYTGDGKNCAEPIKCKAPGNPENGHSSGEIYTVGAEVTFSCQEGYQLMGVTKITCLESGEWNH
LIPYCKAVSCGKPAIPENGCIEELAFTFGSKVTYRCNKGYTLAGDKESSCLANSSWSHSPPVCEPVKC
SSPENINNGKYILSGLTYLSTASYSCDTGYSLQGPSIIECTASGIWDRAPPACHLVFCGEPPAIKDAV
ITGNNFTFRNTVTYTCKEGYTLAGLDTIECLADGKWSRSDQQCLAVSCDEPPIVDHASPETAHRLFGD
IAFYYCSDGYSLADNSQLLCNAQGKWVPPEGQDMPRCIAHFCEKPPSVSYSILESVSKAKFAAGSVVS
FKCMEGFVLNTSAKIECMRGGQWNPSPMSIQCIPVRCGEPPSIMNGYASGSNYSFGAMVAYSCNKGFY
IKGEKKSTCEATGQWSSPIPTCHPVSCGEPPKVENGFLEHTTGRIFESEVRYQCNPGYKSVGSPVFVC
QANRHWHSESPLMCVPLDCGKPPPIQNGFMKGENFEVGSKVQFFCNEGYELVGDSSWTCQKSGKWNKK
SNPKCMPAKCPEPPLLENQLVLKELTTEVGVVTFSCKEGHVLQGPSVLKCLPSQQWNDSFPVCKIVLC
TPPPLISFGVPIPSSALHFGSTVKYSCVGGFFLRGNSTTLCQPDGTWSSPLPECVPVECPQPEEIPNG
IIDVQGLAYLSTALYTCKPGFELVGNTTTLCGENGHWLGGKPTCKAIECLKPKEILNGKFSYTDLHYG
QTVTYSCNRGFRLEGPSALTCLETGDWDVDAPSCNAIHCDSPQPIENGFVEGADYSYGAIIIYSCFPG
FQVAGHAMQTCEESGWSSSIPTCMPIDCGLPPHIDFGDCTKLKDDQGYFEQEDDMMEVPYVTPHPPYH
LGAVAKTWENTKESPATHSSNFLYGTMVSYTCNPGYELLGNPVLICQEDGTWNGSAPSCISIECDLPT
APENGFLRFTETSMGSAVQYSCKPGHILAGSDLRLCLENRKWSGASPRCEAISCKKPNPVMNGSIKGS
NYTYLSTLYYECDPGYVLNGTERRTCQDDKNWDEDEPICIPVDCSSPPVSANGQVRGDEYTFQKEIEY
TCNEGFLLEGARSRVCLANGSWSGATPDCVPVRCATPPQLANGVTEGLDYGFMKEVTFHCHEGYILHG
APKLTCQSDGNWDAEIPLCKPVNCGPPEDLAHGFPNGFSFIHGGHIQYQCFPGYKLHGNSSRRCLSNG
SWSGSSPSCLPCRCSTPVIEYGTVNGTDFDCGKAARIQCFKGFKLLGLSEITCEADGQWSSGFPHCEH
TSCGSLPMIPNAFISETSSWKENVITYSCRSGYVIQGSSDLICTEKGVWSQPYPVCEPLSCGSPPSVA
NAVATGEAHTYESEVKLRCLEGYTMDTDTDTFTCQKDGRWFPERISCSPKKCPLPENITHILVHGDDF
SVNRQVSVSCAEGYTFEGVNISVCQLDGTWEPPFSDESCSPVSCGKPESPEHGFVVGSKYTFESTIIY
QCEPGYELEGNRERVCQENRQWSGGVAICKETRCETPLEFLNGKADIENRTTGPNVVYSCNRGYSLEG
PSEAHCTENGTWSHPVPLCKPNPCPVPFVIPENALLSEKEFYVDQNVSIKCREGFLLQGHGIITCNPD
ETWTQTSAKCEKISCGPPAHVENAIARGVHYQYGDMITYSCYSGYMLEGFLRSVCLENGTWTSPPICR
AVCRFPCQNGGICQRPNACSCPEGWMGRLCEEPICILPCLNGGRCVAPYQCDCPPGWTGSRCHTAVCQ
SPCLNGGKCVRPNRCHCLSSWTGHNCSRKRRTGF

| | | |
|---|---|---|
| NOV8k, SNP13380899 of | SEQ ID NO: 197 | 11158 bp |
| CG50646-04, | ORF Start: ATG at 77 | ORF Stop: TAA at 10787 |

| | | |
|---|---|---|
| DNA Sequence | SNP Pos: 2404 | SNP Change: A to G |

CAATTGGTCTAGGGTCTCCCCCATTGGAATATCCATCAGTGATGAGAAATACAACGTTTGTTGAGTTT
TCTCTAGCATGAGAAGAATTTGCGCGGCTTGCTGGGGTCTGGCGCTCGTTTCGGGCTGGGCGACCTTT
CAGCAGATGTCCCCGTCGCGCAATTTCAGCTTCCGCCTCTTCCCCGAGACCGCGCCCGGGGCCCCCGG
GAGTATCCCCGCGCCGCCCGCTCCTGGCGACGAAGCGGCGGGGAGCAGAGTGGAGCGGCTGGGCCAGG
CGTTCCGCGTGCGGCTGCTGCGGGAGCTCAGCGAGCGCCTGGAGCTTGTCTTCCTGGTGGATGATTCG
TCCAGCGTGGGCGAAGTCAACTTCCGCAGCGAGCTCATGTTCGTCCGCAAGCTGCTGTCCGACTTCCC
CGTGGTGCCCACGGCCACGCGCGTGGCCATCGTGACCTTCTCGTCCAAGAACTACGTGGTGCCGCGCG
TCGATTACATCTCCACCCGCCGCGCGCGCCAGCACAAGTGCGCGCTGCTCCTCCAAGAGATCCCTGCC
ATCTCCTACCGAGGTGGCGGCACCTACACCAAGGGCGCCTTCCAGCAAGCCGCGCAAATTCTTCTTCA
TGCTAGAGAAAACTCAACAAAAGTTGTATTTCTCATCACTGATGGATATTCCAATGGGGGAGACCCTA
GACCAATTGCAGCGTCACTGCGAGATTCAGGAGTGGAGATCTTCACTTTTGGCATATGGCAAGGGAAC
ATTCGAGAGCTGAATGACATGGCTTCCACCCCAAAGGAGGAGCACTGTTACCTGCTACACAGTTTTGA
AGAATTTGAGGCTTTAGTCGCCCTCTGTCATATGTTATTTGTAGATCTACCTTCTGGGAGTTTTATTC
AAGATGATATGGTCCACTGCTCATATCTTTGTGATGAAGGCAAGGACTGCTGTGACCGAATGGGAAGC
TGCAAATGTGGGAAACACACAGGCCATTTTGAGTGCATCTGTGAAAAGGGGTATAACGGGAAAGGTCT
GCAGTATGACTGCACAGTTTGCCCATCGGGGACATACAAACCTGAAGGCTCACCAGGAGGAATCAGCA
GTTGCATTCCATGTCCTGATGAAAATCACACCTCTCCACCTGGAAGCACATCCCCTGAAGACTGTGTC
TGCAGAGAGGGATACAGGGCATCTGGCCAGACCTGTGAAGTTGTCCACTGCCCTGCCCTGAAGCCTCC
CGAAAATGGTTACTTTATCCAAAACACTTGCAACAACCACTTCAATGCAGCCTGTGGGGTCCGATGTC
ACCCTGGATTTGATCTTGTGGGAAGCAGCATCATCTTATGTCTACCCAATGGTTTGTGGTCCGGTTCA
GAGAGCTACTGCAGAGTAAGAACATGTCCTCATCTCCGCCAGCCGAAACATGGCCACATCAGCTGTTC
TACAAGGGAAATGTTATATAAGACAACATGTTTGGTTGCCTGTGATGAAGGGTACAGGCTAGAAGGCA
GTGATAAGCTTACTTGTCAAGGAAACAGCCAGTGGGATGGGCCAGAACCCCGGTGTGTGGAGCGCCAC
TGTTCCACCTTTCAGATGCCCAAAGATGTCATCATATCCCCCCACAACTGTGGCAAGCAGCCAGCCAA
ATTTGGGACGATCTGCTATGTAAGTTGCCGCCAAGGGTTCATTTTATCTGGAGTCAAAGAAATGCTGA
GATGTACCACTTCTGGAAAATGGAATGTCGGAGTTCAGGCAGCTGTGTGTAAAGACGTGGAGGCTCCT
CAAATCAACTGTCCTAAGGACATAGAGGCTAAGACTCTGGAACAGCAAGATTCTGCCAATGTTACCTG
GCAGATTCCAACAGCTAAAGACAACTCTGGTGAAAAGGTGTCAGTCCACGTTCATCCAGCTTTCACCC
CACCTTACCTTTTCCCAATTGGAGATGTTGCTATCGTATACACGGCAACTGACCTATCCGGCAACCAG
GCCAGCTGCATTTTCCATATCAAGGTTATTGATGCAGAACCACCTGTCATAGACTGGTGCAGATCTCC
ACCTCCCGTCCAGGTCTCGGAGAAGGTACATGCCGCAAGCTGGGATGAGCCTCAGTTCTCAGACAACT
CAGGTGCTGAATTGGTCATTACCAGAAGTCATACACAAGGAGACCTTTTCCCTCAAGGGGAGACTATA
GTACAGTATACAGCCACTGACCCCTCAGGCAATAACAGGACATGTGATATCCATATTGTCATAAAAGG
TTCTCCCTGTGAAATTCCATTCACACCTGTAAATGGGGATTTTATATGCACTCCAGATAATACTGGAG
TCAACTGTACATTAACTTGCTTGGAGGGCTATGATTTCACAGAAGGGTCTACTGACAAGTATTATTGT
GCTTATGAAGATGGCGTCTGGAAGCCAACATATACCACTGAATGGCCAGACTGTGCCAGTAAGCGTTT
TGCAAACCACGGGTTCAAGTCCTTTGAGATGTTCTACAAAGCAGCTCGTTGTGATGACACAGATCTGA
TGAAGAAGTTTTCTGAAGCATTTGAGACGACCCTGGGAAAAATGGTCCCATCATTTTGTAGTGATGCA
GAGGACATTGACTGCAGACTGGAGGAGAACCTGACCAAAAAATATTGCCTAGAATATAATTATGACTA
TGAAAATGGCTTTGCAATTGGTCCAGGTGGCTGGGGTGCAGCTCATAGGCTGGATTACTCTTACGATG
ACTTCCTGGACACTGTGCAAGAAACAGCCACAAGCATCGGCAATGCCAAGTCCTCACGGATTAAAAGA
AGTGCCCCATTATCTGACTATAAAATTAAGTTAATTTTTAACATCACAGCTAGTGTGCCATTACCCGA
TGAAAGAAATGATACCCTTGAATGGGAAAATCAGCAACGACTCCTTCAGACATTGGAAACTATCACAA
ATAAACTGAAAAGGACTCTCAACAAAGACCCCATGTATTCCTTTCAGCTTGCATCAGAAATACTTATA
GCCGACAGCAATTCATTAGAAACAAAAAAGGCTTCCCCCTTCTGCAGACCAGGCTCAGTGCTGAGAGG
GCGTATGTGTGTCAATTGCCCTTTGGGAACCTATTATAATCTGGAACATTTCACCTGTAGAAACTGCC
GGATCGGATCCTATCAAGATGAAGAAGGGCAACTTGAGTGCAAGCTTTGCCCCTCTGGGATGTACACG
GAATATATCCATTCAAGAAACATCTCTGATTGTAAAGCTCAGTGTAAACAAGGCACCTACTCATACAG
TGGACTTGAGACTTGTGAATCGTGTCCACTGGGCACTTATCAGCCAAAATTTGGTTCCCGGAGCTGCC
TCTCGTGTCCAGAAAACACCTCAACTGTGAAAAGAGGAGCCGTGAACATTTCTGCATGTGGAGTTCCT
GATCCATCACAGAATGTTCAAGTTTTAGTTCAACTTTCTCAGCGGCAGAGGAAAGTGTGGTGCCCCCT
CCCTTGCCACAATAGTGGAACCTGCCAGCAACTTGGGCGTGGTTATGTTTGTCTCTGTCCACTTGGAT
ATACAGGTTTAAAGTGTGAAACAGACATCGATGAGTGCAGCCCACTGCCTTGCCTCAACAATGGAGTT
TGTAAAGACCTAGTTGGGGAATTCATTTGTGAGTGCCCATCAGGTTACACAGGTAAGCACTGTGAATT
GAACATCAATGAATGTCAGTCTAATCCATGTAGAAATCAGGCCACCTGTGTGGATGAATTAAATTCAT
ACAGTTGTAAATGTCAGCCAGGATTTTCAGGCAAGGTGTGAAACAGGTATGTATCGTATCTCAGTGTT
ATTAATAACCTTAATAATGCAGTCTGTGAAGACCAGGTTGGGGGATTCTTGTGCAAATGCCCACCTGG
ATTTTTGGGTACCCGATGTGGAAAGAACGTCGATGAGTGTCTCAGTCAGCCATGCAAAAATGGAGCTA
CCTGTAAAGACGGTGCCAATAGCTTCAGGTGCCTGTGTGCAGCTGGCTTCACAGGATCACACTGTGAA
TTGAACATCAATGAATGTCAGTCTAATCCATGTAGAAATCAGGCCACCTGTGTGGATGAATTAAATTC
ATACAGTTGTAAATGTCAGCCAGGATTTTCAGGCAAAAGGTGTGAAACAGAACAGTCTACAGGCTTTA
ACCTGGATTTTGAAGTTTCTGGCATCTATGGATATGTCATGCTAGATGGCATGCTCCCATCTCTCCAT
GCTCTAACCTGTACCTTCTGGATGAAATCCTCTGACGACATGAACTATGGAACACCAATCTCCTATGC
AGTTGATAACGGCAGCGACAATACCTTGCTCCTGACTGATTATAACGGGTGGGTTCTTTATGTGAATG
GCAGGGAAAAGATAACAAACTGTCCCTCGGTGAATGATGGCAGATGGCATCATATTGCAATCACTTGG
ACAAGTACTGGTGGAGCCTGGAGGGTCTATATAAATGGGGAATTATCTGACGGTGGTACTGGCCTCTC
CATTGGCAAAGCCATACCTGGTGGCGGTGCATTAGTTCTTGGGCAAGAGCAAGACAAAAAAGGAGAGG
GGTTCAACCCGGCTGAGTCTTTTGTGGGCTCCATAAGCCAGCTCAACCTCTGGGACTATGTCCTGTCT
CCACAGCAGGTGAAGTCACTGGCTACCTCCTGCCCAGAGGAACTCAGTAAAGGAAACGTGTTAGCATG
GCCTGATTTCTTGTCAGGAATTGTGGGGAAAGTGAAGATCGATTCTAAGAGCATATTTTGTTCTGATT
GCCCACGCTTGGGAGGGTCAGTGCCTCATCTGAGAACTGCATCTGAAGATTTAAAACCAGGTTCCAAA
GTCAATCTGTTCTGTGAACCAGGCTTCCAGCTGGTCGGGAACCCTGTGCAGTACTGTCTGAATCAAGG
ACAGTGGACACAACCACTCCCCCACTGTGAACGCATTCGCTGTGGGGTGCCACCTCCTTTGGAGAATG
GCTTCCATTCAGCCGATGACTTCTATGCTGGCAGCACAGTAACCTACCAGTGCAACAATGGCTACTAT
CTATTGGGTGACTCAAGGATGTTCTGTACAGATAATGGGAGCTGGAACGGCGTTTCACCATCCTGCTT
AGATGTCGATGAGTGTGCAGTTGGATCAGATTGTAGTGAGCATGCTTCTTGCCTGAACGTAGATGGAT
CCTACATATGTTCATGTGTCCCACCGTACACAGGAGATGGGAAAAACTGTGCAGAACCTATAAAATGT
AAGGCTCCAGGAAATCCGGAAAATGGCCACTCCTCAGGTGAGATTTATACAGTAGGTGCCGAAGTCAC
ATTTTCGTGTCAGGAAGGATACCAGTTGATGGGAGTAACCAAAATCACATGTTTGGAGTCTGGAGAAT
GGAATCATCTAATACCATATTGTAAAGCTGTTTCATGTGGTAAACCGGCTATTCCAGAAAATGGTTGC
ATTGAGGAGTTAGCATTTACTTTTGGCAGCAAAGTGACATATAGGTGTAATAAAGGATATACTCTGGC
CGGTGATAAAGAATCATCCTGTCTTGCTAACAGTTCTTGGAGTCATTCCCCTCCTGTGTGTGAACCAG
TGAAGTGTTCTAGTCCGGAAAATATAAATAATGGAAAATATATTTTGAGTGGGCTTACCTACCTTTCT
ACTGCATCATATTCATGCGATACAGGATACAGCTTACAGGGCCCTTCCATTATTGAATGCACGGCTTC
TGGCATCTGGGACAGAGCGCCACCTGCCTGTCACCTCGTCTTCTGTGGAGAACCACCTGCCATCAAAG
ATGCTGTCATTACGGGGAATAACTTCACTTTCAGGAACACCGTCACTTACACTTGCAAAGAAGGCTAT
ACTCTTGCTGGTCTTGACACCATTGAATGCCTGGCCGACGGCAAGTGGAGTAGAAGTGACCAGCAGTG
CCTGGCTGTCTCCTGTGATGAGCCACCCATTGTGGACCACGCCTCTCCAGAGACTGCCCATCGGCTCT
TTGGAGACATTGCATTCTACTACTGCTCTGATGGTTACAGCCTAGCAGACAATTCCCAGCTTCTCTGC
AATGCCCAGGGCAAGTGGGTACCCCCAGAAGGTCAAGACATGCCCCGTTGTATAGCTCATTTCTGTGA
AAAACCTCCATCGGTTTCCTATAGCATCTTGGAATCTGTGAGCAAAGCAAAATTTGCAGCTGGCTCAG
TTGTGAGCTTTAAATGCATGGAAGGCTTTGTACTGAACACCTCAGCAAAGATTGAATGTATGAGAGGT
GGGCAGTGGAACCCTTCCCCCATGTCCATCCAGTGCATCCCTGTGCGGTGTGGAGAGCCACCAAGCAT
CATGAATGGCTATGCAAGTGGATCAAACTACAGTTTTGGAGCCATGGTGGCTTACAGCTGCAACAAGG
GGTTCTACATCAAAGGGGAAAAGAAGAGCACCTGCGAAGCCACAGGGCAGTGGAGTAGTCCTATACCG
ACGTGCCACCCGGTATCTTGTGGTGAACCACCTAAGGTTGAGAATGGCTTTCTGGAGCATACAACTGG
CAGGATCTTTGAGAGTGAAGTGAGGTATCAGTGTAACCCGGGCTATAAGTCAGTCGGAAGTCCTGTAT
TTGTCTGCCAAGCCAATCGCCACTGGCACAGTGAATCCCCTCTGATGTGTGTTCCTCTCGACTGTGGA
AAACCTCCCCCGATCCAGAATGGCTTCATGAAAGGAGAAAACTTTGAAGTAGGGTCCAAGGTTCAGTT
TTTCTGTAATGAGGGTTATGAGCTTGTTGGTGACAGTTCTTGGACATGTCAGAAATCTGGCAAATGGA
ATAAGAAGTCAAATCCAAAGTGCATGCCTGCCAAGTGCCCAGAGCCGCCCCTCTTGGAAAACCAGCTA
GTATTAAAGGAGTTGACCACCGAGGTAGGAGTTGTGACATTTTCCTGTAAAGAAGGGCATGTCCTGCA
AGGCCCCTCTGTCCTGAAATGCTTGCCATCCCAGCAATGGAATGACTCTTTCCCTGTTTGTAAGATTG
TTCTTTGTACCCCACCTCCCCTAATTTCCTTTGGTGTCCCCATTCCTTCTTCTGCTCTTCATTTTGGA
AGTACTGTCAAGTATTCTTGTGTAGGTGGGTTTTTCCTAAGAGGAAATTCTACCACCCTCTGCCAACC
TGATGGCACCTGGAGCTCTCCACTGCCAGAATGTGTTCCAGTAGAATGTCCCCAACCTGAGGAAATCC
CCAATGGAATCATTGATGTGCAAGGCCTTGCCTATCTCAGCACAGCTCTCTATACCTGCAAGCCAGGC
TTTGAATTGGTGGGAAATACTACCACCCTTTGTGGAGAAAATGGTCACTGGCTTGGAGGAAAACCAAC
ATGTAAAGCCATTGAGTGCCTGAAACCCAAGGAGATTTTGAATGGCAAATTCTCTTACACGGACCTAC
ACTATGGACAGACCGTTACCTACTCTTGCAACCGAGGCTTTCGGCTCGAAGGTCCCAGTGCCTTGACC
TGTTTAGAGACAGGTGATTGGGATGTAGATGCCCCATCTTGCAATGCCATCCACTGTGATTCCCCACA
ACCCATTGAAAATGGTTTTGTAGAAGGTGCAGATTACAGCTATGGTGCCATAATCATCTACAGTTGCT
TCCCTGGGTTTCAGGTGGCTGGTCATGCCATGCAGACCTGTGAAGAGTCAGGATGGTCAAGTTCCATC
CCAACATGTATGCCAATAGACTGTGGCCTCCCTCCTCATATAGATTTTGGAGACTGTACTAAACTCAA
AGATGACCAGGGATATTTTGAGCAAGAAGACGACATGATGGAAGTTCCATATGTGACTCCTCACCCTC
CTTATCATTTGGGAGCAGTGGCTAAAACCTGGGAAAATACAAAGGAGTCTCCTGCTACACATTCATCA
AACTTTCTGTATGGTACCATGGTTTCATACACCTGTAATCCAGGATATGAACTTCTGGGGAACCCTGT
GCTGATCTGCCAGGAAGATGGAACTTGGAATGGCAGTGCACCATCCTGCATTTCAATTGAATGTGACT
TGCCTACTGCTCCTGAAAATGGCTTTTTGCGTTTTACAGAGACTAGCATGGGAAGTGCTGTGCAGTAT
AGCTGTAAACCTGGACACATTCTAGCAGGCTCTGACTTAAGGCTTTGTCTAGAGAATAGAAAGTGGAG
TGGTGCCTCCCCACGCTGTGAAGCCATTTCATGCAAAAAGCCAAATCCAGTCATGAATGGATCCATCA
AAGGAAGCAACTACACATACCTGAGCACGTTGTACTATGAGTGTGACCCCGGATATGTGCTGAATGGC
ACTGAGAGGAGAACATGCCAGGATGACAAAAACTGGGATGAGGATGAGCCCATTTGCATTCCTGTGGA
CTGCAGTTCACCCCCAGTCTCAGCCAATGGCCAGGTGAGAGGAGACGAGTACACATTCCAAAAAGAGA
TTGAATACACTTGCAATGAAGGGTTCTTGCTTGAGGGAGCCAGGAGTCGGGTTTGTCTTGCCAATGGA
GGTGACGGAAGGCCTGGACTATGGCTTCATGAAGGAAGTAACATTCCACTGTCACGAGGGCTACATCT
TGCACGGTGCTCCAAAACTCACCTGTCAGTCAGATGGCAACTGGGATGCAGAGATTCCTCTCTGTAAA
CCAGTCAACTGTGGACCTCCTGAAGATCTTGCCCATGGTTTCCCTAATGGTTTTTCCTTTATTCATGG
GGGCCATATACAGTATCAGTGCTTTCCTGGTTATAAGCTCCATGGAAATTCATCAAGAAGGTGCCTCT
CCAATGGCTCCTGGAGTGGCAGCTCACCTTCCTGCCTGCCTTGCAGATGTTCCACACCAGTAATTGAA
TATGGAACTGTCAATGGGACAGATTTTGACTGTGGAAAGGCAGCCCGGATTCAGTGCTTCAAAGGCTT
CAAGCTCCTAGGACTTTCTGAAATCACCTGTGAAGCCGATGGCCAGTGGAGCTCTGGGTTCCCCCACT
AAGGAAAATGTGATAACTTACAGCTGCAGGTCTGGATATGTCATACAAGGCAGTTCAGATCTGATTTG
TACAGAGAAAGGGGTATGGAGCCAGCCTTATCCAGTCTGTGAGCCCTTGTCCTGTGGGTCCCCACCGT
CTGTCGCCAATGCAGTGGCAACTGGAGAGGCACACACCTATGAAAGTGAAGTGAAACTCAGATGTCTG
GAAGGTTATACGATGGATACAGATACAGATACATTCACCTGTCAGAAAGATGGTCGCTGGTTCCCTGA
GAGAATCTCCTGCAGTCCTAAAAAATGTCCTCTCCCGGAAAACATAACACATATACTTGTACATGGGG
ACGATTTCAGTGTGAATAGGCAAGTTTCTGTGTCATGTGCAGAAGGGTATACCTTTGAGGGAGTTAAC
ATATCAGTATGTCAGCTTGATGGAACCTGGGAGCCACCATTCTCCGATGAATCTTGCAGTCCAGTTTC
TTGTGGGAAACCTGAAAGTCCAGAACATGGATTTGTGGTTGGCAGTAAATACACCTTTGAAAGCACAA
TTATTTATCAGTGTGAGCCTGGCTATGAACTAGAGGGGAACAGGGAACGTGTCTGCCAGGAGAACAGA
CAGTGGAGTGGAGGGGTGGCAATATGCAAAGAGACCAGGTGTGAAACTCCACTTGAATTTCTCAATGG
GAAAGCTGACATTGAIAACAGGACGACTGGACCCAACGTGGTATATTCCTGCAACAGAGGCTACAGTC
TTGAAGGGCCATCTGAGGCACACTGCACAGAAAATGGAACCTGGAGCCACCCAGTCCCTCTCTGCAAA
CCAAATCCATGCCCTGTTCCTTTTGTGATTCCCGAGAATGCTCTGCTGTCTGAAAAGGAGTTTTATGT
TGATCAGAATGTGTCCATCAAATGTAGGGAAGGTTTTCTGCTGCAGGGCCACGGCATCATTACCTGCA
ACCCCGACGAGACGTGGACACAGACAAGCGCCAAATGTGAAAAAATCTCATGTGGTCCACCAGCTCAC
GTAGAAAATGCAATTGCTCGAGGCGTACATTATCAATATGGAGACATGATCACCTACTCATGTTACAG
TGGATACATGTTGGAGGGTTTCCTGAGGAGTGTTTGTTTAGAAAATGGAACATGGACATCACCTCCTA
TTTGCAGAGCTGTCTGTCGATTTCCATGTCAGAATGGGGGCATCTGCCAACGCCCAAATGCTTGTTCC
TGTCCAGAGGGCTGGATGGGGCGCCTCTGTGAAGAACCAATCTGCATTCTTCCCTGTCTGAACGGAGG
TCGCTGTGTGGCCCCTTACCAGTGTGACTGCCCGCCTGGCTGGACGGGGTCTCGCTGTCATACAGCTG
TTTGCCAGTCTCCCTGCTTAAATGGTGGAAAATGTGTAAGACCAAACCGATGTCACTGTCTTTCTTCT
TGGACGGGACATAACTGTTCAAGGAAAAGGAGGACTGGGTTTTAACCACTGCACGACCATCTGGCTCT
CCCAAAAGCAGGATCATCTCTCCTCGGTAGTGCCTGGGCATCCTGGAACTTATGCAAAGAAAGTCCAA
CATGGTGCTGGGTCTTGTTTAGTAAACTTGTTACTTGGGGTTACTTTTTTTATTTTGTGATATATTTT
GTTATTCCTTGTGACATACTTTCTTACATGTTTCCATTTTTAAATATGCCTGTATTTTCTATATAAAA
ATTATATTAAATAGATGCTGCTCTACCCTCACAAAATGTACATATTCTGCTGTCTATTGGGAAAGTTC
CTGGTACACATTTTTATTCAGTTACTTAAAATGATTTTTCCATTAAAGTATATTTTGCTACTAAATAA
AAAAAA

| | | |
|---|---|---|
| NOV8k, SNP13380899 of | SEQ ID NO: 198 | MW at 390012.5kD |

| | | | |
|---|---|---|---|
| CG50646-04, Protein Sequence | SNP Pos: 776 | 3570 aa | SNP Change: Lys to Lys |

MRRICAACWGLALVSGWATFQQMSPSRNFSFRLFPETAPGAPGSIPAPPAPGDEAAGSRVERLGQAFR
VRLLRELSERLELVFLVDDSSSVGEVNFRSELMFVRKLLSDFPVVPTATRVAIVTFSSKNYVVPRVDY
ISTRRARQHKCALLLQEIPAISYRGGGTYTKGAFQQAAQILLHARENSTKVVFLITDGYSNGGDPRPI
AASLRDSGVEIFTFGIWQGNIRELNDMASTPKEEHCYLLHSFEEFEAIVALCHMLFVDLPSGSFIQDD
MVHCSYLCDEGKDCCDRMGSCKCGKHTGHFECICEKGYNGKGLQYDCTVCPSGTYKPEGSPGGISSCI
PCPDENHTSPPGSTSPEDCVCREGYRASGQTCEVVHCPALKPPENGYFIQNTCNNHFNAACGVRCHPG
FDLVGSSIILCLPNGLWSGSESYCRVRTCPHLRQPKHGHISCSTREMLYKTTCLVACDEGYRLEGSDK
LTCQGNSQWDGPEPRCVERHCSTFQMPKDVIISPHNCGKQPAKFGTICYVSCRQGFILSGVKEMLRCT
TSGKWNVGVQAAVCKDVEAPQINCPKDIEAKTLEQQDSANVTWQIPTAKDNSGEKVSVHVHPAFTPPY
LFPIGDVAIVYTATDLSGNQASCIFHIKVIDAEPPVIDWCRSPPPVQVSEKVHAASWDEPQFSDNSGA
ELVITRSHTQGDLFPQGETIVQYTATDPSGNNRTCDIHIVIKGSPCEIPFTPVNGDFICTPDNTGVNC
TLTCLEGYDFTEGSTDKYYCAYEDGVWKPTYTTEWPDCASKRFANHGFKSFEMFYKAARCDDTDLMKK
FSEAFETTLGKMVPSFCSDAEDIDCRLEENLTKYYCLEYNYDYENGFAIGPGGWGAANRLDYSYDDFL
DTVQETATSIGNAKSSRIKRSAPLSDYKIKLIFNITASVPLPDERNDTLEWENQQRLLQTLETITNKL
KRTLNKDPMYSFQLASEILIADSNSLETKKASPFCRPGSVLRGRMCVNCPLGTYYNLEHFTCESCRIG
SYQDEEGQLECKLCPSGMYTEYIHSRNISDCKAQCKQGTYSYSGLETCESCPLGTYQPKFGSRSCLSC
PENTSTVKRGAVNISACGVPCPEGKFSRSGLMPCHPCPRDYYQPNAGKAFCLACPFYGTTPFAGSRSI
TECSSFSSTFSAAEESVVPPASLGHIKKRHEISSQASHECFFNPCHNSGTCQQLGRGYVCLCPLGYTG
LKCETDIDECSPLPCLNNGVCKDLVGEFICECPSGYTGKHCELNINECQSNPCRNQATCVDELNSYSC
KCQPGFSGKRCETGMYQLSVINNLNNAVCEDQVGGFLCKCPPGFLGTRCGKNVDECLSQPCKNGATCK
DGANSFRCLCAAGFTGSHCELNINECQSNPCRNQATCVDELNSYSCKCQPGFSGKRCETEQSTGFNLD
FEVSGIYGYVMLDGMLPSLHALTCTFWMKSSDDMNYGTPISYAVDNGSDNTLLLTDYNGWVLYVNGRE
KITNCPSVNDGRWHHIAITWTSTGGAWRVYINGELSDGGTGLSIGKAIPGGGALVLGQEQDKKGEGFN
PAESFVGSISQLNLWDYLSPQQVKSLATSCPEELSKGNVLAWPDFLSGIVGKVKIDSKSIFCSDCPR
LGGSVPHLRTASEDLKPGSKVNLFCEPGFQLVGNPVQYCLNQGQWTQPLPHCERIRCGVPPPLENGFH
SADDFYAGSTVTYQCNNGYYLLGDSRMFCTDNGSWNGVSPSCLDVDECAVGSDCSEHASCLNVDGSYI
CSCVPPYTGDGKNCAEPIKCKAPGNPENGHSSGEIYTVGAEVTFSCQEGYQLMGVTKITCLESGEWNH
LIPYCKAVSCGKPAIPENGCIEELAFTFGSKVTYRCNKGYTLAGDKESSCLANSSWSHSPPVCEPVKC
SSPENINNGKYILSGLTYLSTASYSCDTGYSLQGPSIIECTASGIWDRAPPACHLVFCGEPPAIKDAV
ITGNNFTFRNTVTYTCKEGYTLAGLDTIECLADGKWSRSDQQCLAVSCDEPPIVDHASPETAHRLFGD
IAFYYCSDGYSLADNSQLLCNAQGKWVPPEGQDMPRCIAHFCEKPPSVSYSILESVSKAKFAAGSVVS
FKCMEGFVLNTSAKIECMRGGQWNPSPMSIQCIPVRCGEPPSIMNGYASGSNYSFGAMVAYSCNKGFY
IKGEKKSTCEATGQWSSPIPTCHPVSCGEPPKVENGFLEHTTGRIFESEVRYQCNPGYKSVGSPVFVC
QANRHWHSESPLMCVPLDCGKPPPIQNGFMKGENFEVGSKVQFFCNEGYELVGDSSWTCQKSGKWNKK
SNPKCMPAKCPEPPLLENQLVLKELTTEVGVVTFSCKEGHVLQGPSVLKCLPSQQWNDSFPVCKIVLC
TPPPLISFGVPIPSSALHFGSTVKYSCVGGFFLRGNSTTLCQPDGTWSSPLPECVPVECPQPEEIPNG
IIDVQGLAYLSTALYTCKPGFELVGNTTTLCGENGHWLGGKPTCKAIECLKPKEILNGKFSYTDLHYG
QTVTYSCNRGFRLEGPSALTCLETGDWDVDAPSCNAIHCDSPQPIENGFVEGADYSYGAIIIYSCFPG
FQVAGHAMQTCEESGWSSSIPTCMPIDCGLPPHIDFGDCTKLKDDQGYFEQEDDMNEVPYVTPHPPYH
LGAVAKTWENTKESPATHSSNFLYGTMVSYTCNPGYELLGNPVLICQEDGTWNGSAPSCISIECDLPT
APENGFLRFTETSMGSAVQYSCKPGHILAGSDLRLCLENRKWSGASPRCEAISCKKPNPVMNGSIKGS
NYTYLSTLYYECDPGYVLNGTERRTCQDDKNWDEDEPICIPVDCSSPPVSANGQVRGDEYTFQKEIEY
TCNEGFLLEGARSRVCLANGSWSGATPDCVPVRCATPPQLANGVTEGLDYGFMKEVTFHCHEGYILHG
APKLTCQSDGNWDAEIPLCKPVNCGPPEDLAHGFPNGFSFIHGGHIQYQCFPGYKLHGNSSRRCLSNG
SWSGSSPSCLPCRCSTPVIEYGTVNGTDFDCGKAARIQCFKGFKLLGLSEITCEADGQWSSGFPHCEH
TSCGSLPMIPNAFISETSSWKENVITYSCRSGYVIQGSSDLICTEKGVWSQPYPVCEPLSCGSPPSVA
NAVATGEAHTYESEVKLRCLEGYTMDTDTDTFTCQKDGRWFPERISCSPKKCPLPENITHILVHGDDF
SVNRQVSVSCAEGYTFEGVNISVCQLDGTWEPPFSDESCSPVSCGKPESPEHGFVVGSKYTFESTIIY
QCEPGYELEGNRERVCQENRQWSGGVAICKETRCETPLEFLNGKADIENRTTGPNVVYSCNRGYSLEG
PSEAHCTENGTWSHPVPLCKPNPCPVPFVIPENALLSEKEFYVDQNVSIKCREGFLLQGHGIITCNPD
ETWTQTSAKCEKISCGPPAHVENAIARGVHYQYGDMITYSCYSGYMLEGFLRSVCLENGTWTSPPICR
AVCRFPCQNGGICQRPNACSCPEGWMGRLCEEPICILPCLNGGRCVAPYQCDCPPGWTGSRCHTAVCQ
SPCLNGGKCVRPNRCHCLSSWTGHNCSRKRRTGF

| | |
|---|---|
| SEQ ID NO: 199 | 11158 bp |

| | | |
|---|---|---|
| NOV8l, SNP13374702 of | ORF Start: ATG at 77 | ORF Stop: TAA at 10787 |

| | | |
|---|---|---|
| CG50646-04, DNA Sequence | SNP Pos: 2457 | SNP Change: A to G |

CAATTGGTCTAGGGTCTCCCCCATTGGAATATCCATCAGTGATGAGAAATACAACGTTTGTTGAGTTT
TCTCTAGCATGAGAAGAATTTGCGCGGCTTGCTGGGGTCTGGCGCTCGTTTCGGGCTGGGCGACCTTT
CAGCAGATGTCCCCGTCGCGCAATTTCAGCTTCCGCCTCTTCCCCGAGACCGCGCCCGGGGCCCCCGG
GAGTATCCCCGCGCCGCCCGCTCCTGGCGACGAAGCGGCGGGGAGCAGAGTGGAGCGGCTGGGCCAGG
CGTTCCGCGTGCGGCTGCTGCGGGAGCTCAGCGAGCGCCTGGAGCTTGTCTTCCTGGTGGATGATTCG
TCCAGCGTGGGCGAAGTCAACTTCCGCAGCGAGCTCATGTTCGTCCGCAAGCTGCTGTCCGACTTCCC
CGTGGTGCCCACGGCCACGCGCGTGGCCATCGTGACCTTCTCGTCCAAGAACTACGTGGTGCCGCGCG
TCGATTACATCTCCACCCGCCGCGCGCGCCAGCACAAGTGCGCGCTGCTCCTCCAAGAGATCCCTGCC
ATCTCCTACCGAGGTGGCGGCACCTACACCAAGGGCGCCTTCCAGCAAGCCGCGCAAATTCTTCTTCA
TGCTAGAGAAAACTCAACAAAAGTTGTATTTCTCATCACTGATGGATATTCCAATGGGGGAGACCCTA
GACCAATTGCAGCGTCACTGCGAGATTCAGGAGTGGAGATCTTCACTTTTGGCATATGGCAAGGGAAC
ATTCGAGAGCTGAATGACATGGCTTCCACCCCAAAGGAGGAGCACTGTTACCTGCTACACAGTTTTGA
AGAATTTGAGGCTTTAGTCGCCCTCTGTCATATGTTATTTGTAGATCTACCTTCTGGGAGTTTTATTC
AAGATGATATGGTCCACTGCTCATATCTTTGTGATGAAGGCAAGGACTGCTGTGACCGAATGGGAAGC
TGCAAATGTGGGAAACACACAGGCCATTTTGAGTGCATCTGTGAAAAGGGGTATAACGGGAAAGGTCT
GCAGTATGACTGCACAGTTTGCCCATCGGGGACATACAAACCTGAAGGCTCACCAGGAGGAATCAGCA
GTTGCATTCCATGTCCTGATGAAAATCACACCTCTCCACCTGGAAGCACATCCCCTGAAGACTGTGTC
TGCAGAGAGGGATACAGGGCATCTGGCCAGACCTGTGAAGTTGTCCACTGCCCTGCCCTGAAGCCTCC
CGAAAATGGTTACTTTATCCAAAACACTTGCAACAACCACTTCAATGCAGCCTGTGGGGTCCGATGTC
ACCCTGGATTTGATCTTGTGGGAAGCAGCATCATCTTATGTCTACCCAATGGTTTGTGGTCCGGTTCA
GAGAGCTACTGCAGAGTAAGAACATGTCCTCATCTCCGCCAGCCGAAACATGGCCACATCAGCTGTTC
TACAAGGGAAATGTTATATAAGACAACATGTTTGGTTGCCTGTGATGAAGGGTACAGGCTAGAAGGCA
GTGATAAGCTTACTTGTCAAGGAAACAGCCAGTGGGATGGGCCAGAACCCCGGTGTGTGGAGCGCCAC
TGTTCCACCTTTCAGATGCCCAAAGATGTCATCATATCCCCCCACAACTGTGGCAAGCAGCCAGCCAA
ATTTGGGACGATCTGCTATGTAAGTTGCCGCCAAGGGTTCATTTTATCTGGAGTCAAAGAAATGCTGA
GATGTACCACTTCTGGAAAATGGAATGTCGGAGTTCAGGCAGCTGTGTGTAAAGACGTGGAGGCTCCT
CAAATCAACTGTCCTAAGGACATAGAGGCTAAGACTCTGGAACAGCAAGATTCTGCCAATGTTACCTG
GCAGATTCCAACAGCTAAAGACAACTCTGGTGAAAAGGTGTCAGTCCACGTTCATCCAGCTTTCACCC
CACCTTACCTTTTCCCAATTGGAGATGTTGCTATCGTATACACGGCAACTGACCTATCCGGCAACCAG
GCCAGCTGCATTTTCCATATCAAGGTTATTGATGCAGAACCACCTGTCATAGACTGGTGCAGATCTCC
ACCTCCCGTCCAGGTCTCGGAGAAGGTACATGCCGCAAGCTGGGATGAGCCTCAGTTCTCAGACAACT
CAGGTGCTGAATTGGTCATTACCAGAAGTCATACACAAGGAGACCTTTTCCCTCAAGGGGAGACTATA
GTACAGTATACAGCCACTGACCCCTCAGGCAATAACAGGACATGTGATATCCATATTGTCATAAAAGG
TTCTCCCTGTGAAATTCCATTCACACCTGTAAATGGGGATTTTATATGCACTCCAGATAATACTGGAG
TCAACTGTACATTAACTTGCTTGGAGGGCTATGATTTCACAGAAGGGTCTACTGACAAGTATTATTGT
GCTTATGAAGATGGCGTCTGGAAACCAACATATACCACTGAATGGCCAGACTGTGCCAGTAAGCGTTT
TGCAAACCGCGGGTTCAAGTCCTTTGAGATGTTCTACAAAGCAGCTCGTTGTGATGACACAGATCTGA
TGAAGAAGTTTTCTGAAGCATTTGAGACGACCCTGGGAAAAATGGTCCCATCATTTTGTAGTGATGCA
GAGGACATTGACTGCAGACTGGAGGAGAACCTGACCAAAAAATATTGCCTAGAATATAATTATGACTA
TGAAAATGGCTTTGCAATTGGTCCAGGTGGCTGGGGTGCAGCTAATAGGCTGGATTACTCTTACGATG
ACTTCCTGGACACTGTGCAAGAAACAGCCACAAGCATCGGCAATGCCAAGTCCTCACGGATTAAAAGA
AGTGCCCCATTATCTGACTATAAAATTAAGTTAATTTTTAACATCACAGCTAGTGTGCCATTACCCGA
ATAAACTGAAAAGGACTCTCAACAAAGACCCCATGTATTCCTTTCAGCTTGCATCAGAAATACTTATA
GCCGACAGCAATTCATTAGAAACAAAAAAGGCTTCCCCCTTCTGCAGACCAGGCTCAGTGCTGAGAGG
GCGTATGTGTGTCAATTGCCCTTTGGGAACCTATTATAATCTGGAACATTTCACCTGTGAAAGCTGCC
GGATCGGATCCTATCAAGATGAAGAAGGGCAACTTGAGTGCAAGCTTTGCCCCTCTGGGATGTACACG
GAATATATCCATTCAAGAAACATCTCTGATTGTAAAGCTCAGTGTAAACAAGGCACCTACTCATACAG
TGGACTTGAGACTTGTGAATCGTGTCCACTGGGCACTTATCAGCCAAAATTTGGTTCCCGGAGCTGCC
TCTCGTGTCCAGAAAACACCTCAACTGTGAAAAGAGGAGCCGTGAACATTTCTGCATGTGGAGTTCCT
TGTCCAGAAGGAAAATTCTCGCGTTCTGGGTTAATGCCCTGTCACCCATGTCCTCGTGACTATTACCA
ACCTAATGCAGGGAAGGCCTTCTGCCTGGCCTGTCCCTTTTATGGAACTACCCCATTCGCTGGTTCCA
GATCCATCACAGAATGTTCAAGTTTTAGTTCAACTTTCTCAGCGGCAGAGGAAAGTGTGGTGCCCCCT
GCCTCTCTTGGACATATTAAAAAGAGGCATGAAATCAGCAGTCAGGCAAGTCATGAATGCTTCTTTAA
CCCTTGCCACAATAGTGGAACCTGCCAGCAACTTGGGCGTGGTTATGTTTGTCTCTGTCCACTTGGAT
ATACAGGTTTAAAGTGTGAAACAGACATCGATGAGTGCAGCCCACTGCCTTGCCTCAACAATGGAGTT
TGTAAAGACCTAGTTGGGGAATTCATTTGTGAGTGCCCATCAGGTTACACAGGTAAGCACTGTGAATT
GAACATCAATGAATGTCAGTCTAATCCATGTAGAAATCAGGCCACCTGTGTGGATGAATTAAATTCAT
ACAGTTGTAAATGTCAGCCAGGATTTTCAGGCAAAAGGTGTGAAACAGGTATGTATCAACTCAGTGTT
ATTAATAACCTTAATAATGCAGTCTGTGAAGACCAGGTTGGGGGATTCTTGTGCAAATGCCCACCTGG
ATTTTTGGGTACCCGATGTGGAAAGAACGTCGATGAGTGTCTCAGTCAGCCATGCAAAAATGGAGCTA
CCTGTAAAGACGGTGCCAATAGCTTCAGGTGCCTGTGTGCAGCTGGCTTCACAGGATCACACTGTGAA
TTGAACATCAATGAATGTCAGTCTAATCCATGTAGAAATCAGGCCACCTGTGTGGATGAATTAAATTC
ATACAGTTGTAAATGTCAGCCAGGATTTTCAGGCAAAAGGTGTGAAACAGAACAGTCTACAGGCTTTA
ACCTGGATTTTGAAGTTTCTGGCATCTATGGATATGTCATGCTAGATGGCATGCTCCCATCTCTCCAT
GCTCTAACCTGTACCTTCTGGATGAAATCCTCTGACGACATGAACTATGGAACACCAATCTCCTATGC
AGTTGATAACGGCAGCGACAATACCTTGCTCCTGACTGATTATAACGGGTGGGTTCTTTATGTGAATG
GCAGGGAAAAGATAACAAACTGTCCCTCGGTGAATGATGGCAGATGGCATCATATTGCAATCACTTGG
ACAAGTACTGGTGGAGCCTGGAGGGTCTATATAAATGGGGAATTATCTGACGGTGGTACTGGCCTCTC
CATTGGCAAAGCCATACCTGGTGGCGGTGCATTAGTTCTTGGGCAAGAGCAAGACAAAAAAGGAGAGG
GGTTCAACCCGGCTGAGTCTTTTGTGGGCTCCATAAGCCAGCTCAACCTCTGGGACTATGTCCTGTCT
CCACAGCAGGTGAAGTCACTGGCTACCTCCTGCCCAGAGGAACTCAGTAAAGGAAACGTGTTAGCATG
GCCTGATTTCTTGTCAGGAATTGTGGGGAAAGTGAAGATCGATTCTAAGAGCATATTTTGTTCTGATT
GCCCACGCTTGGGAGGGTCAGTGCCTCATCTGAGAACTGCATCTGAAGATTTAAAACCAGGTTCCAAA
GTCAATCTGTTCTGTGAACCAGGCTTCCAGCTGGTCGGGAACCCTGTGCAGTACTGTCTGAATCAAGG
ACAGTGGACACAACCACTCCCCCACTGTGAACGCATTCGCTGTGGGGTGCCACCTCCTTTGGAGAATG
GCTTCCATTCAGCCGATGACTTCTATGCTGGCAGCACAGTAACCTACCAGTGCAACAATGGCTACTAT
CTATTGGGTGACTCAAGGATGTTCTGTACAGATAATGGGAGCTGGAACGGCGTTTCACCATCCTGCTT
AGATGTCGATGAGTGTGCAGTTGGATCAGATTGTAGTGAGCATGCTTCTTGCCTGAACGTAGATGGAT
CCTACATATGTTCATGTGTCCCACCGTACACAGGAGATGGGAAAAACTGTGCAGAACCTATAAAATGT
AAGGCTCCAGGAAATCCGGAAAATGGCCACTCCTCAGGTGAGATTTATACAGTAGGTGCCGAAGTCAC
ATTTTCGTGTCAGGAAGGATACCAGTTGATGGGAGTAACCAAAATCACATGTTTGGAGTCTGGAGAAT
GGAATCATCTAATACCATATTGTAAAGCTGTTTCATGTGGTAAACCGGCTATTCCAGAAAATGGTTGC
ATTGAGGAGTTAGCATTTACTTTTGGCAGCAAAGTGACATATAGGTGTAATAAAGGATATACTCTGGC
CGGTGATAAAGAATCATCCTGTCTTGCTAACAGTTCTTGGAGTCATTCCCCTCCTGTGTGTGAACCAG
TGAAGTGTTCTAGTCCGGAAAATATAAATAATGGAAAATATATTTTGAGTGGGCTTACCTACCTTTCT
ACTGCATCATATTCATGCGATACAGGATACAGCTTACAGGGCCCTTCCATTATTGAATGCACGGCTTC
TGGCATCTGGGACAGAGCGCCACCTGCCTGTCACCTCGTCTTCTGTGGAGAACCACCTGCCATCAAAG
ATGCTGTCATTACGGGGAATAACTTCACTTTCAGGAACACCGTCACTTACACTTGCAAAGAAGGCTAT
ACTCTTGCTGGTCTTGACACCATTGAATGCCTGGCCGACGGCAAGTGGAGTAGAAGTGACCAGCAGTG
CCTGGCTGTCTCCTGTGATGAGCCACCCATTGTGGACCACGCCTCTCCAGAGACTGCCCATCGGCTCT
TTGGAGACATTGCATTCTACTACTGCTCTGATGGTTACAGCCTAGCAGAGACTTCCCAGCTTCTCTGC
AATGCCCAGGGCAAGTGGGTACCCCCAGAAGGTCAAGACATGCCCCGTTGTATAGCTCATTTCTGTGA
AAAACCTCCATCGGTTTCCTATAGCATCTTGGAATCTGTGAGCAAAGCAAAATTTGCAGCTGGCTCAG
TTGTGAGCTTTAAATGCATGGAAGGCTTTGTACTGAACACCTCAGCAAAGATTGAATGTATGAGAGGT
CATGAATGGCTATGCAAGTGGATCAAACTACAGTTTTGGAGCCATGGTGGCTTACAGCTGCAACAAGG
GGTTCTACATCAAAGGGGAAAAGAAGAGCACCTGCGAAGCCACAGGGCAGTGGAGTAGTCCTATACCG
ACGTGCCACCCGGTATCTTGTGGTGAACCACCTAAGGTTGAGAATGGCTTTCTGGAGCATACAACTGG
CAGGATCTTTGAGAGTGAAGTGAGGTATCAGTGTAACCCGGGCTATAAGTCAGTCGGAAGTCCTGTAT
TTGTCTGCCAAGCCAATCGCCACTGGCACAGTGAATCCCCTCTGATGTGTGTTCCTCTCGACTGTGGA
AAACCTCCCCCGATCCAGAATGGCTTCATGAAAGGAGAAAACTTTGAAGTAGGGTCCAAGGTTCAGTT
TTTCTGTAATGAGGGTTATGAGCTTGTTGGTGACAGTTCTTGGACATGTCAGAAATCTGGCAAATGGA
ATAAGAAGTCAAATCCAAAGTGCATGCCTGCCAAGTGCCCAGAGCCGCCCCTCTTGGAAAACCAGCTA
GTATTAAAGGAGTTGACCACCGAGGTAGGAGTTGTGACATTTTCCTGTAAAGAAGGGCATGTCCTGCA
AGGCCCCTCTGTCCTGAAATGCTTGCCATCCCAGCAATGGAATGACTCTTTCCCTGTTTGTAAGATTG
TTCTTTGTACCCCACCTCCCCTAATTTCCTTTGGTGTCCCCATTCCTTCTTCTGCTCTTCATTTTGGA
AGTACTGTCAAGTATTCTTGTGTAGGTGGGTTTTTCCTAAGAGGAAATTCTACCACCCTCTGCCAACC
TGATGGCACCTGGAGCTCTCCACTGCCAGAATGTGTTCCAGTAGAATGTCCCCAACCTGAGGAAATCC
CCAATGGAATCATTGATGTGCAAGGCCTTGCCTATCTCAGCACAGCTCTCTATACCTGCAAGCCAGGC
TTTGAATTGGTGGGAAATACTACCACCCTTTGTGGAGAAAATGGTCACTGGCTTGGAGGAAAACCAAC
ATGTAAAGCCATTGAGTGCCTGAAACCCAAGGAGATTTTGAATGGCAAATTCTCTTACACGGACCTAC
ACTATGGACAGACCGTTACCTACTCTTGCAACCGAGGCTTTCGGCTCGAAGGTCCCAGTGCCTTGACC
TGTTTAGAGACAGGTGATTGGGATGTAGATGCCCCATCTTGCAATGCCATCCACTGTGATTCCCCACA
ACCCATTGAAAATGGTTTTGTAGAAGGTGCAGATTACAGCTATGGTGCCATAATCATCTACAGTTGCT
TCCCTGGGTTTCAGGTGGCTGGTCATGCCATGCAGACCTGTGAAGAGTCAGGATGGTCAAGTTCCATC
CCAACATGTATGCCAATAGACTGTGGCCTCCCTCCTCATATAGATTTTGGAGACTGTACTAAACTCAA
AGATGACCAGGGATATTTTGAGCAAGAAGACGACATGATGGAAGTTCCATATGTGACTCCTCACCCTC
CTTATCATTTGGGAGCAGTGGCTAAAACCTGGGAAAATACAAAGGAGTCTCCTGCTACACATTCATCA
AACTTTCTGTATGGTACCATGGTTTCATACACCTGTAATCCAGGATATGAACTTCTGGGGAACCCTGT
GCTGATCTGCCAGGAAGATGGAACTTGGAATGGCAGTGCACCATCCTGCATTTCAATTGAATGTGACT
TGCCTACTGCTCCTGAAAATGGCTTTTTGCGTTTTACAGAGACTAGCATGGGAAGTGCTGTGCAGTAT
AGCTGTAAACCTGGACACATTCTAGCAGGCTCTGACTTAAGGCTTTGTCTAGAGAATAGAAAGTGGAG
TGGTGCCTCCCCACGCTGTGAAGCCATTTCATGCAAAAAGCCAAATCCAGTCATGAATGGATCCATCA
AAGGAAGCAACTACACATACCTGAGCACGTTGTACTATGAGTGTGACCCCGGATATGTGCTGAATGGC
ACTGAGAGGAGAACATGCCAGGATGACAAAAACTGGGATGAGGATGAGCCCATTTGCATTCCTGTGGA
CTGCAGTTCACCCCCAGTCTCAGCCAATGGCCAGGTGAGAGGAGACGAGTACACATTCCAAAAAGAGA
TTGAATACACTTGCAATGAAGGGTTCTTGCTTGAGGGAGCCAGGAGTCGGGTTTGTCTTGCCAATGGA
AGTTGGAGTGGAGCCACTCCCGACTGTGTGCCTGTCAGATGTGCCACCCCGCCACAACTGGCCAATGG
GGTGACGGAAGGCCTGGACTATGGCTTCATGAAGGAAGTAACATTCCACTGTCACGAGGGCTACATCT
TGCACGGTGCTCCAAAACTCACCTGTCAGTCAGATGGCAACTGGGATGCAGAGATTCCTCTCTGTAAA
CCAGTCAACTGTGGACCTCCTGAAGATCTTGCCCATGGTTTCCCTAATGGTTTTTCCTTTATTCATGG
GGGCCATATACAGTATCAGTGCTTTCCTGGTTATAAGCTCCATGGAAATTCATCAAGAAGGTGCCTCT
CCAATGGCTCCTGGAGTGGCAGCTCACCTTCCTGCCTGCCTTGCAGATGTTCCACACCAGTAATTGAA
TATGGAACTGTCAATGGGACAGATTTTGACTGTGGAAAGGCAGCCCGGATTCAGTGCTTCAAAGGCTT
CAAGCTCCTAGGACTTTCTGAAATCACCTGTGAAGCCGATGGCCAGTGGAGCTCTGGGTTCCCCCACT
GTGAACACACTTCTTGTGGTTCTCTTCCAATGATACCAAATGCGTTCATCAGTGAGACCAGCTCTTGG
AAGGAAAATGTGATAACTTACAGCTGCAGGTCTGGATATGTCATACAAGGCAGTTCAGATCTGATTTG
TACAGAGAAAGGGGTATGGAGCCAGCCTTATCCAGTCTGTGAGCCCTTGTCCTGTGGGTCCCCACCGT
CTGTCGCCAATGCAGTGGCAACTGGAGAGGCACACACCTATGAAAGTGAAGTGAAACTCAGATGTCTG
GAAGGTTATACGATGGATACAGATACAGATACATTCACCTGTCAGAAAGATGGTCGCTGGTTCCCTGA
GAGAATCTCCTGCAGTCCTAAAAAATGTCCTCTCCCGGAAAACATAACACATATACTTGTACATGGGG
ACGATTTCAGTGTGAATAGGCAAGTTTCTGTGTCATGTGCAGAAGGGTATACCTTTGAGGGAGTTAAC
ATATCAGTATGTCAGCTTGATGGAACCTGGGAGCCACCATTCTCCGATGAATCTTGCAGTCCAGTTTC
TTGTGGGAAACCTGAAAGTCCAGAACATGGATTTGTGGTTGGCAGTAAATACACCTTTGAAAGCACAA
TTATTTATCAGTGTGAGCCTGGCTATGAACTAGAGGGGAACAGGGAACGTGTCTGCCAGGAGAACAGA
CAGTGGAGTGGAGGGGTGGCAATATGCAAAGAGACCAGGTGTGAAACTCCACTTGAATTTCTCAATGG
GAAAGCTGACATTGAAAACAGGACGACTGGACCCAACGTGGTATATTCCTGCAACAGAGGCTACAGTC
TTGAAGGGCCATCTGAGGCACACTGCACAGAAAATGGAACCTGGAGCCACCCAGTCCCTCTCTGCAAA
CCAAATCCATGCCCTGTTCCTTTTGTGATTCCCGAGAATGCTCTGCTGTCTGAAAAGGAGTTTTATGT
TGATCAGAATGTGTCCATCAAATGTAGGGAAGGTTTTCTGCTGCAGGGCCACGGCATCATTACCTGCA
ACCCCGACGAGACGTGGACACAGACAAGCGCCAAATGTGAAAAAATCTCATGTGGTCCACCAGCTCAC
GTAGAAAATGCAATTGCTCGAGGCGTACATTATCAATATGGAGACATGATCACCTACTCATGTTACAG
TGGATACATGTTGGAGGGTTTCCTGAGGAGTGTTTGTTTAGAAAATGGACAATGGACATCACCTCCTA
TTTGCAGAGCTGTCTGTCGATTTCCATGTCAGAATGGGGGCATCTGCCAACGCCCAAATGCTTGTTCC
TGTCCAGAGGGCTGGATGGGGCGCCTCTGTGAAGAACCAATCTGCATTCTTCCCTGTCTGAACGGAGG
TCGCTGTGTGGCCCCTTACCAGTGTGACTGCCCGCCTGGCTGGACGGGGTCTCGCTGTCATACAGCTG
TTTGCCAGTCTCCCTGCTTAAATGGTGGALAATGTGTAAGACCAAACCGATGTCACTGTCTTTCTTCT
TGGACGGGACATAACTGTTCCAGGAAAAGGAGGACTGGGTTTTAACCACTGCACGACCATCTGGCTCT
CCCAAAAGCAGGATCATCTCTCCTCGGTAGTGCCTGGGCATCCTGGAACTTATGCAAAGAAAGTCCAA
CATGGTGCTGGGTCTTGTTTAGTAAACTTGTTACTTGGGGTTACTTTTTTTATTTTGTGATATATTTT
GTTATTCCTTGTGACATACTTTCTTACATGTTTCCATTTTTAAATATGCCTGTATTTTCTATATAAAA
ATTATATTAAATAGATGCTGCTCTACCCTCACAAAATGTACATATTCTGCTGTCTATTGGGAAAGTTC
CTGGTACACATTTTTATTCAGTTACTTAAAATGATTTTTCCATTAAAGTATATTTTGCTACTAAATAA
AAAAAA

| | | |
|---|---|---|
| NOV8l, SNP13374702 of | SEQ ID NO: 200 | MW at 390031.5kD |

| | | | |
|---|---|---|---|
| CG50646-04, Protein Sequence | SNP Pos: 794 | 3570 aa | SNP Change: His to Arg |

MRRICAACWGLALVSGWATFQQMSPSRNFSFRLFPETAPGAPGSIPAPPAPGDEAAGSRVERLGQAFR
VRLLRELSERLELVFLVDDSSSVGEVNFRSELMFVRKLLSDFPVVPTATRVAIVTFSSKNYVVPRVDY
ISTRRARQHKCALLLQEIPAISYRGGGTYTKGAFQQAAQILLHARENSTKVVFLITDGYSNGGDPRPI
AASLRDSGVEIFTFGIWQGNIRELNDMASTPKEEHCYLLHSFEEFEALVALCHMLFVDLPSGSFIQDD
MVHCSYLCDEGKDCCDRMGSCKCGKHTGHFECICEKGYNGKGLQYDCTVCPSGTYKPEGSPGGISSCI
PCPDENHTSPPGSTSPEDCVCREGYPASGQTCEVVHCPALKPPENGYFIQNTCNNHFNAACGVRCHPG
FDLVGSSIILCLPNGLWSGSESYCRVRTCPHLRQPKHGHISCSTREMLYKTTCLVACDEGYRLEGSDK
LTCQGNSQWDGPEPRCVERHCSTFQMPKDVIISPHNCGKQPAKFGTICYVSCRQGFILSGVKEMLRCT
TSGKWNVGVQAAVCKDVEAPQINCPKDIEAKTLEQQDSANVTWQIPTAKDNSGEKVSVHVHPAFTPPY
LFPIGDVAIVYTATDLSGNQASCIFHIKVIDAEPPVIDWCRSPPPVQVSEKVHAASWDEPQFSDNSGA
ELVITRSHTQGDLFPQGETIVQYTATDPSGNNRTCDIHIVIKGSPCEIPFTPVNGDFICTPDNTGVNC
TLTCLEGYDFTEGSTDKYYCAYEDGVWKPTYTTEWPDCASKRFANRGFKSFEMFYKAARCDDTDLMKK
FSEAFETTLGKMVPSFCSDAEDIDCPLEENLTKKYCLEYNYDYENGFAIGPGGWGAANRLDYSYDDFL
DTVQETATSIGNAKSSRIKRSAPLSDYKIKLIFNITASVPLPDERNDTLEWENQQRLLQTLETITNKL
KRTLNKDPMYSFQLASEILIADSNSLETKKASPFCRPGSVLRGRMCVNCPLGTYYNLEHFTCESCRIG
SYQDEEGQLECKLCPSGMYTEYIHSRNISDCKAQCKQGTYSYSGLETCESCPLGTYQPKFGSRSCLSC
TECSSFSSTFSAAEESVVPPASLGHIKKRHEISSQASHECFFNPCHNSGTCQQLGRGYVCLCPLGYTG
LKCETDIDECSPLPCLNNGVCKDLVGEFICECPSGYTGKHCELNINECQSNPCRNQATCVDELNSYSC
KCQPGFSGKRCETGMYQLSVINNLNNAVCEDQVGGFLCKCPPGFLGTRCGKNVDECLSQPCKNGATCK
DGANSFRCLCAAGFTGSHCELNINECQSNPCRNQATCVDELNSYSCKCQPGFSGKRCETEQSTGFNLD
FEVSGIYGYVMLDGMLPSLHALTCTFWMKSSDDMNYGTPISYAVDNGSDNTLLLTDYNGWVLYVNGRE
KITNCPSVNDGRWHHIAITWTSTGGAWRVYINGELSDGGTGLSIGKAIPGGGALVLGQEQDKKGEGFN
PAESFVGSISQLNLWDYVLSPQQVKSLATSCPEELSKGNVLAWPDFLSGIVGKVKIDSKSIFCSDCPR
LGGSVPHLRTASEDLKPGSKVNLFCEPGFQLVGNPVQYCLNQGQWTQPLPHCERIRCGVPPPLENGFH
SADDFYAGSTVTYQCNNGYYLLGDSRMFCTDNGSWNGVSPSCLDVDECAVGSDCSEHASCLNVDGSYI
CSCVPPYTGDGKNCAEPIKCKAPGNPENGHSSGEIYTVGAEVTFSCQEGYQLMGVTKITCLESGEWNH
LIPYCKAVSCGKPAIPENGCIEELAFTFGSKVTYRCNKGYTLAGDKESSCLANSSWSHSPPVCEPVKC
SSPENINNGKYILSGLTYLSTASYSCDTGYSLQGPSIIECTASGIWDRAPPACHLVFCGEPPAIKDAV
ITGNNFTFRNTVTYTCKEGYTLAGLDTIECLADGKWSRSDQQCLAVSCDEPPIVDHASPETAHRLFGD
IAFYYCSDGYSLADNSQLLCNAQGKWVPPEGQDMPRCIAHFCEKPPSVSYSILESVSKAKFAAGSVVS
FKCMEGFVLNTSAKIECMRGGQWNPSPMSIQCIPVRCGEPPSIMNGYASGSNYSFGAMVAYSCNKGFY
IKGEKKSTCEATGQWSSPIPTCHPVSCGEPPKVENGFLEHTTGRIFESEVRYQCNPGYKSVGSPVFVC
QANRHWHSESPLMCVPLDCGKPPPIQNGFMKGENFEVGSKVQFFCNEGYELVGDSSWTCQKSGKWNKK
SNPKCMPAKCPEPPLLENQLVLKELTTEVGVVTFSCKEGHVLQGPSVLKCLPSQQWNDSFPVCKIVLC
TPPPLISFGVPIPSSALHFGSTVKYSCVGGFFLRGNSTTLCQPDGTWSSPLPECVPVECPQPEEIPNG
IIDVQGLAYLSTALYTCKPGFELVGNTTTLCGENGHWLGGKPTCKAIECLKPKEILNGKFSYTDLHYG
QTVTYSCNRGFRLEGPSALTCLETGDWDVDAPSCNAIHCDSPQPIENGFVEGADYSYGAIIIYSCFPG
FQVAGHAMQTCEESGWSSSIPTCMPIDCGLPPHIDFGDCTKLKDDQGYFEQEDDNMEVPYVTPHPPYH
LGAVAKTWENTKESPATHSSNFLYGTMVSYTCNPGYELLGNPVLICQEDGTWNGSAPSCISIECDLPT
APENGFLRFTETSMGSAVQYSCKPGHILAGSDLRLCLENRKWSGASPRCEAISCKKPNPVMNGSIKGS
NYTYLSTLYYECDPGYVLNGTERRTCQDDKNWDEDEPICIPVDCSSPPVSANGQVRGDEYTFQKEIEY
TCNEGFLLEGARSRVCLANGSWSGATPDCVPVRCATPPQLANGVTEGLDYGFMKEVTFHCHEGYILHG
APKLTCQSDGNWDAEIPLCKPVNCGPPEDLAHGFPNGFSFIHGGHIQYQCFPGYKLHGNSSRRCLSNG
SWSGSSPSCLPCRCSTPVIEYGTVNGTDFDCGKAARIQCFKGFKLLGLSEITCEADGQWSSGFPHCEH
TSCGSLPMIPNAFISETSSWKENVITYSCRSGYVIQGSSDLICTEKGVWSQPYPVCEPLSCGSPPSVA
NAVATGEAHTYESEVKLRCLEGYTMDTDTDTFTCQKDGRWFPERISCSPKKCPLPENITHILVHGDDF
SVNRQVSVSCAEGYTFEGVNISVCQLDGTWEPPFSDESCSPVSCGKFESPEHGFVVGSKYTFESTIIY
QCEPGYELEGNRERVCQENRQWSGGVAICKETRCETPLEFLNGKADIENRTTGPNVVYSCNRGYSLEG
PSEAHCTENGTWSHPVPLCKPNPCPVPFVIPENALLSEKEFYVDQNVSIKCREGFLLQGHGIITCNPD
ETWTQTSAKCEKISCGPPAHVENAIARGVHYGYGDMITYSCYSGYMLEGFLRSVCLENGTWTSPPICR
AVCRFPCQNGGICQRPNACSCPEGWMGRLCEEPICILPCLNGGRCVAPYQCDCPPGWTGSRCHTAVCQ
SPCLNGGKCVRPNRCHCLSSWTGHNCSRKRRTGF

| | |
|---|---|
| SEQ ID NO: 201 | 11158 bp |

| | | |
|---|---|---|
| NOV8m, SNP13374257 of | ORF Start: ATG at 77 | ORF Stop: TAA at 10787 |

| | | |
|---|---|---|
| CG50646-04, DNA Sequence | SNP Pos: 7217 | SNP Change: A to G |

CAATTGGTCTAGGGTCTCCCCCATTGGAATATCCATCAGTGATGAGAAATACAACGTTTGTTGAGTTT
TCTCTAGCATGAGAAGAATTTGCGCGGCTTGCTGGGGTCTGGCGCTCGTTTCGGGCTGGGCGACCTTT
CAGCAGATGTCCCCGTCGCGCAATTTCAGCTTCCGCCTCTTCCCCGAGACCGCGCCCGGGGCCCCCGG
GAGTATCCCCGCGCCGCCCGCTCCTGGCGACGAAGCGGCGGGGAGCAGAGTGGAGCGGCTGGGCCAGG
CGTTCCGCGTGCGGCTGCTGCGGGAGCTCAGCGAGCGCCTGGAGCTTGTCTTCCTGGTGGATGATTCG
TCCAGCGTGGGCGAAGTCAACTTCCGCAGCGAGCTCATGTTCGTCCGCAAGCTGCTGTCCGACTTCCC
CGTGGTGCCCACGGCCACGCGCGTGGCCATCGTGACCTTCTCGTCCAAGAACTACGTGGTGCCGCGCG
TCGATTACATCTCCACCCGCCGCGCGCGCCAGCACAAGTGCGCGCTGCTCCTCCAAGAGATCCCTGCC
ATCTCCTACCGAGGTGGCGGCACCTACACCAAGGGCGCCTTCCAGCAAGCCGCGCAAATTCTTCTTCA
TGCTAGAGAAAACTCAACAAAAGTTGTATTTCTCATCACTGATGGATATTCCAATGGGGGAGACCCTA
GACCAATTGCAGCGTCACTGCGAGATTCAGGAGTGGAGATCTTCACTTTTGGCATATGGCAAGGGAAC
ATTCGAGAGCTGAATGACATGGCTTCCACCCCAAAGGAGGAGCACTGTTACCTGCTACACAGTTTTGA
AGAATTTGAGGCTTTAGTCGCCCTCTGTCATATGTTATTTGTAGATCTACCTTCTGGGAGTTTTATTC
AAGATGATATGGTCCACTGCTCATATCTTTGTGATGAAGGCAAGGACTGCTGTGACCGAATGGGAAGC
TGCAAATGTGGGAAACACACAGGCCATTTTGAGTGCATCTGTGAAAAGGGGTATAACGGGAAAGGTCT
GCAGTATGACTGCACAGTTTGCCCATCGGGGACATACAAACCTGAAGGCTCACCAGGAGGAATCAGCA
GTTGCATTCCATGTCCTGATGAAAATCACACCTCTCCACCTGGAAGCACATCCCCTGAAGACTGTGTC
TGCAGAGAGGGATACAGGGCATCTGGCCAGACCTGTGAAGTTGTCCACTGCCCTGCCCTGAAGCCTCC
CGAAAATGGTTACTTTATCCAAAACACTTGCAACAACCACTTCAATGCAGCCTGTGGGGTCCGATGTC
ACCCTGGATTTGATCTTGTGGGAAGCAGCATCATCTTATGTCTACCCAATGGTTTGTGGTCCGGTTCA
GAGAGCTACTGCAGAGTAAGAACATGTCCTCATCTCCGCCAGCCGAAACATGGCCACATCAGCTGTTC
TACAAGGGAAATGTTATATAAGACAACATGTTTGGTTGCCTGTGATGAAGGGTACAGGCTAGAAGGCA
GTGATAAGCTTACTTGTCAAGGAAACAGCCAGTGGGATGGGCCAGAACCCCGGTGTGTGGAGCGCCAC
TGTTCCACCTTTCAGATGCCCAAAGATGTCATCATATCCCCCCACAACTGTGGCAAGCAGCCAGCCAA
ATTTGGGACGATCTGCTATGTAAGTTGCCGCCAAGGGTTCATTTTATCTGGAGTCAAAGAAATGCTGA
GATGTACCACTTCTGGAAAATGGAATGTCGGAGTTCAGGCAGCTGTGTGTAAAGACGTGGAGGCTCCT
CAAATCAACTGTCCTAAGGACATAGAGGCTAAGACTCTGGAACAGCAAGATTCTGCCAATGTTACCTG
GCAGATTCCAACAGCTAAAGACAACTCTGGTGAAAAGGTGTCAGTCCACGTTCATCCAGCTTTCACCC
CACCTTACCTTTTCCCAATTGGAGATGTTGCTATCGTATACACGGCAACTGACCTATCCGGCAACCAG
GCCAGCTGCATTTTCCATATCAAGGTTATTGATGCAGAACCACCTGTCATAGACTGGTGCAGATCTCC
ACCTCCCGTCCAGGTCTCGGAGAAGGTACATGCCGCAAGCTGGGATGAGCCTCAGTTCTCAGACAACT
CAGGTGCTGAATTGGTCATTACCAGAAGTCATACACAAGGAGACCTTTTCCCTCAAGGGGAGACTATA
GTACAGTATACAGCCACTGACCCCTCAGGCAATAACAGGACATGTGATATCCATATTGTCATAAAAGG
TTCTCCCTGTGAAATTCCATTCACACCTGTAAATGGGGATTTTATATGCACTCCAGATAATACTGGAG
TCAACTGTACATTAACTTGCTTGGAGGGCTATGATTTCACAGAAGGGTCTACTGACAAGTATTATTGT
GCTTATGAAGATGGCGTCTGGAAACCAACATATACCACTGAATGGCCAGACTGTGCCAGTAAGCGTTT
TGCAAACCACGGGTTCAAGTCCTTTGAGATGTTCTACAAAGCAGCTCGTTGTGATGACACAGATCTGA
TGAAGAAGTTTTCTGAAGCATTTGAGACGACCCTGGGAAAAATGGTCCCATCATTTTGTAGTGATGCA
GAGGACATTGACTGCAGACTGGAGGAGAACCTGACCAAAAAATATTGCCTAGAATATAATTATGACTA
TGAAAATGGCTTTGCAATTGGTCCAGGTGGCTGGGGTGCAGCTAATAGGCTGGATTACTCTTACGATG
ACTTCCTGGACACTGTGCAAGAAACAGCCACAAGCATCGGCAATGCCAAGTCCTCACGGATTAAAAGA
AGTGCCCCATTATCTGACTATAAAATTAAGTTAATTTTTAACATCACAGCTAGTGTGCCATTACCCGA
TGAAAGAAATGATACCCTTGAATGGGAAAATCAGCAACGACTCCTTCAGACATTGGAAACTATCACAA
ATAAACTGAAAAGGACTCTCAACAAAGACCCCATGTATTCCTTTCAGCTTGCATCAGAAATACTTATA
GCCGACAGCAATTCATTAGAAACAAAAAAGGCTTCCCCCTTCTGCAGACCAGGCTCAGTGCTGAGAGG
GCGTATGTGTGTCAATTGCCCTTTGGGAACCTATTATAATCTGGAACATTTCACCTGTGAAAGCTGCC
GGATCGGATCCTATCAAGATGAAGAAGGGCAACTTGAGTGCAAGCTTTGCCCCTCTGGGATGTACACG
GAATATATCCATTCAAGAAACATCTCTGATTGTAAAGCTCAGTGTAAACAAGGCACCTACTCATACAG
TGGACTTGAGACTTGTGAATCGTGTCCACTGGGCACTTATCAGCCAAAATTTGGTTCCCGGAGCTGCC
TCTCGTGTCCAGAAAACACCTCAACTGTGAAAAGAGGAGCCGTGAACATTTCTGCATGTGGAGTTCCT
TGTCCAGAAGGAAAATTCTCGCGTTCTGGGTTAATGCCCTGTCACCCATGTCCTCGTGACTATTACCA
ACCTAATGCAGGGAAGGCCTTCTGCCTGGCCTGTCCCTTTTATGGAACTACCCCATTCGCTGGTTCCA
GATCCATCACAGAATGTTCAAGTTTTAGTTCAACTTTCTCAGCGGCAGAGGAAAGTGTGGTGCCCCCT
GCCTCTCTTGGACATATTAAAAAGAGGCATGAAATCAGCAGTCAGGCAAGTCATGAATGCTTCTTTAA
CCCTTGCCACAATAGTGGAACCTGCCAGCAACTTGGGCGTGGTTATGTTTGTCTCTGTCCACTTGGAT
ATACAGGTTTAAAGTGTGAAACAGACATCGATGAGTGCAGCCCACTGCCTTGCCTCAACAATGGAGTT
TGTAAAGACCTAGTTGGGGAATTCATTTGTGAGTGCCCATCAGGTTACACAGGTAAGCACTGTGAATT
GAACATCAATGAATGTCAGTCTAATCCATGTAGAAATCAGGCCACCTGTGTGGATGAATTAAATTCAT
ACAGTTGTAAATGTCAGCCAGGATTTTCAGGCAAAGGTGTGAAAACAGGTATGTATCAACTCAGTGTT
ATTAATAACCTTAATAATGCAGTCTGTGAAGACCAGGTTGGGGGATTCTTGTGCAAATGCCCACCTGG
ATTTTTGGGTACCCGATGTGGAAAGAACGTCGATGAGTGTCTCAGTCAGCCATGCAAAAATGGAGCTA
CCTGTAAAGACGGTGCCAATAGCTTCAGGTGCCTGTGTGCAGCTGGCTTCACAGGATCACACTGTGAA
TTGAACATCAATGAATGTCAGTCTAATCCATGTAGAAATCAGGCCACCTGTGTGGATGAATTAAATTC
ATACAGTTGTAAATGTCAGCCAGGATTTTCAGGCAAAAGGTGTGAAACAGAACAGTCTACAGGCTTTA
ACCTGGATTTTGAAGTTTCTGGCATCTATGGATATGTCATGCTAGATGGCATGCTCCCATCTCTCCAT
GCTCTAACCTGTACCTTCTGGATGAAATCCTCTGACGACATGAACTATGGAACACCAATCTCCTATGC
AGTTGATAACGGCAGCGACAATACCTTGCTCCTGACTGATTATAACGGGTGGGTTCTTTATGTGAATG
GCAGGGAAAAGATAACAAACTGTCCCTCGGTGAATGATGGCAGATGGCATCATATTGCAATCACTTGG
ACAAGTACTGGTGGAGCCTGGAGGGTCTATATAAATGGGGAATTATCTGACGGTGGTACTGGCCTCTC
CATTGGCAAAGCCATACCTGGTGGCGGTGCATTAGTTCTTGGGCAAGAGCAAGACAAAAAAGGAGAGG
GGTTCAACCCGGCTGAGTCTTTTGTGGGCTCCATAAGCCAGCTCAACCTCTGGGACTATGTCCTGTCT
CCACAGCAGGTGAAGTCACTGGCTACCTCCTGCCCAGAGGAACTCAGTAAAGGAAACGTGTTAGCATG
GCCTGATTTCTTGTCAGGAATTGTGGGGAAAGTGAAGATCGATTCTAAGAGCATATTTTGTTCTGATT
GCCCACGCTTGGGAGGGTCAGTGCCTCATCTGAGAACTGCATCTGAAGATTTAAAACCAGGTTCCAAA
GTCAATCTGTTCTGTGAACCAGGCTTCCAGCTGGTCGGGAACCCTGTGCAGTACTGTCTGAATCAAGG
ACAGTGGACACAACCACTCCCCCACTGTGAACGCATTCGCTGTGGGGTGCCACCTCCTTTGGAGAATG
GCTTCCATTCAGCCGATGACTTCTATGCTGGCAGCACAGTAACCTACCAGTGCAACAATGGCTACTAT
CTATTGGGTGACTCAAGGATGTTCTGTACAGATAATGGGAGCTGGAACGGCGTTTCACCATCCTGCTT
AGATGTCGATGAGTGTGCAGTTGGATCAGATTGTAGTGAGCATGCTTCTTGCCTGAACGTAGATGGAT
CCTACATATGTTCATGTGTCCCACCGTACACAGGAGATGGGAAAAACTGTGCAGAACCTATAAAATGT
AAGGCTCCAGGAAATCCGGAAAATGGCCACTCCTCAGGTGAGATTTATACAGTAGGTGCCGAAGTCAC
ATTTTCGTGTCAGGAAGGATACCAGTTGATGGGAGTAACCAAAATCACATGTTTGGAGTCTGGAGAAT
GGAATCATCTAATACCATATTGTAAAGCTGTTTCATGTGGTAAACCGGCTATTCCAGAAAATGGTTGC
ATTGAGGAGTTAGCATTTACTTTTGGCAGCAAAGTGACATATAGGTGTAATAAAGGATATACTCTGGC
CGGTGATAAAGAATCATCCTGTCTTGCTAACAGTTCTTGGAGTCATTCCCCTCCTGTGTGTGAACCAG
TGAAGTGTTCTAGTCCGGAAAATATAAATAATGGAAAATATATTTTGAGTGGGCTTACCTACCTTTCT
ACTGCATCATATTCATGCGATACAGGATACAGCTTACAGGGCCCTTCCATTATTGAATGCACGGCTTC
TGGCATCTGGGACAGAGCGCCACCTGCCTGTCACCTCGTCTTCTGTGGAGAACCACCTGCCATCAAAG
ATGCTGTCATTACGGGGAATAACTTCACTTTCAGGAACACCGTCACTTACACTTGCAAAGAAGGCTAT
ACTCTTGCTGGTCTTGACACCATTGAATGCCTGGCCGACGGCAAGTGGAGTAGAAGTGACCAGCAGTG
CCTGGCTGTCTCCTGTGATGAGCCACCCATTGTGGACCACGCCTCTCCAGAGACTGCCCATCGGCTCT
TTGGAGACATTGCATTCTACTACTGCTCTGATGGTTACAGCCTAGCAGACAATTCCCAGCTTCTCTGC
AATGCCCAGGGCAAGTGGGTACCCCCAGAAGGTCAAGACATGCCCCGTTGTATAGCTCATTTCTGTGA
AAAACCTCCATCGGTTTCCTATAGCATCTTGGAATCTGTGAGCAAAGCAAAATTTGCAGCTGGCTCAG
TTGTGAGCTTTAAATGCATGGAAGGCTTTGTACTGAACACCTCAGCAAAGATTGAATGTATGAGAGGT
GGGCAGTGGAACCCTTCCCCCATGTCCATCCAGTGCATCCCTGTGCGGTGTGGAGAGCCACCAAGCAT
CATGAATGGCTATGCAAGTGGATCAAACTACAGTTTTGGAGCCATGGTGGCTTACAGCTGCAACAAGG
GGTTCTACATCAAAGGGGAAAAGAAGAGCACCTGCGAAGCCACAGGGCAGTGGAGTAGTCCTATACCG
ACGTGCCACCCGGTATCTTGTGGTGAACCACCTAAGGTTGAGAATGGCTTTCTGGAGCATACAACTGG
CAGGATCTTTGAGAGTGAAGTGAGGTATCAGTGTAACCCGGGCTATAAGTCAGTCGGAAGTCCTGTAT
TTGTCTGCCAAGCCAATCGCCACTGGCACAGTGAATCCCCTCTGATGTGTGTTCCTCTCGACTGTGGA
AAACCTCCCCCGATCCAGAATGGCTTCATGAAAGGAGAAAACTTTGAAGTAGGGTCCAAGGTTCAGTT
TTTCTGTAATGAGGGTTATGAGCTTGTTGGTGACAGTTCTTGGACATGTCAGAAATCTGGCAAATGGA
ATAAGAAGTCAAATCCAAAGTGCATGCCTGCCAAGTGCCCAGAGCCGCCCCTCTTGGAAAACCAGCTA
GTATTAAAGGAGTTGACCACCGAGGTAGGAGTTGTGACATTTTCCTGTAAAGAAGGGCATGTCCTGCA
AGGCCCCTCTGTCCTGAAATGCTTGCCATCCCAGCAATGGAATGACTCTTTCCCTGTTTGTAAGATTG
TTCTTTGTGCCCCACCTCCCCTAATTTCCTTTGGTGTCCCCATTCCTTCTTCTGCTCTTCATTTTGGA
AGTACTGTCAAGTATTCTTGTGTAGGTGGGTTTTTCCTAAGAGGAAATTCTACCACCCTCTGCCAACC
TGATGGCACCTGGAGCTCTCCACTGCCAGAATGTGTTCCAGTAGAATGTCCCCAACCTGAGGAAATCC
CCAATGGAATCATTGATGTGCAAGGCCTTGCCTATCTCAGCACAGCTCTCTATACCTGCAAGCCAGGC
TTTGAATTGGTGGGAAATACTACCACCCTTTGTGGAGAAAATGGTCACTGGCTTGGAGGAAAACCAAC
ATGTAAAGCCATTGAGTGCCTGAAACCCAAGGAGATTTTGAATGGCAAATTCTCTTACACGGACCTAC
ACTATGGACAGACCGTTACCTACTCTTGCAACCGAGGCTTTCGGCTCGAAGGTCCCAGTGCCTTGACC
TGTTTAGAGACAGGTGATTGGGATGTAGATGCCCCATCTTGCAATGCCATCCACTGTGATTCCCCACA
ACCCATTGAAAATGGTTTTGTAGAAGGTGCAGATTACAGCTATGGTGCCATAATCATCTACAGTTGCT
TCCCTGGGTTTCAGGTGGCTGGTCATGCCATGCAGACCTGTGAAGAGTCAGGATGGTCAAGTTCCATC
CCAACATGTATGCCAATAGACTGTGGCCTCCCTCCTCATATAGATTTTGGAGACTGTACTAAACTCAA
AGATGACCAGGGATATTTTGAGCAAGAAGACGACATGATGGAAGTTCCATATGTGACTCCTCACCCTC
CTTATCATTTGGGAGCAGTGGCTAAAACCTGGGAAAATACAAAGGAGTCTCCTGCTACACATTCATCA
AACTTTCTGTATGGTACCATGGTTTCATACACCTGTAATCCAGGATATGAACTTCTGGGGAACCCTGT
GCTGATCTGCCAGGAAGATGGAACTTGGAATGGCAGTGCACCATCCTGCATTTCAATTGAATGTGACT
AGCTGTAAACCTGGACACATTCTAGCAGGCTCTGACTTAAGGCTTTGTCTAGAGAATAGAAAGTGGAG
TGGTGCCTCCCCACGCTGTGAAGCCATTTCATGCAAAAAGCCAAATCCAGTCATGAATGGATCCATCA
AAGGAAGCAACTACACATACCTGAGCACGTTGTACTATGAGTGTGACCCCGGATATGTGCTGAATGGC
ACTGAGAGGAGAACATGCCAGGATGACAAAAACTGGGATGAGGATGAGCCCATTTGCATTCCTGTGGA
CTGCAGTTCACCCCCAGTCTCAGCCAATGGCCAGGTGAGAGGAGACGAGTACACATTCCAAAAAGAGA
TTGAATACACTTGCAATGAAGGGTTCTTGCTTGAGGGAGCCAGGAGTCGGGTTTGTCTTGCCAATGGA
AGTTGGAGTGGAGCCACTCCCGACTGTGTGCCTGTCAGATGTGCCACCCCGCCACAACTGGCCAATGG
GGTGACGGAAGGCCTGGACTATGGCTTCATGAAGGAAGTAACATTCCACTGTCACGAGGGCTACATCT
TGCACGGTGCTCCAAAACTCACCTGTCAGTCAGATGGCAACTGGGATGCAGAGATTCCTCTCTGTAAA
CCAGTCAACTGTGGACCTCCTGAAGATCTTGCCCATGGTTTCCCTAATGGTTTTTCCTTTATTCATGG
GGGCCATATACAGTATCAGTGCTTTCCTGGTTATAAGCTCCATGGAAATTCATCAAGAAGGTGCCTCT
CCAATGGCTCCTGGAGTGGCAGCTCACCTTCCTGCCTGCCTTGCAGATGTTCCACACCAGTAATTGAA
TATGGAACTGTCAATGGGACAGATTTTGACTGTGGAAAGGCAGCCCGGATTCAGTGCTTCAAAGGCTT
CAAGCTCCTAGGACTTTCTGAAATCACCTGTGAAGCCGATGGCCAGTGGAGCTCTGGGTTCCCCCACT
GTGAACACACTTCTTGTGGTTCTCTTCCAATGATACCAAATGCGTTCATCAGTGAGACCAGCTCTTGG
AAGGAAAATGTGATAACTTACAGCTGCAGGTCTGGATATGTCATACAAGGCAGTTCAGATCTGATTTG
TACAGAGAAAGGGGTATGGAGCCAGCCTTATCCAGTCTGTGAGCCCTTGTCCTGTGGGTCCCCACCGT
CTGTCGCCAATGCAGTGGCAACTGGAGAGGCACACACCTATGAAAGTGAAGTGAAACTCAGATGTCTG
GAAGGTTATACGATGGATACAGATACAGATACATTCACCTGTCAGAAAGATGGTCGCTGGTTCCCTGA
GAGAATCTCCTGCAGTCCTAAAAAATGTCCTCTCCCGGAAAACATAACACATATACTTGTACATGGGG
ACGATTTCAGTGTGAATAGGCAAGTTTCTGTGTCATGTGCAGAAGGGTATACCTTTGAGGGAGTTAAC
ATATCAGTATGTCAGCTTGATGGAACCTGGGAGCCACCATTCTCCGATGAATCTTGCAGTCCAGTTTC
TTGTGGGAAACCTGAAAGTCCAGAAACATGGATTTGTGGTTGGCAGTAAATACACCTTTGAAAGCACA
TTATTTATCAGTGTGAGCCTGGCTATGAACTAGAGGGGAACAGGGAACGTGTCTGCCAGGAGAACAGA
CAGTGGAGTGGAGGGGTGGCAATATGCAAAGAGACCAGGTGTGAAACTCCACTTGAATTTCTCAATGG
GAAAGCTGACATTGAAAACAGGACGACTGGACCCAACGTGGTATATTCCTGCAACAGAGGCTACAGTC
TTGAAGGGCCATCTGAGGCACACTGCACAGAAAATGGAACCTGGAGCCACCCAGTCCCTCTCTGCAAA
CCAAATCCATGCCCTGTTCCTTTTGTGATTCCCGAGAATGCTCTGCTGTCTGAAAAGGAGTTTTATGT
TGATCAGAATGTGTCCATCAAATGTAGGGAAGGTTTTCTGCTGCAGGGCCACGGCATCATTACCTGCA
ACCCCGACGAGACGTGGACACAGACAAGCGCCAAATGTGAAAAAATCTCATGTGGTCCACCAGCTCAC
GTAGAAAATGCAATTGCTCGAGGCGTACATTATCAATATGGAGACATGATCACCTACTCATGTTACAG
TGGATACATGTTGGAGGGTTTCCTGAGGAGTGTTTGTTTAGAAAATGGAACATGGACATCACCTCCTA
TTTGCAGAGCTGTCTGTCGATTTCCATGTCAGAATGGGGGCATCTGCCAACGCCCAAATGCTTGTTCC
TGTCCAGAGGGCTGGATGGGGCGCCTCTGTGAAGAACCAATCTGCATTCTTCCCTGTCTGAACGGAGG
TCGCTGTGTGGCCCCTTACCAGTGTGACTGCCCGCCTGGCTGGACGGGGTCTCGCTGTCATACAGCTG
TTTGCCAGTCTCCCTGCTTAAATGGTGGAAAATGTGTAAGACCAAACCGATGTCACTGTCTTTCTTCT
TGGACGGGACATAACTGTTCCAGGAAAAGGAGGACTGGGTTTTAACCACTGCACGACCATCTGGCTCT
CCCAAAAGCAGGATCATCTCTCCTCGGTAGTGCCTGGGCATCCTGGAACTTATGCAAAGAAAGTCCAA
CATGGTGCTGGGTCTTGTTTAGTAAACTTGTTACTTGGGGTTACTTTTTTTATTTTGTGATATATTTT
GTTATTCCTTGTGACATACTTTCTTACATGTTTCCATTTTTAAATATGCCTGTATTTTCTATATAAAA
ATTATATTAAATAGATGCTGCTCTACCCTCACAAAATGTACATATTCTGCTGTCTATTGGGAAAGTTC
CTGGTACACATTTTTATTCAGTTACTTAAAATGATTTTTCCATTAAAGTATATTTTGCTACTAAATAA
AAAAAA

| | | |
|---|---|---|
| NOV8m, SNP13374257 of | SEQ ID NO: 202 | MW at 389982.5kD |

| | | | |
|---|---|---|---|
| CG50646-04, Protein Sequence | SNP Pos: 2381 | 3570 aa | SNP Change: Thr to Ala |

MRRICAACWGLALVSGWATFQQMSPSRNFSFRLFPETAPGAPGSIPAPPAPGDEAAGSRVERLGQAFR
VRLLRELSERLELVFLVDDSSSVGEVNFRSELMFVRKLLSDFPVVPTATRVAIVTFSSKNYVVPRVDY
ISTRRARQHKCALLLQEIPAISYRGGGTYTKGAFQQAAQILLHARENSTKVVFLITDGYSNGGDPRPI
AASLRDSGVEIFTFGIWQGNIRELNDMASTPKEEHCYLLHSFEEFEALVALCHMLFVDLPSGSFIQDD
MVHCSYLCDEGKDCCDRMGSCKCGKHTGHFECICEKGYNGKGLQYDCTVCPSGTYKPEGSPGGISSCI
PCPDENHTSPPGSTSPEDCVCREGYPASGQTCEVVHCPALKPPENGYFIQNTCNNHFNAACGVRCHPG
FDLVGSSIILCLPNGLWSGSESYCRVRTCPHLRQPKHGHISCSTREMLYKTTCLVACDEGYRLEGSDK
LTCQGNSQWDGPEPRCVERHCSTFQMPKDVIISPHNCGKQPAKFGTICYVSCRQGFILSGVKEMLRCT
TSGKWNVGVQAAVCKDVEAPQINCPKDIEAKTLEQQDSANVTWQIPTAKDNSGEKVSVHVHPAFTPPY
LFPIGDVAIVYTATDLSGNQASCIFHIKVIDAEPPVIDWCRSPPPVQVSEKVHAASWDEPQFSDNSGA
ELVITRSHTQGDLFPQGETIVQYTATDPSGNNRTCDIHIVIKGSPCEIPFTPVNGDFICTPDNTGVNC
TLTCLEGYDFTEGSTDKYYCAYEDGVWKPTYTTEWPDCASKRFANRGFKSFEMFYKAARCDDTDLMKK
FSEAFETTLGKMVPSFCSDAEDIDCPLEENLTKKYCLEYNYDYENGFAIGPGGWGAANRLDYSYDDFL
DTVQETATSIGNAKSSRIKRSAPLSDYKIKLIFNITASVPLPDERNDTLEWENQQRLLQTLETITNKL
KRTLNKDPMYSFQLASEILIADSNSLETKKASPFCRPGSVLRGRMCVNCPLGTYYNLEHFTCESCRIG
SYQDEEGQLECKLCPSGMYTEYIHSRNISDCKAQCKQGTYSYSGLETCESCPLGTYQPKFGSRSCLSC
TECSSFSSTFSAAEESVVPPASLGHIKKRHEISSQASHECFFNPCHNSGTCQQLGRGYVCLCPLGYTG
LKCETDIDECSPLPCLNNGVCKDLVGEFICECPSGYTGKHCELNINECQSNPCRNQATCVDELNSYSC
KCQPGFSGKRCETGMYQLSVINNLNNAVCEDQVGGFLCKCPPGFLGTRCGKNVDECLSQPCKNGATCK
DGANSFRCLCAAGFTGSHCELNINECQSNPCRNQATCVDELNSYSCKCQPGFSGKRCETEQSTGFNLD
FEVSGIYGYVMLDGMLPSLHALTCTFWMKSSDDMNYGTPISYAVDNGSDNTLLLTDYNGWVLYVNGRE
KITNCPSVNDGRWHHIAITWTSTGGAWRVYINGELSDGGTGLSIGKAIPGGGALVLGQEQDKKGEGFN
PAESFVGSISQLNLWDYVLSPQQVKSLATSCPEELSKGNVLAWPDFLSGIVGKVKIDSKSIFCSDCPR
LGGSVPHLRTASEDLKPGSKVNLFCEPGFQLVGNPVQYCLNQGQWTQPLPHCERIRCGVPPPLENGFH
SADDFYAGSTVTYQCNNGYYLLGDSRMFCTDNGSWNGVSPSCLDVDECAVGSDCSEHASCLNVDGSYI
CSCVPPYTGDGKNCAEPIKCKAPGNPENGHSSGEIYTVGAEVTFSCQEGYQLMGVTKITCLESGEWNH
LIPYCKAVSCGKPAIPENGCIEELAFTFGSKVTYRCNKGYTLAGDKESSCLANSSWSHSPPVCEPVKC
SSPENINNGKYILSGLTYLSTASYSCDTGYSLQGPSIIECTASGIWDRAPPACHLVFCGEPPAIKDAV
ITGNNFTFRNTVTYTCKEGYTLAGLDTIECLADGKWSRSDQQCLAVSCDEPPIVDHASPETAHRLFGD
IAFYYCSDGYSLADNSQLLCNAQGKWVPPEGQDMPRCIAHFCEKPPSVSYSILESVSKAKFAAGSVVS
FKCMEGFVLNTSAKIECMRGGQWNPSPMSIQCIPVRCGEPPSIMNGYASGSNYSFGAMVAYSCNKGFY
IKGEKKSTCEATGQWSSPIPTCHPVSCGEPPKVENGFLEHTTGRIFESEVRYQCNPGYKSVGSPVFVC
QANRHWHSESPLMCVPLDCGKPPPIQNGFMKGENFEVGSKVQFFCNEGYELVGDSSWTCQKSGKWNKK
SNPKCMPAKCPEPPLLENQLVLKELTTEVGVVTFSCKEGHVLQGPSVLKCLPSQQWNDSFPVCKIVLC
APPPLISFGVPIPSSALHFGSTVKYSCVGGFFLRGNSTTLCQPDGTWSSPLPECVPVECPQPEEIPNG
IIDVQGLAYLSTALYTCKPGFELVGNTTTLCGENGHWLGGKPTCKAIECLKPKEILNGKFSYTDLHYG
QTVTYSCNRGFRLEGPSALTCLETGDWDVDAPSCNAIHCDSPQPIENGFVEGADYSYGAIIIYSCFPG
FQVAGHAMQTCEESGWSSSIPTCMPIDCGLPPHIDFGDCTKLKDDQGYFEQEDDNMEVPYVTPHPPYH
LGAVAKTWENTKESPATHSSNFLYGTMVSYTCNPGYELLGNPVLICQEDGTWNGSAPSCISIECDLPT
APENGFLRFTETSMGSAVQYSCKPGHILAGSDLRLCLENRKWSGASPRCEAISCKKPNPVMNGSIKGS
NYTYLSTLYYECDPGYVLNGTERRTCQDDKNWDEDEPICIPVDCSSPPVSANGQVRGDEYTFQKEIEY
TCNEGFLLEGARSRVCLANGSWSGATPDCVPVRCATPPQLANGVTEGLDYGFMKEVTFHCHEGYILHG
APKLTCQSDGNWDAEIPLCKPVNCGPPEDLAHGFPNGFSFIHGGHIQYQCFPGYKLHGNSSRRCLSNG
SWSGSSPSCLPCRCSTPVIEYGTVNGTDFDCGKAARIQCFKGFKLLGLSEITCEADGQWSSGFPHCEH
TSCGSLPMIPNAFISETSSWKENVITYSCRSGYVIQGSSDLICTEKGVWSQPYPVCEPLSCGSPPSVA
NAVATGEAHTYESEVKLRCLEGYTMDTDTDTFTCQKDGRWFPERISCSPKKCPLPENITHILVHGDDF
SVNRQVSVSCAEGYTFEGVNISVCQLDGTWEPPFSDESCSPVSCGKFESPEHGFVVGSKYTFESTIIY
QCEPGYELEGNRERVCQENRQWSGGVAICKETRCETPLEFLNGKADIENRTTGPNVVYSCNRGYSLEG
PSEAHCTENGTWSHPVPLCKPNPCPVPFVIPENALLSEKEFYVDQNVSIKCREGFLLQGHGIITCNPD
ETWTQTSAKCEKISCGPPAHVENAIARGVHYGYGDMITYSCYSGYMLEGFLRSVCLENGTWTSPPICR
AVCRFPCQNGGICQRPNACSCPEGWMGRLCEEPICILPCLNGGRCVAPYQCDCPPGWTGSRCHTAVCQ
SPCLNGGKCVRPNRCHCLSSWTGHNCSRKRRTGF

| | |
|---|---|
| SEQ ID NO: 203 | 11158 bp |

| | | |
|---|---|---|
| NOV8n, SNP13382479 of | ORF Start: ATG at 77 | ORF Stop: TAA at 10787 |

| | | |
|---|---|---|
| CG50646-04, DNA Sequence | SNP Pos: 9649 | SNP Change: A to T |

CAATTGGTCTAGGGTCTCCCCCATTGGAATATCCATCAGTGATGAGAAATACAACGTTTGTTGAGTTT
TCTCTAGCATGAGAAGAATTTGCGCGGCTTGCTGGGGTCTGGCGCTCGTTTCGGGCTGGGCGACCTTT
CAGCAGATGTCCCCGTCGCGCAATTTCAGCTTCCGCCTCTTCCCCGAGACCCCGCCCGGGGCCCCCCG
CGTTCCGCGTGCGGCTGCTGCGGGAGCTCAGCGAGCGCCTGGAGCTTGTCTTCCTGGTGGATGATTCG
TCCAGCGTGGGCGAAGTCAACTTCCGCAGCGAGCTCATGTTCGTCCGCAAGCTGCTGTCCGACTTCCC
TCGATTACATCTCCACCCGCCGCGCGCGCCAGCACAAGTGCGCGCTGCTCCTCCAAGAGATCCCTGCC
ATCTCCTACCGAGGTGGCGGCACCTACACCAAGGGCGCCTTCCAGCAAGCCGCGCAAATTCTTCTTCA
TGCTAGAGAAAACTCAACAAAAGTTGTATTTCTCATCACTGATGGATATTCCAATGGGGGAGACCCTA
GACCAATTGCAGCGTCACTGCGAGATTCAGGAGTGGAGATCTTCACTTTTGGCATATGGCAAGGGAAC
ATTCGAGAGCTGAATGACATGGCTTCCACCCCAAAGGAGGAGCACTGTTACCTGCTACACAGTTTTGA
AGAATTTGAGGCTTTAGTCGCCCTCTGTCATATGTTATTTGTAGATCTACCTTCTGGGAGTTTTATTC
AAGATGATATGGTCCACTGCTCATATCTTTGTGATGAAGGCAAGGACTGCTGTGACCGAATGGGAAGC
TGCAAATGTGGGAAACACACAGGCCATTTTGAGTGCATCTGTGAAAAGGGGTATAACGGGAAAGGTCT
GCAGTATGACTGCACAGTTTGCCCATCGGGGACATACAAACCTGAAGGCTCACCAGGAGGAATCAGCA
GTTGCATTCCATGTCCTGATGAAAATCACACCTCTCCACCTGGAAGCACATCCCCTGAAGACTGTGTC
TGCAGAGAGGGATACAGGGCATCTGGCCAGACCTGTGAAGTTGTCCACTGCCCTGCCCTGAAGCCTCC
CGAAAATGGTTACTTTATCCAAAACACTTGCAACAACCACTTCAATGCAGCCTGTGGGGTCCGATGTC
ACCCTGGATTTGATCTTGTGGGAAGCAGCATCATCTTATGTCTACCCAATGGTTTGTGGTCCGGTTCA
GAGAGCTACTGCAGAGTAAGAACATGTCCTCATCTCCGCCAGCCGAAACATGGCCACATCAGCTGTTC
TACAAGGGAAATGTTATATAAGACAACATGTTTGGTTGCCTGTGATGAAGGGTACAGGCTAGAAGGCA
GTGATAAGCTTACTTGTCAAGGAAACAGCCAGTGGGATGGGCCAGAACCCCGGTGTGTGGAGCGCCAC
TGTTCCACCTTTCAGATGCCCAAAGATGTCATCATATCCCCCCACAACTGTGGCAAGCAGCCAGCCAA
ATTTGGGACGATCTGCTATGTAAGTTGCCGCCAAGGGTTCATTTTATCTGGAGTCAAAGAAATGCTGA
GATGTACCACTTCTGGAAAATGGAATGTCGGAGTTCAGGCAGCTGTGTGTAAAGACGTGGAGGCTCCT
CAAATCAACTGTCCTAAGGACATAGAGGCTAAGACTCTGGAACAGCAAGATTCTGCCAATGTTACCTG
GCAGATTCCAACAGCTAAAGACAACTCTGGTGAAAAGGTGTCAGTCCACGTTCATCCAGCTTTCACCC
CACCTTACCTTTTCCCAATTGGAGATGTTGCTATCGTATACACGGCAACTGACCTATCCGGCAACCAG
GCCAGCTGCATTTTCCATATCAAGGTTATTGATGCAGAACCACCTGTCATAGACTGGTGCAGATCTCC
ACCTCCCGTCCAGGTCTCGGAGAAGGTACATGCCGCAAGCTGGGATGAGCCTCAGTTCTCAGACAACT
CAGGTGCTGAATTGGTCATTACCAGAAGTCATACACAAGGAGACCTTTTCCCTCAAGGGGAGACTATA
GTACAGTATACAGCCACTGACCCCTCAGGCAATAACAGGACATGTGATATCCATATTGTCATAAAAGG
TTCTCCCTGTGAAATTCCATTCACACCTGTAAATGGGGATTTTATATGCACTCCAGATAATACTGGAG
TCAACTGTACATTAACTTGCTTGGAGGGCTATGATTTCACAGAAGGGTCTACTGACAAGTATTATTGT
GCTTATGAAGATGGCGTCTGGAAACCAACATATACCACTGAATGGCCAGACTGTGCCAGTAAGCGTTT
TGCAAACCACGGGTTCAAGTCCTTTGAGATGTTCTACAAAGCAGCTCGTTGTGATGACACAGATCTGA
TGAAGAAGTTTTCTGAAGCATTTGAGACGACCCTGGGAAAAATGGTCCCATCATTTTGTAGTGATGCA
GAGGACATTGACTGCAGACTGGAGGAGAACCTGACCAAAAAATATTGCCTAGAATATAATTATGACTA
TGAAAATGGCTTTGCAATTGGTCCAGGTGGCTGGGGTGCAGCTAATAGGCTGGATTACTCTTACGATG
ACTTCCTGGACACTGTGCAAGAAACAGCCACAAGCATCGGCAATGCCAAGTCCTCACGGATTAAAAGA
AGTGCCCCATTATCTGACTATAAAATTAAGTTAATTTTTAACATCACAGCTAGTGTGCCATTACCCGA
TGAAAGAAATGATACCCTTGAATGGGAAAATCAGCAACGACTCCTTCAGACATTGGAAACTATCACAA
ATAAACTGAAAAGGACTCTCAACAAAGACCCCATGTATTCCTTTCAGCTTGCATCAGAAATACTTATA
GCCGACAGCAATTCATTAGAAACAAAAAAGGCTTCCCCCTTCTGCAGACCAGGCTCAGTGCTGAGAGG
GCGTATGTGTGTCAATTGCCCTTTGGGAACCTATTATAATCTGGAACATTTCACCTGTGAAAGCTGCC
GGATCGGATCCTATCAAGATGAAGAAGGGCAACTTGAGTGCAAGCTTTGCCCCTCTGGGATGTACACG
GAATATATCCATTCAAGAAACATCTCTGATTGTAAAGCTCAGTGTAAACAAGGCACCTACTCATACAG
TGGACTTGAGACTTGTGAATCGTGTCCACTGGGCACTTATCAGCCAAAATTTGGTTCCCGGAGCTGCC
TCTCGTGTCCAGAAAACACCTCAACTGTGAAAAGAGGAGCCGTGAACATTTCTGCATGTGGAGTTCCT
TGTCCAGAAGGAAAATTCTCGCGTTCTGGGTTAATGCCCTGTCACCCATGTCCTCGTGACTATTACCA
ACCTAATGCAGGGAAGGCCTTCTGCCTGGCCTGTCCCTTTTATGGAACTACCCCATTCGCTGGTTCCA
GATCCATCACAGAATGTTCAAGTTTTAGTTCAACTTTCTCAGCGGCAGAGGAAAGTGTGGTGCCCCCT
GCCTCTCTTGGACATATTAAAAAGAGGCATGAAATCAGCAGTCAGGCAAGTCATGAATGCTTCTTTAA
CCCTTGCCACAATAGTGGAACCTGCCAGCAACTTGGGCGTGGTTATGTTTGTCTCTGTCCACTTGGAT
ATACAGGTTTAAAGTGTGAAACAGACATCGATGAGTGCAGCCCACTGCCTTGCCTCAACAATGGAGTT
TGTAAGACCTAGTTGGGGAAATTCATTTGTGAGTGCCCATCAGGTTACACAGGTAAGCACTGTGAATT
GAACATCAATGAATGTCAGTCTAATCCATGTAGAAATCAGGCCACCTGTGTGGATGAATTAAATTCAT
ACAGTTGTAAATGTCAGCCAGGATTTTCAGGCAAAAGGTGTGAAACAGGTATGTATCAACTCAGTGTT
ATTAATAACCTTAATAATGCAGTCTGTGAAGACCAGGTTGGGGGATTCTTGTGCAAATGCCCACCTGG
ATTTTTGGGTACCCGATGTGGAAAGAACGTCGATGAGTGTCTCAGTCAGCCATGCAAAAATGGAGCTA
CCTGTAAAGACGGTGCCAATAGCTTCAGGTGCCTGTGTGCAGCTGGCTTCACAGGATCACACTGTGAA
TTGAACATCAATGAATGTCAGTCTAATCCATGTAGAAATCAGGCCACCTGTGTGGATGAATTAAATTC
ATACAGTTGTAAATGTCAGCCAGGATTTTCAGGCAAAAGGTGTGAAACAGAACAGTCTACAGGCTTTA
ACCTGGATTTTGAAGTTTCTGGCATCTATGGATATGTCATGCTAGATGGCATGCTCCCATCTCTCCAT
GCTCTAACCTGTACCTTCTGGATGAAATCCTCTGACGACATGAACTATGGAACACCAATCTCCTATGC
AGTTGATAACGGCAGCGACAATACCTTGCTCCTGACTGATTATAACGGGTGGGTTCTTTATGTGAATG
GCAGGGAAAAGATAACAAACTGTCCCTCGGTGAATGATGGCAGATGGCATCATATTGCAATCACTTGG
ACAAGTACTGGTGGAGCCTGGAGGGTCTATATAAATGGGGAATTATCTGACGGTGGTACTGGCCTCTC
CATTGGCAAAGCCATACCTGGTGGCGGTGCATTAGTTCTTGGGCAAGAGCAAGACAAAAAAGGAGAGG
GGTTCAACCCGGCTGAGTCTTTTGTGGGCTCCATAAGCCAGCTCAACCTCTGGGACTATGTCCTGTCT
CCACAGCAGGTGAAGTCACTGGCTACCTCCTGCCCAGAGGAACTCAGTAAAGGAAACGTGTTAGCATG
GCCTGATTTCTTGTCAGGAATTGTGGGGAAAGTGAAGATCGATTCTAAGAGCATATTTTGTTCTGATT
GCCCACGCTTGGGAGGGTCAGTGCCTCATCTGAGAACTGCATCTGAAGATTTAAAACCAGGTTCCAAA
ACAGTGGACACAACCACTCCCCCACTGTGAACGCATTCGCTGTGGGGTGCCACCTCCTTTGGAGAATG
GCTTCCATTCAGCCGATGACTTCTATGCTGGCAGCACAGTAACCTACCAGTGCAACAATGGCTACTAT
CTATTGGGTGACTCAAGGATGTTCTGTACAGATAATGGGAGCTGGAACGGCGTTTCACCATCCTGCTT
AGATGTCGATGAGTGTGCAGTTGGATCAGATTGTAGTGAGCATGCTTCTTGCCTGAACGTAGATGGAT
CCTACATATGTTCATGTGTCCCACCGTACACAGGAGATGGGAAAAACTGTGCAGAACCTATAAAATGT
AAGGCTCCAGGAAATCCGGAAAATGGCCACTCCTCAGGTGAGATTTATACAGTAGGTGCCGAAGTCAC
ATTTTCGTGTCAGGAAGGATACCAGTTGATGGGAGTAACCAAAATCACATGTTTGGAGTCTGGAGAAT
GGAATCATCTAATACCATATTGTAAAGCTGTTTCATGTGGTAAACCGGCTATTCCAGAAAATGGTTGC
ATTGAGGAGTTAGCATTTACTTTTGGCAGCAAAGTGACATATAGGTGTAATAAAGGATATACTCTGGC
CGGTGATAAAGAATCATCCTGTCTTGCTAACAGTTCTTGGAGTCATTCCCCTCCTGTGTGTGAACCAG
TGAAGTGTTCTAGTCCGGAAAATATAAATAATGGAAAATATATTTTGAGTGGGCTTACCTACCTTTCT
ACTGCATCATATTCATGCGATACAGGATACAGCTTACAGGGCCCTTCCATTATTGAATGCACGGCTTC
TGGCATCTGGGACAGAGCGCCACCTGCCTGTCACCTCGTCTTCTGTGGAGAACCACCTGCCATCAAAG
ATGCTGTCATTACGGGGAATAACTTCACTTTCAGGAACACCGTCACTTACACTTGCAAAGAAGGCTAT
ACTCTTGCTGGTCTTGACACCATTGAATGCCTGGCCGACGGCAAGTGGAGTAGAAGTGACCAGCAGTG
CCTGGCTGTCTCCTGTGATGAGCCACCCATTGTGGACCACGCCTCTCCAGAGACTGCCCATCGGCTCT
AATGCCCAGGGCAAGTGGGTACCCCCAGAAGGTCAAGACATGCCCCGTTGTATAGCTCATTTCTGTGA
AAAACCTCCATCGGTTTCCTATAGCATCTTGGAATCTGTGAGCAAAGCAAAATTTGCAGCTGGCTCAG
TTGTGAGCTTTAAATGCATGGAAGGCTTTGTACTGAACACCTCAGCAAAGATTGAATGTATGAGAGGT
GGGCAGTGGAACCCTTCCCCCATGTCCATCCAGTGCATCCCTGTGCGGTGTGGAGAGCCACCAAGCAT
CATGAATGGCTATGCAAGTGGATCAAACTACAGTTTTGGAGCCATGGTGGCTTACAGCTGCAACAAGG
GGTTCTACATCAAAGGGGAAAAGAAGAGCACCTGCGAAGCCACAGGGCAGTGGAGTAGTCCTATACCG
ACGTGCCACCCGGTATCTTGTGGTGAACCACCTAAGGTTGAGAATGGCTTTCTGGAGCATACAACTGG
CAGGATCTTTGAGAGTGAAGTGAGGTATCAGTGTAACCCGGGCTATAAGTCAGTCGGAAGTCCTGTAT
TTGTCTGCCAAGCCAATCGCCACTGGCACAGTGAATCCCCTCTGATGTGTGTTCCTCTCGACTGTGGA
AAACCTCCCCCGATCCAGAATGGCTTCATGAAAGGAGAAAACTTTGAAGTAGGGTCCAAGGTTCAGTT
TTTCTGTAATGAGGGTTATGAGCTTGTTGGTGACAGTTCTTGGACATGTCAGAAATCTGGCAAATGGA
ATAAGAAGTCAAATCCAAAGTGCATGCCTGCCAAGTGCCCAGAGCCGCCCCTCTTGGAAAACCAGCTA
GTATTAAAGGAGTTGACCACCGAGGTAGGAGTTGTGACATTTTCCTGTAAAGAAGGGCATGTCCTGCA
AGGCCCCTCTGTCCTGAAATGCTTGCCATCCCAGCAATGGAATGACTCTTTCCCTGTTTGTAAGATTG
TTCTTTGTACCCCACCTCCCCTAATTTCCTTTGGTGTCCCCATTCCTTCTTCTGCTCTTCATTTTGGA
AGTACTGTCAAGTATTCTTGTGTAGGTGGGTTTTTCCTAAGAGGAAATTCTACCACCCTCTGCCAACC
TGATGGCACCTGGAGCTCTCCACTGCCAGAATGTGTTCCAGTAGAATGTCCCCAACCTGAGGAAATCC
CCAATGGAATCATTGATGTGCAAGGCCTTGCCTATCTCAGCACAGCTCTCTATACCTGCAAGCCAGGC
TTTGAATTGGTGGGAAATACTACCACCCTTTGTGGAGAAAATGGTCACTGGCTTGGAGGAAAACCAAC
ATGTAAAGCCATTGAGTGCCTGAAACCCAAGGAGATTTTGAATGGCAAATTCTCTTACACGGACCTAC
ACTATGGACAGACCGTTACCTACTCTTGCAACCGAGGCTTTCGGCTCGAAGGTCCCAGTGCCTTGACC
TGTTTAGAGACAGGTGATTGGGATGTAGATGCCCCATCTTGCAATGCCATCCACTGTGATTCCCCACA
ACCCATTGAAAATGGTTTTGTAGAAGGTGCAGATTACAGCTATGGTGCCATAATCATCTACAGTTGCT
TCCCTGGGTTTCAGGTGGCTGGTCATGCCATGCAGACCTGTGAAGAGTCAGGATGGTCAAGTTCCATC
CCAACATGTATGCCAATAGACTGTGGCCTCCCTCCTCATATAGATTTTGGAGACTGTACTAAACTCAA
AGATGACCAGGGATATTTTGAGCAAGAAGACGACATGATGGAAGTTCCATATGTGACTCCTCACCCTC
CTTATCATTTGGGAGCAGTGGCTAAAACCTGGGAAAATACAAAGGAGTCTCCTGCTACACATTCATCA
AACTTTCTGTATGGTACCATGGTTTCATACACCTGTAATCCAGGATATGAACTTCTGGGGAACCCTGT
GCTGATCTGCCAGGAAGATGGAACTTGGAATGGCAGTGCACCATCCTGCATTTCAATTGAATGTGACT
TGCCTACTGCTCCTGAAAATGGCTTTTTGCGTTTTACAGAGACTAGCATGGGAAGTGCTGTGCAGTAT
AGCTGTAAACCTGGACACATTCTAGCAGGCTCTGACTTAAGGCTTTGTCTAGAGAATAGAAAGTGGAG
TGGTGCCTCCCCACGCTGTGAAGCCATTTCATGCAAAAAGCCAAATCCAGTCATGAATGGATCCATCA
AAGGAAGCAACTACACATACCTGAGCACGTTGTACTATGAGTGTGACCCCGGATATGTGCTGAATGGC
ACTGAGAGGAGAACATGCCAGGATGACAAAAACTGGGATGAGGATGAGCCCATTTGCATTCCTGTGGA
CTGCAGTTCACCCCCAGTCTCAGCCAATGGCCAGGTGAGAGGAGACGAGTACACATTCCAAAAAGAGA
TTGAATACACTTGCAATGAAGGGTTCTTGCTTGAGGGAGCCAGGAGTCGGGTTTGTCTTGCCAATGGA
AGTTGGAGTGGAGCCACTCCCGACTGTGTGCCTGTCAGATGTGCCACCCCGCCACAACTGGCCAATGG
GGTGACGGAAGGCCTGGACTATGGCTTCATGAAGGAAGTAACATTCCACTGTCACGAGGGCTACATCT
TGCACGGTGCTCCAAAACTCACCTGTCAGTCAGATGGCAACTGGGATGCAGAGATTCCTCTCTGTAAA
CCAGTCAACTGTGGACCTCCTGAAGATCTTGCCCATGGTTTCCCTAATGGTTTTTCCTTTATTCATGG
GGGCCATATACAGTATCAGTGCTTTCCTGGTTATAAGCTCCATGGAAATTCATCAAGAAGGTGCCTCT
CCAATGGCTCCTGGAGTGGCAGCTCACCTTCCTGCCTGCCTTGCAGATGTTCCACACCAGTAATTGAA
TATGGAACTGTCAATGGGACAGATTTTGACTGTGGAAAGGCAGCCCGGATTCAGTGCTTCAAAGGCTT
CAAGCTCCTAGGACTTTCTGAAATCACCTGTGAAGCCGATGGCCAGTGGAGCTCTGGGTTCCCCCACT
GTGAACACACTTCTTGTGGTTCTCTTCCAATGATACCAAATGCGTTCATCAGTGAGACCAGCTCTTGG
AAGGAAAATGTGATAACTTACAGCTGCAGGTCTGGATATGTCATACAAGGCAGTTCAGATCTGATTTG
TACAGAGAAAGGGGTATGGAGCCAGCCTTATCCAGTCTGTGAGCCCTTGTCCTGTGGGTCCCCACCGT
CTGTCGCCAATGCAGTGGCAACTGGAGAGGCACACACCTATGAAAGTGAAGTGAAACTCAGATGTCTG
GAAGGTTATACGATGGATACAGATACAGATACATTCACCTGTCAGAAAGATGGTCGCTGGTTCCCTGA
GAGAATCTCCTGCAGTCCTAAAAAATGTCCTCTCCCGGAAAACATAACACATATACTTGTTCATGGGG
ACGATTTCAGTGTGAATAGGCAAGTTTCTGTGTCATGTGCAGAAGGGTATACCTTTGAGGGAGTTAAC
ATATCAGTATGTCAGCTTGATGGAACCTGGGAGCCACCATTCTCCGATGAATCTTGCAGTCCAGTTTC
TTGTGGGAAACCTGAAAGTCCAGAACATGGATTTGTGGTTGGCAGTAAATACACCTTTGAAAGCACAA
TTATTTATCAGTGTGAGCCTGGCTATGAACTAGAGGGGAACAGGGAACGTGTCTGCCAGGAGAACAGA
CAGTGGAGTGGAGGGGTGGCAATATGCAAAGAGACCAGGTGTGAAACTCCACTTGAATTTCTCAATGG
GAAAGCTGACATTGAAAACAGGACGACTGGACCCAACGTGGTATATTCCTGCAACAGAGGCTACAGTC
TTGAAGGGCCATCTGAGGCACACTGCACAGAAAATGGAACCTGGAGCCACCCAGTCCCTCTCTGCAAA
CCAAATCCATGCCCTGTTCCTTTTGTGATTCCCGAGAATGCTCTGCTGTCTGAAAAGGAGTTTTATGT
TGATCAGAATGTGTCCATCAAATGTAGGGAAGGTTTTCTGCTGCAGGGCCACGGCATCATTACCTGCA
ACCCCGACGAGACGTGGACACAGACAAGCGCCAAATGTGAAAAAATCTCATGTGGTCCACCAGCTCAC
GTAGAAAATGCAATTGCTCGAGGCGTACATTATCAATATGGAGACATGATCACCTACTCATGTTACAG
TGGATACATGTTGGAGGGTTTCCTGAGGAGTGTTTGTTTAGAAAATGGAACATGGACATCACCTCCTA
TTTGCAGAGCTGTCTGTCGATTTCCATGTCAGAATGGGGGCATCTGCCAACGCCCAAATGCTTGTTCC
TGTCCAGAGGGCTGGATGGGGCGCCTCTGTGAAGAACCAATCTGCATTCTTCCCTGTCTGAACGGAGG
TCGCTGTGTGGCCCCTTACCAGTGTGACTGCCCGCCTGGCTGGACGGGGTCTCGCTGTCATACAGCTG
TTTGCCAGTCTCCCTGCTTAAATGGTGGAAAATGTGTAAGACCAAACCGATGTCACTGTCTTTCTTCT
TGGACGGGACATAACTGTTCCAGGAAAAGGAGGACTGGGTTTTAACCACTGCACGACCATCTGGCTCT
CCCAAAAGCAGGATCATCTCTCCTCGGTAGTGCCTGGGCATCCTGGAACTTATGCAAAGAAAGTCCAA
CATGGTGCTGGGTCTTGTTTAGTAAACTTGTTACTTGGGGTTACTTTTTTTATTTTGTGATATATTTT
GTTATTCCTTGTGACATACTTTCTTACATGTTTCCATTTTTAAATATGCCTGTATTTTCTATATAAAA
ATTATATTAAATAGATGCTGCTCTACCCTCACAAAATGTACATATTCTGCTGTCTATTGGGAAAGTTC
CTGGTACACATTTTTATTCAGTTACTTAAAATGATTTTTCCATTAAAGTATATTTTGCTACTAAATAA
AAAAAA

| | | |
|---|---|---|
| NOV8n, SNP13382479 of | SEQ ID NO: 204 | MW at 390012.5kD |

| | | | |
|---|---|---|---|
| CG50646-04, Protein Sequence | SNP Pos: 3191 | 3570 aa | SNP Change: Val to Val |

MRRICAACWGLALVSGWATFQQMSPSRNFSFRLFPETAPGAPGSIPAPPAPGDEAAGSRVERLGQAFR
VRLLRELSERLELVFLVDDSSSVGEVNFRSELMFVRKLLSDFPVVPTATRVAIVTFSSKNYVVPRVDY
ISTRRARQHKCALLLQEIPAISYRGGGTYTKGAFQQAAQILLHARENSTKVVFLITDGYSNGGDPRPI
AASLRDSGVEIFTFGIWQGNIRELNDMASTPKEEHCYLLHSFEEFEALVALCHMLFVDLPSGSFIQDD
MVHCSYLCDEGKDCCDRMGSCKCGKHTGHFECICEKGYNGKGLQYDCTVCPSGTYKPEGSPGGISSCI
PCPDENHTSPPGSTSPEDCVCREGYFASGQTCEVVHCPALKPPENGYFIQNTCNNHFNAACGVRCHPG
FDLVGSSIILCLPNGLWSGSESYCRVRTCPHLRQPKHGHISCSTREMLYKTTCLVACDEGYPLEGSDK
LTCQGNSQWDGPEPRCVERHCSTFQMPKDVIISPHNCGKQPAKFGTICYVSCRQGFILSGVKEMLRCT
TSGWNNVGVQAAVCKDVEAPQINCPKDIEAKTLEQQDSANVTWQIPTAKDNSGEKVSVHVHPAFTPPY
LFPIGDVAIVYTATDLSGNQASCIFHIKVIDAEPPVIDWCRSPPPVQVSEKVHAASWDEPQFSDNSGA
ELVITRSHTQGDLFPQGETIVQYTATDPSGNNRTCDIHIVIKGSPCEIPFTPVNGDFICTPDNTGVNC
TLTCLEGYDFTEGSTDKYYCAYEDGVWKPTYTTEWPDCASKRFANHGFKSFEMFYKAARCDDTDLMKK
FSEAFETTLGKMVPSFCSDAEDIDCRLEENLTKKYCLEYNYDYENGFAIGPGGWGAANRLDYSFDDFL
DTVQETATSIGNAKSSRIKRSAPLSDYKIKLIFNITASVPLPDERNDTLEWENQQRLLQTLETITNKL
KRTLNKDPMYSFQLASEILIADSNSLETKKASPFCRPGSVLRGRMCVNCPLGTYYNLEHFTCESCRIG
SYQDEEGQLECKLCPSGMYTEYIHSRNISDCKAQCKQGTYSYSGLETCESCPLGTYQPKFGSRSCLSC
PENTSTVKRGAVNISACGVPCPEGKFSRSGLMPCHPCPRDYYQPNAGKAFCLACPFYGTTPFAGSRSI
TECSSFSSTFSAAEESVVPPASLGHIKKRHEISSQASHECFFNPCHNSGTCQQLGRGYVCLCPLGYTG
LKCETDIDECSPLPCLNNGVCKDLVGEFICECPSGYTGKHCELNINECQSNPCRNQATCVDELNSYSC
KCQPGFSGKRCETGMYQLSVINNLNNAVCEDQVGGFLCKCPPGFLGTRCGKNVDECLSQPCKNGATCK
DGANSFRCLCAAGFTGSHCELNINECQSNPCRNQATCVDELNSYSCKCQPGFSGKRCETEQSTGFNLD
FEVSGIYGYVMLDGMLPSLHAITCTFWMKSSDDMNYGTPISYAVDNGSDNTLLLTDYNGWVLYVNGRE
KITNCPSVNDGRWHHIAITWTSTGGAWRVYINGELSDGGTGLSIGKAIPGGGALVLGQEQDKKGEGFN
PAESFVGSISQLNLWDYVLSPQQVKSLATSCPEELSKGNVLAWPDFLSGIVGKVKIDSKSIFCSDCPR
LGGSVPHLRTASEDLKPGSKVNLFCEPGFQLVGNPVQYCLNQGQWTQPLPHCERIRCGVPPPLENGFH
SADDFYAGSTVTYQCNNGYYLLGDSRMFCTDNGSWNGVSPSCLDVDECAVGSDCSEHASCLNVDGSYI
CSCVPPYTGDGKNCAEPIKCKAPGNPENGHSSGEIYTVGAEVTFSCQEGYQLMGVTKITCLESGEWNH
LIPYCKAVSCGKPAIPENGCIEELAFTFGSKVTYRCNKGYTLAGDKESSCLANSSWSHSPPVCEPVKC
SSPENINNGKYILSGLTYLSTASYSCDTGYSLQGPSIIECTASGIWDRAPPACHLVFCGEPPAIKDAV
ITGNNFTFRNTVTYTCKEGYTLAGLDTIECLADGKWSRSDQQCLAVSCDEPPIVDHASPETAHRLFGD
IAFYYCSDGYSLADNSQLLCNAQGKWVPPEGQDMPRCIAHFCEKPPSVSYSILESVSKAKFAAGSVVS
FKCMEGFVLNTSAKIECMRGGQWNPSPMSIQCIPVRCGEPPSIMNGYASGSNYSFGAMVAYSCNKGFY
IKGEKKSTCEATGQWSSPIPTCHPVSCGEPPKVENGFLEHTTGRIFESEVRYQCNPGYKSVGSPVFVC
QANRHWHSESPLMCVPLDCGKPPPIQNGFMKGENFEVGSKVQFFCNEGYELVGDSSWTCQKSGKWNKK
SNPKCMPAKCPEPPLLENQLVLKELTTEVGVVTFSCKEGHVLQGPSVLKCLPSQQWNDSFPVCKIVLC
TPPPLISFGVPIPSSALHFGSTVKYSCVGGFFLRGNSTTLCQPDGTWSSPLPECVPVECPQPEEIPNG
IIDVQGLAYLSTALYTCKPGFELVGNTTTLCGENGHWLGGKPTCKAIECLKPKEILNGKFSYTDLHYG
QTVTYSCNRGFRLEGPSALTCLETGDWDVDAPSCNAIHCDSPQPIENGFVEGADYSYGAIIIYSCFPG
FQVAGHAMQTCEESGWSSSIPTCMPIDCGLPPHIDFGDCTKLKDDQGYFEQEDDMMEVPYVTPHPPYH
LGAVAKTWENTKESPATHSSNFLYGTMVSYTCNPGYELLGNPVLICQEDGTWNGSAPSCISIECDLPT
APENGFLRFTETSMGSAVQYSCKPGHILAGSDLRLCLENRKWSGASPRCEAISCKKPNPVMNGSIKGS
NYTYLSTLYYECDPGYVLNGTERRTCQDDKNWDEDEPICIPVDCSSPPVSANGQVRGDEYTFQKEIEY
TCNEGFLLEGARSRVCLANGSWSGATPDCVPVRCATPPQLANGVTEGLDYGFMKEVTFHCHEGYILHG
APKLTCQSDGNWDAEIPLCKPVNCGPPEDLAHGFPNGFSFIHGGHIQYQCFPGYKLHGNSSRRCLSNG
SWSGSSPSCLPCRCSTPVIEYGTVNGTDFDCGKAARIQCFKGFKLLGLSEITCEADGQWSSGFPHCEH
TSCGSLPMIPNAFISETSSWKENVITYSCRSGYVIQGSSDLICTEKGVWSQPYPVCEPLSCGSPPSVA
NAVATGEAHTYESEVKLRCLEGYTMDTDTDTFTCQKDGRWFPERISCSPKKCPLPENITHILVHGDDF
SVNRQVSVSCAEGYTFEGVNISVCQLDGTWEPPFSDESCSPVSCGKPESPEHGFVVGSKYTFESTIIY
QCEPGYELEGNRERVCQENRQWSGGVAICKETRCETPLEFLNGKADIENRTTGPNVVYSCNRGYSLEG
PSEAHCTENGTWSHPVPLCKPNPCPVPFVIPENALLSEKEFYVDQNVSIKCREGFLLQGHGIITCNPD
ETWTQTSAKCEKISCGPPAHVENAIARGVHYQYGDMITYSCYSGYMLEGFLRSVCLENGTWTSPPICR
AVCRFPCQNGGICQRPNACSCPEGWMGRLCEEPICILPCLNGGRCVAPYQCDCPPGWTGSRCHTAVCQ
SPCLNGGKCVRPNRCHCLSSWTGHNCSRKRRTGF

| | |
|---|---|
| SEQ ID NO: 205 | 11158 bp |

| | | |
|---|---|---|
| NOV8o, SNP13382480 of | ORF Start: ATG at 77 | ORF Stop: TAA at 10787 |

| | | |
|---|---|---|
| CG50646-04, DNA Sequence | SNP Pos: 10749 | SNP Change: C to T |

GAATTGGTCTAGGGTCTCCCCCATTGGAATATCCATCAGTGATGAGAAATACAACGTTTGTTGAGTTT
TCTCTAGCATGAGAAGAATTTGCGCGGCTTGCTGGGGTCTGGCGCTCGTTTCGGGCTGGGCGACCTTT
CAGCAGATGTCCCCGTCGCGCAATTTCAGCTTCCGCCTCTTCCCCGAGACCGCGCCCGGGGCCCCCGG
GAGTATCCCCGCGCCGCCCGCTCCTGGCGACGAAGCGGCGGGGAGCAGAGTGGAGCGGCTGGGCCAGG
CGTTCCGCGTGCGGCTGCTGCGGGAGCTCAGCGAGCGCCTGGAGCTTGTCTTCCTGGTGGATGATTCG
TCCAGCGTGGGCGAAGTCAACTTCCGCAGCGAGCTCATGTTCGTCCGCAAGCTGCTGTCCGACTTCCC
CGTGGTGCCCACGGCCACGCGCGTGGCCATCGTGACCTTCTCGTCCAAGAACTACGTGGTGCCGCGCG
TCGATTACATCTCCACCCGCCGCGCGCGCCAGCACAAGTGCGCGCTGCTCCTCCAAGAGATCCCTGCC
ATCTCCTACCGAGGTGGCGGCACCTACACCAAGGGCGCCTTCCAGCAAGCCGCGCAAATTCTTCTTCA
TGCTAGAGAAAACTCAACAAAAGTTGTATTTCTCATCACTGATGGATATTCCAATGGGGGAGACCCTA
GACCAATTGCAGCGTCACTGCGAGATTCAGGAGTGGAGATCTTCACTTTTGGCATATGGCAAGAGAAC
ATTCGAGAGCTGAATGACATGGCTTCCACCCCAAAGGAGGAGCACTGTTACCTGCTACACAGTTTTGA
AGAATTTGAGGCTTTAGTCGCCCTCTGTCATATGTTATTTGTAGATCTACCTTCTGGGAGTTTTATTC
AAGATGATATGGTCCACTGCTCATATCTTTGTGATGAAGGCAAGGACTGCTGTGACCGAATGGGAAGC
TGCAAATGTGGGAAACACACAGGCCATTTTGAGTGCATCTGTGAAAAGGGGTATAACGGGAAAGGTCT
GCAGTATGACTGCACAGTTTGCCCATCGGGGACATACAAACCTGAAGGCTCACCAGGAGGAATCAGCA
GTTGCATTCCATGTCCTGATGAAAATCACACCTCTCCACCTGGAAGCACATCCCCTGAAGACTGTGTC
TGCAGAGAGGGATACAGGGCATCTGGCCAGACCTGTGAAGTTGTCCACTGCCCTGCCCTGAAGCCTCC
CGAAAATGGTTACTTTATCCAAAACACTTGCAACAACCACTTCAATGCAGCCTGTGGGGTCCGATGTC
ACCCTGGATTTGATCTTGTGGGAAGCAGCATCATCTTATGTCTACCCAATGGTTTGTGGTCCGGTTCA
GAGAGCTACTGCAGAGTAAGAACATGTCCTCATCTCCGCCAGCCGAAACATGGCCACATCAGCTGTTC
TACAAGGGAAATGTTATATAAGACAACATGTTTGGTTGCCTGTGATGAAGGGTACAGGCTAGAAGGCA
GTGATAAGCTTACTTGTCAAGGAAACAGCCAGTGGGATGGGCCAGAACCCCGGTGTGTGGAGCGCCAC
TGTTCCACCTTTCAGATGCCCAAAGATGTCATCATATCCCCCCACAACTGTGGCAAGCAGCCAGCCAA
ATTTGGGACGATCTGCTATGTAAGTTGCCGCCAAGGGTTCATTTTATCTGGAGTCAAAGAAATGCTGA
GATGTACCACTTCTGGAAAATGGAATGTCGGAGTTCAGGCAGCTGTGTGTAAAGACGTGGAGGCTCCT
CAAATCAACTGTCCTAAGGACATAGAGGCTAAGACTCTGGAACAGCAAGATTCTGCCAATGTTACCTG
GCAGATTCCAACAGCTAAAGACAACTCTGGTGAAAAGGTGTCAGTCCACGTTCATCCAGCTTTCACCC
CACCTTACCTTTTCCCAATTGGAGATGTTGCTATCGTATACACGGCAACTGACCTATCCGGCAACCAG
GCCAGCTGCATTTTCCATATCAAGGTTATTGATGCAGAACCACCTGTCATAGACTGGTGCAGATCTCC
ACCTCCCGTCCAGGTCTCGGAGAAGGTACATGCCGCAAGCTGGGATGAGCCTCAGTTCTCAGACAACT
CAGGTGCTGAATTGGTCATTACCAGAAGTCATACACAAGGAGACCTTTTCCCTCAAGGGGAGACTATA
GTACAGTATACAGCCACTGACCCCTCAGGCAATAACAGGACATGTGATATCCATATTGTCATAAAAGG
TTCTCCCTGTGAAATTCCATTCACACCTGTAAATGGGGATTTTATATGCACTCCAGATAATACTGGAG
TCAACTGTACATTAACTTGCTTGGAGGGCTATGATTTCACAGAAGGGTCTACTGACAAGTATTATTGT
GCTTATGAAGATGGCGTCTGGAAACCAACATATACCACTGAATGGCCAGACTGTGCCAGTAAGCGTTT
TGCAAACCACGGGTTCAAGTCCTTTGAGATGTTCTACAAAGCAGCTCGTTGTGATGACACAGATCTGA
TGAAGAAGTTTTCTGAAGCATTTGAGACGACCCTGGGAAAAATGGTCCCATCATTTTGTAGTGATGCA
GAGGACATTGACTGCAGACTGGAGGAGAACCTGACCAAAAAATATTGCCTAGAATATAATTATGACTA
TGAAAATGGCTTTGCAATTGGTCCAGGTCGCTGGGGTGCAGCTAATAGGCTGGATTACTCTTACGATG
ACTTCCTGGACACTGTGCAAGAAACAGCCACAAGCATCGGCAATGCCAAGTCCTCACGGATTAAAAGA
AGTGCCCCATTATCTGACTATAAAATTAAGTTAATTTTTAACATCACAGCTAGTGTGCCATTACCCGA
TGAAAGAAATGATACCCTTGAATGGGAAAATCAGCAACGACTCCTTCAGACATTGGAAACTATCACAA
ATAAACTGAAAAGGACTCTCAACAAAGACCCCATGTATTCCTTTCAGCTTGCATCAGAAATACTTATA
GCCGACAGCAATTCATTAGAAACAAAAAAGGCTTCCCCCTTCTGCAGACCAGGCTCAGTGCTGAGAGG
GCGTATGTGTGTCAATTGCCCTTTGGGAACCTATTATAATCTGGAACATTTCACCTGTGAAAGCTGCC
GGATCGGATCCTATCAAGATGAAGAAGGGCAACTTGAGTGCAAGCTTTGCCCCTCTGGGATGTACACG
GAATATATCCATTCAAGAAACATCTCTGATTGTAAAGCTCAGTGTAAACAAGGCACCTACTCATACAG
TGGACTTGAGACTTGTGAATCGTGTCCACTGGGCACTTATCAGCCAAAATTTGGTTCCCGGAGCTGCC
TCTCGTGTCCAGAAAACACCTCAACTGTGAAAAGAGGAGCCGTGAACATTTCTGCATGTGGAGTTCCT
TGTCCAGAAGGAAAATTCTCGCGTTCTGGGTTAATGCCCTGTCACCCATGTCCTCGTGACTATTACCA
ACCTAATGCAGGGAAGGCCTTCTGCCTGGCCTGTCCCTTTTATGGAACTACCCCATTCGCTGGTTCCA
GATCCATCACAGAATGTTCAAGTTTTAGTTCAACTTTCTCAGCGGCAGAGGAAAGTGTGGTGCCCCCT
GCCTCTCTTGGACATATTAAAAAGAGGCATGAAATCAGCAGTCAGGCAAGTCATGAATGCTTCTTTAA
CCCTTGCCACAATAGTGGAACCTGCCAGCAACTTGGGCGTGGTTATGTTTGTCTCTGTCCACTTGGAT
ATACAGGTTTAAGTGTGAAAACAGACATCGATGAGTGCAGCCCACTGCCTTGCCTCAACAATGGAGTT
TGTAAAGACCTAGTTGGGGAATTCATTTGTGAGTGCCCATCAGGTTACACAGGTAAGCACTGTGAATT
GAACATCAATGAATGTCAGTCTAATCCATGTAGAAATCAGGCCACCTGTGTGGATGAATTAAATTCAT
ACAGTTGTAAATGTCAGCCAGGATTTTCAGGCAAAAGGTGTGAAACAGGTATGTATCAACTCAGTGTT
ATTAATAACCTTAATAATGCAGTCTGTGAAGACCAGGTTGGGGGATTCTTGTGCAAATGCCCACCTGG
ATTTTTGGGTACCCGATGTGGAAAGAACGTCGATGAGTGTCTCAGTCAGCCATGCAAAAATGGAGCTA
CCTGTAAAGACGGTGCCAATAGCTTCAGGTGCCTGTGTGCAGCTGGCTTCACAGGATCACACTGTGAA
TTGAACATCAATGAATGTCAGTCTAATCCATGTAGAAATCAGGCCACCTGTGTGGATGAATTAAATTC
ATACAGTTGTAAATGTCAGCCAGGATTTTCAGGCAAAAGGTGTGAAACAGAACAGTCTACAGGCTTTA
ACCTGGATTTTGAAGTTTCTGGCATCTATGGATATGTCATGCTAGATGGCATGCTCCCATCTCTCCAT
GCTCTAACCTGTACCTTCTGGATGAAATCCTCTGACGACATGAACTATGGAACACCAATCTCCTATGC
AGTTGATAACGGCAGCGACAATACCTTGCTCCTGACTGATTATAACGGGTGGGTTCTTTATGTGAATG
GCAGGGAAAAGATAACAAACTGTCCCTCGGTGAATGATGGCAGATGGCATCATATTGCAATCACTTCG
ACAAGTACTGGTGGAGCCTGGAGGGTCTATATAAATGGGGAATTATCTGACGGTGGTACTGGCCTCTC
CATTGGCAAAGCCATACCTGGTGGCGGTGCATTAGTTCTTGGGCAAGAGCAAGACAAAAAAGGAGAGG
GGTTCAACCCGGCTGAGTCTTTTGTGGGCTCCATAAGCCAGCTCAACCTCTGGGACTATGTCCTGTCT
CCACAGCAGGTGAAGTCACTGGCTACCTCCTGCCCAGAGGAACTCAGTAAAGGAAACGTGTTAGCATG
GCCTGATTTCTTGTCAGGAATTGTGGGGAAAGTGAAGATCGATTCTAAGAGCATATTTTGTTCTGATT
GCCCACGCTTGGGAGGGTCAGTGCCTCATCTGAGAACTGCATCTGAAGATTTAAAACCAGGTTCCAAA
GTCAATCTGTTCTGTGAACCAGGCTTCCAGCTGGTCGGGAACCCTGTGCAGTACTGTCTGAATCAAGG
ACAGTGGACACAACCACTCCCCCACTGTGAACGCATTCGCTGTGGGGTGCCACCTCCTTTGGAGAATG
GCTTCCATTCAGCCGATGACTTCTATGCTGGCAGCACAGTAACCTACCAGTGCAACAATGGCTACTAT
CTATTGGGTGACTCAAGGATGTTCTGTACAGATAATGGGAGCTGGGACGGCGTTTCACCATCCTGCTT
AGATGTCGATGAGTGTGCAGTTGGATCAGATTGTAGTGAGCATGCTTCTTGCCTGAACGTAGATGGAT
CCTACATATGTTCATGTGTCCCACCGTACACAGGAGATGGGAAAAACTGTGCAGAACCTATAAAATGT
AAGGCTCCAGGAAATCCGGAAAATGGCCACTCCTCAGGTGAGATTTATACAGTAGGTGCCGAAGTCAC
ATTTTCGTGTCAGGAAGGATACCAGTTGATGGGAGTAACCAAAATCACATGTTTGGAGTCTGGAGAAT
GGAATCATCTAATACCATATTGTAAAGCTGTTTCATGTGGTAAACCGGCTATTCCAGAAAATGGTTGC
ATTGAGGAGTTAGCATTTACTTTTGGCAGCAAAGTGACATATAGGTGTAATAAAGGATATACTCTGGC
CGGTGATAAAGAATCATCCTGTCTTGCTAACAGTTCTTGGAGTCATTCCCCTCCTGTGTGTGAACCAG
TGAAGTGTTCTAGTCCGGAAAATATAAATAATGGAAAATATATTTTGAGTGGGCTTACCTACCTTTCT
ACTGCATCATATTCATGCGATACAGGATACAGCTTACAGGGCCCTTCCATTATTGAATGCACGGCTTC
TGGCATCTGGGACAGAGCGCCACCTGCCTGTCACCTCGTCTTCTGTGGAGAACCACCTGCCATCAAAG
ATGCTGTCATTACGGGGAATAACTTCACTTTCAGGAACACCGTCACTTACACTTGCAAAGAAGGCTAT
ACTCTTGCTGGTCTTGACACCATTGAATGCCTGGCCGACGGCAAGTGGAGTAGAAGTGACCAGCAGTG
CCTGGCTGTCTCCTGTGATGAGCCACCCATTGTGGACCACGCCTCTCCAGAGACTGCCCATCGGCTCT
TTGGAGACATTGCATTCTACTACTGCTCTGATGGTTACAGCCTAGCAGACAATTCCCAGCTTCTCTGC
AATGCCCAGGGCAAGTGGGTACCCCCAGAAGGTCAAGACATGCCCCGTTGTATAGCTCATTTCTGTGA
AAAACCTCCATCGGTTTCCTATAGCATCTTGGAATCTGTGAGCAAAGCAAAATTTGCAGCTGGCTCAG
TTGTGAGCTTTAAATGCATGGAAGGCTTTGTACTGAACACCTCAGCAAAGATTGAATGTATGAGAGGT
GGGCAGTGGAACCCTTCCCCCATGTCCATCCAGTGCATCCCTGTGCGGTGTGGAGAGCCACCAAGCAT
CATGAATGGCTATGCAAGTGGATCAAACTACAGTTTTGGAGCCATGGTGGCTTACAGCTGCAACAAGG
GGTTCTACATCAAAGGGGAAAAGAAGAGCACCTGCGAAGCCACAGGGCAGTGGAGTAGTCCTATACCG
ACGTGCCACCCGGTATCTTGTGGTGAACCACCTAAGGTTGAGAATGGCTTTCTGGAGCATACAACTGG
CAGGATCTTTGAGAGTGAAGTGAGGTATCAGTGTAACCCGGGCTATAAGTCAGTCGGAAGTCCTGTAT
TTGTCTGCCAAGCCAATCGCCACTGGCACAGTGAATCCCCTCTGATGTGTGTTCCTCTCGACTGTGGA
AAACCTCCCCCGATCCAGAATGGCTTCATGAAAGGAGAAAACTTTGAAGTAGGGTCCAAGGTTCAGTT
TTTCTGTAATGAGGGTTATGAGCTTGTTGGTGACAGTTCTTGGACATGTCAGAAATCTGGCAAATGGA
ATAAGAAGTCAAATCCAAAGTGCATGCCTGCCAAGTGCCCAGAGCCGCCCCTCTTGGAAAACCAGCTA
GTATTAAAGGAGTTGACCACCGAGGTAGGAGTTGTGACATTTTCCTGTAAAGAAGGGCATGTCCTGCA
AGGCCCCTCTGTCCTGAAATGCTTGCCATCCCAGCAATGGAATGACTCTTTCCCTGTTTGTAAGATTG
TTCTTTGTACCCCACCTCCCCTAATTTCCTTTGGTGTCCCCATTCCTTCTTCTGCTCTTCATTTTGGA
AGTACTGTCAAGTATTCTTGTGTAGGTGGGTTTTTCCTAAGAGGAAATTCTACCACCCTCTGCCAACC
TGATGGCACCTGGAGCTCTCCACTGCCAGAATGTGTTCCAGTAGAATGTCCCCAACCTGAGGAAATCC
CCAATGGAATCATTGATGTGCAAGGCCTTGCCTATCTCAGCACAGCTCTCTATACCTGCAAGCCAGGC
TTTGAATTGGTGGGAAATACTACCACCCTTTGTGGAGAAAATGGTCACTGGCTTGGAGGAAAACCAAC
ATGTAAAGCCATTGAGTGCCTGAAACCCAAGGAGATTTTGAATGGCAAATTCTCTTACACGGACCTAC
ACTATGGACAGACCGTTACCTACTCTTGCAACCGAGGCTTTCGGCTCGAAGGTCCCAGTGCCTTGACC
TGTTTAGAGACAGGTGATTGGGATGTAGATGCCCCATCTTGCAATGCCATCCACTGTGATTCCCCACA
ACCCATTGAAAATGGTTTTGTAGAAGGTGCAGATTACAGCTATGGTGCCATAATCATCTACAGTTGCT
TCCCTGGGTTTCAGGTGGCTGGTCATGCCATGCAGACCTGTGAAGAGTCAGGATGGTCAAGTTCCATC
CCAACATGTATGCCAATAGACTGTGGCCTCCCTCCTCATATAGATTTTGGAGACTGTACTAAACTCAA
AGATGACCAGGGATATTTTGAGCAAGAAGACGACATGATGGAAGTTCCATATGTGACTCCTCACCCTC
CTTATCATTTGGGAGCAGTGGCTAAAACCTGGGAAAATACAAAGGAGTCTCCTGCTACACATTCATCA
AACTTTCTGTATGGTACCATGGTTTCATACACCTGTAATCCAGGATATGAACTTCTGGGGAACCCTGT
GCTGATCTGCCAGGAAGATGGAACTTGGAATGGCAGTGCACCATCCTGCATTTCAATTGAATGTGACT
TGCCTACTGCTCCTGAAAATGGCTTTTTGCGTTTTACAGAGACTAGCATGGGAAGTGCTGTGCAGTAT
AGCTGTAAACCTGGACACATTCTAGCAGGCTCTGACTTAAGGCTTTGTCTAGAGAATAGAAAGTGGAG
TGGTGCCTCCCCACGCTGTGAAGCCATTTCATGCAAAAAGCCAAATCCAGTCATGAATGGATCCATCA
AAGGAAGCAACTACACATACCTGAGCACGTTGTACTATGAGTGTGACCCCGGATATGTGCTGAATGGC
ACTGAGAGGAGAACATGCCAGGATGACAAAAACTGGGATGAGGATGAGCCCATTTGCATTCCTGTGGA
CTGCAGTTCACCCCCAGTCTCAGCCAATGGCCAGGTGAGAGGAGACGAGTACACATTCCAAAAAGAGA
TTGAATACACTTGCAATGAAGGGTTCTTGCTTGAGGGAGCCAGGAGTCGGGTTTGTCTTGCCAATGGA
AGTTGGAGTGGAGCCACTCCCGACTGTGTGCCTGTCAGATGTGCCACCCCGCCACAACTGGCCAATGG
GGTGACGGAAGGCCTGGACTATGGCTTCATGAAGGAAGTAACATTCCACTGTCACGAGGGCTACATCT
TGCACGGTGCTCCAAAACTCACCTGTCAGTCAGATGGCAACTGGGATGCAGAGATTCCTCTCTGTAAA
CCAGTCAACTGTGGACCTCCTGAAGATCTTGCCCATGGTTTCCCTAATGGTTTTTCCTTTATTCATGG
GGGCCATATACAGTATCAGTGCTTTCCTGGTTATAAGCTCCATGGAAATTCATCAAGAAGGTGCCTCT
CCAATGGCTCCTGGAGTGGCAGCTCACCTTCCTGCCTGCCTTGCAGATGTTCCACACCAGTAATTGAA
TATGGAACTGTCAATGGGACAGATTTTGACTGTGGAAAGGCAGCCCGGATTCAGTGCTTCAAAGGCTT
CAAGCTCCTAGGACTTTCTGAAATCACCTGTGAAGCCGATGGCCAGTGGAGCTCTGGGTTCCCCCACT
GTGAACACACTTCTTGTGGTTCTCTTCCAATGATACCAAATGCGTTCATCAGTGAGACCAGCTCTTGG
AAGGAAAATGTGATAACTTACAGCTGCAGGTCTGGATATGTCATACAAGGCAGTTCAGATCTGATTTG
TACAGAGAAAGGGGTATGGAGCCAGCCTTATCCAGTCTGTGAGCCCTTGTCCTGTGGGTCCCCACCGT
CTGTCGCCAATGCAGTGGCAACTGGAGAGGCACACACCTATGAAAGTGAAGTGAAACTCAGATGTCTG
GAAGGTTATACGATGGATACAGATACAGATACATTCACCTGTCAGAAAGATGGTCGCTGGTTCCCTGA
ACGATTTCAGTGTGAATAGGCAAGTTTCTGTGTCATGTGCAGAAGGGTATACCTTTGAGGGAGTTAAC
ATATCAGTATGTCAGCTTGATGGAACCTGGGAGCCACCATTCTCCGATGAATCTTGCAGTCCAGTTTC
TTGTGGGAAACCTGAAAGTCCAGAACATGGATTTGTGGTTGGCAGTAAATACACCTTTGAAAGCACAA
TTATTTATCAGTGTGAGCCTGGCTATGAACTAGAGGGGAACAGGGAACGTGTCTGCCAGGAGAACAGA
CAGTGGAGTGGAGGGGTGGCAATATGCAAAGAGACCAGGTGTGAAACTCCACTTGAATTTCTCAATGG
GAAAGCTGACATTGAAAACAGGACGACTGGACCCAACGTGGTATATTCCTGCAACAGAGGCTACAGTC
TTGAAGGGCCATCTGAGGCACACTGCACAGALAATGGAACCTGGAGCCACCCAGTCCCTCTCTGCAAA
CCAAATCCATGCCCTGTTCCTTTTGTGATTCCCGAGAATGCTCTGCTGTCTGAAAAGGAGTTTTATGT
TGATCAGAATGTGTCCATCAAATGTAGGGAAGGTTTTCTGCTGCAGGGCCACGGCATCATTACCTGCA
ACCCCGACGAGACGTGGACACAGACAAGCGCCAAATGTGAAAAAATCTCATGTGGTCCACCAGCTCAC
GTAGAAAATGCAATTGCTCGAGGCGTACATTATCAATATGGAGACATGATCACCTACTCATGTTACAG
TGGATACATGTTGGAGGGTTTCCTGAGGAGTGTTTGTTTAGAAAATGGAACATGGACATCACCTCCTA
TTTGCAGAGCTGTCTGTCGATTTCCATGTCAGAATGGGGGCATCTGCCAACGCCCAAATGCTTGTTCC
TGTCCAGAGGGCTGGATGGGGCGCCTCTGTGAAGAACCAATCTGCATTCTTCCCTGTCTGAACGGAGG
TCGCTGTGTGGCCCCTTACCAGTGTGACTGCCCGCCTGGCTGGACGGGGTCTCGCTGTCATACAGCTG
TTTGCCAGTCTCCCTGCTTAAATGGTGGAAAATGTGTAAGACCAAACCGATGTCACTGTCTTTCTTCT
TGGATGGGACATAACTGTTCCAGGAAAAGGAGGACTGGGTTTTAACCACTGCACGACCATCTGGCTCT
CCCAAAAGCAGGATCATCTCTCCTCGGTAGTGCCTGGGCATCCTGGAACTTATGCAAAGAAAGTCCAA
CATGGTGCTGGGTCTTGTTTAGTAAACTTGTTACTTGGGGTTACTTTTTTTATTTTGTGATATATTTT
GTTATTCCTTGTGACATACTTTCTTACATGTTTCCATTTTTAAATATGCCTGTATTTTCTATATAAAA
ATTATATTAAATAGATGCTGCTCTACCCTCACALAATGTACATATTCTGCTGTCTATTGGGAAAGTTC
CTGGTACACATTTTTATTCAGTTACTTAAAATGATTTTTCCATTAAAGTATATTTTGCTACTAAATAA
AAAAAA

| | | |
|---|---|---|
| NOV8o, SNP13382480 of | SEQ ID NO: 206 | MW at 390042.6kD |

| | | | |
|---|---|---|---|
| CG50646-04, Protein Sequence | SNP Pos: 3558 | 3570 aa | SNP Change: Thr to Met |

MRRICAACWGLALVSGWATFQQMSPSRNFSFRLFPETAPGAPGSIPAPPAPGDEAAGSRVERLGQAFR
VRLLRELSERLELVFLVDDSSSVGEVNFRSELMFVRKLLSDFPVVPTATRVAIVTFSSKNYVVPRVDY
ISTRRARQHKCALLLQEIPAlSYRGGGTYTKGAFQQAAQILLHARENSTKVVFLITDGYSNGGDPRPI
AASLRDSGVEIFTFGIWQGNIRELNDMASTPKEEHCYLLHSFEEFEALVALCHMLFVDLPSGSFIQDD
MVHCSYLCDEGKDCCDRMGSCKCGKHTGHFECICEKGYNGKGLQYDCTVCPSGTYKPEGSPGGISSCI
PCPDENHTSPPGSTSPEDCVCREGYFASGQTCEVVHCPALKPPENGYFIQNTCNNHFNAACGVRCHPG
FDLVGSSIILCLPNGLWSGSESYCRVRTCPHLRQPKHGHISCSTREMLYKTTCLVACDEGYPLEGSDK
LTCQGNSQWDGPEPRCVERHCSTFQMPKDVIISPHNCGKQPAKFGTICYVSCRQGFILSGVKEMLRCT
TSGWNNVGVQAAVCKDVEAPQINCPKDIEAKTLEQQDSANVTWQIPTAKDNSGEKVSVHVHPAFTPPY
LFPIGDVAIVYTATDLSGNQASCIFHIKVIDAEPPVIDWCRSPPPVQVSEKVHAASWDEPQFSDNSGA
ELVITRSHTQGDLFPQGETIVQYTATDPSGNNRTCDIHIVIKGSPCEIPFTPVNGDFICTPDNTGVNC
TLTCLEGYDFTEGSTDKYYCAYEDGVWKPTYTTEWPDCASKRFANHGFKSFEMFYKAARCDDTDLMKK
FSEAFETTLGKMVPSFCSDAEDIDCRLEENLTKKYCLEYNYDYENGFAIGPGGWGAANRLDYSFDDFL
DTVQETATSIGNAKSSRIKRSAPLSDYKIKLIFNITASVPLPDERNDTLEWENQQRLLQTLETITNKL
KRTLNKDPMYSFQLASEILIADSNSLETKKASPFCRPGSVLRGRMCVNCPLGTYYNLEHFTCESCRIG
SYQDEEGQLECKLCPSGMYTEYIHSRNISDCKAQCKQGTYSYSGLETCESCPLGTYQPKFGSRSCLSC
PENTSTVKRGAVNISACGVPCPEGKFSRSGLMPCHPCPRDYYQPNAGKAFCLACPFYGTTPFAGSRSI
TECSSFSSTFSAAEESVVPPASLGHIKKRHEISSQASHECFFNPCHNSGTCQQLGRGYVCLCPLGYTG
LKCETDIDECSPLPCLNNGVCKDLVGEFICECPSGYTGKHCELNINECQSNPCRNQATCVDELNSYSC
KCQPGFSGKRCETGMYQLSVINNLNNAVCEDQVGGFLCKCPPGFLGTRCGKNVDECLSQPCKNGATCK
DGANSFRCLCAAGFTGSHCELNINECQSNPCRNQATCVDELNSYSCKCQPGFSGKRCETEQSTGFNLD
FEVSGIYGYVMLDGMLPSLHAITCTFWMKSSDDMNYGTPISYAVDNGSDNTLLLTDYNGWVLYVNGRE
KITNCPSVNDGRWHHIAITWTSTGGAWRVYINGELSDGGTGLSIGKAIPGGGALVLGQEQDKKGEGFN
PAESFVGSISQLNLWDYVLSPQQVKSLATSCPEELSKGNVLAWPDFLSGIVGKVKIDSKSIFCSDCPR
LGGSVPHLRTASEDLKPGSKVNLFCEPGFQLVGNPVQYCLNQGQWTQPLPHCERIRCGVPPPLENGFH
SADDFYAGSTVTYQCNNGYYLLGDSRMFCTDNGSWNGVSPSCLDVDECAVGSDCSEHASCLNVDGSYI
CSCVPPYTGDGKNCAEPIKCKAPGNPENGHSSGEIYTVGAEVTFSCQEGYQLMGVTKITCLESGEWNH
LIPYCKAVSCGKPAIPENGCIEELAFTFGSKVTYRCNKGYTLAGDKESSCLANSSWSHSPPVCEPVKC
SSPENINNGKYILSGLTYLSTASYSCDTGYSLQGPSIIECTASGIWDRAPPACHLVFCGEPPAIKDAV
ITGNNFTFRNTVTYTCKEGYTLAGLDTIECLADGKWSRSDQQCLAVSCDEPPIVDHASPETAHRLFGD
IAFYYCSDGYSLADNSQLLCNAQGKWVPPEGQDMPRCIAHFCEKPPSVSYSILESVSKAKFAAGSVVS
FKCMEGFVLNTSAKIECMRGGQWNPSPMSIQCIPVRCGEPPSIMNGYASGSNYSFGAMVAYSCNKGFY
IKGEKKSTCEATGQWSSPIPTCHPVSCGEPPKVENGFLEHTTGRIFESEVRYQCNPGYKSVGSPVFVC
QANRHWHSESPLMCVPLDCGKPPPIQNGFMKGENFEVGSKVQFFCNEGYELVGDSSWTCQKSGKWNKK
SNPKCMPAKCPEPPLLENQLVLKELTTEVGVVTFSCKEGHVLQGPSVLKCLPSQQWNDSFPVCKIVLC
TPPPLISFGVPIPSSALHFGSTVKYSCVGGFFLRGNSTTLCQPDGTWSSPLPECVPVECPQPEEIPNG
IIDVQGLAYLSTALYTCKPGFELVGNTTTLCGENGHWLGGKPTCKAIECLKPKEILNGKFSYTDLHYG
QTVTYSCNRGFRLEGPSALTCLETGDWDVDAPSCNAIHCDSPQPIENGFVEGADYSYGAIIIYSCFPG
FQVAGHAMQTCEESGWSSSIPTCMPIDCGLPPHIDFGDCTKLKDDQGYFEQEDDMMEVPYVTPHPPYH
LGAVAKTWENTKESPATHSSNFLYGTMVSYTCNPGYELLGNPVLICQEDGTWNGSAPSCISIECDLPT
APENGFLRFTETSMGSAVQYSCKPGHILAGSDLRLCLENRKWSGASPRCEAISCKKPNPVMNGSIKGS
NYTYLSTLYYECDPGYVLNGTERRTCQDDKNWDEDEPICIPVDCSSPPVSANGQVRGDEYTFQKEIEY
TCNEGFLLEGARSRVCLANGSWSGATPDCVPVRCATPPQLANGVTEGLDYGFMKEVTFHCHEGYILHG
APKLTCQSDGNWDAEIPLCKPVNCGPPEDLAHGFPNGFSFIHGGHIQYQCFPGYKLHGNSSRRCLSNG
SWSGSSPSCLPCRCSTPVIEYGTVNGTDFDCGKAARIQCFKGFKLLGLSEITCEADGQWSSGFPHCEH
TSCGSLPMIPNAFISETSSWKENVITYSCRSGYVIQGSSDLICTEKGVWSQPYPVCEPLSCGSPPSVA
NAVATGEAHTYESEVKLRCLEGYTMDTDTDTFTCQKDGRWFPERISCSPKKCPLPENITHILVHGDDF
SVNRQVSVSCAEGYTFEGVNISVCQLDGTWEPPFSDESCSPVSCGKPESPEHGFVVGSKYTFESTIIY
QCEPGYELEGNRERVCQENRQWSGGVAICKETRCETPLEFLNGKADIENRTTGPNVVYSCNRGYSLEG
PSEAHCTENGTWSHPVPLCKPNPCPVPFVIPENALLSEKEFYVDQNVSIKCREGFLLQGHGIITCNPD
ETWTQTSAKCEKISCGPPAHVENAIARGVHYQYGDMITYSCYSGYMLEGFLRSVCLENGTWTSPPICR
AVCRFPCQNGGICQRPNACSCPEGWMGRLCEEPICILPCLNGGRCVAPYQCDCPPGWTGSRCHTAVCQ
SPCLNGGKCVRPNRCHCLSSWMGHNCSRKRRTGF

[0393] A ClustalW comparison of the above protein sequences yields the following sequence alignment shown in Table 8B.

TABLE 8B
Comparison of the NOV8 protein sequences.

NOV8a MRRICAACWGLALVSGWATFQQMSPSRNFSFRLFPETAPGAPGSIPAPPAPGDEAAGSRV
NOV8b --------------RPWATFQQMSPSRNFSFRLFPETAPGAPGSIPAPPAPGDEAAGSRV
NOV8c --------------RPWATFQQMSPSRNFSFRLFPETAPGAPGSIPAPPAPGDEAAGSRV
NOV8d --------------RPWATFQQMSPSRNFSFRLFPETAPGAPGSIPAPPAPGDEAAGSRV
NOV8e --------------RPWATFQQMSPSRNFSFRLFPETAPGAPGSIPAPPAPGDEAAGSRV
NOV8f ------------------------------------------------------------
NOV8g ------------------------------------------------------------
NOV8h --------------MAGAPPPASLPPCSLISDCCASNQRDSVGVGPSEPGVGYSLVVRRF
NOV8i MRRICAACWGLALVSGWATFQQMSPSRNFSFRLFPETAPGAPGSIPAPPAPGDEAAGSRV
NOV8a ERLGQAFR--VRLLRELSERLELVFLVDDSSS----------------------------
NOV8b ERLGQAFRRRVRLLRELSERLELVFLVDDSSS----------------------------
NOV8c ERLGQAFRRRVRLLRELSERLELVFLVDDSSS----------------------------
NOV8d ERLGQAFRRRVRLLRELSERLELVFLVDDSSS----------------------------
NOV8e ERLGQAFRRRVRLLRELSERLELVFLVDDSSS----------------------------
NOV8f ------------------------------------------------------------
NOV8g ------------------------------------------------------------
NOV8h LSRSEKRNIRVGVTRFSSYTLAGLDTIECLADGKWSRSDQQCLAVSCDEPPIVDHASPET
NOV8i ERLGQAFR--VRLLRELSERLELVFLVDDSSS----------------------------
NOV8a ----------------------------VGEVNFRSELMFVRKLLSDFPVVPTATRVAIV
NOV8b ----------------------------VGEVNFRSELMFVRKLLSDFPVVPTATRVAIV
NOV8c ----------------------------VGEVNFRSELMFVRKLLSDFPVVPTATRVAIV
NOV8d ----------------------------VGEVNFRSELMFVRKLLSDFPVVPTATRVAIV
NOV8e ----------------------------VGEVNFRSELMFVRKLLSDFPVVPTATRVAIV
NOV8f ------------------------------------------------------------
NOV8g ------------------------------------------------------------
NOV8h AHRLFGDIAFYYCSDGYSLADNSQLLCNAQGKWVPPEGQDMPRCIAHFCEKPPSVSYSIL
NOV8i ----------------------------VGEVNFRSELMFVRKLLSDFPVVPTATRVAIV
NOV8a TFSSKN------------------------------YVVPRVDYISTRRARQHKCALLLQ
NOV8b TFSSKN------------------------------YVVPRVDYISTPRARQHKCALLLQ
NOV8c TFSSKN------------------------------YVVPRVDYISTRPARQHKCALLLQ
NOV8d TFSSKN------------------------------YVVPRVDYISTRRARQHKCALLLQ
NOV8e TFSSKN------------------------------YVVPRADYISTRRARQHKCALLLQ
NOV8f ------------------------------------------MSIQCIPVRCGEPPSINN
NOV8g ------------------------------------------------------------
NOV8h ------------------------------------------------------------
NOV8i TFSSKN------------------------------YVVPRVDYISTRRARQHKCALLLQ
NOV8a EIPAISYRGGGTYTKGAFQQAAQILLHARENSTKVVFLITDGYSNGGDPRPIAASLRDSG
NOV8b EIPAISYRGGGTYTKGAFQQAAQILLHARENSTKVVFLITDGYSNGGDPRPIAASLRDSG
NOV8c EIPAISYRGGGTYTKGAFQQAAQILLHARENSTKVVFLITDGYSNGGDPRPIAASLRDSG
NOV8d EIPAISYRGGGTYTKGAFQQAAQILLHARENSTKVVFLITDGYSNGGDPRPIAASLRDSG
NOV8e EIPAISYRGGGTYTKGAFQQAAQILLHARENSTKVVFLITDGYSNGGDPRPIAASLRDSG
NOV8f GYASGSNYSFGAMVAYSCNKGFYIKGEKYSTCEATGQWSSPIPTCHPVSCGEPPKVENGF
NOV8g --------------------------------------------MLSSVIQIALTCFLPV
Nov8h GYASGSNYSFGAMVAYSCNKGFYIKGEKYSTCEATGQWSSPIPTCHPVSCGEPPKVENGF
NOV8i EIPAISYRGGGTYTKGAFQQAAQILLHARENSTKVVFLITDGYSNGGDPRPIAASLRDSG
NOV8a VEIFTFGIWQGNIRELNDMASTPKEEHCYLLHSFEEFEALVALCHMLFVDLPSGSFIQDD
NOV8b VEIFTFGIWQGNIRELNDMASTPKEEHCYLLHSFEEFEALAR--RALHEDLPSGSFIQDD
NOV8c VEIFTFGIWQGNIRELNDMASTPKEEHCYLLHSFEEFEALAR--RALHEDLPSGSFIQDD
NOV8d VEIFTFGIWQGNIRELNDMASTPKEEHCYLLHSFEEFEALAR--RALHEDLPSGSFIQDD
NOV8e VEIFTFGIWQGNIRELNDMASTPKEEHCYLLHSFEEFEALAR--RALHEDLPSGSFIQDD
NOV8f LEHTTGRIFESEVRYQCNPGYKSVGSPVFVCQANRHWHSESP-LMCVPLDCGKPPPIQNG
NOV8g AQHTTGRIFESEVRYQCNPGYKSVGSPVFVCQANRHWHSESP-LMCVPLDCGKPPPIQNG
NOV8h LEHTTGRIFESEVRYQCNPGYKSVGSPVFVCQANRHWHSESP-LMCVPLDCGKPPPIQNG
N0V8i VEIFTFGIWQGNIRELNDMASTPKEEHCYLLHSFEEFEALAR--RALHEDLPSGSFIQDD
NOV8a MVHCSYLCDEGKDCCDRMGSCKCGKHTGHFECICEKGYNGKG----LQYDCTVCPSGTYK
NOV8b MVHCSYLCDEGKDCCDRMGSCKCGTHTGHFECICEKGYNGKG----LQYECTACPSGTYK
NOV8c MVHCSYLCDEGKDCCDRMGSCKCGTHTDRFECICEKGYYGKG----LQYECTACPSGTYK
NOV8d MVHCSYLCDEGKDCCDRMGSCKCGTHTGHFECICEKGYYGKG----LQYECTACPSGTYK
NOV8e MVHCSYLCDEGKDCCDRNGSCKCGTHTGHFECICEKGYYGKG----LQYECTACPSGTYK
NOV8f FMKGENFEVGSKVQFFCNEGY-ELVGDSSWTCQKSGKWNKKSNPKCMPAKCPEPPLLENQ
NOV8g FMKGENFEVGSKVQFFCNEGY-ELVGDSSWTCQKSGKWNKKSNPKCMPAKCPEPPLLENQ
NOV8h FMKGENFEVGSKGQFFCNEGLXSFVGDSSWTCQKSGKWNKKSNPKCMPAKCPEPPLLENQ
NOV8i MVHCSYLCDEGKDCCDRMGSCKCGTHTGHFECICEKGYYGKG----LQYECTACPSGTYK
NOV8a PEGSPGGISSCIPCPDENHTSPPGSTSPEDCVCREGYRASGQTCEVVHCPALKPPENGYF
NOV8b PEASPGGISSCIPCPDENHTSPPGSTSPEDCVCREGYPASGQTCELVHCPALKPPENGYF
NOV8c PEGSPGGISSCIPCPDENHTSPPGSTSPEDCVCREGYRASGQTCELVHCPAWKPPENGYF
NOV8d PEGSPGGISSCIPCPDENHTSPPGSTSPEDCVCREGYRASGQTCELVHCPALKPPENGYF
NOV8e PEGSPGGISSCIPCPDENHTSPPGSTSPEDCVCREGYRASGQTCELVHCPALKPPENGYF
NOV8f LVLKELTTEVGVVTFSCKEGHVLQGPSVLKCLPSQQWNDSFPVCKIVLCTPPPLISFGVP
NOV8g LVLKELTTEVGVVTFSCKEGHVLQGPSVLKCLPSQQWNDSFPVCKIVLCTPPPLISFGVP
NOV8h LVLKELTTEVGVVTFSCKERHVLQGPSVLKCLPSQQWNDSFPVCKIVLCTPPPLISFGVP
NOV8i PEASPGGISSCIPCPDENHTSPPGSTSPEDCVCREGYRASGQTCELVHCPALKPPENGYF
NOV8a IQNTCNNHFNAACGVRCHPGFDLVGSSIILCLPNGLWSGSESYCRVRTCPHLRQPKHGHI
NOVBb IQNTCNNHFNAACGVRCHPGFDLVGSSIILCLPNGLWSGSESYCRVRTCPHLRQPKHGHI
NOV8c IQNTCNNHFNAACGVRCHPGFDLVGSSIILCLPNGLWSGSESYCRVRTCPHLRQPKHGHI
NOV8d IQNTCNNHFNAACGVRCHPGFDLVGSSIILCLPNGLWSGSESYCRVRTCPHLRQPKHGHI
NOV8e IQNTCNMHFNAACGVRCHPGFDLVGSSIILCLPNGLWSGSESYCRVRTCPHLRQPKHGHI
NOV8f IP-SSALHFGSTVKYSCVGGFFLRGNSTTLCQPDGTWSSPLPECVPVECPQPEEIPNGII
NOV8g IP-SSALHFGSTVKYSCVGGFFLRGNSTTLCQPDGTWSSPLPECVPVECPQPEETPNGII
NOV8h IP-SSALHFGSTVKYSCVGGFFLRGNSTTLCQPDGTWSSPLPECVPVECPQPEEIPNGII
NOV8i IQNTCNNEFNAACGVRCHPGFDLVGSSIILCLPNGLWSGSESYCRVRTCPHLRQPKHGHI
NOV8a SCSTREMLYKTTCLVACDEGYRLEGSDKLTCQGNSQWDGPEPRCVERHCSTFQMPKDVII
NOV8b SCSTREMLYKTTCLVACDEGYRLEGSDKLTCQGNSQWDGPEPRCVERHCSTFQMPKDVII
NOV8c SCSTREMLYKTTCLVACDEGYRLEGSDKLTCQGNSQWDGPEPRCVERHCSTFQMPKDIII
NOV8d SCSTREMLYKTTCLVACDEGYRLEGSDKLTCQGNSQWDGPEPRCVERHCSTFQMPKDVII
NOV8e SCSTREMLYKTTCLVACDEGYRLEGSDKLTCQGNSQWDGPEPRCVERHCSTFQMPKDIII
NOV8f DVQG--LAYLSTALYTCKPGFELVGNTTTLCGENGHWLGGKP---T--CKAIECLKPKEI
NOV8g DVQG--LAYLSTALYTCKPGFELVGNTTTLCGENGHWLGGKP---T--CKAIECLKPKEI
NOV8h DVQG--LAYLSTALYTCKPGFELVGNTTTLCGENGHWLGGKP---T--CKAIECLKPKEI
NOV8i SCSTREMLYKTTCLVACDEGYRLEGSDKLTCQGNSQWDGPEPRCVERHCSTFQMPKDVII
NOV8a SPHNCGKQPAKFGTICYVSCRQGFILSGVKEMLRCTTSGKWNVGVQAAVCKDVEAPQINC
NOV8b SPHNCGKQPAKFGTICYVSCRQGFILSGVKEMLRCTTSGKWNVGVQAAVCKDVEAPQINC
NOV8c SPHNCGKQPAKFGTICYVSCRQGFILSGVKEMLRCTTSGKWNVGVQAAVCKDVEAPQINC
NOV8d SPHNCGKQPAKFGTICYVSCRQGFILSGVKEMLRCTTSGKWNVGVQAAVCKDVEAPQINC
NOV8e SPHNCGKQPAKFGTICYVSCRQGFILSGVKEMLRCTTSGKWNVGVQAAVCKDVEAPQINC
NOV8f LNGKFSYTDLHYGQTVTYSCNRGFRLEGS-QCLDLFRDR---------------------
NOV8g LNGKFSYTDLHYGQTVTYSCNRGFRLEGS-QCLDLFRDR---------------------
NOV8h LNGKFSYTDLHYGQTVTYSCNRGFRLEGP-SALTCLETGDWDVDAPSCNAIHCDSPQPIE
NOV8i SPHNCGKQPAKFGTICYVSCRQGFILSGVKEMLRCTTSGKWNVGVQAAVCKDVEAPQINC
NOV8a PKDIEAKTLEQ-------------------------------------------------
NOV8b PKDIEAKTLEQ-------------------------------------------------
NOV8c PKDIEAKTLEQ-------------------------------------------------
NOV8d PKDIEAKTLEQ-------------------------------------------------
NOV8e PKDIEAKTLEQ-------------------------------------------------
NOV8f ------------------------------------------------------------
NOV8g ------------------------------------------------------------
NOV8h NGFVEGADYSYGAIIIYSCFPGFQVAGHAMQTCEESGWSSSIPTCMPIDCGLPPHIDFGD
NOV8i PKDIEAKTLEQ-------------------------------------------------
NOV8a ------------------------------------------------------------
NOV8b ------------------------------------------------------------
NOV8c ------------------------------------------------------------
NOV8d ------------------------------------------------------------
NOV8e ------------------------------------------------------------
NOV8f ------------------------------------------------------------
NOV8g ------------------------------------------------------------
NOV8h CTKLKDDQGYFEQEDDMMEVPYVTPHPPYHLGAVAKTWENTKESPATHSSNFLYGTMVSY
NOV8i ------------------------------------------------------------
NOV8a --------------------------QDSANVTWQIPTAKDN-----SGEKVSVHVHPAF
NOV8b --------------------------QDSANVTWQIPTAKDN-----SGEKVSVHVHPAF
NOV8c --------------------------QDSANVTWQIPTAKDN-----SGEKVSVHVHPAF
NOV8d --------------------------QDSANVTWQIPTAKDN-----SGEKVSVHVHPAF
NOV8e --------------------------QDSANVTWQIPTAKDN-----SGEKVSVHVHPAF
NOV8f ------------------------------------------------------------
NOV8g ------------------------------------------------------------
NOV8h TCNPGYELLGNPVLICQEDGTWNGSAPSCISIECDLPTAPENGFLRFTETSMGSAVQYSC
NOV8i --------------------------QDSANVTWQIPTAKDN-----SGEKVSVHVHPAF
NOV8a TPPYLFPIGDVAIVYTATDLSGN-------------------------------------
NOV8b TPPYLFPIGDVAIVYTATDLSGN-------------------------------------
NOV8c TPPYLFPIGDVAIVYTATDLSGN-------------------------------------
NOV8d TPPYLFPIGDVAIVYTATDLSGN-------------------------------------
NOV8e TPPYLFPIGDVAIVYTATDLSGN-------------------------------------
NOV8f ------------------------------------------------------------
NOV8g ------------------------------------------------------------
NOV8h KPGHILAGSDLRLCLENRXWSGASPRCEAISCKKPNPVMNGSIKGSNYTYLSTLYYECDP
NOV8i TPPYLFPIGDVAIVYTATDLSGN-------------------------------------
NOV8a --------QASCIFHIKVIDAEPPVIDWCRSPPPVQVSEKVHAASWD-------------
NOV8b --------QASCIFHIKVIDAEPPVIDWCRSPPPVQVSEKVHAASWD-------------
NOV8c --------QASCIFHIKVIDAEPPVIDWCRSPPPVQVSEKVHAASWD-------------
NOV8d --------QASCIFHIKVIDAEPPVIDWCRSPPPVQVSEKVHAASWD-------------
NOV8e --------QASCIFHIKVIDAEPPVIDWCRSPPPVQVSEKVHAASWD-------------
NOV8f ------------------------------------------------------------
NOV8g ------------------------------------------------------------
NOv8h GYVLNGTERRTCQDDKNWDEDEPICIPVDCSSPPVSANGQVRGDEYTFQKEIEYTCNEGF
NOV8i --------QASCIFHIKVIDAEPPVIDWCRSPPPVQVSEKVHAASWD-------------
NOV8a ------------------------------------------------------------
NOV8b ------------------------------------------------------------
NOV8c ------------------------------------------------------------
NOV8d ------------------------------------------------------------
NOV8e ------------------------------------------------------------
NOV8f ------------------------------------------------------------
NOV8g ------------------------------------------------------------
NOV8h LLEGARSRVCLANGSWSGATPDCVPVRCATPPQLANGVTEGLDYGFMKEVTFHCHEGYIL
NOV8i ------------------------------------------------------------
NOV8a ------------------------------------------------------------
NOV8b ------------------------------------------------------------
NOV8c ------------------------------------------------------------
NOV8d ------------------------------------------------------------
NOV8e ------------------------------------------------------------
NOV8f ------------------------------------------------------------
NOV8g ------------------------------------------------------------
NOV8h HGAPKLTCQSDGNWDAEIPLCKPVNCGPPEDLAHGFPNGFSFIHGGHIQYQCFPGYKLHG
NOV8i ------------------------------------------------------------
NOV8a ------------------------------------------------------------
NOV8b ------------------------------------------------------------
NOV8c ------------------------------------------------------------
NOV8d ------------------------------------------------------------
NOV8e ------------------------------------------------------------
NOV8f ------------------------------------------------------------
NOV8g ------------------------------------------------------------
NOV8h NSSRRCLSNGSWSGSSPSCLPCRCSTPVIEYGTVNGTDFDCGKAARIQCFKGFKLLGLSE
NOV8i ------------------------------------------------------------
NOV8a ------------------------------------------------------------
NOV8b ------------------------------------------------------------
NOV8c ------------------------------------------------------------
NOV8d ------------------------------------------------------------
NOV8e ------------------------------------------------------------
NOV8f ------------------------------------------------------------
NOV8g ------------------------------------------------------------
NOV8h ITCEADGQWSSGFPHCEHTSCGSLPMIPNAFISETSSWKENVITYSCRSGYVIQGSSDLI
NOV8i ------------------------------------------------------------
NOV8a ------------------------------------------------------------
NOV8b ------------------------------------------------------------
NOV8c ------------------------------------------------------------
NOV8d ------------------------------------------------------------
NOV8e ------------------------------------------------------------
NOV8f ------------------------------------------------------------
NOV8g ------------------------------------------------------------
NOV8h CTEKGVWSQPYPVCEPLSCGSPPSVANAVATGEAHTYESEVKLRCLEGYTMDTDTDTFTC
NOV8i ------------------------------------------------------------
NOV8a ------------------------------------------------------------
NOV8b ------------------------------------------------------------
NOV8c ------------------------------------------------------------
NOV8d ------------------------------------------------------------
NOV8e ------------------------------------------------------------
NOV8f ------------------------------------------------------------
NOV8g ------------------------------------------------------------
NOV8h QKDGRWFPERISCSPKKCPLPENITHILVHGDDFSVNRQVSVSCAEGYTFEGVNISVCQL
NOV8i ------------------------------------------------------------
NOV8a ----EPQFSDNSGAELVITRSHTQGDLFPQGE---------------TIVQYTATDPSGN
NOV8b ----EPQFSDNSGAELVITRSHTQGDLFPQGE---------------TIVQYTATDPSGN
NOV8c ----EPQFSDNSGAELVITRSHTQGDLFPQGE---------------TIVQYTATDPSGN
NOV8d ----EPQFSDNSGAELVITRSHTQGDLFPQGE---------------TIVQYTATDPSGN
NOV8e ----EPQFSDNSGAELVITRSHTQGELFPQGE---------------TIVQYTATDPSGN
NOV8f ------------------------------------------------------------
NOV8g ------------------------------------------------------------
NOV8h DGTWEPPFSDESCSPVSCGKPESPEHGFVVGSKYTFESTIIYQCEPGYELENLAVNPSGP
NOV8i ----EPQFSDNSGAELVITRSHTQGDLFPQGE---------------TIVQYTATDPSGN
NOV8a ---------------------------------------NRTCDIHIVIKGSPCEIPFTP
NOV8b ---------------------------------------NRTCDIHIVILE---------
NOV8c ---------------------------------------NRTCDIHIVILE---------
NOV8d ---------------------------------------NRTCDIHIVILE---------
NOV8e ---------------------------------------NRTCDIHIVILE---------
NOV8f ------------------------------------------------------------
NOV8g ------------------------------------------------------------
NOV8h GLFLVDRTLSCRSELARGPIQTLFAWVSAAEGAEQRTLVNRKCCCLIIPLEVLSQRNTRP
NOV8i ---------------------------------------NRICDIHIVMKGSPCEIPFTP
NOV8a VNGDFICTPDNTGVNCTLTCLEGYDFTEGSTDKYYCAYEDGVWKPTYTTEWPDCASKRFA
NOV8b ------------------------------------------------------------
NOV8c ------------------------------------------------------------
NOV8d ------------------------------------------------------------
NOV8e ------------------------------------------------------------
NOV8f ------------------------------------------------------------
NOV8g ------------------------------------------------------------
NOV8h CEVSVRPYWGGNRERVCQENRQWSGGVAICKETRCETPLEFLNGKADIENRTTGPNVVYS
NOV8i VNGDFICTPDNTGVNCTLTCLEGYDFTEGSTDKYYCAYEDGVWKPTYTTEWPDCASKRFA
NOV8a NHGFKSFEMFYKAARCDDTDLMKKFSEAFETTLGKMVPSFCSDAEDIDCRLEENLTKKYC
NOV8b ------------------------------------------------------------
NOV8c ------------------------------------------------------------
NOV8d ------------------------------------------------------------
NOV8e ------------------------------------------------------------
NOV8f ------------------------------------------------------------
NOV8g ------------------------------------------------------------
NOV8h CNRGYSLEGPSEAHCTENGTWSHPVPLCKPNPCPVPFVIPENALLSEKEFYVDQNVSIKC
NOV8i NHGFKSFEMFYKAARCDDSDLMKKFSEAFETTLGKMVPSFCSDAEDIDCRLEENLTKKYC
NOV8a LEYNYDYENGFAIGPGGWGAANRLDYSYDDFLDTVQETATSIGNAKSSRIKRSAPLSDYK
NOV8b ------------------------------------------------------------
NOV8c ------------------------------------------------------------
NOV8d ------------------------------------------------------------
NOV8e ------------------------------------------------------------
NOV8f ------------------------------------------------------------
NOV8g ------------------------------------------------------------
NOV8h REGFLLQGHGIITCNPDETWTQTSAKCERRYTQQPKSLNFQLAAYCSIRMFILRGGVQDG
NOV8i LEYNYDYENGFAIGPGGWGAANRLDYSYDDFLDTVQETATSIGNAKSSRIKRSAPLSDYK
NOV8a IKLIFNITASVPLPDERNDTLEWENQQRLLQTLETITNKLKRTLNKDPMYSFQLASEILI
NOV8b ------------------------------------------------------------
NOV8c ------------------------------------------------------------
NOV8d ------------------------------------------------------------
NOV8e ------------------------------------------------------------
NOV8f ------------------------------------------------------------
NOV8g ------------------------------------------------------------
NOV8h QLETAVAGASHREEQKQKREKARWYNGPPGSHMGQAELPPPAKGGGPPCGNFSNSSQGFM
NOV8i IKLIFNITASVPLPDERNDTLEWENQQRLLQTLETITNKLKRTLNKDPMYSFQLASEILI
NOV8a ADSNSLETKKASPFCRPGSVLRGRMCVNCPLGTYYNLEHFTCESCRIGSYQDEEGQLECK
NOV8b ------------------------------------------------------------
NOV8c ------------------------------------------------------------
NOV8d ------------------------------------------------------------
NOV8e ------------------------------------------------------------
NOV8f ------------------------------------------------------------
NOV8g ------------------------------------------------------------
NOV8h NRPLISLRWSPWGSMWPWSPQISRLSPSPAGSEESRQAGLVGFPTAQFTdSAKGQLERFV
NOV8i ADSNSLETKKASPFCRPGSVLRGRMCVNCPLGTYYNLEHFTCESCRIGSYQDEEGQLECK
NOV8a LCPSGMYTEYIHSRNISDCKAQCKQGTYSYSGLETCESCPLGTYQPKFGSRSCLSCPENT
NOV8b ------------------------------------------------------------
NOV8c ------------------------------------------------------------
NOV8d ------------------------------------------------------------
NOV8e ------------------------------------------------------------
NOV8f ------------------------------------------------------------
NOV8g ------------------------------------------------------------
NOV8h KRVPDPMPPDWDETPPQQGSRMRPPHNRGHQTPYTRVFLLASGQCPSGTELPEERAGSHL
NOV8i LCPSGMYTEYIHSRNISDCKAQCKQGTYSYSGLETCESCPLGTVQPKFGSRSCLSCPENT
NOV8a STVKRGAVNISACGVPCPEGKFSRSGLMPCHPCPRDYYQPNAGKAFCLACPFYGTTPFAG
NOV8b ------------------------------------------------------------
NOV8c ------------------------------------------------------------
NOV8d ------------------------------------------------------------
NOV8e ------------------------------------------------------------
NOV8f ------------------------------------------------------------
NOV8g ------------------------------------------------------------
NOV8h CCSAASAGKAQNWAEARIDELKEVGFRKWVIMKFAELKEHVLNQCKDAKNQDKTLQDPLT
NOV8i STVKRGAVNISACGVPCPEGKFSRSGLMPCHPCPRDYYQPNAGKAFCLACPFYGTTPFAG
NOV8a SRSITECSSFSSTFSAAEESVVPPASLGHIKKRHEISSQASHECFFNPCHNSGTCQQLGR
NOV8b ------------------------------------------------------------
NOV8c ------------------------------------------------------------
NOV8d ------------------------------------------------------------
NOV8e ------------------------------------------------------------
NOV8f ------------------------------------------------------------
NOV8g ------------------------------------------------------------
NOV8h RITSLERNVNDLMELKNTTRELHNATTKQGQHSSSGNPENPSKILHEKINPKTHNPQVLQ
NOV8i SRSITECSSFSSTFSAAEESVVPPASLGHIKKRHEISSQASHECFFNPCHNSGTCQQLGR
NOV8a GYVCLCPLGYTGLKCETDIDECSPLPCLNNGVCKDLVGEFICECPSGYTGKHCELNINEC
NOV8b ------------------------------------------------------------
NOV8c ------------------------------------------------------------
NOV8d ------------------------------------------------------------
NOV8e ------------------------------------------------------------
NOV8f ------------------------------------------------------------
NOV8g ------------------------------------------------------------
NOV8h EISCGPPAHVENAIARGVHYQYGDMITYSCYSGYMLEGFLRSVCLENGTWTSPPICRAVC
NOV8i GYVCLCPLGYTGLKCETDIDECSPLPCLNNGVCKDLVGEFICECPSGYTGKHCELNINEC
NOV8a QSNPCRNQATCVDELNSYSCKCQPGFSGKRCETGMYQLSVINNLNNAVCEDQVGGFLCKC
NOV8b ------------------------------------------------------------
NOV8c ------------------------------------------------------------
NOV8d ------------------------------------------------------------
NOV8e ------------------------------------------------------------
NOV8f ------------------------------------------------------------
NOV8g ------------------------------------------------------------
NOV8h RFPCQNGGICQRPNACSCPEGWMGRLCEEPICILPCLNGGRCVAPYQCDCPPGWTGSRCH
Nov8i QSNPCRNQATCVDELNSYSCKCQPGFSGKRCETGMYQLSVINNLNNAVCEDQVGGFLCKC
NOV8a PPGFLGTRCGKNVDECLSQPCKNGATCKDGANSFRCLCAAGFTGSHCELNINECQSNPCR
NOV8b ------------------------------------------------------------
NOV8c ------------------------------------------------------------
NOV8d ------------------------------------------------------------
NOV8e ------------------------------------------------------------
NOV8f ------------------------------------------------------------
NOV8g ------------------------------------------------------------
NOV8h TGRPLSWFVFLVAQAHETPEDIEECDLDSEVVAK--------------------------
NOV8i PPGFLGTRCGKNVDECLSQPCKNGATCKDGANSFRCLCAAGFTGSHCELNINECQSNPCR
NOV8a NQATCVDELNSYSCKCQPGFSGKRCETEQSTGFNLDFEVSGIYGYVMLDGMLPSLHALTC
NOV8b ------------------------------------------------------------
NOV8c ------------------------------------------------------------
NOV8d ------------------------------------------------------------
NOV8e ------------------------------------------------------------
NOV8f ------------------------------------------------------------
NOV8g ------------------------------------------------------------
NOV8h ------------------------------------------------------------
NOV8i NQATCVDELNSYSCKCQPGFSGKRCETEQSTGFNLDFEVSGIYGYVMLDGMLPSLHALTC
NOV8a TFWMKSSDDMNYGTPISYAVDNGSDNTLLLTDYNGWVLYVNGREKITNCPSVNDGRWHHI
NOV8b ------------------------------------------------------------
NOV8c ------------------------------------------------------------
NOV8d ------------------------------------------------------------
NOV8e ------------------------------------------------------------
NOV8f ------------------------------------------------------------
NOV8g ------------------------------------------------------------
NOV8h ------------------------------------------------------------
NOV8i TFWMKSSDDMNYGTPISYAVDNGSDNTLLLTDYNGWVLYVNGREKITNCPSVNDGRWHHI
NOV8a AITWTSTGGAWRVYINGELSDGGTGLSIGKAIPGGGALVLGQEQDKKGEGFNPAESFVGS
NOV8b ------------------------------------------------------------
NOV8c ------------------------------------------------------------
NOV8d ------------------------------------------------------------
NOV8e ------------------------------------------------------------
NOV8f ------------------------------------------------------------
NOV8g ------------------------------------------------------------
NOV8h ------------------------------------------------------------
NOV8i AITWTSTGGAWRVYINGELSDGGTGLSIGKAIPGGGALVLGQEQDKKGEGFNPAESFVGS
NOV8a ISQLNLWDYVLSPQQVKSLATSCPEELSKGNVLAWPDFLSGIVGKVKIDSKSIFCSDCPR
NOV8b ------------------------------------------------------------
NOV8c ------------------------------------------------------------
NOV8d ------------------------------------------------------------
NOV8e ------------------------------------------------------------
NOV8f ------------------------------------------------------------
NOV8g ------------------------------------------------------------
NOV8h ------------------------------------------------------------
NOV8i ISQLNLWDYVLSPQQVKSIATSCPEELSKGNVLAWPDFLSGIVGKVKIDSKSIFCSDCPR
NOV8a LGGSVPHLRTASEDLKPGSKVNLFCEPGFQLVGNPVQYCLNQGQWTQPLPHCERIRCGVP
NOV8b ------------------------------------------------------------
NOV8c ------------------------------------------------------------
NOV8d ------------------------------------------------------------
NOV8e ------------------------------------------------------------
NOV8f ------------------------------------------------------------
NOV8g ------------------------------------------------------------
NOV8h ------------------------------------------------------------
NOV8i LGGSVPHLRTASEDLKPGSKVNLFCEPGFQLVGNPVQYCLNQGQWTQPLPHCERIRCGVP
NOV8a PPLENGFHSADDFYAGSTVTYQCNNGYYLLGDSPMFCTDNGSWNGVSPSCLDVDECAVGS
NOV8b ------------------------------------------------------------
NOV8c ------------------------------------------------------------
NOV8d ------------------------------------------------------------
NOV8e ------------------------------------------------------------
NOV8f ------------------------------------------------------------
NOV8g ------------------------------------------------------------
NOV8h ------------------------------------------------------------
NOV8i PPLENGFHSADDFYAGSTVTYQCNNGYYLLGDSRMFCTDNGSWNGVSPSCLDVDECAVGS
NOV8a DCSEHASCLNVDGSYICSCVPPYTGDGKNCAEPIKCKAPGNPENGHSSGEIYTVGAEVTF
NOV8b ------------------------------------------------------------
NOV8c ------------------------------------------------------------
NOV8d ------------------------------------------------------------
NOV8e ------------------------------------------------------------
NOV8f ------------------------------------------------------------
NOV8g ------------------------------------------------------------
NOV8h ------------------------------------------------------------
NOV8i DCSEHASCLNVDGSYICSCVPPYTGDGKNCAEPIKCKAPGNPENGHSSGEIYTVGAEVTF
NOV8a SCQEGYQLMGVTKITCLESGEWNHLIPYCKAVSCGKPAIPENGCIEELAFTFGSKVTYRC
NOV8b ------------------------------------------------------------
NOV8c ------------------------------------------------------------
NOV8d ------------------------------------------------------------
NOV8e ------------------------------------------------------------
NOV8f ------------------------------------------------------------
NOV8g ------------------------------------------------------------
NOV8h ------------------------------------------------------------
NOV8i SCQEGYQLMGVTKITCLESGEWNHLIPYCKAVSCGKPATPENGCIEELAFTFGSKVTYRC
NOV8a NKGYTLAGDKESSCLANSSWSHSPPVCEPVKCSSPENINNGKYILSGLTYLSTASYSCDT
NOV8b ------------------------------------------------------------
NOV8c ------------------------------------------------------------
NOV8d ------------------------------------------------------------
NOV8e ------------------------------------------------------------
NOV8f ------------------------------------------------------------
NOV8g ------------------------------------------------------------
NOV8h ------------------------------------------------------------
NOV8i NKGYTLAGDKESSCLANSSWSHSPPVCEPVKCSSPENINNGKYILSGLTYLSTASYSCDT
NOV8a GYSLQGPSIIECTASGIWDRAPPACHLVFCGEPPAIKDAVITGNNFTFRNTVTYTCKEGY
NOV8b ------------------------------------------------------------
NOV8c ------------------------------------------------------------
NOV8d ------------------------------------------------------------
NOV8e ------------------------------------------------------------
NOV8f ------------------------------------------------------------
NOV8g ------------------------------------------------------------
NOV8h ------------------------------------------------------------
NOV8i GYSLQGPSIIECTASGIWDRAPPACHLVFCGEPPAIKDAVITGNNFTFRNTVTYTCKEGY
NOV8a TLAGLDTIECLADGKWSRSDQQCLAVSCDEPPIVDHASPETAHRLFGDIAFYYCSDGYSL
NOV8b ------------------------------------------------------------
NOV8c ------------------------------------------------------------
NOV8d ------------------------------------------------------------
NOV8e ------------------------------------------------------------
NOV8f ------------------------------------------------------------
NOV8g ------------------------------------------------------------
NOV8h ------------------------------------------------------------
NOV8i TLAGLDTIECLADGKWSRSDQQCLAVSCDEPPIVDHASPETAHRLFGDIAFYYCSDGYSL
NOV8a ADNSQLLCNAQGKWVPPEGQDMPRCIAHFCEKPPSVSYSILESVSKAKFAAGSVVSFKCM
NOV8b ------------------------------------------------------------
NOV8c ------------------------------------------------------------
NOV8d ------------------------------------------------------------
NOV8e ------------------------------------------------------------
NOV8f ------------------------------------------------------------
NOV8g ------------------------------------------------------------
NOV8h ------------------------------------------------------------
NOV8i ADNSQLLCNAQGKWVPPEGQDMPRCIAHFCEKPPSVSYSILESVSKAKFAAGSVVSFKCM
NOV8a EGFVLNTSAKIECMRGGQWNPSPMSIQCIPVRCGEPPSIMNGYASGSNYSFGAMVAYSCN
NOV8b ------------------------------------------------------------
NOV8c ------------------------------------------------------------
NOV8d ------------------------------------------------------------
NOV8e ------------------------------------------------------------
NOV8f ------------------------------------------------------------
NOV8g ------------------------------------------------------------
NOV8h ------------------------------------------------------------
NOV8i EGFVLNTSAKIECMRGGQWNPSPMSIQCIPVRCGEPPSIMNGYASGSNYSFGAMVAYSCN
NOV8a KGFYIKGEKKSTCEATGQWSSPIPTCHPVSCGEPPKVENGFLEHTTGRIFESEVRYQCNP
NOV8b ------------------------------------------------------------
NOV8c ------------------------------------------------------------
NOV8d ------------------------------------------------------------
NOV8e ------------------------------------------------------------
NOV8f ------------------------------------------------------------
NOV8g ------------------------------------------------------------
NOV8h ------------------------------------------------------------
NOV8i KGFYIKGEKKSTCEATGQWSSPIPTCHPVSCGEPPKVENGFLEHTTGRIFESEVRYQCNP
NOV8a GYKSVGSPVFVCQANRHWHSESPLMCVPLDCGKPPPIQNGFMKGENFEVGSKVQFFCNEG
NOV8b ------------------------------------------------------------
NOV8c ------------------------------------------------------------
NOV8d ------------------------------------------------------------
NOV8e ------------------------------------------------------------
NOV8f ------------------------------------------------------------
NOV8g ------------------------------------------------------------
NOV8h ------------------------------------------------------------
NOV8i GYKSVGSPVFVCQANRHWHSESPLMCVPLDCGKPPPIQNGFMKGENFEVGSKVQFFCNEG
NOV8a YELVGDSSWTCQKSGKWNKKSNPKCMPAKCPEPPLLENQLVLKELTTEVGVVTFSCKEGH
NOV8b ------------------------------------------------------------
NOV8c ------------------------------------------------------------
NOV8d ------------------------------------------------------------
NOV8e ------------------------------------------------------------
NOV8f ------------------------------------------------------------
NOV8g ------------------------------------------------------------
NOV8h ------------------------------------------------------------
NOV8i YELVGDSSWTCQKSGKWNKKSNPKCMPAKCPEPPLLENQLVLKELTTEVGVVTFSCKEGH
NOV8a VLQGPSVLKCLPSQQWNDSFPVCKIVLCTPPPLISFGVPIPSSALHFGSTVKYSCVGGFF
NOV8b ------------------------------------------------------------
NOV8c ------------------------------------------------------------
NOV8d ------------------------------------------------------------
NOV8e ------------------------------------------------------------
NOV8f ------------------------------------------------------------
NOV8g ------------------------------------------------------------
NOV8h ------------------------------------------------------------
NOV8i VLQGPSVLKCLPSQQWNDSFPVCKIVLCTPPPLISFGVPIPSSALHFGSTVKYSCVGGFF
NOV8a LRGNSTTLCQPDGTWSSPLPECVPVECPQPEEIPNGIIDVQGLAYLSTALYTCKPGFELV
NOV8b ------------------------------------------------------------
NOV8c ------------------------------------------------------------
NOV8d ------------------------------------------------------------
NOV8e ------------------------------------------------------------
NOV8f ------------------------------------------------------------
NOV8g ------------------------------------------------------------
NOV8h ------------------------------------------------------------
NOV8i LRGNSTTLCQPDGTWSSPLPECVPVECPQPEEIPNGIIDVQGLAYLSTALYTCKPGFELV
NOV8a GNTTTLCGENGHWLGGKPTCKAIECLKPKEILNGKFSYTDLHYGQTVTYSCNRGFRLEGP
NOV8b ------------------------------------------------------------
NOV8c ------------------------------------------------------------
NOV8d ------------------------------------------------------------
NOV8e ------------------------------------------------------------
NOV8f ------------------------------------------------------------
NOV8g ------------------------------------------------------------
NOV8h ------------------------------------------------------------
NOV8i GNTTTLCGENGHWLGGKPTCKAIECLKPKEILNGKFSYTDLHYGQTVTYSCNRGFRLEGP
NOV8a SALTCLETGDWDVDAPSCNAIHCDSPQPIENGFVEGADYSYGAIIIYSCFPGFQVAGHAM
NOV8b ------------------------------------------------------------
NOV8c ------------------------------------------------------------
NOV8d ------------------------------------------------------------
NOV8e ------------------------------------------------------------
NOV8f ------------------------------------------------------------
NOV8g ------------------------------------------------------------
NOV8h ------------------------------------------------------------
NOV8i SALTCLETGDWDVDAPSCNAIHCDSPQPIENGFVEGADYSYGAIIIYSCFPGFQVAGHAM
NOV8a QTCEESGWSSSIPTCMPIDCGLPPHIDFGDCTKLKDDQGYFEQEDDMMEVPYVTPHPPYH
NOV8b ------------------------------------------------------------
NOV8c ------------------------------------------------------------
NOV8d ------------------------------------------------------------
NOV8e ------------------------------------------------------------
NOV8f ------------------------------------------------------------
NOV8g ------------------------------------------------------------
NOV8h ------------------------------------------------------------
NOV8i QTCEESGWSSSIPTCMPIDCGLPPHIDFGDCTKLKDDQGYFEQEDDMMEVPYVTPHPPYH
NOV8a LGAVAKTWENTKESPATHSSNFLYGTMVSYTCNPGYELLGNPVLICQEDGTWNGSAPSCI
NOV8b ------------------------------------------------------------
NOV8c ------------------------------------------------------------
NOV8d ------------------------------------------------------------
NOV8e ------------------------------------------------------------
NOV8f ------------------------------------------------------------
NOV8g ------------------------------------------------------------
NOV8h ------------------------------------------------------------
NOV8i LGAVAKTWENTKESPATHSSNFLYGTMVSYTCNPGYELLGNPVLICQEDGTWNGSAPSCI
NOV8a SIECDLPTAPENGFLRFTETSMGSAVQYSCKPGHILAGSDLRLCLENRKWSGASPRCEAI
NOV8b ------------------------------------------------------------
NOV8c ------------------------------------------------------------
NOV8d ------------------------------------------------------------
NOV8e ------------------------------------------------------------
NOV8f ------------------------------------------------------------
NOV8g ------------------------------------------------------------
NOV8h ------------------------------------------------------------
NOV8i SIECDLPTAPENGFLRFTETSMGSAVQYSCKPGHILAGSDLRLCLENRKWSGASPRCEAI
NOV8a SCKKPNPVNNGSIKGSNYTYLSTLYYECDPGYVLNGTERRTCQDDKNWDEDEPICIPVDC
NOV8b ------------------------------------------------------------
NOV8c ------------------------------------------------------------
NOV8d ------------------------------------------------------------
NOV8e ------------------------------------------------------------
NOV8f ------------------------------------------------------------
NOV8g ------------------------------------------------------------
NOV8h ------------------------------------------------------------
NOV8i SCKKPNPVMNGSIKGSNYTYLSTLYYECDPGYVLNGTERRTCQDDKNWDEDEPICIPVDC
NOV8a SSPPVSANGQVRGDEYTFQKEIEYTCNEGFLLEGARSRVCLANGSWSGATPDCVPVRCAT
NOV8b ------------------------------------------------------------
NOV8c ------------------------------------------------------------
NOV8d ------------------------------------------------------------
NOV8e ------------------------------------------------------------
NOV8f ------------------------------------------------------------
NOV8g ------------------------------------------------------------
NOV8h ------------------------------------------------------------
NOV8i SSPPVSANGQVRGDEYTFQKEIEYTCNEGFLLEGARSRVCLANGSWSGATPDCVPVRCAT
NOV8a PPQLANGVTEGLDYGFMKEVTFHCHEGYILHGAPKLTCQSDGNWDAEIPLCKPVNCGPPE
NOV8b ------------------------------------------------------------
NOV8c ------------------------------------------------------------
NOV8d ------------------------------------------------------------
NOV8e ------------------------------------------------------------
NOV8f ------------------------------------------------------------
NOV8g ------------------------------------------------------------
NOV8h ------------------------------------------------------------
NOV8i PPQLANGVTEGLDYGFMKEVTFHCHEGYILHGAPKLTCQSDGNWDAEIPLCKPVNCGPPE
NOV8a DLAHGFPNGFSFIHGGHIQYQCFPGYKLHGNSSRRCLSNGSWSGSSPSCLPCRCSTPVIE
NOV8b ------------------------------------------------------------
NOV8c ------------------------------------------------------------
NOV8d ------------------------------------------------------------
NOV8e ------------------------------------------------------------
NOV8f ------------------------------------------------------------
NOV8g ------------------------------------------------------------
NOV8h ------------------------------------------------------------
NOV8i DLAHGFPNGFSFIHGGHIQYQCFPGYKLHGNSSRRCLSNGSWSGSSPSCLPCRCSTPVIE
NOV8a YGTVNGTDFDCGKAARIQCFKGFKLLGLSEITCEADGQWSSGFPHCEHTSCGSLPMIPNA
NOV8b ------------------------------------------------------------
NOV8c ------------------------------------------------------------
NOV8d ------------------------------------------------------------
NOV8e ------------------------------------------------------------
NOV8f ------------------------------------------------------------
NOV8g ------------------------------------------------------------
NOV8h ------------------------------------------------------------
NOV8i YGTVNGTDFDCGKAARIQCFKGFKLLGLSEITCEADGQWSSGFPHCEHTSCGSLPMIPNA
NOV8a FISETSSWKENVITYSCRSGYVIQGSSDLICTEKGVWSQPYPVCEPLSCGSPPSVANAVA
NOV8b ------------------------------------------------------------
NOV8c ------------------------------------------------------------
NOV8d ------------------------------------------------------------
NOV8e ------------------------------------------------------------
NOV8f ------------------------------------------------------------
NOV8g ------------------------------------------------------------
NOV8h ------------------------------------------------------------
NOV8i FISETSSWKENVITYSCRSGYVIQGSSDLICTEKGVWSQPYPVCEPLSCGSPPSVANAVA
NOV8a TGEAHTYESEVKLRCLEGYTMDTDTDTFTCQKDGRWFPERISCSPKKCPLPENITHILVH
NOV8b ------------------------------------------------------------
NOV8c ------------------------------------------------------------
NOV8d ------------------------------------------------------------
NOV8e ------------------------------------------------------------
NOV8f ------------------------------------------------------------
NOV8g ------------------------------------------------------------
NOV8h ------------------------------------------------------------
NOV8i TGEAHTYESEVKLRCLEGYTMDTDTDTFTCQKDGRWFPERISCSPKKCPLPENITHILVH
NOV8a GDDFSVNRQVSVSCAEGYTFEGVNISVCQLDGTWEPPFSDESCSPVSCGKPESPEHGFVV
NOV8b ------------------------------------------------------------
NOV8c ------------------------------------------------------------
NOV8d ------------------------------------------------------------
NOV8e ------------------------------------------------------------
NOV8f ------------------------------------------------------------
NOV8g ------------------------------------------------------------
NOV8h ------------------------------------------------------------
NOV8i GDDFSVNRQVSVSCAEGYTFEGVNISVCQLDGTWEPPFSDESCSPVSCGKPESPEHGFVV
NOV8a GSKYTFESTIIYQCEPGYELEGNRERVCQENRQWSGGVAICKETRCETPLEFLNGKADIE
NOV8b ------------------------------------------------------------
NOV8c ------------------------------------------------------------
NOV8d ------------------------------------------------------------
NOV8e ------------------------------------------------------------
NOV8f ------------------------------------------------------------
NOV8g ------------------------------------------------------------
NOV8h ------------------------------------------------------------
NOV8i GSKYTFESTIIYQCEPGYELEGNRERVCQENRQWSGGVAICKETRCETPLEFLNGKADIE
NOV8a NRTTGPNVVYSCNRGYSLEGPSEAHCTENGTWSHPVPLCKPNPCPVPFVIPENALLSEKE
NOV8b ------------------------------------------------------------
NOV8c ------------------------------------------------------------
NOV8d ------------------------------------------------------------
NOV8e ------------------------------------------------------------
NOV8f ------------------------------------------------------------
NOV8g ------------------------------------------------------------
NOV8h ------------------------------------------------------------
NOV8i NRTTGPNVVYSCNRGYSLEGPSEAHCTENGTWSHPVPLCKPNPCPVPFVIPENALLSEKE
NOV8a FYVDQNVSIKCREGFLLQGHGIITCNPDETWTQTSAKCEKISCGPPAHVENATARGVHYQ
NOV8b ------------------------------------------------------------
NOV8c ------------------------------------------------------------
NOV8d ------------------------------------------------------------
NOV8e ------------------------------------------------------------
NOV8f ------------------------------------------------------------
NOV8g ------------------------------------------------------------
NOV8h ------------------------------------------------------------
NOV8i FYVDQNVSIKCREGFLLQGHGIITCNPDETWTQTSAKCEKISCGPPAHVENAIARGVHYQ
NOV8a YGDMITYSCYSGYMLEGFLRSVCLENGTWTSPPICRAVCRFPCQNGGICQRPNACSCPEG
NOV8b ------------------------------------------------------------
NOV8c ------------------------------------------------------------
NOV8d ------------------------------------------------------------
NOV8e ------------------------------------------------------------
NOV8f ------------------------------------------------------------
NOV8g ------------------------------------------------------------
NOV8h ------------------------------------------------------------
NOV8i YGDMITYSCYSGYMLEGFLRSVCLENGTWTSPPICRAVCRFPCQNGGICQRPNACSCPEG
NOV8a WMGRLCEEPICILPCLNGGRCVAPYQCDCPPGWTGSRCHTAVCQSPCLNGGKCVRPNRCH
NOV8b ------------------------------------------------------------
NOV8c ------------------------------------------------------------
NOV8d ------------------------------------------------------------
NOV8e ------------------------------------------------------------
NOV8f ------------------------------------------------------------
NOV8g ------------------------------------------------------------
NOV8h ------------------------------------------------------------
NOV8i WMGRLCEEPICILPCLNGGRCVAPYQCDCPPGWTGSRCHTAVCQSPCLNGGKCVRPNRCH
NOV8a CLSSWTGHNCSRKRRTGF
NOV8b ------------------
NOV8c ------------------
NOV8d ------------------
NOV8e ------------------
NOV8f ------------------
NOV8g ------------------
NOV8h ------------------
NOV8i CLSSWTGHNCSRKRRTGF
NOV8a (SEQ ID NO: 178)
NOV8b (SEQ ID NO: 180)
NOV8c (SEQ ID NO: 182)
NOV8d (SEQ ID NO: 184)
NOV8e (SEQ ID NO: 186)
NOV8f (SEQ ID NO: 188)
NOV8g (SEQ ID NO: 190)
NOV8h (SEQ ID NO: 192)
NOV8i (SEQ ID NO: 194)

[0394] Further analysis of the NOV8a protein yielded the following properties shown in Table 8C.

TABLE 8C
Protein Sequence Properties NOV8a

| | |
|---|---|
| SignalP analysis: | Cleavage site between residues 17 and 18 |
| PSORT II analysis: | |

| PSG: | a new signal peptide prediction method | |
|---|---|---|
| | N-region: | length 3; pos. chg 2; neg. chg 0 |
| | H-region: | length 23; peak value 8.53 |
| | PSG score: | 4.12 |

| | |
|---|---|
| GvH: | von Heijne's method for signal seq recognition |
| | GvH score (threshold: −2.1): −2.66 |
| | possible cleavage site: between 16 and 17 |

>>> Seems to have no N-terminal signal peptide

| ALOM: | Klein et al's method for TM region allocation | |
|---|---|---|
| | Init position for calculation: 1 | |
| | Tentative number of TMS(s) for the threshold 0.5: 2 | |
| | Number of TMS(s) for threshold 0.5: 0 | |
| | PERIPHERAL | Likelihood = 0.58 (at 253) |

| | ALOM score: −0.16 (number of TMSs: 0) | | | |
|---|---|---|---|---|
| MTOP: | Prediction of membrane topology (Hartmann et al.) | | | |
| | Center position for calculation: 6 | | | |
| | Charge difference: −2.0 C(1.0)-N(3.0) | | | |
| | N >= C: N-terminal side will be inside | | | |
| MITDISC: | discrimination of mitochondrial targeting seq | | | |
| | R content: | 4 | Hyd Moment(75): | 11.27 |
| | Hyd Moment(95): | 11.90 | G content: | 2 |
| | D/E content: | 1 | S/T content: | 5 |

| | |
|---|---|
| | Score: 0.60 |
| Gavel: | prediction of cleavage sites for mitochondrial preseq |
| | R-10 motif at 37 SRN FS |

NUCDISC: discrimination of nuclear localization signals

| | |
|---|---|
| | pat4: KKRH (3) at 1183 |
| | pat4: RKRR (5) at 3564 |
| | pat7: none |
| | bipartite: none |
| | content of basic residues: 8.0% |
| | NLS Score: 0.03 |
| KDEL: | ER retention motif in the C-terminus: none |

ER Membrane Retention Signals:

XXRR-like motif in the N-terminus: RRIC

none
SKL: peroxisomal targeting signal in the C-terminus: none
PTS2: 2nd peroxisomal targeting signal: found
RLGGSVPHL at 1632
VAC: possible vacuolar targeting motif: none
RNA-binding motif: none
Actinin-type actin-binding motif:

type 1: none
type 2: none

NMYR: N-myristoylation pattern: none
Prenylation motif: none
memYQRL: transport motif from cell surface to Golgi: none
Tyrosines in the tail: none
Dileucine motif in the tail: none
checking 63 PROSITE DNA binding motifs: none
checking 71 PROSITE ribosomal protein motifs: none
checking 33 PROSITE prokaryotic DNA binding motifs: none

| | |
|---|---|
| NNCN: | Reinhardt's method for Cytoplasmic/Nuclear discrimination |
| | Prediction: nuclear |
| | Reliability: 76.7 |
| COIL: | Lupas's algorithm to detect coiled-coil regions |
| | total: 0 residues |

Final Results (k = 9/23):

```
65.2%: nuclear
21.7%: mitochondrial
  8.7%: cytoplasmic
  4.3%: vacuolar
```

>> prediction for CG50646-04 is nuc (k = 23)

[0395] A search of the NOV8a protein against the Geneseq database, a proprietary database that contains sequences published in patents and patent publication, yielded several homologous proteins shown in Table 8D.

TABLE 8D
Geneseq Results for NOV8a

| | | NOV8a | | |
|---|---|---|---|---|
| | | Residues/ | Identities/ | |
| Geneseq | Protein/Organism/Length | Match | Similarities for the | Expect |
| Identifier | [Patent #, Date] | Residues | Matched Region | Value |
| ABJ10589 | Human novel protein NOV2a SEQ ID | 1 . . . 3570 | 3570/3570 (100%) | 0.0 |
| | NO: 6 - Homo sapiens, 3570 aa. | 1 . . . 3570 | 3570/3570 (100%) | |
| | [WO200259315-A2, 01-AUG-2002] | | | |
| ABJ10590 | Human novel protein NOV2b SEQ ID | 1 . . . 3570 | 3551/3570 (99%) | 0.0 |
| | NO: 8 - Homo sapiens, 3568 aa. | 1 . . . 3568 | 3555/3570 (99%) | |
| | [WO200259315-A2, 01-AUG-2002] | | | |
| AAE20146 | Human C3b/C4b complement | 3 . . . 3570 | 3502/3570 (98%) | 0.0 |
| | receptor-like protein - Homo sapiens, | 4 . . . 3571 | 3519/3570 (98%) | |
| | 3571 aa. [WO200210388-A2, 07- | | | |
| | FEB-2002] | | | |
| AAE20147 | Mouse C3b/C4b complement | 3 . . . 3569 | 2886/3570 (80%) | 0.0 |
| | receptor-like protein - Mus musculus, | 31 . . . 3593 | 3174/3570 (88%) | |
| | 3594 aa. [WO200210388-A2, 07- | | | |
| | FEB-2002] | | | |
| AAM93954 | Human polypeptide, SEQ ID NO: | 2074 . . . 3570 | 1485/1497 (99%) | 0.0 |
| | 4153 - Homo sapiens, 1497 aa. | 1 . . . 1497 | 1487/1497 (99%) | |
| | [EP1130094-A2, 05-SEP-2001] | | | |

[0396] In a BLAST search of public sequence databases, the NOV8a protein was found to have homology to the proteins shown in the BLASTP data in Table 8E.

TABLE 8E
Public BLASTP Results for NOV8a

| | | NOV8a | | | |
|---|---|---|---|---|---|
| Protein | | Residues/ | Identities/ | | |
| Accession | | Match | Similarities for the | | Expect |
| Number | Protein/Organism/Length | Residues | Matched Portion | | Value |
| Q9ES77 | Polydom protein precursor - Mus | 3 . . . 3569 | 2894/3570 | (81%) | 0.0 |
| | musculus (Mouse), 3567 aa. | 4 . . . 3566 | 3180/3570 | (89%) | |
| Q8NBT9 | Hypothetical protein FLJ90754 - | 2074 . . . 3570 | 1485/1497 | (99%) | 0.0 |
| | Homo sapiens (Human), 1497 aa. | 1 . . . 1487 | 1487/1497 | (99%) | |
| Q96JU7 | Hypothetical protein FLJ14964 - | 231 . . . 1546 | 1255/1316 | (95%) | 0.0 |
| | Homo sapiens (Human), 1316 aa. | 1 . . . 1314 | 1267/1316 | (95%) | |
| Q8C720 | Polydomain protein - Mus | 3 . . . 845 | 694/846 | (82%) | 0.0 |
| | musculus (Mouse), 848 aa | 4 . . . 846 | 748/846 | (88%) | |
| | (fragment). | | | | |
| Q922H0 | Polydomain protein - Mus | 2902 . . . 3569 | 534/668 | (79%) | 0.0 |
| | musculus (Mouse), 669 aa | 2 . . . 668 | 594/668 | (87%) | |
| | (fragment). | | | | |

[0397] PFam analysis predicts that the NOV8a protein contains the domains shown in the Table 8F.

TABLE 8F
Domain Analysis of NOV8a

| | | Identities/ | | |
|---|---|---|---|---|
| | | Similarities | | |
| Pfam Domain | NOV8a Match Region | for the Matched Region | | Expect Value |
| vwa | 80 . . . 256 | 57/200 | (28%) | 5.1e−37 |
| | | 128/200 | (64%) | |
| Metallothio_PEC | 269 . . . 324 | 22/80 | (28%) | 0.15 |
| | | 27/80 | (34%) | |
| sushi | 377 . . . 432 | 18/64 | (28%) | 1e−06 |
| | | 39/64 | (61%) | |
| sushi | 437 . . . 492 | 21/64 | (33%) | 4.6e−14 |
| | | 48/64 | (75%) | |
| sushi | 497 . . . 558 | 12/68 | (18%) | 0.17 |
| | | 39/68 | (57%) | |
| HYR | 560 . . . 641 | 29/86 | (34%) | 6.1e−16 |
| | | 57/86 | (66%) | |
| HYR | 642 . . . 721 | 27/86 | (31%) | 3.4e−16 |
| | | 54/86 | (63%) | |
| TNFR_c6 | 1017 . . . 1055 | 14/48 | (29%) | 0.74 |
| | | 34/48 | (71%) | |
| EGF | 1196 . . . 1227 | 18/47 | (38%) | 3.9e−07 |
| | | 24/47 | (51%) | |
| EGF | 1234 . . . 1265 | 18/47 | (38%) | 1.2e−10 |
| | | 27/47 | (57%) | |
| EGF | 1272 . . . 1303 | 17/47 | (36%) | 6.9e−10 |
| | | 28/47 | (60%) | |
| EGF | 1348 . . . 1379 | 13/47 | (28%) | 1.3e−08 |
| | | 26/47 | (55%) | |
| EGF | 1386 . . . 1417 | 17/47 | (36%) | 6.9e−10 |
| | | 28/47 | (60%) | |
| pentaxin | 1430 . . . 1622 | 57/209 | (27%) | 5e−14 |
| | | 99/209 | (47%) | |
| sushi | 1630 . . . 1684 | 18/64 | (28%) | 2.3e−10 |
| | | 42/64 | (66%) | |
| sushi | 1689 . . . 1742 | 25/63 | (40%) | 3.3e−17 |
| | | 43/63 | (68%) | |
| EGF | 1748 . . . 1782 | 14/47 | (30%) | 1.8e−05 |
| | | 26/47 | (55%) | |
| sushi | 1788 . . . 1841 | 24/63 | (38%) | 2e−15 |
| | | 43/63 | (68%) | |
| sushi | 1846 . . . 1899 | 20/63 | (32%) | 4.2e−14 |
| | | 45/63 | (71%) | |
| sushi | 1904 . . . 1957 | 22/63 | (35%) | 8.5e−14 |
| | | 42/63 | (67%) | |
| sushi | 1962 . . . 2015 | 22/63 | (35%) | 1.9e−13 |
| | | 39/63 | (62%) | |
| sushi | 2020 . . . 2077 | 19/64 | (30%) | 5.4e−07 |
| | | 42/64 | (66%) | |
| sushi | 2082 . . . 2140 | 17/65 | (26%) | 2.3e−08 |
| | | 39/65 | (60%) | |
| sushi | 2145 . . . 2198 | 24/63 | (38%) | 3.8e−18 |
| | | 46/63 | (73%) | |
| sushi | 2203 . . . 2258 | 19/64 | (30%) | 3.3e−10 |
| | | 45/64 | (70%) | |
| sushi | 2263 . . . 2317 | 26/63 | (41%) | 9.4e−17 |
| | | 46/63 | (73%) | |
| sushi | 2322 . . . 2375 | 21/63 | (33%) | 3.2e−08 |
| | | 41/63 | (65%) | |
| sushi | 2380 . . . 2434 | 24/63 | (38%) | 1.9e−13 |
| | | 43/63 | (68%) | |
| sushi | 2439 . . . 2492 | 21/63 | (33%) | 3.8e−11 |
| | | 42/63 | (67%) | |
| sushi | 2497 . . . 2550 | 26/63 | (41%) | 3.4e−15 |
| | | 43/63 | (68%) | |
| sushi | 2555 . . . 2607 | 22/63 | (35%) | 1.1e−12 |
| | | 38/63 | (60%) | |
| sushi | 2659 . . . 2711 | 21/65 | (32%) | 2.9e−10 |
| | | 43/65 | (66%) | |
| sushi | 2716 . . . 2769 | 19/63 | (30%) | 9.6e−10 |
| | | 38/63 | (60%) | |
| sushi | 2774 . . . 2827 | 20/63 | (32%) | 5.2e−14 |
| | | 45/63 | (71%) | |
| sushi | 2832 . . . 2885 | 22/63 | (35%) | 1.1e−14 |
| | | 42/63 | (67%) | |
| sushi | 2890 . . . 2943 | 21/63 | (33%) | 7.6e−12 |
| | | 35/63 | (56%) | |
| sushi | 2948 . . . 3001 | 19/63 | (30%) | 7.6e−13 |
| | | 40/63 | (63%) | |
| sushi | 3006 . . . 3058 | 21/62 | (34%) | 3.8e−08 |
| | | 37/62 | (60%) | |
| sushi | 3063 . . . 3116 | 22/63 | (35%) | 5.7e−11 |
| | | 44/63 | (70%) | |
| sushi | 3121 . . . 3175 | 17/64 | (27%) | 1.1e−10 |
| | | 40/64 | (62%) | |
| sushi | 3180 . . . 3235 | 16/62 | (26%) | 1.2e−05 |
| | | 39/62 | (63%) | |
| sushi | 3240 . . . 3293 | 19/63 | (30%) | 1.2e−12 |
| | | 44/63 | (70%) | |
| sushi | 3298 . . . 3351 | 23/63 | (37%) | 1.6e−10 |
| | | 41/63 | (65%) | |
| sushi | 3356 . . . 3410 | 18/64 | (28%) | 3.6e−09 |
| | | 41/64 | (64%) | |
| sushi | 3415 . . . 3467 | 22/63 | (35%) | 1.5e−12 |
| | | 42/63 | (67%) | |
| EGF | 3467 . . . 3498 | 13/47 | (28%) | 0.0029 |
| | | 22/47 | (47%) | |
| EGF | 3503 . . . 3530 | 18/47 | (38%) | 2e−05 |
| | | 24/47 | (51%) | |
| EGF | 3535 . . . 3562 | 13/47 | (28%) | 0.0034 |
| | | 22/47 | (47%) | |

### Example 9

[0398] The NOV9 clone was analyzed, and the nucleotide and encoded polypeptide sequences are shown in Table 9A.

TABLE 9A
NOV9 Sequence Analysis

| | | |
|---|---|---|
| NOV9a, CG50736-09 | SEQ ID NO: 207 | 3260 bp |
| DNA Sequence | ORF Start: ATG at 171 | ORF Stop: TGA at 2862 |

GGCACGAGCAGGAGCTTCCCAAGAACCCGAAAACTTCCCAGTATTTCTTCCAGTTGCAGGAGCATTTC
GTGAAAGATCTGGTCGGCCCAGGCCCCTTCACTGTTTTTGCACCTTTATCTGCAGCCTTTGATGAGGA
AGCTCGGGTTAAAGACTGGGACAAATACGGTTTAATGCCCCAGGTTCTTCGGTACCATGTGGTCGCCT
GCCACCAGCTGCTTCTGGAAAACCTGAAATTGATCTCAAATGCTACTTCCCTCCAAGGAGAGCCAATA
GTCATCTCCGTCTCTCAGAGCACGGTGTATATAAATAATAAGGCTAAGATCATATCCAGTGATATCAT
CAGTACTAATGGGATTGTTCATATCATAGACAAATTGCTATCTCCCAAAAATTTGCTTATCACTCCCA
AAGACAACTCTGGAAGAATTCTGCAAAATCTTACGACTTTGGCAACAAACAATGGCTACATCAAATTT
AGCAACTTAATACAGGACTCAGGTTTGCTGAGTGTCATCACCGATCCCATCCACACCCCAGTCACTCT
CTTCTGGCCCACCGACCAAGCCCTCCATGCCCTACCTGCTGAACAACAGGACTTCCTGTTCAACCAAG
ACAACAAGGACAAGCTGAAGGAGTATTTGAAGTTTCATGTGATACGAGATGCCAAGGTTTTAGCTGTG
GATCTTCCCACATCCACTGCCTGGAAGACCCTGCAAGGTTCAGAGCTGAGTGTGAAATGTGGAGCTGG
CAGGGACATCGGTGACCTCTTTCTGAATGGCCAAACCTGCAGAATTGTGCAGCGGGAGCTCTTGTTTG
ACCTGGGTGTGGCCTACGGCATTGACTGTCTGCTGATTGATCCCACCCTGGGGGGCCGCTGTGACACC
TTTACTACTTTCGATGCCTCGGGGGAGTGTGGGAGCTGTGTCAATACTCCCAGCTGCCCAAGGTGGAG
TAAACCAAAGGGTGTGAAGCAGAAGTGTCTCTACAACCTGCCCTTCAAGAGGAACCTGGAAGGCTGCC
GGGAGCGGTGCAGCCTGGTGATACAGATCCCCAGGTGCTGCAAGGGCTACTTCGGGCGAGACTGTCAG
GCCTGCCCTGGAGGACCAGATGCCCCGTGTAATAACCGGGGTGTCTGCCTTGATCAGTACTCGGCCAC
CGGAGAGTGTAAATGCAACACCGGCTTCAATGGGACGGCGTGTGAGATGTGCTGGCCGGGGAGATTCG
GGCCTGATTGTCTGCCCTGTGGCTGCTCAGACCACGGACAGTGCGATGATGGCATCACGGGCTCCGGG
CAGTGCCTCTGTGAAACGGGGTGGACAGGCCCCTCGTGTGACACTCAGGCAGTTTTGCCTGCAGTGTG
TACGCCTCCTTGTTCTGCTCATGCCACCTGTAAGGAGAACAACACGTGTGAGTGTAACCTGGATTATG
AAGGTGACGGAATCACATGCACAGTTGTGGATTTCTGCAAACAGGACAACGGGGGCTGTGCAAAGGTG
GCCAGATGCTCCCAGAAGGGCACGAAGGTCTCCTGCAGCTGCCAGAAGGGATACAAAGGGGACGGGCA
CAGCTGCACAGAGATAGACCCCTGTGCAGACGGCCTTAACGGAGGGTGTCACGAGCACGCCACCTGTA
AGATGACAGGCCCGGGCAAGCACAAGTGTGAGTGTAAAAGTCACTATGTCGGAGATGGGCTGAACTGT
GAGCCGGAGCAGCTGCCCATTGACCGCTGCTTACAGGACAATGGGCAGTGCCATGCAGACGCCAAATG
TGTCGACCTCCACTTCCAGGATACCACTGTTGGGGTGTTCCATCTACGCTCCCCACTGGGCCAGTATA
AGCTGACCTTTGACAAAGCCAGAGAGGCCTGTGCCAACGAAGCTGCGACCATGGCAACCTACAACCAG
CTCTCCTATGCCCAGAAGGCCAAGTACCACCTGTGCTCAGCAGGCTGGCTGGAGACCGGGCGGGTTGC
CTACCCCACAGCCTTCGCCTCCCAGAACTGTGGCTCTGGTGTGGTTGGGATAGTGGACTATGGACCTA
GACCCAACAAGAGTGAAATGTGGGATGTCTTCTGCTATCGGATGAAAGATGTGAACTGCACCTGCAAG
GTGGGCTATGTGGGAGATGGCTTCTCATGCAGTGGGAACCTGCTGCAGGTCCTGATGTCCTTCCCCTC
ACTCACAAACTTCCTGACGGAAGTGCTGGCCTATTCCAACAGCTCAGCTCGAGGCCGTGCATTTCTAG
AACACCTGACTGACCTGTCCATCCGCGGCACCCTCTTTGTGCCACAGAACAGTGGGCTGGGGGAGAAT
GAGACCTTGTCTGGGCGGGACATCGAGCACCACCTCGCCAATGTCAGCATGTTTTTCTACAATGACCT
TGTCAATGGCACCACCCTGCAAACGAGGGTGGGAAGCAAGCTGCTCATCACTGCCAGCCAGGACCCAC
TCCAACCGACGGAGACCAGGTTTGTTGATGGAAGAGCCATTCTGCAGTGGGACATCTTTGCCTcCAAT
GGGATCATTCATGTCATTTCCAGGCCTTTAAAAGCACCCCCTGCCCCCGTGACCTTGACCCACACTGG
CTTGGGAGCAGGGATCTTCTTTGCCATCATCCTGGTGACTGGGGCTGTTGCCTTGGCTGCTTACTCCT
ACTTTCGGATAAACCGGAGAACAATCGGCTTCCAGCATTTTGAGTCGGAAGAGGACATTAATGTTGCA
GCTCTTGGCAAGCAGCAGCCTGAGAATATCTCGAACCCCTTGTATGAGAGCACAACCTCAGCTCCCCC
AGAACCTTCCTACGACCCCTTCACGGACTCTGAAGAACGGCAGCTTGAGGGCAATGACCCCTTGAGGA
CACTGTGAGGGCCTGGACGGGAGATGCCAGCCATCACTCACTGCCACCTGGGCCATCAACTGTGAATT
CTCAGCACCAGTTGCCTTTTAGGAACGTAAAGTCCTTTAAGCACTCAGAAGCCATACCTCATCTCTCT
GGCTGATCTGGGGGTTGTTTCTGTGGGTGAGAGATGTGTTGCTGTGCCCACCCAGTACAGCTTCCTCC
TCTGACCCTTTGGCTCTTCTTCCTTTGTACTCTTCAGCTGGCACCTGCTCCATTCTGCCCTACATGAT
GGGTAACTGTGATCTTTCTTCCCTGTTAGATTGTAAGCCTCCNTCTTTGTATCCCAGCCCCTAGCCCA
GTGCCTGACACAGGAACTGTGCACAATAAGGTTTATGGACAGAAAAAAAAAAAAAAAAAAAAAA

| | | | |
|---|---|---|---|
| NOV9a, CG50738-09 | SEQ ID NO: 208 | 897 aa | MW at 97584.6kD |
| Protein Sequence | | | |

MPQVLRYHVVACHQLLLENLKLISNATSLQGEPIVISVSQSTVYINNKAKIISSDIISTNGIVHIIDK
LLSPKNLLITPKDNSGRILQNLTTLATNNGYIKFSNLIQDSGLLSVITDPIHTPVTLFWPTDQALHAL
PAEQQDFLFNQDNKDKLKEYLKFHVIRDAKVLAVDLPTSTAWKTLQGSELSVKCGAGRDIGDLFLNGQ
TCRIVQRELLFDLGVAYGIDCLLIDPTLGGRCDTFTTFDASGECGSCVNTPSCPRWSKPKGVKQKCLY
NLPFKRNLEGCRERCSLVIQIPRCCKGYFGRDCQACPGGPDAPCNNRGVCLDQYSATGECKCNTGFNG
TACEMCWPGRFGPDCLPCGCSDHGQCDDGITGSGQCLCETGWTGPSCDTQAVLPAVCTPPCSAHATCK
ENNTCECNLDYEGDGITCTVVDFCKQDNGGCAKVARCSQKGTKVSCSCQKGYKGDGHSCTEIDPCADG
LNGGCHEHATCKMTGPGKHKCECKSHYVGDGLNCEPEQLPIDRCLQDNGQCHADAKCVDLHFQDTTVG
VFHLRSPLGQYKLTFDKAREACANEAATMATYNQLSYAQKAKYHLCSAGWLETGRVAYPTAFASQNCG
SGVVGIVDYGPRPNKSEMWDVFCYRMKDVNCTCKVGYVGDGFSCSGNLLQVLMSFPSLTNFLTEVLAY
SNSSARGRAFLEHLTDLSIRGTLFVPQNSGLGENETLSGRDIEHHLANVSMFFYNDLVNGTTLQTRVG
SKLLITASQDPLQPTETRFVDGRAILQWDIFASNGIIHVISRPLKAPPAPVTLTHTGLGAGIFFAIIL
VTGAVALAAYSYFRINRRTIGFQHFESEEDINvAALGKQQPENISNPLYESTTSAPPEPSYDPFTDSE
ERQLEGNDPLRTL

| | | |
|---|---|---|
| NOV9b, 197408749 | SEQ ID NO: 209 | 1668 bp |
| DNA Sequence | ORF Start: at 1 | ORF Stop: end of sequence |

GGATCCAGAATTCTGCAAAATCTTACGACTTTGGCAACAAACAATGGCTACATCAAATTTAGCAACTT
AATACAGGACTCAGGTTTGCTGAGTGTCATCACCGATCCCATCCACACCCCAGTCACTCTCTTCTGGC
CCACCGACCAAGCCCTCCATGCCCTACCTGCTGAACAACAGGACTTCCTGTTCAACCAAGACAACAAG
GACAAGCTGAAGGAGTATTTGAAGTTTCATGTGATACGAGATGCCAAGGTTTTAGCTGTGGATCTTCC
CACATCCACTGCCTGGAAGACCCTGCAAGGTTCAGAGCTGAGTGTGAAATGTGGAGCTGGCAGGGACA
TCGGTGACCTCTTTCTGAATGGCCAAACCTGCAGAATTGTGCAGCGGGAGCTCTTGTTTGACCTGGGT
GTGGCCTACGGCATTGACTGTCTGCTGATTGATCCCACCCTGGGGGGCCGCTGTGACACCTTTACTAC
TTTCGATGCCTCGGGGGAGTGTGGGAGCTGTGTCAATACTCCCAGCTGCCCAAGGTGGAGTAAACCAA
AGGGTGTGAAGCAGAAGTGTCTCTACAACCTGCCCTTCAAGAGGAACCTGGAAGGCTGCCGGGAGCGG
TGCAGCCTGGTGATACAGATCCCCAGGTGCTGCAAGGGCTACTTCGGGCGAGACTGTCAGGCCTGCCC
TGGAGGACCAGATGCCCCGTGTAATAACCGGGGTGTCTGCCTTGATCAGTACTCGGCCACCGGAGAGT
GTAAATGCAACACCGGCTTCAATGGGACGGCATGTGAGATGTGCTGGCCGGGGAGATTTGGGCCTGAT
TGTCTGCCCTGTGGCTGCTCAGACCACGGACAGTGCGATGATGGCATCACGGGCTCCGGGCAGTGCCT
CTGTGAAACGGGGTGGACAGGCCCCTCGTGTGACACTCAGGCAGTTTTGCCTGCAGTGTGTACGCCTC
CTTGTTCTGCTCATGCCACCTGTAAGGAGAACAACACGTGTGAGTGTAACCTGGATTATGAAGGTGAC
GGAATCACATGCACAGTTGTGGATTTCTGCAAACAGGACAACGGGGGCTGTGCAAAGGTGGCCAGATG
CTCCCAGAAGGGCACGAAGGTCTCCTGCAGCTGCCAGAAGGGATACAAAGGGGACGGGCACAGCTGCA
CAGAGATAGACCCCTGTGCAGACGGCCTTAACGGAGGGTGTCACGAGCACGCCACCTGTAAGATGACA
GGCCCGGGCAAGCACAAGTGTGAGTGTAIAAGTCACTATGTCGGAGATGGGCTGAACTGTGGGCCGGA
GCAGCTGCCCATTGACCGCTGCTTACAGGACAATGGGCAGTGCCATGCAGACGCCAAATGTGTCGACC
TCCACTTCCAGGATACCACTGTTGGGGTGTTCCATCTACGCTCCCCACTGGGCCAGTATAAGCTGACC
TTTGACAAAGCCAGAGAGGCCTGTGCCAACGAAGCTGCGACCATGGCAACCTACAACCAGCTCTCCTA
TGCCCAGAAGGCCAAGTACCACCTGTGCTCAGCAGGCTGGCTGGAGACCGGGCGGGTTGCCTACCCCA
CAGCCTTCGCCTCCCAGAACTGTGGCTCTGGTGTGGTTGGGATAGTGGACTATGGACCTAGACCCAAC
AAGAGTGAAATGTGGGATGTCTTCTGCTATCGGCCG

| | | | |
|---|---|---|---|
| NOV9b, 197408749 | SEQ ID NO: 210 | 556 aa | MW at 60171.4kD |
| Protein Sequence | | | |

GSRILQNLTTLATNNGYIKFSNLIQDSGLLSVITDPIHTPVTLFWPTDQALHALPAEQQDFLFNQDNK
DKLKEYLKFHVIRDAKVLAVDLPTSTAWKTLQGSELSVKCGAGRDIGDLFLNGQTCRIVQRELLFDLG
VAYGIDCLLIDPTLGGRCDTFTTFDASGECGSCVNTPSCPRWSKPKGVKQKCLYNLPFKPNLEGCRER
CSLVIQIPRCCKGYFGRDCQACPGGPDAPCNNRGVCLDQYSATGECKCNTGFNGTACEMCWPGRFGPD
CLPCGCSDHGQCDDGITGSGQCLCETGWTGPSCDTQAVLPAVCTPPCSAHATCKENNTCECNLDYEGD
GITCTVVDFCKQDNGGCAKVARCSQKGTKVSCSCQKGYKGDGHSCTEIDPCADGLNGGCHEHATCKMT
GPGKHKCECKSHYVGDGLNCGPEQLPIDRCLQDNGQCHADAKCVDLHFQDTTVGVFHLRSPLGQYKLT
FDKAREACANEAATMATYNQLSYAQKAKYHLCSAGWLETGRVAYPTAFASQNCGSGVVGIVDYGPRPN
KSEMWDVFCYRP

| | | |
|---|---|---|
| NOV9c, CG50736-01 | SEQ ID NO: 211 | 2011 bp |
| DNA Sequence | ORF Start: ATG at 877 | ORF Stop: TGA at 1822 |

GGGTGTGATGGGCTTCTAGTTTCTCTAGCTGCATCACCCTTGAACCATCCAGAGTCCCAGTAAGCCAC
GGGCTTGAGCATGGAGGAGAATCCTCAGAGACAGAACCCCTGCCCACATGTCTGGGCCTTGCTCAAGC
CAGCAAGGGGCTGAATCCCTGTGTTTCAGGACTCAGGTTTGCTGAGTGTCATCACCGATCCCATCCAC
ACCCCAGTCACTCTCTTCTGGCCCACCGACCAAGCCCTCCATGCCCTACCTGCTGAACAACAGGACTT
CCTGTTCAACCAAGACAACAAGGACAAGCTGAAGGAGTATTTGAAGTTTCATGTGATACGAGATGCCA
AGGTTTTAGCTGTGGATCTTCCCACATCCACTGCCTGGAAGACCCTGCAAGGTTCAGAGCTGAGTGTG
AAATGTGGAGCTGGCAGGGACATCGGTGACCTCTTTCTGAATGGCCAAACCTGCAGAATTGTGCAGCG
GGAGCTCTTGTTTGACCTGGGTGTGGCCTACGGCATTGACTGTCTGCTGATTGATCCCACCCTGGGGG
GCCGCTGTGACACCTTTACTACTTTCGATGCCTCGGGGGAGTGTGGGAGCTGTGTCAATACTCCCAGC
TGCCCAAGGTGGAGTAAACCAAAGGGTGTGAAGCAGAAGTGTCTCTACAACCTGCCCTTCAAGAGGAA
CCTCGAAGGCTGCCGGGAGCGATGCAGCCTGGTGATACAGATCCCCAGGTGCTGCAAGGGCTACTTCG
GGCGAGACTGTCAGGCCTGCCCTGGAGGACCAGATGCCCCGTGTAATAACCGGGGTGTCTGCCTTGAT
CAGTACTCGGCCACCGGAGAGTGTAAATGCAACACCGGCTTCAATGGGACGGCGTGTGAGATGTGCTG
GCCGGGGAGATTTGGGCCTGATTGTCTGCCCTGTGGCTGCTCAGACCACGGACAGTGCGATGATGGCA
TCACGGGCTCCGGGCAGTGCCTCTGTGAAACGGGGTGGACAGGCCCCTCGTGTGACACTCAGGCAGTT
TTGTCTGCAGTGTGTACGCCTCCTTGTTCTGCTCATGCCACCTGTAAGGAGAACAACACGTGTGAGTG
TAACCTGGATTATGAAGGTGACGGAATCACATGCACAGTTGTGGATTTCTGCAAACAGGACAACGGGG
GCTGTGCAAAGGTGGCCAGATGCTCCCAGAAGGGCACGAAGGTCTCCTGCAGCTGCCAGAAGGGATAC
AAAGGGGACGGGCACAGCTGCACAGAGATAGACCCCTGTGCAGACGGCCTTAACGGAGGGTGTCACGA
GCACGCCACCTGTAAGATGACAGGCCCGGGCAAGCACAAGTGTGAGTGTAAAAGTCACTATGTCGGAG
ATGGGCTGAACTGTGAGCCGGAGCAGCTGCCCATTGACCGCTGCTTACAGGACAATGGGCAGTGCCAT
GCAGACGCCAAATGTGCCGACCTCCACTTCCAGGATACCACTGTTGGGGTGTTCCATCTACGCTCCCC
ACTGGGCCAGTATAAGCTGACCTTTGACAAAGCCAGAGAGGCCTGTGCCAACGAAGCTGCGACCATGG
CAACCTACAACCAGCTCTCCTATGCCCAGAAGGCCAAGTACCACCTGTGCTCAGCAGGCTGGCTGGAG
ACCGGGCGGGTTGCCTACCCCACAGCCTTCGCCTCCCAGAACTGTGGCTCTGGTGTGGTTGGGATAGT
GGACTATGGACCCAGACCCAACAAGAGTGAAATGTGGGATGTCTTCTGCTATCGGATGAAAGGAAGTG
CTGGCCTATTCCAACAGCTCAGCTCGAGGCCGTGCATTTCTAGAACACCTGACTGACCTGTCCATCCG
CGGCACCCTCTTTGTGCCACAGAACAGTGGGCTGGGGGAGAATGAGACCTTGTCTGGGCGGGACATCG
AACACCACCTCGCCAATGTCAGCATGTTTTTCTACAATGACCTTGTCAATGGCACCACCCTGCAAACG
AGGCTGGGAAGCAAGCTGCTCATCACTGCCAGCCAGGAC

| | | | |
|---|---|---|---|
| NOV9c,CG50736-01 | SEQ ID NO: 212 | 315 aa | MW at 33739.5kD |
| Protein Sequence | | | |

MCWPGRFGPDCLPCGCSDHGQCDDGITGSGQCLCETGWTGPSCDTQAVLSAVCTPPCSAHATCKENNT
CECNLDYEGDGITCTVVDFCKQDNGGCAKVARCSQKGTKVSCSCQKGYKGDGHSCTEIDPCADGLNGG
CHEHATCKMTGPGKHKCECKSHYVGDGLNCEPEQLPIDRCLQDNGQCHADAKCADLHFQDTTVGVFHL
RSPLGQYKLTFDKAREACANEAATMATYNQLSYAQKAKYHLCSAGWLETGRVAYPTAFASQNCGSGVV
GIVDYGPRPNKSEMWDVFCYRMKGSAGLFQQLSSRPCISRTPD

| | | |
|---|---|---|
| NOV9d, CG50736-02 | SEQ ID NO: 213 | 1804 bp |
| DNA Sequence | ORF Start: ATG at 877 | ORF Stop: TGA at 1609 |

GGGTGTGATGGGCTTCTAGTTTCTCTAGCTGCATCACCCTTGAACCATCCAGAGTCCCAGTAAGCCAC
GGGCTTGAGCATGGAGGAGAATCCTCAGAGACAQAACCCCTGCCCACATGTCTGGGCCTTGCTCAAGC
CAGCAAGGGGCTGAATCCCTGTGTTTCAGGACTCAGGTTTGCTGAGTGTCATCACCGATCCCATCCAC
ACCCCAGTCACTCTCTTCTGGCCCACCGACCAAGCCCTCCATGCCCTACCTGCTGAACAACAGGACTT
CCTGTTCAACCAAGACAACAAGGACAAGCTGAAGGAGTATTTGAAGTTTCATGTGATACGAGATGCCA
AGGTTTTAGCTGTGGATCTTCCCACATCCACTGCCTGGAAGACCCTGCAAGGTTCAGAGCTGAGTGTG
AAATGTGGAGCTGGCAGGGACATCGGTGACCTCTTTCTGAATGGCCAAACCTGCAGAATTGTGCAGCG
GGAGCTCTTGTTTGACCTGGGTGTGGCCTACGGCATTGACTGTCTGCTGATTGATCCCACCCTGGGGG
GCCGCTGTGACACCTTTACTACTTTCGATGCCTCGGGGGAGTGTGGGAGCTGTGTCAATACTCCCAGC
TGCCCAAGGTGGAGTAAACCAAAGGGTGTGAAGCAGAAGTGTCTCTACAACCTGCCCTTCAAGAGGAA
CCTGGAAGGCTGCCGGGAGCGATGCAGCCTGGTGATACAGATCCCCAGGTGCTGCAAGGGCTACTTCG
GGCGAGACTGTCAGGCCTGCCCTGGAGGACCAGATGCCCCGTGTAATAACCGGGGTGTCTGCCTTGAT
CAGTACTCGGCCACCGGAGAGTGTAAATGCAACACCGGCTTCAATGGGACGGCGTGTGAGATGTGCTG
GCCGGGGAGATTTGGGCCTGATTGTCTGCCCTGTGGCTGCTCAGACCACGGACAGTGCGATGATGGCA
TCACGGGCTCCGGGCAGTGCCTCTGTGAAACGGGGTGGACAGGCCCCTCGTGTGACACTCAGGCAGTT
TTGTCTGCAGTGTGTACGCCTCCTTGTTCTGCTCATGCCACCTGTAAGGAGAACAACACGTGTGAGTG
TAACCTGGATTATGAAGGTGACGGAATCACATGCACAGTTGTGGATTTCTGCAAACAGGACAACGGGG
GCTGTGCAAAGGTGGCCAGATGCTCCCAGAAGGGCACGAAGGTCTCCTGCAGCTGCCAGAAGGGATAC
AAAGGGGACGGGCACAGCTGCACAGAGATAGACCCCTGTGCAGACGGCCTTAACGGAGGGTGTCACGA
GCACGCCACCTGTAAGATGACAGGCCCGGGCAAGCACAAGTGTGAGTGTAAAAGTCACTATGTCGGAG
ATGGGCTGAACTGTGAGCCGGAGCAGCTGCCCATTGACCGCTGCTTACAGGACAATGGGCAGTGCCAT
GCAGACGCCAAATGTGTCGACCTCCACTTCCAGGATACCACTGTTGGGGTGTTCCATCTACGCTCCCC
ACTGGGCCAGTATAAGCTGACCTTTGACAAAGCCAGAGAGGCCTGTGCCAACGAAGCTGCGACCATGG
CAACCTACAACCAGCTCTCCTATGCCCAGAAGAGAGAAGAGAAATGAGTATGAAAGACCTGGGCACCT
ACAAGAAAGAGAGGACACTTTTGTTCACCCAGTGGCTCAATCAACCAGTCAACATCTAATGACCACCT
ACTGTGTGCCAGGCACAGAGGTGCAATAGGCAAAGCCAAGTACCACCTGTGCTCAGCAGGCTGGCTGC
AGACCGGGCGGGTTGCCTACCCCACAGCCTTCGCCT

| | | | |
|---|---|---|---|
| NOV9d, CG50736-02 | SEQ ID NO: 214 | 244 aa | MW at 26106.9kD |
| Protein Sequence | | | |

MCWPGRFGPDCLPCGCSDHGQCDDGITGSGQCLCETGWTGPSCDTQAVLSAVCTPPCSANATCKENNT
CECNLDYEGDGITCTVVDFCKQDNGGCAKVARCSQKGTKVSCSCQKGYKGDGHSCTEIDPCADGLNGG
CHEHATCKMTGPGKHKCECKSHYVGDGLNCEPEQLPIDRCLQDNGQCHADAKCVDLHFQDTTVGVFHL
RSPLGQYKLTFDKAREACANEAATMATYNQLSYAQKREEK

| | | |
|---|---|---|
| NOV9e, CG50736-03 | SEQ ID NO: 215 | 2512 bp |
| DNA Sequence | ORF Start: ATG at 416 | ORF Stop: TAA at 2423 |

ATAGGGCTCGAGCGGCTGCCCGGGCAGGTCTCATGCCTCAGCCTCCGGAGTAGTATTTTTAGTAGAGA
TGGTGTTTACCATGTGGGCCAGGCTGGTCTCGAACTCCTGGCCTCAAGTGATCCACCCGCCTCGGCCT
CCCAGAGTGCTGGGATTACAGGCATGAGCCACTGCACCCAGCCTTGTTTGTATTTTGAATTCCAAATG
GAAATACCTTCATGATCTTCCCACTACTAAAGGTTTAAATCTGGCACTGATACCTCTCCAAGAGGGCT
ATATACTATGCAGTGTTTCCCAGCATGTTTCACAAGAAAATTCTTTTTTGAGGATCATCTCACAGAAC
TTGGGATCTTTGCAACATGTATTGTGAAATCCAGGCCAGAGGAACCCCATGTTCCTTCCACACTGATA
TTCCACAATGGAGGCAAGAAAGGAGCTAGAGTCACTTCCTCCCTTTTGTCTGAACAGCCTCCACTCTA
TAATCCTGACCACAAAGCTTACTTCCCAGAGTCTGGGTGGGCCGAGAGGTGTGGAAGAGAGAATGGAG
GACAGGAGAGCCAAATGGCACATTGCAGCAAAAGACTCCTGCCTCTGGCTGAAACCCTCTGATCTTCT
GTTACAGGTTAAAGACTGGGACAAATACGGTTTAATGCCCCAGGTTCTTCGGTACCATGTGGTCGCCT
GCCACCAGCTGCTTCTGGAAAACCTGAAATTGATCTCAAATGCTACTTCCCTCCAAGGAGAGCCAATA
GTCATCTCCGTCTCTCAGAGCACGGTGTATATAAACAATAAGGCTAAGATCATATCCAGTGATATCAT
CAGTACTAATGGGATTGTTCATATCATAGACAAATTGCTATCTCCCAAAAATTTGCTTATCACTCCCA
AAGACAACTCTGGAAGAATTCTGCAAAATCTTACGACTTTGGCAACAAACAATGGCTACATCAAATTT
AGCAACTTAATACAGGACTCAGGTTTGCTGAGTGTCATCACCGATCCCATCCACACCCCAGTCACTCT
CTTCTGGCCCACCGACCAAGCCCTCCATGCCCTACCTGCTGAACAACAGGACTTCCTGTTCAACCAAG
ACAACAAGGACAAGCTGAAGGAGTATTTGAAGTTTCATGTGATACGAGATGCCAAGGTTTTAGCTGTG
GATCTTCCCACATCCACTGCCTGGAAGACCCTGCAAGGTTCAGAGCTGAGTGTGAAATGTGGACGTGG
CAGGGACATCGGTGACCTCTTTCTGAATGGCCAAACCTGCAGAATTGTGCAGCGCGAGCTCTTGTTTG
ACCTGGGTGTGGCCTACGGCATTGACTGTCTGCTGATTGATCCCACCCTGGGGGGCCGCTGTGACACC
TTTACTACTTTCGATGCCTCGGGGGAGTGTGGGAGCTGTGTCAATACTCCCAGCTGCCCAAGGTGGAG
TAAACCAAAGGGTGTGAAGCAGAAGTGTCTCTACAACCTGCCCTTCAAGAGGAACCTGGAAGGCTGCC
GGGAGCGGTGCAGCCTGGTGATACAGATCCCCAGGTGCTGCAAGGGCTACTTCGGGCGAGACTGTCAG
GCCTGCCCTGGAGGACCAGTTGCCCCGTGTAATAACCGGGGTGTCTGCCTTGATCAGTACTCGGCCAC
CGGAGAGTGTAAATGCAACACCGGCTTCAATGGGACGGCGTGTGAGATGTGCTGGCCGGGGAGATTTG
GGCCTGATTGTCTGCCCTGTGGCTGCTCAGACCACGGACAGTGCGATGATGGCATCACGGGCTCCGGG
CAGTGCCTCTGTGAAACGGGGTGGACAGGCCCCTCGTGTGACACTCAGGCAGTTTTGTCTGCAGTGTG
TACGCCTCCTTGTTCTGCTCATGCCACCTGTAAGGAGAACAACACGTGTGAGTGTAACCTGGATTATG
AAGGTGACGGAATCACATGCACAGTTGTGGATTTCTGCAAACAGGACAACGGGGGCTGTGCAAAGGTG
GCCAGATGCTCCCAGAAGGGCACGAAGGTCTCCTGCAGCTGCCAGAAGGGATACAAAGGGGACGGGCA
CAGCTGCACAGAGATAGACCCCTGTGCAGACGGCCTTAACGGAGGGTGTCACGAGCACGCCACCTGTA
AGATGACAGGCCCGGGCAAGCACAAGTGTGAGTGTAAAAGTCACTATGTCGGAGATGGGCTGAACTGT
GAGCCGGAGCAGCTGCCCATTGACCGCTGCTTACAGGACAATGGGCAGTGCCATGCAGACGCCAAATG
TGTCGACCTCCACTTCCAGGATACCACTGTTGGGGTGTTCCATCTACGCTCCCCACTGGGCCAGTATA
AGCTGACCTTTGACAAAGCCAGAGAGGCCTGTGCCAACGAAGCTGCGACCATGGCAACCTACAACCAG
CTCTCCTATGCCCAGAAGACCTGGTATTCCTTTACCAAGGAATAAAGCCTTTGATGCCAGGACCCAGA
CTCAAGGAGAATCTGAATCTCTGCTCTCCTGCTTGCTGGTCATGTGGCCTTGATATCAAGCCAC

| | | | |
|---|---|---|---|
| NOV9e, CG50736-03 | SEQ ID NO: 216 | 669 aa | MW at 73167.6kD |
| Protein Sequence | | | |

MEARKELESLPPFCLNSLHSIILTTKLTSQSLGGPRGVEERMEDRRAKWHIAAKDSCLWLKPSDLLLQ
VKDWDKYGLMPQVLRYHVVACHQLLLENLKLTSNATSLQGEPIVISVSQSTVYINNKAKIISSDIIST
NGIVHIIDKLLSPKNLLITPKDNSGRILQNLTTLATNNGYIKFSNLIQDSGLLSVITDPIHTPVTLFW
PTDQALHALPAEQQDFLFNQDNKDKLKEYLKFHVIRDAKVLAVDLPTSTAWKTLQGSELSVKCGAGRD
IGDLFLNGQTCRIVQRELLFDLGVAYGIDCLLIDPTLGGRCDTFTTFDASGECGSCVNTPSCPRWSKP
KGVKQKCLYNLPFKRNLEGCRERCSLVIQIPRCCKGYFGRDCQACPGGPVAPCNNRGVCLDQYSATGE
CKCNTGFNGTACEMCWPGRFGPDCLPCGCSDHGQCDDGITGSGQCLCETGWTGPSCDTQAVLSAVCTP
PCSAHATCKENNTCECNLDYEGDGITCTVVDFCKQDNGGCAKVARCSQKGTKVSCSCQKGYKGDGHSC
TEIDPCADGLNGGCHEHATCKMTGPGKHKCECKSHYVGDGLNCEPEQLPIDRCLQDNGQCHADAKCVD
LHFQDTTVGVFHLRSPLGQYKLTFDKEACANEAATMATYNQLSYAQKTWYSFTKE

| | | |
|---|---|---|
| NOV9f, CG50736-04 | SEQ ID NO: 217 | 2483 bp |
| DNA Sequence | ORF Start: ATG at 387 | ORF Stop: TAA at 2394 |

CTCATGCCTCAGCCTCCGGAGTAGTATTTTTAGTAGAGATGGTGTTTACCATGTGGGCCAGGCTGGTC
TCGAACTCCTGGCCTCAAGTGATCCACCCGCCTCGGCCTCCCAGAGTGCTGGGATTACAGGCATGAGC
CACTGCACCCAGCCTTGTTTGTATTTTGAATTCCAAATGGGAATTCCTTCATGATCTTCCCACTACTA
AAGGTTTAAATCTGGCACTGATACCTCTCCAAGAGGGCTATATACTATGCAGTGTTTCCCAGCATGTT
TCACAAGAAAATTCTTTTTTGAGGATCATCTCACAGAACTTGGGATCTTTGCAACATGTATTGTGAAA
TCCAGGCCAGAGGAACCCCATGTTCCTTCCACACTGATATTCCACAATGGAGGCAAGAAAGGAGCTAG
AGTCACTTCCTCCCTTTTGTCTGAACAGCCTCCACTCTATAATCCTGACCACAAAGCTTACTTCCCAG
AGTCTGGGTGGGCCGAGAGGTGTGGAAGAGAGAATGGAGGACAGGAGAGCCAAATGGCACATTGCAGC
AAAAGACTCCTGCCTCTGGCTGAAACCCTCTGATCTTCTGTTACAGGTTAAAGACTGGGACAAATACG
GTTTAATGCCCCAGGTTCTTCGGTACCATGTGGTCGCCTGCCACCAGCTGCTTCTGGAAAACCTGAAA
TTGATCTCAAATGCTACTTCCCTCCAAGGAGAGCCAATAGTCATCTCCGTCTCTCAGAGCACGGTGTA
TATAAACAATAAGGCTAAGATCATATCCAGTGATATCATCAGTACTAATGGGATTGTTCATATCATAG
ACAAATTGCTATCTCCCAAAAATTTGCTTATCACTCCCAAAGACAACTCTGGAAGAATTCTGCAAAAT
CTTACGACTTTGGCAACAAACAATGGCTACATCAAATTTAGCAACTTAATACAGGACTCAGGTTTGCT
GAGTGTCATCACCGATCCCATCCACACCCCAGTCACTCTCTTCTGGCCCACCGACCAAGCCCTCCATG
CCCTACCTGCTGAACAACAGGACTTCCTGTTCAACCAAGACAACAAGGACAAGCTGAAGGAGTATTTG
AAGTTTCATGTGATACGAGATGCCAAGGTTTTAGCTGTGGATCTTCCCACATCCACTGCCTGGAAGAC
CCTGCAAGGTTCAGAGCTGAGTGTGAAATGTGGAGCTGGCAGGGACATCGGTGACCTCTTTCTGAATG
GCCAAACCTGCAGAATTGTGCAGCGGGAGCTCTTGTTTGACCTGGGTGTGGCCTACGGCATTGACTGT
CTGCTGATTGATCCCACCCTGGGGGGCCGCTGTGACACCTTTACTACTTTCGATGCCTCGGGGGAGTG
TGGGAGCTGTGTCAATACTCCCAGCTGCCCAAGGTGGAGTAAAACCAAAGGGTGTGAGCAGAAGTGTC
TCTACAACCTGCCCTTCAAGAGGAACCTGGAAGGCTGCCGGGAGCGATGCAGCCTGGTGATACAGATC
CCCAGGTGCTGCAAGGGCTACTTCGGGCGAGACTGTCAGGCCTGCCCTGGAGGACCAGATGCCCCGTG
TAATAACCGGGGTGTCTGCCTTGATCAGTACTCGGCdACCGGAGAGTGTAAATGCAACACCGGCTTCA
ATGGGACGGCGTGTGAGATGTGCTGGCCGGGGAGATTTGGGCCTGATTGTCTGCCCTGTGGCTGCTCA
GACCACGGACAGTGCGATGATGGCATCACGGGCTCCGGGCAGTGCCTCTGTGAAACGGGGTGGACAGG
CCCCTCGTGTGACACTCAGGCAGTTTTGTCTGCAGTGTGTACGCCTCCTTGTTCTGCTCATGCCACCT
GTAAGGAGAACAACACGTGTGAGTGTAACCTGGATTATGAAGGTGACGGAATCACATGCACAGTTGTG
GATTTCTGCAAACAGGACAACGGGGGCTGTGCAAAGGTGGCCAGATGCTCCCAGAAGGGCACGAAGGT
CTCCTGCAGCTGCCAGAAGGGATACAAAGGGGACGGGCACAGCTGCACAGAGATAGACCCCTGTGCAG
ACGGCCTTAACGGAGGGTGTCACGAGCACGCCACCTGTAAGATGACAGGCCCGGGCAAGCACAAGTGT
GAGTGTAAAAGTCACTATGTCGGAGATGGGCTGAACTGTGAGCCGGAGCAGCTGCCCATTGACCGCTG
CTTACAGGACAATGGGCAGTGCCATGCAGACGCCAAATGTGTCGACCTCCACTTCCAGGATACCACTG
TTGGGGTGTTCCATCTACGCTCCCCACTGGGCCAGTATAAGCTGACCTTTGACAAAGCCAGAGAGGCC
TGTGCCAACGAAGCTGCGACCATGGCAACCTACAACCAGCTCTCCTATGCCCAGAAGACCTGGTATTC
CTTTACCAAGGAATAAAGCCTTTGATGCCAGGACCCAGACTCAAGGAGAATCTGAATCTCTGCTCTCC
TGCTTGCTGGTCATGTGGCCTTGATATCAAGCCAC

| | | | |
|---|---|---|---|
| NOV9f, CG50736-04 | SEQ ID NO: 218 | 669 aa | MW at 73183.5kD |
| Protein Sequence | | | |

MEARKELESLPPFCLNSLHSIILTTKLTSQSLGGPRGVEERMEDRPAKWHIAAKDSCLWLKPSDLLLQ
VKDWDKYGLMPQVLRYHVVACHQLLLENLKLISNATSLQGEPIVISVSQSTVYINNKAKIISSDIIST
NGIVHIIDKLLSPKNLLITPKDNSGRILQNLTTLATNNGYIKFSNLIQDSGLLSVITDPIHTPVTLFW
PTDQALHALPAEQQDFLFNQDNKDKLKEYLKFHVIRDAKVLAVDLPTSTAWKTLQGSELSVKCGAGRD
IGDLFLNGQTCRIVQRELLFDLGVAYGIDCLLIDPTLGGRCDTFTTFDASGECGSCVNTPSCPRWSKP
KGVKQKCLYNLPFKRNLEGCRERCSLVIQIPRCCKGYFGRDCQACPGGPDAPCNNRGVCLDQYSATGE
CKCNTGFNGTACEMCWPGRFGPDCLPCGCSDHGQCDDGITGSGQCLCETGWTGPSCDTQAVLSAVCTP
PCSAHATCKENNTCECNLDYEGDGITCTVVDFCKQDNGGCAKVARCSQKGTKVSCSCQKGYKGDGHSC
TEIDPCADGLNGGCHEHATCKMTGPGKHKCECKSHYVGDGLNCEPEQLPIDRCLQDNGQCHADAKCVD
LHFQDTTVGVFHLRSPLGQYKLTFDKAREACANEAATMATYNQLSYAQKTWYSFTKE

| | | |
|---|---|---|
| NOV9g, CG50736-05 | SEQ ID NO: 219 | 1353 bp |
| DNA Sequence | ORF Start: at 1 | ORF Stop: TAA at 1264 |

CTTCCCACATCCACTGCCTGGAAGACCCTGCAAGGTTCAGAGCTGAGTGTGAAATGTGGAGCTGGCAG
GGACATCGGTGACCTCTTTCTGAATGGCCAAACCTGCAGAATTGTGCAGCGGGAGCTCTTGTTTGACC
TGGGTGTGGCCTACGGCATTGACTGTCTGCTGATTGATCCCACCCTGGGGGGCCGCTGTGACACCTTT
ACTACTTTCGATGCCTCGGGGGAGTGTGGGAGCTGTGTCAATACTCCCAGCTGCCCAAGGTGGAGTAA
ACCAAAGGGTGTGAAGCAGAAGTGTCTCTACAACCTGCCCTTCAAGAGGAACCTGGAAGGCTGCCGGG
AGCGATGCAGCCTGGTGATACAGATCCCCAGGTGCTGCAAGGGCTACTTCGGGCGAGACTGTCAGGCC
TGCCCTGGAGGACCAGATGCCCCGTGTAATAACCGGGGTGTCTGCCTTGATCAGTACTCGGCCACCGG
AGAGTGTAAATGCAACACCGGCTTCAATGGGACGGCGTGTGAGATGTGCTGGCCGGGGAGATTTGGGC
CTGATTGTCTGCCCTGTGGCTGCTCAGACCACGGACAGTGCGATGATGGCATCACGGGCTCCGGGCAG
TGCCTCTGTGAAACGGGGTGGACAGGCCCCTCGTGTGACACTCAGGCAGTTTTGTCTGCAGTGTGTAC
GCCTCCTTGTTCTGCTCATGCCACCTGTAAGGAGAACAACACGTGTGAGTGTAACCTGGATTATGAAG
GTGACGGAATCACATGCACAGTTGTGGATTTCTGCAAACAGGACAACGGGGGCTGTGCAAAGGTGGCC
AGATGCTCCCAGAAGGGCACGAAGGTCTCCTGCAGCTGCCAGAAGGGATACAAAGGGGACGGGCACAG
CTGCACAGAGATAGACCCCTGTGCAGACGGCCTTAACGGAGGGTGTCACGAGCACGCCACCTGTAAGA
TGACAGGCCCGGGCAAGCACAAGTGTGAGTGTAAAAGTCACTATGTCGGAGATGGGCTGAACTGTGAG
CCGGAGCAGCTGCCCATTGACCGCTGCTTACAGGACAATGGGCAGTGCCATGCAGACGCCAAATGTGT
CGACCTCCACTTCCAGGATACCACTGTTGGGGTGTTCCATCTACGCTCCCCACTGGGCCAGTATAAGC
TGACCTTTGACAAAGCCAGAGAGGCCTGTGCCAACGAAGCTGCGACCATGGCAACCTACAACCAGCTC
TCCTATGCCCAGAAGACCTGGTATTCCTTTACCAAGGAATAAAGCCTTTGATGCCAGGACCCAGACTC
AAGGAGAATCTGAATCTCTGCTCTCCTGCTTGCTGGTCATGTGGCCTTGATATCAAGCCAC

| | | | |
|---|---|---|---|
| NOV9g, CG50736-05 | SEQ ID NO: 220 | 421 aa | MW at 45276.6kD |
| Protein Sequence | | | |

LPTSTAWKTLQGSELSVKCGAGRDIGDLFLNGQTCRIVQRELLFDLGVAYGIDCLLIDPTLGGRCDTF
TTFDASGECGSCVNTPSCPRWSKPKGVKQKCLYNLPFKRNLEGCRERCSLVIQIPRCCKGYFGRDCQA
CPGGPDAPCNNRGVCLDQYSATGECKCNTGFNGTACEMCWPGRFGPDCLPCGCSDHGQCDDGITGSGQ
CLCETGWTGPSCDTQAVLSAVCTPPCSAHATCKENNTCECNLDYEGDGITCTVVDFCKQDNGGCAKVA
RCSQKGTKVSCSCQKGYKGDGHSCTEIDPCADGLNGGCHEHATCKMTGPGKHKCECKSHYVGDGLNCE
PEQLPIDRCLQDNGQCHADAKCVDLHFQDTTVGVFHLRSPLGQYKLTFDKAREACANEAATMATYNQL
SYAQKTWYSFTKE

| | | |
|---|---|---|
| NOV9h, CG50736-06 | SEQ ID NO: 221 | 3625 bp |
| DNA Sequence | ORF Start: ATG at 387 | ORF Stop: TAG at 2022 |

CTCATGCCTCAGCCTCCGGAGTAGTATTTTTAGTAGAGATGGTGTTTACCATGTGGGCCAGGCTGGTC
TCGAACTCCTGGCCTCAAGTGATCCACCCGCCTCGGCCTCCCAGACTGCTGGGATTACAGGCATGAGC
CACTGCACCCAGCCTTGTTTGTATTTTGAATTCCAAATGGAAATACCTTCATGATCTTCCCACTACTA
AAGGTTTAAATCTGGCACTGATACCTCTCCAAGAGGGCTATATACTATGCAGTGTTTCCCAGCATGTT
TCACAAGAAAATTCTTTTTTGAGGATCATCTCACAGAACTTGGGATCTTTGCAACATGTATTGTGAAA
TCCAGGCCAGAGGAACCCCATGTTCCTTCCACACTGATATTCCACAATGGAGGCAAGAAAGGAGCTAG
AGTCACTTCCTCCCTTTTGTCTGAACAGCCTCCACTCTATAATCCTGACCACAAAGCTTACTTCCCAG
AGTCTGGGTGGGCCGAGAGGTGTGGAAGAGAGAATGGAGGACAGGAGAGCCAAATGGCACATTGCAGC
AAAAGACTCCTGCCTCTGGCTGAAACCCTCTGATCTTCTGTTACAGGTTAAAGACTGGGACAAATACG
GTTTAATGCCCCAGGTTCTTCGGTACCATGTGGTCGCCTGCCACCAGCTGCTTCTGGAAAACCTGAAA
TTGATCTCAAATGCTACTTCCCTCCAAGGAGAGCCAATAGTCATCTCCGTCTCTCAGAGCACGGTGTA
TATAAATAATAAGGCTAAGATCATATCCAGTGATATCATCAGTACTAATGGGATTGTTCATATCATAG
ACAAATTGCTATCTCCCAAAAATTTGCTTATCACTCCCAAAGACAACTCTGGAAGAATTCTGCAAAAT
CTTACGACTTTGGCAACAAACAATGGCTACATCAAATTTAGCAACTTAATACAGGACTCAGGTTTGCT
GAGTGTCATCACCGATCCCATCCACACCCCAGTCACTCTCTTCTGGCCCACCGACCAAGCCCTCCATG
CCCTACCTGCTGAACAACAGGACTTCCTGTTCAACCAAGACAACAAGGACAAGCTGAAGGAGTATTTG
AAGTTTCATGTGATACGAGATGCCAAGGTTTTAGCTGTGGATCTTCCCACATCCACTGCCTGGAAGAC
CCTGCAAGGTTCAGAGCTGAGTGTGAAATGTGGAGCTGGCAGGGACATCGGTGACCTCTTTCTGAATG
GCCAAACCTGCAGAATTGTGCAGCGGGAGCTCTTGTTTGACCTGGGTGTGGCCTACGGCATTGACTGT
CTGCTGATTGATCCCACCCTGGGGGGCCGCTGTGACACCTTTACTACTTTCGATGCCTCGGGGGAGTG
TGGGAGCTGTGTCAATACTCCCAGCTGCCCAAGGTGGAGTAAACCAAAGGGTGTGAAGCAGAAGTGTC
TCTACAACCTGCCCTTCAAGAGGAACCTGQAAGGCTGCCGGGAGCGGTGCAGCCTGGTGATACAGATC
CCCAGGTGCTGCAAGGGCTACTTCGGGCGAGACTGTCAGGGTGAGGGTGCCTCTTCCCCCCTCGCAAC
TCTAAAAGTGTCTGCCTTGATCAGTACTCGGCCACCGGAGAGTGTAAATGCAACACCGGCTTCAATGG
GACGGCGTGTGAGATGTGCTGGCCGGGGAGATTTGGGCCTGATTGTCTGCCCTGTGGCTGCTCAGACC
ACGGACAGTGCGATGATGGCATCACGGGCTCCGGGCAGTGCCTCTGTGAAACGGGGTGGACAGGCCCC
TCGTGTGACACTCAGGCAGTTTTGCCTGCAGTGTGTACGCCTCCTTGTTCTGCTCATGCCACCTGTAA
GGAGAACAACACGTGTGAGTGTAACCTGGATTATGAAGGTGACGGAATCACATGCACAGTTGTGGATT
TCTGCAAACAGGACAACGGGGGCTGTGCAAAGGTGGCCAGATGCTCCCAGAAGGGCACGAAGGTCTCC
TGCAGCTGCCAGAAGGGATACAAAGGGGACGGGCACAGCTGCACAGAGATAGACCCCTGTGCAGACGG
CCTTAACGGAGGGTGTCACGAGCACGCCACCTGTAAGATGACAGGCCCGGGCAAGCACAAGTGTGAGT
GTAAAAGTCACTATGTCGGAGATGGGCTGAACTGTGAGCCGGAGCAGCTGCCCATTGACCGCTGCTTA
CAGGACAATGGGCAGTGCCATGCAGACGCCAAATGTGTCGACCTCCACTTCCAGGATACCACTGTTGG
GGTGTTCCATCTACGCTCCCCACTGGGCCAGTATAAGCTGACCTTTGACAAAGCCAGAGAGGCCTGTG
CCAACGAAGCTGCGACCATGGCAACCTACAACCAGCTCTCCTATGCCCAGAAGGCCAAGTACCACCTG
TGCTCAGCAGGCTGGCTGGAGACCGGGCGGGTTGCCTACCCCACAGCCTTCGCCTCCCAGAACTGTGG
CTCTGGTGTGGTTGGGATAGTGGACTATGGACCTAGACCCAACAAGAGTGAAATGTGGGATGTCTTCT
GCTATCGGATGAAAGGAAGTGCTGGCCTATTCCAACAGCTCAGCTCGAGGCCGTGCATTTCTAGAACA
CCTGACTGACCTGTCCATCCGCGGCACCCTCTTTGTGCCACAGAACAGTGGGCTGGGGGAGAATGAGA
CCTTGTCTGGGCGGGACATCGAGCACCACCTCGCCAATGTCAGCATGTTTTTCTACAATGACCTTGTC
AATGGCACCACCCTGCAAACGAGGCTGGGAAGCAAGCTGCTCATCACTGCCAGCCAGGACCCACTCCA
ACCGACGGAGACCAGGTTTGTTGATGGAAGAGCCATTCTGCAGTGGGACATCTTTGCCTCCAATGGGA
TCATTCATGTCATTTCCAGGCCTTTAAAAGCACCCCCTGCCCCCGTGACCTTGACCCACACTGGCTTG
GGAGCAGGGATCTTCTTTGCCATCATCCTGGTGACTGGGGCTGTTGCCTTGGCTGCTTACTCCTACTT
TCGGCAAGCAGCAGCCTGAGAATATCTCGAACCCCTTGTATGAGAGCACAACCTCAGCTCCCCCAGAA
TTGGCAAGCAGCAGCCTGAGAATATCTCGAACCCCTTGTATGAGAGCACAACCTCAGCTCCCCCAGAA
CCTTCCTACGACCCCTTCACGGACTCTGAAGAACGGCAGCTTGAGGGCAATGACCCCTTGAGGACACT
GTGAGGGCCTGGACGGGAGATGCCAGCCATCACTCACTGCCACCTGGGCCATCAACTGTGAATTCTCA
GCACCAGTTGCCTTTTAGGAACGTAAAGTCCTTTAAGCACTCAGAAGCCATACCTCATCTCTCTGGCT
GATCTGGGGGTTGTTTCTGTGGGTGAGAGATGTGTTGCTGTGCCCACCCAGTACAGCTTCCTCCTCTG
ACCCTTTGGCTCTTCTTCCTTTGTACTCTTCAGCTGGCACCTGCTCCATTCTGCCCTACATGATGGGT
AACTGTGATCTTTCTTCCCTGTTAGATTGTAAGCCTCCGTCTTTGTATCCCAGCCCCTAGCCCAGTGC
CTGACACAGGAACTGTGCACAATAAAGGTTTATGGAACAGAAACAAAGTCAAAAAAAAAAAAAAAAAA
AAAAAAAAAAAAAAAAAAAAC

| | | | |
|---|---|---|---|
| NOV9h, CG50736-06 | SEQ ID NO: 222 | 545 aa | MW at 60038.8kD |
| Protein Sequence | | | |

MEARKELESLPPFCLNSLHSIILTTKLTSQSLGGPRGVEERMEDRRAKWHIAAKDSCLWLKPSDLLLQ
VKDWDKYGLMPQVLRYHVVACHQLLLENLKLISNATSLQGEPIVISVSQSTVYINNKAKIISSDIIST
NGIVHIIDKLLSPKNLLITPKDNSGRILQNLTTLATNNGYIKFSNLIQDSGLLSVITDPIHTPVTLFW
PTDQALHALPAEQQDFLFNQDNKDKLKEYLKFHVIRDAKVLAVDLPTSTAWKTLQGSELSVKCGAGRD
IGDLFLNGQTCRIVQRELLFDLGVAYGIDCLLIDPTLGGRCDTFTTFDASGECGSCVNTPSCPRWSKP
KGVKQKCLYNLPFKRNLEGCRERCSLVIQIPRCCKGYFGRDCQGEGASSPLATLKVSALISTRPPESV
NATPASMGRRVRCAGRGDLGLIVCPVAAQTTDSAMMASRAPGSASVKRGGQAPRVTLRQFCLQCVRLL
VLLMPPVRRTTRVSVTWIMKVTESHAQLWISANRTTGAVQRWPDAPRRARRSPAAARRDTKGTGTAAQ
R

| | | |
|---|---|---|
| NOV9i, CG50736-07 | SEQ ID NO: 223 | 1624 bp |
| DNA Sequence | ORF Start: ATG at 387 | ORF Stop: TAA at 1530 |

CTCATGCCTCAGCCTCCGGAGTAGTATTTTTAGTAGAGATGGTGTTTACCATGTGGGCCAGGCTGGTC
TCGAACTCCTGGCCTCAAGTGATCCACCCGCCTCGGCCTCCCAGAGTGCTGGGATTACAGGCATGAGC
CACTGCACCCAGCCTTGTTTGTATTTTGAATTCCAAATGGAAATACCTTCATGATCTTCCCACTACTA
AAGGTTTAAATCTGGCACTGATACCTCTCCAAGAGGGCTATATACTATGCAGTGTTTCCCAGCATGTT
TCACAAGAAAATTCTTTTTTGAGGATCATCTCACAGAACTTGGGATCTTTGCAACATGTATTGTGAAA
TCCAGGCCAGAGGAACCCCATGTTCCTTCCACACTGATATTCCACAATGGAGGCAAGAAAGGAGCTAG
AGTCACTTCCTCCCTTTTGTCTGAACAGCCTCCACTCTATAATCCTGACCACAAAGCTTACTTCCCAG
AGTCTGGGTGGGCCGAGAGGTGTGGAAGAGAGAATGGAGGACAGGAGAGCCAAATGGCACATTGCAGC
AAAAGACTCCTGCCTCTGGCTGAAACCCTCTGATCTTCTGTTACAGGTTAAAGACTGGGACAAATACG
GTTTAATGCCCCAGGTTCTTCGGTACCATGTGGTCGCCTGCCACCAGCTGCTTCTGGAAAACCTGAAA
TTGATCTCAAATGCTACTTCCCTCCAAGGAGAGCCAATAGTCATCTCCGTCTCTCAGAGCACGGTGTA
TATAAACAATAAGGCTAAGATCATATCCAGTGATATCATCAGTACTAATGGGATTGTTCATATCATAG
ACAAATTGCTATCTCCCAAAAATTTGCTTATCACTCCCAAAGACAACTCTGGAAGAATTCTGCAAAAT
CTTACGACTTTGGCAACAAACAATGGCTACATCAAATTTAGCAACTTAATACAGGACTCAGGTTTGCT
GAGTGTCATCACCGATCCCATCCACACCCCAGTCACTCTCTTCTGGCCCACCGACCAAGCCCTCCATG
CCCTACCTGCTGAACAACAGGACTTCCTGTTCAACCAAGACAACAAGGACAAGCTGAAGGAGTATTTG
AAGTTTCATGTGATACGAGATGCCAAGGTTTTAGCTGTGGATCTTCCCACATCCACTGCCTGGAAGAC
CCTGCAAGGTTCAGAGCTGAGTGTGAAATGTGGAGCTGGCAGGGACATCGGTGACCTCTTTCTGAATG
GCCAAACCTGCAGAATTGTGCAGCGGGAGCTCTTGTTTGACCTGGGTGTGGCCTACGGCATTGACTGT
CTGCTGATTGATCCCACCCTGGGGGGCCGCTGTGACACCTTTACTACTTTCGATGCCTCGGGGGAGTG
TGGGAGCTGTGTCAATACTCCCAGCTGCCCAAGGTGGAGTAAACCAAAGGGTGTGAAGCAGAAGTGTC
TCTACAACCTGCCCTTCAAGAGGAACCTGGAAGGCTGCCGGGAGCGGTGCAGCCTGGTGATACAGATC
CCCAGCCTGCCCTGGAGGACCAGATGCCCCGTGTAATAACCGGGGTGTCTGCCTTGATCAGTACTCGG
CCACCGGAGAGTGTAAATGCAACACCGGCTTCAATGGGACGGCGTGTGAGATGTGCTGGC

| | | | |
|---|---|---|---|
| NOV9i, CG50736-07 | SEQ ID NO: 224 | 381 aa | MW at 42565.8kD |
| Protein Sequence | | | |

MEARKELESLPPFCLNSLHSIILTTKLTSQSLGGPRGVEERMEDRRAKWHIAAKDSCLWLKPSDLLLQ
VKDWDKYGLMPQVLRYHVVACHQLLLENLKLISNATSLQGEPIVISVSQSTVYINNKAKIISSDIIST
NGIVHIIDKLLSPKNLLITPKDNSGRILQNLTTLATNNGYIKFSNLIQDSGLLSVITDPIHTPVTLFW
PTDQALHALPAEQQDFLFNQDNKDKLKEYLKFHVIRDAKVLAVDLPTSTAWKTLQGSELSVKCGAGRD
IGDLFLNGQTCRIVQRELLFDLGVAYGIDCLLIDPTLGGRCDTFTTFDASGECGSCVNTPSCPRWSKP
KGVKQKCLYNLPFKRNLEGCRERCSLVIQIPSLPWRTRCPV

| | | |
|---|---|---|
| NOV9j, CG50736-08 | SEQ ID NO: 225 | 1857 bp |
| DNA Sequence | ORF Start: at 1 | ORF Stop: TAA at 1768 |

GTTCTTCGGTACCATGTGGTCGCCTGCCACCAGCTGCTTCTGGAAAACCTGAAATTGATCTCAAATGC
TACTTCCCTCCAAGGAGAGCCAATAGTCATCTCCGTCTCTCAGAGCACGGTGTATATAAACAATAAGG
CTAAGATCATATCCAGTGATATCATCAGTACTAATGGGATTGTTCATATCATAGACAAATTGCTATCT
CCCAAAAATTTGCTTATCACTCCCAAAGACAACTCTGGAAGAATTCTGCAAAATCTTACGACTTTGGC
AACAAACAATGGCTACATCAAATTTAGCAACTTAATACAGGACTCAGGTTTGCTGAGTGTCATCACCG
ATCCCATCCACACCCCAGTCACTCTCTTCTGGCCCACCGACCAAGCCCTCCATGCCCTACCTGCTGAA
CAACAGGACTTCCTGTTCAACCAAGACAACAAGGACAAGCTGAAGGAGTATTTGAAGTTTCATGTGAT
ACGAGATGCCAAGGTTTTAGCTGTGGATCTTCCCACATCCACTGCCTGGAAGACCCTGCAAGGTTCAG
AGCTGAGTGTGAAATGTGGAGCTGGCAGGGACATCGGTGACCTCTTTCTGAATGGCCAAACCTGCAGA
ATTGTGCAGCGGGAGCTCTTGTTTGACCTGGGTGTGGCCTACGGCATTGACTGTCTGCTGATTGATCC
CACCCTGGGGGGCCGCTGTGACACCTTTACTACTTTCGATGCCTCGGGGGAGTGTGGGAGCTGTGTCA
ATACTCCCAGCTGCCCAAGGTGGAGTAAACCAAAGGGTGTGAAGCAGAAGTGTCTCTACAACCTGCCC
TTCAAGAGGAACCTGGAAGGCTGCCGGGAGCGATGCAGCCTGGTGATACAGATCCCCAGGTGCTGCAA
GGGCTACTTCGGGCGAGACTGTCAGGCCTGCCCTGGAGGACCAGATGCCCCGTGTAATAACCGGGGTG
TCTGCCTTGATCAGTACTCGGCCACCGGAGAGTGTAAATGCAACACCGGCTTCAATGGGACGGCGTGT
GAGATGTGCTGGCCGGGGAGATTTGGGCCTGATTGTCTGCCCTGTGGCTGCTCAGACCACGGACAGTG
CGATGATGGCATCACGGGCTCCGGGCAGTGCCTCTGTGAAACGGGGTGGACAGGCCCCTCGTGTGACA
CTCAGGCAGTTTTGTCTGCAGTGTGTACGCCTCCTTGTTCTGCTCATGCCACCTGTAAGGAGAACAAC
ACGTGTGAGTGTAACCTGGATTATGAAGGTGACGGAATCACATGCACAGTTGTGGATTTCTGCAAACA
GGACAACGGGGGCTGTGCAAAGGTGGCCAGATGCTCCCAGAAGGGCACGAAGGTCTCCTGCAGCTGCC
AGAAGGGATACAAAGGGGACGGGCACAGCTGCACAGAGATAGACCCCTGTGCAGACGGCCTTAACGGA
GGGTGTCACGAGCACGCCACCTGTAAGATGACAGGCCCGGGCAAGCACAAGTGTGAGTGTAAAAGTCA
CTATGTCGGAGATGGGCTGAACTGTGAGCCGGAGCAGCTGCCCATTGACCGCTGCTTACAGGACAATG
GGCAGTGCCATGCAGACGCCAAATGTGTCGACCTCCACTTCCAGGATACCACTGTTGGGGTGTTCCAT
CTACGCTCCCCACTGGGCCAGTATAAGCTGACCTTTGACAAAGCCAGAGAGGCCTGTGCCAACGAAGC
TGCGACCATGGCAACCTACAACCAGCTCTCCTATGCCCAGAAGACCTGGTATTCCTTTACCAAGGAAT
AAAGCCTTTGATGCCAGGACCCAGACTCAAGGAGAATCTGAATCTCTGCTCTCCTGCTTGCTGGTCAT
GTGGCCTTGATATCAAGCCAC

| | | | |
|---|---|---|---|
| NOV9j, CG50736-08 | SEQ ID NO: 226 | 589 aa | MW at 63994.0kD |
| Protein Sequence | | | |

VLRYHVVACHQLLLENLKLISNATSLQGEPIVISVSQSTVYINNKAKIISSDIISTNGIVHIIDKLLS
PKNLLITPKDNSGRILQNLTTLATNNGYIKFSNLIQDSGLLSVITDPIHTPVTLFWPTDQALHALPAE
QQDFLFNQDNKDKLKEYLKFHVIRDAKVLAVDLPTSTAWKTLQGSELSVKCGAGRDIGDLFLNGQTCR
IVQRELLFDLGVAYGIDCLLIDPTLGGRCDTFTTFDASGECGSCVNTPSCPRWSKPKGVKQKCLYNLP
FKRNLEGCRERCSLVIQIPRCCKGYFGRDCQACPGGPDAPCNNRGVCLDQYSATGECKCNTGFNGTAC
EMCWPGRFGPDCLPCGCSDHGQCDDGITGSGQCLCETGWTGPSCDTQAVLSAVCTPPCSAHATCKENN
TCECNLDYEGDGITCTVVDFCKQDNGGCAKVARCSQKGTKVSCSCQKGYKGDGHSCTEIDPCADGLNG
GCHEHATCKMTGPGKHKCECKSHYVGDGLNCEPEQLPIDRCLQDNGQCHADAKCVDLHFQDTTVGVFH
LRSPLGQYKLTFDKAREACANEAATMATYNQLSYAQKTWYSFTKE

| | | |
|---|---|---|
| NOV9k, CG50736-10 | SEQ ID NO: 227 | 8495 bp |
| DNA Sequence | ORF Start: ATG at 210 | ORF Stop: TGA at 7461 |

AATCATCCCACATGCTAAGAATCTAAGATGTATAAAATAAAGTGGTGAAAGATGAAAATGAAATTTTA
TCAAGGTTAGAGTCAGGTTGGAGTGGCCATTGTTTACCAAACTGAGAAATCTAAATTTTATTTGGTTG
GTAATTGAGAGTCATTGAGATATTTTGGGGAAGGTCACCCTGATGCCTTTGCTAATCAAATGAAATGA
ATGAAATGGAGAGGCAAGAAACTGGAAATAGCAAGACGAGGTATCATGCTACTGCAATAGTCCAGGCA
AAACATGATAAAGGCCTCAACAAGAATGGCACCAGTGGAGATGAAGAGCAGAAGATCAAGGTGGGAGA
CAGAGACAGAGAAAACAAAGGATTTGATGGCTTATTAGATGTTTGGAATACTTTAAACTTTATTCATC
CTTGCTTTGCTGTGTGCAACTGTGTGCATGGGGTGTGCAACAGTGGACTAGATGGCGATGGAACCTGT
GAGTGCTACTCTGCGTACACTGGCCCCAAGTGTGACAAGCTCACAGAAAACTTTCACACCTCTCATCT
GACACTGTGGCCTGTGCACGACTCCAAGCACTGGGGAAGCCTTCGACATCAGAATATGAATGGCACCT
GTTCTTCCGGGGGCGGCAAGGGGGATCCCGATGTTTATCAAAATGGGTTGATTTTCCACGGAGGGGGT
ACTTCTGGAGGTCTATCGTCATCACGAAACAGACGAAGTAGTGTCAAGCGTCCTGAGAAGTGGAAGGG
GGACGATCGAGATGGAGGTGGCAAGGAAGGCCAGCAGCGGCGGCGGGCAGACACAGAGTCGAGTCTTC
AAAGAGGTCACATCAAAACGCCCCTGCCCCACAGGCAAGGTGAAGCGCGGATCACGGAGACAACGGGG
AATTGTGTTTCTGCTGGCATGACTGGAACCAATGCCAATCACACAAAAGTTCACCCTACGGTTCAGTC
CTTGACAGAATATGATTCCTTTCAGACTCATTCCACCAGCAGACTGAAGGAATTTGAGAAACAGCAGG
TGAAGGAAAGATTTTCTGACCCTCCCCTAATGCAGGCTATAAAACCCTCACATGAGAAGTACCCTCCT
TATGCCCAGAGAAAAGGAACATCTTTGTCTCCAAAGACACAGGGACACGGAGATGATGAACAGGCCTT
GCTAAGTTTCCTCCACTCTATTACCCTTAGCTTGTACCTTTATCCAACCACATTCTTCCATGACTCTC
CAGTCTTCATCAAACCTGGCATAAAAACACTCAGACTTAACCACTTCTTTGGGTCTTCATTTCCTTAT
GAAGGCTCCAGTGTCATANNNNNNATGGGAATTGAGGTTTGGAAAAACTGGTGCCAAAATGCTGATAC
CCTGGCTGCTGCCCCTGCTCCATCCCTGAATGTGCAGCCTTGCTCTGCCCAGAAAATTCCAGATGTTC
GCCTTCCACTGAAGATGAAAACAAACTGGAATGCAAATGCCTTCCCAATTACCGAGGCGATGGCAAAT
ACTGCGACCCCATCAATCCATGTTTACGAAAAATCTGCCACCCTCATGCTCATTGTACGTACCTGGGA
CCAAATCGGCACAGTTGTACATGCCAAGAAGGCTACCGTGGGGATGGCCAAGTGTGCTTGCCTGTGGA
CCCCTGCCAAATTAACTTTGGAAACTGCCCTACAAAGTCTACAGTGTGCAAATATGATGGGCCTGGAC
AGATGCATTTGCCAGAAAGGTTACGTGGGTGATGGCTTAACGTGTTATGGAAACATTATGGAGCGACT
CAGAGAATTAAATACTGAACCCAGAGGAAAATGGCAAGGAAGGCTGACCTCTTTCATCTCACTCCTAG
AAAGTATACAAATTGTAAGTGTACAACTCAGTGAATTTTCCCAACGTGAACCTACTTGTGTAAACACC
AAGTCCATTGCCAGCAACCTAGAAGGCCCCCTGGTCCCCCTTTCCAATCATTACCCTCTACAGGTAAA
TGAGCTTTTGGTGGATAATAAAGCTGCTCAATACTTTGTGAAACTCCACATAATTGCTGGTCAGATGA
ACATCGAATATATGAATAACACAGACATGTTCTACACCTTGACTGGAAAGTCGGGGGAAATCTTCAAC
AGCGATAAGGACAATCAAATAAAGCTTAAACTCCATGGAGGCAAAAAGAAGGTAAAAATTATACAAGG
GGACATCATTGCTTCCAATGGGCTTCTGCACATCCTTGACAGAGCCATGGACAAGTTAGAACCCACAT
TTGAGAGCAACAATGAGGALACCAATTTGGGACATGCCTTAGATGAGGATGGAGTTGGTGGACCATAC
ACCATTTTTGTTCCAAATAATGAAGCATTGAATAACATGAAGGACGGCACTCTCGATTACCTCCTTTC
TCCAGAGCTTGAAGTGGCCACTCTCATCTCCACCCCTCACATCAGGAGCATGGCCAACCAGCTCATAC
AGTTCAACACCACCGACAATGGACAGATTCTGGCAAATGATGTGGCAATGGAAGAAATTGAGATCACT
GCCAAAAATGGCCGAATTTACACACTGACAGGAGTTCTCATTCCTCCCTCCATTGTCCCGATTCTGCC
CCATCGATGTGATGAAACAAAGAGAGAGATGAAACTGGGCACTTGTGTGAGCTGTTCTCTGGTGTACT
GGAGCAGATGTCCTGCTAACTCTGAGCCCACAGCACTCTTCACACACAGATGTGTCTACAGTGGCAGG
TTTGGGAGCCTGAAGAGCGGCTGTGCCCGGTACTGCAATGCCACTGTGAAGTGTGCAGATAGCCTCGG
CGGCAACGGGACATGCATTTGTGAGGAGGGCTTCCAAGGCTCCCAGTGTCAGTTCTGCTCTGATCCCA
ATAAATACGGACCTCGGTGTAACAAAAAATGCCTGTGCGTTCACGGAACATGCAATAACAGGATAGAC
AGCGATGGGGCCTGCCTCACTGGCACATGCAGAGACGGCTCTGCCGGGAGACTCTGTGATAAGCAGAC
CTCAGCCTGTGGGCCCTACGTGCAGTTCTGTCACATCCACGCCACCTGTGAATACAGCAATGGGACAG
CCAGTTGTATTTGCAAAGCAGGATATGAAGGAGATGGAACTCTGTGTTCTGAGATGGACCCTTGCACA
GGACTAACTCCAGGAGGCTGTAGCCGCAATGCAGAATGCATCAAAACTGGCACGGGCACCCACACCTG
CGTGTGTCAGCAGGGTTGGACAGGGAATGGGAGAGACTGCTCGGAGATCAACAACTGCCTGCTGCCCA
GTGCAGGCGGCTGCCACGACAACGCATCCTGTTTGTATGTGGGTCCCGGGCAGAATGAGTGTGAGTGC
AAGAAAGGATTTCGAGGAAATGGGATTGACTGTGAACCAATAACTTCATGCTTGGAACAAACCGGGAA
ATGTCATCCATTGGCAAGCTGTCAATCTACTTCGTCTGGTGTCTGGAGCTGTGTTTGTCAAGAGGGCT
ATGAAGGAGATGGCTTTCTGTGCTATGGAAACGCAGCAGTGGAATTGTCATTTCTCTCCGAAGCAGCT
ATATTTAACCGATGGATAAATAATGCTTCTCTACAACCCACACTGTCAGCCACCTCAAACCTCACTGT
CCTCGTGCCTTCCCAACAAGCTACTGAGGACATGGACCAGGATGAGAAAAGCTTCTGGTTGTCACAGA
GCAATATTCCAGCCCTAATAAAGTACCATATGCTACTAGGCACATACAGAGTGGCAGATCTGCAGACC
CTGTCTTCTTCTGACATGTTGGCAACATCTTTGCAGGGCAACTTCCTTCACTTGGCAAAGGTGGATGG
GAATATCACAATTGAAGGGGCCTCCATTGTCGATGGGGACAACGCAGCCACAAATGGAGTGATACACA
TCATCAACAAGGTGCTGGTCCCACAAAGACGTCTAACTGGCTCCTTACCAAACCTGCTCATGCGGCTG
GAACAGATGCCTGACTATTCCATCTTCCGGGGCTACATCATTCAATATAATCTGGCGAATGCAATTGA
GGCTGCCGATGCCTACACAGTGTTTGCTCCAAACAACAATGCCATCGAGAATTACATCAGGGAGAAGA
AAGTCTTGTCTCTAGAGGAGGACGTCCTCCGGTATCATGTGGTCCTGGAGGAGAAACTCCTGAAGAAT
GACCTGCACAATGGCATGCATCGTGAGACCATGCTGGGTTTCTCCTATTTCCTTAGCTTCTTTCTCCA
TAATGACCAGCTCTATGTAAATGAGGCTCCAATAAACTACACCAATGTAGCCACTGATAAGGGAGTGA
TCCATGGTTTGGGAAAAGTTCTGGAAATTCAGAAGAACAGATGTGATAATAATGACACTACTATTATA
CGAGGAAGATGTAGGACATGCTCCTCAGAGCTGACCTGCCCATTCGGAACTAAATCTCTAGGTAATGA
GAAGAGGAGATGCATCTATACCTCCTATTTCATGGGAAGACGAACCCTGTTTATTGGGTGCCAGCCAA
AATGTGTGAGAACCGTCATTACGAGAGAATGCTGTGCCGGCTTCTTTGGCCCCCAATGCCAGCCCTGC
CCAGGGAATGCCCAGAATGTCTGCTTTGGTAATGGCATCTGTTTGGATGGAGTGAATGGCACAGGTGT
GTGTGAGTGTGGGGAGGGCTTCAGCGGCACAGCCTGCGAGACCTGCACCGAGGGCAAGTACGGCATCC
ACTGTGACCAAGCATGTTCTTGTGTCCATGGGAGATGCAACCAAGGACCCTTGGGAGATGGCTCCTGT
GACTGTGATGTTGGCTGGCGAGGAGTGCATTGTGACAATGCAACCACAGAAGACAACTGCAATGGGAC
ATGCCATACCAGCGCCAACTGCCTCACCAACTCAGATGGTACAGCTTCATGCAAGTGTGCAGCAGGAT
TCCAAGGAAACGGGACCATCTGCACAGCAATCAATGCCTGTGAGATCAGCAATGGAGGTTGCTCTGCC
AAGGCTGACTGTAAGAGAACCACCCCAGGAAGGCGAGTGTGCACGTGCAAAGCAGGCTACACGGGTGA
TGGCATTGTGTGCCTGGAAATCAACCCGTGTTTGGAGAACCATGGTGGCTGTGACAAGAATGCGGAGT
GCACACAGACAGGACCCAACCAGGCTGCCTGTAACTGTTTGCCAGCATACACTGGAGATGGAAAGGTC
TGCACACTCATCAATGTCTGCTTAACTAAAAATGGCGGCTGTAGTGAATTTGCCATCTGCAACCACAC
TGGGCAAGTAGAAAGGACTTGTACTTGCAAGCCAAACTACATTGGAGATGGATTTACCTGCCGCGGCA
GCATTTATCAGGAGCTTCCCAAGAACCCGAAAACTTCCCAGTATTTCTTCCAGTTGCAGGAGCATTTC
GTGAAAGATCTGGTCGGCCCAGGCCCCTTCACTGTTTTTGCACCTTTATCTGCAGCCTTTGATGAGGA
AGCTCGGGTTAAAGACTGGGACAAATACGGTTTAATGCCCCAGGTTCTTCGGTACCATGTGGTCGCCT
GCCACCAGCTGCTTCTGGAAAACCTGAAATTGATCTCAAATGCTACTTCCCTCCAAGGAGAGCCAATA
GTCATCTCCGTCTCTCAGAGCACGGTGTATATAAACAATAAGGCTAAGATCATATCCAGTGATATCAT
CAGTACTAATGGGATTGTTCATATCATAGACAAATTGCTATCTCCCAAAAATTTGCTTATCACTCCCA
AAGACAACTCTGGAAGAATTCTGCAAAATCTTACGACTTTGGCAACAAACAATGGCTACATCAAATTT
AGCAACTTAATACAGGACTCAGGTTTGCTGAGTGTCATCACCGATCCCATCCACACCCCAGTCACTCT
CTTCTGGCCCACCGACCAAGCCCTCCATGCCCTCCATGCCCTACCTGCTGAACAACAGGACTTCCTGT
TCAACCAAGACAACAAGGACAAGCTGAAGGAGTATTTGAAGTTTCATGTGATACGAGATGCCAAGGTT
TTAGCTGTGGATCTTCCCACATCCACTGCCTGGAAGACCCTGCAAGGTTCAGAGCTGAGTGTGAAATG
TGGAGCTGGCAGGGACATCGGTGACCTCTTTCTGAATGGCCAAACCTACAGAATTGTGCAGCGGGAGC
TCTTGTTTGACCTGGGTGTGGCCTACGGCATTGACTGTCTGCTGATTGATCCCACCCTGGGGGGCCGC
TGTGACACCTTTACTACTTTCGATGCCTCGGGGGAGTGTGGGAGCTGTGTCAATACTCCCAGCTGCCC
AAGGTGGAGTAAACCAAAGGGTGTGAAGCAGAAGTGTCTCTACAACCTGCCCTTCAAGAGGAACCTGG
AAGGCTGCCGGGAGCGGTGCAGCCTGGTGATACAGATCCCCAGGTGCTGCAAGGGCTACTTCGGGCGA
GACTGTCAGGCCTGCCCTGGAGGACCAGATGCCCCGTGTAATAACCGGGGTGTCTGCCTTGATCAGTA
CTCGGCCACCGGAGAGTGTAAATGCAACACCGGCTTCAATGGGACGGCGTGTGAGATGTGCTGGCCGG
GGAGATTTGGGCCTGATTGTCTGCCCTGTGGCTGCTCAGACCACGGACAGTGCGATGATGGCATCACG
GGCTCCGGGCAGTGCCTCTGTGAAACGGGGTGGACAGGCCCCTCGTGTGACACTCAGGCAGTTTTGCC
TGCAGTGTGTACGCCTCCTTGTTCTGCTCATGCCACCTGTAAGGAGAACAACACGTGTGAGTGTAACC
TGGATTATGAAGGTGACGGAATCACATGCACAGTTGTGGATTTCTGCAAACAGGACAACGGGGGCTGT
GCAAAGGTGGCCAGATGCTCCCAGAAGGGCACGAAGGTCTCCTGCAGCTGCCAGAAGGGATACAAAGG
GGACGGGCACAGCTGCACAGAGATAGACCCCTGTGCAGACGGCCTTAACGGAGGGTGTCACGAGCACG
CCACCTGTAAGATGACAGGCCCGGGCAAGCACAAGTGTGAGTGTAAAAGTCACTATGTCGGAGATGGG
CTGAACTGTGAGCCGGAGCAGCTGCCCATTGACCGCTGCTTACAGGACAATGGGCAGTGCCATGCAGA
CGCCAAATGTGTCGACCTCCACTTCCAGGATACCACTGTTGGGGTGTTCCATCTACGCTCCCCACTGG
GCCAGTATAAGCTGACCTTTGACAAAGCCAGAGAGGCCTGTGCCAACGAAGCTGCGACCATGGCAACC
TACAACCAGCTCTCCTATGCCCAGAAGGCCAAGTACCACCTGTGCTCAGCAGGCTGGCTGGAGACCGG
GCGGGTTGCCTACCCCACAGCCTTCGCCTCCCAGAACTGTGGCTCTGGTGTGGTTGGGATAGTGGACT
ATGGACCTAGACCCAACAAGAGTGAAATGTGGGATGTCTTCTGCTATCGGATGAAAGGAAGTGCTGGC
CTATTCCAACAGCTCAGCTCGAGGCCGTGCATTTCTAGAACACCTGACTGACCTGTCCATCCGCGGCA
CCCTCTTTGTGCCACAGAACAGTGGGCTGGGGGAGAATGAGACCTTGTCTGGGCGGGACATCGAGCAC
CACCTCGCCAATGTCAGCATGTTTTTCTACAATGACCTTGTCAATGGCACCACCCTGCAAACGAGGCT
GGGAAGCAAGCTGCTCATCACTGCCAGCCAGGACCCACTCCAACCGACGGAGACCAGGTTTGTTGATC
GAAGAGCCATTCTGCAGTGGGACATCTTTGCCTCCAATGGGATCATTCATGTCATTTCCAGGCCTTTA
AAAGCACCCCCTGCCCCCGTGACCTTGACCCACACTGGCTTGGGAGCAGGGATCTTCTTTGCCATCAT
CCTGGTGACTGGGGCTGTTGCCTTGGCTGCTTACTCCTACTTTCGGATAAACCGGAGAACAATCGGCT
TCCAGCATTTTGAGTCGGAAGAGGACATTAATGTTGCAGCTCTTGGCAAGCAGCAGCCTGAGAATATC
TCGAACCCCTTGTATGAGAGCACAACCTCAGCTCCCCCAGAACCTTCCTACGACCCCTTCACGGACTC
TGAAGAACGGCAGCTTGAGGGCAATGACCCCTTGAGGACACTGTGAGGGCCTGGACGGGAGATGCCAC
CCATCACTCACTGCCACCTGGGCCATCAACTGTGAATTCTCAGCACCAGTTGCCTTTTAGGAACGTAA
AGTCCTTTAAGCACTCAGAAGCCATACCTCATCTCTCTGGCTGATCTGGGGGTTGTTTCTGTGGGTGA
GAGATGTGTTGCTGTGCCCACCCAGTACAGCTTCCTCCTCTGACCCTTTGGCTCTTCTTCCTTTGTAC
TCTTCAGCTGGCACCTGCTCCATTCTGCCCTACATGATGGGTAACTGTGATCTTTCTTCCCTGTTAGA
TTGTAAGCCTCCGTCTTTGTATCCCAGCCCCTAGCCCAGTGCCTGACACAGGAACTGTGCACAATAAA
GGTTTATGGAACAGAAACAAAGTCAAAAAAAAAAAAAAAAAAAAAAAAAAAAAAAAAAAAAAC

| | | | |
|---|---|---|---|
| NOV9k, CG50736-10 | SEQ ID NO: 228 | 2417 aa | MW at 262971.8kD |
| Protein Sequence | | | |

MERQETGNSKTRYHATAIVQAKHDKGLNKNGTSGDEEQKIKVGDRDRENKGFDGLLDVWNTLNFIHPC
FAVCNCVHGVCNSGLDGDGTCECYSAYTGPKCDKLTENFHTSHLTLWPVHDSKHWGSLRHQNMNGTCS
SGGGKGDPDVYQNGLIFHGGGTSGGLSSSRNRRSSVKRPEKWKGDDRDGGGKEGQQRRRADTESSLQR
GHIKTPLPHRQGEARITETTGNCVSAGMTGTNANHTKVHPTVQSLTEYDSFQTHSTSRLKEFEKQQVK
ERFSDPPLMQAIKPSHEKYPPYAQRKGTSLSPKTQGHGDDEQALLSFLHSITLSLYLYPTTFFHDSPV
FIKPGIKTLRLNHFFGSSFPYEGSSVIXXMGIEVWKNWCQNADTLAAAPAPSLNVQPCSAQKIPDVRL
PLKMKTNWNANAFPITEAMANTATPSIHVYEKSATLMLIVRTWDQIGTVVHAKKATVGMAKCACLWTP
AKLTLETALQSLQCANNMGLDRCICQKGYVGDGLTCYGNIMERLRELNTEPRGKWQGRLTSFISLLES
IQIVSVQLSEFSQREPTCVNTKSIASNLEGPLVPLSNHYPLQVNELLVDNKAAQYFVKLHIIAGQNNI
EYMNNTDMFYTLTGKSGEIFNSDKDNQIKLKLHGGKKKVKIIQGDIIASNGLLHILDRAMDKLEPTFE
SNNEETNLGHALDEDGVGGPYTIFVPNNEALNNMKDGTLDYLLSPELEVATLISTPHIRSMANQLIQF
NTTDNGQILANDVAMEEIEITAKNGRIYTLTGVLIPPSIVPILPHRCDETKREMKLGTCVSCSLVYWS
RCPANSEPTALFTHRCVYSGRFGSLKSGCARYCNATVKCADSLGGNGTCICEEGFQGSQCQFCSDPNK
YGPRCNKKCLCVHGTCNNRIDSDGACLTGTCRDGSAGRLCDKQTSACGPYVQFCHIHATCEYSNGTAS
CICKAGYEGDGTLCSEMDPCTGLTPGGCSRNAECIKTGTGTHTCVCQQGWTGNGRDCSEINNCLLPSA
GGCHDNASCLYVGPGQNECECKKGFRGNGIDCEPITSCLEQTGKCHPLASCQSTSSGVWSCVCQEGYE
GDGFLCYGNAAVELSFLSEAAIFNRWINNASLQPTLSATSNLTVLVPSQQATEDMDQDEKSFWLSQSN
IPALIKYHMLLGTYRVADLQTLSSSDMLATSLQGNFLHLAKVDGNITIEGASIVDGDNAATNGVIHII
NKVLVPQRRLTGSLPNLLMRLEQMPDYSIFRGYIIQYNLANAIEAADAYTVFAPNNNAIENYIREKKV
LSLEEDVLRYHVVLEEKLLKNDLHNGMHRETMLGFSYFLSFFLHNDQLYVNEAPINYTNVATDKGVIH
GLGKVLEIQKNRCDNNDTTIIRGRCRTCSSELTCPFGTKSLGNEKRRCIYTSYFMGRRTLFIGCQPKC
VRTVITRECCAGFFGPQCQPCPGNAQNVCFGNGICLDGVNGTGVCECGEGFSGTACETCTEGKYGIHC
DQACSCVHGRCNQGPLGDGSCDCDVGWRGVHCDNATTEDNCNGTCHTSANCLTNSDGTASCKCAAGFQ
GNGTICTAINACEISNGGCSAKADCKRTTPGRRVCTCKAGYTGDGIVCLEINPCLENHGGCDKNAECT
QTGPNQAACNCLPAYTGDGKVCTLINVCLTKNGGCSEFAICNHTGQVERTCTCKPNYIGDGFTCRGSI
YQELPKNPKTSQYFFQLQEHFVKDLVGPGPFTVFAPLSAAFDEEARVKLWDKYGLMPQVLRYHVVACH
QLLLENLKLISNATSLQGEPIVISVSQSTVYINNKAKIISSDIISTNGIVHIIDKLLSPKNLLITPKD
NSGRILQNLTTLATNNGYIKFSNLIQDSGLLSVITDPIHTPVTLFWPTDQALHALHALPAEQQDFLFN
QDNKDKLKEYLKFHVIRDAKVLAVDLPTSTAWKTLQGSELSVKCGAGRDIGDLFLNGQTYRIVQRELL
FDLGVAYGIDCLLIDPTLGGRCDTFTTFDASGECGSCVNTPSCPRWSKPKGVKQKCLYNLPFKRNLEG
CRERCSLVIQIPRCCKGYFGRDCQACPGGPDAPCNNRGVCLDQYSATGECKCNTGFNGTACEMCWPGR
FGPDCLPCGCSDHGQCDDGITGSGQCLCETGWTGPSCDTQAVLPAVCTPPCSAHATCKENNTCECNLD
YEGDGITCTVVDFCKQDNGGCAKVARCSQKGTKVSCSCQKGYKGDGHSCTEIDPCADGLNGGCHEHAT
CKMTGPGKHKCECKSHYVGDGLNCEPEQLPIDRCLQDNGQCHADAKCVDLHFQDTTVGVFHLRSPLGQ
YKLTFDKAREACANEAATMATYNQLSYAQKAKYHLCSAGWLETGRVAYPTAFASQNCGSGVVGIVDYG
PRPNKSEMWDVFCYRMKGSAGLFQQLSSRPCISRTPD

| | | |
|---|---|---|
| NOV9l, CG50736-11 | SEQ ID NO: 229 | 1599 bp |
| DNA Sequence | ORF Start: at 1 | ORF Stop: end of sequence |

AGAATTCTGCAAAATCTTACGACTTTGGCAACAAACAATGGCTACATCAAATTTAGCAACTTAATACA
GGACTCAGGTTTGCTGAGTGTCATCACCGATCCCATCCACACCCCAGTCACTCTCTTCTGGCCCACCG
ACCAAGCCCTCCATGCCCTACCTGCTGAACAACAGGACTTCCTGTTCAACCAAGACAACAAGGACAAG
CTGAAGGAGTATTTGAAGTTTCATGTGATACGAGATGCCAAGGTTTTAGCTGTGGATCTTCCCACATC
CACTGCCTGGAAGACCCTGCAAGGTTCAGAGCTGAGTGTGAAATGTGGAGCTGGCAGGGACATCGGTG
ACCTCTTTCTGAATGGCCAAACCTGCAGAATTGTGCAGCGGGAGCTCTTGTTTGACCTGGGTGTGGCC
TACGGCATTGACTGTCTGCTGATTGATCCCACCCTGGGGGGCCGCTGTGACACCTTTACTACTTTCGA
TGCCTCGGGTGTGAAGCAGAAGTGTCTCTACAACCTGCCCTTCAAGAGGAACCTGGAAGGCTGCCGGG
AGCGGTGCAGCCTGGTGATACAGATCCCCAGGTGCTGCAAGGGCTACTTCGGGCGAGACTGTCAGGCC
TGCCCTGGAGGACCAGATGCCCCGTGTAATAACCGGGGTGTCTGCCTTGATCAGTACTCGGCCACCGG
AGAGTGTAAATGCAACACCGGCTTCAATGGGACGGCGTGTGAGATGTGCTGGCCGGGGAGATTCGGGC
CTGATTGTCTGCCCTGTGGCTGCTCAGACCACGGACAGTGCGATGATGGCATCACGGGCTCCGGGCAG
TGCCTCTGTGAAACGGGGTGGACAGGCCCCTCGTGTGACACTCAGGCAGTTTTGCCTGCAGTGTGTAC
GCCTCCTTGTTCTGCTCATGCCACCTGTAAGGAGAACAACACGTGTGAGTGTAACCTGGATTATGAAG
GTGACGGAATCACATGCACAGTTGTGGATTTCTGCAAACAGGACAACGGGGGCTGTGCAAAGGTGGCC
AGATGCTCCCAGAAGGGCACGAAGGTCTCCTGCAGCTGCCAGAAGGGATACAAAGGGGACGGGCACAG
CTGCACAGAGATAGACCCCTGTGCAGACGGCCTTAACGGAGGGTGTCACGAGCACGCCACCTGTAAGA
TGACAGGCCCGGGCAAGCACAAGTGTGAGTGTAAAAGTCACTATGTCGGAGATGGGCTGAACTGTGAG
CCGGAGCAGCTGCCCATTGACCGCTGCTTACAGGACAATGGGCAGTGCCATGCAGACGCCAAATGTGT
CGACCTCCACTTCCAGGATACCACTGTTGGGGTGTTCCATCTACGCTCCCCACTGGGCCAGTATAAGC
TGACCTTTGACAAAGCCAGAGAGGCCTGTGCCAACGAAGCTGCGACCATGGCAACCTACAACCAGCTC
TCCTATGCCCAGAAGGCCAAGTACCACCTGTGCTCAGCAGGCTGGCTGGAGACCGGGCGGGTTGCCTA
CCCCACAGCCTTCGCCTCCCAGAACTGTGGCTCTGGTGTGGTTGGGATAGTGGACTATGGACCTAGAC
CCAACAAGAGTGAAATGTGGGATGTCTTCTGCTAT

| | | | |
|---|---|---|---|
| NOV9l, CG50736-11 | SEQ ID NO: 230 | 533 aa | MW at 57827.8kD |
| Protein Sequence | | | |

RILQNLTTLATNNGYIKFSNLIQDSGLLSVITDPIHTPVTLFWPTDQALHALPAEQQDFLFNQDNKDK
LKEYLKFHVIRDAKVLAVDLPTSTAWKTLQGSELSVKCGAGRDIGDLFLNGQTCRIVQRELLFDLGVA
YGIDCLLIDPTLGGRCDTFTTFDASGVKQKCLYNLPFKRNLEGCRERCSLVIQIPRCCKGYFGRDCQA
CPGGPDAPCNNRGVCLDQYSATGECKCNTGFNGTACEMCWPGRFGPDCLPCGCSDHGQCDDGITGSGQ
CLCETGWTGPSCDTQAVLPAVCTPPCSAHATCKENNTCECNLDYEGDGITCTVVDFCKQDNGGCAKVA
RCSQKGTKVSCSCQKGYKGDGHSCTEIDPCADGLNGGCHEHATCKMTGPGKHKCECKSHYVGDGLNCE
PEQLPIDRCLQDNGQCHADAKCVDLHFQDTTVGVFHLRSPLGQYKLTFDKAREACANEAATMATYNQL
YAQKAKYHLCSAGWLETGRVAYPTAFASQNCGSGVVGIVDYGPRPNKSEMWDVFCY

| | | |
|---|---|---|
| NOV9m, CG50736-12 | JSEQ ID NO: 231 | 1611 bp |
| DNA Sequence | ORF Start: at 7 | ORF Stop: at 1606 |

GGATCCAGAATTCTGCAAAATCTTACGACTTTGGCAACAAACAATGGCTACATCAAATTTAGCAACTT
AATACAGGACTCAGGTTTGCTGAGTGTCATCACCGATCCCATCCACACCCCAGTCACTCTCTTCTGGC
CCACCGACCAAGCCCTCCATGCCCTACCTGCTGAACAACAGGACTTCCTGTTCAACCAAGACAACAAG
GACAAGCTGAAGGAGTATTTGAAGTTTCATGTGATACGAGATGCCAAGGTTTTAGCTGTGGATCTTCC
CACATCCACTGCCTGGAAGACCCTGCAAGGTTCAGAGCTGAGTGTGAAATGTGGAGCTGGCAGGGACA
TCGGTGACCTCTTTCTGAATGGCCAAACCTGCAGAATTGTGCAGCGGGAGCTCTTGTTTGACCTGGGT
GTGGCCTACGGCATTGACTGTCTGCTGATTGATCCCACCCTGGGGGGCCGCTGTGACACCTTTACTAC
TTTCGATGCCTCGGGTGTGAAGCAGAAGTGTCTCTACAACCTGCCCTTCAAGAGGAACCTGGAAGGCT
GCCGGGAGCGGTGCAGCCTGGTGATACAGATCCCCAGGTGCTGCAAGGGCTACTTCGGGCGAGACTGT
CAGGCCTGCCCTGGAGGACCAGATGCCCCGTGTAATAACCGGGGTGTCTGCCTTGATCAGTACTCGGC
CACCGGAGAGTGTAAATGCAACACCGGCTTCAATGGGACGGCGTGTGAGATGTGCTGGCCGGGGAGAT
TCGGGCCTGATTGTCTGCCCTGTGGCTGCTCAGACCACGGACAGTGCGATGATGGCATCACGGGCTCC
GGGCAGTGCCTCTGTGAAACGGGGTGGACAGGCCCCTCGTGTGACACTCAGGCAGTTTTGCCTGCAGT
GTGTACGCCTCCTTGTTCTGCTCATGCCACCTGTAAGGAGAACAACACGTGTGAGTGTAACCTGGATT
ATGAAGGTGACGGAATCACATGCACAGTTGTGGATTTCTGCAAACAGGACAACGGGGGCTGTGCAAAG
GTGGCCAGATGCTCCCAGAAGGGCACGAAGGTCTCCTGCAGCTGCCAGAAGGGATACAAAGGGGACGG
GCACAGCTGCACAGAGATAGACCCCTGTGCAGACGGCCTTAACGGAGGGTGTCACGAGCACGCCACCT
GTAAGATGACAGGCCCGGGCAAGCACAAGTGTGAGTGTAAAAGTCACTATGTCGGAGATGGGCTGAAC
TGTGAGCCGGAGCAGCTGCCCATTGACCGCTGCTTACAGGACAATGGGCAGTGCCATGCAGACGCCAA
ATGTGTCGACCTCCACTTCCAGGATACCACTGTTGGGGTGTTCCATCTACGCTCCCCACTGGGCCAGT
ATAAGCTGACCTTTGACAAAGCCAGAGAGGCCTGTGCCAACGAAGCTGCGACCATGGCAACCTACAAC
CAGCTCTCCTATGCCCAGAAGGCCAAGTACCACCTGTGCTCAGCAGGCTGGCTGGAGACCGGGCGGGT
TGCCTACCCCACAGCCTTCGCCTCCCAGAACTGTGGCTCTGGTGTGGTTGGGATAGTGGACTATGGAC
CTAGACCCAACAAGAGTGAAATGTGGGATGTCTTCTGCTATCGGCGG

| | | | |
|---|---|---|---|
| NOV9m, CG50736-12 | SEQ ID NO: 232 | 533 aa | MW at 57827.8kD |
| Protein Sequence | | | |

RILQNLTTLATNNGYIKFSNLIQDSGLLSVITDPIHTPVTLFWPTDQALHALPAEQQDFLFNQDNKDK
LKEYLKFHVIRDAKVLAVDLPTSTAWKTLQGSELSVKCGAGRDIGDLFLNGQTCRIVQRELLFDLGVA
YGIDCLLIDPTLGGRCDTFTTFDASGVKQKCLYNLPFKRNLEGCRERCSLVIQIPRCCKGYFGRDCQA
CPGGPDAPCNNRGVCLDQYSATGECKCNTGFNGTACEMCWPGRFGPDCLPCGCSDHGQCDDGITGSGQ
CLCETGWTGPSCDTQAVLPAVCTPPCSAHATCKENNTCECNLDYEGDGITCTVVDFCKQDNGGCAKVA
RCSQKGTKVSCSCQKGYKGDGHSCTEIDPCADGLNGGCHEHATCKMTGPGKHKCECKSHYVGDGLNCE
PEQLPIDRCLQDNGQCHADAKCVDLHFQDTTVGVFHLRSPLGQYKLTFDKAREACANEAATMATYNQL
SYAQKAKYHLCSAGWLETGRVAYPTAFASQNCGSGVVGIVDYGPRPNKSEMWDVFCY

| | | |
|---|---|---|
| NOV9n, CG50736-13 | SEQ ID NO: 233 | 1668 bp |
| DNA Sequence | ORF Start: at 7 | ORF Stop: at 1663 |

GGATCCAGAATTCTGCAAAATCTTACGACTTTGGCAACAAACAATGGCTACATCAAATTTAGCAACTT
AATACAGGACTCAGGTTTGCTGAGTGTCATCACCGATCCCATCCACACCCCAGTCACTCTCTTCTGGC
CCACCGACCAAGCCCTCCATGCCCTACCTGCTGAACAACAGGACTTCCTGTTCAACCAAGACAACAAG
GACAAGCTGAAGGAGTATTTGAAGTTTCATGTGATACGAGATGCCAAGGTTTTAGCTGTGGATCTTCC
CACATCCACTGCCTGGAAGACCCTGCAAGGTTCAGAGCTGAGTGTGAAATGTGGAGCTGGCAGGGACA
TCGGTGACCTCTTTCTGAATGGCCAAACCTGCAGAATTGTGCAGCGGGAGCTCTTGTTTGACCTGGGT
GTGGCCTACGGCATTGACTGTCTGCTGATTGATCCCACCCTGGGGGGCCGCTGTGACACCTTTACTAC
TTTCGATGCCTCGGGGGAGTGTGGGAGCTGTGTCAATACTCCCAGCTGCCCAAGGTGGAGTAAACCAA
AGGGTGTGAAGCAGAAGTGTCTCTACAACCTGCCCTTCAAGAGGAACCTGGAAGGCTGCCGGGAGCGG
TGCAGCCTGGTGATACAGATCCCCAGGTGCTGCAAGGGCTACTTCGGGCGAGACTGTCAGGCCTGCCC
TGGAGGACCAGATGCCCCGTGTAATAACCGGGGTGTCTGCCTTGATCAGTACTCGGCCACCGGAGAGT
GTAAATGCAACACCGGCTTCAATGGGACGGCGTGTGAGATGTGCTGGCCGGGGAGATTCGGGCCTGAT
TGTCTGCCCTGTGGCTGCTCAGACCACGGACAGTGCAATGATGGCATCACGGGCTCCGGGCAGTGCCT
CTGTGAAACGGGGTGGACAGGCCCCTCGTGTGACACTCAGGCAGTTTTGCCTGCAGTGTGTACGCCTC
CTTGTTCTGCTCATGCCACCTGTAAGGAGAACAACACGTGTGAGTGTAACCTGGATTATGAAGGTGAC
GGAATCACATGCACAGTTGTGGATTTCTGCAAACAGGACAACGGGGGCTGTGCAAAGGTGGCCAGATG
CTCCCAGAAGGGCACGAAGGTCTCCTGCAGCTGCCAGAAGGGATACAAAGGGGACGGGCACAGCTGCA
CAGAGATAGACCCTTGTGCAGACGGCCTTAACGGAGGGTGTCACGAGCACGCCACCTGTAAGATGACA
GGCCCGGGCAAGCACAAGTGTGAGTGTAAAAGTCACTATGTCGGAGATGGGCTGAACTGTGAGCCGGA
GCAGCTGCCCATTGACCGCTGCTTACAGGACAATGGGCAGTGCCATGCAGACGCCAAATGTGTCGACC
TCCACTTCCAGGATACCACTGTTGGGGTGTTCCATCTACGCTCCCCACTGGGCCAGTATAAGCTGACC
TTTGACAGAGCCAGAGAGGCCTGTGCCAACGAAGCTGCGACCATGGCAACCTACAACCAGCTCTCCTA
TGCCCAGAAGGCCAAGTACCACCTGTGCTCAGCAGGCTGGCTGGAGACCGGGCGGGTTGCCTACCCCA
CAGCCTTCGCCTCCCAGAACTGTGGCTCTGGTGTGGTTGGGATAGTGGACTATGGACCTAGACCCAAC
AAGAGTGAAATGTGGGATGTCTTCTGCTATCGGCCG

| | | | |
|---|---|---|---|
| NOV9n, CG50736-13 | SEQ ID NO: 234 | 552 aa | MW at 59873.1kD |
| Protein Sequence | | | |

RILQNLTTLATNNGYIKFSNLIQDSGLLSVITDPIHTPVTLFWPTDQALHALPAEQQDFLFNQDNKDK
LKEYLKFHVIRDAKVLAVDLPTSTAWKTLQGSELSVKCGAGRDIGDLFLNGQTCRIVQRELLFDLGVA
YGIDCLLIDPTLGGRCDTFTTFDASGECGSCVNTPSCPRWSKPKGVKQKCLYNLPFKRNLEGCRERCS
LVIQIPRCCKGYFGRDCQACPGGPDAPCNNRGVCLDQYSATGECKCNTGFNGTACEMCWPGRFGPDCL
PCGCSDHGQCNDGITGSGQCLCETGWTGPSCDTQAVLPAVCTPPCSAHATCKENNTCECNLDYEGDGI
TCTVVDFCKQDNGGCAKVARCSQKGTKVSCSCQKGYKGDGHSCTEIDPCADGLNGGCHEHATCKNTGP
GKHKCECKSHYVGDGLNCEPEQLPIDRCLQDNGQCHADAKCVDLHFQDTTVGVFHLRSPLGQYKLTFD
RAREACANEAATMATYNQLSYAQKAKYHLCSAGWLETGRVAYPTAFASQNCGSGVVGIVDYGPRPNKS
EMWDVFCY

| | | |
|---|---|---|
| NOV9o, CG50736-14 | SEQ ID NO: 235 | 1668 bp |
| DNA Sequence | ORF Start: at 7 | ORF Stop: at 1663 |

GGATCCAGAATTCTGCAAAATCTTACGACTTTGGCAACAAACAATGGCTACATCAAATTTAGCAACTT
AATACAGGACTCAGGTTTGCTGAGTGTCATCACCGATCCCATCCACACCCCAGTCACTCTCTTCTGGC
CCACCGACCAAGCCCTCCATGCCCTACCTGCTGAACAACAGGACTTCCTGTTCAACCAAGACAACAAG
GACAAGCTGAAGGAGTATTTGAAGTTTCATGTGATACGAGATGCCAAGGTTTTAGCTGTGGATCTTCC
CACATCCACTGCCTGGAAGACCCTGCAAGGTTCAGAGCTGAGTGTGAAATGTGGAGCTGGCAGGGACA
TCGGTGACCTCTTTCTGAATGGCCAAACCTGCAGAATTGTGCAGCGGGAGCTCTTGTTTGACCTGGGT
GTGGCCTACGGCATTGACTGTCTGCTGATTGATCCCACCCTGGGGGGCCGCTGTGACACCTTCACTAC
TTTCGATGCCTCGGGGGAGTGTGGGAGCTGTGTCAATACTCCCAGCTGCCCAAGGTGGAGTAAACCAA
AGGGTGTGAAGCAGAAGTGTCTCTACAACCTGCCCTTCAAGAGGAACCTGGAAGGCTGCCGGGAGCGG
TGCAGCCTGGTGATACAGATCCCCAGGTGCTGCAAGGGCTACTTCGGGCGAGACTGTCAGGCCTGCCC
TGGAGGACCAGATGCCCCGTGTAATAACCGGGGTGTCTGCCTTGATCTGTACTCGGCCACCGGAGAGT
GTAAATGCAACACCGGCTTCAATGGGACGGCGTGTGAGATGTGCTGGCCGGGGAGATTCGGGCCTGAT
TGTCTGCCCTGTGGCTGCTCAGACCACGGACAGTGCGATGATGGCATCACGGGCTCCGGGCAGTGCCT
CTGTGAAACGGGGTGGACAGGCCCCTCGTGTGACACTCAGGCAGTTTTGCCTGCAGTGTGTACGCCTC
CTTGTTCTGCTCATGCCACCTGTAAGGAGAACAACACGTGTGAGTGTAACCTGGATTATGAAGGTGAC
GGAATCACATGCACAGTTGTGGATTTCTGCAAACAGGACAACGGGGGCTGTGCAAAGGTGGCCAGATG
CTCCCAGAAGGGCACGAAGGTCTCCTGCAGCTGCCAGAAGGGATACAAAGGGGACGGGCACAGCTGCA
CAGAGATAGACCCCTGTGCAGACGGCCTTAACGGAGGGTGTCACGAGCACGCCACCTGTAAGATGACA
GGCCCGGGCAAGCACAAGTGTGAGTGTAAAAGTCACTATGTCGGAGATGGGCTGAACTGTGAGCCGGA
GCAGCTGCCCATTGACCGCTGCTTACAGGACAATGGGCAGTGCCATGCAGACGCCAAATGTGTCGACC
TCCACTTCCAGGATACCACTGTTGGGGTGTTCCATCTACGCTCCCCACTGGGCCAGTATAAGCTGACC
TTTGACAAAGCCAGAGAGGCCTGTGCCAACGAAGCTGCGACCATGGCAACCTACAACCAGCTCTCCTA
TGCCCAGAAGGCCAAGTACCACCTGTGCTCAGCAGGCTGGCTGGAGACCGGGCGGGTTGCCTACCCCA
CAGCCTTCGCCTCCCAGAACTGTGGCTCTGGTGTGGTTGGGATAGTGGACTATGGACCTAGACCCAAC
AAGAGTGAAATGTGGGATGTCTTCTGCTATCGGCCG

| | | | |
|---|---|---|---|
| NOV9o, CG50736-14 | SEQ ID NO: 236 | 552 aa | MW at 59831.1kD |
| Protein Sequence | | | |

RILQNLTTLATNNGYIKFSNLIQDSGLLSVITDPIHTPVTLFWPTDQALHALPAEQQDFLFNQDNKDK
LKEYLKFHVIRDAKVLAVDLPTSTAWKTLQGSELSVKCGAGRDIGDLFLNGQTCRIVQRELLFDLGVA
YGIDCLLIDPTLGGRCDTFTTFDASGECGSCVNTPSCPRWSKPKGVKQKCLYNLPFKRNLEGCRERCS
LVIQIPRCCKGYFGRDCQACPGGPDAPCNNRGVCLDLYSATGECKCNTGFNGTACEMCWPGRFGPDCL
PCGCSDHGQCDDGITGSGQCLCETGWTGPSCDTQAVLPAVCTPPCSAHATCKENNTCECNLDYEGDGI
TCTVVDFCKQDNGGCAKVARCSQKGTKVSCSCQKGYKGDGHSCTEIDPCADGLNGGCHEHATCKMTGP
GKHKCECKSHYVGDGLNCEPEQLPIDRCLQDNGQCHADAKCVDLHFQDTTVGVFHLRSPLGQYKLTFD
KAREACANEAATMATYNQLSYAQKAKYHLCSAGWLETGRVAYPTAFASQNCGSGVVGIVDYGPRPNKS
EMWDVFCY

| | | |
|---|---|---|
| NOV9p, CG50736-15 | SEQ ID NO: 237 | 1668 bp |
| DNA Sequence | ORF Start: at 7 | ORF Stop: at 1663 |

GGATCCAGAATTCTGCAAAATCTTACGACTTTGGCAACAAACAATGGCTACATCAAATTTAGCAACTT
AATACAGGACTCAGGTTTGCTGAGTGTCATCACCGATCCCATCCACACCCCAGTCACTCTCTTCTGGC
CCACCGACCAAGCCCTCCATGCCCTACCTGCTGAACAACAGGACTTCCTGTTCAACCAAGACAACAAG
GACAAGCTGAAGGAGTATTTGAAGTTTCATGTGATACGAGATGCCAAGGTTTTAGCTGTGGATCTTCC
CACATCCACTGCCTGGAAGACCCTGCAAGGTTCAGAGCTGAGTGTGAAATGTGGAGCTGGCAGGGACA
TCGGTGACCTCTTTCTGAATGGCCAAACCTGCAGAATTGTGCAGCGGGAGCTCTTGTTTGACCTGGGT
GTGGCCTACGGCATTGACTGTCTGCTGATTGATCCCACCCTGGGGGGCCGCTGTGACACCTTTACTAC
TTTCGATGCCTCGGGGGAGTGTGGGAGCTGTGTCAATACTCCCAGCTGCCCAAGGTGGAGTAAACCAA
AGGGTGTGAAGCAGAAGTGTCTCTACAACCTGCCCTTCAAGAGGAACCTGGAAGGCTGCCGGGAGCGG
TGCAGTCTGGTGATACAGATCCCCAGGTGCTGCAAGGGCTACTTCGGGCGAGACTGTCAGGCCTGCCC
TGGAGGACCAGATGCCCCGTGTAATAACCGGGGTGTCTGCCTTGATCAGTACTCGGCCACCGGAGAGT
GTAAATGCAACACCGGCTTCAATGGGACGGCGTGTGAGATGTGCTGGCCGGGGAGATTCGGGCCTGAT
TGTCTGCCCTGCGGCTGCTCAGACCACGGACAGTGCGATGATGGCATCACGGGCTCCGGGCAGTGCCT
CTGTGAAACGGGGTGGACAGGCCCCTCGTGTGACACTCAGGCAGTTTTGCCTGCAGTGTGTACGCCTC
CTTGTTCTGCTCATGCCACCTGTAAGGAGAACAACACGTGTGAGTGTAACCTGGATTATGAAGGTGAC
GGAATCACATGCACAGTTGTGGATTTCTGCAAACAGGACAACGGGGGCTGTGCAAAGGTGGCCAGATG
CTCCCAGAAGGGCACGAAGGTCTCCTGCAGCTGCCAGAAGGGATACAAAGGGGACGGGCACAGCTGCA
CAGAGATAGACCCCTGTGCAGACGGCCTTAACGGAGGGTGTCACGAGCACGCCACCTGTAAGATGACA
GGCCCGGGCAAGCACAAGTGTGAGTGTAAAAGTCACTATGTCGGAGATGGGCTGAACTGTGAGCCGGA
GCAGCTGCCCATTGACCGCTGCTTACAGGACAATGGGCAGTGCCATGCAGACGCCAAATGTGTCGACC
TCCACTTCCAGGATACCACTGTTGGGGTGTTCCATCTACGCTCCCCACTGGGCCAGTATAAGCTGACC
TTTGACAAAGCCAGAGAGGCCTGTGCCAACGAAGCTGCGACCATGGCAACCTACAACCAGCTCTCCTA
TGCCCAGAAGGCCAAGTACCACCTGTGCTCAGCAGGCTGGCTGGAGACCGGGCGGGTTGCCTACCCCA
CAGCCTTCGCCTCCCAGAACTGTGGCTCTGGTGTGGTTGGGATAGTGGACTATGGACCTAGACCCAAC
AAGAGTGAAATGTGGGATGTCTTCTGCTATCGGCCG

| | | | |
|---|---|---|---|
| NOV9p, CG50736-15 | SEQ ID NO: 238 | 552 aa | MW at 59846.1kD |
| Protein Sequence | | | |

RILQNLTTLATNNGYIKFSNLIQDSGLLSVITDPIHTPVTLFWPTDQALHALPAEQQDFLFNQDNKDK
LKEYLKFHVIRDAKVLAVDLPTSTAWKTLQGSELSVKCGAGRDIGDLFLNGQTCRIVQRELLFDLGVA
YGIDCLLIDPTLGGRCDTFTTFDASGECGSCVNTPSCPRWSKPKGVKQKCLYNLPFKRNLEGCRERCS
LVIQIPRCCKGYFGRDCQACPGGPDAPCNNRGVCLDQYSATGECKCNTGFNGTACEMCWPGRFGPDCL
PCGCSDHGQCDDGITGSGQCLCETGWTGPSCDTQAVLPAVCTPPCSAHATCKENNTCECNLDYEGDGI
TCTVVDFCKQDNGGCAKVARCSQKGTKVSCSCQKGYKGDGHSCTEIDPCADGLNGGCHEHATCKMTGP
GKHKCECKSHYVGDGLNCEPEQLPIDRCLQDNGQCHADAKCVDLHFQDTTVGVFHLRSPLGQYKLTFD
KAREACANEAATMATYNQLSYAQKAKYHLCSAGWLETGRVAYPTAFASQNCGSGVVGIVDYGPRPNKS
EMWDVFCY

| | | |
|---|---|---|
| NOV9q, CG50736-16 | SEQ ID NO: 239 | 1668 bp |
| DNA Sequence | ORF Start: at 7 | ORF Stop: at 1663 |

GGATCCAGAATTCTGCAAAATCTTACGACTTTGGCAACAAACAATGGCTACATCAAATTTAGCAACTT
AATACAGGACTCAGGTTTGCTGAGTGTCATCACCGATCCCATCCACACCCCAGTCACTCTCTTCTGGC
CCACCGACCAAGCCCTCCATGCCCTACCTGCTGAACAACAGGACTTCCTGTTCAACCAAGACAACAAG
GACAAGCTGAAGGAGTATTTGAAGTTTCATGTGATACGAGATGCCAAGGTTTTAGCTGTGGATCTTCC
CACATCCACTGCCTGGAAGACCCTGCAAGGTTCAGAGCTGAGTGTGAAATGTGGAGCTGGCAGGGACA
TCGGTGACCTCTTTCTGAATGGCCAAACCTGCAGAATTGTGCAGCGGGAGCTCTTGTTTGACCTGGGT
GTGGCCTACGGCATTGACTGTCTGCTGATTGATCCCACCCTGGGGGGCCGCTGTGACACCTTTACTAC
TTTCGATGCCTCGGGGGAGTGTGGGAGCTGTGTCAATACTCCCAGCTGCCCAAGGTGGAGTAAACCAA
AGGGTGTGAAGCAGAAGTGTCTCTACAACCTGCCCTTCAAGAGGAACCTGGAAGGCTGCCGGGAGCGG
TGCAGCCTGGTGATACAGATCCCCAGGTGCTGCAAGGGCTACTTCGGGCGAGACTGTCAGGCCTGCCC
TGGAGGACCAGATGCCCCGTGTAATAACCGGGGTGTCTGCCTTGATCAGTACTCGGCCACCGGAGAGT
GTAAATGCAACACCGGCTTCAATGGGACGGCGTGTGAGATGTGCTGGCCGGGGAGATTTGGGCCTGAT
TGTCTGCCCTGTGGCTGCTCAGACCACGGACAGTGCGATGATGGCATCACGGGCTCCGGGCAGTGCCT
CTGTGAAACGGGGTGGACAGGCCCCTCGTGTGACACTCAGGCAGTTTTGCCTGCAGTGTGTACGCCTC
CTTGTTCTGCTCATGCCACCTGTAAGGAGAACAACACGTGTGAGTGTTACCTGGATTATGAAGGTGAC
GGAATCACATGCACAGTTGTGGATTTCTGCAAACAGGACAACGGGGGCTGTGCAAAGGTGGCCAGATG
CTCCCAGAAGGGCACGAAGGTCTCCTGCAGCTGCCAGAAGGGATACAAAGGGGACGGGCACAGCTGCA
CAGAGATAGACCCCTGTGCAGACGGCCTTAACGGAGGGTGTCACGAGCACGCCACCCGTAAGATGACA
GGCCCGGGCAAGCACAAGTGTGAGTGTAAAAGTCACTATGTCGGAGATGGGCTGAACTGTGAGCCGGA
GCAGCTGCCCATTGACCGCTGCTTACAGGACAATGGGCAGTGCCATGCAGACGCCAAATGTGTCGACC
TCCACTTCCAGGATACCACTGTTGGGGTGTTCCATCTACGCTCCCCACTGGGCCAGTATAAGCTGACC
TTTGACAAAGCCAGAGAGGCCTGTGCCAACGAAGCTGCGACCATGGCAACCTACAACCAGCTCTCCTA
TGCCCAGAAGGCCAAGTACCACCTGTGCTCAGCAGGCTGGCTGGAGACCGGGCGGGTTGCCTACCCCA
CAGCCTTCGCCTCCCAGAACTGTGGCTCTGGTGTGGTTGGGATAGTGGACTATGGACCTAGACCCAAC
AAGAGTGAAATGTGGGATGTCTTCTGCTATCGGCCG

| | | | |
|---|---|---|---|
| NOV9q, CG50736-16 | SEQ ID NO: 240 | 552 aa | MW at 59948.2kD |
| Protein Sequence | | | |

RILQNLTTLATNNGYIKFSNLIQDSGLLSVITDPIHTPVTLFWPTDQALHALPAEQQDFLFNQDNKDK
LKEYLKFHVIRDAKVLAVDLPTSTAWKTLQGSELSVKCGAGRDIGDLFLNGQTCRIVQRELLFDLGVA
YGIDCLLIDPTLGGRCDTFTTFDASGECGSCVNTPSCPRWSKPKGVKQKCLYNLPFKRNLEGCRERCS
LVIQIPRCCKGYFGRDCQACPGGPDAPCNNRGVCLDQYSATGECKCNTGFNGTACEMCWPGRFGPDCL
PCGCSDHGQCDDGITGSGQCLCETGWTGPSCDTQAVLPAVCTPPCSAHATCKENNTCECYLDYEGDGI
TCTVVDFCKQDNGGCAKVARCSQKGTKVSCSCQKGYKGDGHSCTEIDPCADGLNGGCHEHATRKMTGP
GKHKCECKSHYVGDGLNCEPEQLPIDRCLQDNGQCHADAKCVDLHFQDTTVGVFHLRSPLGQYKLTFD
KAREACANEAATMATYNQLSYAQKAKYHLCSAGWLETGRVAYPTAFASQNCGSGVVGIVDYGPRPNKS
EMWDVFCY

| | | |
|---|---|---|
| NOV9r, CG50736-17 | SEQ ID NO: 241 | 1668 bp |
| DNA Sequence | ORF Start: at 7 | ORF Stop: at 1663 |

GGATCCAGAATTCTGCAAAATCTTACGACTTTGGCAACAAACAATGGCTACATCAAATTTAGCAACTT
AATACAGGACTCAGGTTTGCTGAGTGTCATCACCGATCCCATCCACACCCCAGTCACTCTCTTCTGGC
CCACCGACCAAGCCCTCCATGCCCTACCTGCTGA~CAACAGGACTTCCTGTTCAACCAAGACAACAAG
GACAAGCTGAAGGAGTATTTGAAGTTTCATGTGATACGAGATGCCAAGGTTTTAGCTGTGGATCTTCC
CACATCCACTGCCTGGAAGACCCTGCAAGGTTCAGAGCTGAGTGTGAAATGTGGAGCTGGCAGGGACA
TCGGTGACCTCTTTCTGAATGGCCAAACCTGCAGAATTGTGCAGCGGGAGCTCTTGTTTGACCTGGGT
GTGGCCTACGGCATTGACTGTCTGCTGATTGATCCCACCCTGGGGGGCCGCTGTGACACCTTTACTAC
TTTCGATGCCTCGGGGGAGTGTGGGAGCTGTGTCAATACTCCCAGCTGCCCAAGGTGGAGTAAACCAA
AGGGTGTGAAGCAGAAGTGTCTCTACAACCTGCCCTTCAAGAGGAACCTGGAAGGCTGCCGGGAGCGG
TGCAGCCTGGTGATACAGATCCCCAGGTGCTGCAAGGGCTACTTCGGGCGAGACTGTCAGGCCTGCCC
TGGAGGACCAGATGCCCCGTGTAATAACCGGGGTGTCTGCCTTGATCAGTACTCGGCCACCGGAGAGT
GTAAATGCAACACCGGCTTCAATGGGACGGCGTGTGAGATGTGCTGGCCGGGGAGATTCGGGCCTGAT
TGTCTGCCCTGTGGCTGCTCAGACCACGGACAGTGCGATGATGGCATCACGGGCTCCGGGCAGTGCCT
CTGTGAAACGGGGTGGACAGGCCCCTCGTGTGACACTCAGGCAGTTTTGCCTGCAGTGTGTACGCCTC
CTTGTTCTGCTCATGCCACCTGTAAGGAGAACAACACGTGTGAGTGTAACCTGGATTATGAAGGTGAC
GGAATCACATGCACAGTTGTGGATTTCTGCAAACAGGACAACGGGGGCTGTGCAAAGGTGGCCAGATG
CTCCCAGAAGGGCACGAAGGTCTCCTGCAACTGCCAGAAGGGGTACAAAGGGGACGGGCACAGCTGCA
CAGAGATAGACCCCTGTGCAGACGGCCTTAACGGAGGGTGTCACGAGCACGCCACCTGTAAGATGACA
GGCCCGGGCAAGCACAAGTGTGAGTGTAAAAGTCACTATGTCGGAGATGGGCTGAACTGTGAGCCGGA
GCAGCTGCCCATTGACCGCTGCTTACAGGACAATGGGCAGTGCCATGCAGACGCCAAATGTGTCGACC
TCCACTTCCAGGATACCACTGTTGGGGTGTTCCATCTACGCTCCCCACTGGGCCAGTATAAGCTGACC
TTTGACAAAGCCAGAGAGGCCTGTGCCAACGAAGCTGCGACCATGGCAACCTACAACCAGCTCTCCTA
TGCCCAGAAGGCCAAGTACCACCTGTGCTCAGCAGGCTGGCTGGAGACCGGGCGGGTTGCCTACCCCA
CAGCCTTCGCCTCCCAGAACTGTGGCTCTGGTGTGGTTGGGATAGTGGACTATGGACCTAGACCCAAC
AAGAGTGAAATGTGGGATGTCTTCTGCTATCGGCCG

| | | | |
|---|---|---|---|
| NOV9r, CG50736-17 | SEQ ID NO: 242 | 552 aa | MW at 59873.1kD |
| Protein Sequence | | | |

RILQNLTTLATNNGYIKFSNLIQDSGLLSVITDPIHTPVTLFWPTDQALHALPAEQQDFLFNQDNKDK
LKEYLKFHVIRDAKVLAVDLPTSTAWKTLQGSELSVKCGAGRDIGDLFLNGQTCRIVQRELLFDLGVA
YGIDCLLIDPTLGGRCDTFTTFDASGECGSCVNTPSCPRWSKPKGVKQKCLYNLPFKRNLEGCRERCS
LVIQIPRCCKGYFGRDCQACPGGPDAPCNNRGVCLDQYSATGECKCNTGFNGTACEMCWPGRFGPDCL
PCGCSDHGQCDDGITGSGQCLCETGWTGPSCDTQAVLPAVCTPPCSAHATCKENNTCECNLDYEGDGI
TCTVVDFCKQDNGGCAKVARCSQKGTKVSCNCQKGYKGDGHSCTETDPCADGLNGGCHEHATCKMTGP
GKHKCECKSHYVGDGLNCEPEQLPIDRCLQDNGQCHADAKCVDLHFQDTTVGVFHLRSPLGQYKLTFD
KAREACANEAATMATYNQLSYAQKAKYHLCSAGWLETGRVAYPTAFASQNCGSGVVGIVDYGPRPNKS
EMWDVFCY

| | | |
|---|---|---|
| NOV9s, CG50736-18 | SEQ ID NO: 243 | 1668 bp |
| DNA Sequence | ORF Start: at 7 | ORF Stop: at 1663 |

GGATCCAGAATTCTGCAAAATCTTACGACTTTGGCAACAAACAATGGCTACATCAAATTTAGCAACTT
AATACAGGACTCAGGTTTGCTGAGTGTCATCACCGATCCCATCCACACCCCAGTCACTCTCTTCTGGC
CCACCGACCAAGCCCTCCATGCCCTACCTGCTGAACAACAGGACTTCCTGTTCAACCAAGACAACAAG
GACAAGCTGAAGGAGTATTTGAAGTTTCATGTGATACGAGATGCCAAGGTTTTAGCTGTGGATCTTCC
CACATCCACTGCCTGGAAGACCCTGCAAGGTTCAGAGCTGAGTGTGAAATGTGGAGCTGGCAGGGACA
TCGGTGACCTCTTTCTGAATGGCCAAACCTGCAGAATTGTGCAGCGGGAGCTCTTGTTTGACCTGGGT
GTGGCCTACGGCATTGACTGTCTGCTGATTGATCCCACCCTGGGGGGCCGCTGTGACACCTTTACTAC
TTTCGATGCCTCGGGGGAGTGTGGGAGCTGTGTCAATACTCCCAGCTGCCCAAGGTGGAGTAAACCAA
AGGGTGTGAAGCAGAGGTGTCTCTACAACCTGCCCTTCAAGAGGAACCTGGAAGGCTGCCGGGAGCGG
TGCAGCCTGGTGATACAGATCCCCAGGTGCTGCAAGGGCTACTTCGGGCGAGACTGTCAGGCCTGCCC
TGGAGGACCAGATGCCCCGTGTAATAACCGGGGTGTCTGCCTTGATCAGTACTCGGCCACCGGAGAGT
GTAAATGCAACACCGGCTTCAATGGGACGGCGTGTGAGATGTGCTGGCCGGGGAGATTCGGGCCTGAT
TGTCTGCCCTGTGGCTGCTCAGACCACGGACAGTGCGATGATGGCATCACGGGCTCCGGGCAGTGCCT
CTGTGAAACGGGGTGGACAGGCCCCTCGTGTGACACTCAGGCAGTTTTGCCTGCAGTGTGTACGCCTC
CTTGTTCTGCTCATGCCACCTGTAAGGAGAACAACACGTGTGAGTGTAACCTGGATTATGAAGGTGAC
GGAATCACATGCACAGTTGTGGATTTCTGCAAACAGGACAACGGGGGCTGTGCAAAGGTGGCCAGATG
CAGAGATAGACCCCTGTGCAGACGGCCTTAACGGAGGGTGTCACGAGCACGCCACCTGTAAGATGACA
GGCCCGGGCAAGCACAAGTGTGAGTGTAAAAGTCACTATGTCGGAGATGGGCTGAACTGTGAGCCGGA
GCAGCTGCCCATTGACCGCTGCTTACAGGACAATGGGCAGTGCCATGCAGACGCCAAATGTGTCGACC
TCCACTTCCAGGATACCACTGTTGGGGTGTTCCATCTACGCTCCCCACTGGGCCAGTATAAGCTGACC
TTTGACAAAGCCAGAGAGGCCTGTGCCAACGAAGCTGCGACCATGGCAACCTACAACCAGCTCTCCTA
TGCCCAGAAGGCCAAGTACCACCTGTGCTCAGCAGGCTGGCTGGAGACCGGGCGGGTTGCCTACCCCA
CAGCCTTCGCCTCCCAGAACTGTGGCTCTAGTGTGGTTGGGATAGTGGACTATGGACCTAGACCCAAC
AAGAGTGAAATGTGGGATGTCTTCTGCTATCGGCCG

| | | | |
|---|---|---|---|
| NOV9s, CG50736-18 | SEQ ID NO: 244 | 552 aa | MW at 59904.1kD |
| Protein Sequence | | | |

RILQNLTTLATNNGYIKFSNLIQDSGLLSVITDPIHTPVTLFWPTDQALHALPAEQQDFLFNQDNKDK
LKEYLKFHVIRDAKVLAVDLPTSTAWKTLQGSELSVKCGAGRDIGDLFLNGQTCRIVQRELLFDLGVA
YGIDCLLIDPTLGGRCDTFTTFDASGECGSCVNTPSCPRWSKPKGVKQRCLYNLPFKRNLEGCRERCS
LVIQIPRCCKGYFGRDCQACPGGPDAPCNNRGVCLDQYSATGECKCNTGFNGTACEMCWPGRFGPDCL
PCGCSDHGQCDDGITGSGQCLCETGWTGPSCDTQAVLPAVCTPPCSAHATCKENNTCECNLDYEGDGI
TCTVVDFCKQDNGGCAKVARCSQKGTKVSCSCQKGYKGDGHSCTEIDPCADGLNGGCHEHATCKNTGP
GKHKCECKSHYVGDGLNCEPEQLPIDRCLQDNGQCHADAKCVDLHFQDTTVGVFHLRSPLGQYKLTFD
KAREACANEAATMATYNQLSYAQKAKYHLCSAGWLETGRVAYPTAFASQNCGSSVVGIVDYGPRPNKS
EMWDVFCY

| | | |
|---|---|---|
| NOV9t, CG50736-19 | SEQ ID NO: 245 | 1668 bp |
| DNA Sequence | ORF Start: at 7 | ORF Stop: at 1663 |

GGATCCAGAATTCTGCAAAATCTTACGACTTTGGCAACAAACAATGGCTACATCAAATTTAGCAACTT
AATACAGGACTCAGGTTTGCTGAGTGTCATCACCGATCCCATCCACACCCCAGTCACTCTCTTCTGGC
CCACCGACCAAGCCCTCCATGCCCTACCTGCTGAACAACAGGACTTCCTGTTCAACCAAGACAACAAG
GACAAGCTGAAGGAGTATTTGAAGTTTCATGTGATACGAGATGCCAAGGTTTTAGCTGTGGATCTTCC
CACATCCACTGCCTGGAAGACCCTGCAAGGTTCAGAGCTGAGTGTGAAATGTGGAGCTGGCAGGGACA
TCGGTGACCTCTTTCTGAATGGCCAAACCTGCAGAATTGTGCAGCGGGAGCTCTTGTTTGACCTGGGT
GTGGCCTGCGGCATTGACTGTCTGCTGATTGATCCCACCCTGGGGGGCCGCTGTGACACCTTTACTAC
TTTCGATGCCTCGGGGGAGTGTGGGAGCTGTGTCAATACTCCCAGCTGCCCAAGGTGGAGTAAACCAA
AGGGTGTGAAGCAGAAGTGTCTCTACAACCTGCCCTTCAAGAGGAACCTGGAAGGCTGCCGGGAGCGG
TGCAGCCTGGTGATACAGATCCCCAGGTGCTGCAAGGGCTACTTCGGGCGAGACTGTCAGGCCTGCCC
TGGAGGACCAGATGCCCCGTGTAATAACCGGGGTGTCTGCCTTGATCAGTACTCGGCCACCGGAGAGT
GTAAATGCAACACCGGCTTCAATGGGACGGCGTGTGAGATGTGCTGGCCGGGGAGATTTGGGCCTGAT
TGTCTGCCCTGTGGCTGCTCAGACCACGGACAGTGCGATGATGGCATCACGGGCTCCGGGCAGTGCCT
CTGTGAAACGGGGTGGACAGGCCCCTCGTGTGACACTCAGGCAGTTTTGCCTGCAGTGTGTACGCCTC
CTTGTTCTGCTCATGCCACCTGTAAGGAGAACAACACGTGTGAGTGTAACCTGGATTATGAAGGTGAC
GGAATCACATGCACAGTTGTGGATTTCTGCAAACAGGACAACGGGGGCTGTGCAAAGGTGGCCAGATG
CTCCCAGAAGGGCACGAAGGTCTCCTGCAGCTGCCAGAAGGGATACAAAGGGGACGGGCACAGCTGCA
CAGAGATAGACCCCTGTGCAGACGGCCTTAACGGAGGGTGTCACGAGCACGCCACCTGTAAGATGACA
GGCCCGGGCAAGCACAAGTGTGAGTGTAAAAGTCACTATGTCGGAGATGGGCTGAACTGTGAGCCGGA
GCAGCTGCCCATTGACCGCTGCTTACAGGACAATGGGCAGTGCCATGCAGACGCCAAATGTGTCGACC
TCCACTTCCAGGATACCACTGTTGGGGTGTTCCATCTACGCTCCCCACTGGGCCAGTATAAGCTGACC
TTTGACAAAGCCAGAGAGGCCTGTGCCAACGAAGCTGCGACCATGGCAACCTACAACCAGCTCTCCTA
TGCCCAGAAGGCCAAGTACCACCTGTGCTCAGCAGGCTGGCTGGAGACCGGGCGGGTTGCCTACCCCA
CAGCCTTCGCCTCCCAGAACTGCGGCTCTGGTGTGGTTGGGATAGTGGACTATGGACCTAGACCCAAC
AAGAGTGAAATGTGGGATGTCTTCTGCTATCGGCCG

| | | | |
|---|---|---|---|
| NOV9t, CG50736-19 | SEQ ID NO: 246 | 552 aa | MW at 59786.0kD |
| Protein Sequence | | | |

RILQNLTTLATNNGYIKFSNLIQDSGLLSVITDPIHTPVTLFWPTDQALHALPAEQQDFLFNQDNKDK
LKEYLKFHVIRDAKVLAVDLPTSTAWKTLQGSELSVKCGAGRDIGDLFLNGQTCRIVQRELLFDLGVA
CGIDCLLIDPTLGGRCDTFTTFDASGECGSCVNTPSCPRWSKPKGVKQKCLYNLPFKRNLEGCRERCS
LVIQIPRCCKGYFGRDCQACPGGPDAPCNNRGVCLDQYSATGECKCNTGFNGTACEMCWPGRFGPDCL
PCGCSDHGQCDDGITGSGQCLCETGWTGPSCDTQAVLPAVCTPPCSAHATCKENNTCECNLDYEGDGI
TCTVVDFCKQDNGGCAKVARCSQKGTKVSCSCQKGYKGDGHSCTEIDPCADGLNGGCHEHATCKMTGP
GKHKCECKSHYVGDGLNCEPEQLPIDRCLQDNGQCHADAKCVDLHFQDTTVGVFHLRSPLGQYKLTFD
KAREACANEAATMATYNQLSYAQKAKYHLCSAGWLETGRVAYPTAFASQNCGSGVVGIVDYGPRPNKS
EMWDVFCY

| | | |
|---|---|---|
| NOV9u, CG50736-20 | SEQ ID NO: 247 | 1668 bp |
| DNA Sequence | ORF Start: at 7 | ORF Stop: at 1663 |

GGATCCAGAATTCTGCAAAATCTTACGACTTTGGCAACAAACAATGGCTACATCAAATTTAGCAACTT
AATACAGGACTCAGGTTTGCTGAGTGTCGTCACCGATCCCATCCACACCCCAGTCACTCTCTTCTGGC
CCACCGACCAAGCCCTCCATGCCCTACCTGCTGAACAACAGGACTTCCTGTTCAACCAAGACAACAAG
GACAAGCTGAAGGAGTATTTGAAGTTTCATGTGATACGAGATGCCAAGGTTTTAGCTGTGGATCTTCC
CACATCCACTGCCTGGAAGACCCTGCAAGGTTCAGAGCTGAGTGTGAAATGTGGAGCTGGCAGGGACA
TCGGTGACCTCTTTCTGAATGGCCAAACCTGCAGAATTGTGCAGCGGGAGCTCTTGTTTGACCTGGGT
GTGGCCTACGGCATTGACTGTCTGCTGATTGATCCCACCCTGGGGGGCCGCTGTGACACCTTTACTAC
TTTCGATGCCTCGGGGGAGTGTGGGAGCTGTGTCAATACTCCCAGCTGCCCAAGGTGGAGTAAACCAA
AGGGTGTGAAGCAGAAGTGTCTCTACAACCTGCCCTTCAAGAGGAACCTGGAAGGCTGCCGGGAGCGG
TGCAGCCTGGTGATACAGATCCCCAGGTGCTGCAAGGGCTACTTCGGGCGAGACTGTCAGGCCTGCCC
TGGAGGACCAGATGCCCCGTGTAATAACCGGGGTGTCTGCCTTGATCAGTACTCGGCCACCGGAGAGT
GTAAATGCAACACCGGCTTCAATGGGACGGCGTGTGAGATGTGCTGGCCGGGGAGATTCGGGCCTGAT
CTGTGAAACGGGGTGGACAGGCCCCTCGTGTGACACTCAGGCAGTTTTGCCTGCAGTGTGTACGCCTC
CTTGTTCTGCTCATGCCACCTGTAAGGAGAACAACACGTGTGAGTGTAACCTGGATTATGAAGGTGAC
GGAATCACATGCACAGTTGTGGATTTCTGCAAACAGGACAACGGGGGCTGTGCAAAGGTGGCCAGATG
CTCCCAGAAGGGCACGAAGGTCTCCTGCAGCTGCCAGAAGGGATACAAAGGGGACGGGCACAGCTGCA
CAGAGATAGACCCCTGTGCAGACGGCCTTAACGGAGGGTGTCACGAGCACGCCACCTGTAAGATGACA
GGCCCGGGCAAGCACAAGTGTGAGTGTAAAAGTCACTATGTCGGAGATGGGCTGAACTGTGAGCCGGA
GCAGCTGCCCATTGACCGCTGCTTACAGGACAATGGGCAGTGCCATGCAGACGCCAAATGTGTCGACC
TCCACTTCCAGGATACCACTGTTGGGGTGTTCCATCTACGCTCCCCACTGGGCCAGTATAAGCTGACC
TTTGACAAAGCCAGAGAGGCCTGTGCCAACGAAGCTGCGACCACGGCAACCTACAACCAGCTCTCCTA
TGCCCAGAAGGCCAAGTACCACCTGTGCTCAGCAGGCTGGCTGGAGACCGGGCGGGTTGCCTACCCCA
CAGCCTTCGCCTCCCAGAACTGTGGCTCTGGTGTGGTTGGGATAGTGGACTATGGACCTAGACCCAAC
AAGAGTGAAATGTGGGATGTCTTCTGCTATCGGCCG

| | | | |
|---|---|---|---|
| NOV9u, CG50736-20 | SEQ ID NO: 248 | 552 aa | MW at 59802.0kD |
| Protein Sequence | | | |

RILQNLTTLATNNGYIKFSNLIQDSGLLSVVTDPIHTPVTLFWPTDQALHALPAEQQDFLFNQDNKDK
LKEYLKFHVIRDAKVLAVDLPTSTAWKTLQGSELSVKCGAGRDIGDLFLNGQTCRIVQRELLFDLGVA
YGIDCLLIDPTLGGRCDTFTTFDASGECGSCVNTPSCPRWSKPKGVKQKCLYNLPFKRNLEGCRERCS
LVIQIPRCCKGYFGRDCQACPGGPDAPCNNRGVCLDQYSATGECKCNTGFNGTACEMCWPGRFGPDCL
PCGCSDHGQCDDGITGSGQCLCETGWTGPSCDTQAVLPAVCTPPCSAHATCKENNTCECNLDYEGDGI
TCTVVDFCKQDNGGCAKVARCSQKGTKVSCSCQKGYKGDGHSCTEIDPCADGLNGGCHEHATCKMTGP
GKHKCECKSHYVGDGLNCEPEQLPIDRCLQDNGQCHADAKCVDLHFQDTTVGVFHLRSPLGQYKLTFD
KAREACANEAATTATYNQLSYAQKAKYHLCSAGWLETGRVAYPTAFASQNCGSGVVGIVDYGPRPNKS
EMWDVFCY

| | | |
|---|---|---|
| NOV9v, CG50736-21 | SEQ ID NO: 249 | 1668 bp |
| DNA Sequence | ORF Start: at 7 | ORF Stop: at 1663 |

GGATCCAGAATTCTGCAAAATCTTACGACTTTGGCAACAAACAATGGCTACATCAAATTTAGCAACTT
AATACAGGACTCAGGTTTGCTGAGTGTCATCACCGATCCCATCCACACCCCAGTCACTCTCTTCTGGC
CCACCGACCAAGCCCTCCATGCCCTACCTGCTGAACAACAGGACTTCCTGTTCAACCAAGACAACAAG
GACAAGCTGAAGGAGTATTTGAAGTTTCATGTGATACGAGATGCCAAGGTTTTAGCTGTGGATCTTCC
CACATCCACTGCCTGGAAGACCCTTCAAGGTTCAGAGCTGAGTGTGAAATGTGGAGCTGGCAGGGACA
TCGGTGACCTCTTTCTGAATGGCCAAACCTGCAGAATTGTGCAGCGGGAGCTCTTGTTTGACCTGGGT
GTGGCCTACGGCATTGACTGTCTGCTGATTGATCCCACCCTGGGGGGCCGCTGTGACACCTTTACTAC
TTTCGATGCCTCGGGGGAGTGTGGGAGCTGTGTCAATACTCCCAGCTGCCCAAGGTGGAGTAAACCAA
AGGGTGTGAAGCAGAAGTGTCTCTACAACCTGCCCTTCAAGAGGAACCTGGAAGGCTGCCGGGAGCGG
TGCAGCCTGGTGATACAGATCCCCAGGTGCTGCAAGGGCTACTTCGGGCGAGACTGTCAGGCCTGCCC
TGGAGGACCAGATGCCCCGTGTAATAACCGGGGTGTCTGCCTTGATCAGTACTCGGCCACCGGAGAGT
GTAAATGCAACACCGGCTTCAATGGGACGGCGTGTGAGATGTGCTGGCCGGGGAGATTCGGGCCTGAT
TGTCTGCCCTGTGGCTGCTCAGACCACGGACAGTGCGATGATGGCATCACGGGCTCCGGGCAGTGCCT
CTGTGAAACGGGGTGGACAGGCCCCTCGTGTGACACTCAGGCAGTTTTGCCTGCAGTGTGTACGCCTC
CTTGTTCTGCTCATGCCACCTGTAAGGAGAACAACACGTGTGAGTGTAACCTGGATTATGAAGGTGAC
GGAATCACATGCACAGTTGTGGATTTCTGCAAACAGGACAACGGGGGCTGTGCAAAGGTGGCCAGATG
CTCCCAGAAGGGCACGAAGGTCTCCTGCAGCTGCCAGAAGGGATACAAAGGGGACGGGCACAGCTGCA
CAGAGATAGACCCCTGTGCAGACGGCCTTAACGGAGGGTGTCACGAGCACGCCACCTGTAAGATGACA
GGCCCGGGCAAGCACAAGTGTGAGTGTAAAAGTCACTATGTCGGAGATGGGCTGAACTGTGAGCCGGA
GCAGCTGCCCATTGACCGCTGCTTACAGGACAATGGGCAGTGCCATGCAGACGCCAAATGTGTCGACC
TCCACTTCCAGGATACCACTGTTGGGGTGTTCCATCTACGCTCCCCACTGGGCCAGTATAAGCTGACC
TTTGACAAAGCCAGAGAGGCCTGTGCCAACGAAGCTGCGACCATGGCAACCTACAACCAGCTCTCCTA
TGCCCAGAAGGCCAAGTACCACCTGTGCTCAGCAGGCTGGCTGGAGACCGGGCGGGTTGCCTACCCCA
CAGCCTTCGCCTCCCAGAACTGTGGCTCTGGTGTGGTTGGGATAGTGGACTATGGACCTAGACCCAAC
AAGAGTGAAATGTGGGATGTCTTCTGCTATCGGCCG

| | | | |
|---|---|---|---|
| NOV9V, CG50736-21 | SEQ ID NO: 250 | 552 aa | MW at 59846.1kD |
| Protein Sequence | | | |

RILQNLTTLATNNGYIKFSNLIQDSGLLSVITDPIHTPVTLFWPTDQALHALPAEQQDFLFNQDNKDK
LKEYLKFHVIRDAKVLAVDLPTSTAWKTLQGSELSVKCGAGRDIGDLFLNGQTCRIVQRELLFDLGVA
YGIDCLLIDPTLGGRCDTFTTFDASGECGSCVNTPSCPRWSKPKGVKQKCLYNLPFKRNLEGCRERCS
LVIQIPRCCKGYFGRDCQACPGGPDAPCNNRGVCLDQYSATGECKCNTGFNGTACEMCWPGRFGPDCL
PCGCSDHGQCDDGITGSGQCLCETGWTGPSCDTQAVLPAVCTPPCSAHATCKENNTCECNLDYEGDGI
TCTVVDFCKQDNGGCAKVARCSQKGTKVSCSCQKGYKGDGHSCTEIDPCADGLNGGCHEHATCKMTGP
GKHKCECKSHYVGDGLNCEPEQLPIDRCLQDNGQCHADAKCVDLHFQDTTVGVFHLRSPLGQYKLTFD
KAREACANEAATMATYNQLSYAQKAKYHLCSAGWLETGRVAYPTAFASQNCGSGVVGIVDYGPRPNKS
EMWDVFCY

| | | |
|---|---|---|
| NOV9w, CG50736-22 | SEQ ID NO: 251 | 4527 bp |
| DNA Sequence | ORF Start: ATG at 4 | ORF Stop: TGA at 4510 |

GACATGGACCAGGATGAGAAAAGCTTCTGGTTGTCACAGAGCAATATTCCAGCCCTAATAAAGTACCA
TATGCTACTAGGCACATACAGAGTGGCAGATCTGCAGACCCTGTCTTCTTCTGACATGTTGGCAACAT
CTTTGCAGGGCAACTTCCTTCACTTGGCAAAGGTGGATGGGAATATCACAATTGAAGGGGCCTCCATT
GTCGATGGGGACAACGCAGCCACAAATGGAGTGATACACATCATCAACAAGGTGCTGGTCCCACAAAG
ACGTCTAACTGGCTCCTTACCAAACCTGCTCATGCGGCTGGAACAGATGCCTGACTATTCCATCTTCC
GGGGCTACATCATTCAATATAATCTGGCGAATGCAATTGAGGCTGCCGATGCCTACACAGTGTTTGCT
CCAAACAACAATGCCATCGAGAATTACATCAGGGAGAAGAAAGTCTTGTCTCTAGAGGAGGACGTCCT
CCGGTATCATGTGGTCCTGGAGGAGAAACTCCTGAAGAATGACCTGCACAATGGCATGCATCGTGAGA
CCATGCTGGGTTTCTCCTATTTCCTTAGCTTCTTTCTCCACAATGACCAGCTCTATGTAAATGAGGCT
CCAATAAACTACACCAATGTAGCCACTGATAAGGGAGTGATCCATGGCTTGGGAAAAGTTCTGGAAAT
TCAGAAGAACAGATGTGATAATAATGACACTACTATTATACGAGGAAGATGTAGGACATGCTCCTCAG
AGCTGACCTGCCCATTCGGAACTAAATCTCTAGGTAATGAGAAGAGGAGATGCATCTATACCTCCTAT
TTCATGGGAAGACGAACCCTGTTTATTGGGTGCCAGCCAAAATGTGTGAGAACCGTCATTACGAGAGA
ATGCTGTGCCGGCTTCTTTGGCCCCCAATGCCAGCCCTGCCCAGGGAATGCCCAGAATGTCTGCTTTG
GTAATGGCATCTGTTTGGATGGAGTGAATGGCACAGGTGTGTGTGAGTGTGGGGAGGGCTTCAGCGGC
ACAGCCTGCGAGACCTGCACCGAGGGCAAGTACGGCATCCACTGTGACCAAGCATGTTCTTGTGTCCA
TGGGAGATGCAACCAAGGACCCTTGGGAGATGGCTCCTGTGACTGTGATGTTGGCTGGCGAGGAGTGC
ATTGTGACAATGCAACCACAGAAGACAACTGCAATGGGACATGCCATACCAGCGCCAACTGCCTCACC
AACTCAGATGGTACAGCTTCATGCAAGTGTGCAGCAGGATTCCAAGGAAACGGGACCATCTGCACAGC
AATCAATGCCTGTGAGATCAGCAATGGAGGTTGCTCTGCCAAGGCTGACTGTAAGAGAACCACCCCAG
GAAGGCGAGTGTGCACGTGCAAAGCAGGCTACACGGGTGATGGCATTGTGTGCCTGGAAATCAACCCG
TGTTTGGAGAACCATGGTGGCTGTGACAAGAATGCGGAGTGCACACAGACAGGACCCAACCAGGCTGC
CTGTAACTGTTTGCCAGCATACACTGGAGATGGAAAGGTCTGCACACTCATCAATGTCTGCTTAACTA
AAAATGGCGGCTGTGGTGAATTTGCCATCTGCAACCACACTGGGCAAGTAGAAAGGACTTGTACTTGC
AAGCCAAACTACATTGGAGATGGATTTACCTGCCGCGGCAGCATTTATCAGGAGCTTCCCAAGAACCC
GAAAACTTCCCAGTATTTCTTCCAGTTGCAGGAGCATTTCGTGAAAGATCTGGTCGGCCCAGGCCCCT
TCACTGTTTTTGCACCTTTATCTGCAGCCTTTGATGAGGAAGCTCGGGTTAAAGACTGGGACAAATAC
GGTTTAATGCCCCAGGTTCTTCGGTACCATGTGGTCGCCTGCCACCAGCTGCTTCTGGAAAACCTGAA
ATTGATCTCAAATGCTACTTCCCTCCAAGGAGAGCCAATAGTCATCTCCGTCTCTCAGAGCACGGTGT
ATATAAACAATAAGGCTAAGATCATATCCAGTGATATCATCAGTACTAATGGGATTGTTCATATCATA
GACAAATTGCTATCTCCCAAAAATTTGCTTATCACTCCCAAAGACAACTCTGGAAGAATTCTGCAAAA
TCTTACGACTTTGGCAACAAACAATGGCTACATCAAATTTAGCAACTTAATACAGGACTCAGGTTTGC
TGAGTGTCATCACCGATCCCATCCACACCCCAGTCACTCTCTTCTGGCCCACCGACCAAGCCCTCCAT
GCCCTACCTGCTGAACAACAGGACTTCCTGTTCAACCAAAGACACAAGGACAAGCTGAAGGAGTATTT
GAAGTTTCATGTGATACGAGATGCCAAGGTTTTAGCTGTGGATCTTCCCACATCCACTGCCTGGAAGA
CCCTGCAAGGTTCAGAGCTGAGTGTGAAATGTGGAGCTGGCAGGGACATCGGTGACCTCTTTCTGAAT
GGCCAAACCTGCAGAATTGTGCAGCGGGAGCTCTTGTTTGACCTGGGTGTGGCCTACGGCATTGACTG
TCTGCTGATTGATCCCACCCTGGGGGGCCGCTGTGACACCTTTACTACTTTCGATGCCTCGGGGGAGT
GTGGGAGCTGTGTCAATACTCCCAGCTGCCCAAGGTGGAGTAAACCAAAGGGTGTGAAGCAGAAGTGT
CTCTACAACCTGCCCTTCAAGAGGAACCTGGAAGGCTGCCGGGAGCGGTGCAGCCTGGTGATACAGAT
CCCCAGGTGCTGCAAGGGCTACTTCGGGCGAGACTGTCAGCCTCGCAACTCTAAAAGTGTCTGCCTTG
ATCAGTACTCGGCCACCGGAGAGTGTAAATGCAACACCGGCTTCAATGGGACGGCGTGTGAGATGTGC
TGGCCGGGGAGATTTGGGCCTGATTGTCTGCCCTGTGGCTGCTCAGACCACGGACAGTGCGATGATGG
CATCACGGGCTCCGGGCAGTGCCTCTGTGAAACGGGGTGGACAGGCCCCTCGTGTGACACTCAGGCAG
TTTTGCCTGCAGTGTGTACGCCTCCTTGTTCTGCTCATGCCACCTGTAAGGAGAACAACACGTGTGAG
TGTAACCTGGATTATGAAGGTGACGGAATCACATGCACAGTTGTGGATTTCTGCAAACAGGACAACGG
GGGCTGTGCAAAGGTGGCCAGATGCTCCCAGAAGGGCACGAAGGTCTCCTGCAGCTGCCAGAAGGGAT
ACAAAGGGGACGGGCACAGCTGCACAGAGATAGACCCCTGTGCAGACGGCCTTAACGGAGGGTGTCAC
GAGCACGCCACCTGTAAGATGACAGGCCCGGGCAAGCACAAGTGTGAGTGTAAAAGTCACTATGTCGG
AGATGGGCTGAACTGTGAGCCGGAGCAGCTGCCCATTGACCGCTGCTTACAGGACAATGGGCAGTGCC
ATGCAGACGCCAAATGTGTCGACCTCCACTTCCAGGATACCACTGTTGGGGTGTTCCATCTACGCTCC
CCACTGGGCCAGTATAAGCTGACCTTTGACAAAGCCAGAGAGGCCTGTGCCAACGAAGCTGCGACCAT
GGCAACCTACAACCAGCTCTCCTATGCCCAGAAGGCCAAGTACCACCTGTGCTCAGCAGGCTGGCTGG
AGACCGGGCGGGTTGCCTACCCCACAGCCTTCGCCTCCCAGAACTGTGGCTCTGGTGTGGTTGGGATA
GTGGACTATGGACCTAGACCCAACAAGAGTGAAATGTGGGATGTCTTCTGCTATCGGATGAAAGATGT
GAACTGCACCTGCAAGGTGGGCTATGTGGGAGATGGCTTCTCATGCAGTGGGAACCTGCTGCAGGTCC
TGATGTCCTTCCCCTCACTCACAAACTTCCTGACGGAAGTGCTGGCCTATTCCAACAGCTCAGCTCGA
GGCCGTGCATTTCTAGAACACCTGACTGACCTGTCCATCCGCGGCACCCTCTTTGTGCCACAGAACAG
TGGGCTGGGGGAGAATGAGACCTTGTCTGGGCGGGACATCGAGCACCACCTCGCCAATGTCAGCATGT
TTTTCTACAATGACCTTGTCAATGGCACCACCCTGCAAACGAGGGTGGGAAGCAAGCTGCTCATCACT
GCCAGCCAGGACCCACTCCAACCGACGGAGACCAGGTTTGTTGATGGAAGAGCCATTCTGCAGTGGGA
CATCTTTGCCTCCAATGGGATCATTCATGTCATTTCCAGGCCTTTAAAAGCACCCCCTGCCCCCGTGA
CCTTGACCCACACTGGCTTGGGAGCAGGGATCTTCTTTGCCATCATCCTGGTGACTGGGGCTGTTGCC
TTGGCTGCTTACTCCTACTTTCGGATAAACCGGAGAACAATCGGCTTCCAGCATTTTGAGTCGGAAGA
GGACATTAATGTTGCAGCTCTTGGCAAGCAGCAGCCTGAGAATATCTCGAACCCCTTGTATGAGAGCA
CAACCTCAGCTCCCCCAGAACCTTCCTACGACCCCTTCACGGACTCTGAAGAACGGCAGCTTGAGGGC
AATGACCCCTTGAGGACACTGTGAGGGCCTGGACGGGAG

| | | | |
|---|---|---|---|
| NOV9w, CG50736-22 | SEQ ID NO: 252 | 1502 aa | MW at 163589.6kD |
| Protein Sequence | | | |

MDQDEKSFWLSQSNIPALIKYHMLLGTYRVADLQTLSSSDMLATSLQGNFLHLAKVDGNITIEGASIV
DGDNAATNGVIHIINKVLVPQRRLTGSLPNLLMRLEQMPDYSIFRGYIIQYNLANAIEAADAYTVFAP
NNNAIENYIREKKVLSLEEDVLRYHVVLEEKLLKNDLHNGMHRETMLGFSYFLSFFLHNDQLYVNEAP
INYTNVATDKGVIHGLGKVLEIQKNRCDNNDTTIIRGRCRTCSSELTCPFGTKSLGNEKRRCIYTSYF
MGRRTLFIGCQPKCVRTVITRECCAGFFGPQCQPCPGNAQNVCFGNGICLDGVNGTGVCECGEGFSGT
ACETCTEGKYGIHCDQACSCVHGRCNQGPLGDGSCDCDVGWRGVHCDNATTEDNCNGTCHTSANCLTN
SDGTASCKCAAGFQGNGTICTAINACEISNGGCSAKADCKRTTPGRRVCTCKAGYTGDGIVCLEINPC
LENHGGCDKNAECTQTGPNQAACNCLPAYTGDGKVCTLINVCLTKNGGCGEFAICNHTGQVERTCTCK
PNYIGDGFTCRGSIYQELPKNPKTSQYFFQLQEHFVKDLVGPGPFTVFAPLSAAFDEEARVKDWDKYG
LMPQVLRYHVVACHQLLLENLKLISNATSLQGEPIVISVSQSTVYINNKAKIISSDIISTNGIVHIID
KLLSPKNLLITPKDNSGRILQNLTTLATNNGYIKFSNLIQDSGLLSVITDPIHTPVTLFWPTDQALHA
LPAEQQDFLFNQDNKDKLKEYLKFHVIRDAXVLAVDLPTSTAWKTLQGSELSVKCGAGRDIGDLFLNG
QTCRIVQRELLFDLGVAYGIDCLLIDPTLGGRCDTFTTFDASGECGSCVNTPSCPRWSKPKGVKQKCL
YNLPFKRNLEGCRERCSLVIQIPRCCKGYFGRDCQPRNSKSVCLDQYSATGECKCNTGFNGTACEMCW
PGRFGPDCLPCGCSDHGQCDDGITGSGQCLCETGWTGPSCDTQAVLPAVCTPPCSAHATCKENNTCEC
NLDYEGDGITCTVVDFCKQDNGGCAKVARCSQKGTKVSCSCQKGYKGDGHSCTEIDPCADGLNGGCHE
HATCKMTGPGKHKCECKSHYVGDGLNCEPEQLPIDRCLQDNGQCHADAKCVDLHFQDTTVGVFHLRSP
LGQYKLTFDKAREACANEAATMATYNQLSYAQKAKYHLCSAGWLETGRVAYPTAFASQNCGSGVVGIV
DYGPRPNKSEMWDVFCYRMKDVNCTCKVGYVGDGFSCSGNLLQVLMSFPSLTNFLTEVLAYSNSSARG
RAFLEHLTDLSIRGTLFVPQNSGLGENETLSGRDIEHHLANVSMFFYNDLVNGTTLQTRVGSKLLITA
SQDPLQPTETRFVDGPAILQWDIFASNGIIHVISRPLKAPPAPVTLTHTGLGAGIFFAIILVTGAVAL
AAYSYFRINRRTIGFQHFESEEDINVAALGKQQPENISNPLYESTTSAPPEPSYDPFTDSEERQLEGN
DPLRTL

| | | |
|---|---|---|
| NOV9x, CG50736-23 | SEQ ID NO: 253 | 5416 bp |
| DNA Sequence | ORF Stan: ATG at 478 | ORF Stop: TGA at 5008 |

GTAGAATGCATCAAAACTGGCACGGGCACCCACACCTGCGTGTGTCAGCAGGGTTGGACAGGGAATGG
GAGAGACTGCTCGGAGATCAACAACTGCCTGCTGCCCAGTGCAGGCGGCTGCCACGACAACGCATCCT
GTTTGTATGTGGGTCCCGGGCAGAATGAGTGTGAGTGCAAGAAAGGATTTCGAGGAAATGGGATTGAC
TGTGCACCAATAACTTCATGCTTGGAACAAACCGGGAAATGTCATCCATTGGCAAGCTGTCAATCTAC
TTCGTCTGGTGTCTGGAGCTGTGTTTGTCAAGAGGGCTATGAAGGAGATGGCTTTCTGTGCTATGGAA
ACGCAGCAGTGGAATTGTCATTTCTCTCCGAAGCAGCTATATTTAACCGATGGATAAATAATGCTTCT
CTACAACCCACACTGTCAGCCACCTCAAACCTCACTGTCCTCGTGCCTTCCCAACAAGCTACTGAGGA
CATGGACCAGGATGAGAAAAGCTTCTGGTTGTCACAGAGCAATATTCCAGCCCTAATAAAGTACCATA
TGCTACTAGGCACATACAGAGTGGCAGATCTGCAGACCCTGTCTTCTTCTGACATGTTGGCAACATCT
TTGCAGGGCAACTTCCTTCACTTGGCAAAGGTGGATGGGAATATCACAATTGAAGGGGCCTCCATTGT
CGATGGGGACAACGCAGCCACAAATGGAGTGATACACATCATCAACAAGGTGCTGGTCCCACAAAGAC
GTCTAACTGGCTCCTTACCAAACCTGCTCATGCGGCTGGAACAGATGCCTGACTATTCCATCTTCCGG
GGCTACATCATTCAATATAATCTGGCGAATGCAATTGAGGCTGCCGATGCCTACACAGTGTTTGCTCC
AAACAACAATGCCATCGAGAATTACATCAGGGAGAAGAAAGTCTTGTCTCTAGAGGAGGACGTCCTCC
GGTATCATGTGGTCCTGGAGGAGAAACTCCTGAAGAATGACCTGCACAATGGCATGCATCGTGAGACC
ATGCTGGGTTTCTCCTATTTCCTTAGCTTCTTTCTCCACAATGACCAGCTCTATGTAAATGAGGCTCC
AATAAACTACACCAATGTAGCCACTGATAAGGGAGTGATCCATGGCTTGGGAAAAGTTCTGGAAATTC
AGAAGAACAGATGTGATAATAATGACACTACTATTATACGAGGAAGATGTAGGACATGCTCCTCAGAG
CTGACCTGCCCATTCGGAACTAAATCTCTAGGTAATGAGAAGAGGAGATGCATCTATACCTCCTATTT
CATGGGAAGACGAACCCTGTTTATTGGGTGCCAGCCAAAATGTGTGAGAACCGTCATTACGAGAGAAT
GCTGTGCCGGCTTCTTTGGCCCCCAATGCCAGCCCTGCCCAGGGAATGCCCAGAATGTCTGCTTTGGT
AATGGCATCTGTTTGGATGGAGTGAATGGCACAGGTGTGTGTGAGTGTGGGGAGGGCTTCAGCGGCAC
AGCCTGCGAGACCTGCACCGAGGGCAAGTACGGCATCCACTGTGACCAAGCATGTTCTTGTGTCCATG
GGAGATGCAACCAAGGACCCTTGGGAGATGGCTCCTGTGACTGTGATGTTGGCTGGCGAGGAGTGCAT
TGTGACAATGCAACCACAGAAGACAACTGCAATGGGACATGCCATACCAGCGCCAACTGCCTCACCAA
CTCAGATGGTACAGCTTCATGCAAGTGTGCAGCAGGATTCCAAGGAAACGGGACCATCTGCACAGCAA
TCAATGCCTGTGAGATCAGCAATGGAGGTTGCTCTGCCAAGGCTGACTGTAAGAGAACCACCCCAGGA
AGGCGAGTGTGCACGTGCAAAGCAGGCTACACGGGTGATGGCATTGTGTGCCTGGAAATCAACCCGTG
TTTGGAGAACCATGGTGGCTGTGACAAGAATGCGGAGTGCACACAGACAGGACCCAACCAGGCTGCCT
GTAACTGTTTGCCAGCATACACTGGAGATGGAAAGGTCTGCACACTCATCAATGTCTGCTTAACTAAA
AATGGCGGCTGTAGTGAATTTGCCATCTGCAACCACACTGGGCAAGTAGAAAGGACTTGTACTTGCAA
GCCAAACTACATTGGAGATGGATTTACCTGCCGCGGCAGCATTTATCAGGAGCTTCCCAAGAACCCGA
AAACTTCCCAGTATTTCTTCCAGTTGCAGGAGCACTTCGTGAAAGATCTGGTCGGCCCAGGCCCCTTC
ACTGTTTTTGCACCTTTATCTGCAGCCTTTGATGAGGAAGCTCGGGTTAAAGACTGGGACAAATACGG
TTTAATGCCCCAGGTTCTTCGGTACCATGTGGTCGCCTGCCACCAGCTGCTTCTGGAAAACCTGAAAT
TGATCTCAAATGCTACTTCCCTCCAAGGAGAGCCAATAGTCATCTCCGTCTCTCAGAGCACGGTGTAT
ATAAACAATAAGGCTAAGATCATATCCAGTGATATCATCAGTACTAATGGGATTGTTCATATCATAGA
CAAATTGCTATCTCCCAAAAATTTGCTTATCACTCCCAAAGACAACTCTGGAAGAATTCTGCAAAATC
TTACGACTTTGGCAACAAACAATGGCTACATCAAATTTAGCAACTTAATACAGGACTCAGGTTTGCTG
AGTGTCATCACCGATCCCATCCACACCCCAGTCACTCTCTTCTGGCCCACCGACCAAGCCCTCCATGC
CCTACCTGCTGAACAACAGGACTTCCTGTTCAACCAAGACAACAAGGACAAGCTGAAGGAGTATTTGA
AGTTTCATGTGATACGAGATGCCAAGGTTTTAGCTGTGGATCTTCCCACATCCACTGCCTGGAAGACC
CTGCAAGGTTCAGAGCTGAGTGTGAAATGTGGAGCTGGCAGGGACATCGGTGACCTCTTTCTGAATGG
CCAAACCTGCAGAATTGTGCAGCGGGAGCTCTTGTTTGACCTGGGTGTGGCCTACGGCATTGACTGTC
TGCTGATTGATCCCACCCTGGGGGGCCGCTGTGACACCTTTACTACTTTCGATGCCTCGGGGGAGTGT
GGGAGCTGTGTCAATACTCCCAGCTGCCCAAGGTGGAGTAAACCAAAGGGTGTGAAGCAGAAGTGTCT
CTACAACCTGCCCTTCAAGAGGAACCTGGAAGGCTGCCGGGAGCGGTGCAGCCTGGTGATACAGATCC
CCAGGTGCTGCAAGGGCTACTTCGGGCGAGACTGTCAGGCCTGCCCTGGAGGACCAGATGCCCCGTGT
AATAACCGGGGTGTCTGCCTTGATCAGTACTCGGCCACCGGAGAGTGTAAATGCAACACCGGCTTCAA
TGGGACGGCGTGTGAGATGTGCTGGCCGGGGAGATTTGGGCCTGATTGTCTGCCCTGTGGCTGCTCAG
ACCACGGACAGTGCGATGATGGCATCACGGGCTCCGGGCAGTGCCTCTGTGAAACGGGGTGGACAGGC
CCCTCGTGTGACACTCAGGCAGTTTTGCCTGCAGTGTGTACGCCTCCTTGTTCTGCTCATGCCACCTG
TAAGGAGAACAACACGTGTGAGTGTAACCTGGATTATGAAGGTGACGGAATCACATGCACAGTTGTGG
ATTTCTGCAAACAGGACAACGGGGGCTGTGCAAAGGTGGCCAGATGCTCCCAGAAGGGCACGAAGGTC
TCCTGCAGCTGCCAGAAGGGATACAAAGGGGACGGGCACAGCTGCACAGAGATAGACCCCTGTGCAGA
CGGCCTTAACGGAGGGTGTCACGAGCACGCCACCTGTAAGATGACAGGCCCGGGCAAGCACAAGTGTG
AGTGTAAAAGTCACTATGTCGGAGATGGGCTGAACTGTGAGCCGGAGCAGCTGCCCATTGACCGCTGC
TTACAGGACAATGGGCAGTGCCATGCAGACGCCAAATGTGTCGACCTCCACTTCCAGGATACCACTGT
TGGGGTGTTCCATCTACGCTCCCCACTGGGCCAGTATAAGCTGACCTTTGACAAAGCCAGAGAGGCCT
GTGCCAACGAAGCTGCGACCATGGCAACCTACAACCAGCTCTCCTATGCCCAGAAGGCCAAGTACCAC
CTGTGCTCAGCAGGCTGGCTGGAGACCGGGCGGGTTGCCTACCCCACAGCCTTCGCCTCCCAGAACTG
TGGCTCTGGTGTGGTTGGGATAGTGGACTATGGACCTAGACCCAACAAGAGTGAAATGTGGGATGTCT
TCTGCTATCGGATGAAAGATGTGAACTGCACCTGCAAGGTGGGCTATGTGGGAGATGGCTTCTCATGC
AGTGGGAACCTGCTGCAGGTCCTGATGTCCTTCCCCTCACTCACAAACTTCCTGACGGAAGTGCTGGC
CTATTCCAACAGCTCAGCTCGAGGCCGTGCATTTCTAGAACACCTGACTGACCTGTCCATCCGCGGCA
CCCTCTTTGTGCCACAGAACAGTGGGCTGGGGGAGAATGAGACCTTGTCTGGGCGGGACATCGAGCAC
CACCTCGCCAATGTCAGCATGTTTTTCTACAATGACCTTGTCAATGGCACCACCCTGCAAACGAGGCT
GGGAAGCAAGCTGCTCATCACTGCCAGCCAGGACCCACTCCAACCGACGGAGACCAGGTTTGTTGATG
GAAGAGCCATTCTGCAGTGGGACATCTTTGCCTCCAATGGGATCATTCATGTCATTTCCAGGCCTTTA
AAAGCACCCCCTGCCCCCGTGACCTTGACCCACACTGGCTTGGGAGCAGGGATCTTCTTTGCCATCAT
CCTGGTGACTGGGGCTGTTGCCTTGGCTGCTTACTCCTACTTTCGGATAAACCGGAGAACAATCGGCT
TCCAGCATTTTGAGTCGGAAGAGGACATTAATGTTGCAGCTCTTGGCAAGCAGCAGCCTGAGAATATC
TCGAACCCCTTGTATGAGAGCACAACCTCAGCTCCCCCAGAACCTTCCTACGACCCCTTCACGGACTC
TGAAGAACGGCAGCTTGAGGGCAATGACCCCTTGAGGACACTGTGAGGGCCTGGACGGGAGATGCCAC
CCATCACTCACTGCCACCTGGGCCATCAACTGTGAATTCTCAGCACCAGTTGCCTTTTAGGAACGTAP
AGTCCTTTAAGCACTCAGAAGCCATACCTCATCTCTCTGGCTGATCTGGGGGTTGTTTCTGTGGGTGA
GAGATGTGTTGCTGTGCCCACCCAGTACAGCTTCCTCCTCTGACCCTTTGGCTCTTCTTCCTTTGTAC
TCTTCAGCTGGCACCTGCTCCATTCTGCCCTACATGATGGGTAACTGTGATCTTTCTTCCCTGTTTGT
TAGATTGTAAGCCTCCGTCTTTGTATCCCAGCCCCTAGCCCAGTGCCTGACACAGGAACTGTGCACAA
TAAAGGTTTATGGAACAGAAACAAAGTCAACAGAAAAAAAAAAA

| | | | |
|---|---|---|---|
| NOV9x, CG50736-23 | SEQ ID NO: 254 | 1510 aa | MW at 164274.3kD |
| Protein Sequence | | | |

MDQDEKSFWLSQSNIPALIKYHMLLGTYRVADLQTLSSSDMLATSLQGNFLHLAKVDGNITIEGASIV
DGDNAATNGVIHIINKVLVPQRRLTGSLPNLLMRLEQMPDYSIFRGYIIQYNLANAIEAADAYTVFAP
NNNAIENYIREKKVLSLEEDVLRYHVVLEEKLLKNDLHNGMHRETMLGFSYFLSFFLHNDQLYVNEAP
INYTNVATDKGVIHGLGKVLEIQKNRCDNNDTTIIRGRCRTCSSELTCPFGTKSLGNEKRRCIYTSYF
MGRRTLFIGCQPKCVRTVITRECCAGFFGPQCQPCPGNAQNVCFGNGICLDGVNGTGVCECGEGFSGT
ACETCTEGKYGIHCDQACSCVHGRCNQGPLGDGSCDCDVGWRGVHCDNATTEDNCNGTCHTSANCLTN
SDGTASCKCAAGFQGNGTICTAINACEISNGGCSAKADCKRTTPGRRVCTCKAGYTGDGIVCLEINPC
LENHGGCDKNAECTQTGPNQAACNCLPAYTGDGKVCTLINVCLTKNGGCSEFAICNHTGQVERTCTCK
PNYIGDGFTCRGSIYQELPKNPKTSQYFFQLQEHFVKDLVGPGPFTVFAPLSAAFDEEARVKDWDKYG
LMPQVLRYHVVACHQLLLENLKLISNATSLQGEPIVISVSQSTVYINNKAKIISSDIISTNGIVHIID
KLLSPKNLLITPKDNSGRILQNLTTLATNNGYIKFSNLIQDSGLLSVITDPIHTPVTLFWPTDQALHA
LPAEQQDFLFNQDNKDKLKEYLKFHVIRDAKVLAVDLPTSTAWKTLQGSELSVKCGAGRDIGDLFLNG
QTCRIVQRELLFDLGVAYGIDCLLIDPTLGGRCDTFTTFDASGECGSCVNTPSCPRWSKPKGVKQKCL
YNLPFKRNLEGCRERCSLVIQIPRCCKGYFGRDCQACPGGPDAPCNNRGVCLDQYSATGECKCNTGFN
GTACEMCWPGRFGPDCLPCGCSDHGQCDDGITGSGQCLCETGWTGPSCDTQAVLPAVCTPPCSAHATC
KENNTCECNLDYEGDGITCTVVDFCKQDNGGCAKVARCSQKGTKVSCSCQKGYKGDGHSCTEIDPCAD
GLNGGCHEHATCKMTGPGKHKCECKSHYVGDGLNCEPEQLPIDRCLQDNGQCHADAKCVDLHFQDTTV
GVFHLRSPLGQYKLTFDKAREACANEAATMATYNQLSYAQKAKYHLCSAGWLETGRVAYPTAFASQNC
GSGVVGIVDYGPRPNKSEMWDVFCYRMKDVNCTCKVGYVGDGFSCSGNLLQVLMSFPSLTNFLTEVLA
YSNSSARGRAFLEHLTDLSIRGTLFVPQNSGLGENETLSGRDIEHHLANVSMFFYNDLVNGTTLQTRL
GSKLLITASQDPLQPTETRFVDGRAILQWDIFASNGIIHVISRPLKAPPAPVTLTHTGLGAGIFFAII
LVTGAVALAAYSYFRINPRTIGFQHFESEEDINVAALGKQQPENISNPLYESTTSAPPEPSYDPFTDS
EERQLEGNDPLRTL

| | | |
|---|---|---|
| NOV9y, CG50736-24 | SEQ ID NO: 255 | 7670 bp |
| DNA Sequence | ORF Start: ATG at 8 | ORF Stop: TGA at 7661 |

TTTCCTCATGATGCTACAACATTTAGTAATTTTTTGTCTTGGATTGGTTGTACAAAATTTCTGCTCCC
CAGCTGAAACCACAGGGCAGGCAAGAAGATGTGATAGGAAGTCTCTTCTTACAATTAGGACCGAGTGC
CGATCCTGCGCTCTCAACCTTGGAGTCAAGTGCCCGGATGGTTACACCATGATTACCAGTGGCTCTGT
AGGGGTTCGAGATTGCAGGTACACCTTTGAGGTCAGAACATACTCTCTGTCTCTCCCCGGATGCCGCC
ATATTTGTAGGAAGGACTATCTCCAACCTCGGTGTTGTCCTGGCCGCTGGGGCCCAGACTGTATAGAG
TGCCCAGGTGGAGCGGGGTCACCCTGCAATGGCAGAGGCAGTTGTGCTGAAGGCATGGAAGGAAATGG
AACCTGCTCCTGCCAAGAAGGGTTTGGTGGAACAGCCTGTGAAACCTGTGCTGACGACAACTTATTTG
GACCCAGCTGTTCATCAGTGTGCAACTGTGTGCATGGGGTGTGCAACAGTGGACTAGATGGCGATGGA
ACCTGTGAGTGCTACTCTGCGTACACTGGCCCCAAGTGTGACAAGCCCATCCCTGAATGTGCAGCCTT
GCTCTGCCCAGAAAATTCCAGATGTTCGCCTTCCACTGAAGATGAAAACAAACTGGAATGCAAATGCC
TTCCCAATTACCGAGGCGATGGCAAATACTGCGACCCCATCAATCCATGTTTACGAAAAATCTGCCAC
CCTCATGCTCATTGTACGTACCTGGGACCAAATCGGCACAGTTGTACATGCCAAGAAGGCTACCGTGG
GGATGGCCAAGTGTGCTTGCCTGTGGACCCCTGCCAAATTAACTTTGGAAACTGCCCTACAAAGTCTA
CAGTGTGCAAATATGATGGGCCTGGACAGTCTCACTGCGAGTGTAAGGAGCATTACCAGAATTTCGTA
CCTGGAGTGGGGTGCAGTATGACTGATATATGTAAATCAGATAACCCGTGTCATAGGAATGCAAATTG
CACCACCGTCGCACCAGGCCGAACTGAATGCATTTGCCAGAAAGGTTACGTGGGTGATGGCTTAACGT
GTTATGGAAACATTATGGAGCGACTCAGAGAATTAAATACTGAACCCAGAGGAAAATGGCAAGGAAGG
CTGACCTCTTTCATCTCACTCCTAGACAAAGCTTATGCCTGGCCACTGAGTAAGCTGGGACCCTTCAC
GGTGCTGTTACCTACAGACAAGGGACTGAAAGGATTCAATGTAAATGAGCTTTTGGTGGATAATAAAG
CTGCTCAATACTTTGTGAAACTCCACATAATTGCTGGTCAGATGAACATCGAATATATGAATAACACA
GACATGTTCTACACCTTGACTGGAAAGTCGGGGGAAATCTTCAACAGCGATAAGGACAATCAAATAAA
GCTTAAACTCCATGGAGGCAAAAAGAAGGTAAAAATTATACAAGGGGACATCATTGCTTCCAATGGGC
TTCTGCACATCCTTGACAGAGCCATGGACAAGTTAGAACACACATTTGAGAGCAACAATGAGCAAACC
ATAATGACAATGCTACAACCAAGGTACAGCAAGTTCAGATCTTTGTTAGAGGAAACCAATTTGGGACA
TGCCTTAGATGAGGATGGAGTTGGTGGACCATACACCATTTTTGTTCCAAATAATGAAGCATTGAATA
ACATGAAGGACGGCACTCTCGATTACCTCCTTTCTCCAGAGGGATCTCGGAAGCTTCTGGAACTCGTC
AGATACCACATTGTCCCATTTACCCAGCTTGAAGTGGCCACTCTCATCTCCACCCCTCACATCAGGAG
CATGGCCAACCAGCTCATACAGTTCAACACCACCGACAATGGACAGATTCTGGCAAATGATGTGGCAA
TGGAAGAAATTGAGATCACTGCCAAAAATGGCCGAATTTACACACTGACAGGAGTTCTCATTCCTCCC
TCCATTGTCCCGATTCTGCCCCATCGATGTGATGAAACAAAGAGAGAGATGAAACTGGGCACTTGTGT
GAGCTGTTCTCTGGTGTACTGGAGCAGATGTCCTGCTAACTCTGAGCCCACAGCACTCTTCACACACA
GATGTGTCTACAGTGGCAGGTTTGGGAGCCTGAAGAGCGGCTGTGCCCGGTACTGCAATGCCACTGTG
AAGATTCCAAAGTGCTGCAAAGGCTTCTATGGACCTGACTGCAACCAGTGTCCAGGAGGCTTCTCAAA
TCCATGCTCAGGAAATGGACAGTGTGCAGATAGCCTCGGCGGCAACGGGACATGCATTTGTGAGGAGG
GCTTCCAAGGCTCCCAGTGTCAGTTCTGCTCTGATCCCAATAAATACGGACCTCGGTGTAACAAAAAA
TGCCTGTGCGTTCACGGAACATGCAATAACAGGATAGACAGCGATGGGGCCTGCCTCACTGGCACATG
CAGAGACGGCTCTGCCGGGAGACTCTGTGATAAGCAGACCTCAGCCTGTGGGCCCTATGTGCAGTTCT
GTCACATCCACGCCACCTGTGAATACAGCAATGGGACAGCCAGTTGTATTTGCAAAGCAGGATATGAA
GGAGATGGAACTCTGTGTTCTGAGATGGACCCTTGCACAGGACTAACTCCAGGAGGCTGTAGCCGCAA
TGCAGAATGCATCAAAACTGGCACGGGCACCCACACCTGCGTGTGTCAGCAGGGTTGGACAGGGAATG
GGAGAGACTGCTCGGAGATCAACAACTGCCTGCTGCCCAGTGCAGGCGGCTGCCACGACAACGCATCC
TGTTTGTATGTGGGTCCCGGGCAGAATGAGTGTGAGTGCAAGAAAGGATTTCGAGGAAATGGGATTGA
CTGTGAACCAATAACTTCATGCTTGGAACAAACCGGGAAATGTCATCCATTGGCAAGCTGTCAATCTA
CTTCGTCTGGTGTCTGGAGCTGTGTTTGTCAAGAGGGCTATGAAGGAGATGGCTTTCTGTGCTATGGA
AACGCAGCAGTGGAATTGTCATTTCTCTCCGAAGCAGCTATATTTAACCGATGGATAAATAATGCTTC
TCTACAACCCACACTGTCAGCCACCTCAAACCTCACTGTCCTCGTGCCTTCCCAACAAGCTACTGAGG
ACATGGACCAGGATGAGAAAAGCTTCTGGTTGTCACAGAGCAATATTCCAGCCCTAATAAAGTACCAT
ATGCTACTAGGCACATACAGAGTGGCAGATCTGCAGACCCTGTCTTCTTCTGACATGTTGGCAACATC
TTTGCAGGGCAACTTCCTTCACTTGGCAAAGGTGGATGGGAATATCACAATTGAAGGGGCCTCCATTG
TCGATGGGGACAATGCAGCCACAAATGGAGTGATACACATCATCAACAAGGTGCTGGTCCCACAAAGA
CGTCTAACTGGCTCCTTACCAAACCTGCTCATGCGGCTGGAACAGATGCCTGACTATCCCATCTTCCG
GGGCTACATCATTCAATATAATCTGGCGAATGCAATTGAGGCTGCCGATGCCTACACAGTGTTTGCTC
CAAACAACAATGCCATCGAGAATTACATCAGGGAGAAGAAAGTCTTGTCTCTAGAGGAGGACGTCCTC
CGGTATCATGTGGTCCTGGAGGAGAAACTCCTGAAGAATGACCTGCACAATGGCATGCATCGTGAGAC
CATGCTGGGTTTCTCCTATTTCCTTAGCTTCTTTCTCCATAATGACCAGCTCTATGTAAATGAGGCTC
CAATAAACTACACCAATGTAGCCACTGATAAGGGAGTGATCCATGGCTTGGGAAAAGTTCTGGAAATT
CAGAAGAACAGATGTGATAATAATGCCACTACTATTATACGAGGAAGATGTAGGACATGCTCCTCAGA
GCTGACCTGCCCATTCGGAACTAAATCTCTAGGTAATGAGAAGAGGAGATGCATCTATACCTCCTATT
TCATGGGAAGACGAACCCTGTTTATTGGGTGCCAGCCAAAATGTGTGAGAACCGTCATTACGAGAGAA
TGCTGTGCCGGCTTCTTTGGCCCCCAATGCCAGCCCTGTCCAGGGAATGCCCAGAATGTCTGCTTTGG
TAATGGCATCTGTTTGGATGGAGTGAATGGCACAGGTGTGTGTGAGTGTGGGGAGGGCTTCAGCGGCA
CAGCCTGCGAGACCTGCACCGAGGGCAAGTACGGCATCCACTGTGACCAAGCATGTTCTTGTGTCCAT
GGGAGATGCAACCAAGGACCCTTGGGAGATGGCTCCTGTGACTGTGATGTTGGCTGGCGAGGAGTGCA
TTGTGACAATGCAACCACAGAAGACAACTGCAATGGGACATGCCATACCAGCGCCAACTGCCTCACCA
ACTCAGATGGTACAGCTTCATGCAAGTGTGCAGCAGGATTCCAAGGAAACGGGACCATCTGCACAGCA
ATCAATGCCTGTGAGATCAGCAATGGAGGTTGCTCTGCCAAGGCTGACTGTAAGAGAACCACCCCAGG
AAGGCGAGTGTGCACGTGCAAAGCAGGCTACACGGGTGATGGCATTGTGTGCCTGGAAATCAACCCGT
GTTTGGAGAACCATGGTGGCTGTGACAAGAATGCGGAGTGCACACAGACAGGACCCAACCAGGCTGCC
TGTAACTGTTTGCCAGCATACACTGGAGATGGAAAGGTCTGCACACTCATCAATGTCTGCTTAACTAA
AAATGGCGGCTGTAGTGAATTTGCCATCTGCAACCACACTGGGCAAGTAGAAAGGACTTGTACTTGCA
AGCCAAACTACATTGGAGATGGATTTACCTGCCGCGGCAGCATTTATCAGGAGCTTCCCAAGAACCCG
AAAACTTCCCAGTATTTCTTCCAGTTGCAGGAGCATTTCGTGAAAGATCTGGTCGGCCCAGGCCCCTT
CACTGTTTTTGCACCTTTATCTGCAGCCTTTGATGAGGAAGCTCGGGTTAAAGACTGGGACAAATACG
GTTTAATGCCCCAGGTTCTTCGGTACCATGTGGTCGCCTGCCACCAGCTGCTTCTGGAAAACCTGAAA
TTGATCTCAAATGCTACTTCCCTCCAAGGAGAGCCAATAGTCATCTCCGTCTCTCAGAGCACGGTGTA
TATAAATAATAAGGCTAAGATCATATCCAGTGATATCATCAGTACTAATGGGATTGTTCATATCATAG
ACAAATTGCTATCTCCCAAAAATTTGCTTATCACTCCCAAAGACAACTCTGGAAGAATTCTGCAAAAT
CTTACGACTTTGGCAACAAACAATGGCTACATCAAATTTAGCAACTTAATACAGGACTCAGGTTTGCT
GAGTGTCATCACCGATCCCATCCACACCCCAGTCACTCTCTTCTGGCCCACCGACCAAGCCCTCCATG
CCCTACCTGCTGAACAACAGGACTTCCTGTTCAACCAAGACAACAAGGACAAGCTGAAGGAGTATTTG
AAGTTTCATGTGATACGAGATGCCAAGGTTTTAGCTGTGGATCTTCCCACATCCACTGCCTGGAAGAC
CCTGCAAGGTTCAGAGCTGAGTGTGAAATGTGGAGCTGGCAGGGACATCGGTGACCTCTTTCTGAATG
GCCAAACCTGCAGAATTGTGCAGCGGGAGCTCTTGTTTGACCTGGGTGTGGCCTACGGCATTGACTGT
CTGCTGATTGATCCCACCCTGGGGGGCCGCTGTGACACCTTTACTACTTTCGATGCCTCGGGGGAGTG
TGGGAGCTGTGTCAATACTCCCAGCTGCCCAAGGTGGAGTAAACCAAAGGGTGTGAAGCAGAAGTGTC
TCTACAACCTGCCCTTCAAGAGGAACCTGGAAGGCTGCCGGGAGCGGTGCAGCCTGGTGATACAGATC
CCCAGGTGCTGCAAGGGCTACTTCGGGCGAGACTGTCAGGCCTGCCCTGGAGGACCAGATGCCCCGTG
TAATAACCGGGGTGTCTGCCTTGATCAGTACTCGGCCACCGGAGAGTGTAAATGCAACACCGGCTTCA
ATGGGACGGCGTGTGAGATGTGCTGGCCGGGGAGATTTGGGCCTGATTGTCTGCCCTGTGGCTGCTCA
GACCACGGACAGTGCGATGATGGCATCACGGGCTCCGGGCAGTGCCTCTGTGAAACGGGGTGGACAGG
CCCCTCGTGTGACACTCAGGCAGTTTTGCCTGCAGTGTGTACGCCTCCTTGTTCTGCTCATGCCACCT
GTAAGGAGAACAACACGTGTGAGTGTAACCTGGATTATGAAGGTGACGGAATCACATGCACAGTTGTG
GATTTCTGCAAACAGGACAACGGGGGCTGTGCAAAGGTGGCCAGATGCTCCCAGAAGGGCACGAAGGT
CTCCTGCAGCTGCCAGAAGGGATACAAAGGGGACGGGCACAGCTGCACAGAGATAGACCCCTGTGCAG
ACGGCCTTAACGGAGGGTGTCACGAGCACGCCACCTGTAAGATGACAGGCCCGGGCAAGCACAAGTGT
GAGTGTAAAAGTCACTATGTCGGAGATGGGCTGAACTGTGAGCCGGAGCAGCTGCCCATTGACCGCTG
CTTACAGGACAATGGGCAGTGCCATGCAGACGCCAAATGTGTCGACCTCCACTTCCAGGATACCACTG
TTGGGGTGTTCCATCTACGCTCCCCACTGGGCCAGTATAAGCTGACCTTTGACAAAGCCAGAGAGGCC
TGTGCCAACGAAGCTGCGACCATGGCAACCTACAACCAGCTCTCCTATGCCCAGAAGGCCAAGTACCA
CCTGTGCTCAGCAGGCTGGCTGGAGACCGGGCGGGTTGCCTACCCCACAGCCTTCGCCTCCCAGAACT
GTGGCTCTGGTGTGGTTGGGATAGTGGACTATGGACCTAGACCCAACAAGAGTGAAATGTGGGATGTC
TTCTGCTATCGGATGAAAGATGTGAACTGCACCTGCAAGGTGGGCTATGTGGGAGATGGCTTCTCATG
CAGTGGGAACCTGCTGCAGGTCCTGATGTCCTTCCCCTCACTCACAAACTTCCTGACGGAAGTGCTGG
CCTATTCCAACAGCTCAGCTCGAGGCCGTGCATTTCTAGAACACCTGACTGACCTGTCCATCCGCGGC
ACCCTCTTTGTGCCACAGAACAGTGGGCTGGGGGAGAATGAGACCTTGTCTGGGCGGGACATCGAGCA
CCACCTCGCCAATGTCAGCATGTTTTTCTACAATGACCTTGTCAATGGCACCACCCTGCAAACGAGGC
TGGGAAGCAAGCTGCTCATCACTGCCAGCCAGGACCCACTCCAACCGACGGAGACCAGGTTTGTTGAT
GGAAGAGCCATTCTGCAGTGGGACATCTTTGCCTCCAATGGGATCATTCATGTCATTTCCAGGCCTTT
AAAAGCACCCCCTGCCCCCGTGACCTTGACCCACACTGGCTTGGGAGCAGGGATCTTCTTTGCCATCA
TCCTGGTGACTGGGGCTGTTGCCTTGGCTGCTTACTCCTACTTTCGGATAAACCGGAGAACAATCGGC
TTCCAGCATTTTGAGTCGGAAGAGGACATTAATGTTGCAGCTCTTGGCAAGCAGCAGCCTGAGAATAT
CTCGAACCCCTTGTATGAGAGCACAACCTCAGCTCCCCCAGAACCTTCCTACGACCCCTTCACGGACT
CTGAAGAACGGCAGCTTGAGGGCAATGACCCCTTGAGGACACTGTGAGGGCCTG

| | | | |
|---|---|---|---|
| NOV9y, CG50736-24 | SEQ ID NO: 256 | 2551 aa | MW at 276991.0kD |
| Protein Sequence | | | |

MMLQHLVIFCLGLVVQNFCSPAETTGQARRCDRKSLLTIRTECRSCALNLGVKCPDGYTMITSGSVGV
RDCRYTFEVRTYSLSLPGCRHICRKDYLQPRCCPGRWGPDCIECPGGAGSPCNGRGSCAEGMEGNGTC
SCQEGFGGTACETCADDNLFGPSCSSVCNCVHGVCNSGLDGDGTCECYSAYTGPKCDKPIPECAALLC
PENSRCSPSTEDENKLECKCLPNYRGDGKYCDPINPCLRKICHPHAHCTYLGPNRHSCTCQEGYRGDG
QVCLPVDPCQINFGNCPTKSTVCKYDGPGQSHCECKEHYQNFVPGVGCSMTDICKSDNPCHRNANCTT
VAPGRTECICQKGYVGDGLTCYGNIMERLRELNTEPRGKWQGRLTSFISLLDKAYAWPLSKLGPFTVL
LPTDKGLKGFNVNELLVDNKAAQYFVKLHIIAGQMNIEYMNNTDMFYTLTGKSGEIFNSDKDNQIKLK
LHGGKKKVKIIQGDIIASNGLLHILDRAMDKLEHTFESNNEQTIMTMLQPRYSKFRSLLEETNLGHAL
DEDGVGGPYTIFVPNNEALNNMKDGTLDYLLSPEGSRKLLELVRYHIVPFTQLEVATLISTPHIRSMA
NQLIQFNTTDNGQILANDVAMEEIEITAKNGRIYTLTGVLIPPSIVPILPHRCDETKREMKLGTCVSC
SLVYWSRCPANSEPTALFTHRCVYSGRFGSLKSGCARYCNATVKIPKCCKGFYGPDCNQCPGGFSNPC
SGNGQCADSLGGNGTCICEEGFQGSQCQFCSDPNKYGPRCNKKCLCVHGTCNNRIDSDGACLTGTCRD
GSAGRLCDKQTSACGPYVQFCHIHATCEYSNGTASCICKAGYEGDGTLCSEMDPCTGLTPGGCSRNAE
CIKTGTGTHTCVCQQGWTGNGRDCSEINNCLLPSAGGCHDNASCLYVGPGQNECECKKGFRGNGIDCE
PITSCLEQTGKCHPLASCQSTSSGVWSCVCQEGYEGDGFLCYGNAAVELSFLSEAAIFNRWINNASLQ
PTLSATSNLTVLVPSQQATEDMDQDEKSFWLSQSNIPALIKYHMLLGTYRVADLQTLSSSDMLATSLQ
GNFLHLAKVDGNITIEGASIVDGDNAATNGVIHIINKVLVPQRRLTGSLPNLLMRLEQMPDYPIFRGY
IIQYNLANAIEAADAYTVFAPNNNAIENYIREKKVLSLEEDVLRYHVVLEEKLLKNDLHNGMHRETML
GFSYFLSFFLHNDQLYVNEAPINYTNVATDKGVIHGLGKVLEIQKNRCDNNATTIIRGRCRTCSSELT
CPFGTKSLGNEKRRCIYTSYFMGRRTLFIGCQPKCVRTVITRECCAGFFGPQCQPCPGNAQNVCFGNG
ICLDGVNGTGVCECGEGFSGTACETCTEGKYGIHCDQACSCVHGRCNQGPLGDGSCDCDVGWRGVHCD
NATTEDNCNGTCHTSANCLTNSDGTASCKCAAGFQGNGTICTAINACEISNGGCSAKADCKRTTPGRR
VCTCKAGYTGDGIVCLEINPCLENHGGCDKNAECTQTGPNQAACNCLPAYTGDGKVCTLINVCLTKNG
GCSEFAICNHTGQVERTCTCKPNYIGDGFTCRGSIYQELPKIJPKTSQYFFQLQEHFVDLVGPGPFTV
FAPLSAAFDEEARVKDWDKYGLMPQVLRYHVVACHQLLLENLKLISNATSLQGEPIVISVSQSTVYIN
NKAKIISSDIISTNGIVHIIDKLLSPKNLLITPKDNSGRILQNLTTLATNNGYIKFSNLIQDSGLLSV
ITDPIHTPVTLFWPTDQALHALPAEQQDFLFNQDNKDKLKEYLKFHVIRDAKVLAVDLPTSTAWKTLQ
GSELSVKCGAGRDIGDLFLNGQTCRIVQRELLFDLGVAYGIDCLLIDPTLGGRCDTFTTFDASGECGS
CVNTPSCPRWSKPKGVKQKCLYNLPFKRNLEGCRERCSLVIQIPRCCKGYFGRDCQACPGGPDAPCNN
RGVCLDQYSATGECKCNTGFNGTACEMCWPGRFGPDCLPCGCSDHGQCDDGITGSGQCLCETGWTGPS
CDTQAVLPAVCTPPCSAHATCKENNTCECNLDYEGDGITCTVVDFCKQDNGGCAKVARCSQKGTKVSC
SCQKGYKGDGHSCTEIDPCADGLNGGCHEHATCKMTGPGKHKCECKSHYVGDGLNCEPEQLPIDRCLQ
DNGQCHADAKCVDLHFQDTTVGVFHLRSPLGQYKLTFDKAREACANEAATMATYNQLSYAQKAXYHLC
SAGWLETGRVAYPTAFASQNCGSGVVGIVDYGPRPNKSEMWDVFCYRMKDVNCTCKVGYVGDGFSCSG
NLLQVLMSFPSLTNFLTEVLAYSNSSARGRAFLEHLTDLSIRGTLFVPQNSGLGENETLSGRDIEHHL
ANVSMFFYNDLVNGTTLQTRLGSKLLITASQDPLQPTETRFVDGRAILQWDIFASNGIIHVISRPLKA
PPAPVTLTRTGLGAGIFFAIILVTGAVALAAYSYFRINRRTIGFQHFESEEDINVAALGKQQPENISN
PLYESTTSAPPEPSYDPFTDSEERQLEGNDPLRTL

[0399] A ClustalW comparison of the above protein sequences yields the following sequence alignment shown in Table 9B.

TABLE 9B
Comparison of the NOV9 protein sequences.

| | |
|---|---|
| NOV9a | ------------------------------------------------------------ |
| NOV9b | ------------------------------------------------------------ |
| NOV9c | ------------------------------------------------------------ |
| NOV9d | ------------------------------------------------------------ |
| NOV9e | ------------------------------------------------------------ |
| NOV9f | ------------------------------------------------------------ |
| NOV9g | ------------------------------------------------------------ |
| NOV9h | ------------------------------------------------------------ |
| NOV9i | ------------------------------------------------------------ |
| NOV9j | ------------------------------------------------------------ |
| NOV9k | MERQETGNSKTRYHATAIVQAKHDKGLNKNGTSGDEEQKIKVGDRDRENKGFDGLLDVWN |
| NOV9l | ------------------------------------------------------------ |
| NOV9m | ------------------------------------------------------------ |
| NOV9n | ------------------------------------------------------------ |
| NOV9o | ------------------------------------------------------------ |
| NOV9p | ------------------------------------------------------------ |
| NOV9q | ------------------------------------------------------------ |
| NOV9r | ------------------------------------------------------------ |
| NOV9s | ------------------------------------------------------------ |
| NOV9t | ------------------------------------------------------------ |
| NOV9u | ------------------------------------------------------------ |
| NOV9v | ------------------------------------------------------------ |
| NOV9w | ------------------------------------------------------------ |
| NOV9x | ------------------------------------------------------------ |
| NOV9y | ------------------------------------------------------------ |
| NOV9a | ------------------------------------------------------------ |
| NOV9b | ------------------------------------------------------------ |
| NOV9c | ------------------------------------------------------------ |
| NOV9d | ------------------------------------------------------------ |
| NOV9e | ------------------------------------------------------------ |
| NOV9f | ------------------------------------------------------------ |
| NOV9g | ------------------------------------------------------------ |
| NOV9h | ------------------------------------------------------------ |
| NOV9i | ------------------------------------------------------------ |
| NOV9j | ------------------------------------------------------------ |
| NOV9k | TLNFIHPCFAVCNCVHGVCNSGLDGDGTCECYSAYTGPKCDKLTENFHTSHLTLWPVHDS |
| NOV9l | ------------------------------------------------------------ |
| NOV9m | ------------------------------------------------------------ |
| NOV9n | ------------------------------------------------------------ |
| NOV9o | ------------------------------------------------------------ |
| NOV9p | ------------------------------------------------------------ |
| NOV9q | ------------------------------------------------------------ |
| NOV9r | ------------------------------------------------------------ |
| NOV9s | ------------------------------------------------------------ |
| NOV9t | ------------------------------------------------------------ |
| NOV9u | ------------------------------------------------------------ |
| NOV9v | ------------------------------------------------------------ |
| NOV9w | ------------------------------------------------------------ |
| NOV9x | ------------------------------------------------------------ |
| NOV9y | ------------------------------------------------------------ |
| NOV9a | ------------------------------------------------------------ |
| NOV9b | ------------------------------------------------------------ |
| NOV9c | ------------------------------------------------------------ |
| NOV9d | ------------------------------------------------------------ |
| NOV9e | ------------------------------------------------------------ |
| NOV9f | ------------------------------------------------------------ |
| NOV9g | ------------------------------------------------------------ |
| NOV9h | ------------------------------------------------------------ |
| NOV9i | ------------------------------------------------------------ |
| NOV9j | ------------------------------------------------------------ |
| NOV9k | KHWGSLRHQNMNGTCSSGGGKGDPDVYQNGLIFHGGGTSGGLSSSRNRRSSVKRPEKWKG |
| NOV9l | ------------------------------------------------------------ |
| NOV9m | ------------------------------------------------------------ |
| NOV9n | ------------------------------------------------------------ |
| NOV9o | ------------------------------------------------------------ |
| NOV9p | ------------------------------------------------------------ |
| NOV9q | ------------------------------------------------------------ |
| NOV9r | ------------------------------------------------------------ |
| NOV9s | ------------------------------------------------------------ |
| NOV9t | ------------------------------------------------------------ |
| NOV9u | ------------------------------------------------------------ |
| NOV9v | ------------------------------------------------------------ |
| NOV9w | ------------------------------------------------------------ |
| NOV9x | ------------------------------------------------------------ |
| NOV9y | -----------------------------------------------MMLQHLVIFCLGL |
| NOV9a | ------------------------------------------------------------ |
| NOV9b | ------------------------------------------------------------ |
| NOV9c | ------------------------------------------------------------ |
| NOV9d | ------------------------------------------------------------ |
| NOV9e | ------------------------------------------------------------ |
| NOV9f | ------------------------------------------------------------ |
| NOV9g | ------------------------------------------------------------ |
| NOV9h | ------------------------------------------------------------ |
| NOV9i | ------------------------------------------------------------ |
| NOV9j | ------------------------------------------------------------ |
| NOV9k | DDRDGGGKEGQQRRRADTESSLQRGHIKTPLPHRQGEARITETTGNCVSAGMTGTNANHT |
| NOV9l | ------------------------------------------------------------ |
| NOV9m | ------------------------------------------------------------ |
| NOV9n | ------------------------------------------------------------ |
| NOV9o | ------------------------------------------------------------ |
| NOV9p | ------------------------------------------------------------ |
| NOV9q | ------------------------------------------------------------ |
| NOV9r | ------------------------------------------------------------ |
| NOV9s | ------------------------------------------------------------ |
| NOV9t | ------------------------------------------------------------ |
| NOV9u | ------------------------------------------------------------ |
| NOV9v | ------------------------------------------------------------ |
| NOV9w | ------------------------------------------------------------ |
| NOV9x | ------------------------------------------------------------ |
| NOV9y | VVQNFCSPAETTGQARRCDRKSLLTIRTECRSCALNLGVKCPDGYTMITSGSVGVRDCRY |
| NOV9a | ------------------------------------------------------------ |
| NOV9b | ------------------------------------------------------------ |
| NOV9c | ------------------------------------------------------------ |
| NOV9d | ------------------------------------------------------------ |
| NOV9e | ------------------------------------------------------------ |
| NOV9f | ------------------------------------------------------------ |
| NOV9g | ------------------------------------------------------------ |
| NOV9h | ------------------------------------------------------------ |
| NOV9i | ------------------------------------------------------------ |
| NOV9j | ------------------------------------------------------------ |
| NOV9k | KVHPTVQSLTEYDSFQTHSTSRLKEFEKQQVKERFSDPPLMQAIKPSHEKYPPYAQRKGT |
| NOV9l | ------------------------------------------------------------ |
| NOV9m | ------------------------------------------------------------ |
| NOV9n | ------------------------------------------------------------ |
| NOV9o | ------------------------------------------------------------ |
| NOV9p | ------------------------------------------------------------ |
| NOV9q | ------------------------------------------------------------ |
| NOV9r | ------------------------------------------------------------ |
| NOV9s | ------------------------------------------------------------ |
| NOV9t | ------------------------------------------------------------ |
| NOV9u | ------------------------------------------------------------ |
| NOV9v | ------------------------------------------------------------ |
| NOV9w | ------------------------------------------------------------ |
| NOV9x | ------------------------------------------------------------ |
| NOV9y | TFEVRTYSLSLPGCRRICRKDYLQPRCCPGRWGPDCIECPGGAGSPCNGRGSCAEGMEGN |
| NOV9a | ------------------------------------------------------------ |
| NOV9b | ------------------------------------------------------------ |
| NOV9c | ------------------------------------------------------------ |
| NOV9d | ------------------------------------------------------------ |
| NOV9e | ------------------------------------------------------------ |
| NOV9f | ------------------------------------------------------------ |
| NOV9g | ------------------------------------------------------------ |
| NOV9h | ------------------------------------------------------------ |
| NOV9i | ------------------------------------------------------------ |
| NOV9j | ------------------------------------------------------------ |
| NOV9k | SLSPKTQGHGDDEQALLSFLHSITLSLYLYPTTFFHDSPVFIKPGIKTLRLNHFFGSSFP |
| NOV9l | ------------------------------------------------------------ |
| NOV9m | ------------------------------------------------------------ |
| NOV9n | ------------------------------------------------------------ |
| NOV9o | ------------------------------------------------------------ |
| NOV9p | ------------------------------------------------------------ |
| NOV9q | ------------------------------------------------------------ |
| NOV9r | ------------------------------------------------------------ |
| NOV9s | ------------------------------------------------------------ |
| NOV9t | ------------------------------------------------------------ |
| NOV9u | ------------------------------------------------------------ |
| NOV9v | ------------------------------------------------------------ |
| NOV9w | ------------------------------------------------------------ |
| NOV9x | ------------------------------------------------------------ |
| NOV9y | GTCSCQEGFGGTACETCADDNLFGPSCSSVCNCVHGVCNSGLDGDGTCECYSAYTGPKCD |
| NOV9a | ------------------------------------------------------------ |
| NOV9b | ------------------------------------------------------------ |
| NOV9c | ------------------------------------------------------------ |
| NOV9d | ------------------------------------------------------------ |
| NOV9e | ------------------------------------------------------------ |
| NOV9f | ------------------------------------------------------------ |
| NOV9g | ------------------------------------------------------------ |
| NOV9h | ------------------------------------------------------------ |
| NOV9i | ------------------------------------------------------------ |
| NOV9j | ------------------------------------------------------------ |
| NOV9k | YEGSSVIXXMGIEVWKNWCQNADTLAAAPAPSLNVQPCSAQKIPDVRLPLKMKTNWNANA |
| NOV9l | ------------------------------------------------------------ |
| NOV9m | ------------------------------------------------------------ |
| NOV9n | ------------------------------------------------------------ |
| NOV9o | ------------------------------------------------------------ |
| NOV9p | ------------------------------------------------------------ |
| NOV9q | ------------------------------------------------------------ |
| NOV9r | ------------------------------------------------------------ |
| NOV9s | ------------------------------------------------------------ |
| NOV9t | ------------------------------------------------------------ |
| NOV9u | ------------------------------------------------------------ |
| NOV9v | ------------------------------------------------------------ |
| NOV9w | ------------------------------------------------------------ |
| NOV9x | ------------------------------------------------------------ |
| NOV9y | KPIPECAALLCPENSRCSPSTEDENKLECKCLPNYRGDGKYCDPINPCLRKTCHPHAHCT |
| NOV9a | ------------------------------------------------------------ |
| NOV9b | ------------------------------------------------------------ |
| NOV9c | ------------------------------------------------------------ |
| NOV9d | ------------------------------------------------------------ |
| NOV9e | ------------------------------------------------------------ |
| NOV9f | ------------------------------------------------------------ |
| NOV9g | ------------------------------------------------------------ |
| NOV9h | ------------------------------------------------------------ |
| NOV9i | ------------------------------------------------------------ |
| NOV9j | ------------------------------------------------------------ |
| NOV9k | FPITEAMANTATPSIHVYEKSATLMLIVRTWDQIGTVVHAKKATVGMAKCACLWTPAKLT |
| NOV9l | ------------------------------------------------------------ |
| NOV9m | ------------------------------------------------------------ |
| NOV9n | ------------------------------------------------------------ |
| NOV9o | ------------------------------------------------------------ |
| NOV9p | ------------------------------------------------------------ |
| NOV9q | ------------------------------------------------------------ |
| NOV9r | ------------------------------------------------------------ |
| NOV9s | ------------------------------------------------------------ |
| NOV9t | ------------------------------------------------------------ |
| NOV9u | ------------------------------------------------------------ |
| NOV9v | ------------------------------------------------------------ |
| NOV9w | ------------------------------------------------------------ |
| NOV9x | ------------------------------------------------------------ |
| NOV9y | YLGPNPBSCTCQEGYRGDGQVCLPVDPCQINFGNCPTKSTVCKYDGPGQSHCECKEHYQN |
| NOV9a | ------------------------------------------------------------ |
| NOV9b | ------------------------------------------------------------ |
| NOV9c | ------------------------------------------------------------ |
| NOV9d | ------------------------------------------------------------ |
| NOV9e | ------------------------------------------------------------ |
| NOV9f | ------------------------------------------------------------ |
| NOV9g | ------------------------------------------------------------ |
| NOV9h | ------------------------------------------------------------ |
| NOV9i | ------------------------------------------------------------ |
| NOV9j | ------------------------------------------------------------ |
| NOV9k | LETALQSLQCANMMGLDRCICQKGYVGDGLTCYGNIMERLRELNTEPRGKWQGRLTSFIS |
| NOV9l | ------------------------------------------------------------ |
| NOV9m | ------------------------------------------------------------ |
| NOV9n | ------------------------------------------------------------ |
| NOV9o | ------------------------------------------------------------ |
| NOV9p | ------------------------------------------------------------ |
| NOV9q | ------------------------------------------------------------ |
| NOV9r | ------------------------------------------------------------ |
| NOV9s | ------------------------------------------------------------ |
| NOV9t | ------------------------------------------------------------ |
| NOV9u | ------------------------------------------------------------ |
| NOV9v | ------------------------------------------------------------ |
| NOV9w | ------------------------------------------------------------ |
| NOV9x | ------------------------------------------------------------ |
| NOV9y | FVPGVGCSMTDICKSDNPCHRNANCTTVAPGRTECICQKGYVGDGLTCYGNIMERLRELN |
| NOV9a | ------------------------------------------------------------ |
| NOV9b | ------------------------------------------------------------ |
| NOV9c | ------------------------------------------------------------ |
| NOV9d | ------------------------------------------------------------ |
| NOV9e | ------------------------------------------------------------ |
| NOV9f | ------------------------------------------------------------ |
| NOV9g | ------------------------------------------------------------ |
| NOV9h | ------------------------------------------------------------ |
| NOV9i | ------------------------------------------------------------ |
| NOV9j | ------------------------------------------------------------ |
| NOV9k | LLESIQIVSVQLSEFSQREPTCVNTKSIASNLEGPLVPLSNHYPLQVNELLVDNKAAQYF |
| NOV9l | ------------------------------------------------------------ |
| NOV9m | ------------------------------------------------------------ |
| NOV9n | ------------------------------------------------------------ |
| NOV9o | ------------------------------------------------------------ |
| NOV9p | ------------------------------------------------------------ |
| NOV9q | ------------------------------------------------------------ |
| NOV9r | ------------------------------------------------------------ |
| NOV9s | ------------------------------------------------------------ |
| NOV9t | ------------------------------------------------------------ |
| NOV9u | ------------------------------------------------------------ |
| NOV9v | ------------------------------------------------------------ |
| NOV9w | ------------------------------------------------------------ |
| NOV9x | ------------------------------------------------------------ |
| NOV9y | TEPRGKWQGRLTSFISLLDKAYAWPLSKLGPFTVLLPTDKGLKGFNVNELLVDNKAAQYF |
| NOV9a | ------------------------------------------------------------ |
| NOV9b | ------------------------------------------------------------ |
| NOV9c | ------------------------------------------------------------ |
| NOV9d | ------------------------------------------------------------ |
| NOV9e | ------------------------------------------------------------ |
| NOV9f | ------------------------------------------------------------ |
| NOV9g | ------------------------------------------------------------ |
| NOV9h | ------------------------------------------------------------ |
| NOV9i | ------------------------------------------------------------ |
| NOV9j | ------------------------------------------------------------ |
| NOV9k | VKLHIIAGQMNIEYMNNTDMFYTLTGKSGEIFNSDKDNQIKLKLHGGKKKVKIIQGDIIA |
| NOV9l | ------------------------------------------------------------ |
| NOV9m | ------------------------------------------------------------ |
| NOV9n | ------------------------------------------------------------ |
| NOV9o | ------------------------------------------------------------ |
| NOV9p | ------------------------------------------------------------ |
| NOV9q | ------------------------------------------------------------ |
| NOV9r | ------------------------------------------------------------ |
| NOV9s | ------------------------------------------------------------ |
| NOV9t | ------------------------------------------------------------ |
| NOV9u | ------------------------------------------------------------ |
| NOV9v | ------------------------------------------------------------ |
| NOV9w | ------------------------------------------------------------ |
| NOV9x | ------------------------------------------------------------ |
| NOV9y | VKLHIIAGQMNIEYMNNTDMFYTLTGKSGEIFNSDKDNQIKLKLHGGKKKVKIIQGDIIA |
| NOV9a | ------------------------------------------------------------ |
| NOV9b | ------------------------------------------------------------ |
| NOV9c | ------------------------------------------------------------ |
| NOV9d | ------------------------------------------------------------ |
| NOV9e | ------------------------------------------------------------ |
| NOV9f | ------------------------------------------------------------ |
| NOV9g | ------------------------------------------------------------ |
| NOV9h | ------------------------------------------------------------ |
| NOV9i | ------------------------------------------------------------ |
| NOV9j | ------------------------------------------------------------ |
| NOV9k | SNGLLHILDRAMDKLEPTF-------------------ESNNEETNLGHALDEDGVGGPY |
| NOV9l | ------------------------------------------------------------ |
| NOV9m | ------------------------------------------------------------ |
| NOV9n | ------------------------------------------------------------ |
| NOV9o | ------------------------------------------------------------ |
| NOV9p | ------------------------------------------------------------ |
| NOV9q | ------------------------------------------------------------ |
| NOV9r | ------------------------------------------------------------ |
| NOV9s | ------------------------------------------------------------ |
| NOV9t | ------------------------------------------------------------ |
| NOV9u | ------------------------------------------------------------ |
| NOV9v | ------------------------------------------------------------ |
| NOV9w | ------------------------------------------------------------ |
| NOV9x | ------------------------------------------------------------ |
| NOV9y | SNGLLHILDRAMDKLEHTFESNNEQTIMTMLQPRYSKFRSLLEETNLGHALDEDGVGGPY |
| NOV9a | ------------------------------------------------------------ |
| NOV9b | ------------------------------------------------------------ |
| NOV9c | ------------------------------------------------------------ |
| NOV9d | ------------------------------------------------------------ |
| NOV9e | ------------------------------------------------------------ |
| NOV9f | ------------------------------------------------------------ |
| NOV9g | ------------------------------------------------------------ |
| NOV9h | ------------------------------------------------------------ |
| NOV9i | ------------------------------------------------------------ |
| NOV9j | ------------------------------------------------------------ |
| NOV9k | TIFVPNNEALNNMKDGTLDYLLSP------------------ELEVATLISTPHIRSMAN |
| NOV9l | ------------------------------------------------------------ |
| NOV9m | ------------------------------------------------------------ |
| NOV9n | ------------------------------------------------------------ |
| NOV9o | ------------------------------------------------------------ |
| NOV9p | ------------------------------------------------------------ |
| NOV9q | ------------------------------------------------------------ |
| NOV9r | ------------------------------------------------------------ |
| NOV9s | ------------------------------------------------------------ |
| NOV9t | ------------------------------------------------------------ |
| NOV9u | ------------------------------------------------------------ |
| NOV9v | ------------------------------------------------------------ |
| NOV9w | ------------------------------------------------------------ |
| NOV9x | ------------------------------------------------------------ |
| NOV9y | TIFVPNNEALNNMKDGTLDYLLSPEGSRKLLELVRYHIVPFTQLEVATLISTPHIRSMAN |
| NOV9a | ------------------------------------------------------------ |
| NOV9b | ------------------------------------------------------------ |
| NOV9c | ------------------------------------------------------------ |
| NOV9d | ------------------------------------------------------------ |
| NOV9e | ------------------------------------------------------------ |
| NOV9f | ------------------------------------------------------------ |
| NOV9g | ------------------------------------------------------------ |
| NOV9h | ------------------------------------------------------------ |
| NOV9i | ------------------------------------------------------------ |
| NOV9j | ------------------------------------------------------------ |
| NOV9k | QLIQFNTTDNGQILANDVAMEEIEITAKNGRIYTLTGVLIPPSIVPILPHRCDETKREMK |
| NOV9l | ------------------------------------------------------------ |
| NOV9m | ------------------------------------------------------------ |
| NOV9n | ------------------------------------------------------------ |
| NOV9o | ------------------------------------------------------------ |
| NOV9p | ------------------------------------------------------------ |
| NOV9q | ------------------------------------------------------------ |
| NOV9r | ------------------------------------------------------------ |
| NOV9s | ------------------------------------------------------------ |
| NOV9t | ------------------------------------------------------------ |
| NOV9u | ------------------------------------------------------------ |
| NOV9v | ------------------------------------------------------------ |
| NOV9w | ------------------------------------------------------------ |
| NOV9x | ------------------------------------------------------------ |
| NOV9y | QLIQFNTTDNGQILANDVAMEEIEITAKNGRIYTLTGVLIPPSIVPILPHRCDETKREMK |
| NOV9a | ------------------------------------------------------------ |
| NOV9b | ------------------------------------------------------------ |
| NOV9c | ------------------------------------------------------------ |
| NOV9d | ------------------------------------------------------------ |
| NOV9e | ------------------------------------------------------------ |
| NOV9f | ------------------------------------------------------------ |
| NOV9g | ------------------------------------------------------------ |
| NOV9h | ------------------------------------------------------------ |
| NOV9i | ------------------------------------------------------------ |
| NOV9j | ------------------------------------------------------------ |
| NOV9k | LGTCVSCSLVYWSRCPANSEPTALFTHRCVYSGRFGSLKSGCARYC-------------- |
| NOV9l | ------------------------------------------------------------ |
| NOV9m | ------------------------------------------------------------ |
| NOV9n | ------------------------------------------------------------ |
| NOV9o | ------------------------------------------------------------ |
| NOV9p | ------------------------------------------------------------ |
| NOV9q | ------------------------------------------------------------ |
| NOV9r | ------------------------------------------------------------ |
| NOV9s | ------------------------------------------------------------ |
| NOV9t | ------------------------------------------------------------ |
| NOV9u | ------------------------------------------------------------ |
| NOV9v | ------------------------------------------------------------ |
| NOV9w | ------------------------------------------------------------ |
| NOV9x | ------------------------------------------------------------ |
| NOV9y | LGTCVSCSLVYWSRCPANSEPTALFTHRCVYSGRFGSLKSGCARYCNATVKIPKCCKGFY |
| NOV9a | ------------------------------------------------------------ |
| NOV9b | ------------------------------------------------------------ |
| NOV9c | ------------------------------------------------------------ |
| NOV9d | ------------------------------------------------------------ |
| NOV9e | ------------------------------------------------------------ |
| NOV9f | ------------------------------------------------------------ |
| NOV9g | ------------------------------------------------------------ |
| NOV9h | ------------------------------------------------------------ |
| NOV9i | ------------------------------------------------------------ |
| NOV9j | ------------------------------------------------------------ |
| NOV9k | ---------------NATVKCADSLGGNGTCICEEGFQGSQCQFCSDPNKYGPRCNKKCL |
| NOV9l | ------------------------------------------------------------ |
| NOV9m | ------------------------------------------------------------ |
| NOV9n | ------------------------------------------------------------ |
| NOV9o | ------------------------------------------------------------ |
| NOV9p | ------------------------------------------------------------ |
| NOV9q | ------------------------------------------------------------ |
| NOV9r | ------------------------------------------------------------ |
| NOV9s | ------------------------------------------------------------ |
| NOV9t | ------------------------------------------------------------ |
| NOV9u | ------------------------------------------------------------ |
| NOV9v | ------------------------------------------------------------ |
| NOV9w | ------------------------------------------------------------ |
| NOV9x | ------------------------------------------------------------ |
| NOV9y | GPDCNQCPGGFSNPCSGNGQCADSLGGNGTCICEEGFQGSQCQFCSDPNKYGPRCNKKCL |
| NOV9a | ------------------------------------------------------------ |
| NOV9b | ------------------------------------------------------------ |
| NOV9c | ------------------------------------------------------------ |
| NOV9d | ------------------------------------------------------------ |
| NOV9e | ------------------------------------------------------------ |
| NOV9f | ------------------------------------------------------------ |
| NOV9g | ------------------------------------------------------------ |
| NOV9h | ------------------------------------------------------------ |
| NOV9i | ------------------------------------------------------------ |
| NOV9j | ------------------------------------------------------------ |
| NOV9k | CVHGTCNNRIDSDGACLTGTCRDGSAGRLCDKQTSACGPYVQFCHIHATCEYSNGTASCI |
| NOV9l | ------------------------------------------------------------ |
| NOV9m | ------------------------------------------------------------ |
| NOV9n | ------------------------------------------------------------ |
| NOV9o | ------------------------------------------------------------ |
| NOV9p | ------------------------------------------------------------ |
| NOV9q | ------------------------------------------------------------ |
| NOV9r | ------------------------------------------------------------ |
| NOV9s | ------------------------------------------------------------ |
| NOV9t | ------------------------------------------------------------ |
| NOV9u | ------------------------------------------------------------ |
| NOV9v | ------------------------------------------------------------ |
| NOV9w | ------------------------------------------------------------ |
| NOV9x | ------------------------------------------------------------ |
| NOV9y | CVHGTCNNRIDSDGACLTGTCRDGSAGRLCDKQTSACGPYVQFCHIHATCEYSNGTASCI |
| NOV9a | ------------------------------------------------------------ |
| NOV9b | ------------------------------------------------------------ |
| NOV9c | ------------------------------------------------------------ |
| NOV9d | ------------------------------------------------------------ |
| NOV9e | ------------------------------------------------------------ |
| NOV9f | ------------------------------------------------------------ |
| NOV9g | ------------------------------------------------------------ |
| NOV9h | ------------------------------------------------------------ |
| NOV9i | ------------------------------------------------------------ |
| NOV9j | ------------------------------------------------------------ |
| NOV9k | CKAGYEGDGTLCSEMDPCTGLTPGGCSRNAECIKTGTGTHTCVCQQGWTGNGRDCSEINN |
| NOV9l | ------------------------------------------------------------ |
| NOV9m | ------------------------------------------------------------ |
| NOV9n | ------------------------------------------------------------ |
| NOV9o | ------------------------------------------------------------ |
| NOV9p | ------------------------------------------------------------ |
| NOV9q | ------------------------------------------------------------ |
| NOV9r | ------------------------------------------------------------ |
| NOV9s | ------------------------------------------------------------ |
| NOV9t | ------------------------------------------------------------ |
| NOV9u | ------------------------------------------------------------ |
| NOV9v | ------------------------------------------------------------ |
| NOV9w | ------------------------------------------------------------ |
| NOV9x | ------------------------------------------------------------ |
| NOV9y | CKAGYEGDGTLCSEMDPCTGLTPGGCSRNAECIKTGTGTHTCVCQQGWTGNGRDCSEINN |
| NOV9a | ------------------------------------------------------------ |
| NOV9b | ------------------------------------------------------------ |
| NOV9c | ------------------------------------------------------------ |
| NOV9d | ------------------------------------------------------------ |
| NOV9e | ------------------------------------------------------------ |
| NOV9f | ------------------------------------------------------------ |
| NOV9g | ------------------------------------------------------------ |
| NOV9h | ------------------------------------------------------------ |
| NOV9i | ------------------------------------------------------------ |
| NOV9j | ------------------------------------------------------------ |
| NOV9k | CLLPSAGGCHDNASCLYVGPGQNECECKKGFRGNGIDCEPITSCLEQTGKCHPLASCQST |
| NOV9l | ------------------------------------------------------------ |
| NOV9m | ------------------------------------------------------------ |
| NOV9n | ------------------------------------------------------------ |
| NOV9o | ------------------------------------------------------------ |
| NOV9p | ------------------------------------------------------------ |
| NOV9q | ------------------------------------------------------------ |
| NOV9r | ------------------------------------------------------------ |
| NOV9s | ------------------------------------------------------------ |
| NOV9t | ------------------------------------------------------------ |
| NOV9u | ------------------------------------------------------------ |
| NOV9v | ------------------------------------------------------------ |
| NOV9w | ------------------------------------------------------------ |
| NOV9x | ------------------------------------------------------------ |
| NOV9y | CLLPSAGGCHDNASCLYVGPGQNECECKKGFRGNGIDCEPITSCLEQTGKCHPLASCQST |
| NOV9a | ------------------------------------------------------------ |
| NOV9b | ------------------------------------------------------------ |
| NOV9c | ------------------------------------------------------------ |
| NOV9d | ------------------------------------------------------------ |
| NOV9e | ------------------------------------------------------------ |
| NOV9f | ------------------------------------------------------------ |
| NOV9g | ------------------------------------------------------------ |
| NOV9h | ------------------------------------------------------------ |
| NOV9i | ------------------------------------------------------------ |
| NOV9j | ------------------------------------------------------------ |
| NOV9k | SSGVWSCVCQEGYEGDGFLCYGNAAVELSFLSEAAIFNRWINNASLQPTLSATSNLTVLV |
| NOV9l | ------------------------------------------------------------ |
| NOV9m | ------------------------------------------------------------ |
| NOV9n | ------------------------------------------------------------ |
| NOV9o | ------------------------------------------------------------ |
| NOV9p | ------------------------------------------------------------ |
| NOV9q | ------------------------------------------------------------ |
| NOV9r | ------------------------------------------------------------ |
| NOV9s | ------------------------------------------------------------ |
| NOV9t | ------------------------------------------------------------ |
| NOV9u | ------------------------------------------------------------ |
| NOV9v | ------------------------------------------------------------ |
| NOV9w | ------------------------------------------------------------ |
| NOV9x | ------------------------------------------------------------ |
| NOV9y | SSGVWSCVCQEGYEGDGFLCYGNAAVELSFLSEAAIFNRWINNASLQPTLSATSNLTVLV |
| NOV9a | ------------------------------------------------------------ |
| NOV9b | ------------------------------------------------------------ |
| NOV9c | ------------------------------------------------------------ |
| NOV9d | ------------------------------------------------------------ |
| NOV9e | ------------------------------------------------------------ |
| NOV9f | ------------------------------------------------------------ |
| NOV9g | ------------------------------------------------------------ |
| NOV9h | ------------------------------------------------------------ |
| NOV9i | ------------------------------------------------------------ |
| NOV9j | ------------------------------------------------------------ |
| NOV9k | PSQQATEDMDQDEKSFWLSQSNIPALIKYHMLLGTYRVADLQTLSSSDMLATSLQGNFLH |
| NOV9l | ------------------------------------------------------------ |
| NOV9m | ------------------------------------------------------------ |
| NOV9n | ------------------------------------------------------------ |
| NOV9o | ------------------------------------------------------------ |
| NOV9p | ------------------------------------------------------------ |
| NOV9q | ------------------------------------------------------------ |
| NOV9r | ------------------------------------------------------------ |
| NOV9s | ------------------------------------------------------------ |
| NOV9t | ------------------------------------------------------------ |
| NOV9u | ------------------------------------------------------------ |
| NOV9v | ------------------------------------------------------------ |
| NOV9w | --------MDQDEKSFWLSQSNIPALIKYHNLLGTYRVADLQTLSSSDMLATSLQGNFLH |
| NOV9x | --------MDQDEKSFWLSQSNIPALIKYHMLLGTYRVADLQTLSSSDMLATSLQGNFLH |
| NOV9y | PSQQATEDMDQDEKSFWLSQSNIPALIKYHMLLGTYRVADLQTLSSSDMLATSLQGNFLH |
| NOV9a | ------------------------------------------------------------ |
| NOV9b | ------------------------------------------------------------ |
| NOV9c | ------------------------------------------------------------ |
| NOV9d | ------------------------------------------------------------ |
| NOV9e | ------------------------------------------------------------ |
| NOV9f | ------------------------------------------------------------ |
| NOV9g | ------------------------------------------------------------ |
| NOV9h | ------------------------------------------------------------ |
| NOV9i | ------------------------------------------------------------ |
| NOV9j | ------------------------------------------------------------ |
| NOV9k | LAKVDGNITIEGASIVDGDNAATNGVIHIINKVLVPQRRLTGSLPNLLMRLEQMPDYSIF |
| NOV9l | ------------------------------------------------------------ |
| NOV9m | ------------------------------------------------------------ |
| NOV9n | ------------------------------------------------------------ |
| NOV9o | ------------------------------------------------------------ |
| NOV9p | ------------------------------------------------------------ |
| NOV9q | ------------------------------------------------------------ |
| NOV9r | ------------------------------------------------------------ |
| NOV9s | ------------------------------------------------------------ |
| NOV9t | ------------------------------------------------------------ |
| NOV9u | ------------------------------------------------------------ |
| NOV9v | ------------------------------------------------------------ |
| NOV9w | LAKVDGNITIEGASIVDGDNAATNGVIHIINKVLVPQRRLTGSLPNLLMRLEQMPDYSIF |
| NOV9x | LAKVDGNITIEGASIVDGDNAATNGVIHIINKVLVPQRRLTGSLPNLLMRLEQMPDYSIF |
| NOV9y | LAKVDGNITIEGASIVDGDNAATNGVIHIINKVLVPQRRLTGSLPNLLMRLEQMPDYPIF |
| NOV9a | ------------------------------------------------------------ |
| NOV9b | ------------------------------------------------------------ |
| NOV9c | ------------------------------------------------------------ |
| NOV9d | ------------------------------------------------------------ |
| NOV9e | ------------------------------------------------------------ |
| NOV9f | ------------------------------------------------------------ |
| NOV9g | ------------------------------------------------------------ |
| NOV9h | ------------------------------------------------------------ |
| NOV9i | ------------------------------------------------------------ |
| NOV9j | ------------------------------------------------------------ |
| NOV9k | RGYIIQYNLANAIEAADAYTVFAPNNNAIENYIREKKVLSLEEDVLRYHVVLEEKLLKND |
| NOV9l | ------------------------------------------------------------ |
| NOV9m | ------------------------------------------------------------ |
| NOV9n | ------------------------------------------------------------ |
| NOV9o | ------------------------------------------------------------ |
| NOV9p | ------------------------------------------------------------ |
| NOV9q | ------------------------------------------------------------ |
| NOV9r | ------------------------------------------------------------ |
| NOV9s | ------------------------------------------------------------ |
| NOV9t | ------------------------------------------------------------ |
| NOV9u | ------------------------------------------------------------ |
| NOV9v | ------------------------------------------------------------ |
| NOV9w | RGYIIQYNLANAIEAADAYTVFAPNNNAIENYIREKKVLSLEEDVLRYHVVLEEKLLKND |
| NOV9x | RGYIIQYNLANAIEAADAYTVFAPNNNAIENYIREKKVLSLEEDVLRYHVVLEEKLLKND |
| NOV9y | RGYIIQYNLANAIEAADAYTVFAPNNNAIENYIREKKVLSLEEDVLRYHVVLEEKLLKND |
| NOV9a | ------------------------------------------------------------ |
| NOV9b | ------------------------------------------------------------ |
| NOV9c | ------------------------------------------------------------ |
| NOV9d | ------------------------------------------------------------ |
| NOV9e | ------------------------------------------------------------ |
| NOV9f | ------------------------------------------------------------ |
| NOV9g | ------------------------------------------------------------ |
| NOV9h | ------------------------------------------------------------ |
| NOV9i | ------------------------------------------------------------ |
| NOV9j | ------------------------------------------------------------ |
| NOV9k | LHNGMHRETMLGFSYFLSFFLHNDQLYVNEAPINYTNVATDKGVIHGLGKVLEIQKNRCD |
| NOV9l | ------------------------------------------------------------ |
| NOV9m | ------------------------------------------------------------ |
| NOV9n | ------------------------------------------------------------ |
| NOV9o | ------------------------------------------------------------ |
| NOV9p | ------------------------------------------------------------ |
| NOV9q | ------------------------------------------------------------ |
| NOV9r | ------------------------------------------------------------ |
| NOV9s | ------------------------------------------------------------ |
| NOV9t | ------------------------------------------------------------ |
| NOV9u | ------------------------------------------------------------ |
| NOV9v | ------------------------------------------------------------ |
| NOV9w | LHNGMHRETMLGFSYFLSFFLHNDQLYVNEAPINYTNVATDKGVIHGLGKVLEIQKNRCD |
| NOV9x | LHNGMHRETMLGFSYFLSFFLHNDQLYVNEAPINYTNVATDKGVIHGLGKVLEIQKNRCD |
| NOV9y | LHNGMHRETMLGFSYFLSFFLHNDQLYVNEAPINYTNVATDKGVIHGLGKVLEIQKNRCD |
| NOV9a | ------------------------------------------------------------ |
| NOV9b | ------------------------------------------------------------ |
| NOV9c | ------------------------------------------------------------ |
| NOV9d | ------------------------------------------------------------ |
| NOV9e | ------------------------------------------------------------ |
| NOV9f | ------------------------------------------------------------ |
| NOV9g | ------------------------------------------------------------ |
| NOV9h | ------------------------------------------------------------ |
| NOV9i | ------------------------------------------------------------ |
| NOV9j | ------------------------------------------------------------ |
| NOV9k | NNDTTIIRGRCRTCSSELTCPFGTKSLGNEKRRCIYTSYFMGRRTLFIGCQPKCVRTVIT |
| NOV9l | ------------------------------------------------------------ |
| NOV9m | ------------------------------------------------------------ |
| NOV9n | ------------------------------------------------------------ |
| NOV9o | ------------------------------------------------------------ |
| NOV9p | ------------------------------------------------------------ |
| NOV9q | ------------------------------------------------------------ |
| NOV9r | ------------------------------------------------------------ |
| NOV9s | ------------------------------------------------------------ |
| NOV9t | ------------------------------------------------------------ |
| NOV9u | ------------------------------------------------------------ |
| NOV9v | ------------------------------------------------------------ |
| NOV9w | NNDTTIIRGRCRTCSSELTCPFGTKSLGNEKRRCIYTSYFMGRRTLFIGCQPKCVRTVIT |
| NOV9x | NNDTTIIRGRCRTCSSELTCPFGTKSLGNEKRRCIYTSYFMGRRTLFIGCQPKCVRTVIT |
| NOV9y | NNATTIIRGRCRTCSSELTCPFGTKSLGNEKRRCIYTSYFMGRRTLFIGCQPKCVRTVIT |
| NOV9a | ------------------------------------------------------------ |
| NOV9b | ------------------------------------------------------------ |
| NOV9c | ------------------------------------------------------------ |
| NOV9d | ------------------------------------------------------------ |
| NOV9e | ------------------------------------------------------------ |
| NOV9f | ------------------------------------------------------------ |
| NOV9g | ------------------------------------------------------------ |
| NOV9h | ------------------------------------------------------------ |
| NOV9i | ------------------------------------------------------------ |
| NOV9j | ------------------------------------------------------------ |
| NOV9k | RECCAGFFGPQCQPCPGNAQNVCFGNGICLDGVNGTGVCECGEGFSGTACETCTEGKYGI |
| NOV9l | ------------------------------------------------------------ |
| NOV9m | ------------------------------------------------------------ |
| NOV9n | ------------------------------------------------------------ |
| NOV9o | ------------------------------------------------------------ |
| NOV9p | ------------------------------------------------------------ |
| NOV9q | ------------------------------------------------------------ |
| NOV9r | ------------------------------------------------------------ |
| NOV9s | ------------------------------------------------------------ |
| NOV9t | ------------------------------------------------------------ |
| NOV9u | ------------------------------------------------------------ |
| NOV9v | ------------------------------------------------------------ |
| NOV9w | RECCAGFFGPQCQPCPGNAQNVCFGNGICLDGVNGTGVCECGEGFSGTACETCTEGKYGI |
| NOV9x | RECCAGFFGPQCQPCPGNAQNVCFGNGICLDGVNGTGVCECGEGFSGTACETCTEGKYGI |
| NOV9y | RECCAGFFGPQCQPCPGNAQNVCFGNGICLDGVNGTGVCECGEGFSGTACETCTEGKYGI |
| NOV9a | ------------------------------------------------------------ |
| NOV9b | ------------------------------------------------------------ |
| NOV9c | ------------------------------------------------------------ |
| NOV9d | ------------------------------------------------------------ |
| NOV9e | ------------------------------------------------------------ |
| NOV9f | ------------------------------------------------------------ |
| NOV9g | ------------------------------------------------------------ |
| NOV9h | ------------------------------------------------------------ |
| NOV9i | ------------------------------------------------------------ |
| NOV9j | ------------------------------------------------------------ |
| NOV9k | HCDQACSCVHGRCNQGPLGDGSCDCDVGWRGVHCDNATTEDNCNGTCHTSANCLTNSDGT |
| NOV9l | ------------------------------------------------------------ |
| NOV9m | ------------------------------------------------------------ |
| NOV9n | ------------------------------------------------------------ |
| NOV9o | ------------------------------------------------------------ |
| NOV9p | ------------------------------------------------------------ |
| NOV9q | ------------------------------------------------------------ |
| NOV9r | ------------------------------------------------------------ |
| NOV9s | ------------------------------------------------------------ |
| NOV9t | ------------------------------------------------------------ |
| NOV9u | ------------------------------------------------------------ |
| NOV9v | ------------------------------------------------------------ |
| NOV9w | HCDQACSCVHGRCNQGPLGDGSCDCDVGWRGVHCDNATTEDNCNGTCHTSANCLTNSDGT |
| NOV9x | HCDQACSCVHGRCNQGPLGDGSCDCDVGWRGVHCDNATTEDNCNGTCHTSANCLTNSDGT |
| NOV9y | HCDQACSCVHGRCNQGPLGDGSCDCDVGWRGVHCDNATTEDNCNGTCHTSANCLTNSDGT |
| NOV9a | ------------------------------------------------------------ |
| NOV9b | ------------------------------------------------------------ |
| NOV9c | ------------------------------------------------------------ |
| NOV9d | ------------------------------------------------------------ |
| NOV9e | ------------------------------------------------------------ |
| NOV9f | ------------------------------------------------------------ |
| NOV9g | ------------------------------------------------------------ |
| NOV9h | ------------------------------------------------------------ |
| NOV9i | ------------------------------------------------------------ |
| NOV9j | ------------------------------------------------------------ |
| NOV9k | ASCKCAAGFQGNGTICTAINACEISNGGCSAXADCKRTTPGRRVCTCKAGYTGDGIVCLE |
| NOV9l | ------------------------------------------------------------ |
| NOV9m | ------------------------------------------------------------ |
| NOV9n | ------------------------------------------------------------ |
| NOV9o | ------------------------------------------------------------ |
| NOV9p | ------------------------------------------------------------ |
| NOV9q | ------------------------------------------------------------ |
| NOV9r | ------------------------------------------------------------ |
| NOV9s | ------------------------------------------------------------ |
| NOV9t | ------------------------------------------------------------ |
| NOV9u | ------------------------------------------------------------ |
| NOV9v | ------------------------------------------------------------ |
| NOV9w | ASCKCAAGFQGNGTICTAINACEISNGGCSAXADCKRTTPGRRVCTCKAGYTGDGIVCLE |
| NOV9x | ASCKCAAGFQGNGTICTAINACEISNGGCSAKADCKRTTPGRRVCTCKAGYTGDGIVCLE |
| NOV9y | ASCKCAAGFQGNGTICTAINACEISNGGCSAKADCKRTTPGRRVCTCKAGYTGDGIVCLE |
| NOV9a | ------------------------------------------------------------ |
| NOV9b | ------------------------------------------------------------ |
| NOV9c | ------------------------------------------------------------ |
| NOV9d | ------------------------------------------------------------ |
| NOV9e | ------------------------------------------------------------ |
| NOV9f | ------------------------------------------------------------ |
| NOV9g | ------------------------------------------------------------ |
| NOV9h | ------------------------------------------------------------ |
| NOV9i | ------------------------------------------------------------ |
| NOV9j | ------------------------------------------------------------ |
| NOV9k | INPCLENHGGCDKNAECTQTGPNQAACNCLPAYTGDGKVCTLINVCLTKNGGCSEFAICN |
| NOV9l | ------------------------------------------------------------ |
| NOV9m | ------------------------------------------------------------ |
| NOV9n | ------------------------------------------------------------ |
| NOV9o | ------------------------------------------------------------ |
| NOV9p | ------------------------------------------------------------ |
| NOV9q | ------------------------------------------------------------ |
| NOV9r | ------------------------------------------------------------ |
| NOV9s | ------------------------------------------------------------ |
| NOV9t | ------------------------------------------------------------ |
| NOV9u | ------------------------------------------------------------ |
| NOV9v | ------------------------------------------------------------ |
| NOV9w | INPCLENHGGCDKNAECTQTGPNQAACNCLPAYTGDGKVCTLINVCLTKNGGCGEFAICN |
| NOV9x | INPCLENHGGCDKNAECTQTGPNQAACNCLPAYTGDGKVCTLINVCLTKNGGCGEFAICN |
| NOV9y | INPCLENHGGCDKNAECTQTGPNQAACNCLPAYTGDGKVCTLINVCLTKNGGCSEFAICN |
| NOV9a | ------------------------------------------------------------ |
| NOV9b | ------------------------------------------------------------ |
| NOV9c | ------------------------------------------------------------ |
| NOV9d | ------------------------------------------------------------ |
| NOV9e | ----MEARKELESLPPFCLNSLHSIILTTKLTSQSLGGPRGVEERNEDREAKWHIAAKDS |
| NOV9f | ----MEARKELESLPPFCLNSLHSIILTTKLTSQSLGGPRGVEERMEDRRAKWHIAAKDS |
| NOV9g | ------------------------------------------------------------ |
| NOV9h | ----MEARKELESLPPFCLNSLHSIILTTKLTSQSLGGPRGVEERNEDREAKWHIAAKDS |
| NOV9i | ----MEARKELESLPPFCLNSLHSIILTTKLTSQSLGGPRGVEERMEDRPAKWHIAAKDS |
| NOV9j | ------------------------------------------------------------ |
| NOV9k | HTGQVERTCTCKPNYIGDGFTCRGSIYQELPKNPKTSQYFFQLQEHFVKDLVGPGPFTVF |
| NOV9l | ------------------------------------------------------------ |
| NOV9m | ------------------------------------------------------------ |
| NOV9n | ------------------------------------------------------------ |
| NOV9o | ------------------------------------------------------------ |
| NOV9p | ------------------------------------------------------------ |
| NOV9g | ------------------------------------------------------------ |
| NOV9r | ------------------------------------------------------------ |
| NOV9s | ------------------------------------------------------------ |
| NOV9t | ------------------------------------------------------------ |
| NOV9u | ------------------------------------------------------------ |
| NOV9v | ------------------------------------------------------------ |
| NOV9w | HTGQVERTCTCKPNYIGDGFTCRGSIYQELPKNPKTSQYFFQLQEHFVKDLVGPGPFTVF |
| NOV9x | HTGQVERTCTCKPNYIGDGFTCRGSIYQELPKNPKTSQYFFQLQEHFVKDLVGPGPFTVF |
| NOV9y | HTGQVERTCTCKPNYIGDGFTCRGSIYQELFKNPKTSQYFFQLQEHFVKDLVGPGPFTVF |
| NOV9a | ---------------------MPQVLRYHVVACHQLLLENLKLISNATSLQGEPIVISVS |
| NOV9b | ------------------------------------------------------------ |
| NOV9c | ------------------------------------------------------------ |
| NOV9d | ------------------------------------------------------------ |
| NOV9e | CLWLKPSDLLLQVKDWDKYGLMPQVLRYHVVACHQLLLENLKLISNATSLQGEPIVISVS |
| NOV9f | CLWLKPSDLLLQVKDWDKYGLMPQVLRYHVVACHQLLLENLKLISNATSLQGEPIVISVS |
| NOV9g | ------------------------------------------------------------ |
| NOV9h | CLWLKPSDLLLQVKDWDKYGLMPQVLRYHVVACHQLLLENLKLISNATSLQGEPIVISVS |
| NOV9i | CLWLKPSDLLLQVKDWDKYGLMPQVLRYHVVACHQLLLENLKLISNATSLQGEPIVISVS |
| NOV9j | ------------------------VLRYHVVACHQLLLENLKLISNATSLQGEPIVISVS |
| NOV9k | APLSAAFDEEARVKDWDKYGLMPQVLRYHVVACHQLLLENLKLISNATSLQGEPIVISVS |
| NOV9l | ------------------------------------------------------------ |
| NOV9m | ------------------------------------------------------------ |
| NOV9n | ------------------------------------------------------------ |
| NOV9o | ------------------------------------------------------------ |
| NOV9p | ------------------------------------------------------------ |
| NOV9q | ------------------------------------------------------------ |
| NOV9r | ------------------------------------------------------------ |
| NOV9s | ------------------------------------------------------------ |
| NOV9t | ------------------------------------------------------------ |
| NOV9u | ------------------------------------------------------------ |
| NOV9v | ------------------------------------------------------------ |
| NOV9w | APLSAAFDEEARVKDWDKYGLMPQVLRYHVVACHQLLLENLKLISNATSLQGEPIVISVS |
| NOV9x | APLSAAFDEEARVKDWDKYGLMPQVLRYHVVACHQLLLENLKLISNATSLQGEPIVISVS |
| NOV9y | APLSAAFDEEARVKDWDKYGLMPQVLRYHVVACHQLLLENLKLISNATSLQGEPIVISVS |
| NOV9a | QSTVYINNKAKIISSDIISTNGIVHIIDKLLSPKNLLITPKDNSGRILQNLTTLATNNGY |
| NOV9b | -------------------------------------------GSRILQNLTTLATNNGY |
| NOV9c | ------------------------------------------------------------ |
| NOV9d | ------------------------------------------------------------ |
| NOV9e | QSTVYINNKAKIISSDIISTNGIVHIIDKLLSPKNLLITPKDNSGRILQNLTTLATNNGY |
| NOV9f | QSTVYINNKAKIISSDIISTNGIVHIIDKLLSPKNLLITPKDNSGRILQNLTTLATNNGY |
| NOV9g | ------------------------------------------------------------ |
| NOV9h | QSTVYINNKAKIISSDIISTNGIVHIIDKLLSPKNLLITPKDNSGRILQNLTTLATNNGY |
| NOV9i | QSTVYINNKAKIISSDIISTNGIVHIIDKLLSPKNLLITPKDNSGRILQNLTTLATNNGY |
| NOV9j | QSTVYINNKAKIISSDIISTNGIVHIIDKLLSPKNLLITPKDNSGRILQNLTTLATNNGY |
| NOV9k | QSTVYINNKAKIISSDIISTNGIVHIIDKLLSPKNLLITPKDNSGRILQNLTTLATNNGY |
| NOV9l | ---------------------------------------------RILQNLTTLATNNGY |
| NOV9m | ---------------------------------------------RILQNLTTLATNNGY |
| NOV9n | ---------------------------------------------RILQNLTTLATNNGY |
| NOV9o | ---------------------------------------------RILQNLTTLATNNGY |
| NOV9p | ---------------------------------------------RILQNLTTLATNNGY |
| NOV9q | ---------------------------------------------RILQNLTTLATNNGY |
| NOV9r | ---------------------------------------------RILQNLTTLATNNGY |
| NOV9s | ---------------------------------------------RILQNLTTLATNNGY |
| NOV9t | ---------------------------------------------RILQNLTTLATNNGY |
| NOV9u | ---------------------------------------------RILQNLTTLATNNGY |
| NOV9v | ---------------------------------------------RILQNLTTLATNNGY |
| NOV9w | QSTVYINNKAKIISSDIISTNGIVHIIDKLLSPKNLLITPKDNSGRILQNLTTLATNNGY |
| NOV9x | QSTVYINNKAKIISSDIISTNGIVHIIDKLLSPKNLLITPKDNSGRILQNLTTLATNNGY |
| NOV9y | QSTVYINNKAKIISSDIISTNGIVHIIDKLLSPKNLLITPKDNSGRILQNLTTLATNNGY |
| NOV9a | IKFSNLIQDSGLLSVITDPIHTPVTLFWPTDQALHALPAE---QQDFLFNQDNKDKLKEY |
| NOV9b | IKFSNLIQDSGLLSVITDPIHTPVTLFWPTDQALHALPAE---QQDFLFNQDNKDKLKEY |
| NOV9c | ------------------------------------------------------------ |
| NOV9d | ------------------------------------------------------------ |
| NOV9e | IKFSNLIQDSGLLSVITDPIHTPVTLFWPTDQALHALPAE---QQDFLFNQDNKDKLKEY |
| NOV9f | IKFSNLIQDSGLLSVITDPIHTPVTLFWPTDQALHALPAE---QQDFLFNQDNKDKLKEY |
| NOV9g | ------------------------------------------------------------ |
| NOV9h | IKFSNLIQDSGLLSVITDPIHTPVTLFWPTDQALHALPAE---QQDFLFNQDNKDKLKEY |
| NOV9i | IKFSNLIQDSGLLSVITDPIHTPVTLFWPTDQALHALPAE---QQDFLFNQDNKDKLKEY |
| NOV9j | IKFSNLIQDSGLLSVITDPIHTPVTLFWPTDQALHALPAE---QQDFLFNQDNKDKLKEY |
| NOV9k | IKFSNLIQDSGLLSVITDPIHTPVTLFWPTDQALHALHALPAEQQDFLFNQDNKDKLKEY |
| NOV9l | IKFSNLIQDSGLLSVITDPIHTPVTLFWPTDQALHALPAE---QQDFLFNQDNKDKLKEY |
| NOV9m | IKFSNLIQDSGLLSVITDPIHTPVTLFWPTDQALHALPAE---QQDFLFNQDNKDKLKEY |
| NOV9n | IKFSNLIQDSGLLSVITDPIHTPVTLFWPTDQALHALPAE---QQDFLFNQDNKDKLKEY |
| NOV9o | IKFSNLIQDSGLLSVITDPIHTPVTLFWPTDQALHALPAE---QQDFLFNQDNKDKLKEY |
| NOV9p | IKFSNLIQDSGLLSVITDPIHTPVTLFWPTDQALHALPAE---QQDFLFNQDNKDKLKEY |
| NOV9q | IKFSNLIQDSGLLSVITDPIHTPVTLFWPTDQALHALPAE---QQDFLFNQDNKDKLKEY |
| NOV9r | IKFSNLIQDSGLLSVITDPIHTPVTLFWPTDQALHALPAE---QQDFLFNQDNKDKLKEY |
| NOV9s | IKFSNLIQDSGLLSVITDPIHTPVTLFWPTDQALHALPAE---QQDFLFNQDNKDKLKEY |
| NOV9t | IKFSNLIQDSGLLSVITDPIHTPVTLFWPTDQALHALPAE---QQDFLFNQDNKDKLKEY |
| NOV9u | IKFSNLIQDSGLLSVVTDPIHTPVTLFWPTDQALHALPAE---QQDFLFNQDNKDKLKEY |
| NOV9v | IKFSNLIQDSGLLSVITDPIHTPVTLFWPTDQALHALPAE---QQDFLFNQDNKDKLKEY |
| NOV9w | IKFSNLIQDSGLLSVITDPIHTPVTLFWPTDQALHALPAE---QQDFLFNQDNKDKLKEY |
| NOV9x | IKFSNLIQDSGLLSVITDPIHTPVTLFWPTDQALHALPAE---QQDFLFNQDNKDKLKEY |
| NOV9y | IKFSNLIQDSGLLSVITDPIHTPVTLFWPTDQALHALPAE---QQDFLFNQDNKDKLKEY |
| NOV9a | LKFHVIRDAKVLAVDLPTSTAWKTLQGSELSVKCGAGRDIGDLFLNGQTCRIVQRELLFD |
| NOV9b | LKFHVIRDAKVLAVDLPTSTAWKTLQGSELSVKCGAGRDIGDLFLNGQTCRIVQRELLFD |
| NOV9c | ------------------------------------------------------------ |
| NOV9d | ------------------------------------------------------------ |
| NOV9e | LKFHVIRDAKVLAVDLPTSTAWKTLQGSELSVKCGAGRDIGDLFLNGQTCRIVQRELLFD |
| NOV9f | LKFHVIRDAKVLAVDLPTSTAWKTLQGSELSVKCGAGRDIGDLFLNGQTCRIVQRELLFD |
| NOV9g | ---------------LPTSTAWKTLQGSELSVKCGAGRDIGDLFLNGQTCRIVQRELLFD |
| NOV9h | LKFHVIRDAKVLAVDLPTSTAWKTLQGSELSVKCGAGRDIGDLFLNGQTCRIVQRELLFD |
| NOV9i | LKFHVIRDAKVLAVDLPTSTAWKTLQGSELSVKCGAGRDIGDLFLNGQTCRIVQRELLFD |
| NOV9j | LKFHVIRDAKVLAVDLPTSTAWKTLQGSELSVKCGAGRDIGDLFLNGQTCRIVQRELLFD |
| NOV9k | LKFHVIRDAKVLAVDLPTSTAWKTLQGSELSVKCGAGRDIGDLFLNGQTYRIVQRELLFD |
| NOV9l | LKFHVIRDAKVLAVDLPTSTAWKTLQGSELSVKCGAGRDIGDLFLNGQTCRIVQRELLFD |
| NOV9m | LKFHVIRDAKVLAVDLPTSTAWKTLQGSELSVKCGAGRDIGDLFLNGQTCRIVQRELLFD |
| NOV9n | LKFHVIRDAKVLAVDLPTSTAWKTLQGSELSVKCGAGRDIGDLFLNGQTCRIVQRELLFD |
| NOV9o | LKFHVIRDAKVLAVDLPTSTAWKTLQGSELSVKCGAGRDIGDLFLNGQTCRIVQRELLFD |
| NOV9p | LKFHVIRDAKVLAVDLPTSTAWKTLQGSELSVKCGAGRDIGDLFLNGQTCRIVQRELLFD |
| NOV9q | LKFHVIRDAKVLAVDLPTSTAWKTLQGSELSVKCGAGRDIGDLFLNGQTCRIVQRELLFD |
| NOV9r | LKFHVIRDAKVLAVDLPTSTAWKTLQGSELSVKCGAGRDIGDLFLNGQTCRIVQRELLFD |
| NOv9s | LKFHVIRDAKVLAVDLPTSTAWKTLQGSELSVKCGAGRDIGDLFLNGQTCRIVQRELLFD |
| NOV9t | LKFHVIRDAKVLAVDLPTSTAWKTLQGSELSVKCGAGRDIGDLFLNGQTCRIVQRELLFD |
| NOV9u | LKFHVIRDAKVLAVDLPTSTAWKTLQGSELSVKCGAGRDIGDLFLNGQTCRIVQRELLFD |
| NOV9v | LKFHVIRDAKVLAVDLPTSTAWKTLQGSELSVKCGAGRDIGDLFLNGQTCRIVQRELLFD |
| NOV9w | LKFHVIRDAKVLAVDLPTSTAWKTLQGSELSVKCGAGRDIGDLFLNGQTCRIVQRELLFD |
| NOV9x | LKFHVIRDAKVLAVDLPTSTAWKTLQGSELSVKCGAGRDIGDLFLNGQTCRIVQRELLFD |
| NOV9y | LKFHVIRDAKVLAVDLPTSTAWKTLQGSELSVKCGAGRDIGDLFLNGQTCRIVQRELLFD |
| NOV9a | LGVAYGIDCLLIDPTLGGRCDTFTTFDASGECGSCVNTPSCPRWSKPKGVKQKCLYNLPF |
| NOV9b | LGVAYGIDCLLIDPTLGGRCDTFTTFDASGECGSCVNTPSCPRWSKPKGVKQKCLYNLPF |
| NOV9c | ------------------------------------------------------------ |
| NOV9d | ------------------------------------------------------------ |
| NOV9e | LGVAYGIDCLLIDPTLGGRCDTFTTFDASGECGSCVNTPSCPRWSKPKGVKQKCLYNLPF |
| NOV9f | LGVAYGIDCLLIDPTLGGRCDTFTTFDASGECGSCVNTPSCPRWSKPKGVKQKCLYNLPF |
| NOV9g | LGVAYGIDCLLIDPTLGGRCDTFTTFDASGECGSCVNTPSCPRWSKPKGVKQKCLYNLPF |
| NOV9h | LGVAYGIDCLLIDPTLGGRCDTFTTFDASGECGSCVNTPSCPRWSKPKGVKQKCLYNLPF |
| NOV9i | LGVAYGIDCLLIDPTLGGRCDTFTTFDASGECGSCVNTPSCPRWSKPKGVKQKCLYNLPF |
| NOV9j | LGVAYGIDCLLIDPTLGGRCDTFTTFDASGECGSCVNTPSCPRWSKPKGVKQKCLYNLPF |
| NOV9k | LGVAYGIDCLLIDPTLGGRCDTFTTFDASGECGSCVNTPSCPRWSKPKGVKQKCLYNLPF |
| NOV9l | LGVAYGIDCLLIDPTLGGRCDTFTTFDAS-------------------GVKQKCLYNLPF |
| NOV9m | LGVAYGIDCLLIDPTLGGRCDTFTTFDAS-------------------GVKQKCLYNLPF |
| NOV9n | LGVAYGIDCLLIDPTLGGRCDTFTTFDASGECGSCVNTPSCPRWSKPKGVKQKCLYNLPF |
| NOV9o | LGVAYGIDCLLIDPTLGGRCDTFTTFDASGECGSCVNTPSCPRWSKPKGVKQKCLYNLPF |
| NOV9p | LGVAYGIDCLLIDPTLGGRCDTFTTFDASGECGSCVNTPSCPRWSKPKGVKQKCLYNLPF |
| NOV9q | LGVAYGIDCLLIDPTLGGRCDTFTTFDASGECGSCVNTPSCPRWSKPKGVKQKCLYNLPF |
| NOV9r | LGVAYGIDCLLIDPTLGGRCDTFTTFDASGECGSCVNTPSCPRWSKPKGVKQKCLYNLPF |
| NOV9s | LGVAYGIDCLLIDPTLGGRCDTFTTFDASGECGSCVNTPSCPRWSKPKGVKQRCLYNLPF |
| NOV9t | LGVACGIDCLLIDPTLGGRCDTFTTFDASGECGSCVNTPSCPRWSKPKGVKQKCLYNLPF |
| NOV9u | LGVAYGIDCLLIDPTLGGRCDTFTTFDASGECGSCVNTPSCPRWSKPKGVKQKCLYNLPF |
| NOV9v | LGVAYGIDCLLIDPTLGGRCDTFTTFDASGECGSCVNTPSCPRWSKPKGVKQKCLYNLPF |
| NOV9w | LGVAYGIDCLLIDPTLGGRCDTFTTFDASGECGSCVNTPSCPRWSKPKGVKQKCLYNLPF |
| NOV9x | LGVAYGIDCLLIDPTLGGRCDTFTTFDASGECGSCVNTPSCPRWSKPKGVKQKCLYNLPF |
| NOV9y | LGVAYGIDCLLIDPTLGGRCDTFTTFDASGECGSCVNTPSCPRWSKPKGVKQKCLYNLPF |
| NOV9a | KRNLEGCRERCSLVIQIPRCCKGYFGRDCQACPGGPDAPCNNRGVCLDQYSATGECKCNT |
| NOV9b | KRNLEGCRERCSLVIQIPRCCKGYFGRDCQACPGGPDAPCNNRGVCLDQYSATGECKCNT |
| NOV9c | ------------------------------------------------------------ |
| NOV9d | ------------------------------------------------------------ |
| NOV9e | KRNLEGCRERCSLVIQIPRCCKGYFGRDCQACPGGPVAPCNNRGVCLDQYSATGECKCNT |
| NOV9f | KRNLEGCRERCSLVIQIPRCCKGYFGRDCQACPGGPDAPCNNRGVCLDQYSATGECKCNT |
| NOV9g | KRNLEGCRERCSLVIQIPRCCKGYFGRDCQACPGGPDAPCNNRGVCLDQYSATGECKCNT |
| NOV9h | KRNLEGCRERCSLVIQIPRCCKGYFGRDCQGE--GASSP-------LATL----KVSALI |
| NOV9i | KRNLEGCRERCSLVIQIP------------------------------------------ |
| NOV9j | KRNLEGCRERCSLVIQIPRCCKGYFGRDCQACPGGPDAPCNNRGVCLDQYSATGECKCNT |
| NOV9k | KRNLEGCRERCSLVIQIPRCCKGYFGRDCQACPGGPDAPCNNRGVCLDQYSATGECKCNT |
| NOV9l | KRNLEGCRERCSLVIQIPRCCKGYFGRDCQACPGGPDAPCNNRGVCLDQYSATGECKCNT |
| NOV9m | KRNLEGCRERCSLVIQIPRCCKGYFGRDCQACPGGPDAPCNNRGVCLDQYSATGECKCNT |
| NOV9n | KRNLEGCRERCSLVIQIPRCCKGYFGRDCQACPGGPDAPCNNRGVCLDQYSATGECKCNT |
| NOV9o | KRNLEGCRERCSLVIQIPRCCKGYFGRDCQACPGGPDAPCNNRGVCLDLYSATGECKCNT |
| NOV9p | KPNLEGCRERCSLVTQIPRCCKGYFGRDCQACPGGPDAPCNNRGVCLDQYSATGECKCNT |
| NOV9q | KRNLEGCRERCSLVIQIPRCCKGYFGRDCQACPGGPDAPCNNRGVCLDQYSATGECKCNT |
| NOV9r | KRNLEGCRERCSLVIQIPRCCKGYFGRDCQACPGGPDAPCNNRGVCLDQYSATGECKCNT |
| NOV9s | KRNLEGCRERCSLVIQIPRCCKGYFGRDCQACPGGPDAPCNNRGVCLDQYSATGECKCNT |
| NOV9t | KRNLEGCRERCSLVIQIPRCCKGYFGRDCQACPGGPDAPCNNRGVCLDQYSATGECKCNT |
| NOV9u | KRNLEGCRERCSLVIQIPRCCKGYFGRDCQACPGGPDAPCNNRGVCLDQYSATGECKCNT |
| NOV9v | KRNLEGCRERCSLVIQIPRCCKGYFGRDCQACPGGPDAPCNNRGVCLDQYSATGECKCNT |
| NOV9w | KRNLEGCRERCSLVIQIPRCCKGYFGRDCQPR--------NSKSVCLDQYSATGECKCNT |
| NOV9x | KRNLEGCRERCSLVIQIPRCCKGYFGRDCQACPGGPDAPCNNRGVCLDQYSATGECKCNT |
| NOV9y | KRNLEGCRERCSLVIQIPRCCKGYFGRDCQACPGGPDAPCNNRGVCLDQYSATGECKCNT |
| NOV9a | GFNGTACEMCWPGRFGPDCLPCGCSDHGQCDDGITGSGQCLCETGWTGPSCDTQAVLPAV |
| NOV9b | GFNGTACEMCWPGRFGPDCLPCGCSDHGQCDDGITGSGQCLCETGWTGPSCDTQAVLPAV |
| NOV9c | --------MCWPGRFGPDCLPCGCSDHGQCDDGITGSGQCLCETGWTGPSCDTQAVLSAV |
| NOV9d | --------MCWPGRFGPDCLPCGCSDHGQCDDGITGSGQCLCETGWTGPSCDTQAVLSAV |
| NOV9e | GFNGTACEMCWPGRFGPDCLPCGCSDHGQCDDGITGSGQCLCETGWTGPSCDTQAVLSAV |
| NOV9f | GFNGTACEMCWPGRFGPDCLPCGCSDHGQCDDGITGSGQCLCETGWTGPSCDTQAVLSAV |
| NOV9g | GFNGTACEMCWPGRFGPDCLPCGCSDHGQCDDGITGSGQCLCETGWTGPSCDTQAVLSAV |
| NOV9h | STRPPESVNATPASMGRRVRCAGRGDLGLIVCPVA-A--------------QTTDSAMMA |
| NOV9i | ---------SLPWRTRCPV----------------------------------------- |
| NOV9j | GFNGTACEMCWPGRFGPDCLPCGCSDHGQCDDGITGSGQCLCETGWTGPSCDTQAVLSAV |
| NOV9k | GFNGTACEMCWPGRFGPDCLPCGCSDHGQCDDGITGSGQCLCETGWTGPSCDTQAVLPAV |
| NOV9l | GFNGTACEMCWPGRFGPDCLPCGCSDHGQCDDGITGSGQCLCETGWTGPSCDTQAVLPAV |
| NOV9m | GFNGTACEMCWPGRFGPDCLPCGCSDHGQCDDGITGSGQCLCETGWTGPSCDTQAVLPAV |
| NOV9n | GFNGTACEMCWPGRFGPDCLPCGCSDHGQCNDGITGSGQCLCETGWTGPSCDTQAVLPAV |
| NOV9o | GFNGTACEMCWPGRFGPDCLPCGCSDHGQCDDGITGSGQCLCETGWTGPSCDTQAVLPAV |
| NOV9p | GFNGTACEMCWPGRFGPDCLPCGCSDHGQCDDGITGSGQCLCETGWTGPSCDTQAVLPAV |
| NOV9q | GFNGTACEMCWPGRFGPDCLPCGCSDHGQCDDGITGSGQCLCETGWTGPSCDTQAVLPAV |
| NOV9r | GFNGTACEMCWPGRFGPDCLPCGCSDHGQCDDGITGSGQCLCETGWTGPSCDTQAVLPAV |
| NOV9s | GFNGTACEMCWPGRFGPDCLPCGCSDHGQCDDGITGSGQCLCETGWTGPSCDTQAVLPAV |
| NOV9t | GFNGTACEMCWPGRFGPDCLPCGCSDHGQCDDGITGSGQCLCETGWTGPSCDTQAVLPAV |
| NOV9u | GFNGTACEMCWPGRFGPDCLPCGCSDHGQCDDGITGSGQCLCETGWTGPSCDTQAVLPAV |
| NOV9v | GFNGTACEMCWPGRFGPDCLPCGCSDHGQCDDGITGSGQCLCETGWTGPSCDTQAVLPAV |
| NOV9w | GFNGTACEMCWPGRFGPDCLPCGCSDHGQCDDGITGSGQCLCETGWTGPSCDTQAVLPAV |
| NOV9x | GFNGTACEMCWPGRFGPDCLPCGCSDHGQCDDGITGSGQCLCETGWTGPSCDTQAVLPAV |
| NOV9y | GFNGTACEMCWPGRFGPDCLPCGCSDHGQCDDGITGSGQCLCETGWTGPSCDTQAVLPAV |
| NOV9a | CTPPCSAHATCKENNTCECNLDYEGDGITCTVVDFCKQDNGGCAKVARCSQKGTKVSCSC |
| NOV9b | CTPPCSAHATCKENNTCECNLDYEGDGITCTVVDFCKQDNGGCAKVARCSQKGTKVSCSC |
| NOV9c | CTPPCSAHATCKENNTCECNLDYEGDGITCTVVDFCKQDNGGCAKVARCSQKGTKVSCSC |
| NOV9d | CTPPCSAHATCKENNTCECNLDYEGDGITCTVVDFCKQDNGGCAKVARCSQKGTKVSCSC |
| NOV9e | CTPPCSAHATCKENNTCECNLDYEGDGITCTVVDFCKQDNGGCAKVARCSQKGTKVSCSC |
| NOV9f | CTPPCSAHATCKENNTCECNLDYEGDGITCTVVDFCKQDNGGCAKVARCSQKGTKVSCSC |
| NOV9g | CTPPCSAHATCKENNTCECNLDYEGDGITCTVVDFCKQDNGGCAKVARCSQKGTKVSCSC |
| NOV9h | SRAPGSASVKRG------------GQAPRVTLRQFCLQCVRLLVLLMPPVRRTTRVSVTW |
| NOV9i | ------------------------------------------------------------ |
| NOV9j | CTPPCSAHATCKENNTCECNLDYEGDGITCTVVDFCKQDNGGCAKVARCSQKGTKVSCSC |
| NOV9k | CTPPCSAHATCKENNTCECNLDYEGDGITCTVVDFCKQDNGGCAKVARCSQKGTKVSCSC |
| NOV9l | CTPPCSAHATCKENNTCECNLDYEGDGITCTVVDFCKQDNGGCAKVARCSQKGTKVSCSC |
| NOV9m | CTPPCSAHATCKENNTCECNLDYEGDGITCTVVDFCKQDNGGCAKVARCSQKGTKVSCSC |
| NOV9n | CTPPCSAHATCKENNTCECNLDYEGDGITCTVVDFCKQDNGGCAKVARCSQKGTKVSCSC |
| NOV9o | CTPPCSAHATCKENNTCECNLDYEGDGITCTVVDFCKQDNGGCAKVARCSQKGTKVSCSC |
| NOV9p | CTPPCSAHATCKENNTCECNLDYEGDGITCTVVDFCKQDNGGCAKVARCSQKGTKVSCSC |
| NOV9q | CTPPCSAHATCKENNTCECYLDYEGDGITCTVVDFCKQDNGGCAKVARCSQKGTKVSCSC |
| NOV9r | CTPPCSAHATCKENNTCECNLDYEGDGITCTVVDFCKQDNGGCAKVARCSQKGTKVSCNC |
| NOV9s | CTPPCSAHATCKENNTCECNLDYEGDGITCTVVDFCKQDNGGCAKVARCSQKGTKVSCSC |
| NOV9t | CTPPCSAHATCKENNTCECNLDYEGDGITCTVVDFCKQDNGGCAKVARCSQKGTKVSCSC |
| NOV9u | CTPPCSAHATCKENNTCECNLDYEGDGITCTVVDFCKQDNGGCAKVARCSQKGTKVSCSC |
| NOV9v | CTPPCSAHATCKENNTCECNLDYEGDGITCTVVDFCKQDNGGCAKVARCSQKGTKVSCSC |
| NOV9w | CTPPCSAHATCKENNTCECNLDYEGDGITCTVVDFCKQDNGGCAKVARCSQKGTKVSCSC |
| NOV9x | CTPPCSAHATCKENNTCECNLDYEGDGITCTVVDFCKQDNGGCAKVARCSQKGTKVSCSC |
| NOV9y | CTPPCSAHATCKENNTCECNLDYEGDGITCTVVDFCKQDNGGCAKVARCSQKGTKVSCSC |
| NOV9a | QKGYKGDGHSCTEIDPCADGLNGGCHEHATCKMTGPGKHKCECKSHYVGDGLNCEPEQLP |
| NOV9b | QKGYKGDGHSCTEIDPCADGLNGGCHEHATCKMTGPGKHKCECKSHYVGDGLNCGPEQLP |
| NOV9c | QKGYKGDGHSCTEIDPCADGLNGGCHEHATCKMTGPGKHKCECKSHYVGDGLNCEPEQLP |
| NOV9d | QKGYKGDGHSCTEIDPCADGLNGGCHEHATCKMTGPGKHKCECKSHYVGDGLNCEPEQLP |
| NOV9e | QKGYKGDGHSCTEIDPCADGLNGGCHEHATCKMTGPGKHKCECKSHYVGDGLNCEPEQLP |
| NOV9f | QKGYKGDGHSCTEIDPCADGLNGGCHEHATCKMTGPGKHKCECKSHYVGDGLNCEPEQLP |
| NOV9g | QKGYKGDGHSCTEIDPCADGLNGGCHEHATCKMTGPGKHKCECKSHYVGDGLNCEPEQLP |
| NOV9h | IMKVT---ESHAQLWISANRTTGAVQRWPDAPRPAR-RSPAAARRDTKGTGTAAQR---- |
| NOV9i | ------------------------------------------------------------ |
| NOV9j | QKGYKGDGHSCTEIDPCADGLNGGCHEHATCKMTGPGKHKCECKSHYVGDGLNCEPEQLP |
| NOV9k | QKGYKGDGHSCTEIDPCADGLNGGCHEHATCKMTGPGKHKCECKSHYVGDGLNCEPEQLP |
| NOV9l | QKGYKGDGHSCTEIDPCADGLNGGCHEHATCKMTGPGKHKCECKSHYVGDGLNCEPEQLP |
| NOV9m | QKGYKGDGHSCTEIDPCADGLNGGCHEHATCKMTGPGKHKCECKSHYVGDGLNCEPEQLP |
| NOV9n | QKGYKGDGHSCTEIDPCADGLNGGCHEHATCKMTGPGKHKCECKSHYVGDGLNCEPEQLP |
| NOV9o | QKGYKGDGHSCTEIDPCADGLNGGCHEHATCKMTGPGKHKCECKSHYVGDGLNCEPEQLP |
| NOV9p | QKGYKGDGHSCTEIDPCADGLNGGCHEHATCKNTGPGKHKCECKSHYVGDGLNCEPEQLP |
| NOV9q | QKGYKGDGHSCTEIDPCADGLNGGCHEHATRKMTGPGKHKCECKSHYVGDGLNCEPEQLP |
| NOV9r | QKGYKGDGHSCTEIDPCADGLNGGCHEHATCKMTGPGKHKCECKSHYVGDGLNCEPEQLP |
| NOV9s | QKGYKGDGHSCTEIDPCADGLNGGCHEHATCKMTGPGKHKCECKSHYVGDGLNCEPEQLP |
| NOV9t | QKGYKGDGHSCTEIDPCADGLNGGCHEHATCKNTGPGKHKCECKSHYVGDGLNCEPEQLP |
| NOV9u | QKGYKGDGHSCTETDPCADGLNGGCHEHATCKMTGPGKHKCECKSHYVGDGLNCEPEQLP |
| NOV9v | QKGYKGDGHSCTEIDPCADGLNGGCHEHATCKMTGPGKHKCECKSRYVGDGLNCEPEQLP |
| NOV9w | QKGYKGDGHSCTEIDPCADGLNGGCHEHATCKMTGPGKHKCECKSHYVGDGLNCEPEQLP |
| NOV9x | QKGYKGDGHSCTEIDPCADGLNGGCHEHATCKMTGPGKHKCECKSHYVGDGLNCEPEQLP |
| NOV9y | QKGYKGDGHSCTEIDPCADGLNGGCHEHATCKMTGPGKHKCECKSHYVGDGLNCEPEQLP |
| NOV9a | IDRCLQDNGQCHADAKCVDLHFQDTTVGVFHLRSPLGQYKLTFDKAREACANEAATMATY |
| NOV9b | IDRCLQDNGQCHADAKCVDLHFQDTTVGVFHLRSPLGQYKLTFDKAREACANEAATMATY |
| NOV9c | IDRCLQDNGQCHADAKCADLHFQDTTVGVFHLRSPLGQYKLTFDKAREACANEAATMATY |
| NOV9d | IDRCLQDNGQCHADAKCVDLHFQDTTVGVFHLRSPLGQYKLTFDKAREACANEAATMATY |
| NOV9e | IDRCLQDNGQCHADAKCVDLHFQDTTVGVFHLRSPLGQYKLTFDKAREACANEAATMATY |
| NOV9f | IDRCLQDNGQCHADAKCVDLHFQDTTVGVFHLRSPLGQYKLTFDKAREACANEAATMATY |
| NOV9g | IDRCLQDNGQCHADAKCVDLHFQDTTVGVFHLRSPLGQYKLTFDKAREACANEAATMATY |
| NOV9h | ------------------------------------------------------------ |
| NOV9i | ------------------------------------------------------------ |
| NOV9j | IDRCLQDNGQCHADAKCVDLHFQDTTVGVFHLRSPLGQYKLTFDKAREACANEAATMATY |
| NOV9k | IDRCLQDNGQCHADAKCVDLHFQDTTVGVFHLRSPLGQYKLTFDKAREACANEAATMATY |
| NOV9l | IDRCLQDNGQCHADAKCVDLHFQDTTVGVFHLRSPLGQYKLTFDKAREACANEAATMATY |
| NOV9m | IDRCLQDNGQCHADAKCVDLHFQDTTVGVFHLRSPLGQYKLTFDKAREACANEAATMATY |
| NOV9n | IDRCLQDNGQCHADAKCVDLHFQDTTVGVFHLRSPLGQYKLTFDRAREACANEAATMATY |
| NOV9o | IDRCLQDNGQCHADAKCVDLHFQDTTVGVFHLRSPLGQYKLTFDKAREACANEAATMATY |
| NOV9p | IDRCLQDNGQCHADAKCVDLHFQDTTVGVFHLRSPLGQYKLTFDKAREACANEAATMATY |
| NOV9q | IDRCLQDNGQCHADAKCVDLHFQDTTVGVFHLRSPLGQYKLTFDKAREACANEAATMATY |
| NOV9r | IDRCLQDNGQCHADAKCVDLHFQDTTVGVFHLRSPLGQYKLTFDKAREACANEAATMATY |
| NOV9s | IDRCLQDNGQCHADAKCVDLHFQDTTVGVFHLRSPLGQYKLTFDKAREACANEAATMATY |
| NOV9t | IDRCLQDNGQCHADAKCVDLHFQDTTVGVFHLRSPLGQYKLTFDKAREACANEAATMATY |
| NOV9u | IDRCLQDNGQCHADAKCVDLHFQDTTVGVFHLRSPLGQYKLTFDKAREACANEAATTATY |
| NOV9v | IDRCLQDNGQCHADAKCVDLHFQDTTVGVFHLRSPLGQYKLTFDKAREACANEAATMATY |
| NOV9w | IDRCLQDNGQCHADAKCVDLHFQDTTVGVFHLRSPLGQYKLTFDKAREACANEAATMATY |
| NOV9x | IDRCLQDNGQCHADAKCVDLHFQDTTVGVFHLRSPLGQYKLTFDKAREACANEAATMATY |
| NOV9y | IDRCLQDNGQCHADAKCVDLHFQDTTVGVFHLRSPLGQYKLTFDKAREACANEAATMATY |
| NOV9a | NQLSYAQKAKYHLCSAGWLETGRVAYPTAFASQNCGSGVVGIVDYGPRPNKSEMWDVFCY |
| NOV9b | NQLSYAQKAKYHLCSAGWLETGRVAYPTAFASQNCGSGVVGIVDYGPRPNKSEMWDVFCY |
| NOV9c | NQLSYAQKAKYHLCSAGWLETGRVAYPTAFASQNCGSGVVGIVDYGPRPNKSEMWDVFCY |
| NOV9d | NQLSYAQKREEK------------------------------------------------ |
| NOV9e | NQLSYAQKTWYSFTKE-------------------------------------------- |
| NOV9f | NQLSYAQKTWYSFTKE-------------------------------------------- |
| NOV9g | NQLSYAQKTWYSFTKE-------------------------------------------- |
| NOV9h | ------------------------------------------------------------ |
| NOV9i | ------------------------------------------------------------ |
| NOV9j | NQLSYAQKTWYSFTKE-------------------------------------------- |
| NOV9k | NQLSYAQKAKYHLCSAGWLETGRVAYPTAFASQNCGSGVVGIVDYGPRPNKSEMWDVFCY |
| NOV9l | NQLSYAQKAKYHLCSAGWLETGRVAYPTAFASQNCGSGVVGIVDYGPRPNKSEMWDVFCY |
| NOV9m | NQLSYAQKAKYHLCSAGWLETGRVAYPTAFASQNCGSGVVGIVDYGPRPNKSEMWDVFCY |
| NOV9n | NQLSYAQKAKYHLCSAGWLETGRVAYPTAFASQNCGSGVVGIVDYGPRPNKSEMWDVFCY |
| NOV9o | NQLSYAQKAKYHLCSAGWLETGRVAYPTAFASQNCGSGVVGIVDYGPRPNKSEMWDVFCY |
| NOV9p | NQLSYAQKAKYHLCSAGWLETGRVAYPTAFASQNCGSGVVGIVDYGPRPNKSEMWDVFCY |
| NOV9q | NQLSYAQKAKYHLCSAGWLETGRVAYPTAFASQNCGSGVVGIVDYGPRPNKSEMWDVFCY |
| NOV9r | NQLSYAQKAKYHLCSAGWLETGRVAYPTAFASQNCGSGVVGIVDYGPRPNKSEMWDVFCY |
| NOV9s | NQLSYAQKAKYHLCSAGWLETGRVAYPTAFASQNCGSSVVGIVDYGPRPNKSEMWDVFCY |
| NOV9t | NQLSYAQKAKYHLCSAGWLETGRVAYPTAFASQNCGSGVVGIVDYGPRPNKSEMWDVFCY |
| NOV9u | NQLSYAQKAKYHLCSAGWLETGRVAYPTAFASQNCGSGVVGIVDYGPRPNKSEMWDVFCY |
| NOV9v | NQLSYAQKAKYHLCSAGWLETGRVAYPTAFASQNCGSGVVGIVDYGPRPNKSEMWDVFCY |
| NOV9w | NQLSYAQKAKYHLCSAGWLETGRVAYPTAFASQNCGSGVVGIVDYGPRPNKSEMWDVFCY |
| NOV9x | NQLSYAQKAKYHLCSAGWLETGRVAYPTAFASQNCGSGVVGIVDYGPRPNKSEMWDVFCY |
| NOV9y | NQLSYAQKAKYHLCSAGWLETGRVAYPTAFASQNCGSGVVGIVDYGPRPNKSEMWDVFCY |
| NOV9a | RMKDVNCTCKVGYVGDGFSCSGNLLQVLMSFPSLTNFLTEVLAYSNSSARGRAFLEHLTD |
| NOV9b | RP---------------------------------------------------------- |
| NOV9c | RMKGS----------------AGLFQQLSSRPCISRTPD--------------------- |
| NOV9d | ------------------------------------------------------------ |
| NOV9e | ------------------------------------------------------------ |
| NOV9f | ------------------------------------------------------------ |
| NOV9g | ------------------------------------------------------------ |
| NOV9h | ------------------------------------------------------------ |
| NOV9i | ------------------------------------------------------------ |
| NOV9j | ------------------------------------------------------------ |
| NOV9k | RMKGS----------------AGLFQQLSSRPCISRTPD--------------------- |
| NOV9l | ------------------------------------------------------------ |
| NOV9m | ------------------------------------------------------------ |
| NOV9n | ------------------------------------------------------------ |
| NOV9o | ------------------------------------------------------------ |
| NOV9p | ------------------------------------------------------------ |
| NOV9q | ------------------------------------------------------------ |
| NOV9r | ------------------------------------------------------------ |
| NOV9s | ------------------------------------------------------------ |
| NOV9t | ------------------------------------------------------------ |
| NOV9u | ------------------------------------------------------------ |
| NOV9v | ------------------------------------------------------------ |
| NOV9w | RMKDVNCTCKVGYVGDGFSCSGNLLQVLMSFPSLTNFLTEVLAYSNSSARGRAFLEHLTD |
| NOV9x | RMKDVNCTCKVGYVGDGFSCSGNLLQVLNSFPSLTNFLTEVLAYSNSSARGRAFLEHLTD |
| NOV9y | RMKDVNCTCKVGYVGDGFSCSGNLLQVLMSFPSLTNFLTEVLAYSNSSARGRAFLEHLTD |
| NOV9a | LSIRGTLFVPQNSGLGENETLSGRDIEHHLANVSMFFYNDLVNGTTLQTRVGSKLLITAS |
| NOV9b | ------------------------------------------------------------ |
| NOV9c | ------------------------------------------------------------ |
| NOV9d | ------------------------------------------------------------ |
| NOV9e | ------------------------------------------------------------ |
| NOV9f | ------------------------------------------------------------ |
| NOV9g | ------------------------------------------------------------ |
| NOV9h | ------------------------------------------------------------ |
| NOV9i | ------------------------------------------------------------ |
| NOV9j | ------------------------------------------------------------ |
| NOV9k | ------------------------------------------------------------ |
| NOV9l | ------------------------------------------------------------ |
| NOV9m | ------------------------------------------------------------ |
| NOV9n | ------------------------------------------------------------ |
| NOV9o | ------------------------------------------------------------ |
| NOV9p | ------------------------------------------------------------ |
| NOV9q | ------------------------------------------------------------ |
| NOV9r | ------------------------------------------------------------ |
| NOV9s | ------------------------------------------------------------ |
| NOV9t | ------------------------------------------------------------ |
| NOV9u | ------------------------------------------------------------ |
| NOV9v | ------------------------------------------------------------ |
| NOV9w | LSIRGTLFVPQNSGLGENETLSGRDIEHHLANVSMFFYNDLVNGTTLQTRVGSKLLITAS |
| NOV9x | LSIRGTLFVPQNSGLGENETLSGRDIEHHLANVSMFFYNDLVNGTTLQTRLGSKLLITAS |
| NOV9y | LSIRGTLFVPQNSGLGENETLSGRDIEHHLANVSMFFYNDLVNGTTLQTRLGSKLLITAS |
| NOV9a | QDPLQPTETRFVDGRAILQWDIFASNGIIHVISRPLKAPPAPVTLTHTGLGAGIFFAIIL |
| NOV9b | ------------------------------------------------------------ |
| NOV9c | ------------------------------------------------------------ |
| NOV9d | ------------------------------------------------------------ |
| NOV9e | ------------------------------------------------------------ |
| NOV9f | ------------------------------------------------------------ |
| NOV9g | ------------------------------------------------------------ |
| NOV9h | ------------------------------------------------------------ |
| NOV9i | ------------------------------------------------------------ |
| NOV9j | ------------------------------------------------------------ |
| NOV9k | ------------------------------------------------------------ |
| NOV9l | ------------------------------------------------------------ |
| NOV9m | ------------------------------------------------------------ |
| NOV9o | ------------------------------------------------------------ |
| NOV9p | ------------------------------------------------------------ |
| NOV9q | ------------------------------------------------------------ |
| NOV9r | ------------------------------------------------------------ |
| NOV9s | ------------------------------------------------------------ |
| NOV9t | ------------------------------------------------------------ |
| NOV9u | ------------------------------------------------------------ |
| NOV9v | ------------------------------------------------------------ |
| NOV9w | QDPLQPTETRFVDGRAILQWDIFASNGIIHVISRPLKAPPAPVTLTHTGLGAGIFFAIIL |
| NOV9x | QDPLQPTETRFVDGPAILQWDIFASNGIIHVISRPLKAPPAPVTLTHTGLGAGIFFAIIL |
| NOV9y | QDPLQPTETRFVDGRAILQWDIFASNGIIHVISRPLKAPPAPVTLTHTGLGAGIFFAIIL |
| NOV9a | VTGAVALAAYSYFRINRRTIGFQHFESEEDINVAALGKQQPENISNPLYESTTSAPPEPS |
| NOV9b | ------------------------------------------------------------ |
| NOV9c | ------------------------------------------------------------ |
| NOV9d | ------------------------------------------------------------ |
| NOV9e | ------------------------------------------------------------ |
| NOV9f | ------------------------------------------------------------ |
| NOV9g | ------------------------------------------------------------ |
| NOV9h | ------------------------------------------------------------ |
| NOV9i | ------------------------------------------------------------ |
| NOV9j | ------------------------------------------------------------ |
| NOV9k | ------------------------------------------------------------ |
| NOV9l | ------------------------------------------------------------ |
| NOV9m | ------------------------------------------------------------ |
| NOV9n | ------------------------------------------------------------ |
| NOV9o | ------------------------------------------------------------ |
| NOV9p | ------------------------------------------------------------ |
| NOV9q | ------------------------------------------------------------ |
| NOV9r | ------------------------------------------------------------ |
| NOV9s | ------------------------------------------------------------ |
| NOV9t | ------------------------------------------------------------ |
| NOV9u | ------------------------------------------------------------ |
| NOV9v | ------------------------------------------------------------ |
| NOV9w | VTGAVALAAYSYFRINRRTIGFQHFESEEDINVAALGKQQPENISNPLYESTTSAPPEPS |
| NOV9x | VTGAVALAAYSYFRINRRTIGFQHFESEEDINVAALGKQQPENISNPLYESTTSAPPEPS |
| NOV9y | VTGAVALAAYSYFRINRRTIGFQHFESEEDINVAALGKQQPENISNPLYESTTSAPPEPS |
| NOV9a | YDPFTDSEERQLEGNDPLRTL |
| NOV9b | --------------------- |
| NOV9c | --------------------- |
| NOV9d | --------------------- |
| NOV9e | --------------------- |
| NOV9f | --------------------- |
| NOV9g | --------------------- |
| NOV9h | --------------------- |
| NOV9i | --------------------- |
| NOV9j | --------------------- |
| NOV9k | --------------------- |
| NOV9l | --------------------- |
| NOV9m | --------------------- |
| NOV9n | --------------------- |
| NOV9o | --------------------- |
| NOV9p | --------------------- |
| NOV9q | --------------------- |
| NOV9r | --------------------- |
| NOV9s | --------------------- |
| NOV9t | --------------------- |
| NOV9u | --------------------- |
| NOV9v | --------------------- |
| NOV9w | YDPFTDSEERQLEGNDPLRTL |
| NOV9x | YDPFTDSEERQLEGNDPLRTL |
| NOV9y | YDPFTDSEERQLEGNDPLRTL |
| NOV9a | (SEQ ID NO: 208) |
| NOV9b | (SEQ ID NO: 210) |
| NOV9c | (SEQ ID NO: 212) |
| NOV9d | (SEQ ID NO: 214) |
| NOV9e | (SEQ ID NO: 216) |
| NOV9f | (SEQ ID NO: 218) |
| NOV9g | (SEQ ID NO: 220) |
| NOV9h | (SEQ ID NO: 222) |
| NOV9i | (SEQ ID NO: 224) |
| NOV9j | (SEQ ID NO: 226) |
| NOV9k | (SEQ ID NO: 228) |
| NOV9l | (SEQ ID NO: 230) |
| NOV9m | (SEQ ID NO: 232) |
| NOV9n | (SEQ ID NO: 234) |
| NOV9o | (SEQ ID NO: 236) |
| NOV9p | (SEQ ID NO: 238) |
| NOV9q | (SEQ ID NO: 240) |
| NOV9r | (SEQ ID NO: 242) |
| NOV9s | (SEQ ID NO: 244) |
| NOV9t | (SEQ ID NO: 246) |
| NOV9u | (SEQ ID NO: 248) |
| NOV9v | (SEQ ID NO: 250) |
| NOV9w | (SEQ ID NO: 252) |
| NOV9x | (SEQ ID NO: 254) |
| NOV9y | (SEQ ID NO: 256) |

[0400] Further analysis of the NOV9a protein yielded the following properties shown in Table 9C.

TABLE 9C
Protein Sequence Properties NOV9a

| | |
|---|---|
| SignalP analysis: | Cleavage site between residues 32 and 33 |
| PSORT II analysis: | |

| PSG: | a new signal peptide prediction method | |
|---|---|---|
| | N-region: | length 6; pos. chg 1; neg. chg 0 |
| | H-region: | length 11; peak value 3.91 |
| | PSG score: | −0.49 |

| | |
|---|---|
| GvH: | von Heijne's method for signal seq. recognition |
| | GvH score (threshold: −2.1): −5.51 |
| | possible cleavage site: between 28 and 29 |

>>> Seems to have no N-terminal signal peptide

| ALOM: | Klein et al's method for TM region allocation | | |
|---|---|---|---|
| | Init position for calculation: 1 | | |
| | Tentative number of TMS(s) for the threshold 0.5: 2 | | |
| | Number of TMS(s) for threshold 0.5: 1 | | |
| | INTEGRAL | Likelihood = | Transmembrane 808-824 |
| | | −8.33 | |

| | |
|---|---|
| PERIPHERAL | Likelihood = 2.97 (at 663) |

| | |
|---|---|
| | ALOM score: −8.33 (number of TMSs: 1) |
| MTOP: | Prediction of membrane topology (Hartmann et al.) |
| | Center position for calculation: 815 |
| | Charge difference: −1.0 C(1.5)-N(2.5) |
| | N >= C: N- terminal side will be inside |

>>> Single TMS is located near the C-terminus
>>> membrane topology: type Nt (cytoplasmic tail 1 to 807)

| MITDISC: | discrimination of mitochondrial targeting seq | | | |
|---|---|---|---|---|
| | R content: | 1 | Hyd Moment(75): | 5.98 |
| | Hyd Moment(95): | 9.18 | G content: | 0 |
| | D/E content: | 1 | S/T content: | 0 |

| | |
|---|---|
| | Score: −3.74 |
| Gavel: | prediction of cleavage sites for mitochondrial preseq |
| | R-2 motif at 16 LRY\|HV |

NUCDISC: discrimination of nuclear localization signals

| | |
|---|---|
| | pat4: none |
| | pat7: none |
| | bipartite: none |
| | content of basic residues: 8.7% |
| | NLS Score: −0.47 |
| KDEL: | ER retention motif in the C-terminus: none |

ER Membrane Retention Signals: none
SKL: peroxisomal targeting signal in the C-terminus: none
PTS2: 2nd peroxisomal targeting signal: none
VAC: possible vacuolar targeting motif: none
RNA-binding motif: none
Actinin-type actin-binding motif:

type 1: none
type 2: none

NMYR: N-myristoylation pattern: none
Prenylation motif: none
memYQRL: transport motif from cell surface to Golgi: none
Tyrosines in the tail: too long tail
Dileucine motif in the tail: found

LL at 15
LL at 16
LL at 69
LL at 75
LL at 111
LL at 213
LL at 226
LL at 660

checking 63 PROSITE DNA binding motifs: none
checking 71 PROSITE ribosomal protein motifs: none
checking 33 PROSITE prokaryotic DNA binding motifs: none

| | |
|---|---|
| NNCN: | Reinhardt's method for Cytoplasmic /Nuclear discrimination |
| | Prediction: nuclear |
| | Reliability: 55.5 |
| COIL: | Lupas's algorithm to detect coiled-coil regions |
| | total: 0 residues |

Final Results (k = 9/23):

```
30.4%: nuclear
21.7%: cytoplasmic
13.0%: mitochondrial
13.0%: Golgi
  8.7%: vesicles of secretory system
  8.7%: endoplasmic reticulum
  4.3%: peroxisomal
```

>> prediction for CG50736-09 is nuc (k = 23)

[0401] A search of the NOV9a protein against the Geneseq database, a proprietary database that contains sequences published in patents and patent publication, yielded several homologous proteins shown in Table 9D.

TABLE 9D
Geneseq Results for NOV9a

| | | NOV9a | Identities/ | |
|---|---|---|---|---|
| | | Residues/ | Similarities for | |
| Geneseq | Protein/Organism/Length | Match | the Matched | Expect |
| Identifier | [Patent #, Date] | Residues | Region | Value |
| ABJ10588 | Human novel protein NOV1c SEQ ID | 1 . . . 897 | 897/897 (100%) | 0.0 |
| | NO: 211 - Homo sapiens, 897 aa. | 1 . . . 897 | 897/897 (100%) | |
| | [WO200259315-A2, 01-AUG-2002] | | | |
| ABG72514 | Human 190 kDa Hyaluronan receptor | 1 . . . 897 | 896/897 (99%) | 0.0 |
| | for endocytosis (HARE) #2 - Homo | 757 . . . 1653 | 897/897 (99%) | |
| | sapiens, 1653 aa. [WO200286093-A2, | | | |
| | 31-OCT-2002] | | | |
| ABG72499 | Human 190 kDa Hyaluronan receptor | 1 . . . 897 | 896/897 (99%) | 0.0 |
| | for endocytosis (HARE) #1 - Homo | 520 . . . 1416 | 897/897 (99%) | |
| | sapiens, 1416 aa. [WO200286093-A2, | | | |
| | 31-OCT-2002] | | | |
| AAM47684 | Human Hyaluronic Acid Receptor for | 1 . . . 897 | 896/897 (99%) | 0.0 |
| | Endocytosis, HARE - Homo sapiens, | 498 . . . 1394 | 897/897 (99%) | |
| | 1394 aa. [WO200181544-A2, 01-NOV- | | | |
| | 2001] | | | |
| ABG72498 | Rat 175 kDa Hyaluronan receptor for | 1 . . . 886 | 674/887 (75%) | 0.0 |
| | endocytosis (HARE) - Rattus sp, 1431 | 519 . . . 1404 | 758/887 (84%) | |
| | aa. [WO200286093-A2, 31-OCT-2002] | | | |

[0402] In a BLAST search of public sequence databases, the NOV9a protein was found to have homology to the proteins shown in the BLASTP data in Table 9E.

TABLE 9E
Public BLASTP Results for NOV9a

| | | NOV9a | Identities/ | |
|---|---|---|---|---|
| Protein | | Residues/ | Similarities for | |
| Accession | | Match | the Matched | Expect |
| Number | Protein/Organism/Length | Residues | Portion | Value |
| Q9NRY3 | CD44-like precursor FELL - Homo | 1 . . . 897 | 897/897 (100%) | 0.0 |
| | sapiens (Human), 897 aa. | 1 . . . 897 | 897/897 (100%) | |
| AAO39681 | Hyaluronan receptor for | 1 . . . 897 | 896/897 (99%) | 0.0 |
| | endocytosis - Homo sapiens | 520 . . . 1416 | 897/897 (99%) | |
| | (Human), 1416 aa (fragment). | | | |
| Q8IUG9 | FELE-2 - Homo sapiens (Human), | 1 . . . 897 | 896/897 (99%) | 0.0 |
| | 2551 aa. | 1655 . . . 2551 | 897/897 (99%) | |
| Q8WWQ8 | Stabilin-2 - Homo sapiens (Human), | 1 . . . 897 | 896/897 (99%) | 0.0 |
| | 2551 aa. | 1655 . . . 2551 | 897/897 (99%) | |
| Q9H7H7 | FLJ00112 protein - Homo sapiens | 1 . . . 897 | 896/897 (99%) | 0.0 |
| | (Human), 1192 aa (fragment). | 296 . . . 1192 | 897/897 (99%) | |

[0403] PFam analysis predicts that the NOV9a protein contains the domains shown in the Table 9F.

TABLE 9F
Domain Analysis of NOV9a

| | | Identities/ | |
|---|---|---|---|
| Pfam | NOV9a | Similaritiesfor | Expect |
| 0 Domain | Match Region | the Matched Region | Value |
| Fasciclin | 86 . . . 229 | 38/152 (25%) | 1.5e−08 |
| | | 100/152 (66%) | |
| EGF | 355 . . . 387 | 13/47 (28%) | 0.24 |
| | | 22/47 (47%) | |
| EGF | 397 . . . 426 | 13/47 (28%) | 0.054 |
| | | 23/47 (49%) | |
| EGF | 432 . . . 467 | 10/47 (21%) | 0.066 |
| | | 23/47 (49%) | |
| EGF | 473 . . . 510 | 13/47 (28%) | 0.036 |
| | | 31/47 (66%) | |
| Xlink | 543 . . . 636 | 40/104 (38%) | 1.1e−26 |
| | | 69/104 (66%) | |

### Example 10

[0404] The NOV10 clone was analyzed, and the nucleotide and encoded polypeptide sequences are shown in Table 10A.

TABLE 10A
NOV10 Sequence Analysis

| | | |
|---|---|---|
| NOV10a, CG50925-01 | SEQ ID NO: 257 | 7892 bp |
| DNA Sequence | ORF Start: ATG at 1 | ORF Stop: TAA at 4627 |

ATGCGGGGGGCGCCCGCGCGCCTGCTGCTGCCGCTGCTGCCGTGGCTCCTGCTGCTCCTGGCGCCCGA
GGCTCGGGGCGCGCCCGGCTGCCCGCTATCCATCCGCAGCTGCAAGTGCTCGGGGGAGCGGCCCAAGG
GGCTGAGCGGCGGCGTCCCTGGCCCGGCTCGGCGGAGGGTGGTGTGCAGCGGCGGGGACCTCCCGGAG
CCTCCCGAGCCCGGCCTTCTGCCTAACGGCACCGTTACCCTTGGCAACCGTTTCTCCACTGCCCCTTG
CCCGCAGTCGGGGCTGGCCCAGTCTTTTCGATTGTGTCCAGAACAATACAGTAACGCCTCTGGTTGGG
TGAGTTCAGAGGCTGCCCGCTTCCTGACAGGACACAACTGGTCAGCCTCTGACGCTGGCCGCCCGGCC
TGCATTTTCCCCGGCCCGGTCTCCTGGAGACAGGTACCAGCTTACAACGCCGGACAGGATCAGGGTAG
CAAATATAGCTTCTATGGAGGAAAGGTCAAAGATGAGTATCTGCGTAGGTCCCCGATCTGTCGCTCTG
CTGCCGCCCTGCACACTGACACCAGTGCCCGCAGCTGGTCTGAATTTAGGCTCTTGAGCAATAACAAG
ATCACGGGGCTCCGCAATGGCTCCTTCCTGGGACTGTCACTGCTGGAGAAGCTTCTCATGAGAGCACA
TTTTTCTGATGAAGATGAAAAGACGGCCTGTCCTTCTCCAGCACCAAGGCTCTGGAGGCTGCATAGCA
AGTGCACCCTGAGCATGGCAGGCAATCAGAAGAACCAGGGCGGCAGCAGCTCACAAGAGGCAGCATCT
GGCTTGATGCCGAGTCGGCGGCTCCAGCGGGGAGAGGTTGAGGGCCTCTGCACTTGCCTCTGCACGGA
CCTGAGGAACAACATCATCAGCACAGTGCAGCCGGGCGCCTTCCTGGGCCTGGGGGAGCTGAAGCGTT
TAGATCTCTCCAACAACCGGATTGGCTGTCTCACCTCCGAGACCTTCCAGGGCCTCCCCAGGCTTCTC
CGACTAAACATATCTGGAAACATCTTCTCCAGTCTGCAACCTGGGGTCTTTGATGAGCTGCCAGCCCT
TAAGGTTGTGGACTTGGGCACCGAGTTCCTGACCTGTGACTGCCACCTGCGCTGGCTGCTGCCCTGGG
CCCAGAATCGCTCCCTGCAGCTGTCGGAACACACGCTCTGTGCTTACCCCAGTGCCCTGCATGCTCAT
GCCCTGGGCAGCCTCCAGGAGGCCCAGCTCTGCTGCGAGGGGGCCCTGGAGCTGCACACACACCACCT
CATCCCGTCCCTACGCCAAGTGGTGTTCCAGGGGGATCGGCTGCCCTTCCAGTGCTCTGCCAGCTACC
TGGGCAACGACACCCGCATCCGCTGGTACCACAACCGAGCCCCTGTGGAGGGTGATGAGCAGGCGGGC
ATCCTCCTGGCCGAGAGCCTCATCCACGACTGCACCTTCATCACCAGTGAGCTGACGCTGTCTCACAT
CGGCGTGTGGGCCTCAGGCGAGTGGGAGTGCACCGTGTCCATGGCCCAAGGCAACGCCAGCAAGAAGG
TGGAGATCGTGGTGCTGGAGACCTCTGCCTCCTACTGCCCCGCCGAGCGTGTTGCCAACAACCGCGGG
GACTTCAGGTGGCCCCGAACTCTGGCTGGCATCACAGCCTACCAGTCCTGCCTGCAGTATCCCTTCAC
CTCAGTGCCCCTGGGCGGGGGTGCCCCGGGCACCCGAGCCTCCCGCCGGTGTGACCGTGCCGGCCGCT
GGGAGCCAGGGGACTACTCCCACTGTCTCTACACCAACGACATCACCAGGGTGCTGTACACCTTCGTG
CTGATGCCCATCAATGCCTCCAATGCGCTGACCCTGGCTCACCAGCTGCGCGTGTACACAGCCGAGGC
CGCTAGCTTTTCAGACATGATGGATGTAGTCTATGTGGCTCAGATGATCCAGAAATTTTTGGGTTATG
TCGACCAGATCAAAGAGCTGGTAGAGGTGATGGTGGACATGCCCAGCAACTTGATGCTGGTGGACGAG
CACCTGCTGTGGCTGGCCCAGCGCGAGGACAAGGCCTGCAGCCGCATCGTGGGTGCCATAGAGCGCAT
TGGGGGGGCCGCCCTCAGCCCCCATGCCCAGCACATCTCAGTGAATGCGAGGAACGTGGCATTGGAGG
CCTACCTCATCAAGCCGCACAGCTACGTGGGCCTGACCTGCACAGCCTTCCAGAGGAGGGAGGGAGGG
GTGCCGGGCACACGGCCAGGAAGCCCTGGCCAGAACCCCCCACCTGAGCCCGAGCCCCCAGCTGACCA
GCAGCTCCGCTTCCGCTGCACCACCGGGAGGCCCAATGTTTCTCTGTCGTCCTTCCACATCAAGAACA
GCGTGGCCCTGGCCTCCATCCAGCTGCCCCCGAGTCTATTCTCATCCCTTCCGGCTGCCCTGGCTCCC
CCGGTGCCCCCAGACTGCACCCTGCAACTGCTCGTCTTCCGAAATGGCCGCCTCTTCCACAGCCACAG
CAACACCTCCCGCCCTGGAGCTGCTGGGCCTGGCAAGAGGCGTGGCGTGGCCACCCCCGTCATCTTCG
CAGGAACCAGTGGCTGTGGCGTGGGAAACCTGACAGAGCCAGTGGCCGTTTCGCTGCGGCACTGGGCT
GAGGGAGCCGAACCTGTGGCCGCTTGGTGGAGCCAGGAGGGGCCCGGGGAGGCTGGGGGCTGGACCTC
GGAGGGCTGCCAGCTCCGCTCCAGCCAGCCCAATGTCAGCGCCCTGCACTGCCAGCACTTGGGCAATG
TGGCCGTGCTCATGGAGCTGAGCGCCTTTCCCAGGGAGGTGGGGGGCGCCGGGGCAGGGCTGCACCCC
GTGGTATACCCCTGCACGGCCTTGCTGCTGCTCTGCCTCTTCGCCACCATCATCACCTACATCCTCAA
CCACAGCTCCATCCGTGTGTCCCGGAAAGGCTGGCACATGCTGCTGAACTTGTGCTTCCACATAGCCA
TGACCTCTGCTGTCTTTGCGGGGGGCATCACACTCACCAACTACCAGATGGTCTGCCAGGCGGTGGGC
ATCACCCTGCACTACTCCTCCCTATCCACGCTGCTCTGGATGGGCGTGAAGGCGCGAGTGCTCCATAA
GGAGCTCACCTGGAGGGCACCCCCTCCGCAAGAAGGGGACCCCGCTCTGCCTACTCCCAGTCCTATGC
TCCGGTACATACTTTCAATTCCAGCTTTGCAATTGGGGAGGGACTCCAACGCAGGCGTAGGAAACCTC
CCAAGGTTCTATTTGATCGCTGGAGGGATTCCACTCATTATCTGTGGCATCACAGCTGCAGTCAACAT
CCACAACTACCGGGACCACAGCCCCTACTGCTGGCTGGTGTGGCGTCCAAGCCTTGGCGCCTTCTACA
TCCCTGTGGCTTTGATTCTGCTCATCACCTGGATCTATTTCCTGTGCGCCGGGCTACGCTTACGGGGT
CCTCTGGCACAGAACCCCAAGGCGGGCAACAGCAGGGCCTCCCTGGAGGCAGGGGAGGAGCTGAGGGG
TTCCACCAGGCTCAGGGGCAGCGGCCCCCTCCTGAGTGACTCAGGTTCCCTTCTTGCTACTGGGAGCG
CGCGAGTGGGGACGCCCGGGCCCCCGGAGGATGGTGACAGCCTCTATTCTCCGGGAGTCCAGCTAGGG
GCGCTGGTGACCACGCACTTCCTGTACTTGGCCATGTGGGCCTGCGGGGCTCTGGCAGTGTCCCAGCG
CTGGCTGCCCCGGGTGGTGTGCAGCTGCTTGTACGGGGTGGCAGCCTCCGCCCTGGGCCTCTTCGTCT
TCACTCACCACTGTGCCAGGCGGAGGGACGTGAGAGCCTCGTGGCGCGCCTGCTGCCCCCCTGCCTCT
CCCGCGGCCCCCCATGCCCCGCCCCGGGCCCTGCCCGCCGCCGCAGAGGACGGTTCCCCGGTGTTCGG
GGAGGGGCCCCCCTCCCTCAAGTCCTCCCCAAGCGGCAGCAGCGGCCATCCGCTGGCTCTGGGCCCCT
GCAAGCTCACCAACCTGCAGCTGGCCCAGAGTCAGGTGTGCGAGGCGGGGGCGGCGGCCGGCGGGGAA
GGAGAGCCGGAGCCGGCGGGCACCCGGGGAAACCTCGCCCACCGCCACCCCAACAACGTGCACCACGG
GCGTCGGGCGCACAAGAGCCGGGCCAAGGGACACCGCGCGGGGGAGGCCTGCGGCAAGAACCGGCTCA
AGGCCCTGCGCGGGGGCGCGGCGGGGGCGCTGGAACTGCTGTCCAGCGAGAGCGGTAGTCTGCACAAC
AGCCCCACCGACAGCTACCTGGGCAGCAGCCGCAACAGCCCGGGCGCCGGCCTGCAGCTGGAAGGCGA
GCCCATGCTCACGCCGTCCGAGGGCAGCGACACCAGCGCCGCGCCGCTTTCTGAGGCGGGCCGGGCAG
GCCAGCGCCGCAGCGCCAGCCGCGACAGTCTCAAGGGCGGCGGCGCGCTGGAGAAGGAGAGCCATCGC
CGCTCGTACCCGCTCAACGCCGCCAGCCTAAACGGCGCCCCCAAGGGGGGCAAGTACGACGACGTCAC
CCTGATGGGCGCGGAGGTAGCCAGCGGCGGCTGCATGAAGACCGGACTCTGGAAGAGCGAAACTACCG
TCTAAGGTGGGGCGGGCGACGCGGTAGACGGGTTGGCCACGCGGCTCGTTCCCCCGCTCCTCGGGGCC
CTCCAAGGTGTCTCCGTAGTCAGCAGGTTGGAGGCAGAGGAGCCGATGGCTGGAGGAAGCCCACAGGC
GGATGTTCCCCACTTGCCTAGAGGGCATCCCTCTGGGGTAGCGACAGACAATCCCAGAAACACGCATA
ATACATTTCCGTCCAGCCCGGGGCAGTCTGACTGTCGGTGCCCTCCCAGGAACGGGGAAGGCCTCCGT
CTGTGTGAAAGGGCACAGCACATCCCAGGTGCACCCTCCCCAAGTACTCCCACCCCGCCTACTGTCCA
TGCGGCCTCACTGGGGGCCATCAGCCTCACCAGCAAAGCAGAGATGAGAGCGTGGGAACTGTGTTCTT
TCCTCCCTGCCCTCTACTGATTTCAGCCCAGCCCCTGCCTAGATCCTAGGTCCCTTTTCCTCCCGAGT
TTGGCTGGCACGAGAGCTAGCCCAGCACATGAAGCAGGTGATGTTAAGTCACAAGGTGCTGCTTTTCA
GATCCACTATGCAAGAGGGGAGGGTGGGGCCACGTGAAAGGCAGCTCTAGACATCAACCAGTCCTGGG
GGAGGGGAGTGGGAACCGGGCACAACTAGGAACAATGCCACCATTCCCACAGGAGTGGTACTTAAACC
AGACAGCAGGGTTCAGAGGTGGCACACCGGGACAAAGCTGAGGCCCTGCACCTCAACAGCTGACTGCC
AGGTGCCTGTGGGTGAACTGAGGGGAGTAGAGGGAGAGGGCAGGTGGAACTGGGGCAGAATCTAGTCA
TGCCCTAAAGCTAGTCCTGTAAACAATGGTGCCCCAGAAAGCTGCAGGTGGTGTTTGGAGAAGCAGTT
ACTTTTCAGTTACAAGACCCATCTCCCTAGTCTCAGCCTTACAACACCACGGGACTAAGGAAGAGCAC
TTCCTTGCCTCCGTAAGGCCAGAGGAAGAACCATCCCAATCATTTGATCTCCAGCTCCACAGTAGAGA
GAAACCTACAAAATGTCAAACCAGCTTCCCGACTCCCAGGAGCTCAAGCCAAGCCCAGAGGCAGTGGC
TGGGGTCCCTGCAGGTCATGAGGGGCCTATGCCTTTACTCCTTTTAAACACCAGCACCCGTCTTTTCC
CCAACCTAAAACCAACCACCAGCATTTCACTACAGGACCAAATGGAAACCGAGGGAACCCTGGGTCTT
GGGAAGAACAACAGGAAACCAAGGTCTGACCTAGGGTTCCCTCCCAGTCTTCACATCACTCTGGCCTC
ATCACCAAGGTGACAGAGGACACAGGGGAGGGGGAAAACCCACACACACTCCTTGGAATGGGTCCTGT
TATTTATGCTTGCTGCACAGACATATTAGAAGAAAAAAAAAAAGCTTTGTATTATTCTTCCACATATG
CTGGCTGCTGTTTACACACCCTGCCAATGCCTTAGCACTGGAGAGCTTTTTGCAATATGCTGGGGAAA
GGGGAGGGAGGGAATGAAAGTGCCAAAGAAAACATGTTTTTAAGAACTCGGGTTTTATACAATAGAAT
GTTTTCTAGCAGATGCCTCTTGTTTTAATATATTAAAATTTTGCAAAGCCCTTTGAGCTACTGCCTTA
GTCTACCCACTGTCCTTTTGTTATGAGGTAGAGGATCTCATGACACCATACACACAAACCCATCATTG
CCTGTGAATGCACGTAGGGCCAGAATTCCCCAGTTCCCGCTCCTCTGAGGGTTGATACTGCTGGGAAT
GCCAACCACTCCACAAGCAGAGGGAAGCCCCCTCAGGCCTGCAGGAGGAGCCGCAGCAGTGTGTCCAA
TTCAAACCAGCAGCAAAGAGCCTGACATTTTCCCATCCATCTATGAGGAAAGCCATCTCACAGAACAT
GGACATAGGCAACTTGCTCTCCCACACCAAGGGATGGGAATCTCTCCTACCTATAGTCATCCCTGCAC
TCCTGACTTTACTCCAGGACCCAGGGTCCAACTAATGGCAGAGCCCCTCTTGGTTCCTTCAAACAAGA
AAAGCAATACCTACGGACTGGTGTACACTTCCATCCTTGGTTATAACAGGAATGTTATCAAGCTGTCA
GAACAGGATGAAGTGCTCCCAGTGGATATCCATCAGGGAGGGTTAGGGACACTCGTGGCAGCCTGTCT
AGCAGCCTGGGCTCTCTGAAAGTCCCTAACTTCCTGAGGGGTACGCAAATACTGTTCTATTTCACTAT
CAGAAATGTTCTCATCTCCAGTGACAGTGGAGACAGGGGGTACAGGGCAGATCCGCTTCGGGGACTTC
AACATGCAGGGTGGCAAGAGAAGGGCAGGACTGGCCGGCCGCTTCCCCTGGGGTAAACCTAAGGAATT
ATTTCCCACCTCCCCTTCTCCTTGCCCCTGTCCCCACCCCGGTGGCTCCTTCTCTCGGGTCTCCACTT
CTGCTGTCCCATCCCGAAAGGCAGAGCGGACCAGTGACTGGCGGTGCTGGAGAAGGTCACCGATGTGC
TTCACCACAGACCGTTTGTCAAGTCTCAGAACTCGTAACCAGGCCAGCTGCTCAGCCATCCGCAGCAG
CACAGCCAGCAGCTCCTGCAGGCGGGAGGACGCCGGGTAGGGCAGGTCCACATTTGCCAATTTACAAA
ATCGGGCAAGGGAACATGAAAGCCGATCTGCAGGCTGCAGCGACTGCCAAGCCAGGAAAGTCGCAGCA
GTGATGACGGGCAAGGGATGCCTCCCGGTCACCAGCCACGTCTCATTTGCCAGCTCCACCAACTGCAT
TGTTCGAGACAGCATCTTCTCTTTGTCTTCCACGTATTTGGCTGGCACAGAAGGTGAAGCTTGGAACA
GTTTGAAGCTGAAATAACCAAAATGAGGGTTGGATCTTAATGATATAGGGGCTGCTCTCCCACAGTGA
GGAAAGACAGCCCACTCAAGATGGGGAAGCTATTCTGCCCTCAGGAATACTCAAGCTCACTGGGCAGC
AAGTTAATAAAGGTAGTGAGAGAAAACAGGGCGTCTTCCGCTTGTTAGGGGAAGGTGGAGGGATGGAG
GAGAGCACGAACATTTATTGGGCGCCTCCCAATCACCATTATTCTGAGTGCTTTACAACGTTCTCATT
TAATCTACGTGCACGTGCACCATCTTATGTGCATGTATAGTTAAAAAACTTTCCCATAGTCATCCAGC
CAGGCAGTAACCAAGCTTCAAATACAAGGCTATTTGACACCAACAGCCTCTACTTTCAACGTTATTTA
TCAG

| | | | |
|---|---|---|---|
| NOV10a, CG50925-01 | SEQ ID NO: 258 | 1542 aa | MW at 164901.2kD |
| Protein Sequence | | | |

MRGAPARLLLPLLPWLLLLLAPEARGAPGCPLSIRSCKCSGERPKGLSGGVPGPARRRVVCSGGDLPE
PPEPGLLPNGTVTLGNRFSTAPCPQSGLAQSFRLCPEQYSNASGWVSSEAARFLTGHNWSASDAGRPA
CIFPGPVSWRQVPAYNAGQDQGSKYSFYGGKVKDEYLRRSPICRSAAALHTDTSARSWSEFRLLSNNK
ITGLRNGSFLGLSLLEKLLMRAHFSDEDEKTACPSPAPRLWRLHSKCTLSMAGNQKNQGGSSSQEAAS
GLMPSRRLQRGEVEGLCTCLCTDLRNNIISTVQPGAFLGLGELKRLDLSNNRIGCLTSETFQGLPRLL
RLNISGNIFSSLQPGVFDELPALKVVDLGTEFLTCDCHLRWLLPWAQNRSLQLSEHTLCAYPSALHAH
ALGSLQEAQLCCEGALELHTHHLIPSLRQVVFQGDRLPFQCSASYLGNDTRIRWYHNRAPVEGDEQAG
ILLAESLIHDCTFITSELTLSHIGVWASGEWECTVSMAQGNASKKVEIVVLETSASYCPAERVANNRG
DFRWPRTLAGITAYQSCLQYPFTSVPLGGGAPGTRASRRCDRAGRWEPGDYSHCLYTNDITRVLYTFV
LMPINASNALTLAHQLRVYTAEAASFSDNMDVVYVAQMIQKFLGYVDQIKELVEVMVDMPSNLMLVDE
HLLWLAQREDKACSRIVGAIERIGGAALSPHAQHISVNARNVALEAYLIKPHSYVGLTCTAFQRREGG
VPGTRPGSPGQNPPPEPEPPADQQLRFRCTTGRPNVSLSSFHIKNSVALASIQLPPSLFSSLPAALAP
PVPPDCTLQLLVFRNGRLFHSHSNTSRPGAAGPGKRRGVATPVIFAGTSGCGVGNLTEPVAVSLRHWA
EGAEPVAAWWSQEGPGEAGGWTSEGCQLRSSQPNVSALHCQHLGNVAVLMELSAFPREVGGAGAGLHP
VVYPCTALLLLCLFATIITYILNHSSIRVSRKGWHMLLNLCFHIAMTSAVFAGGITLTNYQMVCQAVG
ITLHYSSLSTLLWMGVKARVLHKELTWRAPPPQEGDPALPTPSPMLRYILSIPALQLGRDSNAGVGNL
PRFYLIAGGIPLIICGITAAVNIHNYRDHSPYCWLVWRPSLGAFYIPVALILLITWIYFLCAGLRLRG
PLAQNPKAGNSRASLEAGEELRGSTRLRGSGPLLSDSGSLLATGSARVGTPGPPEDGDSLYSPGVQLG
ALVTTHFLYLAMWACGALAVSQRWLPRVVCSCLYGVAASALGLFVFTHHCARRRDVRASWRACCPPAS
PAAPHAPPRALPAAAEDGSPVFGEGPPSLKSSPSGSSGHPLALGPCKLTNLQLAQSQVCEAGAAAGGE
GEPEPAGTRGNLAHRHPNNVHHGRRAHKSRAKGHRAGEACGKNRLKALRGGAAGALELLSSESGSLHN
SPTDSYLGSSRNSPGAGLQLEGEPMLTPSEGSDTSAAPLSEAGRAGQRRSASRDSLKGGGALEKESHR
RSYPLNAASLNGAPKGGKYDDVTLMGAEVASGGCMKTGLWKSETTV

| | | |
|---|---|---|
| NOV10b, CG50925-08 | SEQ ID NO: 259 | 4103 bp |
| DNA Sequence | ORF Start: ATG at 1 | ORF Stop: TAA at 3991 |

ATGCGGGGGGCGCCCGCGCGCCTGCTGCTGCCGCTGCTGCCGTGGCTCCTGCTGCTCCTGGCGCCCGA
GGCTCGGGGCGCGCCCGGCTGCCCGCTATCCATCCGCAGCTGCAAGTGCTCGGGGGAGCGGCCCAAGG
GGCTGAGCGGCGGCGTCCCTGGCCCGGCTCGGCGGAGGGTGGTGTGCAGCGGCGGGGACCTCCCGGAG
CCTCCCGAGCCCGGCCTTCTGCCTAACGGCACCGTTACCCTTGACCTGAGGAACAACATCATCAGCAC
AGTGCAGCCGGGCGCCTTCCTGGGCCTGGGGGAGCTGAAGCGTTTAGATCTCTCCAACAACCGGATTG
GCTGTCTCACCTCCGAGACCTTCCAGGGCCTCCCCAGGCTTCTCCGACTAAACATATCTGGAAACATC
TTCTCCAGTCTGCAACCTGGGGTCTTTGATGAGCTGCCAGCCCTTAAGGTTGTGGACTTGGGCACCGA
GTTCCTGACCTGTGACTGCCACCTGCGCTGGCTGCTGCCCTGGGCCCAGAATCGCTCCCTGCAGCTGT
CGGAACACACGCTCTGTGCTTACCCCAGTGCCCTGCATGCTCATGCCCTGGGCAGCCTCCAGGAGGCC
CAGCTCTGCTGCGAGGGGGCCCTGGAGCTGCACACACACCACCTCATCCCGTCCCTACGCCAAGTGGT
GTTCCAGGGGGATCGGCTGCCCTTCCAGTGCTCTGCCAGCTACCTGGGCAACGACACCCGCATCCGCT
GGTACCACAACCGAGCCCCTGTGGAGGGTGATGAGCAGGCGGGCATCCTCCTGGCCGAGAGCCTCATC
CACGACTGCACCTTCATCACCAGTGAGCTGACGCTGTCTCACATCGGCGTGTGGGCCTCAGGCGAGTG
GGAGTGCACCGTGTCCATGGCCCAAGGCAACGCCAGCAAGAAGGTGGAGATCGTGGTGCTGGAGACCT
CTGCCTCCTACTGCCCCGCCGAGCGTGTTGCCAACAACCGCGGGGACTTCAGGTGGCCCCGAACTCTG
GCTGGCATCACAGCCTACCAGTCCTGCCTGCAGTATCCCTTCACCTCAGTGCCCCTGGGCGGGGGTGC
CCCGGGCACCCGAGCCTCCCGCCGGTGTGACCGTGCCGGCCGCTGGGAGTCAGGGGACTACTCCCACT
GTCTCTACACCAACGACATCACCAGGGTGCTGTACACCTTCGTGCTGATGCCCATCAATGCCTCCAAT
GCGCTGACCCTGGCTCACCAGCTGCGCGTGTACACAGCCGAGGCCGCTAGCTTTTCAGACATGATGGA
TGTAGTCTATGTGGCTCAGATGATCCAGAAATTTTTGGGTTATGTCGACCAGATCAAAGAGCTGGTAG
AGGTGATGGTGGACATGGCCAGCAACTTGATGCTGGTGGACGAGCACCTGCTGTGGCTGGCCCAGCGC
GAGGACAAGGCCTGCAGCCGCATCGTGGGTGCCCTGGAGCGCATTGGGGGGGCCGCCCTCAGCCCCCA
TGCCCAGCACATCTCAGTGAATGCGAGGAACGTGGCATTGGAGGCCTACCTCATCAAGCCGCACAGCT
ACGTGGGCCTGACCTGCACAGCCTTCCAGAGGAGGGAGGGAGGGGTGCCGGGCACACGGCCAGGAAGC
CCTGGCCAGAACCCCCCACCTGAGCCCGAGCCCCCAGCTGACCAGCAGCTCCGCTTCCGCTGCACCAC
CGGGAGGCCCAATGTTTCTCTGTCGTCCTTCCACATCAAGAACAGCGTGGCCCTGGCCTCCATCCAGC
TGCCCCCGAGTCTATTCTCATCCCTTCCGGCTGCCCTGGCTCCCCCGGTGCCCCCAGACTGCACCCTG
CAACTGCTCGTCTTCCGAAATGGCCGCCTCTTCCACAGCCACAGCAACACCTCCCGCCCTGGAGCTGC
TGGGCCTGGCAAGAGGCGTGGCGTGGCCACCCCCGTCATCTTCGCAGGAACCAGTGGCTGTGGCGTGG
GAAACCTGACAGAGCCAGTGGCCGTTTCGCTGCGGCACTGGGCTGAGGGAGCCGAACCTGTGGCCGCT
TGTTGGAGCCAGGAGGGGCCCGGGGAGGCTGGGGGCTGGACCTCGGAGGGCTGCCAGCTCCGCTCCAG
CCAGCCCAATGTCAGCGCCCTGCACTGCCAGCACTTGGGCAATGTGGCCGTGCTCATGGAGCTGAGCG
CCTTTCCCAGGGAGGTGGGGGGCGCCGGGGCAGGGCTGCACCCCGTGGTATACCCCTGCACGGCCTTG
CTGCTGCTCTGCCTCTTCGCCACCATCATCACCTACATCCTCAACCACAGCTCCATCCGTGTGTCCCG
GAAAGGCTGGCACATGCTGCTGAACTTGTGCTTCCACATAGCCATGACCTCTGCTGTCTTTGCGGGGG
GCATCACACTCACCAACTACCAGATGGTCTGCCAGGCGGTGGGCATCACCCTGCACTACTCCTCCCTA
TCCACGCTGCTCTGGATGGGCGTGAAGGCGCGAGTGCTCCATAAGGAGCTCACCTGGAGGGCACCCCC
TCCGCAAGAAGGGGACCCCGCTCTGCCTACTCCCAGTCCTATGCTCCGGTACATACTTTCAATTCCAG
CTTTGCAATTGGGGAGGGACTCCAACGCAGGCGTAGGAAACCTCCCAAGGTTCTATTTGATCGCTGGA
GGGATTCCACTCATTATCTGTGGCATCACAGCTGCAGTCAACATTCACAACTACCGGGACCACAGCCC
CTACTGCTGGCTGGTGTGGCGTCCAAGCCTTGGCGCCTTCTACATCCCTGTGGCTTTGATTCTGCTCA
TCACCTGGATCTATTTCCTGTGCGCCGGGCTACGCTTACGGGGTCCTCTGGCACAGAACCCCAAGGCG
GGCAACAGCAGGGCCTCCCTGGAGGCAGGGGAGGAGCTGAGGGGTTCCACCAGGCTCAGGGGCAGCGG
CCCCCTCCTGAGTGACTCAGGTTCCCTTCTTGCTACTGGGAGCGCGCGAGTGGGGACGCCCGGGCCCC
CGGAGGATGGTGACAGCCTCTATTCTCCGGGAGTCCAGCTAGGGGCGCTGGTGACCACGCACTTCCTG
TACTTGGCCATGTGGGCCTGCGGGGCTCTGGCAGTGTCCCAGCGCTGGCTGCCCCGGGTGGTGTGCAG
CTGCTTGTACGGGGTGGCAGCCTCCGCCCTGGGCCTCTTCGTCTTCACTCACCACTGTGCCAGGCGGA
GGGACGTGAGAGCCTCGTGGCGCGCCTGCTGCCCCCCTGCCTCTCCCGCGGCCCCCCATGCCCCGCCC
CGGGCCCTGCCCGCCGCCGCAGAGGACGGTTCCCCGGTGTTCGGGGAGGGGCCCCCCTCCCTCAAGTC
CTCCCCAAGCGGCAGCAGCGGCCATCCGCTGGCTCTGGGCCCCTGCAAGCTCACCAACCTGCAGCTGG
CCCAGAGTCAGGTGTGCGAGGCGGGGGCGGCGGCCGGCGGGGAAGGAGAGCCGGAGCCGGCGGGCACC
CGGGGAAACCTCGCCCACCGCCACCCCAACAACGTGCACCACGGGCGTCGGGCGCACAAGAGCCGGGC
CAAGGGACACCGCGCGGGGGAGGCCTGCGGCAAGAACCGGCTCAAGGCCCTGCGCGGGGGCGCGGCGG
GGGCGCTGGAACTGCTGTCCAGCGAGAGCGGTAGTCTGCACAACAGCCCCACCGACAGCTACCTGGGC
AGCAGCCGCAACAGCCCGGGCGCCGGCCTGCAGCTGGAAGGCGAGCCCATGCTCACGCCGTCCGAGGG
CAGCGACACCAGCGCCGCGCCGCTTTCTGAGGCGGGCCGGGCAGGCCAGCGCCGCAGCGCCAGCCGCG
ACAGTCTCAAGGGCGGCGGCGCGCTGGAGAAGGAGAGCCATCGCCGCTCGTACCCGCTCAACGCCGCC
AGCCTAAACGGCGCCCCCAAGGGGGGCAAGTACGACGACGTCACCCTGATGGGCGCGGAGGTAGCCAG
CGGCGGCTGCATGAAGACCGGACTCTGGAAGAGCGAAACTACCGTCTAAGGTGGGGCGGGCGACGCGG
TAGACGGGTTGGCCACGCGGCTCGTTCCCCCGCTCCTCGGGGCCCTCCAAGGTGTCTCCGTAGTCAGC
AGGTTGGAGGCAGAGGAGCCGAT

| | | | |
|---|---|---|---|
| NOV10b, CG50925-08 | SEQ ID NO: 260 | 1330 aa | MW at 141782.5kD |
| Protein Sequence | | | |

MRGAPARLLLPLLPWLLLLLAPEARGAPGCPLSIRSCKCSGERPKGLSGGVPGPARRRVVCSGGDLPE
PPEPGLLPNGTVTLDLRNNIISTVQPGAFLGLGELKRLDLSNNRIGCLTSETFQGLPRLLRLNISGNI
FSSLQPGVFDELPALKVVDLGTEFLTCDCHLRWLLPWAQNRSLQLSEHTLCAYPSALHAHALGSLQEA
QLCCEGALELHTHHLIPSLRQVVFQGDRLPFQCSASYLGNDTRIRWYHNRAPVEGDEQAGILLAESLI
HDCTFITSELTLSHIGVWASGEWECTVSMAQGNASKKVEIVVLETSASYCPAERVANNRGDFRWPRTL
AGITAYQSCLQYPFTSVPLGGGAPGTRASRRCDRAGRWESGDYSHCLYTNDITRVLYTFVLMPINASN
ALTLAHQLRVYTAEAASFSDMMDVVYVAQMIQKFLGYVDQIKELVEVMVDMASNLMLVDEHLLWLAQR
EDKACSRIVGALERIGGAALSPHAQHISVNARNVALEAYLIKPHSYVGLTCTAFQRREGGVPGTRPGS
PGQNPPPEPEPPADQQLRFRCTTGRPNVSLSSFHIKNSVALASIQLPPSLFSSLPAALAPPVPPDCTL
QLLVFRNGRLFHSHSNTSRPGAAGPGKRRGVATPVIFAGTSGCGVGNLTEPVAVSLRHWAEGAEPVAA
WWSQEGPGEAGGWTSEGCQLRSSQPNVSALHCQHLGNVAVLMELSAFPREVGGAGAGLHPVVYPCTAL
LLLCLFATIITYILNHSSIRVSRKGWHMLLNLCFHIAMTSAVFAGGITLTNYQMVCQAVGITLHYSSL
STLLWMGVKARVLHKELTWEAPPPQEGDPALPTPSPMLRYILSIPALQLGRDSNAGVGNLPRFYLIAG
GIPLIICGITAAVNIHNYRDHSPYCWLVWRPSLGAFYIPVALILLITWIYFLCAGLRLRGPLAQNPKA
GNSRASLEAGEELRGSTRLRGSGPLLSDSGSLLATGSARVGTPGPPEDGDSLYSPGVQLGALVTTHFL
YLAMWACGALAVSQRWLPRVVCSCLYGVAASALGLFVFTHHCARRRDVRASWRACCPPASPAAPHAPP
RALPAAAEDGSPVFGEGPPSLKSSPSGSSGHPLALGPCKLTNLQIAQSQVCEAGAAAGGEGEPEPAGT
RGNLAHRHPNNVHHGRRAHKSRAKGHRAGEACGKNRLKALRGGAAGALELLSSESGSLHNSPTDSYLG
SSRNSPGAGLQLEGEPMLTPSEGSDTSAAPLSEAGRAGQRRSASRDSLKGGGALEKESHPRSYPLNAA
SLNGAPKGGKYDDVTLMGAEVASGGCMKTGLWKSETTV

| | | |
|---|---|---|
| NOV10c, 226990087 | SEQ ID NO: 261 | 341 bp |
| DNA Sequence | ORF Start: at 3 | ORF Stop: end of sequence |

CAACCGGATCCGAGCTGAAGCGTTTAGATCTCTCCAACAACCGGATTGGCTGTCTCACCTCCGAGACC
TTCCAGGGCCTCCCCAGGCTTCTCCGACTAAACATATCTGGAAACATCTTCTCCAGTCTGCAACCTGG
GGTCTTTGATGAGCTGCCAGCCCTTAAGGTTGTGGACTTGGGCACCGAGTTCCTGACCTGTGACTGCC
ACCTGCGCTGGCTGCTGCCCTGGGCCCAGAATCGCTCCCTGCAGCTGTCGGAACACACGCTCTGTGCT
TACCCCAGTGCCCTGCATGCTCAGGCCCTGGGCAGCCTCCAGGAGGCCCAGCTCTGCTGCGAGCTCGA
G

| | | | |
|---|---|---|---|
| NOV10c, 226990087 | SEQ ID NO: 262 | 113 aa | MW at 12539.2kD |
| Protein Sequence | | | |

TGSELKRLDLSNNRIGCLTSETFQGLPRLLRLNISGNIFSSLQPGVFDELPALKVVDLGTEFLTCDCH
LRWLLPWAQNRSLQLSEHTLCAYPSALHAQALGSLQEAQLCCELE

| | | |
|---|---|---|
| NOV10d, 320054488 | SEQ ID NO: 263 | 2227 bp |
| DNA Sequence | ORF Start: at 2 | ORF Stop: end of sequence |

CACCGGATCCGCGCCCGGCTGCCCGCTATCCATCCGCAGCTGCAAGTGCTCGGGGGAGCGGGCCAAGG
GGCTGAGCGGCGGCGTCCCTGGCCCGGCTCGGCGGAGGGTGGTGTGCAGCGGCGGGGACCTCCCGGAG
CCTCCCGAGCCCGGCCTTCTGCCTAACGGCACCGTTACCCTGCTCTTGAGCAATAACAAGATCACGGG
GCTCCGCAATGGCTCCTTCCTGGGACTGTCACTGCTGGAGAAGCTGGACCTGAGGAACAACATCATCA
GCACAGTGCAGCCGGGCGCCTTCCTGGGCCTGGGGGAGCTGAAGCGTTTAGATCTCTCCAACAACCGG
ATTGGCTGTCTCACCTCCGAGACCTTCCAGGGCCTCCCCAGGCTTCTCCGACTAAACATATCTGGAAA
CATCTTCTCCAGTCTGCAACCTGGGGTCTTTGATGAGCTGCCAGCCCTTAAGGTTGTGGACTTGGGCA
CCGAGTTCCTGACCTGTGACTGCCACCTGCGCTGGCTGCTGCCCTGGGCCCAGAATCGCTCCCTGCAG
CTGTCGGAACACACGCTCTGTGCTTACCCCAGTGCCCTGCATGCTCAGGCCCTGGGCAGCCTCCAGGA
GGCCCAGCTCTGCTGCGAGGGGGCCCTGGAGCTGCACACACACCACCTCATCCCGTCCCTACGCCAAG
TGGTGTTCCAGGGGGATCGGCTGCCCTTCCAGTGCTCTGCCAGCTACCTGGGCAACGACACCCGCATC
CGCTGGTACCACGACCGAGCCCCTGTGGAGGGTGATGAGCAGGCGGGCATCCTCCTGGCCGAGAGCCT
CATCCACGACTGCACCTTCATCACCAGTGAGCTGACGCTGTCTCACATCGGCGTGTGGGCCTCAGGCG
AGTGGGAGTGCACCGTGTCCATGGCCCAAGGCAACGCCAGCAAGAAGGTGGAGATCGTGGTGCTGGAG
ACCTCTGCCTCCTACTGCCCCGCCGAGCGTGTTGCCAACAACCGCGGGGACTTCAGGTGGCCCCGAAC
TCTGGCTGGCATCACAGCCTACCAGTCCTGCCTGCAGTATCCCTTCACCTCAGTGCCCCTGGGCGGGG
GTGCCCCGGGCACCCGAGCCTCCCGCCGGTGTGACCGTGCCGGCCGCTGGGAGCCAGGGGACTACTCC
CACTGTCTCTACACCAACGACATCACCAGGGTGCTGTACACCTTCGTGCTGATGCCCATCAATGCCTC
CAATGCGCTGACCCTGGCTCACCAGCTGCGCGTGTACACAGCCGAGGCCGCTAGCTTTTCAGACATGA
TGGATGTAGTCTATGTGGCTCAGATGATCCAGAAATTTTTGGGTTATGTCGACCAGATCAAAGAGCTG
GTAGAGGTGATGGTGGACATGGCCAGCAACCTGATGCTGGTGGACGAGCACCTGCTGTGGCTGGCCCA
GCGCGAGGACAAGGCCTGCAGCCGCATCGTGGGTGCCCTGGAGCGCATTGGGGGGGCCGCCCTCAGCC
CCCATGCCCAGCACATCTCAGTGAATGCGAGGAACGTGGCATTGGAGGCCTACCTCATCAAGCCGCAC
AGCTACGTGGGCCTGACCTGCACAGCCTTCCAGAGGAGGGAGGGAGGGGTGCCGGGCACACGGCCAGG
AAGCCCTGGCCAGAACCCCCCACCTGAGCCCGAGCCCCCAGCTGACCAGCAGCTCCGCTTCCGCTGCA
CCACCGGGAGGCCCAATGTTTCTCTGTCGTCCTTCCACATCAAGAACAGCGTGGCCCTGGCCTCCATC
CAGCTGCCCCCGAGTCTATTCTCATCCCTTCCGGCTGCCCTGGCTCCCCCGGTGCCCCCAGACTGCAC
CCTGCAACTGCTCGTCTTCCGAAATGGCCGCCTCTTCCACAGCCACAGCAACACCTCCCGCCCTGGAG
CTGCTGGGCCTGGCAAGAGGCGTGGCGTGGCCACCCCCGTCATCTTCGCAGGAACCAGTGGCTGTGGC
GTGGGAAACCTGACAGAGCCAGTGGCCGTTTCGCTGCGGCACTGGGCTGAGGGAGCCGAACCTGTGGC
CGCTTGGTGGAGCCAGGAGGGGCCCGGGGAGGCTGGGGGCTGGACCTCGGAGGGCTGCCAGCTCCGCT
CCAGCCAGCCCAATGTCAGCGCCCTGCACTGCCAGCACTTGGGCAATGTGGCCGTGCTCATGGAGCTG
AGCGCCTTTCCCAGGGAGGTGGGGGGCGCCGGGGCAGGGCTGCTCGAGGGC

| | | | |
|---|---|---|---|
| NOV10d, 320054488 | SEQ ID NO: 264 | 742 aa | MW at 79823.1kD |
| Protein Sequence | | | |

TGSAPGCPLSIRSCKCSGEPAKGLSGGVPGPARRRVVCSGGDLPEPPEPGLLPNGTVTLLLSNNKITG
LRNGSFLGLSLLEKLDLRNNIISTVQPGAFLGLGELKRLDLSNNRIGCLTSETFQGLPRLLRLNISGN
IFSSLQPGVFDELPALKVVDLGTEFLTCDCHLRWLLPWAQNRSLQLSEHTLCAYPSALHAQALGSLQE
AQLCCEGALELHTHHLIPSLRQVVFQGDRLPFQCSASYLGNDTRIRWYHDRAPVEGDEQAGILLAESL
IHDCTFITSELTLSHIGVWASGEWECTVSMAQGNASKKVEIVVLETSASYCPAERVANNRGDFRWPRT
LAGITAYQSCLQYPFTSVPLGGGAPGTRASRRCDPAGRWEPGDYSHCLYTNDITRVLYTFVLMPINAS
NALTLAHQLRVYTAEAASFSDMMDVVYVAQMIQKFLGYVDQIKELVEVMVDMASNLMLVDEHLLWLAQ
REDKACSRIVGALERIGGAALSPHAQHISVNARNVALEAYLIKPHSYVGLTCTAFQRREGGVPGTRPG
SPGQNPPPEPEPPADQQLRFRCTTGRPNVSLSSFHIKNSVALASIQLPPSLFSSLPAALAPPVPPDCT
LQLLVFRNGRLFHSHSNTSRPGAAGPGKRRGVATPVIFAGTSGCGVGNLTEPVAVSLRHWAEGAEPVA
AWWSQEGPGEAGGWTSEGCQLRSSQPNVSALHCQHLGNVAVLMELSAFPREVGGAGAGLLEG

| | | |
|---|---|---|
| NOV10e, CG50925-02 | SEQ ID NO: 265 | 7860 bp |
| DNA Sequence | ORF Start: ATG at 1 | ORF Stop: TAA at 4627 |

ATGCGGGGGGCGCCCGCGCGCCTGCTGCTGCCGCTGCTGCCGTGGCTCCTGCTGCTCCTGGCGCCCGA
GGCTCGGGGCGCGCCCGGCTGCCCGCTATCCATCCGCAGCTGCAAGTGCTCGGGGGAGCGGCCCAAGG
GGCTGAGCGGCGGCGTCCCTGGCCCGGCTCGGCGGAGGGTGGTGTGCAGCGGCGGGGACCTCCCGGAG
CCTCCCGAGCCCGGCCTTCTGCCTAACGGCACCGTTACCCTTGGCAACCGTTTCTCCACTGCCCCTTG
CCCGCAGTCGGGGCTGGCCCAGTCTTTTCGATTGTGTCCAGAACAATACAGTAACGCCTCTGGTTGGG
TGAGTTCAGAGGCTGCCCGCTTCCTGACAGGACACAACTGGTCAGCCTCTGACGCTGGCCGCCCGGCC
TGCATTTTCCCCGGCCCGGTCTCCTGGAGACAGGTACCAGCTTACAACGCCGGACAGGATCAGGGTAG
CAAATATAGCTTCTATGGAGGAAAGGTCAAAGATGAGTATCTGCGTAGGTCCCCGATCTGTCGCTCTG
CTGCCGCCCTGCACACTGACACCAGTGCCCGCAGCTGGTCTGAATTTAGGCTCTTGAGCAATAACAAG
ATCACGGGGCTCCGCAATGGCTCCTTCCTGGGACTGTCACTGCTGGAGAAGCTTCTCATGAGAGCACA
TTTTTCTGATGAAGATGAAAAGACGGCCTGTCCTTCTCCAGCACCAAGGCTCTGGAGGCTGCATAGCA
AGTGCACCCTGAGCATGGCAGGCAATCAGAAGAACCAGGGCGGCAGCAGCTCACAAGAGGCAGCATCT
GGCTTGATGCCGAGTCGGCGGCTCCAGCGGGGAGAGGTTGAGGGCCTCTGCACTTGCCTCTGCACGGA
CCTGAGGAACAACATCATCAGCACAGTGCAGCCGGGCGCCTTCCTGGGCCTGGGGGAGCTGAAGCGTT
TAGATCTCTCCAACAACCGGATTGGCTGTCTCACCTCCGAGACCTTCCAGGGCCTCCCCAGGCTTCTC
CGACTAAACATATCTGGAAACATCTTCTCCAGTCTGCAACCTGGGGTCTTTGATGAGCTGCCAGCCCT
TAAGGTTGTGGACTTGGGCACCGAGTTCCTGACCTGTGACTGCCACCTGCGCTGGCTGCTGCCCTGGG
CCCAGAATCGCTCCCTGCAGCTGTCGGAACACACGCTCTGTGCTTACCCCAGTGCCCTGCATGCTCAT
GCCCTGGGCAGCCTCCAGGAGGCCCAGCTCTGCTGCGAGGGGGCCCTGGAGCTGCACACACACCACCT
CATCCCGTCCCTACGCCAAGTGGTGTTCCAGGGGGATCGGCTGCCCTTCCAGTGCTCTGCCAGCTACC
TGGGCAACGACACCCGCATCCGCTGGTACCACAACCGAGCCCCTGTGGAGGGTGATGAGCAGGCGGGC
ATCCTCCTGGCCGAGAGCCTCATCCACGACTGCACCTTCATCACCAGTGAGCTGACGCTGTCTCACAT
CGGCGTGTGGGCCTCAGGCGAGTGGGAGTGCACCGTGTCCATGGCCCAAGGCAACGCCAGCAAGAAGG
TGGAGATCGTGGTGCTGGAGACCTCTGCCTCCTACTGCCCCGCCGAGCGTGTTGCCAACAACCGCGGG
GACTTCAGGTGGCCCCGAACTCTGGCTGGCATCACAGCCTACCAGTCCTGCCTGCAGTATCCCTTCAC
CTCAGTGCCCCTGGGCGGGGGTGCCCCGGGCACCCGAGCCTCCCGCCGGTGTGACCGTGCCGGCCGCT
GGGAGCCAGGGGACTACTCCCACTGTCTCTACACCAACGACATCACCAGGGTGCTGTACACCTTCGTG
CTGATGCCCATCAATGCCTCCAATGCGCTGACCCTGGCTCACCAGCTGCGCGTGTACACAGCCGAGGC
CGCTAGCTTTTCAGACATGATGGATGTAGTCTATGTGGCTCAGATGATCCAGAAATTTTTGGGTTATG
TCGACCAGATCAAAGAGCTGGTAGAGGTGATGGTGGACATGCCCAGCAACTTGATGCTGGTGGACGAG
CACCTGCTGTGGCTGGCCCAGCGCGAGGACAAGGCCTGCAGCCGCATCGTGGGTGCCATAGAGCGCAT
TGGGGGGGCCGCCCTCAGCCCCCATGCCCAGCACATCTCAGTGAATGCGAGGAACGTGGCATTGGAGG
CCTACCTCATCAAGCCGCACAGCTACGTGGGCCTGACCTGCACAGCCTTCCAGAGGAGGGAGGGAGGG
GTGCCGGGCACACGGCCAGGAAGCCCTGGCCAGAACCCCCCACCTGAGCCCGAGCCCCCAGCTGACCA
GCAGCTCCGCTTCCGCTGCACCACCGGGAGGCCCAATGTTTCTCTGTCGTCCTTCCACATCAAGAACA
GCGTGGCCCTGGCCTCCATCCAGCTGCCCCCGAGTCTATTCTCATCCCTTCCGGCTGCCCTGGCTCCC
CCGGTGCCCCCAGACTGCACCCTGCAACTGCTCGTCTTCCGAAATGGCCGCCTCTTCCACAGCCACAG
CAACACCTCCCGCCCTGGAGCTGCTGGGCCTGGCAAGAGGCGTGGCGTGGCCACCCCCGTCATCTTCG
CAGGAACCAGTGGCTGTGGCGTGGGAAACCTGACAGAGCCAGTGGCCGTTTCGCTGCGGCACTGGGCT
GAGGGAGCCGAACCTGTGGCCGCTTGGTGGAGCCAGGAGGGGCCCGGGGAGGCTGGGGGCTGGACCTC
GGAGGGCTGCCAGCTCCGCTCCAGCCAGCCCAATGTCAGCGCCCTGCACTGCCAGCACTTGGGCAATG
TGGCCGTGCTCATGGAGCTGAGCGCCTTTCCCAGGGAGGTGGGGGGCGCCGGGGCAGGGCTGCACCCC
GTGGTATACCCCTGCACGGCCTTGCTGCTGCTCTGCCTCTTCGCCACCATCATCACCTACATCCTCAA
CCACAGCTCCATCCGTGTGTCCCGGAAAGGCTGGCACATGCTGCTGAACTTGTGCTTCCACATAGCCA
TGACCTCTGCTGTCTTTGCGGGGGGCATCACACTCACCAACTACCAGATGGTCTGCCAGGCGGTGGGC
ATCACCCTGCACTACTCCTCCCTATCCACGCTGCTCTGGATGGGCGTGAAGGCGCGAGTGCTCCATAA
GGAGCTCACCTGGAGGGCACCCCCTCCGCAAGAAGGGGACCCCGCTCTGCCTACTCCCAGTCCTATGC
TCCGGTACATACTTTCAATTCCAGCTTTGCAATTGGGGAGGGACTCCAACGCAGGCGTAGGAAACCTC
CCAAGGTTCTATTTGATCGCTGGAGGGATTCCACTCATTATCTGTGGCATCACAGCTGCAGTCAACAT
CCACAACTACCGGGACCACAGCCCCTACTGCTGGCTGGTGTGGCGTCCAAGCCTTGGCGCCTTCTACA
TCCCTGTGGCTTTGATTCTGCTCATCACCTGGATCTATTTCCTGTGCGCCGGGCTACGCTTACGGGGT
CCTCTGGCACAGAACCCCAAGGCGGGCAACAGCAGGGCCTCCCTGGAGGCAGGGGAGGAGCTGAGGGG
TTCCACCAGGCTCAGGGGCAGCGGCCCCCTCCTGAGTGACTCAGGTTCCCTTCTTGCTACTGGGAGCG
CGCGAGTGGGGACGCCCGGGCCCCCGGAGGATGGTGACAGCCTCTATTCTCCGGGAGTCCAGCTAGGG
GCGCTGGTGACCACGCACTTCCTGTACTTGGCCATGTGGGCCTGCGGGGCTCTGGCAGTGTCCCAGCG
CTGGCTGCCCCGGGTGGTGTGCAGCTGCTTGTACGGGGTGGCAGCCTCCGCCCTGGGCCTCTTCGTCT
TCACTCACCACTGTGCCAGGCGGAGGGACGTGAGAGCCTCGTGGCGCGCCTGCTGCCCCCCTGCCTCT
CCCGCGGCCCCCCATGCCCCGCCCCGGGCCCTGCCCGCCGCCGCAGAGGACGGTTCCCCGGTGTTCGG
GGAGGGGCCCCCCTCCCTCAAGTCCTCCCCAAGCGGCAGCAGCGGCCATCCGCTGGCTCTGGGCCCCT
GCAAGCTCACCAACCTGCAGCTGGCCCAGAGTCAGGTGTGCGAGGCGGGGGCGGCGGCCGGCGGGGAA
GGAGAGCCGGAGCCGGCGGGCACCCGGGGAAACCTCGCCCACCGCCACCCCAACAACGTGCACCACGG
GCGTCGGGCGCACAAGAGCCGGGCCAAGGGACACCGCGCGGGGGAGGCCTGCGGCAAGAACCGGCTCA
AGGCCCTGCGCGGGGGCGCGGCGGGGGCGCTGGAACTGCTGTCCAGCGAGAGCGGTAGTCTGCACAAC
AGCCCCACCGACAGCTACCTGGGCAGCAGCCGCAACAGCCCGGGCGCCGGCCTGCAGCTGGAAGGCGA
GCCCATGCTCACGCCGTCCGAGGGCAGCGACACCAGCGCCGCGCCGCTTTCTGAGGCGGGCCGGGCAG
GCCAGCGCCGCAGCGCCAGCCGCGACAGTCTCAAGGGCGGCGGCGCGCTGGAGAAGGAGAGCCATCGC
CGCTCGTACCCGCTCAACGCCGCCAGCCTAAACGGCGCCCCCAAGGGGGGCAAGTACGACGACGTCAC
CCTGATGGGCGCGGAGGTAGCCAGCGGCGGCTGCATGAAGACCGGACTCTGGAAGAGCGAAACTACCG
TCTAAGGTGGGGCGGGCGACGCGGTAGACGGGTTGGCCACGCGGCTCGTTCCCCCGCTCCTCGGGGCC
CTCCAAGGTGTCTCCGTAGTCAGCAGGTTGGAGGCAGAGGAGCCGATGGCTGGAGGAAGCCCACAGGC
GGATGTTCCCCACTTGCCTAGAGGGCATCCCTCTGGGGTAGCGACAGACAATCCCAGAAACACGCATA
ATACATTTCCGTCCAGCCCGGGGCAGTCTGACTGTCGGTGCCCTCCCAGGAACGGGGAAGGCCTCCGT
CTGTGTGAAAGGGCACAGCACATCCCAGGTGCACCCTCCCCAAGTACTCCCACCCCGCCTACTGTCCA
TGCGGCCTCACTGGGGGCCATCAGCCTCACCAGCAAAGCAGAGATGAGAGCGTGGGAACTGTGTTCTT
TCCTCCCTGCCCTCTACTGATTTCAGCCCAGCCCCTGCCTAGATCCTAGGTCCCTTTTCCTCCCGAGT
TTGGCTGGCACGAGAGCTAGCCCAGCACATGAAGCAGGTGATGTTAAGTCACAAGGTGCTGCTTTTCA
GATCCACTATGCAAGAGGGGAGGGTGGGGCCACGTGAAAGGCAGCTCTAGACATCAACCAGTCCTGGG
GGAGGGGAGTGGGAACCGGGCACAACTAGGAACAATGCCACCATTCCCACAGGAGTGGTACTTAAACC
AGACAGCAGGGTTCAGAGGTGGCACACCGGGACAAAGCTGAGGCCCTGCACCTCAACAGCTGACTGCC
AGGTGCCTGTGGGTGAACTGAGGGGAGTAGAGGGAGAGGGCAGGTGGAACTGGGGCAGAATCTAGTCA
TGCCCTAAAGCTAGTCCTGTAAACAATGGTGCCCCAGAAAGCTGCAGGTGGTGTTTGGAGAAGCAGTT
ACTTTTCAGTTACAAGACCCATCTCCCTAGTCTCAGCCTTACAACACCACGGGACTAAGGAAGAGCAC
TTCCTTGCCTCCGTAAGGCCAGAGGAAGAACCATCCCAATCATTTGATCTCCAGCTCCACAGTAGAGA
GAAACCTACAAAATGTCAAACCAGCTTCCCGACTCCCAGGAGCTCAAGCCAAGCCCAGAGGCAGTGGC
TGGGGTCCCTGCAGGTCATGAGGGGCCTATGCCTTTACTCCTTTTAAACACCAGCACCCGTCTTTTCC
CCAACCTAAAACCAACCACCAGCATTTCACTACAGGACCAAATGGAAACCGAGGGAACCCTGGGTCTT
GGGAAGAACAACAGGAAACCAAGGTCTGACCTAGGGTTCCCTCCCAGTCTTCACATCACTCTGGCCTC
ATCACCAAGGTGACAGAGGACACAGGGGAGGGGGAAAACCCACACACACTCCTTGGAATGGGTCCTGT
TATTTATGCTTGCTGCACAGACATATTAGAAGAAAAAAAAAAAGCTTTGTATTATTCTTCCACATATG
CTGGCTGCTGTTTACACACCCTGCCAATGCCTTAGCACTGGAGAGCTTTTTGCAATATGCTGGGGAAA
GGGGAGGGAGGGAATGAAAGTGCCAAAGAAAACATGTTTTTAAGAACTCGGGTTTTATACAATAGAAT
GTTTTCTAGCAGATGCCTCTTGTTTTAATATATTAAAATTTTGCAAAGCCCTTTGAGCTACTGCCTTA
GTCTACCCACTGTCCTTTTGTTATGAGGTAGAGGATCTCATGACACCATACACACAAACCCATCATTG
CCTGTGAATGCACGTAGGGCCAGAATTCCCCAGTTCCCGCTCCTCTGAGGGTTGATACTGCTGGGAAT
GCCAACCACTCCACAAGCAGAGGGAAGCCCCCTCAGGCCTGCAGGAGGAGCCGCAGCAGTGTGTCCAA
TTCAAACCAGCAGCAAAGAGCCTGACATTTTCCCATCCATCTATGAGGAAAGCCATCTCACAGAACAT
GGACATAGGCAACTTGCTCTCCCACACCAAGGGATGGGAATCTCTCCTACCTATAGTCATCCCTGCAC
TCCTGACTTTACTCCAGGACCCAGGGTCCAACTAATGGCAGAGCCCCTCTTGGTTCCTTCAAACAAGA
AAAGCAATACCTACGGACTGGTGTACACTTCCATCCTTGGTTATAACAGGAATGTTATCAAGCTGTCA
GAACAGGATGAAGTGCTCCCAGTGGATATCCATCAGGGAGGGTTAGGGACACTCGTGGCAGCCTGTCT
AGCAGCCTGGGCTCTCTGAAAGTCCCTAACTTCCTGAGGGGTACGCAAATACTGTTCTATTTCACTAT
CAGAAATGTTCTCATCTCCAGTGACAGTGGAGACAGGGGGTACAGGGCAGATCCGCTTCGGGGACTTC
AACATGCAGGGTGGCAAGAGAAGGGCAGGACTGGCCGGCCGCTTCCCCTGGGGTAAACCTAAGGAATT
ATTTCCCACCTCCCCTTCTCCTTGCCCCTGTCCCCACCCCGGTGGCTCCTTCTCTCGGGTCTCCACTT
CTGCTGTCCCATCCCGAAAGGCAGAGCGGACCAGTGACTGGCGGTGCTGGAGAAGGTCACCGATGTGC
TTCACCACAGACCGTTTGTCAAGTCTCAGAACTCGTAACCAGGCCAGCTGCTCAGCCATCCGCAGCAG
CACAGCCAGCAGCTCCTGCAGGCGGGAGGACGCCGGGTAGGGCAGGTCCACATTTGCCAATTTACAAA
ATCGGGCAAGGGAACATGAAAGCCGATCTGCAGGCTGCAGCGACTGCCAAGCCAGGAAAGTCGCAGCA
GTGATGACGGGCAAGGGATGCCTCCCGGTCACCAGCCACGTCTCATTTGCCAGCTCCACCAACTGCAT
TGTTCGAGACAGCATCTTCTCTTTGTCTTCCACGTATTTGGCTGGCACAGAAGGTGAAGCTTGGAACA
GTTTGAAGCTGAAATAACCAAAATGAGGGTTGGATCTTAATGATATAGGGGCTGCTCTCCCACAGTGA
GGAAAGACAGCCCACTCAAGATGGGGAAGCTATTCTGCCCTCAGGAATACTCAAGCTCACTGGGCAGC
AAGTTAATAAAGGTAGTGAGAGAAAACAGGGCGTCTTCCGCTTGTTAGGGGAAGGTGGAGGGATGGAG
GAGAGCACGAACATTTATTGGGCGCCTCCCAATCACCATTATTCTGAGTGCTTTACAACGTTCTCATT
TAATCTACGTGCACGTGCACCATCTTATGTGCATGTATAGTTAAAAAACTTTCCCATAGTCATCCAGC
CAGGCAGTAACCAAGCTTCAAATACAAGGCTATTTGACAC

| | | | |
|---|---|---|---|
| NOV10e, CG50925-02 | SEQ ID NO: 266 | 1542 aa | MW at 164901.2kD |
| Protein Sequence | | | |

MRGAPARLLLPLLPWLLLLLAPEARGAPGCPLSIRSCKCSGERPKGLSGGVPGPARRRVVCSGGDLPE
PPEPGLLPNGTVTLGNRFSTAPCPQSGLAQSFRLCPEQYSNASGWVSSEAARFLTGHNWSASDAGRPA
CIFPGPVSWRQVPAYNAGQDQGSKYSFYGGKVKDEYLRRSPICRSAAALHTDTSARSWSEFRLLSNNK
ITGLRNGSFLGLSLLEKLLMRAHFSDEDEKTACPSPAPRLWRLHSKCTLSMAGNQKNQGGSSSQEAAS
GLMPSRRLQRGEVEGLCTCLCTDLRNNIISTVQPGAFLGLGELKRLDLSNNRIGCLTSETFQGLPRLL
RLNISGNIFSSLQPGVFDELPALKVVDLGTEFLTCDCHLRWLLPWAQNRSLQLSEHTLCAYPSALHAH
ALGSLQEAQLCCEGALELHTHHLIPSLRQVVFQGDRLPFQCSASYLGNDTRIRWYHNRAPVEGDEQAG
ILLAESLIHDCTFITSELTLSHIGVWASGEWECTVSMAQGNASKKVEIVVLETSASYCPAERVANNRG
DFRWPRTLAGITAYQSCLQYPFTSVPLGGGAPGTRASRRCDRAGRWEPGDYSHCLYTNDITRVLYTFV
LMPINASNALTLAHQLRVYTAEAASFSDMMDVVYVAQMIQKFLGYVDQIKELVEVMVDMPSNLMLVDE
HLLWLAQREDKACSRIVGAIERIGGAALSPHAQHISVNARNVALEAYLIKPHSYVGLTCTAFQRREGG
VPGTRPGSPGQNPPPEPEPPADQQLRFRCTTGRPNVSLSSFHIKNSVALASIQLPPSLFSSLPAALAP
PVPPDCTLQLLVFRNGRLFHSHSNTSRPGAAGPGKRRGVATPVIFAGTSGCGVGNLTEPVAVSLRHWA
EGAEPVAAWWSQEGPGEAGGWTSEGCQLRSSQPNVSALHCQHLGNVAVLMELSAFPREVGGAGAGLHP
VVYPCTALLLLCLFATIITYILNHSSIRVSRKGWHMLLNLCFHIAMTSAVFAGGITLTNYQMVCQAVG
ITLHYSSLSTLLWMGVKARVLHKELTWRAPPPQEGDPALPTPSPMLRYILSIPALQLGRDSNAGVGNL
PRFYLIAGGIPLIICGITAAVNIHNYRDHSPYCWLVWRPSLGAFYIPVALILLITWIYFLCAGLRLRG
PLAQNPKAGNSRASLEAGEELRGSTRLRGSGPLLSDSGSLLATGSARVGTPGPPEDGDSLYSPGVQLG
ALVTTHFLYLAMWACGALAVSQRWLPRVVCSCLYGVAASALGLFVFTHHCARRRDVRASWPACCPPAS
PAAPHAPPRALPAAAEDGSPVFGEGPPSLKSSPSGSSGHPLALGPCKLTNLQLAQSQVCEAGAAAGGE
GEPEPAGTRGNLAHRBPNNVHHGRRAHKSRAKGHRAGEACGKNRLKALRGGAAGALELLSSESGSLHN
SPTDSYLGSSRNSPGAGLQLEGEPMLTPSEGSDTSAAPLSEAGRAGQRRSASRDSLKGGGALEKESHR
RSYPLNAASLNGAPKGGKYDDVTLMGAEVASGGCMKTGLWKSETTV

| | | |
|---|---|---|
| NOV10f, 2482O8844 | SEQ ID NO: 267 | 1888 bp |
| DNA Sequence | ORF Start: at 2 | ORF Stop: end of sequence |

CACCGGATCCGAGCTGAAGCGTTTAGATCTCTCCAACAACCGGATTGGCTGTCTCACCTCCGAGACCT
TCCAGGGCCTCCCCAGGCTTCTCCGACTAAACATATCTGGAAACATCTTCTCCAGTCTGCAACCTGGG
GTCTTTGATGAGCTGCCAGCCCTTAAGGTTGTGGACTTGGGCACCGAGTTCCTGACCTGTGACTGCCA
CCTGCGCTGGCTGCTGCCCTGGGCCCAGAATCGCTCCCTGCAGCTGTCGGAACACACGCTCTGTGCTT
ACCCCAGTGCCCTGCATGCTCAGGCCCTGGGCAGCCTCCAGGAGGCCCAGCTCTGCTGCGAGGGGGCC
CTGGAGCTGCACACACACCACCTCATCCCGTCCCTACGCCAAGTGGTGTTCCAGGGGGATCGGCTGCC
CTTCCAGTGCTCTGCCAGCTACCTGGGCAACGACACCCGCATCCGCTGGTACCACAACCGAGCCCCTG
TGGAGGGTGATGAGCAGGCGGGCATCCTCCTGGCCGAGAGCCTCATCCACGACTGCACCTTCATCACC
AGTGAGCTGACGCTGTCTCACATCGGCGTGTGGGCCTCAGGCGAGTGGGAGTGCACCGTGTCCATGGC
CCAAGGCAACGCCAGCAAGAAGGTGGAGATCGTGGTGCTGGAGACCTCTGCCTCCTACTGCCCCGCCG
AGCGTGTTGCCAACAACCGCGGGGACTTCAGGTGGCCCCGAACTCTGGCTGGCATCACAGCCTACCAG
TCCTGCCTGCAGTATCCCTTCACCTCAGTGCCCCTGGGCGGGGGTGCCCCGGGCACCCGAGCCTCCCG
CCGGTGTGACCGTGCCGGCCGCTGGGAGCCAGGGGACTACTCCCACTGTCTCTACACCAACGACATCA
CCAGGGTGCTGTACACCTTCGTGCTGATGCCCATCAATGCCTCCAATGCGCTGACCCTGGCTCACCAG
CTGCGCGTGTACACAGCCGAGGCCGCTAGCTTTTCAGACATGATGGATGTAGTCTATGTGGCTCAGAT
GATCCAGAAATTTTTGGGTTATGTCGACCAGATCAAAGAGCTGGTAGAGGTGATGGTGGACATGGCCA
GCAACCTGATGCTGGTGGACGAGCACCTGCTGTGGCTGGCCCAGCGCGAGGACAAGGCCTGCAGCCGC
ATCGTGGGTGCCCTGGAGCGCATTGGGGGGGCCGCCCTCAGCCCCCATGCCCAGCACATCTCAGTGAA
TGCGAGGAACGTGGCATTGGAGGCCTACCTCATCAAGCCGCACAGCTACGTGGGCCTGACCTGCACAG
CCTTCCAGAGGAGGGAGGGAGGGGTGCCGGGCACACGGCCAGGAAGCCCTGGCCAGAACCCCCCACCT
GAGCCCGAGCCCCCAGCTGACCAGCAGCTCCGCTTCCGCTGCACCACCGGGAGGCCCAATGTTTCTCT
GTCGTCCTTCCACATCAAGAACAGCGTGGCCCTGGCCTCCATCCAGCTGCCCCCGAGTCTATTCTCAT
CCCTTCCGGCTGCCCTGGCTCCCCCGGTGCCCCCAGACTGCACCCTGCAACTGCTCGTCTTCCGAAAT
GGCCGCCTCTTCCACAGCCACAGCAACACCTCCCGCCCTGGAGCTGCTGGGCCTGGCAAGAGGCGTGG
CGTGGCCACCCCCGTCATCTTCGCAGGAACCAGTGGCTGTGGCGTGGGAAACCTGACAGAGCCAGTGG
CCGTTTCGCTGCGGCACTGGGCTGAGGGAGCCGAACCTGTGGCCGCTTGGTGGAGCCAGGAGGGGCCC
GGGGAGGCTGGGGGCTGGACCTCGGAGGGCTGCCAGCTCCGCTCCAGCCAGCCCAATGTCAGCGCCCT
GCACTGCCAGCACTTGGGCAATGTGGCCGTGCTCATGGAGCTGAGCCTCGAG

| | | | |
|---|---|---|---|
| NOV10f, 248208844 | SEQ ID NO: 268 | 629 aa | MW at 68481.1kD |
| Protein Sequence | | | |

TGSELKRLDLSNNRIGCLTSETFQGLPRLLRLNISGNIFSSLQPGVFDELPALKVVDLGTEFLTCDCH
LRWLLPWAQNRSLQLSEHTLCAYPSALHAQALGSLQEAQLCCEGALELHTHHLIPSLRQVVFQGDRLP
FQCSASYLGNDTRIRWYHNRAPVEGDEQAGILLAESLIHDCTFITSELTLSHIGVWASGEWECTVSMA
QGNASKKVEIVVLETSASYCPAERVANNRGDFRWPRTLAGITAYQSCLQYPFTSVPLGGGAPGTRASR
RCDRAGRWEPGDYSHCLYTNDITRVLYTFVLMPINASNALTLAHQLRVYTAEAASFSDMMDVVYVAQM
IQKFLGYVDQIKELVEVMVDMASNLMLVDEHLLWLAQREDKACSRIVGALERIGGAALSPHAQHISVN
ARNVALEAYLIKPHSYVGLTCTAFQRREGGVPGTRPGSPGQNPPPEPEPPADQQLRFRCTTGRPNVSL
SSFHIKNSVALASIQLPPSLFSSLPAALAPPVPPDCTLQLLVFRNGRLFHSHSNTSRPGAAGPGKRRG
VATPVIFAGTSGCGVGNLTEPVAVSLRHWAEGAEPVAAWWSQEGPGEAGGWTSEGCQLRSSQPNVSAL
HCQHLGNVAVLMELSLE

| | | |
|---|---|---|
| NOV10g, CG50925-03 | SEQ ID NO: 269 | 1329 bp |
| DNA Sequence | ORF Start: at 7 | ORF Stop: at 1324 |

GGATCCCGGCTGCCCTTCCAGTGCTCTGCCAGCTACCTGGGCAACGACACCCGCATCCGCTGGTACCA
CAACCGAGCCCCTGTGGAGGGTGATGAGCAGGCGGGCATCCTCCTGGCCGAGAGCCTCATCCACGACT
GCACCTTCATCACCAGGTGGCCCCGAACTCTGGCTGGCATCACAGCCTACCAGTCCTGCCTGCAGTAT
CCCTTCACCTCAGTGCCCCTGGGCGGGGGTGCCCCGGGCACCCGAGCCTCCCGCCGGTGTGACCGTGC
CGGCCGCTGGGAGCCAGGGGACTACTCCCACTGTCTCTACACCAACGACATCACCAGGGTGCTGTACA
CCTTCGTGCTGATGCCCATCAATGCCTCCAATGCGCTGACCCTGGCTCACCAGCTGCGCGTGTACACA
GCCGAGGCCGCTAGCTTTTCAGACATGATGGATGTGGTCTATGTGGCTCAGATGATCCAGAAATTTTT
GGGTTATGTCGACCAGATCAAAGAGCTGGTAGGGGTGATGGTGGACATGGCCAGCAACCTGATGCTGG
TGGACGAGCACCTGCTGTGGCTGGCCCAGCGCGAGGACAAGGCCTGCAGCCGCATCGTGGGTGCCCTG
GAGCGCATTGGGGGGGCCGCCCTCAGCCCCCATGCCCAGCACATCTCAGTGAATGCGAGGAACGTGGC
ATTGGAGGCCTACCTCATCAAGCCGCACAGCTACGTGGGCCTGACCTGCACAGCCTTCCAGAGGAGGG
AGGGAGGGGTGCCGGGCACACGGCCAGGAAGCCCTGGCCAGAACCCCCCACCTGAGCCCGAGCCCCCA
GCTGACCAGCAGCTCCGCTTCCGCTGCACCACCGGGAGGCCCAATGTTTCTCTGTCGTCCTTCCACAT
CAAGAACAGCGTGGCCCTGGCCTCCATCCAGCTGCCCCCGAGTCTATTCTCATCCCTTCCGGCTGCCC
TGGCTCCCCCGGTGCCCCCAGACTGCACCCTGCAACTGCTCGTCTTCCGAAATGGCCGCCTCTTCCAC
AGCCACAGCAACGCCTCCCGCCCTGGAGCTGCTGGGCCTGGCAAGAGGCGTGGCGTGGCCACCCCCGT
CATCTTCGCAGGAACCAGTGGCTGTGGCGTGGGAAACCTGACAGAGTCAGTGGCCGTTTCGCTGCGGC
ACTGGGCTGAGGGAGCCGAACCTGTGGCCGCTTGGTGGAGCCAGGAGGGGCCCGGGGAGGCTGGGGGC
TGGACCTCGGAGGGCTGCCAGCTCCGCTCCAGCCAGCCCAATGTCAGCGCCCTGCACTGCCAGCACTT
GGGCAATGTGGCCGTGCTCATGGAGCTGAGCCTCGAG

| | | | |
|---|---|---|---|
| NOV10g, CG50925-03 | SEQ ID NO: 270 | 439 aa | MW at 47486.5kD |
| Protein Sequence | | | |

RLPFQCSASYLGNDTRIRWYHNRAPVEGDEQAGILLAESLIHDCTFITRWPRTLAGITAYQSCLQYPF
TSVPLGGGAPGTRASRRCDRAGRWEPGDYSHCLYTNDITRVLYTFVLMPINASNALTLAHQLRVYTAE
AASFSDMMDVVYVAQMIQKFLGYVDQIKELVGVMVDMASNLMLVDEHLLWLAQREDKACSRIVGALER
IGGAALSPHAQHISVNARNVALEAYLIKPHSYVGLTCTAFQRREGGVPGTRPGSPGQNPPPEPEPPAD
QQLRFRCTTGRPNVSLSSFHIKNSVALASIQLPPSLFSSLPAALAPPVPPDCTLQLLVFRNGRLFHSH
SNASRPGAAGPGKRRGVATPVIFAGTSGCGVGNLTESVAVSLRHWAEGAEPVAAWWSQEGPGEAGGWT
SEGCQLRSSQPNVSALHCQHLGNVAVLMELS

| | | |
|---|---|---|
| NOV10h, CG50925-04 | SEQ ID NO: 271 | 60 bp |
| DNA Sequence | ORF Start: at 1 | ORF Stop: end of sequence |

GAGAAGCTTCTCATGAGAGCACATTTTTCTGATGAAGATGAAAAGACGGCCTGTCCTTCT

| | | | |
|---|---|---|---|
| NOV10h, CG50925-04 | SEQ ID NO: 272 | 20 aa | MW at 2307.5kD |
| Protein Sequence | | | |

EKLLMRAHFSDEDEKTACPS

| | | |
|---|---|---|
| NOV10i, CG50925-05 | SEQ ID NO: 273 | 57 bp |
| DNA Sequence | ORF Start: at 1 | ORF Stop: end of sequence |

CGAGCCTCCCGCCGGTGTGACCGTGCCGGCCGCTGGGAGCCAGGGGACTACTCCCAC

| | | | |
|---|---|---|---|
| NOV10i, CG50925-05 | SEQ ID NO: 274 | 19 aa | MW at 2275.4kD |
| Protein Sequence | | | |

RASRRCDRAGRWEPGDYSH

| | | |
|---|---|---|
| NOV10j, CG50925-06 | SEQ ID NO: 275 | 57 bp |
| DNA Sequence | ORF Start: at 1 | ORF Stop: end of sequence |

GAGCTGGTAGAGGTGATGGTGGACATGCCCAGCAACTTGATGCTGGTGGACGAGCAC

| | | | |
|---|---|---|---|
| NOV10j, CG50925-06 | SEQ ID NO: 276 | 19 aa | MW at 2200.6kD |
| Protein Sequence | | | |

ELVEVMVDMPSNLMLVDEH

| | | |
|---|---|---|
| NOV10k, CG50925-07 | SEQ ID NO: 277 | 66 bp |
| DNA Sequence | ORF Start: at 1 | ORF Stop: end of sequence |

AAGGCGGGCAACAGCAGGGCCTCCCTGGAGGCAGGGGAGGAGCTGAGGGGTTCCACCAGGCTCAGG

| | | | |
|---|---|---|---|
| NOV10k, CG50925-07 | SEQ ID NO: 278 | 22 aa | MW at 2358.6kD |
| Protein Sequence | | | |

KAGNSHASLEAGEELRGSTRLR

| | | |
|---|---|---|
| NOV10l, SNP13380040 | SEQ ID NO: 279 | 7892 bp |
| of CG50925-01, | ORF Start: ATG at 1 | ORF Stop: TAA at 4627 |
| DNA Sequence | SNP Pos: 2164 | SNP Change: G to A |

ATGCGGGGGGCGCCCGCGCGCCTGCTGCTGCCGCTGCTGCCGTGGCTCCTGCTGCTCCTGGCGCCCGA
GGCTCGGGGCGCGCCCGGCTGCCCGCTATCCATCCGCAGCTGCAAGTGCTCGGGGGAGCGGCCCAAGG
GGCTGAGCGGCGGCGTCCCTGGCCCGGCTCGGCGGAGGGTGGTGTGCAGCGGCGGGGACCTCCCGGAG
CCTCCCGAGCCCGGCCTTCTGCCTAACGGCACCGTTACCCTTGGCAACCGTTTCTCCACTGCCCCTTG
CCCGCAGTCGGGGCTGGCCCAGTCTTTTCGATTGTGTCCAGAACAATACAGTAACGCCTCTGGTTGGG
TGAGTTCAGAGGCTGCCCGCTTCCTGACAGGACACAACTGGTCAGCCTCTGACGCTGGCCGCCCGGCC
TGCATTTTCCCCGGCCCGGTCTCCTGGAGACAGGTACCAGCTTACAACGCCGGACAGGATCAGGGTAG
CAAATATAGCTTCTATGGAGGAAAGGTCAAAGATGAGTATCTGCGTAGGTCCCCGATCTGTCGCTCTG
CTGCCGCCCTGCACACTGACACCAGTGCCCGCAGCTGGTCTGAATTTAGGCTCTTGAGCAATAACAAG
ATCACGGGGCTCCGCAATGGCTCCTTCCTGGGACTGTCACTGCTGGAGAAGCTTCTCATGAGAGCACA
TTTTTCTGATGAAGATGAAAAGACGGCCTGTCCTTCTCCAGCACCAAGGCTCTGGAGGCTGCATAGCA
AGTGCACCCTGAGCATGGCAGGCAATCAGAAGAACCAGGGCGGCAGCAGCTCACAAGAGGCAGCATCT
GGCTTGATGCCGAGTCGGCGGCTCCAGCGGGGAGAGGTTGAGGGCCTCTGCACTTGCCTCTGCACGGA
CCTGAGGAACAACATCATCAGCACAGTGCAGCCGGGCGCCTTCCTGGGCCTGGGGGAGCTGAAGCGTT
TAGATCTCTCCAACAACCGGATTGGCTGTCTCACCTCCGAGACCTTCCAGGGCCTCCCCAGGCTTCTC
CGACTAAACATATCTGGAAACATCTTCTCCAGTCTGCAACCTGGGGTCTTTGATGAGCTGCCAGCCCT
TAAGGTTGTGGACTTGGGCACCGAGTTCCTGACCTGTGACTGCCACCTGCGCTGGCTGCTGCCCTGGG
CCCAGAATCGCTCCCTGCAGCTGTCGGAACACACGCTCTGTGCTTACCCCAGTGCCCTGCATGCTCAT
GCCCTGGGCAGCCTCCAGGAGGCCCAGCTCTGCTGCGAGGGGGCCCTGGAGCTGCACACACACCACCT
CATCCCGTCCCTACGCCAAGTGGTGTTCCAGGGGGATCGGCTGCCCTTCCAGTGCTCTGCCAGCTACC
TGGGCAACGACACCCGCATCCGCTGGTACCACAACCGAGCCCCTGTGGAGGGTGATGAGCAGGCGGGC
ATCCTCCTGGCCGAGAGCCTCATCCACGACTGCACCTTCATCACCAGTGAGCTGACGCTGTCTCACAT
CGGCGTGTGGGCCTCAGGCGAGTGGGAGTGCACCGTGTCCATGGCCCAAGGCAACGCCAGCAAGAAGG
TGGAGATCGTGGTGCTGGAGACCTCTGCCTCCTACTGCCCCGCCGAGCGTGTTGCCAACAACCGCGGG
GACTTCAGGTGGCCCCGAACTCTGGCTGGCATCACAGCCTACCAGTCCTGCCTGCAGTATCCCTTCAC
CTCAGTGCCCCTGGGCGGGGGTGCCCCGGGCACCCGAGCCTCCCGCCGGTGTGACCGTGCCGGCCGCT
GGGAGCCAGGGGACTACTCCCACTGTCTCTACACCAACGACATCACCAGGGTGCTGTACACCTTCGTG
CTGATGCCCATCAATGCCTCCAATGCGCTGACCCTGGCTCACCAGCTGCGCGTGTACACAGCCGAGGC
CGCTAGCTTTTCAGACATGATGGATGTAGTCTATGTGGCTCAGATGATCCAGAAATTTTTGGGTTATG
TCGACCAGATCAAAGAGCTGGTAGAGGTGATGGTGGACATGCCCAGCAACTTGATGCTGGTGGACGAG
CACCTGCTGTGGCTGGCCCAGCGCGAGGACAAGGCCTGCAGCCGCATCGTGGGTGCCATAGAGCGCAT
TGGGGGGGCCGCCCTCAGCCCCCATGCCCAGCACATCTCAGTGAATGCGAGGAACATGGCATTGGAGG
CCTACCTCATCAAGCCGCACAGCTACGTGGGCCTGACCTGCACAGCCTTCCAGAGGAGGGAGGGAGGG
GTGCCGGGCACACGGCCAGGAAGCCCTGGCCAGAACCCCCCACCTGAGCCCGAGCCCCCAGCTGACCA
GCAGCTCCGCTTCCGCTGCACCACCGGGAGGCCCAATGTTTCTCTGTCGTCCTTCCACATCAAGAACA
CCGGTGCCCCCAGACTGCACCCTGCAACTGCTCGTCTTCCGAAATGGCCGCCTCTTCCACAGCCACAG
CAACACCTCCCGCCCTGGAGCTGCTGGGCCTGGCAAGAGGCGTGGCGTGGCCACCCCCGTCATCTTCG
CAGGAACCAGTGGCTGTGGCGTGGGAAACCTGACAGAGCCAGTGGCCGTTTCGCTGCGGCACTGGGCT
GAGGGAGCCGAACCTGTGGCCGCTTGGTGGAGCCAGGAGGGGCCCGGGGAGGCTGGGGGCTGGACCTC
GGAGGGCTGCCAGCTCCGCTCCAGCCAGCCCAATGTCAGCGCCCTGCACTGCCAGCACTTGGGCAATG
TGGCCGTGCTCATGGAGCTGAGCGCCTTTCCCAGGGAGGTGGGGGGCGCCGGGGCAGGGCTGCACCCC
GTGGTATACCCCTGCACGGCCTTGCTGCTGCTCTGCCTCTTCGCCACCATCATCACCTACATCCTCAA
CCACAGCTCCATCCGTGTGTCCCGGAAAGGCTGGCACATGCTGCTGAACTTGTGCTTCCACATAGCCA
TGACCTCTGCTGTCTTTGCGGGGGGCATCACACTCACCAACTACCAGATGGTCTGCCAGGCGGTGGGC
ATCACCCTGCACTACTCCTCCCTATCCACGCTGCTCTGGATGGGCGTGAAGGCGCGAGTGCTCCATAA
GGAGCTCACCTGGAGGGCACCCCCTCCGCAAGAAGGGGACCCCGCTCTGCCTACTCCCAGTCCTATGC
TCCGGTACATACTTTCAATTCCAGCTTTGCAATTGGGGAGGGACTCCAACGCAGGCGTAGGAAACCTC
CCAAGGTTCTATTTGATCGCTGGAGGGATTCCACTCATTATCTGTGGCATCACAGCTGCAGTCAACAT
CCACAACTACCGGGACCACAGCCCCTACTGCTGGCTGGTGTGGCGTCCAAGCCTTGGCGCCTTCTACA
TCCCTGTGGCTTTGATTCTGCTCATCACCTGGATCTATTTCCTGTGCGCCGGGCTACGCTTACGGGGT
CCTCTGGCACAGAACCCCAAGGCGGGCAACAGCAGGGCCTCCCTGGAGGCAGGGGAGGAGCTGAGGGG
TTCCACCAGGCTCAGGGGCAGCGGCCCCCTCCTGAGTGACTCAGGTTCCCTTCTTGCTACTGGGAGCG
CGCGAGTGGGGACGCCCGGGCCCCCGGAGGATGGTGACAGCCTCTATTCTCCGGGAGTCCAGCTAGGG
GCGCTGGTGACCACGCACTTCCTGTACTTGGCCATGTGGGCCTGCGGGGCTCTGGCAGTGTCCCAGCG
CTGGCTGCCCCGGGTGGTGTGCAGCTGCTTGTACGGGGTGGCAGCCTCCGCCCTGGGCCTCTTCGTCT
TCACTCACCACTGTGCCAGGCGGAGGGACGTGAGAGCCTCGTGGCGCGCCTGCTGCCCCCCTGCCTCT
CCCGCGGCCCCCCATGCCCCGCCCCGGGCCCTGCCCGCCGCCGCAGAGGACGGTTCCCCGGTGTTCGG
GGAGGGGCCCCCCTCCCTCAAGTCCTCCCCAAGCGGCAGCAGCGGCCATCCGCTGGCTCTGGGCCCCT
GCAAGCTCACCAACCTGCAGCTGGCCCAGAGTCAGGTGTGCGAGGCGGGGGCGGCGGCCGGCGGGGAA
GGAGAGCCGGAGCCGGCGGGCACCCGGGGAAACCTCGCCCACCGCCACCCCAACAACGTGCACCACGG
GCGTCGGGCGCACAAGAGCCGGGCCAAGGGACACCGCGCGGGGGAGGCCTGCGGCAAGAACCGGCTCA
AGGCCCTGCGCGGGGGCGCGGCGGGGGCGCTGGAACTGCTGTCCAGCGAGAGCGGTAGTCTGCACAAC
AGCCCCACCGACAGCTACCTGGGCAGCAGCCGCAACAGCCCGGGCGCCGGCCTGCAGCTGGAAGGCGA
GCCCATGCTCACGCCGTCCGAGGGCAGCGACACCAGCGCCGCGCCGCTTTCTGAGGCGGGCCGGGCAG
GCCAGCGCCGCAGCGCCAGCCGCGACAGTCTCAAGGGCGGCGGCGCGCTGGAGAAGGAGAGCCATCGC
CGCTCGTACCCGCTCAACGCCGCCAGCCTAAACGGCGCCCCCAAGGGGGGCAAGTACGACGACGTCAC
CCTGATGGGCGCGGAGGTAGCCAGCGGCGGCTGCATGAAGACCGGACTCTGGAAGAGCGAAACTACCG
TCTAAGGTGGGGCGGGCGACGCGGTAGACGGGTTGGCCACGCGGCTCGTTCCCCCGCTCCTCGGGGCC
CTCCAAGGTGTCTCCGTAGTCAGCAGGTTGGAGGCAGAGGAGCCGATGGCTGGAGGAAGCCCACAGGC
GGATGTTCCCCACTTGCCTAGAGGGCATCCCTCTGGGGTAGCGACAGACAATCCCAGAAACACGCATA
ATACATTTCCGTCCAGCCCGGGGCAGTCTGACTGTCGGTGCCCTCCCAGGAACGGGGAAGGCCTCCGT
CTGTGTGAAAGGGCACAGCACATCCCAGGTGCACCCTCCCCAAGTACTCCCACCCCGCCTACTGTCCA
TGCGGCCTCACTGGGGGCCATCAGCCTCACCAGCAAAGCAGAGATGAGAGCGTGGGAACTGTGTTCTT
TCCTCCCTGCCCTCTACTGATTTCAGCCCAGCCCCTGCCTAGATCCTAGGTCCCTTTTCCTCCCGAGT
TTGGCTGGCACGAGAGCTAGCCCAGCACATGAAGCAGGTGATGTTAAGTCACAAGGTGCTGCTTTTCA
GATCCACTATGCAAGAGGGGAGGGTGGGGCCACGTGAAAGGCAGCTCTAGACATCAACCAGTCCTGGG
GGAGGGGAGTGGGAACCGGGCACAACTAGGAACAATGCCACCATTCCCACAGGAGTGGTACTTAAACC
AGACAGCAGGGTTCAGAGGTGGCACACCGGGACAAAGCTGAGGCCCTGCACCTCAACAGCTGACTGCC
AGGTGCCTGTGGGTGAACTGAGGGGAGTAGAGGGAGAGGGCAGGTGGAACTGGGGCAGAATCTAGTCA
TGCCCTAAAGCTAGTCCTGTAAACAATGGTGCCCCAGAAAGCTGCAGGTGGTGTTTGGAGAAGCAGTT
ACTTTTCAGTTACAAGACCCATCTCCCTAGTCTCAGCCTTACAACACCACGGGACTAAGGAAGAGCAC
TTCCTTGCCTCCGTAAGGCCAGAGGAAGAACCATCCCAATCATTTGATCTCCAGCTCCACAGTAGAGA
GAAACCTACAAAATGTCAAACCAGCTTCCCGACTCCCAGGAGCTCAAGCCAAGCCCAGAGGCAGTGGC
TGGGGTCCCTGCAGGTCATGAGGGGCCTATGCCTTTACTCCTTTTAAACACCAGCACCCGTCTTTTCC
CCAACCTAAAACCAACCACCAGCATTTCACTACAGGACCAAATGGAAACCGAGGGAACCCTGGGTCTT
GGGAAGAACAACAGGAAACCAAGGTCTGACCTAGGGTTCCCTCCCAGTCTTCACATCACTCTGGCCTC
ATCACCAAGGTGACAGAGGACACAGGGGAGGGGGAAAACCCACACACACTCCTTGGAATGGGTCCTGT
TATTTATGCTTGCTGCACAGACATATTAGAAGAAAAAAAAAAAGCTTTGTATTATTCTTCCACATATG
CTGGCTGCTGTTTACACACCCTGCCAATGCCTTAGCACTGGAGAGCTTTTTGCAATATGCTGGGGAAA
GGGGAGGGAGGGAATGAAAGTGCCAAAGAAAACATGTTTTTAAGAACTCGGGTTTTATACAATAGAAT
GTTTTCTAGCAGATGCCTCTTGTTTTAATATATTAAAATTTTGCAAAGCCCTTTGAGCTACTGCCTTA
GTCTACCCACTGTCCTTTTGTTATGAGGTAGAGGATCTCATGACACCATACACACAAACCCATCATTG
CCTGTGAATGCACGTAGGGCCAGAATTCCCCAGTTCCCGCTCCTCTGAGGGTTGATACTGCTGGGAAT
GCCAACCACTCCACAAGCAGAGGGAAGCCCCCTCAGGCCTGCAGGAGGAGCCGCAGCAGTGTGTCCAA
TTCAAACCAGCAGCAAAGAGCCTGACATTTTCCCATCCATCTATGAGGAAAGCCATCTCACAGAACAT
GGACATAGGCAACTTGCTCTCCCACACCAAGGGATGGGAATCTCTCCTACCTATAGTCATCCCTGCAC
TCCTGACTTTACTCCAGGACCCAGGGTCCAACTAATGGCAGAGCCCCTCTTGGTTCCTTCAAACAAGA
AAAGCAATACCTACGGACTGGTGTACACTTCCATCCTTGGTTATAACAGGAATGTTATCAAGCTGTCA
GAACAGGATGAAGTGCTCCCAGTGGATATCCATCAGGGAGGGTTAGGGACACTCGTGGCAGCCTGTCT
AGCAGCCTGGGCTCTCTGAAAGTCCCTAACTTCCTGAGGGGTACGCAAATACTGTTCTATTTCACTAT
CAGAAATGTTCTCATCTCCAGTGACAGTGGAGACAGGGGGTACAGGGCAGATCCGCTTCGGGGACTTC
AACATGCAGGGTGGCAAGAGAAGGGCAGGACTGGCCGGCCGCTTCCCCTGGGGTAAACCTAAGGAATT
ATTTCCCACCTCCCCTTCTCCTTGCCCCTGTCCCCACCCCGGTGGCTCCTTCTCTCGGGTCTCCACTT
CTGCTGTCCCATCCCGAAAGGCAGAGCGGACCAGTGACTGGCGGTGCTGGAGAAGGTCACCGATGTGC
TTCACCACAGACCGTTTGTCAAGTCTCAGAACTCGTAACCAGGCCAGCTGCTCAGCCATCCGCAGCAG
CACAGCCAGCAGCTCCTGCAGGCGGGAGGACGCCGGGTAGGGCAGGTCCACATTTGCCAATTTACAAA
ATCGGGCAAGGGAACATGAAAGCCGATCTGCAGGCTGCAGCGACTGCCAAGCCAGGAAAGTCGCAGCA
GTGATGACGGGCAAGGGATGCCTCCCGGTCACCAGCCACGTCTCATTTGCCAGCTCCACCAACTGCAT
TGTTCGAGACAGCATCTTCTCTTTGTCTTCCACGTATTTGGCTGGCACAGAAGGTGAAGCTTGGAACA
GTTTGAAGCTGAAATAACCAAAATGAGGGTTGGATCTTAATGATATAGGGGCTGCTCTCCCACAGTGA
GGAAAGACAGCCCACTCAAGATGGGGAAGCTATTCTGCCCTCAGGAATACTCAAGCTCACTGGGCAGC
AAGTTAATAAAGGTAGTGAGAGAAAACAGGGCGTCTTCCGCTTGTTAGGGGAAGGTGGAGGGATGGAG
GAGAGCACGAACATTTATTGGGCGCCTCCCAATCACCATTATTCTGAGTGCTTTACAACGTTCTCATT
TAATCTACGTGCACGTGCACCATCTTATGTGCATGTATAGTTAAAAAACTTTCCCATAGTCATCCAGC
CAGGCAGTAACCAAGCTTCAAATACAAGGCTATTTGACACCAACAGCCTCTACTTTCAACGTTATTTA
TCAG

| | | | |
|---|---|---|---|
| NOV10l, SNP13380040 | SEQ ID NO: 280 | 1542 aa | MW at 164933.2kD |
| of CG50925-01, | SNP Pos: 722 | SNP Change: Val to Met | |
| Protein Sequence | | | |

MRGAPARLLLPLLPWLLLLLAPEARGAPGCPLSIRSCKCSGERPKGLSGGVPGPARRRVVCSGGDLPE
PPEPGLLPNGTVTLGNRFSTAPCPQSGLAQSFRLCPEQYSNASGWVSSEAARFLTGHNWSASDAGRPA
CIFPGPVSWRQVPAYNAGQDQGSKYSFYGGKVKDEYLRRSPICRSAAALHTDTSARSWSEFRLLSNNK
ITGLRNGSFLGLSLLEKLLMRAHFSDEDEKTACPSPAPRLWRLHSKCTLSMAGNQKNQGGSSSQEAAS
GLMPSRRLQRGEVEGLCTCLCTDLRNNIISTVQPGAFLGLGELKRLDLSNNRIGCLTSETFQGLPRLL
RLNISGNIFSSLQPGVFDELPALKVVDLGTEFLTCDCHLRWLLPWAQNRSLQLSEHTLCAYPSALHAH
ALGSLQEAQLCCEGALELHTHHLIPSLRQVVFQGDRLPFQCSASYLGNDTRIRWYHNRAPVEGDEQAG
ILLAESLIHDCTFITSELTLSHIGVWASGEWECTVSMAQGNASKKVEIVVLETSASYCPAERVANNRG
DFRWPRTLAGITAYQSCLQYPFTSVPLGGGAPGTRASRRCDRAGRWEPGDYSHCLYTNDITRVLYTFV
LMPINASNALTLAHQLRVYTAEAASFSDMMDVVYVAQMIQKFLGYVDQIKELVEVMVDMPSNLMLVDE
HLLWLAQREDKACSRIVGAIERIGGAALSPHAQHISVNARNMALEAYLIKPHSYVGLTCTAFQRREGG
VPGTRPGSPGQNPPPEPEPPADQQLRFRCTTGRPNVSLSSFHIKNSVALASIQLPPSLFSSLPAALAP
PVPPDCTLQLLVFRNGRLFHSHSNTSRPGAAGPGKRRGVATPVIFAGTSGCGVGNLTEPVAVSLRHWA
EGAEPVAAWWSQEGPGEAGGWTSEGCQLRSSQPNVSALHCQHLGNVAVLMELSAFPREVGGAGAGLHP
VVYPCTALLLLCLFATIITYILNHSSIRVSRKGWHMLLNLCFHIAMTSAVFAGGITLTNYQMVCQAVG
ITLHYSSLSTLLWMGVKARVLHKELTWRAPPPQEGDPALPTPSPMLRYILSIPALQLGRDSNAGVGNL
PRFYLIAGGIPLIICGITAAVNIHNYRDHSPYCWLVWRPSLGAFYIPVALILLITWIYFLCAGLRLRG
PLAQNPKAGNSRASLEAGEELRGSTRLRGSGPLLSDSGSLLATGSARVGTPGPPEDGDSLYSPGVQLG
ALVTTHFLYLAMWACGALAVSQRWLPRVVCSCLYGVAASALGLFVFTHHCARRRDVRASWRACCPPAS
PAAPHAPPRALPAAAEDGSPVFGEGPPSLKSSPSGSSGHPLALGPCKLTNLQLAQSQVCEAGAAAGGE
GEPEPAGTRGNLAHRHPNNVHHGRRAHKSPAKGHRAGEACGKNRLKALRGGAAGALELLSSESGSLHN
SPTDSYLGSSRNSPGAGLQLEGEPMLTPSEGSDTSAAPLSEAGRAGQRRSASRDSLKGGGALEKESHR
RSYPLNAASLNGAPKGGKYDDVTLMGAEVASGGCMKTGLWKSETTV

[0405] A ClustalW comparison of the above protein sequences yields the following sequence alignment shown in Table 10B.

TABLE 10B
Comparison of the NOV10 protein sequences.

| | |
|---|---|
| NOV10a | ------------------------------------------------------------ |
| NOV10b | MRGAPARLLLPLLPWLLLLLAPEARGAPGCPLSIRSCKCSGERPKGLSGGVPGPARRRVV |
| NOV10c | ------------------------------------------------------------ |
| NOV10d | ------------------------------------------------------------ |
| NOV10e | ------------------------------------------------------------ |
| NOV10f | ------------------------------------------------------------ |
| NOV10g | ------------------------------------------------------------ |
| NOV10h | ------------------------------------------------------------ |
| NOV10i | ------------------------------------------------------------ |
| NOV10j | ------------------------------------------------------------ |
| NOV10k | ------------------------------------------------------------ |
| NOV10a | ------------------------------------------------------------ |
| NOV10b | CSGGDLPEPPEPGLLPNGTVTLDLRNNIISTVQPGAFLGLGELKRLDLSNNRIGCLTSET |
| NOV10c | ------------------------------------------------------------ |
| NOV10d | ------------------------------------------------------------ |
| NOV10e | ------------------------------------------------------------ |
| NOV10f | ------------------------------------------------------------ |
| NOV10g | ------------------------------------------------------------ |
| NOV10h | ------------------------------------------------------------ |
| NOV10i | ------------------------------------------------------------ |
| NOV10j | ------------------------------------------------------------ |
| NOV10k | ------------------------------------------------------------ |
| NOV10a | ------------------------------------------------------------ |
| NOV10b | FQGLPRLLRLNISGNIFSSLQPGVFDELPALKVVDLGTEFLTCDCHLRWLLPWAQNRSLQ |
| NOV10c | ------------------------------------------------------------ |
| NOV10d | ------------------------------------------------------------ |
| NOV10e | ------------------------------------------------------------ |
| NOV10f | ------------------------------------------------------------ |
| NOV10h | ------------------------------------------------------------ |
| NOV10i | ------------------------------------------------------------ |
| NOV10j | ------------------------------------------------------------ |
| NOV10k | ------------------------------------------------------------ |
| NOV10a | ------------------------------------------------------------ |
| NOV10b | LSEHTLCAYPSALHAHALGSLQEAQLCCEGALELHTHHLIPSLRQVVFQGDRLPFQCSAS |
| NOV10c | ------------------------------------------------------------ |
| NOV10d | ------------------------------------------------------------ |
| NOV10e | ------------------------------------------------------------ |
| NOV10f | ------------------------------------------------------------ |
| NOV10g | ------------------------------------------------------------ |
| NOV10h | ------------------------------------------------------------ |
| NOV10i | ------------------------------------------------------------ |
| NOV10j | ------------------------------------------------------------ |
| NOV10k | ------------------------------------------------------------ |
| NOV10a | ------------------------------------------------------------ |
| NOV10b | YLGNDTRIRWYHNRAPVEGDEQAGILLAESLIHDCTFITSELTLSHIGVWASGEWECTVS |
| NOV10c | ------------------------------------------------------------ |
| NOV10d | ------------------------------------------------------------ |
| NOV10e | ------------------------------------------------------------ |
| NOV10f | ------------------------------------------------------------ |
| NOV10g | ------------------------------------------------------------ |
| NOV10h | ------------------------------------------------------------ |
| NOV10i | ------------------------------------------------------------ |
| NOV10j | ------------------------------------------------------------ |
| NOV10k | ------------------------------------------------------------ |
| NOV10a | ------------------------------------------------------------ |
| NOV10b | MAQGNASKKVEIVVLETSASYCPAERVANNRGDFRWPRTLAGITAYQSCLQYPFTSVPLG |
| NOV10c | ------------------------------------------------------------ |
| NOV10d | ------------------------------------------------------------ |
| NOV10e | ------------------------------------------------------------ |
| NOV10f | ------------------------------------------------------------ |
| NOV10g | ------------------------------------------------------------ |
| NOV10h | ------------------------------------------------------------ |
| NOV10i | ------------------------------------------------------------ |
| NOV10j | ------------------------------------------------------------ |
| NOV10k | ------------------------------------------------------------ |
| NOV10a | ------------------------------------------------------------ |
| NOV10b | GGAPGTRASRRCDRAGRWESGDYSHCLYTNDITRVLYTFVLMPINASNALTLAHQLRVYT |
| NOV10c | ------------------------------------------------------------ |
| NOV10d | ------------------------------------------------------------ |
| NOV10e | ------------------------------------------------------------ |
| NOV10f | ------------------------------------------------------------ |
| NOV10g | ------------------------------------------------------------ |
| NOV10h | ------------------------------------------------------------ |
| NOV10i | ------------------------------------------------------------ |
| NOV10j | ------------------------------------------------------------ |
| NOV10k | ------------------------------------------------------------ |
| NOV10a | ------------------------------------------------------------ |
| NOV10b | AEAASFSDMMDVVYVAQMIQKFLGYVDQIKELVEVMVDMASNLNLVDEHLLWLAQREDKA |
| NOV10c | ------------------------------------------------------------ |
| NOV10d | ------------------------------------------------------------ |
| NOV10e | ------------------------------------------------------------ |
| NOV10f | ------------------------------------------------------------ |
| NOV10g | ------------------------------------------------------------ |
| NOV10h | ------------------------------------------------------------ |
| NOV10i | ------------------------------------------------------------ |
| NOV10j | ------------------------------------------------------------ |
| NOV10k | ------------------------------------------------------------ |
| NOV10a | ------------------------------------------------------------ |
| NOV10b | CSRIVGALERIGGAALSPHAQHISVNARNVALEAYLIKPHSYVGLTCTAFQRREGGVPGT |
| NOV10c | ------------------------------------------------------------ |
| NOV10d | ------------------------------------------------------------ |
| NOV10e | ------------------------------------------------------------ |
| NOV10f | ------------------------------------------------------------ |
| NOV10g | ------------------------------------------------------------ |
| NOV10h | ------------------------------------------------------------ |
| NOV10i | ------------------------------------------------------------ |
| NOV10j | ------------------------------------------------------------ |
| NOV10k | ------------------------------------------------------------ |
| NOV10a | ------------------------------------------------------------ |
| NOV10b | RPGSPGQNPPPEPEPPADQQLRFRCTTGRPNVSLSSFHIKNSVALASIQLPPSLFSSLPA |
| NOV10c | ------------------------------------------------------------ |
| NOV10d | --------------------------------------------TGSAPGCPLSIRSCKC |
| NOV10e | ------------------------------------------MRGAPARLLLPLLPWLLL |
| NOV10f | ------------------------------------------------------------ |
| NOV10g | ------------------------------------------------------------ |
| NOV10h | ------------------------------------------------------------ |
| NOV10i | ------------------------------------------------------------ |
| NOV10j | ------------------------------------------------------------ |
| NOV10k | ------------------------------------------------------------ |
| NOV10a | ------------------------------------------------------------ |
| NOV10b | ALAPPVPPDCTLQLLVFRNGRLFHSHSNTSRPGAAGPGKRRGVATPVIFAGTSGCGVGNL |
| NOV10c | ------------------------------------------------------------ |
| NOV10d | SGERAKGLSGGVPGPARRRVVCSGGDLPEPPEPGLLPNGTVTLLLSNNKITGLRNGSFLG |
| NOV10e | LLAPEARGAPGCPLSIRSCKCSGERPKGLSGGVPGPARRRVVCSGGDLPEPPEPGLLPNG |
| NOV10f | ------------------------------------------------------------ |
| NOV10g | ------------------------------------------------------------ |
| NOV10h | ------------------------------------------------------------ |
| NOV10i | ------------------------------------------------------------ |
| NOV10j | ------------------------------------------------------------ |
| NOV10k | ------------------------------------------------------------ |
| NOV10a | ------------------------------------------------------------ |
| NOV10b | TEPVAVSLRHWAEGAEPVAAWWSQEGPGEAGGWTSEGCQLRSSQPNVSALHCQHLGNVAV |
| NOV10c | ------------------------------------------------------------ |
| NOV10d | LSLLEKLDLRNNIISTVQPGAFLGLGELKRLDLSNNRIGCLTSETFQGLPRLLRLNISGN |
| NOV10e | TVTLGNRFSTAPCPQSGLAQSFRLCPEQYSNASGWVSSEAARFLTGHNWSASDAGRPACI |
| NOV10f | ------------------------------------------------------------ |
| NOV10g | ------------------------------------------------------------ |
| NOV10h | ------------------------------------------------------------ |
| NOV10i | ------------------------------------------------------------ |
| NOV10j | ------------------------------------------------------------ |
| NOV10k | ------------------------------------------------------------ |
| NOV10a | -----------MRGAPARLLLPLLPWLLLLLAPEARGAPGCPLSIRSCKCSGERPKGLSG |
| NOV10b | LMELSAFPREVGGAGAGLHPVVYPCTALLLLCLFATIITYILNNSSIRVSRKGWHMLLNL |
| NOV10c | ------------------------------------------------------------ |
| NOV10d | IFSSLQPGVFDELPALKVVDLGTEFLTCDCHLRWLLPWAQNRSLQLSEHTLCAYPSALHA |
| NOV10e | FPGPVSWRQVPAYNAGQDQGSKYSFYGGKVKDEYLRRSPICRSAAALHTDTSARSWSEFR |
| NOV10f | ------------------------------------------------------------ |
| NOV10g | ------------------------------------------------------------ |
| NOV10h | ------------------------------------------------------------ |
| NOV10i | ------------------------------------------------------------ |
| NOV10j | ------------------------------------------------------------ |
| NOV10k | ------------------------------------------------------------ |
| NOV10a | GVPGPARRRVVCSGGDLPEPPEPGLLPNGTVTLGNRFSTAPCPQSGLAQSFRLCPEQYSN |
| NOV10b | CFHIAMTSAVFAGGITLTNYQMVCQAVGITLHYSSLSTLLWMGVKARVLHKELTWRAPPP |
| NOV10c | ------------------------------------------------------------ |
| NOV10d | QALGSLQEAQLCCEGALELHTHHLIPSLRQVVFQGDRLPFQCSASYLGNDTRIRWYHDEA |
| NOV10e | LLSNNKITGLRNGSFLGLSLLEKLLMRAHFSDEDEKTACPSPAPRLWRLHSKCTLSMAGN |
| NOV10f | ------------------------------------------------------------ |
| NOV10g | ------------------------------------------------------------ |
| NOV10h | ------------------------------------------------------------ |
| NOV10i | ------------------------------------------------------------ |
| NOV10j | ------------------------------------------------------------ |
| NOV10k | ------------------------------------------------------------ |
| NOV10a | ASGWVSSEAARFLTGHNWSASDAGRPACIFPGPVSWRQVPAYNAGQDQGSKYSFYGGKVK |
| NOV10b | QEGDPALPTPSPMLRYILSIPALQLGRDSNAGVGNLPRFYLIAGGIPLIICGITAAVNIH |
| NOV10c | ----------------------------------------------------TGSELKRL |
| NOV10d | PVEGDEQAGILLAESLIHDCTFITSELTLSHIGVWASGEWECTVSMAQGNASKKVEIVVL |
| NOV10e | QKNQGGSSSQEAASGLMPSRRLQRGEVEGLCTCLCTDLRNNIISTVQPGAFLGLGELKRL |
| NOV10f | ----------------------------------------------------TGSELKRL |
| NOV10g | -------------------------------RLPFQCSASYLGNDTRIRWYHNHAPVEGD |
| NOV10h | ------------------------------------------------------------ |
| NOV10i | ------------------------------------------------------------ |
| NOV10j | ------------------------------------------------------------ |
| NOV10k | ------------------------------------------------------------ |
| NOV10a | DEYLRRSPICRSAAALHTDTSARSWSEFRLLSNNKITGLRNGSFLGLSLLEKLLMRAHFS |
| NOV10b | NYRDHSPYCWLVWRPSLGAFYIPVALILLITWIYFLCAGLRLRGPLAQNPKAGNSRASLE |
| NOV10c | DLSNNRIGCLTSETFQGLPRLLRLNISGNIFSSLQPGVFDELPALKVVDLGTEFLTCDCH |
| NOV10d | ETSASYCPAERVANNRGDFRWPRTLAGITAYQSCLQYPFTSVPLGGGAPGTRASRRCDRA |
| NOV10e | DLSNNRIGCLTSETFQGLPRLLRLNISGNIFSSLQPGVFDELPALKVVDLGTEFLTCDCH |
| NOV10f | DLSNNRIGCLTSETFQGLPRLLRLNISGNIFSSLQPGVFDELPALKVVDLGTEFLTCDCH |
| NOV10g | EQAGILLAESLIHDCTFITRWPRTLAGITAYQSCLQYPFTSVPLGGGAPGTHASRRCDRA |
| NOV10h | --------------------------------------------------EKLLMRAHFS |
| NOV10i | ---------------------------------------------------RASRRCDRA |
| NOV10j | --------------------------------------------------ELVEVMVDMP |
| NOV10k | --------------------------------------------------KAGNSRASLE |
| NOV10a | DEDEKTACPSPAPRLWRLHSKCTLSMAGNQKNQGGSSSQEAASGLMPSRRLQRGEVEGLC |
| NOV10b | AGEELRGSTRLRGSGPLLSDSGSLLATGSARVGTPGPPEDGDSLYSPGVQLGALVTTHFL |
| NOV10c | LRWLLPWAQNRSLQLSEHTLCAYPSALHAQALGSLQEAQLCCELE--------------- |
| NOV10d | GRWEPGDYSHCLYTNDITRVLYTFVLMPINASNALTLAHQLRVYTAEAASFSDNMDVVYV |
| NOV10e | LRWLLPWAQNRSLQLSEHTLCAYPSALHAHALGSLQEAQLCCEGALELHTHHLIPSLRQV |
| NOV10f | LRWLLPWAQNRSLQLSEHTLCAYPSALHAQALGSLQEAQLCCEGALELHTHHLIPSLRQV |
| NOV10g | GRWEPGDYSHCLYTNDITRVLYTFVLMPINASNALTLAHQLRVYTAEAASFSDMMDVVYV |
| NOV10h | DEDEKTACPS-------------------------------------------------- |
| NOV10i | GRWEPGDYSH-------------------------------------------------- |
| NOV10j | SNLMLVDEH--------------------------------------------------- |
| NOV10k | AGEELRGSTRLR------------------------------------------------ |
| NOV10a | TCLCTDLRNNIISTVQPGAFLGLGELKRLDLSNNRIGCLTSETFQGLPRLLRLNISGNIF |
| NOV10b | YLAMWACGALAVSQRWLPRVVCSCLYGVAASALGLFVFTHHCARPPDVRASWRACCPPAS |
| NOV10c | ------------------------------------------------------------ |
| NOV10d | AQMIQKFLGYVDQIKELVEVMVDMASNLMLVDEHLLWLAQREDKACSRIVGALERIGGAA |
| NOV10e | VFQGDRLPFQCSASYLGNDTRIRWYHNRAPVEGDEQAGILLAESLIHDCTFITSELTLSH |
| NOV10f | VFQGDRLPFQCSASYLGNDTRIRWYHNRAPVEGDEQAGILLAESLIHDCTFITSELTLSH |
| NOV10g | AQMIQKFLGYVDQIKELVGVMVDMASNLMLVDEHLLWLAQREDKACSRIVGALERIGGAA |
| NOV10h | ------------------------------------------------------------ |
| NOV10i | ------------------------------------------------------------ |
| NOV10j | ------------------------------------------------------------ |
| NOV10k | ------------------------------------------------------------ |
| NOV10a | SSLQPGVFDELPALKVVDLGTEFLTCDCHLRWLLPWAQNRSLQLSEHTLCAYPSALHAHA |
| NOV10b | PAAPHAPPRALPAAAEDGSPVFGEGPPSLKSSPSGSSGHPLALGPCKLTNLQLAQSQVCE |
| NOV10c | ------------------------------------------------------------ |
| NOV10d | LSPHAQHISVNARNVALEAYLIKPHSYVGLTCTAFQRREGGVPGTRPGSPGQNPPPEPEP |
| NOV10e | IGVWASGEWECTVSMAQGNASKKVEIVVLETSASYCPAERVANNRGDFRWPRTLAGITAY |
| NOV10f | IGVWASGEWECTVSMAQGNASKKVEIVVLETSASYCPAERVANNRGDFRWPRTLAGITAY |
| NOV10g | LSPHAQHISVNARNVALEAYLIKPHSYVGLTCTAFQRREGGVPGTRPGSPGQNPPPEPEP |
| NOV10h | ------------------------------------------------------------ |
| NOV10i | ------------------------------------------------------------ |
| NOV10j | ------------------------------------------------------------ |
| NOV10k | ------------------------------------------------------------ |
| NOV10a | LGSLQEAQLCCEGALELHTHHLIPSLRQVVFQGDRLPFQCSASYLGNDTRIRWYHNEAPV |
| NOV10b | AGAAAGGEGEPEPAGTRGNLAHRHPNNVHHGRRAHKSRAKGHRAGEACGKNRLKALRGGA |
| NOV10c | ------------------------------------------------------------ |
| NOV10d | PADQQLRFRCTTGRPNVSLSSFHIKNSVALASIQLPPSLFSSLPAALAPPVPPDCTLQLL |
| NOV10e | QSCLQYPFTSVPLGGGAPGTRASRRCDEAGRWEPGDYSHCLYTNDITRVLYTFVLMPINA |
| NOV10f | QSCLQYPFTSVPLGGGAPGTRASRRCDRAGRWEPGDYSHCLYTNDITRVLYTFVLMPINA |
| NOV10g | PADQQLRFRCTTGRPNVSLSSFHIKNSVALASIQLPPSLFSSLPAALAPPVPPDCTLQLL |
| NOV10h | ------------------------------------------------------------ |
| NOV10i | ------------------------------------------------------------ |
| NOV10j | ------------------------------------------------------------ |
| NOV10k | ------------------------------------------------------------ |
| NOV10a | EGDEQAGILLAESLIHDCTFITSELTLSHIGVWASGEWECTVSMAQGNASKKVEIVVLET |
| NOV10b | AGALELLSSESGSLHNSPTDSYLGSSRNSPGAGLQLEGEPMLTPSEGSDTSAAPLSEAGR |
| NOV10c | ------------------------------------------------------------ |
| NOV10d | VFRTGRLFHSHSNTSRPGAAGPGKRRGVATPVIFAGTSGCGVGNLTEPVAVSLRHWAEGA |
| NOV10e | SNALTLAHQLRVYTAEAASFSDMMDVVYVAQMIQKFLGYVDQIKELVEVMVDMPSNLMLV |
| NOV10f | SNALTLAHQLRVYTAEAASFSDMMDVVYVAQMIQKFLGYVDQIKELVEVMVDMASNLMLV |
| NOV10g | VFRNGRLFHSHSNASRPGAAGPGKRRGVATPVIFAGTSGCGVGNLTESVAVSLRHWAEGA |
| NOV10h | ------------------------------------------------------------ |
| NOV10i | ------------------------------------------------------------ |
| NOV10j | ------------------------------------------------------------ |
| NOV10k | ------------------------------------------------------------ |
| NOV10a | SASYCPAERVANNRGDFRWPRTLAGITAYQSCLQYPFTSVPLGGGAPGTRASRRcDRAGR |
| NOV10b | AGQRRSASRDSLKGGGALEKESHRRSYPLNAASLNGAPKGGKYDDVTLMGAEVASGGCMK |
| NOV10c | ------------------------------------------------------------ |
| NOV10d | EPVAAWWSQEGPGEAGGWTSEGCQLRSSQPNVSALHCQHLGNVAVLMELSAFPREVGGAG |
| NOV10e | DEHLLWLAQREDKACSRIVGAIERIGGAALSPHAQHISVNARNVALEAYLIKPHSYVGLT |
| NOV10f | DEHLLWLAQREDKACSRIVGALERIGGAALSPHAQHISVNARNVALEAYLIKPHSYVGLT |
| NOV10g | EPVAAWWSQEGPGEAGGWTSEGCQLRSSQPNVSALHCQHLGNVAVLMELS---------- |
| NOV10h | ------------------------------------------------------------ |
| NOV10i | ------------------------------------------------------------ |
| NOV10j | ------------------------------------------------------------ |
| NOV10k | ------------------------------------------------------------ |
| NOV10a | WEPGDYSHCLYTNDITRVLYTFVLMPINASNALTLAHQLRVYTAEAASFSDMMDVVYVAQ |
| NOV10b | TGLWKSETTV-------------------------------------------------- |
| NOV10c | ------------------------------------------------------------ |
| NOV10d | AGLLEG------------------------------------------------------ |
| NOV10e | CTAFQRREGGVPGTRPGSPGQNPPPEPEPPADQQLRFRCTTGRPNVSLSSFHIKNSVALA |
| NOV10f | CTAFQRREGGVPGTRPGSPGQNPPPEPEPPADQQLRFRCTTGRPNVSLSSFHIKNSVALA |
| NOV10g | ------------------------------------------------------------ |
| NOV10h | ------------------------------------------------------------ |
| NOV10i | ------------------------------------------------------------ |
| NOV10j | ------------------------------------------------------------ |
| NOV10k | ------------------------------------------------------------ |
| NOV10a | MIQKFLGYVDQIKELVEVMVDMPSNLMLVDEHLLWLAQREDKACSRIVGAIERIGGAALS |
| NOV10b | ------------------------------------------------------------ |
| NOV10c | ------------------------------------------------------------ |
| NOV10d | ------------------------------------------------------------ |
| NOV10e | SIQLPPSLFSSLPAALAPPVPPDCTLQLLVFRNGRLFHSHSNTSRPGAAGPGKRRGVATP |
| NOV10f | SIQLPPSLFSSLPAALAPPVPPDCTLQLLVFRNGRLFHSHSNTSRPGAAGPGKRRGVATP |
| NOV10g | ------------------------------------------------------------ |
| NOV10h | ------------------------------------------------------------ |
| NOV10i | ------------------------------------------------------------ |
| NOV10j | ------------------------------------------------------------ |
| NOV10k | ------------------------------------------------------------ |
| NOV10a | PHAQHISVNARNVALEAYLIKPHSYVGLTCTAFQRREGGVPGTRPGSPGQNPPPEPEPPA |
| NOV10b | ------------------------------------------------------------ |
| NOV10c | ------------------------------------------------------------ |
| NOV10d | ------------------------------------------------------------ |
| NOV10e | VIFAGTSGCGVGNLTEPVAVSLRHWAEGAEPVAAWWSQEGPGEAGGWTSEGCQLRSSQPN |
| NOV10f | VIFAGTSGCGVGNLTEPVAVSLRHWAEGAEPVAAWWSQEGPGEAGGWTSEGCQLRSSQPN |
| NOV10g | ------------------------------------------------------------ |
| NOV10h | ------------------------------------------------------------ |
| NOV10i | ------------------------------------------------------------ |
| NOV10j | ------------------------------------------------------------ |
| NOV10k | ------------------------------------------------------------ |
| NOV10a | DQQLRFRCTTGRPNVSLSSFHIKNSVALASIQLPPSLFSSLPAALAPPVPPDCTLQLLVF |
| NOV10b | ------------------------------------------------------------ |
| NOV10c | ------------------------------------------------------------ |
| NOV10d | ------------------------------------------------------------ |
| NOV10e | VSALHCQHLGNVAVLMELSAFPREVGGAGAGLHPVVYPCTALLLLCLFATIITYILNHSS |
| NOV10f | VSALHCQHLGNVAVLMELSLE--------------------------------------- |
| NOV10g | ------------------------------------------------------------ |
| NOV10h | ------------------------------------------------------------ |
| NOV10i | ------------------------------------------------------------ |
| NOV10j | ------------------------------------------------------------ |
| NOV10k | ------------------------------------------------------------ |
| NOV10a | RNGRLFHSHSNTSRPGAAGPGKRRGVATPVIFAGTSGCGVGNLTEPVAVSLRHWAEGAEP |
| NOV10b | ------------------------------------------------------------ |
| NOV10c | ------------------------------------------------------------ |
| NOV10d | ------------------------------------------------------------ |
| NOV10e | IRVSRKGWHMLLNLCFHIAMTSAVFAGGITLTNYQMVCQAVGITLHYSSLSTLLWMGVKA |
| NOV10f | ------------------------------------------------------------ |
| NOV10g | ------------------------------------------------------------ |
| NOV10h | ------------------------------------------------------------ |
| NOV10i | ------------------------------------------------------------ |
| NOV10j | ------------------------------------------------------------ |
| NOV10k | ------------------------------------------------------------ |
| NOV10a | VAAWWSQEGPGEAGGWTSEGCQLRSSQPNVSALHCQHLGNVAVLMELSAFPREVGGAGAG |
| NOV10b | ------------------------------------------------------------ |
| NOV10c | ------------------------------------------------------------ |
| NOV10d | ------------------------------------------------------------ |
| NOV10e | RVLHKELTWHAPPPQEGDPALPTPSPMLRYILSIPALQLGRDSNAGVGNLPRFYLIAGGI |
| NOV10f | ------------------------------------------------------------ |
| NOV10g | ------------------------------------------------------------ |
| NOV10h | ------------------------------------------------------------ |
| NOV10i | ------------------------------------------------------------ |
| NOV10j | ------------------------------------------------------------ |
| NOV10k | ------------------------------------------------------------ |
| NOV10a | LHPVVYPCTALLLLCLFATIITYILNHSSIRVSRKGWHMLLNLCFHIAMTSAVFAGGITL |
| NOV10b | ------------------------------------------------------------ |
| NOV10c | ------------------------------------------------------------ |
| NOV10d | ------------------------------------------------------------ |
| NOV10e | PLIICGITAAVNIHNYRDHSPYCWLVWRPSLGAFYIPVALILLITWIYFLCAGLRLRGPL |
| NOV10f | ------------------------------------------------------------ |
| NOV10g | ------------------------------------------------------------ |
| NOV10h | ------------------------------------------------------------ |
| NOV10i | ------------------------------------------------------------ |
| NOV10j | ------------------------------------------------------------ |
| NOV10k | ------------------------------------------------------------ |
| NOV10a | TNYQMVCQAVGITLHYSSLSTLLWMGVKARVLHKELTWRAPPPQEGDPALPTPSPMLRYI |
| NOV10b | ------------------------------------------------------------ |
| NOV10c | ------------------------------------------------------------ |
| NOV10d | ------------------------------------------------------------ |
| NOV10e | AQNPKAGNSRASLEAGEELRGSTRLRGSGPLLSDSGSLLATGSARVGTPGPPEDGDSLYS |
| NOV10f | ------------------------------------------------------------ |
| NOV10g | ------------------------------------------------------------ |
| NOV10h | ------------------------------------------------------------ |
| NOV10i | ------------------------------------------------------------ |
| NOV10j | ------------------------------------------------------------ |
| NOV10k | ------------------------------------------------------------ |
| NOV10a | LSIPALQLGRDSNAGVGNLPRFYLIAGGIPLIICGITAAVNIHNYRDHSPYCWLVWRPSL |
| NOV10b | ------------------------------------------------------------ |
| NOV10c | ------------------------------------------------------------ |
| NOV10d | ------------------------------------------------------------ |
| NOV10e | PGVQLGALVTTHFLYLAMWACGALAVSQRWLPRVVCSCLYGVAASALGLFVFTHHCARRR |
| NOV10f | ------------------------------------------------------------ |
| NOV10g | ------------------------------------------------------------ |
| NOV10h | ------------------------------------------------------------ |
| NOV10i | ------------------------------------------------------------ |
| NOV10j | ------------------------------------------------------------ |
| NOV10k | ------------------------------------------------------------ |
| NOV10a | GAFYIPVALILLITWIYFLCAGLRLRGPLAQNPKAGNSRASLEAGEELRGSTRLRGSGPL |
| NOV10b | ------------------------------------------------------------ |
| NOV10c | ------------------------------------------------------------ |
| NOV10d | ------------------------------------------------------------ |
| NQV10e | DVEASWRACCPPASPAAPHAPPRAIPAAAEDGSPVFGEGPPSLKSSPSGSSGHPLALGPC |
| NOV10f | ------------------------------------------------------------ |
| NOV10g | ------------------------------------------------------------ |
| NOV10h | ------------------------------------------------------------ |
| NOV10i | ------------------------------------------------------------ |
| NOV10j | ------------------------------------------------------------ |
| NOV10k | ------------------------------------------------------------ |
| NOV10a | LSDSGSLLATGSARVGTPGPPEDGDSLYSPGVQLGALVTTHFLYLAMWACGALAVSQRWL |
| NOV10b | ------------------------------------------------------------ |
| NOV10c | ------------------------------------------------------------ |
| NOV10d | ------------------------------------------------------------ |
| NOV10e | KLTNLQLAQSQVCEAGAAAGGEGEPEPAGTRGNLAHRHPNNVHHGRPAHKSRAKGHRAGE |
| NOV10f | ------------------------------------------------------------ |
| NOV10g | ------------------------------------------------------------ |
| NOV10h | ------------------------------------------------------------ |
| NOV10i | ------------------------------------------------------------ |
| NOV10j | ------------------------------------------------------------ |
| NOV10k | ------------------------------------------------------------ |
| NOV10a | PRVVCSCLYGVAASALGLFVFTHHCARRRDVRASWRACCPPASPAAPHAPPRALPAAAED |
| NOV10b | ------------------------------------------------------------ |
| NOV10c | ------------------------------------------------------------ |
| NOV10d | ------------------------------------------------------------ |
| NOV10e | ACGKNRLKALRGGAAGALELLSSESGSLHNSPTDSYLGSSRNSPGAGLQLEGEPMLTPSE |
| NOV10f | ------------------------------------------------------------ |
| NOV10g | ------------------------------------------------------------ |
| NOV10h | ------------------------------------------------------------ |
| NOV10i | ------------------------------------------------------------ |
| NOV10j | ------------------------------------------------------------ |
| NOV10k | ------------------------------------------------------------ |
| NOV10a | GSPVFGEGPPSLKSSPSGSSGHPLALGPCKLTNLQLAQSQVCEAGAAAGGEGEPEPAGTR |
| NOV10b | ------------------------------------------------------------ |
| NOV10c | ------------------------------------------------------------ |
| NOV10d | ------------------------------------------------------------ |
| NOV10e | GSDTSAAPLSEAGRAGQRRSASRDSLKGGGALEKESHRRSYPLNAASLNGAPKGGKYDDV |
| NOV10f | ------------------------------------------------------------ |
| NOV10g | ------------------------------------------------------------ |
| NOV10h | ------------------------------------------------------------ |
| NOV10i | ------------------------------------------------------------ |
| NOV10j | ------------------------------------------------------------ |
| NOV10k | ------------------------------------------------------------ |
| NOV10a | GNLAHRHPNNVHHGRRAHKSRAKGHRAGEACGKNRLKALRGGAAGALELLSSESGSLHNS |
| NOV10b | ------------------------------------------------------------ |
| NOV10c | ------------------------------------------------------------ |
| NOV10d | ------------------------------------------------------------ |
| NOV10e | TLMGAEVASGGCMKTGLWKSETTV------------------------------------ |
| NOV10f | ------------------------------------------------------------ |
| NOV10g | ------------------------------------------------------------ |
| NOV10h | ------------------------------------------------------------ |
| NOV10i | ------------------------------------------------------------ |
| NOV10j | ------------------------------------------------------------ |
| NOV10k | ------------------------------------------------------------ |
| NOV10a | PTDSYLGSSRNSPGAGLQLEGEPMLTPSEGSDTSAAPLSEAGRAGQRRSASRDSLKGGGA |
| NOV10b | ------------------------------------------------------------ |
| NOV10c | ------------------------------------------------------------ |
| NOV10d | ------------------------------------------------------------ |
| NOV10e | ------------------------------------------------------------ |
| NOV10f | ------------------------------------------------------------ |
| NOV10g | ------------------------------------------------------------ |
| NOV10h | ------------------------------------------------------------ |
| NOV10i | ------------------------------------------------------------ |
| NOV10j | ------------------------------------------------------------ |
| NOV10k | ------------------------------------------------------------ |
| NOV10a | LEKESHRRSYPLNAASLNGAPKGGKYDDVTLMGAEVASGGCMKTGLWKSETTV |
| NOV10b | ----------------------------------------------------- |
| NOV10c | ----------------------------------------------------- |
| NOV10d | ----------------------------------------------------- |
| NOV10e | ----------------------------------------------------- |
| NOV10f | ----------------------------------------------------- |
| NOV10g | ----------------------------------------------------- |
| NOV10h | ----------------------------------------------------- |
| NOV10i | ----------------------------------------------------- |
| NOV10j | ----------------------------------------------------- |
| NOV10k | ----------------------------------------------------- |
| NOV10a | (SEQ ID NO: 258) |
| NOV10b | (SEQ ID NO: 260) |
| NOV10c | (SEQ ID NO: 262) |
| NOV10d | (SEQ ID NO: 264) |
| NOV10e | (SEQ ID NO: 266) |
| NOV10f | (SEQ ID NO: 268) |
| NOV10g | (SEQ ID NO: 270) |
| NOV10h | (SEQ ID NO: 272) |
| NOV10i | (SEQ ID NO: 274) |
| NOV10j | (SEQ ID NO: 276) |
| NOV10k | (SEQ ID NO: 278) |

[0406] Further analysis of the NOV10a protein yielded the following properties shown in Table 10C.

TABLE 10C
Protein Sequence Properties NOV10a

| | |
|---|---|
| SignalP analysis: | Cleavage site between residues 27 and 28 |
| PSORT II analysis: | |

| PSG: | a new signal peptide prediction method | |
|---|---|---|
| | N-region: | length 7; pos. chg 2; neg. chg 0 |
| | H-region: | length 15; peak value 9.66 |
| | PSG score: | 5.26 |

| | |
|---|---|
| GvH: | von Heijne's method for signal seq. recognition |
| | GvH score (threshold: −2.1): 5.33 |
| | possible cleavage site: between 26 and 27 |

>>> Seems to have a cleavable signal peptide (1 to 26)

| ALOM: | Klein et al's method for TM region allocation | | |
|---|---|---|---|
| | Init position for calculation: 27 | | |
| | Tentative number of TMS(s) for the threshold 0.5: 5 | | |
| | INTEGRAL | Likelihood = | Transmembrane 958-974 |
| | | −7.91 | |
| | INTEGRAL | Likelihood = | Transmembrane 988-1004 |
| | | −1.22 | |
| | INTEGRAL | Likelihood = | Transmembrane 1093-1109 |
| | | −6.26 | |
| | INTEGRAL | Likelihood = | Transmembrane 1136-1152 |
| | | −8.17 | |
| | INTEGRAL | Likelihood = | Transmembrane 1252-1268 |
| | | −3.50 | |

| | |
|---|---|
| PERIPHERAL | Likelihood = 1.11 (at 1223) |

| | |
|---|---|
| | ALOM score: −8.17 (number of TMSs: 5) |
| MTOP: | Prediction of membrane topology (Hartmann et al.) |
| | Center position for calculation: 13 |
| | Charge difference: −2.0 C(1.0)-N(3.0) |
| | N >= C: N-terminal side will be inside |

>>> membrane topology: type 3a

| MITDISC: | discrimination of mitochondrial targeting seq | | | |
|---|---|---|---|---|
| | R content: | 2 | Hyd Moment(75): | 12.41 |
| | Hyd Moment(95): | 9.21 | G content: | 1 |
| | D/E content: | 1 | S/T content: | 0 |

| | |
|---|---|
| | Score: −2.41 |
| Gavel: | prediction of cleavage sites for mitochondrial preseq |
| | R-2 motif at 68 RRV\|VC |

NUCDISC: discrimination of nuclear localization signals

| | |
|---|---|
| | pat4: none |
| | pat7: PGPARRR (3) at 52 |
| | pat7: PARRRVV (5) at 54 |
| | pat7: PGKRRGV (5) at 849 |
| | bipartite: none |
| | content of basic residues: 9.1% |
| | NLS Score: 0.65 |
| KDEL: | ER retention motif in the C-terminus: none |

ER Membrane Retention Signals:

XXRR-like motif in the N-terminus: RGAP

none
SKL: peroxisomal targeting signal in the C-terminus: none
PTS2: 2nd peroxisomal targeting signal: none
VAC: possible vacuolar targeting motif: none
RNA-binding motif: none
Actinin-type actin-binding motif:

type 1: none
type 2: none

NMYR: N-myristoylation pattern: none
Prenylation motif: none
memYQRL: transport motif from cell surface to Golgi: none
Tyrosines in the tail: none
Dileucine motif in the tail: none
checking 63 PROSITE DNA binding motifs: none
checking 71 PROSITE ribosomal protein motifs: none
checking 33 PROSITE prokaryotic DNA binding motifs: none

| | |
|---|---|
| NNCN: | Reinhardt's method for Cytoplasmic/Nuclear discrimination |
| | Prediction: nuclear |
| | Reliability: 55.5 |
| COIL: | Lupas's algorithm to detect coiled-coil regions |
| | total: 0 residues |

Final Results (k = 9/23):

```
43.5%: endoplasmic reticulum
34.8%: nuclear
13.0%: mitochondrial
  4.3%: cytoplasmic
  4.3%: peroxisomal
```

>> prediction for CG50925-01 is end (k = 23)

[0407] A search of the NOV10a protein against the Geneseq database, a proprietary database that contains sequences published in patents and patent publication, yielded several homologous proteins shown in Table 10D.

TABLE 10D
Geneseq Results for NOV10a

| | | NOV10a | | |
|---|---|---|---|---|
| | | Residues/ | Identities/ | |
| Geneseq | Protein/Organism/Length | Match | Similarities for the | Expect |
| Identifier | [Patent #, Date] | Residues | Matched Region | Value |
| ABU54447 | Human tumour endothelial marker | 263 . . . 1542 | 1231/1292 (95%) | 0.0 |
| | TEM 9 - Homo sapiens, 1331 aa. | 63 . . . 1331 | 1236/1292 (95%) | |
| | [WO200283874-A2, 24-OCT-2002] | | | |
| ABU54432 | Human tumour endothelial marker | 263 . . . 1542 | 1231/1292 (95%) | 0.0 |
| | TEM 5 - Homo sapiens, 1331 aa. | 63 . . . 1331 | 1236/1292 (95%) | |
| | [WO200283874-A2, 24-OCT-2002] | | | |
| AAU74824 | Human REPTR 7 protein - Homo | 263 . . . 1542 | 1231/1292 (95%) | 0.0 |
| | sapiens, 1331 aa. [WO200198354-A2, | 63 . . . 1331 | 1236/1292 (95%) | |
| | 27-DEC-2001] | | | |
| ABB90740 | Human Tumour Endothelial Marker | 263 . . . 1542 | 1231/1292 (95%) | 0.0 |
| | polypeptide SEQ ID NO 212 - Homo | 63 . . . 1331 | 1236/1292 (95%) | |
| | sapiens, 1331 aa. [WO200210217-A2, | | | |
| | 07-FEB-2002] | | | |
| ABB90725 | Human Tumour Endothelial Marker | 263 . . . 1542 | 1231/1292 (95%) | 0.0 |
| | polypeptide SEQ ID NO 188 - Homo | 63 . . . 1331 | 1236/1292 (95%) | |
| | sapiens, 1331 aa. [WO200210217-A2, | | | |
| | 07-FEB-2002] | | | |

[0408] In a BLAST search of public sequence databases, the NOV10a protein was found to have homology to the proteins shown in the BLASTP data in Table 10E.

TABLE 10E
Public BLASTP Results for NOV10a

| | | NOV10a | Identities/ | |
|---|---|---|---|---|
| Protein | | Residues/ | Similarities for | |
| Accession | | Match | the Matched | Expect |
| Number | Protein/Organism/Length | Residues | Portion | Value |
| Q96PE1 | Tumor endothelial marker 5 | 263 . . . 1542 | 1231/1292 (95%) | 0.0 |
| | precursor - Homo sapiens | 63 . . . 1331 | 1236/1292 (95%) | |
| | (Human), 1331 aa. | | | |
| Q8TEM3 | FLJ00170 protein - Homo sapiens | 263 . . . 1542 | 1230/1292 (95%) | 0.0 |
| | (Human), 1310 aa (fragment). | 42 . . . 1310 | 1235/1292 (95%) | |
| Q91ZV8 | Tumor endothelial marker 5 | 280 . . . 1542 | 1083/1266 (85%) | 0.0 |
| | precursor - Mus musculus | 92 . . . 1329 | 1140/1266 (89%) | |
| | (Mouse), 1329 aa. | | | |
| Q9P1Z7 | KIAA1531 protein - Homo sapiens | 923 . . . 1542 | 587/620 (94%) | 0.0 |
| | (Human), 1206 aa (fragment). | 615 . . . 1206 | 589/620 (94%) | |
| Q8N3R1 | Hypothetical protein - Homo | 1031 . . . 1542 | 489/512 (95%) | 0.0 |
| | sapiens (Human), 489 aa | 1 . . . 489 | 489/512 (95%) | |
| | (fragment). | | | |

[0409] PFam analysis predicts that the NOV10a protein contains the domains shown in the Table 10F.

TABLE 10F
Domain Analysis of NOV10a

| | | Identities/ | |
|---|---|---|---|
| | | Similarities | |
| Pfam | NOV10a | for the | Expect |
| Domain | Match Region | Matched Region | Value |
| LRR | 314 . . . 337 | 10/25 (40%) | 0.0086 |
| | | 20/25 (80%) | |
| LRR | 338 . . . 361 | 10/25 (40%) | 0.15 |
| | | 20/25 (80%) | |
| LRRCT | 371 . . . 421 | 19/54 (35%) | 1.3e-08 |
| | | 40/54 (74%) | |
| HRM | 531 . . . 600 | 24/92 (26%) | 0.0088 |
| | | 48/92 (52%) | |
| GPS | 887 . . . 939 | 15/55 (27%) | 0.0041 |
| | | 34/55 (62%) | |
| 7tm_2 | 950 . . . 1280 | 65/359 (18%) | 0.0032 |
| | | 207/359 (58%) | |

### Example 11

[0410] The NOV11 clone was analyzed, and the nucleotide and encoded polypeptide sequences are shown in Table 11A.

TABLE 11A
NOV11 Sequence Analysis

| | | |
|---|---|---|
| NOV11a, CG51027-06 | SEQ ID NO: 281 | 1271 bp |
| DNA Sequence | ORF Start: ATG at 48 | ORF Stop: TAG at 1056 |

GCGCAGTGTGCTGGAATTCGCCCTTCCTCCGTGCCGCCTCTGCCGCGATGCCCCCCCCTGCGCCCGGC
GCCCGGCTCCGGCTTCTCGCCGCCGCCGCCCTGGCCGGCTTGGCCGTCATCAGCCGAGGGCTGCTCTC
CCAGAGCCTGGAGTTCAACTCTCCTGCCGACAACTACACAGTGTGTGAAGGTGACAACGCCACCCTCA
GCTGCTTCATCGACGAGCACGTGACCCGCGTGGCCTGGCTGAACCGCTCCAACATCCTGTATGCCGGC
AATGACCGCTGGACCAGCGACCCGCGGGTGCGGCTGCTCATCAACACCCCCGAGGAGTTCTCCATCCT
CATCACCGAGGTGGGGCTCGGCGACGAGGGCCTCTACACCTGCTCCTTCCAGACCCGCCACCAGCCGT
ACACCACTCAGGTCTACCTCATTGTCCACGTCCCTGCCCGCATTGTGAACATCTCGTCGCCTGTGATG
GTGAATGAGGGGGGCAATGTGAACCTGCTTTGCCTGGCCGTGGGGCGGCCAGAGCCCACGGTCACCTG
GAGACAGCTCCGAGACGGCTTCACCTCGGAGGGAGAGATCCTGGAGATCTCTGACATCCAGCGGGGCC
AGGCCGGGGAGTATGAGTGCGTGACTCACAACGGGGTTAACTCGGCGCCCGACAGCCGCCGCGTGCTG
GTCACAGTCAACTATCCTCCGACCATCACGGACGTGACCAGCGCCCGCACCGCGCTGGGCCGGGCCGC
CCTCCTGCGCTGCGAAGCCATGGCGGTTCCCCCCGCGGATTTCCAGTGGTATAAGGATGACAGACTGC
TGAGCAGCGGCACGGCCGAAGGCCTGAAGGTGCAGATGGAGCGCACCCGCTCGATGCTTCTCTTTGCC
AACGTGAGCGCCCGGCATTACGGCAACTATACGTGTTGCGCCGCCAACCGACTGGGAGCGTCCAGCGC
CTCCATGCGGCTCCTGTGCCCAGGATCCCTGGAGAACTCAGCCCCGAGGCCCCCAGGGCTCCTGGCCC
TCCTCTCCGCCCTGGGCTGGCTGTGGTGGAGAATGTAGGCGCAACCCAGTGGAGCTCGCCTCCCCCTG
CAGGGGGCCTCAGGCCAAGAGTGAGAGAAAAGGGGGAGCAAGAGCCCTGGGTCTCGTGGGGGCAGAAC
GGCTCTCGGCCACCAAGGAAGAAGAGAAGAGGAGAAAGAGGAGGAGGCAGAGGAAGAAAGATCTTTAG
AGAACCCATCACTGTGAGGGATAACGCAAAATTATGCATCTTTCTAC

| | | | |
|---|---|---|---|
| NOV11a, CG51027-06 | SEQ ID NO: 282 | 336 aa | MW at 36748.4kD |
| Protein Sequence | | | |

MPPPAPGARLRLLAAAALAGLAVISRGLLSQSLEFNSPADNYTVCEGDNATLSCFIDEHVTRVAWLNR
SNILYAGNDRWTSDPRVRLLINTPEEFSILITEVGLGDEGLYTCSFQTRHQPYTTQVYLIVHVPARIV
NISSPVMVNEGGNVNLLCLAVGRPEPTVTWRQLRDGFTSEGEILEISDIQRGQAGEYECVTHNGVNSA
PDSRRVLVTVNYPPTITDVTSARTALGRAALLRCEAMAVPPADFQWYKDDRLLSSGTAEGLKVQMERT
RSMLLFANVSARHYGNYTCCAANRLGASSASMRLLCPGSLENSAPRPPGLIJALLSALGWLWWRM

| | | |
|---|---|---|
| NOV11b, 278391205 | SEQ ID NO: 283 | 1033 bp |
| DNA Sequence | ORF Start: at 2 | ORF Stop: end of sequence |

CACCAAGCTTCCCACCATGCCCCCCCCTGCGCCCGGGGCCCGGCTCCGGCTTCTCGCCGCCGCCGCCC
TGGCCGGCTTGGCCGTCATCAGCCGAGGGCTGCTCTCCCAGAGCCTGGAGTTCAACTCTCCTGCCGAC
AACTACACAGTGTGTGAAGGTGACAACGCCACCCTCAGCTGCTTCATCGACGAGCACGTGACCCGCGT
GGCCTGGCTGAACCGCTCCAACATCCTGTATGCCGGCAATGACCGCTGGACCAGCGACCCGCGGGTGC
GGCTGCTCATCAACACCCCCGAGGAGTTCTCCATCCTCATCACCGAGGTGGGGCTCGGCGACGAGGGC
CTCTACACCTGCTCCTTCCAGACCCGCCACCAGCCGTACACCACTCAGGTCTACCTCATTGTCCACGT
CCCTGCCCGCATTGTGAACATCTCGTCGCCTGTGACGGTGAATGAGGGGGGCAATGTGAACCTGCTTT
GCCTGGCCGTGGGGCGGCCAGAGCCCACGGTCACCTGGAGACAGCTCCGAGACGGCTTCACCTCGGAG
GGAGAGATCCTGGAGATCTCTGACATCCAGCGGGGCCAGGCCGGGGAGTATGAGTGCGTGACTCACAA
CGGGGTTAACTCGGCGCCCGACAGCCGCCGCGTGCTGGTCACAGTCAACTATCCTCCGACCATCACGG
ACGTGACCAGCGCCCGCACCGCGCTGGGCCGGGCCGCCCTCCTGCGCTGCGAAGCCATGGCGGTTCCC
CCCGCGGATTTCCAGTGGTACAAGGATGACAGACTGCTGAGCAGCGGCACGGCCGAAGGCCTGAAGGT
GCAGACGGAGCGCACCCGCTCGATGCTTCTCTTTGCCAACGTGAGCGCCCGGCATTACGGCAACTATA
CGTGTCGCGCCGCCAACCGACTGGGAGCGTCCAGCGCCTCCATGCGGCTCCTGCGCCCAGGATCCCTG
GAGAACTCAGCCCCGAGGCCCCCAGGGCTCCTGGCCCTCCTCTCCGCCCTGGGCTGGCTGTGGTGGAG
AATGCTCGAGGGC

| | | | |
|---|---|---|---|
| NOV11b, 278391205 | SEQ ID NO: 284 | 344 aa | MW at 37634.3kD |
| Protein Sequence | | | |

TKLPTMPPPAPGARLRLLAAAALAGLAVISRGLLSQSLEFNSPADNYTVCEGDNATLSCFIDEHVTRV
AWLNRSNILYAGNDRWTSDPRVRLLINTPEEFSILITEVGLGDEGLYTCSFQTRHQPYTTQVYLIVHV
PARIVNISSPVTVNEGGNVNLLCLAVGRPEPTVTWRQLRDGFTSEGEILEISDIQRGQAGEYECVTHN
GVNSAPDSPRVLVTVNYPPTITDVTSARTALGRAALLRCEAMAVPPADFQWYKDDRLLSSGTAEGLKV
QTERTRSMLLFANVSARHYGNYTCRAANRLGASSASMRLLRPGSLENSAPRPPGLLALLSALGWLWWR
MLEG

| | | |
|---|---|---|
| NOV11c, 278391050 | SEQ ID NO: 285 | 976 bp |
| DNA Sequence | ORF Start: at 2 | ORF Stop: end of sequence |

CACCAAGCTTCTGGCCGGCTTGGCCGTCATCAGCCGAGGGCTGCTCTCCCAGAGCCTGGAGTTCAACT
CTCCTGCCGACAACTACACAGTGTGTGAAGGTGACAACGCCACCCTCAGCTGCTTCATCGACGAGCAC
GTGACCCGCGTGGCCTGGCTGAACCGCTCCAACATCCTGTATGCCGGCAATGACCGCTGGACCAGCGA
CCCGCGGGTGCGGCTGCTCATCAACACCCCCGAGGAGTTCTCCATCCTCATCACCGAGGTGGGGCTCG
GCGACGAGGGCCTCTACACCTGCTCCTTCCAGACCCGCCACCAGCCGTACACCACTCAGGTCTACCTC
ATTGTCCACGTCCCTGCCCGCATTGTGAACATCTCGTCGCCTGTGACGGTGAATGAGGGGGGCAATGT
GAACCTGCTTTGCCTGGCCGTGGGGCGGCCAGAGCCCACGGTCACCTGGAGACAGCTCCGAGACGGCT
TCACCTCGGAGGGAGAGATCCTGGAGATCTCTGACATCCAGCGGGGCCAGGCCGGGGAGTATGAGTGC
GTGACTCACAACGGGGTTAACTCGGCGCCCGACAGCCGCCGCGTGCTGGTCACAGTCAACTATCCTCC
GACCATCACGGACGTGACCAGCGCCCGCACCGCGCTGGGCCGGGCCGCCCTCCTGCGCTGCGAAGCCA
TGGCGGTTCCCCCCGCGGATTTCCAGTGGTACAAGGATGACAGACTGCTGAGCAGCGGCACGGCCGAA
GGCCTGAAGGTGCAGACGGAGCGCACCCGCTCGATGCTTCTCTTTGCCAACGTGAGCGCCCGGCATTA
CGGCAACTATACGTGTCGCGCCGCCAACCGACTGGGAGCGTCCAGCGCCTCCATGCGGCTCCTGCGCC
CAGGATCCCTGGAGAACTCAGCCCCGAGGCCCCCAGGGCTCCTGGCCCTCCTCTCCGCCCTGGGCTGG
CTGTGGTGGAGAATGCTCGAGGGC

| | | | |
|---|---|---|---|
| NOV11c, 278391050 | SEQ ID NO: 286 | 325 aa | MW at 35781.1kD |
| Protein Sequence | | | |

TKLLAGLAVISRGLLSQSLEFNSPADNYTVCEGDNATLSCFIDEHVTRVAWLNRSNILYAGNDRWTSD
PRVRLLINTPEEFSILITEVGLGDEGLYTCSFQTRHQPYTTQVYLIVHVPARIVNISSPVTVNEGGNV
NLLCLAVGRPEPTVTWRQLRDGFTSEGEILEISDIQRGQAGEYECVTHNGVNSAPDSRRVLVTVNYPP
TITDVTSARTALGRAALLRCEAMAVPPADFQWYKDDRLLSSGTAEGLKVQTERTRSMLLFANVSARHY
GNYTCRAANRLGASSASMRLLRPGSLENSAPRPPGLLALLSALGWLWWRMLEG

| | | |
|---|---|---|
| NOV11d, 277582210 | SEQ ID NO: 287 | 1760 bp |
| DNA Sequence | ORF Start: at 2 | ORF Stop: end of sequence |

CACCAAGCTTGGTGACAACGCCACCCTCAGCTGCTTCATCGACGAGCACGTGACCCGCGTGGCCTGGC
TGAACCGCTCCAACATCCTGTATGCCGGCAATGACCGCTGGACCAGCGACCCGCGGGTGCGGCTGCTC
ATCAACACCCCCGAGGAGTTCTCCATCCTCATCACCGAGGTGGGGCTCGGCGACGAGGGCCTCTACAC
CTGCTCCTTCCAGACCCGCCACCAGCCGTACACCACTCAGGTCTACCTCATTGTCCACGTCCCTGCCC
GCATTGTGAACATCTCGTCGCCTGTGACGGTGAATGAGGGGGGCAATGTGAACCTGCTTTGCCTGGCC
GTGGGGCGGCCAGAGCCCACGGTCACCTGGAGACAGCTCCGAGACGGCTTCACCTCGGAGGGAGAGAT
CCTGGAGATCTCTGACATCCAGCGGGGCCAGGCCGGGGAGTATGAGTGCGTGACTCACAACGGGGTTA
ACTCGGCGCCCGACAGCCGCCGCGTGCTGGTCACAGTCAACTATCCTCCGACCATCACGGACGTGACC
AGCGCCCGCACCGCGCTGGGCCGGGCCGCCCTCCTGCGCTGCGAAGCCATGGCGGTTCCCCCCGCGGA
TTTCCAGTGGTACAAGGATGACAGACTGCTGAGCAGCGGCACGGCCGAAGGCCTGAAGGTGCAGACGG
AGCGCACCCGCTCGATGCTTCTCTTTGCCAACGTGAGCGCCCGGCATTACGGCAACTATACGTGTCGC
GCCCTCGAGGGC

| | | | |
|---|---|---|---|
| NOV11d, 277582210 | SEQ ID NO: 288 | 253 aa | MW at 28074.3kD |
| Protein Sequence | | | |

TKLGDNATLSCFIDEHVTRVAWLNRSNILYAGNDRWTSDPRVRLLINTPEEFSILITEVGLGDEGLYT
CSFQTRHQPYTTQVYLIVHVPARIVNISSPVTVNEGGNVNLLCLAVGRPEPTVTWRQLRDGFTSEGEI
LEISDIQRGQAGEYECVTHNGVNSAPDSRRVLVTVNYPPTITDVTSARTALGRAALLRCEAMAVPPAD
FQWYKDDRLLSSGTAEGLKVQTERTRSMLLFANVSARHYGNYTCRALEG

| | | |
|---|---|---|
| NOV11e, 277582173 | SEQ ID NO: 289 | 946 bp |
| DNA Sequence | ORF Start: at 2 | ORF Stop: end of sequence |

CACCAAGCTTCTGCTCTCCCAGAGCCTGGAGTTCAACTCTCCTGCCGACAACTACACAGTGTGTGAAG
GTGACAACGCCACCCTCAGCTGCTTCATCGACGAGCACGTGACCCGCGTGGCCTGGCTGAACCGCTCC
AACATCCTGTATGCCGGCAATGACCGCTGGACCAGCGACCCGCGGGTGCGGCTGCTCATCAACACCCC
CGAGGAGTTCTCCATCCTCATCACCGAGGTGGGGCTCGGCGACGAGGGCCTCTACACCTGCTCCTTCC
AGACCCGCCACCAGCCGTACACCACTCAGGTCTACCTCATTGTCCACGTCCCTGCCCGCATTGTGAAC
ATCTCGTCGCCTGTGACGGTGAATGAGGGGGGCAATGTGAACCTGCTTTGCCTGGCCGTGGGGCGGCC
AGAGCCCACGGTCACCTGGAGACAGCTCCGAGACGGCTTCACCTCGGAGGGAGAGATCCTGGAGATCT
CTGACATCCAGCGGGGCCAGGCCGGGGAGTATGAGTGCGTGACTCACAACGGGGTTAACTCGGCGCCC
GACAGCCGCCGCGTGCTGGTCACAGTCAACTATCCTCCGACCATCACGGACGTGACCAGCGCCCGCAC
CGCGCTGGGCCGGGCCGCCCTCCTGCGCTGCGAAGCCATGGCGGTTCCCCCCGCGGATTTCCAGTGGT
ACAAGGATGACAGACTGCTGAGCAGCGGCACGGCCGAAGGCCTGAAGGTGCAGACGGAGCGCACCCGC
TCGATGCTTCTCTTTGCCAACGTGAGCGCCCGGCATTACGGCAACTATACGTGTCGCGCCGCCAACCG
ACTGGGAGCGTCCAGCGCCTCCATGCGGCTCCTGCGCCCAGGATCCCTGGAGAACTCAGCCCCGAGGC
CCCCAGGGCTCCTGGCCCTCCTCTCCGCCCTGGGCTGGCTGTGGTGGAGAATGCTCGAGGGC

| | | | |
|---|---|---|---|
| NOV11e, 277582173 | SEQ ID NO: 290 | 315 aa | MW at 34843.0kD |
| Protein Sequence | | | |

TKLLLSQSLEFNSPADNYTVCEGDNATLSCFIDEHVTRVAWLNRSNILYAGNDRWTSDPRVRLLINTP
EEFSILITEVGLGDEGLYTCSFQTRHQPYTTQVYLIVHVPARIVNISSPVTVNEGGNVNLLCLAVGRP
EPTVTWRQLRDGFTSEGEILEISDIQRGQAGEYECVTHNGVNSAPDSRRVLVTVNYPPTITDVTSART
ALGRAALLRCEAMAVPPADFQWYKDDRLLSSGTAEGLKVQTERTRSMLLFANVSARHYGNYTCRAANR
LGASSASMELLRPGSLENSAPRPPGLLALLSALGWLWWRMLEG

| | | |
|---|---|---|
| Nov11f, CG51027-09 | SEQ ID NO: 291 | 976 bp |
| DNA Sequence | ORF Start: at 11 | ORF Stop: at 968 |

CACCAAGCTTCTGGCCGGCTTGGCCGTCATCAGCCGAGGGCTGCTCTCCCAGAGCCTGGAGTTCAACT
CTCCTGCCGACAACTACACAGTGTGTGAAGGTGACAACGCCACCCTCAGCTGCTTCATCGACGAGCAC
GTGACCCGCGTGGCCTGGCTGAACCGCTCCAACATCCTGTATGCCGGCAATGACCGCTGGACCAGCGA
CCCGCGGGTGCGGCTGCTCATCAACACCCCCGAGGAGTTCTCCATCCTCATCACCGAGGTGGGGCTCG
GCGACGAGGGCCTCTACACCTGCTCCTTCCAGACCCGCCACCAGCCGTACACCACTCAGGTCTACCTC
ATTGTCCACGTCCCTGCCCGCATTGTGAACATCTCGTCGCCTGTGACGGTGAATGAGGGGGGCAATGT
GAACCTGCTTTGCCTGGCCGTGGGGCGGCCAGAGCCCACGGTCACCTGGAGACAGCTCCGAGACGGCT
TCACCTCGGAGGGAGAGATCCTGGAGATCTCTGACATCCAGCGGGGCCAGGCCGGGGAGTATGAGTGC
GTGACTCACAACGGGGTTAACTCGGCGCCCGACAGCCGCCGCGTGCTGGTCACAGTCAACTATCCTCC
GACCATCACGGACGTGACCAGCGCCCGCACCGCGCTGGGCCGGGCCGCCCTCCTGCGCTGCGAAGCCA
TGGCGGTTCCCCCCGCGGATTTCCAGTGGTACAAGGATGACAGACTGCTGAGCAGCGGCACGGCCGAA
GGCCTGAAGGTGCAGACGGAGCGCACCCGCTCGATGCTTCTCTTTGCCAACGTGAGCGCCCGGCATTA
CGGCAACTATACGTGTCGCGCCGCCAACCGACTGGGAGCGTCCAGCGCCTCCATGCGGCTCCTGCGCC
CAGGATCCCTGGAGAACTCAGCCCCGAGGCCCCCAGGGCTCCTGGCCCTCCTCTCCGCCCTGGGCTGG
CTGTGGTGGAGAATGCTCGAGGGC

| | | | |
|---|---|---|---|
| NOV11f, CG51027-09 | SEQ ID NO: 292 | 319 aa | MW at 35139.3kD |
| Protein Sequence | | | |

LAGLAVISRGLLSQSLEFNSPADNYTVCEGDNATLSCFIDENVTRVAWLNRSNILYAGNDRWTSDPRV
RLLINTPEEFSILITEVGLGDEGLYTCSFQTRHQPYTTQVYLIVHVPARIVNISSPVTVNEGGNVNLL
CLAVGRPEPTVTWRQLRDGFTSEGEILEISDIQRGQAGEYECVTHNGVNSAPDSRRVLVTVNYPPTIT
DVTSARTALGRAALLRCEAMAVPPADFQWYKDDRLLSSGTAEGLKVQTERTRSMLLFANVSARHYGNY
TCRAANRLGASSASMRLLRPGSLENSAPRPPGLLALLSALGWLWWRM

| | | |
|---|---|---|
| NOV11g, 316763704 | SEQ ID NO: 293 | 976 bp |
| DNA Sequence | ORF Start: at 2 | ORF Stop: end of sequence |

CACCTCGCGACTGGCCGGCTTGGCCGTCATCAGCCGAGGGCTGCTCTCCCAGAGCCTGGAGTTCAACT
CTCCTGCCGACAACTACACAGTGTGTGAAGGTGACAACGCCACCCTCAGCTGCTTCATCGACGAGCAC
GTGACCCGCGTGGCCTGGCTGAACCGCTCCAACATCCTGTATGCCGGCAATGACCGCTGGACCAGCGA
CCCGCGGGTGCGGCTGCTCATCAACACCCCCGAGGAGTTCTCCATCCTCATCACCGAGGTGGGGCTCG
GCGACGAGGGCCTCTACACCTGCTCCTTCCAGACCCGCCACCAGCCGTACACCACTCAGGTCTACCTC
ATTGTCCACGTCCCTGCCCGCATTGTGAACATCTCGTCGCCTGTGACGGTGAATGAGGGGGGCAATGT
GAACCTGCTTTGCCTGGCCGTGGGGCGGCCAGAGCCCACGGTCACCTGGAGACAGCTCCGAGACGGCT
TCACCTCGGAGGGAGAGATCCTGGAGATCTCTGACATCCAGCGGGGCCAGGCCGGGGAGTATGAGTGC
GTGACTCACAACGGGGTTAACTCGGCGCCCGACAGCCGCCGCGTGCTGGTCACAGTCAACTATCCTCC
GACCATCACGGACGTGACCAGCGCCCGCACCGCGCTGGGCCGGGCCGCCCTCCTGCGCTGCGAAGCCA
TGGCGGTTCCCCCCGCGGATTTCCAGTGGTACAAGGATGACAGACTGCTGAGCAGCGGCACGGCCGAA
GGCCTGAAGGTGCAGACGGAGCGCACCCGCTCGATGCTTCTCTTTGCCAACGTGAGCGCCCGGCATTA
CGGCAACTATACGTGTCGCGCCGCCAACCGACTGGGAGCGTCCAGCGCCTCCATGCGGCTCCTGCGCC
CAGGATCCCTGGAGAACTCAGCCCCGAGGCCCCCAGGGCTCCTGGCCCTCCTCTCCGCCCTGGGCTGG
CTGTGGTGGAGAATGGTCGACGGC

| | | | |
|---|---|---|---|
| NOV11g, 316763704 | SEQ ID NO: 294 | 325 aa | MW at 35755.0kD |
| Protein Sequence | | | |

TSRLAGLAVISRGLLSQSLEFNSPADNYTVCEGDNATLSCFIDEHVTRVAWLNRSNILYAGNDRWTSD
PRVRLLINTPEEFSILITEVGLGDEGLYTCSFQTRHQPYTTQVYLIVHVPARIVNISSPVTVNEGGNV
NLLCLAVGRPEPTVTWRQLRDGFTSEGEILEISDIQRGQAGEYECVTHNGVNSAPDSRRVLVTVNYPP
TITDVTSARTALGRAALLRCEAMAVPPADFQWYKDDRLLSSGTAEGLKVQTERTRSMLLFAINSARHY
GNYTCRAANRLGASSASMRLLRPGSLENSAPRPPGLLALLSALGWLWWRMVDG

| | | |
|---|---|---|
| NOV11h, CG51027-01 | SEQ ID NO: 295 | 1018 bp |
| DNA Sequence | ORF Start: at 1 | ORF Stop: TAG at 958 |

CTGGCCGGCTTGGCCGTCATCAGCCGAGGGCTGCTCTCCCAGAGCCTGGAGTTCAACTCTCCTGCCGA
CAACTACACAGTGTGTGAAGGTGACAACGCCACCCTCAGCTGCTTCATCGACGAGCACGTGACCCGCG
TGGCTTGGCTGAACCGCTCCAACATCCTGTATGCCGGCAATGACCGCTGGACCAGCGACCCGCGGGTG
CGGCTGCTCATCAACACCCCCGAGGAGTTCTCCATCCTCATCACCGAGGTGGGGCTCGGCGACGAGGG
CCTCTACACCTGCTCCTTCCAGACCCGCCACCAGCCGTACACCACTCAGGTCTACCTCATTGTCCACG
TCCCTGCCCGCATTGTGAACATCTCGTCGCCTGTGACGGTGAATGAGGGGGGCAATGTGAACCTGCTT
TGCCTGGCCGTGGGGCGGCCAGAGCCCACGGTCACCTGGAGACAGCTCCGAGACGGCTTCACCTCGGA
GGGAGAGATCCTGGAGATCTCTGACATCCAGCGGGGCCAGGCCGGGGAGTATGAGTGCGTGACTCACA
ACGGGGTTAACTCGGCGCCCGACAGCCGCCGCGTGCTGGTCACAGTCAACTATCCTCCGACCATCACG
GACGTGACCAGCGCCCGCACCGCGCTGGGCCGGACCGCCCTCCTGCGCTGCGAAGCCATGGCGGTTCC
CCCCGCGGATTTCCAGTGGTACAAGGATGACAGACTGCTGAGCAGCGGCACGGCCGAAGGCCTGAAGG
TGCAGACGGAGCGCACCCGCTCGATGCTTCTCTTTGCCAACGTGAGCGCCCGGCATTACGGCAACTAT
ACGTGTCGCGCCGCCAATCGACTGGGAGCGTCCAGCGCCTCCATGCGGCTCCTGCGCCCAGGATCCCT
GGAGAACTCAGCCCCGAGGCCCCCAGGGCTCCTGGCCCTCCTCTCCGCCCTGGGCTGGCTGTGGTGGA
GAATGTAGGCGCAACCCAGTCCAGCTCACCTCCCCCTGCAGGGGGCCTCAAACCAAGAGTGAGAGA

| | | | |
|---|---|---|---|
| NOV11h, CG51027-01 | SEQ ID NO: 296 | 319 aa | MW at 35169.4kD |
| Protein Sequence | | | |

LAGLAVISRGLLSQSLEFNSPADNYTVCEGDNATLSCFIDEHVTRVAWLNRSNILYAGNDRWTSDPRV
RLLINTPEEFSILITEVGLGDEGLYTCSFQTRHQPYTTQVYLIVHVPARIVNISSPVTVNEGGNVNLL
CLAVGRPEPTVTWRQLRDGFTSEGEILEISDIQRGQAGEYECVTHNGVNSAPDSRRVLVTVNYPPTIT
DVTSARTALGRTALLRCEAMAVPPADFQWYKDDRLLSSGTAEGLKVQTERTRSMLLFANVSARHYGNY
TCRAANRLGASSASMRLLRPGSLENSAPRPPGLLALLSALGWLWWRM

| | | |
|---|---|---|
| NOV11i, CG51027-02 | SEQ ID NO: 297 | 926 bp |
| DNA Sequence | ORF Start: at 1 | ORF Stop: TAG at 922 |

TCCCAGAGCCTGGAGTTCAACTCTCCTGCCGACAACTACACAGTGTGTGAAGGTGACAACGCCACCCT
CAGCTGCTTCATCGACGAGCACGTGACCCGCGTGGCCTGGCTGAACCGCTCCAACATCCTGTATGCCG
GCAATGACCGCTGGACCAGCGACCCGCGGGTGCGGCTGCTCATCAACACCCCCGAGGAGTTCTCCATC
CTCATCACCGAGGTGGGGCTCGGCGACGAGGGCCTCTACACCTGCTCCTTCCAGACCCGCCACCAGCC
GTACACCACTCAGGTCTACCTCATTGTCCACGTCCCTGCCCGCATTGTGAACATCTCGTCGCCTGTGA
CGGTGAATGAGGGGGGCAATGTGAACCTGCTTTGCCTGGCCGTGGGGCGGCCAGAGCCCACGGTCACC
TGGAGACAGCTCCGAGACGGCTTCACCTCGGAGGGAGAGATCCTGGAGATCTCTGACATCCAGCGGGG
CCAGGCCGGGGAGTATGAGTGCGTGACTCACAACGGGGTTAACTCGGCGCCCGACAGCCGCCGCGTGC
TGGTCACAGTCAACTATCCTCCGACCATCACGGACGTGACCAGCGCCCGCACCGCGCTGGGCCGGGCC
GCCCTCCTGCGCTGCGAAGCCATGGCGGTTCCCCCCGCGGATTTCCAGTGGTACAAGGATGACAGACT
GCTGAGCAGCGGCACGGCCGAAGGCCTGAAGGTGCAGACGGAGCGCACCCGCTCGATGCTTCTCTTTG
CCAACGTGAGCGCCCGGCATTACGGCAACTATACGTGTCGCGCCGCCAACCGACTGGGAGCGTCCAGC
GCCTCCATGCGGCTCCTGCGCCCAGGATCCCTGGAGAACTCAGCCCCGAGGCCCCCAGGGCTCCTGGC
CCTCCTCTCCGCCCTGGGCTGGCTGTGGTGGAGAATGTAGGC

| | | | |
|---|---|---|---|
| NOV11i, CG51027-02 | SEQ ID NO: 298 | 307 aa | MW at 33974.9kD |
| Protein Sequence | | | |

SQSLEFNSPADNYTVCEGDNATLSCFIDEHVTRVAWLNRSNILYAGNDRWTSDPRVRLLINTPEEFSI
LITEVGLGDEGLYTCSFQTRHQPYTTQVYLIVHVPARIVNISSPVTVNEGGNVNLLCLAVGRPEPTVT
WRQLRDGFTSEGEILEISDIQRGQAGEYECVTHNGVNSAPDSRRVLVTVNYPPTITDVTSARTALGRA
ALLRCEAMAVPPADFQWYKDDRLLSSGTAEGLKVQTERTRSMLLFANVSARHYGNYTCRAANRLGASS
ASMRLLRPGSLENSAPRPPGLLALLSALGWLWWRM

| | | |
|---|---|---|
| NOV11j, CG51027-03 | SEQ ID NO: 299 | 1171 bp |
| DNA Sequence | ORF Start: at 1 | ORF Stop: TAG at 958 |

CTGGCCGGCTTGGCCGTCATCAGCCGAGGGCTGCTCTCCCAGAGCCTGGAGTTCAACTCTCCTGCCGA
CAACTACACAGTGTGTGAAGGTGACAACGCCACCCTCAGCTGCTTCATCGACGAGCACGTGACCCGCG
TGGCCTGGCTGAACCGCTCCAACATCCTGTATGCCGGCAATGACCGCTGGACCAGCGACCCGCGGGTG
TGGCTGCTCATCAACACCCCCGAGGAGTTCTCCATCCTCATCACCGAGGTGGGGCTCGGCGACGAGGG
CCTCTACACCTGCTCCTTCCAGACCCGCCACCAGCCGTACACCACTCAGGTCTACCTCATTGTCCACG
TCCCTGCCCGCATTGTGAACATCTCGTCGCCTGTGATGGTGAATGAGGGGGGCAATGTGAACCTGCTT
TGCCTGGCCGTGGGGCGGCCAGAGCCCACGGTCACCTGGAGACAGCTCCGAGACGGCTTCACCTCGGA
GGGAGAGATCCTGGAGATCTCTGACATCCAGCGGGGCCAGGCCGGGGAGTATGAGTGCGTGACTCACA
ACGGGGTTAACTCGGCGCCCGACAGCCGCCGCGTGCTGGTCACAGTCAACTATCCTCCGACCATCACG
GACGTGACCAGCGCCCGCACCGCGCTGGGCCGGGCCGCCCTCCTGCGCTGCGAAGCCATGGCGGTTCC
CCCCGCGGATTTCCAGTGGTATAAGGATGACAGACTGCTGAGCAGCGGCACGGCCGAAGGCCTGAAGG
TGCAGATGGAGCGCACCCGCTCGATGCTTCTCTTTGCCAACGTGAGCGCCCGGCATTACGGCAACTAT
ACGTGTCGCGCCGCCAACCGACTGGGAGCGTCCAGCGCCTCCATGCGGCTCCTGCGCCCAGGATCCCT
GGAGAACTCAGCCCCGAGGCCCCCAGGGCTCCTGGCCCTCCTCTCCGCCCTGGGCTGGCTGTGGTGGA
GAATGTAGGCGCAACCCAGTGGAGCTCACCTCCCCCTGCAGGGGGCCTCAGGCCAAGAGTGAGAGAAA
CGGGGGAGCAAGAGCCGTGGGTCTCGTGGGGGCAGAAGAGCTCTCGGCCACCAAGGAAGAAGAGAGAG
GAGAAGAGGAGGAGGCAGAGGAAGAAAGATCTTCAGAGAACCCATCACTGTGAGGGATAACGCAAAAT
TATGCATCTTTCTAC

| | | | |
|---|---|---|---|
| NOV11j, CG51027-03 | SEQ ID NO: 300 | 319 aa | MW at 35229.6kD |
| Protein Sequence | | | |

LAGLAVISRGLLSQSLEFNSPADNYTVCEGDNATLSCFIDEHVTRVAWLNRSNILYAGNDRWTSDPRV
WLLINTPEEFSILITEVGLGDEGLYTCSFQTRHQPYTTQVYLIVHVPARIVNISSPVMVNEGGNVNLL
CLAVGRPEPTVTWRQLRDGFTSEGEILEISDIQRGQAGEYECVTHNGVNSAPDSRRVLVTVNYPPTIT
DVTSARTALGRAALLRCEAMAVPPADFQWYKDDRLLSSGTAEGLKVQMERTRSMLLFANVSARHYGNY
TCRAACRLGASSASMRLLRPGSLENSAPRPPGLLALLSALSWLWWRM

| | | |
|---|---|---|
| NOV11k, CG51027-04 | SEQ ID NO: 301 | 927 bp |
| DNA Sequence | ORF Start: at 1 | ORF Stop: end of sequence |

TTGGCCGTCATCAGCCGAGGGCTGCTCTCCCAGAGCCTGGAGTTCAACTCTCCTGCCGACAACTACAC
AGTGTGTGAAGGTGACAACGCCACCCTCAGCTGCTTCATCGACGAGCACGTGACCCGCGTGGCCTGGC
TGAACCGCTCCAACATCCTGTATGCCGGCAATGACCGCTGGACCAGCGACCCGCGGGTGCGGCTGCTC
ATCAACACCCCCGAGGAGTTCTCCATCCTCATCACCGAGGTGGGGCTCGGCGACGAGGGCCTCTACAC
CTGCTCCTTCCAGACCCGCCACCAGCCGTACACCACTCAGGTCTACCTCATTGTCCACGTCCCTGCCC
GCATTGTGAACATCTCGTCGCCTGTGACGGTGAATGAGGGGGGCAATGTGAACCTGCTTTGCCTGGCC
GTGGGGCGGCCAGAGCCCACGGTCACCTGGAGACAGCTCCGAGACGGCTTCACCTCGGAGGGAGAGAT
CCTGGAGATCTCTGACATCCAGCGGGGCCAGGCCGGGGAGTATGAGTGCGTGACTCACAACGGGGTTA
ACTCGGCGCCCGACAGCCGCCGCGTGCTGGTCACAGTCAACTATCCTCCGACCATCACGGACGTGACC
AGCGCCCGCACCGCGCTGGGCCGGGCCGCCCTCCTGCGCTGCGAAGCCATGGCGGTTCCCCCCGCGGA
TTTCCAGTGGTACAAGGATGACAGACTGCTGAGCAGCGGCACGGCCGAAGGCCTGAAGGTGCAGACGG
AGCGCACCCGCTCGATGCTTCTCTTTGCCAACGTGAGCGCCCGGCATTACGGCAACTATACGTGTCGC
GCCGCCAACCGACTGGGAGCGTCCAGCGCCTCCATGCGGCTCCTGCGCCCAGGATCCCTGGAGAACTC
AGCCCCGAGGCCCCCAGGGCTCCTGGCCCTCCTCTCCGCCCTG

| | | | |
|---|---|---|---|
| NOV11k, CG51 027-04 | SEQ ID NO: 302 | 309 aa | MW at 33881.8kD |
| Protein Sequence | | | |

LAVISRGLLSQSLEFNSPADNYTVCEGDNATLSCFIDEHVTRVAWLNRSNILYAGNDRWTSDPRVRLL
INTPEEFSILITEVGLGDEGLYTCSFQTRHQPYTTQVYLIVHVPARIVNISSPVTVNEGGNVNLLCLA
VGRPEPTVTWRQLRDGFTSEGEILEISDIQRGQAGEYECVTHNGVNSAPDSRRVLVTVNYPPTITDVT
SARTALGRAALLRCEAMAVPPADFQWYKDDRLLSSGTAEGLKVQTERTRSMLLFANVSARHYGNYTCR
AANRLGASSASMRLLRPGSLENSAPRPPGLLALLSAL

| | | |
|---|---|---|
| NOV11l, CG51027-05 | SEQ ID NO: 303 | 1169 bp |
| DNA Sequence | ORF Start: ATG at 71 | ORF Stop: TAG at 1079 |

CTCCAACAAGCATAGCGCGCCCCGGACCGGCCCCCCCTTTCCCCTCCCCCTCCGTGCCGCCTCTGCCG
CGATGCCCCCCGCTGCGCCCGGGGCCCGGCTCCGGCTTCTCGCCGCCGCCGCCCTGGCCGGCTTGGCC
GTCATCAGCCGGGGGCTGCTCTCCCAGAGGCTGGAGTTCAACTCTCCTGCCGACAACTACACAGTGTG
TGAAGGTGACAACGCCACCCTCAGCTGCTTCATGGACGAGCATGTGACCCGCGTGGCCTGGCTGAACC
GCTCCAACATCCTGTACGCCGGCAACGACCGCAGGACCAGGGACCCGCGGGTGCGGCTGCTCATCAAC
ACCCCCGAGGAGTTCTCCATCCTCGTCACCGAGGTGGGGCTCGGCGACGAGGGCCTCTACACCTGCTC
CTTCCAGACCCGCCACCAGCCGTACACCACTCAGGTCTACCTCATTGTCCACGTCCCTGCCCGCGTTG
TGAACATCTCGTCGCCTGTGATGGTGAATGAGGGAGGTAATGTGAACCTGCTTTGCCTGGCCGTGGGG
CGGCCAGAGCCCACGGTCACCTGGAGACAGCTCCGAGACGGCTTCACCTCGGAGGGAGAGATCCTGGA
GATCTCTGACATCCTGCGGGGCCAGGCCGGGGAGTATGAGTGCGTGACTCACAACGGGGTTAACTCGG
CGCCCGACAGCCGCCGCGTGCTGGTCACAGTCAACTATCCTCCGACCATCACGGACGT9ACCAGCGCC
CGCACCGCGCTGGGGCCGGGCCGCCTACTGCGCTGCGAAGCCATGGCGGTTTCCCCCGCGGATTTCCA
GTGGTATAAGGATGACAGACTACTGAGCAGCGGCACGGCCGAGGGCCTGAAGGTGCAGATGGAGCGCA
CTCGCTCGATGCTTCTCTTTGCCAACATGAGCGCCCGGCATTACGGCAACTATACGTGTTGCGCCGCC
AACCGGCTGGGAGCGTCCAGCGCCTCCATGCGGCTCCTGTGCCCAGGATCCCTGGAGAACTCAGCCCC
GAGGCCCCCAGGGCCCCTGGCCCTCCTCTCCGCCCTGGGCTGGCTGTGGTGGAGAATGTAGGCGCAAC
CCAGTGGAGCTCGCCTCCCCCTGCAGGGGGCCTCAGGCCAAGAGTGAGAGAAAAGGGGGAGCAAGAGC
CCTGGGTCTCGTG

| | | | |
|---|---|---|---|
| NOV11l, CG51027-05 | SEQ ID NO: 304 | 336 aa | MW at 36823.6kD |
| Protein Sequence | | | |

MPPAAPGARLRLLAAAALAGLAVISRGLLSQRLEFNSPADNYTVCEGDNATLSCFMDEHVTRVAWLNR
SNILYAGNDRRTRDPRVRLLINTPEEFSILVTEVGLGDEGLYTCSFQTRHQPYTTQVYLIVHVPARVV
NISSPVMVNEGGNVNLLCLAVGRPEPTVTWRQLRDGFTSEGEILEISDILRGQAGEYECVTHNGVNSA
PDSRRVLVTVNYPPTITDVTSARTALGPGRLLRCEAMAVSPADFQWYKDDRLLSSGTAEGLKVQMERT
RSMLLFANMSARHYGNYTCCAANRLGAS SASMRLLCPGSLENSAPRPPGPLALLSALGWLWWRM

| | | |
|---|---|---|
| NOV11m, CG51027-07 | SEQ ID NO: 305 | 946 bp |
| DNA Sequence | ORF Start: at 11 | ORF Stop: at 938 |

CACCAAGCTTCTGCTCTCCCAGAGCCTGGAGTTCAACTCTCCTGCCGACAACTACACAGTGTGTGAAG
GTGACAACGCCACCCTCAGCTGCTTCATCGACGAGCACGTGACCCGCGTGGCCTGGCTGAACCGCTCC
AACATCCTGTATGCCGGCAATGACCGCTGGACCAGCGACCCGCGGGTGCGGCTGCTCATCAACACCCC
CGAGGAGTTCTCCATCCTCATCACCGAGGTGGGGCTCGGCGACGAGGGCCTCTACACCTGCTCCTTCC
AGACCCGCCACCAGCCGTACACCACTCAGGTCTACCTCATTGTCCACGTCCCTGCCCGCATTGTGAAC
ATCTCGTCGCCTGTGACGGTGAATGAGGGGGGCAATGTGAACCTGCTTTGCCTGGCCGTGGGGCGGCC
AGAGCCCACGGTCACCTGGAGACAGCTCCGAGACGGCTTCACCTCGGAGGGAGAGATCCTGGAGATCT
CTGACATCCAGCGGGGCCAGGCCGGGGAGTATGAGTGCGTGACTCACAACGGGGTTAACTCGGCGCCC
GACAGCCGCCGCGTGCTGGTCACAGTCAACTATCCTCCGACCATCACGGACGTGACCAGCGCCCGCAC
CGCGCTGGGCCGGGCCGCCCTCCTGCGCTGCGAAGCCATGGCGGTTCCCCCCGCGGATTTCCAGTGGT
ACAAGGATGACAGACTGCTGAGCAGCGGCACGGCCGAAGGCCTGAAGGTGCAGACGGAGCGCACCCGC
TCGATGCTTCTCTTTGCCAACGTGAGCGCCCGGCATTACGGCAACTATACGTGTCGCGCCGCCAACCG
ACTGGGAGCGTCCAGCGCCTCCATGCGGCTCCTGCGCCCAGGATCCCTGGAGAACTCAGCCCCGAGGC
CCCCAGGGCTCCTGGCCCTCCTCTCCGCCCTGGGCTGGCTGTGGTGGAGAATGCTCGAGGGC

| | | | |
|---|---|---|---|
| NOV11m, CG51027-07 | SEQ ID NO: 306 | 309 aa | MW at 34201.2kD |
| Protein Sequence | | | |

LLSQSLEFNSPADNYTVCEGDNATLSCFIDEHVTRVAWLNRSMILYAGNDRWTSDPRVRLLINTPEEF
SILITEVGLGDEGLYTCSFQTRHQPYTTQVYLIVHVPARIVNISSPVTVNEGGNVNLLCLAVGRPEPT
VTWRQLRDGFTSEGEILEISDIQRGQAGEYECVTHNGVNSAPDSRRVLVTVNYPPTITDVTSARTALG
RAALLRCEAMAVPPADFQWYKDDRLLSSGTAEGLKVQTERTRSMLLFANVSARHYGNYTCRAANRLGA
SSASMRLLRPGSLENSAPRPPGLLALLSALGWLWWRM

| | | |
|---|---|---|
| NOV11n, CG51027-08 | SEQ ID NO: 307 | 1033 bp |
| DNA Sequence | ORF Start: ATG at 17 | ORF Stop: at 1025 |

CACCAAGCTTCCCACCATGCCCCCCCCTGCGCCCGGGGCCCGGCTCCGGCTTCTCGCCGCCGCCGCCC
TGGCCGGCTTGGCCGTCATCAGCCGAGGGCTGCTCTCCCAGAGCCTGGAGTTCAACTCTCCTGCCGAC
AACTACACAGTGTGTGAAGGTGACAACGCCACCCTCAGCTGCTTCATCGACGAGCACGTGACCCGCGT
GGCCTGGCTGAACCGCTCCAACATCCTGTATGCCGGCAATGACCGCTGGACCAGCGACCCGCGGGTGC
GGCTGCTCATCAACACCCCCGAGGAGTTCTCCATCCTCATCACCGAGGTGGGGCTCGGCGACGAGGGC
CTCTACACCTGCTCCTTCCAGACCCGCCACCAGCCGTACACCACTCAGGTCTACCTCATTGTCCACGT
CCCTGCCCGCATTGTGAACATCTCGTCGCCTGTGACGGTGAATGAGGGGGGCAATGTGAACCTGCTTT
GCCTGGCCGTGGGGCGGCCAGAGCCCACGGTCACCTGGAGACAGCTCCGAGACGGCTTCACCTCGGAG
GGAGAGATCCTGGAGATCTCTGACATCCAGCGGGGCCAGGCCGGGGAGTATGAGTGCGTGACTCACAA
CGGGGTTAACTCGGCGCCCGACAGCCGCCGCGTGCTGGTCACAGTCAACTATCCTCCGACCATCACGG
ACGTGACCAGCGCCCGCACCGCGCTGGGCCGGGCCGCCCTCCTGCGCTGCGAAGCCATGGCGGTTCCC
CCCGCGGATTTCCAGTGGTACAAGGATGACAGACTGCTGAGCAGCGGCACGGCCGAAGGCCTGAAGGT
GCAGACGGAGCGCACCCGCTCGATGCTTCTCTTTGCCAACGTGAGCGCCCGGCATTACGGCAACTATA
CGTGTCGCGCCGCCAACCGACTGGGAGCGTCCAGCGCCTCCATGCGGCTCCTGCGCCCAGGATCCCTG
GAGAACTCAGCCCCGAGGCCCCCAGGGCTCCTGGCCCTCCTCTCCGCCCTGGGCTGGCTGTGGTGGAG
AATGCTCGAGGGC

| | | | |
|---|---|---|---|
| NOV11n, CG51027-08 | SEQ ID NO: 308 | 336 aa | MW at 36794.3kD |
| Protein Sequence | | | |

MPPPAPGARLRLLAAAALAGLAVISRGLLSQSLEFNSPADNYTVCEGDNATLSCFIDEHVTRVAWLNR
SNILYAGNDRWTSDPRVRLLINTPEEFSILITEVGLGDEGLYTCSFQTRHQPYTTQVYLIVHVPARIV
NISSPVTVNEGGNVNLLCLAVGRPEPTVTWRQLRDGFTSEGEILEISDIQRGQAGEYECVTHNGVNSA
PDSRRVLVTVNYPPTITDVTSARTALGRAALLRCEAMAVPPADFQWYKDDRLLSSGTAEGLKVQTERT
RSMLLFANVSARHYGNYTCRAANPLGASSASMRLLRPGSLENSAPRPPGLLALLSALGWLWWPM

| | | |
|---|---|---|
| NOV11o, CG51027-10 | SEQ ID NO: 309 | 1035 bp |
| DNA Sequence | ORF Start: ATG at 16 | ORF Stop: TAG at 1024 |

CACCGCGGCCGCACCATGCCCCCCCCTGCGCCCGGGGCCCGGCTCCGGCTTCTCGCCGCCGCCGCCCT
GGCCGGCTTGGCCGTCATCAGCCGAGGGCTGCTCTCCCAGAGCCTGGAGTTCAACTCTCCTGCCGACA
ACTACACAGTGTGTGAAGGTGACAACGCCACCCTCAGCTGCTTCATCGACGAGCACGTGACCCGCGTG
GCCTGGCTGAACCGCTCCAACATCCTGTATGCCGGCAATGACCGCTGGACCAGCGACCCGCGGGTGCG
GCTGCTCATCAACACCCCCGAGGAGTTCTCCATCCTCATCACCGAGGTGGGGCTCGGCGACGAGGGCC
TCTACACCTGCTCCTTCCAGACCCGCCACCAGCCGTACACCACTCAGGTCTACCTCATTGTCCACGTC
CCTGCCCGCATTGTGAACATCTCGTCGCCTGTGACGGTGAATGAGGGGGGCAATGTGAACCTGCTTTG
CCTGGCCGTGGGGCGGCCAGAGCCCACGGTCACCTGGAGACAGCTCCGAGACGGCTTCACCTCGGAGG
GAGAGATCCTGGAGATCTCTGACATCCAGCGGGGCCAGGCCGGGGAGTATGAGTGCGTGACTCACAAC
GGGGTTAACTCGGCGCCCGACAGCCGCCGCGTGCTGGTCACAGTCAACTATCCTCCGACCATCACGGA
CGTGACCAGCGCCCGCACCGCGCTGGGCCGGGCCGCCCTCCTGCGCTGCGAAGCCATGGCGGTTCCCC
CCGCGGATTTCCAGTGGTACAAGGATGACAGACTGCTGAGCAGCGGCACGGCCGAAGGCCTGAAGGTG
CAGACGGAGCGCACCCGCTCGATGCTTCTCTTTGCCAACGTGAGCGCCCGGCATTACGGCAACTATAC
GTGTCGCGCCGCCAACCGACTGGGAGCGTCCAGCGCCTCCATGCGGCTCCTGCGCCCAGGATCCCTGG
AGAACTCAGCCCCGAGGCCCCCAGGGCTCCTGGCCCTCCTCTCCGCCCTGGGCTGGCTGTGGTGGAGA
ATGTAGGTCGACGGC

| | | | |
|---|---|---|---|
| NOV11o, CG51027-10 | SEQ ID NO: 310 | 336 aa | MW at 36794.3kD |
| Protein Sequence | | | |

MPPPAPGARLRLLAAAALAGLAVISRGLLSQSLEFNSPADNYTVCEGDNATLSCFIDEHVTRVAWLNR
SNILYAGNDRWTSDPRVRLLINTPEEFSILITEVGLGDEGLYTCSFQTRHQPYTTQVYLIVHVPARIV
NISSPVTVNEGGNVNLLCLAVGRPEPTVTWRQLRDGFTSEGEILEISDIQRGQAGEYECVTHNGVNSA
PDSRRVLVTVNYPPTITDVTSARTALGRAALLRCEAMAVPPALFQWYKDDRLLSSGTAEGLKVQTERT
RSMLLFANVSARHYGNYTCRAANRLGASSASMRLLRPGSLENSAPRPPGLLALLSALGWLWWRM

| | | |
|---|---|---|
| NOV11p, CG51027-11 | SEQ ID NO: 311 | 976 bp |
| DNA Sequence | ORF Start: at 11 | ORF Stop: at 971 |

CACCTCGCGACTGGCCGGCTTGGCCGTCATCAGCCGAGGGCTGCTCTCCCAGAGCCTGGAGTTCAACT
CTCCTGCCGACAACTACACAGTGTGTGAAGGTGACAACGCCACCCTCAGCTGCTTCATCGACGAGCAC
GTGACCCGCGTGGCCTGGCTGAACCGCTCCAACATCCTGTATGCCGGCAATGACCGCTGGACCAGCGA
CCCGCGGGTGCGGCTGCTCATCAACACCCCCGAGGAGTTCTCCATCCTCATCACCGAGGTGGGGCTCG
GCGACGAGGGCCTCTACACCTGCTCCTTCCAGACCCGCCACCAGCCGTACACCACTCAGGTCTACCTC
ATTGTCCACGTCCCTGCCCGCATTGTGAACATCTCGTCGCCTGTGACGGTGAATGAGGGGGGCAATGT
GAACCTGCTTTGCCTGGCCGTGGGGCGGCCAGAGCCCACGGTCACCTGGAGACAGCTCCGAGACGGCT
TCACCTCGGAGGGAGAGATCCTGGAGATCTCTGACATCCAGCGGGGCCAGGCCGGGGAGTATGAGTGC
GTGACTCACAACGGGGTTAACTCGGCGCCCGACAGCCGCCGCGTGCTGGTCACAGTCAACTATCCTCC
GACCATCACGGACGTGACCAGCGCCCGCACCGCGCTGGGCCGGGCCGCCCTCCTGCGCTGCGAAGCCA
TGGCGGTTCCCCCCGCGGATTTCCAGTGGTACAAGGATGACAGACTGCTGAGCAGCGGCACGGCCGAA
GGCCTGAAGGTGCAGACGGAGCGCACCCGCTCGATGCTTCTCTTTGCCAACGTGAGCGCCCGGCATTA
CGGCAACTATACGTGTCGCGCCGCCAACCGACTGGGAGCGTCCAGCGCCTCCATGCGGCTCCTGCGCC
CAGGATCCCTGGAGAACTCAGCCCCGAGGCCCCCAGGGCTCCTGGCCCTCCTCTCCGCCCTGGGCTGG
CTGTGGTGGAGAATGGTCGACGGC

| | | | |
|---|---|---|---|
| NOV11p, CG51027-11 | SEQ ID NO: 312 | 320 aa | MW at 35238.5kD |
| Protein Sequence | | | |

LAGLAVISRGLLSQSLEFNSPADNYTVCEGDNATLSCFIDEHVTRVAWLNRSNILYAGNDRWTSDPRV
RLLINTPEEFSILITEVGLGDEGLYTCSFQTRHQPYTTQVYLIVHVPARIVNISSPVTVNEGGNVNLL
CLAVGRPEPTVTWRQLRDGFTSEGEILEISDIQRGQAGEYECVTHNGVNSAPDSRRVLVTVNYPPTIT
DVTSARTALGRAALLRCEAMAVPPADFQWYKDDRLLSSGTAEGLKVQTERTRSMLLFANVSARHYGNY
TCRAANRLGASSASMRLLRPGSLENSAPRPPGLLALLSALGWLWWRMV

| | | |
|---|---|---|
| NOV11q, CG51027-12 | SEQ ID NO: 313 | 1030 bp |
| DNA Sequence | ORF Start: ATG at 14 | ORF Stop: at 1022 |

CACCTCGCGAACCATGCCCCCCCCTGCGCCCGGGGCCCGGCTCCGGCTTCTCGCCGCCGCCGCCCTGG
CCGGCTTGGCCGTCATCAGCCGAGGGCTGCTCTCCCAGAGCCTGGAGTTCAACTCTCCTGCCGACAAC
TACACAGTGTGTGAAGGTGACAACGCCACCCTCAGCTGCTTCATCGACGAGCACGTGACCCGCGTGGC
CTGGCTGAACCGCTCCAACATCCTGTATGCCGGCAATGACCGCTGGACCAGCGACCCGCGGGTGCGGC
TGCTCATCAACACCCCCGAGGAGTTCTCCATCCTCATCACCGAGGTGGGGCTCGGCGACGAGGGCCTC
TACACCTGCTCCTTCCAGACCCGCCACCAGCCGTACACCACTCAGGTCTACCTCATTGTCCACGTCCC
TGCCCGCATTGTGAACATCTCGTCGCCTGTGACGGTGAATGAGGGGGGCAATGTGAACCTGCTTTGCC
TGGCCGTGGGGCGGCCAGAGCCCACGGTCACCTGGAGACAGCTCCGAGACGGCTTCACCTCGGAGGGA
GAGATCCTGGAGATCTCTGACATCCAGCGGGGCCAGGCCGGGGAGTATGAGTGCGTGACTCACAACGG
GGTTAACTCGGCGCCCGACAGCCGCCGCGTGCTGGTCACAGTCAACTATCCTCCGACCATCACGGACG
TGACCAGCGCCCGCACCGCGCTGGGCCGGGCCGCCCTCCTGCGCTGCGAAGCCATGGCGGTTCCCCCC
GCGGATTTCCAGTGGTACAAGGATGACAGACTGCTGAGCAGCGGCACGGCCGAAGGCCTGAAGGTGCA
GACGGAGCGCACCCGCTCGATGCTTCTCTTTGCCAACGTGAGCGCCCGGCATTACGGCAACTATACGT
GTCGCGCCGCCAACCGACTGGGAGCGTCCAGCGCCTCCATGCGGCTCCTGCGCCCAGGATCCCTGGAG
AACTCAGCCCCGAGGCCCCCAGGGCTCCTGGCCCTCCTCTCCGCCCTGGGCTGGCTGTGGTGGAGAAT
GGTCGACGGC

| | | | |
|---|---|---|---|
| NOV11q, CG51027-12 | SEQ ID NO: 314 | 336 aa | MW at 36794.3kD |
| Protein Sequence | | | |

MPPPAPGARLRLLAAAALAGLAVISRGLLSQSLEFNSPADNYTVCEGDNATLSCFIDEHVTRVAWLNR
SNILYAGNDRWTSDPRVRLLINTPEEFSILITEVGLGDEGLYTCSFQTRHQPYTTQVYLIVHVPARIV
NISSPVTVNEGGNVNLLCLAVGRPEPTVTWRQLRDGFTSEGEILEISDIQRGQAGEYECVTHNGVNSA
PDSRRVLVTVNYPPTITDVTSARTALGRAALLRCEAMAVPPADFQWYKDDRLLSSGTAEGLKVQTERT
RSMLLFANVSARHYGNYTCRAANRLGASSASMRLLRPGSLENSAPRPPGLLALLSALGWLWWRM

| | | |
|---|---|---|
| NOV11r, SNP13376340 | SEQ ID NO: 315 | 1271 bp |
| of CG51027-06, | ORF Start: ATG at 48 | ORF Stop: TAG at 1056 |
| DNA Sequence | SNP Pos: 888 | SNP Change: G to A |

GCGCAGTGTGCTGGAATTCGCCCTTCCTCCGTGCCGCCTCTGCCGCGATGCCCCCCCCTGCGCCCGGG
GCCCGGCTCCGGCTTCTCGCCGCCGCCGCCCTGGCCGGCTTGGCCGTCATCAGCCGAGGGCTGCTCTC
CCAGAGCCTGGAGTTCAACTCTCCTGCCGACAACTACACAGTGTGTGAAGGTGACAACGCCACCCTCA
GCTGCTTCATCGACGAGCACGTGACCCGCGTGGCCTGGCTGAACCGCTCCAACATCCTGTATGCCGGC
AATGACCGCTGGACCAGCGACCCGCGGGTGCGGCTGCTCATCAACACCCCCGAGGAGTTCTCCATCCT
CATCACCGAGGTGGGGCTCGGCGACGAGGGCCTCTACACCTGCTCCTTCCAGACCCGCCACCAGCCGT
ACACCACTCAGGTCTACCTCATTGTCCACGTCCCTGCCCGCATTGTGAACATCTCGTCGCCTGTGATG
GTGAATGAGGGGGGCAATGTGAACCTGCTTTGCCTGGCCGTGGGGCGGCCAGAGCCCACGGTCACCTG
GAGACAGCTCCGAGACGGCTTCACCTCGGAGGGAGAGATCCTGGAGATCTCTGACATCCAGCGGGGCC
AGGCCGGGGAGTATGAGTGCGTGACTCACAACGGGGTTAACTCGGCGCCCGACAGCCGCCGCGTGCTG
GTCACAGTCAACTATCCTCCGACCATCACGGACGTGACCAGCGCCCGCACCGCGCTGGGCCGGGCCGC
CCTCCTGCGCTGCGAAGCCATGGCGGTTCCCCCCGCGGATTTCCAGTGGTATAAGGATGACAGACTGC
TGAGCAGCGGCACGGCCGAAGGCCTGAAGGTGCAGATGGAGCGCACCCGCTCGATGCTTCTCTTTGCC
AACATGAGCGCCCGGCATTACGGCAACTATACGTGTTGCGCCGCCAACCGACTGGGAGCGTCCAGCGC
CTCCATGCGGCTCCTGTGCCCAGGATCCCTGGAGAACTCAGCCCCGAGGCCCCCAGGGCTCCTGGCCC
TCCTCTCCGCCCTGGGCTGGCTGTGGTGGAGAATGTAGGCGCAACCCAGTGGAGCTCGCCTCCCCCTG
CAGGGGGCCTCAGGCCAAGAGTGAGAGAAAAGGGGGAGCAAGAGCCCTGGGTCTCGTGGGGGCAGAAG
GGCTCTCGGCCACCAAGGAAGAAGAGAAGAGGAGAAAGAGGAGGAGGCAGAGGAAGAAAGATCTTTAG
AGAACCCATCACTGTGAGGGATAACGCAAAATTATGCATCTTTCTAC

| | | | |
|---|---|---|---|
| NOV11r, SNP13376340 | SEQ ID NO: 316 | 336 aa | MW at 36780.5kD |
| of CG51027-06, | SNP Pos: 281 | | SNP Change: |
| Protein Sequence | | | Val to Met |

MPPPAPGARLRLLAAAALAGLAVISRGLLSQSLEFNSPADNYTVCEGDNATLSCFIDEHVTRVAWLNR
SNILYAGNDRWTSDPRVRLLINTPEEFSILITEVGLGDEGLYTCSFQTRHQPYTTQVYLIVHVPARTV
NISSPVMVNEGGNVNLLCLAVGRPEPTVTWRQLRDGFTSEGEILEISDIQRGQAGEYECVTHNGVNSA
PDSRRVLVTVNYPPTITDVTSARTALGRAALLRCEAMAVPPADFQWYKDDRLLSSGTAEGLKVQMERT
RSMLLFANMSARHYGNYTCCAANPLGASSASMRLLCPGSLENSAPRPPGLLALLSALGWLWWRM

| | | |
|---|---|---|
| NOV11s, SNP13376341 | SEQ ID NO: 317 | 1271 bp |
| of CG51027-06, | ORF Start: ATG at 48 | ORF Stop: TAG at 1056 |
| DNA Sequence | SNP Pos: 941 | SNP Change: A to G |

GCGCAGTGTGCTGGAATTCGCCCTTCCTCCGTGCCGCCTCTGCCGCGATGCCCCCCCCTGCGCCCGGG
GCCCGGCTCCGGCTTCTCGCCGCCGCCGCCCTGGCCGGCTTGGCCGTCATCAGCCGAGGGCTGCTCTC
CCAGAGCCTGGAGTTCAACTCTCCTGCCGACAACTACACAGTGTGTGAAGGTGACAACGCCACCCTCA
GCTGCTTCATCGACGAGCACGTGACCCGCGTGGCCTGGCTGAACCGCTCCAACATCCTGTATGCCGGC
AATGACCGCTGGACCAGCGACCCGCGGGTGCGGCTGCTCATCAACACCCCCGAGGAGTTCTCCATCCT
CATCACCGAGGTGGGGCTCGGCGACGAGGGCCTCTACACCTGCTCCTTCCAGACCCGCCACCAGCCGT
ACACCACTCAGGTCTACCTCATTGTCCACGTCCCTGCCCGCATTGTGAACATCTCGTCGCCTGTGATG
GTGAATGAGGGGGGCAATGTGAACCTGCTTTGCCTGGCCGTGGGGCGGCCAGAGCCCACGGTCACCTG
GAGACAGCTCCGAGACGGCTTCACCTCGGAGGGAGAGATCCTGGAGATCTCTGACATCCAGCGGGGCC
AGGCCGGGGAGTATGAGTGCGTGACTCACAACGGGGTTAACTCGGCGCCCGACAGCCGCCGCGTGCTG
GTCACAGTCAACTATCCTCCGACCATCACGGACGTGACCAGCGCCCGCACCGCGCTGGGCCGGGCCGC
CCTCCTGCGCTGCGAAGCCATGGCGGTTCCCCCCGCGGATTTCCAGTGGTATAAGGATGACAGACTGC
TGAGCAGCGGCACGGCCGAAGGCCTGAAGGTGCAGATGGAGCGCACCCGCTCGATGCTTCTCTTTGCC
AACGTGAGCGCCCGGCATTACGGCAACTATACGTGTTGCGCCGCCAACCGACTGGGGGCGTCCAGCGC
CTCCATGCGGCTCCTGTGCCCAGGATCCCTGGAGAACTCAGCCCCGAGGCCCCCAGGGCTCCTGGCCC
TCCTCTCCGCCCTGGGCTGGCTGTGGTGGAGAATGTAGGCGCAACCCAGTGGAGCTCGCCTCCCCCTG
CAGGGGGCCTCAGGCCAAGAGTGAGAGAAAAGGGGGAGCAAGAGCCCTGGGTCTCGTGGGGGCAGAAG
GGCTCTCGGCCACCAAGGAAGAAGAGAAGAGGAGAAAGAGGAGGAGGCAGAGGAAGAAAGATCTTTAG
AGAACCCATCACTGTGAGGGATAACGCAAAATTATGCATCTTTCTAC

| | | | |
|---|---|---|---|
| NOV11s, SNP13376341 | SEQ ID NO: 318 | 336 aa | MW at 36748.4kD |
| of CG51027-06, | SNP Pos: 298 | | SNP Change: |
| Protein Sequence | | | Gly to Gly |

MPPPAPGARLRLLAAAALAGLAVISRGLLSQSLEFNSPADNYTVCEGDNATLSCFIDEHVTRVAWLNR
SNILYAGNDRWTSDPRVRLLINTPEEFSILITEVGLGDEGLYTCSFQTRHQPYTTQVYLIVHVPARIV
NISSPVMVNEGGNVNLLCLAVGRPEPTVTWRQLRDGFTSEGEILEISDIQRGQAGEYECVTHNGVNSA
PDSRRVLVTVNYPPTITDVTSARTALGRAALLRCEAMAVPPADFQWYKDDRLLSSGTAEGLKVQMERT
RSMLLFAIVSARHYGNYTCCAANPLGASSASMRLLCPGSLENSAPRPPGLEALLSALGWLWWRM

[0411] A ClustalW comparison of the above protein sequences yields the following sequence alignment shown in Table 11B.

TABLE 11B
Comparison of the NOV11 protein sequences.

NOV11a -----MPPPAPGARLRLLAAAALAGLAVISRGLLSQSLEFNSPADNYTVCEGDNATLSCF
NOV11b TKLPTMPPPAPGARLRLLAAAALAGLAVISRGLLSQSLEFNSPADNYTVCEGDNATLSCF
NOV11c -------------------TKLLAGLAVISRGLLSQSLEFNSPADNYTVCEGDNATLSCF
NOV11d ------------------------------------------------TKLGDNATLSCF
NOV11e -----------------------------TKLLLSQSLEFNSPADNYTVCEGDNATLSCF
NOV11f ----------------------LAGLAVISRGLLSQSLEFNSPADNYTVCEGDNATLSCF
NOV11g -------------------TSRLAGLAVISRGLLSQSLEFNSPADNYTVCEGDNATLSCF
NOV11h ----------------------LAGLAVISRGLLSQSLEFNSPADNYTVCEGDNATLSCF
NOV11i ----------------------------------SQSLEFNSPADNYTVCEGDNATLSCF
NOV11j ----------------------LAGLAVISRGLLSQSLEFNSPADNYTVCEGDNATLSCF
NOV11k -------------------------LAVISRGLLSQSLEFNSPADNYTVCEGDNATLSCF
NOV11l -----MPPAAPGARLRLLAAAALAGLAVISRGLLSQRLEFNSPADNYTVCEGDNATLSCF
NOV11m --------------------------------LLSQSLEFNSPADNYTVCEGDNATLSCF
NOV11n -----MPPPAPGARLRLLAAAALAGLAVISRGLLSQSLEFNSPADNYTVCEGDNATLSCF
NOV11o -----MPPPAPGARLRLLAAAALAGLAVISRGLLSQSLEFNSPADNYTVCEGDNATLSCF
NOV11p ----------------------LAGLAVISRGLLSQSLEFNSPADNYTVCEGDNATLSCF
NOV11q -----MPPPAPGARLRLLAAAALAGLAVISRGLLSQSLEFNSPADNYTVCEGDNATLSCF
NOV11a IDEHVTRVAWLNRSNILYAGNDRWTSDPRVRLLINTPEEFSILITEVGLGDEGLYTCSFQ
NOV11b IDEHVTRVAWLNRSNILYAGNDRWTSDPRVRLLINTPEEFSILITEVGLGDEGLYTCSFQ
NOV11c IDEHVTRVAWLNRSNILYAGNDRWTSDPRVRLLINTPEEFSILITEVGLGDEGLYTCSFQ
NOV11d IDEHVTRVAWLNRSNTLYAGNDRWTSDPRVRLLINTPEEFSILITEVGLGDEGLYTCSFQ
NOV11e IDEHVTRVAWLNRSNILYAGNDRWTSDPRVRLLINTPEEFSILITEVGLGDEGLYTCSFQ
NOV11f IDEHVTRVAWLNRSNTLYAGNDRWTSDPRVRLLINTPEEFSILITEVGLGDEGLYTCSFQ
NOV11g IDEBVTRVAWLNRSNILYAGNDRWTSDPRVRLLINTPEEFSILITEVGLGDEGLYTCSFQ
NOV11h IDEHVTRVAWLNRSNILYAGNDRWTSDPRVRLLINTPEEFSILITEVGLGDEGLYTCSFQ
NOV11i IDEHVTRVAWLNRSNILYAGNDRWTSDPRVRLLINTPEEFSILITEVGLGDEGLYTCSFQ
NOV11j IDEHVTRVAWLNRSNILYAGNDRWTSDPRVWLLINTPEEFSILITEVGLGDEGLYTCSFQ
NOV11k IDENVTRVAWLNRSNILYAGNDRWTSDPRVRLLINTPEEFSILITEVGLGDEGLYTCSFQ
NOV11l MDEHVTRVAWLNRSNILYAGNDRRTRDPRVRLLINTPEEFSILVTEVGLGDEGLYTCSFQ
NOV11m IDENVTRVAWLNRSNILYAGNDRWTSDPRVRLLINTPEEFSILITEVGLGDEGLYTCSFQ
NOV11n IDEHVTRVAWLNRSNILYAGNDRWTSDPRVRLLINTPEEFSILITEVGLGDEGLYTCSFQ
NOV11o IDEHVTRVAWLNRSNILYAGNDRWTSDPRVRLLINTPEEFSILITEVGLGDEGLYTCSFQ
NOV11p IDEHVTRVAWLNRSNILYAGNDRWTSDPRVRLLINTPEEFSILITEVGLGDEGLYTCSFQ
NOV11q IDEHVTRVAWLNRSNILYAGNDRWTSDPRVRLLINTPEEFSILITEVGLGDEGLYTCSFQ
NOV11a TRHQPYTTQVYLIVHVPARIVNISSPVMVNEGGNVNLLCLAVGRPEPTVTWRQLRDGFTS
NOV11b TRHQPYTTQVYLIVHVPARIVNISSPVTVNEGGNVNLLCLAVGRPEPTVTWRQLRDGFTS
NOV11c TRHQPYTTQVYLIVHVPARIVNISSPVTVNEGGNVNLLCLAVGRPEPTVTWRQLRDGFTS
NOV11d TRHQPYTTQVYLIVHVPARIVNISSPVTVNEGGNVNLLCLAVGRPEPTVTWRQLRDGFTS
NOV11e TRHQPYTTQVYLIVHVPARIVNISSPVTVNEGGNVNLLCLAVGRPEPTVTWRQLRDGFTS
NOV11f TRHQPYTTQVYLIVHVPARIVNISSPVTVNEGGNVNLLCLAVGRPEPTVTWRQLRDGFTS
NOV11g TRHQPYTTQVYLIVHVPARIVNISSPVTVNEGGNVNLLCLAVGRPEPTVTWRQLRDGFTS
NOV11h TRHQPYTTQVYLIVHVPARIVNISSPVRTNEGGNVNLLCLAVGRPEPTVTWRQLRDGFTS
NOV11i TRHQPYTTQVYLIVHVPARIVNISSPVTVNEGGNVNLLCLAVGRPEPTVTWRQLRDGFTS
NOV11j TRHQPYTTQVYLIVHVPARIVNISSPVMVNEGGNVNLLCLAVGRPEPTVTWRQLRDGFTS
NOV11k TRHQPYTTQVYLIVHVPARIVNISSPVTVNEGGNVNLLCLAVGRPEPTVTWRQLRDGFTS
NOV11l TRHQPYTTQVYLIVHVPARVVNISSPVMVNEGGNVNLLCLAVGRPEPTVTWRQLRDGFTS
NOV11m TRHQPYTTQVYLIVHVPARIVNISSPVTVNEGGNVNLLCLAVGRPEPTVTWRQLRDGFTS
NOV11n TRHQPYTTQVYLIVHVPARIVNISSPVTVNEGGNVNLLCIAVGRPEPTVTWRQLRDGFTS
NOV11o TRHQPYTTQVYLIVHVPARIVNISSPVTVNEGGNVNLLCLAVGRPEPTVTWRQLRDGFTS
NOV11p TRHQPYTTQVYLIVHVPARIVNISSPVTVNEGGNVNLLCLAVGRPEPTVTWRQLRDGFTS
NOV11q TRHQPYTTQVYLIVHVPARIVNISSPVTVNEGGNVNLLCLAVGRPEPTVTWRQLRDGFTS
NOV11a EGEILEISDIQRGQAGEYECVTHNGVNSAPDSRRVLVTVNYPPTITDVTSARTALGRAAL
NOV11b EGEILEISDIQRGQAGEYECVTHNGVNSAPDSRRVLVTVNYPPTITDVTSARTALGRAAL
NOV11c EGEILEISDIQRGQAGEYECVTHNGVNSAPDSRRVLVTVNYPPTITDVTSARTALGRAAL
NOV11d EGEILEISDIQRGQAGEYECVTHNGVNSAPDSRRVLVTVNYPPTITDVTSARTALGRAAL
NOV11e EGEILEISDIQRGQAGEYECVTHNGVNSAPDSRRVLVTVNYPPTITDVTSARTALGRAAL
NOV11f EGEILEISDIQRGQAGEYECVTHNGVNSAPDSRRVLVTVNYPPTITDVTSARTALGRAAL
NOV11g EGEILEISDIQRGQAGEYECVTHNGVNSAPDSRRVLVTVNYPPTITDVTSARTALGRAAL
NOV11h EGEILEISDIQRGQAGEYECVTHNGVNSAPDSRRVLVTVNYPPTITDVTSARTALGRTAL
NOV11i EGEILEISDIQRGQAGEYECVTHNGVNSAPDSRRVLVTVNYPPTITDVTSARTALGRAAL
NOV11j EGEILEISDIQRGQAGEYECVTHNGVNSAPDSRRVLVTVNYPPTITDVTSARTALGRAAL
NOV11k EGEILEISDIQRGQAGEYECVTHNGVNSAPDSRRVLVTVNYPPTITDVTSARTALGRAAL
NOV11l EGEILEISDILRGQAGEYECVTHNGVNSAPDSRRVLVTVNYPPTITDVTSARTALGPGRL
NOV11m EGEILEISDIQRGQAGEYECVTHNGVNSAPDSRRVLVTVNYPPTITDVTSARTALGRAAL
NOV11n EGEILEISDIQRGQAGEYECVTHNGVNSAPDSRRVLVTVNYPPTITDVTSARTALGRAAL
NOV11o EGEILEISDIQRGQAGEYECVTHNGVNSAPDSRRVLVTVNYPPTITDVTSARTALGRAAL
NOV11p EGEILEISDIQRGQAGEYECVTHNGVNSAPDSRRVLVTVNYPPTITDVTSARTALGRAAL
NOV11q EGEILEISDIQRGQAGEYECVTHNGVNSAPDSRRVLVTVNYPPTITDVTSARTALGRAAL
NOV11a LRCEAMAVPPADFQWYKDDRLLSSGTAEGLKVQMERTRSMLLFANVSARHYGNYTCCAAN
NOV11b LRCEAMAVPPADFQWYKDDRLLSSGTAEGLKVQTERTRSMLLFANVSARHYGNYTCRAAN
NOV11c LRCEAMAVPPADFQWYKDDRLLSSGTAEGLKVQTERTRSMLLFANVSARHYGNYTCRAAN
NOV11d LRCEAMAVPPADFQWYKDDRLLSSGTAEGLKVQTERTRSMLLFANVSARHYGNYTCRALE
NOV11e LRCEAMAVPPADFQWYKDDRLLSSGTAEGLKVQTERTRSMLLFANVSARHYGNYTCRAAN
NOV11f LRCEAMAVPPADFQWYKDDRLLSSGTAEGLKVQTERTRSMLLFANVSARHYGNYTCRAAN
NOV11g LRCEAMAVPPADFQWYKDDRLLSSGTAEGLKVQTERTRSMLLFANVSARHYGNYTCRAAN
NOV11h LRCEAMAVPPADFQWYKDDRLLSSGTAEGLKVQTERTRSMLLFANVSARHYGNYTCRAAN
NOV11i LRCEAMAVPPADFQWYKDDRLLSSGTAEGLKVQTERTRSMLLFANVSARHYGNYTCRAAN
NOV11j LRCEAMAVPPADFQWYKDDRLLSSGTAEGLKVQMERTRSMLLFANVSARHYGNYTCRAAN
NOV11k LRCEAMAVPPADFQWYKDDRLLSSGTAEGLKVQTERTRSMLLFANVSARHYGNYTCRAAN
NOV11l LRCEAMAVSPADFQWYKDDRLLSSGTAEGLKVQMERTRSMLLFANMSARHYGNYTCCAAN
NOV11m LRCEAMAVPPADFQWYKDDRLLSSGTAEGLKVQTERTRSMLLFANVSARHYGNYTCRAAN
NOV11n LRCEAMAVPPADFQWYKDDRLLSSGTAEGLKVQTERTRSMLLFANVSARHYGNYTCPAAN
NOV11o LRCEAMAVPPADFQWYKDDRLLSSGTAEGLKVQTERTRSMLLFANVSARHYGNYTCRAAN
NOV11p LRCEAMAVPPADFQWYKDDRLLSSGTAEGLKVQTERTRSMLLFANVSARHYGNYTCRAAN
NOV11q LRCEAMAVPPADFQWYKDDRLLSSGTAEGLKVQTERTRSMLLFANVSARHYGNYTCRAAN
NOV11a RLGASSASMRLLCPGSLENSAPRPPGLLALLSALGWLWWRM---
NOV11b RLGASSASMPLLRPGSLENSAPRPPGLLALLSALGWLWWRMLEG
NOV11c RLGASSASMRLLRPGSLENSAPRPPGLLALLSALGWLWWRMLEG
NOV11d G-------------------------------------------
NOV11e RLGASSASMRLLRPGSLENSAPRPPGLLALLSALGWLWWRMLEG
NOV11f RLGASSASMRLLRPGSLENSAPRPPGLLALLSALGWLWWPM---
NOV11g RLGASSASMRLLRPGSLENSAPRPPGLLALLSALGWLWWRMVDG
NOV11h RLGASSASMRLLRPGSLENSAPRPPGLLALLSALGWLWWRM---
NOV11i RLGASSASMRLLRPGSLENSAPRPPGLLALLSALGWLWWRM---
NOV11j RLGASSASMRLLRPGSLENSAPRPPGLLALLSALGWLWWRM---
NOV11k RLGASSASMRLLRPGSLENSAPRPPGLLALLSAL----------
NOV11l RLGASSASMRLLCPGSLENSAPRPPGPLALLSALGWLWWRM---
NOV11m RLGASSASMRLLRPGSLENSAPRPPGLLALLSALGWLWWRM---
NOV11n RLGASSASMRLLRPGSLENSAPRPPGLLALLSALGWLWWRM---
NOV11o RLGASSASMRLLRPGSLENSAPRPPGLLALLSALGWLWWRM---
NOV11p RLGASSASMRLLRPGSLENSAPRPPGLLALLSALGWLWWPMV--
NOV11q RLGASSASMRLLRPGSLENSAPRPPGLLALLSALGWLWWRM---
NOV11a (SEQ ID NO: 282)
NOV11b (SEQ ID NO: 284)
NOV11c (SEQ ID NO: 286)
NOV11d (SEQ ID NO: 288)
NOV11e (SEQ ID NO: 290)
NOV11f (SEQ ID NO: 292)
NOV11g (SEQ ID NO: 294)
NOV11h (SEQ ID NO: 296)
NOV11i (SEQ ID NO: 298)
NOV11j (SEQ ID NO: 300)
NOV11k (SEQ ID NO: 302)
NOV11l (SEQ ID NO: 304)
NOV11m (SEQ ID NO: 306)
NOV11n (SEQ ID NO: 308)
NOV11o (SEQ ID NO: 310)
NOV11p (SEQ ID NO: 312)
NOV11q (SEQ ID NO: 314)

[0412] Further analysis of the NOV11a protein yielded the following properties shown in Table 11C.

TABLE 11C
Protein Sequence Properties NOV11a

| | |
|---|---|
| SignalP analysis: | Cleavage site between residues 28 and 29 |
| PSORT II analysis: | |

| PSG: | a new signal peptide prediction method | |
|---|---|---|
| | N-region: | length 11; pos. chg 2; neg. chg 0 |
| | H-region: | length 14; peak value 8.95 |
| | PSG score: | 4.55 |

| | |
|---|---|
| GvH: | von Heijne's method for signal seq. recognition |
| | GvH score (threshold: −2.1): −2.40 |
| | possible cleavage site: between 22 and 23 |

>>> Seems to have no N-terminal signal peptide

| ALOM: | Klein et al's method for TM region allocation | | |
|---|---|---|---|
| | Init position for calculation: 1 | | |
| | Tentative number of TMS(s) for the threshold 0.5: 1 | | |
| | Number of TMS(s) for threshold 0.5: 1 | | |
| | INTEGRAL | Likelihood = | Transmembrane 12-28 |
| | | −2.92 | |

| | |
|---|---|
| PERIPHERAL | Likelihood = 2.49 (at 128) |

| | |
|---|---|
| | ALOM score: −2.92 (number of TMSs: 1) |
| MTOP: | Prediction of membrane topology (Hartmann et al.) |
| | Center position for calculation: 19 |
| | Charge difference: −4.0 C(−1.0)-N( 3.0) |
| | N >= C: N-terminal side will be inside |

>>> membrane topology: type 2 (cytoplasmic tail 1 to 12)

| MITDISC: | discrimination of mitochondrial targeting seq | | | |
|---|---|---|---|---|
| | R content: | 3 | Hyd Moment (75): | 1.42 |
| | Hyd Moment (95): | 2.81 | G content: | 3 |
| | D/E content: | 1 | S/T content: | 3 |

| | |
|---|---|
| | Score: −3.82 |
| Gavel: | prediction of cleavage sites for mitochondrial preseq |
| | R-2 motif at 36 SRG\|LL |

NUCDISC: discrimination of nuclear localization signals

| | |
|---|---|
| | pat4: none |
| | pat7: none |
| | bipartite: none |
| | content of basic residues: 8.6% |
| | NLS Score: −0.47 |
| KDEL: | ER retention motif in the C-terminus: none |

ER Membrane Retention Signals: none
SKL: peroxisomal targeting signal in the C-terminus: none
PTS2: 2nd peroxisomal targeting signal: none
VAC: possible vacuolar targeting motif: none
RNA-binding motif: none
Actinin-type actin-binding motif:

type 1: none
type 2: none

NMYR: N-myristoylation pattern: none
Prenylation motif: none
memYQRL: transport motif from cell surface to Golgi: none
Tyrosines in the tail: none
Dileucine motif in the tail: none
checking 63 PROSITE DNA binding motifs: none
checking 71 PROSITE ribosomal protein motifs: none
checking 33 PROSITE prokaryotic DNA binding motifs: none

| | |
|---|---|
| NNCN: | Reinhardt's method for Cytoplasmic/Nuclear discrimination |
| | Prediction: cytoplasmic |
| | Reliability: 76.7 |
| COIL: | Lupas's algorithm to detect coiled-coil regions |
| | total: 0 residues |

Final Results (k = 9/23):

```
34.8%: cytoplasmic
30.4%: mitochondrial
13.0%: Golgi
8.7%: endoplasmic reticulum
  4.3%: extracellular, including cell wall
  4.3%: nuclear
  4.3%: vesicles of secretory system
```

>> prediction for CG51027-06 is cyt (k = 23)

[0413] A search of the NOV11a protein against the Geneseq database, a proprietary database that contains sequences published in patents and patent publication, yielded several homologous proteins shown in Table 11D.

TABLE 11D
Geneseq Results for NOV11a

| | | NOV11a | Identities/ | |
|---|---|---|---|---|
| | | Residues/ | Similarities for | |
| Geneseq | Protein/Organism/Length | Match | the Matched | Expect |
| Identifier | [Patent #, Date] | Residues | Region | Value |
| AAE29924 | Human LP289 protein - Homo sapiens, | 1 . . . 336 | 332/336 (98%) | 0.0 |
| | 336 aa. [WO200274906-A2, 26-SEP-2002] | 1 . . . 336 | 332/336 (98%) | |
| ABG96271 | Human immunoglobulin superfamily | 1 . . . 336 | 332/336 (98%) | 0.0 |
| | protein IGSFP-9 - Homo sapiens, 336 | 1 . . . 336 | 332/336 (98%) | |
| | aa. [WO200272794-A2, 19-SEP-2002] | | | |
| AAU84386 | Novel human secreted or membrane- | 1 . . . 336 | 325/336 (96%) | 0.0 |
| | associated protein #25 - Homo sapiens, | 1 . . . 336 | 329/336 (97%) | |
| | 336 aa. [WO200204600-A2, 17-JAN-2002] | | | |
| ABG94639 | Human NOV5d protein - Homo sapiens, | 1 . . . 336 | 322/336 (95%) | 0.0 |
| | 336 aa. [WO200266643-A2, 29-AUG-2002] | 1 . . . 336 | 326/336 (96%) | |
| ABG94637 | Human NOV5b protein - Homo sapiens, | 18 . . . 336 | 315/319 (98%) | 0.0 |
| | 319 aa. [WO200266643-A2, 29-AUG-2002] | 1 . . . 319 | 315/319 (98%) | |

[0414] In a BLAST search of public sequence databases, the NOV11a protein was found to have homology to the proteins shown in the BLASTP data in Table 11E.

TABLE 11E
Public BLASTP Results for NOV11a

| | | NOV11a | Identities/ | |
|---|---|---|---|---|
| Protein | | Residues/ | Similarities for | |
| Accession | | Match | the Matched | Expect |
| Number | Protein/Organism/Length | Residues | Portion | Value |
| Q8HW98 | Adult male hypothalamus cDNA, RIKEN | 12 . . . 336 | 313/325 (96%) | 0.0 |
| | full-length enriched library, | 1 . . . 325 | 318/325 (97%) | |
| | clone: A230106M20 product: weakly similar | | | |
| | to limbic system-associated membrane | | | |
| | protein precursor (E19S) (CHLAMP, G19- | | | |
| | isoform) - Mus musculus (Mouse), 325 aa | | | |
| | (fragment). | | | |
| P11834 | Opioid binding protein/cell adhesion | 11 . . . 329 | 168/328 (51%) | 1e−84 |
| | molecule precursor (OBCAM) (Opioid- | 12 . . . 337 | 224/328 (68%) | |
| | binding cell adhesion molecule) (OPCML) - | | | |
| | Bos taurus (Bovine), 345 aa. | | | |
| Q14982 | Opioid binding protein/cell adhesion | 11 . . . 329 | 166/328 (50%) | 3e−84 |
| | molecule precursor (OBCAM) (Opioid- | 12 . . . 337 | 224/328 (67%) | |
| | binding cell adhesion molecule) (OPCML) - | | | |
| | Homo sapiens (Human), 345 aa. | | | |
| JC1238 | opioid-binding protein (clone DUZ1) - rat, | 12 . . . 333 | 163/326 (50%) | 5e−83 |
| | 338 aa. | 8 . . . 325 | 221/326 (67%) | |
| P32736 | Opioid binding protein/cell adhesion | 11 . . . 333 | 164/329 (49%) | 5e−83 |
| | molecule precursor (OBCAM) (Opioid- | 12 . . . 332 | 224/329 (67%) | |
| | binding cell adhesion molecule) (OPCML) - | | | |
| | Rattus norvegicus (Rat), 345 aa. | | | |

[0415] PFam analysis predicts that the NOV11a protein contains the domains shown in the Table 11F.

TABLE 11F
Domain Analysis of NOV11a

| | | Identities/ | |
|---|---|---|---|
| | | Similarities | |
| Pfam | NOV11a | for the | Expect |
| Domain | Match Region | Matched Region | Value |
| ig | 47 . . . 114 | 16/72 (22%) | 0.00065 |
| | | 40/72 (56%) | |
| ig | 147 . . . 197 | 16/54 (30%) | 0.00057 |
| | | 35/54 (65%) | |
| ig | 231 . . . 293 | 12/66 (18%) | 2.7e-05 |
| | | 45/66 (68%) | |

### Example 12.

[0416] The NOV12 clone was analyzed, and the nucleotide and encoded polypeptide sequences are shown in Table 12A.

TABLE 12A
NOV12 Sequence Analysis

| | | |
|---|---|---|
| NOV12a, CG51373-11 | SEQ ID NO: 319 | 3212 bp |
| DNA Sequence | ORF Start: ATG at 1 | ORF Stop: TAG at 2272 |

ATGCTGAGCCTCCTCGTCTGGATCCTCACTCTCTCCGATACTTTCTCCCAAGGGACCCAGACCCGCTT
CAGCCAGGAGCCAGCTGACCAGACGGTGGTGGCTGGACAGCGGGCCGTGCTCCCCTGTGTGCTGCTCA
ACTACTCTGGAATTGTGCAATGGACCAAGGACGGGCTGGCCCTGGGCATGGGCCAGGGCCTCAAAGCC
TGGCCACGGTACCGGGTTGTGGGCTCCGCAGACGCTGGGCAGTACAACCTGGAGATCACAGATGCTGA
GCTCTCTGACGACGCCTCTTACGAGTGCCAGGCCACGGAGGCCGCCCTGCGCTCTCGGCGGGCCAAAC
TCACCGTGCTCATCCCCCCAGAGGACACCAGGATTGACGGAGGCCCTGTGATTCTACTGCAGGCAGGC
ACCCCCCACAACCTCACATGCCGGGCCTTCAATGCGAAGCCTGCTGCCACCATCATCTGGTTCCGGGA
CGGGACGCAGCAGGAGGGCGCTGTGGCCAGCACGGAATTGCTGAAGGATGGGAAGAGGGAGACCACCG
TGAGCCAACTGCTTATTAACCCCACGGACCTGGACATAGGGCGTGTCTTCACTTGCCGAAGCATGAAC
GAAGCCATCCCTAGTGGCAAGGAGACTTCCATCGAGCTGGATGTGCACCACCCTCCTACAGTGACCCT
GTCCATTGAGCCACAGACGGTGCAGGAGGGTGAGCGTGTTGTCTTTACCTGCCAGGCCACAGCCAACC
CCGAGATCTTGGGCTACAGGTGGGCCAAAGGGGGTTTCTTGATTGAAGACGCCCACGAGAGTCGCTAT
GAGACAAATGTGGATTATTCCTTTTTCACGGAGCCTGTGTCTTGTGAGGTTCACAACAAAGTGGGAAG
CACCAATGTCAGCACTTTAGTAAATGTCCACTTTGCTCCCCGGATTGTAGTTGACCCCAAACCCACAA
CCACAGACATTGGCTCTGATGTGACCCTTACCTGTGTCTGGGTTGGGAATCCCCCCCTCACTCTCACC
TGGACCAAAAAGGACTCAAATATGGTCCTGAGTAACAGCAACCAGCTGCTGCTGAAGTCGGTGACTCA
GGCAGACGCTGGCACCTACACCTGCCGGGCCATCGTGCCTCGAATCGGAGTGGCTGAGCGGGAGGTGC
CGCTCTATGTGAACGGGCCCCCCATCATCTCCAGTGAGGCAGTGCAGTATGCTGTGAGGGGTGACGGT
GGCAAGGTGGAGTGTTTCATTGGGAGCACACCACCCCCAGACCGCATAGCATGGGCCTGGAAGGAGAA
CTTCTTGGAGGTGGGGACCCTGGAACGCTATACAGTGGAGAGGACCAACTCAGGCAGTGGGGTGCTAT
CCACGCTCACCATCAACAATGTCATGGAGGCCGACTTTCAGACTCACTACAACTGCACCGCCTGGAAC
AGCTTCGGGCCAGGCACAGCCATCATCCAGCTGGAAGAGCGAGAGGTGTTACCTGTGGGCATCATAGC
TGGGGCCACCATCGGCGCGAGCATCCTGCTCATCTTCTTCTTCATCGCCTTGGTATTCTTCCTCTACC
GGCGCCGCAAAGGCAGTCGCAAAGACGTGACCCTGAGGAAGCTGGATATCAAGGTGGAGACAGTGAAC
CGAGAGCCACTTACGATGCATTCTGACCGGGAGGATGACACCGCCAGCGTCTCCACAGCAACCCGGGT
CATGAAGGCCATCTACTCGTCGTTTAAGGATGATGTGGATCTGAAGCAGGACCTGCGCTGCGACACCA
TCGACACCCGGGAGGAGTATGAGATGAAGGACCCCACCAATGGCTACTACAACGTGCGTGCCCATGAA
GACCGCCCGTCTTCCAGGGCAGTGCTCTATGCTGACTACCGTGCCCCTGGCCCTGCCCGCTTCGACGG
CCGCCCCTCATCCCGTCTCTCCCACTCCAGCGGCTATGCCCAGCTCAACACCTATAGCCGGGGCCCTG
CCTCTGACTATGGCCCTGAGCCCACACCCCCTGGCCCTGCTGCCCCAGCTGGCACTGACACAACCAGC
CAGCTGTCCTACGAGAACTATGAGAAGTTCAACTCCCATCCCTTCCCTGGGGCAGCTGGGTACCCCAC
CTACCGACTGGGCTACCCCCAGGCCCCACCCTCTGGCCTGGAGCGGACCCCATATGAGGCGTATGACC
CCATTGGCAAGTACGCCACAGCCACTCGATTCTCCTACACCTCCCAGCACTCGGACTACGGCCAGCGA
TTCCAGCAGCGCATGCAGACTCACGTGTAGGGGCCAGAGCCTGGCTGGGGCATCTCTGCGGGGCAGAG
GAGAAGGCTTTCGCAGCTGTTCCCTGATATTCAGGGACATTGCTCATTGCTCCCTTCTCGGACCAGCC
TTCTTCCTCCCACCATGGCAGGTGGGGAGCAGGTCTCCCAGAGACACCCCGTCCCGAGGATGGTGCTC
TGTGCATGCCCCAGCCTCCTGGGCCTGCCCTTCCCTCTTCTTCGGGAGGATGTGTCTCTTCTGACCTG
CACTCTTGCCTGACCCTAGAATGGGGACAGGGAAAGTGAAGGTTAGGGAAAGCAGAGGGGGGCACTTT
TTAGCATTCCCTTTCTATCCCACCCCTCTGATCTCCCATAAGTGGAAATGGGGGTACCCAGGGATGGG
CAGGCTTTGGCCTAGGGACATGAAGTATGGGAGTGGGTGGCTGTGGCACAGACAGGTGGAAAACGGGA
TAGCCTGGCCAGTCCCTCTGTTGTCTGCATTCGTGCCCTGGGTGCCTCTCTCCTTCCTCAGGGTACTG
CAGAAGGGAGCGAACAGGGTACTGTTCGCTCTTGTCTACAGAACAGCCCTGGCACTGCATTCAAATCC
AGTCTTCATTCAGCTGGGATCAAAATGCCAGTCACCTTGGCTACCCACTGTGGACAGCTGTCTGTCAG
CATGCAGAGGGATCCAGGAATCCCCCCGGCAGCACGGCCCGCTTTCCTTCTCCTCCATGCTGGGCCAG
CCAGATAAGTCAGGGTCCTGGTGGAGAAAGAAAGGCTAGGACCATGTCCTCATTGACCCAGATACTGC
TGTGTGCTGCACAGCAGTGAACCAACACTAGAGGGAGCCACACAAGCCTCCTCTCCCCAGTCTGCCCC
ACTTCCTGGCTTTAACTCTTGAGCTGGTTTGGGGAGTGGTGAGGTAGGGGTGGGGGTGCTGTAGGCTC
TTTTTCAAAAAAAAAC

| | | | |
|---|---|---|---|
| NOV12a, CG51373-11 | SEQ ID NO: 320 | 757 aa | MW at 83534.8kD |
| Protein Sequence | | | |

MLSLLVWILTLSDTFSQGTQTRFSQEPADQTVVAGQRAVLPCVLLNYSGIVQWTKDGLALGMGQGLKA
WPRYRVVGSADAGQYNLEITDAELSDDASYECQATEAALRSRRAKLTVLIPPEDTRIDGGPVILLQAG
TPHNLTCRAFNAKPAATIIWFRDGTQQEGAVASTELLKDGKRETTVSQLLINPTDLDIGRVFTCRSMN
EAIPSGKETSIELDVHHPPTVTLSIEPQTVQEGERVVFTCQATANPEILGYRWAKGGFLIEDAHESRY
ETNVDYSFFTEPVSCEVHNKVGSTNVSTLVNVHFAPRIVVDPKPTTTDIGSDVTLTCVWVGNPPLTLT
WTKKDSNMVLSNSNQLLLKSVTQADAGTYTCRAIVPRIGVAEREVPLYVNGPPIISSEAVQYAVRGDG
GKVECFIGSTPPPDRIAWAWKENFLEVGTLERYTVERTNSGSGVLSTLTINNVMEADFQTHYNCTAWN
SFGPGTAIIQLEEREVLPVGIIAGATIGASILLIFFFIALVFFLYRRRKGSRKDVTLRKLDIKVETVN
REPLTMHSDREDDTASVSTATRVMKAIYSSFKDDVDLKQDLRCDTIDTREEYEMKDPTNGYYNVRAHE
DRPSSRAVLYADYRAPGPARFDGRPSSRLSHSSGYAQLNTYSRGPASDYGPEPTPPGPAAPAGTDTTS
QLSYENYEKFNSHPFPGAAGYPTYRLGYPQAPPSGLERTPYEAYDPIGKYATATRFSYTSQHSDYGQR
FQQRIYIQTHV

| | | |
|---|---|---|
| NOV12b, CG51373-10 | SEQ ID NO: 321 | 3430 bp |
| DNA Sequence | ORF Start: ATG at 351 | ORF Stop: TAG at 2490 |

CTCTCCGATACTTTCTCCCAAGGGTCAGCTGCTTCTTCATTCCAAGTGGACAAGGAGCCAGCTGCTCA
CTGTCCTTGAGAGACTTCAGCGAGAGACCAGGGTGTCCAGGCTCCATGCAGGAAAGCCATGCGTATAA
ATTCCACCTCTGAGCCAGGCCTCACCAGCAAGCCCACTCTTAAGCCCTTGACTTGGGCTCCAGGGGCC
ATGGGAAGGAGAAACGGACCCAGACCCGCTTCAGCCAGGAGCCAGCTGACCAGACGGTGGTGGCTGGA
CAGCGGGCCGTGCTCCCCTGTGTGCTGCTCAACTACTCTGGAATTGTGCAATGGACCAAGGACGGGCT
GGCCCTGGGCATGGGCCAGGCCCTCAAAGCCTGGCCACGGTACCGGGTTGTGGGCTCCGCAGACGCTG
GGCAGTACAACCTGGAGATCACAGATGCTGAGCTCTCTGACGACGCCTCTTACGAGTGCCAGGCCACG
GAGGCCGCCCTGCGCTCTCGGCGGGCCAAACTCACCGTGCTCATCCCCCCAGAGGACACCAGGATTGA
CGGAGGCCCTGTGATTCTACTGCAGGCAGGCACCCCCCACAACCTCACATGCCGGGCCTTCAATGCGA
AGCCTGCTGCCACCATCATCTGGTTCCGGGACGGGACGCAGCAGGAGGGCGCTGTGGCCAGCACGGAA
TTGCTGAAGGATGGGAAGAGGGAGACCACCGTGAGCCAACTGCTTATTAACCCCACGGACCTGGACAT
AGGGCGTGTCTTCACTTGCCGAAGCATGAACGAAGCCATCCCTAGTGGCAAGGAGACTTCCATCGAGC
TGGATGTGCACCACCCTCCTACAGTGACCCTGTCCATTGAGCCACAGACGGTGCAGGAGGGTGAGCGT
GTTGTCTTTACCTGCCAGGCCACAGCCAACCCCGAGATCTTGGGCTACAGGTGGGCCAAAGGGGGTTT
CTTGATTGAAGACGCCCACGAGAGTCGCTATGAGACAAATGTGGATTATTCCTTTTTCACGGAGCCTG
TGTCTTGTGAGGTTCACAACAAAGTGGGAAGCACCAATGTCAGCACTTTAGTAAATGTCCACTTTGCT
CCCCGGATTGTAGTTGACCCCAAACCCACAACCACAGACATTGGCTCTGATGTGACCCTTACCTGTGT
CTGGGTTGGGGAAATCCCCCCCTCACTCTCACCTGGACCAAAAAGGACTCAAATATTGGGGCCCTGGC
TTCTTGGTTCCCCACCCGAGGCTGCTCTCTCTGCCCAGGTCCTGAGTAACAGCAACCAGCTGCTGCTG
AAGTCGGTGACTCAGGCAGACGCTGGCACCTACACCTGCCGGGCCATCGTGCCTCGAATCGGAGTGGC
TGAGCGGGAGGTGCCGCTCTATGTGAACGGGCCCCCCATCATCTCCAGTGAGGCAGTGCAGTATGCTG
TGAGGGGTGACGGTGGCAAGGTGGAGTGTTTCATTGGGAGCACACCACCCCCAGACCGCATAGCATGG
GCCTGGAAGGAGAACTTCTTGGAGGTGGGGACCCTGGAACGCTATACAGTGGAGAGGACCAACTCAGG
CAGTGGGGTGCTATCCACGCTCACCATCAACAATGTCATGGAGGCCGACTTTCAGACTCACTACAACT
GCACCGCCTGGAACAGCTTCGGGCCAGGCACAGCCATCATCCAGCTGGAAGAGCGAGAGGTGTTACCT
GTGGGCATCATAGCTGGGGCCACCATCGGCGCGAGCATCCTGCTCATCTTCTTCTTCATCGCCTTGGT
ATTCTTCCTCTACCGGCGCCGCAAAGGCAGTCGCAAAGACGTGACCCTGAGGAAGCTGGATATCAAGG
TGGAGACAGTGAACCGAGAGCCACTTACGATGCATTCTGACCGGGAGGATGACACCGCCAGCGTCTCC
ACAGCAACCCGGGTCATGAAGGCCATCTACTCGTCGTTTAAGGATGATGTGGATCTGAAGCAGGACCT
GCGCTGCGACACCATCGACACCCGGGAGGAGTATGAGATGAAGGACCCCACCAATGGCTACTACAACG
TGCGTGCCCATGAAGACCGCCCGTCTTCCAGGGCAGTGCTCTATGCTGACTACCGTGCCCCTGGCCCT
GCCCGCTTCGACGGCCGCCCCTCATCCCGTCTCTCCCACTCCAGCGGCTATGCCCAGCTCAACACCTA
TAGCCGGGGCCCTGCCTCTGACTATGGCCCTGAGCCCACACCCCCTGGCCCTGCTGCCCCAGCTGGCA
CTGACACAACCAGCCAGCTGTCCTACGAGAACTATGAGAAGTTCAACTCCCATCCCTTCCCTGGGGCA
GCTGGGTACCCCACCTACCGACTGGGCTACCCCCAGGCCCCACCCTCTGGCCTGGAGCGGACCCCATA
TGAGGCGTATGACCCCATTGGCAAGTACGCCACAGCCACTCGATTCTCCTACACCTCCCAGCACTCGG
ACTACGGCCAGCGATTCCAGCAGCGCATGCAGACTCACGTGTAGGGGCCAGAGCCTGGCTGGGGCATC
TCTGCGGGGCAGAGGAGAAGGCTTTCGCAGCTGTTCCCTGATATTCAGGGACATTGCTCATTGCTCCC
TTCTCGGACCAGCCTTCTTCCTCCCACCATGGCAGGTGGGGAGCAGGTCTCCCAGAGACACCCCGTCC
CGAGGATGGTGCTCTGTGCATGCCCCAGCCTCCTGGGCCTGCCCTTCCCTCTTCTTCGGGAGGATGTG
TCTCTTCTGACCTGCACTCTTGCCTGACCCTAGAATGGGGACAGGGAAAGTGAAGGTTAGGGAAAGCA
GAGGGGGGCACTTTTTAGCATTCCCTTTCTATCCCACCCCTCTGATCTCCCATAAGTGGAAATGGGGC
TACCCAGGGATGGGCAGGCTTTGGCCTAGGGACATGAAGTATGGGAGTGGGTGGCTGTGGCACAGACA
GGTGGAAAACGGGATAGCCTGGCCAGTCCCTCTGTTGTCTGCATTCGTGCCCTGGGTGCCTCTCTCCT
TCCTCAGGGTACTGCAGAAGGGAGCGAACAGGGTACTGTTCGCTCTTGTCTACAGAACAGCCCTGGCA
CTGCATTCAAATCCAGTCTTCATTCAGCTGGGATCAAAATGCCAGTCACCTTGGCTACCCACTGTGGA
CAGCTGTCTGTCAGCATGCAGAGGGATCCAGGAATCCCCCCGGCAGCACGGCCCGCTTTCCTTCTCCT
CCATGCTGGGCCAGCCAGATAAGTCAGGGTCCTGGTGGAGAAAGAAAGGCTAGGACCATGTCCTCATT
GACCCAGATACTGCTGTGTGCTGCACAGCAGTGAACCAACACTAGAGGGAGCCACACAAGCCTCCTCT
CCCCAGTCTGCCCCACTTCCTGGCTTTAACTCTTGAGCTGGTTTGGGGAGTGGTGAGGTAGGGGTGGG
GGTGCTGTAGGCTCTTTTTCAAAAAAAAAC

| | | | |
|---|---|---|---|
| NOV12b, CG51373-10 | SEQ ID NO: 322 | 713 aa | MW at 78491.0kD |
| Protein Sequence | | | |

MGQALKAWPRYRVVGSADAGQYNLEITDAELSDDASYECQATEAALRSRRAKLTVLIPPEDTRIDGGP
VILLQAGTPHNLTCRAFNAKPAATIIWFRDGTQQEGAVASTELLKDGKRETTVSQLLINPTDLDIGRV
FTCRSMNEAIPSGKETSIELDVHHPPTVTLSIEPQTVQEGERVVFTCQATANPETLGYRWAKGGFLIE
DAHESRYETNVDYSFFTEPVSCEVHNKVGSTNVSTLVNVHFAPRIVVDPKPTTTDIGSDVTLTCVWVG
EIPPSLSPGPKRTQILGPWLLGSPPEAALSAQVLSNSNQLLLKSVTQADAGTYTCRAIVPRIGVAERE
VPLYVNGPPIISSEAVQYAVRGDGGKVECFIGSTPPPDRIAWAWKENFLEVGTLERYTVERTNSGSGV
LSTLTINNVMEADFQTHYNCTAWNSFGPGTAIIQLEEREVLPVGIIAGATIGASTLLIFFFIALVFFL
YRRRKGSRKDVTLRKLDIKVETVNREPLTMHSDREDDTASVSTATRVMKAIYSSFKDDVDLKQDLRCD
TIDTREEYEMKDPTNGYYNVRAHEDRPSSRAVLYADYRAPGPARFDGRPSSRLSHSSGYAQLNTYSRG
PASDYGPEPTPPGPAAPAGTDTTSQLSYENYEKFNSHPFPGAAGYPTYRLGYPQAPPSGLERTPYEAY
DPIGKYATATRFSYTSQHSDYGQRFQQRMQTHV

| | | |
|---|---|---|
| NOV12c, CG51373-08 | SEQ ID NO: 323 | 2128 bp |
| DNA Sequence | ORF Start: ATG at 31 | ORF Stop: TAG at 2119 |

CAATGGACCAAGGACGGGCTGGCCCTGGGCATGGGCCAGGGCCTCAAAGCCTGGCCACGGTACCGGGT
TGTGGGCTCCGCAGACGCTGGGCAGTACAACCTGGAGATCACAGATGCTGAGCTCTCTGACGACGCCT
CTTACGAGTGCCAGGCCACGGAGGCCGCCCTGCGCTCTCGGCGGGCCAAACTCACCGTGCTCATCCCC
CCAGAGGACACCAGGATTGACGGAGGCCCTGTGATTCTACTGCAGGCAGGCACCCCCCACAACCTCAC
ATGCCGGGCCTTCAATGCGAAGCCTGCTGCCACCATCATCTGGTTCCGGGACGGGACGCAGCAGGAGG
GCGCTGTGGCCAGCACGGAATTGCTGAAGGATGGGAAGAGGGAGACCACCGTGAGCCAACTGCTTATT
AACCCCACGGACCTGGACATAGGGCGTGTCTTCACTTGCCGAAGCATGAACGAAGCCATCCCTAGTGG
CAAGGAGACTTCCATCGAGCTGGATGTGCACCACCCTCCTACAGTGACCCTGTCCATTGAGCCACAGA
CGGTGCAGGAGGGTGAGCGTGTTGTCTTTACCTGCCAGGCCACAGCCAACCCCGAGATCTTGGACTAC
AGGTGGGCCAAAGGGGGTTTCTTGATTGAAGACGCCCACGAGAGTCGCTATGAGACAAATGTGGATTA
TTCCTTTTTCACGGAGCCTGTGTCTTGTGAGGTTCACAACAAAGTGGGAAGCACCAATGTCAGCACTT
TAGTAAATGTCCACTTTGCTCCCCGGATTGTAGTTGACCCCAAACCCACAACCACAGACATTGGCTCT
GATGTGACCCTTACCTGTGTCTGGGTTGGGAATCCCCCCCTCACTCTCACCTGGACCAAAAAGGACTC
AAATATGGTCCTGAGTAACAGCAACCAGCTGCTGCTGAAGTCGGTGACTCAGGCAGACGCTGGCACCT
ACACCTGCCGGGCCATCGTGCCTCGAATCGGAGTGGCTGAGCGGGAGGTGCCGCTCTATGTGAACGGG
CCCCCCATCATCTCCAGTGAGGCAGTGCAGTATGCTGTGAGGGGTGACGGTGGCAAGGTGGAGTGTTT
CATTGGGAGCACACCACCCCCAGACCGCATAGCATGGGCCTGGAAGGAGAACTTCTTGGAGGTGGGGA
CCCTGGAACGCTATACAGTGGAGAGGACCAACTCAGGCAGTGGGGTGCTATCCACGCTCACCATCAAC
AATGTCATGGAGGCCGACTTTCAGACTCACTACAACTGCACCGCCTGGAACAGCTTCGGGCCAGGCAC
AGCCATCATCCAGCTGGAAGAGCGAGAGGTGTTACCTGTGGGCATCATAGCTGGGGCCACCATCGGCG
CGAGCATCCTGCTCATCTTCTTCTTCATCGCCTTGGTATTCTTCCTCTACCGGCGCCGCAAAGGCAGT
CGCAAAGACGTGACCCTGAGGAAGCTGGATATCAAGGTGGAGACAGTGAACCGAGAGCCACTTACGAT
GCATTCTGACCGGGAGGATGACACCGCCAGCGTCTCCACAGCAACCCGGGTCATGAAGGCCATCTACT
CGTCGTTTATGGATGATGTGGATCTGAAGCAGGACCTGCGCTGCGACACCATCGACACCCGGGAGGAG
TATGAGATGAAGGACCCCACCAATGGCTACTACAACGTGCGTGCCCATGAAGACCGCCCGTCTTCCAG
GGCAGTGCTCTATGCTGACTACCGTGCCCCTGGCCCTGCCCGCTTCGACGGCCGCCCCTCATCCCGTC
TCTCCCACTCCAGCGGCTATGCCCAGCTCAACACCTATAGCCGGGGCCCTGCCTCTGACTATGGCCCT
GAGCCCACACCCCCTGGCCCTGCTGCCCCAGCTGGCACTGACACAACCAGCCAGCTGTCCTACGAGAA
CTATGAGAAGTTCAACTCCCATCCCTTCCCTGGGGCAGCTGGGTACCCCACCTACCGACTGGGCTACC
CCCAGGCCCCACCCTCTGGCCTGGAGCGGACCCCATATGAGGCGTATGACCCCATTGGCAAGTACGCC
ACAGCCACTCGATTCTCCTACACCTCCCAGCACTCGGACTACGGCCAGCGATTCCAGCAGCGCATGCA
GACTCACGTGTAGGGGCCAG

| | | | |
|---|---|---|---|
| NOV12c, CG51373-08 | SEQ ID NO: 324 | 696 aa | MW at 76975.3kD |
| Protein Sequence | | | |

MGQGLKAWPRYRVVGSADAGQYNLEITDAELSDDASYECQATEAALRSRRAKLTVLIPPEDTRIDGGP
VILLQAGTPHNLTCRAFNAKPAATIIWFRDGTQQEGAVASTELLKDGKRETTVSQLLINPTDLDIGRV
FTCRSMNEAIPSGKETSIELDVHHPPTVTLSIEPQTVQEGERVVFTCQATANPEILDYRWAKGGFLIE
DAHESRYETNVDYSFFTEPVSCEVHNKVGSTNVSTLVNVHFAPRIVVDPKPTTTDIGSDVTLTCVWVG
NPPLTLTWTKKDSNNVLSNSNQLLLKSVTQADAGTYTCHAIVPRIGVAEREVPLYVNGPPIISSEAVQ
YAVRGDGGKVECFIGSTPPPDRIAWAWKENFLEVGTLERYTVERTNSGSGVLSTLTINNVMEADFQTH
YNCTAWNSFGPGTAIIQLEEREVLPVGIIAGATIGASILLIFFFIALVFFLYRRRKGSRKDVTLRKLD
IKVETVNREPLTMHSDREDDTASVSTATRVMKAIYSSFMDDVDLKQDLRCDTIDTREEYEMKDPTNGY
YNVRAHEDRPSSRAVLYADYRAPGPARFDGRPSSRLSHSSGYAQLNTYSRGPASDYGPEPTPPGPAAP
AGTDTTSQLSYENYEKFNSHPFPGAAGYPTYRLGYPQAPPSGLERTPYEAYDPIGKYATATRFSYTSQ
HSDYGQRFQQRMQTHV

| | | |
|---|---|---|
| NOV12d, 237582097 | SEQ ID NO: 325 | 2100 bp |
| DNA Sequence | ORF Start: at 1 | ORF Stop: end of sequence |

GGATCCATGGGCCAGGGCCTCAAAGCCTGGCCACGGTACCGGGTTGTGGGCTCCGCAGACGCTGGGCA
GTACAACCTGGAGATCACAGATGCTGAGCTCTCTGACGACGCCTCTTACGAGTGCCAGGCCACGGAGG
CCGCCCTGCGCTCTCGGCGGGCCAAACTCACCGTGCTCATCCCCCCAGAGGACACCAGGATTGACGGA
GGCCCTGTGATTCTACTGCAGGCAGGCACCCCCCACAACCTCACATGCCGGGCCTTCAATGCGAAGCC
TGCTGCCACCATCATCTGGTTCCGGGACGGGACGCAGCAGGAGGGCGCTGTGGCCAGCACGGAATTGC
TGAAGGATGGGAAGAGGGAGAACACCGTGAGCCAACTGCTTATTAACCCCACGGACCTGGACATAGGG
CGTGTCTTCACTTGCCGAAGCATGAACGAAGCCATCCCTAGTGGCAAGGAGACTTCCATCGAGCTGGA
TGTGCACCACCCTCCTACAGTGACCCTGTCCATTGAGCCACAGACGGTGCAGGAGGGTGAGCGTGTTG
TCTTTACCTGCCAGGCCACAGCCAACCCCGAGATCTTGGACTACAGGTGGGCCAAAGGGGGTTTCTTG
ATTGAAGACGCCCACGAGAGTCGCTATGAGACAAATGTGGATTATTCCTTTTTCACGGAGCCTGTGTC
TTGTGAGGTTCACAACAAAGTGGGAAGCACCAATGTCAGCACTTTAGTAAATGTCCACTTTGCTCCCC
GGATTGTAGTTGACCCCAAACCCACAACCACAGACATTGGCTCTGATGTGACCCTTACCTGTGTCTGG
GTTGGGAATCCCCCCCTCACTCTCACCTGGACCAAAAAGGACTCAAATATGGTCCTGAGTAACAGCAA
CCAGCTGCTGCTGAAGTCGGTGACTCAGGCAGACGCTGGCACCTACACCTGCCGGGCCATCGTGCCTC
GAATCGGAGTGGCTGAGCGGGAGGTGCCGCTCTATGTGAACGGGCCCCCCATCATCTCCAGTGAGGCA
GTGCAGTATGCTGTGAGGGGTGACGGTGGCAAGGTGGAGTGTTTCATTGGGAGCACACCACCCCCAGA
CCGCATAGCATGGGCCTGGAAGGAGAACTTCTTGGAGGTGGGGACCCTGGAACGCTATACAGTGGAGA
GGACCAACTCAGGCAGTGGGGTGCTATCCACGCTCACCATCAACAATGTCATGGAGGCCGACTTTCAG
ACTCACTACAACTGCACCGCCTGGAACAGCTTCGGGCCAGGCACAGCCATCATCCAGCTGGAAGAGCG
AGAGGTGTTACCTGTGGGCATCATAGCTGGGGCCACCATCGGCGCGAGCATCCTGCTCATCTTCTTCT
TCATCGCCTTGGTATTCTTCCTCTACCGGCGCCGCAAAGGCAGTCGCAAAGACGTGACCCTGAGGAAG
CTGGATATCAAGGTGGAGACAGTGAACCGAGAGCCACTTACGATGCATTCTGACCGGGAGGATGACAC
CGCCAGCGTCTCCACAGCAACCCGGGTCATGAAGGCCATCTACTCGTCGTTTATGGATGATGTGGATC
TGAAGCAGGACCTGCGCTGCGACACCATCGACACCCGGGAGGAGTATGAGATGAAGGACCCCACCAAT
GGCTACTACAACGTGCGTGCCCATGAAGACCGCCCGTCTTCCAGGGCAGTGCTCTATGCTGACTACCG
TGCCCCTGGCCCTGCCCGCTTCGACGGCCGCCCCTCATCCCGTCTCTCCCACTCCAGCGGCTATGCCC
AGCTCAACACCTATAGCCGGGGCCCTGCCTCTGACTATGGCCCTGAGCCCACACCCCCTGGCCCTGCT
GCCCCAGCTGGCACTGACACAACCAGCCAGCTGTCCTACGAGAACTATGAGAAGTTCAACTCCCATCC
CTTCCCTGGGGCAGCTGGGTACCCCACCTACCGACTGGGCTACCCCCAGGCCCCACCCTCTGGCCTGG
AGCGGACCCCATATGAGGCGTATGACCCCATTGGCAAGTACGCCACAGCCACTCGATTCTCCTACACC
TCCCAGCACTCGGACTACGGCCAGCGATTCCAGCAGCGCATGCAGACTCACGTGCTCGAG

| | | | |
|---|---|---|---|
| NOV12d, 237582097 | SEQ ID NO: 326 | 700 aa | MW at 77361.7kD |
| Protein Sequence | | | |

GSMGQGLKAWPRYRVVGSADAGQYNLEITDAELSDDASYECQATEAALRSRPAKLTVLIPPEDTRIDG
GPVILLQAGTPHNLTCRAFNAKPAATIIWFRDGTQQEGAVASTELLKDGKRETTVSQLLINPTDLDIG
RVFTCRSMNEAIPSGKETSIELDVHHPPTVTLSIEPQTVQEGERVVFTCQATANPEILDYRWAKGGFL
IEDAHESRYETNVDYSFFTEPVSCEVHNKVGSTNVSTLVNVHFAPRIVVDPKPTTTDIGSDVTLTCVW
VGNPPLTLTWTKKDSNMVLSNSNQLLLKSVTQADAGTYTCRAIVPRIGVAEREVPLYVNGPPIISSEA
VQYAVRGDGGKVECFIGSTPPPDRIAWAWKENFLEVGTLERYTVERTNSGSGVLSTLTINNVMEADFQ
THYNCTAWNSFGPGTAIIQLEEREVLPVGIIAGATIGASILLIFFFIALVFFLYRRRKGSRKDVTLRK
LDIKVETVNREPLTMHSDREDDTASVSTATRVMKAIYSSFMDDVDLKQDLRCDTIDTREEYEMKDPTN
GYYNVRAHEDRPSSRAVLYADYRAPGPARFDGRPSSRLSHSSGYAQLNTYSRGPASDYGPEPTPPGPA
APAGTDTTSQLSYENYEKFNSHPFPGAAGYPTYRLGYPQAPPSGLERTPYEAYDPIGKYATATRFSYT
SQHSDYGQRFQQRMQTHVLE

| | | |
|---|---|---|
| NOV12e, 294385961 | SEQ ID NO: 327 | 2290 bp |
| DNA Sequence | ORF Start: at 2 | ORF Stop: end of sequence |

CACCAAGCTTATGCTGAGCCTCCTCGTCTGGATCCTCACTCTCTCCGATACTTTCTCCCAAGGGACCC
AGACCCGCTTCAGCCAGGAGCCAGCTGACCAGACGGTGGTGGCTGGACAGCGGGCCGTGCTCCCCTGT
GTGCTGCTCAACTACTCTGGAATTGTGCAATGGACCAAGGACGGGCTGGCCCTGGGCATGGGCCAGGG
CCTCAAAGCCTGGCCACGGTACCGGGTTGTGGGCTCCGCAGACGCTGGGCAGTACAACCTGGAGATCA
CAGATGCTGAGCTCTCTGACGACGCCTCTTACGAGTGCCAGGCCACGGAGGCCGCCCTGCGCTCTCGG
CGGGCCAAACTCACCGTGCTCATCCCCCCAGAGGACACCAGGATTGACGGAGGCCCTGTGATTCTACT
GCAGGCAGGCACCCCCCACAACCTCACATGCCGGGCCTTCAATGCGAAGCCTGCTGCCACCATCATCT
GGTTCCGGGACGGGACGCAGCAGGAGGGCGCTGTGGCCAGCACGGAATTGCTGAAGGATGGGAAGAGG
GAGACCACCGTGAGCCAACTGCTTATTAACCCCACGGACCTGGACATAGGGCGTGTCTTCACTTGCCG
AAGCATGAACGAAGCCATCCCTAGTGGCAAGGAGACTTCCATCGAGCTGGATGTGCACCACCCTCCTA
CAGTGACCCTGTCCATTGAGCCACAGACGGTGCAGGAGGGTGAGCGTGTTGTCTTTACCTGCCAGGCC
ACAGCCAACCCGGAGATCTTGGGCTACAGGTGGGCCAAAGGGGGTTTCTTGATTGAAGACGCCCACGA
GAGTCGCTATGAGACAAATGTGGATTATTCCTTTTTCACGGAGCCTGTGTCTTGTGAGGTCCACAACA
AAGTGGGAAGCACCAATGTCAGCACTTTAGTAAATGTCCACTTTGCTCCCCGGATTGTAGTTGACCCC
AAACCCACAACCACAGACATTGGCTCTGATGTGACCCTTACCTGTGTCTGGGTTGGGAATCCCCCCCT
CACTCTCACCTGGACCAAAAAGGACTCAAATATGGTCCTGAGTAACAGCAACCAGCTGCTGCTGAAGT
CGGTGACTCAGGCAGACGCTGGCACCTACACCTGCCGGGCCATCGTGCCTCGAATCGGAGTGGCTGAG
CGGGAGGTGCCGCTCTATGTGAACGGGCCCCCCATCATCTCCAGTGAGGCAGTGCAGTATGCTGTGAG
GGGTGACGGTGGCAAGGTGGAGTGTTTCATTGGGAGCACACCACCCCCAGACCGCATAGCATGGGCCT
GGAAGGAGAACTTCTTGGAGGTGGGGACCCTGGAACGCTATACAGTGGAGAGGACCAACTCAGGCAGT
GGGGTGCTATCCACGCTCACCATCAACAATGTCATGGAGGCCGACTTTCAGACTCACTACAACTGCAC
CGCCTGGAACAGCTTCGGGCCAGGCACAGCCATCATCCAGCTGGAAGAGCGAGAGGTGTTACCTGTGG
GCATCATAGCTGGGGCCACCATCGGCGCGAGCATCCTGCTCATCTTCTTCTTCATCGCCTTGGTATTC
TTCCTCTACCGGCGCCGCAAAGGCAGTCGCAAAGACGTGACCCTGAGGAAGCTGGATATCAAGGTGGA
GACAGTGAACCGAGAGCCACTTACGATGCATTCTGACCGGGAGGATGACACCGCCAGCGTCTCCACAG
CAACCCGGGTCATGAAGGCCATCTACTCGTCGTTTAAGGATGATGTGGATCTGAAGCAGGACCTGCGC
TGCGACACCATCGACACCCGGGAGGAGTATGAGATGAAGGACCCCACCAATGGCTACTACAACGTGCG
TGCCCATGAAGACCGCCCGTCTTCCAGGGCAGTGCTCTATGCTGACTACCGTGCCCCTGGCCCTGCCC
GCTTCGACGGCCGCCCCTCATCCCGTCTCTCCCACTCCAGCGGCTATGCCCAGCTCAACACCTATAGC
CGGGGCCCTGCCTCTGACTATGGCCCTGAGCCCACACCCCCTGGCCCTGCTGCCCCAGCTGGCACTGA
CACAACCAGCCAGCTGTCCTACGAGAACTATGAGAAGTTCAACTCCCATCCCTTCCCTGGGGCAGCTG
GGTACCCCACCTACCGACTGGGCTACCCCCAGGCCCCACCCTCTGGCCTGGAGCGGACCCCATATGAG
GCGTATGACCCCATTGGCAAGTACGCCACAGCCACTCGATTCTCCTACACCTCCCAGCACTCGGACTA
CGGCCAGCGATTCCAGCAGCGCATGCAGACTCACGTGGTCGACGGC

| | | | |
|---|---|---|---|
| NOV12e, 294385961 | SEQ ID NO: 328 | 763 aa | MW at 84148.5kD |
| Protein Sequence | | | |

TKLMLSLLVWILTLSDTFSQGTQTRFSQEPADQTVVAGQRAVLPCVLLNYSGIVQWTKDGLALGMGQG
LKAWPRYRVVGSADAGQYNLEITDAELSDDASYECQATEAALRSRRAKLTVLIPPEDTRIDGGPVILL
QAGTPHNLTCRAFNAKPAATIIWFRDGTQQEGAVASTELLKDGKRETTVSQLLINPTDLDIGRVFTCR
SMNEAIPSGKETSIELDVHHPPTVTLSIEPQTVQEGERVVFTCQATANPEILGYRWAKGGFLIEDAHE
SRYETNVDYSFFTEPVSCEVHNKVGSTNVSTLVNVHFAPRIVVDPKPTTTDIGSDVTLTCVWVGNPPL
TLTWTKKDSNNVLSNSNQLLLKSVTQADAGTYTCRAIVPRIGVAEREVPLYVNGPPIISSEAVQYAVR
GDGGKVECFIGSTPPPDRIAWAWKENFLEVGTLERYTVERTNSGSGVLSTLTINNVMEADFQTHYNCT
AWNSFGPGTAIIQLEEREVLPVGIIAGATIGASILLIFFFIALVFFLYRRRKGSRKDVTLRKLDIKVE
TVNREPLTMHSDREDDTASVSTATRVMKAIYSSFKDDVDLKQDLRCDTIDTREEYEMKDPTNGYYNVR
AHEDRPSSRAVLYADYRAPGPARFDGRPSSRLSHSSGYAQLNTYSRGPASDYGPEPTPPGPAAPAGTD
TTSQLSYENYEKFNSHPFPGAAGYPTYRLGYPQAPPSGLERTPYEAYDPIGKYATATRFSYTSQHSDY
GQRFQQRMQTHVVDG

| | | |
|---|---|---|
| NOV12f, 294398021 | SEQ ID NO: 329 | 2336 bp |
| DNA Sequence | ORF Start: at 2 | ORF Stop: at 2336 |

CACCAAGCTTATGCTGAGCCTCCTCGTCTGGATCCTCACTCTCTCCGATACTTTCTCCCAAGGGACCC
AGACCCGCTTCAGCCAGGAGCCAGCTGACCAGACGGTGGTGGCTGGACAGCGGGCCGTGCTCCCCTGT
GTGCTGCTCAACTACTCTGGAATTGTGCAATGGACCAAGGACGGGCTGGCCCTGGGCATGGGCCAGGG
CCTCAAAGCCTGGCCACGGTACCGGGTTGTGGGCTCCGCAGACGCTGGGCAGTACAACCTGGAGATCA
CAGATGCTGAGCTCTCTGACGACGCCTCTTACGAGTGCCAGGCCACGGAGGCCGCCCTGCGCTCTCGG
CGGGCCAAACTCACCGTGCTCATCCCCCCAGAGGACACCAGGATTGACGGAGGCCCTGTGATTCTACT
GCAGGCAGGCACCCCCCACAACCTCACATGCCGGGCCTTCAATGCGAAGCCTGCTGCCACCATCATCT
GGTTCCGGGACGGGACGCAGCAGGAGGGCGCTGTGGCCAGCACGGAATTGCTGAAGGATGGGAAGAGG
GAGACCACCGTGAGCCAACTGCTTATTAACCCCACGGACCTGGACATAGGGCGTGTCTTCACTTGCCG
AAGCATGAACGAAGCCATCCCTAGTGGCAAGGAGACTTCCATCGAGCTGGATGTGCACCACCCTCCTA
CAGTGACCCTGTCCATTGAGCCACAGACGGTGCAGGAGGGTGAGCGTGTTGTCTTTACCTGCCAGGCC
ACAGCCAACCCCGAGATCTTGGGCTACAGGTGGGCCAAAGGGGGTTTCTTGATTGAAGACGCCCACGA
GAGTCGCTATGAGACAAATGTGGATTATTCCTTTTTCACGGAGCCTGTGTCTTGTGAGGTTCACAACA
AAGTGGGAAGCACCAATGTCAGCACTTTAGTAAATGTCCACTTTGCTCCCCGGATTGTAGTTGACCCC
AAACCCACAACCACAGACATTGGCTCTGATGTGACCCTTACCTGTGTCTGGGTTGGGAATCCCCCCCT
CACTCTCACCTGGACCAAAAAGGACTCAAATATGGGGCCCAGGCCTCCTGGCTCCCCACCCGAGGCTG
CTCTCTCTGCCCAGGTCCTGAGTAACAGCAACCAGCTGCTGCTGAAGTCGGTGACTCAGGCAGACGCT
GGCACCTACACCTGCCGGGCCATCGTGCCTCGAATCGGAGTGGCTGAGCGGGAGGTGCCGCTCTATGT
GAACGGGCCCCCCATCATCTCCAGTGAGGCAGTGCAGTATGCTGTGAGGGGTGACGGTGGCAAGGTGG
AGTGTTTCATTGGGAGCACACCACCCCCAGACCGCATAGCATGGGCCTGGAAGGAGAACTTCTTGGAG
GTGGGGACCCTGGAACGCTATACAGTGGAGAGGACCAACTCAGGCAGTGGGGTGCTATCCACGCTCAC
CATCAACAATGTCATGGAGGCCGACTTTCAGACTCACTACAACTGCACCGCCTGGAACAGCTTCGGGC
CAGGCACAGCCATCATCCAGCTGGAAGAGCGAGAGGTGTTACCTGTGGGCATCATAGCTGGGGCCACC
ATCGGCGCGAGCATCCTGCTCATCTTCTTCTTCATCGCCTTGGTATTCTTCCTCTACCGGCGCCGCAA
AGGCAGTCGCAAAGACGTGACCCTGAGGAAGCTGGATATCAAGGTGGAGACAGTGAACCGAGAGCCAC
TTACGATGCATTCTGACCGGGAGGATGACACCGCCAGCGTCTCCACAGCAACCCGGGTCATGAAGGCC
ATCTACTCGTCGTTTAAGGATGATGTGGATCTGAAGCAGGACCTGCGCTGCGACACCATCGACACCCG
GGAGGAGTATGAGATGAAGGACCCCACCAATGGCTACTACAACGTGCGTGCCCATGAAGACCGCCCGT
CTTCCAGGGCAGTGCTCTATGCTGACTACCGTGCCCCTGGCCCTGCCCGCTTCGACGGCCGCCCCTCA
TCCCGTCTCTCCCACTCCAGCGGCTATGCCCAGCTCAACACCTATAGCCGGGGCCCTGCCTCTGACTA
TGGCCCTGAGCCCACACCCCCTGGCCCTGCTGCCCCAGCTGGCACTGACACAACCAGCCAGCTGTCCT
ACGAGAACTATGAGAAGTTCAACTCCCATCCCTTCCCTGGGGCAGCTGGGTACCCCACCTACCGACTG
GGCTACCCCCAGGCCCCACCCTCTGGCCTGGAGCGGACCCCATATGAGGCGTATGACCCCATTGGCAA
GTACGCCACAGCCACTCGATTCTCCTACACCTCCCAGCACTCGGACTACGGCCAGCGATTCCAGCAGC
GCATGCAGACTCACGTGGTCGACG

| | | | |
|---|---|---|---|
| NOV12f, 294398021 | SEQ ID NO: 330 | 778 aa | MW at 85605.1kD |
| Protein Sequence | | | |

TKLMLSLLVWILTLSDTFSQGTQTRFSQEPADQTVVAGQPAVLPCVLLNYSGIVQWTKDGLALGMGQG
LKAWPRYRVVGSADAGQYNLEITDAELSDDASYECQATEAALRSRRAKLTVLIPPEDTRIDGGPVILL
QAGTPHNLTCRAFNAKPAATIIWFRDGTQQEGAVASTELLKDGKRETTVSQLLINPTDLDIGRVFTCR
SMNEAIPSGKETSIELDVHHPPTVTLSIEPQTVQEGERVVFTCQATANPEILGYRWAKGGFLIEDAHE
SRYETNVDYSFFTEPVSCEVHNKVGSTNVSTLVNVHFAPRIVVDPKPTTTDIGSDVTLTCVWVGNPPL
TLTWTKKDSNMGPRPPGSPPEAALSAQVLSNSNQLLLKSVTQADAGTYTCRAIVPRIGVAEREVPLYV
NGPPIISSEAVQYAVRGDGGKVECFIGSTPPPDRIAWAWKENFLEVGTLERYTVERTNSGSGVLSTLT
INNVMEADFQTHYNCTAWNSFGPGTAIIQLEEREVLPVGIIAGATIGASILLIFFFIALVFFLYRRRK
GSRKDVTLRKLDIKVETVNREPLTMHSDREDDTASVSTATRVMKAIYSSFKDDVDLKQDLRCDTIDTR
EEYEMKDPTNGYYNVRAHEDRPSSRAVLYADYRAPGPARFDGRPSSRLSHSSGYAQLNTYSRGPASDY
GPEPTPPGPAAPAGTDTTSQLSYENYEKFNSHPFPGAAGYPTYRLGYPQAPPSGLERTPYEAYDPIGK
YATATRFSYTSQHSDYGQRFQQRMQTHVVD

| | | |
|---|---|---|
| NOV12g, CG51373-01 | SEQ ID NO: 331 | 1230 bp |
| DNA Sequence | ORF Start: ATG at 1 | ORF Stop: TAA at 1003 |

ATGCATTTGACTCTGGAAGTCTTAAACCATGGCCCCTTCCCTCTAAACCTTTCCTCCATTGCTTACAA
TCATGGAACTGTGTTTGGCCACTGGAAGAATAACGTCACTCGGGAAACGCTGGTGAAAGTAAAAGATG
CTGAAGATCAGTTGGGTGCACGAGTGGGTTACATCGAACTGGATCTCAACAGCGGGAAGGAAACATTT
CTGGTGAATGAGGAGGCAACGGGCGAGACCTCAGGAGACAATGTTGTTCATTCTAGGAATCTGTCTCA
GACAATCTTCATCACCCGGAAACGATGGGAGGGGACCCAGACCCGCTTCAGCCAGGAGCCAGCTGACC
AGACGGTGGTGGCTGGACAGCGGGCCGTGCTCCCCTGTGTGCTGCTCAACTACTCTGGAATTGTGCAA
TGGACCAAGGACGGGCTGGCCCTGGGCATGGGCCAGGCCCTCAAAGCCTGGCCACGGTACCGGGTTGT
GGGCTCCGCAGACGCTGGGCAGTACAACCTGGAGATCACAGATGCTGAGCTCTCTGACGACGCCTCTT
ACGAGTGCCAGGCCACGGAGGCCGCCCTGCGCTCTCGGCGGGCCAAACTCACCGTGCTCATCCCCCCA
GAGGACACCAGGATTGACGGAGGCCCTGTGATTCTACTGCAGGCAGGCACCCCCCACAACCTCACATG
CCGGGCCTTCAATGCGAAGCCTGCTGCCACCATCATCTGGTTCCGGGACGGGACGCAGCAGGAGGGCG
CTGTGGCCAGCACGGAATTGCTGAAGGATGGGAAGAGGGAGACCACCGTGAGCCAACTGCTTATTAAC
CCCACGGACCTGGACATAGGGCGTGTCTTCACTTGCCGAAGCATGAACGAAGCCATCCCTAGTGGCAA
GGAGACTTCCATCGAGCTGGATGTGCACCGTGAGTGGGCTGGGGGGAGCAGTCTGGAGCAGGGGGGTG
GAAGAAGGGGTGTGTTTGAGAAGCACACTCTTAGTTTGAGAAACACAAACTAAGAGTCCCCCTATGGT
CCCCAGGACAAACGCTTGCCTTCTTCACATCTTTCATTCCCTGGATTGAACCATGGGGACTAAGGGCT
GGTAGAGCATTGGCTGTGGAGTCAGGCAGTCCCCAGGTCTAAACCAGCCTGTTATTAGTCAATGGTTT
ACACTCTCTGGGCCTCGGTTTCCAGTTCTGTATACTGTATATTGCAAAAGATAAAATACTGGCCTACA
GCCCCA

| | | | |
|---|---|---|---|
| NOV12g, CG51373-01 | SEQ ID NO: 332 | 334 aa | MW at 36655.8kD |
| Protein Sequence | | | |

MHLTLEVLNHGPFPLNLSSIAYNHGTVFGHWKNNVTRETLVKVKDAEDQLGARVGYIELDLNSGKETF
LVNEEATGETSGDNVVHSRNLSQTIFITRKRWEGTQTRFSQEPADQTVVAGQRAVLPCVLLNYSGIVQ
WTKDGLALGMGQALKAWPRYRVVGSADAGQYNLEITDAELSDDASYECQATEAALRSRRAKLTVLIPP
EDTRIDGGPVILLQAGTPHNLTCRAFNAKPAATIIWFRDGTQQEGAVASTELLKDGKRETTVSQLLIN
PTDLDIGRVFTCRSMNEAIPSGKETSIELDVHREWAGGSSLEQGGGRRGVFEKHTLSLRNTN

| | | |
|---|---|---|
| NOV12h, CG51373-02 | SEQ ID NO: 333 | 3464 bp |
| DNA Sequence | ORF Start: ATG at 1 | ORF Stop: TAG at 2524 |

ATGCATTTGACTCTGGAAGTCTTAAACCATGGCCCCTTCCCTCTAAACCTTTCCTCCATTGCTTACAA
TCATGGAACTGTGTTTGGCCACTGGAAGAATAACGTCACTCGGGAAACGCTGGTGAAAGTAAAAGATG
CTGAAGATCAGTTGGGTGCACGAGTGGGTTACATCGAACTGGATCTCAACAGCGGGAAGGAAACATTT
CTGGTGAATGAGGAGGCAACGGGCGAGACCTCAGGAGACAATGTTGTTCATTCTAGGAATCTGTCTCA
GACAATCTTCATCACCCGGAAACGATGGGAGGGGACCCAGACCCGCTTCAGCCAGGAGCCAGCTGACC
AGACGGTGGTGGCTGGACAGCGGGCCGTGCTCCCCTGTGTGCTGCTCAACTACTCTGGAATTGTGCAA
TGGACCAAGGACGGGCTGGCCCTGGGCATGGGCCAGGCCCTCAAAGCCTGGCCACGGTACCGGGTTGT
GGGCTCCGCAGACGCTGGGCAGTACAACCTGGAGATCACAGATGCTGAGCTCTCTGACGACGCCTCTT
ACGAGTGCCAGGCCACGGAGGCCGCCCTGCGCTCTCGGCGGGCCAAACTCACCGTGCTCATCCCCCCA
GAGGACACCAGGATTGACGGAGGCCCTGTGATTCTACTGCAGGCAGGCACCCCCCACAACCTCACATG
CCGGGCCTTCAATGCGAAGCCTGCTGCCACCATCATCTGGTTCCGGGACGGGACGCAGCAGGAGGGCG
CTGTGGCCAGCACGGAATTGCTGAAGGATGGGAAGAGGGAGACCACCGTGAGCCAACTGCTTATTAAC
CCCACGGACCTGGACATAGGGCGTGTCTTCACTTGCCGAAGCATGAACGAAGCCATCCCTAGTGGCAA
GGAGACTTCCATCGAGCTGGATGTGCACCACCCTCCTACAGTGACCCTGTCCATTGAGCCACAGACGG
TGCAGGAGGGTGAGCGTGTTGTCTTTACCTGCCAGGCCACAGCCAACCCCGAGATCTTGGGCTACAGG
TGGGCCAAAGGGGGTTTCTTGATTGAAGACGCCCACGAGAGTCGCTATGAGACAAATGTGGATTATTC
CTTTTTCACGGAGCCTGTGTCTTGTGAGGTTCACAACAAAGTGGGAAGCACCAATGTCAGCACTTTAG
TAAATGTCCACTTTGCTCCCCGGATTGTAGTTGACCCCAAACCCACAACCACAGACATTGGCTCTGAT
GTGACCCTTACCTGTGTCTGGGTTGGGAATCCCCCCCTCACTCTCACCTGGACCAAAAAGGACTCAAA
TATGGTCCTGAGTAACAGCAACCAGCTGCTGCTGAAGTCGGTGACTCAGGCAGACGCTGGCACCTACA
CCTGCCGGGCCATCGTGCCTCGAATCGGAGTGGCTGAGCGGGAGGTGCCGCTCTATGTGAACGGGCCC
CCCATCATCTCCAGTGAGGCAGTGCAGTATGCTGTGAGGGGTGACGGTGGCAAGGTGGAGTGTTTCAT
TGGGAGCACACCACCCCCAGACCGCATAGCATGGGCCTGGAAGGAGAACTTCTTGGAGGTGGGGACCC
TGGAACGCTATACAGTGGAGAGGACCAACTCAGGCAGTGGGGTGCTATCCACGCTCACCATCAACAAT
GTCATGGAGGCCGACTTTCAGACTCACTACAACTGCACCGCCTGGAACAGCTTCGGGCCAGGCACAGC
CATCATCCAGCTGGAAGAGCGAGAGGTGTTACCTGTGGGCATCATAGCTGGGGCCACCATCGGCGCGA
GCATCCTGCTCATCTTCTTCTTCATCGCCTTGGTATTCTTCCTCTACCGGCGCCGCAAAGGCAGTCGC
AAAGACGTGACCCTGAGGAAGCTGGATATCAAGGTGGAGACAGTGAACCGAGAGCCACTTACGATGCA
TTCTGACCGGGAGGATGACACCGCCAGCGTCTCCACAGCAACCCGGGTCATGAAGGCCATCTACTCGT
CGTTTAAGGATGATGTGGATCTGAAGCAGGACCTGCGCTGCGACACCATCGACACCCGGGAGGAGTAT
GAGATGAAGGACCCCACCAATGGCTACTACAACGTGCGTGCCCATGAAGACCGCCCGTCTTCCAGGGC
AGTGCTCTATGCTGACTACCGTGCCCCTGGCCCTGCCCGCTTCGACGGCCGCCCCTCATCCCGTCTCT
CCCACTCCAGCGGCTATGCCCAGCTCAACACCTATAGCCGGGGCCCTGCCTCTGACTATGGCCCTGAG
CCCACACCCCCTGGCCCTGCTGCCCCAGCTGGCACTGACACAACCAGCCAGCTGTCCTACGAGAACTA
TGAGAAGTTCAACTCCCATCCCTTCCCTGGGGCAGCTGGGTACCCCACCTACCGACTGGGCTACCCCC
AGGCCCCACCCTCTGGCCTGGAGCGGACCCCATATGAGGCGTATGACCCCATTGGCAAGTACGCCACA
GCCACTCGATTCTCCTACACCTCCCAGCACTCGGACTACGGCCAGCGATTCCAGCAGCGCATGCAGAC
TCACGTGTAGGGGCCAGAGCCTGGCTGGGGCATCTCTGCGGGGCAGAGGAGAAGGCTTTCGCAGCTGT
TCCCTGATATTCAGGGACATTGCTCATTGCTCCCTTCTCGGACCAGCCTTCTTCCTCCCACCATGGCA
GGTGGGGAGCAGGTCTCCCAGAGACACCCCGTCCCGAGGATGGTGCTCTGTGCATGCCCCAGCCTCCT
GGGCCTGCCCTTCCCTCTTCTTCGGGAGGATGTGTCTCTTCTGACCTGCACTCTTGCCTGACCCTAGA
ATGGGGACAGGGAAAGTGAAGGTTAGGGAAAGCAGAGGGGGGCACTTTTTAGCATTCCCTTTCTATCC
CACCCCTCTGATCTCCCATAAGTGGAAATGGGGGTACCCAGGGATGGGCAGGCTTTGGCCTAGGGACA
TGAAGTATGGGAGTGGGTGGCTGTGGCACAGACAGGTGGAAAACGGGATAGCCTGGCCAGTCCCTCTG
TTGTCTGCATTCGTGCCCTGGGTGCCTCTCTCCTTCCTCAGGGTACTGCAGAAGGGAGCGAACAGGGT
ACTGTTCGCTCTTGTCTACAGAACAGCCCTGGCACTGCATTCAAATCCAGTCTTCATTCAGCTGGGAT
CAAAATGCCAGTCACCTTGGCTACCCACTGTGGACAGCTGTCTGTCAGCATGCAGAGGGATCCAGGAA
TCCCCCCGGCAGCACGGCCCGCTTTCCTTCTCCTCCATGCTGGGCCAGCCAGATAAGTCAGGGTCCTG
GTGGAGAAAGAAAGGCTAGGACCATGTCCTCATTGACCCAGATACTGCTGTGTGCTGCACAGCAGTGA
ACCAACACTAGAGGGAGCCACACAAGCCTCCTCTCCCCAGTCTGCCCCACTTCCTGGCTTTAACTCTT
GAGCTGGTTTGGGGAGTGGTGAGGTAGGGGTGGGGGTGCTGTAGGCTCTTTTTCAAAAAAAAAC

| | | | |
|---|---|---|---|
| NOV12h, CG51373-02 | SEQ ID NO: 334 | 841 aa | MW at 92988.2kD |
| Protein Sequence | | | |

MHLTLEVLNHGPFPLNLSSIAYNHGTVFGHWKNNVTRETLVKVKDAEDQLGARVGYIELDLNSGKETF
LVNEEATGETSGDNVVHSRNLSQTIFITRKRWEGTQTRFSQEPADQTVVAGQRAVLPCVLLNYSGIVQ
WTKDGLALGMGQALKAWPRYRVVGSADAGQYNLEITDAELSDDASYECQATEAALRSRRAKLTVLIPP
EDTRIDGGPVILLQAGTPHNLTCRAFNAKPAATIIWFRDGTQQEGAVASTELLKDGKRETTVSQLLIN
PTDLDIGRVFTCRSMNEAIPSGKETSIELDVHHPPTVTLSIEPQTVQEGERVVFTCQATANPEILGYR
WAKGGFLIEDAHESRYETNVDYSFFTEPVSCEVHNKVGSTNVSTLVNVHFAPRIVVDPKPTTTDIGSD
VTLTCVWVGNPPLTLTWTKKDSNMVLSNSNQLLLKSVTQADAGTYTCRAIVPRIGVAEREVPLYVNGP
PIISSEAVQYAVRGDGGKVECFIGSTPPPDRIAWAWKENFLEVGTLERYTVERTNSGSGVLSTLTINN
VMEADFQTHYNCTAWNSFGPGTAIIQLEEREVLPVGIIAGATIGASILLIFFFIALVFFLYRRRKGSR
KDVTLRKLDIKVETVNREPLTMHSDREDDTASVSTATRVMKAIYSSFKDDVDLKQDLRCDTIDTREEY
EMKDPTNGYYNVRAHEDRPSSRAVLYADYRAPGPARFDGRPSSRLSHSSGYAQLNTYSRGPASDYGPE
PTPPGPAAPAGTDTTSQLSYENYEKFNSHPFPGAAGYPTYRLGYPQAPPSGLERTPYEAYDPIGKYAT
ATRFSYTSQHSDYGQRFQQRMQTHV

| | | |
|---|---|---|
| NOV12i, CG51373-03 | SEQ ID NO: 335 | 3379 bp |
| DNA Sequence | ORF Start: ATG at 351 | ORF Stop: TAG at 2439 |

CTCTCCGATACTTTCTCCCAAGGGTCAGCTGCTTCTTCATTCCAAGTGGACAAGGAGCCAGCTGCTCA
CTGTCCTTGAGAGACTTCAGCGAGAGACCAGGGTGTCCAGGCTCCATGCAGGAAAGCCATGCGTATAA
ATTCCACCTCTGAGCCAGGCCTCACCAGCAAGCCCACTCTTAAGCCCTTGACTTGGGCTCCAGGGGCC
ATGGGAAGGAGAAACGGACCCAGACCCGCTTCAGCCAGGAGCCAGCTGACCAGACGGTGGTGGCTGGA
CAGCGGGCCGTGCTCCCCTGTGTGCTGCTCAACTACTCTGGAATTGTGCAATGGACCAAGGACGGGCT
GGCCCTGGGCATGGGCCAGGCCCTCAAAGCCTGGCCACGGTACCGGGTTGTGGGCTCCGCAGACGCTG
GGCAGTACAACCTGGAGATCACAGATGCTGAGCTCTCTGACGACGCCTCTTACGAGTGCCAGGCCACG
GAGGCCGCCCTGCGCTCTCGGCGGGCCAAACTCACCGTGCTCATCCCCCCAGAGGACACCAGGATTGA
CGGAGGCCCTGTGATTCTACTGCAGGCAGGCACCCCCCACAACCTCACATGCCGGGCCTTCAATGCGA
AGCCTGCTGCCACCATCATCTGGTTCCGGGACGGGACGCAGCAGGAGGGCGCTGTGGCCAGCACGGAA
TTGCTGAAGGATGGGAAGAGGGAGACCACCGTGAGCCAACTGCTTATTAACCCCACGGACCTGGACAT
AGGGCGTGTCTTCACTTGCCGAAGCATGAACGAAGCCATCCCTAGTGGCAAGGAGACTTCCATCGAGC
TGGATGTGCACCACCCTCCTACAGTGACCCTGTCCATTGAGCCACAGACGGTGCAGGAGGGTGAGCGT
GTTGTCTTTACCTGCCAGGCCACAGCCAACCCCGAGATCTTGGGCTACAGGTGGGCCAAAGGGGGTTT
CTTGATTGAAGACGCCCACGAGAGTCGCTATGAGACAAATGTGGATTATTCCTTTTTCACGGAGCCTG
TGTCTTGTGAGGTTCACAACAAAGTGGGAAGCACCAATGTCAGCACTTTAGTAAATGTCCACTTTGCT
CCCCGGATTGTAGTTGACCCCAAACCCACAACCACAGACATTGGCTCTGATGTGACCCTTACCTGTGT
CTGGGTTGGGAATCCCCCCCTCACTCTCACCTGGACCAAAAAGGACTCAAATATGGTCCTGAGTAACA
GCAACCAGCTGCTGCTGAAGTCGGTGACTCAGGCAGACGCTGGCACCTACACCTGCCGGGCCATCGTG
CCTCGAATCGGAGTGGCTGAGCGGGAGGTGCCGCTCTATGTGAACGGGCCCCCCATCATCTCCAGTGA
GGCAGTGCAGTATGCTGTGAGGGGTGACGGTGGCAAGGTGGAGTGTTTCATTGGGAGCACACCACCCC
CAGACCGCATAGCATGGGCCTGGAAGGAGAACTTCTTGGAGGTGGGGACCCTGGAACGCTATACAGTG
GAGAGGACCAACTCAGGCAGTGGGGTGCTATCCACGCTCACCATCAACAATGTCATGGAGGCCGACTT
TCAGACTCACTACAACTGCACCGCCTGGAACAGCTTCGGGCCAGGCACAGCCATCATCCAGCTGGAAG
AGCGAGAGGTGTTACCTGTGGGCATCATAGCTGGGGCCACCATCGGCGCGAGCATCCTGCTCATCTTC
TTCTTCATCGCCTTGGTATTCTTCCTCTACCGGCGCCGCAAAGGCAGTCGCAAAGACGTGACCCTGAG
GAAGCTGGATATCAAGGTGGAGACAGTGAACCGAGAGCCACTTACGATGCATTCTGACCGGGAGGATG
ACACCGCCAGCGTCTCCACAGCAACCCGGGTCATGAAGGCCATCTACTCGTCGTTTAAGGATGATGTG
GATCTGAAGCAGGACCTGCGCTGCGACACCATCGACACCCGGGAGGAGTATGAGATGAAGGACCCCAC
CAATGGCTACTACAACGTGCGTGCCCATGAAGACCGCCCGTCTTCCAGGGCAGTGCTCTATGCTGACT
ACCGTGCCCCTGGCCCTGCCCGCTTCGACGGCCGCCCCTCATCCCGTCTCTCCCACTCCAGCGGCTAT
GCCCAGCTCAACACCTATAGCCGGGGCCCTGCCTCTGACTATGGCCCTGAGCCCACACCCCCTGGCCC
TGCTGCCCCAGCTGGCACTGACACAACCAGCCAGCTGTCCTACGAGAACTATGAGAAGTTCAACTCCC
ATCCCTTCCCTGGGGCAGCTGGGTACCCCACCTACCGACTGGGCTACCCCCAGGCCCCACCCTCTGGC
CTGGAGCGGACCCCATATGAGGCGTATGACCCCATTGGCAAGTACGCCACAGCCACTCGATTCTCCTA
CACCTCCCAGCACTCGGACTACGGCCAGCGATTCCAGCAGCGCATGCAGACTCACGTGTAGGGGCCAG
AGCCTGGCTGGGGCATCTCTGCGGGGCAGAGGAGAAGGCTTTCGCAGCTGTTCCCTGATATTCAGGGA
CATTGCTCATTGCTCCCTTCTCGGACCAGCCTTCTTCCTCCCACCATGGCAGGTGGGGAGCAGGTCTC
CCAGAGACACCCCGTCCCGAGGATGGTGCTCTGTGCATGCCCCAGCCTCCTGGGCCTGCCCTTCCCTC
TTCTTCGGGAGGATGTGTCTCTTCTGACCTGCACTCTTGCCTGACCCTAGAATGGGGACAGGGAAAGT
GAAGGTTAGGGAAAGCAGAGGGGGGCACTTTTTAGCATTCCCTTTCTATCCCACCCCTCTGATCTCCC
ATAAGTGGAAATGGGGGTACCCAGGGATGGGCAGGCTTTGGCCTAGGGACATGAAGTATGGGAGTGGG
TGGCTGTGGCACAGACAGGTGGAAAACGGGATAGCCTGGCCAGTCCCTCTGTTGTCTGCATTCGTGCC
CTGGGTGCCTCTCTCCTTCCTCAGGGTACTGCAGAAGGGAGCGAACAGGGTACTGTTCGCTCTTGTCT
ACAGAACAGCCCTGGCACTGCATTCAAATCCAGTCTTCATTCAGCTGGGATCAAAATGCCAGTCACCT
TGGCTACCCACTGTGGACAGCTGTCTGTCAGCATGCAGAGGGATCCAGGAATCCCCCCGGCAGCACGC
CCCGCTTTCCTTCTCCTCCATGCTGGGCCAGCCAGATAAGTCAGGGTCCTGGTGGAGAAAGAAAGGCT
AGGACCATGTCCTCATTGACCCAGATACTGCTGTGTGCTGCACAGCAGTGAACCAACACTAGAGGGAG
CCACACAAGCCTCCTCTCCCCAGTCTGCCCCACTTCCTGGCTTTAACTCTTGAGCTGGTTTGGGGAGT
GGTGAGGTAGGGGTGGGGGTGCTGTAGGCTCTTTTTCAAAAAAAAAC

| | | | |
|---|---|---|---|
| NOV12i, CG51373-03 | SEQ ID NO: 336 | 696 aa | MW at 76928.3kD |
| Protein Sequence | | | |

MGQALKAWPRYRVVGSADAGQYNLEITDAELSDDASYECQATEAALRSRRAKLTVLIPPEDTRIDGGP
VILLQAGTPHNLTCRAFNAKPAATIIWFRDGTQQEGAVASTELLKDGKRETTVSQLLINPTDLDIGRV
FTCRSMNEAIPSGKETSIELDVHHPPTVTLSIEPQTVQEGERVVFTCQATANPEILGYRWAKGGFLIE
DAHESRYETNVDYSFFTEPVSCEVHNKVGSTNVSTLVNVHFAPRIVVDPKPTTTDIGSDVTLTCVWVG
NPPLTLTWTKKDSNMVLSNSNQLLLKSVTQADAGTYTCRAIVPRIGVAEREVPLYVNGPPIISSEAVQ
YAVRGDGGKVECFIGSTPPPDRIAWAWKENFLEVGTLERYTVERTNSGSGVLSTLTINNVMEADFQTH
YNCTAWNSFGPGTAIIQLEEREVLPVGIIAGATIGASILLIFFFIALVFFLYRRRKGSRKDVTLRKLD
IKVETVNREPLTMHSDREDDTASVSTATRVMKAIYSSFKDDVDLKQDLRCDTIDTREEYEMKDPTNGY
YNVRAHEDRPSSRAVLYADYRAPGPARFDQRPSSRLSHSSGYAQLNTYSRGPASDYGPEPTPPGPAAP
AGTDTTSQLSYENYEKFNSHPFPGAAGYPTYRLGYPQAPPSGLERTPYEAYDPIGKYATATRFSYTSQ
HSDYGQRFQQRMQTHV

| | | |
|---|---|---|
| NOV12i, CG51373-04 | SEQ ID NO: 337 | 1145 bp |
| DNA Sequence | ORF Start: ATG at 351 | ORF Stop: TAA at 918 |

CTCTCCGATACTTTCTCCCAAGGGTCAGCTGCTTCTTCATTCCAAGTGGACAAGGAGCCAGCTGCTCA
CTGTCCTTGAGAGACTTCAGCGAGAGACCAGGGTGTCCAGGCTCCATGCAGGAAAGCCATGCGTATAA
ATTCCACCTCTGAGCCAGGCCTCACCAGCAAGCCCACTCTTAAGCCCTTGACTTGGGCTCCAGGGGCC
ATGGGAAGGAGAAACGGACCCAGACCCGCTTCAGCCAGGAGCCAGCTGACCAGACGGTGGTGGCTGGA
CAGCGGGCCGTGCTCCCCTGTGTGCTGCTCAACTACTCTGGAATTGTGCAATGGACCAAGGACGGGCT
GGCCCTGGGCATGGGCCAGGCCCTCAAAGCCTGGCCACGGTACCGGGTTGTGGGCTCCGCAGACGCTG
GGCAGTACAACCTGGAGATCACAGATGCTGAGCTCTCTGACGACGCCTCTTACGAGTGCCAGGCCACG
GAGGCCGCCCTGCGCTCTCGGCGGGCCAAACTCACCGTGCTCATCCCCCCAGAGGACACCAGGATTGA
CGGAGGCCCTGTGATTCTACTGCAGGCAGGCACCCCCCACAACCTCACATGCCGGGCCTTCAATGCGA
AGCCTGCTGCCACCATCATCTGGTTCCGGGACGGGACGCAGCAGGAGGGCGCTGTGGCCAGCACGGAA
TTGCTGAAGGATGGGAAGAGGGAGACCACCGTGAGCCAACTGCTTATTAACCCCACGGACCTGGACAT
AGGGCGTGTCTTCACTTGCCGAAGCATGAACGAAGCCATCCCTAGTGGCAAGGAGACTTCCATCGAGC
TGGATGTGCACCGTGAGTGGGCTGGGGGGAGCAGTCTGGAGCAGGGGGGTGGAAGAAGGGGTGTGTTT
GAGAAGCACACTCTTAGTTTGAGAAACACAAACTAAGAGTCCCCCTATGGTCCCCAGGACAAACGCTT
GCCTTCTTCACATCTTTCATTCCCTGGATTGAACCATGGGGACTAAGGGCTGGTAGAGCATTGGCTGT
GGAGTCAGGCAGTCCCCAGGTCTAAACCAGCCTGTTATTAGTCAATGGTTTACACTCTCTGGGCCTCG
GTTTCCAGTTCTGTATACTGTATATTGCAAAAGATAAAATACTGGCCTACAGCCCCA

| | | | |
|---|---|---|---|
| NOV12j, CG51373-04 | SEQ ID NO: 338 | 189 aa | MW at 20595.8kD |
| Protein Sequence | | | |

MGQALKAWPRYRVVGSADAGQYNLEITDAELSDDASYECQATEAALRSRRAKLTVLIPPEDTRIDGGP
VILLQAGTPHNLTCRAFNAKPAATIIWFRDGTQQEGAVASTELLKDGKRETTVSQLLINPTDLDIGRV
FTCRSMNEAIPSGKETSIELDVHREWAGGSSLEQGGGRRGVFEKHTLSLRNTN

| | | |
|---|---|---|
| NOV12k, CG51373-05 | SEQ ID NO: 339 | 1148 bp |
| DNA Sequence | ORF Start: ATG at 351 | ORF Stop: TAA at 918 |

CTCTCCGATACTTTCTCCCAAGGGTCAGCTGCTTCTTCATTCCAAGTGGACAAGGAGCCAGCTGCTCA
CTGTCCTTGAGAGACTTCAGCGAGAGACCAGGGTGTCCAGGCTCCATGCAGGAAAGCCATGCGTATAA
ATTCCACCTCTGAGCCAGGCCTCACCAGCAAGCCCACTCTTAAGCCCTTGACTTGGGCTCCAGGGGCC
ATGGGAAGGAGAAACGGACCCAGACCCGCTTCAGCCAGGAGCCAGCTGACCAGACGGTGGTGGCTGGA
CAGCGGGCCGTGCTCCCCTGTGTGCTGCTCAACTACTCTGGAATTGTGCAATGGACCAAGGACGGGCT
GGCCCTGGGCATGGGCCAGGCCCTCAAAGCCTGGCCACGGTACCGGGTTGTGGGCTCCGCAGACGCTG
GGCAGTACAACCTGGAGATCACAGATGCTGAGCTCTCTGACGACGCCTCTTACGAGTGCCAGGCCACG
GAGGCCGCCCTGCGCTCTCGGCGGGCCAAACTCACCGTGCTCATCCCCCCAGAGGACACCAGGATTGA
CGGAGGCCCTGTGATTCTACTGCAGGCAGGCACCCCCCACAACCTCACATGCCGGGCCTTCAATGCGA
AGCCTGCTGCCACCATCATCTGGTTCCGGGACGGGACGCAGCAGGAGGGCGCTGTGGCCAGCACGGAA
TTGCTGAAGGATGGGAAGAGGGAGACCACCGTGAGCCAACTGCTTATTAACCCCACGGACCTGGACAT
AGGGCGTGTCTTCACTTGCCGAAGCATGAACGAAGCCATCCCTAGTGGCAAGGAGACTTCCATCGAGC
TGGATGTGCACCGTGAGTGGGCTGGGGGGAGCAGTCTGGAGCAGGGGGGTGGAAGAAGGGGTGTGTTT
GAGAAGCACACTCTTAGTTTGAGAAACACAAACTAAGAGTCCCCCTATGGTCCCCAGGACAAACGCTT
GCCTTCTTCACATCTTTCATTCCCTGGATTGAACCATGGGGACTAAGGGCTGGTAGAGCATTGGCTGT
GGAGTCAGGCAGTCCCCAGGTCTAAACCAGCCTGTTATTAGTCAATGGTTTACACTCTCTGGGCCTCG
GTTTCCAGTTCTGTATACTGTATATTGCAAAAGATAAAATACTGGCCTACAGCCCCAAAA

| | | | |
|---|---|---|---|
| NOV12k, CG51373-05 | SEQ ID NO: 340 | 189 aa | MW at 20595.8kD |
| Protein Sequence | | | |

MGQALKAWPRYRVVGSADAGQYNLEITDAELSDDASYECQATEAALRSRRAKLTVLIPPEDTRIDGGP
VILLQAGTPHNLTCRAFNAKPAATIIWFRDGTQQEGAVASTELLKDGKRETTVSQLLINPTDLDIGRV
FTCRSMNEAIPSGKETSIELDVHREWAGGSSLEQGGGRRGVFEKHTLSLRNTN

| | | |
|---|---|---|
| NOV12l, CG51373-06 | SEQ ID NO: 341 | 1148 bp |
| DNA Sequence | ORF Start: ATG at 351 | ORF Stop: TAA at 918 |

CTCTCCGATACTTTCTCCCAAGGGTCAGCTGCTTCTTCATTCCAAGTGGACAAGGAGCCAGCTGCTCA
CTGTCCTTGAGAGACTTCAGCGAGAGACCAGGGTGTCCAGGCTCCATGCAGGAAAGCCATGCGTATAA
ATTCCACCTCTGAGCCAGGCCTCACCAGCAAGCCCACTCTTAAGCCCTTGACTTGGGCTCCAGGGGCC
ATGGGAAGGAGAAACGGACCCAGACCCGCTTCAGCCAGGAGCCAGCTGACCAGACGGTGGTGGCTGGA
CAGCGGGCCGTGCTCCCCTGTGTGCTGCTCAACTACTCTGGAATTGTGCAATGGACCAAGGACGGGCT
GGCCCTGGGCATGGGCCAGGCCCTCAAAGCCTGGCCACGGTACCGGGTTGTGGGCTCCGCAGACGCTG
GGCAGTACAACCTGGAGATCACAGATGCTGAGCTCTCTGACGACGCCTCTTACGAGTGCCAGGCCACG
GAGGCCGCCCTGCGCTCTCGGCGGGCCAAACTCACCGTGCTCATCCCCCCAGAGGACACCAGGATTGA
CGGAGGCCCTGTGATTCTACTGCAGGCAGGCACCCCCCACAACCTCACATGCCGGGCCTTCAATGCGA
AGCCTGCTGCCACCATCATCTGGTTCCGGGACGGGACGCAGCAGGAGGGCGCTGTGGCCAGCACGGAA
TTGCTGAAGGATGGGAAGAGGGAGACCACCGTGAGCCAACTGCTTATTAACCCCACGGACCTGGACAT
AGGGCGTGTCTTCACTTGCCGAAGCATGAACGAAGCCATCCCTAGTGGCAAGGAGACTTCCATCGAGC
TGGATGTGCACCGTGAGTGGGCTGGGGGGAGCAGTCTGGAGCAGGGGGGTGGAAGAAGGGGTGTGTTT
GAGAAGCACACTCTTAGTTTGAGAAACACAAACTAAGAGTCCCCCTATGGTCCCCAGGACAAACGCTT
GCCTTCTTCACATCTTTCATTCCCTGGATTGAACCATGGGGACTAAGGGCTGGTAGAGCATTGGCTGT
GGAGTCAGGCAGTCCCCAGGTCTAAACCAGCCTGTTATTAGTCAATGGTTTACACTCTCTGGGCCTCG
GTTTCCAGTTCTGTATACTGTATATTGCAAAAGATAAAATACTGGCCTACAGCCCCAAAA

| | | | |
|---|---|---|---|
| NOV12l, CG51373-06 | SEQ ID NO: 342 | 189 aa | MW at 20595.8kD |
| Protein Sequence | | | |

MGQALKAWPRYRVVGSADAGQYNLEITDAELSDDASYECQATEAALRSRRAKLTVLIPPEDTRIDGGP
VILLQAGTPHNLTCRAFNAKPAATIIWFRDGTQQEGAVASTELLKDGKRETTVSQLLINPTDLDIGRV
FTCRSMNEAIPSGKETSIELDVHREWAGGSSLEQGGGRRGVFEKHTLSLRNTN

| | | |
|---|---|---|
| NOV12m, CG51373-07 | SEQ ID NO: 343 | 1407 bp |
| DNA Sequence | ORF Start: at 1 | ORF Stop: end of sequence |

CGCTTCAGCCAGGAGCCAGCTGACCAGACGGTGGTGGCTGGACAGCGGGCCGTGCTCCCCTGTGTGCT
GCTCAACTACTCTGGAATTGTGCAATGGACCAAGGACGGGCTGGCCCTGGGCATGGGCCAGGCCCTCA
AAGCCTGGCCACGGTACCGGGTTGTGGGCTCCGCAGACGCTGGGCAGTACAACCTGGAGATCACAGAT
GCTGAGCTCTCTGACGACGCCTCTTACGAGTGCCAGGCCACGGAGGCCGCCCTGCGCTCTCGGCGGGC
CAAACTCACCGTGCTCATCCCCCCAGAGGACACCAGGATTGACGGAGGCCCTGTGATTCTACTGCAGG
CAGGCACCCCCCACAACCTCACATGCCGGGCCTTCAATGCGAAGCCTGCTGCCACCATCATCTGGTTC
CGGGACGGGACGCAGCAGGAGGGCGCTGTGGCCAGCACGGAATTGCTGAAGGATGGGAAGAGGGAGAC
CACCGTGAGCCAACTGCTTATTAACCCCACGGACCTGGACATAGGGCGTGTCTTCACTTGCCGAAGCA
TGAACGAAGCCATCCCTAGTGGCAAGGAGACTTCCATCGAGCTGGATGTGCACCACCCTCCTACAGTG
ACCCTGTCCATTGAGCCACAGACGGTGCAGGAGGGTGAGCGTGTTGTCTTTACCTGCCAGGCCACAGC
CAACCCCGAGATCTTGGGCTACAGGTGGGCCAAAGGGGGTTTCTTGATTGAAGACGCCCACGAGAGTC
GCTATGAGACAAATGTGGATTATTCCTTTTTCACGGAGCCTGTGTCTTGTGAGGTTCACAACAAAGTG
GGAAGCACCAATGTCAGCACTTTAGTAAATGTCCACTTTGCTCCCCGGATTGTAGTTGACCCCAAACC
CACAACCACAGACATTGGCTCTGATGTGACCCTTACCTGTGTCTGGGTTGGGAATCCCCCCCTCACTC
TCACCTGGACCAAAAAGGACTCAAATATGGTCCTGAGTAACAGCAACCAGCTGCTGCTGAAGTCGGTG
ACTCAGGCAGACGCTGGCACCTACACCTGCCGGGCCATCGTGCCTCGAATCGGAGTGGCTGAGCGGGA
GGTGCCGCTCTATGTGAACGGGCCCCCCATCATCTCCAGTGAGGCAGTGCAGTATGCTGTGAGGGGTG
ACGGTGGCAAGGTGGAGTGTTTCATTGGGAGCACACCACCCCCAGACCGCATAGCATGGGCCTGGAAG
GAGAACTTCTTGGAGGTGGGGACCCTGGAACGCTATACAGTGGAGAGGACCAACTCAGGCAGTGGGGT
GCTATCCACGCTCACCATCAACAATGTCATGGAGGCCGACTTTCAGACTCACTACAACTGCACCGCCT
GGAACAGCTTCGGGCCAGGCACAGCCATCATCCAGCTGGAAGAGCGA

| | | | |
|---|---|---|---|
| NOV12m, CG51373-07 | SEQ ID NO: 344 | 469 aa | MW at 51246.2kD |
| Protein Sequence | | | |

RFSQEPADQTVVAGQRAVLPCVLLNYSGIVQWTKDGLALGMGQALKAWPRYRVVGSADAGQYNLEITD
AELSDDASYECQATEAALRSRRAKLTVLIPPEDTRIDGGPVILLQAGTPHNLTCRAFNAKPAATIIWF
RDGTQQEGAVASTELLKDGKRETTVSQLLINPTDLDIGRVFTCRSMNEAIPSGKETSIELDVHHPPTV
TLSIEPQTVQEGERVVFTCQATANPEILGYRWAKGGFLIEDAHESRYETNVDYSFFTEPVSCEVHNKV
GSTNVSTLVNVHFAPRIVVDPKPTTTDIGSDVTLTCVWVGNPPLTLTWTKKDSNMVLSNSNQLLLKSV
TQADAGTYTCRAIVPRIGVAEREVPLYVNGPPIISSEAVQYAVRGDGGKVECFIGSTPPPDRIAWAWK
ENFLEVGTLERYTVERTNSGSGVLSTLTINNVMEADFQTHYNCTAWNSFGPGTAIIQLEER

| | | |
|---|---|---|
| NOV12n, CG51373-09 | SEQ ID NO: 345 | 2128 bp |
| DNA Sequence | ORF Start: ATG at 31 | ORF Stop: TAG at 2119 |

CAATGGACCAAGGACGGGCTGGCCCTGGGCATGGGCCAGGGCCTCAAAGCCTGGCCACGGTACCGGGT
TGTGGGCTCCGCAGACGCTGGGCAGTACAACCTGGAGATCACAGATGCTGAGCTCTCTGACGACGCCT
CTTACGAGTGCCAGGCCACGGAGGCCGCCCTGCGCTCTCGGCGGGCCAAACTCACCGTGCTCATCCCC
CCAGAGGACACCAGGATTGACGGAGGCCCTGTGATTCTACTGCAGGCAGGCACCCCCCACAACCTCAC
ATGCCGGGCCTTCAATGCGAAGCCTGCTGCCACCATCATCTGGTTCCGGGACGGGACGCAGCAGGAGG
GCGCTGTGGCCAGCACGGAATTGCTGAAGGATGGGAAGAGGGAGACCACCGTGAGCCAACTGCTTATT
AACCCCACGGACCTGGACATAGGGCGTGTCTTCACTTGCCGAAGCATGAACGAAGCCATCCCTAGTGG
CAAGGAGACTTCCATCGAGCTGGATGTGCACCACCCTCCTACAGTGACCCTGTCCATTGAGCCACAGA
CGGTGCAGGAGGGTGAGCGTGTTGTCTTTACCTGCCAGGCCACAGCCAACCCCGAGATCTTGGACTAC
AGGTGGGCCAAAGGGGGTTTCTTGATTGAAGACGCCCACGAGAGTCGCTATGAGACAAATGTGGATTA
TTCCTTTTTCACGGAGCCTGTGTCTTGTGAGGTTCACAACAAAGTGGGAAGCACCAATGTCAGCACTT
TAGTAAATGTCCACTTTGCTCCCCGGATTGTAGTTGACCCCAAACCCACAACCACAGACATTGGCTCT
GATGTGACCCTTACCTGTGTCTGGGTTGGGAATCCCCCCCTCACTCTCACCTGGACCAAAAAGGACTC
AAATATGGTCCTGAGTAACAGCAACCAGCTGCTGCTGAAGTCGGTGACTCAGGCAGACGCTGGCACCT
ACACCTGCCGGGCCATCGTGCCTCGAATCGGAGTGGCTGAGCGGGAGGTGCCGCTCTATGTGAACGGG
CCCCCCATCATCTCCAGTGAGGCAGTGCAGTATGCTGTGAGGGGTGACGGTGGCAAGGTGGAGTGTTT
CATTGGGAGCACACCACCCCCAGACCGCATAGCATGGGCCTGGAAGGAGAACTTCTTGGAGGTGGGGA
CCCTGGAACGCTATACAGTGGAGAGGACCAACTCAGGCAGTGGGGTGCTATCCACGCTCACCATCAAC
AATGTCATGGAGGCCGACTTTCAGACTCACTACAACTGCACCGCCTGGAACAGCTTCGGGCCAGGCAC
AGCCATCATCCAGCTGGAAGAGCGAGAGGTGTTACCTGTGGGCATCATAGCTGGGGCCACCATCGGCG
CGAGCATCCTGCTCATCTTCTTCTTCATCGCCTTGGTATTCTTCCTCTACCGGCGCCGCAAAGGCAGT
CGCAAAGACGTGACCCTGAGGAAGCTGGATATCAAGGTGGAGACAGTGAACCGAGAGCCACTTACGAT
GCATTCTGACCGGGAGGATGACACCGCCAGCGTCTCCACAGCAACCCGGGTCATGAAGGCCATCTACT
CGTCGTTTATGGATGATGTGGATCTGAAGCAGGACCTGCGCTGCGACACCATCGACACCCGGGAGGAG
TATGAGATGAAGGACCCCACCAATGGCTACTACAACGTGCGTGCCCATGAAGACCGCCCGTCTTCCAG
GGCAGTGCTCTATGCTGACTACCGTGCCCCTGGCCCTGCCCGCTTCGACGGCCGCCCCTCATCCCGTC
TCTCCCACTCCAGCGGCTATGCCCAGCTCAACACCTATAGCCGGGGCCCTGCCTCTGACTATGGCCCT
GAGCCCACACCCCCTGGCCCTGCTGCCCCAGCTGGCACTGACACAACCAGCCAGCTGTCCTACGAGAA
CTATGAGAAGTTCAACTCCCATCCCTTCCCTGGGGCAGCTGGGTACCCCACCTACCGACTGGGCTACC
CCCAGGCCCCACCCTCTGGCCTGGAGCGGACCCCATATGAGGCGTATGACCCCATTGGCAAGTACGCC
ACAGCCACTCGATTCTCCTACACCTCCCAGCACTCGGACTACGGCCAGCGATTCCAGCAGCGCATGCA
GACTCACGTGTAGGGGCCAG

| | | | |
|---|---|---|---|
| NOV12n, CG51373-09 | SEQ ID NO: 346 | 696 aa | MW at 76975.3kD |
| Protein Sequence | | | |

MGQGLKAWPRYRVVGSADAGQYNLEITDAELSDDASYECQATEAALRSRRAKLTVLIPPEDTRIDGGP
VILLQAGTPHNLTCRAFNAKPAATIIWFRDGTQQEGAVASTELLKDGKRETTVSQLLINPTDLDIGRV
FTCRSMNEAIPSGKETSIELDVHHPPTVTLSIEPQTVQEGERVVFTCQATANPEILDYRWAKGGFLIE
DAHESRYETNVDYSFFTEPVSCEVHNKVGSTNVSTLVNVHFAPRIVVDPKPTTTDIGSDVTLTCVWVG
NPPLTLTWTKKDSNMVLSNSNQLLLKSVTQADAGTYTCRAIVPRIGVAEREVPLYVNGPPIISSEAVQ
YAVRGDGGKVECFIGSTPPPDRIAWAWKENFLEVGTLERYTVERTNSGSGVLSTLTINNVMEADFQTH
YNCTAWNSFGPGTAIIQLEEREVLPVGIIAGATIGASILLIFFFIALVFFLYRRRKGSRKDVTLRKLD
IKVETVNREPLTMHSDREDDTASVSTATRVMKAIYSSFMDDVDLKQDLRCDTIDTREEYEMKDPTNGY
YNVRAHEDRPSSRAVLYADYRAPGPARFDGRPSSRLSHSSGYAQLNTYSRGPASDYGPEPTPPGPAAP
AGTDTTSQLSYENYEKFNSHPFPGAAGYPTYRLGYPQAPPSGLERTPYEAYDPIGKYATATRFSYTSQ
HSDYGQRFQQRMQTNV

| | | |
|---|---|---|
| NOV12o, CG51373-12 | SEQ ID NO: 347 | 2336 bp |
| DNA Sequence | ORF Start: ATG at 11 | ORF Stop: at 2330 |

CACCAAGCTTATGCTGAGCCTCCTCGTCTGGATCCTCACTCTCTCCGATACTTTCTCCCAAGGGACCC
AGACCCGCTTCAGCCAGGAGCCAGCTGACCAGACGGTGGTGGCTGGACAGCGGGCCGTGCTCCCCTGT
GTGCTGCTCAACTACTCTGGAATTGTGCAATGGACCAAGGACGGGCTGGCCCTGGGCATGGGCCAGGG
CCTCAAAGCCTGGCCACGGTACCGGGTTGTGGGCTCCGCAGACGCTGGGCAGTACAACCTGGAGATCA
CAGATGCTGAGCTCTCTGACGACGCCTCTTACGAGTGCCAGGCCACGGAGGCCGCCCTGCGCTCTCGG
CGGGCCAAACTCACCGTGCTCATCCCCCCAGAGGACACCAGGATTGACGGAGGCCCTGTGATTCTACT
GCAGGCAGGCACCCCCCACAACCTCACATGCCGGGCCTTCAATGCGAAGCCTGCTGCCACCATCATCT
GGTTCCGGGACGGGACGCAGCAGGAGGGCGCTGTGGCCAGCACGGAATTGCTGAAGGATGGGAAGAGG
GAGACCACCGTGAGCCAACTGCTTATTAACCCCACGGACCTGGACATAGGGCGTGTCTTCACTTGCCG
AAGCATGAACGAAGCCATCCCTAGTGGCAAGGAGACTTCCATCGAGCTGGATGTGCACCACCCTCCTA
CAGTGACCCTGTCCATTGAGCCACAGACGGTGCAGGAGGGTGAGCGTGTTGTCTTTACCTGCCAGGCC
ACAGCCAACCCCGAGATCTTGGGCTACAGGTGGGCCAAAGGGGGTTTCTTGATTGAAGACGCCCACGA
GAGTCGCTATGAGACAAATGTGGATTATTCCTTTTTCACGGAGCCTGTGTCTTGTGAGGTTCACAACA
AAGTGGGAAGCACCAATGTCAGCACTTTAGTAAATGTCCACTTTGCTCCCCGGATTGTAGTTGACCCC
AAACCCACAACCACAGACATTGGCTCTGATGTGACCCTTACCTGTGTCTGGGTTGGGAATCCCCCCCT
CACTCTCACCTGGACCAAAAAGGACTCAAATATGGGGCCCAGGCCTCCTGGCTCCCCACCCGAGGCTG
CTCTCTCTGCCCAGGTCCTGAGTAACAGCAACCAGCTGCTGCTGAAGTCGGTGACTCAGGCAGACGCT
GGCACCTACACCTGCCGGGCCATCGTGCCTCGAATCGGAGTGGCTGAGCGGGAGGTGCCGCTCTATGT
GAACGGGCCCCCCATCATCTCCAGTGAGGCAGTGCAGTATGCTGTGAGGGGTGACGGTGGCAAGGTGG
AGTGTTTCATTGGGAGCACACCACCCCCAGACCGCATAGCATGGGCCTGGAAGGAGAACTTCTTGGAG
GTGGGGACCCTGGAACGCTATACAGTGGAGAGGACCAACTCAGGCAGTGGGGTGCTATCCACGCTCAC
CATCAACAATGTCATGGAGGCCGACTTTCAGACTCACTACAACTGCACCGCCTGGAACAGCTTCGGGC
CAGGCACAGCCATCATCCAGCTGGAAGAGCGAGAGGTGTTACCTGTGGGCATCATAGCTGGGGCCACC
ATCGGCGCGAGCATCCTGCTCATCTTCTTCTTCATCGCCTTGGTATTCTTCCTCTACCGGCGCCGCAA
AGGCAGTCGCAAAGACGTGACCCTGAGGAAGCTGGATATCAAGGTGGAGACAGTGAACCGAGAGCCAC
TTACGATGCATTCTGACCGGGAGGATGACACCGCCAGCGTCTCCACAGCAACCCGGGTCATGAAGGCC
ATCTACTCGTCGTTTAAGGATGATGTGGATCTGAAGCAGGACCTGCGCTGCGACACCATCGACACCCG
GGAGGAGTATGAGATGAAGGACCCCACCAATGGCTACTACAACGTGCGTGCCCATGAAGACCGCCCGT
CTTCCAGGGCAGTGCTCTATGCTGACTACCGTGCCCCTGGCCCTGCCCGCTTCGACGGCCGCCCCTCA
TCCCGTCTCTCCCACTCCAGCGGCTATGCCCAGCTCAACACCTATAGCCGGGGCCCTGCCTCTGACTA
TGGCCCTGAGCCCACACCCCCTGGCCCTGCTGCCCCAGCTGGCACTGACACAACCAGCCAGCTGTCCT
ACGAGAACTATGAGAAGTTCAACTCCCATCCCTTCCCTGGGGCAGCTGGGTACCCCACCTACCGACTG
GGCTACCCCCAGGCCCCACCCTCTGGCCTGGAGCGGACCCCATATGAGGCGTATGACCCCATTGGCAA
GTACGCCACAGCCACTCGATTCTCCTACACCTCCCAGCACTCGGACTACGGCCAGCGATTCCAGCAGC
GCATGCAGACTCACGTGGTCGACG

| | | | |
|---|---|---|---|
| NOV12o, CG51373-12 | SEQ ID NO: 348 | 773 aa | MW at 85048.5kD |
| Protein Sequence | | | |

MLSLLVWILTLSDTFSQGTQTRFSQEPADQTVVAGQRAVLPCVLLNYSGIVQWTKDGLALGMGQGLKA
WPRYRVVGSADAGQYNLEITDAELSDDASYECQATEAALRSRHAKLTVLIPPEDTRIDGGPVILLQAG
TPHNLTCRAFNAKPAATIIWFRDGTQQEGAVASTELLKDGKRETTVSQLLINPTDLDIGRVFTCRSMN
EAIPSGKETSIELDVHHPPTVTLSIEPQTVQEGERVVFTCQATANPEILGYRWAKGGFLIEDAHESRY
ETNVDYSFFTEPVSCEVHNKVGSTNVSTLVNVHFAPRIVVDPKPTTTDTGSDVTLTCVWVGNPPLTLT
WTKKDSNMGPRPPGSPPEAALSAQVLSNSNQLLLKSVTQADAGTYTCRAIVPRIGVAEREVPLYVNGP
PIISSEAVQYAVRGDGGKVECFIGSTPPPDRIAWAWKENFLEVGTLERYTVERTNSGSGVLSTLTINN
VMEADFQTHYNCTAWNSFGPGTAIIQLEEREVLPVGIIAGATIGASILLIFFFIALVFFLYRPRKGSR
KDVTLRXLDIKVETVNREPLTMHSDREDDTASVSTATRVMKAIYSSFKDDVDLKQDLRCDTIDTREEY
EMKDPTNGYYNVRAHEDRPSSRAVLYADYRAPGPARFDGRPSSRLSHSSGYAQLNTYSRGPASDYGPE
PTPPGPAAPAGTDTTSQLSYENYEKFNSHPFPGAAGYPTYRLGYPQAPPSGLERTPYEAYDPIGKYAT
ATRFSYTSQHSDYGQRFQQRMQTHV

| | | |
|---|---|---|
| NOV12p, CG51373-13 | SEQ ID NO: 349 | 2290 bp |
| DNA Sequence | ORF Start: ATG at 11 | ORF Stop: at 2282 |

CACCAAGCTTATGCTGAGCCTCCTCGTCTGGATCCTCACTCTCTCCGATACTTTCTCCCAAGGGACCC
AGACCCGCTTCAGCCAGGAGCCAGCTGACCAGACGGTGGTGGCTGGACAGCGGGCCGTGCTCCCCTGT
GTGCTGCTCAACTACTCTGGAATTGTGCAATGGACCAAGGACGGGCTGGCCCTGGGCATGGGCCAGGG
CCTCAAAGCCTGGCCACGGTACCGGGTTGTGGGCTCCGCAGACGCTGGGCAGTACAACCTGGAGATCA
CAGATGCTGAGCTCTCTGACGACGCCTCTTACGAGTGCCAGGCCACGGAGGCCGCCCTGCGCTCTCGG
CGGGCCAAACTCACCGTGCTCATCCCCCCAGAGGACACCAGGATTGACGGAGGCCCTGTGATTCTACT
GCAGGCAGGCACCCCCCACAACCTCACATGCCGGGCCTTCAATGCGAAGCCTGCTGCCACCATCATCT
GGTTCCGGGACGGGACGCAGCAGGAGGGCGCTGTGGCCAGCACGGAATTGCTGAAGGATGGGAAGAGG
GAGACCACCGTGAGCCAACTGCTTATTAACCCCACGGACCTGGACATAGGGCGTGTCTTCACTTGCCG
AAGCATGAACGAAGCCATCCCTAGTGGCAAGGAGACTTCCATCGAGCTGGATGTGCACCACCCTCCTA
ACAGCCAACCCGGAGATCTTGGGCTACAGGTGGGCCAAAGGGGGTTTCTTGATTGAAGACGCCCACGA
GAGTCGCTATGAGACAAATGTGGATTATTCCTTTTTCACGGAGCCTGTGTCTTGTGAGGTCCACAACA
AAGTGGGAAGCACCAATGTCAGCACTTTAGTAAATGTCCACTTTGCTCCCCGGATTGTAGTTGACCCC
AAACCCACAACCACAGACATTGGCTCTGATGTGACCCTTACCTGTGTCTGGGTTGGGAATCCCCCCCT
CACTCTCACCTGGACCAAAAAGGACTCAAATATGGTCCTGAGTAACAGCAACCAGCTGCTGCTGAAGT
CGGTGACTCAGGCAGACGCTGGCACCTACACCTGCCGGGCCATCGTGCCTCGAATCGGAGTGGCTGAG
CGGGAGGTGCCGCTCTATGTGAACGGGCCCCCCATCATCTCCAGTGAGGCAGTGCAGTATGCTGTGAG
GGGTGACGGTGGCAAGGTGGAGTGTTTCATTGGGAGCACACCACCCCCAGACCGCATAGCATGGGCCT
GGAAGGAGAACTTCTTGGAGGTGGGGACCCTGGAACGCTATACAGTGGAGAGGACCAACTCAGGCAGT
GGGGTGCTATCCACGCTCACCATCAACAATGTCATGGAGGCCGACTTTCAGACTCACTACAACTGCAC
CGCCTGGAACAGCTTCGGGCCAGGCACAGCCATCATCCAGCTGGAAGAGCGAGAGGTGTTACCTGTGG
GCATCATAGCTGGGGCCACCATCGGCGCGAGCATCCTGCTCATCTTCTTCTTCATCGCCTTGGTATTC
TTCCTCTACCGGCGCCGCAAAGGCAGTCGCAAAGACGTGACCCTGAGGAAGCTGGATATCAAGGTGGA
GACAGTGAACCGAGAGCCACTTACGATGCATTCTGACCGGGAGGATGACACCGCCAGCGTCTCCACAG
CAACCCGGGTCATGAAGGCCATCTACTCGTCGTTTAAGGATGATGTGGATCTGAAGCAGGACCTGCGC
TGCGACACCATCGACACCCGGGAGGAGTATGAGATGAAGGACCCCACCAATGGCTACTACAACGTGCG
TGCCCATGAAGACCGCCCGTCTTCCAGGGCAGTGCTCTATGCTGACTACCGTGCCCCTGGCCCTGCCC
GCTTCGACGGCCGCCCCTCATCCCGTCTCTCCCACTCCAGCGGCTATGCCCAGCTCAACACCTATAGC
CGGGGCCCTGCCTCTGACTATGGCCCTGAGCCCACACCCCCTGGCCCTGCTGCCCCAGCTGGCACTGA
CACAACCAGCCAGCTGTCCTACGAGAACTATGAGAAGTTCAACTCCCATCCCTTCCCTGGGGCAGCTG
GGTACCCCACCTACCGACTGGGCTACCCCCAGGCCCCACCCTCTGGCCTGGAGCGGACCCCATATGAG
GCGTATGACCCCATTGGCAAGTACGCCACAGCCACTCGATTCTCCTACACCTCCCAGCACTCGGACTA
CGGCCAGCGATTCCAGCAGCGCATGCAGACTCACGTGGTCGACGGC

| | | | |
|---|---|---|---|
| NOV12p, CG51373-13 | SEQ ID NO: 350 | 757 aa | MW at 83534.8kD |
| Protein Sequence | | | |

MLSLLVWILTLSDTFSQGTQTRFSQEPADQTVVAGQRAVLPCVLLNYSGIVQWTKDGLALGMGQGLKA
WPRYRVVGSADAGQYNLEITDAELSDDASYECQATEAALRSRRAKLTVLIPPEDTRIDGGPVILLQAG
TPHNLTCRAFNAXPAATIIWFRDGTQQEGAVASTELLKDGKRETTVSQLLINPTDLDIGRVFTCRSMN
EAIPSGKETSIELDVHHPPTVTLSIEPQTVQEGERVVFTCQATANPEILGYRWAKGGFLIEDAHESRY
ETNVDYSFFTEPVSCEVHNKVGSTNVSTLVNVHFAPRIVVDPKPTTTDIGSDVTLTCVWVGNPPLTLT
WTKKDSNMVLSNSNQLLLKSVTQADAGTYTCRAIVPRIGVAEREVPLYVNGPPIISSEAVQYAVRGDG
GKVECFIGSTPPPDRIAWAWKENFLEVGTLERYTVERTNSGSGVLSTLTINNVMEADFQTHYNCTAWN
SFGPGTAIIQLEEREVLPVGIIAGATIGASILLIFFFIALVFFLYRRRKGSRKDVTLRKLDIKVETVN
REPLTMHSDREDDTASVSTATRVMKAIYSSFKDDVDLKQDLRCDTIDTREEYEMKDPTNGYYNVRAHE
DRPSSRAVLYADYRAPGPARFDGRPSSRLSHSSGYAQLNTYSRGPASDYGPEPTPPGPAAPAGTDTTS
QLSYENYEKFNSHPFPGAAGYPTYRLGYPQAPPSGLERTPYEAYDPIGKYATATRFSYTSQHSDYGQR
FQQRMQTHV

| | | |
|---|---|---|
| NOV12q, CG51373-14 | SEQ ID NO: 351 | 2290 bp |
| DNA Sequence | ORF Start: at 11 | ORF Stop: at 2282 |

CACCAAGCTTCAAGGGACCCAGACCCGCTTCAGCCAGGAGCCAGCTGACCAGACGGTGGTGGCTGGAC
AGCGGGCCGTGCTCCCCTGTGTGCTGCTCAACTACTCTGGAATTGTGCAATGGACCAAGGACGGGCTG
GCCCTGGGCATGGGCCAGGGCCTCAAAGCCTGGCCACGGTACCGGGTTGTGGGCTCCGCAGACGCTGG
GCAGTACAACCTGGAGATCACAGATGCTGAGCTCTCTGACGACGCCTCTTACGAGTGCCAGGCCACGG
AGGCCGCCCTGCGCTCTCGGCGGGCCAAACTCACCGTGCTCATCCCCCCAGAGGACACCAGGATTGAC
GGAGGCCCTGTGATTCTACTGCAGGCAGGCACCCCCCACAACCTCACATGCCGGGCCTTCAATGCGAA
GCCTGCTGCCACCATCATCTGGTTCCGGGACGGGACGCAGCAGGAGGGCGCTGTGGCCAGCACGGAAT
TGCTGAAGGATGGGAAGAGGGAGACCACCGTGAGCCAACTGCTTATTAACCCCACGGACCTGGACATA
GGGCGTGTCTTCACTTGCCGAAGCATGAACGAAGCCATCCCTAGTGGCAAGGAGACTTCCATCGAGCT
GGATGTGCACCACCCTCCTACAGTGACCCTGTCCATTGAGCCACAGACGGTGCAGGAGGGTGAGCGTG
TTGTCTTTACCTGCCAGGCCACAGCCAACCCGGAGATCTTGGGCTACAGGTGGGCCAAAGGGGGTTTC
TTGATTGAAGACGCCCACGAGAGTCGCTATGAGACAAATGTGGATTATTCCTTTTTCACGGAGCCTGT
GTCTTGTGAGGTTCACAACAAAGTGGGAAGCACCAATGTCAGCACTTTAGTAAATGTCCACTTTGCTC
CCCGGATTGTAGTTGACCCCAAACCCACAACCACAGACATTGGCTCTGATGTGACCCTTACCTGTGTC
TGGGTTGGGAATCCCCCCCTCACTCTCACCTGGACCAAAAAGGACTCAAATATGGGGCCCAGGCCTCC
TGGCTCCCCACCCGAGGCTGCTCTCTCTGCCCAGGTCCTGAGTAACAGCAACCAGCTGCTGCTGAAGT
CGGTGACTCAGGCAGACGCTGGCACCTACACCTGCCGGGCCATCGTGCCTCGAATCGGAGTGGCTGAG
CGGGAGGTGCCGCTCTATGTGAACGGGCCCCCCATCATCTCCAGTGAGGCAGTGCAGTATGCTGTGAG
GGGTGACGGTGGCAAGGTGGAGTGTTTCATTGGGAGCACACCACCCCCAGACCGCATAGCATGGGCCT
GGAAGGAGAACTTCTTGGAGGTGGGGACCCTGGAACGCTATACAGTGGAGAGGACCAACTCAGGCAGT
GGGGTGCTATCCACGCTCACCATCAACAATGTCATGGAGGCCGACTTTCAGACTCACTACAACTGCAC
CGCCTGGAACAGCTTCGGGCCAGGCACAGCCATCATCCAGCTGGAAGAGCGAGAGGTGTTACCTGTGG
GCATCATAGCTGGGGCCACCATCGGCGCGAGCATCCTGCTCATCTTCTTCTTCATCGCCTTGGTATTC
TTCCTCTACCGGCGCCGCAAAGGCAGTCGCAAAGACGTGACCCTGAGGAAGCTGGATATCAAGGTGGA
GACAGTGAACCGAGAGCCACTTACGATGCATTCTGACCGGGAGGATGACACCGCCAGCGTCTCCACAG
CAACCCGGGTCATGAAGGCCATCTACTCGTCGTTTAAGGATGATGTGGATCTGAAGCAGGACCTGCGC
TGCGACACCATCGACACCCGGGAGGAGTATGAGATGAAGGACCCCACCAATGGCTACTACAACGTGCG
TGCCCATGAAGACCGCCCGTCTTCCAGGGCAGTGCTCTATGCTGACTACCGTGCCCCTGGCCCTGCCC
GCTTCGACGGCCGCCCCTCATCCCGTCTCTCCCACTCCAGCGGCTATGCCCAGCTCAACACCTATAGC
CGGGGCCCTGCCTCTGACTATGGCCCTGAGCCCACACCCCCTGGCCCTGCTGCCCCAGCTGGCACTGA
CACAACCAGCCAGCTGTCCTACGAGAACTATGAGAAGTTCAACTCCCATCCCTTCCCTGGGGCAGCTG
GGTACCCCACCTACCGACTGGGCTACCCCCAGGCCCCACCCTCTGGCCTGGAGCGGACCCCATATGAG
GCGTATGACCCCATTGGCAAGTACGCCACAGCCACTCGATTCTCCTACACCTCCCAGCACTCGGACTA
CGGCCAGCGATTCCAGCAGCGCATGCAGACTCACGTGGTCGACGGC

| | | | |
|---|---|---|---|
| NOV12q, CG51373-14 | SEQ ID NO: 352 | 757 aa | MW at 83227.3kD |
| Protein Sequence | | | |

QGTQTRFSQEPADQTVVAGQRAVLPCVLLNYSGIVQWTKDGLALGMGQGLKAWPRYRVVGSADAGQYN
LEITDAELSDDASYECQATEAALRSRPAKLTVLIPPEDTRIDGGPVILLQAGTPHNLTCRAFNAKPAA
TIIWFRDGTQQEGAVASTELLKDGKRETTVSQLLINPTDLDIGRVFTCRSMNEAIPSGKETSIELDVH
HPPTVTLSIEPQTVQEGERVVFTCQATANPEILGYRWAKGGFLIEDAHESRYETNVDYSFFTEPVSCE
VHNKVGSTNVSTLVNVHFAPRIVVDPKPTTTDIGSDVTLTCVWVGNPPLTLTWTKKDSNMGPRPPGSP
PEAALSAQVLSNSNQLLLKSVTQADAGTYTCRAIVPRIGVAEREVPLYVNGPPIISSEAVQYAVRGDG
GKVECFIGSTPPPDRIAWAWKENFLEVGTLERYTVERTNSGSGVLSTLTINNVMEADFQTHYNCTAWN
SFGPGTAIIQLEEREVLPVGIIAGATIGASILLIFFFIALVFFLYRRRKGSRKDVTLRKLDIKVETVN
REPLTMHSDREDDTASVSTATRVMKAIYSSFKDDVDLKQDLRCDTIDTREEYEMKDPTNGYYNVRAHE
DRPSSRAVLYADYRAPGPARFDGRPSSRLSHSSGYAQLNTYSRGPASDYGPEPTPPGPAAPAGTDTTS
QLSYENYEKFNSHPFPGAAGYPTYRLGYPQAPPSGLERTPYEAYDPIGKYATATRFSYTSQHSDYGQR
FQQRMQTHV

| | | |
|---|---|---|
| NOV12r, SNP13377352 of | SEQ ID NO: 353 | 2128 bp |
| CG51373-08, DNA Sequence | ORF Start: ATG at 31 | ORF Stop: TAG at 2119 |
| | SNP Pos: 487 | SNP Change: T to C |

CAATGGACCAAGGACGGGCTGGCCCTGGGCATGGGCCAGGGCCTCAAAGCCTGGCCACGGTACCGGGT
TGTGGGCTCCGCAGACGCTGGGCAGTACAACCTGGAGATCACAGATGCTGAGCTCTCTGACGACGCCT
CTTACGAGTGCCAGGCCACGGAGGCCGCCCTGCGCTCTCGGCGGGCCAAACTCACCGTGCTCATCCCC
CCAGAGGACACCAGGATTGACGGAGGCCCTGTGATTCTACTGCAGGCAGGCACCCCCCACAACCTCAC
ATGCCGGGCCTTCAATGCGAAGCCTGCTGCCACCATCATCTGGTTCCGGGACGGGACGCAGCAGGAGG
GCGCTGTGGCCAGCACGGAATTGCTGAAGGATGGGAAGAGGGAGACCACCGTGAGCCAACTGCTTATT
AACCCCACGGACCTGGACATAGGGCGTGTCTTCACTTGCCGAAGCATGAACGAAGCCATCCCTAGTGG
CAAGGAGACTCCCATCGAGCTGGATGTGCACCACCCTCCTACAGTGACCCTGTCCATTGAGCCACAGA
CGGTGCAGGAGGGTGAGCGTGTTGTCTTTACCTGCCAGGCCACAGCCAACCCCGAGATCTTGGACTAC
AGGTGGGCCAAAGGGGGTTTCTTGATTGAAGACGCCCACGAGAGTCGCTATGAGACAAATGTGGATTA
TTCCTTTTTCACGGAGCCTGTGTCTTGTGAGGTTCACAACAAAGTGGGAAGCACCAATGTCAGCACTT
GATGTGACCCTTACCTGTGTCTGGGTTGGGAATCCCCCCCTCACTCTCACCTGGACCAAAAAGGACTC
AAATATGGTCCTGAGTAACAGCAACCAGCTGCTGCTGAAGTCGGTGACTCAGGCAGACGCTGGCACCT
ACACCTGCCGGGCCATCGTGCCTCGAATCGGAGTGGCTGAGCGGGAGGTGCCGCTCTATGTGAACGGG
CCCCCCATCATCTCCAGTGAGGCAGTGCAGTATGCTGTGAGGGGTGACGGTGGCAAGGTGGAGTGTTT
CATTGGGAGCACACCACCCCCAGACCGCATAGCATGGGCCTGGAAGGAGAACTTCTTGGAGGTGGGGA
CCCTGGAACGCTATACAGTGGAGAGGACCAACTCAGGCAGTGGGGTGCTATCCACGCTCACCATCAAC
AATGTCATGGAGGCCGACTTTCAGACTCACTACAACTGCACCGCCTGGAACAGCTTCGGGCCAGGCAC
AGCCATCATCCAGCTGGAAGAGCGAGAGGTGTTACCTGTGGGCATCATAGCTGGGGCCACCATCGGCG
CGAGCATCCTGCTCATCTTCTTCTTCATCGCCTTGGTATTCTTCCTCTACCGGCGCCGCAAAGGCAGT
CGCAAAGACGTGACCCTGAGGAAGCTGGATATCAAGGTGGAGACAGTGAACCGAGAGCCACTTACGAT
GCATTCTGACCGGGAGGATGACACCGCCAGCGTCTCCACAGCAACCCGGGTCATGAAGGCCATCTACT
CGTCGTTTATGGATGATGTGGATCTGAAGCAGGACCTGCGCTGCGACACCATCGACACCCGGGAGGAG
TATGAGATGAAGGACCCCACCAATGGCTACTACAACGTGCGTGCCCATGAAGACCGCCCGTCTTCCAG
GGCAGTGCTCTATGCTGACTACCGTGCCCCTGGCCCTGCCCGCTTCGACGGCCGCCCCTCATCCCGTC
TCTCCCACTCCAGCGGCTATGCCCAGCTCAACACCTATAGCCGGGGCCCTGCCTCTGACTATGGCCCT
GAGCCCACACCCCCTGGCCCTGCTGCCCCAGCTGGCACTGACACAACCAGCCAGCTGTCCTACGAGAA
CTATGAGAAGTTCAACTCCCATCCCTTCCCTGGGGCAGCTGGGTACCCCACCTACCGACTGGGCTACC
CCCAGGCCCCACCCTCTGGCCTGGAGCGGACCCCATATGAGGCGTATGACCCCATTGGCAAGTACGCC
ACAGCCACTCGATTCTCCTACACCTCCCAGCACTCGGACTACGGCCAGCGATTCCAGCAGCGCATGCA
GACTCACGTGTAGGGGCCAG

| | | | |
|---|---|---|---|
| NOV12r, SNP13377352 of | SEQ ID NO: 354 | 696 aa | MW at 76985.3kD |
| CG51373-08, Protein | SNP Pos: 153 | | SNP Change: Ser to Pro |
| Sequence | | | |

MGQGLKAWPRYRVVGSADAGQYNLEITDAELSDDASYECQATEAALRSRRAKLTVLIPPEDTRIDGGP
VILLQAGTPHNLTCRAFNAKPAATIIWFRDGTQQEGAVASTELLKDGKRETTVSQLLINPTDLDIGRV
FTCRSMNEAIPSGKETPIELDVHHPPTVTLSIEPQTVQEGERVVFTCQATANPEILDYRWAKGGFLIE
DAHESRYETNVDYSFFTEPVSCEVHNKVGSTNVSTLVNVHFAPRIVVDPKPTTTDIGSDVTLTCVWVG
NPPLTLTWTKKDSNMVLSNSNQLLLKSVTQADAGTYTCRAIVPRIGVAEREVPLYVNGPPIISSEAVQ
YAVRGDGGKVECFIGSTPPPDRIAWAWKENFLEVGTLERYTVERTNSGSGVLSTLTINNVMEADFQTH
YNCTAWNSFGPGTAIIQLEEREVLPVGIIAGATIGASILLIFFFIALVFFLYRRRKGSRKDVTLRKLD
IKVETVNREPLTMHSDREDDTASVSTATRVMKAIYSSFMDDVDLKQDLRCDTIDTREEYEMKDPTNGY
YNVRAHEDRPSSRAVLYADYEAPGPARFDGRPSSRLSHSSGYAQLNTYSRGPASDYGPEPTPPGPAAP
AGTDTTSQLSYENYEKFNSHPFPGAAGYPTYRLGYPQAPPSGLERTPYEAYDPIGKYATATRFSYTSQ
HSDYGQRFQQRMQTHV

| | | |
|---|---|---|
| NOV12s, SNP13379746 of | SEQ ID NO: 355 | 2128 bp |
| CG51373-08, DNA Sequence | ORF Start: ATG at 31 | ORF Stop: TAG at 2119 |
| | SNP Pos: 597 | SNP Change: C to G |

CAATGGACCAAGGACGGGCTGGCCCTGGGCATGGGCCAGGGCCTCAAAGCCTGGCCACGGTACCGGGT
TGTGGGCTCCGCAGACGCTGGGCAGTACAACCTGGAGATCACAGATGCTGAGCTCTCTGACGACGCCT
CTTACGAGTGCCAGGCCACGGAGGCCGCCCTGCGCTCTCGGCGGGCCAAACTCACCGTGCTCATCCCC
CCAGAGGACACCAGGATTGACGGAGGCCCTGTGATTCTACTGCAGGCAGGCACCCCCCACAACCTCAC
ATGCCGGGCCTTCAATGCGAAGCCTGCTGCCACCATCATCTGGTTCCGGGACGGGACGCAGCAGGAGG
GCGCTGTGGCCAGCACGGAATTGCTGAAGGATGGGAAGAGGGAGACCACCGTGAGCCAACTGCTTATT
AACCCCACGGACCTGGACATAGGGCGTGTCTTCACTTGCCGAAGCATGAACGAAGCCATCCCTAGTGG
CAAGGAGACTTCCATCGAGCTGGATGTGCACCACCCTCCTACAGTGACCCTGTCCATTGAGCCACAGA
CGGTGCAGGAGGGTGAGCGTGTTGTCTTTACCTGCCAGGCCACAGCCAACCCGGAGATCTTGGACTAC
AGGTGGGCCAAAGGGGGTTTCTTGATTGAAGACGCCCACGAGAGTCGCTATGAGACAAATGTGGATTA
TTCCTTTTTCACGGAGCCTGTGTCTTGTGAGGTTCACAACAAAGTGGGAAGCACCAATGTCAGCACTT
TAGTAAATGTCCACTTTGCTCCCCGGATTGTAGTTGACCCCAAACCCACAACCACAGACATTGGCTCT
GATGTGACCCTTACCTGTGTCTGGGTTGGGAATCCCCCCCTCACTCTCACCTGGACCAAAAAGGACTC
AAATATGGTCCTGAGTAACAGCAACCAGCTGCTGCTGAAGTCGGTGACTCAGGCAGACGCTGGCACCT
ACACCTGCCGGGCCATCGTGCCTCGAATCGGAGTGGCTGAGCGGGAGGTGCCGCTCTATGTGAACGGG
CCCCCCATCATCTCCAGTGAGGCAGTGCAGTATGCTGTGAGGGGTGACGGTGGCAAGGTGGAGTGTTT
CATTGGGAGCACACCACCCCCAGACCGCATAGCATGGGCCTGGAAGGAGAACTTCTTGGAGGTGGGGA
CCCTGGAACGCTATACAGTGGAGAGGACCAACTCAGGCAGTGGGGTGCTATCCACGCTCACCATCAAC
AATGTCATGGAGGCCGACTTTCAGACTCACTACAACTGCACCGCCTGGAACAGCTTCGGGCCAGGCAC
AGCCATCATCCAGCTGGAAGAGCGAGAGGTGTTACCTGTGGGCATCATAGCTGGGGCCACCATCGGCG
CGAGCATCCTGCTCATCTTCTTCTTCATCGCCTTGGTATTCTTCCTCTACCGGCGCCGCAAAGGCAGT
CGCAAAGACGTGACCCTGAGGAAGCTGGATATCAAGGTGGAGACAGTGAACCGAGAGCCACTTACGAT
GCATTCTGACCGGGAGGATGACACCGCCAGCGTCTCCACAGCAACCCGGGTCATGAAGGCCATCTACT
CGTCGTTTATGGATGATGTGGATCTGAAGCAGGACCTGCGCTGCGACACCATCGACACCCGGGAGGAG
TATGAGATGAAGGACCCCACCAATGGCTACTACAACGTGCGTGCCCATGAAGACCGCCCGTCTTCCAG
GGCAGTGCTCTATGCTGACTACCGTGCCCCTGGCCCTGCCCGCTTCGACGGCCGCCCCTCATCCCGTC
TCTCCCACTCCAGCGGCTATGCCCAGCTCAACACCTATAGCCGGGGCCCTGCCTCTGACTATGGCCCT
GAGCCCACACCCCCTGGCCCTGCTGCCCCAGCTGGCACTGACACAACCAGCCAGCTGTCCTACGAGAA
CTATGAGAAGTTCAACTCCCATCCCTTCCCTGGGGCAGCTGGGTACCCCACCTACCGACTGGGCTACC
CCCAGGCCCCACCCTCTGGCCTGGAGCGGACCCCATATGAGGCGTATGACCCCATTGGCAAGTACGCC
ACAGCCACTCGATTCTCCTACACCTCCCAGCACTCGGACTACGGCCAGCGATTCCAGCAGCGCATGCA
GACTCACGTGTAGGGGCCAG

| | | | |
|---|---|---|---|
| NOV12s, SNP13379746 of | SEQ ID NO: 356 | 696 aa | MW at 76975.3kD |
| CG51373-08, Protein | SNP Pos: 189 | | SNP Change: Pro to Pro |
| Sequence | | | |

MGQGLKAWPRYRVVGSADAGQYNLEITDAELSDDASYECQATEAALRSRRAKLTVLIPPEDTRIDGGP
VILLQAGTPHNLTCRAFNAKPAATIIWFRDGTQQEGAVASTELLKDGKRETTVSQLLINPTDLDIGRV
FTCRSMNEAIPSGKETSIELDVHHPPTVTLSIEPQTVQEGERVVFTCQATANPEILDYRWAKGGFLIE
DAHESRYETNVDYSFFTEPVSCEVHNKVGSTNVSTLVNVHFAPRIVVDPKPTTTDIGSDVTLTCVWVG
NPPLTLTWTKKDSNMVLSNSNQLLLKSVTQADAGTYTCRAIVPRIGVAEREVPLYVNGPPIISSEAVQ
YAVRGDGGKVECFIGSTPPPDRIAWAWKENFLEVGTLERYTVERTNSGSGVLSTLTINNVMEADFQTH
YNCTAWNSFGPGTAIIQLEEREVLPVGIIAGATIGASILLIFFFIALVFFLYRRRKGSRKDVTLRKLD
IKVETVNREPLTMHSDREDDTASVSTATRVMKAIYSSFMDDVDLKQDLRCDTIDTREEYEMKDPTNGY
YNVRAHEDRPSSRAVLYADYEAPGPARFDGRPSSRLSHSSGYAQLNTYSRGPASDYGPEPTPPGPAAP
AGTDTTSQLSYENYEKFNSHPFPGAAGYPTYRLGYPQAPPSGLERTPYEAYDPIGKYATATRFSYTSQ
HSDYGQRFQQRMQTHV

| | | |
|---|---|---|
| NOV12t, SNP13374859 of | SEQ ID NO: 357 | 2128 bp |
| CG51373-08, DNA Sequence | ORF Start: ATG at 31 | ORF Stop: TAG at 2119 |
| | SNP Pos: 961 | SNP Change: C to T |

CAATGGACCAAGGACGGGCTGGCCCTGGGCATGGGCCAGGGCCTCAAAGCCTGGCCACGGTACCGGGT
TGTGGGCTCCGCAGACGCTGGGCAGTACAACCTGGAGATCACAGATGCTGAGCTCTCTGACGACGCCT
CTTACGAGTGCCAGGCCACGGAGGCCGCCCTGCGCTCTCGGCGGGCCAAACTCACCGTGCTCATCCCC
CCAGAGGACACCAGGATTGACGGAGGCCCTGTGATTCTACTGCAGGCAGGCACCCCCCACAACCTCAC
ATGCCGGGCCTTCAATGCGAAGCCTGCTGCCACCATCATCTGGTTCCGGGACGGGACGCAGCAGGAGG
GCGCTGTGGCCAGCACGGAATTGCTGAAGGATGGGAAGAGGGAGACCACCGTGAGCCAACTGCTTATT
AACCCCACGGACCTGGACATAGGGCGTGTCTTCACTTGCCGAAGCATGAACGAAGCCATCCCTAGTGG
CAAGGAGACTTCCATCGAGCTGGATGTGCACCACCCTCCTACAGTGACCCTGTCCATTGAGCCACAGA
CGGTGCAGGAGGGTGAGCGTGTTGTCTTTACCTGCCAGGCCACAGCCAACCCCGAGATCTTGGACTAC
AGGTGGGCCAAAGGGGGTTTCTTGATTGAAGACGCCCACGAGAGTCGCTATGAGACAAATGTGGATTA
TTCCTTTTTCACGGAGCCTGTGTCTTGTGAGGTTCACAACAAAGTGGGAAGCACCAATGTCAGCACTT
TAGTAAATGTCCACTTTGCTCCCCGGATTGTAGTTGACCCCAAACCCACAACCACAGACATTGGCTCT
GATGTGACCCTTACCTGTGTCTGGGTTGGGAATCCCCCCCTCACTCTCACCTGGACCAAAAAGGACTC
AAATATGGTCCTGAGTAACAGCAACCAGCTGCTGCTGAAGTCGGTGACTCAGGCAGACGCTGGCACCT
ACACCTGCTGGGCCATCGTGCCTCGAATCGGAGTGGCTGAGCGGGAGGTGCCGCTCTATGTGAACGGG
CCCCCCATCATCTCCAGTGAGGCAGTGCAGTATGCTGTGAGGGGTGACGGTGGCAAGGTGGAGTGTTT
CATTGGGAGCACACCACCCCCAGACCGCATAGCATGGGCCTGGAAGGAGAACTTCTTGGAGGTGGGGA
CCCTGGAACGCTATACAGTGGAGAGGACCAACTCAGGCAGTGGGGTGCTATCCACGCTCACCATCAAC
AATGTCATGGAGGCCGACTTTCAGACTCACTACAACTGCACCGCCTGGAACAGCTTCGGGCCAGGCAC
AGCCATCATCCAGCTGGAAGAGCGAGAGGTGTTACCTGTGGGCATCATAGCTGGGGCCACCATCGGCG
CGAGCATCCTGCTCATCTTCTTCTTCATCGCCTTGGTATTCTTCCTCTACCGGCGCCGCAAAGGCAGT
CGCAAAGACGTGACCCTGAGGAAGCTGGATATCAAGGTGGAGACAGTGAACCGAGAGCCACTTACGAT
GCATTCTGACCGGGAGGATGACACCGCCAGCGTCTCCACAGCAACCCGGGTCATGAAGGCCATCTACT
CGTCGTTTATGGATGATGTGGATCTGAAGCAGGACCTGCGCTGCGACACCATCGACACCCGGGAGGAG
TATGAGATGAAGGACCCCACCAATGGCTACTACAACGTGCGTGCCCATGAAGACCGCCCGTCTTCCAG
GGCAGTGCTCTATGCTGACTACCGTGCCCCTGGCCCTGCCCGCTTCGACGGCCGCCCCTCATCCCGTC
TCTCCCACTCCAGCGGCTATGCCCAGCTCAACACCTATAGCCGGGGCCCTGCCTCTGACTATGGCCCT
GAGCCCACACCCCCTGGCCCTGCTGCCCCAGCTGGCACTGACACAACCAGCCAGCTGTCCTACGAGAA
CTATGAGAAGTTCAACTCCCATCCCTTCCCTGGGGCAGCTGGGTACCCCACCTACCGACTGGGCTACC
CCCAGGCCCCACCCTCTGGCCTGGAGCGGACCCCATATGAGGCGTATGACCCCATTGGCAAGTACGCC
ACAGCCACTCGATTCTCCTACACCTCCCAGCACTCGGACTACGGCCAGCGATTCCAGCAGCGCATGCA
GACTCACGTGTAGGGGCCAG

| | | | |
|---|---|---|---|
| NOV12t, SNP13374859 of | SEQ ID NO: 358 | 696 aa | MW at 77005.3kD |
| CG51373-08, Protein | SNP Pos: 311 | | SNP Change: Arg to Trp |
| Sequence | | | |

MGQGLKAWPRYRVVGSADAGQYNLEITDAELSDDASYECQATEAALRSRRAKLTVLIPPEDTRIDGGP
VILLQAGTPHNLTCRAFNAKPAATIIWFRDGTQQEGAVASTELLKDGKRETTVSQLLINPTDLDIGRV
FTCRSMNEAIPSGKETSIELDVHHPPTVTLSIEPQTVQEGERVVFTCQATANPEILDYRWAKGGFLIE
DAHESRYETNVDYSFFTEPVSCEVHNKVGSTNVSTLVNVHFAPRIVVDPKPTTTDIGSDVTLTCVWVG
NPPLTLTWTKKDSNMVLSNSNQLLLKSVTQADAGTYTCWAIVPRIGVAEREVPLYVNGPPIISSEAVQ
YAVRGDGGKVECFIGSTPPPDRIAWAWKENFLEVGTLERYTVERTNSGSGVLSTLTINNVMEADFQTH
YNCTAWNSFGPGTAIIQLEEREVLPVGIIAGATIGASILLIFFFIALVFFLYRRRKGSRKDVTLRKLD
IKVETVNREPLTMHSDREDDTASVSTATRVMKAIYSSFMDDVDLKQDLRCDTIDTREEYEMKDPTNGY
YNVRAHEDRPSSRAVLYADYRAPGPARFDGRPSSRLSHSSGYAQLNTYSRGPASDYGPEPTPPGPAAP
AGTDTTSQLSYENYEKFNSHPFPGAAGYPTYRLGYPQAPPSGLERTPYEAYDPIGKYATATRFSYTSQ
HSDYGQRFQQRMQTHV

| | | |
|---|---|---|
| NOV12u, SNP13374858 of | SEQ ID NO: 359 | 2128 bp |
| CG51373-08, DNA Sequence | ORF Start: ATG at 31 | ORF Stop: TAG at 2119 |
| | SNP Pos: 1340 | SNP Change: T to C |

CAATGGACCAAGGACGGGCTGGCCCTGGGCATGGGCCAGGGCCTCAAAGCCTGGCCACGGTACCGGGT
TGTGGGCTCCGCAGACGCTGGGCAGTACAACCTGGAGATCACAGATGCTGAGCTCTCTGACGACGCCT
CTTACGAGTGCCAGGCCACGGAGGCCGCCCTGCGCTCTCGGCGGGCCAAACTCACCGTGCTCATCCCC
CCAGAGGACACCAGGATTGACGGAGGCCCTGTGATTCTACTGCAGGCAGGCACCCCCCACAACCTCAC
ATGCCGGGCCTTCAATGCGAAGCCTGCTGCCACCATCATCTGGTTCCGGGACGGGACGCAGCAGGAGG
GCGCTGTGGCCAGCACGGAATTGCTGAAGGATGGGAAGAGGGAGACCACCGTGAGCCAACTGCTTATT
AACCCCACGGACCTGGACATAGGGCGTGTCTTCACTTGCCGAAGCATGAACGAAGCCATCCCTAGTGG
CAAGGAGACTTCCATCGAGCTGGATGTGCACCACCCTCCTACAGTGACCCTGTCCATTGAGCCACAGA
CGGTGCAGGAGGGTGAGCGTGTTGTCTTTACCTGCCAGGCCACAGCCAACCCCGAGATCTTGGACTAC
AGGTGGGCCAAAGGGGGTTTCTTGATTGAAGACGCCCACGAGAGTCGCTATGAGACAAATGTGGATTA
TTCCTTTTTCACGGAGCCTGTGTCTTGTGAGGTTCACAACAAAGTGGGAAGCACCAATGTCAGCACTT
TAGTAAATGTCCACTTTGCTCCCCGGATTGTAGTTGACCCCAAACCCACAACCACAGACATTGGCTCT
GATGTGACCCTTACCTGTGTCTGGGTTGGGAATCCCCCCCTCACTCTCACCTGGACCAAAAAGGACTC
AAATATGGTCCTGAGTAACAGCAACCAGCTGCTGCTGAAGTCGGTGACTCAGGCAGACGCTGGCACCT
ACACCTGCCGGGCCATCGTGCCTCGAATCGGAGTGGCTGAGCGGGAGGTGCCGCTCTATGTGAACGGG
CCCCCCATCATCTCCAGTGAGGCAGTGCAGTATGCTGTGAGGGGTGACGGTGGCAAGGTGGAGTGTTT
CATTGGGAGCACACCACCCCCAGACCGCATAGCATGGGCCTGGAAGGAGAACTTCTTGGAGGTGGGGA
CCCTGGAACGCTATACAGTGGAGAGGACCAACTCAGGCAGTGGGGTGCTATCCACGCTCACCATCAAC
AATGTCATGGAGGCCGACTTTCAGACTCACTACAACTGCACCGCCTGGAACAGCTTCGGGCCAGGCAC
AGCCATCATCCAGCTGGAAGAGCGAGAGGTGTTACCTGTGGGCATCACAGCTGGGGCCACCATCGGCG
CGAGCATCCTGCTCATCTTCTTCTTCATCGCCTTGGTATTCTTCCTCTACCGGCGCCGCAAAGGCAGT
CGCAAAGACGTGACCCTGAGGAAGCTGGATATCAAGGTGGAGACAGTGAACCGAGAGCCACTTACGAT
GCATTCTGACCGGGAGGATGACACCGCCAGCGTCTCCACAGCAACCCGGGTCATGAAGGCCATCTACT
CGTCGTTTATGGATGATGTGGATCTGAAGCAGGACCTGCGCTGCGACACCATCGACACCCGGGAGGAG
TATGAGATGAAGGACCCCACCAATGGCTACTACAACGTGCGTGCCCATGAAGACCGCCCGTCTTCCAG
GGCAGTGCTCTATGCTGACTACCGTGCCCCTGGCCCTGCCCGCTTCGACGGCCGCCCCTCATCCCGTC
TCTCCCACTCCAGCGGCTATGCCCAGCTCAACACCTATAGCCGGGGCCCTGCCTCTGACTATGGCCCT
GAGCCCACACCCCCTGGCCCTGCTGCCCCAGCTGGCACTGACACAACCAGCCAGCTGTCCTACGAGAA
CTATGAGAAGTTCAACTCCCATCCCTTCCCTGGGGCAGCTGGGTACCCCACCTACCGACTGGGCTACC
CCCAGGCCCCACCCTCTGGCCTGGAGCGGACCCCATATGAGGCGTATGACCCCATTGGCAAGTACGCC
ACAGCCACTCGATTCTCCTACACCTCCCAGCACTCGGACTACGGCCAGCGATTCCAGCAGCGCATGCA
GACTCACGTGTAGGGGCCAG

| | | | |
|---|---|---|---|
| NOV12u, SNP13374858 of | SEQ ID NO: 360 | 696 aa | MW at 76963.2kD |
| CG51373-08, Protein | SNP Pos: 437 | | SNP Change: Ile to Thr |
| Sequence | | | |

MGQGLKAWPRYRVVGSADAGQYNLEITDAELSDDASYECQATEAALRSRRAKLTVLIPPEDTRIDGGP
VILLQAGTPHNLTCRAFNAKPAATIIWFRDGTQQEGAVASTELLKDGKRETTVSQLLINPTDLDIGRV
FTCRSMNEAIPSGKETSIELDVHHPPTVTLSIEPQTVQEGERVVFTCQATANPEILDYRWAKGGFLIE
DAHESRYETNVDYSFFTEPVSCEVHNKVGSTNVSTLVNVHFAPRIVVDPKPTTTDIGSDVTLTCVWVG
NPPLTLTWTKKDSNNVLSNSNQLLLKSVTQADAGTYTCRAIVPRIGVAEREVPLYVNGPPIISSEAVQ
YAVRGDGGKVECFIGSTPPPDRIAWAWKENFLEVGTLERYTVERTNSGSGVLSTLTINNVMEADFQTH
YNCTAWNSFGPGTAIIQLEEREVLPVGITAGATIGASILLIFFFIALVFFLYRRRKGSRKDVTLRKLD
IKVETVNREPLTMHSDREDDTASVSTATRVMKAIYSSFMDDVDLKQDLRCDTIDTREEYEMKDPTNGY
YNVRAHEDRPSSRAVLYADYRAPGPARFDGRPSSRLSHSSGYAQLNTYSRGPASDYGPEPTPPGPAAP
AGTDTTSQLSYENYEKFNSHPFPGAAGYPTYRLGYPQAPPSGLERTPYEAYDPIGKYATATRFSYTSQ
HSDYGQRFQQRMQTHV

| | | |
|---|---|---|
| NOV12v, SNP13374856 of | SEQ ID NO: 361 | 2128 bp |
| CG51373-08, DNA Sequence | ORF Start: ATG at 31 | ORF Stop: TAG at 2119 |
| | SNP Pos: 1418 | SNP Change: G to A |

CAATGGACCAAGGACGGGCTGGCCCTGGGCATGGGCCAGGGCCTCAAAGCCTGGCCACGGTACCGGGT
TGTGGGCTCCGCAGACGCTGGGCAGTACAACCTGGAGATCACAGATGCTGAGCTCTCTGACGACGCCT
CTTACGAGTGCCAGGCCACGGAGGCCGCCCTGCGCTCTCGGCGGGCCAAACTCACCGTGCTCATCCCC
CCAGAGGACACCAGGATTGACGGAGGCCCTGTGATTCTACTGCAGGCAGGCACCCCCCACAACCTCAC
ATGCCGGGCCTTCAATGCGAAGCCTGCTGCCACCATCATCTGGTTCCGGGACGGGACGCAGCAGGAGG
GCGCTGTGGCCAGCACGGAATTGCTGAAGGATGGGAAGACGGAGACCACCGTGAGCCAACTGCTTATT
AACCCCACGGACCTGGACATAGGGCGTGTCTTCACTTGCCGAAGCATGAACGAAGCCATCCCTAGTGG
CAAGGAGACTTCCATCGAGCTGGATGTGCACCACCCTCCTACAGTGACCCTGTCCATTGAGCCACAGA
CGGTGCAGGAGGGTGAGCGTGTTGTCTTTACCTGCCAGGCCACAGCCAACCCCGAGATCTTGGACTAC
AGGTGGGCCAAAGGGGGTTTCTTGATTGAAGACGCCCACGAGAGTCGCTATGAGACAAATGTGGATTA
TTCCTTTTTCACGGAGCCTGTGTCTTGTGAGGTTCACAACAAAGTGGGAAGCACCAATGTCAGCACTT
TAGTAAATGTCCACTTTGCTCCCCGGATTGTAGTTGACCCCAAACCCACAACCACAGACATTGGCTCT
GATGTGACCCTTACCTGTGTCTGGGTTGGGAATCCCCCCCTCACTCTCACCTGGACCAAAAAGGACTC
AAATATGGTCCTGAGTAACAGCAACCAGCTGCTGCTGAAGTCGGTGACTCAGGCAGACGCTGGCACCT
ACACCTGCCGGGCCATCGTGCCTCGAATCGGAGTGGCTGAGCGGGAGGTGCCGCTCTATGTGAACGGG
CCCCCCATCATCTCCAGTGAGGCAGTGCAGTATGCTGTGAGGGGTGACGGTGGCAAGGTGGAGTGTTT
CATTGGGAGCACACCACCCCCAGACCGCATAGCATGGGCCTGGAAGGAGAACTTCTTGGAGGTGGGGA
CCCTGGAACGCTATACAGTGGAGAGGACCAACTCAGGCAGTGGGGTGCTATCCACGCTCACCATCAAC
AATGTCATGGAGGCCGACTTTCAGACTCACTACAACTGCACCGCCTGGAACAGCTTCGGGCCAGGCAC
AGCCATCATCCAGCTGGAAGAGCGAGAGGTGTTACCTGTGGGCATCATAGCTGGGGCCACCATCGGCG
CGAGCATCCTGCTCATCTTCTTCTTCATCGCCTTGGTATTCTTCCTCTACCGGCGCCACAAAGGCAGT
CGCAAAGACGTGACCCTGAGGAAGCTGGATATCAAGGTGGAGACAGTGAACCGAGAGCCACTTACGAT
GCATTCTGACCGGGAGGATGACACCGCCAGCGTCTCCACAGCAACCCGGGTCATGAAGGCCATCTACT
CGTCGTTTATGGATGATGTGGATCTGAAGCAGGACCTGCGCTGCGACACCATCGACACCCGGGAGGAG
TATGAGATGAAGGACCCCACCAATGGCTACTACAACGTGCGTGCCCATGAAGACCGCCCGTCTTCCAG
GGCAGTGCTCTATGCTGACTACCGTGCCCCTGGCCCTGCCCGCTTCGACGGCCGCCCCTCATCCCGTC
TCTCCCACTCCAGCGGCTATGCCCAGCTCAACACCTATAGCCGGGGCCCTGCCTCTGACTATGGCCCT
GAGCCCACACCCCCTGGCCCTGCTGCCCCAGCTGGCACTGACACAACCAGCCAGCTGTCCTACGAGAA
CTATGAGAAGTTCAACTCCCATCCCTTCCCTGGGGCAGCTGGGTACCCCACCTACCGACTGGGCTACC
CCCAGGCCCCACCCTCTGGCCTGGAGCGGACCCCATATGAGGCGTATGACCCCATTGGCAAGTACGCC
ACAGCCACTCGATTCTCCTACACCTCCCAGCACTCGGACTACGGCCAGCGATTCCAGCAGCGCATGCA
GACTCACGTGTAGGGGCCAG

| | | | |
|---|---|---|---|
| NOV12v, SNP13374856 of | SEQ ID NO: 362 | 696 aa | MW at 76956.2kD |
| CG51373-08, Protein | SNP Pos: 463 | | SNP Change: Arg to His |
| Sequence | | | |

MGQGLKAWPRYRVVGSADAGQYNLEITDAELSDDASYECQATEAALRSRPAKLTVLIPPEDTRIDGGP
VILLQAGTPHNLTCRAFNAKPAATIIWFRDGTQQEGAVASTELLKDGKRETTVSQLLINPTDLDIGRV
FTCRSMNEAIPSGKETSIELDVHHPPTVTLSIEPQTVQEGERVVFTCQATANPEILDYRWAKGGFLIE
DAHESRYETNVDYSFFTEPVSCEVHNKVGSTNVSTLVNVHFAPRIVVDPKPTTTDIGSDVTLTCVWVG
NPPLTLTWTKKDSNMVLSNSNQLLLKSVTQADAGTYTCEAIVPRIGVAEREVPLYVNGPPIISSEAVQ
YAVRGDGGKVECFIGSTPPPDRIAWAWKENFLEVGTLERYTVERTNSGSGVLSTLTINNVMEADFQTH
YNCTAWNSFGPGTAIIQLEEREVLPVGIIAGATIGASILLIFFFIALVFFLYRRHKGSRKDVTLRKLD
IKVETVNREPLTMHSDREDDTASVSTATRVMKAIYSSFMDDVDLKQDLRCDTIDTREEYEMKDPTNGY
YNVRAHEDRPSSRAVLYADYRAPGPARFDGRPSSRLSHSSGYAQLNTYSRGPASDYGPEPTPPGPAAP
AGTDTTSQLSYENYEKFNSHPFPGAAGYPTYRLGYPQAPPSGLERTPYEAYDPIGKYATATRFSYTSQ
HSDYGQRFQQRMQTHV

| | | |
|---|---|---|
| NOV12w, SNP13374855 of | SEQ ID NO: 363 | 2128 bp |
| CG51373-08, DNA Sequence | ORF Start: ATG at 31 | ORF Stop: TAG at 2119 |
| | SNP Pos: 1421 | SNP Change: A to G |

CAATGGACCAAGGACGGGCTGGCCCTGGGCATGGGCCAGGGCCTCAAAGCCTGGCCACGGTACCGGGT
TGTGGGCTCCGCAGACGCTGGGCAGTACAACCTGGAGATCACAGATGCTGAGCTCTCTGACGACGCCT
CTTACGAGTGCCAGGCCACGGAGGCCGCCCTGCGCTCTCGGCGGGCCAAACTCACCGTGCTCATCCCC
CCAGAGGACACCAGGATTGACGGAGGCCCTGTGATTCTACTGCAGGCAGGCACCCCCCACAACCTCAC
ATGCCGGGCCTTCAATGCGAAGCCTGCTGCCACCATCATCTGGTTCCGGGACGGGACGCAGCAGGAGG
GCGCTGTGGCCAGCACGGAATTGCTGAAGGATGGGAAGAGGGAGACCACCGTGAGCCAACTGCTTATT
AACCCCACGGACCTGGACATAGGGCGTGTCTTCACTTGCCGAAGCATGAACGAAGCCATCCCTAGTGG
CAAGGAGACTTCCATCGAGCTGGATGTGCACCACCCTCCTACAGTGACCCTGTCCATTGAGCCACAGA
CGGTGCAGGAGGGTGAGCGTGTTGTCTTTACCTGCCAGGCCACAGCCAACCCCGAGATCTTGGACTAC
AGGTGGGCCAAAGGGGGTTTCTTGATTGAAGACGCCCACGAGAGTCGCTATGAGACAAATGTGGATTA
TTCCTTTTTCACGGAGCCTGTGTCTTGTGAGGTTCACAACAAAGTGGGAAGCACCAATGTCAGCACTT
TAGTAAATGTCCACTTTGCTCCCCGGATTGTAGTTGACCCCAAACCCACAACCACAGACATTGGCTCT
GATGTGACCCTTACCTGTGTCTGGGTTGGGAATCCCCCCCTCACTCTCACCTGGACCAAAAAGGACTC
AAATATGGTCCTGAGTAACAGCAACCAGCTGCTGCTGAAGTCGGTGACTCAGGCAGACGCTGGCACCT
ACACCTGCCGGGCCATCGTGCCTCGAATCGGAGTGGCTGAGCGGGAGGTGCCGCTCTATGTGAACGGG
CCCCCCATCATCTCCAGTGAGGCAGTGCAGTATGCTGTGAGGGGTGACGGTGGCAAGGTGGAGTGTTT
CATTGGGAGCACACCACCCCCAGACCGCATAGCATGGGCCTGGAAGGAGAACTTCTTGGAGGTGGGGA
CCCTGGAACGCTATACAGTGGAGAGGACCAACTCAGGCAGTGGGGTGCTATCCACGCTCACCATCAAC
AATGTCATGGAGGCCGACTTTCAGACTCACTACAACTGCACCGCCTGGAACAGCTTCGGGCCAGGCAC
AGCCATCATCCAGCTGGAAGAGCGAGAGGTGTTACCTGTGGGCATCATAGCTGGGGCCACCATCGGCG
CGAGCATCCTGCTCATCTTCTTCTTCATCGCCTTGGTATTCTTCCTCTACCGGCGCCGCAGAGGCAGT
CGCAAAGACGTGACCCTGAGGAAGCTGGATATCAAGGTGGAGACAGTGAACCGAGAGCCACTTACGAT
GCATTCTGACCGGGAGGATGACACCGCCAGCGTCTCCACAGCAACCCGGGTCATGAAGGCCATCTACT
CGTCGTTTATGGATGATGTGGATCTGAAGCAGGACCTGCGCTGCGACACCATCGACACCCGGGAGGAG
TATGAGATGAAGGACCCCACCAATGGCTACTACAACGTGCGTGCCCATGAAGACCGCCCGTCTTCCAG
GGCAGTGCTCTATGCTGACTACCGTGCCCCTGGCCCTGCCCGCTTCGACGGCCGCCCCTCATCCCGTC
TCTCCCACTCCAGCGGCTATGCCCAGCTCAACACCTATAGCCGGGGCCCTGCCTCTGACTATGGCCCT
GAGCCCACACCCCCTGGCCCTGCTGCCCCAGCTGGCACTGACACAACCAGCCAGCTGTCCTACGAGAA
CTATGAGAAGTTCAACTCCCATCCCTTCCCTGGGGCAGCTGGGTACCCCACCTACCGACTGGGCTACC
CCCAGGCCCCACCCTCTGGCCTGGAGCGGACCCCATATGAGGCGTATGACCCCATTGGCAAGTACGCC
ACAGCCACTCGATTCTCCTACACCTCCCAGCACTCGGACTACGGCCAGCGATTCCAGCAGCGCATGCA
GACTCACGTGTAGGGGCCAG

| | | | |
|---|---|---|---|
| NOV12w, SNP13374855 of | SEQ ID NO: 364 | 696 aa | MW at 77003.3kD |
| CG51373-08, Protein | SNP Pos: 464 | | SNP Change: Lys to Arg |
| Sequence | | | |

MGQGLKAWPRYRVVGSADAGQYNLEITDAELSDDASYECQATEAALRSRRAKLTVLIPPEDTRIDGGP
VILLQAGTPHNLTCRAFNAKPAATIIWFRDGTQQEGAVASTELLKDGKRETTVSQLLINPTDLDIGRV
FTCRSMNEAIPSGKETSIELDVHHPPTVTLSIEPQTVQEGERVVFTCQATANPEILDYRWAKGGFLIE
DAHESRYETNVDYSFFTEPVSCEVHNKVGSTNVSTLVNVHFAPRIVVDPKPTTTDIGSDVTLTCVWVG
NPPLTLTWTKKDSNMVLSNSNQLLLKSVTQADAGTYTCRAIVPRIGVAEREVPLYVNGPPIISSEAVQ
YAVRGDGGKVECFIGSTPPPDRIAWAWKENFLEVGTLERYTVERTNSGSGVLSTLTINNVMEADFQTH
YNCTAWNSFGPGTAIIQLEEREVLPVGIIAGATIGASILLIFFFIALVFFLYRRRRGSRKDVTLRKLD
IKVETVNREPLTMHSDREDDTASVSTATRVMKAIYSSFMDDVDLKQDLRCDTIDTREEYEMKDPTNGY
YNVRAEEDRPSSEAVLYADYRAPGPARFDGRPSSRLSHSSGYAQLNTYSRGPASDYGPEPTPPGPAAP
AGTDTTSQLSYENYEKFNSHPFPGAAGYPTYRLGYPQAPPSGLERTPYEAYDPIGKYATATRFSYTSQ
HSDYGQRFQQRMQTHVJ

| | | |
|---|---|---|
| NOV12x, SNP13374854 of | SEQ ID NO: 365 | 2128 bp |
| CG51373-08, DNA Sequence | ORF Start: ATG at 31 | ORF Stop: TAG at 2119 |
| | SNP Pos: 1426 | SNP Change: A to T |

CAATGGACCAAGGACGGGCTGGCCCTGGGCATGGGCCAGGGCCTCAAAGCCTGGCCACGGTACCGGGT
TGTGGGCTCCGCAGACGCTGGGCAGTACAACCTGGAGATCACAGATGCTGAGCTCTCTGACGACGCCT
CTTACGAGTGCCAGGCCACGGAGGCCGCCCTGCGCTCTCGGCGGGCCAAACTCACCGTGCTCATCCCC
CCAGAGGACACCAGGATTGACGGAGGCCCTGTGATTCTACTGCAGGCAGGCACCCCCCACAACCTCAC
ATGCCGGGCCTTCAATGCGAAGCCTGCTGCCACCATCATCTGGTTCCGGGACGGGACGCAGCAGGAGG
GCGCTGTGGCCAGCACGGAATTGCTGAAGGATGGGAAGAGGGAGACCACCGTGAGCCAACTGCTTATT
AACCCCACGGACCTGGACATAGGGCGTGTCTTCACTTGCCGAAGCATGAACGAAGCCATCCCTAGTGG
CAAGGAGACTTCCATCGAGCTGGATGTGCACCACCCTCCTACAGTGACCCTGTCCATTGAGCCACAGA
CGGTGCAGGAGGGTGAGCGTGTTGTCTTTACCTGCCAGGCCACAGCCAACCCCGAGATCTTGGACTAC
AGGTGGGCCAAAGGGGGTTTCTTGATTGAAGACGCCCACGAGAGTCGCTATGAGACAAATGTGGATTA
TTCCTTTTTCACGGAGCCTGTGTCTTGTGAGGTTCACAACAAAGTGGGAAGCACCAATGTCAGCACTT
TAGTAAATGTCCACTTTGCTCCCCGGATTGTAGTTGACCCCAAACCCACAACCACAGACATTGGCTCT
GATGTGACCCTTACCTGTGTCTGGGTTGGGAATCCCCCCCTCACTCTCACCTGGACCAAAAAGGACTC
AAATATGGTCCTGAGTAACAGCAACCAGCTGCTGCTGAAGTCGGTGACTCAGGCAGACGCTGGCACCT
ACACCTGCCGGGCCATCGTGCCTCGAATCGGAGTGGCTGAGCGGGAGGTGCCGCTCTATGTGAACGGG
CCCCCCATCATCTCCAGTGAGGCAGTGCAGTATGCTGTGAGGGGTGACGGTGGCAAGGTGGAGTGTTT
CATTGGGAGCACACCACCCCCAGACCGCATAGCATGGGCCTGGAAGGAGAACTTCTTGGAGGTGGGGA
CCCTGGAACGCTATACAGTGGAGAGGACCAACTCAGGCAGTGGGGTGCTATCCACGCTCACCATCAAC
AATGTCATGGAGGCCGACTTTCAGACTCACTACAACTGCACCGCCTGGAACAGCTTCGGGCCAGGCAC
AGCCATCATCCAGCTGGAAGAGCGAGAGGTGTTACCTGTGGGCATCATAGCTGGGGCCACCATCGGCG
CGAGCATCCTGCTCATCTTCTTCTTCATCGCCTTGGTATTCTTCCTCTACCGGCGCCGCAAAGGCTGT
CGCAAAGACGTGACCCTGAGGAAGCTGGATATCAAGGTGGAGACAGTGAACCGAGAGCCACTTACGAT
GCATTCTGACCGGGAGGATGACACCGCCAGCGTCTCCACAGCAACCCGGGTCATGAAGGCCATCTACT
CGTCGTTTATGGATGATGTGGATCTGAAGCAGGACCTGCGCTGCGACACCATCGACACCCGGGAGGAG
TATGAGATGAAGGACCCCACCAATGGCTACTACAACGTGCGTGCCCATGAAGACCGCCCGTCTTCCAG
GGCAGTGCTCTATGCTGACTACCGTGCCCCTGGCCCTGCCCGCTTCGACGGCCGCCCCTCATCCCGTC
TCTCCCACTCCAGCGGCTATGCCCAGCTCAACACCTATAGCCGGGGCCCTGCCTCTGACTATGGCCCT
GAGCCCACACCCCCTGGCCCTGCTGCCCCAGCTGGCACTGACACAACCAGCCAGCTGTCCTACGAGAA
CTATGAGAAGTTCAACTCCCATCCCTTCCCTGGGGCAGCTGGGTACCCCACCTACCGACTGGGCTACC
CCCAGGCCCCACCCTCTGGCCTGGAGCGGACCCCATATGAGGCGTATGACCCCATTGGCAAGTACGCC
ACAGCCACTCGATTCTCCTACACCTCCCAGCACTCGGACTACGGCCAGCGATTCCAGCAGCGCATGCA
GACTCACGTGTAGGGGCCAG

| | | | |
|---|---|---|---|
| NOV12x, SNP13374854 of | SEQ ID NO: 366 | 696 aa | MW at 76991.4kD |
| CG51373-08, Protein | SNP Pos: 466 | | SNP Change: Ser to Cys |
| Sequence | | | |

MGQGLKAWPRYRVVGSADAGQYNLEITDAELSDDASYECQATEAALRSRRAKLTVLIPPEDTRIDGGP
VILLQAGTPHNLTCRAFNAKPAATIIWFRDGTQQEGAVASTELLKDGKRETTVSQLLINPTDLDIGRV
FTCRSMNEAIPSGKETSIELDVHHPPTVTLSIEPQTVQEGERVVFTCQATANPEILDYRWAKGGFLIE
DAHESRYETNVDYSFFTEPVSCEVHNKVGSTNVSTLVNVHFAPRIVVDPKPTTTDIGSDVTLTCVWVG
NPPLTLTWTKKDSNMVLSNSNQLLLKSVTQADAGTYTCRAIVPRIGVAEREVPLYVNGPPIISSEAVQ
YAVRGDGGKVECFIGSTPPPDRIAWAWKENFLEVGTLERYTVERTNSGSGVLSTLTINNVMEADFQTH
YNCTAWNSFGPGTAIIQLEEREVLPVGIIAGATIGASILLIFFFIALVFFLYRRRKGCRKDVTLRKLD
IKVETVNREPLTMHSDREDDTASVSTATRVMKAIYSSFMDDVDLKQDLRCDTIDTREEYEMKDPTNGY
YNVRAHEDRPSSRAVLYADYRAPGPARFDGRPSSRLSHSSGYAQLNTYSRGPASDYGPEPTPPGPAAP
AGTDTTSQLSYENYEKFNSHPFPGAAGYPTYRLGYPQAPPSGLERTPYEAYDPIGKYATATRFSYTSQ
HSDYGQRFQQRMQTHV

| | | |
|---|---|---|
| NOV12y, SNP13374853 of | SEQ ID NO: 367 | 2128 bp |
| CG51373-08, DNA Sequence | ORF Start: ATG at 31 | ORF Stop: TAG at 2119 |
| | SNP Pos: 1436 | SNP Change: A to G |

CAATGGACCAAGGACGGGCTGGCCCTGGGCATGGGCCAGGGCCTCAAAGCCTGGCCACGGTACCGGGT
TGTGGGCTCCGCAGACGCTGGGCAGTACAACCTGGAGATCACAGATGCTGAGCTCTCTGACGACGCCT
CTTACGAGTGCCAGGCCACGGAGGCCGCCCTGCGCTCTCGGCGGGCCAAACTCACCGTGCTCATCCCC
CCAGAGGACACCAGGATTGACGGAGGCCCTGTGATTCTACTGCAGGCAGGCACCCCCCACAACCTCAC
ATGCCGGGCCTTCAATGCGAAGCCTGCTGCCACCATCATCTGGTTCCGGGACGGGACGCAGCAGGAGG
GCGCTGTGGCCAGCACGGAATTGCTGAAGGATGGGAAGAGGGAGACCACCGTGAGCCAACTGCTTATT
AACCCCACGGACCTGGACATAGGGCGTGTCTTCACTTGCCGAAGCATGAACGAAGCCATCCCTAGTGG
CAAGGAGACTTCCATCGAGCTGGATGTGCACCACCCTCCTACAGTGACCCTGTCCATTGAGCCACAGA
CGGTGCAGGAGGGTGAGCGTGTTGTCTTTACCTGCCAGGCCACAGCCAACCCCGAGATCTTGGACTAC
AGGTGGGCCAAAGGGGGTTTCTTGATTGAAGACGCCCACGAGAGTCGCTATGAGACAAATGTGGATTA
TTCCTTTTTCACGGAGCCTGTGTCTTGTGAGGTTCACAACAAAGTGGGAAGCACCAATGTCAGCACTT
TAGTAAATGTCCACTTTGCTCCCCGGATTGTAGTTGACCCCAAACCCACAACCACAGACATTGGCTCT
GATGTGACCCTTACCTGTGTCTGGGTTGGGAATCCCCCCCTCACTCTCACCTGGACCAAAAAGGACTC
AAATATGGTCCTGAGTAACAGCAACCAGCTGCTGCTGAAGTCGGTGACTCAGGCAGACGCTGGCACCT
ACACCTGCCGGGCCATCGTGCCTCGAATCGGAGTGGCTGAGCGGGAGGTGCCGCTCTATGTGAACGGG
CCCCCCATCATCTCCAGTGAGGCAGTGCAGTATGCTGTGAGGGGTGACGGTGGCAAGGTGGAGTGTTT
CATTGGGAGCACACCACCCCCAGACCGCATAGCATGGGCCTGGAAGGAGAACTTCTTGGAGGTGGGGA
CCCTGGAACGCTATACAGTGGAGAGGACCAACTCAGGCAGTGGGGTGCTATCCACGCTCACCATCAAC
AATGTCATGGAGGCCGACTTTCAGACTCACTACAACTGCACCGCCTGGAACAGCTTCGGGCCAGGCAC
AGCCATCATCCAGCTGGAAGAGCGAGAGGTGTTACCTGTGGGCATCATAGCTGGGGCCACCATCGGCG
CGAGCATCCTGCTCATCTTCTTCTTCATCGCCTTGGTATTCTTCCTCTACCGGCGCCGCAAAGGCAGT
CGCAAAGGCGTGACCCTGAGGAAGCTGGATATCAAGGTGGAGACAGTGAACCGAGAGCCACTTACGAT
GCATTCTGACCGGGAGGATGACACCGCCAGCGTCTCCACAGCAACCCGGGTCATGAAGGCCATCTACT
CGTCGTTTATGGATGATGTGGATCTGAAGCAGGACCTGCGCTGCGACACCATCGACACCCGGGAGGAG
TATGAGATGAAGGACCCCACCAATGGCTACTACAACGTGCGTGCCCATGAAGACCGCCCGTCTTCCAG
GGCAGTGCTCTATGCTGACTACCGTGCCCCTGGCCCTGCCCGCTTCGACGGCCGCCCCTCATCCCGTC
TCTCCCACTCCAGCGGCTATGCCCAGCTCAACACCTATAGCCGGGGCCCTGCCTCTGACTATGGCCCT
GAGCCCACACCCCCTGGCCCTGCTGCCCCAGCTGGCACTGACACAACCAGCCAGCTGTCCTACGAGAA
CTATGAGAAGTTCAACTCCCATCCCTTCCCTGGGGCAGCTGGGTACCCCACCTACCGACTGGGCTACC
CCCAGGCCCCACCCTCTGGCCTGGAGCGGACCCCATATGAGGCGTATGACCCCATTGGCAAGTACGCC
ACAGCCACTCGATTCTCCTACACCTCCCAGCACTCGGACTACGGCCAGCGATTCCAGCAGCGCATGCA
GACTCACGTGTAGGGGCCAG

| | | | |
|---|---|---|---|
| NOV12y, SNP13374853 of | SEQ ID NO: 368 | 696 aa | MW at 76917.3kD |
| CG51373-08, Protein | SNP Pos: 469 | | SNP Change: Asp to Gly |
| Sequence | | | |

MGQGLKAWPRYRVVGSADAGQYNLEITDAELSDDASYECQATEAALRSRRAKLTVLIPPEDTRIDGGP
VILLQAGTPHNLTCRAFNAKPAATIIWFRDGTQQEGAVASTELLKDGKRETTVSQLLINPTDLDIGRV
FTCRSNNEAIPSGKETSIELDVHHPPTVTLSIEPQTVQEGERVVFTCQATANPEILDYRWAKGGFLIE
DAHESRYETNVDYSFFTEPVSCEVHNKVGSTNVSTLVNVHFAPRIVVDPKPTTTDIGSDVTLTCVWVG
NPPLTLTWTKKDSNMVLSNSNQLLLKSVTQADAGTYTCRAIVPRIGVAEREVPLYVNGPPIISSEAVQ
YAVRGDGGKVECFIGSTPPPDRIAWAWKENFLEVGTLERYTVERTNSGSGVLSTLTINNVMEADFQTH
YNCTAWNSFGPGTAIIQLEEREVLPVGIIAGATIGASILLIFFFIALVFFLYRRRKGSRKGVTLRKLD
IKVETVNREPLTMHSDREDDTASVSTATRVMKAIYSSFMDDVDLKQDLRCDTIDTREEYEMKDPTNGY
YNVEAHEDRPSSRAVLYADYRAPGPARFDGRPSSRLSHSSGYAQLNTYSRGPASDYGPEPTPPGPAAP
AGTDTTSQLSYENYEKFNSHPFPGAAGYPTYRLGYPQAPPSGLERTPYEAYDPIGKYATATRFSYTSQ
HSDYGQRFQQRMQTHV

[0417] A ClustalW comparison of the above protein sequences yields the following sequence alignment shown in Table 12B.

TABLE 12B
Comparison of the NOV12 protein sequences.

NOV12a ------------------------------------------------------------
NOV12b ------------------------------------------------------------
NOV12c ------------------------------------------------------------
NOV12d ------------------------------------------------------------
NOV12e ------------------------------------------------------------
NOV12f ------------------------------------------------------------
NOV12g MHLTLEVLNHGPFPLNLSSIAYNHGTVFGHWKNNVTRETLVKVKDAEDQLGARVGYIELD
NOV12h MHLTLEVLNHGPFPLNLSSIAYNHGTVFGHWKNNVTRETLVKVKDAEDQLGARVGYIELD
NOV12i ------------------------------------------------------------
NOV12j ------------------------------------------------------------
NOV12k ------------------------------------------------------------
NOV12l ------------------------------------------------------------
NOV12m ------------------------------------------------------------
NOV12n ------------------------------------------------------------
NOV12o ------------------------------------------------------------
NOV12p ------------------------------------------------------------
NOV12q ------------------------------------------------------------
NOV12a -------------------------MLSLLVWILTLSDTFSQGTQTRFSQEPADQWVAGQ
NOV12b ------------------------------------------------------------
NOV12c ------------------------------------------------------------
NOV12d ------------------------------------------------------------
NOV12e ---------------------TKLMLSLLVWILTLSDTFSQGTQTRFSQEPADQTVVAGQ
NOV12f ---------------------TKLMLSLLVWILTLSDTFSQGTQTRFSQEPADQTVVAGQ
NOV12g LNSGKETFLVNEEATGETSGDNVVBSRNLSQTIFITRKRWEGTQTRFSQEPADQTVVAGQ
NOV12h LNSGKETFLVNEEATGETSGDNVVHSRNLSQTIFITRKRWEGTQTRFSQEPADQTVVAGQ
NOV12i ------------------------------------------------------------
NOV12j ------------------------------------------------------------
NOV12k ------------------------------------------------------------
NOV12l ------------------------------------------------------------
NOV12m ---------------------------------------------RFSQEPADQTVVAGQ
NOV12n ------------------------------------------------------------
NOV12o ------------------------MLSLLVWILTLSDTFSQGTQTRFSQEPADQTVVAGQ
NOV12p ------------------------MLSLLVWILTLSDTFSQGTQTRFSQEPADQTVVAGQ
NOV12q ----------------------------------------QGTQTRFSQEPADQTVVAGQ
NOV12a RAVLPCVLLNYSGIVQWTKDGLALGMGQGLKAWPRYRVVGSADAGQYNLEITDAELSDDA
NOV12b -------------------------MGQALKAWPRYRVVGSADAGQYNLEITDAELSDDA
NOV12c -------------------------MGQGLKAWPRYRVVGSADAGQYNLEITDAELSDDA
NOV12d -----------------------GSMGQGLKAWPRYRVVGSADAGQYNLEITDAELSDDA
NOV12e RAVLPCVLLNYSGIVQWTKDGLALGMGQGLKAWPRYRVVGSADAGQYNLEITDAELSDDA
NOV12f RAVLPCVLLNYSGIVQWTKDGLALGMGQGLKAWPRYRVVGSADAGQYNLEITDAELSDDA
NOV12g RAVLPCVLLNYSGIVQWTKDGLALGMGQALKAWPRYRVVGSADAGQYNLEITDAELSDDA
NOV12h RAVLPCVLLNYSGIVQWTKDGLALGMGQALKAWPRYRVVGSADAGQYNLEITDAELSDDA
NOV12i -------------------------MGQALKAWPRYRVVGSADAGQYNLEITDAELSDDA
NOV12j -------------------------MGQALKAWPRYRVVGSADAGQYNLEITDAELSDDA
NOV12k -------------------------MGQALKAWPRYRVVGSADAGQYNLEITDAELSDDA
NOV12l -------------------------MGQALKAWPRYRVVGSADAGQYNLEITDAELSDDA
NOV12m RAVLPCVLLNYSGIVQWTKDGLALGMGQALKAWPRYRVVGSADAGQYNLEITDAELSDDA
NOV12n -------------------------MGQGLKAWPRYRVVGSADAGQYNLEITDAELSDDA
NOV12o RAVLPCVLLNYSGIVQWTKDGLALGMGQGLKAWPRYRVVGSADAGQYNLEITDAELSDDA
NOV12p RAVLPCVLLNYSGIVQWTKDGLALGMGQGLKAWPRYRVVGSADAGQYNLEITDAELSDDA
NOV12q RAVLPCVLLNYSGIVQWTKDGLALGMGQGLKAWPRYRVVGSADAGQYNLEITDAELSDDA
NOV12a SYECQATEAALRSRRAKLTVLIPPEDTRIDGGPVILLQAGTPHNLTCRAFNAKPAATIIW
NOV12b SYECQATEAALRSRRAKLTVLIPPEDTRIDGGPVILLQAGTPHNLTCRAFNAKPAATIIW
NOV12c SYECQATEAALRSRRAXLTVLIPPEDTRIDGGPVILLQAGTPHNLTCRAFNAKPAATIIW
NOV12d SYECQATEAALRSRRAKLTVLIPPEDTRIDGGPVILLQAGTPHNLTCEAFNAKPAATIIW
NOV12e SYECQATEAALRSRRAKLTVLIPPEDTRIDGGPVILLQAGTPHNLTCEAFNAKPAATIIW
NOV12f SYECQATEAALRSRRAKLTVLIPPEDTRIDGGPVILLQAGTPHNLTCRAFNAKPAATIIW
NOV12g SYECQATEAALRSRRAXLTVLIPPEDTRIDGGPVILLQAGTPHNLTCRAFNAKPAATIIW
NOV12h SYECQATEAALRSRRAKLTVLIPPEDTRIDGGPVILLQAGTPHNLTCEAFNAKPAATIIW
NOV12i SYECQATEAALRSRRAKLTVLIPPEDTRIDGGPVILLQAGTPHNLTCRAFNAKPAATIIW
NOV12j SYECQATEAALRSRRAKLTVLIPPEDTRIDGGPVILLQAGTPHNLTCRAFNAKPAATIIW
NOV12k SYECQATEAALRSRPAKLTVLIPPEDTRIDGGPVILLQAGTPHNLTCRAFNAKPAATIIW
NOV12l SYECQATEAALRSRRAKLTVLIPPEDTRIDGGPVILLQAGTPHNLTCRAFNAKPAATIIW
NOV12m SYECQATEAALRSRRAKLTVLIPPEDTRIDGGPVILLQAGTPHNLTCRAFNAKPAATIIW
NOV12n SYECQATEAALRSRRAKLTVLIPPEDTRIDGGPVILLQAGTPHNLTCRAFNAKPAATIIW
NOV12o SYECQATEAALRSRRAKLTVLIPPEDTRIDGGPVILLQAGTPHNLTCRAFNAKPAATIIW
NOV12p SYECQATEAALRSRRAKLTVLIPPEDTRIDGGPVILLQAGTPHNLTCHAFNAKPAATIIW
NOV12q SYECQATEAALRSRRAKLTVLIPPEDTRIDGGPVILLQAGTPHNLTCRAFNAKPAATIIW
NOV12a FRDGTQQEGAVASTELLKDGKRETTVSQLLINPTDLDIGRVFTCRSMNEAIPSGKETSIE
NOV12b FRDGTQQEGAVASTELLKDGKRETTVSQLLINPTDLDIGRVFTCRSMNEAIPSGKETSIE
NOV12c FRDGTQQEGAVASTELLKDGKRETTVSQLLINPTDLDIGRVFTCRSMNEAIPSGKETSIE
NOV12d FRDGTQQEGAVASTELLKDGKRETTVSQLLINPTDLDIGRVFTCRSMNEAIPSGKETSIE
NOV12e FRDGTQQEGAVASTELLKDGKRETTVSQLLINPTDLDIGRVFTCRSMNEAIPSGKETSIE
NOV12f FRDGTQQEGAVASTELLKDGKRETTVSQLLINPTDLDIGRVFTCRSMNEAIPSGKETSIE
NOV12g FRDGTQQEGAVASTELLKDGKRETTVSQLLINPTDLDIGRVFTCRSMNEAIPSGKETSIE
NOV12h FRDGTQQEGAVASTELLKDGKRETTVSQLLINPTDLDIGRVFTCRSMNEAIPSGKETSIE
NOV12i FRDGTQQEGAVASTELLKDGKRETTVSQLLINPTDLDIGRVFTCRSMNEAIPSGKETSIE
NOV12j FRDGTQQEGAVASTELLKDGKRETTVSQLLINPTDLDIGRVFTCRSMNEAIPSGKETSIE
NOV12k FRDGTQQEGAVASTELLKDGKRETTVSQLLINPTDLDIGRVFTCRSMNEAIPSGKETSIE
NOV12l FRDGTQQEGAVASTELLKDGKRETTVSQLLINPTDLDIGRVFTCRSMNEAIPSGKETSIE
NOV12m FRDGTQQEGAVASTELLKDGKRETTVSQLLINPTDLDIGRVFTCRSMNEAIPSGKETSIE
NOV12n FRDGTQQEGAVASTELLKDGKRETTVSQLLINPTDLDIGRVFTCRSNNEAIPSGKETSIE
NOV12o FRDGTQQEGAVASTELLKDGKRETTVSQLLINPTDLDIGRVFTCRSMNEAIPSGKETSIE
NOV12p FRDGTQQEGAVASTELLKDGKRETTVSQLLINPTDLDIGRVFTCRSMNEAIPSGKETSIE
NOV12q FRDGTQQEGAVASTELLKDGKRETTVSQLLINPTDLDIGRVFTCRSMNEAIPSGKETSIE
NOV12a LDVHHPPTVTLSIEPQTVQEGERVVFTCQATANPEILGYRWAKGGFLIEDAHESRYETNV
NOV12b LDVHHPPTVTLSIEPQTVQEGERVVFTCQATANPEILGYRWAKGGFLIEDAHESRYETNV
NOV12c LDVHHPPTVTLSIEPQTVQEGERVVFTCQATANPEILDYRWAKGGFLIEDAHESRYETNV
NOV12d LDVHHPPTVTLSIEPQTVQEGERVVFTCQATANPEILDYRWAKGGFLIEDAHESRYETNV
NOV12e LDVHHPPTVTLSIEPQTVQEGERVVFTCQATANPEILGYRWAKGGFLIEDAHESRYETNV
NOV12f LDVHHPPTVTLSIEPQTVQEGERVVFTCQATANPEILGYRWAKGGFLIEDAHESRYETNV
NOV12g LDVHREWAGGSSLEQGGGRRGVFEKHTLSLRNTN--------------------------
NOV12h LDVHHPPTVTLSIEPQTVQEGERVVFTCQATANPEILGYRWAKGGFLIEDAHESRYETNV
NOV12i LDVHHPPTVTLSIEPQTVQEGERVVFTCQATANPEILGYRWAKGGFLIEDAHESRYETNV
NOV12j LDVHREWAGGSSLEQGGGRRGVFEKHTLSLRNTN--------------------------
NOV12k LDVHREWAGGSSLEQGGGRRGVFEKHTLSLRNTN--------------------------
NOV12l LDVHREWAGGSSLEQGGGRRGVFEKHTLSLRNTN--------------------------
NOV12m LDVHHPPTVTLSIEPQTVQEGERVVFTCQATANPEILGYRWAKGGFLIEDAHESRYETNV
NOV12n LDVHHPPTVTLSIEPQTVQEGERVVFTCQATANPEILDYRWAKGGFLIEDAHESRYETNV
NOV12o LDVHHPPTVTLSIEPQTVQEGERVVFTCQATANPEILGYRWAKGGFLIEDAHESRYETNV
NOV12p LDVHHPPTVTLSIEPQTVQEGERVVFTCQATANPEILGYRWAKGGFLIEDAHESRYETNV
NOV12q LDVHHPPTVTLSIEPQTVQEGERVVFTCQATANPEILGYRWAKGGFLIEDAHESRYETNV
NOV12a DYSFFTEPVSCEVHNKVGSTNVSTLVNVHFAPRIVVDPKPTTTDIGSDVTLTCVWVGNPP
NOV12b DYSFFTEPVSCEVHNKVGSTNVSTLVNVHFAPRIVVDPKPTTTDIGSDVTLTCVWVGEIP
NOV12c DYSFFTEPVSCEVHNKVGSTNVSTLVNVHFAPRIVVDPKPTTTDIGSDVTLTCVWVGNPP
NOV12d DYSFFTEPVSCEVHNKVGSTNVSTLVNVHFAPRIVVDPKPTTTDIGSDVTLTCVWVGNPP
NOV12e DYSFFTEPVSCEVHNKVGSTNVSTLVNVHFAPRIVVDPKPTTTDIGSDVTLTCVWVGNPP
NOV12f DYSFFTEPVSCEVHNKVGSTNVSTLVNVHFAPRIVVDPKPTTTDIGSDVTLTCVWVGNPP
NOV12g ------------------------------------------------------------
NOV12h DYSFFTEPVSCEVHNKVGSTNVSTLVNVHFAPRIVVDPKPTTTDIGSDVTLTCVWVGNPP
NOV12i DYSFFTEPVSCEVHNKVGSTNVSTLVNVHFAPRIVVDPKPTTTDIGSDVTLTCVWVGNPP
NOV12j ------------------------------------------------------------
NOV12k ------------------------------------------------------------
NOV12l ------------------------------------------------------------
NOV12m DYSFFTEPVSCEVHNKVGSTNVSTLVNVHFAPRIVVDPKPTTTDIGSDVTLTCVWVGNPP
NOV12n DYSFFTEPVSCEVHNKVGSTNVSTLVNVHFAPRIVVDPKPTTTDIGSDVTLTCVWVGNPP
NOV12o DYSFFTEPVSCEVHNKVGSTNVSTLVNVHFAPRIVVDPKPTTTDIGSDVTLTCVWVGNPP
NOV12p DYSFFTEPVSCEVHNKVGSTNVSTLVNVHFAPRIVVDPKPTTTDIGSDVTLTCVWVGNPP
NOV12q DYSFFTEPVSCEVHNKVGSTNVSTLVNVHFAPRIVVDPKPTTTDIGSDVTLTCVWVGNPP
NOV12a LTLTWTKKD-----------------SNMVLSNSNQLLLKSVTQADAGTYTCPAIVPRIG
NOV12b PSLSPGPKRTQILGPWLLGSPPEAALSAQVLSNSNQLLLKSVTQADAGTYTCRAIVPRIG
NOV12c LTLTWTKKD-----------------SNMVLSNSNQLLLKSVTQADAGTYTCRAIVPRIG
NOV12d LTLTWTKKD-----------------SNMVLSNSNQLLLKSVTQADAGTYTCRAIVPRIG
NOV12e LTLTWTKKD-----------------SNMVLSNSNQLLLKSVTQADAGTYTCRAIVPRIG
NOV12f LTLTWTKKDSN-MGPRPPGSPPEAALSAQVLSNSNQLLLKSVTQADAGTYTCPAIVPRIG
NOV12g ------------------------------------------------------------
NOV12h LTLTWTKKD-----------------SNMVLSNSNQLLLKSVTQADAGTYTCRAIVPRIG
NOV12i LTLTWTKK-----------------DSNMVLSNSNQLLLKSVTQADAGTYTCRAIVPRIG
NOV12j ------------------------------------------------------------
NOV12k ------------------------------------------------------------
NOV12l ------------------------------------------------------------
NOV12m LTLTWTKKD-----------------SNMVLSNSNQLLLKSVTQADAGTYTCRATVPRIG
NOV12n LTLTWTKKD-----------------SNMVLSNSNQLLLKSVTQADAGTYTCRAIVPRIG
NOV12o LTLTWTKKDSN-MGPRPPGSPPEAALSAQVLSNSNQLLLKSVTQADAGTYTCRAIVPRIG
NOV12p LTLTWTKKD-----------------SNMVLSNSNQLLLKSVTQADAGTYTCEAIVPRIG
NOV12q LTLTWTKKDSN-MGPRPPGSPPEAALSAQVLSNSNQLLLKSVTQADAGTYTCRAIVPRIG
NOV12a VAEREVPLYVNGPPIISSEAVQYAVRGDGGKVECFIGSTPPPDRIAWAWKENFLEVGTLE
NOV12b VAEREVPLYVNGPPIISSEAVQYAVRGDGGKVECFIGSTPPPDRIAWAWKENFLEVGTLE
NOV12c VAEREVPLYVNGPPIISSEAVQYAVRGDGGKVECFIGSTPPPDRIAWAWKENFLEVGTLE
NOV12d VAEREVPLYVNGPPIISSEAVQYAVRGDGGKVECFIGSTPPPDRIAWAWKENFLEVGTLE
NOV12e VAEREVPLYVNGPPIISSEAVQYAVRGDGGKVECFIGSTPPPDRIAWAWKENFLEVGTLE
NOV12f VAEREVPLYVNGPPIISSEAVQYAVRGDGGKVECFIGSTPPPDRIAWAWKENFLEVGTLE
NOV12g ------------------------------------------------------------
NOV12h VAEREVPLYVNGPPIISSEAVQYAVRGDGGKVECFIGSTPPPDRIAWAWKENFLEVGTLE
NOV12i VAEREVPLYVNGPPIISSEAVQYAVRGDGGKVECFIGSTPPPDRIAWAWKENFLEVGTLE
NOV12j ------------------------------------------------------------
NOV12k ------------------------------------------------------------
NOV12l ------------------------------------------------------------
NOV12m VAEREVPLYVNGPPIISSEAVQYAVRGDGGKVECFIGSTPPPDRIAWAWKENFLEVGTLE
NOV12n VAEREVPLYVNGPPIISSEAVQYAVRGDGGKVECFIGSTPPPDRIAWAWKENFLEVGTLE
NOV12o VAEREVPLYVNGPPIISSEAVQYAVRGDGGKVECFIGSTPPPDRIAWAWKENFLEVGTLE
NOV12p VAEREVPLYVNGPPIISSEAVQYAVRGDGGKVECFIGSTPPPDRIAWAWKENFLEVGTLE
NOV12q VAEREVPLYVNGPPIISSEAVQYAVRGDGGKVECFIGSTPPPDRIAWAWKENFLEVGTLE
NOV12a RYTVERTNSGSGVLSTLTINNVMEADFQTHYNCTAWNSFGPGTAIIQLEEREVLPVGIIA
NOV12b RYTVERTNSGSGVLSTLTINNVMEADFQTHYNCTAWNSFGPGTAIIQLEEREVLPVGIIA
NOV12c RYTVERTNSGSGVLSTLTINNVMEADFQTHYNCTAWNSFGPGTAIIQLEEREVLPVGIIA
NOV12d RYTVERTNSGSGVLSTLTINNVMEADFQTHYNCTAWNSFGPGTAIIQLEEREVLPVGIIA
NOV12e RYTVERTNSGSGVLSTLTINNVMEADFQTHYNCTAWNSFGPGTAIIQLEEREVLPVGIIA
NOV12f RYTVERTNSGSGVLSTLTINNVMEADFQTHYNCTAWNSFGPGTAIIQLEEREVLPVGIIA
NOV12g ------------------------------------------------------------
NOV12h RYTVERTNSGSGVLSTLTINNVMEADFQTHYNCTAWNSFGPGTAIIQLEEREVLPVGIIA
NOV12i RYTVERTNSGSGVLSTLTINNVMEADFQTHYNCTAWNSFGPGTAIIQLEEREVLPVGIIA
NOV12j ------------------------------------------------------------
NOV12k ------------------------------------------------------------
NOV12l ------------------------------------------------------------
NOV12m RYTVERTNSGSGVLSTLTINNVMEADFQTHYNCTAWNSFGPGTAIIQLEER---------
NOV12n RYTVERTNSGSGVLSTLTINNVMEADFQTHYNCTAWNSFGPGTAIIQLEEREVLPVGIIA
NOV12o RYTVERTNSGSGVLSTLTINNVMEADFQTHYNCTAWNSFGPGTAIIQLEEREVLPVGIIA
NOV12p RYTVERTNSGSGVLSTLTINNVMEADFQTHYNCTAWNSFGPGTAIIQLEEREVLPVGIIA
NOV12q RYTVERTNSGSGVLSTLTINNVMEADFQTHYNCTAWNSFGPGTAIIQLEEREVLPVGIIA
NOV12a GATIGASILLIFFFIALVFFLYRRRKGSRKDVTLRKLDIKVETVNREPLTMHSDREDDTA
NOV12b GATIGASILLIFFFIALVFFLYRRRKGSRKDVTLRKLDIKVETVNREPLTMHSDREDDTA
NOV12c GATIGASILLIFFFIALVFFLYRRRKGSRKDVTLRKLDIKVETVNREPLTMHSDREDDTA
NOV12d GATIGASILLIFFFIALVFFLYRRRKGSRKDVTLRKLDIKVETVNREPLTMHSDREDDTA
NOV12e GATIGASILLIFFFIALVFFLYRRRKGSRKDVTLRKLDIKVETVNREPLTMHSDREDDTA
NOV12f GATIGASILLIFFFIALVFFLYRRRKGSRKDVTLRKLDIKVETVNREPLTMHSDREDDTA
NOV12g ------------------------------------------------------------
NOV12h GATIGASILLIFFFIALVFFLYRRRKGSRKDVTLRKLDIKVETVNREPLTMHSDREDDTA
NOV12i GATIGASILLIFFFIALVFFLYRRRKGSRKDVTLRKLDIKVETVNREPLTMHSDREDDTA
NOV12j ------------------------------------------------------------
NOV12k ------------------------------------------------------------
NOV12l ------------------------------------------------------------
NOV12m ------------------------------------------------------------
NOV12n GATIGASILLIFFFIALVFFLYRRRKGSRKDVTLRKLDIKVETVNREPLTMHSDREDDTA
NOV12o GATIGASILLIFFFIALVFFLYRRRKGSRKDVTLRKLDIKVETVNREPLTMHSDREDDTA
NOV12p GATIGASILLIFFFIALVFFLYRRRKGSRKDVTLRKLDIKVETVNREPLTMHSDREDDTA
NOV12q GATIGASILLIFFFIALVFFLYRRRKGSRKDVTLRKLDIKVETVNREPLTMHSDREDDTA
NOV12a SVSTATRVMKAIYSSFKDDVDLKQDLRCDTIDTREEYEMKDPTNGYYNVRAHEDRPSSRA
NOV12b SVSTATRVMKAIYSSFKDDVDLKQDLRCDTIDTREEYEMKDPTNGYYNVPAHEDRPSSRA
NOV12c SVSTATRVMKAIYSSFMDDVDLKQDLRCDTIDTREEYEMKDPTNGYYNVRAHEDRPSSRA
NOV12d SVSTATRVMKAIYSSFMDDVDLKQDLRCDTIDTREEYEMKDPTNGYYNVRAHEDRPSSEA
NOV12e SVSTATRVMKAIYSSFKDDVDLKQDLRCDTIDTREEYEMKDPTNGYYNVRAHEDRPSSEA
NOV12f SVSTATRVMKAIYSSFKDDVDLKQDLRCDTIDTREEYEMKDPTNGYYNVRAHEDRPSSRA
NOV12g ------------------------------------------------------------
NOV12h SVSTATRVMKAIYSSFKDDVDLKQDLRCDTIDTREEYEMKDPTNGYYNVRAHEDRPSSRA
NOV12i SVSTATRVMKAIYSSFKDDVDLKQDLRCDTIDTREEYEMKDPTNGYYNVRAHEDRPSSRA
NOV12j ------------------------------------------------------------
NOV12k ------------------------------------------------------------
NOV12l ------------------------------------------------------------
NOV12m ------------------------------------------------------------
NOV12n SVSTATRVMKAIYSSFMDDVDLKQDLRCDTIDTREEYEMKDPTNGYYNVRAHEDRPSSRA
NOV12o SVSTATRVMKAIYSSFKDDVDLKQDLRCDTIDTREEYEMKDPTNGYYNVRAHEDRPSSRA
NOV12p SVSTATRVMKAIYSSFKDDVDLKQDLRCDTIDTREEYEMKDPTNGYYNVRAHEDRPSSRA
NOV12q SVSTATRVMKAIYSSFKDDVDLKQDLRCDTIDTREEYEMKDPTNGYYNVRAHEDRPSSRA
NOV12a VLYADYRAPGPARFDGRPSSRLSHSSGYAQLNTYSRGPASDYGPEPTPPGPAAPAGTDTT
NOV12b VLYADYPAPGPARFDGRPSSRLSHSSGYAQLNTYSRGPASDYGPEPTPPGPAAPAGTDTT
NOV12c VLYADYRAPGPARFDGRPSSRLSHSSGYAQLNTYSRGPASDYGPEPTPPGPAAPAGTDTT
NOV12d VLYADYRAPGPARFDGRPSSRLSHSSGYAQLNTYSRGPASDYGPEPTPPGPAAPAGTDTT
NOV12e VLYADYRAPGPARFDGRPSSRLSHSSGYAQLNTYSRGPASDYQPEPTPPGPAAPAGTDTT
NOV12f VLYADYRAPGPARFDGRPSSRLSHSSGYAQLNTYSRGPASDYGPEPTPPGPAAPAGTDTT
NOV12g ------------------------------------------------------------
NOV12h VLYADYRAPGPARFDGRPSSRLSHSSGYAQLNTYSRGPASDYGPEPTPPGPAAPAGTDTT
NOV12i VLYADYRAPGPARFDGRPSSRLSHSSGYAQLNTYSRGPASDYGPEPTPPGPAAPAGTDTT
NOV12j ------------------------------------------------------------
NOV12k ------------------------------------------------------------
NOV12l ------------------------------------------------------------
NOV12m ------------------------------------------------------------
NOV12n VLYADYRAPGPARFDGRPSSRLSHSSGYAQLNTYSRGPASDYGPEPTPPGPAAPAGTDTT
NOV12o VLYADYRAPGPARFDGRPSSRLSHSSGYAQLNTYSRGPASDYGPEPTPPGPAAPAGTDTT
NOV12p VLYADYRAPGPARFDGRPSSRLSHSSGYAQLNTYSRGPASDYGPEPTPPGPAAPAGTDTT
NOV12q VLYADYRAPGPARFDGRPSSRLSHSSGYAQLNTYSRGPASDYGPEPTPPGPAAPAGTDTT
NOV12a SQLSYENYEKFNSHPFPGAAGYPTYRLGYPQAPPSGLERTPYEAYDPIGKYATATRFSYT
NOV12b SQLSYENYEKFNSHPFPGAAGYPTYRLGYPQAPPSGLERTPYEAYDPIGKYATATRFSYT
NOV12c SQLSYENYEKFNSHPFPGAAGYPTYRLGYPQAPPSGLERTPYEAYDPIGKYATATRFSYT
NOV12d SQLSYENYEKFNSHPFPGAAGYPTYRLGYPQAPPSGLERTPYEAYDPIGKYATATRFSYT
NOV12e SQLSYENYEKFNSHPFPGAAGYPTYRLGYPQAPPSGLERTPYEAYDPIGKYATATRFSYT
NOV12f SQLSYENYEKFNSHPFPGAAGYPTYRLGYPQAPPSGLERTPYEAYDPIGKYATATRFSYT
NOV12g ------------------------------------------------------------
NOV12h SQLSYENYEKFNSHPFPGAAGYPTYRLGYPQAPPSGLERTPYEAYDPIGKYATATRFSYT
NOV12i SQLSYENYEKFNSHPFPGAAGYPTYRLGYPQAPPSGLERTPYEAYDPIGKYATATRFSYT
NOV12j ------------------------------------------------------------
NOV12k ------------------------------------------------------------
NOV12l ------------------------------------------------------------
NOV12m ------------------------------------------------------------
NOV12n SQLSYENYEKFNSHPFPGAAGYPTYRLGYPQAPPSGLERTPYEAYDPIGKYATATRFSYT
NOV12o SQLSYENYEKFNSHPFPGAAGYPTYRLGYPQAPPSGLERTPYEAYDPIGKYATATRFSYT
NOV12p SQLSYENYEKFNSHPFPGAAGYPTYRLGYPQAPPSGLERTPYEAYDPIGKYATATRFSYT
NOV12q SQLSYENYEKFNSHPFPGAAGYPTYRLGYPQAPPSGLERTPYEAYDPIGKYATATRFSYT
NOV12a SQHSDYGQRFQQRMQTHV---
NOV12b SQHSDYGQRFQQRMQTHV---
NOV12c SQHSDYGQRFQQRMQTHV---
NOV12d SQHSDYGQRFQQRMQTHVLE-
NOV12e SQHSDYGQRFQQRMQTHVVDG
NOV12f SQHSDYGQRFQQRMQTHVVD-
NOV12g ---------------------
NOV12h SQHSDYGQRFQQRMQTHV---
NOV12i SQHSDYGQRFQQRMQTHV---
NOV12j ---------------------
NOV12k ---------------------
NOV12l ---------------------
NOV12m ---------------------
NOV12n SQHSDYGQRFQQRMQTHV---
NOV12o SQHSDYGQRFQQRMQTHV---
NOV12p SQHSDYGQRFQQRMQTHV---
NOV12q SQHSDYGQRFQQRMQTHV---
NOV12a (SEQ ID NO: 320)
NOV12b (SEQ ID NO: 322)
NOV12c (SEQ ID NO: 324)
NOV12d (SEQ ID NO: 326)
NOV12e (SEQ ID NO: 328)
NOV12f (SEQ ID NO: 330)
NOV12g (SEQ ID NO: 332)
NOV12h (SEQ ID NO: 334)
NOV12i (SEQ ID NO: 336)
NOV12j (SEQ ID NO: 338)
NOV12k (SEQ ID NO: 340)
NOV12l (SEQ ID NO: 342)
NOV12m (SEQ ID NO: 344)
NOV12n (SEQ ID NO: 346)
NOV12o (SEQ ID NO: 348)
NOV12p (SEQ ID NO: 350)
NOV12q (SEQ ID NO: 352)

[0418] Further analysis of the NOV12a protein yielded the following properties shown in Table 12C.

TABLE 12C
Protein Sequence Properties NOV12a

| | |
|---|---|
| SignalP analysis: | Cleavage site between residues 17 and 18 |
| PSORT II analysis: | |

| PSG: | a new signal peptide prediction method | |
|---|---|---|
| | N-region: | length 0; pos. chg 0; neg. chg 0 |
| | H-region: | length 12; peak value 10.45 |
| | PSG score: | 6.05 |

| | |
|---|---|
| GvH: | von Heijne's method for signal seq. recognition |
| | GvH score (threshold: −2.1): 0.73 |
| | possible cleavage site: between 16 and 17 |

>>> Seems to have a cleavable signal peptide (1 to 16)

| ALOM: | Klein et al's method for TM region allocation | | |
|---|---|---|---|
| | Init position for calculation: 17 | | |
| | Tentative number of TMS(s) for the threshold 0.5: 1 | | |
| | Number of TMS(s) for threshold 0.5: 1 | | |
| | INTEGRAL | Likelihood = | Transmembrane 503-519 |
| | | −12.26 | |

| | |
|---|---|
| PERIPHERAL | Likelihood = 3.61 (at 38) |

| | |
|---|---|
| | ALOM score: −12.26 (number of TMSs: 1) |
| MTOP: | Prediction of membrane topology (Hartmann et al.) |
| | Center position for calculation: 8 |
| | Charge difference: −2.0 C(−1.0)-N(1.0) |
| | N >= C: N-terminal side will be inside |

>>> membrane topology: type 1a (cytoplasmic tail 520 to 757)

| MITDISC: | discrimination of mitochondrial targeting seq | | | |
|---|---|---|---|---|
| | R content: | 1 | Hyd Moment(75): | 1.68 |
| | Hyd Moment(95): | 2.60 | G content: | 1 |
| | D/E content: | 2 | S/T content: | 8 |

| | |
|---|---|
| | Score: −5.22 |
| Gavel: | prediction of cleavage sites for mitochondrial preseq |
| | R-2 motif at 32 TRF\|SQ |

NUCDISC: discrimination of nuclear localization signals

| | |
|---|---|
| | pat4: RRRK (5) at 522 |
| | pat7: none |
| | bipartite: none |
| | content of basic residues: 9.6% |
| | NLS Score: −0.16 |
| KDEL: | ER retention motif in the C-terminus: none |

ER Membrane Retention Signals: none
SKL: peroxisomal targeting signal in the C-terminus: none
PTS2: 2nd peroxisomal targeting signal: none
VAC: possible vacuolar targeting motif: none
RNA-binding motif: none
Actinin-type actin-binding motif:

type 1: none
type 2: none

NMYR: N-myristoylation pattern: none
Prenylation motif: none
memYQRL: transport motif from cell surface to Golgi: none
Tyrosines in the tail: too long tail
Dileucine motif in the tail: none
checking 63 PROSITE DNA binding motifs: none
checking 71 PROSITE ribosomal protein motifs: none
checking 33 PROSITE prokaryotic DNA binding motifs: none

| | |
|---|---|
| NNCN: | Reinhardt's method for Cytoplasmic/Nuclear discrimination |
| | Prediction: cytoplasmic |
| | Reliability: 70.6 |
| COIL: | Lupas's algorithm to detect coiled-coil regions |
| | total: 0 residues |

Final Results (k = 9/23):

44.4%: endoplasmic reticulum
22.2%: Golgi
22.2%: extracellular, including cell wall
11.1%: plasma membrane

>> prediction for CG51373-11 is end (k = 9)

[0419] A search of the NOV12a protein against the Geneseq database, a proprietary database that contains sequences published in patents and patent publication, yielded several homologous proteins shown in Table 12D.

TABLE 12D
Geneseq Results for NOV12a

| | | NOV12a | Identities/ | |
|---|---|---|---|---|
| | | Residues/ | Similarities for | |
| Geneseq | Protein/Organism/Length | Match | the Matched | Expect |
| Identifier | [Patent #, Date] | Residues | Region | Value |
| ABB05749 | Human G protein-coupled receptor | 17 . . . 757 | 739/741 (99%) | 0.0 |
| | NOV1a protein SEQ ID NO: 2 - Homo | 101 . . . 841 | 740/741 (99%) | |
| | sapiens, 841 aa. [WO200200691-A2, | | | |
| | 03-JAN-2002] | | | |
| ABP66884 | Human polypeptide SEQ ID NO 605 - | 57 . . . 757 | 701/717 (97%) | 0.0 |
| | Homo sapiens, 749 aa. | 33 . . . 749 | 701/717 (97%) | |
| | [US2002090672-A1, 11-JUL-2002] | | | |
| ABB10297 | Human cDNA SEQ ID NO: 605 - Homo | 57 . . . 757 | 701/717 (97%) | 0.0 |
| | sapiens, 749 aa. [WO200154474-A2, | 33 . . . 749 | 701/717 (97%) | |
| | 02-AUG-2001] | | | |
| ABB05762 | Human G protein-coupled receptor | 62 . . . 757 | 695/696 (99%) | 0.0 |
| | NOV7b protein SEQ ID NO: 26 - Homo | 1 . . . 696 | 695/696 (99%) | |
| | sapiens, 696 aa. [WO200200691-A2, | | | |
| | 03-JAN-2002] | | | |
| ABG65107 | Human albumin fusion protein #1782 - | 62 . . . 757 | 696/712 (97%) | 0.0 |
| | Homo sapiens, 712 aa. [WO200177137- | 1 . . . 712 | 696/712 (97%) | |
| | A1, 18-OCT-2001] | | | |

[0420] In a BLAST search of public sequence databases, the NOV12a protein was found to have homology to the proteins shown in the BLASTP data in Table 12E.

TABLE 12E
Public BLASTP Results for NOV12a

| | | NOV12a | Identities/ | |
|---|---|---|---|---|
| Protein | | Residues/ | Similarities for | |
| Accession | | Match | the Matched | Expect |
| Number | Protein/Organism/Length | Residues | Portion | Value |
| CAD23338 | Sequence 1 from Patent | 17 . . . 757 | 739/741 (99%) | 0.0 |
| | WO0200691 - Homo sapiens | 101 . . . 841 | 740/741 (99%) | |
| | (Human), 841 aa. | | | |
| AAO91769 | NEPH1 - Mus musculus (Mouse), | 18 . . . 757 | 717/740 (96%) | 0.0 |
| | 789 aa. | 50 . . . 789 | 728/740 (97%) | |
| Q8CJ59 | NEPH1 - Mus musculus (Mouse), | 18 . . . 757 | 714/740 (96%) | 0.0 |
| | 789 aa. | 50 . . . 789 | 726/740 (97%) | |
| CAD23349 | Sequence 25 from Patent | 62 . . . 757 | 695/696 (99%) | 0.0 |
| | WO0200691 - Homo sapiens | 1 . . . 696 | 695/696 (99%) | |
| | (Human), 696 aa. | | | |
| AAP12626 | NEPH1 - Rattus norvegicus (Rat), | 53 . . . 754 | 678/702 (96%) | 0.0 |
| | 702 aa (fragment). | 1 . . . 702 | 688/702 (97%) | |

[0421] PFam analysis predicts that the NOV12a protein contains the domains shown in the Table 12F.

TABLE 12F
Domain Analysis of NOV12a

| | | Identities/ | |
|---|---|---|---|
| | | Similarities | |
| Pfam | NOV12a | for the Matched | Expect |
| Domain | Match Region | Region | Value |
| ig | 35 . . . 102 | 12/72 (17%) | 1.3e−05 |
| | | 47/72 (65%) | |
| ig | 136 . . . 202 | 14/69 (20%) | 0.0023 |
| | | 48/69 (70%) | |
| ig | 322 . . . 373 | 21/55 (38%) | 2.2e−09 |
| | | 43/55 (78%) | |

### Example 13

[0422] The NOV13 clone was analyzed, and the nucleotide and encoded polypeptide sequences are shown in Table 13A.

TABLE 13A

NOV13 Sequence Analysis

| | | |
|---|---|---|
| NOV13a, CG51622-04 | SEQ ID NO: 369 | 1826 bp |
| DNA Sequence | ORF Start: ATG at 167 | ORF Stop: TGA at 1721 |

AGGACTCCAGCGTGCCCAGTGACATAAACCCACTCTGCACATACCAGTTGCTCTGTCCCAGCTGTGCT
GCGGTGGTGCTGGGACAAAAGAAGCATGAGACGCAGACTCTGTCCCTCAAAGAACTCCCAGTGCAGGA
CAATGTGGTGCCCAAGGAAGACCCAGGGACATGGGAGTGGAGGACAGTCAAAGAAGGGATCCTGGAAG
AGGTCTGGCATCCTGCACTTGCTGCCCTCTGACACCTGGGAAGATGGCCGGCCCGTGGACCTTCACCC
TTCTCTGTGGTTTGCTGGCAGCCACCTTGATCCAAGCCACCCTCAGTCCCACTGCAGTTCTCATCCTC
GGCCCAAAAGTCATCAAAGAAAAGCTGACACAGGAGCTGAAGGACCACAACGCCACCAGCATCCTGCA
GCAGCTGCCGCTGCTCAGTGCCATGCGGGAAAAGCCAGCCGGAGGCATCCCTGTGCTGGGCAGCCTGG
TGAACACCGTCCTGAAGCACATCATCTGGCTGAAGGTCATCACAGCTAACATCCTCCAGCTGCAGGTG
AAGCCCTCGGCCAATGACCAGGAGCTGCTAGTCAAGATCCCCCTGGACATGGTGGCTGGATTCAACAC
GCCCCTGGTCAAGACCATCGTGGAGTTCCACATGACGACTGAGGCCCAAGCCACCATCCGCATGGACA
CCAGTGCAAGTGGCCCCACCCGCCTGGTCCTCAGTGACTGTGCCACCAGCCATGGGAGCCTGCGCATC
CAACTGCTGCATAAGCTCTCCTTCCTGGTGAACGCCTTAGCTAAGCAGGTCATGAACCTCCTAGTGCC
ATCCCTGCCCAATCTAGTGAAAAACCAGCTGTGTCCCGTGATCGAGGCTTCCTTCAATGGCATGTATG
CAGACCTCCTGCAGCTGGTGAAGGTGCCCATTTCCCTCAGCATTGACCGTCTGGAGTTTGACCTTCTG
TATCCTGCCATCAAGGGTGACACCATTCAGCTCTACCTGGGGGCCAAGTTGTTGGACTCACAGGGAAA
GGTGACCAAGTGGTTCAATAACTCTGCAGCTTCCCTGACAATGCCCACCCTGGACAACATCCCGTTCA
GTCCTGTTGGACTCTGTGCTTCCTGAGAGTGCCCATCGGCTGAAGTCAAGCATCGGGCTGATCAATGA
AAAGGCTGCAGATAAGCTGGGATCTACCCAGATCGTGAAGATCCTAACTCAGGACACTCCCGAGTTTT
TTATAGACCAAGGCCATGCCAAGGTGGCCCAACTGATCGTGCTGGAAGTGTTTCCCTCCAGTGAAGCC
CTCCGCCCTTTGTTCACCCTGGGCATCGAAGCCAGCTCGGAAGCTCAGTTTTACACCAAAGGTGACCA
ACTTATACTCAACTTGAATAACATCAGCTCTGATCGGATCCAGCTGATGAACTCTGGGATTGGCTGGT
TCCAATGCCCCTTCTCTCTCTCACAGCCTGATGTTCTGAAAAACATCATCACTGAGATCATCCACTCC
ATCCTGCTGCCGAACCAGAATGGCAAATTAAGATCTGGGGTCCCAGTGTCATTGGTGAAGGCCTTGGG
CCAGCTCTCCTGTCTCCCAGTGAAGACTTGGATGGCAGCCATCAGGGAAGGCTGGGTCCCAGCTGGGA
GTATGGGTGTGAGCTCTATAGACCATCCCTCTCTGCAATCAATAAACACTTGCCTGTG

| | | | |
|---|---|---|---|
| NOV13a, CG51622-04 | | | |
| Protein Sequence | SEQ ID NO: 370 | 518 aa | MW at 56020.9kD |

MGVEDSQRRDPGRGLASCTCCPLTPGKMAGPWTFTLLCGLLAATLIQATLSPTAVLILGPKVIKEKLT
QELKDHNATSILQQLPLLSAMREKPAGGIPVLGSLVNTVLKHIIWLKVITANILQLQVKPSANDQELL
VKIPLDMVAGFNTPLVKTIVEFHMTTEAQATIRMDTSASGPTRLVLSDCATSHGSLRIQLLHKLSFLV
NALAKQVMNLLVPSLPNLVKNQLCPVIEASFNGMYADLLQLVKVPISLSIDRLEFDLLYPAIKGDTIQ
LYLGAKLLDSQGKVTKWFNNSAASLTMPTLDNIPFSLIVSQDVVKAAVAAVLSPEEFMVLLDSVLPES
AHRLKSSIGLINEKAADKLGSTQIVKILTQDTPEFFIDQGHAKVAQLIVLEVFPSSEALRPLFTLGIE
ASSEAQFYTKGDQLILNLNNISSDRIQLMNSGIGWFQCPFSLSQPDVLKNIITEIIHSILLPNQNGKL
RSGVPVSLVKALGFEAAESSLTKDALVLTPASLWKPSSPVSQ

| | | |
|---|---|---|
| NOV13b, CG51622-03 | SEQ ID NO: 371 | 1452 bp |
| DNA Sequence | ORF Start: ATG at 44 | ORF Stop: TGA at 1346 |

AGGTCTGCCATCCTGCACTTGCTGCCCTCTGACACCTGGGAAGATGGCCGGCCCGTGGACCTTCACCC
CTCTCTGTGGTTTGCTGGCAGCCACCTTGATCCAAGCCACCCTCAGTCCCACTGCAGTTCTCATCCTC
GGCCCAAAAGTCATCAAAGAAAAGCTGACACAGGAGCTGAAGGACCACAACGCCACCAGCATCCTGCA
GCAGCTGCCGCTGCTCAGTGCCATGCGGGAAAAGCCAGCCGGAGGCATCCCTGTGCTGGGCAGCCTGG
TGAACACCGTCCTGAAGCACGTCATCTGGCTGAAGGTCATCACAGCTAACATCCTCCAGCTGCAGGTG
AAGCCCTCGGCCAATGACCAGGAGCTGCTAGTCAAGATCCCCCTGGACATGGTGGCTGGATTCAACAC
GCTCTCCTTCCTGGTGAACGCCTTAGCTAAGCAGGTCATGAACCTCCTAGTGCCATCCCTGCCCAATC
TAGTGAAAAACCAGCTGTGTCCCGTGATCGAGGCTTCCTTCAATGGCATGTATGCAGACCTCCTGCAG
CTGGTGAAGGTGCCCATTTCCCTCAGCATTGACCGTCTGGAGTTTGACCTTCTGTATCCTGCCATCAA
GGGTGACACCATTCAGCTCTACCTGGGGGCCAAGTTGTTGGACTCACAGGGAAAGGTGACCAAGTGGT
TCAATAACTCTGCAGCTTCCCTGACAATGCCCACCCTGGACAACATCCCGTTCAGCCTCATCGTGAGT
CAGGACGTGGTGAAAGCTGCAGTGGCTGCTGTGCTCTCTCCAGAAGAATTCATGGTCCTGTTGGACTC
CATGCCAAGGTGGCCCAACTGATCGTGCTGGAAGTGTTTCCCTCCAGTGAAGCCCTCCGCCCTTTGTT
CACCCTGGGCATCGAAGCCAGCTCGGAAGCTCAGTTTTACACCAAAGGTGACCAACTTATACTCAACT
TGAATAACATCAGCTCTGATCGGATCCAGCTGATGAACTCTGGGATTGGCTGGTTCCAACCTGATGTT
CTGAAAAACATCATCACTGAGATCATCCACTCCATCCTGCTGCCGAACCAGAATGGCAAATTAAGATC
TGGGGTCCCAGTGTCATTGGTGAAGGCCTTGGGATTCGAGGCAGCTGAGTCCTCACTGAGCAAGGATG
CCCTTGTGCTTACTCCAGCCTCCTTGTGGAAACCCACCTCTCCTGTCTCCCAGTGAAGACTTGGATGG
CAGCCATCAGGGAAGGCTGGGTCCCAGCTGGGAGTATGGGTGTGAGCTCTATAGACCATCCCTCTCTG
CAATCAATAAACACTTGCCTGTGA

| | | | |
|---|---|---|---|
| NOV13b, CG51622-03 | | | |
| Protein Sequence | SEQ ID NO: 372 | 1434 aa | MW at 46965.5kD |

MAGPWTFTPLCGLLAATLIQATLSPTAVLILGPKVIKEKLTQELKDHNATSILQQLPLLSAMREKPAG
GIPVLGSLVNTVLKHVIWLKVITANILQLQVKPSANDQELLVKIPLDMVAGFNTLSFLVNALAKQVMN
LLVPSLPNLVKNQLCPVIEASFNGMYADLLQLVKVPISLSIDRLEFDLLYPAIKGDTIQLYLGAKLLD
SQGKVTKWFNNSAASLTMPTLDNIPFSLIVSQDVVKAAVAAVLSPEEFMVLLDSVLPESAHRLKSSIG
LINEKAADKLGSTQIVKILTQDTPEFFIDQGHAKVAQLIVLEVFPSSEALRPLFTLGIEASSEAQFYT
KGDQLILNLNNISSDRIQLNNSGIGWFQPDVLKNIITEIIHSILLPNQNGKLRSGVPVSLVKALGFEA
AESSLSKDALVLTPASLWKPTSPVSQ

| | | |
|---|---|---|
| NOV13c, CG51622-05 | SEQ ID NO: 373 | 1580 bp |
| DNA Sequence | ORF Start: ATG at 77 | ORF Stop: TGA at 1475 |

AGAGAGGAGCGGGCCGAGGACTCCAGCGTGCCCAGGTCTGGCATCCTGCACTTGCTGCCCTCTGACAC
CTGGGAAGATGGCCGGCCCGTGGACCTTCACCCTTCTCTGTGGTTTGCTGGCAGCCACCTTGATCCAA
GCCACCCTCAGTCCCACTGCAGTTCTCATCCTCGGCCCAAAAGTCATCAAAGAAAAGCTGACACAGGA
GCTGAAGGACCACAACGCCACCAGCATCCTGCAGCAGCTGCCGCTGCTCAGTGCCATGCGGGAAAAGC
CAGCCGGAGGCATCCCTGTGCTGGGCAGCCTGGTGAACACCGTCCTGAAGCACGTCATCTGGCTGAAG
GTCATCACAGCTAACATCCTCCAGCTGCAGGTGAAGCCCTCGGCCAATGACCAGGAGCTGCTAGTCAA
GATCCCCCTGGACATGGTGGCTGGATTCAACACGCCCCTGGTCAAGACCATCGTGGAGTTCCACATGA
CGACTGAGGCCCAAGCCACCATCCGCATGGACACCAGTGCAAGTGGCCCCACCCGCCTGGTCCTCAGT
GACTGTGCCACCAGCCATGGGAGCCTGCGCATCCAACTGCTGCATAAGCTCTCCTTCCTGGTGAACGC
CTTAGCTAAGCAGGTCATGAACCTCCTAGTGCCATCCCTGCCCAATCTAGTGAAAAACCAGCTGGTGA
AGGTGCCCATTTCCCTCAGCATTGACCGTCTGGAGTTTGACCTTCTGTATCCTGCCATCAAGGGTGAC
ACCATTCAGCTCTACCTGGGGGCCAAGTTGTTGGACTCACAGGGAAAGGTGACCAAGTGGTTCAATAA
CTCTGCAGCTTCCCTGACAATGCCCACCCTGGACAACATCCCGTTCAGCCTCATCGTGAGTCAGGACG
TGGTGAAAGCTGCAGTGGCTGCTGTGCTCTCTCCAGAAGAATTCATGGTCCTGTTGGACTCTGTGCTT
CCTGAGAGTGCCCATCGGCTGAAGTCAAGCATCGGGCTGATCAATGAAAAGGCTGCAGATAAGCTGGG
ATCTACCCAGATCGTGAAGATCCTAACTCAGGACACTCCCGAGTTTTTTATAGACCAAGGCCATGCCA
AGGTGGCCCAACTGATCGTGCTGGAAGTGTTTCCCTCCAGTGAAGCCCTCCGCCCTTTGTTCACCCTG
GGCATCGAAGCCAGCTCGGAAGCTCAGTTTTACACCAAAGGTGACCAACTTATACTCAACTTGAATAA
CATCAGCTCTGATCGGATCCAGCTGATGAACTCTGGGATTGGCTGGTTCCAACCTGATGTTCTGAAAA
ACATCATCACTGAGATCATCCACTCCATCCTGCTGCCGAACCAGAATGGCAAATTAAGATCTGGGGTC
CCAGTGTCATTGGTGAAGGCCTTGGGATTCGAGGCAGCTGAGTCCTCACTGAGCAAGGATGCCCTTGT
GCTTACTCCAGCCTCCTTGTGGAAACCCACCTCTCCTGTCTCCCAGTGAAGACTTGGATGGCAGCCAT
AGGGAAGGCTGGGTCCCAGCTGGGAGTATGGGTGTGAGCTCTATAGACCATCCCTCTCTGCAATCAA
TAAACACTTGCCTGTG

| | | | |
|---|---|---|---|
| NOV13c, CG51622-05 | | | |
| Protein Sequence | SEQ ID NO: 374 | 466 aa | MW at 50460.5kD |

MAGPWTFTLLCGLLAATLIQATLSPTAVLILGPKVIKEKLTQELKDHNATSILQQLPLLSAMREKPAG
GIPVLGSLVNTVLKHVIWLKVITANILQLQVKPSANDQELLVKIPLDMVAGFNTPLVKTIVEFHMTTE
AQATIRMDTSASGPTRLVLSDCATSHGSLRIQLLHKLSFLVNALAKQVMNLLVPSLPNLVKNQLVKVP
ISLSIDRLEFDLLYPAIKGDTIQLYLGAKLLDSQGKVTKWFNNSAASLTMPTLDNIPFSLIVSQDVVK
AAVAAVLSPEEFMVLLDSVLPESAHRLKSSIGLINEKAADKLGSTQIVKILTQDTPEFFIDQGHAKVA
QLIVLEVFPSSEALRPLFTLGIEASSEAQFYTKGDQLILNLNNISSDRIQLMNSGIGWFQPDVLKNII
TEIIHSILLPNQNGKLRSGVPVSLVKALGFEAAESSLSKDALVLTPASLWKPTSPVSQ

| | | |
|---|---|---|
| NOV13d, CG51622-01 | SEQ ID NO: 375 | 963 bp |
| DNA Sequence | ORF Start: ATG at 1 | ORF Stop: TAA at 961 |

ATGGCCGGCCCGTGGACCTTCACCCTTCTCTGTGGTTTGCTGGCAGCCACCTTGATCCAAGCCACCCT
CAGTCCCACTGCAGTTCTCATCCTCGGCCCAAAAGTCATCAAAGAAAGTCTGACACAGGAGCTGAAGG
ACCACAACGCCACCAGCATCCTGCAGCAGCTGCCGCTGCTCAGTGCCATGCGGGAAAAGCCAGCCGGA
GGCATCCCTGTGCTGGGCAGCCTGGTGAACACCGTCCTGAAGCACATCACCCCATCCAGGCTGAAGGT
CATCACAGCTAACATCCTCCAGCTGCAGGTGAAGCCCTCGGCCAATGACCAGGAGCTGCTAGTCAAGA
TCCCCCTGGACATGGTGGCTGGATTCAACACGCCCCTGGTCAAGACCATCGTGGAGTTCCACATGACG
ACTGAGGCCCAAGCCACCATCCGCATGGACACCAGTGCAAGTGGCCCCACCCGCCTGGTCCTCAGTGA
CTGTGCCACCAGCCATGGGAGCCTGCGCATCCAACTGCTGCATAAGCTCTCCTTCCTGGTGAACGCCT
TAGCTAAGCAGGTCATGAACCTCCTAGTGCCATCCCTGCCCAATCTAGTGAAAAACCAGCTGTGTCCC
GTGATCGAGGCTTCCTTCAATGGCATGTATGCAGACCTCCTGCAGCTGGTGAAGGGTAGGTGCTCTGC
TCTCTCTCCCACTTTTTCCTTTACTACGGAGCTGGCCTCCAGACCCGGAAAGGTGACCAAGTGGTTCA
ATAACTCTGCAGCTTCCCTGACAATGCCCACCCTGGACAACATCCCGTTCAGCCTCATCGTGAGTCAG
GACGTGGTGAAAGCTGCAGTGGCTGCTGTGCTCTCTCCAGAAGAATTCATGGTCCTGTTGGACTCTGT
GGTAAACCTCAGCACAAGGCAGAGAATAGGGCCGCCCAGGCCACATCATAGGAATTTCCTGAACACAG
GGTGCCCCTAA

| | | | |
|---|---|---|---|
| Nov13d, CG51622-01 | | | |
| Protein Sequence | SEQ ID NO: 376 | 320 aa | MW at 34533.2kD |

MAGPWTFTLLCGLLAATLIQATLSPTAVLILGPKVIKESLTQELKDHNATSILQQLPLLSAMREKPAG
GIPVLGSLVNTVLKHITPSRLKVITANILQLQVKPSANDQELLVKIPLDMVAGFNTPLVKTIVEFHMT
TEAQATIRMDTSASGPTRLVLSDCATSHGSLRIQLLHKLSFLVNALAKQVMNLLVPSLPNLVKNQLCP
VIEASFNGMYADLLQLVKGRCSALSPTFSFTTELASRPGKVTKWFNNSAASLTMPTLDNIPFSLIVSQ
DVVKAAVAAVLSPEEFMVLLDSVVNLSTRQRIGPPRPHHRNFLNTGCP

| | | |
|---|---|---|
| NOV13e, 275698370 | SEQ ID NO: 377 | 1024 bp |
| DNA Sequence | ORF Start: at 2 | ORF Stop: end of sequence |

CACCGGATCCACCATGGCCGGCCCGTGGACCTTCACCCTTCTCTGTGGTTTGCTGGCAGCCACCTTGA
TCCAAGCCACCCTCAGTCCCACTGCAGTTCTCATCCTCGGCCCAAAAGTCATCAAAGAAAAGCTGACA
CAGGAGCTGAAGGACCACAACGCCACCAGCATCCTGCAGCAGCTGCCGCTGCTCAGTGCCATGCGGGA
AAAGCCAGCCGGAGGCATCCCTGTGCTGGGCAGCCTGGTGAACACCGTCCTGAAGCACGTCATCTGGC
TGAAGGTCATCACAGCTAACATCCTCCAGCTGCAGGTGAAGCCCTCGGCCAATGACCAGGAGCTGCTA
GTCAAGATCCCCCTGGACATGGTGGCTGGATTCAACACGCCCCTGGTCAAGACCATCGTGGAGTTCCA
CATGACGACTGAGGCCCAAGCCACCATCCGCATGGACACCAGTGCAAGTGGCCCCACCCGCCTGGTCC
TCAGTGACTGTGCCACCAGCCATGGGAGCCTGCGCATCCAACTGCTGCATAAGCTCTCCTTCCTGGTG
GTGTCCCGTGATCGAGGCTTCCTTCAATGGCATGTATGCAGACCTCCTGCAGCTGGTGAAGGTGCCCA
TTTCCCTCAGCATTGACCGTCTGGAGTTTGACCTTCTGTATCCTGCCATCAAGGGTGACACCATTCAG
TTCCCTGACAATGCCCACCCTGGACAACATCCCGTTCAGCCTCATCGTGAGTCAGGACGTGGTGAAAG
CTGCAGTGGCTGCTGTGCTCTCTCCAGAAGAATTCATGGTCCTGTTGGACTCTGTGGTAAACCTCAGC
ACAAGGCAGAGAATAGGGCCGCCCAGGCCACATCATAGGAATTTCCTGAACACAGGGTGCCCCCTCGA
GGGC

| | | | |
|---|---|---|---|
| NOV13e, 275698370 | | | |
| Protein Sequence | SEQ ID NO: 378 | 341 aa | MW at 36955.1kD |

TGSTMAGPWTFTLLCGLLAATLIQATLSPTAVLILGPKVIKEKLTQELKDHNATSILQQLPLLSAMRE
KPAGGIPVLGSLVNTVLKHVIWLKVITANILQLQVKPSANDQELLVKIPLDMVAGFNTPLVKTIVEFH
MTTEAQATIRMDTSASGPTRLVLSDCATSHGSLRIQLLHKLSFLVNALAKQVMNLLVPSLPNLVKNQL
CPVIEASFNGMYADLLQLVKVPISLSIDRLEFDLLYPAIKGDTIQLYLGAKLLDSQGKVTKWFNNSAA
SLTMPTLDNIPFSLIVSQDVVKAAVAAVLSPEEFMVLLDSVVNLSTRQRIGPPRPHHRNFLNTGCPLE
IG

| | | |
|---|---|---|
| NOV13f, 274054187 | SEQ ID NO: 379 | 946 bp |
| DNA Sequence | ORF Start: at 2 | ORF Stop: end of sequence |

CACCGGATCCCCCACTGCAGTTCTCATCCTCGGCCCAAAAGTCATCAAAGAAAAGCTGACACAGGAGC
GCCGGAGGCATCCCTGTGCTGGGCAGCCTGGTGAACACCGTCCTGAAGCACGTCATCTGGCTGAAGGT
TCCCCCTGGACATGGTGGCTGGATTCAACACGCCCCTGGTCAAGACCATCGTGGAGTTCCACATGACG
ACTGAGGCCCAAGCCACCATCCGCATGGACACCAGTGCAAGTGGCCCCACCCGCCTGGTCCTCAGTGA
CTGTGCCACCAGCCATGGGAGCCTGCGCATCCAACTGCTGCATAAGCTCTCCTTCCTGGTGAACGCCT
TAGCTAAGCAGGTCATGAACCTCCTAGTGCCATCCCTGCCCAATCTAGTGAAAAACCAGCTGTGTCCC
GTGATCGAGGCTTCCTTCAATGGCATGTATGCAGACCTCCTGCAGCTGGTGAAGGTGCCCATTTCCCT
CAGCATTGACCGTCTGGAGTTTGACCTTCTGTATCCTGCCATCAAGGGTGACACCATTCAGCTCTACC
TGGGGGCCAAGTTGTTGGACTCACAGGGAAAGGTGACCAAGTGGTTCAATAACTCTGCAGCTTCCCTG
ACAATGCCCACCCTGGACAACATCCCGTTCAGCCTCATCGTGAGTCAGGACGTGGTGAAAGCTGCAGT
GGCTGCTGTGCTCTCTCCAGAAGAATTCATGGTCCTGTTGGACTCTGTGGTAAACCTCAGCACAAGGC
AGAGAATAGGGCCGCCCAGGCCACATCATAGGAATTTCCTGAACACAGGGTGCCCCCTCGAG

| | | | |
|---|---|---|---|
| NOV13f, 274054187 | | | |
| Protein Sequence | SEQ ID NO: 380 | 315 aa | MW at 34322.0kD |

TGSPTAVLILGPKVIKEKLTQELKDHNATSILQQLPLLSAMREKPAGGIPVLGSLVNTVLKHVIWLKV
ITANILQLQVKPSANDQELLVKIPLDMVAGFNTPLVKTIVEFHMTTEAQATIRMDTSASGPTRLVLSD
CATSHGSLRIQLLHKLSFLVNALAKQVMNLLVPSLPNLVKNQLCPVIEASFNGMYADLLQLVKVPISL
SIDRLEFDLLYPAIKGDTIQLYLGAKLLDSQGKVTKWFNNSAASLTMPTLDNIPFSLIVSQDVVKAAV
AAVLSPEEFMVLLDSVVNLSTRQRIGPPRPHHRNFLNTGCPLE

| | | |
|---|---|---|
| NOV13g, CG51622-02 | SEQ ID NO: 381 | 1035 bp |
| DNA Sequence | ORF Start: ATG at 79 | ORF Stop: TAA at 1033 |

AGAGCGTTGGGTCACGTGAGGACTCCAGCGTGCCCAGGTCTGGCATCCTGCACTTACTGCCCTCTGAC
ACCTGGGAAGATGGCCGGCCCGTGGACCTTCACCCTTCTCTGTGGTTTGCTGGCAGCCACCTTGATCC
AAGCCACCCTCAGTCCCACTGCAGTTCTCATCCTCGGCCCAAAAGTCATCAAAGAAAAGCTGACACAG
GAGCTGAAGGACCACAACGCCACCAGCATCCTGCAGCAGCTGCCGCTGCTCAGTGCCATGCGGGAAAA
GCCAGCCGGAGGCATCCCTGTGCTGGGCAGCCTGGTGAACACCGTCCTGAAGCACATCATCTGGCTGA
AGGTCATCACAGCTAACATCCTCCAGCTGCAGGTGAAGCCCTCGGCCAATGACCAGGAGCTGCTAGTC
AAGATCCCCCTGGACATGGTGGCTGGATTCAACACGCCCCTGGTCAAGACCATCGTGGAGTTCCACAT
GACGACTGAGGCCCAAGCCACCATCCGCATGGACACCAGTGCAAGTGGCCCCACCCGCCTGGTCCTCA
GTGACTGTGCCACCAGCCATGGGAGCCTGCGCATCCAACTGCTGCATAAGCTCTCCTTCCTGGTGAAC
GCCTTAGCTAAGCAGGTCATGAACCTCCTAGTGCCATCCCTGCCCAATCTAGTGAAAAACCAGCTGTG
TCCCGTGATCGAGGCTTCCTTCAATGGCATGTATGCAGACCTCCTGCAGCTGGTGAAGGGTAGGTGCT
CTGCTCTCTCTCCCACTTTTTCCTTTACTACGGAGCTGGCCTCCAGACCCGGAAAGGTGACCAAGTGG
TTCAATAACTCTGCAGCTTCCCTGACAATGCCCACCCTGGACAACATCCCGTTCAGCCTCATCGTGAG
TCAGGACGTGGTGAAAGCTGCAGTGGCTGCTGTGCTCTCTCCAGAAGAATTCATGGTCCTGTTGGACT
CTGTGGTAAACCTCAGCACAAGGCAGAGAATAGGGCCGCCCAGGCCACATCATAGGAATTTCCTGAAC
ACAGGGTGCCCCTAA

| | | | |
|---|---|---|---|
| NOV13g, CG51622-02 | | | |
| Protein Sequence | SEQ ID NO: 382 | 318 aa | MW at 34432.2kD |

MAGPWTFTLLCGLLAATLIQATLSPTAVLILGPKVIKEKLTQELKDHNATSILQQLPLLSAMREKPAG
GIPVLGSLVNTVLKHIIWLKVITANILQLQVKPSANDQELLVKIPLDMVAGFNTPLVKTIVEFHMTTE
AQATIRMDTSASGPTRLVLSDCATSHGSLRIQLLHKLSFLVNALAKQVMNLLVPSLPNLVKNQLCPVI
EASFNGMYADLLQLVKGRCSALSPTFSFTTELASRPGKVTKWFNNSAASLTMPTLDNIPFSLIVSQDV
IVKAAVAAVLSPEEFMVLLDSVVNLSTRQRIGPPRPHHRNFLNTGCP

| | | |
|---|---|---|
| NOV13h, CG51622-06 | SEQ ID NO: 383 | 1572 bp |
| DNA Sequence | ORF Start: ATG at 124 | ORF Stop: TGA at 1441 |

GGTGTGCAGGATATAAGGTTGGACTTCCAGACCCACTGCCCGGGAGAGGAGAGGAGCGGGCCGAGGAC
TCCAGCGTGCCCAGGTCTGGCATCCTGCACTTGCTGCCCTCTGACACCTGGGAAGATGGCCGGCCCGT
GGACCTTCACCCTTCTCTGTGGTTTGCTGGCAGCCACCTTGATCCAAGCCACCCTCAGTCCCACTGCA
GTTCTCATCCTCGGCCCAAAAGTCATCAAAGAAAAGCTGACACAGGAGCTGAAGGACCACAACGCCAC
CAGCATCCTGCAGCAGCTGCCGCTGCTCAGTGCCATGCGGGAAAAGCCAGCCGGAGGCATCCCTGTGC
TGGGCAGCCTGGTGAACACCGTCCTGAAGCACATCATCTGGCTGAAGGTCATCACAGCTAACATCCTC
CAGCTGCAGGTGAAGCCCTCGGCCAATGACCAGGAGCTGCTAGTCAAGATCCCCCTGGACATGGTGGC
TGGATTCAACACGCCCCTGGTCAAGACCATCGTGGAGTTCCACATGACGACTGAGGCCCTTGCCACCA
TCCGCATGGACACCAGTGCAAGTGGCCCCACCCGCCTGGTCCTCAGTGACTGTGCCACCAGCCATGGG
AGCCTGCGCATCCAACTGCTGCATAAGCTCTCCTTCCTGGTGAACGCCTTAGCTAAGCAGGTCATGAA
CCTCCTAGTGCCATCCCTGCCCAATCTAGTGAAAAACCAGCTGTGTCCCGTGATCGAGGCTTCCTTCA
ATGGCATGTATGCAGACCTCCTGCAGCTGGTGAAGGTGCCCATTTCCCTCAGCATTGACCGTCTGGAG
TTTGACCTTCTGTATCCTGCCATCAAGGGTGACACCATTCAGCTCTACCTGGGGGCCAAGTTGTTGGA
CTCACAGGGAAAGGTGACCAAGTGGTTCAATAACTCTGCAGCTTCCCTGACAATGCCCACCCTGGACA
ACATCCCGTTCAGCCTCATCGTGAGTCACCCGTTCAGCCTCATCGTGAGTCAGGACGTGGTGAAAGCT
GCAGTGGCTGCTGTGCTCTCTCCAGAAGAATTCATGGTCCTGTTGGACTCTGTGCTTCCTGAGAGTGC
CCATCGGCTGAAGTCAAGCATCGGGCTGATCAATGAAAAGGAAGCCAGCTCGGAAGCTCAGTTTTACA
CCAAAGGTGACCAACTTATACTCAACTTGAATAACATCAGCTCTGATCGGATCCAGCTGATGAACTCT
GGGATTGGCTGGTTCCAACCTGATGTTCTGAAAAACATCATCACTGAGATCATCCACTCCATCCTGCT
CAGCTGAGTCCTCACTGACCAAGGATGCCCTTGTGCTTACTCCAGCCTCCTTGTGGAAACCCAGCTCT
CCTGTCTCCCAGTGAAGACTTGGATGGCAGCCATCAGGGAAGGCTGGGTCCCAGTTGGGAGTATGGGT
GTGAGCTCTATAGACCATCCCTCTCTGCAATCAATAAACACTTGCCTGTGAAAAAAAAAAAAAAATAA
AAAAAAAA

| | | | |
|---|---|---|---|
| NOV13h, CG51622-06 | | | |
| Protein Sequence | SEQ ID NO: 384 | 439 aa | MW at 47572.2kD |

MAGPWTFTLLCGLLAATLIQATLSPTAVLILGPKVIKEKLTQELKDHNATSILQQLPLLSAMREKPAG
GIPVLGSLVNTVLKHIIWLKVITANILQLQVKPSANDQELLVKIPLDMVAGFNTPLVKTIVEFHMTTE
AQATIRMDTSASGPTRLXTSDCATSHGSLRIQLLHKLSFLVNALAKQVMNLLVPSLPNLVKNQLCPVI
EASFNGMYADLLQLVKVPISLSIDRLEFDLLYPAIKGDTIQLYLGAKLLDSQGKVTKWFNNSAASLTM
PTLDNIPFSLIVSHPFSLIVSQDVVKAAVAAVLSPEEFMVLLDSVLPESAHRLKSSIGLINEKEASSE
LGFEAAESSLTKDALVLTPASLWKPSSPVSQ

| | | |
|---|---|---|
| NOV13i, CG51622-07 | SEQ ID NO: 385 | 1023 bp |
| DNA Sequence | ORF Start: ATG at 19 | ORF Stop: TAA at 1021 |

CCTCTGACACCTGGGAAGATGGCCGGCCCGTGGACCTTCACCCTTCTCTGTGGTTTGCTGGCAGCCAC
CTTGATCCAAGCCACCCTCAGTCCCACTGCAGTTCTCATCCTCGGCCCAAAAGTCATCAAAGAAAAGC
TGACACAGGAGCTGAAGGACCACAACGCCACCAGCATCCTGCAGCAGCTGCCGCTGCTCAGTGCCATG
CGGGAAAAGCCAGCCGGAGGCATCCCTGTGCTGGGCAGCCTGGTGAACACCGTCCTGAAGCACGTCAT
CTGGCTGAAGGTCATCACAGCTAACATCCTCCAGCTGCAGGTGAAGCCCTCGGCCAATGACCAGGAGC
TGCTAGTCAAGATCCCCCTGGACATGGTGGCTGGATTCAACACGCCCCTGGTCAAGACCATCGTGGAG
TTCCACATGACGACTGAGGCCCAAGCCACCATCCGCATGGACACCAGTGCAAGTGGCCCCACCCGCCT
GGTCCTCAGTGACTGTGCCACCAGCCATGGGAGCCTGCGCATCCAACTGCTGCATAAGCTCTCCTTCC
TGGTGAACGCCTTAGCTAAGCAGGTCATGAACCTCCTAGTGCCATCCCTGCCCAATCTAGTGAAAAAC
GCCCATTTCCCTCAGCATTGACCGTCTGGAGTTTGACCTTCTGTATCCTGCCATCAAGGGTGACACCA
TTCAGCTCTACCTGGGGGCCAAGTTGTTGGACTCACAGGGAAAGGTGACCAAGTGGTTCAATAACTCT
GCAGCTTCCCTGACAATGCCCACCCTGGACAACATCCCGTTCAGCCTCATCGTGAGTCAGGACGTGGT
GAAAGCTGCAGTGGCTGCTGTGCTCTCTCCAGAAGAATTCATGGTCCTGTTGGACTCTGTGGTAAACC
TCAGCACAAGGCAGAGAATAGGGCCGCCCAGGCCACATCATAGGAATTTCCTGAACACAGGGTGCCCC
TAA

| | | | |
|---|---|---|---|
| NOV13l, CG51622-07 | | | |
| Protein Sequence | SEQ ID NO: 386 | 334 aa | MW at 36309.5kD |

MAGPWTFTLLCGLLAATLIQATLSPTAVLILGPKVIKEKLTQELKDHNATSILQQLPLLSAMREKPAG
GIPVLGSLVNTVLKHVIWLKVITANILQLQVKPSANDQELLVKIPLDMVAGFNTPLVKTIVEFHMTTE
AQATIRMDTSASGPTRLVLSDCATSHGSLRIQLLHKLSFLVNALAKQVMNLLVPSLPNLVKNQLCPVI
EASFNGMYADLLQLVKVPISLSIDRLEFDLLYPAIKGDTIQLYLGAKLLDSQGKVTKWFNNSAASLTM
PTLDNIPFSLIVSQDVVKAAVAAVLSPEEFMVLLDSVVNLSTRQRIGPPRPHHRNFLNTGCP

| | | |
|---|---|---|
| NOV13j, CG51622-08 | SEQ ID NO: 387 | 1509 bp |
| DNA Sequence | ORF Start: ATG at 31 | ORF Stop: TGA at 1480 |

TGCACTTGCTGCCCTCTGACACCTGGGAAGATGGCCGGCCCGTGGACCTTCACCCTTCTCTGTGGTTT
GCTGGCAGCCACCTTGATCCAAGCCACCCTCAGTCCCACTGCAGTTCTCATCCTCGGCCCAAAAGTCA
TCAAAGAAAAGCTGACACAGGAGCTGAAGGACCACAACGCCACCAGCATCCTGCAGCAGCTGCCGCTG
CTCAGTGCCATGCGGGAAAAGCCAGCCGGAGGCATCCCTGTGCTGGGCAGCCTGGTGAACACCGTCCT
GAAGCACATCATCTGGCTGAAGGTCATCACAGCTAACATCCTCCAGCTGCAGGTGAAGCCCTCGGCCA
ATGACCAGGAGCTGCTAGTCAAGATCCCCCTGGACATGGTGGCTGGATTCAACACGCCCCTGGTCAAG
ACCATCGTGGAGTTCCACATGACGACTGAGGCCCAAGCCACCATCCGCATGGACACCAGTGCAAGTGG
CCCCACCCGCCTGGTCCTCAGTGACTGTGCCACCAGCCATGGGAGCCTGCGCATCCAACTGCTGCATA
AGCTCTCCTTCCTGGTGAACGCCTTAGCTAAGCAGGTCATGAACCTCCTAGTGCCATCCCTGCCCAAT
CTAGTGAAAAACCAGCTGTGTCCCGTGATCGAGGCTTCCTTCAATGGCATGTATGCAGACCTCCTGCA
GCTGGTGAAGGTGCCCATTTCCCTCAGCATTGACCGTCTGGAGTTTGACCTTCTGTATCCTGCCATCA
AGGGTGACACCATTCAGCTCTACCTGGGGGCCAAGTTGTTGGACTCACAGGGAAAGGTGACCAAGTGG
TTCAATAACTCTGCAGCTTCCCTGACAATGCCCACCCTGGACAACATCCCGTTCAGCCTCGTGAGTCA
GGACGTGGTGAAAGCTGCAGTGGCTGCTGTGCTCTCTCCAGAAGAATTCATGGTCCTGTTGGACTCTG
TGCTTCCTGAGAGTGCCCATCGGCTGAAGTCAAGCATCGGGCTGATCAATGAAAAGGCTGCAGATAAG
CTGGGATCTACCCAGATCGTGAAGATCCTAACTCAGGACACTCCCGAGTTTTTTATAGACCAAGGCCA
TGCCAAGGTGGCCCAACTGATCGTGCTGGAAGTGTTTCCCTCCAGTGAAGCCCTCCGCCCTTTGTTCA
AATAACATCAGCTCTGATCGGATCCAGCTGATGAACTCTGGGATTGGCTGGTTCCAACCTGATGTTCT
GAAAAACATCATCACTGAGATCATCCACTCCATCCTGCTGCCGAACCAGAATGGCAAATTAAGATCTG
GGGTCCCAGTGTCATTGGTGAAGGCCTTGGGATTCGAGGCAGCTGAGTCCTCACTGACCAAGGATGCC
CTTGTGCTTACTCCAGCCTCCTTGTGGAAACCCAGCTCTCCTGTCTCCCAGTGAAGACTTGGATGGCA
GCCATCAGGGAAG

| | | | |
|---|---|---|---|
| NOV13j, CG51622-08 | | | |
| Protein Sequence | SEQ ID NO: 388 | 1483 aa | MW at 52327.7kD |

MAGPWTFTLLCGLLAATLIQATLSPTAVLILGPKVTKEKLTQELKDHNATSILQQLPLLSAMREKPAG
GIPVLGSLVNTVLKHIIWLKVITANILQLQVKPSANDQELLVKIPLDMVAGFNTPLVKTIVEFHMTTE
AQATIRMDTSASGPTRLVLSDCATSHGSLRIQLLHKLSFLVNALAKQVMNLLVPSLPNLVKNQLCPVI
EASFNGMYADLLQLVKVPISLSIDRLEFDLLYPAIKGDTIQLYLGAKLLDSQGKVTKWFNNSAASLTM
PTLDNIPFSLVSQDVVKAAVAAVLSPEEFMVLLDSVLPESAHRLKSSIGLINEKAADKLGSTQIVKIL
TQDTPEFFIDQGHAKVAQLIVLEVFPSSEALRPLFTLGIEASSEAQFYTKGDQLILNLNNISSDRIQL
MNSGIGWFQPDVLKNIITEIIHSILLPNQNGKLRSGVPVSLVKALGFEAAESSLTKDALVLTPASLWK
PSSPVSQ

| | | |
|---|---|---|
| NOV13k, CG51622-09 | SEQ ID NO: 389 | 1392 bp |
| DNA Sequence | ORF Start: at 7 | ORF Stop: at 1387 |

AAGCTTCCCACTGCAGTTCTCATCCTCGGCCCAAAAGTCATCAAAGAAAAGCTGACACAGGAGCTGAA
GGACCACAACGCCACCAGCATCCTGCAGCAGCTGCCGCTGCTCAGTGCCATGCGGGAAAAGCCAGCCG
GAGGCATCCCTGTGCTGGGCAGCCTGGTGAACACCGTCCTGAAACACATCATCTGGCTGATGGTCATC
ACAGCTAACATCCTCCAGCTGCAGGTGAAGCCCTCGGCCAATGACCAGGAGCTGCTAGTCAAGATCCC
CCTGGACATGGTGGCTGGATTCAACACGCCCCTGGTCAAGACCATCGTGGAGTTCCACATGACGACTG
AGGCCCAAGCCACCATCCGCATGGACACCAGTGCAAGTGGCCCCACCCGCCTGGTCCTCAGTGACTGT
GCCACCAGCCATGGGAGCCTGCGCATCCAACTGCTGCATAAGCTCTCCTTCCTGGTGAACGCCTTAGC
TAAGCAGGTCATGAACCTCCTAGTGCCGTCCCTGCCCAATCTAGTGAAAAACCAGCTGTGTCCCGTGA
TCGAGGCTTCCTTCAATGGCATGTATGCAGACCTCCTGCAGCTGGTGAAGGTGCCCATTTCCCTCAGC
ATTGACCGTCTGGAGTTTGACCTTCTGTATCCTGCCATCAAGGGTGACACCATTCAGCTCTACCTGGG
GGCCAAGTTGTTGGACTCACAGGGAAAGGTGACCAAGTGGTTCAATAACTCTGCAGCTTCCCTGACAA
TGCCCACCCTGGACAACATCCCGTTCAGCCTCATCGTGAGTCAGGACGTGGTGAAAGCTGCAGTGGCT
GCTGTGCTCTCTCCAGAAGAATTCATGGTCCTGTTGGACTCTGTGCTTCCTGAGAGTGCCCATCGGCT
GAAGTCAAGCATCGGGCTGATCAATGAAAAGGCTGCAGATAAGCTGGGACCTACCCAGATCGTGAAGA
TCCTAACTCAGGACACTCCCGAGTTTTTTATAGACCAAGGCCATGCCAAGGTGGCCCAACTGATCGTG
CTGGAAGTGTTTCCCTCCAGTGAAGCCCTCCGCCCTTTGTTCACCCTGGGCATCGAAGCCAGCTCGGA
AGCTCAGTTTTACACCAAAGGTGACCAACTTATACTCAACTTGAATAACATCAGCTCTGATCGGATCC
AGCTGATGAACTCTGGGATTGGCTGGTTCCAACCTGATGTTCTGAAAAACATCATCACTGAGATCATC
CACTCCATCCTGCTGCCGAACCAGAATGGCAAATTAAGATCTGGGGTCCCAGTGTCATTGGTGAAGGC
CTTGGGATTCGAGGCAGCTGAGTCCTCACTGACCAAGGATGCCCTTGTGCTTACTCCAGCCTCCTTGT
GGAAACCCAGCTCTCCTGTCTCCCAGCTCGAG

| | | | |
|---|---|---|---|
| NOV13k, CG51622-09 | | | |
| Protein Sequence | SEQ ID NO: 390 | 460 aa | MW at 49975.9kD |

PTAVLILGPKVIKEKLTQELKDHNATSILQQLPLLSANREKPAGGIPVLGSLVNTVLKHIIWLKVITA
NILQLQVKPSANDQELLVKIPLDMVAGFNTPLVKTIVEFHMTTEAQATIRMDTSASGPTRLVLSDCAT
SHGSLRIQLLHKLSFLVNALAKQVMNLLVPSLPNLVKNQLCPVIEASFNGMYADLLQLVKVPISLSID
RLEFDLLYPAIKGDTIQLYLGAKLLDSQGKVTKWFNNSAASLTMPTLDNIPFSLIVSQDVVKAAVAAV
LSPEEFMVLLDSVLPESAHRLKSSIGLINEKAADKLGPTQIVKILTQDTPEFFIDQGHAKVAQLIVLE
VFPSSEALRPLFTLGIEASSEAQFYTKGDQLILNLNNISSDRIQLMNSGIGWFQPDVLKNIITEIIHS
ILLPNQNGKLRSGVPVSLVKALGFEAAESSLTKDALVLTPASLWKPSSPVSQ

| | | |
|---|---|---|
| NOV13l, CG51622-10 | SEQ ID NO: 391 | 1684 bp |
| DNA Sequence | ORF Start: ATG at 77 | ORF Stop: TGA at 1529 |
| AGAGAGGAGCGGGCCGAGGACTCCAGCGTGCCCAGGTCTGGCATCCTGCACTTGCTGCCCTCTGACAC | | |
| CTGGGAAGATGGCCGGCCCGTGGACCTTCACCCTTCTCTGTGGTTTGCTGGCAGCCACCTTGATCCAA | | |
| GCCACCCTCAGTCCCACTGCAGTTCTCATCCTCGGCCCAAAAGTCATCAAAGAAAAGCTGACACAGGA | | |
| GCTGAAGGACCACAACGCCACCAGCATCCTGCAGCAGCTGCCGCTGCTCAGTGCCATGCGGGAAAAGC | | |
| CAGCCGGAGGCATCCCTGTGCTGGGCAGCCTGGTGAACACCGTCCTGAAGCACGTCATCTGGCTGAAG | | |
| GTCATCACAGCTAACATCCTCCAGCTGCAGGTGAAGCCCTCGGCCAATGACCAGGAGCTGCTAGTCAA | | |
| GATCCCCCTGGACATGGTGGCTGGATTCAACACGCCCCTGGTCAAGACCATCGTGGAGTTCCACATGA | | |
| CGACTGAGGCCCAAGCCACCATCCGCATGGACACCAGTGCAAGTGGCCCCACCCGCCTGGTCCTCAGT | | |
| GACTGTGCCACCAGCCATGGGAGCCTGCGCATCCAACTGCTGCATAAGCTCTCCTTCCTGGTGAACGC | | |
| CTTAGCTAAGCAGGTCATGAACCTCCTAGTGCCATCCCTGCCCAATCTAGTGAAAAACCAGCTGTGTC | | |
| CGTGATCTGAGGCTTCCTTCAATGGCATGTATGCAGACCTCCTGCAGCTGGTGAAGGTGCCCATTTCC | | |
| TCAGCATTGAACCGTCTGGAGTTTGACCTTCTGTATCCTGCCATCAAGGGTGACACCATTCAGCTCTA | | |
| CCTGGGGGCCAAGTTGTTGGACTCACAGGGAAAGGTGACCAAGTGGTTCAATAACTCTGCAGCTTCCC | | |
| TGACAATGCCCACCCTGGACAACATCCCGTTCAGCCTCATCGTGAGTCAGGACGTGGTGAAAGCTGCA | | |
| GTGGCTGCTGTGCTCTCTCCAGAAGAATTCATGGTCCTGTTGGACTCTGTGCTTCCTGAGAGTGCCCA | | |
| TCGGCTGAAGTCAAGCATCGGGCTGATCAATGAAAAGGCTGCAGATAAGCTGGGATCTACCCAGATCG | | |
| TGAAGATCCTAACTCAGGACACTCCCGAGTTTTTTATAGACCAAGGCCATGCCAAGGTGGCCCAACTG | | |
| ATCGTGCTGGAAGTGTTTCCCTCCAGTGAAGCCCTCCGCCCTTTGTTCACCCTGGGCATCGAAGCCAG | | |
| CTCGGAAGCTCAGTTTTACACCAAAGGTGACCAACTTATACTCAACTTGAATAACATCAGCTCTGATC | | |
| GGATCCAGCTGATGAACTCTGGGATTGGCTGGTTCCAACCTGATGTTCTGAAAAACATCATCACTGAG | | |
| ATCATCCACTCCATCCTGCTGCCGAACCAGAATGGCAAATTAAGATCTGGGGTCCCAGTGTCATTGGT | | |
| GAAGGCCTTGGGATTCGAGGCAGCTGAGTCCTCACTGAGCAAGGATGCCCTTGTGCTTACTCCAGCCT | | |
| CCTTGTGGAAACCCACCTCTCCTGTCTCCCAGTGAAGACTTGGATGGCAGCCATCAGGGAAGGCTGGG | | |
| TCCCAGCTGGGAGTATGGGTGTGAGCTCTATAGACCATCCCTCTCTGCAATCAATAAACACTTGCCTG | | |
| TGAAAAAAAAAAAAAAAAAAAAAAAAAAAAAAAAAAAAAAAAAAAAAAAAAA | | |

| | | | |
|---|---|---|---|
| NOV13l, CG51622-10 | | | |
| Protein Sequence | SEQ ID NO: 392 | 484 aa | MW at 52426.8kD |

MAGPWTFTLLCGLLAATLIQATLSPTAVLILGPKVIKEKLTQELKDHNATSILQQLPLLSAMREKPAG
GIPVLGSLVNTVLKHVIWLKVITANILQLQVKPSANDQELLVKIPLDMVAGFNTPLVKTIVEFHMTTE
AQATIRMDTSASGPTRLVLSDCATSHGSLRIQLLHKLSFLVNALAKQVMNLLVPSLPNLVKNQLCPVI
EASFNGMYADLLQLVKVPISLSIDRLEFDLLYPAIKGDTIQLYLGAKLLDSQGKVTKWFNNSAASLTM
PTLDNIPFSLIVSQDVVKAAVAAVLSPEEFMVLLDSVLPESAHRLKSSIGLINEKAADKLGSTQIVKI
LTQDTPEFFIDQGHAKVAQLIVLEVFPSSEALRPLFTLGIEASSEAQFYTKGDQLILNLNNISSDRIQ
LMNSGIGWFQPDVLLNIITEIIHSILLPNQNGKLRSGVPVSLVKALGFEAAESSLSKDALVLTPASLW
KPTSPVSQ

| | | |
|---|---|---|
| NOV13m, | | |
| SNP13375774 of | SEQ ID NO: 393 | 963 bp |
| CG51622-01, | ORF Start: ATG at 1 | ORF Stop: TAA at 961 |
| DNA Sequence | SNP Pos: 248 | SNP Change: A to G |

ATGGCCGGCCCGTGGACCTTCACCCTTCTCTGTGGTTTGCTGGCAGCCACCTTGATCCAAGCCACCCT
CAGTCCCACTGCAGTTCTCATCCTCGGCCCAAAAGTCATCAAAGAAAGTCTGACACAGGAGCTGAAGG
ACCACAACGCCACCAGCATCCTGCAGCAGCTGCCGCTGCTCAGTGCCATGCGGGAAAAGCCAGCCGGA
GGCATCCCTGTGCTGGGCAGCCTGGTGAACACCGTCCTGAAGCGCATCACCCCATCCAGGCTGAAGGT
CATCACAGCTAACATCCTCCAGCTGCAGGTGAAGCCCTCGGCCAATGACCAGGAGCTGCTAGTCAAGA
TCCCCCTGGACATGGTGGCTGGATTCAACACGCCCCTGGTCAAGACCATCGTGGAGTTCCACATGACG
ACTGAGGCCCAAGCCACCATCCGCATGGACACCAGTGCAAGTGGCCCCACCCGCCTGGTCCTCAGTGA
CTGTGCCACCAGCCATGGGAGCCTGCGCATCCAACTGCTGCATAAGCTCTCCTTCCTGGTGAACGCCT
TAGCTAAGCAGGTCATGAACCTCCTAGTGCCATCCCTGCCCAATCTAGTGAAAAACCAGCTGTGTCCC
GTGATCGAGGCTTCCTTCAATGGCATGTATGCAGACCTCCTGCAGCTGGTGAAGGGTAGGTGCTCTGC
TCTCTCTCCCACTTTTTCCTTTACTACGGAGCTGGCCTCCAGACCCGGAAAGGTGACCAAGTGGTTCA
ATAACTCTGCAGCTTCCCTGACAATGCCCACCCTGGACAACATCCCGTTCAGCCTCATCGTGAGTCAG
GGTAAACCTCAGCACAAGGCAGAGAATAGGGCCGCCCAGGCCACATCATAGGAATTTCCTGAACACAG
GGTGCCCCTAA

| | | | |
|---|---|---|---|
| NOV13m, | | | |
| SNP13375774 of | | | |
| CG51622-01, | SEQ ID NO: 394 | | MW at 34552.3kD |
| Protein Sequence | SNP Pos: 83 | 320 aa | SNP Change: His to Arg |

MAGPWTFTLLCGLLAATLIQATLSPTAVLILGPKVIKESLTQELKDHNATSILQQLPLLSAMREKPAG
GIPVLGSLVNTVLKRITPSRLKVITANILQLQVKPSANDQELLVKIPLDMVAGFNTPLVKTIVEFHNT
TEAQATIRMDTSASGPTRLVLSDCATSHGSLRIQLLHKLSFLVNALAKQVMNLLVPSLPNLVKNQLCP
VIEASFNGMYADLLQLVKGRCSALSPTFSFTTELASRPGKVTKWFNNSAASLTMPTLDNIPFSLIVSQ
DVVKAAVAAVLSPEEFMVLLDSVVNLSTRQRIGPPRPHHRNFLNTGCP

| | | |
|---|---|---|
| NOV13n, | | |
| SNP1 3375775 of | SEQ ID NO: 395 | 963 bp |
| CG51622-01, | ORF Start: ATG at 1 | ORF Stop: TAA at 961 |
| DNA Sequence | SNP Pos: 250 | SNP Change: A to G |

ATGGCCGGCCCGTGGACCTTCACCCTTCTCTGTGGTTTGCTGGCAGCCACCTTGATCCAAGCCACCCT
CAGTCCCACTGCAGTTCTCATCCTCGGCCCAAAAGTCATCAAAGAAAGTCTGACACAGGAGCTGAAGG
ACCACAACGCCACCAGCATCCTGCAGCAGCTGCCGCTGCTCAGTGCCATGCGGGAAAAGCCAGCCGGA
GGCATCCCTGTGCTGGGCAGCCTGGTGAACACCGTCCTGAAGCACGTCACCCCATCCAGGCTGTTGGT
CATCACAGCTAACATCCTCCAGCTGCAGGTGAAGCCCTCGGCCAATGACCAGGAGCTGCTAGTCAAGA
TCCCCCTGGACATGGTGGCTGGATTCAACACGCCCCTGGTCAAGACCATCGTGGAGTTCCACATGACG
ACTGAGGCCCAAGCCACCATCCGCATGGACACCAGTGCAAGTGGCCCCACCCGCCTGGTCCTCAGTGA
CTGTGCCACCAGCCATGGGAGCCTGCGCATCCAACTGCTGCATAAGCTCTCCTTCCTGGTGAACGCCT
TAGCTAAGCAGGTCATGAACCTCCTAGTGCCATCCCTGCCCAATCTAGTGAAAAACCAGCTGTGTCCC
GTGATCGAGGCTTCCTTCAATGGCATGTATGCAGACCTCCTGCAGCTGGTGAAGGGTAGGTGCTCTGC
TCTCTCTCCCACTTTTTCCTTTACTACGGAGCTGGCCTCCAGACCCGGAAAGGTGACCAAGTGGTTCA
ATAACTCTGCAGCTTCCCTGACAATGCCCACCCTGGACAACATCCCGTTCAGCCTCATCGTGAGTCAG
GACGTGGTGAAAGCTGCAGTGGCTGCTGTGCTCTCTCCAGAAGAATTCATGGTCCTGTTGGACTCTGT
GGTAAACCTCAGCACAAGGCAGAGAATAGGGCCGCCCAGGCCACATCATAGGAATTTCCTGAACACAG
GGTGCCCCTAA

| | | | |
|---|---|---|---|
| NOV13n, | | | |
| SNP13375775 of | | | |
| CG51622-01, | SEQ ID NO: 396 | | MW at 3451 9.2kD |
| Protein Sequence | SNP Pos: 84 | 320 aa | SNP Change: Ile to Val |

MAGPWTFTLLCGLLAATLIQATLSPTAVLILGPKVIKESLTQELKDHNATSILQQLPLLSAMREKPAG
GIPVLGSLVNTVLKHVTPSRLKVITANILQLQVKPSANDQELLVKIPLDMVAGFNTPLVKTIVEFHMT
TEAQATIPMDTSAsGPTRLVLSDCATSHGSLRIQLLHKLSFLVNALAKQVNNLLVPSLPNLVKNQLCP
VIEASFNGMYADLLQLVKGRCSALSPTFSFTTELASRPGKVTKWFNNSAASLTMPTLDNIPFSLIVSQ
DVVKAAVAAVLSPEEFMVLLDSVVNLSTRQRIGPPRPHHRNFLNTGCP

[0423] A ClustalW comparison of the above protein sequences yields the following sequence alignment shown in Table 13B.

TABLE 13B
Comparison of the NOV13 protein sequences.

| | |
|---|---|
| NOV13a | MGVEDSQRRDPGRGLASCTCCPLTPGKMAGPWTFTLLCGLLAATLIQATLSPTAVLILGP |
| NOV13b | ---------------------------MAGPWTFTPLCGLLAATLIQATLSPTAVLILGP |
| NOV13c | ---------------------------MAGPWTFTLLCGLLAATLIQATLSPTAVLILGP |
| NOV13d | ---------------------------MAGPWTFTLLCGLLAATLIQATLSPTAVLILGP |
| NOV13e | -----------------------TGSTMAGPWTFTLLCGLLAATLIQATLSPTAVLILGP |
| NOV13f | ------------------------------------------------TGSPTAVLILGP |
| NOV13g | ---------------------------MAGPWTFTLLCGLLAATLIQATLSPTAVLILGP |
| NOV13h | ---------------------------MAGPWTFTLLCGLLAATLIQATLSPTAVLILGP |
| NOV13i | ---------------------------MAGPWTFTLLCGLLAATLIQATLSPTAVLILGP |
| NOV13j | ---------------------------MAGPWTFTLLCGLLAATLIQATLSPTAVLILGP |
| NOV13k | ---------------------------------------------------PTAVLILGP |
| NOV13l | ---------------------------MAGPWTFTLLCGLLAATLIQATLSPTAVLILGP |
| NOV13a | KVIKEKLTQELKDHNATSILQQLPLLSAMREKPAGGIPVLGSLVNTVLKHII--WLKVIT |
| NOV13b | KVIKEKLTQELKDHNATSILQQLPLLSAMREKPAGGIPVLGSLVNTVLKHVI--WLKVIT |
| NOV13c | KVIKEKLTQELKDHNATSILQQLPLLSAMREKPAGGIPVLGSLVNTVLKHVI--WLKVIT |
| NOV13d | KVIKESLTQELKDHNATSILQQLPLLSAMREKPAGGIPVLGSLVNTVLKHITPSRLKVIT |
| NOV13e | KVIKEKLTQELKDHNATSILQQLPLLSAMREKPAGGIPVLGSLVNTVLKHVI--WLKVIT |
| NOV13f | KVIKEKLTQELKDHNATSILQQLPLLSAMREKPAGGIPVLGSLVNTVLKHVI--WLKVIT |
| NOV13g | KVIKEKLTQELKDHNATSILQQLPLLSAMREKPAGGIPVLGSLVNTVLKHII--WLKVIT |
| NOV13h | KVIKEKLTQELKDHNATSILQQLPLLSAMREKPAGGIPVLGSLVNTVLKHII--WLKVIT |
| NOV13i | KVIKEKLTQELKDHNATSILQQLPLLSAMREKPAGGIPVLGSLVNTVLKHVI--WLKVIT |
| NOV13j | KVIKEKLTQELKDHNATSILQQLPLLSAMREKPAGGIPVLGSLVNTVLKHII--WLKVIT |
| NOV13k | KVIKEKLTQELKDHNATSILQQLPLLSAMREKPAGGIPVLGSLVNTVLKHII--WLKVIT |
| NOV13l | KVIKEKLTQELKDHNATSILQQLPLLSAMREKPAGGIPVLGSLVNTVLKHVI--WLKVIT |
| NOV13a | ANILQLQVKPSANDQELLVKIPLDMVAGFNTPLVKTIVEFHMTTEAQATIRMDTSASGPT |
| NOV13b | ANILQLQVKPSANDQELLVKIPLDMVAGFNT----------------------------- |
| NOV13c | ANILQLQVKPSANDQELLVKIPLDMVAGFNTPLVKTIVEFHMTTEAQATIRMDTSASGPT |
| NOV13d | ANILQLQVKPSANDQELLVKIPLDMVAGFNTPLVKTIVEFHMTTEAQATIRMDTSASGPT |
| NOV13e | ANILQLQVKPSANDQELLVKIPLDMVAGFNTPLVKTIVEFHMTTEAQATIRMDTSASGPT |
| NOV13f | ANILQLQVKPSANDQELLVKIPLDMVAGFNTPLVKTIVEFHMTTEAQATIRMDTSASGPT |
| NOV13g | ANILQLQVKPSANDQELLVKIPLDMVAGFNTPLVKTIVEFHMTTEAQATIRMDTSASGPT |
| NOV13h | ANILQLQVKPSANDQELLVKIPLDMVAGFNTPLVKTIVEFHMTTEAQATIRMDTSASGPT |
| NOV13i | ANILQLQVKPSANDQELLVKIPLDMVAGFNTPLVKTIVEFHMTTEAQATIRMDTSASGPT |
| NOV13j | ANILQLQVKPSANDQELLVKIPLDMVAGFNTPLVKTIVEFHMTTEAQATIRMDTSASGPT |
| NOV13k | ANILQLQVKPSANDQELLVKIPLDMVAGFNTPLVKTIVEFHMTTEAQATIRMDTSASGPT |
| NOV13l | ANILQLQVKPSANDQELLVKIPLDMVAGFNTPLVKTIVEFHMTTEAQATIRMDTSASGPT |
| NOV13a | RLVLSDCATSHGSLRIQLLHKLSFLVNALAKQVMNLLVPSLPNLVKNQLCPVIEASFNGM |
| NOV13b | ---------------------LSFLVNALAKQVMNLLVPSLPNLVKNQLCPVIEASFNGM |
| NOV13c | RLVLSDCATSHGSLRIQLLHKLSFLVNALAKQVMNLLVPSLPNLVKN------------- |
| NOV13d | RLVLSDCATSHGSLRIQLLHKLSFLVNALAKQVMNLLVPSLPNLVKNQLCPVIEASFNGM |
| NOV13e | RLVLSDCATSHGSLRIQLLHKLSFLVNALAKQVMNLLVPSLPNLVKNQLCPVIEASFNGM |
| NOV13f | RLVLSDCATSHGSLRIQLLHKLSFLVNALAKQVMNLLVPSLPNLVKNQLCPVIEASFNGM |
| NOV13g | RLVLSDCATSHGSLRIQLLHKLSFLVNALAKQVMNLLVPSLPNLVKNQLCPVIEASFNGM |
| NOV13h | RLVLSDCATSHGSLRIQLLHKLSFLVNALAKQVMNLLVPSLPNLVKNQLCPVIEASFNGM |
| NOV13i | RLVLSDCATSHGSLRIQLLHKLSFLVNALAKQVMNLLVPSLPNLVKNQLCPVIEASFNGM |
| NOV13j | RLVLSDCATSHGSLRIQLLHKLSFLVNALAKQVMNLLVPSLPNLVKNQLCPVIEASFNGM |
| NOV13k | RLVLSDCATSHGSLRIQLLHKLSFLVNALAKQVMNLLVPSLPNLVKNQLCPVIEASFNGM |
| NOV13l | RLVLSDCATSHGSLRIQLLHKLSFLVNALAKQVMNLLVPSLPNLVKNQLCPVIEASFNGM |
| NOV13a | YADLLQLVKVPISLSIDRLEFDLLYPAIKGDTIQLYLGAKLLDSQGKVTKWFNNSAASLT |
| NOV13b | YADLLQLVKVPISLSIDRLEFDLLYPAIKGDTIQLYLGAKLLDSQGKVTKWFNNSAASLT |
| NOV13c | -----QLVKVPISLSIDRLEFDLLYPAIKGDTIQLYLGAKLLDSQGKVTKWFNNSAASLT |
| NOV13d | YADLLQLVKGRCSALSPTFSFTTELASRP------------G----KVTKWFNNSAASLT |
| NOV13e | YADLLQLVKVPISLSIDRLEFDLLYPAIKGDTIQLYLGAKLLDSQGKVTKWFNNSAASLT |
| NOV13f | YADLLQLVKVPISLSIDRLEFDLLYPAIKGDTIQLYLGAKLLDSQGKVTKWFNNSAASLT |
| NOV13g | YADLLQLVKGRCSALSPTFSFTTELASRP------------G----KVTKWFNNSAASLT |
| NOV13h | YADLLQLVKVPISLSIDRLEFDLLYPAIKGDTIQLYLGAKLLDSQGKVTKWFNNSAASLT |
| NOV13i | YADLLQLVKVPISLSIDRLEFDLLYPAIKGDTIQLYLGAKLLDSQGKVTKWFNNSAASLT |
| NOV13j | YADLLQLVKVPISLSIDRLEFDLLYPAIKGDTIQLYLGAKLLDSQGKVTKWFNNSAASLT |
| NOV13k | YADLLQLVKVPISLSIDRLEFDLLYPAIKGDTIQLYLGAKLLDSQGKVTKWFNNSAASLT |
| NOV13l | YADLLQLVKVPISLSIDRLEFDLLYPAIKGDTIQLYLGAKLLDSQGKVTKWFNNSAASLT |
| NOV13a | MPTLDNIPFSLIVS--------QDVVKAAVAAVLSPEEFMVLLDSVLPESAHRLKSSIGL |
| NOV13b | MPTLDNIPFSLIVS--------QDVVKAAVAAVLSPEEFMVLLDSVLPESAHRLKSSIGL |
| NOV13c | MPTLDNIPFSLIVS--------QDVVKAAVAAVLSPEEFMVLLDSVLPESAHRLKSSIGL |
| NOV13d | MPTLDNIPFSLIVS--------QDVVKAAVAAVLSPEEFMVLLDSVVNLSTRQRIG---- |
| NOV13e | MPTLDNIPFSLIVS--------QDVVKAAVAAVLSPEEFMVLLDSVVNLSTRQRIG---- |
| NOV13f | MPTLDNIPFSLIVS--------QDVVKAAVAAVLSPEEFMVLLDSVVNLSTRQRIG---- |
| NOV13g | MPTLDNIPFSLIVS--------QDVVKAAVAAVLSPEEFMVLLDSVVNLSTRQRIG---- |
| NOV13h | MPTLDNIPFSLIVSHPFSLIVSQDVVKAAVAAVLSPEEFMVLLDSVLPESAHRLKSSIGL |
| NOV13i | MPTLDNIPFSLIVS--------QDVVKAAVAAVLSPEEFMVLLDSVVNLSTRQRIG---- |
| NOV13j | MPTLDNIPFSLVS---------QDVVKAAVAAVLSPEEFMVLLDSVLPESAHRLKSSIGL |
| NOV13k | MPTLDNIPFSLIVS--------QDVVKAAVAAVLSPEEFMVLLDSVLPESAHRLKSSIGL |
| NOV13l | MPTLDNIPFSLIVS--------QDVVKAAVAAVLSPEEFMVLLDSVLPESAHRLKSSIGL |
| NOV13a | INEKAADKLGSTQIVKILTQDTPEFFIDQGHAKVAQLIVLEVFPSSEALRPLFTLGIEAS |
| NOV13b | INEKAADKLGSTQIVKILTQDTPEFFIDQGHAKVAQLIVLEVFPSSEALRPLFTLGIEAS |
| NOV13c | INEKAADKLGSTQIVKILTQDTPEFFIDQGHAKVAQLIVLEVFPSSEALRPLFTLGIEAS |
| NOV13d | ----------------------P--------------------P-----RP--------- |
| NOV13e | ----------------------P--------------------P-----RP--------- |
| NOV13f | ----------------------P--------------------P-----RP--------- |
| NOV13g | ----------------------P--------------------P-----RP--------- |
| NOV13h | INEK-----------------------------------------------------EAS |
| NOV13i | ----------------------P--------------------P-----RP--------- |
| NOV13j | INEKAADKLGSTQIVKILTQDTPEFFIDQGHAKVAQLIVLEVFPSSEALRPLFTLGIEAS |
| NOV13k | INEKAADKLGPTQIVKILTQDTPEFFIDQGHAKVAQLIVLEVFPSSEALRPLFTLGIEAS |
| NOV13l | INEKAADKLGSTQIVKILTQDTPEFFIDQGHAKVAQLIVLEVFPSSEALRPLFTLGIEAS |
| NOV13a | SEAQFYTKGDQLILNLNNISSDRIQLMNSGIGWFQCPFSLSQPDVLKNIITEIIHSILLP |
| NOV13b | SEAQFYTKGDQLILNLNNISSDRIQLMNSGIGWFQ-------PDVLKNIITEIIHSILLP |
| NOV13c | SEAQFYTKGDQLILNLNNISSDRIQLMNSGIGWFQ-------PDVLKNIITEIIHSILLP |
| NOV13d | HHRNFLNTGCP------------------------------------------------- |
| NOV13e | HHRNFLNTGCPLEG---------------------------------------------- |
| NOV13f | HHRNFLNTGCPLE----------------------------------------------- |
| NOV13g | HHRNFLNTGCP------------------------------------------------- |
| NOV13h | SEAQFYTKGDQLILNLNNISSDRIQLMNSGIGWFQ-------PDVLKNIITEIIHSILLP |
| NOV13i | HHRNFLNTGCP------------------------------------------------- |
| NOV13j | SEAQFYTKGDQLILNLNNISSDRIQLMNSGIGWFQ-------PDVLKNIITEIIHSILLP |
| NOV13k | SEAQFYTKGDQLILNLNNISSDRIQLMNSGIGWFQ-------PDVLKNIITEIIHSILLP |
| NOV13l | SEAQFYTKGDQLILNLNNISSDRIQLMNSGIGWFQ-------PDVLKNIITEIIHSILLP |
| NOV13a | NQNGKLRSGVPVSLVKALGFEAAESSLTKDALVLTPASLWKPSSPVSQ |
| NOV13b | NQNGKLRSGVPVSLVKALGFEAAESSLSKDALVLTPASLWKPTSPVSQ |
| NOV13c | NQNGKLRSGVPVSLVKALGFEAAESSLSKDALVLTPASLWKPTSPVSQ |
| NOV13d | ------------------------------------------------ |
| NOV13e | ------------------------------------------------ |
| NOV13f | ------------------------------------------------ |
| NOV13g | ------------------------------------------------ |
| NOV13h | NQNGKLRSGVPVSLVKALGFEAAESSLTKDALVLTPASLWKPSSPVSQ |
| NOV13i | ------------------------------------------------ |
| NOV13j | NQNGKLRSGVPVSLVKALGFEAAESSLTKDALVLTPASLWKPSSPVSQ |
| NOV13k | NQNGKLRSGVPVSLVKALGFEAAESSLTKDALVLTPASLWKPSSPVSQ |
| NOV13l | NQNGKLRSGVPVSLVKALGFEAAESSLSKDALVLTPASLWKPTSPVSQ |
| NOV13a | (SEQ ID NO: 370) |
| NOV13b | (SEQ ID NO: 372) |
| NOV13c | (SEQ ID NO: 374) |
| NOV13d | (SEQ ID NO: 376) |
| NOV13e | (SEQ ID NO: 378) |
| NOV13f | (SEQ ID NO: 380) |
| NOV13g | (SEQ ID NO: 382) |
| NOV13h | (SEQ ID NO: 384) |
| NOV13i | (SEQ ID NO: 386) |
| NOV13j | (SEQ ID NO: 388) |
| NOV13k | (SEQ ID NO: 390) |
| NOV13l | (SEQ ID NO: 392) |

[0424] Further analysis of the NOV13a protein yielded the following properties shown in Table 13C.

TABLE 13C
Protein Sequence Properties NOV13a

| | |
|---|---|
| SignalP analysis: | Cleavage site between residues 52 and 53 |
| PSORT II analysis: | |

| PSG: | a new signal peptide prediction method | |
|---|---|---|
| | N-region: | length 10; pos. chg 2; neg. chg 3 |
| | H-region: | length 2; peak value 0.00 |
| | PSG score: | −4.40 |

| | |
|---|---|
| GvH: | von Heijne's method for signal seq. recognition |
| | GvH score (threshold: −2.1): 1.17 |
| | possible cleavage site: between 48 and 49 |

>>> Seems to have no N-terminal signal peptide

| ALOM: | Klein et al's method for TM region allocation | | |
|---|---|---|---|
| | Init position for calculation: 1 | | |
| | Tentative number of TMS(s) for the threshold 0.5: 2 | | |
| | Number of TMS(s) for threshold 0.5: 1 | | |
| | INTEGRAL | Likelihood = | Transmembrane 34-50 |
| | | −2.71 | |

| | |
|---|---|
| PERIPHERAL | Likelihood = 1.16 (at 200) |

| | |
|---|---|
| | ALOM score: −2.71 (number of TMSs: 1) |
| MTOP: | Prediction of membrane topology (Hartmann et al.) |
| | Center position for calculation: 41 |
| | Charge difference: −0.5 C(1.5)-N(2.0) |
| | N >= C: N-terminal side will be inside |

>>> membrane topology: type 2 (cytoplasmic tail 1 to 34)

| MITDISC: | discrimination of mitochondrial targeting seq | | | |
|---|---|---|---|---|
| | R content: | 0 | Hyd Moment(75): | 8.50 |
| | Hyd Moment(95): | 5.94 | G content: | 1 |
| | D/E content: | 2 | S/T content: | 0 |

| | |
|---|---|
| | Score: −7.21 |
| Gavel: | prediction of cleavage sites for mitochondrial preseq |
| | cleavage site motif not found |

NUCDISC: discrimination of nuclear localization signals

| | |
|---|---|
| | pat4: none |
| | pat7: none |
| | bipartite: none |
| | content of basic residues: 8.3% |
| | NLS Score: −0.47 |
| KDEL: | ER retention motif in the C-terminus: none |

ER Membrane Retention Signals: none
SKL: peroxisomal targeting signal in the C-terminus: none
PTS2: 2nd peroxisomal targeting signal: none
VAC: possible vacuolar targeting motif: none
RNA-binding motif: none
Actinin-type actin-binding motif:

type 1: none
type 2: none

NMYR: N-myristoylation pattern: MGVEDSQ
Prenylation motif: none
memYQRL: transport motif from cell surface to Golgi: none
Tyrosines in the tail: none
Dileucine motif in the tail: none
checking 63 PROSITE DNA binding motifs: none
checking 71 PROSITE ribosomal protein motifs: none
checking 33 PROSITE prokaryotic DNA binding motifs: none

| | |
|---|---|
| NNCN: | Reinhardt's method for Cytoplasmic/Nuclear discrimination |
| | Prediction: cytoplasmic |
| | Reliability: 76.7 |
| COIL: | Lupas's algorithm to detect coiled-coil regions |
| | total: 0 residues |

Final Results (k = 9/23):

```
30.4%: mitochondrial
26.1%: cytoplasmic
17.4%: Golgi
  8.7%: endoplasmic reticulum
  4.3%: vacuolar
  4.3%: extracellular, including cell wall
  4.3%: nuclear
  4.3%: vesicles of secretory system
```

>> prediction for CG51622-04 is mit (k = 23)

[0425] A search of the NOV13a protein against the Geneseq database, a proprietary database that contains sequences published in patents and patent publication, yielded several homologous proteins shown in Table 13D.

TABLE 13D
Geneseq Results for NOV13a

| | | NOV13a | Identities/ | |
|---|---|---|---|---|
| | | Residues/ | Similarities for | |
| Geneseq | Protein/Organism/Length | Match | the Matched | Expect |
| Identifier | [Patent #, Date] | Residues | Region | Value |
| AAY77126 | Human neurotransmission-associated | 28 . . . 518 | 484/491 (98%) | 0.0 |
| | protein (NTAP) 2799056 - Homo | 1 . . . 484 | 484/491 (98%) | |
| | sapiens, 484 aa. [WO200001821-A2, | | | |
| | 13-JAN-2000] | | | |
| AAG63976 | Amino acid sequence of a human | 28 . . . 518 | 483/491 (98%) | 0.0 |
| | Lng103 polypeptide - Homo sapiens, | 1 . . . 484 | 484/491 (98%) | |
| | 484 aa. [WO200161055-A2, 23-AUG- | | | |
| | 2001] | | | |
| ABU58539 | Human PRO polypeptide #140 - Homo | 28 . . . 518 | 483/491 (98%) | 0.0 |
| | sapiens, 484 aa. [US2003027272-A1, | 1 . . . 484 | 484/491 (98%) | |
| | 06-FEB-2003] | | | |
| ABU57070 | Human PRO polypeptide #140 - Homo | 28 . . . 518 | 483/491 (98%) | 0.0 |
| | sapiens, 484 aa. [US2003027280-A1, | 1 . . . 484 | 484/491 (98%) | |
| | 06-FEB-2003] | | | |
| ABU56075 | Human secreted/transmembrane | 28 . . . 518 | 483/491 (98%) | 0.0 |
| | protein, PRO1357 - Homo sapiens, 484 | 1 . . . 484 | 484/491 (98%) | |
| | aa. [US2003022298-A1, 30-JAN-2003] | | | |

[0426] In a BLAST search of public sequence databases, the NOV13a protein was found to have homology to the proteins shown in the BLASTP data in Table 13E.

TABLE 13E
Public BLASTP Results for NOV13a

| | | NOV13a | Identities/ | |
|---|---|---|---|---|
| Protein | | Residues/ | Similarities for | |
| Accession | | Match | the Matched | Expect |
| Number | Protein/Organism/Length | Residues | Portion | Value |
| Q8TDL5 | Von Ebner minor protein - Homo | 28 . . . 518 | 484/491 (98%) | 0.0 |
| | sapiens (Human), 484 aa. | 1 . . . 484 | 484/491 (98%) | |
| Q96HK6 | Similar to DNA segment, Chr 2, | 28 . . . 518 | 481/491 (97%) | 0.0 |
| | Massachusetts Institute of Technology | 1 . . . 484 | 484/491 (97%) | |
| | 19 - Homo sapiens (Human), 484 aa. | | | |
| Q9BWZ6 | DJ1187J4.1.1 (Novel protein similar to | 227 . . . 518 | 285/292 (97%) | e−154 |
| | mouse von Ebner salivary gland | 1 . . . 285 | 285/292 (97%) | |
| | protein, isoform 1.) - Homo sapiens | | | |
| | (Human), 285 aa (fragment). | | | |
| CAD13090 | Sequence 15 from Patent WO0174851 - | 28 . . . 337 | 276/310 (89%) | e−146 |
| | Homo sapiens (Human), 318 aa. | 1 . . . 294 | 278/310 (89%) | |
| Q8SPF8 | Von Ebner minor salivary gland protein- | 28 . . . 508 | 269/481 (55%) | e−144 |
| | like protein - Bos taurus (Bovine), 473 aa. | 1 . . . 472 | 353/481 (72%) | |

[0427] PFam analysis predicts that the NOV13a protein contains the domains shown in the Table 13F.

TABLE 13F
Domain Analysis of NOV13a

| | | | |
|---|---|---|---|
| Pfam | NOV13a | Identities/ | Expect |
| Domain | Match Region | Similarities | Value |
| | | for the | |
| | | Matched Region | |

### Example 14.

[0428] The NOV14 clone was analyzed, and the nucleotide and encoded polypeptide sequences are shown in Table 14A.

TABLE 14A
NOV14 Sequence Analysis

| | | |
|---|---|---|
| NOV14a, CG51821-01 | SEQ ID NO: 397 | 5103 bp |
| DNA Sequence | ORF Start: ATG at 1 | ORF Stop: TGA at 5101 |

ATGGGCTTCTTGCCCAAGCTTCTCCTCCTGGCCTCAGCCGTTCTTCCCCCAGGCCAGGCCTCATGGGG
CGTCTCCAGTCCCCAGGACGTGCAGGGTGTGAAGGGGTCTTGCCTGCTTATCCCCTGCATCTTCAGCT
TCCCTGCCGACGTGGAGGTGCCCGACGGCATCACGGCCATCTGGTACTACGACTACTCGGGCCAGCGG
CAGGTGGTGAGCCACTCGGCGGACCCCAAGCTGGTGGAGGCCCGCTTCCGCGGCCGCACCGAGTTCAT
ACAACTTCCGCTTCGAGATCAGTGAGGTCAACCGCTGGTCAGATGTGAAAGGCACCTTGGTCACAGTA
ACAGGTGATCCCAGGGTGCCCACCATTGCCTCCCCGGTGGAGCTTCTCGAGGGCACAGAGGTGGACTT
CAACTGCTCCACTCCCTACGTATGCCTGCAGGAGCAGGTCAGACTGCAGTGGCAAGGCCAGGACCCTG
CTCGCTCTGTCACCTTCAACAGCCAGAAGTTTGAGCCCACCGGCGTCGGCCACCTGGAGACCCTCCAC
ATGGCCATGTCCTGGCAGGACCACGGCCGGATCCTGCGCTGCCAGCTCTCCGTGGCCAATCACAGGGC
TCAGAACGAGATTCACCTCCAAGTGAAGTGTGCCCCCAAGGGTGTGAAGATCCTCCTCAGCCCCTCGG
GGAGGAACATCCTTCCAGGTGAGCTGGTCACACTCACCTGCCAGGTGAACAGCAGCTACCCTGCAGTC
AGTTCCATTAAGTGGCTCAAGGATGGGGTACGCCTCCAAACCAAGACTGGTGTGCTGCACCTGCCCCA
GGCAGCCTGGAGCGATGCTGGCGTCTACACCTGCCAAGCTGAGAACGGCGTGGGCTCTTTGGTCTCAC
CCCCCATCAGCCTCCACATCTTCGTGGCTGAGGTCCAGGTGAGCCCAGCAGGTCCCATCCTGGAGAAC
CAGACAGTGACACTAGTCTGCAACACACCCAATGAGGCACCCAGTGATCTCCGCTACAGCTGGTACAA
GAACCATGTCCTGCTGGAGGATGCCCACTCCCATACCCTCCGGCTGCACTTGGCCACTAGGGCTGATA
CTGGCTTCTACTTCTGTGAGGTGCAGAACGTCCATGGCAGCGAGCGCTCGGGCCCTGTCAGCGTGGTA
GTCACAGACCCGCCTCTCACTCCAGTCCTGACAGCCTTCCTGGAGACCCAGGCGGGACTTGTGGGCAT
CCTTCACTGCTCTGTGGTCAGTGAGCCCCTGGCCACACTGGTGCTGTCACATGGGGGTCATATCCTGG
CCTCCACCTCCGGGGACAGTGATCACAGCCCACGCTTCAGTGGTACCTCTGGTCCCAACTCCCTGCGC
CTGGAGATCCGAGACCTGGAGGAAACTGACAGTGGGGAGTACAAGTGCTCAGCCACCAACTCCCTTGG
AAATGCAACCTCCACCCTGGACTTCCATGCCAATGTCGCCCGTCTCCTCATCAGCCCGGCAGCCGAGG
TGGTGGAAGGACAGGCAGTGACACTGAGCTGCAGAAGCGGCCTAAGCCCCACACCTGATGCCCGCTTC
TCCTGGTACCTGAATGGAGCCCTGCTTCACGAGGGTCCCGGCAGCAGCCTCCTGCTCCCCGCGGCCTC
CAGCACTGACGCCGGCTCATACCACTGCCGGGCCCGGGACGGCCACAGTGCCAGTGGCCCCTCTTCGC
CAGCTGTTCTCACTGTGCTCTGTGAGCAGCCACCACGACAACCAACATTCACCACCAGGCTGGACCTT
GATGCCGCTGGGGCCGGGGCTGGACGGCGAGGCCTCCTTTTGTGCCGTGTGGACAGCGACCCCCCCGC
CAGGCTGCAGCTGCTCCACAAGGACCGTGTTGTGGCCACTTCCCTGCCATCAGGGGGTGGCTGCAGCA
CCTGTGGGGGCTGTTCCCCACGCATGAAGGTCACCAAAGCCCCCAACTTGCTGCGTGTGGAGATTCAC
AACCCTTTGCTGGAAGAGGAGGGCTTGTACCTCTGTGAGGCCAGCAATGCCCTGGGCAACGCCTCCAC
CTCAGCCACCTTCAATGGCCAGGCCACTGTCCTGGCCATTGCACCATCACACACACTTCAGGAGGGCA
AGAAGCACAACTTGACTTGCAACGTGAGCCGGGAAGCTGCTGGCAGCCCTGCTAACTTCTCCTGGTTC
CGAAATGGGGTGCTGTGGGCCCAGGGTCCCCTGGAGACCGTGACACTGCTGCCCGTGGCCAGAACTGA
TGCTGCCCTTTACGCCTGCCGCATCCTGACTGAGGCTGGTGCCCAGCTCTCCACTCCCGTGCTCCTGA
GTGTACTCTATCCCCCGGACCGTCCAAAGCTGTCAGCCCTCCTAGACATGGGCCAGGGCCACATGGCT
CTGTTCATCTGCACTGTGGACAGCCGCCCCCTGGCCTTGCTGGCCTTGTTCCATGGGGAGCACCTCCT
GGCCACCAGCCTGGGTCCCCAGGTCCCATCCCATGGTCGGTTCCAGGCTAAAGCTGAGGCCAACTCCC
TGAAGTTAGAGGTCCGAGAACTGGGCCTTGGGGACTCTGGCAGCTACCGCTGTGAGGCCACAAATGTT
TGAGCTCCAAGAGGGCCAGGCTGTGGTCCTGAGCTGCCAGGTACACACAGGAGTCCCAGAGGGGACCT
CATATCGTTGGTATCGGGATGGCCAGCCCCTCCAGGAGTCGACCTCGGCCACGCTCCGCTTTGCAGCC
AGCTGCACCCATCAGCCTCCACGTGTCCTGTAAGGATGCCCCACGCCACGTCACACTCACTACCCTGA
TGGACACAGGCCCTGGACGACTGGGCCTCCTCCTGTGCCGTGTGGACAGTGACCCTCCGGCCCAGCTG
TCCCAGGCTGCATGTGGCTGTGGCCCCCAACACACTGCGTCTGGAGATCCACGGGGCTATGCTGGAGG
ATGAGGGTGTCTATATCTGTGAGGCCTCCAACACCCTGGGCCAGGCCTCGGCCTCAGCTGACTTCGAC
GCTCAAAGCTGTGAATGTGCAGGTGTGGCCCGGGGCTACCGTGCGGGAGGGGCAGCTGGTGAACCTGA
CCTGCGCCTGACCTACCTCCTGGAGAGCCATGGCGGGCAGCTGGCCCTGGTACTGTGCACTGTGGACA
GCCGCCCGCCCGCCCAGCTGGCCCTCAGCCACGCCGGTCGCCTCTTGGCCTCCTCGACAGCAGCCTCT
GTCCCCAACACCCTGCGCCTGGAGCTGCGAGGGCCACAGCCCAGGGATGAGGGTTTCTACAGCTGCTC
TGCCCGCAGCCCTCTGGGCCAGGCCAACACGTCCCTGGAGCTGCGGCTGGAGGTGCGGGTGATCCTGG
CTCCGGAGGCTGCCGTGCCTGAAGGTGCCCCCATCACAGTGACCTGTGCGGACCCTGCTGCCCACGCA
CCCACACTCTATACTTGGTACCACAACGGTCGTTGGCTGCAGGAGGGTCCAGCTGCCTCACTCTCATT
CCTGGTGGCCACGCGGGCTCATGCAGGCGCCTACTCTTGCCAGGCCCAGGATGCCCAGGGCACCCGCA
GCTCCCGTCCTGCTGCCCTGCAAGTCCTCTGTGCCCCTCAGGACGCTGTCCTGTCCTCCTTCCGGGAC
TCCAGGGCCAGATCCATGGCTGTGATACAGTGCACTGTGGACAGTGAGCCACCTGCTGAGCTGGCCCT
ATCTCATGATGGCAAGGTGCTGGCCACGAGCAGCGGGGTCCACAGCTTGGCATCAGGGACAGGCCATG
TCCAGGTGGCCCGAAACGCCCTACGGCTGCAGGTGCAAGATGTGCCTGCAGGTGATGACACCTATGTT
TGCACAGCCCAAAACTTGCTGGGCTCAATCAGCACCATCGGGCGGTTGCAGGTAGAAGGTGAGTGGCG
CGTGGTGGCAGAGCCTGGCCTGGACGTGCCTGAGGGCGCTGCCCTGAACCTCAGCTGCCGCCTCCTGG
GTGGCCCTGGGCCTGTGGGCAACTCCACCTTTGCATGGTTCTGGAATGACCGGCGGCTGCACGCGGAG
CCTGTGCCCACTCTCGCCTTCACCCACGTGGCTCGTGCTCAAGCTGGGATGTACCACTGCCTGGCTGA
GCTCCCCACTGGGGCTGCTGCCTCTGCTCCAGTCATGCTCCGTGTGCTCTACCCTCCCAAGACGCCCA
CCATGATGGTCTTCGTGGAGCCTGAGGGTGGCCTCCGGGGCATCCTGGATTGCCGAGTGGACAGCGAG
CCGCTCGCCAGCCTGACTCTCCACCTTGGCAGTCGACTGGTGGCCTCCAGTCAGCCCCAGGGTGCTCC
TGCAGAGCCACACATCCATGTCCTGGCTTCCCCCAATGCCCTGAGGGTGGACATCGAGGCGCTGAGGC
CCAGCGACCAAGGGGAATACATCTGTTCTGCCTCAAATGTCCTGGGCCCTGCCTCTACCTCCACCTAC
TTTGGGGTCAGAGCCCTGCACCGCCTGCATCAGTTCCAGCAGCTGCTCTGGGTCCTGGGACTGCTGGT
GGGCCTCCTGCTCCTGCTGTTGGGCCTGGGGGCCTGCTACACCTGGAGAAGGAGGCGTGTTTGTAAGC
AGAGCATGGGCGAGAATCCAGGGCGGGCATCGTCTTTCCATTTACTGCCTCTAGCTGGGTCTTCAAGG
TGA

| | | | |
|---|---|---|---|
| NOV14a, CG51821-01 | | | |
| Protein Sequence | SEQ ID NO: 398 | 1700 aa | MW at 180833.0kD |

MGFLPKLLLLASAVLPPGQASWGVSSPQDVQGVKGSCLLIPCIFSFPADVEVPDGITAIWYYDYSGQR
QVVSHSADPKLVEARFRGRTEFMGNPEHRVCNLLLKDLQPEDSGSYNFRFEISEVNRWSDVKGTLVTV
TGDPRVPTIASPVELLEGTEVDFNCSTPYVCLQEQVRLQWQGQDPARSVTFNSQKFEPTGVGHLETLH
MAMSWQDHGRILRCQLSVANHRAQSEIHLQVKCAPKGVKILLSPSGRNILPGELVTLTCQVNSSYPAV
SSIKWLKDGVRLQTKTGVLHLPQAAWSDAGVYTCQAENGVGSLVSPPISLHIFVAEVQVSPAGPILEN
QTVTLVCNTPNEAPSDLRYSWYKNHVLLEDAHSHTLRLHLATRADTGFYFCEVQNVHGSERSGPVSVV
VTDPPLTPVLTAFLETQAGLVGILHCSVVSEPLATLVLSHGGHILASTSGDSDHSPRFSGTSGPNSLR
LEIRDLEETDSGEYKCSATNSLGNATSTLDFHAIVARLLISPAAEVVEGQAVTLSCRSGLSPTPDARF
SWYLNGALLHEGPGSSLLLPAASSTDAGSYHCRARDGHSASGPSSPAVLTVLCEQPPRQPTFTTRLDL
DAAGAGAGRRGLLLCRVDSDPPARLQLLHKDRVVATSLPSGGGCSTCGGCSPRMKVTKAPNLLRVEIH
NPLLEEEGLYLCEASNALGNASTSATFNGQATVLAIAPSHTLQEGTEANLTCNVSREAAGSPANFSWF
RNGVLWAQGPLETVTLLPVARTDAALYACRILTEAGAQLSTPVLLSVLYPPDRPKLSALLDMGQGHMA
LFICTVDSRPLALLALFHGEHLLATSLGPQVPSHGRFQAKAEANSLKLEVRELGLGDSGSYRCEATNV
LGSSNTSLFFQVRGAWVQVSPSPELQEGQAVVLSCQVHTGVPEGTSYRWYRDGQPLQESTSATLRFAA
ITLTQAGAYHCQAQAPGSATTSLAAPISLHVSCKDAPRHVTLTTLMDTGPGRLGLLLCRVDSDPPAQL
RLLHGDRLVASTLQGVGGPEGSSPRLHVAVAPNTLRLEIHGAMLEDEGVYICEASNTLGQASASADFD
AQSCECAGVARGYRAGGAAGEPDLPCVDHSPGPAHLHMVPGWAAAPGCPLHPPAQRHSQGCHLLPLRC
GPPWSGTPPLQTYHLGRPHAPRNLRLTYLLESHGGQLALvLCTVDSRPPAQLALSHAGRLLASSTAAS
VPNTLRLELRGPQPRDEGFYSCSARSPLGQANTSLELRLEVRVILAPEAAVPEGAPITVTCADPAAHA
PTLYTWYHNGRWLQEGPAASLSFLVATRAHAGAYSCQAQDAQGTRSSRPAALQVLCAPQDAVLSSFRD
SRARSMAVIQCTVDSEPPAELALSHDGKVLATSSGVHSLASGTGHVQVARNALRLQVQDVPAGDDTYV
CTAQNLLGSISTIAGRLQVEGEWRWAEPGLDVPEGAALNLSCRLLGGPGPVGNSTFAWFWNDRRLHAE
PVPTLAFTHVARAQAGMYHCLAELPTGAAASAPVMLRVLYPPKTPTMMVFVEPEGGLRGILDCRVDSE
PLASLTLHLGSRLVASSQPQGAPAEPHIHVLASPNALRVDIEALRPSDQGEYICSASNVLGPASTSTY
FGVRALHRLHQFQQLLWVLGLLVGLLLLLLGLGACYTWRRRRVCKQSMGENPGRASSFHLLPLAGSSR

| | | |
|---|---|---|
| NOV14b, 229823091 | SEQ ID NO: 399 | 717 bp |
| DNA Sequence | ORF Start: at 1 | ORF Stop: end of sequence |

AGATCTTCATGGGGCGTCTCCAGTCCCCAGGACGTGCAGGGTGTGAAGGGGTCTTGCCTGCTTATCCC
CTGCATCTTCAGCTTCCCTGCCGACGTGGAGGTGCCCGACGGCATCACGGCCATCTGGTACTACGACT
ACTCGGGCCAGCGGCAGGTGGTGAGCCACTCGGCGGACCCCAAGCTGGTGGAGGCCCGCTTCCGCGGC
CGCACCGAGTTCATGGGGAACCCCGAGCACAGGGTGTGCAACCTGCTGCTGAAGGACCTGCAGCCCGA
GGACTCTGGTTCCTACAACTTCCGCTTCGAGATCAGTGAGGTCAACCGCTGGTCAGATGTGAAAGGCA
CCTTGGTCACAGTAACAGAGGAGCCCAGGGTGCCCACCATTGCCTCCCCGGTGGAGCTTCTCGAGGGC
ACAGAGGTGGACTTCAACTGCTCCACTCCCTACGTATGCCTGCAGGAGCAGGTCAGACTGCAGTGGCA
AGGCCAGGACCCTGCTCGCTCTGTCACCTTCAACAGCCAGAAGTTTGAGCCCACCGGCGTCGGCCACC
TGGAGACCCTCCACATGGCCATGTCCTGGCAGGACCACGGCCGGATCCTGCGCTGCCAGCTCTCCGTG
GCCAATCACAGGGCTCAGAGCGAGATTCACCTCCAAGTGAAGTATGCCCCCAGGGGTGTGAAGATCCT
CCTCAGCCCCTCGGGGAGGAACATCCTTCCAGTCGAC

| | | | |
|---|---|---|---|
| NOV14b, 229823091 | | | |
| Protein Sequence | SEQ ID NO: 400 | 239 aa | Mw at 26882.1kD |

RSSWGVSSPQDVQGVKGSCLLIPCIFSFPADVEVPDGITAIWYYDYSGQRQVVSHSADPKLVEARFRG
RTEFMGNPEHRVCNLLLKDLQPEDSGSYNFRFEISEVNRWSDVKGTLVTVTEEPRVPTIASPVELLEG
TEVDFNCSTPYVCLQEQVRLQWQGQDPARSVTFNSQKFEPTGVGHLETLHMAMSWQDHGRILRCQLSV
ANHRAQSEIHLQVKYAPRGVKILLSPSGRNILPVD

| | | |
|---|---|---|
| NOV14c, 229823107 | SEQ ID NO: 401 | 717 bp |
| DNA Sequence | ORF Start: at 1 | ORF Stop: end of sequence |

AGATCTTCATGGGGCGTCTCCAGTCCCCAGGACGTGCAGGGTGTGAAGGGGTCTTGCCTGCTTATCCC
CTGCATCTTCAGCTTCCCTGCCGACGTGGAGGTGCCCGACGGCATCACGGCCATCTGGTACTACGACT
ACTCGGGCCAGCGGCAGGTGGTGAGCCACTCGGCGGACCCCAAGCTGGTGGAGGCCCGCTTCCGCGGC
CGCACCGAGTTCATGGGGAACCCCGAGCACAGGGTGTGCAACCTGCTGCTGAAGGACCTGCAGCCCGA
GGACTCTGGTTCCTACAACTTCCGCTTCGAGATCAGTGAGGTCAACCGCTGGTCAGATGTGAAAGGCA
CCTTGGTCACAGTAACAGAGGAGCCCAGGGTGCCCACCATTGCCTCCCCGGTGGAGCTTCTCGAGGGC
ACAGAGGTGGACTTCAACTGCTCCACTCCCTACGTATGCCTGCAGGAGCAGGTCAGACTGCAGTGGCA
AGGCCAGGACCCTGCTCGCTCTGTCACCTTCAACAGCCAGAAGTTTGAGCCCACCGGCGTCGGCCACC
TGGAGACCCTCCACATGGCCATGTCCTGGCAGGACCACGGCCGGATCCTGCGCTGCCAGCTCTCCATG
GCCAATCACAGGGCTCAGAGCGAGATTCACCTCCAAGTGAAGTATGCCCCCAGGGGTGTGAAGATCCT
CCTCAGCCCCTCGGGGAGGAACATCCTTCCAGTCGAC

| | | | |
|---|---|---|---|
| NOV14c, 229823107 | | | |
| Protein Sequence | SEQ ID NO: 402 | 239 aa | MW at 26914.2kD |

RSSWGVSSPQDVQGVKGSCLLIPCIFSFPADVEVPDGITAIWYYDYSGQRQVVSHSADPKLVEARFRG
RTEFMGNPEHRVCNLLLKDLQPEDSGSYNFRFETSEVNRWSDVKGTLVTVTEEPRVPTIASPVELLEG
TEVDFNCSTPYVCLQEQVRLQWQGQDPARSVTFNSQKFEPTGVGHLETLHMAMSWQDHGRILRCQLSM
ANHRAQSEIHLQVKYAPRGVKILLSPSGRNILPVD

| | | |
|---|---|---|
| NOV14d, 229823095 | SEQ ID NO: 403 | 717 bp |
| DNA Sequence | ORF Start: at 1 | ORF Stop: end of sequence |

AGATCTTCATGGGGCGTCTCCAGTCCCCAGGACGTGCAGGGTGTGAAGGGGTCTTGCCTGCTTATCCC
CTGCATCTTCAGCTTCCCTGCCGACGTGGAGGTGCCCGACGGCATCACGGCCATCTGGTACTACGACT
ACTCGGGCCAGCGGCAGGTGGTGAGCCACTCGGTGGACCCCAAGCTGGTGGAGGCCCGCTTCCGCGGC
CGCACCGAGTTCATGGGGAACCCCGAGCACAGGGTGTGCAACCTGCTGCTGAAGGACCTGCAGCCCGA
GGACTCTGGTTCCTACAACTTCCGCTTCGAGATCAGTGAGGTCAACCGCTGGTCAGATGTGAAAGGCA
CCTTGGTCACAGTAACAGAGGAGCCCAGGGTGCCCACCATTGCCTCCCCGGTGGAGCTTCTCGAGGGC
ACAGAGGTGGACTTCAACTGCTCCACTCCCTACGTATGCCTGCAGGAGCAGGTCAGACTGCAGTGGCA
AGGCCAGGACCCTGCTCGCTCTGTCACCTTCAACAGCCAGAAGTTTGAGCCCACCGGCGTCGGCCACC
TGGAGACCCTCCACATGGCCATGTCCTGGCAGGACCACGGCCGGATCCTGCGCTGCCAGCTCTCCATG
GCCAATCACAGGGCTCAGAGCGAGATTCACCTCCAAGTGAAGTATGCCCCCAAGGGTGTGAAGATCCT
CCTCAGCCCCTCGGGGAGGAACATCCTTCCAGTCGAC

| | | | |
|---|---|---|---|
| NOV14d, 229823095 | | | |
| Protein Sequence | SEQ ID NO: 404 | 239 aa | Mw at 26914.2kD |

RSSWGVSSPQDVQGVKGSCLLIPCIFSFPADVEVPDGITAIWYYDYSGQRQVVSHSVDPKLVEARFRG
RTEFMGNPEHRVCNLLLKDLQPEDSGSYNFRFEISEVNRWSDVKGTLVTVTEEPRVPTIASPVELLEG
TEVDFNCSTPYVCLQEQVRLQWQGQDPARSVTFNSQKFEPTGVGHLETLHMAMSWQDHGRILRCQLSM
ANHRAQSEIHLQVKYAPKGVKILLSPSGRNILPVD

| | | |
|---|---|---|
| NOV14e, CG51821-02 | SEQ ID NO: 405 | 717 bp |
| DNA Sequence | ORF Start: at 7 | ORF Stop: at 712 |

AGATCTTCATGGGGCGTCTCCAGTCCCCAGGACGTGCAGGGTGTGAAGGGGTCTTGCCTGCTTATCCC
CTGCATCTTCAGCTTCCCTGCCGACGTGGAGGTGCCCGACGGCATCACGGCCATCTGGTACTACGACT
ACTCGGGCCAGCGGCAGGTGGTGAGCCACTCGGCGGACCCCAAGCTGGTGGAGGCCCGCTTCCGCGGC
CGCACCGAGTTCATGGGGAACCCCGAGCACAGGGTGTGCAACCTGCTGCTGAAGGACCTGCAGCCCGA
GGACTCTGGTTCCTACAACTTCCGCTTCGAGATCAGTGAGGTCAACCGCTGGTCAGATGTGAAAGGCA
CCTTGGTCACAGTAACAGAGGAGCCCAGGGTGCCCACCATTGCCTCCCCGGTGGAGCTTCTCGAGGGC
ACAGAGGTGGACTTCAACTGCTCCACTCCCTACGTATGCCTGCAGGAGCAGGTCAGACTGCAGTGGCA
AGGCCAGGACCCTGCTCGCTCTGTCACCTTCAACAGCCAGAAGTTTGAGCCCACCGGCGTCGGCCACC
TGGAGACCCTCCACATGGCCATGTCCTGGCAGGACCACGGCCGGATCCTGCGCTGCCAGCTCTCCGTG
GCCAATCACAGGGCTCAGAGCGAGATTCACCTCCAAGTGAAGTATGCCCCCAGGGGTGTGAAGATCCT
CCTCAGCCCCTCGGGGAGGAACATCCTTCCAGTCGAC

| | | | |
|---|---|---|---|
| NOV14e, CG51821 -02 | | | |
| Protein Sequence | SEQ ID NO: 406 | 235 aa | MW at 26424.7kD |

SWGVSSPQDVQGVKGSCLLIPCIFSFPADVEVPDGITAIWYYDYSGQRQVVSHSADPKLVEARFRGRT
EFMGNPEHRVCNLLLKDLQPEDSGSYNFRFEISEVNRWSDVKGTLVTVTEEPRVPTIASPVELLEGTE
VDFNCSTPYVCLQEQVRLQWQGQDPARSVTFNSQKFEPTGVGHLETLHMAMSWQDHGRILRCQLSVAN
HRAQSEIHLQVKYAPRGVKILLSPSGRNILP

| | | |
|---|---|---|
| NOV14f, CG51821-03 | SEQ ID NO: 407 | 717 bp |
| DNA Sequence | ORF Start: at 7 | ORF Stop: at 712 |

AGATCTTCATGGGGCGTCTCCAGTCCCCAGGACGTGCAGGGTGTGAAGGGGTCTTGCCTGCTTATCCC
CTGCATCTTCAGCTTCCCTGCCGACGTGGAGGTGCCCGACGGCATCACGGCCATCTGGTACTACGACT
CGCACCGAGTTCATGGGGAACCCCGAGCACAGGGTGTGCAACCTGCTGCTGAAGGACCTGCAGCCCGA
CCTTGGTCACAGTAACAGAGGAGCCCAGGGTGCCCACCATTGCCTCCCCGGTGGAGCTTCTCGAGGGC
ACAGAGGTGGACTTCAACTGCTCCACTCCCTACGTATGCCTGCAGGAGCAGGTCAGACTGCAGTGGCA
AGGCCAGGACCCTGCTCGCTCTGTCACCTTCAACAGCCAGAAGTTTGAGCCCACCGGCGTCGGCCACC
TGGAGACCCTCCACATGGCCATGTCCTGGCAGGACCACGGCCGGATCCTGCGCTGCCAGCTCTCCATG
CCTCAGCCCCTCGGGGAGGAACATCCTTCCAGTCGAC

| | | | |
|---|---|---|---|
| NOV14f, CG51821-03 | | | |
| Protein Sequence | SEQ ID NO: 408 | 235 aa | MW at 26456.8kD |

SWGVSSPQDVQGVKGSCLLIPCIFSFPADVEVPDGITAIWYYDYSGQRQVVSHSVDPKLVEARFRGRT
EFMGNPEHRVCNLLLKDLQPEDSGSYNFRFEISEVNRWSDVKGTLVTVTEEPRVPTIASPVELLEGTE
VDFNCSTPYVCLQEQVRLQWQGQDPARSVTFNSQKFEPTGVGHLETLHMAMSWQDHGRILRCQLSMAN
HRAQSEIHLQVKYAPKGVKILLSPSGRNILP

| | | |
|---|---|---|
| NOV14g, CG51821-04 | SEQ ID NO: 409 | 5130 bp |
| DNA Sequence | ORF Start: ATG at 1 | ORF Stop: TGA at 5128 |

ATGGGCTTCTTGCCCAAGCTTCTCCTCCTGGCCTCATTCTTCCCAGCAGGCCAGGCCTCATGGGGCGT
CTCCAGTCCCCAGGACGTGCAGGGTGTGAAGGGGTCTTGCCTGCTTATCCCCTGCATCTTCAGCTTCC
CTGCCGACGTGGAGGTGCCCGACGGCATCACGGCCATCTGGTACTACGACTACTCGGGCCAGCGGCAG
GTGGTGAGCCACTCGGCGGACCCCAAGCTGGTGGAGGCCCGCTTCCGCGGCCGCACCGAGTTCATGGG
GAACCCCGAGCACAGGGTGTGCAACCTGCTGCTGAAGGACCTGCAGCCCGAGGACTCTGGTTCCTACA
ACTTCCGCTTCGAAATCAGTGAGGTCAACCGCTGGTCAGATGTGAAAGGCACCTTGGTCACAGTAACA
GAGGAGCCCAGGGTGCCCACCATTGCCTCCCCGGTGGAGCTTCTCGAGGGCACAGAGGTGGACTTCAA
CTGCTCCACTCCCTACGTATGCCTGCAGGAGCAGGTCAGACTGCAGTGGCAAGGCCAGGACCCTGCTC
GCTCTGTCACCTTCAACAGCCAGAAGTTTGAGCCCACCGGCGTCGGCCACCTGGAGACCCTCCACATG
GCCATGTCCTGGCAGGACCACGGCCGGATCCTGCGCTGCCAGCTCTCCGTGGCCAATCACAGGGCTCA
GAGCGAGATTCACCTCCAAGTGAAGTATGCCCCCAAGGGTGTGAAGATCCTCCTCAGCCCCTCGGGGA
GGAACATCCTTCCAGGTGAGCTGGTCACACTCACCTGCCAGGTGAACAGCAGCTACCCTGCAGTCACT
TCCATTAAGTGGCTCAAGGATGGGGTACGCCTCCAAACCAAGACTGGTGTGCTGCACCTGCCCCAGGC
AGCCTGGAGCGATGCTGGCGTCTACACCTGCCAAGCTGAGAACGGCGTGGGCTCTTTGGTCTCACCCC
CCATCAGCCTCCACATCTTCATGGCTGAGGTCCAGGTGAGCCCAGCAGGTCCCATCCTGGAGAACCAG
ACAGTGACACTAGTCTGCAACACACCCAATGAGGCACCCAGTGATCTCCGCTACAGCTGGTACAAGAA
CCATGTCCTGCTGGAGGATGCCCACTCCCATACCCTCCGGCTGCACTTGGCCACTAGGGCTGATACTG
GCTTCTACTTCTGTGAGGTGCAGAACGTCCATGGCAGCGAGCGCTCGGGCCCTGTCAGCGTGGTAGTC
AACCACCCGCCTCTCACTCCAGTCCTGACAGCCTTCCTGGAGACCCAGGCGGGACTTGTGGGCATCCT
TCACTGCTCTGTGGTCAGTGAGCCCCTGGCCACACTGGTGCTGTCACATGGGGGTCATATCCTGGCCT
CCACCTCCGGGGACAGTGATCACAGCCCACGCTTCAGTGGTACCTCTGGTCCCAACTCCCTGCGCCTG
GAGATCCGAGACCTGGAGGAAACTGACAGTGGGGAGTACAAGTGCTCAGCCACCAACTCCCTTGGAAA
TGCAACCTCCACCCTGGACTTCCATGCCAATGCCGCCCGTCTCCTCATCAGCCCGGCAGCCGAGGTGG
TGGAAGGACAGGCAGTGACACTGAGCTGCAGAAGCGGCCTAAGCCCCACACCTGATGCCCGCTTCTCC
TGGTACCTGAATGGAGCCCTGCTTCACGAGGGTCCCGGCAGCAGCCTCCTGCTCCCCGCGGCCTCCAG
CACTGACGCCGGCTCATACCACTGCCGGGCCCGGGACGGCCACAGTGCCAGTGGCCCCTCTTCGCCAG
GGGGCCGGGGCTGGACGGCGAGGCCTCCTTTTGTGCCGTGTGGACAGCGACCCCCCCGCCAGGCTGCA
GCTGCTCCACAAGGACCGTGTTGTGGCCACTTCCCTGCCATCAGGGGGTGGCTGCAGCACCTGTGGGG
GCTGTTCCCCACGCATGAAGGTCACCAAAGCCCCCAACTTGCTGCGTGTGGAGATTCACAACCCTTTG
CTGGAAGAGGAGGGCTTGTACCTCTGTGAGGCCAGCAATGCCCTGGGCAACGCCTCCACCTCAGCCAC
CTTCAATGGCCAGGCCACTGTCCTGGCCATTGCACCATCACACACACTTCAGGAGGGCACAGAAGCCA
ACTTGACTTGCAACGTGAGCCGGGAAGCTGCTGGCAGCCCTGCTAACTTCTCCTGGTTCCGAAATGGG
GTGCTGTGGGCCCAGGGTCCCCTGGAGACCGTGACACTGCTGCCCGTGGCCAGAACTGATGCTGCCCT
TTACGCCTGCCGCATCCTGACTGAGGCTGGTGCCCAGCTCTCCACTCCCGTGCTCCTGAGTGTACTCT
ATCCCCCGGACCGTCCAAAGCTGTCAGCCCTCCTAGACATGGGCCAGGGCCACATGGCTCTGTTCATC
TGCACTGTGGACAGCCGCCCCCTGGCCTTGCTGGCCTTGTTCCATGGGGAGCACCTCCTGGCCACCAG
CCTGGGTCCCCAGGTCCCATCCCATGGTCGGTTCCAGGCTAAAGCTGAGGCCAACTCCCTGAAGTTAG
AGGTCCGAGAACTGGGCCTTGGGGACTCTGGCAGCTACCGCTGTGAGGCCACAAATGTTCTTGGATCA
TCCAACACCTCACTCTTCTTCCAGGTCCGAGGAGCCTGGGTCCAGGTGTCACCATCACCTGAGCTCCA
AGAGGGCCAGGCTGTGGTCCTGAGCTGCCAGGTACACACAGGAGTCCCAGAGGGGACCTCATATCGTT
GGTATCGGGATGGCCAGCCCCTCCAGGAGTCGACCTCGGCCACGCTCCGCTTTGCAGCCATAACTTTG
ACACAAGCTGGGGCCTATCATTGCCAAGCCCAGGCCCCAGGCTCAGCCACCACGAGCCTAGCTGCACC
CATCAGCCTCCACGTGTCCTATGCCCCACGCCACGTCACACTCACTACCCTGATGGACACAGGCCCTG
GACGACTGGGCCTCCTCCTGTGCCGTGTGGACAGTGACCCTCCGGCCCAGCTGCGGCTGCTCCACGGG
GATCGCCTTGTGGCCTCCACCCTACAAGGTGTGGGGGGACCCGAAGGCAGCTCTCCCAGGCTGCATGT
GGCTGTGGCCCCCAACACACTGCGTCTGGAGATCCACGGGGCTATGCTGGAGGATGAGGGTGTCTATA
TCTGTGAGGCCTCCAACACCCTGGGCCAGGCCTCGGCCTCAGCTGACTTCGACGCTCAAGCTGTGAAT
GTGCAGGTGTGGCCCGGGGCTACCGTGCGGGAGGGGCAGCTGGTGAACCTGACCTGCCTTGTGTGGAC
CACTCACCCGGCCCAGCTCACCTACACATGGTACCAGGATGGGCAGCAGCGCCTGGATGCCCACTCCA
GCACCCCGCCTCTCCAGACCTATCACCTTGGACGTCCTCTACGCGCCCCGCAACCTGCGCCTGACCTA
CCTCCTGGAGAGCCATGGCGGGCAGCTGGCCCTGGTACTGTGCACTGTGGACAGCCGCCCGCCCGCCC
AGCTGGCCCTCAGCCACGCCGGTCGCCTCTTGGCCTCCTCGACAGCAGCCTCTGTCCCCAACACCCTG
CGCCTGGAGCTGCGAGGGCCACAGCCCAGGGATGAGGGTTTCTACAGCTGCTCTGCCCGCAGCCCTCT
GGGCCAGGCCAACACGTCCCTGGAGCTGCGGCTGGAGGGTGTGCGGGTGATCCTGGCTCCGGAGGCTG
CCGTGCCTGAAGGTGCCCCCATCACAGTGACCTGTGCGGACCCTGCTGCCCACGCACCCACACTCTAT
ACTTGGTACCACAACGGTCGTTGGCTGCAGGAGGGTCCAGCTGCCTCACTCTCATTCCTGGTGGCCAC
GCGGGCTCATGCAGGCGCCTACTCTTGCCAGGCCCAGGATGCCCAGGGCACCCGCAGCTCCCGTCCTG
CTGCCCTGCAAGTCCTCTATGCCCCTCAGGACACTGTCCTGTCCTCCTTCCGGGACTCCAGGGCCAGA
TCCATGGCTGTGATACAGTGCACTGTGGACAGTGAGCCACCTGCTGAGCTGGCCCTATCTCATGATGG
CAAGGTGCTGGCCACGAGCAGCGGGGTCCACAGCTTGGCATCAGGGACAGGCCATGTCCAGGTGGCCC
GAAACGCCCTACGGCTGCAGGTGCAAGATGTGCCTGCAGGTGATGACACCTATGTTTGCACAGCCCAA
AACTTGCTGGGCTCAATCAGCACCATCGGGCGGTTGCAGGTAGAAGGTGCACGCGTGGTGGCAGAGCC
TGGGCAACTCCACCTTTGCATGGTTCTGGAATGACCGGCGGCTGCACGCGGAGCCTGTGCCCACTCTC
GCCTTCACCCACGTGGCTCGTGCTCAAGCTGGGATGTACCACTGCCTGGCTGAGCTCCCCACTGGGGC
TGCTGCCTCTGCTCCAGTCATGCTCCGTGTGCTCTACCCTCCCAAGACGCCCACCATGATGGTCTTCG
TGGAGCCTGAGGGTGGCCTCCGGGGCATCCTGGATTGCCGAGTGGACAGCGAGCCGCTCGCCAGCCTG
ACTCTCCACCTTGGCAGTCGACTGGTGGCCTCCAGTCAGCCCCAGGGTGCTCCTGCAGAGCCACACAT
CCATGTCCTGGCTTCCCCCAATGCCCTGAGGGTGGACATCGAGGCGCTGAGGCCCAGCGACCAAGGGG
AATACATCTGTTCTGCCTCAAATGTCCTGGGCTCTGCCTCTACCTCCACCTACTTTGGGGTCAGAGCC
CTGCACCGCCTGCATCAGTTCCAGCAGCTGCTCTGGGTCCTGGGACTGCTGGTGGGCCTCCTGCTCCT
GCTGTTGGGCCTGGGGGCCTGCTACACCTGGAGAAGGAGGCGTGTTTGTAAGCAGAGCATGGGCGAGA
ATTCGGTGGAGATGGCTTTTCAGAAAGAGACCACGCAGCTCATTGATCCTGATGCAGCCACATGTGAG
ACCTCAACCTGTGCCCCACCCCTGGGCTGA

| | | | |
|---|---|---|---|
| NOV14g, CG51821-04 | | | |
| Protein Sequence | SEQ ID NO: 410 | 1709 aa | Mw at 182651.9kD |

MGFLPKLLLLASFFPAGQASWGVSSPQDVQGVKGSCLLIPCIFSFPADVEVPDGITAIWYYDYSGQRQ
VVSHSADPKLVEARFRGRTEFMGNPEHRVCNLLLKDLQPEDSGSYNFRFEISEVNRWSDVKGTLVTVT
EEPRVPTIASPVELLEGTEVDFNCSTPYVCLQEQVRLQWQGQDPARSVTFNSQKFEPTGVGHLETLHM
AMSWQDHGRILRCQLSVANHRAQSEIHLQVKYAPKGVKILLSPSGRNILPGELVTLTCQVNSSYPAVS
SIKWLKDGVRLQTKTGVLHLPQAAWSDAGVYTCQAENGVGSLVSPPISLHIFMAEVQVSPAGPILENQ
TVTLVCNTPNEAPSDLRYSWYKNHVLLEDAHSHTLRLHLATRADTGFYFCEVQNVHGSERSGPVSVVV
NHPPLTPVLTAFLETQAGLVGILHCSVTSEPLATLVLSHGGHILASTSGDSDHSPRFSGTSGPNSLRL
EIRDLEETDSGEYKCSATNSLGNATSTLDFHANAARLLISPAAEVVEGQAVTLSCRSGLSPTPDARFS
WYLNGALLHEGPGSSLLLPAASSTDAGSYHCRARDGHSASGPSSPAVLTVLYPPRQPTFTTRLDLDAA
GAGAGRRGLLLCRVDSDPPAPLQLLHKDRVVATSLPSGGGCSTCGGCSPRNKVTKAPNLLRVEIHNPL
LEEEGLYLCEASNALGNASTSATFNGQATVLAIAPSHTLQEGTEANLTCNVSREAAGSPANFSWFRNG
VLWAQGPLETVTLLPVARTDAALYACRILTEAGAQLSTPVLLSVLYPPDRPKLSALLDMGQGHMALFI
CTVDSRPLALLALFHGEHLLATSLGPQVPSHGRFQAKAEANSLKLEVRELGLGDSGSYRCEATNVLGS
SNTSLFFQVRGAWVQVSPSPELQEGQAVVLSCQVHTGVPEGTSYRWYRDGQPLQESTSATLRFAAITL
TQAGAYHCQAQAPGSATTSLAAPISLHVSYAPRHVTLTTLMDTGPGRLGLLLCRVDSDPPAQLRLLHG
DRLVASTLQGVGGPEGSSPRLHVAVAPNTLRLEIHGAMLEDEGVYICEASNTLGQASASADFDAQAVN
VQVWPGATVREGQLVNLTCLVWTTHPAQLTYTWYQDGQQRLDAHSIPLPNVTVRDATSYRCGVGPPGR
APRLSRPITLDVLYAPRNLRLTYLLESHGGQLALVLCTVDSRPPAQLALSHAGRLLASSTAASVPNTL
RLELRGPQPRDEGFYSCSARSPLGQANTSLELRLEGVRVILAPEAAVPEGAPMMVTCADPAAHAPTLY
TWYHNGRWLQEGPAASLSFLVATRAHAGAYSCQAQDAQGTRSSRPAALQVLYAPQDTVLSSFRDSPAR
SMAVIQCTVDSEPPAELALSHDGKVLATSSGVHSLASGTGHVQVARNALRLQVQDVPAGDDTYVCTAQ
NLLGSISTIGRLQVEGARVVAEPGLDVPEGAALNLSCRLLGGPGPVGNSTFAWFWNDRRLHAEPVPTL
AFTHVARAQAGMYHCLAELPTGAAASAPVMLRVLYPPKTPTMMVFVEPEGGLRGILDCRVDSEPLASL
TLHLGSRLVASSQPQGAPAEPHIHVLASPNALRVDIEALRPSDQGEYICSASNVLGSASTSTYFGVRA
LHRLHQFQQLLWVLGLLVGLLLLLLGLGACYTWRRRRVCKQSMGENSVEMAFQKETTQLIDPDAATCE
TSTCAPPLG

| | | |
|---|---|---|
| NOV14h, | | |
| SNP1 3382490 | SEQ ID NO: 411 | 5103 bp |
| of CG51821-01, | ORF Start: ATG at 1 | ORF Stop: TGA at 5101 |
| DNA Sequence | SNP Pos: 4056 | SNP Change: C to T |

ATGGGCTTCTTGCCCAAGCTTCTCCTCCTGGCCTCAGCCGTTCTTCCCCCAGGCCAGGCCTCATGGGG
CGTCTCCAGTCCCCAGGACGTGCAGGGTGTGAAGGGGTCTTGCCTGCTTATCCCCTGCATCTTCAGCT
TCCCTGCCGACGTGGAGGTGCCCGACGGCATCACGGCCATCTGGTACTACGACTACTCGGGCCAGCGG
CAGGTGGTGAGCCACTCGGCGGACCCCAAGCTGGTGGAGGCCCGCTTCCGCGGCCGCACCGAGTTCAT
GGGGAACCCCGAGCACAGGGTGTGCAACCTGCTGCTGAAGGACCTGCAGCCCGAGGACTCTGGTTCCT
ACAACTTCCGCTTCGAGATCAGTGAGGTCAACCGCTGGTCAGATGTGAAAGGCACCTTGGTCACAGTA
ACAGGTGATCCCAGGGTGCCCACCATTGCCTCCCCGGTGGAGCTTCTCGAGGGCACAGAGGTGGACTT
CAACTGCTCCACTCCCTACGTATGCCTGCAGGAGCAGGTCAGACTGCAGTGGCAAGGCCAGGACCCTG
CTCGCTCTGTCACCTTCAACAGCCAGAAGTTTGAGCCCACCGGCGTCGGCCACCTGGAGACCCTCCAC
ATGGCCATGTCCTGGCAGGACCACGGCCGGATCCTGCGCTGCCAGCTCTCCGTGGCCAATCACAGGGC
TCAGAGCGAGATTCACCTCCAAGTGAAGTGTGCCCCCAAGGGTGTGAAGATCCTCCTCAGCCCCTCGG
GGAGGAACATCCTTCCAGGTGAGCTGGTCACACTCACCTGCCAGGTGAACAGCAGCTACCCTGCAGTC
GGCAGCCTGGAGCGATGCTGGCGTCTACACCTGCCAAGCTGAGAACGGCGTGGGCTCTTTGGTCTCAC
CCCCCATCAGCCTCCACATCTTCGTGGCTGAGGTCCAGGTGAGCCCAGCAGGTCCCATCCTGGAGAAC
CAGACAGTGACACTAGTCTGCAACACACCCAATGAGGCACCCAGTGATCTCCGCTACAGCTGGTACAA
GAACCATGTCCTGCTGGAGGATGCCCACTCCCATACCCTCCGGCTGCACTTGGCCACTAGGGCTGATA
CTGGCTTCTACTTCTGTGAGGTGCAGAACGTCCATGGCAGCGAGCGCTCGGGCCCTGTCAGCGTGGTA
GTCACAGACCCGCCTCTCACTCCAGTCCTGACAGCCTTCCTGGAGACCCAGGCGGGACTTGTGGGCAT
CCTTCACTGCTCTGTGGTCAGTGAGCCCCTGGCCACACTGGTGCTGTCACATGGGGGTCATATCCTGG
CCTCCACCTCCGGGGACAGTGATCACAGCCCACGCTTCAGTGGTACCTCTGGTCCCAACTCCCTGCGC
CTGGAGATCCGAGACCTGGAGGAAACTGACAGTGGGGAGTACAAGTGCTCAGCCACCAACTCCCTTGG
AAATGCAACCTCCACCCTGGACTTCCATGCCAATGTCGCCCGTCTCCTCATCAGCCCGGCAGCCGAGG
TGGTGGAAGGACAGGCAGTGACACTGAGCTGCAGAAGCGGCCTAAGCCCCACACCTGATGCCCGCTTC
TCCTGGTACCTGAATGGAGCCCTGCTTCACGAGGGTCCCGGCAGCAGCCTCCTGCTCCCCGCGGCCTC
CAGCACTGACGCCGGCTCATACCACTGCCGGGCCCGGGACGGCCACAGTGCCAGTGGCCCCTCTTCGC
CAGCTGTTCTCACTGTGCTCTGTGAGCAGCCACCACGACAACCAACATTCACCACCAGGCTGGACCTT
GATGCCGCTGGGGCCGGGGCTGGACGGCGAGGCCTCCTTTTGTGCCGTGTGGACAGCGACCCCCCCGC
CAGGCTGCAGCTGCTCCACAAGGACCGTGTTGTGGCCACTTCCCTGCCATCAGGGGGTGGCTGCAGCA
CCTGTGGGGGCTGTTCCCCACGCATGAAGGTCACCAAAGCCCCCAACTTGCTGCGTGTGGAGATTCAC
AACCCTTTGCTGGAAGAGGAGGGCTTGTACCTCTGTGAGGCCAGCAATGCCCTGGGCAACGCCTCCAC
CTCAGCCACCTTCAATGGCCAGGCCACTGTCCTGGCCATTGCACCATCACACACACTTCAGGAGGGCA
CAGAAGCCAACTTGACTTGCAACGTGAGCCGGGAAGCTGCTGGCAGCCCTGCTAACTTCTCCTGGTTC
CGAAATGGGGTGCTGTGGGCCCAGGGTCCCCTGGAGACCGTGACACTGCTGCCCGTGGCCAGAACTGA
TGCTGCCCTTTACGCCTGCCGCATCCTGACTGAGGCTGGTGCCCAGCTCTCCACTCCCGTGCTCCTGA
GTGTACTCTATCCCCCGGACCGTCCAAAGCTGTCAGCCCTCCTAGACATGGGCCAGGGCCACATGGCT
CTGTTCATCTGCACTGTGGACAGCCGCCCCCTGGCCTTGCTGGCCTTGTTCCATGGGGAGCACCTCCT
GGCCACCAGCCTGGGTCCCCAGGTCCCATCCCATGGTCGGTTCCAGGCTAAAGCTGAGGCCAACTCCC
TGAAGTTAGAGGTCCGAGAACTGGGCCTTGGGGACTCTGGCAGCTACCGCTGTGAGGCCACAAATGTT
CTTGGATCATCCAACACCTCACTCTTCTTCCAGGTCCGAGGTGCCTGGGTCCAGGTGTCACCATCACC
TGAGCTCCAAGAGGGCCAGGCTGTGGTCCTGAGCTGCCAGGTACACACAGGAGTCCCAGAGGGGACCT
CATATCGTTGGTATCGGGATGGCCAGCCCCTCCAGGAGTCGACCTCGGCCACGCTCCGCTTTGCAGCC
ATAACTTTGACACAAGCTGGGGCCTATCATTGCCAAGCCCAGGCCCCAGGCTCAGCCACCACGAGCCT
AGCTGCACCCATCAGCCTCCACGTGTCCTGTAAGGATGCCCCACGCCACGTCACACTCACTACCCTGA
TGGACACAGGCCCTGGACGACTGGGCCTCCTCCTGTGCCGTGTGGACAGTGACCCTCCGGCCCAGCTG
CGGCTGCTCCACGGGGATCGCCTTGTGGCCTCCACCCTACAAGGTGTGGGGGGACCCGAAGGCAGCTC
CCCACGGCTGCATGTGGCTGTGGCCCCCAACACACTGCGTCTGGAGATCCACGGGGCTATGCTGGAGG
ATGAGGGTGTCTATATCTGTGAGGCCTCCAACACCCTGGGCCAGGCCTCGGCCTCAGCTGACTTCGAC
CCTGCCTTGTGTGGACCACTCACCCGGCCCAGCTCACCTACACATGGTACCAGGATGGGCAGCAGCGC
CTGGATGCCCACTCCATCCCCCTGCCCAACGTCACAGTCAGGGATGCCACCTCCTACCGCTGCGGTGT
GGGCCCCCCTGGTCGGGCACCCCGCCTCTCCAGACCTATCACCTTGGACGTCCTCACGCGCCCCGCAA
CCTGCGCCTGACCTACCTCCTGGAGAGCCATGGCGGGCAGCTGGCCCTGGTACTGTGCACTGTGGACA
GCCGCCCGCCCGCCCAGCTGGCCCTCAGCCACGCCGGTCGCCTCTTGGCCTCCTCGACAGCAGCCTCT
GTCCCCAACACCCTGCGCCTGGAGCTGCGAGGGCCACAGCCCAGGGATGAGGGTTTCTACAGCTGCTC
TGCCCGCAGCCCTCTGGGCCAGGCCAACACGTCCCTGGAGCTGCGGCTGGAGGTGCGGGTGATCCTGG
CTCCGGAGGCTGCCGTGCCTGAAGGTGCCCCCATCACAGTGACCTGTGCGGACCCTGCTGCCCACGCA
CCCACACTCTATACTTGGTACCACAACGGTCGTTGGCTGCAGGAGGGTCCAGCTGCCTCACTCTCATT
CCTGGTGGCCACGCGGGCTCATGCAGGCGCCTACTCTTGCCAGGCCCAGGATGCCCAGGGCACCCGCA
GCTCCCGTCCTGCTGCCCTGCAAGTCCTCTGTGCCCCTCAGGATGCTGTCCTGTCCTCCTTCCGGGAC
TCCAGGGCCAGATCCATGGCTGTGATACAGTGCACTGTGGACAGTGAGCCACCTGCTGAGCTGGCCCT
ATCTCATGATGGCAAGGTGCTGGCCACGAGCAGCGGGGTCCACAGCTTGGCATCAGGGACAGGCCATG
TCCAGGTGGCCCGAAACGCCCTACGGCTGCAGGTGCAAGATGTGCCTGCAGGTGATGACACCTATGTT
TGCACAGCCCAAAACTTGCTGGGCTCAATCAGCACCATCGGGCGGTTGCAGGTAGAAGGTGAGTGGCG
GTGGCCCTGGGCCTGTGGGCAACTCCACCTTTGCATGGTTCTGGAATGACCGGCGGCTGCACGCGGAG
CCTGTGCCCACTCTCGCCTTCACCCACGTGGCTCGTGCTCAAGCTGGGATGTACCACTGCCTGGCTGA
GCTCCCCACTGGGGCTGCTGCCTCTGCTCCAGTCATGCTCCGTGTGCTCTACCCTCCCAAGACGCCCA
CCATGATGGTCTTCGTGGAGCCTGAGGGTGGCCTCCGGGGCATCCTGGATTGCCGAGTGGACAGCGAG
CCGCTCGCCAGCCTGACTCTCCACCTTGGCAGTCGACTGGTGGCCTCCAGTCAGCCCCAGGGTGCTCC
TGCAGAGCCACACATCCATGTCCTGGCTTCCCCCAATGCCCTGAGGGTGGACATCGAGGCGCTGAGGC
TTTGGGGTCAGAGCCCTGCACCGCCTGCATCAGTTCCAGCAGCTGCTCTGGGTCCTGGGACTGCTGGT
GGGCCTCCTGCTCCTGCTGTTGGGCCTGGGGGCCTGCTACACCTGGAGAAGGAGGCGTGTTTGTAAGC
AGAGCATGGGCGAGAATCCAGGGCGGGCATCGTCTTTCCATTTACTGCCTCTAGCTGGGTCTTCAAGG
TGA

| | | | |
|---|---|---|---|
| NOV14h, | | | |
| SNP13382490 of | | | |
| CG51821-01, | SEQ ID NO: 412 | | MW at 180833.0kD |
| Protein Sequence | SNP Pos: 1352 | 1700 aa | SNP Change: Asp to Asp |

MGFLPKLLLLASAVLPPGQASWGVSSPQDVQGVKGSCLLIPCIFSFPADVEVPDGITAIWYYDYSGQR
QVVSHSADPKLVEARFRGRTEFMGNPEHRVCNLLLKDLQPEDSGSYNFRFEISEVNRWSDVKGTLVTV
TGDPRVPTIASPVELLEGTEVDFNCSTPYVCLQEQVRLQWQGQDPARSVTFNSQKFEPTGVGHLETLH
MAMSWQDHGRILRCQLSVANHRAQSEIHLQVKCAPKGVKILLSPSGRNILPGELVTLTCQVNSSYPAV
SSIKWLKDGVRLQTKTGVLHLPQAAWSDAGVYTCQAENGVGSLVSPPISLHIFVAEVQVSPAGPILEN
QTVTLVCNTPNEAPSDLRYSWYKNHVLLEDAHSHTLRLHLATRADTGFYFCEVQNVHGSERSGPVSVV
VTDPPLTPVLTAFLETQAGLVGILHCSVVSEPLATLVLSHGGHILASTSGDSDHSPRFSGTSGPNSLR
LEIRDLEETDSGEYKCSATNSLGNATSTLDFHANVARLLISPAAEVVEGQAVTLSCRSGLSPTPDARF
SWYLNGALLHEGPGSSLLLPAASSTDAGSYHCRARDGHSASGPSSPAVLTVLCEQPPRQPTFTTRLDL
DAAGAGAGPRGLLLCRVDSDPPARLQLLHKDRVVATSLPSGGGCSTCGGCSPRMKVTKAPNLLRVEIH
NPLLEEEGLYLCEASNALGNASTSATFNGQATVLAIAPSHTLQEGTEANLTCNVSREAAGSPANFSWF
RNGVLWAQGPLETVTLLPVARTDAALYACRILTEAGAQLSTPVLLSVLYPPDRPKLSALLDMGQGHMA
LFICTVDSRPLALLALFHGEHLLATSLGPQVPSHGRFQAKAEANSLKLEVRELGLGDSGSYRCEATNV
LGSSNTSLFFQVRGAWVQVSPSPELQEGQAVVLSCQVHTGVPEGTSYRWYRDGQPLQESTSATLRFAA
ITLTQAGAYHCQAQAPGSATTSLAAPISLHVSCKDAPRHVTLTTLMDTGPGRLGLLLCRVDSDPPAQL
RLLHGDRLVASTLQGVGGPEGSSPRLHVAVAPNTLRLEIHGAMLEDEGVYICEASNTLGQASASADFD
GPPWSGTPPLQTYHLGRPHAPRNLRLTYLLESHGGQLALVLCTVDSRPPAQLALSHAGRLLASSTAAS
VPNTLRLELRGPQPRDEGFYSCSARSPLGQANTSLELRLEVRVILAPEAAVPEGAPITVTCADPAAHA
PTLYTWYHNGRWLQEGPAASLSFLVATRAHAGAYSCQAQDAQGTRSSRPAALQVLCAPQDAVLSSFRD
SRARSMAVIQCTVDSEPPAELALSHDGKVLATSSGVHSLASGTGHVQVARNALRLQVQDVPAGDDTYV
CTAQNLLGSISTIGRLQVEGEWRVVAEPGLDVPEGAALNLSCRLLGGPGPVGNSTFAWFWNDRRLHAE
PVPTLAFTHVARAQAGMYHCLAELPTGAAASAPVMLRVLYPPKTPTMMVFVEPEGGLRGILDCRVDSE
PLASLTLHLGSRLVASSQPQGAPAEPHIHVLASPNALRVDIEALRPSDQGEYICSASNVLGPASTSTY
FGVRALHRLHQFQQLLWVLGLLVGLLLLLLGLGACYTWRRRRVCKQSMGENPGPASSFHLLPLAGSSR

| | | |
|---|---|---|
| NOV14i, | | |
| SNP1 3382489 of | SEQ ID NO: 413 | 5103 bp |
| CG51821-01, | ORF Start: ATG at 1 | ORF Stop: TGA at 5101 |
| DNA Sequence | SNP Pos: 4245 | SNP Change: G to A |

ATGGGCTTCTTGCCCAAGCTTCTCCTCCTGGCCTCAGCCGTTCTTCCCCCAGGCCAGGCCTCATGGGG
CGTCTCCAGTCCCCAGGACGTGCAGGGTGTGAAGGGGTCTTGCCTGCTTATCCCCTGCATCTTCAGCT
TCCCTGCCGACGTGGAGGTGCCCGACGGCATCACGGCCATCTGGTACTACGACTACTCGGGCCAGCGG
CAGGTGGTGAGCCACTCGGCGGACCCCAAGCTGGTGGAGGCCCGCTTCCGCGGCCGCACCGAGTTCAT
GGGGAACCCCGAGCACAGGGTGTGCAACCTGCTGCTGAAGGACCTGCAGCCCGAGGACTCTGGTTCCT
ACAACTTCCGCTTCGAGATCAGTGAGGTCAACCGCTGGTCAGATGTGAAAGGCACCTTGGTCACAGTA
ACAGGTGATCCCAGGGTGCCCACCATTGCCTCCCCGGTGGAGCTTCTCGAGGGCACAGAGGTGGACTT
CAACTGCTCCACTCCCTACGTATGCCTGCAGGAGCAGGTCAGACTGCAGTGGCAAGGCCAGGACCCTG
CTCGCTCTGTCACCTTCAACAGCCAGAAGTTTGAGCCCACCGGCGTCGGCCACCTGGAGACCCTCCAC
ATGGCCATGTCCTGGCAGGACCACGGCCGGATCCTGCGCTGCCAGCTCTCCGTGGCCAATCACAGGGC
TCAGAGCGAGATTCACCTCCAAGTGAAGTGTGCCCCCAAGGGTGTGAAGATCCTCCTCAGCCCCTCGG
GGAGGAACATCCTTCCAGGTGAGCTGGTCACACTCACCTGCCAGGTGAACAGCAGCTACCCTGCAGTC
AGTTCCATTAAGTGGCTCAAGGATGGGGTACGCCTCCAAACCAAGACTGGTGTGCTGCACCTGCCCCA
GGCAGCCTGGAGCGATGCTGGCGTCTACACCTGCCAAGCTGAGAACGGCGTGGGCTCTTTGGTCTCAC
CCCCCATCAGCCTCCACATCTTCGTGGCTGAGGTCCAGGTGAGCCCAGCAGGTCCCATCCTGGAGAAC
CAGACAGTGACACTAGTCTGCAACACACCCAATGAGGCACCCAGTGATCTCCGCTACAGCTGGTACAA
GAACCATGTCCTGCTGGAGGATGCCCACTCCCATACCCTCCGGCTGCACTTGGCCACTAGGGCTGATA
CTGGCTTCTACTTCTGTGAGGTGCAGAACGTCCATGGCAGCGAGCGCTCGGGCCCTGTCAGCGTGGTA
GTCACAGACCCGCCTCTCACTCCAGTCCTGACAGCCTTCCTGGAGACCCAGGCGGGACTTGTGGGCAT
CCTTCACTGCTCTGTGGTCAGTGAGCCCCTGGCCACACTGGTGCTGTCACATGGGGGTCATATCCTGG
CCTCCACCTCCGGGGACAGTGATCACAGCCCACGCTTCAGTGGTACCTCTGGTCCCAACTCCCTGCGC
CTGGAGATCCGAGACCTGGAGGAAACTGACAGTGGGGAGTACAAGTGCTCAGCCACCAACTCCCTTGG
AAATGCAACCTCCACCCTGGACTTCCATGCCAATGTCGCCCGTCTCCTCATCAGCCCGGCAGCCGAGG
TGGTGGAAGGACAGGCAGTGACACTGAGCTGCAGAAGCGGCCTAAGCCCCACACCTGATGCCCGCTTC
TCCTGGTACCTGAATGGAGCCCTGCTTCACGAGGGTCCCGGCAGCAGCCTCCTGCTCCCCGCGGCCTC
CAGCACTGACGCCGGCTCATACCACTGCCGGGCCCGGGACGGCCACAGTGCCAGTGGCCCCTCTTCGC
CAGCTGTTCTCACTGTGCTCTGTGAGCAGCCACCACGACAACCAACATTCACCACCAGGCTGGACCTT
CAGGCTGCAGCTGCTCCACAAGGACCGTGTTGTGGCCACTTCCCTGCCATCAGGGGGTGGCTGCAGCA
CCTGTGGGGGCTGTTCCCCACGCATGAAGGTCACCAAAGCCCCCAACTTGCTGCGTGTGGAGATTCAC
AACCCTTTGCTGGAAGAGGAGGGCTTGTACCTCTGTGAGGCCAGCAATGCCCTGGGCAACGCCTCCAC
CTCAGCCACCTTCAATGGCCAGGCCACTGTCCTGGCCATTGCACCATCACACACACTTCAGGAGGGCA
CAGAAGCCAACTTGACTTGCAACGTGAGCCGGGAAGCTGCTGGCAGCCCTGCTAACTTCTCCTGGTTC
CGAAATGGGGTGCTGTGGGCCCAGGGTCCCCTGGAGACCGTGACACTGCTGCCCGTGGCCAGAACTGA
TGCTGCCCTTTACGCCTGCCGCATCCTGACTGAGGCTGGTGCCCAGCTCTCCACTCCCGTGCTCCTGA
GTGTACTCTATCCCCCGGACCGTCCAAAGCTGTCAGCCCTCCTAGACATGGGCCAGGGCCACATGGCT
CTGTTCATCTGCACTGTGGACAGCCGCCCCCTGGCCTTGCTGGCCTTGTTCCATGGGGAGCACCTCCT
GGCCACCAGCCTGGGTCCCCAGGTCCCATCCCATGGTCGGTTCCAGGCTAAAGCTGAGGCCAACTCCC
TGAAGTTAGAGGTCCGAGAACTGGGCCTTGGGGACTCTGGCAGCTACCGCTGTGAGGCCACAAATGTT
CTTGGATCATCCAACACCTCACTCTTCTTCCAGGTCCGAGGTGCCTGGGTCCAGGTGTCACCATCACC
TGAGCTCCAAGAGGGCCAGGCTGTGGTCCTGAGCTGCCAGGTACACACAGGAGTCCCAGAGGGGACCT
CATATCGTTGGTATCGGGATGGCCAGCCCCTCCAGGAGTCGACCTCGGCCACGCTCCGCTTTGCAGCC
ATACTaTTGACACAAGCTGGGGCCTATCATTGCCAAGCCCAGGCCCCAGGCTCAGCCACCACGAGCCT
AGCTGCACCCATCAGCCTCCACGTGTCCTGTAAGGATGCCCCACGCCACGTCACACTCACTACCCTGA
TGGACACAGGCCCTGGACGACTGGGCCTCCTCCTGTGCCGTGTGGACAGTGACCCTCCGGCCCAGCTG
CGGCTGCTCCACGGGGATCGCCTTGTGGCCTCCACCCTACAAGGTGTGGGGGGACCCGAAGGCAGCTC
TCCCAGGCTGCATGTGGCTGTGGCCCCCAACACACTGCGTCTGGAGATCCACGGGGCTATGCTGGAGG
ATGAGGGTGTCTATATCTGTGAGGCCTCCAACACCCTGGGCCAGGCCTCGGCCTCAGCTGACTTCGAC
GCTCAAAGCTGTGAATGTGCAGGTGTGGCCCGGGGCTACCGTGCGGGAGGGGCAGCTGGTGAACCTGA
CCTGGATGCCCACTCCATCCCCCTGCCAACGTCACAGTCAGGGATGCCACCTCCTACCGCTGCGGTGT
GGGCCCCCCTGGTCGGGCACCCCGCCTCTCCAGACCTATCACCTTGGACGTCCTCACGCGCCCCGCAA
CCTGCGCCTGACCTACCTCCTGGAGAGCCATGGCGGGCAGCTGGCCCTGGTACTGTGCACTGTGGACA
GCCGCCCGCCCGCCCAGCTGGCCCTCAGCCACGCCGGTCGCCTCTTGGCCTCCTCGACAGCAGCCTCT
GTCCCCAACACCCTGCGCCTGGAGCTGCGAGGGCCACAGCCCAGGGATGAGGGTTTCTACAGCTGCTC
TGCCCGCAGCCCTCTGGGCCAGGCCAACACGTCCCTGGAGCTGCGGCTGGAGGTGCGGGTGATCCTGG
CTCCGGAGGCTGCCGTGCCTGAAGGTGCCCCCATCACAGTGACCTGTGCGGACCCTGCTGCCCACGCA
CCCACACTCTATACTTGGTACCACAACGGTCGTTGGCTGCAGGAGGGTCCAGCTGCCTCACTCTCATT
CCTGGTGGCCACGCGGGCTCATGCAGGCGCCTACTCTTGCCAGGCCCAGGATGCCCAGGGCACCCGCA
GCTCCCGTCCTGCTGCCCTGCAAGTCCTCTGTGCCCCTCAGGACGCTGTCCTGTCCTCCTTCCGGGAC
TCCAGGGCCAGATCCATGGCTGTGATACAGTGCACTGTGGACAGTGAGCCACCTGCTGAGCTGGCCCT
ATCTCATGATGGCAAGGTGCTGGCCACGAGCAGCGGGGTCCACAGCTTGGCATCAGGGACAGGCCATG
TCCAGGTGGCCCGAAACGCCCTACGGCTACAGGTGCAAGATGTGCCTGCAGGTGATGACACCTATGTT
TGCACAGCCCAAAACTTGCTGGGCTCAATCAGCACCATCGGGCGGTTGCAGGTAGAAGGTGAGTGGCG
CGTGGTGGCAGAGCCTGGCCTGGACGTGCCTGAGGGCGCTGCCCTGAACCTCAGCTGCCGCCTCCTGG
GTGGCCCTGGGCCTGTGGGCAACTCCACCTTTGCATGGTTCTGGAATGACCGGCGGCTGCACGCGGAG
CCTGTGCCCACTCTCGCCTTCACCCACGTGGCTCGTGCTCAAGCTGGGATGTACCACTGCCTGGCTGA
GCTCCCCACTGGGGCTGCTGCCTCTGCTCCAGTCATGCTCCGTGTGCTCTACCCTCCCAAGACGCCCA
CCATGATGGTCTTCGTGGAGCCTGAGGGTGGCCTCCGGGGCATCCTGGATTGCCGAGTGGACAGCGAG
CCGCTCGCCAGCCTGACTCTCCACCTTGGCAGTCGACTGGTGGCCTCCAGTCAGCCCCAGGGTGCTCC
TGCAGAGCCACACATCCATGTCCTGGCTTCCCCCAATGCCCTGAGGGTGGACATCGAGGCGCTGAGGC
CCAGCGACCAAGGGGAATACATCTGTTCTGCCTCAAATGTCCTGGGCCCTGCCTCTACCTCCACCTAC
TTTGGGGTCAGAGCCCTGCACCGCCTGCATCAGTTCCAGCAGCTGCTCTGGGTCCTGGGACTGCTGGT
GGGCCTCCTGCTCCTGCTGTTGGGCCTGGGGGCCTGCTACACCTGGAGAAGGAGGCGTGTTTGTAAGC
AGAGCATGGGCGAGAATCCAGGGCGGGCATCGTCTTTCCATTTACTGCCTCTAGCTGGGTCTTCAAGG
TGA

| | | | |
|---|---|---|---|
| NOV14i, | | | |
| SNP1 3382489 of | | | |
| CG51821-01, | SEQ ID NO: 414 | | MW at 180833.0kD |
| Protein Sequence | SNP Pos: 1415 | 1700 aa | SNP Change: Leu to Leu |

MGFLPKLLLLASAVLPPGQASWGVSSPQDVQGVKGSCLLIPCIFSFPADVEVPDGITAIWYYDYSGQR
QVVSHSADPKLVEARFRGRTEFMGNPEHRVCNLLLKDLQPEDSGSYNFRFEISEVNRWSDVKGTLVTV
TGDPRVPTIASPVELLEGTEVDFNCSTPYVCLQEQVRLQWQGQDPARSVTFNSQKFEPTGVGHLETLH
MAMSWQDHGRILRCQLSVANHRAQSEIHLQVKCAPKGVKILLSPSGRNILPGELVTLTCQVNSSYPAV
SSIKWLKDGVRLQTKTGVLHLPQAAWSDAGVYTCQAENGVGSLVSPPISLHIFVAEVQVSPAGPILEN
QTVTLVCNTPNEAPSDLRYSWYKNHVLLEDAHSHTLRLHLATEADTGFYFCEVQNVHGSERSGPVSVV
VTDPPLTPVLTAFLETQAGLVGILHCSVVSEPLATLVLSHGGHILASTSGDSDHSPRFSGTSGPNSLR
LEIRDLEETDSGEYKCSATNSLGNATSTLDFHANVARLLISPAAEVVEGQAVTLSCRSGLSPTPDARF
SWYLNGALLHEGPGSSLLLPAASSTDAGSYHCRARDGHSASGPSSPATLTVLCEQPPRQPTFTTRLDL
DAAGAGAGRRGLLLCRVDSDPPARLQLLHKDRVVATSLPSGGGCSTCGGCSPRMKVTKAPNLLRVEIH
NPLLEEEGLYLCEASNALGNASTSATFNGQATVLAIAPSHTLQEGTEANLTCNVSREAAGSPANFSWF
RNGVLWAQGPLETVTLLPVARTDAALYACRILTEAGAQLSTPVLLSVLYPPDRPKLSALLDMGQGHMA
LFICTVDSRPLALLALFHGEHLLATSLGPQVPSHGRFQAKAEANSLKLEVRELGLGDSGSYRCEATNV
LGSSNTSLFFQVRGAWVQVSPSPELQEGQAVVLSCQVHTGVPEGTSYRWYRDGQPLQESTSATLRFAA
ITLTQAGAYHCQAQAPGSATTSLAAPISLHVSCKDAPRHVTLTTLMDTGPGRLGLLLCRVDSDPPAQL
RLLHGDRLVASTLQGVGGPEGSSPRLHVAVAPNTLRLEIHGAMLEDEGVYICEASNTLGQASASADFD
AQSCECAGVARGYRAGGAAGEPDLPCVDHSPGPAHLHMVPGWAAAPGCPLHPPAQRHSQGCHLLPLRC
GPPWSGTPPLQTYHLGRPHAPRNLRLTYLLESHGGQLALVLCTVDSRPPAQLALSHAGRLLASSTAAS
VPNTLRLELRGPQPRDEGFYSCSARSPLGQANTSLELRLEVRVILAPEAAVPEGAPITVTCADPAAHA
PTLYTWYHNGRWLQEGPAASLSFLVATRAHAGAYSCQAQDAQGTRSSRPAALQTLCAPQDAVLSSFRD
SRARSMAVIQCTVDSEPPAELALSHDGKVLATSSGVHSLASGTGHVQVARNALRLQVQDVPAGDDTYV
CTAQNLLGSISTIGRLQVEGEWRVVAEPGLDVPEGAALNLSCRLLGGPGPVGNSTFAWFWNDRRLHAE
PVPTLAFTHVARAQAGMYHCLAELPTGAAASAPVMLRVLYPPKTPTMMVFVEPEGGLRGILDCRVDSE
PLASLTLHLGSRLVASSQPQGAPAEPHIHVLASPNALRVDIEALRPSDQGEYICSASNVLGPASTSTY
FGVRALHRLHQFQQLLWVLGLLVGLLLLLLGLGACYTWRRRRVCKQSMGENPGRASSFHLLPLAGSSR

| | | |
|---|---|---|
| NOV14j, | | |
| SNP1 3377616 of | SEQ ID NO: 415 | 5103 bp |
| CG51821-01, | ORF Start: ATG at 1 | ORF Stop: TGA at 5101 |
| DNA Sequence SNP Pos: 4768 | SNP Change: C to T | |

ATGGGCTTCTTGCCCAAGCTTCTCCTCCTGGCCTCAGCCGTTCTTCCCCCAGGCCAGGCCTCATGGGG
CGTCTCCAGTCCCCAGGACGTGCAGGGTGTGAAGGGGTCTTGCCTGCTTATCCCCTGCATCTTCAGCT
TCCCTGCCGACGTGGAGGTGCCCGACGGCATCACGGCCATCTGGTACTACGACTACTCGGGCCAGCGG
GGGGAACCCCGAGCACAGGGTGTGCAACCTGCTGCTGAAGGACCTGCAGCCCGAGGACTCTGGTTCCT
ACAACTTCCGCTTCGAGATCAGTGAGGTCAACCGCTGGTCAGATGTGAAAGGCACCTTGGTCACAGTA
ACAGGTGATCCCAGGGTGCCCACCATTGCCTCCCCGGTGGAGCTTCTCGAGGGCACAGAGGTGGACTT
CAACTGCTCCACTCCCTACGTATGCCTGCAGGAGCAGGTCAGACTGCAGTGGCAAGGCCAGGACCCTG
CTCGCTCTGTCACCTTCAACAGCCAGAAGTTTGAGCCCACCGGCGTCGGCCACCTGGAGACCCTCCAC
TCAGAGCGAGATTCACCTCCAAGTGAAGTGTGCCCCCAAGGGTGTGAAGATCCTCCTCAGCCCCTCGG
GGAGGAACATCCTTCCAGGTGAGCTGGTCACACTCACCTGCCAGGTGAACAGCAGCTACCCTGCAGTC
AGTTCCATTAAGTGGCTCAAGGATGGGGTACGCCTCCAAACCAAGACTGGTGTGCTGCACCTGCCCCA
GGCAGCCTGGAGCGATGCTGGCGTCTACACCTGCCAAGCTGAGAACGGCGTGGGCTCTTTGGTCTCAC
CCCCCATCAGCCTCCACATCTTCGTGGCTGAGGTCCAGGTGAGCCCAGCAGGTCCCATCCTGGAGAAC
CAGACAGTGACACTAGTCTGCAACACACCCAATGAGGCACCCAGTGATCTCCGCTACAGCTGGTACAA
GAACCATGTCCTGCTGGAGGATGCCCACTCCCATACCCTCCGGCTGCACTTGGCCACTAGGGCTGATA
CTGGCTTCTACTTCTGTGAGGTGCAGAACGTCCATGGCAGCGAGCGCTCGGGCCCTGTCAGCGTGGTA
GTCACAGACCCGCCTCTCACTCCAGTCCTGACAGCCTTCCTGGAGACCCAGGCGGGACTTGTGGGCAT
CCTTCACTGCTCTGTGGTCAGTGAGCCCCTGGCCACACTGGTGCTGTCACATGGGGGTCATATCCTGG
CCTCCACCTCCGGGGACAGTGATCACAGCCCACGCTTCAGTGGTACCTCTGGTCCCAACTCCCTGCGC
CTGGAGATCCGAGACCTGGAGGAAACTGACAGTGGGGAGTACAAGTGCTCAGCCACCAACTCCCTTGG
AAATGCAACCTCCACCCTGGACTTCCATGCCAATGTCGCCCGTCTCCTCATCAGCCCGGCAGCCGAGG
TGGTGGAAGGACAGGCAGTGACACTGAGCTGCAGAAGCGGCCTAAGCCCCACACCTGATGCCCGCTTC
TCCTGGTACCTGAATGGAGCCCTGCTTCACGAGGGTCCCGGCAGCAGCCTCCTGCTCCCCGCGGCCTC
CAGCACTGACGCCGGCTCATACCACTGCCGGGCCCGGGACGGCCACAGTGCCAGTGGCCCCTCTTCGC
CAGCTGTTCTCACTGTGCTCTGTGAGCAGCCACCACGACAACCAACATTCACCACCAGGCTGGACCTT
GATGCCGCTGGGGCCGGGGCTGGACGGCGAGGCCTCCTTTTGTGCCGTGTGGACAGCGACCCCCCCGC
CAGGCTGCAGCTGCTCCACAAGGACCGTGTTGTGGCCACTTCCCTGCCATCAGGGGGTGGCTGCAGCA
CCTGTGGGGGCTGTTCCCCACGCATGAAGGTCACCAAAGCCCCCAACTTGCTGCGTGTGGAGATTCAC
AACCCTTTGCTGGAAGAGGAGGGCTTGTACCTCTGTGAGGCCAGCAATGCCCTGGGCAACGCCTCCAC
CTCAGCCACCTTCAATGGCCAGGCCACTGTCCTGGCCATTGCACCATCACACACACTTCAGGAGGGCA
CAGAAGCCAACTTGACTTGCAACGTGAGCCGGGAAGCTGCTGGCAGCCCTGCTAACTTCTCCTGGTTC
CGAAATGGGGTGCTGTGGGCCCAGGGTCCCCTGGAGACCGTGACACTGCTGCCCGTGGCCAGAACTGA
TGCTGCCCTTTACGCCTGCCGCATCCTGACTGAGGCTGGTGCCCAGCTCTCCACTCCCGTGCTCCTGA
CTGTTCATCTGCACTGTGGACAGCCGCCCCCTGGCCTTGCTGGCCTTGTTCCATGGGGAGCACCTCCT
GGCCACCAGCCTGGGTCCCCAGGTCCCATCCCATGGTCGGTTCCAGGCTAAAGCTGAGGCCAACTCCC
TGAAGTTAGAGGTCCGAGAACTGGGCCTTGGGGACTCTGGCAGCTACCGCTGTGAGGCCACAAATGTT
CTTGGATCATCCAACACCTCACTCTTCTTCCAGGTCCGAGGTGCCTGGGTCCAGGTGTCACCATCACC
TGAGCTCCAAGAGGGCCAGGCTGTGGTCCTGAGCTGCCAGGTACACACAGGAGTCCCAGAGGGGACCT
CATATCGTTGGTATCGGGATGGCCAGCCCCTCCAGGAGTCGACCTCGGCCACGCTCCGCTTTGCAGCC
AGCTGCACCCATCAGCCTCCACGTGTCCTGTAAGGATGCCCCACGCCACGTCACACTCACTACCCTGA
TGGACACAGGCCCTGGACGACTGGGCCTCCTCCTGTGCCGTGTGGACAGTGACCCTCCGGCCCAGCTG
TCCCAGGCTGCATGTGGCTGTGGCCCCCAACACACTGCGTCTGGAGATCCACGGGGCTATGCTGGAGG
GCTCAAAGCTGTGAATGTGCAGGTGTGGCCCGGGGCTACCGTGCGGGAGGGGCAGCTGGTGAACCTGA
CCTGCCTTGTGTGGACCACTCACCCGGCCCAGCTCACCTACACATGGTACCAGGATGGGCAGCAGCGC
CTGGATGCCCACTCCATCCCCCTGCCCAACGTCACAGTCAGGGATGCCACCTCCTACCGCTGCGGTGT
GGGCCCCCCTGGTCGGGCACCCCGCCTCTCCAGACCTATCACCTTGGACGTCCTCACGCGCCCCGCAA
CCTGCGCCTGACCTACCTCCTGGAGAGCCATGGCGGGCAGCTGGCCCTGGTACTGTGCACTGTGGACA
GCCGCCCGCCCGCCCAGCTGGCCCTCAGCCACGCCGGTCGCCTCTTGGCCTCCTCGACAGCAGCCTCT
GTCCCCAACACCCTGCGCCTGGAGCTGCGAGGGCCACAGCCCAGGGATGAGGGTTTCTACAGCTGCTC
TGCCCGCAGCCCTCTGGGCCAGGCCAACACGTCCCTGGAGCTGCGGCTGGAGGTGCGGGTGATCCTGG
CTCCGGAGGCTGCCGTGCCTGAAGGTGCCCCCATCACAGTGACCTGTGCGGACCCTGCTGCCCACGCA
CCCACACTCTATACTTGGTACCACAACGGTCGTTGGCTGCAGGAGGGTCCAGCTGCCTCACTCTCATT
CCTGGTGGCCACGCGGGCTCATGCAGGCGCCTACTCTTGCCAGGCCCAGGATGCCCAGGGCACCCGCA
GCTCCCGTCCTGCTGCCCTGCAAGTCCTCTGTGCCCCTCAGGACGCTGTCCTGTCCTCCTTCCGGGAC
TCCAGGGCCAGATCCATGGCTGTGATACAGTGCACTGTGGACAGTGAGCCACCTGCTGAGCTGGCCCT
ATCTCATGATGGCAAGGTGCTGGCCACGAGCAGCGGGGTCCACAGCTTGGCATCAGGGACAGGCCATG
TGCACAGCCCAAAACTTGCTGGGCTCAATCAGCACCATCGGGCGGTTGCAGGTAGAAGGTGAGTGGCG
CGTGGTGGCAGAGCCTGGCCTGGACGTGCCTGAGGGCGCTGCCCTGAACCTCAGCTGCCGCCTCCTGG
GTGGCCCTGGGCCTGTGGGCAACTCCACCTTTGCATGGTTCTGGAATGACCGGCGGCTGCACGCGGAG
CCTGTGCCCACTCTCGCCTTCACCCACGTGGCTCGTGCTCAAGCTGGGATGTACCACTGCCTGGCTGA
GCTCCCCACTGGGGCTGCTGCCTCTGCTCCAGTCATGCTCCGTGTGCTCTACCCTCCCAAGACGCCCA
CCGCTCGCCAGCCTGACTCTCCACCTTGGCAGTCGACTGGTGGCCTCCAGTCAGCCCCAGGGTGCTCC
TGCAGAGTCACACATCCATGTCCTGGCTTCCCCCAATGCCCTGAGGGTGGACATCGAGGCGCTGAGGC
CCAGCGACCAAGGGGAATACATCTGTTCTGCCTCAAATGTCCTGGGCCCTGCCTCTACCTCCACCTAC
TTTGGGGTCAGAGCCCTGCACCGCCTGCATCAGTTCCAGCAGCTGCTCTGGGTCCTGGGACTGCTGGT
GGGCCTCCTGCTCCTGCTGTTGGGCCTGGGGGCCTGCTACACCTGGAGAAGGAGGCGTGTTTGTAAGC
AGAGCATGGGCGAGAATCCAGGGCGGGCATCGTCTTTCCATTTACTGCCTCTAGCTGGGTCTTCAAGG
TGA

| | | | |
|---|---|---|---|
| NOV14j, | | | |
| SNP13377616 of | | | |
| CG51821-01, | SEQ ID NO: 416 | | MW at 180822.9kD |
| Protein Sequence | SNP Pos: 1590 | 1700 aa | SNP Change: Pro to Ser |

MGFLPKLLLLASAVLPPGQASWGVSSPQDVQGVKGSCLLIPCIFSFPADVEVPDGITAIWYYDYSGQR
QVVSHSADPKLVEARFRGRTEFMGNPEHRVCNLLLKDLQPEDSGSYNFRFEISEVNRWSDVKGTLVTV
TGDPRVPTIASPVELLEGTEVDFNCSTPYVCLQEQVRLQWQGQDPARSVTFNSQKFEPTGVGHLETLH
MAMSWQDHGRILRCQLSVANHRAQSEIHLQVKCAPKGVKILLSPSGPNILPGELVTLTCQVNSSYPAV
SSIKWLKDGVRLQTKTGVLHLPQAAWSDAGVYTCQAENGVGSLVSPPISLHIFVAEVQVSPAGPILEN
QTVTLVCNTPNEAPSDLRYSWYKNHVLLEDAHSHTLRLHLATRADTGFYFCEVQNVHGSERSGPVSVV
VTDPPLTPVLTAFLETQAGLVGILHCSVVSEPLATLVLSHGGHILASTSGDSDHSPRFSGTSGPNSLR
LEIRDLEETDSGEYKCSATNSLGNATSTLDFHANVARLLISPAAEVVEGQAVTLSCRSGLSPTPDARF
SWYLNGALLHEGPGSSLLLPAASSTDAGSYHCRARDGHSASGPSSPAVLTVLCEQPPRQPTFTTRLDL
DAAGAGAGRRGLLLCRVDSDPPARLQLLHKDRVVATSLPSGGGCSTCGGCSPRMKVTKAPNLLRVEIH
NPLLEEEGLYLCEASNALGNASTSATFNGQATVLAIAPSHTLQEGTEANLTCNVSREAAGSPANFSWF
RNGVLWAQGPLETVTLLPVARTDAALYACRILTEAGAQLSTPVLLSVLYPPDRPKLSALLDMGQGHMA
LFICTVDSRPLALLALFHGEHLLATSLGPQVPSHGRFQAKAEANSLKLEVRELGLGDSGSYRCEATNV
LGSSNTSLFFQVRGAWVQVSPSPELQEGQAVVLSCQVHTGVPEGTSYRWYRDGQPLQESTSATLRFAA
TLTQAGAYHCQAQAPGSATTSLAAPISLHVSCKDAPRHVTLTTLLMDTGPGRLGLLLCRVDSDPPAQL
RLLHGDRLVASTLQGVGGPEGSSPRLHVAVAPNTLRLEIHGAMLEDEGVYICEASNTLGQASASADFD
AQSCECAGVARGYRAGGAAGEPDLPCVDHSPGPAHLHMVPGWAAAPGCPLHPPAQRHSQGCHLLPLRC
GPPWSGTPPLQTYHLGRPHAPRNLRLTYLLESHGGQLALVLCTVDSRPPAQLALSHAGRLLASSTAAS
VPNTLRLELRGPQPRDEGFYSCSARSPLGQANTSLELRLEVRVILAPEAAVPEGAPITVTCADPAAHA
PTLYTWYHNGRWLQEGPAASLSFLVATRAHAGAYSCQAQDAQGTRSSRPAALQVLCAPQDAVLSSFRD
SRARSMAVIQCTVDSEPPAELALSHDGKVLATSSGVHSLASGTGHVQVARNALRLQVQDVPAGDDTYV
CTAQNLLGSISTIGRIJQVEGEWRWAEPGLDVPEGAALNLSCRLLGGPGPVGNSTFAWFWNDRRLHAE
PVPTLAFTHVARAQAGMYHCLAELPTGAAASAPVMLRVLYPPKTPTMMVFVEPEGGLRGILDCRVDSE
PLASLTLHLGSPLVASSQPQGAPAESHIHVLASPNALRVDIEALRPSDQGEYICSASNVLGPASTSTY
FGVRALHRLHQFQQLLWVLGLLVGLLLLLLGLGACYTWRRRRVCKQSMGENPGRASSFHLLPLAGSSR

| | | |
|---|---|---|
| NOV14k, | | |
| SNP13377617 of | SEQ ID NO: 417 | 5103 bp |
| CG51821-01, | ORF Start: ATG at 1 | ORF Stop: TGA at 5101 |
| DNA Sequence | SNP Pos: 4881 | SNP Change: C to T |

ATGGGCTTCTTGCCCAAGCTTCTCCTCCTGGCCTCAGCCGTTCTTCCCCCAGGCCAGGCCTCATGGGG
CGTCTCCAGTCCCCAGGACGTGCAGGGTGTGAAGGGGTCTTGCCTGCTTATCCCCTGCATCTTCAGCT
CAGGTGGTGAGCCACTCGGCGGACCCCAAGCTGGTGGAGGCCCGCTTCCGCGGCCGCACCGAGTTCAT
GGGGAACCCCGAGCACAGGGTGTGCAACCTGCTGCTGAAGGACCTGCAGCCCGAGGACTCTGGTTCCT
ACAACTTCCGCTTCGAGATCAGTGAGGTCAACCGCTGGTCAGATGTGAAAGGCACCTTGGTCACAGTA
ACAGGTGATCCCAGGGTGCCCACCATTGCCTCCCCGGTGGAGCTTCTCGAGGGCACAGAGGTGGACTT
CAACTGCTCCACTCCCTACGTATGCCTGCAGGAGCAGGTCAGACTGCAGTGGCAAGGCCAGGACCCTG
CTCGCTCTGTCACCTTCAACAGCCAGAAGTTTGAGCCCACCGGCGTCGGCCACCTGGAGACCCTCCAC
ATGGCCATGTCCTGGCAGGACCACGGCCGGATCCTGCGCTGCCAGCTCTCCGTGGCCAATCACAGGGC
TCAGAGCGAGATTCACCTCCAAGTGAAGTGTGCCCCCAAGGGTGTGAAGATCCTCCTCAGCCCCTCGG
GGAGGAACATCCTTCCAGGTGAGCTGGTCACACTCACCTGCCAGGTGAACAGCAGCTACCCTGCAGTC
AGTTCCATTAAGTGGCTCAAGGATGGGGTACGCCTCCAAACCAAGACTGGTGTGCTGCACCTGCCCCA
GGCAGCCTGGAGCGATGCTGGCGTCTACACCTGCCAAGCTGAGAACGGCGTGGGCTCTTTGGTCTCAC
CCCCCATCAGCCTCCACATCTTCGTGGCTGAGGTCCAGGTGAGCCCAGCAGGTCCCATCCTGGAGAAC
CAGACAGTGACACTAGTCTGCAACACACCCAATGAGGCACCCAGTGATCTCCGCTACAGCTGGTACAA
CTGGCTTCTACTTCTGTGAGGTGCAGAACGTCCATGGCAGCGAGCGCTCGGGCCCTGTCAGCGTGGTA
GTCACAGACCCGCCTCTCACTCCAGTCCTGACAGCCTTCCTGGAGACCCAGGCGGGACTTGTGGGCAT
CCTTCACTGCTCTGTGGTCAGTGAGCCCCTGGCCACACTGGTGCTGTCACATGGGGGTCATATCCTGG
CCTCCACCTCCGGGGACAGTGATCACAGCCCACGCTTCAGTGGTACCTCTGGTCCCAACTCCCTGCGC
CTGGAGATCCGAGACCTGGAGGAAACTGACAGTGGGGAGTACAAGTGCTCAGCCACCAACTCCCTTGG
AAATGCAACCTCCACCCTGGACTTCCATGCCAATGTCGCCCGTCTCCTCATCAGCCCGGCAGCCGAGG
TGGTGGAAGGACAGGCAGTGACACTGAGCTGCAGAAGCGGCCTAAGCCCCACACCTGATGCCCGCTTC
TCCTGGTACCTGAATGGAGCCCTGCTTCACGAGGGTCCCGGCAGCAGCCTCCTGCTCCCCGCGGCCTC
CAGCACTGACGCCGGCTCATACCACTGCCGGGCCCGGGACGGCCACAGTGCCAGTGGCCCCTCTTCGC
CAGCTGTTCTCACTGTGCTCTGTGAGCAGCCACCACGACAACCAACATTCACCACCAGGCTGGACCTT
GATGCCGCTGGGGCCGGGGCTGGACGGCGAGGCCTCCTTTTGTGCCGTGTGGACAGCGACCCCCCCGC
CAGGCTGCAGCTGCTCCACAAGGACCGTGTTGTGGCCACTTCCCTGCCATCAGGGGGTGGCTGCAGCA
CCTGTGGGGGCTGTTCCCCACGCATGAAGGTCACCAAAGCCCCCAACTTGCTGCGTGTGGAGATTCAC
AACCCTTTGCTGGAAGAGGAGGGCTTGTACCTCTGTGAGGCCAGCAATGCCCTGGGCAACGCCTCCAC
CTCAGCCACCTTCAATGGCCAGGCCACTGTCCTGGCCATTGCACCATCACACACACTTCAGGAGGGCA
CAGAAGCCAACTTGACTTGCAACGTGAGCCGGGAAGCTGCTGGCAGCCCTGCTAACTTCTCCTGGTTC
CGAAATGGGGTGCTGTGGGCCCAGGGTCCCCTGGAGACCGTGACACTGCTGCCCGTGGCCAGAACTGA
TGCTGCCCTTTACGCCTGCCGCATCCTGACTGAGGCTGGTGCCCAGCTCTCCACTCCCGTGCTCCTGA
GTGTACTCTATCCCCCGGACCGTCCAAAGCTGTCAGCCCTCCTAGACATGGGCCAGGGCCACATGGCT
CTGTTCATCTGCACTGTGGACAGCCGCCCCCTGGCCTTGCTGGCCTTGTTCCATGGGGAGCACCTCCT
GGCCACCAGCCTGGGTCCCCAGGTCCCATCCCATGGTCGGTTCCAGGCTAAAGCTGAGGCCAACTCCC
TGAAGTTAGAGGTCCGAGAACTGGGCCTTGGGGACTCTGGCAGCTACCGCTGTGAGGCCACAAATGTT
CTTGGATCATCCAACACCTCACTCTTCTTCCAGGTCCGAGGTGCCTGGGTCCAGGTGTCACCATCACC
TGAGCTCCAAGAGGGCCAGGCTGTGGTCCTGAGCTGCCAGGTACACACAGGAGTCCCAGAGGGGACCT
CATATCGTTGGTATCGGGATGGCCAGCCCCTCCAGGAGTCGACCTCGGCCACGCTCCGCTTTGCAGCC
ATAACTTTGACACAAGCTGGGGCCTATCATTGCCAAGCCCAGGCCCCAGGCTCAGCCACCACGAGCCT
AGCTGCACCCATCAGCCTCCACGTGTCCTGTAAGGATGCCCCACGCCACGTCACACTCACTACCCTGA
TGGACACAGGCCCTGGACGACTGGGCCTCCTCCTGTGCCGTGTGGACAGTGACCCTCCGGCCCAGCTG
CGGCTGCTCCACGGGGATCGCCTTGTGGCCTCCACCCTACAAGGTGTGGGGGGACCCGAAGGCAGCTC
TCCCAGGCTGCATGTGGCTGTGGCCCCCAACACACTGCGTCTGGAGATCCACGGGGCTATGCTGGAGG
ATGAGGGTGTCTATATCTGTGAGGCCTCCAACACCCTGGGCCAGGCCTCGGCCTCAGCTGACTTCGAC
GCTCAAAGCTGTGAATGTGCAGGTGTGGCCCGGGGCTACCGTGCGGGAGGGGCAGCTGGTGAACCTGA
CCTGCCTTGTGTGGACCACTCACCCGGCCCAGCTCACCTACACATGGTACCAGGATGGGCAGCAGCGC
GGGCCCCCCTGGTCGGGCACCCCGCCTCTCCAGACCTATCACCTTGGACGTCCTCACGCGCCCCGCAA
CCTGCGCCTGACCTACCTCCTGGAGAGCCATGGCGGGCAGCTGGCCCTGGTACTGTGCACTGTGGACA
CCGCCCGCACCGCCCAGCTGGCCCTCAGCCACGCCGGTCGCCTCTTGGCCTCCTCGACAGCAGCCTCT
GTCCCCAACACCCTGCGCCTGGAGCTGCGAGGGCCACAGCCCAGGGATGAGGGTTTCTACAGCTGCTC
TGCCCGCAGCCCTCTGGGCCAGGCCAACACGTCCCTGGAGCTGCGGCTGGAGGTGCGGGTGATCCTGG
CCCACACTCTATACTTGGTACCACAACGGTCGTTGGCTGCAGGAGGGTCCAGCTGCCTCACTCTCATT
CCTGGTGGCCACGCGGGCTCATGCAGGCGCCTACTCTTGCCAGGCCCAGGATGCCCAGGGCACCCGCA
GCTCCCGTCCTGCTGCCCTGCAAGTCCTCTGTGCCCCTCAGGACGCTGTCCTGTCCTCCTTCCGGGAC
TCCAGGGCCAGATCCATGGCTGTGATACAGTGCACTGTGGACAGTGAGCCACCTGCTGAGCTGGCCCT
ATCTCATGATGGCAAGGTGCTGGCCACGAGCAGCGGGGTCCACAGCTTGGCATCAGGGACAGGCCATG
TCCAGGTGGCCCGAAACGCCCTACGGCTGCAGGTGCAAGATGTGCCTGCAGGTGATGACACCTATGTT
TGCACAGCCCAAAACTTGCTGGGCTCAATCAGCACCATCGGGCGGTTGCAGGTAGAAGGTGAGTGGCG
CGTGGTGGCAGAGCCTGGCCTGGACGTGCCTGAGGGCGCTGCCCTGAACCTCAGCTGCCGCCTCCTGG
GTGGCCCTGGGCCTGTGGGCAACTCCACCTTTGCATGGTTCTGGAATGACCGGCGGCTGCACGCGGAG
CCTGTGCCCACTCTCGCCTTCACCCACGTGGCTCGTGCTCAAGCTGGGATGTACCACTGCCTGGCTGA
GCTCCCCACTGGGGCTGCTGCCTCTGCTCCAGTCATGCTCCGTGTGCTCTACCCTCCCAAGACGCCCA
CCGCTCGCCAGCCTGACTCTCCACCTTGGCAGTCGACTGGTGGCCTCCAGTCAGCCCCAGGGTGCTCC
TGCAGAGCCACACATCCATGTCCTGGCTTCCCCCAATGCCCTGAGGGTGGACATCGAGGCGCTGAGGC
CCAGCGACCAAGGGGAATACATCTGTTCTGCCTCAAATGTCCTGGGCCCTGCTTCTACCTCCACCTAC
TTTGGGGTCAGAGCCCTGCACCGCCTGCATCAGTTCCAGCAGCTGCTCTGGGTCCTGGGACTGCTGGT
GGGCCTCCTGCTCCTGCTGTTGGGCCTGGGGGCCTGCTACACCTGGAGAAGGAGGCGTGTTTGTAAGC
AGAGCATGGGCGAGAATCCAGGGCGGGCATCGTCTTTCCATTTACTGCCTCTAGCTGGGTCTTCAAGG
TGA

| | | | |
|---|---|---|---|
| NOV14k, | | | |
| SNP1 3377617 of | | | |
| CG51821-01, | SEQ ID NO: 4181 | | MW at 180833.0kD |
| Protein Sequence | SNP Pos: 1627 | 1700 aa | SNP Change: Ala to Ala |

MGFLPKLLLLASAVLPPGQASWGVSSPQDVQGVKGSCLLIPCIFSFPADVEVPDGITAIWYYDYSGQR
QVVSHSADPKLVEARFRGRTEFMGNPEHRVCNLLLKDLQPEDSGSYNFRFEISEVNRWSDVKGTLVTV
TGDPRVPTIASPVELLEGTEVDFNCSTPYVCLQEQVRLQWQGQDPARSVTFNSQKFEPTGVGHLETLH
MAMSWQDHGRILRCQLSVANHRAQSEIHLQVKCAPKGVKILLSPSGRNILPGELVTLTCQVNSSYPAV
SSIKWLKDGVRLQTKTGVLHLPQAAWSDAGVYTCQAENGVGSLVSPPISLHIFVAEVQVSPAGPILEN
QTVTLVCNTPNEAPSDLRYSWYKNHVLLEDAHSHTLRLHLATRADTGFYFCEVQNVHGSERSGPVSVV
VTDPPLTPVLTAFLETQAGLVGILHCSVVSEPLATLVLSHGGHILASTSGDSDHSPRFSGTSGPNSLR
LEIRDLEETDSGEYKCSATNSLGNATSTLDFHANVARLLISPAAEVVEGQAVTLSCRSGLSPTPDARF
SWYLNGALLHEGPGSSLLLPAASSTDAGSYHCPARDGHSASGPSSPAVLTVLCEQPPRQPTFTTRLDL
DAAGAGAGRRGLLLCRVDSDPPARLQLLHKDRVVATSLPSGGGCSTCGGCSPRMKVTKAPNLLRVEIH
NPLLEEEGLYLCEASNALGNASTSATFNGQATVLAIAPSHTLQEGTEANLTCNVSREAAGSPANFSWF
RNGVLWAQGPLETVTLLPVARTDAALYACRILTEAGAQLSTPVLLSVLYPPDRPKLSALLDMGQGHMA
LFICTVDSRPLALLALFHGEHLLATSLGPQVPSHGRFQAKAEANSLKLEVRELGLGDSGSYRCEATNV
LGSSNTSLFFQVRGAWVQVSPSPELQEGQAVVLSCQVHTGVPEGTSYRWYRDGQPLQESTSATLRFAA
ITLTQAGAYHCQAQAPGSATTSLAAPISLHVSCKDAPRHVTLTTLMDTGPGRLGLLLCRVDSDPPAQL
RLLHGDRLVASTLQGVGGPEGSSPRLHVAVAPNTLRLEIHGANLEDEGVYICEASNTLGQASASADFD
AQSCECAGVARGYRAGGAAGEPDLPCVDHSPGPAHLHMVPGWAAAPGCPLHPPAQRHSQGCHLLPLRC
GPPWSGTPPLQTYHLGRPHAPRNLRLTYLLESHGGQLALVLCTVDSRPPAQLALSHAGRLLASSTAAS
VPNTLRLELRGPQPRDEGFYSCSARSPLGQANTSLELRLEVRVILAPEAAVPEGAPITVTCADPAAHA
PTLYTWYHNGRWLQEGPAASLSFLVATRAHAGAYSCQAQDAQGTRSSRPAALQVLCAPQDAVLSSFRD
SRARSMAVIQCTVDSEPPAELALSHDGKVLATSSGVHSLASGTGHVQVAPNALRLQVQDVPAGDDTYV
CTAQNLLGSISTIGRLQVEGEWRVVAEPGLDVPEAGAALNLSCRLLGPGPVGNSTFAWFWNDRRLHAE
PVPTLAFTHVARAQAGMYHCLAELPTGAAASAPVMLRVLYPPKTPTMMVFVEPEGGLRGILDCRVDSE
PLASLTLHLGSRLVASSQPQGAPAEPHIHVLASPNALRVDIEALRPSDQGEYICSASNVLGPASTSTY
FGVRALHRLHQFQQLLWVLGLLVGLLLLLLGLGACYTWRRRRVCKQSMGENPGRASSFHLLPTAGSSR

[0429] A ClustalW comparison of the above protein sequences yields the following sequence alignment shown in Table 14B.

TABLE 14B

Comparison of the NOV14 protein sequences.

| | |
|---|---|
| NOV14a | MGFLPKLLLLASAVLPPGQASWGVSSPQDVQGVKGSCLLIPCIFSFPADVEVPDGITAIW |
| NOV14b | ------------------RSSWGVSSPQDVQGVKGSCLLIPCIFSFPADVEVPDGITAIW |
| NOV14c | ------------------RSSWGVSSPQDVQGVKGSCLLIPCIFSFPADVEVPDGITAIW |
| NOV14d | ------------------RSSWGVSSPQDVQGVKGSCLLIPCIFSFPADVEVPDGITAIW |
| NOV14e | --------------------SWGVSSPQDVQGVKGSCLLIPCIFSFPADVEVPDGITAIW |
| NOV14f | --------------------SWGVSSPQDVQGVKGSCLLIPCIFSFPADVEVPDGITAIW |
| NOV14g | MGFLPKLLLLAS-FFPAGQASWGVSSPQDVQGVKGSCLLIPCIFSFPADVEVPDGITAIW |
| NOV14a | YYDYSGQRQVVSHSADPKLVEARFRGRTEFMGNPEHRVCNLLLKDLQPEDSGSYNFRFEI |
| NOV14b | YYDYSGQRQVVSHSADPKLVEARFRGRTEFMGNPEHRVCNLLLKDLQPEDSGSYNFRFEI |
| NOV14c | YYDYSGQRQVVSHSADPKLVEARFRGRTEFMGNPEHRVCNLLLKDLQPEDSGSYNFRFEI |
| NOV14d | YYDYSGQRQVVSHSVDPKLVEARFRGRTEFMGNPEHRVCNLLLKDLQPEDSGSYNFRFEI |
| NOV14e | YYDYSGQRQVVSHSADPKLVEARFRGRTEFMGNPEHRVCNLLLKDLQPEDSGSYNFRFEI |
| NOV14f | YYDYSGQRQVVSHSVDPKLVEARFRGRTEFMGNPEHRVCNLLLKDLQPEDSGSYNFRFEI |
| NOV14g | YYDYSGQRQVVSHSADPKLVEARFRGRTEFMGNPEHRVCNLLLKDLQPEDSGSYNFRFEI |
| NOV14a | SEVNRWSDVKGTLVTVTGDPRVPTIASPVELLEGTEVDFNCSTPYVCLQEQVRLQWQGQD |
| NOV14b | SEVNRWSDVKGTLVTVTEEPRVPTIASPVELLEGTEVDFNCSTPYVCLQEQVRLQWQGQD |
| NOV14c | SEVNRWSDVKGTLVTVTEEPRVPTIASPVELLEGTEVDFNCSTPYVCLQEQVRLQWQGQD |
| NOV14d | SEVNRWSDVKGTLVTVTEEPRVPTIASPVELLEGTEVDFNCSTPYVCLQEQVRLQWQGQD |
| NOV14e | SEVNRWSDVKGTLVTVTEEPRVPTIASPVELLEGTEVDFNCSTPYVCLQEQVRLQWQGQD |
| NOV14f | SEVNRWSDVKGTLVTVTEEPRVPTIASPVELLEGTEVDFNCSTPYVCLQEQVRLQWQGQD |
| NOV14g | SEVNRWSDVKGTLVTVTEEPRVPTIASPVELLEGTEVDFNCSTPYVCLQEQVRLQWQGQD |
| NOV14a | PARSVTFNSQKFEPTGVGHLETLHMAMSWQDHGRILRCQLSVANHRAQSEIHLQVKCAPK |
| NOV14b | PARSVTFNSQKFEPTGVGHLETLHMAMSWQDHGRILRCQLSVANHRAQSEIHLQVKYAPR |
| NOV14c | PARSVTFNSQKFEPTGVGHLETLHMAMSWQDHGRILRCQLSMANHRAQSEIHLQVKYAPR |
| NOV14d | PARSVTFNSQKFEPTGVGHLETLHMAMSWQDHGRILRCQLSMANHRAQSEIHLQVKYAPK |
| NOV14e | PARSVTFNSQKFEPTGVGHLETLHMAMSWQDHGRILRCQLSVANHRAQSEIHLQVKYAPR |
| NOV14f | PARSVTFNSQKFEPTGVGHLETLHNAMSWQDHGRILRCQLSMANHRAQSEIHLQVKYAPK |
| NOV14g | PARSVTFNSQKFEPTGVGHLETLHMAMSWQDHGRILRCQLSVANHRAQSEIHLQVKYAPK |
| NOV14a | GVKILLSPSGRNILPGELVTLTCQVNSSYPAVSSIKWLKDGVRLQTKTGVLHLPQAAWSD |
| NOV14b | GVKILLSPSGRNILPVD------------------------------------------- |
| NOV14c | GVKILLSPSGRNILPVD------------------------------------------- |
| NOV14d | GVKILLSPSGRNILPVD------------------------------------------- |
| NOV14e | GVKILLSPSGRNILP--------------------------------------------- |
| NOV14f | GVKILLSPSGRNILP--------------------------------------------- |
| NOV14g | GVKILLSPSGRNILPGELVTLTCQVNSSYPAVSSIKWLKDGVRLQTKTGVLHLPQAAWSD |
| NOV14a | AGVYTCQAENGVGSLVSPPISLHIFVAEVQVSPAGPILENQTVTLVCNTPNEAPSDLRYS |
| NOV14b | ------------------------------------------------------------ |
| NOV14c | ------------------------------------------------------------ |
| NOV14d | ------------------------------------------------------------ |
| NOV14e | ------------------------------------------------------------ |
| NOV14f | ------------------------------------------------------------ |
| NOV14g | AGVYTCQAENGVGSLVSPPISLHIFMAEVQVSPAGPILENQTVTLVCNTPNEAPSDLRYS |
| NOV14a | WYKNHVLLEDAHSHTLRLHLATRADTGFYFCEVQNVHGSERSGPVSVVVTDPPLTPVLTA |
| NOV14b | ------------------------------------------------------------ |
| NOV14c | ------------------------------------------------------------ |
| NOV14d | ------------------------------------------------------------ |
| NOV14e | ------------------------------------------------------------ |
| NOV14f | ------------------------------------------------------------ |
| NOV14g | WYKNHVLLEDAHSHTLRLHLATRADTGFYFCEVQNVHGSERSGPVSVVVNHPPLTPVLTA |
| NOV14a | FLETQAGLVGILHCSVVSEPLATLVLSHGGHILASTSGDSDHSPRFSGTSGPNSLRLEIR |
| NOV14b | ------------------------------------------------------------ |
| NOV14c | ------------------------------------------------------------ |
| NOV14d | ------------------------------------------------------------ |
| NOV14e | ------------------------------------------------------------ |
| NOV14f | ------------------------------------------------------------ |
| NOV14g | FLETQAGLVGILHCSVVSEPLATLVLSHGGHILASTSGDSDHSPRFSGTSGPNSLRLEIR |
| NOV14a | DLEETDSGEYKCSATNSLGNATSTLDFHANAARLLISPAAEVVEGQAVTLSCRSGLSPTP |
| NOV14b | ------------------------------------------------------------ |
| NOV14c | ------------------------------------------------------------ |
| NOV14d | ------------------------------------------------------------ |
| NOV14e | ------------------------------------------------------------ |
| NOV14f | ------------------------------------------------------------ |
| NOV14g | DLEETDSGEYKCSATNSLGNATSTLDFHANAARLLISPAAEVVEGQAVTLSCRSGLSPTP |
| NOV14a | DARFSWYLNGALLHEGPGSSLLLPAASSTDAGSYHCRARDGHSASGPSSPAVLTVLCEQP |
| NOV14b | ------------------------------------------------------------ |
| NOV14c | ------------------------------------------------------------ |
| NOV14d | ------------------------------------------------------------ |
| NOV14e | ------------------------------------------------------------ |
| NOV14f | ------------------------------------------------------------ |
| NOV14g | DARFSWYLNGALLHEGPGSSLLLPAASSTDAGSYHCRARDGHSASGPSSPAVLTVLY--P |
| NOV14a | PRQPTFTTRLDLDAAGAGAGRRGLLLCRVDSDPPARLQLLHKDRVVATSLPSGGGCSTCG |
| NOV14b | ------------------------------------------------------------ |
| NOV14c | ------------------------------------------------------------ |
| NOV14d | ------------------------------------------------------------ |
| NOV14e | ------------------------------------------------------------ |
| NOV14f | ------------------------------------------------------------ |
| NOV14g | PRQPTFTTRLDLDAAGAGAGRRGLLLCRVDSDPPARLQLLHKDRVVATSLPSGGGCSTCG |
| NOV14a | GCSPRMKVTKAPNLLRVEIHNPLLEEEGLYLCEASNALGNASTSATFNGQATVLAIAPSH |
| NOV14b | ------------------------------------------------------------ |
| NOV14c | ------------------------------------------------------------ |
| NOV14d | ------------------------------------------------------------ |
| NOV14e | ------------------------------------------------------------ |
| NOV14f | ------------------------------------------------------------ |
| NOV14g | GCSPRMKVTKAPNLLRVEIHNPLLEEEGLYLCEASNALGNASTSATFNGQATVLAIAPSH |
| NOV14a | TLQEGTEANLTCNVSREAAGSPANFSWFRNGVLWAQGPLETVTLLPVARTDAALYACRIL |
| NOV14b | ------------------------------------------------------------ |
| NOV14c | ------------------------------------------------------------ |
| NOV14d | ------------------------------------------------------------ |
| NOV14e | ------------------------------------------------------------ |
| NOV14f | ------------------------------------------------------------ |
| NOV14g | TLQEGTEANLTCNVSREAAGSPANFSWFRNGVLWAQGPLETVTLLPVARTDAALYACRIL |
| NOV14a | TEAGAQLSTPVLLSVLYPPDRPKLSALLDMGQGHMALFICTVDSRPLALLALFHGEHLLA |
| NOV14b | ------------------------------------------------------------ |
| NOV14c | ------------------------------------------------------------ |
| NOV14d | ------------------------------------------------------------ |
| NOV14e | ------------------------------------------------------------ |
| NOV14f | ------------------------------------------------------------ |
| NOV14g | TEAGAQLSTPVLLSVLYPPDRPKLSALLDMGQGHMALFICTVDSRPLALLALFHGEHLLA |
| NOV14a | TSLGPQVPSHGRFQAKAEANSLKLEVRELGLGDSGSYRCEATNVLGSSNTSLFFQVRGAW |
| NOV14b | ------------------------------------------------------------ |
| NOV14c | ------------------------------------------------------------ |
| NOV14d | ------------------------------------------------------------ |
| NOV14e | ------------------------------------------------------------ |
| NOV14f | ------------------------------------------------------------ |
| NOV14g | TSLGPQVPSHGRFQAKAEANSLKLEVRELGLGDSGSYRCEATNVLGSSNTSLFFQVRGAW |
| NOV14a | VQVSPSPELQEGQAVVLSCQVHTGVPEGTSYRWYRDGQPLQESTSATLRFAAITLTQAGA |
| NOV14b | ------------------------------------------------------------ |
| NOV14c | ------------------------------------------------------------ |
| NOV14d | ------------------------------------------------------------ |
| NOV14e | ------------------------------------------------------------ |
| NOV14f | ------------------------------------------------------------ |
| NOV14g | VQVSPSPELQEGQAVVLSCQVHTGVPEGTSYRWYRDGQPLQESTSATLRFAAITLTQAGA |
| NOV14a | YHCQAQAPGSATTSLAAPISLBVSCKDAPRHVTLTTLMDTGPGRLGLLLCRVDSDPPAQL |
| NOV14b | ------------------------------------------------------------ |
| NOV14c | ------------------------------------------------------------ |
| NOV14d | ------------------------------------------------------------ |
| NOV14e | ------------------------------------------------------------ |
| NOV14f | ------------------------------------------------------------ |
| NOV14g | YHCQAQAPGSATTSLAAPISLHVSY--APRHVTLTTLMDTGPGRLGLLLCRVDSDPPAQL |
| NOV14a | RLLHGDRLVASTLQGVGGPEGSSPRLHVAVAPNTLRLEIHGAMLEDEGVYICEASNTLGQ |
| NOV14b | ------------------------------------------------------------ |
| NOV14c | ------------------------------------------------------------ |
| NOV14d | ------------------------------------------------------------ |
| NOV14e | ------------------------------------------------------------ |
| NOV14f | ------------------------------------------------------------ |
| NOV14g | RLLHGDRLVASTLQGVGGPEGSSPRLHVAVAPNTLRLETHGAMLEDEGVYICEASNTLGQ |
| NOV14a | ASASADFDAQSCECAGVARGYRAGGAAGEPDLPCVDHSPGPAHLHMVPGWAAAPGCPLHP |
| NOV14b | ------------------------------------------------------------ |
| NOV14c | ------------------------------------------------------------ |
| NOV14d | ------------------------------------------------------------ |
| NOV14e | ------------------------------------------------------------ |
| NOV14f | ------------------------------------------------------------ |
| NOV14g | ASASADFDAQAVNVQVWPGATVREGQLVN--LTCLVWTTHPAQLTYTWYQDGQQRLDAHS |
| NOV14a | PAQRHSQGCHLLPLRCG--PPWSGTPPLQTYHLGRPHAPRNLRLTYLLESHGGQLALVLC |
| NOV14b | ------------------------------------------------------------ |
| NOV14c | ------------------------------------------------------------ |
| NOV14d | ------------------------------------------------------------ |
| NOV14e | ------------------------------------------------------------ |
| NOV14f | ------------------------------------------------------------ |
| NOV14g | IPLPNVTVRDATSYRCGVGPPGRAPRLSRPITLDVLYAPRNLRLTYLLESHGGQLALVLC |
| NOV14a | TVDSRPPAQLALSHAGRLLASSTAASVPNTLRLELRGPQPRDEGFYSCSARSPLGQANTS |
| NOV14b | ------------------------------------------------------------ |
| NOV14c | ------------------------------------------------------------ |
| NOV14d | ------------------------------------------------------------ |
| NOV14e | ------------------------------------------------------------ |
| NOV14f | ------------------------------------------------------------ |
| NOV14g | TVDSRPPAQLALSHAGRLLASSTAASVPNTLRLELRGPQPRDEGFYSCSARSPLGQANTS |
| NOV14a | LELRLE-VRVILAPEAAVPEGAPITVTCADPAAHAPTLYTWYHNGRWLQEGPAASLSFLV |
| NOV14b | ------------------------------------------------------------ |
| NOV14c | ------------------------------------------------------------ |
| NOV14d | ------------------------------------------------------------ |
| NOV14e | ------------------------------------------------------------ |
| NOV14f | ------------------------------------------------------------ |
| NOV14g | LELRLEGVRVILAPEAAVPEGAPITVTCADPAAHAPTLYTWYHNGRWLQEGPAASLSFLV |
| NOV14a | ATRAHAGAYSCQAQDAQGTRSSRPAALQVLCAPQDAVLSSFRDSRARSMAVIQCTVDSEP |
| NOV14b | ------------------------------------------------------------ |
| NOV14c | ------------------------------------------------------------ |
| NOV14d | ------------------------------------------------------------ |
| NOV14e | ------------------------------------------------------------ |
| NOV14f | ------------------------------------------------------------ |
| NOV14g | ATPAHAGAYSCQAQDAQGTRSSRPAALQVLYAPQDAVLSSFRDSRARSMAVIQCTVDSEP |
| NOV14a | PAELALSHDGKVLATSSGVHSLASGTGHVQVARNALRLQVQDVPAGDDTYVCTAQNLLGS |
| NOV14b | ------------------------------------------------------------ |
| NOV14c | ------------------------------------------------------------ |
| NOV14d | ------------------------------------------------------------ |
| NOV14e | ------------------------------------------------------------ |
| NOV14f | ------------------------------------------------------------ |
| NOV14g | PAELALSHDGKVLATSSGVHSLASGTGHVQVARNALRLQVQDVPAGDDTYVCTAQNLLGS |
| NOV14a | ISTIGRLQVEGEWRVVAEPGLDVPEGAALNLSCRLLGGPGPVGNSTFAWFWNDRRLHAEP |
| NOV14b | ------------------------------------------------------------ |
| NOV14c | ------------------------------------------------------------ |
| NOV14d | ------------------------------------------------------------ |
| NOV14e | ------------------------------------------------------------ |
| NOV14f | ------------------------------------------------------------ |
| NOV14g | ISTIGRLQVEGAR-VVAEPGLDVPEGAALNLSCRLLGGPGPVGNSTFAWFWNDRRLHAEP |
| NOV14a | VPTLAFTHVARAQAGMYHCLAELPTGAAASAPVMLRVLYPPKTPTMMVFVEPEGGLRGIL |
| NOV14b | ------------------------------------------------------------ |
| NOV14c | ------------------------------------------------------------ |
| NOV14d | ------------------------------------------------------------ |
| NOV14e | ------------------------------------------------------------ |
| NOV14f | ------------------------------------------------------------ |
| NOV14g | VPTLAFTHVARAQAGMYHCLAELPTGAAASAPVMLRVLYPPKTPTNMVFVEPEGGLRGIL |
| NOV14a | DCRVDSEPLASLTLHLGSRLVASSQPQGAPAEPHIHVLASPNALRVDIEALRPSDQGEYI |
| NOV14b | ------------------------------------------------------------ |
| NOV14c | ------------------------------------------------------------ |
| NOV14d | ------------------------------------------------------------ |
| NOV14e | ------------------------------------------------------------ |
| NOV14f | ------------------------------------------------------------ |
| NOV14g | DCRVDSEPLASLTLHLGSRLVASSQPQGAPAEPHIHVLASPNALRVDIEALRPSDQGEYI |
| NOV14a | CSASNVLGPASTSTYFGVPALHRLHQFQQLLWVLGLLVGLLLLLLGLGACYTWRRRRVCK |
| NOV14b | ------------------------------------------------------------ |
| NOV14c | ------------------------------------------------------------ |
| NOV14d | ------------------------------------------------------------ |
| NOV14e | ------------------------------------------------------------ |
| NOV14f | ------------------------------------------------------------ |
| NOV14g | CSASNVLGSASTSTYFGVPALHRLHQFQQLLWVLGLLVGLLLLLLGLGACYTWRRRRVCK |
| NOV14a | QSMGENP-----GEASSFHLLPLAGSSR--------- |
| NOV14b | ------------------------------------- |
| NOV14c | ------------------------------------- |
| NOV14d | ------------------------------------- |
| NOV14e | ------------------------------------- |
| NOV14f | ------------------------------------- |
| NOV14g | QSMGENSVEMAFQKETTQLIDPDAATCETSTCAPPLG |
| NOV14a | (SEQ ID NO: 398) |
| NOV14b | (SEQ ID NO: 400) |
| NOV14c | (SEQ ID NO: 402) |
| NOV14d | (SEQ ID NO: 404) |
| NOV14e | (SEQ ID NO: 406) |
| NOV14f | (SEQ ID NO: 408) |
| NOV14g | (SEQ ID NO: 410) |

[0430] Further analysis of the NOV14a protein yielded the following properties shown in Table 14C.

TABLE 14C
Protein Sequence Properties NOV14a

| | |
|---|---|
| SignalP analysis: | Cleavage site between residues 21 and 22 |
| PSORT II analysis: | |

| PSG: | a new signal peptide prediction method | |
|---|---|---|
| | N-region: | length 6; pos. chg 1; neg. chg 0 |
| | H-region: | length 22; peak value 9.20 |
| | PSG score: | 4.80 |

| | |
|---|---|
| GvH: | von Heijne's method for signal seq. recognition |
| | GvH score (threshold: −2.1): 2.74 |
| | possible cleavage site: between 20 and 21 |

>>> Seems to have a cleavable signal peptide (1 to 20)

| ALOM: | Klein et al's method for TM region allocation | | |
|---|---|---|---|
| | Init position for calculation: 21 | | |
| | Tentative number of TMS(s) for the threshold 0.5: 3 | | |
| | Number of TMS(s) for threshold 0.5: 1 | | |
| | INTEGRAL | Likelihood = | Transmembrane |
| | | −11.25 | 1647-1663 |

| | |
|---|---|
| PERIPHERAL | Likelihood =0.69 (at 36) |

| | |
|---|---|
| | ALOM score: −11.25 (number of TMSs: 1) |
| MTOP: | Prediction of membrane topology (Hartmann et al.) |
| | Center position for calculation: 10 |
| | Charge difference: −2.0 C(0.0)-N(2.0) |
| | N >= C: N-terminal side will be inside |

>>> membrane topology: type 1a (cytoplasmic tail 1664 to 1700)

| MITDISC: | discrimination of mitochondrial targeting seq | | | |
|---|---|---|---|---|
| | R content: | 0 | Hyd Moment(75): | 6.81 |
| | Hyd Moment(95): | 7.54 | G content: | 3 |
| | D/E content: | 1 | S/T content: | 4 |

| | |
|---|---|
| | Score: −4.95 |
| Gavel: | prediction of cleavage sites for mitochondrial preseq |
| | cleavage site motif not found |

NUCDISC: discrimination of nuclear localization signals

| | |
|---|---|
| | pat4: RRRR (5) at 1671 |
| | pat7: none |
| | bipartite: none |
| | content of basic residues: 7.3% |
| | NLS Score: −0.16 |
| KDEL: | ER retention motif in the C-terminus: none |

ER Membrane Retention Signals: none
SKL: peroxisomal targeting signal in the C-terminus: none
PTS2: 2nd peroxisomal targeting signal: none
VAC: possible vacuolar targeting motif: none
RNA-binding motif: none
Actinin-type actin-binding motif:

type 1: none
type 2: none

NMYR: N-myristoylation pattern: none
Prenylation motif: none
memYQRL: transport motif from cell surface to Golgi: none
Tyrosines in the tail: 1667
Dileucine motif in the tail: found

LL at 1692

checking 63 PROSITE DNA binding motifs: none
checking 71 PROSITE ribosomal protein motifs: none
checking 33 PROSITE prokaryotic DNA binding motifs: none

| | |
|---|---|
| NNCN: | Reinhardt's method for Cytoplasmic/Nuclear discrimination |
| | Prediction: cytoplasmic |
| | Reliability: 55.5 |
| COIL: | Lupas's algorithm to detect coiled-coil regions |
| | total: 0 residues |

Final Results (k = 9/23):

33.3%: endoplasmic reticulum
22.2%: Golgi
22.2%: extracellular, including cell wall
11.1%: plasma membrane
11.1%: vesicles of secretory system

>> prediction for CG51821-01 is end (k = 9)

[0431] A search of the NOV14a protein against the Geneseq database, a proprietary database that contains sequences published in. patents and patent publication, yielded several homologous proteins shown in Table 14D.

TABLE 14D
Geneseq Results for NOV14a

| | | NOV14a | Identities/ | |
|---|---|---|---|---|
| | | Residues/ | Similarities for | |
| Geneseq | Protein/Organism/Length | Match | the Matched | Expect |
| Identifier | [Patent #, Date] | Residues | Region | Value |
| ABB05044 | Human NOV6 protein SEQ ID NO: 24 - | 1 . . . 1700 | 1700/1700 (100%) | 0.0 |
| | Homo sapiens, 1700 aa. | 1 . . . 1700 | 1700/1700 (100%) | |
| | [WO200190155-A2, 29-NOV-2001] | | | |
| AAE09448 | Human sbg24878Sla protein #1 - | 1 . . . 1683 | 1588/1695 (93%) | 0.0 |
| | Homo sapiens, 1709 aa. | 1 . . . 1672 | 1598/1695 (93%) | |
| | [WO200160850-A1, 23-AUG-2001] | | | |
| ME09449 | Human sbg24878Sla protein #2 - | 1 . . . 1671 | 1576/1683 (93%) | 0.0 |
| | Homo sapiens, 1694 aa. | 1 . . . 1660 | 1586/1683 (93%) | |
| | [WO200160850-A1, 23-AUG-2001] | | | |
| ABG10466 | Novel human diagnostic protein | 18 . . . 1671 | 1562/1666 (93%) | 0.0 |
| | #10457 - Homo sapiens, 1839 aa. | 162 . . . 1805 | 1573/1666 (93%) | |
| | [WO200175067-A2, 11-OCT-2001] | | | |
| ABP69461 | Human polypeptide SEQ ID NO | 482 . . . 1683 | 1118/1214 (92%) | 0.0 |
| | 1508 - Homo sapiens, 1263 aa. | 35 . . . 1232 | 1126/1214 (92%) | |
| | [WO200270539-A2, 12-SEP-2002] | | | |

[0432] In a BLAST search of public sequence databases, the NOV14a protein was found to have homology to the proteins shown in the BLASTP data in Table 14E.

TABLE 14E
Public BLASTP Results for NOV14a

| | | NOV14a | Identities/ | | |
|---|---|---|---|---|---|
| Protein | | Residues/ | Similarities for | | |
| Accession | | Match | the Matched | | Expect |
| Number | Protein/Organism/Length | Residues | Portion | | Value |
| Q9BZZ2 | Sialoadhesin precursor (Sialic acid | 1 . . . 1683 | 1594/1695 | (94%) | 0.0 |
| | binding Ig-like lectin-1) (Siglec- 1) | 1 . . . 1678 | 1603/1695 | (94%) | |
| | (CD169 antigen) - Homo sapiens | | | | |
| | (Human), 1709 aa. | | | | |
| Q62230 | Sialoadhesin precursor (Sialic acid | 8 . . . 1683 | 1167/1688 | (69%) | 0.0 |
| | binding Ig-like lectin-1) (Siglec- 1) | 7 . . . 1675 | 1333/1688 | (78%) | |
| | (Sheep erythrocyte receptor) (SER) - | | | | |
| | Mus musculus (Mouse), 1694 aa. | | | | |
| BAC56927 | FLJ00411 protein - Homo sapiens | 798 . . . 1091 | 288/294 | (97%) | e−162 |
| | (Human), 437 aa (fragment). | 17 . . . 308 | 289/294 | (97%) | |
| P35329 | B-cell receptor CD22 precursor (Leu- | 22 . . . 634 | 167/649 | (25%) | 5e−37 |
| | 14) (B-lymphocyte cell adhesion | 26 . . . 638 | 274/649 | (41%) | |
| | molecule) (BL-CAM) (Siglec-2) - Mus | | | | |
| | musculus (Mouse), 862 aa. | | | | |
| A46512 | CD22 homolog/B lymphocyte- | 22 . . . 634 | 163/653 | (24%) | 6e−35 |
| | restricted adhesion molecule - mouse, | 26 . . . 644 | 271/653 | (40%) | |
| | 868 aa. | | | | |

[0433] PFam analysis predicts that the NOV14a protein contains the domains shown in the Table 14F.

TABLE 14F
Domain Analysis of NOV14a

| | | Identities/ | |
|---|---|---|---|
| | | Similarities | |
| Pfam | NOV14a | for the | Expect |
| Domain | Match Region | Matched Region | Value |
| ig | 256 . . . 308 | 20/54 (37%) | 1.5e−11 |
| | | 43/54 (80%) | |
| ig | 340 . . . 393 | 17/55 (31%) | 4.3e−10 |
| | | 44/55 (80%) | |
| ig | 427 . . . 494 | 17/71 (24%) | 0.0082 |
| | | 51/71 (72%) | |
| ig | 525 . . . 578 | 16/55 (29%) | 2.1e−06 |
| | | 39/55 (71%) | |
| ig | 620 . . . 694 | 12/78 (15%) | 0.92 |
| | | 53/78 (68%) | |
| ig | 725 . . . 779 | 15/56 (27%) | 0.027 |
| | | 35/56 (62%) | |
| ig | 813 . . . 881 | 13/72 (18%) | 0.022 |
| | | 47/72 (65%) | |
| ig | 912 . . . 965 | 16/55 (29%) | 2.1e−07 |
| | | 39/55 (71%) | |
| ig | 1003 . . . 1074 | 14/75 (19%) | 0.023 |
| | | 52/75 (69%) | |
| ig | 1191 . . . 1248 | 13/61 (21%) | 0.0048 |
| | | 40/61 (66%) | |
| ig | 1278 . . . 1330 | 15/55 (27%) | 0.16 |
| | | 34/55 (62%) | |
| ig | 1364 . . . 1431 | 13/72 (18%) | 0.00084 |
| | | 50/72 (69%) | |

### Example 15

[0434] The NOV15 clone was analyzed, and the nucleotide and encoded polypeptide sequences are shown in Table 15A.

TABLE 15A
NOV15 Sequence Analysis

| | | |
|---|---|---|
| NOV15a, CG51992-05 | SEQ ID NO: 419 | 1511 bp |
| DNA Sequence | ORF Start: ATG at 339 | ORF Stop: TGA at 1203 |

AGAGAAGGAGCTAAGAAGCCTGTGGCTACTGAGAAGAGGCCAGCTAAGTGATGCTGGCATGTAGGAAG
CAGGCACACTACTTGTGGATGGGGAGCATGGTGACTGGAGAGACCAGTGAGGGCAATTTGCATCCTTT
GAGGGCAATTTGGTCTCCAAAGAACAGAGTGATCTGGAGGGAGTGACAGCCAAGAGTCAGCCAGAGCA
TCTCAGCCATCCCAGGAATCAGAGAAATCCAGGGAAGCCAGTCTTAATATGATGGAAACATCTCTGAA
CTTCTAAAAGACCAAGGTTGGCGTTTTAGCTCTATTAATTTTACTTCGTCTTGGCCAGAATTCACAAT
GACAACAGTGACAGTGACCACAGAAATTCCCCCAAGGGATAAGATGGAAGATAATTCTGCCTTGTATG
AGTCTACGTCCGCTCACATTATTGAAGAAACCGAGTATGTGAAAAAGATTCGAACTACTCTGCAAAAG
ATCAGGACCCAGATGTTTAAAGATGAAATAAGACATGACAGTACAAATCACAAACTAGATGCAAAGCT
GCAAGCCTCCAGAGAAGCAGGAGCAGCAGCTCTGAGAAACGTGGCCCAGAGATTATTTGAAAACTACC
AAACGCAATCTGAAGAAGTGAGAAAGAAGCAGGAGGACAGTAAACAATTACTCCAGGTTAACAAGCTT
GAAAAAGAACAGAAATTGAAACAACATGTTGAAAATCTGAATCAAGTTGCTGAAAAACTTGAAGAAAA
ACACAGTCAAATTACAGAATTGGAGAACCTTGTACAGAGAATGGAAAAGGAAAAGAGAACACTACTAG
AAAGAAAACTGTCTTTGGAAAACAAGCTACTGCAACTCAAATCCAGTGCTACATATGGAAAAAGTTGC
CAGGATCTTCAGAGGGAGATTTCCATTCTCCAGGAGCAGATCTCTCATCTGCAGTTTGTGATTCACTC
CCAACATCAGAACCTGCGCAGTGTCATCCAGGAGATGGAAGGATTAAAAAATAATTTAAAAGAACAAG
ACAAAAGAATTGAAAATCTCAGAGAAAAGGTTAACATACTTGAAGCCCAGAATAAAGAACTAAAAACC
CAGGTAGCACTTTCATCTGAAACTCCTAGGACAAAGGTATCTAAGGCTGTCTCTACAAGTGAATTGAA
GACCGAAGGTGTTTCCCCTTATTTAATGTTGATTAGGTTACGGAAATGAACTGGCTGGATGAAGATCT
GATTTAGAAAGACTGCGTGAGTCTTATTTATTCTCTGAAACACAGCCCAAGTTTCATGTTAAAATGGC
AAAATGCCATTATTTAAATGGAACTTATTACATACCAATGGCTTTGCAAGAAGATGACATTTCAGAAA
ATCAAACAAATCTATATTTAATGGATGGACTCTTCAAAACTTACCAAATAGTTGAAGAAACCAGGTGC
CTTCTCATGATGGAAGACAGATTCTGCTTTAAATTAAAAAAAAAAAAATCTGAATCTTGTTTTCAGAT
TTTTTTTTCTACTGG

| | | | |
|---|---|---|---|
| NOV15a, CG51992-05 | SEQ ID NO: 420 | 288 aa | MW at 33581.0kD |
| Protein Sequence | | | |

MTTVTVTTEIPPRDKMEDNSALYESTSAHIIEETEYVKKIRTTLQKIRTQMFKDEIRHDSTNHKLDAK
LQASREAGAAALRNVAQRLFENYQTQSEEVRKKQEDSKQLLQVNKLEKEQKLKQHVENLNQVAEKLEE
KHSQITELENLVQRMEKEKRTLLERKLSLENKLLQLKSSATYGKSCQDLQREISILQEQISHLQFVIH
SQHQNLRSVIQEMEGLKNNLKEQDKRIENLREKVNILEAQNKELKTQVALSSETPRTKVSKAVSTSEL
KTEGVSPYLMLIRLRK

| | | |
|---|---|---|
| NOV15b, CG51992-01 | SEQ ID NO: 421 | 705 bp |
| DNA Sequence | ORF Start: at 3 | ORF Stop: TGA at 423 |

TACAAAGAATGGAAAAGGAAAAGAGAACACTACTAGAAAGAAAACTGTCTTTGGAAAACAAGCTACTG
CAACTCAAATCCAGTGCTACATATGGAAAAAGTTGCCAGGATCTTCAGAGGGAGATTTCCATTCTCCA
GGAGCAGATCTCTCATCTGCAGTTTGTGATTCACTCCCAACATCAGAACCTGCGCAGTGTCATCCAGG
AGATGGAAGGATTAAAAAATAATTTAAAAGAACAAGACAAAAGAATTGAAAATCTCAGAGAAAAGGTT
AACATACTTGAAGCCCAGAATAAAGAACTAAAAACCCAGGTAGCACTTTCATCTGAAACTCCTAGGAC
AAAGGTATCTAAGGCTGTCTCTACAAGTGAATTGAAGACCGAAGGTGTTTCCCCTTATTTAATGTTGA
TTAGGTTACGGAAATGAACTGGCTGGATGAAGATCTGATTTAGAAAGACTGCGTGAGTCTTATTTATT
CTCTGAAACACACCCCAAGTTTCATGTTAAAATGGCAAAATGCCATTATTTAAATGGAACTTATTACA
TACCAATGGCTTTGCAAGAAGATGACATTTCAGAAAATCAAACAAATCTATATTTAATGGATGGACTC
TTCAAAACTTACCAAATAGTTGAAGAAACCAGGTGCCTTCTCATGATGGAAGACAGATTCTGCTTTAA
ATTAAAAAAAAAAAAATCTGAAAAA

| | | | |
|---|---|---|---|
| NOV15b, CG51992-01 | SEQ ID NO: 422 | 140 aa | MW at 16324.7kD |
| Protein Sequence | | | |

QRMEKEKRTLLERKLSLENKLLQLKSSATYGKSCQDLQREISILQEQISHLQFVIHSQHQNLRSVIQE
MEGLKNNLKEQDKRIENLREKVNILEAQNKELKTQVALSSETPRTKVSKAVSTSELKTEGVSPYLMLI
RLRK

| | | |
|---|---|---|
| NOV15c, CG51992-02 | SEQ ID NO: 423 | 1080 bp |
| DNA Sequence | ORF Start: ATG at 45 | ORF Stop: TGA at 798 |

GTTTAAAGATGAAATGAGACATGACAGTACAAATCACAAACTAGATGCAAAGTTTGGATTTGCTTATG
AAAAAGATAAAAGGAAAAGACCTACAGCTCTTAGAAATGAACAAAGAGAATGAAGTATTGAAAATCAA
GCTGCAAGCCTCCAGAGAAGCAGGAGCAGCAGCTCTGAGAAACGTGGCCCAGAGATTATTTGAAAACT
ACCAAACGCAATCTGAAGAAGTGAGAAAGAAGCAGGAGGGCAGTAAACAATTACTCCAGGTTAACAAG
CTTGAAAAAGAACAGAAATTGAAACAACATGTTGAAAATCTGAATCAAGTTGCTGAAAAACTTGAAGA
AAAACACAGTCAAATTACAGAATTGGAGAACCTTGTACAGAGAATGGAAAAGGAAAAGAGAACACTAC
TAGAAAGAAAACTGTCTTTGGAAAACAAGCTACTGCAACTCAAATCCAGTGCTACATATGGAAAAAGT
TGCCAGGATCTTCAGAGGGAGATTTCCATTCTCCAGGAGCAGATCTCTCATCTGCAGTTTGTGATTCA
CTCCCAACATCAGAACCTGCGCAGTGTCATCCAGGAGATGGAAGGATTAAAAAATAATTTAAAAGAAC
AAGACAAAAGAATTGAAAATCTCAGAGAAAAGGTTAACATACTTGAAGCCCAGAATAAAGAACTAAAA
ACCCAGGTAGCACTTTCATCTGAAACTCCTAGGACAAAGGTATCTAAGGCTGTCTCTACAAGTGAATT
GAAGACCGAAGGTGTTTCCCCTTATTTAATGTTGATTAGGTTACGGAAATGAACTGGCTGGATGAAGA
TCTGATTTAGAAAGACTGCGTGAGTCTTATTTATTCTCTGAAACACAGCCCAAGTTTCATGTTAAAAT
GGCAAAATGCCATTATTTAAATGGAACTTATTACATACCAATGGCTTTGCAAGAAGATGACATTTCAG
AAAATCAAACAAATCTATATTTAATGGATGGACTCTTCAAAACTTACCAAATAGTTGAAGAAACCAGG
TGCCTTCTCATGATGGAAGACAGATTCTGCTTTAAATTAAAAAAAAAAAAATCTGAAAAA

| | | | |
|---|---|---|---|
| NOV15c, CG51992-02 | SEQ ID NO: 424 | 251 aa | MW at 29229.5kD |
| Protein Sequence | | | |

MQSLDLLMKKIKGKDLQLLEMNKENEVLKIKLQASREAGAAALRNVAQRLFENYQTQSEEVRKKQEGS
KQLLQVNKLEKEQKLKQHVENLNQVAEKLEEKHSQITELENLVQRMEKEKRTLLERKLSLENKLLQLK
SSATYGKSCQDLQREISILQEQISHLQFVIHSQHQNLRSVIQEMEGLKNNLKEQDKRIENLREKVNIL
EAQNKELKTQVALSSETPRTKVSKAVSTSELKTEGVSPYLMLIRLRK

| | | |
|---|---|---|
| NOV15d, CG51992-03 | SEQ ID NO: 425 | 1442 bp |
| DNA Sequence | ORF Start: ATG at 155 | ORF Stop: TGA at 1160 |

GCCCAGGGGAGGAGCAGCACCGGGACCCCGCGTCGGCTGGGCGCCCCACAAGGGAAGCCAGTCTTAAT
ATGATGGAAACATCTCTGAACTTCTAAAAGACCAAGGTTGGCGTTTTAGCTCTATTAATTTTACTTCG
TCTTGGCCAGAATTCACAATGACAACAGTGACAGTGACCACAGAAATTCCCCCAAGGGATAAGATGGA
AGATAATTCTGCCTTGTATGAGTCTACGTCCGCTCACATTATTGAAGAAACCGAGTATGTGAAAAAGA
TTCGAACTACTCTGCAAAAGATCAGGACCCAGATGTTTAAAGATGAAATAAGACATGACAGTACAAAT
CACAAACTAGATGCAAAGCACTGTGGAAACCTTCAACAGGGCTCTGATTCTGAAATGGATCCTTCTTG
TTGCAGTTTGGATTTGCTTATGAAAAAGATAAAAGGAAAAGACCTACAGCTCTTAGAAATGAACAAAG
AGAATGAAGTATTGAAAATCAAGCTGCAAGCCTCCAGAGAAGCAGGAGCAGCAGCTCTGAGAAACGTG
GCCCAGAGATTATTTGAAAACTACCAAACGCAATCTGAAGAAGTGAGAAAGAAGCAGGAGGACAGTAA
ACAATTACTCCAGGTTAACAAGCTTGAAAAAGAACAGAAATTGAAACAACATGTTGAAAATCTGAATC
AAGTTGCTGAAAAACTTGAAGAAAAACACAGTCAAATTACAGAATTGGAGAACCTTGTACAGAGAATG
GAAAAGGAAAAGAGAACACTACTAGAAAGAAAACTGTCTTTGGAAAACAAGCTACTGCAACTCAAATC
CAGTGCTACATATGGAAAAAGTTGCCAGGATCTTCAGAGGGAGATTTCCATTCTCCAGGAGCAGATCT
CTCATCTGCAGTTTGTGATTCACTCCCAACATCAGAACCTGCGCAGTGTCATCCAGGAGATGGAAGGA
TTAAAAAATAATTTAAAAGAACAAGACAAAAGAATTGAAAATCTCAGAGAAAAGGTTAACATACTTGA
AGCCCAGAATAAAGAACTAAAAACCCAGGTAGCACTTTCATCTGAAACTCCTAGGACAAAGGTATCTA
AGGCTGTCTCTACAAGTGAATTGAAGACCGAAGGTGTTTCCCCTTATTTAATGTTGATTAGGTTACGG
AAATGAACTGGCTGGATGAAGATCTGATTTAGAAAGACTGCGTGAGTCTTATTTATTCTCTGAAACAC
AGCCCAAGTTTCATGTTAAAATGGCAAAATGCCATTATTTAAATGGAACTTATTACATACCAATGGCT
TTGCAAGAAGATGACATTTCAGAAAATCAAACAAATCTATATTTAATGGATGGACTCTTCAAAACTTA
CCAAATAGTTGAAGAAACCAGGTGCCTTCTCATGATGGAAGACAGATTCTGCTTTAAATTAAAAAAAA
AAAAATCTGAAAAA

| | | | |
|---|---|---|---|
| NOV15d, CG51992-03 | SEQ ID NO: 426 | 335 aa | MW at 38869.2kD |
| Protein Sequence | | | |

MTTVTVTTEIPPRDKMEDNSALYESTSAHIIEETEYVKKIRTTLQKIRTQMFKDEIRHDSTNHKLDAK
HCGNLQQGSDSEMDPSCCSLDLLMKKIKGKDLQLLENNKENEVLKIKLQASREAGAAALRNVAQRLFE
NYQTQSEEVRKKQEDSKQLLQVNKLEKEQKLKQHVENLNQVAEKLEEKHSQITELENLVQRMEKEKRT
LLERKLSLENKLLQLKSSATYGKSCQDLQREISILQEQISHLQFVIHSQHQNLRSVIQEMEGLKNNLK
EQDKRIENLREKVNILEAQNKELKTQVALSSETPRTKVSKAVSTSELKTEGVSPYLMLIRLRK

| | | |
|---|---|---|
| NOV15e, CG51992-04 | SEQ ID NO: 427 | 1482bp |
| DNA Sequence | ORF Start: ATG at 195 | ORF Stop: TGA at 1200 |

GTGTGTGGGTGTCCAGGTGCCTTTCCAGCGGCTTCCCCAGTGGAGTTCCTGGCATCAAGGACATTTCC
TGTAAAAGGGTCCTTGTTGAAGAGGGAAGCCAGTCTTAATATGATGGAAACATCTCTGAACTTCTAAA
AGACCAAGGTTGGCGTTTTAGCTCTATTAATTTTACTTCGTCTTGGCCAGAATTCACAATGACAACAG
TGGCAGTGACCACAGAAATTCCCCCAAGGGATAAGATGGAAGATAATTCTGCCTTGTATGAGTCTACG
TCCGCTCACATTATTGAAGAAACCGAGTATGTGAAAAAGATTCGAACTACTCTGCAAAAGATCAGGAC
CCAGATGTTTAAAGATGAAATAAGACATGACAGTACAAATCACAAACTAGATGCAAAGCACTGTGGAA
ACCTTCAACAGGGCTCTGATTCTGAAATGGATCCTTCTTGTTGCAGTTTGGATTTGCTTATGAAAAAG
ATAAAAGGAAAAGACCTACAGCTCTTAGAAATGAACAAAGAGAATGAAGTATTGAAAATCAAGCTGCA
AGCCTCCAGAGAAGCAGGAGCAGCAGCTCTGAGAAACGTGGCCCAGAGATTATTTGAAAACTACCAAA
CGCAATCTGAAGAAGTGAGAAAGAAGCAGGAGGACAGTAAACAATTACTCCAGGTTAACAAGCTTGAA
AAAGAACAGAAATTGAAACAACATGTTGAAAATCTGAATCAAGTTGCTGAAAAACTTGAAGAAAAACA
CAGTCAAATTACAGAATTGGAGAACCTTGTACAGAGAATGGAAAAGGAAAAGAGAACACTACTAGAAA
GAAAACTGTCTTTGGAAAACAAGCTACTGCAACTCAAATCCAGTGCTACATATGGAAAAAGTTGCCAG
GATCTTCAGAGGGAGATTTCCATTCTCCAGGAGCAGATCTCTCATCTGCAGTTTGTGATTCACTCCCA
ACATCAGAACCTGCGCAGTGTCATCCAGGAGATGGAAGGATTAAAAAATAATTTAAAAGAACAAGACA
AAAGAATTGAAAATCTCAGAGAAAAGGTTAACATACTTGAAGCCCAGAATAAAGAACTAAAAACCCAG
GTAGCACTTTCATCTGAAACTCCTAGGACAAAGGTATCTAAGGCTGTCTCTACAAGTGAATTGAAGAC
CGAAGGTGTTTCCCCTTATTTAATGTTGATTAGGTTACGGAAATGAACTGGCTGGATGAAGATCTGAT
TTAGAAAGACTGCGTGAGTCTTATTTATTCTCTGAAACACAGCCCAAGTTTCATGTTAAAATGGCAAA
ATGCCATTATTTAAATGGAACTTATTACATACCAATGGCTTTGCAAGAAGATGACATTTCAGAAAATC
AAACAAATCTATATTTAATGGATGGACTCTTCAAAACTTACCAAATAGTTGAAGAAACCAGGTGCCTT
+E,UNA CTCATGATGGAAGACAGATTCTGCTTTAAATTAAAAAAAAAAAAATCTGAAAAA

| | | | |
|---|---|---|---|
| NOV15e, CG51992-04 | SEQ ID NO: 428 | 335 aa | MW at 38839.1kD |
| Protein Sequence | | | |

MTTVAVTTEIPPRDKMEDNSALYESTSAHIIEETEYVKKIRTTLQKIRTQMFKDEIRHDSTNHKLDAK
HCGNLQQGSDSEMDPSCCSLDLLMKKIKGKDLQLLEMNKENEVLKIKLQASREAGAAALRINAQRLFE
NYQTQSEEVRKKQEDSKQLLQVNKLEKEQKLKQHVENLNQVAEKLEEKHSQITELENLVQRMEKEKRT
LLERKLSLENKLLQLKSSATYGKSCQDLQREISILQEQISHLQFVIHSQHQNLRSVIQEMEGLKNNLK
EQDKRIENLREKVNILEAQNKELKTQVALSSETPRTKVSKAVSTSELKTEGVSPYLMLIRLRK

| | | |
|---|---|---|
| NOV15f, SNP13382486 | SEQ ID NO: 429 | 1511 bp |
| of CG51992-05, | ORF Start: ATG at 339 | ORF Stop: TGA at 1203 |
| DNA Sequence | SNP Pos: 506 | SNP Change: A to G |

AGAGAAGGAGCTAAGAAGCCTGTGGCTACTGAGAAGAGGCCAGCTAAGTGATGCTGGCATGTAGGAAG
CAGGCACACTACTTGTGGATGGGGAGCATGGTGACTGGAGAGACCAGTGAGGGCAATTTGCATCCTTT
GAGGGCAATTTGGTCTCCAAAGAACAGAGTGATCTGGAGGGAGTGACAGCCAAGAGTCAGCCAGAGCA
TCTCAGCCATCCCAGGAATCAGAGAAATCCAGGGAAGCCAGTCTTAATATGATGGAAACATCTCTGAA
CTTCTAAAAGACCAAGGTTGGCGTTTTAGCTCTATTAATTTTACTTCGTCTTGGCCAGAATTCACAAT
GACAACAGTGACAGTGACCACAGAAATTCCCCCAAGGGATAAGATGGAAGATAATTCTGCCTTGTATG
AGTCTACGTCCGCTCACATTATTGAAAGAAACCGAGTATGTGAAAAAGATTCGAACTACTCTGCAAAG
ATCAGGACCCAGATGTTTAAAGATGAAATGAGACATGACAGTACAAATCACAAACTAGATGCAAAGCT
GCAAGCCTCCAGAGAAGCAGGAGCAGCAGCTCTGAGAAACGTGGCCCAGAGATTATTTGAAAACTACC
AAACGCAATCTGAAGAAGTGAGAAAGAAGCAGGAGGACAGTAAACAATTACTCCAGGTTAACAAGCTT
GAAAAAGAACAGAAATTGAAACAACATGTTGAAAATCTGAATCAAGTTGCTGAAAAACTTGAAGAAAA
ACACAGTCAAATTACAGAATTGGAGAACCTTGTACAGAGAATGGAAAAGGAAAAGAGAACACTACTAG
AAAGAAAACTGTCTTTGGAAAACAAGCTACTGCAACTCAAATCCAGTGCTACATATGGAAAAAGTTGC
CAGGATCTTCAGAGGGAGATTTCCATTCTCCAGGAGCAGATCTCTCATCTGCAGTTTGTGATTCACTC
CCAACATCAGAACCTGCGCAGTGTCATCCAGGAGATGGAAGGATTAAAAAATAATTTAAAAGAACAAG
ACAAAAGAATTGAAAATCTCAGAGAAAAGGTTAACATACTTGAAGCCCAGAATAAAGAACTAAAAACC
CAGGTAGCACTTTCATCTGAAACTCCTAGGACAAAGGTATCTAAGGCTGTCTCTACAAGTGAATTGAA
GACCGAAGGTGTTTCCCCTTATTTAATGTTGATTAGGTTACGGAAATGAACTGGCTGGATGAAGATCT
GATTTAGAAAGACTGCGTGAGTCTTATTTATTCTCTGAAACACAGCCCAAGTTTCATGTTAAAATGGC
AAAATGCCATTATTTAAATGGAACTTATTACATACCAATGGCTTTGCAAGAAGATGACATTTCAGAAA
ATCAAACAAATCTATATTTAATGGATGGACTCTTCAAAACTTACCAAATAGTTGAAGAAACCAGGTGC
CTTCTCATGATGGAAGACAGATTCTGCTTTAAATTAAAAAAAAAAAAATCTGAATCTTGTTTTCAGAT
TTTTTTTTCTACTGG

| | | | |
|---|---|---|---|
| NOV15f, SNP13382486 | SEQ ID NO: 430 | 288 aa | MW at 33599.1kD |
| of CG51992-05, | SNP Pos: 56 | | SNP Change: |
| Protein Sequence | | | Ile to Met |

MTTVTVTTEIPPRDKMEDNSALYESTSAHIIEETEYVKKIRTTLQKIRTQMFKDEMRHDSTNHKLDAK
LQASREAGAAALRNVAQRLFENYQTQSEEVRKKQEDSKQLLQVNKLEKEQKLKQHVENLNQVAEKLEE
KHSQITELENLVQRMEKEKRTLLERKLSLENKLLQLKSSATYGKSCQDLQREISILQEQISHLQFVIH
SQHQNLRSVIQEMEGLKNNLKEQDKRIENLREKVNILEAQNKELKTQVALSSETPRTKVSKAVSTSEL
KTEGVSPYLMLIRLRK

| | | |
|---|---|---|
| NOV15g, SNP13382487 | SEQ ID NO: 431 | 1511 bp |
| of CG51992-05, | ORF Start: ATG at 339 | ORF Stop: TGA at 1203 |
| DNA Sequence | SNP Pos: 1360 | SNP Change: A to G |

AGAGAAGGAGCTAAGAAGCCTGTGGCTACTGAGAAGAGGCCAGCTAAGTGATGCTGGCATGTAGGAAC
CAGGCACACTACTTGTGGATGGGGAGCATGGTGACTGGAGAGACCAGTGAGGGCAATTTGCATCCTTT
GAGGGCAATTTGGTCTCCAAAGAACAGAGTGATCTGGAGGGAGTGACAGCCAAGAGTCAGCCAGAGCA
TCTCAGCCATCCCAGGAATCAGAGAAATCCAGGGAAGCCAGTCTTAATATGATGGAAACATCTCTGAA
CTTCTAAAAGACCAAGGTTGGCGTTTTAGCTCTATTAATTTTACTTCGTCTTGGCCAGAATTCACAAT
GACAACAGTGACAGTGACCACAGAAATTCCCCCAAGGGATAAGATGGAAGATAATTCTGCCTTGTATG
AGTCTACGTCCGCTCACATTATTGAAGAAACCGAGTATGTGAAAAAGATTCGAACTACTCTGCAAAAG
ATCAGGACCCAGATGTTTAAAGATGAAATAAGACATGACAGTACAAATCACAAACTAGATGCAAAGCT
GCAAGCCTCCAGAGAAGCAGGAGCAGCAGCTCTGAGAAACGTGGCCCAGAGATTATTTGAAAACTACC
AAACGCAATCTGAAGAAGTGAGAAAGAAGCAGGAGGACAGTAAACAATTACTCCAGGTTAACAAGCTT
GAAAAAGAACAGAAATTGAAACAACATGTTGAAAATCTGAATCAAGTTGCTGAAAAACTTGAAGAAAA
ACACAGTCAAATTACAGAATTGGAGAACCTTGTACAGAGAATGGAAAAGGAAAAGAGAACACTACTAG
AAAGAAAACTGTCTTTGGAAAACAAGCTACTGCAACTCAAATCCAGTGCTACATATGGAAAAAGTTGC
CAGGATCTTCAGAGGGAGATTTCCATTCTCCAGGAGCAGATCTCTCATCTGCAGTTTGTGATTCACTC
CCAACATCAGAACCTGCGCAGTGTCATCCAGGAGATGGAAGGATTAAAAAATAATTTAAAAGAACAAG
ACAAAAGAATTGAAAATCTCAGAGAAAAGGTTAACATACTTGAAGCCCAGAATAAAGAACTAAAAACC
CAGGTAGCACTTTCATCTGAAACTCCTAGGACAAGGTATCTAAAGGCTGTCTCTACAAGTGAATTGAA
GACCGAAGGTGTTTCCCCTTATTTAATGTTGATTAGGTTACGGAAATGAACTGGCTGGATGAAGATCT
GATTTAGAAAGACTGCGTGAGTCTTATTTATTCTCTGAAACACAGCCCAAGTTTCATGTTAAAATGGC
AAAATGCCATTATTTAAATGGAACTTATTACATACCAATGGCTTTGCAAGAAGATGACATTTCAGAAG
ATCAAACAAATCTATATTTAATGGATGGACTCTTCAAAACTTACCAAATAGTTGAAGAAACCAGGTGC
CTTCTCATGATGGAAGACAGATTCTGCTTTAAATTAAAAAAAAAAAAATCTGAATCTTGTTTTCAGAT
TTTTTTTTCTACTGG

| | | | |
|---|---|---|---|
| NOV15g, SNP13382487 | SEQ ID NO: 432 | 1288 aa | MW at 33581.0kD |
| of CG51992-05, | | | SNP Change: |
| Protein Sequence | | | no change |

MTTVTVTTEIPPRDKMEDNSALYESTSAHIIEETEYVKKIRTTLQKIRTQMFKDEIRHDSTNBKLDAK
LQASREAGAAALRNVAQRLFENYQTQSEEVRKKQEDSKQLLQVNKLEKEQKLKQHVENLNQVAEKLEE
KHSQITELENLVQRMEKEKRTLLERKLSLENKLLQLKSSATYGKSCQDLQREISILQEQISHLQFVIH
SQHQNLRSVIQEMEGLKNNLKEQDKRIENLREKVNILEAQNKELKTQVALSSETPRTKVSKAVSTSEL
KTEGVSPYLMLIRLRK

[0435] A ClustalW comparison of the above protein sequences yields the following sequence alignment shown in Table 15B.

TABLE 15B
Comparison of the NOV15 protein sequences.

| | |
|---|---|
| NOV15a | MTTVTVTTEIPPRDKMEDNSALYESTSAHIIEETEYVKKIRTTLQKIRTQMFKDEIRHDS |
| NOV15b | ------------------------------------------------------------ |
| NOV15c | ------------------------------------MQSLDLLMKKIKGKDLQ-LLEMNK |
| NOV15d | MTTVTVTTEIPPRDKMEDNSALYESTSAHIIEETEYVKKIRTTLQKIRTQMFKDEIRHDS |
| NOV15e | MTTVAVTTEIPPRDKMEDNSALYESTSAHIIEETEYVKKIRTTLQKIRTQMFKDEIRHDS |
| NOV15a | TNHKLDAK-----------------------------------------------LQASR |
| NOV15b | ------------------------------------------------------------ |
| NOV15c | ENEVLKIK-----------------------------------------------LQASR |
| NOV15d | TNHKLDAKHCGNLQQGSDSEMDPSCCSLDLLMKKIKGKDLQLLEMNKENEVLKIKLQASR |
| NOV15e | TNHKLDAKHCGNLQQGSDSEMDPSCCSLDLLMKKIKGKDLQLLEMNKENEVLKIKLQASR |
| NOV15a | EAGAAALRNVAQRLFENYQTQSEEVRKKQEDSKQLLQVNKLEKEQKLKQHVENLNQVAEK |
| NOV15b | ------------------------------------------------------------ |
| NOV15c | EAGAAALRNVAQRLFENYQTQSEEVRKKQEGSKQLLQVNKLEKEQKLKQHVENLNQVAEK |
| NOV15d | EAGAAALRNVAQRLFENYQTQSEEVRKKQEDSKQLLQVNKLEKEQKLKQHVENLNQVAEK |
| NOV15e | EAGAAALRNVAQRLFENYQTQSEEVRKKQEDSKQLLQVNKLEKEQKLKQHVENLNQVAEK |
| NOV15a | LEEKHSQITELENLVQRMEKEKRTLLERYLSLENKLLQLKSSATYGKSCQDLQREISILQ |
| NOV15b | ---------------QRMEKEKRTLLERKLSLENKLLQLKSSATYGKSCQDLQREISILQ |
| NOV15c | LEEKHSQITELENLVQRMEKEKRTLLERKLSLENKLLQLKSSATYGKSCQDLQREISILQ |
| NOV15d | LEEKHSQITELENLVQRMEKEKRTLLERKLSLENKLLQLKSSATYGKSCQDLQREISILQ |
| NOV15e | LEEKHSQITELENLVQRMEKEKRTLLERKLSLENKLLQLKSSATYGKSCQDLQREISILQ |
| NOV15a | EQISHLQFVIHSQHQNLRSVIQEMEGLKNNLKEQDKRIENLREKVNILEAQNKELKTQVA |
| NOV15b | EQISHLQFVIHSQHQNLRSVIQEMEGLKNNLKEQDKRIENLREKVNILEAQNKELKTQVA |
| NOV15c | EQISHLQFVIHSQHQNLRSVIQEMEGLKNNLKEQDKRIENLREKVNILEAQNKELKTQVA |
| NOV15d | EQISHLQFVIHSQHQNLRSVIQEMEGLKNNLKEQDKRIENLREKVNILEAQNKELKTQVA |
| NOV15e | EQISHLQFVIHSQHQNLRSVIQEMEGLKNNLKEQDKRIENLREKVNILEAQNKELKTQVA |
| NOV15a | LSSETPRTKVSKAVSTSELKTEGVSPYLMLIRLRK |
| NOV15b | LSSETPRTKVSKAVSTSELKTEGVSPYLMLIRLRK |
| NOV15c | LSSETPRTKVSKAVSTSELKTEGVSPYLMLIRLRK |
| NOV15d | LSSETPRTKVSKAVSTSELKTEGVSPYLMLIRLRK |
| NOV15e | LSSETPRTKVSKAVSTSELKTEGVSPYLMLIRLRK |
| NOV15a | (SEQ ID NO: 420) |
| NOV15b | (SEQ ID NO: 422) |
| NOV15c | (SEQ ID NO: 424) |
| NOV15d | (SEQ ID NO: 426) |
| NOV15e | (SEQ ID NO: 428) |

[0436] Further analysis of the NOV15a protein yielded the following properties shown in Table 15C.

TABLE 15C
Protein Sequence Properties NOV15a

| | |
|---|---|
| SignalP analysis: | No Known Signal Sequence Predicted |
| PSORT II analysis: | |

| PSG: | a new signal peptide prediction method | |
|---|---|---|
| | N-region: | length 9; pos. chg 0; neg. chg 1 |
| | H-region: | length 3; peak value 0.00 |
| | PSG score: | −4.40 |

| | |
|---|---|
| GvH: | von Heijne's method for signal seq. recognition |
| | GvH score (threshold: −2.1): −11.91 |
| | possible cleavage site: between 49 and 50 |

>>> Seems to have no N-terminal signal peptide

| ALOM: | Klein et al's method for TM region allocation | | | |
|---|---|---|---|---|
| | Init position for calculation: 1 | | | |
| | Tentative number of TMS(s) for the threshold 0.5: 0 | | | |
| | number of TMS(s) . . . fixed | | | |
| | PERIPHERAL Likelihood = 9.07 (at 189) | | | |
| | ALOM score: 9.07 (number of TMSs: 0) | | | |
| MITDISC: | discrimination of mitochondrial targeting seq | | | |
| | R content: | 1 | Hyd Moment(75): | 1.56 |
| | Hyd Moment(95): | 1.30 | G content: | 0 |
| | D/E content: | 2 | S/T content: | 5 |

| | |
|---|---|
| | Score: −5.82 |
| Gavel: | prediction of cleavage sites for mitochondrial preseq |
| | cleavage site motif not found |

NUCDISC: discrimination of nuclear localization signals

| | |
|---|---|
| | pat4: none |
| | pat7: none |
| | bipartite: none |
| | content of basic residues: 17.4% |
| | NLS Score: −0.47 |
| KDEL: | ER retention motif in the C-terminus: none |

ER Membrane Retention Signals: none
SKL: peroxisomal targeting signal in the C-terminus: none
PTS2: 2nd peroxisomal targeting signal: none
VAC: possible vacuolar targeting motif: none
RNA-binding motif: none
Actinin-type actin-binding motif:

type 1: none
type 2: none

NMYR: N-myristoylation pattern: none
Prenylation motif: none
memYQRL: transport motif from cell surface to Golgi: none
Tyrosines in the tail: none
Dileucine motif in the tail: none
checking 63 PROSITE DNA binding motifs: none
checking 71 PROSITE ribosomal protein motifs: none
checking 33 PROSITE prokaryotic DNA binding motifs: none

| | |
|---|---|
| NNCN: | Reinhardt's method for Cytoplasmic/Nuclear discrimination |
| | Prediction: nuclear |
| | Reliability: 94.1 |
| COIL: | Lupas's algorithm to detect coiled-coil regions |
| 76 A | 0.56 |
| 77 A | 0.56 |
| 78 A | 0.56 |
| 79 L | 0.56 |
| 80 R | 0.56 |
| 81 N | 0.59 |
| 82 V | 0.67 |
| 83 A | 0.67 |
| 84 Q | 0.67 |
| 85 R | 0.67 |
| 86 L | 0.67 |
| 87 F | 0.67 |
| 88 E | 0.67 |
| 89 N | 0.67 |
| 90 Y | 0.67 |
| 91 Q | 0.67 |
| 92 T | 0.67 |
| 93 Q | 0.80 |
| 94 S | 0.80 |
| 95 E | 0.80 |
| 96 E | 0.80 |
| 97 V | 0.80 |
| 98 R | 0.80 |
| 99 K | 0.81 |
| 100 K | 0.81 |
| 101 Q | 0.81 |
| 102 E | 0.81 |
| 103 D | 0.81 |
| 104 S | 0.81 |
| 105 K | 0.81 |
| 106 Q | 0.81 |
| 107 L | 0.86 |
| 108 L | 0.98 |
| 109 Q | 0.98 |
| 110 V | 0.98 |
| 111 N | 0.98 |
| 112 K | 0.98 |
| 113 L | 0.98 |
| 114 E | 0.98 |
| 115 K | 0.98 |
| 116 E | 0.99 |
| 117 Q | 0.99 |
| 118 K | 0.99 |
| 119 L | 0.99 |
| 120 K | 0.99 |
| 121 Q | 0.99 |
| 122 H | 0.99 |
| 123 V | 0.99 |
| 124 E | 1.00 |
| 125 N | 1.00 |
| 126 L | 1.00 |
| 127 N | 1.00 |
| 128 Q | 1.00 |
| 129 V | 1.00 |
| 130 A | 1.00 |
| 131 E | 1.00 |
| 132 K | 1.00 |
| 133 L | 1.00 |
| 134 E | 1.00 |
| 135 E | 1.00 |
| 136 K | 1.00 |
| 137 H | 1.00 |
| 138 S | 1.00 |
| 139 Q | 1.00 |
| 140 I | 1.00 |
| 141 T | 1.00 |
| 142 E | 1.00 |
| 143 L | 1.00 |
| 144 E | 1.00 |
| 145 N | 1.00 |
| 146 L | 1.00 |
| 147 V | 1.00 |
| 148 Q | 1.00 |
| 149 R | 1.00 |
| 150 M | 1.00 |
| 151 E | 1.00 |
| 152 K | 1.00 |
| 153 E | 1.00 |
| 154 K | 1.00 |
| 155 R | 1.00 |
| 156 T | 1.00 |
| 157 L | 1.00 |
| 158 L | 1.00 |
| 159 E | 1.00 |
| 160 R | 1.00 |
| 161 K | 1.00 |
| 162 L | 1.00 |
| 163 S | 1.00 |
| 164 L | 1.00 |
| 165 E | 1.00 |
| 166 N | 1.00 |
| 167 K | 1.00 |
| 168 L | 1.00 |
| 169 L | 1.00 |
| 170 Q | 1.00 |
| 171 L | 1.00 |
| 172 K | 1.00 |
| 173 S | 1.00 |
| 174 S | 1.00 |
| 175 A | 1.00 |
| 176 T | 0.99 |
| 177 Y | 0.88 |
| 178 G | 0.83 |
| 179 K | 0.83 |
| 180 S | 0.83 |
| 181 C | 0.83 |
| 182 Q | 0.83 |
| 183 D | 0.83 |
| 184 L | 0.83 |
| 185 Q | 0.83 |
| 186 R | 0.83 |
| 187 E | 0.83 |
| 188 I | 0.83 |
| 189 S | 0.83 |
| 190 I | 0.83 |
| 191 L | 0.83 |
| 192 Q | 0.83 |
| 193 E | 0.83 |
| 194 Q | 0.83 |
| 195 I | 0.83 |
| 196 S | 0.83 |
| 197 H | 0.83 |
| 198 L | 0.83 |
| 199 Q | 0.83 |
| 200 F | 0.62 |
| 201 V | 0.62 |
| 202 I | 0.87 |
| 203 H | 0.87 |
| 204 S | 0.99 |
| 205 Q | 0.99 |
| 206 H | 1.00 |
| 207 Q | 1.00 |
| 208 N | 1.00 |
| 209 L | 1.00 |
| 210 R | 1.00 |
| 211 S | 1.00 |
| 212 V | 1.00 |
| 213 I | 1.00 |
| 214 Q | 1.00 |
| 215 E | 1.00 |
| 216 M | 1.00 |
| 217 E | 1.00 |
| 218 G | 1.00 |
| 219 L | 1.00 |
| 220 K | 1.00 |
| 221 N | 1.00 |
| 222 N | 1.00 |
| 223 L | 1.00 |
| 224 K | 1.00 |
| 225 E | 1.00 |
| 226 Q | 1.00 |
| 227 D | 1.00 |
| 228 K | 1.00 |
| 229 R | 1.00 |
| 230 I | 1.00 |
| 231 E | 1.00 |
| 232 N | 1.00 |
| 233 L | 1.00 |
| 234 R | 1.00 |
| 235 E | 1.00 |
| 236 K | 1.00 |
| 237 V | 1.00 |
| 238 N | 1.00 |
| 239 I | 1.00 |
| 240 L | 1.00 |
| 241 E | 1.00 |
| 242 A | 1.00 |
| 243 Q | 1.00 |
| 244 N | 1.00 |
| 245 K | 1.00 |
| 246 E | 1.00 |
| 247 L | 1.00 |
| 248 K | 1.00 |
| 249 T | 1.00 |
| 250 Q | 1.00 |
| 251 V | 1.00 |
| 252 A | 1.00 |
| 253 L | 1.00 |
| 254 S | 1.00 |
| 255 S | 1.00 |
| 256 E | 1.00 |
| 257 T | 1.00 |
| | total: 182 residues |

Final Results (k = 9/23):

```
69.6%: nuclear
13.0%: cytoplasmic
  8.7%: peroxisomal
  4.3%: cytoskeletal
  4.3%: mitochondrial
```

>> prediction for CG51992-05 is nuc (k = 23)

[0437] A search of the NOV15a protein against the Geneseq database, a proprietary se that contains sequences published in patents and patent publication, yielded homologous proteins shown in Table 15D.

TABLE 15D
Geneseq Results for NOV15a

| | | NOV15a | Identities/ | | |
|---|---|---|---|---|---|
| | | Residues/ | Similarities for | | |
| Geneseq | Protein/Organism/Length | Match | the Matched | | Expect |
| Identifier | [Patent #, Date] | Residues | Region | | Value |
| ABB77426 | Human tumour marker protein se57-1 - | 1 . . . 288 | 288/335 | (85%) | e−151 |
| | Homo sapiens, 335 aa. [WO200238803- | 1 . . . 335 | 288/335 | (85%) | |
| | A2, 16-MAY-2002] | | | | |
| AAU08663 | Human NOV7 protein - Homo sapiens, | 1 . . . 288 | 288/335 | (85%) | e−151 |
| | 335 aa. [WO200168851-A2, 20-SEP- | 1 . . . 335 | 288/335 | (85%) | |
| | 2001] | | | | |
| AAU08662 | Human NOV6 protein - Homo sapiens, | 1 . . . 288 | 287/335 | (85%) | e−150 |
| | 335 aa. [WO200168851-A2, 20-SEP- | 1 . . . 335 | 287/335 | (85%) | |
| | 2001] | | | | |
| AAU08661 | Human NOV5 protein - Homo sapiens, | 62 . . . 288 | 222/227 | (97%) | e−117 |
| | 251 aa. [WO200168851-A2, 20-SEP- | 25 . . . 251 | 222/227 | (97%) | |
| | 2001] | | | | |
| ABG79634 | Human novel secreted protein SECP10, | 43 . . . 258 | 67/221 | (30%) | 1e−21 |
| | Incyte ID No. 7939381CD1 - Homo | 202 . . . 415 | 125/221 | (56%) | |
| | sapiens, 466 aa. [WO200262841-A2, | | | | |
| | 15-AUG-2002] | | | | |

[0438] In a BLAST search of public sequence databases, the NOV15a protein was found to have homology to the proteins shown in the BLASTP data in Table 15E.

TABLE 15E
Public BLASTP Results for NOV15a

| | | NOV15a | Identities/ | | |
|---|---|---|---|---|---|
| Protein | | Residues/ | Similarities for | | |
| Accession | | Match | the Matched | | Expect |
| Number | Protein/Organism/Length | Residues | Portion | | Value |
| Q9H2F9 | CTCL tumor antigen se57-1 - | 1 . . . 288 | 288/335 | (85%) | e−150 |
| | Homo sapiens (Human), 335 aa. | 1 . . . 335 | 288/335 | (85%) | |
| Q8BVC4 | Similar to CTCL tumor antigen | 1 . . . 288 | 213/333 | (63%) | e−106 |
| | SE57-1 - Mus musculus (Mouse), | 1 . . . 333 | 241/333 | (71%) | |
| | 333 aa. | | | | |
| AAH46343 | Hypothetical protein - Mus | 1 . . . 155 | 102/200 | (51%) | 3e−43 |
| | musculus (Mouse), 242 aa. | 1 . . . 200 | 120/200 | (60%) | |
| Q96NF5 | Hypothetical protein FLJ30973 - | 43 . . . 258 | 67/221 | (30%) | 5e−21 |
| | Homo sapiens (Human), 466 aa. | 202 . . . 415 | 125/221 | (56%) | |
| A40809 | enamelin, 44K - bovine, 389 aa. | 22 . . . 261 | 61/275 | (22%) | 6e−15 |
| | | 39 . . . 309 | 131/275 | (47%) | |

[0439] PFam analysis predicts that the NOV15a protein contains the domains shown in the Table 15F.

TABLE 15F
Domain Analysis of NOV15a

| | | | |
|---|---|---|---|
| Pfam | NOV15a | Identities/ | Expect |
| Domain | Match Region | Similarities | Value |
| | | for the | |
| | | Matched Region | |

### Example 16

[0440] The NOV16 clone was analyzed, and the nucleotide and encoded polypeptide sequences are shown in Table 16A.

TABLE 16A
NOV16 Sequence Analysis

| | | |
|---|---|---|
| NOV16a, CG52171-04 | SEQ ID NO: 433 | 2403 bp |
| DNA Sequence | ORF Start: ATG at 81 | ORF Stop: TGA at 2292 |

GGCACGAGAAGTTAAGCTGAAGACCGAAGCAAGAGCTGGTTCAGGTGGCAGCCACAGCAGCCTCAGGC
ACCTCAGCAACTATGCCCTCCTGCCCAGACTCTGATAATAGCTGGGTGCTTGCTGGCTCCGAGAGCCT
GCCAGTGGAGACACTGGGCCCGGCATCCAGGATGGACCCAGAATCTGAGAGAGCCCTGCAGGCCCCTC
ACAGCCCCTCCAAGACAGATGGGAAAGAATTAGCTGGGACCATGGATGGAGAAGGGACGCTCTTCCAG
ACTGAAAGCCCTCAGTCTGGCAGCATTCTAACAGAGGAGACTGAGGTCAAGGGCACCCTGGAAGGTGA
TGTTTGTGGTGTGGAGCCTCCTGGCCCAGGAGACACAGTAGTCCAGGGAGACCTGCAGGAGACCACCG
TGGTGACAGGCCTGGGACCAGACACACAGGACCTGGAAGGCCAGAGCCCTCCACAGAGCCTGCCTTCA
ACCCCCAAAGCAGCTTGGATCAGGGAGGAGGGCCGCTGCTCCAGCAGTGACGATGACACCGACGTGGA
CATGGAGGGTCTGCGGAGACGGCGGGGCCGGGAGGCCGGCCCACCTCAGCCCATGGTGCCCCTGGCTG
TGGAGAACCAGGCTGGGGGTGAGGGTGCAGGCGGGGAGCTGGGCATCTCCCTCAACATGTGCCTCCTT
GGGGCCCTGGTTCTGCTTGGCCTGGGGGTCCTCCTCTTCTCAGGTGGCCTCTCAGAGTCTGAGACTGG
GCCCATGGAGGAAGTGGAGCGGCAGGTCCTCCCAGACCCCGAGGTGCTGGAAGCTGTGGGGGACAGGC
AGGATGGGCTAAGGGAACAGCTGCAGGCCCCAGTGCCTCCTGACAGTGTCCCCAGCCTGCAAAACATG
GGTCTTCTGCTGGACAAGCTGGCCAAGGAGAACCAGGACATCCGGCTGCTGCAGGCCCAGCTGCAGGC
CCAAAAGGAAGAGCTTCAGAGCCTGATGCACCAGCCCAAAGGGCTAGAGGAGGAGAATGCCCAGCTCC
GGGGGGCTCTGCAGCAGGGCGAAGCCTTCCAGCGGGCTCTGGAGTCAGAGCTGCAGCAGCTGCGGGCC
CGGCTCCAGGGGCTGGAGGCCGACTGTGTCCGGGGCCCAGATGGGGTGTGCCTCAGTGGGGATAGAGG
CCCACAGGGTGACAAGGCCATCAGGGAGCAAGGCCCCAGGGAGCAGGAGCCAGAACTCAGCTTCCTGA
AGCAGAAGGAACAGCTGGAGGCTGAGGCACAGGCATTAAGGCAAGAGTTAGAGAGGCAGCGACGGCTG
CTGGGGTCTGTACAGCAGGATCTGGAGAGGAGCTTGCAGGATGCCAGCCGCGGGGACCCAGCTCATGC
TGGCTTGGCTGAGCTGGGCCACAGATTGGCCCAGAAACTGCAGGGCCTGGAGAACTGGGGCCAGGACC
CTGGGGTCTCTGCCAATGCCTCAAAGGCCTGGCACCAGAAGTCCCACTTCCAGAATTCTAGGGAGTGG
AGTGGAAAGGAAAAGTGGTGGGATGGGCAGAGAGACCGGAAGGCTGAGCACTGGAAACATAAGAAGGA
AGAATCTGGCCGGGAAAGGAAGAAGAACTGGGGAGGTCAGGAGGACAGGGAGCCAGCAGGAAGGTGGA
AGGAGGGCAGGCCAAGGGTGGAGGAGTCGGGGAGCAAGAAGGAGGGCAAGCGACAGGGCCCGAAGGAA
CCCCCAAGGAAAAGTGGTAGCTTCCACTCCTCTGGAGAAAAGCAGAAGCAACCTCGGTGGAGGGAAGG
GACTAAGGACAGCCATGACCCCCTGCCATCCTGGGCAGAGCTGTTGAGGCCCAAGTACCGGGCACCCC
AGGGCTGCTCAGGTGTGGACGAGTGTGCCCGGCAGGAGGGCTTGACTTTCTTTGGCACAGAGCTAGCC
CCAGTGCGGCAACAGGAGCTGGCCTCTCTGCTAAGAACATACTTGGCACGGCTGCCCTGGGCTGGGCA
GCTGACCAAGGAGCTACCCCTCTCACCTGCTTTCTTTGGTGAGGATGGCATCTTCCGTCATGACCGCC
TCCGCTTCCGGGATTTTGTGGATGCCCTGGAGGACAGCTTGGAGGAGGTGGCTGTGCAACAGACAGGT
GATGATGATGAAGTAGATGACTTTGAGGACTTCATCTTCAGCCACTTCTTTGGAGACAAAGCACTGAA
GAAGAGGCCTCTTCCTCCCCACAGGTCAGGGAAGAAGGACAAGCACTCACAGAGCCCAAGAGCTGCGG
GGCCCAGGGAGGGGCACAGCCATAGCCACCACCACCACCACCGGGGCTGACACCCTGCCCCACAGGGA
ATGGCCTTGGCCTGGCCCAGCCCAAGATCCCAGCGTTATCCAACTCCTGGAGGGTGGACTCTGTCCTG
GCTTGTTTGGTGTCCTCAGATAT

| | | | |
|---|---|---|---|
| NOV16a, CG52171-04 | SEQ ID NO: 434 | 737 aa | MW at 81398.4kD |
| Protein Sequence | | | |

MASCPDSDNSWVLAGSESLPVETLGPASRMDPESEEALQAPHSPSKTDGKELAGTMDGEGTLFQTESP
QSGSILTEETEVKGTLEGDVCGVEPPGPGDTVVQGDLQETTVVTGLGPDTQDLEGQSPPQSLPSTPKA
AWIREEGRCSSSDDDTDVDMEGLRRRRGREAGPPQPMVPLAVENQAGGEGAGGELGISLNMCLLGALV
LLGLGVLLFSGGLSESETGPMEEVERQVLPDPEVLEAVGDRQDGLREQLQAPVPPDSVPSLQNMGLLL
DKLAKENQDIRLLQAQLQAQKEELQSLMHQPKGLEEENAQLRGALQQGEAFQRALESELQQLRARLQG
LEADCVRGPDGVCLSGDRGPQGDKAIREQGPREQEPELSFLKQKEQLEAEAQALRQELERQRRLLGSV
QQDLERSLQDASRGDPAHAGLAELGHRLAQKLQGLENWGQDPGVSANASKAWHQKSHFQNSREWSGKE
KWWDGQRDRKAEHWKHKKEESGRERKKNWGGQEDREPAGRWKEGRPRVEESGSKKEGKRQGPKEPPRK
SGSFHSSGEKQKQPRWREGTKDSHDPLPSWAELLRPKYRAPQGCSGVDECARQEGLTFFGTEIAPVRQ
QELASLLRTYLARLPWAGQLTKELPLSPAFFGEDGIFRHDRLRFRDFVDALEDSLEEVAVQQTGDDDE
VDDFEDFIFSHFFGDKALKKRPLPPHRSGKKDKHSQSPRAAGPREGHSHSHHHHHRG

| | | |
|---|---|---|
| NOV16b, CG52171-01 | SEQ ID NO: 435 | 2739 bp |
| DNA Sequence | ORF Start: ATG at 670 | ORF Stop: TGA at 2275 |

CTGCAACAAGTTAAGCTGAAGACCGAAGCAAGAGCTGGTTCAGGTGGCAGCCACAGCAGCCTCAGGGA
CCTCAGCAACTATGGCCTCCTGCCCAGACTCTGATAATAGCTGGGTGCTTGCTGGCTCCGAGAGCCTC
CCAGTGGAGACACTGGGCCCGGCATCCAGGATGGACCCAGAATCTGAGAGAGCCCTGCAGGCCCCTCA
CAGCCCCTCCAAGACAGATGGGAAAGAATTAGCTGGGACCATGGATGGAGAAGGGACGCGCTTCCAGA
CTGAAAGCCCTCAGTCTGGCAGCATTCTAACAGAGGAGACTGAGGTCAAGGGCACCCTGGAAGGTGAT
GTTTGTGGTGTGGAGCCTCCTGGCCCAGGAGACACAGTAGTCCAGGGAGACCTGCAGGAGACCACCGT
GGTGACAGGCCTGGGACCAGACACACAGGACCTGGAAGGCCAGAGCCCTCCACAGAGCCTGCCTTCAA
CCCCCAAAGCAGCTTGGATCAGGGAGGAGGGCCGCTGCTCCAGCAGTGACGATGACACCGACGTGGAC
ATGGAGGGTCTGCGGAGACGGCGGGGCCGGGAGGCCGGCCCACCTCAGCCCATGGTGCCCCTGGCTGT
GGAGAACCAGGCTGGGGGTGAGGGTGCAGGCGGGGAGCTGGGCATTTTCCCCTCAACATGTGCCTCCT
TGGGGCCCTGGTTCTGCTTGGCCTGGGGGTCCTCCTCTTCTCAGGTGGCCTCTCAGAGTCTGAGACTG
GGCCCATGGAGGAAGTGGAGCGGCAGGTCCTCCCAGACCCCGAGGTGCTGGAAGCTGTGGGGGACAGG
CAGGATGGGCTAAGGGAACAGCTGCAGGCCCCAGTGCCTCCTGACAGTGTCCCCAGCCTGCAAAACAT
GGGTCTTCTGCTGGACAAGCTGGCCAAGGAGAACCAGGACATCCGGCTGCTGCAGGCCCAGCTGCAGG
CCCAAAAGGAAGAGCTTCAGAGCCTGATGCACCAGCCCAAAGGGCTAGAGGAGGAGAATGCCCAGCTC
CGGGGGGCTCTGCAGCAGGGCGAAGCCTTCCAGCGGGCTCTGGAGTCAGAGCTGCAGCAGCTGCGGGC
CCGGCTCCAGGGGCTGGAGGCCGACTGTGTCCGGGGCCCAGATGGGGTGTGCCTCAGTGGGGGTAGAG
GCCCACAGGGTGACAAGGCCATCAGGGAGCAAGGCCCCAGGGAGCAGGAGCCAGAACTCAGCTTCCTG
AAGCAGAAGGAACAGCTGGAGGCTGAGGCACAGGCATTAAGGCAAGAGTTAGAGAGGCAGCGACGGCT
GCTGGGGTCTGTACAGCAGGATCTGGAGAGGAGCTTGCAGGATGCCAGCCGCGGGGACCCAGCTCATG
CTGGCTTGGCTGAGCTGGGCCACAGATTGGCCCAGAAACTGCAGGGCCTGGAGAACTGGGGCCAGGAC
CCTGGGGTCTCTGCCAATGCCTCAAAGGCCTGGCACCAGAAGTCCCACTTCCAGAATTCTAGGGAGTG
GAGTGGAAAGGAAAAGTGGTGGGATGGGCAGAGAGACCGGAAGGCTGAGCACTGGAAACATAAGAAGG
AAGAATCTGGCCGGGAAAGGAAGAAGAACTGGGGAGGTCAGGAGGACAGGGAGCCAGCAGGAAGGTGG
AAGGAGGGCAGGCCAAGGGTGGAGGAGTCGGGGAGCAAGAAGGAGGGCAAGCGACAGGGCCCGAAGGA
ACCCCCAAGGAAAAGTGGTAGCTTCCACTCCTCTGGAGAAAAGCAGAAGCAACCTCGGTGGAGGGAAG
GGACTAAGGGCAGCCATGACCCCCTGCCATCCTGGGCAGAGCTGTTGAGGCCCAAGTACCGGGCACCC
CAGGGCTGCTCAGGTGTGGACGAGTGTGCCCGGCAGGAGGGCCTGACTTTCTTTGGCACAGAGCTAGC
CCCAGTGCGGCAACAGGAGCTGGCCTCTCTGCTAAGAACATACTTGGCACGGCTGCCCTGGGCTGGGC
AGCTGACCAAGGAGCTACCCCTCTCACCTGCTTTCTTTGGTGAGGATGGCATCTTCCGTCATGACCGC
CTCCGCTTCCGGGATTTTGTGGATGCCCTGGAGGACAGCTTGGAGGAGGTGGCTGTGCAACAGACAGG
TGATGATGATGAAGTAGATGACTTTGAGGACTTCATCTTCAGCCACTTCTTTGGAGACAAAGCACTGA
AGAAGAGGTCAGGGAAGAAGGACAAGCACTCACAGAGCCCAAGAGCTGCGGGGCCCAGGGAGGGGCAC
AGCCATAGCCACCACCACCACCACCGGGGCTGACACCCTGCCCCACAGGGAATGGCCTTGGCCTGGCC
CAGCCCAAGATCCCAGCGTTATCTAACTCCTGGAGGGTGGACTCTGTCCTGGCTTGTTTGGTGTCCTC
AGATATCTTTCACACAGTAGAGCAAAATCACCAGCCCTGCACTGATGTCACTTTATGTAGAAAAAGGC
CTTAGCTGGACCTGCGTTGCCGTCTATGCAAATGCATGCAAATACTCCAGGCCCTGGGATGTGGGCTT
GTGTTTTGTCACTGTGAAGGGGGAGATGGGAGAGGAGCCTGTTTTGGGGTGGGGTCTGGGGAAGGCAA
TCTGATTCTGAAGCTAAAGAGCTTTCATCCTCTTGAGTGTATGTCCCCATAGTGGGCCCCTTGACCCA
CATGCTGACCGGTGCCTTGGGATTTGACTAGAGTTGCTGCTTCCAAACCTAACAAAACCCCAGGGTAA
GTCCTCGTGCTGGGCCTCG

| | | | |
|---|---|---|---|
| NOV16b, CG52171-01 | SEQ ID NO: 436 | 535 aa | MW at 60290.7kD |
| Protein Sequence | | | |

MCLLGALVLLGLGVLLFSGGLSESETGPMEEVERQVLPDPEVLEAVGDRQDGLREQLQAPVPPDSVPS
LQNMGLLLDKLAKENQDIRLLQAQLQAQKEELQSLMHQPKGLEEENAQLRGALQQGEAFQRALESELQ
QLRARLQGLEADCVRGPDGVCLSGGRGPQGDKAIREQGPREQEPELSFLKQKEQLEAEAQALRQELER
QRRLLGSVQQDLERSLQDASRGDPAHAGLAELGHRLAQKLQGLENWGQDPGVSANASKAWHQKSHFQN
SREWSGKEKWWDGQRDRKAEHWKHKKEESGRERKKNWGGQEDREPAGRWKEGRPRVEESGSKKEGKRQ
GPKEPPRKSGSFHSSGEKQKQPRWREGTKGSHDPLPSWAELLRPKYRAPQGCSGVDECARQEGLTFFG
TELAPVRQQELASLLRTYLARLPWAGQLTKELPLSPAFFGEDGIFRHDRLRFRDFVDALEDSLEEVAV
QQTGDDDEVDDFEDFIFSHFFGDKALKKRSGKKDKHSQSPRAAGPREGHSHSHHHHHRG

| | | |
|---|---|---|
| NOV16c, CG52171-02 | SEQ ID NO: 437 | 1665 bp |
| DNA Sequence | ORF Start: ATG at 77 | ORF Stop: TGA at 1388 |

CAACAAGTTAAGCTGAAGACCGAAGCAAGAGCTGGTTCAGGTGGCAGCCACAGCAGCCTCAGGGACCT
CAGCAACTATGGCCTCCTGCCCAGACTCTGATAATAGCTGGGTGCTTGCTGGCTCCGAGAGCCTGCCA
GTGGAGACACTGGGCCCGGCATCCAGGATGGACCCAGAATCTGAGAGAGCCCTGCAGGCCCCTCACAG
CCCCTCCAAGACAGATGGGAAAGAATTAGCTGGGACCATGGATGGAGAAGGGACGCTCTTCCAGACTG
AAAGCCCTCAGTCTGGCAGCATTCTAACAGAGGAGACTGAGGTCAAGGGCACCCTGGAAGGTGATGTT
TGTGGTGTGGAGCCTCCTGGCCCAGGAGACACAGTAGTCCAGGGAGACCTGCAGGAGACCACCGTGGT
GACAGGCCTGGGACCAGACACACAGGACCTGGAAGGCCAGAGCCCTCCACAGAGCCTGCCTTCAACCC
CCAAAGCAGCTTGGATCAGGGAGGAGGGCCGCTGCTCCAGCAGTGACGATGACACCGACGTGGACATG
GAGGGTCTGCGGAGACGGCGGGGCCGGGAGGCCGGCCCACCTCAGCCCATGGTGCCCCTGGCTGTGGA
GAACCAGGCTGGGGGTGAGGGTGCAGGCGGGGAGCTGGGCATCTCCCTCAACATGTGCCTCCTTGGGG
CCCTGGGTCTGCTTGGCCTGGGGGTCCTCCTCTTCTCAGGTGGCCTCTCAGAGTCTGAGACTGGGCCC
ATGGAGGAAGTGGAGCGGCAGGTCCTCCCAGACCCCGAGGTGCTGGAAGCTGTGGGGGACAGGCAGGA
TGGGCTAAGGGAACAGCTGCAGGCCCCAGTGCCTCCTGACAGTGTCCCCAGCCTGCAAAACATGGGTC
TTCTGCTGGACAAGCTGGCCAAGGAGAACCAGGACATCCGGCTGCTGCAGGCCCAGCTGCAGGCCCAA
AAGGAAGAGCTTCAGAGCCTGATGCACCAGCCCAAAGGGCTAGAGGAGGAGAATGCCCAGCTCCGGGG
GGCTCTGCAGCAGGGCGAAGCCTTCCAGCGGGCTCTGGAGTCAGAGCTGCAGCAGCTGCGGGCCCGGC
TCCAGGGGCTGGAGGCCGACTGTGTCCGGGGCCCAGATGGGGATGGCATCTTCCGTCATGACCGCCTC
CGCTTCCGGGATTTTGTGGATGCCCTGGAGGACAGCTTGGAGGAGGTGGCTGTGCAACAGACAGGTGA
TGATGATGAAGTAGATGACTTTGAGGACTTCATCTTCAGCCACTTCTTTGGAGACAAAGCACTGAAGA
AGAGGTCAGGGAAGAAGGACAAGCACTCACAGAGCCCAAGAGCTGCGGGGCCCAGGGAGGGGCACAGC
CATAGCCACCACCACCACCACCGGGGCTGACACCCTGCCCCACAGGGAATGGCCTTGGCCTGGCCCAG
CCCAAGATCCCAGCGTTATCTAACTCCTGGAGGGTGGACTCTGTCCTGGCTTGTTTGGTGTCCTCAGA
TATCTTTCACACAGTAGAGCAAAATCACCAGCCCTGCACTGATGTCACTTTATGTAGAAAAAGGCCTT
AGCTGGACCTGCGTTGCCGTCTATGCAAATGCATGCAAATACTCCAGGCCCTGGGATGTGGGCTTGTG
TTTTGTCACTGTGAAGGGGGAGATGGGAGAGGA

| | | | |
|---|---|---|---|
| NOV16c, CG52171-02 | SEQ ID NO: 438 | 437 aa | MW at 47136.5kD |
| Protein Sequence | | | |

MASCPDSDNSWVLAGSESLPVETLGPASRMDPESEHALQAPHSPSKTDGKELAGTMDGEGTLFQTESP
QSGSILTEETEVKGTLEGDVCGVEPPGPGDTVVQGDLQETTVVTGLGPDTQDLEGQSPPQSLPSTPKA
AWIREEGRCSSSDDDTDVDMEGLPRRRGREAGPPQPMVPLAVENQAGGEGAGGELGISLNMCLLGALG
LLGLGVLLFSGGLSESETGPMEEVERQVLPDPEVLEAVGDRQDGLREQLQAPVPPDSVPSLQNMGLLL
DKLAKENQDIRLLQAQLQAQKEELQSLMHQPKGLEEENAQLRGALQQGEAFQRALESELQQLPARLQG
LEADCVRGPDGDGIFRHDRLRFRDFVDALEDSLEEVAVQQTGDDDEVDDFEDFIFSHFFGDKALKKRS
GKKDKHSQSPPAAGPREGHSHSHHHHHRG

| | | |
|---|---|---|
| NOV16d, CG52171-03 | SEQ ID NO: 439 | 2104 bp |
| DNA Sequence | ORF Start: ATG at 76 | ORF Stop: at 2104 |

AACAAGTTAAGCTGAAGACCGAAGCAAGAGCTGGTTCAGGTGGCAGCCACAGCAGCCTCAGGGACCTC
AGCAACTATGGCCTCCTGCCCAGACTCTGATAATAGCTGGGTGCTTGCTGGCTCCGAGAGCCTGCCAG
TGGAGACACTGGGCCCGGCATCCAGGATGGACCCAGAATCTGAGAGAGCCCTGCAGGCCCCTCACAGC
CCCTCCAAGACAGATGGGAAAGAATTAGCTGGGACCATGGATGGAGAAGGGACGCTCTTCCAGACTGA
AAGCCCTCAGTCTGGCAGCATTCTAACAGAGGAGACTGAGGTCAAGGGCACCCTGGAAGGTGATGTTT
GTGGTGTGGAGCCTCCTGGCCCAGGAGACACAGTAGTCCAGGGAGACCTGCAGGAGACCACCGTGGTG
ACAGGCCTGGGACCAGACACACAGGACCTGGAAGGCCAGAGCCCTCCACAGAGCCTGCCTTCAACCCC
CAAAGCAGCTTGGATCAGGGAGGAGGGCCGCTGCTCCAGCAGTGACGATGACACCGACGTGGACATGG
AGGGTCTGCGGAGACGGCGGGGCCGGGAGGCCGGCCCACCTCAGCCCATGGTGCCCCTGGCTGTGGAG
AACCAGGCTGGGGGTGAGGGTGCAGGCGGGGAGCTGGGCATCTCCCTCAACATGTGCCTCCTTGGGGC
CCTGGGTCTGCTTGGCCTGGGGGTCCTCCTCTTCTCAGGTGGCCTCTCAGAGTCTGAGACTGGGCCCA
TGGAGGAAGTGGAGCGGCAGGTCCTCCCAGACCCCGAGGTGCTGGAAGCTGTGGGGGACAGGCAGGAT
GGGCTAAGGGAACAGCTGCAGGCCCCAGTGCCTCCTGACAGTGTCCCCAGCCTGCAAAACATGGGTCT
TCTGCTGGACAAGCTGGCCAAGGAGAACCAGGACATCCGGCTGCTGCAGGCCCAGCTGCAGGCCCAAA
AGGAAGAGCTTCAGAGCCTGATGCACCAGCCCAAAGGGCTAGAGGAGGAGAATGCCCAGCTCCGGGGG
GCTCTGCAGCAGGGCGAAGCCTTCCAGCGGGCTCTGGAGTCAGAGCTGCAGCAGCTGCGGGCCCGGCT
CCAGGGGCTGGAGGCCGACTGTGTCCGGGGCCCAGATGGGGTGTGCCTCAGTGGGGGTAGAGGCCCAC
AGGGTGACAAGGCCATCAGGGAGCAAGGCCCCAGGGAGCAGGAGCCAGAACTCAGCTTCCTGAAGCAG
AAGGAACAGCTGGAGGCTGAGGCACAGGCATTAAGGCAAGAGTTAGAGAGGCAGCGACGGCTGCTGGG
GTCTGTACAGCAGGATCTGGAGAGGAGCTTGCAGGATGCCAGCCGCGGGGACCCAGCTCATGCTGGCT
TGGCTGAGCTGGGCCACAGATTGGCCCAGAAACTGCAGGGCCTGGAGAACTGGGGCCAGGACCCTGGG
GTCTCTGCCAATGCCTCAAAGGCCTGGCACCAGAAGTCCCACTTCCAGAATTCTAGGGAGTGGAGTGG
AAAGGAAAAGTGGTGGGATGGGCAGAGAGACCGGAAGGCTGAGCACTGGAAACATAAGAAGGAAGAAT
CTGGCCGGGAAAGGAAGAAGAACTGGGGAGGTCAGGAGGACAGGGAGCCAGCAGGAAGGTGGAAGGAG
GGCAGGCCAAGGGTGGAGGAGTCGGGGAGCAAGAAGGAGGGCAAGCGACAGGGCCCGAAGGAACCCCC
AAGGAAAAGTGGTAGCTTCCACTCCTCTGGAGAAAAGCAGAAGCAACCTCGGTGGAGGGAAGGGACTA
AGGGCAGCCATGACCCCCTGCCATCCTGGGCAGAGCTGTTGAGGCCCAAGTACCGGGCACCCCAGGGC
TGCTCAGGTGTGGACGAGTGTGCCCGGCAGGAGGGCCTGACTTTCTTTGGCACAGAGCTAGCCCCAGT
GCGGCAACAGGAGCTGGCCTCTCTGCTAAGAACATACTTGGCACGGCTGCCCTGGGCTGGGCAGCTGA
CCAAGGAGCTACCCCTCTCACCTGCTTTCTTTGGTGAGGATGGCATCTTCCGTCATGACCGCCTCCGC
TTCCGGGATTTTGTGGATGCCCTGGAGGACAGCTTGGAGGAGGTTCTAGAATTCAGCGGCCGCT

| | | | |
|---|---|---|---|
| NOV16d, CG52171-03 | SEQ ID NO: 440 | 676 aa | MW at 74306.8kD |
| Protein Sequence | | | |

MASCPDSDNSWVLAGSESLPVETLGPASRMDPESERALQAPHSPSKTDGKELAGTMDGEGTLFQTESP
QSGSILTEETEVKGTLEGDVCGVEPPGPGDTVVQGDLQETTVVTGLGPDTQDLEGQSPPQSLPSTPKA
AWIREEGRCSSSDDDTDVDMEGLRRRRGREAGPPQPMVPLAVENQAGGEGAGGELGISLNMCLLGALG
LLGLGVLLFSGGLSESETGPMEEVERQVLPDPEVLEAVGDRQDGLREQLQAPVPPDSVPSLQNMGLLL
DKLAKENQDIRLLQAQLQAQKEELQSLMHQPKGLEEENAQLRGALQQGEAFQRALESELQQLRARLQG
LEADCVRGPDGVCLSGGRGPQGDKAIREQGPREQEPELSFLKQKEQLEAEAQALRQELERQRRLLGSV
QQDLERSLQDASRGDPAHAGLAELGHRLAQKLQGLENWGQDPGVSANASKAWHQKSHFQNSREWSGKE
KWWDGQRDRKAEHWKHKKEESGRERKKNWGGQEDREPAGRWKEGRPRVEESGSKKEGKRQGPKEPPRK
SGSFHSSGEKQKQPRWREGTKGSHDPLPSWAELLRPKYRAPQGCSGVDECARQEGLTFFGTELAPVRQ
QELASLLRTYLARLPWAGQLTKELPLSPAFFGEDGIFRHDRLRFRDFVDALEDSLEEVLEFSGR

| | | |
|---|---|---|
| NOV16e, CG52171-05 | SEQ ID NO: 441 | 1539 bp |
| DNA Sequence | ORF Start: at 1 | ORF Stop: end of sequence |

GAGTCTGAGACTGGGCCCATGGAGGAAGTGGAGCGGCAGGTCCTCCCAGACCCCGAGGTGCTGGAAGC
TGTGGGGGACAGGCAGGATGGGCTAAGGGAACAGCTGCAGGCCCCAGTGCCTCCTGACAGTGTCCCCA
GCCTGCAAAACATGGGTCTTCTGCTGGACAAGCTGGCCAAGGAGAACCAGGACATCCGGCTGCTGCAG
GCCCAGCTGCAGGCCCAAAAGGAAGAGCTTCAGAGCCTGATGCACCAGCCCAAAGGGCTAGAGGAGGA
GAATGCCCAGCTCCGGGGGGCTCTGCAGCAGGGCGAAGCCTTCCAGCGGGCTCTGGAGTCAGAGCTGC
AGCAGCTGCGGGCCCGGCTCCAGGGGCTGGAGGCCGACTGTGTCCGGGGCCCAGATGGGGTGTGCCTC
AGTGGGGATAGAGGCCCACAGGGTGACAAGGCCATCAGGGAGCAAGGCCCCAGGGAGCAGGAGCCAGA
ACTCAGCTTCCTGAAGCAGAAGGAACAGCTGGAGGCTGAGGCACAGGCATTAAGGCAAGAGTTAGAGA
GGCAGCGACGGCTGCTGGGGTCTGTACAGCAGGATCTGGAGAGGAGCTTGCAGGATGCCAGCCGCGGG
GACCCAGCTCATGCTGGCTTGGCTGAGCTGGGCCACAGATTGGCCCAGAAACTGCAGGGCCTGGAGAA
CTGGGGCCAGGACCCTGGGGTCTCTGCCAATGCCTCAAAGGCCTGGCACCAGAAGTCCCACTTCCAGA
ATTCTAGGGAGTGGAGTGGAAAGGAAAAGTGGTGGGATGGGCAGAGAGACCGGAAGGCTGAGCACTGG
AAACATAAGAAGGAAGAATCTGGCCGGGAAAGGAAGAAGAACTGGGGAGGTCAGGAGGACAGGGAGCC
AGCAGGAAGGTGGAAGGAGGGCAGGCCAAGGGTGGAGGAGTCGGGGAGCAAGAAGGAGGGCAAGCGAC
AGGGCCCGAAGGAACCCCCAAGGAAAAGTGGTAGCTTCCACTCCTCTGGAGAAAAGCAGAAGCAACCT
CGGTGGAGGGAAGGGACTAAGGACAGCCATGACCCCCTGCCATCCTGGGCAGAGCTGTTGAGGCCCAA
GTACCGGGCACCCCAGGGCTGCTCAGGTGTGGACGAGTGTGCCCGGCAGGAGGGCCTGACTTTCTTTG
GCACAGAGCTAGCCCCAGTGCGGCAACAGGAGCTGGCCTCTCTGCTAAGAACATACTTGGCACGGCTG
CCCTGGGCTGGGCAGCTGACCAAGGAGCTACCCCTCTCACCTGCTTTCTTTGGTGAGGATGGCATCTT
CCGTCATGACCGCCTCCGCTTCCGGGATTTTGTGGATGCCCTGGAGGACAGCTTGGAGGAGGTGGCTG
TGCAACAGACAGGTGATGATGATGAAGTAGATGACTTTGAGGACTTCATCTTCAGCCACTTCTTTGGA
GACAAAGCACTGAAGAAGAGGTCAGGGAAGAAGGACAAGCACTCACAGAGCCCAAGAGCTGCGGGGCC
CAGGGAGGGGCACAGCCATAGCCACCACCACCACCACCGGGGC

| | | | |
|---|---|---|---|
| NOV16e, CG52171-05 | SEQ ID NO: 442 | 513 aa | MW at 58278.1kD |
| Protein Sequence | | | |

ESETGPMEEVERQVLPDPEVLEAVGDRQDGLREQLQAPVPPDSVPSLQNMGLLLDKLAKENQDIRLLQ
AQLQAQKEELQSLMHQPKGLEEENAQLRGALQQGEAFQRALESELQQLRARLQGLEADCVRGPDGVCL
SGDRGPQGDKAIREQGPREQEPELSFLKQKEQLEAEAQALRQELERQRRLLGSVQQDLERSLQDASRG
DPAHAGLAELGHRLAQKLQGLENWGQDPGVSANASKAWHQKSHFQNSREWSGKEKWWDGQRDRKAEHW
KHKKEESGRERKKNWGGQEDREPAGRWKEGRPRVEESGSKKEGKRQGPKEPPRKSGSFHSSGEKQKQP
RWREGTKDSHDPLPSWAELLRPKYPAPQGCSGVDECARQEGLTFFGTELAPVRQQELASLLRTYLARL
PWAGQLTKELPLSPAFFGEDGIFRHDRLRFRDFVDALEDSLEEVAVQQTGDDDEVDDFEDFIFSHFFG
DKALKKRSGKKDKHSQSPPAAGPREGHSHSHHHHHRG

| | | |
|---|---|---|
| NOV16f, CG52171-06 | SEQ ID NO: 443 | 2366 bp |
| DNA Sequence | ORF Start: ATG at 76 | ORF Stop: TGA at 2266 |

GAGAAGTTAAGCTGAAGACCGAAGCAAGAGCTGGTTCAGGTGGCAGCCACAGCAGCCTCAGGGACCTC
AGCAACTATGGCCTCCTGCCCAGACTCTGATAATAGCTGGGTGCTTGCTGGCTCCGAGAGCCTGCCAG
TGGAGACACTGGGCCCGGCATCCAGGATGGACCCAGAATCTGAGAGAGCCCTGCAGGCCCCTCACAGC
CCCTCCAAGACAGATGGGAAAGAATTAGCTGGGACCATGGATGGAGAAGGGACGCTCTTCCAGACTGA
AAGCCCTCAGTCTGGCAGCATTCTAACAGAGGAGACTGAGGTCAAGGGCACCCTGGAAGGTGATGTTT
GTGGTGTGGAGCCTCCTGGCCCAGGAGACACAGTAGTCCAGGGAGACCTGCAGGAGACCACCGTGGTG
ACAGGCCTGGGACCAGACACACAGGACCTGGAAGGCCAGAGCCCTCCACAGAGCCTGCCTTCAACCCC
CAAAGCAGCTTGGATCAGGGAGGAGGGCCGCTGCTCCAGCAGTGACGATGACACCGACGTGGACATGG
AGGGTCTGCGGAGACGGCGGGGCCGGGAGGCCGGCCCACCTCAGCCCATGGTGCCCCTGGCTGTGGAG
AACCAGGCTGGGGGTGAGGGTGCAGGCGGGGAGCTGGGCATCTCCCTCAACATGTGCCTCCTTGGGGC
CCTGGTTCTGCTTGGCCTGGGGGTCCTCCTCTTCTCAGGTGGCCTCTCAGAGTCTGAGACTGGGCCCA
TGGAGGAAGTGGAGCGGCAGGTCCTCCCAGACCCCGAGGTGCTGGAAGCTGTGGGGGACAGGCAGGAT
GGGCTAAGGGAACAGCTGCAGGCCCCAGTGCCTCCTGACAGTGTCCCCAGCCTGCAAAACATGGGTCT
TCTGCTGGACAAGCTGGCCAAGGAGAACCAGGACATCCGGCTGCTGCAGGCCCAGCTGCAGGCCCAAA
AGGAAGAGCTTCAGAGCCTGATGCACCAGCCCAAAGGGCTAGAGGAGGAGAATGCCCAGCTCCGGGGG
GCTCTGCAGCAGGGCGAAGCCTTCCAGCGGGCTCTGGAGTCAGAGCTGCAGCAGCTGCGGGCCCGGCT
CCAGGGGCTGGAGGCCGACTGTGTCCGGGGCCCAGATGGGGTGTGCCTCAGTGGGGATAGAGGCCCAC
AGGGTGACAAGGCCATCAGGGAGCAAGGCCCCAGGGAGCAGGAGCCAGAACTCAGCTTCCTGAATCAG
AAGGAACAGCTGGAGGCTGAGGCACAGGCATTAAGGCAAGAGTTAGAGAGGCAGCGACGGCTGCTGGG
GTCTGTACAGCAGGATCTGGAGAGGAGCTTGCAGGATGCCAGCCGCGGGGACCCAGCTCATGCTGGCT
TGGCTGAGCTGGGCCACAGATTGGCCCAGAAACTGCAGGGCCTGGAGAACTGGGGCCAGGACCCTGGG
GTCTCTGCCAATGCCTCAAAGGCCTGGCACCAGAAGTCCCACTTCCAGAATTCTAGGGAGTGGAGTGG
AAAGGAAAAGTGGTGGGATGGGCAGAGAGACCGGAAGGCTGAGCACTGGAAACATAAGAAGGAAGAAT
CTGGCCGGGAAAGGAAGAAGAACTGGGGAGGTCAGGAGGACAGGGAGCCAGCAGGAAGGTGGAAGGAG
GGCAGGCCAAGGGTGGAGGAGTCGGGGAGCAAGAAGGAGGGCAAGCGACAGGCCCCGAAGGAACCCCC
AAGGAAAAGTGGTAGCTTCCACTCCTCTGGAGAAAAGCAGAAGCAACCTCGGTGGAGGGAAGGGACTA
AGGACAGCCATGACCCCCTGCCATCCTGGGCAGAGCTGTTGAGGCCCAAGTACCGGGCACCCCAGGGC
TGCTCAGGTGTGGACGAGTGTGCCCGGCAGGAGGGCCTGACTTTCTTTGGCACAGAGCTAGCCCCAGT
GCGGCAACAGGAGCTGGCCTCTCTGCTAAGAACATACTTGGCACGGCTGCCCTGGGCTGGGCAGCTGA
CCAAGGAGCTACCCCTCTCACCTGCTTTCTTTGGTGAGGATGGCATCTTCCGTCATGACCGCCTCCGC
TTCCGGGATTTTGTGGATGCCCTGGAGGACAGCTTGGAGGAGGTGGCTGTGCAACAGACAGGTGATGA
TGATGAAGTAGATGACTTTGAGGACTTCATCTTCAGCCACTTCTTTGGAGACAAAGCACTGAAGAAGA
GGTCAGGGAAGAAGGACAAGCACTCACAGAGCCCAAGAGCTGCGGGGCCCAGGGAGGGGCACAGCCAT
AGCCACCACCACCACCGGGGCTGACACCCTGCCCCACAGGGAATGGCCTTGGCCTGGCCCAGCCCAAG
ATCCCAGCGTTATCTAACTCCTGGAGGGTGGACTCTGTCCTGGCTTGTTTGGTG

| | | | |
|---|---|---|---|
| NOV16f, CG52171-06 | SEQ ID NO: 444 | 730 aa | MW at 80563.4kD |
| Protein Sequence | | | |

MASCPDSDNSWVLAGSESLPVETLGPASRMDPESERALQAPHSPSKTDGKELAGTMDGEGTLFQTESP
QSGSILTEETEVKGTLEGDVCGVEPPGPGDTVVQGDLQETTVVTGLGPDTQDLEGQSPPQSLPSTPKA
AWIREEGRCSSSDDDTDVDMEGLRRRRGREAGPPQPMVPLAVENQAGGEGAGGELGISLNMCLLGALV
LLGLGVLLFSGGLSESETGPMEEVERQVLPDPEVLEAVGDRQDGLREQLQAPVPPDSVPSLQNMGLLL
DKLAKENQDIRLLQAQLQAQKEELQSLMHQPKGLEEENAQLRGALQQGEAFQRALESELQQLRARLQG
LEADCVRGPDGVCLSGDRGPQGDKAIREQGPREQEPELSFLNQKEQLEAEAQALRQELERQRRLLGSV
QQDLERSLQDASRGDPAHAGLAELGHRLAQKLQGLENWGQDPGVSANASKAWHQKSHFQNSREWSGKE
KWWDGQRDRKAEHWKHKKEESGRERKKNWGGQEDREPAGRWKEGRPRVEESGSKKEGKRQAPKEPPRK
SGSFHSSGEKQKQPRWREGTKDSHDPLPSWAELLRPKYRAPQGCSGVDECARQEGLTFFGTELAPVRQ
QELASLLRTYLARLPWAGQLTKELPLSPAFFGEDGIFRHDRLRFRDFVDALEDSLEEVAVQQTGDDDE
VDDFEDFIFSHFFGDKALKKRSGKKDKHSQSPRAAGPREGHSHSHHHHRG

| | | |
|---|---|---|
| NOV16g, 5NP13374628 | SEQ ID NO: 445 | 2403 bp |
| of CG52171-04, | ORF Start: ATG at 81 | ORF Stop: TGA at 2292 |
| DNA Sequence | SNP Pos: 373 | SNP Change: A to G |

GGCACGAGAAGTTAAGCTGAAGACCGAAGCAAGAGCTGGTTCAGGTGGCAGCCACAGCAGCCTCAGGG
ACCTCAGCAACTATGGCCTCCTGCCCAGACTCTGATAATAGCTGGGTGCTTGCTGGCTCCGAGAGCCT
GCCAGTGGAGACACTGGGCCCGGCATCCAGGATGGACCCAGAATCTGAGAGAGCCCTGCAGGCCCCTC
ACAGCCCCTCCAAGACAGATGGGAAAGAATTAGCTGGGACCATGGATGGAGAAGGGACGCTCTTCCAG
ACTGAAAGCCCTCAGTCTGGCAGCATTCTAACAGAGGAGACTGAGGTCAAGGGCACCCTGGAAGGTGA
TGTTTGTGGTGTGGAGCCTCCTGGCCCAGGAGGCACAGTAGTCCAGGGAGACCTGCAGGAGACCACCG
TGGTGACAGGCCTGGGACCAGACACACAGGACCTGGAAGGCCAGAGCCCTCCACAGAGCCTGCCTTCA
ACCCCCAAAGCAGCTTGGATCAGGGAGGAGGGCCGCTGCTCCAGCAGTGACGATGACACCGACGTGGA
CATGGAGGGTCTGCGGAGACGGCGGGGCCGGGAGGCCGGCCCACCTCAGCCCATGGTGCCCCTGGCTG
TGGAGAACCAGGCTGGGGGTGAGGGTGCAGGCGGGGAGCTGGGCATCTCCCTCAACATGTGCCTCCTT
GGGGCCCTGGTTCTGCTTGGCCTGGGGGTCCTCCTCTTCTCAGGTGGCCTCTCAGAGTCTGAGACTGG
GCCCATGGAGGAAGTGGAGCGGCAGGTCCTCCCAGACCCCGAGGTGCTGGAAGCTGTGGGGGACAGGC
AGGATGGGCTAAGGGAACAGCTGCAGGCCCCAGTGCCTCCTGACAGTGTCCCCAGCCTGCAAAACATG
GGTCTTCTGCTGGACAAGCTGGCCAAGGAGAACCAGGACATCCGGCTGCTGCAGGCCCAGCTGCAGGC
CCAAAAGGAAGAGCTTCAGAGCCTGATGCACCAGCCCAAAGGGCTAGAGGAGGAGAATGCCCAGCTCC
GGGGGGCTCTGCAGCAGGGCGAAGCCTTCCAGCGGGCTCTGGAGTCAGAGCTGCAGCAGCTGCGGGCC
CGGCTCCAGGGGCTGGAGGCCGACTGTGTCCGGGGCCCAGATGGGGTGTGCCTCAGTGGGGATAGAGG
CCCACAGGGTGACAAGGCCATCAGGGAGCAAGGCCCCAGGGAGCAGGAGCCAGAACTCAGCTTCCTGA
AGCAGAAGGAACAGCTGGAGGCTGAGGCACAGGCATTAAGGCAAGAGTTAGAGAGGCAGCGACGGCTG
CTGGGGTCTGTACAGCAGGATCTGGAGAGGAGCTTGCAGGATGCCAGCCGCGGGGACCCAGCTCATGC
TGGCTTGGCTGAGCTGGGCCACAGATTGGCCCAGAAACTGCAGGGCCTGGAGAACTGGGGCCAGGACC
CTGGGGTCTCTGCCAATGCCTCAAAGGCCTGGCACCAGAAGTCCCACTTCCAGAATTCTAGGGAGTGG
AGTGGAAAGGAAAAGTGGTGGGATGGGCAGAGAGACCGGAAGGCTGAGCACTGGAAACATAAGAAGGA
AGAATCTGGCCGGGAAAGGAAGAAGAACTGGGGAGGTCAGGAGGACAGGGAGCCAGCAGGAAGGTGGA
AGGAGGGCAGGCCAAGGGTGGAGGAGTCGGGGAGCAAGAAGGAGGGCAAGCGACAGGGCCCGAAGGAA
CCCCCAAGGAAAAGTGGTAGCTTCCACTCCTCTGGAGAAAAGCAGAAGCAACCTCGGTGGAGGGAAGG
GACTAAGGACAGCCATGACCCCCTGCCATCCTGGGCAGAGCTGTTGAGGCCCAAGTACCGGGCACCCC
AGGGCTGCTCAGGTGTGGACGAGTGTGCCCGGCAGGAGGGCTTGACTTTCTTTGGCACAGAGCTAGCC
CCAGTGCGGCAACAGGAGCTGGCCTCTCTGCTAAGAACATACTTGGCACGGCTGCCCTGGGCTGGGCA
GCTGACCAAGGAGCTACCCCTCTCACCTGCTTTCTTTGGTGAGGATGGCATCTTCCGTCATGACCGCC
TCCGCTTCCGGGATTTTGTGGATGCCCTGGAGGACAGCTTGGAGGAGGTGGCTGTGCAACAGACAGGT
GATGATGATGAAGTAGATGACTTTGAGGACTTCATCTTCAGCCACTTCTTTGGAGACAAAGCACTGAA
GAAGAGGCCTCTTCCTCCCCACAGGTCAGGGAAGAAGGACAAGCACTCACAGAGCCCAAGAGCTGCGG
GGCCCAGGGAGGGGCACAGCCATAGCCACCACCACCACCACCGGGGCTGACACCCTGCCCCACAGGGA
ATGGCCTTGGCCTGGCCCAGCCCAAGATCCCAGCGTTATCCAACTCCTGGAGGGTGGACTCTGTCCTG
GCTTGTTTGGTGTCCTCAGATAT

| | | | |
|---|---|---|---|
| NOV16g, SNP13374628 | SEQ ID NO: 446 | 737 aa | MW at 81340.4kD |
| of CG52171-04, | SNP Pos: 98 | | SNP Change: |
| Protein Sequence | | | Asp to Gly |

MASCPDSDNSWVLAGSESLPVETLGPASRMDPESERALQAPHSPSKTDGKELAGTMDGEGTLFQTESP
QSGSILTEETEVKGTLEGDVCGVEPPGPGGTVVQGDLQETTVVTGLGPDTQDLEGQSPPQSLPSTPKA
AWIREEGRCSSSDDDTDVDMEGLRRRRGREAGPPQPMVPLAVENQAGGEGAGGELGISLNMCLLGALV
LLGLGVLLFSGGLSESETGPMEEVERQVLPDPEVLEAVGDRQDGLREQLQAPVPPDSVPSLQNMGLLL
DKLAKENQDIRLLQAQLQAQKEELQSLMHQPKGLEEENAQLRGALQQGEAFQRALEsELQQLRARLQG
LEADCVRGPDGVCLSGDRGPQGDKAIREQGPREQEPELSFLKQKEQLEAEAQALRQELERQRPLLGSV
QQDLERSLQDASRGDPAHAGLAELGHPLAQKLQGLENWGQDPGVSANASKAWHQKSHFQNSREWSGKE
KWWDGQRDRKAEHWKHKKEESGRERKKNWGGQEDREPAGRWKEGRPRVEESGSKKEGKRQGPKEPPRK
SGSFHSSGEKQKQPRWREGTKDSHDPLPSWAELLRPKYRAPQGCSGVDECARQEGLTFFGTELAPVRQ
QELASLLRTYLARLPWAGQLTKELPLSPAFFGEDGIFRHDRLRFRDFVDALEDSLEEVAVQQTGDDDE
VDDFEDFIFSHFFGDKALKKRPLPPHRSGKKDKHSQSPRAAGPREGHSHSHHHHHRG

| | | |
|---|---|---|
| NOV16h, SNP13377329 | SEQ ID NO: 447 | 2403 bp |
| of CG52171-04, | ORF Start: ATG at 81 | ORF Stop: TGA at 2292 |
| DNA Sequence | SNP Pos: 1150 | SNP Change: A to G |

GGCACGAGAAGTTAAGCTGAAGACCGAAGCAAGAGCTGGTTCAGGTGOCAGCCACAGCAGCCTCAGGG
ACCTCAGCAACTATGGCCTCCTGCCCAGACTCTGATAATAGCTGGGTGCTTGCTGGCTCCGAGAGCCT
GCCAGTGGAGACACTGGGCCCGGCATCCAGGATGGACCCAGAATCTGAGAGAGCCCTGCAGGCCCCTC
ACAGCCCCTCCAAGACAGATGGGAAAGAATTAGCTGGGACCATGGATGGAGAAGGGACGCTCTTCCAG
ACTGAAAGCCCTCAGTCTGGCAGCATTCTAACAGAGGAGACTGAGGTCAAGGGCACCCTGGAAGGTGA
TGTTTGTGGTGTGGAGCCTCCTGGCCCAGGAGACACAGTAGTCCAGGGAGACCTGCAGGAGACCACCG
TGGTGACAGGCCTGGGACCAGACACACAGGACCTGGAAGGCCAGAGCCCTCCACAGAGCCTGCCTTCA
ACCCCCAAAGCAGCTTGGATCAGGGAGGAGGGCCGCTGCTCCAGCAGTGACGATGACACCGACGTGGA
CATGGAGGGTCTGCGGAGACGGCGGGGCCGGGAGGCCGGCCCACCTCAGCCCATGGTGCCCCTGGCTG
TGGAGAACCAGGCTGGGGGTGAGGGTGCAGGCGGGGAGCTGGGCATCTCCCTCAACATGTGCCTCCTT
GGGGCCCTGGTTCTGCTTGGCCTGGGGGTCCTCCTCTTCTCAGGTGGCCTCTCAGAGTCTGAGACTGG
GCCCATGGAGGAAGTGGAGCGGCAGGTCCTCCCAGACCCCGAGGTGCTGGAAGCTGTGGGGGACAGGC
AGGATGGGCTAAGGGAACAGCTGCAGGCCCCAGTGCCTCCTGACAGTGTCCCCAGCCTGCAAAACATG
GGTCTTCTGCTGGACAAGCTGGCCAAGGAGAACCAGGACATCCGGCTGCTGCAGGCCCAGCTGCAGGC
CCAAAAGGAAGAGCTTCAGAGCCTGATGCACCAGCCCAAAGGGCTAGAGGAGGAGAATGCCCAGCTCC
GGGGGGCTCTGCAGCAGGGCGAAGCCTTCCAGCGGGCTCTGGAGTCAGAGCTGCAGCAGCTGCGGGCC
CGGCTCCAGGGGCTGGAGGCCGACTGTGTCCGGGGCCCAGATGGGGTGTGCCTCAGTGGGGGTAGAGG
CCCACAGGGTGACAAGGCCATCAGGGAGCAAGGCCCCAGGGAGCAGGAGCCAGAACTCAGCTTCCTGA
AGCAGAAGGAACAGCTGGAGGCTGAGGCACAGGCATTAAGGCAAGAGTTAGAGAGGCAGCGACGGCTG
CTGGGGTCTGTACAGCAGGATCTGGAGAGGAGCTTGCAGGATGCCAGCCGCGGGGACCCAGCTCATGC
TGGCTTGGCTGAGCTGGGCCACAGATTGGCCCAGAAACTGCAGGGCCTGGAGAACTGGGGCCAGGACC
CTGGGGTCTCTGCCAATGCCTCAAAGGCCTGGCACCAGAAGTCCCACTTCCAGAATTCTAGGGAGTGG
AGTGGAAAGGAAAAGTGGTGGGATGGGCAGAGAGACCGGAAGGCTGAGCACTGGAAACATAAGAAGGA
AGAATCTGGCCGGGAAAGGAAGAAGAACTGGGGAGGTCAGGAGGACAGGGAGCCAGCAGGAAGGTGGA
AGGAGGGCAGGCCAAGGGTGGAGGAGTCGGGGAGCAAGAAGGAGGGCAAGCGACAGGGCCCGAAGGAA
CCCCCAAGGAAAAGTGGTAGCTTCCACTCCTCTGGAGAAAAGCAGAAGCAACCTCGGTGGAGGGAAGG
GACTAAGGACAGCCATGACCCCCTGCCATCCTGGGCAGAGCTGTTGAGGCCCAAGTACCGGGCACCCC
AGGGCTGCTCAGGTGTGGACGAGTGTGCCCGGCAGGAGGGCTTGACTTTCTTTGGCACAGAGCTAGCC
CCAGTGCGGCAACAGGAGCTGGCCTCTCTGCTAAGAACATACTTGGCACGGCTGCCCTGGGCTGGGCA
GCTGACCAAGGAGCTACCCCTCTCACCTGCTTTCTTTGGTGAGGATGGCATCTTCCGTCATGACCGCC
TCCGCTTCCGGGATTTTGTGGATGCCCTGGAGGACAGCTTGGAGGAGGTGGCTGTGCAACAGACAGGT
GATGATGATGAAGTAGATGACTTTGAGGACTTCATCTTCAGCCACTTCTTTGGAGACAAAGCACTGAA
GAAGAGGCCTCTTCCTCCCCACAGGTCAGGGAAGAAGGACAAGCACTCACAGAGCCCAAGAGCTGCGG
GGCCCAGGGAGGGGCACAGCCATAGCCACCACCACCACCACCGGGGCTGACACCCTGCCCCACAGGGA
ATGGCCTTGGCCTGGCCCAGCCCAAGATCCCAGCGTTATCCAACTCCTGGAGGGTGGACTCTGTCCTG
GCTTGTTTGGTGTCCTCAGATAT

| | | | |
|---|---|---|---|
| NOV16h, SNP13377329 | SEQ ID NO: 448 | 737 aa | MW at 81340.4kD |
| of CG52171-04, | SNP Pos: 357 | | SNP Change: |
| Protein Sequence | | | Asp to Gly |

MASCPDSDNSWVLAGSESLPVETLGPASRMDPESERALQAPHSPSKTDGKELAGTMDGEGTLFQTESP
QSGSILTEETEVKGTLEGDVCGVEPPGPGDTVVQGDLQETTVVTGLGPDTQDLEGQSPPQSLPSTPKA
AWIREEGRCSSSDDDTDVDMEGLRRRRGREAGPPQPMVPLAVENQAGGEGAGGELGISLNMCLLGALV
LLGLGVLLFSGGLSESETGPMEEVERQVLPDPEVLEAVGDRQDGLREQLQAPVPPDSVPSLQNMGLLL
DKLAKENQDIRLLQAQLQAQKEELQSLMHQPKGLEEENAQLRGALQQGEAFQRALESELQQLRARLQG
LEADCVRGPDGVCLSGGRGPQGDKAIRBQGPREQEPELSFLKQKEQLEAEAQALRQELERQRRLLGSV
QQDLERSLQDASRGDPAHAGLAELGHRLAQKLQGLENWGQDPGVSANASKAWHQKSHFQNSREWSGKE
KWWDGQRDRKAEHWKHKKEESGRERKKNWGGQEDREPAGRWKEGRPRVEESGSKKEGKRQGPKEPPRK
SGSFHSSGEKQKQPRWREGTKDSHDPLPSWAELLRPKYRAPQGCSGVDECARQEGLTFFGTELAPVRQ
QELASLLRTYLARLPWAGQLTKELPLSPAFFGEDGIFRHDRLRFRDFVDALEDSLEEVAVQQTGDDDE
VDDFEDFIFSHFFGDKALKKRPLPPHRSGKKDKHSQSPRAAGPREGHSHSHHHHHRG

| | | |
|---|---|---|
| NOV16i, SNP13374627 | SEQ ID NO: 449 | 2403 bp |
| of CG52171-04, | ORF Start: ATG at 81 | ORF Stop: TGA at 2292 |
| DNA Sequence | SNP Pos: 1903 | SNP Change: C to T |

GGCACGAGAAGTTAAGCTGAAGACCGAAGCAAGAGCTGGTTCAGGTGGCAGCCACAGCAGCCTCAGGG
ACCTCAGCAACTATGGCCTCCTGCCCAGACTCTGATAATAGCTGGGTGCTTQCTGGCTCCGAGAGCCT
GCCAGTGGAGACACTGGGCCCGGCATCCAGGATGGACCCAGAATCTGAGAGAGCCCTGCAGGCCCCTC
ACAGCCCCTCCAAGACAGATGGGAAAGAATTAGCTGGGACCATGGATGGAGAAGGGACGCTCTTCCAG
ACTGAAAGCCCTCAGTCTGGCAGCATTCTAACAGAGGAGACTGAGGTCAAGGGCACCCTGGAAGGTGA
TGTTTGTGGTGTGGAGCCTCCTGGCCCAGGAGACACAGTAGTCCAGGGAGACCTGCAGGAGACCACCG
TGGTGACAGGCCTGGGACCAGACACACAGGACCTGGAAGGCCAGAGCCCTCCACAGAGCCTGCCTTCA
ACCCCCAAAGCAGCTTGGATCAGGGAGGAGGGCCGCTGCTCCAGCAGTGACGATGACACCGACGTGGA
CATGGAGGGTCTGCGGAGACGGCGGGGCCGGGAGGCCGGCCCACCTCAGCCCATGGTGCCCCTGGCTG
TGGAGAACCAGGCTGGGGGTGAGGGTGCAGGCGGGGAGCTGGGCATCTCCCTCAACATGTGCCTCCTT
GGGGCCCTGGTTCTGCTTGGCCTGGGGGTCCTCCTCTTCTCAGGTGGCCTCTCAGAGTCTGAGACTGG
GCCCATGGAGGAAGTGGAGCGGCAGGTCCTCCCAGACCCCGAGGTGCTGGAAGCTGTGGGGGACAGGC
AGGATGGGCTAAGGGAACAGCTGCAGGCCCCAGTGCCTCCTGACAGTGTCCCCAGCCTGCAAAACATG
GGTCTTCTGCTGGACAAGCTGGCCAAGGAGAACCAGGACATCCGGCTGCTGCAGGCCCAGCTGCAGGC
CCAAAAGGAAGAGCTTCAGAGCCTGATGCACCAGCCCAAAGGGCTAGAGGAGGAGAATGCCCAGCTCC
GGGGGGCTCTGCAGCAGGGCGAAGCCTTCCAGCGGGCTCTGGAGTCAGAGCTGCAGCAGCTGCGGGCC
CGGCTCCAGGGGCTGGAGGCCGACTGTGTCCGGGGCCCAGATGGGGTGTGCCTCAGTGGGGATAGAGG
CCCACAGGGTGACAAGGCCATCAGGGAGCAAGGCCCCAGGGAGCAGGAGCCAGAACTCAGCTTCCTGA
AGCAGAAGGAACAGCTGGAGGCTGAGGCACAGGCATTAAGGCAAGAGTTAGAGAGGCAGCGACGGCTG
CTGGGGTCTGTACAGCAGGATCTGGAGAGGAGCTTGCAGGATGCCAGCCGCGGGGACCCAGCTCATGC
TGGCTTGGCTGAGCTGGGCCACAGATTGGCCCAGAAACTGCAGGGCCTGGAGAACTGGGGCCAGGACC
CTGGGGTCTCTGCCAATGCCTCAAAGGCCTGGCACCAGAAGTCCCACTTCCAGAATTCTAGGGAGTGG
AGTGGAAAGGAAAAGTGGTGGGATGGGCAGAGAGACCGGAAGGCTGAGCACTGGAAACATAAGAAGGA
AGAATCTGGCCGGGAAAGGAAGAAGAACTGGGGAGGTCAGGAGGACAGGGAGCCAGCAGGAAGGTGGA
AGGAGGGCAGGCCAAGGGTGGAGGAGTCGGGGAGCAAGAAGGAGGGCAAGCGACAGGGCCCGAAGGAA
CCCCCAAGGAAAAGTGGTAGCTTCCACTCCTCTGGAGAAAAGCAGAAGCAACCTCGGTGGAGGGAAGG
GACTAAGGACAGCCATGACCCCCTGCCATCCTGGGCAGAGCTGTTGAGGCCCAAGTACCGGGCACCCC
AGGGCTGCTCAGGTGTGGACGAGTGTGCCCGGCAGGAGGGCTTGACTTTCTTTGGCACAGAGCTAGTC
CCAGTGCGGCAACAGGAGCTGGCCTCTCTGCTAAGAACATACTTGGCACGGCTGCCCTGGGCTGGGCA
GCTGACCAAGGAGCTACCCCTCTCACCTGCTTTCTTTGGTGAGGATGGCATCTTCCGTCATGACCGCC
TCCGCTTCCGGGATTTTGTGGATGCCCTGGAGGACAGCTTGGAGGAGGTGGCTGTGCAACAGACAGGT
GATGATGATGAAGTAGATGACTTTGAGGACTTCATCTTCAGCCACTTCTTTGGAGACAAAGCACTGAA
GAAGAGGCCTCTTCCTCCCCACAGGTCAGGGAAGAAGGACAAGCACTCACAGAGCCCAAGAGCTGCGG
GGCCCAGGGAGGGGCACAGCCATAGCCACCACCACCACCACCGGGGCTGACACCCTGCCCCACAGGGA
ATGGCCTTGGCCTGGCCCAGCCCAAGATCCCAGCGTTATCCAACTCCTGGAGGGTGGACTCTGTCCTG
GCTTGTTTGGTGTCCTCAGATAT

| | | | |
|---|---|---|---|
| NOV16i, SNP13374627 | SEQ ID NO: 450 | 737 aa | MW at 81426.5kD |
| of CG52171-04, | SNP Pos: 608 | | SNP Change: |
| Protein Sequence | | | Ala to Val |

MASCPDSDNSWVLAGSESLPVETLGPASRMDPESERALQAPHSPSKTDGKELAGTMDGEGTLFQTESP
QSGSILTEETEVKGTLEGDVCGVEPPGPGDTVVQGDLQETTVVTGLGPDTQDLEGQSPPQSLPSTPKA
AWIREEGRCSSSDDDTDVDMEGLRRRRGREAGPPQPMVPLAVENQAGGEGAGGELGISLNMCLLGALV
LLGLGVLLFSGGLSESETGPMEEVERQVLPDPEVLEAVGDRQDGLREQLQAPVPPDSVPSLQNMGLLL
DKLAKENQDIRLLQAQLQAQKEELQSLMHQPKGLEEENAQLRGALQQGEAFQRALESELQQLRARLQG
LEADCVRGPDGVCLSGDRGPQGDKAIREQGPREQEPELSFLKQKEQLEAEAQALRQELERQRRLLGSV
QQDLERSLQDASRGDPAHAGLAELGHRLAQKLQGLENWGQDPGVSANASKAWHQKSHFQNSREWSGKE
KWWDGQRDRKAEHWKHKKEESGRERKKNWGGQEDREPAGRWKEGRPRVEESGSKKEGKRQGPKEPPRK
SGSFHSSGEKQKQPRWREGTKDSHDPLPSWAELLRPKYRAPQGCSGVDECARQEGLTFFGTELVPVRQ
QELASLLRTYLARLPWAGQLTKELPLSPAFFGEDGIFRHDRLRFRDFVDALEDSLEEVAVQQTGDDDE
VDDFEDFIFSHFFGDKALKKRPLPPHRSGKKDKHSQSPRAAGPREGHSHSHHHHHRG

| | | |
|---|---|---|
| NOV16j, SNP13374626 | SEQ ID NO: 451 | 2403 bp |
| of CG52171-04, | ORF Start: ATG at 81 | ORF Stop: TGA at 2292 |
| DNA Sequence | SNP Pos: 1918 | SNP Change:A to G |

GGCACGAGAAGTTAAGCTGAAGACCGAAGCAAGAGCTGGTTCAGGTGGCAGCCACAGCAGCCTCAGGG
ACCTCAGCAACTATGGCCTCCTGCCCAGACTCTGATAATAGCTGGGTGCTTGCTGGCTCCGAGAGCCT
GCCAGTGGAGACACTGGGCCCGGCATCCAGGATGGACCCAGAATCTGAGAGAGCCCTGCAGGCCCCTC
ACAGCCCCTCCAAGACAGATGGGAAAGAATTAGCTGGGACCATGGATGGAGAAGGGACGCTCTTCCAG
ACTGAAAGCCCTCAGTCTGGCAGCATTCTAACAGAGGAGACTGAGGTCAAGGGCACCCTGGAAGGTGA
TGTTTGTGGTGTGGAGCCTCCTGGCCCAGGAGACACAGTAGTCCAGGGAGACCTGCAGGAGACCACCG
TGGTGACAGGCCTGGGACCAGACACACAGGACCTGGAAGGCCAGAGCCCTCCACAGAGCCTGCCTTCA
ACCCCCAAAGCAGCTTGGATCAGGGAGGAGGGCCGCTGCTCCAGCAGTGACGATGACACCGACGTGGA
CATGGAGGGTCTGCGGAGACGGCGGGGCCGGGAGGCCGGCCCACCTCAGCCCATGGTGCCCCTGGCTG
TGGAGAACCAGGCTGGGGGTGAGGGTGCAGGCGGGGAGCTGGGCATCTCCCTCAACATGTGCCTCCTT
GGGGCCCTGGTTCTGCTTGGCCTGGGGGTCCTCCTCTTCTCAGGTGGCCTCTCAGAGTCTGAGACTGG
GCCCATGGAGGAAGTGGAGCGGCAGGTCCTCCCAGACCCCGAGGTGCTGGAAGCTGTGGGGGACAGGC
AGGATGGGCTAAGGGAACAGCTGCAGGCCCCAGTGCCTCCTGACAGTGTCCCCAGCCTGCAAAACATG
GGTCTTCTGCTGGACAAGCTGGCCAAGGAGAACCAGGACATCCGGCTGCTGCAGGCCCAGCTGCAGGC
CCAAAAGGAAGAGCTTCAGAGCCTGATGCACCAGCCCAAAGGGCTAGAGGAGGAGAATGCCCAGCTCC
GGGGGGCTCTGCAGCAGGGCGAAGCCTTCCAGCGGGCTCTGGAGTCAGAGCTGCAGCAGCTGCGGGCC
CGGCTCCAGGGGCTGGAGGCCGACTGTGTCCGGGGCCCAGATGGGGTGTGCCTCAGTGGGGATAGAGG
CCCACAGGGTGACAAGGCCATCAGGGAGCAAGGCCCCAGGGAGCAGGAGCCAGAACTCAGCTTCCTGA
AGCAGAAGGAACAGCTGGAGGCTGAGGCACAGGCATTAAGGCAAGAGTTAGAGAGGCAGCGACGGCTG
CTGGGGTCTGTACAGCAGGATCTGGAGAGGAGCTTGCAGGATGCCAGCCGCGGGGACCCAGCTCATGC
TGGCTTGGCTGAGCTGGGCCACAGATTGGCCCAGAAACTGCAGGGCCTGGAGAACTGGGGCCAGGACC
CTGGGGTCTCTGCCAATGCCTCAAAGGCCTGGCACCAGAAGTCCCACTTCCAGAATTCTAGGGAGTGG
AGTGGAAAGGAAAAGTGGTGGGATGGGCAGAGAGACCGGAAGGCTGAGCACTGGAAACATAAGAAGGA
AGAATCTGGCCGGGAAAGGAAGAAGAACTGGGGAGGTCAGGAGGACAGGGAGCCAGCAGGAAGGTGGA
AGGAGGGCAGGCCAAGGGTGGAGGAGTCGGGGAGCAAGAAGGAGGGCAAGCGACAGGGCCCGAAGGAA
CCCCCAAGGAAAAGTGGTAGCTTCCACTCCTCTGGAGAAAAGCAGAAGCAACCTCGGTGGAGGGAAGG
GACTAAGGACAGCCATGACCCCCTGCCATCCTGGGCAGAGCTGTTGAGGCCCAAGTACCGGGCACCCC
AGGGCTGCTCAGGTGTGGACGAGTGTGCCCGGCAGGAGGGCTTGACTTTCTTTGGCACAGAGCTAGCC
CCAGTGCGGCAACGGGAGCTGGCCTCTCTGCTAAGAACATACTTGGCACGGCTGCCCTGGGCTGGGCA
GCTGACCAAGGAGCTACCCCTCTCACCTGCTTTCTTTGGTGAGGATGGCATCTTCCGTCATGACCGCC
TCCGCTTCCGGGATTTTGTGGATGCCCTGGAGGACAGCTTGGAGGAGGTGGCTGTGCAACAGACAGGT
GATGATGATGAAGTAGATGACTTTGAGGACTTCATCTTCAGCCACTTCTTTGGAGACAAAGCACTGAA
GAAGAGGCCTCTTCCTCCCCACAGGTCAGGGAAGAAGGACAAGCACTCACAGAGCCCAAGAGCTGCGG
GGCCCAGGGAGGGGCACAGCCATAGCCACCACCACCACCACCGGGGCTGACACCCTGCCCCACAGGGA
ATGGCCTTGGCCTGGCCCAGCCCAAGATCCCAGCGTTATCCAACTCCTGGAGGGTGGACTCTGTCCTG
GCTTGTTTGGTGTCCTCAGATAT

| | | | |
|---|---|---|---|
| NOV16j, SNP13374626 | SEQ ID NO: 452 | 737 aa | MW at 81426.5kD |
| of CG52171-04, | SNP Pos: 613 | | SNP Change: |
| Protein Sequence | | | Gln to Arg |

MASCPDSDNSWVLAGSESLPVETLGPASRMDPESERALQAPHSPSKTDGKELAGTMDGEGTLFQTESP
QSGSILTEETEVKGTLEGDVCGVEPPGPGDTVVQGDLQETTVVTGLGPDTQDLEGQSPPQSLPSTPKA
AWIREEGRCSSSDDDTDVDMEGLRRRRGREAGPPQPMVPLAVENQAGGEGAGGELGISLNMCLLGALV
LLGLGVLLFSGGLSESETGPMEEVERQVLPDPEVLEAVGDRQDGLREQLQAPVPPDSVPSLQNMGLLL
DKLAKENQDIRLLQAQLQAQKEELQSLMHQPKGLEEENAQLRGALQQGEAFQRALESELQQLRARLQG
LEADCVRGPDGVCLSGDRGPQGDKAIREQGPREQEPELSFLKQKEQLEAEAQALRQELERQRRLLGSV
QQDLERSLQDASRGDPAHAGLAELGHRLAQKLQGLENWGQDPGVSANASKAWHQKSHFQNSREWSGKE
KWWDGQRDRKAEHWKHKKEESGRERKKNWGGQEDREPAGRWKEGRPRVEESGSKKEGKRQGPKEPPRK
SGSFHSSGEKQKQPRWREGTKDSHDPLPSWAELLRPKYHAPQGCSGVDECARQEGLTFFGTELAPVRQ
RELASLLRTYLARLPWAGQLTKELPLSPAFFGEDGIFRHDRLRFRDFVDALEDSLEEVAVQQTGDDDE
VDDFEDFIFSHFFGDKALKKRPLPPHRSGKKDKHSQSPRAAGPREGHSHSHHHHHRG

| | | |
|---|---|---|
| NOV16k, SNP13374625 | SEQ ID NO: 453 | 2403 bp |
| of CG52171-04, | ORF Start: ATG at 81 | ORF Stop: TGA at 2292 |
| DNA Sequence | SNP Pos: 1951 | SNP Change: C to T |

GGCACGAGAAGTTAAGCTGAAGACCGAAGCAAGAGCTGGTTCAGGTGGCAGCCACAGCAGCCTCAGGG
ACCTCAGCAACTATGGCCTCCTGCCCAGACTCTQATAATAGCTGGGTGCTTGCTGGCTCCGAGAGCCT
GCCAGTGGAGACACTGGGCCCGGCATCCAGGATGGACCCAGAATCTGAGAGAGCCCTGCAGGCCCCTC
ACAGCCCCTCCAAGACAGATGGGAAAGAATTAGCTGGGACCATGGATGGAGAAGGGACGCTCTTCCAG
ACTGAAAGCCCTCAGTCTGGCAGCATTCTAACAGAGGAGACTGAGGTCAAGGGCACCCTGGAAGGTGA
TGTTTGTGGTGTGGAGCCTCCTGGCCCAGGAGACACAGTAGTCCAGGGAGACCTGCAGGAGACCACCG
TGGTGACAGGCCTGGGACCAGACACACAGGACCTGGAAGGCCAGAGCCCTCCACAGAGCCTGCCTTCA
ACCCCCAAAGCAGCTTGGATCAGGGAGGAGGGCCGCTGCTCCAGCAGTGACGATGACACCGACGTGGA
CATGGAGGGTCTGCGGAGACGGCGGGGCCGGGAGGCCGGCCCACCTCAGCCCATGGTGCCCCTGGCTG
TGGAGAACCAGGCTGGGGGTGAGGGTGCAGGCGGGGAGCTGGGCATCTCCCTCAACATGTGCCTCCTT
GGGGCCCTGGTTCTGCTTGGCCTGGGGGTCCTCCTCTTCTCAGGTGGCCTCTCAGAGTCTGAGACTGG
GCCCATGGAGGAAGTGGAGCGGCAGGTCCTCCCAGACCCCGAGGTGCTGGAAGCTGTGGGGGACAGGC
AGGATGGGCTAAGGGAACAGCTGCAGGCCCCAGTGCCTCCTGACAGTGTCCCCAGCCTGCAAAACATG
GGTCTTCTGCTGGACAAGCTGGCCAAGGAGAACCAGGACATCCGGCTGCTGCAGGCCCAGCTGCAGGC
CCAAAAGGAAGAGCTTCAGAGCCTGATGCACCAGCCCAAAGGGCTAGAGGAGGAGAATGCCCAGCTCC
GGGGGGCTCTGCAGCAGGGCGAAGCCTTCCAGCGGGCTCTGGAGTCAGAGCTGCAGCAGCTGCGGGCC
CGGCTCCAGGGGCTGGAGGCCGACTGTGTCCGGGGCCCAGATGGGGTGTGCCTCAGTGGGGATAGAGG
CCCACAGGGTGACAAGGCCATCAGGGAGCAAGGCCCCAGGGAGCAGGAGCCAGAACTCAGCTTCCTGA
AGCAGAAGGAACAGCTGGAGGCTGAGGCACAGGCATTAAGGCAAGAGTTAGAGAGGCAGCGACGGCTG
CTGGGGTCTGTACAGCAGGATCTGGAGAGGAGCTTGCAGGATGCCAGCCGCGGGGACCCAGCTCATGC
TGGCTTGGCTGAGCTGGGCCACAGATTGGCCCAGAAACTGCAGGGCCTGGAGAACTGGGGCCAGGACC
CTGGGGTCTCTGCCAATGCCTCAAAGGCCTGGCACCAGAAGTCCCACTTCCAGAATTCTAGGGAGTGG
AGTGGAAAGGAAAAGTGGTGGGATGGGCAGAGAGACCGGAAGGCTGAGCACTGGAAACATAAGAAGGA
AGAATCTGGCCGGGAAAGGAAGAAGAACTGGGGAGGTCAGGAGGACAGGGAGCCAGCAGGAAGGTGGA
AGGAGGGCAGGCCAAGGGTGGAGGAGTCGGGGAGCAAGAAGGAGGGCAAGCGACAGGGCCCGAAGGAA
CCCCCAAGGAAAAGTGGTAGCTTCCACTCCTCTGGAGAAAAGCAGAAGCAACCTCGGTGGAGGGAAGG
GACTAAGGACAGCCATGACCCCCTGCCATCCTGGGCAGAGCTGTTGAGGCCCAAGTACCGGGCACCCC
AGGGCTGCTCAGGTGTGGACGAGTGTGCCCGGCAGGAGGGCTTGACTTTCTTTGGCACAGAGCTAGCC
CCAGTGCGGCAACAGGAGCTGGCCTCTCTGCTAAGAACATACTTGGTACGGCTGCCCTGGGCTGGGCA
GCTGACCAAGGAGCTACCCCTCTCACCTGCTTTCTTTGGTGAGGATGGCATCTTCCGTCATGACCGCC
TCCGCTTCCGGGATTTTGTGGATGCCCTGGAGGACAGCTTGGAGGAGGTGGCTGTGCAACAGACAGGT
GATGATGATGAAGTAGATGACTTTGAGGACTTCATCTTCAGCCACTTCTTTGGAGACAAAGCACTGAA
GAAGAGGCCTCTTCCTCCCCACAGGTCAGGGAAGAAGGACAAGCACTCACAGAGCCCAAGAGCTGCGG
GGCCCAGGGAGGGGCACAGCCATAGCCACCACCACCACCACCGGGGCTGACACCCTGCCCCACAGGGA
ATGGCCTTGGCCTGGCCCAGCCCAAGATCCCAGCGTTATCCAACTCCTGGAGGGTGGACTCTGTCCTG
GCTTGTTTGGTGTCCTCAGATAT

| | | | |
|---|---|---|---|
| NOV16k, SNP13374625 | SEQ ID NO: 454 | 737 aa | MW at 81426.5kD |
| of CG52171-04, | SNP Pos: 624 | | SNP Change: |
| Protein Sequence | | | Ala to Val |

MASCPDSDNSWVLAGSESLPVETLGPASRMDPESERALQAPHSPSKTDGKELAGTMDGEGTLFQTESP
QSGSILTEETEVKGTLEGDVCGVEPPGPGDTVVQGDLQETTVVTGLGPDTQDLEGQSPPQSLPSTPKA
AWIREEGRCSSSDDDTDVDMEGLRRRRGREAGPPQPMVPLAVENQAGGEGAGGELGISLNMCLLGALV
LLGLGVLLFSGGLSESETGPMEEVERQVLPDPEVLEAVGDRQDGLREQLQAPVPPDSVPSLQNMGLLL
DKLAKENQDIRLLQAQLQAQKEELQSLMHQPKGLEEENAQLRGALQQGEAFQRALESELQQLRARLQG
LEADCVRGPDGVCLSGDRGPQGDKAIREQGPREQEPELSFLKQKEQLEAEAQALRQELERQRRLLGSV
QQDLERSLQDASRGDPAHAGLAELGHRLAQKLQGLENWGQDPGVSANASKAWHQKSHFQNSREWSGKE
KWWDGQRDRKAEHWKHKKEESGRERKKNWGGQEDREPAGRWKEGRPRVEESGSKKEGKRQGPKEPPRK
SGSFHSSGEKQKQPRWREGTKDSHDPLPSWAELLRPKYRAPQGCSGVDECARQEGLTFFGTELAPVRQ
QELASLLRTYLVRLPWAGQLTKELPLSPAFFGEDGIFRHDRLRFRDFVDALEDSLEEVAVQQTGDDDE
VDDFEDFIFSHFFGDKALKKRPLPPHRSGKKDKHSQSPRAAGPREGHSHSHHHHHRG

| | | |
|---|---|---|
| NOV16l, SNP13374624 | SEQ ID NO: 455 | 2403 bp |
| of CG52171-04, | ORF Start: ATG at 81 | ORF Stop: TGA at 2292 |
| DNA Sequence | SNP Pos: 2124 | SNP Change: G to T |

GGCACGAGAAGTTAAGCTGAAGACCGAAGCAAGAGCTGGTTCAGGTGGCAGCCACAGCAGCCTCAGGC
ACCTCAGCAACTATGGCCTCCTGCCCAGACTCTGATAATAGCTGGGTGCTTGCTGGCTCCGAGAGCCT
GCCAGTGGAGACACTGGGCCCGGCATCCAGGATGGACCCAGAATCTGAGAGAGCCCTGCAGGCCCCTC
ACAGCCCCTCCAAGACAGATGGGAAAGAATTAGCTGGGACCATGGATGGAGAAGGGACGCTCTTCCAG
ACTGAAAGCCCTCAGTCTGGCAGCATTCTAACAGAGGAGACTGAGGTCAAGGGCACCCTGGAAGGTGA
TGTTTGTGGTGTGGAGCCTCCTGGCCCAGGAGACACAGTAGTCCAGGGAGACCTGCAGGAGACCACCG
TGGTGACAGGCCTGGGACCAGACACACAGGACCTGGAAGGCCAGAGCCCTCCACAGAGCCTGCCTTCA
ACCCCCAAAGCAGCTTGGATCAGGGAGGAGGGCCGCTGCTCCAGCAGTGACGATGACACCGACGTGGA
CATGGAGGGTCTGCGGAGACGGCGGGGCCGGGAGGCCGGCCCACCTCAGCCCATGGTGCCCCTGGCTG
TGGAGAACCAGGCTGGGGGTGAGGGTGCAGGCGGGGAGCTGGGCATCTCCCTCAACATGTGCCTCCTT
GGGGCCCTGGTTCTGCTTGGCCTGGGGGTCCTCCTCTTCTCAGGTGGCCTCTCAGAGTCTGAGACTGG
GCCCATGGAGGAAGTGGAGCGGCAGGTCCTCCCAGACCCCGAGGTGCTGGAAGCTGTGGGGGACAGGC
AGGATGGGCTAAGGGAACAGCTGCAGGCCCCAGTGCCTCCTGACAGTGTCCCCAGCCTGCAAAACATG
GGTCTTCTGCTGGACAAGCTGGCCAAGGAGAACCAGGACATCCGGCTGCTGCAGGCCCAGCTGCAGGC
CCAAAAGGAAGAGCTTCAGAGCCTGATGCACCAGCCCAAAGGGCTAGAGGAGGAGAATGCCCAGCTCC
GGGGGGCTCTGCAGCAGGGCGAAGCCTTCCAGCGGGCTCTGGAGTCAGAGCTGCAGCAGCTGCGGGCC
CGGCTCCAGGGGCTGGAGGCCGACTGTGTCCGGGGCCCAGATGGGGTGTGCCTCAGTGGGGATAGAGG
CCCACAGGGTGACAAGGCCATCAGGGAGCAAGGCCCCAGGGAGCAGGAGCCAGAACTCAGCTTCCTGA
AGCAGAAGGAACAGCTGGAGGCTGAGGCACAGGCATTAAGGCAAGAGTTAGAGAGGCAGCGACGGCTG
CTGGGGTCTGTACAGCAGGATCTGGAGAGGAGCTTGCAGGATGCCAGCCGCGGGGACCCAGCTCATGC
TGGCTTGGCTGAGCTGGGCCACAGATTGGCCCAGAAACTGCAGGGCCTGGAGAACTGGGGCCAGGACC
CTGGGGTCTCTGCCAATGCCTCAAAGGCCTGGCACCAGAAGTCCCACTTCCAGAATTCTAGGGAGTGG
AGTGGAAAGGAAAAGTGGTGGGATGGGCAGAGAGACCGGAAGGCTGAGCACTGGAAACATAAGAAGGA
AGAATCTGGCCGGGAAAGGAAGAAGAACTGGGGAGGTCAGGAGGACAGGGAGCCAGCAGGAAGGTGGA
AGGAGGGCAGGCCAAGGGTGGAGGAGTCGGGGAGCAAGAAGGAGGGCAAGCGACAGGGCCCGAAGGAA
CCCCCAAGGAAAAGTGGTAGCTTCCACTCCTCTGGAGAAAAGCAGAAGCAACCTCGGTGGAGGGAAGG
GACTAAGGACAGCCATGACCCCCTGCCATCCTGGGCAGAGCTGTTGAGGCCCAAGTACCGGGCACCCC
AGGGCTGCTCAGGTGTGGACGAGTGTGCCCGGCAGGAGGGCTTGACTTTCTTTGGCACAGAGCTAGCC
CCAGTGCGGCAACAGGAGCTGGCCTCTCTGCTAAGAACATACTTGGCACGGCTGCCCTGGGCTGGGCA
GCTGACCAAGGAGCTACCCCTCTCACCTGCTTTCTTTGGTGAGGATGGCATCTTCCGTCATGACCGCC
TCCGCTTCCGGGATTTTGTGGATGCCCTGGAGGACAGCTTGGAGGAGGTGGCTGTGCAACAGACAGGT
GATGATGATGAAGTATATGACTTTGAGGACTTCATCTTCAGCCACTTCTTTGGAGACAAAGCACTGAA
GAAGAGGCCTCTTCCTCCCCACAGGTCAGGGAAGAAGGACAAGCACTCACAGAGCCCAAGAGCTGCGG
GGCCCAGGGAGGGGCACAGCCATAGCCACCACCACCACCACCGGGGCTGACACCCTGCCCCACAGGGA
ATGGCCTTGGCCTGGCCCAGCCCAAGATCCCAGCGTTATCCAACTCCTGGAGGGTGGACTCTGTCCTG
GCTTGTTTGGTGTCCTCAGATAT

| | | | |
|---|---|---|---|
| NOV16l, SNP13374624 | SEQ ID NO: 456 | 737 aa | MW at 81446.5kD |
| of CG52171-04, | SNP Pos: 682 | | SNP Change: |
| Protein Sequence | | | Asp to Tyr |

MASCPDSDNSWVLAGSESLPVETLGPASRMDPESEHALQAPHSPSKTDGKELAGTMDGEGTLFQTESP
QSGSILTEETEVKGTLEGDVCGVEPPGPGDTVVQGDLQETTVVTGLGPDTQDLEGQSPPQSLPSTPKA
AWIREEGRCSSSDDDTDVDMEGLRRRRGREAGPPQPMVPLAVENQAGGEGAGGELGISLNMCLLGALV
LLGLGVLLFSGGLSESETGPMEEVERQVLPDPEVLEAVGDRQDGLREQLQAPVPPDSVPSLQNMGLLL
DKLAKENQDIRLLQAQLQAQKEELQSLMHQPKGLEEENAQLRGALQQGEAFQRALESELQQLRARLQG
LEADCVRGPDGVCLSGDRGPQGDKAIREQGPREQEPELSFLKQKEQLEAEAQALRQELERQRRLLGSV
KWWDGQRDRKAEHWKHKKEESGRERKKNWGGQEDREPAGRWKEGRPRVEESGSKKEGKRQGPKEPPRK
SGSFHSSGEKQKQPRWREGTKDSHDPLPSWAELLRPKYRAPQGCSGVDECARQEGLTFFGTELAPVRQ
QELASLLRTYLARLPWAGQLTKELPLSPAFFGEDGIFRHDRLRFRDFVDALEDSLEEVAVQQTGDDDE
VYDFEDFIFSHFFGDKALKKRPLPPHRSGKKDKHSQSPRAAGPREGHSHSHHHHHRG

[0441] A ClustalW comparison of the above protein sequences yields the following sequence alignment shown in Table 16B.

TABLE 16B
Comparison of the NOV16 protein sequences.

| | |
|---|---|
| NOV16a | MASCPDSDNSWVLAGSESLPVETLGPASRMDPESERALQAPHSPSKTDGKELAGTNDGEG |
| NOV16b | ------------------------------------------------------------ |
| NOV16c | MASCPDSDNSWVLAGSESLPVETLGPASRMDPESERALQAPHSPSKTDGKELAGTMDGEG |
| NOV16d | MASCPDSDNSWVLAGSESLPVETLGPASRMDPESERALQAPHSPSKTDGKELAGTMDGEG |
| NOV16e | ------------------------------------------------------------ |
| NOV16f | MASCPDSDNSWVLAGSESLPVETLGPASRMDPESERALQAPHSPSKTDGKELAGTMDGEG |
| NOV16a | TLFQTESPQSGSILTEETEVKGTLEGDVCGVEPPGPGDTVVQGDLQETTVVTGLGPDTQD |
| NOV16b | ------------------------------------------------------------ |
| NOV16c | TLFQTESPQSGSILTEETEVKGTLEGDVCGVEPPGPGDTVVQGDLQETTVVTGLGPDTQD |
| NOV16d | TLFQTESPQSGSILTEETEVKGTLEGDVCGVEPPGPGDTVVQGDLQETTVVTGLGPDTQD |
| NOV16e | ------------------------------------------------------------ |
| NOV16f | TLFQTESPQSGSILTEETEVKGTLEGDVCGVEPPGPGDTVVQGDLQETTVVTGLGPDTQD |
| NOV16a | LEGQSPPQSLPSTPKAAWIREEGRCSSSDDDTDVDMEGLRRRRGREAGPPQPMVPLAVEN |
| NOV16b | ------------------------------------------------------------ |
| NOV16c | LEGQSPPQSLPSTPKAAWIREEGRCSSSDDDTDVDMEGLRRRRGREAGPPQPMVPLAVEN |
| NOV16d | LEGQSPPQSLPSTPKAAWIREEGRCSSSDDDTDVDMEGLRRPRGREAGPPQPMVPLAVEN |
| NOV16e | ------------------------------------------------------------ |
| NOV16f | LEGQSPPQSLPSTPKAAWIREEGRCSSSDDDTDVDMEGLRRRRGREAGPPQPMVPLAVEN |
| NOV16a | QAGGEGAGGELGISLNMCLLGALVLLGLGVLLFSGGLSESETGPMEEVERQVLPDPEVLE |
| NOV16b | ----------------MCLLGALVLLGLGVLLFSGGLSESETGPMEEVERQVLPDPEVLE |
| NOV16c | QAGGEGAGGELGISLNMCLLGALGLLGLGVLLFSGGLSESETGPMEEVERQVLPDPEVLE |
| NOV16d | QAGGEGAGGELGISLNMCLLGALGLLGLGVLLFSGGLSESETGPMEEVERQVLPDPEVLE |
| NOV16e | --------------------------------------ESETGPMEEVERQVLPDPEVLE |
| NOV16f | QAGGEGAGGELGISLNMCLLGALVLLGLGVLLFSGGLSESETGPMEEVERQVLPDPEVLE |
| NOV16a | AVGDRQDGLREQLQAPVPPDSVPSLQNMGLLLDKLAKENQDIRLLQAQLQAQKEELQSLM |
| NOV16b | AVGDRQDGLREQLQAPVPPDSVPSLQNMGLLLDKLAKENQDIRLLQAQLQAQKEELQSLM |
| NOV16c | AVGDRQDGLREQLQAPVPPDSVPSLQNMGLLLDKLAKENQDIRLLQAQLQAQKEELQSLM |
| NOV16d | AVGDRQDGLREQLQAPVPPDSVPSLQNMGLLLDKLAKENQDIRLLQAQLQAQKEELQSLM |
| NOV16e | AVGDRQDGLREQLQAPVPPDSVPSLQNMGLLLDKLAKENQDIRLLQAQLQAQKEELQSLM |
| NOV16f | AVGDRQDGLREQLQAPVPPDSVPSLQNMGLLLDKLAKENQDIRLLQAQLQAQKEELQSLM |
| NOV16a | HQPKGLEEENAQLRGALQQGEAFQRALESELQQLRARLQGLEADCVRGPDGVCLSGDRGP |
| NOV16b | HQPKGLEEENAQLRGALQQGEAFQRALESELQQLRARLQGLEADCVRGPDGVCLSGGRGP |
| NOV16c | HQPKGLEEENAQLRGALQQGEAFQRALESELQQLRARLQGLEADCVRGPD---------- |
| NOV16d | HQPKGLEEENAQLRGALQQGEAFQRALESELQQLRARLQGLEADCVRGPDGVCLSGGRGP |
| NOV16e | HQPKGLEEENAQLRGALQQGEAFQRALESELQQLRARLQGLEADCVRGPDGVCLSGDRGP |
| NOV16f | HQPKGLEEENAQLRGALQQGEAFQRALESELQQLRARIQGLEADCVRGPDGVCLSGDRGP |
| NOV16a | QGDKAIREQGPREQEPELSFLKQKEQLEAEAQALRQELERQRRLLGSVQQDLERSLQDAS |
| NOV16b | QGDKAIREQGPREQEPELSFLKQKEQLEAEAQALRQELERQRRLLGSVQQDLERSLQDAS |
| NOV16c | ------------------------------------------------------------ |
| NOV16d | QGDKAIREQGPREQEPELSFLKQKEQLEAEAQALRQELERQRRLLGSVQQDLERSLQDAS |
| NOV16e | QGDKAIREQGPREQEPELSFLKQKEQLEAEAQALRQELERQRRLLGSVQQDLERSLQDAS |
| NOV16f | QGDKAIREQGPREQEPELSFLNQKEQLEAEAQALRQELERQRRLLGSVQQDLERSLQDAS |
| NOV16a | RGDPAHAGLAELGHRLAQKLQGLENWGQDPGVSANASKAWHQKSHFQNSREWSGKEKWWD |
| NOV16b | RGDPAHAGLAELGHRLAQKLQGLENWGQDPGVSANASKAWHQKSHFQNSREWSGKEKWWD |
| NOV16c | ------------------------------------------------------------ |
| NOV16d | RGDPAHAGLAELGHRLAQKLQGLENWGQDPGVSANASKAWHQKSHFQNSREWSGKEKWWD |
| NOV16e | RGDPAHAGLAELGHRLAQKLQGLENWGQDPGVSANASKAWHQKSHFQNSREWSGKEKWWD |
| NOV16f | RGDPAHAGLAELGHRLAQKLQGLENWGQDPGVSANASKAWHQKSHFQNSREWSGKEKWWD |
| NOV16a | GQRDRKAEHWKHKKEESGRERKKNWGGQEDREPAGRWKEGRPRVEESGSKKEGKRQGPKE |
| NOV16b | GQRDRKAEHWKHKKEESGRERKKNWGGQEDREPAGRWKEGRPRVEESGSKKEGKRQGPKE |
| NOV16c | ------------------------------------------------------------ |
| NOV16d | GQRDRKAEHWKHKKEESGRERKKNWGGQEDREPAGRWKEGRPRVEESGSKKEGKRQGPKE |
| NOV16e | GQRDRKAEHWKHKKEESGRERKKNWGGQEDREPAGRWKEGRPRVEESGSKKEGKRQGPKE |
| NOV16f | GQRDRKAEHWKHKKEESGRERKKNWGGQEDREPAGRWKEGRPRVEESGSKKEGKRQAPKE |
| NOV16a | PPRKSGSFHSSGEKQKQPRWREGTKDSHDPLPSWAELLRPKYRAPQGCSGVDECARQEGL |
| NOV16b | PPRKSGSFHSSGEKQKQPRWREGTKGSHDPLPSWAELLRPKYRAPQGCSGVDECARQEGL |
| NOV16c | ------------------------------------------------------------ |
| NOV16d | PPRKSGSFHSSGEKQKQPRWREGTKGSHDPLPSWAELLRPKYRAPQGCSGVDECARQEGL |
| NOV16e | PPRKSGSFHSSGEKQKQPRWREGTKDSHDPLPSWAELLRPKYRAPQGCSGVDECARQEGL |
| NOV16f | PPRKSGSFHSSGEKQKQPRWREGTKDSHDPLPSWAELLRPKYRAPQGCSGVDECARQEGL |
| NOV16a | TFFGTELAPVRQQELASLLRTYLARLPWAGQLTKELPLSPAFFGEDGIFRHDRLRFRDFV |
| NOV16b | TFFGTELAPVRQQELASLLRTYLARLPWAGQLTKELPLSPAFFGEDGIFRHDRLRFRDFV |
| NOV16c | --------------------------------------------GDGIFRHDRLRFRDFV |
| NOV16d | TFFGTELAPVRQQELASLLRTYLARLPWAGQLTKELPLSPAFFGEDGIFRHDRLRFRDFV |
| NOV16e | TFFGTELAPVRQQELASLLRTYLARLPWAGQLTKELPLSPAFFGEDGIFRHDRLRFRDFV |
| NOV16f | TFFGTELAPVRQQELASLLRTYLARLPWAGQLTKELPLSPAFFGEDGIFRHDRLRFRDFV |
| NOV16a | DALEDSLEEVAVQQTGDDDEVDDFEDFIFSHFFGDKALKKRPLPPHRSGKKDKHSQSPPA |
| NOV16b | DALEDSLEEVAVQQTGDDDEVDDFEDFIFSHFFGDKALKKR------SGKKDKHSQSPRA |
| NOV16c | DALEDSLEEVAVQQTGDDDEVDDFEDFIFSHFFGDKALKKR------SGKKDKHSQSPRA |
| NOV16d | DALEDSLEEVLEFSGR-------------------------------------------- |
| NOV16e | DALEDSLEEVAVQQTGDDDEVDDFEDFIFSHFFGDKALKKR------SGKKDKHSQSPRA |
| NOV16f | DALEDSLEEVAVQQTGDDDEVDDFEDFIFSHFFGDKALKKR------SGKKDKHSQSPPA |
| NOV16a | AGPREGHSHSHHHHHRG |
| NOV16b | AGPREGHSHSHHHHHRG |
| NOV16c | AGPREGHSHSHHHHHRG |
| NOV16d | ----------------- |
| NOV16e | AGPREGHSHSHHHHHRG |
| NOV16f | AGPREGHSHSHHHHRG- |
| NOV16a | (SEQ ID NO: 434) |
| NOV16b | (SEQ ID NO: 436) |
| NOV16c | (SEQ ID NO: 438) |
| NOV16d | (SEQ ID NO: 440) |
| NOV16e | (SEQ ID NO: 442) |
| NOV16f | (SEQ ID NO: 444) |

[0442] Further analysis of the NOV16a protein yielded the following properties shown in Table 16C.

TABLE 16C
Protein Sequence Properties NOV16a

| | |
|---|---|
| SignalP analysis: | No Known Signal Sequence Predicted |
| PSORT II analysis: | |

| PSG: | a new signal peptide prediction method | |
|---|---|---|
| | N-region: | length 8; pos. chg 0; neg. chg 2 |
| | H-region: | length 8; peak value 0.00 |
| | PSG score: | −4.40 |

| | |
|---|---|
| GvH: | von Heijne's method for signal seq. recognition |
| | GvH score (threshold: −2.1): −7.85 |
| | possible cleavage site: between 23 and 24 |

>>> Seems to have no N-terminal signal peptide

| ALOM: | Klein et al's method for TM region allocation | | |
|---|---|---|---|
| | Init position for calculation: 1 | | |
| | Tentative number of TMS(s) for the threshold 0.5: 1 | | |
| | Number of TMS(s) for threshold 0.5: 1 | | |
| | INTEGRAL | Likelihood = | Transmembrane 197-213 |
| | | −10.46 | |

| | |
|---|---|
| PERIPHERAL | Likelihood = 9.34 (at 12) |

| | |
|---|---|
| | ALOM score: −10.46 (number of TMSs: 1) |
| MTOP: | Prediction of membrane topology (Hartmann et al.) |
| | Center position for calculation: 204 |
| | Charge difference: −1.0 C(−4.0)-N(−3.0) |
| | N >= C: N-terminal side will be inside |

>>> membrane topology: type 2 (cytoplasmic tail 1 to 197)

| MITDISC: | discrimination of mitochondrial targeting seq | | | |
|---|---|---|---|---|
| | R content: | 0 | Hyd Moment(75): | 2.09 |
| | Hyd Moment(95): | 1.02 | G content: | 0 |
| | D/E content: | 2 | S/T content: | 2 |

| | |
|---|---|
| | Score: −7.60 |
| Gavel: | prediction of cleavage sites for mitochondrial preseq |
| | cleavage site motif not found |

NUCDISC: discrimination of nuclear localization signals

| | |
|---|---|
| | pat4: RRRR (5) at 160 |
| | pat4: KHKK (3) at 491 |
| | pat4: KKRP (4) at 699 |
| | pat7: none |
| | bipartite: none |
| | content of basic residues: 12.9% |
| | NLS Score: 0.28 |
| KDEL: | ER retention motif in the C-terminus: none |

ER Membrane Retention Signals: none
SKL: peroxisomal targeting signal in the C-terminus: none
PTS2: 2nd peroxisomal targeting signal: none
VAC: possible vacuolar targeting motif: none
RNA-binding motif: none
Actinin-type actin-binding motif:

type 1: none
type 2: none

NMYR: N-myristoylation pattern: none
Prenylation motif: none
memYQRL: transport motif from cell surface to Golgi: none
Tyrosines in the tail: too long tail
Dileucine motif in the tail: none
checking 63 PROSITE DNA binding motifs: none
checking 71 PROSITE ribosomal protein motifs: none
checking 33 PROSITE prokaryotic DNA binding motifs: none

| | |
|---|---|
| NNCN: | Reinhardt's method for Cytoplasmic/Nuclear discrimination |
| | Prediction: nuclear |
| | Reliability: 89 |
| COIL: | Lupas's algorithm to detect coiled-coil regions |
| 263 S | 0.81 |
| 264 L | 0.87 |
| 265 Q | 0.96 |
| 266 N | 0.97 |
| 267 M | 0.98 |
| 268 G | 0.99 |
| 269 L | 1.00 |
| 270 L | 1.00 |
| 271 L | 1.00 |
| 272 D | 1.00 |
| 273 K | 1.00 |
| 274 L | 1.00 |
| 275 A | 1.00 |
| 276 K | 1.00 |
| 277 E | 1.00 |
| 278 N | 1.00 |
| 279 Q | 1.00 |
| 280 D | 1.00 |
| 281 I | 1.00 |
| 282 R | 1.00 |
| 283 L | 1.00 |
| 284 L | 1.00 |
| 285 Q | 1.00 |
| 286 A | 1.00 |
| 287 Q | 1.00 |
| 288 L | 1.00 |
| 289 Q | 1.00 |
| 290 A | 1.00 |
| 291 Q | 1.00 |
| 292 K | 1.00 |
| 293 E | 1.00 |
| 294 E | 1.00 |
| 295 L | 1.00 |
| 296 Q | 1.00 |
| 297 S | 1.00 |
| 298 L | 1.00 |
| 299 M | 1.00 |
| 300 H | 1.00 |
| 301 Q | 1.00 |
| 303 K | 0.71 |
| 304 G | 0.71 |
| 305 L | 0.87 |
| 306 E | 0.87 |
| 307 E | 0.87 |
| 308 E | 0.87 |
| 309 N | 0.87 |
| 310 A | 0.87 |
| 311 Q | 0.87 |
| 312 L | 0.87 |
| 313 R | 0.87 |
| 314 G | 0.87 |
| 315 A | 0.90 |
| 316 L | 0.94 |
| 317 Q | 0.94 |
| 318 Q | 0.94 |
| 319 G | 0.94 |
| 320 E | 0.94 |
| 321 A | 0.94 |
| 322 F | 0.94 |
| 323 Q | 0.94 |
| 324 R | 0.94 |
| 325 A | 0.94 |
| 326 L | 0.94 |
| 327 E | 0.94 |
| 328 S | 0.94 |
| 329 E | 0.94 |
| 330 L | 0.94 |
| 331 Q | 0.94 |
| 332 Q | 0.94 |
| 333 L | 0.94 |
| 334 R | 0.94 |
| 335 A | 0.94 |
| 336 R | 0.94 |
| 337 L | 0.94 |
| 338 Q | 0.94 |
| 339 G | 0.94 |
| 340 L | 0.94 |
| 341 E | 0.94 |
| 342 A | 0.94 |
| 343 D | 0.94 |
| 344 C | 0.79 |
| 376 E | 0.95 |
| 377 L | 1.00 |
| 378 S | 1.00 |
| 379 F | 1.00 |
| 380 L | 1.00 |
| 381 K | 1.00 |
| 382 Q | 1.00 |
| 383 K | 1.00 |
| 384 E | 1.00 |
| 385 Q | 1.00 |
| 386 L | 1.00 |
| 387 E | 1.00 |
| 388 A | 1.00 |
| 389 E | 1.00 |
| 390 A | 1.00 |
| 391 Q | 1.00 |
| 392 A | 1.00 |
| 393 L | 1.00 |
| 394 R | 1.00 |
| 395 Q | 1.00 |
| 396 E | 1.00 |
| 397 L | 1.00 |
| 398 E | 1.00 |
| 399 R | 1.00 |
| 400 Q | 1.00 |
| 401 R | 1.00 |
| 402 R | 1.00 |
| 403 L | 1.00 |
| 404 L | 1.00 |
| 405 G | 1.00 |
| 406 S | 1.00 |
| 407 V | 1.00 |
| 408 Q | 1.00 |
| 409 Q | 1.00 |
| 410 D | 1.00 |
| 411 L | 1.00 |
| 412 E | 1.00 |
| 413 R | 1.00 |
| 414 S | 0.99 |
| 415 L | 0.94 |
| 416 Q | 0.94 |
| 417 D | 0.92 |
| 418 A | 0.92 |
| 419 S | 0.78 |
| 420 R | 0.78 |
| 421 G | 0.54 |
| | total: 127 residues |

Final Results (k = 9/23):

```
39.1%: nuclear
26.1%: mitochondrial
  8.7%: cytoplasmic
  8.7%: Golgi
  4.3%: plasma membrane
  4.3%: vesicles of secretory system
  4.3%: extracellular, including cell wall
  4.3%: peroxisomal
```

>> prediction for CG52171-04 is nuc (k = 23)

[0443] A search of the NOV16a protein against the Geneseq database, a proprietary database that contains sequences published in patents and patent publication, yielded several homologous proteins shown in Table 16D.

TABLE 16D
Geneseq Results for NOV16a

| | | NOV16a | Identities/ | |
|---|---|---|---|---|
| | | Residues/ | Similarities for | |
| Geneseq | Protein/Organism/Length | Match | the Matched | Expect |
| Identifier | [Patent #, Date] | Residues | Region | Value |
| AAB93999 | Human protein sequence SEQ ID | 30 . . . 737 | 700/708 (98%) | 0.0 |
| | NO: 14107 - Homo sapiens, 702 aa. | 1 . . . 702 | 700/708 (98%) | |
| | [EP1074617-A2, 07-FEB-2001] | | | |
| ABG20800 | Novel human diagnostic protein | 7 . . . 700 | 624/697 (89%) | 0.0 |
| | #20791 - Homo sapiens, 669 aa. | 2 . . . 668 | 634/697 (90%) | |
| | [WO200175067-A2, 11-OCT-2001] | | | |
| AAB95336 | Human protein sequence SEQ ID | 1 . . . 566 | 564/566 (99%) | 0.0 |
| | NO: 17611 - Homo sapiens, 662 aa. | 1 . . . 566 | 566/566 (99%) | |
| | [EP1074617-A2, 07-FEB-2001] | | | |
| AAB62402 | Human MBSP6 polypeptide (clone | 197 . . . 737 | 533/541 (98%) | 0.0 |
| | 3207791.0.128) - Homo sapiens, 535 | 1 . . . 535 | 533/541 (98%) | |
| | aa. [WO200127277-A2, 19-APR-2001] | | | |
| AAB80449 | Gene #23 associated peptide #1 - | 17 . . . 397 | 375/381 (98%) | 0.0 |
| | Homo sapiens, 451 aa. | 8 . . . 388 | 377/381 (98%) | |
| | [WO200107459-A1, 01-FEB-2001] | | | |

[0444] In a BLAST search of public sequence databases, the NOV16a protein was found to have homology to the proteins shown in the BLASTP data in Table 16E.

TABLE 16E
Public BLASTP Results for NOV16a

| | | NOV16a | Identities/ | |
|---|---|---|---|---|
| Protein | | Residues/ | Similarities for | |
| Accession | | Match | the Matched | Expect |
| Number | Protein/Organism/Length | Residues | Portion | Value |
| Q9HD85 | Hematopoietic PBX-interacting | 1 . . . 737 | 730/737 (99%) | 0.0 |
| | protein - Homo sapiens (Human), | 1 . . . 731 | 730/737 (99%) | |
| | 731 aa. | | | |
| Q96AQ6 | Hematopoietic PBX-interacting | 1 . . . 737 | 730/737 (99%) | 0.0 |
| | protein - Homo sapiens (Human), | 1 . . . 731 | 730/737 (99%) | |
| | 731 aa. | | | |
| Q9HA02 | Hypothetical protein FLJ12435 - | 30 . . . 737 | 700/708 (98%) | 0.0 |
| | Homo sapiens (Human), 702 aa. | 1 . . . 702 | 700/708 (98%) | |
| Q9H8X6 | Hypothetical protein FLJ13157 - | 1 . . . 566 | 564/566 (99%) | 0.0 |
| | Homo sapiens (Human), 662 aa. | 1 . . . 566 | 566/566 (99%) | |
| CAC43890 | Sequence 11 from Patent | 197 . . . 737 | 533/541 (98%) | 0.0 |
| | WO0127277 - Homo sapiens | 1 . . . 535 | 533/541 (98%) | |
| | (Human), 535 aa. | | | |

[0445] PFam analysis predicts that the NOV16a protein contains the domains shown in the Table 16F.

TABLE 16F
Domain Analysis of NOV16a

| | | | |
|---|---|---|---|
| Pfam | NOV16a | Identities/ | Expect |
| Domain | Match Region | Similarities | Value |
| | | for the | |
| | | Matched Region | |

### Example 17.

[0446] The NOV17 clone was analyzed, and the nucleotide and encoded polypeptide sequences are shown in Table 17A.

TABLE 17A
NOV17 Sequence Analysis

| | | |
|---|---|---|
| NOV17a, CG52534-06 | SEQ ID NO: 457 | 1275 bp |
| DNA Sequence | ORF Start: ATG at 1 | ORF Stop: TGA at 1273 |

ATGGAGCGGCTTTGGGGTCTATTCCAGAGAGCGCAACAACTGTCCCCAAGATCCTCTCAGACCGTCTA
CCAGCGTGTGGAAGGCCCCCGGAAAGGGCACCTGGAGGAGGAAGAGGAAGACGGGGAGGAGGGGGCGG
AGACATTGGCCCACTTCTGCCCCATGGAGCTGAGGGGCCCTGAGCCCCTGGGCTCTAGACCCAGGCAG
CCAAACCTCATTCCCTGGGCGGCAGCAGGACGGAGGGCTGCCCCCTACCTGGTCCTGACGGCCCTGCT
GATCTTCACTGGGGCCTTCCTACTGGGCTACGTCGCCTTCCGAGGGTCCTGCCAGGCGTGCGGAGACT
CTGTGTTGGTGGTCAGTGAGGATGTCAACTATGAGCCTGACCTGGATTTCCACCAGGGCAGACTCTAC
TGGAGCGACCTCCAGGCCATGTTCCTGCAGTTCCTGGGGGAGGGGCGCCTGGAGGACACCATCAGGCA
AACCAGCCTTCGGGAACGGGTGGCAGGCTCGGCCGGGATGGCCGCTCTGACTCAGGACATTCGCGCGG
CGCTCTCCCGCCAGAAGCTGGACCACGTGTGGACCGACACGCACTACGTGGGGCTGCAATTCCCGGAT
CCGGCTCACCCCAACACCCTGCACTGGGTCGATGAGGCCGGGAAGGTCGGAGAGCAGCTGCCGCTGGA
GGACCCTGACGTCTACTGCCCCTACAGCGCCATCGGCAACGTCACGGGAGAGCTGGTGTACGCCCACT
ACGGGCGGCCCGAAGACCTGCAGGACCTGCGGGCCAGGGGCGTGGATCCAGTGGGCCGCCTGCTGCTG
GTGCGCGTGGGGGTGATCAGCTTCGCCCAGAAGGTGACCAATGCTCAGGACTTCGGGGCTCAAGGAGT
GCTCATATACCCAGAGCCAGCGGACTTCTCCCAGGACCCACCCAAGCCAAGCCTGTCCAGCCAGCAGG
CAGTGTATGGACATGTGCACCTGGGAACTGGAGACCCCTACACACCTGGCTTCCCTTCCTTCAATCAA
ACCCAGTTCCCTCCAGTTGCATCATCAGGCCTTCCCAGCATCCCAGCCCAGCCCATCAGTGCAGACAT
TGCCTCCCGCCTGCTGGACCACCTGCGGCTGCTGCGCTCCAACAGCTCCGGGACCCCCGGGGCCACCT
CCTCCACTGGCTTCCAGGAGAGCCGTTTCCGGCGTCAGCTAGCCCTGCTCACCTGGACGCTGCAAGGG
GCAGCCAATGCGCTTAGCGGGGATGTCTGGAACATTGATAACAACTTCTGA

| | | | |
|---|---|---|---|
| NOV17a, CG52534-06 | SEQ ID NO: 458 | 424aa | MW at 46603.7kD |
| Protein Sequence | | | |

MERLWGLFQRAQQLSPRSSQTVYQRVEGPRKGHLEEEEEDGEEGAETLAHFCPMELRGPEPLGSRPRQ
PNLIPWAAAGRRAAPYLVLTALLIFTGAFLLGYVAFRGSCQACGDSVLVVSEDVNYEPDLDFHQGRLY
WSDLQAMFLQFLGEGRLEDTIRQTSLRERVAGSAGMAALTQDIPAALSRQKLDHVWTDTHYVGLQFPD
PAHPNTLHWVDEAGKVGEQLPLEDPDVYCPYSAIGNVTGELVYAHYGRPEDLQDLRARGVDPVGRLLL
VRVGVISFAQKVTNAQDFGAQGVLIYPEPADFSQDPPKPSLSSQQAVYGHVHLGTGDPYTPGFPSFNQ
TQFPPVASSGLPSIPAQPISADIASRLLDHLRLLRSNSSGTPGATSSTGFQESRFRRQLALLTWTLQG
AANALSGDVWNIDNNF

| | | |
|---|---|---|
| NOV17b, CG52534-01 | SEQ ID NO: 459 | 2857 bp |
| DNA Sequence | ORF Start: ATG at 28 | ORF Stop: TGA at 1495 |

CTGCAGGCTTCAGGAGGGGACACAAGCATGGAGCGGCTTTGGGGTCTATTCCAGAGAGCGCAACAACT
GTCCCCAAGATCCTCTCAGACCGTCTACCAGCGTGTGGAAGGCCCCCGGAAAGGGCACCTGGAGGAGG
AAGAGGAAGACGGGGAGGAGGGGGCGGAGACATTGGCCCACTTCTGCCCCATGGAGCTGAGGGGCCCT
GAGCCCCTGGGCTCTAGACCCAGGCAGCCAAACCTCATTCCCTGGGCGGCAGCAGGACGGAGGGCTGC
CCCCTACCTGGTCCTGACGGCCCTGCTGATCTTCACTGGGGCCTTCCTACTGGGCTACGTCGCCTTCC
GAGGGTCCTGCCAGGCGTGCGGAGACTCTGTGTTGGTGGTCAGTGAGGATGTCAACTATGAGCCTGAC
CTGGATTTCCACCAGGGCAGACTCTACTGGAGCGACCTCCAGGCCATGTTCCTGCAGTTCCTGGGGGA
GGGGCGCCTGGAGGACACCATCAGGCAAACCAGCCTTCGGGAACGGGTGGCAGGCTCGGCCGGGATGG
CCGCTGCTGACTCAGGACATTCGCGCGGCCTCTCCCGCCAGAAGCTGGACCACGTGTGGACCGACACG
CACTACGTGGGGCTGCAATTCCCGGATCCGGCTCACCCCAACACCCTGCACTGGGTCGATGAGGCCGG
GAAGGTCGGAGAGCAGCTGCCGCTGGAGGACCCTGACGTCTACTGCCCCTACAGCGCCATCGGCAACG
TCACGGGAGAGCTGGTGTACGCCCACTACGGGCGGCCCGAAGACCTGCAGGACCTGCGGGCCAGGGGC
GTGGATCCAGTGGGCCGCCTGCTGCTGGTGCGCGTGGGGGTGATCAGCTTCGCCCAGAAGGTGACCAA
TGCTCAGGACTTCGGGGCTCAAGGAGTGCTCATATACCCAGAGCCAGCGGACTTCTCCCAGGACCCAC
CCAAGCCAAGCCTGTCCAGCCAGCAGGCAGTGTATGGACATGTGCACCTGGGAACTGGAGACCCCTAC
ACACCTGGCTTCCCTTCCTTCAATCAAACCCAGTTCCCTCCAGTTGCATCATCAGGCCTTCCCAGCAT
CCCACGCCGAGCCCTATGGAGTCTCAAAAAAAAAAAGGGCCCCGGGCCACGACTGCGGCTAGTGGTCA
ACAATCACAGGACCTCCACCCCCATCAACAACATCTTCGGCTGCATCGAAGGCCGCTCAGAGCCAGAT
CACTACGTTGTCATCGGGGCCCAGAGGGATGCATGGGGCCCAGGAGCAGCTAAATCCGCTGTGGGGAC
GGCTATACTCCTGGAGCTGGTGCGGACCTTTTCCTCCATGGTGAGCAACGGCTTCCGGCCCCGCAGAA
GTCTCCTCTTCATCAGCTGGGACGGTGGTGACTTTGGAAGCGTGGGCTCCACGGAGTGGCNTAGAGGG
CTACCTCAGCGTGCTGCACCTCAAAGCCGTAGTGTACGTGAGCCTGGACAACGCAGTGAAGGGGGATG
ACAAGTTTCATGCCAAGACCAACCCCCTTCTGACAAGTCTCATTGAGAAGTGTCCTGAAGCAGATGGA
TTCTCCCAACCACAGTGGGCAGACTCTCTATGAACAGGTGGGGTTCACCAATTCCCAGCTGGGATTGC
TGAGGTGATCCGGCCCCTACCCATGGGACAGCAGTGCCTATTTCCTTCACGGGCCTTTGTTGGGGAGT
CCCTTGCCCTTCGAGTTCTTCCTTTTATTGGAGGGACGGACCAGGCCTTACCCATTTCCTTGCACAAA
AAGGGAGGGACACTTATTGGAGGAACCTGCAGTAAGGTGCTGCAAGGCCGCCTGCCCGCCGTGGCCCA
GGCCGTGGCCCAGCTCGCAGGGCAGCTCCTCATCCGGCTCAGCCACGATCGCCTGCTGCCCCTCGACT
TCGGCCGCTACGGGGACGTCGTCCTCAGGCACATCGGGAACCTCAACGAGTTCTCTGGGGACCTCAAG
CCCGCGGGCTGACCCTGCAGTGGGTGTACTCGGCGCGGGGGGACTACATCCGGGCGGCGGAAAAGCTG
CGGCAGGTAGATCTACTTGCCGCAGCTCGGAGGAGAGAGACGAGCGACTGACACGCATGTACAACGTC
CGCATAATGCGGGTGGAGTTCTACTTCCTTTCCCAGTACGTGTCGCCAGCCGACTCCCCGTTCCGCCA
CATCTTCATGGGCCGTGGAGACCACACGCTGGGCGCCCTGCTGGACCACCTGCGGCTGCTGCACTCCA
ACAGCTCCGGGACCCCCGGGGCCACCTCCTCCACTGGCTTCCAGGGAGAGCCGTTTCCGGGTCGTCAG
CTAGCCCTGCTCACCTGGACGCTGCAAGGGGCAGCCAATGCGCTTAGCGGGGATGTCTGGAACATTGA
TAACAACTTCTGAGGCCCTGGGGATCCTCAAATCCCCGTCCCCCAGTCAAGAGCTCCTCTGCTCCTCG
CTTGAATGATTCAGGGTCAGGGAGGTGGCTCAGAGTCCACCTCTCATTGCTGATCAATTTCTCATTAC
CCCTACACATCTCTCCACGGAGCCCAGACCCCAGCACAGATATCCACACACCCCAGCCCTGCAGTGTA
GCTGACCCTAATGTGACGGTCATACTGTCGGTTAATCAGAGAGTAGCATCCCTTCAATCACAGCCCCT
TCCCCTTTCTGGGGTCCTCCATACCTAGAGACCACTCTGGGAGGTTTGCTAGGCCCTGGGACCTGGCC
AGCTCTGTTAGTGGGAGAGATCGCTGGCACCATAGCCTTATGGCCAACAGGTGGTCTGTGGTGAAAGG
GGCGTGGAGTTTCAATATCAATAAACCACCTGATATCAATAAAAAAAAAAAAAAAAAAAAAAAAAAAA
A

| | | | |
|---|---|---|---|
| NOV17b, CG52534-01 | SEQ ID NO: 460 | 489 aa | MW at 53555.7kD |
| Protein Sequence | | | |

MERLWGLFQRAQQLSPRSSQTVYQRVEGPRKGHLEEEEEDGEEGAETLAHFCPMELRGPEPLGSRPRQ
PNLIPWAAAGRRAAPYLVLTALLIFTGAFLLGYVAFRGSCQACGDSVLVVSEDVNYEPDLDFHQGRLY
WSDLQAMFLQFLGEGRLEDTIRQTSLRERVAGSAGMAAADSGHSRGLSRQKLDHVWTDTHYVGLQFPD
PAHPNTLHWVDEAGKVGEQLPLEDPDVYCPYSAIGNVTGELVYAHYGRPEDLQDLRARGVDPVGRLLL
VRVGVISFAQKVTNAQDFGAQGVLIYPEPADFSQDPPKPSLSSQQAVYGHVHLGTGDPYTPGFPSFNQ
TQFPPVASSGLPSIPRRALWSLKKKKGPGPRLRLVVNNHRTSTPINNIFGCIEGRSEPDHYVVIGAQR
DAWGPGAAKSAVGTAILLELVRTFSSMVSNGFRPRRSLLFISWDGGDFGSVGSTEWXRGLPQRAAPQS
RSVREPGQRSEGG

| | | |
|---|---|---|
| NOV17c, CG52534-02 | SEQ ID NO: 461 | 865 bp |
| DNA Sequence | ORF Start: ATG at 27 | ORF Stop: TGA at 837 |

TGCGCGCGGATTCTGCTTCTCAGAAGATGCACTATTATAGATACTCTAACGCCAAGGTCAGCTGCTGG
TACAAGTACCTCCTTTTCAGCTACAACATCATCTTCTGGTTGGCTGGAGTTGTCTTCCTTGGAGTCGG
GCTGTGGGCATGGAGCGAAAAGGGTGTGCTGTCCGACCTCACCAAAGTGACCCGGATGCATGGAATCG
ACCCTGTGGTGCTGGTCCTGATGGTGGGCGTGGTGATGTTCACCCTGGGGTTCGCCGGCTGCGTGGGG
GCTCTGCGGGAGAATATCTGCTTGCTCAACTTTTTCTGTGGCACCATCGTGCTCATCTTCTTCCTGGA
GCTGGCTGTGGCCGTGCTGGCCTTCCTGTTCCAGGACTGGGTGAGGGACCGGTTCCGGGAGTTCTTCG
AGAGCAACATCAAGTCCTACCGGGACGATATCGATCTGCAAAACCTCATCGACTCCCTTCAGAAAGCT
AACCAGTGCTGTGGCGCATATGGCCCTGAAGACTGGGACCTCAACGTCTACTTCAATTGCAGCGGTGC
CAGCTACAGCCGAGAGAAGTGCGGGGTCCCCTTCTCCTGCTGCGTGCCAGATCCTGTGCAAAAAGTTG
TGAACACACAGTGTGGATATGATGTCAGGATTCAGCTGAAGAGCAAGTGGGATGAGTCCATCTTCACG
AAAGGCTGCATCCAGGCGCTGGAAAGCTGGCTCCCGCGGAACATTTACATTGTGGCTGGCGTCTTCAT
CGCCATCTCGCTGTTGCAGATATTTGGCATCTTCCTGGCAAGGACGCTGATCTCAGACATCGAGGCAG
TGAAGGCCGGCCATCACTTCTGAGGAGCAGAGTTGAGGGAGCCGAGCTA

| | | | |
|---|---|---|---|
| NOV17c, CG52534-02 | SEQ ID NO: 462 | 270 aa | MW at 30718.5kD |
| Protein Sequence | | | |

MHYYRYSNAKVSCWYKYLLFSYNIIFWLAGVVFLGVGLWAWSEKGVLSDLTKVTRMHGIDPVVLVLMV
GVVMFTLGFAGCVGALRENICLLNFFCGTIVLIFFLELAVAVLAFLFQDWVRDRFREFFESNIKSYRD
DIDLQNLIDSLQKANQCCGAYGPEDWDLNVYFNCSGASYSREKCGVPFSCCVPDPVQKVVNTQCGYDV
RIQLKSKWDESIFTKGCIQALESWLPRNIYIVAGVFIAISLLQIFGIFLARTLISDIEAVKAGHHF

| | | |
|---|---|---|
| NOV17d, CG52534-03 | SEQ ID NO: 463 | 863 bp |
| DNA Sequence | ORF Start: ATG at 26 | ORF Stop: TGA at 836 |

GCGCGCGGATTCTGCTTCTCAGAAGATGCACTATTATAGATACTCTAACGCCAAGGTCAGCTGCTGGT
ACAAGTACCTCCTTTTCAGCTACAACATCATCTTCTGGTTGGCTGGAGTTGTCTTCCTTGGAGTCGGG
CTGTGGGCATGGAGCGAAAAGGGTGTGCTGTCCGACCTCACCAAAGTGACCCGGATGCATGGAATCGA
CCCTGTGGTGCTGGTCCTGATGGTGGGCGTGGTGATGTTCACCCTGGGGTTCGCCGGCTGCGTGGGGG
CTCTGCGGGAGAATATCTGCTTGCTCAACTTTTTCTGTGGCACCATCGTGCTCATCTTCTTCCTGGAG
CTGGCTGTGGCCGTGCTGGCCTTCCTGTTCCAGGACTGGGTGAGGGACCGGTTCCGGGAGTTCTTCGA
GAGCAACATCAAGTCCTACCGGGACGATATCGATCTGCAAAACCTCATCGACTCCCTTCAGAAAGCTA
ACCAGTGCTGTGGCGCATATGGCCCTGAAGACTGGGACCTCAACGTCTACTTCAATTGCAGCGGTGCC
AGCTACAGCCGAGAGAAGTGCGGGGTCCCCTTCTCCTGCTGCGTGCCAGATCCTGCGCAAAAAGTTGT
GAACACACAGTGTGGATATGATGTCAGGATTCAGCTGAAGAGCAAGTGGGATGAGTCCATCTTCACGA
AAGGCTGCATCCAGGCGCTGGAAAGCTGGCTCCCGCGGAACATTTACATTGTGGCTGGCGTCTTCATC
GCCATCTCGCTGTTGCAGATATTTGGCATCTTCCTGGCAAGGACGCTGATCTCAGACATCGAGGCAGT
GAAGGCCGGCCATCACTTCTGAGGAGCAGAGTTGAGGGAGCCGAGCT

| | | | |
|---|---|---|---|
| NOV17d, CG52534-03 | SEQ ID NO: 464 | 270 aa | MW at 30690.5kD |
| Protein Sequence | | | |

MHYYRYSNAKVSCWYKYLLFSYNIIFWLAGVVFLGVGLWAWSEKGVLSDLTKVTRMHGIDPVVLVLMV
GVVMFTLGFAGCVGALRENICLLNFFCGTIVLIFFLELAVAVLAFLFQDWVRDRFREFFESNIKSYRD
DIDLQNLIDSLQKANQCCGAYGPEDWDLNVYFNCSGASYSREKCGVPFSCCVPDPAQKVVNTQCGYDV
RIQLKSKWDESIFTKGCIQALESWLPRNIYIVAGVFIAISLLQIFGIFLARTLISDIEAVKAGHHF

| | | |
|---|---|---|
| NOV17e, CG52534-04 | SEQ ID NO: 465 | 2406 bp |
| DNA Sequence | ORF Start: ATG at 1 | ORF Stop: TGA at 2404 |

ATGGAGCGGCTTTGGGGTCTATTCCAGAGAGCGCAACAACTGTCCCCAAGATCCTCTCAGACCGTCTA
CCAGCGTGTGGAAGGCCCCCGGAAAGGGCACCTGGAGGAGGAAGAGGAAGACGGGGAGGAGGGGGCGG
AGACATTGGCCCACTTCTGCCCCATGGAGCTGAGGGGCCCTGAGCCCCTGGGCTCTAGACCCAGGCAG
CCAAACCTCATTCCCTGGGCGGCAGCAGGACGGAGGGCTGCCCCCTACCTGGTCCTGACGGCCCTGCT
GATCTTCACTGGGGCCTTCCTACTGGGCTACGTCGCCTTCCGAGGGTCCTGCCAGGCGTGCGGAGACT
CTGTGTTGGTGGTCAGTGAGGATGTCAACTATGAGCCTGACCTGGATTTCCACCAGGGCAGACTCTAC
TGGAGCGACCTCCAGGCCATGTTCCTGCAGTTCCTGGGGGAGGGGCGCCTGGAGGACACCATCAGGCA
AACCAGCCTTCGGGAACGGGTGGCAGGCTCGGCCGGGATGGCCGCTCTGACTCAGGACATTCGCGCGG
CGCTCTCCCGCCAGAAGCTGGACCACGTGTGGACCGACACGCACTACGTGGGGCTGCAATTCCCGGAT
CCGGCTCACCCCAACACCCTGCACTGGGTCGATGAGGCCGGGAAGGTCGGAGAGCAGCTGCCGCTGGA
GGACCCTGACGTCTACTGCCCCTACAGCGCCATCGGCAACGTCACGGGAGAGCTGGTGTACGCCCACT
ACGGGCGGCCCGAAGACCTGCAGGACCTGCGGGCCAGGGGCGTGGATCCAGTGGGCCGCCTGCTGCTG
GTGCGCGTGGGGGTGATCAGCTTCGCCCAGAAGGTGACCAATGCTCAGGACTTCGGGGCTCAAGGAGT
GCTCATATACCCAGAGCCAGCGGACTTCTCCCAGGACCCACCCAAGCCAAGCCTGTCCAGCCAGCAGG
CAGTGTATGGACATGTGCACCTGGGAACTGGAGACCCCTACACACCTGGCTTCCCTTCCTTCAATCAA
ACCCAGTTCCCTCCAGTTGCATCATCAGGCCTTCCCAGCATCCCAGCCCAGCCCATCAGTGCAGACAT
TGCCTCCCGCCTGCTGAGGAAGCTCAAAGGCCCTGTGGCCCCCCAAGAATGGCAGGGGAGCCTCCTAG
GCTCCCCTTATCACCTGGGCCCCGGGCCACGACTGCGGCTAGTGGTCAACAATCACAGGACCTCCACC
CCCATCAACAACATCTTCGGCTGCATCGAAGGCCGCTCAGAGCCAGATCACTACGTTGTCATCGGGGC
CCAGAGGGATGCATGGGGCCCAGGAGCAGCTAAATCCGCTGTGGGGACGGCTATACTCCTGGAGCTGG
TGCGGACCTTTTCCTCCATGGTGAGCAACGGCTTCCGGCCCCGCAGAAGTCTCCTCTTCATCAGCTGG
GACGGTGGTGACTTTGGAAGCGTGGGCTCCACGGAGTGGCTAGAAGGCTACCTCAGCGTGCTGCACCT
CAAAGCCGTAGTGTACGTGAGCCTGGACAACGCAGTGCTGGGGGATGACAAGTTTCATGCCAAGACCA
GCCCCCTTCTGACAAGTCTCATTGAGAGTGTCCTGAAGCAGGTGGATTCTCCCAACCACAGTGGGCAG
ACTCTCTATGAACAGGTGGTGTTCACCAATCCCAGCTGGGATGCTGAGGTGATCCGGCCCCTACCCAT
GGACAGCAGTGCCTATTCCTTCACGGCCTTTGTGGGAGTCCCTGCCGTCGAGTTCTCCTTTATGGAGG
ACGACCAGGCCTACCCATTCCTGCACACAAAGGAGGACACTTATGAGAACCTGCATAAGGTGCTGCAA
GGCCGCCTGCCCGCCGTGGCCCAGGCCGTGGCCCAGCTCGCAGGGCAGCTCCTCATCCGGCTCAGCCA
CGATCGCCTGCTGCCCCTCGACTTCGGCCGCTACGGGGACGTCGTCCTCAGGCACATCGGGAACCTCA
ACGAGTTCTCTGGGGACCTCAAGGCCCGCGGGCTGACCCTGCAGTGGGTGTACTCGGCGCGGGGGGAC
TACATCCGGGCGGCGGAAAAGCTGCGGCAGGAGATCTACAGCTCGGAGGAGAGAGACGAGCGACTGAC
ACGCATGTACAACGTGCGCATAATGCGGGTGGAGTTCTACTTCCTTTCCCAGTACGTGTCGCCAGCCG
ACTCCCCGTTCCGCCACATCTTCATGGGCCGTGGAGACCACACGCTGGGCGCCCTGCTGGACCACCTG
CGGCTGCTGCGCTCCAACAGCTCCGGGACCCCCGGGGCCACCTCCTCCACTGGCTTCCAGGAGAGCCG
TTTCCGGCGTCAGCTAGCCCTGCTCACCTGGACGCTGCAAGGGGCAGCCAATGCGCTTAGCGGGGATG
TCTGGAACATTGATAACAACTTCTGA

| | | | |
|---|---|---|---|
| NOV17e, CG52534-04 | SEQ ID NO: 466 | 801 aa | MW at 88754.1kD |
| Protein Sequence | | | |

MERLWGLFQRAQQLSPRSSQTVYQRVEGPRKGHLEEEEEDGEEGAETLAHFCPMELRGPEPLGSRPRQ
PNLIPWAAAGRRAAPYLVLTALLIFTGAFLLGYVAFRGSCQACGDSVLVVSEDVNYEPDLDFHQGRLY
WSDLQAMFLQFLGEGRLEDTIRQTSLRERVAGSAGMAALTQDIPAALSRQKLDHVWTDTHYVGLQFPD
PAHPNTLHWVDEAGKVGEQLPLEDPDVYCPYSAIGNVTGELVYAHYGRPEDLQDLRARGVDPVGRLLL
VRVGVISFAQKVTNAQDFGAQGVLIYPEPADFSQDPPKPSLSSQQAVYGHVHLGTGDPYTPGFPSFNQ
TQFPPVASSGLPSIPAQPISADIASRLLRKLKGPVAPQEWQGSLLGSPYHLGPGPRLRLVVNNHRTST
PINNIFGCIEGRSEPDHYVVIGAQRDAWGPGAAKSAVGTAILLELVRTFSSMVSNGFRPRRSLLFISW
DGGDFGSVGSTEWLEGYLSVLHLKAVVYVSLDNAVLGDDKFHAKTSPLLTSLIESVLKQVDSPNHSGQ
TLYEQVVFTNPSWDAEVIRPLPMDSSAYSFTAFVGVPAVEFSFMEDDQAYPFLHTKEDTYENLHKVLQ
GRLPAVAQAVAQLAGQLLIRLSHDRLLPLDFGRYGDVVLRHIGNLNEFSGDLKARGLTLQWVYSARGD
YIRAAEKLRQEIYSSEERDERLTRMYNVRIMRVEFYFLSQYVSPADSPFRHIFMGRGDHTLGALLDHL
RLLRSNSSGTPGATSSTGFQESRFRRQLALLTWTLQGAANALSGDVWNIDNNF

| | | |
|---|---|---|
| NOV17f, CG52534-05 | SEQ ID NO: 467 | 2531 bp |
| DNA Sequence | ORF Start: ATG at 65 | ORF Stop: TGA at 2468 |

CTGCAGGCTTCAGGAGGGGTACTCTGCCTTCTGGACACTGCAGGCTTCAGGAGGGGACACAAGCATGG
AGCGGCTTTGGGGTCTATTCCAGAGAGCGCAACAACTGTCCCCAAGATCCTCTCAGACCGTCTACCAG
CGTGTGGAAGGCCCCCGGAAAGGGCACCTGGAGGAGGAAGAGGAAGACGGGGAGGAGGGGGCGGAGAC
ATTGGCCCACTTCTGCCCCATGGAGCTGAGGGGCCCTGAGCCCCTGGGCTCTAGACCCAGGCAGCCAA
ACCTCATTCCCTGGGCGGCAGCAGGACGGAGGGCTGCCCCCTACCTGGTCCTGACGGCCCTGCTGATC
TTCACTGGGGCCTTCCTACTGGGCTACGTCGCCTTCCGAGGGTCCTGCCAGGCGTGCGGAGACTCTGT
GTTGGTGGTCAGTGAGGATGTCAACTATGAGCCTGACCTGGATTTCCACCAGGGCAGACTCTACTGGA
GCGACCTCCAGGCCATGTTCCTGCAGTTCCTGGGGGAGGGGCGCCTGGAGGACACCATCAGGCAAACC
AGCCTTCGGGAACGGGTGGCAGGCTCGGCCGGGATGGCCGCTCTGACTCAGGACATTCGCGCGGCGCT
CTCCTGCCAGAAGCTGGACCACGTGTGGACCGACACGCACTACGTGGGGCTGCAATTCCCGGATCCGG
CTCACCCCAACACCCTGCACTGGGTCGATGAGGCCGGGAAGGTCGGAGAGCAGCTGCCGCTGGAGGAC
CCTGACGTCTACTGCCCCTACAGCGCCATCGGCAACGTCACGGGAGAGCTGGTGTACGCCCACTACGG
GCGGCCCGAAGACTTGCAGGACCTGCGGGCCAGGGGCGTGGATCCAGTGGGCCGCCTGCTGCTGGTGC
GCGTGGGGGTGATCAGCTTCGCCCAGAAGGTGACCAATGCTCAGGACTTCGGGGCTCAAGGAGTGCTC
ATATACCCAGAGCCAGCGGACTTCTCCCAGGACCCACCCAAGCCAAGCCTGTCCAGCCAGCAGGCAGT
GTATGGACATGTGCACCTGGGAACTGGGGACCCCTACACACCTGGCTTCCCTTCCTTCAATCAAACCC
AGTTCCCTCCAGTTGCATCATCAGGCCTTCCCAGCATCCCAGCCCAGCCCATCAGTGCAGACATTGCC
TCCCGCCTGCTGAGGAAGCTCAAAGGCCCTGTGGCCCCCCAAGAATGGCAGGGGAGCCTCCTAGGCTC
CCCTTATCACCTGGGCCCCGGGCCACGACTGCGGCTAGTGGTCAACAATCACAGGACCTCCACCCCCA
TCAACAACATCTTCGGCTGCATCGAAGGCCGCTCAGAGCCAGATCACTACGTTGTCATCGGGGCCCAG
AGGGATGCATGGGGCCCAGGAGCAGCTAAATCCGCTGTGGGGACGGCTATACTCCTGGAGCTGGTGCG
GACCTTTTCCTCCATGGTGAGCAACGGCTTCCGGCCCCGCAGAAGTCTCCTCTTCATCAGCTGGGACG
GTGGTGACTTTGGAAGCGTGGGCTCCACGGAGTGGCTAGAGGGCTACCTCAGCGTGCTGCACCTCAAA
GCCGTAGTGTACGTGAGCCTGGACAACGCAGTGCTGGGGGATGACAAGTTTCATGCCAAGACCAGCCC
CCTTCTGACAAGTCTCATTGAGAGTGTCCTGAAGCAGGTGGATTCTCCCAACCACAGTGGGCAGACTC
TCTATGAACAGGTGGTGTTCACCAATCCCAGCTGGGATGCTGAGGTGATCCGGCCCCTACCCATGGAC
AGCAGTGCCTATTCCTTCACGGCCTTTGTGGGAGTCCCTGCCGTCGAGTTCTCCTTTATGGAGGACGA
CCAGGCCTACCCATTCCTGCACACAAAGGAGGACACTTATGAGAACCTGCATAAGGTGCTGCAAGGCC
GCCTGCCCGCTGTGGCCCAGGCCGTGGCCCAGCCCGCAGGGCAGCTCCTCATCCGGCTCAGCCACGAT
CGCCTGCTGCCCCTCGACTTCGGCCGCTACGGGGACGTCGTCCTCAGGCACATCGGGAACCTCAACGA
GTTCTCTGGGGACCTCAAGGCCCGCGGGCTGACCCTGCAGTGGGTGTACTCGGCGCGGGGGGACTACA
TCCGGGCGGCGGAAAAGCTGCGGCAGGAGATCTACAGCTCGGAGGAGAGAGACGAGCGACTGACACGC
ATGTACAACGTGCGCATAATGCGGGTGGAGTTCTACTTCCTTTCCCAGTACGTGTCGCCAGCCGACTC
CCCGTTCCGCCACATCTTCATGGGCCGTGGAGACCACACGCTGGGCGCCCTGCTGGACCACCTGCGGC
TGCTGCGCTCCAACAGCTCCGGGACCCCCGGGGCCACCTCCTCCACTGGCTTCCAGGAGAGCCGTTTC
CGGCGTCAGCTAGCCCTGCTCACCTGGACGCTGCAAGGGGCAGCCAATGCGCTTAGCGGGGATGTCTG
GAACATTGATAACAACTTCTGAGGCCCTGGGGATCCTCACATCCCCGTCCCCCAGTCAAGAGCTCCTC
TGCACCTCGACTTGA

| | | | |
|---|---|---|---|
| NOV17f, CG52534-05 | SEQ ID NO: 468 | 801 aa | MW at 88685.0kD |
| Protein Sequence | | | |

MERLWGLFQRAQQLSPRSSQTVYQRVEGPRKGHLEEEEEDGEEGAETLAHFCPMELRGPEPLGSRPRQ
PNLIPWAAAGRRAAPYLVLTALLIFTGAFLLGYVAFRGSCQACGDSVLVVSEDVNYEPDLDFHQGRLY
WSDLQAMFLQFLGEGRLEDTIRQTSLRERVAGSAGMAALTQDIRAALSCQKLDHVWTDTHYVGLQFPD
PAHPNTLHWVDEAGKVGEQLPLEDPDVYCPYSAIGNVTGELVYAHYGRPEDLQDLRARGVDPVGRLLL
VRVGVISFAQKVTNAQDFGAQGVLIYPEPADFSQDPPKPSLSSQQAVYGHVHLGTGDPYTPGFPSFNQ
TQFPPVASSGLPSIPAQPISADIASRLLRKLKGPVAPQEWQGSLLGSPYHLGPGPRLRLVVNNHRTST
PINNIFGCIEGRSEPDHYVVIGAQRDAWGPGAAKSAVGTAILLELVRTFSSMVSNGFRPRRSLLFISW
DGGDFGSVGSTEWLEGYLSVLHLKAVVYVSLDNAVLGDDKFHAKTSPLLTSLIESVLKQVDSPNHSGQ
TLYEQVVFTNPSWDAEVIRPLPMDSSAYSFTAFVGVPAVEFSFMEDDQAYPFLHTKEDTYENLHKVLQ
GRLPAVAQAVAQPAGQLLIRLSHDRLLPLDFGRYGDVVLRHIGNLNEFSGDLKARGLTLQWVYSARGD
YIRAAEKLRQEIYSSEERDEPLTRMYNVRIMRVEFYFLSQYVSPADSPFRHIFMGRGDHTLGALLDHL
RLLRSNSSGTPGATSSTGFQESRFRRQLALLTWTLQGAANALSGDVWNIDNNF

[0447] A ClustalW comparison of the above protein sequences yields the following sequence alignment shown in Table 17B.

TABLE 17B
Comparison of the NOV17 protein sequences.

| | |
|---|---|
| NOV17a | MERLWGLFQRAQQLSPRSSQTVYQRVEGPRKGHLEEEEEDGEEGAETLAHFCPMELRGPE |
| NOV17b | MERLWGLFQRAQQLSPRSSQTVYQRVEGPRKGHLEEEEEDGEEGAETLAHFCPMELRGPE |
| NOV17c | --------MHYYRYSNAKVSCWYKYLLFSYNIIFWLA---G-------VVFLGVGLWAWS |
| NOV17d | --------MHYYRYSNAKVSCWYKYLLFSYNIIFWLA---G-------VVFLGVGLWAWS |
| NOV17e | MERLWGLFQRAQQLSPRSSQTVYQRVEGPRKGHLEEEEEDGEEGAETLAHFCPMELRGPE |
| NOV17f | MERLWGLFQRAQQLSPRSSQTVYQRVEGPRKGHLEEEEEDGEEGAETLAHFCPMELRGPE |
| NOV17a | PLGSRPRQPNLIPWAAAGRRAAPYLVLTALLIFTGAFLLGYVAFRG-SCQA---CGDSVL |
| NOV17b | PLGSRPRQPNLIPWAAAGRRAAPYLVLTALLIFTGAFLLGYVAFRG-SCQA---CGDSVL |
| NOV17c | EKGVLSDLTKVT--RMHGIDPVVLVLMVGVVMFTLGFAGCVGALRENICLLNFFCGTIVL |
| NOV17d | EKGVLSDLTKVT--RMHGIDPVVLVLMVGVVMFTLGFAGCVGALRENICLLNFFCGTIVL |
| NOV17e | PLGSRPRQPNLIPWAAAGRRAAPYLVLTALLIFTGAFLLGYVAFRG-SCQA---CGDSVL |
| NOV17f | PLGSRPRQPNLIPWAAAGRRAAPYLVLTALLIFTGAFLLGYVAFRG-SCQA---CGDSVL |
| NOV17a | VVSEDVNYEPDLDFHQGRLYWSDLQAMFLQFLGEGRLEDTIRQTSLRERVAGSAGMAALT |
| NOV17b | VVSEDVNYEPDLDFHQGRLYWSDLQAMFLQFLGEGRLEDTIRQTSLRERVAGSAGMAAAD |
| NOV17c | IFFLELAVA-VLAFLF--QDW--VRDRFREFF-----ESNIK--SYRDDIDLQNLIDSLQ |
| NOV17d | IFFLELAVA-VLAFLF--QDW--VRDRFREFF-----ESNIK--SYRDDIDLQNLIDSLQ |
| NOV17e | VVSEDVNYEPDLDFHQGRLYWSDLQAMFLQFLGEGRLEDTIRQTSLRERVAGSAGMAALT |
| NOV17f | VVSEDVNYEPDLDFHQGRLYWSDLQAMFLQFLGEGRLEDTIRQTSLRERVAGSAGMAALT |
| NOV17a | QDIRAALSRQKLDHVWTDTHYVGLQFPDPAHPNTLHWVDEAGKVGEQLPLEDPDVYCPYS |
| NOV17b | SGHSRGLSRQKLDHVWTDTHYVGLQFPDPAHPNTLHWVDEAGKVGEQLPLEDPDVYCPYS |
| NOV17c | KANQCCGAYGPED--WDLNVYFNCSGASYSREKCGVPFSCCVPDPVQKVV---NTQCGYD |
| NOV17d | KANQCCGAYGPED--WDLNVYFNCSGASYSREKCGVPFSCCVPDPAQKVV---NTQCGYD |
| NOV17e | QDIRAALSRQKLDHVWTDTHYVGLQFPDPAHPNTLHWVDEAGKVGEQLPLEDPDVYCPYS |
| NOV17f | QDIRAALSCQKLDHVWTDTHYVGLQFPDPAHPNTLHWVDEAGKVGEQLPLEDPDVYCPYS |
| NOV17a | AIGNVTGELVYAHYGRPEDLQDLRARGVDPVGRLLLVRVGVISFAQKVTNAQDFGAQGVL |
| NOV17b | AIGNVTGELVYAHYGRPEDLQDLRARGVDPVGRLLLVRVGVISFAQKVTNAQDFGAQGVL |
| NOV17c | VRIQLKSKWDESIFTKGC-IQALESW--LP--RNIYIVAGV--FIA-ISLLQIFG----- |
| NOV17d | VRIQLKSKWDESIFTKGC-IQALESW--LP--RNIYIVAGV--FIA-ISLLQIFG----- |
| NOV17e | AIGNVTGELVYAHYGRPEDLQDLRARGVDPVGRLLLVRVGVISFAQKVTNAQDFGAQGVL |
| NOV17f | AIGNVTGELVYAHYGRPEDLQDLRARGVDPVGRLLLVRVGVISFAQKVTNAQDFGAQGVL |
| NOV17a | IYPEPADFSQDPPKPSLSSQQAVYGHVHLGTGDPYTPGFPSFNQTQFPPVASSGLPSIPA |
| NOV17b | IYPEPADFSQDPPKPSLSSQQAVYGHVHLGTGDPYTPGFPSFNQTQFPPVASSGLPSIPR |
| NOV17c | IFLARTLIS-D--IEAVK--A---GH-HF------------------------------- |
| NOV17d | IFLARTLIS-D--IEAVK--A---GH-HF------------------------------- |
| NOV17e | IYPEPADFSQDPPKPSLSSQQAVYGHVHLGTGDPYTPGFPSFNQTQFPPVASSGLPSIPA |
| NOV17f | IYPEPADFSQDPPKPSLSSQQAVYGHVHLGTGDPYTPGFPSFNQTQFPPVASSGLPSIPA |
| NOV17a | QPISADIASRLLDHLRLLRSNSSGTPGATSSTGFQESRFRRQLALLTWTLQGAANALSGD |
| NOV17b | R------ALWSLKKKKGP---------------G----PRLRLVVNNHRTSTPINNIFGC |
| NOV17c | ------------------------------------------------------------ |
| NOV17d | ------------------------------------------------------------ |
| NOV17e | QPISADIASRLLRKLKGPVAPQEWQGSLLGSPYHLGPGPRLRLVVNNHRTSTPINNIFGC |
| NOV17f | QPISADIASRLLRKLKGPVAPQEWQGSLLGSPYHLGPGPRLRLVVNNHRTSTPINNIFGC |
| NOV17a | VWNIDNNF---------------------------------------------------- |
| NOV17b | IEGRSEPDHYVVIGAQRDAWGPGAAKSAVGTAILLELVRTFSSMVSNGFRPRRSLLFISW |
| NOV17c | ------------------------------------------------------------ |
| NOV17d | ------------------------------------------------------------ |
| NOV17e | IEGRSEPDHYVVIGAQRDAWGPGAAXSAVGTAILLELVRTFSSMVSNGFRPRRSLLFISW |
| NOV17f | IEGRSEPDHYVVIGAQRDAWGPGAAKSAVGTAILLELVRTFSSMVSNGFRPRRSLLFISW |
| NOV17a | ------------------------------------------------------------ |
| NOV17b | DGGDFGSVGSTEWXRGLPQRAAPQSRSVREPGQRSEGG---------------------- |
| NOV17c | ------------------------------------------------------------ |
| NOV17d | ------------------------------------------------------------ |
| NOV17e | DGGDFGSVGSTEWLEGYLSVLHLKAVVYVSLDNAVLGDDKFHAKTSPLLTSLIESVLKQV |
| NOV17f | DGGDFGSVGSTEWLEGYLSVLHLKAVVYVSLDNAVLGDDKFHAKTSPLLTSLIESVLKQV |
| NOV17a | ------------------------------------------------------------ |
| NOV17b | ------------------------------------------------------------ |
| NOV17c | ------------------------------------------------------------ |
| NOV17d | ------------------------------------------------------------ |
| NOV17e | DSPNHSGQTLYEQVVFTNPSWDAEVIRPLPMDSSAYSFTAFVGVPAVEFSFMEDDQAYPF |
| NOV17f | DSPNHSGQTLYEQVVFTNPSWDAEVIRPLPMDSSAYSFTAFVGVPAVEFSFMEDDQAYPF |
| NOV17a | ------------------------------------------------------------ |
| NOV17b | ------------------------------------------------------------ |
| NOV17c | ------------------------------------------------------------ |
| NOV17d | ------------------------------------------------------------ |
| NOV17e | LHTKEDTYENLHKVLQGRLPAVAQAVAQLAGQLLIRLSHDRLLPLDFGRYGDVVLRHIGN |
| NOV17f | LHTKEDTYENLHKVLQGRLPAVAQAVAQPAGQLLIRLSHDRLLPLDFGRYGDVVLRHIGN |
| NOV17a | ------------------------------------------------------------ |
| NOV17b | ------------------------------------------------------------ |
| NOV17c | ------------------------------------------------------------ |
| NOV17d | ------------------------------------------------------------ |
| NOV17e | LNEFSGDLKARGLTLQWVYSARGDYIRAAEKLRQEIYSSEERDERLTRMYNVRIMRVEFY |
| NOV17f | LNEFSGDLKARGLTLQWVYSARGDYIRAAEKLRQEIYSSEERDERLTRMYNVRIMRVEFY |
| NOV17a | ------------------------------------------------------------ |
| NOV17b | ------------------------------------------------------------ |
| NOV17c | ------------------------------------------------------------ |
| NOV17d | ------------------------------------------------------------ |
| NOV17e | FLSQYVSPADSPFRHIFMGRGDHTLGALLDHLRLLRSNSSGTPGATSSTGFQESRFRRQL |
| NOV17f | FLSQYVSPADSPFRHIFMGRGDHTLGALLDHLRLLRSNSSGTPGATSSTGFQESRFRRQL |
| NOV17a | ------------------------- |
| NOV17b | ------------------------- |
| NOV17c | ------------------------- |
| NOV17d | ------------------------- |
| NOV17e | ALLTWTLQGAANALSGDVWNIDNNF |
| NOV17f | ALLTWTLQGAANALSGDVWNIDNNF |
| NOV17a | (SEQ ID NO: 458) |
| NOV17b | (SEQ ID NO: 460) |
| NOV17c | (SEQ ID NO: 462) |
| NOV17d | (SEQ ID NO: 464) |
| NOV17e | (SEQ ID NO: 466) |
| NOV17f | (SEQ ID NO: 468) |

[0448] Further analysis of the NOV17a protein yielded the following properties shown in Table 17C.

TABLE 17C
Protein Sequence Properties NOV17a

| | |
|---|---|
| SignalP analysis: | No Known Signal Sequence Predicted |
| PSORT II analysis: | |

| PSG: | a new signal peptide prediction method | |
|---|---|---|
| | N-region: | length 10; pos. chg 2; neg. chg 1 |
| | H-region: | length 6; peak value −7.91 |
| | PSG score: | −12.31 |

| | |
|---|---|
| GvH: | von Heijne's method for signal seq. recognition |
| | GvH score (threshold: −2.1): −6.46 |
| | possible cleavage site: between 16 and 17 |

>>> Seems to have no N-terminal signal peptide

| ALOM: | Klein et al's method for TM region allocation | | |
|---|---|---|---|
| | Init position for calculation: 1 | | |
| | Tentative number of TMS(s) for the threshold 0.5: 1 | | |
| | Number of TMS(s) for threshold 0.5: 1 | | |
| | INTEGRAL | Likelihood = | Transmembrane 86-102 |
| | | −5.68 | |

| | |
|---|---|
| PERIPHERAL | Likelihood = 1.54 (at 264) |

| | |
|---|---|
| | ALOM score: −5.68 (number of TMSs: 1) |
| MTOP: | Prediction of membrane topology (Hartmann et al.) |
| | Center position for calculation: 93 |
| | Charge difference: −3.0 C(0.0)-N(3.0) |
| | N >= C: N-terminal side will be inside |

>>> membrane topology: type 2 (cytoplasmic tail 1 to 86)

| MITDISC: | discrimination of mitochondrial targeting seq | | | |
|---|---|---|---|---|
| | R content: | 4 | Hyd Moment(75): | 8.36 |
| | Hyd Moment(95): | 11.20 | G content: | 1 |
| | D/E content: | 2 | S/T content: | 4 |

| | |
|---|---|
| | Score: −1.76 |
| Gavel: | prediction of cleavage sites for mitochondrial preseq |
| | R-2 motif at 35 QRV\|EG |

NUCDISC: discrimination of nuclear localization signals

| | |
|---|---|
| | pat4: none |
| | pat7: none |
| | bipartite: none |
| | content of basic residues: 8.0% |
| | NLS Score: −0.47 |
| KDEL: | ER retention motif in the C-terminus: none |

ER Membrane Retention Signals:

XXRR-like motif in the N-terminus: ERLW

none
SKL: peroxisomal targeting signal in the C-terminus: none
PTS2: 2nd peroxisomal targeting signal: none
VAC: possible vacuolar targeting motif: none
RNA-binding motif: none
Actinin-type actin-binding motif:

type 1: none
type 2: none

NMYR: N-myristoylation pattern: none
Prenylation motif: none
memYQRL: transport motif from cell surface to Golgi: none
Tyrosines in the tail: too long tail
Dileucine motif in the tail: none
checking 63 PROSITE DNA binding motifs: none
checking 71 PROSITE ribosomal protein motifs: none
checking 33 PROSITE prokaryotic DNA binding motifs: none

| | |
|---|---|
| NNCN: | Reinhardt's method for Cytoplasmic/Nuclear discrimination |
| | Prediction: cytoplasmic |
| | Reliability: 89 |
| COIL: | Lupas's algorithm to detect coiled-coil regions |
| | total: 0 residues |

Final Results (k = 9/23):

```
47.8%: mitochondrial
26.1%: cytoplasmic
  8.7%: Golgi
  4.3%: vacuolar
  4.3%: vesicles of secretory system
  4.3%: nuclear
  4.3%: endoplasmic reticulum
```

>> prediction for CG52534-06 is mit (k = 23)

[0449] A search of the NOV17a protein against the Geneseq database, a proprietary database that contains sequences published in patents and patent publication, yielded several homologous proteins shown in Table 17D.

TABLE 17D
Geneseq Results for NOV17a

| | | NOV17a | Identities/ | |
|---|---|---|---|---|
| | | Residues/ | Similarities for | |
| Geneseq | Protein/Organism/Length | Match | the Matched | Expect |
| Identifier | [Patent #, Date] | Residues | Region | Value |
| AAY96211 | Transferrin receptor-like (TfR2) protein - | 1 . . . 372 | 369/372 (99%) | 0.0 |
| | Homo sapiens, 801 aa. | 1 . . . 372 | 370/372 (99%) | |
| | [WO200027874-A2, 18-MAY-2000] | | | |
| ABB11600 | Human transferrin receptor homologue, | 1 . . . 372 | 366/372 (98%) | 0.0 |
| | SEQ ID NO: 1970 - Homo sapiens, 802 | 1 . . . 372 | 367/372 (98%) | |
| | aa. [WO200157188-A2, 09-AUG-2001] | | | |
| AAB93873 | Human protein sequence SEQ ID | 1 . . . 158 | 158/158 (100%) | 9e−90 |
| | NO: 13773 - Homo sapiens, 158 aa. | 1 . . . 158 | 158/158 (100%) | |
| | [EP1074617-A2, 07-FEB-2001] | | | |
| ABP56714 | Human CD71 protein SEQ ID NO: 28 - | 84 . . . 371 | 112/299 (37%) | 1e−42 |
| | Homo sapiens, 760 aa. | 68 . . . 349 | 159/299 (52%) | |
| | [WO2002100336-A2, 19-DEC-2002] | | | |
| ABU04022 | Human expressed protein tag (EPT) | 84 . . . 371 | 112/299 (37%) | 1e−42 |
| | #688 - Homo sapiens, 760 aa. | 68 . . . 349 | 159/299 (52%) | |
| | [WO200278524-A2, 10-OCT-2002] | | | |

[0450] In a BLAST search of public sequence databases, the NOV17a protein was found to have homology to the proteins shown in the BLASTP data in Table 17E.

TABLE 17E
Public BLASTP Results for NOV17a

| | | NOV17a | Identities/ | |
|---|---|---|---|---|
| Protein | | Residues/ | Similarities for | |
| Accession | | Match | the Matched | Expect |
| Number | Protein/Organism/Length | Residues | Portion | Value |
| Q9UP52 | Transferrin receptor protein 2 (TfR2) - | 1 . . . 372 | 369/372 (99%) | 0.0 |
| | Homo sapiens (Human), 801 aa. | 1 . . . 372 | 370/372 (99%) | |
| Q9JKX3 | Transferrin receptor protein 2 (TfR2) - | 1 . . . 371 | 293/371 (78%) | e−166 |
| | Mus musculus (Mouse), 798 aa. | 1 . . . 366 | 313/371 (83%) | |
| Q07891 | Transferrin receptor protein 1 (TfR1) | 87 . . . 371 | 112/296 (37%) | 6e−45 |
| | (TR) (TfR) (Trfr) - Cricetulus griseus | 71 . . . 346 | 160/296 (53%) | |
| | (Chinese hamster), 757 aa. | | | |
| P02786 | Transferrin receptor protein 1 (TfR1) | 84 . . . 371 | 112/299 (37%) | 3e−42 |
| | (TR) (TfR) (Trfr) (CD71 antigen) (T9) | 68 . . . 349 | 159/299 (52%) | |
| | (p90) - Homo sapiens (Human), 760 aa. | | | |
| Q8C872 | Transferrin receptor - Mus musculus | 84 . . . 367 | 107/292 (36%) | 4e−42 |
| | (Mouse), 515 aa. | 68 . . . 347 | 152/292 (51%) | |

[0451] PFam analysis predicts that the NOV17a protein contains the domains shown in the Table 17F.

[0452] Table 17F. Domain Analysis of NOV17a

TABLE 17F
Domain Analysis of NOV17a

| | | Identities/ | |
|---|---|---|---|
| | | Similarities | |
| Pfam | NOV17a | for the | Expect |
| Domain | Match Region | Matched Region | Value |
| PA | 236 . . . 335 | 36/112 (32%) | 8.7e−14 |
| | | 70/112 (62%) | |
| TFR_dimer | 247 . . . 416 | 34/188 (18%) | 0.45 |
| | | 121/188 (64%) | |

### Example 18

[0453] The NOV18 clone was analyzed, and the nucleotide and encoded polypeptide sequences are shown in Table 18A.

TABLE 18A
NOV18 Sequence Analysis

| | | |
|---|---|---|
| NOV18a, CG52979-03 | SEQ ID NO: 469 | 458 bp |

| | | |
|---|---|---|
| DNA Sequence | ORF Start: ATG at 61 | Stop: TAG at 343 |

TCTTCATTCTTTCCGCCATCTTGATTCTTTCTCACTGACCAAGACTCAGCCGTGGGAAATATGAGTGA
GCTTGTAAGAACAACATCCCAATCCTCAGAAAGAGGAAATGACCAAGAGTCTTCCCAGCCAGTTGGAT
CTGTGATTGTCCAGGAGCCCACTGAGGAAAAGCGTCAAGAAGAGGAACCACCAACTGATAATCAGGGG
TGATGTCAGGGAGGGTATTATGCCCACTTTTGATCTCACTAAAGTGCTGGAAGCAGGTGATGCGCAAC
CATAGGTTTCAAGCAAGACAAATGAAGACTGAAACCAAGAACGTTATTCTTAATCTGGAAATTTGACT
GATAATATTCTCTTAATAAAGTTTTAAGTTTTCTGCAAAGAATCCTTAAA

NOV18a, CG52979-03

| | | | |
|---|---|---|---|
| Protein Sequence | SEQ ID NO: 470 | 94 aa | MW at 10341.1kD |

MSELVRTTSQSSERGNDQESSQPVGSVIVQEPTEEKRQEEEPPTDNQGPDMEAFQQELALLKIEDEPG
DGPDVREGIMPTFDLTKVLEAGDAQP

| | | |
|---|---|---|
| NOV18b, CG52979-01 | SEQ ID NO: 471 | 458 bp |

| | | |
|---|---|---|
| DNA Sequence | ORF Start: ATG at 61 | ORF Stop: TAG at 343 |

TCTTCATTCTTTCCGCCATCTTGATTCTTTCTCACTGACCAAAGACTCAGCCGTGGGAAAATATGTGA
GCTTGTAAGAGCAAGATCCCAATCCTCAGAAAGAGGAAATGACCAAGAGTCTTCCCAGCCGGTTGGAT
CTGTGATTGTCCAGGAGCCCACTGAGGAAAAACGTCAAGAAGAGGAACCACCAACTGATAATCAGGGG
CCTGACATGGAAGCTTTTCAACAGGAACTGGCTCTGCTTAAGATAGAGGATGAGCCTGGAGATGGTCC
TGATGTCAGGGAGGGTATTATGCCCACTTTTGATCTCACTAAAGTGCTGGAAGCAGGTGATGCGCAAC
CATAGGTTTCAAGCAAGACAAATGAAGACTGAAACCAAGAACGTTATTCTTAATCTGGAAATTTGACT
GATAATATTCTCTTAATAAAGTTTTAAGTTTTCTGCAAAGAATCCTTAAA

NOV18b, CG52979-01

| | | | |
|---|---|---|---|
| Protein Sequence | SEQ ID NO: 472 | 94 aa | MW at 10366.1kD |

MSELVRTTSQSSERGNDQESSQPVGSVIVQEPTEEKRQEEEPPTDNQGPDMEAFQQELALLKIEDEPG
DGPDVREGIMPTFDLTKVLEAGDAQP

| | | |
|---|---|---|
| NOV18c, CG52979-02 | SEQ ID NO: 473 | 336 bp |

| | | |
|---|---|---|
| DNA Sequence | ORF Start: at 1 | ORF Stop: at 112 |

TGGTTGCGCATCACCTGCTTCCAGCACTTTAGTGAGATCAAAAGTGGGCATAATACCCTCCCTGACAT
CAGGACCATCTCCAGGCTCATCCTCTATCTTAAGCAGAGCCAGTTCCTGTTGAAAAGCTTCCATGTCA
GGCCCTTGAAAAGCAGGCACTGCTTGATTTTCAATCTCCCCACTAGGTGCAATACCCTGATTATCAGT
TGGTGGTTCCTCTTCTTGACGTTTTTCCTCAGTGGGCTCCTGGACAATCACAGATCCAACCGGCTGGG
AAGACTCTTGGTCATTTCCTCTTTCTGAGGATTGGGATCTTGCTCTTACAAGCTCACTCATGGT

NOV18c, CG52979-02

| | | | |
|---|---|---|---|
| Protein Sequence | SEQ ID NO: 474 | 37 aa | MW at 4444.1kD |

WLRITCFQHFSEIKSGHNTLPDIRTISRLILYLKQSQ

[0454] A ClustalW comparison of the above protein sequences yields the following sequence alignment shown in Table 18B.

TABLE 18B
Comparison of the NOV18 protein sequences.

| | |
|---|---|
| NOV18a | MSELVRTTSQSSERGNDQESSQPVGSVIVQEPTEEKRQEEEPPTDNQGPDMEAFQQELAL |
| NOV18b | MSELVRARSQSSERGNDQESSQPVGSVIVQEPTEEKRQEEEPPTDNQGPDMEAFQQELAL |
| NOV18c | ----------------------------WLRITCFQHFSEIKSGHNTLPDIRTISRLILY |
| NOV18a | LKIEDEPGDGPDVREGIMPTFDLTKVLEAGDAQP |
| NOV18b | LKIEDEPGDGPDVREGIMPTFDLTKVLEAGDAQP |
| NOV18c | LKQSQ----------------------------- |
| NOV18a (SEQ ID NO: 470) | |
| NOV18b (SEQ ID NO: 472) | |
| NOV18c (SEQ ID NO: 474) | |

[0455] Further analysis of the NOV18a protein yielded the following properties shown in Table 18C.

TABLE 18C
Protein Sequence Properties NOV18a

| | |
|---|---|
| SignalP analysis: | No Known Signal Sequence Predicted |
| PSORT II analysis: | |

| PSG: | a new signal peptide prediction method | |
|---|---|---|
| | N-region: | length 6; pos. chg 1; neg. chg 1 |
| | H-region: | length 6; peak value −10.69 |
| | PSG score: | −15.09 |

| | |
|---|---|
| GvH: | von Heijne's method for signal seq. recognition |
| | GvH score (threshold: −2.1): −14.03 |
| | possible cleavage site: between 14 and 15 |

>>> Seems to have no N-terminal signal peptide

| ALOM: | Klein et al's method for TM region allocation | |
|---|---|---|
| | Init position for calculation: 1 | |
| | Tentative number of TMS(s) for the threshold 0.5: 0 | |
| | number of TMS(s) . . . fixed | |
| | PERIPHERAL | Likelihood = 10.87 (at 76) |

| | ALOM score: 10.87 (number of TMSs: 0) | | | |
|---|---|---|---|---|
| MITDISC: | discrimination of mitochondrial targeting seq | | | |
| | R content: | 1 | Hyd Moment(75): | 5.19 |
| | Hyd Moment(95): | 12.09 | G content: | 0 |
| | D/E content: | 2 | S/T content: | 6 |

| | |
|---|---|
| | Score: −3.75 |
| Gavel: | prediction of cleavage sites for mitochondrial preseq |
| | cleavage site motif not found |

NUCDISC: discrimination of nuclear localization signals

| | |
|---|---|
| | pat4: none |
| | pat7: none |
| | bipartite: none |
| | content of basic residues: 7.4% |
| | NLS Score: −0.47 |
| KDEL: | ER retention motif in the C-terminus: none |

ER Membrane Retention Signals: none
SKL: peroxisomal targeting signal in the C-terminus: none
PTS2: 2nd peroxisomal targeting signal: none
VAC: possible vacuolar targeting motif: none
RNA-binding motif: none
Actinin-type actin-binding motif:

type 1: none
type 2: none

NMYR: N-myristoylation pattern: none
Prenylation motif: none
memYQRL: transport motif from cell surface to Golgi: none
Tyrosines in the tail: none
Dileucine motif in the tail: none
checking 63 PROSITE DNA binding motifs: none
checking 71 PROSITE ribosomal protein motifs: none
checking 33 PROSITE prokaryotic DNA binding motifs: none

| | |
|---|---|
| NNCN: | Reinhardt's method for Cytoplasmic/Nuclear discrimination |
| | Prediction: nuclear |
| | Reliability: 94.1 |
| COIL: | Lupas's algorithm to detect coiled-coil regions |
| | total: 0 residues |

Final Results (k = 9/23):

78.3%: nuclear
21.7%: mitochondrial

>> prediction for CG52979-03 is nuc (k = 23)

[0456] A search of the NOV18a protein against the Geneseq database, a proprietary database that contains sequences published in patents and patent publication, yielded several homologous proteins shown in Table 18D.

TABLE 18D
Geneseq Results for NOV18a

| | | NOV18a | Identities/ | |
|---|---|---|---|---|
| | | Residues/ | Similarities for | |
| Geneseq | Protein/Organism/Length | Match | the Matched | Expect |
| Identifier | [Patent #, Date] | Residues | Region | Value |
| AAE08580 | Human NOV1 protein - Homo sapiens, | 1 . . . 94 | 92/94 (97%) | 1e−47 |
| | 94 aa. [WO200161009-A2, 23-AUG- | 1 . . . 94 | 92/94 (97%) | |
| | 2001] | | | |
| AAE08593 | Protein encoded by pCR2.1-83350421- | 1 . . . 94 | 92/111 (82%) | 2e−44 |
| | S747-3A insert - Homo sapiens, 111 aa. | 1 . . . 111 | 92/111 (82%) | |
| | [WO200161009-A2, 23-AUG-2001] | | | |
| AAE08582 | Human NOV3 protein - Homo sapiens, | 1 . . . 94 | 92/111 (82%) | 2e−44 |
| | 111 aa. [WO200161009-A2, 23-AUG- | 1 . . . 111 | 92/111 (82%) | |
| | 2001] | | | |
| ABJ19255 | Human cancer/testis antigen - SEQ ID | 1 . . . 94 | 92/111 (82%) | 4e−44 |
| | No 37 - Homo sapiens, 111 aa. | 1 . . . 111 | 92/111 (82%) | |
| | [WO200278526-A2, 10-OCT-2002] | | | |
| AAE08581 | Human NOV2 protein - Homo sapiens, | 1 . . . 94 | 92/111 (82%) | 4e−44 |
| | 111 aa. [WO200161009-A2, 23-AUG- | 1 . . . 111 | 92/111 (82%) | |
| | 2001] | | | |

[0457] In a BLAST search of public sequence databases, the NOV18a protein was found to have homology to the proteins shown in the BLASTP data in Table 18E.

TABLE 18E
Public BLASTP Results for NOV18a

| | | NOV18a | Identities/ | |
|---|---|---|---|---|
| Protein | | Residues/ | Similarities for | |
| Accession | | Match | the Matched | Expect |
| Number | Protein/Organism/Length | Residues | Portion | Value |
| Q8WWL9 | Page-5 protein - Homo sapiens | 1 . . . 93 | 80/110 (72%) | 4e−35 |
| | (Human), 130 aa. | 21 . . . 129 | 84/110 (75%) | |
| Q96GU1 | Hypothetical protein - Homo sapiens | 1 . . . 93 | 80/110 (72%) | 4e−35 |
| | (Human), 110 aa. | 1 . . . 109 | 84/110 (75%) | |
| O60829 | G antigen family C 1 protein (Prostate- | 6 . . . 94 | 39/104 (37%) | 1e−06 |
| | associated gene protein 4) (PAGE-4) | 4 . . . 102 | 47/104 (44%) | |
| | (PAGE-1) (JM27) (GAGE-9) - Homo | | | |
| | sapiens (Human), 102 aa. | | | |
| Q8WTP9 | Placenta-specific gene 6 protein (XAGE- | 31 . . . 94 | 31/82 (37%) | 4e−06 |
| | 3 protein) (pp9012) - Homo sapiens | 28 . . . 109 | 43/82 (51%) | |
| | (Human), 111 aa. | | | |
| Q8WWM1 | XAGE-5 protein - Homo sapiens | 21 . . . 94 | 32/92 (34%) | 7e−06 |
| | (Human), 108 aa. | 17 . . . 106 | 49/92 (52%) | |

[0458] PFam analysis predicts that the NOV18a protein contains the domains shown in the Table 18F.

TABLE 18F
Domain Analysis of NOV18a

| | | | |
|---|---|---|---|
| Pfam | NOV18a Match Region | Identities/ | Expect |
| Domain | | Similarities for | Value |
| | | the Matched | |
| | | Region | |

### Example 19.

[0459] The NOV19 clone was analyzed, and the nucleotide and encoded polypeptide sequences are shown in Table 19A.

TABLE 19A
NOV19 Sequence Analysis

| | | |
|---|---|---|
| NOV19a, CG52988-02 | SEQ ID NO: 475 | 501 bp |
| DNA Sequence | ORF Start: ATG at 25 | ORF Stop: TAG at 358 |

GGGAAGAGACCATGTGTGGGAAATATGAGTGAGCTTGTAAGAACAAGATCCCAATCCTCAGAAAGAGG
AAATGACCAAGAGTCTTCCCAGCCGGTTGGATCTGTGATTGTCCAGGAGCCCACTGAGGAAAAACGTC
AAGAAGAGGAACCACCAACTGATAATCAGGGTATTGCACCTAGTGGGGAGATTGAAAATCAAGCAGTG
CCTGCTTTTCAAGGGCCTGACATGGAAGCTTTTCAACAGGAACTGGCTCTGCTTAAGATAGAGGATGA
GCCTGGAGATGGTCCTGATGTCAGGGAGGGTATTATGCCCACTTTTGATCTCACTAAAGTGCTGGAAG
CAGGTGATGCGCAACCATAGGTTTCAAGCAAGACAAATGAAGACTGAAACCAAGAACGTTATTCTTAA
TCTGGAAATTTGACTGATAATATTCTCTTAATAAAGTTTTAAGTTTTCTGCAAAGAATCCTCAAAAAA
AAAAAAAAAAAAAAAAAAAAAGGG

| | | | |
|---|---|---|---|
| NOV19a, CG52988-02 | SEQ ID NO: 476 | 111 aa | MW at 12106.0kD |
| Protein Sequence | | | |

MSELVRTRSQSSERGNDQESSQPVGSVIVQEPTEEKRQEEEPPTDNQGIAPSGEIENQAVPAFQGPDM
EAFQQELALLKIEDEPGDGPDVREGIMPTFDLTKVLEAGDAQP

| | | |
|---|---|---|
| NOV19b, CG52988-03 | SEQ ID NO: 477 | 374 bp |
| DNA Sequence | ORF Start: ATG at 23 | ORF Stop: TAG at 356 |

GAAGAGACCATGTGTGGGAAATATGAGTGAGCTTGTAAGAGCAAGATCCCAATCCTCAGAAAGAGGAA
ATGACCAAGAGTCTTCCCAGCCGGTTGGATCTGTGATTGTCCAGGAGCCCACTGAGGAAAACGTCA
GAAGAGGAACCACCAACTGATAATCAGGGTATTGCACCTAGTGGGGAGATTGAAAATCAAGCAGTGCC
TGCTTTTCAAGGGCCTGACATGGAAGCTTTTCAACAGGAACTGGCTCTGCTTAAGATAGAGGATGAGC
CTGGAGATGGTCCTGATGTCAGGGAGGGTATTATGCCCACTTTTGATCTCACTAA~GTGCTGGAAGCA
IGGTGATGCGCAACCATAQGTTTCAAGCAAGACAA

| | | | |
|---|---|---|---|
| NOV19b, CG52988-03 | SEQ ID NO: 478 | 111 aa | MW at 12076 0kD |
| Protein Sequence | | | |

MSELVRARSQSSERGNDQESSQPVGSVIVQEPTEEKRQEEEPPTDNQGIAPSGEIENQAVPAFQGPDM
EAFQQELALLKIEDEPGDGPDVREGIMPTEDLTKVLEAGDAQP

| | | |
|---|---|---|
| NOV19c, CG52988-04 | SEQ ID NO: 479 | 1337 bp |
| DNA Sequence | ORF Start: ATG at 1 | ORF Stop: TAG at 334 |

ATGAGTGAGCATGTGAGAACAACATCCCAATCCTCAGAAGAGGAAATGACCAAGAGTCTTCCCAGCC
AGTTGGATCTGTGATTGTCCAGGAGCCCACTGAGGAAAAACGTCAAGAAGAGGAACCACCAACTGATA
ATCAGGGTATTGCACCTAGTGGGGAGATCGAAAATGAAGGAGCACCTGCCGTTCAAGGGCCTGACATG
GAAGCTTTTCAAACAGGAACTGGCTCTGCTTAAGATAGAGGATGAGCCTGGAGATGGTCCTGATGTCAG
GGAGGGGATTATGCCCACTTTTGATCTCACTAAAGTGCTGGAAGCAGGTGATGCGCAACCATAGT

| | | | |
|---|---|---|---|
| NOV19c, CG52988-04 | SEQ ID NO: 480 | 111 a | MW at 11985.8kD |
| Protein Sequence | | | |

MSEAAAATTSQSSERGNDQESSQPVGSVIVQEPTEEKRQEEEPPTDNQGIAPSGEIENEGAPAVQGPDM
EAFQQELALLKIEDEPGDGPDVREGIMPTFDLTKVLEAGDAQP

| | | |
|---|---|---|
| NOV19d, CG52988-06 | SEQ ID NO: 481 | 344 bp |
| DNA Sequence | ORF Start: ATG at 9 | ORF Stop: TAG at 342 |

GTGGAATATGATTGAGCATGTGAGAACAATATCCCAATCCTCAGAAGAGGAAATGACCAAAGAGTCT
AACTGATAATCAGGGTATTGCACCTAGTGGGGAGATCGAAAATGAAGGAGCACCTGCCGTTCAAGGGC
CTGACATGGAAGCTTTTCAACAGGAACTGGCTCTGCTTAAGATAGAGGATGAGCCTGGAGATGGTCCT
GATGTCAGGGAGGGGATTATGCCCACTTTTGATCTCACTAGAGTGCTGGAAGCAGGTGATGCGCAACC
ATAG

| | | | |
|---|---|---|---|
| NOV19d, CG52988-06 | SEQ ID NO: 482 | 111 aa | MW at 12061 .0kD |
| Protein Sequence | | | |

MIEHVRTSQSSERGNDQESSHPVGSVIVQEPTEEKRQEEEPPTDNQGIAPSGEIENEGAPAVQGPDM
EAFQQELALLKIEDEPGDGPDVREGIMPTFDLTRVLEAGDAQP

| | | |
|---|---|---|
| lNOV19e, CG52988-07 | SEQ ID NO: 483 | 1343 bp |
| DNA Sequence | ORF Start: ATG at 8 | ORF Stop: TAG at 341 |

GGGAAATATGAGTGAGCATGTGAGAACAAGATCCCAATCCTCAGAAAGAGGAAATGACCAAGAGTCTT
ACTGATAATCAGGGTATTGCGCCTAGTGGGGAGATCGAAAATGAAGGAGCACCTGCCGTTCAAGGGCC
TGACATGGAAGCTTTTCAACAGGAACTGGCTCTGCTTAAGATAGAGGATGAGCCTGGAGATGGTCCTG
ATGTCAGGGAGGGGATTATGCCCACTTTTGATCTCACTAAAGTGCTGGAAGCAGGTGATGCGCAACCA
TAG

| | | | |
|---|---|---|---|
| NOV19e, CG52988-07 | SEQ ID NO: 484 | 111 aa | MW at 12040.9kD |
| Protein Sequence | | | |

MSEHVRTRSQSSERGNDQESSQPVGSVTVQEPTEEKRQEEEPTDNQGIAGEIENEGAPAVQGPDM
EAFQQELALLKIEDEPGDGPDVREGIMPTFDLTKVLEAGDAQ

| | | |
|---|---|---|
| NOV19f, CG52988-01 | SEQ ID NO: 485 | 475 bp |
| DNA Sequence | ORF Start: ATG at 25 | ORF Stop: TAG at 358 |

AAATGACCAAGAGTCTTCCCAGCCAGTTGGATCTGTGATTGTCCAGGAGCCCACTGAGGAAAAAAACGTC
AAGAAGAGGAACCACCAACTGATAATCAGGGTATTGCACCTAGTGGGGAGATCGAATGAAAGGAGCA
CCTGCCGTTCAAGGGCCTGACATGGAAGCTTTTCACAGGAAACTGGCTCTGCTTAAAGATAGAGGATGA
GCCTGGAGATGGTCCTGATGTCAGGGAGGGGATTATGCCCACTTTTGATCTCACTAAAGTGCTGGAAG
CAGGTGATGCGCAACCATAGGTTTCAAGCAGACATGAAGACTGAACCAGAACGTTATTCTTA14
TCTGGAAATTTGACTGATAATATTCTCTTAATAGTTTTAGTTTTCTGCAGA

| | | | |
|---|---|---|---|
| NOV19f,CG52988-01 | SEQ ID NO: 486 | 111 aa | MW at 12040.9kD |
| Protein Sequence | | | |

MSEHVRTRSQSSERGNDQESSQPVGSVIVQEPTEEKRQEEEPPTDNQGIAPSGEIENEGAPAVQGPDM
IEAFQQELALLKIEDEPGDGPDVREGIMPTFDLTKvLEAGDAQP

| | | |
|---|---|---|
| NOV19g, CG52988-05 | SEQ ID NO: 487 | 1344 bp |
| DNA Sequence | ORF Start: ATG at 9 | ORF Stop: TAG at 342 |

TGGGAAATATGAGTGAGCATGTGAGAACAACATCCCAATCCTCAGAAAGAGGAAATGACCAAGAGTCT
CTGACATGGAAGCTTTTCAACAGGAACTGGCTCTGCTTAAGATAGAGGATGAGCCTGGAGATGGTCCT
GATGTCAGGGAGGGGATTATGCCCACTTTTGATCTCACTAAAGTGCTGGAAGCAGGTGATGCGCAACC
ATAG

| | | | |
|---|---|---|---|
| NOV19g, CG52988-05 | SEQ ID NO: 488 | 111 aaa | MW at 12027.9kD |
| Protein Sequence | | | |

MSEHVRTTSQSSERGNDQESSQPVVSVIVQEPTEEKRQEEEPPTDNQGIApSGEIENEGAPAVQGPDM
EAFQQELALLKIEDEPGDGPDVREGIMPTFDLTKVLEAGDAQP

[0460] A ClustalW comparison of the above protein sequences yields the following sequence alignment shown in Table 19B.

TABLE 19B
Comparison of the NOV19 protein sequences.

| | |
|---|---|
| NOV19a | MSELVRTRSQSSERGNDQESSQPVGSVIVQEPTEEKRQEEEPPTDNQGIAPSGEIENQAV |
| NOV19b | MSELVRARSQSSERGNDQESSQPVGSVIVQEPTEEKRQEEEPPTDNQGIAPSGEIENQAV |
| NOV19c | MSEHVRTTSQSSERGNDQESSQPVGSVIVQEPTEEKRQEEEPPTDNQGIAPSGEIENEGA |
| NOV19d | MIEHVRTISQSSERGNDQESSHPVGSVIVQEPTEEKRQEEEPPTDNQGIAPSGEIENEGA |
| NOV19e | MSEHVRTRSQSSERGNDQESSQPVGSVIVQEPTEEKRQEEEPPTDNQGIAPSGEIENEGA |
| NOV19f | MSEHVRTRSQSSERGNDQESSQPVGSVIVQEPTEEKRQEEEPPTDNQGIAPSGEIENEGA |
| NOV19g | MSEHVRTTSQSSERGNDQESSQPVVSVIVQEPTEEKRQEEEPPTDNQGIAPSGEIENEGA |
| NOV19a | PAFQGPDMEAFQQELALLKIEDEPGDGPDVREGIMPTFDLTKVLEAGDAQP |
| NOV19b | PAFQGPDMEAFQQELALLKIEDEPGDGPDVREGIMPTFDLTKVLEAGDAQP |
| NOV19c | PAVQGPDMEAFQQELALLKIEDEPGDGPDVREGIMPTFDLTKVLEAGDAQP |
| NOV19d | PAVQGPDMEAFQQELALLKIEDEPGDGPDVREGIMPTFDLTRVLEAGDAQP |
| NOV19e | PAVQGPDMEAFQQELALLKIEDEPGDGPDVREGIMPTFDLTKVLEAGDAQP |
| NOV19f | PAVQGPDMEAFQQELALLKIEDEPGDGPDVREGIMPTFDLTKVLEAGDAQP |
| NOV19g | PAVQGPDMEAFQQELALLKIEDEPGDGPDVREGIMPTFDLTKVLEAGDAQP |
| NOV19a | (SEQ ID NO: 476) |
| NOV19b | (SEQ ID NO: 478) |
| NOV19c | (SEQ ID NO: 480) |
| NOV19d | (SEQ ID NO: 482) |
| NOV19e | (SEQ ID NO: 484) |
| NOV19f | (SEQ ID NO: 486) |
| NOV19g | (SEQ ID NO: 488) |

[0461] Further analysis of the NOV19a protein yielded the following properties shown in Table 19C.

TABLE 19C
Protein Sequence Properties NOV19a

| | |
|---|---|
| SignalP analysis: | No Known Signal Sequence Predicted |
| PSORT II analysis: | |

| PSG: | a new signal peptide prediction method | |
|---|---|---|
| | N-region: | length 8; pos. chg 2; neg. chg 1 |
| | H-region: | length 4; peak value −13.93 |
| | PSG score: | −18.33 |

| | |
|---|---|
| GvH: | von Heijne's method for signal seq. recognition |
| | GvH score (threshold: −2.1): −15.73 |
| | possible cleavage site: between 14 and 15 |

>>> Seems to have no N-terminal signal peptide

| ALOM: | Klein et al's method for TM region allocation | |
|---|---|---|
| | Init position for calculation: 1 | |
| | Tentative number of TMS(s) for the threshold 0.5: 0 | |
| | number of TMS(s) . . . fixed | |
| | PERIPHERAL | Likelihood = 10.87 (at 93) |

| | ALOM score: 10.87 (number of TMSs: 0) | | | |
|---|---|---|---|---|
| MITDISC: | discrimination of mitochondrial targeting seq | | | |
| | R content: | 2 | Hyd Moment(75): | 8.54 |
| | Hyd Moment(95): | 6.16 | G content: | 0 |
| | D/E content: | 2 | S/T content: | 5 |

| | |
|---|---|
| | Score: −3.37 |
| Gavel: | prediction of cleavage sites for mitochondrial preseq |
| | cleavage site motif not found |

NUCDISC: discrimination of nuclear localization signals

| | |
|---|---|
| | pat4: none |
| | pat7: none |
| | bipartite: none |
| | content of basic residues: 7.2% |
| | NLS Score: −0.47 |
| KDEL: | ER retention motif in the C-terminus: none |

ER Membrane Retention Signals: none
SKL: peroxisomal targeting signal in the C-terminus: none
PTS2: 2nd peroxisomal targeting signal: none
VAC: possible vacuolar targeting motif: none
RNA-binding motif: none
Actinin-type actin-binding motif:

type 1: none
type 2: none

NMYR: N-myristoylation pattern: none
Prenylation motif: none
memYQRL: transport motif from cell surface to Golgi: none
Tyrosines in the tail: none
Dileucine motif in the tail: none
checking 63 PROSITE DNA binding motifs: none
checking 71 PROSITE ribosomal protein motifs: none
checking 33 PROSITE prokaryotic DNA binding motifs: none

| | |
|---|---|
| NNCN: | Reinhardt's method for Cytoplasmic/Nuclear discrimination |
| | Prediction: nuclear |
| | Reliability: 89 |
| COIL: | Lupas's algorithm to detect coiled-coil regions |
| | total: 0 residues |

Final Results (k = 9/23):

69.6%: nuclear
26.1%: mitochondrial
4.3%: cytoplasmic

>> prediction for CG52988-02 is nuc (k = 23)

[0462] A search of the NOV19a protein against the Geneseq database, a proprietary database that contains sequences published in patents and patent publication, yielded several homologous proteins shown in Table 19D.

TABLE 19D
Geneseq Results for NOV19a

| | | NOV19a | Identities/ | |
|---|---|---|---|---|
| | | Residues/ | Similarities for | |
| Geneseq | Protein/Organism/Length | Match | the Matched | Expect |
| Identifier | [Patent #, Date] | Residues | Region | Value |
| AAE08593 | Protein encoded by pCR2.1-83350421- | 1 . . . 111 | 110/111 (99%) | 3e−58 |
| | S747-3A insert - Homo sapiens, 111 | 1 . . . 111 | 110/111 (99%) | |
| | aa. [WO200161009-A2, 23-AUG-2001] | | | |
| AAE08582 | Human NOV3 protein - Homo sapiens, | 1 . . . 111 | 110/111 (99%) | 3e−58 |
| | 111 aa. [WO200161009-A2, 23-AUG- | 1 . . . 111 | 110/111 (99%) | |
| | 2001] | | | |
| ABJ19255 | Human cancer/testis antigen - SEQ ID | 1 . . . 111 | 106/111 (95%) | 6e−56 |
| | No 37 - Homo sapiens, 111 aa. | 1 . . . 111 | 107/111 (95%) | |
| | [WO200278526-A2, 10-OCT-2002] | | | |
| AAE08581 | Human NOV2 protein - Homo sapiens, | 1 . . . 111 | 106/111 (95%) | 6e−56 |
| | 111 aa. [WO200161009-A2, 23-AUG- | 1 . . . 111 | 107/111 (95%) | |
| | 2001] | | | |
| ABJ19247 | Human cancer/testis antigen - SEQ ID | 1 . . . 110 | 93/110 (84%) | 7e−47 |
| | No 21 - Homo sapiens, 110 aa. | 1 . . . 109 | 99/110 (89%) | |
| | [WO200278526-A2, 10-OCT-2002] | | | |

[0463] In a BLAST search of public sequence databases, the NOV19a protein was found to have homology to the proteins shown in the BLASTP data in Table 19E.

TABLE 19E
Public BLASTP Results for NOV19a

| | | NOV19a | Identities/ | | |
|---|---|---|---|---|---|
| Protein | | Residues/ | Similarities for | | |
| Accession | | Match | the Matched | | Expect |
| Number | Protein/Organism/Length | Residues | Portion | | Value |
| Q8WWL9 | Page-5 protein - Homo sapiens | 1 . . . 110 | 93/110 | (84%) | 2e−46 |
| | (Human), 130 aa. | 21 . . . 129 | 99/110 | (89%) | |
| Q96GU1 | Hypothetical protein - Homo sapiens | 1 . . . 110 | 93/110 | (84%) | 2e−46 |
| | (Human), 110 aa. | 1 . . . 109 | 99/110 | (89%) | |
| O60829 | G antigen family C 1 protein (Prostate- | 6 . . . 111 | 45/106 | (42%) | 5e−11 |
| | associated gene protein 4) (PAGE-4) | 4 . . . 102 | 53/106 | (49%) | |
| | (PAGE-1) (JM27) (GAGE-9) - Homo | | | | |
| | sapiens (Human), 102 aa. | | | | |
| Q8WTP9 | Placenta-specific gene 6 protein (XAGE- | 8 . . . 111 | 42/108 | (38%) | 3e−10 |
| | 3 protein) (pp9012) - Homo sapiens | 4 . . . 109 | 62/108 | (56%) | |
| | (Human), 111 aa. | | | | |
| Q8WWM1 | XAGE-5 protein - Homo sapiens | 21 . . . 111 | 36/92 | (39%) | 5e−09 |
| | (Human), 108 aa. | 17 . . . 106 | 55/92 | (59%) | |

[0464] PFam analysis predicts that the NOV19a protein contains the domains shown in the Table 19F.

TABLE 19F
Domain Analysis of NOV19a

| | | | |
|---|---|---|---|
| Pfam | NOV19a | Identities/ | Expect |
| Domain | Match Region | Similarities | Value |
| | | for the | |
| | | Matched Region | |

### Example 20

[0465] The NOV20 clone was analyzed, and the nucleotide and encoded polypeptide sequences are shown in Table 20A.

TABLE 20A
NOV20 Sequence Analysis

| | | |
|---|---|---|
| NOV20a, CG53449-04 | SEQ ID NO: 489 | 2165 bp |

| | | |
|---|---|---|
| DNA Sequence | ORF Start: ATG at 153 | ORF Stop: TGA at 1194 |

AGAACAGCGCAGTTTGCCCTCCGCTCACGCAGAGCCTCTCCGTGGCCTCCGCACCTTGAGCATTAGGC
CAGTTCTCCTCTTCTCTCTAATCCATCCGTCACCTCTCCTGTCATCCGTTTCCATGCCGTGAGGTCCA
TTCACAGAACACATCCATGGCTCTCATGCTCAGTTTGGTTCTGAGTCTCCTCAAGCTGGGATCAGGGC
TTCCTGTCTCCTAAGACCAATGCAGAGGCCATGGAAGTGCGGTTCTTCAGGGGCCAGTTCTCTAGCGT
GGTCCACCTCTACAGGGACGGGAAGGACCAGCCATTTATGCAGATGCCACAGTATCAAGGCAGGACAA
AACTGGTGAAGGATTCTATTGCGGAGGGGCGCATCTCTCTGAGGCTGGAAAACATTACTGTGTTGGAT
GCTGGCCTCTATGGGTGCAGGATTAGTTCCCAGTCTTACTACCAGAAGGCCATCTGGGAGCTACAGGT
GTCAGCACTGGGCTCAGTTCCTCTCATTTCCATCACGGGATATGTTGATAGAGACATCCAGCTACTCT
GTCAGTCCTCGGGCTGGTTCCCCCGGCCCACAGCGAAGTGGAAAGGTCCACAAGGACAGGATTTGTCC
ACAGACTCCAGGACAAACAGAGACATGCATGGCCTGTTTGATGTGGAGATCTCTCTGACCGTCCAAGA
GAACGCCGGGAGCATATCCTGTTCCATGCGGCATGCTCATCTGAGCCGAGAGGTGGAATCCAGGGTAC
AGATAGGAGATACCTTTTTCGAGCCTATATCGTGGCACCTGGCTACCAAAGTACTGGGAATACTCTGC
TGTGGCCTATTTTTTGGCATTGTTGGACTGAAGATTTTCTTCTCCAAATTCCAGTGTAAGCGAGAGAG
AGAAGCATGGGCCGGTGCCTTATTCATGGTTCCAGCAGGGACAGGATCAGAGATGCTCCCACATCCAG
CTGCTTCTCTTCTTCTAGTCCTAGCCTCCAGGGGCCCAGGCCCAAAAAAGGAAAATCCAGGCGGAACT
GGACTGGAGAAGAAAGCACGGACAGGCAGAATTGAGAGACGCCCGGAAACACGCAGTGGAGGTGACTC
TGGATCCAGAGACGGCTCACCCGAAGCTCTGCGTTTCTGATCTGAAAACTGTAACCCATAGAAAAGCT
CCCCAGGAGGTGCCTCACTCTGAGAAGAGATTTACAAGGAAGAGTGTGGTGGCTTCTCAGAGTTTCCA
AGCAGGGAAACATTACTGGGAGGTGGACGGAGGACACAATAAAAGGTGGCGCGTGGGAGTGTGCCGGG
AATGGAGAACATTTGTATTTCACATTAAATCCCCGTTTTATCAGCGTCTTCCCCAGGACCCCACCTAC
AAAAATAGGGGTCTTCCTGGACTATGAGTGTGGGACCATCTCCTTCTTCAACATAAATGACCAGTCCC
TTATTTATACCCTGACATGTCGGTTTGAAGGCTTATTGAGGCCCTACATTGAGTATCCGTCCTATAAT
GAGCAAAATGGAACTCCCATAGTCATCTGCCCAGTCACCCAGGAATCAGAGAAAGAGGCCTCTTGGCA
AAGGGCCTCTGCAATCCCAGAGACAAGCAACAGTGAGTCCTCCTCACAGGCAACCACGCCCTTCCTCC
CCAGGGGTGAAATGTAGGATGAATCACATCCCACATTCTTCTTTAGGGATATTAAGGTCTCTCTCCCA
GATCCAAAGTCCCGCAGCAGCCGGCCAAGGTGGCTTCCAGATGAAGGGGGACTGGCCTGTCCACATGG
CTCCATCTGGCTAAGTGATCTTGAAATACCACCTCTCAGGTGAAGAACCGTCAGGAATTCCCATCTCA
TATCCTAATGGTTTGTTCATTATATTACACTTTCAGTAAAAAAAAAAAAAAAAAAA

NOV20a, CG53449-04

| | | | |
|---|---|---|---|
| Protein Sequence | SEQ ID NO: 490 | 347 aa | MW at 38208.5kD |

MALMLSLVLSLLKLGSGQWQVFGPDKPVQALVGEDAAFSCFLSPKTNAEAMEVRFFRGQFSSVVHLYR
DGKDQPFMQMPQYQGRTKLVKDSIAEGRISLRLENITVLDAGLYGCRISSQSYYQKAIWELQVSALGS
VPLISITGYVDPDIQLLCQSSGWFPRPTAKWKGPQGQDLSTDSRTNRDMHGLFDVEISLTVQENAGSI
SCSMRHAHLSREVESRVQIGDTFFEPISWHLATKVLGILCCGLFFGIVGLKIFFSKFQCKREREAWAG
ALFMVPAGTGSEMLPHPAASLLLVLASRGPGPKKENPGGTGLEKKARTGRIERRPETRSGGDSGSRDG
SPEALRF

| | | |
|---|---|---|
| NOV20b, CG53449-03 | SEQ ID NO: 491 | 1969 bp |

| | | |
|---|---|---|
| DNA Sequence | ORF Start: ATG at 95 | ORF Stop: TAG at 1595 |

AGCATTAGGCCAGTTCTCCTCTTCTCTCTAATCCATCCGTCACCTCTCCTGTCATCCGTTTCCATGCC
GTGAGGTCCATTCACAGAACACATCCATGGCTCTCATGCTCAGTTTGGTTCTGAGTCTCCTCAAGCTG
GGATCAGGGCAGTGGCAGGTGTTTGGGCCAGACAAGCCTGTCCAGGCCTTGGTGGGGGAGGACGCAGC
ATTCTCCTGTTTCCTGTCTCCTAAGACCAATGCAGAGGCCATGGAAGTGCGGTTCTTCAGGGGCCAGT
TCTCTAGCGTGGTCCACCTCTACAGGGACGGGAAGGACCAGCCATTTATGCAGATGCCACAGTATCAA
GGCAGGACAAAACTGGTGAAGGATTCTATTGCGGAGGGGCGCATCTCTCTGAGGCTGGAAAACATTAC
TGTGTTGGATGCTGGCCTCTATGGGTGCAGGATTAGTTCCCAGTCTTACTACCAGAAGGCCATCTGGG
AGCTACAGGTGTCAGCACTGGGCTCAGTTCCTCTCATTTCCATCACGGGATATGTTGATAGAGACATC
CAGCTACTCTGTCAGTCCTCGGGCTGGTTCCCCCGGCCCACAGCGAAGTGGAAAGGTCCACAAGGACA
GGATTTGTCCACAGACTCCAGGACAAACAGAGACATGCATGGCCTGTTTGATGTGGAGATCTCTCTGA
CCGTCCAAGAGAACGCCGGGAGCATATCCTGTTCCATGCGGCATGCTCATCTGAGCCGAGAGGTGGAA
TCCAGGGTACAGATAGGAGATACCTTTTTCGAGCCTATATCGTGGCACCTGGCTACCAAAGTACTGGG
AATACTCTGCTGTGGCCTATTTTTTGGCATTGTTGGACTGAAGATTTTCTTCTCCAAATTCCAGTGGA
AAATCCAGGCGGAACTGGACTGGAGAAGAAAGCACGGACAGGCAGAATTGAGAGACGCCCGGAAACAC
GCAGTGGAGGTGACTCTGGATCCAGAGACGGCTCACCCGAAGCTCTGCGTTTCTGATCTGAAPACTGT
AACCCATAGAAAAGCTCCCCAGGAGGTGCCTCACTCTGAGAAGAGATTTACAAGGAAGAGTGTGGTGG
CTTCTCAGAGTTTCCAAGCAGGGAAACATTACTGGGAGGTGGACGGAGGACACAATAAAAGGTGGCGC
GTGGGAGTGTGCCGGGATGATGTGGACAGGAGGAAGGAGTACGTGACTTTGTCTCCCGATCATGGGTA
CTGGGTCCTCAGACTGAATGGAGAACATTTGTATTTCACATTAAATCCCCGTTTTATCAGCGTCTTCC
CCAGGACCCCACCTACAAAAATAGGGGTCTTCCTGGACTATGAGTGTGGGACCATCTCCTTCTTCAAC
ATAAATGACCAGTCCCTTATTTATACCCTGACATGTCGGTTTGAAGGCTTATTGAGGCCCTACATTGA
GTATCCGTCCTATAATGAGCAAAATGGAACTCCCATAGTCATCTGCCCAGTCACCCAGGAATCAGAGA
ACCACGCCCTTCCTCCCCAGGGGTGAAATGTAGGATGAATCACATCCCACATTCTTCTTTAGGGATAT
TAAGGTCTCTCTCCCAGATCCAAAGTCCCGCAGCAGCCGGCCAAGGTGGCTTCCAGATGAAGGGGGAC
TGGCCTGTCCACATGGGAGTCAGGTGTCATGGCTGCCCTGAGCTGGGAGGGAAGAAGGCTGACATTAC
ATTTAGTTTGCTCTCACTCCATCTGGCTAAGTGATCTTGAAATACCACCTCTCAGGTGAAGAACCGTC
AGGAATTCCCATCTCACAGGCTGTGGTGTAGATTAAGTAGACAAGGAATGTGAATAATGCTTAGATCT
TATTGATGACAGAGTGTATCCTAATGGTTTGTTCATTATATTACACTTTCAGTAAAAAAAAAAAA

NOV20b, CG53449-03

| | | | |
|---|---|---|---|
| Protein Sequence | SEQ ID NO: 492 | 500 aa | MW at 56747.1kD |

MALMLSLVLSLLKLGSGQWQVFGPDKPVQALVGEDAAFSCFLSPKTNAEAMEVRFFRGQFSSVVHLYR
DGKDQPFMQMPQYQGRTKLVKDSIAEGRISLRLENITVLDAGLYGCRISSQSYYQKAIWELQVSALGS
VPLISITGYVDRDIQLLCQSSGWFPRPTAKWKGPQGQDLSTDSRTNRDMHGLFDVEISLTVQENAGSI
SCSMRHAHLSREVESRVQIGDTFFEPISWHLATKVLGILCCGLFFGIVGLKIFFSKFQWKIQAELDWR
HYWEVDGGHNKRWRVGVCRDDVDRRKEYVTLSPDHGYWVLRLNGEHLYFTLNPRFISVFPRTPPTKIG
VFLDYECGTISFFNINDQSLIYTLTCRFEGLLRPYIEYPSYNEQNGTPIVICPVTQESEKEASWQRAS
AIPETSNSESSSQATTPFLPRGEM

| | | |
|---|---|---|
| NOV20c, CG53449-01 | SEQ ID NO: 493 | 252 bp |

| | | |
|---|---|---|
| DNA Sequence | ORF Start: ATG at 1 | ORF Stop: end of sequence |

ATGAACCCGGTACCTCAGATGGAAATGCAGAAATCACCCATGTTCTGCGTCGCTCACTCTGGGAGCTG
TAGACCGGAGCTGTTCCTATTCGGCCATCTTGGCTCCTCCCCCTCACTACAAAGGGTTTTGATGATTT
ATCTTTTGTATGTCTTCCCACAGGGCAGTGGCAGGTGTTTGGGCCAGACAAGCCTGTCCAGGCCTTGG
TGGGGGAGGACGCAGCATTCTCCTGTTTCCTGTCTCCTAAAACCAATG

NOV20c, CG53449-01

| | | | |
|---|---|---|---|
| Protein Sequence | SEQ ID NO: 494 | 84 aa | MW at 9453.1kD |

MNPVPQMEMQKSPMFCVAHSGSCRPELFLFGHLGSSPSLQRVLMYLLYVFPQGSGRCLGQTSLSRPW
WGRTQHSPVSCLLKPM

| | | |
|---|---|---|
| NOV20d, CG53449-02 | SEQ ID NO: 495 | 1495 bp |

| | | |
|---|---|---|
| DNA Sequence | ORF Start: ATG at 1 | ORF Stop: TGA at 1492 |

ATGAACCCGGTACCTCAGATGGAAATGCAGAAATCACCCATGTTCTGCGTCGCTCACTCTGGGAGCTG
TAGACCGGAGCTGTTCCTATTCGGCCATCTTGGCTCCTCCCCCTCACTACAAAGGGTTTTGATGATTT
ATCTTTTGTATGTCTTCCCACAGGGCAGTGGCAGGTGTTTGGGCCAGACAAGCCTGTCCAGGCCTTGG
TGGGGGAGGACGCAGCATTCTCCTGTTTCCTGTCTCCTAAAACCAATGCAGAGGCCATGGAAGTGCGG
TTCTTCAGGGGCCAGTTCTCTAGCGTGGTCCACCTCTACAGGGACGGGAAGGACCAGCCATTTATGCA
GATGCCACAGTATCAAGGCAGGACAAAACTGTGAAGGATTCTATTGCGGAGGGGCGCATCTCTCGAGG
CTGGAAAACATTACTGTGTTGGATGCTGGCCTCTATGGGTGCAGGATTAGTTCCCAGTCTTACTACCA
GAAGGCCATCTGGGAGCTACAGGTGTCAGCACTGGGCTCAGTTCCTCTCATTTCCATCACGGGATATG
TTGATAGAGACATCCAGCTACTCTGTCAGTCCTCGGGCTGGTTCCCCCGGCCCGTGCAAGGAGCCAGC
GTCGTGTTTGTGCCTTGTACACTCCTGTGTCCACCACTGAATATACTGTTTCTGTTTCAGGGAAAATC
CAGGCGGAACTGGGTAAGTATGTGTCATGTCCTGAGCCTCCCACACATGGTTCTCCCGGGTCCCTCCC
TGATCCACAGTTTGAGCCTCTGGACGACCCTGGCTGCAGGCTGGACAGGAAGCACCGACTGGAGAAGA
AAGCACGGACAGGCAGAATTGAGAGACGCCCGGAAACACGCAGTGGAGGTGACTCTGGATCCAGAGAC
GGCTCACCCGAAGCTCTGCGTTTCTGATCTGAAAACTGTAACCCATAGAAAAGCTCCCCAGGAGGTGC
CTCACTCTGAGAAGAGATTTACAAGGAAGAGTGTGGTGGCTTCTCAGAGTTTCCAAGCAGGGAAACAT
TACTGGGAGGTGGACGGAGGACACAATAAAAGGTGGCGCGTGGGAGTGTGCCGGGATGATGTGGACAG
GAGGAAGGAGTACGTGACTTTGTCTCCCGATCATGGGTACTGGGTCCTCAGACTGAATGGAGAACATT
TGTATTTCACATTAAATCCCCGTTTTATCAGCGTCTTCCCCAGGACCCCACCTACAAAAATAGGGGTC
TTCCTGGACTATGAGTGTGGGACCATCTCCTTCTTCAACATAAATGACCAGTCCCTTATTTATACCCT
GACATGTCGGTTTGAAGGCTTATTGAGGCCCTACATTGAGTATCCGTCCTATAATGAGCAAAATGGAA
CTCCCATAGTCATCTGCCCAGTCACCCAGGAATCAGAGAAAGAGGCCTCTTGGCAAAGGGCCTCTGCA
ATCCCAGAGACAAGCAACAGTGAAGTCCTCCTCACAGGCAACCACGCCCTTCCTCCCCAGGGGTGAA

NOV20d, CG53449-02

| | | | |
|---|---|---|---|
| Protein Sequence | SEQ ID NO: 496 | 497 aa | MW at 55724.3kD |

MNPVPQMEMQKSPMFCVAHSGSCRPELFLFGHLGSSPSLQRVLMTYLLYVFPQGSGRCLGQTSLSRPW
WGRTQHSPVSCLLKPMQRPWKCGSSGASSLAWSTSTGTGRTSHLCRCHSIKAGQNCEGFYCGGAHLSR
LENITVLDAGLYGCRISSQSYYQKAIWELQVSALGSVPLISITGYVDRDIQLLCQSSGWFPRPVQGAS
VVFVPCTLLCPPLNILFLFQGKSRRNWVSMCHVLSLPHNVLPGPSLIHSLSLWTTLAAGWTGSTDWRR
KHGQAELRDARKHAVEVTLDPETAHPKLCVSDLKTVTHRKAPQEVPHSEKRFTRKSVVASQSFQAGKH
YWEVDGGHNKRWRVGVCRDDVDRRKEYVTLSPDHGYWVLRLNGEHLYFTLNPRFISVFPRTPPTKIGV
FLDYECGTISFFNINDQSLIYTLTCRFEGLLRPYIEYPSYNEQNGTPIVICPVTQESEKEASWQRASA
IPETSNSEVLLTGNHALPPQG

| | | |
|---|---|---|
| NOV20e, CG53449-05 | SEQ ID NO: 497 | 661 bp |

| | | |
|---|---|---|
| DNA Sequence | ORF Start: at 11 | ORF Stop: at 653 |

CACCAAGCTTCAGTGGCAGGTGTTTGGGCCAGACAAGCCTGTCCAGGCCTTGGTGGGGGAGGACGCAG
CATTCTCCTGTTTCCTGTCTCCTAAGACCAATGCAGAGGCCATGGAAGTGCGGTTCTTCAGGGGCCAG
TTCTCTAGCGTGGTCCACCTCTACAGGGACGGGAAGGACCAGCCATTTATGCAGATGCCACAGTATCA
AGGCAGGACAAAACTGGTGAAGGATTCTATTGCGGAGGGGCGCATCTCTCTGAGGCTGGAAAACATTA
CTGTGTTGGATGCTGGCCTCTATGGGTGCAGGATTAGTTCCCAGTCTTACTACCAGAAGGCCATCTGG
GAGCTACAGGTGTCAGCACTGGGCTCAGTTCCTCTCATTTCCATCACGGGATATGTTGATAGAGACAT
CCAGCTACTCTGTCAGTCCTCGGGCTGGTTCCCCCGGCCCACAGCGAAGTGGAAAGGTCCACAAGGAC
AGGATTTGTCCACAGACTCCAGGACAAACAGAGACATGCATGGCCTGTTTGATGTGGAGATCTCTCTG
ACCGTCCAAGAGAACGCCGGGAGCATATCCTGTTCCATGCGGCATGCTCATCTGAGCCGAGAGGTGGA
ATCCAGGGTACAGATAGGAGATACCTTTTTCGAGCCTATACTCGAGGGC

NOV20e, CG53449-05

| | | | |
|---|---|---|---|
| Protein Sequence | SEQ ID NO: 498 | 214 aa | MW at 24072.0kD |

QWQVFGPDKPVQALVGEDAAFSCFLSPKTNAEAMEVRFFRGQFSSVVHLYRDGKDQPFMQMPQYQGRT
KLVKDSIAEGRISLRLENITVLDAGLYGCRISSQSYYQKAIWELQVSALGSVPLISITGYVDRDIQLL
CQSSGWFPRPTAKWKGPQGQDLSTDSRTNRDMHGLFDVEISLTVQENAGSISCSMRHAHLSREVESRV
QIGDTFFEPI

| | | |
|---|---|---|
| NOV20f, CG53449-06 | SEQ ID NO: 499 | 1066 bp |

| | | |
|---|---|---|
| DNA Sequence | ORF Start: ATG at 17 | ORF Stop: at 1058 |

CACCAAGCTTCCCACCATGGCTCTCATGCTCAGTTTGGTTCTGAGTCTCCTCAAGCTGGGATCAGGGC
AGTGGCAGGTGTTTGGGCCAGACAAGCCTGTCCAGGCCTTGGTGGGGGAGGACGCAGCATTCTCCTGT
TTCCTGTCTCCTAAGACCAATGCAGAGGCCATGGAAGTGCGGTTCTTCAGGGGCCAGTTCTCTAGCGT
GGTCCACCTCTACAGGGACGGGAAGGACCAGCCATTTATGCAGATGCCACAGTATCAAGGCAGGACAA
AACTGGTGAAGGATTCTATTGCGGAGGGGCGCATCTCTCTGAGGCTGGAAAACATTACTGTGTTGGAT
GCTGGCCTCTATGGGTGCAGGATTAGTTCCCAGTCTTACTACCAGAAGGCCATCTGGGAGCTACAGGT
GTCAGCACTGGGCTCAGTTCCTCTCATTTCCATCACGGGATATGTTGATAGAGACATCCAGCTACTCT
GTCAGTCCTCGGGCTGGTTCCCCCGGCCCACAGCGAAGTGGAAAGGTCCACAAGGACAGGATTTGTCC
ACAGACTCCAGGACAAACAGAGACATGCATGGCCTGTTTGATGTGGAGATCTCTCTGACCGTCCAAGA
GAACGCCGGGAGCATATCCTGTTCCATGCGGCATGCTCATCTGAGCCGAGAGGTGGAATCCAGGGTAC
AGATAGGAGATACCTTTTTCGAGCCTATATCGTGGCACCTGGCTACCAAAGTACTGGGAATACTCTGC
TGTGGCCTATTTTTTGGCATTGTTGGACTGAAGATTTTCTTCTCCAAATTCCAGTGTAAGCGAGAGAG
AGAAGCATGGGCCGGTGCCTTATTCATGGTTCCAGCAGGGACAGGATCAGAGATGCTCCCACATCCAG
CTGCTTCTCTTCTTCTAGTCCTAGCCTCCAGGGGCCCAGGCCCAAAAAAGGAAAATCCAGGCGGAACT
GGACTGGAGAAGAAAGCACGGACAGGCAGAATTGAGAGACGCCCGGAAACACGCAGTGGAGGTGACTC
TGGATCCAGAGACGGCTCACCCGAAGCTCTGCGTTTCCTCGAGGGC

NOV20f, CG53449-06

| | | | |
|---|---|---|---|
| Protein Sequence | SEQ ID NO: 500 | 347 aa | MW at 38208.5kD |

MALMLSLVLSLLKLGSGQWQVFGPDKPVQALVGEDAAFSCFLSPKTNAEAMEVRFFRGQFSSVVHLYR
DGKDQPFMQMPQYQGRTKLVKDSIAEGRISLRLENITVLDAGLYGCRISSQSYYQKAIWELQVSALGS
VPLISITGYVDRDIQLLCQSSGWFPRPTAKWKGPQGQDLSTDSRTNRDMHGLFDVEISLTVQENAGSI
SCSMRHAHLSREVESRVQIGDTFFEPISWHLATKVLGILCCGLFFGIVGLKIFFSKFQCKREREAWAG
ALFMVPAGTGSEMLPHPAASLLLVLASRGPGPKKENPGGTGLEKKARTGRIERRPETRSGGDSGSRDG
SPEALRF

| | |
|---|---|
| SEQ ID NO: 501 | 1969 bp |

| | | |
|---|---|---|
| NOV20g, SNP13382434 of | ORF Start: ATG at 95 | ORF Stop: TAG at 1595 |

| | | |
|---|---|---|
| CG53449-03, DNA Sequence | SNP Pos: 396 | SNP Change: T to C |

AGCATTAGGCCAGTTCTCCTCTTCTCTCTAATCCATCCGTCACCTCTCCTGTCATCCGTTTCCATGCC
GTGAGGTCCATTCACAGAACACATCCATGGCTCTCATGCTCAGTTTGGTTCTGAGTCTCCTCAAGCTG
GGATCAGGGCAGTGGCAGGTGTTTGGGCCAGACAAGCCTGTCCAGGCCTTGGTGGGGGAGGACGCAGC
ATTCTCCTGTTTCCTGTCTCCTAAGACCAATGCAGAGGCCATGGAAGTGCGGTTCTTCAGGGGCCAGT
TCTCTAGCGTGGTCCACCTCTACAGGGACGGGAAGGACCAGCCATTTATGCAGATGCCACAGTATCAA
GGCAGGACAAAACTGGTGAAGGATTCTATTGCGGAGGGGCGCATCTCTCTGAGGCCGGAAAACATTAC
TGTGTTGGATGCTGGCCTCTATGGGTGCAGGATTAGTTCCCAGTCTTACTACCAGAAGGCCATCTGGG
AGCTACAGGTGTCAGCACTGGGCTCAGTTCCTCTCATTTCCATCACGGGATATGTTGATAGAGACATC
CAGCTACTCTGTCAGTCCTCGGGCTGGTTCCCCCGGCCCACAGCGAAGTGGAAAGGTCCACAAGGACA
GGATTTGTCCACAGACTCCAGGACAAACAGAGACATGCATGGCCTGTTTGATGTGGAGATCTCTCTGA
CCGTCCAAGAGAACGCCGGGAGCATATCCTGTTCCATGCGGCATGCTCATCTGAGCCGAGAGGTGGAA
TCCAGGGTACAGATAGGAGATACCTTTTTCGAGCCTATATCGTGGCACCTGGCTACCAAAGTACTGGG
AAATCCAGGCGGAACTGGACTGGAGAAGAAAGCACGGACAGGCAGAATTGAGAGACGCCCGGAAACAC
GCAGTGGAGGTGACTCTGGATCCAGAGACGGCTCACCCGAAGCTCTGCGTTTCTGATCTGAAAACTGT
AACCCATAGAAAAGCTCCCCAGGAGGTGCCTCACTCTGAGAAGAGATTTACAAGGAAGAGTGTGGTGG
CTTCTCAGAGTTTCCAAGCAGGGAAACATTACTGGGAGGTGGACGGAGGACACAATAAAAGGTGGCGC
GTGGGAGTGTGCCGGGATGATGTGGACAGGAGGAAGGAGTACGTGACTTTGTCTCCCGATCATGGGTA
CTGGGTCCTCAGACTGAATGGAGAACATTTGTATTTCACATTAAATCCCCGTTTTATCAGCGTCTTCC
CCAGGACCCCACCTACAAAAATAGGGGTCTTCCTGGACTATGAGTGTGGGACCATCTCCTTCTTCAAC
ATAAATGACCAGTCCCTTATTTATACCCTGACATGTCGGTTTGAAGGCTTATTGAGGCCCTACATTGA
GTATCCGTCCTATAATGAGCAAAATGGAACTCCCATAGTCATCTGCCCAGTCACCCAGGAATCAGAGA
AAGAGGCCTCTTGGCAAAGGGCCTCTGCAATCCCAGAGACAAGCAACAGTGAATCCTCCTCACAGGCA
ACCACGCCCTTCCTCCCCAGGGGTGAAATGTAGGATGAATCACATCCCACATTCTTCTTTAGGGATAT
TAAGGTCTCTCTCCCAGATCCAAAGTCCCGCAGCAGCCGGCCAAGGTGGCTTCCAGATGAAGGGGGAC
TGGCCTGTCCACATGGGAGTCAGGTGTCATGGCTGCCCTGAGCTGGGAGGGAAGAAGGCTGACATTAC
ATTTAGTTTGCTCTCACTCCATCTGGCTAAGTGATCTTGAAATACCACCTCTCAGGTGAAGAACCGTC
AGGAATTCCCATCTCACAGGCTGTGGTGTAGATTAAGTAGACAAGGAATGTGAATAATGCTTAGATCT
TATTGATGACAGAGTGTATCCTAATGGTTTGTTCATTATATTACACTTTCAGTAAAAAAAAAAAA

| | | |
|---|---|---|
| NOV20g, SNP13382434 of | SEQ ID NO: 502 | MW at 56731.1kD |

| | | | |
|---|---|---|---|
| CG53449-03, Protein Sequence | SNP Pos: 101 | 500 aa | SNP Change: Leu to Pro |

MALMLSLVLSLLKLGSGQWQVFGPDKPVQALVGEDAAFSCFLSPKTNAEAMEVRFFRGQFSSVVHLYR
DGKDQPFMQMPQYQGRTKLVKDSIAEGRISLRPENITVLDAGLYGCRISSQSYYQKAIWELQVSALGS
VPLISITGYVDRDIQLLCQSSGWFPRPTAKWKGPQGQDLSTDSRTNRDMHGLFDVEISLTVQENAGSI
SCSMRHAHLSREVESRVQIGDTFFEPISWHLATKVLGILCCGLFFGIVGLKIFFSKFQWKIQAELDWR
RKNGQAELRDARKHAVEVTLDPETAHPKLCVSDLKTVTHRKAPQEVPHSEKRFTRKSVVASQSFQAGK
HYWEVDGGHNKRWRVGVCRDDVDRRKEYVTLSPDHGYWVLRLNGEHLYFTLNPRFISVFPRTPPTKIG
VFLDYECGTISFFNINDQSLIYTLTCRFEGLLRPYIEYPSYNEQNGTPIVICPVTQESEKEASWQRAS
AIPETSNSESSSQATTPFLPRGEM

| | |
|---|---|
| SEQ ID NO: 503 | 1969 bp |

| | | |
|---|---|---|
| NOV20h, SNP13382441 of | ORF Start: ATG at 95 | ORF Stop: TAG at 1595 |

| | | |
|---|---|---|
| CG53449-03, DNA Sequence | SNP Pos: 1549 | SNP Change: A to G |

AGCATTAGGCCAGTTCTCCTCTTCTCTCTAATCCATCCGTCACCTCTCCTGTCATCCGTTTCCATGCC
GTGAGGTCCATTCACAGAACACATCCATGGCTCTCATGCTCAGTTTGGTTCTGAGTCTCCTCAAGCTG
GGATCAGGGCAGTGGCAGGTGTTTGGGCCAGACAAGCCTGTCCAGGCCTTGGTGGGGGAGGACGCAGC
ATTCTCCTGTTTCCTGTCTCCTAAGACCAATGCAGAGGCCATGGAAGTGCGGTTCTTCAGGGGCCAGT
TCTCTAGCGTGGTCCACCTCTACAGGGACGGGAAGGACCAGCCATTTATGCAGATGCCACAGTATCAA
GGCAGGACAAAACTGGTGAAGGATTCTATTGCGGAGGGGCGCATCTCTCTGAGGCTGGAAAACATTAC
TGTGTTGGATGCTGGCCTCTATGGGTGCAGGATTAGTTCCCAGTCTTACTACCAGAAGGCCATCTGGG
AGCTACAGGTGTCAGCACTGGGCTCAGTTCCTCTCATTTCCATCACGGGATATGTTGATAGAGACATC
CAGCTACTCTGTCAGTCCTCGGGCTGGTTCCCCCGGCCCACAGCGAAGTGGAAAGGTCCACAAGGACA
GGATTTGTCCACAGACTCCAGGACAAACAGAGACATGCATGGCCTGTTTGATGTGGAGATCTCTCTGA
CCGTCCAAGAGAACGCCGGGAGCATATCCTGTTCCATGCGGCATGCTCATCTGAGCCGAGAGGTGGAA
TCCAGGGTACAGATAGGAGATACCTTTTTCGAGCCTATATCGTGGCACCTGGCTACCAAAGTACTGGG
AATACTCTGCTGTGGCCTATTTTTTGGCATTGTTGGACTGAAGATTTTCTTCTCCAAATTCCAGTGGA
AAATCCAGGCGGAACTGGACTGGAGAAGAAAGCACGGACAGGCAGAATTGAGAGACGCCCGGAAACAC
GCAGTGGAGGTGACTCTGGATCCAGAGACGGCTCACCCGAAGCTCTGCGTTTCTGATCTGAAAACTGT
AACCCATAGAAAAGCTCCCCAGGAGGTGCCTCACTCTGAGAAGAGATTTACAAGGAAGAGTGTGGTGG
CTTCTCAGAGTTTCCAAGCAGGGAAACATTACTGGGAGGTGGACGGAGGACACAATAAAAGGTGGCGC
GTGGGAGTGTGCCGGGATGATGTGGACAGGAGGAAGGAGTACGTGACTTTGTCTCCCGATCATGGGTA
CTGGGTCCTCAGACTGAATGGAGAACATTTGTATTTCACATTAAATCCCCGTTTTATCAGCGTCTTCC
ATAAATGACCAGTCCCTTATTTATACCCTGACATGTCGGTTTGAAGGCTTATTGAGGCCCTACATTGA
GTATCCGTCCTATAATGAGCAAAATGGAACTCCCATAGTCATCTGCCCAGTCACCCAGGAATCAGAGA
AAGAGGCCTCTTGGCAAAGGGCCTCTGCAATCCCAGAGACAAGCAACAGTGAGTCCTCCTCACAGGCA
TGGCCTGTCCACATGGGAGTCAGGTGTCATGGCTGCCCTGAGCTGGGAGGGAAGAAGGCTGACATTAC
ATTTAGTTTGCTCTCACTCCATCTGGCTAAGTGATCTTGAAATACCACCTCTCAGGTGAAGAACCGTC
AGGAATTCCCATCTCACAGGCTGTGGTGTAGATTAAGTAGACAAGGAATGTGAATAATGCTTAGATCT
TATTGATGACAGAGTGTATCCTAATGGTTTGTTCATTATATTACACTTTCAGTAAAAAAAAAAAA

| | | |
|---|---|---|
| NOV20h, SNP13382441 of | SEQ ID NO: 504 | MW at 56747.1kD |

| | | | |
|---|---|---|---|
| CG53449-03, Protein Sequence | 500 aa | SNP Pos: 485 | SNP Change: Glu to Glu |

MALMLSLVLSLLKLGSGQWQVFGPDKPVQALVGEDAAFSCFLSPKTNAEAMEVRFFRGQFSSVVHLYR
DGKDQPFMQMPQYQGRTKLVKDSIAEGRISLRLENITVLDAGLYGCRISSQSYYQKAIWELQVSALGS
VPLISITGYVDRDIQLLCQSSGWFPRPTAKWKGPQGQDLSTDSRTNRDMHGLFDVEISLTVQENAGSI
SCSMRHAHLSREVESRVQIGDTFFEPISWHLATKVLGILCCGLFFGIVGLKIFFSKFQWKIQAELDWR
RKHGQAELRDARKHAVEVTLDPETAHPKLCVSDLKTVTHRKAPQEVPHSEKRFTRKSVVASQSFQAGK
HYWEVDGGHNKRWRVGVCRDDVDRRKEYVTLSPDHGYWVLRLNGEHLYFTLNPRFISVFPRTPPTKIG
VFLDYECGTISFFNINDQSLIYTLTCRFEGLLRPYIEYPSYNEQNGTPIVICPVTQESEKEASWQRAS
AIPETSNSESSSQATTPFLPRGEM

[0466] A ClustalW comparison of the above protein sequences yields the following sequence alignment shown in Table 20B.

TABLE 20B
Comparison of the NOV20 protein sequences.

| | |
|---|---|
| NOV20a | MALMLSLVLSLLKLGSGQWQVFGPDKPVQALVGEDAAFSCFLSPKTNAEAMEVRFFRGQF |
| NOV20b | MALMLSLVLSLLKLGSGQWQVFGPDKPVQALVGEDAAFSCFLSPKTNAEAMEVRFFRGQF |
| NOV20c | --MNPVPQMEMQKSPMFCVAHSGSCRPELFLFGHLGSSPSLQRVLMIYLLYVFPQ |
| NOV20d | --MNPVPQMEMQKSPMFCVAHSGSCRPELFLFGHLGSSPSLQRVLMIYLLYVFPQ |
| NOV20e | -----------------QWQVFGPDKPVQALVGEDAAFSCFLSPKTNAEAMEVRFFRGQF |
| NOV20f | MALMLSLVLSLLKLGSGQWQVFGPDKPVQALVGEDAAFSCFLSPKTNAEAMEVRFFRGQF |
| NOV20a | SSVVHLYRDGKDQPFMQMPQYQGRTKLVKDSIAEGRIS---------------------- |
| NOV20b | SSVVHLYRDGKDQPFMQMPQYQGRTKLVKDSIAEGRIS---------------------- |
| NOV20c | GSGRCLGQTSLSRPWWGRTQHSPVSCLLKPM----------------------------- |
| NOV20d | GSGRCLGQTSLSRPWWGRTQHSPVSCLLKPMQRPWKCGSSGASSLAWSTSTGTGRTSHLC |
| NOV20e | SSVVHLYRDGKDQPFMQMPQYQGRTKLVKDSIAEGRIS---------------------- |
| NOV20f | SSVVHLYRDGKDQPFMQMPQYQGRTKLVKDSIAEGRIS---------------------- |
| NOV20a | ---------------------LRLENITVLDAGLYGCRISSQSYYQKAIWELQVSALGSV |
| NOV20b | ---------------------LRLENITVLDAGLYGCRISSQSYYQKAIWELQVSALGSV |
| NOV20c | ------------------------------------------------------------ |
| NOV20d | RCHSIKAGQNCEGFYCGGAHLSRLENITVLDAGLYGCRISSQSYYQKAIWELQVSALGSV |
| NOV20e | ---------------------LRLENITVLDAGLYGCRISSQSYYQKAIWELQVSALGSV |
| NOV20f | ---------------------LRLENITVLDAGLYGCRISSQSYYQKAIWELQVSALGSV |
| NOV20a | PLISITGYVDRDIQLLCQSSGWFPRPTAKWKGPQGQDLSTDSRTNRDMHGLFDVEISLTV |
| NOV20b | PLISITGYVDRDIQLLCQSSGWFPRPTAKWKGPQGQDLSTDSRTNRDMHGLFDVEISLTV |
| NOV20c | ------------------------------------------------------------ |
| NOV20d | PLISITGYVDRDIQLLCQSSGWFPRPVQGAS------VVFVPCTLLCPPLNILFLFQGKS |
| NOV20e | PLISITGYVDRDIQLLCQSSGWFPRPTAKWKGPQGQDLSTDSRTNRDMHGLFDVEISLTV |
| NOV20f | PLISITGYVDRDIQLLCQSSGWFPRPTAKWKGPQGQDLSTDSRTNRDMHGLFDVEISLTV |
| NOV20a | QENAGSISCSMRHAHLSREVESRVQIGDTFFEPISWHLATKVLGILCCGLFFGIVGLKIF |
| NOV20b | QENAGSISCSMRHAHLSREVESRVQIGDTFFEPISWHLATKVLGILCCGLFFGIVGLKIF |
| NOV20c | ------------------------------------------------------------ |
| NOV20d | RRNWVSMCHVLSLPHMVLPGPSLIHSLSLWTTLAAGWTGSTDWRRKHGQAELRDARKHAV |
| NOV20e | QENAGSISCSMRHAHLSREVESRVQIGDTFFEPI-------------------------- |
| NOV20f | QENAGSISCSMRHAHLSREVESRVQIGDTFFEPISWHLATKVLGILCCGLFFGIVGLKIF |
| NOV20a | FSKFQCKRERE--------------------------------AWAGALFMVPAGTGSEM |
| NOV20b | FSKFQWKIQAELDWRRKHGQAELRDARKHAVEVTLDPETAHPKLCVSDLKTVTHRKAPQE |
| NOV20c | ------------------------------------------------------------ |
| NOV20d | EVTLDPETAHP-------------------------------KLCVSDLKTVTHRKAPQE |
| NOV20e | ------------------------------------------------------------ |
| NOV20f | FSKFQCKRERE--------------------------------AWAGALFMVPAGTGSEM |
| NOV20a | LPHP---AASLLLVLASRGPGPKKENPGGTGLEKKARTGRIERRPETRSGGDSGSRDGSP |
| NOV20b | VPHSEKRFTRKSVVASQSFQAGKHYWEVDGGHNKRWRVGVCRDDVDRRKEYVTLSPDHGY |
| NOV20c | ------------------------------------------------------------ |
| NOV20d | VPHSEKRFTRKSVVASQSFQAGKHYWEVDGGHNKRWRVGVCRDDVDRRKEYVTLSPDHGY |
| NOV20e | ------------------------------------------------------------ |
| NOV20f | LPHP---AASLLLVLASRGPGPKKENPGGTGLEKKARTGRIERRPETRSGGDSGSRDGSP |
| NOV20a | EALRF------------------------------------------------------- |
| NOV20b | WVLRLNGEHLYFTLNPRFISVFPRTPPTKIGVFLDYECGTISFFNINDQSLIYTLTCRFE |
| NOV20c | ------------------------------------------------------------ |
| NOV20d | WVLRLNGEHLYFTLNPRFISVFPRTPPTKIGVFLDYECGTISFFNINDQSLIYTLTCRFE |
| NOV20e | ------------------------------------------------------------ |
| NOV20f | EALRF------------------------------------------------------- |
| NOV20a | ------------------------------------------------------------ |
| NOV20b | GLLRPYIEYPSYNEQNGTPIVICPVTQESEKEASWQRASAIPETSNSESSSQATTPFLPR |
| NOV20c | ------------------------------------------------------------ |
| NOV20d | GLLRPYIEYPSYNEQNGTPIVICPVTQESEKEASWQRASAIPETSNSEVLLTGNHALPPQ |
| NOV20e | ------------------------------------------------------------ |
| NOV20f | ------------------------------------------------------------ |
| NOV20a | --- |
| NOV20b | GEM |
| NOV20c | --- |
| NOV20d | G-- |
| NOV20e | --- |
| NOV20f | --- |
| NOV20a | (SEQ ID NO: 490) |
| NOV20b | (SEQ ID NO: 492) |
| NOV20c | (SEQ ID NO: 494) |
| NOV20d | (SEQ ID NO: 496) |
| NOV20e | (SEQ ID NO: 498) |
| NOV20f | (SEQ ID NO: 500) |

[0467] Further analysis of the NOV20a protein yielded the following properties shown in Table 20C.

TABLE 20C
Protein Sequence Properties NOV20a

| | |
|---|---|
| SignalP analysis: | Cleavage site between residues 18 and 19 |
| PSORT II analysis: | |

| PSG: | a new signal peptide prediction method | |
|---|---|---|
| | N-region: | length 0; pos. chg 0; neg. chg 0 |
| | H-region: | length 12; peak value 10.45 |
| | PSG score: | 6.05 |

| | |
|---|---|
| GvH: | von Heijne's method for signal seq. recognition |
| | GvH score (threshold: −2.1): −0.59 |
| | possible cleavage site: between 17 and 18 |

>>> Seems to have a cleavable signal peptide (1 to 17)

| ALOM: | Klein et al's method for TM region allocation | | |
|---|---|---|---|
| | Init position for calculation: 18 | | |
| | Tentative number of TMS(s) for the threshold 0.5: 1 | | |
| | Number of TMS(s) for threshold 0.5: 1 | | |
| | INTEGRAL | Likelihood = | Transmembrane 242-258 |
| | | −7.06 | |

| | |
|---|---|
| PERIPHERAL | Likelihood = 2.17 (at 126) |

| | |
|---|---|
| | ALOM score: −7.06 (number of TMSs: 1) |
| MTOP: | Prediction of membrane topology (Hartmann et al.) |
| | Center position for calculation: 8 |
| | Charge difference: 0.0 C(1.0)-N(1.0) |
| | N >= C: N-terminal side will be inside |

>>> membrane topology: type 1a (cytoplasmic tail 259 to 347)

| MITDISC: | discrimination of mitochondrial targeting seq | | | |
|---|---|---|---|---|
| | R content: | 0 | Hyd Moment(75): | 1.22 |
| | Hyd Moment(95): | 2.65 | G content: | 3 |
| | D/E content: | 1 | S/T content: | 3 |

| | |
|---|---|
| | Score: −6.60 |
| Gavel: | prediction of cleavage sites for mitochondrial preseq |
| | cleavage site motif not found |

NUCDISC: discrimination of nuclear localization signals

| | |
|---|---|
| | pat4: none |
| | pat7: none |
| | bipartite: none |
| | content of basic residues: 11.8% |
| | NLS Score: −0.47 |
| KDEL: | ER retention motif in the C-terminus: none |

ER Membrane Retention Signals: none
SKL: peroxisomal targeting signal in the C-terminus: none
PTS2: 2nd peroxisomal targeting signal: none
VAC: possible vacuolar targeting motif: none
RNA-binding motif: none
Actinin-type actin-binding motif:

type 1: none
type 2: none

NMYR: N-myristoylation pattern: none
Prenylation motif: none
memYQRL: transport motif from cell surface to Golgi: none
Tyrosines in the tail: too long tail
Dileucine motif in the tail: found

LL at 293

checking 63 PROSITE DNA binding motifs: none
checking 71 PROSITE ribosomal protein motifs: none
checking 33 PROSITE prokaryotic DNA binding motifs: none

| | |
|---|---|
| NNCN: | Reinhardt's method for Cytoplasmic/Nuclear discrimination |
| | Prediction: cytoplasmic |
| | Reliability: 76.7 |
| COIL: | Lupas' s algorithm to detect coiled-coil regions |
| | total: 0 residues |

Final Results (k = 9/23):

44.4%: endoplasmic reticulum
22.2%: Golgi
22.2%: extracellular, including cell wall
11.1%: plasma membrane

>> prediction for CG53449-04 is end (k = 9)

[0468] A search of the NOV20a protein against the Geneseq database, a proprietary database that contains sequences published in patents and patent publication, yielded several homologous proteins shown in Table 20D.

TABLE 20D
Geneseq Results for NOV20a

| | | NOV20a | Identities/ | |
|---|---|---|---|---|
| | | Residues/ | Similarities for | |
| Geneseq | Protein/Organism/Length | Match | the Matched | Expect |
| Identifier | [Patent #, Date] | Residues | Region | Value |
| AAU83681 | Human PRO protein, Seq ID No 180 - | 1 . . . 268 | 264/268 (98%) | e−152 |
| | Homo sapiens, 500 aa. | 1 . . . 268 | 265/268 (98%) | |
| | [WO200208288-A2, 31-JAN-2002] | | | |
| ABB84917 | Human PRO1347 protein sequence | 1 . . . 268 | 264/268 (98%) | e−152 |
| | SEQ ID NO: 202 - Homo sapiens, 500 | 1 . . . 268 | 265/268 (98%) | |
| | aa. [WO200200690-A2, 03-JAN-2002] | | | |
| AAE20317 | Human B7-H13 protein #1 - Homo | 1 . . . 268 | 264/268 (98%) | e−152 |
| | sapiens, 461 aa. [WO200202587-A1 , | 1 . . . 268 | 265/268 (98%) | |
| | 10-JAN-2002] | | | |
| ABB95523 | Human angiogenesis related protein | 1 . . . 268 | 264/268 (98%) | e−152 |
| | PRO1347 SEQ ID NO: 202 - Homo | 1 . . . 268 | 265/268 (98%) | |
| | sapiens, 500 aa. [WO200208284-A2, | | | |
| | 31-JAN-2002] | | | |
| ABG95892 | Human secreted/transmembrane | 1 . . . 268 | 264/268 (98%) | e−152 |
| | protein PRO1347 - Homo sapiens, 500 | 1 . . . 268 | 265/268 (98%) | |
| | aa. [US2002119130-A1, 29-AUG-2002] | | | |

[0469] In a BLAST search of public sequence databases, the NOV20a protein was found to have homology to the proteins shown in the BLASTP data in Table 20E.

TABLE 20E
Public BLASTP Results for NOV20a

| | | NOV20a | | | |
|---|---|---|---|---|---|
| Protein | | Residues/ | Identities/ | | |
| Accession | | Match | Similarities for the | | Expect |
| Number | Protein/Organism/Length | Residues | Matched Portion | | Value |
| Q9H730 | Hypothetical protein FLJ21458 - | 1 . . . 347 | 347/347 | (100%) | 0.0 |
| | Homo sapiens (Human), 347 aa. | 1 . . . 347 | 347/347 | (100%) | |
| Q9Y2C7 | Butyrophilin like receptor - Homo | 1 . . . 157 | 111/157 | (70%) | 5e−55 |
| | sapiens (Human), 432 aa. | 1 . . . 157 | 126/157 | (79%) | |
| O73716 | B-G-like protein - Grus americana | 7 . . . 268 | 103/266 | (38%) | 3e−45 |
| | (whooping crane), 280 aa. | 17 . . . 280 | 154/266 | (57%) | |
| Q96DM5 | Hypothetical protein FLJ32535 - | 2 . . . 252 | 104/259 | (40%) | 3e−44 |
| | Homo sapiens (Human), 315 aa. | 19 . . . 277 | 159/259 | (61%) | |
| P18892 | Butyrophilin precursor (BT) - Bos | 3 . . . 249 | 96/254 | (37%) | 3e−42 |
| | taurus (Bovine), 526 aa. | 13 . . . 266 | 153/254 | (59%) | |

[0470] PFam analysis predicts that the NOV20a protein contains the domains shown in the Table 20F.

TABLE 20F
Domain Analysis of NOV20a

| | | | |
|---|---|---|---|
| Pfam | NOV20a | Identities/ | Expect |
| Domain | Match Region | Similarities | Value |
| | | for the | |
| | | Matched Region | |

### Example 21

[0471] The NOV21 clone was analyzedi and the nucleotide and encoded polypeptide sequences are shown in Table 21A.

TABLE 21A
NOV21 Sequence Analysis

| | | |
|---|---|---|
| NOV21a, CG53908-01 | SEQ ID NO: 505 | 2881 bp |

| | | |
|---|---|---|
| DNA Sequence | ORF Start: ATG at 87 | ORF Stop: TGA at 2784 |

AGCTGGGGCTCCGGGCTGAGGCGCTAAAGCCGCCCTCCCGCCCGCGGGGCCCCGCGCCCGGCCCGCCC
GCCTGCCCGCCCGCGGCCATGGCCGTCCGGCCCGGCCTGTGGCCAGCGCTCCTGGGCATAGTCCTCGC
CGGACCTGCTTCCCCACTTCCTGGTGGAGCCCGAGGATGTGTACATCGTCAAGAACAAGCCAGTGCTG
CTTGTGTGCAAGGCCGTGCCCGCCACGCAGATCTTCTTCAAGTGCAACGGGGAGTGGGTGCGCCAGGT
GGACCACGTGATCGAGCGCAGCACAGACGGGAGCAGTGGTGAGCCGACCATGGAGGTCCGCATTAATG
TCTCAAGGCAGCAGGTCGAGAAGGTGTTCGGGCTGGAGGAATACTGGTGCCAGTGCGTGGCATGGAGC
TCCTCGGGCACCACCAAGAGTCAGAAGGCCTACATCCGCATAGCCAGATTGCGCAAGAACTTCGAGCA
GGAGCCGCTGGCCAAGGAGGTGTCCCTGGAGCAGGGCATCGTGCTGCCCTGCCGTCCACCGGAGGGAA
TCCCTCCAGCCGAGGTGGAGTGGCTCCGGAACGAGGACCTGGTGGACCCGTCCCTGGACCCCAATGTA
TACATCACGCGGGAGCACAGCCTGGTGGTGCGACAGGCCCGCCTTGCTGACACGGCCAACTACACCTG
CGTGGCCAAGAACATCGTGGCACGTCGCCGCAGCGCCTCCGCTGCTGTCATCGTCTACGTGAACGGTG
GGTGGTCGACGTGGACCGAGTGGTCCGTCTGCAGCGCCAGCTGTGGGCGCGGCTGGCAGAAACGGAGC
CGGAGCTGCACCAACCCGGCGCCTCTCAACGGGGGCGCTTTCTGTGAGGGGCAGAATGTCCATGACCG
CACCGTCTCCTCTCTGCTTGTCTCTGTGGACGGCAGCTGGAGCCCGTGGAGCAAGTGGTCGGCCTGTG
GGCTGGACTGCACCCACTGGCGGAGCCGTGAGTGCTCTGACCCAGCACCCCGCAACGGAGGGGAGGAG
TGCCAGGGCACTGACCTGGACACCCGCAACTGTACCAGTGACCTCTGTGTACACAGTGCTTCTGGCCC
TGAGGACGTGGCCCTCTATGTGGGCCTCATCGCCGTGGCCGTCTGCCTGGTCCTGCTGCTGCTTGTCC
TCATCCTCGTTTATTGCCGGAAGAAGGAGGGGCTGGACTCAGATGTGGCTGACTCGTCCATTCTCACC
TCAGGCTTCCAGCCCGTCAGCATCAAGCCCAGCAAAGCAGACAACCCCCATCTGCTCACCATCCAGCC
GGACCTCAGCACCACCACCACCTACCAGGGCAGTCTCTGTCCCCGGCAGGATGGGCCCAGCCCCAAGT
TCCAGCTCACCAATGGGCACCTGCTCAGCCCCCTGGGTGGCGGCCGCCACACACTGCACCACAGCTCT
CCCACCTCTGAGGCCGAGGAGTTCGTCTCCCGCCTCTCCACCCAGAACTACTTCCGCTCCCTGCCCCG
AGGCACCAGCAACATGACCTATGGGACCTTCAACTTCCTCGGGGGCCGGCTGATGATCCCTAATACAG
GTATCAGCCTCCTCATCCCCCCAGATGCCATACCCCGAGGGAAGATCTATGAGATCTACCTCACGCTG
CACAAGCCGGAAGACGTGAGGTTGCCCCTAGCTGGCTGTCAGACCCTGCTGAGTCCCATCGTTAGCTG
TGGACCCCCTGGCGTCCTGCTCACCCGGCCAGTCATCCTGGCTATGGACCACTGTGGGGAGCCCAGCC
CTGACAGCTGGAGCCTGCGCCTCAAAAAGCAGTCGTGCGAGGGCAGCTGGGAGCAGGATGTGCTGCAC
CTGGGCGAGGAGGCGCCCTCCCACCTCTACTACTGCCAGCTGGAGGCCAGTGCCTGCTACGTCTTCAC
CGAGCAGCTGGGCCGCTTTGCCCTGGTGGGAGAGGCCCTCAGCGTGGCTGCCGCCAAGCGCCTCAAGC
TGCTTCTGTTTGCGCCGGTGGCCTGCACCTCCCTCGAGTACAACATCCGGGTCTACTGCCTGCATGAC
ACCCACGATGCACTCAAGGAGGTGGTGCAGCTGGAGAAGCAGCTGGGGGGACAGCTGATCCAGGAGCC
ACGGGTCCTGCACTTCAAGGACAGTTACCACAACCTGCGCCTATCCATCCACGATGTGCCCAGCTCCC
TGTGGAAGAGTAAGCTCCTTGTCAGCTACCAGGAGATCCCCTTTTATCACATCTGGAATGGCACGCAG
CGGTACTTGCACTGCACCTTCACCCTGGAGCGTGTCAGCCCCAGCACTAGTGACCTGGCCTGCAAGCT
GTGGGTGTGGCAGGTGGAGGGCGACGGGCAGAGCTTCAGCATCAACTTCAACATCACCAAGGACACAA
GGTTTGCTGAGCTGCTGGCTCTGGAGAGTGAAGCGGGGGTCCCAGCCCTGGTGGGCCCCAGTGCCTTC
AAGATCCCCTTCCTCATTCGGCAGAAGATAATTTCCAGCCTGGACCCACCCTGTAGGCGGGGTGCCGA
CTGGCGGACTCTGGCCCAGAAACTCCACCTGGACAGCCATCTCAGCTTCTTTGCCTCCAAGCCCAGCC
CCACAGCCATGATCCTCAACCTGTGGGAGGCGCGGCACTTCCCCAACGGCAACCTCAGCCAGCTGGCT
GCAGCAGTGGCTGGACTGGGCCAGCCAGACGCTGGCCTCTTCACAGTGTCGGAGGCTGAGTGCTGAGG
CCGGCCAGGCCCGACACCTACACTCTCACCAGCTTTGGCACCCACCAAGGACAGGCAGAAGCCGGACA
GGGGCCCTTCCCCACACCGGGGAGA

NOV21a, CG53908-01

| | | | |
|---|---|---|---|
| Protein Sequence | SEQ ID NO: 506 | 899 aa | MW at 99063.0kD |

MAVRPGLWPALLGIVLAAWLRGSGAQQSATVANPVPGANPDLLPHFLVEPEDVYIVKNKPVLLVCKAV
PATQIFFKCNGEWVRQVDHVIERSTDGSSGEPTMEVRINVSRQQVEKVFGLEEYWCQCVAWSSSGTTK
SQKAYIRIARLRKNFEQEPLAKEVSLEQGIVLPCRPPEGIPPAEVEWLRNEDLVDPSLDPNVYITREH
SLVVRQARLADTANYTCVAKNIVARRRSASAAVIVYVNGGWSTWTEWSVCSASCGRGWQKRSRSCTNP
APLNGGAFCEGQNVHDRTVSSLLVSVDGSWSPWSKWSACGLDCTHWRSRECSDPAPRNGGEECQGTDL
DTRNCTSDLCVHSASGPEDVALYVGLIAVAVCLVLLLLVLILVYCRKKEGLDSDVADSSILTSGFQPV
SIKPSKADNPHLLTIQPDLSTTTTYQGSLCPRQDGPSPKFQLTNGHLLSPLGGGRHTLHHSSPTSEAE
EFVSRLSTQNYFRSLPRGTSNMTYGTFNFLGGRLMIPNTGISLLIPPDAIPRGKIYEIYLTLHKPEDV
RLPLAGCQTLLSPIVSCGPPGVLLTRPVILAMDHCGEPSPDSWSLRLKKQSCEGSWEQDVLHLGEEAP
SHLYYCQLEASACYVFTEQLGRFALVGEALSVAAAKRLKLLLFAPVACTSLEYNIRVYCLHDTHDALK
EVVQLEKQLGGQLIQEPRVLHFKDSYHNLRLSIHDVPSSLWKSKLLVSYQEIPFYHIWNGTQRYLHCT
FTLERVSPSTSDLACKLWVWQVEGDGQSFSINFNITKDTRFAELLALESEAGVPALVGPSAFKIPFLI
RQKIISSLDPPCRRGADWRTLAQKLHLDSHLSFFASKPSPTAMILNLWEARHFPNGNLSQLAAAVAGL
GQPDAGLFTVSEAEC

| | | |
|---|---|---|
| NOV21b, CG53908-02 | SEQ ID NO: 507 | 993 bp |

| | | |
|---|---|---|
| DNA Sequence | ORF Start: at 1 | ORF Stop: end of sequence |

CAGCAGAGTGCCACCGTGGCCAACCCAGTGCCTGGTGCCAACCCGGACCTGCTTCCCCACTTCCTGGT
GGAGCCCGAGGATGTGTACATCGTCAAGAACAAGCCAGTGCTGCTTGTGTGCAAGGCCGTGCCCGCCA
CGCAGATCTTCTTCAAGTGCAACGGGGAGTGGGTGCGCCAGGTGGACCACGTGATCGAGCGCAGCACA
GACGGGAGCAGTGGTGAGCCGACCATGGAGGTCCGCATTAATGTCTCAAGGCAGCAGGTCGAGAAGGT
GTTCGGGCTGGAGGAATACTGGTGCCAGTGCGTGGCATGGAGCTCCTCGGGCACCACCAAGAGTCAGA
AGGCCTACATCCGCATAGCCAGATTGCGCAAGAACTTCGAGCAGGAGCCGCTGGCCAAGGAGGTGTCC
CTGGAGCAGGGCATCGTGCTGCCCTGCCGTCCACCGGAGGGCATCCCTCCAGCCGAGGTGGAGTGGCT
CCGGAACGAGGACCTGGTGGACCCGTCCCTGGACCCCAATGTATACATCACGCGGGAGCACAGCCTGG
TGGTGCGACAGGCCCGCCTTGCTGACACGGCCAACTACACCTGCGTGGCCAAGAACATCGTGGCACGT
CGCCGCAGCGCCTCCGCTGCTGTCATCGTCTACGTGAACGGTGGGTGGTCGACGTGGACCGAGTGGTC
CGTCTGCAGCGCCAGCTGTGGGCGCGGCTGGCAGAAACGGAGCCGGAGCTGCACCAACCCGGCGCCTC
TCAACGGGGGCGCTTTCTGTGAGGGGCAGAATGTCCATGACCGCACCGTCTCCTCTCTGCTTGTCTCT
GTGGACGGCAGCTGGAGCCCGTGGAGCAAGTGGTCGGCCTGTGGGCTGGACTGCACCCACTGGCGGAG
CCGTGAGTGCTCTGACCCAGCACCCCGCAACGGAGGGGAGGAGTGCCAGGGCACTGACCTGGACACCC
GCAACTGTACCAGTGACCTCTGTGTACACAGTGCTTCTGGC

NOV21b, CG53908-02

| | | | |
|---|---|---|---|
| Protein Sequence | SEQ ID NO: 508 | 331 aa | MW at 36604.8kD |

QQSATVANPVPGANPDLLPHFLVEPEDVYIVKNKPVLLVCKAVPATQIFFKCNGEWVRQVDHVIERST
DGSSGEPTMEVRINVSRQQVEKVFGLEEYWCQCVAWSSSGTTKSQKAYIRIARLRKNFEQEPLAKEVS
LEQGIVLPCRPPEGIPPAEVEWLRNEDLVDPSLDPNVYITREHSLVVRQARLADTANYTCVAKNIVAR
RRSASAAVIVYVNGGWSTWTEWSVCSASCGRGWQKRSRSCTNPAPLNGGAFCEGQNVHDRTVSSLLVS
VDGSWSPWSKWSACGLDCTHWRSRECSDPAPRNGGEECQGTDLDTRNCTSDLCVHSASG

| | | |
|---|---|---|
| NOV21c, 306075989 | SEQ ID NO: 509 | 1009 bp |

| | | |
|---|---|---|
| DNA Sequence | ORF Start: at 2 | ORF Stop: end of sequence |

CACCGGATCCCAGCAGAGTGCCACCGTGGCCAACCCAGTGCCTGGTGCCAACCCGGACCTGCTTCCCC
ACTTCCTGGTGGAGCCCGAGGATGTGTACATCGTCAAGAACAAGCCAGTGCTGCTTGTGTGCAAGGCC
GTGCCCGCCACGCAGATCTTCTTCAAGTGCAACGGGGAGTGGGTGCGCCAGGTGGACCACGTGATCGA
GCGCAGCACAGACGGGAGCAGTGGGCTGCCCACCATGGAGGTCCGCATTAATGTCTCAAGGCAGCAGG
TCGAGAAGGTGTTCGGGCTGGAGGAATACTGGTGCCAGTGCGTGGCATGGAGCTCCTCGGGCACCACC
AAGAGTCAGAAGGCCTACATCCGCATAGCCTATTTGCGCAAGAACTTCGAGCAGGAGCCACTGGCCAA
GGAGGTGTCCCTGGAGCAGGGCATCGTGCTGCCCTGCCGTCCACCGGAGGGCATCCCTCCAGCCGAGG
TGGAGTGGCTCCGGAACGAGGACCTGGTGGACCCGTCCCTGGACCCCAATGTATACATCACGCGGGAG
CACAGCCTGGTGGTGCGACAGGCCCGCCTTGCTGACACGGCCAACTACACCTGCGTGGCCAAGAACAT
CGTGGCACGTCGCCGCAGCGCCTCCGCTGCTGTCATCGTCTACGTGAACGGTGGGTGGTCGACGTGGA
CCGAGTGGTCCGTCTGCAGCGCCAGCTGTGGGCGCGGCTGGCAGAAACGGAGCCGGAGCTGCACCAAC
CCGGCGCCTCTCAACGGGGGCGCTTTCTGTGAGGGGCAGAATGTCCAGAAAACAGCCTGCGCCACCCT
GTGCCCAGTGGACGGCAGCTGGAGCCCGTGGAGCAAGTGGTCGGCCTGTGGGCTGGACTGCACCCACT
GGCGGAGCCGTGAGTGCTCTGACCCAGCACCCCGCAACGGAGGGGAGGAGTGCCAGGGCACTGACCTG
GACACCCGCAACTGTACCAGTGACCTCTGTGTACACAGTGCTTCTGGCGAATTCGGC

NOV21c, 306075989

| | | | |
|---|---|---|---|
| Protein Sequence | SEQ ID NO: 510 | 336 aa | MW at 36996.3kD |

TGSQQSATVANPVPGANPDLLPHFLVEPEDVYIVKNKPVLLVCKAVPATQIFFKCNGEWVRQVDHVIE
RSTDGSSGLPTMEVRINVSRQQVEKVFGLEEYWCQCVAWSSSGTTKSQKAYIRIAYLRKNFEQEPLAK
EVSLEQGIVLPCRPPEGIPPAEVEWLPNEDLVDPSLDPNVYITREHSLVVRQARLADTANYTCVAKNI
VARRRSASAAVIVYVNGGWSTWTEWSVCSASCGRGWQKRSRSCTNPAPLNGGAFCEGQNVQKTACATL
CPVDGSWSPWSKWSACGLDCTHWRSRECSDPAPRNGGEECQGTDLDTRNCTSDLCVHSASGEFG

| | | |
|---|---|---|
| NOV21d, CG53908-03 | SEQ ID NO: 511 | 1009 bp |

| | | |
|---|---|---|
| DNA Sequence | ORF Start: at 1 | ORF Stop: at 1006 |

CAGCAGAGTGCCACCGTGGCCAACCCAGTGCCTGGTGCCAACCCGGACCTGCTTCCCCACTTCCTGGT
GGAGCCCGAGGATGTGTACATCGTCAAGAACAAGCCAGTGCTGCTTGTGTGCAAGGCCGTGCCCGCCA
GACGGGAGCAGTGGTGAGCCGACCATGGAGGTCCGCATTAATGTCTCAAGGCAGCAGGTCGAGAAGGT
GTTCGGGCTGGAGGAATACTGGTGCCAGTGCGTGGCATGGAGCTCCTCGGGCACCACCAAGAGTCAGA
AGGCCTACATCCGCATAGCCAGATTGCGCAAGAACTTCGAGCAGGAGCCGCTGGCCAAGGAGGTGTCC
CTGGAGCAGGGCATCGTGCTGCCCTGCCGTCCACCGGAGGGCATCCCTCCAGCCGAGGTGGAGTGGCT
CCGGAACGAGGACCTGGTGGACCCGTCCCTGGACCCCAATGTATACATCACGCGGGAGCACAGCCTGG
TGGTGCGACAGGCCCGCCTTGCTGACACGGCCAACTACACCTGCGTGGCCAAGAACATCGTGGCACGT
CGCCGCAGCGCCTCCGCTGCTGTCATCGTCTACGTGAACGGACGGCAGCTGGAGCCCGTGGAGCAAGT
GGTCGGCCTGTGGGCTGGACTGCACCCACTGGCGGAGCCGTGAGTGCTCTGACCCAGCACCCCGCAAC
GGAGGGGAGGAGTGCCAGGGCACTGACCTGGACACCCGCAACTGTACCAGTGACCTCTGTGTACACAG
TGCTGCTTGTCCTCATCCTCGTTTATTGCCGGAAGAAGGAGGGGCTGGACTCAGATGTGGCTGACTCG
TCCATTCTCACCTCAGGCTTCCAGCCCGTCAGCATCAAGCCCAGCAAAGCAGACAAC

NOV21d, CG53908-03

| | | | |
|---|---|---|---|
| Protein Sequence | SEQ ID NO: 512 | 335 aa | MW at 36949.6kD |

QQSATVANPVPGANPDLLPHFLVEPEDVYIVKNKPVLLVCKAVPATQIFFKCNGEWVRQVDHVIERST
DGSSGEPTMEVRINVSRQQVEKVFGLEEYWCQCVAWSSSGTTKSQKAYIRIARLRKNFEQEPLAKEVS
LEQGIVLPCRPPEGIPPAEVEWLRNEDLVDPSLDPNVYITREHSLVVRQARLADTANYTCVAKNIVAR
RRSASAAVIVYVDGSWSPWSKWSACGLDCTHWRSRECSDPAPRNGGEECQGTDLDTRNCTSDLCVHSA
SGPEDVALYVGLIAVAVCLVLLLLVLILVYCRKKEGLDSDVADSSILTSGFQPVSIKPSKADN

| | | |
|---|---|---|
| NOV21e, CG53908-04 | SEQ ID NO: 513 | 2752 bp |

| | | |
|---|---|---|
| DNA Sequence | ORF Start: ATG at 46 | ORF Stop: TGA at 2740 |

CCGCGGGGCCCCGCGCCCGGCCCGCCCGCCTGCCCGCCCGCGGCCATGGCCGTCCGGCCCGGCCTGTG
GCCAGCGCTCCTGGGCATAGTCCTCGCCGCTTGGCTCCGCGGCTCGGGTGCCCAGCAGAGTGCCACCG
TGGCCAACCCAGTGCCTGGTGCCAACCCGGACCTGCTTCCCCACTTCCTGGTGGAGCCCGAGGATGTG
TACATCGTCAAGAACAAGCCAGTGCTGCTTGTGTGCAAGGCCGTGCCCGCCACGCAGATCTTCTTCAA
GTGCAACGGGGAGTGGGTGCGCCAGGTGGACCACGTGATCGAGCGCAGCACAGACGGGAGCAGTGGGC
TGCCCACCATGGAGGTCCGCATTAATGTCTCAAGGCAGCAGGTCGAGAAGGTGTTCGGGCTGGAGGAA
TACTGGTGCCAGTGCGTGGCATGGAGCTCCTCGGGCACCACCAAGAGTCAGAAGGCCTACATCCGCAT
AGCCAGATTGCGCAAGAACTTCGAGCAGGAGCCGCTGGCCAAGGAGGTGTCCCTGGAGCAGGGCATCG
TGCTGCCCTGCCGTCCACCGGAGGGCATCCCTCCAGCCGAGGTGGAGTGGCTCCGGAACGAGGACCTG
GTGGACCCGTCCCTGGACCCCAATGTATACATCACGCGGGAGCACAGCCTGGTGGTGCGACAGGCCCG
CCTTGCTGACACGGCCAACTACACCTGCGTGGCCAAGAACATCGTGGCACGTCGCCGCAGCGCCTCCG
CTGCTGTCATCGTCTACGTGAACGGTGGGTGGTCGACGTGGACCGAGTGGTCCGTCTGCAGCGCCAGC
TGTGGGCGCGGCTGGCAGAAACGGAGCCGGAGCTGCACCAACCCGGCGCCTCTCAACGGGGGCGCTTT
CTGTGAGGGGCAGAATGTCCAGAAAACAGCCTGCGCCACCCTGTGCCCAGTAGACGGCAGCTGGAGCC
CGTGGAGCAAGTGGTCGGCCTGTGGGCTGGACTGCACCCACTGGCGGAGCCGTGAGTGCTCTGACCCA
GCACCCCGCAACGGAGGGGAGGAGTGCCAGGGCACTGACCTGGACACCCGCAACTGTACCAGTGACCT
CTGTGTACACAGTGCTTCTGGCCCTGAGGACGTGGCCCTCTATGTGGGCCTCATCGCCGTGGCCGTCT
GCCTGGTCCTGCTGCTGCTTGTCCTCATCCTCGTTTATTGCCGGAAGAAGGAGGGGCTGGACTCAGAT
GTGGCTGACTCGTCCATTCTCACCTCAGGCTTCCAGCCCGTCAGCATCAAGCCCAGCAAGCAGACAAA
CCCCCATCTGCTCACCATCCAGCCGGACCTCAGCACCACCACCACCACCTACCAGGGCAGTCTCTGTC
CCCGGCAGGATGGGCCCAGCCCCAAGTTCCAGCTCACCAATGGGCACCTGCTCAGCCCCCTGGGTGGC
GGCCGCCACACACTGCACCACAGCTCTCCCACCTCTGAGGCCGAGGAGTTCGTCTCCCGCCTCTCCAC
CCAGAACTACTTCCGCTCCCTGCCCCGAGGCACCAGCAACATGACCTATGGGACCTTCAACTTCCTCG
GGGGCCGGCTGATGATCCCTAATACAGGTATCAGCCTCCTCATCCCCCCAGATGCCATACCCCGAGGG
AAGATCTATGAGATCTACCTCACGCTGCACAAGCCGGAAGACGTGAGGTTGCCCCTAGCTGGCTGTCA
CTATGGACCACTGTGGGGAGCCCAGCCCTGACAGCTGGAGCCTGCGCCTCAAAAAGCAGTCGTGCGAG
GGCAGCTGGGAGGATGTGCTGCACCTGGGCGAGGAGGCGCCCTCCCACCTCTACTACTGCCAGCTGGA
GGCCAGTGCCTGCTACGTCTTCACCGAGCAGCTGGGCCGCTTTGCCCTGGTGGGAGAGGCCCTCAGCG
TGGCTGCCGCCAAGCGCCTCAAGCTGCTTCTGTTTGCGCCGGTGGCCTGCACCTCCCTCGAGTACAAC
ATCCGGGTCTACTGCCTGCATGACACCCACGATGCACTCAAGGAGGTGGTGCAGCTGGAGAAGCAGCT
GGGGGGACAGCTGATCCAGGAGCCACGGGTCCTGCACTTCAAGGACAGTTACCACAACCTGCGCCTAT
CCATCCACGATGTGCCCAGCTCCCTGTGGAAGAGTAAGCTCCTTGTCAGCTACCAGGAGATCCCCTTT
TATCACATCTGGAATGGCACGCAGCGGTACTTGCACTGCACCTTCACCCTGGAGCGTGTCAGCCCCAG
CACTAGTGACCTGGCCTGCAAGCTGTGGGTGTGGCAGGTGGAGGGCGACGGGCAGAGCTTCAGCATCA
ACTTCAACATCACCAAGGACACAAGGTTTGCTGAGCTGCTGGCTCTGGAGAGTGAAGCGGGGGTCCCA
GCCCTGGTGGGCCCCAGTGCCTTCAAGATCCCCTTCCTCATTCGGCAGAAGATAATTTCCAGCCTGGA
CCCACCCTGTAGGCGGGGTGCCGACTGGCGGACTCTGGCCCAGAAACTCCACCTGGACAGCCATCTCA
GCTTCTTTGCCTCCAAGCCCAGCCCCACAGCCATGATCCTCAACCTGTGGGAGGCGCGGCACTTCCCC
AACGGCAACCTCAGCCAGCTGGCTGCAGCAGTGGCTGGACTGGGCCAGCCAGACGCTGGCCTCTTCAC
AGTGTCGGAGGCTGAGTGCTGAGGCCGGCCAG

NOV21e, CG53908-04

| | | | |
|---|---|---|---|
| Protein Sequence | SEQ ID NO: 514 | 898 aa | MW at 98841.9kD |

MAVRPGLWPALLGIVLAAWLRGSGAQQSATVANPVPGANPDLLPHFLVEPEDVYIVKNKPVLLVCKAV
PATQIFFKCNGEWVRQVDHVIERSTDGSSGLPTMEVRINVSRQQVEKVFGLEEYWCQCVAWSSSGTTK
SQKAYIRIARLRKNFEQEPLAKEVSLEQGIVLPCRPPEGIPPAEVEWLRNEDLVDPSLDPNVYITREH
SLVVRQARLADTANYTCVAKNIVARRRSASAAVIVYVNGGWSTWTEWSVCSASCGRGWQKRSRSCTNP
APLNGGAFCEGQNVQKTACATLCPVDGSWSPWSKWSACGLDCTHWRSRECSDPAPRNGGEECQGTDLD
TRNCTSDLCVHSASGPEDVALYVGLIAVAVCLVLLLLVLILVYCRKKEGLDSDVADSSILTSGFQPVS
IKPSKADNPHLLTIQPDLSTTTTTYQGSLCPRQDGPSPKFQLTNGHLLSPLGGGRHTLHHSSPTSEAE
EFVSRLSTQNYFRSLPRGTSNMTYGTFNFLGGRLMIPNTGISLLIPPDAIPRGKIYEIYLTLHKPEDV
RLPLAGCQTLLSPIVSCGPPGVLLTRPVILAMDHCGEPSPDSWSLRLKKQSCEGSWEDVLHLGEEAPS
HLYYCQLEASACYVFTEQLGRFALVGEALSVAAAKRLKLLLFAPVACTSLEYNIRVYCLHDTHDALKE
VVQLEKQLGGQLIQEPRVLHFKDSYHNLRLSIHDVPSSLWKSKLLVSYQEIPFYHIWNGTQRYLHCTF
TLERVSPSTSDLACKLWVWQVEGDGQSFSINFNITKDTRFAELLALESEAGVPALVGPSAFKIPFLIR
QKIISSLDPPCRRGADWRTLAQKLHLDSHLSFFASKPSPTAMILNLWEARHFPNGNLSQLAAAVAGLG
QPDAGLFTVSEAEC

| | | |
|---|---|---|
| NOV21f, CG53908-05 | SEQ ID NO: 515 | 1002 bp |

| | | |
|---|---|---|
| DNA Sequence | ORF Start: at 7 | ORF Stop: at 997 |

GGATCCCAGCAGAGTGCCACCGTGGCCAACCCAGTGCCTGGTGCCAACCCGGACCTGCTTCCCCACTT
CCTGGTGGAGCCCGAGGATGTGTACATCGTCAAGAACAAGCCAGTGCTGCTTGTGTGCAAGGCCGTGC
CCGCCACGCAGATCTTCTTCAAGTGCAACGGGGAGTGGGTGCGCCAGGTGGACCACGTGATCGAGCGC
AGCACAGACGGGAGCAGTGGGCTGCCCACCATGGAGGTCCGCATTAATGTCTCAAGGCAGCAGGTCGA
GAAGGTGTTCGGGCTGGAGGAATACTGGTGCCAGTGCGTGGCATGGAGCTCCTCGGGCACCACCAAGA
GTCAGAAGGCCTACATCCGCATAGCCTATTTGCGCAAGAACTTCGAGCAGGAGCCACTGGCCAAGGAG
GTGTCCCTGGAGCAGGGCATCGTGCTGCCCTGCCGTCCACCGGAGGGCATCCCTCCAGCCGAGGTGGA
GTGGCTCCGGAACGAGGACCTGGTGGACCCGTCCCTGGACCCCAATGTATACATCACGCGGGAGCACA
GCCTGGTGGTGCGACAGGCCCGCCTTGCTGACACGGCCAACTACACCTGCGTGGCCAAGAACATCGTG
GCACGTCGCCGCAGCGCCTCCGCTGCTGTCATCGTCTACGTGAACGGTGGGTGGTCGACGTGGACCGA
GTGGTCCGTCTGCAGCGCCAGCTGTGGGCGCGGCTGGCAGAAACGGAGCCGGAGCTGCACCAACCCGG
CGCCTCTCAACGGGGGCGCTTTCTGTGAGGGGCAGAATGTCCAGAAAACAGCCTGCGCCACCCTGTGC
CCAGTGGACGGCAGCTGGAGCCCGTGGAGCAAGTGGTCGGCCTGTGGGCTGGACTGCACCCACTGGCG
GAGCCGTGAGTGCTCTGACCCAGCACCCCGCAACGGAGGGGAGGAGTGCCAGGGCACTGACCTGGACA
CCCGCAACTGTACCAGTGACCTCTGTGTACACAGTGCTTCTGGCCTCGAG

NOV21f, CG53908-05

| | | | |
|---|---|---|---|
| Protein Sequence | SEQ ID NO: 516 | 330 aa | MW at 36417.7kD |

QQSATVANPVPGANPDLLPHFLVEPEDVYIVKNKPVLLVCKAVPATQIFFKCNGEWVRQVDHVIERST
DGSSGLPTMEVRINVSRQQVEKVFGLEEYWCQCVAWSSSGTTKSQKAYIRIAYLRKNFEQEPLAKEVS
LEQGIVLPCRPPEGIPPAEVEWLRNEDLVDPSLDPNVYITREHSLVVRQARLADTANYTCVAKNIVAR
RRSASAAVIVYVNGGWSTWTEWSVCSASCGRGWQKRSRSCTNPAPLNGGAFCEGQNVQKTACATLCPV
DGSWSPWSKWSACGLDCTHWRSRECSDPAPRNGGEECQGTDLDTRNCTSDLCVHSASG

| | | |
|---|---|---|
| NOV21g, CG53908-06 | SEQ ID NO: 517 | 2575 bp |

| | | |
|---|---|---|
| DNA Sequence | ORF Start: at 3 | ORF Stop: TGA at 2502 |

CAGCGCTCCTGGGCATAGTCCTCGCCGCTTGGCTCCGCGGCTCGGGTGCCCAGCAGAGTGCCACCGTG
GCCAACCCAGTGCCTGGTGCCAACCCGGACCTGCTTCCCCACTTCCTGGTGGAGCCCGAGGATGTGTA
CATCGTCAAGAACAAGCCAGTGCTGCTTGTGTGCAAGGCCGTGCCCGCCACGCAGATCTTCTTCAAGT
GCAACGGGGAGTGGGTGCGCCAGGTGGACCACGTGATCGAGCGCAGCACAGACGGGAGCAGTGGGCTG
CCCACCATGGAGGTCCGCATTAATGTCTCAAGGCAGCAGGTCGAGAAGGTGTTCGGGCTGGAGGAATA
CTGGTGCCAGTGCGTGGCATGGAGCTCCTCGGGCACCACCAAGAGTCAGAAGGCCTACATCCGCATAG
CCTATTTGCGCAAGAACTTCGAGCAGGAGCCGCTGGCCAAGGAGGTGTCCCTGGAGCAGGGCATCGTG
CTGCCCTGCCGTCCACCGGAGGGCATCCCTCCAGCCGAGGTGGAGTGGCTCCGGAACGAGGACCTGGT
GGACCCGTCCCTGGACCCCAATGTATACATCACGCGGGAGCACAGCCTGGTGGTGCGACAGGCCCGCC
TTGCTGACACGGCCAACTACACCTGCGTGGCCAAGAACATCGTGGCACGTCGCCGCAGCGCCTCCGCT
GCTGTCATCGTCTACGTGGACGGCAGCTGGAGCCCGTGGAGCAAGTGGTCGGCCTGTGGGCTGGACTG
CACCCACTGGCGGAGCCGTGAGTGCTCTGACCCAGCACCCCGCAACGGAGGGGAGGAGTGCCAGGGCA
CTGACCTGGACACCCGCAACTGTACCAGTGACCTCTGTGTACACACTGCTTCTGGCCCTGAGGACGTG
GCCCTCTATGTGGGCCTCATCGCCGTGGCCGTCTGCCTGGTCCTGCTGCTGCTTGTCCTCATCCTCGT
TTATTGCCGGAAGAAGGAGGGGCTGGACTCAGATGTGGCTGACTCGTCCATTCTCACCTCAGGCTTCC
ACCACCACCACCACCTACCAGGGCAGTCTCTGTCCCCGGCAGGATGGGCCCAGCCCCAAGTTCCAGCT
CACCAATGGGCACCTGCTCAGCCCCCTGGGTGGCGGCCGCCACACACTGCACCACAGCTCTCCCACCT
CTGAGGCCGAGGAGTTCGTCTCCCGCCTCTCCACCCAGAACTACTTCCGCTCCCTGCCCCGAGGCACC
AGCAACATGACCTATGGGACCTTCAACTTCCTCGGGGGCCGGCTGATGATCCCTAATACAGGAATCAG
CCTCCTCATCCCCCCAGATGCCATACCCCGAGGGAAGATCTATGAGATCTACCTCACGCTGCACAAGC
CGGAAGACGTGAGGTTGCCCCTAGCTGGCTGTCAGACCCTGCTGAGTCCCATCGTTAGCTGTGGACCC
CCTGGCGTCCTGCTCACCCGGCCAGTCATCCTGGCTATGGACCACTGTGGGGAGCCCAGCCCTGACAG
CTGGAGCCTGCGCCTCAAAAAGCAGTCGTGCGAGGGCAGCTGGGAGGATGTGCTGCACCTGGGCGAGG
AGGCGCCCTCCCACCTCTACTACTGCCAGCTGGAGGCCAGTGCCTGCTACGTCTTCACCGAGCAGCTG
GGCCGCTTTGCCCTGGTGGGAGAGGCCCTCAGCGTGGCTGCCGCCAAGCGCCTCAAGCTGCTTCTGTT
TGCGCCGGTGGCCTGCACCTCCCTCGAGTACAACATCCGGGTCTACTGCCTGCATGACACCCACGATG
CACTCAAGGAGGTGGTGCAGCTGGAGAAGCAGCTGGGGGGACAGCTGATCCAGGAGCCACGGGTCCTG
CACTTCAAGGACAGTTACCACAACCTGCGCCTATCCATCCACGATGTGCCCAGCTCCCTGTGGAAGAG
TAAGCTCCTTGTCAGCTACCAGGAGATCCCCTTTTATCACATCTGGAATGGCACGCAGCGGTACTTGC
ACTGCACCTTCACCCTGGAGCGTGTCAGCCCCAGCACTAGTGACCTGGCCTGCAAGCTGTGGGTGTGG
CAGGTGGAGGGCGACGGGCAGAGCTTCAGCATCAACTTCAACATCACCAAGGACACAAGGTTTGCTGA
GCTGCTGGCTCTGGAGAGTGAAGCGGGGGTCCCAGCCCTGGTGGGCCCCAGTGCCTTCAAGATCCCCT
TCCTCATTCGGCAGAAGATAATTTCCAGCCTGGACCCACCCTGTAGGCGGGGTGCCGACTGGCGGACT
CTGGCCCAGAAACTCCACCTGGACAGCCATCTCAGCTTCTTTGCCTCCAAGCCCAGCCCCACAGCCAT
GATCCTCAACCTGTGGGAGGCGCGGCACTTCCCCAACGGCAACCTCAGCCAGCTGGCTGCAGCAGTGG
CTGGACTGGGCCAGCCAGACGCTGGCCTCTTCACAGTGTCGGAGGCTGAGTGCTGAGGCCGGCCAGGC
CCGACACCTACACTCTCACCAGCTTTGGCACCCACCAAGGACAGGCAGAAGCCGGACAG

NOV21g, CG53908-06

| | | | |
|---|---|---|---|
| Protein Sequence | SEQ ID NO: 518 | 833 aa | MW at 91922.0kD |

ALLGIVLAAWLRGSGAQQSATVANPVPGANPDLLPHFLVEPEDVYIVKNKPVLLVCKAVPATQIFFKC
NGEWVRQVDHVTERSTDGSSGLPTMEVRINVSRQQVEKVFGLEEYWCQCVAWSSSGTTKSQKAYIRIA
YLRKNFEQEPLAKEVSLEQIVLPCRPPEGIPPAEVEWLRNEDLVDPSLDPNVYITREHSLVVRQARL
ADTANYTCVAKNIVARRRSASAAVIVYVDGSWSPWSKWSACGLDCTHWRSRECSDPAPRNGGEECQGT
DLDTRNCTSDLCVHTASGPEDVALYVGLIAVAVCLVLLLLVLILVYCRKKEGLDSDVADSSILTSGFQ
PVSIKPSKADNPHLLTIQPDLSTTTTTYQGSLCPRQDGPSPKFQLTNGHLLSPLGGGRHTLHHSSPTS
EAEEFVSRLSTQNYFRSLPRGTSNMTYGTFNFLGGRLMIPNTGISLLIPPDAIPRGKIYEIYLTLHKP
EDVRLPLAGCQTLLSPIVSCGPPGVLLTRPVILAMDHCGEPSPDSWSLRLKKQSCEGSWEDVLHLGEE
APSHLYYCQLEASACYVFTEQLGRFALVGEALSVAAAKRLKLLLFAPVACTSLEYNIRVYCLHDTHDA
LKEVVQLEKQLGGQLIQEPRVLHFKDSYHNLRLSIHDVPSSLWKSKLLVSYQEIPFYHIWNGTQRYLH
CTFTLERVSPSTSDLACKLWVWQVEGDGQSFSINFNITKDTRFAELLALESEAGVPALVGPSAFKIPF
LIRQKIISSLDPPCRRGADWRTLAQKLHLDSHLSFFASKPSPTAMILNLWEARHFPNGNLSQLAAAVA
GLGQPDAGLFTVSEAEC

| | | |
|---|---|---|
| NOV21h, CG53908-07 | SEQ ID NO: 519 | 2463 bp |

| | | |
|---|---|---|
| DNA Sequence | ORF Start: at 7 | ORF Stop: at 2458 |

GGATCCCAGCAGAGTGCCACCGTGGCCAACCCAGTGCCTGGTGCCAACCCGGACCTGCTTCCCCACTT
CCTGGTGGAGCCCGAGGATGTGTACATCGTCAAGAACAAGCCAGTGCTGCTTGTGTGCAAGGCCGTGC
CCGCCACGCAGATCTTCTTCAAGTGCAACGGGGAGTGGGTGCGCCAGGTGGACCACGTGATCGAGCGC
AGCACAGACGGGAGCAGTGGGCTGCCCACCATGGAGGTCCGCATTAATGTCTCAAGGCAGCAGGTCGA
GAAGGTGTTCGGGCTGGAGGAATACTGGTGCCAGTGCGTGGCATGGAGCTCCTCGGGCACCACCAAGA
GTCAGAAGGCCTACATCCGCATAGCCTATTTGCGCAAGAACTTCGAGCAGGAGCCGCTGGCCAAGGAG
GTGTCCCTGGAGCAGGGCATCGTGCTGCCCTGCCGTCCACCGGAGGGCATCCCTCCAGCCGAGGTGGA
GTGGCTCCGGAACGAGGACCTGGTGGACCCGTCCCTGGACCCCAATGTATACATCACGCGGGAGCACA
GCACGTCGCCGCAGCGCCTCCGCTGCTGTCATCGTCTACGTGGACGGCAGCTGGAGCCCGTGGAGCAA
GTGGTCGGCCTGTGGGCTGGGCTGCACCCACTGGCGGAGCCGTGAGTGCTCTGACCCAGCACCCCGCA
ACGGAGGGGAGGAGTGCCAGGGCACTGACCTGGACACCCGCAACTGTACCAGTGACCTCTGTGTACAC
ACTGCTTCTGGCCCTGAGGACGTGGCCCTCTATGTGGGCCTCATCGCCGTGGCCGTCTGCCTGGTCCT
GCTGCTGCTTGTCCTCATCCTCGTTTATTGCCGGAAGAAGGAGGGGCTGGACTCAGATGTGGCTGACT
CGTCCATTCTCACCTCAGGCTTCCAGCCCGTCAGCATCAAGCCCAGCAAAGCAGACAACCCCCATCTG
CTCACCATCCAGCCGGACCTCAGCACCACCACCACCACCTACCAGGGCAGTCTCTGTCCCCGGCAGGA
TGGGCCCAGCCCCAAGTTCCAGCTCACCAATGGGCACCTGCTCAGCCCCCTGGGTGGCGGCCGCCACA
CACTGCACCACAGCTCTCCCACCTCTGAGGCCGAGGAGTTCGTCTCCCGCCTCTCCACCCAGAACTAC
TTCCGCTCCCTGCCCCGAGGCACCAGCAACATGACCTATGGGACCTTCAACTTCCTCGGGGGCCGGCT
GATGATCCCTAATACAGGAATCAGCCTCCTCATCCCCCCAGATGCCATACCCCGAGGGAAGATCTATG
AGATCTACCTCACGCTGCACAAGCCGGAAGACGTGAGGTTGCCCCTAGCTGGCTGTCAGACCCTGCTG
AGTCCCATCGTTAGCTGTGGACCCCCTGGCGTCCTGCTCACCCGGCCAGTCATCCTGGCTATGGACCA
AGGATGTGCTGCACCTGGGCGAGGAGGCGCCCTCCCACCTCTACTACTGCCAGCTGGAGGCCAGTGCC
TGCTACGTCTTCACCGAGCAGCTGGGCCGCTTTGCCCTGGTGGGAGAGGCCCTCAGCGTGGCTGCCGC
CAAGCGCCTCAAGCTGCTTCTGTTTGCGCCGGTGGCCTGCACCTCCCTCGAGTACAACATCCGGGTCT
CTGATCCAGGAGCCACGGGTCCTGCACTTCAAGGACAGTTACCACAACCTGCGCCTATCCATCCACGA
TGTGCCCAGCTCCCTGTGGAAGAGTAAGCTCCTTGTCAGCTACCAGGAGATCCCCTTTTATCACATCT
GGAATGGCACGCAGCGGTACTTGCACTGCACCTTCACCCTGGAGCGTGTCAGCCCCAGCACTAGTGAC
CTGGCCTGCAAGCTGTGGGTGTGGCAGGTGGAGGGCGACGGGCAGAGCTTCAGCATCAACTTCAACAT
CACCAAGGACACAAGGTTTGCTGAGCTGCTGGCTCTGGAGAGTGAAGCGGGGGTCCCAGCCCTGGTGG
GCCCCAGTGCCTTCAAGATCCCCTTCCTCATTCGGCAGAAGATAATTTCCAGCCTGGACCCACCCTGT
AGGCGGGGTGCCGACTGGCGGACTCTGGCCCAGAAACTCCACCTGGACAGCCATCTCAGCTTCTTTGC
GCTGAGTGCAAGCTT

NOV21h, CG53908-07

| | | | |
|---|---|---|---|
| Protein Sequence | SEQ ID NO: 520 | 817 aa | MW at 90314.2kD |

QQSATVANPVPGANPDLLPHFLVEPEDVYIVKNKPVLLVCKAVPATQIFFKCNGEWVRQVDHVIERST
DGSSGLPTMEVRINVSRQQVEKVFGLEEYWCQCVAWSSSGTTKSQKAYIRIAYLRKNFEQEPLAKEVS
LEQGIVLPCRPPEGIPPAEVEWLRNEDLVDPSLDPNVYITREHSLVVRQARLADTANYTCVAKNIVAR
RRSASAAVIVYVDGSWSPWSKWSACGLGCTHWRSRECSDPAPRNGGEECQGTDLDTRNCTSDLCVHTA
SGPEDVALYVGLIAVAVCLVLLLLVLILVYCRKKEGLDSDVADSSILTSGFQPVSIKPSKADNPHLLT
IQPDLSTTTTTYQGSLCPRQDGPSPKFQLTNGHLLSPLGGGRHTLHHSSPTSEAEEFVSRLSTQNYFR
SLPRGTSNMTYGTFNFLGGRLMIPNTGISLLIPPDAIPRGKIYEIYLTLHKPEDVRLPLAGCQTLLSP
IVSCGPPGVLLTRPVILAMDHCGEPSPDSWSLRLKKQSCEGSWEDVLHLGEEAPSHLYYCQLEASACY
VFTEQLGRFALVGEALSVAAAKRLKLLLFAPVACTSLEYNIRVYCLHDTHDALKEVVQLEKQLGGQLI
QEPRVLHFKDSYHNLRLSIHDVPSSLWKSKLLVSYQEIPFYHIWNGTQRYLHCTFTLERVSPSTSDLA
CKLWVWQVEGDGQSFSINFNITKDTRFAELLALESEAGVPALVGPSAFKIPFLIRQKIISSLDPPCRR
GADWRTLAQKLHLDSHLSFFASKPSPTAMILNLWEARHFPNGNLSQLAAAVAGLGQPDAGLFTVSEAE
C

| | |
|---|---|
| SEQ ID NO: 521 | 2881 bp |

| | | |
|---|---|---|
| NOV21i, SNP13382444 of | ORF Start: at 423 | ORF Stop: end of sequence |

| | | |
|---|---|---|
| CG53908-01, DNA Sequence | SNP Pos: 420 | SNP Change: C to T |

AGCTGGGGCTCCGGGCTGAGGCGCTAAAGCCGCCCTCCCGCCCGCGGGGCCCCGCGCCCGGCCCGCCC
GCCTGCCCGCCCGCGGCCATGGCCGTCCGGCCCGGCCTGTGGCCAGCGCTCCTGGGCATAGTCCTCGC
CGCTTGGCTCCGCGGCTCGGGTGCCCAGCAGAGTGCCACCGTGGCCAACCCAGTGCCTGGTGCCAACC
CGGACCTGCTTCCCCACTTCCTGGTGGAGCCCGAGGATGTGTACATCGTCAAGAACAAGCCAGTGCTG
CTTGTGTGCAAGGCCGTGCCCGCCACGCAGATCTTCTTCAAGTGCAACGGGGAGTGGGTGCGCCAGGT
GGACCACGTGATCGAGCGCAGCACAGACGGGAGCAGTGGTGAGCCGACCATGGAGGTCCGCATTAATG
TCTCAAGGCAGTAGGTCGAGAAGGTGTTCGGGCTGGAGGAATACTGGTGCCAGTGCGTGGCATGGAGC
TCCTCGGGCACCACCAAGAGTCAGAAGGCCTACATCCGCATAGCCAGATTGCGCAAGAACTTCGAGCA
GGAGCCGCTGGCCAAGGAGGTGTCCCTGGAGCAGGGCATCGTGCTGCCCTGCCGTCCACCGGAGGGCA
TCCCTCCAGCCGAGGTGGAGTGGCTCCGGAACGAGGACCTGGTGGACCCGTCCCTGGACCCCAATGTA
TACATCACGCGGGAGCACAGCCTGGTGGTGCGACAGGCCCGCCTTGCTGACACGGCCAACTACACCTG
CGTGGCCAAGAACATCGTGGCACGTCGCCGCAGCGCCTCCGCTGCTGTCATCGTCTACGTGAACGGTG
GGTGGTCGACGTGGACCGAGTGGTCCGTCTGCAGCGCCAGCTGTGGGCGCGGCTGGCAGAAACGGAGC
CACCGTCTCCTCTCTGCTTGTCTCTGTGGACGGCAGCTGGAGCCCGTGGAGCAAGTGGTCGGCCTGTG
GGCTGGACTGCACCCACTGGCGGAGCCGTGAGTGCTCTGACCCAGCACCCCGCAACGGAGGGGAGGAG
TGAGGACGTGGCCCTCTATGTGGGCCTCATCGCCGTGGCCGTCTGCCTGGTCCTGCTGCTGCTTGTCC
TCATCCTCGTTTATTGCCGGAAGAAGGAGGGGCTGGACTCAGATGTGGCTGACTCGTCCATTCTCACC
TCAGGCTTCCAGCCCGTCAGCATCAAGCCCAGCAAAGCAGACAACCCCCATCTGCTCACCATCCAGCC
GGACCTCAGCACCACCACCACCTACCAGGGCAGTCTCTGTCCCCGGCAGGATGGGCCCAGCCCCAAGT
TCCAGCTCACCAATGGGCACCTGCTCAGCCCCCTGGGTGGCGGCCGCCACACACTGCACCACAGCTCT
CCCACCTCTGAGGCCGAGGAGTTCGTCTCCCGCCTCTCCACCCAGAACTACTTCCGCTCCCTGCCCCG
AGGCACCAGCAACATGACCTATGGGACCTTCAACTTCCTCGGGGGCCGGCTGATGATCCCTAATACAG
GTATCAGCCTCCTCATCCCCCCAGATGCCATACCCCGAGGGAAGATCTATGAGATCTACCTCACGCTG
CACAAGCCGGAAGACGTGAGGTTGCCCCTAGCTGGCTGTCAGACCCTGCTGAGTCCCATCGTTAGCTG
CTGACAGCTGGAGCCTGCGCCTCAAAAAGCAGTCGTGCGAGGGCAGCTGGGAGCAGGATGTGCTGCAC
CTGGGCGAGGAGGCGCCCTCCCACCTCTACTACTGCCAGCTGGAGGCCAGTGCCTGCTACGTCTTCAC
CGAGCAGCTGGGCCGCTTTGCCCTGGTGGGAGAGGCCCTCAGCGTGGCTGCCGCCAAGCGCCTCAAGC
TGCTTCTGTTTGCGCCGGTGGCCTGCACCTCCCTCGAGTACAACATCCGGGTCTACTGCCTGCATGAC
ACCCACGATGCACTCAAGGAGGTGGTGCAGCTGGAGAAGCAGCTGGGGGGACAGCTGATCCAGGAGCC
ACGGGTCCTGCACTTCAAGGACAGTTACCACAACCTGCGCCTATCCATCCACGATGTGCCCAGCTCCC
TGTGGAAGAGTAAGCTCCTTGTCAGCTACCAGGAGATCCCCTTTTATCACATCTGGAATGGCACGCAG
GTGGGTGTGGCAGGTGGAGGGCGACGGGCAGAGCTTCAGCATCAACTTCAACATCACCAAGGACACAA
GGTTTGCTGAGCTGCTGGCTCTGGAGAGTGAAGCGGGGGTCCCAGCCCTGGTGGGCCCCAGTGCCTTC
AAGATCCCCTTCCTCATTCGGCAGAAGATAATTTCCAGCCTGGACCCACCCTGTAGGCGGGGTGCCGA
CTGGCGGACTCTGGCCCAGAAACTCCACCTGGACAGCCATCTCAGCTTCTTTGCCTCCAAGCCCAGCC
CCACAGCCATGATCCTCAACCTGTGGGAGGCGCGGCACTTCCCCAACGGCAACCTCAGCCAGCTGGCT
GCAGCAGTGGCTGGACTGGGCCAGCCAGACGCTGGCCTCTTCACAGTGTCGGAGGCTGAGTGCTGAGG
CCGGCCAGGCCCGACACCTACACTCTCACCAGCTTTGGCACCCACCAAGGACAGGCAGAAGCCGGACA
GGGGCCCTTCCCCACACCGGGGAGA

| | | |
|---|---|---|
| NOV21i, SNP13382444 of | SEQ ID NO: 522 | MW at 98934.8kD |

| | | | |
|---|---|---|---|
| CG53908-01, Protein Sequence | SNP Pos: 112 | 898 aa | SNP Change: Gln to End |

MAVRPGLWPALLGIVLAAWLRGSGAQQSATVANPVPGANPDLLPHFLVEPEDVYIVKNKPVLLVCKAV
PATQIFFKCNGEWVRQVDHVIERSTDGSSGEPTMEVRINVSRQVEKVFGLEEYWCQCVAWSSSGTTKS
QKAYIRIARLRKNFEQEPLAKEVSLEQGIVLPCRPPEGIPPAEVEWLRNEDLVDPSLDPNVYITREHS
LVVRQARLADTANYTCVAKNIVARRRSASAAVIVYVNGGWSTWTEWSVCSASCGRGWQKRSRSCTNPA
PLNGGAFCEGQNVHDRTVSSLLVSVDGSWSPWSKWSACGLDCTHWRSRECSDPAPRNGGEECQGTDLD
TRNCTSDLCVHSASGPEDVALYVGLIAVAVCLVLLLLVLILVYCRKKEGLDSDVADSSILTSGFQPVS
IKPSKADNPHLLTIQPDLSTTTTYQGSLCPRQDGPSPKFQLTNGHLLSPLGGGRHTLHHSSPTSEAEE
FVSRLSTQNYFRSLPRGTSNMTYGTFNFLGGRLMIPNTGISLLIPPDAIPRGKIYEIYLTLHKPEDVR
LPLAGCQTLLSPIVSCGPPGVLLTRPVILAMDHCGEPSPDSWSLRLKKQSCEGSWEQDVLHLGEEAPS
HLYYCQLEASACYVFTEQLGRFALVGEALSVAAAKRLKLLLFAPVACTSLEYNIRVYCLHDTHDALKE
VVQLEKQLGGQLIQEPRVLHFKDSYHNLRLSIHDVPSSLWKSKLLVSYQEIPEYNIWNGTQRYLHCTF
TLERVSPSTSDLACKLWVWQVEGDGQSFSINFNITKDTRFAELLALESEAGVPALVGPSAFKIPELIR
QKIISSLDPPCRRGADWRTLAQKLHLDSHLSFFASKPSPTAMILNLWEARHFPNGNLSQLAAAVAGLG
QPDAGLFTVSEAEC

| | |
|---|---|
| SEQ ID NO: 523 | 2881 bp |

| | | |
|---|---|---|
| NOV21j, SNP13375491 of | ORF Start: ATG at 87 | ORF Stop: TGA at 2784 |

| | | |
|---|---|---|
| CG53908-01, DNA Sequence | SNP Pos: 1139 | SNP Change: A to G |

AGCTGGGGCTCCGGGCTGAGGCGCTAAAGCCGCCCTCCCGCCCGCGGGGCCCCGCGCCCGGCCCGCCC
GCCTGCCCGCCCGCGGCCATGGCCGTCCGGCCCGGCCTGTGGCCAGCGCTCCTGGGCATAGTCCTCGC
CGCTTGGCTCCGCGGCTCGGGTGCCCAGCAGAGTGCCACCGTGGCCAACCCAGTGCCTGGTGCCAACC
CGGACCTGCTTCCCCACTTCCTGGTGGAGCCCGAGGATGTGTACATCGTCAAGAACAAGCCAGTGCTG
CTTGTGTGCAAGGCCGTGCCCGCCACGCAGATCTTCTTCAAGTGCAACGGGGAGTGGGTGCGCCAGGT
TCTCAAGGCAGCAGGTCGAGAAGGTGTTCGGGCTGGAGGAATACTGGTGCCAGTGCGTGGCATGGAGC
GGAGCCGCTGGCCAAGGAGGTGTCCCTGGAGCAGGGCATCGTGCTGCCCTGCCGTCCACCGGAGGGCA
TCCCTCCAGCCGAGGTGGAGTGGCTCCGGAACGAGGACCTGGTGGACCCGTCCCTGGACCCCAATGTA
CGTGGCCAAGAACATCGTGGCACGTCGCCGCAGCGCCTCCGCTGCTGTCATCGTCTACGTGAACGGTG
GGTGGTCGACGTGGACCGAGTGGTCCGTCTGCAGCGCCAGCTGTGGGCGCGGCTGGCAGAAACGGAGC
CGGAGCTGCACCAACCCGGCGCCTCTCAACGGGGGCGCTTTCTGTGAGGGGCAGAATGTCCATGACCG
CACCGTCTCCTCTCTGCTTGTCTCTGTGGACGGCAGCTGGAGCCCGTGGAGCAAGTGGTCGGCCTGTG
GGCTGGACTGCACCCACTGGCGGAGCCGTGAGTGCTCTGACCCAGCACCCCGCAACGGAGGGGAGGAG
TGCCAGGGCACTGACCTGGACACCCGCAACTGTACCAGTGACCTCTGTGTGCACAGTGCTTCTGGCCC
TGAGGACGTGGCCCTCTATGTGGGCCTCATCGCCGTGGCCGTCTGCCTGGTCCTGCTGCTGCTTGTCC
TCATCCTCGTTTATTGCCGGAAGAAGGAGGGGCTGGACTCAGATGTGGCTGACTCGTCCATTCTCACC
TCAGGCTTCCAGCCCGTCAGCATCAAGCCCAGCAAAGCAGACAACCCCCATCTGCTCACCATCCAGCC
GGACCTCAGCACCACCACCACCTACCAGGGCAGTCTCTGTCCCCGGCAGGATGGGCCCAGCCCCAAGT
TCCAGCTCACCAATGGGCACCTGCTCAGCCCCCTGGGTGGCGGCCGCCACACACTGCACCACAGCTCT
CCCACCTCTGAGGCCGAGGAGTTCGTCTCCCGCCTCTCCACCCAGAACTACTTCCGCTCCCTGCCCCG
AGGCACCAGCAACATGACCTATGGGACCTTCAACTTCCTCGGGGGCCGGCTGATGATCCCTAATACAG
GTATCAGCCTCCTCATCCCCCCAGATGCCATACCCCGAGGGAAGATCTATGAGATCTACCTCACGCTG
CACAAGCCGGAAGACGTGAGGTTGCCCCTAGCTGGCTGTCAGACCCTGCTGAGTCCCATCGTTAGCTG
TGGACCCCCTGGCGTCCTGCTCACCCGGCCAGTCATCCTGGCTATGGACCACTGTGGGGAGCCCAGCC
CTGACAGCTGGAGCCTGCGCCTCAAAAAGCAGTCGTGCGAGGGCAGCTGGGAGCAGGATGTGCTGCAC
CTGGGCGAGGAGGCGCCCTCCCACCTCTACTACTGCCAGCTGGAGGCCAGTGCCTGCTACGTCTTCAC
CGAGCAGCTGGGCCGCTTTGCCCTGGTGGGAGAGGCCCTCAGCGTGGCTGCCGCCAAGCGCCTCAAGC
TGCTTCTGTTTGCGCCGGTGGCCTGCACCTCCCTCGAGTACAACATCCGGGTCTACTGCCTGCATGAC
ACCCACGATGCACTCAAGGAGGTGGTGCAGCTGGAGAAGCAGCTGGGGGGACAGCTGATCCAGGAGCC
ACGGGTCCTGCACTTCAAGGACAGTTACCACAACCTGCGCCTATCCATCCACGATGTGCCCAGCTCCC
TGTGGAAGAGTAAGCTCCTTGTCAGCTACCAGGAGATCCCCTTTTATCACATCTGGAATGGCACGCAG
CGGTACTTGCACTGCACCTTCACCCTGGAGCGTGTCAGCCCCAGCACTAGTGACCTGGCCTGCAAGCT
GGTTTGCTGAGCTGCTGGCTCTGGAGAGTGAAGCGGGGGTCCCAGCCCTGGTGGGCCCCAGTGCCTTC
AAGATCCCCTTCCTCATTCGGCAGAAGATAATTTCCAGCCTGGACCCACCCTGTAGGCGGGGTGCCGA
CTGGCGGACTCTGGCCCAGAAACTCCACCTGGACAGCCATCTCAGCTTCTTTGCCTCCAAGCCCAGCC
CCACAGCCATGATCCTCAACCTGTGGGAGGCGCGGCACTTCCCCAACGGCAACCTCAGCCAGCTGGCT
GCAGCAGTGGCTGGACTGGGCCAGCCAGACGCTGGCCTCTTCACAGTGTCGGAGGCTGAGTGCTGAGG
CCGGCCAGGCCCGACACCTACACTCTCACCAGCTTTGGCACCCACCAAGGACAGGCAGAAGCCGGACA
GGGGCCCTTCCCCACACCGGGGAGA

| | | |
|---|---|---|
| NOV21j, SNP13375491 of | SEQ ID NO: 524 | MW at 99063.0kD |

| | | | |
|---|---|---|---|
| CG53908-01, Protein Sequence | SNP Pos: 351 | 899 aa | SNP Change: Val to Val |

MAVRPGLWPALLGIVLAAWLRGSGAQQSATVANPVPGANPDLLPHFLVEPEDVYIVKNKPVLLVCKAV
PATQIFFKCNGEWVRQVDHVIERSTDGSSGEPTMEVRINVSRQQVEKVFGLEEYWCQCVAWSSSGTTK
SQKAYIRIARLRKNFEQEPLAKEVSLEQGIVLPCRPPEGIPPAEVEWLRNEDLVDPSLDPNVYITREH
SLVVRQARLADTANYTCVAKNIVARRRSASAAVIVYVNGGWSTWTEWSVCSASCGRGWQKRSRSCTNP
APLNGGAFCEGQNVHDRTVSSLLVSVDGSWSPWSKWSACGLDCTHWRSRECSDPAPRNGGEECQGTDL
DTRNCTSDLCVHSASGPEDVALYVGLIAVAVCLVLLLLVLILVYCRKKEGLDSDVADSSILTSGFQPV
SIKPSKADNPHLLTIQPDLSTTTTYQGSLCPRQDGPSPKFQLTNGHLLSPLGGGRHTLHHSSPTSEAE
EFVSRLSTQNYFRSLPRGTSNMTYGTFNFLGGRLMIPNTGISLLIPPDAIPRGKIYEIYLTLHKPEDV
RLPLAGCQTLLSPIVSCGPPGVLLTRPVILAMDHCGEPSPDSWSLRLKKQSCEGSWEQDVLHLGEEAP
SHLYYCQLEASACYVFTEQLGRFALVGEALSVAAAKRLKLLLFAPVACTSLEYNIRVYCLHDTHDALK
EVVQLEKQLGGQLIQEPRVLHFKDSYHNLRISIHDVPSSLWKSKLLVSYQEIPFYHIWNGTQRYLHCT
FTLERVSPSTSDLACKLWVWQVEGDGQSFSINFNITKDTRFAELLALESEAGVPALVGPSAFKIPELI
RQKIISSLDPPCRRGADWRTLAQKLHLDSHLSFFASKPSPTAMILNLWEARHFPNGNLSQLAAAVAGL
GQPDAGLFTVSEAEC

| | |
|---|---|
| SEQ ID NO: 525 | 2881 bp |

| | | |
|---|---|---|
| NOV21k, SNP13375492 of | ORF Start: ATG at 87 | ORF Stop: TGA at 2784 |

| | | |
|---|---|---|
| CG53908-01, DNA Sequence | SNP Pos: 1225 | SNP Change: T to C |

AGCTGGGGCTCCGGGCTGAGGCGCTAAAGCCGCCCTCCCGCCCGCGGGGCCCCGCGCCCGGCCCGCCC
GCCTGCCCGCCCGCGGCCATGGCCGTCCGGCCCGGCCTGTGGCCAGCGCTCCTGGGCATAGTCCTCGC
CGCTTGGCTCCGCGGCTCGGGTGCCCAGCAGAGTGCCACCGTGGCCAACCCAGTGCCTGGTGCCAACC
CGGACCTGCTTCCCCACTTCCTGGTGGAGCCCGAGGATGTGTACATCGTCAAGAACAAGCCAGTGCTG
CTTGTGTGCAAGGCCGTGCCCGCCACGCAGATCTTCTTCAAGTGCAACGGGGAGTGGGTGCGCCAGGT
GGACCACGTGATCGAGCGCAGCACAGACGGGAGCAGTGGTGAGCCGACCATGGAGGTCCGCATTAATG
TCTCAAGGCAGCAGGTCGAGAAGGTGTTCGGGCTGGAGGAATACTGGTGCCAGTGCGTGGCATGGAGC
TCCTCGGGCACCACCAAGAGTCAGAAGGCCTACATCCGCATAGCCAGATTGCGCAAGAACTTCGAGCA
GGAGCCGCTGGCCAAGGAGGTGTCCCTGGAGCAGGGCATCGTGCTGCCCTGCCGTCCACCGGAGGGCA
TCCCTCCAGCCGAGGTGGAGTGGCTCCGGAACGAGGACCTGGTGGACCCGTCCCTGGACCCCAATGTA
TACATCACGCGGGAGCACAGCCTGGTGGTGCGACAGGCCCGCCTTGCTGACACGGCCAACTACACCTG
CGTGGCCAAGAACATCGTGGCACGTCGCCGCAGCGCCTCCGCTGCTGTCATCGTCTACGTGAACGGTG
GGTGGTCGACGTGGACCGAGTGGTCCGTCTGCAGCGCCAGCTGTGGGCGCGGCTGGCAGAAACGGAGC
CGGAGCTGCACCAACCCGGCGCCTCTCAACGGGGGCGCTTTCTGTGAGGGGCAGAATGTCCATGACCG
CACCGTCTCCTCTCTGCTTGTCTCTGTGGACGGCAGCTGGAGCCCGTGGAGCAAGTGGTCGGCCTGTG
GGCTGGACTGCACCCACTGGCGGAGCCGTGAGTGCTCTGACCCAGCACCCCGCAACGGAGGGGAGGAG
TGCCAGGGCACTGACCTGGACACCCGCAACTGTACCAGTGACCTCTGTGTACACAGTGCTTCTGGCCC
TGAGGACGTGGCCCTCTATGTGGGCCTCATCGCCGTGGCCGTCTGCCTGGTCCTGCTGCTGCTTGTCC
CCATCCTCGTTTATTGCCGGAAGAAGGAGGGGCTGGACTCAGATGTGGCTGACTCGTCCATTCTCACC
TCAGGCTTCCAGCCCGTCAGCATCAAGCCCAGCAAAGCAGACAACCCCCATCTGCTCACCATCCAGCC
GGACCTCAGCACCACCACCACCTACCAGGGCAGTCTCTGTCCCCGGCAGGATGGGCCCAGCCCCAAGT
TCCAGCTCACCAATGGGCACCTGCTCAGCCCCCTGGGTGGCGGCCGCCACACACTGCACCACAGCTCT
CCCACCTCTGAGGCCGAGGAGTTCGTCTCCCGCCTCTCCACCCAGAACTACTTCCGCTCCCTGCCCCG
GTATCAGCCTCCTCATCCCCCCAGATGCCATACCCCGAGGGAAGATCTATGAGATCTACCTCACGCTG
CACAAGCCGGAAGACGTGAGGTTGCCCCTAGCTGGCTGTCAGACCCTGCTGAGTCCCATCGTTAGCTG
TGGACCCCCTGGCGTCCTGCTCACCCGGCCAGTCATCCTGGCTATGGACCACTGTGGGGAGCCCAGCC
CTGACAGCTGGAGCCTGCGCCTCAAAAAGCAGTCGTGCGAGGGCAGCTGGGAGCAGGATGTGCTGCAC
CTGGGCGAGGAGGCGCCCTCCCACCTCTACTACTGCCAGCTGGAGGCCAGTGCCTGCTACGTCTTCAC
CGAGCAGCTGGGCCGCTTTGCCCTGGTGGGAGAGGCCCTCAGCGTGGCTGCCGCCAAGCGCCTCAAGC
TGCTTCTGTTTGCGCCGGTGGCCTGCACCTCCCTCGAGTACAACATCCGGGTCTACTGCCTGCATGAC
ACCCACGATGCACTCAAGGAGGTGGTGCAGCTGGAGAAGCAGCTGGGGGGACAGCTGATCCAGGAGCC
ACGGGTCCTGCACTTCAAGGACAGTTACCACAACCTGCGCCTATCCATCCACGATGTGCCCAGCTCCC
TGTGGAAGAGTAAGCTCCTTGTCAGCTACCAGGAGATCCCCTTTTATCACATCTGGAATGGCACGCAG
CGGTACTTGCACTGCACCTTCACCCTGGAGCGTGTCAGCCCCAGCACTAGTGACCTGGCCTGCAAGCT
GTGGGTGTGGCAGGTGGAGGGCGACGGGCAGAGCTTCAGCATCAACTTCAACATCACCAAGGACACAA
GGTTTGCTGAGCTGCTGGCTCTGGAGAGTGAAGCGGGGGTCCCAGCCCTGGTGGGCCCCAGTGCCTTC
AAGATCCCCTTCCTCATTCGGCAGAAGATAATTTCCAGCCTGGACCCACCCTGTAGGCGGGGTGCCGA
CCACAGCCATGATCCTCAACCTGTGGGAGGCGCGGCACTTCCCCAACGGCAACCTCAGCCAGCTGGCT
GCAGCAGTGGCTGGACTGGGCCAGCCAGACGCTGGCCTCTTCACAGTGTCGGAGGCTGAGTGCTGAGG
GGGGCCCTTCCCCACACCGGGGAGA

| | | |
|---|---|---|
| NOV21k, SNP13375492 of | SEQ ID NO: 526 | MW at 99046.9kD |

| | | | |
|---|---|---|---|
| CG53908-1, Protein Sequence | SNP Pos: 380 | 899 aa | SNP Change: Leu to Pro |

MAVRPGLWPALLGIVLAAWLRGSGAQQSATVANPVPGANPDLLPHFLVEPEDVYIVKNKPVLLVCKAV
PATQIFFKCNGEWVRQVDHVIERSTDGSSGEPTMEVRINVSRQQVEKVFGLEEYWCQCVAWSSSGTTK
SQKAYIRIARLRKNFEQEPLAKEVSLEQGIVLPCRPPEGIPPAEVEWLRNEDLVDPSLDPNVYITREH
SLVVRQARLADTANYTCVAKNIVARRRSASAAVIVYVNGGWSTWTEWSVCSASCGRGWQKRSRSCTNP
APLNGGAFCEGQNVHDRTVSSLLVSVDGSWSPWSKWSACGLDCTHWRSRECSDPAPRNGGEECQGTDL
DTRNCTSDLCVHSASGPEDVALYVGLIAVAVCLVLLLLVPILVYCRKKEGLDSDVADSSILTSGFQPV
SIKPSKADNPHLLTIQPDLSTTTTYQGSLCPRQDGPSPKFQLTNGHLLSPLGGGRHTLHHSSPTSEAE
EFVSRLSTQNYFRSLPRGTSNMTYGTFNFLGGRLMIPNTGISLLIPPDAIPRGKIYEIYLTLHKPEDV
RLPLAGCQTLLSPIVSCGPPGVLLTRPVILAMDHCGEPSPDSWSLRLKKQSCEGSWEQDVLHLGEEAP
SHLYYCQLEASACYVFTEQLGRFALVGEALSVAAAKRLKLLLFAPVACTSLEYNTRVYCLHDTHDALK
EVVQLEKQLGGQLIQEPRVLHFKDSYHNLRLSIHDVPSSLWKSKLLVSYQEIPFYHIWNGTQRYLHCT
FTLERVSPSTSDLACKLWVWQVEGDGQSFSINFNITKDTRFAELLALESEAGVPALVGPSAFKIPFLI
RQKIISSLDPPCRRGADWRTLLAQKLHLDSHLSFFASKPSPTAMILNLWEARHFPNGNLSQLAAAVAGL
GQPDAGLFTVSEAEC

| | |
|---|---|
| SEQ ID NO: 527 | 2881 bp |

| | | |
|---|---|---|
| NOV21l, SNP13375493 of | ORF Start: ATG at 87 | ORF Stop: TGA at 2784 |

| | | |
|---|---|---|
| CG53908-01, DNA Sequence | SNP Pos: 1660 | SNP Change: C to T |

AGCTGGGGCTCCGGGCTGAGGCGCTAAAGCCGCCCTCCCGCCCGCGGGGCCCCGCGCCCGGCCCGCCC
GCCTGCCCGCCCGCGGCCATGGCCGTCCGGCCCGGCCTGTGGCCAGCGCTCCTGGGCATAGTCCTCGC
CGCTTGGCTCCGCGGCTCGGGTGCCCAGCAGAGTGCCACCGTGGCCAACCCAGTGCCTGGTGCCAACC
CGGACCTGCTTCCCCACTTCCTGGTGGAGCCCGAGGATGTGTACATCGTCAAGAACAAGCCAGTGCTG
CTTGTGTGCAAGGCCGTGCCCGCCACGCAGATCTTCTTCAAGTGCAACGGGGAGTGGGTGCGCCAGGT
GGACCACGTGATCGAGCGCAGCACAGACGGGAGCAGTGGTGAGCCGACCATGGAGGTCCGCATTAATG
TCTCAAGGCAGCAGGTCGAGAAGGTGTTCGGGCTGGAGGAATACTGGTGCCAGTGCGTGGCATGGAGC
TCCTCGGGCACCACCAAGAGTCAGAAGGCCTACATCCGCATAGCCAGATTGCGCAAGAACTTCGAGCA
GGAGCCGCTGGCCAAGGAGGTGTCCCTGGAGCAGGGCATCGTGCTGCCCTGCCGTCCACCGGAGGGCA
TCCCTCCAGCCGAGGTGGAGTGGCTCCGGAACGAGGACCTGGTGGACCCGTCCCTGGACCCCAATGTA
TACATCACGCGGGAGCACAGCCTGGTGGTGCGACAGGCCCGCCTTGCTGACACGGCCAACTACACCTG
CGTGGCCAAGAACATCGTGGCACGTCGCCGCAGCGCCTCCGCTGCTGTCATCGTCTACGTGAACGGTG
GGTGGTCGACGTGGACCGAGTGGTCCGTCTGCAGCGCCAGCTGTGGGCGCGGCTGGCAGAAACGGAGC
CGGAGCTGCACCAACCCGGCGCCTCTCAACGGGGGCGCTTTCTGTGAGGGGCAGAATGTCCATGACCG
CACCGTCTCCTCTCTGCTTGTCTCTGTGGACGGCAGCTGGAGCCCGTGGAGCAAGTGGTCGGCCTGTG
GGCTGGACTGCACCCACTGGCGGAGCCGTGAGTGCTCTGACCCAGCACCCCGCAACGGAGGGGAGGAG
TGCCAGGGCACTGACCTGGACACCCGCAACTGTACCAGTGACCTCTGTGTACACAGTGCTTCTGGCCC
TGAGGACGTGGCCCTCTATGTGGGCCTCATCGCCGTGGCCGTCTGCCTGGTCCTGCTGCTGCTTGTCC
TCATCCTCGTTTATTGCCGGAAGAAGGAGGGGCTGGACTCAGATGTGGCTGACTCGTCCATTCTCACC
GGACCTCAGCACCACCACCACCTACCAGGGCAGTCTCTGTCCCCGGCAGGATGGGCCCAGCCCCAAGT
TCCAGCTCACCAATGGGCACCTGCTCAGCCCCCTGGGTGGCGGCCGCCACACACTGCACCACAGCTCT
GTATCAGCCTCCTCATCCCCCCAGATGTCATACCCCGAGGGAAGATCTATGAGATCTACCTCACGCTG
CACAAGCCGGAAGACGTGAGGTTGCCCCTAGCTGGCTGTCAGACCCTGCTGAGTCCCATCGTTAGCTG
TGGACCCCCTGGCGTCCTGCTCACCCGGCCAGTCATCCTGGCTATGGACCACTGTGGGGAGCCCAGCC
CTGACAGCTGGAGCCTGCGCCTCAAAAAGCAGTCGTGCGAGGGCAGCTGGGAGCAGGATGTGCTGCAC
CTGGGCGAGGAGGCGCCCTCCCACCTCTACTACTGCCAGCTGGAGGCCAGTGCCTGCTACGTCTTCAC
CGAGCAGCTGGGCCGCTTTGCCCTGGTGGGAGAGGCCCTCAGCGTGGCTGCCGCCAAGCGCCTCAAGC
TGCTTCTGTTTGCGCCGGTGGCCTGCACCTCCCTCGAGTACAACATCCGGGTCTACTGCCTGCATGAC
ACCCACGATGCACTCAAGGAGGTGGTGCAGCTGGAGAAGCAGCTGGGGGGACAGCTGATCCAGGAGCC
ACGGGTCCTGCACTTCAAGGACAGTTACCACAACCTGCGCCTATCCATCCACGATGTGCCCAGCTCCC
TGTGGAAGAGTAAGCTCCTTGTCAGCTACCAGGAGATCCCCTTTTATCACATCTGGAATGGCACGCAG
CGGTACTTGCACTGCACCTTCACCCTGGAGCGTGTCAGCCCCAGCACTAGTGACCTGGCCTGCAAGCT
GTGGGTGTGGCAGGTGGAGGGCGACGGGCAGAGCTTCAGCATCAACTTCAACATCACCAAGGACACAA
GGTTTGCTGAGCTGCTGGCTCTGGAGAGTGAAGCGGGGGTCCCAGCCCTGGTGGGCCCCAGTGCCTTC
AAGATCCCCTTCCTCATTCGGCAGAAGATAATTTCCAGCCTGGACCCACCCTGTAGGCGGGGTGCCGA
CCACAGCCATGATCCTCAACCTGTGGGAGGCGCGGCACTTCCCCAACGGCAACCTCAGCCAGCTGGCT
GCAGCAGTGGCTGGACTGGGCCAGCCAGACGCTGGCCTCTTCACAGTGTCGGAGGCTGAGTGCTGAGG
CCGGCCAGGCCCGACACCTACACTCTCACCAGCTTTGGCACCCACCAAGGACAGGCAGAAGCCGGACA
GGGGCCCTTCCCCACACCGGGGAGA

| | | |
|---|---|---|
| NOV21l, SNP13375493 of | SEQ ID NO: 528 | MW at 99091.0kD |

| | | | |
|---|---|---|---|
| CG53908-01, Protein Sequence | SNP Pos: 525 | 899 aa | SNP Change: Ala to Val |

MARRPGLWPALLGIVLAAWLRGSGAQQSATVANPVPGANPDLLPHFLVEPEDVYIVKNKPVLLVCKAV
PATQIFFKCNGEWVRQVDHVIERSTDGSSGEPTMEVRINVSRQQVEKVFGLEEYWCQCVAWSSSGTTK
SQKAYIRIARLRKNFEQEPLAKEVSLEQGIVLPCRPPEGIPPAEVEWLRNEDLVDPSLDPNVYITREH
SLVVRQARLADTANYTCVAKNIVARRRSASAAVIVYVNGGWSTWTEWSVCSASCGRGWQKRSRSCTNP
APLNGGAFCEGQNVHDRTVSSLLVSVDGSWSPWSKWSACGLDCTHWRSRECSDPAPRNGGEECQGTDL
DTRNCTSDLCVHSASGPEDVALYVGLIAVAVCLVLLLLVILVYCRKKEGLDSDVADSSILTSGFQPV
SIKPSKADNPHLLTIQPDLSTTTTYQGSLCPRQDGPSPKFQLTNGHLLSPLGGGRHTLHHSSPTSEAE
EFVSRLSTQNYFRSLPRGTSNMTYGTFNFLGGRLMIPNTGISLLIPPDVIPRGKIYEIYLTLHKPEDV
RLPLAGCQTLLSPIVSCGPPGVLLTRPVILAMDHCGEPSPDSWSLRLKKQSCEGSWEQDVLHLGEEAP
SHLYYCQLEASACYVFTEQLGRFALVGEALSVAAAKRLKLLLFAPVACTSLEYNIRVYCLHDTHDALK
EVVQLEKQLGGQLIQEPRVLHFKDSYHNLRLSIHDVPSSLWKSKLLVSYQEIPFYHIWNGTQRYLHCT
FTLERVSPSTSDLACKLWVWQVEGDGQSFSINFNITKDTRFAELLALESEAGVPALVGPSAFKTPFLI
RQKIISSLDPPCRRGADWRTLAQKLHLDSHLSFFASKPSPTAMILNLWEARHFPNGNLSQLAAAVAGL
GQPDAGLFTVSEAEC

| | |
|---|---|
| SEQ ID NO: 529 | 2881 bp |

| | | |
|---|---|---|
| NOV21m, SNP13375135 of | ORF Start: ATG at 87 | ORF Stop: TGA at 2784 |

| | | |
|---|---|---|
| CG53908-01, DNA Sequence | SNP Pos: 1855 | SNP Change: G to A |

AGCTGGGGCTCCGGGCTGAGGCGCTAAAGCCGCCCTCCCGCCCGCGGGGCCCCGCGCCCGGCCCGCCC
GCCTGCCCGCCCGCGGCCATGGCCGTCCGGCCCGGCCTGTGGCCAGCGCTCCTGGGCATAGTCCTCGC
CGCTTGGCTCCGCGGCTCGGGTGCCCAGCAGAGTGCCACCGTGGCCAACCCAGTGCCTGGTGCCAACC
CGGACCTGCTTCCCCACTTCCTGGTGGAGCCCGAGGATGTGTACATCGTCAAGAACAAGCCAGTGCTG
CTTGTGTGCAAGGCCGTGCCCGCCACGCAGATCTTCTTCAAGTGCAACGGGGAGTGGGTGCGCCAGGT
GGACCACGTGATCGAGCGCAGCACAGACGGGAGCAGTGGTGAGCCGACCATGGAGGTCCGCATTAATG
TCTCAAGGCAGCAGGTCGAGAAGGTGTTCGGGCTGGAGGAATACTGGTGCCAGTGCGTGGCATGGAGC
TCCTCGGGCACCACCAAGAGTCAGAAGGCCTACATCCGCATAGCCAGATTGCGCAAGAACTTCGAGCA
GGAGCCGCTGGCCAAGGAGGTGTCCCTGGAGCAGGGCATCGTGCTGCCCTGCCGTCCACCGGAGGGCA
TACATCACGCGGGAGCACAGCCTGGTGGTGCGACAGGCCCGCCTTGCTGACACGGCCAACTACACCTG
CGTGGCCAAGAACATCGTGGCACGTCGCCGCAGCGCCTCCGCTGCTGTCATCGTCTACGTGAACGGTG
GGTGGTCGACGTGGACCGAGTGGTCCGTCTGCAGCGCCAGCTGTGGGCGCGGCTGGCAGAAACGGAGC
CACCGTCTCCTCTCTGCTTGTCTCTGTGGACGGCAGCTGGAGCCCGTGGAGCAAGTGGTCGGCCTGTG
TGCCAGGGCACTGACCTGGACACCCGCAACTGTACCAGTGACCTCTGTGTACACAGTGCTTCTGGCCC
TGAGGACGTGGCCCTCTATGTGGGCCTCATCGCCGTGGCCGTCTGCCTGGTCCTGCTGCTGCTTGTCC
TCATCCTCGTTTATTGCCGGAAGAAGGAGGGGCTGGACTCAGATGTGGCTGACTCGTCCATTCTCACC
TCAGGCTTCCAGCCCGTCAGCATCAAGCCCAGCAAAGCAGACAACCCCCATCTGCTCACCATCCAGCC
GGACCTCAGCACCACCACCACCTACCAGGGCAGTCTCTGTCCCCGGCAGGATGGGCCCAGCCCCAAGT
TCCAGCTCACCAATGGGCACCTGCTCAGCCCCCTGGGTGGCGGCCGCCACACACTGCACCACAGCTCT
CCCACCTCTGAGGCCGAGGAGTTCGTCTCCCGCCTCTCCACCCAGAACTACTTCCGCTCCCTGCCCCG
AGGCACCAGCAACATGACCTATGGGACCTTCAACTTCCTCGGGGGCCGGCTGATGATCCCTAATACAG
GTATCAGCCTCCTCATCCCCCCAGATGCCATACCCCGAGGGAAGATCTATGAGATCTACCTCACGCTG
CACAAGCCGGAAGACGTGAGGTTGCCCCTAGCTGGCTGTCAGACCCTGCTGAGTCCCATCGTTAGCTG
TGGACCCCCTGGCGTCCTGCTCACCCGGCCAGTCATCCTGGCTATGGACCACTGTGGGGAGCCCAGCC
CTGACAGCTGGAGCCTGCACCTCAAAAAGCAGTCGTGCGAGGGCAGCTGGGAGCAGGATGTGCTGCAC
CTGGGCGAGGAGGCGCCCTCCCACCTCTACTACTGCCAGCTGGAGGCCAGTGCCTGCTACGTCTTCAC
CGAGCAGCTGGGCCGCTTTGCCCTGGTGGGAGAGGCCCTCAGCGTGGCTGCCGCCAAGCGCCTCAAGC
TGCTTCTGTTTGCGCCGGTGGCCTGCACCTCCCTCGAGTACAACATCCGGGTCTACTGCCTGCATGAC
ACCCACGATGCACTCAAGGAGGTGGTGCAGCTGGAGAAGCAGCTGGGGGGACAGCTGATCCAGGAGCC
ACGGGTCCTGCACTTCAAGGACAGTTACCACAACCTGCGCCTATCCATCCACGATGTGCCCAGCTCCC
TGTGGAAGAGTAAGCTCCTTGTCAGCTACCAGGAGATCCCCTTTTATCACATCTGGAATGGCACGCAG
CGGTACTTGCACTGCACCTTCACCCTGGAGCGTGTCAGCCCCAGCACTAGTGACCTGGCCTGCAAGCT
GTGGGTGTGGCAGGTGGAGGGCGACGGGCAGAGCTTCAGCATCAACTTCAACATCACCAAGGACACAA
GGTTTGCTGAGCTGCTGGCTCTGGAGAGTGAAGCGGGGGTCCCAGCCCTGGTGGGCCCCAGTGCCTTC
AAGATCCCCTTCCTCATTCGGCAGAAGATAATTTCCAGCCTGGACCCACCCTGTAGGCGGGGTGCCGA
CTGGCGGACTCTGGCCCAGAAACTCCACCTGGACAGCCATCTCAGCTTCTTTGCCTCCAAGCCCAGCC
CCACAGCCATGATCCTCAACCTGTGGGAGGCGCGGCACTTCCCCAACGGCAACCTCAGCCAGCTGGCT
GCAGCAGTGGCTGGACTGGGCCAGCCAGACGCTGGCCTCTTCACAGTGTCGGAGGCTGAGTGCTGAGG
CCGGCCAGGCCCGACACCTACACTCTCACCAGCTTTGGCACCCACCAAGGACAGGCAGAAGCCGGACT
GGGGCCCTTCCCCACACCGGGGAGA

| | | |
|---|---|---|
| NOV21m, SNP13375135 of | SEQ ID NO:530 | MW at 99043.9kD |

| | | | |
|---|---|---|---|
| CG53908-01, Protein Sequence | SNP Pos: 590 | 899 aa | SNP Change: Arg to His |

MAVRPGLWPALLGIVLAAWLRGSGAQQSATVANPVPGANPDLLPHFLVEPEDVYIVKNKPVLLVCKAV
PATQIFFKCNGEWVRQVDHVIERSTDGSSGEPTMEVRINVSRQQVEKVFGLEEYWCQCVAWSSSGTTK
SQKAYIRIARLRKNFEQEPLAKEVSLEQGIVLPCRPPEGIPPAEVEWLRNEDLVDPSLDPNVYITREH
SLVVRQARLADTANYTCVAKNIVARRRSASAAVIVYVNGGWSTWTEWSVCSASCGRGWQKRSRSCTNP
APLNGGAFCEGQNVHDRTVSSLLVSVDGSWSPWSKWSACGLDCTHWRSRECSDPAPRNGGEECQGTDL
DTRNCTSDLCHSASGPEDVALYVGLIAVAVCLVLLLLVLILVYCRKKEGLDSDVPINSSILTSGFQPV
SIKPSKADNPHLLTIQPDLSTTTTYQGSLCPRQDGPSPKFQLTNGHLLSPLGGGRHTLHHSSPTSEAE
EFVSRLSTQNYFRSLPRGTSNMTYGTFNFLGGRLMIPNTGISLLIPPDAIPRGKIYEIYLTLHKPEDV
RLPLAGCQTLLSPIVSCGPPGVLLTRPVILAMDHCGEPSPDSWSLHLKKQSCEGSWEQDVLHLGEEAP
SHLYYCQLEASACYVFTEQLGRFALVGEALSVAAAKRLKLLLFAPVACTSLEYNIRVYCLHDTHDALK
EVVQLEKQLGGQLIQEPRVLHFKDSYHNLRLSIHDVPSSLWKSKLLVSYQEIPFYHIWNGTQRYLHCT
FTLERVSPSTSDLACKLWVWQVEGDGQSFSINFNITKDTRFAELLALESEAGVPALVGPSAFKIPFLI
RQKIISSLDPPCRRGADWRTLAQKLHLDSHLSFFASKPSPTAMILNLWEARHFPNGNLSQLAAAVAGL
GQPDAGLFTVSEAEC

| | |
|---|---|
| SEQ ID NO: 531 | 2881 bp |

| | | |
|---|---|---|
| NOV21n, SNP13375136 of | ORF Start: ATG at 87 | ORF Stop: TGA at 2784 |

| | | |
|---|---|---|
| CG53908-01, DNA Sequence | SNP Pos: 1965 | SNP Change: G to A |

AGCTGGGGCTCCGGGCTGAGGCGCTAAAGCCGCCCTCCCGCCCGCGGGGCCCCGCGCCCGGCCCGCCC
CGCTTGGCTCCGCGGCTCGGGTGCCCAGCAGAGTGCCACCGTGGCCAACCCAGTGCCTGGTGCCAACC
CGGACCTGCTTCCCCACTTCCTGGTGGAGCCCGAGGATGTGTACATCGTCAAGAACAAGCCAGTGCTG
CTTGTGTGCAAGGCCGTGCCCGCCACGCAGATCTTCTTCAAGTGCAACGGGGAGTGGGTGCGCCAGGT
GGACCACGTGATCGAGCGCAGCACAGACGGGAGCAGTGGTGAGCCGACCATGGAGGTCCGCATTAATG
TCTCAAGGCAGCAGGTCGAGAAGGTGTTCGGGCTGGAGGAATACTGGTGCCAGTGCGTGGCATGGAGC
TCCTCGGGCACCACCAAGAGTCAGAAGGCCTACATCCGCATAGCCAGATTGCGCAAGAACTTCGAGCA
GGAGCCGCTGGCCAAGGAGGTGTCCCTGGAGCAGGGCATCGTGCTGCCCTGCCGTCCACCGGAGGGCA
TCCCTCCAGCCGAGGTGGAGTGGCTCCGGAACGAGGACCTGGTGGACCCGTCCCTGGACCCCAATGTA
TACATCACGCGGGAGCACAGCCTGGTGGTGCGACAGGCCCGCCTTGCTGACACGGCCAACTACACCTG
CGTGGCCAAGAACATCGTGGCACGTCGCCGCAGCGCCTCCGCTGCTGTCATCGTCTACGTGAACGGTG
GGTGGTCGACGTGGACCGAGTGGTCCGTCTGCAGCGCCAGCTGTGGGCGCGGCTGGCAGAAACGGAGC
CGGAGCTGCACCAACCCGGCGCCTCTCAACGGGGGCGCTTTCTGTGAGGGGCAGAATGTCCATGACCG
CACCGTCTCCTCTCTGCTTGTCTCTGTGGACGGCAGCTGGAGCCCGTGGAGCAAGTGGTCGGCCTGTG
GGCTGGACTGCACCCACTGGCGGAGCCGTGAGTGCTCTGACCCAGCACCCCGCAACGGAGGGGAGGAG
TGCCAGGGCACTGACCTGGACACCCGCAACTGTACCAGTGACCTCTGTGTACACAGTGCTTCTGGCCC
TGAGGACGTGGCCCTCTATGTGGGCCTCATCGCCGTGGCCGTCTGCCTGGTCCTGCTGCTGCTTGTCC
TCATCCTCGTTTATTGCCGGAAGAAGGAGGGGCTGGACTCAGATGTGGCTGACTCGTCCATTCTCACC
TCAGGCTTCCAGCCCGTCAGCATCAAGCCCAGCAAAGCAGACAACCCCCATCTGCTCACCATCCAGCC
GGACCTCAGCACCACCACCACCTACCAGGGCAGTCTCTGTCCCCGGCAGGATGGGCCCAGCCCCAAGT
TCCAGCTCACCAATGGGCACCTGCTCAGCCCCCTGGGTGGCGGCCGCCACACACTGCACCACAGCTCT
CCCACCTCTGAGGCCGAGGAGTTCGTCTCCCGCCTCTCCACCCAGAACTACTTCCGCTCCCTGCCCCG
AGGCACCAGCAACATGACCTATGGGACCTTCAACTTCCTCGGGGGCCGGCTGATGATCCCTAATACAG
CACAAGCCGGAAGACGTGAGGTTGCCCCTAGCTGGCTGTCAGACCCTGCTGAGTCCCATCGTTAGCTG
TGGACCCCCTGGCGTCCTGCTCACCCGGCCAGTCATCCTGGCTATGGACCACTGTGGGGAGCCCAGCC
CTGACAGCTGGAGCCTGCGCCTCAAAAAGCAGTCGTGCGAGGGCAGCTGGGAGCAGGATGTGCTGCAC
CTGGGCGAGGAGGCGCCCTCCCACCTCTACTACTGCCAGCTGGAGGCCAGTGCCTGCTACATCTTCAC
CGAGCAGCTGGGCCGCTTTGCCCTGGTGGGAGAGGCCCTCAGCGTGGCTGCCGCCAAGCGCCTCAAGC
ACCCACGATGCACTCAAGGAGGTGGTGCAGCTGGAGAAGCAGCTGGGGGGACAGCTGATCCAGGAGCC
TGTGGAAGAGTAAGCTCCTTGTCAGCTACCAGGAGATCCCCTTTTATCACATCTGGAATGGCACGCAG
CGGTACTTGCACTGCACCTTCACCCTGGAGCGTGTCAGCCCCAGCACTAGTGACCTGGCCTGCAAGCT
GTGGGTGTGGCAGGTGGAGGGCGACGGGCAGAGCTTCAGCATCAACTTCAACATCACCAAGGACACAA
GGTTTGCTGAGCTGCTGGCTCTGGAGAGTGAAGCGGGGGTCCCAGCCCTGGTGGGCCCCAGTGCCTTC
AAGATCCCCTTCCTCATTCGGCAGAAGATAATTTCCAGCCTGGACCCACCCTGTAGGCGGGGTGCCGA
CTGGCGGACTCTGGCCCAGAAACTCCACCTGGACAGCCATCTCAGCTTCTTTGCCTCCAAGCCCAGCC
CCACAGCCATGATCCTCAACCTGTGGGAGGCGCGGCACTTCCCCAACGGCAACCTCAGCCAGCTGGCT
GCAGCAGTGGCTGGACTGGGCCAGCCAGACGCTGGCCTCTTCACAGTGTCGGAGGCTGAGTGCTGAGG
CCGGCCAGGCCCGACACCTACACTCTCACCAGCTTTGGCACCCACCAAGGACAGGCAGAAGCCGGACA
GGGGCCCTTCCCCACACCGGGGAGA

| | | |
|---|---|---|
| NOV21n, SNP13375136 of | SEQ ID NO: 532 | MW at 99077.0kD |

| | | | |
|---|---|---|---|
| CG53908-01, Protein Sequence | SNP Pos: 627 | 899 aa | SNP Change: Val to Ile |

+TL,1, MARVPGLWPALLGIVLAAWLRGSGAQQSATVANPVPGANPDLLPHFLVEPEDVYIVKNKPVLLVCKAV
PATQIFFKCNGEWVRQVDHVIERSTDGSSGEPTMEVRINVSRQQVEKVFGLEEYWCQCVAWSSSGTTK
SQKAYIRIARLRKNFEQEPLAKEVSLEQGIVLPCRPPEGIPPAEVEWLRNEDLVDPSLDPNVYITREH
DTRNCTSDLCVHSASGPEDVALYVGLIAVAVCLVLLLLVLILVYCRKKEGLDSDVADSSILTSGFQPV
SIKPSKADNPHLLTIQPDLSTTTTYQGSLCPRQDGPSPKFQLTNGHLLSPLGGGRHTLHHSSPTSEAE
EFVSRLSTQNYFRSLPRGTSNMTYGTFNFLGGRLMIPNTGISLLIPPDAIPRGKIYEIYLTLHKPEDV
RLPLAGCQTLLSPIVSCGPPGVLLTRPVILAMDHCGEPSPDSWSLRLKYQSCEGSWEQDVLHLGEEAP
SHLYYCQLEASACYIFTEQLGRFALVGEALSVAAAKRLKLLLFAPVACTSLEYNIRVYCLHDTHDALK
EVVQLEKQLGGQLIQEPRVLHFKDSYHNLRLSIHDVPSSLWKSKLLVSYQEIPFYHIWNGTQRYLHCT
FTLERVSPSTSDLACKLWVWQVEGDGQSFSINFNITKDTRFAELLALESEAGVPALVGPSAFKIPFLI
RQKIISSLDPPCRRGADWRTLAQKLHLDSHLSFFASKPSPTAMILNLWEARHFPNGNLSQLAAAVAGL
GQPDAGLFTVSEAEC

| | |
|---|---|
| SEQ ID NO: 533 | 2881 bp |

| | | |
|---|---|---|
| NOV21o, SNP13375137 of | ORF Start: ATG at 87 | ORF Stop: TGA at 2784 |

| | | |
|---|---|---|
| CG53908-01, DNA Sequence | SNP Pos: 2025 | SNP Change: G to A |

AGCTGGGGCTCCGGGCTGAGGCGCTAAAGCCGCCCTCCCGCCCGCGGGGCCCCGCGCCCGGCCCGCCC
GCCTGCCCGCCCGCGGCCATGGCCGTCCGGCCCGGCCTGTGGCCAGCGCTCCTGGGCATAGTCCTCGC
CGCTTGGCTCCGCGGCTCGGGTGCCCAGCAGAGTGCCACCGTGGCCAACCCAGTGCCTGGTGCCAACC
CGGACCTGCTTCCCCACTTCCTGGTGGAGCCCGAGGATGTGTACATCGTCAAGAACAAGCCAGTGCTG
CTTGTGTGCAAGGCCGTGCCCGCCACGCAGATCTTCTTCAAGTGCAACGGGGAGTGGGTGCGCCAGGT
GGACCACGTGATCGAGCGCAGCACAGACGGGAGCAGTGGTGAGCCGACCATGGAGGTCCGCATTAATG
TCTCAAGGCAGCAGGTCGAGAAGGTGTTCGGGCTGGAGGAATACTGGTGCCAGTGCGTGGCATGGAGC
TCCTCGGGCACCACCAAGAGTCAGAAGGCCTACATCCGCATAGCCAGATTGCGCAAGAACTTCGAGCA
GGAGCCGCTGGCCAAGGAGGTGTCCCTGGAGCAGGGCATCGTGCTGCCCTGCCGTCCACCGGAGGGCA
TCCCTCCAGCCGAGGTGGAGTGGCTCCGGAACGAGGACCTGGTGGACCCGTCCCTGGACCCCAATGTA
TACATCACGCGGGAGCACAGCCTGGTGGTGCGACAGGCCCGCCTTGCTGACACGGCCAACTACACCTG
CGTGGCCAAGAACATCGTGGCACGTCGCCGCAGCGCCTCCGCTGCTGTCATCGTCTACGTGAACGGTG
GGTGGTCGACGTGGACCGAGTGGTCCGTCTGCAGCGCCAGCTGTGGGCGCGGCTGGCAGAAACGGAGC
CGGAGCTGCACCAACCCGGCGCCTCTCAACGGGGGCGCTTTCTGTGAGGGGCAGAATGTCCATGACCG
CACCGTCTCCTCTCTGCTTGTCTCTGTGGACGGCAGCTGGAGCCCGTGGAGCAAGTGGTCGGCCTGTG
GGCTGGACTGCACCCACTGGCGGAGCCGTGAGTGCTCTGACCCAGCACCCCGCAACGGAGGGGAGGAG
TGCCAGGGCACTGACCTGGACACCCGCAACTGTACCAGTGACCTCTGTGTACACAGTGCTTCTGGCCC
TGAGGACGTGGCCCTCTATGTGGGCCTCATCGCCGTGGCCGTCTGCCTGGTCCTGCTGCTGCTTGTCC
TCATCCTCGTTTATTGCCGGAAGAAGGAGGGGCTGGACTCAGATGTGGCTGACTCGTCCATTCTCACC
TCAGGCTTCCAGCCCGTCAGCATCAAGCCCAGCAAAGCAGACAACCCCCATCTGCTCACCATCCAGCC
GGACCTCAGCACCACCACCACCTACCAGGGCAGTCTCTGTCCCCGGCAGGATGGGCCCAGCCCCAAGT
TCCAGCTCACCAATGGGCACCTGCTCAGCCCCCTGGGTGGCGGCCGCCACACACTGCACCACAGCTCT
CCCACCTCTGAGGCCGAGGAGTTCGTCTCCCGCCTCTCCACCCAGAACTACTTCCGCTCCCTGCCCCG
AGGCACCAGCAACATGACCTATGGGACCTTCAACTTCCTCGGGGGCCGGCTGATGATCCCTAATACAG
GTATCAGCCTCCTCATCCCCCCAGATGCCATACCCCGAGGGAAGATCTATGAGATCTACCTCACGCTG
TGGACCCCCTGGCGTCCTGCTCACCCGGCCAGTCATCCTGGCTATGGACCACTGTGGGGAGCCCAGCC
CTGACAGCTGGAGCCTGCGCCTCAAAAAGCAGTCGTGCGAGGGCAGCTGGGAGCAGGATGTGCTGCAC
CTGGGCGAGGAGGCGCCCTCCCACCTCTACTACTGCCAGCTGGAGGCCAGTGCCTGCTACGTCTTCAC
CGAGCAGCTGGGCCGCTTTGCCCTGGTGGGAGAGGCCCTCAGCGTGGCTGCCACCAAGCGCCTCAAGC
TGCTTCTGTTTGCGCCGGTGGCCTGCACCTCCCTCGAGTACAACATCCGGGTCTACTGCCTGCATGAC
ACCCACGATGCACTCAAGGAGGTGGTGCAGCTGGAGAAGCAGCTGGGGGGACAGCTGATCCAGGAGCC
ACGGGTCCTGCACTTCAAGGACAGTTACCACAACCTGCGCCTATCCATCCACGATGTGCCCAGCTCCC
TGTGGAAGAGTAAGCTCCTTGTCAGCTACCAGGAGATCCCCTTTTATCACATCTGGAATGGCACGCAG
CGGTACTTGCACTGCACCTTCACCCTGGAGCGTGTCAGCCCCAGCACTAGTGACCTGGCCTGCAAGCT
GTGGGTGTGGCAGGTGGAGGGCGACGGGCAGAGCTTCAGCATCAACTTCAACATCACCAAGGACACAA
GGTTTGCTGAGCTGCTGGCTCTGGAGAGTGAAGCGGGGGTCCCAGCCCTGGTGGGCCCCAGTGCCTTC
AAGATCCCCTTCCTCATTCGGCAGAAGATAATTTCCAGCCTGGACCCACCCTGTAGGCGGGGTGCCGA
CTGGCGGACTCTGGCCCAGAAACTCCACCTGGACAGCCATCTCAGCTTCTTTGCCTCCAAGCCCAGCC
CCACAGCCATGATCCTCAACCTGTGGGAGGCGCGGCACTTCCCCAACGGCAACCTCAGCCAGCTGGCT
GCAGCAGTGGCTGGACTGGGCCAGCCAGACGCTGGCCTCTTCACAGTGTCGGAGGCTGAGTGCTGAGG
CCGGCCAGGCCCGACACCTACACTCTCACCAGCTTTGGCACCCACCAAGGACAGGCAGAAGCCGGACA
GGGGCCCTTCCCCACACCGCGGAGA

| | | |
|---|---|---|
| NOV21o, SNP13375137 of | SEQ ID NO: 534 | MW at 99093.0kD |

| | | | |
|---|---|---|---|
| CG53908-01, Protein Sequence | SNP Pos: 647 | 899 aa | SNP Change: Ala to Thr |

MAVRPGLWPALLGIVLAAWLRGSGAQQSATVANPVPGANPDLLPHFLVEPEDVYIVKNKPVLLVCKAV
PATQIFFKCNGEWVRQVDHVIERSTDGSSGEPTMEVRINVSRQQVEKVFGLEEYWCQCVAWSSSGTTK
SQKAYIRIARLRKNFEQEPLAKEVSLEQGIVLPCRPPEGIPPAEVEWLRNEDLVDPSLDPNVYITREH
SLVVRQARLADTANYTCVAKNIVARRRSASAAVIVYVNGGWSTWTEWSVCSASCGRGWQKRSRSCTNP
APLNGGAFCEGQNVHDRTVSSLLVSVDGSWSPWSKWSACGLDCTHWRSRECSDPAPRNGGEECQGTDL
DTRNCTSDLCVHSASGPEDVALYVGLIAVAVCLVLLLLVLILVYCRKKEGLDSDVADSSILTSGFQPV
SIKPSKADNPHLLTIQPDLSTTTTYQGSLCPRQDGPSPKFQLTNGHLLSPLGGGRHTLHHSSPTSEAE
EFVSRLSTQNYFRSLPRGTSNMTYGTFNFLGGPLMIPNTGISLLIPPDAIPRGKIYEIYLTLHKPEDV
RLPLAGCQTLLSPIVSCGPPGVLLTRPVILAMDHCGEPSPDSWSLRLKKQSCEGSWEQDVLHLGEEAP
SHLYYCQLEASACYVFTEQLGRFALVGEALSVAATKRLKLLLFAPVACTSLEYNIRVYCLHDTHDALK
EVVQLEKQLGGQLIQEPRVLHFKDSYHNLRLSIHDVPSSLWKSKLLVSYQEIPFYHIWNGTQRYLHCT
FTLERVSPSTSDLACKLWVWQVEGDGQSFSINFNITKDTRFAELLALESEAGVPALVGPSAFKIPFLI
RQKIISSLDPPCRRGADWRTLAQKLHLDSHLSFFASKPSPTAMILNLWEARHFPNGNLSQLAAAVAGL
GQPDAGLFTVSEAEC

| | |
|---|---|
| SEQ ID NO: 535 | 2881 bp |

| | | |
|---|---|---|
| NOV21p, SNP13375138 of | ORF Start: ATG at 87 | ORF Stop: TGA at 2784 |

| | | |
|---|---|---|
| CG53908-01, DNA Sequence | SNP Pos: 2038 | SNP Change: A to G |

AGCTGGGGCTCCGGGCTGAGGCGCTAAAGCCGCCCTCCCGCCCGCGGGGCCCCGCGCCCGGCCCGCCC
GCCTGCCCGCCCGCGGCCATGGCCGTCCGGCCCGGCCTGTGGCCAGCGCTCCTGGGCATAGTCCTCGC
CGCTTGGCTCCGCGGCTCGGGTGCCCAGCAGAGTGCCACCGTGGCCAACCCAGTGCCTGGTGCCAACC
CGGACCTGCTTCCCCACTTCCTGGTGGAGCCCGAGGATGTGTACATCGTCAAGAACAAGCCAGTGCTG
CTTGTGTGCAAGGCCGTGCCCGCCACGCAGATCTTCTTCAAGTGCAACGGGGAGTGGGTGCGCCAGGT
GGACCACGTGATCGAGCGCAGCACAGACGGGAGCAGTGGTGAGCCGACCATGGAGGTCCGCATTAATG
TCTCAAGGCAGCAGGTCGAGAAGGTGTTCGGGCTGGAGGAATACTGGTGCCAGTGCGTGGCATGGAGC
TCCTCGGGCACCACCAAGAGTCAGAAGGCCTACATCCGCATAGCCAGATTGCGCAAGAACTTCGAGCA
GGAGCCGCTGGCCAAGGAGGTGTCCCTGGAGCAGGGCATCGTGCTGCCCTGCCGTCCACCGGAGGGCA
TCCCTCCAGCCGAGGTGGAGTGGCTCCGGAACGAGGACCTGGTGGACCCGTCCCTGGACCCCAATGTA
CGTGGCCAAGAACATCGTGGCACGTCGCCGCAGCGCCTCCGCTGCTGTCATCGTCTACGTGAACGGTG
GGTGGTCGACGTGGACCGAGTGGTCCGTCTGCAGCGCCAGCTGTGGGCGCGGCTGGCAGAAACGGAGC
CGGAGCTGCACCAACCCGGCGCCTCTCAACGGGGGCGCTTTCTGTGAGGGGCAGAATGTCCATGACCG
CACCGTCTCCTCTCTGCTTGTCTCTGTGGACGGCAGCTGGAGCCCGTGGAGCCCGTGGTCGGCCTGTG
GGCTGGACTGCACCCACTGGCGGAGCCGTGAGTGCTCTGACCCAGCACCCCGCAACGGAGGGGAGGAG
TGCCAGGGCACTGACCTGGACACCCGCAACTGTACCAGTGACCTCTGTGTACACAGTGCTTCTGGCCC
TGAGGACGTGGCCCTCTATGTGGGCCTCATCGCCGTGGCCGTCTGCCTGGTCCTGCTGCTGCTTGTCC
TCATCCTCGTTTATTGCCGGAAGAAGGAGGGGCTGGACTCAGATGTGGCTGACTCGTCCATTCTCACC
TCAGGCTTCCAGCCCGTCAGCATCAAGCCCAGCAAAGCAGACAACCCCCATCTGCTCACCATCCAGCC
GGACCTCAGCACCACCACCACCTACCAGGGCAGTCTCTGTCCCCGGCAGGATGGGCCCAGCCCCAAGT
TCCAGCTCACCAATGGGCACCTGCTCAGCCCCCTGGGTGGCGGCCGCCACACACTGCACCACAGCTCT
CCCACCTCTGAGGCCGAGGAGTTCGTCTCCCGCCTCTCCACCCAGAACTACTTCCGCTCCCTGCCCCG
AGGCACCAGCAACATGACCTATGGGACCTTCAACTTCCTCGGGGGCCGGCTGATGATCCCTAATACAG
GTATCAGCCTCCTCATCCCCCCAGATGCCATACCCCGAGGGAAGATCTATGAGATCTACCTCACGCTG
CACAAGCCGGAAGACGTGAGGTTGCCCCTAGCTGGCTGTCAGACCCTGCTGAGTCCCATCGTTAGCTG
TGGACCCCCTGGCGTCCTGCTCACCCGGCCAGTCATCCTGGCTATGGACCACTGTGGGGAGCCCAGCC
CTGACAGCTGGAGCCTGCGCCTCAAAAAGCAGTCGTGCGAGGGCAGCTGGGAGCAGGATGTGCTGCAC
CTGGGCGAGGAGGCGCCCTCCCACCTCTACTACTGCCAGCTGGAGGCCAGTGCCTGCTACGTCTTCAC
CGAGCAGCTGGGCCGCTTTGCCCTGGTGGGAGAGGCCCTCAGCGTGGCTGCCGCCAAGCGCCTCAGGC
TGCTTCTGTTTGCGCCGGTGGCCTGCACCTCCCTCGAGTACAACATCCGGGTCTACTGCCTGCATGAC
ACCCACGATGCACTCAAGGAGGTGGTGCAGCTGGAGAAGCAGCTGGGGGGACAGCTGATCCAGGAGCC
ACGGGTCCTGCACTTCAAGGACAGTTACCACAACCTGCGCCTATCCATCCACGATGTGCCCAGCTCCC
TGTGGAAGAGTAAGCTCCTTGTCAGCTACCAGGAGATCCCCTTTTATCACATCTGGAATGGCACGCAG
CGGTACTTGCACTGCACCTTCACCCTGGAGCGTGTCAGCCCCAGCACTAGTGACCTGGCCTGCAAGCT
GTGGGTGTGGCAGGTGGAGGGCGACGGGCAGAGCTTCAGCATCAACTTCAACATCACCAAGGACACAA
AAGATCCCCTTCCTCATTCGGCAGAAGATAATTTCCAGCCTGGACCCACCCTGTAGGCGGGGTGCCGA
CTGGCGGACTCTGGCCCAGAAACTCCACCTGGACAGCCATCTCAGCTTCTTTGCCTCCAAGCCCAGCC
CCACAGCCATGATCCTCAACCTGTGGGAGGCGCGGCACTTCCCCAACGGCAACCTCAGCCAGCTGGCT
GCAGCAGTGGCTGGACTGGGCCAGCCAGACGCTGGCCTCTTCACAGTGTCGGAGGCTGAGTGCTGAGG
CCGGCCAGGCCCGACACCTACACTCTCACCAGCTTTGGCACCCACCAAGGACAGGCAGAAGCCGGACA
GGGGCCCTTCCCCACACCGGGGAGA

| | | |
|---|---|---|
| NOV21p, SNP13375138 of | SEQ ID NO: 536 | MW at 99091.0kD |

| | | | |
|---|---|---|---|
| CG53908-01, Protein Sequence | SNP Pos: 651 | 899 aa | SNP Change: Lys to Arg |

MAVRPGLWPALLGIVLAAWLRGSGAQQSATVANPVPGANPDLLPHFLVEPEDVYIVKNKPVLLVCKAV
PATQIFFKCNGEWVRQVDHVIERSTDGSSGEPTMEVRINVSRQQVEKVFGLEEYWCQCVAWSSSGTTK
SQKAYIRIARLRKNFEQEPLAKEVSLEQGIVLPCRPPEGIPPAEVEWLRNEDLVDPSLDPNVYITREH
SLVVRQARLADTANYTCVAKNIVARRRSASAAVIVYVNGGWSTWTEWSVCSASCGRGWQKRSRSCTNP
APLNGGAFCEGQNVHDRTVSSLLVSVDGSWSPWSKWSACGLDCTHWRSRECSDPAPRNGGEECQGTDL
DTPNCTSDLCVHSASGPEDVALYVGLIAVAVCLVLLLLVLILVYCRKKEGLDSDVADSSILTSGFQPV
SIKPSKADNPHLLTIQPDLSTTTTYQGSLCPRQDGPSPKFQLTNGHLLSPLGGGRHTLHHSSPTSEAE
EFVSRLSTQNYFRSLPRGTSNMTYGTFNFLGGRLMIPNTGISLLIPPDAIPRGKIYEIYLTLHKPEDV
RLPLAGCQTLLSPIVSCGPPGVLLTRPVIIAMDHCGEPSPDSWSLRLKKQSCEGSWEQDVLHLGEEAP
SHLYYCQLEASACYVFTEQLGRFALVGEALSVAAAKRLRLLLFAPVACTSLEYNIRVYCLHDTHDALK
EVVQLEKQLGGQLIQEPRVLHFKDSYHNLRLSIHDVPSSLWKSKLLVSYQEIPFYHIWNGTQRYLHCT
FTLERVSPSTSDLACKLWVWQVEGDGQSFSINFNITKDTRFAELLALESEAGVPALVGPSAFKIPFLI
RQKIISSLDPPCRRGADWRTLAQKLHLDSHLSFFASKPSPTAMILNLWEARHFPNGNLSQLAAAVAGL
GQPDAGLFTVSEAEC

| | |
|---|---|
| SEQ ID NO: 537 | 2881 bp |

| | | |
|---|---|---|
| NOV21q, SNP13375494 of | ORF Start: ATG at 87 | ORF Stop: TGA at 2784 |

| | | |
|---|---|---|
| CG53908-01, DNA Sequence | SNP Pos: 2130 | SNP Change: G to C |

AGCTGGGGCTCCGGGCTGAGGCGCTAAAGCCGCCCTCCCGCCCGCGGGGCCCCGCGCCCGGCCCGCCC
GCCTGCCCGCCCGCGGCCATGGCCGTCCGGCCCGGCCTGTGGCCAGCGCTCCTGGGCATAGTCCTCGC
CGCTTGGCTCCGCGGCTCGGGTGCCCAGCAGAGTGCCACCGTGGCCAACCCAGTGCCTGGTGCCAACC
CGGACCTGCTTCCCCACTTCCTGGTGGAGCCCGAGGATGTGTACATCGTCAAGAACAAGCCAGTGCTG
CTTGTGTGCAAGGCCGTGCCCGCCACGCAGATCTTCTTCAAGTGCAACGGGGAGTGGGTGCGCCAGGT
GGACCACGTGATCGAGCGCAGCACAGACGGGAGCAGTGGTGAGCCGACCATGGAGGTCCGCATTAATG
TCTCAAGGCAGCAGGTCGAGAAGGTGTTCGGGCTGGAGGAATACTGGTGCCAGTGCGTGGCATGGAGC
TCCTCGGGCACCACCAAGAGTCAGAAGGCCTACATCCGCATAGCCAGATTGCGCAAGAACTTCGAGCA
GGAGCCGCTGGCCAAGGAGGTGTCCCTGGAGCAGGGCATCGTGCTGCCCTGCCGTCCACCGGAGGGCA
TCCCTCCAGCCGAGGTGGAGTGGCTCCGGAACGAGGACCTGGTGGACCCGTCCCTGGACCCCAATGTA
TACATCACGCGGGAGCACAGCCTGGTGGTGCGACAGGCCCGCCTTGCTGACACGGCCAACTACACCTG
CGTGGCCAAGAACATCGTGGCACGTCGCCGCAGCGCCTCCGCTGCTGTCATCGTCTACGTGAACGGTG
GGTGGTCGACGTGGACCGAGTGGTCCGTCTGCAGCGCCAGCTGTGGGCGCGGCTGGCAGAAACGGAGC
CGGAGCTGCACCAACCCGGCGCCTCTCAACGGGGGCGCTTTCTGTGAGGGGCAGAATGTCCATGACCG
CACCGTCTCCTCTCTGCTTGTCTCTGTGGACGGCAGCTGGAGCCCGTGGAGCAAGTGGTCGGCCTGTG
GGCTGGACTGCACCCACTGGCGGAGCCGTGAGTGCTCTGACCCAGCACCCCGCAACGGAGGGGAGGAG
TGCCAGGGCACTGACCTGGACACCCGCAACTGTACCAGTGACCTCTGTGTACACAGTGCTTCTGGCCC
TGAGGACGTGGCCCTCTATGTGGGCCTCATCGCCGTGGCCGTCTGCCTGGTCCTGCTGCTGCTTGTCC
TCATCCTCGTTTATTGCCGGAAGAAGGAGGGGCTGGACTCAGATGTGGCTGACTCGTCCATTCTCACC
TCAGGCTTCCAGCCCGTCAGCATCAAGCCCAGCAAAGCAGACAACCCCCATCTGCTCACCATCCAGCC
GGACCTCAGCACCACCACCACCTACCAGGGCAGTCTCTGTCCCCGGCAGGATGGGCCCAGCCCCAAGT
TCCAGCTCACCAATGGGCACCTGCTCAGCCCCCTGGGTGGCGGCCGCCACACACTGCACCACAGCTCT
AGGCACCAGCAACATGACCTATGGGACCTTCAACTTCCTCGGGGGCCGGCTGATGATCCCTAATACAG
CACAAGCCGGAAGACGTGAGGTTGCCCCTAGCTGGCTGTCAGACCCTGCTGAGTCCCATCGTTAGCTG
TGGACCCCCTGGCGTCCTGCTCACCCGGCCAGTCATCCTGGCTATGGACCACTGTGGGGAGCCCAGCC
CTGACAGCTGGAGCCTGCGCCTCAAAAAGCAGTCGTGCGAGGGCAGCTGGGAGCAGGATGTGCTGCAC
CTGGGCGAGGAGGCGCCCTCCCACCTCTACTACTGCCAGCTGGAGGCCAGTGCCTGCTACGTCTTCAC
CGAGCAGCTGGGCCGCTTTGCCCTGGTGGGAGAGGCCCTCAGCGTGGCTGCCGCCAAGCGCCTCAAGC
TGCTTCTGTTTGCGCCGGTGGCCTGCACCTCCCTCGAGTACAACATCCGGGTCTACTGCCTGCATGAC
ACCCACGATGCACTCAAGGAGCTGGTGCAGCTGGAGAAGCAGCTGGGGGGACAGCTGATCCAGGAGCC
ACGGGTCCTGCACTTCAAGGACAGTTACCACAACCTGCGCCTATCCATCCACGATGTGCCCAGCTCCC
CGGTACTTGCACTGCACCTTCACCCTGGAGCGTGTCAGCCCCAGCACTAGTGACCTGGCCTGCAAGCT
GTGGGTGTGGCAGGTGGAGGGCGACGGGCAGAGCTTCAGCATCAACTTCAACATCACCAAGGACACAA
GGTTTGCTGAGCTGCTGGCTCTGGAGAGTGAAGCGGGGGTCCCAGCCCTGGTGGGCCCCAGTGCCTTC
AAGATCCCCTTCCTCATTCGGCAGAAGATAATTTCCAGCCTGGACCCACCCTGTAGGCGGGGTGCCGA
CTGGCGGACTCTGGCCCAGAAACTCCACCTGGACAGCCATCTCAGCTTCTTTGCCTCCAAGCCCAGCC
CCACAGCCATGATCCTCAACCTGTGGGAGGCGCGGCACTTCCCCAACGGCAACCTCAGCCAGCTGGCT
GCAGCAGTGGCTGGACTGGGCCAGCCAGACGCTGGCCTCTTCACAGTGTCGGAGGCTGAGTGCTGAGG
CCGGCCAGGCCCGACACCTACACTCTCACCAGCTTTGGCACCCACCAAGGACAGGCAGAAGCCGGACA
GGGGCCCTTCCCCACACCGGGGAGA

| | | |
|---|---|---|
| NOV21q, SNP13375494 of | SEQ ID NO: 538 | MW at 99077.0kD |

| | | | |
|---|---|---|---|
| CG53908-01, Protein Sequence | SNP Pos: 682 | 899 aa | SNP Change: Val to Leu |

MAVRPGLWPALLGIVLAAWLRGSGAQQSATVANPVPGANPDLLPHFLVEPEDVYIVKNKPVLLVCKAV
PATQIFFKCNGEWVRQVDHVIERSTDGSSGEPTMEVRINVSRQQVEKVFGLEEYWCQCVAWSSSGTTK
SQKAYIRIARLRKNFEQEPLAKEVSLEQGIVLPCRPPEGIPPAEVEWLRNEDLVDPSLDPNVYITREH
SLVVRQARLADTANYTCVAKNTVARRRSASAAVIVYVNGGWSTWTEWSVCSASCGRGWQKRSRSCTNP
APLNGGAFCEGQNVHDRTVSSLLVSVDGSWSPWSKWSACGLDCTHWRSRECSDPAPRNGGEECQGTDL
DTRNCTSDLCVHSASGPEDVALYVGLIAVAVCLVLLLLVLILVYCRKKEGLDSDVADSSILTSGFQPV
SIKPSKADNPHLLTIQPDLSTTTTYQGSLCPRQDGPSPKFQLTNGHLLSPLGGGRHTLHHSSPTSEAE
EFVSRLSTQNYFRSLPRGTSNMTYGTFNFLGGRLMIPNTGISLLIPPDAIPRGKIYEIYLTLHKPEDV
RLPLAGCQTLLSPIVSCGPPGVLLTRPVILAMDHCGEPSPDSWSLRLKKQSCEGSWEQDVLHLGEEAP
SHLYYCQLEASACYVFTEQLGRFALVGEALSVAAAKRLKLLLFAPVACTSLEYNIRVYCLHDTHDALK
ELVQLEKQLGGQLIQEPRVLHFKDSYHNLRLSIHDVPSSLWKSKLLVSYQEIPFYHIWNGTQRYLHCT
FTLERVSPSTSDLACKLWVWQVEGDGQSFSINFNITKDTRFAELLALESEAGVPALVGPSAFKIPFLI
RQKIISSLDPPCRRGADWRTLAQKLHLDSHLSFFASKPSPTAMILNLWEARHFPNGNLSQLAAAVAGL
GQPDAGLFTVSEAEC

| | |
|---|---|
| SEQ ID NO: 539 | 2881 bp |

| | | |
|---|---|---|
| NOV21r, SNP13375495 of | ORF Start: ATG at 87 | ORF Stop: TGA at 2784 |

| | | |
|---|---|---|
| CG53908-01, DNA Sequence | SNP Pos: 2305 | SNP Change: G to A |

AGCTGGGGCTCCGGGCTGAGGCGCTAAAGCCGCCCTCCCGCCCGCGGGGCCCCGCGCCCGGCCCGCCC
GCCTGCCCGCCCGCGGCCATGGCCGTCCGGCCCGGCCTGTGGCCAGCGCTCCTGGGCATAGTCCTCGC
CGCTTGGCTCCGCGGCTCGGGTGCCCAGCAGAGTGCCACCGTGGCCAACCCAGTGCCTGGTGCCAACC
CGGACCTGCTTCCCCACTTCCTGGTGGAGCCCGAGGATGTGTACATCGTCAAGAACAAGCCAGTGCTG
CTTGTGTGCAAGGCCGTGCCCGCCACGCAGATCTTCTTCAAGTGCAACGGGGAGTGGGTGCGCCAGGT
GGACCACGTGATCGAGCGCAGCACAGACGGGAGCAGTGGTGAGCCGACCATGGAGGTCCGCATTAATG
TCTCAAGGCAGCAGGTCGAGAAGGTGTTCGGGCTGGAGGAATACTGGTGCCAGTGCGTGGCATGGAGC
TCCTCGGGCACCACCAAGAGTCAGAAGGCCTACATCCGCATAGCCAGATTGCGCAAGAACTTCGAGCA
GGAGCCGCTGGCCAAGGAGGTGTCCCTGGAGCAGGGCATCGTGCTGCCCTGCCGTCCACCGGAGGGCA
TCCCTCCAGCCGAGGTGGAGTGGCTCCGGAACGAGGACCTGGTGGACCCGTCCCTGGACCCCAATGTA
TACATCACGCGGGAGCACAGCCTGGTGGTGCGACAGGCCCGCCTTGCTGACACGGCCAACTACACCTG
CGTGGCCAAGAACATCGTGGCACGTCGCCGCAGCGCCTCCGCTGCTGTCATCGTCTACGTGAACGGTG
GGTGGTCGACGTGGACCGAGTGGTCCGTCTGCAGCGCCAGCTGTGGGCGCGGCTGGCAGAAACGGAGC
CGGAGCTGCACCAACCCGGCGCCTCTCAACGGGGGCGCTTTCTGTGAGGGGCAGAATGTCCATGACCG
CACCGTCTCCTCTCTGCTTGTCTCTGTGGACGGCAGCTGGAGCCCGTGGAGCAAGTGGTCGGCCTGTG
GGCTGGACTGCACCCACTGGCGGAGCCGTGAGTGCTCTGACCCAGCACCCCGCAACGGAGGGGAGGAG
TGCCAGGGCACTGACCTGGACACCCGCAACTGTACCAGTGACCTCTGTGTACACAGTGCTTCTGGCCC
TCATCCTCGTTTATTGCCGGAAGAAGGAGGGGCTGGACTCAGATGTGGCTGACTCGTCCATTCTCACC
TCAGGCTTCCAGCCCGTCAGCATCAAGCCCAGCAAAGCAGACAACCCCCATCTGCTCACCATCCAGCC
GGACCTCAGCACCACCACCACCTACCAGGGCAGTCTCTGTCCCCGGCAGGATGGGCCCAGCCCCAAGT
TCCAGCTCACCAATGGGCACCTGCTCAGCCCCCTGGGTGGCGGCCGCCACACACTGCACCACAGCTCT
CCCACCTCTGAGGCCGAGGAGTTCGTCTCCCGCCTCTCCACCCAGAACTACTTCCGCTCCCTGCCCCG
AGGCACCAGCAACATGACCTATGGGACCTTCAACTTCCTCGGGGGCCGGCTGATGATCCCTAATACAG
GTATCAGCCTCCTCATCCCCCCAGATGCCATACCCCGAGGGAAGATCTATGAGATCTACCTCACGCTG
CACAAGCCGGAAGACGTGAGGTTGCCCCTAGCTGGCTGTCAGACCCTGCTGAGTCCCATCGTTAGCTG
TGGACCCCCTGGCGTCCTGCTCACCCGGCCAGTCATCCTGGCTATGGACCACTGTGGGGAGCCCAGCC
CTGACAGCTGGAGCCTGCGCCTCAAAAAGCAGTCGTGCGAGGGCAGCTGGGAGCAGGATGTGCTGCAC
CTGGGCGAGGAGGCGCCCTCCCACCTCTACTACTGCCAGCTGGAGGCCAGTGCCTGCTACGTCTTCAC
CGAGCAGCTGGGCCGCTTTGCCCTGGTGGGAGAGGCCCTCAGCGTGGCTGCCGCCAAGCGCCTCAAGC
TGCTTCTGTTTGCGCCGGTGGCCTGCACCTCCCTCGAGTACAACATCCGGGTCTACTGCCTGCATGAC
ACCCACGATGCACTCAAGGAGGTGGTGCAGCTGGAGAAGCAGCTGGGGGGACAGCTGATCCAGGAGCC
ACGGGTCCTGCACTTCAAGGACAGTTACCACAACCTGCGCCTATCCATCCACGATGTGCCCAGCTCCC
TGTGGAAGAGTAAGCTCCTTGTCAGCTACCAGGAGATCCCCTTTTATCACATCTGGAATGACACGCAG
CGGTACTTGCACTGCACCTTCACCCTGGAGCGTGTCAGCCCCAGCACTAGTGACCTGGCCTGCAAGCT
GTGGGTGTGGCAGGTGGAGGGCGACGGGCAGAGCTTCAGCATCAACTTCAACATCACCAAGGACACAA
AAGATCCCCTTCCTCATTCGGCAGAAGATAATTTCCAGCCTGGACCCACCCTGTAGGCGGGGTGCCGA
CTGGCGGACTCTGGCCCAGAAACTCCACCTGGACAGCCATCTCAGCTTCTTTGCCTCCAAGCCCAGCC
CCACAGCCATGATCCTCAACCTGTGGGAGGCGCGGCACTTCCCCAACGGCAACCTCAGCCAGCTGGCT
GCAGCAGTGGCTGGACTGGGCCAGCCAGACGCTGGCCTCTTCACAGTGTCGGAGGCTGAGTGCTGAGG
CCGGCCAGGCCCGACACCTACACTCTCACCAGCTTTGGCACCCACCAAGGACAGGCAGAAGCCGGACA
GGGGCCCTTCCCCACACCGGGGAGA

| | | |
|---|---|---|
| NOV21r, SNP13375495 of | SEQ ID NO: 540 | MW at 99121.0kD |

| | | | |
|---|---|---|---|
| CG53908-01, Protein Sequence | SNP Pos: 740 | 899 aa | SNP Change: Gly to Asp |

MAVRPGLWPALLGIVLAAWLRGSGAQQSATVANPVPGANPDLLPHFLVEPEDVYIVKNKPVLLVCKAV
PATQIFFKCNGEWVRQVDHVIERSTDGSSGEPTMEVRINVSRQQVEKVFGLEEYWCQCVAWSSSGTTK
SQKAYIRIARLRKNFEQEPLAKEVSLEQGIVLPCRPPEGIPPAEVEWLRNEDLVDPSLDPNVYITREH
SLVVRQARLADTANYTCVAKNIVARPRSASAAVIVYVNGGWSTWTEWSVCSASCGRGWQKRSRSCTNP
APLNGGAFCEGQNVHDRTVSSLLVSVDGSWSPWSKWSACGLDCTHWRSRECSDPAPRNGGEECQGTDL
DTRNCTSDLCVHSASGPEDVALYVGLIAVAVCLVLLLLVLILVYCRKKEGLDSDVADSSILTSGFQPV
SIKPSKADNPHLLTIQPDLSTTTTYQGSLCPRQDGPSPKFQLTNGHLLSPLGGGRHTLHHSSPTSEAE
EFVSRLSTQNYFRSLPRGTSNMTYGTFNFLGGRLMIPNTGISLLIPPDAIPRGKIYEIYLTLHKPEDV
RLPLAGCQTLLSPIVSCGPPGVLLTRPVILAMDHCGEPSPDSWSLRLKKQSCEGSWEQDVLHLGEEAP
SHLYYCQLEASACYVFTEQLGRFALVGEALSVAAAKRLKLLLFAPVACTSLEYNIRVYCLHDTHDALK
EVVQLEKQLGGQLIQEPRVLHFKDSYHNLRLSIHDVPSSLWKSKLLVSYQEIPFYHIWNDTQRYLHCT
FTLERVSPSTSDLACKLWVWQVEGDGQSFSINFNITKDTRFAELLALESEAGVPALVGPSAFKIPFLI
RQKIISSLDPPCRRGADWRTLAQKLHLDSHLSFFASKPSPTAMILNLWEARHFPNGNLSQLAAAVAGL
GQPDAGLFTVSEAEC

| | |
|---|---|
| SEQ ID NO: 541 | 2881 bp |

| | | |
|---|---|---|
| NOV21s, SNP13375140 of | ORF Start: ATG at 87 | ORF Stop: TGA at 2784 |

| | | |
|---|---|---|
| CG53908-01, DNA Sequence | SNP Pos: 2325 | SNP Change: T to C |

AGCTGGGGCTCCGGGCTGAGGCGCTAAAGCCGCCCTCCCGCCCGCGGGGCCCCGCGCCCGGCCCGCCC
GCCTGCCCGCCCGCGGCCATGGCCGTCCGGCCCGGCCTGTGGCCAGCGCTCCTGGGCATAGTCCTCGC
CGCTTGGCTCCGCGGCTCGGGTGCCCAGCAGAGTGCCACCGTGGCCAACCCAGTGCCTGGTGCCAACC
CGGACCTGCTTCCCCACTTCCTGGTGGAGCCCGAGGATGTGTACATCGTCAAGAACAAGCCAGTGCTG
CTTGTGTGCAAGGCCGTGCCCGCCACGCAGATCTTCTTCAAGTGCAACGGGGAGTGGGTGCGCCAGGT
GGACCACGTGATCGAGCGCAGCACAGACGGGAGCAGTGGTGAGCCGACCATGGAGGTCCGCATTAATG
TCTCAAGGCAGCAGGTCGAGAAGGTGTTCGGGCTGGAGGAATACTGGTGCCAGTGCGTGGCATGGAGC
TCCTCGGGCACCACCAAGAGTCAGAAGGCCTACATCCGCATAGCCAGATTGCGCAAGAACTTCGAGCA
GGAGCCGCTGGCCAAGGAGGTGTCCCTGGAGCAGGGCATCGTGCTGCCCTGCCGTCCACCGGAGGGCA
TCCCTCCAGCCGAGGTGGAGTGGCTCCGGAACGAGGACCTGGTGGACCCGTCCCTGGACCCCAATGTA
TACATCACGCGGGAGCACAGCCTGGTGGTGCGACAGGCCCGCCTTGCTGACACGGCCAACTACACCTG
CGTGGCCAAGAACATCGTGGCACGTCGCCGCAGCGCCTCCGCTGCTGTCATCGTCTACGTGAACGGTG
GGTGGTCGACGTGGACCGAGTGGTCCGTCTGCAGCGCCAGCTGTGGGCGCGGCTGGCAGAAACGGAGC
CGGAGCTGCACCAACCCGGCGCCTCTCAACGGGGGCGCTTTCTGTGAGGGGCAGAATGTCCATGACCG
CACCGTCTCCTCTCTGCTTGTCTCTGTGGACGGCAGCTGGAGCCCGTGGAGCAAGTGGTCGGCCTGTG
TGCCAGGGCACTGACCTGGACACCCGCAACTGTACCAGTGACCTCTGTGTACACAc3TGCTTCTGGCCC
TGAGGACGTGGCCCTCTATGTGGGCCTCATCGCCGTGGCCGTCTGCCTGGTCCTGCTGCTGCTTGTCC
TCATCCTCGTTTATTGCCGGAAGAAGGAGGGGCTGGACTCAGATGTGGCTGACTCGTCCATTCTCACC
TCAGGCTTCCAGCCCGTCAGCATCAAGCCCAGCAAAGCAGACAACCCCCATCTGCTCACCATCCAGCC
GGACCTCAGCACCACCACCACCTACCAGGGCAGTCTCTGTCCCCGGCAGGATGGGCCCAGCCCCAAGT
TCCAGCTCACCAATGGGCACCTGCTCAGCCCCCTGGGTGGCGGCCGCCACACACTGCACCACAGCTCT
CCCACCTCTGAGGCCGAGGAGTTCGTCTCCCGCCTCTCCACCCAGAACTACTTCCGCTCCCTGCCCCG
AGGCACCAGCAACATGACCTATGGGACCTTCAACTTCCTCGGGGGCCGGCTGATGATCCCTAATACAG
GTATCAGCCTCCTCATCCCCCCAGATGCCATACCCCGAGGGAAGATCTATGAGATCTACCTCACGCTG
CACAAGCCGGAAGACGTGAGGTTGCCCCTAGCTGGCTGTCAGACCCTGCTGAGTCCCATCGTTAGCTG
TGGACCCCCTGGCGTCCTGCTCACCCGGCCAGTCATCCTGGCTATGGACCACTGTGGGGAGCCCAGCC
CTGACAGCTGGAGCCTGCGCCTCAAAAAGCAGTCGTGCGAGGGCAGCTGGGAGCAGGATGTGCTGCAC
CTGGGCGAGGAGGCGCCCTCCCACCTCTACTACTGCCAGCTGGAGGCCAGTGCCTGCTACGTCTTCAC
CGAGCAGCTGGGCCGCTTTGCCCTGGTGGGAGAGGCCCTCAGCGTGGCTGCCGCCAAGCGCCTCAAGC
TGCTTCTGTTTGCGCCGGTGGCCTGCACCTCCCTCGAGTACAACATCCGGGTCTACTGCCTGCATGAC
ACCCACGATGCACTCAAGGAGGTGGTGCAGCTGGAGAAGCAGCTGGGGGGACAGCTGATCCAGGAGCC
ACGGGTCCTGCACTTCAAGGACAGTTACCACAACCTGCGCCTATCCATCCACGATGTGCCCAGCTCCC
TGTGGAAGAGTAAGCTCCTTGTCAGCTACCAGGAGATCCCCTTTTATCACATCTGGAATGGCACGCAG
CGGTACTTGCACCGCACCTTCACCCTGGAGCGTGTCAGCCCCAGCACTAGTGACCTGGCCTGCAAGCT
GTGGGTGTGGCAGGTGGAGGGCGACGGGCAGAGCTTCAGCATCAACTTCAACATCACCAAGGACACAA
AAGATCCCCTTCCTCATTCGGCAGAAGATAATTTCCAGCCTGGACCCACCCTGTAGGCGGGGTGCCGA
CTGGCGGACTCTGGCCCAGAAACTCCACCTGGACAGCCATCTCAGCTTCTTTGCCTCCAAGCCCAGCC
CCACAGCCATGATCCTCAACCTGTGGGAGGCGCGGCACTTCCCCAACGGCAACCTCAGCCAGCTGGCT
GCAGCAGTGGCTGGACTGGGCCAGCCAGACGCTGGCCTCTTCACAGTGTCGGAGGCTGAGTGCTGAGG
CCGGCCAGGCCCGACACCTACACTCTCACCAGCTTTGGCACCCACCAAGGACAGGCAGAAGCCGGACA
GGGGCCCTTCCCCACACCGGGGAGA

| | | |
|---|---|---|
| NOV21s, SNP13375140 of | SEQ ID NO: 542 | MW at 99116.0kD |

| | | | |
|---|---|---|---|
| CG53908-01, Protein Sequence | SNP Pos: 747 | 899 aa | SNP Change: Cys to Arg |

MAVRPGLWPALLGIVLAAWLRGSGAQQSATVANPVPGANPDLLPHFLVEPEDVYIVKNKPVLLVCKAV
PATQIFFKCNGEWVRQVDHVIERSTDGSSGEPTMEVRINVSRQQVEKVFGLEEYWCQCVAWSSSGTTK
SQKAYIRIARLRKNFEQEPLAKEVSLEQGIVLPCRPPEGIPPAEVEWLRNEDLVDPSLDPNVYITREH
SLVVRQARLADTANYTCVAKNIVARRRSASAAVIVYVNGGWSTWTEWSVCSASCGRGWQKRSRSCTNP
APLNGGAFCEGQNVHDRTVSSLLVSVDGSWSPWSKWSACGLDCTHWRSRECSDPAPRNGGEECQGTDL
DTRNCTSDLCVHSASGPEDVALYVGLIAVAVCLVLLLLVLILVYCRKKEGLDSDVADSSILTSGFQPV
SIKPSKADNPHLLTIQPDLSTTTTYQGSLCPRQDGPSPKFQLTNGHLLSPLGGGRHTLHHSSPTSFAE
EFVSRLSTQNYFRSLPRGTSNMTYGTFNFLGGRLMIPNTGISLLIPPDAIPRGKIYEIYLTLHKPEDV
RLPLAGCQTLLSPIVSCGPPGVLLTRPVILAMDHCGEPSPDSWSLRLKKQSCEGSWEQDVLHLGEEAP
EVVQLEKQLGGQLIQEPRVLHFKDSYHNLRLSIHDVPSSLWKSKLLVSYQEIPFYHIWNGTQRYLHRT
FTLERVSPSTSDLACKLWVWQVEGDGQSFSINFNITKDTRFAELLALESEAGVPALVGPSAFKIPFLI
RQKIISSLDPPCRRGADWRTLAQKLHLDSHLSFFASKPSPTAMILNLWEARHFPNGNLSQLAAAVAGL
GQPDAGLFTVSEAEC

| | |
|---|---|
| SEQ ID NO: 543 | 2881 bp |

| | | |
|---|---|---|
| NOV21t, SNP13375139 of | ORF Start: ATG at 87 | ORF Stop: TGA at 2784 |

| | | |
|---|---|---|
| CG53908-01, DNA Sequence | SNP Pos: 2404 | Change: A to G |

GCCTGCCCGCCCGCGGCCATGGCCGTCCGGCCCGGCCTGTGGCCAGCGCTCCTGGGCATAGTCCTCGC
CGGACCTGCTTCCCCACTTCCTGGTGGAGCCCGAGGATGTGTACATCGTCAAGAACAAGCCAGTGCTG
CTTGTGTGCAAGGCCGTGCCCGCCACGCAGATCTTCTTCAAGTGCAACGGGGAGTGGGTGCGCCAGGT
GGACCACGTGATCGAGCGCAGCACAGACGGGAGCAGTGGTGAGCCGACCATGGAGGTCCGCATTAATG
TCTCAAGGCAGCAGGTCGAGAAGGTGTTCGGGCTGGAGGAATACTGGTGCCAGTGCGTGGCATGGAGC
TCCTCGGGCACCACCAAGAGTCAGAAGGCCTACATCCGCATAGCCAGATTGCGCAAGAACTTCGAGCA
GGAGCCGCTGGCCAAGGAGGTGTCCCTGGAGCAGGGCATCGTGCTGCCCTGCCGTCCACCGGAGGGCA
TCCCTCCAGCCGAGGTGGAGTGGCTCCGGAACGAGGACCTGGTGGACCCGTCCCTGGACCCCAATGTA
TACATCACGCGGGAGCACAGCCTGGTGGTGCGACAGGCCCGCCTTGCTGACACGGCCAACTACACCTG
CGTGGCCAAGAACATCGTGGCACGTCGCCGCAGCGCCTCCGCTGCTGTCATCGTCTACGTGAACGGTG
GGTGGTCGACGTGGACCGAGTGGTCCGTCTGCAGCGCCAGCTGTGGGCGCGGCTGGCAGAAACGGAGC
CGGAGCTGCACCAACCCGGCGCCTCTCAACGGGGGCGCTTTCTGTGAGGGGCAGAATGTCCATGACCG
CACCGTCTCCTCTCTGCTTGTCTCTGTGGACGGCAGCTGGAGCCCGTGGAGCAAGTGGTCGGCCTGTG
GGCTGGACTGCACCCACTGGCGGAGCCGTGAGTGCTCTGACCCAGCACCCCGCAACGGAGGGGAGGAG
TGCCAGGGCACTGACCTGGACACCCGCAACTGTACCAGTGACCTCTGTGTACACAGTGCTTCTGGCCC
TGAGGACGTGGCCCTCTATGTGGGCCTCATCGCCGTGGCCGTCTGCCTGGTCCTGCTGCTGCTTGTCC
TCATCCTCGTTTATTGCCGGAAGAAGGAGGGGCTGGACTCAGATGTGGCTGACTCGTCCATTCTCACC
TCAGGCTTCCAGCCCGTCAGCATCAAGCCCAGCAAAGCAGACAACCCCCATCTGCTCACCATCCAGCC
GGACCTCAGCACCACCACCACCTACCAGGGCAGTCTCTGTCCCCGGCAGGATGGGCCCAGCCCCAAGT
TCCAGCTCACCAATGGGCACCTGCTCAGCCCCCTGGGTGGCGGCCGCCACACACTGCACCACAGCTCT
AGGCACCAGCAACATGACCTATGGGACCTTCAACTTCCTCGGGGGCCGGCTGATGATCCCTAATACAG
GTATCAGCCTCCTCATCCCCCCAGATGCCATACCCCGAGGGAAGATCTATGAGATCTACCTCACGCTG
CACAAGCCGGAAGACGTGAGGTTGCCCCTAGCTGGCTGTCAGACCCTGCTGAGTCCCATCGTTAGCTG
TGGACCCCCTGGCGTCCTGCTCACCCGGCCAGTCATCCTGGCTATGGACCACTGTGGGGAGCCCAGCC
CTGACAGCTGGAGCCTGCGCCTCAAAAAGCAGTCGTGCGAGGGCAGCTGGGAGCAGGATGTGCTGCAC
CTGGGCGAGGAGGCGCCCTCCCACCTCTACTACTGCCAGCTGGAGGCCAGTGCCTGCTACGTCTTCAC
CGAGCAGCTGGGCCGCTTTGCCCTGGTGGGAGAGGCCCTCAGCGTGGCTGCCGCCAAGCGCCTCAAGC
TGCTTCTGTTTGCGCCGGTGGCCTGCACCTCCCTCGAGTACAACATCCGGGTCTACTGCCTGCATGAC
ACCCACGATGCACTCAAGGAGGTGGTGCAGCTGGAGAAGCAGCTGGGGGGACAGCTGATCCAGGAGCC
ACGGGTCCTGCACTTCAAGGACAGTTACCACAACCTGCGCCTATCCATCCACGATGTGCCCAGCTCCC
TGTGGAAGAGTAAGCTCCTTGTCAGCTACCAGGAGATCCCCTTTTATCACATCTGGAATGGCACGCAG
CGGTACTTGCACTGCACCTTCACCCTGGAGCGTGTCAGCCCCAGCACTAGTGACCTGGCCTGCAAGCT
GTGGGTGTGGCAGGTGGAGGGCGGCGGGCAGAGCTTCAGCATCAACTTCAACATCACCAAGGACACAA
GGTTTGCTGAGCTGCTGGCTCTGGAGAGTGAAGCGGGGGTCCCAGCCCTGGTGGGCCCCAGTGCCTTC
CTGGCGGACTCTGGCCCAGAAACTCCACCTGGACAGCCATCTCAGCTTCTTTGCCTCCAAGCCCAGCC
CCACAGCCATGATCCTCAACCTGTGGGAGGCGCGGCACTTCCCCAACGGCAACCTCAGCCAGCTGGCT
GCAGCAGTGGCTGGACTGGGCCAGCCAGACGCTGGCCTCTTCACAGTGTCGGAGGCTGAGTGCTGAGG
CCGGCCAGGCCCGACACCTACACTCTCACCAGCTTTGGCACCCACCAAGGACAGGCAGAAGCCGGACA
GGGGCCCTTCCCCACACCGGGGAGA

| | | |
|---|---|---|
| NOV21t, SNP13375139 of | SEQ ID NO: 544 | MW at 99005.0kD |

| | | | |
|---|---|---|---|
| CG53908-01, Protein Sequence | SNP Pos: 773 | 899 aa | SNP Change: Asp to Gly |

MAVRPGLWPALLGIVLAAWLRGSGAQQSATVANPVPGANPDLLPHFLVEPEDVYTVKNKPVLLVCKAV
PATQIFFKCNGEWVRQVDHVIERSTDGSSGEPTMEVRINVSRQQVEKVFGLEEYWCQCVAWSSSGTTK
SQKAYIRIARLRKNFEQEPLAKEVSLEQGIVLPCRPPEGIPPAEVEWLRNEDLVDPSLDPNVYITREH
SLVVRQARLADTANYTCVAKNIVARRRSASAAVIVYVNGGWSTWTEWSVCSASCGRGWQKRSRSCTNP
APLNGGAFCEGQNVHDRTVSSLLVSVDGSWSPWSKWSACGLDCTHWRSRECSDPAPRNGGEECQGTDL
DTRNCTSDLCVHSASGPEDVALYVGLIAVAVCLVLLLLVLILVYCRKKEGLDSDVADSSILTSGFQPV
SIKPSKADNPHLLTIQPDLSTTTTYQGSLCPRQDGPSPKFQLTNGHLLSPLGGGRHTLHHSSPTSEAE
EFVSRLSTQNYFRSLPRGTSNMTYGTFNFLGGRLMIPNTGISLLIPPDAIPRGKIYEIYLTLHKPEDV
RLPLAGCQTLLSPIVSCGPPGVLLTRPVILAMDHCGEPSPDSWSLRLKKQSCEGSWEQDVLHLGEEAP
SHLYYCQLEASACYVFTEQLGRFALVGEALSVAAAKRLKLLLFAPVACTSLEYNIRVYCLHDTHDALK
EVVQLEKQLGGQLIQEPRVLHFKDSYHNLRLSIHDVPSSLWKSKLLVSYQEIPFYHIWNGTQRYLHCT
FTLERVSPSTSDLACKLWVWQVEGGGQSFSINFNITKDTRFAELLALESEAGVPALVGPSAFKIPFLI
RQKIISSLDPPCRRGADWRTLAQKLHLDSHLSFFASKPSPTAMILNLWEARHFPNGNLSQLAAAVAGL
GQPDAGLFTVSEAEC

| | |
|---|---|
| SEQ ID NO: 545 | 2881 bp |

| | | |
|---|---|---|
| NOV21u, SNP13375496 of | ORF Start: ATG at 87 | ORF Stop: TGA at 2784 |

| | | |
|---|---|---|
| CG53908-01, DNA Sequence | SNP Pos: 2676 | SNP Change: T to C |

AGCTGGGGCTCCGGGCTGAGGCGCTAAAGCCGCCCTCCCGCCCGCGGGGCCCCGCGCCCGGCCCGCCC
GCCTGCCCGCCCGCGGCCATGGCCGTCCGGCCCGGCCTGTGGCCAGCGCTCCTGGGCATAGTCCTCGC
CGCTTGGCTCCGCGGCTCGGGTGCCCAGCAGAGTGCCACCGTGGCCAACCCAGTGCCTGGTGCCAACC
CGGACCTGCTTCCCCACTTCCTGGTGGAGCCCGAGGATGTGTACATCGTCAAGAACAAGCCAGTGCTG
CTTGTGTGCAAGGCCGTGCCCGCCACGCAGATCTTCTTCAAGTGCAACGGGGAGTGGGTGCGCCAGGT
TCTCAAGGCAGCAGGTCGAGAAGGTGTTCGGGCTGGAGGAATACTGGTGCCAGTGCGTGGCATGGAGC
TCCTCGGGCACCACCAAGAGTCAGAAGGCCTACATCCGCATAGCCAGATTGCGCAAGAACTTCGAGCA
GGAGCCGCTGGCCAAGGAGGTGTCCCTGGAGCAGGGCATCGTGCTGCCCTGCCGTCCACCGGAGGGCA
TCCCTCCAGCCGAGGTGGAGTGGCTCCGGAACGAGGACCTGGTGGACCCGTCCCTGGACCCCAATGTA
TACATCACGCGGGAGCACAGCCTGGTGGTGCGACAGGCCCGCCTTGCTGACACGGCCAACTACACCTG
CGTGGCCAAGAACATCGTGGCACGTCGCCGCAGCGCCTCCGCTGCTGTCATCGTCTACGTGAACGGTG
GGTGGTCGACGTGGACCGAGTGGTCCGTCTGCAGCGCCAGCTGTGGGCGCGGCTGGCAGAAACGGAGC
CGGAGCTGCACCAACCCGGCGCCTCTCAACGGGGGCGCTTTCTGTGAGGGGCAGAATGTCCATGACCG
CACCGTCTCCTCTCTGCTTGTCTCTGTGGACGGCAGCTGGAGCCCGTGGAGCAAGTGGTCGGCCTGTG
GGCTGGACTGCACCCACTGGCGGAGCCGTGAGTGCTCTGACCCAGCACCCCGCAACGGAGGGGAGGAG
TGCCAGGGCACTGACCTGGACACCCGCAACTGTACCAGTGACCTCTGTGTACACAGTGCTTCTGGCCC
TGAGGACGTGGCCCTCTATGTGGGCCTCATCGCCGTGGCCGTCTGCCTGGTCCTGCTGCTGCTTGTCC
TCATCCTCGTTTATTGCCGGAAGAAGGAGGGGCTGGACTCAGATGTGGCTGACTCGTCCATTCTCACC
TCCAGCTCACCAATGGGCACCTGCTCAGCCCCCTGGGTGGCGGCCGCCACACACTGCACCACAGCTCT
CCCACCTCTGAGGCCGAGGAGTTCGTCTCCCGCCTCTCCACCCAGAACTACTTCCGCTCCCTGCCCCG
AGGCACCAGCAACATGACCTATGGGACCTTCAACTTCCTCGGGGGCCGGCTGATGATCCCTAATACAG
GTATCAGCCTCCTCATCCCCCCAGATGCCATACCCCGAGGGAAGATCTATGAGATCTACCTCACGCTG
TGGACCCCCTGGCGTCCTGCTCACCCGGCCAGTCATCCTGGCTATGGACCACTGTGGGGAGCCCAGCC
CTGACAGCTGGAGCCTGCGCCTCAAAAAGCAGTCGTGCGAGGGCAGCTGGGAGCAGGATGTGCTGCAC
CTGGGCGAGGAGGCGCCCTCCCACCTCTACTACTGCCAGCTGGAGGCCAGTGCCTGCTACGTCTTCAC
CGAGCAGCTGGGCCGCTTTGCCCTGGTGGGAGAGGCCCTCAGCGTGGCTGCCGCCAAGCGCCTCAAGC
TGCTTCTGTTTGCGCCGGTGGCCTGCACCTCCCTCGAGTACAACATCCGGGTCTACTGCCTGCATGAC
ACCCACGATGCACTCAAGGAGGTGGTGCAGCTGGAGAAGCAGCTGGGGGGACAGCTGATCCAGGAGCC
ACGGGTCCTGCACTTCAAGGACAGTTACCACAACCTGCGCCTATCCATCCACGATGTGCCCAGCTCCC
TGTGGAAGAGTAAGCTCCTTGTCAGCTACCAGGAGATCCCCTTTTATCACATCTGGAATGGCACGCAG
CGGTACTTGCACTGCACCTTCACCCTGGAGCGTGTCAGCCCCAGCACTAGTGACCTGGCCTGCAAGCT
GTGGGTGTGGCAGGTGGAGGGCGACGGGCAGAGCTTCAGCATCAACTTCAACATCACCAAGGACACAA
GGTTTGCTGAGCTGCTGGCTCTGGAGAGTGAAGCGGGGGTCCCAGCCCTGGTGGGCCCCAGTGCCTTC
AAGATCCCCTTCCTCATTCGGCAGAAGATAATTTCCAGCCTGGACCCACCCTGTAGGCGGGGTGCCGA
CTGGCGGACTCTGGCCCAGAAACTCCACCTGGACAGCCATCTCAGCTTCTTTGCCTCCAAGCCCAGCC
CCACAGCCATGATCCTCAACCTGCGGGAGGCGCGGCACTTCCCCAACGGCAACCTCAGCCAGCTGGCT
GCAGCAGTGGCTGGACTGGGCCAGCCAGACGCTGGCCTCTTCACAGTGTCGGAGGCTGAGTGCTGAGG
CCGGCCAGGCCCGACACCTACACTCTCACCAGCTTTGGCACCCACCAAGGACAGGCAGAAGCCGGACA
GGGGCCCTTCCCCACACCGGGGAGA

| | | |
|---|---|---|
| NOV21u, SNP13375496 of | SEQ ID NO: 546 | MW at 99032.9kD |

| | | | |
|---|---|---|---|
| CG53908-01, Protein Sequence | SNP Pos: 864 | 899 aa | SNP Change: Trp to Arg |

MAVRPGLWPALLGIVLAAWLRGSGAQQSATVANPVPGANPDLLPHFLVEPEDVYIVKNKPVLLVCKAV
PATQIFFKCNGEWVRQVDHVTERSTDGSSGEPTMEVRINVSRQQVEKVFGLEEYWCQCVAWSSSGTTK
SQKAYIRIARLRKNFEQEPLAKEVSLEQGIVLPCRPPEGIPPAEVEWLRNEDLVDPSLDPNVYITREH
SLVVRQARLADTANYTCVAKNIVARRRSASAAVIVYVNGGWSTWTEWSVCSASCGRGWQKRSRSCTNP
APLNGGAFCEGQNVHDRTVSSLLVSVDGSWSPWSKWSACGLDCTHWRSRECSDPAPRNGGEECQGTDL
DTRNCTSDLCVHSASGPEDVALYVGLIAVAVCLVLLLLVLILVYCRKKEGLDSDVADSSILTSGFQPV
SIKPSKADNPHLLTIQPDLSTTTTYQGSLCPRQDGPSPKFQLTNGHLLSPLGGGRHTLHHSSPTSEAE
EFVSRLSTQNYFRSLPRGTSNMTYGTFNFLGGRLMIPNTGISLLIPPDAIPRGKIYEIYLTLHKPEDV
RLPLAGCQTLLSPIVSCGPPGVLLTRPVILAMDHCGEPSPDSWSLRLKKQSCEGSWEQDVLHLGEEAP
SHLYYCQLEASACYVFTEQLGRFALVGEALSVAAAKRLKLLLFAPVACTSLEYNIRVYCLHDTHDALK
EVVQLEKQLGGQLIQEPRVLHFKDSYHNLRLSIHDVPSSLWKSKLLVSYQEIPFYHIWNGTQRYLHCT
FTLERVSPSTSDLACKLWVWQVEGDGQSFSINFNITKDTRFAELLALESEAGVPALVGPSAFKIPFLI
RQKIISSLDPPCRRGADWRTLAQKLHLDSHLSFFASKPSPTAMILNLREARHFPNGNLSQLAAAVAGL
GQPDAGLFTVSEAEC

[0472] A ClustalW comparison of the above protein sequences yields the following sequence alignment shown in Table 21B.

TABLE 21 B

Comparison of the NOV21 protein sequences.

| | |
|---|---|
| NOV21a | MAVRPGLWPALLGIVLAAWLRGSGAQQSATVANPVPGANPDLLPHFLVEPEDVYIVKNKP |
| NQV21b | -------------------------QQSATVANPVPGANPDLLPHFLVEPEDVYIVKNKP |
| NOV21c | ----------------------TGSQQSATVANPVPGANPDLLPHFLVEPEDVYIVKNKP |
| NOV21d | -------------------------QQSATVANPVPGANPDLLPHFLVEPEDVYIVKNKP |
| NOV21e | MAVRPGLWPALLGIVLAAWLRGSGAQQSATVANPVPGANPDLLPHFLVEPEDVYIVKNKP |
| NOV21f | -------------------------QQSATVANPVPGANPDLLPHFLVEPEDVYIVKNKP |
| NOV21g | ---------ALLGIVLAAWLRGSGAQQSATVANPVPGANPDLLPHFLVEPEDVYIVKNKP |
| NOV21h | -------------------------QQSATVANPVPGANPDLLPHFLVEPEDVYIVKNKP |
| NOV21a | VLLVCKAVPATQIFFKCNGEWVRQVDHVIERSTDGSSGEPTMEVRINVSRQQVEKVFGLE |
| N0V21b | VLLVCKAVPATQIFFKCNGEWVRQVDHVIERSTDGSSGEPTMEVRINVSRQQVEKVFGLE |
| N0V21c | VLLVCKAVPATQIFFKCNGEWVRQVDHVIERSTDGSSGLPTMEVRINVSRQQVEKVFGLE |
| NOV21d | VLLVCKAVPATQIFFKCNGEWVRQVDHVIERSTDGSSGEPTMEVRINVSRQQVEKVFGLE |
| NOV21e | VLLVCKAVPATQIFFKCNGEWVRQVDHVIERSTDGSSGLPTMEVRINVSRQQVEKVFGLE |
| NOV21f | VLLVCKAVPATQIFFKCNGEWVRQVDHVIERSTDGSSGLPTMEVRINVSRQQVEKVFGLE |
| NOV21g | VLLVCKAVPATQIFFKCNGEWVRQVDHVIERSTDGSSGLPTMEVRINVSRQQVEKVFGLE |
| NOV21h | VLLVCKAVPATQIFFKCNGEWVRQVDHVIERSTDGSSGLPTMEVRINVSRQQVEKVFGLE |
| NOV21a | EYWCQCVAWSSSGTTKSQKAYIRIARLRKNFEQEPLAKEVSLEQGIVLPCRPPEGIPPAE |
| NOV21b | EYWCQCVAWSSSGTTKSQKAYIRIARLRKNFEQEPLAKEVSLEQGIVLPCRPPEGIPPAE |
| NOV21c | EYWCQCVAWSSSGTTKSQKAYIRIAYLRKNFEQEPLAKEVSLEQGIVLPCRPPEGIPPAE |
| NOV21d | EYWCQCVAWSSSGTTKSQKAYIRIARLRKNFEQEPLAKEVSLEQGIVLPCRPPEGIPPAE |
| NOV21e | EYWCQCVAWSSSGTTKSQKAYIRIARLRKNFEQEPLAKEVSLEQGIVLPCRPPEGIPPAE |
| NOV21f | EYWCQCVAWSSSGTTKSQKAYIRIAYLRKNFEQEPLAKEVSLEQGIVLPCRPPEGIPPAE |
| NOV21g | EYWCQCVAWSSSGTTKSQKAYIRIAYLRKNFEQEPLAKEVSLEQGIVLPCRPPEGIPPAE |
| NOV21h | EYWCQCVAWSSSGTTKSQKAYIRIAYLRKNFEQEPLAKEVSLEQGIVLPCRPPEGIPPAE |
| NOV21a | VEWLRNEDLVDPSLDPNVYITREHSLVVRQARLADTANYTCVAXNIVARRRSASAAVIVY |
| NOV21b | VEWLRNEDLVDPSLDPNVYITREHSLVVRQAPLADTANYTCVAKNIVARRRSASAAVIVY |
| NOV21c | VEWLRNEDLVDPSLDPNVYITREHSLVVRQARLADTANYTCVAKNIVARRRSASAAVIVY |
| NOV21d | VEWLRNEDLVDPSLDPNVYITREHSLVVRQARLADTANYTCVAKNIVARRRSASAAVIVY |
| NOV21e | VEWLRNEDLVDPSLDPNVYITREHSLVVRQARLADTANYTCVAKNIVARRRSASAAVIVY |
| NOV21t | VEWLRNEDLVDPSLDPNVYITREHSLVVRQARLADTANYTCVAKNIVARRRSASAAVIVY |
| NOV21g | VEWLRNEDLVDPSLDPNVYITREHSLVVRQARLADTANYTCVAKNIVARRRSASAAVIVY |
| NOV21h | VEWLRNEDLVDPSLDPNVYITREHSLVVRQARLADTANYTCVAKNIVARRRSASAAVIVY |
| NOV21a | VNGGWSTWTEWSVCSASCGRGWQKRSRSCTNPAPLNGGAFCEGQNVHDRTVSSLLVSVDG |
| NOV21b | VNGGWSTWTEWSVCSASCGRGWQKRSRSCTNPAPLNGGAFCEGQNVHDRTVSSLLVSVDG |
| NOV21c | VNGGWSTWTEWSVCSASCGRGWQKRSRSCTNPAPLNGGAFCEGQNVQK-TACATLCPVDG |
| NOV21d | VDG--------------------------------------------------------- |
| NOV21e | VNGGWSTWTEWSVCSASCGRGWQKRSRSCTNPAPLNGGAFCEGQ-NVQKTACATLCPVDG |
| NOV21f | VNGGWSTWTEWSVCSASCGRGWQKRSRSCTNPAPLNGGAFCEGQNVQK-TACATLCPVDG |
| NOV21g | VDG--------------------------------------------------------- |
| NOV21h | VDG--------------------------------------------------------- |
| NOV21a | SWSPWSKWSACGLDCTHWRSRECSDPAPRNGGEECQGTDLDTPNCTSDLCVHSASGPEDV |
| NOV21b | SWSPWSKWSACGLDCTHWRSRECSDPAPRNGGEECQGTDLDTRNCTSDLCVHSASG---- |
| NOV21c | SWSPWSKWSACGLDCTHWRSRECSDPAPRNGGEECQGTDLDTRNCTSDLCVHSASGEFG- |
| NOV21d | SWSPWSKWSACGLDCTHWRSRECSDPAPRNGGEECQGTDLDTRNCTSDLCVHSASGPEDV |
| NOV21e | SWSPWSKWSACGLDCTHWRSRECSDPAPRNGGEECQGTDLDTRNCTSDLCVHSASGPEDV |
| NOV21f | SWSPWSKWSACGLDCTHWRSRECSDPAPRNGGEECQGTDLDTRNCTSDLCVHSASG---- |
| NOV21g | SWSPWSKWSACGLDCTHWRSRECSDPAPRNGGEECQGTDLDTRNCTSDLCVHTASGPEDV |
| NOV21h | SWSPWSKWSACGLGCTHWRSRECSDPAPRNGGEECQGTDLDTRNCTSDLCVHTASGPEDV |
| NOV21a | ALYVGLIAVAVCLVLLLLVLILVYCRKKEGLDSDVADSSILTSGFQPVSIKPSKADNPHL |
| NOV21b | ------------------------------------------------------------ |
| NOV21c | ------------------------------------------------------------ |
| NOV21d | ALYVGLIAVAVCLVLLLLVLILVYCRKKEGLDSDVADSSTLTSGFQPVSIKPSKADN--- |
| NOV21e | ALYVGLIAVAVCLVLLLLVLILVYCRKKEGLDSDVADSSILTSGFQPVSIKPSKADNPHL |
| NOV21f | ------------------------------------------------------------ |
| NOV21g | ALYVGLIAVAVCLVLLLLVLILVYCRKKEGLDSDVADSSILTSGFQPVSIKPSKADNPHL |
| NOV21h | ALYVGLIAVAVCLVLLLLVLILVYCRKKEGLDSDVADSSILTSGFQPVSIKPSKADNPHL |
| NOV21a | LTIQPDLS-TTTTYQGSLCPRQDGPSPKFQLTNGHLLSPLGGGRHTLHHSSPTSEAEEFV |
| NOV21b | ------------------------------------------------------------ |
| NOV21c | ------------------------------------------------------------ |
| NOV21d | ------------------------------------------------------------ |
| NOV21e | LTIQPDLSTTTTTYQGSLCPRQDGPSPKFQLTNGHLLSPLGGGRHTLHHSSPTSEAEEFV |
| NOV21f | ------------------------------------------------------------ |
| NOV21g | LTIQPDLSTTTTTYQGSLCPRQDGPSPKFQLTNGHLLSPLGGGRHTLHHSSPTSEAEEFV |
| NOV21h | LTIQPDLSTTTTTYQGSLCPRQDGPSPKFQLTNGHLLSPLGGGRHTLHHSSPTSEAEEFV |
| NOV21a | SRLSTQNYFRSLPRGTSNNTYGTFNFLGGRLMIPNTGISLLIPPDAIPRGKIYEIYLTLH |
| NOV21b | ------------------------------------------------------------ |
| NOV21c | ------------------------------------------------------------ |
| NOV21d | ------------------------------------------------------------ |
| NOV21e | SRLSTQNYFRSLPRGTSNNTYGTFNFLGGRLMIPNTGISLLIPPDAIPRGKIYEIYLTLH |
| NOV21f | ------------------------------------------------------------ |
| NOV21g | SRLSTQNYFRSLPRGTSNMTYGTFNFLGGRLMIPNTGISLLIPPDAIPRGKIYEIYLTLH |
| NOV21h | SRLSTQNYFRSLPRGTSNMTYGTFNFLGGRLMIPNTGISLLIPPDAIPRGKIYEIYLTLH |
| NOV21a | KPEDVRLPLAGCQTLLSPIVSCGPPGVLLTRPVILAMDHCGEPSPDSWSLRLKKQSCEGS |
| NOV21b | ------------------------------------------------------------ |
| NOV21c | ------------------------------------------------------------ |
| NOV21d | ------------------------------------------------------------ |
| NOV21e | KFEDVRLPLAGCQTLLSPIVSCGPPGVLLTRPVILAMDHCGEPSPDSWSLRLKKQSCEGS |
| NOV21f | ------------------------------------------------------------ |
| NOV21g | KPEDVRLPLAGCQTLLSPIVSCGPPGVLLTRPVILAMDHCGEPSPDSWSLRLKKQSCEGS |
| NOV21h | KPEDVRLPLAGCQTLLSPIVSCGPPGVLLTRPVILAMDHCGEPSPDSWSLRLKKQSCEGS |
| NOV21a | WEQDVLHLGEEAPSHLYYCQLEASACYVFTEQLGRFALVGEALSVAAAKRLKLLLFAPVA |
| NOV21b | ------------------------------------------------------------ |
| NOV21c | ------------------------------------------------------------ |
| NOV21d | ------------------------------------------------------------ |
| NOV21e | WED-VLHLGEEAPSHLYYCQLEASACYVFTEQLGRFALVGEALSVAAAKRLKLLLFAPVA |
| NOV21f | ------------------------------------------------------------ |
| NOV21g | WED-VLHLGEEAPSHLYYCQLEASACYVFTEQLGRFALVGEALSVAAAKRLKLLLFAPVA |
| NOV21h | WED-VLHLGEEAPSHLYYCQLEASACYVFTEQLGRFALVGEALSVAAAKRLKLLLFAPVA |
| NOV21a | CTSLEYNIRVYCLHDTHDALKEVVQLEKQLGGQLIQEPRVLHFKDSYHNLRLSIHDVPSS |
| NOV21b | ------------------------------------------------------------ |
| NOV21c | ------------------------------------------------------------ |
| NOV21d | ------------------------------------------------------------ |
| NOV21e | CTSLEYNIRVYCLHDTHDALKEVVQLEKQLGGQLIQEPRVLHFKDSYHNLRLSIHDVPSS |
| NOV21f | ------------------------------------------------------------ |
| NOV21g | CTSLEYNIRVYCLHDTHDALKEVVQLEKQLGGQLIQEPRVLHFKDSYHNLRLSIHDVPSS |
| NOV21h | CTSLEYNIRVYCLHDTHDALKEVVQLEKQLGGQLIQEPRVLHFKDSYHNLRLSIHDVPSS |
| NOV21a | LWKSKLLVSYQEIPFYHIWNGTQRYLHCTFTLERVSPSTSDLACKLWVWQVEGDGQSFSI |
| NOV21b | ------------------------------------------------------------ |
| NOV21c | ------------------------------------------------------------ |
| NOV21d | ------------------------------------------------------------ |
| NOV21e | LWKSKLLVSYQEIPFYHIWNGTQRYLHCTFTLERVSPSTSDLACKLWVWQVEGDGQSFSI |
| NOv21f | ------------------------------------------------------------ |
| NOV21g | LWKSKLLVSYQEIPFYHIWNGTQRYLHCTFTLERVSPSTSDLACKLWVWQVEGDGQSFSI |
| NOV21h | LWKSKLLVSYQEIPFYHIWNGTQRYLHCTFTLERVSPSTSDLACKLWVWQVEGDGQSFSI |
| NOV21a | NFNITKDTRFAELLALESEAGVPALVGPSAFKIPFLIRQKIISSLDPPCRRGADWRTLAQ |
| NOV21b | ------------------------------------------------------------ |
| NOV21c | ------------------------------------------------------------ |
| NOV21d | ------------------------------------------------------------ |
| NOV21e | NFNITKDTRFAELLALESEAGVPALVGPSAFKIPFLIRQKIISSLDPPCRRGADWRTLAQ |
| NOV21f | ------------------------------------------------------------ |
| NOV21g | NFNITKDTRFAELLALESEAGVPALVGPSAFKIPFLIRQKIISSLDPPCRRGADWRTLAQ |
| NOV21h | NFNITKDTRFAELLALESEAGVPALVGPSAFKIPFLIRQKIISSLDPPCRRGADWRTLAQ |
| NOV21a | KLHLDSHLSFFASKPSPTAMILNLWEARHFPNGNLSQLAAAVAGLGQPDAGLFTVSEAEC |
| NOV21b | ------------------------------------------------------------ |
| NOV21c | ------------------------------------------------------------ |
| NOV21d | ------------------------------------------------------------ |
| NOV21e | KLHLDSHLSFFASKPSPTAMILNLWEARHFPNGNLSQLAAAVAGLGQPDAGLFTVSEAEC |
| NOV21f | ------------------------------------------------------------ |
| NOV21g | KLHLDSHLSFFASKPSPTAMILNLWEARHFPNGNLSQLAAAvAGLGQPDAGLFTVSEAEC |
| NOV21h | KLHLDSHLSFFASKPSPTAMILNLWEARHFPNGNLSQLAAAVAGLGQPDAGLFTVSEAEC |
| NOV21a | (SEQ ID NO: 506) |
| NOV21b | (SEQ ID NO: 508) |
| NOV21c | (SEQ ID NO: 510) |
| NOV21d | (SEQ ID NO: 512) |
| NOV21e | (SEQ ID NO: 514) |
| NOV21f | (SEQ ID NO: 516) |
| NOV21g | (SEQ ID NO: 518) |
| NOV21h | (SEQ ID NO: 520) |

[0473] Further analysis of the NOV21a protein yielded the following properties shown in Table 21C.

TABLE 21C
Protein Sequence Properties NOV21a

| | |
|---|---|
| SignalP analysis: | Cleavage site between residues 26 and 27 |
| PSORT II analysis: | |

| PSG: | a new signal peptide prediction method | |
|---|---|---|
| | N-region: | length 4; pos. chg 1; neg. chg 0 |
| | H-region: | length 16; peak value 9.57 |
| | PSG score: | 5.17 |

| | |
|---|---|
| GvH: | von Heijne's method for signal seq. recognition |
| | GvH score (threshold: −2.1): 1.79 |
| | possible cleavage site: between 25 and 26 |

>>> Seems to have a cleavable signal peptide (1 to 25)

| ALOM: | Klein et al's method for TM region allocation | | |
|---|---|---|---|
| | Init position for calculation: 26 | | |
| | Tentative number of TMS(s) for the threshold 0.5: 1 | | |
| | Number of TMS(s) for threshold 0.5: 1 | | |
| | INTEGRAL | Likelihood = | Transmembrane 367-383 |
| | | −19.00 | |

| | |
|---|---|
| PERIPHERAL | Likelihood = 0.85 (at 61) |

| | |
|---|---|
| | ALOM score: −19.00 (number of TMSs: 1) |
| MTOP: | Prediction of membrane topology (Hartmann et al.) |
| | Center position for calculation: 12 |
| | Charge difference: −1.0 C(1.0)-N(2.0) |
| | N >= C: N-terminal side will be inside |

>>> membrane topology: type 1a (cytoplasmic tail 384 to 899)

| MITDISC: | discrimination of mitochondrial targeting seq | | | |
|---|---|---|---|---|
| | R content: | 2 | Hyd Moment(75): | 9.35 |
| | Hyd Moment(95): | 6.17 | G content: | 5 |
| | D/E content: | 1 | S/T content: | 3 |

| | |
|---|---|
| | Score: −4.19 |
| Gavel: | prediction of cleavage sites for mitochondrial preseq |
| | R-2 motif at 31 LRG\|SG |

NUCDISC: discrimination of nuclear localization signals

| | |
|---|---|
| | pat4: none |
| | pat7: none |
| | bipartite: none |
| | content of basic residues: 9.2% |
| | NLS Score: −0.47 |
| KDEL: | ER retention motif in the C-terminus: none |

ER Membrane Retention Signals:

XXRR-like motif in the N-terminus: AVRP

none
SKL: peroxisomal targeting signal in the C-terminus: none
PTS2: 2nd peroxisomal targeting signal: none
VAC: possible vacuolar targeting motif: none
RNA-binding motif: none
Actinin-type actin-binding motif:

type 1: none
type 2: none

NMYR: N-myristoylation pattern: none
Prenylation motif: none
memYQRL: transport motif from cell surface to Golgi: none
Tyrosines in the tail: too long tail
Dileucine motif in the tail: found

LL at 420
LL at 455
LL at 519
LL at 554
LL at 567
LL at 652
LL at 653
LL at 725

checking 63 PROSITE DNA binding motifs: none
checking 71 PROSITE ribosomal protein motifs: none
checking 33 PROSITE prokaryotic DNA binding motifs: none

| | |
|---|---|
| NNCN: | Reinhardt's method for Cytoplasmic/Nuclear discrimination |
| | Prediction: cytoplasmic |
| | Reliability: 70.6 |
| COIL: | Lupas's algorithm to detect coiled-coil regions |
| | total: 0 residues |

Final Results (k = 9/23):

44.4%: endoplasmic reticulum
22.2%: Golgi
11.1%: plasma membrane
11.1%: vesicles of secretory system
11.1%: extracellular, including cell wall

>> prediction for CG53908-01 is end (k = 9)

[0474] A search of the NOV21 a protein against the Geneseq database, a proprietary database that contains sequences published in patents and patent publication, yielded several homologous proteins shown in Table 21D.

TABLE 21D
Geneseq Results for NOV21a

| | | NOV21a | Identities/ | | |
|---|---|---|---|---|---|
| | | Residues/ | Similarities for | | |
| Geneseq | Protein/Organism/Length | Match | the Matched | | Expect |
| Identifier | [Patent #, Date] | Residues | Region | | Value |
| AAU79939 | Human UNC5-like protein NOV1 - | 1 . . . 899 | 899/899 | (100%) | 0.0 |
| | Homo sapiens, 899 aa. | 1 . . . 899 | 899/899 | (100%) | |
| | [WO200229038-A2, 11-APR-2002] | | | | |
| AAU85403 | Human protein NOV1 - Homo sapiens, | 1 . . . 899 | 888/900 | (98%) | 0.0 |
| | 898 aa. [WO200210216-A2, 07-FEB- | 1 . . . 898 | 890/900 | (98%) | |
| | 2002] | | | | |
| AAU97899 | Human netrin binding membrane | 1 . . . 899 | 886/900 | (98%) | 0.0 |
| | receptor UNC5H-1 protein - Homo | 1 . . . 898 | 889/900 | (98%) | |
| | sapiens, 898 aa. [WO200233080-A2, | | | | |
| | 25-APR-2002] | | | | |
| AAU10543 | Rat netrin receptor UNC5H1 (YSG7) | 1 . . . 899 | 852/900 | (94%) | 0.0 |
| | polypeptide - Rattus sp, 898 aa. | 1 . . . 898 | 871/900 | (96%) | |
| | [WO200175440-A2, 11-OCT-2001] | | | | |
| AAU97900 | Rat netrin binding membrane receptor | 1 . . . 899 | 852/900 | (94%) | 0.0 |
| | UNC5H-1 protein - Rattus sp, 898 aa. | 1 . . . 898 | 871/900 | (96%) | |
| | [WO200233080-A2, 25-APR-2002] | | | | |

[0475] In a BLAST search of public sequence databases, the NOV21a protein was found to have homology to the proteins shown in the BLASTP data in Table 21E.

TABLE 21E
Public BLASTP Results for NOV21a

| | | NOV21a | Identities/ | |
|---|---|---|---|---|
| Protein | | Residues/ | Similarities for | |
| Accession | | Match | the Matched | Expect |
| Number | Protein/Organism/Length | Residues | Portion | Value |
| Q8K1S4 | Netrin receptor Unc5h1 - Mus | 1 . . . 899 | 858/900 (95%) | 0.0 |
| | musculus (Mouse), 898 aa. | 1 . . . 898 | 879/900 (97%) | |
| O08721 | Transmembrane receptor UNC5H1 - | 1 . . . 899 | 852/900 (94%) | 0.0 |
| | Rattus norvegicus (Rat), 898 aa. | 1 . . . 898 | 871/900 (96%) | |
| Q96GP4 | Similar to transmembrane receptor | 359 . . . 899 | 540/542 (99%) | 0.0 |
| | Unc5H1 - Homo sapiens (Human), | 4 . . . 544 | 540/542 (99%) | |
| | 544 aa (fragment). | | | |
| O08747 | Rostral cerebellar malformation | 9 . . . 898 | 515/913 (56%) | 0.0 |
| | protein - Mus musculus (Mouse), 931 | 26 . . . 930 | 668/913 (72%) | |
| | aa. | | | |
| Q8CD16 | Unc5 homolog - Mus musculus | 9 . . . 898 | 515/932 (55%) | 0.0 |
| | (Mouse), 950 aa. | 26 . . . 949 | 668/932 (71%) | |

[0476] PFam analysis predicts that the NOV21a protein contains the domains shown in the Table 21F.

TABLE 21F
Domain Analysis of NOV21a

| | | Identities/ | | |
|---|---|---|---|---|
| | | Similarities | | |
| Pfam | NOV21a | for the | | Expect |
| Domain | Match Region | Matched Region | | Value |
| ig | 163 . . . 223 | 17/63 | (27%) | 0.0015 |
| | | 38/63 | (60%) | |
| tsp_1 | 246 . . . 287 | 20/53 | (38%) | 0.00036 |
| | | 30/53 | (57%) | |
| tsp_1 | 303 . . . 350 | 21/53 | (40%) | 0.0017 |
| | | 32/53 | (60%) | |
| ZU5 | 495 . . . 598 | 47/115 | (41%) | 6.3e−56 |
| | | 103/115 | (90%) | |
| death | 818 . . . 898 | 26/88 | (30%) | 3.5e−14 |
| | | 64/88 | (73%) | |

### Example 22.

[0477] The NOV22 clone was analyzed, and the nucleotide and encoded polypeptide sequences are shown in Table 22A.

TABLE 22A
NOV22 Sequence Analysis

| | | |
|---|---|---|
| NOV22a, CG53944-02 | SEQ ID NO: 547 | 1887 bp |
| DNA Sequence | ORF Start: ATG at 1 | ORF Stop: TAG at 1885 |

ATGGCCATCCTCCCGTTGCTCCTGTGCCTGCTGCCGCTGGCCCCTGCCTCATCCCCACCCCAGTCAGC
CACACCCAGCCCATGTCCCCGCCGCTGCCGCTGCCAGACACAGTCGCTGCCCCTAAGCGTGCTGTGCC
CAGGGGCAGGCCTCCTGTTCGTGCCACCCTCGCTGGACCGCCGGGCAGCCGAGCTGCGGCTGGCAGAC
AACTTCATCGCCTCCGTGCGCCGCCGCGACCTGGCCAACATGACAGGCCTGCTGCATCTGAGCCTGTC
GCGGAACACCATCCGCCACGTGGCTGCCGGCGCCTTCGCCGACCTGCGGGCCCTGCGTGCCCTGCACC
ATCCTCAGCAACAACCAGCTGGCAGCGCTGGCGGCCGGCGCCCTGGATGATTGTGCCGAGACACTGGA
GGACCTCGACCTCTCCTACAACAACCTCGAGCAGCTGCCCTGGGAGGCCCTGGGCCGCCTGGGCAACG
TCAACACGTTGGGCCTCGACCACAACCTGCTGGCTTCTGTGCCCGCCGGCGCTTTTTCCCGCCTGCAC
AAGCTGGCCCGGCTGGACATGACCTCCAACCGCCTGACCACAATCCCACCCGACCCACTCTTCTCCCG
CCTGCCCCTGCTCGCCAGGCCCCGGGGCTCGCCCGCCTCTGCCCTGGTGCTGGCCTTTGGCGGGAACC
CCCTGCACTGCAACTGCGAGCTGGTGTGGCTGCGTCGCCTGGCGCGGGAGGACGACCTCGAGGCCTGC
GCGTCCCCACCTGCTCTGGGCGGCCGCTACTTCTGGGCGGTGGGCGAGGAGGAGTTTGTCTGCGAGCC
GCCCGTGGTGACTCACCGCTCACCACCTCTGGCTGTGCCCGCAGGTCGGCCGGCTGCCCTGCGCTGCC
GGGCAGTGGGGGACCCAGAGCCCCGTGTGCGTTGGGTGTCACCCCAGGGCCGGCTGCTAGGCAACTCA
AGCCGTGCCCGCGCCTTCCCCAATGGGACGCTGGAGCTGCTGGTCACCGAGCCGGGTGATGGTGGCAT
CTTCACCTGCATTGCGGCCAATGCAGCTGGCGAGGCCACAGCTGCTGTGGAGCTGACTGTGGGTCCCC
CACCACCTCCTCAGCTAGCCAACAGCACCAGCTGTGACCCCCCGCGGGACGGGGATCCTGATGCTCTC
ACCCCACCCTCCGCTGCCTCTGCTTCTGCCAAGGTGGCCGACACTGGGCCCCCTACCGACCGTGGCGT
CCAGGTGACTGAGCACGCGGCCACAGCTGCTCTTGTCCAGTGGCCGGATCAGCGGCCTATCCCGGGCA
GAGAGCCGCTCGTTCCTGCTGACGGACCTGGCGTCAGGCCGGACCTACGATCTGTGCGTGCTCGCCGT
GTATGAGGACAGCGCCACGGGGCTCACGGCCACGCGGCCTGTGGGCTGCGCCCGCTTCTCCACCGAAC
CTGCGCTGCGGCCATGCGGGGCGCCGCACGCTCCCTTCCTGGGCGGCACGATGATCATCGCGCTGGGC
GGCGTCATCGTAGCCTCGGTACTGGTCTTCATCTTCGTGCTGCTAATGCGCTACAAGGTGCACGGCGG
CCAGCCCCCCGGCAAGGCCAAGATTCCCGCGCCTGTTAGCAGCGTTTGCTCCCAGACCAACGGCGCCC
TGGGCCCCACGCCCACGCCCGCCCCGCCCGCCCCGGAGCCCGCGGCGCTCAGGGCCCACACCGTGGTC
CAGCTGGACTGCGAGCCCTGGGGGCCCGGCCACGAACCTGTGGGACCCTAG

| | | | |
|---|---|---|---|
| NOV22a, CG53944-02 | | | |
| Protein Sequence | SEQ ID NO: 548 | 1628 aa | MW at 66259.1kD |

MAILPLLLCLLPLAPASSPPQSATPSPCPPRCRCQTQSLPLSVLCPGAGLLFVPPSLDRRAAELRLAD
NFIASVRRRDLANMTGLLHLSLSRNTIRHVAAGAFADLPALRALHLDGNRLTSLGEGQLRGLVNLRHL
ILSNNQLAALAAGALDDCAETLEDLDLSYNNLEQLPWEALGRLGNVNTLGLDHNLLASVPAGAFSRLH
KLARLDMTSNRLTTIPPDPLFSRLPLLARPRGSPASALVLAFGGNPLHCNCELVWLRRLAREDDLEAC
ASPPALGGRYFWAVGEEEFVCEPPVVTHRSPPLAVPAGRPAALRCRAVGDPEPRVRWVSPQGRLLGNS
SRAPAFPNGTLELLVTEPGDGGIFTCIAANAAGEATAAVELTVGPPPPPQLANSTSCDPPRDGDPDAL
TPPSAASASAKVADTGPPTDRGVQVTEHGATAALVQWPDQRPIPGIRMYQIQYNSSADDILVYRMIPA
ESRSFLLTDLASGRTYDLCVLAVYEDSATGLTATRPVGCARFSTEPALRPCGAPHAPFLGGTMIIALG
GVIVASVLVFIFVLLMRYKVHGGQPPGKAKIPAPVSSVCSQTNGALGPTPTPAPPAPEPAALRAHTVV
QLDCEPWGPGHEPVGP

| | | |
|---|---|---|
| NOV22b, CG53944-01 | SEQ ID NO: 549 | 1887 bp |
| DNA Sequence | ORF Start: ATG at 1 | ORF Stop: TAG at 1885 |

ATGGCCATCCTCCCGTTGCTCCTGTGCCTGCTGCCGCTGGCCCCTGCCTCATCCCCACCCCAGTCAGC
CACACCCAGCCCATGTCCCCGCCGCTGCCGCTGCCAGACACAGTCGCTGCCCCTAAGCGTGCTGTGCC
AACTTCATCGCCTCCGTGCGCCGCCGCGACCTGGCCAACATGACAGGCCTGCTGCATCTGAGCCTGTC
GCGGAACACCATCCGCCACGTGGCTGCCGGCGCCTTCGCCGACCTGCGGGCCCTGCGTGCCCTGCACC
TGGATGGCAACCGGCTGACCTCACTGGGCGAGGGCCAGCTGCGCGGCCTGGTCAACTTGCGCCACCTC
ATCCTCAGCAACAACCAGCTGGCAGCGCTGGCGGCCGGCGCCCTGGATGATTGTGCCGAGACACTGGA
GGACCTCGACCTCTCCTACAACAACCTCGAGCAGCTGCCCTGGGAGGCCCTGGGCCGCCTGGGCAACG
TCAACACGTTGGGCCTCGACCACAACCTGCTGGCTTCTGTGCCCGCCGGCGCTTTTTCCCGCCTGCAC
AAGCTGGCCCGGCTGGACATGACCTCCAACCGCCTGACCACAATCCCACCCGACCCACTCTTCTCCCG
CCTGCCCCTGCTCGCCAGGCCCCGGGGCTCGCCCGCCTCTGCCCTGGTGCTGGCCTTTGGCGGGAACC
CCCTGCACTGCAACTGCGAGCTGGTGTGGCTGCGTCGCCTGGCGCGGGAGGACGACCTCGAGGCCTGC
GCGTCCCCACCTGCTCTGGGCGGCCGCTACTTCTGGGCGGTGGGCGAGGAGGAGTTTGTCTGCGAGCC
GCCCGTGGTGACTCACCGCTCACCACCTCTGGCTGTGCCCGCAGGTCGGCCGGCTGCCCTGCGCTGCC
GGGCAGTGGGGGACCCAGAGCCCCGTGTGCGTTGGGTGTCACCCCAGGGCCGGCTGCTAGGCAACTCA
AGCCGTGCCCGCGCCTTCCCCAATGGGACGCTGGAGCTGCTGGTCACCGAGCCGGGTGATGGTGGCAT
CTTCACCTGCATTGCGGCCAATGCAGCTGGCGAGGCCACAGCTGCTGTGGAGCTGACTGTGGGTCCCC
CACCACCTCCTCAGCTAGCCAACAGCACCAGCTGTGACCCCCCGCGGGACGGGGATCCTGATGCTCTC
ACCCCACCCTCCGCTGCCTCTGCTTCTGCCAAGGTGGCCGACACTGGGCCCCCTACCGACCGTGGCGT
CCAGGTGACTGAGCACGGGGCCACAGCTGCTCTTGTCCAGTGGCCGGATCAGCGGCCTATCCCGGGCA
TCCGCATGTACCAGATCCAGTACAACAGCTCGGCTGATGACATCCTCGTCTACAGGATGATCCCGGCG
GAGAGCCGCTCGTTCCTGCTGACGGACCTGGCGTCAGGCCGGACCTACGATCTGTGCGTGCTCGCCGT
GTATGAGGACAGCGCCACGGGGCTCACGGCCACGCGGCCTGTGGGCTGCGCCCGCTTCTCCACCGAAC
CTGCGCTGCGGCCATGCGGGGCGCCGCACGCTCCCTTCCTGGGCGGCACGATGATCATCGCGCTGGGC
GGCGTCATCGTAGCCTCGGTACTGGTCTTCATCTTCGTGCTGCTAATGCGCTACAAGGTGCACGGCGG
CCAGCCCCCCGGCAAGGCCAAGATTCCCGCGCCTGTTAGCAGCGTTTGCTCCCAGACCAACGGCGCCC
TGGGCCCCACGCCCACGCCCGCCCCGCCCGCCCCGGAGCCCGCGGCGCTCAGGGCCCACACCGTGGTC
CAGCTGGACTGCGAGCCCTGGGGGCCCGGCCACGAACCTGTGGGACCCTAG

| | | | |
|---|---|---|---|
| NOV22b, CG53944-01 | | | |
| Protein Sequence | SEQ ID NO: 550 | 628 aa | MW at 66259.1kD |

MAILPLLLCLLPLAPASSPPQSATPSPCPRRCRCQTQSLPLSVLCPGAGLLFVPPSLDRRAAELRLAD
NFIASVRRRDLANMTGLLHLSLSRNTIRHVAAGAFADLRALRALHLDGNRLTSLGEGQLRGLVNLRHL
ILSNNQLAALAAGALDDCAETLEDLDLSYNNLEQLPWEALGRLGNVNTLGLDHNLLASVPAGAFSRLH
KLARLDMTSNRLTTIPPDPLFSRLPLLARPRGSPASALVLAFGGNPLHCNCELVWLRRLAREDDLEAC
ASPPALGGRYFWAVGEEEFVCEPPVVTHRSPPLAVPAGRPAALRCRAVGDPEPRVRWVSPQGRLLGNS
SRAPAFPNGTLELLVTEPGDGGIFTCIAANAAGEATAAVELTVGPPPPPQLANSTSCDPPRDGDPDAL
TPPSAASASAKVADTGPPTDRGVQVTEHGATAAIJVQWPDQRPIPGIRMYQIQYNSSADDILVYRMPA
ESRSFLLTDLASGRTYDLCVLAVYEDSATGLTATRPVGCARFSTEPALRPCGAPHAPFLGGTMIIALG
GVIVASVLVFIFVLLMRYKVHGGQPPGKAKIPAPVSSVCSQTNGALGPTPTPAPPAPEPAALRAHTVV
QLDCEPWGPGHEPVGP

[0478] A ClustalW comparison of the above protein sequences yields the following sequence alignment shown in Table 22B.

TABLE 22B

Comparison of the NOV22 protein sequences.

| | |
|---|---|
| NOV22a | MAILPLLLCLLPLAPASSPPQSATPSPCPRRCRCQTQSLPLSVLCPGAGLLFVPPSLDRR |
| NOV22b | MAILPLLLCLLPLAPASSPPQSATPSPCPRRCRCQTQSLPLSVLCPGAGLLFVPPSLDRR |
| NOV22a | AAELRLADNFIASVRPRDLANMTGLLHLSLSRNTIRHVAAGAFADLEALRALHLDGNRLT |
| NOV22b | AAELRLADNFIASVRRRDLANMTGLLHLSLSRNTIRHVAAGAFADLRALRALHLDGNRLT |
| NOV22a | SLGEGQLRGLVNLRHLILSNNQLAALAAGALDDCAETLEDLDLSYNNLEQLPWEALGRLG |
| NOV22b | SLGEGQLRGLVNLRHLILSNNQLAALAAGALDDCAETLEDLDLSYNNLEQLPWEALGRLG |
| NOV22a | NVNTLGLDHNLLASVPAGAFSRLHKLARLDMTSNRLTTIPPDPLFSRLPLLARPRGSPAS |
| NOV22b | NVNTLGLDHNLLASVPAGAFSRLHKLARLDMTSNRLTTIPPDPLFSRLPLLARPRGSPAS |
| NOV22a | ALVLAFGGNPLHCNCELVWLRRLAREDDLEACASPPALGGRYFWAVGEEEFVCEPPVVTH |
| NOV22b | ALVLAFGGNPLHCNCELVWLRRLAREDDLEACASPPALGGRYFWAVGEEEFVCEPPVVTH |
| NOV22a | RSPPLAVPAGRPAALRCRAVGDPEPRVRWVSPQGRLLGNSSRARAFPNGTLELLVTEPGD |
| NOV22b | RSPPLAVPAGRPAALRCRAVGDPEPRVRWVSPQGRLLGNSSRARAFPNGTLELLVTEPGD |
| NOV22a | GGIFTCIAANAAGEATAAVELTVGPPPPPQLANSTSCDPPRDGDPDALTPPSAASASAKV |
| NOV22b | GGIFTCIAANAAGEATAAVELTVGPPPPPQLANSTSCDPPRDGDPDALTPPSAASASAKV |
| NOV22a | ADTGPPTDRGVQVTEHGATAALVQWPDQRPIPGIRMYQIQYNSSADDILVYRMIPAESRS |
| NOV22b | ADTGPPTDRGVQVTEHGATAALVQWPDQRPIPGIRMYQIQYNSSADDILVYRMIPAESRS |
| NOV22a | FLLTDLASGRTYDLCVLAVYEDSATGLTATRPVGCARFSTEPALRPCGAPHAPFLGGTMI |
| NOV22b | FLLTDLASGRTYDLCVLAVYEDSATGLTATRPVGCARFSTEPALRPCGAPHAPFLGGTMI |
| NOV22a | IALGGVIVASVLVFIFVLLMRYKVHGGQPPGKAKIPAPVSSVCSQTNGALGPTPTPAPPA |
| NOV22b | IALGGVIVASVLVFIFVLLMRYKVHGGQPPGKAKIPAPVSSVCSQTNGALGPTPTPAPPA |
| NOV22a | PEPAALRAHTVVQLDCEPWGPGHEPVGP |
| NOV22b | PEPAALRAHTVVQLDCEPWGPGHEPVGP |
| NOV22a | (SEQ ID NO: 548) |
| NOV22b | (SEQ ID NO: 550) |

[0479] Further analysis of the NOV22a protein yielded the following properties shown in Table 22C.

TABLE 22C
Protein Sequence Properties NOV22a

| | |
|---|---|
| SignalP analysis: | Cleavage site between residues 17 and 18 |
| PSORT II analysis: | |

| PSG: | a new signal peptide prediction method | |
|---|---|---|
| | N-region: | length 0; pos. chg 0; neg. chg 0 |
| | H-region: | length 29; peak value 9.99 |
| | PSG score: | 5.59 |

| | |
|---|---|
| GvH: | von Heijne's method for signal seq. recognition |
| | GvH score (threshold: −2.1): 4.65 |
| | possible cleavage site: between 16 and 17 |

>>> Seems to have a cleavable signal peptide (1 to 16)

| ALOM: | Klein et al's method for TM region allocation | | |
|---|---|---|---|
| | Init position for calculation: 17 | | |
| | Tentative number of TMS(s) for the threshold 0.5: 2 | | |
| | Number of TMS(s) for threshold 0.5: 1 | | |
| | INTEGRAL | Likelihood = | Transmembrane 543-559 |
| | | −12.79 | |

| | |
|---|---|
| PERIPHERAL | Likelihood = 2.44 (at 363) |

| | |
|---|---|
| | ALOM score: −12.79 (number of TMSs: 1) |
| MTOP: | Prediction of membrane topology (Hartmann et al.) |
| | Center position for calculation: 8 |
| | Charge difference: 2.0 C(3.0)-N(1.0) |
| | C > N: C-terminal side will be inside |

>>>Caution: Inconsistent mtop result with signal peptide
>>> membrane topology: type 1a (cytoplasmic tail 560 to 628)

| MITDISC: | discrimination of mitochondrial targeting seq | | | |
|---|---|---|---|---|
| | R content: | 3 | Hyd Moment (75): | 2.94 |
| | Hyd Moment (95): | 1.64 | G content: | 2 |
| | D/E content: | 1 | S/T content: | 9 |

| | |
|---|---|
| | Score: −1.46 |
| Gavel: | prediction of cleavage sites for mitochondrial preseq |
| | R-2 motif at 43 CRC\|QT |

NUCDISC: discrimination of nuclear localization signals

| | |
|---|---|
| | pat 4: none |
| | pat7: PCPRRCR (3) at 27 |
| | pat7: PRRCRCQ (5) at 29 |
| | bipartite: none |
| | content of basic residues: 8.4% |
| | NLS Score: 0.22 |
| KDEL: | ER retention motif in the C-terminus: none |

ER Membrane Retention Signals: none
SKL: peroxisomal targeting signal in the C-terminus: none
PTS2: 2nd peroxisomal targeting signal: none
VAC: possible vacuolar targeting motif: none
RNA-binding motif: none
Actinin-type actin-binding motif:

type 1: none
type 2: none

NMYR: N-myristoylation pattern: none
Prenylation motif: none
memYQRL: transport motif from cell surface to Golgi: none
Tyrosines in the tail: too long tail
Dileucine motif in the tail: none
checking 63 PROSITE DNA binding motifs: none
checking 71 PROSITE ribosomal protein motifs: none
checking 33 PROSITE prokaryotic DNA binding motifs: none

| | |
|---|---|
| NNCN: | Reinhardt's method for Cytoplasmic/Nuclear discrimination |
| | Prediction: nuclear |
| | Reliability: 55.5 |
| COIL: | Lupas's algorithm to detect coiled-coil regions |
| | total: 0 residues |

Final Results (k = 9/23):

44.4%: extracellular, including cell wall
22.2%: Golgi
22.2%: endoplasmic reticulum
11.1%: plasma membrane

>> prediction for CG53944-02 is exc (k = 9)

[0480] A search of the NOV22a protein against the Geneseq database, a proprietary database that contains sequences published in patents and patent publication, yielded several homologous proteins shown in Table 22D.

TABLE 22D
Geneseq Results for NOV22a

| | | NOV22a | Identities/ | | |
|---|---|---|---|---|---|
| | | Residues/ | Similarities for | | |
| Geneseq | Protein/Organism/Length | Match | the Matched | | Expect |
| Identifier | [Patent #, Date] | Residues | Region | | Value |
| ABP69326 | Human polypeplide SEQ ID NO 1373 - | 1 . . . 628 | 628/628 | (100%) | 0.0 |
| | Homo sapiens, 628 aa. | 1 . . . 628 | 628/628 | (100%) | |
| | [WO200270539-A2, 12-SEP-2002] | | | | |
| AAG67523 | Amino acid sequence of a human | 1 . . . 628 | 628/628 | (100%) | 0.0 |
| | secreted polypeptide - Homo sapiens, | 1 . . . 628 | 628/628 | (100%) | |
| | 628 aa. [WO200166690-A2, 13-SEP-2001] | | | | |
| AAB84469 | Amino acid sequence of an interferon | 1 . . . 628 | 628/628 | (100%) | 0.0 |
| | omega-1 like protein NOV2 - Homo | 1 . . . 628 | 628/628 | (100%) | |
| | sapiens, 628 aa. [WO200142471-A2, | | | | |
| | 14-JUN-2001] | | | | |
| AAG65805 | Human leucine-rich repeat (LRR) family | 1 . . . 628 | 626/628 | (99%) | 0.0 |
| | member, 33395 polypeptide - Homo | 1 . . . 628 | 627/628 | (99%) | |
| | sapiens, 628 aa. [WO200172827-A2, | | | | |
| | 04-OCT-2001] | | | | |
| ABG34079 | Human Pro peptide #51 - Homo | 1 . . . 628 | 627/628 | (99%) | 0.0 |
| | sapiens, 627 aa. [WO200224888-A2, | 1 . . . 627 | 627/628 | (99%) | |
| | 28-MAR-2002] | | | | |

[0481] In a BLAST search of public sequence databases, the NOV22a protein was found to have homology to the proteins shown in the BLASTP data in Table 22E.

TABLE 22E
Public BLASTP Results for NOV22a

| | | NOV22a | Identities/ | | |
|---|---|---|---|---|---|
| Protein | | Residues/ | Similarities for | | |
| Accession | | Match | the Matched | | Expect |
| Number | Protein/Organism/Length | Residues | Portion | | Value |
| Q9BTNO | Hypothetical protein - Homo sapiens | 1 . . . 628 | 628/628 | (100%) | 0.0 |
| | (Human), 628 aa. | 1 . . . 628 | 628/628 | (100%) | |
| CAD10239 | Sequence 1 from Patent WO0172827 - | 1 . . . 628 | 626/628 | (99%) | 0.0 |
| | Homo sapiens (Human), 628 aa. | 1 . . . 628 | 627/628 | (99%) | |
| Q8BLY3 | Hypothetical leucine-rich repeat | 1 . . . 628 | 603/628 | (96%) | 0.0 |
| | containing protein - Mus musculus | 1 . . . 626 | 611/628 | (97%) | |
| | (Mouse), 626 aa. | | | | |
| Q9ULH4 | Hypothetical protein KIAA1246 - | 23 . . . 603 | 310/585 | (52%) | e−174 |
| | Homo sapiens (Human), 832 aa | 59 . . . 639 | 398/585 | (67%) | |
| | (fragment). | | | | |
| Q9BE71 | Hypothetical 84.7 kDa protein - | 23 . . . 603 | 309/585 | (52%) | e−174 |
| | Macaca fascicularis (Crab eating | 16 . . . 596 | 397/585 | (67%) | |
| | macaque) (Cynomolgus monkey), | | | | |
| | 789 aa. | | | | |

[0482] PFam analysis predicts that the NOV22a protein contains the domains shown in the Table 22F.

TABLE 22F
Domain Analysis of NOV22a

| | | Identities/ | |
|---|---|---|---|
| | | Similarities | |
| Pfam | NOV22a Match | for the Matched | |
| Domain | Region | Region | Expect Value |
| LRR | 84 . . . 107 | 8/25 (32%) | 0.86 |
| | | 21/25 (84%) | |
| LRR | 132 . . . 155 | 10/25 (40%) | 0.27 |
| | | 20/25 (80%) | |
| LRR | 157 . . . 180 | 12/25 (48%) | 0.026 |
| | | 19/25 (76%) | |
| LRRCT | 249 . . . 294 | 21/55 (38%) | 4.3e−05 |
| | | 37/55 (67%) | |
| ig | 310 . . . 368 | 15/62 (24%) | 1.2e−05 |
| | | 44/62 (71%) | |
| fn3 | 425 . . . 505 | 18/84 (21%) | 7.1e−05 |
| | | 55/84 (65%) | |

### Example 23.

[0483] The NOV23 clone was analyzed, and the nucleotide and encoded polypeptide sequences are shown in Table 23A.

TABLE 23A

NOV23 Sequence Analysis

| | | |
|---|---|---|
| NOV23a, CG54308-04 | SEQ ID NO: 551 | 1284 bp |
| DNA Sequence | ORF Start: ATG at 1 | ORF Stop: TAA at 1276 |

ATGGACTCTCTTGTTACAGCAAACACCAAATTTTGCTTTGATCTTTTTCAAGAGATAGGCAAAGATGA
TCGTCATAAAAACATATTTTTCTCTCCCCTGAGCCTCTCAGCTGCCCTTGGTATGGTACGCTTGGGTG
CTAGAAGTGACAGTGCACATCAGATTGATGAGGTACTACACTTCGACGAATTTTCCCAGAATGAAAGC
AAAGAACCTGACCCTTGTCTGAAAAGCAACAAACAAAAGTGCTGGCTGACAGCTCTCTGGAGGGGGCA
GAAAAAAACGACAGAGCCTCTGGATCAGCAGGCTGGGTCCTTAAACAATGAGAGCGGACTGGTCAGCT
GCTACTTTGGGCAGCTTCTCTCCAAATTAGACAGGATCAAGACTGATTACACACTGAGTATTGCCAAC
AGGCTTTATGGAGAGCAGGAATTCCCAATCTGTCAGGAATACTTAGATGGTGTGATTCAATTTTACCA
CACGACGATTGAAAGTGTTGATTTCCAAAAAAACCCTGAAAAATCCAGACAAGAGATTAACTTCTGGG
TTGAATGTCAATCCCAAGGTAAAATCAAGGAACTCTTCAGCAAGGACGCTATTAATGCTGAGACTGTG
CTGGTACTGGTGAATGCTGTTTACTTCAAGGCCAAATGGGAAACATACTTTGACCATGAAAACACGGT
GGATGCACCTTTCTGTCTAAATGCGAATGAAAACAAGAGTGTGAAGATGATGATGCAAAAAGGCCTCT
ACAGAATTGGCTTCATAGAGGAGGTGAAGGCACAGATCCTGGAAATGAGGTACACCAAGGGGAAGCTC
AGCATGTTCGTGCTGCTGCCATCTCACTCTAAAGATAACCTGAAGGGTCTGGAAGAGCTTGAAAGGAA
AATCACCTATGAAAAAATGGTGGCTGGAGCAGCTCAGAAAACATGTCAGAAGAAATCGGTGGTCCTGT
CCTTCCCCCGGTTCACCCTGGAAGACAGCTATGATCTCAATTCCATTTTACAAGACATGGGCATTACG
GATATCTTTGATGAAACGAGGGCTGATCTTACTGGAATCTCTCCAAGTCCCAATTTGTACTTGTCAAA
AATTATCCACAAAACCTTTGTGGAGGTGGATGAAAACGGTACCCAGGCAGCTGCAGCCACTGGGGCTG
TTGTCTCGGAAAGGTCACTACGATCTTGGGTGGAGTTTAATGCCAACCACCCTTTTCTCTTTTTCATT
AGACACAACAAAACCCAAACCATTCTCTTTTATGGAAGGGTCTGCTCTCCTTAAAAGGGG

| | | | |
|---|---|---|---|
| NOV23a, CG54308-04 | | | |
| Protein Sequence | SEQ ID NO: 552 | 425 aa | MW at 48476.3kD |

MDSLVTANTKFCFDLFQEIGKDDRHKNIFFSPLSLSAALGMVRLGARSDSAHQIDEVLHFDEFSQNES
KEPDPCLKSNKQKVLADSSLEGQKKTTEPLDQQAGSLNNESGLVSCYFGQLLSJHDRIKTDYTLSIAN
RLYGEQEFPICQEYLDGVIQFYHTTIESVDFQKNPEKSRQEINFWVECQSQGKIKELFSKDAINAETV
LVLVNAVYFKAKWETYFDHENTVDAPFCLNANENKSVKMMMQKGLYRIGFIEEVKAQILEMRYTKGKL
SMFVLLPSHSKDNLKGLEELERKITYEKMVAWSSSENMSEESVVLSFPRFTLEDSYDLNSILQDMGIT
DIFDETRADLTGISPSPNLYLSKIIHKTFVEVDENGTQAAAATGAVVSERSLRSWVEFNANHPFLFFI
RHNKTQTILFYGRVCSP

| | | |
|---|---|---|
| NOV23b, CG54308-01 | SEQ ID NO: 553 | 1200 bp |
| DNA Sequence | ORF Start: ATG at 7 | ORF Stop: TAA at 1192 |

TTTACAATGGACTCTCTTGTTACAGCAAACACCAAATTTTGCTTTGATCTTTTTCAAGAGATAGGCAA
AGATGATCGTCATAAAAACATATTTTTCTCTCCCCTGAGCCTCTCAGCTGCCCTTGGTATGGTACGCT
GAAAGCAAAGAACCTGCTGGGTCCTTAAACAATGAGAGCGGACTGGTCAGCTGCTACTTTGGGCAGCT
TCTCTCCAAATTAGACAGGATCAAGACTGATTACACACTGAGTATTGCCAACAGGCTTTATGGAGAGC
AGGAATTCCCAATCTGTCAGGAATACTTAGATGGTGTGATTCAATTTTACCACACGACGATTGAAAGT
GTTGATTTCCAAAAAAACCCTGAAAAATCCAGACAAGAGATTAACTTCTGGGTTGAATGTCAATCCCA
AGGTAAATCAAGGACCTCTTCAGCAAGGACGCTATTAATGCTGAGACTGTGCTGGTACTGGGTGAATG
CTGTTTACTTCAAGGCCAAATGGGAAACATACTTTGACCATGAAAACACGGTGGATGCACCTTTCTGT
CTAAATCAGAATGAAAACAAGAGTGTGAAGATGATGACGCAAAAAGGCCTCTACAGAATTGGCTTCAT
AGAGGAGGTGAAGGCACAGATCCTGGAAATGAGGTACACCAAGGGGAAGCTCAGCATGTTCGTGCTGC
ATGGTGGCCTGGAGCAGCTCAGAAAACATGTCAGAAGAATCGGTGGTCCTGTCCTTCCCCCGGTTCAC
CCTGGAAGACAGCTATGATCTCAATTCCATTTTACAAGACATGGGCATTACGGATATCTTTGATGAAA
CGAGGGCTGATCTTACTGGAATCTCTCCAAGTCCCAATTTGTACTTGTCAAAAATTATCCACAAAACC
TTTGTGGAGGTGGATGAAAACGGTACCCAGGCAGCTGCAGCCACTGGGGCTGTTGTCTCGGAAAGGTC
AAACCATTCTCTTTTATGGCAGGGTCTGCTCTCCTTAAAAGGGG

| | | | |
|---|---|---|---|
| NOV23b, CG54308-01 | | | |
| Protein Sequence | SEQ ID NO: 554 | 395 aa | MW at 45176.6kD |

MDSLVTANTKFCFDLFQEIGKDDRHKNIFFSPLSLSAALGMVRLGARSDSAHQIDEVLHFNEFSQNES
KEPAGSLNNESGLVSCYFGQLLSKLDRIKTDYTLSIANRLYGEQEFPICQEYLDGVIQFYHTTIESVD
FQKNPEKSRQEINFWVECQSQGKIKDLFSKDAINAETVLVLVNAVYFKAKEWTYFDHENTVDAPFCLN
QNENKSVKMMTQKGLYRIGFIEEVKAQILEMRYTKGKLSMFVLLPSHSKDNLKGLEELERKITYEKMV
AWSSSENMSEESVVLSFPRFTLEDSYDLNSILQDMGITDIFDETRADLTGISPSPNLYLSKIIHKTFV
EVDENGTQAAAATGAVVSERSLRSWVEFNANHPFLFFIRHNKTQTILFYGRVCSP

| | | |
|---|---|---|
| NOV23c, CG54308-02 | SEQ ID NO: 555 | 1278 bp |
| DNA Sequence | ORF Start: at 1 | ORF Stop: end of sequence |

ACCATGGACTCTCTTGTTACAGCAAACACCAAATTTTGCTTTGATCTTTTTCAAGAGATAGGCAAAGA
TGATCGTCATAAAAACATATTTTTCTCTCCCCTGAGCCTCTCAGCTGCCCTTGGTATGGTACGCTTGG
GTGCTAGAAGTGACAGTGCACATCAGATTGATGAGGTACTACACTTCAACGAATTTTCCCAGAATGAA
AGCAAAGAACCTGACCCTTGTCTGAAAGCAACAAACAAAAAGTGCTGGACTGACAGCTCTCTGGAGGG
GCAGAAAAAAACGACAGAGCCTCTGGATCAGCAGGCTGGGTCCTTAAACAATGAGAGcGGACTGGTCA
GCTGCTACTTTGGGCAGCTTCTCTCCAAATTAGACAGGATCAAGACTGATTACACACTGAGTATTGCC
AACAGGCTTTATGGAGGGCAGGAATTCCCAATCTGTCAGGAATACTTAGATGGTGTGATTCAATTTTA
CCACACGACGATTGAAAGTGTTGATTTCCAAAAAAACCCTGAAAAATCCAGACAAGAGATTAACTTCT
GGGTTGAATGTCAATCCCAAGGTAAAATCAAGGAACTCTTCAGCAAGGACGCTATTAATGCTGAGACT
GTGCTGGTACTGGTGAATGCTGTTTACTTCAAGGCCAAATGGGAAACATACTTTGACCATGAAAACAC
GGTGGATGCACCTTTCTGTCTAAATGCGAATGAAAACAAGAGTGTGAAGATGATGACGCAAAAAGGCC
TCTACAGAATTGGCTTCATAGAGGAGGTGAAGGCACAGATCCTGGAAATGAGGTACACCAAGGGGAAG
CTCAGCATGTTCGTGCTGCTGCCATCTCACTCTAAAGATAACCTGAAGGGTCTGGAAGAGCTTGAAAG
GAAAATCACCTATGAAAAAATGGTGGCCTGGAGCAGCTCAGAAAACATGTCAGAAGAATCGGTGGTCC
TGTCCTTCCCCCGGTTCACCCTGGAAGACAGCTATGATCTCAATTCCATTTTACAAGACATGGGCATT
ACGGATATCTTTGATGAAACGAGGGCTGATCTTACTGGAATCTCTCCAAGTCCCAATTTGTACTTGTC
AAAAATTATCCACAAAACCTTTGTGGAGGTGGATGAAAACGGTACCCAGGCAGCTGCAGCCACTGGGG
CTGTTGTCTCGGAAAGGTCACTACGATCTTGGGTGGAGTTTAATGCCAACCACCCTTTTCTCTTTTTC
ATTAGACACAACAAAACCCAAACCATTCTCTTTTATGGCAGGGTCTGCTCTCCT

| | | | |
|---|---|---|---|
| NOV23c, CG54308-02 | | | |
| Protein Sequence | SEQ ID NO: 556 | 426 aa | MW at 48474.3kD |

TMDSLVTANTKFCFDLFQEIGKDDRHKNIFFSPLSLSAALGMVRLGARSDSAHQIDEVLHFNEFSQNE
SKEPDPCLKSNKQKVLADSSLEGQKKTTEPLDQQAGSLNNESGLVSCYFGQLLSKLDRIKTDYTLSIA
NRLYGGQEFPICQEYLDGVIQFYHTTIESVDFQKNPEKSRQEINFWVECQSQGKIKELFSKDAINAET
VLVLVNAVYFKAKWETYFDHENTVDAPFCLNANENKSVKMMTQKGLYRIGFIEEVKAQILEMRYTKGK
LSMFVLLPSHSKDNLKGLEELERKITYEKMVAWSSSENMSEESVVLSFPRFTLEDSYDLNSILQDMGI
TDIFDETRADLTGISPSPNLYLSKIIHKTFVEVDENGTQAAAATGAVVSERSLRSWVEFNANHPFLFF
IRHNKTQTILFYGRVCSP

| | | |
|---|---|---|
| NOV23d, CG54308-03 | SEQ ID NO: 557 | 1285 bp |
| DNA Sequence | ORF Start: ATG at 8 | ORF Stop: TAA at 1277 |

TTTTACAATGGACTCTCTTGTTACAGCAAACACCAAATTTTGCTTTGATCTTTTTCAAGAGATAGGCA
AAGATGATCGTCATAAAAACATATTTTTCTCTCCCCTGAGCCTCTCAGCTGCCCTTGGTATGGTACGC
TTGGGTGCTATAAGTGACAGTGCACATCACATTGATGAGGTACGTGTCCACTATTCCCAGAATGAAAG
CAAAGAACCTGACCCTTGTCTGAAAAGCAACAAACAAAAAGTGCTGGCTGACAGCTCTCTGGAGGGGC
AGAAAAAAACGACAGAGCCTCTGGATCAGCAGGCTGGGTCCTTAAACAATGGGAGCGGACTGGTCAGC
CAGGCTTTATGGAGAGCGGGAATTCCCAATCTGTCAGGAATACTTAGATGGTGTGATTCAATTTTACC
ACACGACGATTGAAAGTGTTGATTTCCAAAAAAACCCTGAAAAATCCAGACAAGAGATTAACTTCTGG
GTTGAATGTCAATCCCAAGGTAAAATCAAGGAACTCTTCAGCAAGGACGCTATTAATGCTGAGACTGT
GCTGGTACTGGTGAATGCTGTTTACTTCAAGGCCAAATGGGAAAACATACTTTGACCATGAAACACGG
TGGATGCACCTTTCTGTCTAAATGCGAATGAAAACAAGAGTGTGAAGATGATGACGCAAAAAGGCCTC
CAGCATGTTCGTGCTGCTGCCATCTCACTCTAAAGATAACCTGAAGGGTCTGGAAGAGCTTGAAAGGA
AAATCACCTATGAAAAAATGGTGGCCTGGAGCAGCTCAGAAAACATGTCAGAAGAATCGGTGGTCCTG
TCCTTCCCCCGGTTCACCCTGGAAGACAGCTATGATCTCAATTCCATTTTACAAGACATGGGCATTAC
GGATATCTTTGATGAAACGAGGGCTGATCTTACTGGAATCTCTCCAAGTCCCAATTTGTACTTGTCAA
AAATTATCCACAAAACCTTTGTGGAGGTGGATGAAAACGGTACCCAGGCAGCTGCAGCCACTGGGGCT
GTTGTCTCGGAAAGGTCACTACGATCTTGGGTGGAGTTTAATGCCAACCACCCTTTTCTCTTTTTCAT
TAGACACAACAAAACCCAAACCATTCTCTTTTATGGAAGGGTCTGCTCTCCTTAAAAGGGG

| | | | |
|---|---|---|---|
| NOV23d, CG54308-03 | | | |
| Protein Sequence | SEQ ID NO: 558 | 423 aa | MW at 48136.0kD |

MDSLVTANTKFCFDLFQEIGKDDRHKNIFFSPLSLSAALGMVRLGAISDSAHHIDEVRVHYSQNESKE
PDPCLKSNKQKVLADSSLEGQKKTTEPLDQQAGSLNNGSGLVSCYFGQLLSKLDRIKTDYTLSIADRL
LVNAVYFKAXWETYFDHENTVDAPFCLNANENKSVKMMTQKGLYRIGFIEEVKAQILEMRYTKGKLSM
FVLLPSHSKDNLKGLEELERKITYEKMVAWSSSENMSEESVVLSFPRFTLEDSYDLNSILQDMGITDI
FDETRADLTGISPSPNLYLSKIIHKTFVEVDENGTQAAAATGAVVSERSLRSWVEFNANHPFLFFIRH
NKTQTILFYGRVCSP

| | | |
|---|---|---|
| NOV23e, CG54308-05 | SEQ ID NO: 559 | 1196 bp |
| DNA Sequence | ORF Start: ATG at 60 | ORF Stop: TAA at 1155 |

CCAATCACCATTTTCTCTTTCTCCTTTTTTTTTGGTTTTAGATCGTTATAAGTTTTACAATGGACTCT
CTTGTTACAGCAAACACCAAATTTTGCTTTGATCTTTTTCAAGAGATAGGCAAAGATGATCGTCATAA
AAACATATTTTTCTCTCCCCTGAGCCTCTCAGCTGCCCTTGGTATGGTACGCTTGGGTGCTAGAAGTG
ACAGTGCACATCAGATTGATGAGGTACGTTCCTTAAACAATGAGAGCGGACTGGTCAGCTGCTACTTT
GGGCAGCTTCTCTCCAAATTAGACAGGATCAAGACTGATTACACACTGAGTATTGCCAACAGGCTTTA
TGGAGAGTCCAGCCTGGGAGACAAGAGCGAAACTCTGTCTCAAAAAAAAAAAAAAAAAATTATCTACA
CAAATGCTTTTGATACAATTCATACTCAGGATATTCTCTGGGATCTTTTTTTTAGGTAAATCAAGGAA
CTCTTCAGCAAGGACGCTATTAATGCTGAGACTGTGCTGGTACTGGTGATTGCTGTTTACTTCAAGGC
CAAATGGGAACATACTTTGACCATGAAAACACGGTGGATGCACCTTTCTGTCTLAATCAGAATGAAAA
ACAAGAGTGTGAAGATGATGACGCAAAAAGGCCTCTACAGAATTGGCTTCATAGAGGAGGTGAAGGCA
CAGATCCTGGAAATGAGGTACACCAAGGGGAAGCTCAGCATGTTCGTGCTGCTGCCATCTCACTCTAA
AGATAACCTGAAGGGTATCACCTATGAAAAAATGGTGGCCTGGAGCAGCTCAGAAAACATGTCAGAAG
AATCGGTGGTCCTGTCCTTCCCCCGGTTCACCCTGGAAGACAGCTATGATCTCAATTCCATTTTACAA
GACATGGGCATTACGGATATCTTTGATGAAACGAGGGCTGATCTTACTGGAATCTCTCCAAGTCCCAA
TTTGTACTTGTCAAAAATTATCCACAAAACCTTTGTGGAGGTGGATGAAAACGGTACCCAGGCAGCTG
CAGCCACTGGGGCTGTTGTCTCGGAAAGGTCACTACGATCTTGGGTGGAGTTTAATGCCAACCACCCT
TTTCTCTTTTTCATTAGACACAACAAAACCCAAACCATTCTCTTTTATGGCAGGGTCTGCTCTCCTTA
AAAGGGGAGCAGTGTCTAGTACTTTGGAGCTGGAGGAAAA

| | | | |
|---|---|---|---|
| NOV23e, | | | |
| Protein Sequence | SEQ ID NO: 560 | 365 aa | MW at 41476.8kD |

MDSLVTANTKFCFDLFQEIGKDDRhKNIFFSPLSLSAALGMVRLGARSDSAHQIDEVRSLNNESGLVS
CYFGQLLSKLDRIKTDYTLSIANPLYGESSLGDKSETLSQKKKKKIIYTNAFDTIHTQDILWDLFLGK
IKELFSKDAINAETVLVLVNAVYFKACWETYFDHENTVDAPFCLNQNENKSVKMMTQKGLYRIGFIEE
VKAQILEMRYTKGKLSMFVLLPSHSKDNLKGITYEKMVAWSSSENMSEESVVLSFPRFTLEDSYDLNS
ILQDMGITDIFDETPADLTGISPSPNLYLSKIIHKTFVEVDENGTQAAAATGAVVSERSLRSWVEFNA
NHPFLFFIRHNKTQTILFYGRVCSP

[0484] A ClustalW comparison of the above protein sequences yields the following sequence alignment shown in Table 23B.

TABLE 23B

Comparison of the NOV23 protein sequences.

| | |
|---|---|
| NOV23a | -MDSLVTANTKFCFDLFQEIGKDDRHKNIFFSPLSLSAALGMVRLGARSDSAHQIDEVLH |
| NOV23b | -MDSLVTANTKFCFDLFQEIGKDDRHKNIFFSPLSLSAALGMVRLGARSDSAHQIDEVLH |
| NOV23c | TMDSLVTANTKFCFDLFQEIGKDDRHKNIFFSPLSLSAALGMVRLGARSDSAHQIDEVLH |
| NOV23d | -MDSLVTANTKFCFDLFQEIGKDDRHKNIFFSPLSLSAAIGMVRLGAISDSAHHIDEVR- |
| NOV23e | -MDSLVTANTKFCFDLFQEIGKDDRHKNIFFSPLSLSAALGMVRLGARSDSAHQIDEVR- |
| NOV23a | FDEFSQNESKEPDPCLKSNKQKVLADSSLEGQKKTTEPLDQQAGSLNNESGLVSCYFGQL |
| NOV23b | FNEFSQNESKEP------------------------------AGSLNNESGLVSCYFGQL |
| NOV23c | FNEFSQNESKEPDPCLKSNKQKVLADSSLEGQKKTTEPLDQQAGSLNNESGLVSCYFGQL |
| NOV23d | -VHYSQNESKEPDPCLKSNKQKVLADSSLEGQKKTTEPLDQQAGSLNNGSGLVSCYFGQL |
| NOV23e | --------------------------------------------SLNNESGLVSCYFGQL |
| NOV23a | LSKLDRIKTDYTLSIANRLYGEQEFPICQEYLDGVIQFYHTTIESVDFQKNPEKSRQEIN |
| NOV23b | LSKLDRIKTDYTLSIANRLYGEQEFPICQEYLDGVIQFYHTTIESVDFQKNPEKSRQEIN |
| NOV23c | LSKLDRIKTDYTLSIANRLYGGQEFPICQEYLDGVIQFYHTTIESVDFQKNPEKSRQEIN |
| NOV23d | LSKLDRIKTDYTLSIADRLYGEREFPICQEYLDGVIQFYHTTIESVDFQKNPEKSRQEIN |
| NOV23e | LSKLDRIKTDYTLSIANRLYGESSLGDKSETLS------QKKKKKIIYThAFDTIHTQDI |
| NOV23a | FWVECQSQGKIKELFSKDAINAETVLVLVNAVYFKAKWETYFDHENTVDAPFCLNANENK |
| NOV23b | FWVECQSQGKIKDLFSKDAINAETVLVLVNAVYFKAKWETYFDHENTVDAPFCLNQNENK |
| NOV23c | FWVECQSQGKIKELFSKDAINAETVLVLVNAVYFKAKWETYFDHENTVDAPFCLNANENK |
| NOV23d | FWVECQSQGKIKELFSKDAINAETVLVLVNAVYFKAKWETYFDHENTVDAPFCLNANENK |
| NOV23e | LWDLF--LGKIKELFSKDAINAETVLVLVNAVYFKAKWETYFDHENTVDAPFCLNQNENK |
| NOV23a | SVKMMMQKGLYRIGFIEEVKAQILEMRYTKGKLSMFVLLPSHSKDNLKGLEELERKITYE |
| NOV23b | SVKMMTQKGLYRIGFIEEVKAQILENRYTKGKLSMFVLLPSHSKDNLKGLEELERKITYE |
| NOV23c | SVKNMTQKGLYRIGFIEEVKAQILEMRYTKGKLSMFVLLPSHSKDNLKGLEELERKITYE |
| NOV23d | SVKMMTQKGLYRIGFIEEVKAQILEMRYTKGKLSMFVLLPSHSKDNLKGLEELERKITYE |
| NOV23e | SVKMMTQKGLYRIGFIEEVKAQILEMRYTKGKLSMFVLLPSHSKDNLKG-------ITYE |
| NOV23a | KMVAWSSSENMSEESVVLSFPRFTLEDSYDLNSILQDMGITDIFDETRADLTGISPSPNL |
| NOV23b | KMVAWSSSENMSEESVVLSFPRFTLEDSYDLNSILQDMGITDIFDETRADLTGISPSPNL |
| NOV23c | KMVAWSSSENMSEESVVLSFPRFTLEDSYDLNSILQDMGITDIFDETRADLTGISPSPNL |
| NOV23d | KMVAWSSSENMSEESVVLSFPRFTLEDSYDLNSILQDMGITDIFDETRADLTGISPSPNL |
| NOV23e | KMVAWSSSENMSEESVVLSFPRFTLEDSYDLNSILQDMGITDIFDETRADLTGISPSPNL |
| NOV23a | YLSKIIHKTFVEVDENGTQAAAATGAVVSERSLRSWVEFNANHPFLFFIRHNKTQTILFY |
| NOV23b | YLSKIIHKTFVEVDENGTQAAAATGAVVSERSLRSWVEFNANHPFLFFIRHNKTQTILFY |
| NOV23c | YLSKIIHKTFVEVDENGTQAAAATGAVVSERSLRSWVEFNANHPFLFFIRHNKTQTILFY |
| NOV23d | YLSKIIHKTFVEVDENGTQAAAATGAVVSERSLRSWVEFNANHPFLFFIRHNKTQTILFY |
| NOV23e | YLSKIIHKTFVEVDENGTQAAAATGAVVSERSLRSWVEFNANHPFLFFIPHNKTQTILFY |
| NOV23a | GRVCSP |
| NOV23b | GRVCSP |
| NOV23c | GRVCSP |
| NOV23d | GRVCSP |
| NOV23e | GRVCSP |
| NOV23a | (SEQ ID NO: 552) |
| NOV23b | (SEQ ID NO: 554) |
| NOV23c | (SEQ ID NO: 556) |
| NOV23d | (SEQ ID NO: 558) |
| NOV23e | (SEQ ID NO: 560) |

[0485] Further analysis of the NOV23a protein yielded the following properties shown in Table 23C.

TABLE 23C
Protein Sequence Properties NOV23a

| | |
|---|---|
| SignalP analysis: | No Known Signal Sequence Predicted |
| PSORT II analysis: | |

| PSG: | a new signal peptide prediction method | |
|---|---|---|
| | N-region: | length 10; pos. chg 1; neg. chg 1 |
| | H-region: | length 3; peak value −2.92 |
| | PSG score: | −7.33 |

| | |
|---|---|
| GvH: | von Heijne's method for signal seq. recognition |
| | GvH score (threshold: −2.1): −2.16 |
| | possible cleavage site: between 40 and 41 |

>>> Seems to have no N-terminal signal peptide

| ALOM: | Klein et al's method for TM region allocation | |
|---|---|---|
| | Init position for calculation: 1 | |
| | Tentative number of TMS(s) for the threshold 0.5: 1 | |
| | Number of TMS(s) for threshold 0.5: 0 | |
| | PERIPHERAL | Likelihood = 3.07 (at 197) |

| | ALOM score: 0.42 (number of TMSs: 0) | | | |
|---|---|---|---|---|
| MITDISC: | discrimination of mitochondrial targeting seq | | | |
| | R content: | 0 | Hyd Moment (75): | 7.00 |
| | Hyd Moment (95): | 3.76 | G content: | 0 |
| | D/E content: | 2 | S/T content: | 3 |

| | |
|---|---|
| | Score: −6.29 |
| Gavel: | prediction of cleavage sites for mitochondrial preseq |
| | cleavage site motif not found |

NUCDISC: discrimination of nuclear localization signals

| | |
|---|---|
| | pat4: none |
| | pat7: none |
| | bipartite: none |
| | content of basic residues: 10.8% |
| | NLS Score: −0.47 |
| KDEL: | ER retention motif in the C-terminus: none |

ER Membrane Retention Signals: none
SKL: peroxisomal targeting signal in the C-terminus: none
PTS2: 2nd peroxisomal targeting signal: none
VAC: possible vacuolar targeting motif: none
RNA-binding motif: none
Actinin-type actin-binding motif:

type 1: none
type 2: none

NMYR: N-myristoylation pattern: none
Prenylation motif: none
memYQRL: transport motif from cell surface to Golgi: none
Tyrosines in the tail: none
Dileucine motif in the tail: none
checking 63 PROSITE DNA binding motifs: none
checking 71 PROSITE ribosomal protein motifs: none
checking 33 PROSITE prokaryotic DNA binding motifs: none

| | |
|---|---|
| NNCN: | Reinhardt's method for Cytoplasmic/Nuclear |
| | discrimination |
| | Prediction: cytoplasmic |
| | Reliability: 70.6 |
| COIL: | Lupas's algorithm to detect coiled-coil regions |
| | total: 0 residues |

Final Results (k = 9/23):

47.8%: mitochondrial
30.4%: cytoplasmic
17.4%: nuclear
4.3%: vacuolar

>> prediction for CG54308-04 is mit (k = 23)

[0486] A search of the NOV23a protein against the Geneseq database, a proprietary database that contains sequences published in patents and patent publication, yielded several homologous proteins shown in Table 23D.

TABLE 23D
Geneseq Results for NOV23a

| | | NOV23a | Identities/ | |
|---|---|---|---|---|
| | | Residues/ | Similarities for | |
| Geneseq | Protein/Organism/Length | Match | the Matched | Expect |
| Identifier | [Patent #, Date] | Residues | Region | Value |
| ABG70630 | Amino acid sequence for novel human | 1 . . . 425 | 423/425 (99%) | 0.0 |
| | thypin - Homo sapiens, 425 aa. | 1 . . . 425 | 424/425 (99%) | |
| | [WO200272769-A2, 19-SEP-2002] | | | |
| ABB53280 | Human polypeptide #20 - Homo | 1 . . . 425 | 392/425 (92%) | 0.0 |
| | sapiens, 394 aa. [WO200181363-A1, | 1 . . . 394 | 393/425 (92%) | |
| | 01-NOV-2001] | | | |
| AAM47207 | Human NOV1 protein - Homo sapiens, | 1 . . . 425 | 391/425 (92%) | 0.0 |
| | 395 aa. [WO200174851-A2, 11-OCT-2001] | 1 . . . 395 | 393/425 (92%) | |
| ABG28280 | Novel human diagnostic protein | 1 . . . 394 | 388/394 (98%) | 0.0 |
| | #28271 - Homo sapiens, 617 aa. | 109 . . . 502 | 389/394 (98%) | |
| | [WO200175067-A2, 11-OCT-2001] | | | |
| ABG70294 | Human novel polypeptide #10 - Homo | 1 . . . 425 | 327/425 (76%) | e−172 |
| | sapiens, 365 aa. [WO200257452-A2, | 1 . . . 365 | 332/425 (77%) | |
| | 25-JUL-2002] | | | |

[0487] In a BLAST search of public sequence databases, the NOV23a protein was found to have homology to the proteins shown in the BLASTP data in Table 23E.

TABLE 23E
Public BLASTP Results for NOV23a

| | | NOV23a | Identities/ | |
|---|---|---|---|---|
| Protein | | Residues/ | Similarities for | |
| Accession | | Match | the Matched | Expect |
| Number | Protein/Organism/Length | Residues | Portion | Value |
| Q96P63 | Serpin B12 - Homo sapiens | 1 . . . 425 | 403/425 (94%) | 0.0 |
| | (Human), 405 aa. | 1 . . . 405 | 404/425 (94%) | |
| CAD13083 | Sequence 1 from Patent | 1 . . . 425 | 391/425 (92%) | 0.0 |
| | WO0174851 - Homo sapiens | 1 . . . 395 | 393/425 (92%) | |
| | (Human), 395 aa. | | | |
| Q9D7P9 | 2300003F07Rik protein (Weakly | 1 . . . 425 | 303/425 (71%) | e−174 |
| | similar to serpin B12) - Mus | 1 . . . 423 | 354/425 (83%) | |
| | musculus (Mouse), 423 aa. | | | |
| I38202 | leupin precursor - human, 390 aa. | 1 . . . 425 | 196/426 (46%) | 4e−95 |
| | | 1 . . . 390 | 267/426 (62%) | |
| P48594 | Squamous cell carcinoma antigen 2 | 1 . . . 425 | 196/426 (46%) | 4e−95 |
| | (SCCA-2) (Leupin) - Homo sapiens | 1 . . . 390 | 267/426 (62%) | |
| | (Human), 390 aa. | | | |

[0488] PFam analysis predicts that the NOV23a protein contains the domains shown in the Table 23F.

TABLE 23F
Domain Analysis of NOV23a

| | | Identities/ | |
|---|---|---|---|
| Pfam | NOV23a Match | Similarities for | |
| Domain | Region | the Matched Region | Expect Value |
| serpin | 1 . . . 425 | 161/441 (37%) | 1.9e−147 |
| | | 350/441 (79%) | |

### Example 24

[0489] The NOV24 clone was analyzed, and the nucleotide and encoded polypeptide sequences are shown in Table 24A.

TABLE 24A

NOV24 Sequence Analysis

| | | |
|---|---|---|
| NOV24a, CG54764-02 | SEQ ID NO: 561 | 339 bp |
| DNA Sequence | ORF Start: ATG at 1 | ORF Stop: TGA at 337 |

ATGAGCCCCTTTGGCAGTCTGGCGAAGCTCTTGGGTCCTTCTCAGATTGCATGGTGGTGCATCACGAC
CCTGTGCTGTTTTCCAGAGAGGTATGCTGGACGGGACCATAACAGCTGCAAACTCTCCCAGAGGGGGT
TCCTAAACTTCATGAACACTGTACTGGTTGCCTTCACAAAGAACCAGAAGGGCTCTGGTGCCCTTGAC
TGCATGATGAAGAAACTGGACTTCAACTGTGATGGGCAGCTAGATTTTCAGGACTTTCTCAGTCTTAC
TGATGGTGTAGCTGTGGCTTGCCCTGACTCCTTCATCCCGGCTGGCCATGCCCATGAGAGAATCTGA

| | | | |
|---|---|---|---|
| NOV24a, CG54764-02 | | | |
| Protein Sequence | SEQ ID NO: 562 | 112 aa | MW at 12368.1kD |

MSPFGSLAKLLGPSQIAWWCITTLCCFPERYAGRDHNSCKLSQRGFLNFMNTVLVAFTKNQKGSGALD
CMMKKLDFNCDGQLDFQDFLSLTDGVAVACPDSFIPAGHAHERI

| | | |
|---|---|---|
| NOV24b, CG54764-01 | SEQ ID NO: 563 | 348 bp |
| DNA Sequence | ORF Start: ATG at 5 | ORF Stop: TGA at 341 |

TGCCATGAGCCCCTTTGGCAGTCTGGCGAAGCTCTTGGGTCCTTCTCAGATTGCATGGTGGTGCATCA
CGACCTGTGCTGTTTTCCAGAGAGGGTATGCTGGACGGGACCATAACAGCTGCAAACTCTCCCAGAGG
GGGTTCCTAAACTTCATGAACACTGTACTGGTTGCCTTCACAAAGAACCAGAAGGGCTCTGGTGCCCT
TGACTGCATGATGAAGAAACTGGACTTCAACTGTGATGGGCAGCTAGATTTTCAGGACTTTCTCAGTC
TTACTGATGGTGTAGCTGTGGCTTGCCCTGACTCCTTCATCCCGGCTGGCCATGCCCATGAGAGAATC
TGAGGTGC

| | | | |
|---|---|---|---|
| NOV24b, 0G54764-01 | | | |
| Protein Sequence | SEQ ID NO: 564 | 112 aa | MW at 12281.0kD |

MSPFGSLAKLLGPSQIAWWCITTCAVFQRGYAGRDHNSCKLSQRGFLNFMNTVLVAFTKNQKGSGALD
CMMKKLDFNCDGQLDFQDFLSLTDGVAVACPDSFIPAGHAHERI

[0490] A ClustalW comparison of the above protein sequences yields the following sequence alignment shown in Table 24B.

TABLE 24B

Comparison of the NOV24 protein sequences.

| | |
|---|---|
| NOV24a | MSPFGSLAKLLGPSQIAWWCITTLCCFPERYAGRDHNSCKLSQRGFLNFMNTVLVAFTKN |
| NOV24b | MSPFGSLAKLLGPSQIAWWCITTCAVFQRGYAGRDHNSCKLSQRGFLNFMNTVLVAFTKN |
| NOV24a | QKGSGALDCMMKKLDFNCDGQLDFQDFLSLTDGVAVACPDSFIPAGHAHERI |
| NOV24b | QKGSGALDCMMKKLDFNCDGQLDFQDFLSLTDGVAVACPDSFIPAGHAHERI |
| NOV24a | (SEQ ID NO: 562) |
| NOV24b | (SEQ ID NO: 564) |

[0491] Further analysis of the NOV24a protein yielded the following properties shown in Table 24C.

TABLE 24C
Protein Sequence Properties NOV24a

| | |
|---|---|
| SignalP analysis: | Cleavage site between residues 33 and 34 |
| PSORT II analysis: | |

| PSG: | a new signal peptide prediction method | |
|---|---|---|
| | N-region: | length 9; pos. chg 1; neg. chg 0 |
| | H-region: | length 19; peak value 9.43 |
| | PSG score: | 5.03 |

| | |
|---|---|
| GvH: | von Heijne's method for signal seq. recognition |
| | GvH score (threshold: −2.1): −5.43 |
| | possible cleavage site: between 28 and 29 |

>>> Seems to have no N-terminal signal peptide

| ALOM: | Klein et al's method for TM region allocation | |
|---|---|---|
| | Init position for calculation: 1 | |
| | Tentative number of TMS(s) for the threshold 0.5: 0 | |
| | number of TMS(s) . . . fixed | |
| | PERIPHERAL | Likelihood = 3.18 (at 87) |

| | ALOM score: 3.18 (number of TMSs: 0) | | | |
|---|---|---|---|---|
| MTOP: | Prediction of membrane topology (Hartmann et al.) | | | |
| | Center position for calculation: 6 | | | |
| | Charge difference: 0.0 C(1.0)-N(1.0) | | | |
| | N >= C: N-terminal side will be inside | | | |
| MITDISC: | discrimination of mitochondrial targeting seq | | | |
| | R content: | 0 | Hyd Moment (75): | 0.38 |
| | Hyd Moment (95): | 3.15 | G content: | 2 |
| | D/E content: | 1 | S/T content: | 5 |

| | |
|---|---|
| | Score: −5.58 |
| Gavel: | prediction of cleavage sites for mitochondrial preseq |
| | cleavage site motif not found |

NUCDISC: discrimination of nuclear localization signals

| | |
|---|---|
| | pat4: none |
| | pat7: none |
| | bipartite: none |
| | content of basic residues: 8.9% |
| | NLS Score: −0.47 |
| KDEL: | ER retention motif in the C-terminus: none |

ER Membrane Retention Signals: none
SKL: peroxisomal targeting signal in the C-terminus: none
PTS2: 2nd peroxisomal targeting signal: none
VAC: possible vacuolar targeting motif: none
RNA-binding motif: none
Actinin-type actin-binding motif:

type 1: none
type 2: none

NMYR: N-myristoylation pattern: none
Prenylation motif: none
memYQRL: transport motif from cell surface to Golgi: none
Tyrosines in the tail: none
Dileucine motif in the tail: none
checking 63 PROSITE DNA binding motifs: none
checking 71 PROSITE ribosomal protein motifs: none
checking 33 PROSITE prokaryotic DNA binding motifs: none

| | |
|---|---|
| NNCN: | Reinhardt's method for Cytoplasmic/Nuclear |
| | discrimination |
| | Prediction: cytoplasmic |
| | Reliability: 89 |
| COIL: | Lupas's algorithm to detect coiled-coil regions |
| | total: 0 residues |

Final Results (k = 9/23):

```
43.5%: cytoplasmic
21.7%: mitochondrial
21.7%: nuclear
  4.3%: extracellular, including cell wall
  4.3%: vacuolar
  4.3%: endoplasmic reticulum
```

>> prediction for CG54764-02 is cyt (k = 23)

[0492] A search of the NOV24a protein against the Geneseq database, a proprietary database that contains sequences published in patents and patent publication, yielded several homologous proteins shown in Table 24D.

TABLE 24D
Geneseq Results for NOV24a

| | | NOV24a | Identities/ | | |
|---|---|---|---|---|---|
| | | Residues/ | Similarities for | | |
| Geneseq | Protein/Organism/Length | Match | the Matched | | Expect |
| Identifier | [Patent #, Date] | Residues | Region | | Value |
| AAE16342 | Human calgizzarin-like-like protein, | 1 . . . 112 | 106/112 | (94%) | 4e−59 |
| | POLY6 - Homo sapiens, 112 aa. | 1 . . . 112 | 106/112 | (94%) | |
| | [WO200185767-A2, 15-NOV-2001] | | | | |
| AAG65905 | Amino acid sequence of GSK gene Id | 7 . . . 112 | 100/106 | (94%) | 2e−57 |
| | 35812 - Homo sapiens, 106 aa. | 1 . . . 106 | 104/106 | (97%) | |
| | [WO200172961-A2, 04-OCT-2001] | | | | |
| AAG65904 | Amino acid sequence of GSK gene Id | 20 . . . 108 | 88/89 | (98%) | 2e−47 |
| | 35812 - Homo sapiens, 114 aa. | 26 . . . 113 | 88/89 | (98%) | |
| | [WO200172961-A2, 04-OCT-2001] | | | | |
| AAB58356 | Lung cancer associated polypeptide | 6 . . . 111 | 54/106 | (50%) | 6e−22 |
| | sequence SEQ ID 694 - Homo sapiens, | 29 . . . 133 | 73/106 | (67%) | |
| | 134 aa. [WO200055180-A2, 21-SEP-2000] | | | | |
| ABG96407 | Human ovarian cancer marker M471 - | 7 . . . 111 | 54/105 | (51%) | 7e−22 |
| | Homo sapiens, 105 aa. | 1 . . . 104 | 72/105 | (68%) | |
| | [WO200271928-A2, 19-SEP-2002] | | | | |

[0493] In a BLAST search of public sequence databases, the NOV24a protein was found to have homology to the proteins shown in the BLASTP data in Table 24E.

TABLE 24E
Public BLASTP Results for NOV24a

| | | NOV24a | Identities/ | | |
|---|---|---|---|---|---|
| Protein | | Residues/ | Similarities for | | |
| Accession | | Match | the Matched | | Expect |
| Number | Protein/Organism/Length | Residues | Portion | | Value |
| P50543 | Calgizzarin (Endothelial monocyte- | 20 . . . 103 | 52/84 | (61%) | 9e−24 |
| | activating polypeptide) (EMAP) - Mus | 8 . . . 91 | 65/84 | (76%) | |
| | musculus (Mouse), 98 aa. | | | | |
| P24480 | Calgizzarin (S100C protein) - | 20 . . . 111 | 53/92 | (57%) | 1e−22 |
| | Oryctolagus cuniculus (Rabbit), 102 | 10 . . . 101 | 66/92 | (71%) | |
| | aa. | | | | |
| BAC56502 | Similar to S100 calcium-binding | 7 . . . 110 | 55/104 | (52%) | 2e−22 |
| | protein A11 - Bos taurus (Bovine), 103 | 1 . . . 103 | 73/104 | (69%) | |
| | aa (fragment). | | | | |
| P31950 | Calgizzarin (S100C protein) - Sus | 20 . . . 103 | 50/84 | (59%) | 2e−21 |
| | scrofa (Pig), 99 aa. | 11 . . . 94 | 63/84 | (74%) | |
| P31949 | Calgizzarin (S100C protein) (MLN 70) - | 7 . . . 111 | 54/105 | (51%) | 2e−21 |
| | Homo sapiens (Human), 105 aa. | 1 . . . 104 | 72/105 | (68%) | |

[0494] PFam analysis predicts that the NOV24a protein contains the domains shown in the Table 24F.

TABLE 24F
Domain Analysis of NOV24a

| | | Identities/ | |
|---|---|---|---|
| Pfam | NOV24a | Similarities for | Expect |
| Domain | Match Region | the Matched Region | Value |
| S_100 | 20 . . . 60 | 11/44 (25%) | 0.23 |
| | | 28/44 (64%) | |
| efhand | 66 . . . 94 | 7/29 (24%) | 0.22 |
| | | 22/29 (76%) | |

### Example 25

[0495] The NOV25 clone was analyzed, and the nucleotide and encoded polypeptide sequences are shown in Table 25A.

TABLE 25A

NOV25 Sequence Analysis

| | | |
|---|---|---|
| NOV25a, CG55033-04 | SEQ ID NO: 565 | 1722 bp |
| DNA Sequence | ORF Start: ATG at 1 | ORF Stop: TAG at 1591 |

ATGAAGCTGTGGATTCATCTCTTTTATTCATCTCTCCTTGCCTGTATATCTTTACACTCCCAAACTCC
AGTGCTCTCATCCAGAGGCTCTTGTGATTCTCTTTGCAATTGTGAGGAAAAAGATGGCACAATGCTAA
TAAATTGTGAAGCAAAAGGTATCAAGATGGTATCTGAAATAAGTGTGCCACCATCACGACCTTTCCAA
CTAAGCTTATTAAATAACGGCTTGACGATGCTTCACACAAATGACTTTTCTGGGCTTACCAATGCTAT
TTCAATACACCTTGGATTTAACAATATTGCAGATATTGAGATAGGTGCATTTAATGGCCTTGGCCTCC
TGAAACAACTTCATATCAATCACAATTCTTTAGAAATTCTTAAAGAGGATACTTTCCATGGACTGGAA
CAACAGACTCAAAGTGTTAATTTTAAATGACAATGCTATTGAGAGTCTTCCTCCAAACATCTTCCGAT
TTGTTCCTTTAACCCATCTAGATCTTCGTGGAAATCAATTACAAACATTGCCTTATGTTGGTTTTCTC
GAACACATTGGCCGAATATTGGATCTTCAGTTGGAGGACAACAAATGGGCCTGCAATTGTGACTTATT
GCAGTTAAAAACTTGGTTGGAGAACATGCCTCCACAGTCTATAATTGGTGATGTTGTCTGCAACAGCC
CTCCATTTTTTAAAGGAAGTATACTCAGTAGACTAAAGAAGGAATCTATTTGCCCTACTCCACCAGTG
TATGAAGAACATGAGGATCCTTCAGGATCATTACATCTGGCAGCAACATCTTCAATAAATGATAGTCG
CATGTCAACTAAGACCACGTCCATTCTAAAACTACCCACCAAAGCACCAGGTTTGATACCTTATATTA
CAAAGCCATCCACTCAACTTCCAGGACCTTACTGCCCTATTCCTTGTAACTGCAAAGTCCTATCCCCA
TCAGGACTTCTAATACATTGTCAGGAGCGCAACATTGAAAGCTTATCAGATCTGAGACCTCCTCCGCA
AAATCCTAGAAAGCTCATTCTAGCGGGAAATATTATTCACAGTTTAATGAAGAGTCCATCCTTTGGTC
CAAAGCATCTGGAAGAGGAAGAAGAGAGGAATGAGAAAGAAGGAAGTGATGCAAAACATCTCCAAAGA
AGTCTTTTGGAACAGGAAAATCATTCACCACTCACAGGGTCAAATATGAAATACAAAACCACGAACCA
ATCAACAGAATTTTTATCCTTCCAAGATGCCAGCTCATTGTACAGAAACATTTTAGAAAAAGAAAGGG
AACTTCAGCAACTGGGAATCACAGAATACCTAAGGAAAAACATTGCTCAGCTCCAGCCTGATATGGAG
GGTATTAGTGGAACAGACAAAAAATGAGTATTTTGAACTTAAAGCTAATTTACATGCTGAACCTGACT
ATTTAGAAGTCCTGGAGCAGCAAACATAGATGGAGAGTTTGAGGGCTTTCGCAGAAATGCTGTGATTC
TGTTTTAAGTCCATACCTTGTAAATTAGTGCCTTACGTGAGTGTGTCATCCATCAGAACCTAAGCACA
GCAGTAAACTATGGAGAAAAAA

| | | | |
|---|---|---|---|
| NOV25a, CG55033-04 | | | |
| Protein Sequence | SEQ ID NO: 566 | 530 aa | MW at 59730.7kD |

MKLWIHLFYSSLLACISLHSQTPVLSSRGSCDSLCNCEEKDGTMLINCEAKGIKMVSEISVPPSRPFQ
LSLLNNGLTMLHTNDFSGLTNAISIHLGFNNIADIEIGAFNGLGLLKQLHINHNSLEILKEDTFHGLE
NLEFLQADNNFITVIEPSAFSKLNRLKVLILNDNAIESLPPNIFRFVPLTHLDLRGNQLQTLPYVGFL
EHIGRILDLQLEDNKWACNCDLLQLKTWLENMPPQSIIGDVVCNSPPFFKGSILSRLKKESICPTPPV
YEEHEDPSGSLHLAATSSINDSRMSTKTTSILKLPTKAPGLIPYITKPSTQLPGPYCPIPCNCKVLSP
SGLLIHCQERNIESLSDLRPPPQNPRKLILAGNIIHSLMKSPSFGPKHLEEEEERNEKEGSDAKHLQR
SLLEQENHSPLTGSNMKYKTTNQSTEFLSFQDASSLYRNILEKERELQQLGITEYLRNKIAQLQPDME
AHYPGAHEELKLMETLMYSRPRKVLVEQTKNEYFELKANLHAEPDYLEVLEQQT

| | | |
|---|---|---|
| NOV25b, CG55033-05 | SEQ ID NO: 567 | 2058 bp |
| Sequence | ORF Start: ATG at 1 | ORF Stop: TAG at 1927 |

ATGAAGCTGTGGATTCATCTCTTTTATTCATCTCTCCTTGCCTGTATATCTTTACACTCCCAAACTCC
AGTGCTCTCATCCAGAGGCTCTTGTGATTCTCTTTGCAATTGTGAGGAAAAAGATGGCACAATGCTAA
TAAATTGTGAAGCAAAAGGTATCAAGATGGTATCTGAAATAAGTGTGCCACCATCACGACCTTTCCAA
CTAAGCTTATTAAATAACGGCTTGACGATGCTTCACACAAATGACTTTTCTGGGCTTACCAATGCTAT
TTCAATACACCTTGGATTTAACAATATTGCAGATATTGAGATAGGTGCATTTAATGGCCTTGGCCTCC
TGAAACAACTTCATATCAATCACAATTCTTTAGAAATTCTTAAAGAGGATACTTTCCATGGACTGGAA
AACCTGGAATTCCTGCAAGCAGATAACAATTTTATCACAGTGATTGAACCAAGTGCCTTTAGCAAGCT
CAACAGACTCAAAGTGTTAATTTTAAATGACAATGCTATTGAGAGTCTTCCTCCAAACATCTTCCGAT
TTGTTCCTTTAACCCATCTAGATCTTCGTGGAAATCAATTACAAACATTGCCTTATGTTGGTTTTCTC
GCAGTTAAAACTTGGTTGGAGAACATGCCTCCACAGTCTATAATTGGTGATGTTGTCTGCAAACAGCC
CTCCATTTTTTAAAGGAAGTATACTCAGTAGACTAAAGAAGGAATCTATTTGCCCTACTCCACCAGTG
TATGAAGAACATGAGGATCCTTCAGGATCATTACATCTGGCAGCAACATCTTCAATAAATGATAGTCG
CATGTCAACTAAGACCACGTCCATTCTAAACTACCCACCAAAGCACCACAGATTGACCTTGAGAGATA
ACCCCTGGGACTGCTCCTGTGACCTGGTTGGACTGCAGCAATGGATACAAAAGTTAAGCAAGAACACA
GTGACAGATGACATCCTCTGCACTTCCCCCGGGCATCTCGACAAAAAGGAATTGAAAGCCCTAAATAG
CCACTCCTGCAACAACAACAAATACGGCTGATACTATTTTACGATCTCTTACGGACGCTGTGCCACTG
TCTGTTCTAATATTGGGACTTCTGATTATGTTCATCACTATTGTTTTCTGTGCTGCAGGGATAGTGGT
TCTTGTTCTTCACCGCAGGAGAAGATACAAAAAGAAACAAGTAGATGAGCAAATGAGAGACAACAGTC
CTGTGCATCTTCAGTACAGCATGTATGGCCATALAACCACTCATCACACTACTGAAAGACCCTCTGCC
TCACTCTATGAACAGCACATGGTGAGCCCCATGGTTCATGTCTATAGAAGTCCATCCTTTGGTCCAAA
GCATCTGGAAGAGGAAGAAGAGAGGAATGAGAAAGAAGGAAGTGATGCAAAACATCTCCAAAGAAGTC
TTTTGGAACAGGAAAATCATTCACCACTCACAGGGTCAAATATGAAATACAAAACCACGAACCAATCA
ACAGAATTTTTATCCTTCCAAGATGCCAGCTCATTGTACAGAAACATTTTAGAAAAAGAAAGGGAACT
TCAGCAACTGGGAATCACAGAATACCTAAGGAAAAACATTGCTCAGCTCCAGCCTGATATGGAGGCAC
ATTATCCTGGAGCCCACGAAGAGCTGAAGTTAATGGAAACATTAATGTACTCACGTCCAAGGAAGGTA
TTAGTGGAACAGACAAAAAATGAGTATTTTGAACTTAAAGCTAATTTACATGCTGAACCTGACTATTT
AGAAGTCCTGGAGCAGCAAACATAGATGGAGAGTTTGAGGGCTTTCGCAGAAATGCTGTGATTCTGTT
TTAAGTCCATACCTTGTAAATTAGTGCCTTACGTGAGTGTGTCATCCATCAGAACCTAAGCACAGCAG
TAAACTATGGAGAAAAAA

| | | | |
|---|---|---|---|
| NOV25b, CG55033-05 | | | |
| Protein Sequence | SEQ ID NO: 568 | 642 aa | MW at 72606.2kD |

MKLWIHLFYSSLLACISLHSQTPVLSSRGSCDSLCNCEEKDGTMLINCEAKGIKMVSEISVPPSRPFQ
LSLLNNGLTMLHTNDFSGLTNAISIHLGFNNIADIEIGAFNGLGLLKQLHINHNSLEILKEDTFHGLE
NLEFLQADNNFITVIEPSAFSKLNRLKVLILNDNAIESLPPNIFRFVPLTHLDLRGNQLQTLPYVGFL
EHIGRILDLQLEDNKWACNCDLLQLKTWLENMPPQSIIGDVVCNSPPFFKGSILSRLKKESICPTPPV
YEEHEDPSGSLHLAATSSINDSRMSTKTTSILKLPTKAPQIDLEDNPWDCSCDLVGLQQWIQKLSKNT
VTDDILCTSPGHLDKKELKALNSEILCPGLVNNPSMPTQTSYLMVTTPATTTNTADTILRSLTDAVPL
SVLILGLLIMFITIVFCAAGIVVLVLHRRRRYKKKQVDEQMRDNSPVHLQYSMYGHKTTHHTTERPSA
SLYEQHMVSPMVHVYRSPSFGPKHLEEEEERNEKEGSDAKHLQRSLLEQENHSPLTGSNMKYKTTNQS
TEFLSFQDASSLYRNILEKERELQQLGITEYLRKNIAQLQPDMEAHYPGAHEELKLMETLMYSRPRKV
LVEQTKNEYFELKANLHAEPDYLEVLEQQT

| | | |
|---|---|---|
| NOV25c, CG55033-01 | SEQ ID NO: 569 | 2397 bp |
| DNA Sequence | ORF Start: ATG at 1 | ORF Stop: TAG at 2395 |

ATGCTAATAAATTGTGAAGCAAAAGGTATCAAGATGGTATCTGAAATAAGTGTGCCACCATCACGACC
TTTCCAACTAAGCTTATTAAATAACGGCTTGACGATGCTTCACACAAATGACTTTTCTGGGCTTACCA
ATGCTATTTCAATACACCTTGGATTTAACAATATTGCAGATATTGAGATAGGTGCATTTAATGGCCTT
GGCCTCCTGAAACAACTTCATATCAATCACAATTCTTTAGAAATTCTTAAAGAGGATACTTTCCATGG
ACTGGAAAACCTGGAATTCCTGCAAGCAGATAACAATTTTATCACAGTGATTGAACCAAGTGCCTTTA
GCAAGCTCAACAGACTCAAAGTGTTAATTTTAAATGACAATGCTATTGAGAGTCTTCCTCCAAACATC
TTCCGATTTGTTCCTTTAACCCATCTAGATCTTCGTGGAAATCAATTACAAACATTGCCTTATGTTGG
TTTTCTCGAACACATTGGCCGAATATTGGATCTTCAGTTGGAGGACAACAAATGGGCCTGCAATTGTG
ACTTATTGCAGTTAAAAACTTGGTTGGAGAACATGCCTCCACAGTCTATAATTGGTGATGTTGTCTGC
AACAGCCCTCCATTTTTTAAAGGAAGTATACTCAGTAGACTAAAGAAGGAATCTATTTGCCCTACTCC
ACCAGTGTATGAAGAACATGAGGATCCTTCAGGATCATTACATCTGGCAGCAACATCTTCAATAAATG
ATAGTCGCATGTCAACTAAGACCACGTCCATTCTAAAACTACCCACCAAAGCACCAGGTTTGATACCT
TATATTACAAAGCCATCCACTCAACTTCCAGGACCTTACTGCCCTATTCCTTGTAACTGCAAAGTCCT
ATCCCCATCAGGACTTCTAATACATTGTCAGGAGCGCAACATTGAAAGCTTATCAGATCTGAGACCTC
CTCCGCAAAATCCTAGAAAGCTCATTCTAGCGGGAAATATTATTCACAGTTTAATGAAGTCTGATCTA
GTGGAATATTTCACTTTGGAAATGCTTCACTTGGGAAACAATCGTATTGAAGTTCTTGAAGAAGGATC
GTTTATGAACCTAACGAGATTACAAAAACTCTATCTAAATGGTAACCACCTGACCAAATTAAGTAAAG
GCATGTTCCTTGGTCTCCATAATCTTGAATACTTATATCTTGAATACAATGCCATTAAGGAAATACTG
CCAGGAACCTTTAATCCAATGCCTAAACTTAAAGTCCTGTATTTAAATAACAACCTCCTCCAAGTTTT
ACCACCACATATTTTTTCAGGGGTTCCTCTAACTAAGGTAAATCTTAAAACAAACCAGTTTACCCATC
TACCTGTAAGTAATATTTTGGATGATCTTGATTTGCTAACCCAGATTGACCTTGAGGATAACCCCTGG
GACTGCTCCTGTGACCTGGTTGGACTGCAGCAATGGATACAAAAGTTAAGCAAGAACACAGTGACAGA
TGACATCCTCTGCACTTCCCCCGGGCATCTCGACAAAAAGGAATTGAAAGCCCTAAATAGTGAAATTC
TCTGTCCAGGTTTAGTAAATAACCCATCCATGCCAACACAGACTAGTTACCTTATGGTCACCACTCCT
GCAACAACAACAAATACGGCTGATACTATTTTACGATCTCTTACGGACGCTGTGCCACTGTCTGTTCT
AATATTGGGACTTCTGATTATGTTCATCACTATTGTTTTCTGTGCTGCAGGGATAGTGGTTCTTGTTC
TTCACCGCAGGAGAAGATACAAAAAGAAACAAGTAGATGAGCAAATGAGAGACAACAGTCCTGTGCAT
CTTCAGTACAGCATGTATGGCCATAAAACCACTCATCACACTACTGAAAGACCCTCTGCCTCACTCTA
TGAACAGCACATGGTGAGCCCCATGGTTCATGTCTATAGAAGTCCATCCTTTGGTCCAAAGCATCTGG
AAGAGGAAGAAGAGAGGAATGAGAAAGAAGGAAGTGATGCAAAACATCTCCAAAGAAGTCTTTTGGAA
CAGGAAAATCATTCACCACTCACAGGGTCAAATATGAAATACAAAACCACGAACCAATCAACAGAATT
TTTATCCTTCCAAGATGCCAGCTCATTGTACAGAAACATTTTAGAAAAAGAAAGGGAACTTCAGCAAC
TGGGAATCACAGAATACCTAAGGAAAAACATTGCTCAGCTCCAGCCTGATATGGAGGCACATTATCCT
GGAGCCCACGAAGAGCTGAAGTTAATGGAAACATTAATGTACTCACGTCCAAGGAAGGTATTAGTGGA
ACAGACAAAAAATGAGTATTTTGAACTTAAAGCTAATTTACATGCTGAACCTGACTATTTAGAAGTCC
TGGAGCAGCAAACATAG

| | | |
|---|---|---|
| NOV25c, CG55033-01 | | |
| Protein Sequence | SEQ ID NO: 570 798 aa | MW at 90352.1kD |

MLINCEAKGIKMVSEISVPPSRPFQLSLLNNGLTMLHTNDFSGLTNAISIHLGFNNIADIEIGAFNGL
GLLKQLHINHNSLEILKEDTFHGLENLEFLQADNNFITVIEPSAFSKLNRLKVLILNDNAIESLPPNI
FRFVPLTHLDLRGNQLQTLPYVGFLEHIGRILDLQLEDNKWACNCDLLQLKTWLENMPPQSIIGDVVC
NSPPFFKGSILSRLKKESICPTPPVYEEHEDPSGSLHLAATSSINDSRNSTKTTSILKLPTKAPGLIP
YITKPSTQLPGPYCPIPCNCKVLSPSGLLIHCQERNIESLSDLRPPPQNPRKLILAGNIIHSLMKSDL
VEYFTLEMLHLGNNRIEVLEEGSFMNLTRLQKLYLNGNHLTKLSKGMFLGLHNLEYLYLEYNAIKEIL
PGTFNPMPKLKVLYLNNNLLQVLPPHIFSGVPLTKVNLKTNQFTHLPVSNILDDLDLLTQIDLEDNPW
DCSCDLVGLQQWIQKLSKNTVTDDILCTSPGHLDKKELKALNSEILCPGLVNNPSMPTQTSYLMVTTP
ATTTNTADTILRSLTDAVPLSVLILGLLIMFITIVFCAAGIVVLVLHRRRRYKKKQVDEQMRDNSPVH
LQYSMYGHKTTHHTTERPSASLYEQHMVSPMVHVYRSPSFGPKHLEEEEERNEKEGSDAKHLQRSLLE
QENHSPLTGSNMKYKTTNQSTEFLSFQDASSLYRNILEKERELQQLGITEYLRKNIAQLQPDMEAHYP
GAHEELKLMETLMYSRPRKVLVEQTKNEYFELKANLEAEPDYLEVLEQQT

| | | |
|---|---|---|
| NOV25d, 237376826 | SEQ ID NO: 571 | 990 bp |
| DNA Sequence | ORF Start: at 1 | ORF Stop: end of sequence |

CGCGGTACCCCCTGGGACTGCTCCTGTGACCTGGTTGGACTGCAGCAATGGATACAAAAGTTAAGCAA
GAACACAGTGACAGATGACATCCTCTGCACTTCCCCCGGGCATCTCGACAAAAAGGAATTGAAAGCCC
TAAATAGTGAAATTCTCTGTCCAGGTTTAGTAAATAACCCATCCATGCCAACACAGACTAGTTACCTT
ATGGTCACCACTCCTGCAACAACAACAAATACGGCTGATACTATTTTACGATCTCTTACGGACGCTGT
GCCACTGTCTGTTCTAATATTGGGACTTCTGATTATGTTCATCACTATTGTTTTCTGTGCTGCAGGGA
TAGTGGTTCTTGTTCTTCACCGCAGGAGAAGATACAAAAAGAAACAAGTAGATGAGCAAATGAGAGAC
AACAGTCCTGTGCATCTTCAGTACAGCATGTATGGCCATAAAACCACTCATCACACTACTGAAAGACC
CTCTGCCTCACTCTATGAACAGCACATGGTGAGCCCCATGGTTCATGTCTATAGAAGTCCATCCTTTG
AGAAGTCTTTTGGAACAGGAAAATCATTCACCACTCACAGGGTCAAATATGAAATACAAAACCACGAA
CCAATCAACAGAATTTTTATCCTTCCAAGATGCCAGCTCATTGTACAGAAACATTTTAGAAAAAGAAA
GGGAACTTCAGCAACTGGGAATCACAGAATACCTAAGGAAAAACATTGCTCAGCTCCAGCCTGATATG
GAGGCACATTATCCTGGAGCCCACGAAGAGCTGAAGTTAATGGAAACATTAATGTACTCACGTCCAAG
GAAGGTATTAGTGGAACAGACAAAAAATGAGTATTTTGAACTTAAAGCTAATTTACATGCTGAACCTG
ACTATTTAGAAGTCCTGGAGCAGCAAACACTCGAGGCG

| | | | |
|---|---|---|---|
| NOV25d, 237376826 | | | |
| Protein Sequence | SEQ ID NO: 572 | 330 aa | MW at 37853.8kD |

RGTPWDCSCDLVGLQQWIQKLSKNTVTDDILCTSPGHLDKKELKALNSEILCPGLVNNPSMPTQTSYL
MVTTPATTTNTADTILRSLTDAVPLSVLILGLLIMFITIVFCAAGIVVLVLHRRRRYKKKQVDEQMRD
NSPVHLQYSMYGHKTTHHTTERPSASLYEQHMVSPMVHVYRSPSFGPKHLEEEEERNEKEGSDAKHLQ
EAHYPGAHEELKLMETLMYSRPRKVLVEQTKNEYFELKANLHAEPDYLEVLEQQTLEA

| | | |
|---|---|---|
| NOV25e, 310658403 | SEQ ID NO: 573 | 1648 bp |
| DNA Sequence | ORF Start: at 2 | ORF Stop: end of sequence |

CACCTCGCGAACCATGCTAATAAATTGTGAAGCAAAAGGTATCAAGATGGTATCTGAAATAAGTGTGC
CACCATCACGACCTTTCCAACTAAGCTTATTAAATAACGGCTTGACGATGCTTCACACAAATGACTTT
TCTGGGCTTACCAATGCTATTTCAATACACCTTGGATTTAACAATATTGCAGATATTGAGATAGGTGC
ATTTAATGGCCTTGGCCTCCTGAAACAACTTCATATCAATCACAATTCTTTAGAAATTCTTAAAGAGG
ATACTTTCCATGGACTGGAAAACCTGGAATTCCTGCAAGCAGATAACAATTTTATCACAGTGATTGAA
CCAAGTGCCTTTAGCAAGCTCAACAGACTCAAAGTGTTAATTTTAAATGACAATGCTATTGAGAGTCT
TCCTCCAAACATCTTCCGATTTGTTCCTTTAACCCATCTAGATCTTCGTGGAAATCAATTACAAACAT
TGCCTTATGTTGGTTTTCTCGAACACATTGGCCGAATATTGGATCTTCAGTTGGAGGACAACAAATGG
GCCTGCAATTGTGACTTATTGCAGTTAAAAACTTGGTTGGAGAACATGCCTCCACAGTCTATAATTGG
TGATGTTGTCTGCAACAGCCCTCCATTTTTTAAAGGAAGTATACTCAGTAGACTAAAGAAGGAATCTA
TTTGCCCTACTCCACCAGTGTATGAAGAACATGAGGATCCTTCAGGATCATTACATCTGGCAGCAACA
TCTTCAATAAATGATAGTCGCATGTCAACTAAGACCACGTCCATTCTAAAACTACCCACCAAAGCACC
AGGTTTGATACCTTATATTACAAAGCCATCCACTCAACTTCCAGGACCTTACTGCCCTATTCCTTGTA
ACTGCAAAGTCCTATCCCCATCAGGACTTCTAATACATTGTCAGGAGCGCAACATTGAAAGCTTATCA
GATCTGAGACCTCCTCCGCAAAATCCTAGAAAGCTCATTCTAGCGGAAAATATTATTCACAGTTTAAT
GAAGTCTGATCTAGTGGAATATTTCACTTTGGAAATGCTTCACTTGGGAAACAATCGTATTGAAGTTC
TTGAAGAAGGATCGTTTATGAACCTAACGAGATTACAAAAACTCTATCTAAATGGTAACCACCTGACC
AAATTAAGTAAAGGCATGTTCCTTGGTCTCCATAATCTTGAATACTTATATCTTGAATACAATGCCAT
TAAGGAAATACTGCCAGGAACCTTTAATCCAATGCCTAAACTTAAAGTCCTGTATTTAAATAACAACC
TCCTCCAAGTTTTACCACCACATATTTTTTCAGGGGTTCCTCTAACTAAGGTAAATCTTAAAACAAAC
CAGTTTACCCATCTACCTGTAAGTAATATTTTGGATGATCTTGATTTACTAACCCAGATTGACCTTGA
GGATAACCCCTGGGACTGCTCCTGTGACCTGGTTGGACTGCAGCAATGGATACAAAAGTTAAGCAAGA
ACACAGTGACAGATGACATCCTCTGCACTTCCCCCGGGCATCTCGACAAAAAGGAATTGAAAGCCCTA
AATAGTGAAATTCTCTGTCCAGGTTTAGTAAATAACCCATCCATGCCAACACAGACTAGTTACCTTAT
GGTCACCGTCGACGGC

| | | | |
|---|---|---|---|
| NOV25e, 310658403 | | | |
| Protein Sequence | SEQ ID NO: 574 | 549 aa | MW at 61376.4kD |

TSRTMLINCEAKGIKMVSEISVPPSRPFQLSLLNNGLTMLHTNDFSGLTNAISIHLGFNNIADIEIGA
FNGLGLLKQLHINHNSLEILKEDTFHGLENLEFLQADNNFITVIEPSAFSKLNRLKVLILNDNAIESL
PPNIFRFVPLTHLDLRGNQLQTLPYVGFLEHIGRILDLQLEDNKWACNCDLLQLKTWLENMPPQSIIG
DVVCNSPPFFKGSILSRLKKESICPTPPVYEEHEDPSGSLHLAATSSINDSRMSTKTTSILKLPTKAP
GLIPYITKPSTQLPGPYCPIPCNCKVLSPSGLLIHCQERNIESLSDLRPPPQNPRKLILAGNIIHSLM
KSDLVEYFTLEMLHLGNNRIEVLEEGSFMNLTRLQKLYLNGNHLTKLSKGMFLGLHNLEYLYLEYNAI
KEILPGTFNPMPKLKVLYLNNNLLQVLPPHIFSGVPLTKVNLKTNQFTHLPVSNILDDLDLLTQIDLE
DNPWDCSCDLVGLQQWIQKLSKNTVTDDILCTSPGHLDKKELKALNSEILCPGLVNNPSMPTQTSYLM
VTVDG

| | | |
|---|---|---|
| NOV25f, 317980876 | SEQ ID NO: 575 | 1887 bp |
| DNA Sequence | ORF Start: at 1 | ORF Stop: end of sequence |

ACAGTCTATAATTGGTGATGTTGTCTGCAACAGCCCTCCATTTTTTAAAGGAAGTATACTCAGTAGAC
TAAAGAAGGAATCTATTTGCCCTACTCCACCAGTGTATGAAGAACATGAGGATCCTTCAGGATCATTA
TAAAGAAGGAATCTATTTGCCCTACTCCACCAGTGTATGAAGAACATGAGGATCCTTCAGGATCATTA
ACCCACCAAAGCACCAGGTTTGATACCTTATATTACAAAGCCATCCACTCAACTTCCAGGACCTTACT
GCCCTATTCCTTGTAACTGCAAAGTCCTATCCCCATCAGGACTTCTAATACATTGTCAGGAGCGCAAC
ATTGAAAGCTTATCAGATCTGAGACCTCCTCCGCAAAATCCTAGAAAGCTCATTCTAGCGGGAAATAT
TATTCACAGTTTAATGAAGTCTGATCTAGTGGAATATTTCACTTTGGAAATGCTTCACTTGGGAAACA
GGTAACCACCTGACCAAATTAAGTAAAGGCATGTTCCTTGGTCTCCATAATCTTGAATACTTATATCT
ATTTAAATAACAACCTCCTCCAAGTTTTACCACCACATATTTTTTCAGGGGTTCCTCTAACTAAGGTA
CCAGATTGACCTTGAGGATAACCCCTGGGACTGCTCCTGTGACCTGGTTGGACTGCAGCAATGGATAC
AAAAGTTAAGCAAGAACACAGTGACAGATGACATCCTCTGCACTTCCCCCGGGCATCTCGACAAAAAG
GAATTGAAAGCCCTAAATAGTGAAATTCTCTGTCCAGGTTTAGTAAATAACCCATCCATGCCAACACA
GACTAGTTACCTTATGGTCACCACTCCTGCAACAACAACAAATACGGCTGATACTATTTTACGATCTC
TTACGGACGCTGTGCCACTGTCTGTTCTAATATTGGGACTTCTGATTATGTTCATCACTATTGTTTTC
TGTGCTGCAGGGATAGTGGTTCTTGTTCTTCACCGCAGGAGAAGATACAAAAAGAAACAAGTAGATGA
GCAAATGAGAGACAACAGTCCTGTGCATCTTCAGTACAGCATGTATGGCCATAAAACCACTCATCACA
AAAACATCTCCAAAGAAGTCTTTTGGAACAGGAAAATCATTCACCACTCACAGGGTCAAATATGAAAT
ACAAAACCACGAACCAATCAACAGAATTTTTATCCTTCCAAGATGCCAGCTCATTGTACAGAAACATT
TTAGAAAAAGAAAGGGAACTTCAGCAACTGGGAATCACAGAATACCTAAGGAAAAACATTGCTCAGCT
CCAGCCTGATATGGAGGCACATTATCCTGGAGCCCACGAAGAGCTGAAGTTAATGGAAACATTAATGT
ACTCACGTCCAAGGAAGGTATTAGTGGAACAGACAAAAAATGAGTATTTTGAACTTAAAGCTAATTTA
CATGCTGAACCTGACTATTTAGAAGTCCTGGAGCAGCAAACACTCGAGGCG

| | | | |
|---|---|---|---|
| NOV25f, 317980876 | | | |
| Protein Sequence | SEQ ID NO: 576 | 629 aa | MW at 71406.5kD |

RGTKWACNCDLLQLKTWLENMPPQSIIGDVVCNSPPFFKGSILSRLKKESICPTPPVYEEHEDPSGSL
HLAATSSINDSRMSTKTTSILKLPTKAPGLIPYITKPSTQLPGPYCPIPCNCKVLSPSGLLIHCQERN
IESLSDLRPPPQNPRKLILAGNIIHSLMKSDLVEYFTLEMLHLGNNRIEVLEEGSFMNLTRLQKLYLN
GNHLTKLSKGMFLGLHNLEYLYLEYNAIKEILPGTFNPMPKLKVLYLNNNLLQVLPPHIFSGVPLTKV
NLKTNQFTHLPVSNILDDLDLLTQIDLEDNPWDCSCDLVGLQQWIQKLSKNTVTDDILCTSPGHLDKK
ELKALNSEILCPGLVNNPSMPTQTSYLMVTTPATTTNTADTILRSLTDAVPLSVLILGLLIMFITIVF
CAAGIVVLVLHRRRRYKKKQVDEQMRDNSPVHLQYSMYGHKTTHHTTERPSASLYEQHMVSPMVHVYR
SPSFGPKHLEEEEERNEKEGSDAKILQRSLLEQENHSPLTGSNNKYKTTNQSTEFLSFQDASSLYRNI
LEKERELQQLGITEYLRKNIAQLQPDMEAHYPGAHEELKLMETLMYSRPRKVLVEQTKNEYFELKANL
HAEPDYLEVLEQQTLEA

| | | |
|---|---|---|
| NOV25g, 318018151 | SEQ ID NO: 577 | 1887 bp |
| DNA Sequence | ORF Start: at 1 | ORF Stop: end of sequence |

CGCGGTACCAAATGGGCCTGCAATTGTGACTTATTGCAGTTAAAAACTTGGTTGGAGAACATGCCCCC
ACAGTCTATAATTGGTGATGTTGTCTGCAACAGCCCTCCATTTTTTAAAGGAAGTATACTCAGTAGAC
TAAAGAAGGAATCTATTTGCCCTACTCCACCAGTGTATGAAGAACATGAGGATCCTTCAGGATCATTA
CATCTGGCAGCAACATCTTCAATAAATGATAGTCGCATGTCAACTAAGACCACGTCCATTCTAAAACT
ACCCACCAAAGCACCAGGTTTGATACCTTATATTACAAAGCCATCCACTCAACTTCCAGGACCTTACT
GCCCTATTCCTTGTAACTGCAAAGTCCTATCCCCATCAGGACTTCTAATACATTGTCAGGAGCGCAAC
ATTGAAAGCTTATCAGATCTGAGAGCCTCCTCCGCAAAATCCTAGAAGCTCATTCTAGCGGGAAATAT
TATTCACAGTTTAATGAAGTCTGATCTAGTGGAATATTTCACTTTGGAAATGCTTCACTTGGGAAACA
ATCGTATTGAAGTTCTTGAAGAAGGATCGTTTATGAACCTAACGAGATTACAAAAACTCTATCTAAAT
GGTAACCACCTGACCAAATTAAGTAAAGGCATGTTCCTTGGTCTCCATAATCTTGAATACTTATATCT
TGAATACAATGCCATTAAGGAAATACTGCCAGGAACCTTTAATCCAATGCCTAAACTTAAAGTCCTGT
ATTTAAATAACAACCTCCTCCAAGTTTTACCACCACATATTTTTTCAGGGGTTCCTCTAACTAAGGTA
AATCTTAAAACAAACCAGTTTACCCATCTACCTGTAAGTAATATTTTGGATGATCTTGATTTACTAAC
CCAGATTGACCTTGAGGATAACCCCTGGGACTGCTCCTGTGACCTGGTTGGACTGCAGCAATGGATAC
AAAAGTTAAGCAAGAACACAGTGACAGATGACATCCTCTGCACTTCCCCCGGGCATCTCGACAAAAAG
GAATTGAAAGCCCTAAATAGTGAAATTCTCTGTCCAGGTTTAGTAAATAACCCATCCATGCCAACACA
GACTAGTTACCTTATGGTCACCACTCCTGCAACAACAACAAATACGGCTGATACTATTTTACGATCTC
TGTGCTGCAGGGATAGTGGTTCTTGTTCTTCACCGCAGGAGAAGATACAAAAAGAAACAAGTAGATGA
GCAAATGAGAGACAACAGTCCTGTGCATCTTCAGTACAGCATGTATGGCCATAAAACCACTCATCACA
CTACTGAAAGACCCTCTGCCTCACTCTATGAACAGCACATGGTGAGCCCCATGGTTCATGTCTATAGA
AGTCCATCCTTTGGTCCAAAGCATCTGGAAGAGGAAGAAGAGAGGAATGAGAAAGAAGGAAGTGATGC
AAAACATCTCCAAAGAAGTCTTTTGGAACAGGAAAATCATTCACCACTTACAGGGTCAAATATGAAAT
ACAAAACCACGAACCAATCAACAGAATTTTTATCCTTCCAAGATGCCAGCTCATTGTACAGAAACATT
TTAGAAAAAGAAAGGGAACTTCAGCAACTGGGAATCACAGAATACCTAAGGAAAAACATTGCTCAGCT
CCAGCCTGATATGGAGGCACATTATCCTGGAGCCCACGAAGAGCTGAAGTTAATGGAAACATTAATGT
ACTCACGTCCAAGGAAGGTATTAGTGGAACAGACAAAAAATGAGTATTTTGAACTTAAAGCTAATTTA
CATGCTGAACCTGACTATTTAGAAGTCCTGGAGCAGCAAACACTCGAGGCG

| | | | |
|---|---|---|---|
| NOV25g, 318018151 | | | |
| Protein Sequence | SEQ ID NO: 578 | 629 aa | MW at 71406.5kD |

RGTKWACNCDLLQLKTWLENMPPQSIIGDVVCNSPPFFKGSILSRLKKESICPTPPVYEEHEDPSGSL
HLAATSSINDSRMSTKTTSILKLPTKAPGLIPYITKPSTQLPGPYCPIPCNCKVLSPSGLLIHCQERN
IESLSDLRPPPQNPRKLILAGNIIHSLMKSDLVEYFTLEMLHLGNNRIEVLEEGSFMNLTRLQKLYLN
GNHLTKLSKGMFLGLHNLEYLYLEYNAIKEILPGTFNPMPKLKVLYLNNNLLQVLPPHIFSGVPLTKV
NLKTNQFTHLPVSNILDDLDLLTQIDLEDNPWDCSCDLVGLQQWIQKLSKNTVTDDILCTSPGHLDKK
ELKALNSEILCPGLVNNPSMPTQPSYLMVTTPATTTNTADTILRSLTDAVPLSVLILGLLIMFITVIF
CAAGIVVLVLHRRRRYKKKQVDEQMRDNSPVHLQYSMYGHKTTHHTTERPSASLYEQHMVSPMVHVYR
SPSFGPKHLEEEEERNEKEGSDAKHLQRSLLEQENHSPLTGSNMKYKTTNQSTEFLSFQDASSLYRNI
LEKERELQQLGITEYLRKNIAQLQPDMEAHYPGAHEELKLMETLMYSRPRKVLVEQTKNEYFELKANL
HAEPDYLEXTLEQQTLEA

| | | |
|---|---|---|
| NOV25h, 318176316 | SEQ ID NO: 579 | 2433 bp |
| DNA Sequence | ORF Start: at 1 | ORF Stop: end of sequence |

CGCGGTACCACCATGCTAATAAATTGTGAAGCAAAAGGTATCAAGATGGTATCTGAAATAAGTGTGCC
ACCATCACGACCTTTCCAACTAAGCTTATTAAATAACGGCTTGACGATGCTTCACACAAATGACTTTT
CTGGGCTTACCAATGCTATTTCAATACACCTTGGATTTAACAATATTGCAGATATTGAGATAGGTGCA
TTTAATGGCCTTGGCCTCCTGAAACAACTTCATATCAATCACAATTCTTTAGAAATTCTTAAAGAGGA
CAAGTGCCTTTAGCAAGCTCAACAGACTCAAAGTGTTAATTTTAAATGACAATGCTATTGAGAGTCTT
CCTCCAAACATCTTCCGATTTGTTCCTTTAACCCATCTAGATCTTCGTGGAAATCAATTACAAACATT
GCCTTATGTTGGTTTTCTCGAACACATTGGCCGAATATTGGATCTTCAGTTGGAGGACAACAAATGGG
CCTGCAATTGTGACTTATTGCAGTTAAAAACTTGGTTGGAGAACATGCCTCCACAGTCTATAATTGGT
CTTCAATAAATGATAGTCGCATGTCAACTAAGACCACGTCCATTCTAAAACTACCCACCAAAGCACCA
CCTGCAAAGTCCTATCCCCATCAGGACTTCTAATACATTGTCAGGAGCGCAACATTGAAGCTTATCAG
GATGTTGTCTGCAACAGCCCTCCATTTTTTAAAGGAAGTATACTCAGTAGACTAAAGAAGGAATCTAT
TTGCCCTACTCCACCAGTGTATGAAGAACATGAGGATCCTTCAGGATCATTACATCTGGCAGCAACAT
CTTCAATAAATGATAGTCGCATGTCAACTAAGACCACGTCCATTCTAAAACTACCCACCAAAGCACCA
GGTTTGATACCTTATATTACAAAGCCATCCACTCAACTTCCAGGACCTTACTGCCCTATTCCTTGTAA
CTGCAAAGTCCTATCCCCATCAGGACTTCTAATACATTGTCAGGAGCGCAACATTGAAAGCTTATCAG
ATCTGAGACCTCCTCCGCAAAATCCTAGAAAGCTCATTCTAGCGGGAAATATTATTCACAGTTTAATG
AAGTTTACCCATCTACCTGTAAGTAATATTTTGGATGATCTTGATTTACTACCCAGATTGACCTTGAG
TGAAGAAGGATCGTTTACGAACCTAACGAGATTACAAAAACTCTATCTAAATGGTAACCACCTGACCA
AATTAAGTAAAGGCATGTTCCTTGGTCTCCATAATCTTGAATACTTATATCTTGAATACAATGCCATT
AAGGAAATACTGCCAGGAACCTTTAATCCAATGCCTAAACTTAAAGTCCTGTATTTAAATAACAACCT
GTCACCACTCCTGCAACAACAACAAATACGGCTGATACTATTTTACGATCTCTTACGGACGCTGTGCC
ACTGTCTGTTCTAATATTGGGACTTCTGATTATGTTCATCACTATTGTTTTCTGTGCTGCAGGGATAG
TGGTTCTTGTTCTTCACCGCAGGAGAAGATACAAGAAGAAACAAGTAGATGAGCAAATGAGAGACAAC
AGTCCTGTGCATCTTCAGTACAGCATGTATGGCCATAAAACCACTCATCACACTACTGAAAGACCCTC
TGCCTCACTCTATGAACAGCACATGGTGAGCCCCATGGTTCATGTCTATAGAAGTCCATCCTTTGGTC
CAAAGCATCTGGAAGAGGAAGAAGAGAGGAATGAGAAAGAAGGAAGTGATGCAAAACATCTCCAAAGA
AGTCTTTTGGAACAGGAAAATCATTCACCACTCACAGGGTCAAATATGAAATACAAAACCACAGAACC
ATCAACAGAATTTTTATCCTTCCAAGATGCCAGCTCATTGTACAGAAACATTTTAGAAAAAGAAAGGG
AACTTCAGCAACTGGGAATCACAGAATACCTAAGGAAAAACATTGCTCAGCTCCAGCCTGATATGGAG
GCACATTATCCTGGAGCCCACGAAGAGCTGAAGTTAATGGAAACATTAATGTACTCACGTCCAAGGAA
GGTATTAGTGGAGCAGACAAAAAATGAGTATTTTGAACTTAAAGCTAATTTACATGCTGAACCTGACT
ATTTAGAAGTCCTGGAGCAGCAAACACTCGAGGCGAAGGGCGAATTCCAGCAC

| | | | |
|---|---|---|---|
| NOV25h, 318176316 | | | |
| Protein Sequence | SEQ ID NO: 580 | 811 aa | MW at 91777.6kD |

RGTTMLINCEAKGIKMVSIESVPPSRPFQLSLLNNGLTMLHTNDFSGLTNAISIHLGFNNIADIEIGA
FNGLGLLKQLHINHNSLEILKEDTFHGLENLEFLQADNNFITVIEPSAFSKLNRLKVLILNDNAIESL
PPNIFRFVPLTHLDLRGNQLQTLPYVGFLEHIGRILDLQLEDNKWACNCDLLQLKTWLENMPPQSIIG
DVVCNSPPFFKGSILSRLKKESICPTPPVYEEHEDPSGSLHLAATSSINDSRMSTKTTSILKLPTKAP
GLIPYITKPSTQLPGPYCPIPCNCKVLSPSGLLIHCQERNIESLSDLRPPPQNPRKLILAGNIIHSLM
KSDLVEYFTLEMLHLGNNRIEVLEEGSFTNLTRLQKLYLNGNHLTKLSKGMFLGLHNLEYLYLEYNAI
KEILPGTFNPMPKLKVLYLNNNLLQVLPPHIFSGVPLTKVNLKTNQFTHLPVSNILDDLDLLTQIDLE
DNPWDCSCDLVGLQQWIQKLSKNTVTDDILCTSPGHLDKKELKALNSEILCPGLVNNPSMPTQTSYTM
VTTPATTTNTADTILRSLTDAVPLSVTILGLLIMFITIVFCAAGIVVLVLHRRRRYKKKQVDEQMRDN
SPVHLQYSMYGHKTTHHTTERPSASLYEQHMVSPMVHVYRSPSFGPKHLEEEEERNEKEGSDAKHLQR
SLLEQENHSPLTGSNMKYKTTNQSTEFLSFQDASSLYRNILEKERELQQLGITEYLRKNIAQLQPDME
AHYPGAHEELKLMETLMYSRPRKVLVEQTKNEYFELKANLHAEPDYLEVLEQQTLEAKGEFQH

| | | |
|---|---|---|
| NOV25i, CG55033-02 | SEQ ID NO: 581 | 1668 bp |
| DNA Sequence | ORF Start: ATG at 1 | ORE Stop: at 1627 |

ATGCTAATAAATTGTGAAGCAAAAGGTATCAAGATGGTATCTGAAATAAGTGTGCCACCATCACGACC
TTTCCAACTAAGCTTATTAAATAACGGCTTGACGATGCTTCACACAAATGACTTTTCTGGGCTTACCA
ATGCTATTTCAATACACCTTGGATTTAACAATATTGCAGATATTGAGATAGGTGCATTTAATGGCCTT
GGCCTCCTGAAACAACTTCATATCAATCACAATTCTTTAGAAATTCTTAAAGAGGATACTTTCCATGG
ACTGGAAAACCTGGAATTCCTGCAAGCAGATAACAATTTTATCACAGTGATTGAACCAAGTGCCTTTA
GCAAGCTCAACAGACTCAAAGTGTTAATTTTAAATGACAATGCTATTGAGAGTCTTCCTCCAAACATC
TTCCGATTTGTTCCTTTAACCCATCTAGATCTTCGTGGAAATCAATTACAAACATTGCCTTATGTTGG
TTTTCTCGAACACATTGGCCGAATATTGGATCTTCAGTTGGAGGACAACAAATGGGCCTGCAATTGTG
ACTTATTGCAGTTAAAAACTTGGTTGGAGAACATGCCTCCACAGTCTATAATTGGTGATGTTGTCTGC
AACAGCCCTCCATTTTTTAAAGGAATATACTCAGTAGACTAAAGAAGGAATCTATTTGCCCATACTCC
ACCAGTGTATGAAGAACATGAGGATCCTTCAGGATCATTACATCTGGCAGCAACATCTTCAATAAATG
ATAGTCGCATGTCAACTAAGACCACGTCCATTCTAAAACTACCCACCAAAGCACCAGGTTTGATACCT
TATATTACAAAGCCATCCACTCAACTTCCAGGACCTTACTGCCCTATTCCTTGTAACTGCAAAGTCCT
ATCCCCATCAGGACTTCTAATACATTGTCAGGAGCGCAACATTGAAAGCTTATCAGATCTGAGACCTC
CTCCGCAAAATCCTAGAAAGCTCATTCTAGCGGGAAATATTATTCACAGTTTAATGAAGTCTGATCTA
GTGGAATATTTCACTTTGGAAATGCTTCACTTGGGAAACAATCGTATTGAAGTTCTTGAAGAAGGATC
GTTTATGAACCTAACGAGATTACAAAAACTCTATCTAAATGGTAACCACCTGACCAAATTAAGTAAAG
GCATGTTCCTTGGTCTCCATAATCTTGAATACTTATATCTTGAATACAATGCCATTAAGGAAATACTG
CCAGGAACCTTTAATCCAATGCCTAAACTTAAAGTCCTGTATTTAAATAACAACCTCCTCCAAGTTTT
ACCACCACATATTTTTTCAGGGGTTCCTCTAACTAAGGTAAATCTTAAAACAAACCAGTTTACCCATC
TACCTGTAAGTAATATTTTGGATGATCTTGATTTGCTAACCCAGATTGACCTTGAGGATAACCCCTGG
GACTGCTCCTGTGACCTGGTTGGACTGCAGCAATGGATACAAAAGTTAAGCAAGAACACAGTGACAGA
TGACATCCTCTGCACTTCCCCCGGGCATCTCGACAAAAAGGAATTGAAAGCCCTAAATAGTGAAATTC
TCTGTCCAGGTTTAGTAAATAACCCATCCATGCCAACACAGACTAGTTACCTTATGGTCACCACTCCT
GCAACAACAACAAATACGGCTGATACTATTTTACGA

| | | | |
|---|---|---|---|
| NOV25i, CG55033-02 | | | |
| Protein Sequence | SEQ ID NO: 582 | 542 aa | MW at 60659.6kD |

MLINCEAKGIKMVSEISVPPSRPFQLSLLNNGLTMLHTNDFSGLTNAISIHLGFNNIADIEIGAFNGL
GLLKQLHINHNSLEILKEDTFHGLENLEFLQADNNFITVIEPSAFSKLNRLKVLILNDNAIESLPPNI
FRFVPLTHLDLRGNQLQTLPYVGFLEHIGRILDLQLEDNKWACNCDLLQLKTWLENMPPQSIIGDVVC
NSPPFFKGSILSRLKKESICPTPPVYEEHEDPSGSLHLAATSSINDSRMSTKTTSILKLPTKAPGLIP
YITKPSTQLPGPYCPIPCNCKVLSPSGLLIHCQERNIESLSDLRPPPQNPRXLILAGNIIHSLMKSDL
VEYFTLEMLHLGNNRIEVLEEGSFMNLTRLQKLYLNGNHLTKLSKGMFLGLHNLEYLYLEYNAIKEIL
PGTFNPMPKLKVLYLNNNLLQVLPPHIFSGVPLTKVNLKTNQFTHLPVSNILDDLDLLTQIDLEDNPW
DCSCDLVGLQQWIQKLSKNTVTDDILCTSPGHLDKKELKALNSEILCPGLVNNPSMPTQTSYLMVT

| | | |
|---|---|---|
| NOV25j, CG55033-03 | SEQ ID NO: 583 | 1668 bp |
| DNA Sequence | ORF Start: ATG at 1 | ORF Stop: end of sequence |

ATGCTAATAAATTGTGAAGCAAAAGGTATCAAGATGGTATCTGAAATAAGTGTGCCACCATCACGACC
TTTCCAACTAAGCTTATTAAATAACGGCTTGACGATGCTTCACACAAATGACTTTTCTGGGCTTACCA
ATGCTATTTCAATACACCTTGGATTTAACAATATTGCAGATATTGAGATAGGTGCATTTAATGGCCTT
GGCCTCCTGAAACAACTTCATATCAATCACAATTCTTTAGAAATTCTTAAAGAGGATACTTTCCATGG
ACTGGAAAACCTGGAATTCCTGCAAGCAGATAACAATTTTATCACAGTGATTGAACCAAGTGCCTTTA
GCAAGCTCAACAGACTCAAAGTGTTAATTTTAAATGACAATGCTATTGAGAGTCTTCCTCCAAACATC
TTCCGATTTGTTCCTTTAACCCATCTAGATCTTCGTGGAAATCAATTACAAACATTGCCTTATGTTGG
TTTTCTCGAACACATTGGCCGAATATTGGATCTTCAGTTGGAGGACAACAAATGGGCCTGCAATTGTG
ACTTATTGCAGTTAAAAACTTGGTTGGAGAACATGCCTCCACAGTCTATAATTGGTGATGTTGTCTGC
AACAGCCCTCCATTTTTTAAAGGAAGTATACTCAGTAGACTAAAGAAGGAATCTATTTGCCCTACTCC
ACCAGTGTATGAAGAACATGAGGATCCTTCAGGATCATTACATCTGGCAGCAACATCTTCAATAAATG
ATAGTCGCATATCAACTAAGACCACGTCCATTCTAAAACTACCCACCAAGGCACCAGGTTTGATACCT
TATATTACAAAGCCATCCACTCAACTTCCAGGACCTTACTGCCCTATTCCTTGTAACTGCAAAGTCCT
ATCCCCATCAGGACTTCTAATACATTGTCAGGAGCGCAACATTGAAAGCTTATCAGATCTGAGACCTC
CTCCGCAAAATCCTAGAAAGCTCATTCTAGCGGGAAATATTATTCACAGTTTAATGAAGTCTGATCTA
GTGGAATATTTCACCTTGGAAATGCTTCACTTGGGAAACAATCGTATTGAAGTTCTTGAAGAAGGATC
GTTTATGAACCTAACGAGATTACAAAAACTCTATCTAAATGGTAACCACCTGACCAAATTAAGTAAAG
GCATGTTCCTTGGTCTCCATAATCTTGAATACTTATATCTTGAATACAATGCCATTAAGGAAATACTG
CCAGGAACCTTTAATCCAATGCCTAAACTTAAAGTCCTGTATTTAAATAACAACCTCCTCCAAGTTTT
TACCTGTAAGTAATATTTTGGATGATCTTGATTTACTAACCCAGATTGACCTTGAGGATAACCCCTGG
GACTGCTCCTGTGACCTGGTTGGACTGCAGCAATGGATACAAAAGTTAAGCAAGAACACAGTGACAGA
TCTGTCCAQGTTTAGTAAATAACCCATCCATGCCAACACAGACTAGTTACCTTATGGTCACCACTCCT
GCAACAACAACAAATACGGCTGATACTATTTTACGA

| | | | |
|---|---|---|---|
| NOV25j, | | | |
| CG55033-03 | | | |
| Sequence | SEQ ID NO: 584 | 556 aa | MW at 62099.2kD |

MLINCEAKGIKMVSEISVPPSRPFQLSLLNNGLTMLHTNDFSGLTNAISIHLGFNNIADIEIFAFNGL
GLLKQLHINHNSLEILKEDTFHGLENLEFLQADNNFITVIEPSAFSKLNPLKVLILNDNAIESLPPNI
FRFVPLTHLDLRGNQLQTLPYVGFLEHIGRILDLQLEDNKWACNCDLLQLKTWLENMPPQSIIGDVVC
NSPPFFKGSILSRLKKESICPTPPVYEEHEDPSGSLHLAATSSINDSRISTKTTSILKLPTKAPGLIP
YITKPSTQLPGPYCPIPCNCKVLSPSGLLIHCQERNIESLSDLRPPPQNPRKLILAGNIIHSLMKSDL
VEYFTLEMLHLGNNRIEVLEEGSFMNLTRLQKLYLNGNHLTKLSKGMFLGLHNLEYLYLEYNAIKEIL
PGTFNPMPKLKVLYLNNNLLQVLPPHIFSGVPLTKVNLKTNQFTHLPVSNILDDLDLLTQIDLEDNPW
DCSCDLVGLQQWIQKLSKNTVTDDILCTSPGHLDKKELKALNSEILCPGLVNNPSMPTQTSYLMVTTP
ATTTNTADTILR

| | | |
|---|---|---|
| NOV25k, CG5503306 | SEQ ID NO: 585 | 2539 bp |
| DNA Sequence | ORF Start: ATG at 5 | ORF Stop: TAG at 2528 |

CAACATGAAGCTGTGGATTCATCTCTTTTATTCATCTCTCCTTGCCTGTATATCTTTACACTCCCAAA
CTCCAGTGCTCTCATCCAGAGGCTCTTGTGATTCTCTTTGCAATTGTGAGGAAAAAGATGGCACAATG
CTAATAAATTGTGAAGCAAAAGGTATCAAGATGGTATCTGAAATAAGTGTGCCACCATCACGACCTTT
CCAACTAAGCTTATTAAATAACGGCTTGACGATGCTTCACACAAATGACTTTTCTGGGCTTACCAATG
CTATTTCAATACACCTTGGATTTAACAATATTGCAGATATTGAGATAGGTGCATTTAATGGCCTTGGC
CTCCTGAAACAACTTCATATCAATCACAATTCTTTAGAAATTCTTAAAGAGGATACTTTCCATGGACT
GGAAAACCTGGAATTCCTGCAAGCAGATAACAATTTTATCACAGTGATTGAACCAAGTGCCTTTAGCA
AGCTCAACAGACTCAAAGTGTTAATTTTAAATGACAATGCTATTGAGAGTCTTCCTCCAAACATCTTC
CGATTTGTTCCTTTAACCCATCTAGATCTTCGTGGAAATCAATTACAAACATTGCCTTATGTTGGTTT
TCTCGAACACATTGGCCGAATATTGGATCTTCAGTTGGAGGACAACAAATGGGCCTGCAATTGTGACT
TATTGCAGTTAAAAACTTGGTTGGAGAACATGCCTCCACAGTCTATAATTGGTGATGTTGTCTGCAAC
AGCCCTCCATTTTTTAAAGGAAGTATACTCAGTAGACTAAAGAAGGAATCTATTTGCCCTACTCCACC
AGTGTATGAAGAACATGAGGATCCTTCAGGATCATTACATCTGGCAGCAACATCTTCAATAAATGATA
GTCGCATGTCAACTAAGACCACGTCCATTCTAAAACTACCCACCAAAGCACCAGGTTTGATACCTTAT
ATTACAAAGCCATCCACTCAACTTCCAGGACCTTACTGCCCTATTCCTTGTAACTGCAAAGTCCTATC
CCCATCAGGACTTCTAATACATTGTCAGGAGCGCAACATTGAAAGCTTATCAGATCTGAGACCTCCTC
CGCAAAATCCTAGAAAGCTCATTCTAGCGGGAAATATTATTCACAGTTTAATGAAGTCTGATCTAGTG
GAATATTTCACTTTGGAAATGCTTCACTTGGGAAACAATCGTATTGAAGTTCTTGAAGAAGGATCGTT
TATGAACCTAACGAGATTACAAAAACTCTATCTAAATGGTAACCACCTGACCAAATTAAGTAAAGGCA
TGTTCCTTGGTCTCCATAATCTTGAATACTTATATCTTGAATACAATGCCATTAAGGAAATACTGCCA
GGAACCTTTAATCCAATGCCTAAACTTAAAGTCCTGTATTTAAATAACAACCTCCTCCAAGTTTTACC
ACCACATATTTTTTCAGGGGTTCCTCTAACTAAGGTAAATCTTAAAACAAACCAGTTTACCCATCTAC
CTGTAAGTAATATTTTGGATGATCTTGATTTACTAACCCAGATTGACCTTGAGGATAACCCCTGGGAC
TGCTCCTGTGACCTGGTTGGACTGCAGCAATGGATACAAAAGTTAAGCAAGAACACAGTGACAGATGA
CATCCTCTGCACTTCCCCCGGGCATCTCGACAAAAAGGAATTGAAAGCCCTAAATAGTGAAATTCTCT
GTCCAGGTTTAGTAAATAACCCATCCATGCCAACACAGACTAGTTACCTTATGGTCACCACTCCTGCA
ACAACAACAAATACGGCTGATACTATTTTACGATCTCTTACGGACGCTGTGCCACTGTCTGTTCTAAT
ATTGGGACTTCTGATTATGTTCATCACTATTGTTTTCTGTGCTGCAGGGATAGTGGTTCTTGTTCTTC
ACCGCAGGAGAAGATACAAAAAGAAACAAGTAGATGAGCAAATGAGAGACAACAGTCCTGTGCATCTT
CAGTACAGCATGTATGGCCATAAAACCACTCATCACACTACTGAAAGACCCTCTGCCTCACTCTATGA
ACAGCACATGGTGAGCCCCATGGTTCATGTCTATAGAAGTCCATCCTTTGGTCCAAAGCATCTGGAAG
AGGAAGAAGAGAGGAATGAGAAAGAAGGAAGTGATGCAAAACATCTCCAAAGAAGTCTTTTGGAACAG
GAAAATCATTCACCACTCACAGGGTCAAATATGAAATACAAAACCACGAACCAATCAACAGAATTTTT
ATCCTTCCAAGATGCCAGCTCATTGTACAGAAACATTTTAGAAAAAGAAAGGGAACTTCAGCAACTGG
GAATCACAGAATACCTAAGGAAAAACATTGCTCAGCTCCAGCCTGATATGGAGGCACATTATCCTGGA
GACAAAAAATGAGTATTTTGAACTTAAAGCTAATTTACATGCTGAACCTGACTATTTAGAAGTCCTGG
AGCAGCAAACATAGATGGAGAGT

| | | | |
|---|---|---|---|
| NOV25k, CG55033-06 | | | |
| Protein Sequence | SEQ ID NO: 586 | 841 aa | MW at 95108.5kD |

MKLWIHLFYSSLLACISLHSQTPVLSSRGSCDSLCNCEEKDGTMLINCEAKGIKMVSEISVPPSRPFQ
LSLLNNGLTMLHTNDFSGLTNAISIHLGFNNIADIEIGAFNGLGLLKQLHINHNSLEILKEDTFHGLE
NLEFLQADNNFITVIEPSAFSKLNRLKVLILNDNAIESLPPNIFRFVPLTHLDLRGNQLQTLPYVGFL
EHIGRILDLQLEDNKWACNCDLLQLKTWLENMPPQSIIGDVVCNSPPFFKGSILSRLKKESICPTPPV
YEEHEDPSGSLHLAATSSINDSRMSTKTTSILKLPTKAPGLIPYITKPSTQLPGPYCPIPCNCKVLSP
SGLLIHCQERNIESLSDLRPPPQNPRKLILAGNIIHSLMKSDLVEYFTLEMLHLGNNRIEVLEEGSFM
NLTRLQKLYLNGNHLTKLSKGMFLGLHNLEYLYLEYNAIKEILPGTFNPMPKLKSLYLNNNLLQVLPP
HIFSGVPLTKVNLKTNQFTHLPVSNILDDLDLLTQIDLEDNPWDCSCDLVGLQQWIQKLSKNTVTDDI
LCTSPGHLDKKELKALNSEILCPGLVNNPSMPTQTSYLMVTTPATTTNTADTILRSLTDAVPLSVLIL
GLLIMFITIVFCAAGIVVLVLHRPRRYKKKQVDEQMRDNSPVHLQYSMYGHKTTHHTTERPSASLYEQ
HMVSPMVHVYRSPSFGPKHLEEEEERNEKEGSDAKHLQRSLLEQENHSPLTGSNMKYKTTNQSTEFLS
FQDASSLYRNILEKERELQQLGITEYLRKNIAQLQPDMEAHYPGAHEELKLMETLMYSRPRKVLVEQT
KNEYFELKANLHAEPDYLVELEQQT

| | | |
|---|---|---|
| NOV25l, CG55033-07 | SEQ ID NO: 587 | 1648 bp |
| DNA Sequence | ORF Start: ATG at 14 | ORF Stop: at 1640 |

CACCTCGCGAACCATGCTAATAAATTGTGAAGCAAAAGGTATCAAGATGGTATCTGAAATAAGTGTGC
CACCATCACGACCTTTCCAACTAAGCTTATTAAATAACGGCTTGACGATGCTTCACACAAATGACTTT
TCTGGGCTTACCAATGCTATTTCAATACACCTTGGATTTAACAATATTGCAGATATTGAGATAGGTGC
ATTTAATGGCCTTGGCCTCCTGAAACAACTTCATATCAATCACAATTCTTTAGAAATTCTTAAAGAGG
TCCTCCAAACATCTTCCGATTTGTTCCTTTAACCCATCTAGATCTTCGTGGAAATCAATTACAAACAT
TGCCTTATGTTGGTTTTCTCGAACACATTGGCCGAATATTGGATCTTCAGTTGGAGGACAACAAATGG
GCCTGCAATTGTGACTTATTGCAGTTAAAAACTTGGTTGGAGAACATGCCTCCACAGTCTATAATTGG
TGATGTTGTCTGCAACAGCCCTCCATTTTTTAAAGGAAGTATACTCAGTAGACTAAAGAAGGAATCTA
TTTGCCCTACTCCACCAGTGTATGAAGAACATGAGGATCCTTCAGGATCATTACATCTGGCAGCAACA
TCTTCAATAAATGATAGTCGCATGTCAACTAAGACCACGTCCATTCTAAAACTACCCACCAAAGCACC
AGGTTTGATACCTTATATTACAAAGCCATCCACTCAACTTCCAGGACCTTACTGCCCTATTCCTTGTA
ACTGCAAAGTCCTATCCCCATCAGGACTTCTAATACATTGTCAGGAGCGCAACATTGAAAGCTTATCA
GATCTGAGACCTCCTCCGCAAAATCCTAGAAAGCTCATTCTAGCGGGAAATATTATTCACAGTTTAAT
GAAGTCTGATCTAGTGGAATATTTCACTTTGGAAATGCTTCACTTGGGAAACAATCGTATTGAAGTTC
TTGAAGAAGGATCGTTTATGAACCTAACGAGATTACAAAAACTCTATCTAAATGGTAACCACCTGACC
AAATTAAGTAAAGGCATGTTCCTTGGTCTCCATAATCTTGAATACTTATATCTTGAATACAATGCCAT
TAAGGAAATACTGCCAGGAACCTTTAATCCAATGCCTAAACTTAAAGTCCTGTATTTAAATAACAACC
TCCTCCAAGTTTTACCACCACATATTTTTTCAGGGGTTCCTCTAACTAAGGTAAATCTTAAAACAAAC
CAGTTTACCCATCTACCTGTAAGTAATATTTTGGATGATCTTGATTTACTAACCCAGATTGACCTTGA
GGATAACCCCTGGGACTGCTCCTGTGACCTGGTTGGACTGCAGCAATGGATACAAAAGTTAAGCAAGA
ACACAGTGACAGATGACATCCTCTGCACTTCCCCCGGGCATCTCGACAAAAAGGAATTGAAAGCCCTA
AATAGTGAAATTCTCTGTCCAGGTTTAGTAAATAACCCATCCATGCCAACACAGACTAGTTACCTTAT
GGTCACCGTCGACGGC

| | | | |
|---|---|---|---|
| NOV25l, CG55033-07 | | | |
| Protein Sequence | SEQ ID NO: 588 | 542 aa | MW at 60659.6kD |

MLINCEAKGIKMVSEISVPPSRPFQLSLLNNGLTMLHTNDFSGLTNAISIHLGFNNIADIEIGAFNGL
GLLKQLHINHNSLEILKEDTFHGLENLEFLQADNNFITVIEPSAFSKLNRLKVLILNDNAIESLPPNI
FRFVPLTHLDLRGNQLQTLPYVGFLEHIGRILDLQLEDNKWACNCDLLQLKTWLENMPPQSIIGDVVC
NSPPFFKGSILSRLKKESICPTPPVYEEHEDPSGSLHLAATSSINDSRMSTKTTSILKLPTKAPGLIP
YITKPSTQLPGPYCPIPCNCKVLSPSGLLIHCQERNIESLSDLRPPPQNPRKLILAGNIIHSLMKSDL
VEYFTLEMLHLGNNRIEVLEEGSFMNLTRLQKLYLNGNHLTKLSKGMFLGLHNLEYLYLEYNAIKEIL
PGTFNPMPKLKTLYLNNNLLQVLPPHIFSGVPLTKVNLKTNQFTHLPVSNILDDLDLLTQIDLEDNPW
DCSCDLVGLQQWIQKLSKNTVTDDILCTSPGHLDKKELKALNSEILCPGLVNNPSMPTQTSYLMVT

| | | |
|---|---|---|
| NOV25m, CG55033-08 | SEQ ID NO: 589 | 643 bp |
| DNA Sequence | ORF Start: ATG at 9 | ORF Stop: at 1635 |

GCGGCCGCATGCTAATAAATTGTGAAGCAAAAGGTATCAAGATGGTATCTGAAATAAGTGTGCCACCA
TCACGACCTTTCCAACTAAGCTTATTAAATAACGGCTTGACGATGCTTCACACAAATGACTTTTCTGG
GCTTACCAATGCTATTTCAATACACCTTGGATTTAACAATATTGCAGATATTGAGATAGGTGCATTTA
ATGGCCTTGGCCTCCTGAAACAACTTCATATCAATCACAATTCTTTAGAAATTCTTAAAGAGGATACT
TTCCATGGACTGGAAAACCTGGAATTCCTGCAAGCAGATAACAATTTTATCACAGTGATTGAACCAAG
TGCCTTTAGCAAGCTCAACAGACTCAAAGTGTTAATTTTAAATGACAATGCTATTGAGAGTCTTCCTC
CAAACATCTTCCGATTTGTTCCTTTAACCCATCTAGATCTTCGTGGAAATCAATTACAAACATTGCCT
TATGTTGGTTTTCTCGAACACATTGGCCGAATATTGGATCTTCAGTTGGAGGACAACAAATGGGCCTG
CAATTGTGACTTATTGCAGTTAAAAACTTGGTTGGAGAACATGCCTCCACAGTCTATAATTGGTGATG
TTGTCTGCAACAGCCCTCCATTTTTTAAAGGAAGTATACTCAGTAGACTAAAGAAGGAATCTATTTGC
CCTACTCCACCAGTGTATGAAGAACATGAGGATCCTTCAGGATCATTACATCTGGCAGCAACATCTTC
AATAAATGATAGTCGCATGTCAACTAAGACCACGTCCATTCTAAAACTACCCACCAAAGCACCAGGTT
TGATACCTTATATTACAAAGCCATCCACTCAACTTCCAGGACCTTACTGCCCTATTCCTTGTAACTGC
AAAGTCCTATCCCCATCAGGACTTCTAATACATTGTCAGGAGCGCAACATTGAAAGCTTATCAGATCT
GAGACCTCCTCCGCAAAATCCTAGAAAGCTCATTCTAGCGGGAAATATTATTCACAGTTTAATGAAGT
CTGATCTAGTGGAATATTTCACTTTGGAAATGCTTCACTTGGGAAACAATCGTATTGAAGTTCTTGAA
GAAGGATCGTTTATGAACCTAACGAGATTACAAAAACTCTATCTAAATGGTAACCACCTGACCAAATT
AAGTAAAGGCATGTTCCTTGGTCTCCATAATCTTGAATACTTATATCTTGAATACAATGCCATTAAGG
CAAGTTTTACCACCACATATTTTTTCAGGGGTTCCTCTAACTAAGGTAAATCTTAAAACAAACCAGTT
TACCCATCTACCTGTAAGTAATATTTTGGATGATCTTGATTTACTAACCCAGATTGACCTTGAGGATA
ACCCCTGGGACTGCTCCTGTGACCTGGTTGGACTGCAGCAATGGATACAAAAGTTAAGCAAGAACACA
GTGACAGATGACATCCTCTGCACTTCCCCCGGGCATCTCGACAAAAGGAAATTGAAAGCCCTAAATAG
TGAAATTCTCTGTCCAGGTTTAGTAAATAACCCATCCATGCCAACACAGACTAGTTACCTTATGGTCA
CCCTCGAGGGC

| | | | |
|---|---|---|---|
| NOV25m, CG55033-08 | | | |
| Protein Sequence | SEQ ID NO: 590 | 542 aa | MW at 60659.6kD |

MLINCEAKGIKMVSEISVPPSRPFQLSLLNNGLTMLHTNDFSGLTNAISIHLGFNNIADIEIGAFNGL
GLLKQLHINHNSLEILKEDTFHGLENLEFLQADNNFITVIEPSAFSKLNRLKVLILNDNAIESLPPNI
FRFVPLTHLDLRGNQLQTLPYVGFLEHIGRILDLQLEDNKWACNCDLLQLKTWLENMPPQSIIGDVVC
NSPPFFKGSILSRLKKESICPTPPVYEEHEDPSGSLHLAATSSINDSRMSTKTTSILKLPTKAPGLIP
YITKPSTQLPGPYCPIPCNCKVLSPSGLLIHCQERNIESLSDLRPPPQNPRKLILAGNIIHSLMKSDL
VEYFTLEMLHLGNNRIEVLEEGSFMNLTRLQKLYLNGNHLTKLSKGMFLGLHNLEYLYLEYNAIKEIL
PGTFNPMPKLKVLYLNNNLLQVLPPHIFSGVPLTKVNLKTNQFTHLPVSNILDDLDLLTQIDLEDNPW
DCSCDLVGLQQWIQKLSKNTVTDDILCTSPGHLDKKELKALNSETLCPGLVNNPSMPTQTSYLMVT

| | | |
|---|---|---|
| NOV25n, CG55033-09 | SEQ ID NO: 591 | 2838 bp |
| DNA Sequence | ORF Start: ATG at 184 | ORF Stop: TAG at 2707 |

AACTTTATGAAGCTATGGGACTTGACAAAAAGTGATATTTGAGAAGAAAGTACGCAGTGGTTGGTGTT
TTCTTTTTTTTAATAAAGGAATTGAATTACTTTGAACACCTCTTCCAGCTGTGCATTACAGATAACGT
CAGGAAGAGTCTCTGCTTTACAGAATCGGATTTCATCACATGACAACATGAAGCTGTGGATTCATCTC
TTTTATTCATCTCTCCTTGCCTGTATATCTTTACACTCCCAAACTCCAGTGCTCTCATCCAGAGGCTC
TCAAGATGGTATCTGAAATAAGTGTGCCACCATCACGACCTTTCCAACTAAGCTTATTAAATAACGGC
TTGACGATGCTTCACACAAATGACTTTTCTGGGCTTACCAATGCTATTTCAATACACCTTGGATTTAA
CAATATTGCAGATATTGAGATAGGTGCATTTAATGGCCTTGGCCTCCTGAAACAACTTCATATCAATC
ACAATTCTTTAGAAATTCTTAAAGAGGATACTTTCCATGGACTGGAAAACCTGGAATTCCTGCAAGCA
GATAACAATTTTATCACAGTGATTGAACCAAGTGCCTTTAGCAAGCTCAACAGACTCAAAGTGTTAAT
TTTAAATGACAATGCTATTGAGAGTCTTCCTCCAAACATCTTCCGATTTGTTCCTTTAACCCATCTAG
ATCTTCGTGGAAATCAATTACAAACATTGCCTTATGTTGGTTTTCTCGAACACATTGGCCGAATATTG
GATCTTCAGTTGGAGGACAACAAATGGGCCTGCAATTGTGACTTATTGCAGTTAAAAACTTGGTTGGA
GAACATGCCTCCACAGTCTATAATTGGTGATGTTGTCTGCAACAGCCCTCCATTTTTTAAAGGAAGTA
TACTCAGTAGACTAAAGAAGGAATCTATTTGCCCTACTCCACCAGTGTATGAAGAACATGAGGATCCT
TCAGGATCATTACATCTGGCAGCAACATCTTCAATAAATGATAGTCGCATGTCAACTAAGACCACGTC
CATTCTAAAACTACCCACCAAAGCACCAGGTTTGATACCTTATATTACAAAGCCATCCACTCAACTTC
CAGGACCTTACTGCCCTATTCCTTGTAACTGCAAAGTCCTATCCCCATCAGGACTTCTAATACATTGT
CAGGAGCGCAACATTGAAAGCTTATCAGATCTGAGACCTCCTCCGCAAAATCCTAGAAAGCTCATTCT
AGCGGGAAATATTATTCACAGTTTAATGAAGTCTGATCTAGTGGAATATTTCACTTTGGAAATGCTTC
ACTTGGGAAACAATCGTATTGAAGTTCTTGAAGAAGGATCGTTTATGAACCTAACGAGATTACAAAAA
CTCTATCTAAATGGTAACCACCTGACCAAATTAAGTAAAGGCATGTTCCTTGGTCTCCATAATCTTGA
ATACTTATATCTTGAATACAATGCCATTAAGGAAATACTGCCAGGAACCTTTAATCCAATGCCTAAAC
TTAAAGTCCTGTATTTAAATAACAACCTCCTCCAAGTTTTACCACCACATATTTTTTCAGGGGTTCCT
CTAACTAAGGTAAATCTTAAAACAAACCAGTTTACCCATCTACCTGTAAGTAATATTTTGGATGATCT
TGATTTACTAACCCAGATTGACCTTGAGGATAACCCCTGGGACTGCTCCTGTGACCTGGTTGGACTGC
CTCGACAAAAAGGAATTGAAAGCCCTALATAGTGAAATTCTCTGTCCAGGTTTAGTAAATAACCCATC
CATGCCAACACAGACTAGTTACCTTATGGTCACCACTCCTGCAACAACAACAAATACGGCTGATACTA
TTTTACGATCTCTTACGGACGCTGTGCCACTGTCTGTTCTAATATTGGGACTTCTGATTATGTTCATC
ACTATTGTTTTCTGTGCTGCAGGGATAGTGGTTCTTGTTCTTCACCGCAGGAGAAGATACAAAAAGAA
ACAAGTAGATGAGCAAATGAGAGACAACAGTCCTGTGCATCTTCAGTACAGCATGTATGGCCATAAAA
CCACTCATCACACTACTGAAAGACCCTCTGCCTCACTCTATGAACAGCACATGGTGAGCCCCATGGTT
CATGTCTATAGAAGTCCATCCTTTGGTCCAAAGCATCTGGAAGAGGAAGAAGAGAGGAATGAGAAAGA
AGGAAGTGATGCAAAACATCTCCAAAGAAGTCTTTTGGAACAGGAAAATCATTCACCACTCACAGGGT
TACAGAAACATTTTAGAAAAAGAAAGGGAACTTCAGCAACTGGGAATCACAGAATACCTAAGGAAAAA
CATTGCTCAGCTCCAGCCTGATATGGAGGCACATTATCCTGGAGCCCACGAAGAGCTGAAGTTAATGG
AAACATTAATGTACTCACGTCCAAGGAAGGTATTAGTGGAACAGACAAAAAATGAGTATTTTGAACTT
AAAGCTAATTTACATGCTGAACCTGACTATTTAGAAGTCCTGGAGCAGCAAACATAGATGGAGAGTAT
GAGGGCTTTCGCAGAAATGCTGTGATTCTGTTTTAAGTCCATACCTTGTAAATTAGTGCCTTACGTGA
GTGTGTCATCCATCAGAACCTAAGCACAGCAGTAAACTATGGAGAAAAAA

| | | | |
|---|---|---|---|
| NOV25n, CG55033-09 | | | |
| Protein Sequence | SEQ ID NO: 592 | 841 aa | MW at 95108.5kD |

MKLWIHLFYSSLLACISLHSQTPVLSSRGSCDSLCNCEEKDGTMLINCEAKGIKMVSEISVPPSRPFQ
LSLLNNGLTMLHTNDFSGLTNAISIHLGFNNIADIEIGAFNGLGLLKQLHINHNSLEILKEDTFNGLE
NLEFLQADNNFITVIEPSAFSKLNRLKVLILNDNAIESLPPNIFRFVPLTHLDLRGNQLQTLPYVGFL
EHIGRILDLQLEDNKWACNCDLLQLKTWLENMPPQSIIGDVVCNSPPFFKGSILSRLKKESICPTPPV
YEEHEDPSGSLHLAATSSINDSRMSTKTTSILKLPTKAPGLIPYITKPSTQLPGPYCPIPCNCKVLSP
SGLLIHCQERNIESLSDLRPPPQNPRKLILAGNIIHSLMKSDLVEYFTLEMLHLGNNRIEVLEEGSFM
NLTRLQKLYLNGNHLTKLSKGMFLGLHNLEYLYLEYNAIKEILPGTFNPMPKLKVLYLNNNLLQVLPP
HIFSGVPLTKVNLKTNQFTHLPVSNILDDLDLLTQIDLEDNPWDCSCDLVGLQQWIQKLSKNTVTDDI
LCTSPGHLDKKELKALNSEILCPGLVNNPSMPTQTSYLMVTTPATTTNTADTILRSLTDAVPLSVLIL
GLLIMFITIVFCAAGIVVLVLHRRRRYKKKQVDEQMRDNSPVHLQYSMYGHKTTHHTTERPSASLYEQ
FQDASSLYRNILEKERELQQLGITEYLRKNIAQLQPDMEAHYPGAHEELKLMETLMYSRPRKVLVEQT
KNEYFELKANLHAEPDYLEVLEQQT

| | | |
|---|---|---|
| NOV25o, CG55033-10 | SEQ ID NO: 593 | 2531 bp |
| DNA Sequence | ORF Start: at 2 | ORF Stop: TAA at 2513 |

GGATTCTCTCTTTTATTCATCTCTCCTTGCCTGTATATCTTTACACTCCCAAACTCCAGTGCTCTCAT
CCAGAGGCTCTTGTGATTCTCTTTGCAATTGTGAGGAAAAAGATGGCACAATGCTAATAAATTGTGAA
GCAAAAGGTATCAAGATGGTATCTGAAATAAGTGTGCTACCATCACGACCTTTCCAACTAAGCTTATT
AAATAACGGCTTGACGATGCTTCACACAAATGACTTTTCTGGGCTTACCAATGCTATTTCAATACACC
TTGGATTTAACAATATTGCAGATATTGAGATAGGTGCATTTAATGGCCTTGGCCTCCTGAAACAACTT
CATATCAATCACAATTCTTTAGAAATTCTTAAAGAGGATACTTTCCATGGACTGGAAAACCTGGAATT
CCTGCAAGCAGATAACAATTTTATCACAGTGATTGAACCAAGTGCCTTTAGCAAGCTCAACAGACTCA
AAGTGTTAATTTTAAATGACAATGCTATTGAGAGTCTTCCTCCAAACATCTTCCGATTTGTTCCTTTA
ACCCATCTAGATCTTCGTGGAAATCAATTACAAACATTGCCTTATGTTGGTTTTCTCGAACACATTGG
CCGAATATTGGATCTTCAGTTGGAGGACAACAAATGGGCCTGCAATTGTGACTTATTGCAGTTAAAAA
CTTGGTTGGAGAACATGCCTCCACAGTCTATAATTGGTGATGTTGTCTGCAACAGCCCTCCATTTTTT
AAAGGAAGTATACTCAGTAGACTAAAGAAGGAATCTATTTGCCCTACTCCACCAGTGTATGAAGAACA
TGAGGATCCTTCAGGATCATTACATCTGGCAGCAACATCTTCAATAAATGATAGTCGCATGTCAACTA
AGACCACGTCCATTCTAAAACTACCCACCAAAGCACCAGGTTTGATACCTTATATTACAAAGCCATCC
ACTCAACTTCCAGGACCTTACTGCCCTATTCCTTGTAACTGCAAAGTCCTATCCCCATCAGGACTTCT
AATACATTGTCAGGAGCGCAACAATTGAAAGCTTATCAGATCTGAGACCTCCTCCGCAAATCCTAGAA
AGCTCATTCTAGCGGGAAATATTATTCACAGTTTAATGAAGTCTGATCTAGTGGAATATTTCACTTTG
GAATGCTTCACTTGGGAACAATCGTATTGAAGTTCTTGAAGAAGGATCGTTTATGAACCTAAAACGAG
ATTACAAAAACTCTATCTAAATGGTAACCACCTGACCAAATTAAGTAAAGGCATGTTCCTTGGTCTCC
ATAATCTTGAATACTTATATCTTGAATACAATGCCATTAAGGAAATACTGCCAGGAACCTTTAATCCA
ATGCCTAAACTTAAAGTCCTGTATTTAAATAACAACCTCCTCCAAGTTTTACCACCACATATTTTTTC
AGGGGTTCCTCTAACTAAGGTAAATCTTAAAACAAACCAGTTTACCCATCTACCTGTAAGTAATATTT
TGGATGATCTTGATTTGCTAACCCAGATTGACCTTGAGGATAACCCCTGGGACTGCTCCTGTGACCTG
GTTGGACTGCAGCAATGGATACAAAAGTTAAGCAAGAACACAGTGACAGATGACATCCTCTGCACTTC
CCCCGGGCATCTCGACAAAAAGGAATTGAAAGCCCTAAATAGTGAAATTCTCTGTCCAGGTTTAGTAA
ATAACCCATCCATGCCAACACAGACTAGTTACCTTATGGTCACCACTCCTGCAACAACAACAAATACG
GCTGATACTATTTTACGATCTCTTACGGACGCTGTGCCACTGTCTGTTCTAATATTGGGACTTCTGAT
TATGTTCATCACTATTGTTTTCTGTGCTGCAGGGATAGTGGTTCTTGTTCTTCACCGCAGGAGAAGAT
ACAAAAAGAAACAAGTAGATGAGCAAATGAGAGACAACAGTCCTGTGCATCTTCAGTACAGCATGTAT
GGCCATAAAACCACTCATCACACTACTGAAAGACCCTCTGCCTCACTCTATGAACAGCACATGGTGAG
CCCCATGGTTCATGTCTATAGAAGTCCATCCTTTGGTCCAAAGCATCTGGAAGAGGAAGAAGAGAGGA
ATGAGAAAGAAGGAAGTGATGCAAAACATCTCCAAAGAAGTCTTTTGGAACAGGAAAATCATTCACCA
CTCACAGGGTCAAATATGAAATACAAAACCACGAACCAATCAACAGAATTTTTATCCTTCCAAGATGC
CAGCTCATTGTACAGAAACATTTTAGAAAAAGAAAGGGAACTTCAGCAACTGGGAATCACAGAATACC
TAAGGAAAAAACATTGCTCAGCTCCAGCCTGATATGGAGGCACATTATCCTGGAGCCACGAAGAGCTG
AAGTTAATGGAACATTAATGTACTCACGTCCAAGGAAGGTATTAGTGGAACAGACAAAAAAATGAGTA
TTTTGAACTTAAAGCTAATTTACATGCTGAACCTGACTATTTAGAAGTCCTGGAGCAGCAAACATAAG
GGCGAATTCTGCTGT

| | | | |
|---|---|---|---|
| NOV25o, CG55033-10 | | | |
| Protein Sequence | SEQ ID NO: 594 | 837 aa | MW at 94517.6kD |

DSLFYSSLLACISLHSQTPVLSSRGSCDSLCNCEEKDGTMLINCEAKGIKMVSEISVLPSRPFQLSLL
NNGLTMLHTNDFSGLTNAISIHLGFNNIADIEIGAFNGLGLLKQLHINHNSLEILKEDTFHGLENLEF
LQADNNFITVIEPSAFSKLNRLKVLILNDNAIESLPPNIFRFVPLTHLDLRGNQLQTLPYVGFLEHIG
RILDLQLEDNKWACNCDLLQLKTWLENMPPQSIIGDVVCNSPPFFKGSILSRLKKESICPTPPVYEEH
EDPSGSLHLAATSSINDSRMSTKTTSILKLPTKAPGLIPYITKPSTQLPGPYCPIPCNCKVLSPSGLL
IHCQERNIESLSDLRPPPQNPRKLILAGNIIHSLMKSDLVEYFTLEMLHLGNNRIEVLEEGSFMNLTR
LQKLYLNGNHLTKLSKGMFLGLHNLEYLYLEYNAIKEILPGTFNPMPKLKVLYLNNNLLQVLPPHIFS
GVPLTKVNLKTNQFTHLPVSNILDDLDLLTQIDLEDNPWDCSCDLVGLQQWIQKLSKNTVTDDILCTS
PGHLDKKELKALNSEILCPGLVNNPSMPTQTSYLMVTTPATTTNTADTILRSLTDAVPLSVLILGLLI
MFITIVFCAAGIVVLVLHRRRRYKKKQVDEQMRDNSPVHLQYSMYGHKTTHHTTERPSASLYEQHMVS
PMVHVYRSPSFFGPKHLEEEEERNEKEGSDAKHLQRSLLEQENHSPLTGSNMYKTTNQSTEFLSFQDA
SSLYRNILEKERELQQLGITEYLRKNIAQLQPDMEAHYPGAHEELKLMETLMYSRPRKVLVEQTKNEY
FELKANLHAEPDYLEVLEQQT

| | | |
|---|---|---|
| NOV25p, CG55033-11 | SEQ ID NO: 595 | 1758 bp |
| DNA Sequence | ORF Start: at 10 | ORF Stop: at 1750 |

CGCGGATCCCAAACTCCAGTGCTCTCATCCAGAGGCTCTTGTGATTCTCTTTGCAATTGTGAGGAAAA
AGATGGCACAATGCTAATAAATTGTGAAGCAAAAGGTATCAAGATGGTATCTGAAATAAGTGTGCCAC
CATCACGACCTTTCCAACTAAGCTTATTAAATAACGGCTTGACGATGCTTCACACAAATGACTTTTCT
GGGTTACCAATGCTATTTCAATACACCTTGGATTTAACAATATTGCAGATATTGAGATAGGTAGCATT
TAATGGCCTTGGCCTCCTGAAACAACTTCATATCAATCACAATTCTTTAGAAATTCTTAAAGAGGATA
CTTTCCATGGACTGGAAAACCTGGAATTCCTGCAAGCAGATAACAATTTTATCACAGTGATTGAACCA
AGTGCCTTTAGCAAGCTCAACAGACTCAAAGTGTTAATTTTAAATGACAATGCTATTGAGAGTCTTCC
TCCAAACATCTTCCGATTTGTTCCTTTAACCCATCTAGATCTTCGTGGAAATCAATTACAAACATTGC
CTTATGTTGGTTTTCTCGAACACATTGGCCGAATATTGGATCTTCAGTTGGAGGACAACAAATGGGCC
TGCAATTGTGACTTATTGCAGTTAAAAACTTGGTTGGAGAACATGCCTCCACAGTCTATAATTGGTGA
TGTTGTCTGCAACAGCCCTCCATTTTTTAAAGGAAGTATACTCAGTAGACTAAGAAGGAATCTAATTT
GCCCTACTCCACCAGTGTATGAAGAACATGAGGATCCTTCAGGATCATTACATCTGGCAGCAACATCT
TCAATAAATGATAGTCGCATGTCAACTAAGACCACGTCCATTCTAAAACTACCCACCAAAGCACCAGG
TTTGATACCTTATATTACAAAGCCATCCACTCAACTTCCAGGACCTTACTGCCCTATTCCTTGTAACT
GCAAAGTCCTATCCCCATCAGGACTTCTAATACATTGTCAGGAGCGCAACATTGAAAGCTTATCAGAT
CTGAGACCTCCTCCGCAAAATCCTAGAAAGCTCATTCTAGCGGGAAATATTATTCACAGTTTAATGAA
GTCTGAGCTAGTGGAATATTTCACTTTGGAAATGCTTCACTTGGGAAACAATCGTATTGAAGTTCTTG
AAGAAGGATCGTTTATGAACCTAACGAGATTACAAAAACTCTATCTAAATGGTAACCACCTGACCAAA
TTAAGTAAAGGCATGTTCCTTGGTCTCCATAATCTTGAATACTTATATCTTGAATACAATGCCATTAA
GGAATACTGCCAGGAACCTTTAATCCAATGCCTAAACTTAAAGTCCTGTATTTAAATAAACAACCTCC
TCCAAGTTTTACCACCACATATTTTTTCAGGGGTTCCTCTAACTAAGGTALATCTTAAAACAAACCAG
TTTACCCATCTACCTGTAAGTAATATTTTGGATGATCTTGATTTACTAACCCAGATTGACCTTGAGGA
TAACCCCTGGGACTGCTCCTGTGACCTGGTTGGACTGCAGCAATGGATACAAAAGTTAAGCAAGAACA
CAGTGACAGATGACATCCTCTGCACTTCCCCCGGGCATCTCGACAAAAAGGAATTGAAAGCCCTAAAT
AGTGAAATTCTCTGTCCAGGTTTAGTAAATAACCCATCCATGCCAACACAGACTAGTTACCTTATGGT
CACCACTCCTGCAACAACAACAAATACGGCTGATACTATTTTACGATCTCTCGAGGCG

| | | | |
|---|---|---|---|
| NOV25p, CG55033-11 | | | |
| Protein Sequence | SEQ ID NO: 596 | 580 aa | MW at 64615.9kD |

QTPVLSSRGSCDSLCNCEEKDGTMLINCEAKGIKMVSEISVPPSRPFQLSLLNNGLTMLHTNDFSGLT
NAISIHLGFNNIADIEIGAFNGLGLLKQLHINHNSLEILKEDTFHGLENLEFLQADNNFITVIEPSAF
SKLNRLKVLILNDNAIESLPPNIFRFVPLTHLDLRGNQLQTLPYVGFLEHIGRILDLQLEDNKWACNC
DLLQLKTWLENMPPQSIIGDVVCNSPPFFKGSILSRLKKESICPTPPVYEEHEDPSGSLHLAATSSIN
DSRMSTKTTSILKLPTKAPGLIPYITKPSTQLPGPYCPIPCNCKVLSPSGLLIHCQERNIESLSDLRP
PPQNPRKLILAGNIIHSLMKSDLVEYFTLEMLHLGNNRIEVLEEGSFMNLTRLQKLYLNGNHLTKLSK
GMFLGLHNLEYLYLEYNAIKEILPGTFNPMPKLKVLYLNNNLLQVLPPHIFSGVPLTKVNLKTNQFTH
LPVSNILDDLDLLTQIDLEDNPWDCSCDLVGLQQWIQKLSKNTVTDDILCTSPGHLDKKELKALNSEI
LCPGLVNNPSMPTQTSYLMVTTPATTTNTADTILRS

| | | |
|---|---|---|
| NOV25q, CG55033-12 | SEQ ID NO: 597 | 1762 bp |
| DNA Sequence | ORF Start: at 14 | ORF Stop: at 1754 |

CACCTCGCGAACCCAAACTCCAGTGCTCTCATCCAGAGGCTCTTGTGATTCTCTTTGCAATTGTGAGG
AAAAAGATGGCACAATGCTAATAAATTGTGAAGCAAAAGGTATCAAGATGGTATCTGAAATAAGTGTG
CCACCATCACGACCTTTCCAACTAAGCTTATTAAATAACGGCTTGACGATGCTTCACACAAATGACTT
CATTTAATGGCCTTGGCCTCCTGAAACAACTTCATATCAATCACAATTCTTTAGAAATTCTTAAAGAG
GATACTTTCCATGGACTGGAAAACCTGGAATTCCTGCAAGCAGATAACAATTTTATCACAGTGATTGA
ACCAAGTGCCTTTAGCAAGCTCAACAGACTCAAAGTGTTAATTTTAAATGACAATGCTATTGAGAGTC
TTCCTCCAAACATCTTCCGATTTGTTCCTTTAACCCATCTAGATCTTCGTGGAAATCAATTACAAACA
TTGCCTTATGTTGGTTTTCTCGAACACATTGGCCGAATATTGGATCTTCAGTTGGAGGACAACAAATG
GGCCTGCAATTGTGACTTATTGCAGTTAAAAACTTGGTTGGAGAACATGCCTCCACAGTCTATAATTG
GTGATGTTGTCTGCAACAGCCCTCCATTTTTTAAAGGAAGTATACTCAGTAGACTAAAGAAGGAATCT
ATTTGCCCTACTCCACCAGTGTATGAAGAACATGAGGATCCTTCAGGATCATTACATCTGGCAGCAAC
ATCTTCAATAAATGATAGTCGCATGTCAACTAAGACCACGTCCATTCTAAAACTACCCACCAAAGCAC
CAGGTTTGATACCTTATATTACAAAGCCATCCACTCAACTTCCAGGACCTTACTGCCCTATTCCTTGT
AACTGCAAAGTCCTATCCCCATCAGGACTTCTAATACATTGTCAGGAGCGCAACATTGAAAGCTTATC
AGATCTGAGACCTCCTCCGCAAAATCCTAGAAAGCTCATTCTAGCGGGAAATATTATTCACAGTTTAA
TGAAGTCTGATCTAGTGGAATATTTCACTTTGGAAATGCTTCACTTGGGAAACAATCGTATTGAAGTT
CAAATTAAGTAAAGGCATGTTCCTTGGTCTCCATAATCTTGAATACTTATATCTTGAATACAATGCCA
TTAAGGAAATACTGCCAGGAACCTTTAATCCAATGCCTAAACTTAAAGTCCTGTATTTAAATAACAAC
CTCCTCCAAGTTTTACCACCACATATTTTTTCAGGGGTTCCTCTAACTAAGGTAAATCTTAAAACAAA
CCAGTTTACCCATCTACCTGTAAGTAATATTTTGGATGATCTTGATTTACTAACCCAGATTGACCTTG
AGGATAACCCCTGGGACTGCTCCTGTGACCTGGTTGGACTGCAGCAATGGATACAAAAGTTAAGCAAG
AACACAGTGACAGATGACATCCTCTGCACTTCCCCCGGGCATCTCGACAAAAAGGAATTGAAAGCCCT
AAATAGTGAAATTCTCTGTCCAGGTTTAGTAAATAACCCATCCATGCCAACACAGACTAGTTACCTTA
TGGTCACCACTCCTGCAACAACAACAAATACGGCTGATACTATTTTACGATCTGTCGACGGC

| | | | |
|---|---|---|---|
| NOV25q, CG55033-12 | | | |
| Protein Sequence | SEQ ID NO: 598 | 580 aa | MW at 64615.9kD |

QTPVLSSRGSCDSLCNCEEKDGTMLINCEAKGIKMVSEISVPPSRPFQLSLLNNGLTMLHTNDFSGLT
NAISIHLGFNNIADIEIGAFNGLGLLKQLHINhNSLEILKEDTFHGLENLEFLQADNNFITVIEPSAF
SKLNRLKVLILNDNAIESLPPNIFRFVPLTHLDLRGNQLQTLPYVGFLEHIGRILDLQLEDNKWACNC
DLLQLKTWLENMPPQSIIGDVVCNSPPFFKGSILSRLKKESICPTPPVYEEHEDPSGSLHLAATSSIN
DSRMSTKTTSILKLPTKAPGLIPYITKPSTQLPGPYCPIPCNCKVLSPSGLLIHCQERNIESLSDLRP
PPQNPRKLILAGNIIHSLMKSDLVEYFTLEMLHLGNNRIEVLEEGSFMNLTRLQKLYLNGNHLTKLSK
GMFLGLHNLEYLYLEYNAIKEILPGTFNPMPKLKVLYLNNNLLQVLPPHIFSGVPLTKVNLKTNQFTH
LPVSNILDDLDLLTQIDLEDNPWDCSCDLVGLQQWIQKLSKNTVTDDILCTSPGHLDKKELKALNSEI
LCPGLVNNPSMPTQTSYLMVTTPATTTNTADTILRS

| | | |
|---|---|---|
| NOV25r, CG55033-13 | SEQ ID NO: 599 | 2481 bp |
| DNA Sequence | ORF Start: at 10 | ORF Stop: at 2473 |

CGCGGATCCCAAACTCCAGTGCTCTCATCCAGAGGCTCTTGTGATTCTCTTTGCAATTGTGAGGAAAA
AGATGGCACAATGCTAATAAATTGTGAAGCAAAAGGTATCAAGATGGTATCTGAAATAAGTGTGCCAC
CATCACGACCTTTCCAACTAAGCTTATTAAATAACGGCTTGACGATGCTTCACACAAATGACTTTTCT
GGGCTTACCAATGCTATTTCAATACACCTTGGATTTAACAATATTGCAGATATTGAGATAGGTGCATT
TAATGGCCTTGGCCTCCTGAAACAACTTCATATCAATCACAATTCTTTAGAAATTCTTAAAGAGGATA
CTTTCCATGGACTGGAAAACCTGGAATTCCTGCAAGCAGATAACAATTTTATCACAGTGATTGAACCA
AGTGCCTTTAGCAAGCTCAACAGACTCAAAGTGTTAATTTTAAATGACAATGCTATTGAGAGTCTTCC
TCCAAACATCTTCCGATTTGTTCCTTTAACCCATCTAGATCTTCGTGGAAATCAATTACAAACATTGC
CTTATGTTGGTTTTCTCGAACACATTGGCCGAATATTGGATCTTCAGTTGGAGGACAACAAATGGGCC
TGCAATTGTGACTTATTGCAGTTAAAAACTTGGTTGGAGAACATGCCTCCACAGTCTATAATTGGTGA
TGTTGTCTGCAACAGCCCTCCATTTTTTAAAGGAAGTATACTCAGTAGACTAAAGAAGGAATCTATTT
GCCCTACTCCACCAGTGTATGAAGAACATGAGGATCCTTCAGGATCATTACATCTGGCAGCAACATCT
TCAATAAATGATAGTCGCATGTCAACTAAGACCACGTCCATTCTAAAACTACCCACCAAAGCACCAGG
TTTGATACCTTATAAATTACAGCCATCCACTCAACTTCCAGGACCTTACTGCCCTATTCCTTGTAACT
GCAAAGTCCTATCCCCATCAGGACTTCTAATACATTGTCAGGAGCGCAACATTGAAAGCTTATCAGAT
GCAAAGTCCTATCCCCATCAGGACTTCTAATACATTGTCAGGAGCGCAACATTGAAAGCTTATCAGAT
CTGAGACCTCCTCCGCAAAATCCTAGAAAGCTCATTCTAGCGGGAAATATTATTCACAGTTTAATGAA
GTCTGATCTAGTGGAATATTTCACTTTGGAAATGCTTCACTTGGGAAACAATCGTATTGAAGTTCTTG
AAGAAGGATCGTTTATGAACCTAACGAGATTACAAAAACTCTATCTAAATGGTAACCACCTGACCAAA
TTAAGTAAAGGCATGTTCCTTGGTCTCCATAATCTTGAATACTTATATCTTGAATACAATGCCATTAA
GGAAATACTGCCAGGAACCTTTAATCCAATGCCTAAACTTAAAGTCCTGTATTTAAATAACAACCTCC
TCCAAGTTTTACCACCACATATTTTTTCAGGGGTTCCTCTAACTAAGGTAAATCTTAAAACAAACCAG
TTTACCCATCTACCTGTAAGTAATATTTTGGATGATCTTGATTTACTAACCCAGATTGACCTTGAGGA
TAACCCCTGGGACTGCTCCTGTGACCTGGTTGGACTGCAGCAATGGATACAAAAGTTAAGCAAGAACA
CAGTGACAGATGACATCCTCTGCACTTCCCCCGGGCATCTCGACAAAAAGGAATTGAAAGCCCTAAAT
AGTGAAATTCTCTGTCCAGGTTTAGTAAATAACCCATCCATGCCAACACAGACTAGTTACCTTATGGT
CACCACTCCTGCAACAACAACAAATACGGCTGATACTATTTTACGATCTCTTACGGACGCTGTGCCAC
TGTCTGTTCTAATATTGGGACTTCTGATTATGTTCATCACTATTGTTTTCTGTGCTGCAGGGATAGTG
GTTCTTGTTCTTCACCGCAGGAGAAGATACAAAAAGAAACAAGTAGATGAGCAAATGAGAGACAACAG
TCCTGTGCATCTTCAGTACAGCATGTATGGCCATAAAACCACTCATCACACTACTGAAAGACCCTCTG
CCTCACTCTATGAACAGCACATGGTGAGCCCCATGGTTCATGTCTATAGAAGTCCATCCTTTGGTCCA
TCTTTTGGAACAGGAAAATCATTCACCACTCACAGGGTCAAATATGAAATACAAAACCACGAACCAAT
CAACAGAATTTTTATCCTTCCAAGATGCCAGCTCATTGTACAGAAACATTTTAGAAAAAGAAAGGGAA
ACATTATCCTGGAGCCCACGAAGAGCTGAAGTTAATGGACATTAATGTACTCACGTCACAAGGAAAGG
TATTAGTGGAACAGACAAAAAATGAGTATTTTGAACTTAAAGCTAATTTACATGCTGAACCTGACTAT
TTAGAAGTCCTGGAGCAGCAAACACTCGAGGCG

| | | | |
|---|---|---|---|
| NOV25r, CG55033-13 | | | |
| Protein Sequence | SEQ ID NO: 600 | 821 aa | MW at 92763.6kD |

QTPVLSSRGSCDSLCNCEEKDGTMLINCEAKGIKMVSEISVPPSRPFQLSLLNNGLTMLHTNDFSGLT
NAISIHLGFNNIADIEIGAFNGLGLLKQLHINHNSLEILKEDTFHGLENLEFLQADNNFITVIEPSAF
SKLNRLKVLILNDNAIESLPPNIFRFVPLTHLDLRGNQLQTLPYVGFLEHIGRILDLQLEDNKWACNC
DLLQLKTWLENMPPQSIIGDVVCNSPPFFKGSILSPLKKESICPTPPVYEEHEDPSGSLHLAATSSIN
DSRNSTKTTSILKLPTKAPGLIPYITKPSTQLPGPYCPIPCNCKVLSPSGLLIHCQERNIESLSDLRP
PPQNPRKLILAGNIIHSLMKSDLVEYFTLEMLHLGNNRIEVLEEGSFMNLTRLQKLYLNGNHLTKLSK
GMFLGLHNLEYLYLEYNAIKEILPGTFNPMPKLKVLYLNNNLLQVLPPHIFSGVPLTKVNLKTNQFTH
LPVSNILDDLDLLTQIDLEDNPWDCSCDLVGLQQWIQKLSKNTVTDDILCTSPGHLDKKELKALNSEI
LCPGLVNNPSMPTQTSYLMVTTPATTTNTADTILRSLTDAVPLSVLILGLLIMFITIVFCAAGIVVLV
LHRRRRYKKKQVDEQMRDNSPVHLQYSMYGHKTTHHTTERPSASLYEQHMVSPMVHVYRSPSFGPKHL
EEEEERNEKEGSDAKHLQRSLLEQENHSPLTGSNMKYKTTNQSTEFLSFQDASSLYRNILEKERELQQ
LGITEYLRKNIAQLQPDMEAHYPGAHEELKLMETLMYSRPRKVLVEQTKNEYFELKANLHAEPDYLEV
LEQQT

| | | |
|---|---|---|
| NOV25s, CG55033-14 | SEQ ID NO: 601 | 2548 bp |
| DNA Sequence | ORF Start: ATG at 14 | ORF Stop: TGA at 2537 |

CACCGGTACCACCATGAAGCTGTGGATTCATCTCTTTTATTCATCTCTCCTTGCCTGTATATCTTTAC
ACTCCCAAACTCCAGTGCTCTCATCCAGAGGCTCTTGTGATTCTCTTTGCAATTGTGAGGAAAAAGAT
GGCACAATGCTAATAAATTGTGAAGCAAAAGGTATCAAGATGGTATCTGAAATAAGTGTGCCACCATC
ACGACCTTTCCAACTAAGCTTATTAAATAACGGCTTGACGATGCTTCACACAAATGACTTTTCTGGGC
TTACCAATGCTATTTCAATACACCTTGGATTTAACAATATTGCAGATATTGAGATAGGTGCATTTAAT
GGCCTTGGCCTCCTGAAACAACTTCATATCAATCACAATTCTTTAGAAATTCTTAAAGAGGATACTTT
CCATGGACTGGAAAACCTGGAATTCCTGCAAGCAGATAACAATTTTATCACAGTGATTGAACCAAGTG
CCTTTAGCAAGCTCAACAGACTCAAAGTGTTAATTTTAAATGACAATGCTATTGAGAGTCTTCCTCCA
AACATCTTCCGATTTGTTCCTTTAACCCATCTAGATCTTCGTGGAAATCAATTACAAACATTGCCTTA
TGTTGGTTTTCTCGAACACATTGGCCGAATATTGGATCTTCAGTTGGAGGACAACAAATGGGCCTGCA
ATTGTGACTTATTGCAGTTAAAAACTTGGTTGGAGAACATGCCTCCACAGTCTATAATTGGTGATGTT
GTCTGCAACAGCCCTCCATTTTTTAAAGGAAGTATACTCAGTAGACTAAAGAAGGAATCTATTTGCCC
TACTCCACCAGTGTATGAAGAACATGAGGATCCTTCAGGATCATTACATCTGGCAGCAACATCTTCAA
TAAATGATAGTCGCATGTCAACTAAGACCACGTCCATTCTAAAACTACCCACCAAAGCACCAGGTTTG
ATACCTTATATTACAAAGCCATCCACTCAACTTCCAGGACCTTACTGCCCTATTCCTTGTAACTGCAA
AGTCCTATCCCCATCAGGACTTCTAATACATTGTCAGGAGCGCAACATTGAAAGCTTATCAGATCTGA
GACCTCCTCCGCAAAATCCTAGAAAGCTCATTCTAGCGGGAAATATTATTCACAGTTTAATGAAGTCT
GATCTAGTGGAATATTTCACTTTGGAAATGCTTCACTTGGGAAACAATCGTATTGAAGTTCTTGAAGA
AGGATCGTTTATGAACCTAACGAGATTGCAAAAACTCTATCTAAATGGTAACCACCTGACCAAATTAA
GTAAAGGCATGTTCCTTGGTCTCCATAATCTTGAATACTTATATCTTGAATACAATGCCATTAAGGAA
ATACTGCCAGGAACCTTTAATCCAATGCCTAAACTTAAAGTCCTGTATTTAAATAACAACCTCCTCCA
AGTTTTACCACCACATATTTTTTCAGGGGTTCCTCTAACTAAGGTAAATCTTAAAACAAACCAGTTTA
CCCATCTACCTGTAAGTAATATTTTGGATGATCTTGATTTACTAACCCAGATTGACCTTGAGGATAAC
CCCTGGGACTGCTCCTGTGACCTGGTTGGACTGCAGCAATGGATACAAAAGTTAAGCAAGAACACAGT
GACAGATGACATCCTCTGCACTTCCCCCGGGCATCTCGACAAAAAGGAATTGAAAGCCCTAAATAGTG
AAATTCTCTGTCCAGGTTTAGTAAATAACCCATCCATGCCAACACAGACTAGTTACCTTATGGTCACC
ACTCCTGCAACAACAACAAATACGGCTGATACTATTTTACGATCTCTTACGGACGCTGTGCCACTGTC
TGTTCTAATATTGGGACTTCTGATTATGTTCATCACTATTGTTTTCTGTGCTGCAGGGATAGTGGTTC
TTGTTCTTCACCGCAGGAGAAGATACAAAAAGAAACAAGTAGATGAGCAAATGAGAGACAACAGTCCT
GTGCATCTTCAGTACAGCATGTATGGCCATAAAACCACTCATCACACTACTGAAAGACCCTCTGCCTC
ACTCTATGAACAGCACATGGTGAGCCCCATGGTTCATGTCTATAGAAGTCCATCCTTTGGTCCAAAGC
ATCTGGAAGAGGAAGAAGAGAGGAATGAGAAAGAAGGAAGTGATGCAAAACATCTCCAAAGAAGTCTT
TTGGAACAGGAAAATCATTCACCACTCACAGGGTCAAATATGAAATACAAAACCACGAACCAATCAAC
AGAATTTTTATCCTTCCAAGATGCCAGCTCATTGTACAGAAACATTTTAGAAAAAGAAAGGGAACTTC
AGCAACTGGGAAATCACAGAATACCTAAGGAAAAACATTGCTCAGCTCCAGCCTGATATGGAGAACAT
TATCCTGGAGCCCACGAAGAGCTGAAGTTAATGGAAACATTAATGTACTCACGTCCAAGGAAGGTATT
AGTGGAACAGACAAAAAATGAGTATTTTGAACTTAAAGCTAATTTACATGCTGAACCTGACTATTTAG
AAGTCCTGGAGCAGCAAACATGACTCGAGGGC

| | | | |
|---|---|---|---|
| NOV25s, CG55033-14 | | | |
| Protein Sequence | SEQ ID NO: 602 | 1841 aa | MW at 95108.5kD |

MKLWIHLFYSSLLACISLHSQTPVLSSRGSCDSLCNCEEKDGTMLINCEAKGIKMVSEISVPPSRPFQ
LSLLNNGLTMLHTNDFSGLTNAISIHLGFNNIADIEIGAFNGLGLLKQLHINHNSLEILKEDTFHGLE
NLEFLQADNNFITVIEPSAFSKLNRLKVLILNDNAIESLPPNIFRFVPLTHLDLRGNQLQTLPYVGFL
EHIGRILDLQLEDNKWACNCDLLQLKTWLENMPPQSIIGDVVCNSPPFFKGSILSRLKKESICPTPPV
YEEHEDPSGSLHLAATSSINDSRMSTKTTSILKLPTKAPGLIPYITKPSTQLPGPYCPIPCNCKVLSP
SGLLIHCQERNIESLSDLRPPPQNPRKLILAGNIIHSLMKSDLVEYFTLEMLHLGNNRIEVLEEGSFM
NLTRLQKLYLNGNHLTKLSKGMFLGLHNLEYLYEYNAIKEILPGATFNPMPKLKVLYLNNNLLQVLPP
HIFSGVPLTKVNLKTNQFTHLPVSNILDDLDLLTQIDLEDNPWDCSCDLVGLQQWIQKLSKNTVTDDI
LCTSPGHLDKKELKALNSEILCPGLVNNPSMPTQTSYLMVTTPATTTNTADTILRSLTDAVPLSVLIL
GLLIMFITIVFCAAGIVVLVLHRRRRYKKKQVDEQMRDNSPVHLQYSMYGHKTTHHTTERPSASLYEQ
HMVSPMVHVYRSPSFGPKHLEEEEERNEKEGSDAKHLQRSLLEQENHSPLTGSNMKYKTTNQSTEFLS
FQDASSLYRNILEKERELQQLGITEYLRKNIAQLQPDMEAHYPGAHEELKLMETLMYSRPRKVLVEQT
KNEYFELKANLHAEPDYLEVLEQQT

[0496] A ClustalW comparison of the above protein sequences yields the following sequence alignment shown in Table 25B.

TABLE 25B
Comparison of the NOV25 protein sequences.

NOV25a ------------------------------------------------------------
NOV25b MKLWIHLFYSSLLACISLHSQTPVLSSRGSCDSLCNCEEKDGTMLINCEAKGIKIMVSEIS
NOV25c ------------------------------------------------------------
NOV25d ------------------------------------------------------------
NOV25e ------------------------------------------------------------
NOV25f ----------------RGTKWACNCDLLQLKTWLENMPPQSIIGDVVCNSPPFFKGSILS
NOV25g ----------------RGTKWACNCDLLQLKTWLENMPPQSIIGDVVCNSPPFFKGSILS
NOV25h ------------------------------------------------------------
NOV25i ------------------------------------------------------------
NOV25j ------------------------------------------------------------
NOV25k ------------------------------------------------------------
NOV25l ------------------------------------------------------------
NOV25m ------------------------------------------------------------
NOV25n ------------------------------------------------------------
NOV25o ------------------------------------------------------------
NOV25p ------------------------------------------------------------
NOV25q ------------------------------------------------------------
NOV25r ------------------------------------------------------------
NOV25s ------------------------------------------------------------
NOV25a ----------------------------------------MKLWIHLFYSSLLACISLHS
NOV25b VPPSRPFQLSLLNNGLTMLHTNDFSGLTNAISIHLGFNNIADIEIGAFNGLGLLKQLHIN
NOV25c ------------------------------------------------------------
NOV25d ------------------------------------------------------------
NOV25e ------------------------------------------------------------
NOV25f RLKKESICPTPPVYEEHEDPSGSLHLAATSSINDSRMSTKTTSILKLPTKAPGLIPYITK
NOV25g RLKKESICPTPPVYEEHEDPSGSLHLAATSSINDSRMSTKTTSILKLPTKAPGLIPYITK
NOV25h RLKKESICPTPPVYEEHEDPSGSLHLAATSSINDSRMSTKTTSILKLPTKAPGLIPYITK
NOV25i RLKKESICPTPPVYEEHEDPSGSLHLAATSSINDSRMSTKTTSILKLPTKAPGLIPYITK
NOV25j RLKKESICPTPPVYEEHEDPSGSLHLAATSSINDSRMSTKTTSILKLPTKAPGLIPYITK
NOV25k ----------------------------------------MKLWIHLFYSSLLACISLHS
NOV25l ------------------------------------------------------------
NOV25m ------------------------------------------------------------
NOV25n ----------------------------------------MKLWIHLFYSSLLACISLHS
NOV25o --------------------------------------------DSLFYSSLLACISLHS
NOV25p ------------------------------------------------------------
NOV25q ------------------------------------------------------------
NOV25r ------------------------------------------------------------
NOV25s ----------------------------------------MKLWIHLFYSSLLACISLHS
NOV25a QTPVLSSRGSCDSLCNCEEKDGTMLINCEAKGIKMVSEISVPPSRPFQLSLLNNGLTMLH
NOV25b HNSLEILKEDTFHGLENLEFLQADNNFITVIEPSAFSKLNRLKVLILNDNAIESLPPNIF
NOV25c -----------------------MLINCEAKGIKMVSEISVPPSRPFQLSLLNNGLTMLH
NOV25d ------------------------------------------------------------
NOV25e -------------------TSRTMLINCEAKGIKMVSEISVPPSRPFQLSLLNNGLTMLH
NOV25f PSTQLPGPYCPIPCNCKVLSPSGLLIHCQERNIESLSDLRPPPQNPRKLILAGNIIHSLM
NOV25g PSTQLPGPYCPIPCNCKVLSPSGLLIHCQERNIESLSDLRPPPQNPRKLILAGNIIHSLM
NOV25h -------------------RGTTMLINCEAKGIKMVSEISVPPSRPFQLSLLNNGLTMLH
NOV25i -----------------------MLINCEAKGIKMVSEISVPPSRPFQLSLLNNGLTMLH
NOV25j -----------------------MLINCEAKGIKMVSEISVPPSRPFQLSLLNNGLTMLH
NOV25k QTPVLSSRGSCDSLCNCEEKDGTMLINCEAKGIKMVSEISVPPSRPFQLSLLNNGLTMLH
NOV25l -----------------------MLINCEAKGIKMVSEISVPPSRPFQLSLLNNGLTMLH
NOV25m -----------------------MLINCEAKGIKMVSEISVPPSRPFQLSLLNNGLTMLH
NOV25n QTPVLSSRGSCDSLCNCEEKDGTMLINCEAKGIKMVSEISVPPSRPFQLSLLNNGLTMIH
NOV25o QTPVLSSRGSCDSLCNCEEKDGTMLINCEAKGIKMVSEISVLPSRPFQLSLLNNGLTMLH
NOV25p QTPVLSSRGSCDSLCNCEEKDGTMLINCEAKGIKMVSEISVPPSRPFQLSLLNNGLTMLH
NOV25q QTPVLSSRGSCDSLCNCEEKDGTMLINCEAKGIKMVSEISVPPSRPFQLSLLNNGLTMLH
NOV25r QTPVLSSRGSCDSLCNCEEKDGTMLINCEAKGIKMVSEISVPPSRPFQLSLLNNGLTMLH
NOV25s QTPVLSSRGSCDSLCNCEEKDGTMLINCEAKGIKMVSEISVPPSRPFQLSLLNNGLTMLH
NOV25a TNDFSGLTNAISIHLGFNNIADIEIGAFNGLGLLKQLHINHNSLEILKEDTFHGLENLEF
NOV25b RFVPLTHLDLRGNQLQTLPYVGFLEHIGRILDLQLEDNKWACNCDLLQLKTWLENMPPQS
NOV25c TNDFSGLTNAISIHLGFNNIADIEIGAFNGLGLLKQLHINHNSLEILKEDTFHGLENLEF
NOV25d ------------------------------------------------------------
NOV25e TNDFSGLTNAISIHLGFNNIADIEIGAFNGLGLLKQLHINHNSLEILKEDTFHGLENLEF
NOV25f KSDLVEYFTLEMLHLGNNRIEVLEEGSFMNLTRLQKLYLNGNHLTKLSKGMFLGLHNLEY
NOV25g KSDLVEYFTLEMLHLGNNRIEVLEEGSFMNLTRLQKLYLNGNHLTKLSKGMFLGLHNLEY
NOV25h TNDFSGLTNAISIHLGFNNIADIEIGAFNGLGLLKQLHINHNSLEILKEDTFHGLENLEF
NOV25i TNDFSGLTNAISIHLGFNNIADIEIGAFNGLGLLKQLHINHNSLEILKEDTFHGLENLEF
NOV25j TNDFSGLTNAISIHLGFNNIADIEIGAFNGLGLLKQLHINNNSLEILKEDTFHGLENLEF
NOV25k TNDFSGLTNAISIHLGFNNIADIEIGAFNGLGLLKQLHINHNSLEILKEDTFHGLENLEF
NOV25l TNDFSGLTNAISIHLGFNNIADIEIGAFNGLGLLKQLHINHNSLEILKEDTFHGLENLEF
NOV25m TNDFSGLTNAISIHLGFNNIADIEIGAFNGLGLLKQLHINHNSLEILKEDTFHGLENLEF
NOV25n TNDFSGLTNAISIHLGFNNIADIEIGAFNGLGLLKQLHINHNSLEILKEDTFHGLENLEF
NOV25o TNDFSGLTNAISIHLGFNNIADIEIGAFNGLGLLKQLHINHNSLEILKEDTFHGLENLEF
NOV25p ThDFSGLTNAISIHLGFNNIADIEIGAFNGLGLLKQLHINHNSLEILKEDTFHGLENLEF
NOV25q TNDFSGLTNAISIHLGFNNIADIEIGAFNGLGLLKQLHINNNSLEILKEDTFHGLENLEF
NOV25r TNDFSGLTNAISIHLGFNNIADIEIGAFNGLGLLKQLHINHNSLEILKEDTFHGLENLEF
NOV25s TNDFSGLTNAISIHLGFNNIADIEIGAFNGLGLLKQLHINHNSLEILKEDTFHGLENLEF
NOV25a LQADNNFITVIEPSAFSKLNRLKVLILNDNATESLPPNIFRFVPLTHLDLRGNQLQTLPY
NOV25b IIGDVVCNSPPFFKGSILSRLKKESICPTPPVYEEHEDPSGSLHLAATSSINDSRMSTKT
NOV25c LQADNNFITVIEPSAFSKLNRLKVLILNDNAIESLPPNIFRFVPLTHLDLRGNQLQTLPY
NOV25d ------------------------------------------------------------
NOV25e LQADNNFITVIEPSAFSKLNRLKVLILNDNAIESLPPNIFRFVPLTHLDLRGNQLQTLPY
NOV25f LYLEYNAIKEILPGTFNPMPKLKVLYLNNNLLQVLPPHIFSGVPLTKVNLKTNQFTHLPV
NOV25g LYLEYNAIKEILPGTFNPMPKLKVLYLNNNLLQVLPPHIFSGVPLTKVNLKTNQFTHLPV
NOV25h LQADNNFITVIEPSAFSKLNRLKVLILNDNAIESLPPNIFRFVPLTHLDLRGNQLQTLPY
NOV25i LQADNNFITVIEPSAFSKLNRLKVLILNDNAIESLPPNIFRFVPLTHLDLRGNQLQTLPY
NOV25j LQADNNFITVIEPSAFSKLNRLKVLILNDNAIESLPPNIFRFVPLTHLDLRGNQLQTLPY
NOV25k LQADNNFITVIEPSAFSKLNRLKVLILNDNAIESLPPNIFRFVPLTHLDLRGNQLQTLPY
NOV25l LQADNNFITVIEPSAFSKLNRLKVLILNDNAIESLPPNIFRFVPLTHLDLRGNQLQTLPY
NOV25m LQADNNFITVIEPSAFSKLNRLKVLILNDNAIESLPPNIFRFVPLTHLDLRGNQLQTLPY
NOV25n LQADNNFITVIEPSAFSKLNRLKVLILNDNAIESLPPNIFRFVPLTHLDLRGNQLQTLPY
NOV25o LQADNNFITVIEPSAFSKLNRLKVLILNDNAIESLPPNIFRFVPLTHLDLRGNQLQTLPY
NOV25p LQADNNFITVIEPSAFSKLNRLKVLILNDNAIESLPPNIFRFVPLTHLDLRGNQLQTLPY
NOV25q LQADNNFITVIEPSAFSKLNRLKVLILNDNAIESLPPNIFRFVPLTHLDLRGNQLQTLPY
NOV25r LQADNNFITVIEPSAFSKLNRLKVLILNDNAIESLPPNIFRFVPLTHLDLRGNQLQTLPY
NOV25s LQADNNFITVIEPSAFSKLNRLKVLILNDNAIESLPPNIFRFVPLTHLDLRGNQLQTLPY
NOV25a VGFLEHIGRILDLQLEDNKWACNCDLLQLKTWLENMPPQSIIGDVVCNSPPFFKGSILSR
NOV25b TSILKLPTKAPQIDLEDNPWDCSCDLVGLQQWIQKLSKNTVTDDILCTSPGHLDKKELKA
NOV25c VGFLEHIGRILDLQLEDNKWACNCDLLQLKTWLENMPPQSIIGDVVCNSPPFFKGSILSR
NOV25d ---------------RGTPWDCSCDLVGLQQWIQKLSKNTVTDDILCTSPGHLDKKELKA
NOV25e VGFLEHIGRILDLQLEDNKWACNCDLLQLKTWLENMPPQSIIGDVVCNSPPFFKGSILSR
NOV25f SNILDDLDLLTQIDLEDNPWDCSCDLVGLQQWIQKLSKNTVTDDILCTSPGHLDKKELKA
NOV25g SNILDDLDLLTQIDLEDNPWDCSCDLVGLQQWIQKLSKNTVTDDILCTSPGHLDKKELKA
NOV25h VGFLEHIGRILDLQLEDNKWACNCDLLQLKTWLENMPPQSIIGDVVCNSPPFFKGSILSR
NOV25i VGFLEHIGRILDLQLEDNKWACNCDLLQLKTWLENMPPQSIIGDVVCNSPPFFKGSILSR
NOV25j VGFLEHIGRILDLQLEDNKWACNCDLLQLKTWLENMPPQSIIGDVVCNSPPFFKGSILSR
NOV25k VGFLEHIGRILDLQLEDNKWACNCDLLQLKTWLENMPPQSIIGDVVCNSPPFFKGSILSR
NOV25l VGFLEHIGRILDLQLEDNKWACNCDLLQLKTWLENMPPQSIIGDVVCNSPPFFKGSILSR
NOV25m VGFLEHIGRILDLQLEDNKWACNCDLLQLKTWLENMPPQSIIGDVVCNSPPFFKGSILSR
NOV25n VGFLEHIGRILDLQLEDNKWACNCDLLQLKTWLENMPPQSIIGDVVCNSPPFFKGSILSR
NOV25o VGFLEHIGRILDLQLEDNKWACNCDLLQLKTWLENMPPQSIIGDVVCNSPPFFKGSILSR
NOV25p VGFLEHIGRILDLQLEDNKWACNCDLLQLKTWLENMPPQSIIGDVVCNSPPFFKGSILSR
NOV25q VGFLEHIGRILDLQLEDNKWACNCDLLQLKTWLENMPPQSIIGDVVCNSPPFFKGSILSR
NOV25r VGFLEHIGRILDLQLEDNKWACNCDLLQLKTWLENMPPQSIIGDVVCNSPPFFKGSILSR
NOV25s VGFLEHIGRILDLQLEDNKWACNCDLLQLKTWLENMPPQSIIGDVVCNSPPFFKGSILSR
NOV25a LKKESICPTPPVYEEHEDPSGSLHLAATSSINDSRMSTKTTSILKLPTKAPGLIPYITKP
NOV25b LNSEILCPGLVNNPSMPTQTSYLMVTTPATTTNTADTILRSLTDAVPLSVLILGLLIMFI
NOV25c LKKESICPTPPVYEEHEDPSGSLHIAATSSINDSRMSTKTTSILKLPTKAPGLIPYITKP
NOV25d LNSEILCPGLVNNPSMPTQTSYLMVTTPATTTNTADTILRSLTDAVPLSVLILGLLIMFI
NOV25e LKKESICPTPPVYEEHEDPSGSLHLAATSSINDSRMSTKTTSILKLPTKAPGLIPYITKP
NOV25f LNSEILCPGLVNNPSMPTQTSYLMVTTPATTTNTADTILRSLTDAVPLSVLILGLLIMFI
NOV25g LNSEILCPGLVNNPSMPTQTSYLMVTTPATTTNTADTILRSLTDAVPLSVLILGLLIMFI
NOV25h LKKESICPTPPVYEEHEDPSGSLHLAATSSINDSRMSTKTTSILKLPTKAPGLIPYITKP
NOV25i LKKESICPTPPVYEEHEDPSGSLHLAATSSINDSRMSTKTTSILKLPTKAPGLIPYITKP
NOV25j LKKESICPTPPVYEEHEDPSGSLHLAATSSINDSRISTKTTSILKLPTKAPGLIPYITKP
NOV25k LKKESICPTPPVYEEHEDPSGSLHLAATSSINDSRMSTKTTSILKLPTKAPGLIPYITKP
NOV25l LKKESICPTPPVYEEHEDPSGSLHLAATSSINDSRMSTKTTSILKLPTKAPGLIPYITKP
NOV25m LKKESICPTPPVYEEHEDPSGSLHLAATSSINDSRMSTKTTSILKLPTKAPGLIPYITKP
NOV25n LKKESICPTPPVYEEHEDPSGSLHTAATSSINDSRMSTKTTSILKLPTKAPGLIPYITKP
NOV25o LKKESICPTPPVYEEHEDPSGSLHLAATSSINDSRMSTKTTSILKLPTKAPGLIPYITKP
NOV25p LKKESICPTPPVYEEHEDPSGSLHLAATSSINDSRMSTKTTSILKLPTKAPGLIPYITKP
NOV25q LKKESICPTPPVYEEHEDPSGSLHLAATSSINDSRMSTKTTSILKLPTKAPGLIPYITKP
NOV25r LKKESICPTPPVYEEHEDPSGSLHLAATSSINDSRMSTKTTSILKLPTKAPGLIPYITKP
NOV25s LKKESICPTPPVYEEHEDPSGSLHLAATSSINDSRMSTKTTSILKLPTKAPGLIPYITKP
NOV25a STQLPGPYCPIPCNCKVLSPSGLLIHCQERN---------IESLSDLRPPPQNPRKLILA
NOV25b TIVFCAAGIVVLVLHRRRRYKKKQVDEQMRDNSPVHLQYSMYGHKTTHHTTERPSASLYE
NOV25c STQLPGPYCPIPCNCKVLSPSGLLIHCQERN---------IESLSDLRPPPQNPRKLILA
NOV25d TIVFCAAGIVVLVLHRRRRYKKKQVDEQMRDNSPVHLQYSMYGHKTTHHTTERPSASLYE
NOV25e STQLPGPYCPIPCNCKVLSPSGLLIHCQERN---------IESLSDLRPPPQNPRKLILA
NOV25f TIVFCAAGIVVLVLHRRRRYKKKQVDEQMRDNSPVHLQYSMYGHKTTHHTTERPSASLYE
NOV25g TIVFCAAGIVVLVLHRRRRYKKKQVDEQMRDNSPVHLQYSMYGHKTTHHTTERPSASLYE
NOV25h STQLPGPYCPIPCNCKVLSPSGLLIHCQERN---------IESLSDLRPPPQNPRKLILA
NOV25i STQLPGPYCPIPCNCKVLSPSGLLIHCQEPN---------IESLSDLRPPPQNPRKLILA
NOV25j STQLPGPYCPIPCNCKVLSPSGLLIHCQERN---------IESLSDLRPPPQNPRKLILA
NOV25k STQLPGPYCPIPCNCKVLSPSGLLIHCQERN---------IESLSDLRPPPQNPRKLILA
NOV25l STQLPGPYCPIPCNCKVLSPSGLLIHCQERN---------IESLSDLRPPPQNPRKLILA
NOV25m STQLPGPYCPIPCNCKVLSPSGLLIHCQERN---------IESLSDLRPPPQNPRKLILA
NOV25n STQLPGPYCPIPCNCKVLSPSGLLIHCQERN---------IESLSDLRPPPQNPRXLILA
NOV25o STQLPGPYCPIPCNCKVLSPSGLLIHCQERN---------IESLSDLRPPPQNPRKLILA
NOV25p STQLPGPYCPIPCNCKVLSPSGLLIHCQERN---------IESLSDLRPPPQNPRKLILA
NOV25q STQLPGPYCPIPCNCKVLSPSGLLIHCQERN---------IESLSDLRPPPQNPRKLILA
NOV25r STQLPGPYCPIPCNCKVLSPSGLLIHCQERN---------IESLSDLRPPPQNPRKLILA
NOV25s STQLPGPYCPIPCNCKVLSPSGLLIHCQERN---------IESLSDLRPPPQNPRKLILA
NOV25a GNIIHSLMK---------------------------------------------------
NOV25b QHMVSPMVHVYR------------------------------------------------
NOV25c GNIIHSLMKSDLVEYFTLEMLHLGNNRIEVLEEGSFNNLTRLQKLYLNGNHLTKLSKGMF
NOV25d QHMVSPMVHVYR------------------------------------------------
NOV25e GNIIHSLMKS--------------------------------------------------
NOV25f QHMVSPMVHVYR------------------------------------------------
NOV25g QHMVSPMVHVYR------------------------------------------------
NOV25h GNIIHSLMKSDLVEYFTLEMLHLGNNRIEVLEEGSFTNLTRLQKLYLNGNHLTKLSKGMF
NOV25i GNIIHSLNKS--------------------------------------------------
NOV25j GNIIHSLMKS--------------------------------------------------
NOV25k GNIIHSLMKSDLVEYFTLEMLHLGNNRIEVLEEGSFTNLTRLQKLYLNGNHLTKLSKGMF
NOV25l GNIIHSLMKS--------------------------------------------------
NOV25m GNIIHSLMKS--------------------------------------------------
NOV25n GNIIHSLMKS--------------------------------------------------
NOV25o GNIIHSLMKS--------------------------------------------------
NOV25p GNIIHSLMKS--------------------------------------------------
NOV25q GNIIHSLMKS--------------------------------------------------
NOV25r GNIIHSLMKS--------------------------------------------------
NOV25s GNIIHSLMKS--------------------------------------------------
NOV25a ------------------------------------------------------------
NOV25b ------------------------------------------------------------
NOV25c LGLHNLEYLYLEYNAIKEILPGTFNPMPKLKVLYLNNNLLQVLPPHIFSGVPLTKVNLKT
NOV25d ------------------------------------------------------------
NOV25e ------------------------------------------------------------
NOV25f ------------------------------------------------------------
NOV25g ------------------------------------------------------------
NOV25h LGLHNLEYLYLEYNAIKEILPGTFNPMPKLKVLYLNNNLLQVLPPHIFSGVPLTKVNLKT
NOV25i ------------------------------------------------------------
NOV25j ------------------------------------------------------------
NOV25k LGLHNLEYLYLEYNAIKEILPGTFNPMPKLKVLYLNNNLLQVLPPHIFSGVPLTKVNLKT
NOV25l ------------------------------------------------------------
NOV25m ------------------------------------------------------------
NOV25n ------------------------------------------------------------
NOV25o ------------------------------------------------------------
NOV25p ------------------------------------------------------------
NOV25q ------------------------------------------------------------
NOV25r ------------------------------------------------------------
NOV25s ------------------------------------------------------------
NOV25a ------------------------------------------------------------
NOV25b ------------------------------------------------------------
NOV25c NQFTHLPVSNILDDLDLLTQIDLEDNPWDCSCDLVGLQQWIQKLSKNTVTDDILCTSPGH
NOV25d ------------------------------------------------------------
NOV25e ------------------------------------------------------------
NOV25f ------------------------------------------------------------
NOV25g ------------------------------------------------------------
NOV25h NQFTHLPVSNILDDLDLLTQIDLEDNPWDCSCDLVGLQQWIQKLSKNTVTDDILCTSPGH
NOV25i ------------------------------------------------------------
NOV25j ------------------------------------------------------------
NOV25k NQFTHLPVSNILDDLDLLTQIDLEDNPWDCSCDLVGLQQWIQKLSKNTVTDDILCTSPGH
NOV25l ------------------------------------------------------------
NOV25m ------------------------------------------------------------
NOV25n ------------------------------------------------------------
NOV25o ------------------------------------------------------------
NOV25p ------------------------------------------------------------
NOV25q ------------------------------------------------------------
NOV25r ------------------------------------------------------------
NOV25s ------------------------------------------------------------
NOV25a ------------------------------------------------------------
NOV25b ------------------------------------------------------------
NOV25c LDKKELKALNSEILCPGLVNNPSMPTQTSYLMVTTPATTTNTADTILRSLTDAVPLSVLI
NOV25d ------------------------------------------------------------
NOV25e ------------------------------------------------------------
NOV25f ------------------------------------------------------------
NOV25g ------------------------------------------------------------
NOV25h LDKKELKALNSEILCPGLVNNPSMPTQTSYLNVTTPATTTNTADTILRSLTDAVPLSVLI
NOV25i ------------------------------------------------------------
NOV25j ------------------------------------------------------------
NOV25k LDKKELKALNSEILCPGLVNNPSMPTQTSYLMVTTPATTTNTADTILRSLTDAVPLSVLI
NOV25l ------------------------------------------------------------
NOV25m ------------------------------------------------------------
NOV25n ------------------------------------------------------------
NOV25o ------------------------------------------------------------
NOV25p ------------------------------------------------------------
NOV25q ------------------------------------------------------------
NOV25r ------------------------------------------------------------
NOV25s ------------------------------------------------------------
NOV25a ------------------------------------------------------------
NOV25b ------------------------------------------------------------
NOV25c LGLLIMFITIVFCAAGIVVLVLHRRRRYKKKQVDEQMRDNSPVHLQYSMYGHKTTHHTTE
NOV25d ------------------------------------------------------------
NOV25e ------------------------------------------------------------
NOV25f ------------------------------------------------------------
NOV25g ------------------------------------------------------------
NOV25h LGLLIMFITIVFCAAGIVVLVLHRRRRYKKKQVDEQMRDNSPVHLQYSMYGHKTTHHTTE
NOV25i ------------------------------------------------------------
NOV25j ------------------------------------------------------------
NOV25k LGLLIMFITIVFCAAGIVVLVLHRRRRYKKKQVDEQMRDNSPVHLQYSMYGHKTTHHTTE
NOV25l ------------------------------------------------------------
NOV25m ------------------------------------------------------------
NOV25n ------------------------------------------------------------
NOV25o ------------------------------------------------------------
NOV25p ------------------------------------------------------------
NOV25q ------------------------------------------------------------
NOV25r ------------------------------------------------------------
NOV25s ------------------------------------------------------------
NOV25a --------------------SPSFGPKHLEEEEE---RN----EKEGSDAKHLQRSLLEQ
NOV25b --------------------SPSFGPKHLEEEEE---RN----EKEGSDAKHLQRSLLEQ
NOV25c RPSASLYEQHMVSPMVHVYRSPSFGPKHLEEEEE---RN----EKEGSDAKHLQRSLLEQ
NOV25d --------------------SPSFGPKHLEEEEE---RN----EKEGSDAKHLQRSLLEQ
NOV25e -----------DLVEYFTLEMLHLGNNRIEVLEEGSFMNLTRLQKLYLNGNHLTKLSKGM
NOV25f --------------------SPSFGPKHLEEEEE---RN----EKEGSDAKHLQRSLLEQ
NOV25g --------------------SPSFGPKHLEEEEE---RN----EKEGSDAKHLQRSLLEQ
NOV25h RPSASLYEQHMVSPMVHVYRSPSFGPKHLEEEEE---RN----EKEGSDAKHLQRSLLEQ
NOV25i -----------DLVEYFTLEMLHLGNNRIEVLEEGSFMNLTRLQKLYLNGNHLTKLSKGM
NOV25j -----------DLVEYFTLEMLHLGNNRIEVLEEGSFMNLTRLQKLYLNGNHLTKLSKGM
NOV25k RPSASLYEQHMVSPMVHVYRSPSFGPKHLEEEEE---RN----EKEGSDAKHLQRSLLEQ
NOV25l -----------DLVEYFTLEMLHLGNNRIEVLEEGSFMNLTRLQKLYLNGNHLTKLSKGM
NOV25m -----------DLVEYFTLEMLHLGNNRIEVLEEGSFMNLTRLQKLYLNGNHLTKLSKGM
NOV25n -----------DLVEYFTLEMLHLGNNRIEVLEEGSFMNLTRLQKLYLNGNHLTKLSKGM
NOV25o -----------DLVEYFTLEMLHLGNNRIEVLEEGSFMNLTRLQKLYLNGNHLTKLSKGM
NOV25p -----------DLVEYFTLEMLHLGNNRIEVLEEGSFMNLTRLQKLYLNGNHLTKLSKGM
NOV25q -----------DLVEYFTLEMLHLGNNRIEVLEEGSFMNLTRLQKLYLNGNHLTKLSKGM
NOV25r -----------DLVEYFTLEMLHLGNNRIEVLEEGSFMNLTRLQKLYLNGNHLTKLSKGM
NOV25s -----------DLVEYFTLEMLHLGNNRIEVLEEGSFMNLTRLQKLYLNGNHLTKLSKGM
NOV25a EN----------------------HSPLTGSNMKYKTTNQSTEFLSFQDASSLYRNILEK
NOV25b EN----------------------HSPLTGSNMKYKTTNQSTEFLSFQDASSLYRNILEK
NOV25c EN----------------------HSPLTGSNNKYKTTNQSTEFLSFQDASSLYRNILEK
NOV25d EN----------------------HSPLTGSNMKYKTTNQSTEFLSFQDASSLYENILEK
NOV25e FLGLHNLEYLYLEYNAIKEILPGTFNPMPKLKVLYLNNNLLQVLPPHIFSGVPLTKVNLK
NOV25f EN----------------------HSPLTGSNMKYKTTNQSTEFLSFQDASSLYRNILEK
NOV25g EN----------------------HSPLTGSNMKYKTTNQSTEFLSFQDASSLYRNILEK
NOV25h EN----------------------HSPLTGSNMKYKTTNQSTEFLSFQDASSLYRNILEK
NOV25i FLGLHNLEYLYLEYNAIKEILPGTFNPMPKLKVLYLNNNLLQVLPPHIFSGVPLTKVNLK
NOV25j FLGLHNLEYLYLEYNAIKEILPGTFNPMPKLKVLYLNNNLLQVLPPHIFSGVPLTKVNLK
NOV25k EN----------------------HSPLTGSNMKYKTTNQSTEFLSFQDASSLYRNILEK
NOV25l FLGLHNLEYLYLEYNAIKEILPGTFNPMPKLKVLYLNNNLLQVLPPHIFSGVPLTKVNMC
NOV25m FLGLHNLEYLYLEYNAIKEILPGTFNPMPKLKVLYLNNNLLQVLPPHIFSGVPLTKVNLK
NOV25n FLGLHNLEYLYLEYNAIKEILPGTFNPMPKLKVLYLNNNLLQVLPPHIFSGVPLTKVNLK
NOV25o FLGLHNLEYLYLEYNAIKEILPGTFNPMPKLKVLYLNNNLLQVLPPHIFSGVPLTKVNLK
NOV25p FLGLHNLEYLYLEYNAIKEILPGTFNPMPKLKVLYLNNNLLQVLPPHIFSGVPLTKVNLK
NOV25q FLGLHNLEYLYLEYNAIKEILPGTFNPMPKLKVLYLNNNLLQVLPPHIFSGVPLTKVNLK
NOV25r FLGLHNLEYLYLEYNAIKEILPGTFNPMPKLKVLYLNNNLLQVLPPHIFSOVPLTKVNLK
NOV25s FLGLHNLEYLYLEYNAIKEILPGTFNPMPKLKVLYLNNNLLQVLPPHIFSGVPLTKVNLK
NOV25a ERELQQLGITEYLRKNIAQLQPDMEAHYPGAHEELKLMETLMYSRPR-------------
NOV25b ERELQQLGITEYLRKNIAQLQPDMEAHYPGAHEELKLMETLMYSRPR-------------
NOV25c ERELQQLGITEYLRKNIAQLQPDMEAHYPGAHEELKLMETLMYSRPR-------------
NOV25d ERELQQLGITEYLRKNIAQLQPDMEAHYPGAHEELKLMETLMYSRPR-------------
NOV25e TNQFTHLPVSNILDDLDLLTQIDLEDNPWDCSCDLVGLQQWIQKLSKNTVTDDILCTSPG
NOV25f ERELQQLGITEYLRKNIAQLQPDMEAHYPGAHEELKLMETLMYSRPR-------------
NOV25g ERELQQLGITEYLRKNIAQLQPDMEAHYPGAHEELKLMETLMYSRPR-------------
NOV25h ERELQQLGITEYLRKNIAQLQPDMEAHYPGAHEELKLMETLMYSRPR-------------
NOV25i TNQFTHLPVSNILDDLDLLTQIDLEDNPWDCSCDLVGLQQWIQKLSKNTVTDDILCTSPG
NOV25j TNQFTHLPVSNILDDLDLLTQIDLEDNPWDCSCDLVGLQQWIQKLSKNTVTDDILCTSPG
NOV25k ERELQQLGITEYLRKNIAQLQPDMEAHYPGAHEELKLMETLMYSRPR-------------
NOV25l TNQFTHLPVSNILDDLDLLTQIDLEDNPWDCSCDLVGLQQWIQKLSKNTVTDDILCTSPG
NOV25m TNQFTHLPVSNILDDLDLLTQIDLEDNPWDCSCDLVGLQQWIQKLSKNTVTDDILCTSPG
NOV25n TNQFTHLPVSNILDDLDLLTQIDLEDNPWDCSCDLVGLQQWIQKLSKNTVTDDILCTSPG
NOV25o TNQFTHLPVSNILDDLDLLTQIDLEDNPWDCSCDLVGLQQWIQKLSKNTVTDDILCTSPG
NOV25p TNQFTHLPVSNILDDLDLLTQIDLEDNPWDCSCDLVGLQQWIQKLSKNTVTDDILCTSPG
NOV25q TNQFTHLPVSNILDDLDLLTQIDLEDNPWDCSCDLVGLQQWIQKLSKNTVTDDILCTSPG
NOV25r TNQFTHLPVSNILDDLDLLTQIDLEDNPWDCSCDLVGLQQWIQKLSKNTVTDDILCTSPG
NOV25s TNQFTHLPVSNILDDLDLLTQIDLEDNPWDCSCDLVGLQQWIQKLSKNTVTDDILCTSPG
NOV25a -------KVLVEQTKNEYFELKANLHAEPDYLEVLEQQT---------------------
NOV25b -------KVLVEQTKNEYFELKANLHAEPDYLEVLEQQT---------------------
NOV25c -------KVLVEQTKNEYFELKANLHAEPDYLEVLEQQT---------------------
NOV25d -------KVLVEQTKNEYFELKANLHAEPDYLEVLEQQTLEA------------------
NOV25e HLDKKELKALNSEILCPGLVNNPSMPTQTSYLMVTVDG----------------------
NOV25f -------KVLVEQTKNEYFELKANLHAEPDYLEVLEQQTLEA------------------
NOV25g -------KVLVEQTKNEYFELKANLHAEPDYLEVLEQQTLEA------------------
NOV25h -------KVLVEQTKNEYFELKANLHAEPDYLEVLEQQTLEAKGEFQH------------
NOV25i HLDKKELKALNSEILCPGLVNNPSMPTQTSYLMBT-------------------------
NOV25j HLDKKELKALNSETLCPGLVNNPSMPTQTSYLMVTTPATTTNTADTILR-----------
NOV25k -------KVLVEQTKNEYFELKANLHAEPDYLEVLEQQT---------------------
NOV25l HLDKKELKALNSEILCPGLVNNPSMPTQTSYLMVT-------------------------
NOV25m HLDKKELKALNSEILCPGLVNNPSMPTQTSYLMVT-------------------------
NOV25n HLDKKELKALNSEILCPGLVNNPSMPTQTSYLMVTTPATTTNTADTILRSLTDAVPLSVL
NOV25o HLDKKELKALNSEILCPGLVNNPSMPTQTSYLMVTTPATTTNTADTILRSLTDAVPLSVL
NOV25p HLDKKELKALNSEILCPGLVNNPSMPTQTSYLMVTTPATTTNTADTILRS----------
NOV25q HLDKKELKALNSETLCPGLVNNPSMPTQTSYLMVTTPATTTNTADTILRS----------
NOV25r HLDKKELKALNSEILCPGLVNNPSMPTQTSYLMVTTPATTTNTADTILRSLTDAVPLSVL
NOV25s HLDKKELKALNSEILCPGLVNNPSMPTQTSYLMVTTPATTTNTADTILRSLTDAVPLSVL
NOV25a ------------------------------------------------------------
NOV25b ------------------------------------------------------------
NOV25c ------------------------------------------------------------
NOV25d ------------------------------------------------------------
NOV25e ------------------------------------------------------------
NOV25f ------------------------------------------------------------
NOV25g ------------------------------------------------------------
NOV25h ------------------------------------------------------------
NOV25i ------------------------------------------------------------
NOV25j ------------------------------------------------------------
NOV25k ------------------------------------------------------------
NOV25l ------------------------------------------------------------
NOV25m ------------------------------------------------------------
NOV25n ILGLLIMFITIVFCAAGIVVLVLHRRRRYKKKQVDEQMRDNSPVHLQYSMYGHKTTHHTT
NOV25o ILGLLIMFITIVFCAAGIVVLVLHRRRRYKKKQVDEQMRDNSPVHLQYSMYGHKTTHHTT
NOV25p ------------------------------------------------------------
NOV25q ------------------------------------------------------------
NOV25r ILGLLIMFITIVFCAAGIVVLVLHRRRRYKKKQVDEQMRDNSPVHLQYSMYGHKTTHHTT
NOV25s ILGLLIMFITIVFCAAGIVVLVLHRRRRYKKKQVDEQMRDNSPVHLQYSMYGHKTTHHTT
NOV25a ------------------------------------------------------------
NOV25b ------------------------------------------------------------
NOV25c ------------------------------------------------------------
NOV25d ------------------------------------------------------------
NOV25e ------------------------------------------------------------
NOV25f ------------------------------------------------------------
NOV25g ------------------------------------------------------------
NOV25h ------------------------------------------------------------
NOV25i ------------------------------------------------------------
NOV25j ------------------------------------------------------------
NOV25k ------------------------------------------------------------
NOV25l ------------------------------------------------------------
NOV25m ------------------------------------------------------------
NOV25n ERPSASLYEQHMVSPMVHVYRSPSFGPKHLEEEEERNEKEGSDAKHLQRSLLEQENHSPL
NOV25o ERPSASLYEQHMVSPMVHVYRSPSFGPKHLEEEEERNEKEGSDAKHLQRSLLEQENHSPL
NOV25p ------------------------------------------------------------
NOV25q ------------------------------------------------------------
NOV25r ERPSASLYEQHMVSPMVHVYRSPSFGPKHLEEEEERNEKEGSDAKHLQRSLLEQENHSPL
NOV25s ERPSASLYEQHMVSPMVHVYRSPSFGPKHLEEEEERNEKEGSDAKHLQRSLLEQENHSPL
NOV25a ------------------------------------------------------------
NOV25b ------------------------------------------------------------
NOV25c ------------------------------------------------------------
NOV25d ------------------------------------------------------------
NOV25e ------------------------------------------------------------
NOV25f ------------------------------------------------------------
NOV25g ------------------------------------------------------------
NOV25h ------------------------------------------------------------
NOV25i ------------------------------------------------------------
NOV25j ------------------------------------------------------------
NOV25k ------------------------------------------------------------
NOV25l ------------------------------------------------------------
NOV25m ------------------------------------------------------------
NOV25n TGSNMKYKTTNQSTEFLSFQDASSLYRNILEKERELQQLGITEYLRKNIAQLQPDMEAHY
NOV25o TGSNMKYKTTNQSTEFLSFQDASSLYRNILEKERELQQLGITEYLRKNIAQLQPDMEAHY
NOV25p ------------------------------------------------------------
NOV25q ------------------------------------------------------------
NOV25r TGSNNKYKTTNQSTEFLSFQDASSLYRNILEKERELQQLGITEYLRKNIAQLQPDMEAHY
NOV25s TGSNMKYKTTNQSTEFLSFQDASSLYRNILEKERELQQLGITEYLRKNIAQLQPDMEAHY
NOV25a ---------------------------------------------------
NOV25b ---------------------------------------------------
NOV25c ---------------------------------------------------
NOV25d ---------------------------------------------------
NOV25e ---------------------------------------------------
NOV25f ---------------------------------------------------
NOV25g ---------------------------------------------------
NOV25h ---------------------------------------------------
NOV25i ---------------------------------------------------
NOV25j ---------------------------------------------------
NOV25k ---------------------------------------------------
NOV25l ---------------------------------------------------
NOV25m ---------------------------------------------------
NOV25n PGAHEELKLMETLMYSRPRKVLVEQTKNEYFELKANLHAEPDYLEVLEQQT
NOV25o PGAHEELKLMETLMYSRPRXVLVEQTKNEYFELKANLHAEPDYLEVLEQQT
NOV25p ---------------------------------------------------
NOV25q ---------------------------------------------------
NOV25r PGAHEELKLMETLMYSRPRXVLVEQTKNEYFELKANLHAEPDYLEVLEQQT
NOV25s PGAHEELKLMETLMYSRPRXVLVEQTKNEYFELKANLHAEPDYLEVLEQQT
NOV25a (SEQ ID NO: 566)
NOV25b (SEQ ID NO: 568)
NOV25c (SEQ ID NO: 570)
NOV25d (SEQ ID NO: 572)
NOV25e (SEQ ID NO: 574)
NOV25f (SEQ ID NO: 576)
NOV25g (SEQ ID NO: 578)
NOV25h (SEQ ID NO: 580)
NOV25i (SEQ ID NO: 582)
NOV25j (SEQ ID NO: 584)
NOV25k (SEQ ID NO: 586)
NOV25l (SEQ ID NO: 588)
NOV25m (SEQ ID NO: 590)
NOV25n (SEQ ID NO: 592)
NOV25o (SEQ ID NO: 594)
NOV25p (SEQ ID NO: 596)
NOV25q (SEQ ID NO: 598)
NOV25r (SEQ ID NO: 600)
NOV25s (SEQ ID NO: 602)

[0497] Further analysis of the NOV25a protein yielded the following properties shown in Table 25C.

TABLE 25C
Protein Sequence Properties NOV25a

| | |
|---|---|
| SignalP analysis: | Cleavage site between residues 21 and 22 |
| PSORT II analysis: | |

| PSG: | a new signal peptide prediction method | |
|---|---|---|
| | N-region: | length 2; pos. chg 1; neg. chg 0 |
| | H-region: | length 25; peak value 8.53 |

| | |
|---|---|
| | PSG score: 4.13 |
| GvH: | von Heijne's method for signal seq. recognition |
| | GvH score (threshold: −2.1): −3.75 |
| | possible cleavage site: between 15 and 16 |

>>> Seems to have no N-terminal signal peptide

| ALOM: | Klein et al's method for TM region allocation | |
|---|---|---|
| | Init position for calculation: 1 | |
| | Tentative number of TMS(s) for the threshold 0.5: 0 | |
| | number of TMS(s) . . . fixed | |
| | PERIPHERAL | Likelihood = 1.48 (at 3) |

| | ALOM score: 1.48 (number of TMSs: 0) | | | |
|---|---|---|---|---|
| MTOP: | Prediction of membrane topology (Hartmann et al.) | | | |
| | Center position for calculation: 6 | | | |
| | Charge difference: −2.0 C(0.5) − N(2.5) | | | |
| | N >= C: N-terminal side will be inside | | | |
| MITDISC: | discrimination of mitochondrial targeting seq | | | |
| | R content: | 1 | Hyd Moment(75): | 5.82 |
| | Hyd Moment(95): | 9.48 | G content: | 1 |
| | D/E content: | 1 | S/T content: | 8 |

| | |
|---|---|
| | Score: −1.79 |
| Gavel: | prediction of cleavage sites for mitochondrial preseq |
| | R-2 motif at 38 SRG\|SC |

NUCDISC: discrimination of nuclear localization signals

| | |
|---|---|
| | pat4: RPRK (4) at 496 |
| | pat7: none |
| | bipartite: none |
| | content of basic residues: 9.2% |
| | NLS Score: −0.22 |
| KDEL: | ER retention motif in the C-terminus: none |

ER Membrane Retention Signals: none
SKL: peroxisomal targeting signal in the C-terminus: none
PTS2: 2nd peroxisomal targeting signal: none
VAC: possible vacuolar targeting motif: none
RNA-binding motif: none
Actinin-type actin-binding motif:

type 1: none
type 2: none

NMYR: N-myristoylation pattern: none
Prenylation motif: none
memYQRL: transport motif from cell surface to Golgi: none
Tyrosines in the tail: none
Dileucine motif in the tail: none
checking 63 PROSITE DNA binding motifs: none
checking 71 PROSITE ribosomal protein motifs: none
checking 33 PROSITE prokaryotic DNA binding motifs: none

| | |
|---|---|
| NNCN: | Reinhardt's method for Cytoplasmic/Nuclear discrimination |
| | Prediction: nuclear |
| | Reliability: 94.1 |
| COIL: | Lupas's algorithm to detect coiled-coil regions |
| 386 K | 0.97 |
| 387 H | 0.98 |
| 388 L | 0.98 |
| 389 E | 0.98 |
| 390 E | 0.98 |
| 391 E | 0.98 |
| 392 E | 0.98 |
| 393 E | 0.98 |
| 394 R | 0.98 |
| 395 N | 0.98 |
| 396 E | 0.98 |
| 397 K | 0.98 |
| 398 E | 0.98 |
| 399 G | 0.98 |
| 400 S | 0.98 |
| 401 D | 0.98 |
| 402 A | 0.98 |
| 403 K | 0.98 |
| 404 H | 0.98 |
| 405 L | 0.98 |
| 406 Q | 0.98 |
| 407 R | 0.98 |
| 408 S | 0.98 |
| 409 L | 0.98 |
| 410 L | 0.98 |
| 411 E | 0.98 |
| 412 Q | 0.98 |
| 413 E | 0.98 |
| 414 N | 0.98 |
| 415 H | 0.98 |
| 416 S | 0.83 |
| | total: 31 residues |

Final Results (k = 9/23):

52.2%: nuclear
26.1%: extracellular, including cell wall
21.7%: mitochondrial

>> prediction for CG55033-04 is nuc (k = 23)

[0498] A search of the NOV25a protein against the Geneseq database, a proprietary database that contains sequences published in patents and patent publication, yielded several homologous proteins shown in Table 25D.

TABLE 25D
Geneseq Results for NOV25a

| | | NOV25a | Identities/ | |
|---|---|---|---|---|
| | | Residues/ | Similarities for | |
| Geneseq | Protein/Organism/Length [Patent #, | Match | the Matched | Expect |
| Identifier | Date] | Residues | Region | Value |
| ABB53270 | Human polypeptide #10 - Homo | 1 . . . 473 | 401/480 (83%) | 0.0 |
| | sapiens, 841 aa. [WO200181363-A1, | 1 . . . 475 | 412/480 (85%) | |
| | 01-NOV-2001] | | | |
| AAE22222 | Human toll like receptor like molecule 5 | 1 . . . 473 | 401/480 (83%) | 0.0 |
| | (TLR-L5) protein - Homo sapiens, 841 | 1 . . . 475 | 412/480 (85%) | |
| | aa. [WO200220569-A2, 14-MAR-2002] | | | |
| ABJ01956 | 158P1D7 SSH protein sequence SEQ | 1 . . . 473 | 401/480 (83%) | 0.0 |
| | ID No 657 - Unidentified, 841 aa. | 1 . . . 475 | 412/480 (85%) | |
| | [WO200216593-A2, 28-FEB-2002] | | | |
| ABJ05539 | Breast cancer-associated protein 4 - | 1 . . . 473 | 401/480 (83%) | 0.0 |
| | Unidentified, 841 aa. [WO200259377- | 1 . . . 475 | 412/480 (85%) | |
| | A2, 01-AUG-2002] | | | |
| ABG78359 | Human protein, homologous to IGFBP- | 1 . . . 473 | 401/480 (83%) | 0.0 |
| | ALS, designated NOV1a - Homo | 1 . . . 475 | 412/480 (85%) | |
| | sapiens, 841 aa. [WO200226826-A2, | | | |
| | 04-APR-2002] | | | |

[0499] In a BLAST search of public sequence databases, the NOV25a protein was found to have homology to the proteins shown in the BLASTP data in Table 25E.

TABLE 25E
Public BLASTP Results for NOV25a

| | | NOV25a | Identities/ | | |
|---|---|---|---|---|---|
| Protein | | Residues/ | Similarities for | | |
| Accession | | Match | the Matched | | Expect |
| Number | Protein/Organism/Length | Residues | Portion | | Value |
| CAD42380 | Sequence 656 from Patent | 1 . . . 473 | 401/480 | (83%) | 0.0 |
| | WO0216593 - Homo sapiens | 1 . . . 475 | 412/480 | (85%) | |
| | (Human), 841 aa. | | | | |
| Q8BLLO | Hypothetical cysteine-rich flanking | 1 . . . 381 | 339/381 | (88%) | 0.0 |
| | region - Mus musculus (Mouse), | 1 . . . 380 | 358/381 | (92%) | |
| | 425 aa. | | | | |
| Q8C110 | Hypothetical cysteine-rich flanking | 1 . . . 381 | 339/381 | (88%) | 0.0 |
| | region - Mus musculus (Mouse), | 1 . . . 380 | 358/381 | (92%) | |
| | 840 aa. | | | | |
| Q9H5Y7 | Hypothetical protein FLJ22774 - | 44 . . . 381 | 338/338 | (100%) | 0.0 |
| | Homo sapiens (Human), 440 aa. | 1 . . . 338 | 338/338 | (100%) | |
| BAC67207 | Neuronal transmembrane protein | 1 . . . 468 | 189/491 | (38%) | 2e−85 |
| | Slitrk4 - Mus musculus (Mouse), | 30 . . . 493 | 265/491 | (53%) | |
| | 866 aa. | | | | |

[0500] PFam analysis predicts that the NOV25a protein contains the domains shown in the Table 25F.

TABLE 25F
Domain Analysis of NOV25a

| | | Identities/ | |
|---|---|---|---|
| | | Similarities | |
| Pfam | NOV25a | for the | Expect |
| Domain | Match Region | Matched Region | Value |
| LRR | 137 . . . 160 | 10/25 (40%) | 0.13 |
| | | 19/25 (76%) | |
| LRRCT | 218 . . . 268 | 17/54 (31%) | 2.6e−08 |
| | | 39/54 (72%) | |

### Example 26

[0501] The NOV26 clone was analyzed, and the nucleotide and encoded polypeptide sequences are shown in Table 26A.

TABLE 26A
NOV26 Sequence Analysis

| | | |
|---|---|---|
| NOV26a, CG55117-04 | SEQ ID NO: 603 | 3766 bp |
| DNA Sequence | ORF Start: ATG at 10 | ORF Stop: TGA at 2605 |

TTGCTAGCTATGGCCCTCGTACTCGGCTCCCTGTTGCTGCTGGGGCTGTGCGGGAACTCCTTTTCAGG
AGGGCAGCCTTCATCCACAGATGCTCCTAAGGCTTGGAATTATGAATTGCCTGCAACAAATTATGAGA
CCCAAGACTCCCATAAAGCTGGACCCATTGGCATTCTCTTTGAACTAGTGCATATCTTTCTCTATGTG
GTACAGCCGCGTGATTTCCCAGAAGATACTTTGAGAAAATTCTTACAGAAGGCATATGAATCCAAAAT
TGATTATGACAAGCCAGAAACTGTAATCTTAGGTCTAAAGATTGTCTACTATGAAGCAGGGATTATTC
TATGCTGTGTCCTGGGGCTGCTGTTTATTATTCTGATGCCTCTGGTGAAGTATTTCTTTTGTATGTGT
CGTTGCTGTAACAAATGTGGTGGAGAAATGCACCAGCGACAGAAGGAAAATGGGCCCTTCCTGAGGAA
ATGCTTTGCAATCTCCCTGTTGGTGATTTGTATAATAATAAGCATTGGCATCTTCTATGGTTTTGTGG
CAAATCACCAGGTAAGAACCCGGATCAAAAGGAGTCGGAAACTGGCAGATAGCAATTTCAAGGACTTG
CGAACTCTCTTGAATGAAACTCCAGAGCAAATCAAATATATATTGGCCCAGTACAACACTACCAAGGA
CAAGGCGTTCACAGATCTGAACAGTATCAATTCAGTGCTAGGAGGCGGAATTCTTGACCGACTGAGAC
CCAACATCATCCCTGTTCTTGATGAGATTAAGTCCATGGCAACAGCGATCAAGGAGACCAAAGAGGCG
TTGGAGAACATGAACAGCACCTTGAAGAGCTTGCACCAACAAAGTACACAGCTTAGCAGCAGTCTGAC
CAGCGTGAAAACTAGCCTGCGGTCATCTCTCAATGACCCTCTGTGCTTGGTGCATCCATCAAGTGAAA
CCTGCAACAGCATCAGATTGTCTCTAAGCCAGCTGAATAGCAACCCTGAACTGAGGCAGCTTCCACCC
GTGGATGCAGAACTTGACAACGTTAATAACGTTCTTAGGACAGATTTGGATGGCCTGGTCCAACAGGG
CTATCAATCCCTTAATGATATACCTGACAGAGTACAACGCCAAACCACGACTGTCGTAGCAGGTATCA
AAAGGGTCTTGAATTCCATTGGTTCAGATATCGACAATGTAACTCAGCGTCTTCCTATTCAGGATATA
CTCTCAGCATTCTCTGTTTATGTTAATAACACTGAAAGTTACATCCACAGAAATTTACCTACATTGGA
AGAGTATGATTCATACTGGTGGCTGGGTGGCCTGGTCATCTGCTCTCTGCTGACCCTCATCGTGATTT
TTTACTACCTGGGCTTACTGTGTGGCGTGTGCGGCTATGACAGGCATAACACCCCGACCACCCGAGGC
TGTGTCTCCAACACCGGAGGCGTCTTCCTCATGGTTGGAGTTGGATTAAGTTTCCTCTTTTGCTGGAT
ATTGATGATCATTGTGGTTCTTACCTTTGTCTTTGGTGCAAATGTGGAAAAACTGATCTGTGAACCTT
ACACGAGCAAGGAATTATTCCGGGTTTTGGATACACCCTACTTACTAAATGAAGACTGGGAATACTAT
CTCTCTGGGAAGCTATTTAATAAATCAAAAATGAAGCTCACTTTTGAACAAGTTTACAGTGACTGCAA
AAAAAATAGAGGCACTTACGGCACTCTTCACCTGCAGAACAGCTTCAATATCAGTGAACATCTCAACA
TTAATGAGCATACTGGAAGCATAAGCAGTGAATTGGAAAGTCTGAAGGTAAATCTTAATATCTTTCTG
TTGGGTGCAGCAGGAAGAAAAAACCTTCAGGATTTTGCTGCTTGTGGAATAGACAGAATGAATTATGA
CAGCTACTTGGCTCAGACTGGTAAATCCCCCGCAGGAGTGAATCTTTTATCATTTGCATATGATCTAG
AAGCAAAAGCAAACAGTTTGCCCCCAGGAAATTTGAGGAACTCCCTGAAAAGAGATGCACAAACTATT
AAACAATTCACCAGCAACGAGTCCTTCCTATAGAACAATCACTGAGCACTCTATACCAAAAGCGTCAA
GATACTTCAACGCACAGGGAATGGATTGTTGGAGAGAGTAACTAGGATTCTAGCTTCTCTGGATTTTG
CTCAGAACTTCATCACAAACAATACTTCCTCTGTTATTATTGAGGAAACTAAGAAGTATGGGAGAACA
ATAATAGGATATTTTGAACATTATCTGCAGTGGATCGAGTTCTCTATCAGTGAGAAAGTGGCATCGTG
CAAACCTGTGGCCACCGCTCTAGATACTGCTGTTGATGTCTTTCTGTGTAGCTACATTATCGACCCCT
TGAATTTGTTTTGGTTTGGCATAGGAAAAGCTACTGTATTTTTACTTCCGGCTCTAATTTTTGCGGTA
AAACTGGCTAAGTACTATCGTCGAATGGATTCGGAGGACGTGTACGATGATGTTGAAACTATACCCAT
GAAAAATATGGAAAATGGTAATAATGGTTATCATAAAGATCATGTATATGGTATTCACAATCCTGTTA
TGACAAGCCCATCACAACATTGATAGCTGATGTTGAAACTGCTTGAGCATCAGGATACTCAAAGTGGA
AAGGATCACAGATTTTTGGTAGTTTCTGGGTCTACAAGGACTTTCCAAATCCAGGAGCAACGCCAGTG
GCAACGTAGTGACTCAGGCGGGCACCAAGGCAACGGCACCATTGGTCTCTGGGTAGTGCTTTAAGAAT
GAACACAATCACGTTATAGTCCATGGTCCATCACTATTCAAGGATGACTCCCTCCCTTCCTGTCTATT
TTTGTTTTTTACTTTTTTACACTGAGTTTCTATTTAGACACTACAACATATGGGGTGTTTGTTCCCAT
TGGATGCATTTCTATCAAAACTCTATCAAATGTGATGGCTAGATTCTAACATATTGCCATGTGTGGAG
TGTGCTGAACACACACCAGTTTACAGGAAAGATGCATTTTGTGTACAGTAAACGGTGTATATACCTTT
TGTTACCACAGAGTTTTTTAAACAAATGAGTATTATAGGACTTTCTTCTAAATGAGCTAAATAAGTCA
CCATTGACTTCTTGGTGCTGTTGAAAATAATCCATTTTCACTAAAAGTGTGTGAAACCTACAGCATAT
TCTTCACGCAGAGATTTTCATCTATTATACTTTATCAAAGATTGGCCATGTTCCACTTGGAAATGGCA
TGCAAAAGCCATCATAGAGAAACCTGCGTAACTCCATCTGACAAATTCAAAAGAGAGAGAGAGATCTT
GAGAGAGAAATGCTGTTCGTTCAAAAGTGGAGTTGTTTTAACAGATGCCAATTACGGTGTACAGTTTA
ACAGAGTTTTCTGTTGCATTAGGATAAACATTAATTGGAGTGCAGCTAACATGAGTATCATCAGACTA
GTATCAAGTGTTCTAAAATGAAATATGAGAAGATCCTGTCACAATTCTTAGATCTGGTGTCCAGCATG
GATGAAACCTTTGAGTTTGGTCCCTAAATTTGCATGAAAGCACAAGGTAAATATTCATTTGCTTCAGG
AGTTTCATGTTGGATCTGTCATTATCAAAAGTGATCAGCAATGAAGAACTGGTCGGACAAAATTTAAC
GTTGATGTAATGGAATTCCAGATGTAGGCATTCCCCCCAGGTCTTTTCATGTGCAGATTGCAGTTCTG
ATTCATTTGAATAAAAAGGAACTTGG

| | | | |
|---|---|---|---|
| NOV26a, CG55117-04 | SEQ ID NO: 604 | 865 aa | MW at 97200.8kD |
| Protein Sequence | | | |

MALVLGSLLLLGLCGNSFSGGQPSSTDAPKAWNYELPATNYETQDSHKAGPIGILFELVHIFLYVVQP
RDFPEDTLRKFLQKAYESKIDYDKPETVILGLKIVYYEAGIILCCVLGLLFIILMPLVGYFFCMCRCC
NKCGGEMHQRQKENGPFLRKCFAISLLVICIIISIGIFYGFVANHQVRTRIKRSRKLADSNFKDLRTL
LNETPEQIKYILAQYNTTKDKAFTDLNSINSVLGGGILDRLRPNIIPVLDEIKSMATAIKETKEALEN
MNSTLKSLHQQSTQLSSSLTSVKTSLRSSLNDPLCLVHPSSETCNSIRLSLSQLNSNPELRQLPPVDA
ELDNVNNVLRTDLDGLVQQGYQSLNDIPDRVQRQTTTVVAGIKRVLNSIGSDIDNVTQRLPIQDILSA
FSVYVNNTESYIHRNLPTLEEYDSYWWLGGLVICSLLTLIVIFYYLGLLCGVCGYDRHATPTTRGCVS
NTGGVFLMVGVGLSFLFCWILMIIVVLTFVFGANVEKLICEPYTSKELFRVLDTPYLLNEDWEYYLSG
KLFNKSKMKLTFEQVYSDCKKNRGTYGTLHLQNSFNISEHLNINEHTGSISSELESLKVNLNIFLLGA
AGRKNLQDFAACGIDRMNYDSYLAQTGKSPAGVNLLSFAYDLEAKANSLPPGNLRNSLKRDAQTIKTI
HQQRVLPIEQSLSTLYQSVKILQRTGNGLLERVTRILASLDFAQNFITNNTSSVIIEETKKYGRTIIG
YFEHYLQWIEFSISEKVASCKPVATALDTAVDVFLCSYIIDPLNLFWFGIGKATVFLLPALIFAVKWA
KYYRRMDSEDVYDDVETIPMKNMENGNNGYHKDHVYGIHNPVMTSPSQH

| | | |
|---|---|---|
| NOV26b, CG55117-01 | SEQ ID NO: 605 | 3825 bp |
| DNA Sequence | ORF Start: ATG at 69 | ORF Stop: TGA at 2664 |

GNNNNNNANNNNATTCNTNCANTGNACNNNACCAAGTTCTACCTCATGTTTGGAGGATCTTGCTAGCT
ATGGCCCTCGTACTCGGCTCCCTGTTGCTGCTGGGGCTGTGCGGGAACTCCTTTTCAGGAGGGCAGCC
TTCATCCACAGATGCTCCTAAGGCTTGGAATTATGAATTGCCTGCAACAAATTATGAGACCCAAGACT
CCCATAAAGCTGGACCCATTGGCATTCTCTTTGAACTAGTGCATATCTTTCTCTATGTGGTACAGCCG
CGTGATTTCCCAGAAGATACTTTGAGAAAATTCTTACAGAAGGCATATGAATCCAAAATTGATTATGA
CAAGCCAGAAACTGTAATCTTAGGTCTAAAGATTGTCTACTATGAAGCAGGGATTATTCTATGCTGTG
TCCTGGGGCTGCTGTTTATTATTCTGATGCCTCTGGTGGGGTATTTCTTTTGTATGTGTCGTTGCTGT
AACAAATGTGGTGGAGAAATGCACCAGCGACAGAAGGAAAATGGGCCCTTCCTGAGGAAATGCTTTGC
AATCTCCCTGTTGGTGATTTGTATAATAATAAGCATTGGCATCTTCTATGGTTTTGTGGCAAATCACC
AGGTAAGAACCCGGATCAAAAGGAGTCGGAAACTGGCAGATAGCAATTTCAAGGACTTGCGAACTCTC
TTGAATGAAACTCCAGAGCAAATCAAATATATATTGGCCCAGTACAACACTACCAAGGACAAGGCGTT
CACAGATCTGAACAGTATCAATTCAGTGCTAGGAGGCGGAATTCTTGACCGACTGAGACCCAACATCA
TCCCTGTTCTTGATGAGATTAAGTCCATGGCAACAGCGATCAAGGAGACCAAAGAGGCGTTGGAGAAC
ATGAACAGCACCTTGAAGAGCTTGCACCAACAAAGTACACAGCTTAGCAGCAGTCTGACCAGCGTGAA
AACTAGCCTGCGGTCATCTCTCAATGACCCTCTGTGCTTGGTGCATCCATCAAGTGAAACCTGCAACA
GCATCAGATTGTCTCTAAGCCAGCTGAATAGCAACCCTGAACTGAGGCAGCTTCCACCCGTGGATGCA
GAACTTGACAACGTTAATAACGTTCTTAGGACAGATTTGGATGGCCTGGTCCAACAGGGCTATCAATC
CCTTAATGATATACCTGACAGAGTACAACGCCAAACCACGACTGTCGTAGCAGGTATCAAAAGGGTCT
TGAATTCCATTGGTTCAGATATCGACAATGTAACTCAGCGTCTTCCTATTCAGGATATACTCTCAGCA
TTCTCTGTTTATGTTAATAACACTGAAAGTTACATCCACAGAAATTTACCTACATTGGAAGAGTATGA
TTCATACTGGTGGCTGGGTGGCCTGGTCATCTGCTCTCTGCTGACCCTCATCGTGATTTTTTACTACC
TGGGCTTACTGTGTGGCGTGTGCGGCTATGACAGGCATGCCACCCCGACCACCCGAGGCTGTGTCTCC
AACACCGGAGGCGTCTTCCTCATGGTTGGAGTTGGATTAAGTTTCCTCTTTTGCTGGATATTGATGAT
CATTGTGGTTCTTACCTTTGTCTTTGGTGCAAATGTGGAAAAACTGATCTGTGAACCTTACACGAGCA
AGGAATTATTCCGGGTTTTGGATACACCCTACTTACTAAATGAAGACTGGGAATACTATCTCTCTGGG
AAGCTATTTAATAAATCAAAAATGAAGCTCACTTTTGAACAAGTTTACAGTGACTGCAAAAAAAATAG
AGGCACTTACGGCACTCTTCACCTGCAGAACAGCTTCAATATCAGTGAACATCTCAACATTAATGAGC
ATACTGGAAGCATAAGCAGTGAATTGGAAAGTCTGAAGGTAAATCTTAATATCTTTCTGTTGGGTGCA
GCAGGAAGAAAAAACCTTCAGGATTTTGCTGCTTGTGGAATAGACAGAATGAATTATGACAGCTACTT
GGCTCAGACTGGTAAATCCCCCGCAGGAGTGAATCTTTTATCATTTGCATATGATCTAGAAGCAAAAG
CAAACAGTTTGCCCCCAGGAAATTTGAGGAACTCCCTGA~AAGAGATGCACAAACTATTAAAACAATT
CACCAGCAACGAGTCCTTCCTATAGAACAATCACTGAGCACTCTATACCAAAGCGTCAAGATACTTCA
ACGCACAGGGAATGGATTGTTGGAGAGAGTAACTAGGATTCTAGCTTCTCTGGATTTTGCTCAGAACT
TCATCACAAACAATACTTCCTCTGTTATTATTGAGGAAACTAAGAAGTATGGGAGAACAATAATAGGA
TATTTTGAACATTATCTGCAGTGGATCGAGTTCTCTATCAGTGAGAAAGTGGCATCGTGCAAACCTGT
GGCCACCGCTCTAGATACTGCTGTTGATGTCTTTCTGTGTAGCTACATTATCGACCCCTTGAATTTGT
TTTGGTTTGGCATAGGAAAAGCTACTGTATTTTTACTTCCGGCTCTAATTTTTGCGGTAAAACTGGCT
AAGTACTATCGTCGAATGGATTCGGAGGACGTGTACGATGATGTTGAAACTATACCCATGAAAAATAT
GGAAAATGGTAATAATGGTTATCATAAAGATCATGTATATGGTATTCACAATCCTGTTATGACAAGCC
CATCACAACATTGATAGCTGATGTTGAAACTGCTTGAGCATCAGGATACTCAAAGTGGAAAGGATCAC
AGATTTTTGGTAGTTTCTGGGTCTACAAGGACTTTCCAAATCCAGGAGCAACGCCAGTGGCAACGTAG
TGACTCAGGCGGGCACCAAGGCAACGGCACCATTGGTCTCTGGGTAGTGCTTTAAGAATGAACACAAT
CACGTTATAGTCCATGGTCCATCACTATTCAAGGATGACTCCCTCCCTTCCTGTCTATTTTTGTTTTT
TACTTTTTTACACTGAGTTTCTATTTAGACACTACAACATATGGGGTGTTTGTTCCCATTGGATGCAT
TTCTATCAAAACTCTATCAAATGTGATGGCTAGATTCTAACATATTGCCATGTGTGGAGTGTGCTGAA
CACACACCAGTTTACAGGAAAGATGCATTTTGTGTACAGTAAACGGTGTATATACCTTTTGTTACCAC
AGAGTTTTTTAAACAAATGAGTATTATAGGACTTTCTTCTAAATGAGCTAAATAAGTCACCATTGACT
TCTTGGTGCTGTTGAAAATAATCCATTTTCACTAAAAGTGTGTGAAACCTACAGCATATTCTTCACGC
AGAGATTTTCATCTATTATACTTTATCAAAGATTGGCCATGTTCCACTTGGAAATGGCATGCAAAAGC
CATCATAGAGAAACCTGCGTAACTCCATCTGACAAATTCAAAAGAGAGAGAGAGATCTTGAGAGAGAA
ATGCTGTTCGTTCAAAAGTGGAGTTGTTTTAACAGATGCCAATTACGGTGTACAGTTTAACAGAGTTT
TCTGTTGCATTAGGATAAACATTAATTGGAGTGCAGCTAACATGAGTATCATCAGACTAGTATCAAGT
GTTCTAAAATGAAATATGAGAAGATCCTGTCACAATTCTTAGATCTGGTGTCCAGCATGGATGAAACC
TTTGAGTTTGGTCCCTAAATTTGCATGAAAGCACAAGGTAAATATTCATTTGCTTCAGGAGTTTCATG
TTGGATCTGTCATTATCAAAAGTGATCAGCAATGAAGAACTGGTCGGACAAAATTTAACGTTGATGTA
ATGGAATTCCAGATGTAGGCATTCCCCCCAGGTCTTTTCATGTGCAGATTGCAGTTCTGATTCATTTG
AATAAAAAGGAACTTGG

| | | | |
|---|---|---|---|
| NOV26b, CG55117-01 | SEQ ID NO: 606 | 865 aa | MW at 97200.8kD |
| Protein Sequence | | | |

MALVLGSLLLLGLCGNSFSGGQPSSTDAPKAWNYELPATNYETQDSHKAGPIGILFELVHIFLYVVQP
RDFPEDTLRKFLQKAYESKIDYDKPETVILGLKIVYYEAGIILCCVLGLLFIILMPLVGYFFCNCRCC
NKCGGEMHQRQKENGPFLRKCFAISLLVICIIISIGIFYGFVANHQVRTRIKRSRKLADSNFKDLRTL
LNETPEQIKYILAQYNTTKDKAFTDLNSINSVLGGGILDRLRPNIIPVLDEIKSMATAIKETKEALEN
MNSTLKSLHQQSTQLSSSLTSVKTSLRSSLNDPLCLVHPSSETCNSIRLSLSQLNSNPELRQLPPVDA
ELDNVNNVLRTDLDGLVQQGYQSLNDIPDRVQRQTTTVVAGIKRVLNSIGSDIDNVTQRLPIQDILSA
FSVYVNNTESYIHRNLPTLEEYDSYWWLGGLVICSLLTLIVIFYYLGLLCGVCGYDRHATPTTRGCVS
NTGGVFLMVGVGLSFLFCWILMIIVVLTFVFGANVEKLICEPYTSKELFRVLDTPYLLNEDWEYYLSG
KLFNKSKNKLTFEQVYSDCKKNRGTYGTLHLQNSFNISEHLNINEHTGSISSELESLKVNLNIFLLGA
AGRKNLQDFAACGIDRMNYDSYLAQTGKSPAGVNLLSFAYDLEAKANSLPPGNLRNSLKRNAQTIKTI
HQQRVLPIEQSLSTLYQSVKILQRTGNGLLERVTRILASLDFAQNFITNNTSSVIIEETKKYGRTIIG
YFEHYLQWIEFSISEKVASCKPVATALDTAVDVFLCSYIIDPLNLFWFGIGKATVFLLPALIFAVKLA
KYYRRMDSEDVYDDVETIPMMENGNNGYHKDHVYGIHNPVMTSPSQH

| | | |
|---|---|---|
| NOV26c, CG55117-02 | SEQ ID NO: 607 | 756 bp |
| DNA Sequence | ORF Start: at 1 | ORF Stop: end of sequence |

CAGGTAAGAACCCGGATCAAAAGGAGTCGGAAACTGGCAGATAGCAATTTCAAGGACTTGCGAACTCT
CTTGAATGAAACTCCAGAGCAAATCAAATATATATTGGCCCAGTACAACACTACCAAGGACAAGGCGT
TCACAGATCTGAACAGTATCAATTCAGTGCTAGGAGGCGGAATTCTTGACCGACTGAGACCCAACATC
ATCCCTGTTCTTGATGAGATTAAGTCCATGGCAACAGCGATCAAGGAGACCAAAGAGGCGTTGGAGAA
CATGAACAGCACCTTGAAGAGCTTGCACCAACAAAGTACACAGCTTAGCAGCAGTCTGACCAGCGTGA
AAACTAGCCTGCGGTCATCTCTCAATGACCCTCTGTGCTTGGTGCATCCATCAAGTGAAACCTGCAAC
AGCATCAGATTGTCTCTAAGCCAGCTGAATAGCAACCCTGAACTGAGGCAGCTTCCACCCGTGGATGC
AGAACTTGACAACGTTAATAACGTTCTTAGGACAGATTTGGATGGCCTGGTCCAACAGGGCTATCAAT
CCCTTAATGATATACCTGACAGAGTACAACGCCAAACCACGACTGTCGTAGCAGGTATCAAAAGGGTC
TTGAATTCCATTGGTTCAGATATCGACAATGTAACTCAGCGTCTTCCTATTCAGGATATACTCTCAGC
ATTCTCTGTTTATGTTAATAACACTGAAAGTTACATCCACAGAAATTTACCTACATTGGAAGAGTATG
ATTCATAC

| | | | |
|---|---|---|---|
| NOV26c, CG55117-02 | SEQ ID NO: 608 | 252 aa | MW at 28267.5kD |
| Protein Sequence | | | |

QVRTRIKRSRKLADSNFKDLRTLLNETPEQIKYILAQYNTTKDKAFTDLNSINSVLGGGILDRLRPNI
IPVLDEIKSMATAIKETKEALENMNSTLKSLHQQSTQLSSSLTSVKTSLRSSLNDPLCLVHPSSETCN
SIRLSLSQLNSNPELRQLPPVDAELDNVNNVLRTDLDGLVQQGYQSLNDIPDRVQRQTTTVVAGIKRV
LNSIGSDIDNVTQRLPIQDILSAFSVYVNNTESYIHRNLPTLEEYDSY

| | | |
|---|---|---|
| NOV26d, CG55117-03 | SEQ ID NO: 609 | 765 bp |
| DNA Sequence | ORF Start: at 1 | ORF Stop: end of sequence |

TGTGAACCTTACACGAGCAAGGAATTATTCCGGGTTTTGGATACACCCTACTTACTAAATGAAGACTG
GGAATACTATCTCTCTGGGAAGCTATTTAATAAATCAAAAATGAAGCTCACTTTTGAACAAGTTTACA
GTGACTGCAAAAAAAATAGAGGCACTTACGGCACTCTTCACCTGCAGAACAGCTTCAATATCAGTGAA
TATCTTTCTGTTGGGTGCAGCAGGAAGAAAAAACCTTCAGGATTTTGCTGCTTGTGGAATAGACAGAA
TGAATTATGACAGCTACTTGGCTCAGACTGGTAAATCCCCCGCAGGAGTGAATCTTTTATCATTTGCA
TATGATCTAGAAGCAAAAGCAAACAGTTTGCCCCCAGGAAATTTGAGGAACTCCCTGAAAAGAGATGC
ACAAACTATTAAAACAATTCACCAGCAACGAGTCCTTCCTATAGAACAATCACTGAGCACTCTATACC
AAAGCGTCAAGATACTTCAACGCACAGGGAATGGATTGTTGGAGAGAGTAACTAGGATTCTAGCTTCT
CTGGATTTTGCTCAGAACTTCATCACAAACAATACTTCCTCTGTTATTATTGAGGAAACTAAGAAGTA
TGGGAGAACAATAATAGGATATTTTGAACATTATCTGCAGTGGATCGAGTTCTCTATCAGTGAGAAAG
TGGCATCGTGCAAACCT

| | | | |
|---|---|---|---|
| NOV26d, CG55117-03 | SEQ ID NO: 610 | 255 aa | MW at 28999.6kD |
| Protein Sequence | | | |

CEPYTSKELFRVLDTPYLLNEDWEYYLSGKLFNKSKMKLTFEQVYSDCKKNRGTYGTLHLQNSFNISE
HLNINEHTGSISSELESLKVNLNIFLLGAAGRKNLQDFAACGIDRMNYDSYLAQTGKSPAGVNLLSFA
YDLEAKANSLPPGNLRNSLKRDAQTIKTIHQQRVLPIEQSLSTLYQSVKILQRTGNGLLERVTRILAS
LDFAQNFITNNTSSVIIEETKKYGRTIIGYFEHYLQWIEFSISEKVASCKP

| | | |
|---|---|---|
| NOV26e, CG55117-05 | SEQ ID NO: 611 | 2523 bp |
| DNA Sequence | ORF Start: at 7 | ORF Stop: at 2518 |

GGATCCGGAGGGCAGCCTTCATCCACAGATGCTCCTAAGGCTTGGAATTATGAATTGCCTGCAACAAA
TTATGAGACCCAAGACTCCCATAAAGCTGGACCCATTGGCATTCTCTTTGAACTAGTGCATATCTTTC
TCTATGTGGTACAGCCGCGTGATTTCCCAGAAGATACTTTGAGAAAATTCTTACAGAAGGCATATGAA
TCCAAAATTGATTATGACAAGATTGTCTACTATGAAGCAGGGATTATTCTATGCTGTGTCCTGGGGCT
GCTGTTTATTATTCTGATGCCTCTGGTGGGGTATTTCTTTTGTATGTGTCGTTGCTGTAACAAATGTG
GTGGAGAAATGCACCAGCGACAGAAGGAAAATGGGCCCTTCCTGAGGAAATGCTTTGCAATCTCCCTG
TTGGTGATTTGTATAATAATAAGCATTGGCATCTTCTATGGTTTTGTGGCAAATCACCAGGTAAGAAC
CCGGATCAAAAGGAGTCGGAAACTGGCAGATAGCAATTTCAAGGACTTGCGAACTCTCTTGAATGAAA
CTCCAGAGCAAATCAAATATATATTGGCCCAGTACAACACTACCAAGGACAAGGCGTTCACAGATCTG
AACAGTATCAATTCAGTGCTAGGAGGCGGAATTCTTGACCGACTGAGACCCAACATCATCCCTGTTCT
TGATGAGATTAAGTCCATGGCAACAGCGATCAAGGAGACCAAAGAGGCGTTGGAGAACATGAACAGCA
CCTTGAAGAGCTTGCACCAACAAAGTACACAGCTTAGCAGCAGTCTGACCAGCGTGAAAACTAGCCTG
CGGTCATCTCTCAATGACCCTCTGTGCTTGGTGCATCCATCAAGTGAAACCTGCAACAGCATCAGATT
GTCTCTAAGCCAGCTGAATAGCAACCCTGAACTGAGGCAGCTTCCACCCGTGGATGCAGAACTTGACA
ACGTTAATAACGTTCTTAGGACAGATTTGGATGGCCTGGTCCAACAGGGCTATCAATCCCTTAATGAT
ATACCTGACAGAGTACAACGCCAAACCACGACTGTCGTAGCAGGTATCAAAAGGGTCTTGAATTCCAT
TGGTTCAGATATCGACAATGTAACTCAGCGTCTTCCTATTCAGGATATACTCTCAGCATTCTCTGTTT
ATGTTAATAACACTGAAAGTTACATCCACAGAAATTTACCTACATTGGAAGAGTATGATTCATACTGG
TGGCTGGGTGGCCTGGTCATCTGCTCTCTGCTGACCCTCATCGTGATTTTTTACTACCTGGGCTTACT
GTGTGGCGTGTGCGGCTATGACAGGCATGCCACCCCGACCACCCGAGGCTGTGTCTCCAACACCGGAG
GCGTCTTCCTCATGGTTGGAGTTGGATTAAGTTTCCTCTTTTGCTGGATATTGATGATCATTGTGGTT
CTTACCTTTGTCTTTGGTGCAAATGTGGAAAAACTGATCTGTGAACCTTACACGAGCAAGGAATTATT
CCGGGTTTTGGATACACCCTACTTACTAAATGAAGACTGGGAATACTATCTCTCTGGGAAGCTATTTA
ATAAATCAAAAATGAAGCTCACTTTTGAACAAGTTTACAGTGACTGCAAAAAAAATAGAGGCACTTAC
GGCACTCTTCACCTGCAGAACAGCTTCAATATCAGTGAACATCTCAACATTAATGAGCATACTGGAAG
CATAAGCAGTGAATTGGAAAGTCTGAAGGTAAATCTTAATATCTTTCTGTTGGGTGCAGCAGGAAGAA
AAAACCTTCAGGATTTTGCTGCTTGTGGAATAGACAGAATGGATTATGACAGCTACTTGGCTCAGACT
GGTAAATCCCCCGCAGGAGTGAATCTTTTATCATTTGCATATGATCTAGAAGCAAAAGCAAACAGTTT
GCCCCCAGGAAATTTGAGGAACTCCCTGAAAAGAGATGCACAAACTATTAAAACAATTCACCAGCAAC
GAGTCCTTCCTATAGAACAATCACTGAGCACTCTATACCAAAGCGTCAAGATACTTCAACGCACAGGG
AATGGATTGTTGGAGAGAGTAACTAGGACTCTAGCTTCTCTGGATTTTGCTCAGAACTTCATCACAAA
CAATACTTCCTCTGTTATTATTGAGGAAACTAAGAAGTATGGGAGGACAATAATAGGATATTTTGAAC
ATTATCTGCAGTGGATCGAGTTCTCTATCAGTGAGAAAGTGGCATCGTGCAAACCTGTGGCCACCGCT
CTAGATACTGCTGTTGATGTCTTTCTGTGTAGCTACATTATCGACCCCTTGAATTTGTTTTGGTTTGG
CATAGGAAAAGCTACTGTATTTTTACTTCCGGCTCTAATTTTTGCGGTAAAACTGGCTAAGTACTATC
GTCGAATGGATTCGGAGGACGTGTACGATGATGTTGAAACTATACCCATGAAAAATATGGAAAATGGT
AATAATGGTTATCATAAAGATCATGTATATGGTATTCACAATCCTGTTATGACAAGCCCATCACAACA
TCTCGAG

| | | | |
|---|---|---|---|
| NOV26e, CG55117-05 | SEQ ID NO: 612 | 837 aa | MW at 94348.3kD |
| Protein Sequence | | | |

GGQPSSTDAPKAWNYELPATNYETQDSHKAGPIGILFELVHIFLYVVQPRDFPEDTLRKFLQKAYESK
IDYDKIVYYEAGIILCCVLGLLFIILMPLVGYFFCMCRCCNKCGGEMHQRQKENGPFLRKCFAISLLV
ICIIISIGIFYGFVANHQVRTRIKRSRKLADSNFKDLRTLLNETPEQIKYILAQYNTTKDKAFTDLNS
INSVLGGGILDRLRPNIIPVLDEIKSMATAIKETKEALENMNSTLKSLHQQSTQLSSSLTSVKTSLRS
SLNDPLCLVHPSSETCNSIRLSLSQLNSNPELRQLPPVDAELDNVNNVLRTDLDGLVQQGYQSLNDIP
DRVQRQTTTVVAGIKRVLNSIGSDIDNVTQRLPIQDILSAFSVYVNNTESYIHRNLPTLEEYDSYWWL
GGLVICSLLTLIVIFYYLGLLCGVCGYDRHATPTTRGCVSNTGGVFLMVGVGLSFLFCWILMIIVVLT
FVFGANVEKLICEPYTSKELFRVLDTPYLLNEDWEYYLSGKLFNKSKMKLTFEQVYSDCKKNRGTYGT
LHLQNSFNISEHLNINEHTGSISSELESLKVNLNIFLLGAAGRKNLQDFAACGIDRMDYDSYLAQTGK
SPAGVNLLSFAYDLEAKANSLPPGNLRNSLKRDAQTIKTIHQQRVLPIEQSLSTLYQSVKILQRTGNG
LLERVTRTLASLDFAQNFITNNTSSVIIEETKKYGRTIIGYFEHYLQWIEFSISEKVASCKPVATALD
TAVDVFLCSYIIDPLNLFWFGIGKATVFLLPALIFAVKLAKYYRRMDSEDVYDDVETIPMKNMENGNN
GYHKDHVYGIHNPVMTSPSQH

| | | |
|---|---|---|
| NOV26f, SNP13382440 of | SEQ ID NO: 613 | 3766 bp |
| CG55117-04, DNA Sequence | ORF Start: ATG at 10 | ORF Stop: TGA at 2605 |
| | SNP Pos: 3274 | SNP Change: C to A |

TTGCTAGCTATGGCCCTCGTACTCGGCTCCCTGTTGCTGCTGGGGCTGTGCGGGAACTCCTTTTCAGG
AGGGCAGCCTTCATCCACAGATGCTCCTAAGGCTTGGAATTATGAATTGCCTGCAACAAATTATGAGA
CCCAAGACTCCCATAAAGCTGGACCCATTGGCATTCTCTTTGAACTAGTGCATATCTTTCTCTATGTG
GTACAGCCGCGTGATTTCCCAGAAGATACTTTGAGAAAATTCTTACAGAAGGCATATGAATCCAAAAT
TGATTATGACAAGCCAGAAACTGTAATCTTAGGTCTAAAGATTGTCTACTATGAAGCAGGGATTATTC
TATGCTGTGTCCTGGGGCTGCTGTTTATTATTCTGATGCCTCTGGTGGGGTATTTCTTTTGTATGTGT
CGTTGCTGTAACAAATGTGGTGGAGAAATGCACCAGCGACAGAAGGAAAATGGGCCCTTCCTGAGGAA
ATGCTTTGCAATCTCCCTGTTGGTGATTTGTATAATAATAAGCATTGGCATCTTCTATGGTTTTGTGG
CAAATCACCAGGTAAGAACCCGGATCAAAAGGAGTCGGAAACTGGCAGATAGCAATTTCAAGGACTTG
CGAACTCTCTTGAATGAAACTCCAGAGCAAATCAAATATATATTGGCCCAGTACAACACTACCAAGGA
CAAGGCGTTCACAGATCTGAACAGTATCAATTCAGTGCTAGGAGGCGGAATTCTTGACCGACTGAGAC
CCAACATCATCCCTGTTCTTGATGAGATTAAGTCCATGGCAACAGCGATCAAGGAGACCAAAGAGGCG
TTGGAGAACATGAACAGCACCTTGAAGAGCTTGCACCAACAAAGTACACAGCTTAGCAGCAGTCTGAC
CAGCGTGAAAACTAGCCTGCGGTCATCTCTCAATGACCCTCTGTGCTTGGTGCATCCATCAAGTGAAA
CCTGCAACAGCATCAGATTGTCTCTAAGCCAGCTGAATAGCAACCCTGAACTGAGGCAGCTTCCACCC
GTGGATGCAGAACTTGACAACGTTAATAACGTTCTTAGGACAGATTTGGATGGCCTGGTCCAACAGGG
CTATCAATCCCTTAATGATATACCTGACAGAGTACAACGCCAAACCACGACTGTCGTAGCAGGTATCA
AAAGGGTCTTGAATTCCATTGGTTCAGATATCGACAATGTAACTCAGCGTCTTCCTATTCAGGATATA
CTCTCAGCATTCTCTGTTTATGTTAATAACACTGAAAGTTACATCCACAGAAATTTACCTACATTGGA
AGAGTATGATTCATACTGGTGGCTGGGTGGCCTGGTCATCTGCTCTCTGCTGACCCTCATCGTGATTT
TTTACTACCTGGGCTTACTGTGTGGCGTGTGCGGCTATGACAGGCATGCCACCCCGACCACCCGAGGC
TGTGTCTCCAACACCGGAGGCGTCTTCCTCATGGTTGGAGTTGGATTAAGTTTCCTCTTTTGCTGGAT
ATTGATGATCATTGTGGTTCTTACCTTTGTCTTTGGTGCAAATGTGGAAAAACTGATCTGTGAACCTT
ACACGAGCAAGGAATTATTCCGGGTTTTGGATACACCCTACTTACTAAATGAAGACTGGGAATACTAT
CTCTCTGGGAAGCTATTTAATAAATCAAAAATGAAGCTCACTTTTGAACAAGTTTACAGTGACTGCAA
AAAAAATAGAGGCACTTACGGCACTCTTCACCTGCAGAACAGCTTCAATATCAGTGAACATCTCAACA
TTAATGAGCATACTGGAAGCATAAGCAGTGAATTGGAAAGTCTGAAGGTAAATCTTAATATCTTTCTG
TTGGGTGCAGCAGGAAGAAAAAACCTTCAGGATTTTGCTGCTTGTGGAATAGACAGAATGAATTATGA
CAGCTACTTGGCTCAGACTGGTAAATCCCCCGCAGGAGTGAATCTTTTATCATTTGCATATGATCTAG
AAGCAAAAGCAAACAGTTTGCCCCCAGGAAATTTGAGGAACTCCCTGAAAAGAGATGCACAAACTATT
AAAACAATTCACCAGCAACGAGTCCTTCCTATAGAACAATCACTGAGCACTCTATACCAAAGCGTCAA
GATACTTCAACGCACAGGGAATGGATTGTTGGAGAGAGTAACTAGGATTCTAGCTTCTCTGGATTTTG
CTCAGAACTTCATCACAAACAATACTTCCTCTGTTATTATTGAGGAAACTAAGAAGTATGGGAGAACA
ATAATAGGATATTTTGAACATTATCTGCAGTGGATCGAGTTCTCTATCAGTGAGAAAGTGGCATCGTG
CAAACCTGTGGCCACCGCTCTAGATACTGCTGTTGATGTCTTTCTGTGTAGCTACATTATCGACCCCT
TGAATTTGTTTTGGTTTGGCATAGGAAAAGCTACTGTATTTTTACTTCCGGCTCTAATTTTTGCGGTA
AAACTGGCTAAGTACTATCGTCGAATGGATTCGGAGGACGTGTACGATGATGTTGAAACTATACCCAT
GAAAAATATGGAAAATGGTAATAATGGTTATCATAAAGATCATGTATATGGTATTCACAATCCTGTTA
TGACAAGCCCATCACAACATTGATAGCTGATGTTGAAACTGCTTGAGCATCAGCATACTCAAAGTGGA
AAGGATCACAGATTTTTGGTAGTTTCTGGGTCTACAAGGACTTTCCAAATCCAGGAGCAACGCCAGTG
GCAACGTAGTGACTCAGGCGGGCACCAAGGCAACGGCACCATTGGTCTCTGGGTAGTGCTTTAAGAAT
GAACACAATCACGTTATAGTCCATGGTCCATCACTATTCAAGGATGACTCCCTCCCTTCCTGTCTATT
TTTGTTTTTTACTTTTTTACACTGAGTTTCTATTTAGACACTACAACATATGGGGTGTTTGTTCCCAT
TGGATGCATTTCTATCAAAACTCTATCAAATGTGATGGCTAGATTCTAACATATTGCCATGTGTGGAG
TGTGCTGAACACACACCAGTTTACAGGAAAGATGCATTTTGTGTACAGTAAACGGTGTATATACCTTT
TGTTACCACAGAGTTTTTTAAACAAATGAGTATTATAGGACTTTCTTCTAAATGAGCTAAATAAGTCA
CCATTGACTTCTTGGTGCTGTTGAAAATAATCCATTTTCACTAAAAGTGTGTGAAACCTACAGCATAT
TCTTCACGCAGAGATTTTCATCTATTATACTTTATCAAAGATTGGCCATGTTCCACTTGGAAATGGCA
TGCAAAAGCAATCATAGAGAAACCTGCGTAACTCCATCTGACAAATTCAAAAGAGAGAGAGAGATCTT
GAGAGAGAAATGCTGTTCGTTCAAAAGTGGAGTTGTTTTAACAGATGCCAATTACGGTGTACAGTTTA
ACAGAGTTTTCTGTTGCATTAGGATAAACATTAATTGGAGTGCAGCTAACATGAGTATCATCAGACTA
GTATCAAGTGTTCTAAAATGALATATGAGAAGATCCTGTCACAATTCTTAGATCTGGTGTCCAGCATG
GATGAAACCTTTGAGTTTGGTCCCTAAATTTGCATGAAAGCACAAGGTAAATATTCATTTGCTTCAGG
AGTTTCATGTTGGATCTGTCATTATCAAAAGTGATCAGCAATGAAGAACTGGTCGGACAAAATTTAAC
GTTGATGTAATGGAATTCCAGATGTAGGCATTCCCCCCAGGTCTTTTCATGTGCAGATTGCAGTTCTG
ATTCATTTGAATAAAAAGGAACTTGG

| | | | |
|---|---|---|---|
| NOV26f, SNP13382440 of | SEQ ID NO: 614 | 865 aa | MW at 97200.8kD |
| CG55117-04, Protein | | | SNP Change: no change |
| Sequence | | | |

MALVLGSLLLLGLCGNSFSGGQPSSTDAPKAWNYELPATNYETQDSHKAGPIGILFELVHIFLYVVQP
RDFPEDTLRXFLQKAYESKIDYDKPETVILGLKIVYYEAGIILCCVLGLLFIILMPLVGYFFCMCRCC
NKCGGEMHQRQKENGPFLRKCFAISLLVICIIISIGIFYGFVANHQVRTRIKRSRKLADSNFKDLRTL
LNETPEQIKYILAQYNTTKDKAFTDLNSINSVLGGGILDRLRPNIIPVLDEIKSMATAIKETKEALEN
MNSTLKSLHQQSTQLSSSLTSVKTSLRSSLNDPLCLVHPSSETCNSIRLSLSQLNSNPELRQLPPVDA
ELDNVNNVLRTDLDGLVQQGYQSLNDIPDRVQRQTTTVVAGIKRVLNSIGSDIDNVTQRLPIQDILSA
FSVYVNNTESYIHRNLPTLEEYDSYWWLGGLVICSLLTLIVIFYYLGLLCGVCGYDRHATPTTRGCVS
NTGGVFLMVGVGLSFLFCWILMIIVVLTFVFGANVEKLICEPYTSKELFRVLDTPYLLNEDWEYYLSG
KLFNKSKMKLTFEQVYSDCKKNRGTYGTLHLQNSFNISEHLNINEHTGSISSELESLKVNLNIFLLGA
AGRKNLQDFAACGIDRMNYDSYLAQTGKSPAGVNLLSFAYDLEAKANSLPPGNLRNSLKRDAQTIKTI
HQQRVLPIEQSLSTLYQSVKILQRTGNGLLERVTRILASLDFAQNFITNNTSSVIIEETKKYGRTIIG
YFEHYLQWIEFSISEKVASCKPVATALDTAVDVFLCSYIIDPLNLFWFGIGKATVFLLPALIFAVKLA
KYYRRMDSEDVYDDVETIPMKNMENGNNGYHKDHVYGIHNPVMTSPSQH

| | | |
|---|---|---|
| NOV26g, SNP13382439 of | SEQ ID NO: 615 | 3766 bp |
| CG55117-04, DNA Sequence | ORF Start: ATG at 10 | ORF Stop: TGA at 2605 |
| | SNP Pos: 3685 | SNP Change: G to A |

TTGCTAGCTATGGCCCTCGTACTCGGCTCCCTGTTGCTGCTGGGGCTGTGCGGGAACTCCTTTTCAGG
AGGGCAGCCTTCATCCACAGATGCTCCTAAGGCTTGGAATTATGAATTGCCTGCAACAAATTATGAGA
CCCAAGACTCCCATAAAGCTGGACCCATTGGCATTCTCTTTGAACTAGTGCATATCTTTCTCTATGTG
GTACAGCCGCGTGATTTCCCAGAAGATACTTTGAGAAAATTCTTACAGAAGGCATATGAATCCAAAAT
TGATTATGACAAGCCAGAAACTGTAATCTTAGGTCTAAAGATTGTCTACTATGAAGCAGGGATTATTC
TATGCTGTGTCCTGGGGCTGCTGTTTATTATTCTGATGCCTCTGGTGGGGTATTTCTTTTGTATGTGT
CGTTGCTGTAACAAATGTGGTGGAGAAATGCACCAGCGACAGAAGGAAAATGGGCCCTTCCTGAGGAA
ATGCTTTGCAATCTCCCTGTTGGTGATTTGTATAATAATAAGCATTGGCATCTTCTATGGTTTTGTGG
CAAATCACCAGGTAAGAACCCGGATCAAAAGGAGTCGGAAACTGGCAGATAGCAATTTCAAGGACTTG
CGAACTCTCTTGAATGAAACTCCAGAGCPAATCAAATATATATTGGCCCAGTACAACACTACCAAGGA
CAAGGCGTTCACAGATCTGAACAGTATCAATTCAGTGCTAGGAGGCGGAATTCTTGACCGACTGAGAC
CCAACATCATCCCTGTTCTTGATGAGATTAAGTCCATGGCAACAGCGATCAAGGAGACCAAAGAGGCG
TTGGAGAACATGAACAGCACCTTGAAGAGCTTGCACCAACAAAGTACACAGCTTAGCAGCAGTCTGAC
CAGCGTGAAAACTAGCCTGCGGTCATCTCTCAATGACCCTCTGTGCTTGGTGCATCCATCAAGTGAAA
CCTGCAACAGCATCAGATTGTCTCTAAGCCAGCTGAATAGCAACCCTGAACTGAGGCAGCTTCCACCC

[0502] Further analysis of the NOV26a protein yielded the following properties shown in Table 26C.

TABLE 26C
Protein Sequence Properties NOV26a

| | |
|---|---|
| SignalP analysis: | Cleavage site between residues 20 and 21 |
| PSORTII analysis: | |

| PSG: | a new signal peptide prediction method | |
|---|---|---|
| | N-region: | length 0; pos. chg 0; neg. chg 0 |
| | H-region: | length 26; peak value 9.51 |
| | PSG score: | 5.11 |

| | |
|---|---|
| GvH: | von Heijne's method for signal seq. recognition |
| | GvH score (threshold: −2.1): 2.78 |
| | possible cleavage site: between 19 and 20 |

>>> Seems to have a cleavable signal peptide (1 to 19)

| ALOM: | Klein et al's method for TM region allocation | | |
|---|---|---|---|
| | Init position for calculation: 20 | | |
| | Tentative number of TMS(s) for the threshold 0.5: 6 | | |
| | INTEGRAL | Likelihood = | Transmembrane 50-66 |
| | | −3.08 | |
| | INTEGRAL | Likelihood = | Transmembrane 109-125 |
| | | −13.69 | |
| | INTEGRAL | Likelihood = | Transmembrane 158-174 |
| | | −12.90 | |
| | INTEGRAL | Likelihood = | Transmembrane 435-451 |
| | | −8.55 | |
| | INTEGRAL | Likelihood = | Transmembrane 491-507 |
| | | −13.06 | |
| | INTEGRAL | Likelihood = | Transmembrane 797-813 |
| | | −3.13 | |

| | |
|---|---|
| PERIPHERAL | Likelihood = 0.90 (at 772) |

| | |
|---|---|
| | ALOM score: −13.69 (number of TMSs: 6) |
| MTOP: | Prediction of membrane topology (Hartmann et al.) |
| | Center position for calculation: 9 |
| | Charge difference: −2.0 C(−1.0)-N(1.0) |
| | N >= C: N-terminal side will be inside |

>>> membrane topology: type 3a

| MITDISC: | discrimination of mitochondrial targeting seq | | | |
|---|---|---|---|---|
| | R content: | 0 | Hyd Moment(75): | 0.43 |
| | Hyd Moment(95): | 2.59 | G content: | 5 |
| | D/E content: | 1 | S/T content: | 6 |

| | |
|---|---|
| | Score: −6.77 |
| Gavel: | Prediction of cleavage sites for mitochondrial preseq |
| | cleavage site motif not found |

NUCDISC: discrimination of nuclear localization signals

| | |
|---|---|
| | pat4: none |
| | pat7: none |
| | bipartite: none |
| | content of basic residues: 9.5% |
| | NLS Score: −0.47 |
| KDEL: | ER retention motif in the C-terminus: none |

ER Membrane Retention Signals: none
SKL: peroxisomal targeting signal in the C-terminus: none
PTS2: 2nd peroxisomal targeting signal: none
VAC: possible vacuolar targeting motif: none
RNA-binding motif: none
Actinin-type actin-binding motif:

type 1: none
type 2: none

NMYR: N-myristoylation pattern: none
Prenylation motif: none
memYQRL: transport motif from cell surface to Golgi: none
Tyrosines in the tail: none
Dileucine motif in the tail: none
checking 63 PROSITE DNA binding motifs:

Leucine zipper pattern (PS00029): *** found ***
LPPVDAELDNVNNVLRTDLDGL at 335

none
checking 71 PROSITE ribosomal protein motifs: none
checking 33 PROSITE prokaryotic DNA binding motifs: none

| | |
|---|---|
| NNCN: | Reinhardt's method for Cytoplasmic/Nuclear discrimination |
| | Prediction: cytoplasmic |
| | Reliability: 76.7 |
| COIL: | Lupas's algorithm to detect coiled-coil regions |
| 251 V | 0.95 |
| 252 L | 0.99 |
| 253 D | 0.99 |
| 254 E | 0.99 |
| 255 I | 0.99 |
| 256 K | 0.99 |
| 257 S | 0.99 |
| 258 M | 0.99 |
| 259 A | 0.99 |
| 260 T | 0.99 |
| 261 A | 0.99 |
| 262 I | 0.99 |
| 263 K | 0.99 |
| 264 E | 0.99 |
| 265 T | 0.99 |
| 266 K | 0.99 |
| 267 E | 0.99 |
| 268 A | 0.99 |
| 269 L | 0.99 |
| 270 E | 0.99 |
| 271 N | 0.99 |
| 272 M | 0.99 |
| 273 N | 0.99 |
| 274 S | 0.99 |
| 275 T | 0.99 |
| 276 L | 0.99 |
| 277 K | 0.99 |
| 278 S | 0.99 |
| 279 L | 0.99 |
| 280 H | 0.98 |
| 281 Q | 0.98 |
| 282 Q | 0.97 |
| 283 S | 0.90 |
| 284 T | 0.90 |
| 285 Q | 0.90 |
| 286 L | 0.90 |
| 287 S | 0.90 |
| 288 S | 0.90 |
| 289 S | 0.89 |
| 290 L | 0.89 |
| 291 T | 0.67 |
| 292 S | 0.51 |
| 293 V | 0.51 |
| 294 K | 0.51 |
| | total: 44 residues |

Final Results (k = 9/23):

77.8%: endoplasmic reticulum
22.2%: mitochondrial

>> prediction for CG55117-04 is end (k = 9)

[0503] A search of the NOV26a protein against the Geneseq database, a proprietary database that contains sequences published in patents and patent publication, yielded several homologous proteins shown in Table 26D.

TABLE 26D
Geneseq Results for NOV26a

| | | NOV26a | Identities/ | |
|---|---|---|---|---|
| | | Residues/ | Similarities for | |
| Geneseq | Protein/Organism/Length | Match | the Matched | Expect |
| Identifier | [Patent #, Date] | Residues | Region | Value |
| ABJ37079 | Human breast cancer/ovarian cancer | 1 . . . 865 | 865/865 (100%) | 0.0 |
| | related protein #55 - Homo sapiens, | 1 . . . 865 | 865/865 (100%) | |
| | 865 aa. [WO2003000012-A2, 03-JAN- | | | |
| | 2003] | | | |
| ABB82955 | Human PROML related protein | 1 . . . 865 | 865/865 (100%) | 0.0 |
| | (GenBank Identifier No. GI#131214442) - | 1 . . . 865 | 865/865 (100%) | |
| | Homo sapiens, 865 aa. | | | |
| | [WO200299047-A2, 12-DEC-2002] | | | |
| ABB82954 | Human PROML related protein | 1 . . . 865 | 865/865 (100%) | 0.0 |
| | (GenBank Identifier No. GI#5174387) - | 1 . . . 865 | 865/865 (100%) | |
| | Homo sapiens, 865 aa. | | | |
| | [WO200299047-A2, 12-DEC-2002] | | | |
| ABB82953 | Human PROML related protein | 1 . . . 865 | 865/865 (100%) | 0.0 |
| | (GenBank Identifier No. GI#7512271) - | 1 . . . 865 | 865/865 (100%) | |
| | Homo sapiens, 865 aa. | | | |
| | [WO200299047-A2, 12-DEC-2002] | | | |
| AAU79943 | Human AC133 antigen-like protein | 1 . . . 865 | 865/865 (100%) | 0.0 |
| | NOV5 - Homo sapiens, 865 aa. | 1 . . . 865 | 865/865 (100%) | |
| | [WO200229038-A2, 11-APR-2002] | | | |

[0504] In a BLAST search of public sequence databases, the NOV26a protein was found to have homology to the proteins shown in the BLASTP data in Table 26E.

TABLE 26E
Public BLASTP Results for NOV26a

| | | NOV26a | Identities/ | | |
|---|---|---|---|---|---|
| Protein | | Residues/ | Similarities for | | |
| Accession | | Match | the Matched | | Expect |
| Number | Protein/Organism/Length | Residues | Portion | | Value |
| O43490 | Prominin-like protein 1 precursor | 1 . . . 865 | 865/865 | (100%) | 0.0 |
| | (Antigen AC133) (CD133 antigen) - | 1 . . . 865 | 865/865 | (100%) | |
| | Homo sapiens (Human), 865 aa. | | | | |
| Q96EN6 | Similar to prominin (Mouse)-like 1 | 1 . . . 865 | 856/865 | (98%) | 0.0 |
| | (AC133-2 antigen) (MSTP061) - | 1 . . . 856 | 856/865 | (98%) | |
| | Homo sapiens (Human), 856 aa. | | | | |
| Q91XN5 | Prominin - Rattus norvegicus (Rat), | 1 . . . 865 | 528/866 | (60%) | 0.0 |
| | 857 aa. | 1 . . . 857 | 681/866 | (77%) | |
| O54990 | Prominin-like protein 1 precursor | 1 . . . 865 | 526/867 | (60%) | 0.0 |
| | (Antigen AC133 homolog) - Mus | 1 . . . 867 | 683/867 | (78%) | |
| | musculus (Mouse), 867 aa. | | | | |
| T08881 | prominin - mouse, 858 aa. | 1 . . . 865 | 521/867 | (60%) | 0.0 |
| | | 1 . . . 858 | 676/867 | (77%) | |

[0505] PFam analysis predicts that the NOV26a protein contains the domains shown in the Table 26F.

TABLE 26F
Domain Analysis of NOV26a

| | | | |
|---|---|---|---|
| Pfam | NOV26a | Identities/ | Expect |
| Domain | Match Region | Similarities for | Value |
| | | the Matched Region | |

### Example 27

[0506] The MOV27 clone was analyzed, and the nucleotide and encoded polypeptide sequences are shown in Table 27A.

TABLE 27A
NOV27 Sequence Analysis

| | | |
|---|---|---|
| NOV27a, CG55193-04 | SEQ ID NO: 617 | 1336 bp |
| DNA Sequence | ORF Start: ATG at 1 | ORF Stop: TGA at 1327 |

ATGGGTCTGGCCATGGAGCACGGAGGGTCCTACGCTCGGGCGGGGGGCAGCTCTCGGGGCTGCTGGTA
TTACCTGCGCTACTTCTTCCTCTTCGTCTCCCTCATCCAATTCCTCATCATCCTGGGGCTCGTGCTCT
TCATGGTCTATGGCAACGTGCACGTGAGCACAGAGTCCAACCTGCAGGCCACCGAGCGCCGAGCCGAG
GGCCTATACAGTCAGCTCCTAGGGCTCACGGCCTCCCAGTCCAACTTGACCAAGGAGCTCAACTTCAC
CACCCGCGCCAAGGATGCCATCATGCAGATGTGGCTGAATGCTCGCCGCGACCTGGACCGCATCAATG
CCAGCTTCCGCCAGTGCCAGGGTGACCGGGTAATCTACACGAACAATCAGAGGTACATGGCTGCCATC
ATCTTGAGTGAGAAGCAATGCAGAGATCAATTCAAGGACATGAACAAGAGCTGCGATGCCTTGCTCTT
CATGCTGAATCAGAAGGTGAAGACGCTGGAGGTGGAGATAGCCAAGGAGAAGACCATTTGCACTAAGG
ATAAGGAAAGCGTGCTGCTGAACAAACGCGTGGCGGAGGAACAGCTGGTTGAATGCGTGAAAACCCGG
GAGCTGCAGCACCAAGAGCGCCAGCTGGCCAAGGAGCAACTGCAAAAGGTGCAAGCCCTCTGCCTGCC
CCTGGACAAGGACAAGTTTGAGATGGACCTTCGTAACCTGTGGAGGGACTCCATTATCCCACGCAGCC
TGGACAACCTGGGTTACAACCTCTACCATCCCCTGGGCTCGGAATTGGCCTCCATCCGCAGAGCCTGC
GACCACATGCCCAGCCTCATGAGCTCCAAGGTGGAAGGTCAGTGCCGGAGCCTCCGGGCGGATATCGA
ACGCGTGGCCCGCGAGAACTCAGACCTCCAACGCCAGAAGCTGGAAGCCCAGCAGGGCCTGCGGGCCA
GTCAGGAGGCGAAACAGAAGGTGGAGAAGGAGGCTCAGGCCCGGGAGGCCAAGCTCCAAGCTGAATGC
TCCCGGCAGACCCAGCTAGCGCTGGAGGAGAAGGCGGTGCTGCGGAAGGAACGAGACAACCTGGCCAA
GGAGCTGGAAGAGAAGAAGAGGGAGGCGGAGCAGCTCAGGATGGAGCTGGCCATCAGAAACTCAGCCC
TGGACACCTGCATCAAGACCAAGTCGCAGCCGATGATGCCAGTGTCAAGGCCCATGGGCCCTGTCCCC
AACCCCCAGCCCATCGACCCAGCTAGCCTGGAGGAGTTCAAGAGGAAGATCCTGGAGTCCCAGAGGCC
CCCTGCAGGCATCCCTGTAGCCCCATCCAGTGGCTGAGGAGGCT

| | | | |
|---|---|---|---|
| NOV27a, CG55193-04 | SEQ ID NO: 618 | 442 aa | MW at 50568.7kD |
| Protein Sequence | | | |

MGLAMEHGGSYARAGGSSRGCWYYLRYFFLFVSLIQFLIILGLVLFMVYGNVHVSTESNLQATERRAE
GLYSQLLGLTASQSNLTKELNFTTPAKDAIMQMWLNARPDLDRINASFRQCQGDRVIYTNNQRYMAAI
ILSEKQCRDQFKDMNKSCDALLFMLNQKVKTLEVEIAKEKTICTKDKESVLLNKRVAEEQLVECVKTR
ELQHQERQLAKEQLQKVQALCLPLDKDKFEMDLRNLWRDSIIPRSLDNLGYNLYHPLGSELASIRRAC
DHMPSLMSSKVEGQCRSLRADIERVARENSDLQRQKLEAQQGLRASQEAKQKVEKEAQAREAKLQAEC
SRQTQLALEEKAVLRKERDNLAKELEEKKREAEQLRMELAIRNSALDTCIKTKSQPMMPVSRPMGPVP
NPQPIDPASLEEFKRKILESQRPPAGIPVAPSSG

| | | |
|---|---|---|
| NOV27b, 214575880 | SEQ ID NO: 619 | 1188 bp |
| DNA Sequence | ORF Start: at 1 | ORF Stop: end of sequence |

GGATCCAACGTGCACGTGAGCACAGAGTCCAACCTGCAGGCCACCGAGCACCGAGCCGAGGGCCTATA
CAGTCAGCTCCTAGGGCTCACGGCCTCCCAGTCCAACTTGACCAAGGAGCTCAACTTCACCACCCGCG
CCAAGGATGCCATCATGCAGATGTGGCTGAATGCTCGCCGCGACCTGGACCGCATCAATGCCAGCTTC
CGCCAGTGCCAGGGTGACCGGGTCATCTACACGAACAATCAGAGGTACATGGCTGCCATCATCTTGAG
TGAGAAGCAATGCAGAGATCAATTCAAGGACATGAACAAGAGCTGCGATGCCTTGCTCTTCATGCTGA
ATCAGAAGGTGAAGACGCTGGAGGTGGAGATAGCCAAGGAGAAGACCATTTGCACTAAGGATAAGGAA
AGCGTGCTGCTGAACAAACGCGTGGCGGAGGAACAGCTGGTTGAATGCGTGAAAACCCGGGAGCTGCA
GCACCAAGAGCGCCAGCTGGTCAAGGAGCAACTGCAAAAGGTGCAAGCCCTCTGCCTGCCCCTGGACA
AGGACAAGTTTGAGATGGACCTTCGTAACCTGTGGAGGGACTCCATTATCCCACGCAGCCTGGACAAC
CTGGGTTACAACCTCTACCATCCCCTGGGCTCGGAATTGGCCTCCATCCGCAGAGCCTGCGACCACAT
GCCCAGCCTCATGAGCTCCAAGGTGGAGGAGCTGGCCCGGAGCCTCCGGGCGGATATCGAACGCGTGG
TCCGCGAGAACTCAGACCTCCAACGCCAGAAGCTGGAAGCCCAGCAGGGCCTGCGGGCCAGTCAGGAG
GCGAAACAGAAGGTGGAGAAGGAGGCTCAGGCCCGGGAGGCCAAGCTCCAAGCTGAATGCTCCCGGCA
GACCCAGCTAGCGCTGGAGGAGAAGGCGGTGCTGCGGAGGGAACGAGACAACCTGGCCAAGGAGCTGG
AAGAGAAGAAGAGGGAGGCGGAGCAGCTCAGGATGGAGCTGGCCATCAGAAACTCAGCCCTGGACACC
TGCATCAAGACCAAGTCGCAGCCGATGATGCCAGTGTCAAGGCCCATGGGCCCTGTCCCCAACCCCCA
GCCCATCGACCCAGCTAGCCTGGAGGAGTTCAAGAGGAAGATCCTGGAGTCCCAGAGGCCCCCTGCAG
GCATCCCTGTAGCCCCATCCAGTGGCCTCGAG

| | | | |
|---|---|---|---|
| NOV27b, 214575880 | SEQ ID NO: 620 | 396 aa | MW at 45387.5kD |
| Protein Sequence | | | |

GSNVHVSTESNLQATEHRAEGLYSQLLGLTASQSNLTKELNFTTRAKDAIMQMWLNARRDLDRINASF
RQCQGDRVIYTNNQRYMAAIILSEKQCRDQFKDMNKSCDALLFMLNQKVKTLEVEIAKEKTICTKDKE
SVLLNKRVAEEQLVECVKTRELQHQERQLVKEQLQKVQALCLPLDKDKFEMDLRNLWRDSIIPRSLDN
LGYNLYHPLGSELASIRRACDHMPSLMSSKVEELARSLRADIERVVRENSDLQRQKLEAQQGLRASQE
AKQKVEKEAQAREAKLQAECSRQTQLALEEKAVLRRERDNLAKELEEKKREAEQLRMELAIRNSALDT
CIKTKSQPMMPVSRPMGPVPNPQPIDPASLEEFKRKILESQRPPAGIPVAPSSGLE

| | | |
|---|---|---|
| NOV27c, 214458684 | SEQ ID NO: 621 | 1419 bp |
| DNA Sequence | ORF Start: at 1 | ORF Stop: end of sequence |

GAGATTCCCCCCCCTCGGGTCTCTTGGGCCTGTCCATGCGCCCCCCCCTCCGTGCTCCATGGCCAGAC
CCATGGATCCATGGGTCTGGCCATGGAGCACGGAGGGTCCTACGCTCGGGCGGGGGGCAGCTCTCGGG
GCTGCTGGTATTACCTGCGCTACTTCTTCCTCTTCGTCTCCCTCATCCAATTCCTCATCATCCTGGGG
CTCGTGCTCTTCATGGTCTATGGCAACGTGCACGTGAGCACAGAGTCCAACCTGCAGGCCACCGAGCG
CCGAGCCGAGGGCCTATACAGTCAGCTCCTAGGGCTCACGGCCTCCCAGTCCAACTTGACCAAGGAGC
TCAACTTCACCACCCGCGCCAAGGATGCCATCATGCAGATGTGGCTGAATGCTCGCCGCGACCTGGAC
CGCATCAATGCCAGCTTCCGCCAGTGCCAGGGTGACCGGGTCATCTACACGAACAATCAGAGGTACAT
GGCTGCCATCATCTTGAGTGAGAAGCAATGCAGAGATCAATTCAAGGACATGAACAAGAGCTGCGATG
CCTTGCTCTTCATGCTGAATCAGAAGGTGAAGACGCTGGAGGTGGAGATAGCCAAGGAGAAGACCATT
TGCACTAAGGATAAGGAAAGCGTGCTGCTGAACAAACGCGTGGCGGAGGAACAGCTGGTTGAATGCGT
GAAAACCCGGGAGCTGCAGCACCAAGAGCGCCAGCTGGCCAAGGAGCAACTGCAAAAGGTGCAAGCCC
TCTGCCTGCCCCTGGACAAGGACAAGTTTGAGATGGACCTTCGTAACCTGTGGAGGGACTCCATTATC
CCACGCAGCCTGGACAACCTGGGTTACAACCTCTACCATCCCCTGGGCTCGGAATTGGCCTCCATCCG
CAGAGCCTGCGACCACATGCCCAGCCTCATGAGCTCCAAGGTGGAGGAGCTGGCCCGGAGCCTCCGGG
CGGATATCGAACGCGTGGCCCGCGAGAACTCAGACCTCCAACGCCAGAAGCTGGAAGCCCAGCAGGGC
CTGCGGGCCAGTCAGGAGGCGAAACAGAAGGTGGAGAAGGAGGCTCAGGCCCGGGAGGCCAAGCTCCA
AGCTGAATGCTCCCGGCAGACCCAGCTAGCGCTGGAGGAGAAGGCGGTGCTGCGGAAGGAACGAGACA
ACCTGGCCAAGGAGCTGGAAGAGAAGAAGAGGGAGGCGGAGCAGCTCAGGATGGAGCTGGCCATCAGA
AACTCAGCCCTGGACACCTGCATCAAGACCAAGTCGCAGCCGATGATGCCAGTGTCAAGGCCCATGGG
CCCTGTCCCCAACCCCCAGCCCATCGACCCAGCTAGCCTGGAGGAGTTCAAGAGGAAGATCCTGGAGT
CCCAGAGGCCCCCTGCAGGCATCCCTGTAGCCCCATCCAGTGGCCTCGAG

| | | | |
|---|---|---|---|
| NOV27c, 214458684 | SEQ ID NO: 622 | 470 aa | MW at 53542.0kD |
| Protein Sequence | | | |

EIPPPRVSWACPCAPPSVLHGQTHGSMGLAMEHGGSYARAGGSSRGCWYYLRYFFLFVSLIQFLIILG
LVLFMVYGNVHVSTESNLQATERRAEGLYSQLLGLTASQSNLTKELNFTTRAKDAIMQMWLNARRDLD
RINASFRQCQGDRVIYTNNQRYMAAIILSEKQCRDQFKDMNKSCDALLFMLNQKVKTLEVEIAKEKTI
CTKDKESVLLNKRVAEEQLVECVKTRELQHQERQLAKEQLQKVQALCLPLDKDKFEMDLRNLWRDSII
PRSLDNLGYNLYHPLGSELASIRRACDHMPSLMSSKVEELARSLRADIERVARENSDLQRQKLEAQQG
LRASQEAKQKVEKEAQAREAKLQAECSRQTQLALEEKAVLRKERDNLAKELEEKKREAEQLRMELAIR
NSALDTCIKTKSQPMMPVSRPMGPVPNPQPIDPASLEEFKRKILESQRPPAGIPVAPSSGLE

| | | |
|---|---|---|
| NOV27d, 214458688 | SEQ ID NO: 623 | 1404 bp |
| DNA Sequence | ORF Start: at 1 | ORF Stop: end of sequence |

TTCGCCCTTGGATCCATGGGTCTGGCCATGGAGCACGGAGGGTCCTACGCTCGGGCGGGGGGCAGCTC
TCGGGGCTGCTGGTATTACCTGCGCTACTTCTTCCTCTTCGTCTCCCTCATCCAATTCCTCATCATCC
TGGGGCTCGTGCTCTTCATGGTCTATGGCAACGTGCACGTGAGCACAGAGTCCAACCTGCAGGCCACC
GAGCGCCGAGCCGAGGGCCTATACAGTCAGCTCCTAGGGCTCACGGCCTCCCAGTCCAACTTGACCAA
GGAGCTCAACTTCACCACCCGCGCCAAGGATGCCATCATGCAGATGTGGCTGAATGCTCGCCGCGACC
TGGACCGCATCAATGCCAGCTTCCGCCAGTGCCAGGGTGACCGGGTCATCTACACGAACAATCAGAGG
TACATGGCTGCCATCATCTTGAGTGAGAAGCAATGCAGAGATCAATTCAAGGACATGAACAAGAGCTG
CGATGCCTTGCTCTTCATGCTGAATCAGAAGGTGAAGACGCTGGAGGTGGAGATAGCCAAGGAGAAGA
CCATTTGCACTAAGGATAAGGAAAGCGTGCTGCTGAACAAACGCGTGGCGGAGGAACAGCTGGTTGAA
TGCGTGAAAACCCGGGAGCTGCGGCACCAAGAGCGCCAGCTGGCCAAGGAGCAACTGCAAAAGGTGCA
AGCCCTCTGCCTGCCCCTGGACAAGGACAAGTTTGAGATGGACCTTCGTAACCTGTGGAGGGACTCCA
TTATCCCACGCAGCCTGGACAACCTGGGTTACAACCTCTACCATCCCCTGGGCTCGGAATTGGCCTCC
ATCCGCAGAGCCTGCGACCACATGCCCAGCCTCATGAGCTCCAAGGTGGAGGAGCTGGCCCGGAGCCT
CCGGGCGGATATCGAACGCGTGGCCCGCGAGAACTCAGACCTCCAACGCCAGAAGCTGGAAGCCCAGC
AGGGCCTGCGGGCCAGTCAGGAGGCGAAACAGAAGGTGGAGAAGGAGGCTCAGGCCCGGGAGGCCAAG
CTCCAAGCTGAATGCTCCCGGCAGACCCAGCTAGCGCTGGAGGAGAAGGCGGTGCTGCGGAAGGAACG
AGACAACCTGGCCAAGGAGCTGGAAGAGAAGAAGAGGGAGGCGGAGCAGCTCAGGATGGAGCTGGCCA
TCAGAAACTCAGCCCTGGACACCTGCATCAAGACCAAGTCGCAGCCGATGATGCCAGTGTCAAGGCCC
ATGGGCCCTGTCCCCAACCCCCAGCCCATCGACCCAGCTAGCCTGGAGGAGTTCAAGAGGAAGATCCT
GGAGTCCCAGAGGCCCCCTGCAGGCATCCCTGTAGCCCCATCCAGTGGCCTCGAGGCCACTGGATGGG
GCTACAGGGATGCCTCCGTGCTCCATGGCCAGACCCATGGATCC

| | | | |
|---|---|---|---|
| NOV27d, 214458688 | SEQ ID NO: 624 | 468 aa | MW at 53321.6kD |
| Protein Sequence | | | |

FALGSMGLAMEHGGSYARAGGSSRGCWYYLRYFFLFVSLIQFLITLGLVLFMVYGNVHVSTESNLQAT
ERRAEGLYSQLLGLTASQSNLTKELNFTTRAKDAIMQMWLNARRDLDRINASFRQCQGDRVIYTNNQR
YMAAIILSEKQCRDQFKDMNKSCDALLFMLNQKVKTLEVEIAKEKTICTKDKESVLLNKRVAEEQLVE
CVKTRELRHQERQLAKEQLQKVQALCLPLDKDKFEMDLRNLWRDSIIPRSLDNLGYNLYHPLGSELAS
IRRACDHMPSLMSSKVEELARSLRADIERVARENSDLQRQKLEAQQGLRASQEAKQKVEKEAQAREAK
LQAECSRQTQLALEEKAVLRKERDNLAKELEEKKREAEQLRMELAIRNSALDTCIKTKSQPMMPVSRP
MGPVPNPQPIDPASLEEFKRKILESQRPPAGIPVAPSSGLEATGWGYPDASVLHGQTHGS

| | | |
|---|---|---|
| NOV27e, CG55193-01 | SEQ ID NO: 625 | 1366 bp |
| DNA Sequence | ORF Start: ATG at 1 | ORF Stop: TGA at 1327 |

ATGGGTCTGGCCATGGAGCACGGAGGGTCCTACGCTCGGGCGGGGGGCAGCTCTCGGGGCTGCTGGTA
TTACCTGCGCTACTTCTTCCTCTTCGTCTCCCTCATCCAATTCCTCATCATCCTGGGGCTCGTGCTCT
TCATGGTCTATGGCAACGTGCACGTGAGCACAGAGTCCAACCTGCAGGCCACCGAGCGCCGAGCCGAG
GGCCTATACAGTCAGCTCCTAGGGCTCACGGCCTCCCAGTCCAACTTGACCAAGGAGCTCAACTTCAC
CACCCGCGCCAAGGATGCCATCATGCAGATGTGGCTGAATGCTCGCCGCGACCTGGACCGCATCAATG
CCAGCTTCCGCCAGTGCCAGGGTGACCGGGTAATCTACACGAACAATCAGAGGTACATGGCTGCCATC
ATCTTGAGTGAGAAGCAATGCAGAGATCAATTCAAGGACATGAACAAGAGCTGCGATGCCTTGCTCTT
CATGCTGAATCAGAAGGTGAAGACGCTGGAGGTGGAGATAGCCAAGGAGAAGACCATTTGCACTAAGG
ATAAGGAAAGCGTGCTGCTGAACAAACGCGTGGCGGAGGAACAGCTGGTTGAATGCGTGAAAACCCGG
GAGCTGCAGCACCAAGAGCGCCAGCTGGCCAAGGAGCAACTGCAAAAGGTGCAAGCCCTCTGCCTGCC
CCTGGACAAGGACAAGTTTGAGATGGACCTTCGTAACCTGTGGAGGGACTCCATTATCCCACGCAGCC
TGGACAACCTGGGTTACAACCTCTACCATCCCCTGGGCTCGGAATTGGCCTCCATCCGCAGAGCCTGC
GACCACATGCCCAGCCTCATGAGCTCCAAGGTGGAAGGTCAGTGCCGGAGCCTCCGGGCGGATATCGA
ACGCGTGGCCCGCGAGAACTCAGACCTCCAACGCCAGAAGCTGGAAGCCCAGCAGGGCCTGCGGGCCA
GTCAGGAGGCGAAACAGAAGGTGGAGAAGGAGGCTCAGGCCCGGGAGGCCAAGCTCCAAGCTGAATGC
TCCCGGCAGACCCAGCTAGCGCTGGAGGAGAAGGCGGTGCTGCGGAAGGAACGAGACAACCTGGCCAA
GGAGCTGGAAGAGAAGAAGAGGGAGGCGGAGCAGCTCAGGATGGAGCTGGCCATCAGAAACTCAGCCC
TGGACACCTGCATCAAGACCAAGTCGCAGCCGATGATGCCAGTGTCAAGGCCCATGGGCCCTGTCCCC
AACCCCCAGCCCATCGACCCAGCTAGCCTGGAGGAGTTCAAGAGGAAGATCCTGGAGTCCCAGAGGCC
CCCTGCAGGCATCCCTGTAGCCCCATCCAGTGGCTGAGGAGGCTCCGGCACTGACCTAAGGGCGAATC
CCAGGA

| | | | |
|---|---|---|---|
| NOV27e, CG55193-01 | SEQ ID NO: 626 | 442 aa | MW at 50568.7kD |
| Protein Sequence | | | |

MGLAMEHGGSYARAGGSSRGCWYYLRYFFLFVSLIQFLIILGLVLFMVYGNVHVSTESNLQATERPAE
GLYSQLLGLTASQSNLTKELNFTTRAKDAIMQMWLNARRDLDRINASFRQCQGDRVIYTNNQRYMAAI
ILSEKQCRDQFKDMNKSCDALLFMLNQKVKTLEVEIAKEKTICTKDKESVLLNKRVAEEQLVECVKTR
ELQHQERQLAKEQLQKVQALCLPLDKDKFEMDLRNLWRDSIIPRSLDNLGYNLYHPLGSELASIRRAC
DHMPSLMSSKVEGQCRSLRADIERVARENSDLQRQKLEAQQGLHASQEAKQKVEKEAQAREAKLQAEC
SRQTQLALEEKAVLRKERDNLAKELEEKKREAEQLRMELAIRNSALDTCIKTKSQPMMPVSRPMGPVP
NPQPIDPASLEEFKRKILESQRPPAGIPVAPSSG

| | | |
|---|---|---|
| NOV27f, CG55193-02 | SEQ ID NO: 627 | 1367 bp |
| DNA Sequence | ORF Start: ATG at 1 | ORF Stop: TGA at 1327 |

ATGGGTCTGGCCATGGAGCACGGAGGGTCCTACGCTCGGGCGGGGGGCAGCTCTCGGGGCTGCTGGTA
TTACCTGCGCTACTTCTTCCTCTTCGTCTCCCTCATCCAATTCCTCATCATCCTGGGGCTCGTGCTCT
TCATGGTCTATGGCAACGTGCACGTGAGCACAGAGTCCAACCTGCAGGCCACCGAGCGCCGAGCCGAG
GGCCTATACAGTCAGCTCCTAGGGCTCACGGCCTCCCAGTCCAACTTGACCAAGGAGCTCAACTTCAC
CACCCGCGCCAAGGATGCCATCATGCAGATGTGGCTGAATGCTCGCCGCGACCTGGACCGCATCAATG
CCAGCTTCCGCCAGTGCCAGGGTGACCGGGTAATCTACACGAACAATCAGAGGTACATGGCTGCCATC
ATCTTGAGTGAGAAGCAATGCAGAGATCAATTCAAGGACATGAACAAGAGCTGCGATGCCTTGCTCTT
CATGCTGAATCAGAAGGTGAAGACGCTGGAGGTGGAGATAGCCAAGGAGAAGACCATTTGCACTAAGG
ATAAGGAAAGCGTGCTGCTGAACAAACGCGTGGCGGAGGAACAGCTGGTTGAATGCGTGAAAACCCGG
GAGCTGCAGCACCAAGAGCGCCAGCTGGCCAAGGAGCAACTGCAAAAGGTGCAAGCCCTCTGCCTGCC
CCTGGACAAGGACAAGTTTGAGATGGACCTTCGTAACCTGTGGAGGGACTCCATTATCCCACGCAGCC
TGGACAACCTGGGTTACAACCTCTACCATCCCCTGGGCTCGGAATTGGCCTCCATCCGCAGAGCCTGC
GACCACATGCCCAGCCTCATGAGCTCCAAGGTGGAAGGTCAGTGCCGGAGCCTCCGGGCGGATATCGA
ACGCGTGGCCCGCGAGAACTCAGACCTCCAACGCCAGAAGCTGGAAGCCCAGCAGGGCCTGCGGGCCA
GTCAGGAGGCGAAACAGAAGGTGGAGAAGGAGGCTCAGGCCCGGGAGGCCAAGCTCCAAGCTGAATGC
TCCCGGCAGACCCAGCTAGCGCTGGAGGAGAAGGCGGTGCTGCGGAAGGAACGAGACAACCTGGCCAA
GGAGCTGGAAGAGAAGAAGAGGGAGGCGGAGCAGCTCAGGATGGAGCTGGCCATCAGAAACTCAGCCC
TGGACACCTGCATCAAGACCAAGTCGCAGCCGATGATGCCAGTGTCAAGGCCCATGGGCCCTGTCCCC
AACCCCCAGCCCATCGACCCAGCTAGCCTGGAGGAGTTCAAGAGGAAGATCCTGGAGTCCCAGAGGCC
CCCTGCAGGCATCCCTGTAGCCCCATCCAGTGGCTGAGGAGGCTCCGGCACTGACCTAAGGGCGAATC
CCAGCAA

| | | | |
|---|---|---|---|
| NOV27f, CG55193-02 | SEQ ID NO: 628 | 442 aa | MW at 50568.7kD |
| Protein Sequence | | | |

MGLAMEHGGSYAPAGGSSRGCWYYLRYFFLFVSLIQFLIILGLVLFMVYGNVHVSTESNLQATERRAE
GLYSQLLGLTASQSNLTKELNFTTRAKDAIMQMWLNARRDLDRINASFRQCQGDRVIYTNNQRYMAAI
ILSEKQCRDQFKDMNKSCDALLFMLNQKVKTLEVEIAKEKTICTKDKESVLLNKRVAEEQLVECVKTR
ELQHQERQLAKEQLQKVQALCLPLDKDKFEMDLRNLWRDSIIPRSLDNLGYNLYHPLGSELASIRRAC
DHMPSLMSSKVEGQCRSLRADIERVARENSDLQRQKLEAQQGLRASQEAKQKVEKEAQAREAKLQAEC
SRQTQLALEEKAVLRKERDNLAKELEEKKREAEQLRMELAIRNSALDTCIKTKSQPMMPVSRPMGPVP
NPQPIDPASLEEFKRKILESQRPPAGIPVAPSSG

| | | |
|---|---|---|
| NOV27g, CG55193-03 | SEQ ID NO: 629 | 1367 bp |
| DNA Sequence | ORF Start: ATG at 1 | ORF Stop: TGA at 1327 |

ATGGGTCTGGCCATGGAGCACGGAGGGTCCTACGCTCGGGCGGGGGGCAGCTCTCGGGGCTGCTGGTA
TTACCTGCGCTACTTCTTCCTCTTCGTCTCCCTCATCCAATTCCTCATCATCCTGGGGCTCGTGCTCT
TCATGGTCTATGGCAACGTGCACGTGAGCACAGAGTCCAACCTGCAGGCCACCGAGCGCCGAGCCGAG
GGCCTATACAGTCAGCTCCTAGGGCTCACGGCCTCCCAGTCCAACTTGACCAAGGAGCTCAACTTCAC
CACCCGCGCCAAGGATGCCATCATGCAGATGTGGCTGAATGCTCGCCGCGACCTGGACCGCATCAATG
CCAGCTTCCGCCAGTGCCAGGGTGACCGGGTAATCTACACGAACAATCAGAGGTACATGGCTGCCATC
ATCTTGAGTGAGAAGCAATGCAGAGATCAATTCAAGGACATGAACAAGAGCTGCGATGCCTTGCTCTT
CATGCTGAATCAGAAGGTGAAGACGCTGGAGGTGGAGATAGCCAAGGAGAAGACCATTTGCACTAAGG
ATAAGGAAAGCGTGCTGCTGAACAAACGCGTGGCGGAGGAACAGCTGGTTGAATGCGTGAAAACCCGG
GAGCTGCAGCACCAAGAGCGCCAGCTGGCCAAGGAGCAACTGCAAAAGGTGCAAGCCCTCTGCCTGCC
CCTGGACAAGGACAAGTTTGAGATGGACCTTCGTAACCTGTGGAGGGACTCCATTATCCCACGCAGCC
TGGACAACCTGGGTTACAACCTCTACCATCCCCTGGGCTCGGAATTGGCCTCCATCCGCAGAGCCTGC
GACCACATGCCCAGCCTCATGAGCTCCAAGGTGGAAGGTCAGTGCCGGAGCCTCCGGGCGGATATCGA
ACGCGTGGCCCGCGAGAACTCAGACCTCCAACGCCAGAAGCTGGAAGCCCAGCAGGGCCTGCGGGCCA
GTCAGGAGGCGAAACAGAAGGTGGAGAAGGAGGCTCAGGCCCGGGAGGCCAAGCTCCAAGCTGAATGC
TCCCGGCAGACCCAGCTAGCGCTGGAGGAGAAGGCGGTGCTGCGGAAGGAACGAGACAACCTGGCCAA
GGAGCTGGAAGAGAAGAAGAGGGAGGCGGAGCAGCTCAGGATGGAGCTGGCCATCAGAAACTCAGCCC
TGGACACCTGCATCAAGACCAAGTCGCAGCCGATGATGCCAGTGTCAAGGCCCATGGGCCCTGTCCCC
AACCCCCAGCCCATCGACCCAGCTAGCCTGGAGGAGTTCAAGAGGAAGATCCTGGAGTCCCAGAGGCC
CCCTGCAGGCATCCCTGTAGCCCCATCCAGTGGCTGAGGAGGCTCCGGCACTGACCTAAGGGCGAATC
CCAGCAA

| | | | |
|---|---|---|---|
| NOV27g, CG55193-03 | SEQ ID NO: 630 | 442 aa | MW at 50568.7kD |
| Protein Sequence | | | |

MGLAMEHGGSYARAGGSSRGCWYYLRYFFLFVSLIQFLIILGLVLFMVYGNVHVSTESNLQATERRAE
GLYSQLLGLTASQSNLTKELNFTTRAKDAIMQMWLNARRDLDRINASFRQCQGDRVIYTNNQRYMAAI
ILSEKQCRDQFKDMNKSCDALLFMLNQKVKTLEVEIAKEKTICTKDKESVLLNKRVAEEQLVECVKTR
ELQHQERQLAKEQLQKVQALCLPLDKDKFEMDLRNLWRDSIIPRSLDNLGYNLYHPLGSELASIRRAC
DHMPSLMSSKVEGQCRSLRADIERVARENSDLQRQKLEAQQGLRASQEAKQKVEKEAQAREAKLQAEC
SRQTQLALEEKAVLRKERDNLAKELEEKKREAEQLRMELAIRNSALDTCIKTKSQPMMPVSRPMGPVP
NPQPIDPASLEEFKRKILESQRPPAGIPVAPSSG

| | | |
|---|---|---|
| NOV27h, CG55193-05 | SEQ ID NO: 631 | 1188 bp |
| DNA Sequence | ORF Start: at 7 | ORF Stop: at 1183 |

GGATCCAACGTGCACGTGAGCACAGAGTCCAACCTGCAGGCCACCGAGCACCGAGCCGAGGGCCTATA
CAGTCAGCTCCTAGGGCTCACGGCCTCCCAGTCCAACTTGACCAAGGAGCTCAACTTCACCACCCGCG
CCAAGGATGCCATCATGCAGATGTGGCTGAATGCTCGCCGCGACCTGGACCGCATCAATGCCAGCTTC
CGCCAGTGCCAGGGTGACCGGGTCATCTACACGAACAATCAGAGGTACATGGCTGCCATCATCTTGAG
TGAGAAGCAATGCAGAGATCAATTCAAGGACATGAACAAGAGCTGCGATGCCTTGCTCTTCATGCTGA
ATCAGAAGGTGAAGACGCTGGAGGTGGAGATAGCCAAGGAGAAGACCATTTGCACTAAGGATAAGGAA
AGCGTGCTGCTGAACALACGCGTGGCGGAGGAACAGCTGGTTGAATGCGTGAAAACCCGGGAGCTGCA
GCACCAAGAGCGCCAGCTGGTCAAGGAGCAACTGCAAAAGGTGCAAGCCCTCTGCCTGCCCCTGGACA
AGGACAAGTTTGAGATGGACCTTCGTAACCTGTGGAGGGACTCCATTATCCCACGCAGCCTGGACAAC
CTGGGTTACAACCTCTACCATCCCCTGGGCTCGGAATTGGCCTCCATCCGCAGAGCCTGCGACCACAT
GCCCAGCCTCATGAGCTCCAAGGTGGAGGAGCTGGCCCGGAGCCTCCGGGCGGATATCGAACGCGTGG
TCCGCGAGAACTCAGACCTCCAACGCCAGAAGCTGGAAGCCCAGCAGGGCCTGCGGGCCAGTCAGGAG
GCGAAACAGAAGGTGGAGAAGGAGGCTCAGGCCCGGGAGGCCAAGCTCCAAGCTGAATGCTCCCGGCA
GACCCAGCTAGCGCTGGAGGAGAAGGCGGTGCTGCGGAGGGAACGAGACAACCTGGCCAAGGAGCTGG
AAGAGAAGAAGAGGGAGGCGGAGCAGCTCAGGATGGAGCTGGCCATCAGAAACTCAGCCCTGGACACC
TGCATCAAGACCAAGTCGCAGCCGATGATGCCAGTGTCAAGGCCCATGGGCCCTGTCCCCAACCCCCA
GCCCATCGACCCAGCTAGCCTGGAGGAGTTCAAGAGGAAGATCCTGGAGTCCCAGAGGCCCCCTGCAG
GCATCCCTGTAGCCCCATCCAGTGGCCTCGAG

| | | | |
|---|---|---|---|
| NOV27h, CG55193-05 | SEQ ID NO: 632 | 392 aa | MW at 45001.1kD |
| Protein Sequence | | | |

NVHVSTESNLQATEHRAEGLYSQLLGLTASQSNLTKELNFTTRAKDAIMQMWLNARRDLDRINASFRQ
CQGDRVIYTNNQRYMAAIILSEKQCRDQFKDMNKSCDALLFMLNQKVKTLEVEIAKEKTICTKDKESV
LLNKRVAEEQLVECVKTRELQHQERQLVKEQLQKVQALCLPLDKDKFEMDLRNLWRDSIIPRSLDNLG
YNLYHPLGSELASIRRACDHMPSLMSSKVEELARSLRADIERVVRENSDLQRQKLEAQQGLRASQEAK
QKVEKEAQAREAKLQAECSRQTQLALEEKAVLRRERDNLAKELEEKKREAEQLRMELAIRNSALDTCI
KTKSQPMMPVSRPMGPVPNPQPIDPASLEEFKRKILESQRPPAGIPVAPSSG

| | | |
|---|---|---|
| NOV27i, CG55193-06 | SEQ ID NO: 633 | 1188 bp |
| DNA Sequence | ORF Start: at 7 | ORF Stop: at 1183 |

GGATCCAACGTGCACGTGAGCACAGAGTCCAACCTGCAGGCCACCGAGCGCCGAGCCGAGGGCCTATA
CAGTCAGCTCCTAGGGCTCACGGCCTCCCAGTCCAACTTGACCAAGGAGCTCAACTTCACCACCCGCG
CCAAGGATGCCATCATGCAGATGTGGCTGAATGCTCGCCGCGACCTGGACCGCATCAATGCCAGCTTC
CGCCAGTGCCAGGGTGACCGGGTCATCTACACGAACAATCAGAGGTACATGGCTGCCATCATCTTGAG
TGAGAAGCAATGCAGAGATCAATTCAAGGACATGAACAAGAGCTGCGATGCCTTGCTCTTCATGCTGA
ATCAGAAGGTGAAGACGCTGGAGGTGGAGATAGCCAAGGAGAAGACCATTTGCACTAAGGATAAGGAA
AGCGTGCTGCTGAACAAACGCGTGGCGGAGGAACAGCTGGTTGAATGCGTGAAAACCCGGGAGCTGCA
GCACCAAGAGCGCCAGCTGGCCAAGGAGCAACTGCAAAAGGTGCAAGCCCTCTGCCTGCCCCTGGACA
AGGACAAGTTTGAGATGGACCTTCGTAACCTGTGGAGGGACTCCATTATCCCACGCAGCCTGGACAAC
CTGGGTTACAACCTCTACCATCCCCTGGGCTCGGAATTGGCCTCCATCCGCAGAGCCTGCGACCACAT
GCCCAGCCTCATGAGCTCCAAGGTGGAGGAGCTGGCCCGGAGCCTCCGGGCGGATATCGAACGCGTGG
CCCGCGAGAACTCAGACCTCCAACGCCAGAAGCTGGAAGCCCAGCAGGGCCTGCGGGCCAGTCAGGAG
GCGAAACAGAAGGTGGAGAAGGAGGCTCAGGCCCGGGAGGCCAAGCTCCAAGCTGAATGCTCCCGGCA
GACCCAGCTAGCGCTGGAGGAGAAGGCGGTGCTGCGGAAGGAACGAGACAACCTGGCCAAGGAGCTGG
AAGAGAAGAAGAGGGAGGCGGAGCAGCTCAGGATGGAGCTGGCCATCAGAAACTCAGCCCTGGACACC
TGCATCAAGACCAAGTCGCAGCCGATGATGCCAGTGTCAAGGCCCATGGGCCCTGTCCCCAACCCCCA
GCCCATCGACCCAGCTAGCCTGGAGGAGTTCAAGAGGAAGATCCTGGAGTCCCAGAGGCCCCCTGCAG
GCATCCCTGTAGCCCCATCCAGTGGCCTCGAG

| | | | |
|---|---|---|---|
| NOV27i, CG55193-06 | SEQ ID NO: 634 | 392 aa | MW at 44936.0kD |
| Protein Sequence | | | |

NVHVSTESNLQATERRAEGLYSQLLGLTASQSNLTKELNFTTEAKDAIMQMWLNARRDLDRINASFRQ
CQGDRVIYTNNQRYMAAIILSEKQCRDQFKDMNKSCDALLFMLNQKVKTLEVEIAKEKTICTKDKESV
LLNKRVAEEQLVECVKTRELQHQERQLAKEQLQKVQALCLPLDKDKFEMDLRNLWRDSIIPRSLDNLG
YNLYHPLGSELASIRRACDHMPSLMSSKVEELARSLRADIERVARENSDLQRQKLEAQQGLRASQEAK
QKVEKEAQAREAKLQAECSRQTQLALEEKAVLRKERDNLAKELEEKKREAEQLRMELAIRNSALDTCI
KTKSQPMNPVSRPMGPVPNPQPIDPASLEEFKRKILESQRPPAGIPVAPSSG

| | | |
|---|---|---|
| NOV27j, CG55193-07 | SEQ ID NO: 635 | 1410 bp |
| DNA Sequence | ORF Start: ATG at 79 | ORF Stop: at 1405 |

GAGATTCCCCCCCCTCGGGTCTCTTGGGCCTGTCCATGCGCCCCCCCCTCCGTGCTCCATGGCCAGAC
CCATGGATCCATGGGTCTGGCCATGGAGCACGGAGGGTCCTACGCTCGGGCGGGGGGCAGCTCTCGGG
GCTGCTGGTATTACCTGCGCTACTTCTTCCTCTTCGTCTCCCTCATCCAATTCCTCATCATCCTGGGG
CTCGTGCTCTTCATGGTCTATGGCAACGTGCACGTGAGCACAGAGTCCAACCTGCAGGCCACCGAGCG
CCGAGCCGAGGGCCTATACAGTCAGCTCCTAGGGCTCACGGCCTCCCAGTCCAACTTGACCAAGGAGC
TCAACTTCACCACCCGCGCCAAGGATGCCATCATGCAGATGTGGCTGAATGCTCGCcGCGACCTGGAC
CGCATCAATGCCAGCTTCCGCCAGTGCCAGGGTGACCGGGTCATCTACACGAACAATCAGAGGTACAT
GGCTGCCATCATCTTGAGTGAGAAGCAATGCAGAGATCAATTCAAGGACATGAACAAGAGCTGCGATG
CCTTGCTCTTCATGCTGAATCAGAAGGTGAAGACGCTGGAGGTGGAGATAGCCAAGGAGAAGACCATT
TGCACTAAGGATAAGGAAAGCGTGCTGCTGAACAAACGCGTGGCGGAGGAACAGCTGGTTGAATGCGT
GAAAACCCGGGAGCTGCAGCACCAAGAGCGCCAGCTGGCCAAGGAGCAACTGCAAAAGGTGCAAGCCC
TCTGCCTGCCCCTGGACAAGGACAAGTTTGAGATGGACCTTCGTAACCTGTGGAGGGACTCCATTATC
CCACGCAGCCTGGACAACCTGGGTTACAACCTCTACCATCCCCTGGGCTCGGAATTGGCCTCCATCCG
CAGAGCCTGCGACCACATGCCCAGCCTCATGAGCTCCAAGGTGGAGGAGCTGGCCCGGAGCCTCCGGG
CGGATATCGAACGCGTGGCCCGCGAGAACTCAGACCTCCAACGCCAGAAGCTGGAAGCCCAGCAGGGC
CTGCGGGCCAGTCAGGAGGCGAAACAGAAGGTGGAGAAGGAGGCTCAGGCCCGGGAGGCCAAGCTCCA
AGCTGAATGCTCCCGGCAGACCCAGCTAGCGCTGGAGGAGAAGGCGGTGCTGCGGAAGGAACGAGACA
ACCTGGCCAAGGAGCTGGAAGAGAAGAAGAGGGAGGCGGAGCAGCTCAGGATGGAGCTGGCCATCAGA
AACTCAGCCCTGGACACCTGCATCAAGACCAAGTCGCAGCCGATGATGCCAGTGTCAAGGCCCATGGG
CCCTGTCCCCAACCCCCAGCCCATCGACCCAGCTAGCCTGGAGGAGTTCAAGAGGAAGATCCTGGAGT
CCCAGAGGCCCCCTGCAGGCATCCCTGTAGCCCCATCCAGTGGCCTCGAG

| | | | |
|---|---|---|---|
| NOV27j, CG55193-07 | SEQ ID NO: 636 | 442 aa | MW at 50593.7kD |
| Protein Sequence | | | |

MGLAMEHGGSYARAGGSSRGCWYYLRYFFLFVSLIQFLIILGLVLFMVYGNVHVSTESNLQATERRAE
GLYSQLLGLTASQSNLTKELNFTTRAKDAIMQMWLNARRDLDRINASFRQCQGDRVIYTNNQRYMAAI
ILSEKQCRDQFKDMNKSCDALLFMLNQKVKTLEVEIAKEKTICTKDKESvLLNKRvAEEQLVECVKTR
ELQHQERQLAKEQLQKVQALCLPLDKDKFEMDLRNLWRDSIIPRSLDNLGYNLYHPLGSELASIRRAC
DHMPSLMSSKVEELARSLRADIERVARENSDLQRQKLEAQQGLRASQEAKQKVEKEAQAREAKLQAEC
SRQTQLALEEKAVLRKERDNLAKELEEKKREAEQLRMELAIRNSALDTCIKTKSQPMMPVSRPMGPVP
NPQPIDPASLEEFKRKTLESQRPPAGIPVAPSSG

[0507] A ClustalW comparison of the above protein sequences yields the following sequence alignment shown in Table 27B.

TABLE 27B
Comparison of the NOV27 protein sequences.

NOV27a --------------------------MGLAMEHGGSYARAGGSSRGCWYYLRYFFLFVSL
NOV27b ------------------------------------------------------------
NOV27c EIPPPRVSWACPCAPPSVLHGQTHGSMGLAMEHGGSYARAGGSSRGCWYYLRYFFLFVSL
NOV27d ---------------------FALGSMGLAMEHGGSYARAGGSSRGCWYYLRYFFLFVSL
NOV27e --------------------------MGLAMEHGGSYARAGGSSRGCWYYLRYFFLFVSL
NOV27f --------------------------MGLAMEHGGSYAHAGGSSRGCWYYLRYFFLFVSL
NOV27g --------------------------MGLAMEHGGSYARAGGSSRGCWYYLRYFFLFVSL
NOV27h ------------------------------------------------------------
NOV27i ------------------------------------------------------------
NOV27j --------------------------MGLAMEHGGSYARAGGSSRGCWYYLRYFFLFVSL
NOV27a IQFLIILGLVLFMVYGNVHVSTESNLQATERRAEGLYSQLLGLTASQSNLTKELNFTTRA
NOV27b --------------GSNVHVSTESNLQATEHRAEGLYSQLLGLTASQSNLTKELNFTTRA
NOV27c IQFLIILGLVLFMVYGNVHVSTESNLQATERRAEGLYSQLLGLTASQSNLTKELNFTTRA
NOV27d IQFLIILGLVLFMVYGNVHVSTESNLQATERRAEGLYSQLLGLTASQSNLTKELNFTTRA
NOV27e IQFLIILGLVLFMVYGNVHVSTESNLQATERRAEGLYSQLLGLTASQSNLTKELNFTTRA
NOV27f IQFLIILGLVLFMVYGNVHVSTESNLQATERRAEGLYSQLLGLTASQSNLTKELNFTTRA
NOV27g IQFLIILGLVLFMVYGNVHVSTESNLQATERRAEGLYSQLLGLTASQSNLTKELNFTTRA
NOV27h ----------------NVHVSTESNLQATEHRAEGLYSQLLGLTASQSNLTKELNFTTRA
NOV27i ----------------NVHVSTESNLQATERRAEGLYSQLLGLTASQSNLTKELNFTTRA
NOV27j IQFLIILGLVLFMVYGNVHVSTESNLQATERRAEGLYSQLLGLTASQSNLTKELNFTTRA
NOV27a KDAIMQMWLNARRDLDRINASFRQCQGDRVIYTNNQRYMAAIILSEKQCRDQFKDMNKSC
NOV27b KDAIMQMWLNARRDLDRINASFRQCQGDRVIYTNNQRYMAAIILSEKQCRDQFKDMNKSC
NOV27c KDAIMQMWLNAREDLDRINASFRQCQGDRVIYTNNQRYMAAIILSEKQCRDQFKDMNKSC
NOV27d KDAIMQMWLNARRDLDRINASFRQCQGDRVIYTNNQRYMAAIILSEKQCRDQFKDMNKSC
NOV27e KDAIMQMWLNARPDLDRINASFRQCQGDRVIYTNNQRYMAAIILSEKQCRDQFKDMNKSC
NOV27f KDAIMQMWLNARRDLDRINASFRQCQGDRVIYTNNQRYMAAIILSEKQCRDQFKDMNKSC
NOV27g KDAIMQMWLNARRDLDRINASFRQCQGDRVIYTNNQRYMAAIILSEKQCRDQFKDMNKSC
NOV27h KDAIMQMWLNARRDLDRINASFRQCQGDRVIYTNNQRYNAAIILSEKQCRDQFKDMNKSC
NOV27i KDAIMQMWLNARRDLDRINASFRQCQGDRVIYTNNQRYMAAIILSEKQCRDQFKDMNKSC
NOV27j KDAIMQMWLNARPDLDRINASFRQCQGDRVIYTNNQRYMAAIILSEKQCRDQFKDMNKSC
NOV27a DALLFMLNQKVKTLEVEIAKEKTICTKDKESVLLNKRVAEEQLVECVKTRELQHQERQLA
NOV27b DALLFMLNQKVKTLEVEIAKEKTICTKDKESVLLNKRVAEEQLVECVKTRELQHQERQLV
NOV27c DALLFMLNQKVKTLEVEIAKEKTICTKDKESVLLNKRVAEEQLVECVKTRELQHQERQLA
NOV27d DALLFMLNQKVKTLEVEIAKEKTICTKDKESVLLNKRVAEEQLVECVKTRELRHQERQLA
NOV27e DALLFMLNQKVKTLEVEIAKEKTICTKDKESVLLNKRVAEEQLVECVKTRELQHQERQLA
NOV27f DALLFMLNQKVKTLEVEIAKEKTICTKDKESVLLNKRVAEEQLVECVKTRELQHQERQLA
NOV27g DALLFMLNQKVKTLEVEIAKEKTICTKDKESVLLNKRVAEEQLVECVKTRELQHQERQLA
NOV27h DALLFMLNQKVKTLEVEIAKEKTICTKDKESVLLNKRVAEEQLVECVKTRELQHQERQLV
NOV27i DALLFMLNQKVKTLEVEIAKEKTICTKDKESVLLNKRVAEEQLVECVKTRELQHQERQLA
NOV27j DALLFMLNQKVKTLEVEIAKEKTICTKDKESVLLNKRVAEEQLVECVKTRELQHQERQLA
NOV27a KEQLQKVQALCLPLDKDKFEMDLRNLWRDSIIPRSLDNLGYNLYHPLGSELASIRRACDH
NOV27b KEQLQKVQALCLPLDKDKFEMDLRNLWRDSIIPRSLDNLGYNLYHPLGSELASIRRACDH
NOV27c KEQLQKVQALCLPLDKDKFEMDLRNLWRDSIIPRSLDNLGYNLYHPLGSELASIRRACDH
NOV27d KEQLQKVQALCLPLDKDKFEMDLRNLWRDSIIPRSLDNLGYNLYHPLGSELASIRRACDH
NOV27e KEQLQKVQALCLPLDKDKFEMDLRNLWRDSIIPRSLDNLGYNLYHPLGSELASIRPACDH
NOV27f KEQLQKVQALCLPLDKDKFEMDLRNLWRDSIIPRSLDNLGYNLYHPLGSELASIRRACDH
NOV27g KEQLQKVQALCLPLDKDKFEMDLRNLWRDSIIPRSLDNLGYNLYHPLGSELASIRPACDH
NOV27h KEQLQKVQALCLPLDKDKFEMDLRNLWRDSIIPRSLDNLGYNLYHPLGSELASIRPACDH
NOV27i KEQLQKVQALCLPLDKDKFEMDLRNLWRDSIIPRSLDNLGYNLYHPLGSELASIRPACDH
NOV27j KEQLQKVQALCLPLDKDKFEMDLRNLWRDSIIPRSLDNLGYNLYHPLGSELASIRRACDH
NOV27a MPSLMSSKVEGQCRSLRADIERVAPENSDLQRQKLEAQQGLEASQEAKQKVEKEAQAREA
NOV27b MPSLMSSKVEELARSLRADIERVVRENSDLQRQKLEAQQGLRASQEAKQKVEKEAQAREA
NOV27c MPSLMSSKVEELARSLRADIERVARENSDLQRQKLEAQQGLRASQEAKQKVEKEAQAREA
NOV27d MPSLMSSKVEELARSLRADIERVARENSDLQRQKLEAQQGLEASQEAKQKVEKEAQAREA
NOV27e MPSLMSSKVEGQCRSLRADIERVARENSDLQRQKLEAQQGLEASQEAKQKVEKEAQAREA
NOV27f MPSLMSSKVEGQCRSLRADIERVARENSDLQRQKLEAQQGLPASQEAKQKVEKEAQAREA
NOV27g MPSLMSSKVEGQCRSLRADIERVARENSDLQRQKLEAQQGLPASQEAKQKVEKEAQAREA
NOV27h MPSLMSSKVEELARSLHADIERVVRENSDLQRQKLEAQQGLEASQEAKQKVEKEAQAREA
NOV27i MPSLMSSKVEELARSLRADIERVARENSDLQRQKLEAQQGLRASQEAKQKVEKEAQAREA
NOV27j MPSLMSSKVEELARSLEADIERVARENSDLQRQKLEAQQGLPASQEAKQKVEKEAQAREA
NOV27a KLQAECSRQTQLALEEKAVLRKERDNLAKELEEKKREAEQLRMETAIRNSALDTCIKTKS
NOV27b KLQAECSRQTQLALEEKAVLRRERDNLAKELEEKKREAEQLRMELAIRNSALDTCIKTKS
NOV27c KLQAECSRQTQLALEEKAVLRKERDNLAKELEEKKREAEQLRMELAIRNSALDTCIKTKS
NOV27d KLQAECSRQTQLALEEKAVLRKERDNLAKELEEKKREAEQLRMELAIRNSALDTCIKTKS
NOV27e KLQAECSRQTQLALEEKAVLRKERDNLAKELEEKKREAEQLPMELAIRNSALDTCIKTKS
NOV27f KLQAECSRQTQLALEEKAVLRKERDNLAKELEEKKREAEQLRMELAIRNSALDTCIKTKS
NOV27g KLQAECSRQTQLALEEKAVLRKERDNLAKELEEKKREAEQLRNELAIRNSALDTCIKTKS
NOV27h KLQAECSRQTQLALEEKAVLRRERDNLAKELEEKKREAEQLRMELAIRNSALDTCIKTKS
NOV27i KLQAECSRQTQLALEEKAVLRKERDNLAKELEEKKREAEQLRMELAIRNSALDTCIKTKS
NOV27j KLQAECSRQTQLALEEKAVLRKERDNLAKELEEKKREAEQLRMELAIRNSALDTCIKTKS
NOV27a QPMMPVSRPMGPVPNPQPIDPASLEEFKRKILESQRPPAGIPVAPSSG------------
NOV27b QPMMPVSRPMGPVPNPQPIDPASLEEFKRKILESQRPPAGIPVAPSSGLE----------
NOV27c QPMMPVSRPMGPVPNPQPIDPASLEEFKRKILESQRPPAGIPVAPSSGLE----------
NOV27d QPMMPVSRPMGPVPNPQPIDPASLEEFKRKILESQRPPAGIPVAPSSGLEATGWGYRDAS
NOV27e QPMMPVSRPMGPVPNPQPIDPASLEEFKRKILESQRPPAGIPVAPSSG------------
NOV27f QPMMPVSRPMGPVPNPQPIDPASLEEFKRKILESQRPPAGIPVAPSSG------------
NOV27g QPMMPVSRPMGPVPNPQPIDPASLEEFKRKILESQRPPAGIPVAPSSG------------
NOV27h QPMMPVSRPMGPVPNPQPIDPASLEEFKRKILESQRPPAGIPVAPSSG------------
NOV27i QPMMPVSRPMGPVPNPQPIDPASLEEFKRKILESQRPPAGIPVAPSSG------------
NOV27j QPMMPVSRPMGPVPNPQPIDPASLEEFKRKILESQRPPAGIPVAPSSG------------
NOV27a ---------
NOV27b ---------
NOV27c ---------
NOV27d VLHGQTHGS
NOV27e ---------
NOV27f ---------
NOV27g ---------
NOV27h ---------
NOV27i ---------
NOV27j ---------
NOV27a (SEQ ID NO: 618)
NOV27b (SEQ ID NO: 620)
NOV27c (SEQ ID NO: 622)
NOV27d (SEQ ID NO: 624)
NOV27e (SEQ ID NO: 626)
NOV27f (SEQ ID NO: 628)
NOV27g (SEQ ID NO: 630)
NOV27h (SEQ ID NO: 632)
NOV27i (SEQ ID NO: 634)
NOV27j (SEQ ID NO: 636)

[0508] Further analysis of the NOV27a protein yielded the following properties shown in Table 27C.

TABLE 27C
Protein Sequence Properties NOV27a

| | |
|---|---|
| SignalP analysis: | Cleavage site between residues 51 and 52 |
| PSORT II analysis: | |

| PSG: | a new signal peptide prediction method | |
|---|---|---|
| | N-region: | length 6; pos. chg 0; neg. chg 1 |
| | H-region: | length 6; peak value 0.00 |
| | PSG score: | −4.40 |

| | |
|---|---|
| GvH: | von Heijne's method for signal seq. recognition |
| | GvH score (threshold: −2.1): −1.10 |
| | possible cleavage site: between 50 and 51 |

>>> Seems to have no N-terminal signal peptide

| ALOM: | Klein et al's method for TM region allocation | | |
|---|---|---|---|
| | Init position for calculation: 1 | | |
| | Tentative number of TMS(s) for the threshold 0.5: 1 | | |
| | Number of TMS(s) for threshold 0.5: 1 | | |
| | INTEGRAL | Likelihood = | Transmembrane 29-25 |
| | | −11.41 | |

| | |
|---|---|
| PERIPHERAL | Likelihood = 7.85 (at 156) |

| | |
|---|---|
| | ALOM score: −11.41 (number of TMSs: 1) |
| MTOP: | Prediction of membrane topology (Hartmann et al.) |
| | Center position for calculation: 36 |
| | Charge difference: −2.5 C(0.5)-N(3.0) |
| | N >= C: N-terminal side will be inside |

>>> membrane topology: type 2 (cytoplasmic tail 1 to 29)

| MITDISC: | discrimination of mitochondrial targeting seq | | | |
|---|---|---|---|---|
| | R content: | 3 | Hyd Moment(75): | 5.06 |
| | Hyd Moment (95): | 6.63 | G content: | 8 |
| | D/E content: | 2 | S/T content: | 6 |

| | |
|---|---|
| | Score: −6.39 |
| Gavel: | prediction of cleavage sites for mitochondrial preseq |
| | R-2 motif at 36 LRY\|FF |

NUCDISC: discrimination of nuclear localization signals

| | |
|---|---|
| | pat4: none |
| | pat7: none |
| | bipartite: RKERDNLAKELEEKKRE at 355 |
| | content of basic residues: 15.6% |
| | NLS Score: 0.02 |
| KDEL: | ER retention motif in the C-terminus: none |

ER Membrane Retention Signals: none
SKL: peroxisomal targeting signal in the C-terminus: none
PTS2: 2nd peroxisomal targeting signal: none
VAC: possible vacuolar targeting motif: none
RNA-binding motif: none
Actinin-type actin-binding motif:

type 1: none
type 2: none

NMYR: N-myristoylation pattern: none
Prenylation motif: none
memYQRL: transport motif from cell surface to Golgi: none
Tyrosines in the tail: 10, 22, 23, 26
Dileucine motif in the tail: none
checking 63 PROSITE DNA binding motifs: none
checking 71 PROSITE ribosomal protein motifs: none
checking 33 PROSITE prokaryotic DNA binding motifs: none

| | |
|---|---|
| NNCN: | Reinhardt's method for Cytoplasmic/Nuclear discrimination |
| | Prediction: nuclear |
| | Reliability: 89 |
| COIL: | Lupas's algorithm to detect coiled-coil regions |
| 278 M | 0.60 |
| 279 S | 0.85 |
| 280 S | 0.96 |
| 281 K | 0.96 |
| 282 V | 0.96 |
| 283 E | 0.98 |
| 284 G | 0.98 |
| 285 Q | 0.99 |
| 286 C | 0.99 |
| 287 R | 0.99 |
| 288 S | 0.99 |
| 289 L | 0.99 |
| 290 R | 0.99 |
| 291 A | 0.99 |
| 292 D | 0.99 |
| 293 I | 0.99 |
| 294 E | 0.99 |
| 295 R | 0.99 |
| 296 V | 0.99 |
| 297 A | 0.99 |
| 298 R | 0.99 |
| 299 E | 0.99 |
| 300 N | 0.99 |
| 301 S | 0.99 |
| 302 D | 1.00 |
| 303 L | 1.00 |
| 304 Q | 1.00 |
| 305 R | 1.00 |
| 306 Q | 1.00 |
| 307 K | 1.00 |
| 308 L | 1.00 |
| 309 E | 1.00 |
| 310 A | 1.00 |
| 311 Q | 1.00 |
| 312 Q | 1.00 |
| 313 G | 1.00 |
| 314 L | 1.00 |
| 315 R | 1.00 |
| 316 A | 1.00 |
| 317 S | 1.00 |
| 318 Q | 1.00 |
| 319 E | 1.00 |
| 320 A | 1.00 |
| 321 K | 1.00 |
| 322 Q | 1.00 |
| 323 K | 1.00 |
| 324 V | 1.00 |
| 325 E | 1.00 |
| 326 K | 1.00 |
| 327 E | 1.00 |
| 328 A | 1.00 |
| 329 Q | 1.00 |
| 330 A | 0.99 |
| 331 R | 0.96 |
| 332 E | 0.96 |
| 333 A | 0.96 |
| 334 K | 0.96 |
| 335 L | 0.96 |
| 336 Q | 0.96 |
| 337 A | 0.87 |
| 338 E | 0.72 |
| 339 C | 0.71 |
| 340 S | 0.75 |
| 341 R | 0.92 |
| 342 Q | 0.92 |
| 343 T | 0.93 |
| 344 Q | 0.99 |
| 345 L | 1.00 |
| 346 A | 1.00 |
| 347 L | 1.00 |
| 348 E | 1.00 |
| 349 E | 1.00 |
| 350 K | 1.00 |
| 351 A | 1.00 |
| 352 V | 1.00 |
| 353 L | 1.00 |
| 354 R | 1.00 |
| 355 K | 1.00 |
| 356 E | 1.00 |
| 357 R | 1.00 |
| 358 D | 1.00 |
| 359 N | 1.00 |
| 360 L | 1.00 |
| 361 A | 1.00 |
| 362 K | 1.00 |
| 363 E | 1.00 |
| 364 L | 1.00 |
| 365 E | 1.00 |
| 366 E | 1.00 |
| 367 K | 1.00 |
| 368 K | 1.00 |
| 369 R | 1.00 |
| 370 E | 1.00 |
| 371 A | 1.00 |
| 372 E | 1.00 |
| 373 Q | 1.00 |
| 374 L | 1.00 |
| 375 R | 1.00 |
| 376 M | 1.00 |
| 377 E | 1.00 |
| 378 L | 1.00 |
| 379 A | 1.00 |
| 380 I | 1.00 |
| 381 R | 0.97 |
| 382 N | 0.97 |
| 383 S | 0.97 |
| 384 A | 0.97 |
| 385 L | 0.97 |
| 386 D | 0.97 |
| 387 T | 0.91 |
| 388 C | 0.64 |
| 389 I | 0.64 |
| 390 K | 0.64 |
| | total: 113 residues |

Final Results (k = 9/23):

```
39.1%: nuclear
26.1%: mitochondrial
17.4%: cytoplasmic
  4.3%: extracellular, including cell wall
  4.3%: Golgi
  4.3%: plasma membrane
  4.3%: peroxisomal
```

>> prediction for CG55193-04 is nuc (k = 23)

[0509] A search of the NOV27a protein against the Geneseq database, a proprietary se that contains sequences published in patents and patent publication, yielded homologous proteins shown in Table 27D.

TABLE 27D
Geneseq Results for NOV27a

| | | NOV27a | Identities/ | |
|---|---|---|---|---|
| | | Residues/ | Similarities for | |
| Geneseq | Protein/Organism/Length | Match | the Matched | Expect |
| Identifier | [Patent #, Date] | Residues | Region | Value |
| ABG78367 | Human protein, homologous to PV-1 | 1 . . . 442 | 442/442 (100%) | 0.0 |
| | receptor, designated NOV7a - Homo | 1 . . . 442 | 442/442 (100%) | |
| | sapiens, 442 aa. [WO200226826-A2, | | | |
| | 04-APR-2002] | | | |
| AAE06600 | Human protein having hydrophobic | 1 . . . 442 | 439/442 (99%) | 0.0 |
| | domain, HP10787 - Homo sapiens, 442 aa. | 1 . . . 442 | 439/442 (99%) | |
| | [WO200149728-A2, 12-JUL-2001] | | | |
| AAM41619 | Human polypeptide SEQ ID NO 6550 - | 1 . . . 442 | 439/442 (99%) | 0.0 |
| | Homo sapiens, 457 aa. | 16 . . . 457 | 439/442 (99%) | |
| | [WO200153312-A1, 26-JUL-2001] | | | |
| AAB42154 | Human ORFX ORF1918 polypeptide sequence | 1 . . . 442 | 439/442 (99%) | 0.0 |
| | SEQ ID NO: 3836 - Homo | 38 . . . 479 | 439/442 (99%) | |
| | sapiens, 479 aa. [WO200058473-A2, | | | |
| | 05-OCT-2000] | | | |
| ABG78369 | Human protein, homologous to PV-1 | 1 . . . 442 | 436/442 (98%) | 0.0 |
| | receptor, designated NOV7c - Homo | 1 . . . 442 | 439/442 (98%) | |
| | sapiens, 442 aa. [WO200226826-A2, | | | |
| | 04-APR-2002] | | | |

[0510] In a BLAST search of public sequence databases, the NOV27a protein was found to have homology to the proteins shown in the BLASTP data in Table 27E.

TABLE 27E
Public BLASTP Results for NOV27a

| | | NOV27a | Identities/ | |
|---|---|---|---|---|
| Protein | | Residues/ | Similarities for | |
| Accession | | Match | the Matched | Expect |
| Number | Protein/Organism/Length | Residues | Portion | Value |
| AAH50365 | PLVAP protein - Homo sapiens | 1 . . . 442 | 439/442 (99%) | 0.0 |
| | (Human), 455 aa (fragment). | 14 . . . 455 | 439/442 (99%) | |
| Q9BX97 | PV1 protein - Homo sapiens | 1 . . . 442 | 439/442 (99%) | 0.0 |
| | (Human), 442 aa. | 1 . . . 442 | 439/442 (99%) | |
| Q8ND68 | Hypothetical protein - Homo sapiens | 1 . . . 442 | 439/442 (99%) | 0.0 |
| | (Human), 456 aa (fragment). | 15 . . . 456 | 439/442 (99%) | |
| Q9BZD5 | Fenestrated-endothelial linked | 1 . . . 442 | 438/442 (99%) | 0.0 |
| | structure protein - Homo sapiens | 1 . . . 442 | 438/442 (99%) | |
| | (Human), 442 aa. | | | |
| Q8N8Y0 | Hypothetical protein FLJ38711 - | 1 . . . 442 | 433/442 (97%) | 0.0 |
| | Homo sapiens (Human), 437 aa. | 1 . . . 437 | 433/442 (97%) | |

[0511] PFam analysis predicts that the NOV27a protein contains the domains shown in the Table 27F.

TABLE 27F
Domain Analysis of NOV27a

| | | | |
|---|---|---|---|
| Pfam | NOV27a | Identities/ | Expect |
| Domain | Match Region | Similarities | Value |
| | | for the | |
| | | Matched Region | |

### Example 28

[0512] The NOV28 clone was analyzed, and the nucleotide and encoded polypeptide sequences are shown in Table 28A.

TABLE 28A
NOV28 Sequence Analysis

| | | |
|---|---|---|
| NOV28a, CG55256-07 | SEQ ID NO:637 | 4294 bp |
| DNA Sequence | ORF Start: ATG at 103 | ORF Stop: TGA at 2818 |

GCAGCGGCAACCCCGGCGCCGCGGCAAGGACTCGGAGGGCTGAGACGCGGCGGCGGCGGCGCGGGGAG
CGCGGGGCGCGGCGGCCGGAGCCCCGGGCCCGCCATGGGCCTCCCCGAGCCGGGCCCTCTCCGGCTTC
GATCCGCTGCTCGGCGGCCAAGGGCCGGCCAAGGAGTGCGAAAAGGACCAATTCCAGTGCCGGAACGA
GCGCTGCATCCCCTCTGTGTGGAGATGCGACGAGGACGATGACTGCTTAGACCACAGCGACGAGGACG
ACTGCCCCAAGAAGACCTGTGCAGACAGTGACTTCACCTGTGACAACGGCCACTGCATCCACGAACGG
TGGAAGTGTGACGGCGAGGAGGAGTGTCCTGATGGCTCCGATGAGTCCGAGGCCACTTGCACACTGGG
CACCTGCCGTGGGGACGAGTTCCAGTGTGGGGATGGGACATGTGTCCTTGCAATCAAGCACTGCAACC
AGGAGCAGGACTGTCCAGATGGGAGTGATGAAGCTGGCTGCCTACAGGAGTCACCCTGTGAGGGTCCC
CGCAGATTTCAGTGTAAGAGTGGCAAGCGCGTGGACGGCGGGAAAGTGTGTGATGTGCAGAGGGACTG
CCGGGACTGGTCGGATGAGCTTCTGAAAGTGTGGTGCGGTGCCTGTCTACGCCCACTGGCTGGACTCA
GTCTCCTACCATCCCCCTCCTGGTATCTAGGCTCAAGGCCCTCCAGTGCCCCCTGCCCTGACACTTTC
TGCTCTGACCCTCTCTTTGGATTCATGTGCCGTCCTATGGCTTCACATGGGGCTTTTCGCCCCCAGGC
CTCTGGTCTACATCTCTACAAAGTGCTAAGAGCTTGTCCATCCCAGAGGAGGCTGAACGAGTGTCTGC
ACAACAATGGCGGCTGCTCACACATCTGCACTGACCTCAAGATTGGCTTTGAATGCACGTGCCCAGCA
GGCTTCCAGCTCCTGGACCAGAAGACCTGTGGCGACATTGATGAGTGCAAGGACCCAGATGCCTGCAG
CCAGATCTGTGTCAATTACAAGGGCTATTTTAAGTGTGAGTGCTACCCTGGCTACGAGATGGACCTAC
TGACCAAGAACTGCCAAGCTGCTGCTGGAAAGAGCCCATCCCTAATCTTCACCAACCGGTACGAGGTG
CGGAGGATCGACCTGGTGAAGCGGAACTATTCACGCCTCATCCCCATGCTCAAGAATGTCGTGGCACT
AGATGTGGAAGTTGCCACCAATCGCATCTACTGGTGTGACCTCTCCTACCGTAAGATCTATAGCGCCT
ACATGGACAAGGCCAGTGACCCGAAAGAGCAGGAGGTCCTCATTGACGAGCAGTTGCACTCTCCAGAG
GGCCTGGCAGTGGACTGGGTCCACAAGCACATCTACTGGACTGACTCGGGCAATAAGACCATCTCAGT
GGCCACAGTTGATGGTGGCCGCCGACGCACTCTCTTCAGCCGTAACCTCAGTGAACCCCGGGCCATCG
CTGTTGACCCCCTGCGAGGGTTCATGTATTGGTCTGACTGGGGGGACCAGGCCAAGATTGAGAAATCT
GGGCTCAACGGTGTGGACCGGCAAACACTGGTGTCAGACAATATTGAATGGCCCAACGGAATCACCCT
GGATCTGCTGAGCCAGCGCTTGTACTGGGTAGACTCCAAGCTACACCAACTGTCCAGCATTGACTTCA
GTGGAGGCAACAGAAAGACGCTGATCTCCTCCACTGACTTCCTGAGCCACCCTTTTGGGATAGCTGTG
TTTGAGGACAAGGTGTTCTGGACAGACCTGGAGAACGAGGCCATTTTCAGTGCAAATCGGCTCAATGG
CCTGGAAATCTCCATCCTGGCTGAGAACCTCAACAACCCACATGACATTGTCATCTTCCATGAGCTGA
AGCAGCCAAGAGCTCCAGATGCCTGTGAGCTGAGTGTCCAGCCTAATGGAGGCTGTGAATACCTGTGC
CTTCCTGCTCCTCAGATCTCCAGCCACTCTCCCAAGTACACATGTGCCTGTCCTGACACAATGTGGCT
GGGTCCAGACATGAAGAGGTGCTACCGAGCACCTCAATCTACCTCAACTACGACGTTAGCTTCTACCA
TGACGAGGACAGTACCTGCCACCACAAGAGCCCCCGGGACCACCGTCCACAGATCCACCTACCAGAAC
CACAGCACAGAGACACCAAGCCTGACAGCTGCAGTCCCAAGCTCAGTTAGTGTCCCCAGGGCTCCCAG
CATCAGCCCGTCTACCCTAAGCCCTGCAACCAGCAACCACTCCCAGCACTATGCAAATGAAGACAGTA
AGATGGGCTCAACAGTCACTGCCGCTGTTATCGGGATCATCGTGCCCATAGTGGTGATAGCCCTCCTG
TGCATGAGTGGATACCTGATCTGGAGAAACTGGAAGCGGAAGAACACCAAAAGCATGAATTTTGACAA
CCCAGTCTACAGGAAACAAACAGAAGAAGAAGATGAAGATGAGCTCCATATAGGGAGAACTGCTCAGA
TTGGCCATGTCTATCCTGCAGCAATCAGCAGCTTTGATCGCCCACTGTGGGCAGAGCCCTGTCTTGGG
GAGACCAGAGAACCGGAAGACCCAGCCCCTGCCCTCAAGGAGCTTTTTGTCTTGCCGGGGGAACCAAG
GTCACAGCTGCACCAACTCCCGAAGAACCCTCTTTCCGAGCTGCCTGTCGTCAAATCCAAGCGAGTGG
CATTAAGCCTTGAAGATGATGGACTACCCTGAGGATGGGATCACCCCCTTCGTGCCTCATGGAATTCA
GTCCCATGCACTACACTCTGGATGGTGTATGACTGGATGAATGGGTTTCTATATATGGGTCTGTGTGA
GTGTATGTGTGTGTGTGATTTTTTTTTTAAATTTATGTTGCGGAAAGGTAACCACAAAGTTATGATGA
ACTGCAAACATGGAAAGGATGTGAGAGTTTTTCTATGTATAATGTTTTATACACTTTTTAACTGGTTG
CACTACCCATGAGGAATTCGTGGAATGGCTACTGCTGACTAACATGATGCACATAACCAAATGGGGGC
CAATGGCACAGTACCTTACTCATCATTTAAAAACTATATTTACAGAAGATGTTTGGTTGCTGGGGGGG
CTTTTTTGGGTTTTGGGGCATTTGTTTTTTGTAAATAAGATGATTATGCTTTGTGGCTATCCATCAAC
ATAAGTAAAAAAAAAAAAAAAACACTTCAACTCCCTCCCCCATTTAGATTATTTATTAACATATTTTA
AAAATCAGATGAGTTCTATAAATAATTTAGAGAAGTGAGAGTATTTATTTTTGGCATGTTTGGCCCAC
CACACAGACTCTGTGTGTGTATGTGTGTGTTTATATGTGTATGTGTGTGACAGGAAAATCTGTAGAGA
AGAGGCACATCTATGGCTACTGTTCAAATACATAAAGATAAATTTATTTTCACACAGTCCACAAGGGC
TATATCTTGTAGTTTTCAGAAAAGCCTTTGGAAATCTGGATCAGGAAATAGATACCATGGTTTGTGCA
ATTATGTAGTAAAAAGGCAAATCTTTTCACCTCTGGCTATTCCTGAGACCCCAGGAAGTCAGGAAAAA
GCCTTTCAGCTCACCCATGGCTGCTGTGACTCCTACCAGGGCTTTCTTGGCTTTGGCGAAGGTCAGTG
TACAGACATTCCATGGTACCAGAGTGCTCAGAAAGTCAAGATAGGATATGCCTCACCCTCAGCTACTC
CTTGTTTTAAAGTTCAGCTCTTTGAGTAACTTCTTCAATTTCTTTCAGGACACTTGGGTTGAATTCAG
TAAGTTTCCTCTGAAGCACCCTGAAGGGTGCCATCCTTACAGAGCTAAGTGGAGACGTTTCCAGATCA
GCCCAAGTTTACTATAGAGACTGGCCCAGGCACTGAATGTCTAGGACATGCTGTGGATGAAGATAAAG
ATGGTGGAATAGGTTTTATCACATCTCTTATTTCTCTTTTCCCCTTACTCTCTACCATTTCCTTTATG
TGGGGAAACATTTTAAGGTAATAAATAGGTTACTTACCATCATATGTTCATATAGATGAAACTAATTT
TTGGCTTAAGTCAGAACAACTGGCCCCCAATTGAAGTCATATTTGTGGGGGGAAATGGCATACGCAAT
ATTATATTATATTGGATATTTATGTTCACACAGGAATTTGGTTTACTGCTTTGTAAATAAAAGGGAAA
ACTCCGGGTA

| | | | |
|---|---|---|---|
| NOV28a, CG55256-07 | SEQ ID NO:638 | 905 aa | MW at 100461.4 kD |
| Protein Sequence | | | |

MGLPEPGPLRLLALLLLLLLLLLLRLQHLAAAAADPLLGGQGPAKECEKDQFQCRNERCIPSVWRCDE
DDDCLDHSDEDDCPKKTCADSDFTCDNGHCIHERWKCDGEEECPDGSDESEATCTLGTCRGDEFQCGD
GTCVLAIKHCNQEQDCPDGSDEAGCLQESPCEGPRRFQCKSGKRVDGGKVCDVQRDCRDWSDELLKVW
CGACLRPLAGLSLLPSPSWYLGSRPSSAPCPDTFCSDPLFGFMCRPMASHGAFRPQASGLHLYKVLRA
CPSQRRLNECLHNNGGCSHICTDLKIGFECTCPAGFQLLDQKTCGDIDECKDPDACSQICVNYKGYFK
CECYPGYEMDLLTKNCQAAACKSPSLIFTNRYEVRRIDLVKRNYSRLIPMLKNVVALDVEVATNRIYW
CDLSYRKIYSAYMDKASDPKEQEVLIDEQLHSPEGLAVDWVHKHIYWTDSGNKTISVATVDGGRRRTL
FSRNLSEPPAIAVDPLRGFMYWSDWGDQAKIEKSGLNGVDRQTLVSDNIEWPNGITLDLLSQRLYWVD
SKLHQLSSIDFSGGNRKTLISSTDFLSHPFGIAVFEDKVFWTDLENEAIFSANRLNGLEISILAENLN
NPHDIVIFHELKQPHAPDACELSVQPNGGCEYLCLPAPQISSHSPKYTCACPDTMWLGPDMKRCYRAP
QSTSTTTLASTMTRTVPATTRAPGTTVHRSTYQNHSTETPSLTAAVPSSVSVPEAPSISPSTLSPATS
INHSQHYANEDSKMGSTVTAAVIGIIVPIVVIALLCMSGYLIWRAWKRATKSDAFDNPVYRKTTEEED
EDELHIGRTAQIGHVYPAAISSFDRPLWAEPCLGETREPEDPAPALKELFVLPGEPRSQLHQLPKNPL
SELPVVKSKRVALSLEDDGLP

| | | |
|---|---|---|
| NOV28b, CG55256-10 | SEQ ID NO:639 | 1079 bp |
| DNA Sequence | ORF Start: at 1 | ORF Stop: TGA at 1009 |

GCGGCTGATCCGCTGCTCGGCGGCCAAGGGCCGGCCAAGGATTGCGAAAAGGACCAATTCCAGTGCCG
GAACGAGCGCTGCATCCCCTCTGTGTGGAGATGCGACGAGGACGATGACTGCTTAGACCACAGCGACG
AGGACGACTGCCCCAAGAAGACCTGTGCAGACAGTGACTTCACCTGTGACAACGGCCACTGCATCCAC
GAACGGTGGAAGTGTGACGGCGAGGAGGAGTGTCCTGATGGCTCCGATGAGTCCGAGGCCACTTGCAC
CAAGCAGGTGTGTCCTGCAGAGAAGCTGGGTCCAGACATGAAGAGGTGCTACCGAGCACCTCAATCTA
CCTCAACTACGACGTTAGCTTCTACCATGACGAGGACAGTACCTGCCACCACAAGAGCCCCCGGGACC
ACCGTCCACAGATCCACCTACCAGAACCACAGCACAGAGACACCAAGCCTGACAGCTGCAGTCCCAAG
CTCAGTTAGTGTCCCCAGGGCTCCCAGCATCAGCCCGTCTACCCTAAGCCCTGCAACCAGCAACCACT
CCCAGCACTATGCAAATGAAGACAGTAAGATGGGCTCAACAGTCACTGCCGCTGTTATCGGGATCATC
GTGCCCATAGTGGTGATAGCCCTCCTGTGCATGAGTGGATACCTGATCTGGAGAAACTGGAAGCGGAA
GAACACCAAAAGCATGAATTTTGACAACCCAGTCTACAGGAAAACAACAGAAGAAGAAGACGAAGATG
AGCTCCATATAGGGAGAACTGCTCAGATTGGCCATGTCTATCCTGCAGCAATCAGCAGCTTTGATCGC
CCACTGTGGGCAGAGCCCTGTCTTGGGGAGACCAGAGAACCGGAAGACCCAGCCCCTGCCCTCAAGGA
GCTTTTTGTCTTGCCGGGGGAACCAAGGTCACAGCTGCACCAACTCCCGAAGAACCCTCTTTCCGAGC
TGCCTGTCGTCAAATCCAAGCGAGTGGCATTAAGCCTTGAAGATGATGGACTACCCTGAGGATGGGAT
CACCCCCTTCGTGCCTCATGGAATTCAGTCCCATGCACTACACTCTGGATGGTGTATGA

| | | | |
|---|---|---|---|
| NOV28b, CG55256-10 | SEQ ID NO:640 | 336 aa | MW at 36894.7 kD |
| Protein Sequence | | | |

AADPLLGGQGPAKDCEKDQFQCRNERCIPSVWRCDEDDDCLDHSDEDDCPKKTCADSDFTCDNGHCIH
ERWKCDGEEECPDGSDESEATCTKQVCPAEKLGPDMKRCYRAPQSTSTTTLASTMTRTVPATTRAPGT
VPIVVIALLCMSGYLIWRNWKRKNTKSMNFDNPVYRKTTEEEDEDELHIGRTAQIGHVYPAAISSFDR
PLWAEPCLGETREPEDPAPALKELFVLPGEPRSQLHQLPKNPLSELPVVKSKRVALSLEDDGLP

| | | |
|---|---|---|
| NOV28c, 272511714 | SEQ ID NO:641 | 1983 bp |
| DNA Sequence | ORF Start: at 1 | ORF Stop: end of sequence |

GGATCCGCGGCTGATCCGCTGCTCGGCGGCCAAGGGCCGGCCAAGGATTGCGAAAAGGACCAATTCCA
GTGCCGGAACGAGCGCTGCATCCCCTCTGTGTGGAGATGCGACGAGGACGATGACTGCTTAGACCACA
GCGACGAGGACGACTGCCCCAAGAAGACCTGTGCAGACAGTGACTTCACCTGTGACAACGGCCACTGC
ATCCACGAACGGTGGAAGTGTGACGGCGAGGAGGAGTGTCCTGATGGCTCCGATGAGTCCGAGGCCAC
TTGCACCAAGCAGGTGTGTCCTGCAGAGAAGCTGAGCTGTGGACCCACCAGCCACAAGTGTGTACCTG
CCTCGTGGCGCTGCGACGGGGAGAAGGACTGCGAGGGTGGAGCGGATGAGGCCGGCTGTGCTACCTCA
CTGGGCACCTGCCGTGGGGACGAGTTCCAGTGTGGGGATGGGACATGTGTCCTTGCAATCAAGCACTG
CAACCAGGAGCAGGACTGTCCAGATGGGAGTGATGAAGCTGGCTGCCTACAGGGGCTGAACGAGTGTC
GCAGGCTTCCAGCTCCTGGACCAGAAGACCTGTGGCGACATTGATGAGTGCAAGGACCCAGATGCCTG
CAGCCAGATCTGTGTCAATTACAAGGGCTATTTTAAGTGTGAGTGCTACCCTGGCTACGAGATGGACC
TACTGACCAAGAACTGCAAGGCTGCTGCTGGCAAGAGCCCATCCCTAATCTTCACCAACCGGCACGAG
GTGCGGAGGATCGACCTGATGAAGCGGAACTATTCACGCCTCATCCCCATGCTCAAGAATGTCGTGGC
ACTAGATGTGGAAGTTGCCACCAATCGCATCTACTGGTGTGACCTCTCCTACCGTAAGATCTATAGCG
CCTACATGGACAAGGCCAGTGACCCGAAAGAGCAGGAGGTCCTCATTGACGAGCAGTTGCACTCTCCA
GAGGGCCTGGCAGTGGACTGGGTCCACAAGCACATCTACTGGACTGACTCGGGCAATAAGACCATCTC
AGTGGCCACAGTTGATGGTGGCCGCCGACGCACTCTCTTCAGCCGTAACCTCAGTGAACCCCGGGCCA
TCGCTGTTGACCCCCTGCGAGGGTTCATGTATTGGTCTGACTGGGGGGACCAGGCCAAGATTGAGAAA
TCTGGGCTCAACGGTGTGGACCGGCAAACACTGGTGTCAGACAATATTGAATGGCCCAACGGAATCAC
CCTGGATCTGCTGAGCCAGCGCTTGTACTGGGTAGACTCCAAGCTACACCAACTGTCCAGCATTGACT
TCAGTGGAGGCAACAGAAAGACGCTGATCTCCTCCACTGACTTCCTGAGCCACCCTTTTGGGATAGCT
GTGTTTGAGGACAAGGTGTTCTGGACAGACCTGGAGAACGAGGCCATTTTCAGTGCAAATCGGCTCAA
TGGCCTGGAAATCTCCATCCTGGCTGAGAACCTCAACAACCCACATGACATTGTCATCTTCCATGAGC
TGAAGCAGCCAAGAGCTCCAGATGCCTGTGAGCTGAGTGTCCAGCCTAATGGAGGCTGTGAATACCTG
TGCCTTCCTGCTCCTCAGATCTCCAGCCACTCTCCCAAGTACACATGTGCCTGTCCTGACACAATGTG
CCATGACGAGGACAGTACCTGCCACCACAAGAGCCCCCGGGACCACCGTCCACAGATCCACCTACCAG
AACCACAGCACAGAGACACCAAGCCTGACAGCTGCAGTCCCAAGCTCAGTTAGTGTCCCCAGGGTTCC
CAGCATCAGCCCGTCTACCCTAAGACCTGCAACCAGCAACCACTCCCAGCACTATGCAAATGAAGACA
GTAAGCTCGAG

| | | | |
|---|---|---|---|
| NOV28c, 272511714 | SEQ ID NO:642 | 661 aa | MW at 73025.5 kD |
| Protein Sequence | | | |

GSAADPLLGGQGPAKDCEKDQFQCRNERCIPSVWRCDEDDDCLDHSDEDDCPKKTCADSDFTCDNGHC
IHERWKCDGEEECPDGSDESEATCTKQVCPAEKLSCGPTSHKCVPASWRCDGEKDCEGGADEAGCATS
LGTCRGDEFQCGDGTCVLAIKHCNQEQDCPDGSDEAGCLQGLNECLHNNGGCSHICADLKIGFECTCP
AGFQLLDQKTCGDIDECKDPDACSQICVNYKGYFKCECYPGYEMDLLTKNCKAAAGKSPSLIFTNRHE
VRRIDLMKHNYSRLIPMLKNVVALDVEVATNRIYWCDLSYRKIYSAYMDKASDPKEQEVLIDEQLHSP
EGLAVDWVHKHIYWTDSGNKTISVATVDGGRRRTLFSRNLSEPRAIAVDPLRGFMYWSDWGDQAKIEK
SGLNGVDRQTLVSDNIEWPNGITLDLLSQPLYWVDSKLHQLSSIDFSGGNRKTLISSTDFLSHPFGIA
VFEDKVFWTDLENEAIFSANRLNGLEISILAENLNNPHDIVIFHELKQPRAPDACELSVQPNGGCEYL
CLPAPQISSHSPKYTCACPDTMWLGPDMKRCYRAPQSTSTTTLASTMTRTVPATTRAPGTTVHRSTYQ
NHSTETPSLTAAVPSSVSVPRVPSISPSTLRPATSNHSQHYANEDSKLE

| | | |
|---|---|---|
| NOV28d, CG55256-01 | SEQ ID NO:643 | 2537 bp |
| DNA Sequence | ORF Start: ATG at 30 | ORF Stop: TGA at 2505 |

TGTTTTTTTTCTTCAGTACTTTAAATGTCATGCCACTCTCCTGGCCTGTAAGCTTTCCACAGAGAAGC
CTGCTGCCAGACCCATTGGAGCTTCTTTGTGTGTTATTTGTTTCTTTTTTCTTGCTGCTTTTACAGCT
CCAGCATCTTGCGGCGGCAGCGGCTGATCCGCTGCTCGGCGGCCAAGGGCCGGCCAAGGATTGCGAAA
AGGACCAATTCCAGTGCCGGAACGAGCGCTGCATCCCCTCTGTGTGGAGATGCGACGAGGACGATGAC
TGCTTAGACCACAGCGACGAGGACGACTGCCCTGCAGCCAAGAAGACACCTGTGAGAAGTGACTTCAC
CTGTGACAACGGCCACTGCATCCACGAACGGTGGAAGTGTGACGGCGAGGAGGAGTGTCCTGATGGCT
CCGATGAGTCCGAGGCCACTTGCACCAAGCAGGTGTGTCCTGCAGAGAAGCTGAGCTGTGGACCCACT
AGCCACAAGTGTGTACCTGCCTCGTGGCGCTGCGACGGGGAGAAGGACTGCGAGGGTGGAGCGGATGA
GGCCGGCTGTGCTACCTCACTGGGCACCTGCCGTGGGGACGAGTTCCAGTGTGGGGATGGGACATGTG
TCCTTGCAATCAAGCACTGCAACCAGGAGCAGGACTGTCCAGATGGGAGTGATGAAGCTGGCTGCCTA
CAGGGGCTGAACGAGTGTCTGCACAACAATGGCGGCTGCTCACACATCTGCACTGACCTCAAGATTGG
CTTTGAATGCACGTGCCCAGCAGGCTTCCAGCTCCTGGACCAGAAGACCTGTGGCGCTGGCAAGAGCC
CATCCCTAATCTTCACCAACCGGCACGAGGTGCGGAGGATCGACCTGGTGAAGCGGAACTATTCACGC
CTCATCCCCATGCTCAAGAATGTCGTGGCACTAGATGTGGAAGTTGCCACCAATCGCATCTACTGGTG
TGACCTCTCCTACCGTAAGATCTATAGCGCCTACATGGACAAGGCCAGTGACCCGAAAGAGCAGGAGG
TCCTCATTGACGAGCAGTTGCACTCTCCAGAGGGCCTGGCAGTGGACTGGGTCCACAAGCACATCTAC
TGGACTGACTCGGGCAATAAGACCATCTCAGTGGCCACAGTTGATGGTGGCCGCCGACGCACTCTCTT
CAGCCGTAACCTCAGTGAACCCCGGGCCATCGCTGTTGACCCCCTGCGAGGGTTCATGTATTGGTCTG
ACTGGGGGGACCAGGCCAAGATTGAGAAATCTGGGCTCAACGGTGTGGACCGGCAAACACTGGTGTCA
GACAATATTGAATGGCCCAACGGAATCACCTTGGATCTGCTGAGCCAGCGCTTGTACTGGGTAGACTC
CAAGCTACACCAACTGTCCAGCATTGACTTCAGTGGAGGCAACAGAAAGACGCTGATCTCCTCCACTG
ACTTCCTGAGCCACCCTTTTGGGATAGCTGTGTTTGAGGACAAGGTGTTCTGGACAGACCTGGAGAAC
GAGGCCATTTTCAGTGCAAATCGGCTCAATGGCCTGGAAATCTCCATCCTGGCTGAGAACCTGAACAA
CCCACATGACATTGTCATCTTCCATGAGCTGAAGCAGCCAAGAGCTCCAGATGCCTGTGAGCTGAGTG
TCCAGCCTAATGGAGGCTGTGAATACCTGTGCCTTCCTGCTCCTCAGATCTCCAGCCACTCTCCCAAG
TACACATGTGCCTGTCCTGACACAATGTGGCTGGGTCCAGACATGAAGAGGTGCTACCGAGCACCTCA
ATCTACCTCAACTACGACGTTAGCTTCTACCATGACGAGGACAGTACCTGCCACCACAAGAGCCCCCG
GGACCACCGTCCACAGATCCACCTACCAGAACCACAGCACAGAGACACCAAGCCTGACAGCTGCAGTC
CCAAGCTCAGTTAGTGTCCCCAGGGCTCCCAGCATCAGCCCGTCTACCCTAAGCCCTGCAACCAGCAA
CCACTCCCAGCACGCAAATGAAGACAGTAAGATGGGCTCAACAGTCACTGCCGCTGTTATCGGGATCA
TCGTGCCCATAGCAAATGAAGACAGTAAGATGGGCTCAACAGTCACTGCCGCTGTTATCGGGATCATC
GTGCCCATAGGTGATAGCCCTCCTGTGCATGAGTGGATACCTGATCTGGAGAAACTGGAAGCGGAAGA
ACACCAAAAGCATGAATTTGACAACCCAGTCTACAGGAAAACAACAGAAGAAGAAGACGAAGATGAGC
TCCATATAGGGAGAACTGCTCAGATTGGCCATGTCTATCCTGCAGCAATCAGCAGCTTTGATCGCCCA
CTGTGGGCAGAGCCCTGTCTTGGGGAGACCAGAGAACCAGAAGACCCAGCCCCTGCCCTGAAGGAGCT
TTTTGTCTTGCCGGGGGAACCAAGGTCACAGCTGCACCAACTCCCGAAGAACCCTCTTTCCGAGCTGC
CTGTCGTCAAATCCAAGCAGCGAGTGGCATTAAGCCTTGAAGATGATGGACTACCCTGAGGATGGGAT
CACCCCCTTCGTGCCTCATGG

| | | | |
|---|---|---|---|
| NOV28d, CG55256-01 | SEQ ID NO:644 | 1825 aa | MW at 90830.8 kD |
| Protein Sequence | | | |

MPLSWPVSFPQRSLLPDPLELLCVLFVSFFLLLLQLQHLAAAAADPLLGGQGPAKDCEKDQFQCRNER
CIPSVWRCDEDDDCLDHSDEDDCPAAKKTPVRSDFTCDNGHCIHERWKCDGEEECPDGSDESEATCTK
QVCPAEKLSCGPTSHKCVPASWRCDGEKDCEGGADAGCATSLGTCRGDEFQCGDGTCVIAAIAACNQE
QDCPDGSDEAGCLQGLNECLHNNGGCSHICTDLKIGFECTCPAGFQLLDQKTCGAGKSPSLIFTNRHE
VRRIDLVKRNYSRLIPMLKNVVALDVEVATNRIYWCDLSYRKIYSAYMDKASDPKEQEVLIDEQLHSP
EGLAVDWVHKHIYWTDSGNKTISVATVDGGRPRTLFSRNLSEPRAIAVDPLRGFMYWSDWGDQAKIEK
SGLNGVDRQTLVSDNIEWPNGITLDLLSQRLYWVDSKLHQLSSIDFSGGNRKTLISSTDFLSHPFGIA
VFEDKVFWTDLENEAIFSANRLNGLEISILAENLNNPHDIVIFHELKQPRAPDACELSVQPNGGCEYL
CLPAPQISSHSPKYTCACPDTMWLGPDMKRCYRAPQSTSTTTLASTMTRTVPATTRAPGTTVHRSTYQ
NHSTETPSLTAAVPSSVSVPRAPSISPSTLSPATSNHSQHANEDSKMGSTVTAAVIGIIVPIANEDSK
MGSTVTAAVIGIIVPIGDSPPVHEWIPDLEKLEAEEHQKHEFDNPVYRKTTEEEDEDELHIGRTAQIG
HVYPAAISSFDRPLWAEPCLGETREPEDPAPALKELFVLPGEPRSQLHQLPKNPLSELPVVKSKQRVA
LSLEDDGLP

| | | |
|---|---|---|
| NOV28e, CG55256-02 | SEQ ID NO:645 | 3039 bp |
| DNA Sequence | ORF Start: ATG at 1 | ORF Stop: TGA at 3037 |

ATGGGCCTCCCCGAGCCGGGCCCTCTCCGGCTTCTGGCGCTGCTGCTGCTGCTGCTGCTGCTGCTGCT
AGTGCGAAAAGGACCAATTCCAGTGCCGGAACGAGCGCTGCATCCCCTCTGTGTGGAGATGCGACGAG
GACGATGACTGCTTAGACCACAGCGACGAGGACGACTGCCCCAAGAAGACCTGTGCAGACAGTGACTT
CACCTGTGACAACGGCCACTGCATCCACGAACGGTGGAAGTGTGACGGCGAGGAGGAGTGTCCTGATG
GCTCCGATGAGTCCGAGGCCACTTGCACCAAGCAGGTGTGTCCTGCAGAGAAGCTGAGCTGTGGACCC
ACCAGCCACAAGTGTGTACCTGCCTCGTGGCGCTGCGACGGGGAGAAGGACTGCGAGGGTGGAGCGGA
TGAGGCCGGCTGTGCTACCTTGTGCGCCCCGCACGAGTTCCAGTGCGGCAACCGCTCGTGCCTGGCCG
CCGTGTTCGTGTGCGACGGCGATGACGACTGTGGTGACGGCAGCGATGAGCGCGGCTGTGCAGACCCG
GCCTGCGGGCCCCGCGAGTTCCGCTGCGGCGGCGATGGCGGCGGCGCCTGCATCCCGGAGCGCTGGGT
CTGCGACCGCCAGTTTGACTGCGAGGACCGCTCGGACGAGGCAGCCGAGCTCTGCGGCCGCCCGGGCC
CCGGGGCCACGTCCGCGCCCGCCGCCTGCGCCACCGTCTCCCAGTTCGCCTGCCGCAGCGGCGAGTGC
ACTGGGCACCTGCCGTGGGGACGAGTTCCAGTGTGGGGATGGGACATGTGTCCTTGCAATCAAGCACT
GGTCCCCGCAGATTTCAGTGTAAGAGTGGCAAGCGCGTGGACGGCGGGAAAGTGTGTGATGTGCAGAG
GGACTGCCGGGACTGGTCGGATGAGCTTCTGAAAGTGTGGTGCGTCTCCTACCATCCCCCTCCTGGGC
TGAACGAGTGTCTGCACAACAATGGCGGCTGCTCACACATCTGCACTGACCTCAAGATTGGCTTTGAA
TGCACGTGCCCAGCAGGCTTCCAGCTCCTGGACCAGAAGACCTGTGGCGACATTGATGAGTGCAAGGA
CCCAGATGCCTGCAGCCAGATCTGTGTCAATTACAAGGGCTATTTTAAGTGTGAGTGCTACCCTGGCT
ACGAGATGGACCTACTGACCAAGAACTGCAAGGCTGCTGCTGGAAAGAGCCCATCCCTAATCTTCACC
AACCGGCACGAGGTGCGGAGGATCGACCTGGTGAAGCGGAACTATTCACGCCTCATCCCCATGCTCAA
GAATGTCGTGGCACTAGATGTGGAAGTTGCCACCAATCGCATCTACTGGTGTGACCTCTCCTACCGTA
AGATCTATAGCGCCTACATGGACAAGGCCAGTGACCCGAAAGAGCAGGAGGTCCTCATTGACGAGCAG
TTGCACTCTCCAGAGGGCCTGGCAGTGGACTGGGTCCACAAGCACATCTACTGGACTGACTCGGGCAA
TAAGACCATCTCAGTGGCCACAGTTGATGGTGGCCGCCGACGCACTCTCTTCAGCCGTAACCTCAGTG
AACCCCGGGCCATCGCTGTTGACCCCCTGCGAGGGTTCATGTATTGGTCTGACTGGGGGGACCAGGCC
AAGATTGAGAAATCTGGGCTCAACGGTGTGGACCGGCAAACACTGGTGTCAGACAATATTGAATGGCC
CAACGGAATCACCCTGGATCTGCTGAGCCAGCGCTTGTACTGGGTAGACTCCAAGCTACACCAACTGT
CCAGCATTGACTTCAGTGGAGGCAACAGAAAGACGCTGATCTCCTCCACTGACTTCCTGAGCCACCCT
TTTGGGATAGCTGTGTTTGAGGACAAGGTGTTCTGGACAGACCTGGAGAACGAGGCCATTTTCAGTGC
AAATCGGCTCAATGGCCTGGAAATCTCCATCCTGGCTGAGAACCTCAACAACCCACATGACATTGTCA
TCTTCCATGAGCTGAAGCAGCCAAGAGCTCCAGATGCCTGTGAGCTGAGTGTCCAGCCTAATGGAGGC
TGTGAATACCTGTGCCTTCCTGCTCCTCAGATCTCCAGCCACTCTCCCAAGTACACATGTGCCTGTCC
TGACACAATGTGGCTGGGTCCAGACATGAAGAGGTGCTACCGAGCACCTCAATCTACCTCAACTACGA
CGTTAGCTTCTACCATGACGAGGACAGTACCTGCCACCACAAGAGCCCCCGGGACCACCGTCCACAGA
TCCACCTACCAGAACCACAGCACAGAGACACCAAGCCTGACAGCTGCAGTCCCAAGCTCAGTTAGTGT
CAAATGAAGACAGTAAGATGGGCTCAACAGTCACTGCCGCTGTTATCGGGATCATCGTGCCCATAGTG
GTGATAGCCCTCCTGTGCATGAGTGGATACCTGATCTGGAGAAACTGGAAGCGGAAGAACACCAAAAG
CATGAATTTTGACAACCCAGTCTACAGGAAAACAACAGAAGAAGAAGATGAAGATGAGCTCCATATAG
GAGCCCTGTCTTGGGGAGACCAGAGAACCGGAAGACCCAGCCCCTGCCCTCAAGGAGCTTTTTGTCTT
GCCGGGGGAACCAAGGTCACAGCTGCACCAACTCCCGAAGAACCCTCTTTCCGAGCTGCCTGTCGTCA
AATCCAAGCGAGTGGCATTAAGCCTTGAAGATGATGGACTACCCTGA

| | | | |
|---|---|---|---|
| NOV28e, CG55256-02 | SEQ ID NO:646 | 1012 aa | MW at 111334.6 kD |
| Protein Sequence | | | |

MGLPEPGPLRLLALLLLLLLLLLLRLQHLAAAAADPLLGGQGPAKECEKDQFQCRNERCIPSVWRCDE
DDDCLDHSDEDDCPKKTCADSDFTCDNGHCIHERWKCDGEEECPDGSDESEATCTKQVCPAEKLSCGP
TSHKCVPASWRCDGEKDCEGGADEAGCATLCAPHEFQCGNRSCLAAVFVCDGDDDCGDGSDERGCADP
ACGPREFRCGGDGGGACIPERWVCDRQFDCEDRSDEAAELCGRPGPGATSAPAACATVSQFACRSGEC
VHLGWRCDGDRDCKDKSDEADCPLGTCRGDEFQCGDGTCVLAIKHCNQEQDCPDGSDEAGCLQESPCE
GPRRFQCKSGKRVDGGKVCDVQRDCRDWSDELLKVWCVSYHPPPGLNECLHNNGGCSHICTDLKIGFE
CTCPAGFQLLDQKTCGDIDECKDPDACSQICVNYKGYFKCECYPGYEMDLLTKNCKAAAGKSPSLIFT
NRHEVRRIDLVKRNYSRLIPMLKNVVALDVEVATNRIYWCDLSYRKIYSAYMDKASDPKEQEVLIDEQ
LHSPEGLAVDWVHKHIYWTDSGNKTISVATVDGGRRRTLFSRNLSEPAAIAVDPLRGFMYWSDWGDQA
KIEKSGLNGVDRQTLVSDNIEWPNGITLDLLSQRLYWVDSKLHQLSSIDFSGGNRKTLISSTDFLSHP
FGIAVFEDKVFWTDLENEAIFSANRLNGLEISILAENLNNPHDIVIFHELKQPRAPDACELSVQPNGG
CEYLCLPAPQISSHSPKYTCACPDTMWLGPDMKRCYRAPQSTSTTTLASTMTRTVPATTRAPGTTVHR
STYQNHSTETPSLTAAVPSSVSVPRAPSISPSTLSPATSNHSQHYANEDSKMGSTVTAAVIGIIVPIV
VIALLCMSGYLIWRNWKRKNTKSMNFDNPVYRKTTEEEDEDELHIGRTAQIGHVYPAAISSFDRPLWA
EPCLGETREPEDPAPALKELFVLPGEPRSQLHQLPKNPLSELPVVKSKRVALSLEDDGLP

| | | |
|---|---|---|
| NOV28f, CG55256-03 | SEQ ID NO:647 | 2537 bp |
| DNA Sequence | ORF Start: ATG at 1 | ORF Stop: TGA at 2086 |

ATGGGCCTCCCCGAGCCGGGCCCTCTCCGGCTTCTGGCGCTGCTGCTGCTGCTGCTGCTGCTGCTGCT
GCTGCGGCTCCAGCATCTTGCGGCGGCAGCGGCTGATCCGCTGCTCGGCGGCCAAGGGCCGGCCAAGG
ATTGCGAAAAGGACCAATTCCAGTGCCGGAACGAGCGCTGCATCCCCTCTGTGTGGAGATGCGACGAG
GACGATGACTGCTTAGACCACAGCGACGAGGACGACTGCCCCAAGAAGACCTGTGCAGACAGTGACTT
CACCTGTGACAACGGCCACTGCATCCACGAACGGTGGAAGTGTGACGGCGAGGAGGAGTGTCCTGATG
GCTCCGATGAGTCCGAGGCCACTTGCACCAAGCAGGTGTGTCCTGCAGAGAAGCTGAGCTGTGGACCC
ACCAGCCACAAGTGTGTACCTGCCTCGTGGCGCTGCGACGGGGAGAAGGACTGCGAGGGTGGAGCGGA
TGAGGCCGGCTGTGCTACCTCACTGGGCACCTGCCGTGGGGACGAGTTCCAGTGTGGGGATGGGACAT
GTGTCCTTGCAATCAAGCACTGCAACCAGGAGCAGGACTGTCCAGATGGGAGTGATGAAGCTGGCTGC
CTACAGGGGCTGAACGAGTGTCTGCACAACAATGGCGGCTGCTCACACATCTGCACTGACCTCAAGAT
AGTGCAAGGACCCAGATGOCTGCAGCCAGATCTGTGTCAATTACAAGGGCTATTTTAAGTGTGAGTGC
TACCCTGGCTACGAGATGGACCTACTGACCAAGAACTGCAAGGCTGCTGCTGGAAAGAGCCCATCCCT
AATCTTCACCAACCGGCACGAGGTGCGGAGGATCGACCTGGTGAAGCGGAACTATTCACGCCTCATCC
CCATGCTCAAGAATGTCGTGGCACTAGATGTGGAAGTTGCCACCAATCGCATCTACTGGTGTGACCTC
TCCTACCGTAAGATCTATAGCGCCTACATGGACAAGGCCAGTGACCCGAAAGAGCAGGAGGTCCTCAT
TGACGAGCAGTTGCACTCTCCAGAGGGCCTGGCAGTGGACTGGGTCCACAAGCACATCTACTGGACTG
ACTCGGGCAATAAGAACATCTCTGGTGGCCGCCGACGCACTCTCTTCAGCCGTAACCTCAGTGAACCC
CGGGCCATCGCTGTTGACCCCCTGCGAGGGTTCATGTATTGGTCTGACTGGGGGGACCAGGCCAAGAT
TGAGAAATCTGGGCTCAACGGTGTGGACCGGCAAACACTGGTGTCAGACAATATTGAATGGCCCAACG
GAATCACCCTGGATCTGCTGAGCCAGCGCTTGTACTGGGTAGACTCCAAGCTACACCAACTGTCCAGC
ATTGACTTCAGTGGAGGCAACAGAAAGACGCTGATCTCCTCCACTGACTTCCTGAGCCACCCTTTTGG
GATAGCTGTGTTTGAGGACAAGGTGTTCTGGACAGACCTGGAGAACGAGGCCATTTTCAGTGCAAATC
GGCTCAATGGCCTGGAAATCTCCATCCTGGCTGAGAACCTCAACAACCCACATGACATTGTCATCTTC
CATGAGCTGAAGCAGCCAAGAGCTCCAGATGCCTGTGAGCTGAGTGTCCAGCCTAATGGAGGCTGTGA
ATACCTGTGCCTTCCTGCTCCTCAGATCTCCAGCCACTCTCCCAAGTACACATGTGCCTGTCCTGACA
CAATGTGGCTGGGTCCAGACATGAAGAGGTGCTACCGAGATGCAAATGAAGACAGTAAGATGGGCTCA
ACAGTCACTGCCGCTGTTATCGGGATCATCGTGCCCATAGTGGTGATAGCCCTCCTGTGCATGAGTGG
ATACCTGATCTGGAGAAACTGGAAGCGGAAGAACACCAAAAGCATGAATTTTGACAACCCAGTCTACA
GGAAAACAACAGAAGAAGAAGATGAAGATGAGCTCCATATAGGGAGAACTGCTCAGATTGGCCATGTC
TATCCTGCACGAGTGGCATTAAGCCTTGAAGATGATGGACTACCCTGAGGATGGGATCACCCCCTTCG
TGCCTCATGGAATTCAGTCCCATGCACTACACTCCGGATGGTGTATGACTGGATGAATGGGTTTCTAT
ATATGGGTCTGTGTGAGTGTATGTGTGTGTGTGATTTTTTTTTTTTAAATTATGTTGCGGAAAGGTAA
CCACAAAGTTATGATGAACTGCAAACATCCAAAGGATGTGAGAGTTTTTCTATGTATAATGTTTTATA
CACTTTTTAACTGGTTGCACTACCCATGAGGAATTCGTGGAATGGCTACTGCTGACTAACATGATGCA
CATAACCAAATGGGGGCCAATGGCACAGTACCTTACTCATCATTTAAAAACTATATTTACAGAAGATG
TTTGGTTGCTGGGGGGCTTTTTTAGGTTTTGGGCATTTGTTTTTTGTAAATAAGATGATTATGCTTTG
TGGCTATCCATCAACATAAGT

| | | | |
|---|---|---|---|
| NOV28f, CG55256-03 | SEQ ID NO:648 | 695 aa | MW at 77399.4 kD |
| Protein Sequence | | | |

MGLPEPGPLRLLALLLLLLLLLLLRLQHLAAAAADPLLGGQGPAKDCEKDQFQCRNERCIPSVWRCDE
DDDCLDHSDEDDCPKKTCADSDFTCDNGHCIHERWKCDGEEECPDGSDESEATCTKQVCPAEKLSCGP
TSHKCVPASWRCDGEKDCEGGADEAGCATSLGTCRGDEFQCGDGTCVLAIKHCNQEQDCPDGSDEAGC
LQGLNECLHNNGGCSHICTDLKIGFECTCPAGFQLLDQKTCGDIDECKDPDACSQICVNYKGYFKCEC
YPGYEMDLLTKNCKAAAGKSPSLIFTNRHEVRRIDLVKRNYSRLIPMLKNVVALDVEVATNRIYWCDL
SYRKIYSAYMDKASDPKEQEVLIDEQLHSPEGLAVDWVHKHIYWTDSGNKNISGGRRRTLFSRNLSEP
RAIAVDPLRGFMYWSDWGDQAKIEKSGLNGVDRQTLVSDNIEWPNGITLDLLSQRLYWVDSKLHQLSS
IDFSGGNRKTLISSTDFLSHPFGIAVFEDKVFWTDLENEAIFSANRLNGLEISILAENLNNPHDIVIF
HELKQPRAPDACELSVQPNGGCEYLCLPAPQISSHSPKYTCACPDTMWLGPDMKRCYRDANEDSKMGS
TVTAAVIGIIVPIVVIALLCMSGYLIWRNWKRKNTKSMNFDNPVYRKTTEEEDEDELHIGRTAQIGHV
YPARVALSLEDDGLP

| | | |
|---|---|---|
| NOV28g, CG55256-04 | SEQ ID NO:649 | 2474 bp |
| DNA Sequence | ORF Start: ATG at 30 | ORF Stop: TGA at 2442 |

TGTTTTTTTTCTTCAGTACTTTAAATGTCATGCCACTCTCCTGGCCTGTAAGCTTTCCACAGAGAAGC
CTGCTGCCAGACCCATTGGAGCTTCTTTGTGTGTTATTTGTTTCTTTTTTCTTGCTGCTTTTACAGCT
CCAGCATCTTGCGGCGGCAGCGGCTGATCCGCTGCTCGGCGGCCAAGGGCCGGCCAAGGATTGCGAAA
AGGACCAATTCCAGTGCCGGAACGAGCGCTGCATCCCCTCTGTGTGGAGATGCGACGAGGACGATGAC
TGCTTAGACCACAGCGACGAGGACGACTGCCCTGCAGCCAAGAAGACACCTGTGAGAAGTGACTTCAC
CTGTGACAACGGCCACTGCATCCACGAACGGTGGAAGTGTGACGGCGAGGAGGAGTGTCCTGATGGCT
CCGATGAGTCCGAGGCCACTTGCACCAAGCAGGTGTGTCCTGCAGAGAAGCTGAGCTGTGGACCCACT
AGCCACAAGTGTGTACCTGCCTCGTGGCGCTGCGACGGGGAGAAGGACTGCGAGGGTGGAGCGGATGA
TCCTTGCAATCAAGCACTGCAACCAGGAGCAGGACTGTCCAGATGGGAGTGATGAAGCTGGCTGCCTA
CTTTGAATGCACGTGCCCAGCAGGCTTCCAGCTCCTGGACCAGAAGACCTGTGGCGCTGGCAAGAGCC
CATCCCTAATCTTCACCAACCGGCACGAGGTGCGGAGGATCGACCTGGTGAAGCGGAACTATTCACGC
CTCATCCCCATGCTCAAGAATGTCGTGGCACTAGATGTGGAAGTTGCCACCAATCGCATCTACTGGTG
TGACCTCTCCTACCGTAAGATCTATAGCGCCTACATGGACAAGGCCAGTGACCCGAAAGAGCAGGAGG
TCCTCATTGACGAGCAGTTGCACTCTCCAGAGGGCCTGGCAGTGGACTGGGTCCACAAGCACATCTAC
TGGACTGACTCGGGCAATAAGACCATCTCAGTGGCCACAGTTGATGGTGGCCGCCGACGCACTCTCTT
CAGCCGTAACCTCAGTGAACCCCGGGCCATCGCTGTTGACCCCCTGCGAGGGTTCATGTATTGGTCTG
ACTGGGGGGACCAGGCCAAGATTGAGAAATCTGGGCTCAACGGTGTGGACCGGCAAACACTGGTGTCA
GACAATATTGAATGGCCCAACGGAATCACCTTGGATCTGCTGAGCCAGCGCTTGTACTGGGTAGACTC
CAAGCTACACCAACTGTCCAGCATTGACTTCAGTGGAGGCAACAGAAAGACGCTGATCTCCTCCACTG
ACTTCCTGAGCCACCCTTTTGGGATAGCTGTGTTTGAGGACAAGGTGTTCTGGACAGACCTGGAGAAC
GAGGCCATTTTCAGTGCAAATCGGCTCAATGGCCTGGAAATCTCCATCCTGGCTGAGAACCTGAACAA
CCCACATGACATTGTCATCTTCCATGAGCTGAAGCAGCCAAGAGCTCCAGATGCCTGTGAGCTGAGTG
TCCAGCCTAATGGAGGCTGTGAATACCTGTGCCTTCCTGCTCCTCAGATCTCCAGCCACTCTCCCAAG
TACACATGTGCCTGTCCTGACACAATGTGGCTGGGTCCAGACATGAAGAGGTGCTACCGAGCACCTCA
ATCTACCTCAACTACGACGTTAGCTTCTACCATGACGAGGACAGTACCTGCCACCACAAGAGCCCCCG
GGACCACCGTCCACAGATCCACCTACCAGAACCACAGCACAGAGACACCAAGCCTGACAGCTGCAGTC
CCAAGCTCAGTTAGTGTCCCCAGGGCTCCCAGCATCAGCCCGTCTACCCTAAGCCCTGCAACCAGCAA
CCACTCCCAGCACTATGCAAATGAAGACAGTAAGATGGGCTCAACAGTCACTGCCGCTGTTATCGGGA
TCATCGTGCCCATAGTGGTGATAGCCCTCCTGTGCATGAGTGGATACCTGATCTGGAGAAACTGGAAG
CGGAAGAACACCAAAAGCATGAATTTTGACAACCCAGTCTACAGGAAAACAACAGAAGAAGAAGACGA
AGATGAGCTCCATATAGGGAGAACTGCTCAGATTGGCCATGTCTATCCTGCAGCAATCAGCAGCTTTG
ATCGCCCACTGTGGGCAGAGCCCTGTCTTGGGGAGACCAGAGAACCGGAAGACCCAGCCCCTGCCCTC
AAGGAGCTTTTTGTCTTGCCGGGGGAACCAAGGTCACAGCTGCACCAACTCCCGAAGAACCCTCTTTC
CGAGCTGCCTGTCGTCAAATCCAAGCGAGTGGCATTAAGCCTTGAAGATGATGGACTACCCTGAGGAT
GGGATCACCCCCTTCGTGCCTCATGG

| | | | |
|---|---|---|---|
| NOV28g, CG55256-04 | SEQ ID NO:650 | 804 aa | MW at 88873.0 kD |
| Protein Sequence | 1804 | | |

MPLSWPVSFPQRSLLPDPLELLCVLFVSFFLLLLQLQHLAAAAADPLLGGQGPAKDCEKDQFQCRNER
CIPSVWRCDEDDDCLDHSDEDDCPAAKKTPVRSDFTCDNGHCIHERWKCDGEEECPDGSDESEATCTK
QVCPAEKLSCGPTSHKCVPASWRCDGEKDCEGGADEAGCATSLGTCRGDEFQCGDGTCVLAIKHCNQE
QDCPDGSDEAGCLQGLNECLHNNGGCSHICTDLKIGFECTCPAGFQLLDQKTCGAGKSPSLIFTNRHE
VRRIDLVKRNYSRLIPMLKNVVALDVEVATNRIYWCDLSYRKIYSAYMDKASDPKEQEVLIDEQLHSP
EGLAVDWVHKHIYWTDSGNKTISVATVDGGRRRTLFSRNLSEPRAIAVDPLRGFMYWSDWGDQAKIEK
SGLNGVDRQTLVSDNIEWPNGITLDLLSQRLYWVDSKLHQLSSIDFSGGNRKTLISSTDFLSHPFGIA
VFEDKVFWTDLENEAIFSANRLNGLEISILAENLNNPHDIVIFHELKQPRAPDACELSVQPNGGCEYL
CLPAPQISSHSPKYTCACPDTMWLGPDMKRCYRAPQSTSTTTLASTMTRTVPATTAAPGTTVHRSTYQ
NHSTETPSLTAAVPSSVSVPPAPSISPSTLSPATSNHSQHYANEDSKMGSTVTAAVIGIIVPIVVIAL
LCMSGYLIWRNWKRKNTKSMNFDNPVYRKTTEEEDEDELHIGRTAQIGHVYPAAISSFDRPLWAEPCL
GETREPEDPAPALKELFVLPGEPRSQLHQLPKNPLSELPVVKSKRVALSLEDDGLP

| | | |
|---|---|---|
| +TL,1NOV28h, CG55256-05 | SEQ ID NO:651 | 4150 bp |
| DNA Sequence | ORF Start: ATG at 103 | ORF Stop: TGA at 2674 |

GCAGCGGCAACCCCGGCGCCGCGGCAAGGACTCGGAGGGCTGAGACGCGGCGGCGGCGGCGCGGGGAC
CGCGGGGCGCGGCGGCCGGAGCCCCGGGCCCGCCATGGGCCTCCCCGAGCCGGGCCCTCTCCGGCTTC
TGGCGCTGCTGCTGCTGCTGCTGCTGCTGCTGCTGCTGCGGCTCCAGCATCTTGCGGCGGCAGCGGCT
GATCCGCTGCTCGGCGGCCAAGGGCCGGCCAAGGAGTGCGAAAAGGACCAATTCCAGTGCCGGAACGA
GCGCTGCATCCCCTCTGTGTGGAGATGCGACGAGGACGATGACTGCTTAGACCACAGCGACGAGGACG
ACTGCCCCAAGAAGACCTGTGCAGACAGTGACTTCACCTGTGACAACGGCCACTGCATCCACGAACGG
TGGAAGTGTGACGGCGAGGAGGAGTGTCCTGATGGCTCCGATGAGTCCGAGGCCACTTGCACACTGGG
CACCTGCCGTGGGGACGAGTTCCAGTGTGGGGATGGGACATGTGTCCTTGCAATCAAGCACTGCAACC
AGGAGCAGGACTGTCCAGATGGGAGTGATGAAGCTGGCTGCCTACAGGAGTCACCCTGTGAGGGTCCC
CGCAGATTTCAGTGTAAGAGTGGCAAGCGCGTGGACGGCGGGAAAGTGTGTGATGTGCAGAGGGACTG
CCGGGACTGGTCGGATGAGCTTCTGAAAGTGTGGTGCGGTGCCTGTCTACGCCCACTGGCTGGACTCA
GTCTCCTACCATCCCCCTCCTGGAGCCCATGTCCCTCCCCAGGGCTGAACGAGTGTCTGCACAACAAT
GGCGGCTGCTCACACATCTGCACTGACCTCAAGATTGGCTTTGAATGCACGTGCCCAGCAGGCTTCCA
GCTCCTGGACCAGAAGACCTGTGGCGACATTGATGAGTGCAAGGACCCAGATGCCTGCAGCCAGATCT
AACTGCAAGGCTGCTGCTGGCAAGAGCCCATCCCTAATCTTCACCAACCGGCACGAGGTGCGGAGGAT
CGACCTGGTGAAGCGGAACTATTCACGCCTCATCCCCATGCTCAAGAATGTCGTGGCACTAGATGTGG
AAGTTGCCACCAATCGCATCTACTGGTGTGACCTCTCCTACCGTAAGATCTATAGCGCCTACATGGAC
AGTGGACTGGGTCCACAAGCACATCTACTGGACTGACTCGGGCAATAAGACCATCTCAGTGGCCACAG
TTGATGGTGGCCGCCGACGCACTCTCTTCAGCCGTAACCTCAGTGAACCCCGGGCCATCGCTGTTGAC
CCCCTGCGAGGGTTCATGTATTGGTCTGACTGGGGGGACCAGGCCAAGATTGAGAAATCTGGGCTCAA
CGGTGTGGACCGGCAAACACTGGTGTCAGACAATATTGAATGGCCCAACGGAATCACCCTGGATCTGC
TGAGCCAGCGCTTGTACTGGGTAGACTCCAAGCTACACCAACTGTCCAGCATTGACTTCAGTGGAGGC
AACAGAAAGACGCTGATCTCCTCCACTGACTTCCTGAGCCACCCTTTTGGGATAGCTGTGTTTGAGGA
CAAGGTGTTCTGGACAGACCTGGAGAACGAGGCCATTTTCAGTGCAAATCGGCTCAATGGCCTGGAAA
AGAGCTCCAGATGCCTGTGAGCTGAGTGTCCAGCCTAATGGAGGCTGTGAATACCTGTGCCTTCCTGC
TCCTCAGATCTCCAGCCACTCTCCCAAGTACACATGTGCCTGTCCTGACACAATGTGGCTGGGTCCAG
ACATGAAGAGGTGCTACCGAGCACCTCAATCTACCTCAACTACGACGTTAGCTTCTACCATGACGAGG
ACAGTACCTGCCACCACAAGAGCCCCCGGGACCACCGTCCACAGATCCACCTACCAGAACCACAGCAC
AGAGACACCAAGCCTGACAGCTGCAGTCCCAAGCTCAGTTAGTGTCCCCAGGGCTCCCAGCATCAGCC
CGTCTACCCTAAGCCCTGCAACCAGCAACCACTCCCAGCACTATGCAAATGAAGACAGTAAGATGGGC
TCAACAGTCACTGCCGCTGTTATCGGGATCATCGTGCCCATAGTGGTGATAGCCCTCCTGTGCATGAG
TGGATACCTGATCTGGAGAAACTGGAAGCGGAAGAACACCAAAAGCATGAATTTTGACAACCCAGTCT
ACAGGAAAACAACAGAAGAAGAAGATGAAGATGAGCTCCATATAGGGAGAACTGCTCAGATTGGCCAT
GTCTATCCTGCAGCAATCAGCAGCTTTGATCGCCCACTGTGGGCAGAGCCCTGTCTTGGGGAGACCAG
AGAACCGGAAGACCCAGCCCCTGCCCTCAAGGAGCTTTTTGTCTTGCCGGGGGAACCAAGGTCACAGC
TGCACCAACTCCCGAAGAACCCTCTTTCCGAGCTGCCTGTCGTCAAATCCAAGCGAGTGGCATTAAGC
CTTGAAGATGATGGACTACCCTGAGGATGGGATCACCCCCTTCGTGCCTCATGGAATTCAGTCCCATG
CACTACACTCTGGATGGTGTATGACTGGATGAATGGGTTTCTATATATGGGTCTGTGTGAGTGTATGT
GTGTGTGTGATTTTTTTTTTAAATTTATGTTGCGGAAAGGTAACCACAAAGTTATGATGAACTGCAAA
CATCCAAAGGATGTGAGAGTTTTTCTATGTATAATGTTTTATACACTTTTTAACTGGTTGCACTACCC
ATGAGGAATTCGTGGAATGGCTACTGCTGACTAACATGATGCACATAACCAAATGGGGGCCAATGGCA
CAGTACCTTACTCATCATTTAAAAACTATATTTACAGAAGATGTTTGGTTGCTGGGGGGGCTTTTTTG
GGTTTTGGGGCATTTGTTTTTTGTAAATAAGATGATTATGCTTTGTGGCTATCCATCAACATAAGTAA
AAAAAAAAAAAAAACACTTCAACTCCCTCCCCCATTTAGATTATTTATTAACATATTTTAAAAATCAG
ATGAGTTCTATAAATAATTTAGAGAAGTGAGAGTATTTATTTTTGGCATGTTTGGCCCACCACACAGA
CTCTGTGTGTGTATGTGTGTGTTTATATGTGTATGTGTGTGACAGGAAAATCTGTAGAGAAGAGGCAC
ATCTATGGCTACTGTTCAAATACATAAAGATAAATTTATTTTCACACAGTCCACAAGGGGTATATCTT
GTAGTTTTCAGAAAAGCCTTTGGAAATCTGGATCAGGAAATAGATACCATGGTTTGTGCAATTATGTA
GTAAAAAAGGCAAATCTTTTCACCTCTGGCTATTCCTGAGACCCCAGGAAGTCAGGAAAAGCCTTTCA
GCTCACCCATGGCTGCTGTGACTCCTACCAGGGCTTTCTTGGCTTTGGCGAAGGTCAGTGTACAGACA
TTCCATGGTACCAGAGTGCTCAGAAAGTCAAGATAGGATATGCCTCACCCTCAGCTACTCCTTGTTTT
CTCTGAAGCACCCTGAAGGGTGCCATCCTTACAGAGCTAAGTGGAGACGTTTCCAGATCAGCCCAAGT
TTACTATAGAGACTGGCCCAGGCACTGAATGTCTAGGACATGCTGTGGATGAAGATAAAGATGGTGGA
ATAGGTTTTATCACATCTCTTATTTCTCTTTTCCCCTTACTCTCTACCATTTCCTTTATGTGGGGAAA
CATTTTAAGGTAATAAATAGGTTACTTACCATCATATGTTCATATAGATGAAACTAATTTTTGGCTTA
AGTCAGAACAACTGGCCCCCAATTGAAGTCATATTTGTGGGGGGAAATGGCATACGCAATATTATATT
ATATTGGATATTTATGTTCACACAGGAATTTGGTTTACTGCTTTGTAAATAAAAGGGAAAACTCCGGG
TA

| | | | |
|---|---|---|---|
| NOV28h, CG55256-05 | SEQ ID NO:652 | 857 aa | MW at 95006.1 kD |
| Protein Sequence | | | |

+TL,1MGLPEPGPLRLLALLLLLLLLLLLRLQHLAAAAADPLLGGQGPAKECEKDQFQCRNERCIPSVWRCDE
DDDCLDHSDEDDCPKKTCADSDFTCDNGHCIHERWKCDGEEECPDGSDESEATCTLGTCRGDEFQCGD
GTCVLAIKHCNQEQDCPDGSDEAGCLQESPCEGPRRFQCKSGKRVDGGKVCDVQRDCRDWSDELLKVW
CGACLRPLAGLSLLPSPSWSPCPSPGLNECLHNNGGCSHICTDLKIGFECTCPAGFQLLDQKTCGDID
ECKDPDACSQICVNYKGYFKCECYPGYEMDLLTKNCKAAAGKSPSLIFTNRHEVRRIDLVKRNYSRLI
PMLKNVVALDVEVATNRIYWCDLSYRKIYSAYMDKASDPKEQEVLIDEQLHSPEGLAVDWVHKHIYWT
DSGNKTISVATVDGGRRRTLFSRNLSEPRAIAVDPLRGFMYWSDWGDQAKIEKSGLNGVDRQTLVSDN
IEWPNGITLDLLSQRLYWVDSKLHQLSSIDFSGGNRKTLISSTDFLSHPFGIAVFEDKVFWTDLENEA
IFSANRLNGLEISILAENLNNPHDIVIFHELKQPRAPDACELSVQPNGGCEYLCLPAPQISSHSPKYT
SVSVPRAPSISPSTLSPATSNHSQHYANEDSKMGSTVTAAVIGIIVPIVVIALLCMSGYLIWRNWKRK
NTKSMNFDNPVYRKTTEEEDEDELHIGRTAQIGHVYPAAISSFDRPLWAEPCLGETREPEDPAPALKE
LFVLPGEPRSQLHQLPKNPLSELPVVKSKRVALSLEDDGLP

| | | |
|---|---|---|
| NOV28i, CG55256-06 | SEQ ID NO:653 | 4180 bp |
| DNA Sequence | ORF Start: ATG at 163 | ORF Stop: TGA at 2704 |

ATGGCCTCCCCGAACGTATGGGCCTCCCCGAGCGTATGGGCCTCCCCGAGCGTATGGGCCTCCCCGAG
CGTATGGGCCTCACCCGAGCGTATGGGCCTCCCCGAGCGTATGGGCCTCCCCGAGCGTATGGGCCTCC
CCGAGCGTATGGGCCTCCCCGAGCGTATGGGCCTCCCCGAGCCGGGCCCTCTCCGGCTTCTGGCGCTG
CTGCTGCTGCTGCTGCTGCTGCTGCTGCTGCAGCTCCAGCATCTTGCGGCGGCAGCGGCTGATCCGCT
GCTCGGCGGCCAAGGGCCGGCCAAGGATTGCGAAAAGGACCAATTCCAGTGCCGGAACGAGCGCTGCA
TCCCCTCTGTGTGGAGATGCGACGAGGACGATGACTGCTTAGACCACAGCGACGAGGACGACTGCCCC
AAGAAGACCTGTGCAGACAGTGACTTCACCTGTGACAACGGCCACTGCATCCACGAACGGTGGAAGTG
TGACGGCGAGGAGGAGTGTCCTGATGGCTCCGATGAGTCCGAGGCCACTTGCACCAAGCAGGTGTGTC
CTGCAGAGAAGCTGAGCTGTGGACCCACCAGCCACAAGTGTGTACCTGCCTCGTGGCGCTGCGACGGG
GAGAAGGACTGCGAGGGTGGAGCGGATGAGGCCGGCTGTGCTACCTCACTGGGCACCTGCCGTGGGGA
CGAGTTCCAGTGTGGGGATGGGACATGTGTCCTTGCAATCAAGCACTGCAACCAGGAGCAGGACTGTC
AGGGGGCTGAACGAGTGTCTGCACAACAATGGCGGCTGCTCACACATCTGCACTGACCTCAAGATTGG
CTTTGAATGCACGTGCCCAGCAGGCTTCCAGCTCCTGGACCAGAAGACCTGTGGCGACATTGATGAGT
GCAAGGACCCAGATGCCTGCAGCCAGATCTGTGTCAATTACAAGGGCTATTTTAAGTGTGAGTGCTAC
CCTGGCTACGAGATGGACCTACTGACCAAGAACTGCAAGGCTGCTGCTGGAAAGAGCCCATCCCTAAT
CTTCACCAACCGGCACGAGGTGCGGAGGATCGACCTGGTGAAGCGGAACTATTCACGCCTCATCCCCA
TGCTCAAGAATGTCGTGGCACTAGATGTGGAAGTTGCCACCAATCGCATCTACTGGTGTGACCTCTCC
TACCGTAAGATCTATAGCGCCTACATGGACAAGGCCAGTGACCCGAAAGAGCAGGAGGTCCTCATTGA
CGAGCAGTTGCACTCTCCAGAGGGCCTGGCAGTGGACTGGGTCCACAAGCACATCTACTGGACTGACT
CGGGCAATAAGACCATCTCAGTGGCCACAGTTGATGGTGGCCGCCGACGCACTCTCTTCAGCCGTAAC
CTCAGTGAACCCCGGGCCATCGCTGTTGACCCCCTGCGAGGGTTCATGTATTGGTCTGACTGGGGGGA
CCAGGCCAAGATTGAGAAATCTGGGCTCAACGGTGTGGACCGGCAAACACTGGTGTCAGACAATATTG
AATGGCCCAACGGAATCACCCTGGATCTGCTGAGCCAGCGCTTGTACTGGGTAGACTCCAAGCTACAC
CAACTGTCCAGCATTGACTTCAGTGGAGGCAACAGAAAGACGCTGATCTCCTCCACTGACTTCCTGAG
CCACCCTTTTGGGATAGCTGTGTTTGAGGACAAGGTGTTCTGGACAGACCTGGAGAACGAGGCCATTT
TCAGTGCAAATCGGCTCAATGGCCTGGAAATCTCCATCCTGGCTGAGAACCTCAACAACCCACATGAC
ATTGTCATCTTCCATGAGCTGAAGCAGCCAAGAGCTCCAGATGCCTGTGAGCTGAGTGTCCAGCCTAA
TGGAGGCTGTGAATACCTGTGCCTTCCTGCTCCTCAGATCTCCAGCCACTCTCCCAAGTACACATGTG
CCTGTCCTGACACAATGTGGCTGGGTCCAGACATGAAGAGGTGCTACCGAGCACCTCAATCTACCTCA
ACTACGACGTTAGCTTCTACCATGACGAGGACAGTACCTGCCACCACAAGAGCCCCCGGGACCACCGT
CCACAGATCCACCTACCAGAACCACAGCACAGAGACACCAAGCCTGACAGCTGCAGTCCCAAGCTCAG
TTAGTGTCCCCAGGGCTCCCAGCATCAGCCCGTCTACCCTAAGCCCTGCAACCAGCAACCACTCCCAG
CACTATGCAAATGAAGACAGTAAGATGGGCTCAACAGTCACTGCCGCTGTTATCGGGATCATCGTGCC
CATAGTGGTGATAGCCCTCCTGTGCATGAGTGGATACCTGATCTGGAGAAACTGGAAGCGGAAGAACA
CCAAAAGCATGAATTTTGACAACCCAGTCTACAGGAAACAACAGAAGAAGAAGATGAAGATGAGCTC
CATATAGGGAGAACTGCTCAGATTGGCCATGTCTATCCTGCAGCAATCAGCAGCTTTGATCGCCCACT
GTGGGCAGAGCCCTGTCTTGGGGAGACCAGAGAACCGGAAGACCCAGCCCCTGCCCTCAAGGAGCTTT
TTGTCTTGCCGGGGGAACCAAGGTCACAGCTGCACCAACTCCCGAAGAACCCTCTTTCCGAGCTGCCT
GTCGTCAAATCCAAGCGAGTGGCATTAAGCCTTGAAGATGATGGACTACCCTGAGGATGGGATCACCC
TTCTATATATGGGTCTGTGTGAGTGTATGTGTGTGTGTGATTTTTTTTTTAAATTTATGTTGCGGAAA
GGTAACCACAAAGTTATGATGAACTGCAAACATCCAAAGGATGTGAGAGTTTTTCTATGTATAATGTT
TTATACACTTTTTAACTGGTTGCACTACCCATGAGGAATTCGTGGAATGGCTACTGCTGACTAACATG
ATGCACATAACCAAATGGGGGCCAATGGCACAGTACCTTACTCATCATTTAAAAACTATATTTACAGA
AGATGTTTGGTTGCTGGGGGGGCTTTTTTGGGTTTTGGGGCATTTGTTTTTTGTAAATAAGATGATTA
TGCTTTGTGGCTATCCATCAACATAAGTAAAAAAAAAAAAAAAACACTTCAACTCCCTCCCCCATTTA
GATTATTTATTAACATATTTTAAAAATCAGATGAGTTCTATAAATAATTTAGAGAAGTGAGAGTATTT
ATTTTTGGCATGTTTGGCCCACCACACAGACTCTGTGTGTGTATGTGTGTGTTTATATGTGTATGTGT
GTGACAGGAAAATCTGTAGAGAAGAGGCACATCTATGGCTACTGTTCAAATACATAAAGATAAATTTA
TTTTCACACAGTCCACAAGGGGTATATCTTGTAGTTTTCAGAAAAGCCTTTGGAAATCTGGATCAGGA
AATAGATACCATGGTTTGTGCAATTATGTAGTAAAAAAGGCAAATCTTTTCACCTCTGGCTATTCCTG
AGACCCCAGGAAGTCAGGAAAAGCCTTTCAGCTCACCCATGGCTGCTGTGACTCCTACCAGGGCTTTC
TTGGCTTTGGCGAAGGTCAGTGTACAGACATTCCATGGTACCAGAGTGCTCAGAAAGTCAAGATAGGA
AGGACACTTGGGTTGAATTCAGTAAGTTTCCTCTGAAGCACCCTGAAGGGTGCCATCCTTACAGAGCT
AAGTGGAGACGTTTCCAGATCAGCCCAAGTTTACTATAGAGACTGGCCCAGGCACTGAATGTCTAGGA
CATGCTGTGGATGAAGATAAAGATGGTGGAATAGGTTTTATCACATCTCTTATTTCTCTTTTCCCCTT
ACTCTCTACCATTTCCTTTATGTGGGGAAACATTTTAAGGTAATAAATAGGTTACTTACCATCATATC
TTCATATAGATGAAACTAATTTTTGGCTTAAGTCAGAACAACTGGCCCCCAATTGAAGTCATATTTGT
GGGGGGAAATGGCATACGCAATATTATATTATATTGGATATTTATGTTCACACAGGAATTTGGTTTAC

| | | | |
|---|---|---|---|
| NOV28i, CG55256-06 | SEQ ID NO:654 | 847 aa | MW at 93663.5 kD |
| Protein Sequence | | | |

+TL,1MGLPEPGPLRLLALLLLLLLLLLLQLQHLAAAAADPLLGGQGPAKDCEKDQFQCRNERCIPSVWRCDE
DDDCLDHSDEDDCPKKTCADSDFTCDNGHCIHERWKCDGEEECPDGSDESEATCTKQVCPAEKLSCGP
TSHKCVPASWRCDGEKDCEGGADEAGCATSLGTCRGDEFQCGDGTCVIAIKHCNQEQDCPDGSDEAGC
LQVPPTFLGNRRRPRGLNECLHNNGGCSHICTDLKIGFECTCPAGFQLLDQKTCGDIDECKDPDACSQ
ICVKGYFKCECYPGYEMDLLTKNGACKAAAGKSPSLIFTNRHEVRRIDLVKRNYSRLIPMLKNVVALD
TVDGGRRRTLFSRNLSEPRAIAVDPLRGFMYWSDWGDQAKIEKSGLNGVDRQTLVSDNIEWPNGITLD
LLSQRLYWVDSKLHQLSSIDFSGGNRKTLISSTDFLSHPFGIAVFEDKVFWTDLENEAIFSANRLNGL
EISILAENLNNPHDIVIFHELKQPRAPDACELSVQPNGGCEYLCLPAPQISSHSPKYTCACPDTMWLG
PDMKRCYRAPQSTSTTTLASTMTRTVPATTRAPGTTVHRSTYQNHSTETPSLTAAVPSSVSVPPAPSI
SPSTLSPATSNHSQHYANEDSKMGSTVTAAVIGIIVPIVVIALLCMSGYLIWRNWKRKNTKSMNFDNP
VYRKTTEEEDEDELHIGRTAQIGHVYPAAISSFDRPLWAEPCLGETREPEDPAPALKELFVLPGEPRS
QLHQLPAPLSELPWKSKRVALSLEDDGLP

| | | |
|---|---|---|
| NOV28, CG55256-08 | SEQ ID NO:655 | 2656 bp |
| DNA Sequence | ORF Start: ATG at 103 | ORF Stop: TGA at 2428 |

GCAGCGGCAACCCCGGCGCCGCGGCAAGGACTCGGAGGGCTGAGACGCGGCGGCGGCGGCGCGGGGAG
CGCGGGGCGCGGCGGCCGGAGCCCCGGGCCCGCCATGGGCCTCCCCGAGCCGGGCCCTCTCCGGCTTC
TGGCGCTGCTGCTGCTGCTGCTGCTGCTGCTGCTGCTGCGGCTCCAGCATCTTGCGGCGGCAGCGGCT
GATCCGCTGCTCGGCGGCCAAGGGCCGGCCAAGGAGTGCGAAAAGGACCAATTCCAGTGCCGGAACGA
GCGCTGCATCCCCTCTGTGTGGAGATGCGACGAGGACGATGACTGCTTAGACCACAGCGACGAGGACG
ACTGCCCCAAGAAGACCTGTGCAGACAGTGACTTCACCTGTGACAACGGCCACTGCATCCACGAACGG
TGGAAGTGTGACGGCGAGGAGGAGTGTCCTGATGGCTCCGATGAGTCCGAGGCCACTTGCACCAAGCA
GGTGTGTCCTGCAGAGAAGCTGAGCTGTGGACCCACCAGCCACAAGTGTGTACCTGCCTCGTGGCGCT
GCGACGGGGAGAAGGACTGCGAGGGTGGAGCGGATGAGGCCGGCTGTGCTACCTCACTGGGCACCTGC
CGTGGGGACGAGTTCCAGTGTGGGGATGGGACATGTGTCCTTGCAATCAAGCACTGCAACCAGGAGCA
GGACTGTCCAGATGGGAGTGATGAAGCTGGCTGCCTACAGGGGCTGAACGAGTGTCTGCACAACAATG
GCGGCTGCTCACACATCTGCACTGACCTCAAGATTGGCTTTGAATGCACGTGCCCAGCAGGCTTCCAG
CTCCTGGACCAGAAGACCTGTGGCGACATTGATGAGTGCAAGGACCCAGATGCCTGCAGCCAGATCTG
TGTCAATTACAAGGGCTATTTTAAGTGTGAGTGCTACCCTGGCTACGAGATGGACCTACTGACCAAGA
ACTGCAAGGCTGCTGCTGGCAAGAGCCCATCCCTAATCTTCACCAACCGGCACGAGGTGCGGAGGATC
GACCTGGTGAAGCGGAACTATTCACGCCTCATCCCCATGCTCAAGAATGTCGTGGCACTAGATGTGGA
AGTTGCCACCAATCGCATCTACTGGTGTGACCTCTCCTACCGTAAGATCTATAGCGCCTACATGGACA
AGGCCAGTGACCCGAAAGAGCAGGAGGTCCTCATTGACGAGCAGTTGCACTCTCCAGAGGGCCTGGCA
GTGGACTGGGTCCACAAGCACATCTACTGGACTGACTCGGGCAATAAGACCATCTCAGTGGCCACAGT
TGATGGTGGCCGCCGACGCACTCTCTTCAGCCGTAACCTCAGTGAACCCCGGGCCATCGCTGTTGGCC
CCCTGCGAGGGTTCATGTATTGGTCTGACTGGGGGGACCAGGCCAAGATTGAGAAATCTGGGCTCAAC
GGTGTGGACCGGCAAACACTGGTGTTAGACAATATTGAATGGCCCAACGGAATCACCCTGGATCTGCT
GAGCCAGCGCTTGTACTGGGTAGACTCCAAGCTACACCAACTGTCCAGCATTGACTTCAGTGGAGGCA
ACAGAAAGACGCTGATCTCCTCCACTGACTTCCTGAGCCACCCTTTTGGGATAGCTGTGTTTGAGGAC
AAGGTGTTCTGGACAGACCTGGAGAACGAGGCCATTTTCAGTGCAAATCGGCTCAATGGCCTGGAAAT
CTCCATCCTGGCTGAGAACCTCAACAACCCACATGACATTGTCATCTTCCATGAGCTGAAGCAGCCAA
GAGCTCCAGATGCCTGTGAGCTGAGTGTCCAGCCTAATGGAGGCTGTGAATACCTGTGCCTTCCTGCT
CCTCAGATCTCCAGCCACTCTCCCAAGTACACATGTGCCTGTCCTGACACAATGTGGCTGGGCCCAGA
CATGAAGAGGTGCTACCGAGCACCTCAATCTACCTCAACTACGACGTTAGCTTCTACCATGACGAGGA
CAGTACCTGCCACCACAAGAGCCCCCGGGACCACCGTCCACAGATCCACCTACCAGAACCACAGCACA
GAGACACCAAGCCTGACAGCTGCAGTCCCAAGCTCAGTTAGTGTCCCCAGGGCTCCCAGCATCAGCCC
GTCTACCCTAAGCCCTGCAACCAGCAACCACTCCCAGCACTATGCAAATGAAGACAGTAAGATGGGCT
CAACAGTCACTGCCGCTGTTATCGGGATCATCGTGCCCATAGTGGTGATAGCCCTCCTGTGCATGAGT
GGATACCTGATCTGGAGAAACTGGAAGCGGAAGAACACCAAAAGCATGAATTTTGACAACCCAGTCTA
CAGGAAAACAACAGAAGAAGAAGACGAAGATGAGCTCCATATAGGGAGAACTGCTCAGATTGGCCATG
TCTATCCTGCACGAGTGGCATTAAGCCTTGAAGATGATGGACTACCCTGAGGATGGGATCACCCCCTT
CGTGCCTCATGGAATTCAGTCCCATGCACTACACTCTGGAGGGTGTATGACTGGATGAATGGGTTTCT
ATATATGGGTCTGTGTGAGTGTATGTGTGTGTGTGATTTTTTTTTTAAATTTATGTTGCGGAAAGGTA
ACCACAAAGTTATGATGAACTGCAAACATCCAAAGGATGTGAGAGTTTTTCTATGTATAATGTTTTAT
ACAC

| | | | |
|---|---|---|---|
| NOV28, CG55256-08 | SEQ ID NO:656 | 775 aa | MW at 85584.3 kD |
| Protein Sequence | | | |

+TL,1MGLPEPGPLRLLALLLLLLLLLLLRLQHLAAAAADPLLGGQGPAKECEKDQFQCRNERCIPSVWRCDE
DDDCLDHSDEDDCPKKTCADSDFTCDNGHCIHERWKCDGEEECPDGSDESEATCTKQVCPAEKLSCGP
TSHKCVPASWRCDGEKDCEGGADEAGCATSLGTCRGDEFQCGDGTCVLAIKHCNQEQDCPDGSDEAGC
LQGLNECLHNNGGCSHICTDLKIGFECTCPAGFQLLDQKTCGDIDECKDPDACSQICVNYKGYFKCEC
YPGYEMDLLTKNCKAAAGKSPSLIFTNRHEVRRIDLVKRNYSRLIPMLKNVVALDVEVATNRIYWCDL
SYRKIYSAYMDKASDPKEQEVLIDEQLHSPEGLAVDWVHKHIYWTDSGNKTISVATVDGGRRRTLFSR
NLSEPRAIAVGPLRGFMYWSDWGDQAKIEKSGLNGVDRQTLVLDNIEWPNGITLDLLSQRLYWVDSKL
HQLSSIDFSGGNRKTLISSTDFLSHPFGIAVFEDKVFWTDLENEAIFSANRLNGLEISILAENLNNPH
DIVIFHELKQPRAPDACELSVQPNGGCEYLCLPAPQISSHSPKYTCACPDTMWLGPDMKRCYPAPQST
STTTLASTMTRTVPATTRAPGTTVHRSTYQNHSTETPSLTAAVPSSVSVPRAPSISPSTLSPATSNHS
QHYANEDSKMGSTVTAAVIGIIVPIVVIALLCMSGYLIWRNWKRKNTKSNNFDNPVYRKTTEEEDEDE
LHIGRTAQIGHVYPARVALSLEDDGLP

| | | |
|---|---|---|
| NOV28k, CG55256-09 | SEQ ID NO:657 | 2623 bp |
| DNA Sequence | ORF Start: ATG at 103 | ORF Stop: TGA at 2605 |

GCAGCGGCAACCCCGGCGCCGCGGCAAGGACTCGGAGGGCTGAGACGCGGCGGCGGCGGCGCGGGGAG
CGCGGGGCGCGGCGGCCGGAGCCCCGGGCCCGCCATGGGCCTCCCCGAGCCGGGCCCTCTCCGGCTTC
TGGCGCTGCTGCTGCTGCTGCTGCTGCTGCTGCTGCTGCGGCTCCAGCATCTTGCGGCGGCAGCGGCT
GATCCGCTGCTCGGCGGCCAAGGGCCGGCCAAGGATTGCGAAAAGGACCAATTCCAGTGCCGGAACGA
GCGCTGCATCCCCTCTGTGTGGAGATGCGACGAGGACGATGACTGCTTAGACCACAGCGACGAGGACG
ACTGCCCCAAGAAGACCTGTGCAGACAGTGACTTCACCTGTGACAACGGCCACTGCATCCACGAACGG
TGGAAGTGTGACGGCGAGGAGGAGTGTCCTGATGGCTCCGATGAGTCCGAGGCCACTTGCACCAAGCA
GGTGTGTCCTGCAGAGAAGCTGAGCTGTGGACCCACCAGCCACAAGTGTGTACCTGCCTCGTGGCGCT
GCGACGGGGAGAAGGACTGCGAGGGTGGAGCGGATGAGGCCGGCTGTGCTACCTCACTGGGCACCTGC
CGTGGGGACGAGTTCCAGTGTGGGGATGGGACATGTGTCCTTGCAATCAAGCACTGCAACCAGGAGCA
GGACTGTCCAGATGGGAGTGATGAAGCTGGCTGCCTACAGGGGCTGAACGAGTGTCTGCACAACAATG
GCGGCTGCTCACACATCTGCACTGACCTCAAGATTGGCTTTGAATGCACGTGCCCAGCAGGCTTCCAG
CTCCTGGACCAGAAGACCTGTGGCGACATTGATGAGTGCAAGGACCCAGATGCCTGCAGCCAGATCTG
TGTCMATTACAAGGGCTATTTTAAGTGTGAGTGCTACCCTGGCTACGAGATGGACCTACTGACCAAGA
ACTGCAAGGCTGCTGCTGGCAAGAGCCCATCCCTAATCTTCACCAACCGGCACGAGGTGCGGAGGATC
GACCTGGTGAAGCGGAACTATTCACGCCTCATCCCCATGCTCAAGAATGTCGTGGCACTAGATGTGGA
AGTTGCCACCAATCGCATCTACTGGTGTGACCTCTCCTACCGTAAGATCTATAGCGCCTACATGGACA
AGGCCAGTGACCCGAAAGAGCAGGAGGTCCTCATTGACGAGCAGTTGCACTCTCCAGAGGGCCTGGCA
GTGGACTGGGTCCACAAGCACATCTACTGGACTGACTCGGGCAATAAGACCATCTCAGTGGCCACAGT
TGATGGTGGCCGCCGACGCACTCTCTTCAGCCGTAACCTCAGTGAACCCCGGGCCATCGCTGTTGACC
CCCTGCGAGGGTTCATGTATTGGTCTGACTGGGGGGACCAGGCCAAGATTGAGAAATCTGGGCTCAAC
GGTGTGGACCGGCAAACACTGGTGTCAGACAATATTGAATGGCCCAACGGAATCACCCTGGATCTGCT
GAGCCAGCGCTTGTACTGGGTAGACTCCAAGCTACACCAACTGTCCAGCATTGACTTCAGTGGAGGCA
ACAGAAAGACGCTGATCTCCTCCACTGACTTCCTGAGCCACCCTTTTGGGATAGCTGTGTTTGAGGAC
CTCCATCCTGGCTGAGAACCTCAACAACCCACATGACATTGTCATCTTCCATGAGCTGAAGCAGCCAA
CCTCAGATCTCCAGCCACTCTCCCAAGTACACATGTGCCTGTCCTGACACAATGTGGCTGGGTCCAGA
CATGAAGAGGTGCTACCGAGCACCTCAATCTACCTCAACTACGACGTTAGCTTCTACCATGACGAGGA
CAGTACCTGCCACCACAAGAGCCCCCGGGACCACCGTCCACAGATCCACCTACCAGAACCACAGCACA
GAGACACCAAGCCTGACAGCTGCAGTCCCAAGCTCAGTTAGTGTCCCCAGGGCTCCCAGCATCAGCCC
GTCTACCCTAAGCCCTGCAACCAGCAACCACTCCCAGCACTATGCAAATGAAGACAGTAAGATGGGCT
CAACAGTCACTGCCGCTGTTATCGGGATCATCGTGCCCATAGTGGTGATAGCCCTCCTGTGCATGAGT
GGATACCTGATCTGGAGAAACTGGAAGCGGAAGAACACCAAAAGCATGAATTTTGCCAACCCAGTCTA
CAGGAAAACAACAGAAGAAGAAGACGAAGATGAGCTCCATATAGGGAGAACTGCTCAGATTGGCCATG
TCTATCCTGCAGCAATCAGCAGCTTTGATCGCCCACTGTGGGCAGAGCCCTGTCTTGGGGAGACCAGA
GAACCGGAAGACCCAGCCCCTGCCCTCAAGGAGCTTTTTGTCTTGCCGGGGGAACCAAGGTCACAGCT
GCACCAACTCCCGAAGAACCCTCTTTCCGAGCTGCCTGTCGTCAAATCCAAGCGAGTGGCATTAAGCC
TTGAAGATGATGGACTACCCTGAGGATGGGATCACCCCC

| | | | |
|---|---|---|---|
| NOV28k, CG55256-09 | SEQ ID NO:658 | 834 aa | MW at 92099.7 kD |
| Protein Sequence | | | |

MGLPEPGPLRLLALLLLLLLLLLLRLQHLAAAAADPLLGGQGPAKDCEKDQFQCRNERCIPSVWRCDE
DDDCLDHSDEDDCPKKTCADSDFTCDNGHCIHERWKCDGEEECPDGSDESEATCTKQVCPAEKLSCGP
TSHKCVPASWRCDGEKDCEGGADEAGCATSLGTCRGDEFQCGDGTCVLAIKHCNQEQDCPDGSDEAGC
LQGLNECLHNNGGCSHICTDLKIGFECTCPAGFQLLDQKTCGDIDECKDPDACSQICVNYKGYFKCEC
YPGYEMDLLTKNCKAAAGKSPSLIFTNRHEVRRIDLVKRNYSRLIPMLKNVVALDVEVATNRIYWCDL
SYRKIYSAYMDKASDPKEQEVLIDEQLHSPEGLAVDWVHKHIYWTDSGNKTISVATVDGGRRRTLFSR
NLSEPRAIAVDPLRGFMYWSDWGDQAKIEKSGLNGVDRQTLVSDNIEWPNGITLDLLSQRLYWVDSKL
HQLSSIDFSGGNRKTLISSTDFLSHPFGIAVFEDKVFATDLENEAIFSANRLNGLEISILAENLNNPH
DIVIFHELKQPRAPDACELSVQPNGGCEYLCLPAPQISSHSPKYTCACPDTMWLGPDMKRCYRAPQST
STTTLASTMTRTVPATTRAPGTTVHRSTYQNHSTETPSLTAAVPSSVSVPRAPSISPSTLSPATSNHS
QHYANEDSKMGSTVTAAVIGIIVPIVVIALLCMSGYLIWRNWKRKNTKSMNFANPVYRKTTEEEDEDE
LHIGRTAQIGHVYPAAISSFDRPLWAEPCLGETREPEDPAPALKELFVLPGEPRSQLHQLPKNPLSEL
PVVKSKRVALSLEDDGLP

| | | |
|---|---|---|
| NOV281, CG55256-11 | SEQ ID NO:659 | 4607 bp |
| DNA Sequence | ORF Start: ATG at 237 | ORF Stop: TGA at 3126 |

GCTGGCGGCGGCCGCCCAGGGCCGGGGCCGCGCGCCCAGCCTGAGCCCGCCCCGCCGCCGAGCGTCAC
CGAACCTGCTTGAAATGCAGCCGAGGAGCCGGGGCGGGCGGCAGCGGCGGCGGCGGCGGCGGCGGGGG
CAGCGGCAACCCCGGCGCCGCGGCAAGGACTCGGAGGGCTGAGACGCGGCGGCGGCGGCGCGGGGAGC
GCGGGGCGCGGCGGCCGGAGCCCGGGCCCGCCATGGGCCTCCCCGAGCCGGGCCCTCTCCGGCTTCTG
GCGCTGCTGCTGCTGCTGCTGCTGCTGCTGCTGCTGCGGCTCCAGCATCTTGCGGCGGCAGCGGCTGA
TCCGCTGCTCGGCGGCCAAGGGCCGGCCAAGGAGTGCGAAAAGGACCAATTCCAGTGCCGGAACGAGC
GCTGCATCCCCTCTGTGTGGAGATGCGACGAGGACGATGACTGCTTAGACCACAGCGACGAGGACGAC
TGCCCCAAGAAGACCTGTGCAGACAGTGACTTCACCTGTGACAACGGCCACTGCATCCACGAACGGTG
GAAGTGTGACGGCGAGGAGGAGTGTCCTGATGGCTCCGATGAGTCCGAGGCCACTTGCACCAAGCAGG
TGTGTCCTGCAGAGAAGCTGAGCTGTGGACCCACCAGCCACAAGTGTGTACCTGCCTCGTGGCGCTGC
GACGGGGAGAAGGACTGCGAGGGTGGAGCGGATGAGGCCGGCTGTGCTACCTTGTGCGCCCCGCACGA
GTTCCAGTGCGGCAACCGCTCGTGCCTGGCCGCCGTGTTCGTGTGCGACGGCGATGACGACTGTGGTG
ACGGCAGCGATGAGCGCGGCTGTGCAGACCCGGCCTGCGGGCCCCGCGAGTTCCGCTGCGGCGGCGAT
GGCGGCGGCGCCTGCATCCCGGAGCGCTGGGTCTGCGACCGCCAGTTTGACTGCGAGGACCGCTCGGA
CGAGGCAGCCGAGCTCTGCGGCCGCCCGGGCCCCGGGGCCACGTCCGCGCCCGCCGCCTGCGCCACCG
TCTCCCAGTTCGCCTGCCGCAGCGGCGAGTGCGTGCACCTGGGCTGGCGCTGCGACGGCGACCGCGAC
TGCAAAGACAAATCGGACGAGGCCGACTGCCCACTGGGCACCTGCCGTGGGGACGAGTTCCAGTGTGG
GGATGGGACATGTGTCCTTGCAATCAAGCACTGCAACCAGGAGCAGGACTGTCCAGATGGGAGTGATG
AAGCTGGCTGCCTACAGGGGCTGAACGAGTGTCTGCACAACAATGGCGGCTGCTCACACATCTGCACT
GACCTCAAGATTGGCTTTGAATGCACGTGCCCAGCAGGCTTCCAGCTCCTGGACCAGAAGACCTGTGG
CGACATTGATGAGTGCAAGGACCCAGATGCCTGCAGCCAGATCTGTGTCAATTACAAGGGCTATTTTA
AGTGTGAGTGCTACCCTGGCTACGAGATGGACCTACTGACCAAGAACTGCAAGGCTGCTGGTGGAAAG
AGCCCATCCCTAATCTTCACCAACCGGTACGAGGTGCGGAGGATCGACCTGGTGAAGCGGAACTATTC
ACGCCTCATCCCCATGCTCAAGAATGTCGTGGCACTAGATGTGGAAGTTGCCACCAATCGCATCTACT
GGTGTGACCTCTCCTACCGTAAGATCTATAGCGCCTACATGGACAAGGCCAGTGACCcGAAAGAGcAG
GAGGTCCTCATTGACGAGCAGTTGCACTCTCCAGAGGGCCTGGCAGTGGACTGGGTCCACAAGCACAT
CTACTGGACTGACTCGGGCAATAAGACCATCTCAGTGGCCACAGTTGATGGTGGCCGCCGACGCACTC
TCTTCAGCCGTAACCTCAGTGAACCCCGGGCCATCGCTGTTGACCCCCTGCGAGGGTTCATGTATTGG
TCTGACTGGGGGGACCAGGCCAAGATTGAGAAATCTGGGCTCAACGGTGTGGACCGGCAAACACTGGT
GTCAGACAATATTGAATGGCCCAACGGAATCACCCTGGATCTGCTGAGCCAGCGCTTGTACTGGGTAG
ACTCCAAGCTACACCAACTGTCCAGCATTGACTTCAGTGGAGGCAACAGAAAGACGCTGATCTCCTCC
ACTGACTTCCTGAGCCACCCTTTTGGGATAGCTGTGTTTGAGGACAAGGTGTTCTGGACAGACCTGGA
GAACGAGGCCATTTTCAGTGCAAATCGGCTCAATGGCCTGGAAATCTCCATCCTGGCTGAGAACCTCA
ACAACCCACATGACATTGTCATCTTCCATGAGCTGAAGCAGCCAAGAGCTCCAGATGCCTGTGAGCTG
AGTGTCCAGCCTAATGGAGGCTGTGAATACCTGTGCCTTCCTGCTCCTCAGATCTCCAGCCACTCTCC
CAAGTACACATGTGCCTGTCCTGACACAATGTGGCTGGGTCCAGACATGAAGAGGTGCTACCGAGCAC
CTCAATCTACCTCAACTACGACGTTAGCTTCTACCATGACGAGGACAGTACCTGCCACCACAAGAGCC
CCCGGGACCACCGTCCACAGATCCACCTACCAGAACCACAGCACAGAGACACCAAGCCTGACAGCTGC
AGTCCCAAGCTCAGTTAGTGTCCCCAGGGCTCCCAGCATCAGCCCGTCTACCCTAAGCCCTGCAACCA
GGGATCATCGTGCCCATAGTGGTGATAGCCCTCCTGTGCATGAGTGGATACCTGATCTGGAGAAACTG
GAAGCGGAAGAACACCAAAAGCATGAATTTTGACAACCCAGTCTACAGGAAAACAACAGAAGAAGAAG
ATGAAGATGAGCTCCATATAGGGAGAACTGCTCAGATTGGCCATGTCTATCCTGCAGCAATCAGCAGC
TTTGATCGCCCACTGTGGGCAGAGCCCTGTCTTGGGGAGACCAGAGAACCGGAAGACCCAGCCCCTGC
CCTCAAGGAGCTTTTTGTCTTGCCGGGGGAACCAAGGTCACAGCTGCACCAACTCCCGAAGAACCCTC
TTTCCGAGCTGCCTGTCGTCAAATCCAAGCGAGTGGCATTAAGCCTTGAAGATGATGGACTACCCTGA
GGATGGGATCACCCCCTTCGTGCCTCATGGAATTCAGTCCCATGCACTACACTCTGGATGGTGTATGA
CTGGATGAATGGGTTTCTATATATGGGTCTGTGTGAGTGTATGTGTGTGTGTGATTTTTTTTTTAAAT
TTATGTTGCGGAAAGGTAACCACAAAGTTATGATGAACTGCAAACATCCAAAGGATGTGAGAGTTTTT
CTATGTATAATGTTTTATACACTTTTTAACTGGTTGCACTACCCATGAGGAATTCGTGGAATGGCTAC
TGCTGACTAACATGATGCACATAACCAAATGGGGGCCAATGGCACAGTACCTTACTCATCATTTAAAA
ACTATATTTACAGAAGATGTTTGGTTGCTGGGGGGGCTTTTTTGGGTTTTGGGGCATTTGTTTTTTGT
AAATAAGATGATTATGCTTTGTGGCTATCCATCAACATAAGTAAAAAAAAAAAAAAAACACTTCAACT
CCCTCCCCCATTTAGATTATTTATTAACATATTTTAAAAATCAGATGAGTTCTATAAATAATTTAGAG
AAGTGAGAGTATTTATTTTTGGCATGTTTGGCCCACCACACAGACTCTGTGTGTGTATGTGTGTGTTT
ATATGTGTATGTGTGTGACAGGAAAATCTGTAGAGAAGAGGCACATCTATGGCTACTGTTCAAATACA
TAAAGATAAATTTATTTTCACACAGTCCACAAGGGGTATATCTTGTAGTTTTCAGAAAAGCCTTTGGA
AATCTGGATCAGGAAATAGATACCATGGTTTGTGCAATTATGTAGTAAAAAAGGCAAATCTTTTCACC
TCTGGCTATTCCTGAGACCCCAGGAAGTCAGGAAAAGCCTTTCAGCTCACCCATGGCTGCTGTGACTC
CTACCAGGGCTTTCTTGGCTTTGGCCAAGGTCAGTGTACAGACATTCCATGGTACCAGAGTGCTCAGA
AAGTCAAGATAGGATATGCCTGACCCTCAGCTACTCCTTGTTTTAAAGTTCAGCTCTTTGAGTAACTT
CTTCAATTTCTTTCAGGACACTTGGGTTGAATTCAGTAAGTTTCCTCTGAAGCACCCTGAAGGGTGCC
ATCCTTACAGAGCTAAGTGGAGACGTTTCCAGATCAGCCCAAGTTTACTATAGAGACTGGCCCAGGCA
CTGAATGTCTAGGACATGCTGTGGATGAAGATAAAGATGGTGGAATAGGTTTTATCACATCTCTTATT
TCTCTTTTCCCCTTACTCTCTACCATTTCCTTTATGTGGGGAAACATTTTAAGGTAATAAATAGGTTA
CTTACCATCATATGTTCATATAGATGAAACTAATTTTTGGCTTAAGTCAGAACAACTGGCCCCCAATT
GAAGTCATATTTGTGGGGGGAAATGGCATACGCAATATTATATTATATTGGATATTTATGTTCACACA
GGAATTTGGTTTACTGCTTTGTAAATAAAAGGGAAAACTCCGGGTATATGT

| | | | | |
|---|---|---|---|---|
| NOV281, CG55256-11 | SEQ ID NO:660 | 963 aa | MW at 105714.3 kD | I |
| Protein Sequence | | | | |

MGLPEPGPLRLLALLLLLLLLLLLRLQHLAAAAADPLLGGQGPAKECEKDQFQCRNERCIPSVWRCDE
DDDCLDHSDEDDCPKKTCADSDFTCDNGHCIHERWKCDGEEECPDGSDESEATCTKQVCPAEKLSCGP
TSHKCVPASWRCDGEKDCEGGADEAGCATLCAPHEFQCGNRSCLAAVFVCDGDDDCGDGSDERGCADP
ACGPREFRCGGDGGGACIPERWVCDRQFDCEDRSDEAAELCGRPGPGATSAPAACATVSQFACRSGEC
VHLGWRCDGDRDCKDKSDEADCPLGTCRGDEFQCGDGTCVLAIKHCNQEQDCPDGSDEAGCLQGLNEC
LHNNGGCSHICTDLKIGFECTCPAGFQLLDQKTCGDIDECKDPDACSQICVNYKGYFKCECYPGYEMD
LLTKNCKAAGGKSPSLIFTNRYEVRRIDLVKRNYSRLIPMLKNVVALDVEVATNRIYWCDLSYRKIYS
AYMDKASDPKEQEVLIDEQLHSPEGLAVDWVHKHIYWTDSGNKTISVATVDGGRRRTLFSRNLSEPRA
IAVDPLRGFMYWSDWGDQAKIEKSGLNGVDRQTLVSDNIEWPNGITLDLLSQRLYWVDSKLHQLSSID
FSGGNRKTLISSTDFLSHPFGIAVFEDKVFWTDLENEAIFSANRLNGLEISILAENLNNPHDIVIFHE
LKQPRAPDACELSVQPNGGCEYLCLPAPQISSHSPKYTCACPDTMWLGPDMKRCYPAPQSTSTTTLAS
TMTRTVPATTRAPGTTVHRSTYQNHSTETPSLTAAVPSSVSVPAAPSISPSTLSPATSNHSQHYANED
SKMGSTVTAAVIGIIVPIVVIALLCMSGYLIWRWKRKNTKSMNFDNPVYR1CTTEEEDEDELHIGRTA
QIGHVYPAAISSFDRPLWAEPCLGETREPEDPAPALKELFVLPGEPRSQLHQLPKNPLSELPVVKSKR
VALSLEDDGLP

| | | |
|---|---|---|
| NOV28m, SNP13382497 of | SEQ ID NO:661 | 4294 bp |
| CG55256-07, | ORF Start: ATG at 103 | ORF Stop: TGA at 2818 |
| DNA Sequence | SNP Pos: 2550 | SNP Change: T to C |

GCAGCGGCAACCCCGGCGCCGCGGCAAGGACTCGGAGGGCTGAGACGCGGCGGCGGCGGCGCGGGGAG
CGCGGGGCGCGGCGGCCGGAGCCCCGGGCCCGCCATGGGCCTCCCCGAGCCGGGCCCTCTCCGGCTTC
TGGCGCTGCTGCTGCTGCTGCTGCTGCTGCTGCTGCTGCGGCTCCAGCATCTTGCGGCGGCAGCGGCT
ACTGCCCCAAGAAGACCTGTGCAGACAGTGACTTCACCTGTGACAACGGCCACTGCATCCACGAACGG
TGGAAGTGTGACGGCGAGGAGGAGTGTCCTGATGGCTCCGATGAGTCCGAGGCCACTTGCACACTGGG
CACCTGCCGTGGGGACGAGTTCCAGTGTGGGGATGGGACATGTGTCCTTGCAATCAAGCACTGCAACC
AGGAGCAGGACTGTCCAGATGGGAGTGATGAAGCTGGCTGCCTACAGGAGTCACCCTGTGAGGGTCCC
CGCAGATTTCAGTGTAAGAGTGGCAAGCGCGTGGACGGCGGGAAAGTGTGTGATGTGCAGAGGGACTG
CCGGGACTGGTCGGATGAGCTTCTGAAAGTGTGGTGCGGTGCCTGTCTACGCCCACTGGCTGGACTCA
GTCTCCTACCATCCCCCTCCTGGTATCTAGGCTCAAGGCCCTCCAGTGCCCCCTGCCCTGACACTTTC
TGCTCTGACCCTCTCTTTGGATTCATGTGCCGTCCTATGGCTTCACATGGGGCTTTTCGCCCCCAGGC
CTCTGGTCTACATCTCTACAAAGTGCTAAGAGCTTGTCCATCCCAGAGGAGGCTGAACGAGTGTCTGC
ACAACAATGGCGGCTGCTCACACATCTGCACTGACCTCAAGATTGGCTTTGAATGCACGTGCCCAGCA
GGCTTCCAGCTCCTGGACCAGAAGACCTGTGGCGACATTGATGAGTGCAAGGACCCAGATGCCTGCAG
CCAGATCTGTGTCAATTACAAGGGCTATTTTAAGTGTGAGTGCTACCCTGGCTACGAGATGGACCTAC
TGACCAAGAACTGCCAAGCTGCTGCTGGAAAGAGCCCATCCCTAATCTTCACCAACCGGTACGAGGTG
CGGAGGATCGACCTGGTGAAGCGGAACTATTCACGCCTCATCCCCATGCTCAAGAATGTCGTGGCACT
ACATGGACAAGGCCAGTGACCCGAAAGAGCAGGAGGTCCTCATTGACGAGCAGTTGCACTCTCCAGAG
GGCCTGGCAGTGGACTGGGTCCACAAGCACATCTACTGGACTGACTCGGGCAATAAGACCATCTCAGT
GGGCTCAACGGTGTGGACCGGCAAACACTGGTGTCAGACAATATTGAATGGCCCAACGGAATCACCCT
GGATCTGCTGAGCCAGCGCTTGTACTGGGTAGACTCCAAGCTACACCAACTGTCCAGCATTGACTTCA
GTGGAGGCAACAGAAAGACGCTGATCTCCTCCACTGACTTCCTGAGCCACCCTTTTGGGATAGCTGTG
TTTGAGGACAAGGTGTTCTGGACAGACCTGGAGAACGAGGCCATTTTCAGTGCAAATCGGCTCAATGG
CCTGGAAATCTCCATCCTGGCTGAGAACCTCAACAACCCACATGACATTGTCATCTTCCATGAGCTGA
AGCAGCCAAGACCTCCAGATGCCTGTGAGCTGAGTGTCCAGCCTAATGGAGGCTGTGAATACCTGTGC
CTTCCTGCTCCTCAGATCTCCAGCCACTCTCCCAAGTACACATGTGCCTGTCCTGACACAATGTGGCT
GGGTCCAGACATGAAGAGGTGCTACCGAGCACCTCAATCTACCTCAACTACGACGTTAGCTTCTACCA
TGACGAGGACAGTACCTGCCACCACAAGAGCCCCCGGGACCACCGTCCACAGATCCACCTACCAGAAC
CACAGCACAGAGACACCAAGCCTGACAGCTGCAGTCCCAAGCTCAGTTAGTGTCCCCAGGGCTCCCAG
CATCAGCCCGTCTACCCTAAGCCCTGCAACCAGCAACCACTCCCAGCACTATGCAAATGAAGACAGTA
AGATGGGCTCAACAGTCACTGCCGCTGTTATCGGGATCATCGTGCCCATAGTGGTGATAGCCCTCCTG
TGCATGAGTGGATACCTGATCTGGAGAAACTGGAAGCGGAAGAACACCAAAAGCATGAATTTTGACAA
CCCAGTCTACAGGAAAACAACAGAAGAAGAAGACGAAGATGAGCTCCATATAGGGAGAACTGCTCAGA
TTGGCCATGTCTATCCTGCAGCAATCAGCAGCTTTGATCGCCCACTGTGGGCAGAGCCCTGTCTTGGG
GAGACCAGAGAACCGGAAGACCCAGCCCCTGCCCTCAAGGAGCTTTTTGTCTTGCCGGGGGAACCAAG
GTCACAGCTGCACCAACTCCCGAAGAACCCTCTTTCCGAGCTGCCTGTCGTCAAATCCAAGCGAGTGG
CATTAAGCCTTGAAGATGATGGACTACCCTGAGGATGGGATCACCCCCTTCGTGCCTCATGGAATTCA
GTCCCATGCACTACACTCTGGATGGTGTATGACTGGATGAATGGGTTTCTATATATGGGTCTGTGTGA
GTGTATGTGTGTGTGTGATTTTTTTTTTAAATTTATGTTGCGGAAAGGTAACCACAAAGTTATGATGA
ACTGCAAACATCCAAAGGATGTGAGAGTTTTTCTATGTATAATGTTTTATACACTTTTTAACTGGTTG
CACTACCCATGAGGAATTCGTGGAATGGCTACTGCTGACTAACATGATGCACATAACCAAATGGGGGC
CAATGGCACAGTACCTTACTCATCATTTAAAAACTATATTTACAGAAGATGTTTGGTTGCTGGGGGGG
CTTTTTTGGGTTTTGGGGCATTTGTTTTTTGTAAATAAGATGATTATGCTTTGTGGCTATCCATCAAC
ATAAGTAAAAAAAAAAAAAAAACACTTCAACTCCCTCCCCCATTTAGATTATTTATTAACATATTTTA
AAAATCAGATGAGTTCTATAAATAATTTAGAGAAGTGAGAGTATTTATTTTTGGCATGTTTGGCCCAC
CACACAGACTCTGTGTGTGTATGTGTGTGTTTATATGTGTATGTGTGTGACAGGAAAATCTGTAGAGA
AGAGGCACATCTATGGCTACTGTTCAAATACATAAAGATAAATTTATTTTCACACAGTCCACAAGGGG
TATATCTTGTAGTTTTCAGAAAAGCCTTTGGAAATCTGGATCAGGAAATAGATACCATGGTTTGTGCA
ATTATGTAGTAAAAAAGGCAAATCTTTTCACCTCTGGCTATTCCTGAGACCCCAGGAAGTCAGGAAAA
GCCTTTCAGCTCACCCATGGCTGCTGTGACTCCTACCAGGGCTTTCTTGGCTTTGGCGAAGGTCAGTG
TACAGACATTCCATGGTACCAGAGTGCTCAGAAAGTCAAGATAGGATATGCCTCACCCTCAGCTACTC
CTTGTTTTAAAGTTCAGCTCTTTGAGTAACTTCTTCAATTTCTTTCAGGACACTTGGGTTGAATTCAG
TAAGTTTCCTCTGAAGCACCCTGAAGGGTGCCAATCCTTACAGAGCTAAGTAAGACGTTTCCAGATCA
GCCCAAGTTTACTATAGAGACTGGCCCAGGCACTGAATGTCTAGGACATGCTGTGGATGAAGATAAAG
ATGGTGGAATAGGTTTTATCACATCTCTTATTTCTCTTTTCCCCTTACTCTCTACCATTTCCTTTATG
TGGGGAAACATTTTAAGGTAATAAATAGGTTACTTACCATCATATGTTCATATAGATGAAACTAATTT
TTGGCTTAAGTCAGAACAACTGGCCCCCAATTGAAGTCATATTTGTGGGGGGAAATGGCATACGCAAT
ATTATATTATATTGGATATTTATGTTCACACAGGAATTTGGTTTACTGCTTTGTAAATAAAAGGGAAA
ACTCCGGGTA

| | | | |
|---|---|---|---|
| NOV28m, SNP13382497 of | SEQ ID NO:662 | 905 aa | MW at 100461.4 kD |
| CG55256-07, Protein | SNP Pos: 816 | | SNP Change: Asp to Asp |
| Sequence | | | |

MGLPEPGPLRLLALLLLLLLLLLLRLQHLAAAAADPLLGGQGPAKECEKDQFQCRNERCIPSVWRCDE
DDDCLDHSDEDDCPKKTCADSDFTCDNGHCIHERWKCDGEEECPDGSDESEATCTLGTCRGDEFQCGD
GTCVNAIKHCNQEQDCPDGSDEAGCLQESPCEGPRRFQCKSGKRVDGGKVCDVQRDCRDWSDELLKVW
CGACLRPLAGLSLLPSPSWYLGSRPSSAPCPDTFCSDPLFGFMCRPMASHGAFRPQASGLHLYKVLRA
CPSQRRLNECLHNNGGCSHICTDLKIGFECTCPAGFQLLDQKTCGDIDECKDPDACSQICVNYKGYFK
CECYPGYEMDLLTKNCQAAAGKSPSLIFTNRYEVRRIDLVKRNYSRLIPMLKNVVALDVEVATNRIYW
CDLSYRKIYSAYMDKASDPKEQEVLIDEQLHSPEGLAVDWVHKHIYWTDSGNKTISVATVDGGRRRTL
FSRNLSEPRAIAVDPLRGFMYWSDWGDQAKIEKSGLNGVDRQTLVSDNIEWPNGITLDLLSQRLYWVD
SKLHQLSSIDFSGGNRKTLISSTDFLSHPFGIAVFEDKVFWTDLENEAIFSANRLNGLEISILAENLN
NPHDIVIFHELKQPAAPDACELSVQPNGGCEYLCLPAPQISSHSPKYTCACPDTMWLGPDMKRCYRAP
QSTSTTTLASTMTRTVPATTRAPGTTVHRSTYQNHSTETPSLTAAVPSSVSVPRAPSISPSTLSPATS
NHSQHYANEDSKMGSTVTAAVIGIIVPIVVIALLCMSGYLIWRNWKRKNTKSMNFDNPVYRKTTEEED
EDELHIGRTAQIGHVYPAAISSFDRPLWAEPCLGETREPEDPAPALKELFVLPGEPRSQLHQLPKNPL
SELPVVKSKRVALSLEDDGLP

| | | |
|---|---|---|
| NOV28n, SNP13382498 of | SEQ ID NO:663 | 4294 bp |
| CG55256-07, | ORF Start: ATG at 103 | ORF Stop: TGA at 2818 |
| DNA Sequence | SNP Pos: 2783 | SNP Change: G to A |

GCAGCGGCAACCCCGGCGCCGCGGCAAGGACTCGGAGGGCTGAGACGAGGCGGCGGCGGCGCGGGGAG
CGCGGGGCGCGGCGGCCGGAGCCCCGGGCCCGCCATGGGCCTCCCCGAGCCGGGCCCTCTCCGGCTTC
TGGCGCTGCTGCTGCTGCTGCTGCTGCTGCTGCTGCTGCGGCTCCAGCATGTTGCGGCGGCAGCGGCT
GATCCGCTGCTCGGCGGCCAAGGGCCGGCCAAGGAGTGCGAAAAGGACCAATTCCAGTGCCGGAACGA
GCGCTGCATCCCCTCTGTGTGGAGATGCGACGAGGACGATGACTGCTTAGACCACACAGACGAGGACG
ACTGCCCCAAGAAGACCTGTGCAGACAGTGACTTCACCTGTGACAACGGCCACTGCATCCACGAACGG
TGGAAGTGTGACGGCGAGGAGGAGTGTCCTGATGGCTCCGATGAGTCCGAGGCCACTTGCACACTGGG
CACCTGCCGTGGGGACGAGTTCCAGTGTGGGGATGGGACATGTGTCCTTGCATCAAAGCACTGCAACC
AGGAGCAGGACTGTCCAGATGGGAGTGATGAAGCTGGCTGCCTACAGGAGTCACCCTGTGAGGGTCCC
CGCAGATTTCAGTGTAAGAGTGGCAAGCGCGTGGACGGCGGGAAAGTGTGTGATGTGCAGAGGGACTG
CCGGGACTGGTCGGATGAGCTTCTGAAAGTGTGGTGCGGTGCCTGTCTACGCCCACTGGCTGGACTCA
GTCTCCTACCATCCCCCTCCTGGTATCTAGGCTCAAGGCCCTCCAGTGCCCCCTGCCCTGACACTTTC
TGCTCTGACCCTCTCTTTGGATTCATGTGCCGTCCTATGGCTTCACATGGGGCTTTTCGCCCCCAGGC
CTCTGGTCTACATCTCTACAAAGTGCTAAGAGCTTGTCCATCCCAGAGGAGGCTGAACGAGTGTCTGC
ACAACAATGGCGGCTGCTCACACATCTGCACTGACCTCAAGATTGGCTTTGAATGCACGTGCCCAGCA
GGCTTCCAGCTCCTGGACCAGAAGACCTGTGGCGACATTGATGAGTGCAAGGACCCAGATGCCTGCAG
CCAGATCTGTGTCAATTACAAGGGCTATTTTAAGTGTGAGTGCTACCCTGGCAACGAGATGGACCTAC
TGACCAAGAACTGCCAAGCTGCTGCTGGAAAGAGCCCATCCCTAATCTTCACCAACCGGTACGAGGTG
CGGAGGATCGACCTGGTGAAGCGGAACTATTCACGCCTCATCCCCATGCTCAAGAATGTCGTGGCACT
AGATGTGGAAGTTGCCACCAATCGCATCTACTGGTGTGACCTCTCCTACCGTAAGATCTATAGCGCCT
ACATGGACAAGGCCAGTGACCCGAAAGAGCAGGAGGTCCTCATTGACGAGCAGTTGCACTCTCCAGAG
GGCCTGGCAGTGGACTGGGTCCACAAGCACATGTACTGGACTGACTCGGGCAATAAGACCATCTCAGT
GGCCACAGTTGATGGTGGCCGCCGACGCACTCTCTTCAGCCGTAACCTCAGTGAACCCCGGGCCATCG
CTGTTGACCCCCTGCGAGGGTTCATGTATTGGTCTGACTGGGGGGACCAGGCCAAGATTGAGAAATCT
GGGCTCAACGGTGTGGACCGGCAAACACTGGTGTCAGACAATATTGAATGGCCCAACGGAATCACCCT
GGATCTGCTGAGCCAGCGCTTGTACTGGGTAGACTCCAAGCTACACCAACTGTCCAGCATTGACTTCA
GTGGAGGCAACAGAAAGACGCTGATCTCCTCCACTGACTTCCTGAGCCACCCTTTTGGGATAGCTGTG
TTTGAGGACAAGGTGTTCTGGACAGACCTGGAGAACGAGGCCATTTTCAGTGCAAATCGGCTCAATGG
CCTGGAAATCTCCATCCTGGCTGAGAACCTCAACAACCCACATGACATTGTCATCTTCCATGAGCTGA
AGCAGCCAAGAGCTGGAGATGCCTGTGAGCTGAGTGTCCAGCCTAATGGAGGCTGTGAATACCTGTGC
CTTCCTGCTCCTCAGATCTCCAGCCACTCTCCCAAGTACACATGTGCCTGTCCTGACACAATGTGGCT
GGGTCCAGACATGAAGAGGTGCTACCGAGCACCTCAATCTACCTCAACTACGACGTTAGCTTCTACCA
TGACGAGGACAGTACCTGCCACCACAAGAGCCCCCGGGACCACCGTCCACAGATGGACCTACCAGAAC
CACAGCACAGAGACACCAAGCCTGACAGCTGCAGTCCCAAGCTCAGTTAGTGTCCCCAGGGCTCCCAG
CATCAGCCCGTCTACCCTAAGCCCTGCAACCAGCAACCACTCCCAGCACTATGCAAATGAGAACAGTA
AGATGGGCTCAACAGTCACTGCCGCTGTTATCGGGATCATCGTGCCCATAGTGGTGATAGCCCTCCTG
TGCATGAGTGGATACCTGATCTGGAGAAACTGGAAGCGGAAGAACACCAAAAGCATGAATTTTGACAA
CCCAGTCTACAGGAAAACAACAGAAGAAGAAGATGAAGATGAGCTCCATATAGGGAGAACTGCTCAGA
TTGGCCATGTCTATCCTGCAGCAATGAGCAGCTTTGATCGCCCACTGTGGGCAGAGCCCTGTCTTGGG
GAGACCAGAGAACCGGAAGACCCAGCCCCTGCCCTCAAGGAGCTTTTTGTCTTGCCGGGGGAACCAAG
GTCACAGCTGCACCAACTCCCGAAGAACCCTCTTTCCGAGCTGCCTGTCGTCAAATCCAAGCAAGTGG
CATTAAGCCTTGAAGATGATGGACTACCCTGAGGATGGGATCACCCCCTTCGTGCCTCATGGAATTCA
GTCCCATGCACTACACTCTGGATGGTGTATGACTGGATGAATGGGTTTCTATATATGGGTCTGTGTGA
GTGTATGTGTGTGTGTGATTTTTTTTTTAAATTTATGTTGCGGAAAGGTAACCACAAAGTTATGATGA
ACTGCAAACATCCAAAGGATGTGAGAGTTTTTCTATGTATAATGTTTTATACACTTTTTAACTGGTTG
CACTACCCATGAGGAATTCGTGGAATGGCTACTGCTGACTAACATGATGCACATAACCAAATGGGGGC
CAATGGCACAGTACCTTACTCATCATTTAAAAACTATATTTACAGAGATGTTTGGTTGCTGGGGGGGG
CTTTTTTGGGTTTTGGGGCATTTGTTTTTTGTAAATAAGATGATTATGCTTTGTGGCTATCCATCAAC
ATAAGTAAAAAAAAAAAAAAAACACTTCAACTCCCTCCCCCATTTAGATTATTTATTAACATATTTTA
AAAATCAGATGAGTTCTATAAATAATTTAGAGAAGTGAGAGTATTTATTTTTGGCATGTTTGGCCCAC
CACACAGACTCTGTGTGTGTATGTGTGTGTTTATATGTGTATGTGTGTGACAGGAAAATCTGTAGAGA
AGAGGCACATCTATGGCTACTGTTCAAATACATAAAGATAAATTTATTTTCACACAGTCCACAAGGGG
TATATCTTGTAGTTTTCAGAAAAGCCTTTGGAAATCTGGATCAGGAAATAGATACCATGGTTTGTGCA
ATTATGTAGTAAAAAAGGCAAATCTTTTCACCTCTGGCTATTCCTGAGACCCCAGGAAGTCAGGAAAA
GCCTTTCAGCTCACCCATGGCTGCTGTGACTCCTACCAGGGCTTTCTTGGCTTTGGCGAAGGTCAGTG
TACAGACATTCCATGGTACCAGAGTGCTCAGAAAGTCAAGATAGGATATGCCTCACCCTCAGCTACTC
CTTGTTTTAAAGTTCAGCTCTTTGAGTAACTTCTTCAATTTCTTTCAGGACACTTGGGTTGAATTCAG
TAAGTTTCCTCTGAAGCACCCTGAAGGGTGCCATCCTTACAGAGCTAAGTGGAGACGTTTCCAGATCA
GCCCAAGTTTACTATAGAGACTGGCCCAGGCACTGATGTCTAGGACATGCTGTGGATGAAGGATAAAG
ATGGTGGAATAGGTTTTATCACATCTCTTATTTCTCTTTTCCCCTTACTCTCTACCATTTCCTTTATG
TGGGGAAACATTTTAAGGTAATAAATAGGTTACTTACCATCATATGTTCATATAGATGAAACTAATTT
TTGGCTTAAGTCAGAACAACTGGCCCCCAATTGAAGTCATATTTGTGGGGGGAAATGGCATACGCAAT
ATTATATTATATTGGATATTTATGTTCACACAGGAATTTGGTTTACTGCTTTGTAAATAAAAGGGAAA
ACTCCGGGTA

| | | | |
|---|---|---|---|
| NOV28n, SNP13382498 of | SEQ ID NO:664 | 905 aa | MW at 100433.3 kD |
| CG55256-07, | SNP Pos: 894 | SNP Change: Arg to Gln | |
| Protein Sequence | | | |

MGLPEPGPLRLLALLLLLLLLLLLRLQHLAAAAADPLLGGQGPAKECEKDQFQCRNERCIPSVWRCDE
DDDCLDHSDEDDCPKKTCADSDFTCDNGHCIHERWKCDGEEECPDGSDESEATCTLGTCRGDEFQCGD
GTCVLAIKHCNQEQDCPDGSDEAGCLQESPCEGPRRFQCKSGKRVDGGKVCDVQRDCRDWSDELLKVW
CGACLRPLAGLSLLPSPSWYLGSRPSSAPCPDTFCSDPLFGFMCRPMASHGAFRPQASGLHLYKVLRA
CPSQRRLNECLHNNGGCSHICTDLKIGFECTCPAGFQLLDQKTCGDIDECKDPDACSQICVNYKGYFK
CECYPGYEMDLLTKNCQAAAGKSPSLIFTNRYEVRRIDLVKRNYSRLIPMLKNVVALDVEVATNRIYW
CDLSYRKIYSAYMDKASDPKEQEVLIDEQLHSPEGLAVDWVHKHIYWTDSGNKTISVATVDGGRRRTL
FSRNLSEPAAIAVDPLRGFMYWSDWGDQAKIEKSGLNGVDRQTLVSDNIEWPNGITLDLLSQRLYWVD
SKLHQLSSIDFSGGNRKTLISSTDFLSHPFGIAVFEDKVFWTDLENEAIFSANRLNGLEISILAENLN
NPHDIVIFHELKQPRAPDACELSVQPNGGCEYLCLPAPQISSHSPKYTCACPDTMWLGPDMKRCYRAP
QSTSTTTLASTMTRTVPATTRAPGTTVHRSTYQNHSTETPSLTAAVPSSVSVPRAPSISPSTLSPATS
NHSQHYANEDSKMGSTVTAAVIGIIVPIVVIALLCMSGYLIWRNWKRKNTKSMNFDNPVYRKTTEEED
EDELHIGRTAQIGHVYPAAISSFDRPLWAEPCLGETREPEDPAPALKELFVLPGEPRSQLHQLPKNPL
SELPVVKSKQVALSLEDDGLP

[0513] A ClustalW comparison of the above protein sequences yields the following sequence alignment shown in Table 28B.

TABLE 28B
Comparison of the NOV28 protein sequences.

| | | |
|---|---|---|
| NOV28a | ----------MGLPEPGPLRLLALLLLLLLLLLLRLQHLAAAAADPLLGGQGPAKECEKD | (SEQ ID NO:638) |
| NOV28b | ------------------------------------------AADPLLGGQGPAKDCEKD | (SEQ ID NO:640) |
| NOV28c | ----------------------------------------GSAADPLLGGQGPAKDCEKD | (SEQ ID NO:642) |
| NOV28d | MPLSWPVSFPQRSLLPDPLELLCVLFVSFFLLLLQLQHLAAAAADPLLGGQGPAKDCEKD | (SEQ ID NO:644) |
| NOV28e | ------MGLPE----PGPLRLLALLLLLLLLLLLRLQHLAAAAADPLLGGQGPAKECEKD | (SEQ ID NO:646) |
| NOV28f | ------MGLPE----PGPLRLLALLLLLLLLLLLRLQHLAAAAADPLLGGQGPAKDCEKD | (SEQ ID NO:648) |
| NOV28g | MPLSWPVSFPQRSLLPDPLELLCVLFVSFFLLLLQLQHLAAAAADPLLGGQGPAKDCEKD | (SEQ ID NO:650) |
| NOV28h | ----------MGLPEPGPLRLLALLLLLLLLLLLRLQHLAAAAADPLLGGQGPAKECEKD | (SEQ ID NO:652) |
| NOV28i | ------MGLPE----PGPLRLLALLLLLLLLLLLQLQHLAAAAADPLLGGQGPAKDCEKD | (SEQ ID NO:654) |
| NOV28 | ------MGLPE----PGPLRLLALLLLLLLLLLLRLQHLAAAAADPLLGGQGPAKECEKD | (SEQ ID NO:656) |
| NOV28k | ------MGLPE----PGPLRLLALLLLLLLLLLLRLQHLAAAAADPLLGGQGPAKDCEKD | (SEQ ID NO:658) |
| NOV281 | ------MGLPE----PGPLRLLALLLLLLLLLLLRLQHLAAAAADPLLGGQGPAKECEKD | (SEQ ID NO:660) |
| NOV28a | QFQCRNERCIPSVWRCDEDDDCLDHSDEDDCP--KKTCADSDFTCDNGHCIHERWKCDGE | |
| NOV28b | QFQCRNERCIPSVWRCDEDDDCLDHSDEDDCP--KKTCADSDFTCDNGHCIHERWKCDGE | |
| NOV28c | QFQCRNERCIPSVWRCDEDDDCLDHSDEDDCP--KKTCADSDFTCDNGHCIHERWKCDGE | |
| NOV28d | QFQCRNERCIPSVWRCDEDDDCLDHSDEDDCPAAKKTPVRSDFTCDNGHCIHERWKCDGE | |
| NOV28e | QFQCRNERCIPSVWRCDEDDDCLDHSDEDDCP--KKTCVRSDFTCDNGHCIHERWKCDGE | |
| NOV28f | QFQCRNERCIPSVWRCDEDDDCLDHSDEDDCP--KKTCVRSDFTCDNGHCIHERWKCDGE | |
| NOV28g | QFQCRNERCIPSVWRCDEDDDCLDHSDEDDCPAAKKTPVRSDFTCDNGHCIHERWKCDGE | |
| NOV28h | QFQCRNERCIPSVWRCDEDDDCLDHSDEDDCP--KKTCVRSDFTCDNGHCIHERWKCDGE | |
| NOV28i | QFQCRNERCIPSVWRCDEDDDCLDHSDEDDCP--KKTCADSDFTCDNGHCIHERWKCDGE | |
| NOV28 | QFQCRNERCIPSVWRCDEDDDCLDHSDEDDCP--KKTCADSDFTCDNGHCIHERWKCDGE | |
| NOV28k | QFQCRNERCIPSVWRCDEDDDCLDHSDEDDCP--KKTCVRSDFTCDNGHCIHERWKCDGE | |
| NOV28l | QFQCRNERCIPSVWRCDEDDDCLDHSDEDDCP--KKTCADSDFTCDNGHCIHERWKCDGE | |
| NOV28a | EECPDGSDESEATCTLGTCRGDEFQC--GDGTCVLAIKHCNQEQDCPDGSDEAGCLQE-- | |
| NOV28b | EECPDGSDESEATCTKQVC----------------------------------------- | |
| NOV28c | EECPDGSDESEATCTKQVCPAEKLSCGPTSHKCVPASWRCDGEKDCEGGADEAGCATS-- | |
| NOV28d | EECPDGSDESEATCTKQVCPAEKLSCGPTSHKCVPASWRCDGEKDCEGGADEAGCATS-- | |
| NOV28e | EECPDGSDESEATCTKQVCPAEKLSCGPTSHKCVPASWRCDGEKDCEGGADEAGCATLCA | |
| NOV28f | EECPDGSDESEATCTKQVCPAEKLSCGPTSHKCVPASWRCDGEKDCEGGADEAGCATS-- | |
| NOV28g | EECPDGSDESEATCTKQVCPAEKLSCGPTSHKCVPASWRCDGEKDCEGGADEAGCATS-- | |
| NOV28h | EECPDGSDESEATCTLGTCRGDEFQC--GDGTCVLAIKHCNQEQDCPDGSDEAGCLQE-- | |
| NOV28l | EECPDGSDESEATCTKQVCPAEKLSCGPTSHKCVPASWRCDGEKDCEGGADEAGCATS-- | |
| NOV28 | EECPDGSDESEATCTKQVCPAEKLSCGPTSHKCVPASWRCDGEKDCEGGADEAGCATS-- | |
| NOV28k | EECPDGSDESEATCTKQVCPAEKLSCGPTSHKCVPASWRCDGEKDCEGGADEAGCATS-- | |
| NOV28l | EECPDGSDESEATCTKQVCPAEKLSCGPTSHKCVPASWRCDGEKDCEGGADEAGCATLCA | |
| NOV28a | ------------------------------------------------------------ | |
| NOV28b | ------------------------------------------------------------ | |
| NOV28c | ------------------------------------------------------------ | |
| NOV28d | ------------------------------------------------------------ | |
| NOV28e | PHEFQCGNRSCLAAVFVCDGDDDCGDGSDERGCADPACGPREFRCGGDGGGACIPERWVC | |
| NOV28f | ------------------------------------------------------------ | |
| NOV28g | ------------------------------------------------------------ | |
| NOV28h | ------------------------------------------------------------ | |
| NOV28i | ------------------------------------------------------------ | |
| NOV28 | ------------------------------------------------------------ | |
| NOV28k | ------------------------------------------------------------ | |
| NOV28l | PHEFQCGNRSCLAAVFVCDGDDDCGDGSDERGCADPACGPREFRCGGDGGGACIPERWVC | |
| NOV28a | ------------------------------------------------------------ | |
| NOV28b | ------------------------------------------------------------ | |
| NOV28c | ------------------------------------------------------------ | |
| NOV28d | ------------------------------------------------------------ | |
| NOV28e | DRQFDCEDRSDEAAELCGRPGPGATSAPAACATVSQFACRSGECVHLGWRCDGDRDCKDK | |
| NOV28f | ------------------------------------------------------------ | |
| NOV28g | ------------------------------------------------------------ | |
| NOV28h | ------------------------------------------------------------ | |
| NOV28i | ------------------------------------------------------------ | |
| NOV28 | ------------------------------------------------------------ | |
| NOV28k | ------------------------------------------------------------ | |
| NOV28l | DRQFDCEDRSDEAAELCGRPGPGATSAPAACATVSQFACRSGECVHLGWRCDGDRDCKDK | |
| NOV28a | -------SPCEGPRRFQCKSGKRVDGGKVCDVQRDCRDWSDELLKVWCGACLRPLAGLSL | |
| NOV28c | -------LGTCRGDEFQCGDGTCVLAIKHCNQEQDCPDGSDEAGCLQG------------ | |
| NOV28d | -------LGTCRGDEFQCGDGTCVLAIKHCNQEQDCPDGSDEAGCLQG------------ | |
| NOV28e | SDEADCPLGTCRGDEFQCGDGTCVLAIKHCNQEQDCPDGSDEAGCLQESPCEGPRRFQCK | |
| NOV28f | -------LGTCRGDEFQCGDGTCVLAIKHCNQEQDCPDGSDEAGCLQG------------ | |
| NOV28g | -------LGTCRGDEFQCGDGTCVLAIKHCNQEQDCPDGSDEAGCLQG------------ | |
| NOV28h | -------SPCEGPRRFQCKSGKRVDGGKVCDVQRDCRDWSDELLKVWCGACLRPLAGLSL | |
| NOV28i | -------LGTCRGDEFQCGDGTCVLAIKHCNQEQDCPDGSDEAGCLQG------------ | |
| NOV28 | -------LGTCRGDEFQCGDGTCVLAIKHCNQEQDCPDGSDEAGCLQG------------ | |
| NOV28k | -------LGTCRGDEFQCGDGTCVLAIKHCNQEQDCPDGSDEAGCLQG------------ | |
| NOV28a | LPSPSWYLGSRPSSAPCPDTFCSDPLFGFMCRPMASHGAFRPQASGLHLYKVLRACPSQR | |
| NOV28b | ------------------------------------------------------------ | |
| NOV28c | ------------------------------------------------------------ | |
| NOV28d | ------------------------------------------------------------ | |
| NOV28e | SGKRVDGGKVCDVQRDCRDWSDELLKVWCVSYHPPPG----------------------- | |
| NOV28f | ------------------------------------------------------------ | |
| NOV28g | ------------------------------------------------------------ | |
| NOV28h | LPSPSWSPCP----SP-------------------G------------------------ | |
| NOV28i | G----------------------------------------------------------- | |
| NOV28 | ------------------------------------------------------------ | |
| NOV28k | ------------------------------------------------------------ | |
| NOV28l | ------------------------------------------------------------ | |
| NOV28a | RLNECLHNNGGCSHICTDLKIGFECTCPAGFQLLDQKTCGDIDECKDPDACSQICVNYKG | |
| NOV28b | ------------------------------------------------------------ | |
| NOV28c | -LNECLHNNGGCSHICADLKIGFECTCPAGFQLLDQKTCGDIDECKDPDACSQICVNYKG | |
| NOV28d | -LNECLHNNGGCSHICTDLKIGFECTCPAGFQLLDQKTCG-------------------- | |
| NOV28e | -LNECLHNNGGCSHICTDLKIGFECTCPAGFQLLDQKTCGDIDECKDPDACSQICVNYKG | |
| NOV28f | -LNECLHNNGGCSHICTDLKIGFECTCPAGFQLLDQKTCGDIDECKDPDACSQICVNYKG | |
| NOV28g | -LNECLHNNGGCSHICTDLKIGFECTCPAGFQLLDQKTCG-------------------- | |
| NOV28h | -LNECLHNNGGCSHICTDLKIGFECTCPAGFQLLDQKTCGDIDECKDPDACSQICVNYKG | |
| NOV28i | -LNECLHNNGGCSHICTDLKIGFECTCPAGFQLLDQKTCGDIDECKDPDACSQTCVNYKG | |
| NOV28 | -LNECLHNNGGCSHICTDLKIGFECTCPAGFQLLDQKTCGDIDECKDPDACSQICVNYKG | |
| NOV28k | -LNECLHNNGGCSHICTDLKIGFECTCPAGFQLLDQKTCGDIDECKDPDACSQICVNYKG | |
| NOV28l | -LNECLHNNGGCSHICTDLKIGFECTCPAGFQLLDQKTCGDIDECKDPDACSQICVNYKG | |
| NOV28a | YFKCECYPGYEMDLLTKNCKAAAGKSPSLIFTNRYEVRRIDLVKRNYSRLIPMLKNVVAL | |
| NOV28b | ------------------------------------------------------------ | |
| NOV28c | YFKCECYPGYEMDLLTKNCKAAAGKSPSLIFTNRYEVRRIDLVKRNYSRLIPMLKNVVAL | |
| NOV28d | ----------------------AGKSPSLIFTNRHEVRRIDLVKRNYSRLIPMLKNVVAL | |
| NOV28e | YFKCECYPGYEMDLLTKNCKAAAGKSPSLIFTNRYEVRRIDLVKRNYSRLIPMLKNVVAL | |
| NOV28f | YFKCECYPGYEMDLLTKNCKAAAGKSPSLIFTNRYEVRRIDLVKRNYSRLIPMLKNVVAL | |
| NOV28g | ----------------------AGKSPSLIFTNRYEVRRIDLVKRNYSRLIPMLKNVVAL | |
| NOV28h | YFKCECYPGYEMDLLTKNCKAAAGKSPSLIFTNRYEVRRIDLVKRNYSRLIPMLKNVVAL | |
| NOV28i | YFKCECYPGYEMDLLTKNCKAAAGKSPSLIFTNRYEVRRIDLVKRNYSRLIPMLKNVVAL | |
| NOV28 | YFKCECYPGYEMDLLTKNCKAAAGKSPSLIFTNRYEVRRIDLVKRNYSRLIPMLKNVVAL | |
| NOV28k | YFKCECYPGYEMDLLTKNCKAAAGKSPSLIFTNRYEVRRIDLVKRNYSRLIPMLKNVVAL | |
| NOV28l | YFKCECYPGYEMDLLTKNCKAAAGKSPSLIFTNRYEVRRIDLVKRNYSRLIPMLKNVVAL | |
| NOV28a | DVEVATNRIYWCDLSYRKIYSAYMDKASDPKEQEVLIDEQLHSPEGLAVDWVHKHIYWTD | |
| NOV28b | -----------------------------------------------------P--AEK- | |
| NOV28c | DVEVATNRIYWCDLSYRKIYSAYMDKASDPKEQEVLIDEQLHSPEGLAVDWVHKHIYWTD | |
| NOV28d | DVEVATNRIYWCDLSYRKIYSAYMDKASDPKEQEVLIDEQLHSPEGLAVDWVHKHIYWTD | |
| NOV28e | DVEVATNRIYWCDLSYRKIYSAYMDKASDPKEQEVLIDEQLHSPEGLAVDWVHKHIYWTD | |
| NOV28f | DVEVATNRIYWCDLSYRKIYSAYMDKASDPKEQEVLIDEQLHSPEGLAVDWVHKHIYWTD | |
| NOV28g | DVEVATNRIYWCDLSYRKIYSAYMDKASDPKEQEVLIDEQLHSPEGLAVDWVHKHIYWTD | |
| NOV28h | DVEVATNRIYWCDLSYRKIYSAYMDKASDPKEQEVLIDEQLHSPEGLAVDWVHKHIYWTD | |
| NOV28i | DVEVATNRIYWCDLSYRKIYSAYMDKASDPKEQEVLIDEQLHSPEGLAVDWVHKHIYWTD | |
| NOV28 | DVEVATNRIYWCDLSYRKIYSAYMDKASDPKEQEVLIDEQLHSPEGLAVDWVHKHIYWTD | |
| NOV28k | DVEVATNRIYWCDLSYRKIYSAYMDKASDPKEQEVLIDEQLHSPEGLAVDWVHKHIYWTD | |
| NOV28l | DVEVATNRIYWCDLSYRKIYSAYMDKASDPKEQEVLIDEQLHSPEGLAVDWVHKHIYWTD | |
| NOV28a | SGNKTISVATVDGGRRRTLFSRNLSEPRAIAVDPLRGFMYWSDWGDQAKIEKSGLNGVDR | |
| NOV28b | ------------------------------------------------------------ | |
| NOV28c | SGNKTISVATVDGGRRRTLFSRNLSEPRAIAVDPLRGFMYWSDWGDQAKIEKSGLNGVDR | |
| NOV28d | SGNKTISVATVDGGRRRTLFSRNLSEPRAIAVDPLRGFMYWSDWGDQAKIEKSGLNGVDR | |
| NOV28e | SGNKTISVATVDGGRPRTLFSRNLSEPBAIAVDPLRGFMYWSDWGDQAKIEKSGLNGVDR | |
| NOV28f | SGN-----KNISGGRRRTLFSRNLSEPPAIAVDPLRGFMYWSDWGDQAKIEKSGLNGVDR | |
| NOV28g | SGNKTISVATVDGGRRRTLFSRNLSEPRAIAVDPLRGFMYWSDWGDQAKIEKSGLNGvDR | |
| NOV28h | SGNKTISVATVDGGRRRTLFSRNLSEPRAIAVDPLRGFMYWSDWGDQAKIEKSGLNGVDR | |
| NOV28i | SGNKTISVATVDGGRRRTLFSRNLSEPRAIAVDPLRGFMYWSDWGDQAKIEKSGLNGVDR | |
| NOV28 | SGNKTISVATVDGGRPRTLFSRNLSEPRAIAVGPLRGFMYWSDWGDQAKIEKSGLNGVDR | |
| NOV28k | SGNKTISVATVDGGRRRTLFSRNLSEPRAIAVDPLRGFMYWSDWGDQAKIEKSGLNGVDR | |
| NOV28l | SGNKTISVATVDGGRRRTLFSRNLSEPRAIAVDPLRGFMYWSDWGDQAKIEKSGLNGVDR | |
| NOV28a | QTLVSDNIEWPNGITLDLLSQRLYWVDSKLHQLSSIDFSGGNRKTLISSTDFLSHPFGIA | |
| NOV28b | ------------------------------------------------------------ | |
| NOV28c | QTLVSDNIEWPNGITLDLLSQRLYWVDSKLHQLSSIDFSGGNRKTLISSTDFLSHPFGIA | |
| NOV28d | QTLVSDNIEWPNGITLDLLSQRLYWVDSKLHQLSSIDFSGGNRKTLISSTDFLSHPFGIA | |
| NOV28e | QTLVSDNIEWPNGITLDLLSQRLYWVDSKLHQLSSIDFSGGNRKTLISSTDFLSHPFGIA | |
| NOV28f | QTLVSDNIEWPNGITLDLLSQRLYWVDSKLHQLSSIDFSGGNRKTLISSTDFLSHPFGIA | |
| NOV28g | QTLVSDNIEWPNGITLDLLSQRLYWVDSKLHQLSSIDFSGGNRKTLISSTDFLSHPFGIA | |
| NOV28h | QTLVSDNIEWPNGITLDLLSQRLYWVDSKLHQLSSIDFSGGNRKTLISSTDFLSHPFGIA | |
| NOV28i | QTLVSDNIEWPNGITLDLLSQRLYWVDSKLHQLSSIDFSGGNRKTLISSTDFLSHPFGIA | |
| NOV28 | QTLVSDNIEWPNGITLDLLSQRLYWVDSKLHQLSSIDFSGGNRKTLISSTDFLSHPFGIA | |
| NOV28k | QTLVSDNIEWPNGITLDLLSQRLYWVDSKLHQLSSIDFSGGNRKTLISSTDFLSHPFGIA | |
| NOV28l | QTLVSDNIEWPNGITLDLLSQRLYWVDSKLHQLSSIDFSGGNRKTLISSTDFLSHPFGIA | |
| NOV28a | VFEDKVFWTDLENEAIFSANRLNGLEISILAENLNNPHDIVIFHELKQPRAPDACELSVQ | |
| NOV28b | ------------------------------------------------------------ | |
| NOV28c | VFEDKVFWTDLENEAIFSANRLNGLEISILAENLNNPHDIVIFHELKQPRAPDACELSVQ | |
| NOV28d | VFEDKVFWTDLENEAIFSANRLNGLEISILAENLNNPHDIVIFHELKQPEAPDACELSVQ | |
| NOV28e | VFEDKVFWTDLENEAIFSANRLNGLEISILAENLNNPHDIVIFHELKQPRAPDACELSVQ | |
| NOV28f | VFEDKVFWTDLENEAIFSANRLNGLEISILAENLNNPHDIVIFHELKQPRAPDACELSVQ | |
| NOV28g | VFEDKVFWTDLENEAIFSANRLNGLEISILAENLNNPHDIVIFHELKQPPAPDACELSVQ | |
| NOV28h | VFEDKVFWTDLENEAIFSANRLNGLEISILAENLNNPHDIVIFHELKQPRAPDACELSVQ | |
| NOV28i | VFEDKVFWTDLENEAIFSANRLNGLEISILAENLNNPHDIVIFHELKQPRAPDACELSVQ | |
| NOV28 | VFEDKVFWTDLENEAIFSANRLNGLEISILAENLNNPHDIVIFHELKQPRAPDACELSVQ | |
| NOV28k | VFEDKVFWTDLENEAIFSANRLNGLEISILAENLNNPHDIVIFHELKQPRAPDACELSVQ | |
| NOV28l | VFEDKVFWTDLENEAIFSANRLNGLEISILAENLNNPHDIVIFHELKQPRAPDACELSVQ | |
| NOV28a | PNGGCEYLCLPAPQISSHSPKYTCACPDTMWLGPDMKRCYRAP----------------- | |
| NOV28b | -------------------------------LGPDMKRCYFAP----------------- | |
| NOV28c | PNGGCEYLCLPAPQISSHSPKYTCACPDTMWLGPDMKRCYRAP----------------- | |
| NOV28d | PNGGCEYLCLPAPQISSHSPKYTCACPDTMWLGPDMKRCYEAP----------------- | |
| NOV28e | PNGGCEYLCLPAPQISSHSPKYTCACPDTMWLGPDMKRCYEAPQSTSTTTLASTMTRTVP | |
| NOV28f | PNGGCEYLCLPAPQISSHSPKYTCACPDTMWLGPDMKRCYRD------------------ | |
| NOV28g | PNGGCEYLCLPAPQISSHSPKYTCACPDTMWLGPDMKRCYRAP----------------- | |
| NOV28h | PNGGCEYLCLPAPQISSHSPKYTCACPDTMWLGPDMKRCYRAP----------------- | |
| NOV28i | PNGGCEYLCLPAPQISSHSPKYTCACPDTMWLGPDMKRCYRAP----------------- | |
| NOV28 | PNGGCEYLCLPAPQISSHSPKYTCACPDTMWLGPDMKRCYRAPQSTSTTTLASTMTRTVP | |
| NOV28k | PNGGCEYLCLPAPQISSHSPKYTCACPDTMWLGPDMKRCYRAP----------------- | |
| NOV28l | PNGGCEYLCLPAPQISSHSPKYTCACPDTMWLGPDMKRCYRAPQSTSTTTLASTMTRTVP | |
| NOV28a | ------------------------------------------------------------ | |
| NOV28b | ------------------------------------------------------------ | |
| NOV28c | ------------------------------------------------------------ | |
| NOV28d | ------------------------------------------------------------ | |
| NOV28e | ATTRAPGTTVHRSTYQNHSTETPSLTAAVPSSVSVPRAPSISPSTLSPATSNHSQHYANE | |
| NOV28f | ---------------------------------------------------------ANE | |
| NOV28g | ------------------------------------------------------------ | |
| NOV28h | ------------------------------------------------------------ | |
| NOV28i | ------------------------------------------------------------ | |
| NOV28 | ATTRAPGTTVHRSTYQNHSTETPSLTAAVPSSVSVPRAPSISPSTLSPATSNHSQHYANE | |
| NOV28k | ------------------------------------------------------------ | |
| NOV28l | ATTRAPGTTVHRSTYQNHSTETPSLTAAVPSSVSVPRAPSISPSTLSPATSNHSQHYANE | |
| NOV28a | -QSTSTTTLASTMTRTVPATTRAPGTTVHRSTYQNHSTETPSLTAAVPSSVSVPRAPSIS | |
| NOV28b | -QSTSTTTLASTMTRTVPATTRAPGTTVHRSTYQNHSTETPSLTAAVPSSVSVPPAPSIS | |
| NOV28c | -QSTSTTTLASTMTRTVPATTRAPGTTVHRSTYQNHSTETPSLTAAVPSSVSVPRVPSIS | |
| NOV28d | -QSTSTTTLASTMTRTVPATTRAPGTTVHRSTYQNHSTETPSLTAAVPSSVSVPRAPSIS | |
| NOV28e | DSKMGSTVTAAVIGIIVPIVVIALLCMSGYLIWRNWKRKN-TKSMMFDNPVYRKTTEEED | |
| NOV28f | DSKMGSTVTAAVIGIIVPIVVIALLCMSGYLIWRNWKRKN-TKSMMFDNPVYRKTTEEED | |
| NOV28g | -QSTSTTTLASTMTRTVPATTRAPGTTVHRSTYQNHSTETPSLTAAVPSSVSVPRAPSIS | |
| NOV28h | -QSTSTTTLASTMTRTVPATTRAPGTTVHRSTYQNHSTETPSLTAAVPSSVSVPRAPSIS | |
| NOV28i | -QSTSTTTLASTMTRTVPATTRAPGTTVHRSTYQNHSTETPSLTAAVPSSVSVPRAPSIS | |
| NOV28 | DSKMGSTVTAAVIGIIVPIVVIALLCMSGYLIWRNWKRKN-TKSMMFDNPVYRKTTEEED | |
| NOV28k | -QSTSTTTLASTMTRTVPATTRAPGTTVHRSTYQNHSTETPSLTAAVPSSVSVPRAPSIS | |
| NOV28l | DSKMGSTVTAAVIGIIVPIVVIALLCMSGYLIWRNWKRKN-TKSMMFDNPVYRKTTEEED | |
| NOV28a | PSTLSPATSNHSQHYANEDSKNGSTVTAAVIGIIVPIVVIALLCMSGYLIWRNWK----- | |
| NOV28b | PSTLSPATSNHSQHYANEDSKMGSTVTAAVIGIIVPIVVTALLCMSGYLIWRNWK----- | |
| NOV28c | P----------------------------------------------------------- | |
| NOV28d | PSTLSPATSNHSQHAN-EDSKMGSTVTAAVIGIIVPIANEDSKMGSTVTAAVIGIIVPIG | |
| NOV28e | E----------------------------------------------------------- | |
| NOV28f | E----------------------------------------------------------- | |
| NOV28g | PSTLSPATSNHSQHYANEDSKMGSTVTAAVIGIIVPIV-------------VIALLCMSG | |
| NOV28h | PSTLSPATSNHSQHYANEDSKMGSTVTAAVIGIIVPIVVIALLCMSGYLIWRNWK----- | |
| NOV28i | P----------------------------------------------------------- | |
| NOV28 | E----------------------------------------------------------- | |
| NOV28k | P----------------------------------------------------------- | |
| NOV28l | E----------------------------------------------------------- | |
| NOV28a | ----------------RKNTKSMNFDNPVYRKTTEEEDEDELHIGRTAQIGHVYPAAISS | |
| NOV28b | ----------------RKNTKSMNFDNPVYRKTTEEEDEDELHIGRTAQIGHVYPAAISS | |
| NOV28c | ---------------------------------------STLRPATSNHSQHYAN----- | |
| NOV28d | DSPPVHEWIPDLEKLEAEEHQKHEFDNPVYRKTTEEEDEDELHIGRTAQIGHVYPAAISS | |
| NOV28e | ---------------------------------------DELHIGRTAQIGHVYPAAISS | |
| NOV28f | ---------------------------------------DELHIGRTAQIGHVYP----- | |
| NOV28g | -------YLIWRNWKRKNTKSMNFDNPVYRICTTEEEDEDELHIGRTAQIGHVYPAAISS | |
| NOV28h | ---------------RKNTKSMNFDNPVYRICTTEEEDEDELHIGRTAQIGHVYPAAISS | |
| NOV28i | ---------------------------------------STLSPATSNHSQHYAN----- | |
| NOV28 | ---------------------------------------DELHIGRTAQIGHVYP----- | |
| NOV28k | ---------------------------------------STLSPATSNHSQHYAN----- | |
| NOV28l | ---------------------------------------DELHIGRTAQIGHVYPAAISS | |
| NOV28a | FDRPLWAEPCLGETREPEDPAPALKELFVLPGEPRSQLHQLPKNPLSELPVVKSK-RVAL | |
| NOV28b | FDRPLWAEPCLGETREPEDPAPALKELFVLPGEPRSQLHQLPKNPLSELPVVKSK-RVAL | |
| NOV28c | ------------------------------------------------------------ | |
| NOV28d | FDRPLWAEPCLGETREPEDPAPALKELFVLPGEPRSQLHQLPKNPLSELPVVKSKQRVAL | |
| NOV28e | FDRPLWAEPCLGETREPEDPAPALKELFVLPGEPRSQLHQLPKNPLSELPVVKSK-RVAL | |
| NOV28f | ------------------------------------------------------A-RVAL | |
| NOV28g | FDRPLWAEPCLGETREPEDPAPALKELFVLPGEPRSQLHQLPKNPLSELPVVKSK-RVAL | |
| NOV28h | FDRPLWAEPCLGETREPEDPAPALKELFVLPGEPRSQLHQLPKNPLSELPVVKSK-RVAL | |
| NOV28i | ------------------------------------------------------------ | |
| NOV28 | ------------------------------------------------------A-RVAL | |
| NOV28k | ------------------------------------------------------------ | |
| NOV28l | FDRPLWAEPCLGETREPEDPAPALKELFVLPGEPRSQLHQLPKNPLSELPVVKSK-RVAL | |
| NOV28a | SLEDDGLP---------------------------------------------------- | |
| NOV28b | SLEDDGLP---------------------------------------------------- | |
| NOV28c | --EDSKLE---------------------------------------------------- | |
| NOV28d | SLEDDGLP---------------------------------------------------- | |
| NOV28e | SLEDDGLP---------------------------------------------------- | |
| NOV28f | SLEDDGLP---------------------------------------------------- | |
| NOV28g | SLEDDGLP---------------------------------------------------- | |
| NOV28h | SLEDDGLP---------------------------------------------------- | |
| NOV28i | --EDSKMGSTVTAAVIGIIVPIVVIALLCMSGYLIWRNWKRKNTKSMNFDNPVYRKTTEE | |
| NOV28 | SLEDDGLP---------------------------------------------------- | |
| NOV28k | --EDSKMGSTVTAAVIGIIVPIVVIALLCMSGYLIWRNWKRKNTKSMNFDNPVYRKTTEE | |
| NOV28l | SLEDDGLP---------------------------------------------------- | |
| NOV28a | ------------------------------------------------------------ | |
| NOV28b | ------------------------------------------------------------ | |
| NOV28d | ------------------------------------------------------------ | |
| NOV28e | ------------------------------------------------------------ | |
| NOV28f | ------------------------------------------------------------ | |
| NOV28g | ------------------------------------------------------------ | |
| NOV28h | ------------------------------------------------------------ | |
| NOV28i | EDEDELHIGRTAQIGHVYPAAISSFDRPLWAEPCLGETREPEDPAPALKELFVLPGEPRS | |
| NOV28 | ------------------------------------------------------------ | |
| NOV28k | EDEDELHIGRTAQIGHVYPAAISSFDRPLWAEPCLGETREPEDPAPALKELFVLPGEPRS | |
| NOV28l | ------------------------------------------------------------ | |
| NOV28a | ------------------------------- | |
| NOV28d | ------------------------------- | |
| NOV28e | ------------------------------- | |
| NOV28f | ------------------------------- | |
| NOV28g | ------------------------------- | |
| NOV28h | ------------------------------- | |
| NOV28i | QLHQLPKNPLSELPVVKSKRVALSLEDDGLP | |
| NOV28 | ------------------------------- | |
| NOV28k | QLHQLPKNPLSELPVVKSKRVALSLEDDGLP | |
| NOV28l | ------------------------------- | |

[0514] Further analysis of the NOV28a protein yielded the following properties shown in Table 28C.

TABLE 28C
Protein Sequence Properties NOV28a

| | |
|---|---|
| SignalP analysis: | Cleavage site between residues 33 and 34 |
| PSORT II analysis: | |

| PSG: | a new signal peptide prediction method | |
|---|---|---|
| | N-region: | length 10; pos. chg 1; neg. chg 1 |
| | H-region: | length 14; peak value 11.70 |
| | PSG score: | 7.30 |

| | |
|---|---|
| GvH: | von Heijne's method for signal seq. recognition |
| | GvH score (threshold: −2.1): 4.70 |
| | possible cleavage site: between 26 and 27 |

>>> Seems to have a cleavable signal peptide (1 to 26)

| ALOM: | Klein et al's method for TM region allocation | | |
|---|---|---|---|
| | Init position for calculation: 27 | | |
| | Tentative number of TMS(s) for the threshold 0.5: 1 | | |
| | Number of TMS(s) for threshold 0.5: 1 | | |
| | INTEGRAL | Likelihood = | Transmembrane 768-784 |
| | | −13.80 | |

| | |
|---|---|
| PERIPHERAL | Likelihood = 2.81 (at 203) |

| | |
|---|---|
| | ALOM score: −13.80 (number of TMSs: 1) |
| MTOP: | Prediction of membrane topology (Hartmann et al.) |
| | Center position for calculation: 13 |
| | Charge difference: −0.5 C(0.5)-N(1.0) |
| | N >= C: N-terminal side will be inside |

>>> membrane topology: type 1a (cytoplasmic tail 785 to 905)

| MITDISC: | discrimination of mitochondrial targeting seq | | | |
|---|---|---|---|---|
| | R content: | 2 | Hyd Moment(75): | 5.68 |
| | Hyd Moment(95): | 4.45 | G content: | 2 |
| | D/E content: | 2 | S/T content: | 0 |

| | |
|---|---|
| | Score: −6.43 |
| Gavel: | prediction of cleavage sites for mitochondrial preseq |
| | R-2 motif at 35 LRL\|QH |

NUCDISC: discrimination of nuclear localization signals

| | |
|---|---|
| | pat4: none |
| | pat7: PVVKSKR (3) at 888 |
| | bipartite: none |
| | content of basic residues: 10.3% |
| | NLS Score: −0.22 |
| KDEL: | ER retention motif in the C-terminus: none |

ER Membrane Retention Signals: none
SKL: peroxisomal targeting signal in the C-terminus: none
PTS2: 2nd peroxisomal targeting signal: none
VAC: possible vacuolar targeting motif: none
RNA-binding motif: none
Actinin-type actin-binding motif:

type 1: none
type 2: none

NMYR: N-myristoylation pattern: none
Prenylation motif: none
memYQRL: transport motif from cell surface to Golgi: none
Tyrosines in the tail: too long tail
Dileucine motif in the tail: none
checking 63 PROSITE DNA binding motifs: none
checking 71 PROSITE ribosomal protein motifs: none
checking 33 PROSITE prokaryotic DNA binding motifs: none

| | |
|---|---|
| NNCN: | Reinhardt's method for Cytoplasmic/Nuclear discrimination |
| | Prediction: nuclear |
| | Reliability: 89 |
| COIL: | Lupas's algorithm to detect coiled-coil regions |
| | total: 0 residues |

Final Results (k = 9/23):

44.4%: extracellular, including cell wall
22.2%: Golgi
22.2%: endoplasmic reticulum
11.1%: plasma membrane

>> prediction for CG55256-07 is exc (k = 9)

[0515] A search of the NOV28a protein against the Geneseq database, a proprietary database that contains sequences published in patents and patent publication, yielded several homologous proteins shown in Table 28D.

TABLE 28D
Geneseq Results for NOV28a

| | | NOV28a | Identities/ | |
|---|---|---|---|---|
| | | Residues/ | Similarities for | |
| Geneseq | Protein/Organism/Length | Match | the Matched | Expect |
| Identifier | [Patent #, Date] | Residues | Region | Value |
| AAU91290 | Human NOV5i protein - Homo sapiens, | 1 . . . 905 | 903/905 (99%) | 0.0 |
| | 905 aa. [WO200216600-A2, 28-FEB-2002] | 1 . . . 905 | 903/905 (99%) | |
| AAU91288 | Human NOV5g protein - Homo sapiens, 857 aa. | 1 . . . 905 | 851/905 (94%) | 0.0 |
| | [WO200216600-A2, 28-FEB-2002] | 1 . . . 857 | 854/905 (94%) | |
| ABP56838 | Human apolipoprotein E receptor 2 protein | 1 . . . 905 | 800/973 (82%) | 0.0 |
| | SEQ ID NO: 5 - Homo sapiens, | 1 . . . 963 | 817/973 (83%) | |
| | 963 aa. [WO200299438-A2, 12-DEC-2002] | | | |
| AAU91289 | Human NOV5h protein - Homo sapiens, | 1 . . . 905 | 786/908 (86%) | 0.0 |
| | 847 aa. [WO200216600-A2, 28-FEB-2002] | 1 . . . 847 | 802/908 (87%) | |
| AAU91285 | Human NOV5d protein - Homo sapiens, | 42 . . . 905 | 704/884 (79%) | 0.0 |
| | 1012 aa. [WO200216600-A2, 28-FEB-2002] | 162 . . . 1012 | 724/884 (81%) | |

[0516] In a BLAST search of public sequence databases, the NOV28a protein was found to have homology to the proteins shown in the BLASTP data in Table 28E.

TABLE 28E
Public BLASTP Results for NOV28a

| | | NOV28a | Identities/ | | |
|---|---|---|---|---|---|
| Protein | | Residues/ | Similarities for | | |
| Accession | | Match | the Matched | | Expect |
| Number | Protein/Organism/Length | Residues | Portion | | Value |
| Q14114 | Apolipoprotein E receptor 2 | 1 . . . 905 | 800/973 | (82%) | 0.0 |
| | precursor - Homo sapiens | 1 . . . 963 | 817/973 | (83%) | |
| | (Human), 963 aa. | | | | |
| Q921B6 | ApoE receptor-2 - Mus musculus | 1 . . . 905 | 719/912 | (78%) | 0.0 |
| | (Mouse), 870 aa. | 1 . . . 870 | 766/912 | (83%) | |
| O14968 | ApoER2delta4-7 - Homo sapiens | 1 . . . 905 | 721/907 | (79%) | 0.0 |
| | (Human), 793 aa. | 1 . . . 793 | 736/907 | (80%) | |
| Q924X6 | Apolipoprotein E receptor 2 | 1 . . . 905 | 689/1011 | (68%) | 0.0 |
| | precursor - Mus musculus | 1 . . . 996 | 743/1011 | (73%) | |
| | (Mouse), 996 aa. | | | | |
| JE0237 | apolipoprotein E receptor 2 | 1 . . . 905 | 689/1009 | (68%) | 0.0 |
| | precursor- mouse, 996 aa. | 1 . . . 996 | 742/1009 | (73%) | |

[0517] PFam analysis predicts that the NOV28a protein contains the domains shown in the Table 28F.

TABLE 28F
Domain Analysis of NOV28a

| | | Identities/ | |
|---|---|---|---|
| | | Similarities | |
| | NOV28a Match | for the | Expect |
| Pfam Domain | Region | Matched Region | Value |
| Idl_recept_a | 45 . . . 83 | 20/43 (47%) | 7.7e−13 |
| | | 32/43 (74%) | |
| Idl_recept_a | 84 . . . 124 | 19/43 (44%) | 2.8e−13 |
| | | 32/43 (74%) | |
| Idl_recept_a | 125 . . . 163 | 19/43 (44%) | 1.2e−11 |
| | | 32/43 (74%) | |
| Idl_recept_a | 165 . . . 207 | 20/44 (45%) | 1.3e−07 |
| | | 33/44 (75%) | |
| EGF | 282 . . . 316 | 14/47 (30%) | 9e−06 |
| | | 27/47 (57%) | |
| TIL | 273 . . . 322 | 13/67 (19%) | 0.33 |
| | | 29/67 (43%) | |
| EGF | 322 . . . 356 | 15/47 (32%) | 0.5 |
| | | 27/47 (57%) | |
| Idl_recept_b | 404 . . . 449 | 17/48 (35%) | 1.2e−10 |
| | | 40/48 (83%) | |
| Idl_recept_b | 451 . . . 492 | 23/47 (49%) | 2.3e−15 |
| | | 40/47 (85%) | |
| Idl_recept_b | 494 . . . 536 | 19/47 (40%) | 2e−15 |
| | | 38/47 (81%) | |
| Idl_recept_b | 538 . . . 581 | 21/47 (45%) | 2.9e−12 |
| | | 39/47 (83%) | |
| Idl_recept_b | 582 . . . 622 | 12/47 (26%) | 1.5e−08 |
| | | 37/47 (79%) | |

### Example 29

[0518] The NOV29 clone was analyzed, and the nucleotide and encoded polypeptide sequences are shown in Table 29A.

TABLE 29A
NOV29 Sequence Analysis

| | | |
|---|---|---|
| NOV29a, CG55776-01 | SEQ ID NO:665 | 7876 bp |
| DNA Sequence | ORF Start: ATG at 6 | ORF Stop: TGA at 7857 |

TCAGGATGAAGGTAAAAGGCAGAGGAATCACCTGCTTGCTGGTCTCCTTTGCTGTGATCTGCCTGGTC
GCCACCCCTGGGGGCAAGGCCTGTCCTCGCCGCTGTGCCTGTTATATGCCTACGGAGGTACACTGCAC
ATTTCGGTACCTGACTTCCATCCCAGACAGCATCCCGCCCAATGTGAACGCAATGAATTTAGGGTACA
ACAGCTTGGTTAGATTGATGGAAACAGATTTTTCTGGCCTGACCAAACTGGAGTTACTCATGCTTCAC
AGCAATGGCATTCACACAATCCCTGACAAGACCTTCTCAGATTTGCAGGCCTTGCAGGTGAGACTGAT
GGTCTTAAAAATGAGCTATAATAAAGTCCGAAAACTTCAGAAAGATACTTTTTATGGCCTCAGGAGCT
TGACACGATTGCACATGGACCACAACAATATTGAGTTTATAAACCCAGAGGTTTTTTATGGGCTCAAC
TTTCTCCGCCTGGTGCACTTGGAAGGAAATCAGCTCACTAAGCTCCACCCAGATACATTTGTCTCTTT
GAGCTACCTCCAGATATTTAAAATCTCTTTCATTAAGTTCCTATACTTGTCTGATAACTTCCTGACCT
CCCTCCCTCAAGAGATGGTCTCCTATATGCCTGACCTAGACAGCCTTTACCTGCATGGAAACCCATGG
ACCTGTGATTGCCATTTAAAGTGGTTGTCTGACTGGATACAGGAGAAGCCAGGTATCTATATTGTNTT
ACCAGATGTAATAAAATGCAAAAAAGATAGAAGTCCCTCTAGTGCTCAGCAGTGTCCACTTTGCATGA
ACCCTAGGACTTCTAAAGGCAAGCCGTTAGCTATGGTCTCAGCTGCAGCTTTCCAGTGTACAAAGCCA
ACCATTGACTCATCCCTGAAATCAAAGAGCCTGACTATTCTGGAAGACAGTAGTTCTGCTTTCATCTC
TCCCCAAGGTTTCATGGCACCCTTTGGCTCCCTCACTTTGAATATGACAGATCAGTCTGGAAATGAAG
CTAACATGGTCTGCAGTATTCAAAAGCCCTCAAGGACATCACCCATTGCATTCACTGAAGAAAATGAC
TACATCGTGCTAAATACTTCAATTTTCACATTTTTGGTGTGCAACATAGATTACGGTCACATTCAGCC
AGTGTGGCAAAATTTTGGCTTTGTACAGTGATTCTCCTCTGATACTAGAAAGGAACACTTGCTTAGTG
AAACACCGCAGCTCTATTACAAATATAAACAGGTGGCTCCTAAGCCTGAAGACATTTTTACCAACATA
GAGGCAGATCTCAGAGCAGATCCCTCTTGGTTAATGCAAGACCAAATTTCCTTGCAGCTGAACAGAAC
TGCCACCACATTCAGTACATTACAGATCCAGTACTCCAGTGATGCTCAAATCACTTTACCAAGAGCAG
AGATGAGGCCAGTGAAACACAAATGGACTATGATTTCAAGGGATAACAATACTAAGCTGGAACATACT
GTCTTGGTAGGTGGAACCGTTGGCCTGAACTGCCCAGGCCAAGGAGACCCCACCCCACACGTGGATTG
GCTTCTAGCTGATGGAAGTAAAGTGAGAGCCCCTTATGTCAGTGAGGATGGACGGATCCTAATAGACA
AAAGTGGAAAATTGGAACTCCAGATGGCTGATAGTTTTGACACAGGCGTATATCACTGTATAAGCAGC
AATTATGATGATGCAGATATTCTCACCTATAGGATAACTGTGGTAGAACCTTTGGTCGAAGCCTATCA
GGAAAATGGGATTCATCACACAGTTTTCATTGGTGAAACACTTGATCTTCCATGCCATTCTACTGGTA
TCCCAGATGCCTCTATTAGCTGGGTTATTCCAGGACAATGTGCTCTATCAGTCATCAAAGAGACAAAG
AAAGTTCTAAACAATGGCACATTAAGAATATTACAGGTCACCCCGAAAGACCAAGGTTATTATCGCTG
TGTGGCAGCCAACCCATCAGGGGTTGATTTTTTGATTTTCCAAGTTTCAGTCAAGATGAAAGGACAAA
GGCCCTTGGAGCATGATGGAGAAACAGAGGGATCTGGACTTGATGAGTCCAATCCTATTGCTCATCTT
AAGGAGCCACCAGGTGCACAACTCCGTACATCTGCTCTGATGGAGGCTGAGGTTGGAAAACACACCTC
AAGCAACAAGTAAGAGGCACACTATCGGGAATTAACACTCCAGCGACGTGGAGATTCAACACATCGAC
GTTTTAGGGAGAATAGGAGGCATTTCCCTCCCTCTGCTAGGAGAATTGACCCACAACATTGGGCGGCA
CTGTTGGAGAAAGCTAAAAAGAATGCTATGCCAGACAAGCGAGAAAATACCACAGTGAGCCCACCCCC
AGGAATTTATGGTCCCGGCCACTAAAGCTTTGAACCTTCCAGCAAGGACAGTGACTGCTGACTCCAGA
ACAATATCTGATAGTCCTATGACAAACATAAATTATGGCACAGAATTCTCTCCTGTTGTGAATTCACA
AATACTACCACCTGAAGAACCCACAGATTTCAAACTGTCTACTGCTATTAAACTACAGCCATGTCAAA
AGAATATAAACCCAACCATGTCAAGCCAAATACAAGGCACAACCAATCAACATTCATCCACTGTCTTT
CCACTGCTACTTGGAGCAAACTGAATTTCAGGACTCTGACCAGATGGGAAGAGGAGAGAGCATTTCCA
AAGTAGACCCCCAATAACAAGTAAGACTATGATCAAAGATGTCAATGTCAAAATGCTTAGTAGCACCA
CCAACAAACTATTATTAGAGTCAGTAAATACCACAAATAGTCATCAGACATCTGTAAGAGAAGTGAGT
GAACCCAGGCACAATCACTTCTATTCTCACACTACTCAAATACTTAGCACCTCCACGTTCCCTTCAGA
TCCACACACAGCTGCTCATTCTCAGTTTCCGATCCCTAGAAATAGTACAGTTAACATCCCGCTGTTCA
GACGCTTTGGGAGGCAGAGGAAAATTGGCGGAAGGGGGCGGATTATCAGCCCATATAGAACTCCAGTT
CTGCGACGGCATAGATACAGCATTTTCAGGTCAACAACCAGAGGTTCTTCTGAAAAAAGCACTACTGC
ATTCTCAGCCACAGTGCTCAATGTGACATGTCTGTCCTGTCTTCCCAGGGAGAGGCTCACCACTGCCA
CAGCAGCATTGTCTTTTCCAAGTGCTGCTCCCATCACCTTCCCCAAAGCTGACATTGCTAGAGTCCCA
TCAGAAGAGTCTACAACTCTAGTCCAGAATCCACTATTACTACTTGAGAACAAACCCAGTGTAGAGAA
AACAACACCCACAATAAAATATTTCAGGACTGAAATTTCCCAAGTGACTCCAACTGGTGCAGTCATGA
AGCACCAATGAAGCTAAAAGAGATTCAGTGATTACATCGTCACTTTCAGGTGCTATCACCAAGCCACC
ATTGACTATTATAGCCATTACAAGGTTTTCAAGAAGGAAAATTCCCTGGCAACAGAACTTTGTAAATA
ACCATAACCCAAAAGGCAGATTAAGGAATCAACATAAGTTAGTTTACAAAAAAGCACAACATGTGATG
CTTCCTAAAACATCTCCTGCTTTACCACAGAGACAAAGTCTCCCCTCGCACCACACTACGACCAAAAC
ACACAATCCTGGAAGTCTTCCAACAAAGAAGGAGCTTCCCTTCCCACCCCTTAACCCTATGCTTCCTA
GTATTATAAGCAAAGACTCAAGTACAAAAAGCATCATATCAACGCAAACAGCAATACCAGCAACAACT
CCTACCTTCCCTGCATCTGTCATCACTTATGAAACCCAAACAGAGAGATCTAGAGCACAAACAATACA
TCACTACACCCACTGCTATGACACCTCCTGTTCTAACCACAGCCGAAACTTCAGTCAAGCCCAGTGTC
TCTGCATTCACTCATTCCCCACCAGAAAACACAACTGGGATTTCAAGCACAATCAGTTTTCATTCAAG
AACTCTTAATCTGACAGATGTGATTGAAGAACTAGCCCAAGCAAGTACTCAGACTTTGAAGAGCACAA
TTGCTTCTGAAACAACTTTGTCCAGCAAATCACACCAGAGTACCAACACTAGGAAAGCAATCATTAGA
CACTCAACCATACCACCATTCTTGAGCAGCAGTGCTACTCTAATGCCAGTTCCCATCTCCCCTCCCTT
TACTCAGAGAGCAGTTACTGACAACGTGGCGACTCCCATTTCCGGGCTTATGACAAATACAGTGGTCA
AAGGTTCACCCAAATGCCAAGTTCACAATTGGAACCACTCACTTCATCTACTCTAATCTGTTACATTC
TACTCCCATGCCAGCACTAACAACAGTTAAATCACAGAATTCTAAATTAACTCCATCTCCCTGGGCAG
AAAACCAATTTTGGCACAAACCATACTCAGAAATTGCTGAAAAAGGCAAAAAGCCAGAAGTAAGCATG
TTGGCTACTACAGGCCTGTCCGAGGCCACCACTCTTGTTTCAGATTGGGATGGACAGAAGAACACAAA
GAAGAGTGACTTTGATAAGAAACCAGTTCAAGAAGCAACAACTTCCAAACTCCTTCCCTTTGACTCTT
TGTCTAGGTATATATTTGAAAAGCCCAGGATAGTTGGAGGAAAAGCTGCAAGTTTTACTATTCCAGCT
AACTCAGATGCCTTTCTTCCCTGTGAAGCTGTTGGAAATCCCCTGCCCACCATTCATTGGACCAGAGT
CCCATCAGGTATGTCAGGACTTGATTTATCTAAGAGGAAACAGAATAGCAGGGTCCAGGTTCTCCCCA
ATGGTACCCTGTCCATCCAGAGGGTGGAAATTCAGGACCGCGGACAGTACTTGTGTTCCGCATCCAAT
CTGTTTGGCACAGACCACCTTCATGTCACCTTGTCTGTGGTTTCCTATCCTCCCAGGATCCTGGAGAG
ACGTACCAAAGAGATCACAGTTCATTCCGGAAGCACTGTGGAACTGAAGTGCAGAGCAGAAGGTAGGC
CAAGCCCTACAGTTACCTGGATTCTTGCAAACCAAIACAGTTGTCTCAGAATCATCCCAGGGAGTAGG
CAGGCTGTGGTGACGGTTGACGGAACATTGGTCCTCCACAATCTCAGTATTTATGACCGTGGCTTTTA
CAAATGTGTGGCCAGCAACCCAGGTGGCCAGGATTCACTGCTGGTTAAAATACAAGTCATTGCAGCAC
CACCTGTTATTCTAGAGCAAAGGAGGCAAGTCATTGTAGGCACTTGGGGTGAAAGTTTAAAACTGCCC
TGTACTGCAAAGGAACTCCTCAGCCCAGCGTTTACTGGGTCCTCTCTGATGGCACTGAAGTGAAAACC
ATTACAGTTTACCAATTCCAAGTTGTTCTTATTTTCAAATGGGACTTTGTATATAAGAAACCTAGCCT
CTTCAGACAGGGGCACTTATGAATGCATTGCTACCAGTTCCACTGATTCGGAGCGAAGAGTAGTAATG
CTTACAATGGAAGAGCGAGTGACCAGCCCCAGGATAGAAGCTGCATCCCAGAAAGGACTGAAGTGAAA
TTTTGGGGACAAAATTACTACTGAACTGCTCAGCCACTGGGGAGCCCAAACCCAAATAATGTGGAGGT
TACCATCCAAGGCTGTGGTCGACCAGCAGCATAGGGTGGGCAGCTGGATCCACGTCTACCCTTATGGA
TCCCTGTTTATTGGATCAGTAACAGAAAAAGACAGTGGTGTCTACTTGTGTGTGGCAAGAAACAAAAT
GGGGGAATGATCTGATACTGATGCATGTTAGCCTAAGACTGAPAACCTGCCAATTGACCACAAGCAGT
ATTTTAGAAAGCAAGTGCTCCATGGGAAAGATTTCCAAGTAGATTGCAAAGCTTCCGGCTCCCCAGTG
CCAGAGATATCTTGGAGTTTGCCTGATGGAACCATGATCAACAATGCAATGCAAGCCGATGACAGTGG
CCACAGGACTAGGAGATATACCCTTTTCAACAATGGAACTTTATACTTCAACAAAGTTGGGGTAGCGG
AGGAAGGAGATTATACTTGCTATGCCCAGAACACCCTAGGGAAGATGAAATGAAAGGTCCACTTAACA
GTTATAACAGCTGCTCCCCGGATAAGGCAGAGTAACAACCAAACAAGAGAATCAAAAGCTGGAGACAC
ACATGATTTCCTTCTCCATTGATAGGTACACATTTCATGCCAAATGGGTCTTTGACCAATCAACAGTG
AAACTGCTCGATTCTGGAGAGTACGTATGTGTAGCCCGAAATCCCAGTGGGGATGACACCAAAATGTA
CAAACTGGATGTGGTCTCTAAACCTCCATTAATCAATGGTCTGTATACAAACAGAACTGTTATTAAAG
CCACAGCTGTGAGACATTCCAAAAACACTTTGACTGCAGAGCTGAAGGGACACCATCTCCTGAAAGTC
ATGTGGATCATGCCAGACAATATTTTCCTCACAGCCCCATACTATGGAAGCAGAATCACAGTCCATAA
AAATGGAACCTTGGAAATTAGGAATGTGAGGCTTTCAGATTCAGCCGACTTTATCTGTGTGGCCCGAA
ATGAAGGTGGAGAGAGCGTGTTGGTAGTACAGTTAGAAGTACTGGAAATGCTGAGAAGACCGACATTT
AGAAATCCATTTAATGAAAAAATAGTTGCCCAGCTGGGAAAGTCCACAGCATTGAATTGCTCTGTTGA
TGGTAACCCACCACCTGAAATAATCTGGATTTTACCAAATGGCACACGATTTTCCAATGGACCACAAA
GTTATCAGTATCTGATAGCAAGCAATGGTTCTTTTATCATTTCTAAAACAACTCGGGAGGATGCAGGA
AAATATCGCTGTGCAGCTAGGAATAAAGTTGGCTATATTGAGAAATTAGTCATATTAGAAATTGGCCA
GAAGCCAGTTATTCTTACCTATGCACCAGGGACAGTAAAAGGCATCAGTGGAGAATCTCTATCACTGC
ATTGTGTGTCTGATGGAATCCCTAAGCCAAATATCAAATGGACTATGCCAAGTGGTTATGTAGTAGAC
AGGCCTCAAATTAATGGGAAATACATATTGCATGACAATGGCACCTTAGTCATTAAAGAAGCAACAGC
TTATGACAGAGGAAACTATATCTGTAAGGCTCAAAATAGTGTTGGTCATACACTGATTACTGTTCCAG
TAATGATTGTAGCCTACCCTCCCCGAATTACAAATCGTCCACCCAGGAGTATTGTCACCAGGACAGGG
GCAGCCTTTCAGCTCCACTGTGTGGCCTTGGGAGTTCCCAAGCCAGAAATCACATGGGAGATGCCTGA
CCACTCCCTTCTCTCAACGGCAAGTAAAGAGAGGACACATGGAAGTGAGCAGCTTCACTTACAAGGTA
CCCTAGTCATTCAGAATCCCCAAACCTCCGATTCTGGGATATACAAATGCACAGCAAAGAACCCACTT
GGTAGTGATTATGCAGCAACGTATATTCAAGTAATCTGACATGAAATAATAAAGTC

| | | | |
|---|---|---|---|
| NOV29a, CG55776-01 | SEQ ID NO:666 | 2617 aa | MW at 290200.2 kD |
| Protein Sequence | | | |

MKVKGRGITCLLVSFAVICLVATPGGKACPRRCACYMPTEVHCTFRYLTSIPDSIPPNVERINLGYNS
LVRLMETDFSGLTKLELLMLHSNGIHTIPDKTFSDLQALQVRLMVLKMSYNKVRKLQKDTFYGLRSLT
RLHNDHIANIEFINPEVFYGLNFLRLVHLEGNQLTKLHPDTFVSLSYLQIFKSFIKFLYLSDNFLTSL
PQEMVSYMPDLDSLYLHGNPWTCDCHLKWLSDWIQEKPGIYIVLPDVIKCKKDRSPSSAQQCPLCMNP
RTSKGKPLAMVSAAAFQCAKPTIDSSLKSKSLTILEDSSSAFISPQGFMAPFGSLTLNNTDQSGNEAN
MVCSIQKPSRTSPIAFTEENDYIVLNTSFSTFLVCNIDYGHIQPVWQILALYSDSPLILERSHLLSET
PQLYYKYKQVAPKPEDIFTNIEADLRADPSWLMQDQISLQLNRTATTFSTLQIQYSSDAQITLPRAEM
RPVKHKWTMISRDNNTKLEHTVLVGGTVGLNCPGQGDPTPHVDWLLADGSKKAAPYVSEDGRILIDKS
GKLELQMADSFDTGVYHCISSNYDDADILTYRITVVEPLVEAYQENGIHHTVFIGETLDLPCHSTGIP
DASISWVIPGNNVLYQSSRDKKVLNNGTLRTLQVTPKDQGYYRCVAPAPSGVDFLIFQVSVKMKGQRP
LEHDGETEGSGLDESNPIAHLKEPPGAQLRTSALMEAEVGKHTSSTSKRHNYRELTLQRRGDSTHRRF
RENRRHFPPSARRIDPQHWAALLEKAKKNAMPDKRENTTVSPPPVVTQLPNIPGEEDDSSGMLALHEE
FMVPATKALNLPARTVTADSRTISDSPMTNINYGTEFSPVVNSQILPPEEPTDFKLSTAIKTTAMSKN
INPTMSSQIQGTTNQHSSTVFPLLLGATEFQDSDQMGRGREHFQSRPPITVRTMIKDVNVKMLSSTTN
KLLLESVNTTNSHQTSVREVSEPRHNHFYSHTTQILSTSTFPSDPHTAAHSQFPIPRNSTVNIPLFRR
FGRQRKIGGRGRIISPYRTPVLPRHRYSIFRSTTRGSSEKSTTAFSATVLNVTCLSCLPRERATTATA
ALSFPSAAPITFPKADIARVPSEESTTLVQNPLLLLENKPSVEKTTPTIKYFRTEISQVTPTGAVMTY
APTSIPMEKTHKVNASYPRVSSTNEAKRDSVITSSLSGAITKPPMTIIAITRFSRRKIPWQQNFVNNH
NPKGRLRNQHKVSLQKSTAVMLPKTSPALPQRQSLPSHHTTTKTHNPGSLPTKKELPFPPLNPMLPSI
ISKDSSTKSIISTQTAIPATTPTFPASVITYETQTERSRAQTIQREQEPQKKNRTDPNISPDQSSGFT
TPTAMTPPVLTTAETSVKPSVSAFTHSPPENTTGISSTISFHSRTLNLTDVIEELAQASTQTLKSTIA
SETTLSSKSHQSTTTRKAIIRHSTIPPFLSSSATLMPVPISPPFTQRAVTDNVATPISGLMTNTVVKL
HESSRHNAKPQQLVAEVATSPKVHPNAKFTIGTTHFIYSNLLHSTPMPALTTVKSQNSKLTPSPWAEN
QFWHKPYSEIAEKGKKPEVSMLATTGLSEATTLVSDWDGQKNTKKSDFDKKPVQEATTSKLLPFDSLS
RYIFEKPRIVGGKAASFTIPANSDAFLPCEAVGNPLPTIHWTRVPSGMSGLDLSKRKQNSRVQVLPNG
TLSIQRVEIQDRGQYLCSASNLFGTDHLHVTLSVVSYPPRILERRTKEITVHSGSTVELKCRAEGRPS
PTVTWILANQTVVSESSQGSRQAVVTVDGTLVLHNLSIYDRGFYKCVASNPGGQDSLLVKIQVIAAPP
VILEQRRQVIVGTWGESLKLPCTAKGTPQPSVYWVLSDGTEVKPLQFTNSKLFLFSNGTLYIAILASS
DRGTYECIATSSTGSERRVVMLTMEERVTSPRIEAASQKRTEVNFGDKLLLNCSATGEPKPQIMARLP
SKAVVDQQHRVGSWIHVYPNGSLFIGSVTEKDSGVYLCVARNKMGDDLILMHVSLRLKPAKIDHKQYF
RKQVLHGKDFQVDCKASGSPVPEISWSLPDGTMINNAMQADDSGHRTRRYTLFNNGTLYFNKVGVAEE
GDYTCYAQNTLGKDEMKVHLnTITAAPRIRQSNKTNKRIKAGDTAVLDCEVTGDPKPKIFWLLPSNDM
ISFSIDRYTFHANGSLTINKNKLLDSGEVCVARNPSGDDDTKMYKLDVVSKPPLINGLYTNRTVIKAT
AVRHSKKHFDCRAEGTPSPEVMWIMPDNIFLTAPYYGSRITVHKNGTLEIRNVRLSDSADFICVARNE
GGESVLVVQLEVLAEMLRRPTFRNPFNEKMAQLGKSTALNCSVDGNPPPEIIWILPNGTRFSNGPQSY
QYLIASNGSFIISKTTREDAGKYRCAARNKVGYIEKLVILEIGQKPVILTYAPGTVKGISGESLSLHC
VSDGIPKPNIKWTMPSGYVVDRPQINGKYILHDNGTLVIKEATAYDRGNYICKAQNSVGHTLITVPVM
IVAYPPRITRPPRSIVTRTGAAFQLHCVALAGVPKPEITWEMPDHSLLSTASKERTHGSEQLHLQGTL
VIQNPQTSDSGIYKCTAKNPLGSDYAATYIQVI

| | | |
|---|---|---|
| NOV29b, 248210167 | SEQ ID NO:667 | 475 bP |
| DNA Sequence | ORF Start: at 2 | ORF Stop: end of Sequence |

CACCCTCGAGAATGTGGAACGCATCAATTTAGGGTACAACAGCTTGGTTAGATTGATGGAAACAGATT
TTTCTGGCCTGACCAAACTGGACTTACTCATGCTTCACAGCAATGGCATTCACACAATCCCTGACAAG
AGATACTTTTTATGGCCTCAGGAGCTTGACACGATTGCACATGGACCACAACAATATTGAGTTTATAA
ACCCAGAGGTTTTTGATGGGCTCAACTTTCTCCGCCTGGTGCACTTGGAAGGAAATCAGCTCACTAAG
CTCCACCCAGATACATTTGTCTCTTTGAGCTACCTCCAGATATTTAAAATCTCTTTCATTAAGTTCCT
ATACTTGTCTGATAACTTCCTGACCTCCCTCCCTCAAGAGATGGTCTCCTATATGCCTCTCGAGGGC

| | | | |
|---|---|---|---|
| NOV29b, 248210167 | SEQ ID NO:668 | 158 aa | MW at 18415.2 kD |
| Protein Sequence | | | |

TLENVERINLGYNSLVRLMETDFSGLTKLELLMLHSNGIHTIPDKTFSDLQALQVLKMSYNKVRKLQK
DTFYGLRSLTRLHMDHNNIEFINPEVFDGLNFLRLVHLEGNQLTKLHPDTFVSLSYLQIFKISFIKFL
YLSDNFLTSLPQEMVSYMPLEG

| | | |
|---|---|---|
| NOV29c, 247679561 | SEQ ID NO:669 | 2011 bP |
| DNA Sequence | ORF Start: at 2 | ORF Stop: end of Sequence |

AGGCTCCGCGGCCGCCCCCTTCACCCTCGAGGGGGACAATTACTACTGAAACTGCTCAGCCACTGGGG
AGCCCAAACCCCAAATAATGTGGAGGTTACCATCCAAGGCTGTGGTCGACCAGCAGCATAGAGTGGGC
AGCTGGATCCACGTCTACCCTAATGGATCCCTGTTTATTGGATCAGTACAGAAAAAAGACAGTGGTGT
CTACTTGTGTGTGGCAAGAAACAAAATGGGGGATGATCTGATACTGATGCATGTTAGCCTAAGACTGA
AACCTGCCAAAATTGACCACAAGCAGTATTTTAGAAAGCAAGTGCTCCATGGGAAAGATTTCCAAGTA
GATTGCAAAGCTTCCGGCTCCCCAGTGCCAGAGATATCTTGGAGTTTGCCTGATGGAACCATGATCAA
CAATGGATGCAAGCCGATGACAGTGGCCACAGGACTAGGAGATATACCCTTTTCAAACAATGGAACTT
TATACTTCAACAAAGTTGGGGTAGCGGAGGAAGGAGATTATACTTGCTATGCCCAGAACACCCTAGGG
AAAGATGAAATGAAGGTCCACTTAACAGTTATAACAGCTGCTCCCCGGATAAGGCAGAGTAACAAAAC
CAACAAGAGAATCAAGCTGGAGACACAGCTGTCCTTGACTGTGAGGTCACTGAGATCCCAAAACCAAA
AAATATTTTGGTTGCTGCCTTCCAATGACATGATTTCCTTCTCCATTGATAGGTACACATTTCATGCC
AATGGGTCTTTGACCATCAACAAAGTGAAACTGCTCGATTCTGGAGAGTACGTATGTGTAGCCCGAAA
TCCCAGTGGGGATGACACCAATGTACAAACTGGATGTGGTCTCTAAACCTCCAATTAATCAAATGGTC
TGTATACAAACAGAACTGTTATTAAAGCCACAGCTGTGAGACATTCCAAAAAACACTTTGACTGCAGA
GCTGAAGGGACACCATCTCCTGAAGTCATGTGGATCATGCCAGACAATATTTTCCTCACAGCCCCATA
CTATGGAAGCAGAATCACAGTCCATAAAAATGGAACCTTGGAAATTAGGAATGTGAGGCTTTCAGATT
CAGCCGACTTTATCTGTGTGGCCCGAAATGAAGGTGGAGAGAGCGTGTTGGTAGTACAGTTAGAAGTA
CTGGAAATGCTGAGAAGACCGACATTTAGAAATCCATTTAATGAAAAAATAGTTGCCCAGCTGGGAAA
GTCCACAGCATTGAATTGCTCTGTTGATGGTAACCCACCACCTGAAATAATCTGGATTTTACCAAATG
GCACACGATTTTCCAATGGACCACAAAGTTATCAGTATCTGATAGCAAGCAATGGTTCTTTTATCATT
TCTAAAACAACTCGGGAGGATGCAGGAAATATCGCTGTGCAGCTAGGAATAAAGTTGGCTATATTGAA
GAAATTAGTCATATTAGAAATTGGCCAGAAGCCAGTTATTCTTACCTATGCACCAGGGACAGTAAAAG
GCATCAGTGGAGAATCTCTATCACTGCATTGTGTGTCTGATGGAATCCCTAAGCCAAATATCAAATGG
ACTATGCCAAGTGGTTATGTAGTAGACAGGCCTCAAATTAATGGGAAATACATATTGCATGACAATGG
CACCTTAGTCATTAAAGAAGCAACAGCTTATGACAGAGGAACTATATCTGTAAGGCTCAAAAAAAGTG
TTGGTCATACACTGATTACTGTTCCAGTAATGATTGTAGCCTACCCTCCCCGAATTACAATCGTCCAA
CCCAGGAGTATTGTCACCAGGACAGGGGCAGCCTTTCAGCTCCACTGTGTGGcCTTGGGAGTTCCCAA
GCCAGAATCACATGGGAQATGCCTGACCACTCCCTTCTCTCAAACGGCAAAGTAAGAGAGGACACATG
GAAAGTGAGCAGCTTCACTTACAAGGTACCCTAGTCATTCAGATCCCCAAAQCTCCGATTCTGGGATA
TACAAATGCACAGCACTCGAGGGCAAGGGTGGGCGCGCC

| | | | |
|---|---|---|---|
| NOV29c, 247679561 | SEQ ID NO:670 | 670 aa | MW at 73997.1 kD |
| Protein Sequence | | | |

GSAAAPFTLEGDKLLLNCSATGEPKPQIMWRLPSKAVVDQQHRVGSWIHVYPNGSLFIGSVTEKDSGV
YLCVARNKMGDDLILMHVSLRLKPAKIDHKQYFRKQVLHGKDFQVDCKASGSPVPEISWSLPDGTMIN
NAMQADDSGHRTRRYTLFNNGTLYFNKVGVAEEGDYTCYAQNTLGKDEMKVHLTVITAAPRIRQSNKT
NKRIKAGDTAVLDCEVTGDPKPKIFWLLPSNDMISFSIDRYTFHANGSLTINKVKLLDSGEYVCVARN
PSGDDTKMYKLDVVSKPPLINGLYTNRTVIKATAVRHSKKHFDCRAEGTPSPEVMWIMPDNIFLTAPY
YGSRIIVHKNGTLERIAVRLSDSADFICVARNEGGESVLVVQLEVLEMIRRPTFRNPFNEKIVAQLGK
STALNCSVDGNPPPEIIWILPNGTRFSNGPQSYQYLIASNGSFIISKTTREDAGKYRCAARNKVGYIE
KLVILEIGQKPVILTYAPGTVKGISGESLSLHCVSDGIPKPNIKWTMPSGYVVDRPQINGKYILHDNG
TLVIKATAYDRGNYICKAQNSVGHTLITVPVMIVAYPPRIITNRPPRSIVTRTGAAFQLHCVALGVPK
PEITWEMPDHSLLSTASKERTHGSEQLHLQGTLVIQNPQTSDSGIYKCTALEGKGGRA

| | | |
|---|---|---|
| NOV29d, 248057904 | SEQ ID NO:671 | 771 bP |
| DNA Sequence | ORF Start: at 1 | ORF Stop: end of Sequence |

AAGCTTGCCTGTCCTCGCCGCTGTGCCTGTTATATGCCTACGGAGGTACACTGCACATTTCGGTACCT
GACTTCCATCCCAGACAGCATCCCGCCCAATGTGGAACGCATCAATTTAGGATACAACAGCTTGGTTA
GATTGATGGAAACAGATTTTTCTGGCCTGACCAAACTGGAGTTACTCATGCTTCACAGCAATGGCATT
CACACAATCCCTGACAAGACCTTCTCAGATTTGCAGGCCTTGCAGGTCTTAAAAATGAGCTATAATAA
AGTCCGAAAACTTCAGAAAGATACTTTTTATGGCCTCAGGAGCTTGACACGATTGCACATGGACCACA
ACAATATTGAGTTTATAAACCCAGAGGTTTTTTATGGGCTCAACTTTCTCCGCCTGGTGCACTTGGAA
GGAAATCAGCTCACTAAGCTCCACCCAGATACATTTGTCTCTTTGAGCTACCTCCAGATATTTAAAAT
CTCTTTCATTAAGTTCCTATACTTGTCTGATAACTTCCTGACCTCCCTCCCTCAAGAGATGGTCTCCT
ATATGCCTGACCTAGACAGCCTTTACCTGCATAAACCCATGGAAACCTGTGATTGCCATTTAAAGTGG
TTGTCTGACTGGATACAGGAGAAGCCAGATGTATAAATGCAAAAAGAATAAGAAAGTCCCTCTAGTGC
TCAGCAGTGTCCACTTTGCATGAACCCTAGGACTTCTAAAGGCAAGCCGTTAGCTATGGTCTCAGCTG
CAGCTTTCCAGTGTGCCCTCGAG

| | | | |
|---|---|---|---|
| NOV29d, 248057904 | SEQ ID NO:672 | 257 aa | MW at 29661.2 kD |
| Protein Sequence | | | |

KLACPRRCACYMPTEVHCTFRYLTSIPDSIPPNVERINLGYNSLVRLMETDFSGLTKLELLMLHSNGI
HTIPDKTFSDLQALQVLKMSYNKVRKLQKDTFYGLRSLTRLHMDHNNIEFINPEVFYGLNFLRLVHLE
GNQLTKLHPDTFVSLSYLQIFKISFIKFLYLSDNFLTSLPQEMVSYNPDLDSLYLHGNPWTCDCHLKW
LSDWIQEKPDVIKCKKDRSPSSAQQCPLCMNPRTSKGKPLAMVSAAAFQCALE

| | | |
|---|---|---|
| NOV29e, 248057927 | SEQ ID NO:673 | 771 bP |
| DNA Sequence | ORF Start: at 1 | ORF Stop: end of Sequence |

AAGCTTGCCTGTCCTCGCCGCTGTGCCTGTTATATGCCTACGGAGGTACACTGCACATTTCGGTACCT
GACTTCCATCCCAGACAGCATCCCGCCCAATGTGGAACGCATCAATTTAGGATACAACAGCTTGGTTA
GATTGATGGAAACAGATTTTTCTGGCCTGACCAAACTGGAGTTACTCATGCTTCACAGCAATGGCATT
CACACAATCCCTGACAAGACCTTCTCAGATTTGCAGGCCTTGCAGGTCTTAAAAATGAGCTATAACAA
AGTCCGAAAACTTCAGAAAGATACTTTTTATGGCCTCAGGAGCTTGACACGATTGCACATGGACCACA
ACAATATTGAGTTTATAAACCCAGAGGTTTTTTATGGGCTCAACTTTCTCCGCCTGGTGCACTTGGAA
GGAAATCAGCTCACTAAGCTCCACCCAGATACATTTGTCTCTTTGAGCTACCTCCAGATATTTAAAAT
CTCTTTCATTAAGTTCCTATACTTGTCTGATAACTTCCTGACCTCCCTCCCTCAAGAGATGGTCTCCT
ATATGCCTGACCTAGACAGCCTTTACCTGCATGGAAACCCATGGACCTGTGATTGCCATTTAAAGTGG
TTGTCTGACTGGATACAGGAGAIAGCCAGATGTAATAAATGCAAAAAAGATAGAAGTCCCTCTAGTGC
TCAGTAGTGTCCACTTTGCATGAACCCTAGGACTTCTAAAGGCAAGCCGTTAGCTATGGTCTCAGCTG
CAGCTTTCCAGTGTGCCCTCGAG

| | | | |
|---|---|---|---|
| NOV29e, 248057927 | SEQ ID NO:674 | 257 aa | MW at 29661.2 kD |
| Protein Sequence | | | |

KLACPPRCACYMPTEVHCTFRYLTSIPDSIPPNVERINLGYNSLVRLMETDFSGLTKLELLMLHSNGI
HTIPDKTFSDLQALQVLKMSYNKVRKLQKDTFYGLRSLTRLHMDHNNIEFINPEVFYGLNFLRLVHLE
GNQLTKAHPDTFVSLSYLQIFKISFIKFLYLSDNFLTSLPQEMVSYMPDLDSLYLHGNPWTCDCHLKW
LSDWIQEKPDVIKCKKDRSPSSAQQCPLCNNPRTSKGKPLAMVSAAAFQCALE

| | | |
|---|---|---|
| NOV29f, 249239821 | SEQ ID NO:675 | 771 bP |
| DNA Sequence | ORF Start: at 1 | ORF Stop: end of Sequence |

AAGCTTGCCTGTCCTCGCCGCTGTGCCTGTTATATGCCTACGGAGGTACACTGCACATTTCGGTACCT
GACTTCCATCCCAGACAGCATCCCGCCCATGTGGAACGCATCAATTTAAGGAATAACACAATTGGTTA
GATTGATGGAAACAGATTTTTCTGGCCTGACCAAACTGGAGTTACTCATGCTTCACAGCAATGGCATT
CACACAATCCCTGACAAGACCTTCTCAGATTTGCAGGCCTTGCAGGTCTTAAATGAAGCTATAAACAA
AGTCCGAAAACTTCAGAAAGATACTTTTTATGGCCTCAGGAGCTTGACACGATTGCACATGGACCACA
ACAATATTGAGTTTATAAACCCAGAGGTTTTTGATGGGCTCAACTTTCTCCGCCTGGTGCACTTGGAA
GGAAATCAGCTCACTAAGCTCCACCCAGATACATTTGTCTCTTTGAGCTACCTCCAGATATTTAAAAT
CTCTTTCATTAAGTTCCTATACTTGTCTGATAACTTCCTGACCTCCCTCCCTCMAGAGATGGTCTCCT
ATATGCCTGACCTAGACAGCCTTTACCTGCATGGAAACCCATGGACCTGTGATTGCCATTTAAAGTGG
TTGTCTGACTGGATACAGGAGAAGCCAGATGTAATAAATGCAAAAAGATAAGAGTCCCTCTAAAGTGC
TCCGCAGTGTCCACTTTGCATGAACCCTAGGACTTCTAAAGGCAAGCCGTTAGCTATGGTCTCAGCTG
AGCTTTCCAGTGTGCCCTCGAG

| | | | |
|---|---|---|---|
| NOV29f, 249239821 | SEQ ID NO:676 | 257 aa | MW at 29582.1 kD |
| Protein Sequence | | | |

KLACPRRCACYMPTEVHCTFRYLTSIPDSIPPNVERINLGYNSLVRLMETDFSGLTKLELLMLHSNGI
HTIPDKTFSDLQALQVLKMSYNKVRKLQKDTFYGLRSLTRLHMDHINNIFINPEVFDGLNFLRLVHLE
GNQLTKLHPDTFVSLSYLQIFKISFIKFLYLSDNFLTSLPQEMVSYMPDLDSLYLHGNPWTCDCHLKW
LSDWIQEKPDVIKCKKDRSPSSAPQCPLCMNPRTSKGKPLAMVSAAAFQCALE

| | | |
|---|---|---|
| NOV29g, 248057920 | SEQ ID NO:677 | 771 bP |
| DNA Sequence | ORF Start: at 1 | ORF Stop: end of Sequence |

AAGCTTGCCTGTCCTCGCCGCTGTGCCTGTTATATGCCTACGGAGGTACACTGCACATTTCGGTACCT
GACTTCCATCCCAGACAGCATCCCGCCCAATGTGGAACGCATCAATTTAGGATACAACAGCTTGGTTA
CACACAATCCCTGACAAGACCTTCTCAGATTTGCAGGCCTTGCAGGTCTTAAAAATGAGCTATAACAA
AGTCCGAAAACTTCAGAAAGATACTTTTTATGGCCTCAGGAGCTTGACACGATTGCACATGGACCACA
ACAATATTGAGTTTATAAACCCAGAGGTTTTTGATGGGCTCAACTTTCTCCGCCTGGTGCACTTGGAA
CTCTTTCATTAAGTTCCTATACTTGTCTGATAACTTCCTGACCTCCCTCCCTCAAGAGATGGTCTCCT
ATATGCCTGACCTAGACAGCCTTTACCTGCATGGAAACCCATGGAACCTGTGATTGCCATTTAAGTGG
TTGTTTGACTGGATACAGGAGAAGCCAGATGTAATAAAATGCAAAAAAGATAGAAGTCCCTCTAGTGC
TCAGCAGTGTCCACTTTGCATGAACCCTAGGACTTCTAAAGGCAAGCCGTTAGCTATGGTCTCAGCTG
CAGCTTTCCAGTGTGCCCTCGAG

| | | | |
|---|---|---|---|
| NOV29g, 248057920 | SEQ ID NO:678 | 257aa | MW at 29673.2 kD |
| Protein Sequence | | | |

KLACPRRCACYMPTEVHCTFRYLTSIPDSIPPNVERINLGYNSLVRLMETDFSGLTKLELLMLHSNGI
HTIPDKTFSDLQALQVLAMSYNKVRKLQKDTFYGLRSLTRLHMDHNNIEFINPEVFDGLNFLRLVHLE
GNQLTKLHPDTFVSLSYLQIFKISFIKFLYLSDNFLTSLPQEMVSYMPDLDSLYLHGNPWTCDCHLKW
LFDWIQEKPDVIKCKKDRSPSSAQQCPLCAPRTSKGKPLAMVSAAAFQCALE

| | | |
|---|---|---|
| NOV29h, 247679541 | SEQ ID NO:679 | 2059 bP |
| DNA Sequence | ORF Start: at 2 | ORF Stop: end of Sequence |

AGGCTCCGCGGCCGCCCCCTTCACCCTCGAGGGGGACAAATTACTACTGAACTGCTCAGCCACTGGGG
AGCCCAAACCCCAAATAATGTGGAGGTTACCATCCAAGGCTGTGGTCGACCAGCAGCATAGAGTGGGC
AGCTGGATCCACGTCTACCCTAATGGATCCCTGTTTATTGGATCAGTAACAGAAAAAGACAGTGGTGT
CTACTTGTGTGTGGCAAGAAACAAAGGGGGATGATCTGATACTGATGCATGTTAGCCTAAGAAACTGA
AACCTGCCAAATTGACCACAAGCAGTATTTTAGAAAGCAAGTGCTCCATGGGAAAGATTTCCAAAGTA
GATTGCALAGCTTCCGGCTCCCCAGTGCCAGAGATATCTTGGAGTTTGCCTGATGGAACCATGATCAA
CAATGCAATGCAAGCCGATGACAGTGGCCACAGGACTAGGAGATATACCCTTTTCAACAATGGAACTT
TATACTTCAACAAAGTTGGGGTAAGCGGAGGAGGAGATTATACTTGCTATGCCCAGAACACCCTAGGG
AAAGATGAAATGAAGGTCCACTTAACAGTTATAACAGCTGCTCCCCGGATAAGGCAGAGTAACAAAAC
CAACAAGAGAATCAAAAGCTGGAGACACAGCTGTCCTTGACTGTGAGGTCACTGAGATCCCAAACCAA
AAATATTTTGGTTGCTGCCTTCCAATGACATGATTTCCTTCTCCATTGATAGGTACACATTTCATGCC
AATGGGTCTTTGACCATCAACAAGTGAAACTGCTCGATTCTGGAAGAGTACGTATGTGTAGCCCGAAA
TCCCAGTGGGGAATGACACCAAAATGTAACAACTGGAATGTGGTCTCTAACCTCCATTATCAATGGTC
TGTATACAAATAGAACTGTTATTAAAGCCACAGCTGTGAGACATTCCAAAAAACACTTTGACTGCAGA
GCTGAAGGGACACCATCTCCTGAAGTCATGTGGATCATGCCAGACAATATTTTCCTCACAGCCCCATA
CTATGGAAGCAGAATCACAGTCCATAAAAATGGAACCTTGGAAATTAGGAATGTGAGGCTTTCAGATT
CAGCCGACTTTATCTGTGTGGCCCGAAATGAAGGTGGAGAGAGCGTGTTGGTAGTACAGTTAGAAGTA
CTGGAAATGCTGAGAAGACCGACATTTAGAAATCCATTTAATGAAAAAATAGTTGCCCAGCTGGGAAA
GTCCACAGCATTGAATTGCTCTGTTGATGGTAACCCACCACCTGAAATATCTGGATTTTAACCAAATG
GCACACGATTTTCCAATGGACCACAAAGTTATCAGTATCTGATAGCAAGCAATGGTTCTTTTATCATT
TCTAAAACAACTCGGGAGGATGCAGGAAAATATCGCTGTGCAGCTAGGAATAAAGTTGGCTATATTGA
GAAATTAGTCATATTAGAAATTGGCCAGAAGCCAGTTATTCTTACCTATGCACCAGGGACAGTAAAAG
GCATCAGTGGAGAATCTCTATCACTGCATTGTGTGTCTGATGGAATCCCTAAGCCAAATATCAAATGG
ACTATGCCAAGTGGTTATGTAGTAGACAGGCCTCAAATTAATGGGAAATACATATTGCATGACAATGG
CACCTTAGTCATTAAAGAAGCAACAGCTTATGACAGAGGAAACTATATCTGTAAGGCTCAAAATAGTG
TTGGTCATACACTGATTACTGTTCCAGTAATGATTGTAGCCTACCCTCCCCGAATTACAAATCGTCCA
CCCAGGAGTATTGTCACCAGGACAGGGGCAGCCTTTCAGCTCCACTGTGTGGCCTTGGGAGTTCCCAA
GCCAGAAATCACGTGGGAGATGCCTGACCACTCCCTTCTCTCAACGGCAAGTAAAGAGAGGACACATG
GAAGTGAGCAGCTTCACTTACAAGGTACCCTAGTCATTCAGAATCCCCAAACCTCCGATTCTGGGATA
TACAAATGCACAGCAAAGAACCCACTTGGTAGTGATTATGCAGCAACGTATATTCAAGTAATCCTCGA
GGGCAAGGGTGGGCGCGCC

| | | | |
|---|---|---|---|
| NOV29h, 247679541 | SEQ ID NO:680 | 686 aa | MW at 75732.1 kD |
| Protein Sequence | | | |

GSAAAPFTLEGDKLLLNCSATGEPKPQIMWRLPSKAVVDQQHRVGSWIHVYPNGSLFIGSVTEKDSGV
YLCVAPNKMGDDLILMHVSLRLKPAKIDHKQYFRKQVLHGKDFQVDCKASGSPVPEISWSLPDGTMIN
NKRIKAGDTAVLDCEVTGDPKPKIFWLLPSNDMISFSIDRYTFHANGSLTINKVKLLDSGEYVCVARN
PSGDDTKMYKLDVVSKPPLINGLYTNRTVIKATAVRHSKKHFDCRAEGTPSPEVMWIMPDNIFLTAPY
YGSRITVHKNGTLEIRNVRLSDSADFICVARNEGGESVLVVQLEVLEMLRRPTFRNPFNEKIVAQLGK
STALNCSVDGNPPPEIIWILPNGTRFSNGPQSYQYLIASNGSFTISKTTREDAGKYRCAARNKVGYIE
KLVILEIGQKPVILTYAPGTVKGISGESLSLHCVSDGIPKPNIKWTMPSGYVVDRPQINGKYILHDNG
TLVIKEATAYDRGNYICKAQNSVGHTLITVPVMIVAYPPRITNRPPRSIVTRTGAAFQLHCVALGVPK
PEITWEMPDHSLLSTASKERTHGSEQLHLQGTLVIQNPQTSDSGIYKCTAIAPLGSDYAATYIQVILE
GKGGRA

| | | |
|---|---|---|
| NOV291, 249116954 | SEQ ID NO:681 | 2011 bP |
| DNA Sequence | ORF Start: at 2 | ORF Stop: end of Sequence |

AGGCTCCGCGGCCGCCCCCTTCACCCTCGAGGGGGACAAATTACTACTGAACTGCTCAGCCACTGGGG
AGCCCAAACCCCAAATAATGTGGAGGTTACCATCCAAGGCTGTGGTCGACCAGCAGCATAGAGTGGGC
AGCTGGATCCACGTCTACCCTAATGGATCCCTGTTTATTGGATCAGTAACAGAAAAAGACAGTGGTGT
CTACTTGTGTGTGGCAAGAAACAAAATGGGGGATGATCTGATACTGATGCATGTTAGCCTAAGACTGA
AACCTGCCAAATTGACCACAAGCAGTATTTTAGAAAGCAAGTGCTCCATGGGAAAGATTTCCAAAGTA
TATACTTCAACAAAGTTGGGGTAGCGGAGGAAGGAGATTATACTTGCTATGCCCAGAACACCCTAGGG
CAACAAGAGAATCAAAGCTGGAGACACAGCTGTCCTTGACTGTGAGGTCACTGGGGATCCCAAACCAA
AAATATTTTGGTTGCTGCCTTCCAATGACATGATTTCCTTCTCCATTGATAGGTACACATTTCATGCC
AATGGGTCTTTGACCATCAACAAAGTGAAACTGCTCGATTCTGGAGAGTACGTATGTGTAGCCCGAAA
TCCCAGTGGGGATGACACCAAAATGTACAAACTGGATGTGGTCTCTAAACCTCCATTAATCAATGGTC
TGTATACAAATAGAACTGTTATTAAAGCCACAGCTGTGAGACATTCCAAAAAACACTTTGACTGCAGA
GCTGAAGGGACACCATCTCCTGAAGTCATGTGGATCATGCCAGACAATATTTTCCTCACAGCCCCATA
CTATGGAAGCAGAATCACAGTCCATAAAAATGGAACCTTGGAAATTAGGAATGTGAGGCTTTCAGATT
CAGCCGACTTTATCTGTGTGGCCCGAAATGAAGGTGGAGAGAGCGTGTTGGTAGTACAGTTAGAAGTA
CTGGAAATGCTGAGAAGACCGACATTTAGAAATCCATTTAATGAAAAAATAGTTGCCCAGCTGGGAAA
GTCCACAGCATTGAATTGCTCTGTTGATGGTAACCCACCACCTGAAATAATCTGGATTTTACCAAATG
GCACACGATTTTCCAATGGACCACAGTTATCAGTATCTGATAGCAAGCAAATGGTTCTTTTATCAATT
TCTAAACAACTCGGGAGGATGCAGGAAAATATCGCTGTGCAGCTAGGAATAAAAGTTGGCTATATTGA
GAAATTAGTCATATTAGAAATTGGCCAGAAGCCAGTTATTCTTACCTATGCACCAGGGACAGTAAAAG
GCATCAGTGGAGAATCTCTATCACTGCATTGTGTGTCTGATGGAATCCCTAAGCCAAATATCAAATGG
ACTATGCCAAGTGGTTATGTACTAGACAGGCCTCAAATTAATGGGAAATACATATTGCATGACAATGG
CACCTTAGTCATTAAAGAAGCAACAGCTTATGACAGAGGAAACTATATCTGTAAGGCTCAAAATAGTG
TTGGTCATACACTGATTACTGTTCCAGTAATGATTGTAGCCTACCCTCCCCGAATTACAAATCGTCCA
CCCAGGAGTATTGTCACCAGGACAGGGGCAGCCTTTCAGCTCCACTGTGTGGCCTTGGGAGTTCCCAA
GCCAGAAATCACGTGGGAGATGCCTGACCACTCCCTTCTCTCAACGGCAAGTAAAGAGAGGACACATG
GAAGTGAGCAGCTTCACTTACAAGGTACCCTAGTCATTCAGAATCCCCAAACCTCCGATTCTGGGATA
TACAAATGCACAGCACTCGAGGGCAAGGGTGGGCGCGCC

| | | | |
|---|---|---|---|
| NOV29i, 249116954 | SEQ ID NO:682 | 670 aa | MW at 73997.1 kD |
| Protein Sequence | | | |

GSAAAPFTLEGDKLLLNCSATGEPKPQIMWRLPSKAVVDQQHRVGSWIHVYPNGSLFIGSVTEKDSGV
YLCVARNKMGDDLILMHVSLRLKPAKIDHKQYFRKQVLHGKDFQVDCKASGSPVPEISWSLPDGTMIN
NAMQADDSGHRTRRYTLFNNGTLYFNKVGVAEEGDYTCYAQNTLGKDEMKVHLTVITAAPRIRQSNKT
NKRIKAGDTAVLDCEVTGDPKPKIFWLLPSNDMTSFSIDRYTFHANGSLTINKVKLLDSGEYVCVAAA
PSGDDTKMYKLDVVSKPPLINGLYTNRTVIKATAVRHSKKHFDCRAEGTPSPEVMWTMPDNIFLTAPY
YGSRITVHINGTLEIRNVRLSDSALFICVARIEGGESVLVVQLEVLEMLRRPTFPAPFNEKIVAQLGK
STALNCSVDGNPPPEIIWILPNGTRFSNGPQSYQYLIASNGSFIISKTTREDAGKYRCAAAAKVGYIE
KLVILEIGQKPVILTYAPGTVKGISGESLSLHCVSDGIPKPNIKWTMPSGYVVDRPQINGKYILHDNG
TLVIKEATAYDRGNYICKAQNSVGHTLITVPVMIVAYPPRITNRPPRSIVTRTGAAFQLHCVALGVPK
PEITWEMPDHSLLSTASKERTHGSEQLHLQGTLVIQNPQTSDSGIYKCTALEGKGGRA

| | | |
|---|---|---|
| NOV29, 248210155 | SEQ ID NO:683 | 1420 bP |
| DNA Sequence | ORF Start: at 2 | ORF Stop: end of Sequence |

CACCCTCGAGGGGGACAAATTACTACTGAACTGCTCAGCCACTGGGGAGCCCAAACCCCAAATAATGT
GGAGGTTACCATCCAAGGCTGTGGTCGACCAGCAGCATAGGTACACATTTCATGCCAATGGGTCTTTG
ACCATCAACAAAGTGAAACTGCTCGAATTCTGGAGAGTACGTATGTGTAGCCCGAATCCCAGTGGGGA
TGACACCAAAATGTACAAACTGGATGTGGTCTCTAAACCTCCATTAATCAATGGTCTGTATACAAATA
GAACTGTTATTAAAGCCACAGCTGTGAGACATTCCAAAAACAACTTTGAACTGCAGAGCTGAGGGACA
CCATCTCCTGAAAGTCATGTGGATCATGCCAGACAATATTTTCCTCACAGCCCCATACTATGGAGCAG
AATCACAGTCCATAAAAATGGAACCTTGGAAATTAGGAATGTGAGGCTTTCAGATTCAGCCGACTTTA
AGAAGAACCGACATTTAGAAATCCATTTAATGAAAAAATAGTTGCCCAGCTGGGAAGTCCACAGCATT
GAATTGCTCTGTTGATGGTAACCCACCACCTGAAATAATCTGGATTTTACCAAATGGCACACGATTTT
ATTAGAAATTGGCCAGAAGCCAGTTATTCTTACCTATGCACCAGGGACAGTAAAAGGCATCAGTGGAG
ATCTCTATCACTGCATTGTGTGTCTGATGGAAATCCCTAAGCCAAAATATCATGGACTAAATGCCAGT
GGTTATGTAGTAGACAGGCCTCAAATTAATGGGAAATACATATTGCAATGACATGGCACCTTAGTCAT
TAAAGAAGCAACAGCTTATGACAGAGGAAACTATATCTGTAAGGCTCAAATAAGTGTTGGTCATACAC
AGTCACCAGGACAGGGGCAGCCTTTCAGCTCCACTGTGTGGCCTTGGGAGTTCCCAGCCAGAAATCAC
GTGGGAGATGCCTGACCACTCCCTTCTCTCAACGGCAAGTAAAGAGAGGACACATGGAGTGAGCAAGC
TTCACTTACAAGGTACCCTAGTCATTCAGAATCCCCAAACCTCCGATTCTGGGATATACAAATGCACA
GCAAAGAACCCACTTGGTAGTGATTATGCAGCAACGTATATTCAAGTAATCCTCGAGGGC

| | | | |
|---|---|---|---|
| NOV29, 248210155 | SEQ ID NO:684 | 473 aa | MW at 52119.3 kD |
| Protein Sequence | | | |

TLEGDKLLLNCSATGEPKPQIMWRLPSKAVVDQQHRYTFHANGSLTINKVKLLDSGEYVCVARNPSGD
DTIYKLDVVSKPPLINGLYTNRTVIKATAVRHSKKHFDCRAEGTPSPEVMWIVVPDNIFLTAPYYGSR
TVHKNGTLEIRNVRLSDSADFICVARNEGGESVLWQLEVLEMLRRPTFRIAAPFNEKIVAQLGKSTAL
NCSVDGNPPPEIIWILPNGTRFSNGPQSYQYLIASNGSFIISKTTREDAG1ARCAARNKVGYIEKLVI
LEIGQKPVILTYAPGTVKGISGESLSLHCVSDGIPKPNIKWTMPSGYVVDRPQINGKYILHDNGTLVI
KEATAYDRGNYICKAQNSVGHTLITVPVMIVAYPPRITNRPPRSIVTRTGAAFQLHCVALGVPKPEIT
WEMPDHSLLSTASKERTHGSEQLHLQGTLVIQNPQTSDSGIYKCTAKNPLGSDYAATYIQVILEG

| | | |
|---|---|---|
| NOV29k, 248213764 | SEQ ID NO:685 | 1372 bP |
| DNA Sequence | ORF Start: at 2 | ORF Stop: end of Sequence |

CACCCTCGAGGGGGACAAATTACTACTGAACTGCTCAGCCACTGGGGAGCCCAAACCCCAAATAATGT
GGAGGTTACCATCCAAGGCTGTGGTCGACCAGCAGCATAGGTACACATTTCATGCCAATGGGTCTTTG
ACCATCAACAAAGTGAAACTGCTCGAATTCTGGAAGAGTACGTATGTGTAGCCCGATCCCAGTGGGGA
TGACACCAAAATGTACAAACTGGATGTGGTCTCTAAACCTCCATTAATCAATGGTCTGTATACAAACA
GAACTGTTATTAAAGCCACAGCTGTGAGACATTCCAAAAAACACTTTGACTGCAGAGCTGAAGGGACA
CCATCTCCTGAAGTCATGTGGATCATGCCAGACAATATTTTCCTCACAGCCCCATACTATGGAAGCAG
AATCACAGTCCATAAAAATGGAACCTTGGAAATTAGGAATGTGAGGCTTTCAGATTCAGCCGACTTTA
TCTGTGTGGCCCGAAATGAAGGTGGAGAGAGCGTGTTGGTAGTACAGTTAGAAGTACTGGAAATGCTG
AGAAGACCGACATTTAGAAATCCAATTTAAATGAAATAAAGTTGCCCAGCTAGA3AGTCCACAGCATT
GAATTGCTCTGTTGATGGTAACCCACCACCTGAAATAATCTGGATTTTACCAAATGGCACACGATTTT
CCAATGGACCACAAAGTTATCAGTATCTGATAGCAAGCAATGGTTCTTTTAATCATTTCTAAAACACT
CGGGAGGATGCAGGAATATCGCTGTGCAGCTAGGAATAAAGTTGGCTATATTGAGAAAAATTAGTCAT
ATTAGAATTGGCCAGAAGCCAGTTATTCTTACCTATGCACCAAGGGACAGTAAAAGGCATCAGTGGAG
AATCTCTATCACTGCATTGTGTGTCTGATGGAATCCCTAAGCCAAATATCAAATGGACTATGCCAAGT
GGTTATGTAGTAGACAGGCCTCAAATTAATGGGAAATACATATTGCATGACAATGGCACCTTAGTCAT
TAAAGAAGCAACAGCTTATGACAGAGGAAACTATATCTGTAAGGCTCAAAATAGTGTTGGTCATACAC
TGATTACTGTTCCAGTAATGATTGTAGCCTACCCTCCCCGAATTACATCGTCCACCCAAGGAAGTATT
GTCACCAGGACAGGGGCAGCCTTTCAGCTCCACTGTGTGGCCTTGGGAGTTCCCAAGCCAGAAATCAC
ATGGGAGATGCCTGACCACTCCCTTCTCTCACGGCAAGTAAAGAGAGGACACATCGAAGTGAAGCAGC
TTCACTTACAAGGTACCCTAGTCATTCAGAATCCCCAAACCTCCGATTCTGGGATATACAAATGCACA
GCACTCGAGGGC

| | | | |
|---|---|---|---|
| NOV29k, 248213764 | SEQ ID NO:686 | 457 aa | MW at 50532.6 kD |
| Protein Sequence | | | |

TLEGDKLLLNCSATGEPKPQIMWRLPSKAVVDQQHRYTFHANGSLTINKVKLLDSGEYVCVARNPSGD
DTKMYKLDVVSKPPLINGLYTNRTVIKATAVRHHSKKHFDCRAGTPSPEVMWIMPDNIFLTAPYYGSR
ITVHKNGTLEIRNVRLSDSADFICVARNEGGESVLVVQLEVLEMLRRPTFPNPFNEKIVAQLGKSTAL
NCSVDGNPPPEIIWILPNGTRFSNGPQSYQYLIASNGSFIISKTTREDAGKYRCAARNKVGYIEKLVI
LEIGQKPVILTYAPGTVKGISGESLSLHcVSDGIPKPNIKWTMPSGYVVDRPQINGKYILHDNGTLVI
KEATAYDRGNYICKAQNSVGHTLITVPVMIVAYPPRITNRPPRSIVTRTGAAFQLHCVALGVPKPEIT
WEMPDHSLLSTASKERTHRSEQLHLQGTLVIQNPQTSDSGIYKCTALEG

| | | |
|---|---|---|
| NOV29l, 248213768 | SEQ ID NO:687 | 1383 bP |
| DNA Sequence | ORF Start: at 2 | ORF Stop: at 1382 |

CACCCTCGAGGGGGACAAATTACTACTGAACTGCTCAGCCACTGGGGAGCCCAAACCCCAAATAATGT
GGAGGTTACCATCCAAGGCTGTGGTCGACCAGCAGCATAGGTACACATTTCATGCCAATGGGTCTTTG
ACCATCAACAAAGTGAAACTGCTCGATTCTGGAGAGTACGTATGTGTAGCCCGAAATCCCAGTGGGGA
TGACACCAAATGTACAAACTGGAATGTGGTCTCTAAACCTCCATTAATCAAATGGTCTGTAATACATA
GAACTGTTATTAAAGCCACAGCTGTGAGACATTCCAAAAACACTTTGACTGCAGAGCTGAAAGGGACA
CCATCTCCTGAAGTCATGTGGATCATGCCAGACAATATTTTCCTCACAGCCCCATACTATGGAAGCAG
AATCACAGTCCATAAAAATGGAACCTTGGAAATTAGGAATGTGAGGCTTTCAGATTCAGCCGACTTTA
TCTGTGTGGCCCGAAATGAAGGTGGAGAGAGCGTGTTGGTAGTACAGTTAGAAGTACTGGAAATGCTG
AGAAGACCGACATTTAGAAATCCATTTAATGAAAAAATAGTTGCCCAGCTGGGAAAGTCCACAGCATT
GAATTGCTCTGTTGATGGTAACCCACCACCGGAAATMATCTGGATTTTACCAAATGGCACACGATTTT
CCAATGGACCACAAGTTATCAGTATCTGATAGCAAGCAATGGTTCTTTTAATCATTTCTAAACAAACT
CGGGAGGATGCAGGAAAATATCGCTGTGCAGCTAGGAATAAAGTTGGCTATATTGAGAAATTAGTCAT
ATTAGAAATTGGCCAGAAGCCAGTTATTCTTACCTATGCACCAGGGACAGTAAAAGGCATCAGTGGAG
AATCTCTATCACTGCATTGTGTGTCTGATGGAATCCCTAAGCCAAATATCAAATGGACTATGCCAAGT
GGTTATGTAGTAGACAGGCCTCAAATTAATGGGAAATACATATTGCATGACAATGGCACCTTAGTCAT
TAAAGAAGCAACAGCTTATGACAGAGGAAACTATATCTGTAAGGCTCAAAATAGTGTTGGTCATACAC
TGATTACTGTTCCAGTAATGATTGTAGCCTACCCTCCCCGAATTACAAATCGTCCACCCAGGAGTATT
GTCACCAGGACAGGGGCAGCCTTTCAGCTCCACTGTGTGGCCTTGGGAGTTCCCAAGCCAGAAATCAC
GTGGGAGATGCCTGACCACTCCCTTCTCTCAACGGCAAGTAAAGAGAGGACACATGGAAGTGAGCAGC
TTCACTTACAAGGTACCCTAGTCATTCAGAATCCCCAAACCTCCGATTCTGGGATATACAAATGCACA
GCACTCGAGGGCAAGGGCGAATC

| | | | |
|---|---|---|---|
| NOV29l, 248213768 | SEQ ID NO:688 | 460 aa | MW at 50747.8 kD |

TLEGDKLLLNCSATGEPKPQIMWRLPSKAVVDQQHRYTFHANGSLTINKVKLLDSGEYVCVARNPSGD
DTKMYKLDVVSKPPLINGLYTNRTVIKATAVRHSKKHFDCRAEGTPSPEVMWIMPDNIFLTAPYYGSR
ITVHKNGTLEIRNLVRLSDSADFICVAPNEGGESVLWQLEVLEMLRRPTFRNPFNEKIVAQLGKSTAL
NCSVDGNPPPEIIWILPNGTRFSNGPQSYQYLIASNGSFIISKTTREDAGKYRCAARNKVGYIEKLVI
LEIGQKPVILTYAPGTVKGISGESLSLHVSDGIPKPNIKWTMPSGYAATDRPQINGKYILHDNGTLVI
KEATAYDRGNYICKAQNSVGHTLITVPVAMVAYPPRITNRPPRSIVTRTGAAFQLHCVALGVPKPEIT
WEMPDHSLLSTASKERTHGSEQLHLQGTLVIQNPQTSDSGIYKCTALEGKGE

| | | |
|---|---|---|
| NOV29m, 248213772 | SEQ ID NO:689 | 1372 bP |
| DNA Sequence | ORF Start: at 2 | ORF Stop: end of Sequence |

CACCCTCGAGGGGGACAAAATTACTACTGAAACTGCTCAGCCACTGGGGAGCCCACCCCAAATAATGT
GGAGGTTACCATCCAAGGCTGTGGTCGACCAGCAGCATAGGTACACATTTCATGCCAATGGGTCGTTG
ACCATCAACAAAGTGAAACTGCTCGATTCTGGAGAGTACGTATGTGTAGCCCGAAATCCCAGTGGGGA
GAACTGTTATTAAAGCCACAGCTGTGAGACATTCCAAAAAACACTTTGACTGCAGAGCTGAAGGGACA
CCATCTCCTGAAGTCATGTGGATCATGCCAGACAATATTTTCCTCACAGCCCCATACTATGGAAGCAG
AATCACAGTCCATAAAAATGGAACCTTGGAAATTAGGAATGTGAGGCTTTCAGATTCAGCCGACTTTA
TCTGTGTGGCCCGAAATGAAGGTGGAGAGAGCGTGTTGGTAGTACAGTTAGAAGTACTGGAAATGCTG
AGAAGACCGACATTTAGAAATCCATTTAATGAAAAAATAGTTGcCCAGCTGGGAAAAGTCCACAGATT
GAATTGCTCTGTTGATGGTAACCCACCACCGGAAATAATCTGGATTTTACCAAATGGCACACGATTTT
CCAATGGACCACAAAGTTATCAGTATCTGATAGCAAGCAATGATTCTTTTATCATTTCTAAAACAACT
CGGGAGGATGCAGGAAAATATCGCTGTGCAGCTAGGAATAAAGTTGGCTATATTGAGAAATTAGTCAT
ATTAGAAATTGGCCAGAAGCCAGTTATTCTTACCTATGCAACCAGGGACAGTAAAGAATCAAGTGGAG
AATCTCTATCACTGCATTGTGTGTCTGATGGAATCCCTAAGCCAAATATCAATGGACTATGCCAAAGT
GGTTATGTAGTAGACAGGCCTCAAATTAATGGGAAATACATATTGCATGACAATGGCACCTTAGTCAT
TAAAGAAGCAACAGCTTATGACAGAGGAAACTATATCTGTAAGGCTCAAAATAGTGTTGGTCATACAC
TGATTACTGTTCCAGTAATGATTGTAGCCTACCCTCCCCGAATTACAAATCGTCCACCCAGGAGTATT
GTCACCAGGACAGGGGCAGCCTTTCAGCTCCACTGTGTGGCCTTGGGAGTTCCCAAAGCCAGAATCAC
TTCACTTACAAGGTACCCTAGTCATTCAGAATCCCCAACCTCCGATTCTGGGATATACATGCACA
GCACTCGAGGGC

| | | | |
|---|---|---|---|
| NOV29m, 248213772 | SEQ ID NO:690 | 457 aa | MW at 50433.5 kD |
| Protein Sequence | | | |

TLEGDKLLLNCSATGEPKPQIMWRLPSKAVVDQQHRYTFGSLTINKKAKAALDSGEYVCVAPANPSGD
DTKMAYKLDVVSKPPLINGLYTNRTVIKATAVRHSKKHFDCAGTPSPEVMWIMPDNIFLTAAPYYGSR
ITVKKNGTLEIRNVRISDSADFICVARNEGGESVLVVQLEVLEMLRRPTFRNPFNEKIVAQLGKSTAL
NCSVDGNPPPEIIWILPNGTRFSNGPQSYQYLIASNGSFIISKTTREDAGKYRCAARNKVGYIEKLVI
LEIGQKPVILTYAPGTVKGISGESLSLHCVSDGIPKPNIKWTMPSGYVVDRPQINGKYILHDNGTLVI
IWEMPDHSLLSTASKERTHGSEQLHLQGTLVTQNPQTSDSGTYKCTALEG

| | | |
|---|---|---|
| NOV29n, 248586774 | SEQ ID NO:691 | 1420 bP |
| DNA Sequence | ORF Start: at 2 | ORF Stop: end of Sequence |

CACCCTCGAGGGGGACAATTACTACTGAACTGCTCAGCCACTGGGGAGCCCCCCCAAAAAAATAATGT
GGAGGTTACCATCCAAGGCTGTGGTCGACCAGCAGCATAGGTACACATTTCATGCCAATGGGTCTTTG
ACCAATCAACAAAGTGAAACTGCTCGATTCTGGAGAGTACGTATGTGTAGCCCGAATCCCAGTGGGGA
TGACAACCAAATGTACAAACTGGAATGTGGTCTCTAAACCTCCAATTAAATCATGGTCTGTATACATA
GAACTGTTATTAAAGCCACAGCTGTGAGACATTCCAAAAAACACTTTGACTGCAGAGCTGAAGGGACA
AATCACAGTCCATAAAAATGGAACCTTGGAAATTAGGAATGTGAGGCTTTCAGATTCAGCCGACTTTA
TCTGTGTGGCCCGAAAATGAAAGGTGGAGAGAGCGTGTTGGTAGTACAGTTAGAAGTACTGGATGCTG
AGAAGACCGACATTTAGAAATCCATTTAATGAAAAAATAGTTGCCCAGCTGGGAAAGTCCACAGCATT
GAATTGCTCTGTTGATGGTAAACCCACCACCTGAAATAATCTGGATTTTACCAATGGCACACGATTTT
CCAATGGACCACAAAGTTATCAGTATCTGATAGCAAGCAATGGTTCTTTTATCATTTCTAAAACAACT
CGGGAGGATGCAGGAAAAATATCGCTGTGCAGCTAGGAATAAGTTGGCTATATTGAGAAATTAGTCAT
ATTAGAAATTGGCCAGAAGCCAGTTATTCTTACCTATGCACCAGGGACAGTAAAAGGCATCAGTGGAG
ATCTCTATCACTGCATTGTGTGTCTGATGGAATCCCTAAGCCAPAATATCAAATGGACTATGCCAAGT
GGTTATGTAGTAGACAGGCCTCAAATTAATGGGAAATACATATTGCATGACAATGGCACCTTAGTCAT
TAAAGAAGCAACAGCTTATGACAGAGGAAACTATATCTGTAAGGCTCAAAATAGTGTTGGTCATACAC
TGATTACTGTTCCAGTAATGATTGTAGCCTACCCTCCCCGAATTACAAATCGTCCACCCAGGAGTATT
GTCACCAGGACAGGGGCAGCCTTTCAGCTCCACTGTGTGGCCTTGGGAGTTCCCAAGCCAGAAATCAC
GTGGGAGATGCCTGACCACTCCCTTCTCTCAACGGCAAGTAAAGAGAGGACACATGGAAGTGAGCAGC
TTCACTTACAAGGTACCCTAGTCATTCAGAATCCCCAAACCTCCGATTCTGGGATATACAAATGCACA
GCAAAGAACCCACTTGGTAGTGATTATGCAGCAACGTATATTCAAGTAATCCTCGAGGGC

| | | | |
|---|---|---|---|
| NOV29n, 248586774 | SEQ ID NO:692 | 473aa | MW at 52168.4 kD |
| Protein Sequence | | | |

TLEGDKLLLNCSATGEPKPQIMWRLPSKAVVDQQHRYTFHANGSLTINKVKLLDSGEYVCVARNPSGD
DTKMYKLDVVVSKPPLINGLYTNRTVIKATAVPASKAFDCFAAGTPSPEVMWIMPDNIFLTAPYYGSR
ITVHKNGTLEIRVRLSDSADFICVAR1AIEGGESVLVVQLEVLEMLRKPTFRNPFNEIVAQLGKSTAL
INCSVDGNPPPEIIWILPNGTRFSNGPQSYQYLIASNGSFIISKTTREDGKYRCAARNKVGYIEKLVI
LEIGQKPVILTYAPGTVKGISGESLSLHCVSDGIPKPNIKWTMPSGYVVDRPQINGKYILHDNGTLVI
KEATAYDRGNYICKAQNSVGHTLITVPVMIVAYPPRITNRPPRSIVTRTGAAFQLHCVALGVPKPEIT
WEMPDHSLLSTASKERTHGSEQLHLQGTLVIQNPQTSDSGIYKCTAKNPLGSDYAATYIQVILEG

| | | |
|---|---|---|
| NOV29o, 248586793 | SEQ ID NO:693 | 1420 bP |
| DNA Sequence | ORF Start: at 2 | ORF Stop: end of Sequence |

CACCCTCGAGGGGGACAAATTACTACTGAACTGCTCAGCCACTGGGGAGCCCAAACCCCAAATAATGT
GGAGGTTACCATCCAAGGCTGTGGTCGACCAGCAGCATAGGTACACATTTCATGCCAATGGGTCGTTG
ACCATCAACAAAGTGAAACTGCTCGATTCTGGAGAGTACGTATGTGTAGCCCGAAATCCCAGTGGGGA
TGACACCAAAATGTACAACTGGATGTGGTCTCTAACCTCCATTAATCAATGGTCTGTATACCAAAACA
GAACTGTTATTAAAGCCACAGCTATGAGACATTCCAPAAACACTTTGACTGCAGAGCTGAAGGGAACA
CCATCTCCTGAAGTCATGTGGATCATGCCAGACAATATTTTCCTCACAGCCCCATACTATGGAAGCAG
AATCACAGTCCATAAAAATGGAACCTTGGAAATTAGGAATGTGAGGCTTTCAGATTCAGCCGACTTTA
TCTGTGTGGCCCGATGAAGGTGGAGAGAGCGTGTTGGTAGTACAGTTAGAAGATACTGGAAAATGCTG
AGAAGACCGACATTTAGAAATCCATTTAATGAAAAAATAGTTGCCCAGCTGGGAAAGTCCACAGCATT
GAATTGCTCTGTTGATGGTAACCCACCACCGGAAATAATCTGGATTTTACCAAATGGCACACGATTTT
CCAATGGACCACAAAGTTATCAGTATCTGATAGCAAGCAATGGTTCTTTTATCATTTCTAAAACAACT
CGGGAGGATGCAGGAAATATCGCTGTGCAGCTAGGAATAAAGTTGGCTATATTGAAAGAATTAGTCAT
ATTAGAAATTGGCCAGAAGCCAGTTATTCTTACCTATGCACCAGGGACAGTAAGGCATCAAGTGGAAG
AATCTCTATCACTGCATTGTGTGTCTGATGGAATCCCTAAGCCAAATATCAAATGGACTATGCCAAGT
GGTTATGTAGTAGACAGGCCTCAAATTAATGGGAAATACATATTGCATGACATGGCACCTTAGTCAAT
TAAAGAAGCAACAGCTTATGACAGAGGAAACTATATCTGTAAGGCTCAAAATAGTGTTGGTCATACAC
TGATTACTGTTCCAGTAATGATTGTAGCCTACCCTCCCCGAATTACAAATCGTCCACCCAGGAGTATT
GTCACCAGGACAGGGGCAGCCTTTCAGCTCCACTGTGTGGCCTTGGGAGTTCCCAGCCAGAAATCAAC
GTGGGAGATGCCTGACCACTGGGTTCTCTCAACGGCAAGTAAAGAGAGGACACATGGAAGTGAGCAGC
TTCACTTACAAGGTACCCTAGTCATTCAGAATCCCCAAACCTCCGATTCTAGATAATACAAATGCACA
GCAAAGAACCCACTTGGTAGTGATTATGCAGCAACGTATATTCAAGTAATCCTCGAGGGC

| | | | |
|---|---|---|---|
| NOV29o, 248586793 | SEQ ID NO:694 | 473 aa | MW at 52200.5 kD |
| Protein Sequence | | | |

TLEGDKLLLNCSATGEPKPQIMWRTLPSKAVVDQQHRYTFHANGSLTINKVKLLDSGEYVCVARPSGD
DTKMYKLDVVSKPPLINGLYTNRTVIKATAMRHSKKIFDCRAEGTPSPEVMWIMPDNIFLTAPYYGSR
ITVHNGTLEIRNKTRLSDSADFICVARNEGGESVLVQLEVLEMLRRPTFRIAPFNEKIVAQLGKSTAL
NCSVDGNPPPEIIWILPNGTRFSNGPQSYQYLIASNGSFIISKTTREDAGKYRCAARNKVGYIEKLVI
LEIGQKPVILTYAPGTVKGISGESLSLHCVSDGIPKPNIKWTMPSGYVVDRPQINGKYILHDNGTLVI
KEATAYDRGNYICKAQNSVGHTLITVPVMIVAYPPRITNRPPRSIVTRTGAAFQLHCVALGVPKPEIT
WEMPDHSLLSTASKERTHGSEQLHLQGTLVIQNPQTSDSGIYKCTAKNPLGSDYAATYIQVILEG

| | | |
|---|---|---|
| NOV29p, 248586820 | SEQ ID NO:695 | 1420 bP |
| DNA Sequence | ORF Start: at 2 | ORF Stop: end of Sequence |

CACCCTCGAGGGGGACAAATTACTACTGAACTGCTCAGCCACTGGGGAGCCCAAACCCCAAATAATGT
ACCATCAACAAAGTGAAACTGCTCGATTCTGGAGAGTACGTATGTGTAGCCCGAAATCCCAGTGGGGA
GAACTGTTATTAAAGCCACAGCTGTGAGACATTCCAAAAAACACTTTGACTGCAGAGCTGAAGGGACA
CCATCTCCTGAGTCATGTGGATCATGCCAGACATATTTTCCTCACAGCCCCAATAACTATGGAAGCAG
AATCACAGTCCATATATGGAACCTTGGAATTAGGAATGTGAGGCTTTCAGAATTCAAGCCGAACTTTA
TCTGTGTGGCCCGAAATGAAGGTGGAGAGAGCGTGTTGGTAGTACAGTTAGAAGTACTGGAAATGCTG
AGAAGACCGGCATTTAGAAATCCATTTAATGAAAAAATAGTTGCCCAGCTGGGAAAGTCCACAGCATT
GAATTGCTCTGTTGATGGTAACCCACCACCGGAAATAATCTGGATTTTACCAAATGGCACACGATTTT
CGGGAGGATGCAGGAAAATATCGCTGTGCAGCTAGGAATAAAGTTGGCTATATTGAGAAATTAGTCAT
ATTAGAAATTGGCCAGAAGCCAGTTATTCTTACCTATGCACCAGGGACAGTAAAAGGCATCAGTGGAG
AATCTCTATCACTGCATTGTGTGTCTGATGGAATCCCTAAGCCAAATATCAAATGGACTATGCCAAGT
TAAAGAAGCAACAGCTTATGACAGAGGAAACTATATCTGTAAGGCTCAAAATAGTGTTGGTCATACAC
TGATTACTGTTCCAGTAATGATTGTAGCCTACCCTCCCCGATTACAATCGTCCACCCAGGAGTAAATT
GTCACCAGGACAGGGGCAGCCTTTCAGCTCCACTGTGTGGCCTTGGGAGTTCCCAAGCCAGAAATCAC
GTGGGAGATGCCTGACCACTCCCTTCTCTCAACGGCAAGTAAAGAGAGGACACATGGAAGTGAGCAGC
TTCACTTACAAGGTACCCTAGTCATTCAGAATCCCCAAACCTCCGATTCTGGGATATACAAATGCACA

| | | | |
|---|---|---|---|
| NOV29p, 248586820 | SEQ ID NO:696 | 473 aa | MW at 52169.4 kD |
| Protein Sequence | | | |

TLEGDKLLLNCSATGEPKPQIMWRLQSKAVVDQQHRYTFHANGSLTINKVKLLDSGEYVCVARNPSGD
DTKMYKLDVVSKPPLINGLYTNRTVIKATAVAATSKKHFDCPAGTPSPEVMWIMPDNIFLTAPYYGSR
ITVHKNGTLEIRNVRLSDSADFICVARIAIEGGESVLWQLEVLEMLRRPFRNPFNEKIVAQLGKSTAL
NCSVDGNPPPEIIWILPNGTRFSNGPQSYQYLIASNGSFIISKTTREDAGKYRCAARNKVGYIEKLVI
LEIGQKPVILTYAPGTVKGISGESLSLHCVSDGIPKPNIKWTMPSGYVVDRPQINGKYILHDNGTLVI
KEATAYDRGNYICKAQNSVGHTLITVPVMIVAYPPRITNRPPRSIVTRTGAAFQLHCVALGVPKPEIT
WEMPDHSLLSTASKERTHGSEQLHLQGTLVIQNPQTSDSGIYKCTAKNPLGSDYAATYIQVILEG

| | | |
|---|---|---|
| NOV29q, 248586824 | SEQ ID NO:697 | 1420 bP |
| DNA Sequence | ORF Start: at 2 | ORF Stop: end of Sequence |

CACCCTCGAGGGGGACAATTACTACTGAACTGCTCAGCCACTGGGGAGCCCAAAAACACCAATAATGT
GGAGGTTACCATCCAAGGCTGTGGTCGACCAGCAGCATAGGTACACATTTCATGCCAATAAGTCTTTG
ACCATCAACAAAGTGAAACTGCTCGATTCTGGAGAGTACGTATGTGTAGCCCGAATCCCAAGTGGGGA
GAACTGTTATTAAAGCCACAGCTGTGAAGACAAATTCCAACAACTTTGAAACTGCAGAAATGAAGACA
CCATCTCCTGAAGTCATGTGGATCAATGCCAGACAATATTTTCCTCACAGCCCCATACTATGGAGCAG
AATCACAGTCCATAAAAAAATGGAACCTTGGATTAGGAATGTGAGGCTTTCAGATTCAGCCGACTTTA
AGAAGACCGACATTTAGAAAATCCAATTTAATGAAAAAATAGTTGCCCAGCTGGGAGTCCACAGCATT
GATTGCTCTGTTGATGGTAACCCACCAAACCTGAAAAATCTGGATTTTACCAAATGGCACACGATTTT
CCAATGGACCACAAAGTTATCAGTATCTGATAGCAAGCAATGGTTCTTTTATCATTTCTAAACAAACT
CGGGAGGATGCAGGAATATCGCTGTGCAGCTAGGAATAAGTTGGCTAAATAAATTGAGATTAAGTAAT
ATTAGAAATTGGCCAGAAGCCAGTTATTCTTACCTATGCACCAGGGACAAGTAAAGGCATCAGTGGAG
GGTTATGTAGTAGACAGGCCTCAATTAATGGGAATACATATTGACATGACAAATGGCACCTTAGTCAT
TAAAGAAGCAACAGCTTATGACAGAGGAAACTATATATGTAAGGCTCAAAATAGTGTTGGTCATACAC
TGATTACTGTTCCAGTAATGATTGTAGCCTACCCTCCCCGAAATTACAATCGTCCACCCAGGAGTATT
GTCACCAGGACAGGGGCAGCCTTTCAGCTCCACTGTGTGGCCTTGGGAGTTCCCAAAGCCAGAATCAC
GTGGGAGATGTCTGACCACTCCCTTCTCTCAACGGCAAGTAAAGAGAGGACACATGGAAGTGAGCAGC
GCAAAGAACCCACTTGGTAGTGATTATGCAGCAACGTATATTCAAGTAATCCTCGAGGGC

| | | | |
|---|---|---|---|
| NOV29q, 248586824 | SEQ ID NO:698 | 473 aa | MW at 52198.4 kD |
| Protein Sequence | | | |

TLEGDKLLLNCSATGEPKHQIMWRLPSKAVVDQQHRYTFHANGSLTINKVKLLDSGEYVCVARNPSGD
ITVHKNGTLEIRNVRLSDSADFICVARNEGGESVLVVQLEVLEMLRRPTFRNPFNEKIVAQLGKSTAL
INCSVDGNPPPEIIWILPNGTRFSNGPQSYQYLISNGSFIISKTTREDAGKYRCAARNKVGYIEKLVI
LEIGQKPVILTYAPGTVKGISGESLSLHCVSDGIPKPNIKWTMPSGYVVDRPQINGKYILHDNGTLVI
KEATAYDRGNYICKAQNSVGHTLITVPVMIVAYPPRITNRPPRSIVTRTGAAFQLHCVALGVPKPEIT
WEMPDHSLLSTASKERTHGSEQLHLQGTLVIQNPQTSDSGIYKCTAKNPLGSDYAATYIQVILEG

| | | |
|---|---|---|
| NOV29r, 247679817 | SEQ ID NO:699 | 635 bP |
| DNA Sequence | ORF Start: at 3 | ORF Stop: end of Sequence |

AGCTCCGCGGCCGCCCCCTTCACCCTCGAGTGTCCTCGCCGCTGTGCCCTGTTATATGCACCCTCGAG
TGTCCTCGCCGCTGTGCCTGTTATATGCCTACGGAGGTACACTGCACATTTCGGTACCTGACTTCCAT
CCCAGACAGCATCCCGCCCAATGTGGAACGCATCAATTTAGGATACAACAGCTTGGTTAGATTGATGG
CCTGACAAGACCTTCTCAGATTTGCAAAGGCCTTGCAAGGTCTTAAATGAAGCTATAACAAAGTCAAA
ACTTCAGAAAGATACTTTTTATGGCCTCAGGAGCTTGACACGATTGCACATGGACCACAACAATATTG
AGTTTATACCCAAGAAAGGTTTTTGAAAAGGGCTCAACTTTCTCCGCCTGGTGCACTTGGAGGATCAG
CTCACTAAGCTCCACCCAGATACAAATTTGTCTCTTTGAGCTACCTCCAGATATTTAATCTCTTTCAT
TAAGTTCCTATACTTGTCTGATAACTTCCTGACCTCCCTCCCTCAAGAGATGGTCTCCTATATGCCTC
TCGAGGGCAAGGGTGGGCGCGCC

| | | | |
|---|---|---|---|
| NOV29r, 247679817 | SEQ ID NO:700 | 211 aa | MW at 24064.7 kD |
| Protein Sequence | | | |

APRPPPSPSSVLAAVPVICTLEPPACACYMPTEKAACTFRYLTSIPDSIPPNVERINLGYNSLVRLME
TDFSGLTKLELLMLHSNGIHTIPDKTFSDLQALQVLKMSYNKVRKLQKDTFYGLRSLTRLHMDHNNIE
FINPEVFDGLNFLRLVHLEGNQLTKLHPDTFVSLSYLQIFKISFIKFLYLSDNFLTSLPQEMVSYMPL
EGKGGRA

| | | |
|---|---|---|
| NOV29s, 248210264 | SEQ ID NO:701 | 646 bP |
| DNA Sequence | ORF Start: at 2 | ORF Stop: end of Sequence |

AACCCTCGAGATGAAGGTAAAAGGCAGAGGAATCACCTGCTTGCTGGTCTCCTTTGCTGTGATCTGCC
TGGTCGCCACCCCTGGGGGCAAGGCCTGTCCTCGCCGCTGTGCCTGTTATATGCCTACGGAGGTACAC
TGCACATTTCGGTACCTGACTTCCATCCCAGACAGCATCCCGCCCA1ATGTGGAACGCATCATTTAGG
ATACAACAGCTTGGTTAGATTGATGGAAACAGATTTTTCTGGCCTGACCAAACTGGAGTTACTCATGC
TTCACAGCAATGGCATTCACACAATCCCTGACAAGACCTTCTCAGATTTGCAGGCCTTGcAGGTCTTA
AAAATGAGCTATAACAAAGTCCGAAAACTTCAGAAAGATACTTTTTATGGCCTCAGGAGCTTGACACG
ATTGCACATGGACCACAACAATATTGAGTTTATAAACCCAGAGGTTTTTTATGGGCTCAACTTTCTCC
GCCTGGTGCACTTGGAAGGAAATCAGCTCACTAAGCTCCACCCAGATACATTTGTCTCTTTGAGCTAC
CTCCAGATATTTAAAATCTCTTTCATTAAGTTCCTATACTTGTCTGATAACTTCCTGACCTCCCTCCC
TCAAGAGATGGTCTCCTATATGCCTCTCGAGGGC

| | | | |
|---|---|---|---|
| NOV29s, 248210264 | SEQ ID NO:702 | 215 aa | MW at 24618.6 kD |
| Protein Sequence | | | |

ATLENKVKGRGITCLLVSFAVICLVATPGGKACPRRCACYMPEVHCTFRYLTSIPDSIPPNVERINLG
YNSLVRLMETDFSGLTKLELLMLHSNGIHTIPDKTFSDLQALQVLKMSYNKVRKLQKDTFYGLRSLTR
LHMDHNNIEFINPEVFYGLNFLRLVHLEGNQLTKLHPDTFVSLSYLQTFKISFIKFLYLSDNFLTSLP
QEMVSYMPLEG

| | | |
|---|---|---|
| NOV29t, 248210551 | SEQ ID NO:703 | 646 bP |
| DNA Sequence | ORF Start: at 2 | ORF Stop: end of Sequence |

CACCCTCGAGATGAAGGTAAAAGGCAGAGGAATCACCTGCTTGCTGGTCTCCTTTGCTGTGATCTGCC
TGGTCGCCACCCCTGGGGGCAAGGCCTGTCCTCGCCGCTGTGCCTGTTATATGCCTACGGAGGTACAC
TGCACATTTCGGTACCTGACTTCCATCCCAGACAGCATCCCGCCCAATGTGGAACGCATCAATTTAGG
ATACAACAGCTTGGTTAGATTGATGGAAACAGATTTTTCTGGCCTGACCAAACTGGAGTTACTCATGC
TTCACAGCAATGGCATTCACACAATCCCTGACAAGACCTTCTCAGATTTGCAGGCCTTGCAGGTCTTA
AATGAGCTATAAACAAAAGTCCGAAACTTCAGAAAAGATACTTTTTATGGCCTCAGGAGCTTGACACG
ATTGCACATGGACCACAACAATATTGAGTTTATAAACCCAGAGGTTTTTTATGGGCTCAACTTTCTCC
GCCTGGTGCACTTGGAAGGAAATCAGCTCACTAAGCTCCACCCAGATACATTTGTCTCTTTGAGCTAC
CTCCAGATATTTAAAATCTCTTTCATTAAGTTCCTATACTTGTCTGATAACTTCCTGACCTCCCTCCC
TCAAGAGATGGTCTCCTATATGCCTCTCGAGGGC

| | | | |
|---|---|---|---|
| NOV29t, 248210551 | SEQ ID NO:704 | 215 aa | MW at 24618.6 kD |
| Protein Sequence | | | |

TLEMKVKGRGITCLLVSFAVICLVATPGGKACPRRCACYMPTEVHCTFRYLTSIPDSIPPNVERINLG
YNSLVRLMETDFSGLTKLELLMLHSNGIHTIPDKTFSDLQALQVLKMSYNKVRKLQKDTFYGLRSLTR
LHMDHNNEFINPEVFYGLIAFLRLVHLEGNQLTKLHPDTFVSLSYLQIFKISFIKFLYLSDNFLTSLP
QEMVSYMPLEG

| | | |
|---|---|---|
| NOV29u, 248210824 | SEQ ID NO:705 | 646 bP |
| DNA Sequence | ORF Start: at 2 | ORF Stop: end of Sequence |

CACCCTCGAGATGAAGGTAAAAGGCAGAGGAATCACCTGCTTGCTGGTCTCCTTTGCTGTGATCTGCC
TGGTCGCCACCCCTGGGGGCAAGGCCTGTCCTCGCCGCTGTGCCTGTTATATGCCTACGGAGGTACAC
TGCACATTTCGGTACCTGACTTCCATCCCAGACAGCATCCCGCCCAATGTGGAACGCATCAATTTAGG
TTCACAGCAATGGCATTCACACAATCCCTGACAAGACCTTCTCAGATTTGCAGGCCTTGCAGGTCTTA
AAAATGAGCTATAACAAAGTCCGAAAACTTCAGAAAGATACTTTTTATGGCCTCAGGAGCTTGACACG
ATTGCACATGGACCACAACAATATTGAGTTTATAAACCCAGAGGTTTTTTATGGGCTCAACTTTCTCC
GCCTGGTGCACTTGGAAGGAAATCAGCTCACTAAGCTCCACCCAGATACATTTGTCTCTTTGAGCTAC
CTCCAGATATTTAATCTCTTTCATTAGTTCCTATACTTGTCTGAT1AAACTTCCTGACCTCCCTCCC
TCAAGAGATGGTCTCCTATATGCCTCTCGAGGGC

| | | | |
|---|---|---|---|
| NOV29u, 248210824 | SEQ ID NO:706 | 215 aa | MW at 24618.6 kD |
| Protein Sequence | | | |

TLEMKVKGRGITCLLVSFAVICLVATPGGKACPRRCACYMPTEVHCTFRYLTSIPDSIPPNVERINLG
YNSLVRLMETDFSGLTKLELLMLHSNGIHTIPDKTFSDLQALQVLKMSYNKVRKLQKDTFYGLRSLTR
LHMDHNNIEFINPEVFYGLNFLRLVHLEGNQLTKLHPDTFVSLSYLQIFKISFIKFLYLSDNFLTSLP
QEMVSYMPLEG

| | | |
|---|---|---|
| NOV29v, 248679541 | SEQ ID NO:707 | 646 bP |
| DNA Sequence | ORF Start: at 2 | ORF Stop: end of Sequence |

CACCCTCGAGATGAAGGTAAAAGGCAGAGGAATCACCTGCTTGCTGGTCTCCTTTGCTGTGATCTGCC
TGGTCGCCACCCCTGGGGGCAAGGCCTGTCCTCGCCGCTGTGCCTGTTATATGCCTACGGAGGTACAC
TGCACATTTCGGTACCTGACTTCCATCCCAGACAGCATCCCGCCCAATGTGGAACGCATCAATTTAGG
ATACAACAGCTTGGTTAGATTGATGGAAACAGATTTTTCTGGCCTGACCAAACTGGAGTTACTCATGC
TTCACAGCAATGGCATTCACACAATCCCTGACAAGACCTTCTCAGATTTGCAGGCCTTGCAGGTCTTA
AAAATGAGCTATAACAAAGTCCGAAAACTTCAGAAAGATACTTTTTATGGCCTCAGGAGCTTGACACG
ATTGCACATGGACCACAACAATATTGAGTTTATAAACCCAGAGGTTTTTTATGGGCTCAACTTTCTCC
GCCTGGTGCACTTGGAAGGAAATCAGCTCACTAAGCTCCACCCAGATACATTTGTCTCTTTGAGCTAC
CTCCAGATATTTAAAATCTCTTTCATTAAGTTCCTATACTTGTCTGATAACTTCCTGACCTCCCTCCC
TCAAGAGATGGTCTCCTATATGCCTCTCGAGGA

| | | | |
|---|---|---|---|
| NOV29v, 248679541 | SEQ ID NO:708 | 215 aa | MW at 24618.6 kD |
| Protein Sequence | | | |

TLEMKVKGRGITCLLVSFAVICLVATPGGKACPRRCACYMPTEVHCTFRYLTSIPDSIPPNVERINLG
YNSLVRLMETDFSGLTKLELLMLHSNGIHTIPDKTFSDLQALQVLKMSYNKVRKLQKDTFYGLRSLTR
LHMDHNNIEFINPEVFYGLNFLRLVHLEGNQLTKLHPDTFVSLSYLQIFKISFIKFLYLSDNFLTSLP
QEMVSYMPLEG

| | | |
|---|---|---|
| NOV29w, 247679454 | SEQ ID NO:709 | 2011 bP |
| DNA Sequence | ORF Start: at 2 | ORF Stop: end of Sequence |

AGGCTCCGCGGCCGCCCCCTTCACCCTCGAGGGGGACAAATTACTACTGAACTGCTCAGCCACTGGGG
AGCCCAAACCCCAAATAATGTGGAGGTTACCATCCAAGGCTGTGGTCGACCAGCAGCATAGAGTGGGC
AGCTGGATCCACGTCTACCCTAATGGATCCCTGTTTATTGGATCAGTAACAGAAAAAGACAGTGGTGT
CTACTTGTGTGTGGCAAGAAACAAAATGGGGGATGATCTGATACTGATGCATGTTAGCCTAGAACTGA
AACCTGCCAAAATTGACCACAAGCAGTATTTTAGAAAGCAAGTGCTCCATGGGAAAGATTTCCAAGTA
GATTGCAAGCTTCCGGCTCCCCAGTGCCAGAGATATCTTGGAGTTTGCCTGATGGAACCATGATCAAA
TATACTTCAACAAAGTTGGGGTAGCGGAGGAAGGAGATTATACTTGCTATGCCCAGAACACCCTAGGG
AAAGATGAAATGAAGGTCCACTTAACAGTTATAACAGCTGCTCCCCGGATAAGGCAGAGTAACAAAAC
AATGGGTCTTTGACCATCAACAAAGTGAAACTGCTCGATTCTGGAGAGTACGTATGTGTAGCCCGAAA
TGTATACAAATAGAACTGTTATTAAAGCCACAGCTGTGAGACATTCCAAAAAACACTTTGACTGCAGA
GCTGAAGGGACACCATCTCCTGAAGTCATGTGGATCATGCCAGACAATATTTTCCTCACAGCCCCATA
CTATGGAAGCAGAATCACAGTCCATAAAAATGGAACCTTGGAAATTAGGTATGTGAGGCTTTCAGATT
GTCCACAGCATTGAATTGCTCTGTTGATGGTAACCCACCACCTGAAATAATCTGGATTTTACCAAATG
GCACACGATTTTCCAATGGAACCACAAGTTATCAGTATCTGAATAGCAGCAATGGTTCTTTTATCATT
TCTAAAACAACTCGGGAGGATGCAGGAAAATATCGCTGTGCAGCTAGGAATAAAGTTGGCTATATTGA
GAAATTAGTCATATTAGAAATTGGCCAGAAGCCAGTTATTCTTACCTATGCAACCAAGGGACAGTAAG
CATCAGTGGAGAATCTCTATCACTGCATTGTGTGTCTGATGGAATCCCTAAAGCCAAATATCAAATGG
AACTATGCCAAGTGGTTATGTAGTAGACAGGCCTCAAATTAATGGGAATACATATTGCATGACAATGG
ACCTTAGTCATTAAAGAAGCAACAGCTTATGACAGAGGAAACTATAATCTGTAAGGCTCAAAATAGTG
TGGTCATACACTGATTACTGTTCCAGTAATGATTGTAGCCTACCCTCCCCGAATTACAAAATCGTCCA
CCCAGGAGTATTGTCACCAGGACAGGGGCAGCCTTTCAGCTCCACTGTGTGGCCTTGGGAGTTCCCAA
GCCAGAAATCACGTGGGAGATGCCTGACCACTCCCTTCTCTCAACGGCAAGTAAAGAGAGGACACATG
GAAGTGAGCAGCTTCACTTACAAGGTACCCTAGTCATTCAGAATCCCCAAACCTCCGATTCTGGGATA
TACAAATGCACAGCACTCGAGGGCAAGGGTGGGCGCGCC

| | | | |
|---|---|---|---|
| NOV29w, 247679454 | SEQ ID NO:710 | 670 aa | MW at 74046.2 kD |
| Protein Sequence | | | |

GSAAAPFTLEGDKLLLNCSATGEPKPQIMWRLPSKAVVDQQHRVGSWIHVYPNGSLFIGSVTEKDSGV
NAMQADDSGHRTRRYTLFNNGTLYFNKVGVAEEGDYTCYAQNTLGKDENKVHLTVITAAPRIRQSNKT
NKRIKAGDTAVLDCEVTGDPKPKIFWLLPSNDMISFSIDRYTFHANGSLTINKVKLLDSGEYVCVARN
PSGDDTKMYKLDVVSKPPLINGLYTNRTVIKATAVRHSKKHFDCRAEGTPSPEVMWIMPDNIFLTAPY
YGSRITVHKNGTLEIRYVRLSDSADFICVARNEGGESVLVVQLEVLEMLRRPTFRNPFNEKIVAQLGK
STALNCSVDGNPPPEIIWILPNGTRFSNGPQSYQYLIASNGSFIISKTTREDAGKYRCAARNKVGYIE
IKLVILEIGQKPVILTYAPGTVKGISGESLSLHCVSDGIPKPNKWTMPSGYVVDRPQINGKYILHDNG
TLVIKEATAYDRGNYICKAQNSVGHTLITVPVMIVAYPPRITNRPPRSIVTRTGAAFQLHCVALGVPK
PEITWEMPDHSLLSTASKERTHGSEQLHLQGTLVIQNPQTSDSGIYKCTMAEGKGGRA

| | | |
|---|---|---|
| NOV29x, 314361407 | SEQ ID NO:711 | 2902 bP |
| DNA Sequence | ORF Start: at 2 | ORF Stop: end of Sequence |

CACCCTCGAGAACTCAGATGCCTTTCTTCCCTGTGAAGCTGTTGGAAATCCCCTGCCCACCATTCATT
GGACCAGAGTCCCATCAGGACTTGATTTATCTAAAGAGGAACAGAATAGCAGGGTCCAGGTTCTCCCC
AATGGTACCCTGTCCATCCAGAGGGTGGAAATTCAGGACCGCGGACAGTACTTGTGTTCCGCATCCAA
TCTGTTTGGCACAGACCACCTTCATGTCACCTTGTCTGTGGTTTCCTATCCTCCCAGGATCCTGGAGA
GACGTAACCAAGAGATCACAGTTCATTCCGGAAGCACTGTGGAACTGAAGTGCAGAGCAGAAGGTAGG
CCAAGCCCTACAGTTACCTGGATTCTTGCAAACCAAACAGTTGTCTCAGAATCATCCCAGGGAAGTAG
GCAGGCTGTGGTGACGGTTGACGGAACATTGGTCCTCCACAATCTCAGTATTTATGACCGTGGCTTTT
ACAAATGTGTGGCCAGCAACCCAGGTGGCCAGGATTCACTGCTGGTTAAAATACAAGTCATTGCAGCA
CCACCTGTTAATTCTAAAGAGCAAGGAGGCAAGTCATTGTAGGCACTTGGGGTGAAAGTTTAACTGCC
CTGTACTGCAAAAGGAACTCCTCAGCCCAGCGTTTACTGGGTCCTCTCTGATGGCACTGAAGTGAAAC
CATTACAGTTTACCAATTCCAAAGTTGTTCTTATTTTCAAATGGGACTTTGTATATAAGAACCTAGCC
TCTTCAGACAGGGGCACTTATGAATGCATTGCTACCAGTTCCACTGGTTCGGAGCGAGAGTAGTAAAT
ATTTTGGGGACAATTACTACTGAAACTGCTCAAGCCACTGGGGAGCCCAAACCCCAAATATGTGGAGG
TTACCATCCAAGGCTGTGGTCGACCAGCAGCATAGAGTGGGCAGCTGGATCCACGTCTAACCCTATGG
TGGGGGATGATCTGATACTGATGCATGTTAAGCCTAAGACTGACCTGCCAAATTGAACCAAACAGCAG
TATTTTAGAAAGCAAGTGCTCCATGGGAAAGAATTTCCAAGTAGATTGCAAGCTTCCGGCTCCCCAGT
GCCACAGGACTAGGAGATATACCCTTTTCAACAATGGAACTTTATACTTCAACAAAGTTGGGGTAGCG
GAGGAAGGAGATTATACTTGCTATGCCCAGAACAACCCTAGGGAAGAATGATGAAAGGTCCAACTTAC
AGTTATAACAGCTGCTCCCCGGATAAGGCAGAGTAACAAAAACCAACAAAGAGAATCAGCTGGAGACA
CAGCTGTCCTTGACTGTGAGGTCACTGGGGATCCCAACCAAAATATTTTGGTTGCTGCCTTCCATAAT
GACATGATTTCCTTCTCCATTGATAGGTACACATTTCATGCCATGGGTCTTTGACCATCAAACAAAGT
GAAACTGCTCGATTCTGGAGAGTACGTATGTGTAGCCCGAAATCCCAGTGGGGATGACACCAAAATGT
ACAAACTGGATGTGGTCTCTAAACCTCCATTAATCAATGGTCTGTATACAAATAGAACTGTTATTAAA
CATGTGGATCATGCCAGACAATATTTTCCTCACAGCCCCATACTATGGAAGCAGAATCACAGTCCATA
AAAATGGAACCTTGGAAATTAGGAATGTGAGGCTTTCAGATTCAGCCGACTTTATCTGTGTGGCCCGA
AATGAAGGTGGAGAGAGCGTGTTGGTAGTACAGTTAGAAGTACTGAAAATGCTGAGAAGACCGACATT
TAGAAATCCATTTAATGAAAAATAGTTGCCCAGCTGGGAAAGTCCACAGCATTGAAATTGCTCTGTTG
AAAATATCGCTGTGCAGCTAGGAATAAAGTTGGCTATATTGAGAAATTAGTCATATTAGAAATTGGCC
AGAAGCCAGTTATTCTTACCTATGCACCAGGGACAGTAAAAGGCATCAGTGGAGATCTCTATCAACTG
CATTGTGTGTCTGATGGAATCCCTAAGCCAAATATCAAATGGACTATGCCAGTGGTTATGTAGTAAGA
CAGGCCTCAAATTAATGGGAAATACATATTGCATGACAATGGCACCTTAGTCATTAAAGAAGCAACAG
CTTATGACAGAGGAAACTATATCTGTAAGGCTCAAAATAGTGTTGGTCATACACTGATTACTGTTCCA
GTAATGATTGTAGCCTACCCTCCCCGAATTACAAATCGTCCACCCAGGAGTATTGTCACCAGGACAGG
GGCAGCCTTTCAGCTCCACTGTGTGGCCTTGGGAGTTCCCAAGCCAGAAATCACGTGGGAGATGCCTG
ACCACTCCCTTCTCTCAACGGCAAGTAAAGAGAGGACACATGGAAGTGAGCAGCTTCACTTACAAGGT
ACCCTAGTCATTCAGAATCCCCAAACCTCCGATTCTGGGATATACAAATGCACAGCAAAGAACCCACT
TGGTAGTGATTATGCAGCAACGTATATTCAAGTAATCCTCGAGGGC

| | | | |
|---|---|---|---|
| NOV29x, 314361407 | SEQ ID NO:712 | 967 aa | MW at 106911.3 kD |
| Protein Sequence | | | |

TLENSDAFLPCEAVGNPLPTIHWTRVPSGLDLSKRKQNSRVQVLPNGTLSIQRVEIQDRGQYLCSASN
QAVVTVDGTLVLHNLSIYDRGFYKCVASNPGGQDSLLVKIQVIAAPPVILEQRRQVIVGTWGESLKLP
CTAKGTPQPSVYWVLSDGTEVKPLQFTNSKLFLFSNGTLYIRNLASSDRGTYECIATSSTGSERRVVM
LTMEERVTSPRIEAASQKRTEVNFGDKLLLNCSATGEPKPQIMWRLPSKAVVDQQHRVGSWIHVYPNG
SLFIGSVTEKDSGVYLCVARNKMGDDLILMHVSLRLKPAKIDHKQYFRKQVLHGKDFQVDCKASGSPV
PEISWSLPDGTMINNAMQADDSGHRTRRYTLFNNGTLYFNKVGVAEEGDYTCYAQNTLGKDEMKVHLT
VITAAPRIRQSNKTNKRIKAGDTAVLDCEVTGDPKPKIFWLLPSNDMISFSIDRYTFHANGSLTINKV
KLLDSGEYVCVARNPSGDDTAMYKLDVVSKPPLINGLYTNRTVIKATAVRHSKKHFDCRAEGTPSPEV
MWIMPDNIFLTAPYYGSRITVHKNGTLEIRAVRLSDSADFICVARNEGGESVLVVQLEVLEMLRRPTF
RNPFNEKIVAQLGKSTALNCSVDGNPPPEIIWILPNGTRFSNGPQSYQYLIASNGSFIISKTTREDAG
KYRCAARNKVGYIEKLVILEIGQKPVILTYAPGTVKGISGESLSLHCVSDGIPKPNIKWTMPSGYVVD
RPQINGKYILHDNGTLVIKEATAYDRGNYICKAQNSVGHTLITVPVMIVAYPPRITNRPPRSIVTRTG
AAFQLHCVALGVPKPEITWEMPDHSLLSTASKERTHGSEQLHLQGTLVIQNPQTSDSGIYKCTAKAPL
GSDYAATYIQVILEG

| | | |
|---|---|---|
| NOV29y, 317803448 | SEQ ID NO:713 | 2902 bP |
| DNA Sequence | ORF Start: at 2 | ORF Stop: end of Sequence |

CACCAGATCTAACTCAGATGCCTTTCTTCCCTGTGAAGCTGTTGGAAATCCCCTGCCCACCATTCATT
GGACCAGAGTCCCATCAGGACTTGATTTATCTAAGAGGAAACAGAATAGCAGGGTCCAGGTTCTCCCC
AATGGTACCCTGTCCATCCAGAGGGTGGAAATTCAGGACCGCGGACAGTACTTGTGTTCCGCATCCAA
TCTGTTTGGCACAGACCACCTTCATGTCACCTTGTCTGTGGTTTCCTATCCTCCCAGGATCCTGGAGA
GACGTACCAAGAGATCACAGTTCATTCCGGAGCACTGTGGAAACTGAAGTGCAGAAGCAGAGGTAAGG
GCAGGCTGTGGTGACGGTTGACGGAACATTGGTCCTCCACAAATCTCAGTATTTATGACCGTGATTTT
ACAAATGTGTGGCCAGCAACCCAGGTGGCCAGGATTCACTGCTGGTTAAATACAAAGTCATTGCAGCA
TCTTCAGACAGGGGCACTTATGAATGCATTGCTACCAGTTCCACTGGTTCAAGCGAAGAGTAGTAAAT
GCTTACAATGGAAGAGCGAGTGACCAGCCCCAAGGATAGAAGCTGCAATCCCAGAGGAAACTGAGTGA
ATTTTGGGGACAAATTACTACTGAACTGCTCAGCCACTGGGGAGCCCAAACCCCAAATAATGTGGAGG
TTACCATCCAAGGCTGTGGTCGACCAGCAGCATAGAGTGGGCAGCTGGATCCACGTCTACCCTAATGG
TATTTTAGAAAGCAAAAGTGCTCCATGGGAAAGATTTCCAAGTAGATTGCAGCTTCCGGCTCCCCAGT
GAGGAAGGAAGAAATTATACTTGCTATGCCCAAAAGAACACCCTAGGGAAGATGTGAGGTCCACTTAC
AGTTATAACAGCTGCTCCCCGGATAAGGCAGAGTAACAAAACCAACAAGAGAATCAAAGCTGGAGACA
GACATGATTTCCTTCTCCATTGATAGGTACACAAAATTTCAATGCCATGGGTCTTTGACCATCACAGT
GAAACTGCTCGATTCTGGAGAGTACGTATGTGTAGCCCGAAAATCCCAGTGGGGATGACACCAAATGT
GCCACAGCTGTGAGACATTCCMACACTTTGACTGCAGAGCTGAAAAGGGAACAAACCATCTCCTGAGT
AAAATGGAACCTTGGAAATTAGGAATGTGAGGCTTTCAGATTCAGCCGACTTTATCTGTGTGGCCCGA
ATGGTAACCCACCACCTGAATAATCTGGATTTTACCATACACAACGATTTTCCAATGGAACCAAACAA
AGTTATCAGTATCTGATAGCAAAGCAAATGGTTCTTTTAATCAAAATTTCTAACACTCGGGACATGCA
AGAAGCCAGTTATTCTTACCTAATGCAACCAAGGGACAGTAAGGCATCAGTGGAGATCTCTATCACTG
CAGGCCTCAAATTAATGGGAAATACATATTGCATGACAATGGCACCTTAGTCATTAAAGAAGCAACAG
CTTAATGACAGAGGAAACTATATCTGTAAGGCTCAAATAGTGTTGGTCATACACTGATTACTGTTCCA
GTAATGATTGTAGCCTACCCTCCCCGAATTACAAATCGTCCACCCAGGAGTATTGTCACCAGGACAGG
GGCAGCCTTTCAGCTCCACTGTGTGGCCTTGGGAGTTCCCAAAGCCAGAAACACGTGGGAGATGCCTG
ACCACTCCCTTCTCTCAACGGCAAGTAAGAGAGGACACATAAGTGAGCAGCTTCACTTACGAATAAAT
ACCCTAGTCATTCAGAATCCCCAAACCTCCGATTCTGGGAATATAAATGCAAACAGCAAGAACCCACT
TGGTAGTGATTATGCAGCAACGTATATTCAAGTATCCTCGAGGGC

| | | | |
|---|---|---|---|
| NOV29y, 317803448 | SEQ ID NO:714 | 967 aa | MW at 106912.3 kD |
| Protein Sequence | | | |

TRSNSDAFLPCEAVGNPLPTIHWTRVPSGLDLSKRKQNSRVQVLPNGTLSIQRAEIQDRGQYLCSASN
LFGTDHLHTLSVVSYPPRILERRATKEITVHSGSTVELKCPGRPSPTVTVVIAAAAQTVVSESSQGSR
QAVATVDGTLVLHNLSIYDRGFYKCVASNPGGQDSLLVKIQVIAAPPVILEQRRQVIVGTWGESLKLP
CTAKGTPQPSVYWVLSDGTEVKPLQFTNSKLFLFSNGTLYIPNAASSDRGTYECIATSSTGSERRVVM
LTMEERVTSPRIEAAASQKATEVNFGDKLLLNCSATGEPKPQIMIPSAWDQQHRVGSWIHVYAAYPNG
SLFIGSVTEKDSGVYLCVARNKMGDDLILMHVSLRLKPAKIDHKQYFRKQVLHGKDFQVDCKASGSPV
PEISWSLPDGTMINNAMQADDSGHRTRRYTLFNNGTLYFNKVGVAEEGDYTCYAQNTLGKDEMKVHLT
VITAAPRTRQSNKTNKRIKAGDTAVLDCEVTGDPKPKIFWLLPSNDMISFSIDRYTFHANGSLTINKV
MWIMPDNIFLTAPYYGSRITVHKNGTLEIRNVRLSDSADFICVARNEGGESVLVVQLEVLEMLRRPTF
RNPFNEKIVAQLGKSTALNCSVDGNPPPEIIWILPNGTRFSNGPQSYQYLIASNGSFIISKTTREDAG
KYRCAARNKVGYIEKLVILEIGQKPVILTYAPGTVKGISGESLSLHCVSDGIPKPNIKWTMPSGYVVD
RPQINGKYILHDNGTLVIKEATAYDRGNYICKAQNSVVGHTLITVPVMIVAYPPRITAPPRSIVTRTG
AAFQLHCVALGVPKPEITWEMPDHSLLSTASKERTHGSEQLHLQGTLVIQNPQTSDSGIYKCTAKNPL
GSDYAATYIQVILEG

| | | |
|---|---|---|
| NOV29z, CG55776-02 | SEQ ID NO:715 | 7831 bP |
| DNA Sequence | ORF Start: ATG at 6 | ORF Stop: TGA at 7812 |

TCAGGATGAAGGTAAAAGGCAGAGGAATCACCTGCTTGCTGGTCTCCTTTGCTGTGATCTGCCTGGTC
GCCACCCCTGGGGGCAAGGCCTGTCCTCGCCGCTGTGCCTGTTATATGCCTACGGAGGTACACTGCAC
ACAGCTTGGTTAGATTGATGGAAACAGATTTTTCTGGCCTGACCAAACTGGAGTTACTCATGCTTCAC
AGCAATGGCATTCACACAATCCCTGACAAAGACCTTCTCAGATTTGCAGGCCTTGCAATGAGACTGAT
GGTCTTAAAAATGAGCTATAATAAAGTCCGAAAAACTTCAGAAGATACTTTTTATGGCCTCAGGAGCT
TGACACGATTGCACATGGACCACAACAATATTGAGTTTATAAACCCAGAGGTTTTTTATGGGCTCAAC
TTTCTCCGCCTGGTGCACTTGGAAGGAAATCAGCTCACTAAGCTCCACCCAGATACATTTGTCTCTTT
GAGCTACCTCCAGATATTTAAAATCTCTTTCATTAAGTTCCTATACTTGTCTGATAACTTCCTGACCT
CCCTCCCTCAAGAGATGGTCTCCTATATGCCTGACCTAGACAAAGCCTTTACCTGCATGGACCCATGG
ACCTGTGATTGCCATTTAAAGTGGTTGTCTGACTGGATACAGGAGAAGCCAGGTATCTATATTGTTTT
ACCAGATGTAATAATGCAAAAAGATAGAAGTCCCTCTAGTGCTCAAAGCAAGTGTCCAACTTTAATGA
ACCCTAGGACTTCTAAAGGCAAGCCGTTAGCTATGGTCTCAGCTGCAGCTTTCCAGTGTGCCAAGCCA
ACCATTGACTCATCCCTGAAATCAAAGAGCCTGACTATTCTGGAAGACAGTAGTTCTGCTTTCATCTC
TACATCGTGCTAAATACTTCATTTTCAACATTTTTGGTGTGCAACATAGATTACGGTCACATTCAGCC
AGTGTGGCAAATTTTGGCTTTGTACAGTGATTCTCCTCTGATACTAGAAAGGAGCCACTTGCTTAGTG
GAGGCAAAGATCTCAAGAAGCAGATCCCTCTTGGTTATGCAGACCTTTCCTTGCAAGCTGAAACAGAC
TGCCACCACATTCAGTACATTACAGATCCAGTACTCCAGTGATGCTCAAATCACTTTACCAAGAGCAG
GTCTTGGTAGGTGGACCGTTGGCCTGAACTGCCCAGGCCAGGAGACCCCACCCCAACACGTGGAATTG
GCTTCTAGCTGATGGAAGTAGTGAGAGCCCCTTATGTCAGTGAGGATGGACAATCCTAAATAAGAACA
AAAGTGGAAAATTGGAACTCCAGATGGCTGATAGTTTTGACACAGGCGTATATCACTGTATAAGCAGC
ATTATGATGATGCAGATATTCTCACCTATAGGATACTGTGGTAAGAAACCTTTGGTCGAGCCTAATCA
GGAAAATGGGATTCATCACACAGTTTTCATTGGTGAAACACTTGATCTTCCATGCCATTCTACTGGTA
AAAGTTCTAAACAATGGCACATTAAGAATATTACAGGTCACCCCGAAAGACCAAGGTTATTATCGCTG
TGTGGCAGCCAACCCATCAGGGGTTGATTTTTTGATTTTCCAAGTTTCAGTCA7AGATGAGGACAAAA
GGCCCTTGGAGCATGATGGAGAAACAGAGGGATCTGGACTTGATGAGTCCAATCCTATTGCTCATCTT
AAGGAGCCACCAGGTGCACAACTCCGTACATCTGCTCTGATGGAGGCTGAGGTTGGAAAACACACCTC
AAGCACAAGTAAGAGGCACAACTATCGGGAATTAACACTCCAGCGACGTGGAGATTCAACACATCGAC
GTTTTAGGGAGAATAGGAGGCATTTCCCTCCCTCTGCTAGGAGAATTGACCCACAACATTGGGCGGCA
CTGTTGGAGAAAGCTAAAAAGAATGCTATGCCAGACAAGCGAGAAAATACCACAGTGAGCCCACCCCC
AGTGGTCACCCAACTCCCAAACATACCTGGTGAAGAAGACGATTCCTCAGGCATGCTCGCTCTACATG
AGGAATTTATGGTCCCGGCCACTAAAGCTTTGAACCTTCCAGCAAGGACAGTGACTGCTGACTCCAGA
ACAATATCTGATAGTCCTATGACAAACATAAATTATGGCACAGAATTCTCTCCTGTTGTGAATTCACA
AATACTACCACCTGAAGAACCCACAGATTTCAAACTGTCTACTGCTATTAAAACTACAGCCATGTCAA
AGAATATAAACCCAACCATGTCAAGCCAAATACAAGGCACAACCAATCAACATTCATCCACTGTCTTT
AAGTAGACCCCCAATAACAGTAAGGACTATGATCAAAGATGTCAATGTCAAAATGCTTAGTAGCACCA
GAACCCAGGCACAATCACTTCTATTCTCACACTACTCAAATACTTAGCACCTCCACGTTCCCTTCAGA
TCCACACACAGCTGCTCATTCTCAGTTTCCGATCCCTAGAAATAGTACAGTTAACATCCCGCTGTTCA
GACGCTTTGGGAGGCAGAGGAAAATTGGCGGAAGGGGGCGGATTATCAGCCCATATAGAACTCCAGTT
CTGCGACGGCATAGATACAGCATTTTCAGGTCAACAACCAGAGGTTCTTCTGAAAAAAGCACTACTGC
ATTCTCAGCCACAGTGCTCAATGTGACATGTCTGTCCTGTCTTCCCAGGGAGAGGCTCACCACTGCCA
CAGCAGCATTGTCTTTTCCAAGTGCTGCTCCCATCACCTTCCCCAAAGCTGACATTGCTAGAGTCCCA
TCAGAAGAGTCTACAACTCTAGTCCAGAATCCACTATTACTACTTGAGAACAAACCCAGTGTAGAGAA
AACAACACCCACAATAAAATATTTCAGGACTGAAATTTCCCAAGTGACTCCAACTGGTGCAGTCATGA
CATATGCTCCAACATCCATACCCATGGAAAAAACTCACAAAGTAAACGCCAGTTACCCACGTGTGTCT
AGCACCAATGAAGCTAAAAGAGATTCAGTGATTACATCGTCACTTTCAGGTGCTATCACCAAGCCACC
AATGACTATTATAGCCATTACAAGGTTTTCAAGAAAGGAAATTCCCTGGCAAACAGAAACTTTGTATA
ACCATAACCCAAAGGCAGATTAAGGAATCAACATAAAGTTAAAGTTTACAAAAAGCACAGCTGTGATG
CTTCCTAAACATCTCCTGCTTTACCACAAGAGACAAAGTCTCCCCTCGCACCACACTACGACCAAAAC
ACACAATCCTGGAAGTCTTCCAACAAAGAAGGAGCTTCCCTTCCCACCCCTTAACCCTATGCTTCCTA
GTATTATAAGCAAAGACTCAAGTACAAAAAGCATCATATCAACGCAAACAGCAATACCAGCAACAACT
AAGAGAACAGGAGCCTCAAAAGAAGAACAGGACTGACCCAAACATCTCTCCAGACCAGAGTTCTGGCT
TCACTACACCCACTGCTATGACACCTCCTGTTCTAACCACAGCCGAAACTTCAGTCAAGCCCAGTGTC
AACTCTTAATCTGACAGATGTGATTGAGAACTAGCCCAAGCAAGTACTCAAGACTTTGAAGAGCACAA
CACTCAACCATACCACCATTCTTGAGCAGCAGTGCTACTCTAATGCCAGTTCCCATCTCCCCTCCCTT
TACTCAGAGAGCAGTTACTGACAACGTGGCGACTCCCATTTCCGGGCTTATGACAAATACAGTGGTCA
AGCTGCACGAATCCTCAAGGCACAATGCTACCACAGCATTAGTAAGCAGAAGGTTAAAAACATCCCCC
AAGGTTCACCCAATGCCAAGTTCACAATTGGAACCACTCACTTCATCTACTCTAAATCTGTTACATTC
TTGGCTACTACAGGCCTGTCCGAGGCCACCACTCTTGTTTCAGATTGGGAATGGAACAGAGACACAAA
GAAGAGTGACTTTGATAAGAACCAGTTCAAGAAGCAACAACTTCCAAAACTCCTTCCCTTTGACTCTT
CCCATCAGGTATGTCAGGACTTGAATTTAAATCTAAGAGGCAGAAATAGCAAGTCCAGGTTCTCCCCA
ATGGTACCCTGTCCATCCAGAGGGTGGAATTCAGGACCGCGGACAGTACTTGTGTTCCGCATCCAAAT
CTGTTTGGCACAGACCACCTTCATGTCACCTTGTCTGTGGTTTCCTATCCTCCCAGGATCCTGGAGAG
CAGGCTGTGGTGACGGTTGACGGAACATTGGTCCTCCACAATCTCAGTATTTATGACCGTGGCTTTTA
CAAATGTGTGGCCAGCAACCCAGGTGGCCAGGATTCACTGCTGGTTAAAAACAAAGTCATTGCAGCAC
TGTACTGCAAAGGAACTCCTCAAGCCCAAGCGTTTAAACTGGGTCCTCTCTGATGGCACTGAGTGACC
ATTACAGTTTACCATTCCAAGTTGTTCTTAATTTTCAAATGGGAACTTTGAATATAGAAAQCTAGCCT
CTTCAGACAGGGGCACTTATGATGCATTGCTACCAGTTCCAACTGGTTCGGAAGCGAGAGTAAGTATG
CTTACAATGGAAGAGCGAGTGACCAGCCCCAGGTAAGAAGCTGCATCCCAGAAAAGGACTGAAGTGAA
TTTTGGGGACAAATTACTACTGAACTGCTCAGCCACTGGGGAGCCCAAACCCCAAATAATGTGGAGGT
TACCATCCAAGGCTGTGGTCGACCAGCAGCATAGGGTGGGCAGCTGGATCCACGTCTACCCTTATGGA
TCCCTGTTTATTGGATCAGTAACAGAAAAAGACAGTGGTGTCTACTTGTGTGTGGCAAGAAACAAAAT
GGGGGATGATCTGATACTGATGCATGTTAGCCTAAGACTGACCTGCCAAATTGAACCAACAAGCAAGT
ATTTTAGAAAGCAAGTGCTCCATGGGAAGATTTCCAAGTAGATTGCAAAGCTTCCGGCTCCCCAAGTG
CCAGAGATATCTTGGAGTTTGCCTGATGGAACCATGATCAACAATGCAATGCAAGCCGATGACAGTGG
CCACAGGACTAGGAGATATCCCTTTTCAACAATGGACTTTATACTTCAAACAAAGTTGGGGTAAGCGG
AGGAAGGAGATTATACTTGCTATGCCCAGAACACCCTAGGGAAAGATGAAATGAAGGTCCACTTAACA
GTTATAACAGCTGCTCCCCGGATAAGGCAGAGTAACAAAACCAACAAGAGAATCAAAGCTGGAGACAC
AGCTGTCCTTGACCGTGAGGTGACTGGGGATCCCAAACCAAAAATATTTTGGTTGCTGCCTTCCAATG
GGTCTTTGACCATCAAACAAAGTGAAACTGCTCGATTCTGGAGAGTACGTATGTGTAGCCCGAATCCC
AGTGGGGATGACACCAAATGTAACAAACTGGAAATGTGGTCTCTACCTCCATTATCAAATGGTCTGTA
TACAAATAGAACTGTTATTAAAGCCACAGCTGTGAAGAACAATTCCAAACACTTTGACTGCAGAGCTG
GGAAGCAGAATCACAGTCCATAAAAATGGAACCTTGGAAATTAGGAATGTGAGGCTTTCAGATTCAGC
CGACTTTATCTGTGTGGCCCGAAATGAAGGTGGAGAGAAGCGTGTTGGTAGTACAGTTAGAGTACTGG
AAATGCTGAGAAGACCGACATTTAGAATCCATTTAATGAAATAAAGTTACCAGCTGGGATAAAAGTCC
ACAGCATTGAATTGCTCTGTTGATGGTACCCACCACCTGTAATCTGGAAATTTTAAACCAAATGGCAC
ACGATTTTCCAATGGACCACAGTTATCAGTATCTGATAGCAGCAATGGTTCTTTTAATCAATTTCTAA
AAACAACTCGGGAGGATGCAGGAATATCGCTGTGCAGCTAGGAATAAAGTTGGCTAATATTGAGAAAA
TTAGTCATATTAGAATTGGCCAGAAGCCAGTTATTCTTACCTATGCAACCAGGGACAGTAAAGGCAAT
TCATACACTGATTACTGTTCCAGTAATGATTGTAGCCTACCCTCCCCGAATTACAATCGTCCAACCCA
TGCCAAGTGGTTATGTAGTAGACAGGCCTCATTATGGGATACATAATTGCATGAAACAATAAACAACC
TTAGTCATTAAAGAAGCAACAGCTTATGACAGAGGAACTATATCTGTA3AGGCTCAAATAAGTGTTGG
TCATACACTGATTACTGTTCCAGTAATGATTGTAGCCTACCCTCCCCGAAATTACATCGTCCAACCCA
GGAGTATTGTCACCAGGACAGGGGCAGCCTTTCAGCTCCACTGTGTGGCCTTGGGAGTTCCCAAGCCA
GAAATCACATGGGAGATGCCTGACCACTCCCTTCTCTCAACGGCAAGTAAAGAGAGGACACATGGAAG
TGAGCAGCTTCACTTACAAGGTACCCTAGTCATTCAGAATCCCCAAACCTCCGATTCTGGGATATACA
AATGCACAGCAAAGAACCCACTTGGTAGTGATTATGCAGCAACGTATATTCAAGTAATGTGACATGAA
ATAATAAAGTC

| | | | |
|---|---|---|---|
| NOV29z, CG55776-02 | SEQ ID NO:716 | 2602 aa | MW at 288454.2 kD |
| Protein Sequence | | | |

MKVKGRGITCLLVSFAVICLVATPGGKACPRRCACYMPTEAHCTFRYLTSIPDSIPPNVERINLGYNS
LVRLMETDFSGLTKLELLMLHSNGIHIPDKTFSDLQALQVRLMVLKMSYNKKTRKLQKDTFYGLRSLT
RLHMDHNNIEFINPEVFYGLNFLRLVAHLEGNQLTKLHPAFVSLSYLQIFKISFIKFLYLSDNFLTSL
PQEASYMPDLDSLYLHGNPWTCDCHLKWLSDWIQEKPGIYNTAPDVIKCYAADRSPSSAQQCPLCMNP
RTSKGKPLAMKTSAAAFQCAKPTIDSSLKSKSLTILEDSSSAFSPQGFMAPFGSLTLNMTDQSGNEAN
MVCSIQKPSRTSPIAFTEENDYIVLNTSFSTFLVCNIDYGHIQPKAWQILAYSDSPLILERSHLLSET
PQLYYKYKQVAPKPEDIFTNIEADLRADPSWLMQDQISLQLNRTATTFSTLQIQYSSDAQITLPRAEM
RPVKHKWTMISRDNNTKLEHTVLVGGTVGLNCPGQGDPTPHVDWLLADGSKVRAPYVSEDGRILIDKS
GKLELQMADSFDTGVYHCISSNYDDADILTYRITVVEPLVEAYQENGIHHTVFIGETLDLPCHSTGIP
DASISWVIPGNNVLYQSSRDKKVLNNGTLRILQVTPKDQGYYRCVAANPSGVDFLIFQVSVKMKGQRP
LEHDGETEGSGLDESNPIAHLKEPPGAQLRTSALMEAEVGKAHSSTSKRHNYRELTLQRRGDSTHRRF
RENRRHFPPSARRIDPQBWAALLEKAKKNAMPDKRENTTVSPPPVVTQLPNIPGEEDDSSGMLALHEE
FMVPATKALNLPARTVTADSRTISDSPMTNINYGTEFSPVVNSQILPPEEPTDFKLSTAIKTTAMSKN
INPTMSSQIQGTTNQHSSTVFPLLLGATEFQDSDQMGRGREHFQSRPPITVRTMIKDVNVKMLSSTTN
KLLLESVNTTNSHQTSVREVSEPRHNHFYSHTTQILSTSTFPSDPHTAAHSQFPIPRNSTVNIPLFRR
FGRQRKIGGRGRIISPYRTPVLRRHRYSIFRSTTRGSSEKSTTAFSATVLNVTCLSCLPRERLTTATA
ALSFPSAAPITFPKADIARVPSEESTTLVQNPLLLLENKPSVEKTTPTIKYFRTEISQVTPTGAVMTY
APTSIPMEKTHKVNASYPRVSSTNEAKRDSVITSSLSGAITKPPMTIIAITRFSRRKIPWQQNFVNNH
NPKGRLRNQHKVSLQKSTAVMLPKTSPALPQRQSLPSHHTTTKTHNPGSLPTKKELPFPPLNPMLPSI
ISKDSSTKSIISTQTAIPATTPTFPASVITYETQTERSRAQTIQREQEPQKKNRTDPNISPDQSSGFT
TPTAMTPPVLTTAETSVKPSVSAFTHSPPENTTGISSTISFHSRTLNLTDVIEELAQASTQTLKSTIA
SETTLSSKSHQSTTTRKAIRHSTIPPFLSSSATLMPVPISPPFTQRAKTTDNVATPISGLMTNTVVKL
HESSRHNAKPQQLVAEVATSPKVHPNAKFTIGTTHFIYSNLLHSTPMPALTTVKSQNSKLTPSPWAEN
QFWHKPYSEIAEKGKKPEVSMLATTGLSEATTLVSDWDGQKNTKKSDFDKKPVQEATTSKLLPFDSLS
RYIFEKPRIVGGKAASFTIPANSDAFLPCEAVGNPLPTIHWTRVPSGMSGLDLSKRKQNSRVQVLPNG
TLSIQRVEIQDRGQYLCSASNLFGTDHLHVTLSVVSYPPRILERRTKEITVHSGSTVELKCRAEGRPS
PTVTWILANQTVVSESSQGSRQAVVTVDGTLVLHNLSIYDRGFYKCVASNPGGQDSLLVKIQVIAAPP
DRGTYECIATSSTGSERRVVMLTMEERVTSPRIEAASQKRTEVNFGDKLLLNCSATGEPKPQIMWRLP
SKAVVDQQHRVGSWIHVYPNGSLFIGSVTEKDSGVYLCVARNKMGDDLILMHVSLRLKPAKIDHKQYF
RKQVLHGKDFQVDCKASGSPVPEISWSLPDGTMINNNMQADDSGHRTRRYTLFNNGTLYFNKVGVAEE
GDYTCYAQNTLGKDEMKVHLTVITAAPRIRQSNKTNKRIKAGDTAVLDREVTGDPKPKIFWLLPSNGS
LTINKVKLLDSGEYVCVARNPSGDDTKMYKLDVVSKPPLINGLYTNRTVIKATAVRHSKKHFDCRAEG
TPSPEVMWIMPDNIFLTAPYYGSRITVHKNGTLEIRNVRLSDSADFICVARNEGGESVLVVQLEVLEM
LRRPTFRNPFNEKIVAQLGKSTALNCSVDGNPPPEIIWILPNGTRFSNGPQSYQYLIASNGSFIISKT
TREDAGKYRCAARNKVGYIEKLVILEIGQKPVILTYAPGTVKGISGESLSLHCVSDGIPKPNIKWTMP
SGYVVDRPQINGKYILHDNGTLVIKEATAYDRGNYICKAQNSVGHTLITVPVMIVAYPPRITNRPPRS
IVTRTGAAFQLHCVALGVPKPEITWEMPDHSLLSTASKERTHGSEQLHLQGTLVIQNPQTSDSGIYKC
TAKNPLGSDYAATYIQVI

| | | |
|---|---|---|
| NOV29aa, CG55776-03 | SEQ ID NO:717 | 8270 bP |
| DNA Sequence | ORF Start: ATG at 6 | ORF Stop: TGA at 7779 |

TCAGGATGAAGGTAAAAGGCAGAGGAATCACCTGCTTGCTGGTCTCCTTTGCTGTGATCTGCCTGGTC
ATTTCGGTACCTGACTTCCATCCCAGACAGCATCCCGCCCAATGTGGAACGCATCAATTTAGGGTACA
ACAGCTTGGTTAGATTGATGGAAACAGATTTTTCTGGCCTGACCAAACTGGAGTTACTCATGCTTCAC
AGCAATGGCATTCACACAATCCCTGACAAGACCTTCTCAGATTTGCAGGCCTTGCAGGTGAGACTGAT
GGTCTTAATGAGCTATAATAAAGTCCGAAAACTTCAGAAAGATAACTTTTTAATGGCCTCAAGGAGCT
TGACACGATTGCACATGGACCACAACAATATTGAGTTTATAAACCCAGAGGTTTTTTATGGGCTCAAC
TTTCTCCGCCTGGTGCACTTGGAAGGAAATCAGCTCACTAAGCTCCACCCAGATACATTTGTCTCTTT
CCCTCCCTCAAGAGATGGTCTCCTATATGCCTGACCTAGACAGCCTTTACCTGCATGGAAACCCATGG
ACCTGTGATTGCCATTTAAAGTGGTTGTCTGACTGGATACAGGAGAAGCCAGGTATCTATATTGTNTT
ACCAGATGTAATAAAATGCAAAAAAGATAGAAGTCCCTCTAGTGCTCAGCAGTGTCCACTTTGCATGA
ACCCTAGGACTTCTAAAGGCAAGCCGTTAGCTATGGTCTCAGCTGCAGCTTTCCAGTGTGCCAAGCCA
ACCATTGACTCATCCCTGAAATCAAAGAGCCTGACTATTCTGGAAGACAGTAGTTCTGCTTTCATCTC
TCCCCAAGGTTTCATGGCACCCTTTGGCTCCCTCACTTTGAATATGACAGATCAGTCTGGAAATGAAG
CTAACATGGTCTGCAGTATTCAAAAGCCCTCAAGGACATCACCCATTGCATTCACTGAAGAAAATGAC
TACATCGTGCTAAATACTTCAATTTTCAACATTTTTGGTGTGCACATAGATTACGGTCACATTCAGCC
AGTGTGGCAAATTTTGGCTTTGTACAGTGATTCTCCTCTGATACTAGAAAGGAGCCACTTGCTTAGTG
AAACACCGCAGCTCTATTACAAATATAAACAGGTGGCTCCTAAGCCTGAAGACATTTTTACCAACATA
GAGGCAGATCTCAGAGCAGATCCCTCTTGGTTAATGCAAGACCAAATTTCCTTGCAGCTGAACAGAAC
TGCCACCACATTCAGTACATTACAGATCCAGTACTCCAGTGATGCTCAAATCACTTTACCAAGAGCAG
AGATGAGGCCAGTGAAACACAAATGGACTATGATTTCAAGGGATAACAATACTAAGCTGGAACATACT
GTCTTGGTAGGTGGAACCGTTGGCCTGAACTGCCCAGGCCAAGGAGACCCCACCCCACACGTGGATTG
GCTTCTAGCTGATGGAGTAAAGTGAGAGCCCCTTATGTCAGTGAGGATGGACGGATCCTAATAGAACA
AAAGTGGAAAATTGGAACTCCAGATGGCTGATAGTTTTGACACAGGCGTATATCACTGTATAAGCAGC
AATTATGATGATGCAGATATTCTCACCTATAGGATAACTGTGGTAGAACCTTTGGTCGAAGCCTATCA
GGAAAATGGGATTCATCACACAGTTTTCATTGGTGAAACACTTGATCTTCCATGCCATTCTACTGGTA
TCCCAGATGCCTCTATTAGCTGGGTTATTCCAGGAAACAATGTGCTCTATCAGTCATCAAGAGACAAG
AAAGTTCTAAACAATGGCACATTAAGAATATTACAGGTCACCCCGAAAGACCAAGGTTATTATCGCTG
TGTGGCAGCCAACCCATCAGGGGTTGATTTTTTGATTTTCCAAGTTCAGTCAAGATGAAAGGAACAAA
GGCCCTTGGAGCATGATGGAGAAACAGAGGGATCTGGACTTGATGAGTCCAATCCTATTGCTCATCTT
AAGGAGCCACCAGGTGCACAACTCCGTACATCTGCTCTGATGGAGGCTGAAGGTTGGAAACAAACCTC
AAGCACAAGTAAGAGGCACAACTATCGGGAATTAACACTCCAGCGACGTGGAGATTCAACACATCGAC
GTTTTAGGGAGAATAGGAGGCATTTCCCTCCCTCTGCTAGGAGAATTGACCCACAACATTGGGCGGCA
CTGTTGGAGAAAGCTAAAAAGAATGCTATGCCAGACAAGCGAGAAAATACCACAGTGAGCCCACCCCC
AGTGGTCACCCAACTCCCAAACATACCTGGTGAAGAAGACGATTCCTCAGGCATGCTCGCTCTACATG
AGGATTTATGGTCCCGGCCACTAAAGCTTTGAACCTTCCAGCAAGGACAAGTGACTGCTGACTCCAGA
ACAATAATCTGATAGTCCTATGACAACATAAATTATGGCACAGAAATTCTCTCCTGTTGTGATTCACA
AATACTACCACCTGAAGAACCCACAGATTTCAAAGTCTCTACTGCTATTAAAACTACAGCCATGTCAA
AGAATATAAACCCAACCATGTCAAGCCAAATACAAGGCACAACCAATCAACATTCATCCACTGTCTTT
CCACTGCTACTTGGAGCAACTGAATTTCAGGACTCTGACCAGATGGGAAGAGGAAGAGAGCATTTCCA
AAGTAGACCCCCAATAACAGTAAGGACTATGATCAGATGTCAATGTCAAAATGCTTAAGTAAGCACCA
CCAACAAACTATTATTAGAGTCAGTAAATACCACAAATAGTCATCAGACATCTGTAAGAGAAGTGAGT
GAACCCAGGCACAATCACTTCTATTCTCACACTACTCAAATACTTAGCACCTCCACGTTCCCTTCAGA
TCCACACACAGCTGCTCATTCTCAGTTTCCGATCCCTAGAAATAGTACAGTTAACATCCCGCTGTTCA
GACGCTTTGGGAGGCAGAGGAAAATTGGCGGAAGGGGGCGGATTATCAGCCCATATAGAACTCCAGTT
CTGCGACGGCATAGATACAGCATTTTCAGGTCAACAACCAGAGGTTCTTCTGAAAAAAGCACTACTGC
ATTCTCAGCCACAGTGCTCAATGTGACATGTCTGTCCTGTCTTCCCAGGGAGAGGCTCACCACTGCCA
CAGCAGCATTGTCTTTTCCAAGTGCTGCTCCCATCACCTTCCCCAAAGCTGACATTGCTAGAGTCCCA
TCAGAAGAGTCTACAACTCTAGTCCAGAATCCACTATTACTACTTGAGAACAAACCCAGTGTAGAGAA
CATATGCTCCAACATCCATACCCATGGAAAAAACTCACAAAGTAAACGCCAGTTACCCACGTGTGTCT
AGCACCAATGAAGCTAAAAGAGATTCAGTGATTACATCGTCACTTTCAGGTGCTATCACCAAGCCACC
ACCATAACCCAAAAGGCAGATTAAAGGAAATCAACAATAAAGTTAGTTTACAAAGCACAGCTGTGATG
CTTCCTAAAACATCTCCTGCTTTACCACAGAGACAAAGTCTCCCCTCGCACCACACTACGACCAAAAC
ACACAATCCTGGAAGTCTTCCAACAAAGAAGGAGCTTCCCTTCCCACCCCTTAACCCTATGCTTCCTA
GTATTATAAGCAAGACTCAAGTAACAAGCAATCAATAATCAACGCAAACAAGCAAATACCAGCACACT
CCTACCTTCCCTGCATCTGTCATCACTTATGAAACCCAAACAGAGAGATCTAGAGCACAAACAATACA
AAGAGAACAGGAGCCTCAAAAGAAGAACAGGACTGACCCAAACATCTCTCCAGACCAGAGTTCTGGCT
TCAACTACACCCACTGCTATGACACCTCCTGTTCTAACCACAGCCGAAACTTCAGTCAGCCCAGTGTC
TCTGCATTCACTCATTCCCCACCAGAAACAACAACTGGGAATTTCAAGCACAATCAGTTTTCATTCAG
AACTCTTATCTGACAGATGTGATTGAAAGAAACTAGCCCAAGCAAGTACTCAGACTTTGAAGAGCACA
TTGCTTCTGAAACAACTTTGTCCAGCAATCACACCAGAGTACCACAACTAGGAAAGCAAATCATTAGA
CACTCAACCATACCACCATTCTTGAGCAGCAGTGCTACTCTAATGCCAGTTCCCATCTCCCCTCCCTT
TACTCAGAGAGCAGTTACTGACAACGTGGCGACTCCCATTTCCGGGCTTATGACAAATACAGTGGTCA
AGCTGCACGAATCCTCAAGGCACAATGCTACCAACAAGCAATTAGTAGCAGAGGTTGCAACATCCCCC
AAGGTTCACCCAAATGCCAAGTTCACAATTGGAACCACTCACTTCATCTACTCTAATCTGTTACATTC
TACTCCCATGCCAGCACTACAACAGTTAAATCAACAGAATTCTAAATTAACTCCATCTCCCTGGGCAG
AAAACCAATTTTGGCACAAACCATACTCAAGAAATTGCTGAAAAGGCAAAAAGCCAGAAGTAAGCATG
TTGGCTACTACAGGCCTGTCCGAGGCCACCACTCTTGTTTCAGATTGGGATGGACAGAAGAACACAAA
GAAGAGTGACTTTGATAAGAAACCAGTTCAAGAAGCAACAACTTCCAAACTCCTTCCCTTTGACTCTT
TGTCTAGGTATATATTTGAAGCCCAGGAAAATAGTTGGAAAAGAGCTGCAAGTTTTAACTATTCCAAT
AACTCAGATGCCTTTCTTCCCTGTGAAGCTGTTGGAAATCCCCTGCCCACCATTCATTGGACCAGAGT
CCCATCAGGTATGTCAGGACTTGATTTATCTAAGAGGAAACAGAATAGCAGGGTCCAGGTTCTCCCCA
ATGGTACCCTGTCCATCCAGAGGGTGGAAATTCAGGACCGCGGACAGTACTTGTGTTCCGCATCCAAT
ACGTACCAAAGAGATCACAGTTCATTCCGGAAGCACTGTGGAACTGAAGTGCAGAGCAGAAGGTAGGC
CAAGCCCTACAGTTACCTGGATTCTTGCAAACCAAACAGTTGTCTCAGAATCATCCCAGGGAAGTAGG
AGGCTGTGGTGACGGTTGACGGAACATTGGTCCTCCACAATCTCAGTATTTAATGACCGTGGCTTTTA
CAAATGTGTGGCCAGCAACCCAGGTGGCCAGGATTCACTGCTGGTTAAATAACAAGTCATTGCAGCAC
CACCTGTTATTCTAGAGCAAGGAGGCAAGTCATTGTAAGGCAACTTGGGGTGAAAGTTTAAACTGCCC
TGTACTGCAAAAGGAACTCCTCAGCCCAGCGTTTACTGGGTCCTCTCTGATGGCACTGAAGTGAAACC
ATTACAGTTTACCAATTCCAAGTTGTTCTTATTTTCAAATGGGACTTTGTATATAAGAAACCTAGCCT
CTTCAGACAGGGGCACTTATGAATGCATTGCTACCAGTTCCACTGGTTCGGAGCGAAGAGTAGTAATG
CTTACAATGGAAGAGCGAGTGACCAGCCCCAGGATAGAAAGCTGCATCCCAGAAGGACTGAAAGTGAA
TTTTGGGGACATTACTACTGAACTGCTCAGCCACTGGGGAAGCCCAAAACCCCAAATAATGTGGAGGT
TACCATCCAAGGCTGTGGTCGACCAGCAGCATAGAGTGGGCAGCTGGATCCACGTCTACCCTAATGGA
TCCCTGTTTATTGGATCAGTAACAGAAGACAAGTGGTGTCTAACTTGTGTGTGGCAAAGAAACAAAAT
GGGGGATGATCTGATACTGATGCATGTTAGCCTAGAACTGAAACCTGCCAAAATTGACCACAAGCAGT
ATTTTAGAAAGCAAGTGCTCCATGGGAAAGATTTCCAAGTAGATTGCAAAGCTTCCGGCTCCCCAGTG
CCAGAGATATCTTGGAGTTTGCCTGATGGAACCATGATCAACAATGCAAATGCAGCCGATGACAGTGG
CCACAGGACTAGGAGATATACCCTTTTCAACAATGGAACTTTATACTTCAACAAAGTTGGGGTAGCGG
AGGAAGGAGATTATACTTGCTATGCCCAGAACACCCTAGGGAAAGATGAAATGAAGGTCCACTTAACA
GTTATAACAGCTGCTCCCCGGATAAGGCAGAGTAACAAACCMACAAGAGAAATCAAAGCTGGAGACAC
AGCTGTCCTTGACTGTGAGGTCATTCATGCCAAATGGGTCTTTGAACCATCAACAAGTGAACTGCTCG
ATTCTGGAGAGTACGTATGTGTAGCCCGAAATCCCAGTGGGGAATGACACCAAATGTACAAACTGGAT
GTGGTCTCTAAACCTCCATTAATCAATGGTCTGTATACAAATAGAACTGTTATTAAAGCCACAGCTGT
GAGACATTCCAAAAAACACTTTGACTGCAGAGCTGAAGGGACACCATCTCCTGAAGTCATGTGGATCA
TGCCAGACAATATTTTCCTCACAGCCCCATACTATGGAAGCAGAATCACAGTCCATAAAAATGGAACC
TTGGAAATTAGGAATGTGAGGCTTTCAGATTCAGCCGACTTTAATCTGTGTGGCCCGAAATGAGGTGG
AGAGAGCGTGTTGGTAGTACAGTTAGAAGTACTGGAAAATGCTGAAGAAGACCGACATTTAGATCCAT
TTAATGAAAAAATAGTTGCCCAGCTGGGAAAGTCCACAGCATTGAATTGCTCTGTTGATGGTAACCCA
CCACCTGAAATAATCTGGATTTTACCAATGGCACACGATTTTCCAATGGACCACAAAAGTTATCAGTA
TCTGATAGCAAGCAATGGTTCTTTTATCATTTCTAACAACTCGGGAGGATGCAGGAAAAAATCATGCT
GTGCAGCTAGGAATAAAGTTGGCTATATTGAGAMATTAGTCATATTAGAAATTGGCCAGAAGCCAGTT
ATTCTTACCTATGCACCAGGGACAGTAAAGGCATCAGTGGAGAAACTCTAATCAACTAATTGTGTGTC
TGATGGAATCCCTAAGCCAAATATCAAATGGACTATGCCAAGTGGTTATGTAGTAGACAGGCCTCAAA
TTAATGGGAAATACATATTGCATGACAATGGCACCTTAGTCATTAAAGAAGCAACAGCTTATGACAGA
GGAAACTATATCTGTAAGGCTCAAAATAGTGTTGGTCATACACTGATTACTGTTCCAGTAATGATTGT
AGCCTACCCTCCCCGAATTACAAATCGTCCACCCAGGAGTATTGTCACCAGGACAGGGGCAGCCTTTC
AGCTCCACTGTGTGGCCTTGGGAGTTCCCAAGCCAGAAATCACGTGGGAGATGCCTGACCACTCCCTT
CTCTCAACGGCAAGTAAAGAGAGGACACATGGAAGTGAGCAGCTTCACTTACAGGTACCCTAAGTCAT
TCAGAATCCCCAAACCTCCGATTCTGGGATATACAAATGCACAGCAAAGAACCCACTTGGTAGTGATT
ATGCAGCAACGTATATTCAAGTAATCTGACATGAAATAATAAAGTCAACAACATCTGGGCAGAATTTA
TTTTTTGGAAGAAGTTTAATCAAGGCAGCCATAGGCATGTAAATGATTTGAATAACAATTTACAGTAT
TAAATTTACAATGAACATGCAAAATAAAAGGACTTGTAAATAAATGCATTATGAACTGATGATACTGA
TTTATTTAATGGATCTCAAAACAAACTTTTAACTTAAGGCACTTTTATTTTGCCAACAAATAACAATA
AACAAACATTGAAACGGTTCACTATAAAATAACAAATGGCTAATGTACCTGAATTTTTCAGTAAAAAA
ATGAACTTCTAATACCAGTTGCCTAGTGTCCACCTCCTATCAATGTTACAAGCATGGCACTCAGAACA
GAGACAATGGAAAATATTAAATCTGCAATCTTTATGATGTAAATTTACCATCCTGATGTATAAATATT
TTGTGGTTTATAAATTTTTTTGCTAAAACCTACAGAAAAAAA

| | | | |
|---|---|---|---|
| NOV29aa, CG55776-03 | SEQ ID NO:718 | 2591 aa | MW at 287114.6 kD |
| Protein Sequence | | | |

MKVKGRGITCLLVSFAVICLVATPGGKACPRRCACYMPTEVHCTFRYLTSIPDSIPPNTERINLGYNS
LVRLMETDFSGLTKLELLMLHSNGIHTIPDKTFSDLQALQVRLMVLKMSYNKVRKLQKDTFYGLRSLT
RLHMDHNNIEFINPEVFYGLNFLRLVHLEGNQLTKLHPDTFVSLSYLQIFKISFIKFLYLSDNFLTSL
PQEMVSYMPDLDSLYLHGNPWTCDCHLKWLSDWIQEKPGIYIVLPDVIKCKKDRSPSSAQQCPLCDAP
ARTSKGKPLAMVSAAFQCAKPTIDSSLKSKSLTILEDSSSAFISPQGFMAPFGSLTLNMTDQSGNEAN
PQLYYKYKQVAPKPEDIFTNIEADLRADPSWLMQDQISLQLNRTATTFSTLQIQYSSDAQITLPRAEM
RPVKHKWTMISRDNNTKLEHTVLVGGTVGLNCPGQGDPTPHVDWLLADGSKVRAPYVSEDGRILIDKS
GKLELQMADSFDTGVYHCISSNYDDADILTYRITVVEPLVEAYQENGIHHTVFIGETLDLPCHSTGIP
DASISWVIPGNNVLYQSSRDKKVLNNGTLRILQVTPKDQGYYRCVAANPSGVDFLIFQVSVKMKGQRP
RENRRHFPPSARRIDPQHWAALLEKAKKNAMPDKRENTTVSPPPVVTQLPNIPGEEDDSSGMLALHEE
FMVPATKALNLPARTVTADSRTISDSPMTNINYGTEFSPVVNSQILPPEEPTDFKLSTAIKTTAMSKN
INPTMSSQIQGTTNQHSSTVFPLLLGATEFQDSDQMGRGREHFQSRPPITVRTMIKDVNVKMLSSTTN
KLLLESVNTTNSHQTSVREVSEPRHNHFYSHTTQILSTSTFPSDPHTAAHSQFPTPRNSTVNIPLFRR
FGRQRKIGGRGRIISPYRTPVLRRIRYSIFRSTTRGSSEKSTTAFSATKLNVTCLSCLPRERLTTATA
ALSFPSAAPITFPKADIARVPSEESTTLVQNPLLLLENKPSVEKTTPTIKYFRTEISQVTPTGAVMTY
APTSIPMEKTHKNASYPRVSSTNEAKRDSVITSSLSGAITKPPMTIIAITRFSRRKIPWQQNFVNNNH
NPKGRLRNQHKVSLQKSTAVMLPKTSPALPQRQSLPSHHTTTKTHNPGSLPTKKELPFPPLNPMLPSI
ISKDSSTKSISTQTAIPATTPTFPASVITYETQTERSIAAQTIQREQEPQKKNRTDPNISPDQSSGFT
TPTAMTPPVLTTAETSVKPSVSAFTHSPPENTTGISSTISFHSRTLNLTDVIEELAQASTQTLKSTIA
SETTLSSKSHQSTTTRKAIIRHSTIPPFLSSSATLMPVPISPPFTQRAVTDNVATPISGLMTNTVVKL
HESSRHNAKPQQLVAEVATSPKVHPNAKFTIGTTHFIYSNLLHSTPMPALTTVKSQNSKLTPSPWAEN
QFWHKPYSEIAEKGKKPEVSMLATTGLSEATTLVSDWDGQKNTKKSDFDKKPVQEATTSKLLPFDSLS
RYIFEKPRIVGGKAASFTIPANSDAFLPCEAVGNPLPTIHWTRVPSGMSGLDLSKRKQNSRVQVLPNG
TLSIQRVEIQDRGQYLCSASNLFGTDHLHVTLSVVSYPPRILEPRTKEITVHSGSTVELKCRAEGRPS
PTVTWILANQTVVSESSQGSRQAVVTVDGTLVLHNLSIYDRGFYKCVASNPGGQDSLLVKIQVIAAPP
VILEQRRQVIVGTWGESLKLPCTAKGTPQPSVYWVLSDGTEVKPLQFTNSKLFLFSNGTLYIPNLASS
DRGTYECIATSSTGSERRVVMLTMEERVTSPRIEAASQKRTEVNFGDKLLLNCSATGEPKPQIMWRLP
SKAVVDQQHRVGSWIHVYPNGSLFIGSVTEKDSGVYLCVARNKMGDDLILMHVSLELKPAKIDHKQYF
RKQVLHGKDFQVDCKASGSPVPEISWSLPDGTMINNAMQADDSGHRTRRYTLFNNGTLYFNKVGVAEE
GDYTCYAQNTLGKDEMKVHLTVITAAPRIRQSNKTNKRIKAGDTAVLDCEVIHANGSLTINKVKLLDS
GEYVCVARNPSGDDTKMYKLDVVSKPPLINGLYTNRTVIKATAVRHSKKHFDCRAEGTPSPEVMWIMP
DNIFLTAPYYGSRITVHKNGTLIRNVRLSDSADFICVARNEGGESVLLVVQLEVLEMLRRPTFRNPFN
EKIVAQLGKSTALNCSVDGNPPPEIIWILPNGTRFSNGPQSYQYLIASNGSFIISKTTREDAGKYRCA
ARNKVGYIEKLVILEIGQKPVILTYAPGTKTKGISGESLSLHCVSDGPKPNTKWTMPSGYVVDRPQIN
GKYILHDNGTLVIKEATAYDRGNYICKAQNSVGHTLITVPVMIVAYPPRRITNRPPRSIVTRTGAFQL
HCVALGVPKPEITWEMPDHSLLSTASKERTHGSEQLHLQGTLVIQNPQTSDSGIYKCTAKNPLGSDYA
ATYIQVI

| | | |
|---|---|---|
| NOV29ab, CG55776-04 | SEQ ID NO:719 | 771 bP |
| DNA Sequence | ORF Start: at 7 | ORF Stop: at 766 |

AAGCTTGCCTGTCCTCGCCGCTGTGCCTGTTATATGCCTACGGAGGTACACTGCACATTTCGGTACCT
GACTTCCATCCAGACAGCATCCCGCCCAATGTGGAACGCATCAATTTAGGATACAACAAGCTTGGTTA
GATTGATGGAAACAGATTTTTCTGGCCTGACCAAACTGGAGTTACTCATGCTTCACAGCAATGGCATT
CACACAATCCCTGACAAGACCTTCTCAGATTTGCAGGCCTTGCAGGTCTTAAAAATGAGCTATAACAA
AGTCCGAAAACTTCAGAAAGATACTTTTTATGGCCTCAGGAGCTTGACACGATTGCACATGGACCACA
ACAATATTGAGTTTATAAACCCAGAGGTTTTTGATGGGCTCAACTTTCTCCGCCTGGTGCACTTGGAA
GGAAATCAGCTCACTAAGCTCCACCCAGATACATTTGTCTCTTTGAGCTACCTCCAGATATTTAAAAT
CTCTTTCATTAAGTTCCTATACTTGTCTGATAACTTCCTGACCTCCCTCCCTCAAGAGATGGTCTCCT
ATATGCCTGACCTAGACAGCCTTTACCTGCATGGAAACCCATGGACCTGTGATTGCCATTTAAAGTGG
TTGTCTGACTGGATACAGGAGAAGCCAGATGTAATAAAATGCAAAAAAAGATAGAGTCCCTCTAGTGC
TCAGCACTGTCCACTTTGCATGAACCCTAGGACTTCTAAAGGCAAGCCGTTAGCTATGGTCTCAGCTG
CAGCTTTCCAGTGTGCCCTCGAG

| | | | |
|---|---|---|---|
| NOV29ab, CG55776-04 | SEQ ID NO:720 | 253 aa | MW at 29129.5 kD |
| Protein Sequence | | | |

ACPRRCACYMPTEVHCTFRYLTSIPDSIPPNVERINLGYNSLVRLMETDFSGLTKLELLMLHSNGIHT
IPDKTFSDLQALQVLKMSYNKVRKLQKDTFYGLRSLTRLHMDHNNIEFINPEVFDGLNFLRLVHLEGN
QLTKLHPDTFVSLSYLQIFKISFIKFLYLSDNFLTSLPQEMVSYMPDLDSLYLHGNPWTCDCHLKWLS
DWIQEKPDVIKCKKDRSPSSAQQCPLCMNPRTSKGKPLAMVSAAAFQCA

| | | |
|---|---|---|
| NOV29ac, CG55776-05 | SEQ ID NO:721 | 2011 bP |
| DNA Sequence | ORF Start: at 32 | ORF Stop: at 1988 |

AGGCTCCGCGGCCGCCCCCTTCACCCTCGAGGGGGACAAATTACTACTGAACTGCTCAGCCACTGGGG
AGCCCAAACCCCAAATAATGTGGAGGTTACCATCCAAGGCTGTGGTCGACCAGCAGCATAGAGTGGGC
AGCTGGATCCACGTCTACCCTAATGGATCCCTGTTTATTGGATCAGTAACAGAAAAAGACAGTGGTGT
CTACTTGTGTGTGGCAAGAAACAAAATGGGGGATGATCTGATACTGATGCATGTTAGCCTAAGACTGA
AACCTGCCAAATTGACCACAAGCAGTATTTTAGAPAAGCAAGTGCTCCATGGGAAGATTTCCAAAGTA
GATTGCAAGCTTCCGGCTCCCCAGTGCCAGAGATATCTTGGAAGTTTGCCTGAATGGACCATGAATCA
CATGCAAATGCAAGCCGATGACAGTGGCCACAGGACTAGGAGATATACCCTTTTCAACAATGGAACTT
TATACTTCAACAAAGTTGGGGTAAGCGGAAGGAAGGAGATTATACTTGCTATACCAGAACACCCTAAG
AAAGATGAAATGAAGGTCCACTTAACAGTTATAACAGCTGCTCCCCGGATAAGGCAGAGTAACAAAAC
CAACAAGAGAATCAAAGCTGGAGACACAGCTGTCCTTGACTGTGAGGTCACTGGGGATCCCAAACCAA
AAATATTTTGGTTGCTGCCTTCCAATGACATGATTTCCTTCTCCATTGATAGGTACACATTTCATGCC
AATGGGTCTTTGACCATCAACAAAGTGAAACTGCTCGATTCTGGAGAGTACGTATGTGTAGCCCGAAA
TCCCAGTGGGGATGAACACCAAAATGTACAACTGGATGTGGTCTCTAAACCTCCATTAATCAATGGTC
TGTATACAAACAGAAACTGTTATTAAAGCCACAGCTGTGAGACATTCCAAAAACACTTTGACTGCAGA
GCTGAAGGGACACCATCTCCTGAAGTCATGTGGATCATGCCAGACAATATTTTCCTCACAGCCCCATA
CTATGGAAGCAGAATCACAGTCCATAAAAATGGAACCTTGGAAATTAGGAATGTGAGGCTTTCAGATT
CAGCCGACTTTATCTGTGTGGCCCGAAATGAAGGTGGAGAGAGCGTGTTGGTAGTACAGTTAGAAGTA
CTGGAAATGCTGAGAAGACCGACATTTAGAATCCATTTAATGAAAAAAATAGTTGCCCAGCTGGGAAA
GTCCACAGCATTGAATTGCTCTGTTGATGGTAACCCACCACCTGAATAAATCTGGATTTTACCAAATG
GCACACGATTTTCCAATGGACCACAAAGTTATCAGTATCTGATAGCAGCAAATGGTTCTTTTATCATT
TCTAAAACAACTCGGGAGGATGCAGGAAAATATCGCTGTGCAGCTAGGAATAAAGTTGGCTATATTGA
GAAATTAGTCATATTAGAAAATTGGCCAGAAGCCAGTTATTCTTACCTATGCACCAGGGACAGTAAAG
GCATCAGTGGAGAATCTCTATCACTGCATTGTGTGTCTGATGGAATCCCTAAGCCAAATATCAAATGG
ACTATGCCAAGTGGTTATGTAGTAGACAGGCCTCAAATTAATGGGAAATACATATTGCATGACAATGG
CACCTTAGTCATTAAAGAAGCAACAGCTTATGACAGAGGAAACTATATCTGTAAGGCTCAAAATAGTG
TTGGTCATACACTGATTACTGTTCCAGTAATGATTGTAGCCTACCCTCCCCGAATTACAAATCGTCCA
CCCAGGAGTATTGTCACCAGGACAGGGGCAGCCTTTCAGCTGGACTGTGTGGCCTTGGGAGTTCCCAA
GCCAGAAATCACAATGGGAGATGCCTGACCACTCCCTTCTCTCAACGGCAGTAAAGAGAGGACACATG
GAAGTGAGCAGCTTCACTTACAAGGTACCCTAGTCATTCAGAATCCCCAAACCTCCGATTCTGGGATA
TACAAATGCACAGCACTCGAGGGCAAGGGTGGGCGCGCC

| | | | |
|---|---|---|---|
| NOV29aC, CG55776-05 | SEQ ID NO:722 | 652 aa | MW at 72283.3 kD |
| Protein Sequence | | | |

GDKLLLNCSATGEPKPQIMWRLPSKAVVDQQHRVGSWIHVYPNGSLFIGSVTEKDSGVYLCVARNKMG
DDLILMHVSLRLKPAKDHKQYFRKQKTLHGKDFQVDCKASGSPVPEISWSLPDGTMINNAMQADDSGH
RTRRYTLFNNGTLYFNKVGVAEEGDYTCYAQNTLGKDEMVHLTVITAAPRIRQSNKTNKRIKAGDTPA
VLDCEVTGDPKPKIFWLLPSNDMISFSIDRYTFHANGSLTINKVKLLDSGEYVCVARNPSGDDTKAYK
LDVVSKPPLINGLYTNRTVIKATAVRHSKKHFDCRAEGTPSPEVMWIMPDNIFLTAPYYGSRITVHKN
GTLEIRNVRLSDSADFICVAPNEGGESVLVVQLEVLEMLRRPTFRNPFNEKIVAQLGKSTALNCSVDG
NPPPEIIWILPNGTRFSNGPQSYQYLIASNGSFIISKTTREDAGKYRCAARNKVGYIEKLVILEIGQK
PVILTYAPGTVKGISGESLSLHCVSDGIPKPNIKWTMPSGYVVDRPQINGKYILHDNGTLVIKEATAY
DRGNYICKAQNSVGHTLITVPVMIVAYPPRITNRPPRSIVTRTGAAFQLHCVALGVPKPEITWEMPDH
SLLSTASKERTHGSEQLHLQGTLVIQNPQTSDSGIYKCTA

| | | |
|---|---|---|
| NOV29ad, CG55776-06 | SEQ ID NO:723 | 1975 bP |
| DNA Sequence | ORF Start: at 11 | ORF Stop: at 1967 |

CACCAGATCTGGGGACAAATTACTACTGAACTGCTCAGCCACTGGGGAGCCCAAACCCCAAATAATGT
GGAGGTTACCATCCAAGGCTGTGGTCGACCAGCAGCATAGAGTGGGCAGCTGGATCCACGTCTACCCT
AATGGATCCCTGTTTATTGGATCAGTAACAGAAAAAGACAGTGGTGTCTACTTGTGTGTGGCAAGAAA
CAAAATGGGGGATGATCTGATACTGATGCATGTTAAAGCCTAAGACTGACCTGCCAAAATTGACCACA
AGCAGTATTTAGAAAGCAAGTGCTCCATGGGAAAGATTTCCAAGTAGAATTGCAAAGCTTCCGGCTCC
CCAGTGCCAGAGATATCTTGGAGTTTGCCTGATGGAACCATGATCAACAATGCAATGCAAGCCGATGA
CAGTGGCCACAGGACTAGGAGATATACCCTTTTCACATGGAACAATTTAATACTTCAACAAGTTGGGG
TAGCGGAGGAAGGAGATTATACTTGCTATGCCCAGAACACCCTAGGGAAAGATGAAATGAAGGTCCAC
TTAACAGTTATAACAGCTGCTCCCCGGATAAGGCAGAGTAACAAAACCAACAAGAGAATCAAAGCTGG
AGACACAGCTGTCCTTGACTGTGAGGTCACTGGGGAATCCCAAACCAAAATATTTTGGTTGCTGCCTT
CCAATGACATGATTTCCTTCTCCATTGATAGGTACAACATTTCATGCCAATGGGTCTTTGACCATCAC
AAAGTGAAACTGCTCGATTCTGGAGAGTACGTAATGTGTAGCCCGATCCCAGTGGGGATGACACCAAA
AAATGTACAAACTGGATGTGGTCTCTAACCTCCAATTAATCAATGGTCTGTAATAACACAGACTGTTA
TTAAAGCCACAGCTGTGAGACATTCCAAAAAACACTTTGACTGCAGAGCTGAAGGGACACCATCTCCT
CCATAAAATGGAACCTTGGAAATTAGGAATGTGAGGCTTTCAGATTCAGCCGACTTTAATCTGTGTGG
CCCGAAATGAAGGTGGAGAGAGCGTGTTGGTAGTACAGTTAGAAGTACTGGAAATGCTGAGAAGACCG
ACATTTAGAAATCCATTTAATGAAAAAATAGTTGCCCAGCTGGGAAAGTCCACAGCATTGAATTGCTC
TGTTGATGGTAACCCACCACCTGAUATAATCTGGATTTTACCAAATGGCACACGATTTTCCAATGGAC
CACAAAGTTATCAGTATCTGATAGCAAGCAATGGTTCTTTTATCATTTCTA1KAACACTCGGGAGGAT
GCAGGAAAATATCGCTGTGCAGCTAGGAATAAAGTTGGCTATATTGAAAGATTAGTCATATTAGAAAT
TGGCCAGAAGCCAGTTATTCTTACCTATGCACCAGGGACAGTAAAAGGCATCAGTGGAGAATCTCTAT
CACTGCATTGTGTGTCTGATGGAATCCCTAAGCCAATATCAAATGGACTATGCCAAAGTGGTTATGTA
GTAGACAGGCCTCAATTAATGGGAAATAAACATATTGCATGACATGGCACCTTAGTCATTAAAGAAGC
AACAGCTTATGACAGAGGAAACTATATCTGTAAGGCTCAAATAGTGTTGGTCATACAACTGATTACTG
TTCCAGTAATGATTGTAGCCTACCCTCCCCGAATTACAAATCGTCCACCCAGGAGTATTGTCACCAGG
ACAGGGGCAGCCTTTCAGCTCCACTGTGTGGCCTTGGGAGTTCCCAAGCCAGAAATCACATGGGAGAT
AAGGTACCCTAGTCATTCAGAATCCCCAAACCTCCGATTCTGGGATATACAAATGCACAGCAGAATTC
GGC

| | | | |
|---|---|---|---|
| NOV29ad, CG55776-06 | SEQ ID NO:724 | 652 aa | MW at 72283.3 kD |
| Protein Sequence | | | |

GDKLLLNCSATGEPKPQIMWRLPSKAVVDQQHRVGSWIHVYPNGSLFIGSVTEKDSGVYLCVARNKAG
DDLILMHVSLRLKPAKIDHKQYFRKQVLHGKDFQVDCKASGSPVPEISWSLPDGTMINNAMQADDSGH
RTRRYTLFNNGTLYFNKVGVAEEGDYTCYAQNTLGKDEMKVHLTVITAAPRIRQSNKTNKRIKAGDTA
VLDCEVTGDPKPKIFWLLPSNDMISFSIDRYTFHANGSLTINKVKLLDSGEYVCVARNPSGDDTKMYK
LDWSKPPLINGLYTNRTVIKATAVRHSKKIHFDCRAEGTPSPEVMWIMPDNIFLTAPYYGSRITVHKN
GTLEIRNVRLSDSADFICVARNEGGESVLVVQLEVLEMLRRPTFRNPFNEKIVAQLGKSTALNCSVDG
NPPPEIIWILPNGTRFSNGPQSYQYLIASNGSFIISKTTREDAGKYRCAARNKVGYIEKLVILEIGQK
PVILTYAPGTVKGISGESLSLHCVSDGIPKPNIKWTMPSGYVVDRPQINGKYILHDNGTLVIKEATAY
DRGNYICKAQNSVGHTLITVPVMIVAYPPRITNRPPRSIVTRTGAAFQLHCVALGVPKPEITWEMPDH
SLLSTASKERTHGSEQLHLQGTLVTQNPQTSDSGIYKCTA

| | | |
|---|---|---|
| NOV29ae, CG55776-07 | SEQ ID NO:725 | 2902 bP |
| DNA Sequence | ORF Start: at 11 | ORF Stop: at 2894 |

CACCCTCGAGAACTCAGATGCCTTTCTTCCCTGTGAAGCTGTTGGAAATCCCCTGCCCACCATTCATT
GGACCAGAGTCCCATCAGGACTTGATTTATCTAAGAGGAAACAGAATAGCAGGGTCCAGGTTCTCCCC
AATGGTACCCTGTCCATCCAGAGGGTGGAAATTCAGGACCGCGGACAGTACTTGTGTTCCGCATCCAA
TCTGTTTGGCACAGACCACCTTCATGTCACCTTGTCTGTGGTTTCCTATCCTCCCAGGATCCTGGAGA
GACGTACCAAGAGATCACAGTTCATTCCGGAAGCACTGTGGACTGAAGTGCAGAGCAGAAAAGGTAGG
CCAAGCCCTACAGTTACCTGGATTCTTGCAAACCAAACAGTTGTCTCAGAATCATCCCAGGGAAGTAG
GCAGGCTGTGGTGACGGTTGACGGAACATTGGTCCTCCACAATCTCAGTATTTATGACCGTGGCTTTT
ACAAATGTGTGGCCAGCAACCCAGGTGGCCAGGATTCACTGCTGGTTAAAATACAAGTCATTGCAGCA
CCACCTGTTATTCTAGAGCAAAGGAGGCAAGTCATTGTAGGCACTTGGGGTGAAAGTTTAAAACTGCC
CTGTACTGCAAAGGAACTCCTCAGCCCAGCGTTTACTGGGTCCTCTCTGATGGCACTGAAAGTGAAAC
CATTACAGTTTACCAATTCCAAGTTGTTCTTATTTTCAAATGGGACTTTGTATATAAGAAACCTAGCC
TCTTCAGACAGGGGCACTTATGAATGCATTGCTACCAGTTCCACTGGTTCGGAGCGAAGAGTAGTAAT
GCTTACAATGGAAGAGCGAGTGACCAGCCCCAGGATAGAAGCTGCATCCCAGAAAAGGACTGAAGTGA
ATTTTGGGGACAAATTACTACTGAACTGCTCAGCCACTGGGGAGCCCAAACCCCAAATAATGTGGAGG
TTACCATCCAAGGCTGTGGTCGACCAGCAGCATAGAGTGGGCAGCTGGATCCACGTCTACCCTAATGG
ATCCCTGTTTATTGGATCAGTAACAGAAGACAAAGTGGTGTCTAACTTGTGTGTGGCAAGAAACAAAA
TGGGGGATGATCTGATACTGATGCATGTTAGCCTAAGACTGAAACCTGCCAAAATTGACCACAAGCAG
TATTTTAGAAAGCAAGTGCTCCATGGGAAAGATTTCCAAGTAGATTGCAAAGCTTCCGGCTCCCCAGT
GCCAGAGATATCTTGGAGTTTGCCTGATGGAACCATGATCAACAATGCAATGCAAGCCGATGACAGTG
GCCACAGGACTAGGAGATATACCCTTTTCAACAATGGAACTTTATACTTCAACAAAGTTGGGGTAGCG
GAGGAAGGAGATTATACTTGCTATGCCCAGAACACCCTAGGGAAAGATGAAATGAAGGTCCACTTAAC
CAGCTGTCCTTGACTGTGAGGTCACTGGGGATCCCAAACCAAAAATATTTTGGTTGCTGCCTTCCAAT
GACATGATTTCCTTCTCCATTGATAGGTACACATTTCATGCCAATGGGTCTTTGACCATCAAACAAGT
GAAACTGCTCGATTCTGGAGAGTACGTATGTGTAGCCCGAAATCCCAGTGGGGATGACACCAAAATGT
GCCACAGCTGTGAGACATTCCAAAAAACACTTTGACTGCAGAGCTGAAGGGACACCATCTCCTGAAGT
CATGTGGATCATGCCAGACAATATTTTCCTCACAGCCCCATACTATGGAAGCAGAATCACAGTCCATA
AAAATGGAACCTTGGAAATTAGGAATGTGAGGCTTTCAGATTCAGCCGACTTTATCTGTGTGGCCCGA
AATGAAGGTGGAGAGAGCGTGTTGGTAGTACAGTTAGAAGTACTGGAAATGCTGAGAAGACCGACATT
TAGAAATCCATTTAATGAAAAAATAGTTGCCCAGCTGGGAAAGTCCACAGCATTGAATTGCTCTGTTG
AGTTATCAGTATCTGATAGCAAGCAATGGTTCTTTTATCATTTCTAAAACAACTCGGGAGGATGCAGG
AAAATATCGCTGTGCAGCTAGGAATAAAGTTGGCTATATTGAGAAATTAGTCATATTAGAAATTGGCC
AGAAGCCAGTTATTCTTACCTATGCACCAGGGACAGTAAAAGGCATCAGTGGAGAATCTCTATCACTG
CATTGTGTGTCTGATGGAATCCCTAAGCCAAATATCAAATGGACTATGCCAAGTGGTTATGTAGTAGA
GTAATGATTGTAGCCTACCCTCCCCGAATTACAAATCGTCCACCCAGGAGTATTGTCACCAGGACAGG
GGCAAGCCTTTCAGCTCCACTGTGTGGCCTTGGGAGTTCCCAAGCCAGAATCACGTGGGAGATGCCTG
ACCACTCCCTTCTCTCAACGGCAAGTAAAGAGAGGACACATGGAAGTGAGCAGCTTCACTTAACAGGT
ACCCTAGTCATTCAGAATCCCCAAACCTCCGATTCTGGGATATACAAATGCACAGCAAAGAACCCACT
TGGTAGTGATTATGCAGCAACGTATATTCAAGTAATCCTCGAGGGC

| | | | |
|---|---|---|---|
| NOV29ae, CG55776-07 | SEQ ID NO:726 | 961 aa | MW at 106268.6 kD |
| Protein Sequence | | | |

NSDAFLPCEAVGNPLPTIHWTRVPSGLDLSKRKQNSRVQVLPNGTLSIQRVEIQDRGQYLCSASNLFG
TDHLHVTLSVVSYPPRILERRTKEITVHSGSTVELKCRAEGRPSPTVTWILANQTVTSESSQGSRQAV
VTVDGTLVLHNLSIYDRGFYKCVASNPGGQDSLLVKIQVIAAPPVILEQRRQVIVGTWGESLKLPCTA
KGTPQPSVYWVLSDGTEVKPLQFTNSKLFLFSNGTLYIRNLASSDRGTYECIATSSTGSERRVVMLTM
EERVTSPRIEAASQKRTEVNFGDKLLLNCSATGEPKPQIMWRLPSKAVVDQQHRVGSWIHVYPNGSLF
IGSVTEKDSGVYLCVARNKMGDDLILMHVSLRLKPAKIDHKQYFRKQVLHGKDFQVDCKASGSPVPEI
SWSLPDGTMINNAMQADDSGHRTRRYTLFNNGTLYFNKVGVAEEGDYTCYAQNTLGKDEMKVHLTVIT
AAPRIRQSNKTNKRIKAGDTAVLDCEVTGDPKPKIFWLLPSNDMISFSIDRYTFHANGSLTINKVKLL
DSGEYVCVARNPSGDDTKMYKLDVVSKPPLINGLYTNRTVIKATAVRHSKKHFDCREAGTPSPEVMWI
MPDNIFLTAPYYGSRITVHKINGTLEIRNVRLSDSADFICVARNEGGESVLVQLEVLEMLRRPTFRNP
FNEKIVAQLGKSTALNCSVDGNPPPEIIWILPNGTRFSNGPQSYQYLIASNGSFIISKTTREDAGKYR
CAARNKVGYIEKLVILEIGQKPVILTYAPGTVKGISGESLSLHCVSDGIPKPNIKWTMPSGYVVDRPQ
INGKYILHDNGTLVIKEATAYDRGNYICKAQNSVGHTLITVPVMIVAYPPRITNRPPRSIVTRTGAAF
QLHCVALGVPKPEITWEMPDHSLLSTASKERTHGSEQLHLQGTLVIQNPQTSDSGIYKCTAKNPLGSD
YAATYIQVI

| | | |
|---|---|---|
| NOV29af, CG55776-08 | SEQ ID NO:727 | 2902 bP |
| DNA Sequence | ORF Start: at 11 | ORF Stop: at 2894 |

CACCAGATCTAACTCAGATGCCTTTCTTCCCTGTGAAGCTGTTGGAAATCCCCTGCCCACCATTCATT
GGACCAGAGTCCCATCAGGACTTGATTTATCTAAGAGGAAACAGAATAGCAGGGTCCAGGTTCTCCCC
AATGGTACCCTGTCCATCCAGAGGGTGGAAATTCAGGACCGCGGACAGTACTTGTGTTCCGCATCCAA
TCTGTTTGGCACAGACCACCTTCATGTCACCTTGTCTGTGGTTTCCTATCCTCCCAGGATCCTGGAGA
GACGTACCAAAGAGATCACAGTTCATTCCGGAAGCACTGTGGAACTGAAGTGCAGAGCAGAAGGTAGG
CCAAGCCCTACAGTTACCTGGATTCTTGCAAACCAAACAGTTGTCTCAGAATCATCCCAGGGAAGTAG
GCAGGCTGTGGTGACGGTTGACGGAACATTGGTCCTCCACAATCTCAGTATTTATGACCGTGGCTTTT
ACAAATGTGTGGCCAGCAACCCAGGTGGCCAGGATTCACTGCTGGTTATAATACAAGTCATTGCAGCA
CCACCTGTTATTCTAGAGCAAAGGAGGCAAGTCATTGTAGGCACTTGGGGTGAAAGTTTAAAACTGCC
CTGTACTGCAAAAGGAACTCCTCAGCCCAGCGTTTACTGGGTCCTCTCTGATGGCACTGAAGTGAAAC
CATTACAGTTTACCAATTCCAAGTTGTTCTTATTTTCAAATGGGACTTTGTATATAAGAAACCTAGCC
TCTTCAGACAGGGGCACTTATGAATGCATTGCTACCAGTTCCACTGGTTCGGAGCGAAGAGTAGTAAT
GCTTACAATGGAAGAGCGAGTGACCAGCCCCAGGATAGAAGCTGCATCCCAGAAAAGGACTGAAGTGA
ATTTTGGGGACAAATTACTACTGAACTGCTCAGCCACTGGGGAGCCCAAACCCCAAATAATGTGGAGG
TTACCATCCAAGGCTGTGGTCGACCAGCAGCATAGAGTGGGCAGCTGGATCCACGTCTACCCTAATGG
ATCCCTGTTTATTGGATCAGTAACAGAAAAAGACAGTGGTGTCTACTTGTGTGTGGCAAGAAACAAAA
TGGGGGATGATCTGATACTGATGCATGTTAGCCTAAGACTGAAACCTGCCAAAATTGACCACAAGCAG
TATTTTAGAAAGCAAGTGCTCCATGGGAAAGATTTCCAAGTAGATTGCAAAGCTTCCGGCTCCCCAGT
GCCAGAGATATCTTGGAGTTTGCCTGATGGAACCATGATCAACAATGCAATGCAAGCCGATGACAGTG
GCCACAGGACTAGGAGATATACCCTTTTCAACAATGGAACTTTATACTTCAACAAAGTTGGGGTAGCG
GAGGAAGGAGATTATACTTGCTATGCCCAGAACACCCTAGGGAAAGATGAAATGAAGGTCCACTTAAC
AGTTATAACAGCTGCTCCCCGGATAAGGCAGAGTAACAAAACCAACAAGAGAATCAAAGCTGGAGACA
CAGCTGTCCTTGACTGTGAGGTCACTGGGGATCCCAAACCAAAAATATTTTGGTTGCTGCCTTCCAAT
GACATGATTTCCTTCTCCATTGATAGGTACACATTTCATGCCAATGGGTCTTTGACCATCAACAAAGT
GAAACTGCTCGATTCTGGAGAGTACGTATGTGTAGCCCGAAATCCCAGTGGGGATGACACCAAAATGT
ACAAACTGGATGTGGTCTCTAAACCTCCATTAATCAATGGTCTGTATACAAATAGAACTGTTATTAAA
CATGTGGATCATGCCAGACAATATTTTCCTCACAGCCCCATACTATGGAAGCAGAATCACAGTCCATA
AAAATGGAACCTTGGAAATTAGGAATGTGAGGCTTTCAGATTCAGCCGACTTTATCTGTGTGGCCCGA
AATGAAGGTGGAGAGAGCGTGTTGGTAGTACAGTTAGAAGTACTGGAAATGCTGAGAAGACCGACATT
TAGAAATCCATTTAATGAAAAAATAGTTGCCCAGCTGGGAAAGTCCACAGCATTGAATTGCTCTGTTG
ATGGTAACCCACCACCTGAAATAATCTGGATTTTACCAAATGGCACACGATTTTCCAATGGACCACAA
AAAATATCGCTGTGCAGCTAGGAATAAAGTTGGCTATATTGAGAAATTAGTCATATTAGAAATTGGCC
AGAAGCCAGTTATTCTTACCTATGCACCAGGGACAGTAAAAGGCATCAGTGGAGAATCTCTATCACTG
CATTGTGTGTCTGATGGAATCCCTAAGCCAAATATCAAATGGACTATGCCAAGTGGTTATGTAGTAGA
CAGGCCTCAAATTAATGGGAAATACATATTGCATGACAATGGCACCTTAGTCATTAAAGAAGCAACAG
CTTATGACAGAGGAAACTATATCTGTAAGGCTCAAAATAGTGTTGGTCATACACTGATTACTGTTCCA
GTAATGATTGTAGCCTACCCTCCCCGAATTACAAATCGTCCACCCAGGAGTATTGTCACCAGGACAGG
GGCAGCCTTTCAGCTCCACTGTGTGGCCTTGGGAGTTCCCAAGCCAGAAATCACGTGGGAGATGCCTG
ACCACTCCCTTCTCTCAACGGCAAGTAAAGAGAGGACACATGGAAGTGAGCAGCTTCACTTACAAGGT
ACCCTAGTCATTCAGAATCCCCAAACCTCCGATTCTGGGATATACAAATGCACAGCAAAGAACCCACT
TGGTAGTGATTATGCAGCAACGTATATTCAAGTAATCCTCGAGGGC

| | | | |
|---|---|---|---|
| NOV29af, CG55776-08 | SEQ ID NO:728 | 961 aa | MW at 106268.6 kD |
| Protein Sequence | | | |

NSDAFLPCEAVGNPLPTIHWTRVPSGLDLSKRKQNSRVQVLPNGTLSIQRVEIQDRGQYLCSASNLFG
TDHLHVTLSVVSYPPRILERRTKEITVHSGSTVELKCEAEGRPSPTVTWILANQTVVSESSQGSRQAV
VTVDGTLVLHNLSIYDRGFYKCVASNPGGQDSLLVKIQVIAAPPVILEQRRQVIVGTWGESLKLPCTA
KGTPQPSVYWVLSDGTEVKPLQFTNSKLFLFSNGTLYIENLASSDRGTYECIATSSTGSERRVVMLTM
EERVTSPRIEAASQKRTEVNFGDKLLLNCSATGEPKPQIMWRLPSKAVVDQQHRVGSWIHVYPNGSLF
IGSVTEKDSGVYLCVARNKMGDDLILMHVSLRLKPAKDHKQYFRKQKTLHGKDFQVDCKASGSPVPEI
SWSLPDGTMINNAMQADDSGHRTRRYTLFNNGTLYFNKVGVAEEGDYTCYAQNTLGKDEMKVHLTVIT
AAPRIRQSNKTNKRIKAGDTAVLDCEVTGDPKPKIFWLLPSNDMISFSIDRYTFHANGSLTINKVKLL
DSGEYVCVARAPSGDDTKMYKLDVVSKPPLINGLYTNRTVIKATAVRHSKKHFDCRAEGTPSPEVMWI
MPDNIFLTAPYYGSRITVHKNGTLEIRNVRLSDSADFICVARNEGGESVLVVQLEVLEMLRRPTFANP
FNEKIVAQLGKSTALNCSVDGNPPPEIIWILPNGTRFSNGPQSYQYLIASNGSFIISKTTREDAGKYR
CAARNKVGYIEKLVILEIGQKPVILTYAPGTVKGISGESLSLHCVSDGIPKPNIKWTMPSGYVVDRPQ
INGKYILHDNGTLVIKEATAYDRGNYICKAQNSVGHTLITVPVMIVAYPPRITNRPPRSIVTRTGAAF
QLHCVALGVPKPEITWEMPDHSLLSTASKERTHGSEQLHLQGTLVIQNPQTSDSGIYKCTAKNPLGSD
YAATYIQVI

| | | |
|---|---|---|
| NOV29ag, CG55776-09 | SEQ ID NO:729 | 778 bP |
| DNA Sequence | ORF Start: at 11 | ORF Stop: at 770 |

CACCGGATCCGCCTGTCCTCGCCGCTGTGCCTGTTATATGCCTACGGAGGTACACTGCACATTTCGGT
ACCTGACTTCCATCCCAGACAGCATCCCGCCCAATGTGGAACGCATCAATTTAGGATACAACAGCTTG
GTTAGATTGATGGAAACAGATTTTTCTGGCCTGACCAAACTGGAGTTACTCATGCTTCACAGCAATGG
CATTCACACAATCCCTGACAAGACCTTCTCAGATTTGCAGGCCTTGCAGGTCTTAAAAATGAGCTATA
ACAAAGTCCGAAAACTTCAGAAAGATACTTTTTATGGCCTCAGGAGCTTGACACGATTGCACATGGAC
CACAACAATATTGAGTTTATAAACCCAGAGGTTTTTGATGGGCTCAACTTTCTCCGCCTGGTGCACTT
GGAAGGAAATCAGCTCACTAAGCTCCACCCAGATACATTTGTCTCTTTGAGCTACCTCCAGATATTTA
AAATCTCTTTCATTAAGTTCCTATACTTGTCTGATAACTTCCTGACCTCCCTCCCTCAAGAGATGGTC
TCCTATATGCCTGACCTAGACAGCCTTTACCTGCATGGAAACCCATGGACCTGTGATTGCCATTTAAA
GTGGTTGTCTGACTGGATACAGGAGAAGCCAGATGTAATAAAATGCAAAAAAGATAGAAGTCCCTCTA
GTGCTCAGCAGTGTCCACTTTGCATGAACCCTAGGACTTCTAAAGGCAAGCCGTTAGCTATGGTCTCA
GCTGCAGCTTTCCAGTGTGCCCTCGAGGGC

| | | | |
|---|---|---|---|
| NOV29ag, CG55776-09 | SEQ ID NO:730 | 253 aa | MW at 29129.5 kD |

ACPRRCACYMPTEVHCTFRYLTSIPDSIPPNVERINLGYNSLVRLMETDFSGLTKLELLMLHSNGIHT
IPDKTFSDLQALQVLKMSYNKVRKLQKDTFYGLRSLTRLHMDHNNIEFINPEVFDGLNFLRLVHLEGN
QLTKLHPDTFVSLSYLQIFKISFIKFLYLSDNFLTSLPQEMVSYMPDLDSLYLHGNPWTCDCHLKWLS
DWIQEKPDVIKCKKDRSPSSAQQCPLCMNPRTSKGKPLAMVSAAAFQCA

| | | |
|---|---|---|
| NOV29ah, SNP13376522 of | SEQ ID NO:731 | 7876 bP |
| CG55776-01, | ORF Start: ATG at 6 | ORF Stop: TGA at 7857 |
| DNA Sequence | SNP Pos: 87 | SNP Change: G to A |

TCAGGATGAAGGTAAAAGGCAGAGGAATCACCTGCTTGCTGGTCTCCTTTGCTGTGATCTGCCTGGTC
GCCACCCCTGGGGGCAAGACCTGTCCTCGCCGCTGTGCCTGTTATATGCCTACGGAGGTACACTGCAC
ATTTCGGTACCTGACTTCCATCCCAGACAGCATCCCGCCCAATGTGGAACGCATCAATTTAGGGTACA
ACAGCTTGGTTAGATTGATGGAAACAGATTTTTCTGGCCTGACCAAACTGGAGTTACTCATGCTTCAC
AGCAATGGCATTCACACAATCCCTGACAAGACCTTCTCAGATTTGCAGGCCTTGCAGGTGAGACTGAT
GGTCTTAAAAATGAGCTATAATAAAGTCCGAAAACTTCAGAAAGATACTTTTTATGGCCTCAGGAGCT
TGACACGATTGCACATGGACCACAACAATATTGAGTTTATAAACCCAGAGGTTTTTTATGGGCTCAAC
TTTCTCCGCCTGGTGCACTTGGAAGGAAATCAGCTCACTAAGCTCCACCCAGATACATTTGTCTCTTT
GAGCTACCTCCAGATATTTAAAATCTCTTTCATTAAGTTCCTATACTTGTCTGATAACTTCCTGACCT
CCCTCCCTCAAGAGATGGTCTCCTATATGCCTGACCTAGACAGCCTTTACCTGCATGGAAACCCATGG
ACCTGTGATTGCCATTTAAAGTGGTTGTCTGACTGGATACAGGAGAAGCCAGGTATCTATATTGTNTT
ACCAGATGTAATAAAATGCAAAAAAGATAGAAGTCCCTCTAGTGCTCAGCAGTGTCCACTTTGCATGA
ACCCTAGGACTTCTAAAGGCAAGCCGTTAGCTATGGTCTCAGCTGCAGCTTTCCAGTGTGCCAAGCCA
ACCATTGACTCATCCCTGAAATCAAAGAGCCTGACTATTCTGGAAGACAGTAGTTCTGCTTTCATCTC
TCCCCAAGGTTTCATGGCACCCTTTGGCTCCCTCACTTTGAATATGACAGATCAGTCTGGAAATGAAG
CTAACATGGTCTGCAGTATTCAAAAGCCCTCAAGGACATCACCCATTGCATTCACTGAAGAAAATGAC
TACATCGTGCTAAATACTTCATTTTCAACATTTTTGGTGTGCAACATAGATTACGGTCACATTCAGCC
AGTGTGGCAAATTTTGGCTTTGTACAGTGATTCTCCTCTGATACTAGAAAGGAGCCACTTGCTTAGTG
AAACACCGCAGCTCTATTACAAATATAAACAGGTGGCTCCTAAGCCTGAAGACATTTTTACCAACATA
GAGGCAGATCTCAGAGCAGATCCCTCTTGGTTAATGCAAGACCAAATTTCCTTGCAGCTGAACAGAAC
TGCCACCACATTCAGTACATTACAGATCCAGTACTCCAGTGATGCTCAAATCACTTTACCAAGAGCAG
AGATGAGGCCAGTGAAACACAAATGGACTATGATTTCAAGGGATAACAATACTAAGCTGGAACATACT
GTCTTGGTAGGTGGAACCGTTGGCCTGAACTGCCCAGGCCAAGGAGACCCCACCCCACACGTGGATTG
GCTTCTAGCTGATGGAAGTAAAGTGAGAGCCCCTTATGTCAGTGAGGATGGACGGATCCTAATAGACA
AAAGTGGAAAATTGGAACTCCAGATGGCTGATAGTTTTGACACAGGCGTATATCACTGTATAAGCAGC
AATTATGATGATGCAGATATTCTCACCTATAGGATAACTGTGGTAGAACCTTTGGTCGAAGCCTATCA
GGAAAATGGGATTCATCACACAGTTTTCATTGGTGAAACACTTGATCTTCCATGCCATTCTACTGGTA
TCCCAGATGCCTCTATTAGCTGGGTTATTCCAGGAAACAATGTGCTCTATCAGTCATCAAGAGACAAG
AAAGTTCTAAACAATGGCACATTAAGAATATTACAGGTCACCCCGAAAGACCAAGGTTATTATCGCTG
TGTGGCAGCCAACCCATCAGGGGTTGATTTTTTGATTTTCCAAGTTTCAGTCA7AGATGAAAGGACAA
GGCCCTTGGAGCATGATGGAGAAACAGAGGGATCTGGACTTGATGAGTCCAATCCTATTGCTCATCTT
AAGGAGCCACCAGGTGCACAACTCCGTACATCTGCTCTGATGGAGGCTGAGGTTGGAAAACACACCTC
AAGCACAAGTAAGAGGCACAACTATCGGGAATTAACACTCCAGCGACGTGGAGATTCAACACATCGAC
GTTTTAGGGAGAATAGGAGGCATTTCCCTCCCTCTGCTAGGAGAATTGACCCACAACATTGGGCGGCA
CTGTTGGAGAAAGCTAAAAAGAATGCTATGCCAGACAAGCGAGAAAATACCACAGTGAGCCCACCCCC
AGTGGTCACCCAACTCCCAAACATACCTGGTGAAGAAGACGATTCCTCAGGCATGCTCGCTCTACATG
AGGAATTTATGGTCCCGGCCACTAAAGCTTTGAACCTTCCAGCAAGGACAGTGACTGCTGACTCCAGA
ACAATATCTGATAGTCCTATGACAAACATAAATTATGGCACAGAATTCTCTCCTGTTGTGAATTCACA
AATACTACCACCTGAAGAACCCACAGATTTCAAACTGTCTACTGCTATTAAAACTACAGCCATGTCAA
AGAATATAAACCCAACCATGTCAAGCCAAATACAAGGCACAACCAATCAACATTCATCCACTGTCTTT
CCACTGCTACTTGGAGCAACTGAATTTCAGGACTCTGACCAGATGGGAAGAGGAAGAGAGCATTTCCA
AAGTAGACCCCCAATAACAGTAAGGACTATGATCAAAGATGTCAATGTCAAAATGCTTAGTAGCACCA
CCAACAAACTATTATTAGAGTCAGTAAATACCACAAATAGTCATCAGACATCTGTAAGAGAAGTGAGT
GAACCCAGGCACAATCACTTCTATTCTCACACTACTCAAATACTTAGCACCTCCACGTTCCCTTCAGA
TCCACACACAGCTGCTCATTCTCAGTTTCCGATCCCTAGAAATAGTACAGTTAACATCCCGCTGTTCA
GACGCTTTGGGAGGCAGAGGAAAATTGGCGGAAGGGGGCGGATTATCAGCCCATATAGAACTCCAGTT
CTGCGACGGCATAGATACAGCATTTTCAGGTCAACAACCAGAGGTTCTTCTGAAAAAAGCACTACTGC
ATTCTCAGCCACAGTGCTCAATGTGACATGTCTGTCCTGTCTTCCCAGGGAGAGGCTCACCACTGCCA
CAGCAGCATTGTCTTTTCCAAGTGCTGCTCCCATCACCTTCCCCAAAGCTGACATTGCTAGAGTCCCA
TCAGAAGAGTCTACAACTCTAGTCCAGAATCCACTATTACTACTTGAGAACAAACCCAGTGTAGAGAA
AACAACACCCACAATAAAATATTTCAGGACTGAAATTTCCCAAGTGACTCCAACTGGTGCAGTCATGA
CATATGCTCCAACATCCATACCCATGGAAAAAACTCACAAAGTAAACGCCAGTTACCCACGTGTGTCT
AGCACCAATGAAGCTAAAAGAGATTCAGTGATTACATCGTCACTTTCAGGTGCTATCACCAAGCCACC
AATGACTATTATAGCCATTACAAGGTTTTCAAAGAAGGAAATTCCCTGGCAACAGAACTTTGTAAATA
ACCATAACCCAAAGGCAGATTAAGGAATCAAACATAAAGTTAGTTTACAA3AAAGCACAGCTGTGATG
CTTCCTAAACATCTCCTGCTTTACCACAGAGAACAAAGTCTCCCCTCGCACCACACTACGACCAAAAC
ACACAATCCTGGAAGTCTTCCAACAAAGAAGGAGCTTCCCTTCCCACCCCTTAACCCTATGCTTCCTA
GTATTATAAGCAAAGACTCAAGTACAAIAAGCATCATATCAACGCAAACAGCAATACCAGCAACAACT
CCTACCTTCCCTGCATCTGTCATCACTTATGAAACCCAAACAGAGAGATCTAGAGCACAAACAATACA
AAGAGAACAGGAGCCTCAAGAAGAACAGGAACTGAACCCAAACATCTCTCCAGACCAGAGTTCTGGCT
TCACTACACCCACTGCTATGACACCTCCTGTTCTAACCACAGCCGAAACTTCAGTCAAGCCCAGTGTC
TCTGCATTCACTCATTCCCCACCAGAAAACACAACTGGGATTTCAAGCACAATCAGTTTTCATTCAAG
ACTCTTAATCTGACAGATGTGATTGAIAGAACTAGCCCAAGCAAGTACTCAGACTTTGAAGAGCACAA
TTGCTTCTGAACAACTTTGTCCAGCAAATCAACACCAGAGTACCACAACTAGGAAAGCAATCATTAGA
CACTCAACCATACCACCATTCTTGAGCAGCAGTGCTACTCTAATGCCAGTTCCCATCTCCCCTCCCTT
AAGGTTCACCCAAATGCCAAGTTCACAATTGGAACCACTCACTTCATCTACTCTAATCTGTTACATTC
TACTCCCATGCCAGCAACTAACAACAGTTAATCACAGAATTCTAAATTAACTCCATCTCCCTGGGCAG
AAAACCAATTTTGGCACAAACCATACTCAGAAATTGCTGAAAAAGGCAAAAAGCCAGAAGTAAGCATG
TTGGCTACTACAGGCCTGTCCGAGGCCACCACTCTTGTTTCAGATTGGGATGGACAGAAGAACACAAA
GAAGAGTGACTTTGATAAGAAACCAGTTCAAGAAGCAACAACTTCCAAACTCCTTCCCTTTGACTCTT
TGTCTAGGTATATATTTGAAAAGCCCAGGATAGTTGGAGGAAAAGCTGCAAGTTTTACTATTCCAGCT
CCCATCAGGTATGTCAGGACTTGATTTATCTAAGAGGAAACAGAATAGCAGGGTCCAGGTTCTCCCCA
ATGGTACCCTGTCCATCCAGAGGGTGGAAATTCAGGACCGCGGACAGTACTTGTGTTCCGCATCCAAT
CTGTTTGGCACAGACCACCTTCATGTCACCTTGTCTGTGGTTTCCTATCCTCCCAGGATCCTGGAGAG
ACGTACCAAAGAGATCACAGTTCATTCCGGAAGCACTGTGGAACTGAAGTGCAGAGCAGAAGGTAGGC
CAAGCCCTACAGTTACCTGGATTCTTGCACCAAACAAAGTTGTCTCAGAATCATCCCAGGGAAGTAGG
CAGGCTGTGGTGACGGTTGACGGAACATTGGTCCTCCACAATCTCAGTATTTATGACCGTGGCTTTTA
CAAATGTGTGGCCAGCAACCCAGGTGGCCAGGATTCACTGCTGGTTAAAATACAAGTCATTGCAGCAC
CACCTGTTATTCTAGAGCAAAGGAGGCAAGTCATTGTAGGCACTTGGGGTGAAAGTTTAAAACTGCCC
TGTACTGCAAAAGGAACTCCTCAGCCCAGCGTTTACTGGGTCCTCTCTGATGGCACTGAAGTGAAACC
ATTACAGTTTACCAATTCCAAGTTGTTCTTATTTTCAAATGGGACTTTGTATATAAGAAACCTAGCCT
CTTCAGACAGGGGCACTTATGAATGCATTGCTACCAGTTCCACTGGTTCGGAGCGAAGAGTAGTAATG
CTTACAATGGAAGAGCGAGTGACCAGCCCCAGGATAGAAGCTGCATCCCAGAAAAGGACTGAAGTGAA
TTTTGGGGACAAATTACTACTGAACTGCTCAGCCACTGGGGAGCCCAAACCCCAAATAATGTGGAGGT
TACCATCCAAGGCTGTGGTCGACCAGCAGCATAGGGTGGGCAGCTGGATCCACGTCTACCCTAATGGA
GGGGGATGATCTGATACTGATGCATGTTAGCCTAAGACTGAAACCTGCCAAAATTGACCACAAGCAGT
ATTTTAGAAAGCAAGTGCTCCATGGGAAAGATTTCCAAGTAGATTGCAAAGCTTCCGGCTCCCCAGTG
CCAGAGATATCTTGGAGTTTGCCTGATGGAACCATGATCAACAATGCAATGCAAGCCGATGACAGTGG
AGGAAGGAGATTATACTTGCTATGCCCAGAACACCCTAGGGAAAGATGAAATGAAGGTCCACTTAACA
GTTATAACAGCTGCTCCCCGGATAAGGCAGAGTAACAAAACCAACAAGAGAATCAAAGCTGGAGACAC
AGCTGTCCTTGACTGTGAGGTCACTGGGGATCCCAAACCAAAAATATTTTGGTTGCTGCCTTCCAATG
ACATGATTTCCTTCTCCATTGATAGGTACACATTTCATGCCAATGGGTCTTTGACCATCAACAAAGTG
AAACTGCTCGATTCTGGAGAGTACGTATGTGTAGCCCGAAATCCCAGTGGGGATGACACCAAAATGTA
CAAACTGGATGTGGTCTCTAAACCTCCATTAATCAATGGTCTGTATACAAACAGAACTGTTATTAAAG
CCACAGCTGTGAGACATTCCAAAAAACACTTTGACTGCAGAGCTGAAGGGACACCATCTCCTGAAGTC
ATGTGGATCATGCCAGACAATATTTTCCTCACAGCCCCATACTATGGAAGCAGAATCACAGTCCATAA
AAATGGAACCTTGGAAATTAGGAATGTGAGGCTTTCAGATTCAGCCGACTTTATCTGTGTGGCCCGAA
ATGAAGGTGGAGAGAGCGTGTTGGTAGTACAGTTAGAAGTACTGGAAATGCTGAGAAGACCGACATTT
AGAAATCCATTTAATGAAAAAATAGTTGCCCAGCTGGGAAAGTCCACAGCATTGAATTGCTCTGTTGA
TGGTAACCCACCACCTGAAATAATCTGGATTTTACCAAATGGCACACGATTTTCCAATGGACCACAAA
GTTATCAGTATCTGATAGCAAGCAATGGTTCTTTTATCATTTCTAAAACAACTCGGGAGGATGCAGGA
AAATATCGCTGTGCAGCTAGGAATAAAGTTGGCTATATTGAGAAATTAGTCATATTAGAAATTGGCCA
GAAGCCAGTTATTCTTACCTATGCACCAGGGACAGTAAAAGGCATCAGTGGAGAATCTCTATCACTGC
ATTGTGTGTCTGATGGAATCCCTAAGCCAAATATCAAATGGACTATGCCAAGTGGTTATGTAGTAGAC
AGGCCTCAAATTAATGGGAAATACATATTGCATGACAATGGCACCTTAGTCATTAAAGAAGCAACAGC
TTATGACAGAGGAAACTATATCTGTAAGGCTCAAAATAGTGTTGGTCATACACTGATTACTGTTCCAG
TAATGATTGTAGCCTACCCTCCCCGAATTACAAATCGTCCACCCAGGAGTATTGTCACCAGGACAGGG
GCAGCCTTTCAGCTCCACTGTGTGGCCTTGGGAGTTCCCAAGCCAGAAATCACATGGGAGATGCCTGA
CCACTCCCTTCTCTCAACGGCAAGTAAAGAGAGGACACATGGAAGTGAGCAGCTTCACTTACAAGGTA
CCCTAGTCATTCAGAATCCCCAAACCTCCGATTCTGGGATATACAAATGCACAGCAAAGAACCCACTT
GGTAGTGATTATGCAGCAACGTATATTCAAGTAATCTGACATGAAATAATAAAGTC

| | | | |
|---|---|---|---|
| NOV29ah, SNP13376522 of | SEQ ID NO:732 | 2617 aa | MW at 290230.2 kD |
| CG55776-01, Protein Sequence | SNP Pos: 28 | | SNP Change: |
| | | | Ala to Thr |

MKVKGRGITCLLVSFAVICLVATPGGKTCPRRCACYMPTEVHCTFRYLTSIPDSIPPNVERINLGYNS
LVRLMETDFSGLTKLELLMLHSNGIHTIPDKTFSDLQALQVRLMVLKNSYNKVRKLQKDTFYGLRSLT
RLHMDHNNIEFINPEVFYGLNFLRLVHLEGNQLTKLHPDTFVSLSYLQIFKISFIKFLYLSDNFLTSL
PQEMVSYMPDLDSLYLHGNPWTCDCHLKWLSDWIQEKPGIYIVLPDVIKCKKDRSPSSAQQCPLCMNP
RTSKGKPLAMVSAAAFQCAKPTIDSSLKSKSLTILEDSSSAFISPQGFMAPFGSLTLNMTDQSGNEAN
MVCSIQKPSRTSPIAFTEENDYIVLNTSFSTFLVCNIDYGHIQPVWQILALYSDSPLILERSHLLSET
PQLYYKYKQVAPKPEDIFTNIEADLRADPSWLMQDQISLQLNRTATTFSTLQIQYSSDAQITLPRAEM
RPVKHKWTMISRDNNTKLEHTVLVGGTVGLNCPGQGDPTPHVDWLLADGSKVEAPYVSEDGRILIDKS
GKLELQMADSFDTGVYHCISSNYDDADILTYRITVVEPLVEAYQENGIHHTVFIGETLDLPCHSTGIP
DASISWVIPGNAVLYQSSRDKKVLNNGTLRILQVTPKDQGYYRCVAANPSGVDFLIFQVSVKMKGQRP
LEHDGETEGSGLDESNPIAHLKEPPGAQLRTSALMEAEVGKHTSSTSKRHNYRELTLQRRGDSTHRRF
RENRRHFPPSARRIDPQHWAALLEKAKKNAMPDKRENTTVSPPPVVTQLPNIPGEEDDSSGMLALHEE
FMVPATKALNLPARTVTADSRTISDSPMTNINYGTEFSPVVNSQILPPEEPTDFKLSTAIKTTAMSKN
INPTMSSQIQGTTNQHSSTVFPLLLGATEFQDSDQMGRGREHFQSRPPITVRTMIKDVNVKMLSSTTN
KLLLESVNTTNSHQTSVREVSEPRHNHFYSHTTQILSTSTFPSDPHTAAHSQFPIPRNSTVNIPLFRR
FGRQRKIGGRGRIISPYRTPVLRRHRYSIFRSTTRGSSEKSTTAFSATVLNVTCLSCLPRERLTTATA
ALSFPSAAPITFPKADIARVPSEESTTLVQNPLLLLENKPSVEKTTPTIKYFRTEISQVTPTGAVMTY
APTSIPMEKTHKVNASYPRVSSTNEAKRDSVITSSLSGAITKPPMTIIAITRFSRRKIPWQQNFVNNH
NPKGRLRNQHKVSLQKSTAVMLPKTSPALPQRQSLPSHHTTTKTHNPGSLPTKKELPFPPLNPMLPSI
ISKDSSTKSIISTQTAIPATTPTFPASVITYETQTERSRAQTIQREQEPQKKNRTDPNISPDQSSGFT
TPTAMTPPVLTTAETSVKPSVSAFTHSPPENTTGISSTISFHSRTLNLTDVIEELAQASTQTLKSTIA
SETTLSSKSHQSTTTRKAIIRHSTIPPFLSSSATLMPVPISPPFTQRAVTDNVATPISGLMTNTVVKL
HESSRHNAKPQQLVAEVATSPKVHPNAKFTIGTTHFIYSNLLHSTPMPALTTVKSQNSKLTPSPWAEN
QFWHKPYSEIAEKGKKPEVSMLATTGLSEATTLVSDWDGQKNTKKSDFDKKPVQEATTSKLLPFDSLS
RYIFEKPRIVGGKAASFTIPANSDAFLPCEAVGNPLPTIHWTRVPSGMSGLDLSKRKQNSRVQVLPNG
TLSIQRVEIQDRGQYLCSASNLFGTDHLHVTLSVVSYPPRILERRTKEITVHSGSTVELKCRAEGRPS
PTVTWILANQTVVSESSQGSRQAVVTVDGTLVLHNLSIYDRGFYKCVASNPGGQDSLLVKTQVIAAPP
DRGTYECIATSSTGSERRVVMLTMEERVTSPRIEAASQKRTEVNFGDKLLLNCSATGEPKPQIMWRLP
SKAVVDQQHRVGSWIHVYPNGSLFIGSVTEKDSGVYLCVARNKMGDDLILMHVSLRLKPAKIDHKQYF
RKQVLHGKDFQVDCKASGSPVPEISWSLPDGTMINNAMQADDSGHRTRRYTLFNNGTLYFNKVGVAEE
GDYTCYAQNTLGKDEMKVHLTVITAAPRIRQSNKTNKRIKAGDTAVLDCEVTGDPKPKIFWLLPSNDM
ISFSIDRYTFHANGSLTINKVKLLDSGEYVCVARNPSGDDTKMYKLDVVSKPPLINGLYTNRTVIKAT
AVRHSKKHFDCRAEGTPSPEVMWIMPDNIFLTAPYYGSRITVHKNGTLEIRNVRLSDSADFICVARNE
GGESVLVVQLEVLEMLRRPTFRNPFNEKIVAQLGKSTALNCSVDGNPPPEIIWILPNGTRFSNGPQSY
QYLIASNGSFIISKTTREDAGKYRCAARNKVGYIEKLVILEIGQKPVILTYAPGTVKGISGESLSLHC
VSDGIPKPNIKWTMPSGYVVDRPQINGKYILHDNGTLVIKEATAYDRGNYICKAQNSVGHTLITVPVM
IVAYPPRITNRPPRSIVTRTGAAFQLHCVALGVPKPEITWEMPDHSLLSTASKERTHGSEQLHLQGTL
VIQNPQTSDSGIYKCTAKNPLGSDYAATYIQVI

| | | |
|---|---|---|
| NOV29ai, SNP13377624 | SEQ ID NO:733 | 7876 bP |
| of CG55776-01, | ORF Start: ATG at 6 | ORF Stop: TGA at 7857 |
| DNA Sequence | SNP Pos: 113 | SNP Change: T to C |

TCAGGATGAAGGTAAAAGGCAGAGGAATCACCTGCTTGCTGGTCTCCTTTGCTGTGATCTGCCTGGTC
GCCACCCCTGGGGGCAAGGCCTGTCCTCGCCGCTGTGCCTGTTACATGCCTACGGAGGTACACTGCAC
ATTTCGGTACCTGACTTCCATCCCAGACAGCATCCCGCCCAATGTGGAACGCATCAATTTAGGGTACA
ACAGCTTGGTTAGATTGATGGAAACAGATTTTTCTGGCCTGACCAAACTGGAGTTACTCATGCTTCAC
AGCAATGGCATTCACACAATCCCTGACAAGACCTTCTCAGATTTGCAGGCCTTGCAGGTGAGACTGAT
GGTCTTAIAAATGAGCTATAATAAAGTCCGAAAACTTCAGAAAGATACTTTTTATGGCCTCAGGAGCT
TGACACGATTGCACATGGACCACAACAATATTGAGTTTATAAACCCAGAGGTTTTTTATGGGCTCAAC
TTTCTCCGCCTGGTGCACTTGGAAGGAAATCAGCTCACTAAGCTCCACCCAGATACATTTGTCTCTTT
GAGCTACCTCCAGATATTTAAAATCTCTTTCATTAAGTTCCTATACTTGTCTGATAACTTCCTGACCT
CCCTCCCTCAAGAGATGGTCTCCTATATGCCTGACCTAGACAGCCTTTACCTGCATGGAAACCCATGG
ACCTGTGATTGCCATTTAAAGTGGTTGTCTGACTGGATACAGGAGAAGCCAGGTATCTATATTGTNTT
ACCAGATGTAATAAAATGCAAAAAAGATAGAAGTCCCTCTAGTGCTCAGCAGTGTCCACTTTGCATGA
ACCCTAGGACTTCTAAAGGCAAGCCGTTAGCTATGGTCTCAGCTGCAGCTTTCCAGTGTGCCAAGCCA
ACCATTGACTCATCCCTGAAATCAAAGAGCCTGACTATTCTGGAAGACAGTAGTTCTGCTTTCATCTC
TCCCCAAGGTTTCATGGCACCCTTTGGCTCCCTCACTTTGAATATGACAGATCAGTCTGGAAATGAAG
CTAACATGGTCTGCAGTATTCAAAAGCCCTCAAGGACATCACCCATTGCATTCACTGAAGAAAATGAC
TACATCGTGCTAAATACTTCATTTTCAACATTTTTGGTGTGCAACATAGATTACGGTCACATTCAGCC
AGTGTGGCAAATTTTGGCTTTGTACAGTGATTCTCCTCTGATACTAGAAAGGAGCCACTTGCTTAGTG
AAACACCGCAGCTCTATTACAAATATAAACAGGTGGCTCCTAAGCCTGAAGACATTTTTACCAACATA
GAGGCAGATCTCAGAGCAGATCCCTCTTGGTTAATGCAAGACCAAATTTCCTTGCAGCTGAACAGAAC
TGCCACCACATTCAGTACATTACAGATCCAGTACTCCAGTGATGCTCAAATCACTTTACCAAGAGCAG
AGATGAGGCCAGTGAAACACAAATGGACTATGATTTCAAGGGATAACAATACTAAGCTGGAACATACT
GTCTTGGTAGGTGGAACCGTTGGCCTGAACTGCCCAGGCCAAGGAGACCCCACCCCACACGTGGATTG
AAAGTGGAAAATTGGAACTCCAGATGGCTGATAGTTTTGACACAGGCGTATATCACTGTATAAGCAGC
AATTATGATGATGCAGATATTCTCACCTATAGGATAACTGTGGTAGAACCTTTGGTCGAAGCCTATCA
GGAAAATGGGATTCATCACACAGTTTTCATTGGTGAAACACTTGATCTTCCATGCCATTCTACTGGTA
TCCCAGATGCCTCTATTAGCTGGGTTATTCCAGGAAACAATGTGCTCTATCAGTCATCAAGAGACAAG
TGTGGCAGCCAACCCATCAGGGGTTGATTTTTTGATTTTCCAAGTTTCAGTCAAGATGAAAGGACAAA
GGCCCTTGGAGCATGATGGAGAAACAGAGGGATCTGGACTTGATGAGTCCAATCCTATTGCTCATCTT
AAGGAGCCACCAGGTGCACAACTCCGTACATCTGCTCTGATGGAGGCTGAGGTTGGAAAACACACCTC
GTTTTAGGGAGAATAGGAGGCATTTCCCTCCCTCTGCTAGGAGAATTGACCCACAACATTGGGCGGCA
CTGTTGGAGAAAGCTAAAAAGAATGCTATGCCAGACAAGCGAGAAAATACCACAGTGAGCCCACCCCC
AGTGGTCACCCAACTCCCAAACATACCTGGTGAAGAAGACGATTCCTCAGGCATGCTCGCTCTACATG
AGGAATTTATGGTCCCGGCCACTAAAGCTTTGAACCTTCCAGCAAGGACAGTGACTGCTGACTCCAGA
ACAATATCTGATAGTCCTATGACAAACATAAATTATGGCACAGAATTCTCTCCTGTTGTGAATTCACA
AATACTACCACCTGAAGAACCCACAGATTTCAAACTGTCTACTGCTATTAAAACTACAGCCATGTCAA
AGAATATAAACCCAACCATGTCAAGCCAAATACAAGGCACAACCAATCAACATTCATCCACTGTCTTT
CCACTGCTACTTGGAGCAACTGAATTTCAGGACTCTGACCAGATGGGAAGAGGAAGAGAGCATTTCCA
AAGTAGACCCCCAATAACAGTAAGGACTATGATCAAAGATGTCAATGTCAAAATGCTTAGTAGCACCA
GAACCCAGGCACAATCACTTCTATTCTCACACTACTCAAATACTTAGCACCTCCACGTTCCCTTCAGA
TCCACACACAGCTGCTCATTCTCAGTTTCCGATCCCTAGAAATAGTACAGTTAACATCCCGCTGTTCA
GACGCTTTGGGAGGCAGAGGAAAATTGGCGGAAGGGGGCGGATTATCAGCCCATATAGAACTCCAGTT
CTGCGACGGCATAGATACAGCATTTTCAGGTCAACAACCAGAGGTTCTTCTGAAAAAAGCACTACTGC
ATTCTCAGCCACAGTGCTCAATGTGACATGTCTGTCCTGTCTTCCCAGGGAGAGGCTCACCACTGCCA
CAGCAGCATTGTCTTTTCCAAGTGCTGCTCCCATCACCTTCCCCAAAGCTGACATTGCTAGAGTCCCA
TCAGAAGAGTCTACAACTCTAGTCCAGAATCCACTATTACTACTTGAGAACAAACCCAGTGTAGAGAA
AACAACACCCACAATAAAATATTTCAGGACTGAAATTTCCCAAGTGACTCCAACTGGTGCAGTCATGA
CATATGCTCCAACATCCATACCCATGGAIAAAACTCACAAAGTAAACGCCAGTTACCCACGTGTGTCT
AGCACCAATGAAGCTAAAAGAGATTCAGTGATTACATCGTCACTTTCAGGTGCTATCACCAAGCCACC
AATGACTATTATAGCCATTACAAGGTTTTCAAGAAGGAAAATTCCCTGGCAACAGAACTTTGTAAATA
ACCATAACCCAAAAGGCAGATTAAGGAATCAACATAAAGTTAGTTTACAAAAAAGCACAGCTGTGATG
CTTCCTAAAACATCTCCTGCTTTACCACAGAGACAAAGTCTCCCCTCGCACCACACTACGACCAAAAC
ACACAATCCTGGAAGTCTTCCAACAAAGAAGGAGCTTCCCTTCCCACCCCTTAACCCTATGCTTCCTA
GTATTATAAGCAAAGACTCAAGTACAAAAAGCATCATATCAACGCAAACAGCAATACCAGCAACAACT
CCTACCTTCCCTGCATCTGTCATCACTTATGAAACCCAAACAGAGAGATCTAGAGCACAAACAATACA
AAGAGAACAGGAGCCTCAAAAGAAGAACAGGACTGACCCAAACATCTCTCCAGACCAGAGTTCTGGCT
TCACTACACCCACTGCTATGACACCTCCTGTTCTAACCACAGCCGAAACTTCAGTCAAGCCCAGTGTC
TCTGCATTCACTCATTCCCCACCAGAAAACACAACTGGGATTTCAAGCACAATCAGTTTTCATTCAAG
AACTCTTAATCTGACAGATGTGATTGAAGAACTAGCCCAAGCAAGTACTCAGACTTTGAAGAGCACAA
TTGCTTCTGAAACAACTTTGTCCAGCAAATCACACCAGAGTACCACAACTAGGAAAGCAATCATTAGA
CACTCAACCATACCACCATTCTTGAGCAGCAGTGCTACTCTAATGCCAGTTCCCATCTCCCCTCCCTT
TACTCAGAGAGCAGTTACTGACAACGTGGCGACTCCCATTTCCGGGCTTATGACAAATACAGTGGTCA
AGCTGCACGAATCCTCAAGGCACAATGCTAAACCACAGCAATTAGTAGCAGAGGTTGCAACATCCCCC
AAGGTTCACCCAAATGCCAAGTTCACAATTGGAACCACTCACTTCATCTACTCTAATCTGTTACATTC
TACTCCCATGCCAGCACTAACAACAGTTAAATCACAGAATTCTAAATTAACTCCATCTCCCTGGGCAG
AAAACCAATTTTGGCACAAACCATACTCAGAAATTGCTGAAAAAGGCAAAAAGCCAGAAGTAAGCATG
TTGGCTACTACAGGCCTGTCCGAGGCCACCACTCTTGTTTCAGATTGGGATGGACAGAAGAACACAAA
GAAGAGTGACTTTGATAAGAAACCAGTTCAAGAAGCAACAACTTCCAAACTCCTTCCCTTTGACTCTT
TGTCTAGGTATATATTTGAAAAGCCCAGGATAGTTGGAGGAAAAGCTGCAAGTTTTACTATTCCAGCT
AACTCAGATGCCTTTCTTCCCTGTGAAGCTGTTGGAAATCCCCTGCCCACCATTCATTGGACCAGAGT
CCCATCAGGTATGTCAGGACTTGATTTATCTAAGAGGAAACAGAATAGCAGGGTCCAGGTTCTCCCCA
ATGGTACCCTGTCCATCCAGAGGGTGGAAATTCAGGACCGCGGACAGTACTTGTGTTCCGCATCCAAT
CTGTTTGGCACAGACCACCTTCATGTCACCTTGTCTGTGGTTTCCTATCCTCCCAGGATCCTGGAGAG
ACGTACCAAAGAGATCACAGTTCATTCCGGAAGCACTGTGGAACTGAAGTGCAGAGCAGAAGGTAGGC
CAAGCCCTACAGTTACCTGGATTCTTGCAAACCAAACAGTTGTCTCAGAATCATCCCAGGGAAATAGG
CAGGCTGTGGTGACGGTTGACGGAACATTGGTCCTCCACAATCTCAGTATTTATGACCGTGGCTTTTA
CAAATGTGTGGCCAGCAACCCAGGTGGCCAGGATTCACTGCTGGTTAAAATACAAGTCATTGCAGCAC
CACCTGTTATTCTAGAGCAAAGGAGGCAAGTCATTGTAGGCACTTGGGGTGAAAGTTTAAAACTGCCC
TGTACTGCAAAAGGAACTCCTCAGCCCAGCGTTTACTGGGTCCTCTCTGATGGCACTGAAGTGAAACC
ATTACAGTTTACCAATTCCAAGTTGTTCTTATTTTCAAATGGGACTTTGTATATAAGAAACCTAGCCT
CTTCAGACAGGGGCACTTATGAATGCATTGCTACCAGTTCCACTGGTTCGGAGCGAAGAGTAGTAATG
CTTACAATGGAAGAGCGAGTGACCAGCCCCAGGATAGAAGCTGCATCCCAGAAAAGGACTGAAGTGAA
TTTTGGGGACAAATTACTACTGAACTGCTCAGCCACTGGGGAGCCCAAACCCCAAATAATGTGGAGGT
TACCATCCAAGGCTGTGGTCGACCAGCAGCATAGGGTGGGCAGCTGGATCCACGTCTACCCTAATGGA
TCCCTGTTTATTGGATCAGTAACAGAAAAAGACAGTGGTGTCTACTTGTGTGTGGCAAGAAACAAAAT
GGGGGATGATCTGATACTGATGCATGTTAGCCTAAGACTGAAACCTGCCAAAATTGACCACAAGCAGT
ATTTTAGAAAGCAAGTGCTCCATGGGAAAGATTTCCAAGTAGATTGCAAAGCTTCCGGCTCCCCAGTG
CCAGAGATATCTTGGAGTTTGCCTGATGGAACCATGATCAACAATGCAATGCAAGCCGATGACAGTGG
CCACAGGACTAGGAGATATACCCTTTTCAACAATGGAACTTTATACTTCAACAAAGTTGGGGTAGCGG
AGGAAGGAGATTATACTTGCTATGCCCAGAACACCCTAGGGAAAGATGAAATGAAGGTCCACTTAACA
GTTATAACAGCTGCTCCCCGGATAAGGCAGAGTAACAAAACCAACAAGAGAATCAAAGCTGGAGACAC
ACATGATTTCCTTCTCCATTGATAGGTACACATTTCATGCCAATGGGTCTTTGACCATCAACAAAGTG
AAACTGCTCGATTCTGGAGAGTACGTATGTGTAGCCCGAAATCCCAGTGGGGATGACACCAAAATGTA
CAAACTGGATGTGGTCTCTAAACCTCCATTAATCAATGGTCTGTATACAAACAGAACTGTTATTAAAG
CCACAGCTGTGAGACATTCCAAAAAACACTTTGACTGCAGAGCTGAAGGGACACCATCTCCTGAAGTC
ATGTGGATCATGCCAGACAATATTTTCCTCACAGCCCCATACTATGGAAGCAGAATCACAGTCCATAA
AAATGGAACCTTGGAAATTAGGAATGTGAGGCTTTCAGATTCAGCCGACTTTATCTGTGTGGCCCGAA
ATGAAGGTGGAGAGAGCGTGTTGGTAGTACAGTTAGAAGTACTGGAAATGCTGAGAAGACCGACATTT
TGGTAACCCACCACCTGAAATAATCTGGATTTTACCAAATGGCACACGATTTTCCAATGGACCACAAA
GTTATCAGTATCTGATAGCAAGCAATGGTTCTTTTATCATTTCTAAAACAACTCGGGAGGATGCAGGA
AAATATCGCTGTGCAGCTAGGAATAAAGTTGGCTATATTGAGAAATTAGTCATATTAGAAATTGGCCA
GAAGCCAGTTATTCTTACCTATGCACCAGGGACAGTAAAAGGCATCAGTGGAGAATCTCTATCACTGC
ATTGTGTGTCTGATGGAATCCCTAAGCCAAATATCAAATGGACTATGCCAAGTGGTTATGTAGTAGAC
AGGCCTCAAATTAATGGGAAATACATATTGCATGACAATGGCACCTTAGTCATTAAAGAAGCAACAGC
TTATGACAGAGGAAACTATATCTGTAAGGCTCAAAATAGTGTTGGTCATACACTGATTACTGTTCCAG
TAATGATTGTAGCCTACCCTCCCCGAATTACAAATCGTCCACCCAGGAGTATTGTCACCAGGACAGGG
GCAGCCTTTCAGCTCCACTGTGTGGCCTTGGGAGTTCCCAAGCCAGAAATCACATGGGAGATGCCTGA
CCACTCCCTTCTCTCAACGGCAAGTAAAGAGAGGACACATGGAAGTGAGCAGCTTCACTTACAAGGTA
CCCTAGTCATTCAGAATCCCCAAACCTCCGATTCTGGGATATACAAATGCACAGCAAAGAACCCACTT
GGTAGTGATTATGCAGCAACGTATATTCAAGTAATCTGACATGAAATAATAAAGTC

| | | | |
|---|---|---|---|
| NOV29ai, SNP13377624 of | SEQ ID NO:734 | 2617 aa | MW at 2902002 kD |
| CG55776-01, Protein Sequence | SNP Pos:36 | | SNP Change: Tyr to Tyr |

MKVKGRGITCLLVSFAVICLVATPGGKACPRRCACYMPTEVHCTFRYLTSIPDSIPPNVERINLGYNS
LVRLMETDFSGLTKLELLMLHSNGIHTIPDKTFSDLQALQVRLMVLKMSYNKVRKLQKDTFYGLRSLT
RLHMDHNNIEFINPEVFYGLNFLRLVHLEGNQLTKLHPDTFVSLSYLQIFKISFIKFLYLSDNFLTSL
PQEMVSYMPDLDSLYLHGNPWTCDCHLKWLSDWIQEKPGIYIVLPDVIKCKKDRSPSSAQQCPLCDAP
RTSKGKPLAMVSAAAFQCAKPTIDSSLKSKSLTILEDSSSAFISPQGFMAPFGSLTLNMTDQSGNEAN
MVCSIQKPSRTSPIAFTEENDYIVLNTSFSTFLVCNIDYGHIQPVWQILALYSDSPLILERSHLLSET
PQLYYKYKQVAPKPEDIFTNIEADLRADPSWLMQDQISLQLNRTATTFSTLQIQYSSDAQITLPRAEM
RPVKHKWTMISRDNNTKLEHTVLVGGTVGLNCPGQGDPTPHVDWLLADGSKVRAPYVSEDGRILIDKS
GKLELQMADSFDTGVYHCISSNYDDADILTYRITVVEPLVEAYQENGIHHTVFIGETLDLPCHSTGIP
DASISWVIPGNNVLYQSSRDKKVLNNGTLRILQVTPKDQGYYRCVAANPSGVDFLIFQVSVKMKGQRP
LEHDGETEGSGLDESNPIAHLKEPPGAQLRTSALMEAEVGKHTSSTSKRHNYRELTLQRRGDSTHRRF
RENRRHFPPSARRIDPQHWAALLEKAKKNAMPDKRENTTVSPPPVVTQLPNIPGEEDDSSGMLALHEE
FMVPATKALNLPARTVTADSRTISDSPMTNINYGTEFSPVVNSQILPPEEPTDFKLSTAIKTTAMSKN
INPTMSSQIQGTTNQHSSTVFPLLLGATEFQDSDQMGRGREHFQSRPPITVRTMIKDVNVKMLSSTTN
KLLLESVNTTNSHQTSVREVSEPRHNHFYSHTTQILSTSTFPSDPHTAAHSQFPIPRNSTVNIPLFRR
FGRQRKIGGRGRIISPYRTPVLRRHRYSIFRSTTRGSSEKSTTAFSATVLNVTCLSCLPRERLTTATA
ALSFPSAAPITFPKADIARVPSEESTTLVQNPLLLLENKPSVEKTTPTIKYFRTEISQVTPTGAVMTY
APTSIPMEKTHKVNASYPRVSSTNEAKRDSVITSSLSGAITKPPMTIIAITRFSRRKIPWQQNFVNNH
NPKGRLPNQHKVSLQKSTAVMLPKTSPALPQRQSLPSHHTTTKTHNPGSLPTKKELPFPPLNPMLPSI
ISKDSSTKSIISTQTAIPATTPTFPASVITYETQTERSRAQTIQREQEPQKKNRTDPNISPDQSSGFT
TPTAMTPPVLTTAETSVKPSVSAFTHSPPENTTGISSTISFHSRTLNLTDVIEELAQASTQTLKSTIA
SETTLSSKSHQSTTTRKAIIRHSTIPPFLSSSATLMPVPISPPFTQRAVTDNVATPISGLMTNTVVKL
HESSRHNAKPQQLVAEVATSPKVHPNAKFTIGTTHFIYSNLLHSTPMPALTTVKSQNSKLTPSPWAEN
QFWHKPYSEIAEKGKKPEVSMLATTGLSEATTLVSDWDGQKNTKKSDFDKKPVQEATTSKLLPFDSLS
RYIFEKPRIVGGKAASFTIPANSDAFLPCEAVGNPLPTIHWTRVPSGMSGLDLSKRKQNSRVQVLPNG
TLSIQRVEIQDRGQYLCSASNLFGTDHLHVTLSVVSYPPRILERRTKEITVHSGSTVELKCRAEGRPS
PTVTWILANQTVVSESSQGSRQAVVTVDGTLVLHNLSIYDRGFYKCVASNPGGQDSLLVKIQVIAAPP
VILEQRRQVIVGTWGESLKLPCTAKGTPQPSVYWVLSDGTEVKPLQFTNSKLFLFSNGTLYIPNLASS
DRGTYECIATSSTGSERRVVMLTMEERVTSPRIEAASQKRTEVNFGDKLLLNCSATGEPKPQIMWRLP
SKAVVDQQHRVGSWIHVYPNGSLFIGSVTEKDSGVYLCVARNKMGDDLILMHVSLRLKPAKIDHKQYF
RKQVLHGKDFQVDCKASGSPVPEISWSLPDGTMINNAMQADDSGHRTRRYTLFNNGTLYFNKVGVAEE
GDYTCYAQNTLGKDEMKVHLTVITAAPRIRQSNKTNKRIKAGDTAVLDCEVTGDPKPKIFWLLPSNDM
ISFSIDRYTFHANGSLTINKVKLLDSGEYVCVARNPSGDDTKMYKLDVVSKPPLINGLYThRTVIKAT
AVRHSKKHFDCRAEGTPSPEVMWIMPDNIFLTAPYYGSRITVHKNGTLEIRNVRLSDSADFICVARNE
GGESVLVVQLEVLEMLRRPTFRNPFNEKIVAQLGKSTALNCSVDGNPPPEIIWILPNGTRFSNGPQSY
QYLIASNGSFIISKTTREDAGKYRCAARNKVGYIEKLVILEIGQKPVILTYAPGTVKGISGESLSLHC
VSDGIPKPNIKWTMPSGYVVDRPQINGKYILHDNGTLVIKEATAYDRGNYICKAQNSVGHTLITVPVM
IVAYPPRITNRPPRSIVTRTGAAFQLHCVALGVPKPEITWEMPDHSLLSTASKERTHGSEQLHLQGTL
VIQNPQTSDSGIYKCTAKNPLGSDYAATYIQVI

| | | |
|---|---|---|
| NOV29a, SNP13377625 | SEQ ID NO:735 | 7876 bP |
| of CG55776-01, | ORF Start: ATG at 6 | ORF Stop: TGA at 7857 |
| DNA Sequence | SNP PoS: 161 | SNP Change: A to G |

TCAGGATGAAGGTAAAAGGCAGAGGAATCACCTGCTTGCTGGTCTCCTTTGCTGTGATCTGCCTGGTC
GCCACCCCTGGGGGCAAGGCCTGTCCTCGCCGCTGTGCCTGTTATATGCCTACGGAGGTACACTGCAC
ATTTCGGTACCTGACTTCCATCCCGGACAGCATCCCGCCCAATGTGGAACGCATCAATTTAGGGTACA
ACAGCTTGGTTAGATTGATGGAAACAGATTTTTCTGGCCTGACCAAACTGGAGTTACTCATGCTTCAC
TGACACGATTGCACATGGACCACAACAATATTGAGTTTATAAACCCAGAGGTTTTTTATGGGCTCAAC
TTTCTCCGCCTGGTGCACTTGGAAGGAAATCAGCTCACTAAGCTCCACCCAGATACATTTGTCTCTTT
GAGCTACCTCCAGATATTTAAAATCTCTTTCATTAAGTTCCTATACTTGTCTGATAACTTCCTGACCT
ACCTGTGATTGCCATTTAAAGTGGTTGTCTGACTGGATACAGGAGAAGCCAGGTATCTATATTGTNTT
ACCAGATGTAATAAAATGCAAAAAAGATAGAAGTCCCTCTAGTGCTCAGCAGTGTCCACTTTGCATGA
ACCCTAGGACTTCTAAAGGCAAGCCGTTAGCTATGGTCTCAGCTGCAGCTTTCCAGTGTGCCAAGCCA
ACCATTGACTCATCCCTGAAATCAAAGAGCCTGACTATTCTGGAAGACAGTAGTTCTGCTTTCATCTC
TCCCCAAGGTTTCATGGCACCCTTTGGCTCCCTCACTTTGAATATGACAGATCAGTCTGGAAATGAAG
CTAACATGGTCTGCAGTATTCAAAAGCCCTCAAGGACATCACCCATTGCATTCACTGAAGAAAATGAC
TACATCGTGCTAAATACTTCATTTTCACAATTTTTGGTGTGCAACATAGATTACGGTCACATTCAGCC
AGTGTGGCAAATTTTGGCTTTGTACAGTGATTCTCCTCTGATACTAGAAAGGAGCCACTTGCTTAGTG
AAACACCGCAGCTCTATTACAAATATAAACAGGTGGCTCCTAAGCCTGAAGACATTTTTACCAACATA
GAGGCAGATCTCAGAGCAGATCCCTCTTGGTTAATGCAAGACCAAATTTCCTTGCAGCTGAACAGAAC
TGCCACCACATTCAGTACATTACAGATCCAGTACTCCAGTGATGCTCAAATCACTTTACCAAGAGCAG
AGATGAGGCCAGTGAAACACAAATGGACTATGATTTCAAGGGATAACAATACTAAGCTGGAACATACT
GTCTTGGTAGGTGGAACCGTTGGCCTGAACTGCCCAGGCCAAGGAGACCCCACCCCACACGTGGATTG
GCTTCTAGCTGATGGAAGTAAAGTGAGAGCCCCTTATGTCAGTGAGGATGGACGGATCCTAATAGACA
AAAGTGGAAAATTGGAACTCCAGATGGCTGATAGTTTTGACACAGGCGTATATCACTGTATAAGCAGC
GGAAAATGGGATTCATCACACAGTTTTCATTGGTGAAACACTTGATCTTCCATGCCATTCTACTGGTA
TCCCAGATGCCTCTATTAGCTGGGTTATTCCAGGAAACAATGTGCTCTATCAGTCATCAAGAGACAAG
AAAGTTCTAAACAATGGCACATTAAGAATATTACAGGTCACCCCGAAAGACCAAGGTTATTATCGCTG
TGTGGCAGCCAACCCATCAGGGGTTGATTTTTTGATTTTCCAAGTTTCAGTCAAGATGAAAGGACAAA
GGCCCTTGGAGCATGATGGAGAAACAGAGGGATCTGGACTTGATGAGTCCAATCCTATTGCTCATCTT
AAGGAGCCACCAGGTGCACAACTCCGTACATCTGCTCTGATGGAGGCTGAGGTTGGAAAACACACCTC
AAGCACAAGTAAGAGGCACAACTATCGGGAATTAACACTCCAGCGACGTGGAGATTCAACACATCGAC
GTTTTAGGGAGAATAGGAGGCATTTCCCTCCCTCTGCTAGGAGAATTGACCCACAACATTGGGCGGCA
CTGTTGGAGAAAGCTAAAAAGAATGCTATGCCAGACAAGCGAGAAAATACCACAGTGAGCCCACCCCC
AGTGGTCACCCAACTCCCAAACATACCTGGTGAAGAAGACGATTCCTCAGGCATGCTCGCTCTACATG
AGGAATTTATGGTCCCGGCCACTAAAGCTTTGAACCTTCCAGCAAGGACAGTGACTGCTGACTCCAGA
ACAATATCTGATAGTCCTATGACAAACATAAATTATGGCACAGAATTCTCTCCTGTTGTGAATTCACA
AATACTACCACCTGAAGAACCCACAGATTTCAAACTGTCTACTGCTATTAAAACTACAGCCATGTCAA
AGAATATAAACCCAACCATGTCAAGCCAMATACAAGGCACAACCAATCAACATTCATCCACTGTCTTT
CCACTGCTACTTGGAGCAACTGAATTTCAGGACTCTGACCAGATGGGAAGAGGAAGAGAGCATTTCCA
AAGTAGACCCCCAATAACAGTAAGGACTATGATCAAAGATGTCAATGTCAAAATGCTTAGTAGCACCA
CCAACAAACTATTATTAGAGTCAGTAAATACCACAAATAGTCATCAGACATCTGTAAGAGAAGTGAGT
GAACCCAGGCACAATCACTTCTATTCTCACACTACTCAAATACTTAGCACCTCCACGTTCCCTTCAGA
TCCACACACAGCTGCTCATTCTCAGTTTCCGATCCCTAGAAATAGTACAGTTAACATCCCGCTGTTCA
GACGCTTTGGGAGGCAGAGGAAAATTGGCGGAAGGGGGCGGATTATCAGCCCATATAGAACTCCAGTT
CTGCGACGGCATAGATACAGCATTTTCAGGTCAACAACCAGAGGTTCTTCTGAAAAAAGCACTACTGC
ATTCTCAGCCACAGTGCTCAATGTGACATGTCTGTCCTGTCTTCCCAGGGAGAGGCTCACCACTGCCA
CAGCAGCATTGTCTTTTCCAAGTGCTGCTCCCATCACCTTCCCCAAAGCTGACATTGCTAGAGTCCCA
TCAGAAGAGTCTACAACTCTAGTCCAGAATCCACTATTACTACTTGAGAACAAACCCAGTGTAGAGAA
AACAACACCCACAATAAAATATTTCAGGACTGAAATTTCCCAAGTGACTCCAACTGGTGCAGTCATGA
CATATGCTCCAACATCCATACCCATGGAAAAAACTCACAAAGTAAACGCCAGTTACCCACGTGTGTCT
AGCACCAATGAAGCTAAAAGAGATTCAGTGATTACATCGTCACTTTCAGGTGCTATCACCAAGCCACC
AATGACTATTATAGCCATTACAAGGTTTTCAAGAAGGAAAATTCCCTGGCAACAGAACTTTGTAAATA
ACCATAACCCAAAAGGCAGATTAAGGAATCAACATAAAGTTAGTTTACAAAAAAGCACAGCTGTGATG
CTTCCTAAAACATCTCCTGCTTTACCACAGAGACAAAGTCTCCCCTCGCACCACACTACGACCAAAAC
ACACAATCCTGGAAGTCTTCCAACAAAGAAGGAGCTTCCCTTCCCACCCCTTAACCCTATGCTTCCTA
GTATTATAAGCAAAGACTCAAGTACAAAAAGCATCATATCAACGCAAACAGCAATACCAGCAACAACT
AAGAGAACAGGAGCCTCAAAAGAAGAACAGGACTGACCCAAACATCTCTCCAGACCAGAGTTCTGGCT
TCACTACACCCACTGCTATGACACCTCCTGTTCTAACCACAGCCGAAACTTCAGTCAAGCCCAGTGTC
AACTCTTAATCTGACAGATGTGATTGAAGAACTAGCCCAAGCAAGTACTCAGACTTTGAAGAGCACAA
TTGCTTCTGAAACAACTTTGTCCAGCAAATCACACCAGAGTACCACAACTAGGAAAGCAATCATTAGA
TACTCAGAGAGCAGTTACTGACAACGTGGCGACTCCCATTTCCGGGCTTATGACAAATACAGTGGTCA
AGCTGCACGAATCCTCAAGGCACAATGCTAAACCACAGCAATTAGTAGCAGAGGTTGCAACATCCCCC
AAGGTTCACCCAAATGCCAAGTTCACAATTGGAACCACTCACTTCATCTACTCTAATCTGTTACATTC
TACTCCCATGCCAGCACTAACAACAGTTAAATCACAGAATTCTAAATTAACTCCATCTCCCTGGGCAG
AAAACCAATTTTGGCACAAACCATACTCAGAAATTGCTGAAAAAGGCAAAAAGCCAGAAGTAAGCATG
TTGGCTACTACAGGCCTGTCCGAGGCCACCACTCTTGTTTCAGATTGGGATGGACAGAAGAACACAAA
GAAGAGTGACTTTGATAAGAAACCAGTTCAAGAAGCAACAACTTCCAAACTCCTTCCCTTTGACTCTT
TGTCTAGGTATATATTTGAAAAGCCCAGGATAGTTGGAGGAAAAGCTGCAAGTTTTACTATTCCAGCT
CCCATCAGGTATGTCAGGACTTGATTTATCTAAGAGGAAACAGAATAGCAGGGTCCAGGTTCTCCCCA
ATGGTACCCTGTCCATCCAGAGGGTGGAAATTCAGGACCGCGGACAGTACTTGTGTTCCGCATCCAAT
CTGTTTGGCACAGACCACCTTCATGTCACCTTGTCTGTGGTTTCCTATCCTCCCAGGATCCTGGAGAG
ACGTACCAAAGAGATCACAGTTCATTCCGGAAGCACTGTGGAACTGAAGTGCAGAGCAGAAGGTAGGC
CAAGCCCTACAGTTACCTGGATTCTTGCAAACCAAACAGTTGTCTCAGAATCATCCCAGGGAAGTAGG
CAGGCTGTGGTGACGGTTGACGGAACATTGGTCCTCCACAATCTCAGTATTTATGACCGTGGCTTTTA
CAAATGTGTGGCCAGCAACCCAGGTGGCCAGGATTCACTGCTGGTTAAAATACAAGTCATTGCAGCAC
CACCTGTTATTCTAGAGCAAAGGAGGCAAGTCATTGTAGGCACTTGGGGTGAAAGTTTAAAACTGCCC
TGTACTGCAAAAGGAACTCCTCAGCCCAGCGTTTACTGGGTCCTCTCTGATGGCACTGAAGTGAAACC
ATTACAGTTTACCAATTCCAAGTTGTTCTTATTTTCAAATGGGACTTTGTATATAAGAAACCTAGCCT
CTTCAGACAGGGGCACTTATGAATGCATTGCTACCAGTTCCACTGGTTCGGAGCGAAGAGTAGTAATG
CTTACAATGGAAGAGCGAGTGACCAGCCCCAGGATAGAAGCTGCATCCCAGAkAAGGACTGAAGTGAA
TTTTGGGGACAAATTACTACTGAACTGCTCAGCCACTGGGGAGCCCAAACCCCAAATAATGTGGAGGT
TACCATCCAAGGCTGTGGTCGACCAGCAGCATAGGGTGGGCAGCTGGATCCACGTCTACCCTAATGGA
TCCCTGTTTATTGGATCAGTAACAGAAAAAGACAGTGGTGTCTACTTGTGTGTGGCAAGAAACAAAAT
GGGGGATGATCTGATACTGATGCATGTTAGCCTAAGACTGAAACCTGCCAAAATTGACCACAAGCAGT
ATTTTAGAAAGCAAGTGCTCCATGGGAAAGATTTCCAAGTAGATTGCAAAGCTTCCGGCTCCCCAGTG
CCAGAGATATCTTGGAGTTTGCCTGATGGAACCATGATCAACAATGCAATGCAAGCCGATGACAGTGG
CCACAGGACTAGGAGATATACCCTTTTCAACAATGGAACTTTATACTTCAACAAAGTTGGGGTAGCGG
AGGAAGGAGATTATACTTGCTATGCCCAGAACACCCTAGGGAAAGATGAAATGAAGGTCCACTTAACA
GTTATAACAGCTGCTCCCCGGATAAGGCAGAGTAACAAAACCAACAAGAGAATCAAAGCTGGAGACAC
AGCTGTCCTTGACTGTGAGGTCACTGGGGATCCCAAACCAALAATATTTTGGTTGCTGCCTTCCAATG
ACATGATTTCCTTCTCCATTGATAGGTACACATTTCATGCCAATGGGTCTTTGACCATCAACAAAGTG
AAACTGCTCGATTCTGGAGAGTACGTATGTGTAGCCCGAAATCCCAGTGGGGATGACACCAAAATGTA
CAAACTGGATGTGGTCTCTAAACCTCCATTAATCAATGGTCTGTATACAAACAGAACTGTTATTAAAG
CCACAGCTGTGAGACATTCCAAAAAACACTTTGACTGCAGAGCTGAAGGGACACCATCTCCTGAAGTC
ATGTGGAATCATGCCAGACATATTTTCCTCACAGCCCCATACTATGGAAAGCAGATCACAGTCCATAA
AAATGGAACCTTGGAAATTAGGAATGTGAGGCTTTCAGATTCAGCCGACTTTATCTGTGTGGCCCGAA
ATGAAGGTGGAGAGAGCGTGTTGGTAGTACAGTTAGAAGTACTGGAAATGCTGAGAAGACCGACATTT
AGAAATCCATTTAATGAAAAAATAGTTGCCCAGCTGGGAAAGTCCACAGCATTGAATTGCTCTGTTGA
TGGTAACCCACCACCTGAAATAATCTGGATTTTACCAAATGGCACACGATTTTCCAATGGACCACAAA
GTTATCAGTATCTGATAGCAAGCAATGGTTCTTTTATCATTTCTAAAACAACTCGGGAGGATGCAGGA
AAATATCGCTGTGCAGCTAGGAATAAAGTTGGCTATATTGAGAAATTAGTCATATTAGAAATTGGCCA
GAAGCCAGTTATTCTTACCTATGCACCAGGGACAGTAAAAGGCATCAGTGGAGAATCTCTATCACTGC
ATTGTGTGTCTGATGGAATCCCTAAGCCAAATATCAAATGGACTATGCCAAGTGGTTATGTAGTAGAC
AGGCCTCATTAIATGGGAAATACATATTGCATGACAATGGCACCTTAGTCATTAAAGAAAGCAACAGC
TTATGACAGAGGAAACTATATCTGTAAGGCTCAAAATAGTGTTGGTCATACACTGATTACTGTTCCAG
TAATGATTGTAGCCTACCCTCCCCGAATTACAAATCGTCCACCCAGGAGTATTGTCACCAGGACAGGG
GCAGCCTTTCAGCTCCACTGTGTGGCCTTGGGAGTTCCCAAGCCAGAAATCACATGGGAGATGCCTGA
CCACTCCCTTCTCTCAACGGCAAGTAAAGAGAGGACACATGGAAGTGAGCAGCTTCACTTACAAGGTA
CCCTAGTCATTCAGAATCCCCAAACCTCCGATTCTGGGATATACAAATGCACAGCAAAGAACCCACTT
GGTAGTGATTATGCAGCAACGTATATTCAGTAATCTGACATGAATAATAGTC

| | | | |
|---|---|---|---|
| NOV29a, SNP13377625 of | SEQ ID NO:736 | 2617 aa | MW at 290200.2 kD |
| CG55776-01, Protein Sequence | ASNP PoS: 52 | | SNP Change: |
| | | | Pro to Pro |

MKVKGRGITCLLVSFAVICLVATPGGKACPRRCACYMPTEVHCTFRYLTSIPDSIPPNVERINLGYNS
LVRLMETDFSGLTKLELLMLHSNGIHTIPDKTFSDLQALQVRLMVLKMSYNKVRKLQKDTFYGLRSLT
RLHMDHNNIEFINPEVFYGLNFLRLVHLEGNQLTKLHPDTFVSLSYLQIFKISFIKFLYLSDNFLTSL
PQEMVSYMPDLDSLYLHGNPWTCDCHLKWLSDWIQEKPGIYIVLPDVIKCKKDRSPSSAQQCPLCMNP
RTSKGKPLAMVSAAAFQCAKPTIDSSLKSKSLTILEDSSSAFISPQGFMAPFGSLTLNMTDQSGNEAN
MVCSIQKPSRTSPIAFTEENDYIVLNTSFSTFLVCNIDYGHIQPVWQILALYSDSPLILERSHLLSET
PQLYYKYKQVAPKPEDIFTNIEADLRADPSWLMQDQISLQLNRTATTFSTLQIQYSSDAQITLPRAEM
RPVKHKWTMISRDNNTKLEHTVLVGGTVGLNCPGQGDPTPHVDWLLADGSKVRAPYVSEDGRILIDKS
GKLELQMADSFDTGVYHCISSNYDDADILTYRITVVEPLVEAYQENGIHHTVFIGETLDLPCHSTGIP
DASISWVIPGNNVLYQSSRDKKVLNNGTLRILQVTPKDQGYYRCVAANPSGVDFLIFQVSVKMKGQRP
LEHDGETEGSGLDESNPIAHLKEPPGAQLRTSALMEAEVGKHTSSTSKRHNYRELTLQRRGDSTHRRF
RENRRHFPPSARRIDPQHWAALLEKAKKNAMPDKRENTTVVSPPPWTQLPNIPGEEDDSSGMLALHEE
FMVPATKALNLPARTVTADSRTISDSPMTNINYGTEFSPVVNSQILPPEEPTDFKLSTAIKTTAMSKN
INPTMSSQIQGTTNQHSSTVFPLLLGATEFQDSDQMGRGREHFQSRPPITVRTMIKDVNVKMLSSTTN
KLLLESVNTTNSHQTSVREVSEPRHNHFYSHTTQILSTSTFPSDPHTAAHSQFPIPRNSTVNIPLFRR
FGRQRKIGGRGRIISPYRTPVLRRHRYSIFRSTTRGSSEKSTTAFSATVLNVTCLSCLPRERLTTATA
ALSFPSAAPITFPKADIARVPSEESTTLVQNPLLLLENKPSVEKTTPTIKYFRTEISQVTPTGAVMTY
APTSIPMEKTHKVNASYPRVSSTNEAKRDSVITSSLSGAITKPPMTIIAITRFSRRKIPWQQNFVNNH
NPKGRLRNQHKVSLQKSTAVMLPKTSPALPQRQSLPSHHTTTKTHNPGSLPTKKELPFPPLNPMLPSI
ISKDSSTKSIISTQTAIPATTPTFPASVITYETQTERSRAQTIQREQEPQKKNRTDPNISPDQSSGFT
TPTAMTPPVLTTAETSVKPSVSAFTHSPPENTTGISSTISFHSRTLNLTDVIEELAQASTQTLKSTIA
SETTLSSKSHQSTTTRKAIIRHSTIPPFLSSSATLMPVPISPPFTQRAVTDNVATPISGLMTNTVVKL
HESSRHNAKPQQLVAEVATSPKVHPNAKFTIGTTHFIYSNLLHSTPMPALTTVKSQNSKLTPSPWAEN
QFWHKPYSEIAEKGKKPEVSMLATTGLSEATTLVSDWDGQKNTKKSDFDKKPVQEATTSKLLPFDSLS
RYIFEKPRIVGGKAASFTIPANSDAFLPCEAVGNPLPTIHWTRVPSGMSGLDLSKRKQNSRVQVLPNG
TLSIQRVEIQDRGQYLCSASNLFGTDHLHVTLSVVSYPPRILERRTKEITVHSGSTVELKCRAEGRPS
PTVTWILANQTVVSESSQGSRQAVVTVDGTLVLHNLSIYDRGFYKCVASNPGGQDSLLVKIQVIAAPP
VILEQRRQVIVGTWGESLKLPCTAKGTPQPSVYWVLSDGTEVKPLQFTNSKLFLFSNGTLYIRNLASS
DRGTYECIATSSTGSERRVVMLTMEERVTSPRIEAASQKRTEVNFGDKLLLNCSATGEPKPQIMWRLP
SKAVVDQQHRVGSWIHVYPNGSLFIGSVTEKDSGVYLCVARNKMGDDLILMHVSLRLKPAKIDHKQYF
RKQVLHGKDFQVDCKASGSPVPEISWSLPDGTMINNAMQADDSGHRTRRYTLFNNGTLYFNKVGVAEE
GDYTCYAQNTLGKDEMKVHLTVITAAPRIRQSNKTNKRIKAGDTAVLDCEVTGDPKPKIFWLLPSNDM
ISFSIDRYTFHANGSLTINKVKLLDSGEYVCVARNPSGDDTKMYKLDVVSKPPLINGLYTNRTVIKAT
AVRHSKKHFDCPAEGTPSPEVMWIMPDNIFLTAPYYGSRITVHKNGTLEIRNVRLSDSADFICVARNE
GGESVLVVQLEVLEMLRRPTFRNPFNEKIVAQLGKSTALNCSVDGNPPPEIIWILPNGTRFSNGPQSY
QYLIASNGSFIISKTTREDAGKYRCAARNKVGYIEKLVILEIGQKPVILTYAPGTVKGISGESLSLHC
VSDGIPKPNTKWTMPSGYVVDRPQINGKYILHDNGTLVIKEATAYDRGNYICKAQNSVGHTLITVPVM
IVAYPPRITNRPPRSIVTRTGAAFQLHCVALGVPKPEITWEMPDHSLLSTASKERTHGSEQLHLQGTL
VIQNPQTSDSGIYKCTAKNPLGSDYAATYIQVI

| | | |
|---|---|---|
| NOV29ak, SNP13376523 of | SEQ ID NO:737 | 7876 bP |
| CG55776-01, | ORF Start: ATG at 6 | ORF Stop: TGA at 7857 |
| DNA Sequence | SNP Pos: 187 | SNP Change: G to A |

TCAGGATGAAGGTAAAAGGCAGAGGAATCACCTGCTTGCTGGTCTCCTTTGCTGTGATCTGCCTGGTC
GCCACCCCTGGGGGCAAGGCCTGTCCTCGCCGCTGTGCCTGTTATATGCCTACGGAGGTACACTGCAC
ATTTCGGTACCTGACTTCCATCCCAGACAGCATCCCGCCCAATGTGGAACACATCAATTTAGGGTACA
ACAGCTTGGTTAGATTGATGGAAACAGATTTTTCTGGCCTGACCAAACTGGAGTTACTCATGCTTCAC
AGCAATGGCATTCACACAATCCCTGACAAGACCTTCTCAGATTTGCAGGCCTTGCAGGTGAGACTGAT
GGTCTTAAAAATGAGCTATAATAAAGTCCGAAAACTTCAGAAAGATACTTTTTATGGCCTCAGGAGCT
TGACACGATTGCACATGGACCACAACAATATTGAGTTTATAAACCCAGAGGTTTTTTATGGGCTCAAC
TTTCTCCGCCTGGTGCACTTGGAAGGAAATCAGCTCACTAAGCTCCACCCAGATACATTTGTCTCTTT
GAGCTACCTCCAGATATTTAAAATCTCTTTCATTAAGTTCCTATACTTGTCTGATAACTTCCTGACCT
CCCTCCCTCAAGAGATGGTCTCCTATATGCCTGACCTAGACAGCCTTTACCTGCATGGAAACCCATGG
ACCTGTGATTGCCATTTAAAGTGGTTGTCTGACTGGATACAGGAGAAGCCAGGTATCTATATTGTNTT
ACCAGATGTAATAAAATGCAAAAAAGATAGAAGTCCCTCTAGTGCTCAGCAGTGTCCACTTTGCATGA
ACCCTAGGACTTCTAAAGGCAAGCCGTTAGCTATGGTCTCAGCTGCAGCTTTCCAGTGTGCCAAGCCA
ACCATTGACTCATCCCTGAAATCAAAGAGCCTGACTATTCTGGAAGACAGTAGTTCTGCTTTCATCTC
TCCCCAAGGTTTCATGGCACCCTTTGGCTCCCTCACTTTGAATATGACAGATCAGTCTGGAAATGAAG
CTAACATGGTCTGCAGTATTCAAAAGCCCTCAAGGACATCACCCATTGCATTCACTGAAGAAAATGAC
TACATCGTGCTAAATACTTCATTTTCAACATTTTTGGTGTGCAACATAGATTACGGTCACATTCAGCC
AGTGTGGCAAATTTTGGCTTTGTACAGTGATTCTCCTCTGATACTAGAAAGGAGCCACTTGCTTAGTG
AAACACCGCAGCTCTATTACAAATATAAACAGGTGGCTCCTAAGCCTGAAGACATTTTTACCAACATA
TGCCACCACATTCAGTACATTACAGATCCAGTACTCCAGTGATGCTCAAATCACTTTACCAAGAGCAG
AGATGAGGCCAGTGAAACACAAATGGACTATGATTTCAAGGGATAACAATACTAAGCTGGAACATACT
GTCTTGGTAGGTGGAACCGTTGGCCTGAACTGCCCAGGCCAAGGAGACCCCACCCCACACGTGGATTG
GCTTCTAGCTGATGGAAGTAAAGTGAGAGCCCCTTATGTCAGTGAGGATGGACGGATCCTAATAGACA
AAAGTGGAAAATTGGAACTCCAGATGGCTGATAGTTTTGACACAGGCGTATATCACTGTATAAGCAGC
AATTATGATGATGCAGATATTCTCACCTATAGGATAACTGTGGTAGAACCTTTGGTCGAAGCCTATCA
TCCCAGATGCCTCTATTAGCTGGGTTATTCCAGGAAACAATGTGCTCTATCAGTCATCAAGAGACAAG
AAAGTTCTAAACAATGGCACATTAAGAATATTACAGGTCACCCCGAAAGACCAAGGTTATTATCGCTG
TGTGGCAGCCAACCCATCAGGGGTTGATTTTTTGATTTTCCAAGTTTCAGTCAAGATGAAAGGACAAA
GGCCCTTGGAGCATGATGGAGAAACAGAGGGATCTGGACTTGATGAGTCCAATCCTATTGCTCATCTT
AAGGAGCCACCAGGTGCACAACTCCGTACATCTGCTCTGATGGAGGCTGAGGTTGGAAAACACACCTC
AAGCACAAGTAAGAGGCACAACTATCGGGAATTAACACTCCAGCGACGTGGAGATTCAACACATCGAC
GTTTTAGGGAGAATAGGAGGCATTTCCCTCCCTCTGCTAGGAGAATTGACCCACAACATTGGGCGGCA
CTGTTGGAGAAAGCTAAAAAGAATGCTATGCCAGACAAGCGAGAAAATACCACAGTGAGCCCACCCCC
AGTGGTCACCCAACTCCCAAACATACCTGGTGAAGAAGACGATTCCTCAGGCATGCTCGCTCTACATG
AGGAATTTATGGTCCCGGCCACTAAAGCTTTGAACCTTCCAGCAAGGACAGTGACTGCTGACTCCAGA
ACAATATCTGATAGTCCTATGACAAACATAAATTATGGCACAGAATTCTCTCCTGTTGTGAATTCACA
AGAATATAAACCCAACCATGTCAAGCCAAATACAAGGCACAACCAATCAACATTCATCCACTGTCTTT
CCACTGCTACTTGGAGCAACTGAATTTCAGGACTCTGACCAGATGGGAAGAGGAAGAGAGCATTTCCA
AAGTAGACCCCCAATAACAGTAAGGACTATGATCAAAGATGTCAATGTCAAAATGCTTAGTAGCACCA
CCAACAAACTATTATTAGAGTCAGTAAATACCACAAATAGTCATCAGACATCTGTAAGAGAAGTGAGT
GAACCCAGGCACAATCACTTCTATTCTCACACTACTCAAATACTTAGCACCTCCACGTTCCCTTCAGA
TCCACACACAGCTGCTCATTCTCAGTTTCCGATCCCTAGAAATAGTACAGTTAACATCCCGCTGTTCA
GACGCTTTGGGAGGCAGAGGAAAATTGGCGGAAGGGGGCGGATTATCAGCCCATATAGAACTCCAGTT
CTGCGACGGCATAGATACAGCATTTTCAGGTCAACAACCAGAGGTTCTTCTGAAAAAAGCACTACTGC
ATTCTCAGCCACAGTGCTCAATGTGACATGTCTGTCCTGTCTTCCCAGGGAGAGGCTCACCACTGCCA
CAGCAGCATTGTCTTTTCCAAGTGCTGCTCCCATCACCTTCCCCAAAGCTGACATTGCTAGAGTCCCA
TCAGAAGAGTCTACAACTCTAGTCCAGAATCCACTATTACTACTTGAGAACAAACCCAGTGTAGAGAA
AACAACACCCACAATAAAATATTTCAGGACTGAAATTTCCCAAGTGACTCCAACTGGTGCAGTCATGA
CATATGCTCCAACATCCATACCCATGGAAAAAACTCACAAAGTAAACGCCAGTTACCCACGTGTGTCT
AGCACCAATGAAGCTAAAAGAGATTCAGTGATTACATCGTCACTTTCAGGTGCTATCACCAAGCCACC
AATGACTATTATAGCCATTACAAGGTTTTCAAGAAGGAAAATTCCCTGGCAACAGAACTTTGTAAATA
ACCATAACCCAAAAGGCAGATTAAGGAATCAACATAAAGTTAGTTTACAAAAAAGCACAGCTGTGATG
CTTCCTAAAACATCTCCTGCTTTACCACAGAGACAAAGTCTCCCCTCGCACCACACTACGACCAAAAC
ACACAATCCTGGAAGTCTTCCAACAAAGAAGGAGCTTCCCTTCCCACCCCTTAACCCTATGCTTCCTA
GTATTATAAGCAAAGACTCAAGTACAAAAAGCATCATATCAACGCAAACAGCAATACCAGCAACAACT
CCTACCTTCCCTGCATCTGTCATCACTTATGAAACCCAAACAGAGAGATCTAGAGCACAAACAATACA
AAGAGAACAGGAGCCTCAAAAGAAGAACAGGACTGACCCAAACATCTCTCCAGACCAGAGTTCTGGCT
TCACTACACCCACTGCTATGACACCTCCTGTTCTAACCACAGCCGAAACTTCAGTCAAGCCCAGTGTC
TCTGCATTCACTCATTCCCCACCAGAAAACACAACTGGGATTTCAAGCACAATCAGTTTTCATTCAAG
AACTCTTAATCTGACAGATGTGATTGAAGAACTAGCCCAAGCAAGTACTCAGACTTTGAAGAGCACAA
TTGCTTCTGAAACAACTTTGTCCAGCAAATCACACCAGAGTACCACAACTAGGAAAGCAATCATTAGA
CACTCAACCATACCACCATTCTTGAGCAGCAGTGCTACTCTAATGCCAGTTCCCATCTCCCCTCCCTT
TACTCAGAGAGCAGTTACTGACAACGTGGCGACTCCCATTTCCGGGCTTATGACAAATACAGTGGTCA
AGCTGCACGAATCCTCAAGGCACAATGCTAAACCACAGCAATTAGTAGCAGAGGTTGCAACATCCCCC
AAGGTTCACCCAAATGCCAAGTTCACAATTGGAACCACTCACTTCATCTACTCTAATCTGTTACATTC
TACTCCCATGCCAGCACTAACAACAGTTAAATCACAGAATTCTAAATTAACTCCATCTCCCTGGGCAG
AAAACCAATTTTGGCACAAACCATACTCAGAAATTGCTGAAAAAGGCAAAAAGCCAGAAGTAAGCATG
TTGGCTACTACAGGCCTGTCCGAGGCCACCACTCTTGTTTCAGATTGGGATGGACAGAAGAACACAAA
GAAGAGTGACTTTGATAAGAAACCAGTTCAAGAAGCAACAACTTCCAAACTCCTTCCCTTTGACTCTT
TGTCTAGGTATATATTTGAAAAGCCCAGGATAGTTGGAGGAAAAGCTGCAAGTTTTACTATTCCAGCT
AACTCAGATGCCTTTCTTCCCTGTGAAGCTGTTGGAAATCCCCTGCCCACCATTCATTGGACCAGAGT
CCCATCAGGTATGTCAGGACTTGATTTATCTAAGAGGAAACAGAATAGCAGGGTCCAGGTTCTCCCCA
ATGGTACCCTGTCCATCCAGAGGGTGGAAATTCAGGACCGCGGACAGTACTTGTGTTCCGCATCCAAT
CTGTTTGGCACAGACCACCTTCATGTCACCTTGTCTGTGGTTTCCTATCCTCCCAGGATCCTGGAGAG
ACGTACCAAAGAGATCACAGTTCATTCCGGAAGCACTGTGGAACTGAAGTGCAGAGCAGAAGGTAGGC
CAAGCCCTACAGTTACCTGGATTCTTGCAAACCAAACAGTTGTCTCAGAATCATCCCAGGGAACTAGG
CAGGCTGTGGTGACGGTTGACGGAACATTGGTCCTCCACAATCTCAGTATTTATGACCGTGGCTTTTA
CAAATGTGTGGCCAGCAACCCAGGTGGCCAGGATTCACTGCTGGTTAAAATACAAGTCATTGCAGCAC
CACCTGTTATTCTAGAGCAAAGGAGGCAAGTCATTGTAGGCACTTGGGGTGAAAGTTTAAAACTGCCC
ATTACAGTTTACCAATTCCAAGTTGTTCTTATTTTCAAATGGGACTTTGTATATAAGAAACCTAGCCT
CTTCAGACAGGGGCACTTATGAATGCATTGCTACCAGTTCCACTGGTTCGGAGCGAAGAGTAGTAATG
CTTACAATGGAAGAGCGAGTGACCAGCCCCAGGATAGAAGCTGCATCCCAGAAAAGGACTGAAGTGAA
TTTTGGGGACAAATTACTACTGAACTGCTCAGCCACTGGGGAGCCCAAACCCCAAATAATGTGGAGGT
TACCATCCAAGGCTGTGGTCGACCAGCAGCATAGGGTGGGCAGCTGGATCCACGTCTACCCTAATGGA
TCCCTGTTTATTGGATCAGTAACAGAAAAAGACAGTGGTGTCTACTTGTGTGTGGCAAGAAACAAAAT
ATTTTAGAAAGCAAGTGCTCCATGGGAAAGATTTCCAAGTAGATTGCAMAGCTTCCGGCTCCCCAGTG
CCAGAGATATCTTGGAGTTTGCCTGATGGAACCATGATCAACAATGCAATGCAAGCCGATGACAGTGG
CCACAGGACTAGGAGATATACCCTTTTCAACAATGGAACTTTATACTTCAACAAAGTTGGGGTAGCGG
AGGAAGGAGATTATACTTGCTATGCCCAGAACACCCTAGGGAAAGATGAAATGAAGGTCCACTTAACA
GTTATAACAGCTGCTCCCCGGATAAGGCAGAGTAACAAAACCAACAAGAGAATCAAAGCTGGAGACAC
AGCTGTCCTTGACTGTGAGGTCACTGGGGATCCCAAACCAAAAATATTTTGGTTGCTGCCTTCCAATG
ACATGATTTCCTTCTCCATTGATAGGTACACATTTCATGCCAATGGGTCTTTGACCATCAACAAAGTG
AAACTGCTCGATTCTGGAGAGTACGTATGTGTAGCCCGAAATCCCAGTGGGGATGACACCAAAATGTA
CAAACTGGATGTGGTCTCTAAACCTCCATTAATCAATGGTCTGTATACAAACAGAACTGTTATTAAAG
CCACAGCTGTGAGACATTCCAAAAAACACTTTGACTGCAGAGCTGAAGGGACACCATCTCCTGAAGTC
ATGTGGATCATGCCAGACAATATTTTCCTCACAGCCCCATACTATGGAAGCAGAATCACAGTCCATAA
AAATGGAACCTTGGAAATTAGGAATGTGAGGCTTTCAGATTCAGCCGACTTTATCTGTGTGGCCCGAA
ATGAAGGTGGAGAGAGCGTGTTGGTAGTACAGTTAGAAGTACTGGAAATGCTGAGAAGACCGACATTT
AGAAATCCATTTAATGAAAAAATAGTTGCCCAGCTGGGAAAGTCCACAGCATTGAATTGCTCTGTTGA
TGGTAACCCACCACCTGAAATAATCTGGATTTTACCAAATGGCACACGATTTTCCAATGGACCACAAA
GTTATCAGTATCTGATAGCAAGCAATGGTTCTTTTATCATTTCTAAAACAACTCGGGAGGATGCAGGA
AAATATCGCTGTGCAGCTAGGAATAAAGTTGGCTATATTGAGAAATTAGTCATATTAGAAATTGGCCA
GAAGCCAGTTATTCTTACCTATGCACCAGGGACAGTAAAAGGCATCAGTGGAGAATCTCTATCACTGC
ATTGTGTGTCTGATGGAATCCCTAAGCCAAATATCAAATGGACTATGCCAAGTGGTTATGTAGTAGAC
AGGCCTCAAATTAATGGGAAATACATATTGCATGACAATGGCACCTTAGTCATTAAAGAAGCAACAGC
TTATGACAGAGGAAACTATATCTGTAAGGCTCAAAATAGTGTTGGTCATACACTGATTACTGTTCCAG
TAATGATTGTAGCCTACCCTCCCCGAATTACAAATCGTCCACCCAGGAGTATTGTCACCAGGACAGGG
GCAGCCTTTCAGCTCCACTGTGTGGCCTTGGGAGTTCCCAAGCCAGAAATCACATGGGAGATGCCTGA
CCACTCCCTTCTCTCAACGGCAAGTAAAGAGAGGACACATGGAAGTGAGCAGCTTCACTTACAAGGTA
CCCTAGTCATTCAGAATCCCCAAACCTCCGATTCTGGGATATACAAATGCACAGCAAAGAACCCACTT
GGTAGTGATTATGCAGCAACGTATATTCAAGTAATCTGACATGAAATAATAAAGTC

| | | | |
|---|---|---|---|
| NOV29ak, SNP13376523 | SEQ ID NO:738 | 2617 aa | MW at 290181.1 kD |
| of CG55776-01, | SNP Pos: 61 | | SNP Change: |
| Protein Sequence | | | Arg to His |

MKVKGRGITCLLVSFAVICLVATPGGKACPRRCACYMPTEVHCTFRYLTSIPDSIPPNVEHINLGYNS
LVRLMETDFSGLTKLELLMLHSNGIHTIPDKTFSDLQALQVRLMVLKMSYNKVRKLQKDTFYGLRSLT
RLHMDHNNIEFINPEVFYGLNFLRLVHLEGNQLTKLHPDTFVSLSYLQIFKISFIKFLYLSDNFLTSL
PQEMVSYMPDLDSLYLHGNPWTCDCHLKWLSDWIQEKPGIYIVLPDVIKCKKDRSPSSAQQCPLCMNP
RTSKGKPLAMVSAAAFQCAKPTIDSSLKSKSLTILEDSSSAFISPQGFMAPFGSLTLNMTDQSGNEAN
MVCSIQKPSRTSPIAFTEENDYIVLNTSFSTFLVCNIDYGHIQPVWQILALYSDSPLILERSHLLSET
PQLYYKYKQVAPKPEDIFTNIEADLRADPSWLMQDQISLQLNRTATTFSTLQIQYSSDAQITLPRAEM
RPVKHKWTMISRDNNTKLEHTVLVGGTVGLNCPGQGDPTPHVDWLLADGSKVRAPYVSEDGRILIDKS
GKLELQMADSFDTGVYHCISSNYDDADILTYRITVVEPLVEAYQENGIHHTVFIGETLDLPCHSTGIP
DASISWVIPGNNVLYQSSRDKKVLNNGTLRILQVTPKDQGYYRCVAANPSGVDFLIFQVSVKMKGQRP
LEHDGETEGSGLDESNPIAHLKEPPGAQLRTSALMEAEVGKHTSSTSKRHNYRELTLQRRGDSTHRRF
RENRRHFPPSARRIDPQHWAALLEKAKKNAMPDKRENTTVSPPPVVTQLPNIPGEEDDSSGMLALHEE
FMVPATKALNLPARTVTADSRTISDSPMTNINYGTEFSPVVNSQILPPEEPTDFKLSTAIKTTAMSKN
INPTMSSQIQGTTNQHSSTVFPLLLGATEFQDSDQMGRGREHFQSRPPITVRTMIKDVNVKMLSSTTN
KLLLESVNTTNSHQTSVREVSEPRHNHFYSHTTQILSTSTFPSDPHTAAHSQFPIPRNSTVNIPLFRR
FGRQRKIGGRGRIISPYRTPVLRRHRYSIFRSTTRGSSEKSTTAFSATVLNVTCLSCLPRERLTTATA
ALSFPSAAPITFPKADIARVPSEESTTLVQNPLLLLENKPSVEKTTPTIKYFRTEISQVTPTGAVMTY
APTSIPMEKTHKVNASYPRVSSTNEAKRDSVITSSLSGAITKPPMTTIAITRFSRRKIPWQQNFVNNH
NPKGRLRNQHKVSLQKSTAVMLPKTSPALPQRQSLPSHHTTTKTHNPGSLPTKKELPFPPLNPMLPSI
ISKDSSTKSIISTQTAIPATTPTFPASVITYETQTERSRAQTIQREQEPQKKNRTDPNISPDQSSGFT
TPTAMTPPVLTTAETSVKPSVSAFTHSPPENTTGISSTISFHSRTLNLTDVIEELAQASTQTLKSTIA
SETTLSSKSHQSTTTRKAIIRHSTIPPFLSSSATLMPVPISPPFTQRAVTDNVATPISGLMTNTVVKL
HESSRHNAKPQQLVAEVATSPKVHPNAKFTIGTTHFIYSNLLHSTPMPALTTVKSQNSKLTPSPWAEN
QFWHKPYSEIAEKGKKPEVSMLATTGLSEATTLVSDWDGQKNTKKSDFDKKPVQEATTSKLLPFDSLS
PTVTWILANQTVVSESSQGSRQAVVTVDGTLVLHNLSIYDRGFYKCVASNPGGQDSLLVKIQVIAAPP
VILEQRRQVIVGTWGESLKLPCTAKGTPQPSVYWVLSDGTEVKPLQFTNSKLFLFSNGTLYIRNLASS
DRGTYECIATSSTGSERRVVMLTMEERVTSPRIEAASQKRTEVNFGDKLLLNCSATGEPKPQIMWRLP
SKAVVDQQHRVGSWIHVYPNGSLFIGSVTEKDSGVYLCVARNKMGDDLILMHVSLRLKPAKIDHKQYF
RKQVLHGKDFQVDCKASGSPVPEISWSLPDGTMINNAMQADDSGHRTRRYTLFNNGTLYFNKVGVAEE
GDYTCYAQNTLGKDEMKVHLTVITAAPRIRQSNKTNKRIKAGDTAVLDCEVTGDPKPKIFWLLPSNDM
ISFSIDRYTFHANGSLTINKVKLLDSGEYVCVARNPSGDDTKMYKLDVVSKPPLINGLYTNRTVIKAT
AVRHSKKHFDCRAEGTPSPEVMWIMPDNIFLTAPYYGSRITVHKNGTLEIPNVRLSDSADFICVARNE
GGESVLVVQLEVLEMLARRPTFAPFNEKIVAQLGKSTAIACSVDGNPPPEIIWILPNGTRFSNGPQSY
QYLIASNGSFIISKTTREDAGKYRCAARNKVGYIEKLVILEIGQKPVILTYAPGTVKGISGESLSLHC
VSDGIPKPNIKWTMPSGYVVDRPQINGKYILHDNGTLVIKEATAYDRGNYICKAQNSVGHTLITVPVM
IVAYPPRITNRPPRSIVTRTGAAFQLHCVALGVPKPEITWEMPDHSLLSTASKERTHGSEQLHLQGTL
VIQNPQTSDSGIYKCTAKNPLGSDYAATYIQVI

| | | |
|---|---|---|
| NOV29al, SNP13376524 of | SEQ ID NO:739 | 7876 bP |
| CG55776-01, | ORF Start: ATG at 6 | ORF Stop: TGA at 7857 |
| DNA Sequence | SNP Pos: 251 | SNP Change: A to T |

TCAGGATGAAGGTAAAAGGCAGAGGAATCACCTGCTTGCTGGTCTCCTTTGCTGTGATCTGCCTGGTC
GCCACCCCTGGGGGCAAGGCCTGTCCTCGCCGCTGTGCCTGTTATATGCCTACGGAGGTACACTGCAC
ATTTCGGTACCTGACTTCCATCCCAGACAGCATCCCGCCCAATGTGGAACGCATCAATTTAGGGTACA
ACAGCTTGGTTAGATTGATGGAAACAGATTTTTCTGGCCTGACCAATCTGGAGTTACTCATGCTTCAC
AGCAATGGCATTCACACAATCCCTGACAAGACCTTCTCAGATTTGCAGGCCTTGCAGGTGAGACTGAT
GGTCTTAAAAATGAGCTATAATAAAGTCCGAAAACTTCAGAAAGATACTTTTTATGGCCTCAGGAGCT
TGACACGATTGCACATGGACCACAACAATATTGAGTTTATAAACCCAGAGGTTTTTTATGGGCTCAAC
TTTCTCCGCCTGGTGCACTTGGAAGGAAATCAGCTCACTAAGCTCCACCCAGATACATTTGTCTCTTT
GAGCTACCTCCAGATATTTAAAATCTCTTTCATTAAGTTCCTATACTTGTCTGATAACTTCCTGACCT
CCCTCCCTCAAGAGATGGTCTCCTATATGCCTGACCTAGACAGCCTTTACCTGCATGGAAACCCATGG
ACCTGTGATTGCCATTTAAAGTGGTTGTCTGACTGGATACAGGAGAAGCCAGGTATCTATATTGTNTT
ACCAGATGTAATAAAATGCAAAAAAGATAGAAGTCCCTCTAGTGCTCAGCAGTGTCCACTTTGCATGA
ACCCTAGGACTTCTAAAGGCAAGCCGTTAGCTATGGTCTCAGCTGCAGCTTTCCAGTGTGCCAAGCCA
ACCATTGACTCATCCCTGAAATCAAAGAGCCTGACTATTCTGGAAGACAGTAGTTCTGCTTTCATCTC
TCCCCAAGGTTTCATGGCACCCTTTGGCTCCCTCACTTTGAATATGACAGATCAGTCTGGAAATGAAG
CTAACATGGTCTGCAGTATTCAAAAGCCCTCAAGGACATCACCCATTGCATTCACTGAAGAAAATGAC
TACATCGTGCTAAATACTTCATTTTCAACATTTTTGGTGTGCAACATAGATTACGGTCACATTCAGCC
AGTGTGGCAAATTTTGGCTTTGTACAGTGATTCTCCTCTGATACTAGAAAGGAGCCACTTGCTTAGTG
AAACACCGCAGCTCTATTACAAATATAAACAGGTGGCTCCTAAGCCTGAAGACATTTTTACCAACATA
GAGGCAGATCTCAGAGCAGATCCCTCTTGGTTAATGCAAGACCAAATTTCCTTGCAGCTGAACAGAAC
TGCCACCACATTCAGTACATTACAGATCCAGTACTCCAGTGATGCTCAAATCACTTTACCAAGAGCAG
AGATGAGGCCAGTGAAAACACAAATGGACTATGATTTCAAGGGATACAATACTAAGCTGGAACATACT
GTCTTGGTAGGTGGAACCGTTGGCCTGAACTGCCCAGGCCAGGAGACCCCACCCCACAACGTGGATTG
GCTTCTAGCTGATGGAAGTAAAGTGAGAGCCCCTTATGTCAGTGAGGATGGACGGATCCTAATAGACA
AATTATGATGATGCAGATATTCTCACCTATAGGATAACTGTGGTAGAACCTTTGGTCGAAGCCTATCA
GGAAAATGGGATTCATCACACAGTTTTCATTGGTGAAACACTTGATCTTCCATGCCATTCTACTGGTA
TCCCAGATGCCTCTATTAGCTGGGTTATTCCAGGAAACAATGTGCTCTATCAGTCATCAAGAGACAAG
TGTGGCAGCCAACCCATCAGGGGTTGATTTTTTGATTTTCCAAGTTTCAGTCAAGATGAAAGGACAAA
GGCCCTTGGAGCATGATGGAGAAACAGAGGGATCTGGACTTGATGAGTCCAATCCTATTGCTCATCTT
AAGGAGCCACCAGGTGCACAACTCCGTACATCTGCTCTGATGGAGGCTGAGGTTGGAAAACACACCTC
AGCACAGTAAGAGGCACA1ACTATCGGGAAATTAACACTCCAGCGACGTGGAGATTCAACACATCGAC
GTTTTAGGGAGAATAGGAGGCATTTCCCTCCCTCTGCTAGGAGAATTGACCCACAACATTGGGCGGCA
CTGTTGGAGAAAGCTAAAAAGAATGCTATGCCAGACAAGCGAGAAAATACCACAGTGAGCCCACCCCC
AGTGGTCACCCAACTCCCAAACATACCTGGTGAAGAAGACGATTCCTCAGGCATGCTCGCTCTACATG
AGGAATTTATGGTCCCGGCCACTAAAGCTTTGAACCTTCCAGCAAGGACAGTGACTGCTGACTCCAGA
ACAATATCTGATAGTCCTATGACAAACATAAATTATGGCACAGAATTCTCTCCTGTTGTGAATTCACA
AATACTACCACCTGAAGAACCCACAGATTTCAAACTGTCTACTGCTATTAAAACTACAGCCATGTCAA
AGAATATAAACCCAACCATGTCAAGCCAAATACAAGGCACAACCAATCAACATTCATCCACTGTCTTT
AAGTAGACCCCCAATAACAGTAAGGACTATGATCAAAGATGTCAATGTCAAAATGCTTAGTAGCACCA
CCAACAAACTATTATTAGAGTCAGTAAATACCACAAATAGTCATCAGACATCTGTAAGAGAAGTGAGT
GAACCCAGGCACAATCACTTCTATTCTCACACTACTCAAATACTTAGCACCTCCACGTTCCCTTCAGA
TCCACACACAGCTGCTCATTCTCAGTTTCCGATCCCTAGAAATAGTACAGTTAACATCCCGCTGTTCA
GACGCTTTGGGAGGCAGAGGAAAATTGGCGGAAGGGGGCGGATTATCAGCCCATATAGAACTCCAGTT
CTGCGACGGCATAGATACAGCATTTTCAGGTCAACAACCAGAGGTTCTTCTGAAAAAAGCACTACTGC
ATTCTCAGCCACAGTGCTCAATGTGACATGTCTGTCCTGTCTTCCCAGGGAGAGGCTCACCACTGCCA
CAGCAGCATTGTCTTTTCCAAGTGCTGCTCCCATCACCTTCCCCAAAGCTGACATTGCTAGAGTCCCA
TCAGAAGAGTCTACAACTCTAGTCCAGAATCCACTATTACTACTTGAGAACAAACCCAGTGTAGAGAA
AACAACACCCACAATAAATATTTCAGGACTGAAATTTCCCAAAGTGACTCCAACTGGTGCAGTCATGA
CATATGCTCCAAACATCCATACCCATGGAAACTCACAAAGTAAACGCCAAGTTACCCAACGTGTGTCT
AGCACCAATGAAGCTAAAAGAGATTCAGTGATTACATCGTCACTTTCAGGTGCTATCACCAAGCCACC
AATGACTATTATAGCCATTACAAGGTTTTCAAGAAGGAAAATTCCCTGGCAACAGAACTTTGTAAATA
ACCATAACCCAAAAGGCAGATTAAGGAATCAACATAAAGTTAGTTTACAAAAAAGCACAGCTGTGATG
CTTCCTAAAACATCTCCTGCTTTACCACAGAGACAAAGTCTCCCCTCGCACCACACTACGACCAAAAC
ACACAATCCTGGAAGTCTTCCAACAAAGAAGGAGCTTCCCTTCCCACCCCTTAACCCTATGCTTCCTA
GTATTATAAGCAAAGACTCAAGTACAAAAGCATCAATATCAACGCAAACAGCAATACCAGCAACAACT
CCTACCTTCCCTGCATCTGTCATCACTTATGACCCAAACAAGAGAGATCTAGAGCACAAAACAATACA
AAGAGAACAGGAGCCTCAAAGAAAGAAkCAGGACTGACCCAACATCTCTCCAGACCAGAGTTCTGGCT
TCACTACACCCACTGCTATGACACCTCCTGTTCTAACCACAGCCGAAACTTCAGTCAAGCCCAGTGTC
TCTGCATTCACTCATTCCCCACCAGAACACAAACTGGGAATTTCAAGCACAATCAGTTTTCATTCAAG
AACTCTTAATCTGACAGATGTGATTGAAGAACTAGCCCAGCAAAGTACTCAGACTTTGAAGAGCACAA
TTGCTTCTGAAACAACTTTGTCCAGCAAATCACACCAGAGTACCACAACTAGGAAAGCAATCATTAGA
CACTCAACCATACCACCATTCTTGAGCAGCAGTGCTACTCTAATGCCAGTTCCCATCTCCCCTCCCTT
TACTCAGAGAGCAGTTACTGACAACGTGGCGACTCCCATTTCCGGGCTTATGACAAATACAGTGGTCA
AGCTGCACGAATCCTCAAGGCACAATGCTAAACCACAGCAATTAGTAGCAGAGGTTGCAACATCCCCC
AAGGTTCACCCAAATGCCAAGTTCACAATTGGAACCACTCACTTCATCTACTCTAATCTGTTACATTC
TACTCCCATGCCAGCACTAACAACAGTTAAATCACAGAATTCTAAATTAACTCCATCTCCCTGGGCAG
AAAACCAATTTTGGCACAAACCATACTCAGAAATTGCTGAAAAAGGCAAAAAGCCAGAAGTAAGCATG
TTGGCTACTACAGGCCTGTCCGAGGCCACCACTCTTGTTTCAGATTGGGATGGACAGAAGAACACAAA
GAAGAGTGACTTTGATAAGAAACCAGTTCAAGAAGCAACAACTTCCAAACTCCTTCCCTTTGACTCTT
TGTCTAGGTATATATTTGAAAAGCCCAGGATAGTTGGAGGAAAAGCTGCAAGTTTTACTATTCCAGCT
AACTCAGATGCCTTTCTTCCCTGTGAAGCTGTTGGAAATCCCCTGCCCACCATTCATTGGACCAGAGT
CCCATCAGGTATGTCAGGACTTGATTTATCTAAGAGGAAACAGAATAGCAGGGTCCAGGTTCTCCCCA
ATGGTACCCTGTCCATCCAGAGGGTGGAAATTCAGGACCGCGGACAGTACTTGTGTTCCGCATCCAAT
CTGTTTGGCACAGACCACCTTCATGTCACCTTGTCTGTGGTTTCCTATCCTCCCAGGATCCTGGAGAG
ACGTACCAAGAGATCACAGTTCATTCCGGAAGCACTGTGGAACTGAAGTGCAGAGCAGAAGGTAAGGC
CAAGCCCTACAGTTACCTGGATTCTTGCAAACCAAACAGTTGTCTCAGAATCATCCCAGGGAAGTAGG
CAGGCTGTGGTGACGGTTGACGGAACATTGGTCCTCCACAATCTCAGTATTTATGACCGTGGCTTTTA
CAAATGTGTGGCCAGCAACCCAGGTGGCCAGGATTCACTGCTGGTTAAAATACAAGTCATTGCAGCAC
CACCTGTTATTCTAGAGCATAGGAGGCAAGTCATTGTAGGCACTTGGGGTGAAAGTTTAAAACTGCCC
TGTACTGCAAAAGGAACTCCTCAGCCCAGCGTTTACTGGGTCCTCTCTGATGGCACTGAAGTGAAACC
ATTACAGTTTACCAATTCCAAGTTGTTCTTATTTTCAAATGGGACTTTGTATATAAGAAACCTAGCCT
CTTCAGACAGGGGCACTTATGAATGCATTGCTACCAGTTCCACTGGTTCGGAGCGAAGAGTAGTAATG
CTTACAATGGAAGAGCGAGTGACCAGCCCCAGGATAGAAGCTGCATCCCAGAAAAGGACTGAAGTGAA
TTTTGGGGACAAATTACTACTGAACTGCTCAGCCACTGGGGAGCCCAAACCCCAAATAATGTGGAGGT
GGGGGATGATCTGATACTGATGCATGTTAGCCTAAGACTGAAACCTGCCAAAATTGACCACAAGCAGT
ATTTTAGAAAGCAAGTGCTCCATGGGAAAGATTTCCAAGTAGATTGCAAAGCTTCCGGCTCCCCAGTG
CCAGAGATATCTTGGAGTTTGCCTGATGGAACCATGATCAACAATGCAATGCAAGCCGATGACAGTGG
CCACAGGACTAGGAGATATACCCTTTTCAACAATGGAACTTTATACTTCAACAAAGTTGGGGTAGCGG
AGGAAGGAGATTATACTTGCTATGCCCAGAACACCCTAGGGAAAAGATGAATGAAGGTCCACTTAACA
GTTATAACAGCTGCTCCCCGGATAAGGCAGAGTAACAAAACCAACAAGAGAATCAAAGCTGGAGACAC
AGCTGTCCTTGACTGTGAGGTCACTGGGGATCCCAAACCAAAAATATTTTGGTTGCTGCCTTCCAATG
AAACTGCTCGATTCTGGAGAGTACGTATGTGTAGCCCGAAATCCCAGTGGGGATGACACCAAAATGTA
CAAACTGGATGTGGTCTCTAAACCTCCATTAATCAATGGTCTGTATACAAACAGAACTGTTATTAAAG
CCACAGCTGTGAGACATTCCAAAAAACACTTTGACTGCAGAGCTGAAGGGACACCATCTCCTGAAGTC
ATGTGGATCATGCCAGACAATATTTTCCTCACAGCCCCATACTATGGAAGCAGAATCACAGTCCATAA
AAATGGAACCTTGGAAATTAGGAATGTGAGGCTTTCAGATTCAGCCGACTTTATCTGTGTGGCCCGAA
ATGAAGGTGGAGAGAGCGTGTTGGTAGTACAGTTAGAAGTACTGGAAATGCTGAGAAGACCGACATTT
AGAAATCCATTTAATGAAAAAATAGTTGCCCAGCTGGGAAAGTCCACAGCATTGAATTGCTCTGTTGA
TGGTAACCCACCACCTGAAATAATCTGGATTTTACCAAATGGCACACGATTTTCCAATGGACCACAAA
GTTATCAGTATCTGATAGCAAGCAATGGTTCTTTTATCATTTCTAAAACAACTCGGGAGGATGCAGGA
AAATATCGCTGTGCAGCTAGGAATAA)GTTGGCTATATTGAGAAATTAGTCATATTAGAAATTGGCCA
GAAGCCAGTTATTCTTACCTATGCACCAGGGACAGTAAAAGGCATCAGTGGAGAATCTCTATCACTGC
ATTGTGTGTCTGATGGAATCCCTAAGCCAAATATCAAATGGACTATGCCAAGTGGTTATGTAGTAGAC
AGGCCTCAAATTAATGGGAAATACATATTGCATGACAATGGCACCTTAGTCATTAAAGAAGCAACAGC
TTATGACAGAGGAAACTATATCTGTAAGGCTCAAAATAGTGTTGGTCATACACTGATTACTGTTCCAG
TAATATGATTGTAGCCTACCCTCCCCG1ATTACATCGTCCACCCAGGAGTATTGTCACCAGGACAGGG
GCAGCCTTTCAGCTCCACTGTGTGGCCTTGGGAGTTCCCAAGCCAGAAATCACATGGGAGATGCCTGA
CCCTAGTCATTCAGAATCCCCAAACCTCCGATTCTGGGATATACAAATGCACAGCAAAGAACCCACTT
GGTAGTGATTATGCAGCAACGTATATTCAAGTAATCTGACATGAAATAATAAAGTC

| | | | |
|---|---|---|---|
| NOV29al, SNP13376524 of | SEQ ID NO:740 | 2617 aa | MW at 290186.1 kD |
| CG55776-01, Protein Sequence | SNP Pos: 82 | | ISNP Change: |
| | | | LYS to ASn |

MKVKGRGITCLLVSFAVICLVATPGGKACPRRCACYMPTEVHCTFRYLTSIPDSIPPNVERINLGYNS
LVRLMETDFSGLTNLELLMLHSNGIHTIPDKTFSDLQALQVRIMVLKMSYNKVRKLQKDTFYGLRSLT
RLHMDHNNIEFINPEVFYGLNFLRLVHLEGNQLTKLHPDTFVSLSYLQIFKISFIKFLYLSDNFLTSL
PQEMVSYMPDLDSLYLHGNPWTCDCHLKWLSDWIQEKPGIYIVLPDVIKCKKDRSPSSAQQCPLCMNP
RTSKGKPLAMVSAAAFQCAKPTIDSSLKSKSLTILEDSSSAFISPQGFMAPFGSLTLNMTDQSGNEAN
MVCSIQKPSRTSPIAFTEENDYIVLNTSFSTFLVCNIDYGHIQPVWQILALYSDSPLILERSHLLSET
PQLYYKYKQVAPKPEDIFTNIEADLRADPSWLMQDQISLQLNRTATTFSTLQIQYSSDAQITLPRAEM
RPVKHKWTMISRDNNTKLEHTVLVGGTVGLNCPGQGDPTPHVDWLLADGSKVPAPYVSEDGRILIDKS
GKLELQMADSFDTGVYHCISSNYDDADILTYRITVVEPLVEAYQENGIHHTVFIGETLDLPCHSTGIP
DASISWVIPGNNVLYQSSRDKKVLNNGTLRILQVTPKDQGYYRCVAANPSGVDFLIFQVSVKMKGQRP
LEHDGETEGSGLDESNPIAHLKEPPGAQLRTSALMEAEVGKHTSSTSKRHNYRELTLQRRGDSTHRRF
RENRRHFPPSARRIDPQHWAALLEKAKKNAMPDKRENTNTSPPPVVTQLPNIPGEEDDSSGMLALHEE
FMVPATKALNLPARTVTADSRTISDSPMTNTNYGTEFSPVVNSQILPPEEPTDFKLSTAIKTTAMSKN
INPTMSSQIQGTTNQHSSTVFPLLLGATEFQDSDQMGRGREHFQSRPPITVRTMIKDVNVKMLSSTTN
KLLLESVNTTNSHQTSVREVSEPRHNHFYSHTTQILSTSTFPSDPHTAAHSQFPIPPNSTVNIPLFRR
FGRQRKIGGRGRIISPYRTPKTLRHRYSIFRSTTRGSSEKSTTAFSATVLNVTCLSCLPRERLTTATA
ALSFPSAAPITFPKADIARVPSEESTTLVQNPLLLLENKPSVEKTTPTIKYFRTEISQVTPTGAVMTY
APTSIPMEKTHKVNASYPRVSSTNEAKRDSVITSSLSGAITKPPMTIIAITRFSRRKIPWQQNFVNNH
NPKGRLRNQHKVSLQKSTAVMLPKTSPALPQRQSLPSHHTTTKTHNPGSLPTKKELPFPPLNPMLPSI
ISKDSSTKSIISTQTAIPATTPTFPASVITYETQTERSRAQTIQREQEPQKKNRTDPNISPDQSSGFT
TPTAMTPPVLTTAETSVKPSVSAFTHSPPENTTGISSTISFHSRTLNLTDVIEELAQASTQTLKSTIA
SETTLSSKSHQSTTTRKAIIRHSTIPPFLSSSATLMPVPISPPFTQRAVTDNVATPISGLMTNTVVKL
HESSRHNAKPQQLVAEVATSPKVHPNAKFTIGTTHFIYSNLLHSTPMPALTTVKSQNSKLTPSPWAEN
QFWHKPYSEIAEKGKKPEVSMLATTGLSEATTLVSDWDGQKATKKSDFDKKPVQEATTSKLLPFDSLS
RYIFEKPRIVGGKAASFTIPANSDAFLPCEAVGNPLPTIHWTRVPSGMSGLDLSKRKQNSRVQVLPNG
TLSIQRVEIQDRGQYLCSASNLFGTDHLHVTLSVVSYPPRILERRTKEITVHSGSTVELKCRAEGRPS
PTVTWILANQTVVSESSQGSRQAVVTVDGTLVLHNLSIYDRGFYKCVASNPGGQDSLLVKIQVIAAPP
VILEQRRQVIVGTWGESLKLPCTAKGTPQPSVYWVLSDGTEVKPLQFTNSKLFLFSNGTLYIRNLASS
DRGTYECIATSSTGSERRVVMLTMEERVTSPRIEAASQKRTEVNFGDKLLLNCSATGEPKPQIMWRLP
SKAVVDQQHRVGSWIHVYPNGSLFIGSVTEKDSGVYLCVARNKMGDDLILMHVSLRLKPAKIDHKQYF
RKQVLHGKDFQVDCKASGSPVPEISWSLPDGTMINNAMQADDSGHRTRRYTLFNNGTLYFNKVGVAEE
GDYTCYAQNTLGKDENKVHLTVITAAPRIRQSNKTAKRIKAGDTAVLDCEVTGDPKPKIFWLLPSNDM
ISFSIDRYTFHANGSLTINKVKLLDSGEYVCVARNPSGDDTKMYKLDVVSKPPLINGLYTNRTVIKAT
AVRHSKKHFDCRAEGTPSPEVMWIMPDNIFLTAPYYGSRITVHKAGTLEIRNVRLSDSADFICVARNE
GGESVLVVQLEVLEMLRRPTFRNPFNEKIVAQLGKSTALNCSVDGNPPPEIIWILPNGTRFSNGPQSY
QYLIASNGSFIISKTTREDAGKYRCAARNKVGYIEKLVILEIGQKPVILTYAPGTVKGISGESLSLHC
VSDGIPKPNIKWTMPSGYVVDRPQINGKYILHDNGTLVIKEATAYDRGNYICKAQNSVGHTLITVPVM
IVAYPPRITNRPPRSIVTRTGAAFQLHCVALGVPKPEITWEMPDHSLLSTASKERTHGSEQLHLQGTL
VIQNPQTSDSGIYKCTAKNPLGSDYAATYIQVI

| | | |
|---|---|---|
| NOV29am, SNP13376525 of | SEQ ID NO:741 | 7876 bP |
| CG55776-01, | ORF Start: ATG at 6 | ORF Stop: TGA at 7857 |
| DNA Sequence | SNP Pos: 493 | SNP Change: A to G |

TCAGGATGAAGGTAAAAGGCAGAGGAATCACCTGCTTGCTGGTCTCCTTTGCTGTGATCTGCCTGGTC
GCCACCCCTGGGGGCAAGGCCTGTCCTCGCCGCTGTGCCTGTTATATGCCTACGGAGGTACACTGCAC
ATTTCGGTACCTGACTTCCATCCCAGACAGCATCCCGCCCAATGTGGAACGCATCAATTTAGGGTACA
ACAGCTTGGTTAGATTGATGGAAACAGATTTTTCTGGCCTGACCAAACTGGAGTTACTCATGCTTCAC
AGCAATGGCATTCACACAATCCCTGACAAGACCTTCTCAGATTTGCAGGCCTTGCAGGTGAGACTGAT
GGTCTTAAAAATGAGCTATAATAAAGTCCGAAAACTTCAGAAAGATACTTTTTATGGCCTCAGGAGCT
TGACACGATTGCACATGGACCACAACAATATTGAGTTTATAAACCCAGAGGTTTTTTATGGGCTCAAC
TTTCTCCGCCTGGTGCGCTTGGAAGGAAATCAGCTCACTAAGCTCCACCCAGATACATTTGTCTCTTT
GAGCTACCTCCAGATCTTTAAAATCTCTTTCATTAAGTTCCTATACTTGTCTGATAACTTCCTGACCT
CCCTCCCTCAAGAGATGGTCTCCTATATGCCTGACCTAGACAGCCTTTACCTGCATGGAAACCCATGG
ACCTGTGATTGCCATTTAAAGTGGTTGTCTGACTGGATACAGGAGAAGCCAGGTATCTATATTGTNTT
ACCAGATGTAATAAATGCAA3AAAAGATAGAAGTCCCTCTAGTGCTCAGCAGTGTCCACTTTGCATGA
ACCCTAGGACTTCTAAAGGCAAGCCGTTAGCTATGGTCTCAGCTGCAGCTTTCCAGTGTGCCAAGCCA
ACCATTGACTCATCCCTGAAATCAAAGAGCCTGACTATTCTGGAAGACAGTAGTTCTGCTTTCATCTC
TCCCCAAGGTTTCATGGCACCCTTTGGCTCCCTCACTTTGAATATGACAGATCAGTCTGGAAATGAAG
CTAACATGGTCTGCAGTATTCAAAAGCCCTCAAGGACATCACCCATTGCATTCACTGAAGAAAATGAC
TACATCGTGCTAAATACTTCATTTTCAACATTTTTGGTGTGCAACATAGATTACGGTCACATTCAGCC
AGTGTGGCAAATTTTGGCTTTGTACAGTGATTCTCCTCTGATACTAGAAAGGAGCCACTTGCTTAGTG
AAACACCGCAGCTCTATTACAAATATAAACAGGTGGCTCCTAAGCCTGAAGACATTTTTACCAACATA
GAGGCAGATCTCAGAGCAGATCCCTCTTGGTTAATGCAAGACCAAATTTCCTTGCAGCTGAACAGAAC
TGCCACCACATTCAGTACATTACAGATCCAGTACTCCAGTGATGCTCAAATCACTTTACCAAGAGCAG
AGATGAGGCCAGTGAAACACAAATGGACTATGATTTCAAGGGATAACAATACTAAGCTGGAACATACT
GTCTTGGTAGGTGGAACCGTTGGCCTGAACTGCCCAGGCCAAGGAGACCCCACCCCACACGTGGATTG
GCTTCTAGCTGATGGAAGTAAAGTGAGAGCCCCTTATGTCAGTGAGGATGGACGGATCCTAATAGACA
AAAGTGGAAAATTGGAACTCCAGATGGCTGATAGTTTTGACACAGGCGTATATCACTGTATAAGCAGC
AATTATGATGATGCAGATATTCTCACCTATAGGATAACTGTGGTAGAACCTTTGGTCGAAGCCTATCA
GGAAAATGGGATTCATCACACAGTTTTCATTGGTGAAACACTTGATCTTCCATGCCATTCTACTGGTA
TCCCAGATGCCTCTATTAGCTGGGTTATTCCAGGAAACAATGTGCTCTATCAGTCATCAAGAGACAAG
AAAGTTCTAAACAATGGCACATTAAGAATATTACAGGTCACCCCGAAAGACCAAGGTTATTATCGCTG
TGTGGCAGCCAACCCATCAGGGGTTGATTTTTTGATTTTCCAAGTTTCAGTCAAGATGAAAGGACAAA
GGCCCTTGGAGCATGATGGAGAAACAGAGGGATCTGGACTTGATGAGTCCAATCCTATTGCTCATCTT
AAGGAGCCACCAGGTGCACAACTCCGTACATCTGCTCTGATGGAGGCTGAGGTTGGAAAACACACCTC
AAGCACkAGTAAGAGGCACAACTATCGGGAATTAACACTCCAGCGACGTGGAGATTCAACACATCGAC
GTTTTAGGGAGAATAGGAGGCATTTCCCTCCCTCTGCTAGGAGAATTGACCCACAACATTGGGCGGCA
CTGTTGGAGAAAGCTAAAAAGAATGCTATGCCAGACAAGCGAGAAAATACCACAGTGAGCCCACCCCC
AGTGGTCACCCAACTCCCAAACATACCTGGTGAAGAAGACGATTCCTCAGGCATGCTCGCTCTACATG
AGGAATTTATGGTCCCGGCCACTAAAGCTTTGAACCTTCCAGCAAGGACAGTGACTGCTGACTCCAGA
ACAATATCTGATAGTCCTATGACAAACATAAATTATGGCACAGAATTCTCTCCTGTTGTGAATTCACA
AATACTACCACCTGAAGAACCCACAGATTTCAAACTGTCTACTGCTATTAAAACTACAGCCATGTCAA
AGAATATAAACCCAACCATGTCAAGCCAAATACAAGGCACAACCAATCAACATTCATCCACTGTCTTT
CCACTGCTACTTGGAGCAACTGAATTTCAGGACTCTGACCAGATGGGAAGAGGAAGAGAGCATTTCCA
AAGTAGACCCCCAATAACAGTAAGGACTATGATCAAAGATGTCAATGTCAAAATGCTTAGTAGCACCA
CCAACAAACTATTATTAGAGTCAGTAAATACCACAAATAGTCATCAGACATCTGTAAGAGAAGTGAGT
GAACCCAGGCACAATCACTTCTATTCTCACACTACTCAAATACTTAGCACCTCCACGTTCCCTTCAGA
TCCACACACAGCTGCTCATTCTCAGTTTCCGATCCCTAGAAATAGTACAGTTAACATCCCGCTGTTCA
GACGCTTTGGGAGGCAGAGGAAAATTGGCGGAAGGGGGCGGATTATCAGCCCATATAGAACTCCAGTT
CTGCGACGGCATAGATACAGCATTTTCAGGTCAACAACCAGAGGTTCTTCTGAAAAAAGCACTACTGC
ATTCTCAGCCACAGTGCTCAATGTGACATGTCTGTCCTGTCTTCCCAGGGAGAGGCTCACCACTGCCA
CAGCAGCATTGTCTTTTCCAAGTGCTGCTCCCATCACCTTCCCCAAAGCTGACATTGCTAGAGTCCCA
TCAGAAGAGTCTACAACTCTAGTCCAGAATCCACTATTACTACTTGAGAACAAACCCAGTGTAGAGAA
AACAACACCCACAATAAAATATTTCAGGACTGAAATTTCCCAAGTGACTCCAACTGGTGCAGTCATGA
CATATGCTCCAACATCCATACCCATGGAAIAAACTCACAAAGTAAACGCCAGTTACCCACGTGTGTCT
AATGACTATTATAGCCATTACAAGGTTTTCAAGAAGGAAAATTCCCTGGCAACAGAACTTTGTAAATA
ACCATAACCCAAAAGGCAGATTAAGGAATCAACATAAAGTTAGTTTACAAAAAAGCACAGCTGTGATG
CTTCCTAAAACATCTCCTGCTTTACCACAGAGACAAAGTCTCCCCTCGCACCACACTACGACCAAAAC
ACACAATCCTGGAAGTCTTCCAACAAAGAAGGAGCTTCCCTTCCCACCCCTTAACCCTATGCTTCCTA
GTATTATAAGCAAAGACTCAAGTAACAAAGCATCAATATCAACGCAAACAGCAATACCAGCAACAACT
CCTACCTTCCCTGCATCTGTCATCACTTATGAAACCCAAACAGAGAGATCTAGAGCACAAACAATACA
AAGAGAACAGGAGCCTCAAAAGAAGAACAGGACTGACCCAAACATCTCTCCAGACCAGAGTTCTGGCT
TCACTACACCCACTGCTATGACACCTCCTGTTCTAACCACAGCCGAAACTTCAGTCAAGCCCAGTGTC
TCTGCATTCACTCAATTCCCCACCAGAAACACAACTGGGATTTCAAGCACAATCAGTTTTCATTCAAG
TTGCTTCTGAAACAACTTTGTCCAGCAAATCACACCAGAGTACCACAACTAGGAAAGCAATCATTAGA
CACTCAACCATACCACCATTCTTGAGCAGCAGTGCTACTCTAATGCCAGTTCCCATCTCCCCTCCCTT
TACTCAGAGAGCAGTTACTGACAACGTGGCGACTCCCATTTCCGGGCTTATGACAAATACAGTGGTCA
AGCTGCACGAATCCTCAAGGCACAATGCTAAACCACAGCAATTAGTAGCAGAGGTTGCAACATCCCCC
AAGGTTCACCCAAATGCCAAGTTCACAATTGGAACCACTCACTTCATCTACTCTAATCTGTTACATTC
TACTCCCATGCCAGCACTAACAACAGTTAAATCACAGAATTCTAAATTAACTCCATCTCCCTGGGCAG
AAAACCAATTTTGGCACAAACCATACTCAGAAATTGCTGAAAAAGGCAAAAAGCCAGAAGTAAGCATG
TTGGCTACTACAGGCCTGTCCGAGGCCACCACTCTTGTTTCAGATTGGGATGGACAGAAGAACACAAA
GAAGAGTGACTTTGATAAGAAACCAGTTCAAGAAGCAACAACTTCCAAACTCCTTCCCTTTGACTCTT
TGTCTAGGTATATATTTGAAAAGCCCAGGATAGTTGGAGGAAAAGCTGCAAGTTTTACTATTCCAGCT
AACTCAGATGCCTTTCTTCCCTGTGAAGCTGTTGGAAATCCCCTGCCCACCATTCATTGGACCAGAGT
CCCATCAGGTATGTCAGGACTTGATTTATCTAAGAGGAAACAGAATAGCAGGGTCCAGGTTCTCCCCA
ATGGTACCCTGTCCATCCAGAGGGTGGAAATTCAGGACCGCGGACAGTACTTGTGTTCCGCATCCAAT
CTGTTTGGCACAGACCACCTTCATGTCACCTTGTCTGTGGTTTCCTATCCTCCCAGGATCCTGGAGAG
ACGTACCAAAGAGATCACAGTTCATTCCGGAAGCACTGTGGAACTGAAGTGCAGAGCAGAAGGTAGGC
CAAGCCCTACAGTTACCTGGATTCTTGCAAACCAAACAGTTGTCTCAGAATCATCCCAGGGAAGTAGG
CAGGCTGTGGTGACGGTTGACGGAACATTGGTCCTCCACAATCTCAGTATTTATGACCGTGGCTTTTA
CAAATGTGTGGCCAGCAACCCAGGTGGCCAGGATTCACTGCTGGTTAAAATACAAGTCATTGCAGCAC
CACCTGTTATTCTAGAGCAAAGGAGGCAAGTCATTGTAGGCACTTGGGGTGAAAGTTTAAAACTGCCC
TGTACTGCAAAAGGAACTCCTCAGCCCAGCGTTTACTGGGTCCTCTCTGATGGCACTGAAGTGAAACC
ATTACAGTTTACCAATTCCAAGTTGTTCTTATTTTCAAATGGGACTTTGTATATAAGAAACCTAGCCT
CTTCAGACAGGGGCACTTATGAATGCATTGCTACCAGTTCCACTGGTTCGGAGCGAAGAGTAGTAATG
CTTACAATGGAAGAGCGAGTGACCAGCCCCAGGATAGAAGCTGCATCCCAGAAAAGGACTGAAGTGAA
TTTTGGGGACAAATTACTACTGAACTGCTCAGCCACTGGGGAGCCCAAACCCCAAATAATGTGGAGGT
TACCATCCAAGGCTGTGGTCGACCAGCAGCATAGGGTGGGCAGCTGGATCCACGTCTACCCTAATGGA
TCCCTGTTTATTGGATCAGTAACAGAAAAAGACAGTGGTGTCTACTTGTGTGTGGCAAGAAACAAAAT
GGGGGATGATCTGATACTGATGCATGTTAGCCTAAGACTGAAACCTGCCAAAATTGACCACAAGCAGT
ATTTTAGAAAGCAAGTGCTCCATGGGAAAGATTTCCAAGTAGATTGCAAAGCTTCCGGCTCCCCAGTG
CCAGAGATATCTTGGAGTTTGCCTGATGGAACCATGATCAACAATGCAATGCAAGCCGATGACAGTGG
CCACAGGACTAGGAGATATACCCTTTTCAACAATGGAACTTTATACTTCAACAAAGTTGGGGTAGCGG
AGGAAGGAGATTATACTTGCTATGCCCAGAACAACCCTAAAGGGAAAGATGATGAGGTCCACTTAACA
GTTATAACAGCTGCTCCCCGGATAAGGCAGAGTAACAAAACCAACAAGAGAATCAAAGCTGGAGACAC
AGCTGTCCTTGACTGTGAGGTCACTGGGGATCCCAAAACCAAAATATTTTCATTGCTGCCTTCCAATG
ACATGATTTCCTTCTCCATTGATAGGTACACATTTCATGCCAATGGGTCTTTGACCATCAACAAAGTG
AAACTGCTCGATTCTGGAGAGTACGTATGTGTAGCCCGAAATCCCAGTGGGGATGACACCAAAATGTA
CAACTGGATGTGGTCTCTAAACCTCCATTAATCAAATGGTCTGTATACAAACAGAACTGTTATTAAAG
CCACAGCTGTGAGACATTCCAAAAAACACTTTGACTGCAGAGCTGAAGGGACACCATCTCCTGAAGTC
ATGTGGATCATGCCAGACAATATTTTCCTCACAGCCCCATACTATGGAAGCAGAATCACAGTCCATAA
AAATGGAACCTTGGAAATTAGGAATGTGAGGCTTTCAGATTCAGCCGACTTTATCTGTGTGGCCCGAA
ATGAAGGTGGAGAGAGCGTGTTGGTAGTACAGTTAGAAGTACTGGAAATGCTGAGAAGACCGACATTT
AGAAATCCATTTAATGAAAAAATAGTTGCCCAGCTGGGAAAGTCCACAGCATTGAATTGCTCTGTTGA
TGGTAACCCACCACCTGAAATAATCTGGATTTTACCAAATGGCACACGATTTTCCAATGGACCACAAA
GTTATCAGTATCTGAATAGCAAGCAATGGTTCTTTTATCATTTCTAAACAACTCGGGAGGATGCAGGA
AAATATCGCTGTGCAGCTAGGAATAAAGTTGGCTATATTGAGAAATTAGTCATATTAGAAATTGGCCA
GAAGCCAGTTATTCTTACCTATGCACCAGGGACAGTAAAAGGCATCAGTGGAGAATCTCTATCACTGC
ATTGTGTGTCTGATGGAATCCCTAAGCCAAATATCAAATGGACTATGCCAAGTGGTTATGTAGTAGAC
AGGCCTCAAATTAATGGGAAATACATATTGCATGACAATGGCACCTTAGTCATTAAAGAAGCAAGAGC
GCAGCCTTTCAGCTCCACTGTGTGGCCTTGGGAGTTCCCAAGCCAGAAATCACATGGGAGATGCCTGA
CCACTCCCTTCTCTCAACGGCAAGTAAAGAGAGGACACATGGAGTGAAGCAGCTTCACTTACAAGGTA
CCCTAGTCATTCAGAATCCCCALACCTCCGATTCTGGGATATACAAATGCACAGCAAAGAACCCACTT
GGTAGTGATTATGCAGCAACGTATATTCAAGTAAAATCTGACATGAATAATAAAGTC

| | | | |
|---|---|---|---|
| NOV29am, SNP13376525 of | SEQ ID NO:742 | 2617 aa | MW at 290219.2 kD |
| CG55776-01, Protein Sequence | SNP Pos: 163 | | SNP Change: His to Arg |

MKVKGRGITCLLVSFAVICLVATPGGKACPRRCACYMPTEVHCTFRYLTSIPDSIPPNVERINLGYNS
LVRLMETDFSGLTKLELLMLHSNGIHTPDKTFSDLQALQVRLMVLKMSYIAKVRKLQKDTFYGLRSLT
RLHMDHNNIEFINPEVFYGLNFLRLVRLEGNQLTKLHPDTFVSLSYLQIFKISFIKFLYLSDNFLTSL
PQEMVSYMPDLDSLYLHGNPWTCDCHLKWLSDWIQEKPGIYIVLPDVIKCKKDRSPSSAQQCPLCMNP
RTSKGKPLAMVSAAAFQCAKPTIDSSLKSKSLTILEDSSSAFISPQGFMAPFGSLTLNMTDQSGNEAN
PQLYYKYKQVAPKPEDIFTNIEADLRADPSWLMQDQISLQLNRTATTFSTLQIQYSSDAQITLPRAEM
RPVKHKWTMISRDNNTKLEHTVLVGGTVGLNCPGQGDPTPHVDWLLADGSKVPAPYVSEDGRILIDKS
GKLELQMADSFDTGVYHCISSNYDDADILTYRITVVEPLVEAYQENGIHHTVFIGETLDLPCHSTGIP
DASISWVIPGNNVLYQSSRDKKVLNNGTLRILQVTPKDQGYYRCVAANPSGVDFLIFQVSVKMKGQRP
LEHDGETEGSGLDESNPIAHLKEPPGAQLRTSALMEAEVGKHTSSTSKRHNYRELTLQRRGDSTHRRF
RENRRHFPPSARRIDPQHWAALLEKAKKNAMPDKRENTTVSPPPVVTQLPNIPGEEDDSSGMLALHEE
FMVPATKALNLPARTVTADSRTISDSPMTNINYGTEFSPVVNSQILPPEEPTDFKLSTAIKTTAMSKN
INPTMSSQIQGTTNQHSSTVFPLLLGATEFQDSDQMGRGREHFQSRPPITVRTMIKDVNVKNLSSTTN
KLLLESVNTTNSHQTSVREVSEPRHNHFYSHTTQILSTSTFPSDPHTAAHSQFPIPRNSTVNIPLFRR
FGRQRKIGGRGRIISPYRTPVLRRHRYSIFRSTTRGSSEKSTTAFSATVLNVTCLSCLPRERLTTATA
ALSFPSAAPITFPKADIARVPSEESTTLVQNPLLLLENKPSVEKTTPTIKYFRTEISQVTPTGAVMTY
APTSIPMEKTHKVNASYPRVSSTNEAKRDSVITSSLSGAITKPPMTIIAITRFSRRKIPWQQNFVNNH
ISKDSSTKSIISTQTAIPATTPTFPASVITYETQTERSRAQTIQREQEPQKKNRTDPNISPDQSSGFT
TPTAMTPPVLTTAETSVKPSVSAFTHSPPENTTGISSTISFHSRTLNLTDVIEELAQASTQTLKSTIA
SETTLSSKSHQSTTTRKAIIRHSTIPPFLSSSATLMPVPISPPFTQEAVTDNVATPISGLMTNTVVKL
HESSRHNAKPQQLVAEVATSPKVHPNAKFTIGTTHFIYSNLLHSTPMPALTTVKSQNSKLTPSPWAEN
QFWHKPYSEIAEKGKKPEVSMLATTGLSEATTLVSDWDGQKNTKKSDFDKKPVQEATTSKLLPFDSLS
RYIFEKPRIVGGKAASFTIPANSDAFLPCEAVGNPLPTIHWTRVPSGMSGLDLSKRKQNSRVQVLPNG
TLSQRVEIQDRGQYLCSASNLFGTDHLHVTLSKTVSYPPRILERRTKEITVHSGSTVELKCRAEGRPS
PTVTWILANQTVVSESSQGSRQAVVTVDGTLVLHNLSIYDRGFYKCVASNPGGQDSLLVKIQVIAAPP
VILEQRRQVIVGTWGESLKLPCTAKGTPQPSVYWVLSDGTEVKPLQFTNSKLFLFSNGTLYIRNLASS
DRGTYECIATSSTGSERRVVMLTMEERVTSPRIEAASQKRTEVNFGDKLLLNCSATGEPKPQIMWRLP
SKAVVDQQHRVGSWIHVYPNGSLFIGSVTEKDSGVYLCVARNKMGDDLILMHVSLRLKPAKIDHKQYF
RKQVLHGKDFQVDCKASGSPVPEISWSLPDGTMINNAMQADDSGHRTRRYTLFNNGTLYFNKVGVAEE
GDYTCYAQNTLGKDEMKVHLTVITAAPRIRQSNKTNKRIKAGDTAVLDCEVTGDPKPKIFWLLPSNDM
ISFSIDRYTFHANGSLTINKVKLLDSGEYVCVARNPSGDDTKMYKLDVVSKPPLINGLYTNRTVIKAT
AVRHSKKHFDCRAEGTPSPEVMWIMPDNIFLTAPYYGSRITVHKNGTLEIRNVRLSDSADFICVARNE
GGESVLVVQLEVLEMLRRPTFRNPFNEKIVAQLGKSTALNCSVDGNPPPEIIWILPNGTRFSNGPQSY
QYLIASNGSFIISKTTREDAGKYRCAARNKVGYIEKLVILEIGQKPVILTYAPGTVKGISGESLSLHC
VSDGIPKPNIKWTMPSGYVVDRPQINGKYILHDNGTLVIKEATAYDRGNYICKAQNSVGHTLITVPVM
IVAYPPRITNRPPRSIVTRTGAAFQLHCVALGVPKPEITWEMPDHSLLSTASKERTHGSEQLHLQGTL
VIQNPQTSDSGIYKCTAKNPLGSDYAATYIQVI

| | | |
|---|---|---|
| NOV29an, SNP13376526 | SEQ ID NO:743 | 7876 bP |
| of CG55776-01, | ORF Start: ATG at 6 | ORF Stop: TGA at 7857 |
| DNA Sequence | SNP Pos: 547 | SNP Change: G to A |

TCAGGATGAAGGTAAAAGGCAGAGGAATCACCTGCTTGCTGGTCTCCTTTGCTGTGATCTGCCTGGTC
GCCACCCCTGGGGGCAAGGCCTGTCCTCGCCGCTGTGCCTGTTATATGCCTACGGAGGTACACTGCAC
ATTTCGGTACCTGACTTCCATCCCAGACAGCATCCCGCCCAATGTGGAACGCATCAATTTAGGGTACA
ACAGCTTGGTTAGATTGATGGAAACAGATTTTTCTGGCCTGACCAAACTGGAGTTACTCATGCTTCAC
AGCAATGGCATTCACACAATCCCTGACAAGACCTTCTCAGATTTGCAGGCCTTGCAGGTGAGACTGAT
GGTCTTAAAAATGAGCTATAATAAAGTCCGAAAACTTCAGAAAGATACTTTTTATGGCCTCAGGAGCT
TGACACGATTGCACATGGACCACAACAATATTGAGTTTATAAACCCAGAGGTTTTTTATGGGCTCAAC
TTTCTCCGCCTGGTGCACTTGGAAGGAAATCAGCTCACTAAGCTCCACCCAGATACATTTGTCTCTTT
GAACTACCTCCAGATATTTAAAATCTCTTTCATTAAGTTCCTATACTTGTCTGATAACTTCCTGACCT
CCCTCCCTCAAGAGATGGTCTCCTATATGCCTGACCTAGACAGCCTTTACCTGCATGGAAACCCATGG
ACCTGTGATTGCCATTTAAAGTGGTTGTCTGACTGGATACAGGAGAAGCCAGGTATCTATATTGTNTT
ACCCTAGGACTTCTAAAGGCAAGCCGTTAGCTATGGTCTCAGCTGCAGCTTTCCAGTGTGCCAAGCCA
ACCATTGACTCATCCCTGAAATCAAAGAGCCTGACTATTCTGGAAGACAGTAGTTCTGCTTTCATCTC
TCCCCAAGGTTTCATGGCACCCTTTGGCTCCCTCACTTTGAATATGACAGATCAGTCTGGAAATGAAG
CTAACATGGTCTGCAGTATTCAAAAGCCCTCAAGGACATCACCCATTGCATTCACTGAAGAAAATGAC
TACATCGTGCTAAATACTTCATTTTCAACATTTTTGGTGTGCAACATAGATTACGGTCACATTCAGCC
AGTGTGGCAAATTTTGGCTTTGTACAGTGATTCTCCTCTGATACTAGAAAGGAGCCACTTGCTTAGTG
AAACACCGCAGCTCTATTACAAATATAAACAGGTGGCTCCTAAGCCTGAAGACATTTTTACCAACATA
GAGGCAGATCTCAGAGCAGATCCCTCTTGGTTAATGCAAGACCAAATTTCCTTGCAGCTGAACAGAAC
TGCCACCACATTCAGTACATTACAGATCCAGTACTCCAGTGATGCTCAAATCACTTTACCAAGAGCAG
AGATGAGGCCAGTGAAACACAAATGGACTATGATTTCAAGGGATAACAATACTAAGCTGGAACATACT
GTCTTGGTAGGTGGAACCGTTGGCCTGAACTGCCCAGGCCAAGGAGACCCCACCCCACACGTGGATTG
GCTTCTAGCTGATGGAAGTAAAGTGAGAGCCCCTTATGTCAGTGAGGATGGACGGATCCTAATAGACA
AAAGTGGAAAATTGGAACTCCAGATGGCTGATAGTTTTGACACAGGCGTATATCACTGTATAAGCAGC
AATTATGATGATGCAGATATTCTCACCTATAGGATAACTGTGGTAGAACCTTTGGTCGAAGCCTATCA
GGAAAATGGGATTCATCACACAGTTTTCATTGGTGAAACACTTGATCTTCCATGCCATTCTACTGGTA
AAAGTTCTAAACAATGGCACATTAAGAATATTACAGGTCACCCCGAAAGACCAAGGTTATTATCGCTG
TGTGGCAGCCAACCCATCAGGGGTTGATTTTTTGATTTTCCAAGTTTCAGTCAAGATGAAAGGACAAA
GGCCCTTGGAGCATGATGGAGAAACAGAGGGATCTGGACTTGATGAGTCCAATCCTATTGCTCATCTT
AAGGAGCCACCAGGTGCACAACTCCGTACATCTGCTCTGATGGAGGCTGAGGTTGGAAAACACACCTC
AAGCACAAGTAAGAGGCACAACTATCGGGAATTAACACTCCAGCGACGTGGAGATTCAACACATCGAC
GTTTTAGGGAGAATAGGAGGCATTTCCCTCCCTCTGCTAGGAGAATTGACCCACAACATTGGGCGGCA
CTGTTGGAGAAAGCTAAAAAGAATGCTATGCCAGACAAGCGAGAAAATACCACAGTGAGCCCACCCCC
AGTGGTCACCCAACTCCCAAACATACCTGGTGAAGAAGACGATTCCTCAGGCATGCTCGCTCTACATG
AGGAATTTATGGTCCCGGCCACTAAAGCTTTGAACCTTCCAGCAAGGACAGTGACTGCTGACTCCAGA
ACAATATCTGATAGTCCTATGACAAACATAAATTATGGCACAGAATTCTCTCCTGTTGTGAATTCACA
AATACTACCACCTGAAGAACCCACAGATTTCAAACTGTCTACTGCTATTAAAACTACAGCCATGTCAA
AGAATATAAACCCAACCATGTCAAGCCAAATACAAGGCACAACCAATCAACATTCATCCACTGTCTTT
CCACTGCTACTTGGAGCAACTGAATTTCAGGACTCTGACCAGATGGGAAGAGGAAGAGAGCATTTCCA
AAGTAGACCCCCAATAACAGTAAGGACTATGATCAAAGATGTCAATGTCAAAATGCTTAGTAGCACCA
CCAACAAACTATTATTAGAGTCAGTAAATACCACAAATAGTCATCAGACATCTGTAAGAGAAGTGAGT
GAACCCAGGCACAATCACTTCTATTCTCACACTACTCAAATACTTAGCACCTCCACGTTCCCTTCAGA
TCCACACACAGCTGCTCATTCTCAGTTTCCGATCCCTAGAAATAGTACAGTTAACATCCCGCTGTTCA
GACGCTTTGGGAGGCAGAGGAAAATTGGCGGAAGGGGGCGGATTATCAGCCCATATAGAACTCCAGTT
CTGCGACGGCATAGATACAGCATTTTCAGGTCAACAACCAGAGGTTCTTCTGAAAAAAGCACTACTGC
ATTCTCAGCCACAGTGCTCAATGTGACATGTCTGTCCTGTCTTCCCAGGGAGAGGCTCACCACTGCCA
CAGCAGCATTGTCTTTTCCAAGTGCTGCTCCCATCACCTTCCCCAAAGCTGACATTGCTAGAGTCCCA
TCAGAAGAGTCTACAACTCTAGTCCAGAATCCACTATTACTACTTGAGAACAAACCCAGTGTAGAGAA
AACAACACCCACAATAAAATATTTCAGGACTGAAATTTCCCAAGTGACTCCAACTGGTGCAGTCATGA
CATATGCTCCAACATCCATACCCATGGAAAAAACTCACAAAGTAAACGCCAGTTACCCACGTGTGTCT
AGCACCAATGAAGCTAAAAGAGATTCAGTGATTACATCGTCACTTTCAGGTGCTATCACCAAGCCACC
AATGACTATTATAGCCATTACAAGGTTTTCAAGAAGGAAAATTCCCTGGCAACAGAACTTTGTAAATA
ACCATAACCCAAAAGGCAGATTAAGGAATCAACATAAAGTTAGTTTACAAAAAAGCACAGCTGTGATG
CTTCCTAAAACATCTCCTGCTTTACCACAGAGACAAAGTCTACCCTCGCACCACACTACGACCAAAAC
ACACAATCCTGGAAGTCTTCCAACAAAGAAGGAGCTTCCCTTCCCACCCCTTAACCCTATGCTTCCTA
GTATTATAAGCAAAGACTCAAGTACAAAAAGCATCATATCAACGCAAACAGCAATACCAGCAACAACT
CCTACCTTCCCTGCATCTGTCATCACTTATGAAACCCAAACAGAGAGATCTAGAGCACAAACAATACA
AAGAGAACAGGAGCCTCAAAAGAAGAACAGGACTGACCCAAACATCTCTCCAGACCAGAGTTCTGGCT
TCACTACACCCACTGCTATGACACCTCCTGTTCTAACCACAGCCGAAACTTCAGTCAAGCCCAGTGTC
TCTGCATTCACTCATTCCCCACCAGAAAACACAACTGGGATTTCAAGCACAATCAGTTTTCATTCAAG
AACTCTTAATCTGACAGATGTGATTGAAGAACTAGCCCAAGCAAGTACTCAGACTTTGAAGAGCACAA
TTGCTTCTGAAACAACTTTGTCCAGCAAATCACACCAGAGTACCACAACTAGGAAAGCAATCATTAGA
CACTCAACCATACCACCATTCTTGAGCAGCAGTGCTACTCTAATGCCAGTTCCCATCTCCCCTCCCTT
TACTCAGAGAGCAGTTACTGACAACGTGGCGACTCCCATTTCCGGGCTTATGACAAATACAGTGGTCA
AGCTGCACGAATCCTCAAGGCACAATGCTAAACCACAGCAATTAGTAGCAGAGGTTGCAACATCCCCC
AAGGTTCACCCAAATGCCAAGTTCACAATTGGAACCACTCACTTCATCTACTCTAATCTGTTACATTC
TACTCCCATGCCAGCACTAACAACAGTTAAATCACAGAATTCTAAATTAACTCCATCTCCCTGGGCAG
AAAACCAATTTTGGCACAAACCATACTCAGAAATTGCTGAAAAAGGCAAAAAGCCAGAAGTAAGCATG
TTGGCTACTACAGGCCTGTCCGAGGCCACCACTCTTGTTTCAGATTGGGATGGACAGAAGAACACAAA
GAAGAGTGACTTTGATAAGAAACCAGTTCAAGAAGCAACAACTTCCAAACTCCTTCCCTTTGACTCTT
TGTCTAGGTATATATTTGAAAAGCCCAGGATAGTTGGAGGAAAAGCTGCAAGTTTTACTATTCCAGCT
AACTCAGATGCCTTTCTTCCCTGTGAAGCTGTTGGAAATCCCCTGCCCACCATTCATTGGACCAGAGT
CCCATCAGGTATGTCAGGACTTGATTTATCTAAGAGGAAACAGAATAGCAGGGTCCAGGTTCTCCCCA
ATGGTACCCTGTCCATCCAGAGGGTGGAAATTCAGGACCGCGGACAGTACTTGTGTTCCGCATCCAAT
CTGTTTGGCACAGACCACCTTCATGTCACCTTGTCTGTGGTTTCCTATCCTCCCAGGATCCTGGAGAG
ACGTACCAAAGAGATCACAGTTCATTCCGGAAGCACTGTGGAACTGAAGTGCAGAGCAGAAGGTAGGC
CAGGCTGTGGTGACGGTTGACGGAACATTGGTCCTCCACAATCTCAGTATTTATGACCGTGGCTTTTA
CAAATGTGTGGCCAGCAACCCAGGTGGCCAGGATTCACTGCTGGTTAAAATACAAGTCATTGCAGCAC
CACCTGTTATTCTAGAGCAAAGGAGGCAAGTCATTGTAGGCACTTGGGGTGAAAGTTTAAAACTGCCC
TGTACTGCAAAAGGAACTCCTCAGCCCAGCGTTTACTGGGTCCTCTCTGATGGCACTGAAGTGAAACC
ATTACAGTTTACCAATTCCAAGTTGTTCTTATTTTCAAATGGGACTTTGTATATAAGAAACCTAGCCT
CTTCAGACAGGGGCACTTATGAATGCATTGCTACCAGTTCCACTGGTTCGGAGCGAAGAGTAGTAATG
CTTACAATGGAAGAGCGAGTGACCAGCCCCAGGATAGAAGCTGCATCCCAGAAAAGGACTGAAGTGAA
TTTTGGGGACAAATTACTACTGAACTGCTCAGCCACTGGGGAGCCCAAACCCCAAATAATGTGGAGGT
TACCATCCAAGGCTGTGGTCGACCAGCAGCATAGGGTGGGCAGCTGGATCCACGTCTACCCTAATGGA
TCCCTGTTTATTGGATCAGTAACAGAAAAAGACAGTGGTGTCTACTTGTGTGTGGCAAGAAACAAAAT
GGGGGATGATCTGATACTGATGCATGTTAGCCTAAGACTGAAACCTGCCAAAATTGACCACAAGCAGT
ATTTTAGAAAGCAAGTGCTCCATGGGAAAGATTTCCAAGTAGATTGCAAAGCTTCCGGCTCCCCAGTG
CCAGAGATATCTTGGAGTTTGCCTGATGGAACCATGATCAACAATGCAATGCAAGCCGATGACAGTGG
CCACAGGACTAGGAGATATACCCTTTTCAACAATGGAACTTTATACTTCAACAAAGTTGGGGTAGCGG
AGGAAGGAGATTATACTTGCTATGCCCAGAACACCCTAGGGAAAGATGAAATGAAGGTCCACTTAACA
GTTATAACAGCTGCTCCCCGGATAAGGCAGAGTAACAAAACCAACAAGAGAATCAAAGCTGGAGACAC
AGCTGTCCTTGACTGTGAGGTCACTGGGGATCCCAAACCAAAAATATTTTGGTTGCTGCCTTCCAATG
ACATGATTTCCTTCTCCATTGATAGGTACACATTTCATGCCAATGGGTCTTTGACCATCAACAAAGTG
AAACTGCTCGATTCTGGAGAGTACGTATGTGTAGCCCGAAATCCCAGTGGGGATGACACCAAAATGTA
CAAACTGGATGTGGTCTCTAAACCTCCATTAATCAATGGTCTGTATACAAACAGAACTGTTATTAAAG
CCACAGCTGTGAGACATTCCAAAAAACACTTTGACTGCAGAGCTGAAGGGACACCATCTCCTGAAGTC
ATGTGGATCATGCCAGACAATATTTTCCTCACAGCCCCATACTATGGAAGCAGAATCACAGTCCATAA
AAATGGAACCTTGGAAATTAGGAATGTGAGGCTTTCAGATTCAGCCGACTTTATCTGTGTGGCCCGAA
ATGAAGGTGGAGAGAGCGTGTTGGTAGTACAGTTAGAAGTACTGGAAATGCTGAGAAGACCGACATTT
AGAAATCCATTTAATGAAAAAATAGTTGCCCAGCTGGGAAAGTCCACAGCATTGAATTGCTCTGTTGA
TGGTAACCCACCACCTGAAATAATCTGGATTTTACCAAATGGCACACGATTTTCCAATGGACCACAAA
GTTATCAGTATCTGATAGCAAGCAATGGTTCTTTTATCATTTCTAAAACAACTCGGGAGGATGCAGGA
AAATATCGCTGTGCAGCTAGGAATAAAGTTGGCTATATTGAGAAATTAGTCATATTAGAAATTGGCCA
GAAGCCAGTTATTCTTACCTATGCACCAGGGACAGTAAAAGGCATCAGTGGAGAATCTCTATCACTGC
ATTGTGTGTCTGATGGAATCCCTAAGCCAAATATCAAATGGACTATGCCAAGTGGTTATGTAGTAGAC
AGGCCTCAAATTAATGGGAAATACATATTGCATGACAATGGCACCTTAGTCATTAAAGAAGCAACAGC
TTATGACAGAGGAAACTATATCTGTAAGGCTCAAAATAGTGTTGGTCATACACTGATTACTGTTCCAG
TAATGATTGTAGCCTACCCTCCCCGAATTACAAATCGTCCACCCAGGAGTATTGTCACCAGGACAGGG
GCAGCCTTTCAGCTCCACTGTGTGGCCTTGGGAGTTCCCAAGCCAGAAATCACATGGGAGATGCCTGA
CCACTCCCTTCTCTCAACGGCAAGTAAAGAGAGGACACATGGAAGTGAGCAGCTTCACTTACAAGGTA
CCCTAGTCATTCAGAATCCCCAAACCTCCGATTCTGGGATATACAAATGCACAGCAAAGAACCCACTT
GGTAGTGATTATGCAGCAACGTATATTCAAGTAATCTGACATGAAATAATAAAGTC

| | | | |
|---|---|---|---|
| NOV29an, SNP13376526 of | SEQ ID NO:744 | 2617 aa | MW at 290227.2 kD |
| CG55776-01, | SNP Pos: 181 | | SNP Change: |
| Protein Sequence | | | Ser to Asn |

MKVKGRGITCLLVSFAVICLVATPGGKACPRRCACYMPTEVHCTFRYLTSTPDSIPPNVERINLGYNS
LVRLMETDFSGLTKLELLMLHSNGIHTIPDKTFSDLQALQVRLMVLKMSYNKVRKLQKDTFYGLRSLT
RLHMDHNNIEFINPEVFYGLNFLRLVHLEGNQLTKLHPDTFVSLNYLQIFKISFIKFLYLSDNFLTSL
PQEMVSYMPDLDSLYLHGNPWTCDCHLKWLSDWIQEKPGIYIVLPDVIKCKKDRSPSSAQQCPLCMNP
RTSKGKPLAMVSAAAFQCAKPTIDSSLKSKSLTILEDSSSAFISPQGFMAPFGSLTLNMTDQSGNEAN
MVCSIQKPSRTSPIAFTEENDYIVLNTSFSTFLVCNIDYGHIQPVWQILALYSDSPLILERSHLLSET
PQLYYKYKQVAPKPEDIFTNIEADLRADPSWLMQDQISLQLNRTATTFSTLQIQYSSDAQITLPRAEM
RPVKHKWTMISRDNNTKLEHTVLVGGTVGLNCPGQGDPTPHVDWLLADGSKVRAPYVSEDGRILIDKS
GKLELQMADSFDTGVYHCISSNYDDADILTYRITVVEPLVEAYQENGIHHTVFIGETLDLPCHSTGIP
DASISWVIPGNNVLYQSSRDKKVLNNGTLRILQVTPKDQGYYRCVAANPSGVDFLIFQVSVKMKGQRP
LEHDGETEGSGLDESNPIAHLKEPPGAQLRTSALMEAEVGKHTSSTSKRHNYRELTLQRRGDSTHRRF
RENRRHFPPSARRIDPQHWAALLEKAKKNAMPDKRENTTVSPPPVVTQLPNIPGEEDDSSGMLALHEE
FMVPATKALNLPARTVTADSRTISDSPMTNINYGTEFSPVVNSQILPPEEPTDFKLSTAIKTTAMSKN
INPTMSSQIQGTTNQHSSTVFPLLLGATEFQDSDQMGRGREHFQSRPPITVRTMIKDVNVKMLSSTTN
KLLLESVNTTNSHQTSVREVSEPRHNHFYSHTTQILSTSTFPSDPHTAAHSQFPIPRNSTVNIPLFRR
FGRQRKIGGRGRIISPYRTPVLRRHRYSIFRSTTRGSSEKSTTAFSATVLNVTCLSCLPRERLTTATA
ALSFPSAAPITFPKADIARVPSEESTTLVQNPLLLLENKPSVEKTTPTIKYFRTEISQVTPTGAVMTY
APTSIPMEKTHKVNASYPRVSSTNEAKRDSVITSSLSGAITKPPMTIIAITRFSRRKIPWQQNFVNNH
NPKGRLRNQHKVSLQKSTAVMLPKTSPALPQRQSLPSHHTTTKTHNPGSLPTKKELPFPPLNPMLPSI
ISKDSSTKSIISTQTAIPATTPTFPASVITYETQTERSRAQTIQREQEPQKKNRTDPNISPDQSSGFT
TPTAMTPPVLTTAETSVKPSVSAFTHSPPENTTGISSTISFHSRTLNLTDVIEELAQASTQTLKSTIA
SETTLSSKSHQSTTTRKAIIRHSTIPPFLSSSATLMPVPISPPFTQRAVTDNVATPISGLMTNTVVKL
HESSRHNAKPQQLVAEVATSPKVHPNAKFTIGTTHFIYSNLLHSTPMPALTTVKSQNSKLTPSPWAEN
QFWHKPYSEIAEKGKKPEVSMLATTGLSEATTLVSDWDGQKNTKKSDFDKKPVQEATTSKLLPFDSLS
RYIFEKPRIVGGKAASFTIPANSDAFLPCEAVGNPLPTIHWTRVPSGMSGLDLSKRKQNSRVQVLPNG
TLSIQRVEIQDRGQYLCSASNLFGTDHLHVTLSVVSYPPRILERRTKEITVHSGSTVELKCRAEGRPS
PTVTWILANQTVVSESSQGSRQAVVTVDGTLVLHNLSIYDRGFYKCVASNPGGQDSLLVKIQVIAAPP
VILEQRRQVIVGTWGESLKLPCTAKGTPQPSVYWVLSDGTEVKPLQFTNSKLFLFSNGTLYIRNLASS
DRGTYECIATSSTGSERRVVMLTMEERVTSPRIEAASQKRTEVNFGDKLLLNCSATGEPKPQIMWRLP
SKAVVDQQHRVGSWIHVYPNGSLFIGSVTEKDSGVYLCVAAAKMGDDLILMHVSLRLKPAKIDHKQYF
RKQVLHGKDFQVDCKASGSPVPEISWSLPDGTMINNAMQADDSGHRTRRYTLFNNGTLYFNKVGVAEE
GDYTCYAQNTLGKDEMKVHLTVITAAPRIRQSNKTNKRIKAGDTAVLDCEVTGDPKPKIFWLLPSNDM
ISFSIDRYTFHANGSLTINKVKLLDSGEYVCVARNPSGDDTKMYKLDVVSKPPLINGLYTNRTVIKAT
AVRHSKKHFDCRAEGTPSPEVMWIMPDNIFLTAPYYGSRITVHKNGTLEIRNVRLSDSADFICVARNE
GGESVLVVQLEVLEMLRRPTFRNPFNEKIVAQLGKSTALNCSVDGNPPPEIIWILPNGTRFSNGPQSY
QYLIASNGSFIISKTTREDAGKYRCAARNKVGYIEKLVILEIGQKPVILTYAPGTVKGISGESLSLHC
VSDGIPKPNIKWTMPSGYVVDRPQINGKYILHDNGTLVIKEATAYDRGNYICKAQNSVGHTLITVPVM
IVAYPPRITNRPPRSIVTRTGAAFQLHCVALGVPKPEITWEMPDHSLLSTASKERTHGSEQLHLQGTL
IVIQNPQTSDSGIYKCTAKNPLGSDYAATYIQVI

| | | |
|---|---|---|
| NOV29ao, SNP13377626 | SEQ ID NO:745 | 7876 bP |
| of CG55776-01, | ORF Start: ATG at 6 | ORF Stop: TGA at 7857 |
| DNA Sequence | SNP Pos: 4405 | SNP Change: C to T |

TCAGGATGAAGGTAAAAGGCAGAGGAATCACCTGCTTGCTGGTCTCCTTTGCTGTGATCTGCCTGGTC
GCCACCCCTGGGGGCAAGGCCTGTCCTCGCCGCTGTGCCTGTTATATGCCTACGGAGGTACACTGCAC
ATTTCGGTACCTGACTTCCATCCCAGACAGCATCCCGCCCAATGTGGAACGCATCAATTTAGGGTACA
ACAGCTTGGTTAGATTGATGGAAACAGATTTTTCTGGCCTGACCAAACTGGAGTTACTCATGCTTCAC
AGCAATGGCATTCACACAATCCCTGACAAGACCTTCTCAGATTTGCAGGCCTTGCAGGTGAGACTGAT
TGACACGATTGCACATGGACCACAACAATATTGAGTTTATAAACCCAGAGGTTTTTTATGGGCTCAAC
TTTCTCCGCCTGGTGCACTTGGAAGGAAATCAGCTCACTAAGCTCCACCCAGATACATTTGTCTCTTT
GAGCTACCTCCAGATATTTAAAATCTCTTTCATTAAGTTCCTATACTTGTCTGATAACTTCCTGACCT
CCCTCCCTCAAGAGATGGTCTCCTATATGCCTGACCTAGACAGCCTTTACCTGCATGGAAACCCATGG
ACCTGTGATTGCCATTTAAAGTGGTTGTCTGACTGGATACAGGAGAAGCCAGGTATCTATATTGTNTT
ACCAGATGTAAAAAAATGCAAAAAAGATAGAAGTCCCTCTAGTGCTCAGCAGTGTCCACTTTGCATGA
ACCCTAGGACTTCTAAAGGCAAGCCGTTAGCTATGGTCTCAGCTGCAGCTTTCCAGTGTGCCAAGCCA
ACCATTGACTCATCCCTGAAATCAAAGAGCCTGACTATTCTGGAAGACAGTACTTCTGCTTTCATCTC
TCCCCAAGGTTTCATGGCACCCTTTGGCTCCCTCACTTTGAATATGACAGATCAGTCTGGAAATGAAG
CTAACATGGTCTGCAGTATTCAAAAGCCCTCAAGGACATCACCCATTGCATTCACTGAAGAAAATGAC
TACATCGTGCTAAATACTTCATTTTCAACATTTTTGGTGTGCAACATAGATTACGGTCACATTCAGCC
AGTGTGGCAAATTTTGGCTTTGTACAGTGATTCTCCTCTGATACTAGAAAGGAGCCACTTGCTTAGTG
AAACACCGCAGCTCTATTACAAATATAAACAGGTGGCTCCTAAGCCTGAAGACATTTTTACCAACATA
GAGGCAGATCTCAGAGCAGATCCCTCTTGGTTAATGCAAGACCAAATTTCCTTGCAGCTGAACAGAAC
TGCCACCACATTCAGTACATTACAGATCCAGTACTCCAGTGATGCTCAAATCACTTTACCAAGAGCAG
AGATGAGGCCAGTGAAACACAAATGGACTATGATTTCAAGGGATAACAATACTAAGCTGGAACATACT
GTCTTGGTAGGTGGAACCGTTGGCCTGAACTGCCCAGGCCAAGGAGACCCCACCCCACACGTGGATTG
GCTTCTAGCTGATGGAAGTAAAGTGAGAGCCCCTTATGTCAGTGAGGATGGACGGATCCTAATAGACA
AAAGTGGAAAATTGGAACTCCAGATGGCTGATAGTTTTGACACAGGCGTATATCACTGTATAAGCAGC
AATTATGATGATGCAGATATTCTCACCTATAGGATAACTGTGGTAGAACCTTTGGTCGAAGCCTATCA
GGAAAATGGGATTCATCACACAGTTTTCATTGGTGAAACACTTGATCTTCCATGCCATTCTACTGGTA
TCCCAGATGCCTCTATTAGCTGGGTTATTCCAGGAAACAATGTGCTCTATCAGTCATCAAGAGACAAG
AAAGTTCTAAACAATGGCACATTAAGAATATTACAGGTCACCCCGAAAGACCAAGGTTATTATCGCTG
TGTGGCAGCCAACCCATCAGGGGTTGATTTTTTGATTTTCCAAGTTTCAGTCAAGATGAAAGGACAAA
GGCCCTTGGAGCATGATGGAGAAACAGAGGGATCTGGACTTGATGAGTCCAATCCTATTGCTCATCTT
AAGGAGCCACCAGGTGCACAACTCCGTACATCTGCTCTGATGGAGGCTGAGGTTGGAAAACACACCTC
AAGCACAAGTAAGAGGCACAACTATCGGGAATTAACACTCCAGCGACGTGGAGATTCAACACATCGAC
GTTTTAGGGAGAATAGGAGGCATTTCCCTCCCTCTGCTAGGAGAATTGACCCACAACATTGGGCGGCA
CTGTTGGAGAAAGCTAAAAAGAATGCTATGCCAGACAAGCGAGAAAATACCACAGTGAGCCCACCCCC
AGTGGTCACCCAACTCCCAAACATACCTGGTGAAGAAGACGATTCCTCAGGCATGCTCGCTCTACATG
AGGAATTTATGGTCCCGGCCACTAAAGCTTTGAACCTTCCAGCAAGGACAGTGACTGCTGACTCCAGA
ACAATATCTGATAGTCCTATGACAAACATAAATTATGGCACAGAATTCTCTCCTGTTGTGAATTCACA
AATACTACCACCTGAAGAACCCACAGATTTCAAACTGTCTACTGCTATTAAAACTACAGCCATGTCAA
AGAATATAAACCCAACCATGTCAAGCCAAATACAAGGCACAACCAATCAACATTCATCCACTGTCTTT
CCACTGCTACTTGGAGCAACTGAATTTCAGGACTCTGACCAGATGGGAAGAGGAAGAGAGCATTTCCA
AAGTAGACCCCCAATAACAGTAAGGACTATGATCAAAGATGTCAATGTCAAAATGCTTAGTAGCACCA
CCAACAAACTATTATTAGAGTCAGTAAATACCACAAATAGTCATCAGACATCTGTAAGAGAAGTGAGT
GAACCCAGGCACAATCACTTCTATTCTCACACTACTCAAATACTTAGCACCTCCACGTTCCCTTCAGA
TCCACACACAGCTGCTCATTCTCAGTTTCCGATCCCTAGAAATAGTACAGTTAACATCCCGCTGTTCA
GACGCTTTGGGAGGCAGAGGAAAATTGGCGGAAGGGGGCGGATTATCAGCCCATATAGAACTCCAGTT
CTGCGACGGCATAGATACAGCATTTTCAGGTCAACAACCAGAGGTTCTTCTGAAAAAAGCACTACTGC
ATTCTCAGCCACAGTGCTCAATGTGACATGTCTGTCCTGTCTTCCCAGGGAGAGGCTCACCACTGCCA
CAGCAGCATTGTCTTTTCCAAGTGCTGCTCCCATCACCTTCCCCAAAGCTGACATTGCTAGAGTCCCA
TCAGAAGAGTCTACAACTCTAGTCCAGAATCCACTATTACTACTTGAGAACAAACCCAGTGTAGAGAA
AACAACACCCACAATAAAATATTTCAGGACTGAAATTTCCCAAGTGACTCCAACTGGTGCAGTCATGA
CATATGCTCCAACATCCATACCCATGGAAAAAACTCACAAAGTAAACGCCAGTTACCCACGTGTGTCT
AATGACTATTATAGCCATTACAAGGTTTTCAAGAAGGAAAATTCCCTGGCAACAGAACTTTGTAAATA
ACCATAACCCAAAAGGCAGATTAAGGAATCAACATAAAGTTAGTTTACAAAAAAGCACAGCTGTGATG
CTTCCTAAAACATCTCCTGCTTTACCACAGAGACAAAGTCTCCCCTCGCACCACACTACGACCAAAAC
ACACAATCCTGGAAGTCTTCCAACAAAGAAGGAGCTTCCCTTCCCACCCCTTAACCCTATGCTTCCTA
GTATTATAAGCAAAGACTCAAGTACAAAAAGCATCATATCAACGCAAACAGCAATACCAGCAACAACT
CCTACCTTCCCTGCATCTGTCATCACTTATGAAACCCAAACAGAGAGATCTAGAGCACAAACAATACA
AAGAGAACAGGAGCCTCAAAAGAAGAACAGGACTGACCCAAACATCTCTCCAGACCAGAGTTCTGGCT
TCACTACACCCACTGCTATGACACCTCCTGTTCTAACCACAGCCGAAACTTCAGTCAAGCCCAGTGTC
TCTGCATTCACTCATTCCCCACCAGAAAACACAACTGGGATTTCAAGCACAATCAGTTTTCATTCAAG
AACTCTTAATCTGACAGATGTGATTGAAGAACTAGCCCAAGCAAGTACTCAGACTTTGAAGAGCACAA
TTGCTTCTGAAACAACTTTGTCCAGCAAATCACACCAGAGTACCACAACTAGGAAAGCAATCATTAGA
CACTCAACCATACCACCATTCTTGAGCAGCAGTGCTACTCTAATGCCAGTTCTCATCTCCCCTCCCTT
TACTCAGAGAGCAGTTACTGACAACGTGGCGACTCCCATTTCCGGGCTTATGACAAATACAGTGGTCA
AGCTGCACGAATCCTCAAGGCACAATGCTAAACCACAGCAATTAGTAGCAGAGGTTGCAACATCCCCC
AAGGTTCACCCAAATGCCAAGTTCACAATTGGAACCACTCACTTCATCTACTCTAATCTGTTACATTC
AAAACCAATTTTGGCACAAACCATACTCAGAAATTGCTGAAAAAGGCAAAAAGCCAGAAGTAAGCATG
TTGGCTACTACAGGCCTGTCCGAGGCCACCACTCTTGTTTCAGATTGGGATGGACAGAAGAACACAAA
GAAGAGTGACTTTGATAAGAAACCAGTTCAAGAAGCAACAACTTCCAAACTCCTTCCCTTTGACTCTT
CCCATCAGGTATGTCAGGACTTGATTTATCTAAGAGGAAACAGAATAGCAGGGTCCAGGTTCTCCCCA
ATGGTACCCTGTCCATCCAGAGGGTGGAAATTCAGGACCGCGGACAGTACTTGTGTTCCGCATCCAAT
CTGTTTGGCACAGACCACCTTCATGTCACCTTGTCTGTGGTTTCCTATCCTCCCAGGATCCTGGAGAG
ACGTACCAAAGAGATCACAGTTCATTCCGGAAGCACTGTGGAACTGAAGTGCAGAGCAGAAGGTAGGC
CAAGCCCTACAGTTACCTGGATTCTTGCAAACCAAACAGTTGTCTCAGAATCATCCCAGGGAAGTAGG
CAGGCTGTGGTGACGGTTGACGGAACATTGGTCCTCCACAATCTCAGTATTTATGACCGTGGCTTTTA
CAAATGTGTGGCCAGCAACCCAGGTGGCCAGGATTCACTGCTGGTTAAAATACAAGTCATTGCAGCAC
CACCTGTTATTCTAGAGCAAAGGAGGCAAGTCATTGTAGGCACTTGGGGTGAAAGTTTAAAACTGCCC
TGTACTGCAAAAGGAACTCCTCAGCCCAGCGTTTACTGGGTCCTCTCTGATGGCACTGAAGTGAAACC
ATTACAGTTTACCAATTCCAAGTTGTTCTTATTTTCAAATGGGACTTTGTATATAAGAAACCTAGCCT
CTTCAGACAGGGGCACTTATGAATGCATTGCTACCAGTTCCACTGGTTCGGAGCGAAGAGTAGTAATG
CTTACAATGGAAGAGCGAGTGACCAGCCCCAGGATAGAAGCTGCATCCCAGAAAAGGACTGAAGTGAA
TTTTGGGGACAAATTACTACTGAACTGCTCAGCCACTGGGGAGCCCAAACCCCAAATAATGTGGAGGT
TACCATCCAAGGCTGTGGTCGACCAGCAGCATAGGGTGGGCAGCTGGATCCACGTCTACCCTAATGGA
TCCCTGTTTATTGGATCAGTAACAGAAAAAGACAGTGGTGTCTACTTGTGTGTGGCAAGAAACAAAAT
GGGGGATGATCTGATACTGATGCATGTTAGCCTAAGACTGAAACCTGCCAAAATTGACCACAAGCAGT
ATTTTAGAAAGCAAGTGCTCCATGGGAAAGATTTCCAAGTAGATTGCAAAGCTTCCGGCTCCCCAGTG
CCAGAGATATCTTGGAGTTTGCCTGATGGAACCATGATCAACAATGCAATGCAAGCCGATGACAGTGG
CCACAGGACTAGGAGATATACCCTTTTCAACAATGGAACTTTATACTTCAACAAAGTTGGGGTAGCGG
AGGAAGGAGATTATACTTGCTATGCCCAGAACACCCTAGGGAAAGATGAAATGAAGGTCCACTTAACA
GTTATAACAGCTGCTCCCCGGATAAGGCAGAGTAACAAAACCAACAAGAGAATCAAAGCTGGAGACAC
AGCTGTCCTTGACTGTGAGGTCACTGGGGATCCCAAACCAAAAATATTTTGGTTGCTGCCTTCCAATG
ACATGATTTCCTTCTCCATTGATAGGTACACATTTCATGCCAATGGGTCTTTGACCATCAACAAAGTG
AAACTGCTCGATTCTGGAGAGTACGTATGTGTAGCCCGAAATCCCAGTGGGGATGACACCAAAATGTA
CAAACTGGATGTGGTCTCTAAACCTCCATTAATCAATGGTCTGTATACAAACAGAACTGTTATTAAAG
CCACAGCTGTGAGACATTCCAAAAAACACTTTGACTGCAGAGCTGAAGGGACACCATCTCCTGAAGTC
ATGTGGATCATGCCAGACAATATTTTCCTCACAGCCCCATACTATGGAAGCAGAATCACAGTCCATAA
AAATGGAACCTTGGAAATTAGGAATGTGAGGCTTTCAGATTCAGCCGACTTTATCTGTGTGGCCCGAA
ATGAAGGTGGAGAGAGCGTGTTGGTAGTACAGTTAGAAGTACTGGAAATGCTGAGAAGACCGACATTT
AGAAATCCATTTAATGAAAAAATAGTTGCCCAGCTGGGAAAGTCCACAGCATTGAATTGCTCTGTTGA
TGGTAACCCACCACCTGAAATAATCTGGATTTTACCAAATGGCACACGATTTTCCAATGGACCACAAA
GTTATCAGTATCTGATAGCAAGCAATGGTTCTTTTATCATTTCTAAAACAACTCGGGAGGATGCAGGA
AAATATCGCTGTGCAGCTAGGAATAAAGTTGGCTATATTGAGAAATTAGTCATATTAGAAATTGGCCA
GAAGCCAGTTATTCTTACCTATGCACCAGGGACAGTAAAAGGCATCAGTGGAGAATCTCTATCACTGC
ATTGTGTGTCTGATGGAATCCCTAAGCCAAATATCAAATGGACTATGCCAAGTGGTTATGTAGTAGAC
AGGCCTCAAATTAATGGGAAATACATATTGCATGACAATGGCACCTTAGTCATTAAAGAAGCAACAGC
TTATGACAGAGGAAACTATATCTGTAAGGCTCAAAATAGTGTTGGTCATACACTGATTACTGTTCCAG
TAATGATTGTAGCCTACCCTCCCCGAATTACAAATCGTCCACCCAGGAGTATTGTCACCAGGACAGGG
GCAGCCTTTCAGCTCCACTGTGTGGCCTTGGGAGTTCCCAAGCCAGAAATCACATGGGAGATGCCTGA
CCACTCCCTTCTCTCAACGGCAAGTAAAGAGAGGACACATGGAAGTGAGCAGCTTCACTTACAAGGTA
CCCTAGTCATTCAGAATCCCCAAACCTCCGATTCTGGGATATACAAATGCACAGCAAAGAACCCACTT
GGTAGTGATTATGCAGCAACGTATATTCAAGTAATCTQACATGAAATAATAAAGTC

| | | | |
|---|---|---|---|
| NOV29ao, SNP13377626 of | SEQ ID NO:746 | 2617 aa | MW at 290216.2 kD |
| CG55776-01, Protein Sequence | SNP Pos: 1467 | | SNP Change: Pro to Leu |

MKVKGRGITCLLVSFAVICLVATPGGKACPRRCACYMPTEVHCTFRYLTSIPDSIPPNVERINLGYNS
LVRLMETDFSGLTKLELLMLHSNGIHTIPDKTFSDLQALQVRLMVLKMSYNKVRKLQKDTFYGLRSLT
RLHMDHNNIEFINPEVFYGLNFLRLVHLEGNQLTKLHPDTFVSLSYLQIFKISFIKFLYLSDNFLTSL
RTSKGKPLAMVSAAAFQCAKPTIDSSLKSKSLTILEDSSSAFTSPQGFMAPFGSLTLNNTDQSGNEAN
MVCSIQKPSRTSPIAFTEENDYIVLNTSFSTFLVCNIDYGHIQPVWQILALYSDSPLILERSHLLSET
PQLYYKYKQVAPKPEDIFTNIEADLRADPSWLMQDQISLQLNRTATTFSTLQIQYSSDAQITLPRAEM
RPVKHKWTMISRDNNTKLEHTVLVGGTVGLNCPGQGDPTPHVDWLLADGSKVRAPYVSEDGRILIDKS
GKLELQMADSFDTGVYHCISSNYDDADILTYRITVVEPLVEAYQENGIHHTVFIGETLDLPCHSTGIP
DASISWVIPGNNVLYQSSRDKKVLNNGTLRILQVTPKDQGYYRCVAANPSGVDFLIFQVSVKMKGQRP
LEHDGETEGSGLDESNPIAHLKEPPGAQLRTSALMEAEVGKHTSSTSKRHNYRELTLQRRGDSTHRRF
RENRRHFPPSARRIDPQHWAALLEKAKKNAMPDKRENTTVSPPPVVTQLPNIPGEEDDSSGMLALHEE
FMVPATKALNLPARTVTADSRTISDSPMTNINYGTEFSPVVNSQILPPEEPTDFKLSTAIKTTAMSKN
KLLLESVNTTNSHQTSVREVSEPRHNHFYSHTTQILSTSTFPSDPHTAAHSQFPIPRNSTVNIPLFRR
FGRQRKIGGRGRIISPYRTPVLRRHRYSIFRSTTRGSSEKSTTAFSATVLNVTCLSCLPRERLTTATA
ALSFPSAAPITFPKADIARVPSEESTTLVQNPLLLLENKPSVEKTTPTIKYFRTEISQVTPTGAVMTY
APTSIPMEKTHKVNASYPRVSSTNEAKRDSVITSSLSGAITKPPMTIIAITRFSRRKIPWQQNFVNNH
NPKGRLRNQHKVSLQKSTAVMLPKTSPALPQRQSLPSHHTTTKTHNPGSLPTKKELPFPPLNPMLPSI
ISKDSSTKSIISTQTAIPATTPTFPASVITYETQTERSRAQTIQREQEPQKKNRTDPNISPDQSSGFT
TPTAMTPPVLTTAETSVKPSVSAFTHSPPENTTGISSTISFHSRTLNLTDVIEELAQASTQTLKSTIA
SETTLSSKSHQSTTTRKAIIRHSTIPPFLSSSATLMPVLISPPFTQRAVTDNVATPISGLMTNTVVKL
HESSRHNAKPQQLVAEVATSPKVHPNAKFTIGTTHFIYSNLLHSTPMPALTTVKSQNSKLTPSPWAEN
QFWHKPYSEIAEKGKKPEVSMLATTGLSEATTLVSDWDGQKNTKKSDFDKKPVQEATTSKLLPFDSLS
RYIFEKPRIVGGKAASFTIPANSDAFLPCEAVGNPLPTIHWTRVPSGMSGLDLSKRKQNSRVQVLPNG
TLSIQRVEIQDRGQYLCSASNLFGTDHLHVTLSVVSYPPRILERRTKEITVHSGSTVELKCRAEGRPS
PTVTWILANQTVVSESSQGSRQAVVTVDGTLVLHNLSIYDRGFYKCVASNPGGQDSLLVKIQVIAAPP
VILEQRRQVIVGTWGESLKLPCTAKGTPQPSVYWVLSDGTEVKPLQFTNSKLFLFSNGTLYIRNLASS
DRGTYECIATSSTGSERRVVMLTMEERVTSPRIEAASQKRTEVNFGDKLLLNCSATGEPKPQIMWRLP
SKAVVDQQHRVGSWIHVYPNGSLFIGSVTEKDSGVYLCVARNKMGDDLILMHVSLRLKPAKIDHKQYF
RKQVLHGKDFQVDCKASGSPVPEISWSLPDGTMINNAMQADDSGHRTRRYTLFNNGTLYFNKVGVAEE
GDYTCYAQNTLGKDEMKVHLTVITAAPRIRQSNKTNKRIKAGDTAVLDCEVTGDPKPKIFWLLPSNDM
ISFSIDRYTFHANGSLTINKVKLLDSGEYVCVARNPSGDDTKMYKLDVVSKPPLINGLYTNRTVIKAT
AVRHSKKHFDCRAEGTPSPEVMWIMPDNIFLTAPYYGSRITVHKNGTLEIRNVRLSDSADFICVARNE
GGESVLVVQLEVLEMLRRTFRNPFNIEKIVAQLGKSTALNCSVDGNPPPEIIWILPNGTRFSNGPQSY
QYLIASNGSFIISKTTREDAGKYRCAARNKVGYIEKLVILEIGQKPVILTYAPGTVKGISGESLSLHC
VSDGIPKPNIKWTMPSGYVVDRPQINGKYILHDNGTLVIKEATAYDRGNYICKAQNSVGHTLITVPVM
IVAYPPRITNRPPRSIVTRTGAAFQLHCVALGVPKPEITWEMPDHSLLSTASKERTHGSEQLHLQGTL
VIQNPQTSDSGIYKCTAKNPLGSDYAATYIQVI

| | | | |
|---|---|---|---|
| NOV29ap, SNP13377641 | SEQ ID NO:747 | 7876 bP | |
| of CG55776-01, | ORF Start: ATG at 6 | ORF Stop: TGA at 7857 | |
| DNA Sequence | | | SNP Pos: 6716 ISNP Change: C to T |

TCAGGATGAAGGTAAAAGGCAGAGGAATCACCTGCTTGCTGGTCTCCTTTGCTGTGATCTGCCTGGTC
GCCACCCCTGGGGGCAAGGCCTGTCCTCGCCGCTGTGCCTGTTATATGCCTACGGAGGTACACTGCAC
ATTTCGGTACCTGACTTCCATCCCAGACAGCATCCCGCCCAATGTGGAACGCATCAATTTAGGGTACA
ACAGCTTGGTTAGATTGATGGAAACAGATTTTTCTGGCCTGACCAAACTGGAGTTACTCATGCTTCAC
AGCAATGGCATTCACACAATCCCTGACAAGACCTTCTCAGATTTGCAGGCCTTGCAGGTGAGACTGAT
GGTCTTAAAAATGAGCTATAATAAAGTCCGAAAACTTCAGAAAGATACTTTTTATGGCCTCAGGAGCT
TGACACGATTGCACATGGACCACAACAATATTGAGTTTATAAACCCAGAGGTTTTTTATGGGCTCAAC
TTTCTCCGCCTGGTGCACTTGGAAGGAAATCAGCTCACTAAGCTCCACCCAGATACATTTGTCTCTTT
GAGCTACCTCCAGATATTTAAAATCTCTTTCATTAAGTTCCTATACTTGTCTGATAACTTCCTGACCT
CCCTCCCTCAAGAGATGGTCTCCTATATGCCTGACCTAGACAGCCTTTACCTGCATGGAAACCCATGG
ACCTGTGATTGCCATTTAAAGTGGTTGTCTGACTGGATACAGGAGAAGCCAGGTATCTATATTGTNTT
ACCAGATGTAATAAAATGCAAAAAAGATAGAAGTCCCTCTAGTGCTCAGCAGTGTCCACTTTGCATGA
ACCCTAGGACTTCTAAAGGCAAGCCGTTAGCTATGGTCTCAGCTGCAGCTTTCCAGTGTGCCAAGCCA
ACCATTGACTCATCCCTGAAATCAAAGAGCCTGACTATTCTGGAAGACAGTAGTTCTGCTTTCATCTC
TCCCCAAGGTTTCATGGCACCCTTTGGCTCCCTCACTTTGAATATGACAGATCAGTCTGGAAATGAAG
CTAACATGGTCTGCAGTATTCAAAAGCCCTCAAGGACATCACCCATTGCATTCACTGAAGAAAATGAC
TACATCGTGCTAAATACTTCATTTTCAACATTTTTGGTGTGCAACATAGATTACGGTCACATTCAGCC
AGTGTGGCAAATTTTGGCTTTGTACAGTGATTCTCCTCTGATACTAGAAAGGAGCCACTTGCTTAGTG
AAACACCGCAGCTCTATTACAAATATAAACAGGTGGCTCCTAAGCCTGAAGACATTTTTACCAACATA
GAGGCAGATCTCAGAGCAGATCCCTCTTGGTTAATGCAAGACCAAATTTCCTTGCAGCTGAACAGAAC
TGCCACCACATTCAGTACATTACAGATCCAGTACTCCAGTGATGCTCAAATCACTTTACCAAGAGCAG
AGATGAGGCCAGTGAAACACAAATGGACTATGATTTCAAGGGATAACAATACTAAGCTGGAACATACT
GTCTTGGTAGGTGGAACCGTTGGCCTGAACTGCCCAGGCCAAGGAGACCCCACCCCACACGTGGATTG
GCTTCTAGCTGATGGAAGTAAAGTGAGAGCCCCTTATGTCAGTGAGGATGGACGGATCCTAATAGACA
AAAGTGGAAAATTGGAACTCCAGATGGCTGATAGTTTTGACACAGGCGTATATCACTGTATAAGCAGC
AATTATGATGATGCAGATATTCTCACCTATAGGATAACTGTGGTAGAACCTTTGGTCGAAGCCTATCA
GGAAAATGGGATTCATCACACAGTTTTCATTGGTGAAACACTTGATCTTCCATGCCATTCTACTGGTA
TCCCAGATGCCTCTATTAGCTGGGTTATTCCAGGAAACAATGTGCTCTATCAGTCATCAAGAGACAAG
AAAGTTCTAAACAATGGCACATTAAGAATATTACAGGTCACCCCGAAAGACCAAGGTTATTATCGCTG
TGTGGCAGCCAACCCATCAGGGGTTGATTTTTTGATTTTCCAAGTTTCAGTCAAGATGAAAGGACAAA
GGCCCTTGGAGCATGATGGAGAAACAGAGGGATCTGGACTTGATGAGTCCAATCCTATTGCTCATCTT
AAGGAGCCACCAGGTGCACAACTCCGTACATCTGCTCTGATGGAGGCTGAGGTTGGAAAACACACCTC
AAGCACAAGTAAGAGGCACAACTATCGGGAATTAACACTCCAGCGACGTGGAGATTCAACACATCGAC
GTTTTAGGGAGAATAGGAGGCATTTCCCTCCCTCTGCTAGGAGAATTGACCCACAACATTGGGCGGCA
CTGTTGGAGAAAGCTAAAAAGAATGCTATGCCAGACAAGCGAGAAAATACCACAGTGAGCCCACCCCC
AGTGGTCACCCAACTCCCAAACATACCTGGTGAAGAAGACGATTCCTCAGGCATGCTCGCTCTACATG
AGGAATTTATGGTCCCGGCCACTAAAGCTTTGAACCTTCCAGCAAGGACAGTGACTGCTGACTCCAGA
ACAATATCTGATAGTCCTATGACAAACATAAATTATGGCACAGAATTCTCTCCTGTTGTGAATTCACA
AATACTACCACCTGAAGAACCCACAGATTTCAAACTGTCTACTGCTATTAAAACTACAGCCATGTCAA
AGAATATAAACCCAACCATGTCAAGCCAAATACAAGGCACAACCAATCAACATTCATCCACTGTCTTT
CCACTGCTACTTGGAGCAACTGAATTTCAGGACTCTGACCAGATGGGAAGAGGAAGAGAGCATTTCCA
AAGTAGACCCCCAATAACAGTAAGGACTATGATCAAAGATGTCAATGTCAAAATGCTTAGTAGCACCA
CCAACAAACTATTATTAGAGTCAGTAAATACCACAAATAGTCATCAGACATCTGTAAGAGAAGTGAGT
GAACCCAGGCACAATCACTTCTATTCTCACACTACTCAAATACTTAGCACCTCCACGTTCCCTTCAGA
TCCACACACAGCTGCTCATTCTCAGTTTCCGATCCCTAGAAATAGTACAGTTAACATCCCGCTGTTCA
GACGCTTTGGGAGGCAGAGGAAAATTGGCGGAAGGGGGCGGATTATCAGCCCATATAGAACTCCAGTT
CTGCGACGGCATAGATACAGCATTTTCAGGTCAACAACCAGAGGTTCTTCTGAAAAAAGCACTACTGC
ATTCTCAGCCACAGTGCTCAATGTGACATGTCTGTCCTGTCTTCCCAGGGAGAGGCTCACCACTGCCA
CAGCAGCATTGTCTTTTCCAAGTGCTGCTCCCATCACCTTCCCCAAAGCTGACATTGCTAGAGTCCCA
TCAGAAGAGTCTACAACTCTAGTCCAGAATCCACTATTACTACTTGAGAACAAACCCAGTGTAGAGAA
AACAACACCCACAATAAAATATTTCAGGACTGAAATTTCCCAAGTGACTCCAACTGGTGCAGTCATGA
CATATGCTCCAACATCCATACCCATGGAAAAAACTCACAAAGTAAACGCCAGTTACCCACGTGTGTCT
AGCACCAATGAAGCTAAAAGAGATTCAGTGATTACATCGTCACTTTCAGGTGCTATCACCAAGCCACC
AATGACTATTATAGCCAATTACAAGGTTTTCAAGAAGGAAATTCCCTGGCAACAGAACTTTGTAAATA
ACCATAACCCAAAAGGCAGATTAAGGAATCAACATAAAGTTAGTTTACAAAAAAGCACAGCTGTGATG
CTTCCTAAAACATCTCCTGCTTTACCACAGAGACAAAGTCTCCCCTCGCACCACACTACGACCAAAAC
ACACAATCCTGGAAGTCTTCCAACAAAGAAGGAGCTTCCCTTCCCACCCCTTAACCCTATGCTTCCTA
GTATTATAAGCAAAGACTCAAGTACAAAAAGCATCATATCAACGCAAACAGCAATACCAGCAACAACT
CCTACCTTCCCTGCATCTGTCATCACTTATGAAACCCAAACAGAGAGATCTAGAGCACAAACAATACA
AAGAGAACAGGAGCCTCAAAAGAAGAACAGGACTGACCCAAACATCTCTCCAGACCAGAGTTCTGGCT
TCACTACACCCACTGCTATGACACCTCCTGTTCTAACCACAGCCGAAACTTCAGTCAAGCCCAGTGTC
TCTGCATTCACTCATTCCCCACCAGAAAACACAACTGGGATTTCAAGCACAATCAGTTTTCATTCAAG
AACTCTTAATCTGACAGATGTGATTGAAGAACTAGCCCAAGCAAGTACTCAGACTTTGAAGAGCACAA
TTGCTTCTGAAACAACTTTGTCCAGCAAATCACACCAGAGTACCACAACTAGGAAAGCAATCATTAGA
CACTCAACCATACCACCATTCTTGAGCAGCAGTGCTACTCTAATGCCAGTTCCCATCTCCCCTCCCTT
TACTCAGAGAGCAGTTACTGACAACGTGGCGACTCCCATTTCCGGGCTTATGACAAATACAGTGGTCA
AGCTGCACGAATCCTCAAGGCACAATGCTAAACCACAGCAATTAGTAGCAGAGGTTGCAACATCCCCC
AAGGTTCACCCAAATGCCAAGTTCACAATTGGAACCACTCACTTCATCTACTCTAATCTGTTACATTC
TACTCCCATGCCAGCACTAACAACAGTTAAATCACAGAATTCTAAATTAACTCCATCTCCCTGGGCAG
AAAACCAATTTTGGCACAAACCATACTCAGAAATTGCTGAAAAAGGCAAAAAGCCAGAAGTAAGCATG
TTGGCTACTACAGGCCTGTCCGAGGCCACCACTCTTGTTTCAGATTGGGATGGACAGAAGAACACAAA
GAAGAGTGACTTTGATAAGAAACCAGTTCAAGAAGCAACAACTTCCAAACTCCTTCCCTTTGACTCTT
TGTCTAGGTATATATTTGAAAAGCCCAGGATAGTTGGAGGAAAAGCTGCAAGTTTTACTATTCCAGCT
AACTCAGATGCCTTTCTTCCCTGTGAAGCTGTTGGAAATCCCCTGCCCACCATTCATTGGACCAGAGT
CCCATCAGGTATGTCAGGACTTGATTTATCTAAGAGGAAACAGAATAGCAGGGTCCAGGTTCTCCCCA
ATGGTACCCTGTCCATCCAGAGGGTGGAAATTCAGGACCGCGGACAGTACTTGTGTTCCGCATCCAAT
ACGTACCAAAGAGATCACAGTTCATTCCGGAAGCACTGTGGAACTGAAGTGCAGAGCAGAAGGTAGGC
CAAGCCCTACAGTTACCTGGATTCTTGCAAACCAAACAGTTGTCTCAGAATCATCCCAGGGAAGTAGG
CAGGCTGTGGTGACGGTTGACGGAACATTGGTCCTCCACAATCTCAGTATTTATGACCGTGGCTTTTA
CAAATGTGTGGCCAGCAACCCAGGTGGCCAGGATTCACTGCTGGTTAAAATACAAGTCATTGCAGCAC
TGTACTGCAAAAGGAACTCCTCAGCCCAGCGTTTACTGGGTCCTCTCTGATGGCACTGAAGTGAAACC
ATTACAGTTTACCAATTCCAAGTTGTTCTTATTTTCAAATGGGACTTTGTATATAAGAAACCTAGCCT
CTTACAATGGAAGAGCGAGTGACCAGCCCCAGGATAGAAGCTGCATCCCAGAAAAGGACTGAAGTGAA
TTTTGGGGACAAATTACTACTGAACTGCTCAGCCACTGGGGAGCCCAAACCCCAAATAATGTGGAGGT
TACCATCCAAGGCTGTGGTCGACCAGCAGCATAGGGTGGGCAGCTGGATCCACGTCTACCCTAATGGA
TCCCTGTTTATTGGATCAGTAACAGAAAAAGACAGTGGTGTCTACTTGTGTGTGGCAAGAAACAAAAT
GGGGGATGATCTGATACTGATGCATGTTAGCCTAAGACTGAAACCTGCCAAAATTGACCACAAGCAGT
ATTTTAGAAAGCAAGTGCTCCATGGGAAAGATTTCCAAGTAGATTGCAAAGCTTCCGGCTCCCCAGTG
CCAGAGATATCTTGGAGTTTGCCTGATGGAACCATGATCAACAATGCAATGCAAGCCGATGACAGTGG
CCACAGGACTAGGAGATATACCCTTTTCAACAATGGAACTTTATACTTCAACAAAGTTGGGGTAGCGG
AGGAAGGAGATTATACTTGCTATGCCCAGAACACCCTAGGGAAAGATGAAATGAAGGTCCACTTAACA
GTTATAACAGCTGCTCCCCGGATAAGGCAGAGTAACAAAACCAACAAGAGAATCAAAGCTGGAGACAC
AGCTGTCCTTGACTGTGAGGTCACTGGGGATCCCAAACCAAAAATATTTTGGTTGCTGCCTTCCAATG
ACATGATTTCCTTCTCCATTGATAGGTACACATTTCATGCCAATGGGTCTTTGACCATCAACAAAGTG
AAACTGCTCGATTCTGGAGAGTACGTATGTGTAGCCCGAAATCCCAGTGGGGATGACACCAAAATGTA
CAAACTGGATGTGGTCTCTAAACCTCCATTAATCAATGGTCTGTATACAAATAGAACTGTTATTAAAG
CCACAGCTGTGAGACATTCCAAAAAACACTTTGACTGCAGAGCTGAAGGGACACCATCTCCTGAAGTC
ATGTGGATCATGCCAGACAATATTTTCCTCACAGCCCCATACTATGGAAGCAGAATCACAGTCCATAA
AAATGGAACCTTGGAAATTAGGAATGTGAGGCTTTCAGATTCAGCCGACTTTATCTGTGTGGCCCGAA
ATGAAGGTGGAGAGAGCGTGTTGGTAGTACAGTTAGAAGTACTGGAAATGCTGAGAAGACCGACATTT
AGAAATCCATTTAATGAAAAAATAGTTGCCCAGCTGGGAAAGTCCACAGCATTGAATTGCTCTGTTGA
TGGTAACCCACCACCTGAAATAATCTGGATTTTACCAAATGGCACACGATTTTCCAATGGACCACAAA
GTTATCAGTATCTGATAGCAAGCAATGGTTCTTTTATCATTTCTAAAACAACTCGGGAGGATGCAGGA
AAATATCGCTGTGCAGCTAGGAATAAAGTTGGCTATATTGAGAAATTAGTCATATTAGAAATTGGCCA
GAAGCCAGTTATTCTTACCTATGCACCAGGGACAGTAAAAGGCATCAGTGGAGAATCTCTATCACTGC
ATTGTGTGTCTGATGGAATCCCTAAGCCAAATATCAAATGGACTATGCCAAGTGGTTATGTAGTAGAC
AGGCCTCAAATTAATGGGAAATACATATTGCATGACAATGGCACCTTAGTCATTAAAGAAGCAACAGC
TTATGACAGAGGAAACTATATCTGTAAGGCTCAAAATAGTGTTGGTCATACACTGATTACTGTTCCAG
TAATGATTGTAGCCTACCCTCCCCGAATTACAAATCGTCCACCCAGGAGTATTGTCACCAGGACAGGG
GCAGCCTTTCAGCTCCACTGTGTGGCCTTGGGAGTTCCCAAGCCAGAAATCACATGGGAGATGCCTGA
CCACTCCCTTCTCTCAACGGCAAGTAAAGAGAGGACACATGGAAGTGAGCAGCTTCACTTACAAGGTA
CCCTAGTCATTCAGAATCCCCAAACCTCCGATTCTGGGATATACAAATGCACAGCAAAGAACCCACTT
GGTAGTGATTATGCAGCAACGTATATTCAAGTAATCTGACATGAAATAATAAAGTC

| | | | |
|---|---|---|---|
| NOV29ap, SNP13377641 of | SEQ ID NO:748 | 2617 aa | MW at 290200.2 kD |
| CG55776-01, Protein Sequence | SNP Pos: 2237 | | SNP Change: Asn to Asn |

MKVKGRGITCLLVSFAVICLVATPGGKACPRRCACYMPTEVHCTFRYLTSIPDSIPPNVERINLGYNS
LVRLMETDFSGLTKLELLMLHSNGIHTIPDKTFSDLQALQVRLMVLKMSYNKVRKLQKDTFYGLRSLT
RLHMDHNNIEFINPEVFYGLNFLRLVHLEGNQLTKLHPDTFVSLSYLQIFKISFIKFLYLSDNFLTSL
PQEMVSYMPDLDSLYLHGNPWTCDCHLKWLSDWIQEKPGIYIVLPDVIKCKKDRSPSSAQQCPLCMNP
RTSKGKPLAMVSAAAFQCAKPTIDSSLKSKSLTILEDSSSAFISPQGFMAPFGSLTLNMTDQSGNEAN
MVCSIQKPSRTSPIAFTEENDYIVLNTSFSTFLVCNIDYGHIQPVWQILALYSDSPLILERSHLLSET
PQLYYKYKQVAPKPEDIFTNIEADLRADPSWLMQDQISLQLNRTATTFSTLQIQYSSDAQITLPRAEM
RPVKHKWTMISRDNNTKLEHTVLVGGTVGLNCPGQGDPTPHVDWLLADGSKVRAPYVSEDGRILIDKS
GKLELQMADSFDTGVYHCISSNYDDADILTYRITVVEPLVEAYQENGIHHTVFIGETLDLPCHSTGTP
DASISWVIPGNNVLYQSSRDKKVLNNGTLRILQVTPKDQGYYRCVAANPSGVDFLIFQVSVKMKGQRP
LEHDGETEGSGLDESNPIAHLKEPPGAQLRTSALMEAEVGKHTSSTSKRHNYRELTLQRRGDSTHRRF
RENRRHFPPSARRIDPQHWAALLEKAKKNAMPDKRENTTVSPPPVVTQLPNIPGEEDDSSGMLALHEE
FMVPATKALNLPARTVTADSRTISDSPMTNINYGTEFSPVVNSQILPPEEPTDFKLSTAIKTTAMSKN
INPTMSSQIQGTTNQHSSTVFPLLLGATEFQDSDQMGRGREHFQSRPPITVRTMIKDVNVKMLSSTTN
KLLLESVNTTNSHQTSVREVSEPRHNHFYSHTTQILSTSTFPSDPHTAAHSQFPIPRNSTVNIPLFRR
FGRQRKIGGRGRIISPYRTPVLRPHRYSIFRSTTRGSSEKSTTAFSATVLNVTCLSCLPRERLTTATA
ALSFPSAAPITFPKADIARVPSEESTTLVQNPLLLLENKPSVEKTTPTIKYFRTEISQVTPTGAVMTY
APTSIPMEKTHKVNASYPRVSSTNEAKRDSVITSSLSGAITKPPMTIIAITRFSRRKIPWQQNFVNNH
NPKGRLRNQHKVSLQKSTAVMLPKTSPALPQRQSLPSHHTTTKTHNPGSLPTKKELPFPPLNPMLPSI
ISKDSSTKSIISTQTAIPATTPTFPASVITYETQTERSRAQTIQREQEPQKKNRTDPNISPDQSSGFT
TPTAMTPPVLTTAETSVKPSVSAFTHSPPENTTGISSTISFHSRTLNLTDVIEELAQASTQTLKSTIA
SETTLSSKSHQSTTTRKAIIRHSTIPPFLSSSATLMPVPISPPFTQRAVTDNVATPISGLMTNTVVKL
HESSRHNAKPQQLVAEVATSPKVHPNAKFTIGTTHFIYSNLLHSTPMPALTTVKSQNSKLTPSPWAEN
QFWHKPYSEIAEKGKKPEVSMLATTGLSEATTLVSDWDGQKNTKKSDFDKKPVQEATTSKLLPFDSLS
YIFEKPRIVGGKAASFTIPAIASDAFLPCEAVGNPLPTIHWTRVPSGMSGLDLSKRKQNSRVQVLPNG
TLSIQRVEIQDRGQYLCSASNLFGTDHLHVTLSVVSYPPRILERRTKEITVHSGSTVELKCRAEGRPS
PTVTWILANQTVVSESSQGSRQAVVTVDGTLVLHNLSIYDRGFYKCVASNPGGQDSLLVKIQVIAAPP
VILEQRRQVIVGTWGESLKLPCTAKGTPQPSVYWVLSDGTEVKPLQFTNSKLFLFSNGTLYIRNLASS
DRGTYECIATSSTGSERRVVMLTMEERVTSPRIEAASQKRTEVNFGDKLLLNCSATGEPKPQIMWRLP
SKAVVDQQHRVGSWIHVYPNGSLFIGSVTEKDSGVYLCVARNKMGDDLILMHVSLRLKPAKIDHKQYF
RKQVLHGKDFQVDCKASGSPVPEISWSLPDGTMINNAMQADDSGHRTRRYTLFNNGTLYFNKVGVAEE
GDYTCYAQNTLGKDEMKVHLTVITAAPRIRQSNKTNKRIKAGDTAVLDCEVTGDPKPKIFWLLPSNDM
ISFSIDRYTFHANGSLTINKVKLLDSGEYVCVARNPSGDDTKMYKLDVVSKPPLINGLYTNRTVIKAT
AVRHSKKHFDCRAEGTPSPEVMWIMPDNIFLTAPYYGSRITVHKNGTLEIRNVRLSDSADFICVARNE
GGESVLVVQLEVLEMLRRPTFRNPFNEKIVAQLGKSTALNCSVDGNPPPEIIWILPNGTRFSNGPQSY
QYLIASNGSFIISKTTREDAGKYRCAARNKVGYIEKLVILEIGQKPVILTYAPGTVKGISGESLSLHC
VSDGIPKPNIKWTMPSGYVVDRPQINGKYILHDNGTLVIKEATAYDRGNYICKAQNSVGHTLITVPVM
IVAYPPRITNRPPRSIVTRTGAAFQLHCVALGVPKPEITWEMPDHSLLSTASKERTHGSEQLHLQGTL
VIQNPQTSDSGIYKCTAKNPLGSDYAATYIQVI

| | | |
|---|---|---|
| NOV29aq, SNP13377640 | SEQ ID NO:749 | 7876 bP |
| of CG55776-01, | ORF Start: ATG at 6 | ORF Stop: TGA at 7857 |
| DNA Sequence | SNP Pos: 7218 | SNP Change: T to C |

TCAGGATGAAGGTAAAAGGCAGAGGAATCACCTGCTTGCTGGTCTCCTTTGCTGTGATCTGCCTGGTC
GCCACCCCTGGGGGCAAGGCCTGTCCTCGCCGCTGTGCCTGTTATATGCCTACGGAGGTACACTGCAC
ATTTCGGTACCTGACTTCCATCCCAGACAGCATCCCGCCCAATGTGGAACGCATCAATTTAGGGTACA
ACAGCTTGGTTAGATTGATGGAAACAGATTTTTCTGGCCTGACCAAACTGGAGTTACTCATGCTTCAC
AGCAATGGCATTCACACAATCCCTGACAAGACCTTCTCAGATTTGCAGGCCTTGCAGGTGAGACTGAT
GGTCTTAAAAATGAGCTATAATAAAGTCCGAAAACTTCAGAAAGATACTTTTTATGGCCTCAGGAGCT
TGACACGATTGCACATGGACCACAACAATATTGAGTTTATAAACCCAGAGGTTTTTTATGGGCTCAAC
TTTCTCCGCCTGGTGCACTTGGAAGGAAATCAGCTCACTAAGCTCCACCCAGATACATTTGTCTCTTT
GAGCTACCTCCAGATATTTAAAATCTCTTTCATTAAGTTCCTATACTTGTCTGATAACTTCCTGACCT
CCCTCCCTCAAGAGATGGTCTCCTATATGCCTGACCTAGACAGCCTTTACCTGCATGGAAACCCATGG
ACCTGTGATTGCCATTTAAAGTGGTTGTCTGACTGGATACAGGAGAAGCCAGGTATCTATATTGTNTT
ACCAGATGTAATAAAATGCAAAAAAGATAGAAGTCCCTCTAGTGCTCAGCAGTGTCCACTTTGCATGA
ACCCTAGGACTTCTAAAGGCAAGCCGTTAGCTATGGTCTCAGCTGCAGCTTTCCAGTGTGCCAAGCCA
ACCATTGACTCATCCCTGAAATCAAAGAGCCTGACTATTCTGGAAGACAGTAGTTCTGCTTTCATCTC
TCCCCAAGGTTTCATGGCACCCTTTGGCTCCCTCACTTTGAATATGACAGATCAGTCTGGAAATGAAG
CTAACATGGTCTGCAGTATTCAAAAGCCCTCAAGGACATCACCCATTGCATTCACTGAAGAAAATGAC
TACATCGTGCTAAATACTTCATTTTCAACATTTTTGGTGTGCAACATAGATTACGGTCACATTCAGCC
AGTGTGGCAAATTTTGGCTTTGTACAGTGATTCTCCTCTGATACTAGAAAGGAGCCACTTGCTTAGTG
AAACACCGCAGCTCTATTACAAATATAAACAGGTGGCTCCTAAGCCTGAAGACATTTTTACCAACATA
GAGGCAGATCTCAGAGCAGATCCCTCTTGGTTAATGCAAGACCAAATTTCCTTGCAGCTGAACAGAAC
TGCCACCACATTCAGTACATTACAGATCCAGTACTCCAGTGATGCTCAAATCACTTTACCAAGAGCAG
AGATGAGGCCAGTGAAACACAAATGGACTATGATTTCAAGGGATAACAATACTAAGCTGGAACATACT
GCTTCTAGCTGATGGAAGTAAAGTGAGAGCCCCTTATGTCAGTGAGGATGGACGGATCCTAATAGACA
AAAGTGGAAAATTGGAACTCCAGATGGCTGATAGTTTTGACACAGGCGTATATCACTGTATAAGCAGC
AATTATGATGATGCAGATATTCTCACCTATAGGATAACTGTGGTAGAACCTTTGGTCGAAGCCTATCA
GGAAAATGGGATTCATCACACAGTTTTCATTGGTGAAACACTTGATCTTCCATGCCATTCTACTGGTA
TCCCAGATGCCTCTATTAGCTGGGTTATTCCAGGAAACAATGTGCTCTATCAGTCATCAAGAGACAAG
AAAGTTCTAAACAATGGCACATTAAGAATATTACAGGTCACCCCGAAAGACCAAGGTTATTATCGCTG
TGTGGCAGCCAACCCATCAGGGGTTGATTTTTTGATTTTCCAAGTTTCAGTCAAGATGAAAGGACAAA
AAGGAGCCACCAGGTGCACAACTCCGTACATCTGCTCTGATGGAGGCTGAGGTTGGAAAACACACCTC
AAGCACAAGTAAGAGGCACAACTATCGGGAATTAACACTCCAGCGACGTGGAGATTCAACACATCGAC
GTTTTAGGGAGAATAGGAGGCATTTCCCTCCCTCTGCTAGGAGAATTGACCCACAACATTGGGCGGCA
CTGTTGGAGAAAGCTAAAAAGAATGCTATGCCAGACAAGCGAGAAAATACCACAGTGAGCCCACCCCC
AGTGGTCACCCAACTCCCAAACATACCTGGTGAAGAAGACGATTCCTCAGGCATGCTCGCTCTACATG
AGGAATTTATGGTCCCGGCCACTAAAGCTTTGAACCTTCCAGCAAGGACAGTGACTGCTGACTCCAGA
ACAATATCTGATAGTCCTATGACAAACATAAATTATGGCACAGAATTCTCTCCTGTTGTGAATTCACA
AATACTACCACCTGAAGAACCCACAGATTTCAAACTGTCTACTGCTATTAAAACTACAGCCATGTCAA
AGAATATAAACCCAACCATGTCAAGCCAAATACAAGGCACAACCAATCAACATTCATCCACTGTCTTT
CCACTGCTACTTGGAGCAACTGAATTTCAGGACTCTGACCAGATGGGAAGAGGAAGAGAGCATTTCCA
AAGTAGACCCCCAATAACAGTAAGGACTATGATCAAAGATGTCAATGTCAAAATGCTTAGTAGCACCA
CCAACAAACTATTATTAGAGTCAGTAAATACCACAAATAGTCATCAGACATCTGTAAGAGAAGTGAGT
GAACCCAGGCACAATCACTTCTATTCTCACACTACTCAAATACTTAGCACCTCCACGTTCCCTTCAGA
TCCACACACAGCTGCTCATTCTCAGTTTCCGATCCCTAGAAATAGTACAGTTAACATCCCGCTGTTCA
GACGCTTTGGGAGGCAGAGGAAAATTGGCGGAAGGGGGCGGATTATCAGCCCATATAGAACTCCAGTT
CTGCGACGGCATAGATACAGCATTTTCAGGTCAACAACCAGAGGTTCTTCTGAAAAAAGCACTACTGC
ATTCTCAGCCACAGTGCTCAATGTGACATGTCTGTCCTGTCTTCCCAGGGAGAGGCTCACCACTGCCA
CAGCAGCATTGTCTTTTCCAAGTGCTGCTCCCATCACCTTCCCCAAAGCTGACATTGCTAGAGTCCCA
TCAGAAGAGTCTACAACTCTAGTCCAGAATCCACTATTACTACTTGAGAACAAACCCAGTGTAGAGAA
AACAACACCCACAATAAAATATTTCAGGACTGAAATTTCCCAAGTGACTCCAACTGGTGCAGTCATGA
CATATGCTCCAACATCCATACCCATGGAAAAAACTCACAAAGTAAACGCCACTTACCCACGTGTGTCT
AGCACCAATGAAGCTAAAAGAGATTCAGTGATTACATCGTCACTTTCAGGTGCTATCACCAAGCCACC
AATGACTATTATAGCCATTACAAGGTTTTCAAGAAGGAAAATTCCCTGGCAACAGAACTTTGTAAATA
ACCATAACCCAAAAGGCAGATTAAGGAATCAACATAAAGTTAGTTTACAAAAAAGCACAGCTGTGATG
ACACAATCCTGGAAGTCTTCCAACAAAGAAGGAGCTTCCCTTCCCACCCCTTAACCCTATGCTTCCTA
GTATTATAAGCAAAGACTCAAGTACAAAAAGCATCATATCAACGCAAACAGCAATACCAGCAACAACT
CCTACCTTCCCTGCATCTGTCATCACTTATGAAACCCAAACAGAGAGATCTAGAGCACAAACAATACA
AAGAGAACAGGAGCCTCAAAAGAAGAACAGGACTGACCCAAACATCTCTCCAGACCAGAGTTCTGGCT
TCACTACACCCACTGCTATGACACCTCCTGTTCTAACCACAGCCGAAACTTCAGTCAAGCCCAGTGTC
TCTGCATTCACTCATTCCCCACCAGAAAACACAACTGGGATTTCAAGCACAATCAGTTTTCATTCAAG
AACTCTTAATCTGACAGATGTGATTGAAGAACTAGCCCAAGCAAGTACTCAGACTTTGAAGAGCACAA
TTGCTTCTGAAACAACTTTGTCCAGCAAATCACACCAGAGTACCACAACTAGGAAAGCAATCATTAGA
CACTCAACCATACCACCATTCTTGAGCAGCAGTGCTACTCTAATGCCAGTTCCCATCTCCCCTCCCTT
TACTCAGAGAGCAGTTACTGACAACGTGGCGACTCCCATTTCCGGGCTTATGACAAATACAGTGGTCA
AGCTGCACGAATCCTCAAGGCACAATGCTAACCACAGCAATTAGTAGCAGAGGTTGCAAACATCCCCC
AAGGTTCACCCAAATGCCAAGTTCACAATTGGAACCACTCACTTCATCTACTCTAATCTGTTACATTC
TACTCCCATGCCAGCACTAACAACAGTTAAATCACAGAATTCTAAATTAACTCCATCTCCCTGGGCAG
AAAACCAATTTTGGCACAAACCATACTCAGAAATTGCTGAAAAAGGCAAAAAGCCAGAAGTAAGCATG
TTGGCTACTACAGGCCTGTCCGAGGCCACCACTCTTGTTTCAGATTGGGATGGACAGAAGAACACAAA
GAAGAGTGACTTTGATAAGAAACCAGTTCAAGAAGCAACAACTTCCAAACTCCTTCCCTTTGACTCTT
TGTCTAGGTATATATTTGAAAAGCCCAGGATAGTTGGAGGAAAAGCTGCAAGTTTTACTATTCCAGCT
AACTCAGATGCCTTTCTTCCCTGTGAAGCTGTTGGAAATCCCCTGCCCACCATTCATTGGACCAGAGT
CCCATCAGGTATGTCAGGACTTGATTTATCTAAGAGGAAACAGAATAGCAGGGTCCAGGTTCTCCCCA
ATGGTACCCTGTCCATCCAGAGGGTGGAAATTCAGGACCGCGGACAGTACTTGTGTTCCGCATCCAAT
CTGTTTGGCACAGACCACCTTCATGTCACCTTGTCTGTGGTTTCCTATCCTCCCAGGATCCTGGAGAG
ACGTACCAAAGAGATCACAGTTCATTCCGGAAGCACTGTGGAACTGAAGTGCAGAGCAGAAGGTAGGC
CAAGCCCTACAGTTACCTGGATTCTTGCAAACCAAACAGTTGTCTCAGAATCATCCCAGGGAAGTAGG
CAGGCTGTGGTGACGGTTGACGGAACATTGGTCCTCCACAATCTCAGTATTTATGACCGTGGCTTTTA
CAAATGTGTGGCCAGCAACCCAGGTGGCCAGGATTCACTGCTGGTTAAAATACAAGTCATTGCAGCAC
CACCTGTTATTCTAGAGCAAAGGAGGCAAGTCATTGTAGGCACTTGGGGTGAAAGTTTAAAACTGCCC
TGTACTGCAAAAGGAACTCCTCAGCCCAGCGTTTACTGGGTCCTCTCTGATGGCACTGAAGTGAAACC
ATTACAGTTTACCAATTCCAAGTTGTTCTTATTTTCAAATGGGACTTTGTATATAAGAAACCTAGCCT
CTTCAGACAGGGGCACTTATGAATGCATTGCTACCAGTTCCACTGGTTCGGAGCGAAGAGTAGTAATG
CTTACAATGGAAGAGCGAGTGACCAGCCCCAGGATAGAAGCTGCATCCCAGAAAAGGACTGAAGTGAA
TTTTGGGGACAAATTACTACTGAACTGCTCAGCCACTGGGGAGCCCAAACCCCAAATAATGTGGAGGT
TACCATCCAAGGCTGTGGTCGACCAGCAGCATAGGGTGGGCAGCTGGATCCACGTCTACCCTAATGGA
TCCCTGTTTATTGGATCAGTAACAGAAAAAGACAGTGGTGTCTACTTGTGTGTGGCAAGAAACAAAAT
GGGGGATGATCTGATACTGATGCATGTTAGCCTAAGACTGAAACCTGCCAAAATTGACCACAAGCAGT
ATTTTAGAAAGCAAGTGCTCCATGGGAAAGATTTCCAAGTAGATTGCAAAGCTTCCGGCTCCCCAGTG
CCAGAGATATCTTGGAGTTTGCCTGATGGAACCATGATCAACAATGCAATGCAAGCCGATGACAGTGG
CCACAGGACTAGGAGATATACCCTTTTCAACAATGGAACTTTATACTTCAACAAAGTTGGGGTAGCGG
AGGAAGGAGATTATACTTGCTATGCCCAGAACACCCTAGGGAAAGATGAAATGAAGGTCCACTTAACA
GTTATAACAGCTGCTCCCCGGATAAGGCAGAGTAACAAAACCAACAAGAGAATCAAAGCTGGAGACAC
ACATGATTTCCTTCTCCATTGATAGGTACACATTTCATGCCAATGGGTCTTTGACCATCAACAAAGTG
AAACTGCTCGATTCTGGAGAGTACGTATGTGTAGCCCGAAATCCCAGTGGGGATGACACCAAAATGTA
CAAACTGGATGTGGTCTCTAAACCTCCATTAATCAATGGTCTGTATACAAACAGAACTGTTATTAAAG
CCACAGCTGTGAGACATTCCAAAAAACACTTTGACTGCAGAGCTGAAGGGACACCATCTCCTGAAGTC
AAATGGAACCTTGGAAATTAGGAATGTGAGGCTTTCAGATTCAGCCGACTTTATCTGTGTGGCCCGAA
AGAAATCCATTTAATGAAAAAATAGTTGCCCAGCTGGGAAAGTCCACAGCATTGAATTGCTCTGTTGA
TGGTAACCCACCACCTGAAATAATCTGGATTTTACCAAATGGCACACGATTTTCCAATGGACCACAAA
AAATATCGCCGTGCAGCTAGGAATAAAGTTGGCTATATTGAGAAATTAGTCATATTAGAAATTGGCCA
GAAGCCAGTTATTCTTACCTATGCACCAGGGACAGTAAAAGGCATCAGTGGAGAATCTCTATCACTGC
ATTGTGTGTCTGATGGAATCCCTAAGCCAAATATCAAATGGACTATGCCAAGTGGTTATGTAGTAGAC
AGGCCTCAAATTAATGGGAAATACATATTGCATGACAATGGCACCTTAGTCATTAAAGAAGCAACAGC
TTATGACAGAGGAAACTATATCTGTAAGGCTCAAAATAGTGTTGGTCATACACTGATTACTGTTCCAG
TAATGATTGTAGCCTACCCTCCCCGAATTACAAATCGTCCACCCAGGAGTATTGTCACCAGGACAGGG
GCAGCCTTTCAGCTCCACTGTGTGGCCTTGGGAGTTCCCAAGCCAGAAATCACATGGGAGATGCCTGA
CCACTCCCTTCTCTCAACGGCAAGTAAAGAGAGGACACATGGAAGTGAGCAGCTTCACTTACAAGGTA
CCCTAGTCATTCAGAATCCCCAAACCTCCGATTCTGGGATATACAAATGCACAGCAAAGAACCCACTT
GGTAGTGATTATGCAGCAACGTATATTCAAGTAATCTGACATGAAATAATAAAGTC

| | | | |
|---|---|---|---|
| NOV29aq, SNP13377640 of | SEQ ID NO:750 | 2617 aa | MW at 290253.2 kD |
| CG55776-01, Protein Sequence | SNP Pos: 2405 | | SNP Change: Cys to Arg |

MKVKGRGITCLLVSFAVICLVATPGGKACPRRCACYMPTEVHCTFRYLTSIPDSIPPNVERINLGYNS
LVRLMETDFSGLTKLELLMLHSNGIHTIPDKTFSDLQALQVRLMVLKMSYNKVRKLQKDTFYGLRSLT
RLHMDHNNIEFINPEVFYGLNFLRLVHLEGNQLTKLHPDTFVSLSYLQIFKISFIKFLYLSDNFLTSL
PQEMKTSYMPDLDSLYLHGNPWTCDCHLKWLSDWIQEKPGIYIVLPDVIKCKKDRSPSSAQQCPLCAP
RTSKGKPLAMVSAAAFQCAKPTIDSSLKSKSLTILEDSSSAFISPQGFMAPFGSLTLNMTDQSGNEAN
MVCSIQKPSRTSPIAFTEENDYIVLNTSFSTFLVCNIDYGHIQPVWQILALYSDSPLILERSHLLSET
PQLYYKYKQVAPKPEDIFTNIEADLRADPSWLMQDQISLQLNRTATTFSTLQIQYSSDAQITLPEAEM
RPVKHKWTMISRDNNTKLEHTVLVGGTVGLNCPGQGDPTPNVDWLLADGSKVRAPYVSEDGRILIDKS
GKLELQMADSFDTGVYHCISSNYDDADILTYRITVVEPLVEAYQENGIHHTVFIGETLDLPCHSTGIP
DASISWVIPGNNVLYQSSRDKKVLNNGTLRILQVTPKDQGYYRCVAANPSGVDFLIFQVSVKMKGQRP
LEHDGETEGSGLDESNPIAHLKEPPGAQLRTSALMEAEVGKHTSSTSKRHNYRELTLQRRGDSTHRRF
RENRRHFPPSARRIDPQHWAALLEKAKKNAMPDKRENTTVSPPPVVTQLPNIPGEEDDSSGMLALHEE
FMVPATKALNLPARTVTADSRTISDSPMTNINYGTEFSPVVNSQILPPEEPTDFKLSTAIKTTAMSKN
INPTMSSQIQGTTNQHSSTVFPLLLGATEFQDSDQMGRGREHFQSRPPITVRTMIKDVNVKMLSSTTN
KLLLESVNTTNSHQTSVREVSEPRHNHFYSHTTQILSTSTFPSDPHTAAHSQFPIPRNSTVNIPLFRR
FGRQRKIGGRGRIISPYRTPVLRRHRYSIFRSTTRGSSEKSTTAFSATVLNVTCLSCLPRERLTTATA
ALSFPSAAPITFPKADIARVPSEESTTLVQNPLLLLENKPSVEKTTPTIKYFRTEISQVTPTGAVMTY
APTSIPMEKTHKVNASYPRVSSTNEAKRDSVITSSLSGAITKPPMTIIAITRFSRRKIPWQQNFVNNH
NPKGRLRNQHKVSLQKSTAVMLPKTSPALPQRQSLPSHHTTTKTHNPGSLPTKKELPFPPLNPMLPSI
ISKDSSTKSIISTQTAIPATTPTFPASVITYETQTERSRAQTIQREQEPQKKNRTDPNISPDQSSGFT
TPTAMTPPVLTTAETSVKPSVSAFTHSPPENTTGISSTISFHSRTLNLTDVIEELAQASTQTLKSTIA
SETTLSSKSHQSTTTRKAIIRHSTIPPFLSSSATLMPVPISPPFTQRAVTDNVATPISGLMTNTVVKL
HESSRHNAKPQQLVAEVATSPKVHPNAKFTIGTTHFIYSNLLHSTPMPALTTVKSQNSKLTPSPWAEN
QFWHKPYSEIAEKGKKPEVSMLATTGLSEATTLVSDWDGQKNTKKSDFDKKPVQEATTSKLLPFDSLS
RYIFEKPRIVGGKAASFTIPANSDAFLPCEAVGNPLPTIHWTRVPSGMSGLDLSKRKQNSRVQVLPNG
TLSIQRVEIQDRGQYLCSASNLFGTDHLHVTLSVVSYPPRILERRTKEITVHSGSTVELKCRAEGRPS
PTVTWILANQTVVSESSQGSRQAVVTVDGTLVLHNLSIYDRGFYKCVASNPGGQDSLLVKIQVIAAPP
VILEQRRQVIVGTWGESLKLPCTAKGTPQPSVYWVLSDGTEVKPLQFTNSKLFLFSNGTLYIRNLASS
DRGTYECIATSSTGSERRVVMLTMEERVTSPRIEAASQKRTEVNFGDKLLLNCSATGEPKPQIMWRLP
SKAVVDQQHRVGSWIHVYPNGSLFIGSVTEKDSGVYLCVARNKMGDDLILMHVSLRLKPAKIDHKQYF
RKQVLHGKDFQVDCKASGSPVPEISWSLPDGTMINNAMQADDSGHRTRRYTLFNNGTLYFNKVGVAEE
GDYTCYAQNTLGKDEMKVHLTVITAAPRIRQSNKTNKRIKAGDTAVLDCEVTGDPKPKIFWLLPSNDM
ISFSIDRYTFHANGSLTINKVKLLDSGEYVCVARNPSGDDTKMYKLDVVSKPPLINGLYTNRTVIKAT
AVRHSKKHFDCRAEGTPSPEVMWIMPDNIFLTAPYYGSRITVHKNGTLEIRNVRLSDSADFICVARNE
QYLIASNGSFIISKTTREDAGKYPRAARNKVGYIEKLVILEIGQKPVILTYAPGTVKGISGESLSLHC
VSDGIPKPNIKWTMPSGYVVDRPQINGKYILHDNGTLVIKEATAYDRGNYICKAQNSVGHTLITVPVM
IVAYPPRITNRPPRSIVTRTGAAFQLHCVALGVPKPEITWEMPDHSLLSTASKERTHGSEQLHLQGTL
VIQNPQTSDSGIYKCTAKNPLGSDYAATYIQVI

[0519] A ClustalW comparison of the above protein sequences yields the following sequence alignment shown in Table 29B.

TABLE 29B
Comparison of the NOV29 protein sequences.

| | |
|---|---|
| NOV29a | MKVKGRGITCLLVSFAVICLVATPGGKACPRRCACYMPTEVHCTFRYLTSIPDSIPPNVE |
| NOV29b | ------------------------------------------------------------ |
| NOV29c | ------------------------------------------------------------ |
| NOV29d | ------------------------------------------------------------ |
| NOV29e | ------------------------------------------------------------ |
| NOV29f | ------------------------------------------------------------ |
| NOV29g | ------------------------------------------------------------ |
| NOV29h | ------------------------------------------------------------ |
| NOV29i | ------------------------------------------------------------ |
| NOV29j | ------------------------------------------------------------ |
| NOV29k | ------------------------------------------------------------ |
| NOV29l | ------------------------------------------------------------ |
| NOV29m | ------------------------------------------------------------ |
| NOV29n | ------------------------------------------------------------ |
| NOV29o | ------------------------------------------------------------ |
| NOV29p | ------------------------------------------------------------ |
| NOV29q | ------------------------------------------------------------ |
| NOV29r | ------------------------------------------------------------ |
| NOV29s | ------------------------------------------------------------ |
| NOV29t | ------------------------------------------------------------ |
| NOV29u | ------------------------------------------------------------ |
| NOV29v | ------------------------------------------------------------ |
| NOV29w | ------------------------------------------------------------ |
| NOV29x | ------------------------------------------------------------ |
| NOV29y | ------------------------------------------------------------ |
| NOV29z | MKVKGRGITCLLVSFAVICLVATPGGKACPRRCACYMPTEVHCTFRYLTSIPDSIPPNVE |
| NOV29aa | MKVKGRGITCLLVSFAVICLVATPGGKACPRRCACYMPTEVHCTFRYLTSIPDSIPPNVE |
| NOV29ab | ------------------------------------------------------------ |
| NOV29ac | ------------------------------------------------------------ |
| NOV29ad | ------------------------------------------------------------ |
| NOV29ae | ------------------------------------------------------------ |
| NOV29af | ------------------------------------------------------------ |
| NOV29ag | ------------------------------------------------------------ |
| NOV29a | RINLGYNSLVRLMETDFSGLTKLELLMLHSNGIHTIPDKTFSDLQALQVRLMVLKMSYNK |
| NOV29b | ------------------------------------------------------------ |
| NOV29c | ------------------------------------------------------------ |
| NOV29d | ------------------------------------------------------------ |
| NOV29e | ------------------------------------------------------------ |
| NOV29f | ------------------------------------------------------------ |
| NOV29g | ------------------------------------------------------------ |
| NOV29h | ------------------------------------------------------------ |
| NOV29i | ------------------------------------------------------------ |
| NOV29j | ------------------------------------------------------------ |
| NOV29k | ------------------------------------------------------------ |
| NOV29l | ------------------------------------------------------------ |
| NOV29m | ------------------------------------------------------------ |
| NOV29n | ------------------------------------------------------------ |
| NOV29o | ------------------------------------------------------------ |
| NOV29p | ------------------------------------------------------------ |
| NOV29q | ------------------------------------------------------------ |
| NOV29r | ------------------------------------------------------------ |
| NOV29s | ------------------------------------------------------------ |
| NOV29t | ------------------------------------------------------------ |
| NOV29u | ------------------------------------------------------------ |
| NOV29v | ------------------------------------------------------------ |
| NOV29w | ------------------------------------------------------------ |
| NOV29x | ------------------------------------------------------------ |
| NOV29y | ------------------------------------------------------------ |
| NOV29z | RINLGYNSLVRLMETDFSGLTKLELLMLHSNGIHTIPDKTFSDLQALQVRLMVLKMSYNK |
| NOV29aa | RINLGYNSLVRLMETDFSGLTKLELLMLHSNGIHTIPDKTFSDLQALQVRLMVLKMSYNK |
| NOV29ab | ------------------------------------------------------------ |
| NOV29ac | ------------------------------------------------------------ |
| NOV29ad | ------------------------------------------------------------ |
| NOV29ae | ------------------------------------------------------------ |
| NOV29af | ------------------------------------------------------------ |
| NOV29ag | ------------------------------------------------------------ |
| NOV29a | VRKLQKDTFYGLRSLTRLHNDHNNIEFINPEVFYGLNFLRLVHLEGNQLTKLHPDTFVSL |
| NOV29b | ------------------------------------------------------------ |
| NOV29c | ------------------------------------------------------------ |
| NOV29d | ------------------------------------------------------------ |
| NOV29e | ------------------------------------------------------------ |
| NOV29f | ------------------------------------------------------------ |
| NOV29g | ------------------------------------------------------------ |
| NOV29h | ------------------------------------------------------------ |
| NOV29i | ------------------------------------------------------------ |
| NOV29j | ------------------------------------------------------------ |
| NOV29k | ------------------------------------------------------------ |
| NOV29l | ------------------------------------------------------------ |
| NOV29m | ------------------------------------------------------------ |
| NOV29n | ------------------------------------------------------------ |
| NOV29o | ------------------------------------------------------------ |
| NOV29p | ------------------------------------------------------------ |
| NOV29q | ------------------------------------------------------------ |
| NOV29r | ------------------------------------------------------------ |
| NOV29s | ------------------------------------------------------------ |
| NOV29t | ------------------------------------------------------------ |
| NOV29u | ------------------------------------------------------------ |
| NOV29v | ------------------------------------------------------------ |
| NOV29w | ------------------------------------------------------------ |
| NOV29x | ------------------------------------------------------------ |
| NOV29y | ------------------------------------------------------------ |
| NOV29z | VRKLQKDTFYGLRSLTRLHMDHNNIEFINPEVFYGLNFLRLVHLEGNQLTKLHPDTFVSL |
| NOV29aa | VRKLQKDTFYGLRSLTRLHMDHNNIEFINPEVFYGLNFLRLVHLEGNQLTKLHPDTFVSL |
| NOV29ab | ------------------------------------------------------------ |
| NOV29ac | ------------------------------------------------------------ |
| NOV29ad | ------------------------------------------------------------ |
| NOV29ae | ------------------------------------------------------------ |
| NOV29af | ------------------------------------------------------------ |
| NOV29ag | ------------------------------------------------------------ |
| NOV29a | SYLQIFKISFIKFLYLSDNFLTSLPQEMVSYMPDLDSLYLHGNPWTCDCHLKWLSDWIQE |
| NOV29b | ------------------------------------------------------------ |
| NOV29c | ------------------------------------------------------------ |
| NOV29d | ------------------------------------------------------------ |
| NOV29e | ------------------------------------------------------------ |
| NOV29f | ------------------------------------------------------------ |
| NOV29g | ------------------------------------------------------------ |
| NOV29h | ------------------------------------------------------------ |
| NOV29i | ------------------------------------------------------------ |
| NOV29j | ------------------------------------------------------------ |
| NOV29k | ------------------------------------------------------------ |
| NOV29l | ------------------------------------------------------------ |
| NOV29m | ------------------------------------------------------------ |
| NOV29o | ------------------------------------------------------------ |
| NOV29p | ------------------------------------------------------------ |
| NOV29q | ------------------------------------------------------------ |
| NOV29r | ------------------------------------------------------------ |
| NOV29s | ------------------------------------------------------------ |
| NOV29t | ------------------------------------------------------------ |
| NOV29u | ------------------------------------------------------------ |
| NOV29v | ------------------------------------------------------------ |
| NOV29w | ------------------------------------------------------------ |
| NOV29x | ------------------------------------------------------------ |
| NOV29y | ------------------------------------------------------------ |
| NOV29z | SYLQIFKISFIKFLYLSDNFLTSLPQEMVSYMPDLDSLYLHGNPWTCDCHLKWLSDWIQE |
| NOV29aa | SYLQIFKISFIKFLYLSDNFLTSLPQEMVSYMPDLDSLYLHGNPWTCDCHLKWLSDWIQE |
| NOV29ab | ------------------------------------------------------------ |
| NOV29ac | ------------------------------------------------------------ |
| NOV29ad | ------------------------------------------------------------ |
| NOV29ae | ------------------------------------------------------------ |
| NOV29af | ------------------------------------------------------------ |
| NOV29ag | ------------------------------------------------------------ |
| NOV29a | KPGIYIVLPDVIKCKKDRSPSSAQQCPLCMNPRTSKGKPLAMVSAAAFQCAKPTIDSSLK |
| NOV29b | ------------------------------------------------------------ |
| NOV29c | ------------------------------------------------------------ |
| NOV29d | ------------------------------------------------------------ |
| NOV29e | ------------------------------------------------------------ |
| NOV29f | ------------------------------------------------------------ |
| NOV29g | ------------------------------------------------------------ |
| NOV29h | ------------------------------------------------------------ |
| NOV29i | ------------------------------------------------------------ |
| NOV29j | ------------------------------------------------------------ |
| NOV29k | ------------------------------------------------------------ |
| NOV29l | ------------------------------------------------------------ |
| NOV29m | ------------------------------------------------------------ |
| NOV29n | ------------------------------------------------------------ |
| NOV29o | ------------------------------------------------------------ |
| NOV29p | ------------------------------------------------------------ |
| NOV29q | ------------------------------------------------------------ |
| NOV29r | ------------------------------------------------------------ |
| NOV29s | ------------------------------------------------------------ |
| NOV29t | ------------------------------------------------------------ |
| NOV29u | ------------------------------------------------------------ |
| NOV29v | ------------------------------------------------------------ |
| NOV29w | ------------------------------------------------------------ |
| NOV29x | ------------------------------------------------------------ |
| NOV29y | ------------------------------------------------------------ |
| NOV29z | KPGIYIVLPDVIKCKKDRSPSSAQQCPLCMNPRTSKGKPLAMVSAAAFQCAKPTIDSSLK |
| NOV29aa | KPGIYIVLPDVIKCKKDRSPSSAQQCPLCMNPRTSKGKPLAMVSAAAFQCAKPTIDSSLK |
| NOV29ab | ------------------------------------------------------------ |
| NOV29ac | ------------------------------------------------------------ |
| NOV29ad | ------------------------------------------------------------ |
| NOV29ae | ------------------------------------------------------------ |
| NOV29af | ------------------------------------------------------------ |
| NOV29ag | ------------------------------------------------------------ |
| NOV29a | SKSLTILEDSSSAFISPQGFMAPFGSLTLNMTDQSGNEANMVCSIQKPSRTSPIAFTEEN |
| NOV29b | ------------------------------------------------------------ |
| NOV29c | ------------------------------------------------------------ |
| NOV29d | ------------------------------------------------------------ |
| NOV29e | ------------------------------------------------------------ |
| NOV29f | ------------------------------------------------------------ |
| NOV29g | ------------------------------------------------------------ |
| NOV29h | ------------------------------------------------------------ |
| NOV29i | ------------------------------------------------------------ |
| NOV29j | ------------------------------------------------------------ |
| NOV29k | ------------------------------------------------------------ |
| NOV29l | ------------------------------------------------------------ |
| NOV29m | ------------------------------------------------------------ |
| NOV29n | ------------------------------------------------------------ |
| NOV29o | ------------------------------------------------------------ |
| NOV29p | ------------------------------------------------------------ |
| NOV29q | ------------------------------------------------------------ |
| NOV29r | ------------------------------------------------------------ |
| NOV29s | ------------------------------------------------------------ |
| NOV29t | ------------------------------------------------------------ |
| NOV29u | ------------------------------------------------------------ |
| NOV29v | ------------------------------------------------------------ |
| NOV29w | ------------------------------------------------------------ |
| NOV29x | ------------------------------------------------------------ |
| NOV29y | ------------------------------------------------------------ |
| NOV29z | SKSLTILEDSSSAFISPQGFMAPFGSLTLNMTDQSGNEANMVCSIQKPSRTSPIAFTEEN |
| NOV29aa | SKSLTILEDSSSAFISPQGFMAPFGSLTLNMTDQSGNEANMVCSIQKPSRTSPIAFTEEN |
| NOV29ab | ------------------------------------------------------------ |
| NOV29ac | ------------------------------------------------------------ |
| NOV29ad | ------------------------------------------------------------ |
| NOV29ae | ------------------------------------------------------------ |
| NOV29af | ------------------------------------------------------------ |
| NOV29ag | ------------------------------------------------------------ |
| NOV29a | DYIVLNTSFSTFLVCNIDYGHIQPVWQILALYSDSPLILERSHLLSETPQLYYKYKQVAP |
| NOV29b | ------------------------------------------------------------ |
| NOV29c | ------------------------------------------------------------ |
| NOV29d | ------------------------------------------------------------ |
| NOV29e | ------------------------------------------------------------ |
| NOV29f | ------------------------------------------------------------ |
| NOV29g | ------------------------------------------------------------ |
| NOV29h | ------------------------------------------------------------ |
| NOV29i | ------------------------------------------------------------ |
| NOV29j | ------------------------------------------------------------ |
| NOV29k | ------------------------------------------------------------ |
| NOV29l | ------------------------------------------------------------ |
| NOV29m | ------------------------------------------------------------ |
| NOV29n | ------------------------------------------------------------ |
| NOV29o | ------------------------------------------------------------ |
| NOV29p | ------------------------------------------------------------ |
| NOV29q | ------------------------------------------------------------ |
| NOV29r | ------------------------------------------------------------ |
| NOV29s | ------------------------------------------------------------ |
| NOV29t | ------------------------------------------------------------ |
| NOV29u | ------------------------------------------------------------ |
| NOV29v | ------------------------------------------------------------ |
| NOV29w | ------------------------------------------------------------ |
| NOV29x | ------------------------------------------------------------ |
| NOV29y | ------------------------------------------------------------ |
| NOV29z | DYIVLNTSFSTFLVCNIDYGHTQPVWQILALYSDSPLILERSHLLSETPQLYYKYKQVAP |
| NOV29aa | DYIVLNTSFSTFLVCNIDYGHTQPVWQILALYSDSPLILERSHLLSETPQLYYKYKQVAP |
| NOV29ab | ------------------------------------------------------------ |
| NOV29ac | ------------------------------------------------------------ |
| NOV29ad | ------------------------------------------------------------ |
| NOV29ae | ------------------------------------------------------------ |
| NOV29af | ------------------------------------------------------------ |
| NOV29ag | ------------------------------------------------------------ |
| NOV29a | KPEDIFTNIEADLRADPSWLMQDQISLQLNRTATTFSTLQIQYSSDAQITLPRAEMRPVK |
| NOV29b | ------------------------------------------------------------ |
| NOV29c | ------------------------------------------------------------ |
| NOV29d | ------------------------------------------------------------ |
| NOV29e | ------------------------------------------------------------ |
| NOV29f | ------------------------------------------------------------ |
| NOV29g | ------------------------------------------------------------ |
| NOV29h | ------------------------------------------------------------ |
| NOV29i | ------------------------------------------------------------ |
| NOV29j | ------------------------------------------------------------ |
| NOV29k | ------------------------------------------------------------ |
| NOV29l | ------------------------------------------------------------ |
| NOV29m | ------------------------------------------------------------ |
| NOV29n | ------------------------------------------------------------ |
| NOV29o | ------------------------------------------------------------ |
| NOV29p | ------------------------------------------------------------ |
| NOV29q | ------------------------------------------------------------ |
| NOV29r | ------------------------------------------------------------ |
| NOV29s | ------------------------------------------------------------ |
| NOV29t | ------------------------------------------------------------ |
| NOV29u | ------------------------------------------------------------ |
| NOV29v | ------------------------------------------------------------ |
| NOV29w | ------------------------------------------------------------ |
| NOV29x | ------------------------------------------------------------ |
| NOV29y | ------------------------------------------------------------ |
| NOV29z | KPEDIFTNIEADLRADPSWLMQDQISLQLNRTATTFSTLQIQYSSDAQITLPPAENRPVK |
| NOV29aa | KPEDIFTNIEADLRADPSWLMQDQISLQLNRTATTFSTLQIQYSSDAQITLPEAENRPVK |
| NOV29ab | ------------------------------------------------------------ |
| NOV29ac | ------------------------------------------------------------ |
| NOV29ad | ------------------------------------------------------------ |
| NOV29ae | ------------------------------------------------------------ |
| NOV29af | ------------------------------------------------------------ |
| NOV29ag | ------------------------------------------------------------ |
| NOV29a | HKWTMISRDNNTKLEHTVLVGGTVGLNCPGQGDPTPHVDWLLADGSKVRAPYVSEDGRIL |
| NOV29b | ------------------------------------------------------------ |
| NOV29c | ------------------------------------------------------------ |
| NOV29d | ------------------------------------------------------------ |
| NOV29e | ------------------------------------------------------------ |
| NOV29f | ------------------------------------------------------------ |
| NOV29g | ------------------------------------------------------------ |
| NOV29h | ------------------------------------------------------------ |
| NOV29i | ------------------------------------------------------------ |
| NOV29j | ------------------------------------------------------------ |
| NOV29k | ------------------------------------------------------------ |
| NOV29l | ------------------------------------------------------------ |
| NOV29m | ------------------------------------------------------------ |
| NOV29n | ------------------------------------------------------------ |
| NOV29o | ------------------------------------------------------------ |
| NOV29p | ------------------------------------------------------------ |
| NOV29q | ------------------------------------------------------------ |
| NOV29r | ------------------------------------------------------------ |
| NOV29s | ------------------------------------------------------------ |
| NOV29t | ------------------------------------------------------------ |
| NOV29u | ------------------------------------------------------------ |
| NOV29v | ------------------------------------------------------------ |
| NOV29w | ------------------------------------------------------------ |
| NOV29x | ------------------------------------------------------------ |
| NOV29y | ------------------------------------------------------------ |
| NOV29z | HKWTMISRDNNTKLEHTVLVGGTVGLNCPGQGDPTPHVDWLLADGSKVRAPYVSEDGRIL |
| NOV29aa | HKWTMISRDNNTKLEHTVLVGGTVGLNCPGQGDPTPHVDWLLADGSKVRAPYVSEDGRIL |
| NOV29ab | ------------------------------------------------------------ |
| NOV29ac | ------------------------------------------------------------ |
| NOV29ad | ------------------------------------------------------------ |
| NOV29ae | ------------------------------------------------------------ |
| NOV29af | ------------------------------------------------------------ |
| NOV29ag | ------------------------------------------------------------ |
| NOV29a | IDKSGKLELQMADSFDTGVYHCISSNYDDADILTYRITVVEPLVEAYQENGIHHTVFIGE |
| NOV29b | ------------------------------------------------------------ |
| NOV29c | ------------------------------------------------------------ |
| NOV29d | ------------------------------------------------------------ |
| NOV29e | ------------------------------------------------------------ |
| NOV29f | ------------------------------------------------------------ |
| NOV29g | ------------------------------------------------------------ |
| NOV29h | ------------------------------------------------------------ |
| NOV29i | ------------------------------------------------------------ |
| NOV29j | ------------------------------------------------------------ |
| NOV29k | ------------------------------------------------------------ |
| NOV29l | ------------------------------------------------------------ |
| NOV29m | ------------------------------------------------------------ |
| NOV29o | ------------------------------------------------------------ |
| NOV29p | ------------------------------------------------------------ |
| NOV29q | ------------------------------------------------------------ |
| NOV29r | ------------------------------------------------------------ |
| NOV29s | ------------------------------------------------------------ |
| NOV29t | ------------------------------------------------------------ |
| NOV29u | ------------------------------------------------------------ |
| NOV29v | ------------------------------------------------------------ |
| NOV29w | ------------------------------------------------------------ |
| NOV29x | ------------------------------------------------------------ |
| NOV29y | ------------------------------------------------------------ |
| NOV29z | IDKSGKLELQMADSFDTGVYHCISSNYDDADILTYRITVVEPLVEAYQENGIHHTVFIGE |
| NOV29aa | IDKSGKLELQMADSFDTGVYHCISSNYDDADILTYRITVVEPLVEAYQENGIHHTVFIGE |
| NOV29ab | ------------------------------------------------------------ |
| NOV29ac | ------------------------------------------------------------ |
| NOV29ad | ------------------------------------------------------------ |
| NOV29ae | ------------------------------------------------------------ |
| NOV29af | ------------------------------------------------------------ |
| NOV29ag | ------------------------------------------------------------ |
| NOV29a | TLDLPCHSTGIPDASISWVIPGNNVLYQSSRDKKVLNNGTLRILQVTPKDQGYYRCVAAN |
| NOV29b | ------------------------------------------------------------ |
| NOV29c | ------------------------------------------------------------ |
| NOV29d | ------------------------------------------------------------ |
| NOV29e | ------------------------------------------------------------ |
| NOV29f | ------------------------------------------------------------ |
| NOV29g | ------------------------------------------------------------ |
| NOV29h | ------------------------------------------------------------ |
| NOV29i | ------------------------------------------------------------ |
| NOV29j | ------------------------------------------------------------ |
| NOV29k | ------------------------------------------------------------ |
| NOV29l | ------------------------------------------------------------ |
| NOV29m | ------------------------------------------------------------ |
| NOV29n | ------------------------------------------------------------ |
| NOV29o | ------------------------------------------------------------ |
| NOV29p | ------------------------------------------------------------ |
| NOV29q | ------------------------------------------------------------ |
| NOV29r | ------------------------------------------------------------ |
| NOV29s | ------------------------------------------------------------ |
| NOV29t | ------------------------------------------------------------ |
| NOV29u | ------------------------------------------------------------ |
| NOV29v | ------------------------------------------------------------ |
| NOV29w | ------------------------------------------------------------ |
| NOV29x | ------------------------------------------------------------ |
| NOV29y | ------------------------------------------------------------ |
| NOV29z | TLDLPCHSTGIPDASISWVIPGNNVLYQSSRDKKVLNNGTLRILQVTPKDQGYYRCVAAN |
| NOV29aa | TLDLPCHSTGIPDASISWVIPGNNVLYQSSRDKKVLNNGTLRILQVTPKDQGYYRCVAAN |
| NOV29ab | ------------------------------------------------------------ |
| NOV29ac | ------------------------------------------------------------ |
| NOV29ad | ------------------------------------------------------------ |
| NOV29ae | ------------------------------------------------------------ |
| NOV29af | ------------------------------------------------------------ |
| NOV29ag | ------------------------------------------------------------ |
| NOV29a | PSGVDFLIFQVSVKMKGQRPLEHDGETEGSGLDESNPIAHLKEPPGAQLRTSALMEAEVG |
| NOV29b | ------------------------------------------------------------ |
| NOV29c | ------------------------------------------------------------ |
| NOV29d | ------------------------------------------------------------ |
| NOV29e | ------------------------------------------------------------ |
| NOV29f | ------------------------------------------------------------ |
| NOV29g | ------------------------------------------------------------ |
| NOV29h | ------------------------------------------------------------ |
| NOV29i | ------------------------------------------------------------ |
| NOV29j | ------------------------------------------------------------ |
| NOV29k | ------------------------------------------------------------ |
| NOV29l | ------------------------------------------------------------ |
| NOV29m | ------------------------------------------------------------ |
| NOV29n | ------------------------------------------------------------ |
| NOV29o | ------------------------------------------------------------ |
| NOV29p | ------------------------------------------------------------ |
| NOV29q | ------------------------------------------------------------ |
| NOV29r | ------------------------------------------------------------ |
| NOV29s | ------------------------------------------------------------ |
| NOV29t | ------------------------------------------------------------ |
| NOV29u | ------------------------------------------------------------ |
| NOV29v | ------------------------------------------------------------ |
| NOV29w | ------------------------------------------------------------ |
| NOV29x | ------------------------------------------------------------ |
| NOV29y | ------------------------------------------------------------ |
| NOV29z | PSGVDFLIFQVSVKMKGQRPLEHDGETEGSGLDESNPIAHLKEPPGAQLRTSALMEAEVG |
| NOV29aa | PSGVDFLIFQVSVKMKGQRPLEHDGETEGSGLDESNPIAHLKEPPGAQLRTSALMEAEVG |
| NOV29ab | ------------------------------------------------------------ |
| NOV29ac | ------------------------------------------------------------ |
| NOV29ad | ------------------------------------------------------------ |
| NOV29ae | ------------------------------------------------------------ |
| NOV29af | ------------------------------------------------------------ |
| NOV29ag | ------------------------------------------------------------ |
| NOV29a | KHTSSTSKRHNYRELTLQRRGDSTHRRFRENRRHFPPSARRIDPQHWAALLEKAKKNAMP |
| NOV29b | ------------------------------------------------------------ |
| NOV29c | ------------------------------------------------------------ |
| NOV29d | ------------------------------------------------------------ |
| NOV29e | ------------------------------------------------------------ |
| NOV29f | ------------------------------------------------------------ |
| NOV29g | ------------------------------------------------------------ |
| NOV29h | ------------------------------------------------------------ |
| NOV29i | ------------------------------------------------------------ |
| NOV29j | ------------------------------------------------------------ |
| NOV29k | ------------------------------------------------------------ |
| NOV29l | ------------------------------------------------------------ |
| NOV29m | ------------------------------------------------------------ |
| NOV29n | ------------------------------------------------------------ |
| NOV29o | ------------------------------------------------------------ |
| NOV29p | ------------------------------------------------------------ |
| NOV29q | ------------------------------------------------------------ |
| NOV29r | ------------------------------------------------------------ |
| NOV29s | ------------------------------------------------------------ |
| NOV29t | ------------------------------------------------------------ |
| NOV29u | ------------------------------------------------------------ |
| NOV29v | ------------------------------------------------------------ |
| NOV29w | ------------------------------------------------------------ |
| NOV29x | ------------------------------------------------------------ |
| NOV29y | ------------------------------------------------------------ |
| NOV29z | KHTSSTSKRHNYRELTLQRRGDSTHRRFRENRRHFPPSARRIDPQHWAALLEKAKKNAMP |
| NOV29aa | KHTSSTSKRHNYRELTLQRRGDSTHRRFRENRRHFPPSARRIDPQHWAALLEKAKKNAMP |
| NOV29ab | ------------------------------------------------------------ |
| NOV29ac | ------------------------------------------------------------ |
| NOV29ad | ------------------------------------------------------------ |
| NOV29ae | ------------------------------------------------------------ |
| NOV29af | ------------------------------------------------------------ |
| NOV29ag | ------------------------------------------------------------ |
| NOV29a | DKRENTTVSPPPVVTQLPNIPGEEDDSSGMLALHEEFMVPATKALNLPARTVTADSRTIS |
| NOV29b | ------------------------------------------------------------ |
| NOV29c | ------------------------------------------------------------ |
| NOV29d | ------------------------------------------------------------ |
| NOV29e | ------------------------------------------------------------ |
| NOV29f | ------------------------------------------------------------ |
| NOV29g | ------------------------------------------------------------ |
| NOV29h | ------------------------------------------------------------ |
| NOV29i | ------------------------------------------------------------ |
| NOV29j | ------------------------------------------------------------ |
| NOV29k | ------------------------------------------------------------ |
| NOV29l | ------------------------------------------------------------ |
| NOV29m | ------------------------------------------------------------ |
| NOV29n | ------------------------------------------------------------ |
| NOV29o | ------------------------------------------------------------ |
| NOV29p | ------------------------------------------------------------ |
| NOV29q | ------------------------------------------------------------ |
| NOV29r | ------------------------------------------------------------ |
| NOV29s | ------------------------------------------------------------ |
| NOV29t | ------------------------------------------------------------ |
| NOV29u | ------------------------------------------------------------ |
| NOV29v | ------------------------------------------------------------ |
| NOV29w | ------------------------------------------------------------ |
| NOV29x | ------------------------------------------------------------ |
| NOV29y | ------------------------------------------------------------ |
| NOV29z | DKRENTTVSPPPVVTQLPNIPGEEDDSSGMLALHEEFMVPATKALNLPARTVTADSRTIS |
| NOV29aa | DKRENTTVSPPPVVTQLPNIPGEEDDSSGMLALHEEFMVPATKALNLPARTVTADSRTIS |
| NOV29ab | ------------------------------------------------------------ |
| NOV29ac | ------------------------------------------------------------ |
| NOV29ad | ------------------------------------------------------------ |
| NOV29ae | ------------------------------------------------------------ |
| NOV29af | ------------------------------------------------------------ |
| NOV29ag | ------------------------------------------------------------ |
| NOV29a | DSPMTNINYGTEFSPVVNSQILPPEEPTDFKLSTAIKTTAMSKNINPTMSSQIQGTTNQH |
| NOV29b | ------------------------------------------------------------ |
| NOV29c | ------------------------------------------------------------ |
| NOV29d | ------------------------------------------------------------ |
| NOV29e | ------------------------------------------------------------ |
| NOV29f | ------------------------------------------------------------ |
| NOV29g | ------------------------------------------------------------ |
| NOV29h | ------------------------------------------------------------ |
| NOV29i | ------------------------------------------------------------ |
| NOV29j | ------------------------------------------------------------ |
| NOV29k | ------------------------------------------------------------ |
| NOV29l | ------------------------------------------------------------ |
| NOV29m | ------------------------------------------------------------ |
| NOV29n | ------------------------------------------------------------ |
| NOV29o | ------------------------------------------------------------ |
| NOV29p | ------------------------------------------------------------ |
| NOV29q | ------------------------------------------------------------ |
| NOV29r | ------------------------------------------------------------ |
| NOV29s | ------------------------------------------------------------ |
| NOV29t | ------------------------------------------------------------ |
| NOV29u | ------------------------------------------------------------ |
| NOV29v | ------------------------------------------------------------ |
| NOV29w | ------------------------------------------------------------ |
| NOV29x | ------------------------------------------------------------ |
| NOV29y | ------------------------------------------------------------ |
| NOV29z | DSPMTNINYGTEFSPVVNSQILPPEEPTDFKLSTAIKTTAMSKNINPTMSSQIQGTTNQH |
| NOV29aa | DSPMTNINYGTEFSPVVNSQILPPEEPTDFKLSTAIKTTAMSKNINPTMSSQIQGTTNQH |
| NOV29ab | ------------------------------------------------------------ |
| NOV29ac | ------------------------------------------------------------ |
| NOV29ad | ------------------------------------------------------------ |
| NOV29ae | ------------------------------------------------------------ |
| NOV29af | ------------------------------------------------------------ |
| NOV29ag | ------------------------------------------------------------ |
| NOV29a | SSTVFPLLLGATEFQDSDQMGRGREHFQSRPPITVRTMIKDVNVKMLSSTTNKLLLESVN |
| NOV29b | ------------------------------------------------------------ |
| NOV29c | ------------------------------------------------------------ |
| NOV29d | ------------------------------------------------------------ |
| NOV29e | ------------------------------------------------------------ |
| NOV29f | ------------------------------------------------------------ |
| NOV29g | ------------------------------------------------------------ |
| NOV29h | ------------------------------------------------------------ |
| NOV29i | ------------------------------------------------------------ |
| NOV29j | ------------------------------------------------------------ |
| NOV29k | ------------------------------------------------------------ |
| NOV29l | ------------------------------------------------------------ |
| NOV29m | ------------------------------------------------------------ |
| NOV29n | ------------------------------------------------------------ |
| NOV29o | ------------------------------------------------------------ |
| NOV29p | ------------------------------------------------------------ |
| NOV29q | ------------------------------------------------------------ |
| NOV29r | ------------------------------------------------------------ |
| NOV29s | ------------------------------------------------------------ |
| NOV29t | ------------------------------------------------------------ |
| NOV29u | ------------------------------------------------------------ |
| NOV29v | ------------------------------------------------------------ |
| NOV29w | ------------------------------------------------------------ |
| NOV29x | ------------------------------------------------------------ |
| NOV29y | ------------------------------------------------------------ |
| NOV29z | SSTVFPLLLGATEFQDSDQMGRGREHFQSRPPITVRTMIKDVNVKNLSSTTNKLLLESVN |
| NOV29aa | SSTVFPLLLGATEFQDSDQMGRGREHFQSRPPITVRTMIKDVNVKNLSSTTNKLLLESVN |
| NOV29ab | ------------------------------------------------------------ |
| NOV29ac | ------------------------------------------------------------ |
| NOV29ad | ------------------------------------------------------------ |
| NOV29ae | ------------------------------------------------------------ |
| NOV29af | ------------------------------------------------------------ |
| NOV29ag | ------------------------------------------------------------ |
| NOV29a | TTNSHQTSVREVSEPRHNHFYSHTTQILSTSTFPSDPHTAAHSQFPIPRNSTVNIPLFRR |
| NOV29b | ------------------------------------------------------------ |
| KOV29c | ------------------------------------------------------------ |
| NOV29d | ------------------------------------------------------------ |
| NOV29e | ------------------------------------------------------------ |
| NOV29f | ------------------------------------------------------------ |
| NOV29g | ------------------------------------------------------------ |
| NOV29h | ------------------------------------------------------------ |
| NOV29i | ------------------------------------------------------------ |
| NOV29j | ------------------------------------------------------------ |
| NOV29k | ------------------------------------------------------------ |
| NOV29l | ------------------------------------------------------------ |
| NOV29m | ------------------------------------------------------------ |
| NOV29n | ------------------------------------------------------------ |
| NOV29o | ------------------------------------------------------------ |
| NOV29p | ------------------------------------------------------------ |
| NOV29q | ------------------------------------------------------------ |
| NOV29r | ------------------------------------------------------------ |
| NOV29s | ------------------------------------------------------------ |
| NOV29t | ------------------------------------------------------------ |
| NOV29u | ------------------------------------------------------------ |
| NOV29v | ------------------------------------------------------------ |
| NOV29w | ------------------------------------------------------------ |
| NOV29x | ------------------------------------------------------------ |
| NOV29y | ------------------------------------------------------------ |
| NOV29z | TTNSHQTSVREVSEPRHNHFYSHTTQILSTSTFPSDPHTAAHSQFPIPRNSTVNIPLFRR |
| NOV29aa | TTNSHQTSVREVSEPRENHFYSHTTQILSTSTFPSDPHTAAHSQFPIPRNSTVNIPLFRR |
| NOV29ab | ------------------------------------------------------------ |
| NOV29ac | ------------------------------------------------------------ |
| NOV29ad | ------------------------------------------------------------ |
| NOV29ae | ------------------------------------------------------------ |
| NOV29af | ------------------------------------------------------------ |
| NOV29ag | ------------------------------------------------------------ |
| NOV29a | FGRQRKIGGRGRIISPYRTPVLRRHRYSIFRSTTRGSSEKSTTAFSATVLNVTCLSCLPR |
| NOV29b | ------------------------------------------------------------ |
| NOV29c | ------------------------------------------------------------ |
| NOV29d | ------------------------------------------------------------ |
| NOV29e | ------------------------------------------------------------ |
| NOV29f | ------------------------------------------------------------ |
| NOV29g | ------------------------------------------------------------ |
| NOV29h | ------------------------------------------------------------ |
| NOV29i | ------------------------------------------------------------ |
| NOV29j | ------------------------------------------------------------ |
| NOV29k | ------------------------------------------------------------ |
| NOV29l | ------------------------------------------------------------ |
| NOV29m | ------------------------------------------------------------ |
| NOV29n | ------------------------------------------------------------ |
| NOV29o | ------------------------------------------------------------ |
| NOV29p | ------------------------------------------------------------ |
| NOV29q | ------------------------------------------------------------ |
| NOV29r | ------------------------------------------------------------ |
| NOV29s | ------------------------------------------------------------ |
| NOV29t | ------------------------------------------------------------ |
| NOV29u | ------------------------------------------------------------ |
| NOV29v | ------------------------------------------------------------ |
| NOV29w | ------------------------------------------------------------ |
| NOV29x | ------------------------------------------------------------ |
| NOV29y | ------------------------------------------------------------ |
| NOV29z | FGRQRKIGGRGRIISPYRTPVLRRHRYSIFRSTTRGSSEKSTTAFSATVLNVTCLSCLPR |
| NOV29aa | FGRQRKIGGRGRIISPYRYPVLRRHRYSIFRSTTRGSSEKSTTAFSATVLNVTCLSCLPR |
| NOV29ab | ------------------------------------------------------------ |
| NOV29ac | ------------------------------------------------------------ |
| NOV29ad | ------------------------------------------------------------ |
| NOV29ae | ------------------------------------------------------------ |
| NOV29af | ------------------------------------------------------------ |
| NOV29ag | ------------------------------------------------------------ |
| NOV29a | ERLTTATAALSFPSAAPITFPKADIARVPSEESTTLVQNPLLLLENKPSVEKTTPTIKYF |
| NOV29b | ------------------------------------------------------------ |
| NOV29c | ------------------------------------------------------------ |
| NOV29d | ------------------------------------------------------------ |
| NOV29e | ------------------------------------------------------------ |
| NOV29f | ------------------------------------------------------------ |
| NOV29g | ------------------------------------------------------------ |
| NOV29h | ------------------------------------------------------------ |
| NOV29i | ------------------------------------------------------------ |
| NOV29j | ------------------------------------------------------------ |
| NOV29k | ------------------------------------------------------------ |
| NOV29l | ------------------------------------------------------------ |
| NOV29m | ------------------------------------------------------------ |
| NOV29n | ------------------------------------------------------------ |
| NOV29o | ------------------------------------------------------------ |
| NOV29p | ------------------------------------------------------------ |
| NOV29q | ------------------------------------------------------------ |
| NOV29r | ------------------------------------------------------------ |
| NOV29s | ------------------------------------------------------------ |
| NOV29t | ------------------------------------------------------------ |
| NOV29u | ------------------------------------------------------------ |
| NOV29v | ------------------------------------------------------------ |
| NOV29w | ------------------------------------------------------------ |
| NOV29x | ------------------------------------------------------------ |
| NOV29y | ------------------------------------------------------------ |
| NOV29z | ERLTTATAALSFPSAAPITFPKADIARVPSEESTTLVQNPLLLLENKPSVEKTTPTIKYF |
| NOV29aa | ERLTTATAALSFPSAAPITFPKADIARVPSEESTTLVQNPLLLLENKPSVEKTTPTIKYF |
| NOV29ab | ------------------------------------------------------------ |
| NOV29ac | ------------------------------------------------------------ |
| NOV29ad | ------------------------------------------------------------ |
| NOV29ae | ------------------------------------------------------------ |
| NOV29af | ------------------------------------------------------------ |
| NOV29ag | ------------------------------------------------------------ |
| NOV29a | RTEISQVTPTGAVMTYAPTSIPMEKTHKVNASYPRVSSTNEAKRDSVITSSLSGAITKPP |
| NOV29b | ------------------------------------------------------------ |
| NOV29c | ------------------------------------------------------------ |
| NOV29d | ------------------------------------------------------------ |
| NOV29e | ------------------------------------------------------------ |
| NOV29f | ------------------------------------------------------------ |
| NOV29g | ------------------------------------------------------------ |
| NOV29h | ------------------------------------------------------------ |
| NOV29i | ------------------------------------------------------------ |
| NOV29j | ------------------------------------------------------------ |
| NOV29k | ------------------------------------------------------------ |
| NOV29l | ------------------------------------------------------------ |
| NOV29m | ------------------------------------------------------------ |
| NOV29n | ------------------------------------------------------------ |
| NOV29o | ------------------------------------------------------------ |
| NOV29p | ------------------------------------------------------------ |
| NOV29q | ------------------------------------------------------------ |
| NOV29r | ------------------------------------------------------------ |
| NOV29s | ------------------------------------------------------------ |
| NOV29t | ------------------------------------------------------------ |
| NOV29u | ------------------------------------------------------------ |
| NOV29v | ------------------------------------------------------------ |
| NOV29w | ------------------------------------------------------------ |
| NOV29x | ------------------------------------------------------------ |
| NOV29y | ------------------------------------------------------------ |
| NOV29z | RTEISQVTPTGAVMTYAPTSIPMEKTHKVNASYPRVSSTNEAKRDSVITSSLSGAITKPP |
| NOV29aa | RTEISQVTPTGAVMTYAPTSIPMEKTHKVNASYPRVSSTNEAKRDSVITSSLSGAITKPP |
| NOV29ab | ------------------------------------------------------------ |
| NOV29ac | ------------------------------------------------------------ |
| NOV29ad | ------------------------------------------------------------ |
| NOV29ae | ------------------------------------------------------------ |
| NOV29af | ------------------------------------------------------------ |
| NOV29ag | ------------------------------------------------------------ |
| NOV29a | MTIIAITRFSRRKIPWQQNFVNNHNPKGRLRNQHKVSLQKSTAVMLPKTSPALPQRQSLP |
| NOV29b | ------------------------------------------------------------ |
| NOV29c | ------------------------------------------------------------ |
| NOV29d | ------------------------------------------------------------ |
| NOV29e | ------------------------------------------------------------ |
| NOV29f | ------------------------------------------------------------ |
| NOV29g | ------------------------------------------------------------ |
| NOV29h | ------------------------------------------------------------ |
| NOV29i | ------------------------------------------------------------ |
| NOV29j | ------------------------------------------------------------ |
| NOV29k | ------------------------------------------------------------ |
| NOV29l | ------------------------------------------------------------ |
| NOV29m | ------------------------------------------------------------ |
| NOV29n | ------------------------------------------------------------ |
| NOV29o | ------------------------------------------------------------ |
| NOV29p | ------------------------------------------------------------ |
| NOV29q | ------------------------------------------------------------ |
| NOV29r | ------------------------------------------------------------ |
| NOV29s | ------------------------------------------------------------ |
| NOV29t | ------------------------------------------------------------ |
| NOV29u | ------------------------------------------------------------ |
| NOV29v | ------------------------------------------------------------ |
| NOV29w | ------------------------------------------------------------ |
| NOV29x | ------------------------------------------------------------ |
| NOV29y | ------------------------------------------------------------ |
| NOV29z | MTIIAITRFSRRKIPWQQNFVNNHNPKGRLRNQHKVSLQKSTAVMLPKTSPALPQRQSLP |
| NOV29aa | MTIIAITRFSRRKIPWQQNFVNNHNPKGRLRNQHKVSLQKSTAVMLPKTSPALPQRQSLP |
| NOV29ab | ------------------------------------------------------------ |
| NOV29ac | ------------------------------------------------------------ |
| NOV29ad | ------------------------------------------------------------ |
| NOV29ae | ------------------------------------------------------------ |
| NOV29af | ------------------------------------------------------------ |
| NOV29ag | ------------------------------------------------------------ |
| NOV29a | SHHTTTKTHNPGSLPTKKELPFPPLNPMLPSIISKDSSTKSIISTQTAIPATTPTFPASV |
| NOV29b | ------------------------------------------------------------ |
| NOV29c | ------------------------------------------------------------ |
| NOV29d | ------------------------------------------------------------ |
| NOV29e | ------------------------------------------------------------ |
| NOV29f | ------------------------------------------------------------ |
| NOV29g | ------------------------------------------------------------ |
| NOV29h | ------------------------------------------------------------ |
| NOV29i | ------------------------------------------------------------ |
| NOV29j | ------------------------------------------------------------ |
| NOV29k | ------------------------------------------------------------ |
| NOV29l | ------------------------------------------------------------ |
| NOV29m | ------------------------------------------------------------ |
| NOV29n | ------------------------------------------------------------ |
| NOV29o | ------------------------------------------------------------ |
| NOV29p | ------------------------------------------------------------ |
| NOV29q | ------------------------------------------------------------ |
| NOV29r | ------------------------------------------------------------ |
| NOV29s | ------------------------------------------------------------ |
| NOV29t | ------------------------------------------------------------ |
| NOV29u | ------------------------------------------------------------ |
| NOV29v | ------------------------------------------------------------ |
| NOV29w | ------------------------------------------------------------ |
| NOV29x | ------------------------------------------------------------ |
| NOV29y | ------------------------------------------------------------ |
| NOV29z | SHHTTTKTHNPGSLPTKKELPFPPLNPMLPSIISKDSSTKSIISTQTAIPATTPTFPASV |
| NOV29aa | SHHTTTKTHNPGSLPTKKELPFPPLNPMLPSIISKDSSTKSIISTQTAIPATTPTFPASV |
| NOV29ab | ------------------------------------------------------------ |
| NOV29ac | ------------------------------------------------------------ |
| NOV29ad | ------------------------------------------------------------ |
| NOV29ae | ------------------------------------------------------------ |
| NOV29af | ------------------------------------------------------------ |
| NOV29ag | ------------------------------------------------------------ |
| NOV29a | ITYETQTERSRAQTIQREQEPQKKNRTDPNISPDQSSGFTTPTAMTPPVLTTAETSVKPS |
| NOV29b | ------------------------------------------------------------ |
| NOV29c | ------------------------------------------------------------ |
| NOV29d | ------------------------------------------------------------ |
| NOV29e | ------------------------------------------------------------ |
| NOV29f | ------------------------------------------------------------ |
| NOV29g | ------------------------------------------------------------ |
| NOV29h | ------------------------------------------------------------ |
| NOV29i | ------------------------------------------------------------ |
| NOV29j | ------------------------------------------------------------ |
| NOV29k | ------------------------------------------------------------ |
| NOV29l | ------------------------------------------------------------ |
| NOV29m | ------------------------------------------------------------ |
| NOV29n | ------------------------------------------------------------ |
| NOV29o | ------------------------------------------------------------ |
| NOV29p | ------------------------------------------------------------ |
| NOV29q | ------------------------------------------------------------ |
| NOV29r | ------------------------------------------------------------ |
| NOV29s | ------------------------------------------------------------ |
| NOV29t | ------------------------------------------------------------ |
| NOV29u | ------------------------------------------------------------ |
| NOV29v | ------------------------------------------------------------ |
| NOV29w | ------------------------------------------------------------ |
| NOV29x | ------------------------------------------------------------ |
| NOV29y | ------------------------------------------------------------ |
| NOV29z | ITYETQTERSEAQTIQREQEPQKKNRTDPNISPDQSSGFTTPTAMTPPVLTTAETSVKPS |
| NOV29aa | ITYETQTERSRAQTIQREQEPQKKNRTDPNISPDQSSGFTTPTAMTPPVLTTAETSVKPS |
| NOV29ab | ------------------------------------------------------------ |
| NOV29ac | ------------------------------------------------------------ |
| NOV29ad | ------------------------------------------------------------ |
| NOV29ae | ------------------------------------------------------------ |
| NOV29af | ------------------------------------------------------------ |
| NOV29ag | ------------------------------------------------------------ |
| NOV29a | VSAFTHSPPENTTGISSTISFHSRTLNLTDVIEELAQASTQTLKSTIASETTLSSKSHQS |
| NOV29b | ------------------------------------------------------------ |
| NOV29c | ------------------------------------------------------------ |
| NOV29d | ------------------------------------------------------------ |
| NOV29e | ------------------------------------------------------------ |
| NOV29f | ------------------------------------------------------------ |
| NOV29g | ------------------------------------------------------------ |
| NOV29h | ------------------------------------------------------------ |
| NOV29i | ------------------------------------------------------------ |
| NOV29j | ------------------------------------------------------------ |
| NOV29k | ------------------------------------------------------------ |
| NOV29l | ------------------------------------------------------------ |
| NOV29m | ------------------------------------------------------------ |
| NOV29n | ------------------------------------------------------------ |
| NOV29o | ------------------------------------------------------------ |
| NOV29p | ------------------------------------------------------------ |
| NOV29q | ------------------------------------------------------------ |
| NOV29r | ------------------------------------------------------------ |
| NOV29s | ------------------------------------------------------------ |
| NOV29t | ------------------------------------------------------------ |
| NOV29u | ------------------------------------------------------------ |
| NOV29v | ------------------------------------------------------------ |
| NOV29w | ------------------------------------------------------------ |
| NOV29x | ------------------------------------------------------------ |
| NOV29y | ------------------------------------------------------------ |
| NOV29z | VSAFTHSPPENTTGISSTISFHSRTLNLTDVIEELAQASTQTLKSTIASETTLSSKSHQS |
| NOV29aa | VSAFTHSPPENTTGISSTISFHSRTLNLTDVIEELAQASTQTLKSTIASETTLSSKSHQS |
| NOV29ab | ------------------------------------------------------------ |
| NOV29ac | ------------------------------------------------------------ |
| NOV29ad | ------------------------------------------------------------ |
| NOV29ae | ------------------------------------------------------------ |
| NOV29af | ------------------------------------------------------------ |
| NOV29ag | ------------------------------------------------------------ |
| NOV29a | TTTRKAIIRHSTIPPFLSSSATLMPVPISPPFTQPAVTDNVATPISGLMTNTVVKLHESS |
| NOV29b | ------------------------------------------------------------ |
| NOV29c | ------------------------------------------------------------ |
| NOV29d | ------------------------------------------------------------ |
| NOV29e | ------------------------------------------------------------ |
| NOV29f | ------------------------------------------------------------ |
| NOV29g | ------------------------------------------------------------ |
| NOV29h | ------------------------------------------------------------ |
| NOV29i | ------------------------------------------------------------ |
| NOV29j | ------------------------------------------------------------ |
| NOV29k | ------------------------------------------------------------ |
| NOV29l | ------------------------------------------------------------ |
| NOV29m | ------------------------------------------------------------ |
| NOV29n | ------------------------------------------------------------ |
| NOV29o | ------------------------------------------------------------ |
| NOV29p | ------------------------------------------------------------ |
| NOV29q | ------------------------------------------------------------ |
| NOV29r | ------------------------------------------------------------ |
| NOV29s | ------------------------------------------------------------ |
| NOV29t | ------------------------------------------------------------ |
| NOV29u | ------------------------------------------------------------ |
| NOV29v | ------------------------------------------------------------ |
| NOV29w | ------------------------------------------------------------ |
| NOV29x | ------------------------------------------------------------ |
| NOV29y | ------------------------------------------------------------ |
| NOV29z | TTTRKAIIRHSTIPPFLSSSATLMPVPISPPFTQRAVTDNVATPISGLMTNTVVKLHESS |
| NOV29aa | TTTRKAIIRHSTIPPFLSSSATLMPVPISPPFTQRAVTDNVATPISGLMTNTVVKLHESS |
| NOV29ab | ------------------------------------------------------------ |
| NOV29ac | ------------------------------------------------------------ |
| NOV29ad | ------------------------------------------------------------ |
| NOV29ae | ------------------------------------------------------------ |
| NOV29af | ------------------------------------------------------------ |
| NOV29ag | ------------------------------------------------------------ |
| NOV29a | RHNAKPQQLVAEVATSFKVHPNAKFTIGTTHFIYSNLLHSTPMPALTTVKSQNSKLTPSP |
| NOV29b | ------------------------------------------------------------ |
| NOV29c | ------------------------------------------------------------ |
| NOV29d | ------------------------------------------------------------ |
| NOV29e | ------------------------------------------------------------ |
| NOV29f | ------------------------------------------------------------ |
| NOV29g | ------------------------------------------------------------ |
| NOV29h | ------------------------------------------------------------ |
| NOV29i | ------------------------------------------------------------ |
| NOV29j | ------------------------------------------------------------ |
| NOV29k | ------------------------------------------------------------ |
| NOV29l | ------------------------------------------------------------ |
| NOV29m | ------------------------------------------------------------ |
| NOV29n | ------------------------------------------------------------ |
| NOV29o | ------------------------------------------------------------ |
| NOV29p | ------------------------------------------------------------ |
| NOV29q | ------------------------------------------------------------ |
| NOV29r | ------------------------------------------------------------ |
| NOV29s | ------------------------------------------------------------ |
| NOV29t | ------------------------------------------------------------ |
| NOV29u | ------------------------------------------------------------ |
| NOV29v | ------------------------------------------------------------ |
| NOV29w | ------------------------------------------------------------ |
| NOV29x | ------------------------------------------------------------ |
| NOV29y | ------------------------------------------------------------ |
| NOV29z | RHNAKPQQLVAEVATSPKVHPNAKFTIGTTHFIYSNLLHSTPMPALTTVKSQNSKLTPSP |
| NOV29aa | RHNAKPQQLVAEVATSFKVHPNAKFTIGTTHFIYSNLLHSTPMPALTTVKSQNSKLTPSP |
| NOV29ab | ------------------------------------------------------------ |
| NOV29ac | ------------------------------------------------------------ |
| NOV29ad | ------------------------------------------------------------ |
| NOV29ae | ------------------------------------------------------------ |
| NOV29af | ------------------------------------------------------------ |
| NOV29ag | ------------------------------------------------------------ |
| NOV29a | WAENQFWHKPYSEIAEKGKKPEVSMLATTGLSEATTLVSDWDGQKNTKKSDFDKKPVQEA |
| NOV29b | ------------------------------------------------------------ |
| NOV29c | ------------------------------------------------------------ |
| NOV29d | ------------------------------------------------------------ |
| NOV29e | ------------------------------------------------------------ |
| NOV29f | ------------------------------------------------------------ |
| NOV29g | ------------------------------------------------------------ |
| NOV29h | ------------------------------------------------------------ |
| NOV29i | ------------------------------------------------------------ |
| NOV29j | ------------------------------------------------------------ |
| NOV29k | ------------------------------------------------------------ |
| NOV29l | ------------------------------------------------------------ |
| NOV29m | ------------------------------------------------------------ |
| NOV29n | ------------------------------------------------------------ |
| NOV29o | ------------------------------------------------------------ |
| NOV29p | ------------------------------------------------------------ |
| NOV29q | ------------------------------------------------------------ |
| NOV29r | ------------------------------------------------------------ |
| NOV29s | ------------------------------------------------------------ |
| NOV29t | ------------------------------------------------------------ |
| NOV29u | ------------------------------------------------------------ |
| NOV29v | ------------------------------------------------------------ |
| NOV29w | ------------------------------------------------------------ |
| NOV29x | ------------------------------------------------------------ |
| NOV29y | ------------------------------------------------------------ |
| NOV29z | WAENQFWHKPYSEIAEKGKKPEVSMLATTGLSEATTLVSDWDGQKNTKKSDFDKKPVQEA |
| NOV29aa | WAENQFWHKPYSEIAEKGKKPEVSMLATTGLSEATTLVSDWDGQKNTKKSDFDKKPVQEA |
| NOV29ab | ------------------------------------------------------------ |
| NOV29ac | ------------------------------------------------------------ |
| NOV29ad | ------------------------------------------------------------ |
| NOV29ae | ------------------------------------------------------------ |
| NOV29af | ------------------------------------------------------------ |
| NOV29ag | ------------------------------------------------------------ |
| NOV29a | TTSKLLPFDSLSRYIFEKPRIVGGKAASFTIPANSDAFLPCEAVGNPLPTIHWTRVPSGM |
| NOV29b | ------------------------------------------------------------ |
| NOV29c | ------------------------------------------------------------ |
| NOV29d | ------------------------------------------------------------ |
| NOV29e | ------------------------------------------------------------ |
| NOV29f | ------------------------------------------------------------ |
| NOV29g | ------------------------------------------------------------ |
| NOV29h | ------------------------------------------------------------ |
| NOV29i | ------------------------------------------------------------ |
| NOV29j | ------------------------------------------------------------ |
| NOV29k | ------------------------------------------------------------ |
| NOV29l | ------------------------------------------------------------ |
| NOV29m | ------------------------------------------------------------ |
| NOV29n | ------------------------------------------------------------ |
| NOV29o | ------------------------------------------------------------ |
| NOV29p | ------------------------------------------------------------ |
| NOV29q | ------------------------------------------------------------ |
| NOV29r | ------------------------------------------------------------ |
| NOV29s | ------------------------------------------------------------ |
| NOV29t | ------------------------------------------------------------ |
| NOV29u | ------------------------------------------------------------ |
| NOV29v | ------------------------------------------------------------ |
| NOV29w | ------------------------------------------------------------ |
| NOV29x | ------------------------------TLENSDAFLPCEAVGNPLPTIHWTRVPS-- |
| NOV29y | ------------------------------TRSNSDAFLPCEAVGNPLPTIHWTRVPS-- |
| NOV29z | TTSKLLPFDSLSRYIFEKPRIVGGKAASFTIPANSDAFLPCEAVGNPLPTIHWTRVPSGM |
| NOV29aa | TTSKLLPFDSLSRYIFEKPRIVGGKAASFTIPANSDAFLPCEAVGNPLPTIHWTRVPSGM |
| NOV29ab | ------------------------------------------------------------ |
| NOV29ac | ------------------------------------------------------------ |
| NOV29ad | ------------------------------------------------------------ |
| NOV29ae | ---------------------------------NSDAFLPCEAVGNPLPTIHWTRVPS-- |
| NOV29af | ---------------------------------NSDAFLPCEAVGNPLPTIHWTRVPS-- |
| NOV29ag | ------------------------------------------------------------ |
| NOV29a | SGLDLSKRKQNSRVQVLPNGTLSIQRVEIQDRGQYLCSASNLFGTDHLHVTLSVVSYPPR |
| NOV29b | ------------------------------------------------------------ |
| NOV29c | ------------------------------------------------------------ |
| NOV29d | ------------------------------------------------------------ |
| NOV29e | ------------------------------------------------------------ |
| NOV29f | ------------------------------------------------------------ |
| NOV29g | ------------------------------------------------------------ |
| NOV29h | ------------------------------------------------------------ |
| NOV29i | ------------------------------------------------------------ |
| NOV29j | ------------------------------------------------------------ |
| NOV29k | ------------------------------------------------------------ |
| NOV29l | ------------------------------------------------------------ |
| NOV29m | ------------------------------------------------------------ |
| NOV29n | ------------------------------------------------------------ |
| NOV29o | ------------------------------------------------------------ |
| NOV29p | ------------------------------------------------------------ |
| NOV29q | ------------------------------------------------------------ |
| NOV29r | ------------------------------------------------------------ |
| NOV29s | ------------------------------------------------------------ |
| NOV29t | ------------------------------------------------------------ |
| NOV29u | ------------------------------------------------------------ |
| NOV29v | ------------------------------------------------------------ |
| NOV29w | ------------------------------------------------------------ |
| NOV29x | -GLDLSKRKQNSRVQVLPNGTLSIQRVEIQDRGQYLCSASNLFGTDHLHVTLSVVSYPPR |
| NOV29y | -GLDLSKRKQNSRVQVLPNGTLSIQRVEIQDRGQYLCSASNLFGTDHLHVTLSVVSYPPR |
| NOV29z | SGLDLSKRKQNSRVQVLPNGTLSIQRVEIQDRGQYLCSASNLFGTDHLHVTLSVVSYPPR |
| NOV29aa | SGLDLSKRKQNSRVQVLPNGTLSIQRVEIQDRGQYLCSASNLFGTDHLHVTLSVVSYPPR |
| NOV29ab | ------------------------------------------------------------ |
| NOV29ac | ------------------------------------------------------------ |
| NOV29ad | ------------------------------------------------------------ |
| NOV29ae | -GLDLSKRKQNSRVQVLPNGTLSIQRVEIQDRGQYLCSASNLFGTDHLHVTLSVVSYPPR |
| NOV29af | -GLDLSKRKQNSRVQVLPNGTLSIQRVEIQDRGQYLCSASNLFGTDHLHVTLSVVSYPPR |
| NOV29ag | ------------------------------------------------------------ |
| NOV29a | ILERRTKEITVHSGSTVELKCRAEGRPSPTVTWILANQTVVSESSQGSRQAVVTVDGTLV |
| NOV29b | ------------------------------------------------------------ |
| NOV29c | ------------------------------------------------------------ |
| NOV29d | ------------------------------------------------------------ |
| NOV29e | ------------------------------------------------------------ |
| NOV29f | ------------------------------------------------------------ |
| NOV29g | ------------------------------------------------------------ |
| NOV29h | ------------------------------------------------------------ |
| NOV29i | ------------------------------------------------------------ |
| NOV29j | ------------------------------------------------------------ |
| NOV29k | ------------------------------------------------------------ |
| NOV29l | ------------------------------------------------------------ |
| NOV29m | ------------------------------------------------------------ |
| NOV29n | ------------------------------------------------------------ |
| NOV29o | ------------------------------------------------------------ |
| NOV29p | ------------------------------------------------------------ |
| NOV29q | ------------------------------------------------------------ |
| NOV29r | ------------------------------------------------------------ |
| NOV29s | ------------------------------------------------------------ |
| NOV29t | ------------------------------------------------------------ |
| NOV29u | ------------------------------------------------------------ |
| NOV29v | ------------------------------------------------------------ |
| NOV29w | ------------------------------------------------------------ |
| NOV29x | ILERRTKEITVHSGSTVELKCRAEGRPSPTVTWILANQTVVSESSQGSRQAVVTVDGTLV |
| NOV29y | ILERRTKEITVHSGSTVELKCRAEGRPSPTVTWILANQTVVSESSQGSRQAVVTVDGTLV |
| NOV29z | ILERRTKEITVHSGSTVELKCRAEGRPSPTVTWILANQTVVSESSQGSRQAVVTVDGTLV |
| NOV29aa | ILERRTKEITVHSGSTVELKCRAEGRPSPTVTWILANQTVVSESSQGSRQAVVTVDGTLV |
| NOV29ab | ------------------------------------------------------------ |
| NOV29ac | ------------------------------------------------------------ |
| NOV29ad | ------------------------------------------------------------ |
| NOV29ae | ILERRTKEITVHSGSTVELKCRAEGRPSPTVTWILANQTVVSESSQGSRQAVVTVDGTLV |
| NOV29af | ILERRTKEITVHSGSTVELKCRAEGRPSPTVTWILANQTVVSESSQGSRQAVVTVDGTLV |
| NOV29ag | ------------------------------------------------------------ |
| NOV29a | LHNLSIYDRGFYKCVASNPGGQDSLLVKIQVIAAPPVILEQRRQVIVGTWGESLKLPCTA |
| NOV29b | ------------------------------------------------------------ |
| NOV29c | ------------------------------------------------------------ |
| NOV29d | ------------------------------------------------------------ |
| NOV29e | ------------------------------------------------------------ |
| NOV29f | ------------------------------------------------------------ |
| NOV29g | ------------------------------------------------------------ |
| NOV29h | ------------------------------------------------------------ |
| NOV29i | ------------------------------------------------------------ |
| NOV29j | ------------------------------------------------------------ |
| NOV29k | ------------------------------------------------------------ |
| NOV29l | ------------------------------------------------------------ |
| NOV29m | ------------------------------------------------------------ |
| NOV29n | ------------------------------------------------------------ |
| NOV29o | ------------------------------------------------------------ |
| NOV29p | ------------------------------------------------------------ |
| NOV29q | ------------------------------------------------------------ |
| NOV29r | ------------------------------------------------------------ |
| NOV29s | ------------------------------------------------------------ |
| NOV29t | ------------------------------------------------------------ |
| NOV29u | ------------------------------------------------------------ |
| NOV29v | ------------------------------------------------------------ |
| NOV29w | ------------------------------------------------------------ |
| NOV29x | LHNLSIYDRGFYKCVASNPGGQDSLLVKIQVIAAPPVILEQRRQVIVGTWGESLKLPCTA |
| NOV29y | LHNLSIYDRGFYKCVASNPGGQDSLLVKIQVIAAPPVILEQRRQVIVGTWGESLKLPCTA |
| NOV29z | LHNLSIYDRGFYKCVASNPGGQDSLLVKIQVIAAPPVILEQRRQVIVGTWGESLKLPCTA |
| NOV29aa | LHNLSIYDRGFYKCVASNPGGQDSLLVKIQVIAAPPVILEQPRQVIVGTWGESLKLPCTA |
| NOV29ab | ------------------------------------------------------------ |
| NOV29ac | ------------------------------------------------------------ |
| NOV29ad | ------------------------------------------------------------ |
| NOV29ae | LHNLSIYDRGFYKCVASNPGGQDSLLVKIQVIAAPPVILEQRRQVIVGTWGESLKLPCTA |
| NOV29af | LHNLSIYDRGFYKCVASNPGGQDSLLVKIQVIAAPPVILEQRRQVIVGTWGESLKLPCTA |
| NOV29ag | ------------------------------------------------------------ |
| NOV29a | KGTPQPSVYWVLSDGTEVKPLQFTNSKLFLFSNGTLYIRNLASSDRGTYECIATSSTGSE |
| NOV29b | ------------------------------------------------------------ |
| NOV29c | ------------------------------------------------------------ |
| NOV29d | ------------------------------------------------------------ |
| NOV29e | ------------------------------------------------------------ |
| NOV29f | ------------------------------------------------------------ |
| NOV29g | ------------------------------------------------------------ |
| NOV29h | ------------------------------------------------------------ |
| NOV29i | ------------------------------------------------------------ |
| NOV29j | ------------------------------------------------------------ |
| NOV29k | ------------------------------------------------------------ |
| NOV29l | ------------------------------------------------------------ |
| NOV29m | ------------------------------------------------------------ |
| NOV29n | ------------------------------------------------------------ |
| NOV29o | ------------------------------------------------------------ |
| NOV29p | ------------------------------------------------------------ |
| NOV29q | ------------------------------------------------------------ |
| NOV29r | ------------------------------------------------------------ |
| NOV29s | ------------------------------------------------------------ |
| NOV29t | ------------------------------------------------------------ |
| NOV29u | ------------------------------------------------------------ |
| NOV29v | ------------------------------------------------------------ |
| NOV29w | ------------------------------------------------------------ |
| NOV29x | KGTPQPSVYWVLSDGTEVKFLQFTNSKLFLFSNGTLYIRNLASSDRGTYECIATSSTGSE |
| NOV29y | KGTPQPSVYWVLSDGTEVKPLQFTNSKLFLFSNGTLYIRNLASSDRGTYECIATSSTGSE |
| NOV29z | KGTPQPSVYWVLSDGTEVKPLQFTNSKLFLFSNGTLYIRNLASSDRGTYECIATSSTGSE |
| NOV29aa | KGTPQPSVYWVLSDGTEVKPLQFTNSKLFLFSNGTLYIRNLASSDRGTYECIATSSTGSE |
| NOV29ab | ------------------------------------------------------------ |
| NOV29ac | ------------------------------------------------------------ |
| NOV29ad | ------------------------------------------------------------ |
| NOV29ae | KGTPQPSVYWVLSDGTEVKPLQFTNSKLFLFSNGTLYIRNLASSDRGTYECIATSSTGSE |
| NOV29af | KGTPQPSVYWVLSDGTEVKPLQFTNSKLFLFSNGTLYIRNLASSDRGTYECIATSSTGSE |
| NOV29ag | ------------------------------------------------------------ |
| NOV29a | RRVVMLTMEERVTSPRIEAASQKRTEVNFGDKLLLNCSATGEPKPQIMWRLPSKAVVDQQ |
| NOV29b | ------------------------------------------------------------ |
| NOV29c | -------------------GSAAAPFTLEGDKLLLNCSATGEPKPQIMWRLPSKAVVDQQ |
| NOV29d | ------------------------------------------------------------ |
| NOV29e | ------------------------------------------------------------ |
| NOV29f | ------------------------------------------------------------ |
| NOV29g | ------------------------------------------------------------ |
| NOV29h | -------------------GSAAAPFTLEGDKLLLNCSATGEPKPQIMWRLPSKAVVDQQ |
| NOV29i | -------------------GSAAAPFTLEGDKLLLNCSATGEPKPQIMWRLPSKAVVDQQ |
| NOV29j | ------------------------------------------------------------ |
| NOV29k | ------------------------------------------------------------ |
| NOV29l | ------------------------------------------------------------ |
| NOV29m | ------------------------------------------------------------ |
| NOV29n | ------------------------------------------------------------ |
| NOV29o | ------------------------------------------------------------ |
| NOV29p | ------------------------------------------------------------ |
| NOV29q | ------------------------------------------------------------ |
| NOV29r | ------------------------------------------------------------ |
| NOV29s | ------------------------------------------------------------ |
| NOV29t | ------------------------------------------------------------ |
| NOV29u | ------------------------------------------------------------ |
| NOV29v | ------------------------------------------------------------ |
| NOV29w | -------------------GSAAAPFTLEGDKLLLNCSATGEPKPQIMWRLPSKAVVDQQ |
| NOV29x | RRVVMLTMEERVTSPRIEAASQKRTEVNFGDKLLLNCSATGEPKPQIMWRLPSKAVVDQQ |
| NOV29y | RRVVMLTMEERVTSPRIEAASQKRTEVNFGDKLLLNCSATGEPKPQTMWRLPSKAVVDQQ |
| NOV29z | RRVVMLTMEERVTSPRIEAASQKRTEVNFGDKLLLNCSATGEPKPQTMWRLPSKAVVDQQ |
| NOV29aa | RRVVMLTMEERVTSPRIEAASQKRTEVNFGDKLLLNCSATGEPKPQTMWRLPSKAVVDQQ |
| NOV29ab | ------------------------------------------------------------ |
| NOV29ac | -----------------------------GDKLLLNCSATGEPKPQIMWRLPSKAVVDQQ |
| NOV29ad | -----------------------------GDKLLLNCSATGEPKPQIMWRLPSKAVVDQQ |
| NOV29ae | RRVVMLTMEERVTSPRIEAASQKRTEVNFGDKLLLNCSATGEPKPQIMWRLPSKAVVDQQ |
| NOV29af | RRVVMLTMEERVTSPRIEAASQKRTEVNFGDKLLLNCSATGEPKPQIMWRLPSKAVVDQQ |
| NOV29ag | ------------------------------------------------------------ |
| NOV29a | HRVGSWIHVYPNGSLFIGSVTEKDSGVYLCVARNKMGDDLILMHVSLRLKPAKIDHKQYF |
| NOV29b | ------------------------------------------------------------ |
| NOV29c | HRVGSWIHVYPNGSLFIGSVTEKDSGVYLCVARNKMGDDLILMHVSLRLKPAKIDHKQYF |
| NOV29d | ------------------------------------------------------------ |
| NOV29e | ------------------------------------------------------------ |
| NOV29f | ------------------------------------------------------------ |
| NOV29g | ------------------------------------------------------------ |
| NOV29h | HRVGSWIHVYPNGSLFIGSVTEKDSGVYLCVARNKMGDDLILMHVSLRLKPAKIDHKQYF |
| NOV29i | HRVGSWIHVYPNGSLFIGSVTEKDSGVYLCVARNKMGDDLILMHVSLRLKPAKIDHKQYF |
| NOV29j | ------------------------------------------------------------ |
| NOV29k | ------------------------------------------------------------ |
| NOV29l | ------------------------------------------------------------ |
| NOV29m | ------------------------------------------------------------ |
| NOV29n | ------------------------------------------------------------ |
| NOV29o | ------------------------------------------------------------ |
| NOV29p | ------------------------------------------------------------ |
| NOV29q | ------------------------------------------------------------ |
| NOV29r | ------------------------------------------------------------ |
| NOV29s | ------------------------------------------------------------ |
| NOV29t | ------------------------------------------------------------ |
| NOV29u | ------------------------------------------------------------ |
| NOV29v | ------------------------------------------------------------ |
| NOV29w | HRVGSWIHVYPNGSLFIGSVTEKDSGVYLCVARNKMGDDLILMHVSLRLKPAKIDHKQYF |
| NOV29x | HRVGSWIHVYPNGSLFIGSVTEKDSGVYLCVARNKMGDDLILMHVSLRLKPAKIDHKQYF |
| NOV29y | HRVGSWIHVYPNGSLFIGSVTEKDSGVYLCVARNKMGDDLILMHVSLRLKPAKIDHKQYF |
| NOV29z | HRVGSWIHVYPNGSLFIGSVTEKDSGVYLCVARNKMGDDLILMHVSLRLKPAKIDHKQYF |
| NOV29aa | HRVGSWIHVYPNGSLFIGSVTEKDSGVYLCVARNKMGDDLILMHVSLELKPAKIDHKQYF |
| NOV29ab | ------------------------------------------------------------ |
| NOV29ac | HRVGSWIHVYPNGSLFIGSVTEKDSGVYLCVARNKMGDDLILMHVSLRLKPAKIDHKQYF |
| NOV29ad | HRVGSWIHVYPNGSLFIGSVTEKDSGVYLCVARNKMGDDLILMHVSLRLKPAKIDHKQYF |
| NOV29ae | HRVGSWIHVYPNGSLFIGSVTEKDSGVYLCVARNKMGDDLILMHVSLRLKPAKIDHKQYF |
| NOV29af | HRVGSWIHVYPNGSLFIGSVTEKDSGVYLCVARNKMGDDLILMHVSLRLKPAKIDHKQYF |
| NOV29ag | ------------------------------------------------------------ |
| NOV29a | RKQVLHGKDFQVDCKASGSPVPEISWSLPDGTMINNAMQADDSGHRTRRYTLFNNGTLYF |
| NOV29b | ------------------------------------------------------------ |
| NOV29c | RKQVLHGKDFQVDCKASGSPVPEISWSLPDGTMINNAMQADDSGHRTRRYTLFNNGTLYF |
| NOV29d | ------------------------------------------------------------ |
| NOV29e | ------------------------------------------------------------ |
| NOV29f | ------------------------------------------------------------ |
| NOV29g | ------------------------------------------------------------ |
| NOV29h | RKQVLHGKDFQVDCKASGSPVPEISWSLPDGTMINNAMQADDSGHRTRRYTLFNNGTLYF |
| NOV29i | RKQVLHGKDFQVDCKASGSPVPEISWSLPDGTMINNAMQADDSGHRTRRYTLFNNGTLYF |
| NOV29j | ------------------------------------------------------------ |
| NOV29k | ------------------------------------------------------------ |
| NOV29l | ------------------------------------------------------------ |
| NOV29m | ------------------------------------------------------------ |
| NOV29n | ------------------------------------------------------------ |
| NOV29o | ------------------------------------------------------------ |
| NOV29p | ------------------------------------------------------------ |
| NOV29q | ------------------------------------------------------------ |
| NOV29r | ------------------------------------------------------------ |
| NOV29s | ------------------------------------------------------------ |
| NOV29t | ------------------------------------------------------------ |
| NOV29u | ------------------------------------------------------------ |
| NOV29v | ------------------------------------------------------------ |
| NOV29w | RKQVLHGKDFQVDCKASGSPVPEISWSLPDGTMINNAMQADDSGHRTRRYTLFNNGTLYF |
| NOV29x | RKQVLHGKDFQVDCKASGSPVPEISWSLPDGTMINNAMQADDSGHRTRRYTLFNNGTLYF |
| NOV29y | RKQVLHGKDFQVDCKASGSPVPEISWSLPDGTMINNAMQADDSGHRTRRYTLFNNGTLYF |
| NOV29z | RKQVLHGKDFQVDCKASGSPVPEISWSLPDGTMINNAMQADDSGHRTRRYTLFNNGTLYF |
| NOV29aa | RKQVLHGKDFQVDCKASGSPVPEISWSLPDGTMINNAMQADDSGHRTRRYTLFNNGTLYF |
| NOV29ab | ------------------------------------------------------------ |
| NOV29ac | RKQVLHGKDFQVDCKASGSPVPEISWSLPDGTMINNAMQADDSGHRTRRYTLFNNGTLYF |
| NOV29ad | RKQVLHGKDFQVDCKASGSPVPEISWSLPDGTMINNAMQADDSGHRTRRYTLFNNGTLYF |
| NOV29ae | RKQVLHGKDFQVDCKASGSPVPEISWSLPDGTMINNAMQADDSGHRTRRYTLFNNGTLYF |
| NOV29af | RKQVLHGKDFQVDCKASGSPVPEISWSLPDGTMINNAMQADDSGHRTRRYTLFNNGTLYF |
| NOV29ag | ------------------------------------------------------------ |
| NOV29a | NKVGVAEEGDYTCYAQNTLGKDEMKVHLTVITAAPRIRQSNKTNKRIKAGDTAVLDCEVT |
| NOV29b | ------------------------------------------------------------ |
| NOV29c | NKVGVAEEGDYTCYAQNTLGKDEMKVHLTVITAAPRIRQSNKTNKRIKAGDTAVLDCEVT |
| NOV29d | ------------------------------------------------------------ |
| NOV29e | ------------------------------------------------------------ |
| NOV29f | ------------------------------------------------------------ |
| NOV29g | ------------------------------------------------------------ |
| NOV29h | NKVGVAEEGDYTCYAQNTLGKDEMKVHLTVITAAPRIRQSNKTNKRIKAGDTAVLDCEVT |
| NOV29i | NKVGVAEEGDYTCYAQNTLGKDEMKVHLTVITAAPRIRQSNKTNKRIKAGDTAVLDCEVT |
| NOV29j | ----------------------------------------------TLEGDKLLLNCSAT |
| NOV29k | ----------------------------------------------TLEGDKLLLNCSAT |
| NOV29l | ----------------------------------------------TLEGDKLLLNCSAT |
| NOV29m | ----------------------------------------------TLEGDKLLLNCSAT |
| NOV29n | ----------------------------------------------TLEGDKLLLNCSAT |
| NOV29o | ----------------------------------------------TLEGDKLLLNCSAT |
| NOV29p | ----------------------------------------------TLEGDKLLLNCSAT |
| NOV29q | ----------------------------------------------TLEGDKLLLNCSAT |
| NOV29r | -------------------------------------------------------APRPP |
| NOV29s | ----------------------------------------------TLEMKVKGRGITCL |
| NOV29t | ----------------------------------------------TLEMKVKGRGITCL |
| NOV29u | ----------------------------------------------TLEMKVKGRGITCL |
| NOV29v | ----------------------------------------------TLEMKVKGRGITCL |
| NOV29w | NKVGVAEEGDYTCYAQNTLGKDEMKVHLTVITAAPRIRQSNKTNKRIKAGDTAVLDCEVT |
| NOV29x | NKVGVAEEGDYTCYAQNTLGKDEMKVHLTVITAAPRIRQSNKTNKRIKAGDTAVLDCEVT |
| NOV29y | NKVGVAEEGDYTCYAQNTLGKDEMKVHLTVITAAPRIRQSNKTNKRIKAGDTAVLDCEVT |
| NOV29z | NKVGVAEEGDYTCYAQNTLGKDEMKVHLTVITAAPRIRQSNKTNKRIKAGDTAVLDREVT |
| NOV29aa | NKVGVAEEGDYTCYAQNTLGKDEMKVHLTVITAAPRIRQSNKTNKRIKAGDTAVLDCEVT |
| NOV29ab | ------------------------------------------------------------ |
| NOV29ac | NKVGVAEEGDYTCYAQNTLGKDEMKVHLTVITAAPRIRQSNKTNKRIKAGDTAVLDCEVT |
| NOV29ad | NKVGVAEEGDYTCYAQNTLGKDEMKVHLTVITAAPRIRQSNKTNKRIKAGDTAVLDCEVT |
| NOV29ae | NKVGVAEEGDYTCYAQNTLGKDEMKVHLTVITAAPRIRQSNKTNKRIKAGDTAVLDCEVT |
| NOV29af | NKVGVAEEGDYTCYAQNTLGKDEMKVHLTVITAAPRIRQSNKTNKRIKAGDTAVLDCEVT |
| NOV29ag | ------------------------------------------------------------ |
| NOV29a | GDPKPKIFWLLPSNDMISFSIDRYTFHANGSLTINKVKLLDSGEYVCVARNPSGDDTKMY |
| NOV29b | -------------------------------------------TLENVERINLGYNSLVR |
| NOV29c | GDPKPKIFWLLPSNDMISFSIDRYTFHANGSLTINKVKLLDSGEYVCVARNPSGDDTKMY |
| NOV29d | --------------KLACPRRCACYMPTEVHCTFRYLTSIPDSIPPNVERINLGYNSLVR |
| NOV29e | --------------KLACPRRCACYMPTEVHCTFRYLTSIPDSIPPNVERINLGYNSLVR |
| NOV29f | --------------KLACPRRCACYMPTEVHCTFRYLTSIPDSIPPNVERINLGYNSLVR |
| NOV29g | --------------KLACPRRCACYMPTEVHCTFRYLTSIPDSIPPNVERINLGYNSLVR |
| NOV29h | GDPKPKIFWLLPSNDMISFSIDRYTFHANGSLTINKVKLLDSGEYVCVARNPSGDDTKMY |
| NOV29i | GDPKPKIFWLLPSNDMISFSIDRYTFHANGSLTINKVKLLDSGEYVCVARNPSGDDTKMY |
| NOV29j | GEPKPQIMWRLPS-KAVVDQQHRYTFHANGSLTINKVKLLDSGEYVCVARNPSGDDTKMY |
| NOV29k | GEPKPQIMWRLPS-KAVVDQQHRYTFHANGSLTINKVKLLDSGEYVCVARNPSGDDTKMY |
| NOV29l | GEPKPQIMWRLPS-KAVVDQQHRYTFHANGSLTINKVKLLDSGEYVCVARNPSGDDTKMY |
| NOV29m | GEPKPQIMWRLPS-KAVVDQQHRYTFHANGSLTINKVKLLDSGEYVCVARNPSGDDTKMY |
| NOV29n | GEPKPQIMWRLPS-KAVVDQQHRYTFHANGSLTINKVKLLDSGEYVCVARNPSGDDTKMY |
| NOV29o | GEPKPQIMWRLPS-KAVVDQQHRYTFHANGSLTINKVKLLDSGEYVCVARNPSGDDTKMY |
| NOV29p | GEPKPQIMWRLQS-KAVVDQQHRYTFHANGSLTINKVKLLDSGEYVCVARNPSGDDTKMY |
| NOV29q | GEPKHQIMWRLPS-KAVVDQQHRYTFHANGSLTINKVKLLDSGEYVCVARNPSGDDTKMY |
| NOV29r | PSPSSVLAAVPVICTLECPRRCACYMPTEVHCTFRYLTSIPDSIPPNVERINLGYNSLVR |
| NOV29s | LVSFAVICLVATPGGKACPRRCACYMPTEVHCTFRYLTSIPDSIPPNVERINLGYNSLVR |
| NOV29t | LVSFAVICLVATPGGKACPRRCACYMPTEVHCTFRYLTSIPDSIPPNVERINLGYNSLVR |
| NOV29u | LVSFAVICLVATPGGKACPRRCACYMPTEVHCTFRYLTSIPDSIPPNVERINLGYNSLVR |
| NOV29v | LVSFAVICLVATPGGKACPRRCACYMPTEVHCTFRYLTSIPDSIPPNVERINLGYNSLVR |
| NOV29w | GDPKPKIFWLLPSNDMISFSIDRYTFHANGSLTINKVKLLDSGEYVCVARNPSGDDTKMY |
| NOV29x | GDPKPKIFWLLPSNDMISFSIDRYTFHANGSLTINKVKLLDSGEYVCVARNPSGDDTKMY |
| NOV29y | GDPKPKIFWLLPSNDMISFSIDRYTFHANGSLTINKVKLLDSGEYVCVARNPSGDDTKMY |
| NOV29z | GDPKPKIFWLLPS---------------NGSLTINKVKLLDSGEYVCVARNPSGDDTKMY |
| NOV29aa | --------------------------HANGSLTINKVKLLDSGEYVCVARNPSGDDTKMY |
| NOV29ab | ----------------ACPRRCACYMPTEVHCTFRYLTSIPDSIPPNVERINLGYNSLVR |
| NOV29ac | GDPKPKIFWLLPSNDMISFSIDRYTFHANGSLTINKVKLLDSGEYVCVARNPSGDDTKIY |
| NOV29ad | GDPKPKIFWLLPSNDMISFSIDRYTFHANGSLTINKVKLLDSGEYVCVARNPSGDDTKIY |
| NOV29ae | GDPKPKIFWLLPSNDMISFSIDRYTFHANGSLTINKVKLLDSGEYVCVARNPSGDDTKIY |
| NOV29af | GDPKPKIFWLLPSNDMISFSIDRYTFHANGSLTINKVKLLDSGEYVCVARNPSGDDTKIY |
| NOV29ag | ----------------ACPRRCACYMPTEVHCTFRYLTSIPDSIPPNVERINLGYNSLVR |
| NOV29a | KLDVVSKPPLINGLYTNRTVIKATAVRHSKKHFDCPAEGTPSPEVMWIMPDNIFLTAPYY |
| NOV29b | LMETDFSGLTKLELLMLHSNGIHTIPDKTFSDLQALQVLKMSYNKVRKLQKDTFYGLRSL |
| NOV29c | KLDVVSKPPLINGLYTNRTVIKATAVRHSKKHFDCRAEGTPSPEVMWIMPDNIFLTAPYY |
| NOV29d | LMETDFSGLTKLELLMLHSNGIHTIPDKTFSDLQALQVLKMSYNKVRKLQKDTFYGLRSL |
| NOV29e | LMETDFSGLTKLELLMLHSNGIHTIPDKTFSDLQALQVLKMSYNKVRKLQKDTFYGLRSL |
| NOV29f | LMETDFSGLTKLELLMLHSNGIHTIPDKTFSDLQALQVLKMSYNKVRKLQKDTFYGLRSL |
| NOV29g | LMETDFSGLTKLELLMLHSNGIHTIPDKTFSDLQALQVLKMSYNKVRKLQKDTFYGLRSL |
| NOV29h | KLDVVSKPPLINGLYTNRTVIKATAVRHSKKHFDCRAEGTPSPEVMWIMPDNIFLTAPYY |
| NOV29i | KLDVVSKPPLINGLYTNRTVIKATAVRHSKKHFDCRAEGTPSPEVMWIMPDNIFLTAPYY |
| NOV29j | KLDVVSKPPLINGLYTNRTVIKATAVRHSKKHFDCRAEGTPSPEVMWIMPDNIFLTAPYY |
| NOV29k | KLDVVSKPPLINGLYThRTVIKATAVRHSKKHFDCPAEGTPSPEVMWIMPDNIFLTAPYY |
| NOV29l | KLDVVSKPPLINGLYTNRTVIKATAVRHSKKHFDCRAEGTPSPEVMWIMPDNIFLTAPYY |
| NOV29m | KLDVVSKPPLINGLYTNRTVIKATAVRHSKKHFDCRAEGTPSPEVMWIMPDNIFLTAPYY |
| NOV29n | KLDVVSKPPLINGLYTNRTVIKATAVRHSKKHFDCRAEGTPSPEVMWIMPDNIFLTAPYY |
| NOV29o | KLDVVSKPPLINGLYTNRTVIKATAMRHSKKHFDCRAEGTPSPEVMWIMPDNIFLTAPYY |
| NOV29p | KLDVVSKPPLINGLYTNRTVIKATAVRHSKKHFDCRAEGTPSPEVMWIMPDNIFLTAPYY |
| NOV29q | KLDVVSKPPLINGLYTNRTVIKATAVRHSKKHFDCRAEGTPSPEVMWIMPDNIFLTAPYY |
| NOV29r | LMETDFSGLTKLELLMLHSNGIHTIPDKTFSDLQALQVLKMSYNKVRKLQKDTFYGLRSL |
| NOV29s | LMETDFSGLTKLELLMLHSNGIHTIPDKTFSDLQALQVLKMSYNKVRKLQKDTFYGLRSL |
| NOV29t | LMETDFSGLTKLELLMLHSNGIHTIPDKTFSDLQALQVLKMSYNKVRKLQKDTFYGLRSL |
| NOV29u | LMETDFSGLTKLELLMLHSNGIHTIPDKTFSDLQALQVLKMSYNKVRKLQKDTFYGLRSL |
| NOV29v | LMETDFSGLTKLELLMLHSNGIHTIPDKTFSDLQALQVLKMSYNKVRKLQKDTFYGLRSL |
| NOV29w | KLDVVSKPPLINGLYTNRTVIKATAVRHSKKHFDCRAEGTPSPEVMWIMPDNIFLTAPYY |
| NOV29x | KLDVVSKPPLINGLYTNRTVIKATAVRHSKKHFDCRAEGTPSPEVMWIMPDNIFLTAPYY |
| NOV29y | KLDVVSKPPLINGLYTNRTVIKATAVRHSKKHFDCRAEGTPSPEVMWIMPDNIFLTAPYY |
| NOV29z | KLDVVSKPPLINGLYTNRTVIKATAVRHSKKHFDCRAEGTPSPEVMWIMPDNIFLTAPYY |
| NOV29aa | KLDVVSKPPLINGLYTNRTVIKATAVRHSKKHFDCRAEGTPSPEVMWIMPDNIFLTAPYY |
| NOV29ab | LMETDFSGLTKLELLMLHSNGIHTIPDKTFSDLQALQVLKMSYNKVRKLQKDTFYGLRSL |
| NOV29ac | KLDVVSKPPLINGLYTNRTVIKATAVRHSKKHFDCRAEGTPSPEVMWIMPDNIFLTAPYY |
| NOV29ad | KLDVVSKPPLINGLYThRTVIKATAVRHSKKHFDCRAEGTPSPEVMWIMPDNIFLTAPYY |
| NOV29ae | KLDVVSKPPLINGLYTNRTVIKATAVRHSKKHFDCRAEGTPSPEVMWIMPDNIFLTAPYY |
| NOV29af | KLDVVSKPPLINGLYTNRTVIKATAVRHSKKHFDCPAEGTPSPEVMWIMPDNIFLTAPYY |
| NOV29ag | LMETDFSGLTKLELLMLHSNGIHTIPDKTFSDLQALQVLKMSYNKVRKLQKDTFYGLRSL |
| NOV29a | GSRITVHKNGTLEIRNVRLSDSADFICVARNEGGESVLVVQLEVLEMLRRPTFRNPFNEK |
| NOV29b | TRLHMDHNN--IEFINPEVFDGLNFLRLVHLEGNQLTKLHPDTFVSLSYLQIFKISFIKF |
| NOV29c | GSRITVHKNGTLEIRNVRLSDSADFICVARNEGGESVLVVQLEVLEMLRRPTFRNPFNEK |
| NOV29d | TRLHMDHNN--IEFINPEVFYGLNFLRLVHLEGNQLTKLHPDTFVSLSYLQIFKISFIKF |
| NOV29e | TRLHMDHNN--IEFINPEVFYGLNFLRLVHLEGNQLTKLHPDTFVSLSYLQIFKISFIKF |
| NOV29f | TRLHMDHNN--IEFINPEVFDGLNFLRLVHLEGNQLTKLHPDTFVSLSYLQIFKISFIKF |
| NOV29g | TRLHMDHNN--IEFINPEVFDGLNFLRLVHLEGNQLTKLHPDTFVSLSYLQIFKISFIKF |
| NOV29h | GSRITVHKNGTLEIRNRLSDSADFICVARNEGGESVLVVQLEVLEMLRRPTFRNPFNEK |
| NOV29i | GSRITVHKNGTLEIRNRLSDSADFICVARNEGGESVLVVQLEVLEMLRRPTFRNPFNEK |
| NOV29j | GSRITVHKNGTLEIRNVRLSDSADFICVARNEGGESVLVVQLEVLEMLRRPTFRNPFNEK |
| NOV29k | GSRITVHKNGTLEIRNVRLSDSADFICVARNEGGESVLVVQLEVLEMLRRPTFRNPFNEK |
| NOV29l | GSRITVHKNGTLEIRNVRLSDSADFICVARNEGGESVLVVQLEVLEMLRRPTFRNPFNEK |
| NOV29m | GSRITVHKNGTLEIRNVRLSDSADFICVARNEGGESVLVVQLEVLEMLRRPTFRNPFNEK |
| NOV29n | GSRITVHKNGTLEIRNVRLSDSADFICVARNEGGESVLVVQLEVLEMLRRPTFRNPFNEK |
| NOV29o | GSRITVHKNGTLEIRNVRLSDSADFICVARNEGGESVLVVQLEVLEMLRRPTFRNPFNEK |
| NOV29p | GSRITVHKNGTLEIRNVRLSDSADFICVARNEGGESVLVVQLEVLEMLRRPAFRNPFNEK |
| NOV29q | GSRITVHKNGTLEIRNVRLSDSADFICVARNEGGESVLVVQLEVLEMLRRPTFRNPFNEK |
| NOV29r | TRLHMDHNN--IEFINPEVFDGLNFLRLVHLEGNQLTKLHPDTFVSLSYLQIFKISFIKF |
| NOV29s | TRLHMDHNN--IEFINPEVFYGLNFLRLVHLEGNQLTKLHPDTFVSLSYLQIFKISFIKF |
| NOV29t | TRLHMDHNN--IEFINPEVFYGLNFLRLVHLEGNQLTKLHPDTFVSLSYLQIFKISFIKF |
| NOV29u | TRLHMDHNN--IEFINPEVFYGLNFLRLVHLEGNQLTKLHPDTFVSLSYLQIFKISFIKF |
| NOV29v | TRLHMDHNN--IEFINPEVFYGLNFLRLVHLEGNQLTKLHPDTFVSLSYLQIFKISFIKF |
| NOV29w | GSRITVHKNGTLEIRYVRLSDSADFICVARNEGGESVLVVQLEVLEMLRRPTFRNPFNEK |
| NOV29x | GSRITVHKNGTLEIRNVRLSDSADFICVARNEGGESVLVVQLEVLEMLRRPTFRNPFNEK |
| NOV29y | GSRITVHKNGTLEIRNVRLSDSADFICVARNEGGESVLVVQLEVLEMLRRPTFRNPFNEK |
| NOV29z | GGRITVHKNGTLEIRNVRLSDSADFICVARNEGGESVLVVQLEVLEMLRRPTFRNPFNEK |
| NOV29aa | GSRITVHKNGTLEIRNVRLSDSADFICVARNEGGESVLVVQLEVLEMLRRPTFRNPFNEK |
| NOV29ab | TRLHMDHNN--IEFINPEVFDGLNFLRLVHLEGNQLTKLHPDTFVSLSYLQIFKISFIKF |
| NOV29ac | GSRITVHKNGTLEIRNVRLSDSADFICVARNEGGESVLVVQLEVLEMLRRPTFRNPFNEK |
| NOV29ad | GSRITVHKNGTLEIRNVRLSDSADFICVARNEGGESVLVVQLEVLEMLRRPTFRNPFNEK |
| NOV29ae | GSRITVHKNGTLEIRNVRLSDSADFICVARNEGGESVLVVQLEVLEMLRRPTFRNPFNEK |
| NOV29af | GSRITVHKNGTLEIRNVRLSDSADFICVARNEGGESVLVVQLEVLEMLRRPTFRNPFNEK |
| NOV29ag | TRLHMDHNN--IEFINPEVFDGLNFLRLVHLEGNQLTKLHPDTFVSLSYLQIFKISFIKF |
| NOV29a | IVAQLGKSTALNCSVDGNPPPEIIWILPNGTRFSNGPQSYQYLIASNGSFIISKTTREDA |
| NOV29b | LYLSDNFLTSLPQEMVSYMP------LEG------------------------------- |
| NOV29c | IVAQLGKSTALNCSVDGNPPPEIIWILPNGTRFSNGPQSYQYLIASNGSFIISKTTREDA |
| NOV29d | LYLSDNFLTSLPQEMVSYMPDLDSLYLHGNPWTCDCHLKWLSDWIQEKPDVIKCKKDRSP |
| NOV29e | LYLSDNFLTSLPQEMVSYMPDLDSLYLHGNPWTCDCHLKWLSDWIQEKPDVIKCKKDRSP |
| NOV29f | LYLSDNFLTSLPQEMVSYMPDLDSLYLHGNPWTCDCHLKWLSDWIQEKPDVIKCKKDRSP |
| NOV29g | LYLSDNFLTSLPQEMVSYMPDLDSLYLHGNPWTCDCHLKWLFDWIQEKPDVIKCKKDRSP |
| NOV29h | IVAQLGKSTALNCSVDGNPPPEIIWILPNGTRFSNGPQSYQYLIASNGSFIISKTTREDA |
| NOV29i | IVAQLGKSTALNCSVDGNPPPEIIWILPNGTRFSNGPQSYQYLIASNGSFIISKTTREDA |
| NOV29j | IVAQLGKSTALNCSVDGNPPPEIIWILPNGTRFSNGPQSYQYLIASNGSFIISKTTREDA |
| NOV29k | IVAQLGKSTALNCSVDGNPPPEIIWILPNGTRFSNGPQSYQYLIASNGSFIISKTTREDA |
| NOV29l | IVAQLGKSTALNCSVDGNPPPEIIWILPNGTRFSNGPQSYQYLIASNGSFIISKTTREDA |
| NOV29m | IVAQLGKSTALNCSVDGNPPPEIIWILPNGTRFSNGPQSYQYLIASNGSFIISKTTREDA |
| NOV29n | IVAQLGKSTALNCSVDGNPPPEIIWILPNGTRFSNGPQSYQYLIASNGSFIISKTTREDA |
| NOV29o | IVAQLGKSTALNCSVDGNPPPEIIWILPNGTRFSNGPQSYQYLIASNGSFIISKTTREDA |
| NOV29p | IVAQLGKSTALNCSVDGNPPPEIIWILPNGTRFSNGPQSYQYLIASNGSFIISKTTREDA |
| NOV29q | IVAQLGKSTALNCSVDGNPPPEIIWILPNGTRFSNGPQSYQYLIASNGSFIISKTTREDA |
| NOV29r | LYLSDNFLTSLPQEMVSYMP------LEGKGGRA-------------------------- |
| NOV29s | LYLSDNFLTSLPQEMVSYMP------LEG------------------------------- |
| NOV29t | LYLSDNFLTSLPQEMVSYMP------LEG------------------------------- |
| NOV29u | LYLSDNFLTSLPQEMVSYMP------LEG------------------------------- |
| NOV29v | LYLSDNFLTSLPQEMVSYMP------LEG------------------------------- |
| NOV29w | IVAQLGKSTALNCSVDGNPPPEIIWILPNGTRFSNGPQSYQYLIASNGSFIISKTTREDA |
| NOV29x | IVAQLGKSTALNCSVDGNPPPEIIWILPNGTRFSNGPQSYQYLIASNGSFIISKTTREDA |
| NOV29y | IVAQLGKSTALNCSVDGNPPPEIIWILPNGTRFSNGPQSYQYLIASNGSFIISKTTREDA |
| NOV29z | IVAQLGKSTALNCSVDGNPPPEIIWILPNGTRFSNGPQSYQYLIASNGSFIISKTTREDA |
| NOV29aa | IVAQLGKSTALNCSVDGNPPPEIIWILPNGTRFSNGPQSYQYLIASNGSFIISKTTREDA |
| NOV29ab | LYLSDNFLTSLPQEMVSYMPDLDSLYLHGNPWTCDCHLKWLSDWIQEKPDVIKCKKDRSP |
| NOV29ac | IVAQLGKSTALNCSVDGNPPPEIIWILPNGTRFSNGPQSYQYLIASNGSFIISKTTREDA |
| NOV29ad | IVAQLGKSTALNCSVDGNPPPEIIWILPNGTRFSNGPQSYQYLIASNGSFIISKTTREDA |
| NOV29ae | IVAQLGKSTALNCSVDGNPPPEIIWILPNGTRFSNGPQSYQYLIASNGSFIISKTTREDA |
| NOV29af | IVAQLGKSTALNCSVDGNPPPEIIWILPNGTRFSNGPQSYQYLIASNGSFIISKTTREDA |
| NOV29ag | LYLSDNFLTSLPQEMVSYMPDLDSLYLHGNPWTCDCHLKWLSDWIQEKPDVIKCKKDRSP |
| NOV29a | GKYRCAARNKVGYIEKLVILEIGQKPVILTYAPGTVKGISGESLSLHCVSDGIPKPNIKW |
| NOV29b | ------------------------------------------------------------ |
| NOV29c | GKYRCAARNKVGYIEKLVILEIGQKPVILTYAPGTVKGISGESLSLHCVSDGIPKPNIKW |
| NOV29d | SSAQQCPLCMNPRTSKGKPLAMVSAAAFQCALE--------------------------- |
| NOV29e | SSAQQCPLCMNPRTSKGKPLAMVSAAAFQCALE--------------------------- |
| NOV29f | SSAPQCPLCNNPRTSKGKPLAMVSAAAFQCALE--------------------------- |
| NOV29g | SSAQQCPLCMNPRTSKGKPLAMVSAAAFQCALE--------------------------- |
| NOV29h | GKYRCAARNKVGYIEKLVILEIGQKPVILTYAPGTVKGISGESLSLHCVSDGIPKPNIKW |
| NOV29i | GKYRCAARNKVGYIEKLVILEIGQKPVILTYAPGTVKGISGESLSLHCVSDGIPKPNIKW |
| NOV29j | GKNRCAARNKVGYIEKLVILEIGQKPVILTYAPGTVKGISGESLSLHCVSDGIPKPNIKW |
| NOV29k | GKYRCAARNKVGYIEKLVILEIGQKPVILTYAPGTVKGISGESLSLHCVSDGIPKPNIKW |
| NOV29l | GKYRCAARNKVGYIEKLVILEIGQKPVILTYAPGTVKGISGESLSLHCVSDGIPKPNIKW |
| NOV29m | GKYRCAARNKVGYIEKLVILEIGQKPVILTYAPGTVKGISGESLSLHCVSDGIPKPNIKW |
| NOV29n | GKYRCAARNKVGYIEKLVILEIGQKPVILTYAPGTVKGISGESLSLHCVSDGIPKPNIKW |
| NOV29o | GKYRCAARNKVGYIEKLVILEIGQKPVILTYAPGTVKGISGESLSLHCVSDGIPKPNIKW |
| NOV29p | GKYRCAAPNKVGYIEKLVILEIGQKPVILTYAPGTVKGISGESLSLHCVSDGIPKPNIKW |
| NOV29q | GKYRCAARNKVGYIEKLVILEIGQKPVILTYAPGTVKGISGESLSLHCVSDGIPKPNIKW |
| NOV29r | ------------------------------------------------------------ |
| NOV29s | ------------------------------------------------------------ |
| NOV29t | ------------------------------------------------------------ |
| NOV29u | ------------------------------------------------------------ |
| NOV29v | ------------------------------------------------------------ |
| NOV29w | GKYRCAARNKVGYIEKLVILEIGQKPVILTYAPGTVKGISGESLSLHCVSDGIPKPNIKW |
| NOV29x | GKYRCAARNKVGYIEKLVILEIGQKPVILTYAPGTVKGISGESLSLHCVSDGIPKPNIKW |
| NOV29y | GKYRCAARNKVGYIEKLVILEIGQKPVILTYAPGTVKGISGESLSLHCVSDGIPKPNIKW |
| NOV29z | GKYRCAARNKVGYIEKLVILEIGQKPVILTYAPGTVKGISGESLSLHCVSDGIPKPNIKW |
| NOV29aa | GKYRCAARNKVGYIEKLVILEIGQKPVILTYAPGTVKGISGESLSLHCVSDGIPKPNIKW |
| NOV29ab | SSAQQCPLCMNPRTSKGKPLAMVSAAAFQCA----------------------------- |
| NOV29ac | GKYRCAARNKVGYIEKLVILEIGQKPVILTYAPGTVKGISGESLSLHCVSDGIPKPNIKW |
| NOV29ad | GKYRCAARNKVGYIEKLVILEIGQKPVILTYAPGTVKGISGESLSLHCVSDGIPKPNIKW |
| NOV29ae | GKYRCAARNKVGYIEKLVILEIGQKPVILTYAPGTVKGISGESLSLHCVSDGIPKPNIKW |
| NOV29af | GKYRCAARNKVGYIEKLVILEIGQKPVILTYAPGTVKGISGESLSLHCVSDGIPKPNIKW |
| NOV29ag | SSAQQCPLCMNPRTSKGKPLAMVSAAAFQCA----------------------------- |
| NOV29a | TMPSGYVVDRPQINGKYILHDNGTLVIKEATAYDRGNYICKAQNSVGHTLITVPVMIVAY |
| NOV29b | ------------------------------------------------------------ |
| NOV29c | TMPSGYVVDRPQINGKYILHDNGTLVIKEATAYDRGNYICKAQNSVGHTLITVPVMIVAY |
| NOV29d | ------------------------------------------------------------ |
| NOV29e | ------------------------------------------------------------ |
| NOV29f | ------------------------------------------------------------ |
| NOV29g | ------------------------------------------------------------ |
| NOV29h | TMPSGYVVDRPQINGKYILHDNGTLVIKEATAYDRGNYICKAQNSVGHTLITVPVMIVAY |
| NOV29i | TMPSGYVVDRPQINGKYILHDNGTLVIKEATAYDRGNYICKAQNSVGHTLITVPVMIVAY |
| NOV29j | TMPSGYVVDRPQINGKYILHDNGTLVIKEATAYDRGNYICKAQNSVGHTLITVPVMIVAY |
| NOV29k | TMPSGYVVDRPQINGKYILHDNGTLVIKEATAYDRGNYICKAQNSVGHTLITVPVMIVAY |
| NOV29l | TMPSGYVVDRPQINGKYILHDNGTLVIKEATAYDRGNYICKAQNSVGHTLITVPVMIVAY |
| NOV29m | TMPSGYVVDRPQINGKYILHDNGTLVIKEATAYDRGNYICKAQNSVGHTLITVPVMIVAY |
| NOV29n | TMPSGYVVDRPQINGKYILHDNGTLVIKEATAYDRGNYICKAQNSVGHTLITVPVMIVAY |
| NOV29o | TMPSGYVVDRPQINGKYILHDNGTLVIKEATAYDRGNYICKAQNSVGHTLITVPVMIVAY |
| NOV29p | TMPSGYVVDRPQINGKYILHDNGTLVIKEATAYDRGNYICKAQNSVGHTLITVPVMIVAY |
| NOV29q | TMPSGYVVDRPQINGKYILHDNGTLVIKEATAYDRGNYICKAQNSVGHTLITVPVMIVAY |
| NOV29r | ------------------------------------------------------------ |
| NOV29s | ------------------------------------------------------------ |
| NOV29t | ------------------------------------------------------------ |
| NOV29u | ------------------------------------------------------------ |
| NOV29v | ------------------------------------------------------------ |
| NOV29w | TMPSGYVVDRPQINGKYILHDNGTLVIKEATAYDRGNYICKAQNSVGHTLITVPVMIVAY |
| NOV29x | TMPSGYVVDRPQINGKYILHDNGTLVIKEATAYDRGNYICKAQNSVGHTLITVPVMIVAY |
| NOV29y | TMPSGYVVDRPQINGKYILHDNGTLVIKEATAYDRGNYICKAQNSVGHTLITVPVMIVAY |
| NOV29z | TMPSGYVVDRPQINGKYILHDNGTLVIKEATAYDRGNYICKAQNSVGHTLITVPVMIVAY |
| NOV29aa | TMPSGYVVDRPQINGKYILHDNGTLVIKEATAYDRGNYICKAQNSVGHTLITVPVMIVAY |
| NOV29ab | ------------------------------------------------------------ |
| NOV29ac | TMPSGYVVDRPQINGKYILHDNGTLVIKEATAYDRGNYICKAQNSVGHTLITVPVMIVAY |
| NOV29ad | TMPSGYVVDRPQINGKYILHDNGTLVIKEATAYDRGNYICKAQNSVGHTLITVPVMIVAY |
| NOV29ae | TMPSGYVVDRPQINGKYILHDNGTLVIKEATAYDRGNYICKAQNSVGHTLITVPVMIVAY |
| NOV29af | TMPSGYVVDRPQINGKYILHDNGTLVIKEATAYDRGNYICKAQNSVGHTLITVPVMIVAY |
| NOV29ag | ------------------------------------------------------------ |
| NOV29a | PPRITNRPPRSIVTRTGAAFQLHCVALGVPKPEITWEMPDHSLLSTASKERTHGSEQLHL |
| NOV29b | ------------------------------------------------------------ |
| NOV29c | PPRITNRPPRSIVTRTGAAFQLHCVALGVPKPEITWEMPDHSLLSTASKERTHGSEQLHL |
| NOV29d | ------------------------------------------------------------ |
| NOV29e | ------------------------------------------------------------ |
| NOV29f | ------------------------------------------------------------ |
| NOV29g | ------------------------------------------------------------ |
| NOV29h | PPRITNRPPRSIVTRTGAAFQLHCVALGVPKPEITWEMPDHSLLSTASKERTHGSEQLHL |
| NOV29i | PPRITNRPPRSIVTRTGAAFQLHCVALGVPKPEITWEMPDHSLLSTASKERTHGSEQLHL |
| NOV29j | PPRITNRPPRSIVTRTGAAFQLHCVALGVPKPEITWEMPDHSLLSTASKERTHGSEQLHL |
| NOV29k | PPRITNRPPRSIVTRTGAAFQLHCVALGVPKPEITWEMPDHSLLSTASKERTHRSEQLHL |
| NOV29l | PPRITNRPPRSIVTRTGAAFQLHCVALGVPKPEITWEMPDHSLLSTASKERTHGSEQLHL |
| NOV29m | PPRITNRPPRSIVTRTGAAFQLHCVALGVPKPEITWEMPDHSLLSTASKERTHGSEQLHL |
| NOV29n | PPRITNRPPRSIVTRTGAAFQLHCVALGVPKPEITWEMPDHSLLSTASKERTHGSEQLHL |
| NOV29o | PPRITNRPPRSIVTRTGAAFQLHCVALGVPKPEITWEMPDHSLLSTASKERTHGSEQLHL |
| NOV29p | PPRITNRPPRSIVTRTGAAFQLHCVALGVPKPEITWEMPDHSLLSTASKERTHGSEQLHL |
| NOV29q | PPRITNRPPRSIVTRTGAAFQLHCVALGVPKPEITWEMSDHSLLSTASKERTHGSEQLHL |
| NOV29r | ------------------------------------------------------------ |
| NOV29s | ------------------------------------------------------------ |
| NOV29t | ------------------------------------------------------------ |
| NOV29u | ------------------------------------------------------------ |
| NOV29v | ------------------------------------------------------------ |
| NOV29w | PPRITNRPPRSIVTRTGAAFQLHCVALGVPKPEITWEMPDHSLLSTASKERTHGSEQLHL |
| NOV29x | PPRITNRPPRSIVTRTGAAFQLHCVALGVPKPEITWEMPDHSLLSTASKERTHGSEQLHL |
| NOV29y | PPRITNRPPRSIVTRTGAAFQLHCVALGVPKPEITWEMPDHSLLSTASKERTHGSEQLHL |
| NOV29z | PPRITNRPPRSIVTRTGAAFQLHCVALGVPKPEITWEMPDHSLLSTASKERTHGSEQLHL |
| NOV29aa | PPRITNRPPRSIVTRTGAAFQLHCVALGVPKPEITWEMPDHSLLSTASKERTHGSEQLHL |
| NOV29ab | ------------------------------------------------------------ |
| NOV29ac | PPRITNRPPRSIVTRTGAAFQLHCVALGVPKPEITWEMPDHSLLSTASKERTHGSEQLHL |
| NOV29ad | PPRITNRPPRSIVTRTGAAFQLHCVALGVPKPEITWEMPDHSLLSTASKERTHGSEQLHL |
| NOV29ae | PPRITNRPPRSIVTRTGAAFQLHCVALGVPKPEITWEMPDHSLLSTASKERTHGSEQLHL |
| NOV29af | PPRITNRPPRSIVTRTGAAFQLHCVALGVPKPEITWEMPDHSLLSTASKERTHGSEQLHL |
| NOV29ag | ------------------------------------------------------------ |
| NOV29a | QGTLVIQNPQTSDSGIYKCTAKNPLGSDYAATYIQVI-------- |
| NOV29b | --------------------------------------------- |
| NOV29c | QGTLVIQNPQTSDSGIYKCTALE----------------GKGGRA |
| NOV29d | --------------------------------------------- |
| NOV29e | --------------------------------------------- |
| NOV29f | --------------------------------------------- |
| NOV29g | --------------------------------------------- |
| NOV29h | QGTLVIQNPQTSDSGIYKCTAKNPLGSDYAATYIQVILEGKGGRA |
| NOV29i | QGTLVIQNPQTSDSGIYKCTALE----------------GKGGRA |
| NOV29j | QGTLVIQNPQTSDSGIYKCTAKNPLGSDYAATYIQVILEG----- |
| NOV29k | QGTLVIQNPQTSDSGIYKCTALEG--------------------- |
| NOV29l | QGTLVIQNPQTSDSGIYKCTALEGKGE------------------ |
| NOV29m | QGTLVIQNPQTSDSGIYKCTALEG--------------------- |
| NOV29n | QGTLVIQNPQTSDSGIYKCTAKNPLGSDYAATYIQVILEG----- |
| NOV29o | QGTLVIQNPQTSDSGIYKCTAKNPLGSDYAATYIQVILEG----- |
| NOV29p | QGTLVIQNPQTSDSGIYKCTAKNPLGSDYAATYIQVILEG----- |
| NOV29q | QGTLVIQNPQTSDSGIYKCTAKNPLGSDYAATYIQVILEG----- |
| NOV29r | --------------------------------------------- |
| NOV29s | --------------------------------------------- |
| NOV29t | --------------------------------------------- |
| NOV29u | --------------------------------------------- |
| NOV29v | --------------------------------------------- |
| NOV29w | QGTLVIQNPQTSDSGIYKCTALE----------------GKGGRA |
| NOV29x | QGTLVIQNPQTSDSGIYKCTAKNPLGSDYAATYIQVILEG----- |
| NOV29y | QGTLVIQNPQTSDSGIYKCTAKNPLGSDYAATYIQVILEG----- |
| NOV29z | QGTLVIQNPQTSDSGIYKCTAKNPLGSDYAATYIQVI-------- |
| NOV29aa | QGTLVIQNPQTSDSGIYKCTAKNPLGSDYAATYIQVI-------- |
| NOV29ab | --------------------------------------------- |
| NOV29ac | QGTLVIQNPQTSDSGIYKCTA------------------------ |
| NOV29ad | QGTLVIQNPQTSDSGIYKCTA------------------------ |
| NOV29ae | QGTLVIQNPQTSDSGIYKCTAKNPLGSDYAATYIQVI-------- |
| NOV29af | QGTLVIQNPQTSDSGIYKCTAKNPLGSDYAATYIQVI-------- |
| NOV29ag | --------------------------------------------- |
| NOV29a | (SEQ ID NO: 666) |
| NOV29b | (SEQ ID NO: 668) |
| NOV29c | (SEQ ID NO: 670) |
| NOV29d | (SEQ ID NO: 672) |
| NOV29e | (SEQ ID NO: 674) |
| NOV29f | (SEQ ID NO: 676) |
| NOV29g | (SEQ ID NO: 678) |
| NOV29h | (SEQ ID NO: 680) |
| NOV29i | (SEQ ID NO: 682) |
| NOV29j | (SEQ ID NO: 684) |
| NOV29k | (SEQ ID NO: 686) |
| NOV29l | (SEQ ID NO: 688) |
| NOV29m | (SEQ ID NO: 690) |
| NOV29n | (SEQ ID NO: 692) |
| NOV29o | (SEQ ID NO: 694) |
| NOV29p | (SEQ ID NO: 696) |
| NOV29q | (SEQ ID NO: 698) |
| NOV29r | (SEQ ID NO: 700) |
| NOV29s | (SEQ ID NO: 702) |
| NOV29t | (SEQ ID NO: 704) |
| NOV29u | (SEQ ID NO: 706) |
| NOV29v | (SEQ ID NO: 708) |
| NOV29w | (SEQ ID NO: 710) |
| NOV29x | (SEQ ID NO: 712) |
| NOV29y | (SEQ ID NO: 714) |
| NOV29z | (SEQ ID NO: 716) |
| NOV29aa | (SEQ ID NO: 718) |
| NOV29ab | (SEQ ID NO: 720) |
| NOV29ac | (SEQ ID NO: 722) |
| NOV29ad | (SEQ ID NO: 724) |
| NOV29ae | (SEQ ID NO: 726) |
| NOV29af | (SEQ ID NO: 728) |
| NOV29ag | (SEQ ID NO: 730) |

[0520] Further analysis of the NOV29a protein yielded the following properties shown in Table 29C.

TABLE 29C
Protein Sequence Properties NOV29a

| | |
|---|---|
| SignalP analysis: | Cleavage site between residues 29 and 30 |
| PSORT II analysis: | |

| PSG: | a new signal peptide prediction method | |
|---|---|---|
| | N-region: | length 6; pos. chg 3; neg. chg 0 |
| | H-region: | length 20; peak value 10.48 |
| | PSG score: | 6.08 |

| | |
|---|---|
| GvH: | von Heijne's method for signal seq. recognition |
| | GvH score (threshold: −2.1): −1.23 |
| | possible cleavage site: between 28 and 29 |

>>> Seems to have a cleavable signal peptide (1 to 28)

| ALOM: | Klein et al's method for TM region allocation | |
|---|---|---|
| | Init position for calculation: 29 | |
| | Tentative number of TMS(s) for the threshold 0.5: 1 | |
| | Number of TMS(s) for threshold 0.5: 0 | |
| | PERIPHERAL | Likelihood = 1.91 (at 1062) |

| | ALOM score: 0.37 (number of TMSs: 0) | | | |
|---|---|---|---|---|
| MTOP: | Prediction of membrane topology (Hartmann et al.) | | | |
| | Center position for calculation: 14 | | | |
| | Charge difference: −2.0 C(2.0)-N(4.0) | | | |
| | N >= C: N-terminal side will be inside | | | |
| MITDISC: | discrimination of mitochondrial targeting seq | | | |
| | R content: | 3 | Hyd Moment(75): | 5.15 |
| | Hyd Moment(95): | 8.32 | G content: | 4 |
| | D/E content: | 1 | S/T content: | 4 |

| | |
|---|---|
| | Score: −2.83 |
| Gavel: | prediction of cleavage sites for mitochondrial preseq |
| | R-2 motif at 56 FRY\|LT |

NUCDISC: discrimination of nuclear localization signals

| | |
|---|---|
| | pat4: RRHR (3) at 1043 |
| | pat7: PVLRRHR (3) at 1040 |
| | pat7: PQKKNRT (4) at 1341 |
| | bipartite: RRIDPQHWAALLEKAKK at 760 |
| | content of basic residues: 11.1% |
| | NLS Score: 0.81 |
| KDEL: | ER retention motif in the C-terminus: none |

ER Membrane Retention Signals: none
SKL: peroxisomal targeting signal in the C-terminus: none
PTS2: 2nd peroxisomal targeting signal: none
VAC: possible vacuolar targeting motif: found

ILPN at 2366

RNA-binding motif: none
Actinin-type actin-binding motif:

type 1: none
type 2: none

NMYR: N-myristoylation pattern: none
Prenylation motif: none
memYQRL: transport motif from cell surface to Golgi: none
Tyrosines in the tail: none
Dileucine motif in the tail: none
checking 63 PROSITE DNA binding motifs: none
checking 71 PROSITE ribosomal protein motifs: none
checking 33 PROSITE prokaryotic DNA binding motifs: none

| | |
|---|---|
| NNCN: | Reinhardt's method for Cytoplasmic/Nuclear discrimination |
| | Prediction: nuclear |
| | Reliability: 89 |
| COIL: | Lupas's algorithm to detect coiled-coil regions |
| | total: 0 residues |

Final Results (k = 9/23):

```
73.9%: nuclear
  8.7%: mitochondrial
  8.7%: extracellular, including cell wall
  4.3%: cytoplasmic
  4.3%: vacuolar
```

>> prediction for CG55776-01 is nuc (k = 23)

[0521] A search of the NOV29a protein against the Geneseq database, a proprietary database that contains sequences published in patents and patent publication, yielded several homologous proteins shown in Table 29D.

TABLE 29D
Geneseq Results for NOV29a

| | | NOV29a | Identities/ | |
|---|---|---|---|---|
| | | Residues/ | Similarities | |
| Geneseq | Protein/Organism/Length | Match | for the | Expect |
| Identifier | [Patent #, Date] | Residues | Matched Region | Value |
| ABG31323 | Human OCP protein - Homo sapiens, | 1 . . . 2617 | 2535/2637 (96%) | 0.0 |
| | 2589 aa. [WO200246364-A2, | 1 . . . 2589 | 2541/2637 (96%) | |
| | 13-JUN-2002] | | | |
| AAB47935 | Human OCP - Homo sapiens, | 1 . . . 2617 | 2534/2637 (96%) | 0.0 |
| | 2587 aa. [US2002022026-A1, | 1 . . . 2587 | 2540/2637 (96%) | |
| | 21-FEB-2002] | | | |
| ABG32896 | Human osteoclast protein (OCP) #2 - | 1 . . . 2617 | 2534/2637 (96%) | 0.0 |
| | Homo sapiens, 2587 aa. | 1 . . . 2587 | 2540/2637 (96%) | |
| | [US2002086825-A1, 04-JUL-2002] | | | |
| ABG32891 | Human osteoclast protein (OCP) #1 - | 1 . . . 2616 | 2533/2636 (96%) | 0.0 |
| | Homo sapiens, 2586 aa. | 1 . . . 2586 | 2539/2636 (96%) | |
| | [US2002086825-A1, 04-JUL-2002] | | | |
| ABG31317 | Human 5 + 3 corrected OCP protein - | 1 . . . 2616 | 2526/2636 (95%) | 0.0 |
| | Homo sapiens, 2586 aa. | 1 . . . 2586 | 2534/2636 (95%) | |
| | [WO200246364-A2, 13-JUN-2002] | | | |

[0522] In a BLAST search of public sequence databases, the NOV29a protein was found to have homology to the proteins shown in the BLASTP data in Table 29E.

TABLE 29E
Public BLASTP Results for NOV29a

| | | NOV29a | Identities/ | | |
|---|---|---|---|---|---|
| Protein | | Residues/ | Similarities for | | |
| Accession | | Match | the Matched | | Expect |
| Number | Protein/Organism/Length | Residues | Portion | | Value |
| Q8NA84 | Hypothetical protein FLJ35750 - Homo | 1982 . . . 2617 | 636/636 | (100%) | 0.0 |
| | sapiens (Human), 650 aa. | 15 . . . 650 | 636/636 | (100%) | |
| AAH31063 | Similar to hypothetical protein | 2016 . . . 2617 | 601/602 | (99%) | 0.0 |
| | 9030224D03 - Homo sapiens (Human), | 1 . . . 602 | 602/602 | (99%) | |
| | 602 aa. | | | | |
| Q9NR99 | Adlican - Homo sapiens (Human), 2828 | 1637 . . . 2616 | 451/980 | (46%) | 0.0 |
| | aa. | 1851 . . . 2827 | 640/980 | (65%) | |
| BAC28314 | Adult male colon cDNA, RIKEN full-length | 2079 . . . 2617 | 419/539 | (77%) | 0.0 |
| | enriched library, clone: 9030224D03 | 1 . . . 539 | 479/539 | (88%) | |
| | product: hypothetical Immunoglobulin and | | | | |
| | major histocompatibility complex | | | | |
| | domain/Immunoglobulin C-2 | | | | |
| | type/Immunoglobulin-like/Immunoglobulin | | | | |
| | subtype containing protein, full insert | | | | |
| | sequence - Mus musculus (Mouse), 539 | | | | |
| | aa (fragment). | | | | |
| Q8N772 | Hypothetical protein FLJ25972 - Homo | 2219 . . . 2617 | 399/399 | (100%) | 0.0 |
| | sapiens (Human), 399 aa. | 1 . . . 399 | 399/399 | (100%) | |

[0523] PFam analysis predicts that the NOV29a protein contains the domains shown in the Table 29F.

TABLE 29F
Domain Analysis of NOV29a

| | | Identities/ | |
|---|---|---|---|
| | | Similarities | |
| Pfam | NOV29a | for the | Expect |
| Domain | Match Region | Matched Region | Value |
| LRRNT | 28 . . . 56 | 12/35 (34%) | 0.00015 |
| | | 23/35 (66%) | |
| LRR | 82 . . . 105 | 8/25 (32%) | 0.25 |
| | | 19/25 (76%) | |
| LRR | 134 . . . 157 | 8/25 (32%) | 0.088 |
| | | 21/25 (84%) | |
| LRR | 158 . . . 181 | 12/25 (48%) | 0.32 |
| | | 19/25 (76%) | |
| LRRCT | 223 . . . 291 | 17/69 (25%) | 8e−10 |
| | | 52/69 (75%) | |
| ig | 501 . . . 564 | 16/67 (24%) | 0.59 |
| | | 40/67 (60%) | |
| ig | 599 . . . 658 | 18/63 (29%) | 1.9e−07 |
| | | 44/63 (70%) | |
| ig | 1654 . . . 1719 | 14/69 (20%) | 0.002 |
| | | 46/69 (67%) | |
| ig | 1754 . . . 1816 | 17/66 (26%) | 5.7e−05 |
| | | 45/66 (68%) | |
| ig | 1851 . . . 1913 | 19/66 (29%) | 1e−07 |
| | | 47/66 (71%) | |
| ig | 1950 . . . 2012 | 21/66 (32%) | 5.1e−08 |
| | | 46/66 (70%) | |
| ig | 2047 . . . 2115 | 13/72 (18%) | 0.0002 |
| | | 44/72 (61%) | |
| ig | 2150 . . . 2209 | 20/63 (32%) | 6e−09 |
| | | 45/63 (71%) | |
| ig | 2248 . . . 2309 | 13/65 (20%) | 0.36 |
| | | 38/65 (58%) | |
| ig | 2346 . . . 2407 | 21/65 (32%) | 1.3e−06 |
| | | 44/65 (68%) | |
| ig | 2441 . . . 2502 | 16/65 (25%) | 0.022 |
| | | 41/65 (63%) | |
| ig | 2537 . . . 2601 | 16/68 (24%) | 1.1e−05 |
| | | 46/68 (68%) | |

### Example 30

[0524] The NOV30 clone was analyzed, and the nucleotide and encoded polypeptide sequences are shown in Table 30A.

TABLE 30A

NOV30 Sequence Analysis

| | | |
|---|---|---|
| NOV30a, CG55784-03 | SEQ ID NO: 751 | 3772 bp |
| DNA Sequence | ORF Start: ATG at 251 | ORF Stop: TAA at 2549 |

CTTCTCCGAGTGGGGACATTGCTGACAATCCCGGCTTCCCGAGGCGGCTAAGAACAGGCAGTTTGTGT
CGGCTGGCTGCAGATACCCAGAGGCACAAAGAGACCGAAGCCACCCGGAGGGACCCACGGACGGACAG
ATGGTAGGCGCGAACCCGAGAGGACCGGCGGAGGCTGAGCACCGAGAGCCGCCAAGGAAGAGAAACTA
ACCACAGCCAAGTTACCCCGCCGGCTTTCCTTCGCTGCGCTAAGGAATGAAACCCTTCCAGCTCGATC
TGCTCTTCGTCTGCTTCTTCCTCTTCAGTCAAGAGCTGGGCCTCCAGAAGAGAGGATGCTGTCTGGTG
CTGGGCTACATGGCCAAGGACAAGTTTCGGAGAATGAATGAAGGCCAAGTCTATTCCTTCAGCCAGCA
GCCCCAGGACCAGGTGGTGGTGTCGGGACAGCCAGTGACGCTACTTTGCGCCATCCCCGAATACGATG
TACCTGGTGGTAGGGAACCACCTGTCAGGGGAGCACCACCTGAAGATCCTGAGGGCAGAGCTGCAAGA
CGATGCGGTGTACGAGTGCCAGGCCATCCAGGCCGCCATCCGCTCCCGCCCCGCACGCCTCACAGTCC
TGGTGCCGCCTGATGACCCCGTCATCCTGGGGGGCCCTGTGATCAGCCTGCGTGCGGGGGACCCTCTC
AACCTCACCTGCCACGCAGACAATGCCAAGCCTGCAGCCTCCATCATCTGGTTGCGAAAGGGAGAGGT
CATCAATGGGGCCACCTACTCCAAGACCCTGCTTCGGGACGGCAAGCGGGAGAGCATCGTCAGCACCC
TCTTCATCTCCCCTGGTGACGTGGAGAATGGCCAGAGCATCGTGTGTCGTGCCACCAACAAAGCCATC
GCCACAGCCAGTGCTGGAGGACAACGTCGTCACTTTCCACTGCTCTGCAAAGGCCAACCCAGCTGTCA
GTGGACTACACGTACTTCTCAGAGCCCGTCTCCTGTGAGGTGACCAACGCCCTGGGCAGCACCAACCT
CAGCCGCACGGTTGACGTCTACTTTGGGCCCCGGATGACCACAGAACCCCAATCCTTGCTCGTGGATC
TGGGCTCTGATGCCATCTTCAGCTGCGCCTGGACCGGCAACCCATCCCTGACCATCGTCTGGATGAAG
CGGGGCTCCGGAGTGGTCCTGAGCAATGAGAAGACCCTGACCCTCAAATCCGTGCGCCAGGAGGACGC
GGGCAAGTACGTGTGCCGGGCTGTGGTGCCCCGTGTGGGAGCCGGGGAGAGAGAGGTGACCCTGACCG
TCAATGGACCCCCCATCATCTCCAGCACCCAGACCCAGCACGCCCTCCACGGCGAGAAGGGCCAGATC
AAGTGCTTCATCCGGAGCACGCCGCCGCCGGACCGCATCGCCTGGTCCTGGAAGGAGAACGTTCTGGA
GTCGGGCACATCGGGGCGCTATACGGTGGAGACCATCAGCACCGAGGAGGGCGTCATCTCCACCCTGA
CCATCAGCAACATCGTGCGGGCCGACTTCCAGACCATCTACAACTGCACGGCCTGGAACAGCTTCGGC
TCCGACACTGAGATCATCCGGCTCAAGGAGCAAGAGTCTGTGCCGATGGCCGTCATCATTGGGGTGGC
CGTAGGAGCTGGTGTGGCCTTCCTCGTCCTTATGGCAACCATCGTGGCGTTCTGCTGTGCCCGTTCCC
GCCTCTGGTCGGGAGGGTGAGGAGCACTCCACCATCAAGCAGCTGATGATGGACCGGGGTGAATTCCA
GCAAGACTCAGTCCTGAAACAGCTGGAGGTCCTCAAAGAAGAGGAGAAAGAGTTTCAGAACCTGAAGG
ACCCCACCAATGGCTACTACAGCGTCAACACCTTCAAAGAGCACCACTCAACCCCGACCATCTCCCTC
TCCAGCTGCCAGCCCGACCTGCGTCCTGCGGGTAAGCAGCGTGTGCCCACAGGCATGTCCTTCACCAA
CATCTACAGCACCCTGAGCGGCCAGGGCCGCCTCTACGACTACGGGCAGCGGTTTGTGCTGGGCATGG
GCAGCTCGTCCATCGAGCTTTGTGAGCGGGAGTTCCAGAGAGGCTCCCTCAGCGACAGCAGCTCCTTC
CTGGACACGCAGTGTGACAGCAGCGTCAGCAGCAGCGGCAAGCAGGATGGCTATGTGCAGTTCGACAA
GACCCCTGCAGCGGCGGATGCAGACTCACGTCTAAGGATCACACACCGCGGGTGGGGACGGGCCAGGC
AAGAGGTCAGGGCACGTTCTGGTTGTCCAGGGACGAGGGGTACTTTGCAGAGGACACCAGAATTGGCC
ACTTCCAGGACAGCCTCCCAGCGCCTCTGCCACTGCCTTCCTTCGAAGCTCTGATCAAGCACAAATCT
GGGTCCCCAGGTGCTGTGTGCCAGAGGTGGGCGGGTGGGGAGACAGACAGAGGCTGCGGCTGAGTGCG
CTGTGCTTAGTGCTGGACACCCGTGTCCCCGGCCCTTTCCTGGAGGCCCCTCTACCACCTGCTCTGCC
CACAGGCACAAGTGGCAGCTATAACTCTGCTTTCATGAAACTGCGGTCCACTCTCTGGTCTCTCTGTG
GGCTCTACCCCTCACTGACCACAAGCTCTACCTACCCCTGTGCCTGTGCTCCCATACAGCCCTGGGGG
CCATACCCTGGAGGTTGACAAGCCAGAAATGGCCTTGGCTAAAGGAGCCTCTCTCTCACCAGGCTGGC
CGGGAGCCCACCCCCAATTTGTTTGGTGTTTTGTGTCCATACTCTTGCAGTTCTGTCCTTGGACTTGA
TGCCGCTGAACTCTGCGGTGGGACCGGTCCCGTCAGAGCCTGGTGTACTGGGGGGAGGGAGGGAGGAG
GGAGCCTGTGCTGACGGAGCACCTCGCCGGGTGTGCCCCTCCTGGGCTGTGTGACCCCAGCCTCCCCA
CCCACCTCCTGCTTTGTGTACTCCTCCCCTCCCCCTCAGCACAATCGGAGTTCATATAAGAAGTGCGC
GAGCTTCTCTGGTCAGGGTTCTCTGAACACTTATGGAGAGAGTGCTTCCTGGGAAGTGTGGCGTTTGA
AGGGGCTGGAGGGCAGGTCTTTAAGATGGCGAGACTGCCCTTCTCAGCTGATAAACACAAGAACGGCC
ATCCTGTCTTCAGTAAGGCTCCACGAGAAGAGAGGAAGTATATCTACACCTCAACCCTCCTAGTCACC
ACCTGAAATAATGTTAGGGACACTACTCCAACATGTTTGTTCTGTTCTTTTGTTCCTACAAAAGCCAC
AGGAAGAACCCAAGAGCTCATAGAATGCGTTGGGAACCCAAGGTTCTCTGCCCTCCTTTGATTCAATC
ATCCTAGACAATAAAGGCAGTTGATAGCTCTG

| | | | |
|---|---|---|---|
| NOV30a, CG55784-03 | | | |
| Protein Sequence | SEQ ID NO: 752 | 766 aa | MW at 84135.5kD |

MKPFQLDLLFVCFFLFSQELGLQKRGCCLVLGYMAKDKFRRMNEGQVYSFSQQPQDQVVVSGQPVTLL
CAIPEYDGFVLWIKDGLALGVGRDLSSYPQYLVVGNHLSGEHHLKILRAELQDDAVYECQAIQAAIRS
RPARLTVLVPPDDPVILGGPVISLRAGDPLNLTCHADNAKPAASIIWLRKGEVINGATYSKTLLRDGK
RESIVSTLFISPGDVENGQSIVCRATNKAIPGGKETSVTIDIQHPPLVNLSVEPQPVLEDNVVTFHCS
AKANPAVTQYRWAKRGQIIKEASGEVYRTTVDYTYFSEPVSCEVTNALGSTNLSRTVDVYFGPRMTTE
PQSLLVDLGSDAIFSCAWTGNPSLTIVWMKRGSGVVLSNEKTLTLKSVRQEDAGKYVCRAVVPRVGAG
EREVTLTVNGPPIISSTQTQHALHGEKGQIKCFIRSTPPPDRIAWSWKENVLESGTSGRYTVETISTE
EGVISTLTISNIVRADFQTIYNCTAWNSFGSDTEIIRLKEQESVPMAVIIGVAVGAGVAFLVLMATIV
AFCCARSQRNLKGVVSAKNDIRVEIVHKEPASGREGEEHSTIKQLMMDRGEFQQDSVLKQLEVLKEEE
KEFQNLKDPTNGYYSVNTFKEHHSTPTISLSSCQPDLRPAGKQRVPTGMSFTNIYSTLSGQGRLYDYG
QRFVLGMGSSSIELCEREFQRGSLSDSSSFLDTQCDSSVSSSGKQDGYVQFDKASKASASSSHHSQSS
SQNSDPSRPLQRRMQTHV

| | | |
|---|---|---|
| NOV30b, CG55784-01 | SEQ ID NO: 753 | 1806 bp |
| DNA Sequence | ORF Start: at 1 | ORF Stop: TAA at 1645 |

AACAAAGCCATCCCCGGAGGAAAGGAGACGTCGGTCACCATTGACATCCAGCACCCTCCACTGGTCAA
CCTCTCGGTGGAGCCACAGCCAGTGCTGGAGGACAACGTCGTCACTTTCCACTGCTCTGCAAAGGCCA
ACCCAGCTGTCACCCAGTACAGGTGGGCCAAGCGGGGCCAGATCATCAAGGAGGCATCTGGAGAGGTG
TACAGGACCACAGTGGACTACACGTACTTCTCAGAGCCCGTCTCCTGTGAGGTGACCAAAGCCCTGGG
CAGCACCAACCTCAGCCGCACGGTTGACGTCTACTTTGGGCCCCGGATGACCACAGAACCCCAATCCT
TGCTCGTGGATCTGGGCTCTGATGCCATCTTAAGCTGCGCCTGGACCGGAAACCCATCCCTGACCATC
TGACCCTGACCGTCAATGGACCCCCCATCATCTCCAGCACCCAGACCCAGCACGCCCTCCACGGCGAG
AAGGGCCAGATCAAGTGCTTCATCCGGAGCACGCCGCCGCCGGACCGCATCGCCTGGTCCTGGAAGGA
GAACGTTCTGGAGTCGGGCACATCGGGGCGCTATACGGTGGAGACCATCAGCACCGAGGAGGGCGTCA
TCTCCACCCTGACCATCAGCAACATCGTGCGGGCCGACTTCCAGACCATCTACAACTGCACGGCCTGG
AACAGCTTCGGCTCCGACACTGAGATCATCCGGCTCAAGGAGCAAGGTTCGGAAATGAAGTCGGGAGC
CGGGCTGGAAGCAGAGTCTGTGCCGATGGCCGTCATCATTGGGGTGGCCGTAGGAGCTGGTGTGGCCT
TCCTCGTCCTTATGGCAACCATCGTGGCGTTCTGCTGTGCCCGTTCCCAGAGAAATCTCAAAGGTGTT
GTGTCAGCCAAAAATGATATCCGAGTGGAAATTGTCCACAAGGAACCAGCCTCTGGTCGGGAGGGTGA
GGAGCACTCCACCATCAAGCAGCTGATGATGGACCGGGGTGAATTCCAGCAAGACTCAGTCCTGAAAC
AGCTGGAAGGTCCTCAAAGAAGAGGAGAAGAGTTTCAGAACCTGAAGGACCCCACCAATGGCTACTAC
AGCGTCAACACCTTCAAAGAGCACCACTCAACCCCGACCATCTCCCTCTCCAGCTGCCAGCCCGACCT
GCGTCCTGCGGGCAAGCAGCGTGTGCCCACAGGCATGTCCTTCACCAACATCTACAGCACCCTGAGCG
GCCAGGGCCGCCTCTACGACTACGGGCAGCGGTTTGTGCTGGGCATGGGCAGCTCGTCCATCGAGCTT
TGTGAGCGGGAGTTCCAGAGAGGCTCCCTCAGCGACAGCAGCTCCTTCCTGGACACGCAGTGTGACAG
CAGCGTCAGCAGCAGCGGCAAGCAGGATGGCTATGTGCAGTTCGACAAGGCCAGCAAGGCTTCTGCTT
CCTCCTCCCACCACTCCCAGTCCTCGTCCCAGAACTCTGACCCCAGTCGACCCCTGCAGCGGCGGATG
CAGACTCACGTCTAAGGATCACACACCGCGGGTGGGGACGGGCCAGGGAAGAGGTCAGGGCACGTTCT
GGTTGTCCAGGGACTGTGGGGTACTTTACAGAGGACACCAGAATGGCCCACTTCCAGGACAGCCTCCC
AGCGCCTCTGCCACTGCCTTCCTTCGAAGCTCTGATCA

| | | | |
|---|---|---|---|
| NOV30b, CG55784-01 | | | |
| Protein Sequence | SEQ ID NO: 754 | 548 aa | MW at 59933.8kD |

NKAIPGGKETSVTIDIQHPPLVNLSVEPQPVLEDNVVTFHCSAKANPAVTQYRWAKRGQIIKEASGEV
YRTTVDYTYFSEPVSCEVTKALGSTNLSRTVDVYFGPRMTTEPQSLLVDLGSDAILSCAWTGNPSLTI
VWMKRGSGVVLSNEKTLTLKSVRQEDAGKYVCRAVVPRVGAGEREVTLTVNGPPIISSTQTQHALHGE
KGQIKCFIRSTPPPDRIAWSWKENVLESGTSGRYTVETISTEEGVISTLTISNIVPADFQTIYNCTAW
NSFGSDTEIIRLKEQGSEMKSGAGLEAESVPMAVIIGVAVGAGVAFLVLMATIVAFCCARSQRNLKGV
VSAKNDIRVEIVHKEPASGREGEEHSTIKQLMMDRGEFQQDSVLKQLEVLKEEEKEFQNLKDPTNGYY
SVNTFKEHHSTPTISLSSCQPDLRPAGKQRVPTGMSFTNIYSTLSGQGRLYDYGQRFVLGMGSSSIEL
CEREFQRGSLSDSSSFLDTQCDSSVSSSGKQDGYVQFDKASKASASSSHHSQSSSQNSDPSRPLQRRM
QTHV

| | | |
|---|---|---|
| NOV30c, 312000579 | SEQ ID NO: 755 | 1630 bp |
| DNA Sequence | ORF Start: at 2 | ORF Stop: end of sequence |

CACCGGATCCACCAACAAAGCCATCCCCGGAGGAAAGGAGACGTCGGTCACCATTGACATCCAGCACC
CTCCACTGGTCAACCTCTCGGTGGAGCCACAGCCAGTGCTGGAGGACAACGTCGTCACTTTCCACTGC
TCTGCAAAGGCCAACCCAGCTGTCACCCAGTACAGGTGGGCCAAGCGGGGCCAGATCATCAAGGAGGC
ATCTGGAGAGGTGTACAGGACCACAGTGGACTACACGTACTTCTCAGAGCCCGTCTCCTGTGAGGTGA
CCAACGCCCTGGGCAGCACCAACCTCAGCCGCACGGTTGACGTCTACTTTGGGCCCCGGATGACCACA
GAACCCCAATCCTTGCTCGTGGATCTGGGCTCTGATGCCATCTTCAGCTGCGCCTGGACCGGCAACCC
ATCCCTGACCATCGTCTGGATGAAGCGGGGCTCCGGAGTGGTCCTGAGCAATGAGAAGACCCTGACCC
TCAAATCCGTGCGCCAGGAGGACGCGGGCAAGTACGTGTGCCGGGCTGTGGTGCCCCGTGTGGGAGCC
GGGGAGAGAGAGGTGACCCTGACCGTCAATGGACCCCCCATCATCTCCAGCACCCAGACCCAGCACGC
CCTCCACGGCGAGAAGGGCCAGATCAAGTGCTTCATCCGGAGCACGCCGCCGCCGGACCGCATCGCCT
GGTCCTGGAAGGAGAACGTTCTGGAGTCGGGCACATCGGGGCGCTATACGGTGGAGACCATCAGCACC
GAGGAGGGCGTCATCTCCACCCTGACCATCAGCAACATCGTGCGGGCCGACTTCCAGACCATCTACAA
CTGCACGGCCTGGAACAGCTTCGGCTCCGACACTGAGATCATCCGGCTCAAGGAGCAAGAGTCTGTGC
CGATGGCCGTCATCATTGGGGTGGCCGTAGGAGCTGGTGTGGCCTTCCTCGTCCTTATGGCAACCATC
GTGGCGTTCTGCTGTGCCCGTTCCCAGAGAAATCTCAAAGGTGTTGTGTCAGCCAAAAATGATATCCG
AGTGGAAATTGTCCACAAGGAACCAGCCTCTGGTCGGGAGGGTGAGGAGCACTCCACCATCAAGCAGC
TGATGATGGACCGGGGTGAATTCCAGCAAGACTCAGTCCTGAAACAGCTGGAGGTCCTCAAAGAAGAG
GAGAAGAGTTTCAGAACCTGAAGGACCCCACCAATGGCTACTACAGCGTCAACACCTTCAAAAGAGCA
CCACTCAACCCCGACCATCTCCCTCTCCAGCTGCCAGCCCGACCTGCGTCCTGCGGGTAAGCAGCGTG
TGCCCACAGGCATGTCCTTCACCAACATCTACAGCACCCTGAGCGGCCAGGGCCGCCTCTACGACTAC
GGGCAGCGGTTTGTGCTGGGCATGGGCAGCTCGTCCATCGAGCTTTGTGAGCGAAAGTTCCAGAGAGG
CTCCCTCAGCGACAGCAGCTCCTTCCTGGACACGCAGTGTGACAGCAGCGTCAGCAGCAGCGGCAAGC
AGGATGGCTATGTGCAGTTCGACAAGGCCAGCAAGGCTTCTGCTTCCTCCTCCCACCACTCCCAGTCC
TCGTCCCAGAACTCTGACCCCAGTCGACCCCTGCAGCGGCGGATGCAGACTCACGTCCCCGGGGGC

| | | | |
|---|---|---|---|
| NOV30c, 312000579 | | | |
| Protein Sequence | SEQ ID NO: 756 | 543 aa | MW at 59393.1kD |

TGSTNKAIPGGKETSVTIDIQHPPLVNLSVEPQPVLEDNVVTFHCSAKANPAVTQYRWAKRGQIIKEA
SGEVYRTTVDYTYFSEPVSCEVTNALGSTNLSRTVDVYFGPRNTTEPQSLLVDLGSDAIFSCAWTGNP
SLTIVWMKRGSGVVLSNEKTLTLKSVRQEDAGKYVCRAVVPRVGAGEREVTLTVNGPPIISSTQTQHA
LHGEKGQIKCFIRSTPPPDRIAWSWKENVLESGTSGRYTVETISTEEGVISTLTISNIVRADFQTIYN
CTAWNSFGSDTEIIRLKEQESVPMAVIIGVAVGAGVAFLVLMATIVAFCCARSQRNLKGVVSAKNDIR
VEIVHKEPASGREGEEHSTIKQLMMDRGEFQQDSVLKQLEVLKEEEKEFQNLKDPTNGYYSVNTFKEH
HSTPTISLSSCQPDLRPAGKQRVPTGMSFTNTYSTLSGQGRLYDYGQRFVLGMGSSSIELCEREFQRG

| | | |
|---|---|---|
| NOV30d, 311333341 | SEQ ID NO: 757 | 1036 bp |
| DNA Sequence | ORF Start: at 2 | ORF Stop: end of sequence |

CACCGGATCCACCAACAAAGCCATCCCCGGAGGAAAGGAGACGTCGGTCACCATTGACATCCAGCACC
CTCCACTGGTCAACCTCTCGGTGGAGCCACAGCCAGTGCTGGAGGACAACGTCGTCACTTTCCACTGC
TCTGCAAAGGCCAACCCAGCTGTCACCCAGTACAGGTGGGCCAAGCGGGGCCAGATCATCAAGGAGGC
ATCTGGAGAGGTGTACAGGACCACAGTGGACTACACGTACTTCTCAGAGCCCGTCTCCTGTGAGGTGA
CCAACGCCCTGGGCAGCACCAACCTCAGCCGCACGGTTGACGTCTACTTTGGGCCCCGGATGACCACA
GAACCCCAATCCTTGCTCGTGGATCTGGGCTCTGATGCCATCTTCAGCTGCGCCTGGACCGGCAACCC
ATCCCTGACCATCGTCTGGATGAAGCGGGGCTCCGGAGTGGTCCTGAGCAATGAGAAGACCCTGACCC
TCAAATCCGTGCGCCAGGAGGACGCGGGCAAGTACGTGTGCCGGGCTGTGGTGCCCCGTGTGGGAGCC
GGGGAGAGAGAGGTGACCCTGACCGTCAATGGACCCCCCATCATCTCCAGCACCCAGACCCAGCACGC
CCTCCACGGCGAGAAGGGCCAGATCAAGTGCTTCATCCGGAGCACGCCGCCGCCGGACCGCATCGCCT
GGTCCTGGAAGGAGAACGTTCTGGAGTCGGGCACATCGGGGCGCTATACGGTGGAGACCATCAGCACC
GAGGAGGGCGTCATCTCCACCCTGACCATCAGCAACATCGTGCGGGCCGACTTCCAGACCATCTACAA
CTGCACGGCCTGGAACAGCTTCGGCTCCGACACTGAGATCATCCGGCTCAAGGAGCAAGAGTCTGTGC
CGATGGCCGTCATCATTGGGGTGGCCGTAGGAGCTGGTGTGGCCTTCCTCGTCCTTATGGCAACCATC
GTGGCGTTCTGCTGTGCCCGTTCCCAGAGAAATCTCAAAGGTGTTGTGTCAGCCAAAAATGATATCCG
AGTGGAACCCGGGGGC

| | | | |
|---|---|---|---|
| NOV30d, 311333341 | | | |
| Protein Sequence | SEQ ID NO: 758 | 345 aa | MW at 37329.1kD |

TGSTNKAIPGGKETSVTIDIQHPPLVNLSVEPQPVLEDNVVTFHCSAKANPAVTQYRWAKRGQIIKEA
SGEVYRTTVDYTYFSEPVSCEVTNALGSTNLSRTVDVYFGPRMTTEPQSLLVDLGSDAIFSCAWTGNP
SLTIVWMKRGSGVVLSNEKTLTLKSVRQEDAGKYVCRAVVPRVGAGEREVTLTVNGPPIISSTQTQHA
LHGEKGQIKCFIRSTPPPDRIAWSWKENVLESGTSGRYTVETISTEEGVISTLTISNIVRADFQTIYN
CTAWNSFGSDTEIIRLKEQESVPMAVIIGVAVGAGVAFLVLMATIVAFCCARSQRNLKGVVSAKNDIR
VEPGG

| | | |
|---|---|---|
| NOV30e, 311333338 | SEQ ID NO: 759 | 1072 bp |
| DNA Sequence | ORF Start: at 2 | ORF Stop: end of sequence |

CACCGGATCCACCAACAAAGCCATCCCCGGAGGAAAGGAGACGTCGGTCACCATTGACATCCAGCACC
CTCCACTGGTCAACCTCTCGGTGGAGCCACAGCCAGTGCTGGAGGACAACGTCGTCACTTTCCACTGC
TCTGCAAAGGCCAACCCAGCTGTCACCCAGTACAGGTGGGCCAAGCGGGGCCAGATCATCAAGGAGGC
ATCTGGAGAGGTGTACAGGACCACAGTGGACTACACGTACTTCTCAGAGCCCGTCTCCTGTGAGGTGA
CCAACGCCCTGGGCAGCACCAACCTCAGCCGCACGGTTGACGTCTACTTTGGGCCCCGGATGACCACA
GAACCCCAATCCTTGCTCGTGGATCTGGGCTCTGATGCCATCTTCAGCTGCGCCTGGACCGGCAACCC
ATCCCTGACCATCGTCTGGATGAAGCGGGGCTCCGGAGTGGTCCTGAGCAATGAGAAGACCCTGACCC
TCAAATCCGTGCGCCAGGAGGACGCGGGCAAGTACGTGTGCCGGGCTGTGGTGCCCCGTGTGGGAGCC
GGGGAGAGAGAGGTGACCCTGACCGTCAATGGACCCCCCATCATCTCCAGCACCCAGACCCAGCACGC
CCTCCACGGCGAGAAGGGCCAGATCAAGTGCTTCATCCGGAGCACGCCGCCGCCGGACCGCATCGCCT
GGTCCTGGAAGGAGAACGTTCTGGAGTCGGGCACATCGGGGCGCTATACGGTGGAGACCATCAGCACC
GAGGAGGGCGTCATCTCCACCCTGACCATCAGCAACATCGTGCGGGCCGACTTCCAGACCATCTACAA
CTGCACGGCCTGGAACAGCTTCGGCTCCGACACTGAGATCATCCGGCTCAAGGAGCAAGGTTCGGAAA
TGAAGTCGGGAGCCGGGCTGGAAGCAGAGTCTGTGCCGATGGCCGTCATCATTGGGGTGGCCGTAGGA
GCTGGTGTGGCCTTCCTCGTCCTTATGGCAACCATCGTGGCGTTCTGCTGTGCCCGTTCCCAGAGAAA
TCTCAAAGGTGTTGTGTCAGCCAAAAATGATATCCGAGTGGAACCCGGGGGC

| | | | |
|---|---|---|---|
| NOV30e, 311333338 | | | |
| Protein Sequence | SEQ ID NO: 760 | 357 aa | MW at 38447.3kD |

TGSTNKAIPGGKETSVTIDIQHPPLVNLSVEPQPVLEDNVVTFHCSAKANPAVTQYRWAKRGQIIKEA
SGEVYRTTVDYTYFSEPVSCEVTNALGSTNLSRTVDVYFGPRMTTEPQSLLVDLGSDAIFSCAWTGNP
SLTIVWMKRGSGVVLSNEKTLTLKSVRQEDAGKYVCRAVVPRVGAGEREVTLTVNGPPIISSTQTQHA
LHGEKGQIKCFIRSTPPPDRIAWSWKENVLESGTSGRYTVETISTEEGVISTLTISNIVRADFQTIYN
CTAWNSFGSDTEIIRLKEQGSEMKSGAGLEAESVPMAVIIGVAVGAGVAFLVLMATIVAFCCARSQRN
LKGVVSAKNDIRVEPGG

| | | |
|---|---|---|
| NOV30f, 311346885 | SEQ ID NO: 761 | 616 bp |
| DNA Sequence | ORF Start: at 2 | ORF Stop: end of sequence |

CACCGGATCCGAAATTGTCCACAAGGAACCAGCCTCTGGTCGGGAGGGTGAGGAGCACTCCACCATCA
AGCAGCTGATGATGGACCGGGGTGAATTCCAGCAAGACTCAGTCCTGAAACAGCTGGAGGTCCTCAAA
GAAGAGGAGAAAGAGTTTCAGAACCTGAAGGACCCCACCAATGGCTACTACAGCGTCAACACCTTCAA
AGAGCACCACTCAACCCCGACCATCTCCCTCTCCAGCTGCCAGCCCGACCTGCGTCCTGCGGGCAAGC
AGCGTGTGCCCACAGGCATGTCCTTCACCAACATCTACAGCACCCTGAGCGGCCAGGGCCGCCTCTAC
GACTACGGGCAGCGGTTTGTGCTGGGCATGGGCAGCTCGTCCATCGAGCTTTGTGAGCGGGAGTTCCA
GCAAGCAGGATGGCTATGTGCAGTTCGACAAGGCCAGCAAGGCTTCTGCTTCCTCCTCCCACCACTCC
GGGC

| | | | |
|---|---|---|---|
| NOV30f, 311346885 | | | |
| Protein Sequence | SEQ ID NO: 762 | 205 aa | MW at 22667.6kD |

TGSEIVHKEPASGREGEEHSTIKQLMMDRGEFQQDSVLKQLEVLKEEEKEFQNLKDPTNGYYSVNTFK
EHHSTPTISLSSCQPDLRPAGKQRVPTGMSFTNTYSTLSGQGRLYDYGQRFVLGMGSSSIELCEREFQ
RGSLSDSSSFLDTQCDSSVSSSGKQDGYVQFDKASKASASSSHHSQSSSQNSDPSRPLQRRMQTHVPG

| | | |
|---|---|---|
| NOV30g, 311333299 | SEQ ID NO: 763 | 1666 bp |
| DNA Sequence | ORF Start: at 2 | ORF Stop: end of sequence |

CACCGGATCCACCAACAAAGCCATCCCCGGAGGAAAGGAGACGTCGGTCACCATTGACATCCAGCACC
CTCCACTGGTCAACCTCTCGGTGGAGCCACAGCCAGTGCTGGAGGACAACGTCGTCACTTTCCACTGC
TCTGCAAAGGCCAACCCAGCTGTCACCCAGTACAGGTGGGCCAAGCGGGGCCAGATCATCAAGGAGGC
ATCTGGAGAGGTGTACAGGACCACAGTGGACTACACGTACTTCTCAGAGCCCGTCTCCTGTGAGGTGA
CCAACGCCCTGGGCAGCACCAACCTCAGCCGCACGGTTGACGTCTACTTTGGGCCCCGGATGACCACA
GAACCCCAATCCTTGCTCGTGGATCTGGGCTCTGATGCCATCTTCAGCTGCGCCTGGACCGGCAACCC
ATCCCTGACCATCGTCTGGATGAAGCGGGGCTCCGGAGTGGTCCTGAGCAATGAGAAGACCCTGACCC
TCAAATCCGTGCGCCAGGAGGACGCGGGCAAGTACGTGTGCCGGGCTGTGGTGCCCCGTGTGGGAGCC
GGGGAGAGAGAGGTGACCCTGACCGTCAATGGACCCCCCATCATCTCCAGCACCCAGACCCAGCACGC
CCTCCACGGCGAGAAGGGCCAGATCAAGTGCTTCATCCGGAGCACGCCGCCGCCGGACCGCATCGCCT
GGTCCTGGAAGGAGAACGTTCTGGAGTCGGGCACATCGGGGCGCTATACGGTGGAGACCATCAGCACC
GAGGAGGGCGTCATCTCCACCCTGACCATCAGCAACATCGTGCGGGCCGACTTCCAGACCATCTACAA
CTGCACGGCCTGGAACAGCTTCGGCTCCGACACTGAGATCATCCGGCTCAAGGAGCAAGGTTCGGAAA
TGAAGTCGGGAGCCGGGCTGGAAGCAGAGTCTGTGCCGATGGCCGTCATCATTGGGGTGGCCGTAGGA
GCTGGTGTGGCCTTCCTCGTCCTTATGGCAACCATCGTGGCGTTCTGCTGTGCCCGTTCCCAGAGAAA
TCTCAAAGGTGTTGTGTCAGCCAAAAATGATATCCGAGTGGAAATTGTCCACAAGGAACCAGCCTCTG
GTCGGGAGGGTGAGGAGCACTCCACCATCAAGCAGCTGATGATGGACCGGGGTGAATTCCAGCAAGAC
TCAGTCCTGAAACAGCTGGAGGTCCTCAAAGAAGAGGAGAAAGAGTTTCAGAACCTGAAGGACCCCAC
CAATGGCTACTACAGCGTCAACACCTTCAAAGAGCACCACTCAACCCCGACCATCTCCCTCTCCAGCT
GCCAGCCCGACCTGCGTCCTGCGGGCAAGCAGCGTGTGCCCACAGGCATGTCCTTCACCAACATCTAC
AGCACCCTGAGCGGCCAGGGCCGCCTCTACGACTACGGGCAGCGGTTTGTGCTGGGCATGGGCAGCTC
GTCCATCGAGCTTTGTGAGCGGGAGTTCCAGAGAGGCTCCCTCAGCGACAGCAGCTCCTTCCTGGACA
CGCAGTGTGACAGCAGCGTCAGCAGCAGCGGCAAGCAGGATGGCTATGTGCAGTTCGACAAGGCCAGC
AAGGCTTCTGCTTCCTCCTCCCACCACTCCCAGTCCTCGTCCCAGAACTCTGACCCCAGTCGACCCCT
GCAGCGGCGGATGCAGACTCACGTCCCCGGGGGC

| | | | |
|---|---|---|---|
| NOV30g, 311333299 | | | |
| Protein Sequence | SEQ ID NO: 764 | 555 aa | MW at 60511.3kD |

TGSTNKAIPGGKETSVTIDIQHPPLVNLSVEPQPVLEDNVVTFHCSAKANPAVTQYRWAKRGQIIKEA
SGEVYRTTVDYTYFSEPVSCEVTNALGSTNLSRTVDVYFGPRMTTEPQSLLVDLGSDAIFSCAWTGNP
SLTIVWMKRGSGVVLSNEKTLTLKSVRQEDAGKYVCPAVVPRVGAGEREVTLTVNGPPIISSTQTQHA
LHGEKGQIKCFIRSTPPPDRIAWSWKENVLESGTSGRYTVETISTEEGVISTLTISNIVRADFQTIYN
CTAWNSFGSDTEIIRLKEQGSEMKSGAGLEAESVPMAVIIGVAVGAGVAFLVLMATIVAFCCARSQRN
LKGVVSAKNDIRVEIVHKEPASGREGEEHSTIKQLMMDRGEFQQDSVLKQLEVLKEEEKEFQNLKDPT
NGYYSVNTFKEHHSTPTISLSSCQPDLRPAGKQRVPTGMSFTNIYSTLSGQGRLYDYGQRFVLGMGSS
SIELCEREFQRGSLSDSSSFLDTQCDSSVSSSGKQDGYVQFDKASKASASSSHHSQSSSQNSDPSRPL
QRRMQTHVPGG

| | | |
|---|---|---|
| NOV30h, CG55784-02 | SEQ ID NO: 765 | 891 bp |
| DNA Sequence | ORF Start: at 1 | ORF Stop: end of sequence |

AACAAAGCCATCCCCGGAGGAAAGGAGACGTCGGTCACCATTGACATCCAGCACCCTCCACTGGTCAA
CCTCTCGGTGGAGCCACAGCCAGTGCTGGAGGACAACGTCGTCACTTTCCACTGCTCTGCAAAGGCCA
ACCCAGCTGTCACCCAGTACAGGTGGGCCAAGCGGGGCCAGATCATCAAGGAGGCATCTGGAGAGGTG
TACAGGACCACAGTGGACTACACGTACTTCTCAGAGCCCGTCTCCTGTGAGGTGACCAACGCCCTGGG
CAGCACCAACCTCAGCCGCACGGTTGACGTCTACTTTGGGCCCCGGATGACCACAGAACCCCAATCCT
TGCTCGTGGATCTGGGCTCTGATGCCATCTTCAGCTGCGCCTGGACCGGCAACCCATCCCTGACCATC
GTCTGGATGAAGCGGGGCTCCGGAGTGGTCCTGAGCAATGAGAAGACCCTGACCCTCAAATCCGTGCG
CCAGGAGGACGCGGGCAAGTACGTGTGCCGGGCTGTGGTGCCCCGTGTGGGAGCCGGGGAGAGAGAGG
TGACCCTGACCGTCAATGGACCCCCCATCATCTCCAGCACCCAGACCCAGCACGCCCTCCACGGCGAG
AAGGGCCAGATCAAGTGCTTCATCCGGAGCACGCCGCCGCCGGACCGCATCGCCTGGTCCTGGAAGGA
GAACGTTCTGGAGTCGGGCACATCGGGGCGCTATACGGTGGAGACCATCAGCACCGAGGAGGGCGTCA
TCTCCACCCTGACCATCAGCAACATCGTGCGGGCCGACTTCCAGACCATCTACAACTGCACGGCCTGG
AACAGCTTCGGCTCCGACACTGAGATCATCCGGCTCAAGGAGCAAGGTTCGGAAATGAAGTCGGGAGC
CGGGCTG

| | | | |
|---|---|---|---|
| NOV30h, CG55784-02 | | | |
| Protein Sequence | SEQ ID NO: 766 | 297 aa | MW at 32432.3kD |

NKAIPGGKETSVTIDIQHPPLVNLSVEPQPVLEDNVVTFHCSAKANPAVTQYRWAKRGQIIKEASGEV
YRTTVDYTYFSEPVSCEVTNALGSTNLSRTVDVYFGPRMTTEPQSLLVDLGSDAIFSCAWTGNPSLTI
VWMKRGSGVVLSNEKTLTLKSVRQEDAGKYVCEAVVPRVGAGEREVTLTVNGPPIISSTQTQHALHGE
KGQIKCFIRSTPPPDRIAWSWKENVLESGTSGRYTVETISTEEGVISTLTISNIVRADFQTIYNCTAW
NSFGSDTEIIRLKEQGSEMKSGAGL

| | | |
|---|---|---|
| NOV30i, | | |
| SNP13376439 of | SEQ ID NO: 767 | 1806 bp |
| CG55784-01, | ORF Start: at 1 | ORF Stop: TAA at 1645 |
| DNA Sequence | SNP Pos: 1305 | SNP Change: C to T |

AACAAAGCCATCCCCGGAGGAAAGGAGACGTCGGTCACCATTGACATCCAGCACCCTCCACTGGTCAA
CCTCTCGGTGGAGCCACAGCCAGTGCTGGAGGACAACGTCGTCACTTTCCACTGCTCTGCAAAGGCCA
ACCCAGCTGTCACCCAGTACAGGTGGGCCAAGCGGGGCCAGATCATCAAGGAGGCATCTGGAGAGGTG
TACAGGACCACAGTGGACTACACGTACTTCTCAGAGCCCGTCTCCTGTGAGGTGACCAAAGCCCTGGG
CAGCACCAACCTCAGCCGCACGGTTGACGTCTACTTTGGGCCCCGGATGACCACAGAACCCCAATCCT
TGCTCGTGGATCTGGGCTCTGATGCCATCTTAAGCTGCGCCTGGACCGGCAACCCATCCCTGACCATC
GTCTGGATGAAGCGGGGCTCCGGAGTGGTCCTGAGCAATGAGAAGACCCTGACCCTCAAATCCGTGCG
CCAGGAGGACGCGGGCAAGTACGTGTGCCGGGCTGTGGTGCCCCGTGTGGGAGCCGGGGAGAGAGAGG
TGACCCTGACCGTCAATGGACCCCCCATCATCTCCAGCACCCAGACCCAGCACGCCCTCCACGGCGAG
AAGGGCCAGATCAAGTGCTTCATCCGGAGCACGCCGCCGCCGGACCGCATCGCCTGGTCCTGGAAGGA
GAACGTTCTGGAGTCGGGCACATCGGGGCGCTATACGGTGGAGACCATCAGCACCGAGGAGGGCGTCA
TCTCCACCCTGACCATCAGCAACATCGTGCGGGCCGACTTCCAGACCATCTACAACTGCACGGCCTGG
AACAGCTTCGGCTCCGACACTGAGATCATCCGGCTCAAGGAGCAAGGTTCGGAAATGAAGTCGGGAGC
CGGGCTGGAAGCAGAGTCTGTGCCGATGGCCGTCATCATTGGGGTGGCCGTAGGAGCTGGTGTGGCCT
TCCTCGTCCTTATGGCAACCATCGTGGCGTTCTGCTGTGCCCGTTCCCAGAGAAATCTCAAAGGTGTT
GTGTCAGCCAAAAATGATATCCGAGTGGAAATTGTCCACAAGGAACCAGCCTCTGGTCGGGAGGGTGA
GGAGCACTCCACCATCAAGCAGCTGATGATGGACCGGGGTGAATTCCAGCAAGACTCAGTCCTGAAAC
AGCTGGAGGTCCTCAAAGAAGAGGAGAAAGAGTTTCAGAACCTGAAGGACCCCACCAATGGCTACTAC
AGCGTCAACACCTTCAAAGAGCACCACTCAACCCCGACCATCTCCCTCTCCAGCTGCCAGCCCGACCT
GCGTCCTGCGGGTAAGCAGCGTGTGCCCACAGGCATGTCCTTCACCAACATCTACAGCACCCTGAGCG
GCCAGGGCCGCCTCTACGACTACGGGCAGCGGTTTGTGCTGGGCATGGGCAGCTCGTCCATCGAGCTT
TGTGAGCGGGAGTTCCAGAGAGGCTCCCTCAGCGACAGCAGCTCCTTCCTGGACACGCAGTGTGACAG
CAGCGTCAGCAGCAGCGGCAAGCAGGATGGCTATGTGCAGTTCGACAAGGCCAGCAAGGCTTCTGCTT
CCTCCTCCCACCACTCCCAGTCCTCGTCCCAGAACTCTGACCCCAGTCGACCCCTGCAGCGGCGGATG
CAGACTCACGTCTAAGGATCACACACCGCGGGTGGGGACGGGCCAGGGAAGAGGTCAGGGCACGTTCT
GGTTGTCCAGGGACTGTGGGGTACTTTACAGAGGACACCAGAATGGCCCACTTCCAGGACAGCCTCCC
AGCGCCTCTGCCACTGCCTTCCTTCGAAGCTCTGATCA

| | | | |
|---|---|---|---|
| Nov30i, | | | |
| SNP1 3376439 of | | | |
| CG55784-01, | SEQ ID NO: 768 | | MW at 59933.8kD |
| Protein Sequence | SNP Pos: 435 | 548 aa | SNP Change: Gly to Gly |

NKAIPGGKETSVTIDIQHPPLVNLSVEPQPVLEDNVVTFHCSAKANPAVTQYRWAKRGQIIKEASGEV
YRTTVDYTYFSEPVSCEVTKALGSTNLSRTVDVYFGPRMTTEPQSLLVDLGSDAILSCAWTGNPSLTI
VWMKRGSGVVLSNEKTLTLKSVRQEDAGKYVCRAVVPRVGAGEREVTLTVNGPPIISSTQTQHALHGE
KGQIKCFIRSTPPPDRIAWSWKENVLESGTSGRYTVETISTEEGVISTLTISNIVRADFQTIYNCTAW
NSFGSDTEIIRLKEQGSEMKSGAGLEAESVPMAVIIGVAVGAGVAFLVLMATIVAFCCARSQRNLKGV
VSAKNDIRVEIVHKEPASGREGEEHSTIKQLMMDRGEFQQDSVLKQLEVLKEEEKEFQNLKDPTNGYY
SVNTFKEHHSTPTISLSSCQPDLRPAGKQRVPTGMSFTNIYSTLSGQGRLYDYGQRFVLGMGSSSIEL
CEREFQRGSLSDSSSFLDTQCDSSVSSSGKQDGYVQFDKASKASASSSHHSQSSSQNSDPSRPLQRRM
QTHV

[0525] A ClustalW comparison of the above protein sequences yields the following sequence alignment shown in Table 30B.

TABLE 30B

Comparison of the NOV30 protein sequences.

| | |
|---|---|
| NOV30a | MKPFQLDLLFVCFFLFSQELGLQKRGCCLVLGYMAKDKFRRMNEGQVYSFSQQPQDQVVV |
| NOV30b | ------------------------------------------------------------ |
| NOV30c | ------------------------------------------------------------ |
| NOV30d | ------------------------------------------------------------ |
| NOV30e | ------------------------------------------------------------ |
| NOV30f | ------------------------------------------------------------ |
| NOV30g | ------------------------------------------------------------ |
| NOV30h | ------------------------------------------------------------ |
| NOV30a | SGQPVTLLCAIPEYDGFVLWIKDGLALGVGRDLSSYPQYLVVGNHLSGEHHLKILRAELQ |
| NOV30b | ------------------------------------------------------------ |
| NOV30c | ------------------------------------------------------------ |
| NOV30d | ------------------------------------------------------------ |
| NOV30e | ------------------------------------------------------------ |
| NOV30f | ------------------------------------------------------------ |
| NOV30g | ------------------------------------------------------------ |
| NOV30h | ------------------------------------------------------------ |
| NOV30a | DDAVYECQAIQAAIRSRPARLTVLVPPDDPVILGGPVISLRAGDPLNLTCHADNAKPAAS |
| NOV30b | ------------------------------------------------------------- |
| NOV30c | ------------------------------------------------------------- |
| NOV30d | ------------------------------------------------------------- |
| NOV30e | ------------------------------------------------------------- |
| NOV30f | ------------------------------------------------------------- |
| NOV30g | ------------------------------------------------------------- |
| NOV30h | ------------------------------------------------------------- |
| NOV30a | IIWLRKGEVINGATYSKTLLRDGKRESIVSTLFISPGDVENGQSIVCRATNKAIPGGKET |
| NOV30b | --------------------------------------------------NKAIPGGKET |
| NOV30c | ----------------------------------------------TGSTNKAIPGGKET |
| NOV30d | ----------------------------------------------TGSTNKAIPGGKET |
| NOV30e | ----------------------------------------------TGSTNKAIPGGKET |
| NOV30f | -------------------------------------------------TGSEIVHKEPA |
| NOV30g | ----------------------------------------------TGSTNKAIPGGKET |
| NOV30h | --------------------------------------------------NKAIPGGKET |
| NOV30a | SVTIDIQHPPLVNLSVEPQPVLEDNVVTFHCSAKANPAVTQYRWAKRGQIIKEASGEVYR |
| NOV30b | SVTIDIQHPPLVNLSVEPQPVLEDNVVTFHCSAKANPAVTQYRWAKRGQIIKEASGEVYR |
| NOV30c | SVTIDIQHPPLVNLSVEPQPVLEDNVVTFHCSAKANPAVTQYRWAKRGQIIKEASGEVYR |
| NOV30d | SVTIDIQHPPLVNLSVEPQPVLEDNVVTFHCSAKANPAVTQYRWAKRGQIIKEASGEVYR |
| NOV30e | SVTIDIQHPPLVNLSVEPQPVLEDNVVTFHCSAKANPAVTQYRWAKRGQIIKEASGEVYR |
| NOV30f | SGREGEEHSTIKQLMMDRGEFQQDSVLKQLEVLKEEEKEFQNLKDPTNGYYSVNTFKEHH |
| NOV30g | SVTIDIQHPPLVNLSVEPQPVLEDNVVTFHCSAKANPAVTQYRWAKRGQIIKEASGEVYR |
| NOV30h | SVTIDIQHPPLVNLSVEPQPVLEDNVVTFHCSAKANPAVTQYRWAKRGQIIKEASGEVYR |
| NOV30a | TTVDYTYFSEPVSCEVTNALGSTNLSRTVDVYFGPRMTTEPQSLLVDLGSDAIFSCAWTG |
| NOV30b | TTVDYTYFSEPVSCEVTKALGSTNLSRTVDVYFGPRMTTEPQSLLVDLGSDAILSCAWTG |
| NOV30c | TTVDYTYFSEPVSCEVTNALGSTNLSRTVDVYFGPRMTTEPQSLLVDLGSDAIFSCAWTG |
| NOV30d | TTVDYTYFSEPVSCEVTNALGSTNLSRTVDVYFGPRMTTEPQSLLVDLGSDAIFSCAWTG |
| NOV30e | TTVDYTYFSEPVSCEVTNALGSThLSRTVDVYFGPRMTTEPQSLLVDLGSDAIFSCAWTG |
| NOV30f | STPTISLSSCQPDLRPAGKQRVPTGMSFTNIYSTLSGQGR----LYDYGQRFVLGMGSS- |
| NOV30g | TTVDYTYFSEPVSCEVTNALGSTNLSRTVDVYFGPRMTTEPQSLLVDLGSDAIFSCAWTG |
| NOV30h | TTVDYTYFSEPVSCEVTNALGSTNLSRnTDVYFGPRMTTEPQSLLVDLGSDAIFSCAWTG |
| NOV30a | NPSLTIVWMKRGSGVVLSNEKTLTLKSVRQEDAGKYVCBAVVPRVGAGEREVTLTVNGPP |
| NOV30b | NPSLTIVWMKRGSGVVLSNEKTLTLKSVRQEDAGKYVCRAVVPRVGAGEREVTLTVNGPP |
| NOV30c | NPSLTIVWMKRGSGVVLSNEKTLTLKSVRQEDAGKYVCRAVVPRVGAGEREVTLTVNGPP |
| NOV30d | NPSLTIVWMKRGSGVVLSNEKTLTLKSVRQEDAGKYVCRAVVPRVGAGEREVTLTVNGPP |
| NOV30e | NPSLTIVWMKRGSGVVLSNEKTLTLKSVRQEDAGKYVCRAVVPRVGAGEREVTLTVNGPP |
| NOV30f | SIELCEREFQRGS---LSDSSSFLDTQCDSSVSSSGKQDGYVQFDKASKASASSSHHSQ- |
| NOV30g | NPSLTIVWMKRGSGVVLSNEKTLTLKSVRQEDAGKYVCRAVVPRVGAGEREVTLTVNGPP |
| NOV30h | NPSLTIVWMKRGSGVVLSNEKTLTLKSVRQEDAGKYVCRAVVPRVGAGEREVTLTVNGPP |
| NOV30a | IISSTQTQHALHGEKGQIKCFIRSTPPPDRIAWSWKENVLESGTSGRYTVETISTEEGVI |
| NOV30b | IISSTQTQHALHGEKGQIKCFIRSTPPPDRIAWSWKENVLESGTSGRYTVETISTEEGVI |
| NOV30c | IISSTQTQHALHGEKGQIKCFIRSTPPPDRIAWSWKENVLESGTSGRYTVETISTEEGVI |
| NOV30d | IISSTQTQHALHGEKGQIKCFIRSTPPPDRIAWSWKENVLESGTSGRYTVETISTEEGVI |
| NOV30e | IISSTQTQHALHGEKGQIKCFIRSTPPPDRIAWSWKENVLESGTSGRYTVETISTEEGVI |
| NOV30f | -S-SSQNSDPSRPLQRRMQTHVPGG----------------------------------- |
| NOV30g | IISSTQTQHALHGEKGQIKCFIRSTPPPDRIAWSWKENVLESGTSGRYTVETTSTEEGVI |
| NOV30h | IISSTQTQHALHGEKGQIKCFIRSTPPPDRIAWSWKENVLESGTSGRYTVETTSTEEGVI |
| NOV30a | STLTISNIVRADFQTIYNCTAWNSFGSDTEIIRLKEQ------------ESVPMAVIIGV |
| NOV30b | STLTISNIVPADFQTIYNCTAWNSFGSDTEIIRLKEQGSEMKSGAGLEAESVPMAVIIGV |
| NOV30c | STLTISNIVRADFQTIYNCTAWNSFGSDTEIIRLKEQ------------ESVPMAVIIGV |
| NOV30d | STLTISNIVRADFQTIYNCTAWNSFGSDTEIIRLKEQ------------ESVPMAVIIGV |
| NOV30e | STLTISNIVRADFQTIYNCTAWNSFGSDTEIIRLKEQGSEMKSGAGLEAESVPMAVIIGV |
| NOV30f | ------------------------------------------------------------ |
| NOV30g | STLTISNIVPADFQTIYNCTAWNSFGSDTEIIRLKEQGSEMKSGAGLEAESVPMAVIIGV |
| NOV30h | STLTISNIVHADFQTIYNCTAWNSFGSDTEIIRLKEQG-------------------SEM |
| NOV30a | AVGAGVAFLVLMATIVAFCCARSQRNLKGVVSAKNDIRVEIVHKEPASGREGEEHSTIKQ |
| NOV30b | AVGAGVAFLVLMATIVAFCCARSQRNLKGVVSAKNDIRVEIVHKEPASGREGEEHSTIKQ |
| NOV30c | AVGAGVAFLVLMATIVAFCCARSQRNLKGVVSAKNDIRVEIVHKEPASGREGEEHSTIKQ |
| NOV30d | AVGAGVAFLVLMATIVAFCCARSQHNLKGVVSAKNDIRVEPGG----------------- |
| NOV30e | AVGAGVAFLVLMATIVAFCCARSQRNLKGVVSAKNDIRVEPGG----------------- |
| NOV30f | ------------------------------------------------------------ |
| NOV30g | AVGAGVAFLVLMATIVAFCCARSQRNLKGVVSAKNDIRVEIVHKEPASGREGEEHSTIKQ |
| NOV30h | KSGAGL------------------------------------------------------ |
| NOV30a | LMMDRGEFQQDSVLKQLEVLKEEEKEFQNLKDPTNGYYSVNTFKEHHSTPTISLSSCQPD |
| NOV30b | LMMDRGEFQQDSVLKQLEVLKEEEKEFQNLKDPTNGYYSVNTFKEHHSTPTISLSSCQPD |
| NOV30c | LMMDRGEFQQDSVLKQLEVLKEEEKEFQNLKDPTNGYYSVNTFKEHHSTPTISLSSCQPD |
| NOV30d | ------------------------------------------------------------ |
| NOV30e | ------------------------------------------------------------ |
| NOV30f | ------------------------------------------------------------ |
| NOV30g | LMMDRGEFQQDSVLKQLEVLKEEEKEFQNLKDPTNGYYSVNTFKEHHSTPTISLSSCQPD |
| NOV30h | ------------------------------------------------------------ |
| NOV30a | LRPAGKQRVPTGMSFTNIYSTLSGQGRLYDYGQRFVLGMGSSSIELCEREFQRGSLSDSS |
| NOV30b | LRPAGKQRVPTGMSFTNIYSTLSGQGRLYDYGQRFVLGMGSSSIELCEREFQRGSLSDSS |
| NOV30c | LRPAGKQRVPTGMSFTNIYSTLSGQGRLYDYGQRFVLGMGSSSIELCEREFQRGSLSDSS |
| NOV30d | ------------------------------------------------------------ |
| NOV30e | ------------------------------------------------------------ |
| NOV30f | ------------------------------------------------------------ |
| NOV30g | LRPAGKQRVPTGMSFTNIYSTLSGQGRLYDYGQRFVLGMGSSSIELCEREFQRGSLSDSS |
| NOV30h | ------------------------------------------------------------ |
| NOV30a | SFLDTQCDSSVSSSGKQDGYVQFDKASKASASSSHHSQSSSQNSDPSRPLQRRMQTHV-- |
| NOV30b | SFLDTQCDSSVSSSGKQDGYVQFDKASKASASSSHHSQSSSQNSDPSRPLQRRMQTHV-- |
| NOV30c | SFLDTQCDSSVSSSGKQDGYVQFDKASKASASSSHHSQSSSQNSDPSRPLQRRMQTHVPG |
| NOV30d | ------------------------------------------------------------ |
| NOV30e | ------------------------------------------------------------ |
| NOV30f | ------------------------------------------------------------ |
| NOV30g | SFLDTQCDSSVSSSGKQDGYVQFDKASKASASSSHHSQSSSQNSDPSRPLQRRMQTHVPG |
| NOV30h | ------------------------------------------------------------ |
| NOV30a | - |
| NOV30b | - |
| NOV30c | G |
| NOV30d | - |
| NOV30e | - |
| NOV30f | - |
| NOV30g | G |
| NOV30h | - |
| NOV30a | (SEQ ID NO: 752) |
| NOV30b | (SEQ ID NO: 754) |
| NOV30c | (SEQ ID NO: 756) |
| NOV30d | (SEQ ID NO: 758) |
| NOV30e | (SEQ ID NO: 760) |
| NOV30f | (SEQ ID NO: 762) |
| NOV30g | (SEQ ID NO: 764) |
| NOV30h | (SEQ ID NO: 766) |

[0526] Further analysis of the NOV30a protein yielded the following properties shown in Table 30C.

TABLE 30C
Protein Sequence Properties NOV30a

| | |
|---|---|
| SignalP analysis: | Cleavage site between residues 24 and 25 |
| PSORT II analysis: | |

| PSG: | a new signal peptide prediction method | |
|---|---|---|
| | N-region: | length 7; pos. chg 1; neg. chg 1 |
| | H-region: | length 11; peak value 13.09 |
| | PSG score: | 8.69 |

| | |
|---|---|
| GvH: | von Heijne's method for signal seq. recognition |
| | GvH score (threshold: −2.1): −3.29 |
| | possible cleavage site: between 17 and 18 |

>>> Seems to have no N-terminal signal peptide

| ALOM: | Klein et al's method for TM region allocation | | |
|---|---|---|---|
| | Init position for calculation: 1 | | |
| | Tentative number of TMS(s) for the threshold 0.5: 2 | | |
| | Number of TMS(s) for threshold 0.5: 1 | | |
| | INTEGRAL | Likelihood = | Transmembrane 524-540 |
| | | −10.40 | |

| | |
|---|---|
| PERIPHERAL | Likelihood = 1.54 (at 65) |

| | |
|---|---|
| | ALOM score: −10.40 (number of TMSs: 1) |
| MTOP: | Prediction of membrane topology (Hartmann et al.) |
| | Center position for calculation: 531 |
| | Charge difference: 5.0 C(3.0)-N(−2.0) |
| | C > N: C-terminal side will be inside |

>>>Caution: Inconsistent mtop result with signal peptide
>>> membrane topology: type 1b (cytoplasmic tail 524 to 766)

| MITDISC: | discrimination of mitochondrial targeting seq | | | |
|---|---|---|---|---|
| | R content: | 0 | Hyd Moment(75): | 8.25 |
| | Hyd Moment(95): | 6.93 | G content: | 0 |
| | D/E content: | 2 | S/T content: | 1 |

| | |
|---|---|
| | Score: −6.35 |
| Gavel: | prediction of cleavage sites for mitochondrial preseq |
| | cleavage site motif not found |

NUCDISC: discrimination of nuclear localization signals

| | |
|---|---|
| | pat4: none |
| | pat7: none |
| | bipartite: KRGCCLVLGYMAKDKFR at 24 |
| | content of basic residues: 10.2% |
| | NLS Score: 0.02 |
| KDEL: | ER retention motif in the C-terminus: none |

ER Membrane Retention Signals: none
SKL: peroxisomal targeting signal in the C-terminus: none
PTS2: 2nd peroxisomal targeting signal: none
VAC: possible vacuolar targeting motif: none
RNA-binding motif: none
Actinin-type actin-binding motif:

type 1: none
type 2: none

NMYR: N-myristoylation pattern: none
Prenylation motif: none
memYQRL: transport motif from cell surface to Golgi: none
Tyrosines in the tail: too long tail
Dileucine motif in the tail: none
checking 63 PROSITE DNA binding motifs:

Leucine zipper pattern (PS00029): *** found ***
LLFVCFFLFSQELGLQKRGCCL at 8

none
checking 71 PROSITE ribosomal protein motifs: none
checking 33 PROSITE prokaryotic DNA binding motifs: none

| | |
|---|---|
| NNCN: | Reinhardt's method for Cytoplasmic/Nuclear discrimination |
| | Prediction: cytoplasmic |
| | Reliability: 55.5 |
| COIL: | Lupas's algorithm to detect coiled-coil regions |
| | total: 0 residues |

Final Results (k = 9/23):

```
39.1%: nuclear
21.7%: cytoplasmic
17.4%: mitochondrial
  8.7%: vesicles of secretory system
  4.3%: vacuolar
  4.3%: peroxisomal
  4.3%: endoplasmic reticulum
```

>> prediction for CG55784-03 is nuc (k = 23)

[0527] A search of the NOV30a protein against the Geneseq database, a proprietary database that contains sequences published in patents and patent publication, yielded several homologous proteins shown in Table 30D.

TABLE 30D
Geneseq Results for NOV30a

| | | NOV30a | Identities/ | | |
|---|---|---|---|---|---|
| | | Residues/ | Similarities for | | |
| Geneseq | Protein/Organism/Length | Match | the Matched | | Expect |
| Identifier | [Patent #, Date] | Residues | Region | | Value |
| ABG96273 | Human immunoglobulin superfamily | 1 . . . 766 | 766/766 | (100%) | 0.0 |
| | protein IGSFP-11 - Homo sapiens, 766 | 1 . . . 766 | 766/766 | (100%) | |
| | aa. [WO200272794-A2, 19-SEP-2002] | | | | |
| ABU58692 | Human PRO polypeptide #293 - Homo | 1 . . . 557 | 554/569 | (97%) | 0.0 |
| | sapiens, 600 aa. [US2003027272-A1, | 1 . . . 569 | 555/569 | (97%) | |
| | 06-FEB-2003] | | | | |
| ABU57223 | Human PRO polypeptide #293 - Homo | 1 . . . 557 | 554/569 | (97%) | 0.0 |
| | sapiens, 600 aa. [US2003027280-A1, | 1 . . . 569 | 555/569 | (97%) | |
| | 06-FEB-2003] | | | | |
| ABU56228 | Human secreted/transmembrane | 1 . . . 557 | 554/569 | (97%) | 0.0 |
| | protein, PRO19814 - Homo sapiens, | 1 . . . 569 | 555/569 | (97%) | |
| | 600 aa. [US2003022298-A1, 30-JAN- | | | | |
| | 2003] | | | | |
| ABU10802 | Human secreted/transmembrane | 1 . . . 557 | 554/569 | (97%) | 0.0 |
| | protein #293 - Homo sapiens, 600 aa. | 1 . . . 569 | 555/569 | (97%) | |
| | [US2002127584-A1, 12-SEP-2002] | | | | |

[0528] In a BLAST search of public sequence databases, the NOV30a protein was found to have homology to the proteins shown in the BLASTP data in Table 30E.

TABLE 30E
Public BLASTP Results for NOV30a

| | | NOV30a | Identities/ | |
|---|---|---|---|---|
| Protein | | Residues/ | Similarities for | |
| Accession | | Match | the Matched | Expect |
| Number | Protein/Organism/Length | Residues | Portion | Value |
| Q8IZU9 | NPEH2 - Homo sapiens (Human), | 1 . . . 766 | 766/778 (98%) | 0.0 |
| | 778 aa. | 1 . . . 778 | 766/778 (98%) | |
| Q96JG0 | Hypothetical protein KIAA1867 - | 1 . . . 766 | 766/778 (98%) | 0.0 |
| | Homo sapiens (Human), 779 aa | 2 . . . 779 | 766/778 (98%) | |
| | (fragment). | | | |
| AAO41835 | Membrane protein mKirre - Mus | 1 . . . 766 | 750/766 (97%) | 0.0 |
| | musculus (Mouse), 766 aa. | 1 . . . 766 | 762/766 (98%) | |
| Q8BR86 | Weakly similar to NEPH1 - Mus | 1 . . . 766 | 750/778 (96%) | 0.0 |
| | musculus (Mouse), 778 aa. | 1 . . . 778 | 762/778 (97%) | |
| Q8BGQ5 | Weakly similar to NEPH1 - Mus | 1 . . . 591 | 575/591 (97%) | 0.0 |
| | musculus (Mouse), 612 aa. | 1 . . . 591 | 588/591 (99%) | |

[0529] PFam analysis predicts that the NOV30a protein contains the domains shown in the Table 30F.

TABLE 30F
Domain Analysis of NOV30a

| | | Identities/ | |
|---|---|---|---|
| | | Similarities | |
| Pfam | NOV30a | for the | Expect |
| Domain | Match Region | Matched Region | Value |
| ig | 62 . . . 129 | 14/72 (19%) | 0.00022 |
| | | 41/72 (57%) | |
| ig | 163 . . . 229 | 13/69 (19%) | 0.0045 |
| | | 43/69 (62%) | |
| ig | 349 . . . 400 | 15/55 (27%) | 1.6e−06 |
| | | 39/55 (71%) | |
| ig | 433 . . . 501 | 12/70 (17%) | 0.31 |
| | | 45/70 (64%) | |

### Example 31

[0530] The NOV31 clone was analyzed, and the nucleotide and encoded polypeptide sequences are shown in Table 31A.

TABLE 31A

NOV31 Sequence Analysis

| | | |
|---|---|---|
| NOV31a, CG55790-02 | SEQ ID NO: 769 | 8250 bp |
| DNA Sequence | ORF Start: ATG at 4 | ORF Stop: TAG at 1423 |

ACCATGCGGCTGGGCAGTCCTGGACTGCTCTTCCTGCTCTTCAGCAGCCTTCGAGCTGATACTCAGGA
GAAGGAAGTCAGAGCGATGGTAGGCAGCGACGTGGAGCTCAGCTGCGCTTGCCCTGAAGGAAGCCGTT
TTGATTTAAATGATGTTTACGTATATTGGCAAACCAGTGAGTCGAAAACCGTGGTGACCTACCACATC
CCACAGAACAGCTCCTTGGAAAACGTGGACAGCCGCTACCGGAACCGAGCCCTGATGTCACCGGCCGG
CATGCTGCGGGCGACTTCTCCCTGCGCTTGTTCAACGTCACCCCCCCAGGACGAGCAGAAGTTTCACT
GCCTGGTGTTGAGCCAATCCCTGGGATTCCAGGAGGTTTTGAGCGTTGAGGTTACACTGCATGTGGCA
GCAAACTTCAGCGTGCCCGTCGTCAGCGCCCCCCACAGCCCCTCCCAGGATGAGCTCACCTTCACGTG
TACATCCATAAACGGCTACCCCAGGCCCAACGTGTACTGGATCAATAAGACGGACAACAGCCTGCTGG
ACCAGGCTCTGCAGAATGACACCGTCTTCTTGAACATGCGGGGCTTGTATGACGTGGTCAGCGTGCTG
AGGATCGCACGGACCCCCAGCGTGAACATTGGCTGCTGCATAGAGAACGTGCTTCTGCAGCAGAACCT
GACTGTCGGCAGCCAGACAGGAAATGACATCGGAGAGAGAGACAAGATCACAGAGAATCCAGTCAGTA
CCGGCGAGAAAAACGCGGCCACGTGGAGCATCCTGGCTGTCCTGTGCCTGCTTGTGGTCGTGGCGGTG
GCCATAGGCTGGGTGTGCAGGGACCGATGCCTCCAACACAGCTATGCAGGTGCCTGGGCTGTGAGTCC
GGAGACAGAGCTCACTGGTGAGTTTGCCGTGGGAAGCAGCAGGTTCTGGGGGGCCCAGGGGAGGCTTG
GCTGCCAGCTGTCTTTCAGAGTTTCAAAAAACTTTCAAAAGGCAAAAGTCCCTTGCCTTGAACAACTG
TTGTTCCTGGAGACGCAGCGAAGCCCTCGATGGTGCGCATGGCATTTCCTGCAGCCTCCCCTTGGCAT
GGGATGGCATCCTGGTGTGCACTTTGTCACACTGCGATGGGATTTTCCCAACATGCACAGAAGCAGAG
AGACGAGTGCTAGACCCCCGCGCTCCCCAGTGCCCAGCCCCGACCAGGGTGTCCAGGGCGGGTCCAGG
CACCGGCGCCCAGCCCCCATGGGGTGTCCGGAGTGGGTCCAGGCACCGGCGCCCAGCCCCCGTGGGGT
GTCCAGGGCGGGTCCAGGCACCGGCGCCCAGCCCCTGTGGGGTGTCCGGAGTGGGTCCGGGCACCGCC
AGCTTCTCTCTGTGGCAGCCACTCCTGCAGCTCTCGTTTGCCCCTCAGTTCCAGGAGCAACATAGATG
TGGATTCCTGTCCAATTTGGGAAAAATGTCCACACACGGTCACCCACCTGGCAGGTGCCTCTGGCTGC
AAGGGGCGCTGGGCTTCGCAGGCAGGCCAGCCGGGCTCCCCGCCATGGGCCAGGATCCCCTCCGAGCG
CTGTTTGCCGCCCAGGAGAAGGGGTTCCCCGGGGACAGTGGGCTCAGGGTGTGCGCAGCCACCATGCT
GTGGTGTCACCTGTGGACCCAGGCGAGCTGATGGCCGACCGCAGAAACGCACTTCCAAGGCCAGGTCG
GCCCATCCAGATGATGCAGGAACACAGCTTGCTAAAAACACGGCCGGCCTGTTCCCGTCGGAGCCAGT
CGAAGTTCCCTGAACAGGCCGCTGTTTCCGAAGCTTTAAACCCTGTGTTTCCACCAAGCTGAGTCCTG
AGAAAACCGACGTCTGCCTGCAGAAGGGAAAGGGGTGCTTCATGTTCCTCTCTCTCCTTCATCTCCCT
TCCAAGGCCACGTTTGACCGGAGCTCACCGCCCAGAGCGTGGACAGGGCTTCCGTGAGACGCCACCGT
GAGAGGCCAGGTGGCAGCTTGAGCATGGACTCCCAGACTGCAGGGGAGCACTTGGGGCAGCCCCCAGA
AGGACCACTGCTGGATCCCAGGGAGAACCTGCTGGCGTTGGCTGTGATCCTGGAATGAGGCCCTTTCA
AAAGCGTCATCCACACCAAAGGCAAATGTCCCCAAGTGAGTGGGCTCCCCGCTGTCACTGCCAGTCAC
CCACAGGAAGGGACTGGTGATGGGCTGTCTCTACCCGGAGCGTGCGGGATTCAGCACCAGGCTCTTCC
CAGTACCCCAGACCCACTGTGGGTCTTCCCGTGGGATGCGGGATCCTGAGACCGAAGGGTGTTTGGTT
TAAAAAGAAGACTGGGCGTCCGCTCTTCCAGGACGGCCTCTGTGCTGCTGGGGTCACGCGAGGCTGTT
TGCAGGGGACACGGTCACAGGAGCTCTTCTGCCCTGAACGCTCCCAACCTGCCTCCCGCCCGGAAGCC
ACAGGACCCACTCATGTGTGTGCCCACAAGTGTAGTTAGCCGTCCACACCGAGGAGCCCCCGGAAGTC
CCCACTGGGCTTCAGTGTCCTCTGCCACATTCCCTGGGAGGAACAATGTCCCTCGGCTGTTCCGGTGA
AAAGTTGAGCCACCTTTGGAAGACGCACGGGTGGAGTTTGCCAGAAGAAAGGCTGTGCCAGGGCCGTG
TTTGGCTACAGGGGCTGCCGGGGCTCTTGGCTCTGCAGCGAGAAAGACACAGCCCAGCAGGGCTGGAG
ACGCCCATGTCCAGCAGGCGCAGGCCTGGCAACACGGTCCCCAGAGTCCTGAGCAGCAGTTAGGTGCA
TGGAGAGGGTATCACCTGGTGGCCACAGTCCCCCTTCTCACCTCAGCAATGATCCCCAAAGTGAGAGC
TGGCTCCCCCGGCCCCCACCACCCTCAGCAGCCCCACCCCACTCAACCCTGAGGGTCCCCAGGGTCCT
GATGAAGACCTCCGACCCCAGCGCCAGGCTCCTCGGAGCCCAACAGTCCCAAGGGGGCAGGAGACGGG
GTGGTCCAGTGCTGAGGGGTACAGCCCTGGGCCCTGACCAGCCCCGGCACCTGCCATGCTGGTTCCCC
GAATGAATCAGCTGCTGACTGTCTCCAGAAGGGCTGGAAAGGATGCTGCCAGGTGACCCGAGGTGCAC
TCGCCCCAGGGAGATGGAGTAGACAGCCTGGCCTGGCCCTCGGGACACATTGTCTGCCCCGGGGCTAT
GGGCAAATGCCCCTCCTTCTTACTTCCCAGAATCCCCTGACATTCCCAGGGTCAGCCAGGACCTGTTA
AAGCCCTGGTCACTTGGAACTGACAGCTGTGTGAGGCCTGCACTTCTCAGACCCAGACTTAGAACAAA
AGGAGGAGTGAGGACTCAAGGCTACAATGAGGTTCCAGTACTTGTTACAAGAAATTGGTTTTCTGCAA
AAGATGTGTGGTGTTTATAAAAGAACAGTTGTCATCACCGGGCATTGATTGGCAGGGACAAGGAGCTG
CTTGGGTGTGGAAAGTTGGGGCGTTGGAAAGTGGGCTGTGGTGCCCATTTGCAGTGACTGTGAAGTGA
CTCCAGGACGGACCTGCGGGGGCACCCAGAGGTCCTAAGCCCCAGGACTGAGGGTCGTGCATCACCAC
TCGGGTGTCCCGGGAGGTGCCCTGGGCCCGGGGACCTCACAGGCAGGACGGCGACACTAATGCAGGGA
GAGGGAGTCTGGCCCCAGCTTTTCCTATCAGAGGCGATTTTCCTTCACCAGGGGATGGGCAGGAAAGA
GGCAGGGGCCCCAGAAGCTTCTGTCCCTCATGCCTGAGGGCACGGGGGACACTTGGAGGCTGCTGTCA
CCACTGTGCGTCCAAGGCCATGCTCTCTGCGGGTCAGTGCCTGAGTCTCGCCTCCCTGCTGGTCCCTG
AAGCCCCCTCAGAAGCCCTGCCTGTCACGTCGGCATTTGTGAGACCTACCCTGTAACGCCTGCCCCTC
TCAGCCCAACATCAGCTTCCTCTTTCTCCCTTGCTGTAGACAGGCTGGATTCCAGTGTTGGGACAGCC
ATCTCCAGAAACCTGACTTAAGAGAGTAAGATGCAAATCGTGCCTGTATCCAGTGGCTTTGGTGGGTC
CAGGGAGTCTTGGGCACAGCCAGCTCAGCTGTCTGTGGTATGAGCAGGAACAGGTGCCACTCCTGCTC
AGGGGACCCTGCCCTACACCAGGCTGTTCCGTCCCCCTGGAGGACATGGGGCCAGGTCTGGAGGCATT
TTGGGTTGTCACAGCTGGGGGCTGTTCCTCGGCTTCAGCGGGTGGAAGCCTCAGATGCTGTTCAACAT
CTTCTGGACACGGGAGGCCCCGACAGAGAGAAGCGTCCACCCGCAAGTCCACAGTCTGAGGTCTCCCC
TCAGAGACCCTGCCCTGCACACCCACCTCCAGCCAAAGGTCCTGCCTGCCCCAGGGCTCAGGGGAACC
TTGCCGGTCTGTGGAACAGGAGAGGGGACTCTCGCCAGCTGCACCACCCTGCACGTAGTAGGTGTGCG
GTAAACATCCACCAGGGAGGCTCCAGTCAAGGCTGGCAGATGGGGCGGTCCATCCCTAGGGCAGGTGA
CAGAAGGGAAAAGGCTGCCTGCTGGCCCCCGAGCCAGGTAGCACATGCTTGTGCCTCAGTTTCCCCTC
CTGTAAAGTGAGGCGCTGGATCCAGGTTCTGTCTACTGGGCTCTGCAGCTTGGACGCTCCTAAGACCA
AGCGACCCACCCTGGGGAGGGCAGCTATGGCTTTGGAATAGCTGTCCAGGCCCGGGTGCCTCCAAGAC
GGCCACCACACCCTGCCTGTGCTGCAGGGGTGCAGGGGTAAGGGGCAAGACTCCAGAGGCCTCCTCTC
TGCATCTCCTTGTCTTCAGTGGCCGGAGGTGAGGCCTGAGCTCAGGGGAGGGGCTTCTGCCACGAACC
CTATGGCGGGGCACAGCACACTTTTCCCAGGGAGGACCCCTGGGCCCCCTGCATTATCCCCAGCGGAC
TGTGGGGTCACCTTCCAAGAGCGACATTGAGAAGCTCCAGCTCTAGGAGTGTGCAGACTCTTAACCAG
GCAGGCCCAGGCCCTGGGGCACACAAAGGCGGGGCCTGCTCTCCCCAGCTGCCCCTGCCAATGGGGGC
TGGACTGTCCTACCCTCCTCCCTTCTACCTCCCCACTGTCTTCCCTCTCCACTGTCACCACTGCCTCC
CTCTTCCACTGTCCTCCATGCACTGCCCTCCCTCCACCTTCCCCCACCCCCACCACTCCCCATGCTGT
CCCCAGGCTCCCCCCGCTCTCCCCCCTCCCCACTGTCCCCCTCCCCATGCTGTACCCAGCTCACCCCC
CTCTCCCCTCTCCCCACTGTCCCCCCTCCCACTCCCCATGCTGTCCCCAGCTCACCCTACATGGACTT
GGCGATGTCCTTCCATGGCTCACCGGTCTGAATTTCCATGATGAGCCGGGCCTGCAGCTTTGCTCCCC
TATCCCTGCCCAGGCTGCAGCTGTCCATGCAGGGAGCGAGCTCCAGCACCTGCGGAGTCCTTCCGTGC
GGGCCTCTCCGTGCCACAGCAGCCAGGGACCTCAGGTGCCTGTGCATGACACCACCGCCCATCCTCAT
CCTGAGCCAGCCTCTCAGGATCAGGACTTGGTTTGGCGGCGTTAACCTTAGAGCCTGCAAGGGGCTTC
CTCCTGGTGGGTCTGGCCGTAGCCTGGGGAGGCCACAGCTCCAGGCCACTCCAGACCTCCCTTCCTCT
GGGCCTTCCATGTGGTGGCAACCACCGCAGCTGTAAGGGAGGGAAAATGGAGCGTTTGTTCTCGGGCT
GGGCTGGGGTCTGGGGGAAGCCATGGGCGTGAAGACTGGAGTATTATTTGATGGAGAAGCGGCCACTC
CTGGAGACCGGCGGCAAACACAGAAGCACAGCGTGGAAGGTGCTGGTGTCAGCCCACACGGGTGATGG
AGCCCCAGACACAATGCATTCCTGTTGCCCTCGCCCTCAGCCAGGCCCCACGCAGGCCAGGGAGCACT
GGCAAAGCTTGGCAACCCTCTGGGGGCCAGCCTTCATCCAGGCCGAAGGTGGTCAGTGGCCCACCATG
GCCCAGGTAGAAAACTCACGGATTAAGATTTCATGCCCGACTCCAAAGGCAAGAGACTTTATTATTTT
ATTTTTTTTGAGCCAGAGTATCGCTCTGTCACCTAGGCTGGAGTGCAATCTCTGCTCATTGCAACATC
TGCCTCCCGAACTCAAGCAATTCTGCCTCAGCCTCCCAAGTAGCTGGGATTACAGGTGTGCGCCACCA
TGCCCAGGTAATTGTATTTTTAGTAGAGACAGGGTTTCACCATGTTGGTCAGGCTGGTTTCAAACTCC
TGACCTCAAATGATCTGCCCACCTCGACCTCCCAAAGTGCTGGGATTACAGGTGCGAGCCACCGCACC
TGGCTACCAGACACTTCAGAGTTACAGGTTAGTTTTTCTTTTTCTTTTATTTTTTTTTTTTTGGCGGA
GGTGCAGGGGGAGTTAAACAAACAAACAAAATAAACAGGCCGGGTGCGGTGGCTCATGCCTGTAATCC
CAGCACTTTAGGAGGCCTAGGTGGGTGGATCACGAGATCAGGGGTTCAAGACCAGCCTGGCCGAGATG
GTAAAACCCCGTCTCCACTAAAAATACAAAAATTGGCCAGGCACGGTGGCTCACACCTGTAATCCCAG
TACTTTGGGAGGCTGAGGTGGGCAGATCACCTGAGGTCAGGAGTTCAAGACCAACCTGACCAACATGG
AGAAACCCCATCTCTACTAAAAATACAkAATTAGCCAGGTGTGGTGGTGCATGCCTGTAATTCCAGCT
GCCATTGCACTCCAGCCTGGGAACAAGAGCGAAACTCTGACTAAAAAAGAAAGAAAGAAAGAAAAAAA
TTAGTTGGGCACGGTGGCAGGCGCCTGTAATCCCAGGTACTCAGGAGGCTGAGGCAGGAGAATTGCTT
GAACCCGGGAGGCAGAGGTCGCAGTGAGCCGAGATTGCACCACTGCCCTCCAGCCTGGGTGACAGAGC
AAGACTCCGTCTCAAAAAAAAAAAAAAAAAAAATTGGATACATTGTAATACCTCAAATACTTGTAAGT
GAAGCACCCCAGTTCCCATAGAGCTGCCGCACTCAGAGGCTTCTGTAACCTGCCTGCTCCCAGCATTC
TATTTAGGGTCTGGTATGTCCAGAATTTGCAGACACAGCAATTCCTGCAGCAGCAGTGCACCATGTGC
AAGGGGCCCCATGACCAGCCCACTGTGAGCTCACACGTGATGACTGAGGCTTCTTCACACAGCAGGGC
TCTGGGTGTGATACCCAGGGCACACGCGTTTGCACAGGCACAGGCCACACAAGTTCTCACATGCTCAG
CCCCATAAGCCGTGCTGGACAGGCATGGCCATTTACACCCAGGATCCTGCTGAGAACAGCAACCAACT
CACCACCCTCGCATCATGATCCTTGCCACACAGGGGCTCTGGTGGCTTTGGTGGCCTGGGCTGTGGCT
CTGCTGCCAGCCACCTTGAGTGAAGATCCGGGTTCTCTGGGTGCTACTCAGCTGCTATGTGGGGAGCT
CTGTCTGCATACAGACTTCTCAGGGGAGTTCTCAGCTTGGACCCTTATCTCCCCAGAATCCTGGAACC
TGCTCCTTCTGCTCTCGTGACTGACTGTGTTCTCTATGCAACTTCCAATAAAACCTCTTCATTTGAAA
GGAAAAAAGTCTGCATTATCTGTTTAGGAAGGGAGAGAGTTCATATTGCAATCTTTTTTTTTTTAATT
AAAATAATCTCAGCCTGGGCAACATGGTGAGACCCCATCTCTGTAAAACATTTTTAAAAAATTAGCCG
GGTATGGTGGCGCACACTTGTAGTCCCAGCTACTCAGGAGGCTGAAGCGGGAGGATCCATTGAACCTG
AGAAGTCGAAGCTGCAGTGAGCTGTGATTGTGCCACTGTACTCCAGCCTGGACAACAGAGTGAGACGC
CGTCTCAAATAAATAAATACAT

| | | | |
|---|---|---|---|
| NOV31a, CG55790-02 | | | |
| Protein Sequence | SEQ ID NO: 770 | 1473 aa | MW at 51924.6kD |

MRLGSPGLLFLLFSSLEADTQEKEVRAMVGSDVELSCACPEGSRFDLNDVYVYWQTSESKTVVTYHIP
NSSLENVDSRYRNRALMSPAGMLRGDFSLRLFNVTPQDEQKFHCLVLSQSLGFQEVTLSVEVTLHVAA
NFSVPVVSAPHSPSQDELTFTCTSINGYPRPNVYWINKTDNSLLDQALQNDTVFLNNRGLYDVVSVLR
IARTPSVNIGCCIENVLLQQNLTVGSQTGNDIGERDKITENPVSTGEKNAATWSILAVLCLLVVVAVA
TGWVCRDRCLQHSYAGAWAVSPETELTGEFAVGSSRFWGAQGRLGCQLSFRVSKNFQKAKVPCLEQLL
FLETQRSPRWCAWHFLQPPLGMGWHPGVHFVTLRWDFPNMHRSRETSARPPRSPVPSPDQGVQGGSRH
RRPAPMGCPEWVQAPAPSPRGVSPAGPGTGAQPLWGVRSGSGHRQLLSVAATPAALVCPSVPGAT

| | | |
|---|---|---|
| NOV31b, 258668431 | SEQ ID NO: 771 | 1393 bp |
| DNA Sequence | ORF Start: at 2 | ORF Stop: end of sequence |

CACCAGATCTCTTCGAGCTGATACTCAGGAGAAGGAAGTCAGAGCGATGGTAGGCAGCGACGTGGAGC
TCAGCTGCGCTTGCCCTGAAGGAAGCCGTTTTGATTTAAATGATGTTTACGTATATTGGCAAACCAGT
GAGTCGAAAACCGTGGTGACCTACCACATCCCACAGAACAGCTCCTTGGAAAACGTGGACAGCCGCTA
CCGGAACCGAGCCCTGATGTCACCGGCCGGCATGCTGCGGGGCGACTTCTCCCTGCGCTTGTTCAACG
TCACCCCCCAGGACGAGCAGAAGTTTCACTGCCTGGTGTTGAGCCAATCCCTGGGATTCCAGGAGGTT
TTGAGCATTGAGGTTACACTGCATGTGGCAGCAAACTTCAGCGTGCCCGTCGTCAGCGCCCCCCACAG
CCCCTCCCAGGATGAGCTCACCTTCACGTGTACATCCATAAACGGCTACCCCAGGCCCAACGTGTACT
GGATCAATAAGACGGACAACAGCCTGCTGGACCAGGCTCTGCAGAATGACACCGTCTTCTTGAACATG
CGGGGCTTGTATGACGTGGTCAGCGTGCTGAGGATCGCACGGACCCCCAGCGTGAACATTGGCTGCTG
CATAGAGAACGTGCTTCTGCAGCAGAACCTGACTGTCGGCAGCCAGACAGGAAATGACATCGGAGAGA
GAGACAAGATCACAGAGAATCCAGTCAGTACCGGCGAGAAAAACGCGGCCACGTGGAGCATCCTGGCT
GTCCTGTGCCTGCTTGTGGTCGTGGCGGTGGCCATAGGCTGGGTGTGCAGGGACCGATGCCTCCAACA
CAGCTATGCAGGTGCCTGGGCTGTGAGTCCGGAGACAGAGCTCACTGGTGAGTTTGCCGTGGGAAGCA
GCAGGTTCTGGGGGGCCCAGGGGAGGCTTGGCTGCCAGCTGTCTTTCAGAGTTTCAAAAAACTTTCAA
AAGGCAAAAGTCCCTTGCCTTGAACAACTGTTGTTCCTGGAGACGCAGCGAAGCCCTCGATGGTGCGC
ATGGCATTTCCTGCAGCCTCCCCTTGGCATGGGATGGCATCCTGGTGTGCACTTTGTCACACTGCGAT
GGGATTTTCCCAACATGCACAGAAGCAGAGAGACGAGTGCTAGACCCCCGCGCTCCCCAGTGCCCAGC
CCCAACCAGGGTGTCCAGGGCGGGTCCAGGCACCGGCGCCCAGCCCCCATGGGGTGTCCGGAGTGGGT
CCAGGCACCGGCGCCCAGCCCCCGTGGGGTGTCCAGGGCGGGTCCAGGCACCGGCGCCCAGCCCCTGT
GGGGTGTCCGGAGCGGGTCCGGGCACCGCCAGCTTCTCTCTGTGGCAGCCACTCCTGCAGCTCTCGTT
TGCCCCTCAGTTCCAGGAGCAACACTCGAGGGC

| | | | |
|---|---|---|---|
| NOV31b, 258668431 | | | |
| Protein Sequence | SEQ ID NO: 772 | 464 aa | MW at 50961.4kD |

TRSLRADTQEKEVRAMVGSDVELSCACPEGSRFDLNDVYVYWQTSESKTVVTYHIPQNSSLENVDSRY
RNRALMSPAGMLRGDFSLRLFNVTPQDEQKFHCLVLSQSLGFQEVLSIEVTLHVAANFSVPVVSAPHS
PSQDELTFTCTSINGYPRPNVYWINKTDNSLLDQALQNDTVFLNNRGLYDVVSVLRIARTPSVNIGCC
IENVLLQQNLTVGSQTGNDIGERDKITENPVSTGEIGAATWSILAVLCLLVVVAVAIGIWCRDRCLQH
SYAGAWAVSPETELTGEFAVGSSRFWGAQGRLGCQLSFRVSKNFQKAKVPCLEQLLFLETQRSPRWCA
WHFLQPPLGMGWHPGVHFVTLRWDFPNMHRSRETSARPPRSPVPSPNQGVQGGSRHRRPAPMGCPEWV
QAPAPSPRGVSRAGPGTGAQPLWGVRSGSGHRQLLSVAATPAALVCPSVPGATLEG

| | | |
|---|---|---|
| NOV31c, 309303509 | SEQ ID NO: 773 | 1393 bp |
| DNA Sequence | ORF Start: at 2 | ORF Stop: end of sequence |

CACCAGATCTCTTCGAGCTGATACTCAGGAGAAGGAAGTCAGAGCGATGGTAGGCAGCGACGTGGAGC
TCAGCTGCGCTTGCCCTGAAGGAAGCCGTTTTGATTTAAATGATGTTTACGTATATTGGCAAACCAGT
GAGTCGAAAACCGTGGTGACCTACCACATCCCACAGAACAGCTCCTTGGAAAACGTGGACAGCCGCTA
CCGGAACCGAGCCCTGATGTCACCGGCCGGCATGCTGCGGGGCGACTTCTCCCTGCGCTTGTTCAACG
TCACCCCCCAGGACGAGCAGAAGTTTCACTGCCTGGTGTTGAGCCAATCCCTGGGATTCCAGGAGGTT
TTGAGCATTGAGGTTACACTGCATGTGGCAGCAAACTTCAGCGTGCCCGTCGTCAGCGCCCCCCACAG
CCCCTCCCAGGATGAGCTCACCTTCACGTGTACATCCATAAACGGCTACCCCAGGCCCAACGTGTACT
GGATCAATAAGACGGACAACAGCCTGCTGGACCAGGCTCTGCAGAATGACACCGTCTTCTTGAACATG
CGGGGCTTGTATGACGTGGTCAGCGTGCTGAGGATCGCACGGACCCCCAGCGTGAACATTGGCTGCTG
CATAGAGAACGTGCTTCTGCAGCAGAACCTGACTGTCGGCAGCCAGACAGGAAATGACATCGGAGAGA
GAGACAAGATCACAGAGAATCCAGTCAGTACCGGCGAGAAAAACGCGGCCACGTGGAGCATCCTGGCT
GTCCTGTGCCTGCTTGTGGTCGTGGCGGTGGCCATAGGCTGGGTGTGCAGGGACCGATGCCTCCAACA
CAGCTATGCAGGTGCCTGGGCTGTGAGTCCGGAGACAGAGCTCACTGGTGAGTTTGCCGTGGGAAGCA
GCAGGTTCTGGGGGGCCCAGGGGAGGCTTGGCTGCCAGCTGTCTTTCAGAGTTTCAAAAAACTTTCAA
AAGGCAAAAGTCCCTTGCCTTGAACAACTGTTGTTCCTGGAGACGCAGCGAAGCCCTCGATGGTGCGC
ATGGCATTTCCTGCAGCCTCCCCTTGGCATGGGATGGCATCCTGGTGTGCACTTTGTCACACTGCGAT
GGGATTTTCCCAACATGCACAGAAGCAGAGAGACGAGTGCTAGACCCCCGCGCTCCCCAGTGCCCAGC
CCCGACCAGGGTGTCCAGGGCGGGTCCAGGCACCGGCGCCCAGCCCCCATGGGGTGTCCGGAGTGGGT
CCAGGCACCGGCGCCCAGCCCCCGTGGGGTGTCCAGGGCGGGTCCAGGCACCGGCGCCCAGCCCCTGT
GGGGTGTCCGGAGCGGGTCCGGGCACCGCCAGCTTCTCTCTGTGGCAGCCACTCCTGCAGCTCTCGTT
TGCCCCTCAGTTCCAGGAGCAACACTCGAGGGC

| | | | |
|---|---|---|---|
| NOV31c, 309303509 | | | |
| Protein Sequence | SEQ ID NO: 774 | 464 aa | MW at 50962.4kD |

TRSLRADTQEKEVRAMVGSDVELSCACPEGSRFDLNDVYVYWQTSESKTVVTYHIPQNSSLENVDSRY
RNRALMSPAGMLRGDFSLRLFNVTPQDEQKFHCLVLSQSLGFQEVLSIEVTLHVAANFSVPVVSAPHS
PSQDELTFTCTSINGYPRPNVYWINKTDNSLLDQALQNDTVFLNMRGLYDVVSVLRIARTPSVNIGCC
IENVLLQQNLTVGSQTGNDIGERDKITENPVSTGEKAAATWSILAVLCLLVVVAVAIGWVCRDRCLQH
SYAGAWAVSPETELTGEFAVGSSRFWGAQGRLGCQLSFRVSKNFQKAKVPCLEQLLFLETQRSPRWCA
WHFLQPPLGMGWHPGVHFVTLRWDFPNMHRSRETSARPPRSPVPSPDQGVQGGSRHRRPAPMGCPEWV
QAPAPSPRGVSRAGPGTGAQPLWGVRSGSGHRQLLSVAATPAALVCPSVPGATLEG

| | | |
|---|---|---|
| NOV31d, 315925314 | SEQ ID NO: 775 | 871 bp |
| DNA Sequence | ORF Start: at 2 | ORF Stop: end of sequence |

CACCGGATCCGATACTCAGGAGAAGGAAGTCAGAGCGATGGTAGGCAGCGACGTGGAGCTCAGCTGCG
CTTGCCCTGAAGGAAGCCGTTTTGATTTAAATGATGTTTACGTATATTGGCAAACCAGTGAGTCGAAA
ACCGTGGTGACCTACCACATCCCACAGAACAGCTCCTTGGAAAACGTGGACAGCCGCTACCGGAACCG
AGCCCTGATGTCACCGGCCGGCATGCTGCGGGGCGACTTCTCCCTGCGCTTGTTCAACGTCACCCCCC
AGGACGAGCAGAAGTTTCACTGCCTGGTGTTGAGCCAATCCCTGGGATTCCAGGAGGTTTTGAGCGTT
GAGGTTACACTGCATGTGGCGGCAAACTTCAGCGTGCCCGTCGTCAGCGCCCCCCACAGCCCCTCCCA
GGATGAGCTCACCTTCACGTGTACATCCATAAACGGCTACCCCAGGCCCAACGTGTACTGGATCAATA
AGACGGACAACAGCCTGCTGGACCAGGCTCTGCAGAATGACACCGTCTTCTTGAACATGCGGGGCTTG
TATGACGTGGTCAGCGTGCTGAGGATCGCACGGACCCCCAGCGTGAACATTGGCTGCTGCATAGAGAA
CGTGCTTCTGCAGCAGAACCTGACTGTCGGCAGCCAGACAGGAAATGACATCGGAGAGAGAGACAAGA
TCACAGAGAATCCAGTCAGTACCGGCGAGAAAAACGCGGCCACGTGGAGCATCCTGGCTGTCCTGTGC
CTGCTTGTGGTCGTGGCGGTGGCCATAGGCTGGGTGTGCAGGGACCGATGCCTCCAACACAGCTATGC
AGGTGCCTGGGCTGTGAGTCCGGAGACAGAGCTCACTGGTCACCTGCTCGAGGGC

| | | | |
|---|---|---|---|
| NOV31d, 315925314 | | | |
| Protein Sequence | SEQ ID NO: 776 | 290 aa | MW at 31946.7kD |

TGSDTQEKEVRAMVGSDVELSCACPEGSRFDLNDVYVYWQTSESKTVVTYHIPQNSSLENVDSRYRNR
ALMSPAGMLRGDFSLRLFNVTPQDEQKFHCLVLSQSLGFQEVLSVEVTLHVAANFSVPVVSAPHSPSQ
DELTFTCTSINGYPRPNVYWINKTDNSLLDQALQNDTVFLNMRGLYDVVSVLRIARTPSVNIGCCIEN
VLLQQNLTVGSQTGNDIGERDKITENPVSTGEKNAATWSILAVLCLLVVVAVAIGWVCRDRCLQHSYA
GAWAVSPETELTGHLLEG

| | | |
|---|---|---|
| NOV31e, 315970230 | SEQ ID NO: 777 | 928 bp |
| DNA Sequence | ORF Start: at 2 | ORF Stop: end of sequence |

CACCGGATCCACCATGCGGCTGGGCAGTCCTGGACTGCTCTTCCTGCTCTTCAGCAGCCTTCGAGCTG
ATACTCAGGAGAAGGAAGTCAGAGCGATGGTAGGCAGCGACGTGGAGCTCAGCTGCGCTTGCCCTGAA
GGAAGCCGTTTTGATTTAAATGATGTTTACGTATATTGGCAAACCAGTGAGTCGAAAACCGTGGTGAC
CTACCACATCCCACAGAACAGCTCCTTGGAAAACGTGGACAGCCGCTACCGGAACCGAGCCCTGATGT
CACCGGCCGGCATGCTGCGGGGCGACTTCTCCCTGCGCTTGTTCAACGTCACCCCCCAGGACGAGCAG
AAGTTTCACTGCCTGGTGTTGAGCCAATCCCTGGGATTCCAGGAGGTTTTGAGCGTTGAGGTTACACT
GCATGTGGCGGCAAACTTCAGCGTGCCCGTCGTCAGCGCCCCCCACAGCCCCTCCCAGGATGAGCTCA
CCTTCACGTGTACATCCATAAACGGCTACCCCAGGCCCAACGTGTACCGGATCAATAAGACGGACAAC
AGCCTGCTGGACCAGGCTCTGCAGAATGACACCGTCTTCTTGAACATGCGGGGCTTGTATGACGTGGT
CAGCGTGCTGAGGATCGCACGGACCCCCAGCGTGAACATTGGCTGCTGCATAGAGAACGTGCTTCTGC
AGCAGAACCTGACTGTCGGCAGCCAGACAGGAAATGACATCGGAGAGAGAGACAAGATCACAGAGAAT
CCAGTCAGTACCGGCGAGAAAAACGCGGCCACGTGGAGCATCCTGGCTGTCCTGTGCCTGCTTGTGGT
CGTGGCGGTGGCCATAGGCTGGGTGTGCAGGGACCGATGCCTCCAACACAGCTATGCAGGTGCCTGGG
CTGTGAGTCCGGAGACAGAGCTCACTGGTCACCTGCTCGAGGGC

| | | | |
|---|---|---|---|
| NOV31e, 315970230 | | | |
| Protein Sequence | SEQ ID NO: 778 | 309 aa | MW at 33978.1kD |

TGSTMRLGSPGLLFLLFSSLEADTQEKEVRAMVGSDVELSCACPEGSRFDLNDVYVYWQTSESKTVVT
YHIPQNSSLENVDSRYRNRALMSPAGMLRGDFSLRLFNVTPQDEQKFHCLVLSQSLGFQEVLSVEVTL
HVAANFSVPVVSAPHSPSQDELTFTCTSINGYPRPNVYRINKTDNSLLDQALQNDTVFLNMRGLYDVV
SVLRIARTPSVNIGCCIENVLLQQNLTVGSQTGNDIGERDKITENPVSTGEKNAATWSILAVLCLLVV
VAVAIGWVCRDRCLQHSYAGAWAVSPETELTGHLLEG

| | | |
|---|---|---|
| NOV31f, CG55790-01 | SEQ ID NO: 779 | 912 bp |
| DNA Sequence | ORF Start: ATG at 4 | ORF Stop: TAA at 910 |

ACCATGCGGCTGGGCAGTCCTGGACTGCTCTTCCTGCTCTTCAGCAGCCTTCGAGCTGATACTCAGGA
GAAGGAAGTCAGAGCGATGGTAGGCAGCGACGTGGAGCTCAGCTGCGCTTGCCCTGAAGGAAGCCGTT
TTGATTTAAATGATGTTTACGTATATTGGCAAACCAGTGAGTCGAAAACCGTGGTGACCTACCACATC
CCACAGAACAGCTCCTTGGAAAACGTGGACAGCCGCTACCGGAACCGAGCCCTGATGTCACCGGCCGG
CATGCTGCGGGGCGACTTCTCCCTGCGCTTGTTCAACGTCACCCCCCAGGACGAGCAGAAGTTTCACT
GCCTGGTGTTGAGCCAATCCCTGGGATTCCAGGAGGTTTTGAGCGTTGAGGTTACACTGCATGTGGCA
GCAAACTTCAGCGTGCCCGTCGTCAGCGCCCCCCACAGCCCCTCCCAGGATGAGCTCACCTTCACGTG
TACATCCATAAACGGCTACCCCAGGCCCAACGTGTACTGGATCAATAAGACGGACAACAGCCTGCTGG
ACCAGGCTCTGCAGAATGACACCGTCTTCTTGAACATGCGGGGCTTGTATGACGTGGTCAGCGTGCTG
AGGATCGCACGGACCCCCAGCGTGAACATTGGCTGCTGCATAGAGAACGTGCTTCTGCAGCAGAACCT
GACTGTCGGCAGCCAGACAGGAAATGACATCGGAGAGAGAGACAAGATCACAGAGAATCCAGTCAGTA
CCGGCGAGAAAAACGCGGCCACGTGGAGCATCCTGGCTGTCCTGTGCCTGCTTGTGGTCGTGGCGGTG
GCCATAGGCTGGGTGTGCAGGGACCGATGCCTCCAACACAGCTATGCAGGTGCCTGGGCTGTGAGTCC
GGAGACAGAGCTCACTGGTCACCTGTAA

| | | | |
|---|---|---|---|
| NOV31f, CG55790-01 | | | |
| Protein Sequence | SEQ ID NO: 780 | 302 aa | MW at 33362.5kD |

MRLGSPGLLFLLFSSLRADTQEKEVRAMVGSDVELSCACPEGSRFDLNDVYVYWQTSESKTVVTYHIP
QNSSLENVDSRYRNRALMSPAGMLRGDFSLRLFNVTPQDEQKFHCLVLSQSLGFQEVLSVEVTLHVAA
NFSVPVVSAPHSPSQDELTFTCTSINGYPRPNVYWINKTDNSLLDQALQNDTVFLNNRGLYDVVSVLR
IARTPSVNIGCCIENVLLQQNLTVGSQTGNDIGERDKITENPVSTGEKNAATWSILAVLCLLVVVAVA
IGWVCPDRCLQHSYAGAWAVSPETELTGHL

| | | |
|---|---|---|
| NOV31g, 0G55790-03 | SEQ ID NO: 781 | 910 bp |
| DNA Sequence | ORF Start: ATG at 2 | ORF Stop: TAA at 908 |

CATGCGGCTGGGCAGTCCTGGACTGCTCTTCCTGCTCTTCAGCAGCCTTCGAGCTGATACTCAGGAGA
AGGAAGTCAGAGCGATGGTAGGCAGCGACGTGGAGCTCAGCTGCGCTTGCCCTGAAGGAAGCCGTTTT
GATTTAAATGATGTTTACGTATATTGGCAAACCAGTGAGTCGAAAACCGTGGTGACCTACCATATCCC
ACAGAACAGCTCCTTGGAAAACGTGGACAGCCGCTACCGGAACCGAGCCCTGATGTCACCGGCCGGCA
TGCTGCGGGGCGACTTCTCCCTGCGCTTGTTCAACGTCACCCCCCAGGACGAGCAGAAGTTTCACTGC
CTGGTGTTGAGCCAATCCCTGGGATTCCAGGAGGTTTTGAGCGTTGAGGTTACACTGCATGTGGCAGC
AAACTTCAGCGTGCCCGTCGTCAGCGCCCCCCACAGCCCCTCCCAGGATGAGCTCACCTTCACGTGTA
CATCCATAAACGGCTACCCCAGGCCCAACGTGTACTGGATCAATAAGACGGACAACAGCCTGCTGGAC
CAGGCTCTGCAGAATGACACCGTCTTCTTGAACATGCGGGGCTTGTATGACGTGGTCAGCGTGCTGAG
GATCGCACGGACCCCCAGCGTGAACATTGGCTGCTGCATAGAGAACGTGCTTCTGCAGCAGAACCTGA
GGCGAGAAAAACGCGGCCACGTGGAGCATCCTGGCTGTCCTGTGCCTGCTTGTGGTCGTGGCGGTGGC
CATAGGCTGGGTGTGCAGGGACCGATGCCTCCAACACAGCTATGCAGGTGCCTGGGCTGTGAGTCCGG
AGACAGAGCTCACTGGTCACCTGTAA

| | | | |
|---|---|---|---|
| NOV31g, CG55790-03 | | | |
| Protein Sequence | SEQ ID NO: 782 | 302 aa | MW at 33362.5kD |

MRLGSPGLLFLLFSSLRADTQEKEVRAMVGSDVELSCACPEGSRFDLNDVYVYWQTSESKTVVTYHIP
QNSSLENVDSRYRNEALMSPAGMLRGDFSLRLFNVTPQDEQKFHCLVLSQSLGFQEVLSVEVTLHVAA
NFSVPWSAPHSPSQDELTFTCTSINGYPRPNVYVVINKTDNSLLDQALQNDTVFLNMRGLYDVVSVLR
IARTPSVNIGCCIENVLLQQNLTVGSQTGNDIGERDKITENPVSTGEKNAATWSILAVLCLLVVVAVA
IGWVCRDRCLQHSYAGAWAVSPETELTGHL

| | | |
|---|---|---|
| NOV31h, CG55790-04 | SEQ ID NO: 783 | 705 bp |
| DNA Sequence | ORF Start: at 1 | ORF Stop: end of sequence |

GATACTCAGGAGAAGGAAGTCAGAGCGATGGTAGGCAGCGACGTGGAGCTCAGCTGCGCTTGCCCTGA
AGGAAGCCGTTTTGATTTAAATGATGTTTACGTATATTGGCAAACCAGTGAGTCGAAAACCGTGGTGA
CCTACCACATCCCACAGAACAGCTCCTTGGAAAACGTGGACAGCCGCTACCGGAACCGAGCCCTGATG
TCACCGGCCGGCATGCTGCGGGGCGACTTCTCCCTGCGCTTGTTCAACGTCACCCCCCAGGACGAGCA
GAAGTTTCACTGCCTGGTGTTGAGCCAATCCCTGGGATTCCAGGAGGTTTTGAGCGTTGAGGTTACAC
TGCATGTGGCAGCAAACTTCAGCGTGCCCGTCGTCAGCGCCCCCCACAGCCCCTCCCAGGATGAGCTC
ACCTTCACGTGTACATCCATAAACGGCTACCCCAGGCCCAACGTGTACTGGATCAATAAGACGGACAA
CAGCCTGCTGGACCAGGCTCTGCAGAATGACACCGTCTTCTTGAACATGCGGGGCTTGTATGACGTGG
TCAGCGTGCTGAGGATCGCACGGACCCCCAGCGTGAACATTGGCTGCTGCATAGAGAACGTGCTTCTG
CAGCAGAACCTGACTGTCGGCAGCCAGACAGGAAATGACATCGGAGAGAGAGACAAGATCACAGAGAA
TCCAGTCAGTACCGGCGAGAAAAAC

| | | | |
|---|---|---|---|
| NOV31h, CG55790-04 | | | |
| Protein Sequence | SEQ ID NO: 784 | 235 aa | MW at 26169.1kD |

DTQEKEVRAMVGSDVELSCACPEGSRFDLNDVYVYWQTSESKTVVTYHIPQNSSLENVDSRYRNRALM
SPAGMLRGDFSLRLFNVTPQDEQKFHCLVLSQSLGFQEVLSVEVTLHVAANFSVPVVSAPHSPSQDEL
TFTCTSINGYPRPNVYWINKTDNSLLDQALQNDTVFLNMRGLYDVVSVLRIARTPSVNIGCCIENVLL
QQNLTVGSQTGNDIGERDKITENPVSTGEKN

| | | |
|---|---|---|
| NOV31i, CG55790-05 | SEQ ID NO: 785 | 393 bp |
| DNA Sequence | ORF Start: at 11 | ORF Stop: at 1385 |

CACCAGATCTCTTCGAGCTGATACTCAGGAGAAGGAAGTCAGAGCGATGGTAGGCAGCGACGTGGAGC
TCAGCTGCGCTTGCCCTGAAGGAAGCCGTTTTGATTTAAATGATGTTTACGTATATTGGCAAACCAGT
GAGTCGAAAACCGTGGTGACCTACCACATCCCACAGAACAGCTCCTTGGAAAACGTGGACAGCCGCTA
CCGGAACCGAGCCCTGATGTCACCGGCCGGCATGCTGCGGGGCGACTTCTCCCTGCGCTTGTTCAACG
TCACCCCCCAGGACGAGCAGAAGTTTCACTGCCTGGTGTTGAGCCAATCCCTGGGATTCCAGGAGGTT
TTGAGCATTGAGGTTACACTGCATGTGGCAGCAAACTTCAGCGTGCCCGTCGTCAGCGCCCCCCACAG
CCCCTCCCAGGATGAGCTCACCTTCACGTGTACATCCATAAACGGCTACCCCAGGCCCAACGTGTACT
GGATCAATAAGACGGACAACAGCCTGCTGGACCAGGCTCTGCAGAATGACACCGTCTTCTTGAACATG
CGGGGCTTGTATGACGTGGTCAGCGTGCTGAGGATCGCACGGACCCCCAGCGTGAACATTGGCTGCTG
CATAGAGAACGTGCTTCTGCAGCAGAACCTGACTGTCGGCAGCCAGACAGGAAATGACATCGGAGAGA
GAGACAAGATCACAGAGAATCCAGTCAGTACCGGCGAGAAAAACGCGGCCACGTGGAGCATCCTGGCT
GTCCTGTGCCTGCTTGTGGTCGTGGCGGTGGCCATAGGCTGGGTGTGCAGGGACCGATGCCTCCAACA
CAGCTATGCAGGTGCCTGGGCTGTGAGTCCGGAGACAGAGCTCACTGGTGAGTTTGCCGTGGGAAGCA
GCAGGTTCTGGGGGGCCCAGGGGAGGCTTGGCTGCCAGCTGTCTTTCAGAGTTTCAAAAAACTTTCAA
AAGGCAAAAGTCCCTTGCCTTGAACAACTGTTGTTCCTGGAGACGCAGCGAAGCCCTCGATGGTGCGC
ATGGCATTTCCTGCAGCCTCCCCTTGGCATGGGATGGCATCCTGGTGTGCACTTTGTCACACTGCGAT
GGGATTTTCCCAACATGCACAGAAGCAGAGAGACGAGTGCTAGACCCCCGCGCTCCCCAGTGCCCAGC
CCCAACCAGGGTGTCCAGGGCGGGTCCAGGCACCGGCGCCCAGCCCCCATGGGGTGTCCGGAGTGGGT
CCAGGCACCGGCGCCCAGCCCCCGTGGGGTGTCCAGGGCGGGTCCAGGCACCGGCGCCCAGCCCCTGT
GGGGTGTCCGGAGCGGGTCCGGGCACCGCCAGCTTCTCTCTGTGGCAGCCACTCCTGCAGCTCTCGTT
TGCCCCTCAGTTCCAGGAGCAACACTCGAGGGC

| | | | |
|---|---|---|---|
| NOV31i, CG55790-05 | | | |
| Protein Sequence | SEQ ID NO: 786 | 458 aa | MW at 50317.7kD |

LRADTQEKEVRAMVGSDVELSCACPEGSRFDLNDVYVYWQTSESKTVVTYHIPQNSSLENVDSRYRNR
ALMSPAGMLRGDFSLRLFNVTPQDEQKFHCLVLSQSLGFQEVLSIEVTLHVAANFSVPVVSAPHSPSQ
DELTFTCTSINGYPRPNVYWINKTDNSLLDQALQNDTVFLNMRGLYDVVSVLRIARTPSVNIGCCIEN
VLLQQNLTVGSQTGNDIGERDKITENPVSTGEKNAATWSITAVLCLLVVVAVAIGWVCRDRCLQHSYA
GAWAVSPETELTGEFAVGSSRFWGAQGRLGCQLSFRVSKNFQKAKVPCLEQLLFLETQRSPRWCAWHF
LQPPLGMGWHPGVHFVTLRWDFPNNHRSRETSARPPRSPVPSPNQGVQGGSRHRRPAPMGCPEWVQAP
APSPRGVSRAGPGTGAQPLWGVRSGSGHRQLLSVAATPAALVCPSVPGAT

| | | |
|---|---|---|
| NOV31j, CG55790-06 | SEQ ID NO: 787 | 928 bp |
| DNA Sequence | ORF Start: ATG at 14 | ORF Stop: at 920 |

CACCGGATCCACCATGCGGCTGGGCAGTCCTGGACTGCTCTTCCTGCTCTTCAGCAGCCTTCGAGCTG
ATACTCAGGAGAAGGAAGTCAGAGCGATGGTAGGCAGCGACGTGGAGCTCAGCTGCGCTTGCCCTGAA
GGAAGCCGTTTTGATTTAAATGATGTTTACGTATATTGGCAAACCAGTGAGTCGAAAACCGTGGTGAC
CTACCACATCCCACAGAACAGCTCCTTGGAAAACGTGGACAGCCGCTACCGGAACCGAGCCCTGATGT
AAGTTTCACTGCCTGGTGTTGAGCCAATCCCTGGGATTCCAGGAGGTTTTGAGCATTGAGGTTACACT
CCTTCACGTGTACATCCATAAACGGCTACCCCAGGCCCAACGTGTACTGGATCAATAAGACGGACAAC
CACGTGCTGAGGAATCGCACGGACCCCCAGCGTGAACATTGGCTGCTGCATAGAGAACGTGCTTCTGC
AGCAGAACCTGACTGTCGGCAGCCAGACAGGAAATGACATCGGAGAGAGAGACAAGATCACAGAGAAT
CCAGTCAGTACCGGCGAGAAAAACGCGGCCACGTGGAGCATCCTGGCTGTCCTGTGCCTGCTTGTGGT
CGTGGCGGTGGCCATAGGCTGGGTGTGCAGGGACCGATGCCTCCAACACAGCTATGCAGGTGCCTGGG
CTGTGAGTCCGGAGACAGAGCTCACTGGTCACCTGCTCGAGGGC

| | | | |
|---|---|---|---|
| NOV31j, CG55790-06 | | | |
| Protein Sequence | SEQ ID NO: 788 | 1302 aa | MW at 33376.5kD |

MRLGSPGLLFLLFSSLRADTQEKEVRAMVGSDVELSCACPEGSRFDLNDVYVYWQTSESKTVVTYHIP
QNSSLENVDSRYRNRALMSPAGMLRGDFSLRLFNVTPQDEQKFHCLVLSQSLGFQEVLSIEVTLHVAA
NFSVPVVSAPHSPSQDELTFTCTSINGYPRPNVYWINKTDNSLLDQALQNDTVFLNMRGLYDVVSVLR
IARTPSVNIGCCIENVLLQQNLTVGSQTGNDIGERDKITENPVSTGEKNAATWSILAVLCLLVVVAVA
IGWVCRDRCLQHSYAGAWAVSPETELTGHL

| | | |
|---|---|---|
| NOV31k, CG55790-07 | SEQ ID NO: 789 | 871 bp |
| DNA Sequence | ORF Start: at 11 | ORF Stop: at 863 |

CACCGGATCCGATACTCAGGAGAAGGAAGTCAGAGCGATGGTAGGCAGCGACGTGGAGCTCAGCTGCG
CTTGCCCTGAAGGAAGCCGTTTTGATTTAAATGATGTTTACGTATATTGGCAAACCAGTGAGTCGAAA
ACCGTGGTGACCTACCACATCCCACAGAACAGCTCCTTGGAAAACGTGGACAGCCGCTACCGGAACCG
AGCCCTGATGTCACCGGCCGGCATGCTGCGGGGCGACTTCTCCCTGCGCTTGTTCAACGTCACCCCCC
AGGACGAGCAGAAGTTTCACTGCCTGGTGTTGAGCCAATCCCTGGGATTCCAGGAGGTTTTGAGCGTT
GAGGTTACACTGCATGTGGCGGCAAACTTCAGCGTGCCCGTCGTCAGCGCCCCCCACAGCCCCTCCCA
GGATGAGCTCACCTTCACGTGTACATCCATAAACGGCTACCCCAGGCCCAACGTGTACTGGATCAATA
AGACGGACAACAGCCTGCTGGACCAGGCTCTGCAGAATGACACCGTCTTCTTGAACATGCGGGGCTTG
TATGACGTGGTCAGCGTGCTGAGGATCGCACGGACCCCCAGCGTGAACATTGGCTGCTGCATAGAGAA
CGTGCTTCTGCAGCAGAACCTGACTGTCGGCAGCCAGACAGGAAATGACATCGGAGAGAGAGACAAGA
TCACAGAGAATCCAGTCAGTACCGGCGAGAAAAACGCGGCCACGTGGAGCATCCTGGCTGTCCTGTGC
CTGCTTGTGGTCGTGGCGGTGGCCATAGGCTGGGTGTGCAGGGACCGATGCCTCCAACACAGCTATGC
AGGTGCCTGGGCTGTGAGTCCGGAGACAGAGCTCACTGGTCACCTGCTCGAGGGC

| | | | |
|---|---|---|---|
| NOV31k, CG55790-07 | | | |
| Protein Sequence | SEQ ID NO: 790 | 284 aa | MW at 31402.1kD |

DTQEKEVRAMVGSDVELSCACPEGSRFDLNDVYVYWQTSESKTVVTYHIPQNSSLENVDSRYRNPALM
SPAGMLRGDFSLRLFNVTPQDEQKFHCLVLSQSLGFQEVLSVEVTLHVAANFSVPVVSAPHSPSQDEL
TFTCTSINGYPRPNVYWINKTDNSLLDQALQNDTVFLNMRGLYDVVSVLRIARTPSVNIGCCIENVLL
AVSPETELTGHL

| | | |
|---|---|---|
| NOV31l, | | |
| SNP1 3374852 of | SEQ ID NO: 791 | 912 bp |
| CG55790-01, | ORF Start: ATG at 4 | ORF Stop: TAA at 910 |
| DNA Sequence | SNP Pos: 296 | SNP Change: T to C |

ACCATGCGGCTGGGCAGTCCTGGACTGCTCTTCCTGCTCTTCAGCAGCCTTCGAGCTGATACTCAGGA
GAAGGAAGTCAGAGCGATGGTAGGCAGCGACGTGGAGCTCAGCTGCGCTTGCCCTGAAGGAAGCCGTT
TTGATTTAAATGATGTTTACGTATATTGGCAAACCAGTGAGTCGAAAACCGTGGTGACCTACCACATC
CCACAGAACAGCTCCTTGGAAAACGTGGACAGCCGCTACCGGAACCGAGCCCTGATGTCACCGGCCGG
CATGCTGCGGGGCGACTTCTCCCAGCGCTTGTTCAACGTCACCCCCCAGGACGAGCAGAAGTTTCACT
GCCTGGTGTTGAGCCAATCCCTGGGATTCCAGGAGGTTTTGAGCGTTGAGGTTACACTGCATGTGGCA
GCAAACTTCAGCGTGCCCGTCGTCAGCGCCCCCCACAGCCCCTCCCAGGATGAGCTCACCTTCACGTG
ACCAGGCTCTGCAGAATGACACCGTCTTCTTGAACATGCGGGGCTTGTATGACGTGGTCAGCGTGCTG
AGGATCGCACGGACCCCCAGCGTGAACATTGGCTGCTGCATAGAGAACGTGCTTCTGCAGCAGAACCT
GACTGTCGGCAGCCAGACAGGAAATGACATCGGAGAGAGAGACAAGATCACAGAGAATCCAGTCAGTA
CCGGCGAGAAAAACGCGGCCACGTGGAGCATCCTGGCTGTCCTGTGCCTGCTTGTGGTCGTGGCGGTG
GCCATAGGCTGGGTGTGCAGGGACCGATGCCTCCAACACAGCTATGCAGGTGCCTGGGCTGTGAGTCC
GGAGACAGAGCTCACTGGTCACCTGTAA

| | | | |
|---|---|---|---|
| NOV31l, | | | |
| SNP13374852 of | | | |
| CG55790-01, | SEQ ID NO: 792 | | MW at 33346.5kD |
| Protein Sequence | SNP Pos: 98 | 302 aa | SNP Change: Leu to Pro |

MRLGSPGLLFLLFSSLRADTQEKEVRAMVGSDVELSCACPEGSRFDLNDVYVYWQTSESKTVVTYHIP
QNSSLENVDSRYRNRALMSPAGMLRGDFSPRLFNVTPQDEQKFHCLVLSQSLGFQEVLSVEVTLHVAA
NFSVPVVSAPHSPSQDELTFTCTSINGYPRPNVYWINKTDNSLLDQALQNDTVFLNDRGLYDVVSVLR
IARTPSVNIGCCIENVLLQQNLTVGSQTGNDIGERDKITENPVSTGEKNAATWSILAVLCLLVVVAVA
IGWVCRDRCLQHSYAGAWAVSPETELTGHL

[0531] A ClustalW comparison of the above protein sequences yields the following sequence alignment shown in Table 31B.

TABLE 31B

Comparison of the NOV31 protein sequences.

| | |
|---|---|
| NOV31a | ----MRLGSPGLLFLLFSSLRADTQEKEVRAMVGSDVELSCACPEGSRFDLNDVYVYWQT |
| NOV31b | ----------------TRSLPADTQEKEVRANVGSDVELSCACPEGSRFDLNDVYVYWQT |
| NOV31c | ----------------TRSLRADTQEKEVPAMVGSDVELSCACPEGSRFDLNDVYVYWQT |
| NOV31d | -------------------TGSDTQEKEVRAMVGSDVELSCACPEGSRFDLNDVYVYWQT |
| NOV31e | TGSTMRLGSPGLLFLLFSSLRADTQEKEVRAMVGSDVELSCACPEGSRFDLNDVYVYWQT |
| NOV31f | ----MRLGSPGLLFLLFSSLRADTQEKEVRAMVGSDVELSCACPEGSRFDLNDVYVYWQT |
| NOV31g | ----MRLGSPGLLFLLFSSLRADTQEKEVRANVGSDVELSCACPEGSRFDLNDVYVYWQT |
| NOV31h | ----------------------DTQEKEVRAMVGSDVELSCACPEGSRFDLNDVYVYWQT |
| NOV31i | -------------------LRADTQEKEVRAMVGSDVELSCACPEGSRFDLNDVYVYWQT |
| NOV31j | ----MRLGSPGLLFLLFSSLRADTQEKEVRAMVGSDVELSCACPEGSRFDLNDVYVYWQT |
| NOV3lk | ----------------------DTQEKEVRAMVGSDVELSCACPEGSRFDLNDVYVYWQT |
| NOV31a | SESKTVVTYHIPQNSSLENVDSRYRNRALMSPAGMLRGDFSLRLFNVTPQDEQKFHCLVL |
| NOV31b | SESKTVVTYHIPQNSSLENVDSRYPNRALMSPAGMLRGDFSLRLFNVTPQDEQKFHCLVL |
| NOV31c | SESKTVVTYHIPQNSSLENVDSRYPNRALMSPAGMLRGDFSLRLFNVTPQDEQKFHCLVL |
| NOV31d | SESKTVVTYHIPQNSSLENVDSRYRNRALMSPAGMLRGDFSLRLFNVTPQDEQKFHCLVL |
| NOV31e | SESKTVVTYHIPQNSSLENVDSRYRNRALMSPAGMLRGDFSLRLFNVTPQDEQKFHCLVL |
| NOV31f | SESKTVVTYHIPQNSSLENVDSRYRNRALMSPAGMLRGDFSLRLFNVTPQDEQKFHCLVL |
| NOV31g | SESKTVVTYHIPQNSSLENVDSRYRNRALMSPAGMLRGDFSLRLFNVTPQDEQKFHCLVL |
| NOV31h | SESKTVVTYHIPQNSSLENVDSRYRNRALMSPAGMLRGDFSLRLFNVTPQDEQKFHCLVL |
| NOV31i | SESKTVVTYHIPQNSSLENVDSRYRNRALMSPAGMLRGDFSLRLFNVTPQDEQKFHCLVL |
| NOV31j | SESKTVVTYHIPQNSSLENVDSRYRNRALMSPAGMLRGDFSLRLFNVTPQDEQKFHCLVL |
| NOV31k | SESKTVVTYHIPQNSSLENVDSRYRNRALMSPAGMLRGDFSLRLFNVTPQDEQKFHCLVL |
| NOV31a | SQSLGFQEVLSVEVTLHVAANFSVPVVSAPHSPSQDELTFTCTSINGYPRPNVYWINKTD |
| NOV31b | SQSLGFQEVLSIEVTLHVAANFSVPVVSAPHSPSQDELTFTCTSINGYPRPNVYWINKTD |
| NOV31c | SQSLGFQEVLSIEVTLHVAANFSVPVVSAPHSPSQDELTFTCTSINGYPRPNVYWINKTD |
| NOV31d | SQSLGFQEVLSVEVTLHVAANFSVPVVSAPHSPSQDELTFTCTSINGYPRPNVYWINKTD |
| NOV31e | SQSLGFQEVLSVEVTLHVAANFSVPVVSAPHSPSQDELTFTCTSINGYPRPNVYRINKTD |
| Nov31f | SQSLGFQEVLSVEVTLHVAANFSVPVVSAPHSPSQDELTFTCTSINGYPRPNVYWINKTD |
| NOV31g | SQSLGFQEVLSVEVTLHVAANFSVPVVSAPHSPSQDELTFTCTSINGYPRPNVYWINKTD |
| NOV31h | SQSLGFQEVLSVEVTLHVAANFSVPVVSAPHSPSQDELTFTCTSINGYPRPNVYWINKTD |
| NOV31i | SQSLGFQEVLSIEVTLHVAANFSVPVVSAPHSPSQDELTFTCTSINGYPRPNVYWINKTD |
| NOV31j | SQSLGFQEVLSIEVTLHVAANFSVPVVSAPHSPSQDELTFTCTSINGYPRPNVYWINKTD |
| NOV31k | SQSLGFQEVLSVEVTLHVAANFSVPVVSAPHSPSQDELTFTCTSINGYPRPNVYWINKTD |
| NOV31a | NSLLDQALQNDTVFLNMRGLYDVVSVLRIARTPSVNIGCCIENVLLQQNLTVGSQTGNDI |
| NOV31b | NSLLDQALQNDTVFLNMRGLYDVVSVLRIARTPSVNIGCCIENVLLQQNLTVGSQTGNDI |
| NOV31c | NSLLDQALQNDTVFLNMRGLYDVVSVLRIARTPSVNIGCCIENVLLQQNLTVGSQTGNDI |
| NOV31d | NSLLDQALQNDTVFLNNRGLYDVVSVLRIARTPSVNIGCCIENVLLQQNLTVGSQTGNDI |
| NOV31e | NSLLDQALQNDTVFLNMRGLYDVVSVLRIARTPSVNIGCCIENVLLQQNLTVGSQTGNDI |
| Nov31f | NSLLDQALQNDTVFLNMRGLYDVVSVLRIARTPSVNIGCCIENVLLQQNLTVGSQTGNDI |
| NOV31g | NSLLDQALQNDTVFLNMRGLYDVVSVLRIARTPSVNIGCCIENVLLQQNLTVGSQTGNDI |
| NOV31h | NSLLDQALQNDTVFLNMRGLYDVVSVLRIARTPSVNIGCCIENVLLQQNLTVGSQTGNDI |
| NOV31i | NSLLDQALQNDTVFLNMRGLYDVVSVLRIARTPSVNIGCCIENVLLQQNLTVGSQTGNDI |
| NOV31j | NSLLDQALQNDTVFLNMRGLYDVVSVLRIARTPSVNIGCCIENVLLQQNLTVGSQTGNDI |
| NOV31k | NSLLDQALQNDTVFLNNRGLYDVVSVLRIARTPSVNIGCCIENVLLQQNLTVGSQTGNDI |
| NOV31a | GERDKITENPVSTGEKNAATWSILAVLCLLVVVAVAIGWVCRDRCLQHSYAGAWAVSPET |
| NOV31b | GERDKITENPVSTGEKNAATWSILAVLCLLVVVAVAIGWVCRDRCLQHSYAGAWAVSPET |
| NOV31c | GERDKITENPVSTGEKNAATWSILAVLCLLVVVAVAIGWVCRDRCLQHSYAGAWAVSPET |
| NOV31d | GERDKITENPVSTGEKNAATWSILAVLCLLVVVAVAIGWVCRDRCLQHSYAGAWAVSPET |
| NOV31e | GERDKITENPVSTGEKNAATWSILAVLCLLVVVAVAIGWVCRDRCLQHSYAGAWAVSPET |
| NOV31f | GERDKITENPVSTGEKNAATWSILAVLCLLVVVAVAIGWVCRDRCLQHSYAGAWAVSPET |
| NOV31g | GERDKITENPVSTGEKNAATWSILAVLCLLVVVAVAIGWVCRDRCLQHSYAGAWAVSPET |
| NOV31h | GERDKITENPVSTGEKN------------------------------------------- |
| NOV31i | GERDKITENPVSTGEKNAATWSILAVLCLLVVVAVAIGWVCRDRCLQHSYAGAWAVSPET |
| NOV31j | GERDKITENPVSTGEKNAATWSILAVLCLLVVVAVAIGWVCRDRCLQHSYAGAWAVSPET |
| NOV31k | GERDKITENPVSTGEKNAATWSILAVLCLLVVVAVAIGWVCRDRCLQHSYAGAWAVSPET |
| NOV31a | ELTGEFAVGSSRFWGAQGRLGCQLSFRVSKNFQKAKVPCLEQLLFLETQRSPRWCAWHFL |
| NOV31b | ELTGEFAVGSSRFWGAQGRLGCQLSFRVSKNFQKAKVPCLEQLLFLETQRSPRWCAWHFL |
| NOV31c | ELTGEFAVGSSRFWGAQGRLGCQLSFRVSKNFQKAKVPCLEQLLFLETQRSPRWCAWHFL |
| NOV31d | ELTGHLLEG--------------------------------------------------- |
| NOV31e | ELTGHLLEG--------------------------------------------------- |
| NOV31f | ELTGHL------------------------------------------------------ |
| NOV31g | ELTGHL------------------------------------------------------ |
| NOV31h | ------------------------------------------------------------ |
| NOV31i | ELTGEFAVGSSRFWGAQGRLGCQLSFRVSKNFQKAKVPCLEQLLFLETQRSPRWCAWHFL |
| NOV31j | ELTGHL------------------------------------------------------ |
| NOV31k | ELTGHL------------------------------------------------------ |
| NOV31a | QPPLGMGWHPGVHFVTLRWDFPNMHRSRETSARPPRSPVPSPDQGVQGGSRHRRPAPMGC |
| NOV31b | QPPLGMGWHPGVHFVTLRWDFPNMHRSRETSARPPRSPVPSPNQGVQGGSRHRRPAPMGC |
| NOV31c | QPPLGMGWHPGVHFVTLRWDFPNMHRSRETSARPPRSPVPSPDQGVQGGSRHRRPAPMGC |
| NOV31d | ------------------------------------------------------------ |
| NOV31e | ------------------------------------------------------------ |
| NOV31f | ------------------------------------------------------------ |
| NOV31g | ------------------------------------------------------------ |
| NOV31h | ------------------------------------------------------------ |
| NOV31i | QPPLGMGWHPGVHFVTLRWDFPNNHRSRETSARPPRSPVPSPNQGVQGGSRHRRPAPMGC |
| NOV31j | ------------------------------------------------------------ |
| NOV31k | ------------------------------------------------------------ |
| NOV31a | PEWVQAPAPSPRGVSEAGPGTGAQPLWGVRSGSGHRQLLSVAATPAALVCPSVPGAT--- |
| NOV31b | PEWVQAPAPSPRGVSRAGPGTGAQPLWGVRSGSGHRQLLSVAATPAALVCPSVPGATLEG |
| NOV31c | PEWVQAPAPSPRGVSRAGPGTGAQPLWGVRSGSGHRQLLSVAATPAALVCPSVPGATLEG |
| NOV31d | ------------------------------------------------------------ |
| NOV31e | ------------------------------------------------------------ |
| NOV3lf | ------------------------------------------------------------ |
| NOV31g | ------------------------------------------------------------ |
| NOV31h | ------------------------------------------------------------ |
| NOV31i | PEWVQAPAPSPRGVSPAGPGTGAQPLWGVRSGSGHRQLLSVAATPAALVCPSVPGAT--- |
| NOV31j | ------------------------------------------------------------ |
| NOV31k | ------------------------------------------------------------ |
| NOV31a | (SEQ ID NO: 770) |
| NOV31b | (SEQ ID NO: 772) |
| NOV31c | (SEQ ID NO: 774) |
| NOV31d | (SEQ ID NO: 776) |
| NOV31e | (SEQ ID NO: 778) |
| NOV3lf | (SEQ ID NO: 780) |
| NOV3lg | (SEQ ID NO: 782) |
| NOV3lh | (SEQ ID NO: 784) |
| NOV31i | (SEQ ID NO: 786) |
| NOV31j | (SEQ ID NO: 788) |
| NOV31k | (SEQ ID NO: 790) |

[0532] Further analysis of the NOV31 a protein yielded the following properties shown in Table 31C.

TABLE 31C
Protein Sequence Properties NOV31a

| | |
|---|---|
| SignalP analysis: | Cleavage site between residues 19 and 20 |
| PSORT II analysis: | |

| PSG: | a new signal peptide prediction method | |
|---|---|---|
| | N-region: | length 2; pos. chg 1; neg. chg 0 |
| | H-region: | length 14; peak value 10.56 |
| | PSG score: | 6.16 |

| | |
|---|---|
| GvH: | von Heijne's method for signal seq. recognition |
| | GvH score (threshold: −2.1): 1.98 |
| | possible cleavage site: between 20 and 21 |

>>> Seems to have a cleavable signal peptide (1 to 20)

| ALOM: | Klein et al's method for TM region allocation | | |
|---|---|---|---|
| | Init position for calculation: 21 | | |
| | Tentative number of TMS(s) for the threshold 0.5: 2 | | |
| | Number of TMS(s) for threshold 0.5: 1 | | |
| | INTEGRAL | Likelihood = | Transmembrane 258-274 |
| | | −13.27 | |

| | |
|---|---|
| PERIPHERAL | Likelihood = 2.97 (at 127) |

| | |
|---|---|
| | ALOM score: −13.27 (number of TMSs: 1) |
| MTOP: | Prediction of membrane topology (Hartmann et al.) |
| | Center position for calculation: 10 |
| | Charge difference: −2.0 C(0.0)-N(2.0) |
| | N >= C: N-terminal side will be inside |

>>> membrane topology: type 1a (cytoplasmic tail 275 to 473)

| MITDISC: | discrimination of mitochondrial targeting seq | | | |
|---|---|---|---|---|
| | R content: | 2 | Hyd Moment(75): | 5.99 |
| | Hyd Moment(95): | 8.79 | G content: | 2 |
| | D/E content: | 1 | S/T content: | 3 |

| | |
|---|---|
| | Score: −2.92 |
| Gavel: | prediction of cleavage sites for mitochondrial preseq |
| | R-2 motif at 27 LRA\|DT |

NUCDISC: discrimination of nuclear localization signals

| | |
|---|---|
| | pat4: RHRR (3) at 407 |
| | pat7: none |
| | bipartite: none |
| | content of basic residues: 8.9% |
| | NLS Score: −0.29 |
| KDEL: | ER retention motif in the C-terminus: none |

ER Membrane Retention Signals:

XXRR-like motif in the N-terminus: RLGS

none
SKL: peroxisomal targeting signal in the C-terminus: none
PTS2: 2nd peroxisomal targeting signal: none
VAC: possible vacuolar targeting motif: none
RNA-binding motif: none
Actinin-type actin-binding motif:

type 1: none
type 2: none

NMYR: N-myristoylation pattern: none
Prenylation motif: none
memYQRL: transport motif from cell surface to Golgi: none
Tyrosines in the tail: too long tail
Dileucine motif in the tail: found

LL at 339
LL at 454

checking 63 PROSITE DNA binding motifs: none
checking 71 PROSITE ribosomal protein motifs: none
checking 33 PROSITE prokaryotic DNA binding motifs: none

| | |
|---|---|
| NNCN: | Reinhardt's method for Cytoplasmic/Nuclear discrimination |
| | Prediction: cytoplasmic |
| | Reliability: 76.7 |
| COIL: | Lupas's algorithm to detect coiled-coil regions |
| | total: 0 residues |

Final Results (k = 9/23):

55.6%: endoplasmic reticulum
22.2%: Golgi
11.1%: plasma membrane
11.1%: extracellular, including cell wall

>> prediction for CG55790-02 is end (k = 9)

[0533] A search of the NOV31a protein against the Geneseq database, a proprietary database that contains sequences published in patents and patent publication, yielded several homologous proteins shown in Table 31D.

TABLE 31D
Geneseq Results for NOV31a

| | | NOV31a | Identities/ | | |
|---|---|---|---|---|---|
| | | Residues/ | Similarities for | | |
| Geneseq | Protein/Organism/Length | Match | the Matched | | Expect |
| Identifier | [Patent #, Date] | Residues | Region | | Value |
| ABG30731 | Human B7-H2 transcript 2 (B7-H2 V2) | 1 . . . 473 | 471/473 | (99%) | 0.0 |
| | polypeptide - Homo sapiens, 473 aa. | 1 . . . 473 | 473/473 | (99%) | |
| | [WO200253733-A2, 11-JUL-2002] | | | | |
| AAU00422 | Human B7-3 protein - Homo sapiens, | 1 . . . 473 | 471/516 | (91%) | 0.0 |
| | 516 aa. [WO200112658-A2, 22-FEB- | 1 . . . 516 | 471/516 | (91%) | |
| | 2001] | | | | |
| AAU99789 | Human B7 related protein-1 (B7RP1) | 1 . . . 300 | 300/300 | (100%) | e−174 |
| | #2 - Homo sapiens, 302 aa. | 1 . . . 300 | 300/300 | (100%) | |
| | [WO200244364-A2, 06-JUN-2002] | | | | |
| AAG67292 | Amino acid sequence of a human hB7- | 1 . . . 300 | 300/300 | (100%) | e−174 |
| | H2 polypeptide - Homo sapiens, 302 | 1 . . . 300 | 300/300 | (100%) | |
| | aa. [WO200164704-A1, 07-SEP-2001] | | | | |
| AAB08729 | Amino acid sequence of a human | 1 . . . 300 | 300/300 | (100%) | e−174 |
| | B7RP1 polypeptide - Homo sapiens, | 1 . . . 300 | 300/300 | (100%) | |
| | 302 aa. [WO200046240-A2, 10-AUG- | | | | |
| | 2000] | | | | |

[0534] In a BLAST search of public sequence databases, the NOV31 a protein was found to have homology to the proteins shown in the BLASTP data in Table 31E.

TABLE 31E
Public BLASTP Results for NOV31a

| | | NOV31a | Identities/ | | |
|---|---|---|---|---|---|
| Protein | | Residues/ | Similarities for | | |
| Accession | | Match | the Matched | | Expect |
| Number | Protein/Organism/Length | Residues | Portion | | Value |
| O75144 | ICOS ligand precursor (B7 homolog 2) | 1 . . . 300 | 300/300 | (100%) | e−174 |
| | (B7-H2) (B7-like protein GI50) (B7- | 1 . . . 300 | 300/300 | (100%) | |
| | related protein-1) (B7RP-1) - Homo | | | | |
| | sapiens (Human), 302 aa. | | | | |
| CAD57064 | Sequence 11 from Patent WO0244364 - | 1 . . . 288 | 288/288 | (100%) | e−166 |
| | Mus musculus (Mouse), 288 aa | 1 . . . 288 | 288/288 | (100%) | |
| | (fragment). | | | | |
| Q9JHJ8 | ICOS ligand precursor (B7 homolog 2) | 7 . . . 295 | 135/291 | (46%) | 2e−58 |
| | (B7-H2) (B7-like protein GI50) (B7- | 32 . . . 317 | 172/291 | (58%) | |
| | related protein-1) (B7RP-1) (LICOS) - | | | | |
| | Mus musculus (Mouse), 322 aa. | | | | |
| O42404 | CD80-like protein - Gallus gallus | 2 . . . 283 | 99/291 | (34%) | 6e−33 |
| | (Chicken), 296 aa. | 3 . . . 288 | 153/291 | (52%) | |
| Q9BXR1 | Costimulatory molecule - Homo | 2 . . . 277 | 89/292 | (30%) | 3e−21 |
| | sapiens (Human), 316 aa. | 4 . . . 270 | 131/292 | (44%) | |

[0535] PFam analysis predicts that the NOV31a protein contains the domains shown in the Table 31F.

TABLE 31F
Domain Analysis of NOV31a

| | | Identities/ | |
|---|---|---|---|
| | | Similarities | |
| Pfam | NOV31a | for the | Expect |
| Domain | Match Region | Matched Region | Value |
| ig | 30 . . . 115 | 16/87 (18%) | 0.011 |
| | | 60/87 (69%) | |

### Example 32

[0536] The NOV32 clone was analyzed, and the nucleotide and encoded polypeptide sequences are shown in Table 32A.

TABLE 32A

NOV32 Sequence Analysis

| | | |
|---|---|---|
| NOV32a, CG55906-04 | SEQ ID NO: 793 | 4119 bp |
| DNA Sequence | ORF Start: ATG at 1 | ORF Stop: TAG at 4117 |

ATGTCTGCTCCAGACGAAGGGAGACGGGATCCCCCCAAACCGAAGGGCAAGACCCTGGGCAGCTTCTT
TGGGTCCCTGCCTGGCTTCAGCTCTGCCCGGAACCTGGTGGCCAACGCACATAGCTCGGCGAGAGCCC
GGCCGGCCGCTGACCCCACAGGAGCGCCTGCTGCCGAGGCTGCCCAACCACAGGCTCAGGTGGCTGCC
CACCCAGAGCAGACGGCCCCATGGACGGAGAAGGAGCTGCAACCTTCGGAAAAGCAGATGGTGTCCGG
GGCCAAAGACCTGGTGTGTTCCAAGATGTCCAGGGCCAAGGATGCCGTGTCCTCCGGGGTGGCCAGCG
TGGTGGACGTGGCTAAGGGAGTGGTCCAGGGAGGCCTGGACACCACTCGGTCTGCACTTACGGGCACC
GGACACCTCGAAGGCTGTCCTCACCGGCACCAAGGACACGGTGTCCACTGGGCTCACGGGGGCAGTGA
ATGTGGCCAAAGGGACCGTACAGGCCGGTGTGGACACCACCAAGACTGTGCTGACCGGCACCAAAGAC
ACAGTGACTACTGGGGTCATGGGGGCAGTGAACTTGGCCAAAGGGACTGTCCAGACTGGCGTGGAAAC
CTCCAAGGCTGTGCTGACCGGCACCAAAGATGCTGTGTCCACTGGGCTCACAGGGGCAGTGAATGTGG
CCAGAGGAAGCATTCAGACCGGTGTGGACACCAGTAAGACTGTCCTAACAGGTACCAAGGACACCGTC
TGTAGTGGGGTGACTGGTGCCATGAATGTGGCCAAAGGAACCATCCAGACCGGCGTGGACACCAGTAA
GACTGTCCTAACAGGTACCAAGGACACCGTCTGTAGTGGGGTGACTGGTGCCATGAATGTGGCCAAAG
GAACCATCCAGACCGGCGTGGACACCAGTAAGACTGTCCTAACAGGTACCAAGGACACCGTCTGTAGT
GGGGTGACTGGTGCCATGAATGTGGCCAAAGGAACCATCCAGACCGGCGTGGACACCACCAAGACTGT
CCTAACTGGCACCAAGAACACTGTCTGCAGTGGGGTGACCGGTGCCGTGAACTTGGCCAAAGAGGCCA
TCCAGGGGGGCCTGGATACCACCAAGTCTATGGTCATGGGTACGAAAGACACGATGTCCACTGGGCTC
ACAGGGGCAGCGAATGTGGCCAAGGGGGCCATGCAAACTGGGCTGAACACAACCCAAAATATCGCAAC
AGGTACAAAGGACACCGTCTGCAGTGGGGTGACTGGTGCCATGAATTTGGCCAGAGGAACCATCCAGA
CAGGCGTGGACACCACCAAGATCGTTCTAACTGGTACCAAGGACACTGTCTGCAGTGGGGTCACCGGT
GCTGCGAATGTGGCCAAAGGGGCCGTCCAGGGCGGCCTGGACACTACAAAGTCTGTCCTGACTGGCAC
TAAAGATGCTGTGTCCACTGGGCTCACAGGGGCTGTGAACGTGGCCAAAGGGACCGTCCAGACCGGCG
TAGACACCACCAAGACTGTCCTAACCGGCACCAAGGACACCGTCTGCAGTGGGGTGACCAGTGCTGTG
AACGTGGCCAAAGGGGCCGTCCAGGGGGGCCTGGACACCACCAAGTCTGTGGTCATAGGTACAAAAGA
CACGATGTCCACTGGGCTCACGGGGGCAGCGAATGTGGCCAAGGGGGCTGTCCAGACAGGTGTAGACA
CAGCCAAGACCGTGCTGACCGGCACCAAGGACACAGTGACTACTGGGCTCGTGGGGGCAGTGAATGTC
CTACAGTGGGGTCACCAGTGCCGTGAACGTGGCCAAGGGGGCTGTGCAAACTGGGCTGAAAACGACCC
AAAATATCGCGACAGGTACAAAGAACACCTTTGGCAGTGGGGTGACCAGTGCTGTGAATGTGGCCAAA
GGGGCTGCCCAGACAGGTGTAGACACGGCCAAGACCGTGCTGACCGGCACCAAGGACACAGTCACTAC
TGGGCTCATGGGGGCAGTGAATGTCGCCAAAGGGACTGTCCAGACCAGTGTGGACACCACCAAGACTG
TCCTAACTGGTACCAAGGACACCGTCTGCAGTGGGGTGACCGGTGCTGCGAATGTGGCCAAAGGGGCC
ATCCAAGGGGGCCTGGACACTACAAAGTCTGTCCTGACTGGCACTAAAGATGCTGTGTCCACTGGGCT
CACAGGGGCTGTGAAGTTGGCCAAAGGGACTGTCCAGACCGGCATGGACACCACCAAGACTGTGTTAA
CTGGTACCAAGGATGCTGTGTGCAGTGGGGTGACCGGTGCTGCGAATGTGGCCAAGGGGGCCGTCCAG
ATGGGTGTAGACACGGCCAAGACCGTGCTGACCGGTACCAAGGACACTGTCTGCAGTGGGGTCACCGG
TGCTGCGAACGTGGCCAAGGGTGCTGTGCAAACTGGGCTGAAAACGACCCAAAATATCGCAACAGGTA
CAAAGAACACCCTTGGCAGTGGGGTGACCGGTGCTGCGAAAGTGGCCAAAGGGGCCGTCCAGGGGGGC
CTGGACACTACAAAGTCTGTCCTGACTGGCACTAAAGATGCCGTGTCCACTGGGCTCACAGGGGCTGT
GAACTTGGCCAAAGGGACTGTCCAGACCGGCGTGGACACCAGCAAGACTGTCCTGACCGGTACCAAGG
ACACCGTCTGCAGTGGAGTCACTGGTGCCGTAAATGTGGCCAAAGGGACCGTCCAGACAGGTGTGGAC
ACAGCCAAGACGGTGCTGAGTGGCGCTAAGGATGCAGTGACTACTGGAGTCACGGGGGCAGTGAATGT
GGCCAAAGGAACCGTGCAGACCGGCGTGGACGCCTCCAAGGCTGTGCTTATGGGTACCAAGGACACTG
TCTTCAGTGGGGTTACCGGTGCCATGAGCATGGCCAAAGGGGCCGTCCAGGGGGGCCTGGACACCACC
AAGACAGTGCTGACCGGAACCAAAGACGCAGTGTCCGCTGGGCTCATGGGGTCAGGGAACGTGGCGAC
AGGGGCCACCCACACTGGCCTCAGCACCTTCCAGAACTGGTTACCTAGTACCCCCGCCACCTCCTGGG
GTGGACTCACCAGTTCCAGGACCACAGACAATGGTGGGGAGCAGACTGCCCTGAGCCCCCAAGAGGCC
AGCCACTACCAAGGGCCTTGCGACTGACGTGGCGACGTTCACCCAAGGGGCCGCCCCAGGCAGGGAGG
ACACGGGGCTTTTGGCCACCACACACGGCCCCGAAGAAGCCCCACGCTTGGCAATGCTGCAGAATGAG
TTGGAGGGGCTGGGGGACATCTTCCACCCCATGAATGCGGAGGAGCAAGCTCAGCTGGCTGCCTCCCA
GCCTGGGCCAAAGGTGCTGTCGGCGGAACAGGGGAGCTACTTCGTTCGTTTAGGTGACCTGGGTCCCA
GCTTCCGCCAGCGGGCATTTGAACACGCGGTGAGCCACCTGCAGCACGGCCAGTTCCAAGCCAGGGAC
ACTCTGGCCCAGCTCCAGGACTGCTTCAGGCTGATTGAAAAGGCCCAGCAGGCTCCAGAAGGGCAGCC
ACGTCTGGACCAGGGCTCAGGTGCCAGTGCGGAGGACGCTGCTGTCCAGGAGGAGCGGGATGCCGGGG
TTCTGTCCAGGGTCTGCGGCCTTCTCCGGCAGCTGCACACGGCCTACAGTGGCCTGGTCTCCAGCCTC
CAGGGCCTGCCCGCCGAGCTCCAGCAGCCAGTGGGGCGGGCGCGGCACAGCCTCTGTGAGCTCTATGG
CATCGTGGCCTCAGCTGGCTCTGTAGAGGAGCTGCCCGCAGAGCGGCTGGTGCAGAGCCGCGAGGGTG
GCACCAGGCTTGGCAGGGGTTAGAGCAGCTGCTGGAGGGCCTACAGCACAATCCCCCGCTCAGCTGG
CTGGTAGGGCCCTTCGCCTTGCCCGCTGGCGGGCAGTAG

| | | | |
|---|---|---|---|
| NOV32a, CG55906-04 | | | |
| Protein Sequence | SEQ ID NO: 794 | 1372 aa | MW at 136019.4kD |

MSAPDEGRRDPPKPKGKTLGSFFGSLPGFSSARNLVANAHSSARARPAADPTGAPAAEAAQPQAQVAA
HPEQTAPWTEKELQPSEKQMVSGAKDLVCSKMSRAKDAVSSGVASVVDVAKGVVQGGLDTTRSALTGT
KEVVSSGVTGAMDMAKGAVQGGLDTSKAVLTGTKDTVSTGLTGAVNVAKGTVQAGVDTTKTVLTGTKD
TVTTGVMGAVNLAKGTVQTGVETSKAVLTGTKDAVSTGLTGAVNVARGSIQTGVDTSKTVLTGTKDTV
CSGVTGAMNVAKGTIQTGVDTSKTVLTGTKDTVCSGVTGAMNVAKGTIQTGVDTSKTVLTGTKDTVCS
GVTGAMNVAKGTIQTGVDTTKTVLTGTKNTVCSGVTGAVNLAKEAIQGGLDTTKSMVMGTKDTMSTGL
TGAANVAKGAMQTGLNTTQNIATGTKDTVCSGVTGAMNLARGTIQTGVDTTKIVLTGTKDTVCSGVTG
AANVAKGAVQGGLDTTKSVLTGTKDAVSTGLTGAVNVAKGTVQTGVDTTKTVLTGTKDTVCSGVTSAV
NVAKGAVQGGLDTTKSVVIGTKDTMSTGLTGAANVAKGAVQTGVDTAKTVLTGTKDTVTTGLVGAVNV
AKGTVQTGMDTTKTVLTGTKDTIYSGVTSAVNVAKGAVQTGLKTTQNIATGTKNTFGSGVTSAVNVAK
GAAQTGVDTAKTVLTGTKDTVTTGLMGAVNVAKGTVQTSVDTTKTTLTGTKDTVCSGVTGAANVAKGA
IQGGLDTTKSVLTGTKDAVSTGLTGAVKLAXGTVQTGMDTTKTVLTGTKDAVCSGVTGAANVAKGAVQ
MGVDTAKTVLTGTKDTVCSGVTGAANVAKGAVQTGLKTTQNIATGTKNTLGSGVTGAAKVAKGAVQGG
LDTTKSVLTGTKDAVSTGLTGAVNLAKGTVQTGVDTSKTVLTGTKDTVCSGVTGAVNVAKGTVQTGVD
TAKTVLSGAKDAVTTGVTGAVNVAKGTVQTGVDASKAVLMGTKDTVFSGVTGAMSMAKGAVQGGLDTT
KTVLTGTKDAVSAGLMGSGNVATGATHTGLSTFQNWLPSTPATSWGGLTSSRTTDNGGEQTALSPQEA
PFSGISTPPDVLSVGPEPAWEAAATTKGLATDVATFTQGAAPGREDTGLLATTHGPEEAPRLAMLQNE
LEGLGDIFHPMNAEEQAQLAASQPGPKVLSAEQGSYFVRLGDLGPSFRQPAFEHAVSHLQHGQFQARD
TLAQLQDCFRLIEKAQQAPEGQPRLDQGSGASAEDAAVQEERDAGVLSRVCGLLRQLHTAYSGLVSSL
QGLPAELQQPVGRARHSLCELYGIVASAGSVEELPAERLVQSREGVHQAWQGLEQLLEGLQHNPPLSW
LVGPFALPAGGQ

| | | |
|---|---|---|
| NOV32b, CG55906-05 | SEQ ID NO: 795 | 6600 bp |
| DNA Sequence | ORF Start: ATG at 23 | ORF Stop: TAG at 4337 |

TCCAGCTTCTCACGTTCTCACTATGTCTGCTCCAGACGAAGGGAGACGGGATCCCCCCAAACCGAAGG
GCAAGACCCTGGGCAGCTTCTTTGGGTCCCTGCCTGGCTTCAACTCTGCCCGGAACCTGGTGGCCAAC
GCACATAGCTCGGCGAGAGCCCGGCCGGCCGCTGACCCCACAGGAGCGCCTGCTGCCGAGGCTGCCCA
ACCACAGGCTCAGGTGGCTGCCCACCCAGAGCAGACGGCCCCATGGACGGAGAAGGAGCTGCAACCTT
CGGAAAAGCAGATGGTGTCCGGGGCCAAAGACCTGGTGTGTTCCAAGATGTCCAGGGCCAAGGATGCC
GTGTCCTCCGGGGTGGCCAGCGTGGTGGACGTGGCTAAGGGAGTGGTCCAGGGAGGCCTGGACACCAC
TCGGTCTGCACTTACGGGCACCAAGGAGGCGGTGTCCAGCGGGGTCACAGGGGCCATGGACATGGCTA
AGGGGGCCGTCCAAGGGGGTCTGGACACCTCGAAGGCTGTCCTCACCGGCACCAAGGACACGGTGTCC
ACTGGGCTCACGGGGGCAGTGAATGTGGCCAAAGGGACCGTACAGGCCGGTGTGGACACCACCAAGAC
TGTGCTGACCGGCACCAAAGACACAGTGACTACTGGGGTCATGGGGGCAGTGAACTTGGCCAAAGGGA
CTGTCCAGACTGGCGTGGAAACCTCCAAGGCTGTGCTGACCGGCACCAAAGATGCTGTGTCCACTGGG
CTCACAGGGGCAGTGAATGTGGCCAGAGGAAGCATTCAGACCGGTGTGGACACCAGTAAGACTGTCCT
AACAGGTACCAAGGACACCGTCTGTAGTGGGGTGACCAGTGCCATGAATGTGGCCAAAGGAACCATCC
AGACCGGCGTGGACACCAGTAAGACTGTCCTAACAGGTACCAAGGACACCGTCTGTAGTGGGGTGACT
GGTGCCATGAATGTGGCCAAAGGAACCATCCAGACCGGCGTGGACACCAGTAAGACTGTCCTAACAGG
TACCAAGGACACCGTCTGTAGTGGGGTGACTGGTGCCATGAATGTGGCCAAAGGAACCATCCAGACCG
GCGTGGACACCACCAAGACTGTCCTAACTGGCACCAAGAACACTGTCTGCAGTGGGGTGACCGGTGCC
GTGAACTTGGCCAAAGAGGCCATCCAGGGGGGCCTGGATACCACCAAGTCTATGGTCATGGGTACGAA
AGACACGATGTCCACTGGGCTCACGGGGGCAGCGAATGTGGCCAAGGGGGCCATGCAAACTGGGCTGA
ACACAACCCAAAATATCGCAACAGGTACAAAGGACACCGTCTGCAGTGGGGTGACTGGTGCCATGAAT
TTGGCCAGAGGAACCATCCAGACAGGCGTGGACACCACCAAGATCGTTCTAACTGGTACCAAGGACAC
TGTCTGCAGTGGGGTCACCGGTGCTGCGAATGTGGCCAAAGGGGCCGTCCAGGGGGGCCTGGACACTA
CAAAGTCTGTCCTGACTGGCACTAAAGATGCTGTGTCCACTGGGCTCACAGGGGCTGTGAACGTGGCC
AAAGGGACCGTCCAGACCGGCGTAGACACCACCAAGACTGTCCTAACCGGCACCAAGGACACCGTCTG
CAGTGGGGTGACCAGTGCTGTGAACGTGGCCAAAGGGGCCGTCCAGGGGGGCCTGGACACCACCAAGT
CTGTGGTCATAGGTACAAAAGACACGATGTCCACTGGGCTCACGGGGGCAGCGAATGTGGCCAAGGGG
GCTGTCCAGACAGGTGTAGACACAGCCAAGACCGTGCTGACCGGCACCAAGGACACAGTGACTACTGG
GCTCGTGGGGGCAGTGAATGTCGCCAAAGGGACCGTCCAGACAGGCATGGACACCACCAAAACTGTCC
TAACCGGTACCAAGGACACCATCTACAGTGGGGTCACCAGTGCCGTGAACGTGGCCAAGGGGGCTGTG
CAAACTGGGCTGAAAACGACCCAAAATATCGCGACAGGTACAAAGAACACCTTTGGCAGTGGGGTGAC
CGGTGCTGTGAATGTGGCCAAAGGGGCCGTCCAGACAGGTGTAGACACAGCCAAGACCGTGCTGACCG
GCACCAAGGACACAGTCACTACTGGGCTCATGGGGGCAGTGAATGTCGCCAAAGGGACTGTCCAGACC
AGTGTGGACACCACCAAGACTGTCCTAACTGGTACCAAGGACACCGTCTGCAGTGGGGTGACCGGTGC
TGCGAATGTGGCCAAGGGGGCCGTCCAGACGGGTGTAGACACGGCCAAGACCGTGCTGACCGGTACCA
AGGACACTGTCTGCAGTGGGGTCACCGGTGCTGTGAACGTGGCCAAGGGTGCTGTGCAAACTGGGCTG
AAAACGACCCAAAATATCGCAACAGGTACAAAGAACACCCTTGGCAGTGGGGTGACCGGTGCTGCGAA
TGTGGCCAAAGGGGCCGTCCAGGGGGGCCTGGACACTACAAAGTCTGTCCTGACTGGCACTAAAGATG
CTGTGTCCACTGGGCTCACAGGGGCTGTGAACTTGGCCAAAGGGACTGTCCAGACCGGCATGGACACC
ACCAAGACTGTGTTAACTGGTACCAAGGATGCTGTGTGCAGTGGGGTGACCGGTGCTGCGAATGTGGC
CAAGGGGGCCGTCCAGACGGGTGTAGACACGGCCAAGACCGTGCTGACCGGCACCAAGGACACAGTCA
CTACTGGGCTCATGGGGGCAGTGAATGTCGCCAAAGGGACCGTCCAGACCAGTGTGGACACCACCAAG
ACTGTCCTAACTGGTACCAAGGACACCGTCTGCAGTGGGGTGACCGGTGCTGCGAATGTGGCCAAGGG
GGCCGTCCAGGGGGGCCTGGACACTACAAAGTCTGTCCTGACTGGCACTAAAGACACCGTATCCACTG
GGCTCACAGGGGCTGTGAACTTGGCCAAAGGGACTGTCCAGACCGGCGTGGACACCAGCAAGACTGTC
CTGACCGGTACCAAGGACACCGTCTGCAGTGGAGTCACTGGTGCCGTAAATGTGGCCAAAGGCACCGT
CCAGACAGGTGTGGACACAGCCAAGACGGTGCTGAGTGGCGCTAAGGATGCAGTGACTACTGGAGTCA
CGGGGGCAGTGAATGTGGCCAAAGGAACCGTGCAGACCGGCGTGGACGCCTCCAAGGCTGTGCTTATG
GGTACCAAGGACACTGTCTTCAGTGGGGTTACCGGTGCCATGAGCATGGCCAAAGGGGCCGTCCAGGG
GGGCCTGGACACCACCAAGACAGTGCTGACCGGAACCAAW3ACGCAGTGTCCGCTGGGCTCATGGGGT
CAGGGAACGTGGCGACAGGGGCCACCCACACTGGCCTCAGCACCTTCCAGAACTGGTTACCTAGTACC
CCCGCCACCTCCTGGGGTGGACTCACCAGTTCCAGGACCACAGACAATGGTGGGGAGCAGACTGCCCT
GAGCCCCCAAGAGGCCCCGTTCTCTGGCATCTCCACGCCCCCGGATGTGCTCAGTGTAGGCCCGGAGC
CTGCCTGGGAAGCCGCAGCCACTACCAAGGGCCTTGCGACTGACGTGGCGACGTTCACCCAAGGGGCC
GCCCCAGGCAGGGAGGACACGGGGCTTTTGACCACCACACACGGCCCCGAAGAAGCCCCACGCTTGGC
AATGCTGCAGAATGAGTTGGAGGGGCTGGGGGACATCTTCCACCCCATGAATGCGGAGGAGCAAGCTC
AGCTGGCTGCCTCCCAGCCCGGGCCAAAGGTGCTGTCGGCGGAACAGGGGAGCTACTTCGTTCGTTTA
GGTGACCTGGGTCCCAGCTTCCGCCAGCGGGCATTTGAACACGCGGTGAGCCACCTGCAGCACGGCCA
GTTCCAAGCCAGGGACACTCTGGCCCAGCTCCAGGACTGCTTCAGGCTGATTGAAAAGGCCCAGCAGG
CTCCAGAAGGGCAGCCACGTCTGGACCAGGGCTCAGGTGCCAGTGCGGAGGACGCTGCTGTCCAGGAG
GAGCGGGATGCCGGGGTTCTGTCCAGGGTCTGCGGCCTTCTCCGGCAGCTGCACACGGCCTACAGTGG
CCTGGTCTCCAGCCTCCAGGGCCTGCCCGCCGAGCTCCAGCAGCCAGTGGGGCGGGCGCGGCACAGCC
TCTGTGAGCTCTATGGCATCGTGGCCTCAGCTGGCTCTGTAGAGGAGCTGCCCGCAGAGCGGCTGGTG
CAGAGCCGCGAGGGTGTGCACCAGGCTTGGCAGGGGTTAGAGCAGCTGCTGGAGGGCCTACAGCACAA
TCCCCCGCTCAGCTGGCTGGTAGGGCCCTTCGCCTTGCCCGCTGGCGGGCAGTAGCTGTAGGAGCCTG
CAGGCCCGGCGCGGGGTCGCCCTGCTCTGTCCAGGGAGGAGCTGCCTCAGAACTTTCTCCCCGCCCCC
AAACCTGGATCGGTTCCCTAAAGCCCTAGACCTTTGGGGCTGCAGCTGGCTGAGCGCCGAGGGGCTGC
GGAGGCAGTGACCTTCTTAACTGAGCCACCCCACGCCCTGCTCCGGGCCTGCCTGCATCTCCCACCTC
CTCCCCAGCGCTGCCTGCCCCTCTCGGAGCCTGGGGTCACTCAGACCACCAGCCAAGAGCCTTCCCTT
GAAGTCCCCAAGCAAGCACTGCAATTAGGAAAGAGAAAAAGCAGCGTGCCCAGCCTGGAAGGGGATCT
GTTTGCCCCGCTAGCAACCCTTTTATATCTAGCAGGGCTCTTCCAGTCCTGCAGCACGGGCCCCCAGC
TATCAGCGGTGCAGGCAGTGCTGTGGCATCCCAGGCTCCGGGCAGCTCCGTTCTCATGCTGAAAGTGG
GTCTCCGGCCTTAGCACACACACCTTGAGGGTCTTAAGAACCACATTCCCTCATAGTAGAAAGTACTA
GAAAAAGCGACACTGCCATCATCATCCCAAGGCAGGCTGCTACTGCCTTTGCTGACCCCCGGGGTGGC
CTCACGGTGGGGACAAAGCTGCCAGGAGCCACAGCAGCCACAGCTGGGGCTTTGCACCAGCCTGGCTT
GAGACTGAGCAGTTTGCAGGGGGTGGGGGGTGCAAAAAACAAGCAAACAGGCTGCTGCTGCCTCCAGC
TGCCCACCACAGGCCTGCCCCAGGCACCTGGGGCTCTGAGGCCCCTGGGGAGGCTGGGCCCAAAAGCT
GCCCCTGGAGACACAGACAAAGGACTTCCCCGCAGGGAACTGTGCCCTATGGAGGGATCAGACAGGAA
CTGGGAACAGCCACAGAGGCTGCGTGCCTATGGCACAGCCCTTCCTCCGCCGCACACTCCCCCTGAAT
CCTCAGGCCCACCCAAGCGCCGGGCTGCAGAGGAAGCGGGGCTGGGGAGGCTGCAGGCATCAGAGACA
CTGGTGGTGGCGGACCCGGCCGCCGGGCCCCGTGCTCTCAGGCTAGCCCAGGTCGTGGAGGCTGGCAG
GCTCAGGTCGGGTGTGAGACGTGCCGTGGCTGCGCTCAGTCCAGCGGGGAGGAGCCGTTCAGCCCAAC
CTCCCCAGGAAGCCATATCCCCACTCACCCGGTAAGAGAACCTTGTCGTCCCCTTTCCATGCTCTCCT
AGGACACGAGCCCAGGAACCCCAGACCCAGGGGGAGGAAGGGTGGAGGGGCCCCAGGGGTCACCATGT
GCACCAGGGGCCGTGAGGGGCCGGGGCATTCAGCTCAGCTCTGAACCGGGGAAGCTGGCACGGCAAGG
ACTGCCTCAGGTGACGGGCCGTGAGAGGGGACGGGTCAGGAGCCTTCCCAAGCCTTCTCCTCAGCCCG
ACACCCATGGCCATCGGAGGCTAGGATGCCAGACACAGCCATTTGCAGAAATCAGGCACAGTGACTGC
AGCTCACGTCCAGCCAACCAAGCATGGGGCCGCAGCTCAGGAAGTCCCTTCCCGCCACACCACAGCCT
AATTCTTACTGGGACGGAGGCAACTCGGCTACGCTGGGCAGGACGACAAACACGAGACGCCACTGTGG
AATGAGCAACTTCGGAGCACGGGGTGACTTGCTTGGGACCGTGCCCACGTGACAGCCCCTTATGCAGA
GGAGGAAAGAGAAGCCCCGAGTGGGAGGGGAACCTGTCCAAAGTCACACGGTGTGTGGGTGACACAGC
TGGGGTGAGTCGAGGCTGGCCCCTGAGGCCCATGCTCCCTGAACGCTGGAGACCACTGTCGGCTAGCC
GCGGCTCTCAGGGAAGGCCTGGTCTCCACCCTCCCAGCCTAGCCTCGCGGACCCTCGTCCTCCCCACA
TCGGACCTGCTCACCTGCCTGGACCCTGGGCTGCCAGATGCAGGAAGCATCAAACCCCCCAGCCTCGT
GGGTGCGGGGCAGGGCGCAGGCAGCACAGCTTAGATGCCCTGGTTTGTCCCTCTTGTCTCCTGGGAAG
AGCTTGCTCCCGCCCAGCTCTCCTGCCACTGGCCTTTCAGGGTTGGGCTGGGCCCAGAGTGCCTTTTA
GTCGCTTCTCACGGTGGCCTGATGGCTCAACCCAGTCCCAAACGGGCCCAGTGACACTGCCGACTGCG
CCCCAGCTCAGGCCCCCACTGCACCAGCAATGCTAGAAAACCAAGCCAATAAAAGTGATTTCTTTTTT
CATT

| | | | |
|---|---|---|---|
| NOV32b, CG55906-05 | | | |
| Protein Sequence | SEQ ID NO: 796 | 1438 aa | MW at 142443.5kD |

MSAPDEGRRDPPKPKGKTLGSFFGSLPGFNSARNLVANAHSSARARPAADPTGAPAAEAAQPQAQVAA
HPEQTAPWTEKELQPSEKQMVSGAKDLVCSKMSRAKDAVSSGVASVVDVAKGVVQGGLDTTRSALTGT
KEAVSSGVTGAMDMAKGAVQGGLDTSKAVLTGTKDTVSTGLTGAVNVAKGTVQAGVDTTKTVLTGTKD
TVTTGVMGAVNLAKGTVQTGVETSKAVLTGTKDAVSTGLTGAVNVARGSIQTGVDTSKTVLTGTKDTV
CSGVTSAMNVAKGTIQTGVDTSKTVLTGTKDTVCSGVTGAMNVAKGTIQTGVDTSKTVLTGTKDTVCS
GVTGAMNVAKGTIQTGVDTTKTVLTGTKNTVCSGVTGAVNLAKEAIQGGLDTTKSMVMGTKDTMSTGL
TGAANVAKGAMQTGLNTTQNIATGTKDTVCSGVTGAMNLARGTIQTGVDTTKIVLTGTKDTVCSGVTG
AANVAKGAVQGGLDTTKSVLTGTKDAVSTGLTGAVNVAKGTVQTGVDTTKTVLTGTKDTVCSGVTSAV
NVAKGAVQGGLDTTKSVVIGTKDTMSTGLTGAANVAKGAVQTGVDTAKTVLTGTKDTVTTGLVGAVNV
AKGTVQTGMDTTKTVLTGTKDTIYSGTSAVNVAKGAVQTGLKTTQNIATGTKNTFGSGVTGAAVNVAK
GAVQTGVDTAKTVLTGTKDTVTTGLMGAVNVAKGTVQTSVDTTKTVLTGTKDTVCSGVTGAANVAXGA
VQTGVDTAKTVLTGTKDTVCSGVTGAVVAKGAVQTGLKTTQNIATGTKNTLGSGVTGAAANVAKGAVQ
GGLDTTKSVLTGTKDAVSTGLTGAVNLAKGTVQTGMDTTKTVLTGTKDAVCSGVTGAANVAKGAVQTG
VDTAKTVLTGTKDTVTTGLMGAVNVAKGTVQTSVDTTKTVLTGTKDTVCSGVTGAANVAKGAVQGGLD
TTKSVLTGTKDTVSTGLTGAVNLAKGTVQTGDVTSKTVLTGTKDTVCSGVTGAVNVAKGTVQTGVDTA
KTVLSGAKDAVTTGVTGAVNVAKGTVQTGVDASKAVLMGTKDTVFSGVTGAMSMAKGAVQGGLDTTKT
VLTGTKDAVSAGLMGSGNVATGATHTGLSTFQNWLPSTPATSWGGLTSSRTTDNGGEQTALSPQEAPF
SGISTPPDVLSVGPEPAVVEAATTKGLATDVATFTQGAAPGREDTGLLTTTHGPEEAPRLAMLQNELE
GLDIFHPMNAEEQAQLAASQPGPKVLSAEQGSYFVRLGDLGPSFRQRAFEHAVSHLQHGAQFQARDTL
AQLQDCFRLIEKAQQAPEGQPRLDQGSGASAEDAAVQEERDAGVLSRVCGLLRQLHTAYSGLVSSLQG
LPAELQQPVGRARHSLCELYGIVASAGSVEELPAERLVQSREGVHQAWQGLEQLLEGLQHNPPLSWLV
GPFALPAGGQ

| | | |
|---|---|---|
| NOV32c, CG55906-01 | SEQ ID NO: 797 | 3839 bp |
| DNA Sequence | ORF Start: ATG at 131 | ORF Stop: TAG at 3806 |

GTGAGGCCAGGCCTGCAGGTGGGTGTCGGGCTGCTCAGGCTTTCAGTGGGGAGTGGGTCTGGGATGGG
AGGCTAGGGAACCCCCATTCACGCACCTTCTCTGCCCCCTTCCAGCTTCTCACGTTCTCACTATGTCT
GCTCCAGACGAAGGGAGACGGGATCCCCCCAAACCGAAGGGCAAGCCCCCCGCCCCCATGCAGACCCT
GGGCAGCTTCTTTGGGTCCCTGCCTGGCTTCAGCTCTGCCCGGAACCTGGTGGCCAACGCACATAGCT
CGGTCGGGGCCAAAGACCTGGTGTGTTCCAAGATGTCCAGGGCCAAGGATGCCGTGTCCTCCGGGGTG
GCCAGCGTGGTGGACGTGGCTAAGGGAGTGGTCCAGGGAGGCCTGGACACCACTCGGTCTGCACTTAC
GGGCACCAAGGAGGTGGTGTCCAGCGGGGTCACAGGGGCCATGGACATGGCTAAGGGGGCCGTCCAAG
GGGGTCTGGACACCTCGAAGGCTGTCCTCACCGGCACCAAGGACACGGTGTCCACTGGGCTCACGGGG
GCAGTGAATGTGGCCAAAGGGACCGTACAGGCCGGTGTGGACACCACCAAGACTGTGCTGACCGGCAC
CAAAGACACAGTGACTACTGGGGTCATGGGGGCAGTGAACTTGGCCAAAGGGACTGTCCAGACTGGCG
TGGAAACCTCCAAGGCTGTGCTGACCGGCACCAAAGATGCTGTGTCCACTGGGCTCACAGGGGCAGTG
AATGTGGCCAGAGGAAGCATTCAGACCGGTGTGGACACCAGTAAGACTGTCCTAACAGGTACCAAGGA
CACCGTCTGTAGTGGGGTGACTGGTGCCATGAATGTGGCCAAAGGAACCATCCAGACCGGCGTGGACA
CCAGTAAGACTGTCCTAACAGGTACCAAGGACACCGTCTGTAGTGGGGTGACTGGTGCCATGAATGTG
GCCAAAGGAACCATCCAGACCGGCGTGGACACCAGTAAGACTGTCCTAACAGGTACCAAGGACACCGT
CTGTAGTGGGGTGACTGGTGCCATGAATGTGGCCAAAGGAACCATCCAGACCGGCGTGGACACCACCA
AGACTGTCCTAACTGGCACCAAGAACACTGTCTGCAGTGGGGTGACCGGTGCCGTGAACTTGGCCAAA
GAGGCCATCCAGGGGGGCCTGGATACCACCAAGTCTATGGTCATGGGTACGAAAGACACGATGTCCAC
TGGGCTCACAGGGGCAGCGAATGTGGCCAAGGGGGCCATGCAAACTGGGCTGAACACAACCCAAAATA
TCGCAACAGGTACAAAGGACACCGTCTGCAGTGGGGTGACTGGTGCCATGAATTTGGCCAGAGGAACC
ATCCAGACAGGCGTGGACACCACCAAGATCGTTCTAACTGGTACCAAGGACACTGTCTGCAGTGGGGT
CACCGGTGCTGCGAATGTGGCCAAAGGGGCCGTCCAGGGCGGCCTGGACACTACAAAGTCTGTCCTGA
CTGGCACTAAAGATGCTGTGTCCACTGGGCTCACAGGGGCTGTGAACGTGGCCAAAGGGACCGTCCAG
ACCGGCGTAGACACCACCAAGACTGTCCTAACCGGCACCAAGGACACCGTCTGCAGTGGGGTGACCAG
TGCTGTGAACGTGGCCAAAGGGGCCGTCCAGGGGGGCCTGGACACCACCAAGTCTGTGGTCATAGGTA
CAAAAGACACGATGTCCACTGGGCTCACGGGGGCAGCGAATGTGGCCAAGGGGGCTGTCCAGACAGGT
GTAGACACAGCCAAGACCGTGCTGACCGGCACCAAGGACACAGTGACTACTGGGCTCGTGGGGGCAGT
GAATGTCGCCAAAGGGACCGTCCAGACAGGCATGGACACCACCAAAACTGTCCTAACCGGTACCAAGG
ACACCATCTACAGTGGGGTCACCAGTGCCGTGAACGTGGCCAAGGGGGCTGTGCAAACTGGGCTGAAA
ACGACCCAAAATATCGCGACAGGTACAAAGAACACCTTTGGCAGTGGGGTGACCAGTGCTGTGAATGT
GGCCAAAGGGGCTGCCCAGACAGGTGTAGACACGGCCAAGACCGTGCTGACCGGCACCAAGGACACAG
TCACTACTGGGCTCATGGGGGCAGTGAATGTCGCCAAAGGGACTGTCCAGACCAGTGTGGACACCACC
AAGACTGTCCTAACTGGTACCAAGGACACCGTCTGCAGTGGGGTGACCGGTGCTGCGAATGTGGCCAA
AGGGGCCATCCAAGGGGGCCTGGACACTACAAAGTCTGTCCTGACTGGCACTAAAGATGCTGTGTCCA
CTGGGCTCACAGGGGCTGTGAAGTTGGCCAAAGGGACTGTCCAGACCGGCATGGACACCACCAAGACT
GTGTTAACTGGTACCAAGGATGCTGTGTGCAGTGGGGTGACCGGTGCTGCGAATGTGGCCAAGGGGGC
CGTCCAGATGGGTGTAGACACGGCCAAGACCGTGCTGACCGGTACCAAGGACACTGTCTGCAGTGGGG
TCACCGGTGCTGCGAACGTGGCCAAGGGTGCTGTGCAAACTGGGCTGAAAACGACCCAAAATATCGCA
ACAGGTACAAAGAACACCCTTGGCAGTGGGGTGACCGGTGCTGCGAAAGTGGCCAAAGGGGCCGTCCA
GGGGGGCCTGGACACTACAAAGTCTGTCCTGACTGGCACTAAAGATGCCGTGTCCACTGGGCTCACAG
GGGCTGTGAACTTGGCCAAAGGGACTGTCCAGACCGGCGTGGACACCAGCAAGACTGTCCTGACCGGT
ACCAAGGACACCGTCTGCAGTGGAGTCACTGGTGCCGTAAATGTGGCCAAAGGGACCGTCCAGACAGG
TGTGGACACAGCCAAGACGGTGCTGAGTGGCGCTAAGGATGCAGTGACTACTGGAGTCACGGGGGCAG
TGAATGTGGCCAAAGGAACCGTGCAGACCGGCGTGGACGCCTCCAAGGCTGTGCTTATGGGTACCAAG
GACACTGTCTTCAGTGGGGTTACCGGTGCCATGAGCATGGCCAAAGGGGCCGTCCAGGGGGGCCTGGA
CACCACCAAGACAGTGCTGACCGGAACCAAAGACGCAGTGTCCGCTGGGCTCATGGGGTCAGGGAACG
TGGCGACAGGGGCCACCCACACTGGCCTCAGCACCTTCCAGAACTGGTTACCTAGTACCCCCGCCACC
TCCTGGGGTGGACTCACCAGTTCCAGGACCACAGCTCAGCTGGCTGCCTCCCAGCCTGGGCCAAAGGT
GCTGTCGGCGGAACAGGGGAGCTACTTCGTTCGTTTAGGTGACCTGGGTCCCAGCTTCCGCCAGCGGG
CATTTGAACACGCGGTGAGCCACCTGCAGCACGGCCAGTTCCAAGCCAGGGACACTCTGGCCCAGCTC
CAGGACTGCTTCAGGCTGATTGAAAAGGCCCAGCAGGCTCCAGAAGGGCAGCCACGTCTGGACCAGGG
CTCAGGTGCCAGTGCGGAGGACGCTGCTGTCCAGGAGAGGGTCTGCGGCCTTCTCCGGCAGCTGCACA
CGGCCTACAGTGGCCTGGTCTCCAGCCTCCAGGGCCTGCCCGCCGAGCTCCAGCAGCCAGTGGGGCGG
GCGCGGCACAGCCTCTGTGAGCTCTATGGCATCGTGGCCTCAGCTGGCTCTGTAGAGGAGCTGCCCGC
AGAGCGGCTGGTGCAGAGCCGCGAGGGTGTGCACCAGGCTTGGCAGGGGTTAGAGCAGCTGCTGGAGG
GCCTACAGCACAATCCCCCGCTCAGCTGGCTGGTAGGGCCCTTCGCCTTGCCCGCTGGCGGGCAGTAG
CTGTAGGAGCCTGCAGGCCCGGCGCGGGGTC

| | | | |
|---|---|---|---|
| NOV32c, CG55906-01 | | | |
| Protein Sequence | SEQ ID NO: 798 | 1225 aa | MW at 120831.1kD |

MSAPDEGRPDPPKPKGKPPAPMQTLGSFFGSLPGFSSARNLVANAHSSVGAKDLVCSKMSRAKDAVSS
GVASVVDVAKGVVQGGLDTTRSALTGTKEVVSSGVTGAMDMAKGAVQGGLDTSKAVLTGTKDTVSTGL
TGAVNVAKGTVQAGVDTTKTVLTGTKDTVTTGVMGAVNLAKGTVQTGVETSKAVLTGTKDAVSTGLTG
AVNVARGSIQTGVDTSKTVLTGTKDTVCSGVTGAMNVAKGTIQTGVDTSKTVLTGTKDTVCSGVTGAM
NVAKGTIQTGVDTSKTVLTGTKDTVCSGVTGAMNVAKGTIQTGVDTTKTVLTGTKNTVCSGVTGAVNL
AKEAIQGGLDTTKSMVMGTKDTMSTGLTGAANVAKGAMQTGLNTTQNIATGTKDTVCSGVTGAMNLAR
GTIQTGVDTTKIVLTGTKDTVCSGVTGAANVAKGAVQGGLDTTKSVLTGTKDAVSTGLTGAVNVAKGT
VQTGVDTTKTVLTGTKDTVCSGVTSAVNVAKGAVQGGLDTTKSVVIGTKDTMSTGLTGAANVAKGAVQ
TGVDTAKTVLTGTKDTVTTGLVGAVNVAKGTVQTGMDTTKTVLTGTKDTIYSGVTSAVNVAKGAVQTG
LKTTQNIATGTKNTFGSGVTSAVNVAKGAAQTGVDTAKTVLTGTKDTVTTGLMGAVNVAKGTVQTSVD
TTKTVLTGTKDTVCSGVTGAANVAKGAIQGGLDTTKSVLTGTKDAVSTGLTGAVKVAKGTVQTGMDTT
KTVLTGTKDAVCSGVTGAANVAKGAVQMGVDTAXTVLTGTKDTVCSGVTGAANVAKGAVQTGLKTTQN
IATGTKNTLGSGVTGAAKVAXGAVQGGLDTTKSVLTGTKDAVSTGLTGAVNLAKGTVQTGVDTSKTVL
TGTKDTVCSGVTGAVNVAKGTVQTGVDTAKTVLSGAKDAVTTGVTGAVNVAKGTVQTGVDASKAVLMG
TKDTVFSGVTGAMSMAKGAVQGGLDTTKTVLTGTKDAVSAGLMGSGNVATGATHTGLSTFQNWLPSTP
ATSWGGLTSSRTTAQLAASQPGPKVLSAEQGSYFVRRGDLGPSFRQRAFEHAVSHLQHGQFQARDTLA
QLQDCFRLIEKAQQAPEGQPRLDQGSGASAEDAAVQERVCGLLRQLHTAYSGLVSSLQGLPAELQQPV
GRARHSLCELYGIVASAGSVEELPAERLVQSREGVHQAWQGLEQLLEGLQHNPPLSWLVGPFALPAGG
Q

| | | |
|---|---|---|
| NOV32d, 277901794 | SEQ ID NO: 799 | 2247 bp |
| DNA Sequence | ORF Start: at 1 | ORF Stop: end of sequence |

AGATCTATCATGTCTGCTCCAGACGAAGGGAGACGGGATCCCCCCAAACCGAAGGGCAAGACCCTGGG
CAGCTTCTTTGGGTCCCTGCCTGGCTTCAGCTCTGCCCGGAACCTGGTGGCCAACGCACATAGCTCGG
GTGGCTGCCCACCCAGAGCAGACGGCCCCATGGACGGAGAAGGAGCTGCAACCTTCGGAAAAGATGGT
GTCCGGGGCCAAAGACCTGGTGTGTTCCAAGATGTCCAGGGCCAAGGATGCCGTGTCCTCCGGGGTGG
CCAGCGTGGTGGACGTGGCTACGGGAGTGGTCCAGGGAGGCCTGGACACCACTCGGTCTGCACTTACG
GGCACCAAGGAGGCGGTGTCCAGCGGGTTCACAGGGGCCATGGACATGGCTAAGGGGGCCGTCCAAGG
GGGTCTGGACACCTCGAAGGCTGTCCTCACCGGCACCAAGGACACGGTGTCCACTGGGCTCACGGGGG
CAGTGAATGTGGCCAAAGGGACCGTACAGGCCGGTGTGGACACCACCAAGACTGTGCTGACCGGCACC
AAAGACACAGTGACTACTGGGGTCATGGGGGCAGTGAACTTGGCCAAAGGGACTGTCCAGACTGGCGT
GGAAACCTCCAAGGCTGTGCTGACCGGCACCAAAGATGCTGTGTCCACTGGGCTCACAGGGGCAGTGA
ATGTGGCCAGAGGAAGCATTCAGACCGGTGTGGACACCAGTAAGACTGTCCTAACAGGTACCAAGGAC
ACCGTCTGTAGTGGGGTGACCAGTGCCATGAATGTGGCCAAAGGAACCATCCAGACCGGCGTGGACAC
CAGCAAGACTGTCCTGACCGGTACCTTGGACACCGTCTGCAGTGGAGTCACTGGTGCCGTAAATGTGG
CCAAAGGCACCGTCCAGACAGGTGTGGACACAGCCAAGACGGTGCTGAGTGGCGCTAAGGATGCAGTG
GGCTGTGCTTATGGGTACCAAGGACACTGTCTTCAGTGGGGTTACCGGTGCCATGAGCATGGCCAAAG
GGGCCGTCCAGGGGGGCCTGGACACCACCAAGACAGTGCTGACCGGAACCAAAGACGCAGTGTCCGCT
GGGCTCATGGGGTCAGGGAACGTGGCGACAGGGGCCACCCACACTGGCCTCAGCACCTTCCAGAACTG
GTTACCTAGTACCCCCGCCACCTCCTGGGGTGGACTCACCAGTTCCAGGACCACAGACAATGGTGGGG
AGCAGACTGCCCTGAGCCCCCAAGAGGCCCCGTTCTCTGGCATCTCCACGCCCCCGGATGTGCTCAGT
GTAGGCCCGGAGCCTGCCTGGGAAGCCGCAGCCACTACCAAGGGCCTTGCGACTGACGTGGCGACGTT
CACCCAAGGGGCCGCCCCAGGCAGGGAGGACACGGGGCTTTTGACCACCACACACGGCCCCGAAGAAG
CCCCACGCTTGGCAATGCTGCAGAATGAGTTGGAGGGGCTGGGGGACATCTTCCACCCCATGAATGCG
GAGGAGCAAGCTCAGCTGGCTGCCTCCCAGCCCGGGCCAAAGGTGCTGTCGGCGGAACAGGGGAGCTA
TGCAGCACGGCCAGTTCCAAGCCAGGGACACTCTGGCCCAGCTCCAGGACTGCTTCAGGCTGATTGAA
TGCTGTCCAGGAGGAGCGGGATGCCGGGGTTCTGTCCAGGGTCTGCGGCCTTCTCCGGCAGCTGCACA
CGGCCTACAGTGGCCTGGTCTCCAGCCTCCAGGGCCTGCCCGCCGAGCTCCAGCAGCCAGTGGGGCGG
GCGCGGCACAGCCTCTGTGAGCTCTATGGCATCGTGGCCTCAGCTGGCTCTGTAGAGGAGCTGCCCGC
AGAGCGGCTGGTGCAGAGCCGCGAGGGTGTGCACCAGGCTTGGCAGGGGTTAGAGCAGCTGCTGGAGG
GCCTACAGCACAATCCCCCGCTCAGCTGGCTGGTAGGGCCCTTCGCCTTGCCCGCTGGCGGGCAGCTC
GAG

| | | | |
|---|---|---|---|
| NOV32d, 277901794 | | | |
| Protein Sequence | SEQ ID NO: 800 | 749 aa | MW at 75993.5kD |

RSIMSAPDEGRRDPPKPKGKTLGSFFGSLPGFSSARNLVANAHSSARARPAADPTGAPAAEAAQPQAQ
VAAHPEQTAPWTEKELQPSEKMVSGAKDLVCSKMSRAKDAVSSGVASVVDVATGVVQGGLDTTRSALT
GTKEAVSSGFTGAMDMAKGAVQGGLDTSKAVLTGTKDTVSTGLTGAVNVAKGTVQAGVDTTKTVLTGT
KDTVTTGVMGAVNLAKGTVQTGVETSKAVLTGTKDAVSTGLTGAVNVARGSIQTGVDTSKTVLTGTKD
TVCSGVTSAMNVAKGTIQTGVDTSKTVLTGTKDTVCSGVTGAVNVAKGTVQTGVDTAKTVLSGAKDAV
GLMGSGNVATGATHTGLSTFQNWLPSTPATSWGGLTSSRTTDNGGEQTALSPQEAPFSGISTPPDVLS
VGPEPAWEAAATTKGLATDVATFTQGAAPGREDTGLLTTTHGPEEAPRLAMLQNELEGLGDIFHPNNA
EEQAQLAASQPGPKVLSAEQGSYFVRLGDLGPSFRQRAFEHAVSHLQHGQFQARDTLAQLQDCFRLIE
KAQQAPEGQPRLDQGSGASAEDAAVQEERDAGVLSRVCGLLRQLHTAYSGLVSSLQGLPAELQQPVGR
ARHSLCELYGIVASAGSVEELPAERLVQSREGVHQAWQGLEQLLEGLQHNPPLSWLVGPFALPAGGQL
E

| | | |
|---|---|---|
| NOV32e, CG55906-02 | SEQ ID NO: 801 | 810 bp |
| DNA Sequence | ORF Start: ATG at 123 | ORF Stop: TAG at 792 |

AGGCCTGCAGGTGGGTGTCGGGCTGCTCAGGCTTTCAGTGGGGAGTGGGTGTGGGATGGGAGGCTAGG
GAACCCCCATTCACGCACCTTCTCTGCCCCCTTCCAGCTTCTCACGTTCTCACTATGTCTGCTCCAGA
CGAAGGGAGACGGGATCCCCCCAAACCGAAGGGCAAGACCCTGGGCAGCTTCTTTGGGTCCCTGCCTG
GCTTCAACTCTGCCCGGAACCTGGTGGCCAACGCACATAGCTCGGCGAGAGCCCGGCCGGCCGCTGAC
CCCACAGGAGCGCCTGCTGCCGAGGCTGCCCAACCACAGGCTCAGGTGGCTGCCCACCCAGAGCAGAC
GGCCCCATGGACGGAGAAGGAGCTGCAACCTTCGGAAAAGATTGAAAAGGCCCAGCAGGCTCCAGAAG
GGCAGCCACGTCTGGACCAGGGCTCAGGTGCCAGTGCGGAGGACGCTGCTGTCCAGGAGGAGCGGGAT
GCCGGGGTTCTGTCCAGGGTCTGCGGCCTTCTCCGGCAGCTGCACACGGCCTACAGTGGCCTGGTCTC
CAGCCTCCGGGGCCTGCCCGCCGAGCTCCAGCAGCCAGTGGGGCGGGCGCGGCACAGCCTCTGTGAGC
TCTATGGCATCGTGGCCTCAGCTGGCTCTGTAGAGGAGCTGCCCGCAGAGCGGCTGGTGCAGAGCCGC
GAGGGTGTGCACCAGGCTTGGCAGGGGTTAGAGCAGCTGCTGGAGGGCCTACAGCACAATCCCCCGCT
CAGCTGGCTGGTAGGGCCCTTCGCCTTGCCCGCTGGCGGGCAGTAGCTGTAGGAGCCTGCAG

| | | | |
|---|---|---|---|
| NOV32e, CG55906-02 | | | |
| Protein Sequence | SEQ ID NO: 802 | 223 aa | MW at 23486.9kD |

MSAPDEGRRDPPKPKGKTLGSFFGSLPGFNSARNLVANAHSSARARPAADPTGAPAAEAAQPQAQVAA
HPEQTAPWTEKELQPSEKIEKAQQAPEGQPRLDQGSGASAEDAAVQEERDAGVLSRVCGLLRQLHTAY
SGLVSSLRGLPAELQQPVGRARHSLCELYGIVASAGSVEELPAERLVQSREGVHQAWQGLEQLLEGLQ
HNPPLSWLVGPFALPAGGQ

| | | |
|---|---|---|
| NOV32f, 230272941 | SEQ ID NO: 803 | 714 bp |
| DNA Sequence | ORF Start: at 2 | ORF Stop: TGA at 692 |

GGCGCGCCCACCCTTCACCACCATGTCTGCTCCAGACGAAGGGAGACGGGATCCCCCCAAACCGAAGG
GCAAGACCCTGGGCAGCTTCTTTGGGTCCCTGCCTGGCTTCAGCTCTGCCCGGAACCTGGTGGCCAAC
GCACATAGCTCGGCGAGAGCCCGGCCGGCCGCTGACCCCACAGGAGCGCCTGCTGCCGAGGCTGCCCA
ACCACAGGCTCAGGTGGCTGCCCACCCAGAGCAGACGGCCCCATGGACGGAGAAGGAGCTGCAACCTT
CGGAAAAGATTGAAAAGGCCCAGCAGGCTCCAGAAGGGCAGCCACGTCTGGACCAGGGCTCAGGTGCC
AGTGCGGAGGACGCTGCTGTCCAGGAGGAGCGGGATGCCGGGGTTCTGTCCAGGGTCTGCGGCCTTCT
CCGGCAGCTGCACACGGCCTACAGTGGCCTGGTCTCCAGCCTCCAGGGCCTGCCCGCCGAGCTCCAGC
AGCCAGTGGGGCGGGCGCGGCACAGCCTCTGTGAGCTCTATGGCATCGTGGCCTCAGCTGGCTCTGTA
GAGGAGCTGCCCGCAGAGCGGCTGGTGCAGAGCCGCGAGGGTGTGCACCAGGCTTGGCAGGGGTTAGA
GCAGCTGCTGGAGGGCCTACAGCACAATCCCCCGCTCAGCTGGCTGGTAGGGCCCTTCGCCTTGCCCG
CTGGCGGGCAGTGAAGGGGGCGGCCGCGGAGCCT

| | | | |
|---|---|---|---|
| NOV32f, 230272941 | | | |
| Protein Sequence | SEQ ID NO: 804 | 230 aa | MW at 24202.7kD |

ARPPFTTMSAPDEGRRDPPKPKGKTLGSFFGSLPGFSSARNLVANAHSSAPARPAADPTGAPAAEAAQ
PQAQVAAHPEQTAPWTEKELQPSEKIEKAQQAPEGQPRLDQGSGASAEDAAVQEERDAGVLSRVCGLL
RQLHTAYSGLVSSLQGLPAELQQPVGRARHSLCELYGIVASAGSVEELPAERLVQSREGVHQAWQGLE
QLLEGLQHNPPLSWLVGPFALPAGGQ

| | | |
|---|---|---|
| NOV32g, CG55906-03 | SEQ ID NO: 805 | 714 bp |
| DNA Sequence | ORF Start: ATG at 23 | ORF Stop: TGA at 692 |

GGCGCGCCCACCCTTCACCACCATGTCTGCTCCAGACGAAGGGAGACGGGATCCCCCCAAACCGAAGG
GCAAGACCCTGGGCAGCTTCTTTGGGTCCCTGCCTGGCTTCAGCTCTGCCCGGAACCTGGTGGCCAAC
GCACATAGCTCGGCGAGAGCCCGGCCGGCCGCTGACCCCACAGGAGCGCCTGCTGCCGAGGCTGCCCA
ACCACAGGCTCAGGTGGCTGCCCACCCAGAGCAGACGGCCCCATGGACGGAGAAGGAGCTGCAACCTT
CGGAAAAGATTGAAAAGGCCCAGCAGGCTCCAGAAGGGCAGCCACGTCTGGACCAGGGCTCAGGTGCC
AGTGCGGAGGACGCTGCTGTCCAGGAGGAGCGGGATGCCGGGGTTCTGTCCAGGGTCTGCGGCCTTCT
CCGGCAGCTGCACACGGCCTACAGTGGCCTGGTCTCCAGCCTCCAGGGCCTGCCCGCCGAGCTCCAGC
AGCCAGTGGGGCGGGCGCGGCACAGCCTCTGTGAGCTCTATGGCATCGTGGCCTCAGCTGGCTCTGTA
GAGGAGCTGCCCGCAGAGCGGCTGGTGCAGAGCCGCGAGGGTGTGCACCAGGCTTGGCAGGGGTTAGA
GCAGCTGCTGGAGGGCCTACAGCACAATCCCCCGCTCAGCTGGCTGGTAGGGCCCTTCGCCTTGCCCG
CTGGCGGGCAGTGAAGGGGGCGGCCGCGGAGCCT

| | | | |
|---|---|---|---|
| NOV32g, CG55906-03 | | | |
| Sequence | SEQ ID NO: 806 | 223 aa | MW at 23431.8kD |

MSAPDEGRRDPPKPKGKTLGSFFGSLPGFSSARNLVANAHSSARARPAADPTGAPAAEAAQPQAQVAA
HPEQTAPWTEKELQPSEKIEKAQQAPEGQPRLDQGSGASAEDAAVQEERDAGVLSRVCGLLRQLHTAY
SGLVSSLQGLPAELQQPVGRARHSLCELYGIVASAGSVEELPAERLVQSREGVHQAWQGLEQLLEGLQ
HNPPLSWLVGPFALPAGGQ

| | | |
|---|---|---|
| NOV32h, | | |
| SNP13382505 of | SEQ ID NO: 807 | 3839 bp |
| CG55906-01, | ORF Start: ATG at 131 | ORF Stop: TAG at 3806 |
| DNA Sequence | SNP Pos: 3393 | SNP Change: C to T |

GTGAGGCCAGGCCTGCAGGTGGGTGTCGGGCTGCTCAGGCTTTCAGTGGGGAGTGGGTGTGGGATGGC
AGGCTAGGGAACCCCCATTCACGCACCTTCTCTGCCCCCTTCCAGCTTCTCACGTTCTCACTATGTCT
GCTCCAGACGAAGGGAGACGGGATCCCCCCAAACCGAAGGGCAAGCCCCCCGCCCCCATGCAGACCCT
GGGCAGCTTCTTTGGGTCCCTGCCTGGCTTCAGCTCTGCCCGGAACCTGGTGGCCAACGCACATAGCT
CGGTCGGGGCCAAAGACCTGGTGTGTTCCAAGATGTCCAGGGCCAAGGATGCCGTGTCCTCCGGGGTG
GCCAGCGTGGTGGACGTGGCTAAGGGAGTGGTCCAGGGAGGCCTGGACACCACTCGGTCTGCACTTAC
GGGCACCAAGGAGGTGGTGTCCAGCGGGGTCACAGGGGCCATGGACATGGCTAAGGGGGCCGTCCAAG
GGGGTCTGGACACCTCGAAGGCTGTCCTCACCGGCACCAAGGACACGGTGTCCACTGGGCTCACGGGG
GCAGTGAATGTGGCCAAAGGGACCGTACAGGCCGGTGTGGACACCACCAAGACTGTGCTGACCGGCAC
CAAAGACACAGTGACTACTGGGGTCATGGGGGCAGTGAACTTGGCCAAAGGGACTGTCCAGACTGGCG
TGGAAACCTCCAAGGCTGTGCTGACCGGCACCAAAGATGCTGTGTCCACTGGGCTCACAGGGGCAGTG
AATGTGGCCAGAGGAAGCATTCAGACCGGTGTGGACACCAGTAAGACTGTCCTAACAGGTACCAAGGA
CACCGTCTGTAGTGGGGTGACTGGTGCCATGAATGTGGCCAAAGGAACCATCCAGACCGGCGTGGACA
CCAGTAAGACTGTCCTAACAGGTACCAAGGACACCGTCTGTAGTGGGGTGACTGGTGCCATGAATGTG
GCCAAAGGAACCATCCAGACCGGCGTGGACACCAGTAAGACTGTCCTAACAGGTACCAAGGACACCGT
CTGTAGTGGGGTGACTGGTGCCATGAATGTGGCCAAAGGAACCATCCAGACCGGCGTGGACACCACCA
AGACTGTCCTAACTGGCACCAAGAACACTGTCTGCAGTGGGGTGACCGGTGCCGTGAACTTGGCCAAA
GAGGCCATCCAGGGGGGCCTGGATACCACCAAGTCTATGGTCATGGGTACGAAAGACACGATGTCCAC
GGGACTCACAGGGGCAGCGAATGTGGCCAAGGGGGCCATGCAAACTGGGCTGAACACAACCCAAAATA
TCGCAACAGGTACAAAGGACACCGTCTGCAGTGGGGTGACTGGTGCCATGAATTTGGCCAGAGGAACC
ATCCAGACAGGCGTGGACACCACCAAGATCGTTCTAACTGGTACCAAGGACACTGTCTGCAGTGGGGT
CACCGGTGCTGCGAATGTGGCCAAAGGGGCCGTCCAGGGCGGCCTGGACACTACAAAGTCTGTCCTGA
CTGGCACTAAAGATGCTGTGTCCACTGGGCTCACAGGGGCTGTGAACGTGGCCAAAGGGACCGTCCAG
ACCGGCGTAGACACCACCAAGACTGTCCTAACCGGCACCAAGGACACCGTCTGCAGTGGGGTGACCAG
TGCTGTGAACGTGGCCAAAGGGGCCGTCCAGGGGGGCCTGGACACCACCAAGTCTGTGGTCATAGGTA
CAAAAGACACGATGTCCACTGGGCTCACGGGGGCAGCGAATGTGGCCAAGGGGGCTGTCCAGACAGGT
GTAGACACAGCCAAGACCGTGCTGACCGGCACCAAGGACACAGTGACTACTGGGCTCGTGGGGGCAGT
GAATGTCGCCAAAGGGACCGTCCAGACAGGCATGGACACCACCAAAACTGTCCTAACCGGTACCAAGG
ACGACCCAAAATATCGCGACAGGTACAAAGAACACCTTTGGCAGTGGGGTGACCAGTGCTGTGAATGT
GGCCAAAGGGGCTGCCCAGACAGGTGTAGACACGGCCAAGACCGTGCTGACCGGCACCAAGGACACAG
TCACTACTGGGCTCATGGGGGCAGTGAATGTCGCCAAAGGGACTGTCCAGACCAGTGTGGACACCACC
AAGACTGTCCTAACTGGTACCAAGGACACCGTCTGCAGTGGGGTGACCGGTGCTGCGAATGTGGCCAA
AGGGGCCATCCAAGGGGGCCTGGACACTACAAAGTCTGTCCTGACTGGCACTAAAGATGCTGTGTCCA
CTGGGCTCACAGGGGCTGTGAAGTTGGCCAAAGGGACTGTCCAGACCGGCATGGACACCACCAAGACT
GTGTTAACTGGTACCAAGGATGCTGTGTGCAGTGGGGTGACCGGTGCTGCGAATGTGGCCAAGGGGGC
CGTCCAGATGGGTGTAGACACGGCCAAGACCGTGCTGACCGGTACCAAGGACACTGTCTGCAGTGGGG
TCACCGGTGCTGCGAACGTGGCCAAGGGTGCTGTGCAAACTGGGCTGAAAACGACCCAAAATATCGCA
ACAGGTACAAAGAACACCCTTGGCAGTGGGGTGACCGGTGCTGCGAAAGTGGCCAAAGGGGCCGTCCA
GGGGGGCCTGGACACTACAAAGTCTGTCCTGACTGGCACTAAAGATGCCGTGTCCACTGGGCTCACAG
GGGCTGTGAACTTGGCCAAAGGGACTGTCCAGACCGGCGTGGACACCAGCAAGACTGTCCTGACCGGT
ACCAAGGACACCGTCTGCAGTGGAGTCACTGGTGCCGTAAATGTGGCCAAAGGGACCGTCCAGACAGG
TGTGGACACAGCCAAGACGGTGCTGAGTGGCGCTAAGGATGCAGTGACTACTGGAGTCACGGGGGCAG
TGAATGTGGCCAAAGGAACCGTGCAGACCGGCGTGGACGCCTCCAAGGCTGTGCTTATGGGTACCAAG
GACACTGTCTTCAGTGGGGTTACCGGTGCCATGAGCATGGCCAAAGGGGCCGTCCAGGGGGGCCTGGA
CACCACC)AGACAGTGCTGACCGGAACCAAAGACGCAGTGTCCGCTGGGCTCATGGGGTCAGGGAACG
TGGCGACAGGGGCCACCCACACTGGCCTCAGCACCTTCCAGAACTGGTTACCTAGTACCCCCGCCACC
TCCTGGGGTGGACTCACCAGTTCCAGGACCACAGCTCAGCTGGCTGCCTCCCAGCCTGGGCCAAAGGT
GCTGTCGGCGGAACAGGGGAGCTACTTCGTTCGTTTAGGTGACCTGGGTCCCAGCTTCCGCCAGCGGG
CATTTGAACACGCGGTGAGCCACCTGCAGCACGGCCAGTTCCAAGCCAGGGACACTCTGGTCCAGCTC
CAGGACTGCTTCAGGCTGATTGAAAAGGCCCAGCAGGCTCCAGAAGGGCAGCCACGTCTGGACCAGGG
CTCAGGTGCCAGTGCGGAGGACGCTGCTGTCCAGGAGAGGGTCTGCGGCCTTCTCCGGCAGCTGCACA
CGGCCTACAGTGGCCTGGTCTCCAGCCTCCAGGGCCTGCCCGCCGAGCTCCAGCAGCCAGTGGGGCGG
GCGCGGCACAGCCTCTGTGAGCTCTATGGCATCGTGGCCTCAGCTGGCTCTGTAGAGGAGCTGCCCGC
AGAGCGGCTGGTGCAGAGCCGCGAGGGTGTGCACCAGGCTTGGCAGGGGTTAGAGCAGCTGCTGGAGG
GCCTACAGCACAATCCCCCGCTCAGCTGGCTGGTAGGGCCCTTCGCCTTGCCCGCTGGCGGGCAGTAG
CTGTAGGAGCCTGCAGGCCCGGCGCGGGGTC

| | | | |
|---|---|---|---|
| NOV32h, | | | |
| SNP13382505 of | | | |
| CG55906-01, | SEQ ID NO: 808 | | MW at 120859.1kD |
| Protein Sequence | SNP Pos: 1088 | 1225 aa | SNP Change: Ala to Val |

MSAPDEGRRDPPKPKGKPPAPMQTLGSFFGSLPGFSSARNLVANAHSSVGAKDLVCSKMSRAKDAVSS
GVASVVDVAKGVVQGGLDTTRSALTGTKEVVSSGVTGAMDMAKGAVQGGLDTSKAVLTGTKDTVSTGL
TGAVNVAKGTVQAGVDTTKTVLTGTKDTVTTGVMGAVNLAKGTVQTGVETSKAVLTGTKDAVSTGLTG
AVNVARGSIQTGVDTSKTVLTGTKDTVCSGVTGAMNVAKGTIQTGVDTSKTVLTGTKDTVCSGVTGAM
NVAKGTIQTGVDTSKTVLTGTKDTVCSGVTGANNVAKGTIQTGVDTTKTVLTGTKNTVCSGVTGAVNL
AKEAIQGGLDTTKSMVMGTKDTMSTGLTGAANVAKGAMQTGLNTTQNIATGTKDTVCSGVTGAMNLAR
GTIQTGVDTTKIVLTGTKDTVCSGVTGAANVAKGAVQGGLDTTKSVLTGTKDAVSTGLTGAVNVAKGT
VQTGVDTTKTVLTGTKDTVCSGVTSAVNVAKGAVQGGLDTTKSVVIGTKDTMSTGLTGAANVAKGAVQ
TGVDTAIKTVLTGTKDTVTTGLVGAVNVAKGTVQTGDTTKTVLTGTKDTIYSGVTSAVNVAKGAVQTG
LKTTQNIATGTKNTFGSGVTSAVNVAXGAAQTGVDTAKTVLTGTKDTVTTGLMGAVNVAKGTVQTSVD
TTKTVLTGTKDTVCSGVTGAANVAKGAQGGLDTTKSVLTGTKDAVSTGLTGAVKLAIKGTVQTGMDTT
KTVLTGTKDAVCSGVTGAANVAKGAVQMGVDTAKTVLTGTKDTVCSGVTGAANVAKGAVQTGLKTTQN
IATGTKNTLGSGVTGAAKVAKGAVQGGLDTTKSVLTGTKDAVSTGLTGAVNLAKGTVQTGVDTSKTVL
TGTKDTVCSGVTGAVNVAKGTVQTGVDTAKTVLSGAXDAVTTGVTGAVNVAKGTVQTGVDASKAVLMG
TKDTVFSGVTGAMSMAKGAVQGGLDTTKTVLTGTKDAVSAGLMGSGNVATGATHTGLSTFQNWLPSTP
ATSWGGLTSSRTTAQLAASQPGPKVLSAEQGSYFVRLGDLGPSFRQRAFEHAVSHLQHGQFQARDTLV
QLQDCFRLIEKAQQAPEGQPRLDQGSGASAEDAAVQERVCGLLRQLHTAYSGLVSSLQGLPAELQQPV
GRARHSLCELYGIVASAGSVEELPAERLVQSREGVHQAWQGLEQLLEGLQHNPPLSWLVGPFALPAGG

| | | |
|---|---|---|
| SNP1 3382504 of | SEQ ID NO: 809 | 3839 bp |
| G55906-01, | ORF Start: ATG at 131 | ORF Stop: TAG at 3806 |
| DNA Sequence | SNP Pos: 3409 | SNP Change: C to T |

GTGAGGCCAGGCCTGCAGGTGGGTGTCGGGCTGCTCAGGCTTTCAGTGGGGAGTGGGTGTGGGATCGG
AGGCTAGGGAACCCCCATTCACGCACCTTCTCTGCCCCCTTCCAGCTTCTCACGTTCTCACTATGTCT
GCTCCAGACGAAGGGAGACGGGATCCCCCCAAACCGAAGGGCAAGCCCCCCGCCCCCATGCAGACCCT
GGGCAGCTTCTTTGGGTCCCTGCCTGGCTTCAGCTCTGCCCGGAACCTGGTGGCCAACGCACATAGCT
CGGTCGGGGCCAAAGACCTGGTGTGTTCCAAGATGTCCAGGGCCAAGGATGCCGTGTCCTCCGGGGTG
GCCAGCGTGGTGGACGTGGCTAAGGGAGTGGTCCAGGGAGGCCTGGACACCACTCGGTCTGCACTTAC
GGGCACCAAGGAGGTGGTGTCCAGCGGGGTCACAGGGGCCATGGACATGGCTAAGGGGGCCGTCCAAG
GGGGTCTGGACACCTCGAAGGCTGTCCTCACCGGCACCAAGGACACGGTGTCCACTGGGCTCACGGGG
GCAGTGAATGTGGCCAAAGGGACCGTACAGGCCGGTGTGGACACCACCAAGACTGTGCTGACCGGCAC
CAAAGACACAGTGACTACTGGGGTCATGGGGGCAGTGAACTTGGCCAAAGGGACTGTCCAGACTGGCG
TGGAAACCTCCAAGGCTGTGCTGACCGGCACCAAAGATGCTGTGTCCACTGGGCTCACAGGGGCAGTG
AATGTGGCCAGAGGAAGCATTCAGACCGGTGTGGACACCAGTAAGACTGTCCTAACAGGTACCAAGGA
CACCGTCTGTAGTGGGGTGACTGGTGCCATGAATGTGGCCAAAGGAACCATCCAGACCGGCGTGGACA
CCAGTAAGACTGTCCTAACAGGTACCAAGGACACCGTCTGTAGTGGGGTGACTGGTGCCATGAATGTG
GCCAAAGGAACCATCCAGACCGGCGTGGACACCAGTAAGACTGTCCTAACAGGTACCAAGGACACCGT
CTGTAGTGGGGTGACTGGTGCCATGAATGTGGCCAAAGGAACCATCCAGACCGGCGTGGACACCACCA
AGACTGTCCTAACTGGCACCAAGAACACTGTCTGCAGTGGGGTGACCGGTGCCGTGAACTTGGCCAAA
GAGGCCATCCAGGGGGGCCTGGATACCACCAAGTCTATGGTCATGGGTACGAAAGACACGATGTCCAC
TGGGCTCACAGGGGCAGCGAATGTGGCCAAGGGGGCCATGCAAACTGGGCTGAACACAACCCAAAATA
TCGCAACAGGTACAAAGGACACCGTCTGCAGTGGGGTGACTGGTGCCATGAATTTGGCCAGAGGAACC
ATCCAGACAGGCGTGGACACCACCAAGATCGTTCTAACTGGTACCAAGGACACTGTCTGCAGTGGGGT
CACCGGTGCTGCGAATGTGGCCAAAGGGGCCGTCCAGGGCGGCCTGGACACTACAAAGTCTGTCCTGA
CTGGCACTAAAGATGCTGTGTCCACTGGGCTCACAGGGGCTGTGAACGTGGCCAAAGGGACCGTCCAG
ACCGGCGTAGACACCACCAAGACTGTCCTAACCGGCACCAAGGACACCGTCTGCAGTGGGGTGACCAG
TGCTGTGAACGTGGCCAAAGGGGCCGTCCAGGGGGGCCTGGACACCACCAAGTCTGTGGTCATAGGTA
CAAAAGACACGATGTCCACTGGGCTCACGGGGGCAGCGAATGTGGCCAAGGGGGCTGTCCAGACAGGT
GTAGACACAGCCAAGACCGTGCTGACCGGCACCAAGGACACAGTGACTACTGGGCTCGTGGGGGCAGT
GAATGTCGCCAAAGGGACCGTCCAGACAGGCATGGACACCACCAAAACTGTCCTAACCGGTACCAAGG
ACACCATCTACAGTGGGGTCACCAGTGCCGTGAACGTGGCCAAGGGGGCTGTGCAAACTGGGCTGAAA
ACGACCCAAAATATCGCGACAGGTACAAAGAACACCTTTGGCAGTGGGGTGACCAGTGCTGTGAATGT
GGCCAAAGGGGCTGCCCAGACAGGTGTAGACACGGCCAAGACCGTGCTGACCGGCACCAAGGACACAG
TCACTACTGGGCTCATGGGGGCAGTGAATGTCGCCAAAGGGACTGTCCAGACCAGTGTGGACACCACC
AAGACTGTCCTAACTGGTACCAAGGACACCGTCTGCAGTGGGGTGACCGGTGCTGCGAATGTGGCCAA
AGGGGCCATCCAAGGGGGCCTGGACACTACAAAGTCTGTCCTGACTGGCACTAAAGATGCTGTGTCCA
CTGGGCTCACAGGGGCTGTGAAGTTGGCCAAAGGGACTGTCCAGACCGGCATGGACACCACCAAGACT
GTGTTAACTGGTACCAAGGATGCTGTGTGCAGTGGGGTGACCGGTGCTGCGAATGTGGCCAAGGGGGC
CGTCCAGATGGGTGTAGACACGGCCAAGACCGTGCTGACCGGTACCAAGGACACTGTCTGCAGTGGGG
TCACCGGTGCTGCGAACGTGGCCAAGGGTGCTGTGCAAACTGGGCTGAAAACGACCCAAAATATCGCA
ACAGGTACAAAGAACACCCTTGGCAGTGGGGTGACCGGTGCTGCGAAAGTGGCCAAAGGGGCCGTCCA
GGGGGGCCTGGACACTACAAAGTCTGTCCTGACTGGCACTAAAGATGCCGTGTCCACTGGGCTCACAG
GGGCTGTGAACTTGGCCAAAGGGACTGTCCAGACCGGCGTGGACACCAGCAAGACTGTCCTGACCAAT
ACCAAGGACACCGTCTGCAGTGGAGTCACTGGTGCCGTAAATGTGGCCAAAGGGACCGTCCAGACAGG
TGTGGACACAGCCAAGACGGTGCTGAGTGGCGCTAAGGATGCAGTGACTACTGGAGTCACGGGGGCAG
TGAATGTGGCCAAAGGAACCGTGCAGACCGGCGTGGACGCCTCCAAGGCTGTGCTTATGGGTACCAAG
GACACTGTCTTCAGTGGGGTTACCGGTGCCATGAGCATGGCCAAAGGGGCCGTCCAGGGGGGCCTGGA
CACCACCAAGACAGTGCTGACCGGAACCAAAGACGCAGTGTCCGCTGGGCTCATGGGGTCAGGGAACG
TGGCGACAGGGGCCACCCACACTGGCCTCAGCACCTTCCAGAACTGGTTACCTAGTACCCCCGCCACC
TCCTGGGGTGGACTCACCAGTTCCAGGACCACAGCTCAGCTGGCTGCCTCCCAGCCTGGGCCAAAGGT
GCTGTCGGCGGAACAGGGGAGCTACTTCGTTCGTTTAGGTGACCTGGGTCCCAGCTTCCGCCAGCGGG
CATTTGAACACGCGGTGAGCCACCTGCAGCACGGCCAGTTCCAAGCCAGGGACACTCTGGCCCAGCTC
CAGGACTGTTTCAGGCTGATTGAAAAGGCCCAGCAGGCTCCAGAAGGGCAGCCACGTCTGGACCAGGG
CTCAGGTGCCAGTGCGGAGGACGCTGCTGTCCAGGAGAGGGTCTGCGGCCTTCTCCGGCAGCTGCACA
CGGCCTACAGTGGCCTGGTCTCCAGCCTCCAGGGCCTGCCCGCCGAGCTCCAGCAGCCAGTGGGGCGG
GCGCGGCACAGCCTCTGTGAGCTCTATGGCATCGTGGCCTCAGCTGGCTCTGTAGAGGAGCTGCCCGC
AGAGCGGCTGGTGCAGAGCCGCGAGGGTGTGCACCAGGCTTGGCAGGGGTTAGAGCAGCTGCTGGAGG
GCCTACAGCACAATCCCCCGCTCAGCTGGCTGGTAGGGCCCTTCGCCTTGCCCGCTGGCGGGCAGTAG
CTGTAGGAGCCTGCAGGCCCGGCGCGGGGTC

| | | | |
|---|---|---|---|
| NOV32i, | | | |
| SNP13382504 of | | | |
| CG559O6-01, | SEQ ID NO: 810 | | MW at 120831.1kD |
| Protein Sequence | SNP Pos: 1093 | 1225 aa | SNP Change: Cys to Cys |

MSAPDEGRRDPPKPKGKPPAPMQTLGSFFGSLPGFSSAENLVANAHSSVGAKDLVCSKMSRAKDAVSS
GVASVVDVAKGVVQGGLDTTRSALTGTKEVVSSGVTGAMDMAKGAVQGGLDTSKAVLTGTKDTVSTGL
TGAVNVAKGTVQAGVDTTKTVLTGTKDTVTTGVMGAVNLAKGTVQTGVETSKAVLTGTKDAVSTGLTG
AVNVARGSIQTGVDTSKTVLTGTKDTVCSGVTGANNVAKGTIQTGVDTSKTVLTGTKDTVCSGVTGAM
NVAKGTIQTGVDTSKTVLTGTKDTVCSGVTGANNVAXGTIQTGVDTTKTVLTGTKNTVCSGVTGAVNL
AKEAIQGGLDTTKSMVMGTKDTMSTGLTGAANVAKGAMQTGLNTTQNIATGTKDTVCSGVTGAMNTAR
GTIQTGVDTTKIVLTGTKDTVCSGVTGAANVAKGAVQGGLDTTKSVLTGTKDAVSTGLTGAVNVAKGT
VQTGVDTTKTVLTGTKDTVCSGVTSAVNVAKGAVQGGLDTTKSVVIGTKDTMSTGLTGAANVAKGAVQ
TGVDTAKTVLTGTKDTVTTGLVGAVNVAKGTVQTGMDTTKTVLTGTKDTIYSGVTSAVNVAKGAVQTG
LKTTQNIATGTKNTFGSGVTSAVVAKGAAQTGVDTAKTXTLTGTKDTVTTGLMGAVNVAKGTVQTSVD
TTKTVLTGTKDTVCSGVTGAANVAKGAIQGGLDTTKSVLTGTKDAVSTGLTGAVKLAKGTVQTGMDTT
KTVLTGTKDAVCSGVTGAAAVAKGAVQMGVDTAKTVLTGTKDTVCSGVTGAAINAKGAVQTGLKTTQN
IATGTKNTLGSGVTGAAKVAKGAVQGGLDTTKSVLTGTKDAVSTGLTGAVNLAKGTVQTGVDTSKTVL
TGTKDTVCSGVTGAVNVAKGTVQTGVDTAKTVLSGAKDAVTTGVTGAVNVAKGTVQTGVDASKAVLMG
TKDTVFSGVTGAMSMAKGAVQGGLDTTKTVLTGTKDAVSAGLMGSGNVATGATHTGLSTFQNWLPSTP
ATSWGGLTSSRTTAQLAASQPGPKVLSAEQGSYFVRLGDLGPSFRQRAFEHAVSHLQHGQFQARDTLA
QLQDCFRLIEKAQQAPEGQPRLDQGSGASAEDAAVQERVCGLLRQLHTAYSGLVSSLQGLPAELQQPV
GRARHSLCELYGIVASAGSVEELPAERLVQSREGVHQAWQGLEQLLEGLQHNPPLSWLVGPFALPAGG
Q

| | | |
|---|---|---|
| NOV32j, | | |
| SNP13376440 of | SEQ ID NO: 811 | 3839 bp |
| CG55906-01, | ORF Start: ATG at 131 | ORF Stop: TAG at 3806 |
| DNA Sequence SNP Pos: 3681 | SNP Change: T to C | |

GTGAGGCCAGGCCTGCAGGTGGGTGTCGGGCTGCTCAGGCTTTCAGTGGGGAGTGGGTGTGGGATGGG
AGGCTAGGGAACCCCCATTCACGCACCTTCTCTGCCCCCTTCCAGCTTCTCACGTTCTCACTATGTCT
GCTCCAGACGAAGGGAGACGGGATCCCCCCAAACCGAAGGGCAAGCCCCCCGCCCCCATGCAGACCCT
GGGCAGCTTCTTTGGGTCCCTGCCTGGCTTCAGCTCTGCCCGGAACCTGGTGGCCAACGCACATAGCT
CGGTCGGGGCCAAAGACCTGGTGTGTTCCAAGATGTCCAGGGCCAAGGATGCCGTGTCCTCCGGGGTG
GCCAGCGTGGTGGACGTGGCTAAGGGAGTGGTCCAGGGAGGCCTGGACACCACTCGGTCTGCACTTAC
GGGCACCAAGGAGGTGGTGTCCAGCGGGGTCACAGGGGCCATGGACATGGCTAAGGGGGCCGTCCAAG
GGGGTCTGGACACCTCGAAGGCTGTCCTCACCGGCACCAAGGACACGGTGTCCACTGGGCTCACGGGG
GCAGTGAATGTGGCCAAAGGGACCGTACAGGCCGGTGTGGACACCACCAAGACTGTGCTGACCGGCAC
CAAAGACACAGTGACTACTGGGGTCATGGGGGCAGTGAACTTGGCCAAAGGGACTGTCCAGACTGGCG
TGGAAACCTCCAAGGCTGTGCTGACCGGCACCAAAGATGCTGTGTCCACTGGGCTCACAGGGGCAGTG
AATGTGGCCAGAGGAAGCATTCAGACCGGTGTGGACACCAGTAAGACTGTCCTAACAGGTACCAAGGA
CACCGTCTGTAGTGGGGTGACTGGTGCCATGAATGTGGCCAAAGGAACCATCCAGACCGGCGTGGACA
CCAGTAAGACTGTCCTAACAGGTACCAAGGACACCGTCTGTAGTGGGGTGACTGGTGCCATGAATGTG
GCCAAAGGAACCATCCAGACCGGCGTGGACACCAGTAAGACTGTCCTAACAGGTACCAAGGACACCGT
CTGTAGTGGGGTGACTGGTGCCATGAATGTGGCCAAAGGAACCATCCAGACCGGCGTGGACACCACCA
AGACTGTCCTAACTGGCACCAAGAACACTGTCTGCAGTGGGGTGACCGGTGCCGTGAACTTGGCCAAA
GAGGCCATCCAGGGGGGCCTGGATACCACCAAGTCTATGGTCATGGGTACGAAAGACACGATGTCCAC
TGGGCTCACAGGGGCAGCGAATGTGGCCAAGGGGGCCATGCAAACTGGGCTGAACACAACCCAAAATA
TCGCAACAGGTACAAAGGACACCGTCTGCAGTGGGGTGACTGGTGCCATGAATTTGGCCAGAGGAACC
ATCCAGACAGGCGTGGACACCACCAAGATCGTTCTAACTGGTACCAAGGACACTGTCTGCAGTGGGGT
CACCGGTGCTGCGAATGTGGCCAAAGGGGCCGTCCAGGGCGGCCTGGACACTACAAAGTCTGTCCTGA
CTGGCACTAAAGATGCTGTGTCCACTGGGCTCACAGGGGCTGTGAACGTGGCCAAAGGGACCGTCCAG
ACCGGCGTAGACACCACCAAGACTGTCCTAACCGGCACCAAGGACACCGTCTGCAGTGGGGTGACCAG
TGCTGTGAACGTGGCCAAAGGGGCCGTCCAGGGGGGCCTGGACACCACCAAGTCTGTGGTCATAGGTA
CAAAAGACACGATGTCCACTGGGCTCACGGGGGCAGCGAATGTGGCCAAGGGGGCTGTCCAGACAGGT
GTAGACACAGCCAAGACCGTGCTGACCGGCACCAAGGACACAGTGACTACTGGGCTCGTGGGGGCAGT
GAATGTCGCCAAAGGGACCGTCCAGACAGGCATGGACACCACCAAAACTGTCCTAACCGGTACCAAGG
ACACCATCTACAGTGGGGTCACCAGTGCCGTGAACGTGGCCAAGGGGGCTGTGCAAACTGGGCTGAAA
ACGACCCAAAATATCGCGACAGGTACAAAGAACACCTTTGGCAGTGGGGTGACCAGTGCTGTGAATGT
GGCCAAAGGGGCTGCCCAGACAGGTGTAGACACGGCCAAGACCGTGCTGACCGGCACCAAGGACACAG
TCACTACTGGGCTCATGGGGGCAGTGAATGTCGCCAAAGGGACTGTCCAGACCAGTGTGGACACCACC
ATGACTGTCCTAACTGGTACCAAGGACACCGTCTGCAGTGGGGTGACCGGTGCTGCGAATGTGGCCAA
AGGGGCCATCCAAGGGGGCCTGGACACTACAAAGTCTGTCCTGACTGGCACTAAAGATGCTGTGTCCA
CTGGGCTCACAGGGGCTGTGAAGTTGGCCAAAGGGACTGTCCAGACCGGCATGGACACCACCAAGACT
GTGTTAACTGGTACCAAGGATGCTGTGTGCAGTGGGGTGACCGGTGCTGCGAATGTGGCCAAGGGGGC
CGTCCAGATGGGTGTAGACACGGCCAAGACCGTGCTGACCGGTACCAAGGACACTGTCTGCAGTGGGG
TCACCGGTGCTGCGAACGTGGCCAAGGGTGCTGTGCAAACTGGGCTGAAAACGACCCAAAATATCGCA
ACAGGTACAAAGAACACCCTTGGCAGTGGGGTGACCGGTGCTGCGAAAGTGGCCAAAGGGGCCGTCCA
GGGGGGCCTGGACACTACAAAGTCTGTCCTGACTGGCACTAAAGATGCCGTGTCCACTGGGCTCACAG
GGGCTGTGAACTTGGCCAAAGGGACTGTCCAGACCGGCGTGGACACCAGCAAGACTGTCCTGACCGGT
ACCAAGGACACCGTCTGCAGTGGAGTCACTGGTGCCGTAAATGTGGCCAAAGGGACCGTCCAGACAGG
TGTGGACACAGCCAAGACGGTGCTGAGTGGCGCTAAGGATGCAGTGACTACTGGAGTCACGGGGGCAG
TGAATGTGGCCAAAGGAACCGTGCAGACCGGCGTGGACGCCTCCAAGGCTGTGCTTATGGGTACCAAG
GACACTGTCTTCAGTGGGGTTACCGGTGCCATGAGCATGGCCAAAGGGGCCGTCCAGGGGGGCCTGGA
CACCACCAAGACAGTGCTGACCGGAACCAAAGACGCAGTGTCCGCTGGGCTCATGGGGTCAGGGAACG
TGGCGACAGGGGCCACCCACACTGGCCTCAGCACCTTCCAGAACTGGTTACCTAGTACCCCCGCCACC
TCCTGGGGTGGACTCACCAGTTCCAGGACCACAGCTCAGCTGGCTGCCTCCCAGCCTGGGCCAAAGGT
GCTGTCGGCGGAACAGGGGAGCTACTTCGTTCGTTTAGGTGACCTGGGTCCCAGCTTCCGCCAGCGGG
CATTTGAACACGCGGTGAGCCACCTGCAGCACGGCCAGTTCCAAGCCAGGGACACTCTGGCCCAGCTC
CAGGACTGTTTCAGGCTGATTGAAAAGGCCCAGCAGGCTCCAGAAGGGCAGCCACGTCTGGACCAGGG
CTCAGGTGCCAGTGCGGAGGACGCTGCTGTCCAGGAGAGGGTCTGCGGCCTTCTCCGGCAGCTGCACA
CGGCCTACAGTGGCCTGGTCTCCAGCCTCCAGGGCCTGCCCGCCGAGCTCCAGCAGCCAGTGGGGCGG
GCGCGGCACAGCCTCTGTGAGCTCTATGGCATCGTGGCCTCAGCTGGCTCTGTAGAGGAGCTGCCCGC
AGAGCGGCCGGTGCAGAGCCGCGAGGGTGTGCACCAGGCTTGGCAGGGGTTAGAGCAGCTGCTGGAGG
GCCTACAGCACAATCCCCCGCTCAGCTGGCTGGTAGGGCCCTTCGCCTTGCCCGCTGGCGGGCAGTAG
CTGTAGGAGCCTGCAGGCCCGGCGCGGGGTC

| | | | |
|---|---|---|---|
| NOV32j, | | | |
| SNP13376440 of | | | |
| CG55906-01, | SEQ ID NO: 812 | | MW at 120815.0kD |
| Protein Sequence | SNP Pos: 1184 | 1225 aa | SNP Change: Leu to Pro |

MSAPDEGRPDPPKPKGKPPAPMQTLGSFFGSLPGFSSARNLVANAHSSVGAKDLVCSKMSRAKDAVSS
GVASVVDVAXGVVQGGLDTTRSALTGTKEVVSSGVTGANDMAKGAVQGGLDTSKAVLTGTKDTVSTGL
TGAVNVAKGTVQAGVDTTKTVLTGTKDTVTTGVMGAVNLAKGTVQTGVETSKAVLTGTKDAVSTGLTG
AVNVARGSIQTGVDTSKTVLTGTKDTVCSGVTGAMNVAKGTIQTGVDTSKTVLTGTKDTVCSGVTGAM
NVAKGTIQTGVDTSKTVLTGTKDTTCSGVTGAMNVAKGTIQTGVDTTKTVLTGTKNTVCSGVTGAVNL
AKEAIQGGLDTTKSMVMGTKDTMSTGLTGAANVAKGAMQTGLNTTQNIATGTKDTVCSGVTGANNLAR
GTIQTGVDTTKIVLTGTKDTVCSGVTGAANVAKGAVQGGLDTTKSVLTGTKDAVSTGLTGAVNVAKGT
VQTGVDTTKTVLTGTKDTVCSGVTSAVNVAKGAVQGGLDTTKSVVIGTKDTMSTGLTGAANVAXGAVQ
TGVDTAKTVLTGTKDTVTTGLVGAVNVAKGTVQTGMDTTKTVLTGTKDTIYSGVTSAVNVAKGAVQTG
LKTTQNIATGTKNTFGSGVTSAVNVAKGAAQTGVDTAKTVLTGTKDTVTTGLMGAVNVAKGTVQTSVD
TTKTVLTGTKDTVCSGVTGAANVAKGATQGGLDTTKSVLTGTKDAVSTGLTGAVKLAKGTVQTGMDTT
KTVLTGTKDAVCSGVTGAANVAKGAVQMGVDTAKTVLTGTKDTVCSGVTGAANVAKGAVQTGLKTTQN
IATGTKNTLGSGVTGAAKVAKGAVQGGLDTTKSVLTGTKDAVSTGLTGAVNLAKGTVQTGVDTSKTVL
TGTKDTVCSGVTGAVNVAKGTVQTGVDTAKTVLSGAKDAVTTGVTGAVNVAKGTVQTGVDASKAVLMG
TKDTVFSGVTGAMSMAKGAVQGGLDTTKTVLTGTKDAVSAGLMGSGNVATGATHTGLSTFQNWLPSTP
ATSWGGLTSSRTTAQLAASQPGPKTLSAEQGSYFVRLGDLGPSFRQPAFEHAVSHLQHGQFQARDTLA
QLQDCFRLIEKAQQAPEGQPRLDQGSGASAEDAAVQERVCGLLRQLHTAYSGLVSSLQGLPAELQQPV
GRARHSLCELYGIVASAGSVEELPAERPVQSREGVHQAWQGLEQLLEGLQHNPPLSWLVGPFALPAGG
Q

[0537] A ClustalW comparison of the above protein sequences yields the following sequence alignment shown in Table 32B.

TABLE 32B
Comparison of the NOV32 protein sequences.

| | | |
|---|---|---|
| NOV32a | ------------------------------------------------------------ | (SEQ ID NO:794) |
| NOV32b | MSAPDEGRRDPPKPKGKTLGSFFGSLPGFNSARNLVANAHSSARARPAADPTGAPAAEAA | (SEQ ID NO:796) |
| NOV32c | ------------------------------------------------------------ | (SEQ ID NO:798) |
| NOV32d | ------------------------------------------------------------ | (SEQ ID NO:800) |
| NOV32e | ------------------------------------------------------------ | (SEQ ID NO:802) |
| NOV32f | ------------------------------------------------------------ | (SEQ ID NO:804) |
| NOV32g | ------------------------------------------------------------ | (SEQ ID NO:806) |
| NOV32a | ------------------------------------------------------------ | |
| NOV32b | QPQAQVAAHPEQTAPWTEKELQPSEKQMVSGAKDLVCSKNSRAKDAVSSGVASVVDVAKG | |
| NOV32c | ------------------------------------------------------------ | |
| NOV32d | ------------------------------------------------------------ | |
| NOV32e | ------------------------------------------------------------ | |
| NOV32f | ------------------------------------------------------------ | |
| NOV32g | ------------------------------------------------------------ | |
| NOV32a | ------------------------------------------------------------ | |
| NOV32b | VVQGGLDTTRSALTGTKEAVSSGVTGAMDMAKGAVQGGLDTSKAVLTGTKDTVSTGLTGA | |
| NOV32c | ------------------------------------------------------------ | |
| NOV32d | ------------------------------------------------------------ | |
| NOV32e | ------------------------------------------------------------ | |
| NOV32f | ------------------------------------------------------------ | |
| NOV32g | ------------------------------------------------------------ | |
| NOV32a | ------------------------------------------------------------ | |
| NOV32b | VNVAKGTVQAGVDTTKTVLTGTKDTVTTGVMGAVNLAKGTVQTGVETSKAVLTGTKDAVS | |
| NOV32c | ------------------------------------------------------------ | |
| NOV32d | ------------------------------------------------------------ | |
| NOV32e | ------------------------------------------------------------ | |
| NOV32f | ------------------------------------------------------------ | |
| NOV32g | ------------------------------------------------------------ | |
| NOV32a | ------------------------------------------------------------ | |
| NOV32b | TGLTGAVNVARGSIQTGVDTSKTVLTGTKDTVCSGVTSAMNVAKGTIQTGVDTSKTVLTG | |
| NOV32c | ------------------------------------------------------------ | |
| NOV32d | ------------------------------------------------------------ | |
| NOV32e | ------------------------------------------------------------ | |
| NOV32f | ------------------------------------------------------------ | |
| NOV32g | ------------------------------------------------------------ | |
| NOV32a | ------------------------------------------------------------ | |
| NOV32b | TKDTVCSGVTGAMNVAKGTIQTGVDTSKTVLTGTKDTVCSGVTGAMNVAKGTIQTGVDTT | |
| NOV32c | ------------------------------------------------------------ | |
| NOV32d | ------------------------------------------------------------ | |
| NOV32e | ------------------------------------------------------------ | |
| NOV32f | ------------------------------------------------------------ | |
| NOV32g | ------------------------------------------------------------ | |
| NOV32a | ------------------------------------------------------------ | |
| NOV32b | KTVLTGTKNTVCSGVTGAVNLAKEAIQGGLDTTKSMVMGTKDTMSTGLTGAANVAKGAMQ | |
| NOV32c | ------------------------------------------------------------ | |
| NOV32d | ------------------------------------------------------------ | |
| NOV32e | ------------------------------------------------------------ | |
| NOV32f | ------------------------------------------------------------ | |
| NOV32g | ------------------------------------------------------------ | |
| NOV32a | ------------------------------------------------------------ | |
| NOV32b | TGLNTTQNIATGTKDTVCSGVTGANNLARGTIQTGVDTTKIVLTGTKDTVCSGVTGAANV | |
| NOV32c | ------------------------------------------------------------ | |
| NOV32d | ------------------------------------------------------------ | |
| NOV32e | ------------------------------------------------------------ | |
| NOV32f | ------------------------------------------------------------ | |
| NOV32g | ------------------------------------------------------------ | |
| NOV32a | ------------------------------------------------------------ | |
| NOV32b | AKGAVQGGLDTTKSVLTGTKDAVSTGLTGAVNVAKGTVQTGVDTTKTVLTGTKDTVCSGV | |
| NOV32c | ------------------------------------------------------------ | |
| NOV32d | ------------------------------------------------------------ | |
| NOV32e | ------------------------------------------------------------ | |
| NOV32f | ------------------------------------------------------------ | |
| NOV32g | ------------------------------------------------------------ | |
| NOV32a | ------------------------------------------------------------ | |
| NOV32b | TSAVNVAKGAVQGGLDTTKSVVIGTKDTMSTGLTGAANVAKGAVQTGVDTAKTVLTGTKD | |
| NOV32c | ------------------------------------------------------------ | |
| NOV32d | ------------------------------------------------------------ | |
| NOV32e | ------------------------------------------------------------ | |
| NOV32f | ------------------------------------------------------------ | |
| NOV32g | ------------------------------------------------------------ | |
| NOV32a | ------------------------------------------------------------ | |
| NOV32b | TVTTGLVGAVNVAKGTVQTGMDTTKTVLTGTKDTIYSGVTSAVNVAKGAVQTGLKTTQNI | |
| NOV32c | ------------------------------------------------------------ | |
| NOV32d | ------------------------------------------------------------ | |
| NOV32e | ------------------------------------------------------------ | |
| NOV32f | ------------------------------------------------------------ | |
| NOV32g | ------------------------------------------------------------ | |
| NOV32a | ----------------------------------MSAPDEGRRDPPKPKGK------TLG | |
| NOV32b | ATGTKNTFGSGVTGAVNVAKGAVQTGVDTAKTVLTGTKDTVTTGLMGAVNV------AKG | |
| NOV32c | ----------------------------------MSAPDEGRPDPPKPKGKPPAPMQTLG | |
| NOV32d | -------------------------------RSIMSAPDEGRRDPPKPKGK------TLG | |
| NOV32e | ----------------------------------MSAPDEGRRDPPKPKGK------TLG | |
| NOV32f | ---------------------------ARPPFTTMSAPDEGRPDPPKPKGK------TLG | |
| NOV32g | ----------------------------------MSAPDEGRRDPPKPKGK------TLG | |
| NOV32a | SFFGSLPGFSSARNLVANAHSS-----------ARARPAADPTGAPAAEAAQPQAQVAAH | |
| NOV32b | TVQTSVDTTKTVLTGTKDTVCS-----------GVTGAANVAKGAVQTGVDTAKTVLTGT | |
| NOV32c | SFFGSLPGFSSAPNLVANAHSSVGAKDLVCSKMSRAKDAVSSGVASVVDVAKGVVQGGLD | |
| NOV32d | SFFGSLPGFSSARNLVANAHSS-----------ARARPAADPTGAPAAEAAQPQAQVAAH | |
| NOV32e | SFFGSLPGFNSARNLVANAHSS-----------ARARPAADPTGAPAAEAAQPQAQVAAH | |
| NOV32f | SFFGSLPGFSSARNLVANAHSS-----------ARARPAADPTGAPAAEAAQPQAQVAAH | |
| NOV32g | SFFGSLPGFSSAPNLVANAHSS-----------ARARPAADPTGAPAAEAAQPQAQVAAH | |
| NOV32a | PEQTAPWTEKELQPSEKQ--------MVSGAKDLVCSKMSRAKDAVSSGVASVVDVAKGV | |
| NOV32b | KDTVCSGVTGAVNVAKG---------AVQTGLKTTQNIATGTKNTLGSGVTGAANVAKGA | |
| NOV32c | TTRSALTGTKEVVSSGVTGAMDMAKGAVQGGLDTSKAVLTGTKDTVSTGLTGAVNVAKGT | |
| NOV32d | PEQTAPWTEKELQPSEK---------MVSGAKDLVCSKMSRAYDAVSSGVASVVDVATGV | |
| NOV32e | PEQTAPWTEKELQPSE-------------------------------------------- | |
| NOV32f | PEQTAPWTEKELQPSE-------------------------------------------- | |
| NOV32g | PEQTAPWTEKELQPSE-------------------------------------------- | |
| NOV32a | VQGGLDTTRSALTGTKEVVSSGVTGAMDMAKGAVQGGLDTSKAVLTGTKDTVSTGLTGAV | |
| NOV32b | VQGGLDTTKSVLTGTKDAVSTGLTGAVNLAKGTVQTGMDTTKTVLTGTKDAVCSGVTGAA | |
| NOV32c | VQAGVDTTKTVLTGTKDTVTTGVMGAVNLAXGTVQTGVETSKAVLTGTKDAVSTGLTGAV | |
| NOV32d | VQGGLDTTRSALTGTKEAVSSGFTGAMDMAKGAVQGGLDTSKAVLTGTKDTVSTGLTGAV | |
| NOV32e | ------------------------------------------------------------ | |
| NOV32f | ------------------------------------------------------------ | |
| NOV32g | ------------------------------------------------------------ | |
| NOV32a | NVAKGTVQAGVDTTKTVLTGTKDTVTTGVMGAVNLAKGTVQTGVETSKAVLTGTKDAVST | |
| NOV32b | NVAKGAVQTGVDTAKTVLTGTKDTVTTGLMGAVNVAKGTVQTSVDTTKTVLTGTKDTVCS | |
| NOV32c | NVARGSIQTGVDTSKTVLTGTKDTVCSGVTGAMNVAKGTIQTGVDTSKTVLTGTKDTVCS | |
| NOV32d | NVAKGTVQAGVDTTKTVLTGTKDTVTTGVMGAVNLAKGTVQTGVETSKAVLTGTKDAVST | |
| NOV32e | ------------------------------------------------------------ | |
| NOV32f | ------------------------------------------------------------ | |
| NOV32g | ------------------------------------------------------------ | |
| NOV32a | GLTGAVNVARGSIQTGVDTSKTVLTGTKDTVCSGVTGAMNVAKGTIQTGVDTSKTVLTGT | |
| NOV32b | GVTGAANWAKGAVQGGLDTTKSVLTGTKDTVSTGLTGAVNLAKGTVQTGVDTSKTVLTGT | |
| NOV32c | GVTGAMNVAKGTIQTGVDTSKTVLTGTKDTVCSGVTGAMNVAKGTIQTGVDTTKTVLTGT | |
| NOV32d | GLTGAVNVARGSIQTGVDTSKTVLTGTKDTVCSGVTSAMNNAKGTIQTGVDTSKTVLTGT | |
| NOV32e | ------------------------------------------------------------ | |
| NOV32f | ------------------------------------------------------------ | |
| NOV32g | ------------------------------------------------------------ | |
| NOV32a | KDTVCSGVTGAMNVAKGTIQTGVDTSKTVLTGTKDTVCSGVTGAMNVAKGTIQTGVDTTK | |
| NOV32b | KDTVCSGVT--------------------------------------------------- | |
| NOV32c | KNTVCSGVTGAVNLAKEAIQGGLDTTKSMVMGTKDTMSTGLTGAANVAKGAMQTGLNTTQ | |
| NOV32d | KDTVCSGVT--------------------------------------------------- | |
| NOV32e | ------------------------------------------------------------ | |
| NOV32f | ------------------------------------------------------------ | |
| NOV32g | ------------------------------------------------------------ | |
| NOV32a | TVLTGTKNTVCSGVTGAVNLAKEAIQGGLDTTKSMVMGTKDTMSTGLTGAANVAKGAMQT | |
| NOV32b | ------------------------------------------------------------ | |
| NOV32c | NIATGTKDTVCSGVTGAMNLARGTIQTGVDTTKIVLTGTKDTVCSGVTGAANVAKGAVQG | |
| NOV32d | ------------------------------------------------------------ | |
| NOV32e | ------------------------------------------------------------ | |
| NOV32f | ------------------------------------------------------------ | |
| NOV32g | ------------------------------------------------------------ | |
| NOV32a | GLNTTQNIATGTKDTVCSGVTGAMNLARGTIQTGVDTTKIVLTGTKDTVCSGVTGAANVA | |
| NOV32b | ------------------------------------------------------------ | |
| NOV32c | G---LDTTKSVLTG---------------------------------------------- | |
| NOV32d | ------------------------------------------------------------ | |
| NOV32e | ------------------------------------------------------------ | |
| NOV32f | ------------------------------------------------------------ | |
| NOV32g | ------------------------------------------------------------ | |
| NOV32a | KGAVQGGLDTTKSVLTGTKDAVSTGLTGAVNVAKGTVQTGVDTTKTVLTGTKDTVCSGVT | |
| NOV32b | ------------------------------------------------------------ | |
| NOV32c | ------------------------------------------------------------ | |
| NOV32d | ------------------------------------------------------------ | |
| NOV32e | ------------------------------------------------------------ | |
| NOV32f | ------------------------------------------------------------ | |
| NOV32g | ------------------------------------------------------------ | |
| NOV32a | SAVNVAKGAVQGGLDTTKSVVIGTKDTMSTGLTGAANVAKGAVQTGVDTAKTVLTGTKDT | |
| NOV32b | ------------------------------------------------------------ | |
| NOV32c | --------------------------------------------------------TKDA | |
| NOV32d | ------------------------------------------------------------ | |
| NOV32e | ------------------------------------------------------------ | |
| NOV32f | ------------------------------------------------------------ | |
| NOV32g | ------------------------------------------------------------ | |
| NOV32a | VTTGLVGAVNVAKGTVQTGMDTTKTVLTGTKDTIYSGVTSAVNVAKGAVQTGLKTTQNIA | |
| NOV32b | ------------------------------------------------------------ | |
| NOV32c | VSTGLTGAVNVAKGTVQTGVDTTKTVLTGTKDTVCSGVTSAVNVAKGAVQGGLDTTKSVV | |
| NOV32d | ------------------------------------------------------------ | |
| NOV32f | ------------------------------------------------------------ | |
| NOV32g | ------------------------------------------------------------ | |
| NOV32a | TGTKNTFGSGVTSAVNVAKGAAQTGVDTAKTVLTGTKDTVTTGLMGAVNVAKGTVQTSVD | |
| NOV32b | ------------------------------------------------------------ | |
| NOV32c | IGTKDTMSTGLTGAANVAKGAVQTGVDTAKTVLTGTKDTVTTGLVGAVNVAKGTVQTGMD | |
| NOV32d | ------------------------------------------------------------ | |
| NOV32e | ------------------------------------------------------------ | |
| NOV32f | ------------------------------------------------------------ | |
| NOV32g | ------------------------------------------------------------ | |
| NOV32a | TTKTVLTGTKDTVCSGVTGAANVAKGAIQGGLDTTKSVLTGTKDAVSTGLTGAVKLAKGT | |
| NOV32b | ------------------------------------------------------------ | |
| NOV32c | TTKTVLTGTKDTIYSGVTSAVNVAKGAVQTGLKTTQNIATGTKNTFGSGVTSAVNVAKGA | |
| NOV32d | ------------------------------------------------------------ | |
| NOV32e | ------------------------------------------------------------ | |
| NOV32f | ------------------------------------------------------------ | |
| NOV32g | ------------------------------------------------------------ | |
| NOV32a | VQTGMDTTKTVLTGTKDAVCSGVTGAANVAKGAVQMGVDTAKTVLTGTKDTVCSGVTGAA | |
| NOV32b | ------------------------------------------------------------ | |
| NOV32c | AQTGVDTAKTVLTGTKDTVTTGLMGAVNVAKGTVQTSVDTTKTVLTGTKDTVCSGVTGAA | |
| NOV32d | ------------------------------------------------------------ | |
| NOV32e | ------------------------------------------------------------ | |
| NOV32f | ------------------------------------------------------------ | |
| NOV32g | ------------------------------------------------------------ | |
| NOV32a | NVAKGAVQTGLKTTQNTATGTKNTLGSGVTGAAKVAKGAVQGGLDTTKSVLTGTKDAVST | |
| NOV32b | ------------------------------------------------------------ | |
| NOV32c | NVAKGAIQGGLDTTKSVLTGTKDAVSTGLTGAVKLAKGTVQTGMDTTKTVLTGTKDAVCS | |
| NOV32d | ------------------------------------------------------------ | |
| NOV32e | ------------------------------------------------------------ | |
| NOV32f | ------------------------------------------------------------ | |
| NOV32g | ------------------------------------------------------------ | |
| NOV32a | GLTGAVNLAKGTVQTGVDTSKTVLTGTKDTVCSGVTGAVNVAKGTVQTGVDTAKTVLSGA | |
| NOV32b | ------------------------------------GAVNVAKGTVQTGVDTAKTVLSGA | |
| NOV32c | GVTGAANVAKGAVQMGVDTAKTVLTGTKDTVCSGVTGAANVAKGAVQTGLKTTQNIATGT | |
| NOV32d | ------------------------------------GAVNVAKGTVQTGVDTAKTVLSGA | |
| NOV32e | ------------------------------------------------------------ | |
| NOV32f | ------------------------------------------------------------ | |
| NOV32g | ------------------------------------------------------------ | |
| NOV32a | KDAVTTGVTGAVNVAKGTVQTGVDASKAVLMGTKDTVFSGVTGAMSMAKGAVQGGLDTTK | |
| NOV32b | KDAVTTGVTGAVNVAKGTVQTGVDASKAVLMGTKDTVFSGVTGAMSMAKGAVQGGLDTTK | |
| NOV32c | KNTLGSGVTGAAKVAKGAVQGGLDTTKSVLTGTKDAVSTGLTGAVNLAKGTVQTGVDTSK | |
| NOV32d | KDAVTTGVTGAVNVAKGTVQTGVDASKAVLMGTKDTVFSGVTGAMSMAKGAVQGGLDTTK | |
| NOV32e | ------------------------------------------------------------ | |
| NOV32f | ------------------------------------------------------------ | |
| NOV32a | TVLTGTKDAVSAGLMGSGNVATGATHTGLSTFQNWLPSTPATSWGGLTSSRTTDNGGEQT | |
| NOV32b | TVLTGTKDAVSAGLMGSGNVATGATHTGLSTFQNWLPSTPATSWGGLTSSRTTDNGGEQT | |
| NOV32c | TVLTGTKDTVCSGVTGAVNVAKGTVQTGVDTAKTVLSGAKDAVTTGVTGAVNVAKGTVQT | |
| NOV32d | TVLTGTKDAVSAGLMGSGNVATGATHTGLSTFQNWLPSTPATSWGGLTSSRTTDNGGEQT | |
| NOV32e | ------------------------------------------------------------ | |
| NOV32f | ------------------------------------------------------------ | |
| NOV32g | ------------------------------------------------------------ | |
| NOV32a | ALSPQEAPFSGISTPPDVLSVGPEPAWEAAATTKGLATDVATFTQGAAPGREDTGL-LAT | |
| NOV32b | ALSPQEAPFSGISTPPDVLSVGPEPAWEAAATTKGLATDVATFTQGAAPGREDTGL-LTT | |
| NOV32c | GVDASKAVLMGTKDTVFSGVTGAMSMAKGAVQGGLDTTKTVLTGTKDAVSAGLMGSGNVA | |
| NOV32d | ALSPQEAPFSGISTPPDVLSVGPEPAWEAAATTKGLATDVATFTQGAAPGREDTGL-LTT | |
| NOV32e | ------------------------------------------------------------ | |
| NOV32f | ------------------------------------------------------------ | |
| NOV32g | ------------------------------------------------------------ | |
| NOV32a | THGPEEAPRLAMLQNELEGLGDTFHPNNAEEQAQLAASQPGPKVLSAEQGSYFVRLGDLG | |
| NOV32b | THGPEEAPRLAMLQNELEGLGDIFHPNNAEEQAQLAASQPGPKVLSAEQGSYFVRLGDLG | |
| NOV32c | TGATHTGLSTFQNWLPSTPATSWGGLTSSRTTAQLAASQPGPKVLSAEQGSYFVRLGDLG | |
| NOV32d | THGPEEAPRLAMLQNELEGLGDIFHPMNAEEQAQLAASQPGPKVLSAEQGSYFVRLGDLG | |
| NOV32e | ------------------------------------------------------------ | |
| NOV32f | ------------------------------------------------------------ | |
| NOV32g | ------------------------------------------------------------ | |
| NOV32a | PSFRQRAFEHAVSHLQHGQFQARDTLAQLQDCFRLIEKAQQAPEGQPRLDQGSGASAEDA | |
| NOV32b | PSFRQRAFEHAVSHLQHGQFQARDTLAQLQDCFRLIEKAQQAPEGQPRLDQGSGASAEDA | |
| NOV32c | PSFRQRAFEHAVSHLQHGQFQARDTLAQLQDCFRLIEKAQQAPEGQPRLDQGSGASAEDA | |
| NOV32d | PSFRQRAFEHAVSHLQHGQFQARDTLAQLQDCFRLIEKAQQAPEGQPRLDQGSGASAEDA | |
| NOV32e | ----------------------------------KIEKAQQAPEGQPRLDQGSGASAEDA | |
| NOV32f | ----------------------------------KIEKAQQAPEGQPRLDQGSGASAEDA | |
| NOV32g | ----------------------------------KIEKAQQAPEGQPRLDQGSGASAEDA | |
| NOV32a | AVQEERDAGVLSRVCGLLRQLHTAYSGLVSSLQGLPAELQQPVGRARHSLCELYGIVASA | |
| NOV32b | AVQEERDAGVLSRVCGLLRQLHTAYSGLVSSLQGLPAELQQPVGRARHSLCELYGIVASA | |
| NOV32c | AVQER--------VCGLLRQLHTAYSGLVSSLQGLPAELQQPVGRARHSLCELYGIVASA | |
| NOV32d | AVQEERDAGVLSRVCGLLRQLHTAYSGLVSSLQGLPAELQQPVGRARHSLCELYGIVASA | |
| NOV32e | AVQEERDAGVLSRVCGLLRQLHTAYSGLVSSLRGLPAELQQPVGRARHSLCELYGIVASA | |
| NOV32f | AVQEERDAGVLSRVCGLLRQLHTAYSGLVSSLQGLPAELQQPVGRARHSLCELYGIVASA | |
| NOV32g | AVQEERDAGVLSRVCGLLRQLHTAYSGLVSSLQGLPAELQQPVGRARHSLCELYGIVASA | |
| NOV32a | GSVEELPAERLVQSREGVHQAWQGLEQLLEGLQHNPPLSWLVGPFALPAGGQ-- | |
| NOV32b | GSVEELPAERLVQSREGVHQAWQGLEQLLEGLQHNPPLSWLVGPFALPAGGQ-- | |
| NOV32c | GSVEELPAERLVQSREGVHQAWQGLEQLLEGLQHNPPLSWLVGPFALPAGGQ-- | |
| NOV32d | GSVEELPAERLVQSREGVHQAWQGLEQLLEGLQHNPPLSWLVGPFALPAGGQLE | |
| NOV32e | GSVEELPAERLVQSREGVHQAWQGLEQLLEGLQHNPPLSWLVGPFALPAGGQ-- | |
| NOV32f | GSVEELPAERLVQSREGVHQAWQGLEQLLEGLQHNPPLSWLVGPFALPAGGQ-- | |
| NOV32g | GSVEELPAERLVQSREGVHQAWQGLEQLLEGLQHNPPLSWLVGPFALPAGGQ-- | |

[0538] Further analysis of the NOV32a protein yielded the following properties shown in Table 32C.

TABLE 32C
Protein Sequence Properties NOV32a

| | |
|---|---|
| SignalP analysis: | No Known Signal Sequence Predicted |
| PSORT II analysis: | |

| PSG: | a new signal peptide prediction method | |
|---|---|---|
| | N-region: | length 10; pos. chg 2; neg. chg 3 |
| | H-region: | length 2; peak value 0.00 |
| | PSG score: | −4.40 |

| | |
|---|---|
| GvH: | von Heijne's method for signal seq. recognition |
| | GvH score (threshold: −2.1): −4.76 |
| | possible cleavage site: between 32 and 33 |

>>> Seems to have no N-terminal signal peptide

| ALOM: | Klein et al's method for TM region allocation | |
|---|---|---|
| | Init position for calculation: 1 | |
| | Tentative number of TMS(s) for the threshold 0.5: 0 | |
| | number of TMS(s) . . . fixed | |
| | PERIPHERAL | Likelihood = 1.43 (at 106) |

| | ALOM score: 1.43 (number of TMSs: 0) | | | |
|---|---|---|---|---|
| MITDISC: | discrimination of mitochondrial targeting seq | | | |
| | R content: | 0 | Hyd Moment(75): | 6.59 |
| | Hyd Moment(95): | 5.57 | G content: | 0 |
| | D/E content: | 2 | S/T content: | 1 |

| | |
|---|---|
| | Score: −6.74 |
| Gavel: | prediction of cleavage sites for mitochondrial preseq |
| | cleavage site motif not found |

NUCDISC: discrimination of nuclear localization signals

| | |
|---|---|
| | pat4: none |
| | pat7: none |
| | bipartite: none |
| | content of basic residues: 8.6% |
| | NLS Score: −0.47 |
| KDEL: | ER retention motif in the C-terminus: none |

ER Membrane Retention Signals: none
SKL: peroxisomal targeting signal in the C-terminus: none
PTS2: 2nd peroxisomal targeting signal: none
VAC: possible vacuolar targeting motif: none
RNA-binding motif: none
Actinin-type actin-binding motif:

type 1: none
type 2: none

NMYR: N-myristoylation pattern: none
Prenylation motif: none
memYQRL: transport motif from cell surface to Golgi: none
Tyrosines in the tail: none
Dileucine motif in the tail: none
checking 63 PROSITE DNA binding motifs: none
checking 71 PROSITE ribosomal protein motifs: none
checking 33 PROSITE prokaryotic DNA binding motifs: none

| | |
|---|---|
| NNCN: | Reinhardt's method for Cytoplasmic/Nuclear |
| | discrimination |
| | Prediction: cytoplasmic |
| | Reliability: 94.1 |
| COIL: | Lupas's algorithm to detect coiled-coil regions |
| | total: 0 residues |

Final Results (k = 9/23):

56.5%: cytoplasmic
26.1%: nuclear
13.0%: mitochondrial
4.3%: vesicles of secretory system

>> prediction for CG55906-04 is cyt (k = 23)

[0539] A search of the NOV32a protein against the Geneseq database, a proprietary database that contains sequences published in patents and patent publication, yielded several homologous proteins shown in Table 32D.

TABLE 32D
Geneseq Results for NOV32a

| | | NOV32a | Identities/ | | |
|---|---|---|---|---|---|
| | | Residues/ | Similarities for | | |
| Geneseq | Protein/Organism/Length | Match | the Matched | | Expect |
| Identifier | [Patent #, Date] | Residues | Region | | Value |
| AAO21705 | Human secreted protein SEQ ID No | 1 . . . 1372 | 1297/1372 | (94%) | 0.0 |
| | 47 - Homo sapiens, 1325 aa. | 1 . . . 1325 | 1306/1372 | (94%) | |
| | [WO200238602-A2, 16-MAY-2002] | | | | |
| ABB12254 | Human S3-12 homologue, SEQ ID | 1 . . . 1235 | 1234/1235 | (99%) | 0.0 |
| | NO: 2624 - Homo sapiens, 1250 aa. | 17 . . . 1250 | 1234/1235 | (99%) | |
| | [WO200157188-A2, 09-AUG-2001] | | | | |
| ABP53597 | Human NOV19 protein SEQ ID | 1 . . . 1074 | 1026/1080 | (95%) | 0.0 |
| | NO: 58 - Homo sapiens, 1225 aa. | 1 . . . 1033 | 1026/1080 | (95%) | |
| | [WO200262999-A2, 15-AUG-2002] | | | | |
| AAY95851 | Autoantigen diagnostic of | 314 . . . 749 | 431/436 | (98%) | 0.0 |
| | endometriosis - Homo sapiens, 439 | 4 . . . 439 | 432/436 | (98%) | |
| | aa. [WO200047739-A2, 17-AUG-2000] | | | | |
| AAY48492 | Human breast tumour-associated | 1049 . . . 1372 | 323/324 | (99%) | 0.0 |
| | protein 37 - Homo sapiens, 324 aa. | 1 . . . 324 | 323/324 | (99%) | |
| | [DE19813835-A1, 23-SEP-1999] | | | | |

[0540] In a BLAST search of public sequence databases, the NOV32a protein was found to have homology to the proteins shown in the BLASTP data in Table 32E.

TABLE 32E
Public BLASTP Results for NOV32a

| | | NOV32a | Identities/ | | |
|---|---|---|---|---|---|
| Protein | | Residues/ | Similarities for | | |
| Accession | | Match | the Matched | | Expect |
| Number | Protein/Organism/Length | Residues | Portion | | Value |
| Q96Q06 | Hypothetical protein KIAA1881 - | 91 . . . 1372 | 1256/1348 | (93%) | 0.0 |
| | Homo sapiens (Human), 1348 aa | 1 . . . 1348 | 1264/1348 | (93%) | |
| | (fragment). | | | | |
| O88492 | S3-12 - Mus musculus (Mouse), | 1 . . . 1370 | 843/1432 | (58%) | 0.0 |
| | 1403 aa. | 1 . . . 1401 | 1043/1432 | (71%) | |
| Q98MG7 | Hypothetical glycine-rich protein | 141 . . . 1141 | 352/1088 | (32%) | 5e−71 |
| | mlr0587 - Rhizobium loti | 1078 . . . 2144 | 387/1088 | (35%) | |
| | (Mesorhizobium loti), 3145 aa. | | | | |
| Q98MG8 | Hypothetical glycine-rich protein | 128 . . . 1141 | 325/1070 | (30%) | 8e−63 |
| | mlr0585 - Rhizobium loti | 329 . . . 1379 | 384/1070 | (35%) | |
| | (Mesorhizobium loti), 2147 aa. | | | | |
| Q96WU8 | Hypothetical 119.8 kDa protein - | 140 . . . 1088 | 265/996 | (26%) | 4e−42 |
| | Schizosaccharomyces pombe | 266 . . . 1173 | 348/996 | (34%) | |
| | (Fission yeast), 1195 aa (fragment). | | | | |

[0541] PFam analysis predicts that the NOV32a protein contains the domains shown in the Table 32F.

TABLE 32F
Domain Analysis of NOV32a

| | | | |
|---|---|---|---|
| | | Identities/ | |
| Pfam | NOV32a | Similarities for | Expect |
| Domain | Match Region | the Matched Region | Value |

| | | | | |
|---|---|---|---|---|
| LEA | 87 . . . 156 | 16/75 | (21%) | 0.00076 |
| | | 44/75 | (59%) | |
| LEA | 516 . . . 589 | 15/76 | (20%) | 0.96 |
| | | 46/76 | (61%) | |
| perilipin | 592 . . . 1356 | 89/788 | (11%) | 0.045 |
| | | 435/788 | (55%) | |

### Example 33

[0542] The NOV33 clone was analyzed, and the nucleotide and encoded polypeptide sequences are shown in Table 33A.

TABLE 33A

| | | |
|---|---|---|
| NOV33a,CG55908-01 | SEQ ID NO:813 | 840 bp |
| DNA Sequence | ORF Start: at 2 | ORF Stop: TAA at 836 |

GGCCTCCGGGATTTGCTACCTTTTTGGCTCCCTGCTCGTCGAACTGCTCTTCTCACGGGCTGTCGCCT
TCAATCTGGACGTGATGGGTGCCTTGCGCAAGGAGGGCGAGCCAGGCAGCCTCTTCGGCTTCTCTGTG
GCCCTGCACCGGCAGTTGCAGCCCCGACCCCAGAGCTGGCTGCTGGTGGGTGCTCCCCAGGCCCTGGC
TCTTCCTGGGCAGCAGGCGAATCGCACTGGAGGCCTCTTCGCTTGCCCGTTGAGCCTGGAGGAGACTG
ACTGCTACAGAGTGGACATCGACCAGGGAGCTGATATGCAAAAGGAAAGCAAGGAGAACCAGTGGTTG
GGAGTCAGTGTTCGGAGCCAGGGGCCTGGGGGCAAGATTGTTGACTGCGCCCGGGGCACGGCCAACTG
TGTGGTGTTCAGCTGCCCACTCTACAGCTTTGACCGCGCGGCTGTGCTGCATGTCTGGGGCCGTCTCT
GGAACAGCACCTTTCTGGAGGAGTACTCAGCTGTGAAGTCCCTGGAAGTGATTGTCCGGGCCAACATC
ACAGTGAAGTCCTCCATAAAGAACTTGATGCTCCGAGATGCCTCCACAGTGATCCCAGTGATGGTATA
CTTGGACCCCATGGCTGTGGTGGCAGAAGGAGTGCCCTGGTGGGTCATCCTCCTGGCTGTACTGGCTG
GGCTGCTGGTGCTAGCACTGCTGGTGCTGCTCCTGTGGAAGTGTGGCTTCTTCCATCGGAGCAGCCAG
AGCTCATCTTTTCCCACCAACTATCACCGGGCCTGTCTGGCTGTGCAGCCTTCAGCCATGGAAGTTGG
GGGTCCAGGGACTGTGGGGTAACT

| | | | |
|---|---|---|---|
| NOV33a, CG55908-01 | SEQ ID NO:814 | 278 aa | MW at 30129.7 kD |
| Protein Sequence | | | |

ASGTCYLFGSLLVELLFSRAVAFNLDVMGALRKEGEPGSLFGFSVALHRQLQPRPQSWLLVGAPQALA
LPGQQANRTGGLFACPLSLEETDCYRVDIDQGADMQKESKENQWLGVSVRSQGPGGKIVDCARGTANC
VVFSCPLYSFDPAAVLHVWGRLWNSTFLEEYSAVKSLEVIVRANITVKSSIKNLMLRDASTVIPVMVY
LDPMAVVAEGVPWWVILLAVLAGLLVLALLVLLLWKCGFFHRSSQSSSFPTNYHRACLAVQPSAMEVG
GPGTVG

| | | |
|---|---|---|
| NOV33b, 253116407 | SEQ ID NO:815 | 780 bp |
| DNA Sequence | ORF Start: at 1 | ORE Stop: end of sequence |

GGATCCTTCAATCTGGACGTGATGGGTGCCTTGCGCAAGGAGGGCGAGCCAGGCAGCCTCTTCGGCTT
CTCTGTGGCCCTGCACCGGCAGTTGCAGCCCCGACCCCAGAGCTGGCTGCTGGTGGGTGCTCCCCAGG
CCCTGGCTCTTCCTGGGCAGCAGGCGAATCGCACTGGAGGCCTCTTCGCTTGCCCGTTGAGCCTGGAG
GAGACTGACTGCTACAGAGTGGACATCGACCAGGGAGCTGATATGCAAAAGGAAAGCAAGGAGAACCA
GTGGTTGGGAGTCAGTGTTCGGAGCCAGGGGCCTGGGGGCAAGATTGTTGACTGCGCCCGGGGCACGG
CCAACTGTGTGGTGTTCAGCTGCCCACTCTACAGCTTTGACCGCGCGGCTGTGCTGCATGTCTGGGGC
CGTCTCTGGAACAGCACCTTTCTGGAGGAGTACTCAGCTGTGAAGTCCCTGGAAGTGATTGTCCGGGC
CAACATCACAGTGAAGTCCTCCATAAAGAACTTGATGCTCCGAGATGCCTCCACAGTGATCCCAGTGA
TGGTATACTTGGACCCCATGGCTGTGGTGGCAGAAGGAGTGCCCTGGTGGGTCATCCTCCTGGCTGTA
CTGGCTGGGCTGCTGGTGCTAGCACTGCTGGTGCTGCTCCTGTGGAAGTGTGGCTTCTTCCATCGGAG
CAGCCAGAGCTCATCTTTTCCCACCAACTATCACCGGGCCTGTCTGGCTGTGCAGCCTTCAGCCATGG
AAGTTGGGGGTCCAGGGACTGTGGGGCTCGAG

| | | | |
|---|---|---|---|
| NOV33b, 253116407 | SEQ ID NO:816 | 260 aa | MW at 28204.4 kD |
| Protein Sequence | | | |

GSFNLDVMGALRKEGEPGSLFGFSVALHRQLQPRPQSWLLVGAPQALALPGQQANRTGGLFACPLSLE
ETDCYRVDIDQGADMQKESKENQWLGVSVRSQGPGGKIVDCARGTANCVVFSCPLYSFDRAAVLHVWG
RLWNSTFLEEYSAVKSLEVIVRANITVKSSIKNLMLRDASTVIPVMVYLDPMAVVAEGVPWWVILLAV
LAGLLVLALLVLLLWKCGFFHRSSQSSSFPTNYHRACLAVQPSAMEVGGPGTVGLE

| | | |
|---|---|---|
| NOV33c, 253116412 | SEQ ID NO:817 | 567 bp |
| DNA Sequence | ORF Start: at 1 | ORF Stop: end of sequence |

GGATCCTTCAATCTGGACGTGATGGGTGCCTTGCGCAAGGAGGGCGAGCCAGGCAGCCTCTTCGGCTT
CTCTGTGGCCCTGCACCGGCAGTTGCAGCCCCGACCCCAGAGCTGGCTGCTGGTGGGTGCTCCCCAGG
CCCTGGCTCTTCCTGGGCAGCAGGCGAATCGCACTGGAGGCCTCTTCGCTTGCCCGTTGAGCCTGGAG
GAGACTGACTGCTACAGAGTGGACATCGACCAGGGAGCTGATATGCAAAAGGAAAGCAAGGAGAACCA
GTGGTTGGGAGTCAGTGTTCGGAGCCAGGGGCCTGGGGGCAAGATTGTTGACTGCGCCCGGGGCACGG
CCAACTGTGTGGTGTTCAGCTGCCCACTCTACAGCTTTGACCGCGCGGCTGTGCTGCATGTCTGGGGC
CGTCTCTGGAACAGCACCTTTCTGGAGGAGTACTCAGCTGTGAAGTCCCTGGAAGTGATTGTCCGGGC
CAACATCACAGTGAAGTCCTCCATAAAGAACTTGATGCTCCGAGATGCCTCCACAGTGATCCCAGTGA
TGGTATACTTGGACCCCCTCGAG

| | | | |
|---|---|---|---|
| NOV33c, 253116412 | SEQ ID NO:818 | 189 aa | MW at 20685.5 kD |
| Protein Sequence | | | |

GSFNLDVMGALRKEGEPGSLFGFSVALHRQLQPRPQSWLLVGAPQALALPGQQANRTGGLFACPLSLE
ETDCYRVDIDQGADMQKESKENQWLGVSVRSQGPGGKIVDCARGTANCVVFSCPLYSFDRAAVLHVWG
RLWNSTFLEEYSAVKSLEVIVRANTTVKSSIKNLMLRDASTVIPVMVYLDPLE

[0543] A ClustalW comparison of the above protein sequences yields the following sequence alignment shown in Table 33B.

TABLE 33B
Comparison of the NOV33 protein sequences.

| | | |
|---|---|---|
| NOV33a | ASGICYLFGSLLVELLFSRAVAFNLDVMGALRKEGEPGSLFGFSVALHRQLQPRPQSWLL | (SEQ ID NO:814) |
| NOV33b | --------------------GSFNLDVMGALRKEGEPGSLFGFSVALHRQLQPRPQSWLL | (SEQ ID NO:816) |
| NOV33c | --------------------GSFNLDVMGALRKEGEPGSLFGFSVALHRQLQPRPQSWLL | (SEQ ID NO:818) |
| NOV33a | VGAPQALALPGQQANRTGGLFACPLSLEETDCYRVDIDQGADMQKESKENQWLGVSVRSQ | |
| NOV33b | VGAPQALALPGQQANRTGGLFACPLSLEETDCYRVDIDQGADMQKESKENQWLGVSVRSQ | |
| NOV33c | VGAPQALALPGQQANRTGGLFACPLSLEETDCYRVDIDQGADMQKESKENQWLGVSVRSQ | |
| NOV33a | GPGGKIVDCARGTANCVVFSCPLYSFDRAAVLHVWGRLWNSTFLEEYSAVKSLEVIVRAN | |
| NOV33b | GPGGKIVDCARGTANCVVFSCPLYSFDRAAVUHVWGRLWNSTFLEEYSAVKSLEVIVRAN | |
| NOV33c | GPGGKIVDCARGTANCVVFSCPLYSFDRAAVLHVWGRLWNSTFLEEYSAVKSLEVIVRAN | |
| NOV33a | ITVKSSIKNLMLRDASTVIPVMVYLDPMAVVAEGVPWWVTLLAVLAGLLVLAILVLLLWK | |
| NOV33b | ITVKSSIKNLMLRDASTVIPVMVYLDPMAVVAEGVPWWVTLLAVLAGLLVLALLVLLLWK | |
| NOV33c | ITVKSSIKNLMLRDASTVIPVMVYLDPLE------------------------------- | |
| NOV33a | CGFFHRSSQSSSFPTNYHRACLAVQPSAMEVGGPGTVG-- | |
| NOV33b | CGFFHRSSQSSSFPTNYHRACLAVQPSAMEVGGPGTVGLE | |
| NOV33c | ---------------------------------------- | |

[0544] Further analysis of the NOV33a protein yielded the following properties shown in Table 33C.

TABLE 33C
Protein Sequence Properties NOV33a

| | |
|---|---|
| SignalP analysis: | Cleavage site between residues 23 and 24 |
| PSORT II analysis: | |

| PSG: | a new signal peptide prediction method | |
|---|---|---|
| | N-region: | length 0; pos. chg 0; neg. chg 0 |
| | H-region: | length 13; peak value 8.16 |
| | PSG score: | 3.76 |

| | |
|---|---|
| GvH: | von Heijne's method for signal seq. recognition |
| | GvH score (threshold: −2.1): −0.41 |
| | possible cleavage site: between 22 and 23 |

>>> Seems to have a cleavable signal peptide (1 to 22)

| ALOM: | Klein et al's method for TM region allocation | | |
|---|---|---|---|
| | Init position for calculation: 23 | | |
| | Tentative number of TMS(s) for the threshold 0.5: 2 | | |
| | Number of TMS(s) for threshold 0.5: 1 | | |
| | INTEGRAL | Likelihood = | Transmembrane 219-235 |
| | | −15.81 | |

| | |
|---|---|
| PERIPHERAL | Likelihood = 2.65 (at 136) |

| | |
|---|---|
| | ALOM score: −15.81 (number of TMSs: 1) |
| MTOP: | Prediction of membrane topology (Hartmann et al.) |
| | Center position for calculation: 11 |
| | Charge difference: −2.0 C(−1.0)-N( 1.0) |
| | N >= C: N-terminal side will be inside |

>>> membrane topology: type 1a (cytoplasmic tail 236 to 278)

| MITDISC: | discrimination of mitochondrial targeting seq | | | |
|---|---|---|---|---|
| | R content: | 1 | Hyd Moment(75): | 2.41 |
| | Hyd Moment(95): | 4.01 | G content: | 2 |
| | D/E content: | 2 | S/T content: | 3 |

| | |
|---|---|
| | Score: −6.94 |
| Gavel: | prediction of cleavage sites for mitochondrial preseq |
| | cleavage site motif not found |

NUCDISC: discrimination of nuclear localization signals

| | |
|---|---|
| | pat4: none |
| | pat7: none |
| | bipartite: none |
| | content of basic residues: 7.9% |
| | NLS Score: −0.471 |
| KDEL: | ER retention motif in the C-terminus: none |

ER Membrane Retention Signals: none
SKL: peroxisomal targeting signal in the C-terminus: none
PTS2: 2nd peroxisomal targeting signal: none
VAC: possible vacuolar targeting motif: none
RNA-binding motif: none
Actinin-type actin-binding motif:

type 1: none
type 2: none

NMYR: N-myristoylation pattern: none
Prenylation motif: none
memYQRL: transport motif from cell surface to Golgi: none
Tyrosines in the tail: 256
Dileucine motif in the tail: found

LL at 236

checking 63 PROSITE DNA binding motifs: none
checking 71 PROSITE ribosomal protein motifs: none
checking 33 PROSITE prokaryotic DNA binding motifs: none

| | |
|---|---|
| NNCN: | Reinhardt's method for Cytoplasmic/Nuclear discrimination |
| | Prediction: cytoplasmic |
| | Reliability: 94.1 |
| COIL: | Lupas's algorithm to detect coiled-coil regions |
| | total: 0 residues |

Final Results (k = 9/23):

44.4%: endoplasmic reticulum
22.2%: Golgi
11.1%: plasma membrane
11.1%: vesicles of secretory system
11.1%: extracellular, including cell wall

>> prediction for CG55908-01 is end (k = 9)

[0545] A search of the NOV33a protein against the Geneseq database, a proprietary database that contains sequences published in patents and patent publication, yielded several homologous proteins shown in Table 33D.

TABLE 33D
Geneseq Results for NOV33a

| | | NOV33a | Identities/ | | |
|---|---|---|---|---|---|
| | | Residues/ | Similarities for | | |
| Geneseq | Protein/Organism/Length | Match | the Matched | | Expect |
| Identifier | [Patent #, Date] | Residues | Region | | Value |
| ABG69620 | Human NOV13 protein - Homo | 1 . . . 278 | 278/278 | (100%) | e−161 |
| | sapiens, 278 aa. [WO200250277-A2, | 1 . . . 278 | 278/278 | (100%) | |
| | 27-JUN-2002] | | | | |
| ABG61788 | Novel ITGA7 precursor-like receptor | 58 . . . 278 | 167/230 | (72%) | 3e−84 |
| | protein #1 - Homo sapiens, 1143 aa. | 917 . . . 1143 | 180/230 | (77%) | |
| | [WO200229058-A2, 11-APR-2002] | | | | |
| ABG61789 | Novel ITGA7 precursor-like receptor | 128 . . . 278 | 150/151 | (99%) | 4e−83 |
| | protein #2 - Homo sapiens, 1035 aa. | 885 . . . 1035 | 151/151 | (99%) | |
| | [WO200229058-A2, 11-APR-2002] | | | | |
| ABU58459 | Human PRO polypeptide #60 - Homo | 1 . . . 130 | 129/130 | (99%) | 3e−70 |
| | sapiens, 1141 aa. [US2003027272- | 12 . . . 141 | 129/130 | (99%) | |
| | A1, 06-FEB-2003] | | | | |
| ABU56990 | Human PRO polypeptide #60 - Homo | 1 . . . 130 | 129/130 | (99%) | 3e−70 |
| | sapiens, 1141 aa. [US2003027280- | 12 . . . 141 | 129/130 | (99%) | |
| | A1, 06-FEB-2003] | | | | |

[0546] In a BLAST search of public sequence databases, the NOV33a protein was found to have homology to the proteins shown in the BLASTP data in Table 33E.

TABLE 33E
Public BLASTP Results for NOV33a

| | | NOV33a | Identities/ | |
|---|---|---|---|---|
| Protein | | Residues/ | Similarities for | |
| Accession | | Match | the Matched | Expect |
| Number | Protein/Organism/Length | Residues | Portion | Value |
| CAD48689 | Sequence 41 from Patent | 58 . . . 278 | 167/230 (72%) | 1e−83 |
| | WO0229058 - Homo sapiens | 917 . . . 1143 | 180/230 (77%) | |
| | (Human), 1143 aa. | | | |
| JC5950 | integrin alpha-7 chain precursor - | 1 . . . 130 | 129/130 (99%) | 9e−70 |
| | human, 1137 aa. | 12 . . . 141 | 129/130 (99%) | |
| AAH50280 | Integrin, alpha 7 - Homo sapiens | 1 . . . 130 | 129/130 (99%) | 9e−70 |
| | (Human), 1137 aa. | 12 . . . 141 | 129/130 (99%) | |
| Q13683 | Integrin alpha-7 precursor - Homo | 1 . . . 130 | 129/130 (99%) | 9e−70 |
| | sapiens (Human), 1181 aa. | 12 . . . 141 | 129/130 (99%) | |
| S40148 | integrin alpha-7A chain - rat, 148 | 150 . . . 278 | 118/129 (91%) | 1e−61 |
| | aa. | 1 . . . 129 | 122/129 (94%) | |

[0547] PFam analysis predicts that the NOV33a protein contains the domains shown in the Table 33F.

TABLE 33F
Domain Analysis of NOV33a

| | | | |
|---|---|---|---|
| Pfam | NOV33a | Identities/ | Expect |
| Domain | Match Region | Similarities for | Value |
| | | the Matched Region | |

### Example 34

[0548] The NOV34 clone was analyzed, and the nucleotide and encoded polypeptide sequences are shown in Table 34A.

TABLE 34A
NOV34 Sequence Analysis

| | | |
|---|---|---|
| NOV34a, CG56077-06 | SEQ ID NO:819 | 2106 bp |
| DNA Sequence | ORF Start: at 1 | ORF Stop: TGA at 1636 |

TCCCGAGACTTTGGAAGTTCTCAGCTATTACTTTATTACATAGGATTTCTGTGTCTTTTCTCATCTCT
TTTCCTTTTGGAAAGACCCCCAAAGGGAAAGTGTCCCCTGCGCTGCTCCTGCTCTAAAGACAGCGCCC
TGTGTGAGGGCTCCCCGGACCTGCCCGTCAGCTTCTCTCCGACCCTGCTGTCACTGTCACTCGTCAGG
ACGGGAGTCACCCAGCTGAAGGCCGGCAGCTTCCTGAGAATTCCGTCTCTGCACCTGCTGCTCTTCAC
CTCCAACTCCTTCTCCGTGATTGAGGACGATGCATTTGCGGGCCTGTCCCACCTGCAGTACCTGTTCA
TCGAGGACAATGAGATTGGCTCCATCTCTAAGAATGCCCTCAGAGGACTTCGCTCGCTTACACACCTG
AGCCTGGCCAATAACCATCTGGAGACCCTCCCCAGATTCCTGTTCCGAGGCCTGGACACCCTTACTCA
TGTGGACCTCCGCGGGAACCCGTTCCAGTGTGACTGCCGCGTCCTCTGGCTCCTGCAGTGGATGCCCA
CCGTGAATGCCAGCGTGGGGACCGGCGCCTGTGCGGGCCCCGCCTCCCTGAGCCACATGCAGCTCCAC
CACCTCGACCCCAAGACTTTCAAGTGCCCACCCACAGAGCTGTCCTGGTTCCAGACGGTGGGGGAGTC
GGCACTGAGCGTAGAGCCCTTCTCCTACCAAGGGGAGCCTCACATTGTGCTGGCACAGCCCTTCGCCG
GCCGCTGCCTGATTCTCTCCTGGGACTACAGCCTGCAGCGCTTCCGGCCCGAGGAAGAGCTGCCCACA
GCGGCCTCCGTGGTGTCCTGCAAGCCACTGGTGCTGGGCCCGAGCCTCTTCGTGCTGGCTGCCCGCCT
GTGGGGGGGCTCACAGCTGTGGGCCCGGCCCAGTCCCGGCCTGCGCCTGGCCCCAACGCAGACCCTGG
CCCCGCGGCGGCTGCTGCGGCCCAATGACGCCGAGCTCCTGTGGCTGGAAGGGCAACCCTGCTTCGTG
GTGGCCGATGCCTCCAAGGCGGGCAGCACCACGCTGCTGTGCCGCGACGGGCCCGGCTTTTACCCGCA
CCAGAGCCTGCACGCCTGGCACCGGGACACGGACGCTGAGGCCCTGGAGCTGGACGGCCGGCCCCACC
TGCTGCTGGCCTCGGCTTCCCAGCGGCCCGTGCTCTTCCACTGGACCGGTGGCCGCTTCGAGAGACGC
ACGGACATCCCCGAGGCCGAGGATGTCTATGCCACACGCCACTTCCAGGCTGGTGGGGACGTGTTCCT
GTGCCTCACACGCTACATTGGGGACTCCATGGTGATGCGCTGGGACGGCTCCATGTTTCGTCTGCTGC
AGCAACTTCCCTCGCGCGGTGCCCACGTCTTCCAGCCACTGCTCATCGCCAGGGACCAGTTGGCCATC
CTAGGCAGCGACTTCGCCTTCAGCCAGGTCCTCCGCCTTGAGCCTGACAAGGGGCTCCTGGAGCCACT
GCAGGAGCTGGGGCCTCCGGCCCTGGTGGCCCCCCGTGCCTTTGCCCACATCACTATGGCCGGCAGAC
GCTTCCTCTTTGCTGCTTGCTTTAAGGGCCCCACACAGATCTACCAGCATCACGAGATCGACCTCAGT
GCCTGAGACCACCAACGGGACTCTGGGCATGGCTGGGGCCCCTGGACGGCCCCTTGGCTGGCTCCTGG
CCCTACTTGGGGTGATGGTCCGCCTGTGAGCTGCTGACCGTGGGCCACGTTCATCAGCCACACGTCTA
GGCCTTAAGCCCACTTCTTAAAGGATCTGCACCCATGGGGGGACATAGAGGGTCCCAGCCTACTGGAC
CTCCCGAGCTGCCCTTCAGGTCTAAAGCAACATCTGGACATCTCGGCTGGGGCAGATTCCCCATCAAA
GGCAACCTGGGGGGTGCAGGCTGGTGCACTGCATGGAGTCGAGGTGGAGGTCACGTGCAGAGCTCCAT
GAGGTCCCGGAGCCCCCCTCTCAACCCGCTCCTACCCCGCTGGTCCCTCTGAAAGCACCGAGGGGTTG
ATGGCATTCCTTTCCCATTCTAAACTCCACGCAGCCAATCGCTTTCCTGGAGGAGCGCCAACCTCG

| | | | |
|---|---|---|---|
| NOV34a, CG56077-06 | SEQ ID NO:820 | 545 aa | MW at 60447.7 kD |
| Protein Sequence | | | |

SRDFGSSQLLLYYIGFLCLFSSLFLLERPPKGKCPLRCSCSKDSALCEGSPDLPVSFSPTLLSLSLVR
TGVTQLKAGSFLRIPSLHLLLFTSNSFSVIEDDAFAGLSHLQYLFIEDNEIGSISKNALRGLRSLTHL
SLANNHLETLPRFLFRGLDTLTHVDLRGNPFQCDCRVLWLLQWMPTVNASVGTGACAGPASLSHMQLH
HLDPKTFKCPPTELSWFQTVGESALSVEPFSYQGEPHIVLAQPFAGRCLILSWDYSLQRFRPEEELPT
AASVVSCKPLVLGPSLFVLAARLWGGSQLWARPSPGLRLAPTQTLAPRRLLRPNDAELLWLEGQPCFV
VADASKAGSTTLLCRDGPGFYPHQSLHAWHRDTDAEALELDGRPHLLLASASQRPVLFHWTGGRFERR
TDIPEAEDVYATRHFQAGGDVFLCLTRYIGDSMVMRWDGSMFRLLQQLPSRGAHVFQPLLIARDQLAI
LGSDFAFSQVLRLEPDKGLLEPLQELGPPALVAPRAFAHITMAGRRFLFAACFKGPTQIYQ
HHEIDLSA

| | | |
|---|---|---|
| NOV34b, CG56077-01 | SEQ ID NO:821 | 1859 bp |
| DNA Sequence | ORF Start: ATG at 101 | ORF Stop: TGA at 1760 |

GTAACTCCTCTTCATCCACTGGGGAGGAAGGTGAGGCAGGCGGGCCCAATTCATTCGCCTCCGGTACT
TGCAAGCCTCGCTCAGTCTTAAGCAAGAGGGGATGGATTCGCCCGCAGCACTGAGAATCCAGGGGCAG
GCGGGATGGCGTTCAGGCGCTGTTGCTAGAAATCTCTGTCTTTACTCTGTTTTGGTCATTACGGAGGG
AAGACAGCCCCCAAAGGGAAAGTGTCCCCTGCGCTGCTCCTGCTCTAAAGACAGCGCCCTGTGTGAGG
GCTCCCCGGACCTGCCCGTCAGCTTCTCTCCGACCCTGCTGTCACTCTCACTCGTCAGGACGGGAGTC
ACCCAGCTGAAGGCCGGCAGCTTCCTGAGAATTCCGTCTCTGCACCTGCTCCTCTTCACCTCCAACTC
CTTCTCCGTGATTGAGGACGATGCATTTGCGGGCCTGTCCCACCTGCAGTACCTCTTCATCGAGGACA
ATGAGATTGGCTCCATCTCTAAGAATGCCCTCAGAGGACTTCGCTCGCTTACACACCTAAGCCTGGCC
AATAACCATCTGGAGACCCTCCCCAGATTCCTGTTCCGAGGCCTGGACACCCTTACTCATGTGGACCT
CCGCGGGAACCCGTTCCAGTGTGACTGCCGCGTCCTCTGGCTCCTGCAGTGGATGCCCACCGTGAATG
CCAGCGTGGGGACCGGCGCCTGTGCGGGCCCCGCCTCCCTGAGCCACATGCAGCTCCACCACCTCGAC
CCCAAGACTTTCAAGTGCAGAGCCATAGAGCTGTCCTGGTTCCAGACGGTGGGGGAGTCGGCACTGAG
CGTAGAGCCCTTCTCCTACCAAGGGGAGCCTCACATTGTGCTGGCACAGCCCTTCGCCGGCCGCTGCC
TGATTCTCTCCTGGGACTACAGCCTGCAGCGCTTCCGGCCCGAGGAAGAGCTGCCCGCGGCCTCCGTG
GTGTCCTGCAAGCCACTGGTGCTGGGCCCGAGCCTCTTCGTGCTGGCTGCCCGCCTGTGGGGGGGCTC
ACAGCTGTGGGCCCGGCCCAGTCCCGGCCTGCGCCTGGCCCCAACGCAGACCCTGGCCCCGCGGCGGC
TGCTGCGGCCCAATGACGCCGAGCTCCTGTGGCTGGAAGGGCAACCCTGCTTCGTGGTGGCCGATGCC
TCCAAGGCGGGCAGCACCACGCTGCTGTGCCGCGACGGGCCCGGCTTTTACCCGCACCAGAGCCTGCA
CGCCTGGCACCGGGACACGGACGCTGAGGCCCTGGAGCTGGACGGCCGGCCCCACCTGCTGCTGGCCT
CGGCTTCCCAGCGGCCCGTGCTCTTCCACTGGACCGGTGGCCGCTTCGAGAGACGCACAGACATCCCG
AGGGCCGAGGATGTCTATGCCACACGCCACTTCCAGGCTGGTGGGGACGTGTTCCTGTGCCTCACACG
CTACATTGGGGACTCCATGGTCATGCGCTGGGACGGCTCCATGTTTCGTCTGCTGCAGCAACTTCCCT
CGCGCGGTGCCCACGTCTTCCAGCCACTGCTCATCGCCAGGGACCAGCTGGCCATCCTAGGCAGCGAC
TTCGCCTTCAGCCAGGTCCTCCGCCTTGAGCCTGACAAGGGGCTCCTGGAGCCACTGCAGGAGCTGGG
GCCTCCGGCCCTGGTGGCCCCCCGTGCCTTTGCCCACATCACTATGGCCGGCAGACGCTTCCTCTTTG
CTGCTTGCTTTAAGGGCCCCACACAGATCTACCAGCATCACGAGATCGACCTCAGTGCCTGAGACCAC
CAACGGGACTCTGGGCATGGCTGGGGCCCCTGGACGGCCCCTTGGCTGGCTCCTGGCCCTACTTGGGG
TGATGGCCCGCCTGTGAGCTGCT

| | | | |
|---|---|---|---|
| NOV34b, CG56077-01 | SEQ ID NO:822 | 553 aa | MW at 61118.5 kD |
| Protein Sequence | | | |

MDSPAALRIQGQAGWRSGAVARNLCLYSVLVITEGRQPPKGKCPLRCSCSKDSALCEGSPDLPVSFSP
TLLSLSLVRTGVTQLKAGSFLRIPSLHLLLFTSNSFSVIEDDAFAGLSHLQYLFIEDNEIGSISKNAL
RGLRSLTHLSLANNHLETLPRFLFRGLDTLTNVDLRGNPFQCDCRVLWLLQWMPTVNASVGTGACAGP
ASLSHMQLHHLDPKTFKCRATELSWFQTVGESALSVEPFSYQGEPHIVLAQPFAGRCLILSWDYSLQR
FRPEEELPAASVVSCKPLVLGPSLFVLAARLWGGSQLWARPSPGLRLAPTQTLAPRRLLRPNDAELLW
LEGQPCFVVADASKAGSTTLLCRDGPGFYPHQSLHAWHRDTDAEALELDGRPHLLLASASQRPVLFHW
TGGRFERRTDIPRAEDVYATRHFQAGGDVFLCLTRYIGDSMVMRWDGSMFRLLQQLPSRGAHVFQPLL
IARDQLAILGSDFAFSQVLRLEPDKGLLEPLQELGPPALVAPRAFAHITMAGRRFLFAACFKGPTQIY
QHHEIDLSA

| | | |
|---|---|---|
| NOV34c, CG56077-02 | SEQ ID NO:823 | 1482 bp |
| DNA Sequence | ORF Start: at 1 | ORF Stop: TGA at 1480 |

TCCCGAGACTTTGGAAGTTCTCAGCTATTACTTTATTACATAGGATTTCTGTGTCTTTTCTCATCTCT
TTTCCTTTTGGAAATTGGAAGACCCCCAAAGGGAAAGTGTCCCCTGCGCTGCTCCTGCTCTAAAGACA
GCGCCCTGTGTGAGGGCTCCCCGGACCTGCCCGTCAGCTTCTCTCCGACCCTGCTGTCACTGACTGCC
CACATCCCCAGCTCACTCGTCAGGACGGGAGTCACCCAGCTGAAGGCCGGCAGCTTCCTGAGAATTCC
GTCTCTGCACCTGCTGCTCTTCACCTCCAACTCCTTCTCCGTGATTGAGGACGATGCATTTGCGGGCC
TGTCCCACCTGCAGTACCTGTTCATCGAGGACAATGAGATTGGCTCCATCTCTAAGAATGCCCTCAGA
GGACTTCGCTCGCTTACACACCTGAGCCTGGCCAATAACCATCTGGAGACCCTCCCCAGATTCCTGTT
CCGAGGCCTGGACACCCTTACTCATGTGGACCTCCGCGGGAACCCGTTCCAGTGTGACTGCCGCGTCC
TCTGGCTCCTGCAGTGGATGCCCACCGTGAATGCCAGCGTGGGGACCGGCGCCTGTGCGGGCCCCGCC
TCCCTGAGCCACATGCAGCTCCACCACCTCGACCCCAAGACTTTCAAGTGCACAGCGGCCTCCGTGGT
GTCCTGCAAGCCACTGGTGCTGGGCCCGAGCCTCTTCGTGCTGGCTGCCCGCCTGTGGGGGGGCTCAC
AGCTGTGGGCCCGGCCCAGTCCCGGCCTGCGCCTGGCCCCAACGCAGACCCTGGCCCCGCGGCGGCTG
CTGCGGCCCAATGACGCCGAGCTCCTGTGGCTGGAAGGGCAACCCTGCTTCGTGGTGGCCGATGCCTC
CAAGGCGGGCAGCACCACGTGCAGCGCTTCCGGCCCGAGGAAGAGCTGCCCGAGCCTGCACGCCTGGC
ACCGGGACACGGACGCTGAGGCCCTGGAGCTGGACGGCCGGCCCCACCTGCTGCTGGCCTCGGCTTCC
CAGCGGCCCGTGCTCTTCCACTGGACCGGTGGCCGCTTCGAGAGACGCACGGACATCCCCGAGGCCGA
GGATGTCTATGCCACACGCCACTTCCAGGCTGGTGGGGACGTGTTCCTGTGCCTCACACGCTACATTG
GGGACTCCATGGTCATGCGCTGGGACGGCTCCATGTTTCGTCTGCTGCAGCAACTTCCCTCGCGCGGT
GCCCACGTCTTCCAGCCACTGCTCATCGCCAGGGACCAATTGGCCATCCTAGGCAGCGACTTCGCCTT
CAGCCAGGTCCTCCGCCTTGAGCCTGACAAGGGGCTCCTGGAGCCACTGCAGGAGCTGGGGCCTCTGG
CCCTGGTGGCCCCCCGTGCCTTTGCCCACATCACTATGGCCGGCAGACGCTTCCTCTTTGCTGCTTGC
TTTAAGGGCCCCACACAGATCTACCAGCATCACGAGATCGACCTCAGTGCCTGA

| | | | |
|---|---|---|---|
| NOV34c, CG56077-02 | SEQ ID NO:824 | 493 aa | MW at 54197.8 kD |
| Protein Sequence | | | |

SRDFGSSQLLLYYIGFLCLFSSLFLLEIGRPPKGKCPLRCSCSKDSALCEGSPDLPVSFSPTLLSLTA
HIPSSLVRTGVTQLKAGSFLRIPSLHLLLFTSNSFSVIEDDAFAGLSHLQYLFIEDNEIGSISKNALR
GLRSLTHLSLANNHLETLPRFLFRGLDTLTHVDLRGNPFQCDCRVLWLLQWMPTVNASVGTGACAGPA
SLSHMQLHHLDPKTFKCTAASVVSCKPLVLGPSLFVLAARLWGGSQLWARPSPGLRLAPTQTLAPRRL
LRPNDAELLWLEGQPCFVVADASKAGSTTCSASGPRKSCPSLHAWHRDTDAEALELDGRPHLLLASAS
QRPVLFHWTGGRFERRTDIPEAEDVYATRHFQAGGDVFLCLTRYIGDSMVMRWDGSMFRLLQQLPSRG
AHVFQPLLIARDQLAILGSDFAFSQVLRLEPDKGLLEPLQELGPLALVAPRAFAHITMAGRRFLFAAC
FKGPTQIYQHHEIDLSA

| | | |
|---|---|---|
| NOV34d, CG56077-03 | SEQ ID NO:825 | 741 bp |
| DNA Sequence | ORF Start: at 1 | ORF Stop: end of sequence |

ACGGAGGGAAGACAGCCCCCAAAGGGAAAGTGTCCCCTGCGCTGCTCCTGCTCTAAAGACAGCGCCCT
GTGTGAGGGCTCCCCGGACCTGCCCGTCAGCTTCTCTCCGACCCTGCTGTCACTCTCACTCGTCAGGA
CGGGAGTCACCCAGCTGAAGGCCGGCAGCTTCCTGAGAATTCCGTCTCTGCACCTGCTCCTCTTCACC
TCCAACTCCTTCTCCGTGATTGAGGACGATGCATTTGCGGGCCTGTCCCACCTGCAGTACCTCTTCAT
CGAGGACAATGAGATTGGCTCCATCTCTAAGAATGCCCTCAGAGGACTTCGCTCGCTTACACACCTAA
GCCTGGCCAATAACCATCTGGAGACCCTCCCCAGATTCCTGTTCCGAGGCCTGGACACCCTTACTCAC
GTGGACCTCCGCGGGAACCCGTTCCAGTGTGACTGCCGCGTCCTCTGGCTCCTGCAGTGGATGCCCAC
CGTGAATGCCAGCGTGGGGACCGGCGCCTGTGCGGGCCCCGCCTCCCTGAGCCACATGCAGCTCCACC
ACCTCGACCCCAAGACTTTCAAGTGCAGAGCCATAGAGCTGTCCTGGTTCCAGACGGTGGGGGAGTCG
GCACTGAGCGTAGAGCCCTTCTCCTACCAAGGGGAGCCTCACATTGTGCTGGCACAGCCCTTCGCCGG
CCGCTGCCTGATTCTCTCCTGGGACTACAGCCTGCAGCGCTTCCGGCCCGAGGAAGAGCTG

| | | | |
|---|---|---|---|
| NOV34d, CG56077-03 | SEQ ID NO:826 | 247 aa | MW at 27380.0 kD |
| Protein Sequence | | | |

TEGRQPPKGKCPLRCSCSKDSALCEGSPDLPVSFSPTLLSLSLVRTGVTQLKAGSFLRIPSLHLLLFT
SNSFSVIEDDAFAGLSHLQYLFIEDNEIGSISKNALRGLRSLTHLSLANNHLETLPRFLFRGLDTLTH
VDLRGNPFQCDCRVLWLLQWMPTVNASVGTGACAGPASLSHMQLHHLDPKTFKCRAIELSWFQTVGES
ALSVEPFSYQGEPHIVLAQPFAGRCLILSWDYSLQRFRPEEEL

| | | |
|---|---|---|
| NOV34e, CG56077-04 | SEQ ID NO:827 | 741 bp |
| DNA Sequence | ORF Start: at 1 | ORF Stop: end of sequence |

ACGGAGGGAAGACAGCCCCCAAAGGGAAAGTGTCCCCTGCGCTGCTCCTGCTCTAAAGACAGCGCCCT
CGGGAGTCACCCAGCTGAAGGCCGGCAGCTTCCTGAGAATTCCGTCTCTGCACCTGCTCCTCTTCACC
TCCAACTCCTTCTCCGTGATTGAGGACGATGCATTTGCGGGCCTGTCCCACCTGCAGTACCTCTTCAT
CGAGGACAATGAGATTGGCTCCATCTCTAAGAATGCCCTCAGAGGACTTCGCTCGCTTACACACCTAA
GCCTGGCCAATAACCATCTGGAGACCCTCCCCAGATTCCTGTTCCGAGGCCTGGACACCCTTACTCAC
GTGGACCTCCGCGGGAACCCGTTCCAGTGTGACTGCCGCGTCCTCTGGCTCCTGCAGTGGATGCCCAC
CGTGAATGCCAGCGTGGGGACCGGCGCCTGTGCGGGCCCCGCCTCCCTGAGCCACATGCAGCTCCACC
ACCTCGACCCCAAGACTTTCAAGTGCAGAGCCATAGAGCTGTCCTGGTTCCAGACGGTGGGGGAGTCG
GCACTGAGCGTAGAGCCCTTCTCCTACCAAGGGGAGCCTCACATTGTGCTGGCACAGCCCTTCGCCGG
CCGCTGCCTGATTCTCTCCTGGGACTACAGCCTGCAGCGCTTCCGGCCCGAGGAAGAGCTG

| | | | |
|---|---|---|---|
| NOV34e, CG56077-04 | SEQ ID NO:828 | 247 aa | MW at 27380.0 kD |
| Protein Sequence | | | |

TEGRQPPKGKCPLRCSCSKDSALCEGSPDLPVSFSPTLLSLSLVRTGVTQLKAGSFLRIPSLHLLLFT
SNSFSVIEDDAFAGLSHLQYLFIEDNEIGSISKNALRGLRSLTHLSLANNHLETLPRFLFRGLDTLTH
VDLRGNPFQCDCRVLWLLQWMPTVNASVGTGACAGPASLSHMQLHHLDPKTFKCRAIELSWFQTVGES
ALSVEPFSYQGEPHIVLAQPFAGRCLILSWDYSLQRFRPEEEL

| | | |
|---|---|---|
| NOV34f, CG56077-05 | SEQ ID NO:829 | 741 bp |
| DNA Sequence | ORF Start: at 1 | ORF Stop: end of sequence |

ACGGAGGGAAGACAGCCCCCAAAGGGAAAGTGTCCCCTGCGCTGCTCCTGCTCTAAAGACAGCGCCCT
GTGTGAGGGCTCCCCGGACCTGCCCGTCAGCTTCTCTCCGACCCTGCTGTCACTCTCACTCGTCAGGA
CGGGAGTCACCCAGCTGAAGGCCGGCAGCTTCCTGAGAATTCCGTCTCTGCACCTGCTCCTCTTCACC
TCCAACTCCTTCTCCGTGATTGAGGACGATGCATTTGCGGGCCTGTCCCACCTGCAGTACCTCTTCAT
CGAGGACAATGAGATTGGCTCCATCTCTAAGAATGCCCTCAGAGGACTTCGCTCGCTTACACACCTAA
GCCTGGCCAATAACCATCTGGAGACCCTCCCCAGATTCCTGTTCCGAGGCCTGGACACCCTTACTCAC
GTGGACCTCCGCGGGAACCCGTTCCAGTGTGACTGCCGCGTCCTCTGGCTCCTGCAGTGGATGCCCAC
CGTGAATGCCAGCGTGGGGACCGGCGCCTGTGCGGGCCCCGCCTCCCTGAGCCACATGCAGCTCCACC
ACCTCGACCCCAAGACTTTCAAGTGCAGAGCCATAGAGCTGTCCTGGTTCCAGACGGTGGGGGAGTCG
GCACTGAGCGTAGAGCCCTTCTCCTACCAAGGGGAGCCTCACATTGTGCTGGCACAGCCCTTCGCCGG
CCGCTGCCTGATTCTCTCCTGGGACTACAGCCTGCAGCGCTTCCGGCCCGAGGAAGAGCTG

| | | | |
|---|---|---|---|
| NOV34f, CG56077-05 | SEQ ID NO:830 | 247 aa | MW at 27380.0 kD |
| Protein Sequence | | | |

TEGRQPPKGKCPLRCSCSKDSALCEGSPDLPVSFSPTLLSLSLVRTGVTQLKAGSFLRIPSLHLLLFT
SNSFSVIEDDAFAGLSHLQYLFIEDNEIGSISKNALRGLRSLTHLSLANNHLETLPRFLFRGLDTLTH
VDLRGNPFQCDCRVLWLLQWMPTVNASVGTGACAGPASLSHMQLHHLDPKTFKCRAIELSWFQTVGES
ALSVEPFSYQGEPHIVLAQPFAGRCLILSWDYSLQRFRPEEEL

| | | |
|---|---|---|
| NOV34g, SNP13374715 of | SEQ ID NO:831 | 2106 bp |
| CG56077-06, DNA Sequence | ORF Start: at 1 | ORF Stop: TGA at 1636 |
| | SNP Pos: 1263 | SNP Change: C to T |

TCCCGAGACTTTGGAAGTTCTCAGCTATTACTTTATTACATAGGATTTCTGTGTCTTTTCTCATCTCT
TTTCCTTTTGGAAAGACCCCCAAAGGGAAAGTGTCCCCTGCGCTGCTCCTGCTCTAAAGACAGCGCCC
TGTGTGAGGGCTCCCCGGACCTGCCCGTCAGCTTCTCTCCGACCCTGCTGTCACTGTCACTCGTCAGG
ACGGGAGTCACCCAGCTGAAGGCCGGCAGCTTCCTGAGAATTCCGTCTCTGCACCTGCTGCTCTTCAC
CTCCAACTCCTTCTCCGTGATTGAGGACGATGCATTTGCGGGCCTGTCCCACCTGCAGTACCTGTTCA
TCGAGGACAATGAGATTGGCTCCATCTCTAAGAATGCCCTCAGAGGACTTCGCTCGCTTACACACCTG
AGCCTGGCCAATAACCATCTGGAGACCCTCCCCAGATTCCTGTTCCGAGGCCTGGACACCCTTACTCA
TGTGGACCTCCGCGGGAACCCGTTCCAGTGTGACTGCCGCGTCCTCTGGCTCCTGCAGTGGATGCCCA
CCGTGAATGCCAGCGTGGGGACCGGCGCCTGTGCGGGCCCCGCCTCCCTGAGCCACATGCAGCTCCAC
CACCTCGACCCCAAGACTTTCAAGTGCCCACCCACAGAGCTGTCCTGGTTCCAGACGGTGGGGGAGTC
GGCACTGAGCGTAGAGCCCTTCTCCTACCAAGGGGAGCCTCACATTGTGCTGGCACAGCCCTTCGCCG
GCCGCTGCCTGATTCTCTCCTGGGACTACAGCCTGCAGCGCTTCCGGCCCGAGGAAGAGCTGCCCACA
GCGGCCTCCGTGGTGTCCTGCAAGCCACTGGTGCTGGGCCCGAGCCTCTTCGTGCTGGCTGCCCGCCT
GTGGGGGGGCTCACAGCTGTGGGCCCGGCCCAGTCCCGGCCTGCGCCTGGCCCCAACGCAGACCCTGG
CCCCGCGGCGGCTGCTGCGGCCCAATGACGCCGAGCTCCTGTGGCTGGAAGGGCAACCCTGCTTCGTG
GTGGCCGATGCCTCCAAGGCGGGCAGCACCACGCTGCTGTGCCGCGACGGGCCCGGCTTTTACCCGCA
CCAGAGCCTGCACGCCTGGCACCGGGACACGGACGCTGAGGCCCTGGAGCTGGACGGCCGGCCCCACC
TGCTGCTGGCCTCGGCTTCCCAGCGGCCCGTGCTCTTCCACTGGACCGGTGGCCGCTTCGAGAGACGC
ACGGACATCCCCGAGGCCGAGGATGTCTATGCCACACGTCACTTCCAGGCTGGTGGGGACGTGTTCCT
GTGCCTCACACGCTACATTGGGGACTCCATGGTGATGCGCTGGGACGGCTCCATGTTTCGTCTGCTGC
AGCAACTTCCCTCGCGCGGTGCCCACGTCTTCCAGCCACTGCTCATCGCCAGGGACCAGTTGGCCATC
CTAGGCAGCGACTTCGCCTTCAGCCAGGTCCTCCGCCTTGAGCCTGACAAGGGGCTCCTGGAGCCACT
GCAGGAGCTGGGGCCTCCGGCCCTGGTGGCCCCCCGTGCCTTTGCCCACATCACTATGGCCGGCAGAC
GCTTCCTCTTTGCTGCTTGCTTTAAGGGCCCCACACAGATCTACCAGCATCACGAGATCGACCTCAGT
GCCTGAGACCACCAACGGGACTCTGGGCATGGCTGGGGCCCCTGGACGGCCCCTTGGCTGGCTCCTGG
CCCTACTTGGGGTGATGGTCCGCCTGTGAGCTGCTGACCGTGGGCCACGTTCATCAGCCACACGTCTA
GGCCTTAAGCCCACTTCTTAAAGGATCTGCACCCATGGGGGGACATAGAGGGTCCCAGCCTACTGGAC
CTCCCGAGCTGCCCTTCAGGTCTAAAGCAACATCTGGACATCTCGGCTGGGGCAGATTCCCCATCAAA
GGCAACCTGGGGGGTGCAGGCTGGTGCACTGCATGGAGTCGAGGTGGAGGTCACGTGCAGAGCTCCAT
GAGGTCCCGGAGCCCCCCTCTCAACCCGCTCCTACCCCGCTGGTCCCTCTGAAAGCACCGAGGGGTTG
ATGGCATTCCTTTCCCATTCTAAACTCCACGCAGCCAATCGCTTTCCTGGAGGAGCGCCAACCTCG

| | | | |
|---|---|---|---|
| NOV34g, SNP13374715 of | SEQ ID NO:832 | 545 aa | MW at 60447.7 kD |
| CG56077-06, Protein Sequence | SNP Pos: 421 | | SNP Change: Arg to Arg |

SRDFGSSQLLLYYIGFLCLFSSLFLLERPPKGKCPLRCSCSKDSALCEGSPDLPVSFSPTLLSLSLVR
TGVTQLKAGSFLRIPSLHLLLFTSNSFSVIEDDAFAGLSHLQYLFIEDNEIGSISKNALRGLRSLTHL
SLANNHLETLPRFLFRGLDTLTHVDLRGNPFQCDCRVLWLLQWMPTVNASVGTGACAGPASLSHMQLH
HLDPKTFKCPPTELSWFQTVGESALSVEPFSYQGEPHIVLAQPFAGRCLILSWDYSLQRFRPEEELPT
AASVVSCKPLVLGPSLFVLAARLWGGSQLWARPSPGLRLAPTQTLAPRRLLRPNDAELLWLEGQPCFV
VADASKAGSTTLLCRDGPGFYPHQSLHAWHRDTDAEALELDGRPHLLLASASQRPVLFHWTGGRFERR
TDIPEAEDVYATRHFQAGGDVFLCLTRYIGDSMVMRWDGSMFRLLQQLPSRGABVFQPLLIARDQLAI
LGSDFAFSQVLRLEPDKGLLEPLQELGPPALVAPRAFAHITMAGRRFLFAACFKGPTQIYQ
HHEIDLSA

| | | |
|---|---|---|
| NOV34h, SNP13374714 of | SEQ ID NO:833 | 2106 bp |
| CG56077-06, DNA Sequence | ORF Start: at 1 | ORF Stop: TGA at 1636 |
| | SNP Pos: 1402 | SNP Change: C to T |

TCCCGAGACTTTGGAAGTTCTCAGCTATTACTTTATTACATAGGATTTCTGTGTCTTTTCTCATCTCT
TTTCCTTTTGGAAAGACCCCCAAAGGGAAAGTGTCCCCTGCGCTGCTCCTGCTCTAAAGACAGCGCCC
TGTGTGAGGGCTCCCCGGACCTGCCCGTCAGCTTCTCTCCGACCCTGCTGTCACTGTCACTCGTCAGG
ACGGGAGTCACCCAGCTGAAGGCCGGCAGCTTCCTGAGAATTCCGTCTCTGCACCTGCTGCTCTTCAC
CTCCAACTCCTTCTCCGTGATTGAGGACGATGCATTTGCGGGCCTGTCCCACCTGCAGTACCTGTTCA
TCGAGGACAATGAGATTGGCTCCATCTCTAAGAATGCCCTCAGAGGACTTCGCTCGCTTACACACCTG
AGCCTGGCCAATAACCATCTGGAGACCCTCCCCAGATTCCTGTTCCGAGGCCTGGACACCCTTACTCA
TGTGGACCTCCGCGGGAACCCGTTCCAGTGTGACTGCCGCGTCCTCTGGCTCCTGCAGTGGATGCCCA
CCGTGAATGCCAGCGTGGGGACCGGCGCCTGTGCGGGCCCCGCCTCCCTGAGCCACATGCAGCTCCAC
CACCTCGACCCCAAGACTTTCAAGTGCCCACCCACAGAGCTGTCCTGGTTCCAGACGGTGGGGGAGTC
GGCACTGAGCGTAGAGCCCTTCTCCTACCAAGGGGAGCCTCACATTGTGCTGGCACAGCCCTTCGCCG
GCCGCTGCCTGATTCTCTCCTGGGACTACAGCCTGCAGCGCTTCCGGCCCGAGGAAGAGCTGCCCACA
GCGGCCTCCGTGGTGTCCTGCAAGCCACTGGTGCTGGGCCCGAGCCTCTTCGTGCTGGCTGCCCGCCT
GTGGGGGGGCTCACAGCTGTGGGCCCGGCCCAGTCCCGGCCTGCGCCTGGCCCCAACGCAGACCCTGG
CCCCGCGGCGGCTGCTGCGGCCCAATGACGCCGAGCTCCTGTGGCTGGAAGGGCAACCCTGCTTCGTG
GTGGCCGATGCCTCCAAGGCGGGCAGCACCACGCTGCTGTGCCGCGACGGGCCCGGCTTTTACCCGCA
CCAGAGCCTGCACGCCTGGCACCGGGACACGGACGCTGAGGCCCTGGAGCTGGACGGCCGGCCCCACC
TGCTGCTGGCCTCGGCTTCCCAGCGGCCCGTGCTCTTCCACTGGACCGGTGGCCGCTTCGAGAGACGC
ACGGACATCCCCGAGGCCGAGGATGTCTATGCCACACGCCACTTCCAGGCTGGTGGGGACGTGTTCCT
GTGCCTCACACGCTACATTGGGGACTCCATGGTGATGCGCTGGGACGGCTCCATGTTTCGTCTGCTGC
AGCAACTTCCCTCGCGCGGTGCCCACGTCTTCCAGCCACTGTTCATCGCCAGGGACCAGTTGGCCATC
CTAGGCAGCGACTTCGCCTTCAGCCAGTCCTCCGCCTTGAGCCTGACAAGGGGCTCCTGGAGGCCACT
GCAGGAGCTGGGGCCTCCGGCCCTGGTGGCCCCCCGTGCCTTTGCCCACATCACTATGGCCGGCAGAC
GCTTCCTCTTTGCTGCTTGCTTTAAGGGCCCCACACAGATCTACCAGCATCACGAGATCGACCTCAGT
GCCTGAGACCACCACCGGGACTCTGGGCATGGCTGGGGCCCCTGGACGGCCCCTTGGCTGGCTCCTGG
CCCTACTTGGGGTGATGGTCCGCCTGTGAGCTGCTGACCGTGGGCCACGTTCATCAGCCACACGTCTA
GGCCTTAAGCCCACTTCTTAAAGGATCTGCACCCATGGGGGGACATAGAGGGTCCCAGCCTACTGGAC
CTCCCGAGCTGCCCTTCAGGTCTAAAGCAACATCTGGACATCTCGGCTGGGGCAGATTCCCCATCAAA
GGCAACCTGGGGGGTGCAGGCTGGTGCACTGCATGGAGTCGAGGTGGAGGTCACGTGCAGAGCTCCAT
GAGGTCCCGGAGCCCCCCTCTCAACCCGCTCCTACCCCGCTGGTCCCTCTGAAAGCACCGAGGGGTTG
ATGGCATTCCTTTCCCATTCTAAACTCCACGCAGCCAATCGCTTTCCTGGAGGAGCGCCAACCTCG

| | | | |
|---|---|---|---|
| NOV34h, SNP13374714 of | SEQ ID NO:834 | 545 aa | MW at 60481.7 kD |
| CG56077-06, Protein Sequence | SNP Pos: 468 | | SNP Change: Leu to Phe |

SRDFGSSQLLLYYIGFLCLFSSLFLLERPPKGKCPLRCSCSKDSALCEGSPDLPVSFSPTLLSLSLVR
TGVTQLKAGSFLRIPSLHLLLFTSNSFSVIEDDAFAGLSHLQYLFIEDNEIGSISKNALRGLRSLTHL
SLANNHLETLPRFLFRGLDTLTHVDLRGNPFQCDCRVLWLLQWMPTVNASVGTGACAGPASLSHMQLH
HLDPKTFKCPPTELSWFQTVGESALSVEPFSYQGEPHIVLAQPFAGRCLILSWDYSLQRFRPEEELPT
AASVVSCKPLVLGPSLFVLAARLWGGSQLWARPSPGLRLAPTQTLAPRRLLRPNDAELLWLEGQPCFV
VADASKAGSTTLLCRDGPGFYPHQSLHAWHRDTDAEALELDGRPHLLLASASQRPVLFHWTGGRFERR
TDIPEAEDVYATRHFQAGGDVFLCLTRYIGDSMVMRWDGSMFRLLQQLPSRGAHVFQPLFIARDQLAI
LGSDFAFSQVLRLEPDKGLLEPLQELGPPALVAPRAFAHITMAGRRFLFAACFKGPTQIYQ
HHEIDLSA

[0549] A ClustalW comparison of the above protein sequences yields the following sequence alignment shown in Table 34B.

TABLE 34B
Comparison of the NOV34 protein sequences.

| | | |
|---|---|---|
| NOV34a | ------------------------------SRDFGSSQLLLYYIGFLCLFSSLFLLERPP | (SEQ ID NO:820) |
| NOV34b | MDSPAALRIQGQAGWRSGAVARNLCLYSVLVITEG---------------------RQPP | (SEQ ID NO:822) |
| NOV34c | ----------------------------SRDFGSSQLLLYYIGFLCLFSSLFLLEIGRPP | (SEQ ID NO:824) |
| NOV34d | --------------------------------TEG---------------------RQPP | (SEQ ID NO:826) |
| NOV34e | --------------------------------TEG---------------------RQPP | (SEQ ID NO:828) |
| NOV34f | --------------------------------TEG---------------------RQPP | (SEQ ID NO:830) |
| NOV34a | KGKCPLRCSCSKDSALCEGSPDLPVSFSPTLLSL------SLVRTGVTQLKAGSFLRIPS | |
| NOV34b | KGKCPLRCSCSKDSALCEGSPDLPVSFSPTLLSL------SLVRTGVTQLKAGSFLRIPS | |
| NOV34c | KGKCPLRCSCSKDSALCEGSPDLPVSFSPTLLSLTAHIPSSLVRTGVTQLKAGSFLRIPS | |
| NOV34d | KGKCPLRCSCSKDSALCEGSPDLPVSFSPTLLSL------SLVRTGVTQLKAGSFLRIPS | |
| NOV34e | KGKCPLRCSCSKDSALCEGSPDLPVSFSPTLLSL------SLVRTGVTQLKAGSFLRIPS | |
| NOV34f | KGKCPLRCSCSKDSALCEGSPDLPVSFSPTLLSL------SLVRTGVTQLKAGSFLRIPS | |
| NOV34a | LHLLLFTSNSFSVIEDDAFAGLSHLQYLFIEDNEIGSISKNALRGLRSLTHLSLANNHLE | |
| NOV34b | LHLLLFTSNSFSVIEDDAFAGLSHLQYLFIEDNEIGSISKNALRGLRSLTHLSLANNHLE | |
| NOV34c | LHLLLFTSNSFSVIEDDAFAGLSHLQYLFIEDNEIGSISKNALRGLRSLTHLSLANNHLE | |
| NOV34d | LHLLLFTSNSFSVIEDDAFAGLSHLQYLFIEDNEIGSISKNALRGLRSLTHLSLANNHLE | |
| NOV34e | LHLLLFTSNSFSVIEDDAFAGLSHLQYLFIEDNEIGSISKNALRGLRSLTHLSLANNHLE | |
| NOV34f | LHLLLFTSNSFSVIEDDAFAGLSHLQYLFIEDNEIGSISKNALRGLRSLTHLSLANNHLE | |
| NOV34a | TLPRFLFRGLDTLTHVDLRGNPFQCDCRVLWLLQWMPTVNASVGTGACAGPASLSHMQLH | |
| NOV34b | TLPRFLFRGLDTLTHVDLRGNPFQCDCRVLWLLQWMPTVNASVGTGACAGPASLSHMQLH | |
| NOV34c | TLPRFLFRGLDTLTHVDLRGNPFQCDCRVLWLLQWMPTVNASVGTGACAGPASLSHMQLH | |
| NOV34d | TLPRFLFRGLDTLTHVDLRGNPFQCDCRVLWLLQWMPTVNASVGTGACAGPASLSHMQLH | |
| NOV34e | TLPRFLFRGLDTLTHVDLRGNPFQCDCRVLWLLQWMPTVNASVGTGACAGPASLSHMQLH | |
| NOV34f | TLPRFLFRGLDTLTHVDLRGNPFQCDCRVLWLLQWMPTVNASVGTGACAGPASLSHMQLH | |
| NOV34a | HLDPKTFKCPP-----------------------------------TELSWFQTVGESAL | |
| NOV34b | HLDPKTFKCRA-----------------------------------IELSWFQTVGESAL | |
| NOV34c | HLDPKTFKCTAASVVSCKPLVLGPSLFVLAARLWGGSQLWARPSPGLRLAPTQTLAPRRL | |
| NOV34d | HLDPKTFKCRA-----------------------------------IELSWFQTVGESAL | |
| NOV34e | HLDPKTFKCRA-----------------------------------IELSWFQTVGESAL | |
| NOV34f | HLDPKTFKCRA-----------------------------------IELSWFQTVGESAL | |
| NOV34a | S-------------------------------------------------VEPFSYQGEP | |
| NOV34b | S-------------------------------------------------VEPFSYQGEP | |
| NOV34c | LRPNDAELLWLEGQPCFVVADASKAGSTTCSASGPRKSCPSLHAWHRDTDAEALELDGRP | |
| NOV34d | S-------------------------------------------------VEPFSYQGEP | |
| NOV34e | S-------------------------------------------------VEPFSYQGEP | |
| NOV34f | S-------------------------------------------------VEPFSYQGEP | |
| NOV34a | HIVLAQP--------------------------------------------FAGRCLILS | |
| NOV34b | HIVLAQP--------------------------------------------FAGRCLILS | |
| NOV34c | HLLLASASQRPVLFHWTGGRFERRTDIPEAEDVYATRHFQAGGDVFLCLTRYIGDSMVMR | |
| NOV34d | HIVLAQP--------------------------------------------FAGRCLILS | |
| NOV34e | HIVLAQP--------------------------------------------FAGRCLILS | |
| NOV34f | HIVLAQP--------------------------------------------FAGRCLILS | |
| NOV34a | WDYSLQRFR--------------------------------------------PEEELPT | |
| NOV34b | WDYSLQRFR--------------------------------------------PEEELPA | |
| NOV34c | WDGSMFRLLQQLPSRGAHVFQPLLIARDQLAILGSDFAFSQVLRLEPDKGLLEPLQELGP | |
| NOV34d | WDYSLQRFR--------------------------------------------PEEEL-- | |
| NOV34e | WDYSLQRFR--------------------------------------------PEEEL-- | |
| NOV34f | WDYSLQRFR--------------------------------------------PEEEL-- | |
| NOV34a | AASVVSCKPLVLGPSLFVLAARLWGGSQLWARPSPGLRLAPTQTLAPRRLLRPNDAELLW | |
| NOV34b | ASVVSCKPLVLGPSLFVLAARLWGGSQLWARPSPGLRLAPTQTLAPRRLLRPNDAELLWL | |
| NOV34c | LALVAPRAFAHITMAGRRFLFAACFKGPTQIYQHHEIDLSA------------------- | |
| NOV34d | ------------------------------------------------------------ | |
| NOV34e | ------------------------------------------------------------ | |
| NOV34f | ------------------------------------------------------------ | |
| NOV34a | LEGQPCFVVADASKAGSTTLLCRDGPGFYPHQSLHAWHRDTDAEALELDGRPHLLLASAS | |
| NOV34b | EGQPCFVVADASKAGSTTLLCRDGPGFYPHQSLHAWHRDTDAEALELDGRPHLLLASASQ | |
| NOV34c | ------------------------------------------------------------ | |
| NOV34d | ------------------------------------------------------------ | |
| NOV34e | ------------------------------------------------------------ | |
| NOV34f | ------------------------------------------------------------ | |
| NOV34a | QRPVLFHWTGGRFERRTDIPEAEDVYATRHFQAGGDVFLCLTRYIGDSMVMRWDGSMFRL | |
| NOV34b | RPVLFHWTGGRFERRTDIPRAEDVYATRHFQAGGDVFLCLTRYIGDSMVMRWDGSMFRLL | |
| NOV34c | ------------------------------------------------------------ | |
| NOV34d | ------------------------------------------------------------ | |
| NOV34e | ------------------------------------------------------------ | |
| NOV34f | ------------------------------------------------------------ | |
| NOV34a | LQQLPSRGAHVFQPLLIARDQLAILGSDFAFSQVLRLEPDKGLLEPLQELGPPALVAPRA | |
| NOV34b | QQLPSRGAHVFQPLLIARDQLAILGSDFAFSQVLRLEPDKGLLEPLQELGPPALVAPRAF | |
| NOV34c | ------------------------------------------------------------ | |
| NOV34d | ------------------------------------------------------------ | |
| NOV34e | ------------------------------------------------------------ | |
| NOV34f | ------------------------------------------------------------ | |
| NOV34a | FAHITMAGRPFLFAACFKGPTQIYQHHEIDLSA | |
| NOV34b | AHITMAGRRFLFAACFKGPTQIYQHHEIDLSA- | |
| NOV34c | --------------------------------- | |
| NOV34d | --------------------------------- | |
| NOV34e | --------------------------------- | |
| NOV34f | --------------------------------- | |

[0550] Further analysis of the NOV34a protein yielded the following properties shown in Table 34C.

TABLE 34C
Protein Sequence Properties NOV34a

| | |
|---|---|
| SignalP analysis: | Cleavage site between residues 26 and 27 |
| PSORT II analysis: | |

| PSG: | a new signal peptide prediction method | |
|---|---|---|
| | N-region: | length 3; pos. chg 1; neg. chg 1 |
| | H-region: | length 23; peak value 10.35 |
| | PSG score: | 5.95 |

| | |
|---|---|
| GvH: | von Heijne's method for signal seq. recognition |
| | GvH score (threshold: −2.1): −5.07 |
| | possible cleavage site: between 25 and 26 |

>>> Seems to have no N-terminal signal peptide

| ALOM: | Klein et al's method for TM region allocation | | |
|---|---|---|---|
| | Init position for calculation: 1 | | |
| | Tentative number of TMS(s) for the threshold 0.5: 2 | | |
| | Number of TMS(s) for threshold 0.5: 1 | | |
| | INTEGRAL | Likelihood = | Transmembrane 9-25 |
| | | −5.57 | |

| | |
|---|---|
| PERIPHERAL | Likelihood = 2.70 (at 82) |

| | |
|---|---|
| | ALOM score: −5.57 (number of TMSs: 1) |
| MTOP: | Prediction of membrane topology (Hartmann et al.) |
| | Center position for calculation: 16 |
| | Charge difference: 2.0 C(3.0)-N(1.0) |
| | C > N: C-terminal side will be inside |

>>>Caution: Inconsistent mtop result with signal peptide
>>> membrane topology: type 1b (cytoplasmic tail 9 to 545)

| MITDISC: | discrimination of mitochondrial targeting seq | | | |
|---|---|---|---|---|
| | R content: | 1 | Hyd Moment(75): | 11.37 |
| | Hyd Moment(95): | 7.33 | G content: | 2 |
| | D/E content: | 2 | S/T content: | 5 |

| | |
|---|---|
| | Score: −4.71 |
| Gavel: | prediction of cleavage sites for mitochondrial preseq |
| | R-2 motif at 47 LRC\|SC |

NUCDISC: discrimination of nuclear localization signals

| | |
|---|---|
| | pat4: none |
| | pat7: none |
| | bipartite: none |
| | content of basic residues: 8.8% |
| | NLS Score: −0.47 |
| KDEL: | ER retention motif in the C-terminus: none |

ER Membrane Retention Signals:

XXRR-like motif in the N-terminus: RDFG

none
SKL: peroxisomal targeting signal in the C-terminus: none
PTS2: 2nd peroxisomal targeting signal: none
VAC: possible vacuolar targeting motif: none
RNA-binding motif: none
Actinin-type actin-binding motif:

type 1: none
type 2: none

NMYR: N-myristoylation pattern: none
Prenylation motif: none
memYQRL: transport motif from cell surface to Golgi: none
Tyrosines in the tail: too long tail
Dileucine motif in the tail: found

LL at 9
LL at 10
LL at 25
LL at 61
LL at 87
LL at 88
LL at 176
LL at 322
LL at 330
LL at 352
LL at 386
LL at 387

checking 63 PROSITE DNA binding motifs:

Leucine zipper pattern (PS00029): *** found ***
LSLANNHLETLPRFLFRGLDTL at 136

none
checking 71 PROSITE ribosomal protein motifs: none
checking 33 PROSITE prokaryotic DNA binding motifs: none

| | |
|---|---|
| NNCN: | Reinhardt's method for Cytoplasmic/Nuclear discrimination |
| | Prediction: cytoplasmic |
| | Reliability: 89 |
| COIL: | Lupas's algorithm to detect coiled-coil regions |
| | total: 0 residues |

Final Results (k = 9/23):

```
34.8%: nuclear
21.7%: mitochondrial
21.7%: cytoplasmic
  8.7%: vesicles of secretory system
  4.3%: vacuolar
  4.3%: endoplasmic reticulum
  4.3%: peroxisomal
```

>> prediction for CG56077-06 is nuc (k = 23)

[0551] A search of the NOV34a protein against the Geneseq database, a proprietary database that contains sequences published in patents and patent publication, yielded several homologous proteins shown in Table 34D.

TABLE 34D
Geneseq Results for NOV34a

| | | NOV34a | Identities/ | |
|---|---|---|---|---|
| | | Residues/ | Similarities for | |
| Geneseq | Protein/Organism/Length | Match | the Matched | Expect |
| Identifier | [Patent #, Date] | Residues | Region | Value |
| ABB09515 | Leu-rich glioma-inactivated protein-like | 17 . . . 545 | 518/531 (97%) | 0.0 |
| | NOV7a protein, SEQ ID NO: 28 - Homo | 24 . . . 553 | 521/531 (97%) | |
| | sapiens, 553 aa. [WO200253742-A2, | | | |
| | 11-JUL-2002] | | | |
| ABB98246 | Human CGDD SEQ ID NO 4 - Homo | 5 . . . 545 | 519/541 (95%) | 0.0 |
| | sapiens, 537 aa. [WO200248368-A2, | 3 . . . 537 | 523/541 (95%) | |
| | 20-JUN-2002] | | | |
| AAE25347 | Human LP polypeptide, LP188 - Homo | 5 . . . 545 | 519/541 (95%) | 0.0 |
| | sapiens, 537 aa. [WO200248361-A2, | 3 . . . 537 | 523/541 (95%) | |
| | 20-JUN-2002] | | | |
| ABG91403 | Primate LP286 - Mammalia, 513 aa. | 5 . . . 545 | 495/541 (91%) | 0.0 |
| | [WO200263009-A2, 15-AUG-2002] | 3 . . . 513 | 499/541 (91%) | |
| ABU11596 | Human MDDT polypeptide SEQ ID 543 - | 55 . . . 545 | 482/493 (97%) | 0.0 |
| | Homo sapiens, 567 aa. | 76 . . . 567 | 483/493 (97%) | |
| | [WO200279449-A2, 10-OCT-2002] | | | |

[0552] In a BLAST search of public sequence databases, the NOV34a protein was found to have homology to the proteins shown in the BLASTP data in Table 34E.

TABLE 34E
Public BLASTP Results for NOV34a

| | | NOV34a | Identities/ | |
|---|---|---|---|---|
| Protein | | Residues/ | Similarities for | |
| Accession | | Match | the Matched | Expect |
| Number | Protein/Organism/Length | Residues | Portion | Value |
| Q8N135 | LGI4 (Leucine-rich glioma inactivated | 5 . . . 545 | 519/541 (95%) | 0.0 |
| | protein 4) (LGI1-like protein 3) - Homo | 3 . . . 537 | 523/541 (95%) | |
| | sapiens (Human), 537 aa. | | | |
| Q8K1S1 | LGI1-like protein 3 - Mus musculus | 16 . . . 545 | 460/530 (86%) | 0.0 |
| | (Mouse), 537 aa. | 9 . . . 537 | 491/530 (91%) | |
| Q8K4Y8 | Leucine-rich glioma inactivated | 16 . . . 545 | 458/530 (86%) | 0.0 |
| | protein 4 - Mus musculus (Mouse), | 9 . . . 537 | 489/530 (91%) | |
| | 537 aa. | | | |
| Q9JIA1 | Leucine-rich glioma-inactivated 1 | 1 . . . 545 | 275/556 (49%) | e−152 |
| | protein - Mus musculus (Mouse), 557 aa. | 6 . . . 557 | 375/556 (66%) | |
| Q8K4Y5 | Leucine-rich glioma inactivated | 16 . . . 545 | 270/540 (50%) | e−151 |
| | protein 1 - Rattus norvegicus (Rat), | 22 . . . 557 | 367/540 (67%) | |
| | 557 aa. | | | |

[0553] PFam analysis predicts that the NOV34a protein contains the domains shown in the Table 34F.

TABLE 34F
Domain Analysis of NOV34a

| | | | |
|---|---|---|---|
| | | Identities/ | |
| | | Similarities for | |
| Pfam | NOV34a | the Matched | Expect |
| Domain | Match Region | Region | Value |

| | | | | |
|---|---|---|---|---|
| LRR | 108 . . . 131 | 7/25 | (28%) | 0.099 |
| | | 21/25 | (84%) | |
| LRR | 132 . . . 155 | 10/25 | (40%) | 0.058 |
| | | 20/25 | (80%) | |
| LRRCT | 165 . . . 214 | 21/54 | (39%) | 1.1e−10 |
| | | 36/54 | (67%) | |
| EPTP | 222 . . . 354 | 30/147 | (20%) | 1.7e−07 |
| | | 73/147 | (50%) | |
| EPTP | 405 . . . 537 | 58/144 | (40%) | 8e−39 |
| | | 90/144 | (62%) | |

### Example 35

[0554] The NOV35 clone was analyzed, and the nucleotide and encoded polypeptide sequences are shown in Table 35A.

TABLE 35A
NOV35 Sequence Analysis

| | | |
|---|---|---|
| NOV35a, CG56110-03 | SEQ ID NO:835 | 874 bp |
| DNA Sequence | ORF Start: ATG at 1 | ORF Stop: TAA at 871 |

ATGAGGATATTTGCTGTCTTTATATTCATGACCTACTGGCATTTGCTGAACGCATTTACTGTCACGGT
TCCCAAGGACCTATATGTGGTAGAGTATGGTAGCAATATGACAATTGAATGCAAATTCCCAGTAGAAA
AACAATTAGACCTGGCTGCACTAATTGTCTATTGGGAAATGGAGGATAAGAACATTATTCAATTTGTG
CATGGAGAGGAAGACCTGAAGGTTCAGCATAGTAGCTACAGACAGAGGGCCCGGCTGTTGAAGGACCA
GCTCTCCCTGGGAAATGCTGCACTTCAGATCACAGATGTGAAATTGCAGGATGCAGGGGTGTACCGCT
GCATGATCAGCTATGGTGGTGCCGACTACAAGCGAATTACTGTGAAAGTCAATGCCCCATACAACAAA
ATCAACCAAAGAATTTTGGTTGTGGATCCAGTCACCTCTGAACATGAACTGACATGTCAGGCTGAGGG
CTACCCCAAGGCCGAAGTCATCTGGACAAGCAGTGACCATCAAGTCCTGAGTGGTAAGACCACCACCA
CCAATTCCAAGAGAGAGGAGAAGCTTTTCAATGTGACCAGCACACTGAGAATCAACACAACAACTAAT
GAGATTTTCTACTGCACTTTTAGGAGATTAGATCCTGAGGAAAACCATACAGCTGAATTGGTCATCCC
AGAACTACCTCTGGCACATCCTCCAAATGAAAGGACTCACTTGGTAATTCTGGGAGCCATCTTATTAT
GCCTTGGTGTAGCACTGACATTCATCTTCCGTTTAAGAAAAGGGAGAATGATGGATGTGAAAAAATGT
GGCATCCAAGATACAAACTCAAAGAAGCAAAGTGATACACATTTGGAGGAGACGTAAA

| | | | |
|---|---|---|---|
| NOV35a, CG56110-03 | SEQ ID NO:835 | 290 aa | MW at 33275.0 kD |
| Protein Sequence | | | |

MRIFAVFIFMTYWHLLNAFTVTVPKDLYVVEYGSNMTIECKFPVEKQLDLAALIVYWEMEDKNIIQFV
HGEEDLKVQHSSYRQHARLLKDQLSLGNAALQITDVKLQDAGVYRCMISYGGADYKRITVKVNAPYNK
INQRILVVDPVTSEHELTCQAEGYPKAEVIWTSSDHQVLSGKTTTTNSKREEKLFNVTSTLRINTTTN
EIFYCTFRRLDPEENHTAELVIPELPLAHPPNERTHLVILGAILLCLGVALTFIFRLRKGRMMDVKKC
GIQDTNSKKQSDTHLEET

| | | |
|---|---|---|
| NOV35b, CG56110-07 | SEQ ID NO:837 | 720 bp |
| DNA Sequence | ORF Start: ATG at 3 | ORF Stop: TAG at 510 |

TCATGACCTACTGGCATTTGCTGAACGCATTTACTGTCACGGTTCCCAAGGACCTATATGTGGTAGAG
TATGGTAGCAATATGACAATTGAATGCAAATTCCCAGTAGAAAAACAATTAGACCTGGCTGCACTAAT
TGTCTATTGGGAAATGGAGGATAAGAACATTATTCAATTTGTGCATGGAGAGGAAGACCTGAAGGTTC
AGCATAGTAGCTACAGACAGAGGGCCCGGCTGTTGAAGGACCAGCTCTCCCTGGGAAATGCTGCACTT
CAGATCACAGATGTGAAATTGCAGGATGCAGGGGTGTACCGCTGCATGATCAGCTATGGTGGTGCCGA
CTACAAGCGAATTACTGTGAAAGTCAATGCCCCATACAACAAAATCAACCAAAGAATTTTGGTTGTGG
ATCCAGTCACCTCTGAACATGAACTGACATGTCAGGCTGAGGGCTACCCCAAGGCCGAAGTCATCTGG
ACAAGCAGTGACCATCAAGTCCTGAGTGGAGATTAGATCCTGAGGAAAACCATACAGCTGAATTGGTC
ATCCCAGAACTACCTCTGGCACATCCTCCAAATGAAAGGACTCACTTGGTAATTCTGGGAGCCATCTT
ATTATGCCTTGGTGTAGCACTGACATTCATCTTCCGTTTAAGAAAAGGGAGAATGATGGATGTGAAAA
AATGTGGCATCCAAGATACAAACTCAAAGAAGCAAAGTGG

| | | | |
|---|---|---|---|
| NOV35b, CG56110-07 | SEQ ID NO:838 | 169 aa | MW at 19327.9 kD |
| Protein Sequence | | | |

MTYWHLLNAFTVTVPKDLYVVEYGSNMTIECKFPVEKQLDLAALIVYWEMEDKNIIQFVHGEEDLKVQ
HSSYRQRARLLKDQLSLGNAALQITDVKLQDAGVYRCMISYGGADYKRITVKVNAPYNKINQRILVVD
PVTSEHELTCQAEGYPKARVIWTSSDHQVLSGD

| | | |
|---|---|---|
| NOV35c, 274082305 | SEQ ID NO:839 | 900 bp |
| DNA Sequence | ORF Start: at 2 | ORF Stop: TAA at 887 |

CACCAGATCTCCCACCATGAGGATATTTGCTGTCTTTATATTCATGACCTACTGGCATTTGCTGAACG
CATTTACTGTCACGGTTCCCAAGGACCTATATGTGGTAGAGTATGGTAGCAATATGACAATTGAATGC
AAATTCCCAGTAGAAAAACAATTAGACCTGGCTGCACTAATTGTCTATTGGGAAATGGAGGATAAGAA
CATTATTCAATTTGTGCATGGAGAGGAAGACCTGAAGGTTCAGCATAGTAGCTACAGACAGAGGGCCC
GGCTGTTGAAGGACCAGCTCTCCCTGGGAAATGCTGCACTTCAGATCACAGATGTGAAATTGCAGGAT
GCAGGGGTGTACCGCTGCATGATCAGCTATGGTGGTGCCGACTACAAGCGAATTACTGTGAAAGTCAA
TGCCCCATACAACAAAATCAACCAAAGAATTTTGGTTGTGGATCCAGTCACCTCTGAACATGAACTGA
CATGTCAGGCTGAGGGCTACCCCAAGGCCGAAGTCATCTGGACAAGCAGTGACCATCAAGTCCTGAGT
GGTAAGACCACCACCACCAATTCCAAGAGAGAGGAGAAGCTTTTCAATGTGACCAGCACACTGAGAAT
CAACACAACAACTAATGAGATTTTCTACTGCACTTTTAGGAGATTAGATCCTGAGGAAAACCATACAG
CTGAATTGGTCATCCCAGAACTACCTCTGGCACATCCTCCAAATGAAAGGACTCACTTGGTAATTCTG
GGAGCCATCTTATTATGCCTTGGTGTAGCACTGACATTCATCTTCCGTTTAAGAAAAGGGAGAATGAT
GGATGTGAAAAAATGTGGCATCCAAGATACAAACTCAAAGAAGCAAAGTGATACACATTTGGAGGAGA
CGTAAAGTCGACGGCC

| | | | |
|---|---|---|---|
| NOV35c, 274082305 | SEQ ID NO:840 | 295 aa | MW at 33817.6 kD |
| Protein Sequence | | | |

TRSPTMRIFAVFIFMTYWHLLNAFTVTVPKDLYVVEYGSNMTIECKFPVEKQLDLAALIVYWEMEDKN
IIQFVHGEEDLKVQHSSYRQRARLLKDQLSLGNAALQITDVKLQDAGVYRCMISYGGADYKRITVKVN
APYNKINQRILVVDPVTSEHELTCQAEGYPKAEVIWTSSDHQVLSGKTTTTNSKREEKLFNVTSTLRI
NTTTNEIFYCTFRRLDPEENHTAELVIPELPLAHPPNERTHLVILGAILLCLGVALTFIFRLRKGRMM
DVKKCGIQDTNSKKQSDTHLEET

| | | |
|---|---|---|
| NOV35d, CG56110-01 | SEQ ID NO:841 | 873 bp |
| DNA Sequence | ORF Start: ATG at 1 | ORF Stop: TAA at 871 |

ATGAGGATATTTGCTGTCTTTATATTCATGACCTACTGGCATTTGCTGAACGCATTTACTGTCACGGT
TCCCAAGGACCTATATGTGGTAGAGTATGGTAGCAATATGACAATTGAATGCAAATTCCCAGTAGAAA
AACAATTAGACCTGGCTGCACTAATTGTCTATTGGGAAATGGAGGATAAGAACATTATTCAATTTGTG
CATGGAGAGGAAGACCTGAAGGTTCAGCATAGTAGCTACAGACAGAGGGCCCGGCTGTTGAAGGACCA
GCTCTCCCTGGGAAATGCTGCACTTCAGATCACAGATGTGAAATTGCAGGATGCAGGGGTGTACCGCT
GCATGATCAGCTATGGTGGTGCCGACTACAAGCGAATTACTGTGAAAGTCAATGCCCCATACAACAAA
ATCAACCAAAGAATTTTGGTTGTGGATCCAGTCACCTCTGAACATGAACTGACATGTCAGGCTGAGGG
CTACCCCAAGGCCGAAGTCATCTGGACAAGCAGTGACCATCAAGTCCTGAGTGGTAAGACCACCACCA
CCAATTCCAAGAGAGAGGAGAAGCTTTTCAATGTGACCAGCACACTGAGAATCAACACAACAACTAAT
GAGATTTTCTACTGCACTTTTAGGAGATTAGATCCTGAGGAAAACCATACAGCTGAATTGGTCATCCC
AGAACTACCTCTGGCACATCCTCCAAATGAAAGGACTCACTTGGTAATTCTGGGAGCCATCTTATTAT
GCCTTGGTGTAGCACTGACATTCATCTTCCGTTTAAGAAAAGGGAGAATGATGGATGTGAAAAAATGT
GGCATCCAAGATACAAACTCAAAGAAGCAAAGTGATACACATTTGGAGGAGACGTAA

| | | | |
|---|---|---|---|
| NOV35d, CG56110-01 | SEQ ID NO:842 | 290 aa | MW at 33275.0 kD |
| Protein Sequence | | | |

MRIFAVFIFMTYWHLLNAFTVTVPKDLYVVEYGSNMTIECKFPVEKQLDLAALIVYWEMEDKNIIQFV
HGEEDLKVQHSSYRQRAELLKDQLSLGNAALQITDVKLQDAGVYRCMISYGGADYKRITVKVNAPYNK
INQRILVVDPVTSEHELTCQAEGYPKAEVIWTSSDHQVLSGKTTTTNSKREEKLFNVTSTLRINTTTN
EIFYCTFRRLDPEENHTAELVIPELPLAHPPNERTHLVILGAILLCLGVALTFIFRLRKGRNMDVKKC
GIQDTNSKKQSDTHLEET

| | | |
|---|---|---|
| NOV35e, CG56110-02 | SEQ ID NO:843 | 666 bp |
| DNA Sequence | ORF Start: at 1 | ORF Stop: end of sequence |

TTTACTGTCACGGTTCCCAAGGACCTATATGTGGTAGAGTATGGTAGCAATATGACAATTGAATGCAA
ATTCCCAGTAGAAAAACAATTAGACCTGGCTGCACTAATTGTCTATTGGGAAATGGAGGATAAGAACA
TTATTCAATTTGTGCATGGAGAGGAAGACCTGAAGGTTCAGCATAGTAGCTACAGACAGAGGGCCCGG
CTGTTGAAGGACCAGCTCTCCCTGGGAAATGCTGCACTTCAGATCACAGATGTGAAATTGCAGGATGC
AGGGGTGTACCGCTGCATGATCAGCTATGGTGGTGCCGACTACAAGCGAATTACTGTGAAAGTCAATG
CCCCATACAACAAAATCAACCAAAGAATTTTGGTTGTGGATCCAGTCACCTCTGAACATGAACTGACA
TGTCAGGCTGAGGGCTACCCCAAGGCCGAAGTCATCTGGACAAGCAGTGACCATCAAGTCCTGAGTGG
TAAGACCACCACCACCAATTCCAAGAGAGAGGAGAAGCTTTTCAATGTGACCAGCACACTGAGAATCA
ACACAACAACTAATGAGATTTTCTACTGCACTTTTAGGAGATTAGATCCTGAGGAAAACCATACAGCT
GAATTGGTCATCCCAGAACTACCTCTGGCACATCCTCCAAATGAAAGGACTCAC

| | | | |
|---|---|---|---|
| NOV35e, CG56110-02 | SEQ ID NO:844 | 222 aa | MW at 25431.6 kD |
| Protein Sequence | | | |

FTVTVPKDLYVVEYGSNMTIECKFPVEKQLDLAALIVYWEMEDKNIIQFVHGEEDLKVQHSSYRQRAR
LLKDQLSLGNAALQITDVKLQDAGVYRCMISYGGADYKRITVKVNAPYNKINQRILVVDPVTSEHELT
CQAEGYPKAEVIWTSSDHQVLSGKTTTTNSKREEKLFNVTSTLRINTTTNEIFYCTFRRLDPEENHTA
ELVIPELPLAHPPNERTH

| | | |
|---|---|---|
| NOV35f, CG56110-04 | SEQ ID NO:845 | 745 bp |
| DNA Sequence | ORF Start: ATG at 1 | ORF Stop: TAG at 535 |

ATGAGGATATTTGCTGTCTTTATATTCATGACCTACTGGCATTTGCTGAACGCATTTACTGTCACGGT
TCCCAAGGACCTATATGTGGTAGAGTATGGTAGCAATATGACAATTGAATGCAAATTCCCAGTAGAAA
AACAATTAGACCTGGCTGCACTAATTGTCTATTGGGAAATGGAGGATAAGAACATTATTCAATTTGTG
CATGGAGAGGAAGACCTGAAGGTTCAGCATAGTAGCTACAGACAGAGGGCCCGGCTGTTGAAGGACCA
GCTCTCCCTGGGAAATGCTGCACTTCAGATCACAGATGTGAAATTGCAGGATGCAGGGGTGTACCGCT
GCATGATCAGCTATGGTGGTGCCGACTACAAGCGAATTACTGTGAAAGTCAATGCCCCATACAACAAA
ATCAACCAAAGAATTTTGGTTGTGGATCCAGTCACCTCTGAACATGAACTGACATGTCAGGCTGAGGG
CTACCCCAAGGCCGAAGTCATCTGGACAAGCAGTGACCATCAAGTCCTGAGTGGAGATTAGATCCTGA
GGAAAACCATACAGCTGAATTGGTCATCCCAGAACTACCTCTGGCACATCCTCCAAATGAAAGGACTC
ACTTGGTAATTCTGGGAGCCATCTTATTATGCCTTGGTGTAGCACTGACATTCATCTTCCGTTTAAGA
AAAGGGAGAATGATGGATGTGAAAAAATGTGGCATCCAAGATACAAACTCAAAGAAGCAAAGTGG

| | | | |
|---|---|---|---|
| NOV35f, CG56110-04 | SEQ ID NO:846 | 178 aa | MW at 20453.3 kD |
| Protein Sequence | | | |

MRIFAVFIFMTYWHLLNAFTVTVPKDLYVVEYGSNMTIECKFPVEKQLDLAALIVYWEMEDKNIIQFV
HGEEDLKVQHSSYRQRARLLKDQLSLGNAALQITDVKLQDAGVYRCMISYGGADYKRITVKVNAPYNK
INQRILVVDPVTSEHELTCQAEGYPKAEVIWTSSDHQVLSGD

| | | |
|---|---|---|
| NOV35g, CG56110-05 | SEQ ID NO:847 | 7184 bp |
| DNA Sequence | ORF Start: ATG at 62 | ORF Stop: TAA at 932 |

GCAGCTTCCCGAGGCTCCGCACCAGCCGCGCTTCTGTCCGCCTGCAGGGCATTCCAGAAAGATGAGGA
TATTTGCTGTCTTTATATTCATGACCTACTGGCATTTGCTGAACGCATTTACTGTCACGGTTCCCAAG
GACCTATATGTGGTAGAGTATGGTAGCAATATGACAATTGAATGCAAATTCCCAGTAGAAAAACAATT
AGACCTGGCTGCACTAATTGTCTATTGGGAAATGGAGGATAAGAACATTATTCAATTTGTGCATGGAG
AGGAAGACCTGAAGGTTCAGCATAGTAGCTACAGACAGAGGGCCCGGCTGTTGAAGGACCAGCTCTCC
CTGGGAAATGCTGCACTTCAGATCACAGATGTGAAATTGCAGGATGCAGGGGTGTACCGCTGCATGAT
CAGCTATGGTGGTGCCGACTACAAGCGAATTACTGTGAAAGTCAATGCCCCATACAACAAAATCAACC
AAAGAATTTTGGTTGTGGATCCAGTCACCTCTGAACATGAACTGACATGTCAGGCTGAGGGCTACCCC
AAGGCCGAAGTCATCTGGACAAGCAGTGACCATCAAGTCCTGAGTGGTAAGACCACCACCACCAATTC
CAAGAGAGAGGAGAAGCTTTTCAATGTGACCAGCACACTGAGAATCAACACAACAACTAATGAGATTT
TCTACTGCACTTTTAGGAGATTAGATCCTGAGGAAAACCATACAGCTGAATTGGTCATCCCAGAACTA
CCTCTGGCACATCCTCCAAATGAAAGGACTCACTTGGTAATTCTGGGAGCCATCTTATTATGCCTTGG
TGTAGCACTGACATTCATCTTCCGTTTAAGAAAAGGGAGAATGATGGATGTGAAAAAATGTGGCATCC
AAGATACAAACTCAAAGAAGCAAAGTGATACACATTTGGAGGAGACGTAATCCAGCATTGGAACTTCT
GATCTTCAAGCAGGGATTCTCAACCTGTGGTTTAGGGGTTCATCGGGGCTGAGCGTGACAAGAGGAAG
GAATGGGCCCGTGGGATGCAGGCAATGTGGGACTTAAAAGGCCCAAGCACTGAAAATGGAACCTGGCG
AAAGCAGAGGAGGAGAATGAAGAAAGATGGAGTCAAACAGGGAGCCTGGAGGGAGACCTTGATACTTT
CAAATGCCTGAGGGGCTCATCGACGCCTGTGACAGGGAGAAAGGATACTTCTGAACAAGGAGCCTCCA
AGCAAATCATCCATTGCTCATCCTAGGAAGACGGGTTGAGAATCCCTAATTTGAGGGTCAGTTCCTGC
AGAAGTGCCCTTTGCCTCCACTCAATGCCTCAATTTGTTTTCTGCATGACTGAGAGTCTCAGTGTTGG
AACGGGACAGTATTTATGTATGAGTTTTTCCTATTTATTTTGAGTCTGTGAGGTCTTCTTGTCATGTG
AGTGTGGTTGTGAATGATTTCTTTTGAAGATATATTGTAGTAGATGTTACAATTTTGTCGCCAAACTA
AACTTGCTGCTTAATGATTTGCTCACATCTAGTAAAACATGGAGTATTTGTAAGGTGCTTGGTCTCCT
CTATAACTACAAGTATACATTGGAAGCATAAAGATCAAACCGTTGGTTGCATAGGATGTCACCTTTAT
TTAACCCATTAATACTCTGGTTGACCTAATCTTATTCTCAGACCTCAAGTGTCTGTGCAGTATCTGTT
CCATTTAAATATCAGCTTTACAATTATGTGGTAGCCTACACACATAATCTCATTTCATCGCTGTAACC
ACCCTGTTGTGATAACCACTATTATTTTACCCATCGTACAGCTGAGGAAGCAAACAGATTAAGTAACT
TGCCCAAACCAGTAAATAGCAGACCTCAGACTGCCACCCACTGTCCTTTTATAATACAATTTACAGCT
ATATTTTACTTTAAGCAATTCTTTTATTCAAAAACCATTTATTAAGTGCCCTTGCAATATCAATCGCT
GTGCCAGGCATTGAATCTACAGATGTGAGCAAGACAAAGTACCTGTCCTCAAGGAGCTCATAGTATAA
TGAGGAGATTAACAAGAAAATGTATTATTACAATTTAGTCCAGTGTCATAGCATAAGGATGATGCGAG
GGGAAAACCCGAGCAGTGTTGCCAAGAGGAGGAAATAGGCCAATGTGGTCTGGGACGGTTGGATATAC
TTAAACATCTTAATAATCAGAGTAATTTTCATTTACAAAGAGAGGTCGGTACTTAAAATAACCCTGAA
AAATAACACTGGAATTCCTTTTCTAGCATTATATTTATTCCTGATTTGCCTTTGCCATATAATCTAAT
GCTTGTTTATATAGTGTCTGGTATTGTTTAACAGTTCTGTCTTTTCTATTTAAATGCCACTAAATTTT
AAATTCATACCTTTCCATGATTCAAAATTCAAAAGATCCCATGGGAGATGGTTGGAAAATCTCCACTT
CATCCTCCAAGCCATTCAAGTTTCCTTTCCAGAAGCAACTGCTACTGCCTTTCATTCATATGTTCTTC
TAAAGATAGTCTACATTTGGAAATGTATGTTAAAAGCACGTATTTTTAAAATTTTTTTCCTAAATAGT
AACACATTGTATGTCTGCTGTGTACTTTGCTATTTTTATTTATTTTAGTGTTTCTTATATAGCAGATG
GAATGAATTTGAAGTTCCCAGGGCTGAGGATCCATGCCTTCTTTGTTTCTAAGTTATCTTTCCCATAC
CTTTTCATTATCTTTCATATGATCCAGTATATGTTAAATATGTCCTACATATACATTTAGACAACCAC
CATTTGTTAAGTATTTGCTCTAGGACAGAGTTTGGATTTGTTTATGTTTGCTCAAAAGGAGACCCATG
GGCTCTCCAGGGTGCACTGAGTCAATCTAGTCCTAAAAAGCAATCTTATTATTAACTCTGTATGACAG
AATCATGTCTGGAACTTTTGTTTTCTGCTTTCTGTCAAGTATAAACTTCACTTTGATGCTGTACTTGC
AAAATCACATTTTCTTTCTGGAAATTCCGGCAGTGTACCTTGACTGCTAGCTACCCTGTGCCAGAAAA
GCCTCATTCGTTGTGCTTGAACCCTTGAATGCCACCAGCTGTCATCACTACACAGCCCTCCTAAGAGC
CTTCCTGGAGGTTTCGAGATTCAGATGCCCTGGGAGATCCCAGAGTTTCCTTTCCCTCTTGGCCATAT
TCTGGTGTCAATGACAAGGAGTACCTTGGCTTTGCCACATGTCAAGGCTGAAGAAACAGTGTCTCCAA
CAGAGCTCCTTGTGTTATCTGTTTGTACATGTGCATTTGTACAGTAATTGGTGTGACAGTGTTCTTTG
TGTGAATTACAGGCAAGAATTGTGGCTGAGCAAGGCACATAGTCTACTCAGTCTATTCCTAAGTCCTA
ACTCCTCCTTGTGGTGTTGGATTTGTAAGGCACTTTATCCCTTTTGTCTCATGTTTCATCGTAAATGG
CATAGGCAGAGATGATACCTAATTCTGCATTTGATTGTCACTTTTTGTACCTGCATTAATTTAATAAA
ATATTCTTATTTATTTTGTTACTTGGTAAAAAAAAAAAAAAAGCTTCCCGAGGCTCCGCACCAGCCGC
GCTTCTGTCCGCCTGCAGGGCATTCCAGAAAGATGAGGATATTTGCTGTCTTTATATTCATGACCTAC
TGGCATTTGCTGAACGCATTTACTGTCACGGTTCCCAAGGACCTATATGTGGTAGAGTATGGTAGCAA
TATGACAATTGAATGCAAATTCCCAGTAGAAAAACAATTAGACCTGGCTGCACTAATTGTCTATTGGG
AAATGGAGGATAAGAACATTATTCAATTTGTGCATGGAGAGGAAGACCTGAAGGTTCAGCATAGTAGC
TACAGACAGAGGGCCCGGCTGTTGAAGGACCAGCTCTCCCTGGGAAATGCTGCACTTCAGATCACAGA
TGTGAAATTGCAGGATGCAGGGGTGTACCGCTGCATGATCAGCTATGGTGGTGCCGACTACAAGCGAA
TTACTGTGAAAGTCAATGCCCCATACAACAAAATCAACCAAAGAATTTTGGTTGTGGATCCAGTCACC
TCTGAACATGAACTGACATGTCAGGCTGAGGGCTACCCCAAGGCCGAAGTCATCTGGACAAGCAGTGA
CCATCAAGTCCTGAGTGGTAAGACCACCACCACCAATTCCAAGAGAGAGGAGAAGCTTTTCAATGTGA
CCAGCACACTGAGAATCAACACAACAACTAATGAGATTTTCTACTGCACTTTTAGGAGATTAGATCCT
GAGGAAAACCATACAGCTGAATTGGTCATCCCAGAACTACCTCTGGCACATCCTCCAAATGAAAGGAC
TCACTTGGTAATTCTGGGAGCCATCTTATTATGCCTTGGTGTAGCACTGACATTCATCTTCCGTTTAA
GAAAAGGGAGAATGATGGATGTGAAAAAATGTGGCATCCAAGATACAAACTCAAAGAAGCAAAGTGAT
ACACATTTGGAGGAGACGTAATCCAGCATTGGAACTTCTGATCTTCAAGCAGGGATTCTCAACCTGTG
GTTTAGGGGTTCATCGGGGCTGAGCGTGACAAGAGGAAGGAATGGACCCGTGGGATGCAGGCAATGTG
GGACTTAAAAGGCCCAAGCACTGAAAATGGAACCTGGCGAAAGCAGAGGAGGAGAATGAAGAAAGATG
GAGTCAAACAGGGAGCCTGGAGGGAGACCTTGATACTTTCAAATGCCTGAGGGGCTCATCGACGCCTG
TGACAGGGAGAAAGGATACTTCTGAACAAGGAGCCTCCAAGCAAATCATCCATTGCTCATCCTAGGAA
GACGGGTTGAGAATCCCTAATTTGAGGGTCAGTTCCTGCAGAAGTGCCCTTTGCCTCCACTCAATGCC
TCAATTTGTTTTCTGCATGACTGAGAGTCTCAGTGTTGGAACGGGACAGTATTTATGTATGAGTTTTT
CCTATTTATTTTGAGTCTGTGAGGTCTTCTTGTCATGTGAGTGTGGTTGTGAATGATTTCTTTTGAAC
ATATATTGTAGTAGATGTTACAATTTTGTCGCCAAACTAAACTTGCTGCTTAATGATTTGCTCACATC
TAGTAAAACATGGAGTATTTGTAAGGTGCTTGGTCTCCTCTATAACTACAAGTATACATTGGAAGCAT
AAAGATCAAACCGTTGGTTGCATAGGATGTCACCTTTATTTAACCCATTAATACTCTGGTTGACCTAA
TCTTATTCTCAGACCTCAAGTGTCTGTGCAGTATCTGTTCCATTTAAATATCAGCTTTACAATTATGT
GGTAGCCTACACACATAATCTCATTTCATCGCTGTAACCACCCTGTTGTGATAACCACTATTATTTTA
CCCATCGTACAGCTGAGGAAGCAAACAGATTAAGTAACTTGCCCAAACCAGTAAATAGCAGACCTCAG
ACTGCCACCCACTGTCCTTTTATAATACAATTTACAGCTATATTTTACTTTAAGCAATTCTTTTATTC
AAAAACCATTTATTAAGTGCCCTTGCAATATCAATCGCTGTGCCAGGCATTGAATCTACAGATGTGAG
CAAGACAAAGTACCTGTCCTCAAGGAGCTCATAGTATAATCAGGAGATTAACAAGAAAATGTATTATT
ACAATTTAGTCCAGTGTCATAGCATAAGGATGATGCGAGGGGAAAACCCGAGCAGTGTTGCCAAGAGC
AGGAAATAGGCCAATGTGGTCTGGGACGGTTGGATATACTTAAAGATCTTAATAATCAGAGTAATTTT
CATTTACAAAGAGAGGTCGGTACTTAAAATAACCCTGAAAAATAACACTGGAATTCCTTTTCTAGCAT
TATATTTATTCCTGATTTGCCTTTGCCATATAATCTAATGCTTGTTTATATAGTGTCTGGTATTGTTT
AACAGTTCTGTCTTTTCTATTTAAATGCCACTAAATTTTAAATTCATACCTTTCCATGATTCAAAATT
CAAAAGATCCCATGGGAGATGGTTGGAAAATCTCCACTTCATCCTCCAAGCCATTCAAGTTTCCTTTC
CAGAAGCAACTGCTACTGCCTTTCATTCATATGTTCTTCTAAAGATAGTCTACATTTGGAAATGTATG
TTAAAAGCACGTATTTTTAAAATTTTTTTCCTAAATAGTAACACATTGTATGTCTGCTGTGTACTTTC
CTATTTTTATTTATTTTAGTGTTTCTTATATAGCAGATGGAATGAATTTGAAGTTCCCAGGGCTGAGG
ATCCATGCCTTCTTTGTTTCTAAGTTATCTTTCCCATAGCTTTTCATTATCTTTCATATGATCCAGTA
TATGTTAAATATGTCCTACATATACATTTAGACAACCACCATTTGTTAAGTATTTGCTCTAGGACAGA
GTTTGGATTTGTTTATGTTTGCTCAAAAGGAGACCCATGGGCTCTCCAGGGTGCACTGAGTCAATCTA
GTCCTAAAAAGCAATCTTATTATTAACTCTGTATGACAGAATCATGTCTGGAACTTTTGTTTTCTGCT
TTCTGTCAAGTATAAACTTCACTTTGATGCTGTACTTGCAAAATCACATTTTCTTTCTGGAAATTCCG
GCAGTGTACCTTGACTGCTAGCTACCCTGTGCCAGAAAAGCCTCATTCGTTGTGCTTGAACCCTTGAA
TGCCACCAGCTGTCATCACTACACAGCCCTCCTAAGAGGCTTCCTGGAGGTTTCGAGATTCAGATGCC
CTGGGAGATCCCAGAGTTTCCTTTCCCTCTTGGCCATATTCTGGTGTCAATGACAAGGAGTACCTTGG
CTTTGCCACATGTCAAGGCTGAAGAAACAGTGTCTCCAACAGAGCTCCTTGTGTTATCTGTTTGTACA
TGTGCATTTGTACAGTAATTGGTGTGACAGTGTTCTTTGTGTGAATTACAGGCAAGAATTGTGGCTGA
GCAAGGCACATAGTCTACTCAGTCTATTCCTAAGTCCTAACTCCTCCTTGTGGTGTTGGATTTGTAAG
GCACTTTATCCCTTTTGTCTCATGTTTCATCGTAAATGGCATAGGCAGAGATGATACCTAATTCTGCA
TTTGATTGTCACTTTTTGTACCTGCATTAATTTAATAAAATATTCTTATTTATTTTGTTACTTGGTAC
ACCAGCATGTCCATTTTCTTGTTTATTTTGTGTTTAATAAAATG

| | | | |
|---|---|---|---|
| NOV35g, CG56110-05 | SEQ ID NO:848 | 290 aa | MW at 33275.0 kD |
| Protein Sequence | | | |

MRIFAVFIFMTYWHLLNAFTVTVPKDLYVVEYGSNMTIECKFPVEKQLDLAALIVYWEMEDKNIIQFV
HGEEDLKVQHSSYRQRARLLKDQLSLGNAALQITDVKLQDAGVYRCMISYGGADYKRITVKVNAPYNK
INQRILVVDPVTSEHELTCQAEGYPKAEVIWTSSDHQVLSGKTTTTNSKREEKLFNVTSTLRINTTTN
EIFYCTFRRLDPEENHTAELVIPELPLAHPPNERTHLVILGAILLCLGVALTFIFRLRKGRMMDVKKC
GIQDTNSKKQSDTHLEET

| | | |
|---|---|---|
| NOV35h, CG56110-06 | SEQ ID NO:849 | 900 bp |
| DNA Sequence | ORF Start: ATG at 17 | ORF Stop: at 866 |

CACCAGATCTCCCACCATGAGGATATTTGCTGTCTTTATATTCATGACCTACTGGCATTTGCTGAACG
CATTTACTGTCACGGTTCCCAAGGACCTATATGTGGTAGAGTATGGTAGCAATATGACAATTGAATGC
AAATTCCCAGTAGAAAAACAATTAGACCTGGCTGCACTAATTGTCTATTGGGAAATGGAGGATAAGAA
CATTATTCAATTTGTGCATGGAGAGGAAGACCTGAAGGTTCAGCATAGTAGCTACAGACAGAGGGCCC
GGCTGTTGAAGGACCAGCTCTCCCTGGGAAATGCTGCACTTCAGATCACAGATGTGAAATTGCAGGAT
GCAGGGGTGTACCGCTGCATGATCAGCTATGGTGGTGCCGACTACAAGCGAATTACTGTGAAAGTCAA
TGCCCCATACAACAAAATCAACCAAAGAATTTTGGTTGTGGATCCAGTCACCTCTGAACATGAACTGA
CATGTCAGGCTGAGGGCTACCCCAAGGCCGAAGTCATCTGGACAAGCAGTGACCATCAAGTCCTGAGT
GGTAAGACCACCACCACCAATTCCAAGAGAGAGGAGAAGCTTTTCAATGTGACCAGCACACTGAGAAT
CAACACAACAACTAATGAGATTTTCTACTGCACTTTTAGGAGATTAGATCCTGAGGAAAACCATACAG
CTGAATTGGTCATCCCAGAACTACCTCTGGCACATCCTCCAAATGAAAGGACTCACTTGGTAATTCTG
GGAGCCATCTTATTATGCCTTGGTGTAGCACTGACATTCATCTTCCGTTTAAGAAAAGGGAGAATGAT
GGATGTGAAAAAATGTGGCATCCAAGATACAAACTCAAAGAAGCAAAGTGATACACATTTGGAGGAGA
CGTAAAGTCGACGGCC

| | | | |
|---|---|---|---|
| NOV35h, CG56110-06 | SEQ ID NO:850 | 283 aa | MW at 32449.2 kD |
| Protein Sequence | | | |

MRIFAVFIFMTYWHLLNAFTVTVPKDLYVVEYGSNMTIECKFPVEKQLDLAALIVYWEMEDKNIIQFV
HGEEDLKVQHSSYRQRARLLKDQLSLGNAALQITDVKLQDAGVYRCMISYGGADYKRITVKVNAPYNK
INQRILVVDPVTSEHELTCQAEGYPKAEVIWTSSDHQVLSGKTTTTNSKREEKLFNVTSTLRINTTTN
EIFYCTFRRLDPEENHTAELVIPELPLAHPPNERTHLVILGAILLCLGVALTFIFRLRKGRMMDVKKC
GIQDTNSKKQS

[0555] A ClustalW comparison of the above protein sequences yields the following sequence alignment shown in Table 35B.

TABLE 35B
Comparison of the NOV35 protein sequences.

| | | |
|---|---|---|
| NOV35a | -----MRIFAVFIFMTYWHLLNAFTVTVPKDLYVVEYGSNMTIECKFPVEKQLDLAALIV | (SEQ ID NO:836) |
| NOV35b | --------------MTYWHLLNAFTVTVPKDLYVVEYGSNMTIECKFPVEKQLDLAALIV | (SEQ ID NO:838) |
| NOV35c | TRSPTMRIFAVFIFMTYWHLLNAFTVTVPKDLYVVEYGSNMTIECKFPVEKQLDLAALIV | (SEQ ID NO:840) |
| NOV35d | -----MRIFAVFIFMTYWHLLNAFTVTVPKDLYVVEYGSNMTIECKFPVEKQLDLAALIV | (SEQ ID NO:842) |
| NOV35e | -----------------------FTVTVPKDLYVVEYGSNMTIECKFPVEKQLDLAALIV | (SEQ ID NO:844) |
| NOV35f | -----MRIFAVFIFMTYWHLLNAFTVTVPKDLYVVEYGSNMTIECKFPVEKQLDLAALIV | (SEQ ID NO:846) |
| NOV35g | -----MRIFAVFIFMTYWHLLNAFTVTVPKDLYVVEYGSNMTIECKFPVEKQLDLAALIV | (SEQ ID NO:848) |
| NOV35h | -----MRIFAVFIFMTYWHLLNAFTVTVPKDLYVVEYGSNMTIECKFPVEKQLDLAALIV | (SEQ ID NO:850) |
| NOV35a | YWEMEDKNIIQFVHGEEDLKVQHSSYRQRARLLKDQLSLGNAALQITDVKLQDAGVYRCM | |
| NOV35b | YWEMEDKNIIQFVHGEEDLKVQHSSYRQRARLLKDQLSLGNAALQITDVKLQDAGVYRCM | |
| NOV35c | YWEMEDKNIIQFVHGEEDLKVQHSSYRQRARLLKDQLSLGNAALQITDVKLQDAGVYRCM | |
| NOV35d | YWEMEDKNIIQFVHGEEDLKVQHSSYRQRARLLKDQLSLGNAALQITDVKLQDAGVYRCM | |
| NOV35e | YWEMEDKNIIQFVHGEEDLKVQHSSYRQRARLLKDQLSLGNAALQITDVKLQDAGVYRCM | |
| NOV35f | YWEMEDKNIIQFVHGEEDLKVQHSSYRQRARLLKDQLSLGNAALQITDVKLQDAGVYRCM | |
| NOV35g | YWEMEDKNIIQFVHGEEDLKVQHSSYRQRARLLKDQLSLGNAALQITDVKLQDAGVYRCM | |
| NOV35h | YWEMEDKNIIQFVHGEEDLKVQHSSYRQRARLLKDQLSLGNAALQITDVKLQDAGVYRCM | |
| NOV35a | ISYGGADYKRITVKVNAPYNKINQRILVVDPVTSEHELTCQAEGYPKAEVIWTSSDHQVL | |
| NOV35b | ISYGGADYKRITVKVNAPYNKINQRILVVDPVTSEHELTCQAEGYPKAEVIWTSSDHQVL | |
| NOV35c | ISYGGADYKRITVKVNAPYNKINQRILVVDPVTSEHELTCQAEGYPKAEVIWTSSDHQVL | |
| NOV35d | ISYGGADYKRITVKVNAPYNKINQRILVVDPVTSEHELTCQAEGYPKAEVIWTSSDHQVL | |
| NOV35e | ISYGGADYKRITVKVNAPYNKINQRILVVDPVTSEHELTCQAEGYPKAEVIWTSSDHQVL | |
| NOV35f | ISYGGADYKRITVKVNAPYNKINQRILVVDPVTSEHELTCQAEGYPKAEVIWTSSDHQVL | |
| NOV35g | ISYGGADYKRITVKVNAPYNKINQRILVVDPVTSEHELTCQAEGYPKAEVIWTSSDHQVL | |
| NOV35h | ISYGGADYKRITVKVNAPYNKINQRILVVDPVTSEHELTCQAEGYPKAEVIWTSSDHQVL | |
| NOV35a | SGKTTTTNSKREEKLFNVTSTLRINTTTNEIFYCTFRRLDPEENHTAELVIPELPLAHPP | |
| NOV35b | SGD--------------------------------------------------------- | |
| NOV35c | SGKTTTTNSKREEKLFNVTSTLRINTTTNEIFYCTFRRLDPEENHTAELVIPELPLAHPP | |
| NOV35d | SGKTTTTNSKREEKLFNVTSTLRINTTTNEIFYCTFRRLDPEENHTAELVIPELPLAHPP | |
| NOV35e | SGKTTTTNSKREEKLFNVTSTLRINTTTNEIFYCTFRRLDPEENHTAELVIPELPLAHPP | |
| NOV35f | SGD--------------------------------------------------------- | |
| NOV35g | SGKTTTTNSKREEKLFNVTSTLRINTTTNEIFYCTFRRLDPEENHTAELVIPELPLAHPP | |
| NOV35h | SGKTTTTNSKREEKLFNVTSTLRINTTTNEIFYCTFRRLDPEENHTAELVIPELPLAHPP | |
| NOV35a | NERTHLVILGAILLCLGVALTFIFRLRKGRMMDVKKCGIQDTNSKKQSDTHLEET | |
| NOV35b | ------------------------------------------------------- | |
| NOV35c | NERTHLVILGAILLCLGVALTFIFRLRKGRMMDVKKCGIQDTNSKKQSDTHLEET | |
| NOV35d | NERTHLVILGAILLCLGVALTFIFRLRKGRMMDVKKCGIQDTNSKKQSDTHLEET | |
| NOV35e | NERTH-------------------------------------------------- | |
| NOV35f | ------------------------------------------------------- | |
| NOV35g | NERTHLVILGAILLCLGVALTFIFRLRKGRMMDVKKCGIQDTNSKKQSDTHLEET | |
| NOV35h | NERTHLVILGAILLCLGVALTFIFRLRKGRMMDVKKCGIQDTNSKKQS------- | |

[0556] Further analysis of the NOV35a protein yielded the following properties shown in Table 35C.

TABLE 35C
Protein Sequence Properties NOV35a

| | |
|---|---|
| SignalP analysis: | Cleavage site between residues 19 and 20 |
| PSORT II analysis: | |

| PSG: | a new signal peptide prediction method | |
|---|---|---|
| | N-region: | length 2; pos. chg 1; neg. chg 0 |
| | H-region: | length 22; peak value 13.04 |
| | PSG score: | 8.64 |

| | |
|---|---|
| GvH: | von Heijne's method for signal seq. recognition |
| | GvH score (threshold: −2.1): −3.72 |
| | possible cleavage site: between 18 and 19 |

>>> Seems to have no N-terminal signal peptide

| ALOM: | Klein et al's method for TM region allocation | | |
|---|---|---|---|
| | Init position for calculation: 1 | | |
| | Tentative number of TMS(s) for the threshold 0.5: 2 | | |
| | Number of TMS(s) for threshold 0.5: 1 | | |
| | INTEGRAL | Likelihood = | Transmembrane 242-258 |
| | | −11.36 | |

| | |
|---|---|
| PERIPHERAL | Likelihood = 7.90 (at 40) |

| | |
|---|---|
| | ALOM score: −11.36 (number of TMSs: 1) |
| MTOP: | Prediction of membrane topology (Hartmann et al.) |
| | Center position for calculation: 249 |
| | Charge difference: 5.0 C(5.0)-N(0.0) |
| | C > N: C-terminal side will be inside |

>>>Caution: Inconsistent mtop result with signal peptide
>>> Single TMS is located near the C-terminus
>>> membrane topology: type Nt (cytoplasmic tail 1 to 241)

| MITDISC: | discrimination of mitochondrial targeting seq | | | |
|---|---|---|---|---|
| | R content: | 1 | Hyd Moment(75): | 5.40 |
| | Hyd Moment(95): | 9.37 | G content: | 0 |
| | D/E content: | 1 | S/T content: | 3 |

| | |
|---|---|
| | Score: −2.89 |
| Gavel: | prediction of cleavage sites for mitochondrial preseq |
| | R-2 motif at 12 MRI\|FA |

NUCDISC: discrimination of nuclear localization signals

| | |
|---|---|
| | pat4: none |
| | pat7: none |
| | bipartite: none |
| | content of basic residues: 11.7% |
| | NLS Score: −0.47 |
| KDEL: | ER retention motif in the C-terminus: none |

ER Membrane Retention Signals:

XXRR-like motif in the N-terminus: RIFA

none
SKL: peroxisomal targeting signal in the C-terminus: none
PTS2: 2nd peroxisomal targeting signal: none
VAC: possible vacuolar targeting motif: none
RNA-binding motif: none
Actinin-type actin-binding motif:

type 1: none
type 2: none

NMYR: N-myristoylation pattern: none
Prenylation motif: none
memYQRL: transport motif from cell surface to Golgi: none
Tyrosines in the tail: too long tail
Dileucine motif in the tail: found

LL at 15
LL at 87

checking 63 PROSITE DNA binding motifs: none
checking 71 PROSITE ribosomal protein motifs: none
checking 33 PROSITE prokaryotic DNA binding motifs: none

| | |
|---|---|
| NNCN: | Reinhardt's method for Cytoplasmic/Nuclear discrimination |
| | Prediction: cytoplasmic |
| | Reliability: 94.1 |
| COIL: | Lupas's algorithm to detect coiled-coil regions |
| | total: 0 residues |

Final Results (k = 9/23):

```
30.4%: nuclear
26.1%: cytoplasmic
13.0%: Golgi
13.0%: endoplasmic reticulum
  8.7%: mitochondrial
  4.3%: vesicles of secretory system
  4.3%: peroxisomal
```

>> prediction for CG56110-03 is nuc (k = 23)

[0557] A search of the NOV35a protein against the Geneseq database, a proprietary database that contains sequences published in patents and patent publication, yielded several homologous proteins shown in Table 35D.

TABLE 35D
Geneseq Results for NOV35a

| | | NOV35a | Identities/ | |
|---|---|---|---|---|
| | | Residues/ | Similarities for | |
| Geneseq | Protein/Organism/Length | Match | the Matched | Expect |
| Identifier | [Patent #,Date] | Residues | Region | Value |
| AAE33390 | Human membrane B7-4 (B7-4M) | 1 . . . 290 | 290/290 (100%) | e−169 |
| | protein - Homo sapiens, 290 aa. | 1 . . . 290 | 290/290 (100%) | |
| | [WO200279499-A1, 10-OCT-2002] | | | |
| ABJ18518 | Human PD-L1M protein - Homo | 1 . . . 290 | 290/290 (100%) | e−169 |
| | sapiens, 290 aa. [WO200278731-A1, | 1 . . . 290 | 290/290 (100%) | |
| | 10-OCT-2002] | | | |
| AAE16964 | Human PD-1 ligand (PD-L1) - Homo | 1 . . . 290 | 290/290 (100%) | e−169 |
| | sapiens, 290 aa. [WO200200730-A2, | 1 . . . 290 | 290/290 (100%) | |
| | 03-JAN-2002] | | | |
| AAU81007 | B7-related protein, BSL1 - Homo | 1 . . . 290 | 290/290 (100%) | e−169 |
| | sapiens, 290 aa. [WO200194413-A2, | 1 . . . 290 | 290/290 (100%) | |
| | 13-DEC-2001] | | | |
| ABG64016 | Human albumin fusion protein #691 - | 1 . . . 290 | 290/290 (100%) | e−169 |
| | Homo sapiens, 290 aa. | 1 . . . 290 | 290/290 (100%) | |
| | [WO200177137-A1, 18-OCT-2001] | | | |

[0558] In a BLAST search of public sequence databases, the NOV35a protein was found to have homology to the proteins shown in the BLASTP data in Table 35E.

TABLE 35E
Public BLASTP Results for NOV35a

| | | NOV35a | Identities/ | |
|---|---|---|---|---|
| Protein | | Residues/ | Similarities for | |
| Accession | | Match | the Matched | Expect |
| Number | Protein/Organism/Length | Residues | Portion | Value |
| Q9NZQ7 | B7-H1 (PD-1-ligand precursor) - | 1 . . . 290 | 290/290 (100%) | e−168 |
| | Homo sapiens (Human), 290 aa. | 1 . . . 290 | 290/290 (100%) | |
| CAC34696 | Sequence 1 from Patent | 1 . . . 227 | 227/227 (100%) | e−130 |
| | WO0114557 - Homo sapiens | 1 . . . 227 | 227/227 (100%) | |
| | (Human), 245 aa. | | | |
| Q9EP73 | PD-1-ligand precursor (B7-H1 | 1 . . . 290 | 202/291 (69%) | e−114 |
| | protein) - Mus musculus (Mouse), | 1 . . . 290 | 236/291 (80%) | |
| | 290 aa. | | | |
| Q9NUZ5 | Hypothetical protein FLJ11032 - | 115 . . . 290 | 176/176 (100%) | 7e−99 |
| | Homo sapiens (Human), 176 aa. | 1 . . . 176 | 176/176 (100%) | |
| Q9BQ51 | Butyrophilin precursor B7-DC (PD- | 19 . . . 240 | 90/223 (40%) | 2e−35 |
| | 1-ligand 2 protein) - Homo sapiens | 21 . . . 218 | 123/223 (54%) | |
| | (Human), 273 aa. | | | |

[0559] PFam analysis predicts that the NOV35a protein contains the domains shown in the Table 35F.

TABLE 35F
Domain Analysis of NOV35a

| | | Identities/ | |
|---|---|---|---|
| Pfam | NOV35a | Similarities for | Expect |
| Domain | Match Region | the Matched Region | Value |
| ig | 33 . . . 116 | 13/85 (15%) | 0.13 |
| | | 54/85 (64%) | |

### Example 36

[0560] The NOV36 clone was analyzed, and the nucleotide and encoded polypeptide sequences are shown in Table 36A.

TABLE 36A
NOV36 Sequence Analysis

| | | |
|---|---|---|
| NOV36a, CG56383-02 | SEQ ID NO:851 | 2715 bp |
| DNA Sequence | ORF Start: ATG at 34 | ORF Stop: TAA at 2566 |

TGCCTGCACTGCAAGTGTCCCCAGGAGGAGCACATGGTGACAGTGATGCCGCTGGAGATGGAGAAGAC
CATCAGCAAACTCATGTTTGACTTTCAGAGGAACTCGACCTCAGATGATGACTCAGGCTGTGCTTTGG
AAGAGTATGCCTGGGTCCCGCCGGGTCTGAAGCCTGAACAGGTACACCAGTACTATAGCTGTCTCCCA
GAAGAGAAAGTCCCTTATGTCAACAGTCCTGGAGAGAAACTGCGAATCAAGCAGCTACTACACCAGCT
GCCGCCACATGACAATGAGGTAAGGTATTGCAACTCCCTGGATGAGGAAGAGAAGAGGGAGCTGAAGC
TTTTCAGCAGCCAGAGGAAACGCGAAAACTTGGGCCGCGGGAATGTCAGGCCTTTCCCAGTCACCATG
ACAGGAGCTATTTGTGAACAGTGCGGAGGCCAGATCAATGGTGGAGACATCGCTGTGTTTGCGTCACG
CGCTGGCCACGGCGTTTGCTGGCACCCGCCGTGCTTCGTATGCACTGTCTGCAATGAGCTCCTGGTGG
ATCTGATCTACTTTTACCAAGATGGGAAGATATACTGTGGCAGGCACCATGCTGAGTGCCTGAAGCCG
CGCTGTGCTGCCTGCGATGAGATCATCTTTGCAGATGAATGCACAGAAGCTGAGGGGCGACACTGGCA
CATGAAACACTTTTGCTGCTTCGAGTGTGAGACAGTGCTGGGCGGCCAGCGCTACATCATGAAGGAGG
GAAGACCCTACTGTTGCCACTGCTTCGAGTCCTTGTATGCAGAATATTGTGACACCTGTGCCCAACAT
ATAGGTATCGACCAAGGTCAAATGACCTATGATGGCCAACACTGGCATGCCACTGAGACCTGTTTCTG
CTGTGCTCACTGCAAGAAATCCCTCCTGGGGCGGCCATTCCTCCCGAAGCAGGGCCAGATATTCTGCT
CACGGGCCTGCAGTGCTGGGGAAGACCCCAATGGTTCTGACTCCTCTGATTCCGCCTTCCAGAACGCC
AGGGCCAAGGAGTCCCGGCGCAGTGCCAAAATTGGCAAGAACAAGGGCAAGACGGAGGAGCCCATGCT
GAACCAGCACAGCCAGCTGCAAGTGAGTTCTAACCGGCTGTCAGCCGACGTAGACCCCCTGTCACTGC
AGATGGACATGCTCAGCCTGTCCAGCCAGACACCCAGCCTCAACCGGGACCCCATCTGGAGGAGCCGG
GAAGAGCCCTACCATTATGGGAACAAGATGGAGCAGAACCAGACCCAGAGCCCTCTGCAGCTCCTCAG
CCAGTGCAACATCAGAACTTCCTACAGTCCAGGAGGGCAAGGGGCTGGGGCCCAGCCCGAAATGTGGG
GCAAGCACTTCAGCAACCCCAAAAGGAGCTCGTCACTGGCCATGACAGGACATGCTGGCAGCTTCATC
AAGGAATGCCGAGAAGACTATTACCCGGGGAGGCTGAGATCTCAGGAGAGCTACAGTGATATGTCTAG
TCAGAGTTTCAGTGAGACCCGAGGCAGCATCCAAGTCCCCAAATATGAGGAGGAAGAGGAAGAGGAAG
GGGGCTTGTCCACTCAGCAGTGTCGGACCCGTCATCCCATCAGTTCCCTGAAATACACAGAGGACATG
ACGCCCACAGAGCAGACCCCTCGGGGCTCCATGGAATCCCTGGCCCTGTCTAATGCAACAGGTCTCTC
TGCTGATGGTGGTGCCAAGCGCCAGGAGCACCTATCCCGATTTTCCATGCCTGACCTCAGCAAAGACT
CTGGAATGAATGTGTCTGAGAAGCTGAGCAACATGGGCACTCTTAACTCGTCCATGCAGTTCCGGAGC
GCAGAGTCAGTTCGCAGCCTGCTCTCTGCCCAGCAGTACCAGGAGATGGAGGGAAACCTCCACCAGCT
CAGCAACCCCATTGGCTACAGAGACCTGCAGTCCCACGGAAGGATGCATCAGAGCTTTGATTTTGATG
GAGGGATGGCGGGCAGCAAGCTGCCAGGGCAGGAGGGCGTGAGGATCCAGCCCATGAGTGAACGCACC
CGGAGAAGAGCTACTTCACGCGACGACAACCGCCGTTTCCGACCTCACAGGTCCAGGCGTTCCCGACG
CTCTCGCTCCGACAACGCCCTCCACCTGGCCAGCGAACGCGAGGCCATCTCCCGGTTAAAAGATAGGC
CCCCTCTGAGAGCCAGGGAGGACTATGACCAATTTATGCGCCAGCGGAGCTTCCAGGAGAGCATGGGG
CATGGGTCCCGGAGGGACCTGTACGGCCAGTGCCCTAGGACTGTGTCGGACCTGGCTTTGCAGAATGC
CTTTGGGGACCGCTGGGGACCCTACTTCGCCGAGTATGATTGGTGTTCCACCTGCTCCTCCTCTTCAG
AGTCTGACAACGAGGGCTATTTCCTAGGAGAACCCATCCCCCAGCCAGCGCGCCTGCGATACGTCACA
AGCGATGAGCTGCTGCACAAATACAGCTCCTACGGCCTCCCCAAATCTTCCACATTAGGTGGCAGAGG
ACAGTTGCACAGCAGGAAAAGACAGAAGAGCAAAAACTGTATCATTTCTTAATATGATTGGGATCAGG
GAATGGGAGAAGATGGGAGCTAAGAATGTAAAGTCAGAAACTTGCACTGTTTTAAATGTTAAAGCGCT
TTTGGGGGTGGCTTATGGGGGAGAAAAGGGAAAATGCTGTCAGTAGATGGAGGCAAGGTTACA

| | | | |
|---|---|---|---|
| NOV36a, CG56383-02 | SEQ ID NO:852 | 844 aa | MW at 95613.8 kD |
| Protein Sequence | | | |

MVTVMPLEMEKTISKLMFDFQRNSTSDDDSGCALEEYAWVPPGLKPEQVHQYYSCLPEEKVPYVNSPG
EKLRIKQLLHQLPPHDNEVRYCNSLDEEEKRELKLFSSQRKRENLGRGNVRPFPVTMTGAICEQCGGQ
INGGDIAVFASRAGHGVCWHPPCFVCTVCNELLVDLIYFYQDGKIYCGRHHAECLKPRCAACDEIIFA
DECTEAEGRHWHMKHFCCFECETVLGGQRYIMKEGRPYCCHCFESLYAEYCDTCAQHIGIDQGQMTYD
GQHWHATETCFCCAHCKKSLLGRPFLPKQGQIFCSRACSAGEDPNGSDSSDSAFQNARAKESRRSAKI
GKNKGKTEEPMLNQHSQLQVSSNRLSADVDPLSLQMDMLSLSSQTPSLNRDPIWRSREEPYHYGNKME
QNQTQSPLQLLSQCNIRTSYSPGGQGAGAQPEMWGKHFSNPKRSSSLAMTGHAGSFIKECREDYYPGR
LRSQESYSDMSSQSFSETRGSIQVPKYEEEEEEEGGLSTQQCRTRHPISSLKYTEDMTPTEQTPRGSM
ESLALSNATGLSADGGAKRQEHLSRFSMPDLSKDSGMINSEKLSNMGTLNSSMQFRSAESVRSLLSAQ
QYQEMEGNLHQLSNPIGURDLQSHGRMHQSFDFDGGMAGSKLPGQEGVRIQPMSERTRRRATSRDDNR
RFRPHRSRRSRRSRSDNALHLASEREAISRLKDRPPLRAREDYDQFMRQRSFQESMGHGSRRDLYGQC
PRTVSDLALQNAFGDRWGPYFAEYDWCSTCSSSSESDNEGYFLGEPIPQPARLRYVTSDELLHKYSSY
GLPKSSTLGGRGQLHSRKRQKSKNCIIS

| | | |
|---|---|---|
| NOV36b, CG56383-01 | SEQ ID NO:853 | 1190 bp |
| DNA Sequence | ORF Start: ATG at 54 | ORF Stop: TGA at 1014 |

TTATTGACAGTTTATCCTGCCGCACCTGGAATCCTGAGACAAACCAAGGTGCTATGTGTTTCACGTCC
CAGTGCAGAGCTCTGAGCAGCTCATCAGCCTCTCCAATGTCTCTCATTTTTTTAGGTATCGACCAAGG
TCAAATGACCTATGACGGCCAACACTGGCATGCCACTGAGACCTGTTTCTGCTGTGCTCACTGCAAGA
AATCCCTCCTGGGGCGGCCATTCCTCCCGAAGCAGGGCCAGATATTCTGCTCACGGGCCTGCAGTGCT
GGGGAAGACCCCAATGGTTCTGACTCCTCTGATTCCGCCTTCCAGAACGCCAGGGCCAAGGAGTCCCG
GCGCAGTGCCAAAATTGGCAAGAACAAGGGCAAGACGGAGGAGCCCATGCTGAACCAGCACAGCCAGC
TGCAAGTGAGTTCTAACCGGCTGTCAGCCGACGTAGACCCCCTGTCACTGCAGATGGACATGCTCAGC
CTGTCCAGCCAGACACCCAGCCTCAACCGGGACCCCATCTGGAGGAGCCGGGAAGAGCCCTACCATTA
AGGGAACAAGATGGAGCAGAACCAGACCCAGAGCCCTCTGCAGCTCCTCAGCCAGTGCAACATCAGAA
CTTCCTACAGTCCAGGAGGGCAAGGGGCTGGGGCCCAGCCCGAAATGTGGGGCAAGCACTTCAGCAAC
CCCAAAAGGAGCACGTCACTGGCCATGACAGGACATGCTGGCAGCTTCATCAAGGAATGCCGAGAAGA
CTATTACCCGGGGAGGCTGAGATCTCAGGAGAGCTACAGTGATATGTCTAGTCAGAGTTTCAGTGAGA
CCCGAGGCAGCATCCAAGTCCCCAAATATGAGGAGGAAGAGGAAGAGGAAGGGGGCTTGTCCACTCAG
CAGTGTCGGACCCGTCATCCCATCAGTTCCCTGAAATACACAGAGGACATGACGCCCACAGAGCAGAC
CCCTCGGGGCTCCATGGAATCCCTGGCCCTGTCTAATGCAACAGGTAGGTTCTGTTCACCTTGAAAAC
AGATAGAAGGGGGTAGTCTCTGGGTGACTGGATGCTGGTCCCCAGGAATTTTTTTTTTTTTGAAATGG
AGTCTCGCTCTGTCCCCCAGGCTGGAGTGCAGTGGCACGATCTCCGCTCACTGCAAGCTCCACCTCCC
GGGTTCACGCCATTCTCCTGCCTCAGCCTCACGA

| | | | |
|---|---|---|---|
| NOV36b, CG56383-01 | SEQ ID NO:854 | 320 aa | MW at 35524.0 kD |
| Protein Sequence | | | |

MCFTSQCRALSSSSASPMSLTFLGIDQGQMTYDGQHWHATETCFCCAHCKKSLLGRPFLPKQGQIFCS
EACSAGEDPNGSDSSDSAFQNARAXESRRSAKIGKNKGKTEEPMLNQHSQLQVSSNRLSADVDPLSLQ
MDMLSLSSQTPSLNRDPIWRSREEPYHYGNKMEQNQTQSPLQLLSQCNIRTSYSPGGQGAGAQPEMWG
KHFSNPKRSTSLAMTGHAGSFIKECREDYYPGRLRSQESYSDMSSQSFSETRGSIQVPKYEEEEEEEG
GLSTQQCRTRHPISSLKYTEDMTPTEQTPRGSMESLALSNATGRFCSP

| | | |
|---|---|---|
| NOV36c, SNP13382513 of | SEQ ID NO:855 | 2715 bp |
| CG56383-02, DNA Sequence | ORF Start: ATG at 34 | ORF Stop: TAA at 2566 |
| | SNP Pos: 989 | SNP Change: C to T |

TGCCTGCACTGCAAGTGTCCCCAGGAGGAGCACATGGTGACAGTGATGCCGCTGGAGATGGAGAAGAC
CATCAGCAAACTCATGTTTGACTTTCAGAGGAACTCGACCTCAGATGATGACTCAGGCTGTGCTTTGG
AAGAGTATGCCTGGGTCCCGCCGGGTCTGAAGCCTGAACAGGTACACCAGTACTATAGCTGTCTCCCA
GAAGAGAAAGTCCCTTATGTCAACAGTCCTGGAGAGAAACTGCGAATCAAGCAGCTACTACACCAGCT
GCCGCCACATGACAATGAGGTAAGGTATTGCAACTCCCTGGATGAGGAAGAGAAGAGGGAGCTGAAGC
TTTTCAGCAGCCAGAGGAAACGCGAAAACTTGGGCCGCGGGAATGTCAGGCCTTTCCCAGTCACCATG
ACAGGAGCTATTTGTGAACAGTGCGGAGGCCAGATCAATGGTGGAGACATCGCTGTGTTTGCGTCACG
CGCTGGCCACGGCGTTTGCTGGCACCCGCCGTGCTTCGTATGCACTGTCTGCAATGAGCTCCTGGTGG
ATCTGATCTACTTTTACCAAGATGGGAAGATATACTGTGGCAGGCACCATGCTGAGTGCCTGAAGCCG
CGCTGTGCTGCCTGCGATGAGATCATCTTTGCAGATGAATGCACAGAAGCTGAGGGGCGACACTGGCA
CATGAAACACTTTTGCTGCTTCGAGTGTGAGACAGTGCTGGGCGGCCAGCGCTACATCATGAAGGAGG
GAAGACCCTACTGTTGCCACTGCTTCGAGTCCTTGTATGCAGAATATTGTGACACCTGTGCCCAACAT
ATAGGTATCGACCAAGGTCAAATGACCTATGATGGCCAACACTGGCATGCCACTGAGACCTGTTTCTG
CTGTGCTCACTGCAAGAAATCCCTCCTGGGGCGGCCATTCCTCCCGAAGCAGGGCCAGATATTCTGCT
CACGGGCCTGCAGTGCTGGGGAAGACCCCAATGGTTTTGACTCCTCTGATTCCGCCTTCCAGAACGCC
AGGGCCAAGGAGTCCCGGCGCAGTGCCAAAATTGGCAAGAACAAGGGCAAGACGGAGGAGCCCATGCT
GAACCAGCACAGCCAGCTGCAAGTGAGTTCTAACCGGCTGTCAGCCGACGTAGACCCCCTGTCACTGC
AGATGGACATGCTCAGCCTGTCCAGCCAGACACCCAGCCTCAACCGGGACCCCATCTGGAGGAGCCGG
GAAGAGCCCTACCATTATGGGAACAAGATGGAGCAGAACCAGACCCAGAGCCCTCTGCAGCTCCTCAG
CCAGTGCAACATCAGAACTTCCTACAGTCCAGGAGGGCAAGGGGCTGGGGCCCAGCCCGAAATGTGGG
GCAAGCACTTCAGCAACCCCAAAAGGAGCTCGTCACTGGCCATGACAGGACATGCTGGCAGCTTCATC
AAGGAATGCCGAGAAGACTATTACCCGGGGAGGCTGAGATCTCAGGAGAGCTACAGTGATATGTCTAG
TCAGAGTTTCAGTGAGACCCGAGGCAGCATCCAAGTCCCCAAATATGAGGAGGAAGAGGAAGAGGAAG
GGGGCTTGTCCACTCAGCAGTGTCGGACCCGTCATCCCATCAGTTCCCTGAAATACACAGAGGACATG
ACGCCCACAGAGCAGACCCCTCGGGGCTCCATGGAATCCCTGGCCCTGTCTAATGCAACAGGTCTCTC
TGCTGATGGTGGTGCCAAGCGCCAGGAGCACCTATCCCGATTTTCCATGCCTGACCTCAGCAAAGACT
CTGGAATGAATGTGTCTGAGAAGCTGAGCAACATGGGCACTCTTAACTCGTCCATGCAGTTCCGGAGC
GCAGAGTCAGTTCGCAGCCTGCTCTCTGCCCAGCAGTACCAGGAGATGGAGGGAAACCTCCACCAGCT
CAGCAACCCCATTGGCTACAGAGACCTGCAGTCCCACGGAAGGATGCATCAGAGCTTTGATTTTGATG
GAGGGATGGCGGGCAGCAAGCTGCCAGGGCAGGAGGGCGTGAGGATCCAGCCCATGAGTGAACGCACC
CGGAGAAGAGCTACTTCACGCGACGACAACCGCCGTTTCCGACCTCACAGGTCCAGGCGTTCCCGACG
CTCTCGCTCCGACAACGCCCTCCACCTGGCCAGCGAACGCGAGGCCATCTCCCGGTTAAAAGATAGGC
CCCCTCTGAGAGCCAGGGAGGACTATGACCAATTTATGCGCCAGCGGAGCTTCCAGGAGAGCATGGGG
CATGGGTCCCGGAGGGACCTGTACGGCCAGTGCCCTAGGACTGTGTCGGACCTGGCTTTGCAGAATGC
CTTTGGGGACCGCTGGGGACCCTACTTCGCCGAGTATGATTGGTGTTCCACCTGCTCCTCCTCTTCAG
AGTCTGACAACGAGGGCTATTTCCTAGGAGAACCCATCCCCCAGCCAGCGCGCCTGCGATACGTCACA
AGCGATGAGCTGCTGCACAAATACAGCTCCTACGGCCTCCCCAAATCTTCCACATTAGGTGGCAGAGG
ACAGTTGCACAGCAGGAAAAGACAGAAGAGCAAAAACTGTATCATTTCTTAATATGATTGGGATCAGG
GAATGGGAGAAGATGGGAGCTAAGAATGTAAAGTCAGAAACTTGCACTGTTTTAAATGTTAAAGCGCT
TTTGGGGGTGGCTTATGGGGGAGAAAAGGGAAAATGCTGTCAGTAGATGGAGGCAAGGTTACA

| | | | |
|---|---|---|---|
| NOV36c, SNP13382513 of | SEQ ID NO:856 | 844 aa | MW at 95673.9 kD |
| CG56383-02, Protein Sequence | SNP Pos: 319 | | SNP Change: Ser to Phe |

MVTVMPLEMEKTISKLMFDFQRNSTSDDDSGCALEEYAWVPPGLKPEQVHQYYSCLPEEKVPYVNSPG
EKLRIKQLLHQLPPHDNEVRYCNSLDEEEKRELKLFSSQRKRENLGRGNVRPFPVTMTGAICEQCGGQ
INGGDIAVFASRAGHGVCWHPPCFVCTVCNELLVDLIYFYQDGKIYCGRHHAECLKPRCAACDEIIFA
DECTEAEGRHWHMKHFCCFECETVLGGQRYIMKEGRPYCCHCFESLYAEYCDTCAQHIGIDQGQMTYD
GQHWHATETCFCCAHCKKSLLGRPFLPKQGQIFCSRACSAGEDPNGFDSSDSAFQNARAKESRRSAKI
GKNKGKTEEPMLNQHSQLQVSSNRLSADVDPLSLQMDMLSLSSQTPSLNRDPIWRSREEPYHYGNKME
QNQTQSPLQLLSQCNIRTSYSPGGQGAGAQPEMWGKHFSNPKRSSSLAMTGHAGSFIKECREDYYPGR
LRSQESYSDMSSQSFSETRGSIQVPKYEEEEEEEGGLSTQQCRTRHPISSLKYTEDMTPTEQTPRGSM
ESLALSNATGLSADGGAKRQEHLSRFSMPDLSKDSGMNVSEKLSNMGTLNSSMQFRSAESVRSLLSAQ
QYQEMEGNLHQLSNPIGYRDLQSHGRMHQSFDFDGGMAGSKLPGQEGVRIQPMSERTRRRATSRDDNR
RFRPHRSRRSRRSRSDNALHLASEREAISRLKDRPPLRAREDYDQFMRQRSFQESMGHGSRRDLYGQC
PRTVSDLALQNAFGDRWGPYFAEYDWCSTCSSSSESDNEGYFLGEPIPQPARLRYVTSDELLHKYSSY
GLPKSSTLGGRGQLHSRKRQKSKNCIIS

[0561] A ClustalW comparison of the above protein sequences yields the following sequence alignment shown in Table 36B.

TABLE 36B

Comparison of the NOV36 protein sequences.

| | |
|---|---|
| NOV36a | MVTVMPLEMEKTISKLMFDFQRNSTSDDDSGCALEEYAWVPPGLKPEQVHQYYSCLPEEK |
| NOV36b | ------------------------------------------------------------ |
| NOV36a | VPYVNSPGEKLRIKQLLHQLPPHDNEVRYCNSLDEEEKRELKLFSSQRKRENLGRGNVRP |
| NOV36b | ------------------------------------------------------------ |
| NOV36a | FPVTMTGAICEQCGGQINGGDIAVFASRAGHGVCWHPPCFVCTVCNELLVDLIYFYQDGK |
| NOV36b | ------------------------------------------------------------ |
| NOV36a | IYCGRHHAECLKPRCAACDEIIFADECTEAEGRHWHMXHFCCFECETVLGGQRYIMKEGR |
| NOV36b | -----------------------------------------------------------M |
| NOV36a | PYCCHCFESLYAEYCDTCAQHIGIDQGQMTYDGQHWHATETCFCCAHCKKSLLGRPFLPK |
| NOV36b | CFTSQCRALSSSSASPMSLIFLGIDQGQMTYDGQHWHATETCFCCAHCKKSLLGRPFLPK |
| N0V36a | QGQIFCSRACSAGEDPNGSDSSDSAFQNARAKESRRSAKTGKNKGKTEEPMLNQHSQLQV |
| NOV36b | QGQIFCSRACSAGEDPNGSDSSDSAFQNARAKESRRSAKIGKNKGKTEEPMLNQHSQLQV |
| NOV36a | SSNRLSADVDPLSLQMDMLSLSSQTPSLNRDPIWRSREEPYHYGNKMEQNQTQSPLQLLS |
| NOV36b | SSNRLSADVDPLSLQMDMLSLSSQTPSLNRDPIWRSREEPYHYGNKMEQNQTQSPLQLLS |
| NOV36a | QCNIRTSYSPGGQGAGAQPEMWGKHFSNPKRSSSLAMTGHAGSFIKECREDYYPGRLRSQ |
| NOV36b | QCNIRTSYSPGGQGAGAQPEMWGKHFSNPKRSTSLAMTGHAGSFIKECREDYYPGRLRSQ |
| NOV36a | ESYSDMSSQSFSETRGSIQVPKYEEEEEEEGGLSTQQCRTRHPISSLKYTEDMTPTEQTP |
| NOV36b | ESYSDMSSQSFSETRGSIQVPKYEEEEEEEGGLSTQQCRTRHPISSLKYTEDMTPTEQTP |
| NOV36a | RGSMESLALSNATGLSADGGAKRQEHLSRFSMPDLSKDSGMNVSEKLSNMGTLNSSMQFR |
| NOV36b | RGSMESLALSNATGRFCSP----------------------------------------- |
| NOV36a | SAESVRSLLSAQQYQEMEGNLHQLSNPIGYRDLQSHGRMHQSFDFDGGMAGSKLPGQEGV |
| NOV36b | ------------------------------------------------------------ |
| NOV36a | RIQPMSERTRRRATSRDDNRRFRPHRSRRSRRSRSDNALHLASEREAISRLKDRPPLRAR |
| NOV36b | ------------------------------------------------------------ |
| NOV36a | EDYDQFMRQRSFQESMGHGSRRDLYGQCPRTVSDLALQNAFGDRWGPYFAEYDWCSTCSS |
| NOV36b | ------------------------------------------------------------ |
| NOV36a | SSESDNEGYFLGEPIPQPARLRYVTSDELLHKYSSYGLPKSSTLGGRGQLHSRKRQKSKN |
| NOV36b | ------------------------------------------------------------ |
| NOV36a | CIIS |
| NOV36b | ---- |
| NOV36a | (SEQ ID NO: 852) |
| NOV36b | (SEQ ID NO: 854) |

[0562] Further analysis of the NOV36a protein yielded the following properties shown in Table 36C.

TABLE 36C
Protein Sequence Properties NOV36a

| | |
|---|---|
| SignalP analysis: | No Known Signal Sequence Predicted |
| PSORT II analysis: | |

| PSG: | a new signal peptide prediction method | |
|---|---|---|
| | N-region: | length 11; pos. chg 1; neg. chg 2 |
| | H-region: | length 3; peak value 0.00 |
| | PSG score: | −4.40 |

| | |
|---|---|
| GvH: | von Heijne's method for signal seq. recognition |
| | GvH score (threshold: −2.1): −10.32 |
| | possible cleavage site: between 26 and 27 |

>>> Seems to have no N-terminal signal peptide

| ALOM: | Klein et al's method for TM region allocation | |
|---|---|---|
| | Init position for calculation: 1 | |
| | Tentative number of TMS(s) for the threshold 0.5: 1 | |
| | Number of TMS(s) for threshold 0.5: 0 | |
| | PERIPHERAL | Likelihood = 8.54 (at 365) |

| | ALOM score: −1.17 (number of TMSs: 0) | | | |
|---|---|---|---|---|
| MITDISC: | discrimination of mitochondrial targeting seq | | | |
| | R content: | 0 | Hyd Moment(75): | 5.58 |
| | Hyd Moment(95): | 3.29 | G content: | 0 |
| | D/E content: | 2 | S/T content: | 1 |

| | |
|---|---|
| | Score: −7.15 |
| Gavel: | prediction of cleavage sites for mitochondrial preseq |
| | cleavage site motif not found |

NUCDISC: discrimination of nuclear localization signals

| | |
|---|---|
| | pat4: none |
| | pat7: PHRSRRS (4) at 684 |
| | bipartite: none |
| | content of basic residues: 12.6% |
| | NLS Score: −0.13 |
| KDEL: | ER retention motif in the C-terminus: none |

ER Membrane Retention Signals: none
SKL: peroxisomal targeting signal in the C-terminus: none
PTS2: 2nd peroxisomal targeting signal: found
RIKQLLHQL at 72
VAC: possible vacuolar targeting motif: none
RNA-binding motif: none
Actinin-type actin-binding motif:

type 1: none
type 2: none

NMYR: N-myristoylation pattern: none
Prenylation motif: CaaX motif in the C-terminus: CIIS

if X is S, A, or M, it will be farnesylated
otherwise, it will be geranylgeranylated

memYQRL: transport motif from cell surface to Golgi: none
Tyrosines in the tail: none
Dileucine motif in the tail: none
checking 63 PROSITE DNA binding motifs:

```
Leucine zipper pattern (PS00029): *** found ***
  LQVSSNRLSADVDPLSLQMDML at 358
LIM domain signature (PS00478): *** found ***
  CEQCGGQINGGDIAVFASRAGHGVCWHPPCFV
  CTVCNELL at 130
```

checking 71 PROSITE ribosomal protein motifs: none
checking 33 PROSITE prokaryotic DNA binding motifs: none

| | |
|---|---|
| NNCN: | Reinhardt's method for Cytoplasmic/Nuclear discrimination |
| | Prediction: nuclear |
| | Reliability: 94.1 |
| COIL: | Lupas's algorithm to detect coiled-coil regions |
| | total: 0 residues |

Final Results (k = 9/23):

```
73.9%: nuclear
  8.7%: mitochondrial
  8.7%: plasma membrane
  8.7%: cytoplasmic
```

>> prediction for CG56383-02 is nuc (k = 23)

[0563] A search of the NOV36a protein against the Geneseq database, a proprietary database that contains sequences published in patents and patent publication, yielded several homologous proteins shown in Table 36D.

TABLE 36D
Geneseq Results for NOV36a

| | | NOV36a | Identities/ | |
|---|---|---|---|---|
| | | Residues/ | Similarities for | |
| Geneseq | Protein/Organism/Length | Match | the Matched | Expect |
| Identifier | [Patent #,Date] | Residues | Region | Value |
| ABG07025 | Novel human diagnostic protein | 49 . . . 844 | 721/807 (89%) | 0.0 |
| | #7016 - Homo sapiens, 795 aa. | 1 . . . 795 | 737/807 (90%) | |
| | [WO200175067-A2, 11-OCT-2001] | | | |
| ABB82161 | Human NOV6b protein sequence - | 1 . . . 554 | 554/554 (100%) | 0.0 |
| | Homo sapiens, 559 aa. | 1 . . . 554 | 554/554 (100%) | |
| | [WO200270660-A2, 12-SEP-2002] | | | |
| ABU11832 | Human MDDT polypeptide SEQ ID | 5 . . . 844 | 429/851 (50%) | 0.0 |
| | 779 - Homo sapiens, 839 aa. | 9 . . . 839 | 542/851 (63%) | |
| | [WO200279449-A2, 10-OCT-2002] | | | |
| ABU11569 | Human MDDT polypeptide SEQ ID | 5 . . . 844 | 429/851 (50%) | 0.0 |
| | 516 - Homo sapiens, 839 aa. | 9 . . . 839 | 542/851 (63%) | |
| | [WO200279449-A2, 10-OCT-2002] | | | |
| ABG08405 | Novel human diagnostic protein | 49 . . . 350 | 302/302 (100%) | 0.0 |
| | #8396 - Homo sapiens, 311 aa. | 1 . . . 302 | 302/302 (100%) | |
| | [WO200175067-A2, 11-OCT-2001] | | | |

[0564] In a BLAST search of public sequence databases, the NOV36a protein was found to have homology to the proteins shown in the BLASTP data in Table 36E.

TABLE 36E
Public BLASTP Results for NOV36a

| | | NOV36a | Identities/ | |
|---|---|---|---|---|
| Protein | | Residues/ | Similarities for | |
| Accession | | Match | the Matched | Expect |
| Number | Protein/Organism/Length | Residues | Portion | Value |
| AAH50793 | Similar to prickle-like 1 (Drosophila) - | 1 . . . 844 | 803/845 (95%) | 0.0 |
| | Mus musculus (Mouse), 879 aa | 35 . . . 879 | 826/845 (97%) | |
| | (fragment). | | | |
| AAP33399 | Prickle2 - Brachydanio rerio | 5 . . . 844 | 569/852 (66%) | 0.0 |
| | (Zebrafish) (Danio rerio), 840 aa. | 1 . . . 840 | 664/852 (77%) | |
| Q96MT3 | Hypothetical protein FLJ31937 - | 5 . . . 844 | 428/851 (50%) | 0.0 |
| | Homo sapiens (Human), 831 aa. | 1 . . . 831 | 541/851 (63%) | |
| Q90WV2 | LIM protein prickle b - Xenopus | 5 . . . 844 | 413/861 (47%) | 0.0 |
| | laevis (African clawed frog), 866 aa. | 35 . . . 866 | 538/861 (61%) | |
| AAP33398 | Prickle1 - Brachydanio rerio | 7 . . . 844 | 387/853 (45%) | 0.0 |
| | (Zebrafish) (Danio rerio), 793 aa. | 9 . . . 793 | 499/853 (58%) | |

[0565] PFam analysis predicts that the NOV36a protein contains the domains shown in the Table 36F.

TABLE 36F
Domain Analysis of NOV36a

| | | Identities/ | |
|---|---|---|---|
| Pfam | NOV36a | Similarities for | |
| Domain | Match Region | the Matched Region | Expect Value |
| LIM | 130 . . . 192 | 19/66 (29%) | 2.9e−11 |
| | | 43/66 (65%) | |
| LIM | 195 . . . 252 | 17/62 (27%) | 3.9e−13 |
| | | 45/62 (73%) | |
| LIM | 255 . . . 315 | 16/66 (24%) | 0.022 |
| | | 34/66 (52%) | |

### Example 37

[0566] The NOV37 clone was analyzed, and the nucleotide and encoded polypeptide sequences are shown in Table 37A.

TABLE 37A

NOV37 Sequence Analysis

| | | |
|---|---|---|
| NOV37a, CG56449-04 | SEQ ID NO: 857 | 877 bp |
| DNA Sequence | ORF Start: ATG at 25 | ORF Stop: TAG at 535 |

CCGGAGCTGCCTGTGATGCCGTGAATGGCTCCTGCCTCTGCCCCGCTGGCCGCCGGGGCCCCCGCTGT
GCCGAGACCTGCCCTGCCGGCCTGTACGGCGACAACTGTCGGCATTCCTGCCTCTGCCAGAACGGAGG
GACCTGTGACCCTGTCTCAGGCCTGCGAGCACCCCTGTCCCCCTGGCTTCCACGGGGCTGGCCGCCAG
GGGTTGTGCTGGTGTCAACATGGAGCCCCCTGCGACCCCATCAGTGGCCGATGCCTCTGCCCTGCCGG
CTTCCACGGCCACTTCTGTGAGAGGGATTGCAGAAGGGGCCAGTTTGGGCCCAGCTGCACCCTGCACT
GTGACTGCGGGGGTGGGGCTGACTGCGACCCTGTCAGTGGGCAGTGTCACTGTGTGGATGGCTACATG
GGGCCCACGTGCCGGGAAGGTGGGCCCCTCCGGCTCCCCGAGAACCCGTCCTTAGCCCAGGGCTCAGC
GGGCACACTGCCCGCCTCCAGCAGACCCACATCCCGGAGCGGTGGACCAGCGAGGCACTAGTAGAGGC
AGTCCCGTGGAGCCCGCCTCTCCAGTCCCAGCCAGAGGGGACCCTGGCCTTTGGTGACCACTGAGAAC
GACACTTCACGGGCCCAGAGCTCCTGGTACTGCCCTTCCTTTGAGGGCCGTGGAGGGCTGTGGACAGC
CCAGCAACCTGTCGCTCTTGGAGGCTGGTGTGGCCTTGAGGAGGGAAGCCTCGCATGGCCGCTGGAAG
AGAGGCGTCTCCTGGCCTGGCTCTGCAGAACCCAGGGGCACGCTCTGGGCCTGGGCTGAGGAAGTCCC
GCTCTCCCGCGGCTCTGAGTTGGACTGAGGACAGGTGTGGGCGCCAGTGTGGGTGCAGGCG

| | | | |
|---|---|---|---|
| NOV37a, CG56449-04 | | | |
| Protein Sequence | SEQ ID NO: 858 | 170 aa | MW at 17123.1kD |

MAPASAPLAAGAPAVPRPALPACTATTVGIPASARTEGPVTLSQACEHPCPPGFHGAGRQGLCWCQHG
APCDPISGRCLCPAGFHGHFCERDCRRGQFGPSCTLHCDCGGGADCDPVSGQCHCVDGYMGPTCREGG
PLRLPENPSLAQGSAGTLPASSRPTSRSGGPARH

| | | |
|---|---|---|
| NOV37b, CG56449-09 | SEQ ID NO: 859 | 5172 bp |
| DNA Sequence | ORF Start: ATG at 16 | ORF Stop: TAG at 4798 |

GCACCGGCGCGCACGATGTCGTTCCTTGAAGAGGCGAGGGCAGCGGGGCGCGCGGTGGTCCTGGCGTT
GGTGCTGCTGCTGCTCCCCGCCGTGCCCGTGGGCGCCAGCGTTCCGCCGCGGCCCCTGCTCCCGCTGC
AGCCCGGCATGCCCCACGTGTGTGCTGAGCAGGAGCTGACCCTGGTGGGCCGCCGCCAGCCGTGCGTG
CAGGCCTTAAGCCACACGGTGCCGGTGTGGAGGGCCGGCTGTGGGTGGCAGGCGTGGTGCGTGGGTCA
TGAGCGGAGAACCGTCTACTACATGGGCTACAGGCAGGTGTATACCACGGAGGCCCGGACCGTGCTCA
GGTGCTGCCGAGGGTGGACGCAGCAGCCCGACGAGGAGGGCTGCCTCTCGGCTGAATGCAGCGCCAGC
CTCTGTTTTCACGGTGGCCGTTGTGTGCCAGGCTCAGCCCAGCCGTGTCACTGTCCCCCCGGCTTCCA
GGGACCCCGCTGTCAGTATGATGTGGACGAATGCCGAACCCACAACGGTGGCTGCCAGCACCGGTGCG
TGAACACCCCAGGCTCCTACCTCTGTGAGTGCAAGCCCGGCTTCCGGCTCCACACTGACAGCAGGACC
TGCCTGGCCATTAACTCCTGCGCCCTGGGCAATGGCGGCTGCCAGCACCACTGTGTCCAGCTCACAAT
CACTCGGCATCGCTGCCAGTGCCGGCCCGGGTTCCAGCTCCAGGAGGACGGCAGGCATTGTGTCCGTA
GAAGCCCGTGTGCCAACAGGAACGGCAGCTGCATGCACAGGTGCCAGGTGGTCCCGGGGCCTCGTCAG
TGTGAGTGCCACGTGGGCTATCAGCTAGCAGCGGACGGCAAGGCCTGTGAAGATGTGGACGAATGTGC
CGCAGGGCTGGCCCAGTGTGCCCATGGCTGCCTCAACACCCAGGGGTCCTTCAAGTGCGTGTGTCACG
CGGGCTATGAGCTGGGCGCCGATGGCCGGCAGTGCTACCGTATTGAGATGGAAATCGTGAACAGCTGT
GAGGCCAACAACGGCGGCTGCTCCCATGGCTGCAGCCACACCAGTGCTGGGCCCCTGTGCACCTGTCC
CCGCGGCTACGAGCTGGACACAGATCAGAGGACCTGCATCAGATGTCGACGACTGTGCAGACAGCCCG
TGCTGCAGCAGGTGTGCACCAACAACCCTGGCGGGTACGAGTGCGGCTGCTACGCCGGCTACCGGCTC
AGTGCCGATGGCTGCGGCTGCGAGGATGTGGATGAGTGCGCCTCCAGCCGTGGCGGCTGCGAGCACCA
CTGCACCAACCTGGCCGGCTCCTTCCAGTGCTCCTGCGAGGCCGGCTACCGGCTGCACGAGGACCGTA
GGGGCTGCAGCGCCCTGGAGGAGCCGATGGTGGACCTGGACGGCGAGCTGCCTTTCGTGCGGCCCCTG
CCCCACATTGCCGTGCTCCAGGACGAGCTGCCGCAACTCTTCCAGGATGACGACGTCGGGACCGATGA
GGAAGAGGCAGAGTTGCGGGGCGAACACACGCTCACAGAGAAGTTTGTCTGCCTGGATGACTCCTTTG
GCCATGACTGCAGCTTGACCTGTGATGACTGCAGGAACGGAGGGACCTGCCTCCTGGGCCTGGATGGC
TGTGATTGCCCCGAGGGCTGGACTGGGCTCATCTGCAATGAGAGTTGTCCTCCGGACACCTTTGGGAA
GAACTGCAGCTTCTCCTGCAGCTGTCAGAATGGTGGGACCTGCGACTCTGTCACGGGGGCCTGCCGCT
GCCCCCCGGGTGTCAGTGGAACTAACTGTGAGGATGGCTGCCCCAAGGGCTACTATGGCAAGCACTGT
CGCAAGAAATGCAACTGTGCCAACCGGGGCCGGTGCCACCGCCTCTACGGGGCCTGCCTCTGCGACCC
AGGGCTCTACGGCCGCTTCTGCCACCTCGCCTGCCCGCCGTGGGCCTTTGGGCCGGGCTGCTCGGAGG
AGTGCCAGTGTGTGCAGCCCCACACGCAGTCCTGTGACAAGAGGGATGGCAGCTGCTCCTGCAAGGCT
GGCTTCCGGGGCGAGCGCTGTCAGGCAGAGTGTGAGCCGGGCTACTTTGGGCCGGGGTGCTGGCAGGC
ATGCACCTGCCCAGTGGGCGTGGCCTGTGACTCCGTGAGCGGCGAGTGTGGGAAGCGGTGTCCTGCTG
GCTTCCAGGGAGAGGACTGTGGCCAAGAGTGCCCGGTGGGGACCTTTGGCGTGAACTGCTCGAGCTCC
TGCTCCTGTGGGGGGGCCCCCTGCCACGGGGTCACGGGGCAGTGCCGGTGTCCGCCGGGGAGGACTGG
GGAAGACTGTGAGGCAGGTGAGTGTGAGGGCCTCTGGGGGCTGGGCTGCCAGGAGATCTGCCCAGCAT
GCCATAACGCTGCTCGCTGCGACCCTGAGACCGGAGCCTGCCTGTGCCTCCCTGGCTTTGTCGGCAGC
CGCTGCCAGGACTGTGAGGCAGGCTGGTATGGTCCCAGCTGCCAGACAATGTGCTCTTGTGCCAATGA
TGGGGCACTGCCACCAAGACACGGGACACTGCAGCTGTGCCCCGGGTGGACCGGCTTTAGCTGCCAGA
GAGCCTGTGATACTGGGCACTGGGGACCTGACTGCAGCCACCCCTGCAACTGCAGCGCTGGCCACGGG
AGCTGTGATGCCATCAGCGGCCTGTGTCTGTGTGAGGCTGGCTACGTGGGCCCGCGGTGCGAGCAGTC
AGAGTGTCCCCAGGGCCACTTTGGGCCCGGCTGTGAGCAGCGGTGCCAGTGTCAGCATGGAGCAGCCT
GTGACCACGTCAGCGGGGCCTGCACCTGCCCGGCCGGCTGGAGGGGCACCTTCTGCGAGCATAACTGC
CCGGCCGGCTTCTTTGGATTGGACTGTCGCAGTGCCTGCAACTGCACCGCCGGAGCTGCCTGTGATGC
CGTGAATGGCTCCTGCCTCTGCCCCGCTGGCCGCCGGGGCCCCCGCTGTGCCGAGAGTGCCTGCCCAG
CCCACACCTACGGGCACAATTGCAGCCAGGCCTGTGCCTGCTTTAACGGGGCCTCCTGTGACCCTGTC
CACGGGCAGTGCCACTGTGCCCCTGGCTGGATGGGGCCCTCCTGCCTGCAGGCCTGCCCTGCCGGCCT
GTACGGCGACAACTGTCGGCATTCCTGCCTCTGCCAGAACGGAGGGACCTGTGACCCTGTCTCAGGCC
ACTGTGCGTGCCCAGAGGGCTGGGCCGGCCTGGCCTGTGAGGTAGAGTGCCTCCCCCGGGACGTCAGA
GCTGGCTGCCGGCACAGCGGCGGTTGCCTCAACGGGGGCCTGTGTGACCCGCACACGGGCCGCTGCCT
CTGCCCAGCCGGCTGGACTGGGGACAAGTGTCAGAGCCCTGCAGCCTGTGCCAAGGAAACATTCGGGC
CTCACTGTGAGGGGCGCTGTGCCTGCCGGTGGGGAGGCCCCTGCCACCTTGCCACCGGGGCCTGCCTC
TGCCCTCCGGGGTGGCGGGGGCCTCATCTTTCTGCAGCCTGCCTGCGAAGCTGGTTTGGAGAGGCCTG
TGCCCAGCGCTGCAGCTGCCCGCCTGGCGCTGCCTGCCACCACGTCACTGGGGCCTAACGCTGTCCCC
CTGGCTTCACTGGCTCCGGCTGCGAGCAGGCCTGCCCACCCGGCAGCTTTGGGGAGGACTGTGCGCAG
ATGTGCCAGTGTCCCGGTGAGAACCCGGCCTGCCACCCTGCCACCGGGACCTGCTCATGTGCTGCTGG
CTACCACGGCCCCAGCTGCCAGCAACGATGTCCGCCCGGGCGGTATGGGCCAGGCTGTGAACAGCTGT
GTGGGTGTCTCAACGGGGGCTCCTGTGATGCGGCCACGGGGGCCTGCCGCTGCCCCACTGGGTTCCTC
GGGACGGACTGCAACCTCACCTGTCCGCAGGGCCGCTTCGGCCCCAACTGCACCCACGTGTGTGGGTG
TGGGCAGGGGGCGGCCTGCGACCCTGTGACCGGCACCTGCCTCTGCCCCCCGGGGAGAGCCGGCGTCC
GCTGTGAGCGAGGCTGCCCCCAGAACCGGTTTGGCGTGGGCTGCGAGCACACCTGCTCCTGCAGAAAT
GGGGGCCTGTGCCACGCCAGCGGGGCCTGTGCCACGCCAGCAAGCGGCAGCTGCTCCTGTGGCCTGGG
CTGGACGGGGCGGCACTGCGAGCTGGCCTGTCCCCCTGGGCGCTACGGAGCCGCCTGCCATCTGGAGT
GCTCCTGCCACAACAACAGCACGTGTGAGCCTGCCACGGGCACCTGCCGCTGCGGCCCCGGCTTCTAT
GGCCAGGCCTGCGAGCACCCCTGTCCCCCTGGCTTCCACGGGGCTGGCTGCCAAAGGTTGTGCTGGTG
TCAACATGGAGCCCCCTGCGACCCCATCAGTGGCCGATGCCTCTGCCCTGCCGAATTCCACGAACACT
TCTGTGAGAGGGGGTGTGAGCCAGGTTCATTTGGAGAGGGCTGCCACCAGCGCTGTGACTGTGACGGG
GGGGCACCCTGTGACCCTGTCACCGGTCTCTGCCTTTGCCCACCAGGGCGCTCAGGAGCCACCTGTAA
CCTGGATTGCAGGGGGGGCCAGTTTGGGCCCAGCTGCACCCTGCACTGTGACTGCGGGGGTGGGGCTG
ACTGCGACCCTGTCAGTGGGCAGTGTCACTGTGTGGATGGCTACATGGGGCCCACGGGCCGGGGGGGT
GGGCCCCTCCGGCTCCCCGAGAACCCGTCCTTAGCCCAGGGCTCAGCGGGCACACTGCCCGCCTCCAG
CAGACCCACATCCCGGAGCGGTGGACCAGCGAGGCACTAGTAGAGGCAGTCCCGTGGAGCCCGCCTCT
CCAGTCCCAGCCAGAGGGGACTCTGGCCTTTGGTGACCACTGAGAAGGACACTTCACGGGCCCAGAGC
TCCTGGTACTGCCCTTCCTTTGAGGGCCGTGGAGGGCTGTGGACAGCCCAGCAACCTGTCGCTCTTGG
AGGCTGGTGTGGCCTTGAGGAGGGAAGCCTCGCATGGCCGCTGGAAGAGAGGCGCCTCCTGGCCTGGC
TCTGCAGAACCCAGGGGCACGCTCTGGGCCTGGGCTGAGGAAGTCCCGCTCTCCCCGCGGCTCTGAGT
TGGACTGAGGACAGGTGTGGGCGCCAGTGTGGGTGCAGTCACAGTGCAGGGTGCAGTCACAGTGCAGC
GTGC

| | | | |
|---|---|---|---|
| NOV37b, CG56449-09 | | | |
| Protein Sequence | SEQ ID NO: 860 | 1594 aa | MW at 166431.4kD |

MSFLEEARAAGRAVVLALVLLLLPAVPVGASVPPRPLLPLQPGMPHVCAEQELTLVGRRQPCVQALSH
TVPVWPAGCGWQAWCVGHERRTVYYMGYRQVYTTEARTVLRCCRGWTQQPDEEGCLSAECSASLCFHG
GRCVPGSAQPCHCPPGFQGPRCQYDVDECRTHNGGCQHRCVNTPGSYLCECKPGFRLHTDSRTCLAIN
SCALGNGGCQHHCVQLTITRHRCQCRPGFQLQEDGRHCVRRSPCANRNGSCMHRCQVVRGLARCECHV
GYQLAADGKACEDVDECAAGLAQCAHGCLNTQGSFKCVCHAGYELGADGRQCYRIEMEIVNSCEANNG
GCSHGCSHTSAGPLCTCPRGYELDTDQRTCIRCRRLCRQPVLQQVCTNNPGGYECGCYAGYRLSADGC
GCEDVDECASSRGGCEHHCTNLAGSFQCSCEAGYRLHEDRRGCSALEEPMVDLDGELPFVRPLPHIAV
LQDELPQLFQDDDVGADEEEAELRGEHTLTEKFVCLDDSFGHDCSLTCDDCRNGGTCLLGLDGCDCPE
GWTGLICNESCPPDTFGKNCSFSCSCQNGGTCDSVTGACRCPPGVSGTNCEDGCPKGYYGKHCRKKCN
CANRGRCHRLYGACLCDPGLYGRFCHLACPPWAFGPGCSEECQCVQPHTQSCDKRDGSCSCKAGFRGE
RCQAECEPGYFGPGCWQACTCPVGVACDSVSGECGKRCPAGFQGEDCGQECPVGTFGVNCSSSCSCGG
APCHGVTGQCRCPPGRTGEDCEAGECEGLWGLGCQEICPACHNAARCDPETGACLCLPGFVGSRCQDC
EAGWYGPSCQTMCSCANDGHCHQDTGHCSCAPGWTGFSCQRACDTGHWGPDCSHPCNCSAGHGSCDAI
SGLCLCEAGYVGPRCEQSECPQGHFGPGCEQRCQCQHGAACDHVSGACTCPAGWRGTFCEHACPAGFF
GLDCRSACNCTAGAACDAVTGSCLCPAGRRGPRCAESACPAHTYGHNCSQACACFNGASCDPVHGQCH
CAPGWMGPSCLQACPAGLYGDNCRHSCLCQNGGTCDPVSGHCACPEGWAGLACEVECLPRDVRAGCRH
SGGCLNGGLCDPHTGRCLCPAGWTGDKCQSPAACAKGTFGPHCEGRCACRWGGPCHLATGACLCPPGW
RGPHLSAACLRGWFGEACAQRCSCPPGAACHHVTGACRCPPGFTGSGCEQACPPGSFGEDCAQMCQCP
GENPACHPATGTCSCAAGYHGPSCQQRCPPGRYGPGCEQLCGCLNGGSCDAATGACRCPTGFLGTDCN
LTCPQGRFGPNCTHVCGCGQGAACDPVTGTCLCPPGRAGVRCERGCPQNRFGVGCEHTCSCRNGGLCH
ASGACATPASGSCSCGLGWTGRHCELACPPGRYGAACHLECSCHNNSTCEPATGTCRCGPGFYGQACE
HPCPPGFHGAGCQGLCWCQHGAPCDPISGRCLCPAGFHGHFCERGCEPGSFGEGCHQRCDCDGGAPCD
PVTGLCLCPPGRSGATCNLDCRRGQFGPSCTLHCDCGGGADCDPVSGQCHCVDGYMGPTCREGGPLRL
PENPSLAQGSAGTLPASSRPTSRSGGPARH

| | | |
|---|---|---|
| NOV37c, 191887507 | SEQ ID NO: 861 | 522 bp |
| DNA Sequence | ORF Start: at 2 | ORF Stop: at 521 |

GGATCCGTGCCTCGCTGGTCCACCGCTCATGGCTCCTGCCTCTGCCCCGCTGGCCGCCGGGGCCCCCG
CTGTGCCGAGACCTGCCCTGCCGGCCTGTACGGCGACAACTGTCGGCATTCCTGCCTCTGCCAGAACG
GAGGGACCTGTGACCCTGTCTCAGGCCTGCGAGCACCCCTGTCCCCCTGGCTTCCACGGGGCTGGCTG
CCAGGGGTTGTGCTGGTGTCAACATGGAGCCCCCTGCGACCCCATCAGTGGCCGATGCCTCTGCCCTG
CCGGCTTCCACGGCCACTTCTGTGAGAGGGATTGCAGAAGGGGCCAGTTTGGGCCCAGCTGCACCCTG
CACTGTGACTGCGGGGGTGGGGCTGACTGCGACCCTGTCAGTGGGCAGTGTCACTGTGTGGATGGCTA
CATGGGGCCCACGTGCCGGGAAGGTGGGCCCCTCCGGCTCCCCGAGAACCCGTCCTTAGCCCAGGGCT
CAGCGGGCACACTGCCCGCCTCCAGCAGACCCACATCCCGCTCGAG

| | | |
|---|---|---|
| NOV37c, 191887507 | | |
| Protein Sequence SEQ ID NO: 862 | 173 aa | MW at 17358.4kD |

DPCLAGPPLMAPASAPLAAGAPAVPRPALPACTATTVGIPASARTEGPVTLSQACEHPCPPGFHGAGC
QGLCWCQHGAPCDPISGRCLCPAGFHGHFCERDCRRGQFGPSCTLHCDCGGGADCDPVSGQCHCVDGY
MGPTCREGGPLRLPENPSLAQGSAGTLPASSRPTSRS

| | | |
|---|---|---|
| NOV37d, 316351371 | SEQ ID NO: 863 | 4255 bp |
| DNA Sequence | ORF Start: at 2 | ORF Stop: end of sequence |

CACCGGATCCACCATGTCGTTCCTTGAAGAGGCGAGGGCAGCGGGGCGCGCGGTGGTCCTGGCGTTGG
TGCTGCTGCTGCTCCCCGCCGTGCCCGTGGGCGCCAGCGTTCCGCCGCGGCCCCTGCTCCCGCTGCAG
CCCGGCATGCCCCACGTGTGTGCTGAGCAGGAGCTGACCCTGGTGGGCCGCCGCCAGCCGTGCGTGCA
GGCCTTAAGCCACACGGTGCCGGTGTGGAAGGCCGGCTGTGGGTGGCAGGCGTGGTGCGTGGGTCATG
AGCGGAGAACCGTCTACTACATGGGCTACAGGCAGGTGTATACCACGGAGGCCCGGACCGTGCTCAGG
TGCTGCCGAGGGTGGACGCAGCAGCCCGACGAGGAGGGCTGCCTCTCGGCTGAATGCAGCGCCGGCCT
CTGTTTTCACGGTGGCCGTTGTGTGCCAGGCTCAGCCCAGCCGTGTCACTGTCCCCCCGGCTTCCAGG
GACCCCGCTGTCAGTATGATGTGGACGAATGCCGAACCCACAACGGTGGCTGCCAGCACCGGTGCGTG
AACACCCCAGGCTCCTACCTCTGTGAGTGCAAGCCCGGCTTCCGGCTCCACACTGACAGCAGGACCTG
CCTGGCCATTAACTCCTGCGCCCTGGGCAATGGCGGCTGCCAGCACCACTGTGTCCAGCTCACAATCA
CTCGGCATCGCTGCCAGTGCCGGCCCGGGTTCCAGCTCCAGGAGGACGGCAGGCATTGTGTCCGTAGA
AGCCCGTGTGCCAACAGGAACGGCAGCTGCATGCACAGGTGCCAGGTGGTCCGGGGCCTCGCCCGCTG
TGAGTGCCACGTGGGCTATCAGCTAGCAGCGGACGGCAAGGCCTGTGAAGATGTGGACGAATGTGCCG
CAGGGCTGGCCCAGTGTGCCCATGGCTGCCTCAACACCCAGGGGTCCTTCAAGTGCGTGTGTCACGCG
GGCTATGAGCTGGGCGCCGATGGCCGGCAGTGCTACCGGATTGAGATGGAAATCGTGAACAGCTGTGA
GGCCAACAACGGCGGCTGCTCCCATGGCTGCAGCCACACCAGTGCTGGGCCCCTGTGCACCTGTCCCC
GCGGCTACGAGCTGGACACAGATCAGAGGACCTGCATCGATGTCGGCGACTGTGCAGACAGCCCGTGC
TGCCAGCAGGTGTGCACCAACAACCCTGGCGGGTACGAGTGCGGCTGCTACGCCGGCTACCGGCTCAG
TGCCGATGGCTGCGGCTGTGAGGATGTGGATGAGTGCGCCTCCAGCCGTGGCGGCTGCGAGCACCACT
GCACCAACCTGGCCGGCTCCTTCCAGTGCTCCTGCGAGGCCGGCTACCGGCTGCACGAGGACCGTAGG
GGCTGCAGCCCCCTGGAGGAGCCGATGGTGGACCTGGACGGCGAGCTGCCTTTCGTGCGGCCCCTGCC
CCACATTGCCGTGCTCCAGGACGAGCTGCCGCAACTCTTCCAGGATGACGACGTCGGGGCCGATGAGG
AAGAGGCAGAGTTGCGGGGCGAACACACGCTCACAGAGAAGTTTGTCTGCCTGGATGACTCCTTTGGC
CATGACTGCAGCTTGACCTGTGATGACTGCAGGAACGGAGGGACCTGTCTCCTGGGCCTGGATGGCTG
TGATTGCCCCGAGGGCTGGACTGGGCTCATCTGCAATGAGACTTGTCCTCCGGACACCTTTGGGAAGA
ACTGCAGCTTCTCCTGCAGCTGTCAGAATGGTGGGACCTGCGACTCTGTCACGGGGGCCTGCCGCTGC
CCCCCGGGTGTCAGTGGAACTAACTGTGAGGATGGCTGCCCCAAGGGCTACTATGGCAAGCACTGTCG
CAAGAAATGCAACTGTGCCAACCGGGGCCGGTGCCACCGCCTCTACGGGGCCTGCCTCTGCGACCCAG
GGCTCTACGGCCGCTTCTGCCACCTCACCTGCCCGCCGTGGGCCTTTGGGCCGGGCTGCTCGGAGGAG
TGCCAGTGTGTGCAGCCCCACACGCAGTCCTGTGACAAGAGGGATGGCAGCTGCTCCTGCAAGGCTGG
CTTCCGGGGCGAGCGCTGTCAGGCAGAGTGTGAGCCGGGCTACTTTGGGCCGGGGTGCTGGCAGGCAT
GCACCTGCCCAGTGGGCGTGGCCTGTGACTCCGTGAGCGGCGAGTGTGGGAAGCGGTGTCCTGCTGGC
TTCCAGGGAGAGGACTGTGGCCAAGAGTGCCCGGTGGGGACGTTTGGCGTGAACTGCTCGAGCTCCTG
CTCCTGTGGGGGGGCCCCCTGCCACGGGGTCACGGGGCAGTGCCGGTGTCCACCGGGGAGGACTGGGG
AAGACTGTGAGGCAGATTGTCCCGAGGGCCGCTGGGGGCTGGGCTGCCAGGAGATCTGCCCAGCATGC
CAGCACGCTGCCCGCTGCGACCCTGAGACCGGAGCCTGCCTGTGCCTCCCTGACTTCGTCGGCAGCCG
CTGCCAGGACGTGTGCCCAGCAGGCTGGTATGGTCCCAGCTGCCAGACAAGGTGCTCTTGTGCCAATG
ATGGGCACTGCCACCCAGCCACCGGACACTGCAGCTGTGCCCCCGGGTGGACCGGCTTTAGCTGCCAG
AGTGTCCCCAGGGCCACTTTGGGCCCGGCTGTGAGCAGCTGTGCCAGTGTCAGCATGGAGCAGCCTGT
GACCACGTCAGCGGGGCCTGCACCTGCCCGGCCGGCTGGAGGGGCACCTTCTGCGAGCATGCCTGCCC
GGCCGGCTTCTTTGGATTGGACTGTCGCAGTGCCTGCAACTGCACCGCCGGAGCTGCCTGTGATGCCG
TGAATGGCTCCTGCCTCTGCCCCGCTGGCCGCCGGGGCCCCCGCTGTGCCGAGAAGTGCCTCCCCCGG
CCGCTGCCTCTGCCCAGCCGGCTGGACTGGGGACAAGTGTCAGAGCCCCTGCCTGCGGGGCTGGTTTG
GAGAGGCCTGTGCCCAGCGCTGCAGCTGCCCGCCTGGCGCTGCCTGCCACCACGTCACTGGGGCCTGC
CGCTGTCCCCCTGGCTTCACTGGCTCCGGCTGCGAGCAGGGATGTCCGCCCGGGCGGTATGGGCCAGG
CTGTGAACAGCTGTGTGGGTGTCTCAACGGGGGCTCCTGTGATGCGGCCACGGGGGCCTGCCGCTGCC
CCACTGGGTTCCTCGGGACGGACTGCAACCTCACCTGTCCGCAGGGCCGCTTCGGCCCCAACTGCACC
GAGAGCCGGCGTCCGCTGTGAGCGAGGCTGCCCCCAGAACCGGTTTGGCGTGGGCTGCGAGCACACCT
GCTCCTGCAGAAATGGGGGCCTGTGCCACGCCAGCAACGGCAGCTGCTCCTGTGGCCTGGGCTGGACG
GGGCGGCACTGCGAGCTGGCCTGTCCCCCTGGGCGCTACGGAGCCGCCTGCCATCTGGAGTGCTCCTG
CCACAACAACAGCACGTGTGAGCCTGCCACGGGCACCTGCCGCTGCGGCCCCGGCTTCTATGGCCAGG
CCTGCGAGCACCCCTGTCCCCCTGGCTTCCACGGGGCTGGCTGCCAGGGGTTGTGCTGGTGTCAACAT
GGAGCCCCCTGCGACCCCATCAGTGGCCGATGCCTCTGCCCTGCCGGCTTCCACGGCCACTTCTGTGA
GAGGGGGTGTGAGCCAGGTTCATTTGGAGAGGGCTGCCACCAGCGCTGTGACTGTGACGGGGGGGCAC
CCTGTGACCCTGTCACCGGTCTCTGCCTTTGCCCACCAGGGCGCTCAGGAGCCACCTGTAACCTGGAT
TGCAGAAGGGGCCAGTTTGGGCCCAGCTGCACCCTGCACTGTGACTGCGGGGGTGGGGCTGACTGCGA
CCCTGTCAGTGGGCAGTGTCACTGTGTGGATGGCTACATGGGGCCCACGTGCCGGGAAGGTGGGCCCC
TCCGGCTCCCCGAGAACCCGTCCTTAGCCCAGGGCTCAGCGGGCACACTGCCCGCCTCCAGCAGACCC

| | | | |
|---|---|---|---|
| NOV37d, 316351371 | | | |
| Protein Sequence | SEQ ID NO: 864 | 1418 aa | MW at 148398.2kD |

TGSTMSFLEEARAAGRAVVLALVLLLLPAVPVGASVPPRPLLPLQPGMPHVCAEQELTLVGRRQPCVQ
ALSHTVPVWKAGCGWQAWCVGHERRTVYYMGYRQVYTTEARTVLRCCRGWTQQPDEEGCLSAECSAGL
CFHGGRCVPGSAQPCHCPPGFQGPRCQYDVDECRTHNGGCQHRCVNTPGSYLCECKPGFRLHTDSRTC
LAINSCALGNGGCQHHCVQLTITRHRCQCRPGFQLQEDGRHCVRRSPCANRNGSCMHRCQVVRGLARC
ECHVGYQLAADGKACEDVDECAAGLAQCAHGCLNTQGSFKCVCHAGYELGADGRQCYRIEMEIVNSCE
ANNGGCSHGCSHTSAGPLCTCPRGYELDTDQRTCIDVGDCADSPCCQQVCTNNPGGYECGCYAGYRLS
ADGCGCEDVDECASSRGGCEHHCTNLAGSFQCSCEAGYRLHEDRRGCSPLEEPMVDLDGELPFVRPLP
HIAVLQDELPQLFQDDDVGADEEEAELRGEHTLTEKFVCLDDSFGHDCSLTCDDCRNGGTCLLGLDGC
DCPEGWTGLICNETCPPDTFGKNCSFSCSCQNGGTCDSVTGACRCPPGVSGTNCEDGCPKGYYGKHCR
KKCNCANRGRCHRLYGACLCDPGLYGRFCHLTCPPWAFGPGCSEECQCVQPHTQSCDKRDGSCSCKAG
FRGERCQAECEPGYFGPGCWQACTCPVGVACDSVSGECGKRCPAGFQGEDCGQECPVGTFGVNCSSSC
SCGGAPCHGVTGQCRCPPGRTGEDCEADCPEGRWGLGCQEICPACQHAARCDPETGACLCLPDFVGSR
CQDVCPAGWYGPSCQTRCSCANDGHCHPATGHCSCAPGWTGFSCQRACDTGHWGPDCSHPCNCSAGHG
SCDAISGLCLCEAGYVGPRCEQQCPQGHFGPGCEQLCQCQHGAACDHVSGACTCPAGWRGTFCEHACP
AGFFGLDCRSACNCTAGAACDAVNGSCLCPAGRRGPRCAEKCLPRDVRAGCRHSGGCLNGGLCDPHTG
RCLCPAGWTGDKCQSPCLRGWFGEACAQRCSCPPGAACHHVTGACRCPPGFTGSGCEQGCPPGRYGPG
CEQLCGCLNGGSCDAATGACRCPTGFLGTDCNLTCPQGRFGPNCTHVCGCGQGAACDPVTGTCLCPPG
RAGVRCERGCPQNRFGVGCEHTCSCRNGGLCHASNGSCSCGLGWTGRHCETACPPGRYGAACHLECSC
HNNSTCEPATGTCRCGPGFYGQACEHPCPPGFHGAGCQGLCWCQHGAPCDPISGRCLCPAGFHGHFCE
RGCEPGSFGEGCHQRCDCDGGAPCDPVTGLCLCPPGRSGATCNLDCRPGQFGPSCTLHCDCGGGADCD
PVSGQCHCVDGYMGPTCREGGPLRLPENPSLAQGSAGTLPASSRPTSRSGGPARHGTG

| | | |
|---|---|---|
| NOV37e, 316935396 | SEQ ID NO: 865 | 5000 bp |
| DNA Sequence | ORF Start: at 28 | ORF Stop: TGA at 4987 |

TGCTGTTACAGGTGGAGGGCAGTGTAGTCTGAGCAGTACTCGTTGCTGCCGCGCGCGCCACCAGACAT
AATAGCTGACAGACTAACAGACTGTTCCTTTCCATGGGTCTTTTCTGCAGTCACCGTCCTTGACACGA
AGCTTTCTAGAAGATCTTCGCGAGGATCCACCATGTCGTTCCTTGAAGAGGCGAGGGCAGCGGGGCGC
GCGGTGGTCCTGGCGTTGGTGCTGCTGCTGCTCCCCGCCGTGCCCGTGGGCGCCAGCGTTCCGCCGCG
GCCCCTGCTCCCGCTGCAGCCCGGCATGCCCCACGTGTGTGCTGAGCAGGAGCTGACCCTGGTGGGCC
GCCGCCAGCCGTGCGTGCAGGCCTTAAGCCACACGGTGCCGGTGTGGAAGGCCGGCTGTGGGTGGCAG
GCGTGGTGCGTGGGTCATGAGCGGAGGACCGTCTACTACATGGGCTACAGGCAGGTGTATACCACGGA
GGCCCGGACCGTGCTCAGGTGCTGCCGAGGGTGGATGCAGCAGCCCGACGAGGAGGGCTGCCTCTCGG
ATGTGGGTGAGTGTGCCAACGCCAACGGGGGCTGTGCGGGTCGGTGCCGGGACACCGTGGGGGGCTTC
TACTGCCGCTGGCCCCCCCCCAGCCACCAGCTGCAGGGTGATGGCGAGACTTGCCAAGATGTGGACGA
ATGCCGAACCCACAACGGTGGCTGCCAGCACCGGTGCGTGAACACCCCAGGCTCCTACCTCTGTGAGT
GCAAGCCCGGCTTCCGGCTCCACACTGACAGCAGGACCTGCGCCATTAACTCCTGCGCCCTGGGCAAT
GGCGGCTGCCAGCACCACTGTGTCCAGCTCACAATCACTCGGCATCGCTGCCAGTGCCGGCCCGGGTT
CCAGCTCCAGGAGGACGGCAGGCATTGTGTCCGTAGAAGCCCGTGTGCCAACAGGAACGGCAGCTGCA
TGCACAGGTGCCAGGTGGTCCGGGGCCTCGCCCGCTGTGAGTGCCACGTGGGCTATCAGCTAGCAGCG
GACGGCAAGGCCTGTGAAGATGTGGACGAATGTGCCGCAGGGCTGGCCCAGTGTGCCCATGGCTGCCT
CAACACCCAGGGGTCCTTCAAGTGCGTGTGTCACGCGGGCTATGAGCTGGGCGCCGATGGCCGGCAGT
GCTACCGTATTGAGATGGAAATCGTGAACAGCTGTGAGGCCAACAACGGCGGCTGCTCCCATGGCTGC
AGCCACACCAGTGCTGGGCCCCTGTGCACCTGTCCCCGCGGCTACGAGCTGGACACAGATCAGAGGAC
CTGCATCAGATGTCGACGACTGTGCAGACAGCCCGTGCTGCAGCAGGTGTGCACCAACAACCCTGGCG
GGTACGAGTGCGGCTGCTACGCCGGCTACCGGCTCAGTGCCGATGGCTGCGGCTGCGAGGATGTGGAT
GAGTGCGCCTCCAGCCGTGGCGGCTGCGAGCACCACTGCACCAACCTGGCCGGCTCCTTCCAGTGCTC
CTGCGAGGCCGGCTACCGGCTGCACGAGGACCGTAGGGGCTGCAGCGCCCTGGAGGAGCCGATGGTGG
ACCTGGACGGCGAGCTGCCTTTCGTGCGGCCCCTGCCCCACATTGCCGTGCTCCAGGACGAGCTGCCG
CAACTCTTCCAGGATGACGACGTCGGGGCCGATGAGGAAGAGGCAGAGTTGCGGGGCGAACACACGCT
CACAGAGAAGTTTGTCTGCCTGGATGACTCCTTTGGCCATGACTGCAGCTTGACCTGTGATGACTGCA
GGAACGGAGGGACCTGCCTCCTGGGCCTGGATGGCTGTGATTGCCCCGAGGGCTGGACTGGGCTCATC
TGCAATGAGAGTTGTCCTCCGGACACCTTTGGGAAGAACTGCAGCTTCTCCTGCAGCTGTCAGAATGG
TGGGACCTGCGACTCTGTCACGGGGGCCTGCCGCTGCCCCCCGGGTGTCAGTGGAACTAACTGTGAGG
ATGGCTGCCCCAAGGGCTACTATGGCAAGCACTGTCGCAAGAAATGCAACTGTGCCAACCGGGGCCGG
TGCCACCGCCTCTACGGGGCCTGCCTCTGCGACCCAGGGCTCTACGGCCGCTTCTGCCACCTCGCCTG
CCCGCCGTGGGCCTTTGGGCCGGGCTGCTCGGAGGAGTGCCAGTGTGTGCAGCCCCACACGCAGTCCT
GTGACAAGAGGGATGGCAGCTGCTCCTGCAAGGCTGGCTTCCGGGGCGAGCGCTGTCAGGCAGAGTGT
GAGCCGGGCTACTTTGGGCCGGGGTGCTGGCAGGCATGCACCTGCCCAGTGGGCGTGGCCTGTGACTC
CGTGAGCGGCGAGTGTGGGAAGCGGTGTCCTGCTGGCTTCCAGGGAGAGGACTGTGGCCAAGAGTGCC
CGGTGGGGACCTTTGGCGTGAACTGCTCGAGCTCCTGCTCCTGTGGGGGGGCCCCCTGCCACGGGGTC
ACGGGGCAGTGCCGGTGTCCGCCGGGGAGGACTGGGGAAGACTGTGAGGCAGGTGAGTGTGAGGGCCT
CTGGGGGCTGGGCTGCCAGGAGATCTGCCCAGCATGCCATAACGCTGCTCGCTGCGACCCTGAGACCG
GAGCCTGCCTGTGCCTCCCTGGCTTTGTCGGCAGCCGCTGCCAGGACTGTGAGGCAGGCTGGTATGGT
CCCAGCTGCCAGACAATGTGCTCTTGTGCCAATGATGGGCACTGCCACCAAGACACGGGACACTGCAG
CTGTGCCCCCGGGTGGACCGGCTTTAGCTGCCAGAGAGCCTGTGATACTGGGCACTGGGGACCTGACT
GCAGCCACCCCTGCAACTGCAGCGCTGGCCACGGGAGCTGTGATGCCATCAGCGGCCTGTGTCTGTGT
GAGGCTGGCTACGTGGGCCCGCGGTGCGAGCAGTCAGAGTGTCCCCAGGGCCACTTTGGGCCCGGCTG
TGAGCAGCGGTGCCAGTGTCAGCATGGAGCAGCCTGTGACCACGTCAGCGGGGCCTGCACCTGCCCGG
CCGGCTGGAGGGGCACCTTCTGCGAGCATGCCTGCCCGGCCGGCTTCTTTGGATTGGACTGTCGCAGT
GCCTGCAACTGCACCGCCGGAGCTGCCTGTGATGCCGTGAATGGCTCCTGCCTCTGCCCCGCTGGCCG
CCGGGGCCCCCGCTGTGCCGAGAGTGCCTGCCCAGCCCACACCTACGGGCACAATTGCAGCCAGGCCT
GTGCCTGCTTTAACGGGGCCTCCTGTGACCCTGTCCACGGGCAGTGCCACTGTGCCCCTGGCTGGATG
GGGCCCTCCTGCCTGCAGGCCTGCCCTGCCGGCCTGTACGGCGACAACTGTCGGCATTCCTGCCTCTG
CCAGAACGGAGGGACCTGTGACCCTGTCTCAGGCCACTGTGCGTGCCCAGAGGGCTGGGCCGGCCTGG
CCTGTGAGGTAGAGTGCCTCCCCCGGGACGTCAGAGCTGGCTGCCGGCACAGCGGCGGTTGCCTCAAC
GGGGGCCTGTGTGACCCGCACACGGGCCGCTGCCTCTGCCCAGCCGGCTGGACTGGGGACAAGTGTCA
GAGCCCTGCAGCCTGTGCCAAGGGCACATTCGGGCCTCACTGTGAGGGGCGCTGTGCCTGCCGGTGGG
GAGGCCCCTGCCACCTTGCCACCGGGGCCTGCCTCTGCCCTCCGGGGTGGCGGGGGCCTCATCTTTCT
GCAGCCTGCCTGCGGGGCTGGTTTGGAGAGGCCTGTGCCCAGCGCTGCAGCTGCCCGCCTGGCGCTGC
CTGCCACCACGTCACTGGGGCCTGCCGCTGTCCCCCTGGCTTCACTGGCTCCGGCTGCGAGCAGGCCT
GCCCACCCGGCAGCTTTGGGGAGGACTGTGCGCAGATGTGCCAGTGTCCCGGTGAGAACCCGGCCTGC
CACCCTGCCACCGGGACCTGCTCATGTGCTGCTGGCTACCACGGCCCCAGCTGCCAGCAACGATGTCC
GCCCGGGCGGTATGGGCCAGGCTGTGAACAGCTGTGTGGGTGTCTCAACGGGGGCTCCTGTGATGCGG
CCACGGGGGCCTGCCGCTGCCCCACTGGGTTCCTCGGGACGGACTGCAACCTCACCTGTCCGCAGGGC
CGCTTCGGCCCCAACTGCACCCACGTGTGTGGGTGTGGGCAGGGGGCGGCCTGCGACCCTGTGACCGG
CACCTGCCTCTGCCCCCCGGGGAGAGCCGGCGTCCGCTGTGAGCGAGGCTGCCCCCAGAACCGGTTTG
GCGTGGGCTGCGAGCACACCTGCTCCTGCAGAAATGGGGGCCTGTGCCACGCCAGCAACGGCAGCTGC
TCCTGTGGCCTGGGCTGGACGGGGCGGCACTGCGAGCTGGCCTGTCCCCCTGGGCGCTACGGAGCCGC
CTGCCATCTGGAGTGCTCCTGCCACAACAACAGCACGTGTGAGCCTGCCACGGGCACCTGCCGCTGCG
GCCCCGGCTTCTATGGCCAGGCCTGCGAGCACCCCTGTCCCCCTGGCTTCCACGGGGCTGGCTGCCAG
GGGTTGTGCTGGTGTCAACATGGAGCCCCCTGCGACCCCATCAGTGGCCGATGCCTCTGCCCTGCCGG
CTTCCACGGCCACTTCTGTGAGAGGGGGTGTGAGCCAGGTTCATTTGGAGAGGGCTGCCACCAGCGCT
GTGACTGTGACGGGGGGGCACCCTGTGACCCTGTCACCGGTCTCTGCCTTTGCCCACCAGGGCGCTCA
GGAGCCACCTGTAACCTGGATTGCAGAAGGGGCCAGTTTGGGCCCAGCTGCACCCTGCACTGTGACTG
CGGGGGTGGGGCTGACTGCGACCCTGTCAGTGGGCAGTGTCACTGTGTGGATGGCTACATGGGGCCCA
CGTGCCGGGAAGCGGGCACACTGCCCGCCTCCAGCAGACCCACATCCCGGAGCGGTGGACCAGCGAGG
CACGTATTCCCCGGGCTCGAGGGTAAGCCTATCCCTAACCCTCTCCTCGGTCTCGATTCTACGCGTAC
CGGTCATCACCACCATCACCATTGAGTTTAATTCAT

| | | | |
|---|---|---|---|
| NOV37e, 316935396 | | | |
| Protein Sequence | SEQ ID NO: 866 | 1653 aa | MW at 173369.0kD |

SEQYSLLPRAPPDIIADRLTDCSFPWVFSAVTVLDTKLSRRSSRGSTMSFLEEARAAGRAVVLALVLL
LLPAVPVGASVPPRPLLPLQPGMPHVCAEQELTLVGRRQPCVQALSHTTPVWKAGCGWQAWCVGHERR
TVYYMGYRQVYTTEARTVLRCCRGWMQQPDEEGCLSDVGECANANGGCAGRCRDTVGGFYCRWPPPSH
QLQGDGETCQDVDECRTHNGGCQHRCVNTPGSYLCECKPGFRLHTDSRTCAINSCALGNGGCQHHCVQ
LTITRHRCQCRPGFQLQEDGRHCVRRSPCANRNGSCMHRCQVVRGLARCECHVGYQLAADGKACEDVD
ECAAGLAQCAHGCLNTQGSFKCVCHAGYELGADGRQCYRIEMEIVNSCEANNGGCSHGCSHTSAGPLC
TCPRGYELDTDQRTCIRCRRLCRQPVLQQVCTNNPGGYECGCYAGYRLSADGCGCEDVDECASSRGGC
EHHCTNLAGSFQCSCEAGYRLHEDRRGCSALEEPMVDLDGELPFVRPLPHIAVLQDELPQLFQDDDVG
ADEEEAELRGEHTLTEKFVCLDDSFGHDCSLTCDDCRNGGTCLLGLDGCDCPEGWTGLICNESCPPDT
FGKNCSFSCSCQNGGTCDSVTGACRCPPGVSGTNCEDGCPKGYYGKHCRKKCNCANRGRCHRLYGACL
CDPGLYGRFCHTACPPWAFGPGCSEECQCVQPHTQSCDKRDGSCSCKAGFRGERCQAECEPGYFGPGC
WQACTCPVGVACDSVSGECGKRCPAGFQGEDCGQECPVGTFGVNCSSSCSCGGAPCHGVTGQCRCPPG
RTGEDCEAGECEGLWGLGCQEICPACHNAARCDPETGACLCLPGFVGSRCQDCEAGWYGPSCQTMCSC
ANDGHCHQDTGHCSCAPGWTGFSCQRACDTGHWGPDCSHPCNCSAGHGSCDAISGLCLCEAGYVGPRC
EQSECPQGHFGPGCEQRCQCQHGAACDHVSGACTCPAGWRGTFCEHACPAGFFGLDCRSACNCTAGAA
CDAVNGSCLCPAGRRGPRCAESACPAETYGHNCSQACACFNGASCDPVHGQCHCAPGWMGPSCLQACP
AGLYGDNCRHSCLCQNGGTCDPVSGHCACPEGWAGLACEVECLPRDVRAGCRhSGGCLNGGLCDPHTG
RCLCPAGWTGDKCQSPAACAKGTFGPHCEGRCACRWGGPCHLATGACLCPPGWRGPHLSAACLRGWFG
EACAQRCSCPPGAACHHVTGACRCPPGFTGSGCEQACPPGSFGEDCAQMCQCPGENPACHPATGTCSC
AAGYHGPSCQQRCPPGRYGPGCEQLCGCLNGGSCDAATGACRCPTGFLGTDCNLTCPQGRFGPNCTHV
CGCGQGAACDPVTGTCLCPPGRAGVRCERGCPQNRFGVGCEHTCSCRNGGLCHASNGSCSCGLGWTGR
HCELACPPGRYGAACHLECSCHNNSTCEPATGTCRCGPGFYGQACEHPCPPGFHGAGCQGLCWCQHGA
PCDPISGRCLCPAGFHGHFCERGCEPGSFGEGCHQRCDCDGGAPCDPVTGLCLCPPGRSGATCNLDCR
RGQFGPSCTLHCDCGGGADCDPVSGQCHCVDGYMGPTCREAGTLPASSRPTSRSGGPARHVFPGLEGK
PIPNPLLGLDSTRTGHHHHHH

| | | |
|---|---|---|
| NOV37f, 317004318 | SEQ ID NO: 867 | 5005 bp |
| DNA Sequence | ORF Start: at 126 | ORF Stop: TGA at 4986 |

AACGGGTGGAGGGCAGTGTAGTCTGAGCAGTACTCGTTGCTGCCGCGCGCGCCACCAGACATAATAGC
TGACAGACTAACAGACTGTTCCTTTCCATGGGTCTTTTCTGCAGTCACCGTCCTTGACACGAAGCTCT
AGCCACCATGGAGACAGACACACTCCTGCTATGGGTACTGCTGCTCTGGGTTCCAGGTTCCACTGGTG
ACGCGGCCCAGCCGGCCAGGCGCGCGCGCCGTACGAAGCTTTCGCGAGGATCCAGCGTTCCGCCGCGG
CCCCTGCTCCCGCTGCAGCCCGGCATGCCCCACGTGTGTGCTGAGCAGGAGCTGACCCTGGTGGGCCG
CCGCCAGCCGTGCGTGCAGGCCTTAAGCCACACGGTGCCGGTGTGGAAGGCCGGCTGTGGGTGGCAGG
CGTGGTGCGTGGGTCATGAGCGGAGGACCGTCTACTACATGGGCTACAGGCAGGTGTATACCACGGAG
GCCCGGACCGTGCTCAGGTGCTGCCGAGGGTGGATGCAGCAGCCCGACGAGGAGGGCTGCCTCTCGGA
TGTGGGTGAGTGTGCCAACGCCAACGGGGGCTGTGCGGGTCGGTGCCGGGACACCGTGGGGGGCTTCT
ACTGCCGCTGGCCCCCCCCCAGCCACCAGCTGCAGGGTGATGGCGAGACTTGCCAAGATGTGGACGAA
TGCCGAACCCACAACGGTGGCTGCCAGCACCGGTGCGTGAACACCCCAGGCTCCTACCTCTGTGAGTG
CAAGCCCGGCTTCCGGCTCCACACTGACAGCAGGACCTGCGCCATTAACTCCTGCGCCCTGGGCAATG
GCGGCTGCCAGCACCACTGTGTCCAGCTCACAATCACTCGGCATCGCTGCCAGTGCCGGCCCGGGTTC
CAGCTCCAGGAGGACGGCAGGCATTGTGTCCGTAGAAGCCCGTGTGCCAACAGGAACGGCAGCTGCAT
GCACAGGTGCCAGGTGGTCCGGGGCCTCGCCCGCTGTGAGTGCCACGTGGGCTATCAGCTAGCAGCGG
ACGaCAAGGCCTGTGAAGATGTGGACGAATGTGCCGCAGGGCTGGCCCAGTGTGCCCATGGCTGCCTC
AACACCCAGGGGTCCTTCAAGTGCGTGTGTCACGCGGGCTATGAGCTGGGCGCCGATGGCCGGCAGTG
CTACCGTATTGAGATGGAAATCGTGAACAGCTGTGAGGCCAACAACGGCGGCTGCTCCCATGGCTGCA
GCCACACCAGTGCTGGGCCCCTGTGCACCTGTCCCCGCGGCTACGAGCTGGACACAGATCAGAGGACC
TGCATCAGATGTCGACGACTGTGCAGACAGCCCGTGCTGCAGCAGGTGTGCACCAACAACCCTGGCGG
GTACGAGTGCGGCTGCTACGCCGGCTACCGGCTCAGTGCCGATGGCTGCGGCTGCGAGGATGTGGATG
AGTGCGCCTCCAGCCGTGGCGGCTGCGAGCACCACTGCACCAACCTGGCCGGCTCCTTCCAGTGCTCC
TGCGAGGCCGGCTACCGGCTGCACGAGGACCGTAGGGGCTGCAGCGCCCTGGAGGAGCCGATGGTGGA
CCTGGACGGCGAGCTGCCTTTCGTGCGGCCCCTGCCCCACATTGCCGTGCTCCAGGACGAGCTGCCGC
AACTCTTCCAGGATGACGACGTCGGGGCCGATGAGGAAGAGGCAGAGTTGCGGGGCGAACACACGCTC
ACAGAGAAGTTTGTCTGCCTGGATGACTCCTTTGGCCATGACTGCAGCTTGACCTGTGATGACTGCAG
GAACGGAGGGACCTGCCTCCTGGGCCTGGATGGCTGTGATTGCCCCGAGGGCTGGACTGGGCTCATCT
GCAATGAGAGTTGTCCTCCGGACACCTTTGGGAAGAACTGCAGCTTCTCCTGCAGCTGTCAGAATGGT
GGGACCTGCGACTCTGTCACGGGGGCCTGCCGCTGCCCCCCGGGTGTCAGTGGAACTAACTGTGAGGA
TGGCTGCCCCAAGGGCTACTATGGCAAGCACTGTCGCAAGAAATGCAACTGTGCCAACCGGGGCCGGT
GCCACCGCCTCTACGGGGCCTGCCTCTGCGACCCAGGGCTCTACGGCCGCTTCTGCCACCTCGCCTGC
CCGCCGTGGGCCTTTGGGCCGGGCTGCTCGGAGGAGTGCCAGTGTGTGCAGCCCCACACGCAGTCCTG
TGACAAGAGGGATGGCAGCTGCTCCTGCAAGGCTGGCTTCCGGGGCGAGCGCTGTCAGGCAGAGTGTG
AGCCGGGCTACTTTGGGCCGGGGTGCTGGCAGGCATGCACCTGCCCAGTGGGCGTGGCCTGTGACTCC
GTGAGCGGCGAGTGTGGGAAGCGGTGTCCTGCTGGCTTCCAGGGAGAGGACTGTGGCCAAGAGTGCCC
GGTGGGGACCTTTGGCGTGAACTGCTCGAGCTCCTGCTCCTGTGGGGGGGCCCCCTGCCACGGGGTCA
CGGGGCAGTGCCGGTGTCCGCCGGGGAGGACTGGGGAAGACTGTGAGGCAGGTGAGTGTGAGGGCCTC
TGGGGGCTGGGCTGCCAGGAGATCTGCCCAGCATGCCATAACGCTGCTCGCTGCGACCCTGAGACCGG
AGCCTGCCTGTGCCTCCCTGGCTTTGTCGGCAGCCGCTGCCAGGACTGTGAGGCAGGCTGGTATGGTC
CCAGCTGCCAGACAATGTGCTCTTGTGCCAATGATGGGCACTGCCACCAAGACACGGGACACTGCAGC
TGTGCCCCCGGGTGGACCGGCTTTAGCTGCCAGAGAGCCTGTGATACTGGGCACTGGGGACCTGACTG
AGGCTGGCTACGTGGGCCCGCGGTGCGAGCAGTCAGAGTGTCCCCAGGGCCACTTTGGGCCCGGCTGT
GAGCAGCGGTGCCAGTGTCAGCATGGAGCAGCCTGTGACCACGTCAGCGGGGCCTGCACCTGCCCGGC
CGGCTGGAGGGGCACCTTCTGCGAGCATGCCTGCCCGGCCGGCTTCTTTGGATTGGACTGTCGCAGTG
CCTGCAACTGCACCGCCGGAGCTGCCTGTGATGCCGTGAATGGCTCCTGCCTCTGCCCCGCTGGCCGC
CGGGGCCCCCGCTGTGCCGAGAGTGCCTGCCCAGCCCACACCTACGGGCACAATTGCAGCCAGGCCTG
TGCCTGCTTTAACGGGGCCTCCTGTGACCCTGTCCACGGGCAGTGCCACTGTGCCCCTGGCTGGATGG
GGCCCTCCTGCCTGCAGGCCTGCCCTGCCGGCCTGTACGGCGACAACTGTCGGCATTCCTGCCTCTGC
GGGGCCTGTGTGACCCGCACACGGGCCGCTGCCTCTGCCCAGCCGGCTGGACTGGGGACAAGTGTCAG
AGCCCTGCAGCCTGTGCCAAGGGCACATTCGGGCCTCACTGTGAGGGGCGCTGTGCCTGCCGGTGGGG
AGGCCCCTGCCACCTTGCCACCGGGGCCTGCCTCTGCCCTCCGGGGTGGCGGGGGCCTCATCTTTCTG
CAGCCTGCCTGCGGGGCTGGTTTGGAGAGGCCTGTGCCCAGCGCTGCAGCTGCCCGCCTGGCGCTGCC
TGCCACCACGTCACTGGGGCCTGCCGCTGTCCCCCTGGCTTCACTGGCTCCGGCTGCGAGCAGGCCTG
CCCACCCGGCAGCTTTGGGGAGGACTGTGCGCAGATGTGCCAGTGTCCCGGTGAGAACCCGGCCTGCC
ACCCTGCCACCGGGACCTGCTCATGTGCTGCTGGCTACCACGGCCCCAGCTGCCAGCAACGATGTCCG
CCCGGGCGGTATGGGCCAGGCTGTGAACAGCTGTGTGGGTGTCTCAACGGGGGCTCCTGTGATGCGGC
CACGGGGGCCTGCCGCTGCCCCACTGGGTTCCTCGGGACGGACTGCAACCTCACCTGTCCGCAGGGCC
GCTTCGGCCCCAACTGCACCCACGTGTGTGGGTGTGGGCAGGGGGCGGCCTGCGACCCTGTGACCGGC
ACCTGCCTCTGCCCCCCGGGGAGAGCCGGCGTCCGCTGTGAGCGAGGCTGCCCCCAGAACCGGTTTGG
CGTGGGCTGCGAGCACACCTGCTCCTGCAGAAATGGGGGCCTGTGCCACGCCAGCAACGGCAGCTGCT
CCTGTGGCCTGGGCTGGACGGGGCGGCACTGCGAGCTGGCCTGTCCCCCTGGGCGCTACGGAGCCGCC
TGCCATCTGGAGTGCTCCTGCCACAACAACAGCACGTGTGAGCCTGCCACGGGCACCTGCCGCTGCGG
CCCCGGCTTCTATGGCCAGGCCTGCGAGCACCCCTGTCCCCCTGGCTTCCACGGGGCTGGCTGCCAGG
GGTTGTGCTGGTGTCAACATGGAGCCCCCTGCGACCCCATCAGTGGCCGATGCCTCTGCCCTGCCGGC
TTCCACGGCCACTTCTGTGAGAGGGGGTGTGAGCCAGGTTCATTTGGAGAGGGCTGCCACCAGCGCTG
TGACTGTGACGGGGGGGCACCCTGTGACCCTGTCACCGGTCTCTGCCTTTGCCCACCAGGGCGCTCAG
GAGCCACCTGTAACCTGGATTGCAGAAGGGGCCAGTTTGGGCCCAGCTGCACCCTGCACTGTGACTGC
GGGGGTGGGGCTGACTGCGACCCTGTCAGTGGGCAGTGTCACTGTGTGGATGGCTACATGGGGCCCAC
GTGCCGGGAAGCGGGCACACTGCCCGCCTCCAGCAGACCCACATCCCGGAGCGGTGGACCAGCGAGGC
ACGAATTCCCCGGGCTCGAGGGTAAGCCTATCCCTAACCCTCTCCTCGGTCTCGATTCTACGCGTACC
GGTCATCACCACCATCACCATTGAGTTTAATTCATTGATTT

| | | | |
|---|---|---|---|
| NOV37f, 317004318 | | | |
| Protein Sequence | SEQ ID NO: 868 | 1620 aa | MW at 169975.0kD |

HEALATMETDTLLLWVLLLWVPGSTGDAAQPARRARRTKLSRGSSVPPRPLLPLQPGMPHVCAEQELT
LVGRRQPCVQALSHTVPVWKAGCGWQAWCVGHERRTVYYMGYRQVYTTEARTVLRCCRGWMQQPDEEG
CLSDVGECANANGGCAGRCRDTVGGFYCRWPPPSHQLQGDGETCQDVDECRTHNGGCQHRCVNTPGSY
LCECKPGFRLHTDSRTCAINSCALGNGGCQHHCVQLTITRHRCQCRPGFQLQEDGRHCVRRSPCANRN
GSCMHRCQVVRGLARCECHVGYQLAADGKACEDVDECAAGLAQCAHGCLNTQGSFKCVCHAGYELGAD
GRQCYRIEMEIVNSCEANNGGCSHGCSHTSAGPLCTCPRGYELDTDQRTCIRCRRLCRQPVLQQVCTN
NPGGYECGCYAGYRLSADGCGCEDVDECASSRGGCEHHCTNLAGSFQCSCEAGYRLHEDRRGCSALEE
PMVDLDGELPFVRPLPHIAVLQDELPQLFQDDDVGADEEEAELRGEHTLTEKFVCLDDSFGHDCSLTC
DDCRNGGTCLLGLDGCDCPEGWTGLICNESCPPDTFGKNCSFSCSCQNGGTCDSVTGACRCPPGVSGT
NCEDGCPKGYYGKHCRKKCNCANRGRCHRLYGACLCDPGLYGRFCHLACPPWAFGPGCSEECQCVQPH
TQSCDKRDGSCSCKAGFRGERCQAECEPGYFGPGCWQACTCPVGVACDSVSGECGKRCPAGFQGEDCG
QECPVGTFGVNCSSSCSCGGAPCHGVTGQCRCPPGRTGEDCEAGECEGLWGLGCQEICPACHNAARCD
PETGACLCLPGFVGSRCQDCEAGWYGPSCQTMCSCANDGHCHQDTGHCSCAPGWTGFSCQRACDTGHW
GPDCSHPCNCSAGHGSCDAISGLCLCEAGYVGPRCEQSECPQGHFGPGCEQRCQCQHGAACDHVSGAC
TCPAGWRGTFCEHACPAGFFGLDCRSACNCTAGAACDAVNGSCLCPAGRRGPRCAESACPAHTYGHNC
SQACACFNGASCDPVHGQCHCAPGWMGPSCLQACPAGLYGDNCRHSCLCQNGGTCDPVSGHCACPEGW
AGLACEVECLPRDVRAGCRHSGGCLNGGLCDPHTGRCLCPAGWTGDKCQSPAACAKGTFGPHCEGRCA
CRWGGPCHLATGACLCPPGWRGPHLSAACLRGWFGEACAQRCSCPPGAACHHVTGACRCPPGFTGSGC
EQACPPGSFGEDCAQMCQCPGENPACHPATGTCSCAAGYHGPSCQQRCPPGRYGPGCEQLCGCLNGGS
CDAATGACRCPTGFLGTDCNLTCPQGRFGPNCTHVCGCGQGAACDPVTGTCLCPPGRAGVRCERGCPQ
NRFGVGCEHTCSCRNGGLCHASNGSCSCGLGWTGRHCELACPPGRYGAACHLECSCHNNSTCEPATGT
CRCGPGFYGQACEHPCPPGFHGAGCQGLCWCQHGAPCDPISGRCLCPAGFHGHFCERGCEPGSFGEGC
HQRCDCDGGAPCDPVTGLCLCPPGRSGATCNLDCRRGQFGPSCTLHCDCGGGADCDPVSGQCHCVDGY
MGPTCREAGTLPASSRPTSRSGGPARHEFPGLEGKPIPNPLLGLDSTRTGHHHHHH

| | | |
|---|---|---|
| NOV37g, CG56449-01 | SEQ ID NO: 869 | 7337 bp |
| DNA Sequence | ORF Start: ATG at 1 | ORF Stop: TGA at 4213 |

ATGCCCATGGGACATTCTGACAGGTGGTCTTGGCGTCTCCTGAGGCTGGCACTGCCACTCCCAGTCTG
GTTGCCGGCTGGGGGTGGCCGAGGCGCTGACTCTCCATGTCTCTGTTCCAGGCCCCACGTGTGTGCTG
AGCAGGAGCTGACCCTGGTGGGCCGCCGCCAGCCGTGCGTGCAGGCCTTAAGCCACACGGTGCCGGTG
TGGAAGGCCGGCTGTGGGTGGCAGGCGTGGTGCGTGGGTCATGAGCGGAGGACCGTCTACTACATGGG
CTACAGGCAGGTGTATACCACGGAGGCCCGGACCGTGCTCAGGTGCTGCCGAGGGTGGATGCAGCAGC
CCGACGAGGAGGGCTGCCTCTCGGATGTGGGTGAGTGTGCCAACGCCAACGGGGGCTGTGCGGGTCGG
TGCCGGGACACCGTGGGGGGCTTCTACTGCCGCTGGCCCCCCCCCAGCCACCAGCTGCAGGGTGATGG
CGAGACTTGCCAAGATGTGGACGAATGCCGAACCCACAACGGTGGCTGCCAGCACCGGTGCGTGAACA
CCCCAGGCTCCTACCTCTGTGAGTGCAAGCCCGGCTTCCGGCTCCACACTGACAGCAGGACCTGCGCC
ATTAACTCCTGCGCCCTGGGCAATGGCGGCTGCCAGCACCACTGTGTCCAGCTCACAATCACTCGGCA
TCGCTGCCAGTGCCGGCCCGGGTTCCAGCTCCAGGAGGACGGCAGGCATTGTGTCCGTAGAAGCCCGT
GTGCCAACAGGAACGGCAGCTGCATGCACAGGTGCCAGGTGGTCCGGGGCCTCGCCCGCTGTGAGTGC
CACGTGGGCTATCAGCTAGCAGCGGACGGCAAGGCCTGTGAAGATGTGGACGAATGTGCCGCAGGGCT
GGCCCAGTGTGCCCATGGCTGCCTCAACACCCAGGGGTCCTTCAAGTGCGTGTGTCACGCGGGCTATG
AGCTGGGCGCCGATGGCCGGCAGTGCTACCGTATTGAGATGGAAATCGTGAACAGCTGTGAGGCCAAC
AACGGCGGCTGCTCCCATGGCTGCAGCCACACCAGTGCTGGGCCCCTGTGCACCTGTCCCCGCGGCTA
CGAGCTGGACACAGATCAGAGGACCTGCATCAGATGTCGACGACTGTGCAGACAGCCCGTGCTGCAGC
AGGTGTGCACCAACAACCCTGGCGGGTACGAGTGCGGCTGCTACGCCGGCTACCGGCTCAGTGCCGAT
GGCTGCGGCTGCGAGGATGTGGATGAGTGCGCCTCCAGCCGTGGCGGCTGCGAGCACCACTGCACCAA
CCTGGCCGGCTCCTTCCAGTGCTCCTGCGAGGCCGGCTACCGGCTGCACGAGGACCGTAGGGGCTGCA
GCGCCCTGGAGGAGCCGATGGTGGACCTGGACGGCGAGCTGCCTTTCGTGCGGCCCCTGCCCCACATT
GCCGTGCTCCAGGACGAGCTGCCGCAACTCTTCCAGGATGACGACGTCGGGGCCGATGAGGAAGAGGC
AGAGTTGCGGGGCGAACACACGCTCACAGAGAAGTTTGTCTGCCTGGATGACTCCTTTGGCCATGACT
GCAGCTTGACCTGTGATGACTGCAGGAACGGAGGGACCTGCCTCCTGGGCCTGGATGGCTGTGATTGC
CCCGAGGGCTGGACTGGGCTCATCTGCAATGAGAGTTGTCCTCCGGACACCTTTGGGAAGAACTGCAG
CTTCTCCTAAAGCTGTCAGAATGGTGGGACCTGCGACTCTGTCACGGGGGCCTGCCGCTGCCCCCCGG
GTGTCAGTGGAACTAACTGTGAGGATGGCTGCCCCAAGGGCTACTATGGCAAGCACTGTCGCAAGAAA
TGCAACTGTGCCAACCGGGGCCGGTGCCACCGCCTCTACGGGGCCTGCCTCTGCGACCCAGGGCTCTA
CGAACGCTTCTGCCACCTCGCCTGCCCGCCGTGGGCCTTTGGGCCGGGCTGCTCGGAGGAGTGCCAGT
GTGTGCAGCCCCACACGCAGTCCTGTGACAAGAGGGATGGCAGCTGCTCCTGCAAGGCTAACTTCCGG
GGCGAGCGCTGTCAGGCAGAGTGTGAGCCGGGCTACTTTGGGCCGGGGTGCTGGCAGGCATGCACCTG
CCCAGTGGGCGTGGCCTGTGACTCCGTGAGCGGCGAGTGTGGGAAGCGGTGTCCTGCTGGCTTCCAGG
GAGAGGACTGTGGCCAAGAGTGCCCGGTGGGGACCTTTGGCGTGAACTGCTCGAGCTCCTGCTCCTGT
GGGGGGGCCCCCTGCCACGGGGTCACGGGGCAGTGCCGGTGTCCGCCGGGGAGGACTGGGAAAGACTG
TGAGGCAGGTGAGTGTGAGGGCCTCTGGGGGCTGGGCTGCCAGGAGATCTGCCCAGCATGCCATAACG
CTGCTCGCTGCGACCCTGAGACCGGAGCCTGCCTGTGCCTCCCTGGCTTTGTCGGCAGCCGCTGCCAG
GACTGTGAGGCAGGCTGGTATGGTCCCAGCTGCCAGACAATGTGCTCTTGTGCCGCTGATGGGCACTG
CCACCAAGACACGGGACACTGCAGCTGTGCCCCCGGGTGGACCGGCTTTAGCTGCCAGAGAGCCTGTG
ATACTGGGCACTGGGGACCTGACTGCAGCCACCCCTGCAACTGCAGCGCTGGCCACGGGAGCTGTGAT
GCCATCAGCGGCCTGTGTCTGTGTGAGGCTGGCTACGTGGGCCCGCGGTGCGAGCAGTCAGAGTGTCC
CCAGGGCCACTTTGGGCCCGGCTGTGAGCAGCGGTGCCAGTGTCAGCATGGAGCAGCCTGTGACCACG
TCAGCGGGGCCTGCACCTGCCCGGCCGGCTGGAGGGGCACCTTCTGCGAGCATGCCTGCCCGGCCGGC
TTCTTTGGATTGGACTGTCGCAGTGCCTGCAACTGCACCGCCGGAGCTGCCTGTGATGCCGTGAATGG
CTCCTGCCTCTGCCCCGCTGGCCGCCGGGGCCCCCGCTGTGCCGAGAGTGCCTGCCCAGCCCACACCT
ACGGGCACAATTGCAGCCAGGCCTGTGCCTGCTTTAACGGGGCCTCCTGTGACCCTGTCCACGGGCAG
TGCCACTGTGCCCCTGGCTGGATGGGGCCCTCCTGCCTGCAGGCCTGCCCTGCCGGCCTGTACGGCGA
CAACTGTCGGCATTCCTGCCTCTGCCAGAACGGAGGGACCTGTGACCCTGTCTCAGGCCACTGTGCGT
GCCCAGAGGGCTGGGCCGGCCTGGCCTGTGAGGTAGAGTGCCTCCCCCGGGACGTCAGAGCTGGCTGC
CGGCACAGCGGCGGTTGCCTCAACGGGGGCCTGTGTGACCCGCACACGGGCCGCTGCCTCTGCCCAGC
CGGCTGGACTGGGGACAAGTGTCAGAGCCCTGCAGCCTGTGCCAAGGGCACATTCGGGCCTCACTGTG
AGGGGCGCTGTGCCTGCCGGTGGGGAGGCCCCTGCCACCTTGCCACCGGGGCCTGCCTCTGCCCTCCG
GGGTGGCGGGGGCCTCATCTTTCTGCAGCCTGCCTGCGGGGCTGGTTTGGAGAGGCCTGTGCCCAGCG
CTGCAGCTGCCCGCCTGGCGCTGCCTGCCACCACGTCACTGGGGCCTGCCGCTGTCCCCCTGGCTTCA
CTGGCTCCGGCTGCGAGCAGGCCTGCCCACCCGGCAGCTTTGGGGAGGACTGTGCGCAGATGTGCCAG
TGTCCCGGTGAGAACCCGGCCTGCCACCCTGCCACCGGGACCTGCTCATGTGCTGCTGGCTACCACGG
CCCCAGCTGCCAGCAACGATGTCCGCCCGGGCGGTATGGGCCAGGCTGTGAACAGCTGTGTGGGTGTC
TCAACGGGGGCTCCTGTGATGCGGCCACGGGGGCCTGCCGCTGCCCCACTGGGTTCCTCGGGACGGAC
TGCAACCTCACCTGTCCGCAGGGCCGCTTCGGCCCCAACTGCACCCACGTGTGTGGGTGTGGGCAAAG
GGCGGCCTGCGACCCTGTGACCGGCACCTGCCTCTGCCCCCCGGGGAGAGCCGGCGTCCGCTGTGAGC
GAGGCTGCCCCCAGAACCGGTTTGGCGTGGGCTGCGAGCACACCTGCTCCTGCAGAAATGGGGGCCTG
TGCCACGCCAGCAAGCGGCAGCTGCTCCTGTGGCCTGGGCTGGACGGGGCGGCACTGCGAGCTGGCCT
GTCCCCCTGGGCGCTACGGAGCCGCCTGCCATCTGGAGTGCTCCTGCCACAACAACAGCACGTGTGAG
CCTGCCACGGGCACCTGCCGCTGCGGCCCCGGCTTCTATGGCCAGGCCTGCGAGCACCCCTGTCCCCC
TGGCTTCCACGGGGCTGGCTGCCAGGGGTTGTGCTGGTGTCAACATGGAGCCCCCTGCGACCCCATCA
GTGGCCGATGCCTCTGCCCTGCCGGCTTCCACGGCCACTTCTGTGAGAGGGGGTGTGAGCCAGGTTCA
CTGCCTTTGCCCACCAGGGCGCTCAGGAGCCACCTGTAACCTGGATTGCAGAAGGGGCCAGTTTGGGC
CCAGCTGCACCCTGCACTGTGACTGCGGGGGTGGGGCTGACTGCGACCCTGTCAGTGGGCAGTGTCAC
TGTGTGGATGGCTACATGGGGCCCACGTGCCGGGAAGGTGGGCCCCTCCGGCTCCCCGAGAACCCGTC
CTTAGCCCAGGGCTCAGCGGGCACACTGCCCGCCTCCAGCAGACCCACATCCCGGAGCGGTGGACCAG
CGAGGCACTAGTAGAGGCAGTCCCGTGGAGCCCGCCTCTCCAGTCCCAGCCAGAGGGGACCCTGGCCT
TTGGTGACCACTGAGAAGGACACTTCACGGGCCCAGAGCTCCTGGTACTGCCCTTCCTTTGAGGGCCG
AGGAGGGCTGTGGACAGCCCAGCAACCTGTCGCTCTTGGAGGCTGGTGTGGCCTTGAGGAGGGAAGAA
TCGCATGGCCGCTGGAAGAGAGGCGCCTCCTGGCCTGGCTCTGCAGAACCCAGGGGCACGCTCTGGGC
CTGGGCTGAGGAAGTCCCGCTCTCCCCGCGGCTCTGAGTTGGACTGAGGACAGGTGTGGGCGCCAGTG
TGGGTGCAGGCGCAGGTGCAGGCACAGGGCCACTGTCCTCCAGGCAGGCTTTTTGGTGCTAGGCCCTG
GGACTGGAAGTCGCCCAGCCCGTATTTATGTAAAGGTATTTATGGGCCACTGCACATGCCCGCTGCAG
CCCTGGGATCAGCTGGAAGCTGCCTGTCATCTCCTGCCCAATCCCCAGAAACCCTGATTCAGGTCTGC
AGGCTCCTGCGGGCTCACCAGGCTGCTGGCTCCGGTACCATGTACCTAAAGGTAAAAAAAGGAGCAGG
CAACCTCCTCGTGGCCTGTGTGTTTGCTGTGTTACGTGGACTCTGTGTGGGCTCCTCCCTGGGGCCCG
GCCAGCATAACGGTGCACCCAGGGACCTCCCAGTGCACCCGGGGCCCTTTGCAGGGGTGGGGGTGCCA
CACAAGTGAAGAAGTTGGGACTCATCTCAGTTCCCAGTGCTATTGAGGAGAACGCTGGGGCTGCATTC
ATTACCGCTGAGACCCAGAGACTGGCTGTTCCCAGAGAATGGCCCAGGGGGAGGAGAACTGGTGTAAA
GGGGCAACCTGGACTGAGGCCGAACTCCCTTGGGCTCACCCCACCCACCCCTACCTGAGCATCAGCAG
TGGGGGGAGGGCAGCATCGCAGGGGCAGGGACTCCCTGGGTGAGGACAGACCAGCCCTCCCGAGCACC
TGGCACTCATGGGCTGAGGCTGACTTCTCCTGGAAGAAGGGCCCAGAGTGGAAGGAAGAGGCAGAGGC
TAGAGGTGGTGGCTGGGGGCTCCTCTGCAGAGTGGGGTGGCCAATGGAGAGGGCTGCACTCACACCGC
ACATAGGAACTCTCTCTCCCTTAAGAAGGCCCCCTTAGGGTCTGGGCTGCCGCCCCCATCACCCTAAA
CCAGCCAAAGGTAGCTGAGGCCCCAGGGCAGACAATTTCACCAGCAGGANGAGGAGGAGTCCAGTGAG
CTTGGTTGCTCACAGACAGCAAGGGAGCTGTCACAGAGGAAGCTGATGAATGGACCGCTGTGGGGAGA
CTTTAAAGTAGAACAGTGATAAGGGAGGGCAGGATGGTGGGGATGCAGAAGCAGCAGCCAGAGAGAGA
CGGACTGGGGTGCAGACGGAGTGTGGAAAACGCATACCTTGAAATGAAGCATCCAGCAGATGGGGTGA
GTGGATACAGCTCAGGAGATTCTCCCAGGAATAGCAGGGAGGCGTAAAGAGAGACAACGTACAGAGAT
AGATGAATGGAAATGGGTAAGGGAGGTGTTCATTCACATCCATCTAACTGCAAAATACAAAAGTAAGA
AGTCATTGACATGAAGCAACGACGACCAAGACGTTCTCAGATCTAAAGGTGAATGATCTCAGTCAGCC
TGGAAATGCACAAGGTGGAAAAATAACATAAAAAAGCCATAAGACCTTGAAGAACATCAATGTCAAAG
ATAAATTCTAAAGTCCCAGAGAAAAAAGAATGGGAATCAAATTGACCTCAGACTATACGTGAGAAACA
CGGAGAGCCAGAAAACTGTGATGTTCCATCCTCAGAGTTTGAAGGAAATATTTGAAGGCTGAATTTTA
CATCCAGCTAAACTATCAAAGGCATGCAAAGTCCATGTTATTCTTAGGCCTTCAAGGCCTCGGCCATT
TTTCTACAGAAAAGCCTGATTTTAAAATGCTCTTAGAGACGTTCTCCAGCCAGAAGAGAAAGAAGCCA
GGAGGGTGCTCTGAGATATTCAGTCACCACAGTTCCCAAATGGCCTAGGAATTCAGAGAGTCAGAATA
TCACCATTACTCCCCAATGGGAACCCCCGACAGTCTCAGCATGGTGTGAGGGTGTGGACGGGGGGCCT
GGCAGGTACCAATCACTCATCCCGCTCAGTGAAGACACAGTGTTCAGCTACGGAAGCCATAAGGCAGG
CCGAGCTTCTGCCCATCCGGAGGAAATCTCAGCTATCCAACGGCGGTCAGGAGCAGAGGAAAATAAAG
CAGAATAACTAGAAAACACGCTCACAGATCCTAATGTTAACGGTTACAAATGACGACGGAAAAACAAA
CTCCTGACCATATATTATATAGTTTCAAGCAGCAAGAAGGAGGATATTGAACATTCTCAACACACATA
ATAAACGCTTGAGATGATGATATGCTCATTACCCTGATTTGATCACTAGACATACCATGTATCAAAAC
ATCACTGTGTATCCGATGAATATCTACAATTATTGTCAATTAAAACATCATTAAAAAACAA

| | | | |
|---|---|---|---|
| NOV37g, CG56449-01 | | | |
| Protein Sequence | SEQ ID NO: 870 | 1404 aa | MW at 147886.8kD |

MPMGHSDRWSWRLLRLALPLPVWLPAGGGRGADSPCLCSRPHVCAEQELTLVGRRQPCVQALSHTVPV
WKAGCGWQAWCVGHERRTVYYMGYRQVYTTEARTVLRCCRGWMQQPDEEGCLSDVGECANANGGCAGR
CRDTVGGFYCRWPPPSHQLQGDGETCQDVDECRTHNGGCQHRCVNTPGSYLCECKPGFRLHTDSRTCA
INSCALGNGGCQHHCVQLTITRHRCQCRPGFQLQEDGRHCVRRSPCANRNGSCMHRCQVVRGLARCEC
HVGYQLAADGKACEDVDECAAGLAQCAHGCLNTQGSFKCVCHAGYELGADGRQCYRIEMEIVNSCEAN
NGGCSHGCSHTSAGPLCTCPRGYELDTDQRTCIRCRRLCRQPVLQQVCTNTPGGYECGCYAGYRLSAD
GCGCEDVDECASSRGGCEHHCTNLAGSFQCSCEAGYRLHEDRRGCSALEEPMVDLDGELPFVRPLPHI
AVLQDELPQLFQDDDVGADEEEAELRGEHTLTEKFVCLDDSFGHDCSLTCDDCRNGGTCLLGLDGCDC
PEGWTGLICNESCPPDTFGKNCSFSCSCQNGGTCDSVTGACRCPPGVSGTNCEDGCPKGYYGKHCRKK
CNCANRGRCHRLYGACLCDPGLYGRFCHLACPPWAFGPGCSEECQCVQPHTQSCDKRDGSCSCKAGFR
GERCQAECEPGYFGPGCWQACTCPVGVACDSVSGECGKRCPAGFQGEDCGQECPVGTFGVNCSSSCSC
GGAPCHGVTGQCRCPPGRTGEDCEAGECEGLWGLGCQEICPACHNAARCDPETGACLCLPGFVGSRCQ
DCEAGWYGPSCQTMCSCANDGHCHQDTGHCSCAPGWTGFSCQPACDTGHWGPDCSHPCNCSAGHGSCD
ASGLCLCEAGYVTGPRCEQSECPQGHFGPGCEQRCQCQHGAACDHVSGACTCPAGWRGTFCEHACPAG
FFGLDCRSACNCTAGAACDAVNGSCLCPAGRRGPRCAESACPAHTYGHNCSQACACFNGASCDPVHGQ
CHCAPGWMGPSCLQACPAGLYGDNCRHSCLCQNGGTCDPVSGHCACPEGWAGLACEVECLPRDVRAGC
RHSGGCLNGGLCDPHTGRCLCPAGWTGDKCQSPAACAKGTFGPHCEGRCACRWGGPCHLATGACLCPP
GWRGPHLSAACLRGWFGEACAQRCSCPPGAACHHVTGACRCPPGFTGSGCEQACPPGSFGEDCAQMCQ
CPGENPACHPATGTCSCAAGYHGPSCQQRCPPGRYGPGCEQLCGCLNGGSCDAATGACRCPTGFLGTD
CNLTCPQGRFGPNCTHVCGCGQGAACDPVTGTCLCPPGRAGVRCERGCPQNRFGVGCEHTCSCRNGGL
CHASKRQLLLWPGLDGAALRAGLSPWALRSRLPSGVLLPQQQHV

| | | |
|---|---|---|
| NOV37h, CG56449-02 | SEQ ID NO: 871 | 7319 bp |
| DNA Sequence | ORF Start: ATG at 1 | ORF Stop: TGA at 4195 |

ATGCCCATGGGACATTCTGACAGGTGGTCTTGGCGTCTCCTGAGGCTGGCACTGCCACTCCCAGTCTG
GTTGCCGGCTGGGGGTGGCCGAGGCGCTGACTCTCCATGTCTCTGTTCCAGGCCCCACGTGTGTGCTG
AGCAGGAGCTGACCCTGGTGGGCCGCCGCCAGCCGTGCGTGCAGGCCTTAAGCCACACGGTGCCGGTG
TGGAAGGCCGGCTGTGGGTGGCAGGCGTGGTGCGTGGGTCATGAGCGGAGAACCGTCTACTACATGGG
CTACAGGCAGGTGTATACCACGGAGGCCCGGACCGTGCTCAGGTGCTGCCGAGGGTGGACGCAGCAGC
CCGACGAGGAGGGCTGCCTCTCGGCTGAATGCAGCGCCAGCCTCTGTTTTCACGGTGGCCGTTGTGTG
CCAGGCTCAGCCCAGCCGTGTCACTGTCCCCCCGGCTTCCAGGGACCCCGCTGTCAGTATGATGTGGA
CGAATGCCGAACCCACAACGGTGGCTGCCAGCACCGGTGCGTGAACACCCCAGGCTCCTACCTCTGTG
AGTGCAAGCCCGGCTTCCGGCTCCACACTGACAGCAGGACCTGCCTGGCCATTAACTCCTGCGCCCTG
GGCAATGGCGGCTGCCAGCACCACTGTGTCCAGCTCACAATCACTCGGCATCGCTGCCAGTGCCGGCC
CGGGTTCCAGCTCCAGGAGGACGGCAGGCATTGTGTCCGTAGAAGCCCGTGTGCCAACAGGAACGGCA
GCTGCATGCACAGGTGCCAGGTGGTCCGGGGCCTCGCCCGCTGTGAGTGCCACGTGGGCTATCAGCTA
GCAGCGGACGGCAAGGCCTGTGAAGATGTGGACGAATGTGCCGCAGGGCTGGCCCAGTGTGCCCATGG
CTGCCTCAACACCCAGGGGTCCTTCAAGTGCGTGTGTCACGCGGGCTATGAGCTGGGCGCCGATGGCC
GGCAGTGCTACCGTATTGAGATGGAAATCGTGAACAGCTGTGAGGCCAACAACGGCGGCTGCTCCCAT
GGCTGCAGCCACACCAGTGCTGGGCCCCTGTGCACCTGTCCCCGCGGCTACGAGCTGGACACAGATCA
GAGGACCTGCATCAGATGTCGACGACTGTGCAGACAGCCCGTGCTGCAGCAGGTGTGCACCAACAACC
CTGGCGGGTACGAGTGCGGCTGCTACGCCGGCTACCGGCTCAGTGCCGATGGCTGCGGCTGCGAGGAT
GTGGATGAGTGCGCCTCCAGCCGTGGCGGCTGCGAGCACCACTGCACCAACCTGGCCGGCTCCTTCCA
GTGCTCCTGCGAGGCCGGCTACCGGCTGCACGAGGACCGTAGGGGCTGCAGCGCCCTGGAGGAGCCGA
TGGTGGACCTGGACGGCGAGCTGCCTTTCGTGCGGCCCCTGCCCCACATTGCCGTGCTCCAGGACGAG
CTGCCGCAACTCTTCCAGGATGACGACGTCGGGGCCGATGAGGAAGAGGCAGAGTTGCGGGGCGAACA
CACGCTCACAGAGAAGTTTGTCTGCCTGGATGACTCCTTTGGCCATGACTGCAGCTTGACCTGTGATG
ACTGCAGGAACGGAGGGACCTGCCTCCTGGGCCTGGATGGCTGTGATTGCCCCGAGGGCTGGACTGGG
CTCATCTGCAATGAGAGTTGTCCTCCGGACACCTTTGGGAAGAACTGCAGCTTCTCCTGCAGCTGTCA
GAATGGTGGGACCTGCGACTCTGTCACGGGGGCCTGCCGCTGCCCCCCGGGTGTCAGTGGAACTAACT
GTGAGGATGGCTGCCCCAAGGGCTACTATGGCAAGCACTGTCGCAAGAAATGCAACTGTGCCAACCGG
GGCCGGTGCCACCGCCTCTACGGGGCCTGCCTCTGCGACCCAGGGCTCTACGGCCGCTTCTGCCACCT
CGCCTGCCCGCCGTGGGCCTTTGGGCCGGGCTGCTCGGAGGAGTGCCAGTGTGTGCAGCCCCACACGC
AGTCCTGTGACAAGAGGGATGGCAGCTGCTCCTGCAAGGCTGGCTTCCGGGGCGAGCGCTGTCAGGCA
GAGTGTGAGCCGGGCTACTTTGGGCCGGGGTGCTGGCAGGCATGCACCTGCCCAGTGGGCGTGGCCTG
TGACTCCGTGAGCGGCGAGTGTGGGAAGCGGTGTCCTGCTGGCTTCCAGGGAGAGGACTGTGGCCAAG
AGTGCCCGGTGGGGACCTTTGGCGTGAACTGCTCGAGCTCCTGCTCCTGTGGGGGGGCCCCCTGCCAC
GGGGTCACGGGGCAGTGCCGGTGTCCGCCGGGGAGGACTGGGGAAGACTGTGAGGCAGGTGAGTGTGA
GGGCCTCTGGGGGCTGGGCTGCCAGGAGATCTGCCCAGCATGCCATAACGCTGCTCGCTGCGACCCTG
AGACCGGAGCCTGCCTGTGCCTCCCTGGCTTTGTCGGCAGCCGCTGCCAGGACTGTGAGGCAGGCTGG
TATGGTCCCAGCTGCCAGACAATGTGCTCTTGTGCCAATGATGGGCACTGCCACCAAGACACGGGACA
CTGCAGCTGTGCCCCCGGGTGGACCGGCTTTAGCTGCCAGAGAGCCTGTGATACTGGGCACTGGGGAC
CTGACTGCAGCCACCCCTGCAACTGCAGCGCTGGCCACGGGAGCTGTGATGCCATCAGCGGCCTGTGT
CTGTGTGAGGCTGGCTACGTGGGCCCGCGGTGCGAGCAGTCAGAGTGTCCCCAGGGCCACTTTGGGCC
CGGCTGTGAGCAGCGGTGCCAGTGTCAGCATGGAGCAGCCTGTGACCACGTCAGCGGGGCCTGCACCT
GCCCGGCCGGCTGGAGGGGCACCTTCTGCGAGCATGCCTGCCCGGCCGGCTTCTTTGGATTGGACTGT
CGCAGTGCCTGCAACTGCACCGCCGGAGCTGCCTGTGATGCCGTGAATGGCTCCTGCCTCTGCCCCGC
TGGCCGCCGGGGCCCCCGCTGTGCCGAGAGTGCCTGCCCAGCCCACACCTACGGGCACAATTGCAGCC
AGGCCTGTGCCTGCTTTAACGGGGCCTCCTGTGACCCTGTCCACGGGCAGTGCCACTGTGCCCCTGGC
TGGATGGGGCCCTCCTGCCTGCAGGCCTGCCCTGCCGGCCTGTACGGCGACAACTGTCGGCATTCCTG
CCTCTGCCAGAACGGAGGGACCTGTGACCCTGTCTCAGGCCACTGTGCGTGCCCAGAGGGCTGGGCCG
GCCTGGCCTGTGAGGTAGAGTGCCTCCCCCGGGACGTCAGAGCTGGCTGCCGGCACAGCGGCGGTTGC
CTCAACGGGGGCCTGTGTGACCCGCACACGGGCCGCTGCCTCTGCCCAGCCGGCTGGACTGGGGACAA
GTGTCAGAGCCCTGCAGCCTGTGCCAAGGGCACATTCGGGCCTCACTGTGAGGGGCGCTGTGCCTGCC
GGTGGGGAGGCCCCTGCCACCTTGCCACCGGGGCCTGCCTCTGCCCTCCGGGGTGGCGGGGGCCTCAT
CTTTCTGCAGCCTGCCTGCGGGGCTGGTTTGGAGAGGCCTGTGCCCAGCGCTGCAGCTGCCCGCCTGG
CGCTGCCTGCCACCACGTCACTGGGGCCTGCCGCTGTCCCCCTGGCTTCACTGGCTCCGGCTGCGAGC
AGGCCTGCCCACCCGGCAGCTTTGGGGAGGACTGTGCGCAGATGTGCCAGTGTCCCGGTGAGAACCCG
GCCTGCCACCCTGCCACCGGGACCTGCTCATGTGCTGCTGGCTACCACGGCCCCAGCTGCCAGCAACG
ATGTCCGCCCGGGCGGTATGGGCCAGGCTGTGAACAGCTGTGTGGGTGTCTCAACGGGGGCTCCTGTG
ATGCGGCCACGGGGGCCTGCCGCTGCCCCACTGGGTTCCTCGGGACGGACTGCAACCTCACCTGTCCG
CAGGGCCGCTTCGGCCCCAACTGCACCCACGTGTGTGGGTGTGGGCAGGGGGCGGCCTGCGACCCTGT
GACCGGCACCTGCCTCTGCCCCCCGGGGAGAGCCGGCGTCCGCTGTGAGCGAGGCTGCCCCCAGAACC
GGTTTGGCGTGGGCTGCGAGCACACCTGCTCCTGCAGAAATGGGGGCCTGTGCCACGCCAGCAAGCGG
CAGCTGCTCCTGTGGCCTGGGCTGGACGGGGCGGCACTGCGAGCTGGCCTGTCCCCCTGGGCGCTACG
GAGCCGCCTGCCATCTGGAGTGCTCCTGCCACAACAACAGCACGTGTGAGCCTGCCACGGGCACCTGC
CGCTGCGGCCCCGGCTTCTATGGCCAGGCCTGCGAGCACCCCTGTCCCCCTGGCTTCCACGGGGCTGG
CTGCCAGGGGTTGTGCTGGTGTCAACATGGAGCCCCCTGCGACCCCATCAGTGGCCGATGCCTCTGCC
CTGCCGGCTTCCACGGCCACTTCTGTGAGAGGGGGTGTGAGCCAGGTTCATTTGGAGAGGGCTGCCAC
CAGCGCTGTGACTGTGACGGGGGGGCACCCTGTGACCCTGTCACCGGTCTCTGCCTTTGCCCACCAGG
GCGCTCAGGAGCCACCTGTAACCTGGATTGCAGAAGGGGCCAGTTTGGGCCCAGCTGCACCCTGCACT
GTGACTGCGGGGGTGGGGCTGACTGCGACCCTGTCAGTGGGCAGTGTCACTGTGTGGATGGCTACATG
GGCAACACTGCCCGCCTCCAGCAGACCCACATCCCGGAGCGGTGGACCAGCGAGGCACTAGTAGAGGC
AGTCCCGTGGAGCCCGCCTCTCCAGTCCCAGCCAGAGGGGACCCTGGCCTTTGGTGACCACTGAGAAG
GACACTTCACGGGCCCAGAGCTCCTGGTACTGCCCTTCCTTTGAGGGCCGTGGAGGGCTGTGGACAGC
CCAGCAACCTGTCGCTCTTGGAGGCTGGTGTGGCCTTGAGGAGGGAAGCCTCGCATGGCCGCTGGAAG
AGAGGCGCCTCCTGGCCTGGCTCTGCAGAACCCAGGGGCACGCTCTGGGCCTGGGCTGAGGAAGTCCC
GCTCTCCCCGCGGCTCTGAGTTGGACTGAGGACAGGTGTGGGCGCCAGTGTGGGTGCAGGCGCAGGTG
AGGCACAAGGGCCACTGTCCTCCAGGCAGGCTTTTTGGTGCTAGGCCCTGGGACTGGAAGTCGCCCAG
CCCGTATTTATGTAAAGGTATTTATGGGCCACTGCACATGCCCGCTGCAGCCCTGGGATCAGCTGGAA
GCTGCCTGTCATCTCCTGCCCAATCCCCAGAAACCCTGATTCAGGTCTGCAGGCTCCTGCGGGCTCAC
CAGGCTGCTGGCTCCGGTACCATGTAAACCTAGGAAGGTAAAGGAGCAGGCAACCTCCTCGTGGCCTG
TGTGTTTGCTGTGTTACGTGGACTCTGTGTGGGCTCCTCCCTGGGGCCCGGCCAGCATAACGGTGCAC
CCAGGGACCTCCCAGTGCACCCGGGGCCCTTTGCAGGGGTGGGGGTGCCACACAAGTGAAGAAGTTGG
GACTCATCTCAGTTCCCAGTGCTATTGAGGAGAACGCTGGGGCTGCATTCATTACCGCTGAGACCCAG
AGACTGGCTGTTCCCAGAGAATGGCCCAGGGGGAGGAGGGCTGGTGTGGAGGGGCAACCTGGACTGAG
GCCGAACTCCCTTGGGCTCACCCCACCCACCCCTACCTGAGCATCAGCAGTGGGGGGAGGGCAGCATC
GCAGGGGCAGGGACTCCCTGGGTGAGGACAGACCAGCCCTCCCGAGCACCTGGCACTCATGGGCTGAG
GCTGACTTCTCCTGGAAGAAGGGCCCAGAGTGGAAGGAAGAGGCAGAGGGTAGAGGTGGTGGCTGGGG
GCTCCTCTGCAGAGTGGGGTGGCCAATGGAGAGGGCTGCACTCACACCGCAACATAGGACTCTCTCTC
CCTTAAGAAGGCCCCCTTAGGGTCTGGGCTGCCGCCCCCATCACCCTAAAACCAGCCAAGGTAGCTGA
GGCCCCAGGGCAGACAATTTCACCAGCAGGANGAGGAGGAGTCCAGTGAGCTTGGTTGCTCACAGACA
GCAAGGGAGCTGTCACAGAGGAAGCTGATGAATGGACCGCTGTGGGGAGACTTTAAAGTAGAACAGTG
ATAAGGGAGGGCAGGATGGTGGGGATGCAGAAGCAGCAGCCAGAGAGAGACGGACTGGGGTGCAGACC
GAGTGTGGAAAACGCATACCTTGAAATGAAGCATCCAGCAGATGGGGTGAGTGGATACAGCTCAGGAG
ATTCTCCCAGGAATAGCAGGGAGGCGTAAAGAGAGACAACGTACAGAGATAGATGAATGGAAATGGGT
AAGGGAGGTGTTCATTCACATCCATCTAACTGCAAAATACAAAAGTAAGAAGTCATTGACATGAAGCA
ACGACGACCAAGACGTTCTCAGATCTAAAGGTGAATGATCTCAGTCAGCCTGGAAATGCACAAGGTGC
AAAAATAACATAAAAAAGCCATAAGACCTTGAAGAACATCAATGTCAAAGATAAATTCTAAAGTCCCA
GAGAAAAAAGAATGGGAATCAAATTGACCTCAGACTATACGTGAGAAACACGGAGAGCCAGAAAACTG
TGATGTTCCATCCTCAGAGTTTGAAGGAAATATTTGAAGGCTGAATTTTACATCCAGCTAAACTATCA
AAGGCATGCAAAGTCCATGTTATTCTTAGGCCTTCAAGGCCTCGGCCATTTTTCTACAGAAAAGCCTG
ATTTTAAAATGCTCTTAGAGACGTTCTCCAGCCAGAAGAGAAAGAAGCCAGGAGGGTGCTCTGAGATA
TTCAGTCACCACAGTTCCCAAATGGCCTAGGAATTCAGAGAGTCAGAATATCACCATTACTCCCCAAT
GGGAACCCCCGACAGTCTCAGCATGGTGTGAGGGTGTGGACGGGGGGCCTGGCAGGTACCAATCACTC
ATCCCGCTCAGTGAAGACACAGTGTTCAGCTACGGAAGCCATAAGGCAGGCCGAGCTTCTGCCCATCC
GGAGGAAATCTCAGCTATCCAACGGCGGTCAGGAGCAGAGGAAAATAAAGCAGAATAACTAGAAAACA
CGCTCACAGATCCTAATGTTAACGGTTACAAATGACGACGGAAAAACAAACTCCTGACCATATATTAT
ATAGTTTCAAGCAGCAAGAAGGAGGATATTGAACATTCTCAACACACATAATAAACGCTTGAGATGAT
GATATGCTCATTACCCTGATTTGATCACTAGACATNCCATGTATCAAAACATCACTGTGTATCCGATC
AATATCTACAATTATTGTCAATTAAAAACATCATTAAAAACAA

| | | | |
|---|---|---|---|
| NOV37h, CG56449-02 | | | |
| Protein Sequence | SEQ ID NO: 872 | 1398 aa | MW at 147208.2kD |

MPMGHSDRWSWRLLRLALPLPVWLPAGGGRGADSPCLCSRPHVCAEQELTLVGRRQPCVQALSHTVPV
WKAGCGWQAWCVGHERRTVYYMGYRQVYTTEARTVLRCCRGWTQQPDEEGCLSAECSASLCFHGGRCV
PGSAQPCHCPPGFQGPRCQYDVDECRTHNGGCQHRCVNTPGSYLCECKPGFRLHTDSRTCLAINSCAL
GNGGCQHHCVQLTITRHRCQCRPGFQLQEDGRHCVPRSPCANRNGSCMHRCQVVRGLARCECHVGYQL
AADGKACEDVDECAAGLAQCAHGCLNTQGSFKCVCHAGYELGADGRQCYRIEMEIVNSCEANNGGCSH
GCSHTSAGPLCTCPRGYELDTDQRTCIRCRRLCRQPVLQQVCTNNPGGYECGCYAGYRLSADGCGCED
VDECASSRGGCEHHCTNLAGSFQCSCEAGYRLHEDRRGCSALEEPMVDLDGELPFVRPLPHIAVLQDE
LPQLFQDDDVGADEEEAELRGEHTLTEKFVCLDDSFGHDCSLTCDDCRNGGTCLLGLDGCDCPEGWTG
LICNESCPPDTFGKNCSFSCSCQNGGTCDSVTGACRCPPGVSGTNCEDGCPKGYYGKHCRKKCNCANR
GRCHRLYGACLCDPGLYGRFCHLACPPWAFGPGCSEECQCVQPHTQSCDKRDGSCSCKAGFRGERCQA
ECEPGYFGPGCWQACTCPVGVACDSVSGECGKRCPAGFQGEDCGQECPVGTFGVNCSSSCSCGGAPCH
GVTGQCRCPPGRTGEDCEAGECEGLWGLGCQEICPACHNAARCDPETGACLCLPGFVGSRCQDCEAGW
YGPSCQTMCSCANDGHCHQDTGHCSCAPGWTGFSCQRACDTGHWGPDCSHPCNCSAGHGSCDAISGLC
LCEAGYVGPRCEQSECPQGHFGPGCEQRCQCQHGAACDHTSGACTCPAGWRGTFCEHACPAGFFGLDC
RSACNCTAGAACDAVNGSCLCPAGRRGPRCAESACPAHTYGHNCSQACACFNGASCDPVHGQCHCAPG
WMGPSCLQACPAGLYGDNCRHSCLCQNGGTCDPVSGHCACPEGWAGLACEVECLPRDVRAGCRHSGGC
LNGGLCDPHTGRCLCPAGWTGDKCQSPAACAKGTFGPFCEGRCACRWGGPCHLATGACLCPPGWRGPH
LSAACLRGWFGEACAQRCSCPPGAACHHVTGACRCPPGFTGSGCEQACPPGSFGEDCAQMCQCPGENP
ACHPATGTCSCAAGYHGPSCQQRCPPGRYGPGCEQLCGCLNGGSCDAATGACRCPTGFLGTDCNLTCP
QGRFGPNCTHCGCGQGAACDPVTGTCLCPPGRAGVRCERGCPQNRFGVGCEHTCSCRNGGLCHASKR
QLLLWPGLDGAALRAGLSPWALRSRLPSGVLLPQQQHV

| | | |
|---|---|---|
| NOV37i, CG56449-03 | SEQ ID NO: 873 | 4733 bp |
| DNA Sequence | ORF Start: ATG at 1 | ORF Stop: TAG at 4351 |

ATGCCCATGGGACATTCTGACAGGTGGTCTTGGCGTCTCCTGAGGCTGGCACTGCCACTCCCAGTCTG
GTTGCCGGCTGGGGGTGGCCGAGGCGCTGACTCTCCATGTCTCTGTTCCAGGCCCCACGTGTGTGCTG
TGGAAGGCCGGCTGTGGGTGGCAGGCGTGGTGCGTGGGTCATGAGCGGAGAACCGTCTACTACATGGG
CTACAGGCAGGTGTATACCACGGAGGCCCGGACCGTGCTCAGGTGCTGCCGAGGGTGGACGCAGCAGC
CCGACGAGGAGGGCTGCCTCTCGGCTGAATGCAGCGCCAGCCTCTGTTTTCACGGTGGCCGTTGTGTG
CCAGGCTCAGCCCAGCCGTGTCACTGTCCCCCCGGCTTCCAGGGACCCCGCTGTCAGTATGATGTGGA
CGAATGCCGAACCCACAACGGTGGCTGCCAGCACCGGTGCGTGAACACCCCAGGCTCCTACCTCTGTG
AGTGCAAGCCCGGCTTCCGGCTCCACACTGACAGCAGGACCTGCCTGGCCATTAACTCCTGCGCCCTG
GGCAATGGCGGCTGCCAGCACCACTGTGTCCAGCTCACAATCACTCGGCATCGCTGCCAGTGCCGGCC
CGGGTTCCAGCTCCAGGAGGACGGCAGGCATTGTGTCCGTAGAAGCCCGTGTGCCAACAGGAACGGCA
GCTGCATGCACAGGTGCCAGGTGGTCCGGGGCCTCGCCCGCTGTGAGTGCCACGTGGGCTATCAGCTA
GCAGCGGACGGCAAGGCCTGTGAAGATGTGGACGAATGTGCCGCAGGGCTGGCCCAGTGTGCCCATGG
CTGCCTCAACACCCAGGGGTCCTTCAAGTGCGTGTGTCACGCGGGCTATGAGCTGGGCGCCGATGGCC
GGCAGTGCTACCGTATTGAGATGGAAATCGTGAACAGCTGTGAGGCCAACAACGGCGGCTGCTCCCAT
GGCTGCAGCCACACCAGTGCTGGGCCCCTGTGCACCTGTCCCCGCGGCTACGAGCTGGACACAGATCA
GAGGACCTGCATCAGATGTCGACGACTGTGCAGACAGCCCGTGCTGCAGCAGGTGTGCACCAACAACC
CTGGCGGGTACGAGTGCGGCTGCTACGCCGGCTACCGGCTCAGTGCCGATGGCTGCGGCTGCGAGGAT
GTGGATGAGTGCGCCTCCAGCCGTGGCGGCTGCGAGCACCACTGCACCAACCTGGCCGGCTCCTTCCA
GTGCTCCTGCGAGGCCGGCTACCGGCTGCACGAGGACCGTAGGGGCTGCAGCGCCCTGGAGGAGCCGA
TGGTGGACCTGGACGGCGAGCTGCCTTTCGTGCGGCCCCTGCCCCACATTGCCGTGCTCCAGGACGAG
CTGCCGCAACTCTTCCAGGATGACGACGTCGGGGCCGATGAGGAAGAGGCAGAGTTGCGGGGCGAACA
CACGCTCACAGAGAAGTTTGTCTGCCTGGATGACTCCTTTGGCCATGACTGCAGCTTGACCTGTGATG
ACTGCAGGAACGGAGGGACCTGCCTCCTGGGCCTGGATGGCTGTGATTGCCCCGAGGGCTGGACTGGG
CTCATCTGCAATGAGAGTTGTCCTCCGGACACCTTTGGGAAGAACTGCAGCTTCTCCTGCAGCTGTCA
GAATGGTGGGACCTGCGACTCTGTCACGGGGGCCTGCCGCTGCCCCCCGGGTGTCAGTGGAACTAACT
GTGAGGATGGCTGCCCCAAGGGCTACTATGGCAAGCACTGTCGCAAGAAATGCAACTGTGCCAACCGG
GGCCGGTGCCACCGCCTCTACGGGGCCTGCCTCTGCGACCCAGGGCTCTACGGCCGCTTCTGCCACCT
CGCCTGCCCGCCGTGGGCCTTTGGGCCGGGCTGCTCGGAGGAGTGCCAGTGTGTGCAGCCCCACACGC
AGTCCTGTGACAAGAGGGATGGCAGCTGCTCCTGCAAGGCTGGCTTCCGGGGCGAGCGCTGTCAGGCA
GAGTGTGAGCTGGGCTACTTTGGGCCGGGGTGCTGGCAGGCATGCACCTGCCCAGTGGGCGTGGCCTG
TGACTCCGTGAGCGGCGAGTGTGGGAAGCGGTGTCCTGCTGGCTTCCAGGGAGAGGACTGTGGCCAAG
AGTGCCCGGTGGGGACGTTTGGCGTGAACTGCTCGAGCTCCTGCTCCTGTGGGGGGGCCCCCTGCCAC
GGGGTCACGGGGCAGTGCCGGTGTCCACCGGGGAGGACTGGGGAAGACTGTGAGGCAGATTGTCCCGA
GGGCCGCTGGGGGCTGGGCTGCCAGGAGATCTGCCCAGCATGCCAGCACGCTGCCCGCTGCGACCCTG
AGACCGGAGCCTGCCTGTGCCTCCCTGGCTTCGTCGGCAGCCGCTGCCAGGACGTGTGCCCAGCAGGC
TGGTATGGTCCCAGCTGCCAGACAAGGTGCTCTTGTGCCAATGATGGGCACTGCCACCCAGCCACCGG
ACACTGCAGCTGTGCCCCCGGGTGGACCGGCTTTAGCTGCCAGAGAGCCTGTGATACTGGGCACTGGG
GACCTGACTGCAGCCACCCCTGCAACTGCAGCGCTGGCCACGGGAGCTGTGATGCCATCAGCGGCCTG
TGTCTGTGTGAGGCTGGCTACGTGGGCCCGCGGTGCGAGCAGCAGTGTCCCCAGGGCCACTTTGGGCC
CGGCTGTGAGCAGCTGTGCCAGTGTCAGCATGGAGCAGCCTGTGACCACGTCAGCGGGGCCTGCACCT
GCCCGGCCGGCTGGAGGGGCACCTTCTGCGAGCATGCCTGCCCGGCCGGCTTCTTTGGATTGGACTGT
CGTAGTGCCTGCAACTGCACCGCCGGAGCTGCCTGTGATGCCGTGAATGGCTCCTGCCTCTGCCCCGC
TGGCCGCCGGGGCCCCCGCTGTGCCGAGACCTGCCCTGCCGGCCTGTACGGCGACAACTGTCGGCATT
CCTGCCTCTGCCAGAACGGAGGGACCTGTGACCCTGTCTCAGGCCACTGTGCGTGCCCAGAGGGCTGG
GCCGGCCTGGCCTGTGAGAAGGAGTGCCCCCCCCGGGACGTCAGAGCTGGCTGCCGGCACAGCGGTGG
TTGCCTCAACGGGGGCCTGTGTGACCCGCACACGGGCCGCTGCCTCTGCCCAGCCGGCTGGGCTGGGG
ACAAGTGTCAGAGCCCCTGCCTGCGGGGCTGGTTTGGAGAGGCCTGTGCCCAGCACTGCAGCTGCCCG
CCTGGCGCTGCCTGCCACCACGTCACTGGGGCCTGCCGCTGTCCCCCTGGCTTCACTGGCTCCGGCTG
CGAGCAGGGATGTCCGCCCGGGCGGTATGGGCCAGGCTGTGAACAGCTGTGTGGGTGTCTCAACGGGG
GCTCCTGTGATGCGGCCACGGGGGCCTGCCGCTGCCCCACTGGGTTCCTCGGGACGGACTGCAACCTC
ACCTGTCCGCAGGGCCGCTTCGGCCCCAACTGCACCCACGTGTGTGGGTGTGGGCAGGGGGCGGCCTG
CGACCCTGTGACCGGCACCTGCCTCTGCCCCCCGGGGAGAGCCGGCGTCCGCTGTGAGCGAGGCTGCC
CCCAGAACCGGTTTGGCGTGGGCTGCGAGCACACCTGCTCCTGCAGAAATGGGGGCCTGTGCCACGCC
AGCAACGGCAGCTGCTCCTGTGGCCTGGGCTGGACGGGGCGGCACTGCGAGCTGGCCTGTCCCCCTGG
GCGCTACGGAGCCGCCTGCCATCTGGAGTGCTCCTGCCACAACAACAGCACGGGTGAGCCTGCCACGG
GCACCTGCCGCTGCGGCCCCGGCTTCTATGGCCAGGCCTGCGAGCACCCCTGTCCCCCTGGCTTCCAC
GGGGCTGGCTGCCAGGGGTTGTGCTGGTGTCAACATGGAGCCCCCTGCGACCCCATCAGTGGCCGATG
CCTCTGCCCTGCCGGCTTCCACGGCCACTTCTGTGAGAGGGGGTGTGAGCCAGGTTCATTTGGAGAGG
GCTGCCACCAGCGCTGTGACTGTGACGGGGGGGCACCCTGTGACCCTGTCACCGGTCTCTGCCTTTGC
CCACCAGGGCGCTCAGGAGCCACCTGTAACCTGGATTGCAGAAGGGGCCAGTTTGGGCCCAGCTGCAC
CCTGCACTGTGACTGCGGGGGTGGGGCTGACTGCGACCCTGTCAGTGGGCAGTGTCACTGTGTGGATG
GCTACATGGGGCCCACGTGCCGGGAAGGTGGGCCCCTCCGGCTCCCCGAGAACCCGTCCTTAGCCCAG
GGCTCAGCGGGCACACTGCCCGCCTCCAGCAGACCCACATCCCGGAGCGGTGGACCAGCGAGGCACTA
GTAGAGGCAGTCCCGTGGAGCCCGCCTCTCCAGTCCCAGCCAGAGGGGACCCTGGCCTTTGGTGACCA
CTGAGAAGGACACTTCACGGGCCCAGAGCTCCTGGTACTGCCCTTCCTTTGAGGGCCGTGGAGGGCTC
TGGACAGCCCAGCAACCTGTCGCTCTTGGAGGCTGGTGTGGCCTTGAGGAGGGAAGCCTCGCATGGCC
GCTGGAAGAGAGGCGCCTCCTGGCCTGGCTCTGCAGAACCCAGGGGCACGCTCTGGGCCTGGGCTGAG
GAAGTCCCGCTCTCCCCGCGGCTCTGAGTTGGACTGAGGACAGGTGTGGGCGCCAGTGTGGGTGCAGG
CGCAGGTGCAGGCACAGGGCCACTGTCCTCCAGGCAGGCTT

| | | | |
|---|---|---|---|
| NOV37i, CG56449-03 | | | |
| Protein Sequence | SEQ ID NO: 874 | 1450 aa | MW at 152213.4kD |

MPMGHSDRWSWRLLRLALPLPVWLPAGGGRGADSPCLCSRPHVCAEQELTLVGRRQPCVQALSHTVPV
WKAGCGWQAWCVGHERRTVYYMGYRQVYTTEARTVLRCCRGWTQQPDEEGCLSAECSASLCFHGGRCV
PGSAQPCHCPPGFQGPRCQYDVDECRTHNGGCQHRCVNTPGSYLCECKPGFRLHTDSRTCLAINSCAL
GNGGCQHHCVQLTITRHRCQCRPGFQLQEDGRHCVRRSPCANRNGSCMHRCQVVRGILACECHVGYQL
AADGKACEDVDECAAGLAQCAHGCLNTQGSFKCVCHAGYELGADGRQCYRIEMEIVNSCEANNGGCSH
GCSHTSAGPLCTCPRGYELDTDQRTCIRCRRLCRQPVLQQVCTNNPGGYECGCYAGYRLSADGCGCED
VDECASSRGGCEHHCTNLAGSFQCSCEAGYRLHEDRRGCSALEEPMVDLDGELPFVRPLPHIAVLQDE
LPQLFQDDDVGADEEEAELRGEHTLTEKFVCLDDSFGHDCSLTCDDCRNGGTCLLGLDGCDCPEGWTG
LICNESCPPDTFGKNCSFSCSCQNGGTCDSVTGACRCPPGVSGTNCEDGCPKGYYGKHCRKKCNCANR
GRCHRLYGACLCDPGLYGRFCHLACPPWAFGPGCSEECQCVQPHTQSCDKRDGSCSCKAGFRGERCQA
ECELGYFGPGCWQACTCPVGVACDSVSGECGKRCPAGFQGEDCGQECPVGTFGVNCSSSCSCGGAPCH
GVTGQCRCPPGRTGEDCEADCPEGRWGLGCQEICPACQHAARCDPETGACLCLPGFVGSRCQDVCPAG
WYGPSCQTRCSCANDGHCHPATGHCSCAPGWTGFSCQRACDTGHWGPDCSHPCNCSAGHGSCDAISGL
CLCEAGYVGPRCEQQCPQGHFGPGCEQLCQCQHGAACDHVSGACTCPAGWRGTFCEHACPAGFFGLDC
RSACNCTAGAACDAVNGSCLCPAGRRGPRCAETCPAGLYGDNCRHSCLCQNGGTCDPVSGHCACPEGW
AGLLACEKECPPRDVPAGCRHSGGCLNGGCDPHTGRCLCPAGWAGDKCQSPCLRGWFGEACAQHCSCP
PGAACHHVTGACRCPPGFTGSGCEQGCPPGRYGPGCEQLCGCLNGGSCDAATGACRCPTGFLGTDCNL
TCPQGRFGPNCTHVCGCGQGAACDPVTGTCLCPPGRAGVRCERGCPQNRFGVGCEHTCSCRNGGLCHA
SNGSCSCGLGWTGRHCELACPPGRYGAACHLECSCHNNSTGEPATGTCRCGPGFYGQACEHPCPPGFH
GAGCQGLCWCQHGAPCDPISGRCLCPAGFHGHFCERGCEPGSFGEGCHQRCDCDGGAPCDPVTGLCLC
PPGRSGATCNLDCRRGQFGPSCTLHCDCGGGADCDPVSGQCNCVDGYMGPTCREGGPLRLPENPSLAQ
GSAGTLPASSRPTSRSGGPARH

| | | |
|---|---|---|
| NOV37j, CG56449-05 | SEQ ID NO: 875 | 522 bp |
| DNA Sequence | ORF Start: ATG at 29 | ORF Stop: at 515 |

GGATCCGTGCCTCGCTGGTCCACCGCTCATGGCTCCTGCCTCTGCCCCGCTGGCCGCCGGGGCCCCCG
CTGTGCCGAGACCTGCCCTGCCGGCCTGTACGGCGACAACTGTCGGCATTCCTGCCTCTGCCAGAACG
GAGGGACCTGTGACCCTGTCTCAGGCCTGCGAGCACCCCTGTCCCCCTGGCTTCCACGGGGCTGGCTG
CCAGGGGTTGTGCTGGTGTCAACATGGAGCCCCCTGCGACCCCATCAGTGGCCGATGCCTCTGCCCTG
CCGGCTTCCACGGCCACTTCTGTGAGAGGGATTGCAGAAGGGGCCAGTTTGGGCCCAGCTGCACCCTG
CACTGTGACTGCGGGGGTGGGGCTGACTGCGACCCTGTCAGTGGGCAGTGTCACTGTGTGGATGGCTA
CATGGGGCCCACGTGCCGGGAAGGTGGGCCCCTCCGGCTCCCCGAGAACCCGTCCTTAGCCCAGGGCT
CAGCGGGCACACTGCCCGCCTCCAGCAGACCCACATCCCGCTCGAG

| | | | |
|---|---|---|---|
| NOV37l, CG56449-05 | | | |
| Protein Sequence | SEQ ID NO: 876 | 162 aa | MW at 16251.2kD |

MAPASAPLAAGAPAVPRPALPACTATTVGIPASARTEGPVTLSQACEHPCPPGFHGAGCQGLCWCQHG
APCDPISGRCLCPAGFHGHFCERDCRRGQFGPSCTLHCDCGGGADCDPVSGQCHCVDGYMGPTCREGG
PLRLPENPSLAQGSAGTLPASSRPTS

| | | |
|---|---|---|
| NOV37k, CG56449-06 | SEQ ID NO: 877 | 7334 bp |
| DNA Sequence | ORF Start: ATG at 1 | ORF Stop: TGA at 4210 |

ATGCCCATGGGACATTCTGACAGGTGGTCTTGGCGTCTCCTGAGGCTGGCACTGCCACTCCCAGTCTG
GTTGCCGGCTGGGGGTGGCCGAGGCGCTGACTCTCCATGTCTCTGTTCCAGGCCCCACGTGTGTGCTG
AGCAGGAGCTGACCCTGGTGGGCCGCCGCCAGCCGTGCGTGCAGGCCTTAAGCCACACGGTGCCGGTG
TGGAAGGCCGGCTGTGGGTGGCAGGCGTGGTGCGTGGGTCATGAGCGGAGGACCGTCTACTACATGGG
CTACAGGCAGGTGTATACCACGGAGGCCCGGACCGTGCTCAGGTGCTGCCGAGGGTGGATGCAGCAGC
CCGACGAGGAGGGCTGCCTCTCGGATGTGGGTGAGTGTGCCAACGCCAACGGGGGCTGTGCGGGTCGG
TGCCGGGACACCGTGGGGGGCTTCTACTGCCGCTGGCCCCCCCCCAGCCACCAGCTGCAGGGTGATGG
CGAGACTTGCCAAGATGTGGACGAATGCCGAACCCACAACGGTGGCTGCCAGCACCGGTGCGTGAACA
CCCCAGGCTCCTACCTCTGTGAGTGCAAGCCCGGCTTCCGGCTCCACACTGACAGCAGGACCTGCGCC
ATTAACTCCTGCGCCCTGGGCAATGGCGGCTGCCAGCACCACTGTGTCCAGCTCACAATCACTCGGCA
TCGCTGCCAGTGCCGGCCCGGGTTCCAGCTCCAGGAGGACGGCAGGCATTGTGTCCGTAGAAGCCCGT
GTGCCAACAGGAACGGCAGCTGCATGCACAGGTGCCAGGTGGTCCGGGGCCTCGCCCGCTGTGAGTGC
CACGTGGGCTATCAGCTAGCAGCGGACGGCAAGGCCTGTGAAGATGTGGACGAATGTGCCGCAGGGCT
GGCCCAGTGTGCCCATGGCTGCCTCAACACCCAGGGGTCCTTCAAGTGCGTGTGTCACGCGGGCTATG
AGCTGGGCGCCGATGGCCGGCAGTGCTACCGTATTGAGATGGAAATCGTGAACAGCTGTGAGGCCAAC
AACGGCGGCTGCTCCCATGGCTGCAGCCACACCAGTGCTGGGCCCCTGTGCACCTGTCCCCGCGGCTA
CGAGCTGGACACAGATCAGAGGACCTGCATCAGATGTCGACGACTGTGCAGACAGCCCGTGCTGCAGC
AGGTGTGCACCAACAACCCTGGCGGGTACGAGTGCGGCTGCTACGCCGGCTACCGGCTCAGTGCCGAT
GGCTGCGGCTGCGAGGATGTGGATGAGTGCGCCTCCAGCCGTGGCGGCTGCGAGCACCACTGCACCAA
CCTGGCCGGCTCCTTCCAGTGCTCCTGCGAGGCCGGCTACCGGCTGCACGAGGACCGTAGGGGCTGCA
GCGCCCTGGAGGAGCCGATGGTGGACCTGGACGGCGAGCTGCCTTTCGTGCGGCCCCTGCCCCACATT
GCCGTGCTCCAGGACGAGCTGCCGCAACTCTTCCAGGATGACGACGTCGGGGCCGATGAGGAAGAGGC
AGAGTTGCGGGGCGAACACACGCTCACAGAGAAGTTTGTCTGCCTGGATGACTCCTTTGGCCATGACT
GCAGCTTGACCTGTGATGACTGCAGGAACGGAGGGACCTGCCTCCTGGGCCTGGATGGCTGTGATTGC
CCCGAGGGCTGGACTGGGCTCATCTGCAATGAGAGTTGTCCTCCGGACACCTTTGGGAAGAACTGCAG
CTTCTCCTGCAGCTGTCAGAATGGTGGGACCTGCGACTCTGTCACGGGGGCCTGCCGCTGCCCCCCGG
GTGTCAGTGGAACTAACTGTGAGGATGGCTGCCCCAAGGGCTACTATGGCAAGCACTGTCGCAAGAAA
TGCAACTGTGCCAACCGGGGCCGGTGCCACCGCCTCTACGGGGCCTGCCTCTGCGACCCAGGGCTCTA
CGGCCGCTTCTGCCACCTCGCCTGCCCGCCGTGGGCCTTTGGGCCGGGCTGCTCGGAGGAGTGCCAGT
GTGTGCAGCCCCACACGCAGTCCTGTGACAAGAGGGATGGCAGCTGCTCCTGCAAGGCTGGCTTCCGG
GGCGAGCGCTGTCAGGCAGAGTGTGAGCCGGGCTACTTTGGGCCGGGGTGCTGGCAGGCATGCACCTG
CCCAGTGGGCGTGGCCTGTGACTCCGTGAGCGGCGAGTGTGGGAAGCGGTGTCCTGCTGGCTTCCAGG
GAGAGGACTGTGGCCAAGAGTGCCCGGTGGGGACCTTTGGCGTGAACTGCTCGAGCTCCTGCTCCTGT
GGGGGGGCCCCCTGCCACGGGGTCACGGGGCAGTGCCGGTGTCCGCCGGGGAGGACTGGGGAAGACTG
TGAGGCAGGTGAGTGTGAGGGCCTCTGGGGGCTGGGCTGCCAGGAGATCTGCCCAGCATGCCATAACG
CTGCTCGCTGCGACCCTGAGACCGGAGCCTGCCTGTGCCTCCCTGGCTTTGTCGGCAGCCGCTGCCAG
GACTGTGAGGCAGGCTGGTATGGTCCCAGCTGCCAGACAATGTGCTCTTGTGCCAATGATGGGCACTG
CCACCAAGACACGGGACACTGCAGCTGTGCCCCCGGGTGGACCGGCTTTAGCTGCCAGAGAGCCTGTG
ATACTGGGCACTGGGGACCTGACTGCAGCCACCCCTGCAACTGCAGCGCTGGCCACGGGAGCTGTGAT
GCCATCAGCGGCCTGTGTCTGTGTGAGGCTGGCTACGTGGGCCCGCGGTGCGAGCAGTCAGAGTGTCC
CCAGGGCCACTTTGGGCCCGGCTGTGAGCAGCGGTGCCAGTGTCAGCATGGAGCAGCCTGTGACCACG
TCAGCGGGGCCTGCACCTGCCCGGCCGGCTGGAGGGGCACCTTCTGCGAGCATGCCTGCCCGGCCGGC
TTCTTTGGATTGGACTGTCGCAGTGCCTGCAACTGCACCGCCGGAGCTGCCTGTGATGCCGTGAATGG
CTCCTGCCTCTGCCCCGCTGGCCGCCGGGGCCCCCGCTGTGCCGAGACCTGCCCAGCCCACACCTACG
GGCACAATTGCAGCCAGGCCTGTGCCTGCTTTAACGGGGCCTCCTGTGACCCTGTCCACGGGCAGTGC
CACTGTGCCCCTGGCTGGATGGGGCCCTCCTGCCTGCAGGCCTGCCCTGCCGGCCTGTACGGCGACAA
CTGTCGGCATTCCTGCCTCTGCCAGAACGGAGGGACCTGTGACCCTGTCTCAGGCCACTGTGCGTGCC
CAGAGGGCTGGGCCGGCCTGGCCTGTGAGGTAGAGTGCCTCCCCCGGGACGTCAGAGCTGGCTGCCGG
CACAGCGGCGGTTGCCTCAACGGGGGCCTGTGTGACCCGCACACGGGCCGCTGCCTCTGCCCAGCCGG
CTGGACTGGGGACAAGTGTCAGAGCCCTGCAGCCTGTGCCAAGGGCACATTCGGGCCTCACTGTGAGG
GGCGCTGTGCCTGCCGGTGGGGAGGCCCCTGCCACCTTGCCACCGGGGCCTGCCTCTGCCCTCCGGGG
TGGCGGGGGCCTCATCTTTCTGCAGCCTGCCTGCGGGGCTGGTTTGGAGAGGCCTGTGCCCAGCGCTG
CAGCTGCCCGCCTGGCGCTGCCTGCCACCACGTCACTGGGGCCTGCCGCTGTCCCCCTGGCTTCACTG
GCTCCGGCTGCGAGCAGGCCTGCCCACCCGGCAGCTTTGGGGAGGACTGTGCGCAGATGTGCCAGTGT
CCCGGTGAGAACCCGGCCTGCCACCCTGCCACCGGGACCTGCTCATGTGCTGCTGGCTACCACGGCCC
CAGCTGCCAGCAACGATGTCCGCCCGGGCGGTATGGGCCAGGCTGTGAACAGCTGTGTGGGTGTCTCA
ACGGGGGCTCCTGTGATGCGGCCACGGGGGCCTGCCGCTGCCCCACTGGGTTCCTCGGGACGGACTGC
AACCTCACCTGTCCGCAGGGCCGCTTCGGCCCCAACTGCACCCACGTGTGTGGGTGTGGGCAGGGGGC
GGCCTGCGACCCTGTGACCGGCACCTGCCTCTGCCCCCCGGGGAGAGCCGGCGTCCGCTGTGAGCGAG
GCTGCCCCCAGAACCGGTTTGGCGTGGGCTGCGAGCACACCTGCTCCTGCAGAAATGGGGGCCTGTGC
CACGCCAGCAAGCGGCAGCTGCTCCTGTGGCCTGGGCTGGACGGGGCGGCACTGCGAGCTGGCCTGTC
CCCCTGGGCGCTACGGAGCCGCCTGCCATCTGGAGTGCTCCTGCCACAACAACAGCACGTGTGAGCCT
GCCACGGGCACCTGCCGCTGCGGCCCCGGCTTCTATGGCCAGGCCTGCGAGCACCCCTGTCCCCCTGG
CTTCCACGGGGCTGGCTGCCAGGGGTTGTGCTGGTGTCAACATGGAGCCCCCTGCGACCCCATCAGTG
GCCGATGCCTCTGCCCTGCCGGCTTCCACGGCCACTTCTGTGAGAGGGGGTGTGAGCCAGGTTCATTT
GGAGAGGGCTGCCACCAGCGCTGTGACTGTGACGGGGGGGCACCCTGTGACCCTGTCACCGGTCTCTG
CCTTTGCCCACCAGGGCGCTCAGGAGCCACCTGTAACCTGGATTGCAGAAGGGGCCAGTTTGGGCCCA
GCTGCACCCTGCACTGTGACTGCGGGGGTGGGGCTGACTGCGACCCTGTCAGTGGGCAGTGTCACTGT
GTGGATGGCTACATGGGGCCCACGTGCCGGGAAGGTGGGCCCCTCCGGCTCCCCGAGAACCCGTCCTT
AGCCCAGGGCTCAGCGGGCACACTGCCCGCCTCCAGCAGACCCACATCCCGGAGCGGTGGACCAGCGA
GGCACTAGTAGAGGCAGTCCCGTGGAGCCCGCCTCTCCAGTCCCAGCCAGAGGGGACCCTGGCCTTTG
GTGACCACTGAGAAGGACACTTCACGGGCCCAGAGCTCCTGGTACTGCCCTTCCTTTGAGGGCCGTGG
AGGGCTGTGGACAGCCCAGCAACCTGTCGCTCTTGGAGGCTGGTGTGGCCTTGAGGAGGGAAGCCTCG
CATGGCCGCTGQAAGAGAGGCGCCTCCTGGCCTGGCTCTGCAGAACCCAGGGGCACGCTCTGGGCCTG
GGCTGAGGAAGTCCCGCTCTCCCCGCGGCTCTGAGTTGGACTGAGGACAGGTGTGGGCGCCAGTGTGG
GTGCAGGCGCAGGTGCAGGCACAGGGCCACTGTCCTCCAGGCAGGCTTTTTGGTGCTAGGCCCTGGGA
CTGGAAGTCGCCCAGCCCGTATTTATGTAAAGGTATTTATGGGCCACTGCACATGCCCGCTGCAGCCC
TGGGATCAGCTGGAAGCTGCCTGTCATCTCCTGCCCAATCCCCAGAAACCCTGATTCAGGTCTGCAGG
CTCCTGCGGGCTCACCAGGCTGCTGGCTCCGGTACCATGTAAACCTAGGAAGGTAAAGGAGCAGGCAA
CCTCCTCGTGGCCTGTGTGTTTGCTGTGTTACGTGGACTCTGTGTGGGCTCCTCCCTGGGGCCCGGCC
AGCATAACGGTGCACCCAGGGACCTCCCAGTGCACCCGGGGCCCTTTGCAGGGGTGGGGGTGCCACAC
AAGTGAAGAAGTTGGGACTCATCTCAGTTCCCAGTGCTATTGAGGAGAACGCTGGGGCTGCATTCATT
ACCGCTGAGACCCAGAGACTGGCTGTTCCCAGAGAATGGCCCAGGGGGAGGAGGGCTGGTGTGGAGGC
GCAACCTGGACTGAGGCCGAACTCCCTTGGGCTCACCCCACCCACCCCTACCTGAGCATCAGCAGTGG
GGGGAGGGCAGCATCGCAGGGGCAGGGACTCCCTGGGTGAGGACAGACCAGCCCTCCCGAGCACCTGG
CACTCATGGGCTGAGGCTGACTTCTCCTGGAAGAAGGGCCCAGAGTGGAAGGAAGAGGCAGAGGGTAG
AGGTGGTGGCTGGGGGCTCCTCTGCAGAGTGGGGTGGCCAATGGAGAGGGCTGCACTCACACCGCAAC
ATAGGACTCTCTCTCCCTTAAGAAGGCCCCCTTAGGGTCTGGGCTGCCGCCCCCATCACCCTAAAACC
AGCCAAGGTAGCTGAGGCCCCAGGGCAGACAATTTCACCAGCAGGANGAGGAGGAGTCCAGTGAGCTT
GGTTGCTCACAGACAGCAAGGGAGCTGTCACAGAGGAAGCTGATGAATGGACCGCTGTGGGGAGACTT
TAAAGTAGAACAGTGATAAGGGAGGGCAGGATGGTGGGGATGCAGAAGCAGCAGCCAGAGAGAGACGC
ACTGGGGTGCAGACGGAGTGTGGAAAACGCATACCTTGAAATGAAGCATCCAGCAGATGGGGTGAGTC
GATACAGCTCAGGAGATTCTCCCAGGAATAGCAGGGAGGCGTAAAGAGAGACAACGTACAGAGATAGA
TGAATGGAAATGGGTAAGGGAGGTGTTCATTCACATCCATCTAACTGCAAAATACAAAAGTAAGAAGT
CATTGACATGAAGCAACGACGACCAAGACGTTCTCAGATCTAAAGGTGAATGATCTCAGTCAGCCTGG
AAATGCACAAGGTGGAAAAATAACATAAAAAAGCCATAAGACCTTGAAGAACATCAATGTCAAAGATA
AATTCTAAAGTCCCAGAGAAAAAAGAATGGGAATCAAATTGACCTCAGACTATACGTGAGAAACACGG
AGAGCCAGAAAACTGTGATGTTCCATCCTCAGAGTTTGAAGGAAATATTTGAAGGCTGAATTTTACAT
CCAGCTAAACTATCAAAGGCATGCAAAGTCCATGTTATTCTTAGGCCTTCAAGGCCTCGGCCATTTTT
CTACAGAAAAGCCTGATTTTAAAATGCTCTTAGAGACGTTCTCCAGCCAGAAGAGAAAGAAGCCAGGA
GGGTGCTCTGAGATATTCAGTCACCACAGTTCCCAAATGGCCTAGGAATTCAGAGAGTCAGAATATCA
CCATTACTCCCCAATGGGAACCCCCGACAGTCTCAGCATGGTGTGAGGGTGTGGACGGGGGGCCTGGC
AGGTACCAATCACTCATCCCGCTCAGTGAAGACACAGTGTTCAGCTACGGAAGCCATAAGGCAGGCCG
AGCTTCTGCCCATCCGGAGGAAATCTCAGCTATCCAACGGCGGTCAGGAGCAGAGGAAAATAAAGCAG
AATAACTAGAAAACACGCTCACAGATCCTAATGTTAACGGTTACAAATGACGACGGAAAAACAAACTC
CTGACCATATATTATATAGTTTCAAGCAGCAAGAAGGAGGATATTGAACATTCTCAACACACATAATA
AACGCTTGAGATGATGATATGCTCATTACCCTGATTTGATCACTAGACATACCATGTATCAAAACATC
ACTGTGTATCCGATGAATATCTACAATTATTGTCAATTAAAAACATCATTAAAAACAA

| | | | |
|---|---|---|---|
| NOV37k, CG56449-06 | | | |
| Protein Sequence | SEQ ID NO: 878 | 1403 aa | MW at 147829.8kD |

MPMGHSDRWSWRLLRLALPLPVWLPAGGGRGADSPCLCSRPHVCAEQELTLVGRRQPCVQALSHTVPV
WKAGCGWQAWCVGHERRTVYYMGYRQVYTTEARTVLRCCRGWMQQPDEEGCLSDVGECANANGGCAGR
CRDTVGGFYCRWPPPSHQLQGDGETCQDVDECRTHNGGCQHRCVNTPGSYLCECKPGFRLHTDSRTCA
INSCALGNGGCQHHCVQLTITRHRCQCRPGFQLQEDGRHCVRRSPCANRNGSCMHRCQVVRGIARCEC
HVGYQLAADGKACEDVDECAAGLAQCAHGCLNTQGSFKCVCHAGYELGADGRQCYRIEMEIVNSCEAI
NGGCSHGCSHTSAGPLCTCPRGYELDTDQRTCIRCRRLCRQPVLQQVCTNNPGGYECGCYAGYRLSAD
GCGCEDVDECASSRGGCEHHCTNLAGSFQCSCEAGYRLHEDRRGCSALEEPMVDLDGELPFVRPLPHI
AVLQDELPQLFQDDDVGADEEEAELRGEHTLTEKFVCLDDSFGHDCSLTCDDCRNGGTCLLGLDGCDC
PEGWTGLICNESCPPDTFGKNCSFSCSCQNGGTCDSVTGACRCPPGVSGTNCEDGCPKGYYGKHCRKK
CNCANRGRCHRLYGACLCDPGLYGRFCHLACPPWAFGPGCSEECQCVQPHTQSCDKRDGSCSCKAGFR
GERCQAECEPGYFGPGCWQACTCPVGVACDSVSGECGKRCPAGFQGEDCGQECPVGTFGVNCSSSCSC
GGAPCHGVTGQCRCPPGRTGEDCEAGECEGLWGLGCQEICPACHNAARCDPETGACLCLPGFVGSRCQ
DCEAGWYGPSCQTMCSCANDGHCHQDTGHCSCAPGWTGFSCQRACDTGHWGPDCSHPCNCSAGHGSCD
AISGLCLCEAGYVGPRCEQSECPQGHFGPGCEQRCQCQHGAACDHVSGACTCPAGWRGTFCEHACPAG
FFGLDCRSACNCTAGAACDAVNGSCLCPAGRRGPRCAETCPAHTYGHNCSQACACFNGASCDPVHGQC
HSGGCLNGGLCDPHTGRCLCPAGWTGDKCQSPAACAKGTFGPHCEGRCACRWGGPCHLATGACLCPPG
WRGPHLSAACLRGWFGEACAQRCSCPPGAACHHVTGACRCPPGFTGSGCEQACPPGSFGEDCAQMCQC
PGENPACHPATGTCSCAAGYHGPSCQQRCPPGRYGPGCEQLCGCLNGGSCDAATGACRCPTGFLGTDC
NLTCPQGRFGPNCTHVCGCGQGAACDPVTGTCLCPPGRAGVRCERGCPQNRFGVGCEHTCSCRNGGLC
HASKRQLLLWPGLDGAALAAGLSPWALRSRLPSGVLLPQQQHV

| | | |
|---|---|---|
| NOV37i, CG56449-07 | SEQ ID NO: 879 | 4783 bp |
| DNA Sequence | ORF Start: ATG at 1 | ORF Stop: TGA at 3595 |

ATGCCCATGGGACATTCTGACAGGTGGTCTTGGCGTCTCCTGAGGCTGGCACTGCCACTCCCAGTCTG
GTTGCCGGCTGGGGGTGGCCGAGGCGCTGACTCTCCATGTCTCTGTTCCAGGCCCCACGTGTGTGCTG
AGCAGGAGCTGACCCTGGTGGGCCGCCGCCAGCCGTGCGTGCAGGCCTTAAGCCACACGGTGCCGGTG
TGGAAGGCCGGCTGTGGGTGGCAGGCGTGGTGCGTGGGTCATGAGCGGAGAACCGTCTACTACATGGG
CTACAGGCAGGTGTATACCACGGAGGCCCGGACCGTGCTCAGGTGCTGCCGAGGGTGGACGCAGCAGC
CCGACGAGGAGGGCTGCCTCTCGGCTGAATGCAGCGCCAGCCTCTGTTTTCACGGTGGCCGTTGTGTG
CCAGGCTCAGCCCAGCCGTGTCACTGTCCCCCCGGCTTCCAGGGACCCCGCTGTCAGTATGATGTGGA
CGAATGCCGAACCCACAACGGTGGCTGCCAGCACCGGTGCGTGAACACCCCAGGCTCCTACCTCTGTG
AGTGCAAGCCCGGCTTCCGGCTCCACACTGACAGCAGGACCTGCCTGGCCATTAACTCCTGCGCCCTG
GGCAATGGCGGCTGCCAGCACCACTGTGTCCAGCTCACAATCACTCGGCATCGCTGCCAGTGCCGGCC
CGGGTTCCAGCTCCAGGAGGACGGCAGGCATTGTGTCCGTAGAAGCCCGTGTGCCAACAGGAACGGCA
GCTGCATGCACAGGTGCCAGGTGGTCCGGGGCCTCGCCCGCTGTGAGTGCCACGTGGGCTATCAGCTA
GCAGCGGACGGCAAGGCCTGTGAAGATGTGGACGAATGTGCCGCAGGGCTGGCCCAGTGTGCCCATGG
CTGCCTCAACACCCAGGGGTCCTTCAAGTGCGTGTGTCACGCGGGCTATGAGCTGGGCGCCGATGGCC
GGCAGTGCTACCGTATTGAGATGGAAATCGTGAACAGCTGTGAGGCCAACAACGGCGGCTGCTCCCAT
GGCTGCAGCCACACCAGTGCTGGGCCCCTGTGCACCTGTCCCCGCGGCTACGAGCTGGACACAGATCA
GAGGACCTGCATCAGATGTCGACGACTGTGCAGACAGCCCGTGCTGCAGCAGGTGTGCACCAACAACC
CTGGCGGGTACGAGTGCGGCTGCTACGCCGGCTACCGGCTCAGTGCCGATGGCTGCGGCTGCGAGGAT
GTGGATGAGTGCGCCTCCAGCCGTGGCGGCTGCGAGCACCACTGCACCAACCTGGCCGGCTCCTTCCA
GTGCTCCTGCGAGGCCGGCTACCGGCTGCACGAGGACCGTAGGGGCTGCAGCGCCCTGGAGGAGCCGA
TGGTGGACCTGGACGGCGAGCTGCCTTTCGTGCGGCCCCTGCCCCACATTGCCGTGCTCCAGGACGAG
CTGCCGCAACTCTTCCAGGATGACGACGTCGGGGCCGATGAGGAAGAGGCAGAGTTGCGGGGCGAACA
CACGCTCACAGAGAAGTTTGTCTGCCTGGATGACTCCTTTGGCCATGACTGCAGCTTGACCTGTGATG
ACTGCAGGAACGGAGGGACCTGCCTCCTGGGCCTGGATGGCTGTGATTGCCCCGAGGGCTGGACTGGG
CTCATCTGCAATGAGAGTTGTCCTCCGGACACCTTTGGGAAGAACTGCAGCTTCTCCTGCAGCTGTCA
GAATGGTGGGACCTGCGACTCTGTCACGGGGGCCTGCCGCTGCCCCCCGGGTGTCAGTGGAACTAACT
GTGAGGATGGCTGCCCCAAGGGCTACTATGGCAAGCACTGTCGCAAGAAATGCAACTGTGCCAACCGG
GGCCGGTGCCACCGCCTCTACGGGGCCTGCCTCTGCGACCCAGGGCTCTACGGCCGCTTCTGCCACCT
CGCCTGCCCGCCGTGGGCCTTTGGGCCGGGCTGCTCGGAGGAGTGCCAGTGTGTGCAGCCCCACACGC
AGTCCTGTGACAAGAGGGATGGCAGCTGCTCCTGCAAGGCTGGCTTCCGGGGCGAGCGCTGTCAGGCA
GAGTGTGAGCTGGGCTACTTTGGGCCGGGGTGCTGGCAGGCATGCACCTGCCCAGTGGGCGTGGCCTG
TGACTCCGTGAGCGGCGAGTGTGGGAAGCGGTGTCCTGCTGGCTTCCAGGGAGAGGACTGTGGCCAAG
AGTGCCCGGTGGGGACGTTTGGCGTGAACTGCTCGAGCTCCTGCTCCTGTGGGGGGGCCCCCTGCCAC
GGGGTCACGGGGCAGTGCCGGTGTCCACCGGGGAGGACTGGGGAAGACTGTGAGGCAGATTGTCCCGA
GGGCCGCTGGGGGCTGGGCTGCCAGGAGATCTGCCCAGCATGCCAGCACGCTGCCCGCTGCGACCCTG
AGACCGGAGCCTGCCTGTGCCTCCCTGGCTTCGTCGGCAGCCGCTGCCAGGACGTGTGCCCAGCAGGC
TGGTATGGTCCCAGCTGCCAGACAAGGTGCTCTTGTGCCAATGATGGGCACTGCCACCCAGCCACCGG
ACACTGCAGCTGTGCCCCCGGGTGGACCGGCTTTAGCTGCCAGAGAGCCTGTGATACTGGGCACTGGG
GACCTGACTGCAGCCACCCCTGCAACTGCAGCGCTGGCCACGGGAGCTGTGATGCCATCAGCGGCCTG
TGTCTGTGTGAGGCTGGCTACGTGGGCCCGCGGTGCGAGCAGCAGTGTCCCCAGGGCCACTTTGGGCC
CGGCTGTGAGCAGCTGTGCCAGTGTCAGCATGGAGCAGCCTGTGACCACGTCAGCGGGGCCTGCACCT
GCCCGGCCGGCTGGAGGGGCACCTTCTGCGAGCATGCCTGCCCGGCCGGCTTCTTTGGATTGGACTGT
CGTAGTGCCTGCAACTGCACCGCCGGAGCTGCCTGTGATGCCGTGAATGGCTCCTGCCTCTGCCCCGC
TGGCCGCCGGGGCCCCCGCTGTGCCGAGACCTGCCCTGCCGGCCTGTACGGCGACAACTGTCGGCATT
CCTGCCTCTGCCAGAACGGAGGGACCTGTGACCCTGTCTCAGGCCACTGTGCGTGCCCAGAGGGCTGG
GCCGGCCTGGCCTGTGAGAAGGAGTGCCCCCCCCGGGACGTCAGAGCTGGCTGCCGGCACAGCGGCGG
TTGCCTCAACGGGGGCCTGTGTGACCCGCACACGGGCCGCTGCCTCTGCCCAGCCGGCTGGACTGGGG
ACAAGTGTCAGAGCCATCCCCACGGGCCCCTCCTAGAAGCCTCCGCAGCCCTCATCTTTCTGCAGCCT
GCCTGCGGGGCTGGTTTGGAGAGGCCTGTGCCCAGCGCTGCAGCTGCCCGCCTGCCGCTGCCTGCCAC
CACGTCACTGGGGCCTGCCGCTGTCCCCCTGGCTTCACTGGCTCCGGCTGCGAGCAGGGATGTCCGCC
CGGGCGGTATGGGCCAGGCTGTGAACAGCTGTGTGGGTGTCTCAACGGGGGCTCCTGTGATGCGGCCA
CGGGGGCCTGCCGCTGCCCCACTGGGTTCCTCGGGACGGACTGCAACCTCACCTGTCCGCAGGGCCGC
TTCGGCCCCAACTGCACCCACGTGTGTGGTTGTGGGCAGGGGGCGGCCTGCGACCCTGTGACCGGCAC
CTGCCTCTGCCCCCCGGGGAGAGCCGGCGTCCGCTGTGAGCGAGGCTGCCCCCAGAACCGGTTTGGCG
TGGGCTGCGAGCACACCTGCTCCTCCAGAAATGGGGGCCTGTGCCACGCCAGCAACGGCAGCTGCTCC
TGTGGCCTGGGCTGGACGGGGCGGCACTGCGAGCTGGCCTGTCCCCCTGGGCGCTACGGAGCCGCCTG
CCATCTGGAGTGCTCCTGCCACAACAACAGCACGGGTGAGCCTGCCACGGGCACCTGCCGCTGCGGCC
CCGGCTTCTATGGCCAGGCCTGCGAGCACCCCTGTCCCCCTGGCTTCCACGGGGCTGGCTGCCAGGGG
TTGTGCTGGTGTCAACATGGAGCCCCCTGCGACCCCATCAGTGGCCGATGCCTCTGCCCTGCCGGCTT
CCACGGCCACTTCTGTGAGAGGGGGTGTGAGCCAGGTTCATTTGGAGAGGGCTGCCACCAGCGCTGTG
ACTGTGACGGGGGGGCACCCTGTGACCCTGTCACCGGTCTCTGCCTTTGCCCACCAGGGCGCTCAGGA
GCCACCTGTAACCTGGATTGCAGAAGGGGCCAGTTTGGGCCCAGCTGCACCCTGCACTGTGACTGCGG
GGGTGGGGCTGACTGCGACCCTGTCAGTGGGCAGTGTCACTGTGTGGATGGCTACATGGGGCCCACGT
GCCGGGAAGGTGGGCCCCTCCGGCTCCCCGAGAACCCGTCCTTAGCCCAGGGCTCAGCGGGCACACTC
CCCGCCTCCAGCAGACCCACATCCCGGAGCGGTGGACCAGCGAGGCACTAGTAGAGGCAGTCCCGTGG
AGCCCGCCTCTCCAGTCCCAGCCAGAGGGGACCCTGGCCTTTGGTGACCACTGAGAAGGACACTTCAC
GGGCCCAGAGCTCCTGGTACTGCCCTTCCTTTGAGGGCCGTGGAGGGCTGTGGACAGCCCAGCAACCT
GTCGCTCTTGGAGGCTGGTGTGGCCTTGAGGAGGGAAGCCTCGCATGGCCGCTGGAAGAGAGGCGCCT
CCTGGCCTGGCTCTGCAGAACCCAGGGGCACGCTCTGGGCCTGGGCTGAGGAAGTCCCGCTCTCCCCG
CGGCTCTGAGTTGGACTGAGGACAGGTGTGGGCGCCAGTGTGGGTGCAGGCGCAGGTGCAGGCACAGC
GCCACTGTCCTCCAGGCAGGCTT

| | | | |
|---|---|---|---|
| NOV371, CG56449-07 | | | |
| Protein Sequence | SEQ ID NO: 880 | 1198 aa | MW at 126170.7kD |

MPMGHSDRWSWRLLRLALPLPVWLPAGGGRGADSPCLCSRPHVCAEQELTLVGRRQPCVQALSHTVPV
WKAGCGWQAWCVGHERRTVYYMGYRQVYTTEARTVLRCCRGWTQQPDEEGCLSAECSASLCFHGGRCV
PGSAQPCHCPPGFQGPRCQYDVDECRTHNGGCQHRCVNTPGSYLCECKPGFRLHTDSRTCLAINSCAL
GNGGCQHHCVQLTITRHRCQCRPGFQLQEDGRHCVRRSPCANPNGSCMHRCQVVRGLARCECHVGYQL
AADGKACEDVDECAAGLAQCAHGCLNTQGSFKCVCHAGYELGADGRQCYRIEMEIVNSCEANNGGCSH
GCSHTSAGPLCTCPRGYELDTDQRTCIRCRRLCRQPVLQQVCTNNPGGYECGCYAGYRLSADGCGCED
VDECASSRGGCEHHCTNLAGSFQCSCEAGYRLHEDRRGCSALEEPMVDLDGELPFVRPLPHIAVLQDE
LPQLFQDDDVGADEEEAELRGEHTLTEKFVCLDDSFGHDCSLTCDDCRNGGTCLLGLDGCDCPEGWTG
LICNESCPPDTFGKNCSFSCSCQNGGTCDSVTGACRCPPGVSGTNCEDGCPKGYYGKHCRKKCNCANR
GRCHRLYGACLCDPGLYGRFCHLACPPWAFGPGCSEECQCVQPHTQSCDKRDGSCSCKAGFRGERCQA
ECELGYFGPGCWQACTCPVGVACDSVSGECGKRCPAGFQGEDCGQECPVGTFGVNCSSSCSCGGAPCH
GVTGQCRCPPGRTGEDCEADCPEGRWGLGCQEICPACQHAARCDPETGACLCLPGFVGSRCQDVCPAG
WYGPSCQTRCSCANDGHCHPATGHCSCAPGWTGFSCQRACDTGHWGPDCSHPCNCSAGHGSCDAISGL
CLCEAGYVGPRCEQQCPQGHFGPGCEQLCQCQHGAACDHVSGACTCPAGWRGTFCEHACPAGFFGLDC
RSACNCTAGAACDAVNGSCLCPAGRRGPRCAETCPAGLYGDNCRHSCLCQNGGTCDPVSGHCACPEGW
AGLACEKECPPRDVRAGCRHSGGCLNGGLCDPHTGRCLCPAGWTGDKCQSHPHGPLLEASAALIFLQP
ACGAGLERPVPSAAAARLPLPATTSLGPAAVPLASLAPAASRDVRPGGMGQAVNSCVGVSTGAPVMRP
RGPAAAPLGSSGRTATSPVRRAASAPTAPTCVVVGRGRPATL

| | | |
|---|---|---|
| NOV37m, CG56449-08 | SEQ ID NO: 881 | 4835 bp |
| DNA Sequence | ORF Start: ATG at 1 | ORF Stop: TAG at 4732 |

ATGTCGTTCCTTGAAGAGGCGAGGGCAGCGGGGCGCGCGGTGGTCCTGGCGTTGGTGCTGCTGCTGCT
CCCCGCCGTGCCCGTGGGCGCCAGCGTTCCGCCGCGGCCCCTGCTCCCGCTGCAGCCCGGCATGCCCC
ACGTGTGTGCTGAGCAGGAGCTGACCCTGGTGGGCCGCCGCCAGCCGTGCGTGCAGGCCTTAAGCCAC
ACGGTGCCGGTGTGGAAGGCCGGCTGTGGGTGGCAGGCGTGGTGCGTGGGTCATGAGCGGAGGACCGT
CTACTACATGGGCTACAGGCAGGTGTATACCACGGAGGCCCGGACCGTGCTCAGGTGCTGCCGAGGGT
GGATGCAGCAGCCCGACGAGGAGGGCTGCCTCTCGGATGTGGGTGAGTGTGCCAACGCCAACGGGGGC
TGTGCGGGTCGGTGCCGGGACACCGTGGGGGGCTTCTACTGCCGCTGGCCCCCCCCCAGCCACCAGCT
GCAGGGTGATGGCGAGACTTGCCAAGATGTGGACGAATGCCGAACCCACAACGGTGGCTGCCAGCACC
GGTGCGTGAACACCCCAGGCTCCTACCTCTGTGAGTGCAAGCCCGGCTTCCGGCTCCACACTGACAGC
AGGACCTGCGCCATTAACTCCTGCGCCCTGGGCAATGGCGGCTGCCAGCACCACTGTGTCCAGCTCAC
AATCACTCGGCATCGCTGCCAGTGCCGGCCCGGGTTCCAGCTCCAGGAGGACGGCAGGCATTGTGTCC
GTAGAAGCCCGTGTGCCAACAGGAACGGCAGCTGCATGCACAGGTGCCAGGTGGTCCGGGGCCTCGCC
CGCTGTGAGTGCCACGTGGGCTATCAGCTAGCAGCGGACGGCAAGGCCTGTGAAGATGTGGACGAATG
TGCCGCAGGGCTGGCCCAGTGTGCCCATGGCTGCCTCAACACCCAGGGGTCCTTCAAGTGCGTGTGTC
ACGCGGGCTATGAGCTGGGCGCCGATGGCCGGCAGTGCTACCGTATTGAGATGGAAATCGTGAACAGC
TGTGAGGCCAACAACGGCGGCTGCTCCCATGGCTGCAGCCACACCAGTGCTGGGCCCCTGTGCACCTG
TCCCCGCGGCTACGAGCTGGACACAGATCAGAGGACCTGCATCAGATGTCGACGACTGTGCAGACAGC
CCGTGCTGCAGCAGGTGTGCACCAACAACCCTGGCGGGTACGAGTGCGGCTGCTACGCCGGCTACCGG
CTCAGTGCCGATGGCTGCGGCTGCGAGGATGTGGATGAGTGCGCCTCCAGCCGTGGCGGCTGCGAGCA
CCACTGCACCAACCTGGCCGGCTCCTTCCAGTGCTCCTGCGAGGCCGGCTACCGGCTGCACGAGGACC
GTAGGGGCTGCAGCGCCCTGGAGGAGCCGATGGTGGACCTGGACGGCGAGCTGCCTTTCGTGCGGCCC
CTGCCCCACATTGCCGTGCTCCAGGACGAGCTGCCGCAACTCTTCCAGGATGACGACGTCGGGGCCGA
TGAGGAAGAGGCAGAGTTGCGGGGCGAACACACGCTCACAGAGAAGTTTGTCTGCCTGGATGACTCCT
TTGGCCATGACTGCAGCTTGACCTGTGATGACTGCAGGAACGGAGGGACCTGCCTCCTGGGCCTGGAT
GGCTGTGATTGCCCCGAGGGCTGGACTGGGCTCATCTGCAATGAGAGTTGTCCTCCGGACACCTTTGG
GAAGAACTGCAGCTTCTCCTGCAGCTGTCAGAATGGTGGGACCTGCGACTCTGTCACGGGGGCCTGCC
GCTGCCCCCCGGGTGTCAGTGGAACTAACTGTGAGGATGGCTGCCCCAAGGGCTACTATGGCAAGCAC
TGTCGCAAGAAATGCAACTGTGCCAACCGGGGCCGGTGCCACCGCCTCTACGGGGCCTGCCTCTGCGA
CCCAGGGCTCTACGGCCGCTTCTGCCACCTCGCCTGCCCGCCGTGGGCCTTTGGGCCGGGCTGCTCGG
AGGAGTGCCAGTGTGTGCAGCCCCACACGCAGTCCTGTGACAAGAGGGATGGCAGCTGCTCCTGCAAG
GCTGGCTTCCGGGGCGAGCGCTGTCAGGCAGAGTGTGAGCCGGGCTACTTTGGGCCGGGGTGCTGGCA
GGCATGCACCTGCCCAGTGGGCGTGGCCTGTGACTCCGTGAGCGGCGAGTGTGGGAAGCGGTGTCCTG
CTGGCTTCCAGGGAGAGGACTGTGGCCAAGAGTGCCCGGTGGGGACCTTTGGCGTGAACTGCTCGAGC
TCCTGCTCCTGTGGGGGGGCCCCCTGCCACGGGGTCACGGGGCAGTGCCGGTGTCCGCCGGGGAGGAC
TGGGGAAGACTGTGAGGCAGGTGAGTGTGAGGGCCTCTGGGGGCTGGGCTGCCAGGAGATCTGCCCAG
CATGCCATAACGCTGCTCGCTGCGACCCTGAGACCGGAGCCTGCCTGTGCCTCCCTGGCTTTGTCGGC
AGCCGCTGCCAGGACTGTGAGGCAGGCTGGTATGGTCCCAGCTGCCAGACAATGTGCTCTTGTGCCAA
TGATGGGCACTGCCACCAAGACACGGGACACTGCAGCTGTGCCCCCGGGTGGACCGGCTTTAGCTGCC
AGAGAGCCTGTGATACTGGGCACTGGGGACCTGACTGCAGCCACCCCTGCAACTGCAGCGCTGGCCAC
GGGAGCTGTGATGCCATCAGCGGCCTGTGTCTGTGTGAGGCTGGCTACGTGGGCCCGCGGTGCGAGCA
GTCAGAGTGTCCCCAGGGCCACTTTGGGCCCGGCTGTGAGCAGCGGTGCCAGTGTCAGCATGGAGCAG
CCTGTGACCACGTCAGCGGGGCCTGCACCTGCCCGGCCGGCTGGAGGGGCACCTTCTGCGAGCATGCC
TGCCCGGCCGGCTTCTTTGGATTGGACTGTCGCAGTGCCTGCAACTGCACCGCCGGAGCTGCCTGTGA
TGCCGTGAATGGCTCCTGCCTCTGCCCCGCTGGCCGCCGGGGCCCCCGCTGTGCCGAGAGTGCCTGCC
CAGCCCACACCTACGGGCACAATTGCAGCCAGGCCTGTGCCTGCTTTAACGGGGCCTCCTGTGACCCT
GTCCACGGGCAGTGCCACTGTGCCCCTGGCTGGATGGGGCCCTCCTGCCTGCAGGCCTGCCCTGCCGG
CCTGTACGGCGACAACTGTCGGCATTCCTGCCTCTGCCAGAACGGAGGGACCTGTGACCCTGTCTCAG
GCCACTGTGCGTGCCCAGAGGGCTGGGCCGGCCTGGCCTGTGAGGTAGAGTGCCTCCCCCGGGACGTC
AGAGCTGGCTGCCGGCACAGCGGCGGTTGCCTCAACGGGGGCCTGTGTGACCCGCACACGGGCCGCTG
CCTCTGCCCAGCCGGCTGGACTGGGGACAAGTGTCAGAGCCCTGCAGCCTGTGCCAAGGGCACATTCG
GGCCTCACTGTGAGGGGCGCTGTGCCTGCCGGTGGGGAGGCCCCTGCCACCTTGCCACCGGGGCCTGC
CTCTGCCCTCCGGGGTGGCGGGGGCCTCATCTTTCTGCAGCCTGCCTGCGGGGCTGGTTTGGAGAGGC
CTGTGCCCAGCGCTGCAGCTGCCCGCCTGGCGCTGCCTGCCACCACGTCACTGGGGCCTGCCGCTGTC
CCCCTGGCTTCACTGGCTCCGGCTGCGAGCAGGCCTGCCCACCCGGCAGCTTTGGGGAGGACTGTGCG
CAGATGTGCCAGTGTCCCGGTGAGAACCCGGCCTGCCACCCTGCCACCGGGACCTGCTCATGTGCTGC
TGGCTACCACGGCCCCAGCTGCCAGCAACGATGTCCGCCCGGGCGGTATGGGCCAGGCTGTGAACAGC
TGTGTGGGTGTCTCAACGGGGGCTCCTGTGATGCGGCCACGGGGGCCTGCCGCTGCCCCACTGGGTTC
CTCGGGACGGACTGCAACCTCACCTGTCCGCAGGGCCGCTTCGGCCCCAACTGCACCCACGTGTGTGG
GTGTGGGCAGGGGGCGGCCTGCGACCCTGTGACCGGCACCTGCCTCTGCCCCCCGGGGAGAGCCGGCG
TCCGCTGTGAGCGAGGCTGCCCCCAGAACCGGTTTGGCGTGGGCTGCGAGCACACCTGCTCCTGCAGA
AATGGGGGCCTGTGCCACGCCAGCAACGGCAGCTGCTCCTGTGGCCTGGGCTGGACGGGGCGGCACTG
CGAGCTGGCCTGTCCCCCTGGGCGCTACGGAGCCGCCTGCCATCTGGAGTGCTCCTGCCACAACAACA
GCACGTGTGAGCCTGCCACGGGCACCTGCCGCTGCGGCCCCGGCTTCTATGGCCAGGCCTGCGAGCAC
CCCTGTCCCCCTGGCTTCCACGGGGCTGGCTGCCAGGGGTTGTGCTGGTGTCAACATGGAGCCCCCTG
CGACCCCATCAGTGGCCGATGCCTCTGCCCTGCCGGCTTCCACGGCCACTTCTGTGAGAGGGGGTGTG
AGCCAGGTTCATTTGGAGAGGGCTGCCACCAGCGCTGTGACTGTGACGGGGGGGCACCCTGTGACCCT
GTCACCGGTCTCTGCCTTTGCCCACCAGGGCGCTCAGGAGCCACCTGTAACCTGGATTGCAGAAGGGG
CCAGTTTGGGCCCAGCTGCACCCTGCACTGTGACTGCGGGGGTGGGGCTGACTGCGACCCTGTCAGTG
GGCAGTGTCACTGTGTGGATGGCTACATGGGGCCCACGTGCCGGGAAGCGGGCACACTGCCCGCCTCC
AGCAGACCCACATCCCGGAGCGGTGGACCAGCGAGGCACTAGTAGAGGCAGTCCCGTGGAGCCCGCCT
CTCCAGTCCCAGCCAGAGGGGACCCTGGCCTTTGGTGACCACTGAGAAGGACACTTCACGGGCCCAGA
GCTCCTG

| | | | |
|---|---|---|---|
| NOV37m, CG56449-08 | | | |
| Protein Sequence | SEQ ID NO: 882 | 1577 aa | MW at 164962.6kD |

MSFLEEARAAGRAVVLALVLLLLPAVPVGASVPPRPLLPLQPGMPHVCAEQELTLVGRRQPCVQALSH
TVPVWKAGCGWQAWCVGHERRTVYYMGYRQVYTTEARTVLRCCRGWMQQPDEEGCLSDVGECANANGG
CAGRCRDTVGGFYCRWPPPSHQLQGDGETCQDVDECRTHNGGCQHRCVNTPGSYLCECKPGFRLHTDS
RTCAINSCALGNGGCQHHCVQLTITRHRCQCRPGFQLQEDGRHCVRRSPCANRNGSCMHRCQVVRGLA
RCECHVGYQLAADGKACEDVDECAAGLAQCAHGCLNTQGSFKCVCHAGYELGADGRQCYRIEMEIVNS
CEANNGGCSHGCSHTSAGPLCTCPRGYELDTDQRTCIRCRRLCRQPVLQQVCTNNPGGYECGCYAGYR
LSADGCGCEDVDECASSRGGCEHHCTNLAGSFQCSCEAGYRLHEDRRGCSALEEPMVDLDGELPFVRP
LPHIAVLQDELPQLFQDDDVGADEEEAELRGEHTLTEKFVCLDDSFGHDCSLTCDDCRNGGTCLLGLD
GCDCPEGWTGLICNESCPPDTFGKNCSFSCSCQNGGTCDSVTGACRCPPGVSGTNCEDGCPKGYYGKH
CRKKCNCANRGRCHRLYGACLCDPGLYGRFCHLACPPWAFGPGCSEECQCVQPHTQSCDKRDGSCSCK
AGFRGERCQAECEPGYFGPGCWQACTCPVGVACDSVSGECGKRCPAGFQGEDCGQECPVGTFGVNCSS
SCSCGGAPCHGVTGQCRCPPGRTGEDCEAGECEGLWGLGCQEICPACHNAARCDPETGACLCLPGFVG
SRCQDCEAGWYGPSCQTMCSCANDGHCHQDTGHCSCAPGWTGFSCQAACDTGHWGPDCSHPCNCSAGH
GSCDAISGLCLCEAGYVGPRCEQSECPQGHFGPGCEQRCQCQHGAACDHVSGACTCPAGWRGTFCEHA
CPAGFFGLDCRSACNCTAGAACDAVNGSCLCPAGRRGPRCAESACPAHTYGHNCSQACACFNGASCDP
JHGQCHCAPGWMGPSCLQACPAGLYGDNCRHSCLCQNGGTCDPVSGHCACPEGWAGLACEVECLPRDV
RAGCRHSGGCLNGGLCDPHTGRCLCPAGWTGDKCQSPAACAKGTFGPHCEGRCACRWGGPCHLATGAC
LCPPGWRGPHLSAACLRGWFGEACAQRCSCPPGAACHHVTGACRCPPGFTGSGCEQACPPGSFGEDCA
QMCQCPGENPACHPATGTCSCAAGYHGPSCQQRCPPGRYGPGCEQLCGCLNGGSCDAATGACRCPTGF
LGTDCNLTCPQGRFGPNCTHVCGCGQGAACDPVTGTCLCPPGRAGVRCERGCPQNRFGVGCEHTCSCR
NGGLCHASNGSCSCGLGWTGRHCELACPPGRYGAACHLECSCHNNSTCEPATGTCRCGPGFYGQACEH
PCPPGFHGAGCQGLCWCQHGAPCDPISGRCLCPAGFHGHFCERGCEPGSFGEGCHQRCDCDGGAPCDP
VTGLCLCPPGRSGATCNLDCRRGQFGPSCTLHCDCGGGADCDPVSGQCHCVDGYMGPTCREAGTLPAS
SRPTSRSGGPARH

| | | |
|---|---|---|
| NOV37n, CG56449-10 | SEQ ID NO: 883 | 5000 bp |
| DNA Sequence | ORF Start: ATG at 169 | ORF Stop: at 4900 |

TGCTGTTACAGGTGGAGGGCAGTGTAGTCTGAGCAGTACTCGTTGCTGCCGCGCGCGCCACCAGACAT
AATAGCTGACAGACTAACAGACTGTTCCTTTCCATGGGTCTTTTCTGCAGTCACCGTCCTTGACACGA
AGCTTTCTAGAAGATCTTCGCGAGGATCCACCATGTCGTTCCTTGAAGAGGCGAGGGCAGCGGGGCGC
GCGGTGGTCCTGGCGTTGGTGCTGCTGCTGCTCCCCGCCGTGCCCGTGGGCGCCAGCGTTCCGCCGCG
GCCCCTGCTCCCGCTGCAGCCCGGCATGCCCCACGTGTGTGCTGAGCAGGAGCTGACCCTGGTGGGCC
GCCGCCAGCCGTGCGTGCAGGCCTTAAGCCACACGGTGCCGGTGTGGAAGGCCGGCTGTGGGTGGCAG
GCGTGGTGCGTGGGTCATGAGCGGAGGACCGTCTACTACATGGGCTACAGGCAGGTGTATACCACGGA
aGGCCCGACCGTGCTCAGGTGCTGCCGAGGGTGGATGCAGCAGCCCGACGAGGAGGGCTGCCTCTCGG
ATGTGGGTGAGTGTGCCAACGCCAACGGGGGCTGTGCGGGTCGGTGCCGGGACACCGTGGGGGGCTTC
TACTGCCGCTGGCCCCCCCCCAGCCACCAGCTGCAGGGTGATGGCGAGACTTGCCAAGATGTGGACGA
ATGCCGAACCCACAACGGTGGCTGCCAGCACCGGTGCGTGAACACCCCAGGCTCCTACCTCTGTGAGT
GCAAGCCCGGCTTCCGGCTCCACACTGACAGCAGGACCTGCGCCATTAACTCCTGCGCCCTGGGCAAT
GGCGGCTGCCAGCACCACTGTGTCCAGCTCACAATCACTCGGCATCGCTGCCAGTGCCGGCCCGGGTT
CCAGCTCCAGGAGGACGGCAGGCATTGTGTCCGTAGAAGCCCGTGTGCCAACAGGAACGGCAGCTGCA
TGCACAGGTGCCAGGTGGTCCGGGGCCTCGCCCGCTGTGAGTGCCACGTGGGCTATCAGCTAGCAGCG
GACGGCAAGGCCTGTGAAGATGTGGACGAATGTGCCGCAGGGCTGGCCCAGTGTGCCCATGGCTGCCT
CAACACCCAGGGGTCCTTCAAGTGCGTGTGTCACGCGGGCTATGAGCTGGGCGCCGATGGCCGGCAGT
GCTACCGTATTGAGATGGAAATCGTGAACAGCTGTGAGGCCAACAACGGCGGCTGCTCCCATGGCTGC
AGCCACACCAGTGCTGGGCCCCTGTGCACCTGTCCCCGCGGCTACGAGCTGGACACAGATCAGAGGAC
CTGCATCAGATGTCGACGACTGTGCAGACAGCCCGTGCTGCAGCAGGTGTGCACCAACAACCCTGGCG
GGTACGAGTGCGGCTGCTACGCCGGCTACCGGCTCAGTGCCGATGGCTGCGGCTGCGAGGATGTGGAT
GAGTGCGCCTCCAGCCGTGGCGGCTGCGAGCACCACTGCACCAACCTGGCCGGCTCCTTCCAGTGCTC
CTGCGAGGCCGGCTACCGGCTGCACGAGGACCGTAGGGGCTGCAGCGCCCTGGAGGAGCCGATGGTGG
ACCTGGACGGCGAGCTGCCTTTCGTGCGGCCCCTGCCCCACATTGCCGTGCTCCAGGACGAGCTGCCG
CAACTCTTCCAGGATGACGACGTCGGGGCCGATGAGGAAGAGGCAGAGTTGCGGGGCGAACACACGCT
CACAGAGAAGTTTGTCTGCCTGGATGACTCCTTTGGCCATGACTGCAGCTTGACCTGTGATGACTGCA
GGAACGGAGGGACCTGCCTCCTGGGCCTGGATGGCTGTGATTGCCCCGAGGGCTGGACTGGGCTCATC
TGCAATGAGAGTTGTCCTCCGGACACCTTTGGGAAGAACTGCAGCTTCTCCTGCAGCTGTCAGAATGG
TGGGACCTGCGACTCTGTCACGGGGGCCTGCCGCTGCCCCCCGGGTGTCAGTGGAACTAACTGTGAGG
ATGGCTGCCCCAAGGGCTACTATGGCAAGCACTGTCGCAAGAAATGCAACTGTGCCAACCGGGGCCGG
TGCCACCGCCTCTACGGGGCCTGCCTCTGCGACCCAGGGCTCTACGGCCGCTTCTGCCACCTCGCCTG
CCCGCCGTGGGCCTTTGGGCCGGGCTGCTCGGAGGAGTGCCAGTGTGTGCAGCCCCACACGCAGTCCT
GTGACAAGAGGGATGGCAGCTGCTCCTGCAAGGCTGGCTTCCGGGGCGAGCGCTGTCAGGCAGAGTGT
GAGCCGGGCTACTTTGGGCCGGGGTGCTGGCAGGCATGCACCTGCCCAGTGGGCGTGGCCTGTGACTC
CGTGAGCGGCGAGTGTGGGAAGCGGTGTCCTGCTGGCTTCCAGGGAGAGGACTGTGGCCAAGAGTGCC
CGGTGGGGACCTTTGGCGTGAACTGCTCGAGCTCCTGCTCCTGTGGGGGGGCCCCCTGCCACGGGGTC
ACGGGGCAGTGCCGGTGTCCGCCGGGGAGGACTGGGGAAGACTGTGAGGCAGGTGAGTGTGAGGGCCT
CTGGGGGCTGGGCTGCCAGGAGATCTGCCCAGCATGCCATAACGCTGCTCGCTGCGACCCTGAGACCG
GAGCCTGCCTGTGCCTCCCTGGCTTTGTCGGCAGCCGCTGCCAGGACTGTGAGGCAGGCTGGTATGGT
CCCAGCTGCCAGACAATGTGCTCTTGTGCCAATGATGGGCACTGCCACCAAGACACGGGACACTGCAG
CTGTGCCCCCGGGTGGACCGGCTTTAGCTGCCAGAGAGCCTGTGATACTGGGCACTGGGGACCTGACT
GCAGCCACCCCTGCAACTGCAGCGCTGGCCACGGGAGCTGTGATGCCATCAGCGGCCTGTGTCTGTGT
GAGGCTGGCTACGTGGGCCCGCGGTGCGAGCAGTCAGAGTGTCCCCAGGGCCACTTTGGGCCCGGCTG
TGAGCAGCGGTGCCAGTGTCAGCATGGAGCAGCCTGTGACCACGTCAGCGGGGCCTGCACCTGCCCGG
CCGGCTGGAGGGGCACCTTCTGCGAGCATGCCTGCCCGGCCGGCTTCTTTGGATTGGACTGTCGCAGT
GCCTGCAACTGCACCGCCGGAGCTGCCTGTGATGCCGTGAATGGCTCCTGCCTCTGCCCCGCTGGCCG
CCGGGGCCCCCGCTGTGCCGAGAGTGCCTGCCCAGCCCACACCTACGGGCACAATTGCAGCCAGGCCT
GTGCCTGCTTTAACGGGGCCTCCTGTGACCCTGTCCACGGGCAGTGCCACTGTGCCCCTGGCTGGATG
GGGCCCTCCTGCCTGCAGGCCTGCCCTGCCGGCCTGTACGGCGACAACTGTCGGCATTCCTGCCTCTG
CCAGAACGGAGGGACCTGTGACCCTGTCTCAGGCCACTGTGCGTGCCCAGAGGGCTGGGCCGGCCTGG
CCTGTGAGGTAGAGTGCCTCCCCCGGGACGTCAGAGCTGGCTGCCGGCACAGCGGCGGTTGCCTCAAC
GGGGGCCTGTGTGACCCGCACACGGGCCGCTGCCTCTGCCCAGCCGGCTGGACTGGGGACAAGTGTCA
GAGCCCTGCAGCCTGTGCCAAGGGCACATTCGGGCCTCACTGTGAGGGGCGCTGTGCCTGCCGGTGGG
GAGGCCCCTGCCACCTTGCCACCGGGGCCTGCCTCTGCCCTCCGGGGTGGCGGGGGCCTCATCTTTCT
GCAGCCTGCCTGCGGGGCTGGTTTGGAGAGGCCTGTGCCCAGCGCTGCAGCTGCCCGCCTGGCGCTGC
CTGCCACCACGTCACTGGGGCCTGCCGCTGTCCCCCTGGCTTCACTGGCTCCGGCTGCGAGCAGGCCT
GCCCACCCGGCAGCTTTGGGGAGGACTGTGCGCAGATGTGCCAGTGTCCCGGTGAGAACCCGGCCTGC
CACCCTGCCACCGGGACCTGCTCATGTGCTGCTGGCTACCACGGCCCCAGCTGCCAGCAACGATGTCC
GCCCGGGCGGTATGGGCCAGGCTGTGAACAGCTGTGTGGGTGTCTCAACGGGGGCTCCTGTGATGCGG
CCACGGGGGCCTGCCGCTGCCCCACTGGGTTCCTCGGGACGGACTGCAACCTCACCTGTCCGCAGGGC
CGCTTCGGCCCCAACTGCACCCACGTGTGTGGGTGTGGGCAGGGGGCGGCCTGCGACCCTGTGACCGG
CACCTGCCTCTGCCCCCCGGGGAGAGCCGGCGTCCGCTGTGAGCGAGGCTGCCCCCAGAACCGGTTTG
GCGTGGGCTGCGAGCACACCTGCTCCTGCAGAAATGGGGGCCTGTGCCACGCCAGCAACGGCAGCTGC
TCCTGTGGCCTGGGCTGGACGGGGCGGCACTGCGAGCTGGCCTGTCCCCCTGGGCGCTACGGAGCCGC
CTGCCATCTGGAGTGCTCCTGCCACAACAACAGCACGTGTGAGCCTGCCACGGGCACCTGCCGCTGCG
GCCCCGGCTTCTATGGCCAGGCCTGCGAGCACCCCTGTCCCCCTGGCTTCCACGGGGCTGGCTGCCAG
GGGTTGTGCTGGTGTCAACATGGAGCCCCCTGCGACCCCATCAGTGGCCGATGCCTCTGCCCTGCCGG
CTTCCACGGCCACTTCTGTGAGAGGGGGTGTGAGCCAGGTTCATTTGGAGAGGGCTGCCACCAGCGCT
GTGACTGTGACGGGGGGGCACCCTGTGACCCTGTCACCGGTCTCTGCCTTTGCCCACCAGGGCGCTCA
GGAGCCACCTGTAACCTGGATTGCAGAAGGGGCCAGTTTGGGCCCAGCTGCACCCTGCACTGTGACTG
CGGGGGTGGGGCTGACTGCGACCCTGTCAGTGGGCAGTGTCACTGTGTGGATGGCTACATGGGGCCCA
CGTGCCGGGAAGCGGGCACACTGCCCGCCTCCAGCAGACCCACATCCCGGAGCGGTGGACCAGCGAGG
CACGTATTCCCCGGGCTCGAGGGTAAGCCTATCCCTAACCCTCTCCTCGGTCTCGATTCTACGCGTAC
CGGTCATCACCACCATCACCATTGAGTTTAATTCAT

| | | | |
|---|---|---|---|
| NOV37n, CG56449-10 | | | |
| Protein Sequence | SEQ ID NO: 884 | 1577 aa | MW at 164962.6kD |

MSFLEEARAAGRAVVLALVLLLLPAVPVGASVPPRPLLPLQPGMPHVCAEQELTLVGRRQPCVQALSH
TVPVWKAGCGWQAWCVGHERRTVYYMGYRQVYTTEARTVLRCCRGWMQQPDEEGCLSDVGECANANGG
CAGRCRDTVGGFYCRWPPPSHQLQGDGETCQDVDECRTHNGGCQHRCVNTPGSYLCECKPGFRLHTDS
RTCAINSCALGNGGCQHHCVQLTITRHRCQCRPGFQLQEDGRHCVRRSPCANRNGSCMHRCQVVRGLA
RCECHVGYQLAADGKACEDVDECAAGTAQCAHGCLNTQGSFKCVCHAGYELGADGRQCYRIEMETVNS
CEANNGGCSHGCSHTSAGPLCTCPRGYELDTDQRTCIRCRRLCRQPVLQQVCTNNPGGYECGCYAGYR
LSADGCGCEDVDECASSRGGCEHHCTNLAGSFQCSCEAGYRLHEDRRGCSALEEPMVDLDGELPFVRP
LPHIAVLQDELPQLFQDDDVGADEEEAELRGEHTLTEKFVCLDDSFGHDCSLTCDDCRIGGTCLLGLD
GCDCPEGWTGLICNESCPPDTFGKNCSFSCSCQNGGTCDSVTGACRCPPGVSGTNCEDGCPKGYYGKH
CRKKCNCANRGRCHRLYGACLCDPGLYGRFCHLACPPWAFGPGCSEECQCVQPHTQSCDKRDGSCSCK
AGFRGERCQAECEPGYFGPGCWQACTCPVGVACDSVSGECGKRCPAGFQGEDCGQECPVGTFGVNCSS
SCSCGGAPCHGVTGQCRCPPGRTGEDCEAGECEGLWGLGCQEICPACHNAARCDPETGACLCLPGFVG
GSCDAISGLCLCEAGYVGPRCEQSECPQGHFGPGCEQRCQCQHGAACDHVSGACTCPAGWRGTFCEHA
CPAGFFGLDCRSACNCTAGAACDAVNGSCLCPAGRRGPRCAESACPAHTYGHNCSQACACFNGASCDP
VHGQCHCAPGWMGPSCLQACPAGLYGDNCRHSCLCQNGGTCDPVSGHCACPEGWAGLACEVECLPRDV
RAGCRHSGGCLNGGLCDPHTGRCLCPAGWTGDKCQSPAACAKGTFGPHCEGRCACRWGGPCHLATGAC
LCPPGWRGPHLSAACLRGWFGEACAQRCSCPPGAACHHVTGACRCPPGFTGSGCEQACPPGSFGEDCA
QMCQCPGENPACHPATGTCSCAAGYHGPSCQQRCPPGRYGPGCEQLCGCLNGGSCDAATGACRCPTGF
LGTDCNLTCPQGRFGPNCTHVCGCGQGAACDPVTGTCLCPPGPAGVRCERGCPQNRFGVGCEHTCSCR
NGGLCHASNGSCSCGLGWTGRHCELACPPGRYGAACHLECSCHNNSTCEPATGTCRCGPGFYGQACEH
PCPPGFHGAGCQGLCWCQHGAPCDPISGRCLCPAGFHGHFCERGCEPGSFGEGCHQRCDCDGGAPCDP
VTGLCLCPPGRSGATCNLDCRRGQFGPSCTLHCDCGGGADCDPVSGQCHCVDGYMGPTCREAGTLPAS
SRPTSRSGGPARH

| | | |
|---|---|---|
| NOV37o, CG56449-1 | SEQ ID NO: 885 | 5005 bp |
| DNA Sequence | ORF Start: at 258 | ORF Stop: at 4899 |

AACGGGTGGAGGGCAGTGTAGTCTGAGCAGTACTCGTTGCTGCCGCGCGCGCCACCAGACATAATAGC
TGACAGACTAACAGACTGTTCCTTTCCATGGGTCTTTTCTGCAGTCACCGTCCTTGACACGAAGCTCT
AGCCACCATGGAGACAGACACACTCCTGCTATGGGTACTGCTGCTCTGGGTTCCAGGTTCCACTGGTG
ACGCGGCCCAGCCGGCCAGGCGCGCGCGCCGTACGAAGCTTTCGCGAGGATCCAGCGTTCCGCCGCGG
CCCCTGCTCCCGCTGCAGCCCGGCATGCCCCACGTGTGTGCTGAGCAGGAGCTGACCCTGGTGGGCCG
CCGCCAGCCGTGCGTGCAGGCCTTAAGCCACACGGTGCCGGTGTGGAAGGCCGGCTGTGGGTGGCAGG
CGTGGTGCGTGGGTCATGAGCGGAGGACCGTCTACTACATGGGCTACAGGCAGGTGTATACCACGGAG
GCCCGGACCGTGCTCAGGTGCTGCCGAGGGTGGATGCAGCAGCCCGACGAGGAGGGCTGCCTCTCGGA
TGTGGGTGAGTGTGCCAACGCCAACGGGGGCTGTGCGGGTCGGTGCCGGGACACCGTGGGGGGCTTCT
ACTGCCGCTGGCCCCCCCCCAGCCACCAGCTGCAGGGTGATGGCGAGACTTGCCAAGATGTGGACGAA
TGCCGAACCCACAACGGTGGCTGCCAGCACCGGTGCGTGAACACCCCAGGCTCCTACCTCTGTGAGTG
CAAGCCCGGCTTCCGGCTCCACACTGACAGCAGGACCTGCGCCATTAACTCCTGCGCCCTGGGCAATG
GCGGCTGCCAGCACCACTGTGTCCAGCTCACAATCACTCGGCATCGCTGCCAGTGCCGGCCCGGGTTC
CAGCTCCAGGAGGACGGCAGGCATTGTGTCCGTAGAAGCCCGTGTGCCAACAGGAACGGCAGCTGCAT
GCACAGGTGCCAGGTGGTCCGGGGCCTCGCCCGCTGTGAGTGCCACGTGGGCTATCAGCTAGCAGCGG
ACGGCAAGGCCTGTGAAGATGTGGACGAATGTGCCGCAGGGCTGGCCCAGTGTGCCCATGGCTGCCTC
AACACCCAGGGGTCCTTCAAGTGCGTGTGTCACGCGGGCTATGAGCTGGGCGCCGATGGCCGGCAGTG
CTACCGTATTGAGATGGAAATCGTGAACAGCTGTGAGGCCAACAACGGCGGCTGCTCCCATGGCTGCA
GCCACACCAGTGCTGGGCCCCTGTGCACCTGTCCCCGCGGCTACGAGCTGGACACAGATCAGAGGACC
TGCATCAGATGTCGACGACTGTGCAGACAGCCCGTGCTGCAGCAGGTGTGCACCAACAACCCTGGCGG
GTACGAGTGCGGCTGCTACGCCGGCTACCGGCTCAGTGCCGATGGCTGCGGCTGCGAGGATGTGGATG
AGTGCGCCTCCAGCCGTGGCGGCTGCGAGCACCACTGCACCAACCTGGCCGGCTCCTTCCAGTGCTCC
TGCGAGGCCGGCTACCGGCTGCACGAGGACCGTAGGGGCTGCAGCGCCCTGGAGGAGCCGATGGTGGA
CCTGGACGGCGAGCTGCCTTTCGTGCGGCCCCTGCCCCACATTGCCGTGCTCCAGGACGAGCTGCCGC
AACTCTTCCAGGATGACGACGTCGGGGCCGATGAGGAAGAGGCAGAGTTGCGGGGCGAACACACGCTC
GAACGGAGGGACCTGCCTCCTGGGCCTGGATGGCTGTGATTGCCCCGAGGGCTGGACTGGGCTCATCT
AGCATGAGAGTTGTCCTCCGGACACCTTTGGGAAGAACTGCAGCTTCTCCTGCAGCTGTCAGAATGGT
GGGACCTGCGACTCTGTCACGGGGGCCTGCCGCTGCCCCCCGGGTGTCAGTGGAACTAACTGTGAGGA
TGGCTGCCCCAAGGGCTACTATGGCAAGCACTGTCGCAAGAAATGCAACTGTGCCAACCGGGGCCGGT
GCCACCGCCTCTACGGGGCCTGCCTCTGCGACCCAGGGCTCTACGGCCGCTTCTGCCACCTCGCCTGC
CCGCCGTGGGCCTTTGGGCCGGGCTGCTCGGAGGAGTGCCAGTGTGTGCAGCCCCACACGCAGTCCTG
TGACAAGAGGGATGGCAGCTGCTCCTGCAAGGCTGGCTTCCGGGGCGAGCGCTGTCAGGCAGAGTGTG
AGCCGGGCTACTTTGGGCCGGGGTGCTGGCAGGCATGCACCTGCCCAGTGGGCGTGGCCTGTGACTCC
GTGAGCGGCGAGTGTGGGAAGCGGTGTCCTGCTGGCTTCCAGGGAGAGGACTGTGGCCAAGAGTGCCC
GGTGGGGACCTTTGGCGTGAACTGCTCGAGCTCCTGCTCCTGTGGGGGGGCCCCCTGCCACGGGGTCA
CGGGGCAGTGCCGGTGTCCGCCGGGGAGGACTGGGGAAGACTGTGAGGCAGGTGAGTGTGAGGGCCTC
TGGGGGCTGGGCTGCCAGGAGATCTGCCCAGCATGCCATAACGCTGCTCGCTGCGACCCTGAGACCGG
AGCCTGCCTGTGCCTCCCTGGCTTTGTCGGCAGCCGCTGCCAGGACTGTGAGGCAGGCTGGTATGGTC
CCAGCTGCCAGACAATGTGCTCTTGTGCCAATGATGGGCACTGCCACCAAGACACGGGACACTGCAGC
TGTGCCCCCGGGTGGACCGGCTTTAGCTGCCAGAGAGCCTGTGATACTGGGCACTGGGGACCTGACTG
CAGCCACCCCTGCAACTGCAGCGCTGGCCACGGGAGCTGTGATGCCATCAGCGGCCTGTGTCTGTGTG
AGGCTGGCTACGTGGGCCCGCGGTGCGAGCAGTCAGAGTGTCCCCAGGGCCACTTTGGGCCCGGCTGT
GAGCAGCGGTGCCAGTGTCAGCATGGAGCAGCCTGTGACCACGTCAGCGGGGCCTGCACCTGCCCGGC
CGGCTGGAGGGGCACCTTCTGCGAGCATGCCTGCCCGGCCGGCTTCTTTGGATTGGACTGTCGCAGTG
CCTGCAACTGCACCGCCGGAGCTGCCTGTGATGCCGTGAATGGCTCCTGCCTCTGCCCCGCTGGCCGC
CGGGGCCCCCGCTGTGCCGAGAGTGCCTGCCCAGCCCACACCTACGGGCACAATTGCAGCCAGGCCTG
TGCCTGCTTTAACGGGGCCTCCTGTGACCCTGTCCACGGGCAGTGCCACTGTGCCCCTGGCTGGATGG
GGCCCTCCTGCCTGCAGGCCTGCCCTGCCGGCCTGTACGGCGACAACTGTCGGCATTCCTGCCTCTGC
CTGTGAGGTAGAGTGCCTCCCCCGGGACGTCAGAGCTGGCTGCCGGCACAGCGGCGGTTGCCTCAACG
GGGGCCTGTGTGACCCGCACACGGGCCGCTGCCTCTGCCCAGCCGGCTGGACTGGGGACAAGTGTCAG
AGCCCTGCAGCCTGTGCCAAGGGCACATTCGGGCCTCACTGTGAGGGGCGCTGTGCCTGCCGGTGGGG
AGGCCCCTGCCACCTTGCCACCGGGGCCTGCCTCTGCCCTCCGGGGTGGCGGGGGCCTCATCTTTCTG
CAGCCTGCCTGCGGGGCTGGTTTGGAGAGGCCTGTGCCCAGCGCTGCAGCTGCCCGCCTGGCGCTGCC
TGCCACCACGTCACTGGGGCCTGCCGCTGTCCCCCTGGCTTCACTGGCTCCGGCTGCGAGCAGGCCTG
CCCACCCGGCAGCTTTGGGGAGGACTGTGCGCAGATGTGCCAGTGTCCCGGTGAGAACCCGGCCTGCC
ACCCTGCCACCGGGACCTGCTCATGTGCTGCTGGCTACCACGGCCCCAGCTGCCAGCAACGATGTCCG
CCCGGGCGGTATGGGCCAGGCTGTGAACAGCTGTGTGGGTGTCTCAACGGGGGCTCCTGTGATGCGGC
CACGGGGGCCTGCCGCTGCCCCACTGGGTTCCTCGGGACGGACTGCAACCTCACCTGTCCGCAGGGCC
GCTTCGGCCCCAACTGCACCCACGTGTGTGGGTGTGGGCAGGGGGCGGCCTGCGACCCTGTGACCGGC
ACCTGCCTCTGCCCCCCGGGGAGAGCCGGCGTCCGCTGTGAGCGAGGCTGCCCCCAGAACCGGTTTGG
CGTGGGCTGCGAGCACACCTGCTCCTGCAGAAATGGGGGCCTGTGCCACGCCAGCAACGGCAGCTGCT
CCTGTGGCCTGGGCTGGACGGGGCGGCACTGCGAGCTGGCCTGTCCCCCTGGGCGCTACGGAGCCGCC
TGCCATCTGGAGTGCTCCTGCCACAACAACAGCACGTGTGAGCCTGCCACGGGCACCTGCCGCTGCGG
CCCCGGCTTCTATGGCCAGGCCTGCGAGCACCCCTGTCCCCCTGGCTTCCACGGGGCTGGCTGCCAGG
GGTTGTGCTGGTGTCAACATGGAGCCCCCTGCGACCCCATCAGTGGCCGATGCCTCTGCCCTGCCGGC
TTCCACGGCCACTTCTGTGAGAGGGGGTGTGAGCCAGGTTCATTTGGAGAGGGCTGCCACCAGCGCTG
TGACTGTGACGGGGGGGCACCCTGTGACCCTGTCACCGGTCTCTGCCTTTGCCCACCAGGGCGCTCAG
GGGGGTGGGGCTGACTGCGACCCTGTCAGTGGGCAGTGTCACTGTGTGGATGGCTACATGGGGCCCAC
GTGCCGGGAAGCGGGCACACTGCCCGCCTCCAGCAGACCCACATCCCGGAGCGGTGGACCAGCGAGGC
ACGAATTCCCCGGGCTCGAGGGTAAGCCTATCCCTAACCCTCTCCTCGGTCTCGATTCTACGCGTACC
GGTCATCACCACCATCACCATTGAGTTTAATTCATTGATTT

| | | | |
|---|---|---|---|
| NOV37o, CG56449-11 | | | |
| Protein Sequence | SEQ ID NO: 886 | 1547 aa | MW at 161933.0kD |

SVPPRPLLPLQPGMPHVCAEQELTLVGRRQPCVQALSHTVPVWKAGCGWQAWCVGHERRTVYYMGYRQ
VYTTEARTVLRCCRGWMQQPDEEGCLSDVGECANANGGCAGRCRDTVGGFYCRWPPPSHQLQGDGETC
QDVDECRTHNGGCQHRCVNTPGSYLCECKPGFRLHTDSRTCAINSCALGNGGCQHHCVQLTITRHRCQ
CRPGFQLQEDGRHCVRRSPCANRNGSCMHRCQVVRGLARCECHVGYQLAADGKACEDVDECAAGLAQC
AHGCLNTQGSFKCVCHAGYELGADGRQCYRIEMEIVNSCEANNGGCSHGCSHTSAGPLCTCPRGYELD
TDQRTCIRCRRLCRQPVLQQVCTNNPGGYECGCYAGYRLSADGCGCEDVDECASSRGGCEHHCTNLAG
SFQCSCEAGYRLHEDRRGCSALEEPMVDLDGELPFVRPLPHIAVLQDELPQLFQDDDVGADEEEAELR
GEHTLTEKFVCLDDSFGHDCSLTCDDCRNGGTCLLGLDGCDCPEGWTGLICNESCPPDTFGKNCSFSC
SCQNGGTCDSVTGACRCPPGVSGTNCEDGCPKGYYGKHCRKKCNCANRGRCHRLYGACLCDPGLYGRF
CHLACPPWAFGPGCSEECQCVQPHTQSCDKRDGSCSCKAGFRGERCQAECEPGYFGPGCWQACTCPVG
VACDSVSGECGKRCPAGFQGEDCGQECPVGTFGVNCSSSCSCGGAPCHGVTGQCRCPPGRTGEDCEAG
ECEGLWGLGCQEICPACHNAARCDPETGACLCLPGFVGSRCQDCEAGWYGPSCQTMCSCANDGHCHQD
TGHCSCAPGWTGFSCQHACDTGHWGPDCSHPCNCSAGHGSCDAISGLCLCEAGYVGPRCEQSECPQGH
FGPGCEQRCQCQHGAACDHVSGACTCPAGWRGTFCEHACPAGFFGLDCRSACNCTAGAACDAVNGSCL
CPAGRRGPRCAESACPAHTYGHNCSQACACFNGASCDPVHGQCHCAPGWMGPSCLQACPAGLYGDNCR
HSCLCQNGGTCDPVSGHCACPEGWAGLACEVECLPRDVRAGCRHSGGCLNGGLCDPHTGRCLCPAGWT
GDKCQSPAACAKGTFGPHCEGRCACRWGGPCHLATGACLCPPGWRGPHLSAACLRGWFGEACAQRCSC
PPGAACHHVTGACRCPPGFTGSGCEQACPPGSFGEDCAQMCQCPGENPACHPATGTCSCAAGYHGPSC
QQRCPPGRYGPGCEQLCGCLNGGSCDAATGACRCPTGFLGTDCNLTCPQGRFGPNCTHVCGCGQGAAC
DPVTGTCLCPPGRAGVRCERGCPQNRFGVGCEHTCSCRNGGLCHASNGSCSCGLGWTGRHCELACPPG
RYGAACHLECSCHNNSTCEPATGTCRCGPGFYGQACEHPCPPGFHGAGCQGLCWCQHGAPCDPISGRC
LCPAGFHGHFCERGCEPGSFGEGCHQRCDCDGGAPCDPVTGLCLCPPGRSGATCNLDCRRGQFGPSCT
LHCDCGGGADCDPVSGQCHCVDGYMGPTCREAGTLPASSRPTSRSGGPARH

| | | |
|---|---|---|
| NOV37p, | | |
| SNP13382514 of | SEQ ID NO: 887 | 877 bp |
| CG56449-04, | ORF Start: ATG at 25 | ORF Stop: TAG at 535 |
| DNA Sequence | SNP Pos: 430 | SNP Change: G to A |

CCGGAGCTGCCTGTGATGCCGTGAATGGCTCCTGCCTCTGCCCCGCTGGCCGCCGGGGCCCCCGCTGT
GCCGAGACCTGCCCTGCCGGCCTGTACGGCGACAACTGTCGGCATTCCTGCCTCTGCCAGAACGGAGG
GACCTGTGACCCTGTCTCAGGCCTGCGAGCACCCCTGTCCCCCTGGCTTCCACGGGGCTGGCCGCCAG
GGGTTGTGCTGGTGTCAACATGGAGCCCCCTGCGACCCCATCAGTGGCCGATGCCTCTGCCCTGCCGG
CTTCCACGGCCACTTCTGTGAGAGGGATTGCAGAAGGGGCCAGTTTGGGCCCAGCTGCACCCTGCACT
GTGACTGCGGGGGTGGGGCTGACTGCGACCCTGTCAGTGGGCAGTGTCACTGTGTGGATGGCTACATG
GGGCCCACGTGCCGGGAAGGTAGGCCCCTCCGGCTCCCCGAGAACCCGTCCTTAGCCCAGGGCTCAGC
GGGCACACTGCCCGCCTCCAGCAGACCCACATCCCGGAGCGGTGGACCAGCGAGGCACTAGTAGAGGC
AGTCCCGTGGAGCCCGCCTCTCCAGTCCCAGCCAGAGGGGACCCTGGCCTTTGGTGACCACTGAGAAG
GACACTTCACGGGCCCAGAGCTCCTGGTACTGCCCTTCCTTTGAGGGCCGTGGAGGGCTGTGGACAGC
CCAGCAACCTGTCGCTCTTGGAGGCTGGTGTGGCCTTGAGGAGGGAAGCCTCGCATGGCCGCTGGAAG
AGAGGCGTCTCCTGGCCTGGCTCTGCAGAACCCAGGGGCACGCTCTGGGCCTGGGCTGAGGAAGTCCC
GCTCTCCCGCGGCTCTGAGTTGGACTGAGGACAGGTGTGGGCGCCAGTGTGGGTGCAGGCG

| | | | |
|---|---|---|---|
| NOV37p, | | | |
| SNP13382514 of | | | |
| CG56449-04, | SEQ ID NO: 888 | | MW at 17222.2kD |
| Protein Sequence | SNP Pos: 136 | 170 aa | SNP Change: Gly to Arg |

MAPASAPLAAGAPAVPRPALPACTATTVGIPASARTEGPVTLSQACEHPCPPGFHGAGRQGLCWCQHG
APCDPISGRCLCPAGFHGHFCERDCRRGQFGPSCTLHCDCGGGADCDPVSGQCHCVDGYMGPTCREGR
PLRLPENPSLAQGSAGTLPASSRPTSRSGGPARH

[0567] A ClustalW comparison of the above protein sequences yields the following sequence alignment shown in Table 37B.

TABLE 37B

Comparison of the NOV37 protein sequences.

| | |
|---|---|
| NOV37a | ------------------------------------------------------------ |
| NOV37b | -----------------------------------------------MSFLEEARAAGRA |
| NOV37c | ------------------------------------------------------------ |
| NOV37d | -------------------------------------------TGSTMSFLEEARAAGRA |
| NOV37e | SEQYSLLPRAPPDIIADRLTDCSFPWVFSAVTVLDTKLSRRSSRGSTMSFLEEAPAAGRA |
| NOV37f | --------------------------------------------HEALATMETDTLLLWV |
| NOV37g | -----------------------------------------------MPMGHSDRWSWRL |
| NOV37h | -----------------------------------------------MPMGHSDRWSWRL |
| NOV37i | -----------------------------------------------MPMGHSDRWSWRL |
| NOV37j | ------------------------------------------------------------ |
| NOV37k | -----------------------------------------------MPMGHSDRWSWRL |
| NOV37l | -----------------------------------------------MPMGHSDRWSWRL |
| NOV37m | -----------------------------------------------MSFLEEARAAGRA |
| NOV37n | -----------------------------------------------MSFLEEARAAGPA |
| NOV37o | ------------------------------------------------------------ |
| NOV37a | ------------------------------------------------------------ |
| NOV37b | VVLALVLLLLPAVPVGASVPPRPLLPLQPG-----------MPHVCAEQELTLVGRRQPC |
| NOV37c | ------------------------------------------------------------ |
| NOV37d | VVLALVLLLLPAVPVGASVPPRPLLPLQPG-----------MPHVCAEQELTLVGRRQPC |
| NOV37e | VVLALVLLLLPAVPVGASVPPRPLLPLQPG-----------MPHVCAEQELTLVGRRQPC |
| NOV37f | LLLWVPGSTGDAAQPARRARRTKLSRGSSVPPRPLLPLQPGMPHVCAEQELTLVGRRQPC |
| NOV37g | LRLALPLPVWLPAGGGRGADSPCLCS---------------RPHVCAEQELTLVGRRQPC |
| NOV37h | LRLALPLPVWLPAGGGRGADSPCLCS---------------RPHVCAEQELTLVGRRQPC |
| NOV37i | LRLALPLPVWLPAGGGRGADSPCLCS---------------RPHVCAEQELTLVGRRQPC |
| NOV37j | ------------------------------------------------------------ |
| NOV37k | LRLALPLPVWLPAGGGRGADSPCLCS---------------RPHVCAEQELTLVGRRQPC |
| NOV37l | LRLALPLPVWLPAGGGRGADSPCLCS---------------RPHVCAEQELTLVGRRQPC |
| NOV37m | VVLALVLLLLPAVPVGASVPPRPLLPLQPG-----------MPHVCAEQELTLVGRRQPC |
| NOV37n | VVLALVLLLLPAVPVGASVPPRPLLPLQPG-----------MPHVCAEQELTLVGRRQPC |
| NOV37o | ---SVPPRPLLPLQPG-------------------------MPHVCAEQELTLVGRRQPC |
| NOV37a | ------------------------------------------------------------ |
| NOV37b | VQALSHTVPVWRAGCGWQAWCVGHERRTVYYMGYRQVYTTEARTVLRCCRGWTQQPDEEG |
| NOV37c | ------------------------------------------------------------ |
| NOV37d | VQALSHTVPVWKAGCGWQAWCVGHERRTVYYMGYRQVYTTEARTVLRCCRGWTQQPDEEG |
| NOV37e | VQALSHTVPVWKAGCGWQAWCVGHERRTVYYMGYRQVYTTEARTVLRCCRGWMQQPDEEG |
| NOV37f | VQALSHTVPVWKAGCGWQAWCVGHERRTVYYMGYRQVYTTEARTVLRCCRGWMQQPDEEG |
| NOV37g | VQALSHTVPVWKAGCGWQAWCVGHERRTVYYMGYRQVYTTEARTVLRCCRGWMQQPDEEG |
| NOV37h | VQALSHTVPVWKAGCGWQAWCVGHERRTVYYMGYRQVYTTEARTVLRCCRGWTQQPDEEG |
| NOV37i | VQALSHTVPVWKAGCGWQAWCVGHERRTVYYMGYRQVYTTEARTVLRCCRGWTQQPDEEG |
| NOV37j | ------------------------------------------------------------ |
| NOV37k | VQALSHTVPVWKAGCGWQAWCVGHERRTVYYMGYRQVYTTEARTVLRCCRGWMQQPDEEG |
| NOV37l | VQALSHTVPVWKAGCGWQAWCVGHERRTVYYMGYRQVYTTEARTVLRCCRGWTQQPDEEG |
| NOV37ni VQALSHTVPVWKAGCGWQAWCVGHERRTVYYMGYRQVYTTEARTVLRCCRGWMQQPDEEG | |
| NOV37n | VQALSHTVPVWKAGCGWQAWCVGHERRTVYYMGYRQVYTTEARTVLRCCRGWMQQPDEEG |
| NOV37o | VQALSHTVPVWKAGCGWQAWCVGHERRTVYYMGYRQVYTTEARTVLRCCRGWMQQPDEEG |
| NOV37a | ------------------------------------------------------------ |
| NOV37b | CLS--AECSASLCFHGGRCVPGS-AQPCHCPP---GFQGP-RCQYDVDECRTHNGGCQHR |
| NOV37c | ------------------------------------------------------------ |
| NOV37d | CLS--AECSAGLCFHGGRCVPGS-AQPCHCPPG---FQGP-RCQYDVDECRTHNGGCQHR |
| NOV37e | CLSDVGECANANGGCAGRCRDTVGGFYCRWPPPSHQLQGDGETCQDVDECRTHNGGCQHR |
| NOV37f | CLSDVGECANANGGCAGRCRDTVGGFYCRWPPPSHQLQGDGETCQDVDECRTHNGGCQHR |
| NOV37g | CLSDVGECANANGGCAGRCRDTVGGFYCRWPPPSHQLQGDGETCQDVDECRTHNGGCQHR |
| NOV37h | CLS--AECSASLCFHGGRCVPGS-AQPCHCPP-G--FQGP-RCQYDVDECRTHNGGCQHR |
| NOV37i | CLS--AECSASLCFHGGRCVPGS-AQPCHCPPG---FQGP-RCQYDVDECRTHNGGCQHR |
| NOV37j | ------------------------------------------------------------ |
| NOV37k | CLSDVGECANANGGCAGRCRDTVGGFYCRWPPPSHQLQGDGETCQDVDECRTHNGGCQHR |
| NOV37l | CLS--AECSASLCFHGGRCVPGS-AQPCHCPP-G--FQGP-RCQYDVDECRTHNGGCQHR |
| NOV37m | CLSDVGECANANGGCAGRCRDTVGGFYCRWPPPSHQLQGDGETCQDVDECRTHNGGCQHR |
| NOV37n | CLSDVGECANANGGCAGRCRDTVGGFYCRWPPPSHQLQGDGETCQDVDECRTHNGGCQHR |
| NOV37o | CLSDVGECANANGGCAGRCRDTVGGFYCRWPPPSHQLQGDGETCQDVDECRTHNGGCQHR |
| NOV37a | ------------------------------------------------------------ |
| NOV37b | CVNTPGSYLCECKPGFRLHTDSRTCLAINSCALGNGGCQHHCVQLTITRHRCQCRPGFQL |
| NOV37c | ------------------------------------------------------------ |
| NOV37d | CVNTPGSYLCECKPGFRLHTDSRTCLAINSCALGNGGCQHHCVQLTITRHRCQCRPGFQL |
| NOV37e | CVNTPGSYLCECKPGFRLHTDSRTC-AINSCALGNGGCQHHCVQLTITRHRCQCRPGFQL |
| NOV37f | CVNTPGSYLCECKPGFRLHTDSRTC-AINSCALGNGGCQHHCVQLTITRHRCQCRPGFQL |
| NOV37g | CVNTPGSYLCECKPGFRLHTDSRTC-ATNSCALGNGGCQHHCVQLTITRHRCQCRPGFQL |
| NOV37h | CVNTPGSYLCECKPGFRLHTDSRTCLAINSCALGNGGCQHHCVQLTITRHRCQCRPGFQL |
| NOV37i | CVNTPGSYLCECKPGFRLHTDSRTCLAINSCALGNGGCQHHCVQLTITRHRCQCRPGFQL |
| NOV37j | ------------------------------------------------------------ |
| NOV37k | CVNTPGSYLCECKPGFRLHTDSRTC-AINSCALGNGGCQHHCVQLTITRHRCQCRPGFQL |
| NOV37l | CVNTPGSYLCECKPGFRLHTDSRTCLAINSCALGNGGCQHHCVQLTITRHRCQCRPGFQL |
| NOV37m | CVNTPGSYLCECKPGFRLHTDSRTC-AINSCALGNGGCQHHCVQLTITRHRCQCRPGFQL |
| NOV37n | CVNTPGSYLCECKPGFRLHTDSRTC-AINSCALGNGGCQHHCVQLTITRHRCQCRPGFQL |
| NOV37o | CVNTPGSYLCECKPGFRLHTDSRTC-AINSCALGNGGCQHHCVQLTITRHRCQCRPGFQL |
| NOV37a | ------------------------------------------------------------ |
| NOV37b | QEDGRHCVRRSPCANRNGSCMHRCQVVRGLARCECHVGYQLAADGKACEDVDECAAGLAQ |
| NOV37c | ------------------------------------------------------------ |
| NOV37d | QEDGRHCVRRSPCANRNGSCMHRCQVVRGLARCECHVGYQLAADGKACEDVDECAAGLAQ |
| NOV37e | QEDGRHCVRRSPCANRNGSCMHRCQVVRGLARCECHVGYQLAADGKACEDVDECAAGLAQ |
| NOV37f | QEDGRHCVRRSPCANRNGSCMHRCQVVRGLARCECHVGYQLAADGKACEDVDECAAGLAQ |
| NOV37g | QEDGRHCVRRSPCANRNGSCMHRCQVVRGLARCECHVGYQLAADGKACEDVDECAAGIAQ |
| NOV37h | QEDGRHCVRRSPCANRNGSCMHRCQVVRGLARCECHVGYQLAADGKACEDVDECAAGLAQ |
| NOV37i | QEDGRHCVRRSPCANRNGSCMHRCQVVRGLARCECHVGYQLAADGKACEDVDECAAGLAQ |
| NOV37j | ------------------------------------------------------------ |
| NOV37k | QEDGRHCVRRSPCANRNGSCMHRCQVVRGLARCECHVGYQLAADGKACEDVDECAAGLAQ |
| NOV37l | QEDGRHCVRRSPCANRNGSCMHRCQVVRGLARCECHVGYQLAADGKACEDVDECAAGLAQ |
| NOV37m | QEDGRHCVRRSPCANRNGSCMHRCQVVRGLARCECHVGYQLAADGKACEDVDECAAGLAQ |
| NOV37n | QEDGRHCVRRSPCANRNGSCMHRCQVVRGLARCECHVGYQLAADGKACEDVDECAAGLAQ |
| NOV37o | QEDGRHCVRRSPCANRNGSCMHRCQVVRGLARCECHVGYQLAADGKACEDVDECAAGLAQ |
| NOV37a | ------------------------------------------------------------ |
| NOV37b | CAHGCLNTQGSFKCVCHAGYELGADGRQCYRIEMEIVNSCEANNGGCSHGCSHTSAGPLC |
| NOV37c | ------------------------------------------------------------ |
| NOV37d | CAHGCLNTQGSFKCVCHAGYELGADGRQCYRIEMEIVNSCEANNGGCSHGCSHTSAGPLC |
| NOV37e | CAHGCLNTQGSFKCVCHAGYELGADGRQCYRIEMEIVNSCEANNGGCSHGCSHTSAGPLC |
| NOV37i | CAHGCLNTQGSFKCVCHAGYELGADGRQCYRIEMEIVNSCEANNGGCSHGCSHTSAGPLC |
| NOV37g | CAHGCLNTQGSFKCVCHAGYELGADGRQCYRIEMEIVNSCEANNGGCSHGCSHTSAGPLC |
| NOV37h | CAHGCLNTQGSFKCVCHAGYELGADGRQCYRIEMEIVNSCEANNGGCSHGCSHTSAGPLC |
| NOV37i | CAHGCLNTQGSFKCVCHAGYELGADGRQCYRIEMEIVNSCEANNGGCSHGCSHTSAGPLC |
| NOV37j | ------------------------------------------------------------ |
| NOV37k | CAHGCLNTQGSFKCVCHAGYELGADGRQCYRIEMEIVNSCEANNGGCSHGCSHTSAGPLC |
| NOV37l | CAHGCLNTQGSFKCVCHAGYELGADGRQCYRIEMEIVNSCEANNGGCSHGCSHTSAGPLC |
| NOV37m | CAHGCLNTQGSFKCVCHAGYELGADGRQCYRIEMEIVNSCEANNGGCSHGCSHTSAGPLC |
| NOV37n | CAHGCLNTQGSFKCVCHAGYELGADGRQCYRIEMEIVNSCEANNGGCSHGCSHTSAGPLC |
| NOV37o | CAHGCLNTQGSFKCVCHAGYELGADGRQCYRIEMEIVNSCEANNGGCSHGCSHTSAGPLC |
| NOV37a | ------------------------------------------------------------ |
| NOV37b | TCPRGYELDTDQRTCIRCPRLCRQPVLQQVCTNNPGGYECGCYAGYRLSADGCGCEDVDE |
| NOV37c | ------------------------------------------------------------ |
| NOV37d | TCPRGYELDTDQRTCIDVGDCADSPCCQQVCTNNPGGYECGCYAGYRLSADGCGCEDVDE |
| NOV37e | TCPRGYELDTDQRTCIRCRRLCRQPVLQQVCTNNPGGYECGCYAGYRLSADGCGCEDVDE |
| NOV37f | TCPRGYELDTDQRTCIRCRRLCRQPVLQQVCTNNPGGYECGCYAGYRLSADGCGCEDVDE |
| NOV37g | TCPRGYELDTDQRTCIRCRRLCRQPVLQQVCTNNPGGYECGCYAGYRLSADGCGCEDVDE |
| NOV37h | TCPRGYELDTDQRTCIRCRRLCRQPVLQQVCTNNPGGYECGCYAGYRLSADGCGCEDVDE |
| NOV37i | TCPRGYELDTDQRTCTRCRRLCRQPVLQQVCTNNPGGYECGCYAGYRLSADGCGCEDVDE |
| NOV37j | ------------------------------------------------------------ |
| NOV37k | TCPRGYELDTDQRTCIRCRRLCRQPVLQQVCTNNPGGYECGCYAGYRLSADGCGCEDVDE |
| NOV371 | TCPRGYELDTDQRTCIRCRRLCRQPVLQQVCTNNPGGYECGCYAGYRLSADGCGCEDVDE |
| NOV37m | TCPRGYELDTDQRTCIRCRRLCRQPVLQQVCTNNPGGYECGCYAGYRLSADGCGCEDVDE |
| NOV37n | TCPRGYELDTDQRTCIRCRRLCRQPVLQQVCTNNPGGYECGCYAGYRLSADGCGCEDVDE |
| NOV37o | TCPRGYELDTDQRTCIRCRRLCRQPVLQQVCTNNPGGYECGCYAGYRLSADGCGCEDVDE |
| NOV37a | ------------------------------------------------------------ |
| NOV37b | CASSRGGCEHHCTNLAGSFQCSCEAGYRLHEDRRGCSALEEPMVDLDGELPFVRPLPHIA |
| NOV37c | ------------------------------------------------------------ |
| NOV37d | CASSRGGCEHHCTNLAGSFQCSCEAGYRLHEDRRGCSPLEEPMVDLDGELPFVRPLPHIA |
| NOV37e | CASSRGGCEHHCTNLAGSFQCSCEAGYRLHEDRRGCSALEEPMVDLDGELPFVRPLPHIA |
| NOV37f | CASSRGGCEHHCTNLAGSFQCSCEAGYRLHEDRRGCSALEEPMVDLDGELPFVRPLPHIA |
| NOV37g | CASSRGGCEHHCTNLAGSFQCSCEAGYRLHEDRRGCSALEEPMVDLDGELPFVRPLPHIA |
| NOV37h | CASSRGGCEHHCTNLAGSFQCSCEAGYRLHEDRRGCSALEEPMVDLDGELPFVRPLPHIA |
| NOV37i | CASSRGGCEHHCTNLAGSFQCSCEAGYRLHEDRRGCSALEEPMVDLDGELPFVRPLPHIA |
| NOV37j | ------------------------------------------------------------ |
| NOV37k | CASSRGGCEHHCTNLAGSFQCSCEAGYRLHEDRRGCSALEEPMVDLDGELPFVRPLPHIA |
| NOV37l | CASSRGGCEHHCTNLAGSFQCSCEAGYRLHEDRRGCSALEEPMVDLDGELPFVRPLPHIA |
| NOV37m | CASSRGGCEHHCTNLAGSFQCSCEAGYRIHEDRRGCSALEEPMVDLDGELPFVRPLPHIA |
| NOV37n | CASSRGGCEHHCTNLAGSFQCSCEAGYRLHEDRRGCSALEEPMVDLDGELPFVRPLPHIA |
| NOV37o | CASSRGGCEHHCTNLAGSFQCSCEAGYRIHEDRRGCSALEEPMVDLDGELPFVRPLPHIA |
| NOV37a | ------------------------------------------------------------ |
| NOV37b | VLQDELPQLFQDDDVGADEEEAELRGEHTLTEKFVCLDDSFGHDCSLTCDDCRNGGTCLL |
| NOV37c | ------------------------------------------------------------ |
| NOV37d | VLQDELPQLFQDDDvGADEEEAELRGEHTLTEKFVCLDDSFGHDCSLTCDDCRNGGTCLL |
| NOV37e | VLQDELPQLFQDDDVGADEEEAELRGEHTLTEKFVCLDDSFGHDCSLTCDDCRNGGTCLL |
| NOV37f | VLQDELPQLFQDDDVGADEEEAELRGEHTLTEKFVCLDDSFGHDCSLTCDDCRNGGTCLL |
| NOV37g | VLQDELPQLFQDDDVGADEEEAELRGEHTLTEKFVCLDDSFGHDCSLTCDDCRNGGTCLL |
| NOV37h | VLQDELPQLFQDDDVGADEEEAELRGEHTLTEKFVCLDDSFGHDCSLTCDDCRNGGTCLL |
| NOV37i | VLQDELPQLFQDDDVGADEEEAELRGEHTLTEKFVCLDDSFGHDCSLTCDDCRNGGTCLL |
| NOV37j | ------------------------------------------------------------ |
| NOV37k | VLQDELPQLFQDDDVGADEEEAELRGEHTLTEKFVCLDDSFGHDCSLTCDDCRNGGTCLL |
| NOV37l | VLQDELPQLFQDDDVGADEEEAELRGEHTLTEKFVCLDDSFGHDCSLTCDDCRNGGTCLL |
| NOV37m | VLQDELPQLFQDDDVGADEEEAELRGEHTLTEKFVCLDDSFGHDCSLTCDDCRNGGTCLL |
| NOV37n | VLQDELPQLFQDDDVGADEEEAELRGEHTLTEKFVCLDDSFGHDCSLTCDDCRNGGTCLL |
| NOV37o | VLQDELPQLFQDDDVGADEEEAELRGEHTLTEKFVCLDDSFGHDCSLTCDDCRNGGTCLL |
| NOV37a | ------------------------------------------------------------ |
| NOV37b | GLDGCDCPEGWTGLICNESCPPDTFGKNCSFSCSCQNGGTCDSVTGACRCPPGVSGTNCE |
| NOV37c | ------------------------------------------------------------ |
| NOV37d | GLDGCDCPEGWTGLICNETCPPDTFGKNCSFSCSCQNGGTCDSVTGACRCPPGVSGTNCE |
| NOV37e | GLDGCDCPEGWTGLICNESCPPDTFGKNCSFSCSCQNGGTCDSVTGACRCPPGVSGTNCE |
| NOV37f | GLDGCDCPEGWTGLICNESCPPDTFGKNCSFSCSCQNGGTCDSVTGACRCPPGVSGTNCE |
| NOV37g | GLDGCDCPEGWTGLICNESCPPDTFGKNCSFSCSCQNGGTCDSVTGACRCPPGVSGTNCE |
| NOV37h | GLDGCDCPEGWTGLICNESCPPDTFGKNCSFSCSCQNGGTCDSVTGACRCPPGVSGTNCE |
| NOV37i | GLDGCDCPEGWTGLICNESCPPDTFGKNCSFSCSCQNGGTCDSVTGACRCPPGVSGTNCE |
| NOV37j | ------------------------------------------------------------ |
| NOV37k | GLDGCDCPEGWTGLICNESCPPDTFGKNCSFSCSCQNGGTCDSVTGACRCPPGVSGTNCE |
| NOV371 | GLDGCDCPEGWTGLICNESCPPDTFGKNCSFSCSCQNGGTCDSVTGACRCPPGVSGTNCE |
| NOV37m | GLDGCDCPEGWTGLICNESCPPDTFGKNCSFSCSCQNGGTCDSVTGACRCPPGVSGTNCE |
| NOV37n | GLDGCDCPEGWTGLICNESCPPDTFGKNCSFSCSCQNGGTCDSVTGACRCPPGVSGTNCE |
| NOV37o | GLDGCDCPEGWTGLICNESCPPDTFGKNCSFSCSCQNGGTCDSVTGACRCPPGVSGTNCE |
| NOV37a | ------------------------------------------------------------ |
| NOV37b | DGCPKGYYGKHCRKKCNCANRGRCHRLYGACLCDPGLYGRFCHLACPPWAFGPGCSEECQ |
| NOV37c | ------------------------------------------------------------ |
| NOV37d | DGCPKGYYGKHCRKKCNCANRGRCHRLYGACLCDPGLYGRFCHLTCPPWAFGPGCSEECQ |
| NOV37e | DGCPKGYYGKHCRKKCNCANRGRCHRLYGACLCDPGLYGRFCHLACPPWAFGPGCSEECQ |
| NOV37f | DGCPKGYYGKHCRKKCNCANRGRCHRLYGACLCDPGLYGRFCHLACPPWAFGPGCSEECQ |
| NOV37g | DGCPKGYYGKHCRKKCNCANRGRCHRLYGACLCDPGLYGRFCHLACPPWAFGPGCSEECQ |
| NOV37h | DGCPKGYYGKHCRKKCNCANRGRCHRLYGACLCDPGLYGRFCHLACPPWAFGPGCSEECQ |
| NOV37i | DGCPKGYYGKHCRKKCNCANRGRCHRLYGACLCDPGLYGRFCHLACPPWAFGPGCSEECQ |
| NOV37j | ------------------------------------------------------------ |
| NOV37k | DGCPKGYYGKHCRKKCNCANRGRCHRLYGACLCDPGLYGRFCHLACPPWAFGPGCSEECQ |
| NOV37l | DGCPKGYYGKHCRKKCNCANRGRCHRLYGACLCDPGLYGRFCHLACPPWAFGPGCSEECQ |
| NOV37m | DGCPKGYYGKHCRKKCNCANRGRCHRLYGACLCDPGLYGRFCHLACPPWAFGPGCSEECQ |
| NOV37n | DGCPKGYYGKHCRKKCNCANRGRCHRLYGACLCDPGLYGRFCHLACPPWAFGPGCSEECQ |
| NOV37o | DGCPKGYYGKHCRKKCNCANRGRCHRLYGACLCDPGLYGRFCHLACPPWAFGPGCSEECQ |
| NOV37a | ------------------------------------------------------------ |
| NOV37b | CVQPHTQSCDKRDGSCSCKAGFRGERCQAECEPGYFGPGCWQACTCPVGVACDSVSGECG |
| NOV37c | ------------------------------------------------------------ |
| NOV37d | CVQPHTQSCDKRDGSCSCKAGFRGERCQAECEPGYFGPGCWQACTCPVGVACDSVSGECG |
| NOV37e | CVQPHTQSCDKRDGSCSCKAGFRGERCQAECEPGYFGPGCWQACTCPVGVACDSVSGECG |
| NOV37f | CVQPHTQSCDKRDGSCSCKAGFRGERCQAECEPGYFGPGCWQACTCPVGVACDSVSGECG |
| NOV37g | CVQPHTQSCDKRDGSCSCKAGFRGERCQAECEPGYFGPGCWQACTCPVGVACDSVSGECG |
| NOV37h | CVQPHTQSCDKRDGSCSCKAGFRGERCQAECEPGYFGPGCWQACTCPVGVACDSVSGECG |
| NOV37i | CVQPHTQSCDKRDGSCSCKAGFRGERCQAECELGYFGPGCWQACTCPVGVACDSVSGECG |
| NOV371 | ------------------------------------------------------------ |
| NOV37k | CVQPHTQSCDKRDGSCSCKAGFRGERCQAECEPGYFGPGCWQACTCPVGVACDSVSGECG |
| NOV37l | CVQPHTQSCDKRDGSCSCKAGFRGERCQAECELGYFGPGCWQACTCPVGVACDSVSGECG |
| NOV37m | CVQPHTQSCDKRDGSCSCKAGFRGERCQAECEPGYFGPGCWQACTCPVGVACDSVSGECG |
| NOV37n | CVQPHTQSCDKRDGSCSCKAGFRGERCQAECEPGYFGPGCWQACTCPVGVACDSVSGECG |
| NOV37o | CVQPHTQSCDKRDGSCSCKAGFRGERCQAECEPGYFGPGCWQACTCPVGVACDSVSGECG |
| NOV37a | ------------------------------------------------------------ |
| NOV37b | KRCPAGFQGEDCGQECPVGTFGVNCSSSCSCGGAPCHGVTGQCRCPPGRTGEDCEAGECE |
| NOV37c | ------------------------------------------------------------ |
| NOV37d | KRCPAGFQGEDCGQECPVGTFGVNCSSSCSCGGAPCHGVTGQCRCPPGRTGEDCEADCPE |
| NOV37e | KRCPAGFQGEDCGQECPVGTFGVNCSSSCSCGGAPCHGVTGQCRCPPGRTGEDCEAGECE |
| NOV37f | KRCPAGFQGEDCGQECPVGTFGVNCSSSCSCGGAPCHGVTGQCRCPPGRTGEDCEAGECE |
| NOV37g | KRCPAGFQGEDCGQECPVGTFGVNCSSSCSCGGAPCHGVTGQCRCPPGRTGEDCEAGECE |
| NOV37h | KRCPAGFQGEDCGQECPVGTFGVNCSSSCSCGGAPCHGVTGQCRCPPGRTGEDCEAGECE |
| NOV37i | KRCPAGFQGEDCGQECPVGTFGVNCSSSCSCGGAPCHGVTGQCRCPPGRTGEDCEADCPE |
| NOV37j | ------------------------------------------------------------ |
| NOV37k | KRCPAGFQGEDCGQECPVGTFGVNCSSSCSCGGAPCHGVTGQCRCPPGRTGEDCEAGECE |
| NOV37l | KRCPAGFQGEDCGQECPVGTFGVNCSSSCSCGGAPCHGVTGQCRCPPGRTGEDCEADCPE |
| NOV37m | KRCPAGFQGEDCGQECPVGTFGVNCSSSCSCGGAPCHGVTGQCRCPPGRTGEDCEAGECE |
| NOV37n | KRCPAGFQGEDCGQECPVGTFGVNCSSSCSCGGAPCHGVTGQCRCPPGRTGEDCEAGECE |
| NOV37o | KRCPAGFQGEDCGQECPVGTFGVNCSSSCSCGGAPCHGVTGQCRCPPGRTGEDCEAGECE |
| NOV37a | ------------------------------------------------------------ |
| NOV37b | GLWGLGCQEICPACHNAARCDPETGACLCLPGFVGSRCQD-CEAGWYGPSCQTMCSCAND |
| NOV37c | ------------------------------------------------------------ |
| NOV37d | GRWGLGCQEICPACQHAARCDPETGACLCLPDFVGSRCQDVCPAGWYGPSCQTRCSCAND |
| NOV37e | GLWGLGCQEICPACHNAARCDPETGACLCLPGFVGSRCQD-CEAGWYGPSCQTMCSCAND |
| NOV37f | GLWGLGCQEICPACHNAARCDPETGACLCLPGFVGSRCQD-CEAGWYGPSCQTMCSCAND |
| NOV37g | GLWGLGCQEICPACHNAARCDPETGACLCLPGFVGSRCQD-CEAGWYGPSCQTMCSCAND |
| NOV37h | GLWGLGCQEICPACHNAARCDPETGACLCLPGFVGSRCQD-CEAGWYGPSCQTMCSCAND |
| NOV37i | GRWGLGCQEICPACQHAARCDPETGACLCLPGFVGSRCQDVCPAGWYGPSCQTRCSCAND |
| NOV37j | ------------------------------------------------------------ |
| NOV37k | GLWGLGCQEICPACHNAARCDPETGACLCLPGFVGSRCQD-CEAGWYGPSCQTMCSCAND |
| NOV37l | GRWGLGCQEICPACQHAARCDPETGACLCLPGFVGSRCQDVCPAGWYGPSCQTRCSCAND |
| NOV37m | GLWGLGCQEICPACHNAARCDPETGACLCLPGFVGSRCQD-CEAGWYGPSCQTMCSCAND |
| NOV37n | GLWGLGCQEICPACHNAARCDPETGACLCLPGFVGSRCQD-CEAGWYGPSCQTMCSCAND |
| NOV37o | GLWGLGCQEICPACHNAARCDPETGACLCLPGFVGSRCQD-CEAGWYGPSCQTMCSCAND |
| NOV37a | -------------------MAPASAPLAAGAPAVPRPALPACTATTVGIPASARTEGPVT |
| NOV37b | GHCHQDTGHCSCAPGWTGFSCQRACDTGHWGPDCSHPCNCSAGHGSCDAISGLCLCEAGY |
| NOV37c | ----------DPCLAGPPLMAPASAPLAAGAPAVPRPALPACTATTVGIPASARTEGPVT |
| NOV37d | GHCHPATGHCSCAPGWTGFSCQRACDTGHWGPDCSHPCNCSAGHGSCDAISGLCLCEAGY |
| NOV37e | GHCHQDTGHCSCAPGWTGFSCQRACDTGHWGPDCSHPCNCSAGHGSCDAISGLCLCEAGY |
| NOV37f | GHCHQDTGHCSCAPGWTGFSCQRACDTGHWGPDCSHPCNCSAGHGSCDAISGLCLCEAGY |
| NOV37g | GHCHQDTGHCSCAPGWTGFSCQRACDTGHWGPDCSHPCNCSAGHGSCDAISGLCLCEAGY |
| NOV37h | GHCHQDTGHCSCAPGWTGFSCQRACDTGHWGPDCSHPCNCSAGHGSCDAISGLCLCEAGY |
| NOV37i | GHCHPATGHCSCAPGWTGFSCQPACDTGHWGPDCSHPCNCSAGHGSCDAISGLCLCEAGY |
| NOV37j | -------------------MAPASAPLAAGAPAVPRPALPACTATTVGIPASARTEGPVT |
| NOV37k | GHCHQDTGHCSCAPGWTGFSCQEACDTGHWGPDCSHPCNCSAGHGSCDAISGLCLCEAGY |
| NOV37l | GHCHPATGHCSCAPGWTGFSCQEACDTGHWGPDCSHPCNCSAGHGSCDAISGLCLCEAGY |
| NOV37m | GHCHQDTGHCSCAPGWTGFSCQRACDTGHWGPDCSHPCNCSAGHGSCDAISGLCLCEAGY |
| NOV37n | GHCHQDTGHCSCAPGWTGFSCQRACDTGHWGPDCSHPCNCSAGHGSCDAISGLCLCEAGY |
| NOV37o | GHCHQDTGHCSCAPGWTGFSCQRACDTGHWGPDCSHPCNCSAGHGSCDAISGLCLCEAGY |
| NOV37a | LSQACEH-PCPPGFHGAGRQGLCWCQHGAPCDPISGRCLCPAGFHGHFCERDCRRGQFGP |
| NOV37b | VGPRCEQSECPQGHFGPGCEQRCQCQHGAACDHVSGACTCPAGWRGTFCEHACPAGFFGL |
| NOV37c | LSQACEH-PCPPGFHGAGCQGLCWCQHGAPCDPISGRCLCPAGFHGHFCERDCRRGQFGP |
| NOV37d | VGPRCEQ-QCPQGHFGPGCEQLCQCQHGAACDHVSGACTCPAGWRGTFCEHACPAGFFGL |
| NOV37e | VGPRCEQSECPQGHFGPGCEQRCQCQHGAACDHVSGACTCPAGWRGTFCEHACPAGFFGL |
| NOV37f | VGPRCEQSECPQGHFGPGCEQRCQCQHGAACDHVSGACTCPAGWRGTFCEHACPAGFFGL |
| NOV37g | VGPRCEQSECPQGHFGPGCEQRCQCQHGAACDHVSGACTCPAGWRGTFCEHACPAGFFGL |
| NOV37h | VGPRCEQSECPQGHFGPGCEQRCQCQHGAACDHVSGACTCPAGWRGTFCEHACPAGFFGL |
| NOV37i | VGPRCEQ-QCpQGHFGPGCEQLCQCQHGAACDHVSGACTCPAGWRGTFCEHACPAGFFGL |
| NOV37j | LSQACEH-PCPPGFHGAGCQGLCWCQHGAPCDPISGRCLCPAGFHGHFCERDCRRGQFGP |
| NOV37k | VGPRCEQSECPQGHFGPGCEQRCQCQHGAACDHVSGACTCPAGWRGTFCEHACPAGFFGL |
| NOV37l | VGPRCEQ-QCPQGHFGPGCEQLCQCQHGAACDHVSGACTCPAGWRGTFCEHACPAGFFGL |
| NOV37m | VGPRCEQSECPQGHFGPGCEQRCQCQHGAACDHVSGACTCPAGWRGTFCEHACPAGFFGL |
| NOV37n | VGPRCEQSECPQGHFGPGCEQRCQCQHGAACDHVSGACTCPAGWRGTFCEHACPAGFFGL |
| NOV37o | VGPRCEQSECPQGHFGPGCEQRCQCQHGAACDHVSGACTCPAGWRGTFCEHACPAGFFGL |
| NOV37a | SCTLHCDCGGGADCDPVSGQCHCVDGYMGPTCREG------------------------- |
| NOV37b | DCRSACNCTAGAACDAVNGSCLCPAGRRGPRCAESACPAHTYGHNCSQACACFNGASCDP |
| NOV37c | SCTLHCDCGGGADCDPVSGQCHCVDGYMGPTCREG------------------------- |
| NOV37d | DCRSACNCTAGAACDAVNGSCLCPAGRRGPRCAEK------------------------- |
| NOV37e | DCRSACNCTAGAACDAVNGSCLCPAGRRGPRCAESACPAHTYGHNCSQACACFNGASCDP |
| NOV37f | DCRSACNCTAGAACDAVNGSCLCPAGRRGPRCAESACPAHTYGHNCSQACACFNGASCDP |
| NOV37g | DCRSACNCTAGAACDAVNGSCLCPAGRRGPRCAESACPAHTYGHNCSQACACFNGASCDP |
| NOV37h | DCRSACNCTAGAACDAVNGSCLCPAGRRGPRCAESACPAHTYGHNCSQACACFNGASCDP |
| NOV37i | DCRSACNCTAGAACDAVNGSCLCPAGRRGPRCAET------------------------- |
| NOV37j | SCTLHCDCGGGADCDPVSGQCHCVDGYMGPTCREG------------------------- |
| NOV37k | DCRSACNCTAGAACDAVNGSCLCPAGRRGPRCAET-CPAHTYGHNCSQACACFNGASCDP |
| NOV37l | DCRSACNCTAGAACDAVNGSCLCPAGRRGPRCAE------T------------------- |
| NOV37m | DCRSACNCTAGAACDAVNGSCLCPAGRRGPRCAESACPAHTYGHNCSQACACFNGASCDP |
| NOV37n | DCRSACNCTAGAACDAVNGSCLCPAGRRGPRCAESACPAHTYGHNCSQACACFNGASCDP |
| NOV37o | DCRSACNCTAGAACDAVNGSCLCPAGRRGPRCAESACPAHTYGHNCSQACACFNGASCDP |
| NOV37a | ---------------------------------------------GPLRIPENPSLAQGS |
| NOV37b | VHGQCHCAPGWMGPSCLQACPAGLYGDNCRHSCLCQNGGTCDPVSGHCACPEGWAGLACE |
| NOV37c | ---------------------------------------------GPLRLPENPSLAQGS |
| NOV37d | ------------------------------------------------------------ |
| NOV37e | VHGQCHCAPGWMGPSCLQACPAGLYGDNCRHSCLCQNGGTCDPVSGHCACPEGWAGLACE |
| NOV37f | VHGQCHCAPGWMGPSCLQACPAGLYGDNCRHSCLCQNGGTCDPVSGHCACPEGWAGLACE |
| NOV37g | VHGQCHCAPGWMGPSCLQACPAGLYGDNCRHSCLCQNGGTCDPVSGHCACPEGWAGLACE |
| NOV37h | VHGQCHCAPGWMGPSCLQACPAGLYGDNCRHSCLCQNGGTCDPVSGHCACPEGWAGLACE |
| NOV37i | -------------------CPAGLYGDNCRHSCLCQNGGTCDPVSGHCACPEGWAGLACE |
| NOV37j | ---------------------------------------------GPLRLPENPSLAQGS |
| NOV37k | VHGQCHCAPGWMGPSCLQACPAGLYGDNCRHSCLCQNGGTCDPVSGHCACPEGWAGLACE |
| NOV37l | -------------------CPAGLYGDNCRHSCLCQNGGTCDPVSGHCACPEGWAGLACE |
| NOV37m | VHGQCHCAPGWMGPSCLQACPAGLYGDNCRHSCLCQNGGTCDPVSGHCACPEGWAGLACE |
| NOV37n | VHGQCHCAPGWMGPSCLQACPAGLYGDNCRHSCLCQNGGTCDPVSGHCACPEGWAGLACE |
| NOV37o | VHGQCHCAPGWMGPSCLQACPAGLYGDNCRHSCLCQNGGTCDPVSGHCACPEGWAGLACE |
| NOV37a | AGTLPASSRPTSRSGGPARH---------------------------------------- |
| NOV37b | VECLPRDVRAGCRHSGGCLNGGLCDPHTGRCLCPAGWTGDKCQSPAACAKGTFGPHCEGR |
| NOV37c | AGTLPASSRPTSRS---------------------------------------------- |
| NOV37d | --CLPRDVRAGCRHSGGCLNGGLCDPHTGRCLCPAGWTGDKCQSP--------------- |
| NOV37e | VECLPRDVRAGCRHSGGCLNGGLCDPHTGRCLCPAGWTGDKCQSPAACAKGTFGPHCEGR |
| NOV37f | VECLPRDVRAGCRHSGGCLNGGLCDPHTGRCLCPAGWTGDKCQSPAACAKGTFGPHCEGR |
| NOV37g | VECLPRDVRAGCRHSGGCLNGGLCDPHTGRCLCPAGWTGDKCQSPAACAKGTFGPHCEGR |
| NOV37h | VECLPRDVRAGCRHSGGCLNGGLCDPHTGRCLCPAGWTGDKCQSPAACAKGTFGPHCEGR |
| NOV37i | KECPPRDVRAGCRHSGGCLNGGLCDPHTGRCLCPAGWAGDKCQS---------------- |
| NOV37j | AGTLPASSRPTS------------------------------------------------ |
| NOV37k | VECLPRDVRAGCRHSGGCLNGGLCDPHTGRCLCPAGWTGDKCQSPAACAKGTFGPHCEGR |
| NOV37l | KECPPRDVRAGCRHSGGCLNGGLCDPHTGRCLCPAGWTGDKCQS---------------- |
| NOV37m | VECLPRDVRAGCRHSGGCLNGGLCDPHTGRCLCPAGWTGDKCQSPAACAKGTFGPHCEGR |
| NOV37n | VECLPRDVRAGCRHSGGCLNGGLCDPHTGRCLCPAGWTGDKCQSPAACAKGTFGPHCEGR |
| NOV37o | VECLPRDVRAGCRHSGGCLNGGLCDPHTGRCLCPAGWTGDKCQSPAACAKGTFGPHCEGR |
| NOV37a | ------------------------------------------------------------ |
| NOV37b | CACRWGGPCHLATGACLCPPGWRGPHLSAACLRGWFGEACAQRCSCPPGAACHHVTGACR |
| NOV37c | ------------------------------------------------------------ |
| NOV37d | ----------------------------CLRG--WFGEACAQRCSCPPGAACHHVTGACR |
| NOV37e | CACRWGGPCHLATGACLCPPGWRGPHLSAACLRGWFGEACAQRCSCPPGAACHHVTGACR |
| NOV37f | CACRWGGPCHLATGACLCPPGWRGPHLSAACLRGWFGEACAQRCSCPPGAACHHVTGACR |
| NOV37g | CACRWGGPCHLATGACLCPPGWRGPHLSAACLRGWFGEACAQRCSCPPGAACHHVTGACR |
| NOV37h | CACRWGGPCHLATGACLCPPGWRGPHLSAACLRGWFGEACAQRCSCPPGAACHHVTGACR |
| NOV37i | -----------P----------------CLRG--WFGEACAQHCSCPPGAACHHVTGACR |
| NOV37j | ------------------------------------------------------------ |
| NOV37k | CACRWGGPCHLATGACLCPPGWRGPHLSAACLRGWFGEACAQRCSCPPGAACHHVTGACR |
| NOV37l | --HP------------------HGPLLEASAALIFLQPACGAGLERPVPSAA-----AAR |
| NOV37m | CACRWGGPCHLATGACLCPPGWRGPHLSAACLRGWFGEACAQRCSCPPGAACHHVTGACR |
| NOV37n | CACRWGGPCHLATGACLCPPGWRGPHLSAACLRGWFGEACAQRCSCPPGAACHHVTGACR |
| NOV37o | CACRWGGPCHLATGACLCPPGWRGPHLSAACLRGWFGEACAQRCSCPPGAACHHVTGACR |
| NOV37a | ------------------------------------------------------------ |
| NOV37b | CPPGFTGSGCEQACPPGSFGEDCAQMCQCPGENPACHPATGTCSCAAGYHGPSCQQRCPP |
| NOV37c | ------------------------------------------------------------ |
| NOV37d | CPPGFTGSGCEQGCP--------------------------------------------P |
| NOV37e | CPPGFTGSGCEQACPPGSFGEDCAQMCQCPGENPACHPATGTCSCAAGYHGPSCQQRCPP |
| NOV37f | CPPGFTGSGCEQACPPGSFGEDCAQMCQCPGENPACHPATGTCSCAAGYHGPSCQQRCPP |
| NOV37g | CPPGFTGSGCEQACPPGSFGEDCAQMCQCPGENPACHPATGTCSCAAGYHGPSCQQRCPP |
| NOV37h | CPPGFTGSGCEQACPPGSFGEDCAQMCQCPGENPACHPATGTCSCAAGYHGPSCQQRCPP |
| NOV37i | CPPGFTGSGCEQGCP--------------------------------------------P |
| NOV37j | ------------------------------------------------------------ |
| NOV37k | CPPGFTGSGCEQACPPGSFGEDCAQMCQCPGENPACHPATGTCSCAAGYHGPSCQQRCPP |
| NOV37l | LPLPATTSLGPAAVPLASL---------------A----------------PAASRDVRP |
| NOV37m | CPPGFTGSGCEQACPPGSFGEDCAQMCQCPGENPACHPATGTCSCAAGYHGPSCQQRCPP |
| NOV37n | CPPGFTGSGCEQACPPGSFGEDCAQMCQCPGENPACHPATGTCSCAAGYHGPSCQQRCPP |
| NOV37o | CPPGFTGSGCEQACPPGSFGEDCAQMCQCPGENPACHPATGTCSCAAGYHGPSCQQRCPP |
| NOV37a | ------------------------------------------------------------ |
| NOV37b | GRYGPGCEQLCGCLNGGSCDAATGACRCPTGFLGTDCNLTCPQGRFGPNCTHVCGCGQGA |
| NOV37c | ------------------------------------------------------------ |
| NOV37d | GRYGPGCEQLCGCLNGGSCDAATGACRCPTGFLGTDCNLTCPQGRFGPNCTHVCGCGQGA |
| NOV37e | GRYGPGCEQLCGCLNGGSCDAATGACRCPTGFLGTDCNLTCPQGRFGPNCTHVCGCGQGA |
| NOV37f | GRYGPGCEQLCGCLNGGSCDAATGACRCPTGFLGTDCNLTCPQGRFGPNCTHVCGCGQGA |
| NOV37g | GRYGPGCEQLCGCLNGGSCDAATGACRCPTGFLGTDCNLTCPQGRFGPNCTHVCGCGQGA |
| NOV37h | GRYGPGCEQLCGCLNGGSCDAATGACRCPTGFLGTDCNLTCPQGRFGPNCTHVCGCGQGA |
| NOV37i | GRYGPGCEQLCGCLNGGSCDAATGACRCPTGFLGTDCNLTCPQGRFGPNCTHVCGCGQGA |
| NOV37j | ------------------------------------------------------------ |
| NOV37k | GRYGPGCEQLCGCLNGGSCDAATGACRCPTGFLGTDCNLTCPQGRFGPNCTHVCGCGQGA |
| NOV37l | GGMGQAVNSCVGVSTGAPVMRPRGPAAAPLGSSGR--TATSP--------------VRPA |
| NOV37m | GRYGPGCEQLCGCLNGGSCDAATGACRCPTGFLGTDCNLTCPQGRFGPNCTHVCGCGQGA |
| NOV37n | GRYGPGCEQLCGCLNGGSCDAATGACRCPTGFLGTDCNLTCPQGRFGPNCTHVCGCGQGA |
| NOV37o | GRYGPGCEQLCGCLNGGSCDAATGACRCPTGFLGTDCNLTCPQGRFGPNCTHVCGCGQGA |
| NOV37a | ------------------------------------------------------------ |
| NOV37b | ACDPVTGTCLCPPGRAGVRCERGCPQNRFGVGCEHTCSCRNGGLCHASGACATPASGSCS |
| NOV37c | ------------------------------------------------------------ |
| NOV37d | ACDPVTGTCLCPPGRAGVRCERGCPQNRFGVGCEHTCSCRNGGLCHAS-------NGSCS |
| NOV37e | ACDPVTGTCLCPPGRAGVRCERGCPQNRFGVGCEHTCSCRNGGLCHAS-------NGSCS |
| NOV37f | ACDPVTGTCLCPPGRAGVRCERGCPQNRFGVGCEHTCSCRNGGLCHAS-------NGSCS |
| NOV37g | ACDPVTGTCLCPPGRAGVRCERGCPQNRFGVGCEHTCSCRNGGLCHAS-------KRQLL |
| NOV37h | ACDPVTGTCLCPPGRAGVRCERGCPQNRFGVGCEHTCSCRNGGLCHAS-------KRQLL |
| NOV37i | ACDPVTGTCLCPPGRAGVRCERGCPQNRFGVGCEHTCSCRNGGLCHAS-------NGSCS |
| NOV37j | ------------------------------------------------------------ |
| NOV37k | ACDPVTGTCLCPPGRAGVRCERGCPQNRPGVGCEHTCSCRNGGLCHAS-------KRQLL |
| NOV37l | ASAPTAPTCVVVG--------RGRPATL-------------------------------- |
| NOV37m | ACDPVTGTCLCPPGRAGVRCERGCPQNRFGVGCEHTCSCRNGGLCHAS-------NGSCS |
| NOV37n | ACDPVTGTCLCPPGPAGVRCERGCPQNRFGVGCEHTCSCPNGGLCHAS-------NGSCS |
| NOV37o | ACDPVTGTCLCPPGRAGVRCERGCPQNRFGVGCEHTCSCPNGGLCHAS-------NGSCS |
| NOV37a | ------------------------------------------------------------ |
| NOV37b | CGLGWTGRHCELACPPGRYGAACHLECSCHNNSTCEPATGTCRCGPGFYGQACEHPCPPG |
| NOV37c | ------------------------------------------------------------ |
| NOV37d | CGLGWTGRHCELACPPGRYGAACHLECSCHNNSTCEPATGTCRCGPGFYGQACEHPCPPG |
| NOV37e | CGLGWTGRHCELACPPGRYGAACHLECSCHNNSTCEPATGTCRCGPGFYGQACEHPCPPG |
| NOV37f | CGLGWTGRHCELACPPGRYGAACHLECSCHNNSTCEPATGTCRCGPGFYGQACEHPCPPG |
| NOV37g | LWPGLDGAALRAGLSPWALRSRLPSGVLLPQQQHV------------------------- |
| NOV37h | LWPGLDGAALRAGLSPWALRSRLPSGVLLPQQQHV------------------------- |
| NOV37i | CGLGWTGRHCELACPPGRYGAACHLECSCHNNSTGEPATGTCRCGPGFYGQACEHPCPPG |
| NOV37j | ------------------------------------------------------------ |
| NOV37k | LWPGLDGAALRAGLSPWALRSRLPSGVLLPQQQHV------------------------- |
| NOV37l | ------------------------------------------------------------ |
| NOV37m | CGLGWTGRHCELACPPGRYGAACHLECSCHNNSTCEPATGTCRCGPGFYGQACEHPCPPG |
| NOV37n | CGLGWTGRHCELACPPGRYGAACHLECSCHNNSTCEPATGTCRCGPGFYGQACEHPCPPG |
| NOV37o | CGLGWTGRHCELACPPGRYGAACHLECSCHNNSTCEPATGTCRCGPGFYGQACEHPCPPG |
| NOV37a | ------------------------------------------------------------ |
| NOV37b | FHGAGCQGLCWCQHGAPCDPISGRCLCPAGFHGHFCERGCEPGSFGEGCHQRCDCDGGAP |
| NOV37c | ------------------------------------------------------------ |
| NOV37d | FHGAGCQGLCWCQHGAPCDPISGRCLCPAGFHGHFCERGCEPGSFGEGCHQRCDCDGGAP |
| NOV37e | FHGAGCQGLCWCQHGAPCDPISGRCLCPAGFHGHFCERGCEPGSFGEGCHQRCDCDGGAP |
| NOV37f | FHGAGCQGLCWCQHGAPCDPISGRCLCPAGFHGHFCERGCEPGSFGEGCHQRCDCDGGAP |
| NOV37g | ------------------------------------------------------------ |
| NOV37h | ------------------------------------------------------------ |
| NOV37i | FHGAGCQGLCWCQHGAPCDPISGRCLCPAGFHGHFCERGCEPGSFGEGCHQRCDCDGGAP |
| NOV37j | ------------------------------------------------------------ |
| NOV37k | ------------------------------------------------------------ |
| NOV37l | ------------------------------------------------------------ |
| NOV37m | FHGAGCQGLCWCQHGAPCDPISGRCLCPAGFHGHFCERGCEPGSFGEGCHQRCDCDGGAP |
| NOV37n | FHGAGCQGLCWCQHGAPCDPISGRCLCPAGFHGHFCERGCEPGSFGEGCHQRCDCDGGAP |
| NOV37o | FHGAGCQGLCWCQHGAPCDPISGRCLCPAGFHGHFCERGCEPGSFGEGCHQRCDCDGGAP |
| NOV37a | ------------------------------------------------------------ |
| NOV37b | CDPVTGLCLCPPGRSGATCNLDCRRGQFGPSCTLHCDCGGGADCDPVSGQCHCVDGYMGP |
| NOV37c | ------------------------------------------------------------ |
| NOV37d | CDPVTGLCLCPPGRSGATCNLDCRRGQFGPSCTLHCDCGGGADCDPVSGQCHCVDGYMGP |
| NOV37e | CDPVTGLCLCPPGRSGATCNLDCRRGQFGPSCTLHCDCGGGADCDPVSGQCHCVDGYMGP |
| NOV37f | CDPVTGLCLCPPGRSGATCNLDCRRGQFGPSCTLHCDCGGGADCDPVSGQCHCVDGYMGP |
| NOV37g | ------------------------------------------------------------ |
| NOV37h | ------------------------------------------------------------ |
| NOV37i | CDPVTGLCLCPPGRSGATCNLDCRRGQFGPSCTLHCDCGGGADCDPVSGQCHCVDGYMGP |
| NOV37j | ------------------------------------------------------------ |
| NOV37k | ------------------------------------------------------------ |
| NOV37l | ------------------------------------------------------------ |
| NOV37m | CDPVTGLCLCPPGRSGATCNLDCRRGQFGPSCTLHCDCGGGADCDPVSGQCHCVDGYMGP |
| NOV37n | CDPVTGLCLCPPGRSGATCNLDCRRGQFGPSCTLHCDCGGGADCDPVSGQCHCVDGYMGP |
| NOV37o | CDPVTGLCLCPPGRSGATCNLDCRRGQFGPSCTLHCDCGGGADCDPVSGQCHCVDGYMGP |
| NOV37a | ------------------------------------------------------------ |
| NOV37b | TCREGGPLRLPENPSLAQGSAGTLPASSRPTSRSGGPARH-------------------- |
| NOV37c | ------------------------------------------------------------ |
| NOV37d | TCREGGPLRLPENPSLAQGSAGTLPASSRPTSRSGGPARHGTG----------------- |
| NOV37e | TCREAG----------------TLPASSRPTSRSGGPARHVFPGLEGKPIPNPLLGLDST |
| NOV37f | TCREAG----------------TLPASSRPTSRSGGPARHEFPGLEGKPIPNPLLGLDST |
| NOV37g | ------------------------------------------------------------ |
| NOV37h | ------------------------------------------------------------ |
| NOV37i | TCREGGPLRLPENPSLLAQGSAGTLPASSRPTSRSGGPARH------------------- |
| NOV37j | ------------------------------------------------------------ |
| NOV37k | ------------------------------------------------------------ |
| NOV37l | ------------------------------------------------------------ |
| NOV37m | TCREAG----------TLPASSRPTSRSGGPARH-------------------------- |
| NOV37n | TCREAG----------TLPASSRPTSRSGGPARH-------------------------- |
| NOV37o | TCREAG----------TLPASSRPTSRSGGPARH-------------------------- |
| NOV37a | --------- |
| NOV37b | --------- |
| NOV37c | --------- |
| NOV37e | RTGHHHHHH |
| NOV37f | RTGHHHHHH |
| NOV37g | --------- |
| NOV37h | --------- |
| NOV37i | --------- |
| NOV37j | --------- |
| NOV37k | --------- |
| NOV37l | --------- |
| NOV37m | --------- |
| NOV37n | --------- |
| NOV37o | --------- |
| NOV37a | (SEQ ID NO: 858) |
| NOV37b | (SEQ ID NO: 860) |
| NOV37c | (SEQ ID NO: 862) |
| NOV37d | (SEQ ID NO: 864) |
| NOV37e | (SEQ ID NO: 866) |
| NOV37f | (SEQ ID NO: 868) |
| NOV37g | (SEQ ID NO: 870) |
| NOV37h | (SEQ ID NO: 872) |
| NOV37i | (SEQ ID NO: 874) |
| NOV37j | (SEQ ID NO: 876) |
| NOV37k | (SEQ ID NO: 878) |
| NOV37l | (SEQ ID NO: 880) |
| NOV37m | (SEQ ID NO: 882) |
| NOV37n | (SEQ ID NO: 884) |
| NOV37o | (SEQ ID NO: 886) |

[0568] Further analysis of the NOV37a protein yielded the following properties shown in Table 37C.

TABLE 37C
Protein Sequence Properties NOV37a

| | |
|---|---|
| SignalP analysis: | No Known Signal Sequence Predicted |
| PSORT II analysis: | |

| PSG: | a new signal peptide prediction method | |
|---|---|---|
| | N-region: | length 0; pos. chg 0; neg. chg 0 |
| | H-region: | length 16; peak value 6.60 |
| | PSG score: | 2.20 |

| | |
|---|---|
| GvH: | von Heijne's method for signal seq. recognition |
| | GvH score (threshold: −2.1): −5.33 |
| | possible cleavage site: between 14 and 15 |

>>> Seems to have no N-terminal signal peptide

| ALOM: | Klein et al's method for TM region allocation | |
|---|---|---|
| | Init position for calculation: 1 | |
| | Tentative number of TMS(s) for the threshold 0.5: 0 | |
| | number of TMS(s) . . . fixed | |
| | PERIPHERAL | Likelihood = 5.83 (at 18) |

| | ALOM score: 5.83 (number of TMSs: 0) | | | |
|---|---|---|---|---|
| MTOP: | Prediction of membrane topology (Hartmann et al.) | | | |
| | Center position for calculation: 6 | | | |
| | Charge difference: 0.0 C(1.0)-N(1.0) | | | |
| | N >= C: N-terminal side will be inside | | | |
| MITDISC: | discrimination of mitochondrial targeting seq | | | |
| | R content: | 2 | Hyd Moment(75): | 1.11 |
| | Hyd Moment(95): | 2.89 | G content: | 2 |
| | D/E content: | 1 | S/T content: | 6 |

| | |
|---|---|
| | Score: −3.38 |
| Gavel: | prediction of cleavage sites for mitochondrial preseq |
| | R-2 motif at 45 ART\|EG |

NUCDISC: discrimination of nuclear localization signals

| | |
|---|---|
| | pat4: none |
| | pat7: none |
| | bipartite: none |
| | content of basic residues: 7.1% |
| | NLS Score: −0.47 |
| KDEL: | ER retention motif in the C-terminus: none |

ER Membrane Retention Signals: none
SKL: peroxisomal targeting signal in the C-terminus: none
PTS2: 2nd peroxisomal targeting signal: none
VAC: possible vacuolar targeting motif: none
RNA-binding motif: none
Actinin-type actin-binding motif:

type 1: none
type 2: none

NMYR: N-myristoylation pattern: none
Prenylation motif: none
memYQRL: transport motif from cell surface to Golgi: none
Tyrosines in the tail: none
Dileucine motif in the tail: none
checking 63 PROSITE DNA binding motifs: none
checking 71 PROSITE ribosomal protein motifs: none
checking 33 PROSITE prokaryotic DNA binding motifs: none

| | |
|---|---|
| NNCN: | Reinhardt's method for Cytoplasmic/Nuclear discrimination |
| | Prediction: nuclear |
| | Reliability: 94.1 |
| COIL: | Lupas's algorithm to detect coiled-coil regions |
| | total: 0 residues |

Final Results (k = 9/23):

```
65.2%: nuclear
21.7%: mitochondrial
  8.7%: cytoplasmic
  4.3%: extracellular, including cell wall
```

>> prediction for CG56449-04 is nuc (k = 23)

[0569] A search of the NOV37a protein against the Geneseq database, a proprietary database that contains sequences published in patents and patent publication, yielded several homologous proteins shown in Table 37D.

TABLE 37D
Geneseq Results for NOV37a

| | | NOV37a | Identities/ | | |
|---|---|---|---|---|---|
| | | Residues/ | Similarities for | | |
| Geneseq | Protein/Organism/Length | Match | the Matched | | Expect |
| Identifier | [Patent #, Date] | Residues | Region | | Value |
| AAY72716 | HMEIR04 clone human attractin-like | 38 . . . 170 | 126/176 | (71%) | 6e−73 |
| | protein - Homo sapiens, 310 aa. | 135 . . . 310 | 126/176 | (71%) | |
| | [WO200116156-A1, 08-MAR-2001] | | | | |
| AAY72715 | HFICU08 clone human attractin-like | 38 . . . 170 | 107/133 | (80%) | 4e−65 |
| | protein - Homo sapiens, 474 aa. | 342 . . . 474 | 108/133 | (80%) | |
| | [WO200116156-A1, 08-MAR-2001] | | | | |
| AAY72740 | HMEIR04 clone human attractin-like | 55 . . . 170 | 113/159 | (71%) | 1e−63 |
| | partial protein - Homo sapiens, 159 aa. | 1 . . . 159 | 113/159 | (71%) | |
| | [WO200116156-A1, 08-MAR-2001 ] | | | | |
| ABB72269 | Murine protein isolated from skin cells | 38 . . . 134 | 74/140 | (52%) | 4e−40 |
| | SEQ ID NO: 458 - Mus sp, 296 aa. | 135 . . . 274 | 79/140 | (55%) | |
| | [WO200190357-A1, 29-NOV-2001] | | | | |
| ABB72216 | Murine protein isolated from skin cells | 38 . . . 134 | 74/140 | (52%) | 4e−40 |
| | SEQ ID NO: 332 - Mus sp, 299 aa. | 138 . . . 277 | 79/140 | (55%) | |
| | [WO200190357-A1, 29-NOV-2001] | | | | |

[0570] In a BLAST search of public sequence databases, the NOV37a protein was found to have homology to the proteins shown in the BLASTP data in Table 37E.

TABLE 37E
Public BLASTP Results for NOV37a

| | | NOV37a | Identities/ | | |
|---|---|---|---|---|---|
| Protein | | Residues/ | Similarities for | | |
| Accession | | Match | the Matched | | Expect |
| Number | Protein/Organism/Length | Residues | Portion | | Value |
| O75095 | MEGF6 - Homo sapiens (Human), | 46 . . . 170 | 99/134 | (73%) | 5e−57 |
| | 1246 aa (fragment). | 1113 . . . 1246 | 105/134 | (77%) | |
| O88281 | MEGF6 - Rattus norvegicus (Rat), | 38 . . . 164 | 82/170 | (48%) | 1e−41 |
| | 1574 aa. | 1413 . . . 1571 | 93/170 | (54%) | |
| AAH39980 | Hypothetical protein - Mus musculus | 38 . . . 134 | 74/140 | (52%) | 1e−39 |
| | (Mouse), 546 aa. | 385 . . . 524 | 79/140 | (55%) | |
| Q8BKK7 | MEGF11 protein - Mus musculus | 46 . . . 137 | 45/92 | (48%) | 7e−23 |
| | (Mouse), 947 aa. | 183 . . . 274 | 54/92 | (57%) | |
| Q96KG6 | MEGF11 protein (Hypothetical | 46 . . . 137 | 45/92 | (48%) | 7e−23 |
| | protein KIAA1781) - Homo sapiens | 140 . . . 231 | 54/92 | (57%) | |
| | (Human), 969 aa. | | | | |

[0571] PFam analysis predicts that the NOV37a protein contains the domains shown in the Table 37F.

TABLE 37F
Domain Analysis of NOV37a

| | | Identities/ | |
|---|---|---|---|
| | | Similarities | |
| | NOV37a Match | for the | Expect |
| Pfam Domain | Region | Matched Region | Value |
| laminin_EGF | 63 . . . 102 | 17/60 (28%) | 0.37 |
| | | 30/60 (50%) | |
| EGF | 102 . . . 132 | 11/47 (23%) | 0.16 |
| | | 23/47 (49%) | |

### Example 38

[0572] The NOV38 clone was analyzed, and the nucleotide and encoded polypeptide sequences are shown in Table 38A.

TABLE 38A
NOV38 Sequence Analysis

| | | |
|---|---|---|
| NOV38a, CG56594-01 | SEQ ID NO: 889 | 695 bp |

| | | |
|---|---|---|
| DNA Sequence | ORF Start: ATG at 53 | ORF Stop: TGA at 662 |

GCACCCTGGCCCAGCTCTGAGTCCTGGGACCCTCGGTCCTCTCTCCTGGGCCATGGCCAACTCAGGCC
TCCAGCTCCTGGGCTACTTCTTGGCCCTGGGTGGCTGGGTGGGCATCATTGCTAGCACAGCCCTGCCA
CAGTGGAAGCAGTCTTCCTACGCAGGCGACGCCATCATCACTGCCGTGGGCCTCTATGAAGGGCTCTG
GATGTCCTGCGCCTCCCAGAGCACTGGGCAAGTGCAGTGCAAGCTCTACGACTCGCTGCTCGCCCTGG
ACGGTAGGCCCCAGGCCGCGCGGGCCCTGATGGTGGTGGCCGTGCTCCTGGGCTTCGTGGCCATGGTC
CTCAGCGTAGTTGGCATGAAGTGTACGCGGGTGGGAGACAGCAACCCCATTGCCAAGGGCCGTGTTGC
CCCTGGTGACCCAGGAGTTCTTCAACCCAGAATTTGGCCCAGCCCTGTTCGTGGGCTGGGCCTCAGCT
GGCCTGGCCGTGCTGGGCGGCTCCTTCCTCTGCTGCACATGCCCGGAGCCAGAGAGACCCAACAGCAG
CCCACAGCCCTATCGGCCTGGACCCTCTGCTGCTGCCCGAGAGTACGTCTGAGCTCCGCCTGCCCTGG
CCAGCCCCCCACCCA

NOV38a, CG56594-01

| | | | |
|---|---|---|---|
| Protein Sequence | SEQ ID NO: 890 | 203 aa | MW at 21174.4kD |

MANSGLQLLGYFLALGGWVGIIASTALPQWKQSSYAGDAIITAVGLYEGLWMSCASQSTGQVQCKLYD
SLLALDGRPQAARALMVVAVLLGFVAMVLSVVGMKCTRVGDSNPIAKGRVAIAGGALFILAGLCTLTA
VSWYATLVTQEFFNPEFGPALFVGWASAGLAVLGGSFLCCTCPEPERPNSSPQPYRPGPSAAAREYV

| | | |
|---|---|---|
| NOV38b, 277685552 | SEQ ID NO: 891 | 655 bp |

| | | |
|---|---|---|
| DNA Sequence | ORF Start: at 2 | ORF Stop: end of sequence |

CACCGGATCCACCATGGCCAACTCAGGCCTCCAGCTCCTGGGCTACTTCTTGGCCCTGGGTGGCTGGG
TGGGCATCATTGCTAGCACAGCCCTGCCACAGTGGAAGCAGTCTTCCTACGCAGGCGACGCCATCATC
ACTGCCGTGGGCCTCTATGAAGGGCTCTGGATGTCCTGCGCCTCCCAGAGCACTGGGCAAGTGCAGTG
CAAGCTCTACGACTCGCTGCTCGCCCTGGACGGTCACATCCAATCAGCGCGGGCCCTGATGGTGGTGG
CCGTGCTCCTGGGCTTCGTGGCCATGGTCCTCAGCGTAGTTGGCATGAAGTGTACGCGGGTGGGAGAC
AGCAACCCCATTGCCAAGGGCCGTGTTGCCATCGCCGGGGGAGCCCTCTTCATCCTGGCAGGCCTCTG
CACTTTGACTGCTGTCTCGTGGTATGCCACCCTGGTGACCCAGGAGTTCTTCAACCCAAGCACACCTG
TCAATGCCAGGTATGAATTTGGCCCAGCCCTGTTCGTGGGCTGGGCCTCAGCTGGCCTGGCCGTGCTG
GGCGGCTCCTTCCTCTGCTGCACATGCCCGGAGCCAGAGAGACCCAACAGCAGCCCACAGCCCTATCG
GCCTGGACCCTCTGCTGCTGCCCGAGAGTACGTCGTCGACGGC

NOV38b, 277685552

| | | | |
|---|---|---|---|
| Protein Sequence | SEQ ID NO: 892 | 218 aa | MW at 22694.0kD |

TGSTMANSGLQLLGYFLALGGWVGIIASTALPQWKQSSYAGDAIITAVGLYEGLWMSCASQSTGQVQC
KLYDSLLALDGHIQSARALMVVAVLLGFVAMVLSVVGMKCTRVGDSNPIAKGRVAIAGGALFILAGLC
TLTAVSWYATLVTQEFFNPSTPVNARYEFGPALFVGWASAGLAVLGGSFLCCTCPEPERPNSSPQPYR
PGPSAAAREYVVDG

| | | |
|---|---|---|
| NOV38c, 277685649 | SEQ ID NO: 893 | 583 bp |

| | | |
|---|---|---|
| DNA Sequence | ORF Start: at 2 | ORF Stop: end of sequence |

CACCGGATCCAGCACAGCCCTGCCACAGTGGAAGCAGTCTTCCTACGCAGGCGACGCCATCATCACTG
CCGTGGGCCTCTATGAAGGGCTCTGGATGTCCTGCGCCTCCCAGAGCACTGGGCAAGTGCAGTGCAAG
CTCTACGACTCGCTGCTCGCCCTGGACGGTCACATCCAATCAGCGCGGGCCCTGATGGTGGTGGCCGT
GCTCCTGGGCTTCGTGGCCATGGTCCTCAGCGTAGTTGGCATGAAGTGTACGCGGGTGGGAGACAGCA
ACCCCATTGCCAAGGGCCGTGTTGCCATCGCCGGGGGAGCCCTCTTCATCCTGGCAGGCCTCTGCACT
TTGACTGCTGTCTCGTGGTATGCCACCCTGGTGACCCAGGAGTTCTTCAACCCAAGCACACCTGTCAA
TGCCAGGTATGAATTTGGCCCAGCCCTGTTCGTGGGCTGGGCCTCAGCTGGCCTGGCCGTGCTGGGCG
GCTCCTTCCTCTGCTGCACATGCCCGGAGCCAGAGAGACCCAACAGCAGCCCACAGCCCTATCGGCCT
GGACCCTCTGCTGCTGCCCGAGAGTACGTCGTCGACGGC

NOV38c, 277685649

| | | | |
|---|---|---|---|
| Protein Sequence | SEQ ID NO: 894 | 194 aa | MW at 20246.1kD |

TGSSTALPQWKQSSYAGDAIITAVGLYEGLWMSCASQSTGQVQCKLYDSLLALDGHIQSARALMVVAV
LLGFVAMVLSVVGMKCTRVGDSNPIAKGRVAIAGGALFILAGLCTLTAVSWYATLVTQEFFNPSTPVN
ARYEFGPALFVGWASAGLAVLGGSFLCCTCPEPERPNSSPQPYRPGPSAAAREYVVDG

| | | |
|---|---|---|
| NOV38d, 277685616 | SEQ ID NO: 895 | 556 bp |

| | | |
|---|---|---|
| DNA Sequence | ORF Start: at 2 | ORF Stop: end of sequence |

CACCGGATCCTCAGGCCTCCAGCTCCTGGGCTACTTCTTGGCCCTGGGTGGCTGGGTGGGCATCATTG
CTAGCACAGCCCTGCCACAGTGGAAGCAGTCTTCCTACGCAGGCGACGCCATCATCACTGCCGTGGGC
CTCTATGAAGGGCTCTGGATGTCCTGCGCCTCCCAGAGCACTGGGCAAGTGCAGTGCAAGCTCTACGA
CTCGCTGCTCGCCCTGGACGGTCACATCCAATCAGCGCGGGCCCTGATGGTGGTGGCCGTGCTCCTGG
GCTTCGTGGCCATGGTCCTCAGCGTAGTTGGCATGAAGTGTACGCGGGTGGGAGACAGCAACCCCATT
GCCAAGGGCCGTGTTGCCATCGCCGGGGGAGCCCTCTTCATCCTGGCAGGCCTCTGCACTTTGACTGC
TGTCTCGTGGTATGCCACCCTGGTGACCCAGGAGTTCTTCAACCCAAGCACACCTGTCAATGCCAGGT
ATGAATTTGGCCCAGCCCTGTTCGTGGGCTGGGCCTCAGCTGGCCTGGCCGTGCTGGGCGGCTCCTTC
CTCGTCGACGGC

NOV38d, 277685616

| | | | |
|---|---|---|---|
| Protein Sequence | SEQ ID NO: 896 | 185 aa | MW at 19131.1kD |

TGSSGLQLLGYFLALGGWVGIIASTALPQWKQSSYAGDAIITAVGLYEGLWMSCASQSTGQVQCKLYD
SLLALDGHIQSARALMVVAVLLGFVAMVLSVVGMKCTRVGDSNPIAKGRVAIAGGALFILAGLCTLTA
VSWYATLVTQEFFNPSTPVNARYEFGPALFVGWASAGLAVLGGSFLVDG

[0573] A ClustalW comparison of the above protein sequences yields the following sequence alignment shown in Table 38B.

TABLE 38B
Comparison of the NOV38 protein sequences.

| | |
|---|---|
| NOV38a | ----MANSGLQLLGYFLALGGWVGIIASTALPQWKQSSYAGDAIITAVGLYEGLWMSCAS |
| NOV38b | TGSTMANSGLQLLGYFLALGGWVGIIASTALPQWKQSSYAGDAIITAVGLYEGLWMSCAS |
| NOV38c | ------------------------TGSSTALPQWKQSSYAGDAIITAVGLYEGLWMSCAS |
| NOV38d | ----TGSSGLQLLGYFLALGGWVGIIASTALPQWKQSSYAGDAIITAVGLYEGLWMSCAS |
| NOV38a | QSTGQVQCKLYDSLLALDGRPQAARALMVVAVLLGFVAMVLSVVGMKCTRVGDSNPIAKG |
| NOV38b | QSTGQVQCKLYDSLLALDGHIQSARALMVVAVLLGFVAMVLSVVGMKCTRVGDSNPIAKG |
| NOV38c | QSTGQVQCKLYDSLLALDGHIQSARALMVVAVLLGFVAMVLSVVGMKCTRVGDSNPIAKG |
| NOV38d | QSTGQVQCKLYDSLLALDGHIQSARALMVVAVLLGFVAMVLSVVGMKCTRVGDSNPIAKG |
| NOV38a | RVAIAGGALFILAGLCTLTAVSWYATLVTQEFFNP--------EFGPALFVGWASAGLAV |
| NOV38b | RVAIAGGALFILAGLCTLTAVSWYATLVTQEFFNPSTPVNARYEFGPALFVGWASAGLAV |
| NOV38c | RVAIAGGALFILGGLCTLTAVSWYATLVTQEFFNPSTPVNARYEFGPALFVGWASAGLAV |
| NOV38d | RVAIAGGALFILAGLCTLTAVSWYATLVTQEFFNPSTPVNARYEFGPALFVGWASAGLAV |
| NOV38a | LGGSFLCCTCPEPERPNSSPQPYRPGPSAAAREYV--- |
| NOV38b | LGGSFLCCTCPEPERPNSSPQPYRPGPSAAAREYVVDG |
| NOV38c | LGGSFLCCTCPEPERPNSSPQPYRPGPSAAAREYVVDG |
| NOV38d | LGGSFLVDG----------------------------- |
| NOV38a | (SEQ ID NO: 890) |
| NOV38b | (SEQ ID NO: 892) |
| NOV38c | (SEQ ID NO: 894) |
| NOV38d | (SEQ ID NO: 896) |

[0574] Further analysis of the NOV38a protein yielded the following properties shown in Table 38C.

TABLE 38C
Protein Sequence Properties NOV38a

| | |
|---|---|
| SignalP analysis: | Cleavage site between residues 24 and 25 |
| PSORT II analysis: | |

| PSG: | a new signal peptide prediction method | |
|---|---|---|
| | N-region: | length 0; pos. chg 0; neg. chg 0 |
| | H-region: | length 30; peak value 9.10 |
| | PSG score: | 4.70 |

| | |
|---|---|
| GvH: | von Heijne's method for signal seq. recognition |
| | GvH score (threshold: −2.1): −4.10 |
| | possible cleavage site: between 17 and 18 |

>>> Seems to have no N-terminal signal peptide

| ALOM: | Klein et al's method for TM region allocation | | |
|---|---|---|---|
| | Init position for calculation: 1 | | |
| | Tentative number of TMS(s) for the threshold 0.5: 4 | | |
| | INTEGRAL | Likelihood = | Transmembrane 8-24 |
| | | −1.75 | |
| | INTEGRAL | Likelihood = | Transmembrane 84-100 |
| | | −12.15 | |
| | INTEGRAL | Likelihood = | Transmembrane 118-134 |
| | | −6.42 | |
| | INTEGRAL | Likelihood = | Transmembrane 153-169 |
| | | −0.64 | |

| | |
|---|---|
| PERIPHERAL | Likelihood = 2.28 (at 39) |

| | |
|---|---|
| | ALOM score: −12.15 (number of TMSs: 4) |
| MTOP: | Prediction of membrane topology (Hartmann et al.) |
| | Center position for calculation: 15 |
| | Charge difference: −1.0 C(0.0)-N(1.0) |
| | N >= C: N-terminal side will be inside |

>>> membrane topology: type 3a

| MITDISC: | discrimination of mitochondrial targeting seq | | | |
|---|---|---|---|---|
| | R content: | 0 | Hyd Moment(75): | 4.90 |
| | Hyd Moment(95): | 7.23 | G content: | 6 |
| | D/E content: | 1 | S/T content: | 5 |

| | |
|---|---|
| | Score: −6.38 |
| Gavel: | prediction of cleavage sites for mitochondrial preseq |
| | cleavage site motif not found |

NUCDISC: discrimination of nuclear localization signals

| | |
|---|---|
| | pat4: none |
| | pat7: none |
| | bipartite: none |
| | content of basic residues: 5.4% |
| | NLS Score: −0.47 |
| KDEL: | ER retention motif in the C-terminus: none |

ER Membrane Retention Signals: none
SKL: peroxisomal targeting signal in the C-terminus: none
PTS2: 2nd peroxisomal targeting signal: none
VAC: possible vacuolar targeting motif: none
RNA-binding motif: none
Actinin-type actin-binding motif:

type 1: none
type 2: none

NMYR: N-myristoylation pattern: none
Prenylation motif: none
memYQRL: transport motif from cell surface to Golgi: none
Tyrosines in the tail: none
Dileucine motif in the tail: none
checking 63 PROSITE DNA binding motifs: none
checking 71 PROSITE ribosomal protein motifs: none
checking 33 PROSITE prokaryotic DNA binding motifs: none

| | |
|---|---|
| NNCN: | Reinhardt's method for Cytoplasmic/Nuclear discrimination |
| | Prediction: cytoplasmic |
| | Reliability: 94.1 |
| COIL: | Lupas's algorithm to detect coiled-coil regions |
| | total: 0 residues |

Final Results (k = 9/23):

66.7%: endoplasmic reticulum
33.3%: mitochondrial

>> prediction for CG56594-01 is end (k = 9)

[0575] A search of the NOV38a protein against the Geneseq database, a proprietary database that contains sequences published in patents and patent publication, yielded several homologous proteins shown in Table 38D.

TABLE 38D
Geneseq Results for NOV38a

| | | NOV38a | Identities/ | |
|---|---|---|---|---|
| | | Residues/ | Similarities for | |
| Geneseq | Protein/Organism/Length | Match | the Matched | Expect |
| Identifier | [Patent #, Date] | Residues | Region | Value |
| ABG27980 | Novel human diagnostic protein | 1 . . . 203 | 200/211 (94%) | e−111 |
| | #27971 - Homo sapiens, 254 aa. | 44 . . . 254 | 201/211 (94%) | |
| | [WO200175067-A2, 11-OCT-2001 ] | | | |
| AAO20545 | Human Claudin-19 protein - Homo | 1 . . . 203 | 197/211 (93%) | e−109 |
| | sapiens, 211 aa. [WO200214499-A2, | 1 . . . 211 | 198/211 (93%) | |
| | 21-FEB-2002] | | | |
| AAO20546 | Murine Claudin-19 protein (partial | 11 . . . 195 | 172/193 (89%) | 1e−94 |
| | sequence) - Mus sp, 193 aa. | 1 . . . 193 | 175/193 (90%) | |
| | [WO200214499-A2, 21-FEB-2002] | | | |
| AAU96166 | Human secreted protein, SEQ ID No | 84 . . . 203 | 120/128 (93%) | 2e−63 |
| | 68 - Homo sapiens, 128 aa. | 1 . . . 128 | 120/128 (93%) | |
| | [WO200224721-A1, 28-MAR-2002] | | | |
| ABG64826 | Human albumin fusion protein #1501 - | 84 . . . 203 | 120/128 (93%) | 2e−63 |
| | Homo sapiens, 128 aa. | 1 . . . 128 | 120/128 (93%) | |
| | [WO200177137-A1, 18-OCT-2001] | | | |

[0576] In a BLAST search of public sequence databases, the NOV38a protein was found to have homology to the proteins shown in the BLASTP data in Table 38E.

TABLE 38E
Public BLASTP Results for NOV38a

| | | NOV38a | Identities/ | |
|---|---|---|---|---|
| Protein | | Residues/ | Similarities for | |
| Accession | | Match | the Matched | Expect |
| Number | Protein/Organism/Length | Residues | Portion | Value |
| Q8N6F1 | Claudin-19 - Homo sapiens (Human), | 1 . . . 203 | 200/211 (94%) | e−111 |
| | 211 aa. | 1 . . . 211 | 201/211 (94%) | |
| Q9ET38 | Claudin-19 - Mus musculus (Mouse), | 1 . . . 203 | 191/211 (90%) | e−105 |
| | 211 aa. | 1 . . . 211 | 195/211 (91%) | |
| O95832 | Claudin-1 (Senescence-associated | 1 . . . 203 | 115/212 (54%) | 1e−62 |
| | epithelial membrane protein) - Homo | 1 . . . 211 | 151/212 (70%) | |
| | sapiens (Human), 211 aa. | | | |
| AAP35475 | Claudin 7 - Homo sapiens (Human), | 1 . . . 203 | 112/211 (53%) | 3e−62 |
| | 211 aa. | 1 . . . 211 | 149/211 (70%) | |
| Q8AVG4 | Similar to claudin 1 - Xenopus laevis | 1 . . . 203 | 112/211 (53%) | 6e−62 |
| | (African clawed frog), 211 aa. | 1 . . . 211 | 142/211 (67%) | |

[0577] PFam analysis predicts that the NOV38a protein contains the domains shown in the Table 38F.

TABLE 38F
Domain Analysis of NOV38a

| | | Identities/ | | |
|---|---|---|---|---|
| | | Similarities | | |
| | NOV38a Match | for the | | Expect |
| Pfam Domain | Region | Matched Region | | Value |
| PMP22_Claudin | 4 . . . 174 | 61/188 | (32%) | 1.7e−56 |
| | | 142/188 | (76%) | |

### Example 39

[0578] The NOV39 clone was analyzed, and the nucleotide and encoded polypeptide sequences are shown in Table 39A.

TABLE 39A
NOV39 Sequence Analysis

| | | |
|---|---|---|
| NOV39a, CG56653-08 | SEQ ID NO: 897 | 1000 bp |

| | | |
|---|---|---|
| DNA Sequence | ORF Start: ATG at 2 | ORF Stop: TAG at 980 |

CATGGAGCTGAGTGGAGCCACCATGGCCCGGGGGCTCGCTGTCCTGCTAGTCTTGTTCCTGCATATCA
AGAACCTGCCTGCCCAGGCTGCGGACACATGTCCAGAGGTGAAGGTGGTGGGCCTGGAGGGCTCTGAC
AAGCTCACCATTCTCCGAGGCTGCCCGGGGCTGCCCGGGGCCCCAGGGCCAAAGGGAGAGGCAGGTGT
CATTGGAGAGAGAGGAGAACGCGGTCTCCCTGGAGCCCCTGGAAAGGCAGGACCAGTGGGGCCCAAGG
GAGACCGAGGAGAGAAGGGGATGCGTGGAGAGAAAGGAGACGCTGGGCAGTCTCAGTCGTGTGCGACA
GGCCCACGCAACTGCAAGGACCTGCTAGACCGGGGGTATTTCCTGAGCGGCTGGCACAATATCTACCT
GCCCGACTGCCGGCCCCTGACTGTGCTCTGTGACATGGACACGGACGGAGGGGGCTGGACCGTTTTCC
AGCGGAGGATGGATGGCTCTGTGGACTTCTATCGGGACTGGGCCGCATACAAGCAGGGCTTCGGCAGT
CAGCTGGGGGAGTTCTGGCTGGGGAACGACAACATCCACGCCCTGACTGCCCAGGGAAGCAGCGAGCT
CCGTGTAGACCTGGTGGACTTTGAGGGCAACCACCAGTTTGCTAAGTACAAATCATTCAAGGTGGCTG
ACGAGGCAGAGAAGTACAAGCTGGTACTGGGAGCCTTTGTCGGGGGCAGTGCGGGTAATTCTCTAACG
GGCCACAACAACAACTTCTTCTCCACCAAAGACCAAGACAATGATGTGAGTTCTTCGAATTGTGCTGA
GAAGTTCCAGGGAGCCTGGTGGTACGCCGACTGTCATGCTTCGAGCCTCAATGGTCTCTACCTCATGG
GTGTCAGAGATGAAGGTGCGGCCCGCCTAGACGGGCCAGGACCCCTAA

NOV39a, CG56653-08

| | | | |
|---|---|---|---|
| Protein Sequence | SEQ ID NO: 898 | 326 aa | MW at 35064.1kD |

[sequence omitted]

| | | |
|---|---|---|
| NOV39b, 214374274 | SEQ ID NO: 899 | 651 bp |

| | | |
|---|---|---|
| DNA Sequence | ORF Start: at 1 | ORF Stop: end of sequence |

GGATCCGGCCCACGCAACTGCAAGGACCTGCTAGACCGGGGGTATTTCCTGAGCGGCTGGACACCAT
CTACCTGCCCGACTGCCGGCCCCTGACTGTGCTCTGTGACATGGACACGGACGGAGGGGGCTGGACCG
TTTTCCAGCGGAGGATGGATGGCTCTGTGGACTTCTATCGGGACTGGGCCGCATACAAGCAGGGCTTC
GGCAGTCAGCTGGGGGAGTTCTGGCTGGGGAACGACAACATCCACGCCCTGACTGCCCAGGGAAGCAG
CGAGCTCCGTGTAGACCTGGTGGACTTTGAGGGCAACCACCAGTTTGCTAAGTACAAATCATTCAAGG
TGGCTGACGAGGCAGAGAAGTACAAGCTGGTACTGGGAACCTTTGTCGGGGGCAGTGCGGGTAATTCT
CTAACGGGCCACAACAACAACTTCTTCTCCACCAAAGACCAAGACAATGATGTGAGTTCTTCGAATTG
TGCTGAGAAGTTCCAGGGAGCCTGGTGGTACGCCGACTGTCATGCTTCAAACCTCAATGGTCTCTACC
TCATGGGACCCCATGAGAGCTATGCCAATGGTATCAACTGGAGTGCGGCGAAGGGGTACAAATATAGC
TACAAGGTGTCAGAGATGAAGGTGCGGCCCGCCCTCGAG

NOV39b, 214374274

| | | | |
|---|---|---|---|
| Protein Sequence | SEQ ID NO: 900 | 217 bp | MW at 24272.7kD |

GSGPRNCKDLLDRGYFLSGWHTIYLPDCRPLTVLCDMDTDGGGWTVFQRRMDGSVDFYRDWAAYKQGF
GSQLGEFWLGNDNIHALTAQGSSELRVDLVDFEGNIIQFAKYKSFKVADEAEKYKLVLGTFVGGSAGNS
LTGHNNNFFSTKDQDNDVSSSNCAEKFQGAWWYADCHASNLNGLYLMGPHESYANGINWSAAKGYKYS
YKVSEMKVRPALE

| | | |
|---|---|---|
| NOV39c, 214374256 | SEQ ID NO: 901 | 651 bp |

| | | |
|---|---|---|
| DNA Sequence | ORF Start: at 1 | ORF Stop: end of sequence |

GGATCCGGCCCACGCAACTGCAAGGACCTGCTAGACCGGGGGTATTTCCTGAGCGGCTGGCACACCAT
CTACCTGCCCGACTGCCGGCCCCTGACTGTGCTCTGTGACATGGACACGGACGGAGGGGGCTGGACCG
TTTTCCAGCGGAGGATGGATGGCTCTGTGGACTTCTATCGGGACTGGGCCGCATACAAGCAGGGCTTC
GGCAGTCAGCTGGGGGAGTTCTGGCTGGGGAATGACAACATCCACGCCCTGACTGCCCAGGGAAGCAG
CGAGCTCCGTGTAGACCTGGTGGACTTTGAGGGCAACCACCAGTTTGCTAAGTACAAATCATTCAAGG
TGGCTGACGAGGCAGAGAAGTACAAGCTGGTACTGGGAGCCTTTGTCGGGGGCAGTGCGGGTAATTCT
CTAACGGGCCACAACAACAACTTCTTCTCCACCAAAGACCAAGACAATGATGTGAGTTCTTCGAATTG
TGCTGAGAAGTTCCAAGGAGCCTGGTGGTACGCCGACTGTCATGCTTCAAACCTCAATGGTCTCTACC
TCATGGGACCCCATGAGAGCTATGCCAATGGTATCAACTGGAGTGCGGCGAAGGGGTACAAATATAGC
TACAAGGTGTCAGAGATGAAGGTGCGGCCCGCCCTCGAG

NOV39c, 214374256

| | | | |
|---|---|---|---|
| Protein Sequence | SEQ ID NO: 902 | 217 aa | MW at 24242.6kD |

GSGPRNCKDLLDRGYFLSGWHTIYLPDCRPLTVLCDMDTDGGGWTVFQRPMDGSVDFYRDWAAYKQGF
LTGHNNNFFSTKDQDNDVSSSNCAEKFQGAWWYADCHASNLNGLYLMGPHESYANGINWSAAKGYKYS
YKVSEMKVRPALE

| | | |
|---|---|---|
| NOV39d, 214374252 | SEQ ID NO: 903 | 651 bp |

| | | |
|---|---|---|
| DNA Sequence | ORF Start: at 1 | ORF Stop: end of sequence |

GGATCCGGCCCACGCAACTGCAAGGACCTGCTAGACCGGGGGTATTTCCTGAGCGGCTGGCACACCAT
CTACCTGCCCGACTGCCGGCCCCTGACTGTGCTCTGTGACATGGACACGGACGGAGGGGGCTGGACCG
GTTTCCAGCGGAGGATGGATGGCTCTGTGGACTTCTATCGGGACTGGGCCGCATACAAGCAGGGCTTC
GGCAGTCAGCTGGGGGAGTTCTGGCTGGGGAACGACAACATCCACGCCCTGACTGCCCAGGGAAGCAG
CGAGCTCCGTGTAGACCTGGTGGACTTTGAGGGCAACCACCAGTTTGCTAAGTACAAATCATTCAAGG
TGGCTGACGAGGCAGAGAAGTACAAGCTGGTACTGGGAGCCTTTGTCGGGGGCAGTGCGGGTAATTCT
CTAACGGGCCACAACAACAACTTCTTCTCCACCAAAGACCAAGACAATGATGTGAGTTCTTCGAATTG
TCATGGGACCCCATGAGAGCTATGCCAATGGTATCAACTGGAGTGCGGCGAAGGGGTACAAATATAGC
TACAAGGTGTCAGAGATGAAGGTGCGGCCCGCCCTCGAG

NOV39d, 214374252

| | | | |
|---|---|---|---|
| Protein Sequence | SEQ ID NO: 904 | 217 aa | MW at 24200.6kD |

GSGPRNCKDLLDRGYFLSGWHTIYLPDCRPLTVLCDMDTDGGGWTGFQRRMDGSVDFYRDWAAYKQGF
GSQLGEFWLGNDNIHALTAQGSSELRVDLVDFEGNHQFAKYKSFKVADEAEKYKLVLGAFVGGSAGNS
LTGHNNNFFSTKDQDNDVSSSNCAEKFQGAWWYADCHASNLNGLYLMGPHESYANGINWSAAKGYKYS
YKVSEMKVRPALE

| | | |
|---|---|---|
| NOV39e, 214458492 | SEQ ID NO: 905 | 651 bp |

| | | |
|---|---|---|
| DNA Sequence | ORF Start: at 1 | ORF Stop: end of sequence |

GGATCCGGCCCACGCAACTGCAAGGACCTGCTAGACCGGGGGTATTTCCTGAGCGGCTGGCACACCAT
CTACCTGCCCGACTGCCGGCCCCTGACTGTGCTCTGTGACATGGACACGGACGGAGGGGGTTGGACCG
TTTTCCAGCGGAGGATGGATGGCTCTGTGGACTTCTATCGGGACTGGGCCGCATACAAGCAGGGCTTC
GGCAGTCGGCTGGGGGAGTTCTGGCTGGGGAACGACAACATCCACGCCCTGACTGCCCAGGGAAGCAG
CGAGCTCCGTGTAGACCTGGTGGACTTTGAGGGCAACCACCAGTTTGCTAAGTACAAATCATTCAAGG
TGGCTGACGAGGCAGAGAAGTACAAGCTGGTACTGGGAGCCTTTGTCGGGGGCAGTGCGGGTAATTCT
CTAACGGGCCACAACAACAACTTCTTCTCCACCAAAGACCAAGACAATGATGTGAGTTCTTCGAATTG
TGCTGAGAAGTTCCAGGGAGCCTGGTGGTACGCCGACTGTCATGCTTCAAACCTCAATGGTCTCTACC
TCATGGGACCCCATGAGAGCTATGCCAATGGTATCAACTGGAGTGCGGCGAAGGGGTACAAATATAGC
TACAAGGTGTCAGAGATGAAGGTGCGGCCCGCCCTCGAG

NOV39e, 214458492

| | | | |
|---|---|---|---|
| Protein Sequence | SEQ ID NO: 906 | 217 aa | MW at 24270.7kD |

GSRLGEFWLGNDNIHALTAQGSSELRVDLVDFEGNHQFAKYKSFKVADEAEKYKLVLGAFVGGSAGNS
LTGHNNNFFSTKDQDNDVSSSNCAEKFQGAWWYADCHASNLNGLYLMGPHESYANGINWSAAKGYKYS
YKVSEMKVRPALE

| | | |
|---|---|---|
| NOV39f, 214458488 | SEQ ID NO: 907 | 651 bp |

| | | |
|---|---|---|
| DNA Sequence | ORF Start: at 1 | ORF Stop: end of sequence |

GGATCCGGCCCACGCAACTGCAAGGACCTGCTAGACCGGGGGTATTTCCTGAGCGGCTGGCACACCAT
CTACCTGCCCGACTGCCGGCCCCTGACTGTGCTCTGTGACATGGACACGGACGGAGGGGGCTGGACCG
TTTTCCAGCGGAGGATGGATGGCTCTGTGGACTTCTATCGGGACTGGGCCGCATACAAGCAGGGCTTC
GGCAGTCAGCTGGGGGAGTTCTGGCTGGGGAATGACGACATCCACGCCCTGACTGCCCAGGGAAGCAG
CGAGCTCCGTGTAGACCTGGTGGACTTTGAGGGCAACCACCAGTTTGCTAAGTACAAATCATTCAAGG
TGGCTGACGAGGCAGAGAAGTACAAGCTGGTACTGGGAGCCTTTGTCGGGGGCAGTGCGGGTAATTCT
CTAACGGGCCACAACAACAACTTCTTCTCCACCAAAGACCAAGACAATGATGTGAGTTCTTCGAATTG
TGCTGAGAAGTTCCAAGGAGCCTGGTGGTACGCCGACTGTCATGCTTCAAACCTCAATGGTCTCTACC
TCATGGGACCCCATGAGAGCTATGCCAATGGTATCAACTGGAGTGCGGCGAAGGGGTACAAATATAGC
TACAAGGTGTCAGAGATGAAGGTGCGGCCCGCCCTCGAG

NOV39f, 214458488

| | | | |
|---|---|---|---|
| Protein Sequence | SEQ ID NO: 908 | 217 aa | MW at 24243.6kD |

GSGPRNCKDLLDRGYFLSGWHTIYLPDCRPLTVLCDMDTDGGGWTVFQRRMDGSVDFYRDWAAYKQGF
GSQLGEFWLGNDDIHALTAQGSSELRVDLVDFEGNHQFAKYKSFKVADEAEKYKLVLGAFVGGSAGNS
LTGHNNNFFSTKDQDNDVSSSNCAEKFQGAWWYADCHASNLNGLYLMGPHESYANGINWSAAKGYKYS
YKVSEMKVRPALE

| | | |
|---|---|---|
| NOV39g, 214374236 | SEQ ID NO: 909 | 651 bp |

| | | |
|---|---|---|
| DNA Sequence | ORF Start: at 1 | ORF Stop: end of sequence |

GGATCCGGCCCACGCAACTGCAAGGACCTGCTAGACCGAGGGCACTTCCTGAGCGGCTGGCACACCAT
CTACCTGCCCGACTGCCGGCCCCTGACTGTGCTCTGTGACATGGACACGGACGGAGGGGGCTGGACCG
TTTTCCAGCGGAGGATGGATGGCTCTGTGGACTTCTATCGGGACTGGGCCGCATACAAGCAGGGCTTC
GGCAGTCAGCTGGGGGAGTTCTGGCTGGGGAACGACAACATCCACGCCCTGACTGCCCAGGGAAGCAG
CGAGCTCCGTGTAGACCTGGTGGACTTTGAGGGCAACCACCAGTTTGCTAAGTACAAATCATTCAAGG
TGGCTGACGAGGCAGAGAAGTACAAGCTGGTACTGGGAGCCTTTGTCGGGGGCAGTGCGGGTAATTCT
CTAACGGGCCACAACAACAACTTCTTCTCCACCAAAGACCAAGACAATGATGTGAGTTCTTCGAATTG
TGCTGAGAAGTTCCAAGGAGCCTGGTGGTACGCCGACTGTCATGCTTCAAACCTCAATGGTCTCTACC
TCATGGGACCCCATGAGAGCTATGCCAATGGTATCAACTGGAGTGCGGCGAAGGGGTACAAATATAGC
TACAAGGTGTCAGAGATGAAGGTGCGGCCCGCCCTCGAG

NOV39g 214374236

| | | | |
|---|---|---|---|
| Protein Sequence | SEQ ID NO: 910 | 217 aa | MW at 24216.6kD |

GSGPRNCKDLLDRGHFLSGWHTIYLPDCRPLTVLCDMDTDGGGWTVFQRRMDGSVDFYRDWAAYKQGF
GSQLGEFWLGNDNIHALTAQGSSELRVDLVDFEGNHQFAKYKSFKVADEAEKYKLVLGAFVGGSAGNS
LTGHNNNFFSTKDQDNDVSSSNCAEKFQGAWWYADCHASNLNGLYLMGPHESYANGINWSAAKGYKYS
YKVSEMKVRPALE

| | | |
|---|---|---|
| NOV39h, CG56653-01 | SEQ ID NO: 911 | 1187 bp |

| | | |
|---|---|---|
| DNA Sequence | ORF Start: ATG at 16 | ORF Stop: TAG at 973 |

CTGAGTGGAGCCACCATGGCCCGGGGGCTCGCTGTCCTGCTAGTCTTGTTCCTGCATATCAAGAACCT
GCCTGCCCAGGCTGCGGACACATGTCCAGAGGTGAAGGTGGTGGGCCTGGAGGGCTCTGACAAGCTCA
CCATTCTCCGAGGCTGCCCGGGGCTGCCCGGGGCCCCAGGGCCAAAGGGAGAGGCAGGTGTCATTGGA
GAGAGAGGAGAACGCGGTCTCCCTGGAGCCCCTGGAAAGGCAGGACCAGTGGGGCCCAAAGGAGACCG
AGGAGAGAAGGGGATGCGTGGAGAGAAAGGAGACGCTGGGCAGTCTCAGTCGTGTGCGACAGGCCCAC
GCAACTGCAAGGACCTGCTAGACCGGGGGTATTTCCTGAGCGGCTGGCACACCATCTACCTGCCCGAC
TGCCGGCCCCTGACTGTGCTCTGTGACATGGACACGGACGGAGGGGGCTGGACCGTTTTCCAGCGGAG
GATGGATGGCTCTGTGGACTTCTATCGGGACTGGGCCGCATACAAGCAGGGCTTCGGCAGTCAGCTGG
GGGAGTTCTGGCTGGGGAACGACAACATCCACGCCCTGACTGCCCAGGGAAGCAGCGAGCTCCGTGTA
GACCTGGTGGACTTTGAGGGCAACCACCAGTTTGCTAAGTACAAATCATTCAAGGTGGCTGACGAGGC
AGAGAAGTACAAGCTGGTACTGGGAGCCTTTGTCGGGGGCAGTGCGGGTAATTCTCTAACGGGCCACA
ACAACAACTTCTTCTCCACCAAAGACCAAGACAATGATGTGAGTTCTTCGAATTGTGCTGAGAAGTTC
CAGGGAGCCTGGTGGTACGCCGACTGTCATGCTTCAAACCTCAATGGTCTCTACCTCATGGGACCCCA
TGAGAGCTATGCCAATGGTATCAACTGGAGTGCGGCGAAGGGGTACAAATATAGCTACAAGGTGTCAG
AGATGAAGGTGCGGCCCGCCTAGACGGGCCAGGACCCCTCCACATGCACCTGCTAGTGGGGAGGCCAC
ACCCACAAGCGCTGCGTCGTGGAAGTCACCCCATTTCCCCAGCCAGACACACTCCCATGACGCCCACA
GCTGCCCCTTTGCCCCCAGCTCAGTCAAGCCGCCACATGCCCACAACCTCACCAGAGGGAGAATTATG
TTTCTAAATATGTTTACTTTGGGACAGAAAA

NOV39h, CG56653-01

| | | | |
|---|---|---|---|
| Protein Sequence | SEQ ID NO: 912 | 319 aa | MW at 34388.3kD |

MARGLAVLLVLFLHIKNLPAQAADTCPEVKVVGLEGSDKLTILRGCPGLPGAPGPKGEAGVIGERGER
GLPGAPGKAGPVGPKGDRGEKGMRGEKGDAGQSQSCATGPRNCKDLLDRGYFLSGWHTIYLPDCRPLT
VLCDMDTDGGGWTVFQRRMDGSVDFYRDWAAYKQGFGSQLGEFWLGNDNIHALTAOGSSELRVDLVDF
EGNHQFAKYKSFKVADEAEKYKLVLGAFVGGSAGNSLTGHNNNFFSTKDQDNDVSSSNCAEKFQGAWW
YADCHASNLNGLYLMGPHESYANGINWSAAKGYKYSYKVSEMKVRPA

| | | |
|---|---|---|
| NOV39i, CG56653-02 | SEQ ID NO: 913 | 1332 bp |

| | | |
|---|---|---|
| DNA Sequence | ORF Start: ATG at 183 | ORF Stop: TAG at 1107 |

TTTTAGGTCTGTTTGTCGTAGGCAGATGGAGCTTGTTATAATTATGCCTCATAGGGATAGTACAAGGA
AGGGGTAGGCTATGTGTTTTGTCAGGGAGTTGAGAAACTGTGGCACAAGGCGAGAGCTGGTTTCCTCT
GCCCTGTTAGAGCTGGGGGACTCTTCAGAGTCAAAGGCCAGAGAGCATGGAGCTGAGTGGAGCCACCA
TGGCCCGGGGGCTCGCTGTCCTGCTAGTCTTGTTCCTGCATATCAAGAACCTGCCTGCCCAGGCTGCG
GACACATGTCCAGAGGTGAAGGTGGTGGGCCTGGAGGGCTCTGGCAAGCTCACCATTCTCCGAGGCTG
CCCGGGGCTGCCCGGGGCCCCAGGGCCAAAGGGAGAGGCAGGTGTCATTGGAGAGAGAGGAGACCGAG
GAGAGAAGGGGATGCGTGGAGAGAAAGGAGACGCTGGGCAGTCTCAGTCGTGTGCGACAGGCCCACGC
AACTGCAAGGACCTGCTAGACCGGGGGTATTTCCTGAGCGGCTGGCACACCATCTACCTGCCCGACTG
CCGGCCCCTGACTGTGCTCTGTGACATGGACACGGACGGAGGGGGCTGGACCGTTTTCCAGCGGAGGA
TGGATGGCTCTGTGGACTTCTATCGGGACTGGGCCGCATACAAGCAGGGCTTCGGCAGTCAGCTGGGG
GAGTTCTGGCTGGGGAATGACAACATCCACGCCCTGACTGCCCAGGGAAGCAGCGAGCTCCGTGTAGA
CCTGGTGGACTTTGAGGGCAACCACCAGTTTGCTAAGTACAAATCATTCAAGGTGGCTGACGAGGCAG
AGAAGTACAAGCTGGTACTGGGAGCCTTTGTCGGGGGCAGTGCGGGTAATTCTCTAACGGGCCACAAC
AACAACTTCTTCTCCACCAAAGACCAAGACAATGATGTGAGTTCTTCGAATTGTGCTGAGAAGTTCCA
AGGAGCCTGGTGGTACGCCGACTGTCATGCTTCAAACCTCAATGGTCTCTACCTCATGGGACCCCATG
AGAGCTATGCCAATGGTATCAACTGGAGTGCGGCGAAGGGGTACAAATATAGCTACAAGGTGTCAGAG
ATGAAGGTGCGGCCCGCCTAGACGGGCCAGGACCCCTCCACATGCACCTGCTAGTGGGGAGGCCACAC
CCACAAGCGCTGCGTCGTGGAAGTCACCCCATTTCCCCAGCCAGACACACTCCCATGACGCCCACAGC
TCTAATATGTTTACTTTTGGGGACAGAAAAAAAAAAAAA

NOV39i, CG56653-02

| | | | |
|---|---|---|---|
| Protein Sequence | SEQ ID NO: 914 | 308 aa | MW at 33393.2kD |

MELSGATMARGLAVLLVLFLHIKNLPAQAADTCPEVKVVGLEGSGKLTILRGCPGLPGAPGPKGEAGV
IGERGDRGEKGNRGEKGDAGQSQSCATGPRNCKDLLDRGYFLSGWHTIYLPDCRPLTVLCDMDTDGGG
WTVFQRRNDGSVDFYRDWAAYKQGFGSQLGEFWLGNDNIHALTAQGSSELRVDLVDFEGNHQFAKYKS
FKVADEAEKYKLVLGAFVGGSAGNSLTGHNNNFFSTKDQDNDVSSSNCAEKFQGAWWYADCHASNLNG
LYLMGPHESYANGINWSAAKGYKYSYKVSEMKVRPA

| | | |
|---|---|---|
| NOV39j, CG56653-03 | SEQ ID NO: 915 | 728 bp |

| | | |
|---|---|---|
| DNA Sequence | ORF Start: at 1 | ORF Stop: TAG at 574 |

CTGCATATCAAGAACCTGCCTGCCCAGGCTGCGGACACATGTCCAGAGGTGAAGGTGGTGGGCCTGGA
GGGCTCTGACAAGCTCACCATTCTCCGAGGCTGCCCGGGGCTGCCCGGGGCCCCAGGGCCAAAGGGAG
AGGCAGGTGTCATTGGAGAGAGAGGAGAACGCGGTCTCCCTGGAGCCCCTGGAAAGGCAGGACCAGTG
GGGCCCAAAGGAGACCGAGGAGAGAAGGGGATGCGTGGAGAGAAAGGAGACGCTGGGCAGTCTCAGTC
GTGTGCGACAGGCCCACGCAACTGCAAGGACCTGCTAGACCGGGGGTATTTCCTGAGCGGCTGGCACA
CCATCTACCTGCCCGACTGCCGGCCCCTGACTGTGCTCTGTGACATGGACACGGACGGAGGGGGCTGG
ACCGTTTTCCAGGGAGCCTGGTGGTACGCCGACTGTCATGCTTCAAACCTCAATGGTCTCTACCTCAT
GGGACCCCATGAGAGCTATGCCAATGGTATCAACTGGAGTGCGGCGAAGGGGTACAAATATAGCTACA
GGAGGCCACACCCACAAGCGCTGCGTCGTGGAAGTCACCCCATTTCCCCAGCCAGACACACTCCCATG
ACGCCCACAGCTGCCCCTTTGCCCCCAGCTCAGTCAAGCCGCCACATG

NOV39j, CG56653-03

| | | | |
|---|---|---|---|
| Protein Sequence | SEQ ID NO: 916 | 191 aa | MW at 20220.7kD |

LHIKNLPAQAADTCPEVKVVGLEGSDKLTILRGCPGLPGAPGPKGEAGVIGERGERGLPGAPGKAGPV
GPKGDRGEKGMRGEKGDAGQSQSCATGPRNCKDLLDRGYFLSGWHTIYLPDCRPLTVLCDMDTDGGGW
TVFQGAWWYADCHASNLNGLYLMGPHESYANGINWSAAKGYKYSYKVSEMKVRPA

| | | |
|---|---|---|
| NOV39k, CG56653-04 | SEQ ID NO: 917 | 1104 bp |

| | | |
|---|---|---|
| DNA Sequence | ORF Start: ATG at 16 | ORF Stop: TAG at 883 |

CTGAGTGGAGCCACCATGGCCCGGGGGCTCGCTGTCCTGCTAGTCTTGTTCCTGCATATCACGAACCT
GCCTGCCCAGGCTGCGGACACATGTCCAGAGGTGAAGGTGGTGGGCCTGGAGGGCTCTGACAAGCTCA
CCATTCTCCGAGGCTGCCCGGGGCTGCCCGGGGCCCCAGGACCAAAGGGAGAGGCAGGTGTCATTGGA
GAGAAAGGAGACGCTGGGCAGTCTCAGTCGTGTGCGACAGGCCCACGCAACTGCAAGGACCTGCTAGA
CCGAGGGTATTTCCTGAGCGGCTGGCACACCATCTACCTGCCCGACTGCCGGCCCCTTACTGTGCTCT
GTGACATGGATACGGACGGAGGGGGCTGGACCGTTTTCCAGCGGAGGATGGATGGCTCTGTGGACTTC
TATCGGGACTGGGCCGCATACAAGCAGGGCTTCGGCAGTCAGCTGGGGGAGTTCTGGCTGGGGAATGA
CAACATCCACGCCCTGACTGCCCAGGGAAGCAGCGAGCTCCGTGTAGACCTGGTGGACTTTGAGGGCA
ACCACCAGTTTGCTAAGTACAAATCATTCAAGGTGGCTGACGAGGCAGAGAAGTACAAGCTGGTACTG
GGAGCCTTTGTCGGGGGCAGTGCGGGTAATTCTCTAACGGGCCACAACAACAACTTCTTCTCCACCAA
AGACCAAGACAATGATGTGAGTTCTTCGAATTGTGCTGAGAAGTTCCAGGGAGCCTGGTGGTACGCCG
ACTGTCATGCTTCAAACCTCAATGGTCTCTACCTCATGGGACCCCATGAGAGCTATGCCAATGGTATC
AACTGGAGTGCGGCGAAGGGGTACAAATATAGCTACAAGGTGTCAGAGATGAAGGTGCGGCCCGCCTA
AAGTCACCCCATTTCCCCAGCCAGACACACTCCCATGACGCCCACAGCTGCCCCTTTGCCCCCAGCTC
AGTCAAGCCGCCACATGCCCACAACCTCACCAGAGGGAGAATTATGTTTCTAAATATGTTTACTTTGG
GACAGAAAAAAAAAAA

NOV39k, CG56653-04

| | | | |
|---|---|---|---|
| Protein Sequence | SEQ ID NO: 918 | 289 aa | MW at 31404.9kD |

MARGLAVLLVLFLHITNLPAQAADTCPEVKVVGLEGSDKLTILRGCPGLPGAPGPKGEAGVIGEKGDA
AYKQGFGSQLGEFWLGNDNIHALTAQGSSELRVDLVDFEGHQFAKYKSFKVADEAEKYKLVLGAFVG
GSAGNSLTGHNNNFFSTKDQDNDVSSSNCAEKFQGAWWYADCHASNLNGLYLMGPHESYANGINWSAA
KGYKYSYKVSEMKVRPA

| | | |
|---|---|---|
| NOV39l, CG56653-05 | SEQ ID NO: 919 | 900 bp |

| | | |
|---|---|---|
| DNA Sequence | ORF Start: at 7 | ORF Stop: at 895 |

GGATCCGCGGACACATGTCCAGAGGTGAAGGTGGTGGGCCTGGAGGGCTCTGACAAGCTCACCATTCT
CCGAGGCTGCCCGGGGCTGCCCGGGGCCCCAGGGCCAAAGGGAGAGGCAGGTGTCATTGGAGAGAGAG
GAGAACGCGGTCTCCCTGGAGCCCCTGGAAAGGCAGGACCAGTGGGGCCCAAAGGAGACCGAGGAGAG
AAGGGGATGCGTGGAGAGAAAGGAGACGCTGGGCAGTCTCAGTCGTGTGCGACAGGCCCACGCAACTG
CAAGGACCTGCTAGACCGGGGGTATTTCCTGAGCGGCTGGCACACCATCTACCTGCCCGACTGCCGGC
CCCTGACTGTGCTCTGTGACATGGACACGGACGGAGGGGGCTGGACCGTTTTCCAGCGGAGGATGGAT
GGCTCTGTGGACTTCTATCGGGACTGGGCCGCATACAAGCAGGGCTTCGGCAGTCAGCTGGGGGAGTT
CTGGCTGGGGAACGACAACATCCACGCCCTGACTGCCCAGGGAAGCAGCGAGCTCCGTGTAGACCTGG
TACAAGCTGGTACTGGGAGCCTTTGTCGGGGGCAGTGCGGGTAATTCTCTAACGGGCCACAACAACAA
CCTGGTGGTACGCCGACTGTCATGCTTCAAACCTCAATGGTCTCTACCTCATGGGACCCCATGAGAGC
TATGCCAATGGTATCAACTGGAGTGCGGCGAAGGGGTACAAATATAGCTACAAGGTGTCAGAGATGAA
GGGGCCCGCCCTCGAG

NOV39l, CG56653-05

| | | | |
|---|---|---|---|
| Protein Sequence | SEQ ID NO: 920 | 296 aa | MW at 31819.1kD |

ADTCPEVKVVGLEGSDKLTILRGCPGLPGAPGPKGEAGVIGERGERGLPGAPGKAGPVGPKGDRGEKG
MRGEKGDAGQSQSCATGPRNCKDLLDRGYFLSGWHTIYLPDCRPLTVLCDMDTDGGGWTVFQRRMDGS
VDFYRDWAAYKQGFGSQLGEFWLGNDNIHALTAQGSSELRVDLVDFEGNHQFAKYKSFKVADEAEKYK
LVLGAFVGGSAGNSLTGHNNNFFSTKDQDNDVSSSNCAEKFQGAWWYADCHASNLNGLYLMGPHESYA
NGINWSAAKGYKYSYKVSEMKGPA

| | | |
|---|---|---|
| NOV39m, CG56653-06 | SEQ ID NO: 921 | 988 bp |

| | | |
|---|---|---|
| DNA Sequence | ORF Start: ATG at 56 | ORF Stop: TAG at 905 |

GTTTCCTCTGCCCTGTTAGAGCTGGGGGACTCTTCAGAGTCAAAGGCCAGAGAGCATGGAGCTGAGTG
GAGCCACCATGGCCCGGGGGCTCGCTGTCCTGCTAGTCTTGTTCCTGCATATCAAGAACCTGCCTGCC
CAGGCTGCGGACACATGTCCAGAGGTGAAGGTGGTGGGCCTGGAGGGCTCTGACAAGCTCACCATTCT
CCGAGGCTGCCCGGGGCTGCCCGGGGCCCCAGGGCCAAAGGGAGAGGCAGGTGTCATTGGAGAGAGAG
GAGAACGCGGTCTCCCTGGAGCCCCTGGAAAGGCAGGACCAGTGGGGCCCAAAGGAGACCGAGGAGAG
AAGGGGATGCGTGGAGAGAAAGGAGACGCTGGGCAGTCTCAGTCGTGTGCGACAGGTCCACGCAACTG
CAAGGACCTGCTAGACCGGGGGTATTTCCTGAGCGGCTGGCACACCATCTACCTGCCCGACTGCCGGC
CCCTGACTGTGCTCTGTGACATGGACACGGACGGAGGGGGCTGGACCGTTTTCCAGCGGAGGATGGAT
GGCTCTGTGGACTTTGAGGGCAACCACCAGTTTGCTAAGTACAAATCATTCAAGGTGGCTGACGAGGC
AGAGAAGTACAAGCTGGTACTGGGAGCCTTTGTCGGGGGCAGTGCGGGTAATTCTCTAACGGGCCACA
ACAACAACTTCTTCTCCACCAAAGACCAAGACAATGATGTGAGTTCTTCGAATTGTGCTGAGAAGTTC
CAAGGAGCCTGGTGGTACGCCGACTGTCATGCTTCAAACCTCAATGGTCTCTACCTCATGGGACCCCA
TGAGAGCTATGCCAATGGTATCAACTGCAGTGCGGCGAAGGGGTACAAATATAGCTACAAGGTGTCAG
AGATGAAGGTGCGGCCCGCCTAGACGGGCCAGGACCCCTCCACATGCACCTGCTAGTGGGGAGGCCAC
ACCCACAAGCGCTGCGTCGTGGAAGTCACCCATTTC

NOV39m, CG56653-06

| | | | |
|---|---|---|---|
| Protein Sequence | SEQ ID NO: 922 | 283 aa | MW at 30136.7kD |

MELSGATMARGLAVLLVLFLHIKNLPAQAADTCPEVKVVGLEGSDKLTILRGCPGLPGAPGPKGEAGV
IGERGERGLPGAPGKAGPVGPKGDRGEKGMRGEKGDAGQSQSCATGPRNCKDLLDRGYFLSGWHTIYL
PDCRPLTVLCDMDTDGGGWTVFQRRMDGSVDFEGNHQFAKYKSFKVADEAEKYKLVLGAFVGGSAGNS
LTGHNNNFFSTKDQDNDVSSSNCAEKFQGAWWYADCHASNLNGLYLMGPHESYANGINCSAAKGYKYS
YKVSEMKVRPA

| | | |
|---|---|---|
| NOV39n, CG56653-07 | SEQ ID NO: 923 | 970 bp |

| | | |
|---|---|---|
| DNA Sequence | ORF Start: at 2 | ORF Stop: TAG at 950 |

GGGGCTCGCTGTCATGCTAGTCTTGTTCCTGCATATCAAGAACCTGCCTGCCCAGGCTGCGGACACAT
GTCCAGAGGTGAAGGTGGTGGGCCTGGAGGGCTCTGACAAGCTCACCATTCTCCGAGGCTGCCCGGGG
CTGCCCGGGGCCCCAGGGCCAAAGGGAGAGGCAGGTGTCATTGGAGAGAGAGGAGAACGCGGTCTCCC
TGGAGCCCCTGGAAAGGCAGGACCAGTGGGGCCCAAAGGAGACCGAGGAGAGAAGGGGATGCGTGGAG
AGAAAGGAGACGCTGGGCAGTCTCAGTCGTGTGCGACAGGCCCACGCAACTGCAAGGACCTGCTAGAC
CGGGGGTATTTCCTGAGCGGCTGGCACACCATCTACCTGCCCGACTGCCGGCCCCTGACTGTGCTCTG
TGACATGGACACGGACGGAGGGGGCTGGACCGTTTTCCAGCGGAGGATGGATGGCTCTGTGGACTTCT
ATCGGGACTGGGCCGCATACAAGCAGGGCTTCGGCAGTCAGCTGGGGGAGTTCTGGCTGGGGAATGAC
AACATCCACGCCTTGACTGCCCAGGGAAGCAGCGAGCTCCGTGTAGACCTGGTGGACTTTGAGGGCAA
CCACCAGTTTGCTAAGTACAAATCATTCAAGGTGGCTGACGAGGCAGAGAAGTACAAGCTGGTACTGG
GAGCCTTTGTCGGGGGCAGTGCGGGTAATTCTCTAACGGGCCACAACAACAACTTCTTCTCCACCAAA
GACCAAGACAATGATGTGAGTTCTTCGAATTGTGCTGAGAAGTTCCAAGGAGCCTGGTGGTACGCCGA
CTGTCATGCTTCAAACCTCAATGGTCTCTACCTCATGGGACCCCATGAGAGCTATGCCAATGGTATCA
ACTGGAGTGCGGCGAAGGGGTACAAATATAGCTACAAGGTGTCAGAGATGAAGGTGCGGCCCGCCTAG
ACGGGCCAGGACCCCTCC

NOV39n, CG56653-07

| | | | |
|---|---|---|---|
| Protein Sequence | SEQ ID NO: 924 | 316 aa | MW at 34047.9kD |

GLAVMLVLFLHIKNLPAQAADTCPEVKVVGLEGSDKLTTLRGCPGLPGAPGPKGEAGVIGERGERGLP
DMDTDGGGWTVFQRRMDGSVDFYRDWAAYKQGFGSQLGEFWLGNDNIHALTAQGSSELRVDLVDFEGN
HQFAKYKSFKVADEAEKYKLVLGAFVGGSAGNSLTGHNNNFFSTKDQDNDVSSSNCAEKFQGAWWYAD
CHASNLNGLYLMGPHESYANGINWSAAKGYKYSYKVSEMKVRPA

| | | |
|---|---|---|
| NOV39o, CG56653-09 | SEQ ID NO: 925 | 1144 bp |

| | | |
|---|---|---|
| DNA Sequence | ORF Start: ATG at 183 | ORF Stop: TAG at 981 |

TTTTAGGTCTGTTTGTCGTAGGCAGATGGAGCTTGTTATAATTATGCCTCATAGGGATAGTACAAGGA
GCCCTGTTAGAGCTGGGGGACTCTTCAGAGTCAAAGGCCAGAGAGCATGGAGCTGAGTGGAGCCACCA
TGGCCCGGGGGCTCGCTGTCCTGCTAGTCTTGTTCCTGCATATCAAGAACCTGCCTGCCCAGGCTGCG
GACACATGTCCAGAGGTGAAGGTGGTGGGCCTGGAGGGCTCTGACAAGCTCACCATTCTCCGAGGCTG
CCCGGGGCTGCCCGGGGCCCCAGGGCCAAAGGGAGAGGCAGGTGTCATTGGAGAGAGAGGAGAACGCG
GTCTCCCTGGAGCCCCTGGAAAGGCAGGACCAGTGGGGCCCAAAGGAGACCGAGGAGAGAAGGGGATG
CGTGGAGAGAAAGGAGACGCTGGGCAGTCTCAGTCGTGTGCGACAGGCCCACGCAACTGCAAGGACCT
GCTAGACCGGGGGTATTTCCTGAGCGGCTGGCACACCATCTACCTGCCCGACTGCCGGCCCCTGACTG
TGCTCTGTGACATGGACACGGACGGAGGGGGCTGGACCGTTTTCCAGCGGAGGATGGATGGCTCTGTG
GACTTCTATCGGGACTGGGCCGCATACAAGCAGGGCTTCGGCAGTCAGCTGGGGGGTAATTCTCTAAC
GGGCCACAACAACAACTTCTTCTCCACCAAAGACCAAGACAATGATGTGAGTTCTTCGAATTGTGCTG
AGAAGTTCCAAGGAGCCTGGTGGTACGCCGACTGTCATGCTTCAAACCTCAATGGTCTCTACCTCATG
GGACCCCATGAGAGCTATGCCAATGGTATCAACTGGAGTGCGGCGAAGGGGTACAAATATAGCTACAA
GGTGTCAGAGATGAAGGTGCGGCCCGCCTAQACGGGCCAGGACCCCTCCACATGCACCTGCTAGTGGG
GAGGCCACACCCACAAGCGCTGCGTCGTGGAAGTCACCCCATTTCCCCAGCCAGACACACTCCCATGA
CGCCCACAGCTGCCCCTTTGCCCCCAGCTCAGTCAAGCCGCCACATGCCCACAACC

NOV39o, CG56653-09

| | | | |
|---|---|---|---|
| Protein Sequence | SEQ ID NO: 926 | 266 aa | MW at 28476.8kD |

MELSGATMARGLAVLLVLFLHIKNLPAQAADTCPEVKVVGLEGSDKLTILRGCPGLPGAPGPKGEAGV
IGERGERGLPGAPGKAGPVGPKGDRGEKGMRGEKGDAGQSQSCATGPRNCKDLLDRGYFLSGWHTIYL
PDCRPLTVLCDMDTDGGGWTVFQRRMDGSVDFYRDWAAYKQGFGSQLGGNSLTGHNNNFFSTKDQDND
VSSSNCAEKFQGAWWYADCHASNLNGLYLMGPHESYANGINWSAAKGYKYSYKVSEMKVRPA

| | | |
|---|---|---|
| NOV39p, CG56653-10 | SEQ ID NO: 927 | 651 bp |

| | | |
|---|---|---|
| DNA Sequence | ORF Start: at 7 | ORF Stop: at 646 |

GGATCCGGCCCACGCAACTGCAAGGACCTGCTAGACCGAGGGCACTTCCTGAGCGGCTGGCACACCAT
CTACCTGCCCGACTGCCGGCCCCTGACTGTGCTCTGTGACATGGACACGGACGGAGGGGGCTGGACCG
TTTTCCAGCGGAGGATGGATGGCTCTGTGGACTTCTATCGGGACTGGGCCGCATACAAGCAGGGCTTC
GGCAGTCAGCTGGGGGAGTTCTGGCTGGGGAACGACAACATCCACGCCCTGACTGCCCAGGGAAGCAG
CGAGCTCCGTGTAGACCTGGTGGACTTTGAGGGCAACCACCAGTTTGCTAAGTACAAATCATTCAAGG
TGGCTGACGAGGCAGAGAAGTACAAGCTGGTACTGGGAGCCTTTGTCGGGGGCAGTGCGGGTAATTCT
CTAACGGGCCACAACAACAACTTCTTCTCCACCAAAGACCAAGACAATGATGTGAGTTCTTCGAATTG
TGCTGAGAAGTTCCAAGGAGCCTGGTGGTACGCCGACTGTCATGCTTCAAACCTCAATGGTCTCTACC
TCATGGGACCCCATGAGAGCTATGCCAATGGTATCAACTGGAGTGCGGCGAAGGGGTACAAATATAGC
TACAAGGTGTCAGAGATGAAGGTGCGGCCCGCCCTCGAG

NOV39p, CG56653-10

| | | | |
|---|---|---|---|
| Protein Sequence | SEQ ID NO: 928 | 213 aa | MW at 23830.2kD |

GPRNCKDLLDRGHFLSGWHTIYLPDCRPLTVLCDMDTDGGGWTVFQRRMDGSVDFYRDWAAYKQGFGS
QLGEFWLGNDNIHALTAQGSSELRVDLVDFEGNHQFAKYKSFKVADEAEKYKLVLGAFVGGSAGNSLT
GHNNNFFSTKDQDNDVSSSNCAEKFQGAWWYADCHASNLNGLYLMGPHESYANGINWSAAKGYKYSYK
VSEMKVRPA

| | | |
|---|---|---|
| NOV39q, CG56653-11 | SEQ ID NO: 929 | 1045 bp |

| | | |
|---|---|---|
| DNA Sequence | ORF Start: ATG at 38 | ORF Stop: TAG at 1016 |

GAGCTGGGGGACTCTTCAGAGTCAAAGGCCAGAGAGCATGGAGCTGAGTGGAGCCACCATGGCCCGGG
GGCTCGCTGTCCTGCTAGTCTTGTTCCTGCATATCAAGAACCTGCCTGCCCAGGCTGCGGACACATGT
CCAGAGGTGAAGGTGGTGGGCCTGGAGGGCTCTGACAAGCTCACCATTCTCCGAGGCTGCCCGGGGCT
GCCCGGGGCCCCAGGGCCAAAGGGAGAGGCAGGTGTCATTGGAGAGAGAGGAGAACGCGGTCTCCCTG
GAGCCCCTGGAAAGGCAGGACCAGTGGGGCCCAAAGGAGACCGAGGAGAGAAGGGGATGCGTGGAGAG
AAAGGAGACGCTGGGCAGTCTCAGTCGTGTGCGACAGGCCCACGCAACTGCAAGGACCTGCTAGACCG
GGGGTATTTCCTGAGCGGCTGGCACACCATCTACCTGCCCGACTGCCGGCCCCTGACTGTGCTCTGTG
ACATGGACACGGACGGAGGGGGCTGGACCGTTTTCCAGCGGAGGATGGATGGCTCTGTGGACTTCTAT
CGGGACTGGGCCGCATACAAGCAGGGCTTCGGCAGTCAGCTGGGGGAGTTCTGGCTGGGGAACGACAA
CATCCACGCCCTGACTGCCCAGGGAAGCAGCGAGCTCCGTGTAGACCTGGTGGACTTTGAGGGCAACC
ACCAGTTTGCTAAGTACAAATCATTCAAGGTGGCTGACGAGGCAGAGAAGTACAAGCTGGTACTGGGA
GCCTTTGTCGGGGGCAGTGCGGGTAATTCTCTAACGGGCCACAACAACAACTTCTTCTCCACCAAAGA
CCAAGACAATGATGTGAGTTCTTCGAATTGTGCTGAGAAGTTCCAGGGAGCCTGGTGGTACGCCGACT
GTCATGCTTCAAACCTCAATGGTCTCTACCTCATGGGACCCCATGAGAGCTATGCCAATGGTATCAAC
TGGAGTGCGGCGAAGGGGTACAAATATAGCTACAAGGTGTCAGAGATGAAGGTGCGGCCCGCCTAGAC
GGGCCAGGACCCCTCCACATGCACC

NOV39q, CG56653-11

| | | | |
|---|---|---|---|
| Protein Sequence | SEQ ID NO: 930 | 326 aa | MW at 35078.1kD |

MELSGATMARGLAVLLVLFLHIKNLPAQAADTCPEVKVVGLEGSDKLTILRGCPGLPGAPGPKGEAGV
IGERGERGLPGAPGKAGPVGPKGDRGEKGMRGEKGDAGQSQSCATGPRNCKDLLDRGYFLSGWHTIYL
PDCRPLTVLCDMDTDGGGWTVFQRRMDGSVDFYRDWAAYKQGFGSQLGEFWLGNDNIHALTAQGSSEL
RVDLVDFEGNHQFAKYKSFKVADEAEKYKLVLGAFVGGSAGNSLTGHNNNFFSTKDQDNDVSSSNCAE
KFQGAWWYADCHASNLNGLYLMGPHESYANGINWSAAKGYKYSYKVSEMKVRPA

| | | |
|---|---|---|
| NOV39r, CG56653-12 | SEQ ID NO: 931 | 972 bp |

| | | |
|---|---|---|
| DNA Sequence | ORF Start: ATG at 10 | ORF Stop: at 967 |

GGATCCACCATGGCCCGGGGGCTCGCTGTCCTGCTAGTCTTGTTCCTGCATATCAAGAACCTGCCTGC
CCAGGCTGCGGACACATGTCCAGAGGTGAAGGTGGTGGGCCTGGAGGGCTCTGACAAGCTCACCATTC
TCCGAGGCTGCCCGGGGCTGCCCGGGGCCCCAGGGCCAAAGGGAGAGGCAGGTGTCATTGGAGAGAGA
GGAGAACGCGGTCTCCCTGGAGCCCCTGGAAAGGCAGGACCAGTGGGGCCCAAAGGAGACCGAGGAGA
GAAGGGGATGCGTGGAGAGAAAGGAGACGCTGGGCAGTCTCAGTCGTGTGCGACAGGCCCACGCAACT
GCAAGGACCTGCTAGACCGGGGGTATTTCCTGAGCGGCTGGCACACCATCTACCTGCCCGACTGCCGG
CCCCTGACTGTGCTCTGTGACATGGACACGGACGGAGGGGGCTGGACCGTTTTCCAGCGGAGGATGGA
TGGCTCTGTGGACTTCTATCGGGACTGGGCCGCATACAAGCAGGGCTTCGGCAGTCAGCTGGGGGAGT
TCTGGCTGGGGAACGACAACATCCACGCCCTGACTGCCCAGGGAAGCAGCGAGCTCCGTGTAGACCTG
GTGGACTTTGAGGGCAACCACCAGTTTGCTAAGTACAAATCATTCAAGGTGGCTGACGAGGCAGAGAA
GTACAAGCTGGTACTGGGAGCCTTTGTCGGGGGCAGTGCGGGTAATTCTCTAACGGGCCACAACAACA
ACTTCTTCTCCACCAAAGACCAAGACAATGATGTGAGTTCTTCGAATTGTGCTGAGAAGTTCCAGGGA
GCCTGGTGGTACGCCGACTGTCATGCTTCAAACCTCAATGGTCTCTACCTCATGGGACCCCATGAGAG
CTATGCCAATGGTATCAACTGGAGTGCGGCGAAGGGGTACAAATATAGCTACAAGGTGTCAGAGATGA
AGGTGCGGCCCGCCCTCGAG

NOV39r, CG56653-12

| | | | |
|---|---|---|---|
| Protein Sequence | SEQ ID NO: 932 | 319 aa | MW at 34388.3kD |

MARGLAVLLVLFLHIKNLPAQAADTCPEVKVVGLEGSDKLTILRGCPGLPGAPGPKGEAGVIGERGER
GLPGAPGKAGPVGPKGDRGEKGMRGEKGDAGQSQSCATGPRNCKDLLDRGYFLSGWHTIYLPDCRPLT
VLCDMDTDGGGWTVFQRRMDGSVDFYRDWAAYKQGFGSQLGEFWLGNDNIHALTAQGSSELRVDLVDF
EGNHQFAKYKSFKVADEAEKYKLVLGAFVGGSAGNSLTGHNNNFFSTKDQDNDVSSSNCAEKFQGAWW
YADCHASNLNGLYLMGPHESYANGINWSAAKGYKYSYKVSEMKVRPA

[0579] A ClustalW comparison of the above protein sequences yields the following sequence alignment shown in Table 39B.

TABLE 39B
Comparison of the NOV39 protein sequences.

| | |
|---|---|
| NOV39a | MELSGATMARGLAVLLVLFLHIKNLPAQAADTCPEVKVVGLEGSDKLTILRGCPGLPGAP |
| NOV39b | ------------------------------------------------------------ |
| NOV39c | ------------------------------------------------------------ |
| NOV39d | ------------------------------------------------------------ |
| NOV39e | ------------------------------------------------------------ |
| NOV39f | ------------------------------------------------------------ |
| NOV39g | ------------------------------------------------------------ |
| NOV39h | -------MARGLAVLLVLFLHIKNLPAQAADTCPEVKVVGLEGSDKLTILRGCPGLPGAP |
| NOV39i | MELSGATMARGLAVLLVLFLHIKNLPAQAADTCPEVKVVGLEGSGKLTILRGCPGLPGAP |
| NOV39j | -------------------LHIKNLPAQAADTCPEVKVVGLEGSDKLTILRGCPGLPGAP |
| NOV39k | -------MARGLAVLLVLFLHITNLPAQAADTCPEVKVVGLEGSDKLTILRGCPGLPGAP |
| NOV39l | -----------------------------ADTCPEVKVVGLEGSDKLTILRGCPGLPGAP |
| NOV39m | MELSGATMARGLAVLLVLFLHIKNLPAQAADTCPEVKVVGLEGSDKLTILRGCPGLPGAP |
| NOV39n | ----------GLAVMLVLFLHIKNLPAQAADTCPEVKVVGLEGSDKLTTLRGCPGLPGAP |
| NOV39o | MELSGATMARGLAVLLVLFLHIKNLPAQAADTCPEVKVVGLEGSDKLTILRGCPGLPGAP |
| NOV39p | ------------------------------------------------------------ |
| NOV39q | MELSGATMARGLAVLLVLFLHIKNLPAQAADTCPEVKVVGLEGSDKLTILRGCPGLPGAP |
| NOV39r | -------MARGLAVLLVLFLHIKNLPAQAADTCPEVKVVGLEGSDKLTILRGCPGLPGAP |
| NOV39a | GPKGEAGVIGERGERGLPGAPGKAGPVGPKGDRGEKGMRGEKGDAGQSQSCATGPRNCKD |
| NOV39b | ---------------------------------------------------GSGPRNCKD |
| NOV39c | ---------------------------------------------------GSGPRNCKD |
| NOV39d | ---------------------------------------------------GSGPRNCKD |
| NOV39e | ---------------------------------------------------GSGPRNCKD |
| NOV39f | ---------------------------------------------------GSGPRNCKD |
| NOV39g | ---------------------------------------------------GSGPRNCKD |
| NOV39h | GPKGEAGVIGERGERGLPGAPGKAGPVGPKGDRGEKGMRGEKGDAGQSQSCATGPRNCKD |
| NOV39i | GPKGEAGVIGERG------------------DRGEKGMRGEKGDAGQSQSCATGPRNCKD |
| NOV39j | GPKGEAGVIGERGERGLPGAPGKAGPVGPKGDRGEKGMRGEKGDAGQSQSCATGPRNCKD |
| NOV39k | GPKGEAGVIGE------------------------------KGDAGQSQSCATGPRNCKD |
| NOV39l | GPKGEAGVIGERGERGLPGAPGKAGPVGPKGDRGEKGMRGEKGDAGQSQSCATGPRNCKD |
| NOV39m | GPKGEAGVIGERGERGLPGAPGKAGPVGPKGDRGEKGMRGEKGDAGQSQSCATGPRNCKD |
| NOV39n | GPKGEAGVIGERGERGLPGAPGKAGPVGPKGDRGEKGMRGEKGDAGQSQSCATGPRNCKD |
| NOV39o | GPKGEAGVIGERGERGLPGAPGKAGPVGPKGDRGEKGMRGEKGDAGQSQSCATGPRNCKD |
| NOV39p | -----------------------------------------------------GPRNCKD |
| NOV39q | GPKGEAGVIGERGERGLPGAPGKAGPVGPKGDRGEKGMRGEKGDAGQSQSCATGPRNCKD |
| NOV39r | GPKGEAGVIGERGERGLPGAPGKAGPVGPKGDRGEKGMRGEKGDAGQSQSCATGPRNCKD |
| NOV39a | LLDRGYFLSGWHNIYLPDCRPLTVLCDMDTDGGGWTVFQRRMDGSVDFYRDWAAYKQGFG |
| NOV39b | LLDRGYFLSGWHTIYLPDCRPLTVLCDMDTDGGGWTVFQRRMDGSVDFYRDWAAYKQGFG |
| NOV39c | LLDRGYFLSGWHTIYLPDCRPLTVLCDMDTDGGGWTVFQRRMDGSVDFYRDWAAYKQGFG |
| NOV39d | LLDRGYFLSGWHTIYLPDCRPLTVLCDMDTDGGGWTGFQRRMDGSVDFYRDWAAYKQGFG |
| NOV39e | LLDRGYFLSGWHTIYLPDCRPLTVLCDMDTDGGGWTVFQRRMDGSVDFYRDWAAYKQGFG |
| NOV39f | LLDRGYFLSGWHTIYLPDCRPLTVLCDMDTDGGGWTVFQRRMDGSVDFYRDWAAYKQGFG |
| NOV39g | LLDRGHFLSGWHTIYLPDCRPLTVLCDMDTDGGGWTVFQRRMDGSVDFYRDWAAYKQGFG |
| NOV39h | LLDRGYFLSGWHTIYLPDCRPLTVLCDMDTDGGGWTVFQRRMDGSVDFYRDWAAYKQGFG |
| NOV39i | LLDRGYFLSGWHTIYLPDCRPLTVLCDMDTDGGGWTVFQRRMDGSVDFYRDWAAYKQGFG |
| NOV39j | LLDRGYFLSGWHTIYLPDCRPLTVLCDMDTDGGGWTVFQ--------------------- |
| NOV39k | LLDRGYFLSGWHTIYLPDCRPLTVLCDMDTDGGGWTVFQRRMDGSVDFYRDWAAYKQGFG |
| NOV39l | LLDRGYFLSGWHTIYLPDCRPLTVLCDMDTDGGGWTVFQRRMDGSVDFYRDWAAYKQGFG |
| NOV39m | LLDRGYFLSGWHTIYLPDCRPLTVLCDMDTDGGGWTVFQRRMDGSVDFEGNHQFAKYKSF |
| NOV39n | LLDRGYFLSGWHTIYLPDCRPLTVLCDMDTDGGGWTVFQRRMDGSVDFYRDWAAYKQGFG |
| NOV39o | LLDRGYFLSGWHTIYLPDCRPLTVLCDMDTDGGGWTVFQRRMDGSVDFY----------- |
| NOV39p | LLDRGHFLSGWHTIYLPDCRPLTVLCDMDTDGGGWTVFQRRMDGSVDFYRDWAAYKQGFG |
| NOV39q | LLDRGYFLSGWHTIYLPDCRPLTVLCDMDTDGGGWTVFQRRMDGSVDFYRDWAAYKQGFG |
| NOV39r | LLDRGYFLSGWHTIYLPDCRPLTVLCDMDTDGGGWTVFQRRMDGSVDFYRDWAAYKQGFG |
| NOV39a | SQLGEFWLGNDNIHALTAQGSSELRVDLVDFEGNHQFAKYKSFKVADEAEKYKLVLGAFV |
| NOV39b | SQLGEFWLGNDNIHALTAQGSSELRVDLVDFEGNHQFAKYKSFKVADEAEKYKLVLGTFV |
| NOV39c | SQLGEFWLGNDNIHALTAQGSSELRVDLVDFEGNHQFAKYKSFKVADEAEKYKLVLGAFV |
| NOV39d | SQLGEFWLGNDNIHALTAQGSSELRVDLVDFEGNHQFAKYKSFKVADEAEKYKLVLGAFV |
| NOV39e | SRLGEFWLGNDNIHALTAQGSSELRVDLVDFEGNHQFAKYKSFKVADEAEKYKLVLGAFV |
| NOV39f | SQLGEFWLGNDDIHALTAQGSSELRVDLVDFEGNHQFAKYKSFKVADEAEKYKLVLGAFV |
| NOV39g | SQLGEFWLGNDNIHALTAQGSSELRVDLVDFEGNHQFAKYKSFKVADEAEKYKLVLGAFV |
| NOV39h | SQLGEFWLGNDNIHALTAQGSSELRVDLVDFEGNHQFAKYKSFKVADEAEKYKLVLGAFV |
| NOV39i | SQLGEFWLGNDNIHALTAQGSSELRVDLVDFEGNHQFAKYKSFKVADEAEKYKLVLGAFV |
| NOV39j | ------------------------------------------------------------ |
| NOV39k | SQLGEFWLGNDNIHALTAQGSSELRVDLVDFEGNHQFAKYKSFKVADEAEKYKLVLGAFV |
| NOV39l | SQLGEFWLGNDNIHALTAQGSSELRVDLVDFEGNHQFAKYKSFKVADEAEKYKLVLGAFV |
| NOV39m | KVADEAEKYKL------------------------------------V-------LGAFV |
| NOV39n | SQLGEFWLGNDNIHALTAQGSSELRVDLVDFEGNHQFAKYKSFKVADEAEKYKLVLGAFV |
| NOV39o | ------RDWAA------------------------------------Y-------KQGFG |
| NOV39p | SQLGEFWLGNDNIHALTAQGSSELRVDLVDFEGNHQFAKYKSFKVADEAEKYKLVLGAFV |
| NOV39q | SQLGEFWLGNDNIHALTAQGSSELRVDLVDFEGNHQFAKYKSFKVADEAEKYKLVLGAFV |
| NOV39r | SQLGEFWLGNDNIHALTAQGSSELRVDLVDFEGNHQFAKYKSFKVADEAEKYKLVLGAFV |
| NOV39a | GGSAGNSLTGHNNNFFSTKDQDNDVSSSNCAEKFQGAWWYADCHASSLNGLYLMGPHESY |
| NOV39b | GGSAGNSLTGHNNNFFSTKDQDNDVSSSNCAEKFQGAWWYADCHASNLNGLYLMGPHESY |
| NOV39c | GGSAGNSLTGHNNNFFSTKDQDNDVSSSNCAEKFQGAWWYADCHASNLNGLYLMGPHESY |
| NOV39d | GGSAGNSLTGHNNNFFSTKDQDNDVSSSNCAEKFQGAWWYADCHASNLNGLYLMGPHESY |
| NOV39e | GGSAGNSLTGHNNNFFSTKDQDNDVSSSNCAEKFQGAWWYADCHASNLNGLYLMGPHESY |
| NOV39f | GGSAGNSLTGHNNNFFSTKDQDNDVSSSNCAEKFQGAWWYADCHASNLNGLYLMGPHESY |
| NOV39g | GGSAGNSLTGHNNNFFSTKDQDNDVSSSNCAEKFQGAWWYADCHASNLNGLYLMGPHESY |
| NOV39h | GGSAGNSLTGHNNNFFSTKDQDNDVSSSNCAEKFQGAWWYADCHASNLNGLYLMGPHESY |
| NOV39i | GGSAGNSLTGHNNNFFSTKDQDNDVSSSNCAEKFQGAWWYADCHASNLNGLYLMGPHESY |
| NOV39j | ----------------------------------GAWWYADCHASNLNGLYLMGPHESY |
| NOV39k | GGSAGNSLTGHNNNFFSTKDQDNDVSSSNCAEKFQGAWWYADCHASNLNGLYLMGPHESY |
| NOV39l | GGSAGNSLTGHNNNFFSTKDQDNDVSSSNCAEKFQGAWWYADCHASNLNGLYLMGPHESY |
| NOV39m | GGSAGNSLTGHNNNFFSTKDQDNDVSSSNCAEKFQGAWWYADCHASNLNGLYLMGPHESY |
| NOV39n | GGSAGNSLTGHNNNFFSTKDQDNDVSSSNCAEKFQGAWWYADCHASNLNGLYLMGPHESY |
| NOV39o | SQLGGNSLTGHNNNFFSTKDQDNDVSSSNCAEKFQGAWWYADCHASNLNGLYLMGPHESY |
| NOV39p | GGSAGNSLTGHNNNFFSTKDQDNDVSSSNCAEKFQGAWWYADCHASNLNGLYLMGPHESY |
| NOV39q | GGSAGNSLTGHNNNFFSTKDQDNDVSSSNCAEKFQGAWWYADCHASNLNGLYLMGPHESY |
| NOV39r | GGSAGNSLTGHNNNFFSTKDQDNDVSSSNCAEKFQGAWWYADCHASNLNGLYLMGPHESY |
| NOV39a | ANGINWSAAKGYKYSYKVSEMKVRPA-- |
| NOV39b | ANGINWSAAKGYKYSYKVSEMKVRPALE |
| NOV39c | ANGINWSAAKGYKYSYKVSEMKVRPALE |
| NOV39d | ANGINWSAAKGYKYSYKVSEMKVRPALE |
| NOV39e | ANGINWSAAKGYKYSYKVSEMKVRPALE |
| NOV39f | ANGINWSAAKGYKYSYKVSEMKVRPALE |
| NOV39g | ANGINWSAAKGYKYSYKVSEMKVRPALE |
| NOV39h | ANGINWSAAKGYKYSYKVSEMKVRPA-- |
| NOV39i | ANGINWSAAKGYKYSYKVSEMKVRPA-- |
| NOV39j | ANGINWSAAKGYKYSYKVSEMKVRPA-- |
| NOV39k | ANGINWSAAKGYKYSYKVSEMKVRPA-- |
| NOV39l | ANGINWSAAKGYKYSYKVSEMKGPA--- |
| NOV39m | ANGINCSAAKGYKYSYKVSEMKVRPA-- |
| NOV39n | ANGINWSAAKGYKYSYKVSEMKVRPA-- |
| NOV39o | ANGINWSAAKGYKYSYKVSEMKVRPA-- |
| NOV39p | ANGINWSAAKGYKYSYKVSEMKVRPA-- |
| NOV39q | ANGINWSAAKGYKYSYKVSEMKVRPA-- |
| NOV39r | ANGINWSAAKGYKYSYKVSEMKVRPA-- |
| NOV39a | (SEQ ID NO: 898) |
| NOV39b | (SEQ ID NO: 900) |
| NOV39c | (SEQ ID NO: 902) |
| NOV39d | (SEQ ID NO: 904) |
| NOV39e | (SEQ ID NO: 906) |
| NOV39f | (SEQ ID NO: 908) |
| NOV39g | (SEQ ID NO: 910) |
| NOV39h | (SEQ ID NO: 912) |
| NOV39i | (SEQ ID NO: 914) |
| NOV39j | (SEQ ID NO: 916) |
| NOV39k | (SEQ ID NO: 918) |
| NOV39l | (SEQ ID NO: 920) |
| NOV39m | (SEQ ID NO: 922) |
| NOV39n | (SEQ ID NO: 924) |
| NOV39o | (SEQ ID NO: 926) |
| NOV39p | (SEQ ID NO: 928) |
| NOV39q | (SEQ ID NO: 930) |
| NOV39r | (SEQ ID NO: 932) |

[0580] Further analysis of the NOV39a protein yielded the following properties shown in Table 39C.

TABLE 39C
Protein Sequence Properties NOV39a

| | |
|---|---|
| SignalP analysis: | Cleavage site between residues 30 and 31 |
| PSORT II analysis: | |

| PSG: | a new signal peptide prediction method | |
|---|---|---|
| | N-region: | length 10; pos. chg 1; neg. chg 1 |
| | H-region: | length 12; peak value 11.35 |
| | PSG score: | 6.95 |

| | |
|---|---|
| GvH: | von Heijne's method for signal seq. recognition |
| | GvH score (threshold: −2.1): −3.79 |
| | possible cleavage site: between 29 and 30 |

>>> Seems to have no N-terminal signal peptide

| ALOM: | Klein et al's method for TM region allocation | | |
|---|---|---|---|
| | Init position for calculation: 1 | | |
| | Tentative number of TMS(s) for the threshold 0.5: 1 | | |
| | Number of TMS(s) for threshold 0.5: 1 | | |
| | INTEGRAL | Likelihood = | Transmembrane 6-22 |
| | | −3.35 | |

| | |
|---|---|
| PERIPHERAL | Likelihood = 4.51 (at 234) |

| | |
|---|---|
| | ALOM score: −3.35 (number of TMSs: 1) |
| MTOP: | Prediction of membrane topology (Hartmann et al.) |
| | Center position for calculation: 13 |
| | Charge difference: −1.5 C(−0.5)-N(1.0) |
| | N >= C: N-terminal side will be inside |

>>> membrane topology: type 2 (cytoplasmic tail 1 to 6)

| MITDISC: | discrimination of mitochondrial targeting seq | | | |
|---|---|---|---|---|
| | R content: | 1 | Hyd Moment(75): | 3.15 |
| | Hyd Moment(95): | 5.83 | G content: | 2 |
| | D/E content: | 2 | S/T content: | 2 |

| | |
|---|---|
| | Score: −6.93 |
| Gavel: | prediction of cleavage sites for mitochondrial preseq |
| | R-2 motif at 20 ARG\|LA |

NUCDISC: discrimination of nuclear localization signals

| | |
|---|---|
| | pat4: none |
| | pat7: none |
| | bipartite: none |
| | content of basic residues: 10.7% |
| | NLS Score: −0.47 |
| KDEL: | ER retention motif in the C-terminus: none |

ER Membrane Retention Signals:

KKXX-like motif in the C-terminus: KVRP

SKL: peroxisomal targeting signal in the C-terminus: none
PTS2: 2nd peroxisomal targeting signal: none
VAC: possible vacuolar targeting motif: none
RNA-binding motif: none
Actinin-type actin-binding motif:

type 1: none
type 2: none

NMYR: N-myristoylation pattern: none
Prenylation motif: none
memYQRL: transport motif from cell surface to Golgi: none
Tyrosines in the tail: none
Dileucine motif in the tail: none
checking 63 PROSITE DNA binding motifs: none
checking 71 PROSITE ribosomal protein motifs: none
checking 33 PROSITE prokaryotic DNA binding motifs: none

| | |
|---|---|
| NNCN: | Reinhardt's method for Cytoplasmic/Nuclear discrimination |
| | Prediction: cytoplasmic |
| | Reliability: 89 |
| COIL: | Lupas's algorithm to detect coiled-coil regions |
| | total: 0 residues |

Final Results (k = 9/23):

```
34.8%: mitochondrial
30.4%: cytoplasmic
  8.7%: Golgi
  8.7%: endoplasmic reticulum
  4.3%: vacuolar
  4.3%: extracellular, including cell wall
  4.3%: nuclear
  4.3%: vesicles of secretory system
```

>> prediction for CG56653-08 is mit (k = 23)

[0581] A search of the NOV39a protein against the Geneseq database, a proprietary database that contains sequences published in patents and patent publication, yielded several homologous proteins shown in Table 39D.

TABLE 39D
Geneseq Results for NOV39a

| | | NOV39a | Identities/ | |
|---|---|---|---|---|
| | | Residues/ | Similarities for | |
| Geneseq | Protein/Organism/Length | Match | the Matched | Expect |
| Identifier | [Patent #, Date] | Residues | Region | Value |
| AAR94183 | Human 35 kDa opsonin protein P35 - | 1 . . . 326 | 248/326 (76%) | e−146 |
| | Homo sapiens, 313 aa. [JP08038182-A, | 1 . . . 313 | 266/326 (81%) | |
| | 13-FEB-1996] | | | |
| AAR30971 | TGF-beta-1 binding protein - Sus | 1 . . . 324 | 239/324 (73%) | e−145 |
| | scrofa, 324 aa. [WO9222319-A1, | 2 . . . 322 | 269/324 (82%) | |
| | 23-DEC-1992] | | | |
| AAR94179 | Human 35 kDa opsonin protein P35 | 28 . . . 326 | 235/299 (78%) | e−140 |
| | fragment (III) residues 26-313 - Homo | 2 . . . 288 | 252/299 (83%) | |
| | sapiens, 288 aa. [JP08038182-A, | | | |
| | 13-FEB-1996] | | | |
| AAR94178 | Human 35 kDa opsonin protein P35 | 109 . . . 326 | 180/218 (82%) | e−110 |
| | fragment (II) residues 96-313 - Homo | 1 . . . 218 | 194/218 (88%) | |
| | sapiens, 218 aa. [JP08038182-A, | | | |
| | 13-FEB-1996] | | | |
| AAB29658 | Human membrane-associated protein | 25 . . . 324 | 143/300 (47%) | 1e−77 |
| | HUMAP-15 - Homo sapiens, 299 aa. | 21 . . . 299 | 189/300 (62%) | |
| | [WO200065054-A2, 02-NOV-2000] | | | |

[0582] In a BLAST search of public sequence databases, the NOV39a protein was found to have homology to the proteins shown in the BLASTP data in Table 39E.

TABLE 39E
Public BLASTP Results for NOV39a

| | | NOV39a | Identities/ | | |
|---|---|---|---|---|---|
| Protein | | Residues/ | Similarities for | | |
| Accession | | Match | the Matched | | Expect |
| Number | Protein/Organism/Length | Residues | Portion | | Value |
| S61517 | ficolin-1 precursor - human, 326 aa. | 1 . . . 326 | 326/326 | (100%) | 0.0 |
| | | 1 . . . 326 | 326/326 | (100%) | |
| O00602 | Ficolin 1 precursor (Collagen/fibrinogen | 1 . . . 326 | 324/326 | (99%) | 0.0 |
| | domain-containing protein 1) (Ficolin-A) | 1 . . . 326 | 325/326 | (99%) | |
| | (Ficolin A) (M-Ficolin) - Homo sapiens | | | | |
| | (Human), 326 aa. | | | | |
| Q29042 | Ficolin - Sus scrofa (Pig), 326 aa. | 1 . . . 324 | 251/324 | (77%) | e−153 |
| | | 1 . . . 324 | 278/324 | (85%) | |
| P57756 | Ficolin 2 precursor (Collagen/fibrinogen | 8 . . . 324 | 242/317 | (76%) | e−150 |
| | domain-containing protein 2) (Ficolin-B) | 1 . . . 317 | 270/317 | (84%) | |
| | (Ficolin B) (Serum lectin p35) (EBP-37) | | | | |
| | (Hucolin) - Rattus norvegicus (Rat), 319 | | | | |
| | aa. | | | | |
| Q29041 | Ficolin - Sus scrofa (Pig), 323 aa. | 1 . . . 324 | 240/324 | (74%) | e−144 |
| | | 1 . . . 321 | 269/324 | (82%) | |

[0583] PFam analysis predicts that the NOV39a protein contains the domains shown in the Table 39F.

TABLE 39F
Domain Analysis of NOV39a

| | | Identities/ | | |
|---|---|---|---|---|
| | | Similarities | | |
| | NOV39a Match | for the | | Expect |
| Pfam Domain | Region | Matched Region | | Value |
| Collagen | 50 . . . 108 | 27/60 | (45%) | 3.1e−09 |
| | | 46/60 | (77%) | |
| fibrinogen_C | 114 . . . 326 | 116/272 | (43%) | 2.2e−91 |
| | | 159/272 | (58%) | |

### Example 40

[0584] The NOV40 clone was analyzed, and the nucleotide and encoded polypeptide sequences are shown in Table 40A.

TABLE 40A
NOV40 Sequence Analysis

| | | |
|---|---|---|
| NOV40a, CG56806-01 | SEQ ID NO: 933 | 1500 bp |

| | | |
|---|---|---|
| DNA Sequence | ORF Start: ATG at 74 | ORF Stop: TGA at 1490 |

CTTCCGAGCGGGCGCCCGTCCGCCCTGCCGCCGCCGCCGCCGCCGCTTCGCCTGCCGGCCTGAGAGCG
GGACCATGGATGAAAGGTTCAACAAGTGGCTGCTGACGCCGGTGCTCACTCTCCTCTTCGTGGTCATC
ATGTACCAGTACGTGTCCCCCTCCTGCACCAGCTCCTGCACCAACTTCGGGGAGCAGCCCCGCGCGGG
GGAGGCCGGCCCGCCCGCCGTCCCGGGTCCCGCCCGCCGGGCTCAGGCGCCGCCGGAGGAGTGGGAGC
AGAGGAGGCCCCAGTTGCCCCCGCCGCCCCGGGGGCCCCCCGAGGGACCTCGGGGGGCCGCGGCGCCG
GAGGAGGAGGACGAGGAGCCCGGAGACCCCCGGGAGGGGGAGGAAGAGGAGGAGGAAGACGAGCCGGA
CCCCGAGGCCCCGGAAAACGGCTCCCTGCCCCGATTCGTGCCGCGCTTCAACTTCAGCCTGAAGGACC
TGACCCGCTTCGTGGATTTCAACATCAAAGGGCGCGACGTGATCGTGTTCCTCCACATCCAGAAGACG
GGGGGCACCACTTTCGGCCGGCACCTGGTGAAGAACATCCGGCTGGAGCAGCCTTGTAGCTGCAAAGC
CCGGCTGGAGCTGCGGGCTGCACGCCGACTGGACGGAGCTCACCAACTGCGTGCCGGCCATCATGGAG
AAGAAGGACTGTCCCCGCAACCACAGCCACACCAGGAATTTCTATTACATCACAATGTTACGGGATCC
AGTGTCACGTTACCTGAGCGAGTGGAAACATGTCCAGAGAGGGGCCACTTGGAAAACCTCTCTTCATA
TGTGTGATGGAAGAAGCCCCACCCCAGATGAGCTGCCTACCTGCTACCCTGGGGATGACTGGTCTGGG
GTCAGCTTGCGGGAGTTTATGGATTGCACCTACAACCTGGCTAACAATCGCCAGGTGCGCATGCTGGC
TGACCTCAGCCTGGTGGGCTGCTATAACTTGACTTTCATGAACGAGAGTGAAAGAAACACCATCCTGT
TGCAGAGTGCAAAGAACAACCTGAAGAACATGGCCTTCTTTGGGCTCACTGAGTTCCAGAGGAAGACA
CAGTTTCTCTTTGAGAGAACATTCAACCTCAAGTTCATCTCCCCCTTCACACAGTTCAACATCACGCG
GGCTTCTAACGTGGAGATCAACGAGGGTGCCCGCCAACGCATTGAGGATCTAAACTTCCTGGACATGC
AGCTTTACGAGTATGCAAAAGATCTCTTCCAGCAGCGCTACCACCACACCAAGCAGCTAGAGCACCAG
AGGGACCGCCAGAAGCGGCGGGAGGAGCGGAGGCTGCAGCGAGAGCACAGGGACCACCAGTGGCCCAA
AGAAGATGGGGCTGCAGAAGGGACTGTCACCGAGGACTACAACAGCCAGGTGGTGAGATGGTGACCTC
CTGC

NOV40a, CG56806-01

| | | | |
|---|---|---|---|
| Protein Sequence | SEQ ID NO: 934 | 472 aa | MW at 54971.3kD |

MDERFNKWLLTPVLTLLFVVIMYQYVSPSCTSSCTNFGEQPRAGEAGPPAVPGPARRAQAPPEEWEQR
RPQLPPPPRGPPEGPRGAAAPEEEDEEPGDPREGEEEEEEDEPDPEAPENGSLPRFVPRFNFSLKDLT
RFVDFNIKGRDVIVFLHIQKTGGTTFGRHLVKNIRLEQPCSCKAGQKKCTCHRPGKKETWLFSRFSTG
WSCGLHADWTELTNCVPAIMEKKDCPRNHSHTRNFYYITMLRDPVSRYLSEWKHVQRGATWKTSLHMC
DGRSPTPDELPTCYPGDDWSGVSLREFMDCTYNLANNRQVRMLADLSLVGCYNLTFMNESERNTILLQ
SAKNNLKNMAFFGLTEFQRKTQFLFERTFNLKFISPFTQFNITRASNVEINEGARQRIEDLNFLDMQL
YEYAKDLFQQRYHHTKQLEHQRDRQKRREERRLQREHRDHQWPKEDGAAEGTVTEDYNSQVVRW

| | | |
|---|---|---|
| NOV40b, 248061366 | SEQ ID NO: 935 | 750 bp |

| | | |
|---|---|---|
| DNA Sequence | ORF Start: at 1 | ORF Stop: end of sequence |

CGCGGTACCTGTCCCCGCAACCACAGCCACACCAGGAATTTCTATTACATCACAATGTTACGGGATCC
AGTGTCACGTTACCTGAGCGAGTGGAAACATGTCCAGAGAGGGGCCACTTGGAAAACCTCTCTTCATA
TGTGTGATGGAAGAAGCCCCACCCCAGATGGGCTGCCTACCTGCTACCCTGGGGATGACTGGTCTGGG
GTCAGCTTGCGGGAGTTTATGGATTGCACCTACAACCTGGCTAACAATCGCCAGGTGCGCATGCTGGC
TGACCTCAGCCTGGTGGGCTGCTATAACTTGACTTTCATGAACGAGAGTGAAAGAAACACCATCCTGT
TGCAGAGTGCAAAGAACAACCTGAAGAACATGGCCTTCTTTGGGCTCACTGAGTTCCAGAGGAAGACA
CAGTTTCTCTTTGAGAGAACATTCAACCTCAAGTTCATCTCCCCCTTCACACAGTTCAACATCACGCG
GGCTTCTAACGTGGAGATCAACGAGGGTGCCCGCCAACGCATTGAGGATCTAAACTTCCTGGACATGC
AGCTTTACGAGTATGCAAAAGATCTCTTCCAGCAGCGCTACCACCACACCAAGCAGCTAGAGCACCAG
AGGGACCGCCAGAAGCGGCGGGAGGAGCGGAGGCTGCAGCGAGAGCACAGGGACCACCAGTGGCCCAA
AGAAGATGGGGCTGCAGAAGGGACTGTCACCGAGGACTACAACAGCCAGGTGGTGAGATGGCTCGAGG
CG

NOV40b, 248061366

| | | | |
|---|---|---|---|
| Protein Sequence | SEQ ID NO: 936 | 250 aa | MW at 29889.3kD |

RGTCPRNHSHTRNFYYITMLRDPVSRYLSEWKHVQRGATWKTSLHMCDGRSPTPDGLPTCYPGDDWSG
VSLREFMDCTYNLANNRQVRMLADLSLVGCYNLTFMNESERNTILLQSAKNNLKNMAFFGLTEFQRKT
QFLFERTFNLKFISPFTQFNITRASNVEINEGARQRIEDLNFLDMQLYEYAKDLFQQRYHHTKQLEHQ
RDRQKRREERRLQREHRDHQWPKEDGAAEGTVTEDYNSQVVRWLEA

| | | |
|---|---|---|
| NOV40c, 246837961 | SEQ ID NO: 937 | 750 bp |

| | | |
|---|---|---|
| DNA Sequence | ORF Start: at 1 | ORF Stop: end of sequence |

CGCGGTACCTGTCCCCGCAACCACAGCCACACCAGGAATTTCTATTACATCACAATGTTACGGGATCC
AGTGTCACGTTACCTGAGTGAGTGGAAACATGTCCAGAGAGGGGCCACTTGGAAAACCTCTCTTCATA
TGTGTGATGGAAGAAGCCCCACCCCAGATGAGCTGCCTACCTGCTACCCTGGGGATGACTGGTCTGGG
GTCAGCTTGCGGGAGTTTATGGATTGCACCTACAACCTGGCTAACAATCGCCAGGTGCGCATGCTGGC
TGACCTCAGCCTGGTGGGCTGCTATAACTTGACTTTCATGAACGAGAGTGAAAGAAACACCATCCTGT
TGCAGAGTGCAAAGAACAACCTGAAGAACATGGCCTTCTTTGGGCTCACTGAGTTCCAGAGGAAGACA
CAGTTTCTCTTTGAGAGAACATTCAACCTCAAGTTCATCTCCCCCTTCACACAGTTCAACATCACGCG
GGCTTCTAACGTGGAGATCAACGAGGGTGCCCGCCAACGCATTGAGGATCTAAACTTCCTGGACATGC
AGCTTTACGAGTATGCAAAAGATCTCTTCCAGCAGCGCTACCACCACACCAAGCAGCTAGAGCGCCAG
AGGGACCGCCAGAAGCGGCGGGAGGAGCGGAGGCTGCAGCGAGAGCACAGGGACCACCAGTGGCCCAA
AGAAGATGGGGCTGCAGAAGGGACTGTCACCGAGGACTACAACAGCCAGGTGGTGAGATGGCTCGAGG
CG

NOV40c, 246837961

| | | | |
|---|---|---|---|
| Protein Sequence | SEQ ID NO: 938 | 250 aa | MW at 29980.4kD |

RGTCPRNHSHTRNFYYITMLRDPVSRYLSEWKHVQRGATWKTSLHMCDGRSPTPDELPTCYPGDDWSG
VSLREFMDCTYNLANNRQVRLADLSLVGCYNLTFMNESERNTILLQSAKNNLKNMAFFGLTEFQRKT
QFLFERTFNLKFISPFTQFNITRASNVEINEGARQRIEDLNFLDMQLYEYAKDLFQQRYHHTKQLERQ
RDRQKRREERRLQREHRDHQWPKEDGAAEGTVTEDYNSQVVRWLEA

| | | |
|---|---|---|
| NOV40d, 246837965 | SEQ ID NO: 939 | 750 bp |

| | | |
|---|---|---|
| DNA Sequence | ORF Start: at 1 | ORF Stop: end of sequence |

CGCGGTACCTGTCCCCGCAACCACAGCCACACCAGGAATTTCTATTACATCACAATGTTACGGGATCC
AGTGTCACGTTACCTGAGTGAGTGGAAACATGCCCAGAGAGGGGCCACTTGGAAAACCTCTCTTCATA
TGTGTGATGGAAGAAGCCCCACCCCAGATGAGCTGCCTACCTGCTACCCTGGGGATGACTGGTCTGGG
GTCAGCTTGCGGGAGTTTATGGATTGCACCTACAACCTGGCTAACAATCGCCAGGTGCGCATGCTGGC
TGACCTCAGCCTGGTGGGCTGCTATAACTTGACTTTCATGAACGAGAGTGAAAGAAACACCATCCTGT
TGCAGAGTGCAAAGAACAACCTGAAGAACATGGCCTTCTTTGGGCTCACTGAGTTCCAGAGGAAGACA
CAGTTTCTCTTTGAGAGAACATTCAACCTCAAGTTCATCTCCCCCTTCACACAGTTCAACATCACGCG
GGCTTCTAACGTGGAGATCAACGAGGGTGCCCGCCAACGCATTGAGGATCTAAACTTCCTGGACATGC
AGCTTTACGAGTATGCAAAAGATCTCTTCCAGCAGCGCTACCACCACACCAAGCAGCTAGAGCACCAG
AGGGACCGCCAGAAGCGGCGGGAGGAGCGGAGGCTGCAGCGAGAGCACAGGGACCACCAGTGGCCCAA
AGAAGATGGGGCTGCAGAAGGGACTGTCACCGAGGACTACAACAGCCAGGTGGTGAGATGGCTCGAGG
CG

NOV40d, 246837965

| | | | |
|---|---|---|---|
| Protein Sequence | SEQ ID NO: 940 | 250 aa | MW at 29933.3kD |

RGTCPRNHSHTRNFYYITMLRDPVSRYLSEWKHAQRGATWKTSLHMCDGRSPTPDELPTCYPGDDWSG
VSLREFMDCTYNLANNRQVRMLADLSLVGCYNLTFMNESERNTILLQSAKNNLKNMAFFGLTEFQRKT
QFLFERTFNLKFISPFTQFNITRASNVEINEGARQRIEDLNFLDMQLYEYAKDLFQQRYHHTKQLEHQ
RDRQKRREERRLQREHRDHQWPKEDGAAEGTVTEDYNSQVVRWLEA

| | | |
|---|---|---|
| NOV40e, 246837975 | SEQ ID NO: 941 | 750 bp |

| | | |
|---|---|---|
| DNA Sequence | ORF Start: at 1 | ORF Stop: end of sequence |

CGCGGTACCTGTCCCCGCAACCACAGCCACACCAGGAATTTCTATTACATCACAATGTTACGGGATCC
AGTGTCACGTTACCTGAGTGAGTGGAAACATGTCCAGAGAGGGGCCACTTGGAAAACCTCTCTTCATA
TGTGTGATGGAAGAAGCCCCACCCCAGATGAGCTGCCTACCTGCTACCCTGGGGATGACTGGTCTGGG
GTCAGCTTGCGGGAGTTTATGGATTGCACCTACAACCTGGCTAACAATCGCCAGGTGCGCATGCTGGC
TGACCTCAGCCTGGTGGGCTGCTATAACTTGACTTTCATGAACGAGAGTGAAAGAAACACCATCCTGT
TGCAGAGTGCAAAGAACAACCTGAAGAACATGGCCTTCTTTGGGCTCACTGAGTTCCAGAGGAAGACA
CAGTTTCTCTTTGAGAGAGCATTCAACCTCAAGTTCATCTCCCCCTTCACACAGTTCAACATCACGCG
GGCTTCTAACGTGGAGATCAACGAGGGTGCCCACCAACGCATTGAGGATCTAAACTTCCTGGACATGC
AGCTTTACGAGTATGCAAAAGATCTCTTCCAGCAGCGCTACCACCACGCCAAGCAGCTAGAGCACCAG
AGGGACCGCCAGAAGCGGCGGGAGGAGCGGAGGCTGCAGCGAGAGCACAGGGACCACCAGTGGCCCAA
AGAAGATGGGGCTGCAGAAGGGACTGTCACCGAGGACTACAACAGCCAGGTGGTGAGATGGCTCGAGG
CG

NOV40e, 246837975

| | | | |
|---|---|---|---|
| Protein Sequence | SEQ ID NO: 942 | 250 aa | MW at 29882.2kD |

RGTCPRNHSHTPNFYYITMLRDPVSRYLSEWKHVQRGATWKTSLHMCDGRSPTPDELPTCYPGDDWSG
VSLREFMDCTYNLANNRQVRMLADLSLVGCYNLTFMNESERNTILLQSAKNNLKNMAFFGLTEFQRKT
QFLFERAFNLKFISPFTQFNITRASNVEINEGAHQRIEDLNFLDMQLYEYAKDLFQQRYHHAKQLEHQ
RDRQKRREERRLQREHRDHQWPKEDGAAEGTVTEDYNSQVVRWLEA

| | | |
|---|---|---|
| NOV40f, 248061376 | SEQ ID NO: 943 | 750 bp |

| | | |
|---|---|---|
| DNA Sequence | ORF Start: at 1 | ORF Stop: end of sequence |

CGCGGTACCTGTCCCCGCAACCACAGCCACACCAGGAATTTCTATTACATCACAATGTTACGGGATCC
AGTGTCACGTTACCTGAGCGAGTGGAAACATGTCCAGAGAGGGGCCACTTGGAAAACCTCTCTTCATA
TGTGTGATGGAAGAAGCCCCACCCCAGATGAGCTGCCTACCTGCTACCCTGGGGATGACTGGTCTGGG
GTCAGCTTGCGGGAGTTTATGGATTGCACCTACAACCTGGCTAACAATCGCCAGGTGCGCATGCTGGC
TGCAGAGTGCAAAGAACAACCTGAAGAACATGGCCTTCTTTGGGCTCACTGAGTTCCAGAGGAAGACA
CAGTTTCTCTTTGAGAGAACATTCAACCTCAAGTTCATCTCCCCCTTCACACAGTTCAACATCACGCG
GGCTTCTAACGTGGAGATCAACGAGGGTGCCCGCCAACGCATTGAGGATCTAAACTTCCTGGACATGC
AGCTTTACGAGTATGCAAAAGATCTCTTCCAGCAGCGCTACCACCACACCAAGCAGCTAGAGCACCAG
AGGGACCGCCAGAAGCGGCGGGAGGAGCGGAGGCTGCAGCGAGAGCACAGGGACCACCAGTGGCCCAA
AGAAGATGGGGCTGCAGAAGGGACTGTCACCGAGGACTACAACAGCCAGGTGGTGAGATGGCTCGAGG
CG

NOV40f, 248061376

| | | | |
|---|---|---|---|
| Protein Sequence | SEQ ID NO: 944 | 250 aa | MW at 29961.3kD |

RGTCPRNHSHTRNFYYITMLRDPVSRYLSEWKHVQRGATWKTSLHMCDGRSPTPDELPTCYPGDDWSG
VSLREFMDCTYNLANNRQVRMLADLSLVGCYNLTFMNESERNTILLQSAKNNLKNMAFFGLTEFQRKT
QFLFERTFNLKFISPFTQFNITRASNVEINEGARQRIEDLNFLDMQLYEYAKDLFQQRYHHTKQLEHQ
RDRQKRREERRLQREHRDHQWPKEDGAAEGTVTEDYNSQVVRWLEA

| | |
|---|---|
| SEQ ID NO: 945 | 1500 bp |

| | | |
|---|---|---|
| NOV40g, SNP13381685 of | ORF Start: ATG at 74 | ORF Stop: TGA at 1490 |

| | | |
|---|---|---|
| CG56806-01, DNA Sequence | SNP Pos: 870 | SNP Change: A to G |

CTTCCGAGCGGGCGCCCGTCCGCCCTGCCGCCGCCGCCGCCGCCGCTTCGCCTGCCGGCCTGAGAGCG
GGACCATGGATGAAAGGTTCAACAAGTGGCTGCTGACGCCGGTGCTCACTCTCCTCTTCGTGGTCATC
ATGTACCAGTACGTGTCCCCCTCCTGCACCAGCTCCTGCACCAACTTCGGGGAGCAGCCCCGCGCGGG
GGAGGCCGGCCCGCCCGCCGTCCCGGGTCCCGCCCGCCGGGCTCAGGCGCCGCCGGAGGAGTGGGAGC
AGAGGAGGCCCCAGTTGCCCCCGCCGCCCCGGGGGCCCCCCGAGGGACCTCGGGGGGCCGCGGCGCCG
GAGGAGGAGGACGAGGAGCCCGGAGACCCCCGGGAGGGGGAGGAAGAGGAGGAGGAAGACGAGCCGGA
CCCCGAGGCCCCGGAAAACGGCTCCCTGCCCCGATTCGTGCCGCGCTTCAACTTCAGCCTGAAGGACC
TGACCCGCTTCGTGGATTTCAACATCAAAGGGCGCGACGTGATCGTGTTCCTCCACATCCAGAAGACG
GGGGGCACCACTTTCGGCCGGCACCTGGTGAAGAACATCCGGCTGGAGCAGCCTTGTAGCTGCAAAGC
GGGTCAGAAGAAGTGCACCTGCCACCGGCCTGGCAAGAAGGAGACGTGGCTCTTCTCCCGCTTCTCCA
CCGGCTGGAGCTGCGGGCTGCACGCCGACTGGACGGAGCTCACCAACTGCGTGCCGGCCATCATGGAG
AAGAAGGACTGTCCCCGCAACCACAGCCACACCAGGAATTTCTATTACATCACAATGTTACGGGATCC
AGTGTCACGTTACCTGAGCGAGTGGAAACATGTCCAGAGAGGGGCCACTTGGAGAACCTCTCTTCATA
TGTGTGATGGAAGAAGCCCCACCCCAGATGAGCTGCCTACCTGCTACCCTGGGGATGACTGGTCTGGG
GTCAGCTTGCGGGAGTTTATGGATTGCACCTACAACCTGGCTAACAATCGCCAGGTGCGCATGCTGGC
TGACCTCAGCCTGGTGGGCTGCTATAACTTGACTTTCATGAACGAGAGTGAAAGAAACACCATCCTGT
CAGTTTCTCTTTGAGAGAACATTCAACCTCAAGTTCATCTCCCCCTTCACACAGTTCAACATCACGCG
GGCTTCTAACGTGGAGATCAACGAGGGTGCCCGCCAACGCATTGAGGATCTAAACTTCCTGGACATGC
AGCTTTACGAGTATGCAAAAGATCTCTTCCAGCAGCGCTACCACCACACCAAGCAGCTAGAGCACCAG
AGGGACCGCCAGAAGCGGCGGGAGGAGCGGAGGCTGCAGCGAGAGCACAGGGACCACCAGTGGCCCAA
AGAAGATGGGGCTGCAGAAGGGACTGTCACCGAGGACTACAACAGCCAGGTGGTGAGATGGTGACCTC
CTGC

| | | |
|---|---|---|
| NOV40g, SNP13381685 of | SEQ ID NO: 946 | MW at 54999.3kD |

| | | | |
|---|---|---|---|
| CG56806-01, Protein Sequence | SNP Pos: 266 | 472 aa | SNP Change: Lys to Arg |

MDERFNKWLLTPVLTLLFVVIMYQYVSPSCTSSCTNFGEQPRAGEAGPPAVPGPARRAQAPPEEWEQR
RPQLPPPPRGPPEGPRGAAAPEEEDEEPGDPREGEEEEEEDEPDPEAPENGSLPRFVPRFNFSLKDLT
RFVDFNIKGRDVIVFLHIQKTGGTTFGRHLVKNIRLEQPCSCKAGQKKCTCHRPGKKETWLFSRFSTG
WSCGLHADWTELTNCVPAIMEKKDCPRNHSHTRNFYYITMLRDPVSRYLSEWKHVQRGATWRTSLHMC
DGRSPTPDELPTCYPGDDWSGVSLREFMDCTYNLANNRQVRMLADLSLVGCYNLTFMNESERNTILLQ
SAKNNLKNMAFFGLTEFQRKTQFLFERTFNLKFISPFTQFNITRASNVEINEGARQRIEDLNFLDMQL
YEYAKDLFQQRYHHTKQLEHQRDRQKRREERRLQREHRDHQWPKEDGAAEGTVTEDYNSQVVRW

| | |
|---|---|
| SEQ ID NO: 947 | 1500 bp |

| | | |
|---|---|---|
| NOV40h, SNP13381686 of | ORF Start: ATG at 74 | ORF Stop: TGA at 1490 |

| | | |
|---|---|---|
| CG56806-01, DNA Sequence | SNP Pos: 1190 | SNP Change: T to C |

CTTCCGAGCGGGCGCCCGTCCGCCCTGCCGCCGCCGCCGCCGCCGCTTCGCCTGCCGGCCTGAGAGCG
GGACCATGGATGAAAGGTTCAACAAGTGGCTGCTGACGCCGGTGCTCACTCTCCTCTTCGTGGTCATC
ATGTACCAGTACGTGTCCCCCTCCTGCACCAGCTCCTGCACCAACTTCGGGGAGCAGCCCCGCGCGGG
GGAGGCCGGCCCGCCCGCCGTCCCGGGTCCCGCCCGCCGGGCTCAGGCGCCGCCGGAGGAGTGGGAGC
AGAGGAGGCCCCAGTTGCCCCCGCCGCCCCGGGGGCCCCCCGAGGGACCTCGGGGGGCCGCGGCGCCG
GAGGAGGAGGACGAGGAGCCCGGAGACCCCCGGGAGGGGGAGGAAGAGGAGGAGGAAGACGAGCCGGA
CCCCGAGGCCCCGGAAAACGGCTCCCTGCCCCGATTCGTGCCGCGCTTCAACTTCAGCCTGAAGGACC
TGACCCGCTTCGTGGATTTCAACATCAAAGGGCGCGACGTGATCGTGTTCCTCCACATCCAGAAGACG
GGGGGCACCACTTTCGGCCGGCACCTGGTGAAGAACATCCGGCTGGAGCAGCCTTGTAGCTGCAAAGC
GGGTCAGAAGAAGTGCACCTGCCACCGGCCTGGCAAGAAGGAGACGTGGCTCTTCTCCCGCTTCTCCA
CCGGCTGGAGCTGCGGGCTGCACGCCGACTGGACGGAGCTCACCAACTGCGTGCCGGCCATCATGGAG
AAGAAGGACTGTCCCCGCAACCACAGCCACACCAGGAATTTCTATTACATCACAATGTTACGGGATCC
AGTGTCACGTTACCTGAGCGAGTGGAAACATGTCCAGAGAGGGGCCACTTGGAAAACCTCTCTTCATA
TGTGTGATGGAAGAAGCCCCACCCCAGATGAGCTGCCTACCTGCTACCCTGGGGATGACTGGTCTGGG
GTCAGCTTGCGGGAGTTTATGGATTGCACCTACAACCTGGCTAACAATCGCCAGGTGCGCATGCTGGC
TGACCTCAGCCTGGTGGGCTGCTATAACTTGACTTTCATGAACGAGAGTGAAAGAAACACCATCCTGT
TGCAGAGTGCAAAGAACAACCTGAAGAACATGGCCTTCTTTGGGCTCACTGAGTTCCAGAGGAAGACA
CAGTTTCTCTTTGAGAGAACATTCAACCTCAAGCTCATCTCCCCCTTCACACAGTTCAACATCACGCG
GGCTTCTAACGTGGAGATCAACGAGGGTGCCCGCCAACGCATTGAGGATCTAAACTTCCTGGACATGC
AGCTTTACGAGTATGCAAAAGATCTCTTCCAGCAGCGCTACCACCACACCAAGCAGCTAGAGCACCAG
AGGGACCGCCAGAAGCGGCGGGAGGAGCGGAGGCTGCAGCGAGAGCACAGGGACCACCAGTGGCCCAA
AGAAGATGGGGCTGCAGAAGGGACTGTCACCGAGGACTACAACAGCCAGGTGGTGAGATGGTGACCTC
CTGC

| | | |
|---|---|---|
| NOV40h, SNP13381686 of | SEQ ID NO: 948 | MW at 54937.3kD |

| | | | |
|---|---|---|---|
| CG56806-01, Protein Sequence | SNP Pos: 373 | 472 aa | SNP Change: Phe to Leu |

MDERFNKWLLTPVLTLLFVVIMYQYVSPSCTSSCTNFGEQPRAGEAGPPAVPGPARPAQAPPEEWEQR
RPQLPPPPRGPPEGPRGAAAPEEEDEEPGDPREGEEEEEEDEPDPEAPENGSLPRFVPRFNFSLKDLT
RFVDFNIKGRDVIVFLHIQKTGGTTFGRHLVKNIRLEQPCSCKAGQKKCTCHRPGKKETWLFSRFSTG
WSCGLHADWTELTNCVPAIMEKKDCPRNHSHTRNFYYITMLRDPVSRYLSEWKHVQRGATWKTSLHMC
DGRSPTPDELPTCYPGDDWSGVSLREFMDCTYNLANNRQVRMLADLSLVGCYNLTFMNESERNTILLQ
SAKNNLKNMAFFGLTEFQRKTQFLFERTFNLKLISPFTQFNITRASNVEINEGARQRIEDLNFLDMQL
YEYAKDLFQQRYHHTKQLEHQRDRQKRREERRLQREHRDHQWPKEDGAAEGTVTEDYNSQVVRW

[0585] A ClustalW comparison of the above protein sequences yields the following sequence alignment shown in Table 40B.

TABLE 40B
Comparison of the NOV40 protein sequences.

| | |
|---|---|
| NOV40a | MDERFNKWLLTPVLTLLFVVIMYQYVSPSCTSSCTNFGEQPRAGEAGPPAVPGPARRAQA |
| NOV40b | ------------------------------------------------------------ |
| NOV40c | ------------------------------------------------------------ |
| NOV40d | ------------------------------------------------------------ |
| NOV40e | ------------------------------------------------------------ |
| NOV40f | ------------------------------------------------------------ |
| NOV40a | PPEEWEQRRPQLPPPPRGPPEGPRGAAAPEEEDEEPGDPREGEEEEEEDEPDPEAPENGS |
| NOV40b | ------------------------------------------------------------ |
| NOV40c | ------------------------------------------------------------ |
| NOV40d | ------------------------------------------------------------ |
| NOV40e | ------------------------------------------------------------ |
| NOV40f | ------------------------------------------------------------ |
| NOV40a | LPRFVPRFNFSLKDLTRFVDFNIKGRDVIVFLHIQKTGGTTFGRHLVKNIRLEQPCSCKA |
| NOV40b | ------------------------------------------------------------ |
| NOV40c | ------------------------------------------------------------ |
| NOV40d | ------------------------------------------------------------ |
| NOV40e | ------------------------------------------------------------ |
| NOV40f | ------------------------------------------------------------ |
| NOV40a | GQKKCTCHRPGKKETWLFSRFSTGWSCGLHADWTELTNCVPAIMEKKDCPRNHSHTRNFY |
| NOV40b | ---------------------------------------------RGTCPRNHSHTRNFY |
| NOV40c | ---------------------------------------------RGTCPRNHSHTRNFY |
| NOV40d | ---------------------------------------------RGTCPRNHSHTRNFY |
| NOV40e | ---------------------------------------------RGTCPRNHSHTRNFY |
| NOV40f | ---------------------------------------------RGTCPRNHSHTRNFY |
| NOV40a | YITMLRDPVSRYLSEWKHVQRGATWKTSLHMCDGRSPTPDELPTCYPGDDWSGVSLREFM |
| NOV40b | YITMLRDPVSRYLSEWKHVQRGATWKTSLHMCDGRSPTPDGLPTCYPGDDWSGVSLREFM |
| NOV40c | YITMLRDPVSRYLSEWKHVQRGATWKTSLHMCDGRSPTPDELPTCYPGDDWSGVSLREFM |
| NOV40d | YITMLRDPVSRYLSEWKHAQRGATWKTSLHMCDGRSPTPDELPTCYPGDDWSGVSLREFM |
| NOV40e | YITMLRDPVSRYLSEWKHVQRGATWKTSLHMCDGRSPTPDELPTCYPGDDWSGVSLREFM |
| NOV40f | YITMLRDPVSRYLSEWKHVQRGATWKTSLHMCDGRSPTPDELPTCYPGDDWSGVSLREFM |
| NOV40a | DCTYNLANNRQVRMLADLSLVGCYNLTFMNESERNTILLQSAKNNLKNMAFFGLTEFQRK |
| NOV40b | DCTYNLANNRQVPMLADLSLVGCYNLTFMNESEENTILLQSAKNNLKNMAFFGLTEFQRK |
| NOV40c | DCTYNLANNRQVPMLADLSLVGCYNLTFMNESEENTILLQSAKNNLKNMAFFGLTEFQRK |
| NOV40d | DCTYNLANNRQVRMLADLSLVGCYNLTFMNESERNTILLQSAKNNLKNMAFFGLTEFQRK |
| NOV40e | DCTYNLANNRQVRMLADLSLVGCYNLTFMNESEENTILLQSAKNNLKNMAFFGLTEFQRK |
| NOV40f | DCTYNLANNRQVRNLADLSLVGCYNLTFMNESERNTILLQSAKNNLKNNAFFGLTEFQRK |
| NOV40a | TQFLFERTFNLKFISPFTQFNITRASNVEINEGARQRIEDLNFLDMQLYEYAKDLFQQRY |
| NOV40b | TQFLFERTFNLKFISPFTQFNITPASNVEINEGARQRIEDLNFLDMQLYEYAKDLFQQRY |
| NOV40c | TQFLFERTFNLKFISPFTQFNITRASNVEINEGARQRIEDLNFLDMQLYEYAKDLFQQRY |
| NOV40d | TQFLFERTFNLKFISPFTQFNITEASNVEINEGARQRIEDLNFLDMQLYEYAKDLFQQRY |
| NOV40e | TQFLFERAFNLKFISPFTQFNITRASNVEINEGAHQRIEDLNFLDMQLYEYAKDLFQQRY |
| NOV40f | TQFLFERTFNLKFISPFTQFNITFASNVEINEGARQRIEDLNFLDMQLYEYAKDLFQQRY |
| NOV40a | HHTKQLEHQRDRQKRREERRLQREHRDHQWPKEDGAAEGTVTEDYNSQVVRW-- |
| NOV40b | HHTKQLEHQRDRQKEREERRLQREHRDHQWPKEDGAAEGTVTEDYNSQVVRWLEA |
| NOV40c | HHTKQLERQRDRQKRREERRLQREHRDHQWPKEDGAAEGTVTEDYNSQVVRWLEA |
| NOV40d | HHTKQLEHQRDRQKRREERRLQREHRDHQWPKEDGAAEGTVTEDYNSQVVRWLEA |
| NOV40e | HHAKQLEHQRDRQKEREERRLQREHRDHQWPKEDGAAEGTVTEDYNSQVVRWLEA |
| NOV40f | HHTKQLEHQRDRQKRREERRLQREHRDHQWPKEDGAAEGTVTEDYNSQVVRWLEA |
| NOV40a | (SEQ ID NO: 934) |
| NOV40b | (SEQ ID NO: 936) |
| NOV40c | (SEQ ID NO: 938) |
| NOV40d | (SEQ ID NO: 940) |
| NOV40e | (SEQ ID NO: 942) |
| NOV40f | (SEQ ID NO: 944) |

[0586] Further analysis of the NOV40a protein yielded the following properties shown in Table 40C.

TABLE 40C
Protein Sequence Properties NOV40a

| | |
|---|---|
| SignalP analysis: | Cleavage site between residues 29 and 30 |
| PSORT II analysis: | |

| PSG: | a new signal peptide prediction method | |
|---|---|---|
| | N-region: | length 7; pos. chg 2; neg. chg 2 |
| | H-region: | length 31; peak value 11.61 |
| | PSG score: | 7.21 |

| | |
|---|---|
| GvH: | von Heijne's method for signal seq. recognition |
| | GvH score (threshold: −2.1): −5.24 |
| | possible cleavage site: between 28 and 29 |

>>> Seems to have no N-terminal signal peptide

| ALOM: | Klein et al's method for TM region allocation | | |
|---|---|---|---|
| | Init position for calculation: 1 | | |
| | Tentative number of TMS(s) for the threshold 0.5: 1 | | |
| | Number of TMS(s) for threshold 0.5: 1 | | |
| | INTEGRAL | Likelihood = | Transmembrane 8-24 |
| | | −2.76 | |

| | |
|---|---|
| PERIPHERAL | Likelihood =4.77 (at 312) |

| | |
|---|---|
| | ALOM score: −2.76 (number of TMSs: 1) |
| MTOP: | Prediction of membrane topology (Hartmann et al.) |
| | Center position for calculation: 15 |
| | Charge difference: −2.0 C(−1.0)-N(1.0) |
| | N >= C: N-terminal side will be inside |

>>> membrane topology: type 2 (cytoplasmic tail 1 to 8)

| MITDISC: | discrimination of mitochondrial targeting seq | | | |
|---|---|---|---|---|
| | R content: | 0 | Hyd Moment(75): | 8.01 |
| | Hyd Moment(95): | 7.59 | G content: | 0 |
| | D/E content: | 2 | S/T content: | 0 |

| | |
|---|---|
| | Score: −6.61 |
| Gavel: | prediction of cleavage sites for mitochondrial preseq |
| | cleavage site motif not found |

NUCDISC: discrimination of nuclear localization signals

| | |
|---|---|
| | pat4: none |
| | pat7: none |
| | bipartite: none |
| | content of basic residues: 13.6% |
| | NLS Score: −0.47 |
| KDEL: | ER retention motif in the C-terminus: none |

ER Membrane Retention Signals:

XXRR-like motif in the N-terminus: DERF

none
SKL: peroxisomal targeting signal in the C-terminus: none
PTS2: 2nd peroxisomal targeting signal: none
VAC: possible vacuolar targeting motif: none
RNA-binding motif: none
Actinin-type actin-binding motif:

type 1: none
type 2: none

NMYR: N-myristoylation pattern: none
Prenylation motif: none
memYQRL: transport motif from cell surface to Golgi: none
Tyrosines in the tail: none
Dileucine motif in the tail: none
checking 63 PROSITE DNA binding motifs: none
checking 71 PROSITE ribosomal protein motifs: none
checking 33 PROSITE prokaryotic DNA binding motifs: none

| | |
|---|---|
| NNCN: | Reinhardt's method for Cytoplasmic/Nuclear discrimination |
| | Prediction: nuclear |
| | Reliability: 76.7 |
| COIL: | Lupas's algorithm to detect coiled-coil regions |
| | total: 0 residues |

Final Results (k = 9/23):

```
39.1%: mitochondrial
34.8%: nuclear
13.0%: cytoplasmic
  4.3%: extracellular, including cell wall
  4.3%: Golgi
  4.3%: peroxisomal
```

>> prediction for CG56806-01 is mit (k = 23)

[0587] A search of the NOV40a protein against the Geneseq database, a proprietary database that contains sequences published in patents and patent publication, yielded several homologous proteins shown in Table 40D.

TABLE 40D
Geneseq Results for NOV40a

| | | NOV40a | Identities/ | |
|---|---|---|---|---|
| | | Residues/ | Similarities for | |
| Geneseq | Protein/Organism/Length | Match | the Matched | Expect |
| Identifier | [Patent #, Date] | Residues | Region | Value |
| AAO26610 | Human 6-OST-3 protein sequence - | 1 . . . 472 | 471/472 (99%) | 0.0 |
| | Homo sapiens, 471 aa. | 1 . . . 471 | 471/472 (99%) | |
| | [WO200279258-A2, 10-OCT-2002] | | | |
| AAY83902 | Mouse HS6ST2 protein - Mus sp, 470 | 1 . . . 472 | 447/472 (94%) | 0.0 |
| | aa. [JP2000060566-A, 29-FEB-2000] | 1 . . . 470 | 458/472 (96%) | |
| ABP71364 | Mouse H6ST-3 protein - Mus sp, 469 | 1 . . . 471 | 446/471 (94%) | 0.0 |
| | aa. [WO2003004610-A2, 16-JAN-2003] | 1 . . . 469 | 457/471 (96%) | |
| ABP71362 | Human AK polypeptide - Homo | 111 . . . 440 | 242/330 (73%) | e−149 |
| | sapiens, 460 aa. [WO2003004610-A2, | 45 . . . 373 | 285/330 (86%) | |
| | 16-JAN-2003] | | | |
| AAO26608 | Human 6-OST-2A protein sequence - | 111 . . . 440 | 242/330 (73%) | e−149 |
| | Homo sapiens, 465 aa. | 51 . . . 379 | 285/330 (86%) | |
| | [WO200279258-A2, 10-OCT-2002] | | | |

[0588] In a BLAST search of public sequence databases, the NOV40a protein was found to have homology to the proteins shown in the BLASTP data in Table 40E.

TABLE 40E
Public BLASTP Results for NOV40a

| | | NOV40a | Identities/ | |
|---|---|---|---|---|
| Protein | | Residues/ | Similarities for | |
| Accession | | Match | the Matched | Expect |
| Number | Protein/Organism/Length | Residues | Portion | Value |
| Q8IZP7 | Heparan sulfate 6-O- | 1 . . . 472 | 469/472 (99%) | 0.0 |
| | sulfotransferase 3 - Homo sapiens | 1 . . . 471 | 469/472 (99%) | |
| | (Human), 471 aa. | | | |
| Q9QYK4 | Heparan sulfate 6-sulfotransferase | 1 . . . 472 | 447/472 (94%) | 0.0 |
| | 3 - Mus musculus (Mouse), 470 aa. | 1 . . . 470 | 458/472 (96%) | |
| AAH47151 | Hs6st2 protein - Mus musculus | 111 . . . 440 | 244/330 (73%) | e−149 |
| | (Mouse), 535 aa (fragment). | 114 . . . 442 | 285/330 (85%) | |
| Q96SJ4 | Hypothetical protein FLJ14814 - | 111 . . . 440 | 242/330 (73%) | e−148 |
| | Homo sapiens (Human), 459 aa. | 45 . . . 373 | 285/330 (86%) | |
| Q8NBN4 | Hypothetical protein | 111 . . . 440 | 241/330 (73%) | e−148 |
| | NT2RP2000358 - Homo sapiens | 51 . . . 379 | 285/330 (86%) | |
| | (Human), 465 aa. | | | |

[0589] PFam analysis predicts that the NOV40a protein contains the domains shown in the Table 40F.

TABLE 40F
Domain Analysis of NOV40a

| | | | |
|---|---|---|---|
| Pfam Domain | NOV40a | Identities/ | Expect |
| | Match Region | Similarities | Value |
| | | for the | |
| | | Matched Region | |

### Example 41

[0590] The NOV41 clone was analyzed, and the nucleotide and encoded polypeptide sequences are shown in Table 41A.

TABLE 41A
NOV41 Sequence Analysis

| | | |
|---|---|---|
| NOV41a, CG56878-01 | SEQ ID NO: 949 | 2739 bp |

| | | |
|---|---|---|
| DNA Sequence | ORF Start: ATG at 86 | ORF Stop: TGA at 2090 |

TTGCACTCTCCCACACCCTTTTCTTTTCGTCCGCTCTTCGCTTATTTCTCCCGCCGTCTCCTCTGCAT
AAGAAGGGGAACGAAAGATGGCGGCGGAAACGCTGCTGTCCAGTTTGTTAGGACTGCTGCTTCTGGGA
CTCCTGTTACCCGCAAGTCTGACCGGCGGTGTCGGGAGCCTGAACCTGGAGGAGCTGAGTGAGATGCG
TTATGGGATCGAGATCCTGCCGTTGCCTGTCATGGGAGGGCAGAGCCAATCTTCGGACGTGGTGATTG
TCTCCTCTAAGTACAAACAGCGCTATGAGTGTCGCCTGCCAGCTGGAGCTATTCACTTCCAGCGTGAA
AGGGAGGAGGAAACACCTGCTTACCAAGGGCCTGGGATCCCTGAGTTGTTGAGCCCAATGAGAGATGC
TCCCTGCTTGCTGAAGACAAAGGACTGGTGGACATATGAATTCTGTTATGGACGCCACATCCAGCAAT
TGGGATGATGAAACAGCCAAGGCCTCCAAGCAGCATCGTCTTAAACGCTACCACAGCCAGACCTATGG
GTGCAGGTATCTCTGGGGACTACATCGATCGCGTGGACGAGCCCTTGTCCTGCTCTTATGTGCTGACC
ATTCGCACTCCTCGGCTCTGCCCCCACCCTCTCCTCCGGCCCCCACCCAGTGCTGCACCGCAGGCCAT
CCTCTGTCACCCTTCCCTACAGCCTGAGGAGTACATGGCCTACGTTCAGAGGCAAGCCGTAGACTCAA
AGCAGTATGGAGATAAAATCATAGAGGAGCTGCAAGATCTAGGCCCCCAAGTGTGGAGTGAGACCAAG
TCTGGGGTGGCACCCCAAAAGATGGCAGGTGCGAGCCCGACCAAGGATGACAGTAAGGACTCAGATTT
CTGGAAGATGCTTAATGAGCCAGAGGACCAGGCCCCAGGAGGGGAGGAGGTGCCGGCTGAGGAGCAGG
ACCCAAGCCCTGAGGCAGCAGATTCAGCTTCTGGTGCTCCCAATGATTTTCAGAACAACGTGCAGGTC
AAAGTCATTCGAAGCCCTGCGGATTTGATTCGATTCATAGAGGAGCTGAAAGGTGGAACAAAAAAGGG
GAAGCCAAATATAGGCCAAGAGCAGCCTGTGGATGATGCTGCAGAAGTCCCTCAGAGGGAACCAGAGA
AGGAAAGGGGTGATCCAGAACGGCAGAGAGAGATGGAAGAAGAGGAGGATGAGGATGAGGATGAGGAT
GAAGATGAGGATGAACGGCAGTTACTGGGAGAATTTGAGAAGGAACTGGAAGGGATCCTGCTTCCGTC
AGACCGAGACCGGCTCCGTTCGGAGGTGAAGGCTGGCATGGAGCGGGAACTGGAGAACATCATCCAGG
AGACAGAGAAAGAGCTGGACCCAGATGGGCTGAAGAAGGAGTCAGAGCGGGATCGGGCAATGCTGGCT
CTCACATCCACTCTCAACAAACTCATCAAAAGACTGGAGGAAAAACAGAGTCCAGAGCTGGTGAAGAA
GCACAAGAAAAAGAGGGTTGTCCCCAAAAAGCCTCCCCCATCACCCCAACCTACAGAGGAGGATCCTG
AGCACAGAGTCCGGGTCCGGGTCACCAAGCTCCGTCTCGGAGGCCCTAATCAGGATCTGACTGTCCTC
GAGATGAAACGGGAAAACCCACAGCTGAAACAAATCGAGGGGCTGGTGAAGGAGCTGCTGGAGAGGGA
GGGACTCACAGCTGCAGGGAAAATTGAGATCAAAATTGTCCGCCCATGGGCTGAAGGGACTGAAGAGG
GTGCACGTTGGCTGACTGATGAGGACACGAGAAACCTCAAGGAGATCTTCTTCAATATCTTGGTGCCG
GGAGCTGAAGAGGCCCAGAAGGAACGCCAGCGGCAGAAAGAGCTGGAGAGCAATTACCGCCGGGTGTG
GGGCTCTCCAGGTGGGGAGGGCACAGGGGACCTGGACGAATTTGACTTCTG&GACCAACACTACACTT
GACCCTTCACGGAATCCAGACTCTTCCTGGACTGGCTTGCCTCCTCCCCACCTCCCCACCCTGGAACC
CCTGAGGGCCAAACAGCAGAGTGGAGCTGAGCTGTGGACCTCTCGGGCAACTCTGTGGGTGTGGGGGC
CCTGGGTGAATGCTGCTGCCCCTGCTGGCAGCCACCTTGAGACCTCACCGGGCCTGTGATATTTGCTC
TCCTGAACTCTCACTCAATCCTCTTCCTCTCCTCTGTGGCTTTTCCTGTTATTGTCCCCTAATGATAC
GATATTCCCTGCTGCCTACCTGGAGATTCAGTAGGATCTTTTGAGTGGAGGTGGGTAGAGAGAGCAAC
GAGGGCAGGACACTTAGCAGGCACTGAGCAAGCAGGCCCCCACCTGCCCTTAGTGATGTTTGGAGTCG
TTTTACCCTCTTCTATTGAATTGCCTTGGGATTTCCTTCTCCCTTTCCCTGCCCACCCTGTCCCCTAC
AATTTGTGCTTCTGAGTTGAGGAGCCTTCACCTCTGTTGCTGAGGAAATGGTAGAATGCTGCCTATCA
CCTCCAGCACAATCCCAGCGAAAAAGGTGTGAAGCACCCACCATGTTCTTGAACAATCAGGTTTCTAP
ATAAACAACTGGACCATCA

NOV41a, CG56878-01

| | | | |
|---|---|---|---|
| Protein Sequence | SEQ ID NO: 950 | 668 aa | MW at 75659.9kD |

MAAETLLSSLLGLLLLGLLLPASLTGGVGSLNLEELSEMRYGIEILPLPVMGGQSQSSDVVIVSSKYK
QRYECRLPAGAIHFQREREEETPAYQGPGIPELLSPMRDAPCLLKTKDWWTYEFCYGRHIQQYHMEDS
EIKGEVLYLGYYQSAFDWDDETAKASKQHRLKRYHSQTYGNGSKCDLNGRPREAEVRFLCDEGAGISG
DYIDRVDEPLSCSYVLTIRTPRLCPHPLLRPPPSAAPQAILCHPSLQPEEYMAYVQRQAVDSKQYGDK
IIEELQDLGPQVWSETKSGVAPQKMAGASPTKDDSKDSDFWKMLNEPEDQAPGGEEVPAEEQDPSPEA
ADSASGAPNDFQNNVQVKVIRSPADLIRFIEELKGGTKKGKPNIGQEQPVDDAAEVPQREPEKERGDP
ERQREMEEEEDEDEDEDEDEDERQLLGEFEKELEGILLPSDRDRLRSEVKAGMERELENIIQETEKEL
DPDGLKKESERDRAMLALTSTLNKLIKRLEEKQSPELVKKHKKKRVVPKKPPPSPQPTEEDPEHRVRV
RVTKLRLGGPNQDLTVLEMKRENPQLKQIEGLVKELLEREGLTAAGKIEIKIVRPWAEGTEEGARWLT
DEDTRNLKEIFFNILVPGAEEAQKERQRQKELESNYRRVWGSPGGEGTGDLDEFDF

| | | |
|---|---|---|
| NOV41b, 175070399 | SEQ ID NO: 951 | 1773 bp |

| | | |
|---|---|---|
| DNA Sequence | ORF Start: at 1 | ORF Stop: end of sequence |

GGTACCGGCGGTGTCGGGAGCCTGAACCTGGAGGAGCTGAGTGAGATGCGTTATGGGATCGAGATCCT
GCCGTTGCCTGTCATGGGAGGGCAGAGCCAATCTTCGGACGTGGTGATTGTCTCCTCTAAGTACAAAC
AGCGCTATGAGTGTCGCCTGCCAGCTGGAGCTATTCACTTCCAGCGTGAAAGGGAGGAGGAAACACCT
GCTTACCAAGGGCCTGGGATCCCTGAGTTGTTGAGCCCAATGAGAGATGCTCCCTGCTTGCTGAAGAC
AAAGGACTGGTGGACATATGAATTCTGTTATGGACGCCACATCCAGCAATACCACATGGAAGATTCAG
AGATCAAAGGTGAAGTCCTCTATCTCGGCTACTACCAATCAGCCTTCGACTGGGATGATGAAACAGCC
AAGGCCTCCAAGCAGCATCGTCTTAAACGCTACCACAGCCAGACCTATGGCAATGGGTCCAAGTGCGA
CCTTAATGGGAGGCCCCGGGAGGCCGAGGTTCGGTTCCTCTGTGACGAGGGTGCAGGTATCTCTGGGG
ACTACATCGATCGCGTGGACGAGCCCTTGTCCTGCTCTTATGTGCTGACCATTCGCACTCCTCGGCTC
TGCCCCCACCCTCTCCTCCGGCCCCCACCCAGTGCTGCACCGCAGGCCATCCTCTGTCACCCTTCCCT
ACAGCCTGAGGAGTACATGGCCTACGTTCAGAGGCAAGCCGACTCAAAGCAGTATGGAGATAAAATCA
TAGAGGAGCTGCAAGATCTAGGCCCCCAAGTGTGGAGTGAGACCAAGTCTGGGGTGGCACCCCAAAAG
ATGGCAGGTGCGAGCCCGACCAAGGATGACAGTAAGGACTCAGATTTCTGGAAGATGCTTAATGAGCC
AGAGGACCAGGCCCCAGGAGGGGAGGAGGTGCCGGCTGAGGAGCAGGACCCAAGCCCTGAGGCAGCAG
ATTCAGCTTCTGGTGCTCCCAATGATTTTCAGAACAACGTGCAGGTCAAAGTCATTCGAAGCCCTGCG
GATTTGATTCGATTCATAGAGGAGCTGAAAGGTGGAACAAAAAAGGGGAAGCCAAATATGGACCAAGA
GCAGCCTGTGGATGATGCTGCAGAAGTCCCTCAGAGGGAACCAGAGAAGGAAAGGGGTGATCCAGAAC
GGCAGAGAGAGATGGAAGAAGAGGAGGATGAGGATGAGGATGAGGATGAAGATGAGGATGAACGGCAG
TTACTGGGAGAATTTGAGAAGGAACTGGAAGGGATCCTGCTTCCGTCAGACCGAGACCGGCTCCGTTC
GGAGGTGAAGGCTGGCATGGAGCGGGAACTGGAGAACATCATCCAGGAGACAGAGAAAGAGCTGGACC
CAGATGGGCTGAAGAAGGAGTCAGAGCGGGATCGGGCAATGCTGGCTCTCACATCCACTCTCAACAAA
CCCATCAAAAGACTGGAGGAAAAACAGAGTCCAGAGCTGGTGAAGAAGCACAAGAAAAAGAGGGTTGT
CCCCAAAAAGCCTCCCCCATCACCCCAACCTACAGGGAAAATTGAGATCAAAATTGTCCGCCCATGGG
CTGAAGGGACTGAAGAGGGTGCACGTTGGCTGACTGATGAGGACACGAGAAACCTCAAGGAGATCTTC
TTCAATATCTTGGTGCCGGGAGCTGAAGAGGCCCAGAAGGAACGCCAGCGGCAGAAAGAGCTGGAGAG
CAATTACCGCCGGGTGTGGGGCTCTCCAGGTGGGGAGGGCACAGGGGACCTGGACGAATTTGACTTCG
TCGAC

NOV41b, 175070399

| | | | |
|---|---|---|---|
| Protein Sequence | SEQ ID NO: 952 | 591 aa | MW at 67172.0kD |

GTGGVGSLNLEELSEMRYGIEILPLPVMGGQSQSSDVVIVSSKYKQRYECRLPAGAIHFQREREEETP
AYQGPGIPELLSPMRDAPCLLKTKDWWTYEFCYGRHIQQYHMEDSEIKGEVLYLGYYQSAFDWDDETA
KASKQHRLKRYHSQTYGNGSKCDLNGRPREAEVRFLCDEGAGISGDYIDRVDEPLSCSYVLTIRTPRL
CPHPLLRPPPSAAPQAILCHPSLQPEEYMAYVQRQADSKQYGDKTIEELQDLGPQVWSETKSGVAPQK
MAGASPTKDDSKDSDFWKMLNEPEDQAPGGEEVPAEEQDPSPEAADSASGAPNDFQNNVQVKVIRSPA
DLIRFIEELKGGTKKGKPNMDQEQPVDDAAEVPQREPEKERGDPERQREMEEEEDEDEDEDEDEDERQ
LLGEFEKELEGILLPSDRDRLRSEVKAGMERELENIIQETEKELDPDGLKKESERDRAMLALTSTLLNK
PIKRLEEKQSPELVKKHKKKRVVPKKPPPSPQPTGKIEIKIVRPWAEGTEEGARWLTDEDTRNLKEIF
FNILVPGAEEAQKERQRQKELESNYRRVWGSPGGEGTGDLDEFDFVD

| | | |
|---|---|---|
| NOV41c, 175070432 | SEQ ID NO: 953 | 1788 bp |

| | | |
|---|---|---|
| DNA Sequence | ORF Start: at 1 | ORF Stop: end of sequence |

TCAGAATTCGCCCTTGGTACCGGCGGTGTCGGGAGCCTGAACCTGGAGGAGCTGAGTGAGATGCGTTA
TGGGATCGAGATCCTGCCGTTGCCTGTCATGGGAGGGCAGAGCCAATCTTCGGACGTGGTGATTGTCT
CCTCTAAGTACAAACAGCGCTATGAGTGTCGCCTGCCAGCTGGAGCTATTCACTTCCAGCGTGAAAGG
GAGGAGGAAACACCTGCTTACCAAGGGCCTGGGATCCCTGAGTTGTTGAGCCCAATGAGAGATGCTCC
CTGCTTGCTGAAGACAAAGGACTGGTGGACATATGAATTCTGTTATGGACGCCACATCCAGCAATACC
ACATGGAAGATTCAGAGATCAAAGGTGAAGTCCTCTATCTCGGCTACTACCAATCAGCCTTCGACTGG
GATGATGAAACAGCCAAGGCCTCCAAGCAGCATCGTCTTAAACGCTACCACAGCCAGACCTATGGCAA
TGGGTCCAAGTGCGACCTTAATGGGAGGCCCCGGGAGGCCGAGGTTCGGTTCCTCTGTGACGAGGGTG
CAGGTATCTCTGGGGACTACATCGATCGCGTGGACGAGCCCTTGTCCTGCTCTTATGTGCTGACCATT
CGCACTCCTCGGCTCTGCCCCCACCCTCTCCTCCGGCCCCCACCCAGTGCTGCACCGCAGGCCATCCT
ATGGAGATAAAATCATAGAGGAGCTGCAAGATCTAGGCCCCCAAGTGTGGAGTGAGACCAAGTCTGGG
GTGGCACCCCAAAAGATGGCAGGTGCGAGCCCGACCAAGGATGACAGTAAGGACTCAGATTTCTGGAA
GATGCTTAATGAGCCAGAGGACCAGGCCCCAGGAGGGGAGGAGGTGCCGGCTGAGGAGCAGGACCCAA
GCCCTGAGGCAGCAGATTCAGCTTCTGGTGCTCCCAATGATTTTCAGAACAACGTGCAGGTCAAAGTC
AAATATAGGCCAAGAGCAGCCTGTGGATGATGCTGCAGAAGTCCCTCAGAGGGAACCAGAGAAGGAAA
GGGGTGATCCAGAACGGCAGAGAGAGATGGAAGAAGAGGAGGATGAGGATGAGGATGAGGATGAAGAT
GAGGATGAACGGCAGTTACTGGGAGAATTTGAGAAGGAACTGGAAGGGATCCTGCTTCCGTCAGACCG
AGGCCGGCTCCGTTCGGAGGTGAAGGCTGGCATGGAGCGGGAACTGGAAAACATCATCCAGGAGACAG
AGAAAGAGCTGGACCCAGATGGGCTGAAGAAGGAGTCAGAGCGGGATCGGGCAATGCTGGCTCTCACA
TCCACTCTCAACAAACTCATCAAAAGACTGGAGGAAAAACAGAGTCCAGAGCTGGTGAAGAAGCACAA
GAAAAAGAGGGTTGTCCCCAAAAAGCCTCCCCCATCACCCCAACCTACAGGGAAAATTGAGATCAAAA
TTGTCCGCCCATGGGCTGAAGGGACTGAAGAGGGTGCACGTTGGCTGACTGATGAGGACACGAGAAAC
CTCAAGGAGATCTTCTTCAATATCTTGGTGCCGGGAGCTGAAGAGGCCCAGAAGGAACGCCAGCGGCA
GAAAGAGCTGGAGAGCAATTACCGCCGGGTGTGGGGCTCTCCAGGTGGGGAGGGCACAGGGGACCTGG
ACGAATTTGACTTCGTCGAC

NOV41c, 175070432

| | | | |
|---|---|---|---|
| Protein Sequence | SEQ ID NO: 954 | 596 aa | MW at 67601.5kD |

SEFALGTGGVGSLNLEELSEMRYGIEILPLPVMGGQSQSSDVVIVSSKYKQRYECRLPAGAIHFQRER
EEETPAYQGPGIPELLSPMRDAPCLLKTKDWWTYEFCYGRHIQQYHMEDSEIKGEVLYLGYYQSAFDW
DDETAKASKQHRLKRYHSQTYGNGSKCDLNGRPREAEVRFLCDEGAGISGDYIDRVDEPLSCSYVLTI
RTPRLCPHPLLRPPPSAAPQAILCHPSLQPEEYMAYVQRQADSKQYGDKIIEELQDLGPQVWSETKSG
VAPQKMAGASPTKDDSKDSDFWKMLNEPEDQAPGGEEVPAEEQDPSPEAADSASGAPNDFQNNVQVKV
IRSPADLIRFIEELKGGTKKGKPNIGQEQPVDDAAEVPQREPEKERGDPERQREMEEEEDEDEDEDED
EDERQLLGEFEKELEGILLPSDRGRLRSEVKAGMERELENIIQETEKELDPDGLKKESERDRAMLALT
STLNKLIKRLEEKQSPELVKKHKKKRVVPKKPPPSPQPTGKIEIKIVRPWAEGTEEGARWLTDEDTRN
LKEIFFNILVPGAEEAQKERQRQKELESNYRRVWGSPGGEGTGDLDEFDFVD

| | | |
|---|---|---|
| NOV41d, 175070419 | SEQ ID NO: 955 | 1773 bp |

| | | |
|---|---|---|
| DNA Sequence | ORF Start: at 1 | ORF Stop: end of sequence |

GGTACCGGCGGTGTCGGGAGCCTGAACCTGGAGGAGCTGAGTGAGATGCGTTATGGGATCGAGATCCT
GCCGTTGCCTGTCATGGGAGGGCAGAGCCAATCTTCGGACGTGGTGATTGTCTCCTCTAAGTACAAAC
AGCGCTATGAGTGTCGCCTGCCAGCTGGAGCTATTCACTTCCAGCGTGAAAGGGAGGAGGAAACACCT
GCTTACCAAGGGCCTGGGATCCCTGAGTTGTTGAGCCCAATGAGAGATGCTCCCTGCTTGCTGAAGAC
AAAGGACTGGTGGACATATGAATTCTGTTATGGACGCCACATCCAGCAATACCACATGGAAGATTCAG
AGATCAAAGGTGAAGTCCTCTATCTCGGCTACTACCAATCAGCCTTCGACTGGGATGATGAAACAGCC
AAGGCCTCCAAGCAGCATCGTCTTAAACGCTACCACAGCCAGACCTATGGCAATGGGTCCAAGTGCGA
CCTTAATGGGAGGCCCCGGGAGGCCGAGGTTCGGTTCCTCTGTGACGAGGGTGCAGGTATCTCTGGGG
ACTACATCGATCGCGTGGACGAGCCCTTGTCCTGCTCTTATGTGCTGACCATTCGCACTCCTCGGCTC
TGCCCCCACCCTCTCCTCCGGCCCCCACCCAGTGCTGCACCGCAGGCCATCCTCTGTCACCCTTCCCT
ACAGCCTGAGGAGTACATGGCCTACGTTCAGAGGCAAGCCGACTCAAAGCAGTATGGAGATAAAATCA
TAGAGGAGCTGCAAGATCTAGGCCCCCAAGTGTGGAGTGAGACCAAGTCTGGGGTGGCACCCCAAAAG
ATGGCAGGTGCGAGCCCGACCAAGGATGACAGTAAGGACTCAGATTTCTGGAAGATGCTTAATGAGCC
AGAGGACCAGGCCCCAGGAGGGGAGGAGGTGCCGGCTGAGGAGCAGGACCCAAGCCCTGAGGCAGCAG
ATTCAGCTTCTGGTGCTCCCAATGATTTTCAGAACAACGTGCAGGTCAAAGTCATTCGAAGCCCTGCG
GATTTGATTCGATTCATAGAGGAGCTGAAAGGTGGAATAAAAAAGGGGAAGCCAAATATAGGCCAAGA
GCAGCCTGTGGATGATGCTGCAGAAGTCCCTCAGAGGGAACCAGAGAAGGAAAGGGGTGATCCAGAAC
GGCAGAGAGAGATGGAAGAAGAGGAGGATGAGGATGAGGATGAGGATGAAGATGAGGATGAACGGCAG
TTACTGGGAGAATTTGAGAAGGAACTGGAAGGGATCCTGCTTCCGTCAGACCGAGACCGGCTCCGTTC
GGAGGTGAAGGCTGGCATGGAGCGGGAACTGGAAAACATCATCCAGGAGACAGAGAAAGAGCTGGACC
CAGATGGGCTGAAGAAGGAGTCAGAGCGGGATCGGGCAATGCTGGCTCTCACATCCACTCTCAACAAA
CTCATCAAAAGACTGGAGGAAAAACAGAGTCCAGAGCTGGTGAAGAAGCACAAGAAAAAGAGGGTTGT
CCCCAAAAAGCCTCCCCCATCACCCCAACCTACAGGGAAAATTGAGATCAAAATTGTCCGCCCATGGG
CTGAAGGGACTGAAGAGGGTGCACGTTGGCTGACTGATGAGGACACGAGAAACCTCAAGGAGATCTTC
TTCAATATCTTGGTGCCGGGAGCTGAAGAGGCCCAGAAGGAACGCCAGCGGCAGAAAGAGCTGGAGAG
CAATTACCGCCGGGTGTGGGGCTCTCCAGGTGGGGAGGGCACAGGGGACCTGGACGAATTTGACTTCG
TCGAC

NOV41d, 175070419

| | | | |
|---|---|---|---|
| Protein Sequence | SEQ ID NO: 956 | 591 aa | MW at 67124.0kD |

GTGGVGSLNLEELSEMRYGIEILPLPVMGGQSQSSDVVIVSSKYKQRYECRLPAGAIHFQREREEETP
AYQGPGIPELLSPMRDAPCLLKTKDWWTYEFCYGRHIQQYHMEDSEIKGEVLYLGYYQSAFDWDDETA
KASKQHRLKRYHSQTYGNGSKCDLNGRPREAEVRFLCDEGAGISGDYIDRVDEPLSCSYVLTIRTPRL
CPHPLLRPPPSAAPQAILCHPSLQPEEYMAYVQRQADSKQYGDKIIEELQDLGPQVWSETKSGVAPQK
MAGASPTKDDSKDSDFWKMLNEPEDQAPGGEEVPAEEQDPSPEAADSASGAPNDFQNNVQVKVIRSPA
DLIRFIEELKGGIKKGKPNIGQEQPVDDAAEVPQREPEKERGDPERQREMEEEEDEDEDEDEDEDERQ
LLGEFEKELEGILLPSDPDRLRSEVKAGMERELENIIQETEKELDPDGLKKESERDRAMLALTSTLNK
LIKRLEEKQSPELVKKHKKKRVVPKKPPPSPQPTGKIEIKIVRPWAEGTEEGARWLTDEDTRNLKEIF
FNILVPGAEEAQKERQRQKELESNYRRVWGSPGGEGTGDLDEFDFVD

| | | |
|---|---|---|
| NOV41e, 175070438 | SEQ ID NO: 957 | 1938 bp |

| | | |
|---|---|---|
| DNA Sequence | ORF Start: at 1 | ORF Stop: end of sequence |

GGTACCGGCGGTGTCGGGAGCCTGAACCTGGAGGAGCTGAGTGAGATGCGTTATGGGATCGAGATCCT
GCCGTTGCCTGTCATGGGAGGGCAGAGCCAATCTTCGGACGTGGTGATTGTCTCCTCTAAGTACAAAC
AGCGCTATGAGTGTCGCCTGCCAGCTGGAGCTATTCACTTCCAGCGTGAAAGGGAGGAGGAAACACCT
GCTTACCAAGGGCCTGGGATCCCTGAGTTGTTGAGCCCAATGAGAGATGCTCCCTGCTTGCTGAAGAC
AAAGGACTGGTGGACATATGAATTCTGTTATGGACGCCACATCCAGCAATACCACATGGAAGATTCAG
AGATCAAAGGTGAAGTCCTCTATCTCGGCTACTACCAATCAGCCTTCGACTGGGATGATGAAACAGCC
AAGGCCTCCAAGCAGCATCGTCTTAAACGCTACCACAGCCAGACCTATGGCAATGGGTCCAAGTGCGA
CCTTAATGGGAGGCCCCGGGAGGCCGAGGTTCGGTTCCTCTGTGACGAGGGTGCAGGTATCTCTGGGG
ACTACATCGATCGCGTGGACGAGCCCTTGTCCTGCTCTTATGTGCTGACCATTCGCACTCCTCGGCTC
TGCCCCCACCCTCTCCTCCGGCCCCCACCCAGTGCTGCACCGCAGGCCATCCTCTGTCACCCTTCCCT
ACAGCCTGAGGAGTACATGGCCTACGTTCAGAGGCAAGCCGACTCAAAGCAGTATGGAGATAAAATCA
TAGAGGAGCTGCAAGATCTAGGCCCCCAAGTGTGGAGTGAGACCAAGTCTGGGGTGGCACCCCAAAAG
ATGGCAGGTGCGAGCCCGACCAAGGATGACAGTAAGGACTCAGATTTCTGGAAGATGCTTAATGAGCC
AGAGGACCAGGCCCCAGGAGGGGAGGAGGTGCCGGCTGAGGAGCAGGACCCAAGCCCTGAGGCAGCAG
ATTCAGCTTCTGGTGCTCCCAATGATTTTCAGAACAACGTGCAGGTCAAAGTCATTCGAAGCCCTGCG
GATTTGATTCGATTCATAGAGGAGCTGAAAGGTGGAACAAAAAAGGGGAAGCCAAATATAGGCCAAGA
GCAGCCTGTGGATGATGCTGCAGAAGTCCCTCAGAGGGAACCAGAGAAGGAAAGGGGTGATCCAGAAC
GGCAGAGAGAGATGGAAGAAGAGGAGGATGAGGATGAGGATGAGGATGAAGATGAGGATGAACGGCAG
TTACTGGGAGAATTTGAGAAGGAACTGGAAGGGATCCTGCTTCCGTCAGACCGAGACCGGCTCCGTTC
GGAGGTGAAGGCTGGCATGGAGCGGGAACTGGAGAACATCATCCAGGAGACAGAGAAAGAGCTGGACC
CAGATGGGCTGAAGAAGGAGTCAGAGCGGGATCGGGCAATGCTGGCTCTCACATCCACTCTCAACAAA
CTCATCAAAAGACTGGAGGAAAAACAGAGTCCAGAGCTGGTGAAGAAGCACAAGAAAAAGAGGGTTGT
CCCCAAAAAGCCTCCCCCATCACCCCAACCTACAGAGGAGGATCCTGAGCACAGAGTCCGGGTCCGGG
TCACCAAGCTCCGTCTCGGAGGCCCTAATCAGGATCTGACTGTCCTCGAGATGAAACGGGAAAACCCA
CAGCTGAAACAAATCGAGGGGCTGGTGAAGGAGCTGCTGGAGAGGGAGGGACTCACAGCTGCAGGGAA
AATTGAGATCAAAATTGTCCGCCCATGGGCTGAAGGGACTGAAGAGGGTGCACGTTGGCTGACTGATG
AGGACACGAGAAACCTCAAGGAGATCTTCTTCAATATCTTGGTGCCGGGAGCTGAAGAGGCCCAGAAG
GAACGCCAGCGGCAGAAAGAGCTGGAGAGCAATTACCGCCGGGTGTGGGGCTCTCCAGGTGGGGAGGG
CACAGGGGACCTGGACGAATTTGACTTCGTCGAC

NOV41e, 175070438

| | | | |
|---|---|---|---|
| Protein Sequence | SEQ ID NO: 958 | 646 aa | MW at 73427.1kD |

GTGGVGSLNLEELSEMRYGIEILPLPVMGGQSQSSDVVIVSSKYKQRYECRLPAGAIHFQREREEETP
AYQGPGIPELLSPMRDAPCLLKTKDWWTYEFCYGRHIQQYHMEDSEIKGEVLYLGYYQSAFDWDDETA
KASKQHRLKRYHSQTYGNGSKCDLNGRPREAEVRFLCDEGAGISGDYIDRVDEPLSCSYVLTIRTPRL
CPHPLLRPPPSAAPQAILCHPSLQPEEYMAYVQRQADSKQYGDKIIEELQDLGPQVWSETKSGVAPQK
MAGASPTKDDSKDSDFWKMLNEPEDQAPGGEEVPAEEQDPSPEAADSASGAPNDFQNNVQVKVIRSPA
DLIRFIEELKGGTKKGKPNIGQEQPVDDAAEVPQREPEKERGDPERQREMEEEEDEDEDEDEDEDERQ
LLGEFEKELEGILLPSDRDRLRSEVKAGMERELENIIQETEKELDPDGLKKESERDRAMLALTSTLNK
LIKRLEEKQSPELVKKHKKKRVVPKKPPPSPQPTEEDPEHRVRVRVTKLRLGGPNQDLTVLEMKRENP
QLKQIEGLVKELLEREGLTAAGKIEIKIVRPWAEGTEEGARWLTDEDTRNLKEIFFNILVPGAEEAQK
ERQRQKELESNYRRVWGSPGGEGTGDLDEFDFVD

| | | |
|---|---|---|
| NOV41f, 175070408 | SEQ ID NO: 959 | 1938 bp |

| | | |
|---|---|---|
| DNA Sequence | ORF Start: at 1 | ORF Stop: end of sequence |

GGTACCGGCGGTGTCGGGAGCCTGAACCTGGAGGAGCTGAGTGAGATGCGTTATGGGATCGAGATCCT
AGCGCTATGAGTGTCGCCTGCCAGCTGGAGCTATTCACTTCCAGCGTGAAAGGGAGGAGGAAACACCT
GCTTACCAAGGGCCTGGGATCCCTGAGTTGTTGAGCCCAATGAGAGATGCTCCCTGCTTGCTGAAGAC
AAAGGACTGGTGGACATATGAATTCTGTTATGGACGCCACATCCAGCAATACCACATGGAAGATTCAG
AGATCAAAGGTGAAGTCCTCTATCTCGGCTACTACCAATCAGCCTTCGACTGGGATGATGAAACAGCC
AAGGCCTCCAAGCAGCATCGTCTTAAACGCTACCACAGCCAGACCTATGGCAATGGGTCCAAGTGCGA
CCTTAATGGGAGGCCCCGGGAGGCCGAGGTTCGGTTCCTCTGTGACGAGGGTGCAGGTATCTCTGGGG
ACTACATCGATCGCGTGGACGAGCCCTTGTCCTGCTCTTATGTGCTGACCATTCGCACTCCTCGGCTC
TGCCCCCACCCTCTCCTCCGGCCCCCACCCAGTGCTGCACCGCAGGCCATCCTCTGTCACCCTTCCCT
ACAGCCTGAGGAGTACATGGCCTACGTTCAGAGGCAAGCCGACTCAAAGCAGTATGGAGATAAAATCA
TAGAGGAGCTGCAAGATCTAGGCCCCCAAGTGTGGAGTGAGACCAAGTCTGGGGTGGCACCCCAAAAG
ATGGCAGGTGCGAGCCCGACCAAGGATGACAGTAAGGACTCAGATTTCTGGAAGATGCTTAATGAGCC
AGAGGACCAGGCCCCAGGAGGGGAGGAGGTGCCGGCTGAGGAGCAGGACCCAAGCCCTGAGGCAGCAG
ATTCAGCTTCTGGTGCTCCCAATGATTTTCAGAACAACGTGCAGGTCAAAGTCATTCGAAGCCCTGCG
GATTTGATTCGATTCATAGAGGAGCTGAAAGGTGGAACAAAAAAGGGGAAGCCAAATATAGGCCAAGA
GCAGCCTGTGGATGATGCTGCAGAAGTCCCTCAGAGGGAACCAGAGAAGGAAAGGGGTGATCCAGAAC
GGCAGAGAGAGATGGAAGAAGAGGAGGATGAGGATGAGGATGAGGATGAAGATGAGGATGAACGGCAG
TTACTGGGAGAATTTGAGAAGGAACTGGAAGGGATCCTGCTTCCGTCAGACCGAGACCGGCTCCGTTC
GGAGGTGAAGGCTGGCATGGAGCGGGAACTGGAAAACATCATCCAGGAGACAGAGAAAGAGCTGGACC
CAGATGGGCTGAAGAAGGAGTCAGAGCGGGATCGGGCAATGCTGGCTCTCACATCCACTCTCAACAAA
CTCATCAAAAGACTGGAGGAAAAACAGAGTCCAGAGCTGGTGAAGAAGCACAAGAAAAAGAGGGTTGT
CCCCAAAAAGCCTCCCCCATCACCCCAACCTACAGAGGAGGATCCTGAGCACAGAGTCCGGGTCCGGG
TCACCAAGCTCCGTCTCGGAGGCCCTAATCAGGATCTGACTGTCCTCGAGATGAAACGGGAAAACCCA
CAGCTGAAACAAATCGAGGGGCTGGTGAAGGAGCTGCTGGAGAGGGAGGGACTCACAGCTGCAGGGAA
AATTGAGATCAAAATTGTCCGCCCATGGGCTGAAGGGACTGAAGAGGGTGCACGTTGGCTGACTGATG
AGGACACGAGAAACCTCAAGGAGATCTTCTTCAATATCTTGGTGCCGGGAGCTGAAGAGGCCCAGAAG
GAACGCCAGCGGCAGAAAGAGCTGGAGAGCAATTACCGCCGGGTGTGGGGCTCTCCAGGTGGGGAGGG
CACAGGGGACCTGGACGAATTTGACTTCGTCGAC

NOV41f, 175070408

| | | | |
|---|---|---|---|
| Protein Sequence | SEQ ID NO: 960 | 646 aa | MW at 73427.1kD |

GTGGVGSLNLEELSEMRYGIEILPLPVMGGQSQSSDVVIVSSKYKQRYECRLPAGAIHFQREREEETP
AYQGPGIPELLSPMRDAPCLLKTKDWWTYEFCYGRHIQQYHMEDSEIKGEVLYLGYYQSAFDWDDETA
KASKQHRLKRYHSQTYGNGSKCDLNGRPREAEVRFLCDEGAGISGDYIDRVDEPLSCSYVLTIRTPRL
CPHPLLRPPPSAAPQAILCHPSLQPEEYMAYVQRQADSKQYGDKIIEELQDLGPQVWSETKSGVAPQK
MAGASPTKDDSKDSDFWKMLNEPEDQAPGGEEVPAEEQDPSPEAADSASGAPNDFQNNVQVKVIRSPA
DLIRFIEELKGGTKKGKPNIGQEQPVDDAAEVPQREPEKERGDPERQREMEEEEDEDEDEDEDEDERQ
LLGEFEKELEGILLPSDRDRLRSEVKAGMERELENIIQETEKELDPDGLKKESERDRAMLALTSTLNK
LIKRLEEKQSPELVKKHKKKRVTPKKPPPSPQPTEEDPEHRVRVRVTKLRLGGPNQDLTVLEMKRENP
QLKQIEGLVKELLEREGLTAAGKIEIKIVRPWAEGTEEGARWLTDEDTRNLKEIFFNILVPGAEEAQK
ERQRQKELESNYRRVWGSPGGEGTGDLDEFDFVD

| | | |
|---|---|---|
| NOV41g, CG56878-02 | SEQ ID NO: 961 | 1938 bp |

| | | |
|---|---|---|
| DNA Sequence | ORF Start: at 7 | ORF Stop: at 1933 |

GGTACCGGCGGTGTCGGGAGCCTGAACCTGGAGGAGCTGAGTGAGATGCGTTATGGGATCGAGATCCT
GCCGTTGCCTGTCATGGGAGGGCAGAGCCAATCTTCGGACGTGGTGATTGTCTCCTCTAAGTACAAAC
AGCGCTATGAGTGTCGCCTGCCAGCTGGAGCTATTCACTTCCAGCGTGAAAGGGAGGAGGAAACACCT
GCTTACCAAGGGCCTGGGATCCCTGAGTTGTTGAGCCCAATGAGAGATGCTCCCTGCTTGCTGAAGAC
AAAGGACTGGTGGACATATGAATTCTGTTATGGACGCCACATCCAGCAATACCACATGGAAGATTCAG
AGATCAAAGGTGAAGTCCTCTATCTCGGCTACTACCAATCAGCCTTCGACTGGGATGATGAAACAGCC
AAGGCCTCCAAGCAGCATCGTCTTAAACGCTACCACAGCCAGACCTATGGCAATGGGTCCAAGTGCGA
CCTTAATGGGAGGCCCCGGGAGGCCGAGGTTCGGTTCCTCTGTGACGAGGGTGCAGGTATCTCTGGGG
ACTACATCGATCGCGTGGACGAGCCCTTGTCCTGCTCTTATGTGCTGACCATTCGCACTCCTCGGCTC
TGCCCCCACCCTCTCCTCCGGCCCCCACCCAGTGCTGCACCGCAGGCCATCCTCTGTCACCCTTCCCT
ACAGCCTGAGGAGTACATGGCCTACGTTCAGAGGCAAGCCGACTCAAAGCAGTATGGAGATAAAATCA
TAGAGGAGCTGCAAGATCTAGGCCCCCAAGTGTGGAGTGAGACCAAGTCTGGGGTGGCACCCCAAAAG
ATGGCAGGTGCGAGCCCGACCAAGGATGACAGTAAGGACTCAGATTTCTGGAAGATGCTTAATGAGCC
AGAGGACCAGGCCCCAGGAGGGGAGGAGGTGCCGGCTGAGGAGCAGGACCCAAGCCCTGAGGCAGCAG
ATTCAGCTTCTGGTGCTCCCAATGATTTTCAGAACAACGTGCAGGTCAAAGTCATTCGAAGCCCTGCG
GATTTGATTCGATTCATAGAGGAGCTGAAAGGTGGAACAAAAAAGGGGAAGCCAAATATAGGCCAAGA
GCAGCCTGTGGATGATGCTGCAGAAGTCCCTCAGAGGGAACCAGAGAAGGAAAGGGGTGATCCAGAAC
GGCAGAGAGAGATGGAAGAAGAGGAGGATGAGGATGAGGATGAGGATGAAGATGAGGATGAACGGCAG
TTACTGGGAGAATTTGAGAAGGAACTGGAAGGGATCCTGCTTCCGTCAGACCGAGACCGGCTCCGTTC
GGAGGTGAAGGCTGGCATGGAGCGGGAACTGGAGAACATCATCCAGGAGACAGAGAAAGAGCTGGACC
CAGATGGGCTGAAGAAGGAGTCAGAGCGGGATCGGGCAATGCTGGCTCTCACATCCACTCTCAACAAA
CTCATCAAAAGACTGGAGGAAAAACAGAGTCCAGAGCTGGTGAAGAAGCACAAGAAAAAGAGGGTTGT
CCCCAAAAAGCCTCCCCCATCACCCCAACCTACAGAGGAGGATCCTGAGCACAGAGTCCGGGTCCGGG
TCACCAAGCTCCGTCTCGGAGGCCCTAATCAGGATCTGACTGTCCTCGAGATGAAACGGGAAAACCCA
AATTGAGATCAAAATTGTCCGCCCATGGGCTGAAGGGACTGAAGAGGGTGCACGTTGGCTGACTGATG
AGGACACGAGAAACCTCAAGGAGATCTTCTTCAATATCTTGGTGCCGGGAGCTGAAGAGGCCCAGAAG
GAACGCCAGCGGCAGAAAGAGCTGGAGAGCAATTACCGCCGGGTGTGGGGCTCTCCAGGTGGGGAGGG
CACAGGGGACCTGGACGAATTTGACTTCGTCGAC

NOV41g, CG56878-02

| | | | |
|---|---|---|---|
| Protein Sequence | SEQ ID NO: 962 | 642 aa | MW at 73054.8kD |

GGVGSLNLEELSEMRYGIEILPLPVMGGQSQSSDVVIVSSKYKQRYECRLPAGAIHFQREREEETPAY
QGPGIPELLSPMRDAPCLLKTKDWWTYEFCYGRHIQQYHMEDSEIKGEVLYLGYYQSAFDWDDETAKA
SKQHRLKRYHSQTYGNGSKCDLNGRPREAEVRFLCDEGAGISGDYIDRVDEPLSCSYVLTIRTPRLCP
HPLLRPPPSAAPQAILCHPSLQPEEYMAYVQRQADSKQYGDKIIEELQDLGPQVWSETKSGVAPQKMA
GASPTKDDSKDSDFWKMLNEPEDQAPGGEEVPAEEQDPSPEAADSASGAPNDFQNINQVKVIRSPADL
IRFIEELKGGTKKGKPNIGQEQPVDDAAEVPQREPEKERGDPERQREMEEEEDEDEDEDEDEDERQLL
GEFEKELEGILLPSDRDRLRSEVKAGMERELENIIQETEKELDPDGLKKESERDRAMLALTSTLNKLI
KRLEEKQSPELVKKHKKKRVVPKKPPPSPQPTEEDPEHRVRVRVTKLRLGGPNQDLTVLEMKRENPQL
KQIEGLVKELLEREGLTAAGKIEIKIVRPWAEGTEEGARWLTDEDTRNLKEIFFNILVPGAEEAQKER
QRQKELESNYRRVWGSPGGEGTGDLDEFDF

| | | |
|---|---|---|
| NOV41h, CG56878-03 | SEQ ID NO: 963 | 1773 bp |

| | | |
|---|---|---|
| DNA Sequence | ORF Start: at 7 | ORF Stop: at 1768 |

GGTACCGGCGGTGTCGGGAGCCTGAACCTGGAGGAGCTGAGTGAGATGCGTTATGGGATCGAGATCCT
GCCGTTGCCTGTCATGGGAGGGCAGAGCCAATCTTCGGACGTGGTGATTGTCTCCTCTAAGTACAAAC
AGCGCTATGAGTGTCGCCTGCCAGCTGGAGCTATTCACTTCCAGCGTGAAAGGGAGGAGGAAACACCT
GCTTACCAAGGGCCTGGGATCCCTGAGTTGTTGAGCCCAATGAGAGATGCTCCCTGCTTGCTGAAGAC
AAAGGACTGGTGGACATATGAATTCTGTTATGGACGCCACATCCAGCAATACCACATGGAAGATTCAG
AGATCAAAGGTGAAGTCCTCTATCTCGGCTACTACCAATCAGCCTTCGACTGGGATGATGAAACAGCC
AAGGCCTCCAAGCAGCATCGTCTTAAACGCTACCACAGCCAGACCTATGGCAATGGGTCCAAGTGCGA
CCTTAATGGGAGGCCCCGGGAGGCCGAGGTTCGGTTCCTCTGTGACGAGGGTGCAGGTATCTCTGGGG
ACTACATCGATCGCGTGGACGAGCCCTTGTCCTGCTCTTATGTGCTGACCATTCGCACTCCTCGGCTC
TGCCCCCACCCTCTCCTCCGGCCCCCACCCAGTGCTGCACCGCAGGCCATCCTCTGTCACCCTTCCCT
ACAGCCTGAGGAGTACATGGCCTACGTTCAGAGGCAAGCCGACTCAAAGCAGTATGGAGATAAAATCA
TAGAGGAGCTGCAAGATCTAGGCCCCCAAGTGTGGAGTGAGACCAAGTCTGGGGTGGCACCCCAAAAG
ATGGCAGGTGCGAGCCCGACCAAGGATGACAGTAAGGACTCAGATTTCTGGAAGATGCTTAATGAGCC
AGAGGACCAGGCCCCAGGAGGGGAGGAGGTGCCGGCTGAGGAGCAGGACCCAAGCCCTGAGGCAGCAG
ATTCAGCTTCTGGTGCTCCCAATGATTTTCAGAACAACGTGCAGGTCAAAGTCATTCGAAGCCCTGCG
GATTTGATTCGATTCATAGAGGAGCTGAAAGGTGGAATAAAAAAGGGGAAGCCAAATATAGGCCAAGA
GCAGCCTGTGGATGATGCTGCAGAAGTCCCTCAGAGGGAACCAGAGAAGGAAAGGGGTGATCCAGAAC
GGCAGAGAGAGATGGAAGAAGAGGAGGATGAGGATGAGGATGAGGATGAAGATGAGGATGAACGGCAG
TTACTGGGAGAATTTGAGAAGGAACTGGAAGGGATCCTGCTTCCGTCAGACCGAGACCGGCTCCGTTC
GGAGGTGAAGGCTGGCATGGAGCGGGAACTGGAAAACATCATCCAGGAGACAGAGAAAGAGCTGGACC
CAGATGGGCTGAAGAAGGAGTCAGAGCGGGATCGGGCAATGCTGGCTCTCACATCCACTCTCAACAAA
CTCATCAAAAGACTGGAGGAAAAACAGAGTCCAGAGCTGGTGAAGAAGCACAAGAAAAAGAGGGTTGT
CCCCAAAAAGCCTCCCCCATCACCCCAACCTACAGGGAAAATTGAGATCAAAATTGTCCGCCCATGGG
CTGAAGGGACTGAAGAGGGTGCACGTTGGCTGACTGATGAGGACACGAGAAACCTCAAGGAGATCTTC
TTCAATATCTTGGTGCCGGGAGCTGAAGAGGCCCAGAAGGAACGCCAGCGGCAGAAAGAGCTGGAGAG
CAATTACCGCCGGGTGTGGGGCTCTCCAGGTGGGGAGGGCACAGGGGACCTGGACGAATTTGACTTCG
TCGAC

NOV41h, CG56878-03

| | | | |
|---|---|---|---|
| Protein Sequence | SEQ ID NO: 964 | 587 aa | MW at 66751.6kD |

GGVGSLNLEELSEMRYGIETLPLPVMGGQSQSSDVVIVSSKYKQRYECRLPAGAIHFQREREEETPAY
QGPGIPELLSPMRDAPCLLKTKDWWTYEFCYGRHIQQYHMEDSEIKGEVLYLGYYQSAFDWDDETAKA
SKQHRLKRYHSQTYGNGSKCDLNGRPREAEVRFLCDEGAGISGDYIDRVDEPLSCSYVLTIRTPRLCP
HPLLRPPPSAAPQAILCHPSLQPEEYMAYVQRQADSKQYGDKIIEELQDLGPQVWSETKSGVAPQKMA
GASPTKDDSKDSDFWKMLNEPEDQAPGGEEVPAEEQDPSPEAADSASGAPNDFQNNVQVKVIRSPADL
IRFIEELKGGIKKGKPNIGQEQPVDDAAEVPQREPEKERGDPERQREMEEEEDEDEDEDEDEDERQLL
GEFEKELEGILLPSDRDRLRSEVKAGMERELENIIQETEKELDPDGLKKESERDRAMLALTSTLNKLI
KRLEEKQSPELVKKHKKKRVVPKKPPPSPQPTGKIEIKIVRPWAEGTEEGARWLTDEDTHNLKEIFFN
ILVPGAEEAQKERQRQKELESNYRRVWGSPGGEGTGDLDEFDF

| | | |
|---|---|---|
| NOV41i, CG56878-04 | SEQ ID NO: 965 | 2702 bp |

| | | |
|---|---|---|
| DNA Sequence | ORF Start: ATG at 86 | ORF Stop: TGA at 2036 |

TTGCACTCTCCCACACCCTTTTCTTTTCGTCCGCTCTTCGCTTATTTCTCCCGCCGTCTCCTCTGCAT
AAGAAGGGGAACGAAAGATGGCGGCGGAAACGCTGCTGTCCAGTTTGTTAGGACTGCTGCTTCTGGGA
CTCCTGTTACCCGCAAGTCTGACCGGCGGTGTCGGGAGCCTGAACCTGGAGGAGCTGAGTGAGATGCG
TTATGGGATCGAGATCCTGCCGTTGCCTGTCATGGGAGGGCAGAGCCAATCTTCGGACGTGGTGATTG
TCTCCTCTAAGTACAAACAGCGCTATGAGTGTCGCCTGCCAGCTGGAGCTATTCACTTCCAGCGTGAA
AGGGAGGAGGAAACACCTGCTTACCAAGGGCCTGGGATCCCTGAGTTGTTGAGCCCAATGAGAGATGC
TCCCTGCTTGCTGAAGACAAAGGACTGGTGGACATATGAATTCTGTTATGGACGCCACATCCAGCAAT
ACCACATGGAAGATTCAGAGATCAAAGGTGAAGTCCTCTATCTCGGCTACTACCAATCAGCCTTCGAC
TGGGATGATGAAACAGCCAAGGCCTCCAAGCAGCATCGTCTTAAACGCTACCACAGCCAGACCTATGG
CAATGGGTCCAAGTGCGACCTTAATGGGAGGCCCCGGGAGGCCGAGGTTCGGTTCCTCTGTGACGAGG
GTGCAGGTATCTCTGGGGACTACATCGATCGCGTGGACGAGCCCTTGTCCTGCTCTTATGTGCTGACC
CCTCTGTCACCCTTCCCTACAGCCTGAGGAGTACATGGCCTACGTTCAGAGGCAAGCCGACTCAAAGC
AGTATGGAGATAAAATCATAGAGGAGCTGCAAGATCTAGGCCCCCAAGTGTGGAGTGAGACCAAGTCT
GGGGTGGCACCCCAAAAGATGGCAGGTGCGAGCCCGACCAAGGATGACAGTAAGGACTCAGATTTCTG
GAAGATGCTTAATGAGCCAGAGGACCAGGCCCCAGGAGGGGAGGAGGTGCCGGCTGAGGAGCAGGACC
GTCATTCGAAGCCCTGCGGATTTGATTCGATTCATAGAGGAGCTGAAAGGTGGAACAAAAAAGGGGAA
GCCAAATATAGGCCAAGAGCAGCCTGTGGATGATGCTGCAGAAGTCCCTCAGAGGGAACCAGAGAAGG
AAAGGGGTGATCCAGAACGGCAGAGAGAGATGGAAGAAGAGGAGGATGAGGATGAGGATAAGATGAGG
ATGAACGGCAGTTACTGGGGAGAATTTGAGAAGGAACTGGAAGGGATCCTGCTTCCGTCAGACCGAGA
CCGGCTCCGTTCGGAGACAGAGAAAGAGCTGGACCCAGATGGGCTGAAGAAGGAGTCAGAGCGGGATC
GGGCAATGCTGGCTCTCACATCCACTCTCAACAAACTCATCAAAAGACTGGAGGAAAAACAGAGTCCA
GAGCTGGTGAAGAAGCACAAGAAAAAGAGGGTTGTCCCCAAAAAGCCTCCCCCATCACCCCAACCTAC
AGAGGAGGATCCTGAGCACAGAGTCCGGGTCCGGGTCACCAAGCTCCGTCTCGGAGGCCCTAATCAGG
ATCTGACTGTCCTCGAGATGAAACGGGAAAACCCACAGCTGAAACAAATCGAGGGGCTGGTGAAGGAG
CTGCTGGAGAGGGAGGGACTCACAGCTGCAGGGAAAATTGAGATCAAAATTGTCCGCCCATGGGCTGA
AGGGACTGAAGAGGGTGCACGTTGGCTGACTGATGAGGACACGAGAAACCTCAAGGAGATCTTCTTCA
ATATCTTGGTGCCGGGAGCTGAAGAGGCCCAGAAGGAACGCCAGCGGCAGAAAGAGCTGGAGAGCAAT
TACCGCCGGGTGTGGGGCTCTCCAGGTGGGGAGGGCACAGGGGACCTGGACGAATTTGACTTCTGAGA
CCAACACTACACTTGACCCTTCACGGAATCCAGACTCTTCCTGGACTGGCTTGCCTCCTCCCCACCTC
CCCACCCTGGAACCCCTGAGGGCCAAACAGCAGAGTGGAGCTGAGCTGTGGACCTCTCGGGCAACTCT
GTGGGTGTGGGGGCCCTGGGTGAATGCTGCTGCCCCTGCTGGCAGCCACCTTGAGACCTCACCGGGCC
TGTGATATTTGCTCTCCTGAACTCTCACTCAATCCTCTTCCTCTCCTCTGTGGCTTTTCCTGTTATTG
TCCCCTAATGATAGGATATTCCCTGCTGCCTACCTGGAGATTCAGTAGGATCTTTTGAGTGGAGGTGG
GTAGAGAGAGCAAGGAGGGCAGGACACTTAGCAGGCACTGAGCAAGCAGGCCCCCACCTGCCCTTAGT
GATGTTTGGAGTCGTTTTACCCTCTTCTATGGAATTGCCTGTGGATTCCTTCTCCCTTCCCTGCCCAC
CGTGTCCTACAATTGTGCTCTGAGTGAGAGCCTTCCTCTCTGCTAGGAAGGTTATGTGCCTTACTCCG
CAATCGGAAAGTTAGCCACGTTCTAATCGTTATACAAGGCTAAAAAAAATAAATATTTATACCCGTTT
TTCCCTGATTTATTTTTAAATATTATATTATTTTTAATATAATTTGTGGG

NOV41i, CG56878-04

| | | | |
|---|---|---|---|
| Protein Sequence | SEQ ID NO: 966 | 650 aa | MW at 73601.9kD |

MAAETLLSSLLGLLLLGLLLPASLTGGVGSLNLEELSEMRYGIEILPLPVMGGQSQSSDVVIVSSKYK
QRYECRLPAGAIHFQREREEETPAYQGPGIPELLSPMRDAPCLLKTKDWWTYEFCYGRHIQQYHMEDS
EIKGEVLYLGYYQSAFDWDDETAKASKQHRLKRYHSQTYGNGSKCDLNGRPREAEVRFLCDEGAGISG
DYIDRVDEPLSCSYVLTIRTPRLCPHPLLRPPPSAAPQAILCHPSLQPEEYMAYVQRQADSKQYGDKI
IEELQDLGPQVWSETKSGVAPQKMAGASPTKDDSKDSDFWKMLNEPEDQAPGGEEVPAEEQDPSPEAA
DSASGAPNDFQNNVQVKVIRSPADLIRFIEELKGGTKKGKPNIGQEQPVDDAAEVPQREPEKERGDPE
RQREMEEEEDEDEDKMRMNGSYWGEFEKELEGILLPSDRDRLRSETEKELDPDGLKKESERDRAMLAL
TSTLNKLIKRLEEKQSPELVKKHKKKRVVPKKPPPSPQPTEEDPEHRVRVRVTKLRLGGPNQDLTVLE
MKRENPQLKQIEGLVKELLEREGLTAAGKIEIKIVRPWAEGTEEGARWLTDEDTRNLKEIFFNILVPG
AEEAQKERQRQKELESNYRRVWGSPGGEGTGDLDEFDF

| | |
|---|---|
| SEQ ID NO: 967 | 2739 bp |

| | | |
|---|---|---|
| NOV41j, SNP13382511 of | ORF Start: ATG at 86 | ORF Stop: TGA at 2090 |

| | | |
|---|---|---|
| CG56878-01, DNA Sequence | SNP Pos: 2596 | SNP Change: C to T |

TTGCACTCTCCCACACCCTTTTCTTTTCGTCCGCTCTTCGCTTATTTCTCCCGCCGTCTCCTCTGCAT
AAGAAGGGGAACGAAAGATGGCGGCGGAAACGCTGCTGTCCAGTTTGTTAGGACTGCTGCTTCTGGGA
CTCCTGTTACCCGCAAGTCTGACCGGCGGTGTCGGGAGCCTGAACCTGGAGGAGCTGAGTGAGATGCG
TTATGGGATCGAGATCCTGCCGTTGCCTGTCATGGGAGGGCAGAGCCAATCTTCGGACGTGGTGATTG
TCTCCTCTAAGTACAAACAGCGCTATGAGTGTCGCCTGCCAGCTGGAGCTATTCACTTCCAGCGTGAA
AGGGAGGAGGAAACACCTGCTTACCAAGGGCCTGGGATCCCTGAGTTGTTGAGCCCAATGAGAGATGC
TCCCTGCTTGCTGAAGACAAAGGACTGGTGGACATATGAATTCTGTTATGGACGCCACATCCAGCAAT
ACCACATGGAAGATTCAGAGATCAAAGGTGAAGTCCTCTATCTCGGCTACTACCAATCAGCCTTCGAC
TGGGATGATGAAACAGCCAAGGCCTCCAAGCAGCATCGTCTTAAACGCTACCACAGCCAGACCTATGG
CAATGGGTCCAAGTGCGACCTTAATGGGAGGCCCCGGGAGGCCGAGGTTCGGTTCCTCTGTGACGAGG
GTGCAGGTATCTCTGGGGACTACATCGATCGCGTGGACGAGCCCTTGTCCTGCTCTTATGTGCTGACC
ATTCGCACTCCTCGGCTCTGCCCCCACCCTCTCCTCCGGCCCCCACCCAGTGCTGCACCGCAGGCCAT
CCTCTGTCACCCTTCCCTACAGCCTGAGGAGTACATGGCCTACGTTCAGAGGCAAGCCGTAGACTCAA
AGCAGTATGGAGATAAAATCATAGAGGAGCTGCAAGATCTAGGCCCCCAAGTGTGGAGTGAGACCAAG
TCTGGGGTGGCACCCCAAAAGATGGCAGGTGCGAGCCCGACCAAGGATGACAGTAAGGACTCAGATTT
CTGGAAGATGCTTAATGAGCCAGAGGACCAGGCCCCAGGAGGGGAGGAGGTGCCGGCTGAGGAGCAGG
ACCCAAGCCCTGAGGCAGCAGATTCAGCTTCTGGTGCTCCCAATGATTTTCAGAACAACGTGCAGGTC
AAAGTCATTCGAAGCCCTGCGGATTTGATTCGATTCATAGAGGAGCTGAAAGGTGGAACAAAAAAGGG
GAAGCCAAATATAGGCCAAGAGCAGCCTGTGGATGATGCTGCAGAAGTCCCTCAGAGGGAACCAGAGA
AGGAAAGGGGTGATCCAGAACGGCAGAGAGAGATGGAAGAAGAGGAGGATGAGGATGAGGATGAGGAT
GAAGATGAGGATGAACGGCAGTTACTGGGAGAATTTGAGAAGGAACTGGAAGGGATCCTGCTTCCGTC
AGACCGAGACCGGCTCCGTTCGGAGGTGAAGGCTGGCATGGAGCGGGAACTGGAGAACATCATCCAGG
AGACAGAGAAAGAGCTGGACCCAGATGGGCTGAAGAAGGAGTCAGAGCGGGATCGGGCAATGCTGGCT
CTCACATCCACTCTCAACAAACTCATCAAAAGACTGGAGGAAAAACAGAGTCCAGAGCTGGTGAAGAA
GCACAAGAAAAAGAGGGTTGTCCCCAAAAAGCCTCCCCCATCACCCCAACCTACAGAGGAGGATCCTG
AGCACAGAGTCCGGGTCCGGGTCACCAAGCTCCGTCTCGGAGGCCCTAATCAGGATCTGACTGTCCTC
GAGATGAAACGGGAAAACCCACAGCTGAAACAAATCGAGGGGCTGGTGAAGGAGCTGCTGGAGAGGGA
GGGACTCACAGCTGCAGGGAAAATTGAGATCAAAATTGTCCGCCCATGGGCTGAAGGGACTGAAGAGG
GGAGCTGAAGAGGCCCAGAAGGAACGCCAGCGGCAGAAAGAGCTGGAGAGCAATTACCGCCGGGTGTG
GGGCTCTCCAGGTGGGGAGGGCACAGGGGACCTGGACGAATTTGACTTCTGAGACCAACACTACACTT
GACCCTTCACGGAATCCAGACTCTTCCTGGACTGGCTTGCCTCCTCCCCACCTCCCCACCCTGGAACC
CCTGAGGGCCAAACAGCAGAGTGGAGCTGAGCTGTGGACCTCTCGGGCAACTCTGTGGGTGTGGGGGC
CCTGGGTGAATGCTGCTGCCCCTGCTGGCAGCCACCTTGAGACCTCACCGGGCCTGTGATATTTGCTC
TCCTGAACTCTCACTCAATCCTCTTCCTCTCCTCTGTGGCTTTTCCTGTTATTGTCCCCTAATGATAC
GATATTCCCTGCTGCCTACCTGGAGATTCAGTAGGATCTTTTGAGTGGAGGTGGGTAGAGAGAGCAAG
GAGGGCAGGACACTTAGCAGGCACTGAGCAAGCAGGCCCCCACCTGCCCTTAGTGATGTTTGGAGTCG
TTTTACCCTCTTCTATTGAATTGCCTTGGGATTTCCTTCTCCCTTTCCCTGCCCACCCTGTCCCCTAC
AATTTGTGCTTTTGAGTTGAGGAGCCTTCACCTCTGTTGCTGAGGAAATGGTAGAATGCTGCCTATCA
CCTCCAGCACAATCCCAGCGACAAAGGTGTGAAGCACCCACCATGTTCTTGAACAATCAGGTTTCTAA
ATAAACAACTGGACCATCA

| | |
|---|---|
| NOV41j, SNP13382511 of | MW at 75659.9kD |

| | | | |
|---|---|---|---|
| CG56878-01 | SEQ ID NO: 968 | 668 aa | SNP Change: no change |

MAAETLLSSLLGLLLLGLLLPASLTGGVGSLNLEELSEMRYGIEILPLPVMGGQSQSSDVVIVSSKYK
QRYECRLPAGAIHFQREREEETPAYQGPGIPELLSPMRDAPCLLKTKDWWTYEFCYGRHIQQYHMEDS
EIKGEVLYLGYYQSAFDWDDETAKASKQHRLKRYHSQTYGNGSKCDLNGRPREAEVRFLCDEGAGISG
DYIDRVDEPLSCSYVLTIRTPRLCPHPLLRPPPSAAPQAILCHPSLQPEEYMAYVQRQAVDSKQYGDK
IIEELQDLGPQVWSETKSGVAPQKMAGASPTKDDSKDSDFWKMLNEPEDQAPGGEEVPAEEQDPSPEA
ADSASGAPNDFQNNVQVKVIRSPADLIRFIEELKGGTKKGKPNIGQEQPVDDAAEVPQREPEKERGDP
ERQREMEEEEDEDEDEDEDEDERQLLGEFEKELEGILLPSDRDRLRSEVKAGMERELENIIQETEKEL
DPDGLKKESERDRAMLALTSTLNKLIKRLEEKQSPELVKKHKKKRVVPKKPPPSPQPTEEDPEHRVRV
RVTKLRLGGPNQDLTVLEMKRENPQLKQIEGLVKELLEREGLTAAGKIEIKIVRPWAEGTEEGARWLT
DEDTRNLKEIFFNILVPGAEEAQKERQRQKELESNYRRVWGSPGGEGTGDLDEFDF

| | |
|---|---|
| SEQ ID NO: 969 | 2739 bp |

| | | |
|---|---|---|
| NOV41k, SNP13382506 of | ORF Start: ATG at 86 | ORF Stop: TGA at 2090 |

| | | |
|---|---|---|
| CG56878-01, DNA Sequence | SNP Pos: 2671 | SNP Change: C to T |

TTGCACTCTCCCACACCCTTTTCTTTTCGTCCGCTCTTCGCTTATTTCTCCCGCCGTCTCCTCTGCAT
CTCCTGTTACCCGCAAGTCTGACCGGCGGTGTCGGGAGCCTGAACCTGGAGGAGCTGAGTGAGATGCG
TTATGGGATCGAGATCCTGCCGTTGCCTGTCATGGGAGGGCAGAGCCAATCTTCGGACGTGGTGATTG
AGGGAGGAGGAAACACCTGCTTACCAAGGGCCTGGGATCCCTGAGTTGTTGAGCCCAATGAGAGATGC
TCCCTGCTTGCTGAAGACAAAGGACTGGTGGACATATGAATTCTGTTATGGACGCCACATCCAGCAAT
ACCACATGGAAGATTCAGAGATCAAAGGTGAAGTCCTCTATCTCGGCTACTACCAATCAGCCTTCGAC
TGGGATGATGAAACAGCCAAGGCCTCCAAGCAGCATCGTCTTAAACGCTACCACAGCCAGACCTATGG
CAATGGGTCCAAGTGCGACCTTAATGGGAGGCCCCGGGAGGCCGAGGTTCGGTTCCTCTGTGACGAGG
GTGCAGGTATCTCTGGGGACTACATCGATCGCGTGGACGAGCCCTTGTCCTGCTCTTATGTGCTGACC
ATTCGCACTCCTCGGCTCTGCCCCCACCCTCTCCTCCGGCCCCCACCCAGTGCTGCACCGCAGGCCAT
CCTCTGTCACCCTTCCCTACAGCCTGAGGAGTACATGGCCTACGTTCAGAGGCAAGCCGTAGACTCAA
AGCAGTATGGAGATAAAATCATAGAGGAGCTGCAAGATCTAGGCCCCCAAGTGTGGAGTGAGACCAAG
TCTGGGGTGGCACCCCAAAAGATGGCAGGTGCGAGCCCGACCAAGGATGACAGTAAGGACTCAGATTT
CTGGAAGATGCTTAATGAGCCAGAGGACCAGGCCCCAGGAGGGGAGGAGGTGCCGGCTGAGGAGCAGG
ACCCAAGCCCTGAGGCAGCAGATTCAGCTTCTGGTGCTCCCAATGATTTTCAGAACAACGTGCAGGTC
AAAGTCATTCGAAGCCCTGCGGATTTGATTCGATTCATAGAGGAGCTGAAAGGTGGAACAAAAAAGGG
GAAGCCAAATATAGGCCAAGAGCAGCCTGTGGATGATGCTGCAGAAGTCCCTCAGAGGGAACCAGAGA
AGGAAAGGGGTGATCCAGAACGGCAGAGAGAGATGGAAGAAGAGGAGGATGAGGATGAGGATGAGGAT
GAAGATGAGGATGAACGGCAGTTACTGGGAGAATTTGAGAAGGAACTGGAAGGGATCCTGCTTCCGTC
AGACCGAGACCGGCTCCGTTCGGAGGTGAAGGCTGGCATGGAGCGGGAACTGGAGAACATCATCCAGG
AGACAGAGAAAGAGCTGGACCCAGATGGGCTGAAGAAGGAGTCAGAGCGGGATCGGGCAATGCTGGCT
CTCACATCCACTCTCAACAAACTCATCAAAAGACTGGAGGAAAAACAGAGTCCAGAGCTGGTGAAGAA
GCACAAGAAAAAGAGGGTTGTCCCCAAAAAGCCTCCCCCATCACCCCAACCTACAGAGGAGGATCCTG
AGCACAGAGTCCGGGTCCGGGTCACCAAGCTCCGTCTCGGAGGCCCTAATCAGGATCTGACTGTCCTC
GAGATGAAACGGGAAAACCCACAGCTGAAACAAATCGAGGGGCTGGTGAAGGAGCTGCTGGAGAGGGA
GGGACTCACAGCTGCAGGGAAAATTGAGATCAAAATTGTCCGCCCATGGGCTGAAGGGACTGAAGAGG
GTGCACGTTGGCTGACTGATGAGGACACGAGAAACCTCAAGGAGATCTTCTTCAATATCTTGGTGCCG
GGAGCTGAAGAGGCCCAGAAGGAACGCCAGCGGCAGAAAGAGCTGGAGAGCAATTACCGCCGGGTGTG
GGGCTCTCCAGGTGGGGAGGGCACAGGGGACCTGGACGAATTTGACTTCTG&GACCAACACTACACTT
CCTGAGGGCCAAACAGCAGAGTGGAGCTGAGCTGTGGACCTCTCGGGCAACTCTGTGGGTGTGGGGGC
CCTGGGTGAATGCTGCTGCCCCTGCTGGCAGCCACCTTGAGACCTCACCGGGCCTGTGATATTTGCTC
TCCTGAACTCTCACTCAATCCTCTTCCTCTCCTCTGTGGCTTTTCCTGTTATTGTCCCCTAATGATAG
GATATTCCCTGCTGCCTACCTGGAGATTCAGTAGGATCTTTTGAGTGGAGGTGGGTAGAGAGAGCAAG
GAGGGCAGGACACTTAGCAGGCACTGAGCAAGCAGGCCCCCACCTGCCCTTAGTGATGTTTGGAGTCG
TTTTACCCTCTTCTATTGAATTGCCTTGGGATTTCCTTCTCCCTTTCCCTGCCCACCCTGTCCCCTAC
CCTCCAGCACAATCCCAGTGAAAAAGGTGTGAAGCACCCACCATGTTCTTGAACAATCAGGTTTCTAA
ATAAACAACTGGACCATCA

| | |
|---|---|
| NOV41k, SNP13382506 of | MW at 75659.9kD |

| | | | |
|---|---|---|---|
| CG56878-01, Protein Sequence | SEQ ID NO: 970 | 668 aa | SNP Change: no change |

MAAETLLSSLLGLLLLGLLLPASLTGGVGSLNLEELSEMRYGIEILPLPVMGGQSQSSDVVIVSSKYK
QRYECRLPAGAIHFQREREEETPAYQGPGIPELLSPMRDAPCLLKTKDWWTYEFCYGRHIQQYHMEDS
EIKGEVLYLGYYQSAFDWDDETAKASKQHRLKRYHSQTYGNGSKCDLNGRPREAEVRFLCDEGAGISG
DYIDRVDEPLSCSYVLTIRTPRLCPHPLLRPPPSAAPQAILCHPSLQPEEYMAYVQRQAVDSKQYGDK
IIEELQDLGPQVWSETKSGVAPQKMAGASPTKDDSKDSDFWKMLNEPEDQAPGGEEVPAEEQDPSPEA
ADSASGAPNDFQNNVQVKVIRSPADLIRFIEELKGGTKKGKPNIGQEQPVDDAAEVPQREPEKERGDP
ERQREMEEEEDEDEDEDEDEDERQLLGEFEKELEGILLPSDRDRLRSEVKAGMERELENIIQETEKEL
DPDGLKKESERDRAMLALTSTLNKLIKRLEEKQSPELVKKHKKKRVVPKKPPPSPQPTEEDPEHRVRV
RVTKLRLGGPNQDLTVLEMKRENPQLKQIEGLVKELLEREGLTAAGKIEIKIVRPWAEGTEEGARWLT
DEDTRNLKEIFFNILVPGAEEAQKERQRQKELESNYRRVWGSPGGEGTGDLDEFDF

[0591] A ClustalW comparison of the above protein sequences yields the following sequence alignment shown in Table 41B.

TABLE 41B
Comparison of the NOV41 protein sequences.

| | | |
|---|---|---|
| NOV41a | MAAETLLSSLLGLLLLGLLLPASLTGGVGSLNLEELSEMRYGIEILPLPVMGGQSQSSDV | (SEQ ID NO:950) |
| NOV4lb | -------G----------------TGGVGSLNLEELSEMRYGIEILPLPVMGGQSQSSDV | (SEQ ID NO:952) |
| NOV41c | --SEFALG----------------TGGVGSLNLEELSEMRYGIEILPLPVMGGQSQSSDV | (SEQ ID NO:954) |
| NOV41d | -------G----------------TGGVGSLNLEELSEMRYGIEILPLPVMGGQSQSSDV | (SEQ ID NO:956) |
| NOV41e | -------G----------------TGGVGSLNLEELSEMRYGIEILPLPVMGGQSQSSDV | (SEQ ID NO:958) |
| NOV41f | -------G----------------TGGVGSLNLEELSEMRYGIEILPLPVMGGQSQSSDV | (SEQ ID NO:960) |
| NOV41g | -------G------------------GVGSLNLEELSEMRYGIEILPLPVMGGQSQSSDV | (SEQ ID NO:960) |
| NOV41h | -------G------------------GVGSLNLEELSEMRYGIEILPLPVMGGQSQSSDV | (SEQ ID NO:962) |
| NOV41i | MAAETLLSSLLGLLLLGLLLPASLTGGVGSLNLEELSEMRYGIEILPLPVMGGQSQSSDV | (SEQ ID NO:964) |
| NOV41a | VIVSSKYKQRYECRLPAGAIHFQREREEETPAYQGPGIPELLSPMRDAPCLLKTKDWWTY | (SEQ ID NO:966) |
| NOV41b | VIVSSKYKQRYECRLPAGAIHFQREREEETPAYQGPGIPELLSPMRDAPCLLKTKDWWTY | |
| NOV41c | VIVSSKYKQRYECRLPAGAIHFQREREEETPAYQGPGIPELLSPMRDAPCLLKTKDWWTY | |
| NOV4ld | VIVSSKYKQRYECRLPAGAIHFQREREEETPAYQGPGIPELLSPMRDAPCLLKTKDWWTY | |
| NOV41e | VIVSSKYKQRYECRLPAGAIHFQREREEETPAYQGPGIPELLSPMPDAPCLLKTKDWWTY | |
| NOV41f | VIVSSKYKQRYECRLPAGAIHFQREREEETPAYQGPGIPELLSPMRDAPCLLKTKDWWTY | |
| NOV41g | VIVSSKYKQRYECRLPAGAIHFQREREEETPAYQGPGIPELLSPMPDAPCLLKTKDWWTY | |
| NOV41h | VIVSSKYKQRYECRLPAGAIHFQREREEETPAYQGPGIPELLSPMRDAPCLLKTKDWWTY | |
| NOV41i | VIVSSKYKQRYECRLPAGAIHFQREREEETPAYQGPGIPELLSPMRDAPCLLKTKDWWTY | |
| NOV41a | EFCYGRHIQQYHMEDSEIKGEVLYLGYYQSAFDWDDETAKASKQHRLKRYHSQTYGNGSK | |
| NOV41b | EFCYGRHIQQYHMEDSEIKGEVLYLGYYQSAFDWDDETAKASKQHRLKRYHSQTYGNGSK | |
| NOV41c | EFCYGRHIQQYHMEDSEIKGEVLYLGYYQSAFDWDDETAKASKQHRLKRYHSQTYGNGSK | |
| NOV41d | EFCYGRHIQQYHMEDSEIKGEVLYLGYYQSAFDWDDETAKASKQHRLKRYHSQTYGNGSK | |
| NOV41e | EFCYGRHIQQYHMEDSEIKGEVLYLGYYQSAFDWDDETAKASKQHRLKRYHSQTYGNGSK | |
| NOV41f | EFCYGRHIQQYHMEDSEIKGEVLYLGYYQSAFDWDDETAKASKQHRLKRYHSQTYGNGSK | |
| NOV41g | EFCYGRHIQQYHMEDSEIKGEVLYLGYYQSAFDWDDETAKASKQHRLKRYHSQTYGNGSK | |
| NOV41h | EFCYGRHIQQYHMEDSEIKGEVLYLGYYQSAFDWDDETAKASKQHRLKRYHSQTYGNGSK | |
| NOV41i | EFCYGRHIQQYHMEDSEIKGEVLYLGYYQSAFDWDDETAKASKQHRLKRYHSQTYGNGSK | |
| NOV41a | CDLNGRPREAEVRFLCDEGAGISGDYIDRVDEPLSCSYVLTIRTPRLCPHPLLRPPPSAA | |
| NOV41b | CDLNGRPREAEVRFLCDEGAGISGDYIDRVDEPLSCSYVLTIRTPRLCPHPLLRPPPSAA | |
| NOV41c | CDLNGRPREAEVRFLCDEGAGISGDYIDRVDEPLSCSYVLTIRTPRLCPHPLLRPPPSAA | |
| NOV41d | CDLNGRPREAEVRFLCDEGAGISGDYIDRVDEPLSCSYVLTIRTPRLCPHPLLRPPPSAA | |
| NOV41e | CDLNGRPREAEVRFLCDEGAGISGDYIDRVDEPLSCSYVLTIRTPRLCPHPLLRPPPSAA | |
| NOV41f | CDLNGRPREAIEVRFLCDEGAGISGDYIDRVDEPLSCSYVLTIRTPRLCPHPLLRPPPSAA | |
| NOV41g | CDLNGRPREAEVRFLCDEGAGISGDYIDRVDEPLSCSYVLTIRTPRLCPHPLLRPPPSAA | |
| NOV41h | CDLNGRPREAEVRFLCDEGAGISGDYIDRVDEPLSCSYVLTIRTPRLCPHPLLRPPPSAA | |
| NOV41i | CDLNGRPREAEVRFLCDEGAGISGDYIDRVDEPLSCSYVLTIRTPRLCPHPLLRPPPSAA | |
| NOV41a | PQAILCHPSLQPEEYMAYVQRQAVDSKQYGDKIIEELQDLGPQVWSETKSGVAPQKMAGA | |
| NOV41b | PQAILCHPSLQPEEYMAYVQRQAD-SKQYGDKIIEELQDLGPQVWSETKSGVAPQKMAGA | |
| NOV41c | PQAILCHPSLQPEEYMAYVQRQAD-SKQYGDKIIEELQDLGPQVWSETKSGVAPQKMAGA | |
| NOV41d | PQAILCHPSLQPEEYMAYVQRQAD-SKQYGDKIIEELQDLGPQVWSETKSGVAPQKMAGA | |
| NOV41e | PQAILCHPSLQPEEYMAYVQRQAD-SKQYGDKIIEELQDLGPQVWSETKSGVAPQKMAGA | |
| NOV41f | PQAILCHPSLQPEEYMAYVQRQAD-SKQYGDKIIEELQDLGPQVWSETKSGVAPQKMAGA | |
| NOV41g | PQAILCHPSLQPEEYMAYVQRQAD-SKQYGDKIIEELQDLGPQVWSETKSGVAPQKMAGA | |
| NOV41h | PQAILCHPSLQPEEYMAYVQRQAD-SKQYGDKIIEELQDLGPQVWSETKSGVAPQKMAGA | |
| NOV41i | PQAILCHPSLQPEEYMAYVQRQAD-SKQYGDKIIEELQDLGPQVWSETKSGVAPQKMAGA | |
| NOV41a | SPTKDDSKDSDFWKMLNEPEDQAPGGEEVPAEEQDPSPEAADSASGAPNDFQNNVQVKVI | |
| NOV41b | SPTKDDSKDSDFWKMLNEPEDQAPGGEEVPAEEQDPSPEAADSASGAPNDFQNNVQVKVI | |
| NOV41c | SPTKDDSKDSDFWKMLNEPEDQAPGGEEVPAEEQDPSPEAADSASGAPNDFQNNVQVKVI | |
| NOV41d | SPTKDDSKDSDFWKMLNEPEDQAPGGEEVPAEEQDPSPEAADSASGAPNDFQNNVQVKVI | |
| NOV41e | SPTKDDSKDSDFWKMLNEPEDQAPGGEEVPAEEQDPSPEAADSASGAPNDFQNNVQVKVI | |
| NOV41f | SPTKDDSKDSDFWKMLNEPEDQAPGGEEVPAEEQDPSPEAADSASGAPNDFQNNVQVKVI | |
| NOV41g | SPTKDDSKDSDFWKMLNEPEDQAPGGEEVPAEEQDPSPEAADSASGAPNDFQNNVQVKVI | |
| NOV41h | SPTKDDSKDSDFWKMLNEPEDQAPGGEEVPAEEQDPSPEAADSASGAPNDFQNNVQVKVI | |
| NOV41i | SPTKDDSKDSDFWKMLNEPEDQAPGGEEVPAEEQDPSPEAADSASGAPNDFQNNVQVKVI | |
| NOV41a | RSPADLIRFIEELKGGTKKGKPNIGQEQPVDDAAEVPQREPEKERGDPERQREMEEEEDE | |
| NOV41b | RSPADLIRFIEELKGGTKKGKPNMDQEQPVDDAAEVPQREPEKERGDPERQREMEEEEDE | |
| NOV41c | RSPADLIRFIEELKGGTKKGKPNIGQEQPVDDAAEVPQREPEKERGDPERQREMEEEEDE | |
| NOV41d | RSPADLIRFIEELKGGIKKGKPNIGQEQPVDDAAEVPQREPEKERGDPERQREMEEEEDE | |
| NOV41e | RSPADLIRFIEELKGGTKKGKPNIGQEQPVDDAAEVPQREPEKERGDPERQREMEEEEDE | |
| NOV41f | RSPADLIRFIEELKGGTKKGKPNIGQEQPVDDAAEVPQREPEKERGDPERQREMEEEEDE | |
| NOV41g | RSPADLIRFIEELKGGTKKGKPNIGQEQPVDDAAEVPQREPEKERGDPERQREMEEEEDE | |
| NOV41h | RSPADLIRFIEELKGGIKKGKPNIGQEQPVDDAAEVPQREPEKERGDPERQREMEEEEDE | |
| NOV41i | RSPADLIRFIEELKGGTKKGKPNIGQEQPVDDAAEVPQREPEKERGDPERQREMEEEEDE | |
| NOV4la | DEDEDEDEDERQLLGEFEKELEGILLPSDRDRLRSEVKAGMERELENIIQETEKELDPDG | |
| NOV41b | DEDEDEDEDERQLLGEFEKELEGILLPSDRDRLRSEVKAGMERELENIIQETEKELDPDG | |
| NOV41c | DEDEDEDEDERQLLGEFEKELEGILLPSDRGRLRSEVKAGMERELENIIQETEKELDPDG | |
| NOV41d | DEDEDEDEDERQLLGEFEKELEGILLPSDRDRLRSEVKAGMERELENIIQETEKELDPDG | |
| NOV41e | DEDEDEDEDERQLLGEFEKELEGILLPSDRDRLRSEVKAGMERELENIIQETEKELDPDG | |
| NOV41f | DEDEDEDEDERQLLGEFEKELEGILLPSDRDRLRSEVKAGMERELENIIQETEKELDPDG | |
| NOV41g | DEDEDEDEDERQLLGEFEKELEGILLPSDRDRLRSEVKAGMERELENIIQETEKELDPDG | |
| NOV41h | DEDEDEDEDERQLLGEFEKELEGILLPSDRDRLRSEVKAGMERELENIIQETEKELDPDG | |
| NOV41i | DED--KMPMNGSYWGEFEKELEGILLPSDRDRLR-------S--------ETEKELDPDG | |
| NOV41a | LKKESERDRAMLALTSTLNKLIKRLEEKQSPELVKKHKKKRVVPKKPPPSPQPTEEDPEH | |
| NOV41b | LKKESERDRAMLALTSTLNKPIKRLEEKQSPELVKKHKKKRVVPKKPPPSPQPT------ | |
| NOV41c | LKKESERDHAMLALTSTLNKLIKRLEEKQSPELVKKHKKKRVVPKKPPPSPQPT------ | |
| NOV41d | LKKESERDRAMLALTSTLNKLIKRLEEKQSPELVKKHKKKRVVPKKPPPSPQPT------ | |
| NOV41e | LKKESERDRAMLALTSTLNKLIKRLEEKQSPELVKKHKKKRVVPKKPPPSPQPTEEDPEH | |
| NOV41f | LKKESERDRAMLALTSTLNKLIKRLEEKQSPELVKKHKKKRVVPKKPPPSPQPTEEDPEH | |
| NOV41g | LKKESERDRAMLALTSTLNKLIKRLEEKQSPELVKKHKKKRVVPKKPPPSPQPTEEDPEH | |
| NOV41h | LKKESERDRAMLALTSTLNKLIKRLEEKQSPELVKKHKKKRVVPKKPPPSPQPT------ | |
| NOV41i | LKKESERDRAMLALTSTLNKLIKRLEEKQSPELVKKHKKKRVVPKKPPPSPQPTEEDPEH | |
| NOV41a | RVRVRVTKLRLGGPNQDLTVLEMKRENPQLKQIEGLVKELLEREGLTAAGKIEIKIVRPW | |
| NOV41b | -------------------------------------------------GKIEIKIVRPW | |
| NOV41c | -------------------------------------------------GKIEIKIVRPW | |
| NOV41d | -------------------------------------------------GKIEIKIVRPW | |
| NOV41e | RVRVRVTKLRLGGPNQDLTVLEMKRENPQLKQIEGLVKELLEREGLTAAGKIEIKIVRPW | |
| NOV41f | RVRVRVTKLRLGGPNQDLTVLEMKRENPQLKQIEGLVKELLEREGLTAAGKIEIKIVRPW | |
| NOV41g | RVRVRVTKLRLGGPNQDLTVLEMKRENPQLKQIEGLVKELLEREGLTAAGKIEIKIVRPW | |
| NOV41h | -------------------------------------------------GKIEIKIVRPW | |
| NOV41i | RVRVRVTKLRLGGPNQDLTVLEMKRENPQLKQIEGLVKELLEREGLTAAGKIEIKIVRPW | |
| NOV41a | AEGTEEGARWLTDEDTRNLKEIFFNILVPGAEEAQKERQRQKELESNYRRVWGSPGGEGT | |
| NOV41b | AEGTEEGARWLTDEDTRNLKEIFFNILVPGAEEAQKERQRQKELESNYRRVWGSPGGEGT | |
| NOV41c | AEGTEEGARWLTDEDTRNLKEIFFNILVPGAEEAQKERQRQKELESNYRRVWGSPGGEGT | |
| NOV41d | AEGTEEGARWLTDEDTRNLKEIFFNILVPGAEEAQKERQRQKELESNYRRVWGSPGGEGT | |
| NOV41e | AEGTEEGARWLTDEDTRNLKEIFFNILVPGAEEAQKERQRQKELESNYRRVWGSPGGEGT | |
| NOV41f | AEGTEEGARWLTDEDTRNLKEIFFNILVPGAEEAQKERQRQKELESNYRRVWGSPGGEGT | |
| NOV41g | AEGTEEGARWLTDEDTRNLKEIFFNILVPGAEEAQKERQRQKELESNYRRVWGSPGGEGT | |
| NOV41h | AEGTEEGARWLTDEDTRNLKEIFFNILVPGAEEAQKERQRQKELESNYRRVWGSPGGEGT | |
| NOV41i | AEGTEEGARWLTDEDTRNLKEIFFNILVPGAEEAQKERQRQKELESNYRRVWGSPGGEGT | |
| NOV41a | GDLDEFDF-- | |
| NOV41b | GDLDEFDFVD | |
| NOV41c | GDLDEFDFVD | |
| NOV41d | GDLDEFDFVD | |
| NOV41e | GDLDEFDFVD | |
| NOV41f | GDLDEFDFVD | |
| NOV41g | GDLDEFDF-- | |
| NOV41h | GDLDEFDF-- | |
| NOV41i | GDLDEFDF-- | |

[0592] Further analysis of the NOV41a protein yielded the following properties shown in Table 41C.

TABLE 41C
Protein Sequence Properties NOV41a

| | |
|---|---|
| SignalP analysis: | Cleavage site between residues 26 and 27 |
| PSORT II analysis: | |

| PSG: | a new signal peptide prediction method | |
|---|---|---|
| | N-region: | length 4; pos. chg 0; neg. chg 1 |
| | H-region: | length 29; peak value 0.00 |
| | PSG score: | −4.40 |

| | |
|---|---|
| GvH: | von Heijne's method for signal seq. recognition |
| | GvH score (threshold: −2.1): 3.65 |
| | possible cleavage site: between 25 and 26 |

>>> Seems to have no N-terminal signal peptide

| ALOM: | Klein et al's method for TM region allocation | | |
|---|---|---|---|
| | Init position for calculation: 1 | | |
| | Tentative number of TMS(s) for the threshold 0.5: 1 | | |
| | Number of TMS(s) for threshold 0.5: 1 | | |
| | INTEGRAL | Likelihood = | Transmembrane 6-22 |
| | | −6.74 | |

| | |
|---|---|
| PERIPHERAL | Likelihood = 8.49 (at 48) |

| | |
|---|---|
| | ALOM score: −6.74 (number of TMSs: 1) |
| MTOP: | Prediction of membrane topology (Hartmann et al.) |
| | Center position for calculation: 13 |
| | Charge difference: −3.0 C(−3.0)-N(0.0) |
| | N >= C: N-terminal side will be inside |

>>> membrane topology: type 2 (cytoplasmic tail 1 to 6)

| MITDISC: | discrimination of mitochondrial targeting seq | | | |
|---|---|---|---|---|
| | R content: | 0 | Hyd Moment(75): | 8.03 |
| | Hyd Moment(95): | 5.55 | G content: | 5 |
| | D/E content: | 2 | S/T content: | 6 |

| | |
|---|---|
| | Score: −7.42 |
| Gavel: | prediction of cleavage sites for mitochondrial preseq |
| | cleavage site motif not found |

NUCDISC: discrimination of nuclear localization signals

| | |
|---|---|
| | pat4: KKHK (3) at 515 |
| | pat4: KHKK (3) at 516 |
| | pat4: HKKK (3) at 517 |
| | pat4: KKKR (5) at 518 |
| | pat7: none |
| | bipartite: KRLEEKQSPELVKKHKK at 503 |
| | content of basic residues: 13.6% |
| | NLS Score: 1.06 |
| KDEL: | ER retention motif in the C-terminus: none |

ER Membrane Retention Signals: none
SKL: peroxisomal targeting signal in the C-terminus: none
PTS2: 2nd peroxisomal targeting signal: none
VAC: possible vacuolar targeting motif: none
RNA-binding motif: none
Actinin-type actin-binding motif:

type 1: none
type 2: none

NMYR: N-myristoylation pattern: none
Prenylation motif: none
memYQRL: transport motif from cell surface to Golgi: none
Tyrosines in the tail: none
Dileucine motif in the tail: none
checking 63 PROSITE DNA binding motifs: none
checking 71 PROSITE ribosomal protein motifs: none
checking 33 PROSITE prokaryotic DNA binding motifs: none

| | |
|---|---|
| NNCN: | Reinhardt's method for Cytoplasmic/Nuclear discrimination |
| | Prediction: nuclear |
| | Reliability: 76.7 |
| COIL: | Lupas's algorithm to detect coiled-coil regions |
| 408 E | 0.52 |
| 409 R | 0.52 |
| 410 Q | 0.52 |
| 411 R | 0.52 |
| 412 E | 0.52 |
| 413 M | 0.74 |
| 414 E | 0.97 |
| 415 E | 0.97 |
| 416 E | 0.97 |
| 417 E | 0.97 |
| 418 D | 0.97 |
| 419 E | 0.97 |
| 420 D | 0.97 |
| 421 E | 0.97 |
| 422 D | 0.97 |
| 423 E | 0.97 |
| 424 D | 0.97 |
| 425 E | 0.97 |
| 426 D | 0.97 |
| 427 E | 0.97 |
| 428 D | 0.97 |
| 429 E | 0.97 |
| 430 R | 0.97 |
| 431 Q | 0.97 |
| 432 L | 0.97 |
| 433 L | 0.97 |
| 434 G | 0.97 |
| 435 E | 0.97 |
| 436 F | 0.97 |
| 437 E | 0.97 |
| 438 K | 0.97 |
| 439 E | 0.97 |
| 440 L | 0.97 |
| 441 E | 0.97 |
| 442 G | 0.84 |
| 443 I | 0.82 |
| | total: 36 residues |

Final Results (k = 9/23):

```
43.5%: nuclear
26.1%: mitochondrial
  8.7%: cytoplasmic
  4.3%: extracellular, including cell wall
  4.3%: Golgi
  4.3%: plasma membrane
  4.3%: vesicles of secretory system
  4.3%: peroxisomal
```

>> prediction for CG56878-01 is nuc (k = 23)

[0593] A search of the NOV41a protein against the Geneseq database, a proprietary database that contains sequences published in patents and patent publication, yielded several homologous proteins shown in Table 41D.

TABLE 41D
Geneseq Results for NOV41a

| | | NOV41a | Identities/ | | |
|---|---|---|---|---|---|
| | | Residues/ | Similarities for | | |
| Geneseq | Protein/Organism/Length | Match | the Matched | | Expect |
| Identifier | [Patent #, Date] | Residues | Region | | Value |
| ABP42584 | Human ovarian antigen HOFNF76, | 3 . . . 120 | 111/118 | (94%) | 8e−59 |
| | SEQ ID NO: 3716 - Homo sapiens, 140 | 6 . . . 123 | 115/118 | (97%) | |
| | aa. [WO200200677-A1 , 03-JAN-2002] | | | | |
| AAG76089 | Human colon cancer antigen protein | 508 . . . 668 | 100/161 | (62%) | 7e−45 |
| | SEQ ID NO: 6853 - Homo sapiens, 106 | 1 . . . 106 | 102/161 | (63%) | |
| | aa. [WO200122920-A2, 05-APR-2001] | | | | |
| ABP42294 | Human ovarian antigen HNHBC18, | 454 . . . 534 | 81/81 | (100%) | 5e−39 |
| | SEQ ID NO: 3426 - Homo sapiens, 93 | 1 . . . 81 | 81/81 | (100%) | |
| | aa. [WO200200677-A1, 03-JAN-2002] | | | | |
| AAG41826 | Arabidopsis thaliana protein fragment | 19 . . . 265 | 83/263 | (31%) | 1e−24 |
| | SEQ ID NO: 52087 - Arabidopsis | 26 . . . 273 | 124/263 | (46%) | |
| | thaliana, 282 aa. [EP1033405-A2, | | | | |
| | 06-SEP-2000] | | | | |
| AAG41828 | Arabidopsis thaliana protein fragment | 100 . . . 265 | 61/169 | (36%) | 6e−23 |
| | SEQ ID NO: 52089 - Arabidopsis | 48 . . . 208 | 90/169 | (53%) | |
| | thaliana, 217 aa. [EP1033405-A2, | | | | |
| | 06-SEP-2000] | | | | |

[0594] In a BLAST search of public sequence databases, the NOV41a protein was found to have homology to the proteins shown in the BLASTP data in Table 41E.

TABLE 41E
Public BLASTP Results for NOV41a

| | | NOV41a | Identities/ | |
|---|---|---|---|---|
| Protein | | Residues/ | Similarities for | |
| Accession | | Match | the Matched | Expect |
| Number | Protein/Organism/Length | Residues | Portion | Value |
| Q13438 | Protein OS-9 precursor - Homo | 1 . . . 668 | 667/668 (99%) | 0.0 |
| | sapiens (Human), 667 aa. | 1 . . . 667 | 667/668 (99%) | |
| Q8IZ58 | Hypothetical protein - Homo sapiens | 1 . . . 668 | 603/668 (90%) | 0.0 |
| | (Human), 615 aa (fragment). | 4 . . . 615 | 609/668 (90%) | |
| Q9BW99 | Similar to amplified in osteosarcoma - | 1 . . . 668 | 603/668 (90%) | 0.0 |
| | Homo sapiens (Human), 612 aa. | 1 . . . 612 | 609/668 (90%) | |
| Q8K2C7 | Hypothetical protein - Mus musculus | 1 . . . 668 | 489/676 (72%) | 0.0 |
| | (Mouse), 617 aa. | 1 . . . 617 | 544/676 (80%) | |
| Q922S5 | Unknown (Protein for | 47 . . . 668 | 447/630 (70%) | 0.0 |
| | IMAGE: 3598453) - Mus musculus | 1 . . . 571 | 501/630 (78%) | |
| | (Mouse), 571 aa (fragment). | | | |

[0595] PFam analysis predicts that the NOV41a protein contains the domains shown in the Table 41F.

TABLE 41F
Domain Analysis of NOV41a

| | | | |
|---|---|---|---|
| Pfam Domain | NOV41a | Identities/ | Expect |
| | Match Region | Similarities | Value |
| | | for the | |
| | | Matched Region | |

### Example 42

[0596] The NOV42 clone was analyzed, and the nucleotide and encoded polypeptide sequences are shown in Table 42A.

TABLE 42A
NOV42 Sequence Analysis

| | | |
|---|---|---|
| NOV42a, CG56904-01 | SEQ ID NO:971 | 1311 bp |
| DNA Sequence | ORF Start: ATG at 19 | ORF Stop: TAA at 1282 |

GGAGCTCCCACACTTTCAATGGGGAGGCCCACCCAGTGGCCGAGCCTGCTGCTGCTCCTGCTGTTGCC
GGGGCCCCCGCCCGTCGCCGGCTTGGAAGACGCTGCCTTCCCCCACCTGGGGGAGAGCTTGCAGCCCC
TGCCCCGGGCCTGTCCCCTGCGCTGCTCCTGCCCCCGAGTCGACACTGTGGACTGTGATGGCTTGGAC
CTTCGAGTGTTCCCGGACAACATCACCAGAGCCGCTCAGCACCTCTCCCTGCAGAACAACCAGCTCCA
GGAACTCCCCTACAATGAGCTGTCCCGCCTCAGTGGCCTGCGAACCCTCAACCTCCACAACAACCTCA
TCTCCTCCGAAGGCCTGCCTGACGAGGCCTTCGAGTCCCTCACCCAGCTGCAGCACCTCTGCGTGGCT
CACAACAAGAACAATCTCATCTCCAAGGTGCCCCGAGGAGCCCTGAGCCGCCAGACTCAACTCCGTGA
GCTCTACCTCCAGCACAACCAGCTGACAGACAGTGGCCTGGATGCCACCACCTTCAGCAAGCTGCATA
GCCTTGAATACCTGGATCTCTCCCACAACCAGCTGACCACAGTGCCCGCCGGCCTGCCCCGGACCCTG
GCTATCCTGCACCTGGGCCGCAACCGCATCCGGCAGGTGGAGGCGGCTCGGCTGCACGGGGCGCGTGG
TCTGCGCTATTTGTTGCTGCAGCACAACCAGCTGGGGAGCTCAGGGCTGCCCGCCGGGGCTCTGCGGC
CGCTGCGGGGCCTGCACACGCTGCACCTCGATGGCAATGGGCTGGACCGCGTGCCTCCAGCCCTGCCC
CGCCGCCTGCGTGCCCTGGTGCTGCCCCACAACCACGTGGCCGCGCTGGGTGCCCGTGACCTGGTCGC
CACACCGGGCCTGACGGAGCTTAACCTGGCCTATAACCGCCTGGCCAGCGCCCGTGTGCACCACCGGG
CCTTCCGCCGGTTGCGTGCCCTGCGCAGCCTCGACCTGGCAGGGAATCAGCTAACCCGGCTGCCCATG
GGCCTGCCCACTGGCCTGCGCACCCTGCAGCTGCAACGCAACCAGCTGCGGATGCTCGAGCCCGAGCC
TCTGGCCGGCCTGGACCAACTGCGGGAGCTCAGCCTGGCGCACAACCGGCTCCGGGTCGGCGACATCG
GGCCAGGCACCTGGCATGAGCTCCAAGCCCTCCAGGTCAGGCACAGGCTGGTTAGCCACACTGTCCCC
AGGGCCCCTCCATCCCCCTGCCTGCCCTGCCACGTCCCAAACATTCTAGTTAGCTGGTAAAGCAATCA
GAACAAGAAAATGATAAGA

| | | | |
|---|---|---|---|
| NOV42a, CG56904-01 | SEQ ID NO:972 | 421 aa | MW at 46667.3 kD |
| Protein Sequence | | | |

MGRPTQWPSLLLLLLLPGPPPVAGLEDAAFPHLGESLQPLPRACPLRCSCPRVDTVDCDGLDLRVFPD
NITRAAQHLSLQNNQLQELPYNELSRLSGLRTLNLHNNLISSEGLPDEAFESLTQLQHLCVAHNKNNL
ISKVPRGALSRQTQLRELYLQHNQLTDSGLDATTFSKLHSLEYLDLSHNQLTTVPAGLPRTLAILHLG
RNRIRQVEAARLHGARGLRYLLLQHNQLGSSGLPAGALRPLRGLHTLHLDGNGLDRVPPALPRRLRAL
VLPHNHVAALGARDLVATPGLTELNLAYNRLASARVHHRAFRRLPALRSLDLAGNQLTRLPMGLPTGL
RTLQLQRNQLRMLEPEPLAGLDQLRELSLAHNRLRVGDIGPGTWHELQALQVRHRLVSHTVPRAPPSP
CLPCHVPNILVSW

| | | |
|---|---|---|
| NOV42b, 272355087 | SEQ ID NO:973 | 1278 bp |
| DNA Sequence | ORF Start: at 1 | ORF Stop: end of sequence |

GGATCCACCATGGGGAGGCCCACCCAGTGGCCGAGCCTGCTGCTGCTCCTGCTGTTGCCGGGGCCCCC
GCCCGTCGCCGGCTTGGAAGACGCTGCCTTCCCCCACCTGGGGGAGAGCTTGCAGCCCCTGCCCCGGG
CCTGTCCCCTGCGCTGCTCCTGCCCCCGAGTCGACACTGTGGACTGTGATGGCTTGGACCTTCGAGTG
TTCCCGGACAACATCACCAGAGCCGCTCAGCACCTCTCCCTGCAGAACAACCAGCTCCAGGAACTCCC
CTACAATGAGCTGTCCCGCCTCAGTGGCCTGCGAACCCTCAACCTCCACAACAACCTCATCTCCTCCG
AAGGCCTGCCTGACGAGGCCTTCGAGTCCCTCACCCAGCTGCAGCACCTCTGCGTGGCTCACAACAAG
AACAATCTCATCTCCAAGGTGCCCCGAGGAGCCCTGAGCCGCCAGACTCAACTCCGTGAGCTCTACCT
CCAGCACAACCAGCTGACAGACAGTGGCCTGGATGCCACCACCTTCAGCAAGCTGCATAGCCTTGAAT
ACCTGGATCTCTCCCACAACCAGCTGACCACAGTGCCCGCCGGCCTGCCCCGGACCCTGGCTATCCTG
CACCTGGGCCGCAACCGCATCCGGCAGGTGGAGGCGGCTCGGCTGCACGGGGCGCGTGGTCTGCGCTA
TTTGTTGCTGCAGCACAACCAGCTGGGGAGCTCAGGGCTGCCCGCCGGGGCTCTGCGGCCGCTGCGGG
GCCTGCACACGCTGCACCTCTATGGCAATGGGCTGGACCGCGTGCCTCCAGCCCTGCCCCGCCGCCTG
CGTGCCCTGGTGCTGCCCCACAACCACGTGGCCGCGCTGGGTGCCCGTGACCTGGTCGCCACACCGGG
CCTGACGGAGCTTAACCTGGCCTATAACCGCCTGGCCAGCGCCCGTGTGCACCACCGGGCCTTCCGCC
GGTTGCGTGCCCTGCGCAGCCTCGACCTGGCAGGGAATCAGCTAACCCGGCTGCCCATGGGCCTGCCC
ACTGGCCTGCGCACCCTGCAGCTGCAACGCAACCAGCTGCGGATGCTCGAGCCCGAGCCTCTGGCCGG
CCTGGACCAACTGCGGGAGCTCAGCCTGGCGCACAACCGGCTCCGGGTCGGCGACATCGGGCCAGGCA
CCTGGCATGAGCTCCAAGCCCTCCAGGTCAGGCACAGGCTGGTTAGCCACACTGTCCCCAGGGCCCCT
CCATCCCCCTGCCTGCCCTGCCACGTCCCAAACATTCTAGTTAGCTGGGAATTC

| | | | |
|---|---|---|---|
| NOV42b, 272355087 | SEQ ID NO:974 | 426 aa | MW at 47236.9 kD |
| Protein Sequence | | | |

GSTMGRPTQWPSLLLLLLLPGPPPVAGLEDAAFPHLGESLQPLPRACPLRCSCPRVDTVDCDGLDLRV
FPDNITRAAQHLSLQNNQLQELPYNELSRLSGLRTLNLHNNLISSEGLPDEAFESLTQLQHLCVAHNK
NNLISKVPRGALSRQTQLRELYLQHNQLTDSGLDATTFSKLHSLEYLDLSHNQLTTVPAGLPRTLAIL
HLGRNRIRQVEAARLHGARGLRYLLLQHNQLGSSGLPAGALRPLRGLHTLHLYGNGLDRVPPALPRRL
RALVLPHNHVAALGARDLVATPGLTELNLAYNRLASARVHHRAFRRLRALRSLDLAGNQLTRLPMGLP
TGLRTLQLQRNQLRMLEPEPLAGLDQLRELSLAHNRLRVGDIGPGTWHELQALQVRHRLVSHTVPRAP
PSPCLPCHVPNILVSWEF

| | | |
|---|---|---|
| NOV42c, 246862506 | SEQ ID NO:975 | 1122 bp |
| DNA Sequence | ORF Start: at 3 | ORF Stop: at 1122 |

GGATCCACCATGGCTTGGACCTTCGAGTGTTCCCGGACAACATCACCAGAGCCGCTCAGCACCTCTCC
CTGCAGAACAACCAGCTCCAGGAACTCCCCTACAATGAGCTGTCCCGCCTCAGTGGCCTGCGAACCCT
CAACCTCCACAACAACCTCATCTCCTCCGAAGGCCTGCCTGACGAGGCCTTCGAGTCCCTCACCCAGC
TGCAGCACCTCTGCGTGGCTCACAACAAGAACAATCTCATCTCCAAGGTGCCCCGAGGAGCCCTGAGC
CGCCAGACTCAACTCCGTGAGCTCTACCTCCAGCACAACCAGCTGACAGACAGTGGCCTGGATGCCAC
CACCTTCAGCAAGCTGCATAGCCTTGAATACCTGGATCTCTCCCACAACCAGCTGACCACAGTGCCCG
CCGGCCTGCCCCGGACCCTGGCTATCCTGCACCTGGGCCGCAACCGCATCCGGCAGGTGGAGGCGGCT
CGGCTGCACGGGGCGCGTGGTCTGCGCTATTTGTTGCTGCAGCACAACCAGCTGGGGAGCTCAGGGCT
GCCCGCCGGGGCTCTGCGGCCGCTGCGGGGCCTGCACACGCTGCACCTCTATGGCAATGGGCTGGACC
GCGTGCCTCCAGCCCTGCCCCGCCGCCTGCGTGCCCTGGTGCTGCCCCACAACCACGTGGCCGCGCTG
GGTGCCCGTGACCTGGTCGCCACACCGGGCCTGACGGAGCTTAACCTGGCCTATAACCGCCTGGCCAG
CGCCCGTGTGCACCACCGGGCCTTCCGCCGGTTGCGTGCCCTGCGCAGCCTCGACCTGGCAGGGAATC
AGCTAACCCGGCTGCCCATGGGCCTGCCCACTGGCCTGCGCACCCTGCAGCTGCAACGCAACCAGCTG
CGGATGCTCGAGCCCGAGCCTCTGGCCGGCCTGGACCAACTGCGGGAGCTCAGCCTGGCGCACAACCG
GCTCCGGGTCGGCGACATCGGGCCAGGCACCTGGCATGAGCTCCAAGCCCTCCAGGTCAGGCACAGGC
TGGTTAGCCACACTGTCCCCAGGGCCCCTCCATCCCCCTGCCTGCCCTGCCACGTCCCAAACATTCTA
GTTAGCTGGGAATTCAAGGGCGAATTCCAAGCAC

| | | | |
|---|---|---|---|
| NOV42c, 246862506 | SEQ ID NO:976 | 373 aa | MW at 41726.5 kD |
| Protein Sequence | | | |

IHHGLDLRVFPDNITRAAQHLSLQNNQLQELPYNELSRLSGLRTLNLHNNLISSEGLPDEAFESLTQL
QHLCVAHNKNNLISKVPRGALSRQTQLRELYLQHNQLTDSGLDATTFSKLHSLEYLDLSHNQLTTVPA
GLPRTLAILHLGRNRIRQVEAARLHGARGLRYLLLQHNQLGSSGLPAGALRPLRGLHTLHLYGNGLDR
VPPALPRRLRALVLPHNHVAALGARDLVATPGLTELNLAYNRLASARVHHRAFRRLRALRSLDLAGNQ
LTRLPMGLPTGLRTLQLQRNQLRMLEPEPLAGLDQLRELSLAHNRLRVGDIGPGTWHELQALQVRHRL
VSHTVPRAPPSPCLPCHVPNILVSWEFKGEFQA

| | | |
|---|---|---|
| NOV42d, CG56904-04 | SEQ ID NO:977 | 1977 bp |
| DNA Sequence | ORF Start: ATG at 1 | ORF Stop: TGA at 1723 |

ATGTGGCCGAGCCTGCTGCTGCTCCTGCTGTTGCCGGGGCCCCCGCCCGTCGCCGGCTTGGAAGACGC
TGCCTTCCCCCACCTGGGGGAGAGCTTGCAGCCCCTGCCCCGGGCCTGTCCCCTGCGCTGCTCCTGCC
CCCGAGTCGACACTGTGGACTGTGATGGCTTGGACCTTCGAGTGTTCCCGGACAACATCACCAGAGCC
GCTCAGCACCTCTCCCTGCAGAACAACCAGCTCCAGGAACTCCCCTACAATGAGCTGTCCCGCCTCAG
TGGCCTGCGAACCCTCAACCTCCACAACAACCTCATCTCCTCCGAAGGTCTGCCTGACGAGGCCTTCG
AGTCCCTCACCCAGCTGCAGCACCTCTGCGTGGCTCACAACAAGCTCTCAGTGGCCCCTCAGTTTCTG
CCCCGGTCCCTCCGTGTCGCGGATCTGGCTGCCAACCAAGTGATGGAGATCTTCCCCCTCACCTTTGG
GGAGAAGCCGGCACTCAGGTCCGTGTACCTCCACAACAACCAGCTGAGCAACGCTGGCCTGCCCCCCG
ACGCCTTCCGCGGCTCCGAGGCCATCGCCACCCTCAGCCTCTCCAACAACCAGCTCAGCTACCTGCCG
CCCAGCCTGCCGCCCTCACTCGAGCGGCTCCACCTGCAGAACAATCTCATCTCCAAGGTGCCCCGAGG
AGCCCTGAGCCGCCAGACTCAACTCCGTGAGCTCTACCTCCAGCACAACCAGCTGACAGACAGTGGCC
TGGATGCCACCACCTTCAGCAAGCTGCATAGCCTTGAATACCTGGATCTCTCCCACAACCAGCTGACC
ACAGTGCCCGCCGGCCTGCCCCGGACCCTGGCTATCCTGCACCTGGGCCGCAACCGCATCCGGCAGGT
GGAGGCGGCTCGGCTGCACGGGGCGCGTGGTCTGCGCTATTTGTTGCTGCAGCACAACCAGCTGGGGA
GCTCAGGGCTGCCCGCCGGGGCTCTGCGGCCGCTGCGGGGCCTGCACACGCTGCACCTCTATGGCAAT
GGGCTGGACCGCGTGCCTCCAGCCCTGCCCCGCCGCCTGCGTGCCCTGGTGCTGCCCCACAACCACGT
GGCCGCGCTGGGTGCCCGTGACCTGGTCGCCACACCGGGCCTGACGGAGCTTAACCTGGCCTATAACC
GCCTGGCCAGCGCCCGTGTGCACCACCGGGCCTTCCGCCGGTTGCGTGCCCTGCGCAGCCTCGACCTG
GCAGGGAATCAGCTAACCCGGCTGCCCATGGGCCTGCCCACTGGCCTGCGCACCCTGCAGCTGCAACG
CAACCAGCTGCGGATGCTCGAGCCCGAGCCTCTGGCCGGCCTGGACCAACTGCGGGAGCTCAGCCTGG
CGCACAACCGGCTCCGGGTCGGCGACATCGGGCCAGGCACCTGGCATGAGCTCCAAGCCCTCCAGATG
CTGGACCTCAGCCACAATGAGCTGTCCTTTGTGCCCCCGGACCTGCCTGAGGCCCTAGAGGAGCTGCA
CCTCGAGGGCAACCGCATCGGCCACGTGGGCCCCGAGGCCTTCCTCAGCACACCCCGCCTGCGTGCCC
TCTTCCTCAGGGCCAACAGGCTTCACATGACGAGCATCGCGGCTGAGGCCTTCCTGGGGCTCCCAAAC
CTGCGTGTGGTGGACACGGCAGGGAATCCGGAGCAGGTCCTGATCCGGCTGCCTCCCACCACCCCACG
TGGGCCACGGGCAGGGGGCCCCTGATCCTAGAGAGGCCCAGCAGAGCAGCTCAGACTCCTGGGACTCC
GCTGGGCCGTGGACTGAGGAGACAACGCCCACCAGGGGCCCTTGGTCTGGCTCTCCTGGGCCTCCAGG
GCTGGGCCTGCTCTGCCTGCCACTGGCCGAGACACAGAGGCACACAGCTGGCATACTCCAGGCTCACA
GACCACGCCGGCCTGGCGGGACACACCCTACCCCAAACTCCCAACACAGATGGAGGCAGCAACAATAA
AGCCA

| | | | |
|---|---|---|---|
| NOV42d, CG56904-04 | SEQ ID NO:978 | 574 aa | MW at 63284.0 kD |
| Protein Sequence | | | |

MWPSLLLLLLLPGPPPVAGLEDAAFPHLGESLQPLPRACPLRCSCPRVDTVDCDGLDLRVFPDNITRA
AQHLSLQNNQLQELPYNELSRLSGLRTLNLHNNLISSEGLPDEAFESLTQLQHLCVAHNKLSVAPQFL
PRSLRVADTAANQVMEIFPLTFGEKPALRSVYLHNNQLSNAGLPPDAFRGSEAIATLSLSNNQLSYLP
PSLPPSLERLHLQNNLISKVPRGALSRQTQLRELYLQHNQLTDSGLDATTFSKLHSLEYLDLSNNQLT
TVPAGLPRTLAILHLGRNRIRQVEAARLHGARGLRYLLLQHNQLGSSGLPAGALRPLRGLHTLHLYGN
GLDRVPPALPRRLRALVLPHNHVAALGARDLVATPGLTELNLAYNRLASARVHHRAFRRLRALRSLDL
AGNQLTRLPMGLPTGLRTLQLQRNQLRMLEPEPLAGLDQLRELSLAHNRLRVGDIGPGTWHELQALQM

| | | |
|---|---|---|
| NOV42e, 268824694 | SEQ ID NO:979 | 1201 bp |
| DNA Sequence | ORF Start: at 2 | ORF Stop: end of sequence |

CACCGGATCCACCATGTGGCCGAGCCTGCTGCTGCTCCTGCTGTTGCCGGGGCCCCCGCCCGTCGCCG
GTTTGGAAGACGCTGCCTTCCCCCACCTGGGGGAGAGCTTGCAGCCCCTGCCCCGGGCCTGTCCCCTG
CGCTGCTCCTGCCCCCGAGTCGACACTGTGGACTGTGATGGCTTGGACCTTCGAGTGTTCCCGGACAA
CATCACCAGAGCCGCTCAGCACCTCTCCCTGCAGAACAACCAGCTCCAGGAACTCCCCTACAATGAGC
TGTCCCGCCTCAGTGGCCTGCGAACCCTCAACCTCCACAACAACCTCATCTCCTCCGAAGGCCTGCCT
GACGAGGCCTTCGAGTCCCTCACCCAGCTGCAGCACCTCTGCGTGGCTCACAACAAGCTCTCAGTGGC
CCCTCAGTTTCTGCCCCGGTCCCTCCGTGTCGCGGATCTGGCTGCCAACCAAGTGATGGAGATCTTCC
CCCTCACCTTTGGGGAGAAGCCGGCACTCAGGTCCGTGTACCTCCACAACAACCAGCTGAGCAACGCT
GGCCTGCCCCCCGACGCCTTCCGCGGCTCCGAGGCCATCGCCACCCTCAGCCTCTCCAACAACCAGCT
CAGCTACCTGCCGCCCAGCCTGCCGCCCTCACTCGAGCGGCTCCACCTGCAGAACAATCTCATCTCCA
AGGTGCCCCGAGGAGCCCTGAGCCGCCAGACTCAACTCCGTGAGCTCTACCTCCAGCACAACCAGCTG
ACAGACAGTGGCCTGGATGCCACCACCTTCAGCAAGCTGCATAGCCTTGAATACCTGGATCTCTCCCA
GCATCCGGCAGATGCTGGACCTCAGCCACAATGAGCTGTCCTTTGTGCCCCCGGACCTGCCTGAGGCC
CTAGAGGAGCTGCACCTCGAGGGCAACCGCATCGGCCACGTGGGCCCCGAGGCCTTCCTCAGCACACC
CCGCCTGCGTGCCCTCTTCCTCAGGGCCAACAGGCTTCACATGACGAGCATCGCGGCTGAGGCCTTCC
TGGGGCTCCCAAACCTGCGTGTGGTGGACACGGCAGGGAATCCGGAGCAGGTCCTGATCCGGCTGCCT
CCCACCACCCCACGTGGGCCACGGGCAGGGGGCCCCAAGCTTGGC

| | | | |
|---|---|---|---|
| NOV42e, 268824694 | SEQ ID NO:980 | 400 aa | MW at 43934.7 kD |
| Protein Sequence | | | |

TGSTMWPSLLLLLLLPGPPPVAGLEDAAFPHLGESLQPLPPACPLRCSCPRVDTVDCDGLDLRVFPDN
ITRAAQHLSLQNNQLQELPYNELSRLSGLRTLNLHNNLISSEGLPDEAFESLTQLQHLCVAHNKLSVA
PQFLPRSLRVADLAANQVMEIFPLTFGEKPALRSVYLHNNQLSNAGLPPDAFRGSEAIATLSLSNNQL
SYLPPSLPPSLERLHLQNNLISKVPRGALSRQTQLRELYLQHNQLTDSGLDATTFSKLHSLEYLDLSH
NQLTTVPAGLPRTLAILHLGRNRIRQMLDLSHNELSFVPPDLPEALEELHLEGNRIGHVGPEAFLSTP
RLRALFLRANRLHMTSIAAEAFLGLPNLRVVDTAGNPEQVLIRLPPTTPRGPRAGGPKLG

| | | |
|---|---|---|
| NOV42f, 283146542 | SEQ ID NO:981 | 1744 bp |
| DNA Sequence | ORF Start: at 2 | ORF Stop: end of sequence |

CACCGGATCCACCATGTGGCCGAGCCTGCTGCTGCTCCTGCTGTTGCCGGGGCCCCCGCCCGTCGCCG
GCTTGGAAGACGCTGCCTTCCCCCACCTGGGGGAGAGCTTGCAGCCCCTGCCCCGGGCCTGTCCCCTG
CGCTGCTCCTGCCCCCGAGTCGACACTGTGGACTGTGATGGCTTGGACCTTCGAGTGTTCCCGGACAA
CATCACCAGAGCCGCTCAGCACCTCTCCCTGCAGAACAACCAGCTCCAGGAACTCCCCTACAATGAGC
TGTCCCGCCTCAGTGGCCTGCGAACCCTCAACCTCCACAACAACCTCATCTCCTCCGAAGGCCTGCCT
GACGAGGCCTTCGAGTCCCTCACCCAGCTGCAGCACCTCTGCGTGGCTCACAACAAGCTCTCAGTGGC
CCCTCAGTTTCTGCCCCGGTCCCTCCGTGTCGCGGATCTGGCTGCCAACCAAGTGATGGAGATCTTCC
CCCTCACCTTTGGGGAGAAGCCGGCACTCAGGTCCGTGTACCTCCACAACAACCAGCTGAGCAACGCT
GGCCTGCCCCCCGACGCCTTCCGCGGCTCCGAGGCCATCGCCACCCTCAGCCTCTCCAACAACCAGCT
CAGCTACCTGCCGCCCAGCCTGCCGCCCTCACTCGAGCGGCTCCACCTGCAGAACAATCTCATCTCCA
AGGTGCCCCGAGGAGCCCTGAGCCGCCAGACTCAACTCCGTGAGCTCTACCTCCAGCACAACCAGCTG
ACAGACAGTGGCCTGGATGCCACCACCTTCAGCAAGCTGCATAGCCTTGAATACCTGGATCTCTCCCA
CAACCAGCTGACCACAGTGCCCGCCGGCCTGCCCCGGACCCTGGCTATCCTGCACCTGGGCCGCAACC
GCATCCGGCAGGTGGAGGCGGCTCGGCTGCACGGGGCGCGTGGTCTGCGCTATTTGTTGCTGCAGCAC
AACCAGCTGGGGAGCTCAGGGCTGCCCGCCGGGGCTCTGCGGCCGCTGCGGGGCCTGCACACGCTGCA
CCTCTATGGCAATGGGCTGGACCGCGTGCCTCCAGCCCTGCCCCGCCGCCTGCGTGCCCTGGTGCTGC
CCCACAACCACGTGGCCGCGCTGGGTGCCCGTGACCTGGTCGCCACACCGGGCCTGACGGAGCTTAAC
CTGGCCTATAACCGCCTGGCCAGCGCCCGTGTGCACCACCGGGCCTTCCGCCGGTTGCGTGCCCTGCG
CAGCCTCGACCTGGCAGGGAATCAGCTAACCCGGCTGCCCATGGGCCTGCCCACTGGCCTGCGCACCC
TGCAGCTGCAACGCAACCAGCTGCGGATGCTCGAGCCCGAGCCTCTGGCCGGCCTGGACCAACTGCGG
GAGCTCAGCCTGGCGCACAACCGGCTCCGGGTCGGCGACATCGGGCCAGGCACCTGGCATGAGCTCCA
AGCCCTCCAGATGCTGGACCTCAGCCACAATGAGCTGTCCTTTGTGCCCCCGGACCTGCCTGAGGCCC
TGGAGGAGCTGCACCTCGAGGGCAACCGCATCGGCCACGTGGGCCCCGAGGCCTTCCTCAGCACACCC
CGCCTGCGTGCCCTCTTCCTCAGGGCCAACAGGCTTCACATGACGAGCATCGCGGCTGAGGCCTTCCT
GGGGCTCCCAAACCTGCGTGTGGTGGACACGGCAGGGAATCCGGAGCAGGTCCTGATCCGGCTGCCTC
CCACCACCCCACGTGGGCCACGGGCAGGGGGCCCCAAGCTTGGC

| | | | |
|---|---|---|---|
| NOV42f, 283146542 | SEQ ID NO:982 | 581 aa | MW at 63928.7 kD |
| Protein Sequence | | | |

TGSTMWPSLLLLLLLPGPPPVAGLEDAAFPHLGESLQPLPRACPLRCSCPRVDTVDCDGLDLRVFPDN
ITRAAQHLSLQNNQLQELPYNELSRLSGLRTLNLHNNLISSEGLPDEAFESLTQLQHLCVAHNKLSVA
PQFLPRSLRVADLAANQVMEIFPLTFGEKPALRSVYLHNNQLSNAGLPPDAFRGSEAIATLSLSNNQL
SYLPPSLPPSLERLHLQNNLISKVPRGALSRQTQLRELYLQHNQLTDSGLDATTFSKLHSLEYLDLSH
NQLTTVPAGLPRTLAILHLGRNRIRQVEAARLHGARGLRYLLLQHNQLGSSGLPAGALRPLRGLHTLH
LYGNGLDRVPPALPRRLRALVLPHNHVAALGARDLVATPGLTELNLAYNRLASARVHHEAFRRLRALR
SLDLAGNQLTRLPMGLPTGLRTLQLQRNQLRMLEPEPLAGLDQLRELSLAHNRLRVGDIGPGTWHELQ
ALQMLDLSHNELSFVPPDLPEALEELHLEGNRIGHVGPEAFLSTPRLRALFLRANRLHMTSIAAEAFL
IGLPNLRVVDTAGNPEQVLIRLPPTTPRGPRAGGPKLG

| | | |
|---|---|---|
| NOV42g, 308521214 | SEQ ID NO:983 | 1744 bp |
| DNA Sequence | ORF Start: at 2 | ORF Stop: end of sequence |

CACCGGATCCACCATGTGGCCGAGCCTGCTGCTGCTCCTGCTGTTGCCGGGGCCCCCGCCCGTCGCCG
GCTTGGAAGACGCTGCCTTCCCCCACCTGGGGGAGAGCTTGCAGCCCCTGCCCCGGGCCTGTCCCCTG
CGCTGCTCCTGCCCCCGAGTCGACACTGTGGACTGTGATGGCTTGGACCTTCGAGTGTTCCCGGACAA
CATCACCAGAGCCGCTCAGCACCTCTCCCTGCAGAACAACCAGCTCCAGGAACTCCCCTACAATGAGC
TGTCCCGCCTCAGTGGCCTGCGAACCCTCAACCTCCACAACAACCTCATCTCCTCCGAAGGCCTGCCT
GACGAGGCCTTCGAGTCCCTCACCCAGCTGCAGCACCTCTGCGTGGCTCACAACAAGCTCTCAGTGGC
CCCTCAGTTTCTGCCCCGGTCCCTCCGTGTCGCGGATCTGGCTGCCAACCAAGTGATGGAGATCTTCC
CCCTCACCTTTGGGGAGAAGCCGGCACTCAGGTCCGTGTACCTCCACAACAACCAGCTGAGCAACGCT
GGCCTGCCCCCCGACGCCTTCCGCGGCTCCGAGGCCATCGCCACCCTCAGCCTCTCCAACAACCAGCT
CAGCTACCTGCCGCCCAGCCTGCCGCCCTCACTCGAGCGGCTCCACCTGCAGAACAATCTCATCTCCA
AGGTGCCCCGAGGAGCCCTGAGCCGCCAGACTCAACTCCGTGAGCTCTACCTCCAGCACAACCAGCTG
CAACCAGCTGACCACAGTGCCCGCCGGCCTGCCCCGGACCCTGGCTATCCTGCACCTGGGCCGCAACC
GCATCCGGCAGGTGGAGGCGGCTCGGCTGCACGGGGCGCGTGGTCTGCGCTATTTGTTGCTGCAGCAC
AACCAGCTGGGGAGCTCAGGGCTGCCCGCCGGGGCTCTGCGGCCGCTGCGGGGCCTGCACACGCTGCA
CCTCTATGGCAATGGGCTGGACCGCGTGCCTCCAGCCCTGCCCCGCCGCCTGCGTGCCCTGGTGCTGC
CCCACAACCACGTGGCCGCGCTGGGTGCCCGTGACCTGGTCGCCACACCGGGCCTGACGGAGCTTAAC
CTGGCCTATAACCGCCTGGCCAGCGCCCGTGTGCACCACCGGGCCTTCCGCCGGTTGCGTGCCCTGCG
CAGCCTCGACCTGGCAGGGAATCAGCTAACCCGGCTGCCCATGGGCCTGCCCACTGGCCTGCGCACCC
TGCAGCTGCAACGCAACCAGCTGCGGATGCTCGAGCCCGAGCCTCTGGCCGGCCTGGACCAACTGCGG
GAGCTCAGCCTGGCGCACAACCGGCTCCGGGTCGGCGACATCGGGCCAGGCACCTGGCATGAGCTCCA
AGCCCTCCAGATGCTGGACCTCAGCCACAATGAGCTGTCCTTTGTGCCCCCGGACCTGCCTGAGGCCC
TGGAGGAGCTGCACCTCGAGGGCAACCGCATCGGCCACGTGGGCCCCGAGGCCTTCCTCAGCACACCC
CGCCTGCGTGCCCTCTTCCTCAGGGCCAACAGGCTTCACATGACGAGCATCGCGGCTGAGGCCTTCCT
GGGGCTCCCAAACCTGCGTGTGGTGGACACGGCAGGGAATCCGGAGCAGGTCCTGATCCGGCTGCCTC
CCACCACCCCACGTGGGCCACGGGCAGGGGGCCCCGAATTCGGC

| | | | |
|---|---|---|---|
| NOV42g, 308521214 | SEQ ID NO:984 | 581 aa | MW at 63963.7 kD |
| Protein Sequence | | | |

TGSTMWPSLLLLLLLPGPPPVAGLEDAAFPHLGESLQPLPRACPLRCSCPRVDTVDCDGLDLRVFPDN
ITRAAQHLSLQNNQLQELPYNELSRLSGLRTLNLHNNLISSEGLPDEAFESLTQLQHLCVAHNKLSVA
PQFLPRSLRVADLAANQVMEIFPLTFGEKPALRSVYLHNNQLSNAGLPPDAFRGSEAIATLSLSNNQL
SYLPPSLPPSLERLHLQNNLISKVPRGALSRQTQLRELYLQHNQLTDSGLDATTFSKLHSLEYLDLSH
NQLTTVPAGLPRTLAILHLGRNRIRQVEAARLHGARGLRYLLLQHNQLGSSGLPAGALRPLRGLHTLH
LYGNGLDRVPPALPRRLRALVLPHNHVAALGARDLVATPGLTELNLAYNRLASARVHHRAFRRLRALR
SLDLAGNQLTRLPMGLPTGLRTLQLQPNQLRMLEPEPLAGLDQLRELSLAHNRLRVGDIGPGTWHELQ
ALQMLDLSHNELSFVPPDLPEALEELHLEGNRIGHVGPEAFLSTPRLRALFLRANRLHMTSIAAEAFL
GLPNLRVVDTAGNPEQVLIRLPPTTPRGPRAGGPEFG

| | | |
|---|---|---|
| NOV42h, CG56904-02 | SEQ ID NO:985 | 1506 bp |
| DNA Sequence | ORF Start: ATG at 1 | ORF Stop: TGA at 1504 |

ATGATGAACAACCAGCTCCAGGAACTCCCCTACAATGAGCTGTCCCGCCTCAGTGGCCTGCGAACCCT
CAACCTCCACAACAACCTCATCTCCTCCGAAGGCCTGCCTGACGAGGCCTTCGAGTCCCTCACCCAGC
TGCAGCACCTCTGCGTGGCTCACAACAAGCTCTCAGTGGCCCCTCAGTTTCTGCCCCGGTCCCTCCGT
GTCGCGGATCTGGCTGCCAACCAAGTGATGGAGATCTTCCCCCTCACCTTTGGGGAGAAGCCGGCACT
CAGGTCCGTGTACCTCCACAACAACCAGCTGAGCAACGCTGGCCTGCCCCCCGACGCCTTCCGCGGCT
CCGAGGCCATCGCCACCCTCAGCCTCTCCAACAACCAGCTCAGCTACCTGCCGCCCAGCCTGCCGCCC
TCACTCGAGCGGCTCCACCTGCAGAACAATCTCATCTCCAAGGTGCCCCGAGGAGCCCTGAGCCGCCA
GACTCAACTCCGTGAGCTCTACCTCCAGCACAACCAGCTGACAGACAGTGGCCTGGATGCCACCACCT
CTGCCCCGGACCCTGGCTATCCTGCACCTGGGCCGCAACCGCATCCGGCAGGTGGAGGCGGCTCGGCT
GCACGGGGCGCGTGGTCTGCGCTATTTGTTGCTGCAGCACAACCAGCTGGGGAGCTCAGGGCTGCCCG
CCGGGGCTCTGCGGCCGCTGCGGGGCCTGCACACGCTGCACCTCTATGGCAATGGGCTGGACCGCGTG
CCTCCAGCCCTGCCCCGCCGCCTGCGTGCCCTGGTGCTGCCCCACAACCACGTGGCCGCGCTGGGTGC
CCGTGACCTGGTCGCCACACCGGGCCTGACGGAGCTTAACCTGGCCTATAACCGCCTGGCCAGCGCCC
GTGTGCACCACCGGGCCTTCCGCCGGTTGCGTGCCCTGCGCAGCCTCGACCTGGCAGGGAATCAGCTA
ACCCGGCTGCCCATGGGCCTGCCCACTGGCCTGCGCACCCTGCAGCTGCAACGCAACCAGCTGCGGAT
GCTCGAGCCCGAGCCTCTGGCCGGCCTGGACCAACTGCGGGAGCTCAGCCTGGCGCACAACCGGCTCC
GGGTCGGCGACATCGGGCCAGGCACCTGGCATGAGCTCCAAGCCCTCCAGATGCTGGACCTCAGCCAC
AATGAGCTGTCCTTTGTGCCCCCGGACCTGCCTGAGGCCCTAGAGGAGCTGCACCTCGAGGGCAACCG
CATCGGCCACGTGGGCCCCGAGGCCTTCCTCAGCACACCCCGCCTGCGTGCCCTCTTCCTCAGGGCCA
ACAGGCTTCACATGACGAGCATCGCGGCTGAGGCCTTCCTGGGGCTCCCAAACCTGCGTGTGGTGGAC
GGGCCCCTGA

| | | | |
|---|---|---|---|
| NOV42h, CG56904-02 | SEQ ID NO:986 | 501 aa | MW at 55426.1 kD |
| Protein Sequence | | | |

MMNNQLQELPYNELSRLSGLRTLNLHNNLISSEGLPDEAFESLTQLQHLCVAHNKLSVAPQFLPRSLR
VADLAANQVMEIFPLTFGEKPALRSVYLHNNQLSNAGLPPDAFRGSEAIATLSLSNNQLSYLPPSLPP
SLERLHLQNNLISKVPRGALSRQTQLRELYLQHNQLTDSGLDATTFSKLHSLEYLDLSHNQLTTVPAG
LPRTLAILHLGRNRIRQVEAARLHGARGLRYLLLQHNQLGSSGLPAGALRPLRGLHTLHLYGNGLDRV
PPALPRRLRALVLPHNHVAALGARDLVATPGLTELNLAYNRLASARVHHRAFRRLRALRSLDLAGNQL
TRLPMGLPTGLRTLQLQRNQLRMLEPEPLAGLDQLRELSLAHNRLRVGDIGPGTWHELQALQMLDLSH
NELSFVPPDLPEALEELHLEGNRIGHVGPEAFLSTPRLRALFLRANRLHMTSIAAEAFLGLPNLRVVD
TAGNPEQVLIRLPPTTPRGPRAGGP

| | | |
|---|---|---|
| NOV42i, CG56904-03 | SEQ ID NO:987 | 1239 bp |
| DNA Sequence | ORF Start: ATG at 1 | ORF Stop: TGA at 1237 |

ATGATGAACAACCAGCTCCAGGAACTCCCCTACAATGAGCTGTCCCGCCTCAGTGGCCTGCGAACCCT
CAACCTCCACAACAACCTCATCTCCTCCGAAGGCCTGCCTGACGAGGCCTTCGAGTCCCTCACCCAGC
TGCAGCACCTCTGCGTGGCTCACAACAAGAACAATCTCATCTCCAAGGTGCCCCGAGGAGCCCTGAGC
CGCCAGACTCAACTCCGTGAGCTCTACCTCCAGCACAACCAGCTGACAGACAGTGGCCTGGATGCCAC
CACCTTCAGCAAGCTGCATAGCCTTGAATACCTGGATCTCTCCCACAACCAGCTGACCACAGTGCCCG
CCGGCCTGCCCCGGACCCTGGCTATCCTGCACCTGGGCCGCAACCGCATCCGGCAGGTGGAGGCGGCT
CGGCTGCACGGGGCGCGTGGTCTGCGCTATTTGTTGCTGCAGCACAACCAGCTGGGGAGCTCAGGGCT
GCCCGCCGGGGCTCTGCGGCCGCTGCGGGGCCTGCACACGCTGCACCTCTATGGCAATGGGCTGGACC
GCGTGCCTCCAGCCCTGCCCCGCCGCCTGCGTGCCCTGGTGCTGCCCCACAACCACGTGGCCGCGCTG
GGTGCCCGTGACCTGGTCGCCACACCGGGCCTGACGGAGCTTAACCTGGCCTATAACCGCCTGGCCAG
CGCCCGTGTGCACCACCGGGCCTTCCGCCGGTTGCGTGCCCTGCGCAGCCTCGACCTGGCAGGGAATC
AGCTAACCCGGCTGCCCATGGGCCTGCCCACTGGCCTGCGCACCCTGCAGCTGCAACGCAACCAGCTG
CGGATGCTCGAGCCCGAGCCTCTGGCCGGCCTGGACCAACTGCGGGAGCTCAGCCTGGCGCACAACCG
GCTCCGGGTCGGCGACATCGGGCCAGGCACCTGGCATGAGCTCCAAGCCCTCCAGATGCTGGACCTCA
GCCACAATGAGCTGTCCTTTGTGCCCCCGGACCTGCCTGAGGCCCTAGAGGAGCTGCACCTCGAGGGC
AACCGCATCGGCCACGTGGGCCCCGAGGCCTTCCTCAGCACACCCCGCCTGCGTGCCCTCTTCCTCAG
GGCCAACAGGCTTCACATGACGAGCATCGCGGCTGAGGCCTTCCTGGGGCTCCCAAACCTGCGTGTGG
TGGACACGGCAGGGAATCCGGAGCAGGTCCTGATCCGGCTGCCTCCCACCACCCCACGTGGGCCACGG
GCAGGGGGCCCCTGA

| | | | |
|---|---|---|---|
| NOV42i, CG56904-03 | SEQ ID NO:988 | 412 aa | MW at 45723.1 kD |
| Protein Sequence | | | |

MMNNQLQELPYNELSRLSGLRTLNLHNNLISSEGLPDEAFESLTQLQHLCVAHNKNNLISKVPRGALS
RQTQLRELYLQHNQLTDSGLDATTFSKLHSLEYLDLSHNQLTTVPAGLPRTLAILHLGRNRIRQVEAA
RLHGARGLRYLLLQHNQLGSSGLPAGALRPLRGLHTLHLYGNGLDRVPPALPRRLRALVLPHNHVAAL
GAPDLVATPGLTELNLAYNRLASARVHHRAFRRLRALRSLDLAGNQLTRLPMGLPTGLRTLQLQRNQL
RMLEPEPLAGLDQLRELSLAHKRLRVGDIGPGTWHELQALQMLDLSHNELSFVPPDLPEALEELHLEG
NRIGHVGPEAFLSTPRLRALFLRANRLHMTSIAAEAFLGLPNLRVVDTAGNPEQVLIRLPPTTPRGPR
AGGP

| | | |
|---|---|---|
| NOV42 , CG56904-05 | SEQ ID NO:989 | 1710 bp |
| DNA Sequence | ORF Start: ATG at 1 | ORF Stop: TGA at 1456 |

ATGTGGCCGAGCCTGCTGCTGCTCCTGCTGTTGCCGGGGCCCCCGCCCGTCGCCGGCTTGGAAGACGC
TGCCTTCCCCCACCTGGGGGAGAGCTTGCAGCCCCTGCCCCGGGCCTGTCCCCTGCGCTGCTCCTGCC
CCCGAGTCGACACTGTGGACTGTGATGGCTTGGACCTTCGAGTGTTCCCGGACAACATCACCAGAGCC
GCTCAGCACCTCTCCCTGCAGAACAACCAGCTCCAGGAACTCCCCTACAATGAGCTGTCCCGCCTCAG
TGGCCTGCGAACCCTCAACCTCCACAACAACCTCATCTCCTCCGAAGGTCTGCCTGACGAGGCCTTCG
AGTCCCTCACCCAGCTGCAGCACCTCTGCGTGGCTCACAACAAGAACAATCTCATCTCCAAGGTGCCC
CGAGGAGCCCTGAGCCGCCAGACTCAACTCCGTGAGCTCTACCTCCAGCACAACCAGCTGACAGACAG
TGGCCTGGATGCCACCACCTTCAGCAAGCTGCATAGCCTTGAATACCTGGATCTCTCCCACAACCAGC
TGACCACAGTGCCCGCCGGCCTGCCCCGGACCCTGGCTATCCTGCACCTGGGCCGCAACCGCATCCGG
CAGGTGGAGGCGGCTCGGCTGCACGGGGCGCGTGGTCTGCGCTATTTGTTGCTGCAGCACAACCAGCT
GGGGAGCTCAGGGCTGCCCGCCGGGGCTCTGCGGCCGCTGCGGGGCCTGCACACGCTGCACCTCTATG
GCAATGGGCTGGACCGCGTGCCTCCAGCCCTGCCCCGCCGCCTGCGTGCCCTGGTGCTGCCCCACAAC
CACGTGGCCGCGCTGGGTGCCCGTGACCTGGTCGCCACACCGGGCCTGACGGAGCTTAACCTGGCCTA
TAACCGCCTGGCCAGCGCCCGTGTGCACCACCGGGCCTTCCGCCGGTTGCGTGCCCTGCGCAGCCTCG
ACCTGGCAGGGAATCAGCTAACCCGGCTGCCCATGGGCCTGCCCACTGGCCTGCGCACCCTGCAGCTG
CAACGCAACCAGCTGCGGATGCTCGAGCCCGAGCCTCTGGCCGGCCTGGACCAACTGCGGGAGCTCAG
CCTGGCGCACAACCGGCTCCGGGTCGGCGACATCGGGCCAGGCACCTGGCATGAGCTCCAAGCCCTCC
AGATGCTGGACCTCAGCCACAATGAGCTGTCCTTTGTGCCCCCGGACCTGCCTGAGGCCCTAGAGGAG
CTGCACCTCGAGGGCAACCGCATCGGCCACGTGGGCCCCGAGGCCTTCCTCAGCACACCCCGCCTGCG
TGCCCTCTTCCTCAGGGCCAACAGGCTTCACATGACGAGCATCGCGGCTGAGGCCTTCCTGGGGCTCC
CAAACCTGCGTGTGGTGGACACGGCAGGGAATCCGGAGCAGGTCCTGATCCGGCTGCCTCCCACCACC
CCACGTGGGCCACGGGCAGGGGGCCCCTGATCCTAGAGAGGCCCAGCAGAGCAGCTCAGACTCCTGGG
ACTCCGCTGGGCCGTGGACTGAGGAGACAACGCCCACCAGGGGCCCTTGGTCTGGCTCTCCTGGGCCT
CCAGGGCTGGGCCTGCTCTGCCTGCCACTGGCCGAGACACAGAGGCACACAGCTGGCATACTCCAGGC
TCACAGACCACGCCGGCCTGGCGGGACACACCCTACCCCAAACTCCCAACACAGATGGAGGCAGCAAC
AATAAAGCCA

| | | | |
|---|---|---|---|
| NOV42 , CG56904-05 | SEQ ID NO:990 | 485aa | MW at 53581.10 kD |
| Protein Sequence | | | |

MWPSLLLLLLLPGPPPVAGLEDAAFPHLGESLQPLPRACPLRCSCPRVDTVDCDGLDLRVFPDNITRA
AQHLSLQNNQLQELPYNELSRLSGLRTLNLHNNLISSEGLPDEAFESLTQLQHLCVAHNKNNLISKVP
RGALSRQTQLRELYLQHNQLTDSGLDATTFSKLHSLEYLDLSHNQLTTVPAGLPRTLAILHLGRNRIR
QVEAARLHGARGLRYLLLQHNQLGSSGLPAGALRPLRGLHTLHLYGNGLDRVPPALPRRLRALVLPHN
HVAALGARDLVATPGLTELNLAYNRLASARVHHRAFRRLRALRSLDLAGNQLTRLPMGLPTGLRTLQL
QRNQLRMLEPEPLAGLDQLRELSLAHNRLRVGDIGPGTWJELQALQMLDLSHNELSFVPPDLPEALEE
LHLEGNRIGHVGPEAFLSTPRLRALFLRANRLHMTSIAAEAFLGLPNLRVVDTAGNPEQVLIRLPPTT
PRGPRAGGP

| | | |
|---|---|---|
| NOV42k, CG56904-06 | SEQ ID NO:991 | 1992 bp |
| DNA Sequence | ORF Start: ATG at 1 | ORF Stop: TGA at 1738 |

ATGGGGAGGCCCACCCAGTGGCCGAGCCTGCTGCTGCTCCTGCTGTTGCCGGGGCCCCCGCCCGTCGC
CGGCTTGGAAGACGCTGCCTTCCCCCACCTGGGGGAGAGCTTGCAGCCCCTGCCCCGGGCCTGTCCCC
TGCGCTGCTCCTGCCCCCGAGTCGACACTGTGGACTGTGATGGCTTGGACCTTCGAGTGTTCCCGGAC
AACATCACCAGAGCCGCTCAGCACCTCTCCCTGCAGAACAACCAGCTCCAGGAACTCCCCTACAATGA
GCTGTCCCGCCTCAGTGGCCTGCGAACCCTCAACCTCCACAACAACCTCATCTCCTCCGAAGGTCTGC
CTGACGAGGCCTTCGAGTCCCTCACCCAGCTGCAGCACCTCTGCGTGGCTCACAACAAGCTCTCAGTG
GCCCCTCAGTTTCTGCCCCGGTCCCTCCGTGTCGCGGATCTGGCTGCCAACCAAGTGATGGAGATCTT
CCCCCTCACCTTTGGGGAGAAGCCGGCACTCAGGTCCGTGTACCTCCACAACAACCAGCTGAGCAACG
CTGGCCTGCCCCCCGACGCCTTCCGCGGCTCCGAGGCCATCGCCACCCTCAGCCTCTCCAACAACCAG
CTCAGCTACCTGCCGCCCAGCCTGCCGCCCTCACTCGAGCGGCTCCACCTGCAGAACAATCTCATCTC
CAAGGTGCCCCGAGGAGCCCTGAGCCGCCAGACTCAACTCCGTGAGCTCTACCTCCAGCACAACCAGC
TGACAGACAGTGGCCTGGATGCCACCACCTTCAGCAAGCTGCATAGCCTTGAATACCTGGATCTCTCC
CACAACCAGCTGACCACAGTGCCCGCCGGCCTGCCCCGGACCCTGGCTATCCTGCACCTGGGCCGCAA
CCGCATCCGGCAGGTGGAGGCGGCTCGGCTGCACGGGGCGCGTGGTCTGCGCTATTTGTTGCTGCAGC
ACAACCAGCTGGGGAGCTCAGGGCTGCCCGCCGGGGCTCTGCGGCCGCTGCGGGGCCTGCACACGCTG
CACCTCTATGGCAATGGGCTGGACCGCGTGCCTCCAGCCCTGCCCCGCCGCCTGCGTGCCCTGGTGCT
GCCCCACAACCACGTGGCCGCGCTGGGTGCCCGTGACCTGGTCGCCACACCGGGCCTGACGGAGCTTA
ACCTGGCCTATAACCGCCTGGCCAGCGCCCGTGTGCACCACCGGGCCTTCCGCCGGTTGCGTGCCCTG
CGCAGCCTCGACCTGGCAGGGAATCAGCTAACCCGGCTGCCCATGGGCCTGCCCACTGGCCTGCGCAC
CCTGCAGCTGCAACGCAACCAGCTGCGGATGCTCGAGCCCGAGCCTCTGGCCGGCCTGGACCAACTGC
GGGAGCTCAGCCTGGCGCACAACCGGCTCCGGGTCGGCGACATCGGGCCAGGCACCTGGCATGAGCTC
CAAGCCCTCCAGATGCTGGACCTCAGCCACAATGAGCTGTCCTTTGTGCCCCCGGACCTGCCTGAGGC
CCTAGAGGAGCTGCACCTCGAGGGCAACCGCATCGGCCACGTGGGCCCCGAGGCCTTCCTCAGCACAC
CCCGCCTGCGTGCCCTCTTCCTCAGGGCCAACAGGCTTCACATGACGAGCATCGCGGCTGAGGCCTTC
CTGGGGCTCCCAAACCTGCGTGTGGTGGACACGGCAGGGAATCCGGAGCAGGTCCTGATCCGGCTGCC
TCCCACCACCCCACGTGGGCCACGGGCAGGGGGCCCCTGATCCTAGAGAGGCCCAGCAGAGCAGCTCA
GACTCCTGGGACTCCGCTGGGCCGTGGACTGAGGAGACAACGCCCACCAGGGGCCCTTGGTCTGGCTC
TCCTGGGCCTCCAGGGCTGGGCCTGCTCTGCCTGCCACTGGCCGAGACACAGAGGCACACAGCTGGCA
TACTCCAGGCTCACAGACCACGCCGGCCTGGCGGGACACACCCTACCCCAAACTCCCAACACAGATGC
AGGCAGCAACAATAAAGCCA

| | | | |
|---|---|---|---|
| NOV42k, CG56904-06 | SEQ ID NO:992 | 579 aa | MW at 63823.6 kD |
| Protein Sequence | | | |

MGRPTQWPSLLLLLLLPGPPPVAGLEDAAFPHLGESLQPLPPACPLRCSCPRVDTVDCDGLDLRVFPD
NITRAAQHLSLQNNQLQELPYNELSRLSGLRTLNLHNNLISSEGLPDEAFESLTQLQHLCVAHNKLSV
APQFLPRSLRVADLAANQVMEIFPLTFGEKPALRSVYLHNNQLSNAGLPPDAFRGSEAIATLSLSNNQ
LSYLPPSLPPSLERLHLQNNLISKVPRGALSRQTQLRELYLQHNQLTDSGLDATTFSKLHSLEYLDLS
HNQLTTVPAGLPRTLAILHLGRNRIRQVEAARLHGARGLRYLLLQHNQLGSSGLPAGALRPLRGLHTL
HLYGNGLDRVPPALPRRLRALVLPHNHVAALGARDLVATPGLTELNLAYNRLASARVHHRAFRRLRAL
RSLDLAGNQLTRLPMGLPTGLRTLQLQRNQLRMLEPEPLAGLDQLRELSLAHNRLRVGDIGPGTWHEL
QALQMLDLSHNELSFVPPDLPEALEELHLEGNRIGHVGPEAFLSTPRLRALFLRANRLHMTSIAAEAF
LGLPNLRVVDTAGNPEQVLIRLPPTTPRGPRAGGP

| | | |
|---|---|---|
| NOV42l, CG56904-07 | SEQ ID NO:993 | 1278 bp |
| DNA Sequence | ORF Start: ATG at 10 | ORF Stop: at 1273 |

GGATCCACCATGGGGAGGCCCACCCAGTGGCCGAGCCTGCTGCTGCTCCTGCTGTTGCCGGGGCCCCC
GCCCGTCGCCGGCTTGGAAGACGCTGCCTTCCCCCACCTGGGGGAGAGCTTGCAGCCCCTGCCCCGGG
CCTGTCCCCTGCGCTGCTCCTGCCCCCGAGTCGACACTGTGGACTGTGATGGCTTGGACCTTCGAGTG
TTCCCGGACAACATCACCAGAGCCGCTCAGCACCTCTCCCTGCAGAACAACCAGCTCCAGGAACTCCC
CTACAATGAGCTGTCCCGCCTCAGTGGCCTGCGAACCCTCAACCTCCACAACAACCTCATCTCCTCCG
AAGGCCTGCCTGACGAGGCCTTCGAGTCCCTCACCCAGCTGCAGCACCTCTGCGTGGCTCACAACAAG
AACAATCTCATCTCCAAGGTGCCCCGAGGAGCCCTGAGCCGCCAGACTCAACTCCGTGAGCTCTACCT
CCAGCACAACCAGCTGACAGACAGTGGCCTGGATGCCACCACCTTCAGCAAGCTGCATAGCCTTGAAT
CACCTGGGCCGCAACCGCATCCGGCAGGTGGAGGCGGCTCGGCTGCACGGGGCGCGTGGTCTGCGCTA
TTTGTTGCTGCAGCACAACCAGCTGGGGAGCTCAGGGCTGCCCGCCGGGGCTCTGCGGCCGCTGCGGG
GCCTGCACACGCTGCACCTCTATGGCAATGGGCTGGACCGCGTGCCTCCAGCCCTGCCCCGCCGCCTG
CGTGCCCTGGTGCTGCCCCACAACCACGTGGCCGCGCTGGGTGCCCGTGACCTGGTCGCCACACCGGG
CCTGACGGAGCTTAACCTGGCCTATAACCGCCTGGCCAGCGCCCGTGTGCACCACCGGGCCTTCCGCC
GGTTGCGTGCCCTGCGCAGCCTCGACCTGGCAGGGAATCAGCTAACCCGGCTGCCCATGGGCCTGCCC
ACTGGCCTGCGCACCCTGCAGCTGCAACGCAACCAGCTGCGGATGCTCGAGCCCGAGCCTCTGGCCGG
CCTGGACCAACTGCGGGAGCTCAGCCTGGCGCACAACCGGCTCCGGGTCGGCGACATCGGGCCAGGCA
CCTGGCATGAGCTCCAAGCCCTCCAGGTCAGGCACAGGCTGGTTAGCCACACTGTCCCCAGGGCCCCT
CCATCCCCCTGCCTGCCCTGCCACGTCCCAAACATTCTAGTTAGCTGGGAATTC

| | | | |
|---|---|---|---|
| NOV421, CG56904-07 | SEQ ID NO:994 | 421 aa | MW at 46715.4 kD |
| Protein Sequence | | | |

MGRPTQWPSLLLLLLLPGPPPVAGLEDAAFPHLGESLQPLPRACPLRCSCPRVDTVDCDGLDLRVFPD
NITRAAQHLSLQNNQLQELPYNELSRLSGLRTLNLHNNLISSEGLPDEAFESLTQLQHLCVAHNKNNL
ISKVPRGALSRQTQLRELYLQHNQLTDSGLDATTFSKLHSLEYLDLSHNQLTTVPAGLPRTLAILHLG
RNRIRQVEAARLHGARGLRYLLLQHNQLGSSGLPAGALRPLRGLHTLHLYGNGLDRVPPALPRRLRAL
VLPHNHVAALGARDLVATPGLTELNLAYNRLASARVHHRAFRRLRALRSLDLAGNQLTRLPMGLPTGL
RTLQLQRNQLRMLEPEPLAGLDQLRELSLAHNRLRVGDIGPGTWHELQALQVRHRLVSHTVPRAPPSP
CLPCHVPNILVSW

| | | |
|---|---|---|
| NOV42m, CG56904-08 | SEQ ID NO:995 | 1744 bp |
| DNA Sequence | ORF Start: ATG at 14 | ORF Stop: end of sequence |

CACCGGATCCACCATGTGGCCGAGCCTGCTGCTGCTCCTGCTGTTGCCGGGGCCCCCGCCCGTCGCCG
GCTTGGAAGACGCTGCCTTCCCCCACCTGGGGGAGAGCTTGCAGCCCCTGCCCCGGGCCTGTCCCCTG
CGCTGCTCCTGCCCCCGAGTCGACACTGTGGACTGTGATGGCTTGGACCTTCGAGTGTTCCCGGACAA
CATCACCAGAGCCGCTCAGCACCTCTCCCTGCAGAACAACCAGCTCCAGGAACTCCCCTACAATGAGC
TGTCCCGCCTCAGTGGCCTGCGAACCCTCAACCTCCACAACAACCTCATCTCCTCCGAAGGCCTGCCT
GACGAGGCCTTCGAGTCCCTCACCCAGCTGCAGCACCTCTGCGTGGCTCACAACAAGCTCTCAGTGGC
CCCTCAGTTTCTGCCCCGGTCCCTCCGTGTCGCGGATCTGGCTGCCAACCAAGTGATGGAGATCTTCC
CCCTCACCTTTGGGGAGAAGCCGGCACTCAGGTCCGTGTACCTCCACAACAACCAGCTGAGCAACGCT
GGCCTGCCCCCCGACGCCTTCCGCGGCTCCGAGGCCATCGCCACCCTCAGCCTCTCCAACAACCAGCT
CAGCTACCTGCCGCCCAGCCTGCCGCCCTCACTCGAGCGGCTCCACCTGCAGAACAATCTCATCTCCA
AGGTGCCCCGAGGAGCCCTGAGCCGCCAGACTCAACTCCGTGAGCTCTACCTCCAGCACAACCAGCTG
ACAGACAGTGGCCTGGATGCCACCACCTTCAGCAAGCTGCATAGCCTTGAATACCTGGATCTCTCCCA
CAACCAGCTGACCACAGTGCCCGCCGGCCTGCCCCGGACCCTGGCTATCCTGCACCTGGGCCGCAACC
GCATCCGGCAGGTGGAGGCGGCTCGGCTGCACGGGGCGCGTGGTCTGCGCTATTTGTTGCTGCAGCAC
AACCAGCTGGGGAGCTCAGGGCTGCCCGCCGGGGCTCTGCGGCCGCTGCGGGGCCTGCACACGCTGCA
CCTCTATGGCAATGGGCTGGACCGCGTGCCTCCAGCCCTGCCCCGCCGCCTGCGTGCCCTGGTGCTGC
CCCACAACCACGTGGCCGCGCTGGGTGCCCGTGACCTGGTCGCCACACCGGGCCTGACGGAGCTTAAC
CTGGCCTATAACCGCCTGGCCAGCGCCCGTGTGCACCACCGGGCCTTCCGCCGGTTGCGTGCCCTGCG
CAGCCTCGACCTGGCAGGGAATCAGCTAACCCGGCTGCCCATGGGCCTGCCCACTGGCCTGCGCACCC
TGCAGCTGCAACGCAACCAGCTGCGGATGCTCGAGCCCGAGCCTCTGGCCGGCCTGGACCAACTGCGG
GAGCTCAGCCTGGCGCACAACCGGCTCCGGGTCGGCGACATCGGGCCAGGCACCTGGCATGAGCTCCA
AGCCCTCCAGATGCTGGACCTCAGCCACAATGAGCTGTCCTTTGTGCCCCCGGACCTGCCTGAGGCCC
TGGAGGAGCTGCACCTCGAGGGCAACCGCATCGGCCACGTGGGCCCCGAGGCCTTCCTCAGCACACCC
CGCCTGCGTGCCCTCTTCCTCAGGGCCAACAGGCTTCACATGACGAGCATCGCGGCTGAGGCCTTCCT
GGGGCTCCCAAACCTGCGTGTGGTGGACACGGCAGGGAATCCGGAGCAGGTCCTGATCCGGCTGCCTC
CCACCACCCCACGTGGGCCACGGGCAGGGGGCCCCAAGCTTGGC

| | | | |
|---|---|---|---|
| NOV42m, CG56904-08 | SEQ ID NO:996 | 577 aa | MW at 63582.4 kD |
| Protein Sequence | | | |

MWPSLLLLLLLPGPPPVAGLEDAAFPHLGESLQPLPRACPLRCSCPRVDTVDCDGLDLRVFPDNITRA
AQHLSLQNNQLQELPYNELSRLSGLRTLNLHNNLISSEGLPDEAFESLTQLQHLCVAHNKLSVAPQFL
PRSLRVADLAANQVMEIFPLTFGEKPALRSVYLHNNQLSNAGLPPDAFRGSEAIATLSLSNNQLSYLP
PSLPPSLERLHLQNNLISKVPRGALSRQTQLRELYLQHNQLTDSGLDATTFSKLHSLEYLDLSHNQLT
TVPAGLPRTLAILHLGRNRIRQVEAARLHGARGLRYLLLQHNQLGSSGLPAGALRPLRGLHTLHLYGN
GLDRVPPALPRRLRALVLPHNHVAALGARDLVATPGLTELNLAYNRLASARVHHRAFRRLRALRSLDL
AGNQLTRLPMGLPTGLRTLQLQRNQLRMLEPEPLAGLDQLRELSLAHNRLRVGDIGPGTWHELQALQM
LDLSHNELSFVPPDLPEALEELHLEGNRIGHVGPEAFLSTPRLRALFLRANRLHMTSIAAEAFLGLPN
LRWDTAGNPEQVLIRLPPTTPRGPRAGGPKLG

[0597] A ClustalW comparison of the above protein sequences yields the following sequence alignment shown in Table 42B.

TABLE 42B
Comparison of the NOV42 protein sequences.

| | | |
|---|---|---|
| NOV42a | ---MGRPTQWPSLLLLLLLPGPPPVAGLEDAAFPHLGESLQPLPRACPLRCSCPRVDTVD | (SEQ ID NO:972) |
| NOV42b | GSTMGRPTQWPSLLLLLLLPGPPPVAGLEDAAFPHLGESLQPLPRACPLRCSCPRVDTVD | (SEQ ID NO:974) |
| NOV42c | -----------------------------------------------------------I | (SEQ ID NO:976) |
| NOV42d | --------MWPSLLLLLLLPGPPPVAGLEDAAFPHLGESLQPLPRACPLRCSCPRVDTVD | (SEQ ID NO:978) |
| NOV42e | ----TGSTMWPSLLLLLLLPGPPPVAGLEDAAFPHLGESLQPLPRACPLRCSCPRVDTVD | (SEQ ID NO:980) |
| NOV42f | ----TGSTMWPSLLLLLLLPGPPPvAGLEDAAFPHLGESLQPLPRACPLRCSCPRVDTVD | (SEQ ID NO:982) |
| NOV42g | ----TGSTMWPSLLLLLLLPGPPPVAGLEDAAFPHLGESLQPLPRACPLRCSCPRVDTVD | (SEQ ID NO:984) |
| NOV42h | ------------------------------------------------------------ | (SEQ ID NO:986) |
| NOV42i | ------------------------------------------------------------ | (SEQ ID NO:988) |
| NOV42j | --------MWPSLLLLLLLPGPPPVAGLEDAAFPHLGESLQPLPRACPLRCSCPRVDTVD | (SEQ ID NO:990) |
| NOV42k | ---MGRPTQWPSLLLLLLLPGPPPVAGLEDAAFPHLGESLQPLPRACPLRCSCPRVDTVD | (SEQ ID NO:992) |
| NOV42l | ---MGRPTQWPSLLLLLLLPGPPPVAGLEDAAFPHLGESLQPLPRACPLRCSCPRVDTVD | (SEQ ID NO:994) |
| NOV42m | --------MWPSLLLLLLLPGPPPVAGLEDAAFPHLGESLQPLPRACPLRCSCPRVDTVD | (SEQ ID NO:996) |
| NOV42a | CDGLDLRVFPDNITRAAQHLSLQNNQLQELPYNELSRLSGLRTLNLHNNLISSEGLPDEA | |
| NOV42b | CDGLDLRVFPDNITRAAQHLSLQNNQLQELPYNELSRLSGLRTLNLHNNLISSEGLPDEA | |
| NOV42c | HHGLDLRVFPDNITPAAQHLSLQNNQLQELPYNELSRLSGLRTLNLHNNLISSEGLPDEA | |
| NOV42d | CDGLDLRVFPDNITRAAQHLSLQNNQLQELPYNELSRLSGLRTLNLHNNLISSEGLPDEA | |
| NOV42e | CDGLDLRVFPDNITRAAQHLSLQNNQLQELPYNELSRLSGLRTLNLHNNLISSEGLPDEA | |
| NOV42f | CDGLDLRVFPDNITPAAQHLSLQNNQLQELPYNELSRLSGLRTLNLHNNLISSEGLPDEA | |
| NOV42g | CDGLDLRVFPDNITRAAQHLSLQNNQLQELPYNELSRLSGLRTLNLHNNLISSEGLPDEA | |
| NOV42h | ---------------------MMNNQLQELPYNELSRLSGLRTLNLHNNLISSEGLPDEA | |
| NOV42i | ---------------------MMNNQLQELPYNELSRLSGLRTLNLHNNLISSEGLPDEA | |
| NOV42j | CDGLDLRVFPDNITRAAQHLSLQNNQLQELPYNELSRLSGLRTLNLHNNLISSEGLPDEA | |
| NOV42k | CDGLDLRVFPDNITRAAQHLSLQNNQLQELPYNELSRLSGLRTLNLHNNLISSEGLPDEA | |
| NOV42l | CDGLDLRVFPDNITRAAQHLSLQNNQLQELPYNELSRLSGLRTLNLHNNLISSEGLPDEA | |
| NOV42m | CDGLDLRVFPDNITRAAQHLSLQNNQLQELPYNELSRLSGLRTLNLHNNLISSEGLPDEA | |
| NOV42a | FESLTQLQHLCVAHNK-------------------------------------------- | |
| NOV42b | FESLTQLQHLCVAHNK-------------------------------------------- | |
| NOV42c | FESLTQLQHLCVAHNK-------------------------------------------- | |
| NOV42d | FESLTQLQHLCVAHNKLSVAPQFLPRSLRVADLAANQVMEIFPLTFGEKPALRSVYLHNN | |
| NOV42e | FESLTQLQHLCVAHNKLSVAPQFLPRSLR------------------------------- | |
| NOV42f | FESLTQLQHLCVAHNKLSVAPQFLPRSLRVADLAANQVMEIFPLTFGEKPALRSVYLHNN | |
| NOV42g | FESLTQLQHLCVAHNKLSVAPQFLPRSLRVADLAANQVMEIFPLTFGEKPALRSVYLHNN | |
| NOV42h | FESLTQLQHLCVAHNKLSVAPQFLPRSLRVADLAANQVMEIFPLTFGEKPALRSVYLHNN | |
| NOV42i | FESLTQLQHLCVAHN--------------------------------------------- | |
| NOV42j | FESLTQLQHLCVAHNK-------------------------------------------- | |
| NOV42k | FESLTQLQHLCVAHNKLSVAPQFLPRSLRVADLAANQVMEIFPLTFGEKPALRSVYLHNN | |
| NOV42l | FESLTQLQHLCVAHNK-------------------------------------------- | |
| NOV42m | FESLTQLQHLCVAHNKLSVAPQFLPRSLRVADLAANQVMEIFPLTFGEKPALRSVYLHNN | |
| NOV42a | ---------------------------------------------NNLISKVPRGALSRQ | |
| NOV42b | ---------------------------------------------NNLISKVPRGALSRQ | |
| NOV42c | ---------------------------------------------NNLISKVPRGALSRQ | |
| NOV42d | QLSNAGLPPDAFRGSEAIATLSLSNNQLSYLPPSLPPSLERLHLQNNLISKVPRGALSRQ | |
| NOV42e | ----------------------------------------VADLAANQVMEIFPLTFGEK | |
| NOV42f | QLSNAGLPPDAFRGSEAIATLSLSNNQLSYLPPSLPPSLERLHLQNNLISKVPRGALSRQ | |
| NOV42g | QLSNAGLPPDAFRGSEAIATLSLSNNQLSYLPPSLPPSLERLHLQNNLISKVPRGALSRQ | |
| NOV42h | QLSNAGLPPDAFRGSEAIATLSLSNNQLSYLPPSLPPSLERLHLQNNLISKVPRGALSRQ | |
| NOV42i | ------------------------K--------------------NNLISKVPRGALSRQ | |
| NOV42j | ---------------------------------------------NNLISKVPRGALSRQ | |
| NOV42k | QLSNAGLPPDAFRGSEAIATLSLSNNQLSYLPPSLPPSLERLHLQNNLISKVPRGALSRQ | |
| NOV42l | ---------------------------------------------NNLISKVPRGALSRQ | |
| NOV42m | QLSNAGLPPDAFRGSEAIATLSLSNNQLSYLPPSLPPSLERLHLQNNLISKVPRGALSRQ | |
| NOV42a | TQLRELYLQHNQLTDSGLDATTFSKLHSLEYLDLSHNQLTTVPAGLPRTLAILHLGRNRI | |
| NOV42b | TQLRELYLQHNQLTDSGLDATTFSKLHSLEYLDLSHNQLTTVPAGLPRTLAILHLGRNRI | |
| NOV42c | TQLRELYLQHNQLTDSGLDATTFSKLHSLEYLDLSHNQLTTVPAGLPRTLAILHLGRNRI | |
| NOV42d | TQLRELYLQHNQLTDSGLDATTFSKLHSLEYLDLSHNQLTTVPAGLPRTLAILHLGRNRI | |
| NOV42e | PALRSVYLHNNQLSNAGLPPDAFRGSEAIATLSLSNNQLSYLPPSLPPSLERLHLQNNLI | |
| NOV42f | TQLRELYLQHNQLTDSGLDATTFSKLHSLEYLDLSHNQLTTVPAGLPRTLAILHLGRNRI | |
| NOV42g | TQLRELYLQHNQLTDSGLDATTFSKLHSLEYLDLSHNQLTTVPAGLPRTLAILHLGRNRI | |
| NOV42h | TQLRELYLQHNQLTDSGLDATTFSKLHSLEYLDLSHNQLTTVPAGLPRTLAILHLGPNRI | |
| NOV42i | TQLRELYLQHNQLTDSGLDATTFSKLHSLEYLDLSHNQLTTVPAGLPRTLAILHLGRNRI | |
| NOV42j | TQLRELYLQHNQLTDSGLDATTFSKLHSLEYLDLSHNQLTTVPAGLPRTLAILHLGRNRI | |
| NOV42k | TQLRELYLQHNQLTDSGLDATTFSKLHSLEYLDLSHNQLTTVPAGLPRTLAILHLGRNRI | |
| NOV42l | TQLRELYLQHNQLTDSGLDATTFSKLHSLEYLDLSHNQLTTVPAGLPRTLAILHLGRNRI | |
| NOV42m | TQLRELYLQHNQLTDSGLDATTFSKLHSLEYLDLSHNQLTTVPAGLPRTLAILHLGRNRI | |
| NOV42a | RQVEAARLHGARGLRYLLLQHNQLGSSGLPAGALRPLRGLHTLHLDGNGLDRVPPALPRR | |
| NOV42b | RQVEAARLHGARGLRYLLLQHNQLGSSGLPAGALRPLRGLHTLHLYGNGLDRVPPALPRR | |
| NOV42c | RQVEAARLHGARGLRYLLLQHNQLGSSGLPAGALRPLRGLHTLHLYGNGLDRVPPALPRR | |
| NOV42d | RQVEAARLHGARGLRYLLLQHNQLGSSGLPAGALRPLRGLHTLHLYGNGLDRVPPALPRR | |
| NOV42e | SKVPRGALSRQTQLRELYLQHNQLTDSGLDATTFSKLHSLEYLDLSHNQLTTVPAGLPRT | |
| NOV42f | RQVEAARLHGARGLRYLLLQHNQLGSSGLPAGALRPLRGLHTLHLYGNGLDRVPPALPRR | |
| NOV42g | RQVEAARLHGARGLRYLLLQHNQLGSSGLPAGALRPLRGLHTLHLYGNGLDRVPPALPRR | |
| NOV42h | RQVEAARLHGARGLRYLLLQHNQLGSSGLPAGALRPLRGLHTLHLYGNGLDRVPPALPRR | |
| NOV42i | RQVEAARLHGARGLRYLLLQHNQLGSSGLPAGALRPLRGLHTLHLYGNGLDRVPPALPRR | |
| NOV42j | RQVEAARLHGARGLRYLLLQHNQLGSSGLPAGALRPLRGLHTLHLYGNGLDRVPPALPRR | |
| NOV42k | RQVEAARLHGARGLRYLLLQHNQLGSSGLPAGALRPLRGLHTLHLYGNGLDRVPPALPRR | |
| NOV42l | RQVEAARLHGARGLRYLLLQHNQLGSSGLPAGALRPLRGLHTLHLYGNGLDRVPPALPRR | |
| NOV42m | RQVEAARLHGARGLRYLLLQHNQLGSSGLPAGALRPLRGLHTLHLYGNGLDRVPPALPRR | |
| NOV42a | LRALVLPHNHVAALGARDLVATPGLTELNLAYNRLASARVHHRAFRRLRALRSLDLAGNQ | |
| NOV42b | LRALVLPHNHVAALGARDLVATPGLTELNLAYNRLASARVHHRAFRRLRALRSLDLAGNQ | |
| NOV42c | LRALVLPHNHVAALGARDLVATPGLTELNLAYNRLASARVHHRAFRRLHALRSLDLAGNQ | |
| NOV42d | LRALVLPHNHVAALGARDLVATPGLTELNLAYNRLASARVHHRAFRRLRALRSLDLAGNQ | |
| NOV42e | LAILHLGR---------------------------------------NRIRQMLDLSHNE | |
| NOV42f | LRALVLPHNHVAALGARDLVATPGLTELNLAYNRLASARVHHRAFRRLRALRSLDLAGNQ | |
| NOV42g | LRALVLPHNHVAALGARDLVATPGLTELNLAYNRLASARVHHRAFRRLRALRSLDLAGNQ | |
| NOV42h | LRALVLPHNHVAALGARDLVATPGLTELNLAYNRLASARVHHRAFRRLRALRSLDLAGNQ | |
| NOV42i | LRALVLPHNHVAALGARDLVATPGLTELNLAYNRLASARVHHRAFPRLRALRSLDLAGNQ | |
| NOV42l | LRALVLFHNHVAALGARDLVATFGLTELNLAYNRLASARVHHRAFRRLRALRSLDLAGNQ | |
| NOV42k | LRALVLPHNHVAALGARDLVATPGLTELNLAYNRLASARVHHEAFRRLRALRSLDLAGNQ | |
| NOV421 | LRALVLPHNHVAALGARDLVATPGLTELNLAYNRLASARVHHRAFRRLEALRSLDLAGNQ | |
| NOV42m | LRALVLPHNHVAALGARDLVATPGLTELNLAYNRLASARVHHPAFRRLHALRSLDLAGNQ | |
| NOV42a | LTRLPMGLPTGLRTLQLQRNQLRMLEPEPLAGLDQLRELSLAHNRLRVGDIGPGTWHELQ | |
| NOV42b | LTRLPMGLPTGLRTLQLQRNQLRMLEPEPLAGLDQLRELSLAHNRLRVGDIGFGTWHELQ | |
| NOV42c | LTRLPMGLPTGLRTLQLQRNQLRMLEPEPLAGLDQLRELSLAHNRLRVGDIGPGTWHELQ | |
| NOV42d | LTRLPMGLPTGLRTLQLQRNQLRMLEPEPLAGLDQLRELSLAHNRLRVGDIGPGTWHELQ | |
| NOV42e | LSFVPPDLPEALEELHLEGNRIGHVGPEAFLSTPRLRALFLRANRLHMTSIAAEAFLGLP | |
| NOV42f | LTRLPMGLPTGLRTLQLQRNQLRMLEPEPLAGLDQLRELSLAHNRLRVGDIGPGTWHELQ | |
| NOV42g | LTRLPMGLPTGLRTLQLQRNQLRMLEPEPLAGLDQLRELSLAHNRLRVGDIGPGTWHELQ | |
| NOV42h | LTRLPMGLPTGLRTLQLQRNQLRMLEPEPLAGLDQLRELSLAHNRLRVGDIGPGTWHELQ | |
| NOV42i | LTRLPMGLPTGLRTLQLQRNQLRMLEPEPLAGLDQLRELSLAHNRLRVGDIGPGTWHELQ | |
| NOV42j | LTRLPMGLPTGLRTLQLQRNQLRMLEPEPLAGLDQLRELSLAHNRLRVGDIGPGTWHELQ | |
| NOV42k | LTRLPMGLPTGLRTLQLQRNQLRMLEPEPLAGLDQLRELSLAHNRLRVGDIGPGTWHELQ | |
| NOV42l | LTRLPMGLPTGLRTLQLQRNQLRMLEPEPLAGLDQLRELSLAHNRLRVGDIGPGTWHELQ | |
| NOV42m | LTRLPMGLPTGLRTLQLQRNQLRMLEPEPLAGLDQLRELSLAHNRLRVGDIGPGTWHELQ | |
| NOV42a | ALQVRHRLVSHT--VPRAPPSPCLPCHVPNILVSW------------------------- | |
| NOV42b | ALQVRHRLVSHT--VPRAPPSPCLPCHVPNILVSWEF----------------------- | |
| NOV42c | ALQVRHRLVSHT--VPRAPPSPCLPCHVPNILVSWEFKGEFQA----------------- | |
| NOV42d | ALQMLDLSHNELSFVPPDLPEALEELHLEGNRIGHVGPEAFLSTPRLRALFLRANRLHMT | |
| NOV42e | NLRVVDTAGNPEQVLIRLPPTTPRGPRAGGPKLG-------------------------- | |
| NOV42f | ALQMLDLSHNELSFVPPDLPEALEELHLEGNRIGHVGPEAFLSTPRLRALFLRANRLHMT | |
| NOV42g | ALQMLDLSHNELSFVPPDLPEALEELHLEGNRIGHVGPEAFLSTPRLRALFLRANRLHMT | |
| NOV42h | ALQMLDLSHNELSFVPPDLPEALEELHLEGNRIGHVGPEAFLSTPRLRALFLRANRLHMT | |
| NOV42i | ALQMLDLSHNELSFVPPDLPEALEELHLEGNRIGHVGPEAFLSTPRLRALFLRANRLHMT | |
| NOV42j | ALQMLDLSHNELSFVPPDLPEALEELHLEGNRIGHVGPEAFLSTPRLRALFLRANRLHMT | |
| NOV42k | ALQMLDLSHNELSFVPPDLPEALEELHLEGNRIGHVGPEAFLSTPRLRALFLRANRLHMT | |
| NOV42l | ALQVRHRLVSHT--VPEAPPSPCLPCHVPNILVSW------------------------- | |
| NOV42m | ALQMLDLSHNELSFVPPDLPEALEELHLEGNRIGHVGPEAFLSTPRLRALFLRANRLHMT | |
| NOV42a | --------------------------------------------- | |
| NOV42c | --------------------------------------------- | |
| NOV42d | SIAAEAFLGLPNLRVVDTAGNPEQVLIRLPPTTPRGPRAGGP--- | |
| NOV42e | --------------------------------------------- | |
| NOV42f | SIAAEAFLGLPNLRVVDTAGNPEQVLIRLPPTTPRGPEAGGPKLG | |
| NOV42g | SIAAEAFLGLPNLRVVDTAGNPEQVLIRLPPTTPRGPRAGGPEFG | |
| NOV42h | SIAAEAFLGLPNLRVVDTAGNPEQVLIRLPPTTPRGPRAGGP--- | |
| NOV42i | SIAAEAFLGLPNLRVVDTAGNPEQVLIRLPPTTPRGPRAGGP--- | |
| NOV42j | SIAAEAFLGLPNLRVVDTAGNPEQVLIRLPPTTPRGPRAGGP--- | |
| NOV42k | SIAAEAFLGLPNLRVVDTAGNPEQVLIRLPPTTPRGPRAGGP--- | |
| NOV42l | --------------------------------------------- | |
| NOV42m | SIAAEAFLGLPNLRVVDTAGNPEQVLIRLPPTTPRGPRAGGPKLG | |

[0598] Further analysis of the NOV42a protein yielded the following properties shown in Table 42C.

TABLE 42C
Protein Sequence Properties NOV42a

| | |
|---|---|
| SignalP analysis: | Cleavage site between residues 25 and 26 |
| PSORT II analysis: | |

| PSG: | a new signal peptide prediction method | |
|---|---|---|
| | N-region: | length 3; pos. chg 1; neg. chg 0 |
| | H-region: | length 22; peak value 10.55 |
| | PSG score: | 6.15 |

| | |
|---|---|
| GvH: | von Heijne's method for signal seq. recognition |
| | GvH score (threshold: −2.1): 2.50 |
| | possible cleavage site: between 24 and 25 |

>>> Seems to have a cleavable signal peptide (1 to 24)

| ALOM: | Klein et al's method for TM region allocation | |
|---|---|---|
| | Init position for calculation: 25 | |
| | Tentative number of TMS(s) for the threshold 0.5: 0 | |
| | number of TMS(s) . . . fixed | |
| | PERIPHERAL | Likelihood = 4.77 (at 187) |

| | ALOM score: 4.77 (number of TMSs: 0) | | | |
|---|---|---|---|---|
| MTOP: | Prediction of membrane topology (Hartmann et al.) | | | |
| | Center position for calculation: 12 | | | |
| | Charge difference: −4.5 C(−2.5)-N(2.0) | | | |
| | N >= C: N-terminal side will be inside | | | |
| MITDISC: | discrimination of mitochondrial targeting seq | | | |
| | R content: | 1 | Hyd Moment(75): | 6.51 |
| | Hyd Moment(95): | 8.64 | G content: | 3 |
| | D/E content: | 1 | S/T content: | 2 |

| | |
|---|---|
| | Score: −4.56 |
| Gavel: | prediction of cleavage sites for mitochondrial preseq |
| | R-2 motif at 13 GRP\|TQ |

NUCDISC: discrimination of nuclear localization signals

| | |
|---|---|
| | pat4: none |
| | pat7: PRRLRAL (5) at 266 |
| | bipartite: none |
| | content of basic residues: 10.7% |
| | NLS Score: −0.04 |
| KDEL: | ER retention motif in the C-terminus: none |

ER Membrane Retention Signals:

XXRR-like motif in the N-terminus: GRPT

none
SKL: peroxisomal targeting signal in the C-terminus: none
PTS2: 2nd peroxisomal targeting signal: none
VAC: possible vacuolar targeting motif: none
RNA-binding motif: none
Actinin-type actin-binding motif:

type 1: none
type 2: none

NMYR: N-myristoylation pattern: none
Prenylation motif: none
memYQRL: transport motif from cell surface to Golgi: none
Tyrosines in the tail: none
Dileucine motif in the tail: none
checking 63 PROSITE DNA binding motifs:

```
Leucine zipper pattern (PS00029): *** found ***
  LDLSHNQLTTVPAGLPRTLAIL at 180
  LHLDGNGLDRVPPALPRRLRAL at 251
  LDLAGNQLTRLPMGLPTGLRTL at 322
```

none
checking 71 PROSITE ribosomal protein motifs: none
checking 33 PROSITE prokaryotic DNA binding motifs: none

| | |
|---|---|
| NNCN: | Reinhardt's method for Cytoplasmic/Nuclear |
| | discrimination |
| | Prediction: nuclear |
| | Reliability: 89 |
| COIL: | Lupas's algorithm to detect coiled-coil regions |
| | total: 0 residues |

Final Results (k = 9/23):

77.8%: extracellular, including cell wall
11.1%: vacuolar
11.1%: mitochondrial

>> prediction for CG56904-01 is exc (k = 9)

[0599] A search of the NOV42a protein against the Geneseq database, a proprietary database that contains sequences published in patents and patent publication, yielded several homologous proteins shown in Table 42D.

TABLE 42D
Geneseq Results for NOV42a

| | | NOV42a | Identities/ | |
|---|---|---|---|---|
| | | Residues/ | Similarities for | |
| Geneseq | Protein/Organism/Length [Patent #, | Match | the Matched | Expect |
| Identifier | Date] | Residues | Region | Value |
| AAU91336 | Human novel secreted protein | 7 . . . 421 | 414/415 (99%) | 0.0 |
| | LP255(a) - Homo sapiens, 423 aa. | 9 . . . 423 | 414/415 (99%) | |
| | [WO200214358-A2, 21-FEB-2002] | | | |
| AAU91340 | Human novel secreted protein | 7 . . . 421 | 413/459 (89%) | 0.0 |
| | LP255(b) - Homo sapiens, 467 aa. | 9 . . . 467 | 413/459 (89%) | |
| | [WO200214358-A2, 21-FEB-2002] | | | |
| AAG65893 | Amino acid sequence of GSK gene Id | 4 . . . 405 | 315/494 (63%) | e−153 |
| | 90060 - Homo sapiens, 605 aa. | 30 . . . 523 | 336/494 (67%) | |
| | [WO200172961-A2, 04-OCT-2001] | | | |
| AAG65892 | Amino acid sequence of GSK gene Id | 63 . . . 405 | 283/364 (77%) | e−152 |
| | 90060 - Homo sapiens, 483 aa. | 38 . . . 401 | 300/364 (81%) | |
| | [WO200172961-A2, 04-OCT-2001] | | | |
| ABU54399 | Human secreted/transmembrane | 39 . . . 392 | 178/443 (40%) | 6e−79 |
| | protein PRO332 - Homo sapiens, 642 | 92 . . . 534 | 232/443 (52%) | |
| | aa. [US2002132240-A1, 19-SEP-2002] | | | |

[0600] In a BLAST search of public sequence databases, the NOV42a protein was found to have homology to the proteins shown in the BLASTP data in Table 42E.

TABLE 42E
Public BLASTP Results for NOV42a

| | | NOV42a | Identities/ | |
|---|---|---|---|---|
| Protein | | Residues/ | Similarities for | |
| Accession | | Match | the Matched | Expect |
| Number | Protein/Organism/Length | Residues | Portion | Value |
| CAD29040 | Sequence 27 from Patent | 7 . . . 421 | 414/415 (99%) | 0.0 |
| | WO0214358 - Homo sapiens | 9 . . . 423 | 414/415 (99%) | |
| | (Human), 423 aa. | | | |
| CAD29044 | Sequence 35 from Patent | 7 . . . 421 | 413/459 (89%) | 0.0 |
| | WO0214358 - Homo sapiens | 9 . . . 467 | 413/459 (89%) | |
| | (Human), 467 aa. | | | |
| Q9H5G9 | Hypothetical protein FLJ23447 - | 131 . . . 421 | 290/291 (99%) | e−166 |
| | Homo sapiens (Human), 363 aa. | 73 . . . 363 | 290/291 (99%) | |
| Q8N641 | Similar to hypothetical protein | 131 . . . 392 | 141/262 (53%) | 4e−70 |
| | FLJ23447 - Homo sapiens (Human), | 33 . . . 294 | 175/262 (65%) | |
| | 402 aa. | | | |
| Q8BM45 | Hypothetical leucine-rich | 131 . . . 392 | 140/262 (53%) | 5e−70 |
| | repeat/leucine-rich repeat - Mus | 33 . . . 294 | 176/262 (66%) | |
| | musculus (Mouse), 399 aa. | | | |

[0601] PFam analysis predicts that the NOV42a protein contains the domains shown in the Table 42F.

TABLE 42F
Domain Analysis of NOV42a

| | | Identities/ | |
|---|---|---|---|
| Pfam | NOV42a | Similarities for | Expect |
| Domain | Match Region | the Matched Region | Value |
| LRRNT | 43 . . . 71 | 11/35 (31%) | 0.24 |
| | | 22/35 (63%) | |
| LRR | 97 . . . 122 | 11/26 (42%) | 0.0047 |
| | | 23/26 (88%) | |
| LRR | 150 . . . 175 | 12/26 (46%) | 0.056 |
| | | 25/26 (96%) | |
| LRR | 176 . . . 195 | 11/25 (44%) | 0.0079 |
| | | 20/25 (80%) | |
| LRR | 221 . . . 246 | 10/26 (38%) | 0.47 |
| | | 22/26 (85%) | |
| LRR | 363 . . . 388 | 10/26 (38%) | 0.46 |
| | | 22/26 (85%) | |

### Example 43

[0602] The NOV43 clone was analyzed, and the nucleotide and encoded polypeptide sequences are shown in Table 43A.

TABLE 43A
NOV43 Sequence Analysis

| | | |
|---|---|---|
| NOV43a, CG56914-01 | SEQ ID NO:997 | 2153 bp |
| DNA Sequence | ORF Start: ATG at 16 | ORF Stop: TAA at 2137 |

GATGCTGGCACTTACATGTGTGTGGCCCAGAACCCGGCTGGTACAGCCTTGGGCAAAATCAAGTTAAA
TGTCCAAGTTCCTCCAGTCATTAGCCCTCATCTAAAGGAATATGTTATTGCTGTGGACAAGCCCATCA
CGTTATCCTGTGAAGCAGATGGCCTCCCTCCGCCTGACATTACATGGCATAAAGATGGGCGTGCAATT
GTGGAATCTATCCGCCAGCGCGTCCTCAGCTCTGGCTCTCTGCAAATAGCATTTGTCCAGCCTGGTGA
TGCTGGCCATTACACGTGCATGGCAGCCAATGTAGCAGGATCAAGCAGCACAAGCACCAAGCTCACCG
TCCATGTACCACCCAGGATCAGAAGTACAGAAGGACACTACACGGTCAATGAGAATTCACAAGCCATT
CTTCCATGCGTAGCTGATGGAATCCCCACACCAGCAATTAACTGGAAAAAAGACAATGTTCTTTTAGC
TAACTTGTTAGGAAAATACACTGCTGAACCATATGGAGAACTCATTTTAGAAAATGTTGTGCTGGAGG
ATTCTGGCTTCTATACCTGTGTTGCTAACAATGCTGCAGGTGAAGATACACACACTGTCAGCCTGACT
GTGCATGTTCTCCCCACTTTTACTGAACTTCCTGGAGACGTGTCATTAAATAAAGGAGAACAGCTACG
ATTAAGCTGTAAAGCTACTGGTATTCCATTGCCCAAATTAACATGGACCTTCAATAACAATATTATTC
CAGCCCACTTTGACAGTGTGAATGGACACAGTGAACTTGTTATTGAAAGAGTGTCAAAAGAGGATTCA
GGTACTTATGTGTGCACCGCAGAGAACAGCGTTGGCTTTGTGAAGGCAATTGGATTTGTTTATGTGAA
AGAACCTCCAGTCTTCAAAGGTGATTATCCTTCTAACTGGATTGAACCACTTGGTGGGAATGCAATCC
TGAATTGTGAGGTGAAAGGAGACCCCACCCCAACCATCCAGTGGAACAGAAAGGGAGTGGATATTGAA
ATTAGCCACAGAATCCGGCAACTGGGCAATGGCTCCCTGGCCATCTATGGCACTGTTAATGAAGATGC
CGGTGACTATACATGTGTAGCTACCAATGAAGCTGGGGTGGTGGAGCGCAGCATGAGTCTGACTCTGC
AAAGTCCTCCTATTATCACTCTTGAGCCAGTGGAAACTGTTATTAATGCTGGTGGCAAAATCATATTG
AATTGTCAGGCAACTGGAGAGCCTCAACCAACCATTACATGGTCCCGTCAAGGGCACTCTATTTCCTG
GGATGACCGGGTTAACGTGTTGTCCAACAACTCATTATATATTGCTGATGCTCAGAAAGAAGATACCT
CTGAATTTGAATGCGTTGCTCGAAACTTAATGGGTTCTGTCCTTGTCAGAGTGCCAGTCATAGTCCAG
GTTCATGGTGGATTTTCCCAGTGGTCTGCATGGAGAGCCTGCAGTGTCACCTGTGGAAAAGGCATCCA
AAAGAGGAGTCGTCTGTGCAACCAGCCCCTTCCAGCCAATGGTGGGAAGCCCTGCCAAGGTTCAGATT
TGGAAATGCGAAACTGTCAAAATAAGCCTTGTCCAGTGGATGGTAGCTGGTCGGAATGGAGTCTTTGG
GAAGAATGCACAAGGAGCTGTGGACGCGGCAACCAAACCAGGACCAGGACTTGCAATAATCCATCAGT
TCAGCATGGTGGGCGGCCATGTGAAGGGAATGCTGTGGAAATAATTATGTGCAACATTAGGCCTTGCC
CAGTTCATGGAGCATGGAGCGCTTGGCAGCCTTGGGGAACATGCAGCGAAAGTTGTGGGAAAGGTACT
CAGACAAGAGCAAGACTTTGTAATAACCCACCACCAGCGTTTGGTGGGTCCTACTGTGATGGAGCAGA
AACACAGATGCAAGTTTGCAATGAAAGAAATTGTCCAATTCATGGCAAGTGGGCGACTTGGGCCAGTT
GGAGTGCCTGTTCTGTGTCATGTGGAGGAGGTGCCAGACAGAGAACAAGGGGCTGCTCCGACCCTGTG
CCCCAGTATGGAGGAAGGAAATGCGAAGGGAGTGATGTCCAGAGTGATTTTTGCAACAGTGACCCTTG
CCCAAGTGAGTGTTGGAAATACCCATGGTAACTGGAGTCCTTGGA

| | | | |
|---|---|---|---|
| NOV43a, CG56914-01 | SEQ ID NO:998 | 707 aa | MW at 76557.7 kD |
| Protein Sequence | | | |

MCVAQNPAGTALGKIKLNVQVPPVISPHLKEYVIAVDKPITLSCEADGLPPPDITWHKDGRAIVESIR
QRVLSSGSLQIAFVQPGDAGHYTCMAANVAGSSSTSTKLTVHVPPRIRSTEGHYTVNENSQAILPCVA
DGIPTPAINWKKDNVLLANLLGKYTAEPYGELILENVVLEDSGFYTCVANNAAGEDTHTVSLTVHVLP
TFTELPGDVSLNKGEQLRLSCKATGIPLPKLTWTFNNNIIPAHFDSVNGHSELVIERVSKEDSGTYVC
TAENSVGFVKAIGFVYVKEPPVFKGDYPSNWIEPLGGNAILNCEVKGDPTPTIQWNRKGVDIEISHRI
RQLGNGSLAIYGTVNEDAGDYTCVATNEAGVVERSMSLTLQSPPIITLEPVETVINAGGKIILNCQAT
GEPQPTITWSRQGHSISWDDRVNVLSNNSLYIADAQKEDTSEFECVARNLMGSVLVRVPVIVQVHGGF
SQWSAWRACSVTCGKGIQKRSRLCNQPLPANGGKPCQGSDLEMRNCQNKPCPVDGSWSEWSLWEECTR
SCGRGNQTRTRTCNNPSVQHGGRPCEGNAVEIIMCNIRPCPVHGAWSAWQPWGTCSESCGKGTQTRAR
LCNNPPPAFGGSYCDGAETQMQVCNERNCPIHGKWATWASWSACSVSCGGGARQRTRGCSDPVPQYGG
RKCEGSDVQSDFCNSDPCPSECWKYPW

| | | |
|---|---|---|
| NOV43b, 262802367 | SEQ ID NO:999 | 2136 bp |
| DNA Sequence | ORF Start: at 1 | ORF Stop: end of sequence |

GGATCCACCATGTGTGTGGCCCAGAACCCGGCTGGTACAGCCTTGGGCAAAATCAAGTTAAATGTCCA
AGTTCCTCCAGTCATTAGCCCTCATCTAAAGGAATATGTTATTGCTGTGGACAAGCCCATCACGTTAT
CCTGTGAAGCAGATGGCCTCCCTCCGCCTGACATTACATGGCATAAAGATGGGCGTGCAATTGTGGAA
TCTATCCGCCAGCGCGTCCTCAGCTCTGGCTCTCTGCAAATAGCATTTGTCCAGCCTGGTGATGCTGG
CCATTACACGTGCATGGCAGCCAATGTAGCAGGATCAAGCAGCACAAGCACCAAGCTCACCGTCCATG
TACCACCCAGGATCAGAAGTACAGAAGGACACTACACGGTCAATGAGAATTCACAAGCCATTCTTCCA
TGCGTAGCTGATGGAATCCCCACACCAGCAATTAACTGGAAAAAAGACAATGTTCTTTTAGCTAACTT
GTTAGGAAAATACACTGCTGAACCATATGGAGAACTCATTTTAGAAAATGTTGTGCTGGAGGATTCTG
GCTTCTATACCTGTGTTGCTAACAATGCTGCAGGTGAAGATACACACACTGTCAGCCTGACTGTGCAT
GTTCTCCCCACTTTTACTGAACTTCCTGGAGACGTGTCATTAAATAAAGGAGAACAGCTACGATTAAG
CTGTAAAGCTACTGGTATTCCATTGCCCAAATTAACATGGACCTTCAATAACAATATTATTCCAGCCC
ACTTTGACAGTGTGAATGGACACAGTGAACTTGTTATTGAAAGAGTGTCAAAAGAGGATTCAGGTACT
TATGTGTGCACCGCAGAGAACAGCGTTGGCTTTGTGAAGGCAATTGGATTTGTTTATGTGAAAGAACC
TCCAGTCTTCAAAGGTGATTATCCTTCTAACTGGATTGAACCACTTGGTGGGAATGCAATCCTGAATT
GTGAGGTGAAAGGAGACCCCACCCCAACCATCCAGTGGAACAGAAAGGGAGTGGATATTGAAATTAGC
CTATACATGTGTAGCTACCAATGAAGCTGGGGTGGTGGAGCGCAGCATGAGTCTGACTCTGCGAAGTC
CTCCTATTATCACTCTTGAGCCAGTGGAAACTGTTATTAATGCTGGTGGCAAAATCATATTGAATTGT
CAGGCAACTGGAGAGCCTCAACCAACTATTACATGGTCCCGTCAAGGGCACTCTATTTCCTGGGATGA
CCGGGTTAACGTGTTGTCCAACAACTCATTATATATTGCTGATGCTCAGAAAGAAGATACCTCTGAAT
TTGAATGTGTTGCTCGAAACTTAATGGGTTCTGTCCTTGTCAGAGTGCCAGTCATAGTCCAGGTTCAT
GGTGGATTTTCCCAGTGGTCTGCATGGAGAGCCTGCAGTGTCACCTGTGGAAAAGGCATCCAAAAGAG
TGCGAAACTGTCAAAATAAGCCTTGTCCAGTGGATGGTAGCTGGTCGGAATGGAGTCTTTGGGAAGAA
TGCACAAGGAGCTGTGGACGCGGCAACCAAACCAGGACCAGGACTTGCAATAATCCATCAGTTCAGCA
TGGTGGGCGGCCATGTGAAGGGAATGCTGTGGAAATAATTATGTGCAACATTAGGCCTTGCCCAGTTC
ATGGAGCATGGAGCGCTTGGCAGCTTTGGGGAACATGCAGCGAAAGTTGTGGGAAAGGTACTCAGACA
AGAGCAAGACTTTGTAATAACCCACCACCAGCGTTTGGTGGGTCCTACTGTGATGGAGCAGAAACACA
GATGCAAGTTTGCAATGAAAGAAATTGTCCAATTCATGGCAAGTGGGCGACTTGGGCCAGTTGGAGTG
CCTGTTCTGTGTCATGTGGAGGAGGTGCCAGACAGAGAACAAGGGGCTGCTCCGACCCTGTGCCCCAG
TATGGAGGAAGGAAATGCGAAGGGAGTGATGTCCAGAGTGATTTTTGCAACAGTGACCCTTGCCCAAG
TGAGTGTTGGAAATACCCATGGCTCGAG

| | | | |
|---|---|---|---|
| NOV43b, 262802367 | SEQ ID NO:1000 | 712 aa | MW at 77089.2 kD |
| Protein Sequence | | | |

GSTMCVAQNPAGTALGKIKLNVQVPPVISPHLKEYVIAVDKPITLSCEADGLPPPDITWHKDGRAIVE
SIRQRVLSSGSLQIAFVQPGDAGHYTCMAANVAGSSSTSTKLTVHVPPRIRSTEGHYTVNENSQAILP
CVADGIPTPAINWKKDNVLLANLLGKYTAEPYGELILENVVLEDSGFYTCVANNAAGEDTHTVSLTVH
VLPTFTELPGDVSLNKGEQLRLSCKATGIPLPKLTWTFNNNIIPAHFDSVNGHSELVIERVSKEDSGT
YVCTAENSVGFVKAIGFVYVKEPPVFKGDYPSNWIEPLGGNAILNCEVKGDPTPTIQWNRKGVDIEIS
HRIRQLGNGSLAIYGTVNEDAGDYTCVATNEAGVVERSMSLTLRSPPIITLEPVETVINAGGKIILNC
QATGEPQPTITWSRQGHSISWDDRVNVLSNNSLYIADAQKEDTSEFECVARNLMGSVLVRVPVIVQVH
GGFSQWSAWRACSVTCGKGIQKRSRLCNQPLPANGGKPCQGSDLEMRNCQNKPCPVDGSWSEWSLWEE
CTRSCGRGNQTRTRTCNNPSVQHGGRPCEGNAVEIIMCNIRPCPVHGAWSAWQLWGTCSESCGKGTQT
RARLCNNPPPAFGGSYCDGAETQMQVCNERNCPIHGKWATWASWSACSVSCGGGARQRTRGCSDPVPQ
YGGRKCEGSDVQSDFCNSDPCPSECWKYPWLE

| | | |
|---|---|---|
| NOV43c, CG56914-02 | SEQ ID NO:1001 | 15660 bp |
| DNA Sequence | ORF Start: ATG at 1649 | ORF Stop: TAA at 15134 |

GATTAGTGGCATAAACTGTAGGTCAGCTGGTGGAGGCAAGCCAGCAAGGGGCTTCATGGTAACCAGTG
GAAACACAAAAATATAAQGGGCTTCTGAGGCGATCGGGCAGTGTCAGTCTTCAGCCGCTAAGCCGAGA
AGATCTGGGAAGGAGTCAGTCAGAGAGCCTTGGGCCAGAGTTCCAGGGGCTCTGGGAGTGGCTGCCAG
AAAATACCAGAAAATGAAAGGAATTGAAATTAAGAGAAGGGAGAGATTGAAGTGTGGCGCCAAGATTG
AAAGGAGAAAGAGGTTGAAGGATAGGGAGGTTGGAGAAGAGAGTAAAAAGAGGCCACTTACTGGATTT
GAAATTGAACCACCCAAAGTCACTGTGATGCCCAAGAATCAGTCTTTCACAGGAGGGTCTGAGGTCTC
CATCATGTGTTCTGCAACAGGTTATCCCAAACCAAAGATTGCCTGGACCGTTAACGATATGTTTATCG
TGGGTTCACACAGGTATAGGATGACCTCAGATGGTACCTTATTTATCAAAAATGCAGCTCCCAAAGAT
GCAGGGATCTATGGTTGCCTAGCAAAAGCCCCTAAGTTGATGGTAGTTCAGAGTGAGCTCTTGGTTGC
CCTTGGGGATATAACCGTTATGGAATGCAAAACCTCTGGTATTCCTCCACCTCAAGTTAAATGGTTCA
AAGGAGATCTTGAGTTGAGGCCCTCAACATTCCTCATTATTGACCCTCTCTTGGGACTTTTGAAGATT
CAAGAAACACAAGATCTGGATGCTGGCGATTATACCTGTGTAGCCATCAATGAGGCTGGAAGAGCAAC
AAATTGGCTCAAATGTGACATTACCTTGTTATGTTCAGGGTTATCCAGAACCAACAATCAAATGGCGA
AGATTAGACAACATGCCAATTTTCTCAAGACCTTTTTCAGTTAGTTCCATCAGCCAACTAAGAACAGG
AGCTCTCTTTATTTTAAACTTATGGGCAAGTGATAAAGGAACCTATATTTGTGAAGCTGAAAACCAGT
TTGGAAAGATCCAGTCAGAGACAACAGTAACAGTGACCGGACTTGTTGCTCCACTTATTGGAATCAGC
CCTTCAGTGGCCAATGTTATTGAAGGACAGCAGCTTACTTTGCCCTGTACTCTGTTAGCTGGAAATCC
CATTCCAGAACGTCGGTGGATTAAGAATTCAGCTATGTTGCTCCAAAATCCTTACATCACTGTGCGCA
GTGATGGGAGCCTCCATATTGAAAGAGTTCAGCTTCAGGATGGTGGTGAATATACTTGTGTGGCCAGT
AACGTTGCTGGGACCAATAACAAAACTACCTCTGTGGTTGTGCATGTTCTGCCAACCATTCAGCATGG
GCAGCAGATACTCAGTACAATTGAAGGCATTCCAGTAACTTTACCATGCAAAGCAAGTGGAAATCCCA
AACCGTCTGTCATCTGGTCCAAGGTAAATGATACATCTAGTTATATTTCCTGAAGAGCAGAGTGTGAA
GTTCACCTGCAAGTTATCCCTAGTCTTGAGCAGGAGGCTCAGGAGTGGGGCATGGAAAGAAGATAAGT
TAATAAAGGATTTCCTATGTGGCTGGACAGATGTGCTAGGAACCCTCCAAGAAACCATATAGATGCAC
CTCAGAAGGCTCCCTCGGCTTTTCGCCGTGTTTTGCAGAAAGGAGAGCTGATTTCAACCAGCAGTGCT
AAGTTTTCAGCAGGAGCTGATGGTAGTCTGTATGTGGTATCACCTGGAGGAGAGGAGAGTGGGGAGTA
TGTCTGCACTGCCACCAATACAGCCGGCTACGCCAAAAGGAAAGTGCAGCTAACAGTCTATGTAAGGC
CCAGAGTGTTTGGAGATCAACGAGGACTGTCCCAGGATAAGCCTGTTGAGATCTCCGTCCTTGCAGGG
GAAGAGGTAACACTTCCATGTGAAGTGAAGAGCTTACCTCCACCCATAATTACTTGGGCCAAAGAAAC
CCAGCTCATCTCACCGTTCTCTCCAAGACACACATTCCTCCCTTCTGGTTCAATGAAGATCACTGAAA
CCCGCACTTCAGATAGTGGGATGTATCTTTGTGTTGCCACAAATATTGCTGGGAATGTGACTCAGGCT
GTCAAATTAAATGTCCATGTTCCTCCAAAGATACAGCGTGGACCTAAACATCTCAAAGTCCAAGTTGG
TCAAAGAGTGGATATTCCATGTAATGCTCAAGGGACTCCTCTTCCTGTAATCACCTGGTCCAAAGGTG
GAAGCACTATGCTGGTTGATGGAGAGCACCATGTTAGCAATCCAGACGGAACTTTAAGCATCGACCAA
GATAACGCTACATGTCCAAGAACCACCCACAGTGGAAGATCTAGAACCTCCATATAACACTACTTTCC
AAGAAAGAGTGGCCAATCAACGCATTGAATTTCCATGTCCTGCAAAAGGTACCCCTAAACCAACCATC
AAATGGTTACACAATGGTAGAGAGTTGACAGGCAGAGAGCCTGGCATTTCTATCTTGGAAGATGGCAC
ATTGCTGGTTATTGCTTCTGTTACACCCTATGACAATGGGGAGTACATCTGTGTGGCAGTCAATGAAG
CTGGAACCACAGAAAGAAAATATAACCTCAAAGTCCATGTTCCTCCAGTAATTAAAGATAAAGAACAA
GTTACAAATGTGTCGGTGTTGTTAAATCAGCTGACCAATCTCTTCTGTGAAGTGGAAGGCACTCCATC
TCCCATCATTATGTGGTATAAAGATAATGTCCAGGTGACTGAAAGCAGCACTATTCAGACTGTGAACA
ATGGGAAGATACTGAAGCTCTTCAGAGCCACTCCAGAGGATGCAGGAAGATATTCCTGCAAAGCAATT
AATATTGCAGGCACTTCTCAGAAGTACTTTAACATTGATGTGCTAGGTACCAACTTCCCAAATGAAGT
CTCAGTTGTCCTCAACCGTGACGTCGCCCTTGAATGCCAGGTCAAAGGCACTCCCTTTCCTGATATTC
ATTGGTTCAAAGATGGCAATATTAAAGGAGGAAATGTCACCACAGACATATCAGTATTGATCAACAGC
CTTATTAAACTGGAATGTGAAACACGGGGACTTCCAATGCCTGCCATTACTTGGTATAAGGACGGGCA
GCCAATCATGTCCAGCTCACAAGCACTTTATATTGATAAAGGACAATATCTTCATATTCCTCGAGCAC
AGGTCTCTGATTCAGCAACATATACGTGTCACGTAGCCAATGTTGCTGGAACTGCTGAAAAATCATTC
CATGTGGATGTCTATGTTCCTCCAATGATTCAAGGCAACTTGGCCACGCCTTTGAATAAGCAAGTAGT
TATTGCTCATTCTCTGACACTGGAGTGCAAAGCTGCTGGAAACCCTTCTCCCATTCTCACCTGGTTGA
AAGATGGTGTACCTGTGAAAGCTAATGACAATATCCGCATAGAAGCTGGTGGGAAGAAACTCGAAATC
ATGAGTGCCCAAGAAATTGATCGAGGACAGTACATATGCGTGGCTACCAGTGTGGCAGGAGAAAAGGA
AATCAAATATGAAGTTGATGTCTTGGTGCCACCAGCTATAGAAGGAGGAGATGAAACATCTTACTTCA
TTGTGATGGTTAATAACTTACTGGAGCTAGATTGTCATGTGACAGGCTCTCCCCCACCAACTATCATG
TGGCTGAAGGATGGCCAGTTAATTGATGAAAGGGATGGATTCAAGATTTTATTAAATGGACGCAAACT
GGTTATTGCTCAGGCTCAAGTGTCAAACACAGGCCTTTATCGGTGCATGGCAGCAAATACTGCTGGAG
ACCACAAGAAGGAATTTGAAGTGACTGTTCATGTTCCTCCAACAATCAAGTCCTCAGGCCTTTCTGAG
AGAGTTGTGGTAAAATACAAGCCTGTCGCCTTGCAGTGCATAGCCAATGGGATTCCAAATCCTTCCAT
TACATGGTTAAAAGATGACCAGCCTGTGAACACTGCCCAAGGAAACCTTAAAATACAGTCTTCTGGTC
GAGTTCTACAAATTGCCAAAACCCTGTTGGAAGATGCTGGCAGATACACATGTGTGGCTACCAACGCA
GCTGGAGAAACACAACAGCACATTCAACTGCATGTTCATGAACCACCTAGTCTGGAAGATGCTGGAAA
AATGCTGAATGAGACTGTGTTGGTGAGCAACCCTGTACAGCTGGAGTGTAAGGCAGCTGGAAATCCTG
TGCCTGTTATTACATGGTACAAAGATAATCGTCTACTCTCAGGTTCCACCAGCATGACTTTCTTGAAC
AGAGGACAGATCATTGATATTGAAAGTGCCCAGATCTCAGATGCTGGCATATATAAATGCGTGGCCAT
CAACTCAGCTGGAGCTACAGAGTTATTTTACAGTCTGCAAGTTCATGTGGCCCCATCAATTTCTGGCA
GCAATAACATGGTGGCAGTGGTGGTTAATAACCCGGTGAGGTTAGAATGTGAAGCCAGAGGTATTCCT
GCCCCAAGTCTGACCTGGTTGAAAGATGGGAGTCCTGTTTCTAGTTTTTCTAATGGATTACAGGTTCT
CTCTGGTGGTCGAATCCTAGCATTGACCAGTGCACAAATCAGCGACACAGGAAGGTACACCTGCGTGG
CAGTGAATGCTGCTGGAGAAAAGCAAAGGGACATTGACCTCCGAGTATATGTTCCGCCAAATATTATG
GGAGAAGAACAGAATGTCTCTGTCCTCATTAGCCAAGCTGTGGAATTACTATGTCAAAGTGATGCTAT
TCCCCCACCTACTCTTACTTGGTTAAAAGACGGCCACCCCTTGCTGAAGAAACCAGGCCTCAGTATAT
CTGAAAATAGAAGTGTGTTAAAGATTGAAGATGCTCAGGTTCAAGACACTGGTCGTTACACTTGTGAA
GCAACAAATGTTGCTGGAAAAACTGAAAAAAACTACAATGTCAACATTTGGGTCCCCCCAAATATTGG
TGGTTCTGATGAACTTACTCAACTTACAGTCATTGAAGGGAATCTCATTAGTCTGTTGTGTGAATCAA
GTGGTATTCCACCCCCAAATCTCATCTGGAAGAAGAAAGGCTCTCCAGTGCTGACTGATTCCATGGGG
CGAGTTAGAATTTTATCTGGGGGCAGGCAATTACAAATTTCAATTGCTGAAAAGTCTGATGCAGCACT
CTATTCATGTGTGGCGTCGAATGTTGCTGGGACTGCAAAGAAAGAATACAATCTGCAAGTTTACATTA
GACCAACCATAACCAACAGTGGCAGCCACCCTACTGAAATTATTGTGACCCGAGGGAAGAGTATCTCC
TTGGAGTGTGAGGTGCAGGGTATTCCACCACCAACAGTGACCTGGATGAAAGATGGCCACCCCTTGAT
CAAGGCAAAGGGAGTAGAAATACTGGATGAAGGTCACATCCTTCAGCTGAAGAACATTCATGTATCTG
ACACAGGCCGTTATGTGTGTGTTGCTGTGAATGTAGCAGGAATGACTGACAAAAAATATGACTTAAGT
GTCCATGGAGGCAGGATGCTACGGCTGATGCAGACCACAATGGAAGATGCTGGCCAATATACTTGCGT
TGTAAGGAATGCAGCTGGTGAAGAAAGAAAAATCTTTGGGCTTTCAGTATTAGTACCACCTCATATTG
TGGGTGAAAATACATTGGAAGATGTGAAGGTAAAAGAGAAACAGAGTGTTACGCTGACTTGTGAAGTG
ACAGGGAATCCAGTGCCAGAAATTACATGGCACAAAGATGGGCAGCCCCTCCAAGAAGATGAAGCCCA
TCACATTATATCTGGTGGCCGTTTTCTTCAAATTACCAATGTCCAGGTGCCACACACTGGAAGATATA
CATGTTTGGCTTCCAGTCCAGCTGGCCACAAGAGCAGGAGCTTCAGTCTTAATGTATTTGTATCTCCT
ACAATTGCTGGTGTAGGTAGTGATGGCAACCCTGAAGATGTCACTGTCATCCTTAACAGCCCTACATC
TTTGGTCTGTGAAGCTTATTCATATCCTCCAGCTACCATCACCTGGTTTAAGGATGGCACTCCTTTAG
AATCTAACCGAAATATTCGTATTCTTCCAGGAGGCAGAACTCTGCAGATCCTCAATGCACAGGAGGAC
AATGCTGGAAGATACTCTTGTGTAGCCACGAATGAGGCTGGAGAAATGATAAAGCACTATGAAGTGAA
GGTGTACACACTTAATGCTAACATTGTTATAATTGAATCACAGCCCCTTAAATCCGATGATCATGTTA
ATATTGCTGCGAATGGACACACACTTCAAATAAAGGAGGCTCAAATATCAGACACCGGACGATATACT
TGTGTAGCATCTAACATTGCAGGTGAAGATGAGTTGGATTTTGATGTGAATATTCAAGTTCCTCCAAG
TTTTCAGAAACTCTGGGAAATAGGAAACATGCTAGATACTGGCAGGAATGGTGAAGCCAAAGATGTGA
TCATCAACAATCCCATTTCTCTTTACTGTGAGACAAATGCTGCTCCCCCTCCTACACTGACATGGTAC
AAAGATGGCCACCCTCTGACCTCAAGTGATAAAGTATTGATTTTGCCAGGAGGGCGAGTGTTGCAGAT
TCCTCGGGCTAAAGTAGAAGATGCTGGGAGATACACATGTGTGGCTGTGAATGAGGCTGGAGAAGATT
CCCTTCAATATGATGTCCGTGTACTCGTGCCGCCAATTATCAAGGGAGCAAATAGTGATCTCCCTGAA
GAGGTCACCGTGCTGGTGAACAAGAGTGCACTGATAGAGTGTTTATCCAGTGGCAGCCCAGCACCAAG
GAATTCCTGGCAGAAAGATGGACAGCCCTTGCTAGAAGATGACCATCATAAATTTCTATCTAATGGAC
GAATTCTGCAGATTCTGAATACTCAAATAACAGATATCGGCAGGTATGTGTGTGTTGCTGAGAACACA
GCTGGGAGTGCCAAAAAATATTTTAACCTCAATGTTCATGTTCCTCCAAGTGTCATTGGTCCTAAATC
TGAAAATCTTACCGTCGTGGTGAACAATTTCATCTCTTTGACCTGTGAGGTCTCTGGTTTTCCACCTC
GGTCGAACTCTACAGATTATTCGGGCCAAGGTATCAGATGGTGGTGAATACACTTGTATAGCTATCAA
TCAAGCTGGCGAAAGCAAGAAAAAGTTTTCCCTGACTGTTTATGTGCCCCCAAGCATTAAAGACCATG
ACAGTGAATCTCTTTCTGTAGTTAATGTAAGAGAGGGAACTTCTGTGTCTTTGGAGTGTGAGTCGAAC
GCTGTGCCACCTCCAGTCATCACTTGGTATAAGAATGGGCGGATGATAACAGAGTCTACTCATGTGGA
GATTTTAGCTGATGGACAAATGCTACACATTAAGAAAGCTGAGGTATCTGACACAGGCCAGTATGTAT
GTAGAGCTATAAATGTAGCAGGACGGGATGATAAAAATTTCCACCTCAATGTATATGTGCCACCCAGT
ATTGAAGGACCTGAAAGAGAAGTGATTGTGGAGACGATCAGCAATCCTGTGACATTAACATGTGATGC
CACTGGGATCCCACCTCCCACGATAGCATGGTTAAAGAACCACAAGCGCATAGAAAATTCTGACTCAC
TGGAAGTTCGTATTTTGTCTGGAGGTAGCAAACTCCAGATTGCCCGGTCTCAGCATTCAGATAGTGGA
AACTATACATGTATTGCTTCAAATATGGAGGGAAAAGCCCAGAAATATTACTTTCTTTCAATTCAAGT
TCCTCCAAGTGTTGCTGGTGCTGAAATTCCAAGTGATGTCAGTGTCCTTCTAGGAGAAAATGTTGAGC
TGGTCTGCAATGCAAATGGCATTCCTACTCCACTTATTCAATGGCTTAAAGATGGAAAGCCCATAGCT
AGTGGTGAAACAGAAAGAATCCGAGTGAGTGCAAATGGCAGCACATTAAACATTTATGGAGCTCTTAC
ATCTGACACGGGGAAATACACATGTGTTGCTACTAATCCCGCTGGAGAAGAAGACCGAATTTTTAACT
TGAATGTCTATGTTACACCTACAATTAGGGGTAATAAAGATGAAGCAGAGAAACTAATGACTTTAGTG
GATACTTCAATAAATATTGAATGCAGAGCCACAGGGACGCCTCCACCACAGATAAACTGGCTGAAGAA
TGGACTTCCTCTGCCTCTCTCCTCCCATATCCGGTTACTGGCAGCAGGACAAGTTATCAGGATTGTGA
GAGCTCAGGTGTCTGATGTCGCTGTGTATACTTGTGTGGCCTCCAACAGAGCTGGGGTGGATAATAAG
CATTACAATCTTCAAGTGTTTGCACCACCAAATATGGACAATTCAATGGGGACAGAGGAAATCACAGT
TCTCAAAGGTAGTTCCACCTCTATGGCATGCATTACTGATGGAACCCCAGCTCCCAGTATGGCCTGGC
TTAGAGATGGCCAGCCTCTGGGGCTTGATGCCCATCTGACAGTCAGCACCCATGGAATGGTCCTGCAG
CTCCTCAAAGCAGAGACTGAAGATTCGGGAAAGTACACCTGCATTGCCTCAAATGAAGCTGGAGAAGT
CAGCAAGCACTTTATCCTCAAGGTCCTAGAACCACCTCACATTAATGGATCTGAAGAACATGAAGAGA
TATCAGTAATTGTTAATAACCCACTTGAACTTACCTGCATTGCTTCTGGAATCCCAGCCCCTAAAATG
ACCTGGATGAAAGATGGCCGGCCCCTTCCACAGACGGATCAAGTGCAAACTCTAGGAGGAGGAGAGGT
TCTTCGAATTTCTACTGCTCAGGTGGAGGATACAGGAAGATATACATGTCTGGCATCCAGTCCTGCAG
GAGATGATGATAAGGAATATCTAGTGAGAGTGCATGTACCTCCTAATATTGCTGGAACTGATGAGCCC
CGGGATATCACTGTGTTACGGAACAGACAAGTGACATTGGAATGCAAGTCAGATGCAGTGCCCCCACC
TGTAATTACTTGGCTCAGAAATGGAGAACGGTTACAGGCAACACCTCGAGTGCGAATCCTATCTGGAG
GGAGATACTTGCAAATCAACAATGCTGACCTAGGTGATACAGCCAATTATACCTGTGTTGCCAGCAAC
ATTGCAGGAAAGACTACAAGAGAATTTATTCTCACTGTAAATGTTCCTCCAAACATAAAGGGGGGCCC
CCAGAGCCTTGTAATTCTTTTAAATAAGTCAACTGTATTGGAATGCATCGCTGAAGGTGTCCCAACTC
CAAGGATAACATGGAGAAAGGATGGAGCTGTTCTAGCTGGGAATCATGCAAGATATTCCATCTTGGAA
AATGGATTCCTTCATATTCAATCAGCACATGTCACTGACACTGGACGGTATTTGTGTATGGCCACCAA
TGCTGCTGGAACAGATCGCAGGCGAATAGATTTACAGGTCCATGTTCCTCCATCTATTGCTCCGGGTC
CTACCAACATGACTGTAATAGTAAATGTTCAAACTACTCTGGCTTGTGAGGCTACTGGGATACCAAAA
CCATCAATCAATTGGAGAAAAAATGGGCATCTTCTTAATGTGGATCAAAATCAGAACTCATACAGGCT
CCTTTCTTCAGGTTCACTAGTAATTATTTCCCCTTCTGTGGATGACACTGCAACCTATGAATGTACTG
TGACAAACGGTGCTGGAGATGATAAAAGAACTGTGGATCTCACTGTCCAAGTTCCACCTTCCATAGCT
GATGAGCCTACAGATTTCCTAGTAACCAAACATGCCCCAGCAGTAATTACCTGCACTGCTTCGGGAGT
TTCTGTCCTCAGGAGCAATTGAAATACTTGCCACCCAATTAAACCATGCTGGAAGATACACTTGTGTC
GCTAGGAATGCGGCTGGCTCTGCACATCGACACGTGACCCTTCATGTTCATGAGCCTCCAGTCATTCA
GCCCCAACCAAGTGAACTACACGTCATTCTGAACAATCCTATTTTATTACCATGTGAAGCAACAGGGA
CACCCAGTCCTTTCATTACTTGGCAAAAAGAAGGCATCAATGTTAACACTTCAGGCAGAAACCATGCA
GTTCTTCCTAGTGGCGGCTTACAGATCTCCAGAGCTGTCCGAGAGGATGCTGGCACTTACATGTGTGT
GGCCCAGAACCCGGCTGGTACAGCCTTGGGCAAAATCAAGTTAAATGTCCAAGTTCCTCCAGTCATTA
GCCCTCATCTAAAGGAATATGTTATTGCTGTGGACAAGCCCATCACGTTATCCTGTGAAGCAGATGGC
CTCCCTCCGCCTGACATTACATGGCATAAAGATGGGCGTGCAATTGTGGAATCTATCCGCCAGCGCGT
CCTCAGCTCTGGCTCTCTGCAAATAACATTTGTCCAGCCTGGTGATGCTGGCCATTACACGTGCATGG
CAGCCAATGTAGCAGGATCAAGCAGCACAAGCACCAAGCTCACCGTCCATGTACCACCCAGGATCAGA
AGTACAGAAGGACACTACACGGTCAATGAGAATTCACAAGCCATTCTTCCATGCGTAGCTGATGGAAT
CCCCACACCAGCAATTAACTGGAAAAAAGACAATGTTCTTTTAGCTAACTTGTTAGGAAAATACACTG
CTGAACCATATGGAGAACTCATTTTAGAAAATGTTGTGCTGGAGGATTCTGGCTTCTATACCTGTGTT
GCTAACAATGCTGCAGGTGAAGATACACACACTGTCAGCCTGACTGTGCATGTTCTCCCCACTTTTAC
TGAACTTCCTGGAGACGTGTCATTAAATAAAGGAGAACAGCTACGATTAAGCTGTAAAGCTACTGGTA
TTCCATTGCCCAAATTAACATGGACCTTCAATAACAATATTATTCCAGCCCACTTTGACAGTGTGAAT
GGACACAGTGAACTTGTTATTGAAAGAGTGTCAAAAGAGGATTCAGGTACTTATGTGTGCACCGCAGA
GAACAGCGTTGGCTTTGTGAAGGCAATTGGATTTGTGTATGTGAAAGAACCTCCAGTCTTCAAAGGTG
ATTATCCTTCTCACTGGATTGAACCACTTGGTGGGAATGCAATCCTGAATTGTGAGGTGAAAGGAGAC
CCCACCCCAACCATCCAGTGGAACAGAAAGGGAGTGGATATTGAAATTAGCCACAGAATCCGGCAACT
GGGCAATGGCTCCCTGGCCATCTATGGCACTGTTAATGAAGATGCCGGTGACTATACATGTGTAGCTA
CCAATGAAGCTGGGGTGGTGGAGCGCAGCATGAGTCTGACTCTGCAAAGTCCTCCTATTATCACTCTT
GAGCCAGTGGAAACTGTTATTAATGCTGGTGGCAAAATCATATTGAATTGTCAGGCAACTGGAGAGCC
TCAACCAACCATTACATGGTCCCGTCAAGGGCACTCTATTTCCTGGGATGACCGGGTTAACGTGTTGT
CCAACAACTCATTATATATTGCTGATGCTCAGAAAGAAGATACCTCTGAATTTGAATGTGTTGCTCGA
AACTTAATGGGTTCTGTCCTTGTCAGAGTGCCAGTCATAGTCCAGGTTCATGGTGGATTTTCCCAGTG
GTCTGCATGGAGAGCCTGCAGTGTCACCTGTGGAAAAGGCATCCAAAAGAGGAGTCGTCTGTGCAACC
AGCCCCTTCCAGCCAATGGTGGGAAGCCCTGCCAAGGTTCAGATTTGGAAATGCGAAACTGTCAAAAT
AAGCCTTGTCCAGTGGATGGTAGCTGGTCGGAATGGAGTCTTTGGGAAGAATGCACAAGGAGCTGTGG
ACGCGGCAACCAAACCAGGACCAGGACTTGCAATAATCCATCAGTTCAGCATGGTGGGCGGCCATGTG
AAGGGAATGCTGTGGAAATAATTATGTGCAACATTAGGCCTTGCCCAGTTCATGGAGCATGGAGCGCT
TGGCAGCCTTGGGGAACATGCAGCGAAAGTTGTGGGAAAGGTACTCAGACAAGAGCAAGACTTTGTAA
AAAGAAATTGTCCAGTTCATGGCAAGTGGGCGACTTGGGCCAGTTGGAGTGCCTGTTCTGTGTCATGT
GGAGGAGGTGCCAGACAGAGAACAAGGGGCTGCTCCGACCCTGTGCCCCAGTATGGAGGAAGGAAATG
CGAAGGGAGTGATGTCCAGAGTGATTTTTGCAACAGTGACCCTTGCCCAACCCATGGTAACTGGAGTC
CTTGGAGTGGCTGGGGAACATGCAGCCGGACGTGTAACGGAGGGCAGATGCGGCGGTACCGCACATGT
GATAACCCTCCTCCCTCCAATGGGGGAAGAGCTTGTGGGGGACCAGACTCCCAGATCCAGAGGTGCAA
CACTGACATGTGTCCTGTGGATGGAAGTTGGGGAAGCTGGCATAGTTGGAGCCAGTGCTCTGCCTCCT
GTGGAGGAGGTGAAAAGACTCGGAAGCGGCTGTGCGACCATCCTGTGCCAGTTAAAGGTGGCCGTCCC
TGTCCCGGAGACACTACTCAGGTGACCAGGTGCAATGTACAAGCATGTCCAGGTGGGCCCCAGCGAGC
CAGAGGAAGTGTTATTGGAAATATTAATGATGTTGAATTTGGAATTGCTTTCCTTAATGCCACAATAA
CTGATAGCCCTAACTCTGATACTAGAATAATACGTGCCAAAATTACCAATGTACCTCGTAGTCTTGGT
TCAGCAATGAGAAAGATAGTTTCTATTCTAAATCCCATTTATTGGACAACAGCAAAGGAAATAGGAGA
AGCAGTCAATGGCTTTACCCTCACCAATGCAGTCTTCAAAAGAGAAACTCAAGTGGAATTTGCAACTG
GAGAAATCTTGCAGATGAGTCATATTGCCCGGGGCTTGGATTCCGATGGTTCTTTGCTGCTAGATATC
GTTGTGAGTGGCTATGTCCTACAGCTTCAGTCACCTGCTGAAGTCACTGTAAAGGATTACACAGAGGA
CTACATTCAAACAGGTCCTGGGCAGCTGTACGCCTACTCAACCCGGCTGTTCACCATTGATGGCATCA
GCATCCCATACACATGGAACCACACCGTTTTCTATGATCAGGCACAGGGAAGAATGCCTTTCTTGGTT
GAAACACTTCATGCATCCTCTGTGGAATCTGACTATAACCAGATAGAAGAGACACTGGGTTTTAAAAT
TCATGCTTCAATATCCAAAGGAGATCGCAGTAATCAGTGCCCCTCCGGGTTTACCTTAGACTCAGTTG
GACCTTTTTGTGCTGATGAGGATGAATGTGCAGCAGGGAATCCCTGCTCCCATAGCTGCCACAATGCC
ATGGGGACTTACTACTGCTCCTGCCCTAAAGGCCTCACCATAGCTGCAGATGGAAGAACTTGTCAAGA
TATTGATGAGTGTGCTTTGGGTAGGCATACCTGCCACGCTGGTCAGGACTGTGACAATACGATTGGAT
CTTATCGCTGTGTGGTCCGTTGTGGAAGTGGCTTTCGAAGAACCTCTGATGGGCTGAGTTGTCAAGAT
ATTAATGAATGTCAAGAATCCAGCCCCTGTCACCAGCGCTGTTTCAATGCCATAGGAAGTTTCCATTG
TGGATGTGAACCTGGGTATCAGCTCAAAGGCAGAAAATGCATGGATGTGAACGAGTGTAGACAAAATG
TATGCAGACCAGATCAGCACTGTAAGAACACCCGTGGTGGCTATAAGTGCATTGATCTTTGTCCAAAT
GGAATGACCAAGGCAGAAAATGGAACCTGTATTGATATTGATGAATGTAAAGATGGGACCCATCAGTG
CAGATATAACCAGATATGTGAGAATACAAGAGGCAGCTATCGTTGTGTATGCCCAAGAGGTTATCGGT
CTCAAGGAGTTGGAAGACCCTGCATGGACATTAATGAATGTGAACAAGTGCCTAAACCTTGTGCACAT
CAGTGCTCCAACACCCCCGGCAGCTTCAAGTGTATCTGTCCACCAGGACAACATTTATTAGGGGACGG
GAAATCTTGCGCTGGATTGGAGAGGCTGCCAAATTATGGCACTCAATACAGTAGCTATAACCTTGCAC
GGTTCTCCCCTGTGAGAAACAACTATCAACCTCAACAGCATTACAGACAGTACTCACATCTCTACAGC
TCCTACTCAGAGTATAGAAACAGCAGAACATCTCTCTCCAGGACTAGAAGGACTATTAGGAAAACTTG
CCCTGAAGGCTCTGAGGCAAGCCATGACACATGTGTAGATATTGATGAATGTGAAAATACAGATGCCT
GCCAGCATGAGTGTAAGAATACCTTTGGAAGTTATCAGTGCATCTGCCCACCTGGCTATCAACTCACA
CACAATGGAAAGACATGCCAAGATATCGATGAATGTCTGGAGCAGAATGTGCACTGTGGACCCAATCG
CATGTGCTTCAACATGAGAGGAAGCTACCAGTGCATCGATACACCCTGTCCACCCAACTACCAACGGG
ATCCTGTTTCAGGGTTCTGCCTCAAGAACTGTCCACCCAATGATTTGGAATGTGCCTTGAGCCCATAT
GCCTTGGAATACAAACTCGTCTCCCTCCCATTTGGAATAGCCACCAATCAAGATTTAATCCGGCTGGT
TGCATACACACAGGATGGAGTGATGCATCCCAGGACAACTTTCCTCATGGTAGATGAGGAACAGACTG
TTCCTTTTGCCTTGAGGGATGAAAACCTGAAAGGAGTGGTGTATACAACACGACCACTACGAGAAGCA
GAGACCTACCGCATGAGGGTCCGAGCCTCATCCTACAGTGCCAATGGGACCATTGAATATCAGACCAC
ATTCATAGTTTATATAGCTGTGTCCGCCTATCCATACTAAGGAACTCTCCAAAGCCTATTCCACATAT
TTAAACCGCATTAATCATGGCAATCAAGCCCCCTTCCAGATTACTGTCTCTTGAACAGTTGCAATCTT
GGCAGCTTGAAAATGGTGCTACACTCTGTTTTGTGTGCCTTCCTTGGTACTTCTGAGGTATTTTCATG
ATCCCACCATGGTCATATCTTGAAGTATGGTCTAGAAAAGTCCCTTATTATTTTATTTATTACACTGC
AGCACTTACTTCCCAAAGATTATTCTGAACATCTAACAGGACATATCAGTGATGGTTTACAGTAGTGT
AGTACCTAAGATCATTTTCCTGAAAGCCAAACCAAACAACGAAAAACAAGAACAACTAATTCAGAATC
AAATAGAGTTTTTGAGCATTTGACTATTTTTAGAATCATAAAATTAGTTACTAAGTATTTTGATCAAA
GCTTATAAAATAACTTACGGAGATTTTTGTAAGTATTGATACATTATAATAGGACTTGCCTATTTTCA
TTTTTAAGAAGAAAAACCCG

| | | | |
|---|---|---|---|
| NOV43c, CG56914-02 | SEQ ID NO:1002 | 4495 aa | MW at 488830.5 kD |
| Protein Sequence | | | |

MWLDRCARNPPRNHIDAPQKAPSAFRRVLQKGELISTSSAKFSAGADGSLYVVSPGGEESGEYVCTAT
NTAGYAKRKVQLTVYVRPRVFGDQRGLSQDKPVEISVLAGEEVTLPCEVKSLPPPTITWAKETQLISP
FSPRHTFLPSGSMKITETRTSDSGMYLCVATNIAGNVTQAVKLNVHVPPKIQRGPKHLKVQVGQRVDI
PCNAQGTPLPVITWSKGGSTMLVDGEHHVSNPDGTLSIDQATPSDAGIYTCVATNIAGTDETEITLHV
QEPPTVEDLEPPYNTTFQERVANQRIEFPCPAKGTPKPTIKWLHNGRELTGREPGISILEDGTLLVIA
SVTPYDNGEYICVAVNEAGTTERKYNLKVHVPPVIKDKEQVTNVSVLLNQLTNLFCEVEGTPSPIIMW
YKDNVQVTESSTIQTVNNGKILKLFRATPEDAGRYSCKAINIAGTSQKYFNIDVLGTNFPNEVSVVLN
RDVALECQVKGTPFPDIHWFKDGNIKGGNVTTDISVLINSLIKLECETRGLPMPAITWYKDGQPIMSS
SQALYIDKGQYLHIPRAQVSDSATYTCHVANVAGTAEKSFHVDVYVPPMIEGNLATPLMKQVVIAHSL
TLECKAAGNPSPILTWLKDGVPVKANDNIRIEAGGKKLEIMSAQEIDRGQYICVATSVAGEKEIKYEV
DVLVPPAIEGGDETSYFIVMVNNLLELDCHVTGSPPPTIMWLKDGQLIDERDGFKILLNGRKLVIAQA
QVSNTGLYRCMAANTAGDHKKEFEVTVHVPPTIKSSGLSERVVVKYKPVALQCIANGIPNPSITWLKD
DQPVNTAQGNLKIQSSGRVLQIAKTLLEDAGRYTCVATNAAGETQQHIQLHVHEPPSLEDAGKMLNET
VLVSNPVQLECKAAGNPVPVITWYKDNRLLSGSTSMTFLNRGQIIDIESAQISDAGIYKCVAINSAGA
TELFYSLQVHVAPSISGSNNMVAVVVNNPVRLECEARGIPAPSLTWLKDGSPVSSFSNGLQVLSGGRI
LALTSAQISDTGRYTCVAVNAAGEKQRDIDLRVYVPPNIMGEEQNVSVLISQAVELLCQSDAIPPPTL
TWLKDGHPLLKKPGLSISENRSVLKIEDAQVQDTGRYTCEATNVAGKTEKNYNVNIWVPPNIGGSDEL
TQLTVIEGNLISLLCESSGIPPPNLIWKKKGSPVLTDSMGRVRTLSGGRQLQISIAEKSDAALYSCVA
SNVAGTAKKEYNLQVYIRPTITNSGSHPTEIIVTRGKSISLECEVQGIPPPTVTWMKDGHPLIKAKGV
EILDEGHILQLKNIHVSDTGRYVCVAVNVAGMTDKKYDLSVHGGRMLRLMQTTMEDAGQYTCVVRNAA
GEERKIFGLSVLVPPHIVGENTLEDVKVKEKQSVTLTCEVTGNPVPEITWHKDGQPLQEDEAHHIISG
GRFLQITNVQVPHTGRYTCLASSPAGHKSRSFSLNVFVSPTIAGVGSDGNPEDVTVILNSPTSLVCEA
YSYPPATITWFKDGTPLESNPNIRILPGGRTLQILNAQEDNAGRYSCVATNEAGEMIKHYEVKVYTLN
ANIVIIESQPLKSDDHVNIAANGHTLQIKEAQISDTGRYTCVASNIAGEDELDFDVNIQVPPSFQKLW
EIGNMLDTGRNGEAKDVIINNPISLYCETNAAPPPTLTWYKDGHPLTSSDKVLILPGGRVLQIPRAKV
EDAGRYTCVAVNEAGEDSLQYDVRVLVPPIIKGANSDLPEEVTVLVNKSALIECLSSGSPAPRNSWQK
DGQPLLEDDHHKFLSNGRILQILNTQITDIGRYVCVAENTAGSAKKYFNLNVHVPPSVIGPKSENLTV
VVNNFISLTCEVSGFPPPDLSWLKNEQPIKLNTNTLIVPGGRTLQIIRAKVSDGGEYTCIAINQAGES
KKKFSLTVYVPPSIKDHDSESLSVVNVREGTSVSLECESNAVPPPVITWYKNGRMITESTHVEILANG
QMLHIKKAEVSDTGQYVCRAINVAGRDDKNFHLNVYVPPSIEGPEREVIVETISNPVTLTCDATGIPP
PTIAWLKNHKRIENSDSLEVRILSGGSKLQIARSQHSDSGNYTCIASNMEGKAQKYYFLSIQVPPSVA
GAEIPSDVSVLLGENVELVCNANGIPTPLIQWLKDGKPIASGETERIRVSANGSTLNIYGALTSDTGK
YTCVATNPAGEEDRIFNLNVYVTPTIRGNKDEAEKLMTLVDTSINIECRATGTPPPQINWLKNGLPLP
LSSHIRLLAAGQVIRIVRAQVSDVAVYTCVASNRAGVDNKHYNLQVFAPPNMDNSMGTEEITVLKGSS
TSMACITDGTPAPSMAWLRDGQPLGLDAHLTVSTHGMVLQLLKAETEDSGKYTCIASNEAGEVSKHFI
LKVLEPPHINGSEEHEEISVIVNNPLELTCIASGIPAPKMTWMKDGRPLPQTDQVQTLGGGEVLRIST
AQVEDTGRYTCLASSPAGDDDKEYLVRVHVPPNIAGTDEPRDITVLRNRQVTLECKSDAVPPPVITWL
RNGERLQATPRVRILSGGRYLQINNADLGDTANYTCVASNIAGKTTREFILTVNVPPNIKGGPQSLVI
LLNKSTVLECIAEGVPTPRITWRKDGAVLAGNHARYSILENGFLHIQSAHVTDTGRYLCMATNAAGTD
RRRIDLQVHVPPSIAPGPTNMTVIVNVQTTLACEATGIPKPSINWRKNGHLLNVDQNQNSYRLLSSGS
LVIISPSVDDTATYECTVTNGAGDDKRTVDLTVQVPPSIADEPTDFLVTKHAPAVITCTASGVPFPSI
HWTKNGIRLLPRGDGYRILSSGAIEILATQLNHAGRYTCVARNAAGSAHRHVTLHVHEPPVIQPQPSE
LHVILNNPILLPCEATGTPSPFITWQKEGINVNTSGRNHAVLPSGGLQISRAVREDAGTYMCVAQNPA
GTALGKIKLNVQVPPVISPHLKEYVIAVDKPITLSCEADGLPPPDITWHKDGRAIVESIRQRVLSSGS
LQITFVQPGDAGHYTCMAANVAGSSSTSTKLTVHVPPRIRSTEGHYTVNENSQAILPCVADGIPTPAI
NWKKDNVLLANLLGKYTAEPYGELILENVVLEDSGFYTCVANNAAGEDTHTVSLTVHVLPTFTELPGD
VSLNKGEQLRLSCKATGIPLPKLTWTFNNNIIPAHFDSVNGHSELVIERVSKEDSGTYVCTAENSVGF
VKAIGFVYVKEPPVFKGDYPSHWIEPLGGNAILNCEVKGDPTPTIQWNRKGVDIEISHRIRQLGNGSL
AIYGTVNEDAGDYTCVATNEAGVVERSMSLTLQSPPIITLEPVETVINAGGKIILNCQATGEPQPTIT
WSRQGHSISWDDRVNVLSNNSLYIADAQKEDTSEFECVARNLMGSVLVRVPVIVQVHGGFSQWSAWRA
CSVTCGKGIQKRSRLCNQPLPANGGKPCQGSDLEMENCQNKPCPVDGSWSEWSLWEECTRSCGRGNQT
RTRTCNNPSVQHGGRPCEGNAVEIIMCNIRPCPVHGAWSAWQPWGTCSESCGKGTQTRAELCNNPPPA
FGGSYCDGAETQMQVCNERNCPVHGKWATWASWSACSVSCGGGARQRTRGCSDPVPQYGGRKCEGSDV
QSDFCNSDPCPTHGNWSPWSGWGTCSRTCNGGQMRRYRTCDNPPPSNGGRACGGPDSQIQRCNTDMCP
VDGSWGSWHSWSQCSASCGGGEKTRKRLCDHPVPVKGGRPCPGDTTQVTRCNVQACPGGPQRARGSVI
GNINDVEFGIAFLNATITDSPNSDTRIIRAKITNVPRSLGSAMRKIVSILNPIYWTTAKEIGEAVNGF
TLTNAVFKRETQVEFATGEILQMSHIARGLDSDGSLLLDIVVSGYVLQLQSPAEVTVKDYTEDYIQTG
PGQLYAYSTRLFTIDGISIPYTWNHTVFYDQAQGRMPFLVETLHASSVESDYNQIEETLGFKIHASIS
KGDRSNQCPSGFTLDSVGPFCADEDECAAGNPCSHSCHNAMGTYYCSCPKGLTIAADGRTCQDIDECA
LGRHTCHAGQDCDNTIGSYRCVVRCGSGFRRTSDGLSCQDINECQESSPCHQRCFNAIGSFHCGCEPG
YQLKGRKCMDVNECRQNVCRPDQHCKNTRGGYKCIDLCPNGMTKAENGTCIDIDECKDGTHQCRYNQI
CENTRGSYRCVCPRGYRSQGVGRPCMDINECEQVPKPCAHQCSNTPGSFKCICPPGQHLLGDGKSCAG
LERLPNYGTQYSSYNLARFSPVRNNYQPQQHYRQYSHLYSSYSEYRNSRTSLSRTRRTIRKTCPEGSE
ASHDTCVDIDECENTDACQHECKNTFGSYQCICPPGYQLTHNGKTCQDIDECLEQNVHCGPNRMCFNM
RGSYQCIDTPCPPNYQRDPVSGFCLKNCPPNDLECALSPYALEYKLVSLPFGIATNQDLIRLVAYTQD
GVMHPRTTFLMVDEEQTVPFALRDENLKGVVYTTRPLREAETYRMRVRASSYSANGTIEYQTTFIVYI
AVSAYPY

| | | |
|---|---|---|
| NOV43d, CG56914-03 | SEQ ID NO:1003 | 6343 bp |
| DNA Sequence | ORF Start: ATG at 105 | ORF Stop: TAA at 5811 |

AACCACCTCACATTAATGGATCTGAAGAACATGAAGAGATATCAGTAATTGTTAATAACCCACTTGAA
CTTACCTGCATTGCTTCTGGAATCCCAGCCCCTAAAATGACCTGGATGAAAGATGGCCGGCCCCTTCC
ACAGACGGATCAAGTGCAAACTCTAGGAGGAGGAGAGGTTCTTCGAATTTCTACTGCTCAGGTGGAGG
ATACAGGAAGATATACATGTCTGGCATCCAGTCCTGCAGGAGATGATGATAAGGAATATCTAGTGAGA
GTGCATGTACCTCCTAATATTGCTGGAACTGATGAGCCCCGGGATATCACTGTGTTACGGAACAGACA
AGTGACATTGGAATGCAAGTCAGATGCAGTGCCCCCACCTGTAATTACTTGGCTCAGAAATGGAGAAC
GGTTACAGGCAACACCTCGAGTGCGAATCCTATCTGGAGGGAGATACTTGCAAATCAACAATGCTGAC
CTAGGTGATACAGCCAATTATACCTGTGTTGCCAGCAACATTGCAGGAAAGACTACAAGAGAATTTAT
TCTCACTGTAAATGTTCCTCCAAACATAAAGGGGGGCCCCCAGAGCCTTGTAATTCTTTTAAATAAGT
CAACTGTATTGGAATGCATCGCTGAAGGTGTGCCAACTCCAAGGATAACATGGAGAAAGGATGGAGCT
GTTCTAGCTGGGAATCATGCAAGATATTCCATCTTGGAAAATGGATTCCTTCATATTCAATCAGCACA
TGTCACTGACACTGGACGGTATTTGTGTATGGCCACCAATGCTGCTGGAACAGATCGCAGGCGAATAG
ATTTACAGGTCCATGGTTCACTAGTAATTATTTCCCCTTCTGTGGATGACACTGCAACCTATGAATGT
ACTGTGACAAACGGTGCTGGAGATGATAAAAGAACTGTGGATCTCACTGTCCAAGTTCCACCTTCCAT
AGCTGATGAGCCTACAGATTTCCTAGTAACCAAACATGCCCCAGCAGTAATTACCTGCACTGCTTCGG
GAGTTCCATTTCCCTCAATTCACTGGACCAAAAATGGTATAAGACTGCTTCCCAGGGGAGATGGCTAT
AGAATTCTGTCCTCAGGAGCAATTGAAATACTTGCCACCCAATTAAACCATGCTGGAAGATACACTTG
TGTCGCTAGGAATGCGGCTGGCTCTGCACATCGACACGTGACCCTTCATGTTCATGAGCCTCCAGTCA
TTCAGCCCCAACCAAGTGAACTACACGTCATTCTGAACAATCCTATTTTATTACCATGTGAAGCAACA
GGGACACCCAGTCCTTTCATTACTTGGCAAAAAGAAGGCATCAATGTTAACACTTCAGGCAGAAACCA
TGCAGTTCTTCCTAGTGGCGGCTTACAGATCTCCAGAGCTGTCCGAGAGGATGCTGGCACTTACATGT
GTGTGGCCCAGAACCCGGCTGGTACAGCCTTGGGCAAAATCAAGTTAAATGTCCAAGTTCCTCCAGTC
ATTAGCCCTCATCTAAAGGAATATGTTATTGCTGTGGACAAGCCCATCACGTTATCCTGTGAAGCAGA
TGGCCTCCCTCCGCCTGACATTACATGGCATAAAGATGGGCGTGCAATTGTGGAATCTATCCGCCAGC
GCGTCCTCAGCTCTGGCTCTCTGCAAATAGCATTTGTCCAGCCTGGTGATGCTGGCCATTACACGTGC
ATGGCAGCCAATGTAGCAGGATCAAGCAGCACAAGCACCAAGCTCACCGTCCATGTACCACCCAGGAT
CAGAAGTACAGAAGGACACTACACGGTCAATGAGAATTCACAAGCCATTCTTCCATGCGTAGCTGATG
GAATCCCCACACCAGCAATTAACTGGAAAAAAGACAATGTTCTTTTAGCTAACTTGTTAGGAAAATAC
ACTGCTGAACCATATGGAGAACTCATTTTAGAAAATGTTGTGCTGGAGGATTCTGGCTTCTATACCTG
TGTTGCTAACAATGCTGCAGGTGAAGATACACACACTGTCAGCCTGACTGTGCATGTTCTCCCCACTT
TTACTGAACTTCCTGGAGACGTGTCATTAAATAAAGGAGAACAGCTACGATTAAGCTGTAAAGCTACT
GGTATTCCATTGCCCAAATTAACATGGACCTTCAATAACAATATTATTCCAGCCCACTTTGACAGTGT
GAATGGACACAGTGAACTTGTTATTGAAAGAGTGTCAAAAGAGGATTCAGGTACTTATGTGTGCACCG
CAGAGAACAGCGTTGGCTTTGTGAAGGCAATTGGATTTGTTTATGTGAAAGAACCTCCAGTCTTCAAA
GGTGATTATCCTTCTAACTGGATTGAACCACTTGGTGGGAATGCAATCCTGAATTGTGAGGTGAAAGG
AGACCCCACCCCAACCATCCAGTGGAACAGAAAGGGAGTGGATATTGAAATTAGCCACAGAATCCGGC
AACTGGGCAATGGCTCCCTGGCCATCTATGGCACTGTTAATGAAGATGCCGGTGACTATACATGTGTA
GCTACCAATGAAGCTGGGGTGGTGGAGCGCAGCATGAGTCTGACTCTGCAAAGTCCTCCTATTATCAC
TCTTGAGCCAGTGGAAACTGTTATTAATGCTGGTGGCAAAATCATATTGAATTGTCAGGCAACTGGAG
AGCCTCAACCAACCATTACATGGTCCCGTCAAGGGCACTCTATTTCCTGGGATGACCGGGTTAACGTG
TTGTCCAACAACTCATTATATATTGCTGATGCTCAGAAAGAAGATACCTCTGAATTTGAATGCGTTGC
TCGAAACTTAATGGGTTCTGTCCTTGTCAGAGTGCCAGTCATAGTCCAGGTTCATGGTGGATTTTCCC
AGTGGTCTGCATGGAGAGCCTGCAGTGTCACCTGTGGAAAAGGCATCCAAAAGAGGAGTCGTCTGTGC
AACCAGCCCCTTCCAGCCAATGGTGGGAAGCCCTGCCAAGGTTCAGATTTGGAAATGCGAAACTGTCA
AAATAAGCCTTGTCCAGTGGATGGTAGCTGGTCGGAATGGAGTCTTTGGGAAGAATGCACAAGGAGCT
GTGGACGCGGCAACCAAACCAGGACCAGGACTTGCAATAATCCATCAGTTCAGCATGGTGGGCGGCCA
TGTGAAGGGAATGCTGTGGAAATAATTATGTGCAACATTAGGCCTTGCCCAGTTCATGGAGCATGGAG
CGCTTGGCAGCCTTGGGGAACATGCAGCGAAAGTTGTGGGAAAGGTACTCAGACAAGAGCAAGACTTT
GTAATAACCCACCACCAGCGTTTGGTGGGTCCTACTGTGATGGAGCAGAAACACAGATGCAAGTTTGC
AATGAAAGAAATTGTCCAATTCATGGCAAGTGGGCGACTTGGGCCAGTTGGAGTGCCTGTTCTGTGTC
ATGTGGAGGAGGTGCCAGACAGAGAACAAGGGGCTGCTCCGACCCTGTGCCCCAGTATGGAGGAAGGA
AATGCGAAGGGAGTGATGTCCAGAGTGATTTTTGCAACAGTGACCCTTGCCCAACCCATGGTAACTGG
AGTCCTTGGAGTGGCTGGGGAACATGCAGCCGGACGTGTAACGGAGGGCAGATGCGGCGGTACCGCAC
ATGTGATAACCCTCCTCCCTCCAATGGGGGAAGAGCTTGTGGGGGACCAGACTCCCAGATCCAGAGGT
GCAACACTGACATGTGTCCTGTGGATGGAAGTTGGGGAAGCTGGCATAGTTGGAGCCAGTGCTCTGCC
TCCTGTGGAGGAGGTGAAAAGACTCGGAAGCGGCTGTGCGACCATCCTGTGCCAGTTAAAGGTGGCCG
TCCTTGTCCCGGAGACACTACTCAGGTGACCAGGTGCAATGTACAAGCATGTCCAGGTGGGCCCCAGC
GAGCCAGAGGAAGTGTTATTGGAAATATTAATGATGTTGAATTTGGAATTGCTTTCCTTAATGCCACA
ATAACTGATAGCCCTAACTCTGATACTAGAATAATACGTGCCAAAATTACCAATGTACCTCGTAGTCT
TGGTTCAGCAATGAGAAAGATAGTTTCTATTCTAAATCCCATTTATTGGACAACAGCAAAGGAAATAG
GAGAAGCAGTCAATGGCTTTACCCTCACCAATGCAGTCTTCAAAAGAGAAACTCAAGTGGAATTTGCA
ACTGGAGAAATCTTGCAGATGAGTCATATTGCCCGGGGCTTGGATTCCGATGGTTCTTTGCTGCTAGA
TATCGTTGTGAGTGGCTATGTCCTACAGCTTCAGTCACCTGCTGAAGTCACTGTAAAGGATTACACAG
AGGACTACATTCAAACAGGTCCTGGGCAGCTGTACGCCTACTCAACCCGGCTGTTCACCATTGATGGC
ATCAGCATCCCATACACATGGAACCACACCGTTTTCTATGATCAGGCACAGGGAAGAATGCCTTTCTT
GGTTGAAACACTTCATGCATCCTCTGTGGAATCTGACTATAACCAGATAGAAGAGACACTGGGTTTTA
AAATTCATGCTTCAATATCCAAAGGAGATCGCAGTAATCAGTGCCCCTCCGGGTTTACCTTAGACTCA
GTTGGACCTTTTTGTGCTGATGAGGATGAATGTGCAGCAGGGAATCCCTGCTCCCATAGCTGCCACAA
TGCCATGGGGACTTACTACTGCTCCTGCCCTAAAGGCCTCACCATAGCTGCAGATGGAAGAACTTGTC
AAGATATTGATGAGTGTGCTTTGGGTAGGCATACCTGCCACGCTGGTCAGGACTGTGACAATACGATT
GGATCTTATCGCTGTGTGGTCCGTTGTGGAAGTGGCTTTCGAAGAACCTCTGATGGGCTGAGTTGTCA
AGATATTAATGAATGTCAAGAATCCAGCCCCTGTCACCAGCGCTGTTTCAATGCCATAGGAAGTTTCC
ATTGTGGATGTGAACCTGGGTATCAGCTCAAAGGCAGAAAATGCATGGATGTGAACGAGTGTAGACAA
AATGTATGCAGACCAGATCAGCACTGTAAGAACACCCGTGGTGGCTATAAGTGCATTGATCTTTGTCC
AAATGGAATGACCAAGGCAGAAAATGGAACCTGTATTGATATTGATGAATGTAAAGATGGGACCCATC
AGTGCAGATATAACCAGATATGTGAGAATACAAGAGGCAGCTATCGTTGTGTATGCCCAAGAGGTTAT
CGGTCTCAAGGAGTTGGAAGACCCTGCATGGATATTGATGAATGTGAAAATACAGATGCCTGCCTGCA
TGAGTGTAAGAATACCTTTGGAAGTTATCAGTGCATCTGCCCACCTGGCTATCAACTCACACACAATG
GAAAGACATGCCAAGATATCGATGAATGTCTGGAGCAGAATGTGCACTGTGGACCCAATCGCATGTGC
TTCAACATGAGAGGAAGCTACCAGTGCATCGATACACCCTGTCCACCCAACTACCAACGGGATCCTGC
TTCAGGGTTCTGCCTCAAGAACTGTCCACCCAATGATTTGGAATGTGCCTTGAGCCCATATGCCTTGG
AATACAAACTCGTCTCCCTCCCATTTGGAATAGCCACCAATCAAGATTTAATCCGGCTGGTTGCATAC
ACACAGGATGGAGTGATGCATCCCAGGACAACTTTCCTCATGGTAGATGAGGAACAGACTGTTCCTTT
TGCCTTGAGGGATGAAAACCTGAAAGGAGTGGTGTATACAACACGACCACTACGAGAAGCAGAGACCT
ACCGCATGAGGGTCCGAGCCTCATCCTACAGTGCCAATGGGACCATTGAATATCAGACCACATTCATA
GTTTATATAGCTGTGTCCGCCTATCCATACTAAGGAACTCTCCAAAGCCTATTCCACATATTTAAACC
GCATTAATCATGGCAATCAAGCCCCCTTCCAGATTACTGTCTCTTGAACAGTTGCAATCTTGGCAGCT
TGAAAATGGTGCTACACTCTGTTTTGTGTGCCTTCCTTGGTACTTCTGAGGTATTTTCATGATCCCAC
CATGGTCATATCTTGAAGTATGGTCTAGAAAAGTCCCTTATTATTTTATTTATTACACTGGAGCAGTT
ACTTCCCAAAGATTATTCTGAACATCTAACAGGACATATCAGTGATGGTTTACAGTAGTGTAGTACCT
AAGATCATTTTCCTGAAAGCCAAACCAAACAACGAAAAACAAGAACAACTAATTCAGAATCAAATAGA
GTTTTTGAGCATTTGACTATTTTTAGAATCATAAAATTAGTTACTAAGTATTTTGATCAAAGCTTATA
AAATAACTTACGGAGATTTTTGTAAGTATTGATACATTATAATAGGACTTGCCTATTTTCATTTTTAA
GAAGAAAAACACCACTCAT

| | | | |
|---|---|---|---|
| NOV43d, CG56914-03 | SEQ ID NO:1004 | 1902 aa | MW at 207163.2 kD |
| Protein Sequence | | | |

MTWMKDGRPLPQTDQVQTLGGGEVLRISTAQVEDTGRYTCLASSPAGDDDKEYLVRVHVPPNIAGTDE
PRDITVLRNRQVTLECKSDAVPPPVITWLRNGERLQATPRVRILSGGRYLQINNADLGDTANYTCVAS
NIAGKTTREFILTVNVPPNIKGGPQSLVILLNKSTVLECIAEGVPTPRITWRKDGAVLAGNHARYSIL
ENGFLHIQSAHVTDTGRYLCMATNAAGTDRRRIDLQVHGSLVIISPSVDDTATYECTVTNGAGDDKRT
VDLTVQVPPSIADEPTDFLVTKHAPAVITCTASGVPFPSIHWTKNGIRLLPRGDGYRILSSGAIElLA
TQLNHAGRYTCVARNAAGSAHRHVTLHVHEPPVIQPQPSELHVILNNPILLPCEATGTPSPFITWQKE
GINVNTSGRNHAVLPSGGLQISRAVREDAGTYMCVAQNPAGTALGKIKLNVQVPPVISPHLKEYVIAV
DKPITLSCEADGLPPPDITWHKDGRAIVESIRQRVLSSGSLQIAFVQPGDAGHYTCMAANVAGSSSTS
TKLTVHVPPRIRSTEGHYTVNENSQAILPCVADGIPTPAINWKKDNVLLANLLGKYTAEPYGELILEN
VVLEDSGFYTCVANNAAGEDTHTVSLTVHVLPTFTELPGDVSLNKGEQLRLSCKATGIPLPKLTWTFN
NNIIPAHFDSVNGHSELVIERVSKEDSGTYVCTAENSVGFVKAIGFVYVKEPPVFKGDYPSNWIEPLG
GNAILNCEVKGDPTPTIQWNRKGVDIEISHRIRQLGNGSLAIYGTVNEDAGDYTCVATNEAGVVERSM
SLTLQSPPIITLEPVETVINAGGKIILNCQATGEPQPTITWSRQGHSISWDDRVNVLSNNSLYIADAQ
KEDTSEFECVARNLMGSVLVRVPVIVQVHGGFSQWSAWRACSVTCGKGIQKRSRLCNQPLPANGGKPC
QGSDLEMRNCQNKPCPVDGSWSEWSLWEECTRSCGRGNQTRTRTCNNPSVQHGGRPCEGNAVEIIMCN
IRPCPVHGAWSAWQPWGTCSESCGKGTQTRARLCNNPPPAFGGSYCDGAETQMQVCNERNCPIHGKWA
TWASWSACSVSCGGGARQRTRGCSDPVPQYGGRKCEGSDVQSDFCNSDPCPTHGNWSPWSGWGTCSRT
CNGGQMRRYRTCDNPPPSNGGRACGGPDSQIQRCNTDMCPVDGSWGSWHSWSQCSASCGGGEKTRKRL
CDHPVPVKGGRPCPGDTTQVTRCNVQACPGGPQRARGSVIGNINDVEFGIAFLNATITDSPNSDTRII
RAKITNVPRSLGSAMRKIVSILNPIYWTTAKEIGEAVNGFTLTNAVFKRETQVEFATGEILQMSHIAR
GLDSDGSLLLDIVVSGYVLQLQSPAEVTVKDYTEDYIQTGPGQLYAYSTRLFTIDGISIPYTWNHTVF
YDQAQGRMPFLVETLHASSVESDYNQIEETLGFKIHASISKGDRSNQCPSGFTLDSVGPFCADEDECA
AGNPCSHSCHNAMGTYYCSCPKGLTIAADGRTCQDIDECALGRHTCHAGQDCDNTIGSYRCVVRCGSG
FRRTSDGLSCQDINECQESSPCHQRCFNAIGSFHCGCEPGYQLKGRKCMDVNECRQNVCRPDQHCKNT
RGGYKCIDLCPNGMTKAENGTCIDIDECKDGTBQCRYNQICENTRGSYRCVCPRGYRSQGVGRPCMDI
DECENTDACLHECKNTFGSYQCICPPGYQLTHNGKTCQDIDECLEQNVHCGPNRNCFNMRGSYQCIDT
PCPPNYQRDPASGFCLKNCPPNDLECALSPYALEYKLVSLPFGIATNQDLIRLVAYTQDGVMHPRTTF
LMVDEEQTVPFALRDENLKGVVYTTRPLREAETYRMRVRASSYSANGTIEYQTTFIVYIAVSAYPY

[0603] A ClustalW comparison of the above protein sequences yields the following sequence alignment shown in Table 43B.

TABLE 43B
Comparison of the NOV43 protein sequences.

| | | |
|---|---|---|
| NOV43a | ------------------------------------------------------------ | (SEQ ID NO:998) |
| NOV43b | ------------------------------------------------------------ | (SEQ ID NO:1000) |
| NOV43c | MWLDRCARNPPRNHIDAPQKAPSAFRRVLQKGELISTSSAKFSAGADGSLYVVSPGGEES | (SEQ ID NO:1002) |
| NOV43d | ------------------------------------------------------------ | (SEQ ID NO:1004) |
| NOV43a | ------------------------------------------------------------ | |
| NOV43b | ------------------------------------------------------------ | |
| NOV43c | GEYVCTATNTAGYAKRKVQLTVYVRPRVFGDQRGLSQDKPVEISVLAGEEVTLPCEVKSL | |
| NOV43d | ------------------------------------------------------------ | |
| NOV43a | ------------------------------------------------------------ | |
| NOV43b | ------------------------------------------------------------ | |
| NOV43c | PPPIITWAKETQLISPFSPRHTFLPSGSMKITETRTSDSGMYLCVATNIAGNVTQAVKLN | |
| NOV43d | ------------------------------------------------------------ | |
| NOV43a | ------------------------------------------------------------ | |
| NOV43b | ------------------------------------------------------------ | |
| NOV43c | VHVPPKIQRGPKHLKVQVGQRVDIPCNAQGTPLPVITWSKGGSTMLVDGEHHVSNPDGTL | |
| NOV43d | ------------------------------------------------------------ | |
| NOV43a | ------------------------------------------------------------ | |
| NOV43b | ------------------------------------------------------------ | |
| NOV43c | SIDQATPSDAGIYTCVATNIAGTDETEITLHVQEPPTVEDLEPPYNTTFQERVANQRIEF | |
| NOV43d | ------------------------------------------------------------ | |
| NOV43a | ------------------------------------------------------------ | |
| NOV43b | ------------------------------------------------------------ | |
| NOV43c | PCPAKGTPKPTIKWLHNGRELTGREPGISILEDGTLLVIASVTPYDNGEYICVAVNEAGT | |
| NOV43d | ------------------------------------------------------------ | |
| NOV43a | ------------------------------------------------------------ | |
| NOV43b | ------------------------------------------------------------ | |
| NOV43c | TERKYNLKVHVPPVIKDKEQVTNVSVLLNQLTNLFCEVEGTPSPIIMWYKDNVQVTESST | |
| NOV43d | ------------------------------------------------------------ | |
| NOV43a | ------------------------------------------------------------ | |
| NOV43c | IQTVNNGKILKLFEATPEDAGRYSCKAINIAGTSQKYFNIDVLGTNFPNEVSVVLNRDVA | |
| NOV43d | ------------------------------------------------------------ | |
| NOV43a | ------------------------------------------------------------ | |
| NOV43c | LECQVKGTPFPDIHWFKDGNIKGGNVTTDISVLINSLIKLECETRGLPMPAITWYKDGQP | |
| NOV43d | ------------------------------------------------------------ | |
| NOV43a | ------------------------------------------------------------ | |
| NOV43b | ------------------------------------------------------------ | |
| NOV43c | IMSSSQALYIDKGQYLHIPRAQVSDSATYTCHVANVAGTAEKSFHVDVYVPPMIEGNLAT | |
| NOV43d | ------------------------------------------------------------ | |
| NOV43a | ------------------------------------------------------------ | |
| NOV43b | ------------------------------------------------------------ | |
| NOV43c | PLNKQVVIAHSLTLECKAAGNPSPILTWLKDGVPVKANDNTRIEAGGKKLEIMSAQEIDR | |
| NOV43d | ------------------------------------------------------------ | |
| NOV43a | ------------------------------------------------------------ | |
| NOV43b | ------------------------------------------------------------ | |
| NOV43c | GQYICVATSVAGEKEIKYEVDVLVPPAIEGGDETSYFIVMVNNLLELDCHVTGSPPPTIM | |
| NOV43d | ------------------------------------------------------------ | |
| NOV43a | ------------------------------------------------------------ | |
| NOV43b | ------------------------------------------------------------ | |
| NOV43c | WLKDGQLIDERDGFKILLNGRKLVIAQAQVSNTGLYRCMAANTAGDHKKEFEVTVHVPPT | |
| NOV43d | ------------------------------------------------------------ | |
| NOV43a | ------------------------------------------------------------ | |
| NOV43b | ------------------------------------------------------------ | |
| NOV43c | IKSSGLSERVVVKYKPVALQCIANGIPNPSITWLKDDQPVNTAQGNLKIQSSGRVLQIAK | |
| NOV43d | ------------------------------------------------------------ | |
| NOV43a | ------------------------------------------------------------ | |
| NOV43b | ------------------------------------------------------------ | |
| NOV43c | TLLEDAGRYTCVATNAAGETQQHIQLHVHEPPSLEDAGKMLNETVLVSNPVQLECKAAGN | |
| NOV43d | ------------------------------------------------------------ | |
| NOV43a | ------------------------------------------------------------ | |
| NOV43b | ------------------------------------------------------------ | |
| NOV43c | PVPVITWYKDNRNLSGSTSMTFLNRGQIIDIESAQISDAGIYKCVAINSAGATELFYSLQ | |
| NOV43d | ------------------------------------------------------------ | |
| NOV43a | ------------------------------------------------------------ | |
| NOV43b | ------------------------------------------------------------ | |
| NOV43c | VHVAPSISGSNNMVAVVVNNPVRLECEARGIPAPSLTWLKDGSPVSSFSNGLQVLSGGRI | |
| NOV43d | ------------------------------------------------------------ | |
| NOV43a | ------------------------------------------------------------ | |
| NOV43b | ------------------------------------------------------------ | |
| NOV43c | LALTSAQISDTGRYTCVAVNAAGEKQRDIDLRVYVPPNIMGEEQNVSVLISQAVELLCQS | |
| NOV43d | ------------------------------------------------------------ | |
| NOV43a | ------------------------------------------------------------ | |
| NOV43b | ------------------------------------------------------------ | |
| NOV43c | DAIPPPTLTWLKDGHPLLKKPGLSISENRSVLKIEDAQVQDTGRYTCEATNVAGKTEKNY | |
| NOV43d | ------------------------------------------------------------ | |
| NOV43a | ------------------------------------------------------------ | |
| NOV43b | ------------------------------------------------------------ | |
| NOV43c | NVNIWVPPNIGGSDELTQLTVIEGNLISLLCESSGIPPPNLIWKKKGSPVLTDSMGRVRI | |
| NOV43d | ------------------------------------------------------------ | |
| NOV43a | ------------------------------------------------------------ | |
| NOV43b | ------------------------------------------------------------ | |
| NOV43c | LSGGRQLQISIAEKSDAALYSCVASNVAGTAKKEYNLQVYIRPTITNSGSHPTEIIVTRG | |
| NOV43d | ------------------------------------------------------------ | |
| NOV43a | ------------------------------------------------------------ | |
| NOV43b | ------------------------------------------------------------ | |
| NOV43c | KSISLECEVQGIPPPTVTWMKDGHPLIKAKGVEILDEGHILQLKNIHVSDTGRYVCVAVN | |
| NOV43d | ------------------------------------------------------------ | |
| NOV43a | ------------------------------------------------------------ | |
| NOV43b | ------------------------------------------------------------ | |
| NOV43c | VAGMTDKKYDLSVHGGRMLRLMQTTMEDAGQYTCVVPNAAGEERKIFGLSVLVPPHIVGE | |
| NOV43d | ------------------------------------------------------------ | |
| NOV43a | ------------------------------------------------------------ | |
| NOV43b | ------------------------------------------------------------ | |
| NOV43c | NTLEDVKVKEKQSVTLTCEVTGNPVPEITWHKDGQPLQEDEAHHIISGGRFLQITNVQVP | |
| NOV43d | ------------------------------------------------------------ | |
| NOV43a | ------------------------------------------------------------ | |
| NOV43b | ------------------------------------------------------------ | |
| NOV43c | HTGRYTCLASSPAGHKSRSFSLNVFVSPTIAGVGSDGNPEDVTVILNSPTSLVCEAYSYP | |
| NOV43d | ------------------------------------------------------------ | |
| NOV43a | ------------------------------------------------------------ | |
| NOV43b | ------------------------------------------------------------ | |
| NOV43c | PATITWFKDGTPLESNRNIRILPGGRTLQILNAQEDNAGRYSCVATNEAGEMIKHYEVKV | |
| NOV43d | ------------------------------------------------------------ | |
| NOV43a | ------------------------------------------------------------ | |
| NOV43b | ------------------------------------------------------------ | |
| NOV43c | YTLNANIVIIESQPLKSDDHVNIAANGHTLQIKEAQISDTGRYTCVASNIAGEDELDFDV | |
| NOV43d | ------------------------------------------------------------ | |
| NOV43a | ------------------------------------------------------------ | |
| NOV43b | ------------------------------------------------------------ | |
| NOV43c | NIQVPPSFQKLWEIGNNLDTGRNGEAKDVIINNPISLYCETNAAPPPTLTWYKDGHPLTS | |
| NOV43d | ------------------------------------------------------------ | |
| NOV43a | ------------------------------------------------------------ | |
| NOV43b | ------------------------------------------------------------ | |
| NOV43c | SDKVLILPGGRVLQIPRAKVEDAGRYTCVAVNEAGEDSLQYDVRVLVPPIIKGANSDLPE | |
| NOV43d | ------------------------------------------------------------ | |
| NOV43a | ------------------------------------------------------------ | |
| NOV43b | ------------------------------------------------------------ | |
| NOV43c | EVTVLVNKSALIECLSSGSPAPRNSWQKDGQPLLEDDHHKFLSNGRILQILNTQITDIGR | |
| NOV43d | ------------------------------------------------------------ | |
| NOV43a | ------------------------------------------------------------ | |
| NOV43b | ------------------------------------------------------------ | |
| NOV43c | YVCVAENTAGSAKKYFNLNVHVPPSVIGPKSENLTVVVNNFISLTCEVSGFPPPDLSWLK | |
| NOV43d | ------------------------------------------------------------ | |
| NOV43a | ------------------------------------------------------------ | |
| NOV43b | ------------------------------------------------------------ | |
| NOV43c | NEQPIKLNTNTLIVPGGRTLQIIRAKVSDGGEYTCIAINQAGESKKKFSLTVYVPPSIKD | |
| NOV43d | ------------------------------------------------------------ | |
| NOV43a | ------------------------------------------------------------ | |
| NOV43b | ------------------------------------------------------------ | |
| NOV43c | HDSESLSVVNVREGTSVSLECESNAVPPPVITWYKNGRMITESTHVEILADGQMLHIKKA | |
| NOV43d | ------------------------------------------------------------ | |
| NOV43a | ------------------------------------------------------------ | |
| NOV43b | ------------------------------------------------------------ | |
| NOV43c | EVSDTGQYVCRAINVAGRDDKNFHLNVYVPPSIEGPEREVIVETISNPVTLTCDATGIPP | |
| NOV43d | ------------------------------------------------------------ | |
| NOV43a | ------------------------------------------------------------ | |
| NOV43b | ------------------------------------------------------------ | |
| NOV43c | PTIAWLKNHKRIENSDSLEVRILSGGSKLQIARSQHSDSGNYTCIASNMEGKAQKYYFLS | |
| NOV43d | ------------------------------------------------------------ | |
| NOV43a | ------------------------------------------------------------ | |
| NOV43b | ------------------------------------------------------------ | |
| NOV43c | IQVPPSVAGAEIPSDVSVLLGENVELVCNANGIPTPLIQWLKDGKPIASGETERIRVSAN | |
| NOV43d | ------------------------------------------------------------ | |
| NOV43a | ------------------------------------------------------------ | |
| NOV43b | ------------------------------------------------------------ | |
| NOV43c | GSTLNIYGALTSDTGKYTCVATNPAGEEDRIFNLNVYVTPTIRGNKDEAEKLMTLVDTST | |
| NOV43d | ------------------------------------------------------------ | |
| NOV43a | ------------------------------------------------------------ | |
| NOV43b | ------------------------------------------------------------ | |
| NOV43c | NIECRATGTPPPQINWLKNGLPLPLSSHIRLLAAGQVIRIVRAQVSDVAVYTCVASNRAG | |
| NOV43d | ------------------------------------------------------------ | |
| NOV43a | ------------------------------------------------------------ | |
| NOV43b | ------------------------------------------------------------ | |
| NOV43c | VDNKHYNLQVFAPPNMDNSMGTEEITVLKGSSTSMACITDGTPAPSMAWLRNGQPLGLDA | |
| NOV43d | ------------------------------------------------------------ | |
| NOV43a | ------------------------------------------------------------ | |
| NOV43b | ------------------------------------------------------------ | |
| NOV43c | HLTVSTHGMVLQLLKAETEDSGKYTCIASNEAGEVSKHFILKVLEPPHINGSEEHEEISV | |
| NOV43d | ------------------------------------------------------------ | |
| NOV43a | ------------------------------------------------------------ | |
| NOV43b | ------------------------------------------------------------ | |
| NOV43c | IVNNPLELTCIASGIPAPKMTWMKDGRPLPQTDQVQTLGGGEVLRISTAQVEDTGRYTCL | |
| NOV43d | -------------------MTWMKDGRPLPQTDQVQTLGGGEVLRISTAQVEDTGRYTCL | |
| NOV43a | ------------------------------------------------------------ | |
| NOV43b | ------------------------------------------------------------ | |
| NOV43c | ASSPAGDDDKEYLVRVHVPPNTAGTDEPRDITVLRNRQVTLECKSDAVPPPVITWLRNGE | |
| NOV43d | ASSPAGDDDKEYLVRVHVPPNIAGTDEPRDITVLRNRQVTLECKSDAVPPPVITWLRNGE | |
| NOV43a | ------------------------------------------------------------ | |
| NOV43b | ------------------------------------------------------------ | |
| NOV43c | RLQATPRVRILSGGRYLQINNADLGDTANYTCVASNIAGKTTREFILTVNVPPNIKGGPQ | |
| NOV43d | RLQATPRVRILSGGRYLQINNADLGDTANYTCVASNIAGKTTREFILTVNVPPNIKGGPQ | |
| NOV43a | ------------------------------------------------------------ | |
| NOV43b | ------------------------------------------------------------ | |
| NOV43c | SLVILLNKSTVLECIAEGVPTPRITWRKDGAVLAGNHARYSTLENGFLHIQSAHVTDTGR | |
| NOV43d | SLVILLNKSTVLECIAEGVPTPRITWRKDGAVLAGNHARYSILENGFLHIQSAHVTDTGR | |
| NOV43a | ------------------------------------------------------------ | |
| NOV43b | ------------------------------------------------------------ | |
| NOV43c | YLCMATNAAGTDRIRIDLQVHVPPSIAPGPTNMTVIVNVQTTLACEATGIPKPSINWRKN | |
| NOV43d | YLCMATNAAGTDRRRIDLQVHG-------------------------------------- | |
| NOV43a | ------------------------------------------------------------ | |
| NOV43b | ------------------------------------------------------------ | |
| NOV43c | GHLLNVDQNQNSYRLLSSGSLVIISPSVDDTATYECTVTNGAGDDKRTVDLTVQVPPSIA | |
| NOV43d | -------------------SLVIISPSVDDTATYECTVTNGAGDDKRTVDLTVQVPPSIA | |
| NOV43a | ------------------------------------------------------------ | |
| NOV43b | ------------------------------------------------------------ | |
| NOV43c | DEPTDFLVTKHAPAVITCTASGVPFPSIHWTKNGIRLLPRGDGYRILSSGAIEILATQLN | |
| NOV43d | DEPTDFLVTKHAPAVITCTASGVPFPSIHWTKNGIRLLPRGDGYRILSSGAIEILATQLN | |
| NOV43a | ------------------------------------------------------------ | |
| NOV43b | ------------------------------------------------------------ | |
| NOV43c | HAGRYTCVARNAAGSAHRHVTLHVHEPPVIQPQPSELHVILNNPILLPCEATGTPSPFIT | |
| NOV43d | HAGRYTCVARNAAGSAHRHVTLHVHEPPVIQPQPSELHVILNNPILLPCEATGTPSPFIT | |
| NOV43a | ------------------------------------MCVAQNPAGTALGKIKLNVQVPPV | |
| NOV43b | ---------------------------------GSTMCVAQNPAGTALGKIKLNVQVPPV | |
| NOV43c | WQKEGINVNTSGRNHAVLPSGGLQISRAVREDAGTYMCVAQNPAGTALGKIKLNVQVPPV | |
| NOV43d | WQKEGINVNTSGRNHAVLPSGGLQISRAVREDAGTYMCVAQNPAGTALGKIKLNVQVPPV | |
| NOV43a | ISPHLKEYVIAVDKPITLSCEADGLPPPDITWHKDGRAIVESIRQRVLSSGSLQIAFVQP | |
| NOV43b | ISPHLKEYVIAVDKPITLSCEADGLPPPDITWHKDGRAIVESIRQRVLSSGSLQIAFVQP | |
| NOV43c | ISPHLKEYVIAVDKPITLSCEADGLPPPDITWHKDGRAIVESIRQRVLSSGSLQITFVQP | |
| NOV43d | ISPHLKEYVTAVDKPITLSCEADGLPPPDITWHKDGRAIVESIRQRVLSSGSLQIAFVQP | |
| NOV43a | GDAGHYTCMAANVAGSSSTSTKLTVHVPPRIRSTEGHYTVNENSQAILPCVADGIPTPAI | |
| NOV43b | GDAGHYTCMAANVAGSSSTSTKLTVHVPPRIRSTEGHYTVNENSQAILPCVADGIPTPAI | |
| NOV43c | GDAGHYTCMAANVAGSSSTSTKLTVHVPPRIRSTEGHYTVNENSQAILPCVADGIPTPAI | |
| NOV43d | GDAGHYTCMAANVAGSSSTSTKLTVHVPPRIRSTEGHYTVNENSQAILPCVADGIPTPAI | |
| NOV43a | NWKKDNVLLANLLGKYTAEPYGELILENVVLEDSGFYTCVANNAAGEDTHTVSLTVHVLP | |
| NOV43b | NWKKDNVLLANLLGKYTAEPYGELILENVVLEDSGFYTCVANNAAGEDTHTVSLTVHVLP | |
| NOV43c | NWKKDNVLLANLLGKYTAEPYGELILENVVLEDSGFYTCVANNAAGEDTHTVSLTVHVLP | |
| NOV43d | NWKKDNVLLANLLGKYTAEPYGELILENVVLEDSGFYTCVANNAAGEDTHTVSLTVHVLP | |
| NOV43a | TFTELPGDVSLNKGEQLRLSCKATGIPLPKLTWTFNNNIIPAHFDSVNGHSELVIERVSK | |
| NOV43b | TFTELPGDVSLNKGEQLRLSCKATGIPLPKLTWTFNNNIIPAHFDSVNGHSELVIERVSK | |
| NOV43c | TFTELPGDVSLNKGEQLRLSCKATGIPLPKLTWTFNNNIIPAHFDSVNGHSELVIERVSK | |
| NOV43d | TFTELPGDVSLNKGEQLRLSCKATGIPLPKLTWTFNNNIIPAHFDSVNGHSELVIERVSK | |
| NOV43a | EDSGTYVCTAENSVGFVKAIGFVYVKEPPVFKGDYPSNWIEPLGGNAILNCEVKGDPTPT | |
| NOV43b | EDSGTYVCTAENSVGFVKAIGFVYVKEPPVFKGDYPSNWIEPLGGNAILNCEVKGDPTPT | |
| NOV43c | EDSGTYVCTAENSVGFVKAIGFVYVKEPPVFKGDYPSHWIEPLGGNAILNCEVKGDPTPT | |
| NOV43d | EDSGTYVCTAENSVGFVKAIGFVYVKEPPVFKGDYPSNWIEPLGGNAILNCEVKGDPTPT | |
| NOV43a | IQWNRKGVDIEISHRIRQLGNGSLAIYGTVNEDAGDYTCVATNEAGVVERSMSLTLQSPP | |
| NOV43b | IQWNRKGVDIEISHRIRQLGNGSLAIYGTVNEDAGDYTCVATNEAGVVERSMSLTLRSPP | |
| NOV43c | IQWNRKGVDIEISHRIRQLGNGSLAIYGTVNEDAGDYTCVATNEAGVVERSMSLTLQSPP | |
| NOV43d | IQWNRKGVDIEISHRIRQLGNGSLAIYGTVNEDAGDYTCVATNEAGVVERSMSLTLQSPP | |
| NOV43a | IITLEPVETVINAGGKIILNCQATGEPQPTITWSRQGHSISWDDRVNVLSNNSLYIADAQ | |
| NOV43b | IITLEPVETVINAGGKIILNCQATGEPQPTITWSRQGHSISWDDRVNVLSNNSLYIADAQ | |
| NOV43c | IITLEPVETVINAGGKIILNCQATGEPQPTITWSRQGHSISWDDRVNVLSNNSLYIADAQ | |
| NOV43d | IITLEPVETVINAGGKIILNCQATGEPQPTITWSRQGHSISWDDRVNVLSNNSLYIADAQ | |
| NOV43a | KEDTSEFECVARNLMGSVLVRVPVIVQVHGGFSQWSAWRACSVTCGKGIQKRSRLCNQPL | |
| NOV43b | KEDTSEFECVARNLMGSVLVRVPVIVQVHGGFSQWSAWRACSVTCGKGIQKRSRLCNQPL | |
| NOV43c | KEDTSEFECVARNLMGSVLVRVPVIVQVHGGFSQWSAWRACSVTCGKGIQKRSRLCNQPL | |
| NOV43d | KEDTSEFECVARNLMGSVLVRVPVIVQVHGGFSQWSAWPACSVTCGKGIQKRSRLCNQPL | |
| NOV43a | PANGGKPCQGSDLEMRNCQNKPCPVDGSWSEWSLWEECTRSCGRGNQTRTRTCNNPSVQH | |
| NOV43b | PANGGKPCQGSDLEMRNCQNKPCPVDGSWSEWSLWEECTRSCGRGNQTRTRTCNNPSVQH | |
| NOV43c | PANGGKPCQGSDLEMRNCQNKPCPVDGSWSEWSLWEECTRSCGRGNQTRTRTCNNPSVQH | |
| NOV43d | PANGGKPCQGSDLEMPNCQNKPCPVDGSWSEWSLWEECTRSCGRGNQTRTRTCNNPSVQH | |
| NOV43a | GGRPCEGNAVEIIMCNIRPCPVHGAWSAWQPWGTCSESCGKGTQTRARLCNNPPPAFGGS | |
| NOV43b | GGRPCEGNAVEIIMCNIRPCPVHGAWSAWQLWGTCSESCGKGTQTRARLCNNPPPAFGGS | |
| NOV43c | GGRPCEGNAVEIIMCNIRPCPVHGAWSAWQPWGTCSESCGKGTQTRARLCNNPPPAFGGS | |
| NOV43d | GGRPCEGNAVEIIMCNIRPCPVHGAWSAWQPWGTCSESCGKGTQTRARLCNNPPPAFGGS | |
| NOV43a | YCDGAETQMQVCNERICPIHGKWATWASWSACSVSCGGGARQRTRGCSDPVPQYGGRKCE | |
| NOV43b | YCDGAETQMQVCNERNCPIHGKWATWASWSACSVSCGGGARQRTRGCSDPVPQYGGRKCE | |
| NOV43c | YCDGAETQMQVCNERNCPVHGKWATWASWSACSVSCGGGARQRTRGCSDPVPQYGGRKCE | |
| NOV43d | YCDGAETQMQVCNERNCPIHGKWATWASWSACSVSCGGGARQRTRGCSDPVPQYGGRKCE | |
| NOV43a | GSDVQSDFCNSDPCPSECWKYPW------------------------------------- | |
| NOV43b | GSDVQSDFCNSDPCPSECWKYPWLE----------------------------------- | |
| NOV43c | GSDVQSDFCNSDPCPTHGNWSPWSGWGTCSRTCNGGQMRRYRTCDNPPPSNGGRACGGPD | |
| NOV43d | GSDVQSDFCNSDPCPTHGNWSPWSGWGTCSRTCNGGQMRRYRTCDNPPPSNGGRACGGPD | |
| NOV43a | ------------------------------------------------------------ | |
| NOV43b | ------------------------------------------------------------ | |
| NOV43c | SQIQRCNTDMCPVDGSWGSWHSWSQCSASCGGGEKTRKRLCDHPVPVKGGRPCPGDTTQV | |
| NOV43d | SQIQRCNTDMCPVDGSWGSWHSWSQCSASCGGGEKTRKRLCDHPVPVKGGRPCPGDTTQV | |
| NOV43a | ------------------------------------------------------------ | |
| NOV43b | ------------------------------------------------------------ | |
| NOV43c | TRCNVQACPGGPQRARGSVIGNINDVEFGIAFLNATITDSPNSDTRIIRAKITNVPRSLG | |
| NOV43d | TRCNVQACPGGPQRARGSVIGNINDVEFGIAFLNATITDSPNSDTRIIRAKITNVPRSLG | |
| NOV43a | ------------------------------------------------------------ | |
| NOV43b | ------------------------------------------------------------ | |
| NOV43c | SAMRKIVSILNPIYWTTAKEIGEAVNGFTLTNAVFKRETQVEFATGEILQMSHIARGLDS | |
| NOV43d | SAMRKIVSILNPIYWTTAKEIGEAVNGFTLTNAVFKRETQVEFATGEILQMSHIARGLDS | |
| NOV43a | ------------------------------------------------------------ | |
| NOV43b | ------------------------------------------------------------ | |
| NOV43c | DGSLLLDIVVSGYVLQLQSPAEVTVKDYTEDYIQTGPGQLYAYSTRLFTIDGISIPYTWN | |
| NOV43d | DGSLLLDIVVSGYVLQLQSPAEVTVKDYTEDYIQTGPGQLYAYSTRLFTIDGISIPYTWN | |
| NOV43a | ------------------------------------------------------------ | |
| NOV43b | ------------------------------------------------------------ | |
| NOV43c | HTVFYDQAQGRNPFLVETLHASSVESDYNQIEETLGFKTHASISKGDRSNQCPSGFTLDS | |
| NOV43d | HTVFYDQAQGRMPFLVETLHASSVESDYNQIEETLGFKIHASISKGDRSNQCPSGFTLDS | |
| NOV43a | ------------------------------------------------------------ | |
| NOV43b | ------------------------------------------------------------ | |
| NOV43c | VGPFCADEDECAAGNPCSHSCHNAMGTYYCSCPKGLTIAADGRTCQDIDECALGRRTCHA | |
| NOV43d | VGPFCADEDECAAGNPCSHSCHNAMGTYYCSCPKGLTIAADGRTCQDIDECALGRHTCHA | |
| NOV43a | ------------------------------------------------------------ | |
| NOV43b | ------------------------------------------------------------ | |
| NOV43c | GQDCDNTIGSYRCVVRCGSGFRRTSDGLSCQDINECQESSPCHQRCFNAIGSFHCGCEPG | |
| NOV43d | GQDCDNTIGSYRCVVRCGSGFRRTSDGLSCQDINECQESSPCHQRCFNAIGSFHCGCEPG | |
| NOV43a | ------------------------------------------------------------ | |
| NOV43b | ------------------------------------------------------------ | |
| NOV43c | YQLKGRKCMDVNECRQNVCRPDQHCKNTRGGYKCIDLCPNGMTKAENGTCIDIDECKDGT | |
| NOV43d | YQLKGRKCMDVNECRQNVCRPDQHCKNTRGGYKCIDLCPNGMTKAENGTCIDIDECKDGT | |
| NOV43a | ------------------------------------------------------------ | |
| NOV43b | ------------------------------------------------------------ | |
| NOV43c | HQCRYNQICENTRGSYRCVCPRGYRSQGVGRPCMDINECEQVPKPCAHQCSNTPGSFKCI | |
| NOV43d | HQCRYNQICENTRGSYRCVCPRGYRSQGVGRPCMDI------------------------ | |
| NOV43a | ------------------------------------------------------------ | |
| NOV43b | ------------------------------------------------------------ | |
| NOV43c | CPPGQHLLGDGKSCAGLERLPNYGTQYSSYNLARFSPVRNNYQPQQHYRQYSHLYSSYSE | |
| NOV43d | ------------------------------------------------------------ | |
| NOV43a | ------------------------------------------------------------ | |
| NOV43b | ------------------------------------------------------------ | |
| NOV43c | YRNSRTSLSRTRRTIRKTCPEGSEASHDTCVDIDECENTDACQHECKNTFGSYQCICPPG | |
| NOV43d | ---------------------------------DECENTDACLHECKNTFGSYQCICPPG | |
| NOV43a | ------------------------------------------------------------ | |
| NOV43b | ------------------------------------------------------------ | |
| NOV43c | YQLTHNGKTCQDIDECLEQNVHCGPNRMCFNMRGSYQCIDTPCPPNYQRDPVSGFCLKNC | |
| NOV43d | YQLTHNGKTCQDIDECLEQNVHCGPNRMCFNMRGSYQCIDTPCPPNYQRDPASGFCLKNC | |
| NOV43a | ------------------------------------------------------------ | |
| NOV43b | ------------------------------------------------------------ | |
| NOV43c | PPNDLECALSPYALEYKLVSLPFGIATNQDLIRLVAYTQDGVMHPRTTFLMVDEEQTVPF | |
| NOV43d | PPNDLECALSPYALEYKLVSLPFGIATNQDLIRLVAYTQDGVMHPRTTFLMVDEEQTVPF | |
| NOV43a | ------------------------------------------------------- | |
| NOV43b | ------------------------------------------------------- | |
| NOV43c | ALRDENLKGVVYTTRPLREAETYRMRVRASSYSANGTIEYQTTFIVYIAVSAYPY | |
| NOV43d | ALRDENLKGVVYTTRPLREAETYRNRVRASSYSANGTIEYQTTFIVYIAVSAYPY | |

[0604] Further analysis of the NOV43a protein yielded the following properties shown in Table 43C.

TABLE 43C
Protein Sequence Properties NOV43a

| | |
|---|---|
| SignalP analysis: | No Known Signal Sequence Predicted |
| PSORT II analysis: | |

| PSG: | a new signal peptide prediction method | |
|---|---|---|
| | N-region: | length 0; pos. chg 0; neg. chg 0 |
| | H-region: | length 13; peak value 2.20 |
| | PSG score: | −2.20 |

| | |
|---|---|
| GvH: | von Heijne's method for signal seq. recognition |
| | GvH score (threshold: −2.1): −8.62 |
| | possible cleavage site: between 48 and 49 |

>>> Seems to have no N-terminal signal peptide

| ALOM: | Klein et al's method for TM region allocation | |
|---|---|---|
| | Init position for calculation: 1 | |
| | Tentative number of TMS(s) for the threshold 0.5: 0 | |
| | number of TMS(s) . . . fixed | |
| | PERIPHERAL | Likelihood = 0.63 (at 454) |

| | ALOM score: 0.63 (number of TMSs: 0) | | | |
|---|---|---|---|---|
| MITDISC: | discrimination of mitochondrial targeting seq | | | |
| | R content: | 0 | Hyd Moment(75): | 4.71 |
| | Hyd Moment(95): | 3.65 | G content: | 2 |
| | D/E content: | 1 | S/T content: | 2 |

| | |
|---|---|
| | Score: −5.83 |
| Gavel: | prediction of cleavage sites for mitochondrial preseq |
| | cleavage site motif not found |

NUCDISC: discrimination of nuclear localization signals

| | |
|---|---|
| | pat4: none |
| | pat7: none |
| | bipartite: none |
| | content of basic residues: 8.5% |
| | NLS Score: −0.47 |
| KDEL: | ER retention motif in the C-terminus: none |

ER Membrane Retention Signals:

KKXX-like motif in the C-terminus: WKYP

SKL: peroxisomal targeting signal in the C-terminus: none
PTS2: 2nd peroxisomal targeting signal: none
VAC: possible vacuolar targeting motif: none
RNA-binding motif: none
Actinin-type actin-binding motif:

type 1: none
type 2: none

NMYR: N-myristoylation pattern: none
Prenylation motif: none
memYQRL: transport motif from cell surface to Golgi: none
Tyrosines in the tail: none
Dileucine motif in the tail: none
checking 63 PROSITE DNA binding motifs: none
checking 71 PROSITE ribosomal protein motifs: none
checking 33 PROSITE prokaryotic DNA binding motifs: none

| | |
|---|---|
| NNCN: | Reinhardt's method for Cytoplasmic/Nuclear |
| | discrimination |
| | Prediction: nuclear |
| | Reliability: 55.5 |
| COIL: | Lupas's algorithm to detect coiled-coil regions |
| | total: 0 residues |

Final Results (k = 9/23):

73.9%: nuclear
13.0%: mitochondrial
13.0%: cytoplasmic

>> prediction for CG56914-01 is nuc (k = 23)

[0605] A search of the NOV43a protein against the Geneseq database, a proprietary database that contains sequences published in patents and patent publication, yielded several homologous proteins shown in Table 43D.

TABLE 43D
Geneseq Results for NOV43a

| | | NOV43a | Identities/ | | |
|---|---|---|---|---|---|
| | | Residues/ | Similarities for | | |
| Geneseq | Protein/Organism/Length | Match | the Matched | | Expect |
| Identifier | [Patent #, Date] | Residues | Region | | Value |
| ABU12084 | Human NOV25c CG56914-03 protein | 1 . . . 707 | 701/707 | (99%) | 0.0 |
| | SEQ ID 88 - Homo sapiens, 1902 aa. | 441 . . . 1147 | 702/707 | (99%) | |
| | [WO200281625-A2, 17-OCT-2002] | | | | |
| ABP60991 | Novel human protein. SEQ ID 78 - | 1 . . . 707 | 701/707 | (99%) | 0.0 |
| | Homo sapiens, 5635 aa. | 4057 . . . 4763 | 702/707 | (99%) | |
| | [WO200250105-A1, 27-JUN-2002] | | | | |
| AAB47771 | Human thrombospondin protein, | 1 . . . 707 | 699/707 | (98%) | 0.0 |
| | BTL.012 - Homo sapiens, 1336 aa. | 184 . . . 890 | 702/707 | (98%) | |
| | [WO200174852-A2, 11-OCT-2001] | | | | |
| ABU12083 | Human NOV25b CG93858-02 protein | 1 . . . 707 | 698/707 | (98%) | 0.0 |
| | SEQ ID 86 - Homo sapiens, 2572 aa. | 1111 . . . 1817 | 701/707 | (98%) | |
| | [WO200281625-A2, 17-OCT-2002] | | | | |
| ABG03933 | Novel human diagnostic protein #3924 - | 1 . . . 471 | 471/471 | (100%) | 0.0 |
| | Homo sapiens, 1240 aa. | 442 . . . 912 | 471/471 | (100%) | |
| | [WO200175067-A2, 11-OCT-2001] | | | | |

[0606] In a BLAST search of public sequence databases, the NOV43a protein was found to have homology to the proteins shown in the BLASTP data in Table 43E.

TABLE 43E
Public BLASTP Results for NOV43a

| | | NOV43a | Identities/ | |
|---|---|---|---|---|
| Protein | | Residues/ | Similarities for | |
| Accession | | Match | the Matched | Expect |
| Number | Protein/Organism/Length | Residues | Portion | Value |
| Q96RW7 | Hemicentin - Homo sapiens | 1 . . . 707 | 700/707 (99%) | 0.0 |
| | (Human), 5636 aa. | 4058 . . . 4764 | 701/707 (99%) | |
| Q96SC3 | Fibulin-6 - Homo sapiens (Human), | 1 . . . 707 | 698/707 (98%) | 0.0 |
| | 2673 aa (fragment). | 1095 . . . 1801 | 701/707 (98%) | |
| Q8NDA2 | Hypothetical protein - Homo sapiens | 2 . . . 489 | 208/503 (41%) | e−111 |
| | (Human), 1340 aa (fragment). | 824 . . . 1326 | 285/503 (56%) | |
| Q96DN3 | Hypothetical protein FLJ31995 - | 1 . . . 460 | 159/475 (33%) | 1e−63 |
| | Homo sapiens (Human), 1252 aa | 782 . . . 1252 | 235/475 (49%) | |
| | (fragment). | | | |
| Q8I0L3 | C. elegans him-4 protein | 2 . . . 511 | 159/529 (30%) | 1e−59 |
| | (corresponding sequence F15G9.4a) - | 3014 . . . 3521 | 241/529 (45%) | |
| | Caenorhabditis elegans, 5175 aa. | | | |

[0607] PFam analysis predicts that the NOV43a protein contains the domains shown in the Table 43F.

TABLE 43F
Domain Analysis of NOV43a

| | | Identities/ | |
|---|---|---|---|
| Pfam | NOV43a | Similarities for | Expect |
| Domain | Match Region | the Matched Region | Value |
| ig | 37 . . . 94 | 21/61 (34%) | 1.1e−09 |
| | | 44/61 (72%) | |
| ig | 127 . . . 185 | 17/62 (27%) | 3.2e−06 |
| | | 38/62 (61%) | |
| ig | 218 . . . 274 | 20/60 (33%) | 1.3e−10 |
| | | 44/60 (73%) | |
| ig | 308 . . . 365 | 21/61 (34%) | 5.3e−09 |
| | | 43/61 (70%) | |
| ig | 398 . . . 455 | 18/61 (30%) | 3.5e−08 |
| | | 42/61 (69%) | |
| tsp_1 | 477 . . . 527 | 28/53 (53%) | 8.9e−17 |
| | | 37/53 (70%) | |
| tsp_1 | 534 . . . 584 | 25/53 (47%) | 4.8e−14 |
| | | 42/53 (79%) | |
| tsp_1 | 591 . . . 641 | 22/53 (42%) | 2.7e−12 |
| | | 36/53 (68%) | |
| tsp_1 | 648 . . . 698 | 23/53 (43%) | 1.7e−14 |
| | | 37/53 (70%) | |

### Example 44

[0608] The NOV44 clone was analyzed, and the nucleotide and encoded polypeptide sequences are shown in Table 44A.

TABLE 44A
NOV44 Sequence Analysis

| | | |
|---|---|---|
| NOV44a, CG56959-02 | SEQ ID NO: 1005 | 1599 bp |
| DNA Sequence | ORF Start: ATG at 25 | ORF Stop: TAA at 1594 |

GACTCACGAAAGAAAAGCCAAACGATGAGTTTCCACAAGGAGGACGGAGTGAACAGTCTGTGCCAGAA
GGCTCTGCACATCGTCACCGAGCTGTGCTTCGCCGGCCAGGTGGAGTGGGAGAAGTGCTCGGGCATCT
TCCCTCGGGACAGGGGCAGCCAGGGCGGAAGCAGCACAGATATTTCAGTCAGCCTGTTAGCAGTCGTT
GTCAGCTTTTGTGGACTGGCCTTGTTGGTTGTCTCACTTTTTGTCTTCTGGAAGCTGTGTTGGCCATG
CTGGAAAAGCAAACCTGTGACTTCCAACATCACTACCCTTCCACAGAGCATTTCAAGTGCTCCTACTG
AAGTTTTTGAGACTGAAGAGAAAAAAGAAATTAAGGAAAATGAAAAGCCAGCCGTAAAAGCTATTGAG
CCTGCAATAAAAATCAGCCACACTTCCCCTGACATCCCAGCAGAAGTCCAAACTGCTTTAAAAGAACA
TTTAATTAAACATGCACGTGTGCAAAGACAAATTACTGAGCCTACGTCATCAACCCGCCACAGTTCCT
TCCGAAGACACCTGCCGAGGCAAATGCAGGTTTCCAGTGTTGATTTTAGCATGGGCACAGAACCTGTT
TTACAACGAGGAGAAACAACAACCAGCATTGGGAGGATAAAGCCAGAACTCTACAAACAGAAATCAGT
TGACTCTGAGGGCAACCAAAACGAAGATGTCAAAATCTGTGGGAAACTTAACTTTACCCTCCAGTATG
ATTATGAAAATGAACTTCTAGTTGTTAAAATTATCAAAGCTTTAGATCTCCCTGCTAAAGACTTCACA
GGAACTTCTGACCCTTATGTGAAGATGTATCTTCTTCCAGATAGGAAAAAGAAATTTCAGACCCGCGT
GCACAGAAAGACTTTAAATCCTCTATTTGATGAAACTTTTCAATTTCCTGTAGCATATGATCAACTAA
GCAACCGAAAACTACATTTCAGTGTGTATGATTTTGACAGATTTTCTAGACATGACATGATTGGGGAA
GTGATTCTTGATAATTTGTTTGAAGTCTCTGATCTCTCCAGGGAAGCCACAGTATGGAAAGATATTCA
CTGTGCTACCACAGAAAGTATAGACCTGGGTGAAATCATGTTTTCCCTTTGTTACCTACCGACGGCTG
GGCGTATGACATTGACAGTCATTAAGTGCAGAAATCTGAAGGCGATGGATATTACTGGCTCATCAGAT
CCTTATGTCAAAGTGTTCCTGATGTGTGAAGGTCGAAGATTAAAAAAGAGGAAAACAACTACAAAGAA
AAACACTCTAAACCCTGTGTACAATGAGGCCATTATTTTTGACATCCCTCCAGAGAACGTGGACCAGG
TCAGCCTCTCCATTGCGGTCATGGATTACGATAGGGTAGGACACAATGAGGTCATAGGAGTGTGCAGA
ACAGGACTGGATGCTGAGGGTCTTGGGCGAGACCACTGGAATGAAATGCTGGCCTATCATCGAAAACC
AATAACGCACTGGCACCCATTGCTGGAGTTACCTGGCCGGGCGACCAGTTTTGATAGTCAAGGATCCT
GCCCTTCTCCTAAACCACCTTCCACACCATAATGC

| | | | |
|---|---|---|---|
| NOV44a, CG56959-02 | SEQ ID NO: 1006 | 523 aa | MW at 59186.2kD |
| Protein Sequence | | | |

MSFHKEDGVNSLCQKALHIVTELCFAGQVEWEKCSGIFPRDRGSQGGSSTDISVSLLAVVVSFCGLAL
LVVSLFVFWKLCWPCWKSKPVTSNITTLPQSISSAPTEVFETEEKKEIKENEKPAVKAIEPAIKISHT
SPDIPAEVQTALKEHLIKHARVQRQITEPTSSTRHSSFRRHLPRQMQVSSVDFSMGTEPVLQRGETTT
SIGRIKPELYKQKSVDSEGNQNEDVKICGKLNFTLQYDYENELLVVKIIKALDLPAKDFTGTSDPYVK
MYLLPDRKKKFQTRVHRKTLNPLFDETFQFPVAYDQLSNRKLHFSVYDFDRFSRHDMIGEVILDNLFE
VSDLSREATVWKDIHCATTESIDLGEIMFSLCYLPTAGPMTLTVIKCRNLKAMDITGSSDPYVKVFLM
CEGRRLKKRKTTTKKNTLNPVYNEAIIFDIPPENVDQVSLSIAVMDYDRVGHNEVIGVCRTGLDAEGL
GRDHWNEMLAYHRKPITHWHPLLELPGRATSFDSQGSCPSPKPPSTP

| | | |
|---|---|---|
| NOV44b, CG56959-01 | SEQ ID NO: 1007 | 1697 bp |
| DNA Sequence | ORF Start: ATG at 78 | ORF Stop: TAA at 1647 |

CAGAGGGGTTAGAGGTACGGGAAGAGGAAAAGACGGCTAACTGGGAAAAAAAGAGAAAACGAAAGAAA
AGCCAAACGATGAGTTTCCACAAGGAGGACGGAGTGAACAGTCTGTGCCAGAAGGCTCTGCACATCGT
CACCGAGCTGTGCTTCGCCGGCCAGGTGGAGTGGGAGAAGTGCTCGGGCATCTTCCCTCGGGACAGGG
GCAGCCAGGGCGGAAGCAGCACAGATATTTCAGTCAGCCTGTTAGCTGTCGTTGTCAGCTTTTGTGGA
CTGGCCTTGTTGGTTGTCTCACTTTTTGTCTTCTGGAAGCTGTGTTGGCCATGCTGGAAAAGCAAACC
TGTGACTTCCAACATCACTACGCTTCCACAGAGCATTTCAAGTGCTCCTACTGAAGTTTTTGAGACTG
AAGAGAAAAAAGAAATTAAGGAAAATGAAAAGCCAGCCGTAAAAGCTATTGAGCCTGCAATAAAAATC
AGCCACACTTCCCCTGACATCCCAGCAGAAGTCCAAACTGCTTTAAAAGAACATTTAATTAAACATGC
ACGTGTGCAAAGACAAATTACTGAGCCTACGTCATCAACCCGGCACAGTTCCTTCCGAAGACACCTGC
CGAGGCAAATGCAGGTTTCCAGTGTTGATTTTAGCATGGGCACAGAACCTGTTTTACAACGAGGAGAA
ACAACAACCAGCATTGGGAGGATAAAGCCAGAACTCTACAAACAGAAATCAGTTGACTCTGAGGGCAA
CCAAAACGAAGATGTCAAAATCTGTGGGAAACTTAACTTTACCCTCCAGTATGATTATGAAAATGAAC
TTCTAGTTGTTAAAATTATCAAAGCTTTAGATCTCCCTGCTAAAGACTTCACAGGAACTTCTGACCCT
TATGTGAAGATGTATCTTCTTCCAGATAGGAAAAAGAAATTTCAGACCCGCGTGCACAGAAAGACTTT
AAATCCTCTATTTGATGAAACTTTTCAATTTCCTGTAGCATATGATCAACTAAGCAACCGAAAACTAC
ATTTCAGTGTGTATGATTTTGACAGATTTTCTAGACATGACATGATTGGGGAAGTGATTCTTGATAAT
TTGTTTGAAGTCTCTGATCTCTCCAGGGAAGCCACAGTATGGAAAGATATTCACTGTGCTACCACAGA
AAGTATAGACCTGGGTGAAATCATGTTTTCCCTTTGTTACCTACCGACGGCTGGGCGTATGACATTGA
CAGTCATTAAGTGCAGAAATCTGAAGGCGATGGATATTACTGGCTCATCAGATCCTTATGTCAAAGTG
TCCCTGATGTGTGAAGGTCGAAGATTAAAAAAGAGGAAAACAACTACAAAGAAAAACACTCTAAACCC
TGTGTACAATGAGGCCATTATTTTTGACATCCCTCCAGAGAACGTGGACCAGGTCAGCCTCTCCATTG
CGGTCATGGATTACGATAGGGTAGGACACAATGAGGTCATAGGAGTGTGCAGAACAGGACTGGATGCT
GAGGGTCTTGGGCGAGACCACTGGAATGAAATGCTGGCCTATCATCGAAAACCAATAACGCACTGGCA
CCCATTGCTGGAGTTACCTGGCCGGGCGACCAGTTTTGATAGTCAAGGATCCTGCCCTTCTCCTAAAC
CACCTTCCACACCATAATGCCTCCAAAATGAGACCATGATATTAAGCATCTAGGATCACGTGCTC

| | | | |
|---|---|---|---|
| NOV44b, CG56959-01 | SEQ ID NO: 1008 | 523 aa | MW at 59126.1kD |
| Protein Sequence | | | |

MSFHKEDGVNSLCQKALHIVTELCFAGQVEWEKCSGIFPRDRGSQGGSSTDISVSLLAVVVSFCGLAL
LVVSLFVFWKLCWPCWKSKPVTSNITTLPQSISSAPTEVFETEEKKEIKENEKPAVKAIEPAIKISHT
SPDIPAEVQTALKEHLIKHARVQRQITEPTSSTRHSSFRRHLPRQMQVSSVDFSMGTEPVLQRGETTT
SIGRIKPELYKQKSVDSEGNQNEDVKICGKLNFTLQYDYENELLVVKIIKALDLPAKDFTGTSDPYVK
MYLLPDRKKKFQTRVHRKTLNPLFDETFQFPVAYDQLSNRKLHFSVYDFDRFSRHDMIGEVILDNLFE
VSDLSREATVWKDIHCATTESIDLGEIMFSLCYLPTAGRMTLTVIKCRNLKAMDITGSSDPYVKVSLM
CEGRRLKKRKTTTKKNTLNPVYNEAIIFDIPPENVDQVSLSIAVMDYDRVGHNEVIGVCRTGLDAEGL
GRDHWNEMLAYHRKPITHWHPLLELPGRATSFDSQGSCPSPKPPSTP

[0609] A ClustalW comparison of the above protein sequences yields the following sequence alignment shown in Table 44B.

TABLE 44B
Comparison of the NOV44 protein sequences.

| | |
|---|---|
| NOV44a | MSFHKEDGVNSLCQKALHIVTELCFAGQVEWEKCSGIFPRDRGSQGGSSTDISVSLLAVV |
| NOV44b | MSFHKEDGVNSLCQKALHIVTELCFAGQVEWEKCSGIFPRDRGSQGGSSTDISVSLLAVV |
| NOV44a | VSFCGLALLVVSLFVFWKLCWPCWKSKPVTSNITTLPQSISSAPTEVFETEEKKEIKENE |
| NOV44b | VSFCGLALLVVSLFVFWKLCWPCWKSKPVTSNITTLPQSISSAPTEVFETEEKKEIKENE |
| NOV44a | KPAVKAIEPAIKISHTSPDIPAEVQTALKEHLIKHARVQRQITEPTSSTRHSSFRRHLPR |
| NOV44b | KPAVKAIEPAIKISHTSPDIPAEVQTALKEHLIKHARVQRQITEPTSSTRHSSFRRHLPR |
| NOV44a | QMQVSSVDFSMGTEPVLQRGETTTSIGRIKPELYKQKSVDSEGNQNEDVKICGKLNFTLQ |
| NOV44b | QMQVSSVDFSMGTEPVLQRGETTTSIGRIKPELYKQKSVDSEGNQNEDVKICGKLNFTLQ |
| NOV44a | YDYENELLVVKIIKALDLPAKDFTGTSDPYVKMYLLPDRKKKFQTRVHRKTLNPLFDETF |
| NOV44b | YDYENELLVVKIIKALDLPAKDFTGTSDPYVKMYLLPDRKKKFQTRVHRKTLNPLFDETF |
| NOV44a | QFPVAYDQLSNRKLHFSVYDFDRFSRHDMIGEVILDNLFEVSDLSREATVWKDIHCATTE |
| NOV44b | QFPVAYDQLSNRKLHFSVYDFDRFSRHDMIGEVILDNLFEVSDLSREATVWKDIHCATTE |
| NOV44a | SIDLGEIMFSLCYLPTAGRMTLTVIKCFNLKAMDITGSSDPYVKVFLMCEGPRLKKRKTT |
| NOV44b | SIDLGEIMFSLCYLPTAGRMTLTVIKCRNLKAMDITGSSDPYVKVSLMCEGPRLKKRKTT |
| NOV44a | TKKNTLNPVYNEAIIFDIPPENVDQVSLSIAVMDYDRVGHNEVIGVCRTGLDAEGLGRDH |
| NOV44b | TKKNTLNPVYNEAIIFDIPPENVDQVSLSIAVMDYDRVGHNEVIGVCRTGLDAEGLGRDH |
| NOV44a | WNEMLAYHRKPITHWHPLLELPGRATSFDSQGSCPSPKPPSTP |
| NOV44b | WNEMLAYHRKPITHWHPLLELPGRATSFDSQGSCPSPKPPSTP |
| NOV44a | (SEQ ID NO: 1006) |
| NOV44b | (SEQ ID NO: 1008) |

[0610] Further analysis of the NOV44a protein yielded the following properties shown in Table 44C.

TABLE 44C
Protein Sequence Properties NOV44a

| | |
|---|---|
| SignalP analysis: | Cleavage site between residues 32 and 33 |
| PSORT II analysis: | |

| PSG: | a new signal peptide prediction method | |
|---|---|---|
| | N-region: | length 7; pos. chg 1; neg. chg 2 |
| | H-region: | length 7; peak value 0.00 |
| | PSG score: | −4.40 |

| | |
|---|---|
| GvH: | von Heijne's method for signal seq. recognition |
| | GvH score (threshold: −2.1): −7.65 |
| | possible cleavage site: between 28 and 29 |

>>> Seems to have no N-terminal signal peptide

| ALOM: | Klein et al's method for TM region allocation | | |
|---|---|---|---|
| | Init position for calculation: 1 | | |
| | Tentative number of TMS(s) for the threshold 0.5: 1 | | |
| | Number of TMS(s) for threshold 0.5: 1 | | |
| | INTEGRAL | Likelihood = | Transmembrane 59-75 |
| | | −11.36 | |

| | |
|---|---|
| PERIPHERAL | Likelihood = 4.35 (at 247) |

| | |
|---|---|
| | ALOM score: −11.36 (number of TMSs: 1) |
| MTOP: | Prediction of membrane topology (Hartmann et al.) |
| | Center position for calculation: 66 |
| | Charge difference: 3.0 C(3.0)-N(0.0) |
| | C > N: C-terminal side will be inside |

>>> membrane topology: type 1b (cytoplasmic tail 59 to 523)

| MITDISC: | discrimination of mitochondrial targeting seq | | | |
|---|---|---|---|---|
| | R content: | 0 | Hyd Moment(75): | 5.17 |
| | Hyd Moment(95): | 1.90 | G content: | 0 |
| | D/E content: | 2 | S/T content: | 1 |

| | |
|---|---|
| | Score: −7.37 |
| Gavel: | prediction of cleavage sites for mitochondrial preseq |
| | cleavage site motif not found |

NUCDISC: discrimination of nuclear localization signals

| | |
|---|---|
| | pat4: RKKK (5) at 279 |
| | pat4: KKRK (5) at 415 |
| | pat7: PDRKKKF (5) at 277 |
| | bipartite: none |
| | content of basic residues: 12.6% |
| | NLS Score: 0.58 |
| KDEL: | ER retention motif in the C-terminus: none |

ER Membrane Retention Signals: none
SKL: peroxisomal targeting signal in the C-terminus: none
PTS2: 2nd peroxisomal targeting signal: none
VAC: possible vacuolar targeting motif: none
RNA-binding motif: none
Actinin-type actin-binding motif:

type 1: none
type 2: none

NMYR: N-myristoylation pattern: none
Prenylation motif: none
memYQRL: transport motif from cell surface to Golgi: none
Tyrosines in the tail: too long tail
Dileucine motif in the tail: found

LL at 68
LL at 247
LL at 275
LL at 498

checking 63 PROSITE DNA binding motifs: none
checking 71 PROSITE ribosomal protein motifs: none
checking 33 PROSITE prokaryotic DNA binding motifs: none

| | |
|---|---|
| NNCN: | Reinhardt's method for Cytoplasmic/Nuclear discrimination |
| | Prediction: cytoplasmic |
| | Reliability: 55.5 |
| COIL: | Lupas's algorithm to detect coiled-coil regions |
| | total: 0 residues |

Final Results (k = 9/23):

```
39.1%: nuclear
26.1%: cytoplasmic
13.0%: mitochondrial
  8.7%: vesicles of secretory system
  4.3%: vacuolar
  4.3%: peroxisomal
  4.3%: endoplasmic reticulum
```

>> prediction for CG56959-02 is nuc (k = 23)

[0611] A search of the NOV44a protein against the Geneseq database, a proprietary database that contains sequences published in patents and patent publication, yielded several homologous proteins shown in Table 44D.

TABLE 44D
Geneseq Results for NOV44a

| | | NOV44a | Identities/ | |
|---|---|---|---|---|
| | | Residues/ | Similarities for | |
| Geneseq | Protein/Organism/Length | Match | the Matched | Expect |
| Identifier | [Patent #, Date] | Residues | Region | Value |
| ABJ04645 | Protein of NOVX 6 SEQ ID No 12 - | 1 . . . 523 | 522/523 (99%) | 0.0 |
| | Unidentified, 523 aa. [WO200246409- | 1 . . . 523 | 522/523 (99%) | |
| | A2, 13-JUN-2002] | | | |
| AAO19183 | Human neurotransmission-associated | 1 . . . 523 | 521/533 (97%) | 0.0 |
| | protein NTRAN6 - Homo sapiens, 533 | 1 . . . 533 | 522/533 (97%) | |
| | aa. [WO200266646-A2, 29-AUG-2002] | | | |
| ABP47935 | Human polypeptide SEQ ID NO 365 - | 78 . . . 501 | 296/424 (69%) | e−176 |
| | Homo sapiens, 461 aa. | 33 . . . 450 | 348/424 (81%) | |
| | [US2002042386-A1, 11-APR-2002] | | | |
| AAU19715 | Human novel extracellular matrix | 78 . . . 501 | 296/424 (69%) | e−176 |
| | protein, Seq ID No 365 - Homo | 33 . . . 450 | 348/424 (81%) | |
| | sapiens, 461 aa. [WO200155368-A1, | | | |
| | 02-AUG-2001] | | | |
| ABP69319 | Human polypeptide SEQ ID NO 1366 - | 84 . . . 501 | 291/418 (69%) | e−172 |
| | Homo sapiens, 425 aa. | 3 . . . 414 | 343/418 (81%) | |
| | [WO200270539-A2, 12-SEP-2002] | | | |

[0612] In a BLAST search of public sequence databases, the NOV44a protein was found to have homology to the proteins shown in the BLASTP data in Table 44E.

TABLE 44E
Public BLASTP Results for NOV44a

| | | NOV44a | Identities/ | |
|---|---|---|---|---|
| Protein | | Residues/ | Similarities for | |
| Accession | | Match | the Matched | Expect |
| Number | Protein/Organism/Length | Residues | Portion | Value |
| Q925B8 | Synaptotagmin 10 - Rattus | 1 . . . 523 | 487/523 (93%) | 0.0 |
| | norvegicus (Rat), 523 aa. | 1 . . . 523 | 502/523 (95%) | |
| Q9R0N4 | Synaptotagmin X (SytX) - Mus | 1 . . . 523 | 485/523 (92%) | 0.0 |
| | musculus (Mouse), 523 aa. | 1 . . . 523 | 501/523 (95%) | |
| O08625 | Synaptotagmin X (SytX) - Rattus | 1 . . . 498 | 462/498 (92%) | 0.0 |
| | norvegicus (Rat), 498 aa | 1 . . . 498 | 477/498 (95%) | |
| | (fragment). | | | |
| Q9R0N8 | Synaptotagmin VI - Mus musculus | 13 . . . 501 | 329/496 (66%) | 0.0 |
| | (Mouse), 511 aa. | 12 . . . 500 | 391/496 (78%) | |
| Q62746 | Synaptotagmin VI - Rattus | 13 . . . 501 | 329/496 (66%) | 0.0 |
| | norvegicus (Rat), 511 aa. | 12 . . . 500 | 389/496 (78%) | |

[0613] PFam analysis predicts that the NOV44a protein contains the domains shown in the Table 44F.

TABLE 44F
Domain Analysis of NOV44a

| | | Identities/ | |
|---|---|---|---|
| | | Similarities | |
| Pfam | NOV44a | for the | Expect |
| Domain | Match Region | Matched Region | Value |
| C2 | 248 . . . 334 | 44/89 (49%) | 6.2e−39 |
| | | 83/89 (93%) | |
| C2 | 380 . . . 468 | 38/90 (42%) | 1.6e−35 |
| | | 78/90 (87%) | |

### Example 45

[0614] The NOV45 clone was analyzed, and the nucleotide and encoded polypeptide sequences are shown in Table 45A.

TABLE 45A
NOV45 Sequence Analysis

| | | |
|---|---|---|
| NOV45a, CG57111-01 | SEQ ID NO: 1009 | 2855 bp |
| DNA Sequence | ORF Start: at 3 | ORF Stop: TGA at 2844 |

GAGGGAATGCGCGCAGCTCACAGGCCCTGGGAGTGAGCTGGTGCCCGGCGACCTGGCACCCGCGCCTG
GATATGGGGCGTCTACATCGTCCCAGGAGCAGCACCAGCTACAGGAACCTGCCGCATCTGTTTCTGTT
TTTCCTCTTCGTGGGACCCTTCAGCTGCCTCGGGAGTTACAGCCGGGCCACCGAGCTTCTGTACAGCC
TAAACGAGGGACTACCCGCGGGGGTGCTCATCGGCAGCCTGGCCGAGGACCTGCGGCTGCTGCCCAGG
TCTGCAGGGAGGCCGGACCCGCAGTCGCAGCTGCCAGAGCGCACCGGTGCTGAGTGGAACCCCCCTCT
CTCCTTCAGCCTGGCCTCCCGGGGACTGAGTGGCCAGTACGTGACCCTAGACAACCGCTCTGGGGAGC
TGCACACTTCAGCTCAGGAGATCGACAGGGAGGCCCTGTGTGTTGAAGGGGGTGGAGGGACTGCGTGG
AGCGGCAGCGTTTCCATCTCCTCCTCTCCTTCTGACTCTTGTCTTTTGCTGCTGGATGTGCTTGTCCT
GCCTCAGGAATACTTCAGGTTTGTGAAGGTGAAGATCGCCATCAGAGACATCAATGACAACGCCCCGC
AGTTCCCTGTTTCCCAGATCTCGGTGTGGGTCCCGGAAAATGCACCTGTAAACACCCGACTGGCCATA
GAGCATCCTGCTGTGGACCCAGATGTTGGCATTAATGGGGTTCAGACCTATCGCTTACTGGACTACCA
TGGTATGTTCACCCTGGACGTGGAGGAGAATGAGAATGGGGAGCGCACCCCCTACCTAATTGTCATGG
GTGCTTTGGACAGGGAAACCCAGGACCAGTATGTGAGCATCATCACAGCTGAGGATGGTGGGTCTCCA
CCACTTTTGGGCAGTGCCACTCTCACCATTGGCATCAGTGACATTAATGACAATTGCCCTCTCTTCAC
AGACTCACAAATCAATGTCACTGTGTATGGGAATGCTACAGTGGGCACCCCAATTGCAGCTGTCCAGG
CTGTGGATAAAGACTTGGGGACCAATGCTCAAATTACTTATTCTTACAGTCAGAAAGTTCCACAAGCA
TCTAAGGATTTATTTCACCTGGATGAAAACACTGGAGTCATTAAACTTTTCAGTAAGATTGGAGGAAG
TGTTCTGGAGTCCCACAAGCTCACCATCCTTGCTAATGGACCAGGCTGCATCCCTGCTGTAATCACTG
CTCTTGTGTCCATTATTAAAGTTATTTTCAGACCCCCTGAAATTGTCCCTCGTTACATAGCAAACGAG
ATAGATGGTGTTGTTTATCTGAAAGAACTGGAACCCGTTAACACTCCCATTGCGTTTTTCACCATAAG
AGATCCAGAAGGTAAATACAAGGTTAACTGCTACCTGGATGGTGAAGGGCCGTTTAGGTTATCACCTT
ACAAACCATACAATAATGAATATTTACTAGAGACCACAAAACCTATGGACTATGAGCTACAGCAGTTC
TATGAAGTAGCTGTGGTGGCTTGGAACTCTGAGGGATTTCATGTCAAAAGGGTCATTAAAGTGCAACT
TTTAGATGACAATGATAATGCTCCAATTTTCCTTCAACCCTTAATAGAACTAACCATCGAAGAGAACA
ACTCACCCAATGCCTTTTTGACTAAGCTGTATGCTACAGATGCCGACAGCGAGGAGAGAGGCCAAGTT
TCATATTTTCTGGGACCTGATGCTCCATCATATTTTTCCTTAGACAGTGTCACAGGAATTCTGACAGT
TTCTACTCAGCTGGACCGAGAAGAGAAAGAAAAGTACAGATACACTGTCAGAGCTGTTGACTGTGGGA
AGCCACCCAGAGAATCAGTAGCCACTGTGGCCCTCACAGTGTTGGATAAAAATGACAACAGTCCTCGG
TTTATCAACAAGGACTTCAGCTTTTTTGTGCCTGAAAACTTTCCAGGCTATGGTGAGATTGGAGTAAT
TAGTGTAACAGATGCTGACGCTGGACGAAATGGATGGGTCGCCCTCTCTGTGGTGAACCAGAGTGATA
TTTTTGTCATAGATACAGGAAAGGGTATGCTGAGGGCTAAAGTCTCTTTGGACAGAGAGCAGCAAAGC
TCCTATACTTTGTGGGTTGAAGCTGTTGATGGGGGTGAGCCTGCCCTCTCCTCTACAGCAAAAATCAC
AATTCTCCTTCTAGATATCAATGACAACCCTCCTCTTGTTTTGTTTCCTCAGTCTAATATGTCTTATC
TGTTAGTACTGCCTTCTACTCTGCCAGGCTCCCCGGTTACAGAAGTCTATGCTGTCGACAAAGACACA
GGCATGAATGCTGTCATAGCTTACAGCATCATAGGGAGAAGAGGTCCTAGGCCTGAGTCCTTCAGGAT
TGACCCTAAAACTGGCAACATTACTTTGGAAGAGGCATTGCTGCAGACAGATTATGGGCTCCATCGCT
TACTGGTGAAAGTGAGTGATCATGGTTATCCCGAGCCTCTCCACTCCACAGTCATGGTGAACCTATTT
GTCAATGACACTGTCAGTAATGAGAGTTACATTGAGAGTCTTTTAAGAAAAGAACCAGAGATTAATAT
AGAGGAGAAAGAACCACAAATCTCAATAGAACCGACTCATAGGAAGGTAGAATCTGTGTCTTGTATGC
CCACCTTAGTAGCTCTGTCTGTAATAAGCTTGGGTTCCATCACACTGGTCACAGGGATGGGCATATAC
ATCTGTTTAAGGAAAGGGGAAAAGCATCCCAGGGAAGATGAAAATTTGGAAGTACAGATTCCACTGAA
AGGAAAAATTGACTTGCATATGCGAGAGAGAAAGCCAATGGATATTTCTAATATTTGATATTTCATG

| | | | |
|---|---|---|---|
| NOV45a, CG57111-01 | SEQ ID NO: 1010 | 947 aa | MW at 104405.1kD |
| Protein Sequence | | | |

GNARSSQALGVSWCPATWHPRLDMGRLHRPRSSTSYRNLPHLFLFFLFVGPFSCLGSYSRATELLYSL
NEGLPAGVLIGSLAEDLRLLPRSAGRPDPQSQLPERTGAEWNPPLSFSLASRGLSGQYVTLDNRSGEL
HTSAQEIDREALCVEGGGGTAWSGSVSISSSPSDSCLLLLDVLVLPQEYFRFVKVKIAIRDINDNAPQ
FPVSQISVWVPENAPVNTRLAIEHPAVDPDVGINGVQTYRLLDYHGMFTLDVEENENGERTPYLIVMG
ALDRETQDQYVSIITAEDGGSPPLLGSATLTIGISDINDNCPLFTDSQINVTVYGNATVGTPIAAVQA
VDKDLGTNAQITYSYSQKVPQASKDLFHLDENTGVIKLFSKIGGSVLESHKLTILANGPGCIPAVITA
LVSIIKVIFRPPEIVPRYIANEIDGVVYLKELEPVNTPIAFFTIRDPEGKYKVNCYLDGEGPFRLSPY
KPYNNEYLLETTKPMDYELQQFYEVAVVAWNSEGFHVKRVIKVQLLDDNDNAPIFLQPLIELTIEENN
SPNAFLTKLYATDADSEERGQVSYFLGPDAPSYFSLDSVTGILTVSTQLDREEKEKYRYTVRAVDCGK
PPRESVATVALTVLDKNDNSPRFINKDFSFFVPENFPGYGEIGVISVTDADAGRNGWVALSVVNQSDI
FVIDTGKGMLRAKVSLDREQQSSYTLWVEAVDGGEPALSSTAKITILLLDINDNPPLVLFPQSNMSYL
LVLPSTLPGSPVTEVYAVDKDTGNNAVIAYSIIGRRGPRPESFRIDPKTGNITLEEALLQTDYGLHRL
LVKVSDHGYPEPLHSTVMVNLFVNDTVSNESYIESLLRKEPEINIEEKEPQISIEPTHRKVESVSCMP
TLVALSVISLGSITLVTGMGIYICLRKGEKHPREDENLEVQIPLKGKIDLHMRERKPMDISNI

| | | |
|---|---|---|
| NOV45b, 277726328 | SEQ ID NO: 1011 | 2854 bp |
| DNA Sequence | ORF Start: at 2 | ORF Stop: end of sequence |

GGGATCCGGGAATGCGCGCAGCTCACAGGCCCTGGGAGTGAGCTGGTGCCCGGCGACCTGGCACCCGC
GCCTGGATATGGGGCGTCTACATCGTCCCAGGAGCAGCACCAGCTACAGGAACCTGCCGCATCTGTTT
CTGTTTTTCCTCTTCGTGGGACCCTTCAGCTGCCTCGGGAGTTACAGCCGGGCCACCGAGCTTCTGTA
CAGCCTAAACGAGGGACTACCCGCGGGGGTGCTCATCGGCAGCCTGGCCGAGGACCTGCGGCTGCTGC
CCAGGTCTGCAGGGAGGCCGGACCCGCAGTCGCAGCTGCCAGAGCGCACCGGTGCTGAGTGGAACCCC
CCTCTCTCCTTCAGCCTGGCCTCCCGGGGACTGAGTGGCCAGTACGTGACCCTAGACAACCGCTCTGG
GGAGCTGCACACTTCAGCTCAGGAGATCGACAGGGAGGCCCTGTGTGTTGAAGGGGGTGGAGGGACTG
CGTGGAGCGGCAGCGTTTCCATCTCCTCCTCTCCTTCTGACTCTTGTCTTTTGCTGCTGGATGTGCTT
GTCCTGCCTCAGGAATACTTCAGGTTTGTGAAGGTGAAGATCGCCATCAGAGACATCAATGACAACGC
CCCGCAGTTCCCTGTTTCCCAGATCTCGGTGTGGGTCCCGGAAAATGCACCTGTAAACACCCGACTGG
CCATAGAGCATCCTGCTGTGGACCCAGATGTAGGCATTAATGGGGTACAGACCTATCGCTTACTGGAC
TACCATGGTATGTTCACCCTGGACGTGGAGGAGAATGAGAATGGGGAGCGCACCCCCTACCTAATTGT
CATGGGTGCTTTGGACAGGGAAACCCAGGACCAGTATGTGAGCATCATCATAGCTGAGGATGGTGGGT
CTCCACCACTTTTGGGCAGTGCCACTCTCACCATTGGCATCAGTGACATTAATGACAATTGCCCTCTC
TTCACAGACTCACAAATCAATGTCACTGTGTATGGGAATGCTACAGTGGGCACCCCAATTGCAGCTGT
CCAGGCTGTGGATAAAGACTTGGGGACCAATGCTCAAATTACTTATTCTTACAGTCAGAAAGTTCCAC
AAGCATCTAAGGATTTATTTCACCTGGATGAAAACACTGGAGTCATTAAACTTTTCAGTAAGATTGGA
GGAAGTGTTCTGGAGTCCCACAAGCTCACCATCCTTGCTAATGGACCAGGCTGCATCCCTGCTGTAAT
CACTGCTCTTGTGTCCATTATTAAAGTTATTTTCAGACCCCCTGAAATTGTCCCTCGTTACATAGCAA
ACGAGATAGATGGTGTTGTTTATCTGAAAGAACTGGAACCCGTTAACACTCCCATTGCGTTTTTCACC
ATAAGAGATCCAGAAGGTAAATACAAGGTTAACTGCTACCTGGATGGTGAAGGGCCGTTTAGGTTATC
ACCTTACAAACCATACAATAATGAATATTTACTAGAGACCACAAAACCTATGGACTATGAGCTACAGC
AGTTCTATGAAGTAGCTGTGGTGGCTTGGAACTCTGAGGGATTTCATGTCAAAAGGGTCATTAAAGTG
CAACTTTTAGATGACAATGATAATGCTCCAATTTTCCTTCAACCCTTAATAGAACTAACCATCGAAGA
GAACAACTCACCCAATGCCTTTTTGACTAAGCTGTATGCTACAGATGCCGACAGCGAGGAGAGAGGCC
AAGTTTCATATTTTCTGGGACCTGATGCTCCATCATATTTTTCCTTAGACAGTGTCACAGGAATTCTG
ACAGTTTCTACTCAGCTGGACCGAGAAGAGAAAGAAAAGTACAGATACACTGTCAGAGCTGTTGACTG
TGGGAAGCCACCCAGAGAATCAGTAGCCACTGTGGCCCTCACAGTGTTGGATAAAAATGACAACAGTC
CTCGGTTTATCAACAAGGACTTCAGCTTTTTTGTGCCTGAAAACTTTCCAGGCTATGGTGAGATTGGA
GTAATTAGTGTAACAGATGCTGACGCTGGACGAAATGGATGGGTCGCCCTCTCTGTGGTGAACCAGAG
TGGTATTTTTGTCATAGATACAGGAAAGGGTATGCTGAGGGCTAAAGTCTCTTTGGACAGAGAGCAGC
AAAGCTCCTATACTTTGTGGGTTGAAGCTGTTGATGGGGGTGAGCCTGCCCTCTCCTCTACAGCAAAA
ATCACAATTCTCCTTCTAGATATCAATGACAACCCTCCTCTTGTTTTGTTTCCTCAGTCTAATATGTC
TTATCTGTTAGTACTGCCTTCTACTCTGCCAGGCTCCCCGGTTACAGAAGTCTATGCTGTCGACAAAG
ACACAGGCATGAATGCTGTCATAGCTTACAGCATCATAGGGAGAAGAGGTCCTAGGCCTGAGTCCTTC
AGGATTGACCCTAAAACTGGCAACATTACTTTGGAAGAGGCATTGCTGCAGACAGATTATGGGCTCCA
TCGCTTACTGGTGAAAGTGAGTGATCATGGTTATCCCGAGCCTCTCCACTCCACAGTCATGGTGAACC
TATTTGTCAATGACACTGTCAGTAATGAGAGTTACATTGAGAGTCTTTTAAGAAAAGAACCAGAGATT
AATATAGAGGAGAAAGAACCACAAATCTCAATAGAACCGACTCATAGGAAGGTAGAATCTGTGTCTTG
TATGCCCACCTTAGTAGCTCTGTCTGTAATAAGCTTGGGTTCCATCACACTGGTCACAGGGATGGGCA
TATACATCTGTTTAAGGAAAGGGGAAAAGCATCCCAGGGAAGATGAAAATTTGGAAGTACAGATTCCA
CTGAAAGGAAAAATTGACTTGCATATGCGAGAGAGAAAGCCAATGGATATTTCTAATATTCTCGAG

| | | | |
|---|---|---|---|
| NOV45b, 277726328 | SEQ ID NO: 1012 | 951 aa | MW at 104745.6kD |
| Protein Sequence | | | |

GSGNARSSQALGVSWCPATWHPRLDMGRLHRPRSSTSYRNLPHLFLFFLFVGPFSCLGSYSRATELLY
SLNEGLPAGVLIGSLAEDLRLLPRSAGRPDPQSQLPERTGAEWNPPLSFSLASRGLSGQYVTLDNRSG
ELHTSAQEIDREALCVEGGGGTAWSGSVSISSSPSDSCLLLLDVLVLPQEYFRFVKVKIAIRDINDNA
PQFPVSQISVWVPENAPVNTRLAIEHPAVDPDVGINGVQTYRLLDYHGMFTLDVEENENGERTPYLIV
MGALDRETQDQYVSIIIAEDGGSPPLLGSATLTIGISDINDNCPLFTDSQINVTVYGNATVGTPIAAV
QAVDKDLGTNAQITYSYSQKVPQASKDLFHLDENTGVIKLFSKIGGSVLESHKLTILANGPGCIPAVI
TALVSIIKVIFRPPEIVPRYIANEIDGVVYLKELEPVNTPIAFFTIRDPEGKYKVNCYLDGEGPFRLS
PYKPYNNEYLLETTKPMDYELQQFYEVAVVAWNSEGFHVKRVIKVQLLDDNDNAPIFLQPLIELTIEE
NNSPNAFLTKLYATDADSEERGQVSYFLGPDAPSYFSLDSVTGILTVSTQLDREEKEKYRYTVRAVDC
GKPPRESVATVALTVLDKNDNSPRFINKDFSFFVPENFPGYGEIGVISVTDADAGRNGWVALSVVNQS
GIFVIDTGKGMLRAKVSLDREQQSSYTLWVEAVDGGEPALSSTAKITILLLDINDNPPLVLFPQSNMS
YLLVLPSTLPGSPVTEVYAVDKDTGMNAVIAYSIIGRRGPRPESFRIDPKTGNITLEEALLQTDYGLH
RLLVKVSDHGYPEPLHSTVMVNLFVNDTVSNESYIESLLRKEPEINIEEKEPQISIEPTHRKVESVSC
MPTLVALSVISLGSITLVTGMGIYICLRKGEKHPREDENLEVQIPLKGKIDLHMRERKPMDISNILE

| | | |
|---|---|---|
| NOV45c, CG57111-02 | SEQ ID NO: 1013 | 1020 bp |
| DNA Sequence | ORF Start: at 1 | ORF Stop: end of sequence |

AGTTACAGCCGGGCCACCGAGCTTCTGTACAGCCTAAACGAGGGACTACCCGCGGGGGTGCTCATCGG
CAGCCTGGCCGAGGACCTGCGGCTGCTGCCCAGGTCTGCAGGGAGGCCGGACCCGCAGTCGCAGCTGC
CAGAGCGCACCGGTGCTGAGTGGAACCCCCCTCTCTCCTTCAGCCTGGCCTCCCGGGGACTGAGTGGC
CAGTACGTGACCCTAGACAACCGCTCTGGGGAGCTGCACACTTCAGCTCAGGAGATCGACAGGGAGGC
CCTGTGTGTTGAAGGGGGTGGAGGGACTGCGTGGAGCGGCAGCGTTTCCATCTCCTCCTCTCCTTCTG
ACTCTTGTCTTTTGCTGCTGGATGTGCTTGTCCTGCCTCAGGAATACTTCAGGTTTGTGAAGGTGAAG
ATCGCCATCAGAGACATCAATGACAACGCCCCGCAGTTCCCTGTTTCCCAGATCTCGGTGTGGGTCCC
GGAAAATGCACCTGTAAACACCCGACTGGCCATAGAGCATCCTGCTGTGGACCCAGATGTAGGCATTA
ATGGGGTGCAGACCTATCGCTTACTGGACTACCATGGTATGTTCACCCTGGACGTGGAGGAGAATGAG
AATGGGGAGCGCACCCCCTACCTAATTGTCATGGGTGCTTTGGACAGGGAAACCCAGGACCAGTATGT
GAGCATCATCATAGCTGAGGATGGTGGGTCTCCACCACTTTTGGGCAGTGCCACTCTCACCATTGGCA
TCAGTGACATTAATGACAATTGCCCTCTCTTCACAGACTCACAAATCAATGTCACTGTGTATGGGAAT
GCTACAGTGGGCACCCCAATTGCAGCTGTCCAGGCTGTGGATAAAGACTTGGGGACCAATGCTCAAAT
TACTTATTCTTACAGTCAGAAAGTTCCACAAGCATCTAAGGATTTATTTCACCTGGATGAAAACACTG
GAGTCATTAAACTTTTCAGTAAGATTGGAGGAAGTGTTCTGGAGTCCCACAAGCTCACCATCCTTGCT

| | | | |
|---|---|---|---|
| NOV45c, CG57111-02 | SEQ ID NO: 1014 | 340 aa | MW at 36598.6kD |
| Protein Sequence | | | |

SYSRATELLYSLNEGLPAGVLIGSLAEDLRLLPRSAGRPDPQSQLPERTGAEWNPPLSFSLASRGLSG
QYVTLDNRSGELHTSAQEIDREALCVEGGGGTAWSGSVSISSSPSDSCLLLLDVLVLPQEYFRFVKVK
IAIRDINDNAPQFPVSQISVWVPENAPVNTRLAIEHPAVDPDVGINGVQTYRLLDYHGMFTLDVEENE
NGERTPYLIVMGALDRETQDQYVSIIIAEDGGSPPLLGSATLTIGISDINDNCPLFTDSQINVTVYGN
ATVGTPIAAVQAVDKDLGTNAQITYSYSQKVPQASKDLFHLDENTGVIKLFSKIGGSVLESHKLTILA

| | | |
|---|---|---|
| NOV45d, CG57111-03 | SEQ ID NO: 1015 | 1032 bp |
| DNA Sequence | ORF Start: at 7 | ORF Stop: at 1027 |

GGATCCAGTTACAGCCGGGCCACCGAGCTTCTGTACAGCCTAAACGAGGGACTACCCGCGGGGGTGCT
CATCGGCAGCCTGGCCGAGGACCTGCGGCTGCTGCCCAGGTCTGCAGGGAGGCCGGACCCGCAGTCGC
AGCTGCCAGAGCGCACCGGTGCTGAGTGGAACCCCCCTCTCTCCTTCAGCCTGGCCTCCCGGGGACTG
AGTGGCCAGTACGTGACCCTAGACAACCGCTCTGGGGAGCTGCACACTTCAGCTCAGGAGATCGACAG
GGAGGCCCTGTGTGTTGAAGGGGGTGGAGGGACTGCGTGGAGCGGCAGCGTTTCCATCTCCTCCTCTC
CTTCTGACTCTTGTCTTTTGCTGCTGGATGTGCTTGTCCTGCCTCAGGAATACTTCAGGTTTGTGAAG
GTGAAGATCGCCATCAGAGACATCAATGACAACGCCCCGCAGTTCCCTGTTTCCCAGATCTCGGTGTG
GGTCCCGGAAAATGCACCTGTAAACACCCGACTGGCCATAGAGCATCCTGCTGTGGACCCAGATGTAG
GCATTAATGGGGTGCAGACCTATCGCTTACTGGACTACCATGGTATGTTCACCCTGGACGTGGAGGAG
AATGAGAATGGGGAGCGCACCCCCTACCTAATTGTCATGGGTGCTTTGGACAGGGAAACCCAGGACCA
GTATGTGAGCATCATCATAGCTGAGGATGGTGGGTCTCCACCACTTTTGGGCAGTGCCACTCTCACCA
TTGGCATCAGTGACATTAATGACAATTGCCCTCTCTTCACAGACTCACAAATCAATGTCACTGTGTAT
GGGAATGCTACAGTGGGCACCCCAATTGCAGCTGTCCAGGCTGTGGATAAAGACTTGGGGACCAATGC
TCAAATTACTTATTCTTACAGTCAGAAAGTTCCACAAGCATCTAAGGATTTATTTCACCTGGATGAAA
ACACTGGAGTCATTAAACTTTTCAGTAAGATTGGAGGAAGTGTTCTGGAGTCCCACAAGCTCACCATC
CTTGCTCTCGAG

| | | | |
|---|---|---|---|
| NOV45d, CG57111-03 | SEQ ID NO: 1016 | 340 aa | MW at 36598.6kD |
| Protein Sequence | | | |

SYSRATELLYSLNEGLPAGVLIGSLAEDLRLLPRSAGRPDPQSQLPERTGAEWNPPLSFSLASRGLSG
QYVTLDNRSGELHTSAQEIDREALCVEGGGGTAWSGSVSISSSPSDSCLLLLDVLVLPQEYFRFVKVK
IAIRDINDNAPQFPVSQISVWVPENAPVNTRLAIEHPAVDPDVGINGVQTYRLLDYHGMFTLDVEENE
NGERTPYLIVMGALDRETQDQYVSIIIAEDGGSPPLLGSATLTIGISDINDNCPLFTDSQINVTVYGN
ATVGTPIAAVQAVDKDLGTNAQITYSYSQKVPQASKDLFHLDENTGVIKLFSKIGGSVLESHKLTILA

| | | |
|---|---|---|
| NOV45e, CG57111-04 | SEQ ID NO: 1017 | 1390 bp |
| DNA Sequence | ORF Start: at 8 | ORF Stop: at 1385 |

GGGATCCCCTGAAATTGTCCCTCGTTACATAGCAAACGAGATAGATGGTGTTGTTTATCTGAAAGAAC
TGGAACCCGTTAACACTCCCATTGCGTTTTTCACCATAAGAGATCCAGAAGGTAAATACAAGGTTAAC
TGCTACCTGGATGGTGAAGGGCCGTTTAGGTTATCACCTTACAAACCATACAATAATGAATATTTACT
AGAGACCACAAAACCTATGGACTATGAGCTACAGCAGTTCTATGAAGTAGCTGTGGTGGCTTGGAACT
CTGAGGGATTTCATGTCAAAAGGGTCATTAAAGTGCAACTTTTAGATGACAATGATAATGCTCCAATT
TTCCTTCAACCCTTAATAGAACTAACCATCGAAGAGAACAACTCACCCAATGCCTTTTTGACTAAGCT
GTATGCTACAGATGCCGACAGCGAGGAGAGAGGCCAAGTTTCATATTTTCTGGGACCTGATGCTCCAT
CATATTTTTCCTTAGACAGTGTCACAGGAATTCTGACAGTTTCTACTCAGCTGGACCGAGAAGAGAAA
GAAAAGTACAGATACACTGTCAGAGCTGTTGACTGTGGGAAGCCACCCAGAGAATCAGTAGCCACTGT
GGCCCTCACAGTGTTGGATAAAAATGACAACAGTCCTCGGTTTATCAACAAGGACTTCAGCTTTTTTG
TGCCTGAAAACTTTCCAGGCTATGGTGAGATTGGAGTAATTAGTGTAACAGATGCTGACGCTGGACGA
AATGGATGGGTCGCCCTCTCTGTGGTGAACCAGAGTGATATTTTTGTCATAGATACAGGAAAGGGTAT
GCTGAGGGCTAAAGTCTCTTTGGACAGAGAGCAGCAAAGCTCCTATACTTTGTGGGTTGAAGCTGTTG
ATGGGGGTGAGCCTGCCCTCTCCTCTACAGCAAAAATCACAATTCTCCTTCTAGATATCAATGACAAC
CCTCCTCTTGTTTTGTTTCCTCAGTCTAATATGTCTTATCTGTTAGTACTGCCTTCTACTCTGCCAGG
CTCCCCGGTTACAGAAGTCTATGCTGTCGACAAAGACACAGGCATGAATGCTGTCATAGCTTACAGCA
TCATAGGGAGAAGAGGTCCTAGGCCTGAGTCCTTCAGGATTGACCCTAAAACTGGCAACATTACTTTG
GAAGAGGCATTGCTGCAGACAGATTATGGGCTCCATCGCTTACTGGTGAAAGTGAGTGATCATGGTTA
TCCCGAGCCTCTCCACTCCACAGTCATGGTGAACCTATTTGTCAATGACACTGTCAGTAATGAGAGTT
ACATTGAGAGTCTTTTAAGAAAAGAACCAGAGATTAATATAGAGGAGAAAGAACCACAAATCTCAATA
GAACCGACTCATAGGAAGGTAGAACTCGAG

| | | | |
|---|---|---|---|
| NOV45e, CG57111-04 | SEQ ID NO: 1018 | 459 aa | MW at 51489.5kD |
| Protein Sequence | | | |

PEIVPRYIANEIDGVVYLKELEPVNTPIAFFTIRDPEGKYKVNCYLDGEGPFRLSPYKPYNNEYLLET
TKPMDYELQQFYEVAVVAWNSEGFHVKRVIKVQLLDDNDNAPIFLQPLIELTIEENNSPNAFLTKLYA
TDADSEERGQVSYFLGPDAPSYFSLDSVTGILTVSTQLDREEKEKYRYTVRAVDCGKPPRESVATVAL
TVLDKNDNSPRFINKDFSFFVPENFPGYGEIGVISVTDADAGRNGWVALSVVNQSDIFVIDTGKGMLR
AKVSLDREQQSSYTLWVEAVDGGEPALSSTAKITILLLDINDNPPLVLFPQSNMSYLLVLPSTLPGSP
VTEVYAVDKDTGMNAVIAYSIIGRRGPRPESFRIDPKTGNITLEEALLQTDYGLHRLLVKVSDHGYPE
PLHSTVMVNLFVNDTVSNESYIESLLRKEPEINIEEKEPQISIEPTHRKVE

[0615] A ClustalW comparison of the above protein sequences yields the following sequence alignment shown in Table 45B.

TABLE 45B
Comparison of the NOV45 protein sequences.

| | |
|---|---|
| NOV45a | --GNARSSQALGVSWCPATWHPRLDMGRLHRPRSSTSYRNLPHLFLFFLFVGPFSCLGSY |
| NOV45b | GSGNARSSQALGVSWCPATWHPRLDMGRLHRPRSSTSYRNLPHLFLFFLFVGPFSCLGSY |
| NOV45c | ----------------------------------------------------------SY |
| NOV45d | ----------------------------------------------------------SY |
| NOV45e | -------------------------------------------PEIVPRYIANEIDGVVY |
| NOV45a | SRATELLYSLNEGLPAGVLIGSLAEDLRLLPRSAGRPDPQSQLPERTGAEWNPPLSFSLA |
| NOV45b | SRATELLYSLNEGLPAGVLIGSLAEDLRLLPRSAGRPDPQSQLPERTGAEWNPPLSFSLA |
| NOV45c | SRATELLYSLNEGLPAGVLIGSLAEDLRLLPRSAGRPDPQSQLPERTGAEWNPPLSFSLA |
| NOV45d | SRATELLYSLNEGLPAGVLIGSLAEDLRLLPRSAGRPDPQSQLPERTGAEWNPPLSFSLA |
| NOV45e | LKELEPVNTPIAFFTIRDPEGKYKVNCYLDGEGPFRLSPYKPYNNEYLLETTKPMDYELQ |
| NOV45a | SRGLSGQYVTLDN---------------------------------RSGELHTSAQEIDR |
| NOV45b | SRGLSGQYVTLDN---------------------------------RSGELHTSAQEIDR |
| NOV45c | SRGLSGQYVTLDN---------------------------------RSGELHTSAQEIDR |
| NOV45d | SRGLSGQYVTLDN---------------------------------RSGELHTSAQEIDR |
| NOV45e | QFYEVAVVAWNSEGFHVKRVIKVQLLDDNDNAPIFLQPLIELTIEENNSPNAFLTKLYAT |
| NOV45a | EALCVEGGGGTAWSGSVSISSSPSDSCLLLLDVLVLPQEYFR------------------ |
| NOV45b | EALCVEGGGGTAWSGSVSISSSPSDSCLLLLDVLVLPQEYFR------------------ |
| NOV45c | EALCVEGGGGTAWSGSVSISSSPSDSCLLLLDVLVLPQEYFR------------------ |
| NOV45d | EALCVEGGGGTAWSGSVSISSSPSDSCLLLLDVLVLPQEYFR------------------ |
| NOV45e | DADSEERGQVSYFLGPDAPSYFSLDSVTGILTVSTQLDREEKEKYRYTVRAVDCGKPPRE |
| NOV45a | -FVKVKIAIRDINDNAPQFPVSQISVWVPENAPVNTRLAIEHPAVDPDVGINGVQTYRLL |
| NOV45b | -FVKVKIAIRDINDNAPQFPVSQISVWVPENAPVNTRLAIEHPAVDPDVGINGVQTYRLL |
| NOV45c | -FVKVKIAIRDINDNAPQFPVSQISVWVPENAPVNTRLAIEHPAVDPDVGINGVQTYRLL |
| NOV45d | -FVKVKIAIRDINDNAPQFPVSQISVWVPENAPVNTRLATEHPAVDPDVGINGVQTYRLL |
| NOV45e | SVATVALTVLDKNDNSPRFINKDFSFFVPENFPGYGEIGVIS-VTDADAGRNGWVALSVV |
| NOV45a | DYHGMFTLDVEENENGERTPYLIVMGALDRETQDQYVSIITAEDGGSPPLLGSATLTIGI |
| NOV45b | DYHGMFTLDVEENENGERTPYLIVMGALDRETQDQYVSIIIAEDGGSPPLLGSATLTIGI |
| NOV45c | DYHGMFTLDVEENENGERTPYLIVMGALDRETQDQYVSIIIAEDGGSPPLLGSATLTIGI |
| NOV45d | DYHGMFTLDVEENENGERTPYLIVMGALDRETQDQYVSIIIAEDGGSPPLLGSATLTIGI |
| NOV45e | NQSDIFVIDTGKG-------MLRAKVSLDREQQSSYTLWVEAVDGGEPALSSTAKITILL |
| NOV45a | SDINDNCPLFTDSQIN---VTVYGNATVGTPIAAVQAVDKDLGTNAQITYSYSQKVPQAS |
| NOV45b | SDINDNCPLFTDSQIN---VTVYGNATVGTPIAAVQAVDKDLGTNAQITYSYSQKVPQAS |
| NOV45c | SDINDNCPLFTDSQIN---VTVYGNATVGTPIAAVQAVDKDLGTNAQITYSYSQKVPQAS |
| NOV45d | SDINDNCPLFTDSQIN---VTVYGNATVGTPIAAVQAVDKDLGTNAQITYSYSQKVPQAS |
| NOV45e | LDINDNPPLVLFPQSNMSYLLVLPSTLPGSPVTEVYAVDKDTGMNAVIAYSIIGRR-GPR |
| NOV45a | KDLFHLDENTGVIKLFSKIGGSVLESHKLTILANGPGCIPAVITALVSIIKVIFRPPEIV |
| NOV45b | KDLFHLDENTGVIKLFSKIGGSVLESHKLTILANGPGCIPAVITALVSIIKVIFRPPEIV |
| NOV45c | KDLFHLDENTGVIKLFSKIGGSVLESHKLTILA--------------------------- |
| NOV45d | KDLFHLDENTGVIKLFSKIGGSVLESHKLTILA--------------------------- |
| NOV45e | PESFRIDPKTGNITLEEALLQTDYGLHRLLVKVSDHGYPEPLHSTVMVNLFVNDTVSNES |
| NOV45a | PRYIANEIDGVVYLKELEPVNTPIAFFTIRDPEGKYKVNCYLDGEGPFRLSPYKPYNNEY |
| NOV45b | PRYIANEIDGVVYLKELEPVNTPIAFFTIRDPEGKYKVNCYLDGEGPFRLSPYKPYNNEY |
| NOV45c | ------------------------------------------------------------ |
| NOV45d | ------------------------------------------------------------ |
| NOV45e | YIESLLRKEPEINIEEKEPQISIEPTHRKVE----------------------------- |
| NOV45a | LLETTKPMDYELQQFYEVAVVAWNSEGFHVKRVIKVQLLDDNDNAPIFLQPLIELTIEEN |
| NOV45b | LLETTKPMDYELQQFYEVAVVAWNSEGFHVKRVIKVQLLDDNDNAPIFLQPLIELTIEEN |
| NOV45c | ------------------------------------------------------------ |
| NOV45d | ------------------------------------------------------------ |
| NOV45e | ------------------------------------------------------------ |
| NOV45a | NSPNAFLTKLYATDADSEERGQVSYFLGPDAPSYFSLDSVTGILTVSTQLDREEKEKYRY |
| NOV45b | NSPNAFLTKLYATDADSEERGQVSYFLGPDAPSYFSLDSVTGILTVSTQLDREEKEKYRY |
| NOV45c | ------------------------------------------------------------ |
| NOV45d | ------------------------------------------------------------ |
| NOV45e | ------------------------------------------------------------ |
| NOV45a | TVRAVDCGKPPRESVATVALTVLDKNDNSPRFINKDFSFFVPENFPGYGEIGVISVTDAD |
| NOV45b | TVRAVDCGKPPRESVATVALTVLDKNDNSPRFINKDFSFFVPENFPGYGEIGVISVTDAD |
| NOV45c | ------------------------------------------------------------ |
| NOV45d | ------------------------------------------------------------ |
| NOV45e | ------------------------------------------------------------ |
| NOV45a | AGRNGWVALSVVNQSDIFVIDTGKGMLRAKVSLDREQQSSYTLWVEAVDGGEPALSSTAK |
| NOV45b | AGRNGWVALSVVNQSGIFVIDTGKGMLRAKVSLDREQQSSYTLWVEAVDGGEPALSSTAK |
| NOV45c | ------------------------------------------------------------ |
| NOV45d | ------------------------------------------------------------ |
| NOV45e | ------------------------------------------------------------ |
| NOV45a | ITILLLDINDNPPLVLFPQSNMSYLLVLPSTLPGSPVTEVYAVDKDTGMNAVIAYSIIGR |
| NOV45b | ITILLLDINDNPPLVLFPQSNMSYLLVLPSTLPGSPVTEVYAVDKDTGMNAVIAYSIIGR |
| NOV45c | ------------------------------------------------------------ |
| NOV45d | ------------------------------------------------------------ |
| NOV45e | ------------------------------------------------------------ |
| NOV45a | RGPRPESFRIDPKTGNITLEEALLQTDYGLHRLLVKVSDHGYPEPLHSTVMVNLFVNDTV |
| NOV45b | RGPRPESFRIDPKTGNITLEEALLQTDYGLHRLLVKVSDHGYPEPLHSTVMVNLFVNDTV |
| NOV45c | ------------------------------------------------------------ |
| NOV45d | ------------------------------------------------------------ |
| NOV45e | ------------------------------------------------------------ |
| NOV45a | SNESYIESLLRKEPEINIEEKEPQISIEPTHRKVESVSCMPTLVALSVISLGSITLVTGM |
| NOV45b | SNESYIESLLRKEPEINIEEKEPQISIEPTHRKVESVSCMPTLVALSVISLGSITLVTGM |
| NOV45c | ------------------------------------------------------------ |
| NOV45d | ------------------------------------------------------------ |
| NOV45e | ------------------------------------------------------------ |
| NOV45a | GIYICLRKGEKHPREDENLEVQIPLKGKIDLHMRERKPMDISNI-- |
| NOV45b | GIYICLRKGEKHPREDENLEVQIPLKGKIDLHMRERKPMDISNILE |
| NOV45c | ---------------------------------------------- |
| NOV45d | ---------------------------------------------- |
| NOV45e | ---------------------------------------------- |
| NOV45a | (SEQ ID NO: 1010) |
| NOV45b | (SEQ ID NO: 1012) |
| NOV45c | (SEQ ID NO: 1014) |
| NOV45d | (SEQ ID NO: 1016) |
| NOV45e | (SEQ ID NO: 1018) |

[0616] Further analysis of the NOV45a protein yielded the following properties shown in Table 45C.

TABLE 45C
Protein Sequence Properties NOV45a

| | |
|---|---|
| SignalP analysis: | Cleavage site between residues 57 and 58 |
| PSORT II analysis: | |

| PSG: | a new signal peptide prediction method | |
|---|---|---|
| | N-region: | length 4; pos. chg 1; neg. chg 0 |
| | H-region: | length 16; peak value 6.44 |
| | PSG score: | 2.04 |

| | |
|---|---|
| GvH: | von Heijne's method for signal seq. recognition |
| | GvH score (threshold: −2.1): −0.42 |
| | possible cleavage site: between 56 and 57 |

>>> Seems to have a cleavable signal peptide (1 to 56)

| ALOM: | Klein et al's method for TM region allocation | | |
|---|---|---|---|
| | Init position for calculation: 57 | | |
| | Tentative number of TMS(s) for the threshold 0.5: 2 | | |
| | INTEGRAL | Likelihood = | Transmembrane 401-417 |
| | | −7.38 | |
| | INTEGRAL | Likelihood = | Transmembrane 886-902 |
| | | −3.77 | |

| | |
|---|---|
| PERIPHERAL | Likelihood = 2.01 (at 173) |

| | |
|---|---|
| | ALOM score: −7.38 (number of TMSs: 2) |
| MTOP: | Prediction of membrane topology (Hartmann et al.) |
| | Center position for calculation: 28 |
| | Charge difference: 0.5 C(3.5)-N(3.0) |
| | C > N: C-terminal side will be inside |

>>>Caution: Inconsistent mtop result with signal peptide
>>> membrane topology: type 3b

| MITDISC: | discrimination of mitochondrial targeting seq | | | |
|---|---|---|---|---|
| | R content: | 2 | Hyd Moment(75): | 3.38 |
| | Hyd Moment(95): | 4.41 | G content: | 2 |
| | D/E content: | 1 | S/T content: | 4 |

| | |
|---|---|
| | Score: −3.49 |
| Gavel: | prediction of cleavage sites for mitochondrial preseq |
| | R-2 motif at 70 SRA\|TE |

NUCDISC: discrimination of nuclear localization signals

| | |
|---|---|
| | pat4: none |
| | pat7: none |
| | bipartite: none |
| | content of basic residues: 8.6% |
| | NLS Score: −0.47 |
| KDEL: | ER retention motif in the C-terminus: none |

ER Membrane Retention Signals:

| | |
|---|---|
| | XXRR-like motif in the N-terminus: NARS |
| none | |

SKL: peroxisomal targeting signal in the C-terminus: none
PTS2: 2nd peroxisomal targeting signal: none
VAC: possible vacuolar targeting motif: none
RNA-binding motif: none
Actinin-type actin-binding motif:

type 1: none
type 2: none

NMYR: N-myristoylation pattern: GNARSS
Prenylation motif: none
memYQRL: transport motif from cell surface to Golgi: none
Tyrosines in the tail: none
Dileucine motif in the tail: none
checking 63 PROSITE DNA binding motifs: none
checking 71 PROSITE ribosomal protein motifs: none
checking 33 PROSITE prokaryotic DNA binding motifs: none

| | |
|---|---|
| NNCN: | Reinhardt's method for Cytoplasmic/Nuclear discrimination |
| | Prediction: cytoplasmic |
| | Reliability: 76.7 |
| COIL: | Lupas's algorithm to detect coiled-coil regions |
| | total: 0 residues |

Final Results (k = 9/23):

44.4%: endoplasmic reticulum
11.1%: Golgi
11.1%: vacuolar
11.1%: mitochondrial
11.1%: nuclear
11.1%: cytoplasmic

>> prediction for CG57111-01 is end (k = 9)

[0617] A search of the NOV45a protein against the Geneseq database, a proprietary database that contains sequences published in patents and patent publication, yielded several homologous proteins shown in Table 45D.

TABLE 45D
Geneseq Results for NOV45a

| | | NOV45a | Identities/ | |
|---|---|---|---|---|
| | | Residues/ | Similarities for | |
| Geneseq | Protein/Organism/Length | Match | the Matched | Expect |
| Identifier | [Patent #, Date] | Residues | Region | Value |
| ABP70119 | Human NOV32a - Homo sapiens, 947 | 1 . . . 947 | 947/947 (100%) | 0.0 |
| | aa. [WO200272771-A2, 19-SEP-2002] | 1 . . . 947 | 947/947 (100%) | |
| ABU52605 | Human NOVX protein, NOV16a - | 1 . . . 947 | 946/947 (99%) | 0.0 |
| | Homo sapiens, 962 aa. | 16 . . . 962 | 946/947 (99%) | |
| | [WO200281518-A2, 17-OCT-2002] | | | |
| AAU09958 | Human cadherin-1 (CDHN-1) protein - | 24 . . . 947 | 923/924 (99%) | 0.0 |
| | Homo sapiens, 924 aa. | 1 . . . 924 | 923/924 (99%) | |
| | [WO200179293-A2, 25-OCT-2001] | | | |
| ABP47865 | Human polypeptide SEQ ID NO 295 - | 551 . . . 947 | 396/397 (99%) | 0.0 |
| | Homo sapiens, 397 aa. | 1 . . . 397 | 397/397 (99%) | |
| | [US2002042386-A1, 11-APR-2002] | | | |
| AAU19645 | Human novel extracellular matrix | 551 . . . 947 | 396/397 (99%) | 0.0 |
| | protein, Seq ID No 295 - Homo | 1 . . . 397 | 397/397 (99%) | |
| | sapiens, 397 aa. [WO200155368-A1, | | | |
| | 02-AUG-2001] | | | |

[0618] In a BLAST search of public sequence databases, the NOV45a protein was found to have homology to the proteins shown in the BLASTP data in Table 45E.

TABLE 45E
Public BLASTP Results for NOV45a

| | | NOV45a | Identities/ | |
|---|---|---|---|---|
| Protein | | Residues/ | Similarities for | |
| Accession | | Match | the Matched | Expect |
| Number | Protein/Organism/Length | Residues | Portion | Value |
| Q9NRT9 | Protocadherin 13 - Homo sapiens | 1 . . . 947 | 947/947 (100%) | 0.0 |
| | (Human), 947 aa (fragment). | 1 . . . 947 | 947/947 (100%) | |
| Q8NDN4 | Hypothetical protein - Homo | 1 . . . 947 | 946/947 (99%) | 0.0 |
| | sapiens (Human), 951 aa. | 5 . . . 951 | 946/947 (99%) | |
| Q8N6Y1 | Protocadherin 20 - Homo sapiens | 24 . . . 947 | 923/924 (99%) | 0.0 |
| | (Human), 924 aa. | 1 . . . 924 | 923/924 (99%) | |
| Q8BIV2 | PROTOCADHERIN 13 homolog - | 1 . . . 947 | 874/948 (92%) | 0.0 |
| | Mus musculus (Mouse), 952 aa. | 5 . . . 952 | 910/948 (95%) | |
| Q8BIZ0 | PROTOCADHERIN 13 homolog - | 24 . . . 947 | 860/925 (92%) | 0.0 |
| | Mus musculus (Mouse), 925 aa. | 1 . . . 925 | 896/925 (95%) | |

[0619] PFam analysis predicts that the NOV45a protein contains the domains shown in the Table 45F.

TABLE 45F
Domain Analysis of NOV45a

| | | Identities/ | |
|---|---|---|---|
| | NOV45a | Similarities for | Expect |
| Pfam Domain | Match Region | the Matched Region | Value |
| cadherin | 210 . . . 307 | 36/111 (32%) | 2.5e−08 |
| | | 72/111 (65%) | |
| cadherin | 321 . . . 413 | 27/110 (25%) | 0.0004 |
| | | 66/110 (60%) | |
| cadherin | 536 . . . 626 | 33/107 (31%) | 6.4e−19 |
| | | 69/107 (64%) | |
| cadherin | 640 . . . 729 | 39/107 (36%) | 5.8e−20 |
| | | 69/107 (64%) | |
| cadherin | 747 . . . 840 | 38/112 (34%) | 4e−11 |
| | | 70/112 (62%) | |

### Example 46

[0620] The NOV46 clone was analyzed, and the nucleotide and encoded polypeptide sequences are shown in Table 46A.

TABLE 46A
NOV46 Sequence Analysis

| | | |
|---|---|---|
| NOV46a, CG57409-05 | SEQ ID NO: 1019 | 1500 bp |
| DNA Sequence | ORF Start: ATG at 12 | ORE Stop: TGA at 1476 |

TGAGCCGAGACATGAGCGGGACCTACCGCTGCCAGACGGCCCGCTATAATGGCTTCAACGTGCGCCCC
CGTGAGGCCCAGGTGCAGCTGAACGTGCAGTTCCCGCCGGAGGTGGAGCCCAGTTCCCAGGACGTGCG
CCAGGCGCTGGGCCGGCCCGTGCTCCTGCGCTGCTCGCTGCTGCGAGGCAGCCCCCAGCGCATCGCCT
CGGCTGTGTGGCGTTTCAAAGGGCAGCTGCTGCCGCCGCCGCCTGTTGTTCCCGCCGCCGCCGAGGCG
CCGGATCACGCGGAGCTGCGCCTCGACGCCGTAACTCGCGACAGCAGCGGCAGCTACGAGTGCAGCGT
CTCCAACGATGTGGGCTCGGCTGCCTGCCTCTTCCAGGTCTCCGCCAAAGCCTACAGCCCGGAGTTTT
ACTTCGACACCCCCAACCCCACCCGCAGCCACAAGCTGTCCAAGAACTACTCCTACGTGCTGCAGTGG
ACTCAGAGGGAGCCCGACGCTGTCGACCCTGTGCTCAACTACAGACTCAGCATCCGCCAGTTGAACCA
GCACAATGCGGTGGTCAAGGCCATCCCGGTCCGGCGTGTGGAGAAGGGGCAGCTGCTGGAGTACATCC
TGACCGATCTCCGTGTGCCCCACAGCTATGAGGTCCGCCTCACACCCTATACCACCTTCGGGGCTGGT
GACATGGCCTCCCGCATCATCCACTACACAGAGCGCCAGATCCGCTGGCCCCCAGTCCTGGCTCTGAG
GACCCTGTCCTCTGGTCCCAAGCAGGGTATCCTCTGCAGAGCCCCACACCTCAGTTCTGACTTGGTTT
CCCCGCTTGCTTTCTCAGCCATCAACTCTCCGAACCTTTCAGACAACACCTGCCACTTTGAGGATGAG
AAGATCTGTGGCTATACCCAGGACCTGACAGACAACTTTGACTGGACGCGGCAGAATGCCCTCACCCA
GAACCCCAAACGCTCCCCCAACACTGGTCCCCCCACCGACATAAGTGGCACCCCTGAGGGCTACTACA
TGTTCATCGAGACATCGAGGCCTCGGGAGCTGGGGGACCGTGCAAGGTTAGTGAGTCCCCTCTACAAT
GCCAGCGCCAAGTTCTACTGTGTCTCCTTCTTCTACCACATGTACGGGAAACACATCGGCTCCCTCAA
CCCCCTGGTGCGGTCCCGGAACAAAGGGGCTCTGGACACGCACGCCTGGTCTCTCAGTGGCAATAAGG
GCAATGTGTGGCAGCAGGCCCATGTGCCCATCAGCCCCAGTGGGCCCTTCCAGATTATTTTTGAGGGG
GTTCGAGGCCCGGGCTACCTGGGGGATATTGCCATAGATGACGTCACACTGAAGAAGGGGGAGTGTCC
CCGGAAGCAGACGGATCCCAATAAAGTGGTGGTGATGCCGGGCAGTGGAGCCCCCTGCCAGTCCAGCC
CACAGCTGTGGGGGCCCATGGCCATCTTCCTCTTGGCGTTGCAGAGATGATGAGAGCTGTGTGGCCAC
CCCC

| | | | |
|---|---|---|---|
| NOV46a, CG57409-05 | SEQ ID NO: 1020 | 488 aa | MW at 54357.1kD |
| Protein Sequence | | | |

MSGTYRCQTARYNGFNVRPREAQVQLNVQFPPEVEPSSQDVRQALGRPVLLRCSLLRGSPQRIASAVW
RFKGQLLPPPPVVPAAAEAPDHAELRLDAVTRDSSGSYECSVSNDVGSAACLFQVSAKAYSPEFYFDT
PNPTRSHKLSKNYSYVLQWTQREPDAVDPVLNYRLSIRQLNQHNAVVKAIPVRRVEKGQLLEYILTDL
RVPHSYEVRLTPYTTFGAGDMASRIIHYTERQIRWPPVLALRTLSSGPKQGILCRAPHLSSDLVSPLA
FSAINSPNLSDNTCHFEDEKICGYTQDLTDNFDWTRQNALTQNPKRSPNTGPPTDISGTPEGYYMFIE
TSRPRELGDRARLVSPLYNASAKFYCVSFFYHMYGKHIGSLNPLVRSRNKGALDTHAWSLSGNKGNVW
QQAHVPISPSGPFQIIFEGVRGPGYLGDIAIDDVTLKKGECPRKQTDPNKVVVMPGSGAPCQSSPQLW
GPMAIFLLALQR

| | | |
|---|---|---|
| NOV46b, 277731446 | SEQ ID NO: 1021 | 1363 bp |
| DNA Sequence | ORF Start: at 2 | ORF Stop: end of sequence |

CACCGGTACCATGAGCGGGACCTACCGCTGCCAGACGGCCCGCTATAATGGCTTCAACGTGCGCCCCC
GTGAGGCCCAGGTGCAGCTGAACGTGCAGTTCCCGCCGGAGGTGGAGCCCAGTTCCCAGGACGTGCGC
CAGGCGCTGGGCCGGCCCGTGCTCCTGCGCTGCTCGCTGCTGCGAGGCAGCCCCCAGCGCATCGCCTC
GGCTGTGTGGCGTTTCAAAGGGCAGCTGCTGCCGCCGCCGCCTGTTGTTCCCGCCGCCGCCGAGGCGC
CGGATCACGCGGAGCTGCGCCTCGACGCCGTAACTCGCGACAGCAGCGGCAGCTACGAGTGCAGCGTC
TCCAACGATGTGGGCTCGGCTGCCTGCCTCTTCCAGGTCTCCGCCAAAGCCTACAGCCCGGAGTTTTA
CTTCGACACCCCCAACCCCACCCGCAGCCACAAGCTGTCCAAGAACTACTCCTACGTGCTGCAGTGGA
CTCAGAGGGAGCCCGACGCTGTCGACCCTGTGCTCAACTACAGACTCAGCATCCGCCAGTTGAACCAG
CACAATGCGGTGGTCAAGGCCATCCCGGTCCGGCGTGTGGAGAAGGGGCAGCTGCTGGAGTACATCCT
GACCGATCTCCGTGTGCCCCACAGCTATGAGGTCCGCCTCACACCCTATACCACCTTCGGGGCTGGTG
ACATGGCCTCCCGCATCATCCACTACACAGAGCCCATCAACTCTCCGAACCTTTCAGACAACACCTGC
CACTTTGAGGATGAGAAGATCTGTGGCTATACCCAGGACCTGACAGACAACTTTGACTGGACGCGGCA
GAATGCCCTCACCCAGAACCCCAAACGCTCCCCCAACACTGGTCCCCCCACCGACATAAGTGGCACCC
CTGAGGGCTACTACATGTTCATCGAGACATCGAGGCCTCGGGAGCTGGGGGACCGTGCAAGGTTAGTG
AGTCCCCTCTACAATGCCAGCGCCAAGTTCTACTGTGTCTCCTTCTTCTACCACATGTACGGGAAACA
CATCGGCTCCCTCAACCTCCTGGTGCGGTCCCGGAACAAAGGGGCTCTGGACACGCACGCCTGGTCTC
TCAGTGGCAATAAGGGCAATGTGTGGCAGCAGGCCCATGTGCCCATCAGCCCCAGTGGGCCCTTCCAG
ATTATTTTTGAGGGGGTTCGAGGCCCGGGCTACCTGGGGGATATTGCCATAGATGACGTCACACTGAA
GAAGGGGGAGTGTCCCCGGAAGCAGACGGATCCCAATAAAGTGGTGGTGATGCCGGGCAGTGGAGCCC
CCTGCCAGTCCAGCCCACAGCTGTGGGGGCCCATGGCCATCTTCCTCTTGGCGTTGCAGAGACTCGAG
GGC

| | | | |
|---|---|---|---|
| NOV46b, 277731446 | SEQ ID NO: 1022 | 454 aa | MW at 50606.7kD |
| Protein Sequence | | | |

TGTMSGTYRCQTARYNGFNVRPREAQVQLNVQFPPEVEPSSQDVRQALGRPVLLRCSLLRGSPQRIAS
AVWRFKGQLLPPPPVVPAAAEAPDHAELRLDAVTRDSSGSYECSVSNDVGSAACLFQVSAKAYSPEFY
FDTPNPTRSHKLSKNYSYVLQWTQREPDAVDPVLNYRLSIRQLNQHNAVVKAIPVRRVEKGQLLEYIL
TDLRVPHSYEVRLTPYTTFGAGDMASRIIHYTEPINSPNLSDNTCHFEDEKICGYTQDLTDNFDWTRQ
NALTQNPKRSPNTGPPTDISGTPEGYYMFIETSRPRELGDRARLVSPLYNASAKFYCVSFFYHMYGKH
IGSLNLLVRSRNKGALDTHAWSLSGNKGNVWQQAHVPISPSGPFQIIFEGVRGPGYLGDIAIDDVTLK
KGECPRKQTDPNKVVVMPGSGAPCQSSPQLWGPMAIFLLALQRLEG

| | | |
|---|---|---|
| NOV46c, CG57409-07 | SEQ ID NO: 1023 | 1363 bp |
| DNA Sequence | ORF Start: ATG at 11 | ORF Stop: at 1355 |

CACCGGTACCATGAGCGGGACCTACCGCTGCCAGACGGCCCGCTATAATGGCTTCAACGTGCGCCCCC
GTGAGGCCCAGGTGCAGCTGAACGTGCAGTTCCCGCCGGAGGTGGAGCCCAGTTCCCAGGACGTGCGC
CAGGCGCTGGGCCGGCCCGTGCTCCTGCGCTGCTCGCTGCTGCGAGGCAGCCCCCAGCGCATCGCCTC
GGCTGTGTGGCGTTTCAAAGGGCAGCTGCTGCCGCCGCCGCCTGTTGTTCCCGCCGCCGCCGAGGCGC
CGGATCACGCGGAGCTGCGCCTCGACGCCGTAACTCGCGACAGCAGCGGCAGCTACGAGTGCAGCGTC
TCCAACGATGTGGGCTCGGCTGCCTGCCTCTTCCAGGTCTCCGCCAAAGCCTACAGCCCGGAGTTTTA
CTTCGACACCCCCAACCCCACCCGCAGCCACAAGCTGTCCAAGAACTACTCCTACGTGCTGCAGTGGA
CTCAGAGGGAGCCCGACGCTGTCGACCCTGTGCTCAACTACAGACTCAGCATCCGCCAGTTGAACCAG
CACAATGCGGTGGTCAAGGCCATCCCGGTCCGGCGTGTGGAGAAGGGGCAGCTGCTGGAGTACATCCT
GACCGATCTCCGTGTGCCCCACAGCTATGAGGTCCGCCTCACACCCTATACCACCTTCGGGGCTGGTG
ACATGGCCTCCCGCATCATCCACTACACAGAGCCCATCAACTCTCCGAACCTTTCAGACAACACCTGC
CACTTTGAGGATGAGAAGATCTGTGGCTATACCCAGGACCTGACAGACAACTTTGACTGGACGCGGCA
GAATGCCCTCACCCAGAACCCCAAACGCTCCCCCAACACTGGTCCCCCCACCGACATAAGTGGCACCC
CTGAGGGCTACTACATGTTCATCGAGACATCGAGGCCTCGGGAGCTGGGGGACCGTGCAAGGTTAGTG
AGTCCCCTCTACAATGCCAGCGCCAAGTTCTACTGTGTCTCCTTCTTCTACCACATGTACGGGAAACA
CATCGGCTCCCTCAACCTCCTGGTGCGGTCCCGGAACAAAGGGGCTCTGGACACGCACGCCTGGTCTC
TCAGTGGCAATAAGGGCAATGTGTGGCAGCAGGCCCATGTGCCCATCAGCCCCAGTGGGCCCTTCCAG
ATTATTTTTGAGGGGGTTCGAGGCCCGGGCTACCTGGGGGATATTGCCATAGATGACGTCACACTGAA
GAAGGGGGAGTGTCCCCGGAAGCAGACGGATCCCAATAAAGTGGTGGTGATGCCGGGCAGTGGAGCCC
CCTGCCAGTCCAGCCCACAGCTGTGGGGGCCCATGGCCATCTTCCTCTTGGCGTTGCAGAGACTCGAG
GGC

| | | | |
|---|---|---|---|
| NOV46c, CG57409-07 | SEQ ID NO: 1024 | 448 aa | MW at 50048.1kD |
| Protein Sequence | | | |

MSGTYRCQTARYNGFNVRPREAQVQLNVQFPPEVEPSSQDVRQALGRPVLLRCSLLRGSPQRIASAVW
RFKGQLLPPPPVVPAAAEAPDHAELRLDAVTRDSSGSYECSVSNDVGSAACLFQVSAKAYSPEFYFDT
PNPTRSHKLSKNYSYVLQWTQREPDAVDPVLNYRLSIRQLNQHNAVVKAIPVRRVEKGQLLEYILTDL
RVPHSYEVRLTPYTTFGAGDMASRIIHYTEPINSPNLSDNTCHFEDEKICGYTQDLTDNFDWTRQNAL
TQNPKRSPNTGPPTDISGTPEGYYMFIETSRPRELGDRARLVSPLYNASAKFYCVSFFYHMYGKHIGS
LNLLVRSRNKGALDTHAWSLSGNKGNVWQQAHVPISPSGPFQIIFEGVRGPGYLGDIAIDDVTLKKGE
CPRKQTDPNKVVVMPGSGAPCQSSPQLWGPMAIFLLALQR

| | | |
|---|---|---|
| NOV46d, 312102874 | SEQ ID NO: 1025 | 1369 bp |
| DNA Sequence | ORF Start: at 2 | ORF Stop: end of sequence |

CACCAAGCTTCCCACCATGAGCGGGACCTACCGCTGCCAGACGGCCCGCTATAATGGCTTCAACGTGC
GCCCCCGTGAGGCCCAGGTGCAGCTGAACGTGCAGTTCCCGCCGGAGGTGGAGCCCAGTTCCCAGGAC
GTGCGCCAGGCGCTGGGCCGGCCCGTGCTCCTGCGCTGCTCGCTGCTGCGAGGCAGCCCCCAGCGCAT
CGCCTCGGCTGTGTGGCGTTTCAAAGGGCAGCTGCTGCCGCCGCCGCCTGTTGTTCCCGCCGCCGCCG
AGGCGCCGGATCACGCGGAGCTGCGCCTCGACGCCGTAACTCGCGACAGCAGCGGCAGCTACGAGTGC
AGCGTCTCCAACGATGTGGGCTCGGCTGCCTGCCTCTTCCAGGTCTCCGCCAAAGCCTACAGCCCGGA
GTTTTACTTCGACACCCCCAACCCCACCCGCAGCCACAAGCTGTCCAAGAACTACTCCTACGTGCTGC
AGTGGACTCAGAGGGAGCCCGACGCTGTCGACCCTGTGCTCAACTACAGACTCAGCATCCGCCAGTTG
AACCAGCACAATGCGGTGGTCAAGGCCATCCCGGTCCGGCGTGTGGAGAAGGGGCAGCTGCTGGAGTA
CATCCTGACCGATCTCCGTGTGCCCCACAGCTATGAGGTCCGCCTCACACCCTATACCACCTTCGGGG
CTGGTGACATGGCCTCCCGCATCATCCACTACACAGAGCCCATCAACTCTCCGAACCTTTCAGACAAC
ACCTGCCACTTTGAGGATGAGAAGATCTGTGGCTATACCCAGGACCTGACAGACAACTTTGACTGGAC
GCGGCAGAATGCCCTCACCCAGAACCCCAAACGCTCCCCCAACACTGGTCCCCCCACCGACATAAGTG
GCACCCCTGAGGGCTACTACATGTTCATCGAGACATCGAGGCCTCGGGAGCTGGGGGACCGTGCAAGG
TTAGTGAGTCCCCTCTACAATGCCAGCGCCAAGTTCTACTGTGTCTCCTTCTTCTACCACATGTACGG
GAAACACATCGGCTCCCTCAACCTCCTGGTGCGGTCCCGGAACAAAGGGGCTCTGGACACGCACGCCT
GGTCTCTCAGTGGCAATAAGGGCAATGTGTGGCAGCAGGCCCATGTGCCCATCAGCCCCAGTGGGCCC
TTCCAGATTATTTTTGAGGGGGTTCGAGGCCCGGGCTACCTGGGGGATATTGCCATAGATGACGTCAC
ACTGAAGAAGGGGGAGTGTCCCCGGAAGCAGACGGATCCCAATAAAGTGGTGGTGATGCCGGGCAGTG
GAGCCCCCTGCCAGTCCAGCCCACAGCTGTGGGGGCCCATGGCCATCTTCCTCTTGGCGTTGCAGAGA
GAATTCGGC

| | | | |
|---|---|---|---|
| NOV46d, 312102874 | SEQ ID NO: 1026 | 456 aa | MW at 50922.1kD |
| Protein Sequence | | | |

TKLPTMSGTYRCQTARYNGFNVRPREAQVQLNVQFPPEVEPSSQDVRQALGRPVLLRCSLLRGSPQRI
ASAVWRFKGQLLPPPPVVPAAAEAPDHAELRLDAVTRDSSGSYECSVSNDVGSAACLFQVSAKAYSPE
FYFDTPNPTRSHKLSKNYSYVLQWTQREPDAVDPVLNYRLSIRQLNQHNAVVKATPVRRVEKGQLLEY
ILTDLRVPHSYEVRLTPYTTFGAGDMASRIIHYTEPINSPNLSDNTCHFEDEKICGYTQDLTDNFDWT
RQNALTQNPKRSPNTGPPTDISGTPEGYYMFIETSRPRELGDRARLVSPLYNASAKFYCVSFFYHMYG
KHIGSLNLLVRSRNKGALDTHAWSLSGNKGNVWQQAHVPISPSGPFQIIFEGVRGPGYLGDIAIDDVT
LKKGECPRKQTDPNKVVVMPGSGAPCQSSPQLWGPMAIFLLALQREFG

| | | |
|---|---|---|
| NOV46e, 312102899 | SEQ ID NO: 1027 | 1249 bp |
| DNA Sequence | ORF Start: at 2 | ORF Stop: end of sequence |

CACCAAGCTTAGCGGGACCTACCGCTGCCAGACGGCCCGCTATAATGGCTTCAACGTGCGCCCCCGTG
AGGCCCAGGTGCAGCTGAACGTGCAGTTCCCGCCGGAGGTGGAGCCCAGTTCCCAGGACGTGCGCCAG
GCGCTGGGCCGGCCCGTGCTCCTGCGCTGCTCGCTGCTGCGAGGCAGCCCCCAGCGCATCGCCTCGGC
TGTGTGGCGTTTCAAAGGGCAGCTGCTGCCGCCGCCGCCTGTTGTTCCCGCCGCCGCCGAGGCGCCGG
ATCACGCGGAGCTGCGCCTCGACGCCGTAACTCGCGACAGCAGCGGCAGCTACGAGTGCAGCGTCTCC
AACGATGTGGGCTCGGCTGCCTGCCTCTTCCAGGTCTCCGCCAAAGCCTACAGCCCGGAGTTTTACTT
CGACACCCCCAACCCCACCCGCAGCCACAAGCTGTCCAAGAACTACTCCTACGTGCTGCAGTGGACTC
AGAGGGAGCCCGACGCTGTCGACCCTGTGCTCAACTACAGACTCAGCATCCGCCAGTTGAACCAGCAC
AATGCGGTGGTCAAGGCCATCCCGGTCCGGCGTGTGGAGAAGGGGCAGCTGCTGGAGTACATCCTGAC
CGATCTCCGTGTGCCCCACAGCTATGAGGTCCGCCTCACACCCTATACCACCTTCGGGGCTGGTGACA
TGGCCTCCCGCATCATCCACTACACAGAGCCCATCAACTCTCCGAACCTTTCAGACAACACCTGCCAC
TTTGAGGATGAGAAGATCTGTGGCTATACCCAGGACCTGACAGACAACTTTGACTGGACGCGGCAGAA
TGCCCTCACCCAGAACCCCAAACGCTCCCCCAACACTGGTCCCCCCACCGACATAAGTGGCACCCCTG
AGGGCTACTACATGTTCATCGAGACATCGAGGCCTCGGGAGCTGGGGGACCGTGCAAGGTTAGTGAGT
CCCCTCTACAATGCCAGCGCCAAGTTCTACTGTGTCTCCTTCTTCTACCACATGTACGGGAAACACAT
CGGCTCCCTCAACCTCCTGGTGCGGTCCCGGAACAAAGGGGCTCTGGACACGCACGCCTGGTCTCTCA
GTGGCAATAAGGGCAATGTGTGGCAGCAGGCCCATGTGCCCATCAGCCCCAGTGGGCCCTTCCAGATT
ATTTTTGAGGGGGTTCGAGGCCCGGGCTACCTGGGGGATATTGCCATAGATGACGTCACACTGAAGAA
GGGGGAGTGTCCCCGGGAATTCGGC

| | | | |
|---|---|---|---|
| NOV46e, 312102899 | SEQ ID NO: 1028 | 416 aa | MW at 46644.0kD |
| Protein Sequence | | | |

TKLSGTYRCQTARYNGFNVRPREAQVQLNVQFPPEVEPSSQDVRQALGRPVLLRCSLLRGSPQRIASA
VWRFKGQLLPPPPVVPAAAEAPDHAELRLDAVTRDSSGSYECSVSNDVGSAACLFQVSAKAYSPEFYF
DTPNPTRSHKLSKNYSYVLQWTQREPDAVDPVLNYRLSIRQLNQHNAVVKAIPVRRVEKGQLLEYILT
DLRVPHSYEVRLTPYTTFGAGDMASRIIHYTEPINSPNLSDNTCHFEDEKICGYTQDLTDNFDWTRQN
ALTQNPKRSPNTGPPTDISGTPEGYYMFIETSRPRELGDRARLVSPLYNASAKFYCVSFFYHMYGKHI
GSLNLLVRSRNKGALDTHAWSLSGNKGNVWQQAHVPISPSGPFQIIFEGVRGPGYLGDIAIDDVTLKK
GECPREFG

| | | |
|---|---|---|
| NOV46f, CG57409-01 | SEQ ID NO: 1029 | 4141 bp |
| DNA Sequence | ORF Start: ATG at 135 | ORF Stop: at 4140 |

TCTTCGTCGCCGCTCTCTCTCTCACCTCTCAGGGAAAGGGGGGGACATAGGGGCGTCGCGGGGCCCCC
GCGAATGCGCCCCCCGCCGCCTCTCGGGCTGCGCCGCCTCGCGGGGATGAAGCACCGGCCGTGAAGAT
GGAGGTGACCTGCCTTCTACTTCTGGCGCTGATCCCCTTCCACTGCCGGGGACAAGGAGTCTACGCTC
CAGCCCAGGCGCAGATCGTGCATGCGGGCCAGGCATGTGTGGTGAAAGAGGACAATATCAGCGAGCGT
GTCTACACCATCCGGGAGGGGGACACCCTCATGCTGCAGTGCCTTGTAACAGGGCACCCTCGACCCCA
GGTACGGTGGACCAAGACGGCAGGTAGCGCCTCGGACAAGTTCCAGGAGACATCGGTGTTCAACGAGA
CGCTGCGCATCGAGCGTATTGCACGCACGCAGGGCGGCCGCTACTACTGCAAGGCTGAGAACGGCGTG
GGGGTGCCGGCCATCAAGTCCATCCGCGTGGACGTGCAGTACCTGGATGAGCCAATGCTGACGGTGCA
CCAGACGGTGAGCGATGTGCGAGGCAACTTCTACCAGGAGAAGACGGTGTTCCTGCGCTGTACTGTCA
ACTCCAACCCGCCTGCCCGCTTCATCTGGAAGCGGGGTTCCGATACCCTATCCCACAGCCAGGACAAT
GGGGTTGACATCTATGAGCCCCTCTACACTCAGGGGGAGACCAAGGTCCTGAAGCTGAAGAACCTGCG
GCCCCAGGACTATGCCAGCTACACCTGCCAGGTGTCTGTGCGTAACGTGTGCGGCATCCCAGACAAGG
CCATCACCTTCCGGCTCACCAACACCACGGCACCACCAGCCCTGAAGCTGTCTGTGAACGAAACTCTG
GTGGTGAACCCTGGGGAGAATGTGACGGTGCAGTGTCTGCTGACAGGCGGTGATCCCCTCCCCCAGCT
GCAGTGGTCCCATGGGCCTGGCCCACTGCCCCTGGGTGCTCTGGCCCAGGGTGGCACCCTCAGCATCC
CTTCAGTGCAGGCCCGGGACTCTGGCTACTACAACTGCACAGCCACCAACAATGTGGGCAACCCTGCC
AAGAAGACTGTCAACCTGCTGGTGCGATCCATGAAGAACGCTACATTCCAGATCACTCCTGACGTGAT
CAAAGAGAGTGAGAACATCCAGCTGGGCCAGGACCTGAAGCTATCGTGCCACGTGGATGCAGTGCCCC
AGGAGAAGGTGACCTACCAGTGGTTCAAGAATGGCAAGCCGGCACGCATGTCCAAGCGGCTGCTGGTG
ACCCGCAATGATCCTGAGCTGCCCGCAGTCACCAGCAGCCTAGAGCTCATTGACCTGCACTTCAGTGA
CTATGGCACCTACCTGTGCATGGCTTCTTTCCCAGGGGCACCCGTGCCCGACCTCAGCGTCGAGGTCA
ACATCTCCTCTGAGACAGTGCCGCCCACCATCAGTGTGCCCAAGGGTAGGGCCGTGGTGACCGTGCGC
GAGGGATCGCCTGCCGAGCTGCAATGCGAGGTGCGGGGCAAGCCGCGGCCGCCAGTGCTCTGGTCCCG
CGTGGACAAGGAGGCTGCACTGCTGCCCTCGGGGCTGCCCCTGGAGGAGACTCCGGACGGGAAGCTGC
GGCTGGAGCGAGTGAGCCGAGACATGAGCGGGACCTACCGCTGCCAGACGGCCCGCTATAATGGCTTC
AACGTGCGCCCCCGTGAGGCCCAGGTGCAGCTGAACGTGCAGTTCCCGCCGGAGGTGGAGCCCAGTTC
CCAGGACGTGCGCCAGGCGCTGGGCCGGCCCGTGCTCCTGCGCTGCTCGCTGCTGCGAGGCAGCCCCC
AGCGCATCGCCTCGGCTGTGTGGCGTTTCAAAGGGCAGCTGCTGCCGCCGCCGCCTGTTGTTCCCGCC
GCCGCCGAGGCGCCGGATCACGCGGAGCTGCGCCTCGACGCCGTAACTCGCGACAGCAGCGGCAGCTA
CGAGTGCAGCGTCTCCAACGATGTGGGCTCGGCTGCCTGCCTCTTCCAGGTCTCCGCCAAAGCCTACA
GCCCGGAGTTTTACTTCGACACCCCCAACCCCACCCGCAGCCACAAGCTGTCCAAGAACTACTCCTAC
GTGCTGCAGTGGACTCAGAGGGAGCCCGACGCTGTCGACCCTGTGCTCAACTACAGACTCAGCATCCG
CCAGTTGAACCAGCACAATGCGGTGGTCAAGGCCATCCCGGTCCGGCGTGTGGAGAAGGGGCAGCTGC
TGGAGTACATCCTGACCGATCTCCGTGTGCCCCACAGCTATGAGGTCCGCCTCACACCCTATACCACC
TTCGGGGCTGGTGACATGGCCTCCCGCATCATCCACTACACAGAGCGCCAGATCCGCTGGCCCCCAGT
CCTGGCTCTGAGGACCCTGTCCTCTGGTCCCAAGCAGGGTATCCTCTGCAGAGCCCCACACCTCAGTT
CTGACTTGGTTTCCCCGCTTGCTTTCTCAGCCATCAACTCTCCGAACCTTTCAGACAACACCTGCCAC
TTTGAGGATGAGAAGATCTGTGGCTATACCCAGGACCTGACAGACAACTTTGACTGGACGCGGCAGAA
TGCCCTCACCCAGAACCCCAAACGCTCCCCCAACACTGGTCCCCCCACCGACATAAGTGGCACCCCTG
AGGGCTACTACATGTTCATCGAGACATCGAGGCCTCGGGAGCTGGGGGACCGTGCAAGGTTAGTGAGT
CCCCTCTACAATGCCAGCGCCAAGTTCTACTGTGTCTCCTTCTTCTACCACATGTACGGGAAACACAT
CGGCTCCCTCAACCTCCTGGTGCGGTCCCGGAACAAAGGGGCTCTGGACACGCACGCCTGGTCTCTCA
GTGGCAATAAGGGCAATGTGTGGCAGCAGGCCCATGTGCCCATCAGCCCCAGTGGGCCCTTCCAGATT
ATTTTTGAGGGGGTTCGAGGCCCGGGCTACCTGGGGGATATTGCCATAGATGACGTCACACTGAAGAA
GGGGGAGTGTCCCCGGAAGCAGACGGATCCCAATAAAGGTGCAAGACGGGAAGGAGCTGCCTGCGATG
GCCTGAAATTCCACCTTTCATCCCCTATGGATGACGGAGAGCTTACAGATGACCCTATTGAATGCAAG
CACCTTTGGATCCATAGAGTGGACAGTAAAGGTGCTCAGTACATGTTGGCTGAGCTGAACTGCATACA
TGTGGCCCCCAGGTTCCTGGTCTTTATGGACGAAGGGCACAAGGTTGGTGAAAAGGACTCCGGGGGCC
AGCCCTTCCAAGTTTACACTGATTTCTCCTTTTACCCTCATGCTATCCCTGAGAAGATGTCAATAATG
CCCACGTTACAGGTGGGAAAACTGAGGCTTAGAGAGGAGGAGGAATCTGCCTACGGTCACACAGCTGC
AAAGGCTAGAGCTGGGACCAGGAGCTGGTCTCTTAACCGACCACCTGAGCTCAAGAGCTTTTCTCTCT
GGACCAACATGACCCAAAGTGTGCGCGAGCCTATCACAGGTCCCCTGCAATGCCAAACATACACGCAC
AGCAATACACAACACCTGGGGACATGGATGAAGCTGGAAACCATCATTCTCAGCAAACTGACACAAGA
ACAGAAAACCAAACACCACATGTTCTCACTCACCACCCAGTCTGCCCCGCCCTCTCTCTTCTCACCTG
AACTTCCCCTCTCCTCAAACTCTCGAGGCCACGCCTCTATGTCCTTGGATGATGATGATGACGACGAC
GACGATGATGATGATGATGATGACGACGATGACAATGATGATGATGATGGAAGGAAGACCTACAGAAT
CCCTCCAGGCTCTGACCTCAGTGCTTGTGGGTGGGTGAATGACCACATGTCGCAGGGAGACTCCACAG
GTCCTCCCGATGAGAAGCACTCTTATGCCAAAGAGGAGACTCAGGCCAAACTGACAGGACCAGGAATT
AGCTACCCTGGTAAACCCAGCTATCGACTGCACCCGAGCGGCTACACACCACTGGAGCAGTTCAGGGA
GAAAGCCACCGGCATGCTCACCCCGTATGTCTCTGGCTCTGTTTCCTCTTTCTGCTTCCCCTTCCCCA
CCTCTGAGTCTCTGTGTTCTGCTCATGCCAATTCCCCTTCTGCCTGTCTCTGCCCGCTTCT

| | | | |
|---|---|---|---|
| NOV46f, CG57409-01 | SEQ ID NO: 1030 | 1335 aa | MW at 147969.4kD |
| Protein Sequence | | | |

MEVTCLLLLALIPFHCRGQGVYAPAQAQIVHAGQACVVKEDNISERVYTIREGDTLMLQCLVTGHPRP
QVRWTKTAGSASDKFQETSVFNETLRIERIARTQGGRYYCKAENGVGVPAIKSIRVDVQYLDEPMLTV
HQTVSDVRGNFYQEKTVFLRCTVNSNPPARFIWKRGSDTLSHSQDNGVDIYEPLYTQGETKVLKLKNL
RPQDYASYTCQVSVRNVCGIPDKAITFRLTNTTAPPALKLSVNETLVVNPGENVTVQCLLTGGDPLPQ
LQWSHGPGPLPLGALAQGGTLSIPSVQARDSGYYNCTATNNVGNPAKKTVNLLVRSMKNATFQITPDV
IKESENIQLGQDLKLSCHVDAVPQEKVTYQWFKNGKPARMSKRLLVTRNDPELPAVTSSLELIDLHFS
DYGTYLCMASFPGAPVPDLSVEVNISSETVPPTISVPKGRAVVTVREGSPAELQCEVRGKPRPPVLWS
RVDKEAALLPSGLPLEETPDGKLRLERVSRDMSGTYRCQTARYNGFNVRPREAQVQLNVQFPPEVEPS
SQDVRQALGRPVLLRCSLLRGSPQRIASAVWRFKGQLLPPPPVVPAAAEAPDHAELRLDAVTRDSSGS
YECSVSNDVGSAACLFQVSAKAYSPEFYFDTPNPTRSHKLSKNYSYVLQWTQREPDAVDPVLNYRLSI
RQLNQHNAVVKAIPVRRVEKGQLLEYILTDLRVPHSYEVRLTPYTTFGAGDMASRIIHYTERQIRWPP
VLALRTLSSGPKQGILCRAPHLSSDLVSPLAFSAINSPNLSDNTCHFEDEKICGYTQDLTDNFDWTRQ
NALTQNPKRSPNTGPPTDISGTPEGYYMFIETSRPRELGDRARLVSPLYNASAKFYCVSFFYHMYGKH
IGSLNLLVRSRNKGALDTHAWSLSGNKGNVWQQAHVPISPSGPFQIIFEGVRGPGYLGDIAIDDVTLK
KGECPRKQTDPNKGARREGAACDGLKFHLSSPMDDGELTDDPIECKHLWIHRVDSKGAQYMLAELNCI
HVAPRFLVFMDEGHKVGEKDSGGQPFQVYTDFSFYPHAIPEKMSIMPTLQVGKLRLREEEESAYGHTA
AKARAGTRSWSLNRPPELKSFSLWTNMTQSVREPITGPLQCQTYTHSNTQHLGTWNKLETIILSKLTQ
EQKTKHHMFSLTTQSAPPSLFSPELPLSSNSRGHASMSLDDDDDDDDDDDDDDDDDDNDDDDGRKTYR
IPPGSDLSACGWVNDHMSQGDSTGPPDEKHSYAKEETQAKLTGPGISYPGKPSYRLHPSGYTPLEQFR
EKATGMLTPYVSGSVSSFCFPFPTSESLCSAHANSPSACLCPL

| | | |
|---|---|---|
| NOV46g, CG57409-02 | SEQ ID NO: 1031 | 720 bp |
| DNA Sequence | ORF Start: at 7 | ORF Stop: at 715 |

GGTACCTTGAACCAGCACAATGCGGTGGTCAAGGCCATCCCGGTCCGGCGTGTGGAGAAGGGGCAGCT
GCTGGAGTACATCCTGACCGATCTCCGTGTGCCCCACAGCTATGAGGTCCGCCTCACACCCTATACCA
CCTTCGGGGCTGGTGACATGGCCTCCCGCATCATCCACTACACAGAGCCCATCAACTCTCCGAACCTT
TCAGACAACACCTGCCACTTTGAGGATGAGAAGATCTGTGGCTATACCCAGGACCTGACAGACAACTT
TGACTGGACGCGGCAGAATGCCCTCACCCAGAACCCCAAACGCTCCCCCAACACTGGTCCCCCCACCG
ACATAAGTGGCACCCCTGAGGGCTACTACATGTTCATCGAGACATCGAGGCCTCGGGAGCTGGGGGAC
CGTGCAAGGTTAGTGAGTCCCCTCTACAATGCCTGCGCCAAGTTCTACTGTGTCTCCTTCTTCTACCA
CATGTACGGGAAACACATCGGCTCCCTCAACCTCCTGGTGCGGTCCCGGAACAAAGGGGCTCTGGACA
CGCACGCCTGGTCTCTCAGTGGCAATAAGGGCAATGTGTGGCAGCAGGCCCATGTGCCCATCAGCCCC
AGTGGGCCCTTCCAGATTATTTTTGAGGGGGTTCGAGGCCCGGGCTACCTGGGGGATATTGCCATAGA
TGACGTCACACTGAAGAAGGGGGAGTGTCCCCGGGAATTC

| | | | |
|---|---|---|---|
| NOV46g, CG57409-02 | SEQ ID NO: 1032 | 236 aa | MW at 26563.7kD |
| Protein Sequence | | | |

LNQHNAVVKAIPVRRVEKGQLLEYILTDLRVPHSYEVRLTPYTTFGAGDMASRIIHYTEPINSPNLSD
NTCHFEDEKICGYTQDLTDNFDWTRQNALTQNPKRSPNTGPPTDISGTPEGYYMFIETSRPRELGDRA
RLVSPLYNACAKFYCVSFFYHMYGKHIGSLNLLVRSRNKGALDTHAWSLSGNKGNVWQQAHVPISPSG
PFQIIFEGVRGPGYLGDIAIDDVTLKKGECPR

| | | |
|---|---|---|
| NOV46h, CG57409-03 | SEQ ID NO: 1033 | 4169 bp |
| DNA Sequence | ORF Start: ATG at 135 | ORF Stop: TGA at 4080 |

TCTTCGTCGCCGCTCTCTCTCTCACCTCTCAGGGAAAGGGGGGGACATAGGGGCGTCGCGGGGCCCCG
GCGAATGCGCCCCCCGCCGCCTCTCGGGCTGCGCCGCCTCGCGGGGATGAAGCACCGGCCGTGAAGAT
GGAGGTGACCTGCCTTCTACTTCTGGCGCTGATCCCCTTCCACTGCCGGGGACAAGGAGTCTACGCTC
CAGCCCAGGCGCAGATCGTGCATGCGGGCCAGGCATGTGTGGTGAAAGAGGACAATATCAGCGAGCGT
GTCTACACCATCCGGGAGGGGGACACCCTCATGCTGCAGTGCCTTGTAACAGGGCACCCTCGACCCCA
GGTACGGTGGACCAAGACGGCAGGTAGCGCCTCGGACAAGTTCCAGGAGACATCGGTGTTCAACGAGA
CGCTGCGCATCGAGCGTATTGCACGCACGCAGGGCGGCCGCTACTACTGCAAGGCTGAGAACGGCGTG
GGGGTGCCGGCCATCAAGTCCATCCGCGTGGACGTGCAGTACCTGGATGAGCCAATGCTGACGGTGCA
CCAGACGGTGAGCGATGTGCGAGGCAACTTCTACCAGGAGAAGACGGTGTTCCTGCGCTGTACTGTCA
ACTCCAACCCGCCTGCCCGCTTCATCTGGAAGCGGGGTTCCGATACCCTATCCCACAGCCAGGACAAT
GGGGTTGACATCTATGAGCCCCTCTACACTCAGGGGGAGACCAAGGTCCTGAAGCTGAAGAACCTGCG
GCCCCAGGACTATGCCAGCTACACCTGCCAGGTGTCTGTGCGTAACGTGTGCGGCATCCCAGACAAGG
CCATCACCTTCCGGCTCACCAACACCACGGCACCACCAGCCCTGAAGCTGTCTGTGAACGAAACTCTG
GTGGTGAACCCTGGGGAGAATGTGACGGTGCAGTGTCTGCTGACAGGCGGTGATCCCCTCCCCCAGCT
GCAGTGGTCCCATGGGCCTGGCCCACTGCCCCTGGGTGCTCTGGCCCAGGGTGGCACCCTCAGCATCC
CTTCAGTGCAGGCCCGGGACTCTGGCTACTACAACTGCACAGCCACCAACAATGTGGGCAACCCTGCC
AAGAAGACTGTCAACCTGCTGGTGCGATCCATGAAGAACGCTACATTCCAGATCACTCCTGACGTGAT
CAAAGAGAGTGAGAACATCCAGCTGGGCCAGGACCTGAAGCTATCGTGCCACGTGGATGCAGTGCCCC
AGGAGAAGGTGACCTACCAGTGGTTCAAGAATGGCAAGCCGGCACGCATGTCCAAGCGGCTGCTGGTG
ACCCGCAATGATCCTGAGCTGCCCGCAGTCACCAGCAGCCTAGAGCTCATTGACCTGCACTTCAGTGA
CTATGGCACCTACCTGTGCATGGCTTCTTTCCCAGGGGCACCCGTGCCCGACCTCAGCGTCGAGGTCA
ACATCTCCTCTGAGACAGTGCCGCCCACCATCAGTGTGCCCAAGGGTAGGGCCGTGGTGACCGTGCGC
GAGGGATCGCCTGCCGAGCTGCAATGCGAGGTGCGGGGCAAGCCGCGGCCGCCAGTGCTCTGGTCCCG
CGTGGACAAGGAGGCTGCACTGCTGCCCTCGGGGCTGCCCCTGGAGGAGACTCCGGACGGGAAGCTGC
GGCTGGAGCGAGTGAGCCGAGACATGAGCGGGACCTACCGCTGCCAGACGGCCCGCTATAATGGCTTC
AACGTGCGCCCCCGTGAGGCCCAGGTGCAGCTGAACGTGCAGTTCCCGCCGGAGGTGGAGCCCAGTTC
CCAGGACGTGCGCCAGGCGCTGGGCCGGCCCGTGCTCCTGCGCTGCTCGCTGCTGCGAGGCAGCCCCC
AGCGCATCGCCTCGGCTGTGTGGCGTTTCAAAGGGCAGCTGCTGCCGCCGCCGCCTGTTGTTCCCGCC
GCCGCCGAGGCGCCGGATCACGCGGAGCTGCGCCTCGACGCCGTAACTCGCGACAGCAGCGGCAGCTA
CGAGTGCAGCGTCTCCAACGATGTGGGCTCGGCTGCCTGCCTCTTCCAGGTCTCCGCCAAAGCCTACA
GCCCGGAGTTTTACTTCGACACCCCCAACCCCACCCGCAGCCACAAGCTGTCCAAGAACTACTCCTAC
GTGCTGCAGTGGACTCAGAGGGAGCCCGACGCTGTCGACCCTGTGCTCAACTACAGACTCAGCATCCG
CCAGTTGAACCAGCACAATGCGGTGGTCAAGGCCATCCCGGTCCGGCGTGTGGAGAAGGGGCAGCTGC
TGGAGTACATCCTGACCGATCTCCGTGTGCCCCACAGCTATGAGGTCCGCCTCACACCCTATACCACC
TTCGGGGCTGGTGACATGGCCTCCCGCATCATCCACTACACAGAGCCCATCAACTCTCCGAACCTTTC
AGACAACACCTGCCACTTTGAGGATGAGAAGATCTGTGGCTATACCCAGGACCTGACAGACAACTTTG
ACTGGACGCGGCAGAATGCCCTCACCCAGAACCCCAAACGCTCCCCCAACACTGGTCCCCCCACCGAC
ATAAGTGGCACCCCTGAGGGCTACTACATGTTCATCGAGACATCGAGGCCTCGGGAGCTGGGGGACCG
TGCAAGGTTAGTGAGTCCCCTCTACAATGCCAGCGCCAAGTTCTACTGTGTCTCCTTCTTCTACCACA
TGTACGGGAAACACATCGGCTCCCTCAACCTCCTGGTGCGGTCCCGGAACAAAGGGGCTCTGGACACG
CACGCCTGGTCTCTCAGTGGCAATAAGGGCAATGTGTGGCAGCAGGCCCATGTGCCCATCAGCCCCAG
TGGGCCCTTCCAGATTATTTTTGAGGGGGTTCGAGGCCCGGGCTACCTGGGGGATATTGCCATAGATG
ACGTCACACTGAAGAAGGGGGAGTGTCCCCGGAAGCAGACGGATCCCAATAAAGGTGCAAGACGGGAA
GGAGCTGCCTGCGATGGCCTGAAATTCCACCTTTCATCCCCTATGGATGACGGAGAGCTTACAGATGA
CCCTATTGAATGCAAGCACCTTTGGATCCATAGAGTGGACAGTAAAGGTGCTCAGTACATGTTGGCTG
AGCTGAACTGCATACATGTGGCCCCCAGGTTCCTGGTCTTTATGGACGAAGGGCACAAGGTTGGTGAA
AAGGACTCCGGGGGCCAGCCCTTCCAAGTTTACACTGATTTCTCCTTTTACCCTCATGCTATCCCTGA
GAAGATGTCAATAATGCCCACGTTACAGGTGGGAAAACTGAGGCTTAGAGAGGAGGAGGAATCTGCCT
ACGGTCACACAGCTGCAAAGGCTAGAGCTGGGACCAGGAGCTGGTCTCTTAACCGACCACCTGAGCTC
AAGAGCTTTTCTCTCTGGACCAACATGACCCAAAGTGTGCGCGAGCCTATCACAGGTCCCCTGCAATG
CCAAACATACACGCACAGCAATACACAACACCTGGGGACATGGATGAAGCTGGAAACCATCATTCTCA
GCAAACTGACACAAGAACAGAAAACCAAACACCACATGTTCTCACTCACCACCCAGTCTGCCCCGCCC
TCTCTCTTCTCACCTGAACTTCCCCTCTCCTCAAACTCTCGAGGCCACGCCTCTATGTCCTTGGATGA
TGATGATGACGACGACGACGATGATGATGATGATGATGACGACGATGACAATGATGATGATGATGGAA
GGAAGACCTACAGAATCCCTCCAGGCTCTGACCTCAGTGCTTGTGGGTGGGTGAATGACCACATGTCG
CAGGGAGACTCCACAGGTCCTCCCGATGAGAAGCACTCTTATGCCAAAGAGGAGACTCAGGCCAAACT
GACAGGACCAGGAATTAGCTACCCTGGTAAACCCAGCTATCGACTGCACCCGAGCGGCTACACACCAC
TGGAGCAGTTCAGGGAGAAAGCCACCGGCATGCTCACCCCGTATGTCTCTGGCTCTGTTTCCTCTTTC
TGCTTCCCCTTCCCCACCTCTGAGTCTCTGTGTTCTGCTCATGCCAATTCCCCTTCTGCCTGTCTCTG
CCCGCTTCTCTCTGGGCTGGTCTCTCCGAGACTCTGTTCCCTTGGCTGGCATGCCCTCCACCTCCCCT
GATGGTTCAGCAGAGATGAAGCCGGCCTGGCTCATGGGTGTGGGTAATGTACTAGTGCAGGAGAGTGG
TGGGGCCCAGTCTGGGTGCAG

| | | | |
|---|---|---|---|
| NOV46h, CG57409-03 | SEQ ID NO: 1034 | 1315 aa | MW at 145782.9kD |
| Protein Sequence | | | |

MEVTCLLLLALIPFHCRGQGVYAPAQAQIVHAGQACVVKEDNISERVYTIREGDTLMLQCLVTGHPRP
QVRWTKTAGSASDKFQETSVFNETLRIERIARTQGGRYYCKAENGVGVPAIKSIRVDVQYLDEPMLTV
HQTVSDVRGNFYQEKTVFLRCTVNSNPPARFIWKRGSDTLSHSQDNGVDIYEPLYTQGETKVLKLKNL
RPQDYASYTCQVSVRNVCGIPDKAITFRLTNTTAPPALKLSVNETLVVNPGENVTVQCLLTGGDPLPQ
LQWSHGPGPLPLGALAQGGTLSIPSVQARDSGYYNCTATNNVGNPAKKTVNLLVRSMKNATFQITPDV
IKESENIQLGQDLKLSCHVDAVPQEKVTYQWFKNGKPARMSKRLLVTRNDPELPAVTSSLELIDLHFS
DYGTYLCMASFPGAPVPDLSVEVNISSETVPPTISVPKGRAVVTVREGSPAELQCEVRGKPRPPVLWS
RVDKEAALLPSGLPLEETPDGKLRLERVSRDMSGTYRCQTARYNGFNVRPREAQVQLNVQFPPEVEPS
SQDVRQALGRPVLLRCSLLRGSPQRIASAVWRFKGQLLPPPPVVPAAAEAPDHAELRLDAVTRDSSGS
YECSVSNDVGSAACLFQVSAKAYSPEFYFDTPNPTRSHKLSKNYSYVLQWTQREPDAVDPVLNYRLSI
RQLNQHNAVVKAIPVRRVEKGQLLEYILTDLRVPHSYEVRLTPYTTFGAGDMASRIIHYTEPINSPNL
SDNTCHFEDEKICGYTQDLTDNFDWTRQNALTQNPKRSPNTGPPTDISGTPEGYYMFIETSRPRELGD
RARLVSPLYNASAKFYCVSFFYHMYGKHIGSLNLLVRSRNKGALDTHAWSLSGNKGNVWQQAHVPISP
SGPFQIIFEGVRGPGYLGDIAIDDVTLKKGECPRKQTDPNKGARREGAACDGLKFHLSSPMDDGELTD
DPIECKHLWIHRVDSKGAQYMLAELNCIHVAPRFLVFMDEGHKVGEKDSGGQPFQVYTDFSFYPHAIP
EKMSIMPTLQVGKLRLREEEESAYGHTAAKARAGTRSWSLNRPPELKSFSLWTNMTQSVREPITGPLQ
CQTYTHSNTQHLGTWMKLETIILSKLTQEQKTKHHNFSLTTQSAPPSLFSPELPLSSNSRGHASMSLD
DDDDDDDDDDDDDDDDDNDDDDGRKTYRIPPGSDLSACGWVNDHMSQGDSTGPPDEKHSYAKEETQAK
LTGPGISYPGKPSYRLHPSGYTPLEQFREKATGMLTPYVSGSVSSFCFPFPTSESLCSAHANSPSACL
CPLLSGLVSPRLCSLGWHALHLP

| | | |
|---|---|---|
| NOV46i, CG57409-04 | SEQ ID NO: 1035 | 720 bp |
| DNA Sequence | ORF Start: at 7 | ORF Stop: at 715 |

GGATCCTTGAACCAGCACAATGCGGTGGTCAAGGCCATCCCGGTCCGGCGTGTGGAGAAGGGGCAGCT
GCTGGAGTACATCCTGACCGATCTCCGTGTGCCCCACAGCTATGAGGTCCGCCTCACACCCTATACCA
CCTTCGGGGCTGGTGACATGGCCTCCCGCATCATCCACTACACAGAGCCCATCAACTCTCCGAACCTT
TCAGACAACACCTGCCACTTTGAGGATGAGAAGATCTGTGGCTATACCCAGGACCTGACAGACAACTT
TGACTGGACGCGGCAGAATGCCCTCACCCAGAACCCCAAACGCTCCCCCAACACTGGTCCCCCCACCG
ACATAAGTGGCACCCCTGAGGGCTACTACATGTTCATCGAGACATCGAGGCCTCGGGAGCTGGGGGAC
CGTGCAAGGTTAGTGAGTCCCCTCTACAATGCCTGCGCCAAGTTCTACTGTGTCTCCTTCTTCTACCA
CATGTACGGGAAACACATCGGCTCCCTCAACCTCCTGGTGCGGTCCCGGAACAAAGGGGCTCTGGACA
CGCACGCCTGGTCTCTCAGTGGCAATAAGGGCAATGTGTGGCAGCAGGCCCATGTGCCCATCAGCCCC
AGTGGGCCCTTCCAGATTATTTTTGAGGGGGTTCGAGGCCCGGGCTACCTGGGGGATATTGCCATAGA
TGACGTCACACTGAAGAAGGGGGAGTGTCCCCGGCTCGAG

| | | | |
|---|---|---|---|
| NOV46i, CG57409-04 | SEQ ID NO: 1036 | 236 aa | MW at 26563.7kD |
| Protein Sequence | | | |

LNQHNAVVKAIPVRRVEKGQLLEYILTDLRVPHSYEVRLTPYTTFGAGDMASRIIHYTEPINSPNLSD
NTCHFEDEKICGYTQDLTDNFDWTRQNALTQNPKRSPNTGPPTDISGTPEGYYMFIETSRPRELGDRA
RLVSPLYNACAKFYCVSFFYHMYGKHIGSLNLLVRSRNKGALDTHAWSLSGNKGNVWQQAHVPISPSG
PFQIIFEGVRGPGYLGDIAIDDVTLKKGECPR

| | | |
|---|---|---|
| NOV46j, CG57409-06 | SEQ ID NO: 1037 | 1828 bp |
| DNA Sequence | ORF Start: ATG at 12 | ORF Stop: TGA at 1521 |

TGAGCCGAGACATGAGCGGGACCTACCGCTGCCAGACGGCCCGCTATAATGGCTTCAACGTGCGCCCC
CGTGAGGCCCAGGTGCAGCTGAACGTGCAGTTCCCGCCGGAGGTGGAGCCCAGTTCCCAGGACGTGCG
CCAGGCGCTGGGCCGGCCCGTGCTCCTGCGCTGCTCGCTGCTGCGAGGCAGCCCCCAGCGCATCGCCT
CGGCTGTGTGGCGTTTCAAAGGGCAGCTGCTGCCGCCGCCGCCTGTTGTTCCCGCCGCCGCCGAGGCG
CCGGATCACGCGGAGCTGCGCCTCGACGCCGTAACTCGCGACAGCAGCGGCAGCTACGAGTGCAGCGT
CTCCAACGATGTGGGCTCGGCTGCCTGCCTCTTCCAGGTCTCCGCCAAAGCCTACAGCCCGGAGTTTT
ACTTCGACACCCCCAACCCCACCCGCAGCCACAAGCTGTCCAAGAACTACTCCTACGTGCTGCAGTGG
ACTCAGAGGGAGCCCGACGCTGTCGACCCTGTGCTCAACTACAGACTCAGCATCCGCCAGTTGAACCA
GCACAATGCGGTGGTCAAGGCCATCCCGGTCCGGCGTGTGGAGAAGGGGCAGCTGCTGGAGTACATCC
TGACCGATCTCCGTGTGCCCCACAGCTATGAGGTCCGCCTCACACCCTATACCACCTTCGGGGCTGGT
GACATGGCCTCCCGCATCATCCACTACACAGAGCGCCAGATCCGCTGGCCCCCAGTCCTGGCTCTGAG
GACCCTGTCCTCTGGTCCCAAGCAGGGTATCCTCTGCAGAGCCCCACACCTCAGTTCTGACTTGGTTT
CCCCGCTTGCTTTCTCAGCCATCAACTCTCCGAACCTTTCAGACAACACCTGCCACTTTGAGGATGAG
AAGATCTGTGGCTATACCCAGGACCTGACAGACAACTTTGACTGGACGCGGCAGAATGCCCTCACCCA
GAACCCCAAACGCTCCCCCAACACTGGTCCCCCCACCGACATAAGTGGCACCCCTGAGGGCTACTACA
TGTTCATCGAGACATCGAGGCCTCGGGAGCTGGGGGACCGTGCAAGGTTAGTGAGTCCCCTCTACAAT
GCCAGCGCCAAGTTCTACTGTGTCTCCTTCTTCTACCACATGTACGGGAAACACATCGGCTCCCTCAA
CCCCCTGGTGCGGTCCCGGAACAAAGGGGCTCTGGACACGCACGCCTGGTCTCTCAGTGGCAATAAGG
GCAATGTGTGGCAGCAGGCCCATGTGCCCATCAGCCCCAGTGGGCCCTTCCAGATTATTTTTGAGGGG
GTTCGAGGCCCGGGCTACCTGGGGGATATTGCCATAGATGACGTCACACTGAAGAAGGGGGAGTGTCC
CCGGAAGCAGACGGATCCCAATAAAGGTGCAAGACGGGAAGGAGGTGGGGGAGCTGAATCTGGAGGGA
GCTGTGCGTGGCGGGGGTTCCTGTCTGTTGAGGGAGGGTGTTCGGGTCTGAATAGGGGTTCAGACTGT
CTGATGATGGGAATCAGGTGGCTCTGACTGTGTTAACGTGTGCCCACAACTCACGTCAGGCTGAGAAC
TGGTGTAACACCATGAGAAAGCTTGGCCCCCACCATCGTGATGAGCATACCGACCTGGTCACCGGAAC
ACAAACACCAACAACCACAGAGGGCGCCTCAGAATACCCAGAGGGCCCAATACGCCGACCCGCTGTCA
CGAGCGCCCACGAGCGGCAGAACACGACAGGCACACAACCAGCCGGAGCAAGACGGAGCCGAGAGCCC
CGGGGACATAGACCCCAGCAAGCGACACACAAGGACGCGCACAGAGCGCACACACTAACA

| | | | |
|---|---|---|---|
| NOV46j, CG57409-06 | SEQ ID NO: 1038 | 503 aa | MW at 55764.4kD |
| Protein Sequence | | | |

MSGTYRCQTARYNGFNVRPREAQVQLNVQFPPEVEPSSQDVRQALGRPVLLRCSLLRGSPQRIASAVW
RFKGQLLPPPPVVPAAAEAPDHAELRLDAVTRDSSGSYECSVSNDVGSAACLFQVSAKAYSPEFYFDT
PNPTRSHKLSKNYSYVLQWTQREPDAVDPVLNYRLSIRQLNQHNAVVKAIPVRRVEKGQLLEYILTDL
RVPHSYEVRLTPYTTFGAGDMASRIIHYTERQIRWPPVLALRTLSSGPKQGILCRAPHLSSDLVSPLA
FSAINSPNLSDNTCHFEDEKICGYTQDLTDNFDWTRQNALTQNPKRSPNTGPPTDISGTPEGYYMFIE
TSRPRELGDRARLVSPLYNASAKFYCVSFFYHMYGKHIGSLNPLVRSRNKGALDTHAWSLSGNKGNVW
QQAHVPISPSGPFQIIFEGVRGPGYLGDIAIDDVTLKKGECPRKQTDPNKGARREGGGGAESGGSCAW
RGFLSVEGGCSGLNRGSDCLNMGIRWL

| | | |
|---|---|---|
| NOV46k, CG57409-08 | SEQ ID NO: 1039 | 1369 bp |
| DNA Sequence | ORF Start: ATG at 17 | ORF Stop: end of sequence |

CACCAAGCTTCCCACCATGAGCGGGACCTACCGCTGCCAGACGGCCCGCTATAATGGCTTCAACGTGC
GCCCCCGTGAGGCCCAGGTGCAGCTGAACGTGCAGTTCCCGCCGGAGGTGGAGCCCAGTTCCCAGGAC
GTGCGCCAGGCGCTGGGCCGGCCCGTGCTCCTGCGCTGCTCGCTGCTGCGAGGCAGCCCCCAGCGCAT
CGCCTCGGCTGTGTGGCGTTTCAAAGGGCAGCTGCTGCCGCCGCCGCCTGTTGTTCCCGCCGCCGCCG
AGGCGCCGGATCACGCGGAGCTGCGCCTCGACGCCGTAACTCGCGACAGCAGCGGCAGCTACGAGTGC
AGCGTCTCCAACGATGTGGGCTCGGCTGCCTGCCTCTTCCAGGTCTCCGCCAAAGCCTACAGCCCGGA
GTTTTACTTCGACACCCCCAACCCCACCCGCAGCCACAAGCTGTCCAAGAACTACTCCTACGTGCTGC
AGTGGACTCAGAGGGAGCCCGACGCTGTCGACCCTGTGCTCAACTACAGACTCAGCATCCGCCAGTTG
AACCAGCACAATGCGGTGGTCAAGGCCATCCCGGTCCGGCGTGTGGAGAAGGGGCAGCTGCTGGAGTA
CATCCTGACCGATCTCCGTGTGCCCCACAGCTATGAGGTCCGCCTCACACCCTATACCACCTTCGGGG
CTGGTGACATGGCCTCCCGCATCATCCACTACACAGAGCCCATCAACTCTCCGAACCTTTCAGACAAC
ACCTGCCACTTTGAGGATGAGAAGATCTGTGGCTATACCCAGGACCTGACAGACAACTTTGACTGGAC
GCGGCAGAATGCCCTCACCCAGAACCCCAAACGCTCCCCCAACACTGGTCCCCCCACCGACATAAGTG
GCACCCCTGAGGGCTACTACATGTTCATCGAGACATCGAGGCCTCGGGAGCTGGGGGACCGTGCAAGG
TTAGTGAGTCCCCTCTACAATGCCAGCGCCAAGTTCTACTGTGTCTCCTTCTTCTACCACATGTACGG
GAAACACATCGGCTCCCTCAACCTCCTGGTGCGGTCCCGGAACAAAGGGGCTCTGGACACGCACGCCT
GGTCTCTCAGTGGCAATAAGGGCAATGTGTGGCAGCAGGCCCATGTGCCCATCAGCCCCAGTGGGCCC
TTCCAGATTATTTTTGAGGGGGTTCGAGGCCCGGGCTACCTGGGGGATATTGCCATAGATGACGTCAC
ACTGAAGAAGGGGGAGTGTCCCCGGAAGCAGACGGATCCCAATAAAGTGGTGGTGATGCCGGGCAGTG
GAGCCCCCTGCCAGTCCAGCCCACAGCTGTGGGGGCCCATGGCCATCTTCCTCTTGGCGTTGCAGAGA
GAATTCGGC

| | | | |
|---|---|---|---|
| NOV46k, CG57409-08 | SEQ ID NO: 1040 | 451 aa | MW at 50381.4kD |
| Protein Sequence | | | |

MSGTYRCQTARYNGFNVRPREAQVQLNVQFPPEVEPSSQDVRQALGRPVLLRCSLLRGSPQRIASAVW
RFKGQLLPPPPVVPAAAEAPDHAELRLDAVTRDSSGSYECSVSNDVGSAACLFQVSAKAYSPEFYFDT
PNPTRSHKLSKNYSYVLQWTQREPDAVDPVLNYRLSIRQLNQHNAVVKAIPVRRVEKGQLLEYILTDL
RVPHSYEVRLTPYTTFGAGDMASRIIHYTEPINSPNLSDNTCHFEDEKICGYTQDLTDNFDWTRQNAL
TQNPKRSPNTGPPTDISGTPEGYYMFIETSRPRELGDRARLVSPLYNASAKFYCVSFFYHMYGKHIGS
LNLLVRSRNKGALDTHAWSLSGNKGNVWQQAHVPISPSGPFQIIFEGVRGPGYLGDIAIDDVTLKKGE
CPRKQTDPNKVVVMPGSGAPCQSSPQLWGPMAIFLLALQREFG

[0621] A ClustalW comparison of the above protein sequences yields the following sequence alignment shown in Table 46B.

TABLE 46B
Comparison of the NOV46 protein sequences.

| | |
|---|---|
| NOV46a | ------------------------------------------------------------ |
| NOV46b | ------------------------------------------------------------ |
| NOV46c | ------------------------------------------------------------ |
| NOV46d | ------------------------------------------------------------ |
| NOV46e | ------------------------------------------------------------ |
| NOV46f | MEVTCLLLLALIPFHCRGQGVYAPAQAQIVHAGQACVVKEDNISERVYTIREGDTLMLQC |
| NOV46g | ------------------------------------------------------------ |
| NOV46h | MEVTCLLLLALIPFHCRGQGVYAPAQAQIVHAGQACVVKEDNISERVYTIREGDTLMLQC |
| NOV46i | ------------------------------------------------------------ |
| NOV46j | ------------------------------------------------------------ |
| NOV46k | ------------------------------------------------------------ |
| NOV46a | ------------------------------------------------------------ |
| NOV46b | ------------------------------------------------------------ |
| NOV46c | ------------------------------------------------------------ |
| NOV46d | ------------------------------------------------------------ |
| NOV46e | ------------------------------------------------------------ |
| NOV46f | LVTGHPRPQVRWTKTAGSASDKFQETSVFNETLRIERIARTQGGRYYCKAENGVGVPAIK |
| NOV46g | ------------------------------------------------------------ |
| NOV46h | LVTGHPRPQVRWTKTAGSASDKFQETSVFNETLRIERIARTQGGRYYCKAENGVGVPAIK |
| NOV46i | ------------------------------------------------------------ |
| NOV46j | ------------------------------------------------------------ |
| NOV46k | ------------------------------------------------------------ |
| NOV46a | ------------------------------------------------------------ |
| NOV46b | ------------------------------------------------------------ |
| NOV46c | ------------------------------------------------------------ |
| NOV46d | ------------------------------------------------------------ |
| NOV46e | ------------------------------------------------------------ |
| NOV46f | SIRVDVQYLDEPMLTVHQTVSDVRGNFYQEKTVFLRCTVNSNPPARFIWKRGSDTLSHSQ |
| NOV46g | ------------------------------------------------------------ |
| NOV46h | SIRVDVQYLDEPMLTVHQTVSDVRGNFYQEKTVFLRCTVNSNPPARFIWKRGSDTLSHSQ |
| NOV46i | ------------------------------------------------------------ |
| NOV46j | ------------------------------------------------------------ |
| NOV46k | ------------------------------------------------------------ |
| NOV46a | ------------------------------------------------------------ |
| NOV46b | ------------------------------------------------------------ |
| NOV46c | ------------------------------------------------------------ |
| NOV46d | ------------------------------------------------------------ |
| NOV46e | ------------------------------------------------------------ |
| NOV46f | DNGVDIYEPLYTQGETKVLKLKNLRPQDYASYTCQVSVRNVCGIPDKAITFRLTNTTAPP |
| NOV46g | ------------------------------------------------------------ |
| NOV46h | DNGVDIYEPLYTQGETKVLKLKNLRPQDYASYTCQVSVRNVCGIPDKAITFRLTNTTAPP |
| NOV46i | ------------------------------------------------------------ |
| NOV46j | ------------------------------------------------------------ |
| NOV46k | ------------------------------------------------------------ |
| NOV46a | ------------------------------------------------------------ |
| NOV46b | ------------------------------------------------------------ |
| NOV46c | ------------------------------------------------------------ |
| NOV46d | ------------------------------------------------------------ |
| NOV46e | ------------------------------------------------------------ |
| NOV46f | ALKLSVNETLVVNPGENVTVQCLLTGGDPLPQLQWSHGPGPLPLGALAQGGTLSIPSVQA |
| NOV46g | ------------------------------------------------------------ |
| NOV46h | ALKLSVNETLVVNPGENVTVQCLLTGGDPLPQLQWSHGPGPLPLGALAQGGTLSIPSVQA |
| NOV46i | ------------------------------------------------------------ |
| NOV46j | ------------------------------------------------------------ |
| NOV46k | ------------------------------------------------------------ |
| NOV46a | ------------------------------------------------------------ |
| NOV46b | ------------------------------------------------------------ |
| NOV46c | ------------------------------------------------------------ |
| NOV46d | ------------------------------------------------------------ |
| NOV46e | ------------------------------------------------------------ |
| NOV46f | RDSGYYNCTATNNVGNPAKKTVNLLVRSMKNATFQITPDVIKESENIQLGQDLKLSCHVD |
| NOV46g | ------------------------------------------------------------ |
| NOV46h | RDSGYYNCTATNNVGNPAKKTVNLLVRSMKNATFQITPDVIKESENIQLGQDLKLSCHVD |
| NOV46i | ------------------------------------------------------------ |
| NOV46j | ------------------------------------------------------------ |
| NOV46k | ------------------------------------------------------------ |
| NOV46a | ------------------------------------------------------------ |
| NOV46b | ------------------------------------------------------------ |
| NOV46c | ------------------------------------------------------------ |
| NOV46d | ------------------------------------------------------------ |
| NOV46e | ------------------------------------------------------------ |
| NOV46f | AVPQEKVTYQWFKNGKPARMSKRLLVTRNDPELPAVTSSLELIDLHFSDYGTYLCMASFP |
| NOV46g | ------------------------------------------------------------ |
| NOV46h | AVPQEKVTYQWFKNGKPARMSKRLLVTRNDPELPAVTSSLELIDLHFSDYGTYLCMASFP |
| NOV46i | ------------------------------------------------------------ |
| NOV46j | ------------------------------------------------------------ |
| NOV46k | ------------------------------------------------------------ |
| NOV46a | ------------------------------------------------------------ |
| NOV46b | ------------------------------------------------------------ |
| NOV46c | ------------------------------------------------------------ |
| NOV46d | ------------------------------------------------------------ |
| NOV46e | ------------------------------------------------------------ |
| NOV46f | GAPVPDLSVEVNISSETVPPTISVPKGRAVVTVREGSPAELQCEVRGKPRPPVLWSRVDK |
| NOV46g | ------------------------------------------------------------ |
| NOV46h | GAPVPDLSVEVNISSETVPPTISVPKGRAVVTVREGSPAELQCEVRGKPRPPVLWSRVDK |
| NOV46i | ------------------------------------------------------------ |
| NOV46j | ------------------------------------------------------------ |
| NOV46k | ------------------------------------------------------------ |
| NOV46a | ---------------------------MSGTYRCQTARYNGFNVRPREAQVQLNVQFPPE |
| NOV46b | ------------------------TGTMSGTYRCQTARYNGFNVRPREAQVQLNVQFPPE |
| NOV46c | ---------------------------MSGTYRCQTARYNGFNVRPREAQVQLNVQFPPE |
| NOV46d | ----------------------TKLPTMSGTYRCQTARYNGFNVRPREAQVQLNVQFPPE |
| NOV46e | -------------------------TKLSGTYRCQTARYNGFNVRPREAQVQLNVQFPPE |
| NOV46f | EAALLPSGLPLEETPDGKLRLERVSRDMSGTYRCQTARYNGFNVRPREAQVQLNVQFPPE |
| NOV46g | ------------------------------------------------------------ |
| NOV46h | EAALLPSGLPLEETPDGKLRLERVSRDMSGTYRCQTARYNGFNVRPREAQVQLNVQFPPE |
| NOV46i | ------------------------------------------------------------ |
| NOV46j | ---------------------------MSGTYRCQTARYNGFNVRPREAQVQLNVQFPPE |
| NOV46k | ---------------------------MSGTYRCQTARYNGFNVRPREAQVQLNVQFPPE |
| NOV46a | VEPSSQDVRQALGRPVLLRCSLLRGSPQRIASAVWRFKGQLLPPPPVVPAAAEAPDHAEL |
| NOV46b | VEPSSQDVRQALGRPVLLRCSLLRGSPQRIASAVWRFKGQLLPPPPVVPAAAEAPDHAEL |
| NOV46c | VEPSSQDVRQALGRPVLLRCSLLRGSPQRIASAVWRFKGQLLPPPPVVPAAAEAPDHAEL |
| NOV46d | VEPSSQDVRQALGRPVLLRCSLLRGSPQRIASAVWRFKGQLLPPPPVVPAAAEAPDHAEL |
| NOV46e | VEPSSQDVRQALGRPVLLRCSLLRGSPQRIASAVWRFKGQLLPPPPVVPAAAEAPDHAEL |
| NOV46f | VEPSSQDVRQALGRPVLLRCSLLRGSPQRIASAVWRFKGQLLPPPPVVPAAAEAPDHAEL |
| NOV46g | ------------------------------------------------------------ |
| NOV46h | VEPSSQDVRQALGRPVLLRCSLLRGSPQRIASAVWRFKGQLLPPPPVVPAAAEAPDHAEL |
| NOV46i | ------------------------------------------------------------ |
| NOV46j | VEPSSQDVRQALGRPVLLRCSLLRGSPQRIASAVWRFKGQLLPPPPVVPAAAEAPDHAEL |
| NOV46k | VEPSSQDVRQALGRPVLLRCSLLRGSPQRIASAVWRFKGQLLPPPPVVPAAAEAPDHAEL |
| NOV46a | RLDAVTRDSSGSYECSVSNDVGSAACLFQVSAKAYSPEFYFDTPNPTRSHKLSKNYSYVL |
| NOV46b | RLDAVTRDSSGSYECSVSNDVGSAACLFQVSAKAYSPEFYFDTPNPTRSHKLSKNYSYVL |
| NOV46c | RLDAVTRDSSGSYECSVSNDVGSAACLFQVSAKAYSPEFYFDTPNPTRSHKLSKNYSYVL |
| NOV46d | RLDAVTRDSSGSYECSVSNDVGSAACLFQVSAKAYSPEFYFDTPNPTRSHKLSKNYSYVL |
| NOV46e | RLDAVTRDSSGSYECSVSNDVGSAACLFQVSAKAYSPEFYFDTPNPTRSHKLSKNYSYVL |
| NOV46f | RLDAVTRDSSGSYECSVSNDVGSAACLFQVSAKAYSPEFYFDTPNPTRSHKLSKNYSYVL |
| NOV46g | ------------------------------------------------------------ |
| NOV46h | RLDAVTRDSSGSYECSVSNDVGSAACLFQVSAKAYSPEFYFDTPNPTRSHKLSKNYSYVL |
| NOV46i | ------------------------------------------------------------ |
| NOV46j | RLDAVTRDSSGSYECSVSNDVGSAACLFQVSAKAYSPEFYFDTPNPTRSHKLSKNYSYVL |
| NOV46k | RLDAVTRDSSGSYECSVSNDVGSAACLFQVSAKAYSPEFYFDTPNPTRSHKLSKNYSYVL |
| NOV46a | QWTQREPDAVDPVLNYRLSIRQLNQHNAVVKAIPVRRVEKGQLLEYILTDLRVPHSYEVR |
| NOV46b | QWTQREPDAVDPVLNYRLSIRQLNQHNAVVKAIPVRRVEKGQLLEYILTDLRVPHSYEVR |
| NOV46c | QWTQREPDAVDPVLNYRLSIRQLNQHNAVVKAIPVRRVEKGQLLEYILTDLRVPHSYEVR |
| NOV46d | QWTQREPDAVDPVLNYRLSIRQLNQHNAVVKAIPVRRVEKGQLLEYILTDLRVPHSYEVR |
| NOV46e | QWTQREPDAVDPVLNYRLSIRQLNQHNAVVKAIPVRRVEKGQLLEYILTDLRVPHSYEVR |
| NOV46f | QWTQREPDAVDPVLNYRLSIRQLNQHNAVVKAIPVRRVEKGQLLEYILTDLRVPHSYEVR |
| NOV46g | ----------------------LNQHNAVVKAIPVRRVEKGQLLEYILTDLRVPHSYEVR |
| NOV46h | QWTQREPDAVDPVLNYRLSIRQLNQHNAVVKAIPVRRVEKGQLLEYILTDLRVPHSYEVR |
| NOV46i | ----------------------LNQHNAVVKAIPVRRVEKGQLLEYILTDLRVPHSYEVR |
| NOV46j | QWTQREPDAVDPVLNYRLSIRQLNQHNAVVKAIPVRRVEKGQLLEYILTDLRVPHSYEVR |
| NOV46k | QWTQREPDAVDPVLNYRLSIRQLNQHNAVVKAIPVRRVEKGQLLEYILTDLRVPHSYEVR |
| NOV46a | LTPYTTFGAGDMASRIIHYTERQIRWPPVLALRTLSSGPKQGILCRAPHLSSDLVSPLAF |
| NOV46b | LTPYTTFGAGDMASRIIHYTEP-------------------------------------- |
| NOV46c | LTPYTTFGAGDMASRIIHYTEP-------------------------------------- |
| NOV46d | LTPYTTFGAGDMASRIIHYTEP-------------------------------------- |
| NOV46e | LTPYTTFGAGDMASRIIHYTEP-------------------------------------- |
| NOV46f | LTPYTTFGAGDMASRIIHYTERQIRWPPVLALRTLSSGPKQGILCRAPHLSSDLVSPLAF |
| NOV46g | LTPYTTFGAGDMASRIIHYTEP---------IN--------------------------- |
| NOV46h | LTPYTTFGAGDMASRIIHYTEP---------IN--------------------------- |
| NOV46i | LTPYTTFGAGDMASRIIHYTEP-------------------------------------- |
| NOV46j | LTPYTTFGAGDMASRIIHYTERQIRWPPVLALRTLSSGPKQGILCRAPHLSSDLVSPLAF |
| NOV46k | LTPYTTFGAGDMASRIIHYTEP-------------------------------------- |
| NOV46a | SAINSPNLSDNTCHFEDEKICGYTQDLTDNFDWTRQNALTQNPKRSPNTGPPTDISGTPE |
| NOV46b | --INSPNLSDNTCHFEDEKICGYTQDLTDNFDWTRQNALTQNPKRSPNTGPPTDISGTPE |
| NOV46c | --INSPNLSDNTCHFEDEKICGYTQDLTDNFDWTRQNALTQNPKRSPNTGPPTDISGTPE |
| NOV46d | --INSPNLSDNTCHFEDEKICGYTQDLTDNFDWTRQNALTQNPKRSPNTGPPTDISGTPE |
| NOV46e | --INSPNLSDNTCHFEDEKICGYTQDLTDNFDWTRQNALTQNPKRSPNTGPPTDISGTPE |
| NOV46f | SAINSPNLSDNTCHFEDEKICGYTQDLTDNFDWTRQNALTQNPKRSPNTGPPTDISGTPE |
| NOV46g | ----SPNLSDNTCHFEDEKICGYTQDLTDNFDWTRQNALTQNPKRSPNTGPPTDISGTPE |
| NOV46h | ----SPNLSDNTCHFEDEKICGYTQDLTDNFDWTRQNALTQNPKRSPNTGPPTDISGTPE |
| NOV46i | --INSPNLSDNTCHFEDEKICGYTQDLTDNFDWTRQNALTQNPKRSPNTGPPTDISGTPE |
| NOV46j | SAINSPNLSDNTCHFEDEKICGYTQDLTDNFDWTRQNALTQNPKRSPNTGPPTDISGTPE |
| NOV46k | --INSPNLSDNTCHFEDEKICGYTQDLTDNFDWTRQNALTQNPKRSPNTGPPTDISGTPE |
| NOV46a | GYYMFIETSRPRELGDRARLVSPLYNASAKFYCVSFFYHMYGKHIGSLNPLVRSRNKGAL |
| NOV46b | GYYMFIETSRPRELGDRARLVSPLYNASAKFYCVSFFYHMYGKHIGSLNLLVRSRNKGAL |
| NOV46c | GYYMFIETSRPRELGDRARLVSPLYNASAKFYCVSFFYHMYGKHIGSLNLLVRSRNKGAL |
| NOV46d | GYYMFIETSRPRELGDRARLVSPLYNASAKFYCVSFFYHNYGKHIGSLNLLVRSRNKGAL |
| NOV46e | GYYMFIETSRPRELGDRARLVSPLYNASAKFYCVSFFYHMYGKHIGSLNLLVRSRNKGAL |
| NOV46f | GYYMFIETSRPRELGDRARLVSPLYNASAKFYCVSFFYHMYGKHIGSLNLLVRSPNKGAL |
| NOV46g | GYYMFIETSRPRELGDRARLVSPLYNACAKFYCVSFFYHMYGKHIGSLNLLVRSRNKGAL |
| NOV46h | GYYMFIETSRPRELGDRARLVSPLYNASAKFYCVSFFYHMYGKHIGSLNLLVRSRNKGAL |
| NOV46i | GYYMFIETSRPRELGDRARLVSPLYNACAKFYCVSFFYHMYGKHIGSLNLLVRSRNKGAL |
| NOV46j | GYYMFIETSRPRELGDRARLVSPLYNASAKFYCVSFFYHNYGKHIGSLNPLVRSRNKGAL |
| NOV46k | GYYMFIETSRPRELGDRARLVSPLYNASAKFYCVSFFYHNYGKHIGSLNLLVRSRNKGAL |
| NOV46a | DTHAWSLSGNKGNVWQQAHVPISPSGPFQIIFEGVRGPGYLGDIAIDDVTLKKGECPRKQ |
| NOV46b | DTHAWSLSGNKGNVWQQAHVPISPSGPFQIIFEGVRGPGYLGDIAIDDVTLKKGECPRKQ |
| NOV46c | DTHAWSLSGNKGNVWQQAHVPISPSGPFQIIFEGVRGPGYLGDIAIDDVTLKKGECPRKQ |
| NOV46d | DTHAWSLSGNKGNVWQQAHVPISPSGPFQIIFEGVRGPGYLGDIAIDDVTLKKGECPRKQ |
| NOV46e | DTHAWSLSGNKGNVWQQAHVPISPSGPFQIIFEGVRGPGYLGDIAIDDVTLKKGECPREF |
| NOV46f | DTHAWSLSGNKGNVWQQAHVPISPSGPFQIIFEGVRGPGYLGDIAIDDVTLKKGECPRKQ |
| NOV46g | DTHAWSLSGNKGNVWQQAHVPISPSGPFQIIFEGVRGPGYLGDIAIDDVTLKKGECPR-- |
| NOV46h | DTHAWSLSGNKGNVWQQAHVPISPSGPFQIIFEGVRGPGYLGDIAIDDVTLKKGECPRKQ |
| NOV46i | DTHAWSLSGNKGNVWQQAHVPISPSGPFQIIFEGVRGPGYLGDIAIDDVTLKKGECPR-- |
| NOV46j | DTHAWSLSGNKGNVWQQAHVPISPSGPFQIIFEGVRGPGYLGDIAIDDVTLKKGECPRKQ |
| NOV46k | DTHAWSLSGNKGNVWQQAHVPISPSGPFQIIFEGVRGPGYLGDIAIDDVTLKKGECPRKQ |
| NOV46a | TDPNKVVVMPGSGAPCQSSPQLWG--------------------PMAIFLLALQR----- |
| NOV46b | TDPNKVVVMPGSGAPCQSSPQLWG--------------------PMAIFLLALQRLEG-- |
| NOV46c | TDPNKVVVMPGSGAPCQSSPQLWG--------------------PMAIFLLALQR----- |
| NOV46d | TDPNKVVVMPGSGAPCQSSPQLWG--------------------PMAIFLLALQREFG-- |
| NOV46e | G----------------------------------------------------------- |
| NOV46f | TDPNKGARREGAACDGLKFHLSSPMDDGELTDDPIECKHLWIHRVDSKGAQYMLAELNCI |
| NOV46g | ------------------------------------------------------------ |
| NOV46h | TDPNKGARREGAACDGLKFHLSSPMDDGELTDDPIECKHLWIHRVDSKGAQYMLAELNCI |
| NOV46i | ------------------------------------------------------------ |
| NOV46j | TDPNKGARREGGGGAESGGSCAWRG-----------------FLSVEGGCSGLNRGSDCL |
| NOV46k | TDPNKVVVMPGSGAPCQSSPQLWG--------------------PMAIFLLALQREFG-- |
| NOV46a | ------------------------------------------------------------ |
| NOV46b | ------------------------------------------------------------ |
| NOV46c | ------------------------------------------------------------ |
| NOV46d | ------------------------------------------------------------ |
| NOV46e | ------------------------------------------------------------ |
| NOV46f | HVAPRFLVFMDEGHKVGEKDSGGQPFQVYTDFSFYPHAIPEKMSIMPTLQVGKLRLREEE |
| NOV46g | ------------------------------------------------------------ |
| NOV46h | HVAPRFLVFMDEGHKVGEKDSGGQPFQVYTDFSFYPHAIPEKMSIMPTLQVGKLRLREEE |
| NOV46i | ------------------------------------------------------------ |
| NOV46j | MMGIRWL----------------------------------------------------- |
| NOV46k | ------------------------------------------------------------ |
| NOV46a | ------------------------------------------------------------ |
| NOV46b | ------------------------------------------------------------ |
| NOV46c | ------------------------------------------------------------ |
| NOV46d | ------------------------------------------------------------ |
| NOV46e | ------------------------------------------------------------ |
| NOV46f | ESAYGHTAAKAPAGTRSWSLNRPPELKSFSLWTNMTQSVREPITGPLQCQTYTHSNTQHL |
| NOV46g | ------------------------------------------------------------ |
| NOV46h | ESAYGHTAAKARAGTRSWSLNRPPELKSFSLWTNMTQSVREPITGPLQCQTYTHSNTQHL |
| NOV46i | ------------------------------------------------------------ |
| NOV46j | ------------------------------------------------------------ |
| NOV46k | ------------------------------------------------------------ |
| NOV46a | ------------------------------------------------------------ |
| NOV46b | ------------------------------------------------------------ |
| NOV46c | ------------------------------------------------------------ |
| NOV46d | ------------------------------------------------------------ |
| NOV46e | ------------------------------------------------------------ |
| NOV46f | GTWMKLETIILSKLTQEQKTKHHMFSLTTQSAPPSLFSPELPLSSNSRGHASMSLDDDDD |
| NOV46g | ------------------------------------------------------------ |
| NOV46h | GTWMKLETIILSKLTQEQKTKHHMFSLTTQSAPPSLFSPELPLSSNSRGHASMSLDDDDD |
| NOV46i | ------------------------------------------------------------ |
| NOV46j | ------------------------------------------------------------ |
| NOV46k | ------------------------------------------------------------ |
| NOV46a | ------------------------------------------------------------ |
| NOV46b | ------------------------------------------------------------ |
| NOV46c | ------------------------------------------------------------ |
| NOV46d | ------------------------------------------------------------ |
| NOV46e | ------------------------------------------------------------ |
| NOV46f | DDDDDDDDDDDDDNDDDDGRKTYRIPPGSDLSACGWVNDHMSQGDSTGPPDEKHSYAKEE |
| NOV46g | ------------------------------------------------------------ |
| NOV46h | DDDDDDDDDDDDDNDDDDGRKTYRIPPGSDLSACGWVNDHMSQGDSTGPPDEKHSYAKEE |
| NOV46i | ------------------------------------------------------------ |
| NOV46j | ------------------------------------------------------------ |
| NOV46k | ------------------------------------------------------------ |
| NOV46a | ------------------------------------------------------------ |
| NOV46b | ------------------------------------------------------------ |
| NOV46c | ------------------------------------------------------------ |
| NOV46d | ------------------------------------------------------------ |
| NOV46e | ------------------------------------------------------------ |
| NOV46f | TQAKLTGPGISYPGKPSYRLHPSGYTPLEQFREKATGMLTPYVSGSVSSFCFPFPTSESL |
| NOV46g | ------------------------------------------------------------ |
| NOV46h | TQAKLTGPGISYPGKPSYRLHPSGYTPLEQFREKATGMLTPYVSGSVSSFCFPFPTSESL |
| NOV46i | ------------------------------------------------------------ |
| NOV46j | ------------------------------------------------------------ |
| NOV46k | ------------------------------------------------------------ |
| NOV46a | ----------------------------------- |
| NOV46b | ----------------------------------- |
| NOV46c | ----------------------------------- |
| NOV46d | ----------------------------------- |
| NOV46e | ----------------------------------- |
| NOV46f | CSAHANSPSACLCPL-------------------- |
| NOV46g | ----------------------------------- |
| NOV46h | CSAHANSPSACLCPLLSGLVSPRLCSLGWHALHLP |
| NOV46i | ----------------------------------- |
| NOV46j | ----------------------------------- |
| NOV46k | ----------------------------------- |
| NOV46a | (SEQ ID NO: 1020) |
| NOV46b | (SEQ ID NO: 1022) |
| NOV46c | (SEQ ID NO: 1024) |
| NOV46d | (SEQ ID NO: 1026) |
| NOV46e | (SEQ ID NO: 1028) |
| NOV46f | (SEQ ID NO: 1030) |
| NOV46g | (SEQ ID NO: 1032) |
| NOV46h | (SEQ ID NO: 1034) |
| NOV46i | (SEQ ID NO: 1036) |
| NOV46j | (SEQ ID NO: 1038) |
| NOV46k | (SEQ ID NO: 1040) |

[0622] Further analysis of the NOV46a protein yielded the following properties shown in Table 46C.

TABLE 46C
Protein Sequence Properties NOV46a

| | |
|---|---|
| SignalP analysis: | No Known Signal Sequence Predicted |

PSORT II analysis:

| PSG: | a new signal peptide prediction method | |
|---|---|---|
| | N-region: | length 11; pos. chg 2; neg. chg 0 |
| | H-region: | length 6; peak value −8.10 |
| | PSG score: | −12.50 |

| | |
|---|---|
| GvH: | von Heijne's method for signal seq. recognition |
| | GvH score (threshold: −2.1): −2.49 |
| | possible cleavage site: between 61 and 62 |

>>> Seems to have no N-terminal signal peptide

| ALOM: | Klein et al's method for TM region allocation | |
|---|---|---|
| | Init position for calculation: 1 | |
| | Tentative number of TMS(s) for the threshold 0.5: 0 | |
| | number of TMS(s) . . . fixed | |
| | PERIPHERAL | Likelihood = 6.21 (at 260) |

| | ALOM score: 6.21 (number of TMSs: 0} | | | |
|---|---|---|---|---|
| MITDISC: | discrimination of mitochondrial targeting seq | | | |
| | R content: | 4 | Hyd Moment(75): | 3.44 |
| | Hyd Moment(95): | 5.36 | G content: | 2 |
| | D/E content: | 1 | S/T content: | 3 |

Score: −1.85

Gavel: prediction of cleavage sites for mitochondrial preseq

R-2 motif at 28 VRP|RE

NUCDISC: discrimination of nuclear localization signals

pat4: none
pat7: none
bipartite: none
content of basic residues: 10.9%
NLS Score: −0.47

KDEL: ER retention motif in the C-terminus: none
ER Membrane Retention Signals: none
SKL: peroxisomal targeting signal in the C-terminus: none
PTS2: 2nd peroxisomal targeting signal: none
VAC: possible vacuolar targeting motif: none
RNA-binding motif: none
Actinin-type actin-binding motif:

type 1: none
type 2: none

NMYR: N-myristoylation pattern: none
Prenylation motif: none
memYQRL: transport motif from cell surface to Golgi: none
Tyrosines in the tail: none
Dileucine motif in the tail: none
checking 63 PROSITE DNA binding motifs: none
checking 71 PROSITE ribosomal protein motifs: none
checking 33 PROSITE prokaryotic DNA binding motifs: none

| | |
|---|---|
| NNCN: | Reinhardt's method for Cytoplasmic/Nuclear |
| | discrimination |
| | Prediction: nuclear |
| | Reliability: 76.7 |
| COIL: | Lupas's algorithm to detect coiled-coil regions |
| | total: 0 residues |

Final Results (k = 9/23):

47.8%: mitochondrial
47.8%: nuclear
4.3%: cytoplasmic

>> prediction for CG57409-05 is mit (k = 23)

[0623] A search of the NOV46a protein against the Geneseq database, a proprietary database that contains sequences published in patents and patent publication, yielded several homologous proteins shown in Table 46D.

TABLE 46D
Geneseq Results for NOV46a

| | | | Identities/ | |
|---|---|---|---|---|
| | | NOV46a | Similarities | |
| Geneseq | Protein/Organism/Length | Residues/ | for the | Expect |
| Identifier | [Patent #, Date] | Match Residues | Matched Region | Value |
| ABU52337 | Human GPCR related protein | 1 . . . 488 | 488/488 (100%) | 0.0 |
| | NOV13b - Homo sapiens, 488 aa. | 1 . . . 488 | 488/488 (100%) | |
| | [WO200279398-A2, 10-OCT-2002] | | | |
| ABU52338 | Human GPCR related protein | 1 . . . 476 | 461/476 (96%) | 0.0 |
| | NOV13c - Homo sapiens, 503 aa. | 1 . . . 476 | 461/476 (96%) | |
| | [WO200279398-A2, 10-OCT-2002] | | | |
| ABJ10922 | Human secreted protein (SECP) #18 - | 1 . . . 458 | 457/458 (99%) | 0.0 |
| | Homo sapiens, 869 aa. | 308 . . . 765 | 457/458 (99%) | |
| | [WO200270669-A2, 12-SEP-2002] | | | |
| ABG12100 | Novel human diagnostic protein | 1 . . . 458 | 457/458 (99%) | 0.0 |
| | #12091 - Homo sapiens, 1219 aa. | 556 . . . 1013 | 457/458 (99%) | |
| | [WO200175067-A2, 11-OCT-2001] | | | |
| ABU52329 | Human GPCR related protein | 1 . . . 458 | 456/458 (99%) | 0.0 |
| | NOV12a - Homo sapiens, 1386 aa. | 508 . . . 965 | 456/458 (99%) | |
| | [WO200279398-A2, 10-OCT-2002] | | | |

[0624] In a BLAST search of public sequence databases, the NOV46a protein was found to have homology to the proteins shown in the BLASTP data in Table 46E.

TABLE 46E
Public BLASTP Results for NOV46a

| | | NOV46a | Identities/ | |
|---|---|---|---|---|
| Protein | | Residues/ | Similarities for | |
| Accession | | Match | the Matched | Expect |
| Number | Protein/Organism/Length | Residues | Portion | Value |
| Q8NFP4 | Glycosyl-phosphatidyl-inositol-MAM - | 1 . . . 488 | 446/488 (91%) | 0.0 |
| | Homo sapiens (Human), 955 aa. | 508 . . . 955 | 446/488 (91%) | |
| Q8HYV1 | Glycosylphosphatidylinositol anchor 1 | 1 . . . 488 | 430/488 (88%) | 0.0 |
| | protein - Sus scrofa (Pig), 885 aa | 438 . . . 885 | 435/488 (89%) | |
| | (fragment). | | | |
| Q8HYV2 | MAM domain containing | 1 . . . 488 | 430/488 (88%) | 0.0 |
| | glycosylphosphatidylinositol anchor 1 - | 439 . . . 886 | 435/488 (89%) | |
| | Sus scrofa (Pig), 886 aa (fragment). | | | |
| CAB86653 | DJ402N21.2 (novel protein with MAM | 176 . . . 488 | 271/313 (86%) | e−156 |
| | domain) - Homo sapiens (Human), | 1 . . . 273 | 271/313 (86%) | |
| | 273 aa (fragment). | | | |
| Q8NBE3 | Hypothetical protein FLJ33358 - | 276 . . . 476 | 185/201 (92%) | e−108 |
| | Homo sapiens (Human), 242 aa. | 12 . . . 212 | 185/201 (92%) | |

[0625] PFam analysis predicts that the NOV46a protein contains the domains shown in the Table 46F.

TABLE 46F
Domain Analysis of NOV46a

| | | Identities/ | |
|---|---|---|---|
| Pfam | NOV46a | Similarities for | Expect |
| Domain | Match Region | the Matched Region | Value |
| ig | 46 . . . 110 | 17/66 (26%) | 0.0094 |
| | | 38/66 (58%) | |
| MAM | 286 . . . 451 | 78/185 (42%) | 6.1e−74 |
| | | 146/185 (79%) | |

### Example 47

[0626] TABLE 47A
NOV47 Sequence Analysis

| | | |
|---|---|---|
| NOV47a, CG57448-01 | SEQ ID NO: 1041 | 2907 bp |
| DNA Sequence | ORF Start: ATG at 10 | ORF Stop: TGA at 2896 |

GGCCGCTGAATGCTAGCTAGAATTCAGCGGCCGCTGAATTCTAGGCGCTGCCGAGGGAATGCGCGCAG
CTCACAGGCCCTGGGAGTGAGCTGGTGCCCGGCGACCTGGCACCCGCGCCTGGATATGGGGCGTCTAC
ATCGTCCCAGGAGCAGCACCAGCTACAGGAACCTGCCGCATCTGTTTCTGTTTTTCCTCTTCGTGGGA
CCCTTCAGCTGCCTCGGGAGTTACAGCCGGGCCACCGAGCTTCTGTACAGCCTAAACGAGGGACTACC
CGCGGGGGTGCTCATCGGCAGCCTGGCCGAGGACCTGCGGCTGCTGCCCAGGTCTGCAGGGAGGCCGG
ACCCGCAGTCGCAGCTGCCAGAGCGCACCGGTGCTGAGTGGAACCCCCCTCTCTCCTTCAGCCTGGCC
TCCCGGGGACTGAGTGGCCAGTACGTGACCCTAGACAACCGCTCTGGGGAGCTGCACACTTCAGCTCA
GGAGATCGACAGGGAGGCCCTGTGTGTTGAAGGGGGTGGAGGGACTGCGTGGAGCGGCAGCGTTTCCA
TCTCCTCCTCTCCTTCTGACTCTTGTCTTTTGCTGCTGGATGTGCTTGTCCTGCCTCAGGAATACTTC
AGGTTTGTGAAGGTGAAGATCGCCATCAGAGACATCAATGACAACGCCCCGCAGTTCCCTGTTTCCCA
GATCTCGGTGTGGGTCCCGGAAAATGCACCTGTAAACACCCGACTGGCCATAGAGCATCCTGCTGTGG
ACCCAGATGTAGGCATTAATGGGGTACAGACCTATCGCTTACTGGACTACCATGGTATGTTCACCCTG
GACGTGGAGGAGAATGAGAATGGGGAGCGCACCCCCTACCTAATTGTCATGGGTGCTTTGGACAGGGA
AACCCAGGACCAGTATGTGAGCATCATCATAGCTGAGGATGGTGGGTCTCCACCACTTTTGGGCAGTG
CCACTCTCACCATTGGCATCAGTGACATTAATGACAATTGCCCTCTCTTCACAGACTCACAAATCAAT
GTCACTGTGTATGGGAATGCTACAGTGGGCACCCCAATTGCAGCTGTCCAGGCTGTGGATAAAGACTT
GGGGACCAATGCTCAAATTACTTATTCTTACAGTCAGAAAGTTCCACAAGCATCTAAGGATTTATTTC
ACCTGGATGAAAACACTGGAGTCATTAAACTTTTCAGTAAGATTGGAGGAAGTGTTCTGGAGTCCCAC
AAGCTCACCATCCTTGCTAATGGACCAGGCTGCATCCCTGCTGTAATCACTGCTCTTGTGTCCATTAT
TAAAGTTATTTTCAGACCCCCTGAAATTGTCCCTCGTTACATAGCAAACGAGATAGATGGTGTTGTTT
ATCTGAAAGAACTGGAACCCGTTAACACTCCCATTGCGTTTTTCACCATAAGAGATCCAGAAGGTAAA
TACAAGGTTAACTGCTACCTGGATGGTGAAGGGCCGTTTAGGTTATCACCTTACAAACCATACAATAA
TGAATATTTACTAGAGACCACAAAACCTATGGACTATGAGCTACAGCAGTTCTATGAAGTAGCTGTGG
TGGCTTGGAACTCTGAGGGATTTCATGTCAAAAGGGTCATTAAAGTGCAACTTTTAGATGACAATGAT
AATGCTCCAATTTTCCTTCAACCCTTAATAGAACTAACCATCGAAGAGAACAACTCACCCAATGCCTT
TTTGACTAAGCTGTATGCTACAGATGCCGACAGCGAGGAGAGAGGCCAAGTTTCATATTTTCTGGGAC
CTGATGCTCCATCATATTTTTCCTTAGACAGTGTCACAGGAATTCTGACAGTTTCTACTCAGCTGGAC
CGAGAAGAGAAAGAAAAGTACAGATACACTGTCAGAGCTGTTGACTGTGGGAAGCCACCCAGAGAATC
AGTAGCCACTGTGGCCCTCACAGTGTTGGATAAAAATGACAACAGTCCTCGGTTTATCAACAAGGACT
TCAGCTTTTTTGTGCCTGAAAACTTTCCAGGCTATGGTGAGATTGGAGTAATTAGTGTAACAGATGCT
GACGCTGGACGAAATGGATGGGTCGCCCTCTCTGTGGTGAACCAGAGTGATATTTTTGTCATAGATAC
AGGAAAGGGTATGCTGAGGGCTAAAGTCTCTTTGGACAGAGAGCAGCAAAGCTCCTATACTTTGTGGG
TTGAAGCTGTTGATGGGGGTGAGCCTGCCCTCTCCTCTACAGCAAAAATCACAATTCTCCTTCTAGAT
ATCAATGACAACCCTCCTCTTGTTTTGTTTCCTCAGTCTAATATGTCTTATCTGTTAGTACTGCCTTC
TACTCTGCCAGGCTCCCCGGTTACAGAAGTCTATGCTGTCGACAAAGACACAGGCATGAATGCTGTCA
TAGCTTACAGCATCATAGGGAGAAGAGGTCCTAGGCCTGAGTCCTTCAGGATTGACCCTAAAACTGGC
AACATTACTTTGGAAGAGGCATTGCTGCAGACAGATTATGGGCTCCATCGCTTACTGGTGAAAGTGAG
TGATCATGGTTATCCCGAGCCTCTCCACTCCACAGTCATGGTGAACCTATTTGTCAATGACACTGTCA
GTAATGAGAGTTACATTGAGAGTCTTTTAAGAAAAGAACCAGAGATTAATATAGAGGAGAAAGAACCA
CAAATCTCAATAGAACCGACTCATAGGAAGGTAGAATCTGTGTCTTGTATGCCCACCTTAGTAGCTCT
GTCTGTAATAAGCTTGGGTTCCATCACACTGGTCACAGGGATGGGCATATACATCTGTTTAAGGAAAG
GGGAAAAGCATCCCAGGGAAGATGAAAATTTGGAAGTACAGATTCCACTGAAAGGAAAAATTGACTTG
CATATGCGAGAGAGAAAGCCAATGGATATTTCTAATATTTGATATTTCATG

| | | | |
|---|---|---|---|
| NOV47a, CG57448-01 | SEQ ID NO: 1042 | 962 aa | MW at 106269.4kD |
| Protein Sequence | | | |

MLARIQRPLNSRRCRGNARSSQALGVSWCPATWHPRLDMGRLHRPRSSTSYRNLPHLFLFFLFVGPFS
CLGSYSRATELLYSLNEGLPAGVLIGSLAEDLRLLPRSAGRPDPQSQLPERTGAEWNPPLSFSLASRG
LSGQYVTLDNRSGELHTSAQEIDREALCVEGGGGTAWSGSVSISSSPSDSCLLLLDVLVLPQEYFRFV
KVKIAIRDINDNAPQFPVSQISVWVPENAPVNTRLAIEHPAVDPDVGINGVQTYRLLDYHGMFTLDVE
ENENGERTPYLIVMGALDRETQDQYVSIIIAEDGGSPPLLGSATLTIGISDINDNCPLFTDSQINVTV
YGNATVGTPIAAVQAVDKDLGTNAQITYSYSQKVPQASKDLFHLDENTGVIKLFSKIGGSVLESHKLT
ILANGPGCIPAVITALVSIIKVIFRPPEIVPRYIANEIDGVVYLKELEPVNTPIAFFTIRDPEGKYKV
NCYLDGEGPFRLSPYKPYNNEYLLETTKPMDYELQQFYEVAVVAWNSEGFHVKRVIKVQLLDDNDNAP
IFLQPLIELTIEENNSPNAFLTKLYATDADSEERGQVSYFLGPDAPSYFSLDSVTGILTVSTQLDREE
KEKYRYTVPAVDCGKPPRESVATVALTVLDKNDNSPRFINKDFSFFVPENFPGYGEIGVISVTDADAG
RNGWVALSVVNQSDIFVIDTGKGMLRAKVSLDREQQSSYTLWVEAVDGGEPALSSTAKITILLLDIND
NPPLVLFPQSNMSYLLVLPSTLPGSPVTEVYAVDKDTGMNAVIAYSIIGRRGPRPESFRIDPKTGNIT
LEEALLQTDYGLHRLLVKVSDHGYPEPLHSTVMVNLFVNDTVSNESYIESLLRKEPEINIEEKEPQIS
IEPTHRKVESVSCMPTLVALSVISLGSITLVTGMGIYICLRKGEKHPREDENLEVQIPLKGKIDLHMR
ERKPMDISNI

| | | |
|---|---|---|
| NOV47b, 247846705 | SEQ ID NO: 1043 | 1377 bp |
| DNA Sequence | ORF Start: at 1 | ORF Stop: end of sequence |

GGATCCCCTCGTTACATAGCAAACGAGATAGATGGTGTTGTTTATCTGAAAGAACTGGAACCCGTTAA
CACTCCCATTGCGTTTTTCACCATAAGAGATCCAGAAGGTAAATACAAGGTTAACTGCTACCTGGATG
GTGAAGGGCCGTTTAGGTTATCACCTTACAAACCATACAATAATGAATATTTACTAGAGACCACAAAA
CCTATGGACTATGAGCTACAGCAGTTCTATGAAGTAGCTGTGGTGGCTTGGAACTCTGAGGGATTTCA
TGTCAAAAGGGTCATTAAAGTGCAACTTTTAGATGACAATGATAATGCTCCAATTTTCCTTCAACCCT
TAATAGACTAACCATCGAAGAGAACAACTCACCCAATGCCTTTTTGACTAAGGTGTATGCTACAGAT
GCCGACAGCGAGGAGAGAGGCCAAGTTTCATATTTTCTGGGACCTGATGCTCCATCATATTTTTCCTT
AGACAGTGTCACAGGAATTCTGACAGTTTCTACTCAGCTGGACCGAGAAGAGAAAGAAAAGTACAGAT
ACACTGTCAGAGCTGTTGACTGTGGGAAGCCACCCAGAGAATCAGTAGCCACTGTGGCCCTCACAGTG
TTGGATAAAAATGACAACAGTCCTCGGTTTATCAACAAGGACTTCAGCTTTTTTGTGCCTGAAAACTT
TCCAGGCTATGGTGAGATTGGAGTAATTAGTGTAACAGATGCTGACGCTGGACGAAATGGATGGGTCG
CCCTCTCTGTGGTGAACCAGAGTGATATTTTTGTCATAGATACAGGAAAGGGTATGCTGAGGGCTAAA
GTCTCTTTGGACAGAGAGCAGCAAAGCTCCTATACTTTGTGGGTTGAAGCTGTTGATGGGGGTGAGCC
TGCCCTCTCCTCTACAGCAAAAATCACAATTCTCCTTCTAGATATCAATGACAACCCTCCTCTTGTTT
TGTTTCCTCAGTCTAATATGTCTTATCTGTTAGTACTGCCTTCTACTCTGCCAGGCTCCCCGGTTACA
GAAGTCTATGCTGTCGACAAAGACACAGGCATGAATGCTGTCATAGCTTACAGCATCATAGGGAGAAG
AGGTCCTAGGCCTGAGTCCTTCAGGATTGACCCTAAAACTGGCAACATTACTTTGGAAGAGGCATTGC
TGCAGACAGATTATGGGCTCCATCGCTTACTGGTGAAAGTGAGTGATCATGGTTATCCCGAGCCTCTC
CACTCCACAGTCATGGTGAACCTATTTGTCAATGACACTGTCAGTAATGAGAGTTACATTGAGAGTCT
TTTAAGAAAAGAACCAGAGATTAATATAGAGGAGAAAGAACCACAAATCTCAATAGAACCGACTCATA
GGAAGGTAGAACTCGAG

| | | | |
|---|---|---|---|
| NOV47b, 247846705 | SEQ ID NO: 1044 | 459 aa | MW at 51423.4kD |
| Protein Sequence | | | |

GSPRYIANEIDGVVYLKELEPVNTPIAFFTIRDPEGKYKVNCYLDGEGPFRLSPYKPYNNEYLLETTK
PMDYELQQFYEVAVVAWNSEGFHVKRVIKVQLLDDNDNAPIFLQPLIELTIEENNSPNAFLTKVYATD
ADSEERGQVSYFLGPDAPSYFSLDSVTGILTVSTQLDREEKEKYRYTVPAVDCGKPPRESVATVALTV
LDKNDNSPRFINKDFSFFVPENFPGYGEIGVISVTDADAGRNGWVALSVVNQSDIFVIDTGKGMLRAK
VSLDREQQSSYTLWVEAVDGGEPALSSTAKITILLLDINDNPPLVLFPQSNMSYLLVLPSTLPGSPVT
EVYAVDKDTGMNAVIAYSIIGRRGPRPESFRIDPKTGNITLEEALLQTDYGLHRLLVKVSDHGYPEPL
HSTVMVNLFVNDTVSNESYIESLLRKEPEINIEEKEPQISIEPTHRKVELE

| | | |
|---|---|---|
| NOV47c, 247846708 | SEQ ID NO: 1045 | 1377 bp |
| DNA Sequence | ORF Start: at 1 | ORF Stop: end of sequence |

GGATCCCCTCGTTACATAGCAAACGAGATAGATGGTGTGGTTTATCTGAAAGAACTGGAACCCGTTAA
CACTCCCATTGCGTTTTTCACCATAAGAGATCCAGAAGGTAAATACAAGGTTAACTGCTACCTGGATG
GTGAAGGGCCGTTTAGGTTATCACCTTACAAACCATACAATAATGAATATTTACTAGAGACCACAAAA
CCTATGGACTATGAGCTACAGCAGTTCTATGAAGTAGCTGTGGTGGCTTGGAACTCTGAGGGATTTCA
TGTCAAAAGGGTCATTAAAGTGCAACTTTTAGATGACAATGATAATGCTCCAATTTTCCTTCAACCCT
TAATAGAACTAACCATCGAAGAGAACAACTCACCCAATGCCTTTTTGACTAAGCTGTATGCTACAGAT
GCCGACAGCGAGGAGAGAGGCCAAGTTTCATATTTTCTGGGACCTGATGCTCCATCATATTTTTCCTT
AGACAGTGTCACAGGAATTCTGACAGTTTCTACTCAGCTGGACCGAGAAGAGAAAGAAAAGTACAGAT
ACACTGTCAGAGCTGTTGACTGTGGGAAGCCACCCAGAGAATCAGTAGCCACTGTGGCCCTCACAGTG
TTGGATAAAAATGACAACAGTCCTCGGTTTATCAACAAGGACTTCAGCTTTTTTGTGCCTGAAAACTT
TCCAGGCTATGGTGAGATTGGAGTAATTAGTGTAACAGATGCTGACGCTGGACGAAATGGATGGGTCG
CCCTCTCTGTGGTGAACCAGAGTGATATTTTTGTCATAGATACAGGAAAGGGTATGCTGAGGGCTAAA
GTCTCTTTGGACAGAGAGCAGCAAAGCTCCTATACTTTGTGGGTTGAAGCTGTTGATGGGGGTGAGCC
TGCCCTCTCCTCTACAGCAAAAATCACAATTCTCCTTCTAGATATCAATGACAACCCTCCTCTTGTTT
TGTTTCCTCAGTCTAATATGTCTTATCTGTTAGTACTGCCTTCTACTCTGCTAGGCTCCCCGGTTACA
GAAGTCTATGCTGTCGACAAAGACACAGGCATGAATGCTGTCATAGCTTACAGCATCATAGGGAGAAG
AGGTCCTAGGCCTGAGTCCTTCAGGATTGACCCTAAAACTGGCAACATTACTTTGGAAGAGGCATTGC
TGCAGACAGATTATGGGCTCCATCGCTTACTGGTGAAAGTGAGTGATCATGGTTATCCCGAGCCTCTC
CACTCCACAGTCATGGTGAACCTATTTGTCAATGACACTGTCAGTAATGAGAGTTACATTGAGAGTCT
TTTAAGAAAAGAACCAGAGATTAATATAGAGGAGAAAGAACCACAAATCTCAATAGAACCGACTCATA
GGAAGGTAGAACTCGAG

| | | | |
|---|---|---|---|
| NOV47c, 247846708 | SEQ ID NO: 1046 | 459 aa | MW at 51453.4kD |
| Protein Sequence | | | |

GSPRYIANEIDGVVYLKELEPVNTPIAFFTIRDPEGKYKVNCYLDGEGPFRLSPYKPYNNEYLLETTK
PMDYELQQFYEVAVVAWNSEGFHVKRVIKVQLLDDNDNAPIFLQPLIELTIEENNSPNAFLTKLYATD
ADSEERGQVSYFLGPDAPSYFSLDSVTGILTVSTQLDREEKEKYRYTVPAVDCGKPPRESVATVALTV
LDKNDNSPRFINKDFSFFVPENFPGYGEIGVISVTDADAGRNGWVALSVVNQSDIFVIDTGKGMLRAK
VSLDREQQSSYTLWVEAVDGGEPALSSTAKITILLLDINDNPPLVLFPQSNMSYLLVLPSTLLGSPVT
EVYAVDKDTGMNAVIAYSIIGRRGPRPESFRIDPKTGNITLEEALLQTDYGLHRLLVKVSDHGYPEPL
HSTVMVNLFVNDTVSNESYIESLLRKEPEINIEEKEPQISIEPTHRKVELE

| | | |
|---|---|---|
| NOV47d, 237580295 | SEQ ID NO: 1047 | 1377 bp |
| DNA Sequence | ORF Start: at 1 | ORF Stop: end of sequence |

GGATCCCCTCGTTACATAGCAAACGAGATAGATGGTGTTGTTTATCTGAAAGAACTGGAACCCGTTAA
CACTCCCATTGCGCTTTTCACCATAAGAGATCCAGAAGGTAAATACAAGGTTAACTGCTACCTGGATG
GTGAAGGGCCGTTTAGGTTATCACCTTACAAACCATACAATAATGAATATTTACTAGAGACCACAAAA
CCTATGGACTATGAGCTACAGCAGTTCTATGAAGTAGCTGTGGTGGCTTGGAACTCTGAGGGATTTCA
TGTCAAAAGGGTCATTAAAGTGCAACTTTTAGATGACAATGATAATGCTCCAATTTTCCTTCAACCCT
TAATAGAACTAACCATCGAAGAGAACAACTCACCCAATGCCTTTTTGACTAAGCTGTATGCTACAGAT
GCCGACAGCGAGGAGAGAGGCCAAGTTTCATATTTTCTGGGACCTGATGCTCCATCATATTTTTCCTT
AGACAGTGTCACAGGAATTCTGACAGTTTCTACTCAGCTGGACCGAGAAGAGAAAGAAAAGTACAGAT
ACACTGTCAGAGCTGTTGACTGTGGGAAGCCACCCAGAGAATCAGTAGCCACTGTGGCCCTCACAGTG
TTGGATAAAAATGACAACAGTCCTCGGTTTATCAACAAGGACTTCAGCTTTTTTGTGCCTGAAAACTT
TCCAGGCTATGGTGAGATTGGAGTAATTAGTGTAACAGATGCTGACGCTGGACGAAATGGATGGGTCG
CCCTCTCTGTGGTGAACCAGAGTGATATTTTTGTCATAGATACAGGAAAGGGTATGCTGAGGGCTAAA
GTCTCTTTGGACAGAGAGCAGCAAAGCTCCTATACTTTGTGGGTTGAAGCTGTTGATGGGGGTGAGCC
TGCCCTCTCCTCTACAGCAAAAATCACAATTCTCCTTCTAGATATCAATGACAACCCTCCTCTTGTTT
TGTTTCCTCAGTCTAATATGTCTTATCTGTTAGTACTGCCTTCTACTCTGCCAGGCTCCCCGGTTACA
GAAGTCTATGCTGTCGACAAAGACACAGGCATGAATGCTGTCATAGCTTACAGCATCATAGGGAGAAG
AGGTCCTAGGCCTGAGTCCTTCAGGATTGACCCTAAAACTGGCAACATTACTTTGGAAGAGGCATTGC
TGCAGACAGATTATGGGCTCCATCGCTTACTGGTGAAAGTGAGTGATCATGGTTATCCCGAGCCTCTC
CACTCCACAGTCATGGTGAACCTATTTGTCAATGACACTGTCAGTAATGAGAGTTACATTGAGAGTCT
TTTAAGAAAAGAACCAGAGATTAATATAGAGGAGAAAGAACCACAAATCTCAATAGAACCGACTCATA
GGAAGGTAGAACTCGAG

| | | | |
|---|---|---|---|
| NOV47d, 237580295 | SEQ ID NO: 1048 | 459 aa | MW at 51403.4kD |
| Protein Sequence | | | |

GSPRYIANEIDGVVYLKELEPVNTPIALFTIRDPEGKYKVNCYLDGEGPFRLSPYKPYNNEYLLETTK
PMDYELQQFYEVAVVAWNSEGFHVKRVIKVQLLDDNDNAPIFLQPLIELTIEENNSPNAFLTKLYATD
ADSEERGQVSYFLGPDAPSYFSLDSVTGILTVSTQLDREEKEKYRYTVRAVDCGKPPRESVATVALTV
LDKNDNSPRFINKDFSFFVPENFPGYGEIGVISVTDADAGRNGWVALSVVNQSDIFVIDTGKGMLRAK
VSLDREQQSSYTLWVEAVDGGEPALSSTAKITILLLDINDNPPLVLFPQSNMSYLLVLPSTLPGSPVT
EVYAVDKDTGMNAVIAYSIIGRRGPRPESFRIDPKTGNITLEEALLQTDYGLHRLLVKVSDHGYPEPL
HSTVMVNLFVNDTVSNESYIESLLRKEPEINIEEKEPQISIEPTHRKVELE

| | | |
|---|---|---|
| NOV47e, 237579512 | SEQ ID NO: 1049 | 1377 bp |
| DNA Sequence | ORF Start: at 1 | ORF Stop: end of sequence |

GGATCCCCTCGTTACATAGCAAACGAGATAGATGGTGTGGTTTATCTGAAAGAACTGGAACCCGTTAA
CACTCCCATTGCGTTTTTCACCATAAGAGATCCAGAAGGTAAATACAAGGTTAACTGCTACCTGGATG
GTGAAGGGCCGTTTAGGTTATCACCTTACAAACCATACAATAATGAATATTTACTAGAGACCACAAAA
CCTATGGACTATGAGCTACAGCAGTTCTATGAAGTAGCTGTGGTGGCTTGGAACTCTGAGGGATTTCA
TGTCAAAAGGGTCATTAAAGTGCAACTTTTAGATGACAATGATAATGCTCCAATTTTCCTTCAACCCT
TAATAGAACTAACCATCGAAGAGAACAACTCACCCAATGCCTTTTTGACTAAGCTGTATGCTACAGAT
GCCGACAGCGAGGAGAGAGGCCAAGTTTCATATTTTCTGGGACCTGATGCTCCATCATATTTTTCCTT
AGACAGTGTCACAGGAATTCTGACAGTTTCTACTCAGCTGGACCGAGAAGAGAAAGAAAAGTACAGAT
ACACTGTCAGAGCTGTTGACTGTGGGAAGCCACCCAGAGAATCAGTAGCCACTGTGGCCCTCACAGTG
TTGGATAAAAATGACAACAGTCCTCGGTTTATCAACAAGGACTTCAGCTTTTTTGTGCCTGAAAACTT
TCCAGGCTATGGTGAGATTGGAGTAATTAGTGTAACAGATGCTGACGCTGGACGAAATGGATGGGTCG
CCCTCTCTGTGGTGAACCAGAGTGATATTTTTGTCATAGATACAGGAAAGGGTATGCTGAGGGCTAAA
GTCTCTTTGGACAGAGAGCAGCA)AGCTCCTATACTTTGTGGGTTGAAGCTGTTGATGGGGGTGAGCC
TGCCCTCTCCTCTACAGCAAAAATCACAATTCTCCTTCTAGATATCAATGACAACCCTCCTCTTGTTT
TGTTTCCTCAGTCTAATATGTCTTATCTGTTAGTACTGCCTTCTACTCTGCCAGGCTCCCCGGTTACA
GAAGTCTATGCTGTCGACAAAGACACAGGCATGAATGCTGTCATAGCTTACAGCATCATAGGGAGAAG
AGGTCCTAGGCCTGAGTCCTTCAGGATTGACCCTAAAACTGGCAACATTACTTTGGAAGAGGCATTGC
TGCAGACAGATTATGGGCTCCATCGCTTACTGGTGAAAGTGAGTGATCATGGTTATCCCGAGCCTCTC
CACTCCACAGTCATGGTGAACCTATTTGTCAATGACACTGTCAGTAATGAGAGTTACATTGAGAGTCT
TTTAAGAAAAGAACCAGAGATTAATATAGAGGAGAAAGAACCACAAATCTCAATAGAACCGACTCATA
GGAAGGTAGAACTCGAG

| | | | |
|---|---|---|---|
| NOV47e, 237579512 | SEQ ID NO: 1050 | 459 aa | MW at 51437.4kD |
| Protein Sequence | | | |

GSPRYIANEIDGVVYLKELEPVNTPIAFFTIRDPEGKYKVNCYLDGEGPFRLSPYKPYNNEYLLETTK
PMDYELQQFYEVAVVAWNSEGFHVKRVIKVQLLDDNDNAPIFLQPLIELTIEENNSPNAFLTKLYATD
ADSEERGQVSYFLGPDAPSYFSLDSVTGILTVSTQLDREEKEKYRYTVEAVDCGKPPRESVATVALTV
LDKNDNSPRFINKDFSFFVPENFPGYGEIGVISVTDADAGRNGWVALSVVNQSDIFVIDTGKGMLRAK
VSLDREQQSSYTLWVEAVDGGEPALSSTAKITILLLDINDNPPLVLFPQSNMSYLLVLPSTLPGSPVT
EVYAVDKDTGHNAVIAYSIIGRRGPRPESFRIDPKTGNITLEEALLQTDYGLHRLLVKVSDHGYPEPL
HSTVMVNLFVNDTVSNESYIESLLRKEPEINIEEKEPQISIEPTHRKVELE

| | | |
|---|---|---|
| NOV47f, CG57448-02 | SEQ ID NO: 1051 | 576 bp |
| DNA Sequence | ORF Start: at 7 | ORF Stop: at 571 |

GGATCCATCTCGGTGTGGGTCCCGGAAAATGCACCTGTAAACACCCGACTGGCCATAGAGCATCCTGC
TGTGGACCCAGATGTAGGCATTAATGGGGTACAGACCTATCGCTTACTGGACTACCATGGTATGTTCA
CCCTGGACGTGGAGGAGAATGAGAATGGGGAGCGCACCCCCTACCTAATTGTCATGGGTGCTTTGGAC
AGGGAAACCCAGGACCAGTATGTGAGCATCATCATAGCTGAGGATGGTGGGTCTCCACCACTTTTGGG
CAGTGCCACTCTCACCATTGGCATCAGTGACATTAATGACAATTGCCCTCTCTTCACAGACTCACAAA
TCAATGTCACTGTGTATGGGAATGCTACAGTGGGCACCCCAATTGCAGCTGTCCAGGCTGTGGATAAA
GACTTGGGGACCAATGCTCAAATTACTTATTCTTACAGTCAGAAAGTTCCACAAGCATCTAAGGATTT
ATTTCACCTGGATGAAAACACTGGAGTCATTAAACTTTTCAGTAAGATTGGAGGAAGTGTTCTGGAGT
CCCACAAGCTCACCATCCTTGCTAATCTCGAG

| | | | |
|---|---|---|---|
| NOV47f, CG57448-02 | SEQ ID NO: 1052 | 188 aa | MW at 20271.5kD |
| Protein Sequence | | | |

ISVWVPENAPVNTRLAIEHPAVDPDVGINGVQTYRLLDYHGMFTLDVEENENGERTPYLIVMGALDRE
TQDQYVSIIIAEDGGSPPLLGSATLTIGISDINDNCPLFTDSQINVTVYGNATVGTPIAAVQAVDKDL
GTNAQITYSYSQKVPQASKDLFHLDENTGVIKLFSKIGGSVLESHKLTILAN

[0627] A ClustalW comparison of the above protein sequences yields the following sequence alignment shown in Table 47B.

TABLE 47B
Comparison of the NOV47 protein sequences.

| | |
|---|---|
| NOV47a | MLARIQRPLNSRRCRGNARSSQALGVSWCPATWHPRLDMGRLHRPRSSTSYRNLPHLFLF |
| NOV47b | ------------------------------------------------------------ |
| NOV47c | ------------------------------------------------------------ |
| NOV47d | ------------------------------------------------------------ |
| NOV47e | ------------------------------------------------------------ |
| NOV47f | ------------------------------------------------------------ |
| NOV47a | FLFVGPFSCLGSYSRATELLYSLNEGLPAGVLIGSLAEDLRLLPRSAGRPDPQSQLPERT |
| NOV47b | ------------------------------------------------------------ |
| NOV47c | ------------------------------------------------------------ |
| NOV47d | ------------------------------------------------------------ |
| NOV47e | ------------------------------------------------------------ |
| NOV47f | ------------------------------------------------------------ |
| NOV47a | GAEWNPPLSFSLASRGLSGQYVTLDNRSGELHTSAQEIDREALCVEGGGGTAWSGSVSIS |
| NOV47b | ------------------------------------------------------------ |
| NOV47c | ------------------------------------------------------------ |
| NOV47d | ------------------------------------------------------------ |
| NOV47e | ------------------------------------------------------------ |
| NOV47f | ------------------------------------------------------------ |
| NOV47a | SSPSDSCLLLLDVLVLPQEYFRFVKVKIAIRDINDNAPQFPVSQISVWVPENAPVNTRLA |
| NOV47b | ------------------------------------------------------------ |
| NOV47c | ------------------------------------------------------------ |
| NOV47d | ------------------------------------------------------------ |
| NOV47e | ------------------------------------------------------------ |
| NOV47f | ------------------------------------------------------------ |
| NOV47a | IEHPAVDPDVGINGVQTYRLLDYHGMFTLDVEENENGERTPYLIVMGALDRETQDQYVSI |
| NOV47b | ------------------------------------------------------------ |
| NOV47c | ------------------------------------------------------------ |
| NOV47d | ------------------------------------------------------------ |
| NOV47e | ------------------------------------------------------------ |
| NOV47f | ------------------------------------------------------------ |
| NOV47a | IIAEDGGSPPLLGSATLTIGISDINDNCPLFTDSQINVTVYGNATVGTPIAAVQAVDKDL |
| NOV47b | ------------------------------------------------------------ |
| NOV47c | ------------------------------------------------------------ |
| NOV47d | ------------------------------------------------------------ |
| NOV47e | ------------------------------------------------------------ |
| NOV47f | ------------------------------------------------------------ |
| NOV47a | GTNAQITYSYSQKVPQASKDLFHLDENTGVIKLFSKIGGSVLESHKLTILANGPGCIPAV |
| NOV47b | ------------------------------------------------------------ |
| NOV47c | ------------------------------------------------------------ |
| NOV47d | ------------------------------------------------------------ |
| NOV47e | ------------------------------------------------------------ |
| NOV47f | ------------------------------------------------------------ |
| NOV47a | ITALVSIIKVIFRPPEIVPRYIANEIDGVVYLKELEPVNTPIAFFTIRDPEGKYKVNCYL |
| NOV47b | ----------------GSPRYIANEIDGVVYLKELEPVNTPIAFFTIRDPEGKYKVNCYL |
| NOV47c | ----------------GSPRYIANEIDGVVYLKELEPVNTPIAFFTIRDPEGKYKVNCYL |
| NOV47d | ----------------GSPRYIANEIDGVVYLKELEPVNTPIALFTIRDPEGKYKVNCYL |
| NOV47e | ----------------GSPRYIANEIDGVVYLKELEPVNTPIAFFTIRDPEGKYKVNCYL |
| NOV47f | ------------------------------------------------------------ |
| NOV47a | DGEGPFRLSPYKPYNNEYLLETTKPMDYELQQFYEVAVVAWNSEGFHVKRVIKVQLLDDN |
| NOV47b | DGEGPFRLSPYKPYNNEYLLETTKPMDYELQQFYEVAVVAWNSEGFHVKRVIKVQLLDDN |
| NOV47c | DGEGPFRLSPYKPYNNEYLLETTKPMDYELQQFYEVAVVAWNSEGFHVKRVIKVQLLDDN |
| NOV47d | DGEGPFRLSPYKPYNNEYLLETTKPMDYELQQFYEVAVVAWNSEGFHVKRVIKVQLLDDN |
| NOV47e | DGEGPFRLSPYKPYNNEYLLETTKPMDYELQQFYEVAVVAWNSEGFHVKRVIKVQLLDDN |
| NOV47f | ------------------------------------------------------------ |
| NOV47a | DNAPIFLQPLIELTIEENNSPNAFLTKLYATDADSEERGQVSYFLGPDAPSYFSLDSVTG |
| NOV47b | DNAPIFLQPLIELTIEENNSPNAFLTKVYATDADSEERGQVSYFLGPDAPSYFSLDSVTG |
| NOV47c | DNAPIFLQPLIELTIEENNSPNAFLTKLYATDADSEERGQVSYFLGPDAPSYFSLDSVTG |
| NOV47d | DNAPIFLQPLIELTIEENNSPNAFLTKLYATDADSEERGQVSYFLGPDAPSYFSLDSVTG |
| NOV47e | DNAPIFLQPLIELTIEENNSPNAFLTKLYATDADSEERGQVSYFLGPDAPSYFSLDSVTG |
| NOV47f | ------------------------------------------------------------ |
| NOV47a | ILTVSTQLDREEKEKYRYTVRAVDCGKPPRESVATVALTVLDKNDNSPRFINKDFSFFVP |
| NOV47b | ILTVSTQLDREEKEKYRYTVRAVDCGKPPRESVATVALTVLDKNDNSPRFINKDFSFFVP |
| NOV47c | ILTVSTQLDREEKEKYRYTVRAVDCGKPPRESVATVALTVLDKNDNSPRFINKDFSFFVP |
| NOV47d | ILTVSTQLDREEKEKYRYTVRAVDCGKPPRESVATVALTVLDKNDNSPRFINKDFSFFVP |
| NOV47e | ILTVSTQLDREEKEKYRYTVRAVDCGKPPRESVATVALTVLDKNDNSPRFINKDFSFFVP |
| NOV47f | ------------------------------------------------------ISVWVP |
| NOV47a | ENFPGYGEIGVIS-VTDADAGRNGWVALSVVNQSDIFVIDTGKG-------MLRAKVSLD |
| NOV47b | ENFPGYGEIGVIS-VTDADAGRNGWVALSVVNQSDIFVIDTGKG-------MLRAKVSLD |
| NOV47c | ENFPGYGEIGVIS-VTDADAGRNGWVALSVVNQSDIFVIDTGKG-------MLRAKVSLD |
| NOV47d | ENFPGYGEIGVIS-VTDADAGRNGWVALSVVNQSDIFVIDTGKG-------MLRAKVSLD |
| NOV47e | ENFPGYGEIGVIS-VTDADAGRNGWVALSVVNQSDIFVIDTGKG-------MLRAKVSLD |
| NOV47f | ENAPVNTRLAIEHPAVDPDVGINGVQTYRLLDYHGMFTLDVEENENGERTPYLIVMGALD |
| NOV47a | REQQSSYTLWVEAVDGGEPALSSTAKITILLLDINDNPPLVLFPQSNMSYLLVLPSTLPG |
| NOV47b | REQQSSYTLWVEAVDGGEPALSSTAKITILLLDINDNPPLVLFPQSNMSYLLVLPSTLPG |
| NOV47c | REQQSSYTLWVEAVDGGEPALSSTAKITILLLDINDNPPLVLFPQSNMSYLLVLPSTLLG |
| NOV47d | REQQSSYTLWVEAVDGGEPALSSTAKITILLLDINDNPPLVLFPQSNMSYLLVLPSTLPG |
| NOV47e | REQQSSYTLWVEAVDGGEPALSSTAKITILLLDINDNPPLVLFPQSNMSYLLVLPSTLPG |
| NOV47f | RETQDQYVSIIIAEDGGSPPLLGSATLTIGISDINDNCPLFTDSQ--IN-VTVYGNATVG |
| NOV47a | SPVTEVYAVDKDTGMNAVIAYSIIGRR-GPRPESFRIDPKTGNITLEEALLQTDYGLHRL |
| NOV47b | SPVTEVYAVDKDTGMNAVIAYSIIGRR-GPRPESFRIDPKTGNITLEEALLQTDYGLHRL |
| NOV47c | SPVTEVYAVDKDTGMNAVIAYSIIGRR-GPRPESFRIDPKTGNITLEEALLQTDYGLHRL |
| NOV47d | SPVTEVYAVDKDTGMNAVIAYSIIGRR-GPRPESFRIDPKTGNITLEEALLQTDYGLHRL |
| NOV47e | SPVTEVYAVDKDTGMNAVIAYSIIGRR-GPRPESFRIDPKTGNITLEEALLQTDYGLHRL |
| NOV47f | TPIAAVQAVDKDLGTNAQITYSYSQKVPQASKDLFHLDENTGVIKLFSKIGGSVLESHKL |
| NOV47a | LVKVSDHGYPEPLHSTVMVNLFVNDTVSNESYIESLLRKEPEINIEEKEPQISIEPTHRK |
| NOV47b | LVKVSDHGYPEPLHSTVMVNLFVNDTVSNESYIESLLRKEPEINIEEKEPQISIEPTHRK |
| NOV47c | LVKVSDHGYPEPLHSTVMVNLFVNDTVSNESYIESLLRKEPEINIEEKEPQISIEPTHRK |
| NOV47d | LVKVSDHGYPEPLHSTVMVNLFVNDTVSNESYIESLLRKEPEINIEEKEPQISIEPTHRK |
| NOV47e | LVKVSDHGYPEPLHSTVMVNLFVNDTVSNESYIESLLRKEPEINIEEKEPQISIEPTHRK |
| NOV47f | TILAN------------------------------------------------------- |
| NOV47a | VESVSCMPTLVALSVISLGSITLVTGMGIYICLRKGEKHPREDENLEVQIPLKGKIDLHM |
| NOV47b | VELE-------------------------------------------------------- |
| NOV47c | VELE-------------------------------------------------------- |
| NOV47d | VELE-------------------------------------------------------- |
| NOV47e | VELE-------------------------------------------------------- |
| NOV47f | ------------------------------------------------------------ |
| NOV47a | RERKPMDISNI |
| NOV47b | ----------- |
| NOV47c | ----------- |
| NOV47d | ----------- |
| NOV47e | ----------- |
| NOV47f | ----------- |
| NOV47a | (SEQ ID NO: 1042) |
| NOV47b | (SEQ ID NO: 1044) |
| NOV47c | (SEQ ID NO: 1046) |
| NOV47d | (SEQ ID NO: 1048) |
| NOV47e | (SEQ ID NO: 1050) |
| NOV47f | (SEQ ID NO: 1052) |

[0628] Further analysis of the NOV47a protein yielded the following properties shown in Table 47C.

TABLE 47C
Protein Sequence Properties NOV47a

| | |
|---|---|
| SignalP analysis: | Cleavage site between residues 14 and 15 |
| PSORT II analysis: | |

| PSG: | a new signal peptide prediction method | |
|---|---|---|
| | N-region: | length 7; pos. chg 2; neg. chg 0 |
| | H-region: | length 4; peak value −19.10 |
| | PSG score: | −23.50 |

| | |
|---|---|
| GvH: | von Heijne's method for signal seq. recognition |
| | GvH score (threshold: −2.1): −9.89 |
| | possible cleavage site: between 29 and 30 |

>>> Seems to have no N-terminal signal peptide

| ALOM: | Klein et al's method for TM region allocation | | |
|---|---|---|---|
| | Init position for calculation: 1 | | |
| | Tentative number of TMS(s) for the threshold 0.5: 3 | | |
| | INTEGRAL | Likelihood = | Transmembrane 54-70 |
| | | −2.76 | |
| | INTEGRAL | Likelihood = | Transmembrane 416-432 |
| | | −7.38 | |
| | INTEGRAL | Likelihood = | Transmembrane 901-917 |
| | | −3.77 | |

| | |
|---|---|
| PERIPHERAL | Likelihood = 2.01 (at 188) |

| | |
|---|---|
| | ALOM score: −7.38 (number of TMSs: 3) |
| MTOP: | Prediction of membrane topology (Hartmann et al.) |
| | Center position for calculation: 61 |
| | Charge difference: −5.0 C(−1.0)-N(4.0) |
| | N >= C: N-terminal side will be inside |

>>> membrane topology: type 3a
MITDISC: discrimination of mitochondrial targeting seq

| | | | |
|---|---|---|---|
| R content: | 7 | Hyd Moment(75): | 5.23 |
| Hyd Moment(95): | 11.82 | G content: | 2 |
| D/E content: | 1 | S/T content: | 5 |

Score: 2.50

Gavel: prediction of cleavage sites for mitochondrial preseq

R-2 motif at 85 SRA|TE

NUCDISC: discrimination of nuclear localization signals

| | |
|---|---|
| | pat4: none |
| | pat7: none |
| | bipartite: none |
| | content of basic residues: 8.9% |
| | NLS Score: −0.47 |
| KDEL: | ER retention motif in the C-terminus: none |

ER Membrane Retention Signals:

| | |
|---|---|
| | XXRR-like motif in the N-terminus: LARI |
| none | |

SKL: peroxisomal targeting signal in the C-terminus: none
PTS2: 2nd peroxisomal targeting signal: none
VAC: possible vacuolar targeting motif: none
RNA-binding motif: none
Actinin-type actin-binding motif:

| | |
|---|---|
| | type 1: none |
| | type 2: none |
| NMYR: | N-myristoylation pattern: none |

Prenylation motif: none
memYQRL: transport motif from cell surface to Golgi: none
Tyrosines in the tail: none
Dileucine motif in the tail: none
checking 63 PROSITE DNA binding motifs: none
checking 71 PROSITE ribosomal protein motifs: none
checking 33 PROSITE prokaryotic DNA binding motifs: none

| | |
|---|---|
| NNCN: | Reinhardt's method for Cytoplasmic/Nuclear discrimination |
| | Prediction: cytoplasmic |
| | Reliability: 76.7 |
| COIL: | Lupas's algorithm to detect coiled-coil regions |
| | total: 0 residues |

Final Results (k = 9/23):

```
34.8%: mitochondrial
34.8%: endoplasmic reticulum
17.4%: nuclear
  4.3%: cytoplasmic
  4.3%: plasma membrane
  4.3%: vesicles of secretory system
```

>> prediction for CG57448-01 is mit (k = 23)

[0629] A search of the NOV47a protein against the Geneseq database, a proprietary database that contains sequences published in patents and patent publication, yielded several homologous proteins shown in Table 47D.

TABLE 47D
Geneseq Results for NOV47a

| | | NOV47a | Identities/ | |
|---|---|---|---|---|
| | | Residues/ | Similarities for | |
| Geneseq | Protein/Organism/Length | Match | the Matched | Expect |
| Identifier | [Patent #, Date] | Residues | Region | Value |
| ABU52605 | Human NOVX protein, NOV16a - | 1 . . . 962 | 962/962 (100%) | 0.0 |
| | Homo sapiens, 962 aa. | 1 . . . 962 | 962/962 (100%) | |
| | [WO200281518-A2, 17-OCT-2002] | | | |
| ABP70119 | Human NOV32a - Homo sapiens, 947 | 16 . . . 962 | 946/947 (99%) | 0.0 |
| | aa. [WO200272771-A2, 19-SEP-2002] | 1 . . . 947 | 946/947 (99%) | |
| AAU09958 | Human cadherin-1 (CDHN-1) protein - | 39 . . . 962 | 924/924 (100%) | 0.0 |
| | Homo sapiens, 924 aa. | 1 . . . 924 | 924/924 (100%) | |
| | [WO200179293-A2, 25-OCT-2001] | | | |
| ABP47865 | Human polypeptide SEQ ID NO 295 - | 566 . . . 962 | 396/397 (99%) | 0.0 |
| | Homo sapiens, 397 aa. | 1 . . . 397 | 397/397 (99%) | |
| | [US2002042386-A1, 11-APR-2002] | | | |
| AAU19645 | Human novel extracellular matrix | 566 . . . 962 | 396/397 (99%) | 0.0 |
| | protein, Seq ID No 295 - Homo | 1 . . . 397 | 397/397 (99%) | |
| | sapiens, 397 aa. [WO200155368-A1, | | | |
| | 02-AUG-2001] | | | |

[0630] In a BLAST search of public sequence databases, the NOV47a protein was found to have homology to the proteins shown in the BLASTP data in Table 47E.

TABLE 47E
Public BLASTP Results for NOV47a

| | | NOV47a | Identities/ | |
|---|---|---|---|---|
| Protein | | Residues/ | Similarities for | |
| Accession | | Match | the Matched | Expect |
| Number | Protein/Organism/Length | Residues | Portion | Value |
| Q8NDN4 | Hypothetical protein - Homo | 13 . . . 962 | 949/950 (99%) | 0.0 |
| | sapiens (Human), 951 aa. | 2 . . . 951 | 949/950 (99%) | |
| Q9NRT9 | Protocadherin 13 - Homo sapiens | 16 . . . 962 | 946/947 (99%) | 0.0 |
| | (Human), 947 aa (fragment). | 1 . . . 947 | 946/947 (99%) | |
| Q8N6Y1 | Protocadherin 20 - Homo sapiens | 39 . . . 962 | 924/924 (100%) | 0.0 |
| | (Human), 924 aa. | 1 . . . 924 | 924/924 (100%) | |
| Q8BIV2 | PROTOCADHERIN 13 homolog - | 13 . . . 962 | 877/951 (92%) | 0.0 |
| | Mus musculus (Mouse), 952 aa. | 2 . . . 952 | 913/951 (95%) | |
| Q8BIZ0 | PROTOCADHERIN 13 homolog - | 39 . . . 962 | 861/925 (93%) | 0.0 |
| | Mus musculus (Mouse), 925 aa. | 1 . . . 925 | 897/925 (96%) | |

[0631] PFam analysis predicts that the NOV47a protein contains the domains shown in the Table 47F.

TABLE 47F
Domain Analysis of NOV47a

| | | Identities/ | |
|---|---|---|---|
| | | Similarities | |
| Pfam | NOV47a | for the | Expect |
| Domain | Match Region | Matched Region | Value |
| cadherin | 225 . . . 322 | 36/111 (32%) | 1.3e−08 |
| | | 73/111 (66%) | |
| cadherin | 336 . . . 428 | 27/110 (25%) | 0.0004 |
| | | 66/110 (60%) | |
| cadherin | 551 . . . 641 | 33/107 (31%) | 6.4e−19 |
| | | 69/107 (64%) | |
| cadherin | 655 . . . 744 | 39/107 (36%) | 5.8e−20 |
| | | 69/107 (64%) | |
| cadherin | 762 . . . 855 | 38/112 (34%) | 4e−11 |
| | | 70/112 (62%) | |

### Example 48

[0632] The NOV48 clone was analyzed, and the nucleotide and encoded polypeptide sequences are shown in Table 48A.

TABLE 48A
NOV48 Sequence Analysis

| | | |
|---|---|---|
| NOV48a, CG57574-03 | SEQ ID NO: 1053 | 1012 bp |
| DNA Sequence | ORF Start: ATG at 23 | ORF Stop: TAG at 1010 |

AGAGACCAGGTTCTGAGAAGCAATGGTGACGAAGGCCTTTGTCTTGTTGGCCATCTTTGCAGAAGCCT
CTGCAAAATCGTGTGCTCCAAATAAAGCAGATGTCATTCTTGTGTTTTGCTATCCCAAAACCATCATC
ACCAAAATCCCCGAGTGTCCCTATGGATGGGAAGTTCATCAGCTGGCCCTCGGAGGGCTGTGTTACAA
TGGGGTCCACGAAGGAGGTTACTACCAATTTGTGATCCCAGATTTATCACCTAAAAACAAGTCCTATT
GTGGAACCCAGTCTGAGTACAAGCCACCTATCTATCACTTCTACAGTCACATCGTTTCCAATGACACC
ACAGTGATTGTAAAAAACCAGCCTGTCAACTACTCCTTCTCCTGCACCTACCACTCCACCTACTTGGT
GAACCAGGCTGCCTTTGACCAGAGAGTGGCCACTGTTCACGTGAAGAACGGGAGCATGGGCACATTTG
AGAGCCAACTGTCTCTCAACTTCTACACTAATGCCAAGTTCTCCATCAAGAAAGAAGCTCCCTTTGTC
CTGGAGGCATCGGAAATCGGTTCAGATCTGTTTGCAGGAGTGGAAGCCAAAGGGTTAAGCATTAGGTT
TAAAGTGGTCTTGAACAGCTGTTGGGCCACCCCCTCGGCTGACTTCATGTATCCCTTGCAGTGGCAGC
TGATCAACAAGGGCTGCCCCACGGATGAAACCGTCCTCGTGCATGAGAATGGGAGAGATCACAGGGCA
ACCTTCCAATTCAATGCTTTCCGGTTCCAGAACATCCCCAAACTCTCCAAGGTGTGGTTACACTGTGA
GACGTTCATCTGCGACAGTGAGAAACTCTCCTGCCCAGTGACCTGCGATAAACGGAAGCGCCTCCTGC
GAGACCAGACCGGGGGAGTCCTGGTCGTGGAGCTCTCCCTGCGGAGCAGGGGATTTTCCAGTCTCTAT
AGCTTCTCAGATGTTCTCCACCACCTCATCATGATGTTGGGGATTTGTGCCGTGTTATAG

| | | | |
|---|---|---|---|
| NOV48a, CG57574-03 | SEQ ID NO: 1054 | 329 aa | MW at 36955.2kD |
| Protein Sequence | | | |

MVTKAFVLLAIFAEASAKSCAPNKADVILVFCYPKTIITKIPECPYGWEVHQLALGGLCYNGVHEGGY
YQFVIPDLSPKNKSYCGTQSEYKPPIYHFYSHIVSNDTTVIVKNQPVNYSFSCTYHSTYLVNQAAFDQ
RVATVHVKNGSMGTFESQLSLNFYTNAKFSIKKEAPFVLEASEIGSDLFAGVEAKGLSIRFKVVLNSC
WATPSADFMYPLQWQLINKGCPTDETVLVHENGRDHRATFQFNAFRFQNIPKLSKVWLHCETFICDSE
KLSCPVTCDKRKRLLRDQTGGVLVVELSLRSRGFSSLYSFSDVLHHLIMMLGICAVL

| | | |
|---|---|---|
| NOV48b, CG57574-01 | SEQ ID NO: 1055 | 1026 bp |
| DNA Sequence | ORF Start: ATG at 85 | ORF Stop: TAG at 985 |

GATCGAGGCTCAGGCCCTGGAAGGACCGTAAACATTTGGCCAGCTTGGTTTGGATACCTGGCAGAGAC
CAGGTTCTGAGAAGCAATGGTGACGAAGGCCTTTGTCTTGTTGGCCATCTTTGCAGAAGCCTCTGCAA
AATCGTGTGCTCCAAATAAAGCAGATGTCATTCTTGTGTTTTGCTATCCCAAAACCATCATCACCAAA
ATCCCCGAGTGTCCCTATGGATGGGAAGTTCATCAGCTGGCCCTCGGAGGGCTGTGTTACAATGGGGT
CCACGAAGGAGGTTACTACCAATTTGTGATCCCAGATTTATCACCTAAAAACAAGTCCTATTGTGGAA
CCCAGTCTGAGTACAAGCCACCTATCTATCACTTCTACAGTCACATCGTTTCCAATGACACCACAGTG
ATTGTAAAAAACCAGCCTGTCAACTACTCCTTCTCCTGCACCTACCACTCCACCTACTTGGTGAACCA
GGCTGCCTTTGACCAGAGTGTCAATTTCCTTCCAAAGAATGCCAAGTTCTCCATCAAGAAAGAAGCTC
CCTTTGTCCTGGAGGCATCCGAAATCGGTTCAGATCTGTTTGCAGGAGTGGAAGCCAAAGGGTTAAGC
ATTAGGTTTAAAGTGGTCTTGAACAGCTGTTGGGCCACCCCCTCGGCTGACTTCATGTATCCCTTGCA
GTGGCAGCTGATCAACAAGGGCTGCCCCACGGATGAAACCGTCCTCGTGCATGAGAATGGGAGAGATC
ACAGGGCAACCTTCCAATTCAATGCTTTCCGGTTCCAGAACATCCCCAAACTCTCCAAGGTGTGGTTA
CACTGTGAGACGTTCATCTGCGACAGTGAGAAACTCTCCTGCCCAGTGACCTGCGATAAACGGAAGCG
CCTCCTGCGAGACCAGACCGGGGGAGTCCTGGTCGTGGAGCTCTCCCTGCGGAATGTTCTCCACCACC
TCATCATGATGTTGGGGATTTGTGCCGTGTTATAGGAGTTAGCCAGGCAGCTGCCGCTCCTCCACCCA
CAATAG

| | | | |
|---|---|---|---|
| NOV48b, CG57574-01 | SEQ ID NO: 1056 | 300 aa | MW at 33751.8kD |
| Protein Sequence | | | |

MVTKAFVLLAIFAEASAKSCAPNKADVILVFCYPKTIITKIPECPYGWEVHQLALGGLCYNGVHEGGY
YQFVIPDLSPKNKSYCGTQSEYKPPIYHFYSHIVSNDTTVIVKNQPVNYSFSCTYHSTYLVNQAAFDQ
SVNFLPKNAKFSIKKEAPFVLEASEIGSDLFAGVEAKGLSIRFKVVLNSCWATPSADFMYPLQWQLIN
KGCPTDETVLVHENGRDHEATFQFNAFRFQNIPKLSKVWLHCETFICDSEKLSCPVTCDKRKRLLRDQ
TGGVLVVELSLRNVLHHLIMMLGICAVL

| | | |
|---|---|---|
| NOV48c, CG57574-02 | SEQ ID NO: 1057 | 1012 bp |
| DNA Sequence | ORF Start: ATG at 23 | ORF Stop: TAG at 1010 |

AGAGACCAGGTTCTGAGAAGCAATGGTGACGAAGGCCTTTGTCTTGTTGGCCATCTTTGCAGAAGCCT
CTGCAAAATCGTGTGCTCCAAATAAAGCAGATGTCATTCTTGTGTTTTGCTATCCCAAAACCATCATC
ACCAAAATCCCCGAGTGTCCCTATGGATGGGAAGTTCATCAGCTGGCCCTCGGAGGGCTGTGTTACAA
TGGGGTCCACGAAGGAGGTTACTACCAATTTGTGATCCCAGATTTATCACCTAAAAACAAGTCCTATT
GTGGAACCCAGTCTGAGTACAAGCCACCTATCTATCACTTCTACAGTCACATCGTTTCCAATGACGCC
ACAGTGATTGTAAAAAACCAGCCTGTCAACTACTCCTTCTCCTGCACCTACCACTCCACCTACTTGGT
GAACCAGGCTGCCTTTGACCAGAGAGTGGCCACTGTTCACGTGAAGAACGGGAGCATGGGCACATTTG
AGAGCCAACTGTCTCTCAACTTCTACACTAATGCCAAGTTCTCCATCAAGAAAGAAGCTCCCTTTGTC
CTGGAGGCATCCGAAATCGGTTCAGATCTGTTTGCAGGAGTGGAAGCCAAAGGGTTAAGCATTAGGTT
TAAAGTGGTCTTGAACAGCTGTTGGGCCACCCCCTCGGCTGACTTCATGTATCCCTTGCAGTGGCAGC
TGATCAACAAGGGCTGCCCCACGGATGAAACCGTCCTCGTGCATGAGAATGGGAGAGATCACAGGGCA
ACCTTCCAATTCAATGCTTTCCGGTTCCAGAACATCCCCAAACTCTCCAAGGTGTGGTTACACTGTGA
GACGTTCATCTGCGACAGTGAGAAACTCTCCTGCCCAGTGACCTGCGATAAACGGAAGCGCCTCCTGC
GAGACCAGACCGGGGGAGTCCTGGTCGTGGAGCTCTCCCTGCGGAGCAGGGGATTTTCCAGTCTCTAT
AGCTTCTCAGATGTTCTCCACCACCTCATCATGATGTTGGGGATTTGTGCCGTGTTATAG

| | | | |
|---|---|---|---|
| NOV48c, CG57574-02 | SEQ ID NO: 1058 | 329 aa | MW at 36925.2kD |
| Protein Sequence | | | |

MVTKAFVLLAIFAEASAKSCAPNKADVILVFCYPKTIITKIPECPYGWEVHQLALGGLCYNGVHEGGY
YQFVIPDLSPKNKSYCGTQSEYKPPIYHFYSHIVSNDATVIVKNQPVNYSFSCTYHSTYLVNQAAFDQ
RVATVHVKNGSMGTFESQLSLNFYTNAKFSIKKEAPFVLEASEIGSDLFAGVEAKGLSIRFKVVLNSC
WATPSADFMYPLQWQLINKGCPTDETVLVHENGRDHRATFQFNAFRFQNIPKLSKVWLHCETFICDSE
KLSCPVTCDKRKRLLRDQTGGVLVVELSLRSRGFSSLYSFSDVLHHLIMMLGICAVL

| | | |
|---|---|---|
| NOV48d, CG57574-04 | SEQ ID NO: 1059 | 840 bp |
| DNA Sequence | ORF Start: at 7 | ORF Stop: at 835 |

GGATCCAAATCGTGTGCTCCAAATAAAGCAGATGTCATTCTTGTGTTTTGCTATCCCAAAACCATCAT
CACCAAAATCCCCGAGTGTCCCTATGGATGGGAAGTTCATCAGCTGGCCCTCGGAGGGCTGTGTTACA
ATGGGGTCCACGAAGGAGGTTACTACCAATTTGTGATCCCAGATTTATCACCTAAAAACAAGTCCTAT
TGTGGAACCCAGTCTGAGTACAAGCCACCTATCTATCACTTCTACAGTCACATCGTTTCCAATGACAC
CACAGTGATTGTAAAAAACCAGCCTGTCAACTACTCCTTCTCCTGCACCTACCACTCCACCTACTTGG
TGAACCAGGCTGCCTTTGACCAGAGAGTGGCCACTGTTCACGTGAAGAACGGGAGCATGGGCACATTT
GAGAGCCAACTGTCTCTCAACTTCTACACTAATGCCAAGTTCTCCATCAAGAAAGAAGCTCCCTTTGT
CCTGGAGGCATCGGAAATCGGTTCAGATCTGTTTGCAGGAGTGGAAGCCAAAGGGTTAAGCATTAGGT
TTAAAGTGGTCTTGAACAGCTGTTGGGCCACCCCCTCGGCTGACTTCATGTATCCCTTGCAGTGGCAG
CTGATCAACAAGGGCTGCCCCACGGATGAAACCGTCCTCGTGCATGAGAATGGGAGAGATCACAGGGC
AACCTTCCAATTCAATGCTTTCCGGTTCCAGAACATCCCCAAACTCTCCAAGGTGTGGTTACACTGTG
AGACGTTCATCTGCGACAGTGAGAAACTCTCCTGCCCAGTGACCTGCGATAAACGGAAGCGCCTCCTG
CGAGACCAGACCGGGGGACTCGAG

| | | | |
|---|---|---|---|
| NOV48d, CG57574-04 | SEQ ID NO: 1060 | 276 aa | MW at 31202.3kD |
| Protein Sequence | | | |

KSCAPNKADVILVFCYPKTIITKIPECPYGWEVHQLALGGLCYNGVHEGGYYQFVIPDLSPKNKSYCG
TQSEYKPPIYHFYSHIVSNDTTVIVKNQPVNYSFSCTYHSTYLVNQAAFDQRVATVHVKNGSMGTFES
QLSLNFYTNAKFSIKKEAPFVLEASEIGSDLFAGVEAKGLSIRFKVVLNSCWATPSADFMYPLQWQLT
NKGCPTDETVLVHENGRDHPATFQFNAFRFQNIPKLSKVWLHCETFICDSEKLSCPVTCDKRKRLLRD
QTGG

| | | |
|---|---|---|
| NOV48e, CG57574-05 | SEQ ID NO: 1061 | 821 bp |
| DNA Sequence | ORF Start: at 1 | ORF Stop: at 820 |

GGATCCAAATCGTGCGCTCCAAATAAAGCAGATGTCATTCTTGTGTTTTGCTATCCCAAAACCATCAT
CACCAAAATCCCCGAGTGTCCCTATGGATGGGAAGTTCATCAGCTGGCCCTCGGAGGGCTGTGTTACA
ATGGGGTCCACGAAGGAGGTTACTACCAATTTGTGATCCCAGATTTATCACCTAAAAACAAGTCCTAT
TGTGGAACCCAGTCTGAGTACAAGCCACCTATCTATCACTTCTACAGTCACATCGTTTCCAATGACAC
CACAGTGATTGTAAAAAACCAGCCTGTCAACTACTCCTTCTCCTGCACCTACCACTCCACCTACTTGG
TGAACCAGGCTGCCTTTGACCAGAGAGTGGCCACTGTTCACGTGAAGAACGGGAGCATGGGCACATTT
GAGAGCCAACTGTCTCTCAACTTCTACACTAATGCCAAGTTCTCCATCAAGAAAGAAGCTCCCTTTGT
CCTGGAGGCATCCGAAATCGGTTCAGATCTGTTTGCAGGAGTGGAAGCCAAAGGGTTAAGCATTAGGT
TTAAAGTGGTCTTGAACAGCTGTTGGGCCACCCCCTCGGCTGACTTCATGTATCCCTTGCAGTGGCAG
CTGATCAACAAGGGCTGCCCCACGGATGAAACCGTCCTCGTGCATGAGAATGGGAGAGATCACAGGGC
AACCTTCCAATTCAATGCTTTCCGGTTCCAGAACATCCCCAAACTCTCCAAGGTGTGGTTACACTGTG
AGACGTTCATCTGCGACAGTGAGAAACTCTCCTGCCCAGTGACCTGCGATAAACGGAAGCGCCTCCTG
CGAGA

| | | | |
|---|---|---|---|
| NOV48e, CG57574-05 | SEQ ID NO: 1062 | 273 aa | MW at 30888.0kD |
| Protein Sequence | | | |

GSKSCAPNKADVILVFCYPKTIITKIPECPYGWEVHQLALGGLCYNGVHEGGYYQFVIPDLSPKNKSY
CGTQSEYKPPIYHFYSHIVSNDTTVIVKNQPVNYSFSCTYHSTYLVNQAAFDQRVATVHVKNGSMGTF
ESQLSLNFYTNAKFSIKKEAPFVLEASEIGSDLFAGVEAKGLSIRFKVVLNSCWATPSADFMYPLQWQ
LINKGCPTDETVLVHENGRDHRATFQFNAFRFQNIPKLSKVWLHCETFICDSEKLSCPVTCDKRKRLL
R

[0633] A ClustalW comparison of the above protein sequences yields the following sequence alignment shown in Table 48B.

TABLE 48B
Comparison of the NOV48 protein sequences.

| | |
|---|---|
| NOV48a | MVTKAFVLLAIFAEASAKSCAPNKADVILVFCYPKTIITKIPECPYGWEVHQLALGGLCY |
| NOV48b | MVTKAFVLLAIFAEASAKSCAPNKADVILVFCYPKTIITKIPECPYGWEVHQLALGGLCY |
| NOV48c | MVTKAFVLLAIFAEASAKSCAPNKADVILVFCYPKTIITKIPECPYGWEVHQLALGGLCY |
| NOV48d | -----------------KSCAPNKADVILVFCYPKTIITKIPECPYGWEVHQLALGGLCY |
| NOV48e | ---------------GSKSCAPNKADVILVFCYPKTIITKIPECPYGWEVHQLALGGLCY |
| NOV48a | NGVHEGGYYQFVIPDLSPKNKSYCGTQSEYKPPIYHFYSHIVSNDTTVIVKNQPVNYSFS |
| NOV48b | NGVHEGGYYQFVIPDLSPKNKSYCGTQSEYKPPIYHFYSHIVSNDTTVIVKNQPVNYSFS |
| NOV48c | NGVHEGGYYQFVIPDLSPKNKSYCGTQSEYKPPIYHFYSHIVSNDATVIVKNQPVNYSFS |
| NOV48d | NGVHEGGYYQFVIPDLSPKNKSYCGTQSEYKPPIYHFYSHIVSNDTTVIVKNQPVNYSFS |
| NOV48e | NGVHEGGYYQFVIPDLSPKNKSYCGTQSEYKPPIYHFYSHIVSNDTTVIVKNQPVNYSFS |
| NOV48a | CTYHSTYLVNQAAFDQRVATVHVKNGSMGTFESQLSLNFYTNAKFSIKKEAPFVLEASEI |
| NOV48b | CTYHSTYLVNQAAFDQSVNFLPK-----------------N-AKFSIKKEAPFVLEASEI |
| NOV48c | CTYHSTYLVNQAAFDQRVATVHVKNGSMGTFESQLSLNFYTNAKFSIKKEAPFVLEASEI |
| NOV48d | CTYHSTYLVNQAAFDQRVATVHVKNGSMGTFESQLSLNFYTNAKFSIKKEAPFVLEASEI |
| NOV48e | CTYHSTYLVNQAAFDQRVATVHVKNGSMGTFESQLSLNFYTNAKFSIKKEAPFVLEASEI |
| NOV48a | GSDLFAGVEAKGLSIRFKVVLNSCWATPSADFMYPLQWQLINKGCPTDETVLVHENGRDH |
| NOV48b | GSDLFAGVEAKGLSIRFKVVLNSCWATPSADFMYPLQWQLINKGCPTDETVLVHENGRDH |
| NOV48c | GSDLFAGVEAKGLSIRFKVVLNSCWATPSADFMYPLQWQLINKGCPTDETVLVHENGRDH |
| NOV48d | GSDLFAGVEAKGLSIRFKVVLNSCWATPSADFMYPLQWQLINKGCPTDETVLVHENGRDH |
| NOV48e | GSDLFAGVEAKGLSIRFKVVLNSCWATPSADFMYPLQWQLINKGCPTDETVLVHENGRDH |
| NOV48a | RATFQFNAFRFQNIPKLSKVWLHCETFICDSEKLSCPVTCDKRKRLLRDQTGGVLVVELS |
| NOV48b | RATFQFNAFRFQNIPKLSKVWLHCETFICDSEKLSCPVTCDKRKRLLRDQTGGVLVVELS |
| NOV48c | RATFQFNAFRFQNIPKLSKVWLHCETFICDSEKLSCPVTCDKRKRLLRDQTGGVLVVELS |
| NOV48d | RATFQFNAFRFQNIPKLSKVWLHCETFICDSEKLSCPVTCDKRKRLLRDQTGG------- |
| NOV48e | RATFQFNAFRFQNIPKLSKVWLHCETFICDSEKLSCPVTCDKRKRLLR------------ |
| NOV48a | LRSRGFSSLYSFSDVLHHLIMMLGICAVL |
| NOV48b | LRNVLHHLIMMLGICAVL----------- |
| NOV48c | LRSRGFSSLYSFSDVLHHLIMMLGICAVL |
| NOV48d | ----------------------------- |
| NOV48e | ----------------------------- |
| NOV48a | (SEQ ID NO: 1054) |
| NOV48b | (SEQ ID NO: 1056) |
| NOV48c | (SEQ ID NO: 105B) |
| NOV48d | (SEQ ID NO: 1060) |
| NOV48e | (SEQ ID NO: 1062) |

[0634] Further analysis of the NOV48a protein yielded the following properties shown in Table 48C.

TABLE 48C
Protein Sequence Properties NOV48a

| | |
|---|---|
| SignalP analysis: | Cleavage site between residues 18 and 19 |
| PSORT II analysis: | |

| PSG: | a new signal peptide prediction method | |
|---|---|---|
| | N-region: | length 4; pos. chg 1; neg. chg 0 |
| | H-region: | length 9; peak value 11.46 |
| | PSG score: | 7.06 |

| | |
|---|---|
| GvH: | von Heijne's method for signal seq. recognition |
| | GvH score (threshold: −2.1): 0.86 |
| | possible cleavage site: between 17 and 18 |

>>> Seems to have a cleavable signal peptide (1 to 17)

| ALOM: | Klein et al's method for TM region allocation | |
|---|---|---|
| | Init position for calculation: 18 | |
| | Tentative number of TMS(s) for the threshold 0.5: 1 | |
| | Number of TMS(s) for threshold 0.5: 0 | |
| | PERIPHERAL | Likelihood = 2.76 (at 25) |

| | ALOM score: −1.44 (number of TMSs: 0) | | | |
|---|---|---|---|---|
| MTOP: | Prediction of membrane topology (Hartmann et al.) | | | |
| | Center position for calculation: 8 | | | |
| | Charge difference: −2.0 C(0.0)-N(2.0) | | | |
| | N >= C: N-terminal side will be inside | | | |
| MITDISC: | discrimination of mitochondrial targeting seq | | | |
| | R content: | 0 | Hyd Moment(75): | 8.58 |
| | Hyd Moment(95): | 5.88 | G content: | 0 |
| | D/E content: | 2 | S/T content: | 3 |

| | |
|---|---|
| | Score: −5.83 |
| Gavel: | prediction of cleavage sites for mitochondrial preseq |
| | cleavage site motif not found |

NUCDISC: discrimination of nuclear localization signals

| | |
|---|---|
| | pat4: KRKR (5) at 282 |
| | pat7: none |
| | bipartite: none |
| | content of basic residues: 9.4% |
| | NLS Score: −0.16 |
| KDEL: | ER retention motif in the C-terminus: none |

ER Membrane Retention Signals: none
SKL: peroxisomal targeting signal in the C-terminus: none
PTS2: 2nd peroxisomal targeting signal: none
VAC: possible vacuolar targeting motif: none
RNA-binding motif: none
Actinin-type actin-binding motif:

type 1: none
type 2: none

NMYR: N-myristoylation pattern: none
Prenylation motif: CaaX motif in the C-terminus: CAVL
if X is S, A, or M, it will be farnesylated
otherwise, it will be geranylgeranylated
memYQRL: transport motif from cell surface to Golgi: none
Tyrosines in the tail: none
Dileucine motif in the tail: none
checking 63 PROSITE DNA binding motifs: none
checking 71 PROSITE ribosomal protein motifs: none
checking 33 PROSITE prokaryotic DNA binding motifs: none

| | |
|---|---|
| NNCN: | Reinhardt's method for Cytoplasmic/Nuclear |
| | discrimination |
| | Prediction: cytoplasmic |
| | Reliability: 94.1 |
| COIL: | Lupas's algorithm to detect coiled-coil regions |
| | total: 0 residues |

Final Results (k = 9/23):

33.3%: endoplasmic reticulum
22.2%: mitochondrial
11.1%: cytoplasmic
11.1%: vacuolar
11.1%: nuclear
11.1%: extracellular, including cell wall

>> prediction for CG57574-03 is end (k = 9)

[0635] A search of the NOV48a protein against the Geneseq database, a proprietary database that contains sequences published in patents and patent publication, yielded several homologous proteins shown in Table 48D.

TABLE 48D
Geneseq Results for NOV48a

| | | NOV48a | Identities/ | |
|---|---|---|---|---|
| | | Residues/ | Similarities for | |
| Geneseq | Protein/Organism/Length | Match | the Matched | Expect |
| Identifier | [Patent #, Date] | Residues | Region | Value |
| AAE17314 | Human tectorin beta protein, | 1 . . . 329 | 329/329 (100%) | 0.0 |
| | sbg453915TECTORINa - Homo | 1 . . . 329 | 329/329 (100%) | |
| | sapiens, 329 aa. [WO200198342-A1, | | | |
| | 27-DEC-2001] | | | |
| ABG72418 | Cytochrome b45.65 - Unidentified, 415 | 14 . . . 285 | 84/299 (28%) | 3e−17 |
| | aa. [CN1345764-A, 24-APR-2002] | 27 . . . 318 | 131/299 (43%) | |
| AAE17559 | Human pancreatic tumour protein, GP- | 77 . . . 282 | 62/215 (28%) | 1e−12 |
| | 2 - Homo sapiens, 530 aa. | 270 . . . 472 | 101/215 (46%) | |
| | [WO200194409-A2, 13-DEC-2001] | | | |
| AAB54274 | Human pancreatic cancer antigen | 77 . . . 282 | 62/215 (28%) | 1e−12 |
| | protein sequence SEQ ID NO: 726 - | 146 . . . 348 | 101/215 (46%) | |
| | Homo sapiens, 406 aa. | | | |
| | [WO200055320-A1, 21-SEP-2000] | | | |
| AAR98963 | Human GP2 pancreatic glycoprotein - | 77 . . . 282 | 62/215 (28%) | 1e−12 |
| | Homo sapiens, 384 aa. [WO9617873- | 124 . . . 326 | 101/215 (46%) | |
| | A1, 13-JUN-1996] | | | |

[0636] In a BLAST search of public sequence databases, the NOV48a protein was found to have homology to the proteins shown in the BLASTP data in Table 48E.

TABLE 48E
Public BLASTP Results for NOV48a

| | | NOV48a | Identities/ | | |
|---|---|---|---|---|---|
| Protein | | Residues/ | Similarities for | | |
| Accession | | Match | the Matched | | Expect |
| Number | Protein/Organism/Length | Residues | Portion | | Value |
| Q96PL2 | Tectorin beta - Homo sapiens | 1 . . . 329 | 329/329 | (100%) | 0.0 |
| | (Human), 329 aa. | 1 . . . 329 | 329/329 | (100%) | |
| O08524 | Beta tectorin - Mus musculus | 1 . . . 329 | 310/329 | (94%) | 0.0 |
| | (Mouse), 329 aa. | 1 . . . 329 | 317/329 | (96%) | |
| P54097 | Beta-tectorin precursor - Gallus | 1 . . . 329 | 242/329 | (73%) | e−150 |
| | gallus (Chicken), 329 aa. | 1 . . . 328 | 286/329 | (86%) | |
| Q95JJ6 | Hypothetical 45.5 kDa protein - | 14 . . . 285 | 85/299 | (28%) | 4e−17 |
| | Macaca fascicularis (Crab eating | 27 . . . 318 | 131/299 | (43%) | |
| | macaque) (Cynomolgus monkey), | | | | |
| | 415 aa. | | | | |
| Q8TCW7 | Hypothetical protein - Homo sapiens | 14 . . . 285 | 84/299 | (28%) | 5e−17 |
| | (Human), 431 aa. | 43 . . . 334 | 131/299 | (43%) | |

[0637] PFam analysis predicts that the NOV48a protein contains the domains shown in the Table 48F.

TABLE 48F
Domain Analysis of NOV48a

| | | | |
|---|---|---|---|
| | | Identities/ | |
| | | Similarities | |
| Pfam | NOV48a | for the | Expect |
| Domain | Match Region | Matched Region | Value |

| | | | | |
|---|---|---|---|---|
| zona_pellucida | 19 . . . 283 | 55/310 | (18%) | 8.2e−49 |
| | | 190/310 | (61%) | |

### Example 49

[0638] The NOV49 clone was analyzed, and the nucleotide and encoded polypeptide sequences are shown in Table 49A.

TABLE 49A
NOV49 Sequence Analysis

| | | |
|---|---|---|
| NOV49a, CG57689-01 | SEQ ID NO: 1063 | 1933 bp |
| DNA Sequence | ORF Start: ATG at 75 | ORF Stop: TAA at 1881 |

GGTCGGCTGCCCCGAGGGCTTTGAGCTGGACTCCCAGGGAGCGTTTTGTGTGGGTGAGCGCCCCCAAC
CCTGGCATGGATGTGGGAGGCCTCTCAGCCTGGGATGGATGGCTTCTCCCAGCCAGCTGGCAGGAGGG
CCTGGGAGCGGAGACCACCAGACCCCTTCCTGCCCCAGACAGGGACGAGTGCTCAGGAGGCCCTAGCC
CCTGCTCCCATGCCTGCCTTAATGCACCCGGCCGCTTCTCCTGCACCTGCCCCACTGGCTTCGCCCTG
GCCTGGGATGACAGGAACTGCAGAGATGTGGACGAGTGTGCGTGGGATGCTCACCTCTGCCGAGAGGG
ACAGCGCTGTGTGAACCTGCTCGGGTCCTACCGCTGCCTCCCCGACTGTGGGCCTGGCTTCCGGGTGG
CTGATGGGGCCGGCTGTGAAGATGTGGACGAATGCCTGGAGGGGTTGGACGACTGTCACTACAACCAG
CTCTGCGAGAACACCCCAGGCGGTCACCGCTGCAGCTGCCCCAGGGGTTACCGGATGCAGGGCCCCAG
CCTGCCCTGCCTAGATGTCAATGAGTGCCTGCAGCTGCCCAAGGCCTGCGCCTACCAGTGCCACAACC
TCCAGGGCAGCTACCGCTGCCTGTGCCCCCCAGGCCAGACCCTCCTTCGCGACGGCAAGGCCTGCACC
TCACTGGAGCGGAATGGACAAAATGTGACCACCGTCAGCCACCGAGGCCCTCTATTGCCCTGGCTGCG
GCCCTGGGCCTCGATCCCCGGTACCTCCTACCACGCCTGGGTCTCTCTCCGTCCGGGTCCCATGGCCC
TGAGCAGTGTGGGCCGGGCCTGGTGCCCTCCTGGTTTCATCAGGCAGAACGGAGTCTGCACAGACCTT
GACGAGTGCCGCGTGAGGAACCTGTGTCAGCACGCCTGCCGCAACACTGAGGGCAGCTACCAGTGCCT
GTGCCCACGCCGGCTACCGTCTGCTCCCCAGCGGGAAGAACTGCCAGGACATCAACGAGTGCGAGGAG
GAGAGCATCGAGTGTGGACCCGGCCAGATGTGCTTCAACACCCGTGGCAGCTACCAGTGTGTGGACAC
ACCCTGTCCTGCCACCTACCGGCAGGGCCCCAGCCCTGGGACGTGCTTCCGGCGCTGCTCGCAGGACT
GCGGCACGGGCGGCCCCTCTACGCTGCAGTACCGGCTGCTGCCGCTGCCCCTGGGCGTGCGCGCCCAC
CACGACGTGGCCCGCCTCACCGCCTTCTCCGAGGTCGGCGTCCCCGCCAACCGCACCGAGCTCAGCAT
GCTGGAGCCCGACCCCCGCAGCCCCTTCGCGCTGCGTCCGCTGCGCGCGGGCCTTGGCGCGGTCTACA
CCCGTCGCGCGCTCACCCGCGCCGGCCTCTACCGGCTCACCGTGCGTGCTGCGGCACCGCGCCACCAA
AGCGTCTTCGTCTTGCTCATCGCCGTGTCCCCCTACCCCTACTAAACGGGAGAGGGCATTGGCGGCCG
CCCTGGCGTGACCCCCGAGGAAGGGGTCGAGGAGAAGCTTGGTCCACGCCACCTGCTGTGGCAAGCGG
AGCGTCATCGTCTCCCGCCCCGTGCGTCAGCGAGACCTTGGGTCAACACGACCCTGCGCACAGCCTTG
ACCCCCGACAGCGAGGACCTGACCTCACAGAGGGAGGCGTCCAGGGCGGCCCTTGGGTGGCCAGTCCC
GCAGGCAGGGCCCGGGGAAGCCCGGATCAGACCTCCAGGTCTGATCCGCCCCTCAGTGGGAGCGGGAC
AGGGACACAGGGCACCTGGACGCGCGGGAGAGGGGGCAGACCCCGCGTTAGGGGTGGCAGCAGCTGTC
GCCCGGCCACACCTGGTGGTGTCATTCTGAACCCTGTTGCAATATAAAGGGATTTTTTTTTAACCAAC
TTGGTTTCTTTGTCTAATTATTTTGCTTT

| | | | |
|---|---|---|---|
| NOV49a, CG57689-01 | SEQ ID NO: 1064 | 602 aa | MW at 65011.8kD |
| Protein Sequence | | | |

MDVGGLSAWDGWLLPASWQEGLGAETTRPLPAPDRDECSGGPSPCSHACLNAPGRFSCTCPTGFALAW
DDRNCRDVDECAWDAHLCREGQRCVNLLGSYRCLPDCGPGFRVADGAGCEDVDECLEGLDDCHYNQLC
ENTPGGHRCSCPRGYRMQGPSLPCLDVNECLQLPKACAYQCHNLQGSYRCLCPPGQTLLRDGKACTSL
ERNGQNVTTVSHRGPLLPWLRPWASIPGTSYHAWVSLRPGPMALSSVGRAWCPPGFIRQNGVCTDLDE
CRVRNLCQHACRNTEGSYQCLCPRRLPSAPQREELPGHQRVRGGEHRVWTRPDVLQHPWQLPVCGHTL
SCHLPAGPQPWDVLPALLAGLRHGRPLYAAVPAAAAAPGRARPPRRGPPHRLLRGRRPRQPHRAQHAG
ARPPQPLRAASAARGPWRGLHPSRAHPRRPLPAHRACCGTAPPKRLRLAHRRVPLPLLNGRGHWRPPW
RDPRGRGRGEAWSTPPAVASGASSSPAPCVSETLGQHDPAHSLDPRQRGPDLTEGGVQGGPWVASPAG
RARGSPDQTSRSDPPLSGSGTGTQGTWTRGRGGRPRVRGGSSCRPATPGGVILNPVAI

[0639] Further analysis of the NOV49a protein yielded the following properties shown in Table 49B.

TABLE 49B
Protein Sequence Properties NOV49a

| | |
|---|---|
| SignalP analysis: | No Known Signal Sequence Predicted |
| PSORT II analysis: | |

| PSG: | a new signal peptide prediction method | |
|---|---|---|
| | N-region: | length 10; pos. chg 0; neg. chg 2 |
| | H-region: | length 9; peak value 0.00 |
| | PSG score: | −4.40 |

| | |
|---|---|
| GvH: | von Heijne's method for signal seq. recognition |
| | GvH score (threshold: −2.1): −3.99 |
| | possible cleavage site: between 23 and 24 |

>>> Seems to have no N-terminal signal peptide

| ALOM: | Klein et al's method for TM region allocation | |
|---|---|---|
| | Init position for calculation: 1 | |
| | Tentative number of TMS(s) for the threshold 0.5: 0 | |
| | number of TMS(s) . . . fixed | |
| | PERIPHERAL | Likelihood = 7.80 (at 586) |

| | ALOM score: 7.80 (number of TMSs: 0) | | | |
|---|---|---|---|---|
| MITDISC: | discrimination of mitochondrial targeting seq | | | |
| | R content: | 0 | Hyd Moment(75): | 3.89 |
| | Hyd Moment(95): | 4.99 | G content: | 2 |
| | D/E content: | 2 | S/T content: | 1 |

| | |
|---|---|
| | Score: −8.14 |
| Gavel: | prediction of cleavage sites for mitochondrial preseq |
| | cleavage site motif not found |

NUCDISC: discrimination of nuclear localization signals

| | |
|---|---|
| | pat4: RRPR (4) at 396 |
| | pat7: PPKRLRL (4) at 450 |
| | pat7: PKRLRLA (5) at 451 |
| | bipartite: none |
| | content of basic residues: 12.3% |
| | NLS Score: 0.55 |
| KDEL: | ER retention motif in the C-terminus: none |

ER Membrane Retention Signals: none
SKL: peroxisomal targeting signal in the C-terminus: none
PTS2: 2nd peroxisomal targeting signal: none
VAC: possible vacuolar targeting motif: none
RNA-binding motif: none
Actinin-type actin-binding motif:

type 1: none
type 2: none

NMYR: N-myristoylation pattern: none
Prenylation motif: none
memYQRL: transport motif from cell surface to Golgi: none
Tyrosines in the tail: none
Dileucine motif in the tail: none
checking 63 PROSITE DNA binding motifs: none
checking 71 PROSITE ribosomal protein motifs: none
checking 33 PROSITE prokaryotic DNA binding motifs: none

| | |
|---|---|
| NNCN: | Reinhardt's method for Cytoplasmic/Nuclear |
| | discrimination |
| | Prediction: nuclear |
| | Reliability: 94.1 |
| COIL: | Lupas's algorithm to detect coiled-coil regions |
| | total: 0 residues |

Final Results (k = 9/23):

```
73.9%: nuclear
17.4%: cytoplasmic
  4.3%: mitochondrial
  4.3%: peroxisomal
```

>> prediction for CG57689-01 is nuc (k = 23)

[0640] A search of the NOV49a protein against the Geneseq database, a proprietary database that contains sequences published in patents and patent publication, yielded several homologous proteins shown in Table 49C.

TABLE 49C
Geneseq Results for NOV49a

| | | NOV49a | Identities/ | |
|---|---|---|---|---|
| | | Residues/ | Similarities for | |
| Geneseq | Protein/Organism/Length | Match | the Matched | Expect |
| Identifier | [Patent #, Date] | Residues | Region | Value |
| ABU07377 | Human protein NOV9 - Homo sapiens, | 34 . . . 307 | 266/277 (96%) | e−172 |
| | 3931 aa. [WO200285922-A2, 31-OCT- | 3500 . . . 3776 | 269/277 (97%) | |
| | 2002] | | | |
| ABP69271 | Human polypeptide SEQ ID NO 1318 - | 34 . . . 307 | 266/277 (96%) | e−172 |
| | Homo sapiens, 939 aa. | 508 . . . 784 | 269/277 (97%) | |
| | [WO200270539-A2, 12-SEP-2002] | | | |
| ABG34007 | Human secreted protein #4 encoded by | 60 . . . 307 | 231/251 (92%) | e−146 |
| | gene 57 - Homo sapiens, 638 aa. | 233 . . . 483 | 234/251 (93%) | |
| | [WO200226931-A2, 04-APR-2002] | | | |
| ABG33919 | Human secreted protein encoded by | 60 . . . 307 | 231/251 (92%) | e−146 |
| | gene 57 #1 - Homo sapiens, 575 aa. | 170 . . . 420 | 234/251 (93%) | |
| | [WO200226931-A2, 04-APR-2002] | | | |
| AAE06183 | Human gene 57 encoded secreted | 60 . . . 307 | 231/251 (92%) | e−146 |
| | protein fragment, SEQ ID NO: 245 - | 233 . . . 483 | 234/251 (93%) | |
| | Homo sapiens, 638 aa. | | | |
| | [WO200151504-A1, 19-JUL-2001] | | | |

[0641] In a BLAST search of public sequence databases, the NOV49a protein was found to have homology to the proteins shown in the BLASTP data in Table 49D.

TABLE 49D
Public BLASTP Results for NOV49a

| | | NOV49a | Identities/ | |
|---|---|---|---|---|
| Protein | | Residues/ | Similarities for | |
| Accession | | Match | the Matched | Expect |
| Number | Protein/Organism/Length | Residues | Portion | Value |
| Q8BNH3 | Inferred: hemicentin - Mus | 34 . . . 546 | 285/541 (52%) | e−148 |
| | musculus (Mouse), 729 aa. | 229 . . . 729 | 314/541 (57%) | |
| Q8K061 | Hypothetical protein - Mus | 34 . . . 307 | 212/278 (76%) | e−135 |
| | musculus (Mouse), 787 aa. | 355 . . . 632 | 229/278 (82%) | |
| Q96SC3 | Fibulin-6 - Homo sapiens | 26 . . . 317 | 124/302 (41%) | 5e−62 |
| | (Human), 2673 aa (fragment). | 2222 . . . 2506 | 159/302 (52%) | |
| Q96RW7 | Hemicentin - Homo sapiens | 26 . . . 317 | 122/302 (40%) | 1e−60 |
| | (Human), 5636 aa. | 5185 . . . 5469 | 158/302 (51%) | |
| Q96K89 | Hypothetical protein FLJ14438 - | 34 . . . 317 | 114/297 (38%) | 4e−48 |
| | Homo sapiens (Human), 741 aa. | 330 . . . 574 | 147/297 (49%) | |

[0642] PFam analysis predicts that the NOV49a protein contains the domains shown in the Table 49E.

TABLE 49E
Domain Analysis of NOV49a

| | | Identities/ | |
|---|---|---|---|
| | | Similarities | |
| Pfam | NOV49a | for the | Expect |
| Domain | Match Region | Matched Region | Value |
| EGF | 38 . . . 73 | 14/47 (30%) | 2.9e−07 |
| | | 29/47 (62%) | |
| EGF | 123 . . . 160 | 14/47 (30%) | 0.86 |
| | | 24/47 (51%) | |
| EGF | 166 . . . 201 | 15/47 (32%) | 8.6e−06 |
| | | 26/47 (55%) | |

### Example 50

[0643] The NOV50 clone was analyzed, and the nucleotide and encoded polypeptide sequences are shown in Table 50A.

TABLE 50A
NOV50 Sequence Analysis

| | | |
|---|---|---|
| NOV50a, CG58567-01 | SEQ ID NO: 1065 | 3373 bp |
| DNA Sequence | ORF Start: at 1 | ORF Stop: TGA at 3190 |

TTGATTGTCCAAGCCACAGATAAAGGGATGCCCAGGCTTTCTAATACGACTGTAATCAAGGTACAGGT
GACTGATATAAATGACAATGCCCCAGCTTTTCTCCCCTCTGAAGCAGTGGAAATTACAGAAGTCATGA
CTATTTCAGAAGATTCTTTGCCTGGTGTAATTGTGACTCATGTGTCAGTTCATGATGTGGATTTGAAT
TCAGCTTTCATATTCAGTTTTGCCAAAGAGAGTAATCCTGGAACCAAGTTTGCTATTGATCAGAACAC
TGGAGTGGTGGTGTTGGTGAAAACATTGGATTTTGAAGAAATGACTGAATATGAGCTGCTCATCCAAA
TTTCTGATTCAGTGCACTACACAGAGGGAGCACTTGTAGTCCGTGTGCTGGATGTCAATGATAATCCA
CCAGTGTTTTCTCAAGATTTCTATCAGGTCACAGTTCCTGAATCAATACCTGTGGGGTATTCAGTGCT
GACTCTGTCAGCCACAGACTTAGAAAGCAATGAGAACATTTCTTACAGAATTCTATCCTCTTCTAAGG
AATTCTCCATTGATCCTAAGAATGGCACAATATTTACTATCAGTCCCGTATTACTTCTGGATACAATA
TCAACAACTCGATTTCTTGTGGAAGCCAGTGATGGTGGAAATCCTGACCCGAGAGCTCTTACTTTAGT
GGAGATAGGAATAGAAGATATGAACAATTATGCCCCTGAATTCACAGTCAAATCCTATAATCTTAGCC
TAAGTGAGGATGCTCTGGTTGGAAGCACGCTTGTTACATTTTCAAACATCGACCATGACTGGACCCGT
GAAAACACATATGTTGAATATTCCATCATCAGTGGTAATTCACAGAACAATTTTCATGTGGAAACTAA
GTTCTTTCATTCAGAATATCCTTATAAGCAAGTCGGTTATCTTGTGTTGCTTCACAGTCTGGACAGAG
AAGCAAGTGCTAGCCATGAGCTTGTCATTCTGGCATCTGACAGTGGCTGCCCTCCATTGAGTTCCACA
GCTGTCATATCAATACAAGTACTTGATGTCAATGACAATCCCCCAAACTTCAGCAGCCTGAGCTATCA
CACCCATGTCAAGGAAAGCACCCCTCTAGGGAGTCACATCACTGTGGTCTCAGCAAATGACCGTGACA
CAGGGTCACATGCAGAAATCATCTACAACATCATCTCTGGAAATGAGAAGGGACATTTTTACTTAGAA
GAAAACACTGGAGTTCTTTATTTGATTAAACCTCTGGATTATGAAAAAATGACAAAATTCACCTTAAC
TGTCCAAGCTTCAGATGCAGAAAAGAAACATTTTTCTTTTGCAGTTGTGTTTGTCAGTGTCCTGGATG
ATAACGACCATGCACCTCAGTTTATGTTCTCAAGCTTCAGCTGTATTGTTCCAGAAAATCTGCCTATT
TCCTCTACCATATGCTCTATAAATGCTCTGGATTTTGATGCTGGTCCGTATGGAGAATTGACCTATTC
TATTGTATCACCCTGTTTTCTCACTCATGGAATGTCTTATGATCATGATCTCTTCCTCATTGACCCTT
TGACAGGGGATATTCATGCTAAGCAAATCCTTGACTATGAAAATGGCAATAAATACTGCCTCACAGTC
CAAGCCAAAGACAAAGGTGATGCAACTGCCTCCTTAGTGGTCTGGGTGGATATTGAAGGGATAGATGA
ATTTGAGCCCATTTTCACTCAAGATCAGTATTTTTTCACCCTCCCAGAAAAGAATAAAGACAGACAGT
TGATTGGCAGAGTGGAAGCCTCAGATGCAGATGCTGGTATTGATGGAGTCATTCTTTACTCCCTTGGA
ACCTCATCTCCTTTCTTTTCAGTAAATAGAACCAATGGAAATATTTATTTGATTAGAGCCCTTCCCCT
AATAAAAAGTCAACTCAACAAAGAAGACACCTTGGAAATGAAAATAATCGCTCATAGTCCCAAATCAG
ATTCCAAGTTTGCATCTTGCACTGTTTTTGTGAATGTGTCTTTCTCCTCTGAAGGAACACCCTTGGCA
GTGTTCGCCAGCAGCTTTTCAATCAGCCTGGTGGTCTCCTTTTTAGTGTTTCTGATACTCATCTGCAT
TCTAATTGTAATGATTTTAAGACATAAACAAAAAGACACAATAAACAATTATGAGGAGAAGAAAACCT
CATCTTTAGATGCGGACTTGAGAGTGACCCGGGATGCCAGTGTGCTCAAAGCCTTCCAGAAAACTGAC
GACTGCAGTAACGAGGTGGTCCCTGTGGATGCCACTCCGGAATGGTTGAGTTTAATAAGTATCATGGA
GAAGGATATTGTCAATCTGTACAGATACTCAAACTCCAGTGGCCACTGTTCTGTGGAAGGAGAAACTG
CAGAAGATAAGGAAATCCAGAGGATAAATGAGCATCCCTACAGAAAGTGCTCAGACTCAGCTCTGAGT
GACCACGAGTCCAGGGTGCCAGACTCGGGTATCCCGAGGGACTCAGACCAGCTCTCCTGCCTATCTGG
GGAAACTGATGTGATGGTGACTGCCGAAACAGCAGAAGCCAGCCAAACATTTGGGGAAGGAGATCAAG
GGGAAGGCTGCAGCACCACCTGTGCTCAAAATAATGTGTTACCCCAGACAGTTCAGAAGAGAGAGGCA
AAAGAGAGCATCCTGGCTGACGTTAGAAAAGAGTCTGTCTTTATTTCAGGTGATCAGGAAGTAAGGTG
TGCAGCTCTTTCAACTCAGACGACCTCTGATCATGATGGAAAAGACAACTATCACTGGAATTATCTTC
TTAGTTGGGAGCCCAAATTCCAACCTCTTGCCTCAGTATTTAATGATATTGCAAAACTAAAGGATGAA
CATTTGCATATGCCTGGCATTCCAAAAGAGAAGAAATCTTTTGTTTTTCCACCCCCTTTGATAACAGC
AGTAGCCCAGCCTGGGATTAAAGCAGTCCCACCAAGAATGCCGGCAGTAAACCTGGGGCAGGTGCCTC
CGAAACACCCACGCTCTCCCATCCCCTACCATCTTGGTTCTCTGCCAGAAGGCATGACTCCCAATTTT
TCTCCATCTCTTTCCCTATTGACGATGCAGCCTCCTGCCTTGTCTCCACTGTTGAGAGAAGGAGAATT
ATTAGGAACACACATCAGTGGTACATGCCATGAACTTAAAGCAGAAGATGAAGTTCAAATATGAAACC
ACTGGGATGCCAAGTACCTGCTCACCATTGGTCATGAATGAATGAACAAAATGTTTTCAAGCCGGCAA
CTCGAGATTGGGCTCATTTTTATCTAAAAGCAAGTGATGTAATTTAGTTAGAGTTTTTAAAACTTCCC
CATTAAAGTTTCTCCAATTTCAAAAAAAAAAAAAAAAAAAA

| | | | |
|---|---|---|---|
| NOV50a, CG58567-01 | SEQ ID NO: 1066 | 1063 aa | MW at 117200.4kD |
| Protein Sequence | | | |

LIVQATDKGMPRLSNTTVIKVQVTDINDNAPAFLPSEAVEITEVMTISEDSLPGVIVTHVSVHDVDLN
SAFIFSFAKESNPGTKFAIDQNTGVVVLVKTLDFEEMTEYELLIQISDSVHYTEGALVVRVLDVNDNP
PVFSQDFYQVTVPESIPVGYSVLTLSATDLESNENISYRILSSSKEFSIDPKNGTIFTISPVLLLDTI
STTRFLVEASDGGNPDPRALTLVEIGIEDMNNYAPEFTVKSYNLSLSEDALVGSTLVTFSNIDHDWTR
ENTYVEYSIISGNSQNNFHVETKFFHSEYPYKQVGYLVLLHSLDREASASHELVILASDSGCPPLSST
AVISIQVLDVNDNPPNFSSLSYHTHVKESTPLGSHITVVSANDRDTGSHAEIIYNIISGNEKGHFYLE
ENTGVLYLIKPLDYEKMTKFTLTVQASDAEKKHFSFAVVFVSVLDDNDHAPQFMFSSFSCIVPENLPI
SSTICSINALDFDAGPYGELTYSIVSPCFLTHGMSYDHDLFLIDPLTGDIHAKQILDYENGNKYCLTV
QAKDKGDATASLVVWVDIEGIDEFEPIFTQDQYFFTLPEKNKDRQLIGRVEASDADAGIDGVILYSLG
TSSPFFSVNRTNGNIYLIRALPLIKSQLNKEDTLEMKIIAHSPKSDSKFASCTVFVNVSFSSEGTPLA
VFASSFSISLVVSFLVFLILICILIVMILRHKQKDTINNYEEKKTSSLDADLRVTRDASVLKAFQKTD
DCSNEVVPVDATPEWLSLISIMEKDIVNLYRYSNSSGHCSVEGETAEDKEIQRINEHPYRKCSDSALS
DHESRVPDSGIPRDSDQLSCLSGETDVMVTAETAEASQTFGEGDQGEGCSTTCAQNNVLPQTVQKREA
KESILADVRKESVFISGDQEVRCAALSTQTTSDHDGKDNYHWNYLLSWEPKFQPLASVFNDIAKLKDE
HLHMPGIPKEKKSFVFPPPLITAVAQPGIKAVPPRMPAVNLGQVPPKHPRSPIPYHLGSLPEGMTPNF
SPSLSLLTMQPPALSPLLREGELLGTHISGTCHELKAEDEVQI

| | | |
|---|---|---|
| NOV50b, 220087646 | SEQ ID NO: 1067 | 3075 bp |
| DNA Sequence | ORF Start: at 1 | ORF Stop: end of sequence |

GGATCCGAAGTCATGACTATTTCAGAAGATTCTTTGCCTGGTGTAATTGTGACTCATGTGTCAGTTCA
TGATGTGGATTTGAATTCAGCTTTCATATTCAGTTTTGCCAAAGAGAGTAATCCTGGAACCAAGTTTG
CTATTGATCAGAACACTGGAGTGGTGGTGTTGGTGAAAACATTGGATTTTGAAGAAATGACTGAATAT
GAGCTGCTCATCCAAATTTCTGATTCAGTGCACTACACAGAGGGAGCACTTGTAGTCCGTGTGCTGGA
TGTCAATGATAATCCACCAGTGTTTTCTCAAGATTTCTATCAGGTCACAGTTCCTGAATCAATACCTG
TGGGGTATTCAGTGCTGACTCTGTCAGCCACAGACTTAGAAAGCAATGAGAACATTTCTTACAGAATT
CTATCCTCTTCTAAGGAATTCTCCATTGATCCTAAGAATGGCACAATATTTACTATCAGTCCCGTATT
ACTTCTGGATACAATATCAACAACTCAATTTCTTGTGGAAGCCAGTGATGGTGGAAATCCTGACCTGA
GAGCTCTTACTTTAGTGGAGATAGGAATAGAAGATATGAACAATTATGCCCCTGAATTCACAGTCAAA
TCCTATAATCTTAGCCTAAGTGAGGATGCTCTGGTTGGAAGCACGCTTGTTACATTTTCAAACATCGA
CCATGACTGGACCCGTGAAAACACATATGTTGAATATTCCATCATCAGTGGTAATTCACAGAACAATT
TTCATGTGGAAACTAAGTTCTTTCATTCAGAATATCCTTATAAGCAGGTCGGTTATCTTGTGTTGCTT
CACAGTCTGGACAGAGAAGCAAGTGCTAGCCATGAGCTTGTCATTCTGGCATCTGACAGTGGCTGCCC
TCCATTGAGTTCCACAGCTGTCATATCAATACAAGTACTTGATGTCAATGACAATCCCCCAAACTTCA
GCAGCCTGAGCTATCACACCCATGTCAAGGAAAGCACCCCTCTAGGGAGTCACATCACTGTGGTCTCA
GCAAATGACCGTGACACAGGGTCACATGCAGAAATCATCTACAACATCATCTCTGGAAATGAGAAGGG
ACATTTTTACTTAGAAGAAAACACTGGAGTTCTTTATTTGATTAAACCTCTGGATTATGAAAAAATGA
CAAAATTCACCTTAACTGTCCAAGCTTCAGATGCAGAAAAGAAACATTTTTCTTTTGCAGTTGTGTTT
GTCAGTGTCCTGGATGATAACGACCATGCACCTCAGTTTATGTTCTCAAGCTTCAGCTGTATTGTTCC
AGAAAATCTGCCTATTTCCTCTACCATACGCTCTATAAATGCTCTGGATTTTGATGCTGGTCCGTATG
GAGAATTGACCTATTCTATTGTATCACCCTGTTTTCTCACTCATGGAATGTCTTATGATCATGATCTC
TTCCTCATTGACCCTTTGACAGGGGATATTCATGCTAAGCAAATCCTTGACTATGAAAATGGCAATAA
ATACTGCCTCACAGTCCAAGCCAAAGACAAAGGTGATGCAACTGCCTCCTTAGTGGTCTGGGTGGATA
TTGAAGGGATAGATGAATTTGAGCCCATTTTCACTCAAGATCAGTATTTTTTCACCCTCCCAGAAAAG
AATAAAGACAGACAGTTGATTGGCAGAGTGGAAGCCTCAGATGCAGATGCTGGTATTGATGGAGTCAT
TCTTTACTCCCTTGGAACCTCATCTCCTTTCTTTTCAGTAAATAAAACCAATGGAAATATTTATTTGA
TTAGAGCCCTTCCCCTAATAAAAAGTCAACTCAACAAAGAAGACACCTTGGAAATGAAAATAATCGCT
CATAGTCCCAAATCAGATTCCAAGTTTGCATCTTGCACTGTTTTTGTGAATGTGTCTTTCTCCTCTGA
AGGAACACCCTTGGCAGTGTTCGCCAGCAGCTTTTCAATCAGCCTGGTGGTCTCCTTTTTAGTGTTTC
TGATACTCATCTGCATTCTAATTGTAATGATTTTAAGACATAAACAAAAAGACACAATAAACAATTAT
GAGGAGAAGAAAACCTCATCTTTAGATGCGGACTTGAGAGTGACCCGGGATGCCAGTGTGCTCAAAGC
CTTCCAGAAAACTGACGACTGCAGTAACGAGGTGGTCCCTGTGGATGCCACTCCGGAATGGTTGAGTT
TAATAAGTATCATGGAGAAGGATATTGTCAATCTGTACAGACACTCAAACTCCAGTGGCCACTGTTCT
GTGGAAGGAGAAACTGCAGAAGATAAGGAAATCCAGAGGATAAATGAGCATCCCTACAGAAAGTGCTC
AGACTCAGCTCTGAGTGACCACGAGTCCAGGGTGCCAGACTCGGGTATCCCGAGGGACTCAGACCAGC
TCTCCTGCCTATCTGGGGAAACTGATGTGATGGTGACTGCCGAAACAGCAGAAGCCAGCCAAACATTT
GGGGAAGGAGATCAAGGGGAAGGCTGCAGCACCACCTGTGCTCAAAATAATGTGTTACCCCAGACAGT
TCAGAAGAGAGAGGCAAAAGAGAGCATCCTGGCTGATGTTAGAAAAGAGTCTGTCTTTATTTCAGGTG
ATCAGGAAGTAAGGTGTGCAGCTCTTTCAACTCAGACGACCTCTGATCATGATGGAAAGGACAACTAT
CACTGGAATTATCTTCTTAGTTGGGAGCCCAAATTCCAACCTCTTGCCTCAGTATTTAATGATATTGC
AAAACTAAAGGATGAACATTTGCATATGCCTGGCATTCCAAAAGAGAAGAAATCTTTTGTTTTTCCAC
CCCCTTTGATAACAGCAGTAGCCCAGCCTGGGATTAAAGCAGTCCCACCAAGAATGCCGGCAGTAAAC
CTGGGGCAGGTGCCTCCGAAACACCCACGCTCTCCCATCCCCTACCATCTTGGTTCTCTGCCAGAAGG
CATGACTCCCAATTTTTCTCCATCTCTTTCCCTATTGACGATGCAGCCTCCTGCCTTGTCTCCACTGT
TGAGAGAAGGAGAATTATTAGGAACACACATCAGTGGTACATGCCATGAACTTAAAGCAGAAGATGAA
GTTCAAATAGTCGAC

| | | | |
|---|---|---|---|
| NOV50b, 220087646 | SEQ ID NO: 1068 | 1025 aa | MW at 113052.6kD |
| Protein Sequence | | | |

GSEVMTISEDSLPGVIVTHVSVHDVDLNSAFIFSFAKESNPGTKFAIDQNTGVVVLVKTLDFEEMTEY
ELLIQISDSVHYTEGALVVRVLDVNDNPPVFSQDFYQVTVPESIPVGYSVLTLSATDLESNENISYRI
LSSSKEFSIDPKNGTIFTISPVLLLDTISTTQFLVEASDGGNPDLRALTLVEIGIEDMNNYAPEFTVK
SYNLSLSEDALVGSTLVTFSNIDHDWTRENTYVEYSIISGNSQNNFHVETKFFHSEYPYKQVGYLVLL
HSLDREASASHELVILASDSGCPPLSSTAVISIQVLDVNDNPPNFSSLSYHTHVKESTPLGSHITVVS
ANDRDTGSHAEIIYNIISGNEKGHFYLEENTGVLYLIKPLDYEKMTKFTLTVQASDAEKKHFSFAVVF
VSVLDDNDHAPQFMFSSFSCIVPENLPISSTIRSINALDFDAGPYGELTYSIVSPCFLTHGMSYDHDL
FLIDPLTGDIHAKQILDYENGNKYCLTVQAKDKGDATASLVVWVDIEGIDEFEPIFTQDQYFFTLPEK
NKDRQLIGRVEASDADAGIDGVILYSLGTSSPFFSVNKTNGNIYLIRALPLIKSQLNKEDTLEMKIIA
HSPKSDSKFASCTVFVNVSFSSEGTPLAVFASSFSISLVVSFLVFLILICILIVMILRHKQKDTINNY
EEKKTSSLDADLRVTRDASVLKAFQKTDDCSNEVVPVDATPEWLSLISIMEKDIVNLYRHSNSSGHCS
VEGETAEDKEIQRINEHPYRKCSDSALSDHESRVPDSGIPRDSDQLSCLSGETDVMVTAETAEASQTF
GEGDQGEGCSTTCAQNNVLPQTVQKREAKESILADVRKESVFISGDQEVRCAALSTQTTSDHDGKDNY
HWNYLLSWEPKFQPLASVFNDIAKLKDEHLHMPGIPKEKKSFVFPPPLITAVAQPGIKAVPPRMPAVN
LGQVPPKHPRSPIPYHLGSLPEGMTPNFSPSLSLLTMQPPALSPLLREGELLGTHISGTCHELKAEDE
VQIVD

| | | |
|---|---|---|
| NOV50c, 194877960 | SEQ ID NO: 1069 | 3075 bp |
| DNA Sequence | ORF Start: at 1 | ORF Stop: end of sequence j |

GGATCCGAAGTCATGACTATTTCAGAAGATTCTTTGCCTGGTGTAATTGTGACTCATGTGTCAGTTCA
TGATGTGGATTTGAATTCAGCTTTCATATTCAGTTTTGCCAAAGAGAGTAATCCTGGAACCAAGTTTG
CTATTGATCAGAACACTGGAGTGGTGGTGTTGGTGAAAACATTGGATTTTGAAGAAATGACTGAATAT
GAGCTGCTCATCCAAATTTCTGATTCAGTGCACTACACAGAGGGAGCACTTGTAGTCCGTGTAATGGA
TGTCAATGATAATCCACCAGTGTTTTCTCAAGATTTCTATCAGGTCACAGTTCCTGAATCAATACCTG
TGGGGTATTCAGTGCTGACTCTGTCAGCCACAGACTTAGAAAGCAATGAGAACATTTCTTACAGAATT
CTATCCTCTTCTAAGGAATTCTCCATTGATCCTAAGAATGGCACAATATTTACTATCAGCCCCGTATT
ACTTCTGGATACAATATCAACAACTCAATTTCTTGTGGAAGCCAGTGATGGTGGAAATCCCGACCTGA
GAGCTCTTACTTTAGTGGAGATAGGAATAGAAGATATGAACAATTATGCCCCTGAATTCACAGTCAAA
TCCTATAATCTTAGCCTAAGTGAGGATGCTCTGGTTGGAAGCACGCTTGTTACATTTTCAAACATCGA
CCATGACTGGACCCGTGAAAACACATATGTTGAATATTCCATCATCAGTGGTAATTCACAGAACAATT
TTCATGTGGAAACTAAGTTCTTTCATTCAGAATATCCTTATAAGCAAGTCGGTTATCTTGTGTTGCTT
CACAGTCTGGACAGAGAAGCAAGTGCTAGCCATGAGCTTGTCATTCTGGCATCTGACAGTGGCTGCCC
TCCATTGAGTTCCACAGCTGTCATATCAATACAAGTACTTGATGTCAATGACAATCCCCCAAACTTCA
GCAGCCTGAGCTATCACACCCATGTCAAGGAAAGCACCCCTCTAGGGAGTCACATCACTGTGGTCTCA
GCAAATGACCGTGACACAGGGTCACATGCAGAAATCATCTACAACATCATCTCTGGAAATGAGAAGGG
ACATTTTTACTTAGAAGAAAACACTGGAGTTCTTTATTTGATTAAACCTCTGGATTATGAAAAAATGA
CAAAATTCACCTTAACTGTCCAAGCTTCAGATGCAGAAAAGAAACATTTTTCTTTTGCAGTTGTGTTT
GTCAGTGTCCTGGATGATAACGACCATGCACCTCAGTTTATGTTCTCAAGCTTCAGCTGTATTGTTCC
AGAAAATCTGCCTATTTCCTCTACCATATGCTCTATAAATGCTCTGGATTTTGATGCTGGTCCGTATG
GAGAATTGACCTATTCTATTGTATCACCCTGTTTTCTCACTCATGGAATGTCTTATGATCATGATCTC
TTCCTCATTGACCCTTTGACAGGGGATATTCATGCTAAGCAAATCCTTGACTATGAAAATGGCAATAA
ATACTGCCTCACAGTCCAAGCCAAAGACAAAGGTGATGCAACTGCCTCCTTAGTGGTCTGGGTGGATA
TTGAAGGGATAGATGAATTTGAGCCCATTTTCACTCAAGATCAGTATTTTTTCACCCTCCCAGAAAAG
AATAAAGACAGACAGTTGATTGGCAGAGTGGAAGCCTCAGATGCAGATGCTGGTATTGATGGAGTCAT
TCTTTACTCCCTTGGAACCTCATCTCCTTTCTTTTCAGTAAATAAAACCAATGGAAATATTTATTTGA
TTAGAGCCCTTCCCCTAATAAAAAGTCAACTCAACAAAGAAGACACCTTGGAAATGAAAATAATCGCT
CATAGTCCCAAATCAGATTCCAAGTTTGCATCTTGCACTGTTTTTGTGAATGTGTCTTTCTCCTCTGA
AGGAACACCCTTGGCAGTGTTCGCCAGCAGCTTTTCAATCAGCCTGGTGGTCTCCTTTTTAGTGTTTC
TGATACTCATCTGCATTCTAATTGTAATGATTTTAAGACATAAACAAAAAGACACAATAAACAATTAT
GAGGAGAAGAAAACCTCATCTTTAGATGCGGACTTGAGAGTGACCCGGGATGCCAGTGTGCTCAkAGC
CTTCCAGAAAACTGACGACTGCAGTAACGAGGTGGTCCCTGTGGATGCCACTCCGGAATGGTTGAGTT
TAATAAGTATCATGGAGAAGGATATTGTCAATCTGTACAGACACTCAAACTCCAGTGGCCACTGTTCT
GTGGAAGGAGAAACTGCAGAAGATAAGGAAATCCAGAGGATAAATGAGCATCCCTACAGAAAGTGCTC
AGACTCAGCTCTGAGTGACCACGAGTCCAGGGTGCCAGACTCGGGTATCCCGAGGGACTCAGACCAGC
TCTCCTGCCTATCTGGGGAAACTGATGTGATGGTGACTGCCGAAACAGCAGAAGCCAGCCAAACATTT
GGGGAAGGAGATCAAGGGGAAGGCTGCAGCACCACCTGTGCTCAAAATAATGTGTTACCCCAGACAGT
TCAGAAGAGAGAGGCAAAAGAGAGCATCCTGGCTGATGTTAGAAAAGAGTCTGTCTTTATTTCAGGTG
ATCAGGAAGTAAGGTGTGCAGCTCTTTCAACTCAGACGACCTCTGATCATGATGGAAAAGACAACTAT
CACTGGAATTATCTTCTTAGTTGGGAGCCCAAATTCCAACCTCTTGCCTCAGTATTTAATGATATTGC
AAAACTAAAGGATGAACATTTGCATATGCCTGGCATTCCAAAAGAGAAGAAATCTTTTGTTTTTCCAC
CCCCTTTGATAACAGCAGTAGCCCAGCCTGGGATTAAAGCAGTCCCACCAAGAATGCCGGCAGTAAAC
CTGGGGCAGGTGCCTCCGAAACACCCACGCTCTCCCATCCCCTACCATCTTGGTTCTCTGCCAGAAGG
CATGACTCCCAATTTTTCTCCATCTCTTTCCCTATTGACGATGCAGCCTCCTGCCTTGTCTCCACTGT
TGAGAGAAGGAGAATTATTAGGAACACACATCAGTGGTACATGCCATGAACTTAAAGCAGAAGATGAA
GTTCAAATAGTCGAC

| | | | |
|---|---|---|---|
| NOV50c, 194877960 | SEQ ID NO: 1070 | 1025 aa | MW at 112999.6kD |
| Protein Sequence | | | |

GSEVMTTSEDSLPGVTVTHVSVHDVDLNSAFIFSFAKESNPGTKFAIDQNTGVVVLVKTLDFEEMTEY
ELLIQISDSVHYTEGALVVRVLDVNDNPPVFSQDFYQVTVPESIPVGYSVLTLSATDLESNENISYRI
LSSSKEFSIDPKNGTIFTISPVLLLDTISTTQFLVEASDGGNPDLRALTLVEIGIEDMNNYAPEFTVK
SYNLSLSEDALVGSTLVTFSNIDHDWTRENTYVEYSIISGNSQNNFHVETKFFHSEYPYKQVGYLVLL
HSLDREASASHELVILASDSGCPPLSSTAVISIQVLDVNDNPPNFSSLSYHTHVKESTPLGSHITVVS
ANDRDTGSHAEIIYNIISGNEKGHFYLEENTGVLYLIKPLDYEKMTKFTLTVQASDAEKKHFSFAVVF
VSVLDDNDHAPQFMFSSFSCIVPENLPISSTICSINALDFDAGPYGELTYSIVSPCFLTHGMSYDHDL
FLIDPLTGDIHAXQILDYENGNKYCLTVQAKDKGDATASLVVWVDIEGIDEFEPIFTQDQYFFTLPEK
NKDRQLIGRVEASDADAGIDGVILYSLGTSSPFFSVNKTNGNIYLIRALPLIKSQLNKEDTLEMKIIA
HSPKSDSKFASCTVFVNVSFSSEGTPLAVFASSFSISLVVSFLVFLILICILIVMILRHKQKDTINNY
EEKKTSSLDADLRVTRDASVLKAFQKTDDCSNEVVPVDATPEWLSLISIMEKDIVNLYRHSNSSGHCS
VEGETAEDKEIQRINEHPYRKCSDSALSDHESRVPDSGIPRDSDQLSCLSGETDVMVTAETAEASQTF
GEGDQGEGCSTTCAQNNVLPQTVQKREAKESILADVRKESVFISGDQEVRCAALSTQTTSDHDGKDNY
HWNYLLSWEPKFQPLASVFNDIAKLKDEHLHMPGIPKEKKSFVFPPPLITAVAQPGIKAVPPRNPAVN
LGQVPPKHPRSPIPYHLGSLPEGMTPNFSPSLSLLTMQPPALSPLLREGELLGTHISGTCHELKAEDE
VQIVD

| | | |
|---|---|---|
| NOV50d, 192589297 | SEQ ID NO: 1071 | 1899 bp |
| DNA Sequence | ORF Start: at 1 | ORF Stop: end of sequence |

GGATCCGAAGTCATGACTATTTCAGAAGATTCTTTGCCTGGTGTAATTGTGACTCATGTGTCAGTTCA
TGATGTGGATTTGAATTCAGCTTTCATATTCAGTTTTGCCAAAGAGAGTAATCCTGGAACCAAGTTTG
CTATTGATCAGAACACTGGAGTGGTGGTGTTGGTGAAAACATTGGATTTTGAAGAAATGACTGAATAT
GAGCTGCTCATCCAAATTTCTGATTCAGTGCACTACACAGAGGGAGCACTTGTAGTCCGTGTGCTGGA
TGTCAATGATAATCCACCAGTGTTTTCTCAAGATTTCTATCAGGTCACAGTTCCTGAATCAATACCTG
TGGGGTATTCAGTGCTGACTCTGTCAGCCACAGACTTAGAAAGCAATGAGAACATTTCTTACAGAATT
CTATCCTCTTCTAAGGAATTCTCCATTGATCCTAAGAATGGCACAATATTTACTATCAGTCCCGTATT
ACTTCTGGATACAATATCAACAACTCAATTTCTTGTGGAAGCCAGTGATGGTGGAAATCCTGACCTGA
GAGCTCTTACTTTAGTGGAGATAGGAATAGAAGATATGAACAATTATGCCCCTGAATTCACAGTCAAA
TCCTATAATCTTAGCCTAAGTGAGGATGCTCTGGTTGGAAGCACGCTTGTTACATTTTCAAACATCGA
CCATGACTGGACCCGTGAAAACACATATGTTGAATATTCCATCATCAGTGGTAATTCACAGAACAATT
TTCATGTGGAAACTAAGTTCTTTCATTCAGAATATCCTTATAAGCAAGTCGGTTATCTTGTGTTGCTT
CACAGTCTGGACAGAGAAGCAAGTGCTAGCCATGAGCTTGTCATTCTGGCATCTGACAGTGGCTGCCC
TCCATTGAGTTCCACAGCTGTCATATCAATACAAGTACTTGATGTCAATGACAATCCCCCAAACTTCA
GCAGCCTGAGCTATCACACCCATGTCAAGGAAAGCACCCCTCTAGGGAGTCACATCACTGTGGTCTCA
GCAAATGACCGTGACACAGGGTCACATGCAGAAATCATCTACAACATCATCTCTGGAAATGAGAAGGG
ACATTTTTACTTAGAAGAAAACACTGGAGTTCTTTATTTGATTAAACCTCTGGATTATGAAAAAATGA
CAAAATTCACCTTAACTGTCCAAGCTTCAGATGCAGAAAAGAAACATTTTTCTTTTGCAGTTGTGTTT
GTCAGTGTCCTGGATGATAACGACCATGCACCTCAGTTTATGTTCTCAAGCTTCAGCTGTATTGTTCC
AGAAAATCTGCCTATTTCCTCTACCATATGCTCTATAAATGCTCTGGATTTTGATGCTGGTCCGTATG
GAGAATTGACCTATTCTATTGTATCACCCTGTTTTCTCACTCATGGAATGTCTTATGATCATGATCTC
TTCCTCATTGACCCTTTGACAGGGGATATTCATGCTAAGCAAATCCTTGACTATGAAAATGGCAATAA
ATACTGCCTCACAGTCCAAGCCAAAGACAAAGGTGATGCAACTGCCTCCTTAGTGGTCTGGGTGGATA
TTGAAGGGATAGATGAATTTGAGCCCATTTTCACTCAAGATCAGTATTTTTTCACCCTCCCAGAAAAG
AATAAAGACAGACAGTTGATTGGCAGAGTGGAAGCCTCAGATGCAGATGCTGGTATTGATGGAGTCAT
TCTTTACTCCCTTGGAACCTCATCTCCTTTCTTTTCAGTAAATAAAACCAATGGAAATATTTATTTGA
TTAGAGCCCTTCCCCTAATAAAAAGTCAACTCAACAAAGAAGACACCTTGGAAATGAAAATAATCGCT
CATAGTCCCAAATCAGATTCCAAGTTTGCATCTTGCACTGTTTTTGTGAATGTGTCTGTCGAC

| | | | |
|---|---|---|---|
| NOV50d, 192589297 | SEQ ID NO: 1072 | 633 aa | MW at 69903.4kD |
| Protein Sequence | | | |

GSEVMTISEDSLPGVIVTHVSVHDVDLNSAFIFSFAKESNPGTKFAIDQNTGVVVLVKTLDFEEMTEY
ELLIQISDSVHYTEGALVVRVLDVNDNPPVFSQDFYQVTVPESIPVGYSVLTLSATDLESNENISYRI
LSSSKEFSIDPKNGTIFTISPVLLLDTISTTQFLVEASDGGNPDLRALTLVEIGIEDMNNYAPEFTVK
SYNLSLSEDALVGSTLVTFSNIDHDWTRENTYVEYSIISGNSQNNFHVETKFFHSEYPYKQVGYLVLL
HSLDREASASHELVILASDSGCPPLSSTAVISIQVLDVNDNPPNFSSLSYHTHVKESTPLGSHITVVS
ANDRDTGSHAEIIYNIISGNEKGHFYLEENTGVLYLIKPLDYEKMTKFTLTVQASDAEKKHFSFAVVF
VSVLDDNDHAPQFMFSSFSCIVPENLPISSTICSINALDFDAGPYGELTYSIVSPCFLTHGMSYDHDL
FLIDPLTGDIHAKQILDYENGNKYCLTVQAKDKGDATASLVVWVDIEGIDEFEPIFTQDQYFFTLPEK
NKDRQLIGRVEASDADAGIDGVILYSLGTSSPFFSVNKTNGNIYLIRALPLIKSQLNKEDTLEMKIIA
HSPKSDSKFASCTVFVNVSVD

| | | |
|---|---|---|
| NOV50e, CG58567-02 | SEQ ID NO: 1073 | 2956 bp |
| DNA Sequence | ORF Start: ATG at 57 | ORF Stop: TGA at 2934 |

CTATTGATCAGAACACTGGAGTGGTGGTGTTGGTGAAAACATTGGATTTTGAAGAAATGACTGAATAT
GAGCTGCTCATCCAAATTTCTGATTCAGTGCACTACACAGAGGGAGCACTTGTAGTCCGTGTGCTGGA
TGTCAATGATAATCCACCAGTGTTTTCTCAAGATTTCTATCAGGTCACAGTTCCTGAATCAATACCTG
TGGGGTATTCAGTGCTGACTCTGTCAGCCACAGACTTAGAAAGCAATGAGAACATTTCTTACAGAATT
CTATCCTCTTCTAAGGAATTCTCCATTGATCCTAAGAATGGCACAATATTTACTATCAGTCCCGTATT
ACTTCTGGATACAATATCAACAACTCAATTTCTTGTGGAAGCCAGTGATGGTGGAAATCCTGACCTGA
GAGCTCTTACTTTAGTGGAGATAGGAATAGAAGATATGAACAATTATGCCCCTGAATTCACAGTCAAA
TCCTATAATCTTAGCCTAAGTGAGGATGCTCTGGTTGGAAGCACGCTTGTTACATTTTCAAACATCGA
CCATGACTGGACCCGTGAAAACACATATGTTGAATATTCCATCATCAGTGGTAATTCACAGAACAATT
TTCATGTGGAAACTAAGTTCTTTCATTCAGAATATCCTTATAAGCAAGTCGGTTATCTTGTGTTGCTT
CACAGTCTGGACAGAGAAGCAAGTGCTAGCCATGAGCTTGTCATTCTGGCATCTGACAGTGGCTGCCC
TCCATTGAGTTCCACAGCTGTCATATCAATACAAGTACTTGATGTCAATGACAATCCCCCAAACTTCA
GCAGCCTGAGCTATCACACCCATGTCAAGGAAAGCACCCCTCTAGGGAGTCACATCACTGTGGTCTCA
GCAAATGACCGTGACACAGGGTCACATGCAGAAATCATCTACAACATCATCTCTGGAAATGAGAAGGG
ACATTTTTACTTAGAAGAAAACACTGGAGTTCTTTATTTGATTAAACCTCTGGATTATGAAAAAATGA
CAAAATTCACCTTAACTGTCCAAGCTTCAGATGCAGAAAAGAAACATTTTTCTTTTGCAGTTGTGTTT
GTCAGTGTCCTGGATGATAACGACCATGCACCTCAGTTTATGTTCTCAAGCTTCAGCTGTATTGTTCC
AGAAAATCTGCCTATTTCCTCTACCATATGCTCTATAAATGCTCTGGATTTTGATGCTGGTCCGTATG
GAGAATTGACCTATTCTATTGTATCACCCTGTTTTCTCACTCATGGAATGTCTTATGATCATGATCTC
TTCCTCATTGACCCTTTGACAGGGGATATTCATGCTAAGCAAATCCTTGACTATGAAAATGGCAATAA
ATACTGCCTCACAGTCCAAGCCAAAGACAAAGGTGATGCAACTGCCTCCTTAGTGGTCTGGGTGGATA
TTGAAGGGATAGATGAATTTGAGCCCATTTTCACTCAAGATCAGTATTTTTTCACCCTCCCAGAAAAG
AATAAAGACAGACAGTTGATTGGCAGAGTGGAAGCCTCAGATGCAGATGCTGGTATTGATGGAGTCAT
TCTTTACTCCCTTGGAACCTCATCTCCTTCCCTTTCAGTAAATAAAACCAATGGAAATATTTATTTGA
TTAGAGCCCTTCCCCTAATAAAAAGTCAACTCAACAAAGAAGACACCTTGGAAATGAAAATAATCGCT
CATAGTCCCAAATCAGATTCCAAGTTTGCATCTTGCACTGTTTTTGTGAATGTGTCTTTCTCCTCTGA
AGGAACACCCTTGGCAGTGTTCGCCAGCAGCTTTTCAATCAGCCTGGTGGTCTCCTTTTTAGTGTTTC
TGATACTCATCTGCATTCTAATTGTAATGATTTTAAGACATAAACAAAAAGACACAATAAACAATTAT
GAGGAGAAGAAAACCTCATCTTTAGATGCGGACTTGAGAGTGACCCGGGATGCCAGTGTGCTCAAAGC
CTTCCAGAAAACTGACGACTGCAGTAACGAGGTGGTCCCTGTGGATGCCACTCCGGAATGGTTGAGTT
TAATAAGTATCATGGAGAAGGATATTGTCAATCTGTACAGACACTCAAACTCCAGTGGCCACTGTTCT
GTGGAAGGAGAAACTGCAGAAGATAAGGAAATCCAGAGGATAAATGAGCATCCCTACAGAAAGTGCTC
AGACTCAGCTCTGAGTGACCACGAGTCCAGGGTGCCAGACTCGGGTATCCCGAGGGACTCAGACCAGC
TCTCCTGCCTATCTGGGGAAACTGATGTGATGGTGACTGCCGAAACAGCAGAAGCCAGCCAAACATTT
GGGGAAGGAGATCAAGGGGAAGGCTGCAGCACCACCTGTGCTCAAAATAATGTGTTACCCCAGACAGT
TCAGAAGAGAGAGGCAAAAGAGAGCATCCTGGCTGATGTTAGAAAAGAGTCTGTCTTTATTTCAGGTG
ATCAGGAAGTAAGGTGTGCAGCTCTTTCAACTCAGACGACCTCTGATCATGATGGAAAAGACAACTAT
CACTGGAATTATCTTCTTAGTTGGGAGCCCAAATTCCAACCTCTTGCCTCAGTATTTAATGATATTGC
AAAACTAAAGGATGAACATTTGCATATGCCTGGCATTCCAAAAGAGAAGAAATCTTTTGTTTTTCCAC
CCCCTTTGATAACAGCAGTAGCCCAGCCTGGGATTAAAGCAGTCCCACCAAGAATGCCGGCAGTAAAC
CTGGGGCAGGTGCCTCCGAAACACCCACGCTCTCCCATCCCCTACCATCTTGGTTCTCTGCCAGAAGG
CATGACTCCCAATTTTTCTCCATCTCTTTCCCTATTGACGATGCAGCCTCCTGCCTTGTCTCCACTGT
TGAGAGAAGGAGAATTATTAGGAACACACATCAGTGGTACATGCCATGAACTTAAAGCAGAAGATGAA
GTTCAAATATGAAACCACTGGGATGCCAAGTA

| | | | |
|---|---|---|---|
| NOV50e, CG58567-02 | SEQ ID NO: 1074 | 959 aa | MW at 105826.6kD |
| Protein Sequence | | | |

MTEYELLIQISDSVHYTEGALVVRVLDVNDNPPVFSQDFYQVTVPESIPVGYSVLTLSATDLESNENI
SYRILSSSKEFSIDPKNGTIFTISPVLLLDTISTTQFLVEASDGGNPDLRALTLVEIGIEDMNNYAPE
FTVKSYNLSLSEDALVGSTLVTFSNIDHDWTRENTYVEYSIISGNSQNNFHVETKFFHSEYPYKQVGY
LVLLHSLDREASASHELVILASDSGCPPLSSTAVISIQVLDVNDNPPNFSSLSYHTHVKESTPLGSHI
TVVSANDRDTGSHAEIIYNIISGNEKGHFYLEENTGVLYLIKPLDYEKMTKFTLTVQASDAEKKHFSF
AVVFVSVLDDNDHAPQFMFSSFSCIVPENLPISSTICSINALDFDAGPYGELTYSIVSPCFLTHGMSY
DHDLFLIDPLTGDIHAKQILDYENGNKYCLTVQAKDKGDATASLVVWVDIEGIDEFEPIFTQDQYFFT
LPEKNKDRQLIGRVEASDADAGIDGVILYSLGTSSPSLSVNKTNGNIYLIRALPLIKSQLNKEDTLEM
KIIAHSPKSDSKFASCTVFVNVSFSSEGTPLAVFASSFSISLVVSFLVFLILICILIVMILRHKQKDT
INNYEEKKTSSLDADLRVTRDASVLKAFQKTDDCSNEVVPVDATPEWLSLISIMEKDIVNLYRHSNSS
GHCSVEGETAEDKEIQRINEHPYRKCSDSALSDHESRVPDSGIPRDSDQLSCLSGETDVMVTAETAEA
SQTFGEGDQGEGCSTTCAQNNVLPQTVQKREAKESILADVRKESVFISGDQEVRCAALSTQTTSDHDG
KDNYHWNYLLSWEPKFQPLASVFNDIAKLKDEHLHMPGIPKEKKSFVFPPPLITAVAQPGIKAVPPRM
PAVNLGQVPPKHPRSPIPYHLGSLPEGMTPNFSPSLSLLTMQPPALSPLLREGELLGTHISGTCHELK
AEDEVQI

| | | |
|---|---|---|
| NOV50f, CG58567-03 | SEQ ID NO: 1075 | 3075 bp |
| DNA Sequence | ORF Start: at 7 | ORF Stop: at 3070 |

GGATCCGAAGTCATGACTATTTCAGAAGATTCTTTGCCTGGTGTAATTGTGACTCATGTGTCAGTTCA
TGATGTGGATTTGAATTCAGCTTTCATATTCAGTTTTGCCAAAGAGAGTAATCCTGGAACCAAGTTTG
CTATTGATCAGAACACTGGAGTGGTGGTGTTGGTGAAAACATTGGATTTTGAAGAAATGACTGAATAT
GAGCTGCTCATCCAAATTTCTGATTCAGTGCACTACACAGAGGGAGCACTTGTAGTCCGTGTGCTGGA
TGTCAATGATAATCCACCAGTGTTTTCTCAAGATTTCTATCAGGTCACAGTTCCTGAATCAATACCTG
TGGGGTATTCAGTGCTGACTCTGTCAGCCACAGACTTAGAAAGCAATGAGAACATTTCTTACAGAATT
CTATCCTCTTCTAAGGAATTCTCCATTGATCCTAAGAATGGCACAATATTTACTATCAGCCCCGTATT
ACTTCTGGATACAATATCAACAACTCAATTTCTTGTGGAAGCCAGTGATGGTGGAAATCCCGACCTGA
GAGCTCTTACTTTAGTGGAGATAGGAATAGAAGATATGAACAATTATGCCCCTGAATTCACAGTCAAA
TCCTATAATCTTAGCCTAAGTGAGGATGCTCTGGTTGGAAGCACGCTTGTTACATTTTCAAACATCGA
CCATGACTGGACCCGTGAAAACACATATGTTGAATATTCCATCATCAGTGGTAATTCACAGAACAATT
TTCATGTGGAAACTAAGTTCTTTCATTCAGAATATCCTTATAAGCAAGTCGGTTATCTTGTGTTGCTT
CACAGTCTGGACAGAGAAGCAAGTGCTAGCCATGAGCTTGTCATTCTGGCATCTGACAGTGGCTGCCC
TCCATTGAGTTCCACAGCTGTCATATCAATACAAGTACTTGATGTCAATGACAATCCCCCAAACTTCA
GCAGCCTGAGCTATCACACCCATGTCAAGGAAAGCACCCCTCTAGGGAGTCACATCACTGTGGTCTCA
GCAAATGACCGTGACACAGGGTCACATGCAGAAATCATCTACAACATCATCTCTGGAAATGAGAAGGG
ACATTTTTACTTAGAAGAAAACACTGGAGTTCTTTATTTGATTAAACCTCTGGATTATGAAAAAATGA
CAAAATTCACCTTAACTGTCCAAGCTTCAGATGCAGAAAAGAAACATTTTTCTTTTGCAGTTGTGTTT
GTCAGTGTCCTGGATGATAACGACCATGCACCTCAGTTTATGTTCTCAAGCTTCAGCTGTATTGTTCC
AGAAAATCTGCCTATTTCCTCTACCATATGCTCTATAAATGCTCTGGATTTTGATGCTGGTCCGTATG
GAGAATTGACCTATTCTATTGTATCACCCTGTTTTCTCACTCATGGAATGTCTTATGATCATGATCTC
TTCCTCATTGACCCTTTGACAGGGGATATTCATGCTAAGCAAATCCTTGACTATGAAAATGGCAATAA
ATACTGCCTCACAGTCCAAGCCAAAGACAAAGGTGATGCAACTGCCTCCTTAGTGGTCTGGGTGGATA
TTGAAGGGATAGATGAATTTGAGCCCATTTTCACTCAAGATCAGTATTTTTTCACCCTCCCAGAAAAG
AATAAAGACAGACAGTTGATTGGCAGAGTGGAAGCCTCAGATGCAGATGCTGGTATTGATGGAGTCAT
TCTTTACTCCCTTGGAACCTCATCTCCTTTCTTTTCAGTAAATAAAACCAATGGAAATATTTATTTGA
TTAGAGCCCTTCCCCTAATAAAAAGTCAACTCAACAAAGAAGACACCTTGGAAATGAAAATAATCGCT
CATAGTCCCAAATCAGATTCCAAGTTTGCATCTTGCACTGTTTTTGTGAATGTGTCTTTCTCCTCTGA
AGGAACACCCTTGGCAGTGTTCGCCAGCAGCTTTTCAATCAGCCTGGTGGTCTCCTTTTTAGTGTTTC
TGATACTCATCTGCATTCTAATTGTAATGATTTTAAGACATAAACAAAAAGACACAATAAACAATTAT
GAGGAGAAGAAAACCTCATCTTTAGATGCGGACTTGAGAGTGACCCGGGATGCCAGTGTGCTCAAAGC
CTTCCAGAAAACTGACGACTGCAGTAACGAGGTGGTCCCTGTGGATGCCACTCCGGAATGGTTGAGTT
TAATAAGTATCATGGAGAAGGATATTGTCAATCTGTACAGACACTCAAACTCCAGTGGCCACTGTTCT
GTGGAAGGAGAAACTGCAGAAGATAAGGAAATCCAGAGGATAAATGAGCATCCCTACAGAAAGTGCTC
AGACTCAGCTCTGAGTGACCACGAGTCCAGGGTGCCAGACTCGGGTATCCCGAGGGACTCAGACCAGC
TCTCCTGCCTATCTGGGGAAACTGATGTGATGGTGACTGCCGAAACAGCAGAAGCCAGCCAAACATTT
GGGGAAGGAGATCAAGGGGAAGGCTGCAGCACCACCTGTGCTCAAAATAATGTGTTACCCCAGACAGT
TCAGAAGAGAGAGGCAAAAGAGAGCATCCTGGCTGATGTTAGAAAAGAGTCTGTCTTTATTTCAGGTG
ATCAGGAAGTAAGGTGTGCAGCTCTTTCAACTCAGACGACCTCTGATCATGATGGAAAAGACAACTAT
CACTGGAATTATCTTCTTAGTTGGGAGCCCAAATTCCAACCTCTTGCCTCAGTATTTAATGATATTGC
AAAACTAAAGGATGAACATTTGCATATGCCTGGCATTCCAAAAGAGAAGAAATCTTTTGTTTTTCCAC
CCCCTTTGATAACAGCAGTAGCCCAGCCTGGGATTAAAGCAGTCCCACCAAGAATGCCGGCAGTAAAC
CTGGGGCAGGTGCCTCCGAAACACCCACGCTCTCCCATCCCCTACCATCTTGGTTCTCTGCCAGAAGG
CATGACTCCCAATTTTTCTCCATCTCTTTCCCTATTGACGATGCAGCCTCCTGCCTTGTCTCCACTGT
TGAGAGAAGGAGAATTATTAGGAACACACATCAGTGGTACATGCCATGAACTTAAAGCAGAAGATGAA
GTTCAAATAGTCGAC

| | | | |
|---|---|---|---|
| NOV50f, CG58567-03 | SEQ ID NO: 1076 | 1021 aa | MW at 112641.2kD |
| Protein Sequence | | | |

EVMTISEDSLPGVIVTHVSVHDVDLNSAFIFSFAKESNPGTKFAIDQNTGVVVLVKTLDFEEMTEYEL
LIQISDSVHYTEGALVVRVLDVNDNPPVFSQDFYQVTVPESIPVGYSVLTLSATDLESNENISYRILS
SSKEFSIDPKNGTIFTISPVLLLDTISTTQFLVEASDGGNPDLRALTLVEIGIEDMNNYAPEFTVKSY
NLSLSEDALVGSTLVTFSNIDHDWTRENTYVEYSIISGNSQNNFHVETKFFHSEYPYKQVGYLVLLHS
LDREASASHELVILASDSGCPPLSSTAVISIQVLDVNDNPPNFSSLSYHTHVKESTPLGSHITVVSAN
DRDTGSHAEIIYNIISGNEKGHFYLEENTGVLYLIKPLDYEKMTKFTLTVQASDAEKKHFSFAVVFVS
VLDDNDHAPQFMFSSFSCIVPENLPISSTICSINALDFDAGPYGELTYSIVSPCFLTHGMSYDHDLFL
IDPLTGDIHAKQILDYENGNKYCLTVQAKDKGDATASLVVWVDIEGIDEFEPIFTQDQYFFTLPEKNK
DRQLIGRVEASDADAGIDGVILYSLGTSSPFFSVNKTNGNIYLIRALPLIKSQLNKEDTLEMKIIAHS
PKSDSKFASCTVFVNVSFSSEGTPLAVFASSFSISLVVSFLVFLILICILIVMILRHKQKDTINNYEE
KKTSSLDADLRVTRDASVLKAFQKTDDCSNEVVPVDATPEWLSLISIMEKDIVNLYRHSNSSGHCSVE
GETAEDKEIQRINEHPYRKCSDSALSDHESRVPDSGIPRDSDQLSCLSGETDVMVTAETAEASQTFGE
GDQGEGCSTTCAQNNVLPQTVQKREAKESILADVRKESVFISGDQEVRCAALSTQTTSDHDGKDNYHW
NYLLSWEPKFQPLASVFNDIAKLKDEHLHMPGIPKEKKSFVFPPPLITAVAQPGIKAVPPRMPAVNLG
QVPPKHPRSPIPYHLGSLPEGMTPNFSPSLSLLTMQPPALSPLLREGELLGTHISGTCHELKAEDEVQ
I

| | | |
|---|---|---|
| NOV50g, CG58567-04 | SEQ ID NO: 1077 | 1899 bp |
| DNA Sequence | ORF Start: at 1 | ORF Stop: end of sequence |

GGATCCGAAGTCATGACTATTTCAGAAGATTCTTTGCCTGGTGTAATTGTGACTCATGTGTCAGTTCA
TGATGTGGATTTGAATTCAGCTTTCATATTCAGTTTTGCCAAAGAGAGTAATCCTGGAACCAAGTTTG
CTATTGATCAGAACACTGGAGTGGTGGTGTTGGTGAAAACATTGGATTTTGAAGAAATGACTGAATAT
GAGCTGCTCATCCAAATTTCTGATTCAGTGCACTACACAGAGGGAGCACTTGTAGTCCGTGTGCTGGA
TGTCAATGATAATCCACCAGTGTTTTCTCAAGATTTCTATCAGGTCACAGTTCCTGAATCAATACCTG
TGGGGTATTCAGTGCTGACTCTGTCAGCCACAGACTTAGAAAGCAATGAGAACATTTCTTACAGAATT
CTATCCTCTTCTAAGGAATTCTCCATTGATCCTAAGAATGGCACAATATTTACTATCAGTCCCGTATT
ACTTCTGGATACAATATCAACAACTCAATTTCTTGTGGAAGCCAGTGATGGTGGAAATCCTGACCTGA
GAGCTCTTACTTTAGTGGAGATAGGAATAGAAGATATGAACAATTATGCCCCTGAATTCACAGTCAAA
TCCTATAATCTTAGCCTAAGTGAGGATGCTCTGGTTGGAAGCACGCTTGTTACATTTTCAAACATCGA
CCATGACTGGACCCGTGAAAACACATATGTTGAATATTCCATCATCAGTGGTAATTCACAGAACAATT
TTCATGTGGAAACTAAGTTCTTTCATTCAGAATATCCTTATAAGCAAGTCGGTTATCTTGTGTTGCTT
CACAGTCTGGACAGAGAAGCAAGTGCTAGCCATGAGCTTGTCATTCTGGCATCTGACAGTGGCTGCCC
TCCATTGAGTTCCACAGCTGTCATATCAATACAAGTACTTGATGTCAATGACAATCCCCCAAACTTCA
GCAGCCTGAGCTATCACACCCATGTCAAGGAAAGCACCCCTCTAGGGAGTCACATCACTGTGGTCTCA
GCAAATGACCGTGACACAGGGTCACATGCAGAAATCATCTACAACATCATCTCTGGAAATGAGAAGGG
ACATTTTTACTTAGAAGAAAACACTGGAGTTCTTTATTTGATTAAACCTCTGGATTATGAAAAAATGA
CAAAATTCACCTTAACTGTCCAAGCTTCAGATGCAGAAAAGAAACATTTTTCTTTTGCAGTTGTGTTT
GTCAGTGTCCTGGATGATAACGACCATGCACCTCAGTTTATGTTCTCAAGCTTCAGCTGTATTGTTCC
AGAAAATCTGCCTATTTCCTCTACCATATGCTCTATAAATGCTCTGGATTTTGATGCTGGTCCGTATG
GAGAATTGACCTATTCTATTGTATCACCCTGTTTTCTCACTCATGGAATGTCTTATGATCATGATCTC
TTCCTCATTGACCCTTTGACAGGGGATATTCATGCTAAGCAAATCCTTGACTATGAAAATGGCAATAA
ATACTGCCTCACAGTCCAAGCCAAAGACAAAGGTGATGCAACTGCCTCCTTAGTGGTCTGGGTGGATA
TTGAAGGGATAGATGAATTTGAGCCCATTTTCACTCAAGATCAGTATTTTTTCACCCTCCCAGAAAAG
AATAAAGACAGACAGTTGATTGGCAGAGTGGAAGCCTCAGATGCAGATGCTGGTATTGATGGAGTCAT
TCTTTACTCCCTTGGAACCTCATCTCCTTTCTTTTCAGTAAATAAAACCAATGGAAATATTTATTTGA
TTAGAGCCCTTCCCCTAATAAAAAGTCAACTCAACAAAGAAGACACCTTGGAAATGAAAATAATCGCT
CATAGTCCCAAATCAGATTCCAAGTTTGCATCTTGCACTGTTTTTGTGAATGTGTCTGTCGAC

| | | | |
|---|---|---|---|
| NOV50g, CG58567-04 | SEQ ID NO: 1078 | 633 aa | MW at 69903.4kD |
| Protein Sequence | | | |

GSEVMTISEDSLPGVIVTHVSVHDVDLNSAFIFSFAKESNPGTKFAIDQNTGVVVLVKTLDFEEMTEY
ELLIQISDSVHYTEGALVVRVLDVNDNPPVFSQDFYQVTVPESIPVGYSVLTLSATDLESNENISYRI
LSSSKEFSIDPKNGTIFTISPVLLLDTISTTQFLVEASDGGNPDLPALTLVEIGIEDMNNYAPEFTVK
SYNLSLSEDALVGSTLVTFSNIDHDWTRENTYVEYSIISGNSQNNFHVETKFFHSEYPYKQVGYLVLL
HSLDREASASHELVILASDSGCPPLSSTAVISIQVLDVNDNPPNFSSLSYHTHVKESTPLGSHITVVS
ANDRDTGSHAEIIYNIISGNEKGHFYLEENTGVLYLIKPLDYEKMTKFTLTVQASDAEKKHFSFAVVF
VSVLDDNDHAPQFMFSSFSCIVPENLPISSTICSINALDFDAGPYGELTYSIVSPCFLTHGMSYDHDL
FLIDPLTGDIHAKQILDYENGNKYCLTVQAKDKGDATASLVVWVDIEGIDEFEPIFTQDQYFFTLPEK
NKDRQLIGRVEASDADAGIDGVILYSLGTSSPFFSVNKTNGNIYLIRALPLIKSQLNKEDTLEMKIIA
HSPKSDSKFASCTVFVNVSVD

| | | |
|---|---|---|
| NOV50h, CG58567-05 | SEQ ID NO: 1079 | 9193 bp |
| DNA Sequence | ORF Start: ATG at 1 | ORF Stop: TGA at 9010 |

ATGGAGAAATGTGGGCTTAAAGAGGAAGGCAGTTACGCGGACATAGATCCAGTTGCCCACGATCCGGA
CGCCGGACTGTTCAGCACTCAGGGCTACACCCTGGTGCAACCGTCCGACCTGCCCAAGGACCCCGCAG
GCCCGTTCTTCCAGTTGCGCTACCGGACTCCGGGGCCACTACCGTCACCGCTTTTGCCAGGCTCCTCG
TCACCCCTGGAGCCTCTAGATCTGGTGCTGCTGCGGCGCTTGGACCGAGAGGAGGCGGCGGCGCACCG
GCTGCAGATCGAGGCATGGGACGGCGGCCGACCCCGGCGCACCGGCCTCCTGAGCGTGGAGCTGCGCG
TGCTGGATGAGAACGACAACCCGCCGGTCTTTGAGCAGGACGAGTACCGCGCCGCGGTGCGCGAGGAC
GCCCAGCCGGGCGCCGAGGTCTGTCGCGTGCGCGCCACCGACCGCGACCTGGGGCCCAATGGCTTCGT
GCGCTACAGCGTCCGCGCCCGGCAAGTGCCTGGGGCGGGTAGCGGCGGCGGGGCACTGGGCGACGCGG
CCTACTTCGCGGTGGAGGAGCTGAGCGGCGTGGTGCGAGTGTGGAGACCTCTGGACCGCGAGGCACAG
GCCTGGCACCAGTTGGTGGTGGAGGCCCGCGATGGAGGCGCCGAGCCTGAGGTTGCCACGGTGCGCGT
GTCCATCGCCGTGCTGGACGTGAATGACAACCGGCCAGCAATTCACGTGCTCTTTCTCACAGAGGGAG
GCGTCGCCCGTGTCTCTGAAGGCGCCCGACCGGGCGACTACGTGGCTCGCGTCTCGGTGTCTGACGCG
GACGGGGTAATAGGCAAAATTACAGCTATTGACATGGACTCTGGAAAGAATGGACAGCTATTATATTT
CCTTTTGTCTGATGGAAAATTCTTCAAGATGAATCCTAATACAGGAGAGTTAATCAATTGGGTGGCAC
TGGATCGTGAGCACCGGGGGCACCATGAGATGACTGTGCTAGTGACAGACCGCGGCTCCCCACCACGA
AACGCCACCATGGCGGTTTACGTCTCAGTTACTGACATCAATGATAACAGGCCCTTCTTCCCCCAGTG
TCTCCCTGGAAAGGAGTTACACGTGAAGGTTCTGGAAGGTCAACCAGTAAATATGTTGGTTACAACTG
TGTTTGCAAAGGATCCTGATGAAGGAAATAATGCAGAAGTTACATACTCAGTATCTTCAGAAGATAGT
TCTGATCACTTTAAGATTGACGCCAACAATGGTGAAATAAGAACAACCACAATACTTTCGTATGATTA
TAGACCTTCCTACAGAATGAGTGTCATTGCCACTGACCAGGGAGTGCCTCCTCTTCAAGGACAGGCAG
TTGTTAATATTCAGGAACTTGATTATGAGACGACATCTCATTATCTTTTCAGAGTGATTACTACAGAC
CATAGCAAAAACCTTTCCCTGAGTAGCACAGTCTTCCTTAGTATCGATGTGGAAGATCAGAATGACCA
TTCCCCATCTTTCCAGGATGAGCTCATTGTGATCAGTGTAGAGGAGAATGTTCCCATAGGAACCCTGG
TGTATGTCTTCAATGCCAAAGATGATGACGGCAGTTTTTTGAACAGTAGAATACAATACTACATTGAA
TCCCACAACCCTGGCACGAATCCATTTCTCATCCACCCCTCATTTGGCACACTAGTCACTGTGTCCCG
TCTTGACAGAGAAAGCATTCCAACTGTCATCCTGACAGTAACAGCATCTGATCAGGCTGTGAATGTGA
CAGACCGGCGACTGAGATCACTGACAGCACAAATAGTGATTTTGGATGTAAATGACCACAACCCCACT
TTTATTTCTTTCCCCAATGCCCATGTCAAAGAGGATGTCACAGTGGGCTCCTTGGTCCACCACATAAC
TGCTCACGATCCAGACGAAGGAAGGAATGGAAAAGTAACATACAGCATCCTCTCAGGAAATGAAAACA
TGACGTTTATGCTAGATGAGTCATCAGGCTTACTAACCACAACCTGTCCTTTGGATTATGAAATGAAA
ACTCAGCATATTCTGACTGTTCTGGCACTGGATGATGGCACACCAGCACTTTCTTCATCCCAGACTTT
GACAGTTACTGTTCTTGATGTAAATGATGAAGCTCCAGTATTTAAGCAGCACCTGTATGAAGCCTCAG
TGAAAGAAAACCAAAATCCAGGGGAGTTTGTTACCAGGGTTGAAGCTCTGGACAGAGATTCAGTGTTC
CTTAATACTAGAGAGCTTAACATGTGTTTTCTAGCATTCTACGATGCAGTTTTTAAAAATGGTGGGCT
AAGTGCCCAAGCCTTTGTTCGTGTGGACCTGGAGGACGTGAATGATAATCATCCTGTGTTTAACCCAT
CAACCTATGTGACGAGCATCAGTGATGAGACCCAGCCAGGCACCGAGATCATCAATGTTCTTGCCACT
GACCAGGACTCTGGGATATATGGGACAGTGGCTTATGAGCTTATTCCAGGAAACGTGTCGTCCCTTTT
TACCATTGACTCCACCACAGGAATTATTTACTTAACATTACCTCTTAGTCATTTGGAATCTACCACAC
TTTCGTTGATGGTCTCTGCTCAAGACGGTGGTGGGCTCACAGCTGTCATTAATGCCGATGTCACCATA
CACATTTTCCAGACAACTCTGGCACCTGCTGAGTTTGAAAGGCCTAAGTACACTTTCTTAGTTTATGA
AGATGTGCCTGAAGATAGTCCCATTGGAACAGTGAAAGCAAGAGAGCCCTTGAATCCACCTAGGAGCT
CTGTAATACACCTGCAAGTTAGAGTTTTGGATGCCAATGACCACAGTCCTTCTTTTCCCACACTTTAT
TACCAGTCCTCTGTGAGAGAAGATGCTGAAGTGGGAACAGTGGTTCTTGTGCTTTCAGCTGTGGACAA
GGATGAAGGCCTGAATGGGCAAACTGAGTATTTTCTGACTGATGAGGCTTGTGGTGCATTCACCATTG
ATCCTATGTCAGGCACATTGAAAACCAGCAACACCCTCGACCGTGAAGCCAGATCTCAGCATACATTT
AGTGCTGTGGCCAGAGACTGTAGCATCCAGGGTTCACGAAGCACCACTGTAATTATAAAAGTATATGT
CACTGATGTTAATGACAATGATCCAGTTTTGGAACAGAACCCTTTTGATGTGTTTCTTTCCCCCGAGT
CGCCTACAAACCAGACAACTGTCATTGTGAGAGCTGATGACCTGGACTTGGGGCCCAATGGAACTGTG
GACTCCGATGACTCCCCGCTGCTGGACGACTTCCACGTGCACCCGGACACCGGCATCATCCGCACTGC
GCGGCGCCTGGACCGCGAGCGGCGGGACCACTACAGCTTCGTCGCCGCCACGCTGCTGGGCGCTGTGG
TGCAGGTGGAGATTCGCGTCAACGACGTGAATGACCACTCGCCCCGCTTTCCCCTCGACTCCCTGCAA
CTCGACGTCTCCGAGCTCAGCCCGCCAGGGACCGCCTTCCGCCTGCCAGTTGCCCACGATCCGGACGC
CGGACTGTTCAGCACTCAGGGCTACACCCTGGTGCAACCGTCCGACCTGCCCAAGGACCCCGCAGGCC
CGTTCTTCCAGTTGCGCTACCGGACTCCGGGGCCACTACCGTCACCGCTTTTGCCAGGCTCCTCGTCA
CCCCTGGAGCCTCTAGATCTGGTGCTGCTGCGGCGCTTGGACCGAGAGGAGGCGGCGGCGCACCGGCT
GCAGATCGAGGCATGGGACGGCGGCCGACCCCGGCGCACCGGCCTCCTGAGCGTGGAGCTGCGCGTGC
TGGATGAGAACGACAACCCGCCGGTCTTTGAGCAGGACGAGTCCCGCGCCGCGGTGCGAGAGCACGCC
CAGCCGGGCGCCGAGGTCTGTCGCGTGCGCGCCACCGCCCGCGACGTGGGGCCCAATGGCTTCGTGCG
CTACAGCGTCCGCGCCCGGCAAGTGCCTGGGGCGGGTAGCGGCGGCGGGGCACTGGGCGACGCGGCCT
ACTTCGCGTTGGTGGTGGAGGCCCGCGATGGAGGCGCCGAGCATGAGGTTGCCGCGGTGCGTGTGTCC
ATCGCCGTGCTGGACGTGAATGACAACCGGCCAGCAATTCACGTGCTCTTTCTCACAGAGGGAGGTGT
CGCCCGTGTCTCTGAAGGCGCCCGCCCGGGCGACTACGTGGCTCGCGTCTCGGTGTCTGACGCGGGCG
GTGACTGGGAGAAGGAAGATGAGGCCACAGGGGAGCTTGGTGTGACAGCCTCTGATGCAGATTCAGGA
CTCTATGGCTTTATTGAATATTCTCTTTATGATGGATTCCTGAGCTATGAAGCACCTCAGGCATTCCG
GATCGACCCTCATGATGGGCAAATCTGTGTTTCTCAAGATATCGACAGGGAAAGGGATCCAGCTACCT
ATGATCTCCTGGTGGAAGCTAAGGATGGGTTTGAAATCATGCCAGGTGCTTCATTTGAATTATTCGAG
ATAAATTCTGACACTGGAGAGGTAGTGACAACCACCATACTTGACAGAGAAATTCAAGAAGTCTTCAC
CCTTCGAGTACTAGTACGAGATGGGGGATTCCCTTCATTGTCCAGCACCACAACAATCCTCTGCACTG
TTGAAGATGAAAACGATCACGCACCAGAGTTTATTGTTTCCAGTTATGACATTGAGGTTCTGGAAAAC
CAGGAACCAGAGGTTGTCTATACGGTTTTAGCCTCTGATATGGATGCTGGCAATAACAGAGCTGTTGA
ATATCACATAATTGACTCCTCAGAACCAATCTTTTACAGGATTTCTTCTGGTGATCTCGGCGGAAAGT
TCTCCATTCACCCGCGGCTGGGCACTATTCGCACCCGGAAGCCCCTGGATCACGAGACGCAGCCCGTG
GTTGTGCTCACGGTGCAGGCGCAGCTCGGCAGCGCCCCAGCCTGCAGCAGCACCGAGGTCAACATAAC
AGTCATGGATGTCAATGACAACCACCCAGCGTTCCTCAGGACCTCGGATGAGATTAGAATATCCCAGA
CCACGCCCCCTGGCACAGCCTTGTACCTCGCACGTGCGGAAGACAGAGACAGTGGGCGGAACGGACTC
ATCCGGTACTCCATCGCCAGCCCGCAGCCAGGCGTCTTTGCCATCGACAGAGCCCTGGGGGTGCTGTT
CCTCAACGGCAGCCTGGGCGCGGGCGAGCAGCGGGAGCTCACGCTGACTCTCAGGGCCGAGGACCAAG
GCGTGCATCCTCAGGCAGCCCTGCTGGTGCTGACAGTCGTTATCGAGAAACGCGAACACAGCCCATCC
TGGACTTTCGAACATTTGGTCTATCAAGTGGAAGTCAGTACTTCTATTGTGACTGTTAAAGCTTTTGC
TCCTGACTCAATTCAGGACAGCATGAAATATTCAATTTTTAGTGGAAATGAAGATGGAGTTCTTTCCC
TGTGCTCTAAGTCAGGTGTGGTGAACTGCCTTGCTTCTCTCAGTCACACAGACTTTCTCTCCCTGAAA
TTTGAATCTTCGGTGAAGGGACACCAAGACAGAGACAAATTACAGCCAATTCATCTTGATGACAACAA
CTCAAAGAAGCTGTGCTTTACATTCCCTAGAGCCACTCAGGCTCTTGTATTCACTGGGCACTGTCTTT
CTGATACATCTCTCCCCGGTTGGGTTTTTGCTACCGACTTGGACAGTGGTTTGAACGGCCTGATTGAG
TATTCTATTCTGTCTGGCAACCAAGAAGAAGCATTCCAGATTGATGCACTGAGTGGTGTGATAACAAC
AAAAGCGATTCTAGATTACGAGCTCACCAGCTCCTACAGCTTGATTGTCCAAGCCACAGATAAAGGGA
TGCCCAGGCTTTCTAATACGACTGTAATCAAGGTACAGGTGACTGATATAAATGACAATGCCCCAGCT
TTTCTCCCCTCTGAAGCAGTGGAAATTACAGAAGTCATGACTATTTCAGAAGATTCTTTGCCTGGTGT
AATTGTGACTCATGTGTCAGTTCATGATGTGGATTTGAATTCAGCTTTCATATTCAGTTTTGCCAAAG
AGAGTAATCCTGGAACCAAGTTTGCTATTGATCAGAACACTGGAGTGGTGGTGTTGGTGAAAACATTG
GATTTTGAAGAAATGACTGAATATGAGCTGCTCATCCAAATTTCTGATTCAGTGCACTACACAGAGGG
AGCACTTGTAGTCCGTGTGCTGGATGTCAATGATAATCCACCAGTGTTTTCTCAAGATTTCTATCAGG
TCACAGTTCCTGAATCAATACCTGTGGGGTATTCAGTGCTGACTCTGTCAGCCACAGACTTAGAAAGC
AATGAGAACATTTCTTACAGAATTCTATCCTCTTCTAAGGAATTCTCCATTGATCCTAAGAATGGCAC
AATATTTACTATCAGTCCCGTATTACTTCTGGATACAATATCAACAACTCGATTTCTTGTGGAAGCCA
GTGATGGTGGAAATCCTGACCCGAGAGCTCTTACTTTAGTGGAGATAGGAATAGAAGATATGAACAAT
TATGCCCCTGAATTCACAGTCAAATCCTATAATCTTAGCCTAAGTGAGGATGCTCTGGTTGGAAGCAC
GCTTGTTACATTTTCAAACATCGACCATGACTGGACCCGTGAAAACACATATGTTGAATATTCCATCA
TCAGTGGTAATTCACAGAACAATTTTCATGTGGAAACTAAGTTCTTTCATTCAGAATATCCTTATAAG
CAAGTCGGTTATCTTGTGTTGCTTCACAGTCTGGACAGAGAAGCAAGTGCTAGCCATGAGCTTGTCAT
TCTGGCATCTGACAGTGGCTGCCCTCCATTGAGTTCCACAGCTGTCATATCAATACAAGTACTTGATG
TCAATGACAATCCCCCAAACTTCAGCAGCCTGAGCTATCACACCCATGTCAAGGAAAGCACCCCTCTA
GGGAGTCACATCACTGTGGTCTCAGCAAATGACCGTGACACAGGGTCACATGCAGAAATCATCTACAA
CATCATCTCTGGAAATGAGAAGGGACATTTTTACTTAGAAGAAAACACTGGAGTTCTTTATTTGATTA
AACCTCTGGATTATGAAAAAATGACAAAATTCACCTTAACTGTCCAAGCTTCAGATGCAGAAAAGAAA
CATTTTTCTTTTGCAGTTGTGTTTGTCAGTGTCCTGGATGATAACGACCATGCACCTCAGTTTATGTT
CTCAAGCTTCAGCTGTATTGTTCCAGAAAATCTGCCTATTTCCTCTACCATATGCTCTATAAATGCTC
TGGATTTTGATGCTGGTCCGTATGGAGAATTGACCTATTCTATTGTATCACCCTGTTTTCTCACTCAT
GGAATGTCTTATGATCATGATCTCTTCCTCATTGACCCTTTGACAGGGGATATTCATGCTAAGCAAAT
CCTTGACTATGAAAATGGCAATAAATACTGCCTCACAGTCCAAGCCAAAGACAAAGGTGATGCAACTG
CCTCCTTAGTGGTCTGGGTGGATATTGAAGGGATAGATGAATTTGAGCCCATTTTCACTCAAGATCAG
TATTTTTTCACCCTCCCAGAAAAGAATAAAGACAGACAGTTGATTGGCAGAGTGGAAGCCTCAGATGC
AGATGCTGGTATTGATGGAGTCATTCTTTACTCCCTTGGAACCTCATCTCCTTTCTTTTCAGTAAATA
GAACCAATGGAAATATTTATTTGATTAGAGCCCTTCCCCTAATAAAAAGTCAACTCAACAAAGAAGAC
ACCTTGGAAATGAAAATAATCGCTCATAGTCCCAAATCAGATTCCAAGTTTGCATCTTGCACTGTTTT
TGTGAATGTGTCTTTCTCCTCTGAAGGAACACCCTTGGCAGTGTTCGCCAGCAGCTTTTCAATCAGCC
TGGTGGTCTCCTTTTTAGTGTTTCTGATACTCATCTGCATTCTAATTGTAATGATTTTAAGACATAAA
CAAAAAGACACAATAAACAATTATGAGGAGAAGAAAACCTCATCTTTAGATGCGGACTTGAGAGTGAC
CCGGGATGCCAGTGTGCTCAAAGCCTTCCAGAAAACTGACGACTGCAGTAACGAGGTGGTCCCTGTGG
ATGCCACTCCGGAATGGTTGAGTTTAATAAGTATCATGGAGAAGGATATTGTCAATCTGTACAGATAC
TCAAACTCCAGTGGCCACTGTTCTGTGGAAGGAGAAACTGCAGAAGATAAGGAAATCCAGAGGATAAA
TGAGCATCCCTACAGAAAGTGCTCAGACTCAGCTCTGAGTGACCACGAGTCCAGGGTGCCAGACTCGG
GTATCCCGAGGGACTCAGACCAGCTCTCCTGCCTATCTGGGGAAACTGATGTGATGGTGACTGCCGAA
ACAGCAGAAGCCAGCCAAACATTTGGGGAAGGAGATCAAGGGGAAGGCTGCAGCACCACCTGTGCTCA
AAATAATGTGTTACCCCAGACAGTTCAGAAGAGAGAGGCAAAAGAGAGCATCCTGGCTGACGTTAGAA
AAGAGTCTGTCTTTATTTCAGGTGATCAGGAAGTAAGGTGTGCAGCTCTTTCAACTCAGACGACCTCT
GATCATGATGGAAAAGACAACTATCACTGGAATTATCTTCTTAGTTGGGAGCCCAAATTCCAACCTCT
TGCCTCAGTATTTAATGATATTGCAAAACTAAAGGATGAACATTTGCATATGCCTGGCATTCCAAAAG
AGAAGAAATCTTTTGTTTTTCCACCCCCTTTGATAACAGCAGTAGCCCAGCCTGGGATTAAAGCAGTC
CCACCAAGAATGCCGGCAGTAAACCTGGGGCAGGTGCCTCCGAAACACCCACGCTCTCCCATCCCCTA
CCATCTTGGTTCTCTGCCAGAAGGCATGACTCCCAATTTTTCTCCATCTCTTTCCCTATTGACGATGC
AGCCTCCTGCCTTGTCTCCACTGTTGAGAGAAGGAGAATTATTAGGAACACACATCAGTGGTACATGC
CATGAACTTAAAGCAGAAGATGAAGTTCAAATATGAAACCACTGGGATGCCAAGTACCTGCTCACCAT
TGGTCATGAATGAATGAACAAAATGTTTTCAAGCCGGCAACTCGAGATTGGGCTCATTTTTATCTAAA
AGCAAGTGATGTAATTTAGTTAGAGTTTTTAAAACTTCCCCATTAAAGTTTCTCCAATTTCAAAAAAA
AAAAAAAAAAA

| | | | |
|---|---|---|---|
| NOV50h, CG58567-05 | SEQ ID NO: 1080 | 3003 aa | MW at 329184.0kD |
| Protein Sequence | | | |

MEKCGLKEEGSYADIDPVAHDPDAGLFSTQGYTLVQPSDLPKDPAGPFFQLRYRTPGPLPSPLLPGSS
SPLEPLDLVLLRRLDREEAAAHRLQIEAWDGGRPRRTGLLSVELRVLDENDNPPVFEQDEYRAAVRED
AQPGAEVCRVRATDRDLGPNGFVRYSVRARQVPGAGSGGGALGDAAYFAVEELSGVVRVWRPLDREAQ
AWHQLVVEARDGGAEPEVATVRVSIAVLDVNDNRPAIHVLFLTEGGVARVSEGARPGDYVARVSVSDA
DGVIGKITAIDMDSGKNGQLLYFLLSDGKFFKMNPNTGELINWVALDREHRGHHEMTVLVTDRGSPPR
NATMAVYVSVTDINDNRPFFPQCLPGKELHVKVLEGQPVNMLVTTVFAKDPDEGNNAEVTYSVSSEDS
SDHFKIDANNGEIRTTTILSYDYRPSYRMSVIATDQGVPPLQGQAVVNIQELDYETTSHYLFRVITTD
HSKNLSLSSTVFLSIDVEDQNDHSPSFQDELIVISVEENVPIGTLVYVFNAKDDDGSFLNSRIQYYIE
SHNPGTNPFLIHPSFGTLVTVSRLDRESIPTVILTVTASDQAVNVTDRRLRSLTAQIVILDVNDHNPT
FISFPNAHVKEDVTVGSLVHHITAHDPDEGRNGKVTYSILSGNENMTFMLDESSGLLTTTCPLDYEMK
TQHILTVLALDDGTPALSSSQTLTVTVLDVNDEAPVFKQHLYEASVKENQNPGEFVTRVEALDRDSVF
LNTRELNMCFLAFYDAVFKNGGLSAQAFVRVDLEDVNDNHPVFNPSTYVTSISDETQPGTEIINVLAT
DQDSGIYGTVAYELIPGNVSSLFTIDSTTGIIYLTLPLSHLESTTLSLMVSAQDGGGLTAVINADVTI
HIFQTTLAPAEFERPKYTFLVYEDVPEDSPIGTVKAREPLNPPRSSVIHLQVRVLDANDHSPSFPTLY
YQSSVREDAEVGTVVLVLSAVDKDEGLNGQTEYFLTDEACGAFTIDPMSGTLKTSNTLDREARSQHTF
SAVARDCSIQGSRSTTVIIKVYVTDVNDNDPVLEQNPFDVFLSPESPTNQTTVIVRADDLDLGPNGTV
DSDDSPLLDDFHVHPDTGIIRTARRLDRERRDHYSFVAATLLGAVVQVEIRVNDVNDHSPRFPLDSLQ
LDVSELSPPGTAFRLPVAHDPDAGLFSTQGYTLVQPSDLPKDPAGPFFQLRYRTPGPLPSPLLPGSSS
PLEPLDLVLLRRLDREEAAAHRLQIEAWDGGRPRRTGLLSVELRVLDENDNPPVFEQDESRAAVREHA
QPGAEVCRVRATARDVGPNGFVRYSVRARQVPGAGSGGGALGDAAYFALVVEARDGGAEHEVAAVRVS
IAVLDVNDNRPAIHVLFLTEGGVARVSEGARPGDYVARVSVSDAGGDWEKEDEATGELGVTASDADSG
LYGFIEYSLYDGFLSYEAPQAFRIDPHDGQICVSQDIDRERDPATYDLLVEAKDGFEIMPGASFELFE
INSDTGEVVTTTILDREIQEVFTLRVLVRDGGFPSLSSTTTILCTVEDENDHAPEFIVSSYDIEVLEN
QEPEVVYTVLASDMDAGNNRAVEYHIIDSSEPIFYRISSGDLGGKFSIHPRLGTIRTRKPLDHETQPV
VVLTVQAQLGSAPACSSTEVNITVMDVNDNHPAFLRTSDEIRISQTTPPGTALYLARAEDRDSGRNGL
IRYSIASPQPGVFAIDPALGVLFLNGSLGAGEQRELTLTLRAEDQGVHPQAALLVLTVVIEKREHSPS
WTFEHLVYQVEVSTSIVTVKAFAPDSIQDSMKYSIFSGNEDGVLSLCSKSGVVNCLASLSHTDFLSLK
FESSVKGHQDRDKLQPIHLDDNNSKKLCFTFPRATQALVFTGHCLSDTSLPGWVFATDLDSGLNGLIE
YSILSGNQEEAFQIDALSGVITTKAILDYELTSSYSLIVQATDKGMPRLSNTTVIKVQVTDINDNAPA
FLPSEAVEITEVMTISEDSLPGVIVTHVSVHDVDLNSAFIFSFAKESNPGTKFAIDQNTGVVVLVKTL
DFEEMTEYELLIQISDSVHYTEGALVVRVLDVNDNPPVFSQDFYQVTVPESIPVGYSVLTLSATDLES
NENISYRILSSSKEFSIDPKNGTIFTISPVLLLDTISTTRFLVEASDGGNPDPRALTLVEIGIEDMNN
YAPEFTVKSYNLSLSEDALVGSTLVTFSNIDHDWTRENTYVEYSIISGNSQNNFHVETKFFHSEYPYK
QVGYLVLLHSLDREASASHELVILASDSGCPPLSSTAVISIQVLDVNDNPPNFSSLSYHTHVKESTPL
GSHITVVSANDRDTGSHAEIIYNIISGNEKGHFYLEENTGVLYLIKPLDYEKMTKFTLTVQASDAEKK
HFSFAVVFVSVLDDNDHAPQFMFSSFSCIVPENLPISSTICSINALDFDAGPYGELTYSIVSPCFLTH
GMSYDHDLFLIDPLTGDIHAKQILDYENGNKYCLTVQAKDKGDATASLVVWVDIEGIDEFEPIFTQDQ
YFFTLPEKNKDRQLIGRVEASDADAGIDGVILYSLGTSSPFFSVNRTNGNIYLIRALPLIKSQLNKED
TLEMKIIAHSPKSDSKFASCTVFVNVSFSSEGTPLAVFASSFSISLVVSFLVFLILICILIVMILRHK
QKDTINNYEEKKTSSLDADLRVTRDASVLKAFQKTDDCSNEVVPVDATPEWLSLISIMEKDIVNLYRY
SNSSGHCSVEGETAEDKEIQRINEHPYRKCSDSALSDHESRVPDSGIPRDSDQLSCLSGETDVMVTAE
TAEASQTFGEGDQGEGCSTTCAQNNVLPQTVQKREAKESILADVRKESVFISGDQEVRCAALSTQTTS
DHDGKDNYHWNYLLSWEPKFQPLASVFNDIAKLKDEHLHMPGIPKEKKSFVFPPPLITAVAQPGIKAV
PPRMPAVNLGQVPPKHPRSPIPYHLGSLPEGMTPNFSPSLSLLTMQPPALSPLLREGELLGTHISGTC
HELKAEDEVQI

| | | |
|---|---|---|
| NOV50i, CG58567-06 | SEQ ID NO: 1081 | 10267 bp |
| DNA Sequence | ORF Start: ATG at 1 | ORF Stop: TGA at 10084 |

ATGGAGAAATGTGGGCTTAAAGAGGAAGGCAGTTACGCGGACATAGATCCAGTTGCCCACGATCCGGA
CGCCGGACTGTTCAGCACTCAGGGCTACACCCTGGTGCAACCGTCCGACCTGCCCAAGGACCCCGCAG
GCCCGTTCTTCCAGTTGCGCTACCGGACTCCGGGGCCACTACCGTCACCGCTTTTGCCAGGCTCCTCG
TCACCCCTGGAGCCTCTAGATCTGGTGCTGCTGCGGCGCTTGGACCGAGAGGAGGCGGCGGCGCACCG
GCTGCAGATCGAGGCATGGGACGGCGGCCGACCCCGGCGCACCGGCCTCCTGAGCGTGGAGCTGCGCG
TGCTGGATGAGAACGACAACCCGCCGGTCTTTGAGCAGGACGAGTACCGCGCCGCGGTGCGCGAGGAC
GCCCAGCCGGGCGCCGAGGTCTGTCGCGTGCGCGCCACCGACCGCGACCTGGGGCCCAATGGCTTCGT
GCGCTACAGCGTCCGCGCCCGGCAAGTGCCTGGGGCGGGTAGCGGCGGCGGGGCACTGGGCGACGCGG
CCTACTTCGCGGTGGAGGAGCTGAGCGGCGTGGTGCGAGTGTGGAGACCTCTGGACCGCGAGGCACAG
GCCTGGCACCAGTTGGTGGTGGAGGCCCGCGATGGAGGCGCCGAGCCTGAGGTTGCCACGGTGCGCGT
GTCCATCGCCGTGCTGGACGTGAATGACAACCGGCCAGCAATTCACGTGCTCTTTCTCACAGAGGGAG
GCGTCGCCCGTGTCTCTGAAGGCGCCCGACCGGGCGACTACGTGGCTCGCGTCTCGGTGTCTGACGCG
GACGGTGACTGGGAGAAGGAAGATGAGGCCACAGGGGAGCTTGGTGTGGGTCTTGGAGACGGGAGCAT
CTCTCTGTCCTTGGAAGGCGGAGAGGGAGACTTCGCGTTGCTACCCGGCGGCCCCCCAGGGGTATTTT
TCCTTTGCGTGGAGGGGCCCCTGGACAGAGAGAGCCGCGATCTGTATGAGTTACTACTGGTGGCCACG
GACGCGGGGTCCCCGCCGCTGAGCACGGAGGAGACGCTGCTACTCCGGGTCGCTGACCTCAATGACCA
ACCACCTCTCTTCAGCCAACAGCATTACAAGGCCTCAGTGTCCGAGGCCGCGGCCCCTGGCACTGTAG
TCATGTGGGTCAGCGCCTCCGATGCCGACGAGGCAGGCAGTGATCACGCCTGGCTGCGCTACACTGTA
GTCCAACTCTCGGCTCCCTGCAATCTCGGCTCCCTGCAATCAAAGATGGTCCACACCGCAGAGTGTGG
ACCATCTTTTGCCATTGATTCCGAAAGCGGTGCGATCAGCACTATCCGGACTCTAGACCGAGAGGTCC
AGGAGGCGGTGGAGCTGAAAGTGGTGGCCCAGGACCTCGGAGAGCCCCCACTCTCTGCCACCTGCCTG
GTGAGCATCACCGTAGATGATGTGAATGACAATGAGCCCATCTTCTGGAGGCAGGTGTACAATGCCAC
CATTGCAGAGCATGCCCCGGTTGGACACTGCTTTCTGCAGCTTATATCTGCTCAAGTTGCCTCTGTCA
AAATCAAACACAAACACAAGGAGATACACGAGAAACACAATCTTGCCTATATTTCCTGTCCAGCAGGC
ACCATCTATGTCATAACCTGGGCAGATGGTGCTGCTGCCTTTAGTGGGACAGACTTTGCATTCAGTTC
TGATGAACTTCAAGCCTTTGTTCTCAAGTCTCTGTTCTGTGAATTAGGAGAAGGAGAGTTAATCAATT
GGGTGGCACTGGATCGTGAGCACCGGGGGCACCATGAGATGACTGTGCTAGTGACAGACCGCGGCTCC
CCACCACGAAACGCCACCATGGCGGTTTACGTCTCAGTTACTGACATCAATGATAACAGGCCCTTCTT
CCCCCAGTGTCTCCCTGGAAAGGAGTTACACGTGAAGGTTCTGGAAGGTCAACCAGTAAATATGTTGG
TTACAACTGTGTTTGCAAAGGATCCTGATGAAGGAAATAATGCAGAAGTTACATACTCAGTATCTTCA
GAAGATAGTTCTGATCACTTTAAGATTGACGCCAACAATGGTGAAATAAGAACAACCACAATACTTTC
GTATGATTATAGACCTTCCTACAGAATGAGTGTCATTGCCACTGACCAGGGAGTGCCTCCTCTTCAAG
GACAGGCAGTTGTTAATATTCAGGTGATCCCACTATCCAAAGGGAGAGCAATCATGTCTCAGAATATT
AGACATTTAATTATACCAGAAAATTTGAAGCCCACAAAAATAATGAGCTTGATAAAGTCATCTGATCA
CCTTCAACAACATTATAATGGAAAGTTACATTTTAGTATTGTTGCAGATGATAAGGATGGACACTTTG
AAATAGACAGCTCAACCGGAGACTTGTTTCTTTCTAAGGAACTTGATTATGAGACGACATCTCATTAT
CTTTTCAGAGTGATTACTACAGACCATAGCAAAAACCTTTCCCTGAGTAGCACAGTCTTCCTTAGTAT
CGATGTGGAAGATCAGAATGACCATTCCCCATCTTTCCAGGATGAGCTCATTGTGATCAGTGTAGAGG
AGAATGTTCCCATAGGAACCCTGGTGTATGTCTTCAATGCCAAAGATGATGACGGCAGTTTTTTGAAC
AGTAGAATACAATACTACATTGAATCCCACAACCCTGGCACGAATCCATTTCTCATCCACCCCTCATT
TGGCACACTAGTCACTGTGTCCCGTCTTGACAGAGAAAGCATTCCAACTGTCATCCTGACAGTAACAG
GATGTAAATGACCACAACCCCACTTTTATTTCTTTCCCCAATGCCCATGTCAAAGAGGATGTCACAGT
GGGCTCCTTGGTCCACCACATAACTGCTCACGATCCAGACGAAGGAAGGAATGGAAAAGTAACATACA
GCATCCTCTCAGGAAATGAAAACATGACGTTTATGCTAGATGAGTCATCAGGCTTACTAACCACAACC
TGTCCTTTGGATTATGAAATGAAAACTCAGCATATTCTGACTGTTCTGGCACTGGATGATGGCACACC
AGCACTTTCTTCATCCCAGACTTTGACAGTTACTGTTCTTGATGTAAATGATGAAGCTCCAGTATTTA
AGCAGCACCTGTATGAAGCCTCAGTGAAAGAAAACCAAAATCCAGGGGAGTTTGTTACCAGGGTTGAA
GCTCTGGACAGAGATTCAGGTATGAGGCTGAATGGAGATCCAGACAGGGAGCTGTGTGCAGGAGGGAA
CCCTCTTGGAAGCAGGGCCCCTCCTGGAAGCAGGACCCCTCCTGAAGGTGGGCTAAGTGCCCAAGCCT
TTGTTCGTGTGGACCTGGAGGACGTGAATGATAATCATCCTGTGTTTAACCCATCAACCTATGTGACG
AGCATCAGTGATGAGACCCAGCCAGGCACCGAGATCATCAATGTTCTTGCCACTGACCAGGACTCTGG
GATATATGGGACAGTGGCTTATGAGCTTATTCCAGGAAACGTGTCGTCCCTTTTTACCATTGACTCCA
CCACAGGAATTATTTACTTAACATTACCTCTTAGTCATTTGGAATCTACCACACTTTCGTTGATGGTC
TCTGCTCAAGACGGTGGTGGGCTCACAGCTGTCATTAATGCCGATGTCACCATACACATTTTCCAGAC
AACTCTGGCACCTGCTGAGTTTGAAAGGCCTAAGTACACTTTCTTAGTTTATGAAGATGTGCCTGAAG
ATAGTCCCATTGGAACAGTGAAAGCAAGAGAGCCCTTGAATCCACCTAGGAGCTCTGTAATACACCTG
CAAGTTAGAGTTTTGGATGCCAATGACCACAGTCCTTCTTTTCCCACACTTTATTACCAGTCCTCTGT
GAGAGAAGATGCTGAAGTGGGAACAGTGGTTCTTGTGCTTTCAGCTGTGGACAAGGATGAAGGCCTGA
ATGGGCAAACTGAGTATTTTCTGACTGATGAGGCTTGTGGTGCATTCACCATTGATCCTATGTCAGGC
ACATTAGAAACCAGCAACACCCTCGACCGTGAAGCCAGATCTCAGCATACATTTAGTGCTGTGGCCAG
AGACTGTAGCATCCAGGGTTCACGAAGCACCACTGTAATTATAAAAGTATATGTCACTGATGTTAATG
ACAATGATCCAGTTTTGGAACAGAACCCTTTTGATGTGTTTCTTTCCCCCGAGTCGCCTACAAACCAG
ACAACTGTCATTGTGAGAGCTGATGACCTGGACTTGGGGCCCAATGGAACTGTGGACTCCGATGACTC
CCCGCTGCTGGACGACTTCCACGTGCACCCGGACACCGGCATCATCCGCACTGCGCGGCGCCTGGACC
GCGAGCGGCGGGACCACTACAGCTTCGTCGCCGCCACGCTGCTGGGCGCTGTGGTGCAGGTGGAGATT
CGCGTCAACGACGTGAATGACCACTCGCCCCGCTTTCCCCTCGACTCCCTGCAACTCGACGTCTCCGA
GCTCAGCCCGCCAGGGACCGCCTTCCGCCTGCCAGTTGCCCACGATCCGGACGCCGGACTGTTCAGCA
CTCAGGGCTACACCCTGGTGCAACCGTCCGACCTGCCCAAGGACCCCGCAGGCCCGTTCCCCCAGTTG
CGCTACCGGACTCCGGGGCCACTACCGTCACCGCTTTTGCCAGGCTCCTCGTCACCCCTGGAGCCTCT
AGATCTGGTGCTGCTGCGGCGCTTGGACCGAGAGGAGGCGGCGGCGCACCGGCTGCAGATCGAGGCAT
GGGACGGCGGCCGACCCCGGCGCACCGGCCTCCTGAGCGTGGAGCTGCGCGTGCTGGATGAGAACGAC
AACCCGCCGGTCTTTGAGCAGGACGAGTCCCGCGCCGCGGTGCGAGAGCACGCCCAGCCGGGCGCCGA
GGTCTGTCGCGTGCGCGCCACCGCCCGCGACGTGGGGCCCAATGGCTTCGTGCGCTACAGCGTCCGCG
CCCGGCAAGTGCCTGGGGCGGGTAGCGGCGGCGGGGCACTGGGCGACGCGGCCTACTTCGCGTTGGTG
GTGGAGGCCCGCGATGGAGGCGCCGAGCATGAGGTTGCCGCGGTGCGTGTGTCCATCGCCGTGCTGGA
CGTGAATGACAACCGGCCAGCAATTCACGTGCTCTTTCTCACAGAGGGAGGTGTCGCCCGTGTCTCTG
AAGGCGCCCGCCCGGGCGACTACGTGGCTCGCGTCTCGGTGTCTGACGCGGGCGGTGACTGGGAGAAG
GAAGATGAGGCCACAGGGGAGCTTGGTGTGACAGCCTCTGATGCAGATTCAGGACTCTATGGCTTTAT
TGAATATTCTCTTTATGATGGATTCCTGAGCTATGAAGCACCTCAGGCATTCCGGATCGACCCTCATG
ATGGGCAAATCTGTGTTTCTCAAGATATCGACAGGGAAAGGGATCCAGCTACCTATGATCTCCTGGTG
GAAGCTAAGGATGGGTTTGAAATCATGCCAGGTGCTTCATTTGAATTATTCGAGATAAATTCTGACAC
TGGAGAGGTAGTGACAACCACCATACTTGACAGAGAAATTCAAGAAGTCTTCACCCTTCGAGTACTAG
TACGAGATGGGGGATTCCCTTCATTGTCCAGCACCACAACAATCCTCTGCACTGTTGAAGATGAAAAC
GATCACGCACCAGAGTTTATTGTTTCCAGTTATGACATTGAGGTTCTGGAAAACCAGGAACCAGAGGT
TGTCTATACGGTTTTAGCCTCTGATATGGATGCTGGCAATAACAGAGCTGTTGAATATCACATAATTG
ACTCCTCAGAACCAATCTTTTACAGGATTTCTTCTGGTGATCTCGGCGGAAAGTTCTCCATTCACCCG
CGGCTGGGCACTATTCGCACCCGGAAGCCCCTGGATCACGAGACGCAGCCCGTGGTTGTGCTCACGGT
GCAGGCGCAGCTCGGCAGCGCCCCAGCCTGCAGCAGCACCGAGGTCAACATAACAGTCATGGATGTCA
ATGACAACCACCCAGCGTTCCTCAGGACCTCGGATGAGATTAGAATATCCCAGACCACGCCCCCTGGC
ACAGCCTTGTACCTCGCACGTGCGGAAGACAGAGACAGTGGGCGGAACGGACTCATCCGGTACTCCAT
CGCCAGCCCGCAGCCAGGCGTCTTTGCCATCGACAGAGCCCTGGGGGTGCTGTTCCTCAACGGCAGCC
TGGGCGCGGGCGAGCAGCGGGAGCTCACGCTGACTCTCAGGGCCGAGGACCAAGGCGTGCATCCTCAG
GCAGCCCTGCTGGTGCTGACAGTCGTTATCGAGAAACGCGAACACAGCCCATCCTGGACTTTCGAACA
TTTGGTCTATCAAGTGGAAGTCAGTACTTCTATTGTGACTGTTAAAGCTTTTGCTCCTGACTCAATTC
AGGACAGCATGAAATATTCAATTTTTAGTGGAAATGAAGATGGAGTTCTTTCCCTGTGCTCTAAGTCA
GGTGTGGTGAACTGCCTTGCTTCTCTCAGTCACACAGACTTTCTCTCCCTGAAATTTGAATCTTCGGT
GAAGGGACACCAAGACAGAGACAAATTACAGCCAATTCATCTTGATGACAACAACTCAAAGAAGCTGT
GCTTTACATTCCCTAGAGCCACTCAGGCTCTTGTATTCACTGGGCACTGTCTTTCTGATACATCTCTC
CCCGGTTGGGTTTTTGCTACCGACTTGGACAGTGGTTTGAACGGCCTGATTGAGTATTCTATTCTGTC
TGGCAACCAAGAAGAAGCATTCCAGATTGATGCACTGAGTGGTGTGATAACAACAAAAGCGATTCTAG
ATTACGAGCTCACCAGCTCCTACAGCTTGATTGTCCAAGCCACAGATAAAGGGATGCCCAGGCTTTCT
AATACGACTGTAATCAAGGTACAGGTGACTGATATAAATGACAATGCCCCAGCTTTTCTCCCCTCTGA
AGCAGTGGAAATTACAGAAGTCATGACTATTTCAGAAGATTCTTTGCCTGGTGTAATTGTGACTCATG
TGTCAGTTCATGATGTGGATTTGAATTCAGCTTTCATATTCAGTTTTGCCAAAGAGAGTAATCCTGGA
ACCAAGTTTGCTATTGATCAGAACACTGGAGTGGTGGTGTTGGTGAAAACATTGGATTTTGAAGAAAT
GACTGAATATGAGCTGCTCATCCAAATTTCTGATTCAGTGCACTACACAGAGGGAGCACTTGTAGTCC
GTGTGCTGGATGTCAATGATAATCCACCAGTGTTTTCTCAAGATTTCTATCAGGTCACAGTTCCTGAA
TCAATACCTGTGGGGTATTCAGTGCTGACTCTGTCAGCCACAGACTTAGAAAGCAATGAGAACATTTC
TTACAGAATTCTATCCTCTTCTAAGGAATTCTCCATTGATCCTAAGAATGGCACAATATTTACTATCA
GTCCCGTATTACTTCTGGATACAATATCAACAACTCGATTTCTTGTGGAAGCCAGTGATGGTGGAAAT
CCTGACCCGAGAGCTCTTACTTTAGTGGAGATAGGAATAGAAGATATGAACAATTATGCCCCTGAATT
CACAGTCAAATCCTATAATCTTAGCCTAAGTGAGGATGCTCTGGTTGGAAGCACGCTTGTTACATTTT
CAAACATCGACCATGACTGGACCCGTGAAAACACATATGTTGAATATTCCATCATCAGTGGTAATTCA
CAGAACAATTTTCATGTGGAAACTAAGTTCTTTCATTCAGAATATCCTTATAAGCAAGTCGGTTATCT
TGTGTTGCTTCACAGTCTGGACAGAGAAGCAAGTGCTAGCCATGAGCTTGTCATTCTGGCATCTGACA
GTGGCTGCCCTCCATTGAGTTCCACAGCTGTCATATCAATACAAGTACTTGATGTCAATGACAATCCC
CCAAACTTCAGCAGCCTGAGCTATCACACCCATGTCAAGGAAAGCACCCCTCTAGGGAGTCACATCAC
TGTGGTCTCAGCAAATGACCGTGACACAGGGTCACATGCAGAAATCATCTACAACATCATCTCTGGAA
ATGAGAAGGGACATTTTTACTTAGAAGAAAACACTGGAGTTCTTTATTTGATTAAACCTCTGGATTAT
GAAAAAATGACAAAATTCACCTTAACTGTCCAAGCTTCAGATGCAGAAAAGAAACATTTTTCTTTTGC
AGTTGTGTTTGTCAGTGTCCTGGATGATAACGACCATGCACCTCAGTTTATGTTCTCAAGCTTCAGCT
GTATTGTTCCAGAAAATCTGCCTATTTCCTCTACCATATGCTCTATAAATGCTCTGGATTTTGATGCT
GGTCCGTATGGAGAATTGACCTATTCTATTGTATCACCCTGTTTTCTCACTCATGGAATGTCTTATGA
TCATGATCTCTTCCTCATTGACCCTTTGACAGGGGATATTCATGCTAAGCAAATCCTTGACTATGAAA
ATGGCAATAAATACTGCCTCACAGTCCAAGCCAAAGACAAAGGTGATGCAACTGCCTCCTTAGTGGTC
TGGGTGGATATTGAAGGGATAGATGAATTTGAGCCCATTTTCACTCAAGATCAGTATTTTTTCACCCT
CCCAGAAAAGAATAAAGACAGACAGTTGATTGGCAGAGTGGAAGCCTCAGATGCAGATGCTGGTATTG
ATGGAGTCATTCTTTACTCCCTTGGAACCTCATCTCCTTTCTTTTCAGTAAATAGAACCAATGGAAAT
ATTTATTTGATTAGAGCCCTTCCCCTAATAAAAAGTCAACTCAACAAAGAAGACACCTTGGAAATGAA
AATAATCGCTCATAGTCCCAAATCAGATTCCAAGTTTGCATCTTGCACTGTTTTTGTGAATGTGTCTT
TCTCCTCTGAAGGAACACCCTTGGCAGTGTTCGCCAGCAGCTTTTCAATCAGCCTGGTGGTCTCCTTT
TTAGTGTTTCTGATACTCATCTGCATTCTAATTGTAATGATTTTAAGACATAAACAAAAAGACACAAT
AAACAATTATGAGGAGAAGAAAACCTCATCTTTAGATGCGGACTTGAGAGTGACCCGGGATGCCAGTG
TGCTCAAAGCCTTCCAGAAAACTGACGACTGCAGTAACGAGGTGGTCCCTGTGGATGCCACTCCGGAA
TGGTTGAGTTTAATAAGTATCATGGAGAAGGATATTGTCAATCTGTACAGATACTCAAACTCCAGTGG
CCACTGTTCTGTGGAAGGAGAAACTGCAGAAGATAAGGAAATCCAGAGGATAAATGAGCATCCCTACA
GAAAGTGCTCAGACTCAGCTCTGAGTGACCACGAGTCCAGGGTGCCAGACTCGGGTATCCCGAGGGAC
TCAGACCAGCTCTCCTGCCTATCTGGGGAAACTGATGTGATGGTGACTGCCGAAACAGCAGAAGCCAG
CCAAACATTTGGGGAAGGAGATCAAGGGGAAGGCTGCAGCACCACCTGTGCTCAAAATAATGTGTTAC
CCCAGACAGTTCAGAAGAGAGAGGCAAAAGAGAGCATCCTGGCTGACGTTAGAAAAGAGTCTGTCTTT
ATTTCAGGTGATCAGGAAGTAAGGTGTGCAGCTCTTTCAACTCAGACGACCTCTGATCATGATGGAAA
AGACAACTATCACTGGAATTATCTTCTTAGTTGGGAGCCCAAATTCCAACCTCTTGCCTCAGTATTTA
ATGATATTGCAAAACTAAAGGATGAACATTTGCATATGCCTGGCATTCCAAAAGAGAAGAAATCTTTT
GTTTTTCCACCCCCTTTGATAACAGCAGTAGCCCAGCCTGGGATTAAAGCAGTCCCACCAAGAATGCC
GGCAGTAAACCTGGGGCAGGTGCCTCCGAAACACCCACGCTCTCCCATCCCCTACCATCTTGGTTCTC
TGCCAGAAGGCATGACTCCCAATTTTTCTCCATCTCTTTCCCTATTGACGATGCAGCCTCCTGCCTTG
TCTCCACTGTTGAGAGAAGGAGAATTATTAGGAACACACATCAGTGGTACATGCCATGAACTTAAAGC
AGAAGATGAAGTTCAAATATGAAACCACTGGGATGCCAAGTACCTGCTCACCATTGGTCATGAATGAA
TGAACAAAATGTTTTCAAGCCGGCAACTCGAGATTGGGCTCATTTTTATCTAAAAGCAAGTGATGTAA
TTTAGTTAGAGTTTTTAAAACTTCCCCATTAAAGTTTCTCCAATTTCAAAAAAAAAAAAAAAAAAAA

| | | | |
|---|---|---|---|
| NOV50i, CG58567-06 | SEQ ID NO: 1082 | 3361 aa | MW at 367309.1kD |
| Protein Sequence | | | |

MEKCGLKEEGSYADIDPVAHDPDAGLFSTQGYTLVQPSDLPKDPAGPFFQLRYRTPGPLPSPLLPGSS
SPLEPLDLVLLRRLDREEAAAHRLQIEAWDGGRPRRTGLLSVELRVLDENDNPPVFEQDEYRAAVRED
AQPGAEVCRVPATDRDLGPNGFVRYSVRARQVPGAGSGGGALGDAAYFAVEELSGVVRVWRPLDREAQ
AWHQLVVEARDGGAEPEVATVRVSIAVLDVNDNRPAIHVLFLTEGGVARVSEGARPGDYVARVSVSDA
DGDWEKEDEATGELGVGLGDGSISLSLEGGEGDFALLPGGPPGVFFLCVEGPLDRESRDLYELLLVAT
DAGSPPLSTEETLLLRVADLNDQPPLFSQQHYKASVSEAAAPGTVVMWVSASDADEAGSDHAWLRYTV
VQLSAPCNLGSLQSKMVHTAECGPSFAIDSESGAISTIRTLDREVQEAVELKVVAQDLGEPPLSATCL
VSITVDDVNDNEPIFWRQVYNATIAEHAPVGHCFLQLISAQVASVKIKHKHKEIHEKHNLAYISCPAG
TIYVITWADGAAAFSGTDFAFSSDELQAFVLKSLFCELGEGELINWVALDREHRGHHEMTVLVTDRGS
PPRNATMAVYVSVTDINDNRPFFPQCLPGKELHVKVLEGQPVNMLVTTVFAKDPDEGNNAEVTYSVSS
EDSSDHFKIDANNGEIRTTTILSYDYRPSYRMSVIATDQGVPPLQGQAVVNIQVIPLSKGRAIMSQNI
RHLIIPENLKPTKIMSLIKSSDHLQQHYNGKLHFSIVADDKDGHFEIDSSTGDLFLSKELDYETTSHY
LFRVITTDHSKNLSLSSTVFLSIDVEDQNDHSPSFQDELIVISVEENVPIGTLVYVFNAKDDDGSFLN
SRIQYYIESHNPGTNPFLIHPSFGTLVTVSRLDRESIPTVILTVTASDQAVNVTDRRLRSLTAQIVIL
DVNDHNPTFISFPNAHVKEDVTVGSLVHHITAHDPDEGRNGKVTYSILSGNENMTFMLDESSGLLTTT
CPLDYEMKTQHILTVLALDDGTPALSSSQTLTVTVLDVNDEAPVFKQHLYEASVKENQNPGEFVTRVE
ALDRDSGMRLNGDPDRELCAGGNPLGSRAPPGSRTPPEGGLSAQAFVRVDLEDVNDNHPVFNPSTYVT
SISDETQPGTEIINVLATDQDSGIYGTVAYELIPGNVSSLFTIDSTTGIIYLTLPLSHLESTTLSLMV
SAQDGGGLTAVINADVTIHIFQTTLAPAEFERPKYTFLVYEDVPEDSPIGTVKAREPLNPPRSSVIHL
QVRVLDANDHSPSFPTLYYQSSVREDAEVGTVVLVLSAVDKDEGLNGQTEYFLTDEACGAFTIDPMSG
TLKTSNTLDREARSQHTFSAVARDCSIQGSRSTTVIIKVYVTDVNDNDPVLEQNPFDVFLSPESPTNQ
TTVIVRADDLDLGPNGTVDSDDSPLLDDFHVHPDTGIIRTARRLDRERRDHYSFVAATLLGAVVQVEI
RVNDVNDHSPRFPLDSLQLDVSELSPPGTAFRLPVAHDPDAGLFSTQGYTLVQPSDLPKDPAGPFFQL
RYRTPGPLPSPLLPGSSSPLEPLDLVLLRRLDREEAAAHRLQIEAWDGGRPRRTGLLSVELRVLDEND
NPPVFEQDESRAAVREHAQPGAEVCRVRATARDVGPNGFVRYSVRARQVPGAGSGGGALGDAAYFALV
VEARDGGAEHEVAAVRVSIAVLDVNDNRPAIHVLFLTEGGVARVSEGARPGDYVARVSVSDAGGDWEK
EDEATGELGVTASDADSGLYGFIEYSLYDGFLSYEAPQAFRIDPHDGQICVSQDIDRERDPATYDLLV
EAKDGFEIMPGASFELFEINSDTGEVVTTTILDREIQEVFTLRVLVRDGGFPSLSSTTTILCTVEDEN
DHAPEFIVSSYDTEVLENQEPEVVYTVLASDMDAGNNRAVEYHIIDSSEPIFYRISSGDLGGKFSTHP
RLGTIRTRKPLDHETQPVVVLTVQAQLGSAPACSSTEVNITVMDVNDNHPAFLRTSDEIRISQTTPPG
TALYLARAEDRDSGRNGLIRYSIASPQPGVFAIDRALGVLFLNGSLGAGEQRELTLTLRAEDQGVHPQ
AALLVLTVVIEKREHSPSWTFEHLVYQVEVSTSIVTVKAFAPDSIQDSMKYSIFSGNEDGVLSLCSKS
GVVNCLASLSHTDFLSLKFESSVKGHQDRDKLQPIHLDDNNSKKLCFTFPRATQALVFTGHCLSDTSL
PGWVFATDLDSGLNGLIEYSILSGNQEEAFQIDALSGVITTKAILDYELTSSYSLIVQATDKGMPRLS
NTTVIKVQVTDINDNAPAFLPSEAVEITEVMTISEDSLPGVIVTHVSVHDVDLNSAFIFSFAKESNPG
TKFAIDQNTGVVVLVKTLDFEEMTEYELLIQISDSVHYTEGALVVRVLDVNDNPPVFSQDFYQVTVPE
SIPVGYSVLTLSATDLESNENISYRILSSSKEFSIDPKNGTIFTISPVLLLDTISTTRFLVEASDGGN
PDPRALTLVEIGIEDMNNYAPEFTVKSYNLSLSEDALVGSTLVTFSNIDHDWTRENTYVEYSIISGNS
QNNFHVETKFFHSEYPYKQVGYLVLLHSLDREASASHELVILASDSGCPPLSSTAVISIQVLDVNDNP
PNFSSLSYHTHVKESTPLGSHITVVSANDRDTGSHAEIIYNIISGNEKGHFYLEENTGVLYLIKPLDY
EKMTKFTLTVQASDAEKKHFSFAVVFVSVLDDNDHAPQFMFSSFSCIVPENLPISSTICSINALDFDA
GPYGELTYSIVSPCFLTHGMSYDHDLFLIDPLTGDIHAKQILDYENGNKYCLTVQAKDKGDATASLVV
WVDIEGIDEFEPIFTQDQYFFTLPEKNKDRQLIGRVEASDADAGIDGVILYSLGTSSPFFSVNRTNGN
IYLIRALPLIKSQLNKEDTLEMKIIAHSPKSDSKFASCTVFVNVSFSSEGTPIAVFASSFSISLVVSF
LVFLILICILIVMILRHKQKDTINNYEEKKTSSLDADLRVTRDASVLKAFQKTDDCSNEVVPVDATPE
WLSLISIMEKDIVNLYRYSNSSGHCSVEGETAEDKEIQRINEHPYRKCSDSALSDHESRVPDSGIPRD
SDQLSCLSGETDVMVTAETAEASQTFGEGDQGEGCSTTCAQNNVLPQTVQKREAKESILADVRKESVF
ISGDQEVRCAALSTQTTSDHDGKDNYHWNYLLSWEPKFQPLASVFNDIAKLKDEHLHMPGIPKEKKSF
VFPPPLITAVAQPGIKAVPPRMPAVNLGQVPPKHPRSPIPYHLGSLPEGMTPNFSPSLSLLTMQPPAL
SPLLREGELLGTHISGTCHELKAEDEVQI

[0644] A ClustalW comparison of the above protein sequences yields the following sequence alignment shown in Table 50B.

TABLE 50B
Comparison of the NOV50 protein sequences.

NOV50a ------------------------------------------------------------
NOV50b ------------------------------------------------------------
NOV50c ------------------------------------------------------------
NOV50d ------------------------------------------------------------
NOV50e ------------------------------------------------------------
NOV50f ------------------------------------------------------------
NOV50g ------------------------------------------------------------
NOV50h MEKCGLKEEGSYADIDPVAHDPDAGLFSTQGYTLVQPSDLPKDPAGPFFQLRYRTPGPLP
NOV50i MEKCGLKEEGSYADIDPVAHDPDAGLFSTQGYTLVQPSDLPKDPAGPFFQLRYRTPGPLP
NOV50a ------------------------------------------------------------
NOV50b ------------------------------------------------------------
NOV50c ------------------------------------------------------------
NOV50d ------------------------------------------------------------
NOV50e ------------------------------------------------------------
NOV50f ------------------------------------------------------------
NOV50g ------------------------------------------------------------
NOV50h SPLLPGSSSPLEPLDLVLLRRLDREEAAAHRLQIEAWDGGRPRRTGLLSVELRVLDENDN
NOV50i SPLLPGSSSPLEPLDLVLLRRLDREEAAAHRLQIEAWDGGRPRRTGLLSVELRVLDENDN
NOV50a ------------------------------------------------------------
NOV50b ------------------------------------------------------------
NOV50c ------------------------------------------------------------
NOV50d ------------------------------------------------------------
NOV50e ------------------------------------------------------------
NOV50f ------------------------------------------------------------
NOV50g ------------------------------------------------------------
NOV50h PPVFEQDEYRAAVREDAQPGAEVCRVRATDRDLGPNGFVRYSVRARQVPGAGSGGGALGD
NOV50i PPVFEQDEYRAAVREDAQPGAEVCRVRATDRDLGPNGFVRYSVRARQVPGAGSGGGALGD
NOV50a ------------------------------------------------------------
NOV50b ------------------------------------------------------------
NOV50c ------------------------------------------------------------
NOV50d ------------------------------------------------------------
NOV50e ------------------------------------------------------------
NOV50f ------------------------------------------------------------
NOV50g ------------------------------------------------------------
NOV50h AAYFAVEELSGVVRVWRPLDREAQAWHQLVVEARDGGAEPEVATVRVSIAVLDVNDNRPA
NOV50i AAYFAVEELSGVVRVWRPLDREAQAWHQLVVEARDGGAEPEVATVRVSIAVLDVNDNRPA
NOV50a ------------------------------------------------------------
NOV50b ------------------------------------------------------------
NOV50c ------------------------------------------------------------
NOV50d ------------------------------------------------------------
NOV50e ------------------------------------------------------------
NOV50f ------------------------------------------------------------
NOV50g ------------------------------------------------------------
NOV50h IHVLFLTEGGVARVSEGARPGDYVARVSVSDADGVIGKITAIDMDS--------------
NOV50i IHVLFLTEGGVARVSEGARPGDYVARVSVSDADGDWEKEDEATGELGVGLGDGSISLSLE
NOV50a ------------------------------------------------------------
NOV50b ------------------------------------------------------------
NOV50c ------------------------------------------------------------
NOV50d ------------------------------------------------------------
NOV50e ------------------------------------------------------------
NOV50f ------------------------------------------------------------
NOV50g ------------------------------------------------------------
NOV50h ------------------------------------------------------------
NOV50i GGEGDFALLPGGPPGVFFLCVEGPLDRESRDLYELLLVATDAGSPPLSTEETLLLRVADL
NOV50a ------------------------------------------------------------
NOV50b ------------------------------------------------------------
NOV50c ------------------------------------------------------------
NOV50d ------------------------------------------------------------
NOV50e ------------------------------------------------------------
NOV50f ------------------------------------------------------------
NOV50g ------------------------------------------------------------
NOV50h ---------------------------------------------------------GK-
NOV50i NDQPPLFSQQHYKASVSEAAAPGTVVMWVSASDADEAGSDHAWLRYTVVQLSAPCNLGSL
NOV50a ------------------------------------------------------------
NOV50b ------------------------------------------------------------
NOV50c ------------------------------------------------------------
NOV50d ------------------------------------------------------------
NOV50e ------------------------------------------------------------
NOV50f ------------------------------------------------------------
NOV50g ------------------------------------------------------------
NOV50h ------------------------------------------------------------
NOV50i QSKMVHTAECGPSFAIDSESGAISTIRTLDREVQEAVELKVVAQDLGEPPLSATCLVSIT
NOV50a ------------------------------------------------------------
NOV50b ------------------------------------------------------------
NOV50c ------------------------------------------------------------
NOV50d ------------------------------------------------------------
NOV50e ------------------------------------------------------------
NOV50f ------------------------------------------------------------
NOV50g ------------------------------------------------------------
NOV50h --------------------------------NG-QLLYFLLSD----------------
NOV50i VDDVNDNEPIFWRQVYNATIAEHAPVGHCFLQLISAQVASVKIKHKHKEIHEKHNLAYIS
NOV50a ------------------------------------------------------------
NOV50b ------------------------------------------------------------
NOV50c ------------------------------------------------------------
NOV50d ------------------------------------------------------------
NOV50e ------------------------------------------------------------
NOV50f ------------------------------------------------------------
NOV50g ------------------------------------------------------------
NOV50h ----------G------------------------KFFKMNPNTGELINWVALDREHRGH
NOV50i CPAGTIYVITWADGAAAFSGTDFAFSSDELQAFVLKSLFCELGEGELINWVALDREHRGH
NOV50a ------------------------------------------------------------
NOV50b ------------------------------------------------------------
NOV50c ------------------------------------------------------------
NOV50d ------------------------------------------------------------
NOV50e ------------------------------------------------------------
NOV50f ------------------------------------------------------------
NOV50g ------------------------------------------------------------
NOV50h HEMTVLVTDRGSPPRNATMAVYVSVTDINDNRPFFPQCLPGKELHVKVLEGQPVNMLVTT
NOV50i HEMTVLVTDRGSPPRNATMAVYVSVTDINDNRPFFPQCLPGKELHVKVLEGQPVNMLVTT
NOV50a ------------------------------------------------------------
NOV50b ------------------------------------------------------------
NOV50c ------------------------------------------------------------
NOV50d ------------------------------------------------------------
NOV50e ------------------------------------------------------------
NOV50f ------------------------------------------------------------
NOV50g ------------------------------------------------------------
NOV50h VFAKDPDEGNNAEVTYSVSSEDSSDHFKIDANNGEIRTTTILSYDYRPSYRMSVIATDQG
NOV50i VFAKDPDEGNNAEVTYSVSSEDSSDHFKIDANNGEIRTTTILSYDYRPSYRMSVIATDQG
NOV50a ------------------------------------------------------------
NOV50b ------------------------------------------------------------
NOV50c ------------------------------------------------------------
NOV50d ------------------------------------------------------------
NOV50e ------------------------------------------------------------
NOV50f ------------------------------------------------------------
NOV50g ------------------------------------------------------------
NOV50h VPPLQGQAVVNIQEL---------------------------------------------
NOV50i VPPLQGQAVVNIQVIPLSKGRAIMSQNIRHLIIPENLKPTKIMSLIKSSDHLQQHYNGKL
NOV50a ------------------------------------------------------------
NOV50b ------------------------------------------------------------
NOV50c ------------------------------------------------------------
NOV50d ------------------------------------------------------------
NOV50e ------------------------------------------------------------
NOV50f ------------------------------------------------------------
NOV50g ------------------------------------------------------------
NOV50h --------D--------------------YETTSHYLFRVITTDHSKNLSLSSTVFLSID
NOV50i HFSIVADDKDGHFEIDSSTGDLFLSKELDYETTSHYLFRVITTDHSKNLSLSSTVFLSID
NOV50a ------------------------------------------------------------
NOV50b ------------------------------------------------------------
NOV50c ------------------------------------------------------------
NOV50d ------------------------------------------------------------
NOV50e ------------------------------------------------------------
NOV50f ------------------------------------------------------------
NOV50g ------------------------------------------------------------
NOV50h VEDQNDHSPSFQDELIVISVEENVPIGTLVYVFNAKDDDGSFLNSRIQYYIESHNPGTNP
NOV50i VEDQNDHSPSFQDELIVISVEENVPIGTLVYVFNAKDDDGSFLNSRIQYYIESHNPGTNP
NOV50a ------------------------------------------------------------
NOV50b ------------------------------------------------------------
NOV50c ------------------------------------------------------------
NOV50d ------------------------------------------------------------
NOV50e ------------------------------------------------------------
NOV50f ------------------------------------------------------------
NOV50g ------------------------------------------------------------
NOV50h FLIHPSFGTLVTVSRLDRESIPTVILTVTASDQAVNVTDRRLRSLTAQIVILDVNDHNPT
NOV50i FLIHPSFGTLVTVSRLDRESIPTVILTVTASDQAVNVTDRRLRSLTAQIVILDVNDHNPT
NOV50a ------------------------------------------------------------
NOV50b ------------------------------------------------------------
NOV50c ------------------------------------------------------------
NOV50d ------------------------------------------------------------
NOV50e ------------------------------------------------------------
NOV50f ------------------------------------------------------------
NOV50g ------------------------------------------------------------
NOV50h FISFPNAHVKEDVTVGSLVHHITAHDPDEGRNGKVTYSILSGNENMTFMLDESSGLLTTT
NOV50i FISFPNAHVKEDVTVGSLVHHITAHDPDEGRNGKVTYSILSGNENMTFMLDESSGLLTTT
NOV50a ------------------------------------------------------------
NOV50b ------------------------------------------------------------
NOV50c ------------------------------------------------------------
NOV50d ------------------------------------------------------------
NOV50e ------------------------------------------------------------
NOV50f ------------------------------------------------------------
NOV50g ------------------------------------------------------------
NOV50h CPLDYEMKTQHILTVLALDDGTPALSSSQTLTVTVLDVNDEAPVFKQHLYEASVKENQNP
NOV50i CPLDYEMKTQHILTVTALDDGTPALSSSQTLTVTVLDVNDEAPVFKQHLYEASVKENQNP
NOV50a ------------------------------------------------------------
NOV50b ------------------------------------------------------------
NOV50c ------------------------------------------------------------
NOV50d ------------------------------------------------------------
NOV50e ------------------------------------------------------------
NOV50f ------------------------------------------------------------
NOV50g ------------------------------------------------------------
NOV50h GEFVTRVEALDRDSVFLNTRELNMCFLAFYDAVFK----------NGGLSAQAFVRVDLE
NOV50i GEFVTRVEALDRDSGNRLNGDPDRELCAGGNPLGSRAPPGSRTPPEGGLSAQAFVRVDLE
NOV50a ------------------------------------------------------------
NOV50b ------------------------------------------------------------
NOV50c ------------------------------------------------------------
NOV50d ------------------------------------------------------------
NOV50e ------------------------------------------------------------
NOV50f ------------------------------------------------------------
NOV50g ------------------------------------------------------------
NOV50h DVNDNHPVFNPSTYVTSISDETQPGTEIINVLATDQDSGTYGTVAYELIPGNVSSLFTID
NOV50i DVNDNHPVFNPSTYVTSISDETQPGTEIINVLATDQDSGTYGTVAYELIPGNVSSLFTID
NOV50a ------------------------------------------------------------
NOV50b ------------------------------------------------------------
NOV50c ------------------------------------------------------------
NOV50d ------------------------------------------------------------
NOV50e ------------------------------------------------------------
NOV50f ------------------------------------------------------------
NOV50g ------------------------------------------------------------
NOV50h STTGIIYLTLPLSHLESTTLSLNVSAQDGGGLTAVINADVTIHIFQTTLAPAEFERPKYT
NOV50i STTGIIYLTLPLSHLESTTLSLNVSAQDGGGLTAVINADVTIHIFQTTLAPAEFERPKYT
NOV50a ------------------------------------------------------------
NOV50b ------------------------------------------------------------
NOV50c ------------------------------------------------------------
NOV50d ------------------------------------------------------------
NOV50e ------------------------------------------------------------
NOV50f ------------------------------------------------------------
NOV50g ------------------------------------------------------------
NOV50h FLVYEDVPEDSPIGTVKAREPLNPPRSSVIHLQVRVLDANDHSPSFPTLYYQSSVREDAE
NOV50i FLVYEDVPEDSPIGTVKAREPLNPPRSSVIHLQVRVLDANDHSPSFPTLYYQSSVREDAE
NOV50a ------------------------------------------------------------
NOV50b ------------------------------------------------------------
NOV50c ------------------------------------------------------------
NOV50d ------------------------------------------------------------
NOV50e ------------------------------------------------------------
NOV50f ------------------------------------------------------------
NOV50g ------------------------------------------------------------
NOV50h VGTVVLVLSAVDKDEGLNGQTEYFLTDEACGAFTTDPMSGTLKTSNTLDREARSQHTFSA
NOV50i VGTVVLVLSAVDKDEGLNGQTEYFLTDEACGAFTIDPMSGTLKTSNTLDREARSQHTFSA
NOV50a ------------------------------------------------------------
NOV50b ------------------------------------------------------------
NOV50c ------------------------------------------------------------
NOV50d ------------------------------------------------------------
NOV50e ------------------------------------------------------------
NOV50f ------------------------------------------------------------
NOV50g ------------------------------------------------------------
NOV50h VARDCSIQGSRSTTVIIKVYVTDVNDNDPVLEQNPFDVFLSPESPTNQTTVIVRADDLDL
NOV50i VARDCSIQGSRSTTVIIKVYVTDVNDNDPVLEQNPFDVFLSPESPTNQTTVIVRADDLDL
NOV50a ------------------------------------------------------------
NOV50b ------------------------------------------------------------
NOV50c ------------------------------------------------------------
NOV50d ------------------------------------------------------------
NOV50e ------------------------------------------------------------
NOV50f ------------------------------------------------------------
NOV50g ------------------------------------------------------------
NOV50h GPNGTVDSDDSPLLDDFHVHPDTGIIRTARRLDRERRDHYSFVAATLLGAVVQVEIRVND
NOV50i GPNGTVDSDDSPLLDDFNVHPDTGIIRTARRLDRERRDHYSFVAATLLGAVVQVEIRVND
NOV50a ------------------------------------------------------------
NOV50b ------------------------------------------------------------
NOV50c ------------------------------------------------------------
NOV50d ------------------------------------------------------------
NOV50e ------------------------------------------------------------
NOV50f ------------------------------------------------------------
NOV50g ------------------------------------------------------------
N0V50h VNDHSPRFPLDSLQLDVSELSPPGTAFRLPVAHDPDAGLFSTQGYTLVQPSDLPKDPAGP
NOV50i VNDHSPRFPLDSLQLDVSELSPPGTAFRLPVAHDPDAGLFSTQGYTLVQPSDLPKDPAGP
NOV50a ------------------------------------------------------------
NOV50b ------------------------------------------------------------
NOV50c ------------------------------------------------------------
NOV50d ------------------------------------------------------------
NOV50e ------------------------------------------------------------
NOV50f ------------------------------------------------------------
NOV50g ------------------------------------------------------------
NOV50h FFQLRYRTPGPLPSPLLPGSSSPLEPLDLVLLRRLDREEAAAHRLQIEAWDGGRPRRTGL
NOV50i FFQLRYRTPGPLPSPLLPGSSSPLEPLDLVLLRRLDREEAAAHRLQIEAWDGGRPRRTGL
NOV50a ------------------------------------------------------------
NOV50b ------------------------------------------------------------
NOV50c ------------------------------------------------------------
NOV50d ------------------------------------------------------------
NOV50e ------------------------------------------------------------
NOV50f ------------------------------------------------------------
NOV50g ------------------------------------------------------------
NOV50h LSVELRVLDENDNPPVFEQDESRAAVREHAQPGAEVCRVRATARDVGPNGFVRYSVRARQ
NOV50i LSVELRVLDENDNPPVFEQDESRAAVREHAQPGAEVCRVRATARDVGPNGFVRYSVRARQ
NOV50a ------------------------------------------------------------
NOV50b ------------------------------------------------------------
NOV50c ------------------------------------------------------------
NOV50d ------------------------------------------------------------
NOV50e ------------------------------------------------------------
NOV50f ------------------------------------------------------------
NOV50g ------------------------------------------------------------
NOV50h VPGAGSGGGALGDAAYFALVVEARDGGAEHEVAAVRVSIAVLDVNDNRPAIHVLFLTEGG
NOV50i VPGAGSGGGALGDAAYFALVVEARDGGAEHEVAAVRVSIAVLDVNDNRPAIHVLFLTEGG
NOV50a ------------------------------------------------------------
NOV50b ------------------------------------------------------------
NOV50c ------------------------------------------------------------
NOV50d ------------------------------------------------------------
NOV50e ------------------------------------------------------------
NOV50f ------------------------------------------------------------
NOV50g ------------------------------------------------------------
NOV50h VARVSEGARPGDYVARVSVSDAGGDWEKEDEATGELGVTASDADSGLYGFIEYSLYDGFL
NOV50i VARVSEGARPGDYVARVSVSDAGGDWEKEDEATGELGVTASDADSGLYGFIEYSLYDGFL
NOV50a ------------------------------------------------------------
NOV50b ------------------------------------------------------------
NOV50c ------------------------------------------------------------
NOV50d ------------------------------------------------------------
NOV50e ------------------------------------------------------------
NOV50f ------------------------------------------------------------
NOV50g ------------------------------------------------------------
NOV50h SYEAPQAFRIDPHDGQICVSQDIDRERDPATYDLLVEAKDGFEIMPGASFELFEINSDTG
NOV50i SYEAPQAFRIDPHDGQICVSQDIDRERDPATYDLLVEAKDGFEIMPGASFELFEINSDTG
NOV50a ------------------------------------------------------------
NOV50b ------------------------------------------------------------
NOV50c ------------------------------------------------------------
NOV50d ------------------------------------------------------------
NOV50e ------------------------------------------------------------
NOV50f ------------------------------------------------------------
NOV50g ------------------------------------------------------------
NOV50h EVVTTTILDREIQEVFTLRVLVRDGGFPSLSSTTTILCTVEDENDHAPEFIVSSYDIEVL
NOV50i EVVTTTILDREIQEVFTLRVLVRDGGFPSLSSTTTILCTVEDENDHAPEFIVSSYDIEVL
NOV50a ------------------------------------------------------------
NOV50b ------------------------------------------------------------
NOV50c ------------------------------------------------------------
NOV50d ------------------------------------------------------------
NOV50e ------------------------------------------------------------
NOV50f ------------------------------------------------------------
NOV50g ------------------------------------------------------------
NOV50h ENQEPEVVYTVLASDMDAGNNRAVEYHIIDSSEPIFYRISSGDLGGKFSIHPRLGTIRTR
NOV50i ENQEPEVVYTVLASDMDAGNNRAVEYHIIDSSEPIFYRISSGDLGGKFSIHPRLGTIRTR
NOV50a ------------------------------------------------------------
NOV50b ------------------------------------------------------------
NOV50c ------------------------------------------------------------
NOV50d ------------------------------------------------------------
NOV50e ------------------------------------------------------------
NOV50f ------------------------------------------------------------
NOV50g ------------------------------------------------------------
NOV50h KPLDHETQPVVVLTVQAQLGSAPACSSTEVNITVMDVNDNHPAFLRTSDEIRISQTTPPG
NOV50i KPLDHETQPVVVLTVQAQLGSAPACSSTEVNITVMDVNDNHPAFLRTSDEIRISQTTPPG
NOV50a ------------------------------------------------------------
NOV50b ------------------------------------------------------------
NOV50c ------------------------------------------------------------
NOV50d ------------------------------------------------------------
NOV50e ------------------------------------------------------------
NOV50f ------------------------------------------------------------
NOV50g ------------------------------------------------------------
NOV50h TALYLARAEDRDSGRNGLIRYSIASPQPGVFAIDRALGVLFLNGSLGAGEQRELTLTLRA
NOV50i TALYLARAEDRDSGRNGLIRYSIASPQPGVFAIDRALGVLFLNGSLGAGEQRELTLTLRA
NOV50a ------------------------------------------------------------
NOV50b ------------------------------------------------------------
NOV50c ------------------------------------------------------------
NOV50d ------------------------------------------------------------
NOV50e ------------------------------------------------------------
NOV50f ------------------------------------------------------------
NOV50g ------------------------------------------------------------
NOV50h EDQGVHPQAALLVLTVVIEKREHSPSWTFEHLVYQVEVSTSIVTVKAFAPDSIQDSMKYS
NOV50i EDQGVHPQAALLVLTVVIEKREHSPSWTFEHLVYQVEVSTSIVTVKAFAPDSIQDSMKYS
NOV50a ------------------------------------------------------------
NOV50b ------------------------------------------------------------
NOV50c ------------------------------------------------------------
NOV50d ------------------------------------------------------------
NOV50e ------------------------------------------------------------
NOV50f ------------------------------------------------------------
NOV50g ------------------------------------------------------------
NOV50h IFSGNEDGVLSLCSKSGVVNCLASLSHTDFLSLKFESSVKGHQDRDKLQPIHLDDNNSKK
NOV50i IFSGNEDGVLSLCSKSGVVNCLASLSHTDFLSLKFESSVKGHQDRDKLQPIHLDDNNSKK
NOV50a ------------------------------------------------------------
NOV50b ------------------------------------------------------------
NOV50c ------------------------------------------------------------
NOV50d ------------------------------------------------------------
NOV50e ------------------------------------------------------------
NOV50f ------------------------------------------------------------
NOV50g ------------------------------------------------------------
NOV50h LCFTFPRATQALVFTGHCLSDTSLPGWVFATDLDSGLNGLIEYSILSGNQEEAFQIDALS
NOV50i LCFTFPRATQALVFTGHCLSDTSLPGWVFATDLDSGLNGLIEYSILSGNQEEAFQIDALS
NOV50a ------------------LIVQATDKGMPRLSNTTVIKVQVTDTNDNAPAFLPSEAVEIT
NOV50b ----------------------------------------------------------GS
NOV50c ----------------------------------------------------------GS
NOV50d ----------------------------------------------------------GS
NOV50e ------------------------------------------------------------
NOV50f ------------------------------------------------------------
NOV50g ----------------------------------------------------------GS
NOV50h GVITTKAILDYELTSSYSLIVQATDKGMPRLSNTTVIKVQVTDINDNAPAFLPSEAVEIT
NOV50i GVITTKAILDYELTSSYSLIVQATDKGMPRLSNTTVIKVQVTDINDNAPAFLPSEAVEIT
NOV50a EVMTISEDSLPGVIVTHVSVHDVDLNSAFIFSFAKESNPGTKFAIDQNTGVVVLVKTLDF
NOV50b EVMTISEDSLPGVIVTHVSVHDVDLNSAFIFSFAKESNPGTKFAIDQNTGVVVLVKTLDF
NOV50c EVMTISEDSLPGVIVTHVSVHDVDTNSAFIFSFAKESNPGTKFAIDQNTGVVVLVKTLDF
NOV50d EVMTISEDSLPGVIVTHVSVHDVDLNSAFIFSFAKESNPGTKFAIDQNTGVVVLVKTLDF
NOV50e ------------------------------------------------------------
NOV50f EVMTISEDSLPGVIVTHVSVHDVDLNSAFIFSFAKESNPGTKFAIDQNTGVVVLVKTLDF
NOV50g EVMTISEDSLPGVIVTHVSVHDVDLNSAFIFSFAKESNPGTKFAIDQNTGVVVLVKTLDF
NOV50h EVMTISEDSLPGVIVTHVSVHDVDLNSAFIFSFAKESNPGTKFAIDQNTGVVVLVKTLDF
NOV50i EVMTISEDSLPGVIVTHVSVHDVDLNSAFIFSFAKESNPGTKFAIDQNTGVVVLVKTLDF
NOV50a EEMTEYELLIQISDSVHYTEGALVVRVLDVNDNPPVFSQDFYQVTVPESIPVGYSVLTLS
NOV50b EEMTEYELLIQISDSVHYTEGALVVRVLDVNDNPPVFSQDFYQVTVPESIPVGYSVLTLS
NOV50c EEMTEYELLIQISDSVHYTEGALVVRVLDVNDNPPVFSQDFYQVTVPESIPVGYSVLTLS
NOV50d EEMTEYELLIQISDSVHYTEGALVVRVLDVNDNPPVFSQDFYQVTVPESIPVGYSVLTLS
NOV50e --MTEYELLIQISDSVHYTEGALVVRVLDVNDNPPVFSQDFYQVTVPESIPVGYSVLTLS
NOV50f EEMTEYELLIQISDSVHYTEGALVVRVLDVNDNPPVFSQDFYQVTVPESIPVGYSVLTLS
NOV50g EEMTEYELLIQISDSVHYTEGALVVRVLDVNDNPPVFSQDFYQVTVPESIPVGYSVLTLS
NOV50h EEMTEYELLIQISDSVHYTEGALVVRVLDVNDNPPVFSQDFYQVTVPESIPVGYSVLTLS
NOV50i EEMTEYELLIQISDSVHYTEGALVVRVLDVNDNPPVFSQDFYQVTVPESIPVGYSVLTLS
NOV50a ATDLESNENISYRILSSSKEFSIDPKNGTIFTISPVLLLDTISTTRFLVEASDGGNPDPR
NOV50b ATDLESNENISYRILSSSKEFSIDPKNGTIFTISPVLLLDTISTTQFLVEASDGGNPDLR
NOV50c ATDLESNENISYRILSSSKEFSIDPKNGTIFTISPVLLLDTISTTQFLVEASDGGNPDLR
NOV50d ATDLESNENISYRILSSSKEFSIDPKNGTIFTISPVLLLDTISTTQFLVEASDGGNPDLR
NOV50e ATDLESNENISYRILSSSKEFSIDPKNGTIFTISPVLLLDTISTTQFLVEASDGGNPDLR
NOV50f ATDLESNENISYRILSSSKEFSIDPKNGTIFTISPVLLLDTISTTQFLVEASDGGNPDLR
NOV50g ATDLESNENISYRILSSSKEFSIDPKNGTIFTISPVLLLDTISTTQFLVEASDGGNPDLR
NOV50h ATDLESNENISYRILSSSKEFSIDPKNGTIFTISPVLLLDTISTTRFLVEASDGGNPDPR
NOV50i ATDLESNENISYRILSSSKEFSIDPKNGTIFTISPVLLLDTISTTRFLVEASDGGNPDPR
NOV50a ALTLVEIGIEDMNNYAPEFTVKSYNLSLSEDALVGSTLVTFSNIDHDWTRENTYVEYSII
NOV50b ALTLVEIGIEDMNNYAPEFTVKSYNLSLSEDALVGSTLVTFSNIDHDWTRENTYVEYSII
NOV50c ALTLVEIGIEDMNNYAPEFTVKSYNLSLSEDALVGSTLVTFSNIDHDWTRENTYVEYSII
NOV50d ALTLVEIGIEDMNNYAPEFTVKSYNLSLSEDALVGSTLVTFSNIDHDWTRENTYVEYSII
NOV50e ALTLVEIGIEDMNNYAPEFTVKSYNLSLSEDALVGSTLVTFSNIDHDWTRENTYVEYSII
NOV50f ALTLVEIGIEDMNNYAPEFTVKSYNLSLSEDALVGSTLVTFSNIDHDWTRENTYVEYSII
NOV50g ALTLVEIGIEDMNNYAPEFTVKSYNLSLSEDALVGSTLVTFSNIDHDWTRENTYVEYSII
NOV50h ALTLVEIGIEDMNNYAPEFTVKSYNLSLSEDALVGSTLVTFSNIDHDWTRENTYVEYSII
NOV50i ALTLVEIGIEDMNNYAPEFTVKSYNLSLSEDALVGSTLVTFSNIDHDWTRENTYVEYSII
NOV50a SGNSQNNFHVETKFFHSEYPYKQVGYLVLLHSLDREASASHELVILASDSGCPPLSSTAV
NOV50b SGNSQNNFHVETKFFHSEYPYKQVGYLVLLHSLDREASASHELVILASDSGCPPLSSTAV
NOV50c SGNSQNNFHVETKFFHSEYPYKQVGYLVLLHSLDREASASHELVILASDSGCPPLSSTAV
NOV50d SGNSQNNFHVETKFFHSEYPYKQVGYLVLLHSLDREASASHELVILASDSGCPPLSSTAV
NOV50e SGNSQNNFHVETKFFHSEYPYKQVGYLVLLHSLDREASASHELVILASDSGCPPLSSTAV
NOV50f SGNSQNNFHVETKFFHSEYPYKQVGYLVLLHSLDREASASHELVILASDSGCPPLSSTAV
NOV50g SGNSQNNFHVETKFFHSEYPYKQVGYLVLLHSLDREASASHELVILASDSGCPPLSSTAV
NOV50h SGNSQNNFHVETKFFHSEYPYKQVGYLVLLHSLDREASASHELVILASDSGCPPLSSTAV
NOV50i SGNSQNNFHVETKFFHSEYPYKQVGYLVLLHSLDREASASHELVILASDSGCPPLSSTAV
NOV50a ISIQVLDVNDNPPNFSSLSYHTHVKESTPLGSHITVVSANDRDTGSHAEIIYNIISGNEK
NOV50b ISIQVLDVNDNPPNFSSLSYHTHVKESTPLGSHITVVSANDRDTGSHAEIIYNIISGNEK
NOV50c ISIQVLDVNDNPPNFSSLSYHTHVKESTPLGSHITVVSANDRDTGSHAEITYNIISGNEK
NOV50d ISIQVLDVNDNPPNFSSLSYHTHVKESTPLGSHITVVSANDRDTGSHAEIIYNIISGNEK
NOV50e ISIQVLDVNDNPPNFSSLSYHTHVKESTPLGSHITVVSANDRDTGSHAEIIYNIISGNEK
NOV50f ISIQVLDVNDNPPNFSSLSYHTHVKESTPLGSHITVVSANDRDTGSHAEIIYNIISGNEK
NOV50g ISIQVLDVNDNPPNFSSLSYHTHVKESTPLGSHITVVSANDRDTGSHAEIIYNIISGNEK
NOV50h ISIQVLDVNDNPPNFSSLSYHTHVKESTPLGSHITVVSANDRDTGSHAEIIYNIISGNEK
NOV50i ISIQVLDVNDNPPNFSSLSYHTHVKESTPLGSHITVVSANDRDTGSHAETIYNIISGNEK
NOV50a GHFYLEENTGVLYLIKPLDYEKMTKFTLTVQASDAEKKHFSFAVVFVSVLDDNDHAPQFM
NOV50b GHFYLEENTGVLYLIKPLDYEKMTKFTLTVQASDAEKKHFSFAVVFVSVLDDNDHAPQFM
NOV50c GHFYLEENTGVLYLIKPLDYEKMTKFTLTVQASDAEKKHFSFAVVFVSVLDDNDHAPQFM
NOV50d GHFYLEENTGVLYLIKPLDYEKMTKFTLTVQASDAEKKHFSFAVVFVSVLDDNDHAPQFM
NOV50e GHFYLEENTGVLYLIKPLDYEKMTKFTLTVQASDAEKKHFSFAVVFVSVLDDNDHAPQFM
NOV50f GHFYLEENTGVLYLIKPLDYEKMTKFTLTVQASDAEKKHFSFAVVFVSVLDDNDHAPQFM
NOV50g GHFYLEENTGVLYLIKPLDYEKMTKFTLTVQASDAEKKHFSFAVVFVSVLDDNDHAPQFM
NOV50h GHFYLEENTGVLYLIKPLDYEKMTKFTLTVQASDAEKKHFSFAVVFVSVLDDNDHAPQFM
NOV50i GHFYLEENTGVLYLIKPLDYEKMTKFTLTVQASDAEKKHFSFAVVFVSVLDDNDHAPQFM
NOV50a FSSFSCIVPENLPISSTICSINALDFDAGPYGELTYSIVSPCFLTHGMSYDHDLFLIDPL
NOV50b FSSFSCIVPENLPISSTIRSINALDFDAGPYGELTYSIVSPCFLTHGMSYDHDLFLIDPL
NOV50c FSSFSCIVPENLPISSTICSINALDFDAGPYGELTYSIVSPCFLTHGMSYDHDLFLIDPL
NOV50d FSSFSCIVPENLPISSTICSINALDFDAGPYGELTYSIVSPCFLTHGMSYDHDLFLIDPL
NOV50e FSSFSCIVPENLPISSTICSTNALDFDAGPYGELTYSIVSPCFLTHGMSYDHDLFLIDPL
NOV50f FSSFSCIVPENLPISSTICSINALDFDAGPYGELTYSIVSPCFLTHGMSYDHDLFLIDPL
NOV50g FSSFSCIVPENLPISSTICSINALDFDAGPYGELTYSIVSPCFLTHGMSYDHDLFLIDPL
NOV50h FSSFSCIVPENLPISSTICSINALDFDAGPYGELTYSIVSPCFLTHGMSYDHDLFLIDPL
NOV50i FSSFSCIVPENLPISSTICSINALDFDAGPYGELTYSIVSPCFLTHGMSYDHDLFLIDPL
NOV50a TGDIHAKQILDYENGNKYCLTVQAKDKGDATASLVVWVDIEGIDEFEPIFTQDQYFFTLP
NOV50b TGDIHAKQILDYENGNKYCLTVQAKDKGDATASLVVWVDIEGIDEFEPIFTQDQYFFTLP
NOV50c TGDIHAKQILDYENGNKYCLTVQAKDKGDATASLVVWVDIEGIDEFEPIFTQDQYFFTLP
NOV50d TGDIHAKQILDYENGNKYCLTVQAKDKGDATASLVVWVDIEGIDEFEPIFTQDQYFFTLP
NOV50e TGDIHAKQILDYENGNKYCLTVQAKDKGDATASLVVWVDIEGIDEFEPIFTQDQYFFTLP
NOV50f TGDIHAKQILDYENGNKYCLTVQAKDKGDATASLVVWVDIEGIDEFEPIFTQDQYFFTLP
NOV50g TGDIHAKQILDYENGNKYCLTVQAKDKGDATASLVVWVDIEGIDEFEPIFTQDQYFFTLP
NOV50h TGDIHAKQILDYENGNKYCLTVQAKDKGDATASLVVWVDIEGIDEFEPIFTQDQYFFTLP
NOV50i TGDIHAKQILDYENGNKYCLTVQAKDKGDATASLVVWVDIEGIDEFEPIFTQDQYFFTLP
NOV50a EKNKDRQLIGRVEASDADAGIDGVILYSLGTSSPFFSVNRTNGNIYLIRALPLIKSQLNK
NOV50b EKNKDRQLIGRVEASDADAGIDGVILYSLGTSSPFFSVNKTNGNIYLIRALPLIKSQLNK
NOV50c EKNKDRQLIGRVEASDADAGIDGVILYSLGTSSPFFSVNKTNGNIYLIRALPLIKSQLNK
NOV50d EKNKDRQLIGRVEASDADAGIDGVILYSLGTSSPFFSVNKTNGNIYLIRALPLIKSQLNK
NOV50e EKNKDRQLIGRVEASDADAGIDGVILYSLGTSSPSLSVNKTNGNIYLIPALPLIKSQLNK
NOV50f EKNKDRQLIGRVEASDADAGIDGVILYSLGTSSPFFSVNKTNGNTYLIRALPLIKSQLNK
NOV50g EKNKDRQLIGRVEASDADAGIDGVILYSLGTSSPFFSVNKTNGNIYLIRALPLIKSQLNK
NOV50h EKNKDRQLIGRVEASDADAGIDGVILYSLGTSSPFFSVNRTNGNIYLIRALPLIKSQLNK
NOV50i EKNKDRQLIGRVEASDADAGIDGVILYSLGTSSPFFSVNRTNGNIYLIRALPLIKSQLNK
NOV50a EDTLEMKIIAHSPKSDSKFASCTVFVNVSFSSEGTPLAVFASSFSISLVVSFLVFLILIC
NOV50b EDTLEMKIIAHSPKSDSKFASCTVFVNVSFSSEGTPLAVFASSFSISLVVSFLVFLILIC
NOV50c EDTLEMKIIAHSPKSDSKFASCTVFVNVSFSSEGTPLAVFASSFSISLVVSFLVFLTLIC
NOV50d EDTLEMKIIAHSPKSDSKFASCTVFVNVSVD-----------------------------
NOV50e EDTLEMKIIAHSPKSDSKFASCTVFVNVSFSSEGTPLAVFASSFSISLVVSFLVFLTLIC
NOV50f EDTLEMKIIAHSPKSDSKFASCTVFVNVSFSSEGTPLAVFASSFSISLVVSFLVFLILIC
NOV50g EDTLEMKIIAHSPKSDSKFASCTVFVNVSVD-----------------------------
NOV50h EDTLEMKTTAHSPKSDSKFASCTVFVNVSFSSEGTPLAVFASSFSISLVVSFLVFLILIC
NOV50i EDTLEMKITAHSPKSDSKFASCTVFVNVSFSSEGTPLAVFASSFSISLVVSFLVFLILIC
N0V50a ILIVMILRHKQKDTINNYEEKKTSSLDADLRVTRDASVLKAFQKTDDCSNEVVPVDATPE
NOV50b ILIVNILRHKQKDTINNYEEKKTSSLDADLRVTRDASVLKAFQKTDDCSNEVVPVDATPE
NOV50c ILIVMILRHKQKDTINNYEEKKTSSLDADLRVTRDASVLKAFQKTDDCSNEVVPVDATPE
NOV50d ------------------------------------------------------------
NOV50e ILIVMILRHKQKDTINNYEEKKTSSLDADLRVTRDASVLKAFQKTDDCSNEVVPVDATPE
NOV50f ILIVMILRHKQKDTINNYEEKKTSSLDADLRVTRDASVLKAFQKTDDCSNEVVPVDATPE
NOV50g ------------------------------------------------------------
NOV50h ILIVMILRHKQKDTINNYEEKKTSSLDADLRVTRDASVLKAFQKTDDCSNEVVPVDATPE
NOV50i ILIVMILRHKQKDTINNYEEKKTSSLDADLRVTRDASVLKAFQKTDDCSNEVVPVDATPE
NOV50a WLSLISIMEKDIVNLYRYSNSSGHCSVEGETAEDKEIQRINEHPYRKCSDSALSDHESRV
NOV50b WLSLISIMEKDIVNLYRHSNSSGHCSVEGETAEDKEIQRINEHPYRKCSDSALSDHESRV
NOV50c WLSLISIMEKDIVNLYRHSNSSGHCSVEGETAEDKEIQRINEHPYRKCSDSALSDHESRV
NOV50d ------------------------------------------------------------
NOV50e WLSLISIMEKDTVNLYRHSNSSGHCSVEGETAEDKEIQRINEHPYRKCSDSALSDHESRV
NOV50f WLSLISIMEKDIVNLYRHSNSSGHCSVEGETAEDKEIQRINEHPYRKCSDSALSDHESRV
NOV50g ------------------------------------------------------------
NOV50h WLSLISIMEKDIVNLYRYSNSSGHCSVEGETAEDKEIQRINEHPYRKCSDSALSDHESRV
NOV50i WLSLISIMEKDIVNLYRYSNSSGHCSVEGETAEDKEIQRINEHPYRKCSDSALSDHESRV
NOV50a PDSGIPPDSDQLSCLSGETDVMVTAETAEASQTFGEGDQGEGCSTTCAQNNVLPQTVQKR
NOV50b PDSGIPRDSDQLSCLSGETDVMVTAETAEASQTFGEGDQGEGCSTTCAQNNVLPQTVQKR
NOV50c PDSGIPRDSDQLSCLSGETDVMVTAETAEASQTFGEGDQGEGCSTTCAQNNVLPQTVQKR
NOV50d ------------------------------------------------------------
NOV50e PDSGIPRDSDQLSCLSGETDVMVTAETAEASQTFGEGDQGEGCSTTCAQNNVLPQTVQKR
NOV50f PDSGIPRDSDQLSCLSGETDVMVTAETAEASQTFGEGDQGEGCSTTCAQNNVLPQTVQKR
NOV50g ------------------------------------------------------------
NOV50h PDSGIPRDSDQLSCLSGETDVMVTAETAEASQTFGEGDQGEGCSTTCAQNNVLPQTVQKR
NOV50i PDSGIPRDSDQLSCLSGETDVMVTAETAEASQTFGEGDQGEGCSTTCAQNNVLPQTVQKR
NOV50a EAKESILADVRKESVFISGDQEVRCAALSTQTTSDHDGKDNYHWNYLLSWEPKFQPLASV
NOV50b EAKESILADVRKESVFISGDQEVRCAALSTQTTSDHDGKDNYHWNYLLSWEPKFQPLASV
NOV50c EAKESILADVRKESVFISGDQEVRCAALSTQTTSDHDGKDNYHWNYLLSWEPKFQPLASV
NOV50d ------------------------------------------------------------
NOV50e EAKESILADVRKESVFISGDQEVRCAALSTQTTSDHDGKDNYHWNYLLSWEPKFQPLASV
NOV50f EAKESTLADVRKESVFISGDQEVRCAALSTQTTSDHDGKDNYHWNYLLSWEPKFQPLASV
NOV50g ------------------------------------------------------------
NOV50h EAKESILADVRKESVFISGDQEVRCAALSTQTTSDHDGKDNYHWNYLLSWEPKFQPLASV
NOV50i EAKESILADVRKESVFISGDQEVRCAALSTQTTSDHDGKDNYHWNYLLSWEPKFQPLASV
NOV50a FNDIAKLKDEHLHMPGIPKEKKSFVFPPPLITAVAQPGIKAVPPRMPAVNLGQVPPKHPR
NOV50b FNDIAKLKDEHLHMPGIPKEKKSFVFPPPLITAVAQPGIKAVPPRMPAVNLGQVPPKHPR
NOV50c FNDIAKLKDEHLHMPGIPKEKKSFVFPPPLITAVAQPGIKAVPPRMPAVNLGQVPPKHPR
NOV50d ------------------------------------------------------------
NOV50e FNDIAKLKDEHLHNPGIPKEKKSFVFPPPLITAVAQPGIKAVPPRMPAVNLGQVPPKHPR
NOV50f FNDIAKLKDEHLHMPGIPKEKKSFVFPPPLITAVAQPGIKAVPPRMPAVNLGQVPPKHPR
NOV50g ------------------------------------------------------------
NOV50h FNDIAKLKDEHLHMPGIPKEKKSFVFPPPLITAVAQPGIKAVPPRMPAVNLGQVPPKHPR
NOV50i FNDIAKLKDEHLHMPGIPKEKKSFVFPPPLITAVAQPGIKAVPPRNPAVNLGQVPPKHPR
NOV50a SPIPYHLGSLPEGMTPNFSPSLSLLTMQPPALSPLLREGELLGTHISGTCHELKAEDEVQ
NOV50b SPIPYHLGSLPEGMTPNFSPSLSLLTMQPPALSPLLREGELLGTHISGTCHELKAEDEVQ
NOV50c SPIPYHLGSLPEGMTPNFSPSLSLLTMQPPALSPLLREGELLGTHISGTCHELKAEDEVQ
NOV50d ------------------------------------------------------------
NOV50e SPIPYHLGSLPEGMTPNFSPSLSLLTMQPPALSPLLREGELLGTHISGTCHELKAEDEVQ
NOV50f SPIPYHLGSLPEGMTPNFSPSLSLLTMQPPALSPLLREGELLGTHISGTCHELKAEDEVQ
NOV50g ------------------------------------------------------------
NOV50h SPIPYHLGSLPEGMTPNFSPSLSLLTMQPPALSPLLREGELLGTHISGTCHELKAEDEVQ
NOV50i SPIPYHLGSLPEGMTPNFSPSLSLLTMQPPALSPLLREGELLGTHISGTCHELKAEDEVQ
NOV50a I--
NOV50b IVD
NOV50c IVD
NOV50d ---
NOV50e I--
NOV50f I--
NOV50g ---
NOV50h I--
NOV50i I--
NOV50a (SEQ ID NO: 1066)
NOV50b (SEQ ID NO: 1068)
NOV50c (SEQ ID NO: 1070)
NOV50d (SEQ ID NO: 1072)
NOV50e (SEQ ID NO: 1074)
NOV50f (SEQ ID NO: 1076)
NOV50g (SEQ ID NO: 1078)
NOV50h (SEQ ID NO: 1080)
NOV50i (SEQ ID NO: 1082)

[0645] Further analysis of the NOV50a protein yielded the following properties shown in Table 50C.

TABLE 50C
Protein Sequence Properties NOV50a

| | |
|---|---|
| SignalP analysis: | No Known Signal Sequence Predicted |
| PSORT II analysis: | |

| PSG: | a new signal peptide prediction method | |
|---|---|---|
| | N-region: | length 8; pos. chg 1; neg. chg 1 |
| | H-region: | length 3; peak value −4.35 |
| | PSG score: | −8.75 |

| | |
|---|---|
| GvH: | von Heijne's method for signal seq. recognition |
| | GvH score (threshold: −2.1): −9.63 |
| | possible cleavage site: between 38 and 39 |

>>> Seems to have no N-terminal signal peptide

| ALOM: | Klein et al's method for TM region allocation | | |
|---|---|---|---|
| | Init position for calculation: 1 | | |
| | Tentative number of TMS(s) for the threshold 0.5: 1 | | |
| | Number of TMS(s) for threshold 0.5: 1 | | |
| | INTEGRAL | Likelihood = | Transmembrane 690-706 |
| | | −18.15 | |

| | |
|---|---|
| PERIPHERAL | Likelihood = 2.54 (at 195) |

| | |
|---|---|
| | ALOM score: −18.15 (number of TMSs: 1) |
| MTOP: | Prediction of membrane topology (Hartmann et al.) |
| | Center position for calculation: 697 |
| | Charge difference: 3.5 C(2.5)-N(−1.0) |
| | C > N: C-terminal side will be inside |

>>> membrane topology: type 1b (cytoplasmic tail 690 to 1063)

| MITDISC: | discrimination of mitochondrial targeting seq | | | |
|---|---|---|---|---|
| | R content: | 1 | Hyd Moment(75): | 8.18 |
| | Hyd Moment(95): | 10.59 | G content: | 1 |
| | D/E content: | 2 | S/T content: | 5 |

| | |
|---|---|
| | Score: −4.29 |
| Gavel: | prediction of cleavage sites for mitochondrial preseq |
| | R-2 motif at 22 PRL\|SN |

NUCDISC: discrimination of nuclear localization signals

| | |
|---|---|
| | pat4: none |
| | pat7: PKEKKSF (5) at 960 |
| | bipartite: none |
| | content of basic residues: 7.1% |
| | NLS Score: −0.04 |
| KDEL: | ER retention motif in the C-terminus: none |

ER Membrane Retention Signals: none
SKL: peroxisomal targeting signal in the C-terminus: none
PTS2: 2nd peroxisomal targeting signal: none
VAC: possible vacuolar targeting motif: none
RNA-binding motif: none
Actinin-type actin-binding motif:

type 1: none
type 2: none

NMYR: N-myristoylation pattern: none
Prenylation motif: none
memYQRL: transport motif from cell surface to Golgi: none
Tyrosines in the tail: too long tail
Dileucine motif in the tail: found
LL at 929
LL at 1026
LL at 1037
LL at 1043
checking 63 PROSITE DNA binding motifs: none
checking 71 PROSITE ribosomal protein motifs: none
checking 33 PROSITE prokaryotic DNA binding motifs: none

| | |
|---|---|
| NNCN: | Reinhardt's method for Cytoplasmic/Nuclear discrimination |
| | Prediction: cytoplasmic |
| | Reliability: 70.6 |
| COIL: | Lupas's algorithm to detect coiled-coil regions |
| | total: 0 residues |

Final Results (k = 9/23):

```
34.8%: nuclear
26.1%: cytoplasmic
17.4%: mitochondrial
  8.7%: vesicles of secretory system
  4.3%: vacuolar
  4.3%: peroxisomal
  4.3%: endoplasmic reticulum
```

>> prediction for CG58567-01 is nuc (k = 23)

[0646] A search of the NOV50a protein against the Geneseq database, a proprietary database that contains sequences published in patents and patent publication, yielded several homologous proteins shown in Table 50D.

TABLE 50D
Geneseq Results for NOV50a

| | | | Identities/ | | |
|---|---|---|---|---|---|
| | | NOV50a | Similarities | | |
| Geneseq | Protein/Organism/Length | Residues/ | for the | | Expect |
| Identifier | [Patent #, Date] | Match Residues | Matched Region | | Value |
| ABP70112 | Human NOV28c - Homo sapiens, | 1 . . . 1063 | 1063/1063 | (100%) | 0.0 |
| | 3361 aa. [WO200272771-A2, | 2299 . . . 3361 | 1063/1063 | (100%) | |
| | 19-SEP-2002] | | | | |
| ABP70111 | Human NOV28b - Homo sapiens, | 1 . . . 1063 | 1063/1063 | (100%) | 0.0 |
| | 3003 aa. [WO200272771-A2, | 1941 . . . 3003 | 1063/1063 | (100%) | |
| | 19-SEP-2002] | | | | |
| ABP70110 | Human NOV28a - Homo sapiens, | 1 . . . 1063 | 1063/1063 | (100%) | 0.0 |
| | 1063 aa. [WO200272771-A2, | 1 . . . 1063 | 1063/1063 | (100%) | |
| | 19-SEP-2002] | | | | |
| ABP43938 | FLJ20047 fis clone COL00577 - | 105 . . . 1063 | 959/959 | (100%) | 0.0 |
| | Homo sapiens, 959 aa. | 1 . . . 959 | 959/959 | (100%) | |
| | [WO200231111-A2, 18-APR-2002] | | | | |
| AAO26793 | Human cadherin (CAD) protein, SEQ | 1 . . . 1036 | 366/1073 | (34%) | e−148 |
| | ID No 16 - Homo sapiens, 3298 aa. | 2245 . . . 3270 | 543/1073 | (50%) | |
| | [WO200299042-A2, 12-DEC-2002] | | | | |

[0647] In a BLAST search of public sequence databases, the NOV50a protein was found to have homology to the proteins shown in the BLASTP data in Table 50E.

TABLE 50E
Public BLASTP Results for NOV50a

| | | NOV50a | Identities/ | | |
|---|---|---|---|---|---|
| Protein | | Residues/ | Similarities for | | |
| Accession | | Match | the Matched | | Expect |
| Number | Protein/Organism/Length | Residues | Portion | | Value |
| Q9NXU8 | Hypothetical protein FLJ20047 - | 105 . . . 1063 | 959/959 | (100%) | 0.0 |
| | Homo sapiens (Human), 959 aa. | 1 . . . 959 | 959/959 | (100%) | |
| Q9NRU0 | Cadherin-like protein VR8 - Homo | 189 . . . 582 | 391/394 | (99%) | 0.0 |
| | sapiens (Human), 398 aa (fragment). | 5 . . . 398 | 393/394 | (99%) | |
| Q96JQ0 | Protocadherin 16 precursor | 1 . . . 1036 | 366/1073 | (34%) | e−148 |
| | (Cadherin 19) (Cadherin fibroblast | 2245 . . . 3270 | 543/1073 | (50%) | |
| | 1) - Homo sapiens (Human), 3298 aa. | | | | |
| Q24292 | Dachsous protein precursor | 1 . . . 1037 | 328/1165 | (28%) | e−100 |
| | (Adherin) - Drosophila melanogaster | 2343 . . . 3471 | 528/1165 | (45%) | |
| | (Fruit fly), 3503 aa. | | | | |
| Q8AXB7 | Protocadherin - Brachydanio rerio | 3 . . . 605 | 206/615 | (33%) | 3e−77 |
| | (Zebrafish) (Danio rerio), 4610 aa. | 2885 . . . 3471 | 317/615 | (51%) | |

[0648] PFam analysis predicts that the NOV50a protein contains the domains shown in the Table 50F.

TABLE 50F
Domain Analysis of NOV50a

| | | Identities/ | |
|---|---|---|---|
| Pfam | NOV50a | Similarities for | Expect |
| Domain | Match Region | the Matched Region | Value |
| cadherin | 43 . . . 130 | 26/108 (24%) | 1.6e−14 |
| | | 64/108 (59%) | |
| cadherin | 144 . . . 232 | 36/108 (33%) | 2.5e−12 |
| | | 66/108 (61%) | |
| cadherin | 246 . . . 348 | 36/113 (32%) | 2e−15 |
| | | 79/113 (70%) | |
| cadherin | 362 . . . 452 | 35/107 (33%) | 8.4e−24 |
| | | 75/107 (70%) | |
| cadherin | 466 . . . 563 | 33/115 (29%) | 1.1e−11 |
| | | 67/115 (58%) | |
| cadherin | 577 . . . 671 | 26/110 (24%) | 0.17 |
| | | 60/110 (55%) | |

### Example 51

[0649] The NOV51 clone was analyzed, and the nucleotide and encoded polypeptide sequences are shown in Table 51A.

TABLE 51 A
NOV51 Sequence Analysis

| | | |
|---|---|---|
| NOV51 a, CG59534-03 | SEQ ID NO:1083 | 3333 bp |
| DNA Sequence | ORF Start: ATG at 15 | ORF Stop: TAG at 3219 |

GCGCTCCAGACAAGATGGCGCGGCCGGTCCGGGGAGGGCTCGGGGCCCCGCGCCGCTCGCCTTGCCTT
CTCCTTCTCTGGCTGGTTTTGGTTCGGCTGGAGCCGGTGACCGCCGCGGCCGGCCCGCGGGCGCCCTG
CGCGGCCGCCTGCACTTGCGCTGGGGACTCGCTGGACTGCGGTGGGCGCGGGCTGGCTGCGTTGCCCG
GGGACCTGCCCTCCTGGACGCGGAGCCTAAACCTGAGTTACAACAAACTCTCTGAGATTGACCCTGCT
GGTTTTGAGGACTTGCCGAACCTACAGGAAGTGCAGCACAACAAGATTCGCAGCGTGGAGGGGAGCCA
GCTGAAGGCCTACCTTTCCTTAGAAGTGTTAGATCTGAGTTTGAACAACATCACGGAAGTGCGGAACA
CCTGCTTTCCACACGGACCGCCTATAAAGGAGCTCAACCTGGCAGGCAATCGGATTGGCACCCTGGAG
TTGGGAGCATTTGATGGTCTGTCACGGTCGCTGCTAACTCTTCGCCTGAGCAAAAACAGGATCACCCA
GCTTCCTGTAAGAGCATTCAAGCTACCCAGGCTGACACAACTGGACCTCAATCGGAACAGGATTCGGC
TGATAGAGGGCCTCACCTTCCAGGGGCTCAACAGCTTGGAGGTGCTGAAGCTTCAGCGAAACAACATC
AGCAAACTGACAGATGGGGCCTTCTGGGGACTGTCCAAGATGCATGTGCTGCACCTGGAGTACAACAG
ATTCCATCGCTCGCATTCACCGCAAGGGCTGGAGCTTCTGCCAGAAGCTGCATGAGTTGGTCCTGTCC
TTCAACAACCTGACACGGCTGGACGAGGAGAGCCTGGCCGAGCTGAGCAGCCTGAGTGTCCTGCGTCT
CAGCCACAATTCCATCAGCCACATTGCGGAGGGTGCCTTCAAGGGACTCAGGAGCCTGCGAGTCTTGG
ATCTGGACCATAACGAGATTTCGGGCACAATAGAGGACACGAGCGGCGCCTTCTCAGGGCTCGACAGC
CTCAGCAAGCTGACTCTGTTTGGAAACAAGATCAAGTCTGTGGCTAAGAGAGCATTCTCGGGGCTGGA
AGGCCTGGAGCACCTGAACCTTGGAGGGAATGCGATCAGATCTGTCCAGTTTGATGCCTTTGTGAAGA
TGAAGAATCTTAAAGAGCTCCATATCAGCAGCGACAGCTTCCTGTGTGACTGCCAGCTGAAGTGGCTG
CCCCCGTGGCTAATTGGCAGGATGCTGCAGGCCTTTGTGACAGCCACCTGTGCCCACCCAGAATCACT
GAAGGGTCAGAGCATTTTCTCTGTGCCACCAGAGAGTTTCGTGTGCGATGACTTCCTGAAGCCACAGA
TCATCACCCAGCCAGAAACCACCATGGCTATGGTGGGCAAGGACATCCGGTTTACATGCTCAGCAGCC
AGCAGCAGCAGCTCCCCCATGACCTTTGCCTGGAAGAAAGACAATGAAGTCCTGACCAATGCAGACAT
GGAGAACTTTGTCCACGTCCACGCGCAGGACGGGGAAGTGATGGAGTACACCACCATCCTGCACCTCC
GTCAGGTCACTTTCGGGCACGAGGGCCGCTACCAATGTGTCATCACCAACCACTTTGGCTCCACCTAT
TCACATAAGGCCAGGCTCACCGTGAATGTGTTGCCATCATTCACCAAAACGCCCCACGACATAACCAT
CCGGACCACCACCGTGGCCCGCCTCGAATGTGCTGCCACAGGTCACCCAAACCCTCAGATTGCCTGGC
AGAAGGATGGAGGCACGGATTTCCCCGCTGCCCGTGAGCGACGCATGCATGTCATGCCGGATGACGAC
GTGTTTTTCATCACTGATGTGAAAATAGATGACGCAGGGGTTTACAGCTGTACTGCTCAGAACTCAGC
CGGTTCTATTTCAGCTAATGCCACCCTGACTGTCCTAGAGACCCCATCCTTGGTGGTCCCCTTGGAAG
ACCGTGTGGTATCTGTGGGAGAAACAGTGGCCCTCCAATGCAAAGCCACGGGGAACCCTCCGCCCCGC
ATCACCTGGTTCAAGGGGGACCGCCCGCTGAGCCTCACTGAGCGGCACCACCTGACCCCTGACAACCA
GCTCCTGGTGGTTCAGAACGTGGTGGCAGAGGATGCGGGCCGATATACCTGTGAGATGTCCAACACCC
TGGGCACGGAGCGAGCTCACAGCCAGCTGAGCGTCCTGCCCGCAGCAGGCTGCAGGAAGGATGGGACC
ACGGTAGGCATCTTCACCATTGCTGTCGTGAGCAGCATCGTCCTGACGTCACTGGTCTGGGTGTGCAT
CATCTACCAGACCAGGAAGAAGAGTGAAGAGTACAGTGTCACCAACACAGATGAAACCGTCGTGCCAC
CAGATGTTCCAAGCTACCTCTCTTCTCAGGGGACCCTTTCTGACCGACAAGAAACCGTGGTCAGGACC
GAGGGTGGCCCTCAGGCCAATGGGCACATTGAGAGCAATGGTGTGTGTCCAAGAGATGCAAGCCACTT
TCCAGAGCCCGACACTCACAGCGTTGCCTGCAGGCAGCCAAAGCTCTGTGCTGGGTCTGCGTATCACA
AAGAGCCGTGGAAAGCGATGGAGAAAGCTGAAGGGACACCTGGGCCACATAAGATGGAACACGGTGGC
CGGGTCGTATGCAGTGACTGCAACACCGAAGTGGACTGTTACTCCAGGGGACAAGCCTTCCACCCCCA
GCCTGTGTCCAGAGACAGCGCACAGCCAAGTGCGCCAAATGGCCCGGAGCCGGGTGGGAGTGACCAAG
AGCATTCTCCACATCACCAGTGCAGCAGGACTGCCGCTGGGTCCTGCCCCGAGTGCCAAGGGTCGCTC
TACCCCAGTAACCACGATAGAATGCTGACGGCTGTGAAGAAAAAGCCAATGGCATCTCTAGATGGGAA
AGGGGATTCTTCCTGGACTTTAGCAAGGTTGTATCACCCGGACTCCACAGAGCTACAGCCTGCATCTT
CATTAACTTCAGGCAGTCCAGAGCGCGCGGAAGCCCAGTACTTGCTTGTTTCCAATGGCCACCTCCCC
AAAGCATGTGACGCCAGTCCCGAGTCCACGCCACTGACAGGACAGCTCCCCGGGAAACAGAGGGTGCC
ACTGCTGTTGGCACCAAAAAGCTAGGTTTTGTCTACCTCAGTTCTTGTCATACCAATCTCTACGGGAA
AGAGAGGTAGGAGAGGCTGCGAGGAAGCTTGGGTTCAAGCGTCACTCATCTGTACATAGTTGT
AACTCC

| | | | |
|---|---|---|---|
| NOV51a, CG59534-03 | SEQ ID NO:1084 | 1068 aa | MW at 116452.8 kD |
| Protein Sequence | | | |

MARPVRGGLGAPRRSPCLLLLWLVLVRLEPVTAAAGPRAPCAAACTCAGDSLDCGGRGLAALPGDLPS
WTRSLNLSYNKLSEIDPAGFEDLPNLQEVQHNKIRSVEGSQLKAYLSLEVLDLSLNNITEVRNTCFPH
GPPIKELNLAGNRIGTLELGAFDGLSRSLLTLRLSKNRITQLPVRAFKLPRLTQLDLNRNRIRLIEGL
TFQGLNSLEVLKLQRNNISKLTDGAFWGLSKMHVLHLEYNSLVEVNSGSLYGLTALHQLHLSNNSIAR
IHRKGWSFCQKLHELVLSFNNLTRLDEESLAELSSLSVLRLSHNSISHIAEGAFKGLRSLRVLDLDHN
EISGTIEDTSGAFSGLDSLSKLTLFGNKIKSVAKRAFSGLEGLEHLNLGGNAIRSVQFDAFVKMKNLK
ELHISSDSFLCDCQLKWLPPWLIGRMLQAFVTATCANPESLKGQSIFSVPPESFVCDDFLKPQIITQP
ETTMAMVGKDIRFTCSAASSSSSPMTFAWKKDNEVLTNADMENFVHVHAQDGEVMEYTTILHLRQVTF
GHEGRYQCVITNHFGSTYSHKARLTVNVLPSFTKTPHDITIRTTTVARLECAATGHPNPQIAWQKDGG
TDFPAARERRMHVMPDDDVFFITDVKIDDAGVYSCTAQNSAGSISANATLTVLETPSLVVPLEDRVVS
VGETVALQCKATGNPPPRITWFKGDRPLSLTERHHLTPDNQLLVVQNVVAEDAGRYTCEMSNTLGTER
AHSQLSVLPAAGCRKDGTTVGIFTIAVVSSIVLTSLVWVCIIYQTRKKSEEYSVTNTDETVVPPDVPS
YLSSQGTLSDRQETVVRTEGGPQANGHIESNGVCPRDASHFPEPDTHSVACRQPKLCAGSAYHKEPWK
AMEKAEGTPGPHKMEHGGRVVCSDCNTEVDCYSRGQAFHPQPVSPDSAQPSAPNGPEPGGSDQEHSPH
HQCSRTAAGSCPECQGSLYPSNHDRMLTAVKKKPMASLDGKGDSSWTLARLYHPDSTELQPASSLTSG
SPERAEAQYLLVSNGHLPKACDASPESTPLTGQLPGKQRVPLLLAPKS

| | | |
|---|---|---|
| NOV51b, CG59534-01 | SEQ ID NO:1085 | 5101 bp |
| DNA Sequence | ORF Start: ATG at 77 | ORF Stop: TAG at 3308 |

ATCCTCCTACCTCAGTCTACTGAGTAGCTAGGACTACAGGCATGTGCCACCACACCTGGCTAGTTTTT
ATTTTTTGATGAGATGGGATCTTGCTGTGTTGCCCAGACTGGTCTTGATCTCCTGGGCTCAAGTGATC
CTCCTGCCTTGGCCTGCGGCCGCCTGCACTTGCGCTGGGGACTCGCTGGACTGCGGTGGGCGCGGGCT
GGCTGCGTTGCCCGGGGACCTGCCCTCCTGGACGCGGAGCCTAAACCTGAGTTACAACAAACTCTCTG
AGATTGACCCTGCTGGTTTTGAGGACTTGCCGAACCTACAGGAAGTGTACCTCAATAATAATGAGTTG
TCGCAGCGTGGAGGGGAGCCAGCTGAAGGCCTACCTTTCCTTAGAAGTGTTAGATCTGAGTTTGAACA
ACATCACGGAAGTGCGGAACACCTGCTTTCCACACGGACCGCCTATAAAGGAGCTGAACCTGGCAGGC
AATCGGATTGGCACCCTGGAGTTGGGAGCATTTGATGGTCTGTCACGGTCGCTGCTAACTCTTCGCCT
GAGCAAAAACAGGATCACCCAGCTTCCTGTAAGAGCATTCAAGCTACCCAGGCTGACACAACTGGACC
TCAATCGGAACAGGATTCGGCTGATAGAGGGCCTCACCTTCCAGGGGCTCAACAGCTTGGAGGTGCTG
AAGCTTCAGCGAAACAACATCAGCAAACTGACAGATGGGGCCTTCTGGGGACTGTCCAAGATGCATGT
GCTGCACCTGGAGTACAACAGCCTGGTAGAAGTGAACAGCGGCTCGCTCTACGGCCTCACGGCCCTGC
ATCAGCTCCACCTCAGCAACAATTCCATCGCTCGCATTCACCGCAAGGGCTGGAGCTTCTGCCAGAAG
CTGCATGAGTTGGTCCTGTCCTTCAACAACCTGACACGGCTGGACGAGGAGAGCCTGGCCGAGCTGAG
CAGCCTGAGTGTCCTGCGTCTCAGCCACAATTCCATCAGCCACATTGCGGAGGGTGCCTTCAAGGGAC
TCAGGAGCCTGCGAGTCTTGGATCTGGACCATAACGAGATTTCGGGCACAATAGAGGACACGAGCGGC
GCCTTCTCAGGGCTCGACAGCCTCAGCAAGCTGACTCTGTTTGGAAACAAGATCAAGTCTGTGGCTAA
GAGAGCATTCTCGGGGCTGGAAGGCCTGGAGCACCTGAACCTTGGAGGGAATGCGATCAGATCTGTCC
AGTTTGATGCCTTTGTGAAGATGAAGAATCTTAAAGAGCTCCATATCAGCAGCGACAGCTTCCTGTGT
GACTGCCAGCTGAAGTGGCTGCCCCCGTGGCTAATTGGCAGGATGCTGCAGGCCTTTGTGACAGCCAC
CTGTGCCCACCCAGAATCACTGAAGGGTCAGAGCATTTTCTCTGTGCCACCAGAGAGTTTCGTGTGCG
ATGACTTCCTGAAGCCACAGATCATCACCCAGCCAGAAACCACCATGGCTATGGTGGGCAAGGACATC
CGGTTTACATGCTCAGCAGCCAGCAGCAGCAGCTCCCCCATGACCTTTGCCTGGAAGAAAGACAATGA
AGTCCTGACCAATGCAGACATGGAGAACTTTGTCCACGTCCACGCGCAGGACGGGGAAGTGATGGAGT
ACACCACCATCCTGCACCTCCGTCAGGTCACTTTCGGGCACGAGGGCCGCTACCAATGTGTCATCACC
AACCACTTTGGCTCCACCTATTCACATAAGGCCAGGCTCACCGTGAATGTGTTGCCATCATTCACCAA
AACGCCCCACGACATAACCATCCGGACCACCACCATGGCCCGCCTCGAATGTGCTGCCACAGGTCACC
CAAACCCTCAGATTGCCTGGCAGAAGGATGGAGGCACGGATTTCCCCGCTGCCCGTGAGCGACGCATG
CATGTCATGCCGGATGACGACGTGTTTTTCATCACTGATGTGAAAATAGATGACGCAGGGGTTTACAG
CTGTACTGCTCAGAACTCAGCCGGTTCTATTTCAGCTAATGCCACCCTGACTGTCCTAGAGACCCCAT
CCTTGGTGGTCCCCTTGGAAGACCGTGTGGTATCTGTGGGAGAAACAGTGGCCCTCCAATGCAAAGCC
ACGGGGAACCCTCCGCCCCGCATCACCTGGTTCAAGGGGGACCGCCCGCTGAGCCTCACTGAGCGGCA
CCACCTGACCCCTGACAACCAGCTCCTGGTGGTTCAGAACGTGGTGGCAGAGGATGCGGGCCGATATA
CCTGTGAGATGTCCAACACCCTGGGCACGGAGCGAGCTCACAGCCAGCTGAGCGTCCTGCCCGCAGCA
GGCTGCAGGAAGGATGGGACCACGGTAGGCATCTTCACCATTGCTGTCGTGAGCAGCATCGTCCTGAC
GTCACTGGTCTGGGTGTGCATCATCTACCAGACCAGGAAGAAGAGTGAAGAGTACAGTGTCACCAACA
CAGATGAAACCGTCGTGCCACCAGATGTTCCAAGCTACCTCTCTTCTCAGGGGACCCTTTCTGACCGA
CAAGAAACCGTGGTCAGGACCGAGGGTGGCCCTCAGGCCAATGGGCACATTGAGAGCAATGGTGTGTG
TCCAAGAGATGCAAGCCACTTTCCAGAGCCCGACACTCACAGCGTTGCCTGCAGGCAGCCAAAGCTCT
GTGCTGGGTCTGCGTATCACAAAGAGCCGTGGAAAGCGATGGAGAAAGCTGAAGGGACACCTGGGCCA
CATAAGATGGAACACGGTGGCCGGGTCGTATGCAGTGACTGCAACACCGAAGTGGACTGTTACTCCAG
GGGACAAGCCTTCCACCCCCAGCCTGTGTCCAGAGACAGCGCACAGCCAAGTGCGCCAAATGGCCCGG
AGCCGGGTGGGAGTGACCAAGAGCATTCTCCACATCACCAGTGCAGCAGGACTGCCGCTGGGTCCTGC
CCCGAGTGCCAAGGGTCGCTCTACCCCAGTAACCACGATAGAATGCTGACGGCTGTGAAGAAAAAGCC
AATGGCATCTCTAGATGGGAAAGGGGATTCTTCCTGGACTTTAGCAAGGTTGTATCACCCGGACTCCA
CAGAGCTACAGCCTGCATCTTCATTAACTTCAGGCAGTCCAGAGCGCGCGGAAGCCCAGTACTTGCTT
GTTTCCAATGGCCACCTCCCCAAAGCATGTGACGCCAGTCCCGAGTCCACGCCACTGACAGGACAGCT
CCCCGGGAAACAGAGGGTGCCACTGCTGTTGGCACCAAAAAGCTAGGTTTTGTCTACCTCAGTTCTTG
TCATACCAATCTCTACGGGAAAGAGAGGTAGGAGAGGCTGCGAGGAAGCTTGGGTTCAAGCGTCACTC
ATCTGTACATAGTTGTAACTCCCATGTGGAGTATCAGTCGCTCACAGGACTTGGATCTGAAGCACAGT
AAACGCAAGAGGGGATTTGTGTACAAAAGGCAAAAAAAAGTATTTGATATCATTGTACATAAGAGTTT
TCAGAGATTTCATATATATCTTTTACAGAGGCTATTTTAATCTTTAGTGCATGGTTAACAGAAAAAAA
TTATACAATTTTGACAATATTATTTTTCGTATCAGGTTGCTGTTTAATTTTGGAGGGGGTGGGGAAAT
AGTTCTGGTGCCTTAACGCATGGCTGGAATTTATAGAGGCTACAACCACATTTGTTCACAGGAGTTTT
TGGTGCGGGGTGGGAAGGATGGAAGGCCTTGGATTTATATTGCACTTCATAGACCCCTAGGCTGCTGT
GCGGTGGGACTCCACATGCGCCGGAAGGAGCTTCAGGTGAGCACTGCTCATGTGTGGATGCCCCTGCA
ACAGGCTTCCCTGTCTGTAGAGCCAGGGGTGCAAGTGCCATCCACACTTGCAGTGAATGGCTTTTCCT
TTTAGGTTTAAGTCCTGTCTGTCTGTAAGGCGTAGAATCTGTCCGTCTGTAAGGCGTAGAATGAGGGT
TGTTAATCCATCACAAGCAAAAGGTCAGAACAGTTAAACACTGCCTTTCCTCCTCCTCTTATTTTATG
ATAAAAGCAAATGTGGCCTTCTCAGTATCATTCGATTGCTATTTGAGACTTTTAAATTAAGGTAAAGG
CTGCTGGTGTTGGTACCTGTGGATTTTTCTATACTGATGTTTTCGTTTTGCCAATATAATGAGTATTA
CATTGGCCTTGGGGGACAGAAAGGAGGAAGTTCTGACTTTTCAGGGCTACCTTATTTCTACTAAGGAC
CCAGAGCAGGCCTGTCCATGCCATTCCTTCGCACAGATGAAACTGAGCTGGGACTGGAAAGGACAGCC
CTTGACCTGGGTTCTGGGTATAATTTGCACTTTTGAGACTGGTAGCTAACCATCTTATGAGTGCCAAT
GTGTCATTTAGTAAAACTTAAATAGAAACAAGGTCCTTCAAATGTTCCTTTGGCCAAAAGCTGAAGGG
AGTTACTGAGAAAATAGTTAACAATTACTGTCAGGTGTCATCACTGTTCAAAAGGTAAGCACATTTAG
AATTTTGTTCTTGACAGTTAACTGACTAATCTTACTTCCACAAAATATGTGAATTTGCTGCTTCTGAG
AGGCAATGTGAAAGAGGGAGTATTACTTTTATGTACAAAGTTATTTATTTATAGAAATTTTGGTACAG
TGTACATTGAAAACCATGTAAAATATTGAAGTGTCTAACAAATGGCATTGAAGTGTCTTTAATAAAGG
TTCATTTATAAATGTCAGTATAGTTGGTGGTCCTTCTTTTACAAACGCAGTCATTCTGCCTTTAATTA
TCTTCCCCCAAAAAAGAAAAAAAAAATAGGCGAAGCAAAATCACATACTGTTTGTTTGCTCCAGGGCA
GACAACACTGCTAGATTCCTGACATTTTGTTTTGAATTTTTCTACACCTGGAGCTTGTTAGTCAAGGT
CTAAAATCCCTAAGTGTGGTGACCTTTCCATTTCATCCTGCCTTTTCAAAGCTGGCCCAGGCCCTCCT
TTCAGTCTGACATGAGAATGGCGAGAATGGCTCACCCACCGTGCCCTCCTGCACGAAGCCAG
CTGGGCC

| | | | |
|---|---|---|---|
| NOV51b, CG59534-01 | SEQ ID NO:1086 | 1077 aa | MW at 117735.2 kD |
| Protein Sequence | | | |

MRWDLAVLPRLVLISWAQVILLPWPAAACTCAGDSLDCGGRGLAALPGDLPSWTRSLNLSYNKLSEID
PAGFEDLPNLQEVYLNNNELTAVPSLGAASSHVVSLFLQHNKIRSVEGSQLKAYLSLEVLDLSLNNIT
EVRNTCFPHGPPIKELNLAGNRIGTLELGAFDGLSRSLLTLRLSKNRITQLPVRAFKLPRLTQLDLNR
NRIRLIEGLTFQGLNSLEVLKLQRNNISKLTDGAFWGLSKNHVLHLEYNSLVEVNSGSLYGLTALHQL
HLSNNSIARIHRKGWSFCQKLHELVLSFNNLTRLDEESLAELSSLSVLRLSHNSISHIAEGAFKGLRS
LRVLDLDHNEISGTIEDTSGAFSGLDSLSKLTLFGNKIKSVAKRAFSGLEGLEHLNLGGNAIRSVQFD
AFVKMKNLKELHISSDSFLCDCQLKWLPPWLIGRMLQAFVTATCAHPESLKGQSIFSVPPESFVCDDF
LKPQIITQPETTMAMVGKDIRFTCSAASSSSSPMTFAWKKDNEVLTNADMENFVHVHAQDGEVMEYTT
ILHLRQVTFGHEGRYQCVITNHFGSTYSHKARLTVNVLPSFTKTPHDITIRTTTMARLECAATGHPNP
QIAWQKDGGTDFPAARERRMHVMPDDDVFFITDVKIDDAGVYSCTAQNSAGSISANATLTVLETPSLV
VPLEDRVVSVGETVALQCKATGNPPPRITWFKGDRPLSLTERHHLTPDNQLLVVQNVVAEDAGRYTCE
MSNTLGTERAHSQLSVLPAAGCRKDGTTVGIFTIAVVSSIVLTSLVWVCIIYQTRKKSEEYSVTNTDE
TVVPPDVPSYLSSQGTLSDRQETVVRTEGGPQANGHIESNGVCPRDASHFPEPDTHSVACRQPKLCAG
SAYHKEPWKAMEKAEGTPGPHKMEHGGRVVCSDCNTEVDCYSRGQAFHPQPVSRDSAQPSAPNGPEPG
GSDQEHSPHHQCSRTAAGSCPECQGSLYPSNHDRMLTAVKKKPMASLDGKGDSSWTLARLYHPDSTEL
QPASSLTSGSPERAEAQYLLVSNGHLPKACDASPESTPLTGQLPGKQRVPLLLAPKS

| | | |
|---|---|---|
| NOV51c, CG59534-02 | SEQ ID NO:1087 | 4762 bp |
| DNA Sequence | ORF Start: ATG at 15 | ORF Stop: TAG at 3294 |

GCGCTCCAGACAAGATGGCGCGGCCGGTCCGGGGAGGGCTCGGGGCCCCGCGCCGCTCGCCTTGCCTT
CTCCTTCTCTGGCTGGTTTTGGTTCGGCTGGAGCCGGTGACCGCCGCGGCCGGCCCGCGGGCGCCCTG
CGCGGCCGCCTGCACTTGCGCTGGGGACTCGCTGGACTGCGGTGGGCGCGGGCTGGCTGCGTTGCCCG
GGGACCTGCCCTCCTGGACGCGGAGCCTAAACCTGAGTTACAACAAACTCTCTGAGATTGACCCTGCT
GGTTTTGAGGACTTGCCGAACCTACAGGAAGTGTACCTCAATAATAATGAGTTGACAGCGGTACCATC
CCTGGGCGCTGCTTCATCACATGTCGTCTCTCTCTTTCTGCAGCACAACAAGATTCGCAGCGTGGAGG
GGAGCCAGCTGAAGGCCTACCTTTCCTTAGAAGTGTTAGATCTGAGTTTGAACAACATCACGGAAGTG
CGGAACACCTGCTTTCCACACGGACCGCCTATAAAGGAGCTCAACCTGGCAGGCAATCGGATTGGCAC
CCTGGAGTTGGGAGCATTTGATGGTCTGTCACGGTCGCTGCTAACTCTTCGCCTGAGCAAAAACAGGA
TCACCCAGCTTCCTGTAAGAGCATTCAAGCTACCCAGGCTGACACAACTGGACCTCAATCGGAACAGG
ATTCGGCTGATAGAGGGCCTCACCTTCCAGGGGCTCAACAGCTTGGAGGTGCTGAAGCTTCAGCGAAA
CAACATCAGCAAACTGACAGATGGGGCCTTCTGGGGACTGTCCAAGATGCATGTGCTGCACCTGGAGT
ACAACAGCCTGGTAGAAGTGAACAGCGGCTCGCTCTACGGCCTCACGGCCCTGCATCAGCTCCACCTC
AGCAACAATTCCATCGCTCGCATTCACCGCAAGGGCTGGAGCTTCTGCCAGAAGCTGCATGAGTTGGT
CCTGTCCTTCAACAACCTGACACGGCTGGACGAGGAGAGCCTGGCCGAGCTGAGCAGCCTGAGTGTCC
TGCGTCTCAGCCACAATTCCATCAGCCACATTGCGGAGGGTGCCTTCAAGGGACTCAGGAGCCTGCGA
GTCTTGGATCTGGACCATAACGAGATTTCGGGCACAATAGAGGACACGAGCGGCGCCTTCTCAGGGCT
CGACAGCCTCAGCAAGCTGACTCTGTTTGGAAACAAGATCAAGTCTGTGGCTAAGAGAGCATTCTCGG
GGCTGGAAGGCCTGGAGCACCTGAACCTTGGAGGGAATGCGATCAGATCTGTCCAGTTTGATGCCTTT
GTGAAGATGAAGAATCTTAAAGAGCTCCATATCAGCAGCGACAGCTTCCTGTGTGACTGCCAGCTGAA
GTGGCTGCCCCCGTGGCTAATTGGCAGGATGCTGCAGGCCTTTGTGACAGCCACCTGTGCCCACCCAG
AATCACTGAAGGGTCAGAGCATTTTCTCTGTGCCACCAGAGAGTTTCGTGTGCGATGACTTCCTGAAG
CCACAGATCATCACCCAGCCAGAAACCACCATGGCTATGGTGGGCAAGGACATCCGGTTTACATGCTC
AGCAGCCAGCAGCAGCAGCTCCCCCATGACCTTTGCCTGGAAGAAAGACAATGAAGTCCTGACCAATG
CAGACATGGAGAACTTTGTCCACGTCCACGCGCAGGACGGGGAAGTGATGGAGTACACCACCATCCTG
CACCTCCGTCAGGTCACTTTCGGGCACGAGGGCCGCTACCAATGTGTCATCACCAACCACTTTGGCTC
CACCTATTCACATAAGGCCAGGCTCACCGTGAATGTGTTGCCATCATTCACCAAAACGCCCCACGACA
TAACCATCCGGACCACCACCGTGGCCCGCCTCGAATGTGCTGCCACAGGTCACCCAAACCCTCAGATT
GCCTGGCAGAAGGATGGAGGCACGGATTTCCCCGCTGCCCGTGAGCGACGCATGCATGTCATGCCGGA
TGACGACGTGTTTTTCATCACTGATGTGAAAATAGATGACGCAGGGGTTTACAGCTGTACTGCTCAGA
ACTCAGCCGGTTCTATTTCAGCTAATGCCACCCTGACTGTCCTAGAGACCCCATCCTTGGTGGTCCCC
TTGGAAGACCGTGTGGTATCTGTGGGAGAAACAGTGGCCCTCCAATGCAAAGCCACGGGGAACCCTCC
GCCCCGCATCACCTGGTTCAAGGGGGACCGCCCGCTGAGCCTCACTGAGCGGCACCACCTGACCCCTG
ACAACCAGCTCCTGGTGGTTCAGAACGTGGTGGCAGAGGATGCGGGCCGATATACCTGTGAGATGTCC
AACACCCTGGGCACGGAGCGAGCTCACAGCCAGCTGAGCGTCCTGCCCGCAGCAGGCTGCAGGAAGGA
TGGGACCACGGTAGGCATCTTCACCATTGCTGTCGTGAGCAGCATCGTCCTGACGTCACTGGTCTGGG
TGTGCATCATCTACCAGACCAGGAAGAAGAGTGAAGAGTACAGTGTCACCAACACAGATGAAACCGTC
GTGCCACCAGATGTTCCAAGCTACCTCTCTTCTCAGGGGACCCTTTCTGACCGACAAGAAACCGTGGT
CAGGACCGAGGGTGGCCCTCAGGCCAATGGGCACATTGAGAGCAATGGTGTGTGTCCAAGAGATGCAA
GCCACTTTCCAGAGCCCGACACTCACAGCGTTGCCTGCAGGCAGCCAAAGCTCTGTGCTGGGTCTGCG
TATCACAAAGAGCCGTGGAAAGCGATGGAGAAAGCTGAAGGGACACCTGGGCCACATAAGATGGAACA
CGGTGGCCGGGTCGTATGCAGTGACTGCAACACCGAAGTGGACTGTTACTCCAGGGGACAAGCCTTCC
ACCCCCAGCCTGTGTCCAGAGACAGCGCACAGCCAAGTGCGCCAAATGGCCCGGAGCCGGGTGGGAGT
GACCAAGAGCATTCTCCACATCACCAGTGCAGCAGGACTGCCGCTGGGTCCTGCCCCGAGTGCCAAGG
GTCGCTCTACCCCAGTAACCACGATAGAATGCTGACGGCTGTGAAGAAAAAGCCAATGGCATCTCTAG
ATGGGAAAGGGGATTCTTCCTGGACTTTAGCAAGGTTGTATCACCCGGACTCCACAGAGCTACAGCCT
GCATCTTCATTAACTTCAGGCAGTCCAGAGCGCGCGGAAGCCCAGTACTTGCTTGTTTCCAATGGCCA
CCTCCCCAAAGCATGTGACGCCAGTCCCGAGTCCACGCCACTGACAGGACAGCTCCCCGGGAAACAGA
GGGTGCCACTGCTGTTGGCACCAAAAAGCTAGGTTTTGTCTACCTCAGTTCTTGTCATACCAATCTCT
ACGGGAAAGAGAGGTAGGAGAGGCTGCGAGGAAGCTTGGGTTCAAGCGTCACTCATCTGTACATAGTT
GTAACTCCCATGTGGAGTATCAGTCGCTCACAGGACTTGGATCTGAAGCACAGTAAACGCAAGAGGGG
ATTTGTGTACAAAAGGCAAAAAAAGTATTTGATATCATTGTACATAAGAGTTTTCAGAGATTTCATAT
ATATCTTTTACAGAGGCTATTTTAATCTTTAGTGCATGGTTAACAGAAAAAAATTATACAATTTTGAC
AATATTATTTTTCGTATCAGGTTGCTGTTTAATTTTGGAGGGGGTGGGGAAATAGTTCTGGTGCCTTA
ACGCATGGCTGGAATTTATAGAGGCTACAACCACATTTGTTCACAGGAGTTTTTGGTGCGGGGTGGGA
AGGATGGAAGGCCTTGGATTTATATTGCACTTCATAGACCCCTAGGCTGCTGTGCGGTGGGACTCCAC
ATGCGCCGGAAGGAGCTTCAGGTGAGCACTGCTCATGTGTGGATGCCCCTGCAACAGGCTTCCCTGTC
TGTAGAGCCAGGGGTGCAAGTGCCATCCACACTTGCAGTGAATGGCTTTTCCTTTTAGGTTTAAGTCC
TGTCTGTCTGTAAGGCGTAGAATCTGTCCGTCTGTAAGGCGTAGAATGAGGGTTGTTAATCCATCACA
AGCAAAAGGTCAGAACAGTTAAACACTGCCTTTCCTCCTCCTCTTATTTTATGATAAAAGCAAATGTG
GCCTTCTCAGTATCATTCGATTGCTATTTGAGACTTTTAAATTAAGGTAAAGGCTGCTGGTGTTGGTA
CCTGTGGATTTTTCTATACTGATGTTTTCGTTTTGCCAATATAATGAGTATTACATTGGCCTTGGGGG
ACAGAAAGGAGGAAGTTCTGACTTTTCAGGGCTACCTTATTTCTACTAAGGACCCAGAGCAGGCCTGT
CCATGCCATTCCTTCGCACAGATGAAACTGAGCTGGGACTGGAAAGGACAGCCCTTGACCTGGGTTCT
GGGTATAATTTGCACTTTTGAGACTGGTAGCTAACCATCTTATGAGTGCCAATGTGTCATTTAGTAAA
ACTTAAATAGAAACAAGGTCCTTCAAATGTTCCTTTGGCCAAAAGCTGAAGGGAGTTACTGAGAAAAT
AGTTAACAATTACTGTCAGGTGTCATCACTGTTCAAAAGGTAAGCACATTTAGAATTTTGTTCTTGAC
AGTTAACTGACTAATCTTACTTCCACAAAATATGTGAATTTGCTGCTTCTGAGAGGCAATGTGAAAGA
GGGAGTATTACTTTTATGTACAAAGTTATTTATTTATAGAAATTTTGGTACAGTGTACATTGAAAACC
ATGTAAAATATTGAAGTGTCTAACAAATGGCATTGAAGTGTCTTTAATAAAGGTTCATTTAT
AAATGTCA

| | | | |
|---|---|---|---|
| NOV51c, CG59534-02 | SEQ ID NO:1088 | 1093 aa | MW at 119051.7 kD |
| Protein Sequence | | | |

MARPVRGGLGAPRRSPCLLLLWLVLVRLEPVTAAAGPRAPCAAACTCAGDSLDCGGRGLAALPGDLPS
WTRSLNLSYNKLSEIDPAGFEDLPNLQEVYLNNNELTAVPSLGAASSHVVSLFLQHNKIRSVEGSQLK
AYLSLEVLDLSLNNITEVRNTCFPHGPPIKELNLAGNRIGTLELGAFDGLSRSLLTLRLSKNRITQLP
VEAFKLPRLTQLDLNRNRIRLIEGLTFQGLNSLEVLKLQRNNISKLTDGAFWGLSKMHVLHLEYNSLV
EVNSGSLYGLTALHQLHLSNNSIARIHRKGWSFCQKLHELVLSFNNLTRLDEESLAELSSLSVLRLSH
NSISHIAEGAFKGLRSLRVLDLDHNEISGTIEDTSGAFSGLDSLSKLTLFGNKIKSVAKRAFSGLEGL
EHLNLGGNAIRSVQFDAFVKMKNLKELHISSDSFLCDCQLKWLPPWLIGRMLQAFVTATCAHPESLKG
QSIFSVPPESFVCDDFLKPQIITQPETTMAMVGKDIRFTCSAASSSSSPMTFAWKKDNEVLTNADMEN
FVHVHAQDGEVMEYTTILHLRQVTFGHEGRYQCVITNHFGSTYSHKAPLTVNVLPSFTKTPHDITIRT
TTVARLECAATGHPNPQIAWQKDGGTDFPAARERRMHVMPDDDVFFITDVKIDDAGVYSCTAQNSAGS
ISANATLTVLETPSLVVPLEDRVVSVGETVALQCKATGNPPPRITWFKGDRPLSLTERHHLTPDNQLL
VVQNVVAEDAGRYTCEMSNTLGTERAHSQLSVLPAAGCRKDGTTVGIFTIAVVSSIVLTSLVWVCIIY
QTRKKSEEYSVTNTDETVVPPDVPSYLSSQGTLSDRQETVVRTEGGPQANGHIESNGVCPRDASHFPE
PDTHSVACRQPKLCAGSAYHKEPWKAMEKAEGTPGPHKMEHGGRVVCSDCNTEVDCYSRGQAFHPQPV
SRDSAQPSAPNGPEPGGSDQEHSPHHQCSRTAAGSCPECQGSLYPSNHDRMLTAVKKKPMASLDGKGD
SSWTLARLYHPDSTELQPASSLTSGSPERAEAQYLLVSNGHLPKACDASPESTPLTGQLPGKQRVPLL
ILAPKS

| | | |
|---|---|---|
| NOV51d, SNP13377255 of | SEQ ID NO:1089 | 3333 bp |
| CG59534-03, DNA Sequence | ORF Start: ATG at 15 | ORF Stop: TAG at 3219 |
| | SNP Pos: 1912 | SNP Change: T to C |

GCGCTCCAGACAAGATGGCGCGGCCGGTCCGGGGAGGGCTCGGGGCCCCGCGCCGCTCGCCTTGCCTT
CTCCTTCTCTGGCTGGTTTTGGTTCGGCTGGAGCCGGTGACCGCCGCGGCCGGCCCGCGGGCGCCCTG
CGCGGCCGCCTGCACTTGCGCTGGGGACTCGCTGGACTGCGGTGGGCGCGGGCTGGCTGCGTTGCCCG
GGGACCTGCCCTCCTGGACGCGGAGCCTAAACCTGAGTTACAACAAACTCTCTGAGATTGACCCTGCT
GGTTTTGAGGACTTGCCGAACCTACAGGAAGTGCAGCACAACAAGATTCGCAGCGTGGAGGGGAGCCA
GCTGAAGGCCTACCTTTCCTTAGAAGTGTTAGATCTGAGTTTGAACAACATCACGGAAGTGCGGAACA
CCTGCTTTCCACACGGACCGCCTATAAAGGAGCTCAACCTGGCAGGCAATCGGATTGGCACCCTGGAG
TTGGGAGCATTTGATGGTCTGTCACGGTCGCTGCTAACTCTTCGCCTGAGCAAAAACAGGATCACCCA
GCTTCCTGTAAGAGCATTCAAGCTACCCAGGCTGACACAACTGGACCTCAATCGGAACAGGATTCGGC
TGATAGAGGGCCTCACCTTCCAGGGGCTCAACAGCTTGGAGGTGCTGAAGCTTCAGCGAAACAACATC
AGCAAACTGACAGATGGGGCCTTCTGGGGACTGTCCAAGATGCATGTGCTGCACCTGGAGTACAACAG
CCTGGTAGAAGTGAACAGCGGCTCGCTCTACGGCCTCACGGCCCTGCATCAGCTCCACCTCAGCAACA
ATTCCATCGCTCGCATTCACCGCAAGGGCTGGAGCTTCTGCCAGAAGCTGCATGAGTTGGTCCTGTCC
TTCAACAACCTGACACGGCTGGACGAGGAGAGCCTGGCCGAGCTGAGCAGCCTGAGTGTCCTGCGTCT
CAGCCACAATTCCATCAGCCACATTGCGGAGGGTGCCTTCAAGGGACTCAGGAGCCTGCGAGTCTTGG
ATCTGGACCATAACGAGATTTCGGGCACAATAGAGGACACGAGCGGCGCCTTCTCAGGGCTCGACAGC
CTCAGCAAGCTGACTCTGTTTGGAAACAAGATCAAGTCTGTGGCTAAGAGAGCATTCTCGGGGCTGGA
AGGCCTGGAGCACCTGAACCTTGGAGGGAATGCGATCAGATCTGTCCAGTTTGATGCCTTTGTGAAGA
TGAAGAATCTTAAAGAGCTCCATATCAGCAGCGACAGCTTCCTGTGTGACTGCCAGCTGAAGTGGCTG
CCCCCGTGGCTAATTGGCAGGATGCTGCAGGCCTTTGTGACAGCCACCTGTGCCCACCCAGAATCACT
GAAGGGTCAGAGCATTTTCTCTGTGCCACCAGAGAGTTTCGTGTGCGATGACTTCCTGAAGCCACAGA
TCATCACCCAGCCAGAAACCACCATGGCTATGGTGGGCAAGGACATCCGGTTTACATGCTCAGCAGCC
AGCAGCAGCAGCTCCCCCATGACCTTTGCCTGGAAGAAAGACAATGAAGTCCTGACCAATGCAGACAT
GGAGAACTTTGTCCACGTCCACGCGCAGGACGGGGAAGTGATGGAGTACACCACCATCCTGCACCTCC
GTCAGGTCACTTTCGGGCACGAGGGCCGCTACCAATGTGTCATCACCAACCACTTTGGCTCCACCTAT
TCACATAAGGCCAGGCTCACCGTGAATGTGTTGCCATCATTCACCAAAACGCCCCACGACATAACCAT
CCGGACCACCACCGTGGCCCGCCTCGAATGTGCTGCCACAGGTCACCCAAACCCTCAGATTGCCTGGC
AGAAGGATGGAGGCACGGATTTCCCCGCTGCCCGTGAGCGACGCATGCATGTCATGCCGGATGACGAC
GTGTTTTCCATCACTGATGTGAAAATAGATGACGCAGGGGTTTACAGCTGTACTGCTCAGAACTCAGC
CGGTTCTATTTCAGCTAATGCCACCCTGACTGTCCTAGAGACCCCATCCTTGGTGGTCCCCTTGGAAG
ACCGTGTGGTATCTGTGGGAGAAACAGTGGCCCTCCAATGCAAAGCCACGGGGAACCCTCCGCCCCGC
ATCACCTGGTTCAAGGGGGACCGCCCGCTGAGCCTCACTGAGCGGCACCACCTGACCCCTGACAACCA
GCTCCTGGTGGTTCAGAACGTGGTGGCAGAGGATGCGGGCCGATATACCTGTGAGATGTCCAACACCC
TGGGCACGGAGCGAGCTCACAGCCAGCTGAGCGTCCTGCCCGCAGCAGGCTGCAGGAAGGATGGGACC
ACGGTAGGCATCTTCACCATTGCTGTCGTGAGCAGCATCGTCCTGACGTCACTGGTCTGGGTGTGCAT
CATCTACCAGACCAGGAAGAAGAGTGAAGAGTACAGTGTCACCAACACAGATGAAACCGTCGTGCCAC
CAGATGTTCCAAGCTACCTCTCTTCTCAGGGGACCCTTTCTGACCGACAAGAAACCGTGGTCAGGACC
GAGGGTGGCCCTCAGGCCAATGGGCACATTGAGAGCAATGGTGTGTGTCCAAGAGATGCAAGCCACTT
TCCAGAGCCCGACACTCACAGCGTTGCCTGCAGGCAGCCAAAGCTCTGTGCTGGGTCTGCGTATCACA
AAGAGCCGTGGAAAGCGATGGAGAAAGCTGAAGGGACACCTGGGCCACATAAGATGGAACACGGTGGC
CGGGTCGTATGCAGTGACTGCAACACCGAAGTGGACTGTTACTCCAGGGGACAAGCCTTCCACCCCCA
GCCTGTGTCCAGAGACAGCGCACAGCCAAGTGCGCCAAATGGCCCGGAGCCGGGTGGGAGTGACCAAG
AGCATTCTCCACATCACCAGTGCAGCAGGACTGCCGCTGGGTCCTGCCCCGAGTGCCAAGGGTCGCTC
TACCCCAGTAACCACGATAGAATGCTGACGGCTGTGAAGAAAAAGCCAATGGCATCTCTAGATGGGAA
AGGGGATTCTTCCTGGACTTTAGCAAGGTTGTATCACCCGGACTCCACAGAGCTACAGCCTGCATCTT
CATTAACTTCAGGCAGTCCAGAGCGCGCGGAAGCCCAGTACTTGCTTGTTTCCAATGGCCACCTCCCC
AAAGCATGTGACGCCAGTCCCGAGTCCACGCCACTGACAGGACAGCTCCCCGGGAAACAGAGGGTGCC
ACTGCTGTTGGCACCAAAAAGCTAGGTTTTGTCTACCTCAGTTCTTGTCATACCAATCTCTACGGGAA
AGAGAGGTAGGAGAGGCTGCGAGGAAGCTTGGGTTCAAGCGTCACTCATCTGTACATAGTTGT
AACTCC

| | | | |
|---|---|---|---|
| NOV51d, SNP13377255 of | SEQ ID NO:1090 | 1068 aa | MW at 116392.7 kD |
| CG59534-03, Protein Sequence | SNP Pos: 633 | | SNP Change: Phe to Ser |

MARPVRGGLGAPRRSPCLLLLWLVLVRLEPVTAAAGPRAPCAAACTCAGDSLDCGGRGLAALPGDLPS
WTRSLNLSYNKLSEIDPAGFEDLPNLQEVQHNKIRSVEGSQLKAYLSLEVLDLSLNNITEVRNTCFPH
GPPIKELNLAGNRIGTLELGAFDGLSRSLLTLRLSKNRITQLPVRAFKLPRLTQLDLNRNRIRLIEGL
TFQGLNSLEVLKLQRNNISKLTDGAFWGLSKMHVLHLEYNSLVEVNSGSLYGLTALHQLHLSNNSIAR
IHRKGWSFCQKLHELVLSFNNLTRLDEESLAELSSLSVLRLSHNSISHIAEGAFKGLRSLRVLDLDHN
EISGTIEDTSGAFSGLDSLSKLTLFGNKIKSVAKRAFSGLEGLEHLNLGGNAIRSVQFDAFVKMKNLK
ELHISSDSFLCDCQLKWLPPWLIGRMLQAFVTATCAHPESLKGQSIFSVPPESFVCDDFLKPQIITQP
ETTMAMVGKDIRFTCSAASSSSSPMTFAWKKDNEVLTNADMENFVHVHAQDGEVMEYTTILHLRQVTF
GHEGRYQCVITNHFGSTYSHKARLTVNVLPSFTKTPHDITIRTTTVARLECAATGHPNPQIAWQKDGG
TDFPAARERRMHVMPDDDVFSITDVKIDDAGVYSCTAQNSAGSISANATLTVLETPSLVVPLEDRVVS
VGETVALQCKATGNPPPRITWFKGDRPLSLTERHHLTPDNQLLVVQNVVAEDAGRYTCEMSNTLGTER
AHSQLSVLPAAGCRKDGTTVGIFTIAVVSSIVLTSLVWVCIIYQTRKKSEEYSVTNTDETVVPPDVPS
YLSSQGTLSDRQETVVRTEGGPQANGHIESNGVCPRDASHFPEPDTHSVACRQPKLCAGSAYHKEPWK
AMEKAEGTPGPHKMEHGGRVVCSDCNTEVDCYSRGQAFHPQPVSRDSAQPSAPNGPEPGGSDQEHSPH
HQCSRTAAGSCPECQGSLYPSNHDRMLTAVKKKPMASLDGKGDSSWTLARLYHPDSTELQPASSLTSG
SPERAEAQYLLVSNGHLPKACDASPESTPLTGQLPGKQRVPLLLAPKS

[0650] A ClustalW comparison of the above protein sequences yields the following sequence alignment shown in Table 51B.

TABLE 51B
Comparison of the NOV51 protein sequences.

| | | |
|---|---|---|
| NOV51a | MARPVRGGLGAPRRSPCLLLLWLVLVRLEPVTAAAGPRAPCAAACTCAGDSLDCGGRGLA | (SEQ ID NO:1084) |
| NOV51b | ----MRWDLAVLPR--------LVLISWAQVILLPWP----AAACTCAGDSLDCGGRGLA | (SEQ ID NO:1086) |
| NOV51c | MARPVRGGLGAPRRSPCLLLLWLVLVRLEPVTAAAGPRAPCAAACTCAGDSLDCGGRGLA | (SEQ ID NO:1088) |
| NOV51a | ALPGDLPSWTRSLNLSYNKLSEIDPAGFEDLPNLGEV----------------------- | |
| NOV51b | ALPGDLPSWTRSLNLSYNKLSEIDPAGFEDLPNLQEVYLNNNELTAVPSLGAASSHVVSL | |
| NOV51c | ALPGDLPSWTRSLNLSYNKLSEIDPAGFEDLPNLQEVYLNNNELTAVPSLGAASSHVVSL | |
| NOV51a | --QHNKIRSVEGSQLKAYLSLEVLDLSLNNITEVRNTCFPHGPPIKELNLAGNRIGTLEL | |
| NOV51b | FLQHNKIRSVEGSQLKAYLSLEVLDLSLNNITEVRNTCFPHGPPIKELNLAGNRIGTLEL | |
| NOV51c | FLQHNKIRSVEGSQLKAYLSLEVLDLSLNNTTEVRNTCFPHGPPIKELNLAGNRIGTLEL | |
| NOV51a | GAFDGLSRSLLTLRLSKNRITQLPVRAFKLPRLTQLDLNPNRIRLIEGLTFQGLNSLEVL | |
| NOV51b | GAFDGLSRSLLTLRLSKNRITQLPVRAFKLPRLTQLDLNRNRIRLIEGLTFQGLNSLEVL | |
| NOV51c | GAFDGLSRSLLTLRLSKNRITQLPVRAFKLPRLTQLDLNRNRIRLIEGLTFQGLNSLEVL | |
| NOV51a | KLQRNNISKLTDGAFWGLSKMHVLHLEYNSLVEVNSGSLYGLTALHQLHLSNNSIARIHR | |
| NOV51b | KLQRNNISKLTDGAFWGLSKMHVLHLEYNSLVEVNSGSLYGLTALHQLHLSNNSIARIHR | |
| NOV51c | KLQRNNISKLTDGAFWGLSKMHVLHLEYNSLVEVNSGSLYGLTALHQLHLSNNSIARIHR | |
| NOV51a | KGWSFCQKLHELVLSFNNLTRLDEESIAELSSLSVLRLSHNSISHIAEGAFKGLRSLRVL | |
| NOV51b | KGWSFCQKLHELVLSFNNLTRLDEESLAELSSLSVLRLSHNSISHIAEGAFKGLRSLRVL | |
| NOV51c | KGWSFCQKLHELVLSFNNLTRLDEESLAELSSLSVLRLSHNSISHIAEGAFKGLRSLRVL | |
| NOV51a | DLDHNEISGTIEDTSGAFSGLDSLSKLTLFGNKIKSVAKRAFSGLEGLEHLNLGGNAIRS | |
| NOV51b | DLDHNEISGTIEDTSGAFSGLDSLSKLTLFGNKIKSVAKRAFSGLEGLEHLNLGGNAIRS | |
| NOV51c | DLDHNEISGTIEDTSGAFSGLDSLSKLTLFGNKIKSVAKRAFSGLEGLEHLNLGGNAIRS | |
| NOV51a | VQFDAFVKMKNLKELHISSDSFLCDCQLKWLPPWLIGRMLQAFVTATCAHPESLKGQSIF | |
| NOV51b | VQFDAFVKMKNLKELHISSDSFLCDCQLKWLPPWLIGRMLQAFVTATCAHPESLKGQSIF | |
| NOV51c | VQFDAFVKMKNLKELHISSDSFLCDCQLKWLPPWLIGRMLQAFVTATCAHPESLKGQSIF | |
| NOV51a | SVPPESFVCDDFLKPQIITQPETTMAMVGKDIRFTCSAASSSSSPMTFAWKKDNEVLTNA | |
| NOV51b | SVPPESFVCDDFLKPQIITQPETTMAMVGKDIRFTCSAASSSSSPMTFAWKKDNEVLTNA | |
| NOV51c | SVPPESFVCDDFLKPQIITQPETTMAMVGKDIRFTCSAASSSSSPMTFAWKKDNEVLTNA | |
| NOV51a | DMENFVNVHAQDGEVMEYTTILHLRQVTFGHEGRYQCVITNHFGSTYSHKARLTVNVLPS | |
| NOV51b | DMENFVHVHAQDGEVMEYTTILHLRQVTFGHEGRYQCVITNHFGSTYSHKARLTVNVLPS | |
| NOV51c | DMENFVHVHAQDGEVMEYTTILHLRQVTFGHEGRYQCVITNHFGSTYSHKARLTVNVLPS | |
| NOV51a | FTKTPHDITIRTTTVARLECAATGHPNPQIAWQKDGGTDFPAARERRMHVMPDDDVFFIT | |
| NOV51b | FTKTPHDITIRTTTMARLECAATGHPNPQIAWQKDGGTDFPAARERRMHVMPDDDVFFIT | |
| NOV51c | FTKTPHDITIRTTTVARLECAATGHPNPQIAWQKDGGTDFPAARERRMHVMPDDDVFFIT | |
| NOV51a | DVKIDDAGVYSCTAQNSAGSISANATLTVLETPSLVVPLEDRVVSVGETVALQCKATGNP | |
| NOV51b | DVKIDDAGVYSCTAQNSAGSISANATLTVLETPSLVVPLEDRVVSVGETVALQCKATGNP | |
| NOV51c | DVKIDDAGVYSCTAQNSAGSISANATLTVLETPSLVVPLEDRVVSVGETVALQCKATGNP | |
| NOV51a | PPRITWFKGDRPLSLTERHHLTPDNQLLVVQNVVAEDAGRYTCEMSNTLGTERAHSQLSV | |
| NOV51b | PPRITWFKGDRPLSLTERHHLTPDNQLLVVQNVVAEDAGRYTCEMSNTLGTERAHSQLSV | |
| NOV51c | PPRITWFKGDRPLSLTERHHLTPDNQLLVVQNVVAEDAGRYTCEMSNTLGTERAHSQLSV | |
| NOV51a | LPAAGCRKDGTTVGIFTIAVVSSIVLTSLVWVCIIYQTRKKSEEYSVTNTDETVVPPDVP | |
| NOV51b | LPAAGCRKDGTTVGIFTIAVVSSIVLTSLVWVCIIYQTRKKSEEYSVTNTDETVVPPDVP | |
| NOV51c | LPAAGCRKDGTTVGIFTIAVVSSIVLTSLVWVCIIYQTRKKSEEYSVTNTDETVVPPDVP | |
| NOV51a | SYLSSQGTLSDRQETVVRTEGGPQANGHIESNGVCPRDASHFPEPDTHSVACRQPKLCAG | |
| NOV51b | SYLSSQGTLSDRQETVVRTEGGPQANGHIESNGVCPRDASHFPEPDTHSVACRQPKLCAG | |
| NOV51c | SYLSSQGTLSDRQETVVRTEGGPQANGHIESNGVCPRDASHFPEPDTHSVACRQPKLCAG | |
| NOV51a | SAYHKEPWKAMEKAEGTPGPHKMEHGGRVVCSDCNTEVDCYSRGQAFHPQPVSRDSAQPS | |
| NOV51b | SAYHKEPWKAMEKAEGTPGPHKMEHGGRVVCSDCNTEVDCYSRGQAFHPQPVSRDSAQPS | |
| NOV51c | SAYHKEPWKAMEKAEGTPGPHKMEHGGRVVCSDCNTEVDCYSRGQAFHPQPVSRDSAQPS | |
| NOV51a | APNGPEPGGSDQEHSPHHQCSRTAAGSCPECQGSLYPSNHDRMLTAVKKKPMASLDGKGD | |
| NOV51b | APNGPEPGGSDQEHSPHHQCSRTAAGSCPECQGSLYPSNHDRMLTAVKKKPMASLDGKGD | |
| NOV51c | APNGPEPGGSDQEHSPHHQCSRTAAGSCPECQGSLYPSNHDRMLTAVKKKPMASLDGKGD | |
| NOV51a | SSWTLARLYHPDSTELQPASSLTSGSPERAEAQYLLVSNGHLPKACDASPESTPLTGQLP | |
| NOV51b | SSWTLARLYHPDSTELQPASSLTSGSPERAEAQYLLVSNGHLPKACDASPESTPLTGQLP | |
| NOV51c | SSWTLARLYHPDSTELQPASSLTSGSPERAEAQYLLVSNGHLPKACDASPESTPLTGQLP | |
| NOV51a | GKQRVPLLIAPKS | |
| NOV51b | GKQRVPLLLAPKS | |
| NOV51c | GKQRVPLLLAPKS | |

[0651] Further analysis of the NOV51a protein yielded the following properties shown in Table 51C.

TABLE 51C
Protein Sequence Properties NOV51a

| | |
|---|---|
| SignalP analysis: | Cleavage site between residues 36 and 37 |
| PSORT II analysis: | |

| PSG: | a new signal peptide prediction method | |
|---|---|---|
| | N-region: | length 6; pos.chg 2; neg.chg 0 |
| | H-region: | length 6; peak value −9.10 |
| | PSG score: | −13.50 |

GvH: von Heijne's method for signal seq. recognition
GvH score (threshold: −2.1): −0.07
possible cleavage site: between 33 and 34

>>> Seems to have no N-terminal signal peptide

| ALOM: | Klein et al's method for TM region allocation | | |
|---|---|---|---|
| | Init position for calculation: 1 | | |
| | Tentative number of TMS(s) for the threshold 0.5: 2 | | |
| | INTEGRAL | Likelihood = | Transmembrane 17-33 |
| | | −2.87 | |
| | INTEGRAL | Likelihood = | Transmembrane 773-789 |
| | | −8.23 | |

| | |
|---|---|
| PERIPHERAL | Likelihood = 3.76 (at 656) |

| | |
|---|---|
| | ALOM score: −8.23 (number of TMSs: 2) |
| MTOP: | Prediction of membrane topology (Hartmann et al.) |
| | Center position for calculation: 24 |
| | Charge difference: −4.0 C(1.0)-N(5.0) |
| | N >= C: N-terminal side will be inside |

>>> membrane topology: type 3a

| MITDISC: | discrimination of mitochondrial targeting seq | | | |
|---|---|---|---|---|
| | R content: | 5 | Hyd Moment(75): | 4.80 |
| | Hyd Moment(95): | 12.52 | G content: | 3 |
| | D/E content: | 1 | S/T content: | 1 |

Score: −0.99
Gavel: prediction of cleavage sites for mitochondrial preseq
R-2 motif at 48 PRA|PC

NUCDISC: discrimination of nuclear localization signals

pat4: KKKP (4) at 983
pat7: PAARERR (3) at 616
bipartite: none
content of basic residues: 9.7%
NLS Score: 0.04
KDEL: ER retention motif in the C-terminus: none

ER Membrane Retention Signals:

XXRR-like motif in the N-terminus: ARPV
KKXX-like motif in the C-terminus: LAPK

SKL: peroxisomal targeting signal in the C-terminus: none
PTS2: 2nd peroxisomal targeting signal: none
VAC: possible vacuolar targeting motif: none
RNA-binding motif: none
Actinin-type actin-binding motif:

type 1: none
type 2: none

NMYR: N-myristoylation pattern: none
Prenylation motif: none
memYQRL: transport motif from cell surface to Golgi: none
Tyrosines in the tail: none
Dileucine motif in the tail: none
checking 63 PROSITE DNA binding motifs:

Leucine zipper pattern (PS00029): *** found ***
LDCGGRGLAALPGDLPSWTRSL at 52

none
checking 71 PROSITE ribosomal protein motifs: none
checking 33 PROSITE prokaryotic DNA binding motifs: none

| | |
|---|---|
| NNCN: | Reinhardt's method for Cytoplasmic/Nuclear discrimination |
| | Prediction: nuclear |
| | Reliability: 70.6 |
| COIL: | Lupas's algorithm to detect coiled-coil regions |
| | total: 0 residues |

Final Results (k = 9/23):

```
34.8%: nuclear
30.4%: mitochondrial
21.7%: endoplasmic reticulum
  4.3%: plasma membrane
  4.3%: cytoplasmic
  4.3%: peroxisomal
```

>> prediction for CG59534-03 is nuc (k = 23)

[0652] A search of the NOV51a protein against the Geneseq database, a proprietary database that contains sequences published in patents and patent publication, yielded several homologous proteins shown in Table 51D.

TABLE 51D
Geneseq Results for NOV51a

| | | NOV51a | Identities/ | |
|---|---|---|---|---|
| Geneseq | Protein/Organism/Length | Residues/Match | Similarities for the | Expect |
| Identifier | [Patent #, Date] | Residues | Matched Region | Value |
| ABG69660 | Human secreted protein SCEP-40 - | 1 . . . 1068 | 1065/1093 (97%) | 0.0 |
| | Homo sapiens, 1093 aa. | 1 . . . 1093 | 1068/1093 (97%) | |
| | [WO200248337-A2, 20-JUN-2002] | | | |
| AAY08008 | Human HLIG-1 protein - Homo sapiens, | 1 . . . 1068 | 1053/1101 (95%) | 0.0 |
| | 1101 aa. [EP913472-A2, | 1 . . . 1101 | 1062/1101 (95%) | |
| | 06-MAY-1999] | | | |
| ABG69674 | Human secreted protein SCEP-54 - | 1 . . . 1068 | 1042/1093 (95%) | 0.0 |
| | Homo sapiens, 1070 aa. | 1 . . . 1070 | 1045/1093 (95%) | |
| | [WO200248337-A2, 20-JUN-2002] | | | |
| ABP70116 | Human NOV30a - Homo sapiens, | 42 . . . 1068 | 1026/1052 (97%) | 0.0 |
| | 1077 aa. [WO200272771-A2, | 26 . . . 1077 | 1027/1052 (97%) | |
| | 19-SEP-2002] | | | |
| AAY97833 | Murine LIG-1 protein - Mus sp, 1091 | 1 . . . 1068 | 887/1102 (80%) | 0.0 |
| | aa. [JP2000093043-A, 04-APR-2000] | 1 . . . 1091 | 945/1102 (85%) | |

[0653] In a BLAST search of public sequence databases, the NOV51 a protein was found to have homology to the proteins shown in the BLASTP data in Table 51E.

TABLE 51E
Public BLASTP Results for NOV51a

| Protein | | NOV51a | Identities/ | | |
|---|---|---|---|---|---|
| Accession | | Residues/Match | Similarities for the | | Expect |
| Number | Protein/Organism/Length | Residues | Matched Portion | | Value |
| Q96JA1 | Membrane glycoprotein LIG-1 - | 1 . . . 1068 | 1068/1093 | (97%) | 0.0 |
| | Homo sapiens (Human), 1093 aa. | 1 . . . 1093 | 1068/1093 | (97%) | |
| Q9BYB8 | Membrane glycoprotein LIG-1 - | 1 . . . 1068 | 1064/1094 | (97%) | 0.0 |
| | Homo sapiens (Human), 1094 aa. | 1 . . . 1094 | 1068/1094 | (97%) | |
| P70193 | Membrane glycoprotein - | 1 . . . 1068 | 887/1102 | (80%) | 0.0 |
| | Mus musculus (Mouse), 1091 aa. | 1 . . . 1091 | 945/1102 | (85%) | |
| Q9UFI4 | Hypothetical protein - | 586 . . . 1068 | 481/483 | (99%) | 0.0 |
| | Homo sapiens (Human), 483 aa | 1 . . . 483 | 481/483 | (99%) | |
| | (fragment). | | | | |
| O94898 | Hypothetical protein KIAA0806 - | 41 . . . 993 | 491/1002 | (49%) | 0.0 |
| | Homo sapiens (Human), 1065 aa. | 43 . . . 991 | 624/1002 | (62%) | |

[0654] PFam analysis predicts that the NOV51a protein contains the domains shown in the Table 51F.

TABLE 51F
Domain Analysis of NOV51a

| | | | |
|---|---|---|---|
| | | Identities/ | |
| | | Similarities | |
| Pfam | NOV51a | for the | Expect |
| Domain | Match Region | Matched Region | Value |

| | | | | |
|---|---|---|---|---|
| LRRNT | 40 . . . 67 | 17/35 | (49%) | 0.0012 |
| | | 20/35 | (57%) | |
| LRR | 211 . . . 234 | 10/25 | (40%) | 0.063 |
| | | 21/25 | (84%) | |
| LRR | 283 . . . 306 | 11/25 | (44%) | 0.16 |
| | | 20/25 | (80%) | |
| LRR | 307 . . . 330 | 9/25 | (36%) | 0.0016 |
| | | 23/25 | (92%) | |
| LRR | 382 . . . 405 | 9/25 | (36%) | 0.18 |
| | | 18/25 | (72%) | |
| LRRCT | 415 . . . 465 | 22/54 | (41%) | 1.6e−13 |
| | | 42/54 | (78%) | |
| ig | 484 . . . 554 | 13/72 | (18%) | 2e−05 |
| | | 50/72 | (69%) | |
| ig | 588 . . . 649 | 13/65 | (20%) | 0.025 |
| | | 43/65 | (66%) | |
| ig | 682 . . . 740 | 19/62 | (31%) | 1.4e−08 |
| | | 45/62 | (73%) | |

### Example 52

[0655] The NOV52 clone was analyzed, and the nucleotide and encoded polypeptide sequences are shown in Table 52A.

TABLE 52A
NOV52 Sequence Analysis

| | | |
|---|---|---|
| NOV52a, CG59584-03 | SEQ ID NO:1091 | 4994 bp |
| DNA Sequence | ORF Start: ATG at 36 | ORF Stop: TGA at 4815 |

CCTGGACCTAATACCCCTTCTTCCTAAAGCACAAAATGATTAAATTGCTTAATCCAGACAACTCTCCA
ATCCCAAATGAAGTTGTTCAGTTGCATCTGAAGGACAAAATCGTGGGAAACTACACCACAGATGTAAA
TGGCATCGCTCAGTTTTTCTTGGACACATATACGTTTACATACCCAAATATCACTTTGAAAGCAGCCT
ACAAGGCCAATGAAAATTGCCAGGCTCATGGCTGGGTGTTGCCTCAATACCCTCAGCCCGAGTACTTT
GCATATCGATTTTACTCCAAGATGAATAGCTTCCTAAAGATTGTCCAAGAGATGGAAGAACTGAGATG
CAACCAGCAGAAGAGGGTGCTAGTGCACTGCATTCTCAATATGGAAGACTTTGAAGACAAAACCTACA
CAGCAGACTTCAATTATTTGGTGATTTCAAAAGGTGTAATCATTCTTCATGGGCAACAGAAAATTGAG
ATCAACGAAAATGGGAGGAAGGGCATATTTTCCATTTCTATAGACATTAACCCTGAATTAGCGCCCTC
AGTAGATATGCTTGTCTATAGCTTGCATCCTGGAGGAGAAATGGTCACTGATAGCACCCAATTCCGAA
TTGAGAAATGCTTCGAAAATCAGGTCAACTTAAATTTTTCTAAAGAAAAAAGTTTACCAGGATCCAAT
ATTGATCTTCAAGTCTCGGCTGCTTCAAACTCTCTTTGTGCTCTTTGGGCTGTAGACCAGAGTGTATT
GCTACTAAGGAATTATGGTCAGCTGTCAGCACAAACTGTGTATAGTCAGCTATATTCCAGGGAACTAC
ATGGCTATTACTTCAGAGGACTTAACTTAGAAGATGGCCTTAAAGTGCCGTGTCTTGAAGATGAACAT
ATCCTTTACAATGGAATTTATTACACACCTGCATGGGCTGACTTTGGAAAAGATGGCTATGACCTTGT
GAAGGATCCTCAAAACAATCGGATTTTTCAAAGGCAAAATGTGACTTCTTTCCGAAATATTACCCAAC
TCTCGTTCCAACTGATTTCAGAACCAATGTTTGGAGATTACTGGATTGTTGTGAAAAGAAACTCAAGG
GAGACAGTGACACACCAATTTGCTGTTAAAAGATATGTGCTGCCCAAGTTTGAAGTTACAGTCAATGC
ACCACAAACAGTAACTATTTCAGATGATGAATTCCAAGTGGATGTATGTGCTAAGTACAACTTTGGCC
AACCTGTGCAAGGGGAAACCCAAATCCGGGTGTGCAGAGAGTATTTTTCTTCAAGCAATTGTGAGAAA
AATGAAAATGAAATATGTGAGCAATTTATTGCACAGTTGGAAAATGGTTGTGTTTCTCAAATTGTAAA
TACAAAAGTCTTCCAACTCTACCGTTCGGGATTGTTCATGACATTTCATGTCGCTGTAATTGTTACAG
AATCTGGGACAGTTATGCAGATCAGCGAGAAGACCTCAGTTTTTATCACTCAATTGCTTGGAACTGTA
AACTTTGAGAACATGGATACATTCTATAGAAGAGGGATTTCTTATTTTGGAACTCTTAAATTTTCGGA
TCCCAATAATGTACCTATGGTGAACAAGTTGTTGCAACTGGAGCTCAATGATGAATTTATAGGAAATT
ACACTACGGATGAGAATGGCGAAGCTCAATTTTCCATTGACACTTCAGACATATTTGATCCAGAGTTC
AACCTAAAAGCCACATATGTTCGACCTGAGAGCTGCTATCTTCCCAGCTGGTTGACGCCTCAGTACTT
GGATGCTCACTTCTTAGTCTCACGCTTTTACTCCCGAACCAACAGCTTCCTGAAGATTGTTCCAGAAC
CAAAGCAGCTTGAATGTAATCAACAGAAGGTTGTTACTGTGCATTACTCCCTAAACAGTGAAGCATAT
GAGGATGATTCCAATGTAAAGTTCTTCTATTTGATGATGGTAAAAGGAGCTATCTTACTCAGTGGACA
AAAGGAAATCAGAAACAAAGCCTGGAATGGAAACTTCTCGTTCCCAATCAGCATCAGTGCTGATCTGG
CTCCTGCAGCCGTCCTGTTTGTCTATACCCTTCACCCCAGTGGGGAAATTGTGGCTGACAGTGTCAGA
TTCCAGGTTGACAAGTGCTTTAAACACAAGGTTAACATAAAGTTCTCTAACGAGCAGGGCTTACCTGG
TTCCAATGCTAGTCTCTGTCTTCAAGCGGCGCCTGTCTTATTCTGTGCCCTCAGGGCTGTGGATAGGA
ATGTCCTTCTACTGAAATCTGAACAACAGCTGTCAGCTGAAAGTGTGTATAACATGGTTCCAAGTATA
GAGCCGTATGGTTATTTCTACCATGGCCTCAATCTTGATGATGGCAAGGAAGACCCTTGCATTCCTCA
GAGGGATATGTTCTACAATGGTTTATATTACACACCTGTAAGCAACTATGGGGATGGAGATATCTATA
ATATTGTCAGGAACATGGGTCTAAAAGTCTTTACCAATCTCCATTACCGAAAACCAGAAAAAATTATG
GTCCAATGCGTAGTGTTCCGTCTAGAATTGCATGTAGCTAGTGGAATCAGAGGGGAGAATGCTGACTA
TGTAGAACAGGCTATAATTCAAACAGTAAGAACAAACTTCCCAGAGACATGGATGTGGGACCTCGTCA
GTGTCGATTCCTCAGGCTCTGCCAATCTTTCGTTCCTCATTCCTGATACGATAACCCAATGGGAGGCA
AGTGGCTTTTGTGTGAATGGTGACGTTGGATTTGGCATTTCCTCTACAACCACTCTAGAAGTCTCCCA
ACCTTTCTTTATTGAGATTGCCTCACCCTTTTCGGTTGTTCAAAATGAACAATTTGATTTGATTGTCA
ATGTCTTCAGCTACCGGAATACATGTGTAGAGATTTCTGTTCAAGTGGAGGAGTCTCAGAATTATGAA
GCAAATATTCATACCTTGAAAATCAATGGCAGTGAGGTTATTCAAGCTGGAGGGAGGAAAACAAACGT
CTGGACTATTATACCTAAGAAATTGGGTAAAGTGAATATCACTGTAGTTGCTGAGTCCAAACAAAGCA
TTAGTAGAGCCTGAAGGTATTGAAAAGGAAAGGACCCAGAGTTTCCTTATCTGTACAGAAGGTGCCAA
CTGTTGTGGGGGATATTCTAGGACTTGCCTTGCAGAATCTGGTTGTTCTCCAAATGCCCTATGGAAGT
GGAGAGCAGAATGCTGCCCTACTAGCATCTGATACTTATGTTCTGGACTATCTGAAATCTACTGAGCA
ACTGACAGAGGAAGTTCAATCTAAGGCTTTCTTTCTCTTATCTAATGGTTATCAAAGGCAATTATCTT
TCAAAAACTCTGATGGTTCCTATAGTGTGTTTTGGCAGCAGAGTCAGAAAGGAAGCATATGGCTCAGT
GCTCTTACTTTTAAGACATTGGAGAGAATGAAAAAATATGTATTCATTGATGAAAATGTTCAAAAACA
GACCTTAATCTGGCTTTCAAGCCAACAGAAAACAAGCGGCTGCTTTAAGAATGATGGCCAGCTTTTCA
ACCACGCCTGGGAGGGTGGAGATGAAGAGGACATTTCACTCACTGCGTATGTTGTTGGGATGTTCTTT
GAAGCTGGGCTCAATTTCACTTTTCCTGCTCTACGAAACGCACTCTTTTGCCTTGAAGCGGCATTGGA
CAGTGGTGTCACTAATGGCTATAATCATGCAATTCTAGCTTATGCTTTTGCCTTAGCTGGAAAAGAGA
AGCAAGTGGAATCTTTACTCCAAACCCTGGATCAATCTGCCCCAAAACTAAATAATGTCATCTACTGG
TGAGAAGAGTTGCTACGTGCTGTTGGCTGTCATTTCCCGGAAAATTCCTGACCTCACCTATGCTAGTA
AGATTGTGCAGTGGCTTGCCCAACGGATGAATTCCCATGGAGGCTTTTCTTCCAACCAGACACCTGAT
GATACTCTGTTCAAATTATATACGGGCCAAAAAGAAAGCTTTCGCTCTAGTTCTGTGGGCTATACACT
GGGAAAAGCAAATGAAAAGAAGGAAAACAGGAGAAATGGGGGTGAAGGATCCAGTGAGATTTTCCAGG
TTAACGGTCATAACCGCCTACTGGTCCAACGTTCAGAAGTAACACAGGCACCTGGAGAATACACAGTA
GATGTGGAAGGACACGGTTGTACATTTATCCAGGCCACCCTTAAGTACAATGTTCTCCTACCTAAGAA
GGCATCTGGATTTTCTCTTTCCTTGGAAATAGTAAAGAACTACTCTTCGACTGCTTTTGACCTCACAG
TGACCCTCAAATACACTGGAATTCGCAATAAATCCAGTATGGTGGTTATAGATGTAAAAATGCTATCA
CAAGAATGACCATGTTCTTTTCTACTTGGAAAATGTAGGTTTTGGTCGAGCAGACAGTTTCCCTTTTT
CTGTTGAGCAGAGCAACCTTGTGTTCAACATTCAGCCAGCCCCAGCCATGGTCTACGATTATTATGAA
AAAGAAGAATATGCCCTAGCTTTTTACAACATCGACAGTAGTTCAGTTTCCGAGTGAGACAAAGCAAT
TACTAGAAGAGTTGGAGAAGCATTTCTTGTAACAAACTGATTCTTCTGTATCAAACCTGGAAAAAAAT
CATGAACCATCTGACATCGTGAACAGTCTGCAGTGGGCTATGGTTTCTTGTCAAGTCTTATTTCCTTA
TCATCCCATTAAATGTTGTCATTTTGCAAA

| | | | |
|---|---|---|---|
| NOV52a CG59584-03 | SEQ ID NO:1092 | 1593 aa | MW at 180167.3 kD |
| Protein | | | |

MIKLLNPDNSPIPNEVVQLHLKDKIVGNYTTDVNGIAQFFLDTYTFTYPNITLKAAYKANENCQAHGW
VLPQYPQPEYFAYRFYSKMNSFLKIVQEMEELRCNQQKRVLVHCILNMEDFEDKTYTADFNYLVISKG
VIILHGQQKIEINENGRKGIFSISIDINPELAPSVDMLVYSLHPGGEMVTDSTQFRIEKCFENQVNLN
FSKEKSLPGSNIDLQVSAASNSLCALWAVDQSVLLLRNYGQLSAQTVYSQLYSRELHGYYFRGLNLED
GLKVPCLEDEHILYNGIYYTPAWADFGKDGYDLVKDPQNNRIFQRQNVTSFRNITQLSFQLISEPMFG
DYWIVVKRNSRETVTHQFAVKRYVLPKFEVTVNAPQTVTISDDEFQVDVCAKYNFGQPVQGETQIRVC
REYFSSSNCEKNENEICEQFIAQLENGCVSQIVNTKVFQLYRSGLFMTFHVAVIVTESGTVMQISEKT
SVFITQLLGTVNFENMDTFYRRGISYFGTLKFSDPNNVPMVNKLLQLELNDEFIGNYTTDENGEAQFS
IDTSDIFDPEFNLKATYVRPESCYLPSWLTPQYLDAHFLVSRFYSRTNSFLKIVPEPKQLECNQQKVV
TVHYSLNSEAYEDDSNVKFFYLMMVKGAILLSGQKEIRNKAWNGNFSFPISISADLAPAAVLFVYTLH
PSGEIVADSVRFQVDKCFKHKVNIKFSNEQGLPGSNASLCLQAAPVLFCALRAVDRNVLLLKSEQQLS
AESVYNMVPSIEPYGYFYHGLNLDDGKEDPCIPQRDMFYNGLYYTPVSNYGDGDIYNIVPNMGLKVFT
NLHYRKPEKIMVQCVVFRLELHVASGIRGENADYVEQAIIQTVRTNFPETWMWDLVSVDSSGSANLSF
LIPDTITQWEASGFCVNGDVGFGISSTTTLEVSQPFFIEIASPFSVVQNEQFDLIVNVFSYRNTCVEI
SVQVEESQNYEANIHTLKINGSEVIQAGGRKTNVWTIIPKKLGKVNITVVAESKQSSACPNEGMEQQK
LNWKDTVVQSFLVEPEGIEKERTQSFLICTEGAKASKQGVLDLPNDVVEGSARGFFTVVGDILGLALQ
NLVVLQMPYGSGEQNAALLASDTYVLDYLKSTEQLTEEVQSKAFFLLSNGYQRQLSFKNSDGSYSVFW
QQSQKGSIWLSALTFKTLERMKKYVFIDENVQKQTLIWLSSQQKTSGCFKNDGQLFNHAWEGGDEEDI
SLTAYVVGMFFEAGLNFTFPALRNALFCLEAALDSGVTNGYNHAILAYAFALAGKEKQVESLLQTLDQ
SAPKLNNVIYWERERKPKTEEFPSFIPWAPSAQTEKSCYVLLAVISRKIPDLTYASKIVQWLAQRMNS
HGGFSSNQTPDDTLFKLYTGQKESFRSSSVGYTLGKANEKKENRRNGGEGSSEIFQVNGHNRLLVQRS
EVTQAPGEYTVDVEGHGCTFIQATLKYNVLLPKKASGFSLSLEIVKNYSSTAFDLTVTLKYTGIRNKS
SMVVIDVKMLSGFTPTMSSIEELENKGQVMKTEVKNDHVLFYLENVGFGRADSFPFSVEQSNLVFNIQ
PAPAMVYDYYEKEEYALAFYNIDSSSVSE

| | | |
|---|---|---|
| NOV52b, CG59584-02 | SEQ ID NO:1093 | 4501 bp |
| DNA Sequence | ORF Start: at 1 | ORF Stop: TGA at 4309 |

TCCATTTCTATAGACATTAACCCTGAATTAGCGCCCTCAGTAGATATGCTTGTCTATAGCTTGCATCC
TGGAGGAGAAATGGTCACTGATAGCACCCAATTCCGAATTGAGAAATGCTTCGAAAATCAGGTCAACT
TAAATTTTTCTAAAGAAAAAAGTTTACCAGGATCCAATATTGATCTTCAAGTCTCGGCTGCTTCAAAC
TCTCTTTGTGCTCTTTGGGCTGTAGACCAGAGTGTATTGCTACTAAGGAATTATGGTCAGCTGTCAGC
ACAAACTGTGTATAGTCAGCTATATTCCAGGGAACTACATGGCTATTACTTCAGAGGACTTAACTTAG
AAGATGGCCTTAAAGTGCCGTGTCTTGAAGATGAACATATCCTTTACAATGGAATTTATTACACACCT
GCATGGGCTGACTTTGGAAAAGATGGCTATGACCTTGTGAAGGATCCTCAAAACAATCGGATTTTTCA
AAGGCAAAATGTGACTTCTTTCCGAAATATTACCCAACTCTCGTTCCAACTGATTTCAGAACCAATGT
TTGGAGATTACTGGATTGTTGTGAAAAGAAACTCAAGGGAGACAGTGACACACCAATTTGCTGTTAAA
AGATATGTGCTGCCCAAGTTTGAAGTTACAGTCAATGCACCACAAACAGTAACTATTTCAGATGATGA
ATTCCAAGTGGATGTATGTGCTAAGTACAACTTTGGCCAACCTGTGCAAGGGGAAACCCAAATCCGGG
TGTGCAGAGAGTATTTTTCTTCAAGCAATTGTGAGAAAAATGAAAATGAAATATGTGAGCAATTTATT
GCACAGTTGGAAAATGGTTGTGTTTCTCAAATTGTAAATACAAAAGTCTTCCAACTCTACCGTTCGGG
ATTGTTCATGACATTTCATGTCGCTGTAATTGTTACAGAATCTGGGACAGTTATGCAGATCAGCGAGA
AGACCTCAGTTTTTATCACTCAATTGCTTGGAACTGTAAACTTTGAGAACATGGATACATTCTATAGA
AGAGGGATTTCTTATTTTGGAACTCTTAAATTTTCGGATCCCAATAATGTACCTATGGTGAACAAGTT
GTTGCAACTGGAGCTCAATGATGAATTTATAGGAAATTACACTACGGATGAGAATGGCGAAGCTCAAT
TTTCCATTGACACTTCAGACATATTTGATCCAGAGTTCAACCTAAAAGCCACATATGTTCGACCTGAG
AGCTGCTATCTTCCCAGCTGGTTGACGCCTCAGTACTTGGATGCTCACTTCTTAGTCTCACGCTTTTA
CTCCCGAACCAACAGCTTCCTGAAGATTGTTCCAGAACCAAAGCAGCTTGAATGTAATCAACAGAAGG
TTGATGATGGTAAAAGGAGCTATCTTACTCAGTGGACAAAAGGAAATCAGAAACAAAGCCTGGAATGG
TTCACCCCAGTGGGGAAATTGTGGCTGACAGTGTCAGATTCCAGGTTGACAAGTGCTTTAAACACAAG
GTTAACATAAAGTTCTCTAACGAGCAGGGCTTACCTGGTTCCAATGCTAGTCTCTGTCTTCAAGCGGC
GCCTGTCTTATTCTGTGCCCTCAGGGCTGTGGATAGGAATGTCCTTCTACTGAAATCTGAACAACAGC
TGTCAGCTGAAAGTGTGTATAACATGGTTCCAAGTATAGAGCCGTATGGTTATTTCTACCATGGCCTC
AATCTTGATGATGGCAAGGAAGACCCTTGCATTCCTCAGAGGGATATGTTCTACAATGGTTTATATTA
CACACCTGTAAGCAACTATGGGGATGGAGATATCTATAATATTGTCAGGAACATGGGTCTAAAAGTCT
TTACCAATCTCCATTACCGAAAACCAGAAAAAATTATGGTCCAATGCGTAGTGTTCCGTCTAGAATTG
CATGTAGCTAGTGGAATCAGAGGGGAGAATGCTGACTATGTAGAACAGGCTATAATTCAAACAGTAAG
AACAAACTTCCCAGAGACATGGATGTGGGACCTCGTCAGTGTCGATTCCTCAGGCTCTGCCAATCTTT
CGTTCCTCATTCCTGATACGATAACCCAATGGGAGGCAAGTGGCTTTTGTGTGAATGGTGACGTTGGA
TTTGGCATTTCCTCTACAACCACTCTAGAAGTCTCCCAACCTTTCTTTATTGAGATTGCCTCACCCTT
TTCGGTTGTTCAAAATGAACAATTTGATTTGATTGTCAATGTCTTCAGCTACCGGAATACATGTGTAG
AGATTTCTGTTCAAGTGGAGGAGTCTCAGAATTATGAAGCAAATATTCATACCTTGAAAATCAATGGC
AGTGAGGTTATTCAAGCTGGAGGGAGGAAAACAAACGTCTGGACTATTATACCTAAGAAATTGGGTAA
AGTGAATATCACTGTAGTTGCTGAGTCCAAACAAAGCAGTGCTTGCCCAAATGAAGGAATGGAGCAGC
AAAAGCTAAACTGGAAAGACACTGTGGTCCAAAGCTTCTTAGTAGAGCCTGAAGGTATTGAAAAGGAA
AGGACCCAGAGTTTCCTTATCTGTACAGAAGGTGCCAAAGCCTCCAAGCAGGGAGTTTTGGACTTGCC
AAACGATGTAGTAGAAGGGTCAGCCAGAGGCTTTTTCACTGTTGTGGGGGATATTCTAGGACTTGCCT
TGCAGAATCTGGTTGTTCTCCAAATGCCCTATGGAAGTGGAGAGCAGAATGCTGCCCTACTAGCATCT
GATACTTATGTTCTGGACTATCTGAAATCTACTGAGCAACTGACAGAGGAAGTTCAATCTAAGGCTTT
CTTTCTCTTATCTAATGGTTATCAAAGGCAATTATCTTTCAAAAACTCTGATGGTTCCTATAGTGTGT
TTTGGCAGCAGAGTCAGAAAGGAAGCATATGGCTCAGTGCTCTTACTTTTAAGACATTGGAGAGAATG
AAAAAATATGTATTCATTGATGAAAATGTTCAAAAACAGACCTTAATCTGGCTTTCAAGCCAACAGAA
AACAAGCGGCTGCTTTAAGAATGATGGCCAGCTTTTCAACCACGCCTGGGAGGGTGGAGATGAAGAGG
ACATTTCACTCACTGCGTATGTTGTTGGGATGTTCTTTGAAGCTGGGCTCAATTTCACTTTTCCTGCT
CTACGAAACGCACTCTTTTGCCTTGAAGCGGCATTGGACAGTGGTGTCACTAATGGCTATAATCATGC
AATTCTAGCTTATGCTTTTGCCTTAGCTGGAAAAGAGAAGCAAGTGGAATCTTTACTCCAAACCCTGG
ATCAATCTGCCCCAAAACTAAATAATGTCATCTACTGGGAAAGAGAAAGGAAACCCAAGACAGAAGAA
TTTCCATCCTTTATTCCCTGGGCACCTTCTGCTCAGACTGAGAAGAGTTGCTACGTGCTGTTGGCTGT
CATTTCCCGGAAAATTCCTGACCTCACCTATGCTAGTAAGATTGTGCAGTGGCTTGCCCAACGGATGA
ATTCCCATGGAGGCTTTTCTTCCAACCAGACACCTGATGATACTCTGTTCAAATTATATACGGGCCAA
AAAGAAAGCTTTCGCTCTAGTTCTGTGGGCTATACACTGGGAAAAGCAAATGAAAAGAAGGAAAACAG
GAGAAATGGGGGTGAAGGATCCAGTGAGATTTTCCAGGTTAACGGTCATAACCGCCTACTGGTCCAAC
GTTCAGAAGTAACACAGGCACCTGGAGAATACACAGTAGATGTGGAAGGACACGGTTGTACATTTATC
CAGGCCACCCTTAAGTACAATGTTCTCCTACCTAAGAAGGCATCTGGATTTTCTCTTTCCTTGGAAAT
AGTAAAGAACTACTCTTCGACTGCTTTTGACCTCACAGTGACCCTCAAATACACTGGAATTCGCAATA
AATCCAGTATGGTGGTTATAGATGTAAAAATGCTATCAGGATTTACTCCAACCATGTCATCCATTGAA
GAGCTTGAAAACAAGGGCCAAGTGATGAAGACTGAAGTCAAGAATGACCATGTTCTTTTCTACTTGGA
AAATGTAGGTTTTGGTCGAGCAGACAGTTTCCCTTTTTCTGTTGAGCAGAGCAACCTTGTGTTCAACA
TTCAGCCAGCCCCAGCCATGGTCTACGATTATTATGAAAAAGAAGAATATGCCCTAGCTTTTTACAAC
ATCGACAGTAGTTCAGTTTCCGAGTGAGACAAAGCAATTACTAGAAGAGTTGGAGAAGCATTTCTTGT
AACAAACTGATTCTTCTGTATCAAACCTGGAAAAAAATCATGAACCATCTGACATCGTGAACAGTCTG
CAGTGGGCTATGGTTTCTTGTCAAGTCTTATTTCCTTATCATCCCATTAAATGTTGTCATTTTGCAAA
AAAAAAAAAAAAA

| | | | |
|---|---|---|---|
| NOV52b, CG59584-02 | SEQ ID NO:1094 | 1436 aa | MW at 161836.4 kD |
| Protein Sequence | | | |

SISIDINPELAPSVDMLVYSLHPGGEMVTDSTQFRIEKCFENQVNLNFSKEKSLPGSNIDLQVSAASN
SLCALWAVDQSVLLLRNYGQLSAQTVYSQLYSRELHGYYFRGLNLEDGLKVPCLEDEHILYNGIYYTP
AWADFGKDGYDLVKDPQNNRIFQRQNVTSFRNITQLSFQLISEPMFGDYWIVVKRNSRETVTHQFAVK
RYVLPKFEVTVNAPQTVTISDDEFQVDVCAKYNFGQPVQGETQIRVCREYFSSSNCEKNENEICEQFI
AQLENGCVSQIVNTKVFQLYRSGLFMTFHVAVIVTESGTVMQISEKTSVFITQLLGTVNFENMDTFYR
RGISYFGTLKFSDPNNVPMVNKLLQLELNDEFIGNYTTDENGEAQFSIDTSDIFDPEFNLKATYVRPE
SCYLPSWLTPQYLDAHFLVSRFYSRTNSFLKIVPEPKQLECNQQKVVTVHYSLNSEAYEDDSNVKFFY
LMMVKGAILLSGQKEIRNKAWNGNFSFPISISADLAPAAVLFVYTLHPSGEIVADSVRFQVDKCFKHK
VNIKFSNEQGLPGSNASLCLQAAPVLFCALRAVDRNVLLLKSEQQLSAESVYNMVPSIEPYGYFYHGL
NLDDGKEDPCIPQRDMFYNGLYYTPVSNYGDGDIYNIVRNMGLKVFTNLHYRKPEKIMVQCVVFRLEL
HVASGIRGENADYVEQAIIQTVRTNFPETWMWDLVSVDSSGSANLSFLIPDTITQWEASGFCVNGDVG
FGISSTTTLEVSQPFFIEIASPFSVVQNEQFDLIVNVFSYRNTCVEISVQVEESQNYEANIHTLKING
SEVIQAGGRKTNVWTIIPKKLGKVNITVVAESKQSSACPNEGMEQQKLNWKDTVVQSFLVEPEGIEKE
RTQSFLICTEGAKASKQGVLDLPNDVVEGSARGFFTVVGDILGLALQNLVVLQMPYGSGEQNAALLAS
DTYVLDYLKSTEQLTEEVQSKAFFLLSNGYQRQLSFKNSDGSYSVFWQQSQKGSIWLSALTFKTLERM
KKYVFIDENVQKQTLIWLSSQQKTSGCFKNDGQLFNHAWEGGDEEDISLTAYVVGMFFEAGLNFTFPA
LRNALFCLEAALDSGVTNGYNHAILAYAFALAGKEKQVESLLQTLDQSAPKLNNVIYWERERKPKTEE
FPSFIPWAPSAQTEKSCYVLLAVISRKIPDLTYASKIVQWLAQRMMSHGGFSSNQTPDDTLFKLYTGQ
KESFRSSSVGYTLGKANEKKENRRNGGEGSSEIFQVNGHNRLLVQRSEVTQAPGEYTVDVEGHGCTFI
QATLKYNVLLPKKASGFSLSLEIVKNYSSTAFDLTVTLKYTGIRNKSSMVVIDVKNLSGFTPTMSSIE
ELENKGQVMKTEVKNDHVLFYLENVGFGRADSFPFSVEQSNLVFNIQPAPAMVYDYYEKEEYALAFYN
IDSSSVSE

| | | |
|---|---|---|
| NOV52c 248210405 | SEQ ID NO:1095 | 571 bp |
| DNA Sequence | ORF Start: at 2 | ORF Stop: end of sequence |

CACCAGATGTGAAGGATCCAGTGAGATTTTCCACCTTAACGGTCATAATCGCCTACTGGTCCAACGTT
CAGAAGTAACACAGGCACCTGGAGAATACACAGTAGATGTGGAAGGACACGGTTGTACATTTATCCAG
GCCACCCTTAAGTACAATGTTCTCCTACCTAAGAAGGCATCTGGATTTTCTCTTTCCTTGGAAATAGT
AAAGAACTACTCTTCGACTGCTTTTGACCTCACAGTGACCCTCAAATACACTGGAATTCGCAATAAAT
CCAGTATGGTGGTTATAGATGTAAAAATGCTATCAGGATTTACTCCAACCATGTCATCCATTGAAGAG
CTTGAAAACAAGGGCCAAGTGATGAAGACTGAAGTCAAGAATGACCATGTTCTTTTCTACTTGGAAAA
TGGTTTTGGTCGAGCAGACAGTTTCCCTTTTTCTGTTGAGCAGAGCAACCTTGTGTTCAACATTCAGC
CAGCCCCAGCCATGGTCTACGATTACTATGAAAAAGAAGAATATGCCCTAGCTTTTTACAACATCGAC
AGTAGTTCAGTTTCCGAGCTCGAGGGC

| | | | |
|---|---|---|---|
| NOV52c, 248210405 | SEQ ID NO:1096 | 190 aa | MW at 21231.7 kD |
| Protein Sequence | | | |

TRSEGSSEIFQVNGHNRLLVQRSEVTQAPGEYTVDVEGHGCTFIQATLKYNVLLPKKASGFSLSLEIV
KNYSSTAFDLTVTLKYTGIRNKSSMVVIDVKMLSGFTPTMSSIEELENKGQVMKTEVKNDHVLFYLEN
GFGRASFPFSVEQSNLVFNIQPAPDYYEKEEYALAFYNIDSSSVSELEG

| | | |
|---|---|---|
| NOV52d, 248210436 | SEQ ID NO:1097 | 571 bp |
| DNA Sequence | ORF Start: at 2 | ORF Stop: end of sequence |

CACCAGATCTGAAGGATCCAGTGAGATTTTCCAGGTTAACGGTCATAACCGCCTACTGGTCCAACGTT
CAGAAGTAACACAGGCACCTGGACAATACACAGTAGATGTGGAAGGACACGGTTGTACATTTATCCAG
GCCACCCTTAAGTACAATGTTCTCCTACCTAAGAAGGCATCTGGATTTTCTCTTTCCTTGGAAATAGT
AAAGAACTACTCTTCGACTGCTTTTGACCTCACAGTGACCCTCAAATACACTGGAATTCGCAATAAAT
CCAGTATGGTGGTTATAGATGTAAAAATGCTATCAGGATTTACTCCAACCATGTCATCCATTGAAGAG
CTTGAAAACAAGGGCCAAGTGATGAAGACTGAAGTCAAGAATGACCATGTTCTTTTCTACTTGGAAAA
TGGTTTTGGTCGAGCAGACAGTTTCCCTTTTTCTGTTGAGCAGAGCAACCTTGTGTTCAACATTCAGC
CAGCCCCAGCCATGGTCTACGATTACTATGAAAAAGAAGAATATGCCCTAGCTTTTTACAACATCGAC
AGTAGTTCAGTTTCCGAGCTCGAGGGC

| | | | |
|---|---|---|---|
| NOV52d, 248210436 | SEQ ID NO:1098 | 190 aa | MW at 21230.7 kD |
| Protein Sequence | | | |

TRSEGSSEIFQVNGHNRLLVQRSEVTQAPGQYTVDVEGHGCTFIQATLKYNVLLPKKASGFSLSLEIV
KNYSSTAFDLTVTLKYTGIRNKSSMVVIDVKMLSGFTPTMSSIEELENKGQVMKTEVKNDHVLFYLEN
GFGRADSFPFSVEQSNLVFNIQPAPAMVYDYYEKEEYALAFYNIDSSSVSELEG

| | | |
|---|---|---|
| NOV52e 249357737 | SEQ ID NO:1099 | 571 bp |
| DNA Sequence | ORF Start: at 2 | ORF Stop: end of sequence |

CACCAGATCTGAAGGATCCAGTGAGATTTTCCAGGTTAACGGTCATAACCGCCTACTGGTCCAACGTT
CAGAAGTAACACAGGCACCTGGACAATACACAGTAGATGTGGAAGGACACGGTTGTACATTTATCCAG
GCCACCCTTAAGTACGATGTTCTCCTACCTAAGAAGGCATCTGGATTTTCTCTTTCCTTGGAAATAGT
AAAGAACTACTCTTCGACTGCTTTTGACCTCACAGTGACCCTCAAATACACTGGAATTCGCAATAAAT
CCAGTATGGTGGTTATAGATGTAAAAATGCTATCAGGATTTACTCCAACCATGTCATCCATTGAAGAG
CTTGAAAACAAGGGCCAAGTGATGAAGACTGAAGTCAAGAATGACCATGTTCTTTTCTACTTGGAAAA
TGGTTTTGGTCGAGCAGACAGTTTCCCTTTTTCTGTTGAGCAGAGCAACCTTGTGTTCAACATTCAGC
CAGCCCCAGCCATGGTCTACGATTACTATGAAAAAGAAGAATATGCCCTAGCTTTTTACAACATCGAC
AGTAGTTCAGTTTCCGAGCTCGAGGGC

| | | | |
|---|---|---|---|
| NOV52e, 249357737 | SEQ ID NO:1100 | 190 aa | MW at 21231.7 kD |
| Protein Sequence | | | |

TRSEGSSEIFQVNGHNRLLVQRSEVTQAPGQYTVDVEGHGCTFIQATLKYDVLLPKKASGFSLSLEIV
KNYSSTAFDLTVTLKYTGIRNKSSMVVIDVKMLSGFTPTMSSIEELENKGQVMKTEVKNDHVLFYLEN
GFGRADSFPFSVEQSNLVFNIQPAPDYYEKEEYALAFYNIDSSSVSELEG

| | | |
|---|---|---|
| NOV52f, 248210430 | SEQ ID NO:1101 | 529 bp |
| DNA Sequence | ORF Start: at 2 | ORF Stop: end of sequence |

CACCAGATCTGAAGGATCCAGTGAGATTTTCCAGGTTAACGGTCATAACCGCCTACTGGTCCAACGTT
CAGAAGTAACACAGGCACCTGGACAATACACAGTAGATGTGGAAGGACACGGTTGTACATTTATCCAG
GCCACCCTTAAGTACAATGTTCTCCTACCTAAGAAGGCATCTGGATTTTCTCTTTCCTTGGAAATAGT
AAAGAACTACTCTTCGACTGCTTTTGACCTCACAGTGACCCTCAAATACACTGGAATTCGCAATAAAT
CCAGTATGGTGGTTATAGATGTAAAAATGCTATCAGGATTTACTCCAACCATGTCATCCATTGAAGAG
CTTGAAAACAAGGGCCAAGTGATGAAGACTGAAGTCAAGAATGACCATGTTCTTTTCTACTTGGAAAA
TAGCAACCTTGTGTTCAACATTCAGCCAGCCCCAGCCATGGTCTACGATTACTATGAAAAAGAAGAAT
ATGCCCTAGCTTTTTACAACATCGACAGTAGTTCAGTTTCCGAGCTCGAGGGC

| | | | |
|---|---|---|---|
| NOV52f, 248210430 | SEQ ID NO:1102 | 176 aa | MW at 19705.1 kD |
| Protein Sequence | | | |

TRSEGSSEIFQVNGHNRLLVQRSEVTQAPGQYTVDVEGHGCTFIQATLKYNVLLPKKASGFSLSLEIV
KNYSSTAFDLTVTLKYTGIRNKSSMVVIDVKMLSGFTPTMSSIEELENKGQVMKTEVKNDHVLFYLEN
SNLVFNIQPAPAMVYDYYEKEEYALAFYNIDSSSVSELEG

| | | |
|---|---|---|
| NOV52g, 249357755 | SEQ ID NO:1103 | 547 bp |
| DNA Sequence | ORF Start: at 2 | ORF Stop: end of sequence |

CACCAGATCTGAAGGATCCAGTGAGATTTTCCAGGTTAACGGTCATAATCGCCTACTGGTCCAACGTT
CAGAAGTAACACAGGCACCTGGACAATACACAGTAGATGTGGAAGGACACGGTTGTACATTTATCCAG
GCCACCCTTAAGTACAATGTTCTCCTACCTAAGAAGGCATCTGGATTTTCTCTTTCCTTGGAAATAGT
AAAGAACTACTCTTCGACTGCTTTTGACCTCACAGTGACCCTCAAATACACTGGAATTCGCAATAAAT
CCAGTATGGTGGTTATAGATGTAAAAATGCTATCAGGATTTACTCCAACCATGTCATCCACTGAAGAG
CTTGAAAACAAGGGCCAAGTGATGAAGACTGAAGTCAAGAATGACCATGTTCTTTTCTACTTGGAAAA
TAGCAACCTTGTGTTCAACATTCAGCCAGCCCCAGCCATGGTCTACGATTACTATGAAAAAGAAGAAT
ATGCCCTAGCTTTTTACAACATCGACAGTAGTTCAGTTTCCGAGCTCGAGGGCAAGGGCGAATCCAGC
ACA

| | | | |
|---|---|---|---|
| NOV52g, 249357755 | SEQ ID NO:1104 | 182 aa | MW at 20282.6 kD |
| Protein Sequence | | | |

TRSEGSSEIFQVNGHNRLLVQRSEVTQAPGQYTVDVEGHGCTFIQATLKYNVLLPKKASGFSLSLEIV
KNYSSTAFDLTVTLKYTGIPNKSSMVVIDVKMLSGFTPTMSSTEELENKGQVMKTEVKNDHVLFYLEN
SNLVFNIQPAPAMVYDYYEKEEYALAFYNIDSSSVSELEGKGESST

| | | |
|---|---|---|
| NOV52h, CG59584-01 | SEQ ID NO:1105 | 4426 bp |
| DNA Sequence | ORF Start: ATG at 1 | ORF Stop: TGA at 4234 |

ATGTACTGTTTTTTGCGATCTGCCGTTTCGTTCTTCTGCCTCAGCCTCCCCAGGTGCTGGGGTTATAG
GTGTGAGCCACTGTGCCTGGCTATTCTTTTATTACAGTATGTTCTGCTGATTCCTTCTGTTCTACAAG
AAGGCTCTTTGGATAAAGCTTGTGCCCAGCTTTTTAATCTCACTGAATCTGTTGTTTTGACGGTCTCC
CTCAACTATGGTGAGGTCCAGACCAAAATATTTGAAGAAAATGTTACTGGAGAAAATTTCTTCAAATG
CATCAGCTTTGAGGTTCCTCAGGCCAGATCTGACCCACTGGCATTTATTACATTTTCTGCTAAAGGAG
CCACTCTCAACCTGGAAGAGAGGAGATCTGTGGCAATCAGATCCAGAGAGAATGTGGTCTTTGTACAG
ACTGATAAACCCACCTACAAGCCTGGACAGTATAATAAAAAGCCGATCAGTCACATAATGCCAGTGAT
AGCAGTCACTGAACAGGATCCAGAAGGCAATCGAATACAACAGTGGGTGAATGAGGAGTCTGTGGGAG
GGATTCTACAACTCTCCTTCCAGTTAATCTCAGAGCCCATCCTCGGATGGTATGAAATCACCGTGGAG
ATGCTCAATGAGAAGAAAACATATCACTCCTTCTCTGTGGAAGAATATGTGTTACCCAAATTTCAAAT
GACTGTGGATGCACCAGAAAATATCTTAGTTGTGGACTCTGAATTCAAAGTGAATGTCTGTGCCTTGT
ATACCTATGGTGAACCTGTGGACGGGAAGGTCCAACTTAGTGTGTGCAGAGAATCTACGGCTTATCAT
TCATGTGCTCATCTTATCAGTTCACTCTGTAAAAATTTTACCTTGGGGAAAGATGGCTGTGTCTCCAA
GTTTATTAACACAGATGCTTTTGAGTTAAATCGGGAAGGATACTGGAGTTTCCTCAAAGTGCATGCTC
TTGTTACAGAGCTTACAGGCTCCAAGTACGTATACATAGACTCATCAGTGGTGAAGATTAGTTTTGAG
ATGTAAATGGCATCGCTCAGTTTTTCTTGGACACATATACGTTTACATACCCAAATATCACTTTGAAA
GCAGCCTACAAGGCCAATGAAAATTGCCAGGCTCATGGCTGGGTGTTGCCTCAATACCCTCAGCCCGA
GTACTTTGCATATCGATTTTACTCCAAGATGAATAGCTTCCTAAAGATTGTCCAAGAGATGGAAGAAC
TGAGATGCAACCAGCAGAAGAGGGTGCTAGTGCACTGCATTCTCAATATGGAAGACTTTGAAGACAAA
ACCTACACAGCAGACTTCAATTATTTGGTGATTTCAAAAGGTGTAATCATTCTTCATGGGCAACAGAA
AATTGAGATCAACGAAAATGGGAGGAAGGGCATATTTTCCATTTCTATAGACATTAACCCTGAATTAG
CGCCCTCAGTACATATGCTTGTCTATAGCTTGCATCCTGGAGGAGAAATGGTCACTGATAGCACCCAA
TTCCAATTGAGAAATGTTAACATAAAGTTCTCTAACGAGCAGGGCTTACCTGGTTCCAATGCTAGTCT
CTGTCTTCAAGCGGCGCCTGTCTTATTCTGTGCCCTCAGGGCTGTGGATAGGAATGTCCTTCTACTGA
AATCTGAACAACAGCTGTCAGCTGAAAGTGTGTATAACATGGTTCCAAGTATAGAGCCGTATGGTTAT
TTCTACCATGGCCTCAATCTTGATGATGGCAAGGAAGACCCTTGCATTCCTCAGAGGGATATGTTCTA
CAATGGTTTATATTACACACCTGTAAGCAACTATGGGGATGGAGATATCTATAATATTGTCAGGAACA
TGGGTCTAAAAGTCTTTACCAATCTCCATTACCGAAAACCAGAAGTATGTGTGATGGAGAGAAGGCTG
CCACTCCCTAAGCCGCTTTATCTGGAAACAGAAAATTATGGTCCAATGCGTAGTGTTCCGTCTAGAAT
TGCATCTAGTGGAATCAGAGGGGAGAATGCTGACTATGTAGAACAGGCTATAATTCAAACAGTAAGAA
CAAACTTCCCAGAGACATGGATGTGGGACCTCGTCAGTGTCGATTCCTCAGGCTCTGCCAATCTTTCG
TTCCTCATTCCTGATACGATAACCCAATGGGAGGCAAGTGGCTTTTGTGTGAATGGTGACGTTGGATT
TGGCATTTCCTCTACAACCACTCTAGAAGTCTCCCAACCTTTCTTTATTGAGATTGCCTCACCCTTTT
CGGTTGTTCAAAATGAACAATTTGATTTGATTGTCAATGTCTTCAGCTACCGGAATACATGTGTAGAG
ATTTCTGTTCAAGTGGAGGAGTCTCAGAATTATGAAGCAAATATTCATACCTTGAAAATCAATGGCAG
TGAGGTTATTCAAGCTGGAGGGAGGAAAACAAACGTCTGGACTATTATACCTAAGAAATTGGGCAAAG
TGAATATCACTGTAGTTGCTGAGTCCAAACAAAGCAGTGCTTGCCCAAATGAAGGAATGGAGCAGCAA
AAGCTAAACTGGAAAGACACTGTGGTCCAAAGCTTCTTAGTAGAGCCTGAAGGTATTGAAAAGGAAAG
GACCCAGAGTTTCCTTATCTGTACAGAAGGTGCCAAAGCCTCCAAGCAGGGAGTTTTGGACTTGCCAA
ACGATGTAGTAGAAGGGTCAGCCAGAGGCTTTTTCACTGTTGTGGGGGATATTCTAGGACTTGCCTTG
CAGAATCTGGTTGTTCTCCAAATGCCCTATGGAAGTGGAGAGCAGAATGCTGCCCTACTAGCATCTGA
TACTTATGTTCTGGACTATCTGAAATCTACTGAGCAACTGACAGAGGAAGTTCAATCTAAGGCTTTCT
TTCTCTTATCTAATGGTTATCAAAGGCAATTATCTTTCAAAAACTCTGATGGTTCCTATAGTGTGTTT
TGGCAGCAGAGTCAGAAAGGAAGCATATGGCTCAGTGCTCTTACTTTTAAGACATTGGAGAGAATGAA
AAAATATGTATTCATTGATGAAAATGTTCAAAAACAGACCTTAATCTGGCTTTCAAGCCAACAGAAAA
CAAGCGGCTGCTTTAAGAATGATGGCCAGCTTTTCAACCACGCCTGGCAGGGTGGAGATGAAGAGGAC
ATTTCACTCACTGCGTATGTTGTTGGGATGTTCTTTGAAGCTGGGGCGGCATTGGACAGTGGTGTCAC
TAATGGCTATAATCATGCAATTCTAGCTTATGCTTTTGCCTTAGCTGGAAAAGAGAAGCAAGTGGAAT
CTTTACTCCAAACCCTGGATCAATCTGCCCCAAAACTAAATAATGTCATCTACTGGGAAAGAGAAAGG
AAACCCAAGACAGAAGAATTTCCATCCTTTATTCCCTGGGCACCTTCTGCTCAGACTGAGAAGAGTTG
CTACGTGCTGTTGGCTGTCATTTCCCGGAAAATTCCTGACCTCACCTATGCTAGTAAGATTGTGCAGT
GGCTTGCCCAACGGATGAATTCCCATGGAGGCTTTTCTTCCAACCAGGATCAAAACACTGTCACCTTT
AGCAGTGAAGGATCCAGTGAGATTTTCCAGGTTAACGGTCATAACCGCCTACTGGTCCAACGTTCAGA
AGTAACACAGGCACCTGGAGAATACACAGTAGATGTGGAAGGACACGGTTGTACATTTATCCAGGCCA
CCCTTAAGTACAATGTTCTCCTACCTAAGAAGGCATCTGGATTTTCTCTTTCCTTGGAAATAGTAAAG
AACTACTCTTCGACTGCTTTTGACCTCACAGTGACCCTCAAATACACTGGAATTCGCAATAAATCCAG
TATGGTGGTTATAGATGTAAAAATGCTATCAGGATTTACTCCAACCATGTCATCCATTGAAGAGCTTG
AAAACAAGGGCCAAGTGATGAAGACTGAAGTCAAGAATGACCATGTTCTTTTCTACTTGGAAAATGTA
GGTTTTGGTCGAGCAGACAGTTTCCCTTTTTCTGTTGAGCAGAGCAACCTTGTGTTCAACATTCAGCC
AGCCCCAGCCATGGTCTACGATTATTATGAAAAAGAAGAATATGCCCTAGCTTTTTACAACATCGACA
GTAGTTCAGTTTCCGAGTGAGACAAAGCAATTACTAGAAGAGTTGGAGAAGCATTTCTTGTAACAAAC
TGATTCTTCTGTATCAAACCTGGAAAAAAATCATGAACCATCTGACATCGTGAACAGTCTGCAGTGGG
CTATGGTTTCTTGTCAAGTCTTATTTCCTTATCATCCCATTAAATGTTGTCATTTTGCAAAAAAAAAA
AAAAAA

| | | | |
|---|---|---|---|
| NOV52h, CG59584-01 | SEQ ID NO:1106 | 1411 aa | MW at 158867.0 kD |
| Protein Sequence | | | |

MYCFLRSAVSFFCLSLPRCWGYRCEPLCLAILLLQYVLLIPSVLQEGSLDKACAQLFNLTESVVLTVS
LNYGEVQTKIFEENVTGENFFKCISFEVPQARSDPLAFITFSAKGATLNLEERRSVAIRSRENVVFVQ
TDKPTYKPGQYNKKPISHIMPVIAVTEQDPEGNRIQQWVNEESVGGILQLSFQLISEPTLGWYEITVE
MLNEKKTYHSFSVEEYVLPKFQMTVDAPENILVVDSEFKVNVCALYTYGEPVDGKVQLSVCRESTAYH
SCAHLISSLCKNFTLGKDGCVSKFINTDAFELNREGYWSFLKVHALVTELTGSKYVYIDSSVVKISFE
NMDMSYKQGLPYFGQIKLLNPDNSPIPNEVVQLHLKDKIVGNYTTDVNGIAQFFLDTYTFTYPNITLK
AAYKANENCQAHGWVLPQYPQPEYFAYRFYSKMNSFLKIVQENEELRCNQQKRVLVHCILNMEDFEDK
TYTADFNYLVISKGVIILHGQQKIEINENGRKGIFSISIDINPELAPSVHMLVYSLHPGGEMVTDSTQ
FQLRNVNIKFSNEQGLPGSNASLCLQAAPVLFCALRAVDRNVLLLKSEQQLSAESVYNMVPSIEPYGY
FYHGLNLDDGKEDPCIPQRDMFYNGLYYTPVSNYGDGDIYNIVRNMGLKVFTNLHYRKPEVCVMERRL
PLPKPLYLETENYGPMRSVPSRIASSGIRGENADYVEQAIIQTVRTNFPETWMWDLVSVDSSGSANLS
FLIPDTITQWEASGFCVNGDVGFGISSTTTLEVSQPFFIEIASPFSVVQNEQFDLIVNVFSYRNTCVE
ISVQVEESQNYEANIHTLKINGSEVIQAGGRKTNVWTIIPKKLGKVNITVVAESKQSSACPNEGMEQQ
KLNWKDTVVQSFLVEPEGIEKERTQSFLICTEGAKASKQGVLDLPNDVXTEGSARGFFTWGDILGLAL
QNLVVLQMPYGSGEQNAALLASDTYVLDYLKSTEQLTEEVQSKAFFLLSNGYQRQLSFKNSDGSYSVF
WQQSQKGSIWLSALTFKTLERMKKYVFIDENVQKQTLIWLSSQQKTSGCFKNDGQLFNHAWQGGDEED
ISLTAYVVGMFFEAGAALDSGVTNGYNHAILAYAFALAGKEKQVESLLQTLDQSAPKLNNVIYWERER
KPKTEEFPSFIPWAPSAQTEKSCYVLLAVISRKIPDLTYASKIVQWLAQRMNSHGGFSSNQDQNTVTF
SSEGSSEIFQVNGHNRLLVQRSEVTQAPGEYTVDVEGHGCTFIQATLKYNVLLPKKASGFSLSLEIVK
NYSSTAFDLTVTLKYTGIRNKSSMVVIDVKMLSGFTPTMSSIEELENKGQVMKTEVKNDHVLFYLENV
GFGRADSFPFSVEQSNLVFNIQPAPAMVYDYYEKEEYALAFYNIDSSSVSE

[0656] A ClustalW comparison of the above protein sequences yields the following sequence alignment shown in Table 52B.

TABLE 52B
Comparison of the NOV52 protein sequences.

| | | |
|---|---|---|
| NOV52a | MIKLLNPDNSPIPNEVVQLHLKDKIVGNYTTDVNGIAQFFLDTYTFTYPNITLKAAYKAN | (SEQ ID NO:1092) |
| NOV52b | ------------------------------------------------------------ | (SEQ ID NO:1094) |
| NOV52c | ------------------------------------------------------------ | (SEQ ID NO:1096) |
| NOV52d | ------------------------------------------------------------ | (SEQ ID NO:1098) |
| NOV52e | ------------------------------------------------------------ | (SEQ ID NO:1100) |
| NOV52f | ------------------------------------------------------------ | (SEQ ID NO:1102) |
| NOV52g | ------------------------------------------------------------ | (SEQ ID NO:1104) |
| NOV52h | ------------------------------------------------------------ | (SEQ ID NO:1106) |
| NOV52a | ENCQAHGWVLPQYPQPEYFAYRFYSKMNSFLKIVQEMEELRCNQQKRVLVHCILNMEDFE | |
| NOV52b | ------------------------------------------------------------ | |
| NOV52c | ------------------------------------------------------------ | |
| NOV52d | ------------------------------------------------------------ | |
| NOV52e | ------------------------------------------------------------ | |
| NOV52f | ------------------------------------------------------------ | |
| NOV52g | ------------------------------------------------------------ | |
| NOV52h | --------------------------MYCFLRSAVSFFCLSLPR---------------- | |
| NOV52a | DKTYTADFNYLVISKGVIILHGQQKIEINENGRKGIFSISIDINPELAPSVDMLVYSLHP | |
| NOV52b | -------------------------------------SISIDINPELAPSVDMLVYSLHP | |
| NOV52c | ------------------------------------------------------------ | |
| NOV52d | ------------------------------------------------------------ | |
| NOV52e | ------------------------------------------------------------ | |
| NOV52f | ------------------------------------------------------------ | |
| NOV52g | ------------------------------------------------------------ | |
| NOV52h | --------------------------------CWGYRCEPLCLAILLLQYVLLIPSVLQE | |
| NOV52a | GGEMVTDSTQFRIEKCFENQVNLNFSKEKSLPGSNIDLQVSAASNSLCALWAVDQSVLLL | |
| NOV52b | GGEMVTDSTQFRIEKCFENQVNLNFSKEKSLPGSNIDLQVSAASNSLCALWAVDQSVLLL | |
| NOV52c | ------------------------------------------------------------ | |
| NOV52d | ------------------------------------------------------------ | |
| NOV52e | ------------------------------------------------------------ | |
| NOV52f | ------------------------------------------------------------ | |
| NOV52g | ------------------------------------------------------------ | |
| NOV52h | GSLDKACAQLFNLTESVVLTVSLNYGEVQTK---IFEENVTGENFFKCISFEVPQARSDP | |
| NOV52a | RNYGQLSAQTVYSQLYSRELHGYYFRGLNLEDGLKVPCLEDEHILYNGIYYTPAWADFGK | |
| NOV52b | RNYGQLSAQTVYSQLYSRELHGYYFRGLNLEDGLKVPCLEDEHILYNGIYYTPAWADFGK | |
| NOV52c | ------------------------------------------------------------ | |
| NOV52d | ------------------------------------------------------------ | |
| NOV52e | ------------------------------------------------------------ | |
| NOV52f | ------------------------------------------------------------ | |
| NOV52g | ------------------------------------------------------------ | |
| NOV52h | LAFITFSAKGATLNLEERRSVAIRSRENVVFVQTDKPTYKPGQYNKKPISHIMPVIAVT- | |
| NOV52a | DGYDLVKDPQNNRIFQRQNVTSFRNITQLSFQLISEPMFGDYWIVVKRNSRETVTHQFAV | |
| NOV52b | DGYDLVKDPQNNRIFQRQNVTSFRNITQLSFQLTSEPMFGDYWIVVKRNSRETVTHQFAV | |
| NOV52c | ------------------------------------------------------------ | |
| NOV52d | ------------------------------------------------------------ | |
| NOV52e | ------------------------------------------------------------ | |
| NOV52f | ------------------------------------------------------------ | |
| NOV52g | ------------------------------------------------------------ | |
| NOV52h | -----EQDPEGNRIQQWVNEESVGGILQLSFQLISEPILGWYEITVEMLNEKKTYHSFSV | |
| NOV52a | KRYVLPKFEVTVNAPQTVTISDDEFQVDVCAKYNFGQPVQGETQIRVCREYFSSSNCEKN | |
| NOV52b | KRYVLPKFEVTVNAPQTVTISDDEFQVDVCAKYNFGQPVQGETQIRVCREYFSSSNCEKN | |
| NOV52c | ------------------------------------------------------------ | |
| NOV52d | ------------------------------------------------------------ | |
| NOV52e | ------------------------------------------------------------ | |
| NOV52f | ------------------------------------------------------------ | |
| NOV52g | ------------------------------------------------------------ | |
| NOV52h | EEYVLPKFQMTVDAPENILVVDSEFKVNVCALYTYGEPVDGKVQLSVCRESTAYHSCAHL | |
| NOV52a | ENEICEQFIAQLENGCVSQIVNTKVFQLYRSGLFMTFHVAVIVTESGTVMQISEKTSVFI | |
| NOV52b | ENEICEQFIAQLENGCVSQIVNTKVFQLYRSGLFMTFHVAVIVTESGTVMQISEKTSVFI | |
| NOV52c | ------------------------------------------------------------ | |
| NOV52d | ------------------------------------------------------------ | |
| NOV52e | ------------------------------------------------------------ | |
| NOV52f | ------------------------------------------------------------ | |
| NOV52g | ------------------------------------------------------------ | |
| NOV52h | ISSLCKNFTLGKD-GCVSKFINTDAFELNREGYWSFLKVEALVTE------LTGSKYVYI | |
| NOV52a | TQLLGTVNFENMDTFYRRGISYFGTLKFSDPNNVPMVNKLLQLELNDEFIGNYTTDENGE | |
| NOV52b | TQLLGTVNFENMDTFYRRGISYFGTLKFSDPNNVPMVNKLLQLELNDEFIGNYTTDENGE | |
| NOV52c | ------------------------------------------------------------ | |
| NOV52d | ------------------------------------------------------------ | |
| NOV52e | ------------------------------------------------------------ | |
| NOV52f | ------------------------------------------------------------ | |
| NOV52g | ------------------------------------------------------------ | |
| NOV52h | DSSVVKISFENMDMSYKQGLPYFGQIKLLNPDNSPIPNEVVQLHLKDKIVGNYTTDVNGI | |
| NOV52a | AQFSIDTSDIFDPEFNLKATYVRPESCYLPSWLTPQYLDAHFLVSRFYSRTNSFLKIVPE | |
| NOV52b | AQFSIDTSDIFDPEFNLKATYVRPESCYLPSWLTPQYLDAHFLVSRFYSRTNSFLKIVPE | |
| NOV52c | ------------------------------------------------------------ | |
| NOV52d | ------------------------------------------------------------ | |
| NOV52e | ------------------------------------------------------------ | |
| NOV52f | ------------------------------------------------------------ | |
| NOV52g | ------------------------------------------------------------ | |
| NOV52h | AQFFLDTYTFTYPNITLKAAYKANENCQAHGWVLPQYPQPEYFAYRFYSKMNSFLKIVQE | |
| NOV52a | PKQLECNQQKVVTVHYSLNSEAYEDDS-NVKFFYLMMVKGAILLSGQK--EIRNKAWNGN | |
| NOV52b | PKQLECNQQKVVTVHYSLNSEAYEDDS-NVKFFYLMMVKGAILLSGQK--EIRNKAWNGN | |
| NOV52c | ------------------------------------------------------------ | |
| NOV52d | ------------------------------------------------------------ | |
| NOV52e | ------------------------------------------------------------ | |
| NOV52f | ------------------------------------------------------------ | |
| NOV52g | ------------------------------------------------------------ | |
| NOV52h | MEELRCNQQKRVLVHCILNMEDFEDKTYTADFNYLVISKGVIILHGQQKIEINENGRKGI | |
| NOV52a | FSFPISISADLAPAAVLFVYTLHPSGEIVADSVRFQVDKCFKHKVNIKFSNEQGLPGSNA | |
| NOV52b | FSFPISISADLAPAAVLFVYTLHPSGEIVADSVRFQVDKCFKHKVNIKFSNEQGLPGSNA | |
| NOV52c | ------------------------------------------------------------ | |
| NOV52d | ------------------------------------------------------------ | |
| NOV52e | ------------------------------------------------------------ | |
| NOV52f | ------------------------------------------------------------ | |
| NOV52g | ------------------------------------------------------------ | |
| NOV52h | FSISIDINPELAPSVHMLVYSLHPGGEMVTDSTQFQLR-----NVNIKFSNEQGLPGSNA | |
| NOV52a | SLCLQAAPVLFCALRAVDRNVLLLKSEQQLSAESVYNMVPSIEPYGYFYHGLNLDDGKED | |
| NOV52b | SLCLQAAPVLFCALRAVDRNVLLLKSEQQLSAESVYNMVPSIEPYGYFYHGLNLDDGKED | |
| NOV52c | ------------------------------------------------------------ | |
| NOV52d | ------------------------------------------------------------ | |
| NOV52e | ------------------------------------------------------------ | |
| NOV52f | ------------------------------------------------------------ | |
| NOV52g | ------------------------------------------------------------ | |
| NOV52h | SLCLQAAPVLFCALRAVDRNVLLLKSEQQLSAESVYNMVPSIEPYGYFYHGLNLDDGKED | |
| NOV52a | PCIPQRDMFYNGLYYTPVSNYGDGDIYNIVPNMGLKVFTNLHYRKPEKIMVQCVVFR--- | |
| NOV52b | PCIPQRDMFYNGLYYTPVSNYGDGDIYNIVRNMGLKVFTNLHYRKPEKIMVQCVVFR--- | |
| NOV52c | ------------------------------------------------------------ | |
| NOV52d | ------------------------------------------------------------ | |
| NOV52e | ------------------------------------------------------------ | |
| NOV52f | ------------------------------------------------------------ | |
| NOV52g | ------------------------------------------------------------ | |
| NOV52h | PCIPQRDMFYNGLYYTPVSNYGDGDIYNIVRNMGLKVFTNLHYRKPEVCVMERRLPLPKP | |
| NOV52a | --------------LELHVASGIRGENADYVEQAIIQTVRTNFPETWMWDLVSVDSSGSA | |
| NOV52b | --------------LELRVASGIRGENADYVEQAIIQTVRTNFPETWMWDLVSVDSSGSA | |
| NOV52c | ------------------------------------------------------------ | |
| NOV52d | ------------------------------------------------------------ | |
| NOV52e | ------------------------------------------------------------ | |
| NOV52f | ------------------------------------------------------------ | |
| NOV52g | ------------------------------------------------------------ | |
| NOV52h | LYLETENYGPMRSVPSRIASSGIRGENADYVEQAIIQTVRTNFPETWMWDLVSVDSSGSA | |
| NOV52a | NLSFLIPDTITQWEASGFCVNGDVGFGISSTTTLEVSQPFFIEIASPFSVVQNEQFDLIV | |
| NOV52b | NLSFLIPDTITQWEASGFCVNGDVGFGISSTTTLEVSQPFFIEIASPFSVVQNEQFDLIV | |
| NOV52c | ------------------------------------------------------------ | |
| NOV52d | ------------------------------------------------------------ | |
| NOV52e | ------------------------------------------------------------ | |
| NOV52f | ------------------------------------------------------------ | |
| NOV52g | ------------------------------------------------------------ | |
| NOV52h | NLSFLIPDTITQWEASGFCVNGDVGFGISSTTTLEVSQPFFIEIASPFSVVQNEQFDLIV | |
| NOV52a | NVFSYRNTCVEISVQVEESQNYEANIHTLKINGSEVIQAGGRKTNVWTIIPKKLGKVNIT | |
| NOV52b | NVFSYRNTCVEISVQVEESQNYEANIHTLKINGSEVIQAGGRKTNVWTIIPKKLGKVNIT | |
| NOV52c | ------------------------------------------------------------ | |
| NOV52d | ------------------------------------------------------------ | |
| NOV52e | ------------------------------------------------------------ | |
| NOV52f | ------------------------------------------------------------ | |
| NOV52g | ------------------------------------------------------------ | |
| NOV52h | NVFSYRNTCVEISVQVEESQNYEANIHTLKINGSEVIQAGGRKTNVWTIIPKKLGKVNIT | |
| NOV52a | VVAESKQSSACPNEGMEQQKLNWKDTVVQSFLVEPEGIEKERTQSFLICTEGAKASKQGV | |
| NOV52b | VVAESKQSSACPNEGMEQQKLNWKDTVVQSFLVEPEGIEKERTQSFLICTEGAKASKQGV | |
| NOV52c | ------------------------------------------------------------ | |
| NOV52d | ------------------------------------------------------------ | |
| NOV52e | ------------------------------------------------------------ | |
| NOV52f | ------------------------------------------------------------ | |
| NOV52g | ------------------------------------------------------------ | |
| NOV52h | VVAESKQSSACPNEGMEQQKLNWKDTVVQSFLVEPEGIEKERTQSFLICTEGAKASKQGV | |
| NOV52a | LDLPNDVVEGSARGFFTVVGDILGLALQNLVVLQMPYGSGEQNAALLASDTYVLDYLKST | |
| NOV52b | LDLPNDVVEGSARGFFTVVGDILGLALQNLVVLQMPYGSGEQNAALLASDTYVLDYLKST | |
| NOV52c | ------------------------------------------------------------ | |
| NOV52d | ------------------------------------------------------------ | |
| NOV52e | ------------------------------------------------------------ | |
| NOV52f | ------------------------------------------------------------ | |
| NOV52g | ------------------------------------------------------------ | |
| NOV52h | LDLPNDVVEGSARGFFTVVGDILGLALQNLVVLQMPYGSGEQNAALLASDTYVLDYLKST | |
| NOV52a | EQLTEEVQSKAFFLLSNGYQRQLSFKNSDGSYSVFWQQSQKGSIWLSALTFKTLERMKKY | |
| NOV52b | EQLTEEVQSKAFFLLSNGYQRQLSFKNSDGSYSVFWQQSQKGSIWLSALTFKTLERMKKY | |
| NOV52c | ------------------------------------------------------------ | |
| NOV52d | ------------------------------------------------------------ | |
| NOV52e | ------------------------------------------------------------ | |
| NOV52f | ------------------------------------------------------------ | |
| NOV52g | ------------------------------------------------------------ | |
| NOV52h | EQLTEEVQSKAFFLLSNGYQRQLSFKNSDGSYSVFWQQSQKGSIWLSALTFKTLERMKKY | |
| NOV52a | VFIDENVQKQTLIWLSSQQKTSGCFKNDGQLFNHAWEGGDEEDISLTAYVVGMFFEAGLN | |
| NOV52b | VFIDENVQKQTLIWLSSQQKTSGCFKNDGQLFNHAWEGGDEEDISLTAYVVGMFFEAGLN | |
| NOV52c | ------------------------------------------------------------ | |
| NOV52d | ------------------------------------------------------------ | |
| NOV52e | ------------------------------------------------------------ | |
| NOV52f | ------------------------------------------------------------ | |
| NOV52g | ------------------------------------------------------------ | |
| NOV52h | VFIDENVQKQTLIWLSSQQKTSGCFKNDGQLFNHAWQGGDEEDISLTAYVVGMFFEAGA- | |
| NOV52a | FTFPALRNALFCLEAALDSGVTNGYNHAILAYAFALAGKEKQVESLLQTLDQSAPKLNNV | |
| NOV52b | FTFPALRNALFCLEAALDSGVTNGYNHAILAYAFALAGKEKQVESLLQTLDQSAPKLNNV | |
| NOV52c | ------------------------------------------------------------ | |
| NOV52d | ------------------------------------------------------------ | |
| NOV52e | ------------------------------------------------------------ | |
| NOV52f | ------------------------------------------------------------ | |
| NOV52g | ------------------------------------------------------------ | |
| NOV52h | ---------------ALDSGVTNGYNHAILAYAFALAGKEKQVESLLQTLDQSAPKLNNV | |
| NOV52a | IYWERERKPKTEEFPSFIPWAPSAQTEKSCYVLLAVISRKIPDLTYASKIVQWLAQRMNS | |
| NOV52b | IYWERERKPKTEEFPSFIPWAPSAQTEKSCYVLLAVISRKIPDLTYASKIVQWLAQRMNS | |
| NOV52c | ------------------------------------------------------------ | |
| NOV52d | ------------------------------------------------------------ | |
| NOV52e | ------------------------------------------------------------ | |
| NOV52f | ------------------------------------------------------------ | |
| NOV52g | ------------------------------------------------------------ | |
| NOV52h | IYWERERKPKTEEFPSFIPWAPSAQTEKSCYVLLAVISRKIPDLTYASKIVQWLAQRMNS | |
| NOV52a | HGGFSSNQTPDDTLFKLYTGQKESFRSSSVGYTLGKANEKKENRRNGGEGSSEIFQVNGH | |
| NOV52b | HGGFSSNQTPDDTLFKLYTGQKESFRSSSVGYTLGKANEKKENRRNGGEGSSEIFQVNGH | |
| NOV52c | ------------------------TRS---------------------EGSSEIFQVNGH | |
| NOV52d | ------------------------TRS---------------------EGSSEIFQVNGH | |
| NOV52e | ------------------------TRS---------------------EGSSEIFQVNGH | |
| NOV52f | ------------------------TRS---------------------EGSSEIFQVNGH | |
| NOV52g | ------------------------TRS---------------------EGSSEIFQVNGH | |
| NOV52h | HGGFSSNQDQNT----------VTFSS---------------------EGSSEIFQVNGH | |
| NOV52a | NRLLVQRSEVTQAPGEYTVDVEGHGCTFIQATLKYNVLLPKKASGFSLSLEIVKNYSSTA | |
| NOV52b | NRLLVQRSEVTQAPGEYTVDVEGHGCTFIQATLKYNVLLPKKASGFSLSLEIVKNYSSTA | |
| NOV52c | NRLLVQRSEVTQAPGEYTVDVEGHGCTFIQATLKYNVLLPKKASGFSLSLEIVKNYSSTA | |
| NOV52d | NRLLVQRSEVTQAPGQYTVDVEGHGCTFIQATLKYNVLLPKKASGFSLSLEIVKNYSSTA | |
| NOV52e | NRLLVQRSEVTQAPGQYTVDVEGHGCTFIQATLKYDVLLPKKASGFSLSLEIVKNYSSTA | |
| NOV52f | NRLLVQRSEVTQAPGQYTVDVEGHGCTFIQATLKYNVLLPKKASGFSLSLEIVKNYSSTA | |
| NOV52g | NRLLVQRSEVTQAPGQYTVDVEGHGCTFIQATLKYNVLLPKKASGFSLSLEIVKNYSSTA | |
| NOV52h | NRLLVQRSEVTQAPGEYTVDVEGHGCTFIQATLKYNVLLPKKASGFSLSLEIVKNYSSTA | |
| NOV52a | FDLTVTLKYTGIRNKSSMVVIDVKMLSGFTPTMSSIEELENKGQVMKTEVKNDHVLFYLE | |
| NOV52b | FDLTVTLKYTGIRNKSSMVVIDVKMLSGFTPTMSSIEELENKGQVMKTEVKNDHVLFYLE | |
| NOV52C | FDLTVTLKYTGIRNKSSMVVIDVKMLSGFTPTMSSIEELENKGQVMKTEVKNDHVLFYLE | |
| NOV52d | FDLTVTLKYTGIRNKSSMVVIDVKMLSGFTPTMSSIEELENKGQVMKTEVKNDHVLFYLE | |
| NOV52e | FDLTVTLKYTGIRNKSSMVVIDVKMLSGFTPTMSSIEELENKGQVMKTEVKNDHVLFYLE | |
| NOV52f | FDLTVTLKYTGIRNKSSMVVIDVKMLSGFTPTMSSIEELENKGQVMKTEVKNDHVLFYLE | |
| NOV52g | FDLTVTLKYTGIRNKSSMVVIDVKMLSGFTPTMSSTEELENKGQVMKTEVKNDHVLFYLE | |
| NOV52h | FDLTVTLKYTGIRNKSSMVVIDVKMLSGFTPTMSSIEELENKGQVMKTEVKNDHVLFYLE | |
| NOV52a | NVGFGRADSFPFSVEQSNLVFNIQPAPAMVYDYYEKEEYALAFYNIDSSSVSE------- | |
| NOV52b | NVGFGRADSFPFSVEQSNLVFNIQPAPAMVYDYYEKEEYALAFYNIDSSSVSE------- | |
| NOV52c | NG-FGRADSFPFSVEQSNLVFNIQPAPAMVYDYYEKEEYALAFYNIDSSSVSELEG---- | |
| NOV52d | NG-FGRADSFPFSVEQSNLVFNIQPAPAMVYDYYEKEEYALAFYNIDSSSVSELEG---- | |
| NOV52e | NG-FGRADSFPFSVEQSNLVFNIQPAPAMVYDYYEKEEYALAFYNIDSSSVSELEG---- | |
| NOV52f | NS---------------NLVFNIQPAPAMVYDYYEKEEYALAFYNIDSSSVSELEG---- | |
| NOV52g | NS---------------NLVFNIQPAPAMVYDYYEKEEYALAFYNIDSSSVSELEGKGES | |
| NOV52h | NVGFGRADSFPFSVEQSNLVFNIQPAPAMVYDYYEKEEYALAFYNIDSSSVSE------- | |
| NOV52a | -- | |
| NOV52b | -- | |
| NOV52c | -- | |
| NOV52d | -- | |
| NOV52e | -- | |
| NOV52f | -- | |
| NOV52g | ST | |
| NOV52h | -- | |

[0657] Further analysis of the NOV52a protein yielded the following properties shown in Table 52C.

TABLE 52C
Protein Sequence Properties NOV52a

| | |
|---|---|
| SignalP analysis: | No Known Signal Sequence Predicted |
| PSORT II analysis: | |

| PSG: | a new signal peptide prediction method | |
|---|---|---|
| | N-region: | length 8; pos. chg 1; neg. chg 1 |
| | H-region: | length 6; peak value −6.21 |
| | PSG score: | −10.61 |

| | |
|---|---|
| GvH: | von Heijne's method for signal seq. recognition |
| | GvH score (threshold: −2.1): −9.40 |
| | possible cleavage site: between 45 and 46 |

>>> Seems to have no N-terminal signal peptide

| ALOM: | Klein et al's method for TM region allocation | |
|---|---|---|
| | Init position for calculation: 1 | |
| | Tentative number of TMS(s) for the threshold 0.5: 3 | |
| | Number of TMS(s) for threshold 0.5: 0 | |
| | PERIPHERAL | Likelihood = 1.11 (at 629) |

| | ALOM score: −1.70 (number of TMSs: 0) | | | |
|---|---|---|---|---|
| MITDISC: | discrimination of mitochondrial targeting seq | | | |
| | R content: | 0 | Hyd Moment(75): | 9.53 |
| | Hyd Moment(95): | 7.08 | G content: | 0 |
| | D/E content: | 2 | S/T content: | 1 |

| | |
|---|---|
| | Score: −6.16 |
| Gavel: | prediction of cleavage sites for mitochondrial preseq |
| | cleavage site motif not found |

NUCDISC: discrimination of nuclear localization signals

| | |
|---|---|
| | pat4: RKPK (4) at 1307 |
| | pat7: none |
| | bipartite: none |
| | content of basic residues: 8.7% |
| | NLS Score: −0.22 |
| KDEL: | ER retention motif in the C-terminus: none |

ER Membrane Retention Signals: none
SKL: peroxisomal targeting signal in the C-terminus: none
PTS2: 2nd peroxisomal targeting signal: found
KIVPEPKQL at 596
VAC: possible vacuolar targeting motif: none
RNA-binding motif: none
Actinin-type actin-binding motif:

type 1: none
type 2: none

NMYR: N-myristoylation pattern: none
Prenylation motif: none
memYQRL: transport motif from cell surface to Golgi: none
Tyrosines in the tail: none
Dileucine motif in the tail: none
checking 63 PROSITE DNA binding motifs: none
checking 71 PROSITE ribosomal protein motifs: none
checking 33 PROSITE prokaryotic DNA binding motifs: none

| | |
|---|---|
| NNCN: | Reinhardt's method for Cytoplasmic/Nuclear discrimination |
| | Prediction: cytoplasmic |
| | Reliability: 89 |
| COIL: | Lupas's algorithm to detect coiled-coil regions |
| | total: 0 residues |

Final Results (k = 9/23):

47.8%: nuclear
30.4%: cytoplasmic
17.4%: mitochondrial
4.3%: vesicles of secretory system

>> prediction for CG59584-03 is nuc (k = 23)

[0658] A search of the NOV52a protein against the Geneseq database, a proprietary database that contains sequences published in patents and patent publication, yielded several homologous proteins shown in Table 52D.

TABLE 52D
Geneseq Results for NOV52a

| | | NOV52a | Identities/ | | |
|---|---|---|---|---|---|
| | | Residues/ | Similarities for | | |
| Geneseq | Protein/Organism/Length | Match | the Matched | | Expect |
| Identifier | [Patent #, Date] | Residues | Region | | Value |
| ABU52373 | Human GPCR related protein | 158 . . . 1593 | 1436/1436 | (100%) | 0.0 |
| | NOV26b - Homo sapiens, 1436 aa. | 1 . . . 1436 | 1436/1436 | (100%) | |
| | [WO200279398-A2, 10-OCT-2002] | | | | |
| ABU52372 | Human GPCR related protein | 307 . . . 1593 | 997/1311 | (76%) | 0.0 |
| | NOV26a - Homo sapiens, 1411 aa. | 164 . . . 1411 | 1072/1311 | (81%) | |
| | [WO200279398-A2, 10-OCT-2002] | | | | |
| ABG05715 | Novel human diagnostic protein | 308 . . . 1137 | 742/852 | (87%) | 0.0 |
| | #5706 - Homo sapiens, 1200 aa. | 30 . . . 819 | 748/852 | (87%) | |
| | [WO200175067-A2, 11-OCT-2001] | | | | |
| ABG05716 | Novel human diagnostic protein | 393 . . . 1137 | 655/767 | (85%) | 0.0 |
| | #5707 - Homo sapiens, 1379 aa. | 294 . . . 998 | 662/767 | (85%) | |
| | [WO200175067-A2, 11-OCT-2001] | | | | |
| AAU81018 | Human alpha2 macroglobulin | 306 . . . 1589 | 527/1320 | (39%) | 0.0 |
| | (alpha2M) receptor #1 mature protein - | 144 . . . 1445 | 798/1320 | (59%) | |
| | Homo sapiens, 1451 aa. | | | | |
| | [WO200192474-A1, 06-DEC-2001] | | | | |

[0659] In a BLAST search of public sequence databases, the NOV52a protein was found to have homology to the proteins shown in the BLASTP data in Table 52E.

TABLE 52E
Public BLASTP Results for NOV52a

| | | NOV52a | Identities/ | |
|---|---|---|---|---|
| Protein | | Residues/ | Similarities for | |
| Accession | | Match | the Matched | Expect |
| Number | Protein/Organism/Length | Residues | Portion | Value |
| P20740 | Ovostatin precursor | 306 . . . 1584 | 577/1306 (44%) | 0.0 |
| | (Ovomacroglobulin) - Gallus gallus | 178 . . . 1461 | 844/1306 (64%) | |
| | (Chicken), 1473 aa. | | | |
| P01023 | Alpha-2-macroglobulin precursor | 306 . . . 1589 | 527/1320 (39%) | 0.0 |
| | (Alpha-2-M) - Homo sapiens | 167 . . . 1468 | 798/1320 (59%) | |
| | (Human), 1474 aa. | | | |
| CAA01532 | ALPHA 2-MACROGLOBULIN 690- | 306 . . . 1589 | 525/1320 (39%) | 0.0 |
| | 730 - Homo sapiens (Human), 1474 | 167 . . . 1468 | 795/1320 (59%) | |
| | aa. | | | |
| CAA01533 | ALPHA 2-MACROGLOBULIN 690- | 306 . . . 1589 | 524/1330 (39%) | 0.0 |
| | 740 - Homo sapiens (Human), 1484 | 167 . . . 1478 | 792/1330 (59%) | |
| | aa. | | | |
| P06238 | Alpha-2-macroglobulin precursor | 306 . . . 1590 | 520/1314 (39%) | 0.0 |
| | (Alpha-2-M) - Rattus norvegicus | 170 . . . 1467 | 782/1314 (58%) | |
| | (Rat), 1472 aa. | | | |

[0660] PFam analysis predicts that the NOV52a protein contains the domains shown in the Table 52F.

TABLE 52F
Domain Analysis of NOV52a

| | | Identities/ | |
|---|---|---|---|
| | | Similarities | |
| Pfam | NOV52a Match | for the | |
| Domain | Region | Matched Region | Expect Value |
| A2M_N | 110 . . . 763 | 171/707 (24%) | 6e−62 |
| | | 420/707 (59%) | |
| A2M | 852 . . . 1584 | 258/858 (30%) | 3.9e−146 |
| | | 503/858 (59%) | |

### Example 53

[0661] The NOV53 clone was analyzed, and the nucleotide and encoded polypeptide sequences are shown in Table 53A.

TABLE 53A
NOV53 Sequence Analysis

| | | |
|---|---|---|
| NOV53a, 56008-01 | SEQ ID NO:1107 | 3445 bp |
| DNA Sequence | ORF Start: ATG at 117 | ORF Stop: TGA at 2381 |

CACCGCGTGTTCGCGCCTGGTAGAGATTTCTCGAAGACACCAGTGGGCCCGTGTGGAACC
AAACCTGCGCGCGTGGCCGGGCCGTGGGACAACGAGGCCGCGGAGACGAAGGCGCAATGG
CGAGGAAGTTATCTGTAATCTTGATCCTGACCTTTGCCCTCTCTGTCACAAATCCCCTTC
ATGAACTAAAAGCAGCTGCTTTCCCCCAGACCACTGAGAAAATTAGTCCGAATTGGGAAT
CTGGCATTAATGTTGACTTGGCAATTTCCACACGGCAATATCATCTACAACAGCTTTTCT
ACCGCTATGGAGAAAATAATTCTTTGTCAGTTGAAGGGTTCAGAAAATTACTTCAAAATA
TAGGCATAGATAAGATTAAAAGAATCCATATACACCATGACCACGACCATCACTCAGACC
ACGAGCATCACTCAGACCATGAGCGTCACTCAGACCATGAGCATCACTCAGAGCACGAGC
ATCACTCTGACCATGATCATCACTCTCACCATAATCATGCTGCTTCTGGTAAAAATAAGC
GAAAAGCTCTTTGCCCAGACCATGACTCAGATAGTTCAGGTAAAGATCCTAGAAACAGCC
AGGGGAAAGGAGCTCACCGACCAGAACATGCCAGTGGTAGAAGGAATGTCAAGGACAGTG
TTAGTGCTAGTGAAGTGACCTCAACTGTGTACAACACTGTCTCTGAAGGAACTCACTTTC
TAGAGACAATAGAGACTCCAAGACCTGGAAAACTCTTCCCCAAAGATGTAAGCAGCTCCA
CTCCACCCAGTGTCACATCAAAGAGCCGGGTGAGCCGGCTGGCTGGTAGGAAAACAAATG
AATCTGTGAGTGAGCCCCGAAAAGGCTTTATGTATTCCAGAAACACAAATGAAAATCCTC
AGGAGTGTTTCAATGCATCAAAGCTACTGACATCTCATGGCATGGGCATCCAGGTTCCGC
TGAATGCAACAGAGTTCAACTATCTCTGTCCAGCCATCATCAACCAAATTGATGCTAGAT
CTTGTCTGATTCATACAAGTGAAAAGAAGGCTGAAATCCCTCCAAAGACCTATTCATTAC
TGGCACTGGCCGTTGGGACTTTGAGTGGTGATGCTTTTTTACACCTTCTTCCACATTCTC
ATGCAAGTCACCACCATAGTCATAGCCATGAAGAACCAGCAATGGAAATGAAAAGAGGAC
CACTTTTCAGTCATCTGTCTTCTCAAAACATAGAAGAAAGTGCCTATTTTGATTCCACGT
GGAAGGGTCTAACAGCTCTAGGAGGCCTGTATTTCATGTTTCTTGTTGAACATGTCCTCA
CATTGATCAAACAATTTAAAGATAAGAAGAAAAAGAATCAGAAGAAACCTGAAAATGATG
ATGATGTGGAGATTAAGA2GCAGTTGTCCAAGTATGAATCTCAACTTTCAACAAATGAGG
AGAAAGTAGATACAGATGATCGAACTGAAGGCTATTTACGAGCAGACTCACAAGAGCCCT
CCCACTTTGATTCTCAGCAGCCTGCAGTCTTGGAAGAAGAAGAGGTCATGATAGCTCATG
CTCATCCACAGGAAGTCTACAATGAATATGTACCCAGAGGGTGCAAGAATAAATGCCATT
CACATTTCCACGATACACTCGGCCAGTCAGACGATCTCATTCACCACCATCATGACTACC
ATCATATTCTCCATCATCACCACCACCAAAACCACCATCCTCACAGTCACAGCCAGCGCT
ACTCTCGGGAGGAGCTGAAAGATGCCGGCGTCGCCACTCTGGCCTGGATGGTGATAATGG
GTGATGGCCTGCACAATTTCAGCGATGGCCTAGCAATTGGTGCTGCTTTTACTGAAGGCT
TATCAAGTGGTTTAAGTACTTCTGTTGCTGTGTTCTGTCATGAGTTGCCTCATGAATTAG
GTGACTTTGCTGTTCTACTAAAGGCTGGCATGACCGTTAAGCAGGCTGTCCTTTATAATG
CATTGTCAGCCATGCTGGCGTATCTTGGAATGGCAACAGGAATTTTCATTGGTCATTATG
CTGAAAATGTTTCTATGTGGATATTTGCACTTACTGCTGGCTTATTCATGTATGTTGCTC
TGGTTGATATGGTACCTGAAATGCTGCACAATGATGCTAGTGACCATGGATGTAGCCGCT
GGGGGTATTTCTTTTTACAGAATGCTGGGATGCTTTTGGGTTTTGGAATTATGTTACTTA
TTTCCATATTTGAACATAAAATCGTGTTTCGTATAAATTTCTAGTTAAGGTTTAAATGCT
AGAGTAGCTTAAAAAGTTGTCATAGTTTCAGTAGGTCATAGGGAGATGAGTTTGTATGCT
GTACTATGCAGCGTTTAAAGTTAGTGGGTTTTGTGATTTTTGTATTGAATATTGCTGTCT
GTTACAAAGTCAGTTAAAGGTACGTTTTAATATTTAAGTTATTCTATCTTGGAGATAAAA
TCTGTATGTGCAATTCACCGGTATTACCAGTTTATTATGTAAACAAGAGATTTGGCATGA
CATGTTCTGTATGTTTCAGGGAAAAATGTCTTTAATGCTTTTTCAAGAACTAACACAGTT
ATTCCTATACTGGATTTTAGGTCTCTGAAGAACTGCTGGTGTTTAGGAATAAGAATGTGC
ATGAAGCCTAAAATACCAAGAAAGCTTATACTGAATTTAAGCAAAGAAATAAAGGAGAAA
AGAGAAGAATCTGAGAATTGGGGAGGCATAGATTCTTATAAAAATCACAAAATTTGTTGT
AAATTAGAGGGGAGAAATTTAGAATTAAGTATAAAAAGGCAGAATTAGTATAGAGTACAT
TCATTAAACATTTTTGTCAGGATTATTTCCCGTAAAAACGTAGTGAGCACTTTTCATATA
CTAATTTAGTTGTACATTTAACTTTGTATAATACAGAAATCTAAATATATTTAATGAATT
CAAGCAATATATCACTTGACCAAGAAATTGGAATTTCAAAATGTTCGTGCGGGTATATAC
CAGATGAGTACAGTGAGTAGTTTTATGTATCACCAGACTGGGTTATTGCCAAGTTATATA
TCACCAAAAGCTGTATGACTGGATGTTCTGGTTACCTGGTTTACAAAATTATCAGAGTAG
TAAAACTTTGATATATATGAGGATATTAAAACTACACTAAGTATCATTTGATTCGATTCA
GAAAGTACTTTGATATCTCTCAGTGCTTCAGTGCTATCATTGTGAGCAATTGTCTTTTAT
ATACGGTACTGTAGCCATACTAGGCCTGTCTGTGGCATTCTCTAGATGTTTCTTTTTTAC
ACAATAAATTCCTTATATCAGCTTG

| | | |
|---|---|---|
| NOV53a, CG56008-01 | SEQ ID NO:1108 | 775 aa |
| Protein Sequence | | |

MARKLSVILILTFALSVTNPLHELKAAAFPQTTEKISPNWESGINVDLAISTRQYHLQQL
FYRYGENNSLSVEGFRKLLQNIGIDKIKRIHIHHDHDHHSDHEHHSDHERHSDHEHHSEH
EHHSDHDHHSHHNHAASGKNKRKALCPDHDSDSSGKDPRNSQGKGAHRPEHASGRRNVKD
SVSASEVTSTVYNTVSEGTHFLETIETPRPGKLFPKDVSSSTPPSVTSKSRVSRLAGRKT
NESVSEPRKGFMYSRNTNENPQECFNASKLLTSHGMGIQVPLNATEFNYLCPAIINQIDA
RSCLIHTSEKKAEIPPKTYSLQTAWVGGFIAISIISFLSLLGVILVPLMNRVFFKFLLSF
LVALAVGTLSGDAFLHLLPHSHASHHHSHSHEEPAMEMKRGPLFSHLSSQNIEESAYFDS
TWKGLTALGGLYFMFLVEHVLTLIKQFKDKKKKNQKKPENDDDVEIKKQLSKYESQLSTN
EEKVDTDDRTEGYLRADSQEPSHFDSQQPAVLEEEEVMIAHAHPQEVYNEYVPRGCKNKC
HSHFHDTLGQSDDLIHHHHDYHHILHHHHHQNHHPHSHSQRYSREELKDAGVATLAWMVI
MGDGLHNFSDGLAIGAAFTEGLSSGLSTSVAVFCHELPHELGDFAVLLKAGMTVKQAVLY
NALSAMLAYLGMATGIFIGHYAENVSMWIFALTAGLFMYVALVDMVPENLHNDASDHGCS
RWGYFFLQNAGMLLGFGIMLLISIFEHKIVFRINF

[0662] Further analysis of the NOV53a protein yielded the following properties shown in Table 53B.

TABLE 53B
Protein Sequence Properties NOV53a

| | |
|---|---|
| SignalP analysis: | Cleavage site between residues 18 and 19 |
| PSORT II analysis: | |

Results Summary:
plasma membrane --- Certainty = 0.6400(Affirmative) < succ>
Golgi body --- Certainty = 0.4600(Affirmative) < succ>
endoplasmic reticulum (membrane) --- Certainty =
0.3700(Affirmative) < succ>
endoplasmic reticulum (lumen) --- Certainty =
0.1000(Affirmative) < succ>
Reasoning Steps:
>>> MUS belongs to the animal class
*** Reasoning Step: 2

| | |
|---|---|
| SRCFLG: | 1 |

Prelim. Calc. of ALOM (thresh: 0.5) count: 7

| | |
|---|---|
| mostN: | 5 at i = 4 |

| | |
|---|---|
| MTOP program | Imiddle: 12 Chg diff(C-N): −2.5 |

| | |
|---|---|
| McG: | Length of UR: 17 |
| | Peak Value of UR: 3.09 |
| | Net Charge of CR: 2 |
| McG: | Discrim Score: 9.90 |
| GvH: | Signal Score (−3.5): 2.04 |
| | Possible site: 20 |

>>> Seems to have a cleavable N-term signal seq.
Amino Acid Composition: calculated from 21
involving clv.sig in the ALOMREC or not: 1B

| ALOM program | | count: 6 value: −11.15 threshold: 0.5 | |
|---|---|---|---|
| | INTEGRAL | Likelihood = | Transmembrane |
| | | −11.15 | 324-340 (313-348) |
| | INTEGRAL | Likelihood = | Transmembrane |
| | | −5.26 | 346-362 (342-369) |
| | INTEGRAL | Likelihood = | Transmembrane |
| | | −4.73 | 681-697 (679-701) |
| | INTEGRAL | Likelihood = | Transmembrane |
| | | −2.44 | 725-741 (723-742) |
| | INTEGRAL | Likelihood = | Transmembrane |
| | | −1.97 | 656-672 (656-673) |
| | INTEGRAL | Likelihood = | Transmembrane |
| | | −1.59 | 422-438 (421-438) |

| | |
|---|---|
| PERIPHERAL | Likelihood = 3.45 |

modified ALOM score: 2.83

>>> Likely a Type IIIa membrane protein (clv)

| | |
|---|---|
| Gavel: | Bound.Mitoch.Preseq. R-2 motif: 5 ARKLSV |
| | mtdisc (mit) Status: positive (3.31) |

*** Reasoning Step: 3

| | |
|---|---|
| KDEL | Count: 0 |

2nd signal for mitochondria (apolar)(5)

from: 5 to: 17 Score: 8.5

SKL motif: pos: 399(752), count: 3 SHL
pox modified by SKL scr: 0.1

| | |
|---|---|
| Poxaac | Score: 2.67 |
| | aac not from the N-term. scr modified |

>>> POX Status: notclr
>>> lys: −1.27 Status: negative
Nuc-4 pos: 443 (5) KKKK
>>> Nuclear Signal. Status: negative (0.00)

[0663] A search of the NOV53a protein against the Geneseq and public databases, a proprietary database that contains sequences published in patents and patent publication, yielded several homologous proteins shown in Table 53C. In a BLAST search of public sequence databases, the NOV53a protein was found to have homology to the proteins shown in the BLASTP data in Table 53D.

TABLE 53C
Geneseq and Public Results for NOV53a

| | | NOV53a | Identities/ | |
|---|---|---|---|---|
| | | Residues/ | Similarities for | |
| Geneseq | Protein/Organism/Length | Match | the Matched | Expect |
| Identifier | [Patent #, Date] | Residues | Region | Value |
| AAM51198 | Human breast cancer 4 gene | 32 . . . 773 | 735/742 (99%) | |
| | (BCR4)-encoded | 1 . . . 736 | 736/742 (99%) | |
| Q13433 | ESTROGEN REGULATED LIV-1 | 32 . . . 786 | 748/755 (99%) | |
| | PROTEIN. | 1 . . . 749 | 749/755 (99%) | |
| AAE07205 | Human LIV-1 protein | 32 . . . 773 | 735/742 (99%) | |
| | | 1 . . . 736 | 736/742 (99%) | |

[0664] PFam analysis predicts that the NOV53a protein contains the domains shown in the Table 53E.

TABLE 53E
Domain Analysis of NOV53a

| | | Score for | |
|---|---|---|---|
| | NOV53a Match | the Matched | Expect |
| Pfam Domain | Region | Region | Value |
| Peptidase_C4 | 251 . . . 266 | 4.6 | 3.4e−56 |
| Osteopontin | 4 . . . 300 | −85.1 | 0.95 |

### Example 54

[0665] The NOV54 clone was analyzed, and the nucleotide and encoded polypeptide sequences are shown in Table 54A.

TABLE 54A
NOV54 Sequence Analysis

| | | |
|---|---|---|
| +TL,1NOV54a, CG59905-01 | SEQ ID NO:1109 | 3145 bp |
| DNA Sequence | ORF Start: ATG at 34 | ORF Stop: TGA at 3046 |

ATTTTACTTGCTGGATCTTCAGCCTTGACCTGTATGGCAAATGGCTTATGGGACCGATCCCTGCCCAA
GTGTTTGGCTATATCCTGTGGACACCCAGGGGTCCCTGCCAACGCCGTCCTCACTGGAGAGCTGTTTA
CCTATGGCGCCGTCGTGCACTACTCCTGCAGAGGGAGCGAGAGCCTCATAGGCAACGACACGAGAGTG
TGCCAGGAAGACAGTCACTGGAGCGGGGCACTGCCCCACTGCACAGGAAATAATCCTGGATTCTGTGG
TGATCCGGGGACCCCAGCACATGGGTCTCGGCTTGGTGATGACTTTAAGACAAAGAGTCTTCTCCGCT
TCTCCTGTGAAATGGGGCACCAGCTGAGGGGCTCCCCTGAACGCACGTGTTTGCTCAATGGGTCATGG
TCAGGACTGCAGCCGGTGTGTGAGGCCGTGTCCTGTGGCAACCCTGGCACACCCACCAACGGAATGAT
TGTCAGTAGTGATGGCATTCTGTTCTCCAGCTCGGTCATCTATGCCTGCTGGGAAGGCTACAAGACCT
CAGGGCTCATGACACGGCATTGCACAGCCAATGGGACCTGGACAGGCACTGCTCCCGACTGCACAATT
ATAAGTTGTGGGGATCCAGGCACACTAGCAAATGGCATCCAGTTTGGGACCGACTTCACCTTCAACAA
GACTGTGAGCTATCAGTGTAACCCAGGCTATGTCATGGAAGCAGTCACATCCGCCACTATTCGCTGTA
CCAAAGACGGCAGGTGGAATCCGAGCAAACCTGTCTGCAAAGCCGTGCTGTGTCCTCAGCCGCCGCCG
GTGCAGAATGGAACAGTGGAGGGAAGTGATTTCCGCTGGGGCTCCAGCATAAGTTACAGCTGCATGGA
CGGTTACCAGCTCTCTCACTCCGCCATCCTCTCCTGTGAAGGTCGCGGGGTGTGGAAAGGAGAGATCC
CCAGTGTCTGCCTGTGTTCTGCGGAGACCCTGGCATCCCCGCAGAAGGGCGACTTAGTGGGAAAAGTT
TCACCTATAAGTCCGAAGTCTTCTTCCAGTGCAAATCTCCATTTATACTCGTGGGATCCTCCAGAAGA
GTCTGCCAAGCTGACGGCACGTGGAGCGGCATACAACCCACCTGCATTGGTAATAATTATCATACAGC
TCTGGGGATACCTGGGAGTATTTGGAGATGAGGACGCTTCATTCCGAAATTGGGTCATTTGTGATTAC
ATAGAAAGTGTTTCCATAGACAGTTTTCTGTACAAGGTTGGAAGCACGGTTTTTTTCAGGTGCAGAAA
AGGCTACCATATTCAAGGTTCCACGACTCGCACCTGCCTTGCCAATTTAACATGGAGTGGGATACAGA
CCGAATGTATACCTCATGCCTGCAGACAGCCAGAAACCCCGGCACACGCGGATGTGAGAGCCATCGAT
CTTCCTACTTTCGGCTACACCTTAGTGTACACCTGCCATCCAGGCTTTTTCCTCGCAGGGGGATCTGA
GCACAGAACATGTAAAGCAGACATGAAATGGACAGGAAAGTCGCCTGTGTGTAAAATTCCTTCAGATG
TCTTTTTCGTCAATTCACTGTGGAAGGGGTATTATGAATATTTAGGGAAAAGACAACCCGCCACTCTA
ACTGTTGACTGGTTCAATGCAACAAGCAGTAAGGTGAATGCCACCTTCAGCGAAGCCTCGCCAGTGGA
GCTGAAGTTGACAGGCATTTACAAGAAGGAGGAGGCCCACTTACTCCTGAAAGCTTTTCAAATTAAAG
GCCAGGCAGATATTTTTGTAAGCAAGTTCGAAAATGACAACTGGGGACTAGATGGTTATGTGTCATCT
GGACTTGAAAGAGGAGGATTTACTTTTCAAGGTGACATTCATGGAAAAGACTTTGGAAAATTTAAGCT
AGAAAGGCAAGGATGGGTCACAATATTCTTGAGCCTATTTCTTCATCTTAAATCTCAGTATAGAAGTT
CCCAAGGTTGTTACGAGATTGAGAGGCCACATCCTTTAAACCCAGATCAAGACTCTTCCAGTCATTAC
CACGGCACCAGCAGTGGCTCTGTGGCGGCTGCCATTCTGGTTCCTTTCTTTGCTCTAATTTTATCAGG
GTTTGCATTTTACCTCTACAAACACAGAACGAGACCAAAAGTTCAATACAATGGCTATGCTGGGCATG
AAAACAGCAATGGACAAGCATCGTTTGAAAACCCCATGTATGATACAAACTTAAAACCCACAGAAGCC
AAGGCTAAAACCACACACGGGCTGCTCACGTCTCTGGACTCCAAGAGAAAGATGGTTATAACCCTGGC
AGAGTCTTTACCCGCCCTGCGAACCTGCCTGTTGATCTGCTTCCCACTCCTCTTTAGACTTGCTCGTG
AATCTTCAGCACAGCCATTTGTTTTGAGTATTCAAACACATAAAAAGATATCTGGCAACTTCCCACTT
CTTATGACTTCTCAGACACCTTGTAACGGAGCTTCCCTTGGAGGTGGACAAACTTCTCACTCACAAGA
GAGACGGAGAGCAACAGAGAGAGATGGGCAGGGATTGATTCGAGGATTGGCTGACTCGATTATGGAGG
GTGAGAAGTCCCAGGACAGGCCGTCTGCAAGGCGTAAACCCAGGGAAGCTGCTGGTATGGCTCGGTTC
AAGTCCAAAGGCCTCAGCACCAAGGAAACCAAGGTGATAACTCTCAGTTCGGGTCAAAGTCCTGGGAG
TCTGCAAGGCCTCTCATTGAGTAAGTCTCACAAGATCCGATGGTTTTATAAAGGGCAGTTCCCCTGCA
CAAGCTCTCTTCTCTGCCACCACGCGTTTGCTGTTCATTCACCTTTCACCATGATTGTGAGGCCTCCC
AGCCATGTGGAACTGTGCAAAGAGGATGTTCAAAGGGCATCTTGGACCAGGAGGAGGAAGCCCATTGT
GAGGATGGCAAAGAACAATAAATGGAAGGCCCGTGGAACCCTGAGCGGCTGCCCCATCACTGTCCTCT
CCATCCTTTCCATGCTTCCCATGGTGCATGGCTCTCAGGCTCTCCAAGCACCATGAGCTCCTGGCGCG
TATGGCCTGGCCCCTGAGTGTGGAGTCTGTGGACTTTAAATGTGCCTTTACTCAGCCAGCATCTCCCT
GCTGGGTGCGATGTTG

| | | | |
|---|---|---|---|
| NOV54a, CG59905-01 | SEQ ID NO:1110 | 1004 aa | MW at 109752.7 kD |
| Protein Sequence | | | |

MANGLWDRSLPKCLAISCGHPGVPANAVLTGELFTYGAVVHYSCRGSESLIGNDTRVCQEDSHWSGAL
PHCTGNNPGFCGDPGTPAHGSRLGDDFKTKSLLRFSCEMGHQLRGSPERTCLLNGSWSGLQPVCEAVS
CGNPGTPTNGMIVSSDGTLFSSSVTYACWEGYKTSGLMTRHCTANGTWTGTAPDCTIISCGDPGTLAN
GIQFGTDFTFNKTVSYQCNPGYVMEAVTSATIRCTKDGRWNPSKPVCKAVLCPQPPPVQNGTVEGSDF
RWGSSISYSCMDGYQLSHSAILSCEGRGVWKGEIPSVCLCSAETLASPQKGDLVGKVSPISPKSSSSA
NLHLYSWDPPEESAKLTARGAAYNPPALVIIIIQLWGYLGVFGDEDASFRNWVICDYIESVSIDSFLY
KVGSTVFFRCRKGYEIQGSTTRTCLANLTWSGIQTECIPHACRQPETPAHADVRAIDLPTFGYTLVYT
CHPGFFLAGGSEHRTCKADMKWTGKSPVCKIPSDVFFVNSLWKGYYEYLGKRQPATLTVDWFNATSSK
VNATFSEASPVELKLTGIYKKEEAHLLLKAFQIKGQADIFVSKFENDNWGLDGYVSSGLERGGFTFQG
DIHGKDFGKFKLERQGWVTIFLSLFLHLKSQYRSSQGCYEIERPHPLNPDQDSSSHYHGTSSGSVAAA
ILVPFFALILSGFAFYLYKHRTRPKVQYNGYAGHENSNGQASFENPMYDTNLKPTEAKAKTTHGLLTS
LDSKRKMVITLAESLPALRTCLLICFPLLFRLARESSAQPFVLSIQTHKKISGNFPLLMTSQTPCNGA
SLGGGQTSHSQERRRATERDGQGLIRGLADSIMEGEKSQDRPSARRKPREAAGMARFKSKGLSTKETK
VITLSSGQSPGSLQGLSLSKSHKIRWFYKGQFPCTSSLLCHHAFAVHSPFTMIVRPPSHVELCKEDVQ
RASWTRRRKPIVRMAKNNKWKARGTLSGCPITVLSTLSMLPMVHGSQALQAP

| | | |
|---|---|---|
| NOV54b, CG59905-03 | SEQ ID NO:1111 | 10989 bp |
| DNA Sequence | ORF Start: ATG at 286 | ORF Stop: TGA at 10987 |

CCTTCCTGCCCGGCTCGGCCGGCGCTCGTCCCCGGCCCCGGCCCCGCCAGCCCGGGTCTCCGCGCTCG
GAGCAGCTCAGCCCTGCAGTGGCTCGGGACCCGATGCTATGAGAGGGAAGCGAGCCGGGCGCCCAGAC
CTTCAGGAGGCGTCGGATGCGCGGCGGGTCTTGGGACCGGGCTCTCTCTCCGGCTCGCCTTGCCCTCG
GGTGATTATTTGGCTCCGCTCATAGCCCTGCCTTCCTCGGAGGAGCCATCGGTGTCGCGTGCGTGTGG
AGTATCTGCAGACATGACTGCGTGGAGGAGATTCCAGTCGCTGCTCCTGCTTCTCGGGCTGCTGGTGC
TGTGCGCGAGGCTCCTCACTGCAGCGAAGGGTCAGAACTGTGGAGGCTTAGTCCAGGGTCCCAATGGC
ACTATTGAGAGCCCAGGGTTTCCTCACGGGTATCCGAACTATGCCAACTGCACCTGGATCATCATCAC
GGGCGAGCGCAATAGGATACAGTTGTCCTTCCATACCTTTGCTCTTGAAGAAAATTTTGATATTTTAT
CAGTTTACGATGGACAGCCTCAACAAGGGAATTTAAAAGTGAGATTATCGGGATTTCAGCTGCCCTCC
TCTATAGTGAGTACAGGATCTATCCTCACTCTGTGGTTCACGACAGACTTCGCTGTGAGTGCCCAAGG
TTTCAAAGCATTATATGAAGTTTTACCTAGCCACACTTGTGGAAATCCTGGAGAAATCCTGAAAGGAG
TTCTGCATGGAACGAGATTCAACATAGGAGACAAAATCCGGTACAGCTGCCTCCCTGGCTACATCTTG
GAAGGCCACGCCATCCTGACCTGCATCGTCAGCCCAGGAAATGGTGCATCGTGGGACTTCCCAGCTCC
CTTTTGCAGAGCTGAGGGAGCCTGCGGAGGAACCTTACGCGGGACCAGCAGCTCCATCTCCAGCCCGC
ACTTCCCTTCAGAGTACGAGAACAACGCGGACTGCACCTGGACCATTCTGGCTGAGCCCGGGGACACC
ATTGCGCTGGTCTTCACTGACTTTCAGCTAGAAGAAGGATATGATTTCTTAGAGATCAGTGGCACGGA
AGCTCCATCCATATGGCTAACTGGCATGAACCTCCCCTCTCCAGTTATCAGTAGCAAGAATTGGCTAC
GACTCCATTTCACCTCTGACAGCAACCACCGACGCALAGGATTTAACGCTCAGTTCCAAGTGAAAAAG
GCGATTGAGTTGAAGTCAAGAGGAGTCAAGATGCTGCCCAGCAAGGATGGAAGCCATAAAAACTCTGT
CTTGAGCCAAGGAGGTGTTGCATTGGTCTCTCACATGTGTCTAGATCCTGGGATTCCAGAAAATGGTA
GAAGAGCAGGTTCCGACTTCAGTAGGGTTGGTGCAAATGTACAGTTTTCATGTGAGGACAATTACGTG
CTCCAGGGATCTAAAAGCATCACCTGTCAGAGAGTTACAGAGACGCTCGCTGCTTGGAGTGACCACAG
GCCCATCTGCCGAGCGAGAACATGTGGATCCAATCTGCGTGGGCCCAGCGGCGTCATTACCTCCCCTA
ATTATCCGGTTCAGTATGAAGATAATGCACACTGTGTGTGGGTCATCACCACCACCGACCCGGACAAG
GTCATCAAGCTTGCCTTTGAAGAGTTTGAGCTGGAGCGAGGCTATGACACCCTGACGGTTGGTGATGC
TGGGAAGGTGGGAGACACCAGATCGGTCTTGTACGTGCTCACGGGATCCAGTGTTCCTGACCTCATTG
TGAGCATGAGCAACCAGATGTGGCTACATCTGCAGTCGGATGATAGCATTGGCTCACCTGGGTTTAAA
GCTGTTTACCAAGAAATTGAAAAGGGAGGGTGTGGGGATCCTGGAATCCCCGCCTATGGGAAGCGGAC
GGGCAGCAGTTTCCTCCATGGAGATACACTCACCTTTGAATGCCCGGCGGCCTTTGAGCTGGTGGGGG
AGAGAGTTATCACCTGTCAGCAGAACAATCAGTGGTCTGGCAACAAGCCCAGCTGTGTATTTTCATGT
TTCTTCAACTTTACGGCATCATCTGGGATTATTCTGTCACCAAATTATCCAGAGGAATATGGGAACAA
CATGAACTGTGTCTGGTTGATTATCTCGGAGCCAGGAAGTCGAATTCACCTAATCTTTAATGATTTTG
ATGTTGAGCCTCAATTTGACTTTCTCGCGGTCAAGGATAATGGCATTTCTGACATAACTGTCCTGGGT
ACTTTTTCTGGCAATGAAGTGCCTTCCCAGCTGGCCAGCAGTGGGCATATAGTTCGCTTGGAATTTCA
GTCTGACCATTCCACTACTGGCAGAGGGTTCAACATCACTTACACCACATTTGGTCAGAATGAGTGCC
ATGATCCTGGCATTCCTATAAACGGACGACGTTTTGGTGACAGGTTTCTACTCGGGAGCTCGGTTTCT
TTCCACTGTGATGATGGCTTTGTCAAGACCCAGGGATCCGAGTCCATTACCTGCATACTGCAAGACGG
GAACGTGGTCTGGAGCTCCACCGTGCCCCGCTGTGAAGCTCCATGTGGTGGACATCTGACAGCGTCCA
GCGGAGTCATTTTGCCTCCTGGATGGCCAGGATATTATAAGGATTCTTTACATTGTGAATGGATAATT
GAAGCAAAACCAGGCCACTCTATCAAAATGACTTTTGACAGATTTCAGACAGAGGTCAATTATGACAC
CCCAGTTCCTCATCAGCACCGGGAACTTCATGTACCTGCTGTTCACCACTGACAACAGCCGCTCCAGC
ATCGGCTTCCTCATCCACTATGAGAGTGTGACGCTTGAGTCGGATTCCTGCCTGGACCCGGGCATCCC
TGTGAACGGCCATCGCCACGGTGGAGACTTTGGCATCAGGTCCACAGTGACTTTCAGCTGTGACCCGG
GGTACACACTAAGTGACGACGAGCCCCTCGTCTGTGAGAGGAACCACCAGTGGAACCACGCCTTGCCC
AGCTGCGACGCTCTATGTGGAGGCTACATCCAAGGGAAGAGTGGAACAGTCCTTTCTCCTGGGTTTCC
AGATTTTTATCCAAACTCTCTAAACTGCACGTGGACCATTGAAGTGTCTCATGGGAAAGGAGTTCAAA
TGCTCTTTCACACCTTTCATCTTGAGAGTTCCCACGACTATTTACTGATCACAGAGGATGGAAGTTTT
TCCGAGCCCGTTGCCAGGCTCACCGGGTCGGTGTTGCCTCATACGATCAAGGCAGGCCTGTTTGGAAA
CTTCACTGCCCAGCTTCGGTTTATATCAGACTTCTCAATTTCGTACGAGGGCTTCAATATCACATTTT
CAGAATATGACCTGGAGCCATGTGATGATCCTGGAGTCCCTGCCTTCAGCCGAAGAATTGGTTTTCAC
TTTGGTGTGGGAGACTCTCTGACGTTTTCCTGCTTCCTGGGATATCGTTTAGAAGGTGCCACCAAGCT
TACCTGCCTGGGTGGGGGCCGCCGTGTGTGGAGTGCACCTCTGCCAAGGTGTGTGGCCGAATGTGGAG
CAAGTGTCAAAGGAAATGAAGGAACATTACTGTCTCCAAATTTTCCATCCAATTATGATAATACCCAT
GAGTGTATCTATAAAATAGAAACAGAAGCCGGCAAGGGCATCCACCTTAGAACACGAAGCTTCCAGCT
GTTTGAAGGAGATACTCTAAAGGTATATGATGGAAAAGACAGTTCCTCACGTCCACTGGGCACGTTCA
CTAAAAATGAACTTCTGGGGCTGATCCTAAACAGCACATCCAATCACCTATGGCTAGAGTTCAACACC
AATGGATCTGACACCGACCAAGGTTTTCAACTCACCTATACCAGTTTTGATCTGGTAAAATGTGAGGA
TCCGGGCATCCCTAACTACGGCTATAGGATCCGTGATGAAGGCCACTTTACCGACACTGTAGTTCTGT
ACAGTTGCAACCCGGGGTACGCCATGCATGGCAGCAACACCCTGACCTGTTTGAGTGGAGACAGGAGA
GTGTGGGACAAACCACTACCTTCGTGCATAGCGGAATGTGGTGGTCAGATCCATGCAGCCACATCAGG
ACGAATATTGTCCCCTGGCTATCCAGCTCCGTATGACAACAACCTCCACTGCACCTGGATTATAGAGG
CAGACCCAGGAAAGACCATTAGCCTCCATTTCATTGTTTTCGACACGGAGATGGCTCACGACATCCTC
AAGGTCTGGGACGGGCCGGTGGACAGTGACATCCTGCTGAAGGAGTGGAGTGGCTCCGCCCTTCCGGA
GGACATCCACAGCACCTTCAACTCACTCACCCTGCAGTTCGACAGCGACTTCTTCATCAGCAAGTCTG
GCTTCTCCATCCAGTTCTCCACCTCAATTGCAGCCACCTGTAACGATCCAGGTATGCCCCAAAATGGC
ACCCGCTATGGAGACAGCAGAGAGGCTGGAGACACCGTCACATTCCAGTGTGACCCTGGCTATCAGCT
CCAAGGACAAGCCAAAATCACCTGTGTGCAGCTGAATAACCGGTTCTTTTGGCAACCAGACCCTCCTA
CATGCATAGCTGCTTGTGGAGGGAATCTGACGGGCCCAGCAGGTGTTATTTTGTCACCCAACTACCCA
CAGCCGTATCCTCCTGGGAAGGAATGTGACTGGAGAGTAAAAGTGAACCCGGACTTTGTCATCGCCTT
GATATTCAAAAGTTTCAACATGGAGCCCAGCTATGACTTCCTACACATCTATGAAGGGGAAGATTCCA
ACAGCCCCCTCATTGGGAGTTACCAGGGCTCTCAGGCCCCAGAAAGAATAGAGAGTAGCGGAAACAGC
CTGTTTCTGGCATTTCGGAGTGATGCCTCCGTGGGCCTTTCAGGGTTCGCCATTGAATTTAAAGAGAA
ACCACGGGAAGCTTGTTTTGACCCAGGAAATATAATGAATGGGACAAGAGTTGGAACAGACTTCAAGC
TTGGCTCCACCATCACCTACCAGTGTGACTCTGGCTATAAGATTCTTGACCCCTCATCCATCACCTGT
GTGATTGGGGCTGATGGGAAACCCTCCTGGGACCAAGTGCTGCCCTCCTGCAATGCTCCCTGTGGAGG
CCAGTACACGGGATCAGAAGGGGTAGTTTTATCACCAAACTACCCCCATAATTACACAGCTGGTCAAA
TATGCCTCTATTCCATCACGGTACCAAAGGAATTCGTGGTCTTTGGACAGTTTGCCTATTTCCAGACA
GCCCTGAATGATTTGGCAGAATTATTTGATGGAACCCATGCACAGGCCAGACTTCTCAGCTCACTCTC
GGGGTCTCACTCAGGGGAAACATTGCCCTTGGCTACGTCAAATCAAATTCTGCTCCGATTCAGTGCAA
AGAGCGGTGCCTCTGCCCGCGGCTTCCACTTCGTGTATCAAGCTGTTCCTCGTACCAGTGACACCCAA
TGCAGCTCTGTCCCCGAGCCCAGATACGGAAGGAGAATTGGTTCTGAGTTTTCTGCCGGCTCCATCGT
CCGATTCGAGTGCAACCCGGGATACCTGCTTCAGGGTTCCACGGCGCTCCACTGCCAGTCCGTGCCCA
ACGCCTTGGCACAGTGGAACGACACGATCCCCAGCTGTGTGGTACCCTGCAGTGGCAATTTCACTCAA
CGAAGAGGTACAATCCTGTCCCCCGGCTACCCTGAGCCATACGGAAACAACTTGAACTGTATATGGAA
GATCATAGTTACGGAGGGCTCGGGAATTCAAGATCCAAGTGATCAGTTTTGCCACGGAGCAGAACTGG
GACTTCCCTTTGAGATCCACGATGGTGGGGATGTGACCGCACCCAGACTGGGAAGCTTCTCAGGCACC
ACAGTACCGGCACTGCTGAACAGTACTTCCAACCAACTCTACCTGCATTTCCAGTCTGACATTAGTGT
GGCAGCTGCTGGTTTCCACCTGGAATACAAAACTGTAGGTCTTGCTGCATGCCAAGAACCAGCCCTCC
CCAGCAACAGCATCAAAATCGGAGATCGGTACATGGTGAACGACGTGCTCTCCTTCCAGTGCGAGCCC
GGGTACACCCTGCAGGGCCGTTCCCACATTTCCTGTATGCCAGGGACCGTTCGCCGTTGGAACTATCC
GTCTCCCCTGTGCATTGCAACCTGTGGAGGGACGCTGAGCACCTTGGGTGGTGTGATCCTGAGCCCCG
GCTTCCCAGGTTCTTACCCCAACAACTTAGACTGCACCTGGAGGATCTCATTACCCATCGGCTATGGT
GCACATATTCAGTTTCTGAATTTTTCTACCGAAGCTAATCATGACTTCCTTGAAATTCAAAATGGACC
TTACCACACCAGCCCCATGATTGGACAATTTAGCGGCACGGATCTCCCCGCGGCCCTGCTGAGCACAA
CGCATGAAACCCTCATCCACTTTTATAGTGACCATTCGCAAAACCGGCAAGGATTTAAACTTGCTTAC
CAAGCCTATGAATTACAGAACTGTCCAGATCCACCCCCATTTCAGAATGGGTACATGATCAACTCGGA
TTACAGCGTGGGGCAATCAGTATCTTTCGAGTGTTATCCTGGGTACATTCTAATAGGCCATCCTGTCC
CCACTTGTCAGCATGGGATCAACAGAAACTGGAACTACCCTTTTCCAAGATGTGATGCCCCTTGTGGG
TACAACGTAACTTCTCAGAACGGCACCATCTACTCCCCTGGCTTTCCTGATGAGTATCCGATCCTGAA
GGACTGCATTTGGCTCATCACGGTGCCTCCAGGGCACGGAGTTTACATCAACTTCACCCTGTTACAGA
TTCAGTGGCAACACAGCCCTCGAAACGGCGTATAGCTCCACCAACCAAGTCCTGCTCAAGTTCCACAG
CGACTTTTCAAATGGAGGCTTCTTTGTCCTCAATTTCCACGCATTTCAGCTCAAGAAATGTCAACCTC
CCCCAGCGGTTCCACAGGCAGAAATGCTTACTGAGGATGATGATTTCGAAATAGGAGATTTTGTGAAG
TACCAGTGCCACCCCGGGTACACCTTGGTGGGGACCGACATTCTGACTTGCAAGCTCAGTTCCCAGTT
GCAGTTTGAGGGTTCTCTCCCAACATGTGAAGCACAATGCCCAGCAAATGAAGTCCGGACTGGATCAT
CGGGAGTCATTCTCAGTCCAGGGTATCCGGGTAATTATTTTAACTCCCAGACTTGCTCTTGGAGTATT
ACTGGAAGTGTTTGATGGTTCTTCTGGGCAAAGTCCTCTGCTAGTAGTCTTAAGTGGGAATCATACTG
AACAATCAAATTTTACAAGCAGGAGTAATCAGTTATATCTCCGCTGGTCCACTGACCATGCCACCAGT
AAGAAAGGATTCAAGATTCGCTATGCAGCACCTTACTGCAGTTTGACCCACCCCCTGAAGAATGGGGG
TATTCTAAACAGGACTGCAGGAGCGGTTGGAAGCAAAGTGCATTATTTTTGCAAGCCTGGATACCGAA
TGGTCGGCCACAGCAATGCAACCTGTAGACGAAACCCACTTGGCATGTACCAGTGGGACTCCCTCACG
CCACTCTGCCAGGCTGTGTCCTGTGGAATCCCAGAATCCCCAGGAAACGGTTCATTTACCGGGAACGA
GTTCACTTTGGACAGTAAAGTGGTCTATGAATGTCATGAAGGCTTCAAGCTTGAATCCAGCCAGCAAG
CAACAGCCGTGTGTCM~GAAGATGGGCTGTGGAGTAACAAGGGGAAGCCGCCCATGTGTAAGCCGGTC
GCTTGCCCCAGCATTGAAGCTCAGCTCTCAGAACATGTCATCTGGAGGCTGGTTTCAGGATCCTTGAA
TGAGTACGGTGCTCAAGTATTGCTGAGCTGCAGTCCTGGTTACTACTTAGAAGGCTGGAGGCTCCTGC
GGTGCCAGGCCAATGGGACGTGGAACATAGGAGATGAGAGGCCAAGCTGTCGAGTTATCTCGTGTGGA
AGCCTTTCCTTTCCCCCAAATGGCAACAAGATTGGAACGTTGACAGTTTATGGGGCCACAGCTATATT
TACGTGCAACACCGGCTACACGCTTGTGGGGTCTCATGTCAGAGAGTGCTTGGCAAATGGGCTCTGGA
GCGGCAGCGAAACTCGATGTTTAGCTGGCCACTGCGGTTCCCCAGACCCGATTGTGAACGGTCACATT
AGTGGAGATGGCTTCAGTTACAGAGACACGGTGGTTTACCAGTGCAATCCTGGTTTCCGGCTTGTGGG
AACTTCCGTGAGGATATGCCTGCAAGACCACAAGTGGTCTGGACAAACGCCTGTCTGTGTCCGTATCA
CATGTGGTCACCCTGGAAACCCTGCCCACGGATTCACTAATGGCAGTGAGTTCAACCTGAATGATGTC
GTGAATTTCACCTGCAACACGGGCTATTTGCTGCAGGGCGTGTCTCGAGCCCAGTGTCGGAGCAACGG
CCAGTGGAGTAGCCCTCTGCCCACGTGTCGAGTGGTGAACTGTTCTGATCCAGGCTTTGTGGAAAATG
CCATTCGTCACGGGCAACAGAACTTCCCTGAGAGTTTTGAGTATGGAATGAGTATCCTGTACCATTGC
AAGAAGGGATTTTACTTGCTGGGATCTTCAGCCTTGACCTGTATGGCAAATGGCTTATGGGACCGATC
CCTGCCCAAGTGTTTGGCTATATCGTGTGGACACCCAGGGGTCCCTGCCAACGCCGTCCTCACTGGAG
AGCTGTTTACCTATGGCGCCGTCGTGCACTACTCCTGCAGAGGGAGCGAGAGCCTCATAGGCAACGAC
ACGAGAGTGTGCCAGGAAGACAGTCACTGGAGCGGGGCACTGCCCCACTGCACAGGAAATAATCCTGG
ATTCTGTGGTGATCCGGGGACCCCAGCACATGGGTCTCGGCTTGGTGATGACTTTAAGACAAAGAGTC
TTCTCCGCTTCTCCTGTGAAATGGGGCACCAGCTGAGGGGCTCCCCTGAACGCACGTGTTTGCTCAAT
GGGTCATGGTCAGGACTGCAGCCGGTGTGTGAGGCCGTGTCCTGTGGCAACCCTGGCACACCCACCAA
CGGAATGATTGTCAGTAGTGATGGCATTCTGTTCTCCAGCTCGGTCATCTATGCCTGCTGGGAAGGCT
ACAAGACCTCAGGGCTCATGACACGGCATTGCACAGCCAATGGGACCTGGACAGGCACTGCTCCCGAC
CTTCAACAAGACTGTGAGCTATCAGTGTAACCCAGGCTATGTCATGGAAGCAGTCACATCCGCCACTA
TTCGCTGTACCAAAGACGGCAGGTGGAATCCGAGCAAACCTGTCTGCAAAGCCGTGCTGTGTCCTCAG
CCGCCGCCGGTGCAGAATGGAACAGTGGAGGGAAGTGATTTCCGCTGGGGCTCCAGCATAAGTTACAG
CTGCATGGACGGTTACCAGCTCTCTCACTCCGCCATCCTCTCCTGTGAAGGTCGCGGGGTGTGGAAAG
GAGAGATCCCCCAGTGTCTCGCTGTGTTCTGCGGAGACCCTGGCATCCCCGCAGAAGGGCGACTTAGT
GGGAAAAGTTTCACCTATAAGTCCGAAGTCTTCTTCCAGTGCAAATCTCCATTTATACTCGTGGGATC
CTCCAGAAGAGTCTGCCAAGCTGACGGCACGTGGAGCGGCATACAACCCACCTGCATTGGTGATCCTG
CTCATAACACCTGCCCAGACCCTGGTACGCCACACTTTGGAATACAGAATAGCTCCAGAGGCTATGAG
GTTGGAAGCACGGTTTTTTTCAGGTGCAGAAAAGGCTACCATATTCAAGGTTCCACGACTCGCACCTG
CCTTGCCAATTTAACATGGAGTGGGATACAGACCGAATGTATACGTCATGCCTGCAGACAGCCAGAAA
CCCCGGCACACGCGGATGTGAGAGCCATCGATCTTCCTACTTTCGGCTACACCTTAGTGTACACCTGC
CATCCAGGCTTTTTCCTCGCAGGGGGATCTGAGCACAGAACATGTAAAGCAGACATGAAATGGACAGG
CTTCAGATGTCTTTTTCGTCAATTCACTGTGGAAGGGGTATTATGAATATTTAGGGAAAAGACAACCC
GCCACTCTAACTGTTGACTGGTTCAATGCAACAAGCAGTAAGGTGAATGCCACCTTCAGCGAAGCCTC
GCCAGTGGAGCTGAAGTTGACAGGCATTTACAAGAAGGAGGAGGCCCACTTACTCCTGAAAGCTTTTC
AAATTAAAGGCCAGGCAGATATTTTTGTAAGCAAGTTCGAAAATGACAACTGGGGACTAGATGGTTAT
ATTTAAGCTAGAAAGGCAAGATCCTTTAAACCCAGATCAAGACTCTTCCAGTCATTACCACGGCACCA
GCAGTGGCTCTGTGGCGGCTGCCATTCTGGTTCCTTTCTTTGCTCTAATTTTATCAGGGTTTGCATTT
TACCTCTACAAACACAGAACGAGACCAAAAGTTCAATACAATGGCTATGCTGGGCATGAAAACAGCAA
TGGACAAGCATCGTTTGAAAACCCCATGTATGATACAAACTTAAAACCCACAGAAGCCAAGGCTGTGA
GGTTTGACACAAGTGTGAACACAGTCTGTACAGTGGTATGA

| | | | |
|---|---|---|---|
| NOV54b, CG59905-03 | SEQ ID NO:1112 | 3567 aa | MW at 389007.4 kD |
| Protein Sequence | | | |

MTAWRRFQSLLLLLGLLVLCARLLTAAKGQNCGGLVQGPNGTIESPGFPHGYPNYANCTWIIITGERN
RIQLSFHTFALEENFDILSVYDGQPQQGNLKVRLSGFQLPSSIVSTGSILTLWFTTDFAVSAQGFKAL
YEVLPSHTCGNPGEILKGVLHGTRFNIGDKIRYSCLPGYILEGHAILTCIVSPGNGASWDFPAPFCRA
EGACGGTLRGTSSSISSPHFPSEYENNADCTWTILAEPGDTIALVFTDFQLEEGYDFLEISGTEAPSI
WLTGMNLPSPVISSKNWLRLHFTSDSNHRRKGFNAQFQVKKAIELKSRGVKMLPSKDGSHKNSVLSQG
GVALVSHMCLDPGIPENGRPAGSDFSRVGANVQFSCEDNYVLQGSKSITCQRVTETLAAWSDHRPICR
ARTCGSNLRGPSGVITSPNYPVQYEDNAHCVWVITTTDPDKVIKLAFEEFELERGYDTLTVGDAGKVG
DTRSVLYVLTGSSVPDLIVSMSNQMWLHLQSDDSIGSPGFKAVYQEIEKGGCGDPGIPAYGKRTGSSF
LHGDTLTFECPAAFELVGERVITCQQNNQWSGNKPSCVFSCFFNFTASSGIILSPNYPEEYGNNMNCV
TTGRGFNITYTTFGQNECHDPGIPINGRRFGDRFLLGSSVSFHCDDGFVKTQGSESITCILQDGNVVW
SSTVPRCEAPCGGHLTASSGVILPPGWPGYYKDSLHCEWIIEAKPGHSIKMTFDRFQTEVNYDTLEVR
DGPASSSPLIGEYHGTQAPQFLISTGNFMYLLFTTDNSRSSIGFLIHYESVTLESDSCLDPGIPVNGH
RHGGDFGIRSTVTFSCDPGYTLSDDEPLVCERNHQWNHALPSCDALCGGYIQGKSGTVLSPGFPDFYP
NSLNCTWTIEVSHGKGVQMIFHTFHLESSHDYLLITEDGSFSEPVARLTGSVLPHTIKAGLFGNFTAQ
LRFISDFSISYEGFNITFSEYDLEPCDDPGVPAFSRRIGFHFGVGDSLTFSCFLGYRLEGATKLTCLG
TLKVYDGKDSSSRPLGTFTKNELLGLILNSTSNHLWLEFNTNGSDTDQGFQLTYTSFDLVKCEDPGIP
NYGYRIRDEGHFTDTVVLYSCNPGYAMHGSNTLTCLSGDRRVWDKPLPSCIAECGGQIHAATSGRILS
PGYPAPYDNNLHCTWIIEADPGKTISLHFIVFDTEMAHDILKVWDGPVDSDILLKEWSGSALPEDIHS
TFNSLTLQFDSDFFISKSGFSIQFSTSIAATCNDPGMPQNGTRYGDSREAGDTVTFQCDPGYQLQGQA
KITCVQLNNRFFWQPDPPTCIAACGGNLTGPAGVILSPNYPQPYPPGKECDWRVKVNPDFVIALIFKS
FNMEPSYDFLHIYEGEDSNSPLIGSYQGSQAPERIESSGNSLFLAFRSDASVGLSGFAIEFKEKPREA
CFDPGNIMNGTRVGTDFKLGSTITYQCDSGYKILDPSSITCVIGADGKPSWDQVLPSCNAPCGGQYTG
SEGVVLSPNYPHNYTAGQICLYSITVPKEFVVFGQFAYFQTALNDLAELFDGTHAQARLLSSLSGSHS
GETLPLATSNQILLRFSAKSGASARGFHFVYQAVPRTSDTQCSSVPEPRYGRRIGSEFSAGSIVRFEC
NPGYLLQGSTALHCQSVPNALAQWNDTIPSCVVPCSGNFTQRRGTILSPGYPEPYGNNLNCIWKIIVT
EGSGIQDPSDQFCHGAELGLPFEIHDGGDVTAPRLGSFSGTTVPALLNSTSNQLYLHFQSDISVAAAG
FHLEYKTVGLAACQEPALPSNSIKIGDRYMVNDVLSFQCEPGYTLQGRSHISCMPGTVRRWNYPSPLC
IATCGGTLSTLGGVILSPGFPGSYPNNLDCTWRISLPIGYGAHIQFLNFSTEANHDFLEIQNGPYHTS
PMIGQFSGTDLPAALLSTTHETLIHFYSDHSQNRQGFKLAYQAYELQNCPDPPPFQNGYMINSDYSVG
QSVSFECYPGYILIGHPVLTCQHGINRNWNYPFPRCDAPCGYNVTSQNGTIYSPGFPDEYPILKDCIW
LITVPPGHGVYINFTLLQTEAVNDYIAVWDGPDQNSPQLGVFSGNTALETAYSSTNQVLLKFHSDFSN
GGFFVLNFHAFQLKKCQPPPAVPQAEMLTEDDDFEIGDFVKYQCHPGYTLVGTDILTCKLSSQLQFEG
SLPTCEAQCPANEVRTGSSGVILSPGYPGNYFNSQTCSWSIKVEPNYNITIFVDTFQSEKQFDALEVF
DGSSGQSPLLVVLSGNHTEQSNFTSRSNQLYLRWSTDHATSKKGFKIRYAAPYCSLTHPLKNGGILNR
TAGAVGSKVHYFCKPGYRMVGHSNATCRRNPLGMYQWDSLTPLCQAVSCGIPESPGNGSFTGNEFTLD
SKVVYECHEGFKLESSQQATAVCQEDGLWSNKGKPPMCKPVACPSIEAQLSEHVIWRLVSGSLNEYGA
QVLLSCSPGYYLEGWRLLRCQANGTWNIGDERPSCRVISCGSLSFPPNGNKIGTLTVYGATAIFTCNT
GYTLVGSHVRECLANGLWSGSETRCLAGHCGSPDPIVNGHISGDGFSYRDTVVYQCNPGFRLVGTSVR
ICLQDHKWSGQTPVCVRITCGHPGNPAHGFTNGSEFNLNDVVNFTCNTGYLLQGVSRAQCRSNGQWSS
PLPTCRVVNCSDPGFVENAIRHGQQNFPESFEYGMSILYHCKKGFYLLGSSALTCMANGLWDRSLPKC
LAISCGHPGVPANAVLTGELFTYGAVVHYSCRGSESLIGNDTRVCQEDSHWSGALPHCTGNNPGFCGD
PGTPAHGSRLGDDFKTKSLLRFSCEMGHQLRGSPERTCLLNGSWSGLQPVCEAVSCGNPGTPTNGMIV
SSDGILFSSSVIYACWEGYKTSGLMTRHCTANGTWTGTAPDCTVISCGDPGTLANGIQFGTDFTFNKT
VSYQCNPGYVMEAVTSATIRCTKDGRWNPSKPVCKAVLCPQPPPVQNGTVEGSDFRWGSSISYSCMDG
YQLSHSAILSCEGRGVWKGEIPQCLAVFCGDPGIPAEGRLSGKSFTYKSEVFFQCKSPFILVGSSRRV
CQADGTWSGIQPTCIGDPAHNTCPDPGTPHFGIQNSSRGYEVGSTVFFRCRKGYHIQGSTTRTCLANL
TWSGIQTECIRHACRQPETPAHADVRAIDLPTFGYTLVYTCHPGFFLAGGSEHRTCKADMKWTGKSPV
CKSKGVREVNETVTKTPVPSDVFFVNSLWKGYYEYLGKRQPATLTVDWFNATSSKVNATFSEASPVEL
KLTGTYKKEEAHLLLKAFQIKGQADIFVSKFENDNWGLDGYVSSGLERGGFTFQGDIHGKDFGKFKLE
RQDPLNPDQDSSSHYHGTSSGSVAAAILVPFFALILSGFAFYLYKHRTRPKVQYNGYAGHENSNGQAS
FENPMYDTNLKPTEAKAVRFDTTLNTVCTVV

| | | |
|---|---|---|
| NOV54c, 275631102 | SEQ ID NO:1113 | 898 bp |
| DNA Sequence | ORF Start: at 2 | ORF Stop: end of sequence |

CACCAGATCTTGTGGACACCCAGGGGTCCCTGCCAACGCCGTCCTCACTGGAGAGCTGTTTACCTATG
GCGCCGTCGTGCACTACTCCTGCAGAGGGAGCGAGAGCCTCATAGGCAACGACACGAGAGTGTGCCAG
GAAGACAGTCACTGGAGCGGGGCACTGCCCCACTGCACAGGAAATAATCCTGGATTCTGTGGTGATCC
GGGGACCCCAGCACATGGGTCTCGGCTTGGTGATGACTTTAAGACAAAGAGTCTTCTCCGCTTCTCCT
GTGAAATGGGGCACCAGCTGAGGGGCTCCCCTGAACGCACGTGTTTGCTCAATGGGTCATGGTCAGGA
CTGCAGCCGGTGTGTGAGGCCGTGTCCTGTGGCAACCCTGGCACACCCACCAACGGAATGATTGTCAG
TAGTGATGGCATTCTGTTCTCCAGCTCGGTCATCTATGCCTGCTGGGAAGGCTACAAGACCTCAGGGC
TCATGACACGGCATTGCACAGCCAATGGGACCTGGACAGGCACTGCTCCCGACTGCACAATTATAAGT
TGTGGGGATCCAGGCACACTAGCAAATGGCATCCAGTTTGGGACCGACTTCACCTTCAACAAGACTGT
GAGCTATCAGTGTAACCCAGGCTATGTCATGGAAGCAGTCACATCCGCCACTATTCGCTGTACCAAAG
ACGGCAGGTGGAATCCGAGCAAACCTGTCTGCAAAGCCGTGCTGTGTCCTCAGCCGCCGCCGGTGCAG
AATGGAACAGTGGAGGGAAGTGATTTCCGCTGGGGCTCCAGCATAAGTTACAGCTGCATGGACGGTTA
CCAGCTCTCTCACTCCGCCATCCTCTCCTGTGAAGGTCGCGGGGTGTGGAAAGGAGAGATCCCCAGTG
TCTGCCTCGAGGGC

| | | | |
|---|---|---|---|
| NOV54c, 275631102 | SEQ ID NO:1114 | 299 aa | MW at 31648.2 kD |
| Protein Sequence | | | |

TRSCGHPGVPANAVLTGELFTYGAVVHYSCRGSESLIGNDTRVCQEDSHWSGALPHCTGNNPGFCGDP
GTPAHGSRLGDDFKTKSLLRFSCEMGHQLRGSPERTCLLNGSWSGLQPVCEAVSCGNPGTPTNGMIVS
SDGILFSSSVIYACWEGYKTSGLMTRHCTANGTWTGTAPDCTIISCGDPGTLANGIQFGTDFTFNKTV
SYQCNPGYVMEAVTSATIRCTKDGRWNPSKPVCKAVLCPQPPPVQNGTVEGSDFRWGSSISYSCMDGY
QLSHSAILSCEGRGVWKGEIPSVCLEG

| | | |
|---|---|---|
| NOV54d, CG59905-02 | SEQ ID NO:1115 | 3019 bp |
| DNA Sequence | ORF Start: ATG at 184 | ORF Stop: TAA at 2614 |

CTGCCAGGCTGTGTCCTGTGGAATCCCAGAATCCCCAGGAAACGGTTCATTACCGGGAACGAGTTCAC
TTTGGACAGTAAAGTGGTCTATGAATGTCATGAGGGCTTCAAGCTTGAATCCAGCCAGCAAGCAACAG
CCGTGTGTCAAGAAGATGGGCTGTGGAGTAACAAGGGGAAGCCGCCCATGTGTAAGCCGGTCGCTTGC
CCCAGCATTGAAGCTCAGCTCTCAGAACATGTCATCTGGAGGCTGGTTTCAGGATCCTTGAATGAGTA
CGGTGCTCAAGTATTGCTGAGCTGCAGTCCTGGTTACTACTTAGAAGGCTGGAGGCTCCTGCGGTGCC
AGGCCAATGGGACGTGGAGCATAGGAGATGAGAGGCCAAGCTGTCGAGTTATCTCGTGTGGAAGCCTT
TCCTTTCCCCCAAATGGCAACAAGATTGGAACGTTGACAGTTTATGGGGCCACAGCTATATTTACGTG
CAACACCGGCTACACGCTTGTGGGGTCTCATGTCAGAGAGTGCTTGGCAAATGGGCTCTGGAGCGGCA
GCGAAACTCGATGTCTGGCTGGCCACTGCGGTTCCCCAGACCCGATTGTGAACGGTCACATTAGTGGA
GATGGCTTCAGTTACAGAGACACGGTGGTTTACCAGTGCAATCCTGGTTTCCGGCTTGTGGGAACTTC
CGTGAGGATATGCCTGCAAGACCACAAGTGGTCTGGACAAACGCCTGTCTGTGTCGCCATCACATGTG
GTCACCCTGGAAACCCTGCCCACGGATTCACTAATGGCAGTGAGTTCAACCTGAATGATGTCGTGAAT
TTCACCTGCAACACGGGCTATTTGCTGCAGGGCGTGTCTCGAGCCCAGTGTCGGAGCAACGGCCAGTG
GAGTAGCCCTCTGCCCACGTCTCGACACGTGGGCAGAGGGCTACTCCACTGGCGGTTGCTCCGACACG
GGGCTCCGAGACACGCCCTGCAGCAAATAGCCCGTGTTGCAGGTGAAATTCACGACATCATTATTTTA
CTTGCTGGATCTTCAGCCTTGACCTGTATGGCAAATGGCTTATGGGACCGATCCCTGCCCAAGTGTTT
GGCTATATCGTGTGGACACCCAGGGGTCCCTGCCAACGCCGTCCTCACTGGAGAGCTGTTTACCTATG
GCGCCGTCGTGCACTACTCCTGCAGAGGGAGCGAGAGCCTCATAGGCAACGACACGAGAGTGTGCCAG
GAAGACAGTCACTGGAGCGGGGCACTGCCCCACTGCACAGGTAATAATCCTGGATTCTGTGGTGATCC
GGGGACCCCAGCACATGGGTCTCGGCTTGGTGATGACTTTAAGACAAAGAGTCTTCTCCGCTTCTCCT
GTGAAATGGGGCACCAGCTGAGGGGCTCCCCTGAACGCACGTGTTTGCTCAATGGGTCATGGTCAGGA
CTGCAGTCGGTGTGTGAGGCCGTGTCCTGTGGCAACCCTGGCACACCCACCAACGGAATGATTGTCAG
TAGTGATGGCATTCTGTTCTCCAGCTCGGTCATCTATGCCTGCTGGGAAGGCTACAAGACCTCAGGGC
TCATGACACGGCATTGCACAGCCAATGGGACCTGGACAGGCACTGCTCCCGACTGCTTAGTTATAAGT
TGTGGGGATCCAGGCACACTAGCAAATGGCATCCAGTTTGGGACCGACTTCACCTTCAACAAGACTGT
GAGCTATCAGTGTAACCCAGGCTATGTCATGGAAGCAGTCACATCCGCCACTATTCGCTGTACCAAAG
ACGGCAGGTGGAATCCGAGCAAACCTGTCTGCAAAGGTTTGCTGTGTCCTCAGCCGCCGCCGGTGCAG
AATGGAACAGTGGAGGGAAGTGATTTCCGCTGGGGCTCCAGCATAAGTTACAGCTGCATGGACGGTTA
CCAGCTCTCTCACTCCGCCATCCTCTCCTGTGAAGGTCGCGGGGTGTGGAAAGGAGAGATCCCCCAGT
GTCTGCCTGTGTTCTGCGGAGACCCTGGCATCCCCGCAGAGGGGCGACTTAGTGGGAAAAGTTTCACC
TATAAGTCCGAAGTCTTCTTCCAGTGCAAATCTCCATTTATACTCGTGGGATCCTCCAGAAGAGTCTG
CCAAGCTGACGGCACGTGGAGCGGCATACAACCCACCTGCATTGATCCTGCTCATAACACCTGCCCAG
ACCCTGGTACGCCACACTTTGGAATACAGAATAGCTCCAGAGGCTATGAGGTTGGAAGCACGGTTTTT
TTCAGGTGCAGAAAAGGCTACCATATTCAAGGTTCCACGACTCGCACCTGCCTTGCCAATTTAACATG
GAGTGGGATACAGACCGAATGTATACCTCATGCCTGCAGACAGCCAGAAACCCCGGCACACGCGGATG
TGAGAGCCATCGATCTTCCTACTTTCGGCTACACCTTAGTGTACACCTGCCATCCAGGCTTTTTCCTC
GCAGGGGGATCTGAGCACAGAACATGTAAAGCAGACATGAAATGGACAGGAAAGTCGCCTGTGTGTAA
AAGTAAGTCATTGATCAAGGAGTGGCATACTTTTCCAAAGAGCAAGGGAAAGGATCAGCTGCCCATCA
GGCTAGTGTCCACGTGTGAGACCCATAAGTAAGAGCATGAGGCTGCAGCATCGCCACCTGCCTCAGTC
GTGCTTCATGTGCGTGAGCTGTGTGTGTGAACGTGTGTATCCTCAGTGTTTGATGCAATGGTGGCATA
GCTAAATATATAGTACAATTAGTATGCAATTAGTACATAATAAAATGATTGCATTATTTCAAGCCAAA
AGAGAAAAGCTATTTGGTTAAAGAAAAGCATTCTGAGTTAAAAGGAAAATAATACTTGGTATAGTTTC
AGGAAAAGTAGTTCTTAGAGATGAAAATGAATAAAGGTCACCAAGTATCCGAGAATAGGTAAATGAAA
CTCTGTCTTATTTTTAAGACCACATGCTGTTTGTGGTAAAACCTCAGTTTATGTGTCCCTGACATTGA
TTCTGCTTTTTAAAATTACAAAAGCAA

| | | | |
|---|---|---|---|
| NOV54d, CG59905-02 | SEQ ID NO:1116 | 810 aa | MW at 87208.0 kD |
| Protein Sequence | | | |

MCKPVACPSIEAQLSEHVTWRLVSGSLNEYGAQVLLSCSPGYYLEGWRLLRCQANGTWSIGDERPSCR
VISCGSLSFPPNGNKIGTLTVYGATAIFTCNTGYTLVGSHVRECLANGLWSGSETRCLAGHCGSPDPI
VNGHISGDGFSYRDTVVYQCNPGFRLVGTSVRICLQDHKWSGQTPVCVAITCGHPGNPAHGFTNGSEF
NLNDVVNFTCNTGYLLQGVSRAQCRSNGQWSSPLPTSRHVGRGLLHWRLLRHGAPRRALQQIARVAGE
IHDIIILLAGSSALTCMANGLWDRSLPKCLAISCGHPGVPANAVLTGELFTYGAVVHYSCRGSESLIG
NDTRVCQEDSHWSGALPHCTGNNPGFCGDPGTPAHGSRLGDDFKTKSLLRFSCEMGHQLRGSPERTCL
LNGSWSGLQSVCEAVSCGNPGTPTNGMIVSSDGILFSSSVIYACWEGYKTSGLMTRHCTANGTWTGTA
PDCLVISCGDPGTLANGIQFGTDFTFNKTVSYQCNPGYVMEAVTSATIRCTKDGRWNPSKPVCKGLLC
PQPPPVQNGTVEGSDFRWGSSISYSCMDGYQLSHSAILSCEGRGVWKGEIPQCLPVFCGDPGIPAEGR
LSGKSFTYKSEVFFQCKSPFILVGSSRRVCQADGTWSGIQPTCIDPAHNTCPDPGTPHFGIQNSSRGY
EVGSTVFFRCRKGYHIQGSTTRTCLANLTWSGIQTECIPHACRQPETPAHADVRAIDLPTFGYTLVYT
CHPGFFLAGGSEHRTCKADMKWTGKSPVCKSKSLIKEWHTFPKSKGKDQLPIRLVSTCETHK

| | | |
|---|---|---|
| NOV54e, SNP13382527 of | SEQ ID NO:1117 | 3145 bp |
| CG59905-01, DNA Sequence | ORF Start: ATG at 34 | ORF Stop: TGA at 3046 |
| | SNP Pos: 392 | SNP Change: T to C |

ATTTTACTTGCTGGATCTTCAGCCTTGACCTGTATGGCAAATGGCTTATGGGACCGATCCCTGCCCAA
GTGTTTGGCTATATCCTGTGGACACCCAGGGGTCCCTGCCAACGCCGTCCTCACTGGAGAGCTGTTTA
CCTATGGCGCCGTCGTGCACTACTCCTGCAGAGGGAGCGAGAGCCTCATAGGCAACGACACGAGAGTG
TGCCAGGAAGACAGTCACTGGAGCGGGGCACTGCCCCACTGCACAGGAAATAATCCTGGATTCTGTGG
TGATCCGGGGACCCCAGCACATGGGTCTCGGCTTGGTGATGACTTTAAGACAAAGAGTCTTCTCCGCT
TCTCCTGTGAAATGGGGCACCAGCTGAGGGGCTCCCCTGAACGCACGTGTTCGCTCAATGGGTCATGG
TCAGGACTGCAGCCGGTGTGTGAGGCCGTGTCCTGTGGCAACCCTGGCACACCCACCAACGGAATGAT
TGTCAGTAGTGATGGCATTCTGTTCTCCAGCTCGGTCATCTATGCCTGCTGGGAAGGCTACAAGACCT
CAGGGCTCATGACACGGCATTGCACAGCCAATGGGACCTGGACAGGCACTGCTCCCGACTGCACAATT
ATAAGTTGTGGGGATCCAGGCACACTAGCAAATGGCATCCAGTTTGGGACCGACTTCACCTTCAACAA
GACTGTGAGCTATCAGTGTAACCCAGGCTATGTCATGGAAGCAGTCACATCCGCCACTATTCGCTGTA
CCAAAGACGGCAGGTGGAATCCGAGCAAACCTGTCTGCAAAGCCGTGCTGTGTCCTCAGCCGCCGCCG
GTGCAGAATGGAACAGTGGAGGGAAGTGATTTCCGCTGGGGCTCCAGCATAAGTTACAGCTGCATGGA
CGGTTACCAGCTCTCTCACTCCGCCATCCTCTCCTGTGAAGGTCGCGGGGTGTGGAAAGGAGAGATCC
CCAGTGTCTGCCTGTGTTCTGCGGAGACCCTGGCATCCCCGCAGAAGGGCGACTTAGTGGGAAAAGTT
TCACCTATAAGTCCGAAGTCTTCTTCCAGTGCAAATCTCCATTTATACTCGTGGGATCCTCCAGAAGA
GTCTGCCAAGCTGACGGCACGTGGAGCGGCATACAACCCACCTGCATTGGTAATAATTATCATACAGC
TCTGGGGATACCTGGGAGTATTTGGAGATGAGGACGCTTCATTCCGAAATTGGGTCATTTGTGATTAC
ATAGAAAGTGTTTCCATAGACAGTTTTCTGTACAAGGTTGGAAGCACGGTTTTTTTCAGGTGCAGAAA
AGGCTACCATATTCAAGGTTCCACGACTCGCACCTGCCTTGCCAATTTAACATGGAGTGGGATACAGA
CCGAATGTATACCTCATGCCTGCAGACAGCCAGAAACCCCGGCACACGCGGATGTGAGAGCCATCGAT
CTTCCTACTTTCGGCTACACCTTAGTGTACACCTGCCATCCAGGCTTTTTCCTCGCAGGGGGATCTGA
GCACAGAACATGTAAAGCAGACATGAAATGGACAGGAAAGTCGCCTGTGTGTAAAATTCCTTCAGATG
TCTTTTTCGTCAATTCACTGTGGAAGGGGTATTATGAATATTTAGGGAAAAGACAACCCGCCACTCTA
ACTGTTGACTGGTTCAATGCAACAAGCAGTAAGGTGAATGCCACCTTCAGCGAAGCCTCGCCAGTGGA
GCTGAAGTTGACAGGCATTTACAAGAAGGAGGAGGCCCACTTACTCCTGAAAGCTTTTCAAATTAAAG
GCCAGGCAGATATTTTTGTAAGCAAGTTCGAAAATGACAACTGGGGACTAGATGGTTATGTGTCATCT
GGACTTGAAAGAGGAGGATTTACTTTTCAAGGTGACATTCATGGAAAAGACTTTGGAAAATTTAAGCT
AGAAAGGCAAGGATGGGTCACAATATTCTTGAGCCTATTTCTTCATCTTAAATCTCAGTATAGAAGTT
CCCAAGGTTGTTACGAGATTGAGAGGCCACATCCTTTAAACCCAGATCAAGACTCTTCCAGTCATTAC
CACGGCACCAGCAGTGGCTCTGTGGCGGCTGCCATTCTGGTTCCTTTCTTTGCTCTAATTTTATCAGG
GTTTGCATTTTACCTCTACAAACACAGAACGAGACCAAAAGTTCAATACAATGGCTATGCTGGGCATG
AAAACAGCAATGGACAAGCATCGTTTGAAAACCCCATGTATGATACAAACTTAAAACCCACAGAAGCC
AAGGCTAAAACCACACACGGGCTGCTCACGTCTCTGGACTCCAAGAGAAAGATGGTTATAACCCTGGC
AGAGTCTTTACCCGCCCTGCGAACCTGCCTGTTGATCTGCTTCCCACTCCTCTTTAGACTTGCTCGTG
AATCTTCAGCACAGCCATTTGTTTTGAGTATTCAAACACATAAAAAGATATCTGGCAACTTCCCACTT
CTTATGACTTCTCAGACACCTTGTAACGGAGCTTCCCTTGGAGGTGGACAAACTTCTCACTCACAAGA
GAGACGGAGAGCAACAGAGAGAGATGGGCAGGGATTGATTCGAGGATTGGCTGACTCGATTATGGAGG
GTGAGAAGTCCCAGGACAGGCCGTCTGCAAGGCGTAAACCCAGGGAAGCTGCTGGTATGGCTCGGTTC
AAGTCCAAAGGCCTCAGCACCAAGGAAACCAAGGTGATAACTCTCAGTTCGGGTCAAAGTCCTGGGAG
TCTGCAAGGCCTCTCATTGAGTAAGTCTCACAAGATCCGATGGTTTTATAAAGGGCAGTTCCCCTGCA
CAAGCTCTCTTCTCTGCCACCACGCGTTTGCTGTTCATTCACCTTTCACCATGATTGTGAGGCCTCCC
AGCCATGTGGAACTGTGCAAAGAGGATGTTCAAAGGGCATCTTGGACCAGGAGGAGGAAGCCCATTGT
GAGGATGGCAAAGAACAATAAATGGAAGGCCCGTGGAACCCTGAGCGGCTGCCCCATCACTGTCCTCT
CCATCCTTTCCATGCTTCCCATGGTGCATGGCTCTCAGGCTCTCCAAGCACCATGAGCTCCTGGCGCG
TATGGCCTGGCCCCTGAGTGTGGAGTCTGTGGACTTTAAATGTGCCTTTACTCAGCCAGCATCTCCCT
GGCTGGGTGCGATGTTG

| | | | |
|---|---|---|---|
| NOV54e, SNP13382527 of | SEQ ID NO:1118 | 1004 aa | MW at 109726.6 kD |
| CG59905-01, Protein | SNP Pos: 120 | | SNP Change: Leu to Ser |
| Sequence | | | |

MANGLWDRSLPKCLAISCGHPGVPANAVLTGELFTYGAVVHYSCRGSESLIGNDTRVCQEDSHWSGAL
PHCTGNNPGFCGDPGTPAHGSRLGDDFKTKSLLRFSCEMGHQLRGSPERTCSLNGSWSGLQPVCEAVS
CGNPGTPTNGMIVSSDGILFSSSVIYACWEGYKTSGLMTRHCTANGTWTGTAPDCTIISCGDPGTLAN
GIQFGTDFTFNKTVSYQCNPGYVMEAVTSATIRCTKDGRWNPSKPVCKAVLCPQPPPVQNGTVEGSDF
RWGSSISYSCMDGYQLSHSAILSCEGRGVWKGEIPSVCLCSAETLASPQKGDLVGKVSPISPKSSSSA
NLHLYSWDPPEESAKLTARGAAYNPPALVTIIIQLWGYLGVFGDEDASFRNWVICDYIESVSIDSFLY
KVGSTVFFRCRKGYHIQGSTTRTCLANLTWSGIQTECIPHACRQPETPAHADVRAIDLPTFGYTLVYT
CHPGFFLAGGSEHRTCKADMKWTGKSPVCKIPSDVFFVNSLWKGYYEYLGKRQPATLTVDWFNATSSK
VNATFSEASPVELKLTGIYKKEEAHLLLKAFQIKGQADIFVSKFENDNWGLDGYVSSGLERGGFTFQG
DIHGKDFGKFKLERQGWVTIFLSLFLHLKSQYRSSQGCYEIERPHPLNPDQDSSSHYHGTSSGSVAAA
ILVPFFALILSGFAFYLYKHRTRPKVQYNGYAGHENSNGQASFENPMYDTNLKPTEAKAKTTHGLLTS
LDSKRKMVITLAESLPALRTCLLICFPLLFRLARESSAQPFVLSIQTHKKISGNFPLLMTSQTPCNGA
SLGGGQTSHSQERRRATERDGQGLIRGLADSIMEGEKSQDRPSARRKPREAAGMARFKSKGLSTKETK
VITLSSGQSPGSLQGLSLSKSHKIRWFYKGQFPCTSSLLCHHAFAVHSPFTMIVRPPSHVELCKEDVQ
RASWTRRRKPIVRMAKNNKWKARGTLSGCPITVLSILSMLPMVHGSQALQAP

| | | |
|---|---|---|
| NOV54f, SNP13382520 of | SEQ ID NO:1119 | 3145 bp |
| CG59905-01, DNA Sequence | ORF Start: ATG at 34 | ORF Stop: TGA at 3046 |
| | SNP Pos: 1620 | SNP Change: A to T |

ATTTTACTTGCTGGATCTTCAGCCTTGACCTGTATGGCAAATGGCTTATGGGACCGATCCCTGCCCAA
GTGTTTGGCTATATCCTGTGGACACCCAGGGGTCCCTGCCAACGCCGTCCTCACTGGAGAGCTGTTTA
CCTATGGCGCCGTCGTGCACTACTCCTGCAGAGGGAGCGAGAGCCTCATAGGCAACGACACGAGAGTG
TGCCAGGAAGACAGTCACTGGAGCGGGGCACTGCCCCACTGCACAGGAAATAATCCTGGATTCTGTGG
TGCTCCGGGGACCCCAGCACATGGGTCTCGGCTTGGTGATGACTTTAAGACAAAGAGTCTTCTCCGCT
TCTCCTGTGAAATGGGGCACCAGCTGAGGGGCTCCCCTGAACGCACGTGTTTGCTCAATGGGTCATGG
TCAGGACTGCAGCCGGTGTGTGAGGCCGTGTCCTGTGGCAACCCTGGCACACCCACCAACGGAATGAT
TGTCAGTAGTGATGGCATTCTGTTCTCCAGCTCGGTCATCTATGCCTGCTGGGAAGGCTACAAGACCT
CAGGGCTCATGACACGGCATTGCACAGCCAATGGGACCTGGACAGGCACTGCTCCCGACTGCACAATT
ATAAGTTGTGGGGATCCAGGCACACTAGCAAATGGCATCCAGTTTGGGACCGACTTCACCTTCAACAA
GACTGTGAGCTATCAGTGTAACCCAGGCTATGTCATGGAAGCAGTCACATCCGCCACTATTCGCTGTA
CCAAAGACGGCAGGTGGAATCCGAGCAAACCTGTCTGCAAAGCCGTGCTGTGTCCTCAGCCGCCGCCG
GTGCAGAATGGAACAGTGGAGGGAAGTGATTTCCGCTGGGGCTCCAGCATAAGTTACAGCTGCATGGA
CGGTTACCAGCTCTCTCACTCCGCCATCCTCTCCTGTGAAGGTCGCGGGGTGTGGAAAGGAGAGATCC
CCAGTGTCTGCCTGTGTTCTGCGGAGACCCTGGCATCCCCGCAGAAGGGCGACTTAGTGGGAAAAGTT
TCACCTATAAGTCCGAAGTCTTCTTCCAGTGCAAATCTCCATTTATACTCGTGGGATCCTCCAGAAGA
GTCTGCCAAGCTGACGGCACGTGGAGCGGCATACAACCCACCTGCATTGGTAATAATTATCATACAGC
TCTGGGGATACCTGGGAGTATTTGGAGATGAGGACGCTTCATTCCGAAATTGGGTCATTTGTGATTAC
ATAGAAAGTGTTTCCATAGACAGTTTTCTGTACAAGGTTGGAAGCACGGTTTTTTTCAGGTGCAGAAA
AGGCTACCATATTCAAGGTTCCACGACTCGCACCTGCCTTGCCAATTTAACATGGAGTGGGATACAGA
CCGAATGTATACCTCATGCCTGCAGACAGCCAGAAACCCCGGCACACGCGGATGTGAGAGCCATCGAT
CTTCCTACTTTCGGCTACACCTTAGTGTACACCTGCCATCCAGGCTTTTTCCTCGCAGGGGGATCTGA
GCACAGAACATGTAAAGCAGACATGAAATGGACAGGAAAGTCGCCTGTGTGTAAAATTCCTTCAGATG
TCTTTTTCGTCAATTCACTGTGGAAGGGGTATTATGAATATTTAGGGAAAAGACATCCCGCCACTCTA
ACTGTTGACTGGTTCAATGCAACAAGCAGTAAGGTGAATGCCACCTTCAGCGAAGCCTCGCCAGTGGA
GCTGAAGTTGACAGGCATTTACAAGAAGGAGGAGGCCCACTTACTCCTGAAAGCTTTTCAAATTAAAG
GCCAGGCAGATATTTTTGTAAGCAAGTTCGAAAATGACAACTGGGGACTAGATGGTTATGTGTCATCT
GGACTTGAAAGAGGAGGATTTACTTTTCAAGGTGACATTCATGGAAAAGACTTTGGAAAATTTAAGCT
AGAAAGGCAAGGATGGGTCACAATATTCTTGAGCCTATTTCTTCATCTTAAATCTCAGTATAGAAGTT
CCCAAGGTTGTTACGAGATTGAGAGGCCACATCCTTTAAACCCAGATCAAGACTCTTCCAGTCATTAC
GTTTGCATTTTACCTCTACAAACACAGAACGAGACCAAAAGTTCAATACAATGGCTATGCTGGGCATG
AAAACAGCAATGGACAAGCATCGTTTGAAAACCCCATGTATGATACAAACTTAAAACCCACAGAAGCC
AAGGCTAAAACCACACACGGGCTGCTCACGTCTCTGGACTCCAAGAGAAAGATGGTTATAACCCTGGC
AGAGTCTTTACCCGCCCTGCGAACCTGCCTGTTGATCTGCTTCCCACTCCTCTTTAGACTTGCTCGTG
AATCTTCAGCACAGCCATTTGTTTTGAGTATTCAAACACATAAAAAGATATCTGGCAACTTCCCACTT
CTTATGACTTCTCAGACACCTTGTAACGGAGCTTCCCTTGGAGGTGGACAAACTTCTCACTCACAAGA
GAGACGGAGAGCAACAGAGAGAGATGGGCAGGGATTGATTCGAGGATTGGCTGACTCGATTATGGAGG
GTGAGAAGTCCCAGGACAGGCCGTCTGCAAGGCGTAAACCCAGGGAAGCTGCTGGTATGGCTCGGTTC
AAGTCCAAAGGCCTCAGCACCAAGGAAACCAAGGTGATAACTCTCAGTTCGGGTCAAAGTCCTGGGAG
TCTGCAAGGCCTCTCATTGAGTAAGTCTCACAAGATCCGATGGTTTTATAAAGGGCAGTTCCCCTGCA
CAAGCTCTCTTCTCTGCCACCACGCGTTTGCTGTTCATTCACCTTTCACCATGATTGTGAGGCCTCCC
AGCCATGTGGAACTGTGCAAAGAGGATGTTCAAAGGGCATCTTGGACCAGGAGGAGGAAGCCCATTGT
GAGGATGGCAAAGAACAATAAATGGAAGGCCCGTGGAACCCTGAGCGGCTGCCCCATCACTGTCCTCT
CCATCCTTTCCATGCTTCCCATGGTGCATGGCTCTCAGGCTCTCCAAGCACCATGAGCTCCTGGCGCG
TATGGCCTGGCCCCTGAGTGTGGAGTCTGTGGACTTTAAATGTGCCTTTACTCAGCCAGCATCTCCCT
GGCTGGGTGCGATGTTG

| | | | |
|---|---|---|---|
| NOV54f, SNP13382520 of | SEQ ID NO:1120 | 1004 aa | MW at 109761.8 kD |
| CG59905-01, Protein Sequence | SNP Pos: 529 | | SNP Change: Gln to His |

MANGLWDRSLPKCLAISCGHPGVPANAVLTGELFTYGAVVHYSCRGSESLIGNDTRVCQEDSHWSGAL
PHCTGNNPGFCGDPGTPAHGSRLGDDFKTKSLLRFSCEMGHQLRGSPERTCLLNGSWSGLQPVCEAVS
CGNPGTPTNGMIVSSDGILFSSSVIYACWEGYKTSGLMTRHCTANGTWTGTAPDCTIISCGDPGTLAN
GIQFGTDFTFNKTVSYQCNPGYVMEAVTSATIRCTKDGRWNPSKPVCKAVLCPQPPPVQNGTVEGSDF
RWGSSISYSCMDGYQLSHSAILSCEGRGVWKGEIPSVCLCSAETLASPQKGDLVGKVSPISPKSSSSA
NLHLYSWDPPEESAKLTARGAAYNPPALVIIIIQLWGYLGVFGDEDASFRNWVICDYIESVSIDSFLY
KVGSTVFFRCRKGYHIQGSTTRTCLANLTWSGIQTECIPHACRQPETPAHADVRAIDLPTFGYTLVYT
CHPGFFLAGGSEHRTCKADMKWTGKSPVCKIPSDVFFVNSLWKGYYEYLGKRHPATLTVDWFNATSSK
VNATFSEASPVELKLTGIYKKEEAHLLLKAFQIKGQADIFVSKFENDNWGLDGYVSSGLERGGFTFQG
DIHGKDFGKFKLERQGWVTIFLSLFLHLKSQYRSSQGCYEIERPHPLNPDQDSSSHYHGTSSGSVAAA
ILVPFFALILSGFAFYLYKHRTRPKVQYNGYAGHENSNGQASFENPMYDTNLKPTEAKAKTTHGLLTS
LDSKRKMVITLAESLPALRTCLLICFPLLFRLARESSAQPFVLSIQTHKKISGNFPLLMTSQTPCNGA
SLGGGQTSHSQERRRATERDGQGLIRGLADSIMEGEKSQDRPSARRKPREAAGMARFKSKGLSTKETK
VITLSSGQSPGSLQGLSLSKSHKIRWFYKGQFPCTSSLLCHHAFAVHSPFTMIVRPPSNVELCKEDVQ
RASWTRRRKPIVRMAKNNKWKARGTLSGCPITVLSILSMLPMVHGSQALQAP

[0666] A ClustalW comparison of the above protein sequences yields the following sequence alignment shown in Table 54B.

TABLE 54B
Comparison of the NOV54 protein sequences.

NOV54a ------------------------------------------------------------
NOV54b MTAWRRFQSLLLLLGLLVLCARLLTAAKGQNCGGLVQGPNGTIESPGFPHGYPNYANCTW
NOV54c ------------------------------------------------------------
NOV54d ------------------------------------------------------------
NOV54a ------------------------------------------------------------
NOV54b IIITGERNRIQLSFHTFALEENFDILSVYDGQPQQGNLKVRLSGFQLPSSIVSTGSILTL
NOV54c ------------------------------------------------------------
NOV54d ------------------------------------------------------------
NOV54a ------------------------------------------------------------
NOV54b WFTTDFAVSAQGFKALYEVLPSHTCGNPGEILKGVLHGTRFNIGDKIRYSCLPGYILEGH
NOV54c ------------------------------------------------------------
NOV54d ------------------------------------------------------------
NOV54a ------------------------------------------------------------
NOV54b AILTCIVSPGNGASWDFPAPFCHAEGACGGTLRGTSSSISSPHFPSEYENNADCTWTILA
NOV54c ------------------------------------------------------------
NOV54d ------------------------------------------------------------
NOV54a ------------------------------------------------------------
NOV54b EPGDTIALVFTDFQLEEGYDFLEISGTEAPSIWLTGMNLPSPVISSKNWLRLHFTSDSNH
NOV54c ------------------------------------------------------------
NOV54d ------------------------------------------------------------
NOV54a ------------------------------------------------------------
NOV54b RRKGFNAQFQVKKAIELKSRGVKMLPSKDGSHKNSVLSQGGVALVSHMCLDPGIPENGRR
NOV54c ------------------------------------------------------------
NOV54d ------------------------------------------------------------
NOV54a ------------------------------------------------------------
NOV54b AGSDFSRVGANVQFSCEDNYVLQGSKSTTCQRVTETLAAWSDHRPICRARTCGSNLRGPS
NOV54c ------------------------------------------------------------
NOV54d ------------------------------------------------------------
NOV54a ------------------------------------------------------------
NOV54b GVITSPNYPVQYEDNAHCVWVITTTDPDKVIKLAFEEFELERGYDTLTVGDAGKVGDTRS
NOV54c ------------------------------------------------------------
NOV54d ------------------------------------------------------------
NOV54a ------------------------------------------------------------
NOV54b VLYVLTGSSVPDLIVSMSNQMWLHLQSDDSIGSPGFKAVYQEIEKGGCGDPGIPAYGKRT
NOV54c ------------------------------------------------------------
NOV54d ------------------------------------------------------------
NOV54a ------------------------------------------------------------
NOV54b GSSFLHGDTLTFECPAAFELVGERVITCQQNNQWSGNKPSCVFSCFFNFTASSGIILSPN
NOV54c ------------------------------------------------------------
NOV54d ------------------------------------------------------------
NOV54a ------------------------------------------------------------
NOV54b YPEEYGNNMNCVWLTISEPGSRIHLIFNDFDVEPQFDFLAVKDNGISDITVLGTFSGNEV
NOV54c ------------------------------------------------------------
NOV54d ------------------------------------------------------------
NOV54a ------------------------------------------------------------
NOV54b PSQLASSGHIVRLEFQSDHSTTGRGFNITYTTFGQNECHDPGIPINGRRFGDRFLLGSSV
NOV54c ------------------------------------------------------------
NOV54d ------------------------------------------------------------
NOV54a ------------------------------------------------------------
NOV54b SFHCDDGFVKTQGSESITCILQDGNVVWSSTVPRCEAPCGGHLTASSGVILPPGWPGYYK
NOV54c ------------------------------------------------------------
NOV54d ------------------------------------------------------------
NOV54a ------------------------------------------------------------
NOV54b DSLHCEWIIEAKPGHSIKMTFDRFQTEVNYDTLEVRDGPASSSPLIGEYHGTQAPQFLIS
NOV54c ------------------------------------------------------------
NOV54d ------------------------------------------------------------
NOV54a ------------------------------------------------------------
NOV54b TGNFMYLLFTTDNSRSSIGFLIHYESVTLESDSCLDPGIPVNGHRHGGDFGIRSTVTFSC
NOV54c ------------------------------------------------------------
NOV54d ------------------------------------------------------------
NOV54a ------------------------------------------------------------
NOV54b DPGYTLSDDEPLVCERNHQWNHALPSCDALCGGYIQGKSGTVLSPGFPDFYPNSLNCTWT
NOV54c ------------------------------------------------------------
NOV54d ------------------------------------------------------------
NOV54a ------------------------------------------------------------
NOV54b IEVSHGKGVQMIFHTFHLESSHDYLLITEDGSFSEPVARLTGSVLPHTIKAGLFGNFTAQ
NOV54c ------------------------------------------------------------
NOV54d ------------------------------------------------------------
NOV54a ------------------------------------------------------------
NOV54b LRFISDFSISYEGFNITFSEYDLEPCDDPGVPAFSRRIGFHFGVGDSLTFSCFLGYRLEG
NOV54c ------------------------------------------------------------
NOV54d ------------------------------------------------------------
NOV54a ------------------------------------------------------------
NOV54b ATKLTCLGGGRRVWSAPLPRCVAECGASVKGNEGTLLSPNFPSNYDNTHECIYKIETEAG
NOV54c ------------------------------------------------------------
NOV54d ------------------------------------------------------------
NOV54a ------------------------------------------------------------
NOV54b KGIHLRTRSFQLFEGDTLKVYDGKDSSSRPLGTFTKNELLGLILNSTSNHLWLEFNTNGS
NOV54c ------------------------------------------------------------
NOV54d ------------------------------------------------------------
NOV54a ------------------------------------------------------------
NOV54b DTDQGFQLTYTSFDLVKCEDPGIPNYGYRIRDEGHFTDTVVLYSCNPGYANHGSNTLTCL
NOV54c ------------------------------------------------------------
NOV54d ------------------------------------------------------------
NOV54a ------------------------------------------------------------
NOV54b SGDPRVWDKPLPSCIAECGGQIHAATSGRILSPGYPAPYDNNLHCTWIIEADPGKTISLH
NOV54c ------------------------------------------------------------
NOV54d ------------------------------------------------------------
NOV54a ------------------------------------------------------------
NOV54b FIVFDTEMAHDILKVWDGPVDSDILLKEWSGSALPEDIHSTFNSLTLQFDSDFFISKSGF
NOV54c ------------------------------------------------------------
NOV54d ------------------------------------------------------------
NOV54a ------------------------------------------------------------
NOV54b SIQFSTSIAATCNDPGMPQNGTRYGDSREAGDTVTFQCDPGYQLQGQAKITCVQLNNRFF
NOV54c ------------------------------------------------------------
NOV54d ------------------------------------------------------------
NOV54a ------------------------------------------------------------
NOV54b WQPDPPTCIAACGGNLTGPAGVILSPNYPQPYPPGKECDWRVKVNPDFVIALIFKSFNME
NOV54c ------------------------------------------------------------
NOV54d ------------------------------------------------------------
NOV54a ------------------------------------------------------------
NOV54b PSYDFLHIYEGEDSNSPLIGSYQGSQAPERIESSGNSLFLAFRSDASVGLSGFAIEFKEK
NOV54c ------------------------------------------------------------
NOV54d ------------------------------------------------------------
NOV54a ------------------------------------------------------------
NOV54b PREACFDPGNIMNGTRVGTDFKLGSTITYQCDSGYKILDPSSITCVIGADGKPSWDQVLP
NOV54c ------------------------------------------------------------
NOV54d ------------------------------------------------------------
NOV54a ------------------------------------------------------------
NOV54b SCNAPCGGQYTGSEGVVLSPNYPHNYTAGQICLYSITVPKEFVVFGQFAYFQTALNDLAE
NOV54c ------------------------------------------------------------
NOV54d ------------------------------------------------------------
NOV54a ------------------------------------------------------------
NOV54b LFDGTHAQARLLSSLSGSHSGETLPLATSNQILLRFSAKSGASARGFHFVYQAVPRTSDT
NOV54c ------------------------------------------------------------
NOV54d ------------------------------------------------------------
NOV54a ------------------------------------------------------------
NOV54b QCSSVPEPRYGRRIGSEFSAGSIVRFECNPGYLLQGSTALHCQSVPNALAQWNDTIPSCV
NOV54c ------------------------------------------------------------
NOV54d ------------------------------------------------------------
NOV54a ------------------------------------------------------------
NOV54b VPCSGNFTQRRGTILSPGYPEPYGNNLNCIWKIIVTEGSGIQDPSDQFCHGAELGLPFEI
NOV54c ------------------------------------------------------------
NOV54d ------------------------------------------------------------
NOV54a ------------------------------------------------------------
NOV54b HDGGDVTAPRLGSFSGTTVPALLNSTSNQLYLHFQSDISVAAAGFHLEYKTVGLAACQEP
NOV54c ------------------------------------------------------------
NOV54d ------------------------------------------------------------
NOV54a ------------------------------------------------------------
NOV54b ALPSNSIKIGDRYMVNDVLSFQCEPGYTLQGRSHISCMPGTVRRWNYPSPLCIATCGGTL
NOV54c ------------------------------------------------------------
NOV54d ------------------------------------------------------------
NOV54a ------------------------------------------------------------
NOV54b STLGGVILSPGFPGSYPNNLDCTWRISLPIGYGAHIQFLNFSTEANHDFLEIQNGPYHTS
NOV54c ------------------------------------------------------------
NOV54d ------------------------------------------------------------
NOV54a ------------------------------------------------------------
NOV54b PMIGQFSGTDLPAALLSTTHETLIHFYSDHSQNRQGFKLAYQAYELQNCPDPPPFQNGYM
NOV54c ------------------------------------------------------------
NOV54d ------------------------------------------------------------
NOV54a ------------------------------------------------------------
NOV54b INSDYSVGQSVSFECYPGYILIGHPVLTCQHGINRNWNYPFPRCDAPCGYNVTSQNGTIY
NOV54c ------------------------------------------------------------
NOV54d ------------------------------------------------------------
NOV54a ------------------------------------------------------------
NOV54b SPGFPDEYPILKDCIWLITVPPGHGVYINFTLLQTEAVNDYIAVWDGPDQNSPQLGVFSG
NOV54c ------------------------------------------------------------
NOV54d ------------------------------------------------------------
NOV54a ------------------------------------------------------------
NOV54b NTALETAYSSTNQVLLKFHSDFSNGGFFVLNFHAFQLKKCQPPPAVPQAEMLTEDDDFEI
NOV54c ------------------------------------------------------------
NOV54d ------------------------------------------------------------
NOV54a ------------------------------------------------------------
NOV54b GDFVKYQCHPGYTLVGTDILTCKLSSQLQFEGSLPTCEAQCPANEVRTGSSGVILSPGYP
NOV54c ------------------------------------------------------------
NOV54d ------------------------------------------------------------
NOV54a ------------------------------------------------------------
NOV54b GNYFNSQTCSWSIKVEPNYNITIFVDTFQSEKQFDALEVFDGSSGQSPLLVVLSGNHTEQ
NOV54c ------------------------------------------------------------
NOV54d ------------------------------------------------------------
NOV54a ------------------------------------------------------------
NOV54b SNFTSRSNQLYLRWSTDHATSKKGFKIRYAAPYCSLTHPLKNGGILNRTAGAVGSKVHYF
NOV54c ------------------------------------------------------------
NOV54d ------------------------------------------------------------
NOV54a ------------------------------------------------------------
NOV54b CKPGYRMVGHSNATCRRNPLGMYQWDSLTPLCQAVSCGIPESPGNGSFTGNEFTLDSKVV
NOV54c ------------------------------------------------------------
NOV54d ------------------------------------------------------------
NOV54a ------------------------------------------------------------
NOV54b YECHEGFKLESSQQATAVCQEDGLWSNKGKPPMCKPVACPSIEAQLSEHVIWRLVSGSLN
NOV54c ------------------------------------------------------------
NOV54d --------------------------------MCKPVACPSIEAQLSENVIWRLVSGSLN
NOV54a ------------------------------------------------------------
NOV54b EYGAQVLLSCSPGYYLEGWRLLRCQANGTWNIGDERPSCRVISCGSLSFPPNGNKIGTLT
NOV54c ------------------------------------------------------------
NOV54d EYGAQVLLSCSPGYYLEGWRLLRCQANGTWSIGDERPSCRVISCGSLSFPPNGNKIGTLT
NOV54a ------------------------------------------------------------
NOV54b VYGATAIFTCNTGYTLVGSHVRECLANGLWSGSETRCLAGHCGSPDPIVNGHISGDGFSY
NOV54c ------------------------------------------------------------
NOV54d VYGATAIFTCNTGYTLVGSHVRECLANGLWSGSETRCLAGHCGSPDPIVNGHISGDGFSY
NOV54a ------------------------------------------------------------
NOV54b RDTVVYQCNPGFRLVGTSVRICLQDHKWSGQTPVCVRITCGHPGNPAHGFTNGSEFNLND
NOV54c ------------------------------------------------------------
NOV54d RDTVVYQCNPGFRLVGTSVRICLQDHKWSGQTPVCVAITCGHPGNPAHGFTNGSEFNLND
NOV54a ------------------------------------------------------------
NOV54b VVNFTCNTGYLLQGVSPAQCRSNGQWSSPLPTCRVVNCSDPGFVENAIRHGQQNFPESFE
NOV54c ------------------------------------------------------------
NOV54d VVNFTCNTGYLLQGVSRAQCRSNGQWSSPLPTSRHVGRG--LLHWRLLRHG-APRHALQQ
NOV54a -----------------------MANGLWDRSLPKCLATSCGHPGVPANAVLTGELFTYG
NOV54b YGMSILYHCKKGFYLLGSSALTCMANGLWDRSLPKCLAISCGHPGVPANAVLTGELFTYG
NOV54c -------------------------------------TRSCGHPGVPANAVLTGELFTYG
NOV54d IARVAGEIHDIIILLAGSSALTCMANGLWDRSLPKCLAISCGHPGVPANAVLTGELFTYG
NOV54a AVVHYSCRGSESLIGNDTRVCQEDSHWSGALPHCTGNNPGFCGDPGTPAHGSRLGDDFKT
NOV54b AVVHYSCRGSESLIGNDTRVCQEDSHWSGALPHCTGNNPGFCGDPGTPAHGSRLGDDFKT
NOV54c AVVHYSCRGSESLIGNDTRVCQEDSHWSGALPHCTGNNPGFCGDPGTPAHGSRLGDDFKT
NOV54d AVVHYSCRGSESLIGNDTRVCQEDSHWSGALPHCTGNNPGFCGDPGTPAHGSRLGDDFKT
NOV54a KSLLRFSCEMGHQLRGSPERTCLLNGSWSGLQPVCEAVSCGNPGTPTNGMIVSSDGILFS
NOV54b KSLLRFSCEMGHQLRGSPERTCLLNGSWSGLQPVCEAVSCGNPGTPTNGMIVSSDGILFS
NOV54c KSLLRFSCEMGHQLRGSPERTCLLNGSWSGLQPVCEAVSCGNPGTPTNGMIVSSDGILFS
NOV54d KSLLRFSCEMGHQLRGSPERTCLLNGSWSGLQSVCEAVSCGNPGTPTNGMIVSSDGILFS
NOV54a SSVIYACWEGYKTSGLMTRHCTANGTWTGTAPDCTIISCGDPGTLANGIQFGTDFTFNKT
NOV54b SSVIYACWEGYKTSGLMTRHCTANGTWTGTAPDCTVISCGDPGTLANGIQFGTDFTFNKT
NOV54c SSVIYACWEGYKTSGLMTRHCTANGTWTGTAPDCTIISCGDPGTLANGIQFGTDFTFNKT
NOV54d SSVIYACWEGYKTSGLMTRHCTANGTWTGTAPDCLVISCGDPGTLANGIQFGTDFTFNKT
NOV54a VSYQCNPGYVMEAVTSATIRCTKDGRWNPSKPVCKAVLCPQPPPVQNGTVEGSDFRWGSS
NOV54b VSYQCNPGYVMEAVTSATIRCTKDGRWNPSKPVCKAVLCPQPPPVQNGTVEGSDFRWGSS
NOV54c VSYQCNPGYVMEAVTSATIRCTKDGRWNPSKPVCKAVLCPQPPPVQNGTVEGSDFRWGSS
NOV54d VSYQCNPGYVMEAVTSATIRCTKDGRWNPSKPVCKGLLCPQPPPVQNGTVEGSDFRWGSS
NOV54a ISYSCMDGYQLSHSAILSCEGRGVWKGEIPSVCLCSAETIASPQKGDLVGKVSPISPKSS
NOV54b ISYSCMDGYQLSHSAILSCEGRGVWKGEIPQCLAVFCGDPGIPAEGRLSGKSFTYKSEVF
NOV54c ISYSCMDGYQLSHSAILSCEGRGVWKGEIPSVCLEG------------------------
NOV54d ISYSCMDGYQLSHSAILSCEGRGVWKGEIPQCLPVFCGDPGIPAEGRLSGKSFTYKSEVF
NOV54a SSANLHLYSWDPPEESAKLTARGAAYNPPALVIIIIQLWGYLGVFGDEDASFRNWVICDY
NOV54b FQCKSPFILVGSSRRVCQADGTWSGIQPTCIGDPAHNTCPDPGTPHFG------------
NOV54c ------------------------------------------------------------
NOV54d FQCKSPFILVGSSRRVCQADGTWSGIQPTCI-DPAHNTCPDPGTPHFG------------
NOV54a IESVSIDSFLYKVGSTVFFRCRKGYHIQGSTTRTCLANLTWSGIQTECIPHACRQPETPA
IWV54b ---IQNSSRGYEVGSTVFFRCRKGYHIQGSTTRTCLANLTWSGIQTECIRHACRQPETPA
NOV54c ------------------------------------------------------------
NOV54d ---IQNSSRGYEVGSTVFFRCRKGYHIQGSTTRTCLANLTWSGIQTECIPHACRQPETPA
NOV54a HADVRAIDLPTFGYTLVYTCHPGFFLAGGSEHRTCKADMKWTGKSPVCKIP---------
NOV54b HADVRAIDLPTFGYTLVYTCHPGFFLAGGSEHRTCKADMKWTGKSPVCKSKGVREVNETV
NOV54c ------------------------------------------------------------
NOV54d HADVRAIDLPTFGYTLVYTCHPGFFLAGGSEHRTCKADMKWTGKSPVCKSK---------
NOV54a ------SDVFFVNSLWKGYYEYLGKRQPATLTVDWFNATSSKVNATFSEASPVELKLTGI
NOV54b TKTPVPSDVFFVNSLWKGYYEYLGKRQPATLTVDWFNATSSKVNATFSEASPVELKLTGI
NOV54c ------------------------------------------------------------
NOV54d -------------SLIKEWHTFPKSKGKDQLPIRLVSTCETHK-----------------
NOV54a YKKEEAHLLLKAFQIKGQADIFVSKFENDNWGLDGYVSSGLERGGFTFQGDIHGKDFGKF
NOV54b YKKEEAHLLLKAFQIKGQADIFVSKFENDNWGLDGYVSSGLERGGFTFQGDIHGKDFGKF
NOV54c ------------------------------------------------------------
NOV54d ------------------------------------------------------------
NOV54a KLERQGWVTIFLSLFLHLKSQYRSSQGCYEIERPHPLNPDQDSSSHYHGTSSGSVAAAIL
NOV54b KLERQ-----------------------------DPLNPDQDSSSHYHGTSSGSVAAAIL
NOV54c ------------------------------------------------------------
NOV54d ------------------------------------------------------------
NOV54a VPFFALILSGFAFYLYKHRTRPKVQYNGYAGHENSNGQASFENPMYDTNLKPTEAKAXTT
NOV54b VPFFALILSGFAFYLYKHRTRPKVQYNGYAGHENSNGQASFENPMYDTNLKPTEAKAVRF
NOV54c ------------------------------------------------------------
NOV54d ------------------------------------------------------------
NOV54a HGLLTSLDSKRKMVITLAESLPALRTCLLICFPLLFRLARESSAQPFVLSIQTHKKISGN
NOV54b DTTLNTVCTVV-------------------------------------------------
NOV54c ------------------------------------------------------------
NOV54d ------------------------------------------------------------
NOV54a FPLLMTSQTPCNGASLGGGQTSHSQERPPATERDGQGLIRGLADSIMEGEKSQDRPSARR
NOV54b ------------------------------------------------------------
NOV54c ------------------------------------------------------------
NOV54d ------------------------------------------------------------
NOV54a KPREAAGMARFKSKGLSTKETKVITLSSGQSPGSLQGLSLSKSHKIRWFYKGQFPCTSSL
NOV54b ------------------------------------------------------------
NOV54c ------------------------------------------------------------
NOV54d ------------------------------------------------------------
NOV54a LCHHAFAVHSPFTMIVRPPSHVELCKEDVQRASWTRPRKPIVRMAKNNKWKARGTLSGCP
NOV54b ------------------------------------------------------------
NOV54c ------------------------------------------------------------
NOV54d ------------------------------------------------------------
NOV54a ITVLSILSMLPMVHGSQALQAP
NOV54b ----------------------
NOV54c ----------------------
NOV54d ----------------------
NOV54a (SEQ ID NO: 1110)
NOV54b (SEQ ID NO: 1112)
NOV54c (SEQ ID NO: 1114)
NOV54d (SEQ ID NO: 1116)

[0667] Further analysis of the NOV54a protein yielded the following properties shown in Table 54C.

TABLE 54C
Protein Sequence Properties NOV54a

| | |
|---|---|
| SignalP analysis: | No Known Signal Sequence Predicted |
| PSORT II analysis: | |

| PSG: | a new signal peptide prediction method | |
|---|---|---|
| | N-region: | length 8; pos. chg 1; neg. chg 1 |
| | H-region: | length 3; peak value 2.05 |
| | PSG score: | −2.35 |

| | |
|---|---|
| GvH: | von Heijne's method for signal seq. recognition |
| | GvH score (threshold: −2.1): −6.14 |
| | possible cleavage site: between 46 and 47 |

>>> Seems to have no N-terminal signal peptide

| ALOM: | Klein et al's method for TM region allocation | | |
|---|---|---|---|
| | Init position for calculation: 1 | | |
| | Tentative number of TMS(s) for the threshold 0.5: 4 | | |
| | INTEGRAL | Likelihood = | Transmembrane 367-383 |
| | | −4.57 | |
| | INTEGRAL | Likelihood = | Transmembrane 677-693 |
| | | −7.80 | |
| | INTEGRAL | Likelihood = | Transmembrane 762-778 |
| | | −1.91 | |
| | INTEGRAL | Likelihood = | Transmembrane 979-995 |
| | | −0.80 | |

| | |
|---|---|
| PERIPHERAL | Likelihood = 1.75 (at 148) |

| | |
|---|---|
| | ALOM score: −7.80 (number of TMSs: 4) |
| MTOP: | Prediction of membrane topology (Hartmann et al.) |
| | Center position for calculation: 374 |
| | Charge difference: −2.0 C(−3.0)-N(−1.0) |
| | N >= C: N-terminal side will be inside |

>>> membrane topology: type 3a

| MITDISC: | discrimination of mitochondrial targeting seq | | | |
|---|---|---|---|---|
| | R content: | 1 | Hyd Moment(75): | 14.35 |
| | Hyd Moment(95): | 11.39 | G content: | 4 |
| | D/E content: | 2 | S/T content: | 3 |

| | |
|---|---|
| | Score: −5.37 |
| Gavel: | prediction of cleavage sites for mitochondrial preseq |
| | R-2 motif at 55 CRG\|SE |

NUCDISC: discrimination of nuclear localization signals

| | |
|---|---|
| | pat4: RRKP (4) at 861 |
| | pat4: RKPR (4) at 862 |
| | pat4: RRRK (5) at 958 |
| | pat4: RRKP (4) at 959 |
| | pat7: PSARRKP (4) at 858 |
| | bipartite: RRKPIVRMAKNNKWKAR at 959 |
| | content of basic residues: 10.4% |
| | NLS Score: 1.43 |
| KDEL: | ER retention motif in the C-terminus: none |

ER Membrane Retention Signals: none
SKL: peroxisomal targeting signal in the C-terminus: none
PTS2: 2nd peroxisomal targeting signal: none
VAC: possible vacuolar targeting motif: none
RNA-binding motif: none
Actinin-type actin-binding motif:

type 1: none
type 2: none

NMYR: N-myristoylation pattern: none
Prenylation motif: none
memYQRL: transport motif from cell surface to Golgi: none
Tyrosines in the tail: none
Dileucine motif in the tail: none
checking 63 PROSITE DNA binding motifs: none
checking 71 PROSITE ribosomal protein motifs:
Ribosomal protein L23 signature (PS00050): *** found ***
RKMVITLAESLPALRT at 753
checking 33 PROSITE prokaryotic DNA binding motifs: none

| | |
|---|---|
| NNCN: | Reinhardt's method for Cytoplasmic/Nuclear discrimination |
| | Prediction: nuclear |
| | Reliability: 70.6 |
| COIL: | Lupas's algorithm to detect coiled-coil regions |
| | total: 0 residues |

Final Results (k = 9/23):

```
34.8%: nuclear
30.4%: mitochondrial
26.1%: endoplasmic reticulum
  4.3%: cytoplasmic
  4.3%: peroxisomal
```

>> prediction for CG59905-01 is nuc (k = 23)

[0668] A search of the NOV54a protein against the Geneseq database, a proprietary database that contains sequences published in patents and patent publication, yielded several homologous proteins shown in Table 54D.

TABLE 54D
Geneseq Results for NOV54a

| | | NOV54a | Identities/ | |
|---|---|---|---|---|
| | | Residues/ | Similarities for | |
| Geneseq | Protein/Organism/Length | Match | the Matched | Expect |
| Identifier | [Patent #, Date] | Residues | Region | Value |
| AAE20901 | Human C3b/C4b complement receptor | 1 . . . 328 | 312/328 (95%) | 0.0 |
| | like protein #2, alternative version - | 2378 . . . 2705 | 313/328 (95%) | |
| | Homo sapiens, 3100 aa. | | | |
| | [WO200210199-A2, 07-FEB-2002] | | | |
| AAE20900 | Human C3b/C4b complement receptor | 1 . . . 328 | 312/328 (95%) | 0.0 |
| | like protein #1 , alternative version - | 2347 . . . 2674 | 313/328 (95%) | |
| | Homo sapiens, 3069 aa. | | | |
| | [WO200210199-A2, 07-FEB-2002] | | | |
| AAE20789 | Human C3b/C4b complement receptor | 1 . . . 328 | 312/328 (95%) | 0.0 |
| | like protein #2 - Homo sapiens, 3100 | 2378 . . . 2705 | 313/328 (95%) | |
| | aa. [WO200210199-A2, 07-FEB-2002] | | | |
| AAE20787 | Human C3b/C4b complement receptor | 1 . . . 328 | 312/328 (95%) | 0.0 |
| | like protein #1 - Homo sapiens, 3069 | 2347 . . . 2674 | 313/328 (95%) | |
| | aa. [WO200210199-A2, 07-FEB-2002] | | | |
| ABU11478 | Human MDDT polypeptide SEQ ID 425 - | 27 . . . 328 | 286/302 (94%) | e−176 |
| | Homo sapiens, 474 aa. | 44 . . . 345 | 287/302 (94%) | |
| | [WO200279449-A2, 10-OCT-2002] | | | |

[0669] In a BLAST search of public sequence databases, the NOV54a protein was found to have homology to the proteins shown in the BLASTP data in Table 54E.

TABLE 54E
Public BLASTP Results for NOV54a

| | | NOV54a | Identities/ | |
|---|---|---|---|---|
| Protein | | Residues/ | Similarities for | |
| Accession | | Match | the Matched | Expect |
| Number | Protein/Organism/Length | Residues | Portion | Value |
| AAK73475 | CUB and sushi multiple domains 1 | 1 . . . 328 | 312/328 (95%) | 0.0 |
| | protein - Homo sapiens (Human), | 2844 . . . 3171 | 313/328 (95%) | |
| | 3566 aa. | | | |
| CAD26764 | Sequence 6 from Patent | 1 . . . 328 | 312/328 (95%) | 0.0 |
| | WO0210199 - Homo sapiens | 2378 . . . 2705 | 313/328 (95%) | |
| | (Human), 3100 aa (fragment). | | | |
| CAD26763 | Sequence 1 from Patent | 1 . . . 328 | 312/328 (95%) | 0.0 |
| | WO0210199 - Homo sapiens | 2347 . . . 2674 | 313/328 (95%) | |
| | (Human), 3069 aa. | | | |
| Q96RM4 | CUB and sushi multiple domains 1 | 1 . . . 328 | 312/328 (95%) | 0.0 |
| | protein - Homo sapiens (Human), | 2786 . . . 3113 | 313/328 (95%) | |
| | 3508 aa. | | | |
| Q923L3 | CSMD1 - Mus musculus (Mouse), | 1 . . . 328 | 279/328 (85%) | e−175 |
| | 3564 aa. | 2842 . . . 3169 | 297/328 (90%) | |

[0670] PFam analysis predicts that the NOV54a protein contains the domains shown in the Table 54F.

TABLE 54F
Domain Analysis of NOV54a

| | | Identities/ | |
|---|---|---|---|
| | | Similarities | |
| Pfam | NOV54a | for the | |
| Domain | Match Region | Matched Region | Expect Value |
| sushi | 18 . . . 71 | 18/63 (29%) | 2.9e−11 |
| | | 43/63 (68%) | |
| sushi | 79 . . . 132 | 15/63 (24%) | 4e−11 |
| | | 41/63 (65%) | |
| sushi | 137 . . . 191 | 20/64 (31%) | 1.4e−08 |
| | | 41/64 (64%) | |
| sushi | 196 . . . 251 | 21/65 (32%) | 5.2e−14 |
| | | 46/65 (71%) | |
| sushi | 256 . . . 310 | 20/64 (31%) | 4e−09 |
| | | 45/64 (70%) | |
| sushi | 395 . . . 445 | 18/62 (29%) | 3.2e−07 |
| | | 39/62 (63%) | |
| sushi | 450 . . . 505 | 18/64 (28%) | 1.4e−09 |
| | | 41/64 (64%) | |

### Example 55

[0671] The NOV55 clone was analyzed, and the nucleotide and encoded polypeptide sequences are shown in Table 55A.

TABLE 55A
NOV55 Sequence Analysis

| | | |
|---|---|---|
| NOV55a, CG59932-01 | SEQ ID NO: 1121 | 1171 bp |
| DNA Sequence | ORF Start: at 2 | ORF Stop: TAA at 1031 |

GGAGGCCGCAAGGCCCTTCGCCCGGGAGTGGAGGGCCCAGTCCCTACCCCTGGCAGTAGGGGGCGTTT
TGAAGCTGCGGCTCTGTGAGCTGTGGCTACTGCTACTGGGTTCTAGTTTGAACGCCAGATTTTTGCCA
GACGAGGAGGACGTAGACTTTATCAACGAGTACGTGAACCTCCACAATGAGCTGCGGGGCGACGTTAT
TCCCCGAGGGTCTAACTTGCGCTTCATGACTTGGGATGTAGCTTTATCACGGACTGCTAGAGCATGGG
GAAAAAAATGTTTGTTTACGCATAATATTTATTTACAAGATGTACAAATGGTCCATCCTAAATTTTAT
GGTATTGGTGAAAATATGTGGGTCGGCCCTGAAAATGAATTTACTGCAAGTATTGCTATCAGAAGTTG
GCATGCAGAGAAGAAAATGTACAATTTTGAAAATGGCAGTTGCTCTGGAGACTGTTCTAATTATATTC
AGCTTGTTTGGGACCACTCTTACAAAGTTGGTTGTGCTGTTACTCCATGTTCAAAAATTGGACATATT
ATACATGCAGCAATTTTCATATGCAACTATGCGCCAGGAGGAACACTGACGAGAAGACCTTATGAACC
AGGAATATTTTGTACTCGATGTGGCAGACGTGACAAATGCACAGATTTTCTATGCAGTAATGCAGATC
GTGACCAAGCCACATATTACCGATTTTGGTATCCAAAATGGGAAATGCCCCGGCCAGTTGTGTGTGAT
CCACTGTGCACATTCATTTTATTATTGAGAATATTATGTTTTATCCTGTGTGTCATAACTGTTTTGAT
AGTACAGTCTCAGTTTCCAAATATCTTGTTGGAACAACAAATGATATTTACCCCTGAGGAATCTGAAG
CAGGGAATGAAGAGGAGGAAAAAGAGGAAGAGAAGAAAGAGAAAGAGGAAATGGAAATGGAAATAATG
GAAATGGAGGAGGAAAAAGAAGAGAGAGAGGAGGAGGAGGAGGAAACACAAAAAGAAAAGATGGAGGA
AGAGGAAAAATAAGAGTAGAAAGAGGAGGAAAAAGATGTATCACCAATATAAACCAAAAGTGTAATAC
AAAAAAAGACAGAAAAAAAAAAAAAGTAAAACACTGAGTTTTAACAAGAAAGAAAATATGCAAACCAC
CATTGGAATGTTTTT

| | | | |
|---|---|---|---|
| NOV55a, CG59932-01 | SEQ ID NO: 1122 | 343 aa | MW at 40047.3kD |
| Protein Sequence | | | |

EAARPFAREWRAQSLPLAVGGVLKLRLCELWLLLLGSSLNARFLPDEEDVDFINEYVNLHNELRGDVI
HAEKKMYNFENGSCSGDCSNYIQLVWDHSYKVGCAVTPCSKIGHIIHAAIFICNYAPGGTLTRRPYEP
GIFCTRCGRRDKCTDFLCSNADRDQATYYRFWYPKWEMPRPVVCDPLCTFILLLRILCFILCVITVLI
VQSQFPNILLEQQMIFTPEESEAGNEEEEKEEEKKEKEEMEMEIMEMEEEKEEREEEEEETQKEKMEE
EEK

[0672] Further analysis of the NOV55a protein yielded the following properties shown in Table 55B.

TABLE 55B
Protein Sequence Properties NOV55a

| | |
|---|---|
| SignalP analysis: | Cleavage site between residues 42 and 43 |
| PSORT II analysis: | |

| PSG: | a new signal peptide prediction method | |
|---|---|---|
| | N-region: | length 11; pos. chg 3; neg. chg 2 |
| | H-region: | length 12; peak value 7.44 |
| | PSG score: | 3.04 |

| | |
|---|---|
| GvH: | von Heijne's method for signal seq. recognition |
| | GvH score (threshold: −2.1): −0.10 |
| | possible cleavage site: between 41 and 42 |

>>> Seems to have a cleavable signal peptide (1 to 41)

| ALOM: | Klein et al's method for TM region allocation | | |
|---|---|---|---|
| | Init position for calculation: 42 | | |
| | Tentative number of TMS(s) for the threshold 0.5: 1 | | |
| | Number of TMS(s) for threshold 0.5: 1 | | |
| | INTEGRAL | Likelihood = | Transmembrane 257-273 |
| | | −13.43 | |

| | |
|---|---|
| PERIPHERAL | Likelihood = 2.70 (at 172) |

| | |
|---|---|
| | ALOM score: −13.43 (number of TMSs: 1) |
| MTOP: | Prediction of membrane topology (Hartmann et al.) |
| | Center position for calculation: 20 |
| | Charge difference: −1.0 C(1.0)-N(2.0) |
| | N >= C: N-terminal side will be inside |

>>> membrane topology: type 1a (cytoplasmic tail 274 to 343)

| MITDISC: | discrimination of mitochondrial targeting seq | | | |
|---|---|---|---|---|
| | R content: | 4 | Hyd Moment(75): | 9.56 |
| | Hyd Moment(95): | 18.17 | G content: | 2 |
| | D/E content: | 3 | S/T content: | 1 |

| | |
|---|---|
| | Score: −4.20 |
| Gavel: | prediction of cleavage sites for mitochondrial preseq |
| | cleavage site motif not found |

NUCDISC: discrimination of nuclear localization signals

| | |
|---|---|
| | pat4: none |
| | pat7: none |
| | bipartite: none |
| | content of basic residues: 11.4% |
| | NLS Score: −0.47 |
| KDEL: | ER retention motif in the C-terminus: none |

ER Membrane Retention Signals:

| | |
|---|---|
| | XXRR-like motif in the N-terminus: AARP |
| none | |

SKL: peroxisomal targeting signal in the C-terminus: none
PTS2: 2nd peroxisomal targeting signal: none
VAC: possible vacuolar targeting motif: none
RNA-binding motif: none
Actinin-type actin-binding motif:

type 1: none
type 2: none

NMYR: N-myristoylation pattern: none
Prenylation motif: none
memYQRL: transport motif from cell surface to Golgi: none
Tyrosines in the tail: too long tail
Dileucine motif in the tail: found

LL at 281

checking 63 PROSITE DNA binding motifs: none
checking 71 PROSITE ribosomal protein motifs: none
checking 33 PROSITE prokaryotic DNA binding motifs: none

| | |
|---|---|
| NNCN: | Reinhardt's method for Cytoplasmic/Nuclear discrimination |
| | Prediction: cytoplasmic |
| | Reliability: 94.1 |
| COIL: | Lupas's algorithm to detect coiled-coil regions |
| 290 E | 1.00 |
| 291 E | 1.00 |
| 292 S | 1.00 |
| 293 E | 1.00 |
| 294 A | 1.00 |
| 295 G | 1.00 |
| 296 N | 1.00 |
| 297 E | 1.00 |
| 298 E | 1.00 |
| 299 E | 1.00 |
| 300 E | 1.00 |
| 301 K | 1.00 |
| 302 E | 1.00 |
| 303 E | 1.00 |
| 304 E | 1.00 |
| 305 K | 1.00 |
| 306 K | 1.00 |
| 307 E | 1.00 |
| 308 K | 1.00 |
| 309 E | 1.00 |
| 310 E | 1.00 |
| 311 M | 1.00 |
| 312 E | 1.00 |
| 313 M | 1.00 |
| 314 E | 1.00 |
| 315 I | 1.00 |
| 316 M | 1.00 |
| 317 E | 1.00 |
| 318 M | 1.00 |
| 319 E | 1.00 |
| 320 E | 1.00 |
| 321 E | 1.00 |
| 322 K | 1.00 |
| 323 E | 1.00 |
| 324 E | 1.00 |
| 325 R | 1.00 |
| 326 E | 1.00 |
| 327 E | 1.00 |
| 328 E | 1.00 |
| 329 E | 1.00 |
| 330 E | 1.00 |
| 331 E | 1.00 |
| 332 T | 1.00 |
| 333 Q | 1.00 |
| 334 K | 1.00 |
| 335 E | 1.00 |
| 336 K | 1.00 |
| 337 M | 1.00 |
| 338 E | 1.00 |
| 339 E | 1.00 |
| 340 E | 1.00 |
| 341 E | 1.00 |
| 342 K | 1.00 |
| | total: 53 residues |

Final Results (k = 9/23):

55.6%: endoplasmic reticulum
22.2%: Golgi
11.1%: plasma membrane
11.1%: extracellular, including cell wall

>> prediction for CG59932-01 is end (k = 9)

[0673] A search of the NOV55a protein against the Geneseq database, a proprietary database that contains sequences published in patents and patent publication, yielded several homologous proteins shown in Table 55C.

TABLE 55C
Geneseq Results for NOV55a

| | | NOV55a | Identities/ | | |
|---|---|---|---|---|---|
| | | Residues/ | Similarities for | | |
| Geneseq | Protein/Organism/Length | Match | the Matched | | Expect |
| Identifier | [Patent #, Date] | Residues | Region | | Value |
| ABP69108 | Human polypeptide SEQ ID NO 1155 - | 1 . . . 223 | 220/223 | (98%) | e−134 |
| | Homo sapiens, 253 aa. [WO200270539- | 2 . . . 224 | 222/223 | (98%) | |
| | A2, 12-SEP-2002] | | | | |
| AAB64953 | Human secreted protein sequence | 45 . . . 222 | 177/178 | (99%) | e−109 |
| | encoded by gene 12 SEQ ID NO: 131 - | 1 . . . 178 | 177/178 | (99%) | |
| | Homo sapiens, 178 aa. [WO200076530- | | | | |
| | A1, 21-DEC-2000] | | | | |
| AAB43408 | Human cancer associated protein | 38 . . . 282 | 102/250 | (40%) | 6e−51 |
| | sequence SEQ ID NO: 853 - Homo | 55 . . . 300 | 143/250 | (56%) | |
| | sapiens, 302 aa. [WO200055350-A1, | | | | |
| | 21-SEP-2000] | | | | |
| ABB53121 | Human ORF27 protein - Homo sapiens, | 94 . . . 178 | 85/85 | (100%) | 2e−48 |
| | 85 aa. [WO200177155-A2, 18-OCT-2001] | 1 . . . 85 | 85/85 | (100%) | |
| AAE18962 | Mouse testes-specific, vespid and | 37 . . . 282 | 96/247 | (38%) | 1e−46 |
| | pathogenic protein (RTVP) - Mus sp, | 18 . . . 253 | 138/247 | (55%) | |
| | 255 aa. [WO200206344-A2, 24-JAN-2002] | | | | |

[0674] In a BLAST search of public sequence databases, the NOV55a protein was found to have homology to the proteins shown in the BLASTP data in Table 55D.

TABLE 55D
Public BLASTP Results for NOV55a

| | | | Identities/ | |
|---|---|---|---|---|
| Protein | | NOV55a | Similarities | |
| Accession | | Residues/ | for the | Expect |
| Number | Protein/Organism/Length | Match Residues | Matched Portion | Value |
| Q8NA43 | Hypothetical protein FLJ35856 - | 1 . . . 228 | 228/228 (100%) | e−139 |
| | Homo sapiens (Human), 229 aa. | 2 . . . 229 | 228/228 (100%) | |
| Q8N6N0 | Similar to RIKEN cDNA 4921508O11 | 1 . . . 223 | 223/223 (100%) | e−135 |
| | gene - Homo sapiens (Human), 253 | 2 . . . 224 | 223/223 (100%) | |
| | aa. | | | |
| Q9CQ35 | 4921508O11 Rik protein - Mus | 1 . . . 343 | 209/345 (60%) | e−117 |
| | musculus (Mouse), 332 aa. | 2 . . . 331 | 252/345 (72%) | |
| P48060 | Glioma pathogenesis-related protein | 38 . . . 282 | 103/250 (41%) | 1e−51 |
| | (GliPR) (RTVP-1 protein) - Homo | 19 . . . 264 | 144/250 (57%) | |
| | sapiens (Human), 266 aa. | | | |
| JC5308 | testis-specific, vespid, and | 38 . . . 282 | 103/250 (41%) | 1e−51 |
| | pathogenesis-related protein 1 | 19 . . . 264 | 144/250 (57%) | |
| | precursor - human, 266 aa. | | | |

[0675] PFam analysis predicts that the NOV55a protein contains the domains shown in the Table 55E.

TABLE 55E
Domain Analysis of NOV55a

| | | Identities/ | |
|---|---|---|---|
| Pfam | NOV55a | Similarities for | Expect |
| Domain | Match Region | the Matched Region | Value |
| SCP | 57 . . . 190 | 42/167 (25%) | 3.1e−33 |
| | | 95/167 (57%) | |

### Example 56

[0676] The NOV56 clone was analyzed, and the nucleotide and encoded polypeptide sequences are shown in Table 56A.

TABLE 56A
NOV56 Sequence Analysis

| | | |
|---|---|---|
| NOV56a, CG92715-01 | SEQ ID NO: 1123 | 2800 bp |
| DNA Sequence | ORF Start: ATG at 26 | ORF Stop: end of sequence |

TAGACGCGGAGCCCAAGGAGGTAAAATGCACACTTGCTGCCCCCCAGTAACTTTGGAACAGGACCTTC
ACAGAAAAATGCATAGCTGGATGCTGCAGACTCTAGCGTTTGCTGTAACATCTCTCGTCCTTTCGTGT
GCAGAAACCATCGATTATTACGGGGAAATCTGTGACAATGCATGTCCTTGTGAGGAAAAGGACGGCAT
TTTAACTGTGAGCTGTGAAAACCGGGGGATCATCAGTCTCTCTGAAATTAGCCCTCCCCGTTTCCCAA
TCTACCACCTCTTGTTGTCCGGAAACCTTTTGAACCGTCTCTATCCCAATGAGTTTGTCAATTACACT
GGGGCTTCAATTTTGCATCTAGGTAGCAATGTTATCCAGGACATTGAGACCGGGGCTTTCCATGGGCT
ACGGGGTTTGAGGAGATTGCATCTAAACAATAATAAACTGGAACTTCTGCGAGATGATACCTTCCTTG
GCTTGGAGAACCTGGAGTACCTACAGGTCGATTACAACTACATCAGCGTCATTGAACCCAATGCTTTT
GGGAAACTGCATTTGTTGCAGGTGCTTATCCTCAATGACAATCTTTTGTCCAGTTTACCCAACAATCT
TTTCCGTTTTGTGCCCTTAACGCACTTGGACCTCCGGGGGAACCGGCTGAAACTTCTGCCCTACGTGG
GGCTCTTGCAGCACATGGATAAAGTTGTGGAGCTACAGCTGGAGGAAAACCCTTGGAATTGTTCTTGT
GAGCTGATCTCTCTAAAGGATTGGTTGGACAGCATCTCCTATTCAGCCCTGGTGGGGGATGTAGTTTG
TGAGACCCCCTTCCGCTTACACGGAAGGGACTTGGACGAGGTATCCAAGCAGGAACTTTGCCCAAGGA
GACTTATTTCTGACTACGAGATGAGGCCGCAGACGCCTTTGAGCACCACGGGGTATTTACACACCACC
CCGGCGTCAGTGAATTCTGTGGCCACTTCTTCCTCTGCTGTTTACAAACCCCCTTTGAAGCCCCCTAA
GGGGACTCGCCAACCCAACAAGCCCAGGGTGCGCCCCACCTCTCGGCAGCCCTCTAAGGACTTGGGCT
ACAGCAACTATGGCCCCAGCATCGCCTATCAGACCAAATCCCCGGTGCCTTTGGAGTGTCCCACCGCG
TGCTCTTGCAACCTGCAGATCTCTGATCTGGGCCTCAACGTAAACTGCCAGGAGCGAAAGATCGAGAG
CATCGCTGAACTGCAGCCCAAGCCCTACAATCCCAAGAAAATGTATCTGACAGAGAACTACATCGCTG
TCGTGCGCAGGACAGACTTCCTGGAGGCCACGGGGCTGGACCTCCTGCACCTGGGGAATAACCGCATC
TCGATGATCCAGGACCGCGCTTTCGGGGATCTCACCAACCTGAGGCGCCTCTACCTGAATGGCAACAG
GATCGAGAGGCTGAGCCCGGAGTTATTCTATGGCCTGCAGAGCCTGCAGTATCTCTTCCTCCAGTACA
ATCTCATCCGCGAGATTCAGTCTGGAACTTTTGACCCGGTCCCAAACCTCCAGCTGCTATTCTTGAAT
AACAACCTCCTGCAGGCCATGCCCTCAGGCGTCTTCTCTGGCTTGACCCTCCTCAGGCTAAACCTGAG
GAGTAACCACTTCACCTCCTTGCCAGTGAGTGGAGTTTTGGACCAGCTGAAGTCACTCATCCAAATCG
ACCTGCATGACAATCCTTGGGATTGTACCTGTGACATTGTGGGCATGAAGCTGTGGGTGGAGCAGCTC
AAAGTGGGCGTCCTAGTGGACGAGGTGATCTGTAAGGCGCCCAAAAAATTCGCTGAGACCGACATGCG
CTCCATTAAGTCGGAGCTGCTGTGCCCTGACTATTCAGATGTAGTAGTTTCCACGCCCACACCCTCCT
CTATCCAGGTCCCTGCGAGGACCAGCGCCGTGACTCCTGCGGTCCGGTTGAATAGCACCGGGGCCCCC
GCGAGCTTGGGCGCAGGCGGAGGGGCGTCGTCGGTGCCCTTGTCTGTGTTAATTCTCAGCCTCCTGCT
GGTTTTCATCATGTCCGTCTTCGTGGCCGCCGGGCTCTTCGTGCTGGTCATGAAGCGCAGGAAGAAGA
ACCAGAGCGACCACACCAGCACCAACAACTCCGACGTGAGCTCCTTTAACATGCAGTACAGCGTGTAC
GGCGGCGGCGGCGGCACGGGCGGCCACCCACACGCGCACGTGCATCACCGCGGGCCCGCGCTGCCCAA
GGTGAAGACGCCCGCGGGCCACGTGTATGAATACATCCCCCACCCACTGGGCCACATGTGCAAAAACC
CCATCTACCGCTCCCGAGAGGGCAACTCCGTAGAGGATTACAAAGACCTGCACGAGCTCAAGGTCACC
TACAGCAGCAACCACCACCTGCAGCAGCAGCAGCAGCCGCCGCCGCCACCGCAGCAGCCACAGCAGCA
GCCCCCGCCGCAGCTGCAGCTGCAGCCTGGGGAGGAGGAGAGGCGGGAAAGCCACCACTTGCGGAGCC
CCGCCTACAGCGTCAGCACCATCGAGCCCCGGGAGGACCTGCTGTCGCCGGTGCAGGACGCCGACCGC
TTTTACAGGGGCATTTTAGAACCAGACAAACACTGCTCCACCACCCCCGCCGGCAATAGCCTCCCGGA
ATATCCCAAATTCCCGTGCAGCCCCGCTGCTTACACTTTCTCCCCCAACTATGACCTGAGACGCCCCC
ATCAGTATTTGCACCCGGGGGCAGGGGACAGCAGGCTACGGGAACCGGTGCTCTACAGCCCCCCGAGT
GCTGTCTTTGTA

| | | | |
|---|---|---|---|
| NOV56a, CG92715-01 | SEQ ID NO: 1124 | 925 aa | MW at 103516.1kD |
| Protein Sequence | | | |

MHTCCPPVTLEQDLHRKMHSWMLQTLAFAVTSLVLSCAETIDYYGEICDNACPCEEKDGTLTVSCENR
GIISLSEISPPRFPIYHLLLSGNLLNRLYPNEFVNYTGASILHLGSNVIQDIETGAFHGLRGLRRLHL
NNNKLELLRDDTFLGLENLEYLQVDYNYISVIEPNAFGKLHLLQVLILNDNLLSSLPNNLFRFVPLTH
LDLRGNRLKLLPYVGLLQHMDKVVELQLEENPWNCSCELISLKDWLDSISYSALVGDVVCETPFRLHG
RDLDEVSKQELCPRRLISDYEMRPQTPLSTTGYLHTTPASVNSVATSSSAVYKPPLKPPKGTRQPNKP
RVRPTSRQPSKDLGYSNYGPSIAYQTKSPvPLECPTACSCNLQISDLGLNVNCQERKIESIAELQPKP
YNPKKMYLTENYIAVVRRTDFLEATGLDLLHLGNNRISMIQDRAFGDLTNLRRLYLNGNRIERLSPEL
FYGLQSLQYLFLQYNLIREIQSGTFDPVPNLQLLFLNNNLLQAMPSGVFSGLTLLRLNLRSNHFTSLP
VSGVLDQLKSLIQIDLHDNPWDCTCDIVGMKLWVEQLKVGVLVDEVICKAPKKFAETDMRSIKSELLC
PDYSDVVVSTPTPSSIQVPARTSAVTPAVRLNSTGAPASLGAGGGASSVPLSVLILSLLLVFIMSVFV
AAGLFVLVMKRRKKNQSDHTSTNNSDVSSFNMQYSVYGGGGGTGGHPHAHVHHRGPALPKVKTPAGHV
YEYIPHPLGHMCKNPIYRSREGNSVEDYKDLHELKVTYSSNHHLQQQQQPPPPPQQPQQQPPPQLQLQ
PGEEERRESHHLRSPAYSVSTIEPREDLLSPVQDADRFYRGILEPDKHCSTTPAGNSLPEYPKFPCSP
AAYTFSPNYDLRRPHQYLHPGAGDSRLREPVLYSPPSAVFV

| | | |
|---|---|---|
| NOV56b, 248576233 | SEQ ID NO: 1125 | 1872 bp |
| DNA Sequence | ORF Start: at 1 | ORF Stop: end of sequence |

GGATCCATCGATTATTACGGGGAAATCTGTGACAATGCATGTCCTTGTGAGGAAAAGGACGGCATTTT
AACTGTGAGCTGTGAAAACCGGGGGATCATCAGTCTCTCTGAAATTAGCCCTCCCCGTTTCCCAATCT
ACCACCTCTTGTTGTCCGGAAACCTTTTGAACCGTCTCTATCCCAATGAGTTTGTCAATTACACTGGG
GCTTCAATTTTGCATCTAGGTAGCAATGTTATCCAGGACATTGAGACCGGGGCTTTCCATGGGCTACG
GGGTTTGAGGAGATTGCATCTAAACAATAATAAACTGGAACTTCTGCGAGATGATACCTTCCTTGGCT
TGGAGAACCCGGAGTACCTACAGGTCGATTACAACTACATCAGCGTCATTGAACCCAATGCTTTTGGG
AAACTGCATTTGTTGCAGGTGCTTATCCTCAATGACAATCTTTTGTCCAGTTTACCCAACAATCTTTT
CCGTTTTGTGCCCTTAACGCACTTGGACCTCCGGGGGAACCGGCTGAAACTTCTGCCCTACGTGGGGC
TCTTGCAGCACATGGATAAAGTTGTGGAGCTACAGCTGGAGGAAAACCCTTGGAATTGTTCTTGTGAG
CTGATCTCTCTAAAGGATTGGTTGGACAGCATCTCCTATTCAGCCCTGGTGGGGGATGTAGTTTGTGA
GACCCCCTTCCGCTTACACGGAAGGGACTTGGACGAGGTATCCAAGCAGGAACTTTGCCCAAGGAGAC
TTATTTCTGACTACGAGATGAGGCCGCAGACGCCTTTGAGCACCACGGGGTATTTACACACCACCCCG
GCGTCAGTGAATTCTGTGGCCACTTCTTCCTCTGCTGTTTACAAACCCCCTTTGAAGCCCCCTAAGGG
GACTCGCCAACCCAACAAGCCCAGGGTGCGCCCCACCTCTCGGCAGCCCTCTAAGGACTTGGGCTACA
GCAACTATGGCCCCAGCATCGCCTATCAGACCAAATCCCCGGTGCCTTTGGAGTGTCCCACCGCGTGC
TCTTGCAACCTGCAGATCTCTGATCTGGGCCTCAACGTAAACTGCCAGGAGCGAAAGATCGAGAGCAT
CGCTGAACTGCAGCCCAAGCCCTACAATCCCAAGAAAATGTATCTGACAGAGAACTACATCGCTGTCG
TGCGCAGGACAGACTTCCTGGAGGCCACGGGGCTGGACCTCCTGCACCTGGGGAATAACCGCATCTCG
ATGATCCAGGACCGCGCTTTCGGGGATCTCACCAACCTGAGGCGCCTCTACCTGAATGGCAACAGGAT
CGAGAGGCTGAGCCCGGAGTTATTCTATGGCCTGCAGAGCCTGCAGTATCTCTTCCTCCAGTACAATC
TCATCCGCGAGATTCAGTCTGGAACTTTTGACCCGGTCCCAAACCTCCAGCTGCTATTCTTGAATAAC
AACCTCCTGCAGGCCATGCCCTCAGGCGTCTTCTCTGGCTTGACCCTCCTCAGGCTAAACCTGAGGAG
TAACCACTTCACCTCCTTGCCAGTGAGTGGAGTTTTGGACCAGCTGAAGTCACTCATCCAAATCGACC
TGCATGACAATCCTTGGGATTGTACCTGTGACATTGTGGGCATGAAGCTGTGGGTGGAGCAGCTCAAA
GTGGGCGTCCTAGTGGACGAGGTGATCTGTAAGGCGCCCAAAAAATTCGCTGAGACCGACATGCGCTC
CATTAAGTCGGAGCTGCTGTGCCCTGACTATTCAGATGTAGTAGTTTCCACGCCCACACCCTCCTCTA
TCCAGGTCCCTGCGAGGACCAGCGCCGTGACTCCTGCGGTCCGGTTGAATAGCACCGGGGCCCCCGCG
AGCTTGGGCGCAGGCGGAGGGGCGTCGTCGCTCGAG

| | | | |
|---|---|---|---|
| NOV56b, 248576233 | SEQ ID NO: 1126 | 624 aa | MW at 69694.9kD |
| Protein Sequence | | | |

GSIDYYGEICDNACPCEEKDGILTVSCENRGIISLSEISPPRFPIYHLLLSGNLLNRLYPNEFVNYTG
ASILHLGSNVIQDIETGAFHGLRGLRRLHLNNNKLELLRDDTFLGLENPEYLQVDYNYISVIEPNAFG
KLHLLQVLILNDNLLSSLPNNLFRFVPLTHLDLRGNRLKLLPYVGLLQHMDKVVELQLEENPWNCSCE
LISLKDWLDSISYSALVGDVVCETPFRLHGRDLDEVSKQELCPRRLISDYEMRPQTPLSTTGYLHTTP
ASVNSVATSSSAVYKPPLKPPKGTRQPNKPRVRPTSRQPSKDLGYSNYGPSIAYQTKSPVPLECPTAC
SCNLQISDLGLNVNCQERKIESIAELQPKPYNPKKMYLTENYIAVVRRTDFLEATGLDLLHLGNNRIS
MIQDRAFGDLTNLRPLYLNGNRIERLSPELFYGLQSLQYLFLQYNLIREIQSGTFDPVPNLQLLFLNN
NLLQAMPSGVFSGLTLLRLNLRSNHFTSLPVSGVLDQLKSLIQIDLHDNPWDCTCDIVGMKLWVEQLK
VGVLVDEVICKAPKKFAETDMRSIKSELLCPDYSDVVVSTPTPSSIQVPARTSAVTPAVRLNSTGAPA
SLGAGGGASSLE

| | | |
|---|---|---|
| NOV56c, CG92715-02 | SEQ ID NO: 1127 | 4500 bp |
| DNA Sequence | ORF Start: ATG at 178 | ORF Stop: TAA at 3094 |

CGGAACCCGCGGTCGCCACCGCGGCGGCGGCCCCAGGCTGGAGGCGTCCGGGCGCCTCTTTCCTCCAG
CCTCTGGGACTGCGCTGCTCGCAGTCTCCTCGCCCTGCCTGGGCTTGAGAAACCTAGTGCATACCCCA
AAGAGGGTTTTTGTGTATGTGTGTGTTTTTAAAGGGTGGCTATGATGACTGGGCCTTGGAGACGCGGA
GACCAAGGAGGTAAAATGCACACTTGCTGCCCCCCAGTAACTTTGGAACAGGACCTTCACAGAAAAAT
GCATAGCTGGATGCTGCAGACTCTAGCGTTTGCTGTAACATCTCTCGTCCTTTCGTGTGCAGAAACCA
TCGATTATTACGGGGAAATCTGTGACAATGCATGTCCTTGTGAGGAAAAGGACGGCATTTTAACTGTG
AGCTGTGAAAACCGGGGGATCATCAGTCTCTCTGAAATTAGCCCTCCCCGTTTCCCAATCTACCACCT
CTTGTTGTCCGGAAACCTTTTGAACCGTCTCTATCCCAATGAGTTTGTCAATTACACTGGGGCTTCAA
TTTTGCATCTAGGTAGCAATGTTATCCAGGACATTGAGACCGGGGCTTTCCATGGGCTACGGGGTTTG
AGGAGATTGCATCTAAACAATAATAAACTGGAACTTCTGCGAGATGATACCTTCCTTGGCTTGGAGAA
CCTGGAGTACCTACAGGTCGATTACAACTACATCAGCGTCATTGAACCCAATGCTTTTGGGAAACTGC
ATTTGTTGCAGGTGCTTATCCTCAATGACAATCTTTTGTCCAGTTTACCCAACAATCTTTTCCGTTTT
GTGCCCTTAACGCACTTGGACCTCCGGGGGAACCGGCTGAAACTTCTGCCCTACGTGGGGCTCTTGCA
GCACATGGATAAAGTTGTGGAGCTACAGCTGGAGGAAAACCCTTGGAATTGTTCTTGTGAGCTGATCT
CTCTAAAGGATTGGTTGGACAGCATCTCCTATTCAGCCCTGGTGGGGGATGTAGTTTGTGAGACCCCC
TTCCGCTTACACGGAAGGGACTTGGACGAGGTATCCAAGCAGGAACTTTGCCCAAGGAGACTTATTTC
TGACTACGAGATGAGGCCGCAGACGCCTTTGAGCACCACGGGGTATTTACACACCACCCCGGCGTCAG
TGAATTCTGTGGCCACTTCTTCCTCTGCTGTTTACAAACCCCCTTTGAAGCCCCCTAAGGGGACTCGC
CAACCCAACAAGCCCAGGGTGCGCCCCACCTCTCGGCAGCCCTCTAAGGACTTGGGCTACAGCAACTA
TGGCCCCAGCATCGCCTATCAGACCAAATCCCCGGTGCCTTTGGAGTGTCCCACCGCGTGCTCTTGCA
ACCTGCAGATCTCTGATCTGGGCCTCAACGTAAACTGCCAGGAGCGAAAGATCGAGAGCATCGCTGAA
CTGCAGCCCAAGCCCTACAATCCCAAGAAAATGTATCTGACAGAGAACTACATCGCTGTCGTGCGCAG
GACAGACTTCCTGGAGGCCACGGGGCTGGACCTCCTGCACCTGGGGAATAACCGCATCTCGATGATCC
AGGACCGCGCTTTCGGGGATCTCACCAACCTGAGGCGCCTCTACCTGAATGGCAACAGGATCGAGAGG
CTGAGCCCGGAGTTATTCTATGGCCTGCAGAGCCTGCAGTATCTCTTCCTCCAGTACAATCTCATCCG
CGAGATTCAGTCTGGAACTTTTGACCCGGTCCCAAACCTCCAGCTGCTATTCTTGAATAACAACCTCC
TGCAGGCCATGCCCTCAGGCGTCTTCTCTGGCTTGACCCTCCTCAGGCTAAACCTGAGGAGTAACCAC
TTCACCTCCTTGCCAGTGAGTGGAGTTTTGGACCAGCTGAAGTCACTCATCCAAATCGACCTGCATGA
CAATCCTTGGGATTGTACCTGTGACATTGTGGGCATGAAGCTGTGGGTGGAGCAGCTCAAAGTGGGCG
TCCTAGTGGACGAGGTGATCTGTAAGGCGCCCAAAAAATTCGCTGAGACCGACATGCGCTCCATTAAG
TCGGAGCTGCTGTGCCCTGACTATTCAGATGTAGTAGTTTCCACGCCCACACCCTCCTCTATCCAGGT
CCCTGCGAGGACCAGCGCCGTGACTCCTGCGGTCCGGTTGAATAGCACCGGGGCCCCCGCGAGCTTGG
GCGCAGGCGGAGGGGCGTCGTCGGTGCCCTTGTCTGTGTTAATTCTCAGCCTCCTGCTGGTTTTCATC
ATGTCCGTCTTCGTGGCCGCCGGGCTCTTCGTGCTGGTCATGAAGCGCAGGAAGAAGAACCAGAGCGA
CCACACCAGCACCAACAACTCCGACGTGAGCTCCTTTAACATGCAGTACAGCGTGTACGGCGGCGGCG
GCGGCACGGGCGGCCACCCACACGCGCACGTGCATCACCGCGGGCCCGCGCTGCCCAAGGTGAAGACG
CCCGCGGGCCACGTGTATGAATACATCCCCCACCCACTGGGCCACATGTGCAAAAACCCCATCTACCG
CTCCCGAGAGGGCAACTCCGTAGAGGATTACAAAGACCTGCACGAGCTCAAGGTCACCTACAGCAGCA
ACCACCACCTGCAGCAGCAGCAGCAGCCGCCGCCGCCACCGCAGCAGCCACAGCAGCAGCCCCCGCCG
CAGCTGCAGCTGCAGCCCGGGGAGGAGGAGAGGCGGGAAAGCCACCACTTGCGGAGCCCCGCCTACAG
CGTCAGCACCATCGAGCCCCGGGAGGACCTGCTGTCGCCGGTGCAGGACGCCGACCGCTTTTACAGGG
GCATTTTAGAACCAGACAAACACTGCTCCACCACCCCCGCCGGCAATAGCCTCCCGGAATATCCCAAA
TTCCCGTGCAGCCCCGCTGCTTACACTTTCTCCCCCAACTATGACCTGAGACGCCCCCATCAGTATTT
GCACCCGGGGGCAGGGGACAGCAGGCTACGGGAACCGGTGCTCTACAGCCCCCCGAGTGCTGTCTTTG
TAGAACCCAACCGGAACGAATATCTGGAGTTAAAAGCAAAACTAAACGTTGAGCCGGACTACCTCGAA
GTGCTGGAAAAACAGACCACGTTTAGCCAGTTCTAAAAGCAAAGAAACTCTCTTGGAGCTTTTGCATT
TAAAACAAACAAGCAAGCAGACACACACAGTGAACACATTTGATTAATTGTGTTGTTTCAACGTTTAG
GGTGAAGTGCCTTGGCACGGGATTTCTCAGCTTCGGTGGAAGATACGAAAAGGGTGTGCAATTTCCTT
TAAAATTTACACGTGGGAAACATTTGTGTAAACTGGGCACATCACTTTCTCTTCTTGCGTGTGGGGCA
GGTGTGGAGAAGGGCTTTAAGGAGGCCAATTTGCTGCGCGGGTGACCTGTGAAAGGTCACAGTCATTT
TTGTAGTGGTTGGAAGTGCTAAGAATGGTGGATGATGGCAGAGCATAGATTCTACTCTTCCTCTTTAG
CTTCCTCCCCATCCAACGAACCCTGCCCAACACTCTAAATATCCACCAGATAAGACATGGAATGAGGT
CTAAATGACACAAAGTGAAGAAATCAACACAACACAAACTTTACAGCTAACAACAAATGATCAACAAA
AACCGAACCAACAAGACAACCATCGAACCTCACCACTCCACACTCACAACAACTCATATCAAGACAAC
AACACAATGACGTTAAAGGAAACGAAATCAATGCAAAAATAGACATTTGACAATACAAAAAAACAAGA
ACCGTGATCACACTACAACCGAAGCAACCATAGATGTGAGAAAAAACAACAAACAAAACACCGAGCTA
TATGATCCATAATTGATTAGTCAAAATAACTTATTGATGAAATATACAAATATTTTATTGTAGCACCT
ATTTTTATATGCACATTTAGCATTCCTCTTTCCTTCACTATTTAGCCTATGATTTTGCAGAGGTGTCA
CACTGTATTAGGATCTGCATTTCTAAAACTGACGTGGTATCAGGAAGGCATTTTCAATCATTCAAAAT
GTGGAGAATTTAATGGCTAAATCTTTAAAAGCCAATGCAACCCACCCAATTGAATCTGCATTTTCTTT
TAAGAAAACAGAGCTGATTGTATCCCAATGTATTTTAAAAAATAGGGCAATTGATTGGGCCATTCCGA
GAGAATTGTTTGCAAGTTTTGGGTTTTATTAGAAAATATTTGAAAGTATTTTTATTAATGAACCAAAA
TGACATGTTCATTTGACTACTATTGTAGCCGATTTTCGATTGTTTAACCAAACCCAGTTGCATTTGTA
CAGATCCACGTGTACTGGCACCTCAGAAGACCAAATCATGGACTGTACAAGTCTCTATACAATGTCTT
TATCCCTGTGGGCAGCAAGCAATGATGATAATGACAAACAGGATATCTGTAAGATGGGGCTACTGTTG
TTACAGTCTCATATGTATCCCAGCACATGTAATTTTTTAAATAGTTTCTGAATAAACACTTGATAACT
ATGTCAAAAAAA

| | | | |
|---|---|---|---|
| NOV56c, CG92715-02 | SEQ ID NO: 1128 | 972 aa | MW at 109043.3kD |
| Protein Sequence | | | |

MMTGPWRRGDQGGKMHTCCPPVTLEQDLHRKMHSWMLQTLAFAVTSLVLSCAETIDYYGEICDNACPC
EEKDGILTVSCENRGIISLSEISPPRFPIYHLLLSGNLLNRLYPNEFVNYTGASILHLGSNVIQDIET
GAFHGLRGLRRLHLNNNKLELLRDDTFLGLENLEYLQVDYNYISVIEPNAFGKLHLLQVLILNDNLLS
SLPNNLFRFVPLTHLDLRGNRLKLLPYVGLLQHNDKVVELQLEENPWNCSCELISLKDWLDSISYSAL
VGDVVCETPFRLHGRDLDEVSKQELCPRRLISDYEMRPQTPLSTTGYLHTTPASVNSVATSSSAVYKP
PLKPPKGTRQPNKPRVRPTSRQPSKDLGYSNYGPSIAYQTKSPVPLECPTACSCNLQISDLGLNVNCQ
ERKIESIAELQPKPYNPKKNYLTENYIAVVRRTDFLEATGLDLLHLGNNRTSMIQDRAFGDLTNLRRL
YLNGNRIERLSPELFYGLQSLQYLFLQYNLIREIQSGTFDPVPNLQLLFLNNNLLQAMPSGVFSGLTL
LRLNLRSNHFTSLPVSGVLDQLKSLIQIDLHDNPWDCTCDIVGMKLWVEQLKVGVLVDEVICKAPKKF
AETDMRSIKSELLCPDYSDVVVSTPTPSSIQVPARTSAVTPAVRLNSTGAPASLGAGGGASSVPLSVL
ILSLLLVFIMSVFVAAGLFVLVMKRRKKNQSDHTSTNNSDVSSFNMQYSVYGGGGGTGGHPHAHVHHR
GPALPKVKTPAGHVYEYIPHPLGHMCKNPIYRSREGNSVEDYKDLHELKVTYSSNHHLQQQQQPPPPP
QQPQQQPPPQLQLQPGEEERRESHHLRSPAYSVSTIEPREDLLSPVQDADRFYRGILEPDKHCSTTPA
GNSLPEYPKFPCSPAAYTFSPNYDLRRPHQYLHPGAGDSRLREPVLYSPPSAVFVEPNRNEYLELKAK
LNVEPDYLEVLEKQTTFSQF

| | | |
|---|---|---|
| NOV56d, CG92715-03 | SEQ ID NO: 1129 | 1872 bp |
| DNA Sequence | ORF Start: at 7 | ORF Stop: at 1867 |

GGATCCATCGATTATTACGGGGAAATCTGTGACAATGCATGTCCTTGTGAGGAAAAGGACGGCATTTT
AACTGTGAGCTGTGAAAACCGGGGGATCATCAGTCTCTCTGAAATTAGCCCTCCCCGTTTCCCAATCT
ACCACCTCTTGTTGTCCGGAAACCTTTTGAACCGTCTCTATCCCAATGAGTTTGTCAATTACACTGGG
GCTTCAATTTTGCATCTAGGTAGCAATGTTATCCAGGACATTGAGACCGGGGCTTTCCATGGGCTACG
GGGTTTGAGGAGATTGCATCTAAACAATAATAAACTGGAACTTCTGCGAGATGATACCTTCCTTGGCT
TGGAGAACCTGGAGTACCTACAGGTCGATTACAACTACATCAGCGTCATTGAACCCAATGCTTTTGGG
AAACTGCATTTGTTGCAGGTGCTTATCCTCAATGACAATCTTTTGTCCAGTTTACCCAACAATCTTTT
CCGTTTTGTGCCCTTAACGCACTTGGACCTCCGGGGGAACCGGCTGAAACTTCTGCCCTACGTGGGGC
TCTTGCAGCACATGGATAAAGTTGTGGAGCTACAGCTGGAGGAAAACCCTTGGAATTGTTCTTGTGAG
CTGATCTCTCTAAAGGATTGGTTGGACAGCATCTCCTATTCAGCCCTGGTGGGGGATGTAGTTTGTGA
GACCCCCTTCCGCTTACACGGAAGGGACTTGGACGAGGTATCCAAGCAGGAACTTTGCCCAAGGAGAC
TTATTTCTGACTACGAGATGAGGCCGCAGACGCCTTTGAGCACCACGGGGTATTTACACACCACCCCG
GCGTCAGTGAATTCTGTGGCCACTTCTTCCTCTGCTGTTTACAAACCCCCTTTGAAGCCCCCTAAGGG
GACTCGCCAACCCAACAAGCCCAGGGTGCGCCCCACCTCTCGGCAGCCCTCTAAGGACTTGGGCTACA
GCAACTATGGCCCCAGCATCGCCTATCAGACCAAATCCCCGGTGCCTTTGGAGTGTCCCACCGCGTGC
TCTTGCAACCTGCAGATCTCTGATCTGGGCCTCAACGTAAACTGCCAGGAGCGAAAGATCGAGAGCAT
CGCTGAACTGCAGCCCAAGCCCTACAATCCCAAGAAAATGTATCTGACAGAGAACTACATCGCTGTCG
TGCGCAGGACAGACTTCCTGGAGGCCACGGGGCTGGACCTCCTGCACCTGGGGAATAACCGCATCTCG
ATGATCCAGGACCGCGCTTTCGGGGATCTCACCAACCTGAGGCGCCTCTACCTGAATGGCAACAGGAT
CGAGAGGCTGAGCCCGGAGTTATTCTATGGCCTGCAGAGCCTGCAGTATCTCTTCCTCCAGTACAATC
TCATCCGCGAGATTCAGTCTGGAACTTTTGACCCGGTCCCAAACCTCCAGCTGCTATTCTTGAATAAC
AACCTCCTGCAGGCCATGCCCTCAGGCGTCTTCTCTGGCTTGACCCTCCTCAGGCTAAACCTGAGGAG
TAACCACTTCACCTCCTTGCCAGTGAGTGGAGTTTTGGACCAGCTGAAGTCACTCATCCAAATCGACC
TGCATGACAATCCTTGGGATTGTACCTGTGACATTGTGGGCATGAAGCTGTGGGTGGAGCAGCTCAAA
GTGGGCGTCCTAGTGGACGAGGTGATCTGTAAGGCGCCCAAAAAATTCGCTGAGACCGACATGCGCTC
CATTAAGTCGGAGCTGCTGTGCCCTGACTATTCAGATGTAGTAGTTTCCACGCCCACACCCTCCTCTA
TCCAGGTCCCTGCGAGGACCAGCGCCGTGACTCCTGCGGTCCGGTTGAATAGCACCGGGGCCCCCGCG
AGCTTGGGCGCAGGCGGAGGGGCGTCGTCGCTCGAG

| | | | |
|---|---|---|---|
| NOV56d, CG92715-03 | SEQ ID NO: 1130 | 620 aa | MW at 69324.6kD |
| Protein Sequence | | | |

IDYYGEICDNACPCEEKDGILTVSCENRGIISLSEISPPRFPIYHLLLSGNLLNRLYPNEFVNYTGAS
ILHLGSNVIQDIETGAFHGLRGLRRLHLNNNKLELLRDDTFLGLENLEYLQVDYNYISVIEPNAFGKL
HLLQVLILNDNLLSSLPNNLFRFVPLTHLDLRGNRLKLLPYVGLLQHMDKVVELQLEENPWNCSCELI
SLKDWLDSISYSALVGDVVCETPFRLHGRDLDEVSKQELCPRRLISDYEMRPQTPLSTTGYLHTTPAS
VNSVATSSSAVYKPPLKPPKGTRQPNKPRVRPTSRQPSKDLGYSNYGPSIAYQTKSPVPLECPTACSC
NLQISDLGLNVNCQERKIESIAELQPKPYNPKKMYLTENYIAVVRRTDFLEATGLDLLHLGNNRISMI
QDRAFGDLTNLRRLYLNGNRIERLSPELFYGLQSLQYLFLQYNLIREIQSGTFDPVPNLQLLFLNNNL
LQAMPSGVFSGLTLLRLNLRSNHFTSLPVSGVLDQLKSLIQIDLHDNPWDCTCDIVGMKLWVEQLKVG
VLVDEVICKAPKKFAETDMRSIKSELLCPDYSDVVVSTPTPSSIQVPARTSAVTPAVRLNSTGAPASL
GAGGGASS

[0677] A ClustalW comparison of the above protein sequences yields the following sequence alignment shown in Table 56B.

TABLE 56B
Comparison of the NOV56 protein sequences.

NOV56b VDEVICKAPKKFAETDMRSIKSELLCPDYSDVVVSTPTPSSIQVPARTSAVTPAVRLNST
NOV56c VDEVICKAPKKFAETDMRSIKSELLCPDYSDVVVSTPTPSSIQVPARTSAVTPAVRLNST
NOV56d VDEVICKAPKKFAETDMRSIKSELLCPDYSDVVVSTPTPSSIQVPARTSAVTPAVRLNST
NOV56a GAPASLGAGGGASSVPLSVLILSLLLVFIMSVFVAAGLFVLVMKRRKKNQSDHTSTNNSD
NOV56b GAPASLGAGGGASSLE--------------------------------------------
NOV56c GAPASLGAGGGASSVPLSVLILSLLLVFIMSVFVAAGLFVLVMKRRKKNQSDHTSTNNSD
NOV56d GAPASLGAGGGASS----------------------------------------------
NOV56a VSSFNMQYSVYGGGGGTGGHPHAHVHHRGPALPKVKTPAGHVYEYIPHPLGHMCKNPIYR
NOV56b ------------------------------------------------------------
NOV56c VSSFNMQYSVYGGGGGTGGHPHAHVHHRGPALPKVKTPAGHVYEYIPHPLGHMCKNPIYR
NOV56d ------------------------------------------------------------
NOV56a SREGNSVEDYKDLHELKVTYSSNHHLQQQQQPPPPPQQPQQQPPPQLQLQPGEEERRESH
NOV56b ------------------------------------------------------------
NOV56c SREGNSVEDYKDLHELKVTYSSNHHLQQQQQPPPPPQQPQQQPPPQLQLQPGEEERRESH
NOV56d ------------------------------------------------------------
NOV56a HLRSPAYSVSTIEPREDLLSPVQDADRFYRGILEPDKHCSTTPAGNSLPEYPKFPCSPAA
NOV56b ------------------------------------------------------------
NOV56c HLRSPAYSVSTIEPREDLLSPVQDADRFYRGILEPDKHCSTTPAGNSLPEYPKFPCSPAA
NOV56d ------------------------------------------------------------
NOV56a YTFSPNYDLRRPHQYLHPGAGDSRLREPVLYSPPSAVFV---------------------
NOV56b ------------------------------------------------------------
NOV56c YTFSPNYDLRRPHQYLHPGAGDSRLREPVLYSPPSAVFVEPNRNEYLELKAKLNVEPDYL
NOV56d ------------------------------------------------------------
NOV56a ------------
NOV56b ------------
NOV56c EVLEKQTTFSQF
NOV56d ------------
NOV56a (SEQ ID NO: 1124)
NOV56b (SEQ ID NO: 1126)
NOV56c (SEQ ID NO: 1128)
NOV56d (SEQ ID NO: 1130)

[0678] Further analysis of the NOV56a protein yielded the following properties shown in Table 56C.

TABLE 56C
Protein Sequence Properties NOV56a

| | |
|---|---|
| SignalP analysis: | Cleavage site between residues 41 and 42 |
| PSORT II analysis: | |

| PSG: | a new signal peptide prediction method | |
|---|---|---|
| | N-region: | length 11; pos. chg 0; neg. chg 1 |
| | H-region: | length 1; peak value 0.00 |
| | PSG score: | −4.40 |

| | |
|---|---|
| GvH: | von Heijne's method for signal seq. recognition |
| | GvH score (threshold: −2.1): −2.49 |
| | possible cleavage site: between 38 and 39 |

>>> Seems to have no N-terminal signal peptide

| ALOM: | Klein et al's method for TM region allocation | | |
|---|---|---|---|
| | Init position for calculation: 1 | | |
| | Tentative number of TMS(s) for the threshold 0.5: 2 | | |
| | Number of TMS(s) for threshold 0.5: 1 | | |
| | INTEGRAL | Likelihood = | Transmembrane 665-681 |
| | | −13.59 | |

| | |
|---|---|
| PERIPHERAL | Likelihood = 2.44 (at 571) |

| | |
|---|---|
| | ALOM score: −13.59 (number of TMSs: 1) |
| MTOP: | Prediction of membrane topology (Hartmann et al.) |
| | Center position for calculation: 672 |
| | Charge difference: 2.5 C(4.5)-N(2.0) |
| | C > N: C-terminal side will be inside |

>>> membrane topology: type 1b (cytoplasmic tail 665 to 925)

| MITDISC: | discrimination of mitochondrial targeting seq | | | |
|---|---|---|---|---|
| | R content: | 0 | Hyd Moment(75): | 2.75 |
| | Hyd Moment(95): | 4.92 | G content: | 0 |
| | D/E content: | 2 | S/T content: | 2 |

| | |
|---|---|
| | Score: −7.05 |
| Gavel: | prediction of cleavage sites for mitochondrial preseq |
| | cleavage site motif not found |

NUCDISC: discrimination of nuclear localization signals

| | |
|---|---|
| | pat4: KRRK (5) at 690 |
| | pat4: RRKK (5) at 691 |
| | pat7: none |
| | bipartite: none |
| | content of basic residues: 9.2% |
| | NLS Score: 0.15 |
| KDEL: | ER retention motif in the C-terminus: none |

ER Membrane Retention Signals: none
SKL: peroxisomal targeting signal in the C-terminus: none
PTS2: 2nd peroxisomal targeting signal: none
VAC: possible vacuolar targeting motif: none
RNA-binding motif: none
Actinin-type actin-binding motif:

type 1: none
type 2: none

NMYR: N-myristoylation pattern: none
Prenylation motif: none
memYQRL: transport motif from cell surface to Golgi: none
Tyrosines in the tail: too long tail
Dileucine motif in the tail: found

| | |
|---|---|
| | LL at 670 |
| LL at 671 | |

checking 63 PROSITE DNA binding motifs: none
checking 71 PROSITE ribosomal protein motifs: none
checking 33 PROSITE prokaryotic DNA binding motifs: none

| | |
|---|---|
| NNCN: | Reinhardt's method for Cytoplasmic/Nuclear discrimination |
| | Prediction: nuclear |
| | Reliability: 89 |
| COIL: | Lupas's algorithm to detect coiled-coil regions |
| | total: 0 residues |

Final Results (k = 9/23):

```
69.6%: nuclear
  8.7%: mitochondrial
  8.7%: cytoplasmic
  4.3%: vacuolar
  4.3%: plasma membrane
  4.3%: vesicles of secretory system
```

>> prediction for CG92715-01 is nuc (k = 23)

[0679] A search of the NOV56a protein against the Geneseq database, a proprietary database that contains sequences published in patents and patent publication, yielded several homologous proteins shown in Table 56D.

TABLE 56D
Geneseq Results for NOV56a

| | | NOV56a | Identities/ | | |
|---|---|---|---|---|---|
| | | Residues/ | Similarities for | | |
| Geneseq | Protein/Organism/Length | Match | the Matched | | Expect |
| Identifier | [Patent #, Date] | Residues | Region | | Value |
| ABU12071 | Human NOV16b CG92715-02 protein | 1 . . . 925 | 925/925 | (100%) | 0.0 |
| | SEQ ID 62 - Homo sapiens, 972 aa. | 15 . . . 939 | 925/925 | (100%) | |
| | [WO200281625-A2, 17-OCT-2002] | | | | |
| ABU12070 | Human NOV16a CG92715-01 protein | 1 . . . 925 | 925/925 | (100%) | 0.0 |
| | SEQ ID 60 - Homo sapiens, 925 aa. | 1 . . . 925 | 925/925 | (100%) | |
| | [WO200281625-A2, 17-OCT-2002] | | | | |
| AAU98780 | Human haematopoietic cell line Kg-1a | 1 . . . 925 | 925/925 | (100%) | 0.0 |
| | protein KIAA0918 - Homo sapiens, 958 | 1 . . . 925 | 925/925 | (100%) | |
| | aa. [WO200236804-A2, 10-MAY-2002] | | | | |
| AAB95753 | Human protein sequence SEQ ID | 1 . . . 925 | 925/925 | (100%) | 0.0 |
| | NO: 18665 - Homo sapiens, 958 aa. | 1 . . . 925 | 925/925 | (100%) | |
| | [EP1074617-A2, 07-FEB-2001] | | | | |
| ABB12025 | Human IGFALS homologue, SEQ ID | 1 . . . 925 | 924/925 | (99%) | 0.0 |
| | NO: 2395 - Homo sapiens, 977 aa. | 20 . . . 944 | 924/925 | (99%) | |
| | [WO200157188-A2, 09-AUG-2001] | | | | |

[0680] In a BLAST search of public sequence databases, the NOV56a protein was found to have homology to the proteins shown in the BLASTP data in Table 56E.

TABLE 56E
Public BLASTP Results for NOV56a

| | | NOV56a | Identities/ | | |
|---|---|---|---|---|---|
| Protein | | Residues/ | Similarities for | | |
| Accession | | Match | the Matched | | Expect |
| Number | Protein/Organism/Length | Residues | Portion | | Value |
| O94991 | Hypothetical protein KIAA0918 - | 1 . . . 925 | 925/925 | (100%) | 0.0 |
| | Homo sapiens (Human), 966 aa | 9 . . . 933 | 925/925 | (100%) | |
| | (fragment). | | | | |
| CAD48653 | Sequence 18 from Patent | 22 . . . 925 | 904/904 | (100%) | 0.0 |
| | WO0220569 - Homo sapiens | 1 . . . 904 | 904/904 | (100%) | |
| | (Human), 937 aa. | | | | |
| BAC67208 | Neuronal transmembrane protein | 1 . . . 925 | 895/926 | (96%) | 0.0 |
| | Slitrk5 - Mus musculus (Mouse), | 1 . . . 924 | 908/926 | (97%) | |
| | 957 aa. | | | | |
| Q9H156 | BG115M3.1 (Novel protein) | 46 . . . 925 | 423/886 | (47%) | 0.0 |
| | (SLITL1 protein) - Homo sapiens | 27 . . . 812 | 563/886 | (62%) | |
| | (Human), 845 aa. | | | | |
| Q8NBC7 | Hypothetical protein FLJ33696 - | 46 . . . 781 | 393/742 | (52%) | 0.0 |
| | Homo sapiens (Human), 724 aa | 27 . . . 717 | 511/742 | (67%) | |
| | (fragment). | | | | |

[0681] PFam analysis predicts that the NOV56a protein contains the domains shown in the Table 56F.

TABLE 56F
Domain Analysis of NOV56a

| | | | |
|---|---|---|---|
| | | Identities/ | |
| Pfam | NOV56a Match | Similarities for | Expect |
| Domain | Region | the Matched Region | Value |

| | | | | |
|---|---|---|---|---|
| LRR | 154 . . . 177 | 8/25 | (32%) | 0.053 |
| | | 21/25 | (84%) | |
| LRRCT | 235 . . . 285 | 18/54 | (33%) | 2.7e−08 |
| | | 34/54 | (63%) | |
| LRRNT | 373 . . . 406 | 10/36 | (28%) | 0.0099 |
| | | 19/36 | (53%) | |
| LRR | 434 . . . 457 | 8/25 | (32%) | 0.28 |
| | | 17/25 | (68%) | |
| LRR | 458 . . . 481 | 12/25 | (48%) | 0.0022 |
| | | 23/25 | (92%) | |
| LRR | 482 . . . 505 | 5/25 | (20%) | 0.59 |
| | | 19/25 | (76%) | |
| LRR | 506 . . . 529 | 12/25 | (48%) | 0.0077 |
| | | 19/25 | (76%) | |
| LRRCT | 563 . . . 613 | 10/54 | (19%) | 1.9e−05 |
| | | 36/54 | (67%) | |

### Example 57

[0682] The NOV57 clone was analyzed, and the nucleotide and encoded polypeptide sequences are shown in Table 57A.

TABLE 57A
NOV57 Sequence Analysis

| | | |
|---|---|---|
| NOV57a, CG92813-01 | SEQ ID NO: 1131 | 15603 bp |
| DNA Sequence | ORF Start: ATG at 518 | ORF Stop: TGA at 15401 |

| CTAATAGAATTCAGCGGCCGCTTTCCCCGGTGCGCAGTTGTGCTTGGACGTTTGTTCCTCCCTCTTCA | | | | |
|---|---|---|---|---|
| CGCTCTTCGCTGCGGGTAAGTTCTAAAGTTTCTGAAGGCCGTTCTTTGCAATGATTCCTCATATACCT | | | | |
| TAGATACAGGCAACTTCTCCCAACTCTCATCCACCCGGGTGAAAACGCTCAGACTATCTGGATTCAAA | | | | |
| AACAAAGTAAAAGGGGGCATATATAAGAGGCTTGAGAAACTTTTCTGGGAACTCAGCTCACAGGAGTG | | | | |
| TCCCGCGGAATGCCCTGCCGCTTTTCGCCACAGCATCTCTCTTGCACTCCGCGTTCAACTGGCTACCT | | | | |
| AGAGTCTTTTGCTGATGCTACTTGCTTTTGCCGGACTGGAGGTTCTTTGAAATAGCAGAGGTCTCAGA | | | | |
| CCAAGCCGTCAGCTGAATCTTTGCTGGCGCTCCTTAATCCCTGTAAATATCATTGCGTTTGCTTCACC | | | | |
| CCTTCCTTCTCTTTATCACATCGTTTTAGGGAGCCAGGACCATGGACTTAGCACCAGACAGGGCTACT | | | | |
| GGCCGCCCGTGGCTCCCGTTGCACACTCTATCAGTATCTCAGCTCCTTCGAGTGTTTTGGCTACTGTC | | | | |
| ATTGCTTCCGGGGCAGGCCTGGGTCCACGGGGCCGAGCCGCGCCAGGTGTTCCAAGTGCTGGAAGAGC | | | | |
| AACCTCCAGGCACTCTGGTAGGCACCATCCAGACGCGCCCCGGCTTCACCTACAGGCTCAGCGAAAGC | | | | |
| CACGCCCTGTTTGCCATAAACAGTAGCACCGGAGCCCTGTACACCACCTCCACCATCGACCGCGAGAG | | | | |
| CCTGCCCAGCGACGTGATCAACCTGGTGGTCCTTTCCAGCGCGCCCACCTACCCCACCGAAGTGCGAG | | | | |
| TGCTGGTGCGGGACCTCAATGACAACGCCCCCGTTTTCCCGGACCCCTCTATCGTGGTCACTTTCAAG | | | | |
| GAAGACAGTAGCAGCGGACGCCAAGTCATCTTAGACACCGCCACCGACTCGGACATCGGCTCAAACGG | | | | |
| TGTGGACCACCGCTCCTACCGCATCATCCGCGGCAATGAGGCGGGGCGCTTCCGTCTGGACATCAACC | | | | |
| TGAACCCGAGCGGCGAGGGAGCGTTCCTGCATCTGGTGTCCAAGGGCGGACTGGACCGTGAGGTCACT | | | | |
| CCGCAGTACCAGCTCCTGGTTGAGGTGGAGGACAAGGGTGAGCCTAAGCGGCGGGGCTACCTTCAGGT | | | | |
| AAACGTGACTGTGCAAGACATTAATGACAACCCCCCGGTTTTTGGCAGTTCTCACTACCAGGCGGGGG | | | | |
| TGCCTGAGGACGCGGTTGTGGGTTCCAGCGTCCTCCAGGTGGCGGCGGCGGACGCGGACGAGGGCACC | | | | |
| AACGCGGACATCCGCTATCGCCTGCAGGACGAGGGGACCCCCTTCCAAATGGACCCTGAGACGGGACT | | | | |
| TATCACGGTGCGGGAGCCCCTGGACTTCGAAGCTCGGCGCCAATACTCGCTTACGGTGCAGGCGATGG | | | | |
| ACAGAGGCGTGCCTTCCCTCACTGGGCGCGCCGAGGCGCTGATTCAGCTGCTGGACGTGAATGACAAT | | | | |
| GACCCGGTAGTGAAGTTCCGCTACTTCCCGGCCACCTCGOGCTACGCCTCGGTAGATGAGAATGCTCA | | | | |
| AGTGGGCACCGTGGTGGCTCTGCTCACCGTGACGGACGCAGATTCTCCCGCGGCCAACGGGAACATCT | | | | |
| CCGTGCAAATTCTCGGGGGCAATGAGCAGCGCCACTTTGAAGTGCAAAGCAGCAAAGTGCCGAACCTG | | | | |
| AGCCTAATCAAGGTGGCCAGCGCCTTGGACCGCGAGCGCATCCCTTCCTACAACCTCACAGTTTCCGT | | | | |
| CTCTGATAACTACGGGGCGCCCCCTGGCGCAGCAGTCCAGGCGCGCTCTTCTGTGGCAAGCCTGGTGA | | | | |
| TTTTTGTTAATGACATCAATGACCATCCTCCTGTCTTTTCACAGCAAGTGTACAGAGTGAACCTGAGC | | | | |
| GAGGAGGCGCCTCCGGGAAGCTATGTGAGTGGGATATCTGCCACTGATGGCGACTCTGGTCTCAATGC | | | | |
| TAATCTGCGTTACAGCATTGTCTCTGGCAATGGACTGGGATGGTTCCATATCAGTGAACATAGCGGCC | | | | |
| TCGTGACCACTGGGTCCTCTGGGGGCCTGGACCGTGAACTTGCTTCCCAGATTGTTCTGAATATAAGT | | | | |
| GCCCGGGACCAGGGAGTTCACCCCAAGGTGTCCTATGCCCAGCTTGTAGTAACTCTCCTAGATGTGAA | | | | |
| TGATGAAAAGCCAGTATTTAGCCAGCCAGAAGGGTATGATGTGTCTGTGGTTGAGAATGCCCCAACAG | | | | |
| GGACAGAACTGTTGATGCTCAGGGCAACTGACGGGGACCTGGGTGACAACGGAACAGTGCGCTTCTCC | | | | |
| TTACAAGAGGCAGAGACTGACCGGAGGTCCTTCCGTCTGGATCCTGTGTCTGGGAGGTTGAGTACTAT | | | | |
| TTCCTCCTTGGACAGAGAAGAGCAAGCCTTCTACTCCCTGTTGGTTCTGGCCACAGATCTGGGCTCCC | | | | |
| CTCCCCAGTCATCAATGGCTCGCATAAATGTGAGTCTTCTGGATATAAATGATAACAGCCCTGTCTTC | | | | |
| TACCCGGTCCAATACTTTGCTCACATTAAGGAGAATGAGCCTGGAGGTAGCTACATCACCACTGTGTC | | | | |
| TGCCACTGACCCAGACTTGGGTACCAATGGTACTGTCAAATATAGCATATCTGCTGGGGACAGGTCTC | | | | |
| GGTTTCAGGTCAATGCTCAGAGTGGGGTTATTTCTACAAGAATGGCCCTAGACAGAGAAGAAAAAACA | | | | |
| GCTTATCAGTTGCAAATAGTAGCTACTGATGGTGGCAATTTACAATCTCCCAACCAGGCAATAGTAAC | | | | |
| CATCACTGTATTGGACACTCAAGACAACCCACCTGTATTCAGTCAGGTTGCCTACAGCTTTGTGGTTT | | | | |
| TTGAGAACGTGGCGCTGGGATATCATGTGGGTAGTGTGTCTGCATCCACCATGGATCTCAATTCCAAC | | | | |
| ATCAGTTATCTCATTACTACTGGGGATCAGAAAGGTATGTTTGCTATCAACCAGGTCACTGGGCAGCT | | | | |
| TACCACAGCAAATGTGATTGATAGAGAAGAGCAATCCTTTTATCAGCTGAAGGTAGTGGCCAGTGGGG | | | | |
| GCACAGTGACTGGAGACACTATGGTTAACATAACAGTTAAGGATTTGAATGACAACTCTCCCCATTTC | | | | |
| CTTCAGGCAATAGAGAGTGTAAATGTGGTGGAGAATTGGCAGGCAGGTCACAGCATTTTCCAGGCCAA | | | | |
| AGCTGTGGACCCTGATGAAGGTGTCAATGGCATGGTACTCTATAGTCTGAAGCAAAACCCCAAGAACC | | | | |
| TGTTTGCTATCAATGAAAAGAATGGCACTATTAGTCTGCTTGGGCCCCTGGATGTTCATGCTGGCTCC | | | | |
| TACCAAATAGAGATCTTGGCATCTGACATGGGTGTCCCACAGCTCTCCTCTAGTGTCATCCTAACAGT | | | | |
| TTATGTCCATGATGTAAATGACAATTCACCAGTGTTTGACCAACTCTCTTATGAAGTCACCCTTTCTG | | | | |
| AGTCAGAACCTGTGAATTCTCGATTCTTTAAAGTACAAGCTTCTGATAAGGATTCAGGAGCAAATGAT | | | | |
| GGTCAATTGTATATAAAAAGTGAACTGGACCGTGAACTTCAAGACAGATATGTTTTAATGGTTGTTGC | | | | |
| TTCTGACAGAGCAGTGGAACCCCTTAGTGCTACTGTGAATGTTACTGTAATTTTAGAAGATGTAAATG | | | | |
| ATAACAGACCTCTTTTTAACAGTACCAATTACACATTTTACTTCGAAGAAGAGCAGAGGGCTGGGTCG | | | | |
| TTTGTGGGCAAAGTAAGTGCTGTAGATAAAGACTTTGGGCCAAATGGAGAAGTAAGGTATTCTTTTGA | | | | |
| AATGGTGCAGCCAGATTTTGAGTTGCATGCCATCAGTGGGGAAATTACAAATACTCATCAGTTTGACA | | | | |
| GGGAGTCTCTTATGAGGCGGAGAGGGACTGCTGTGTTTAGCTTTACAGTCATAGCAACAGATCAGGGG | | | | |
| ATCCCTCAGCCTCTCAAGGATCAGGCCACTGTACATGTTTACATGAAGGATATAAATGATAATGCTCC | | | | |
| CAAATTTTTAAAAGACTTTTACCAAGCTACAATATCAGAATCAGCAGCCAATCTGACACAAGTGTTAA | | | | |
| GAGTATCTGCCTCAGATGTTGATGAAGGTAATAATGGACTTATTCACTATTCTATAATAAAAGGAAAT | | | | |
| GAAGAAAGACAGTTTGCTATAGACAGTACCTCTGGTCAGGTAACACTAATTGGCAAATTAGACTATGA | | | | |
| AGCAACACCTGCCTATTCCCTTGTAATTCAAGCAGTGGATTCAGGGACAATCCCCCTCAATTCAACGT | | | | |
| GTACTTTAAATATTGATATTTTAGATGAAAATGACAATACCCCTTCTTTCCTTAAATCAACACTGTTT | | | | |
| GTTGATGTTTTGGAAAACATGAGAATTGGTGAACTCGTGTCCTCTGTTACTGCAACTGATTCCGATTC | | | | |
| AGGTGACAATGTTGATTTATATTACAGTATTACTGGGACTAACAACCACGGAACTTTTAGCATTAGCC | | | | |
| CAAACACTGGGAGTATTTTTCTTGCCAAAAAACTGGACTTTGAAACACAGTCTTTGTATAAATTAAAT | | | | |
| ATAACAGCAAAAGACCAAGGAAGACCTCCTCGTTCATCTACAATGTCAGTGGTTATTCACGTGAGGGA | | | | |
| CTTTAATGACAATCCTCCTAGCTTTCCTCCTGGAGATATTTTCAAGTCTATTGTTGAGAACATTCCCA | | | | |
| TTGGTACATCTGTCATTTCAGTGACTGCACATGACCCTGATGCAGACATTAATGGTCAACTATCCTAC | | | | |
| ACAATCATTCAACAGATGCCAAGAGGCAACCACTTTACCATAGATGAAGTCAAAGGGACTATATATAC | | | | |
| TAATGCTGAAATAGATCGGGAATTTGCTAATCTCTTTGAGTTGACTGTAAAAGCCAATGATCAAGCTG | | | | |
| TGCCAATAGAAACTAGACGGTATGCTTTGAAGAACGTGACCATTTTGGTTACAGACCTCAATGACAAT | | | | |
| GTCCCAATGTTTATATCACAAAACGCCCTTGCTGCAGACCCATCAGCTGTGATTGGTTCCGTTCTGAC | | | | |
| AACAATTATGGCTGCTGACCCAGATGAAGGTGCTAATGGAGAAATAGAGTATGAGATCATCAATGGGG | | | | |
| ACACAGACACCTTCATTGTTGATCGTTATAGTGGAGACCTGAGAGTGGCTTCAGCGTTGGTGCCTTCA | | | | |
| CAGTTGATCTACAATCTCATAGTTTCAGCAACAGACCTTGGGCCTGAAAGGAGGAAATCGACCACTGA | | | | |
| ATTGACCATCATTCTTCAGGGCCTTGATGGACCTGTTTTTACTCAACCCAAATATATAACTATTTTGA | | | | |
| AGGAAGGAGAACCCATTGGCACAAACGTGATATCAATAGAAGCAGCTAGCCCCAGAGGATCTGAGGCC | | | | |
| CCAGTGGAGTATTATATTGTTTCAGTTCGTTGTGAAGAAAAAACTGTTGGACGCCTCTTTACTATTGG | | | | |
| ACGACATACTGGTATAATTCAGACCGCAGCCATTCTGGACCGGGAGCAAGGAGCATGTCTTTACCTGG | | | | |
| TGGATGTTTATGCCATAGAAAAATCAACTGCTTTTCCCAGAACACAGAGAGCAGAGGTAGAAACAACA | | | | |
| CTTCAGGATATCAATGACAATCCACCAGTATTTCCAACGGACATGCTGGATCTCACGGTAGAGGAGAA | | | | |
| CATTGGAGATGGCTCTAAGATTATGCAGCTGACAGCCATGGATGCTGACGAGGTGCAAATGCTCTCGT | | | | |
| CACATACACTATCATTAGTGGGTTCTTTGGTAGCAGCCATTTTAGCCACGGATGATGACTCTGGTGTG | | | | |
| AATGGAGAAATTACATATATTGTGAATGAAGATGATGAAGATGGCATCTTTTTCCTGAATCCTATTAC | | | | |
| TGGGGTCTTTAATTTGACTCGATTATTAGATTATGAAGTACAGCAATATTATATCCTCACTGTTCGAG | | | | |
| CAGAAGATGGTGGGGGACAATTTACTACCATCAGAGTTTATTTCAATATTCTAGATGTAAATGATAAT | | | | |
| CCACCTATTTTCAGCTTGAATTCATACAGCACATCTTTAATGGAGAATCTACCTGTGGGATCTACTGT | | | | |
| TCTTGTGTTTAATGTTACTGATGCAGATATGATGAAGGCAGAAATAAAGATGTTCTTTGAAACCAGTG | | | | |
| AGAACAAAGACACAACATACCAGAATCTCTGGGACACATTCAAAGCAGTGTGTAGAGGGAAATTTATA | | | | |
| GCACTAAATGCCCACAAGAGAAAGCAGGAAAGATCCAAAATTGACACCCTAACATCACAATTAAAAGA | | | | |
| ACTAGAAAAGCAAGAGCAAACACATTCAAAAGCTAGCAGAAGGCAAGAAATAACTAAAATCAGAGCAG | | | | |
| AACTGAAGGATATAGAGACACAAAAAACCCTTCAAAAAATTAATGAATCCAGGAGCTGGTTTTTTGAA | | | | |
| AGGATCAACAAAATTGATAGACCGCTAGCAAGACTAATAAAGAAGAAAACAGAGAAGAATCAAATAGA | | | | |
| CGCAATAAAAAATGATAAAGGGGATATCACCATCGATCCCACAGAAATACAAACTACCATCAGAGAAT | | | | |
| ACTGCAAACACCTCTATGCAAATAAACTAGAAAATCTAGAAGAAATGGATAAATTCCTCGACACATAC | | | | |
| ACCCTCCCAAGACTAAACCAGGAAGAAGTTGAATCTCTGAATAGACCAATAACAGACTCTGAAACTGT | | | | |
| GGCAATAATCAATAGCTTACCAACCAAAAAGAGTCCAGGACCAGATGGATTCACAGCCGAATTCTACC | | | | |
| AGATGATAACAACCCCAGTCTTTGCACAAGCTTTGTATAAAGTGGAGATTAATGAAAACACACTTACT | | | | |
| GGAACAGATATAATACAAGTGTTCGCAGCAGATGGAGATGAAGGCACAAATGGACAGGTTCGCTATGG | | | | |
| CATTGTTAATGGTAATACCAATCAGGAATTTCGGATAGACTCTGTCACAGGTGCCATCACTGTCGCTA | | | | |
| AACCTTTGGATAGAGAAAAGACCCCTACCTACCATTTAACTGTTCAGGCAACAGATCGAGGCAGCACA | | | | |
| CCCAGAACTGATACCTCCACGGTCAGCATTGTTCTACTGGATATTAATGACTTTGTTCCTGTATTTGA | | | | |
| GCTATCTCCATATTCTGTAAATGTCCCTGAGAATTTAGGGACACTACCCAGAACAATTCTTCAGACTG | | | | |
| CTTCGCCTTGCGTGAGGTTTGCCAGCGCCAGTAAAGCGTATTTCACAACAATTCCTGAGGATGCACCA | | | | |
| ACTGGAACAGATGTTTTATTGGTAAATGCCTCAGATGCTGATGCTTCAAAGAATGCAGTTATAAGTTA | | | | |
| TAGGATCATCGGTGGAAACTCTCAGTTCACGATCAACCCATCGACAGGACAAATCATCACCAGCGCAT | | | | |
| TGTTAGATAGGGAAACAAAAGATAATTATACTTTGGTAGTGGTCTGCAGTGATGCGGGATCCCCAGAG | | | | |
| CCTCTTTCCAGTTCCACCAGTGTGCTTGTCACTGTGACTGATGTCCATGACAATCCACCAAGATTTCA | | | | |
| GCATCACCCATATGTCACTCACATCCCATCTCCTACTCTTCCAGGTTCCTTTGTCTTTGCGGTTACAG | | | | |
| TCACAGATGCTGATATTGGACCAAATTCTGAACTGCATTATTCTCTTTCGGGTAGAAATTCTGAAAAA | | | | |
| TTTCACATTGACCCACTGAGGGGAGCCATTATGGCCGCCGGACCACTAAACGGAGCTTCAGAAGTGAC | | | | |
| ATTTTCTGTGCATGTAAAAGATGGTGGCTCATTTCCAAAGACAGATTCTACAACAGTGACTGTTAGAT | | | | |
| TCGTGAATAAGGCCGATTTCCCTAAAGTCAGAGCCAAAGAACAAACGTTCATGTTTCCTGAAAACCAA | | | | |
| CCAGTCAGCTCTCTTGTCACCACCATCACAGGATCCTCTTTAAGAGGAGAACCTATGTCATATTATAT | | | | |
| CGCAAGTGGGAATCTTGGCAATACTTTCCAGATTGATCAGTTAACAGGGCAGGTGTCTATTAGTCAAC | | | | |
| CTCTGGATTTTGAAAAGATACAAAAATATGTTGTATGGATAGAGGCCAGAGACGGTGGTTTCCCTCCT | | | | |
| TTCTCCTCTTACGAGAAACTTGATATAACAGTATTAGATGTCAATGATAATGCCCCAATTTTTAAGGA | | | | |
| AGACCCATTTATATCTGAAATATTGGAAAACCTTTCCCCTCGAAAAATACTTACTGTTTCGGCAATGG | | | | |
| ACAAGGACAGTGGACCCAATGGACAGTTAGATTATGAAATTGTTAATGGCAACATGGAAAATAGTTTC | | | | |
| AGTATCAATCATGCTACTGGTGAAATTAGAAGCGTTAGACCTTTGGACAGGGAAAAAGTATCTCATTA | | | | |
| TGTCCTAACCATAAAATCATCAGACAAAGGGTCCCCGTCTCAGAGTACTTCAGTAAAAGTCATGATTA | | | | |
| ACATTTTAGATGAAAATGATAATGCCCCTAGGTTTTCTCAGATATTTAGTGCCCATGTTCCTGAAAAT | | | | |
| TCCCCCTTAGGATACACAGTTACCCGTGTCACAACTTCTGATGAAGACATTGGGATCAATGCAATTAG | | | | |
| TAGATATTCTATAATGGATGCAAGTCTTCCATTTACAATTAATCCCAGCACAGGGGATATTGTCATAA | | | | |
| GCAGACCTTTAAATAGGGAAGATACAGACCGTTACAGAATTCGAGTTTCCGCACATGATTCTGGGTGG | | | | |
| ACTGTAAGTACAGATGTCACAATATTTGTGACAGACATCAATGACAATGCTCCAAGATTTAGCAGAAC | | | | |
| TTCCTATTATTTAGATTGCCCTGAACTTACTGAGATTGGCTCCAAAGTAACTCAGGTATTTGCAACAG | | | | |
| ATCCTGATGAGGGATCAAATGGACAAGTGTTTTATTTCATAAAATCCCAATCAGAATATTTCAGGATT | | | | |
| AATGCCACCACTGGAGAGATTTTCAATAAACAGATCTTAAAATACCAAAATGTCACTGGCTTCAGTAA | | | | |
| TGTGAATATCAACAGGCATAGTTTTATAGTGACATCTTCAGATCGAGGTAAACCTTCCTTAATTAGTG | | | | |
| AGACAACAGTTACCATCAATATAGTGGACAGTAATGACAATGCACCTCAATTTCTTAAAAGTAAATAT | | | | |
| TTCACTCCAGTCACCAAAAATGTTAAGGTTGGTACGAAGTTAATCAGAGTTACAGCAATAGATGACAA | | | | |
| AGATTTTGGACTGAATTCAGAAGTGGAGTATTTCATTTCTAATGATAACCATTTAGGAAAATTTAAGT | | | | |
| TGGACAATGATACGGGGTGGATTTCAGTAGCATCCTCCCTGATTTCTGACTTGAACCAAAACTTTTTT | | | | |
| ATCACAGTCACTGCAAAGGATAAGGGAAACCCTCCACTTTCTTCCCAAGCAACTGTTCACATAACTGT | | | | |
| CACTGAGGAAAACTACCATACACCTGAATTCTCTCAAAGCCACATGAGTGCAACCATCCCTGAGAGCC | | | | |
| ATAGCATTGGGTCCATTGTCAGAACTGTTTCTGCAAGAGATAGAGATGCAGCGATGAATGGCTTGATT | | | | |
| AAGTACAGCATTTCTTCAGGAAATGAAGAAGGCATTTTTGCAATCAATTCTTCTACAGGTATATTAAC | | | | |
| ACTAGCCAAAGCTCTTGATTATGAGCTATGCCAGAAACACGAAATGACGATTAGTGCTATAGATGGAG | | | | |
| GATGGGTTGCAAGAACTGGTTACTGCAGTGTGACCGTAAATGTGATTGATGTGAATGATAATTCTCCA | | | | |
| GTATTCCTCTCTGATGACTATTTCCCTACTGTTTTGGAAAATGCCCCAAGTGGAACAACAGTTATCCA | | | | |
| CCTAAATGCAACAGATGCTGACTCTGGAACAAATGCTGTGATTGCGTATACTGTACAGTCATCTGACA | | | | |
| GTGACCTCTTTGTCATTGACCCTAACACAGGAGTCATAACCACTCAAGGCTTCTTGGATTTTGAAACC | | | | |
| AAGCAGAGCTACCATCTTACTGTGAAAGCCTTCAATGTCCCCGATGAGGAAAGGTGTAGCTTTGCCAC | | | | |
| TGTTAATATACAATTAAAAGGGACAAATGAATATGTGCCCCGTTTTGTTTCCAAACTTTACTATTTTG | | | | |
| AAATCTCAGAAGCAGCTCCTAAAGGTACTATTGTTGGAGAAGTGTTTGCTAGCGACCGTGATTTGGGC | | | | |
| ACTGATGGGGAGGTACACTATTTGATTTTTGGTAATAGTCGAAAGAAGGGTTTCCAGATCAATAAGAA | | | | |
| GACTGGACAGATTTATGTTTCTGGAATTCTTGATCGAAAAAAAGAAGAAAGGGTGTCTTTGAAGGTAT | | | | |
| TGGCCAAGAACTTTGGCAGCATTAGAGGTGCAGATATAGATGAGGTCACTGTAAATGTCACCGTGCTT | | | | |
| GATGCAAATGACCCACCCATTTTTACTCTAAACATCTACAGTGTGCAGATCAGTGAAGGGGTCCCAAT | | | | |
| AGGAACTCATGTGACCTTTGTCAGTGCCTTTGACTCAGACTCCATCCCCAGCTGGAGCAGGTTTTCTT | | | | |
| ACTTCATCGGATCAGGGAATGAAAATGGTGCCTTTTCTATTAATCCGCAGACAGGACAGATCACCGTT | | | | |
| ACTGCAGAATTAGATCGAGAAACCCTTCCCATCTATAATCTCTCAGTTTTGGCTGTTGATTCAGGGAC | | | | |
| CCCCTCAGCTACAGGTAGTGCCTCTTTATTAGTCACCCTGGAAGATATAAATGATAACGGGCCCATGC | | | | |
| TGACTGTCAGTGAAGGAGAAGTCATGGAAAACAAACGGCCAGGCACTTTGGTGATGACCCTTCAGTCC | | | | |
| ACTGACCCTGATCTCCCTCCAAATCAAGGTCCCTTTACTTATTACTTGCTGAGCACAGGTCCTGCCAC | | | | |
| CAGTTATTTCAGTCTGAGCACTGCTGGAGTTCTGAGCACAACCAGAGAGATTGACAGAGAGCAGATTG | | | | |
| CAGACTTCTATCTGTCTGTGGTTACCAAGGATTCTGGTGTTCCTCAAATGTCTTCCACAGGAACTGTG | | | | |
| CATATCACAGTTATAGACCAAAATGACAATCCTTCACAGTCTCGGACGGTGGAGATATTTGTTAATTA | | | | |
| TTATGGTAACTTGTTTCCCGGTGGGATTTTAGGCTCTGTGAAGCCACAGGATCCAGATGTGTTAGACA | | | | |
| GCTTCCACTGCTCCCTTACTTCAGGAGTTACCAGCCTCTTCAGTATTCCAGGGGGTACTTGTGATCTG | | | | |
| AATTCCCAGCCAAGGTCCACAGATGGCACGTTTGATCTGACTGTCCTTAGCAATGATGGAGTTCACAG | | | | |
| CACAGTCACGAGCAACATCCGAGTTTTCTTTGCTGGATTTTCCAATGCCACAGTGGATAACAGCATCT | | | | |
| TACTTCGTCTCGGCGTACCAACAGTAAAGGACTTCTTGACCAACCACTATCTTCATTTTTTACGCATT | | | | |
| GCCAGCTCACAGCTGACAGGCTTAGGGACTGCTGTGCAACTGTACAGTGCATATGAAGAGAACAATAG | | | | |
| AACGTTTCTTTTGGCAGCTGTGAAGCGAAATCATAATCAGTATGTGAATCCCAGTGGCGTAGCCACCT | | | | |
| TCTTTGAAAGCATCAAAGAGATCCTTCTCCGGCAGAGTGGAGTAAAGGTGGAATCTGTGGATCATGAC | | | | |
| TCCTGTGTGCATGGCCCATGTCAGAATGGAGGGAGCTGTCTACGAAGATTGGCTGTGAGCTCCGTATT | | | | |
| AAAAAGCCGTGAGAGTCTTCCAGTCATCATCGTGGCAAATGAACCTCTGCAGCCTTTCTTATGCAAGT | | | | |
| GTCTGCCAGGATATGCGGGTAGCTGGTGTGAAATAGATATAGATGAATGTCTTCCATCACCTTGCCAC | | | | |
| AGTGGTGGAACCTGTCACAATTTAGTGGGAGGATTTTCATGCAGCTGCCCAGATGGCTTCACTGGTAG | | | | |
| GGCGTGTGAGAGAGATATCAATGAGTGCCTGCAGAGTCCTTGCAAGAATGGTGCCATCTGCCAGAATT | | | | |
| TTCCAGGAAGCTTCAACTGTGTTTGCAAAACTGGATACACAGGTATGACAACGTTTGTACTTTTCTCA | | | | |
| CTAAGACTTGGAAAATGTGTGAATCTTCAGTCAATTACTGTGAATGCAACCCCTGCTTTAATGGTGGT | | | | |
| TCCTGCCAAAGTGGTGTGGATTCTTATTATTGTCATTGTCCATTTGGTGTCTTTGGAACACTGCGAGT | | | | |
| TGAACAGTTATGGATTTGAGGAGTTATCATACATGGAATTTCCAAGCTTGGACCCCAATAACAACTAT | | | | |
| ATTTATGTCAAATTTGCCACGATTAAAAGTCATGCCTTATTGCTTTACAACTATGACAACCAGACAGG | | | | |
| CGACCGGGCTGAGTTTTTGGCCCTTGAAATTGCCGAAGAAAGACTAAGATTCTCTTATAATTTAGGCA | | | | |
| GTGGTACATATAAGCTCACCACCATGAAGAAGGTGTCAGATGGACATTTTCACACTGTGATTGCCAGG | | | | |
| AGAGCAGGAATGGCAGCCTCCTTAACTGTGGACTCCTGTTCTGAGAACCAAGAGCCAGGATATTGTAC | | | | |
| TGTCAGTAATGTGGCAGTTTCAGATGACTGGACTCTTGATGTTCAGCCAAATAGAGTTACAGTTGGAG | | | | |
| GTATCAGATCTCTAGAACCAATCCTTCAGAGAAGAGGACACGTGGAAAGCCATGATTTTGTTGGGTGT | | | | |
| ATAATGGAGTTTGCAGTCAATGGAAGGCCTCTGGAACCCAGCCAAGCTTTGGCAGCACAAGGCATCCT | | | | |
| AGATCAGTATGGCGATTTTATTTCTTACTGTTTTAAAGAAAAAAAATGCAAAAAAGTATGCTTCACTG | | | | |
| TTACTCCTGACACTGCCTTATCATTAGAAGGCAAAGGGCGCTTGGACTACCACATGAGTCAGAATGAG | | | | |
| AAGCGGGAATATTTGTTAAGGCAAAGCTTACGAGGTGCCATGTTGGAGCCTTTTGGTGTGAACAGTCT | | | | |
| GGAAGTAAAATTTAGGACCAGAAGCGAGAATGGCGTTTTAATCCATATCCAAGAAAGCAGCAATTACA | | | | |
| CTACTGTGAAGGGAATGTGTGAATCTTCAGTCAATTACTGTGAATGCAACCCCTGCTTTAATGGTGGT | | | | |
| TCCTGCCAAAGTGGTGTGGATTCTTATTATTGTCATTGTCCATTTGGTGTCTTTGGAAAACACTGCGA | | | | |
| GTTGAACAGTTATGGATTTGAGGAGTTATCATACATGGAATTTCCAAGCTTGGACCCCAATAACAACT | | | | |
| ATATTTATGTCAAATTTGCCACGATTAAAAGTCATGCCTTATTGCTTTACAACTATGACAACCAGACA | | | | |
| GGCGACCGGGCTGAGTTTTTGGCCCTTGAAATTGCCGAAGAAAGACTAAGATTCTCTTATAATTTAGG | | | | |
| CAGTGGTACATATAAGCTCACCACCATGAAGAAGGTGTCAGATGGACATTTTCACACTGTGATTGCCA | | | | |
| GGAGAGCAGGAATGACTCTTGATGTTCAGCCAAATAGAGTTACAGTTGGAGGTATCAGATCTCTAGAA | | | | |
| CCAATCCTTCAGAGAAGAGGACACGTGGAAAGCCATGATTTTGTTGGGTGTATAATGGAGTTTGCAGT | | | | |
| CAATGGAAGGCCTCTGGAACCCAGCCAAGCTTTGGCAGCACAAGGCATCCTAGATCAGTATGGCGATT | | | | |
| TTATTTCTTACTGTTTTAAAGAAAAAAAATGCAAAAAGTATGCTTCACTTGGCCTCCATCTCGGGAAG | | | | |
| CATAGCTTGGCCTCCATCTCAAAAACAGATCCCTCAGTGAAGATTGGCTGCCGTGGCCCGAACATTTG | | | | |
| TGCCAGCAACCCCTGCTGGGGTGATTTGCTGTGCATTAATCAGTGGTATGCCTACAGGTGTGTCCCTC | | | | |
| CTGGGGACTGTGCCTCCCACCCGTGCCAGAATGGTGGCAGCTGTGAGCCAGGCCTGCACTCCGGCTTC | | | | |
| ACCTGTAGCTGCCCAGACTCGCACACGGGAAGGACCTGTGAGATGGTGGTGGCCTGTCTTGGCGTCCT | | | | |
| CTGTCCTCAGGGGAAGGTGTGCAAAGCTGGAAGTCCTGCGGGGCATGTCTGTGTTCTGAGTCAGGGCC | | | | |
| CTGAAGAGATCTCTCTGCCTTTGTGGGCTGTGCCTGCCATCGTGGGCAGCTGCGCAACCGTCTTGGCC | | | | |
| CTCCTGGTCCTTAGCCTGATCCTGTGTAACCAGTGCAGGGGGAAGAAGGCCAAAAATCCCAAAGAGGA | | | | |
| GAAGAAACCGAAGGAGAAGAAGAAAAAGGGAAGTGAGAACGTTGCTTTTGATGACCCTGACAATATCC | | | | |
| CTCCCTATGGGGATGACATGACTGTGAGGAAGCAGCCTGAAGGGAACCCAAAACCAGATATCATTGAA | | | | |
| AGGGAAAACCCCTACCTTATCTATGATGAAACTGATATTCCTCACAACTCAGAAACCATCCCCAGCGC | | | | |
| CCCTTTGGCATCTCCAGAGCAGGAGATAGAGCACTATGACATTGACAACGCCAGCAGCATCGCCCCTT | | | | |
| CGGATGCAGACATCATTCAACACTACAAGCAGTTCCGCAGCCACACACCAAAATTTTCAATCCAGAGG | | | | |
| CACAGTCCCCTAGGCTTTGCAAGGCAATCCCCCATGCCCTTAGGAGCAAGCAGTTTGACTTACCAGCC | | | | |
| TTCATATGGTCAAGGTTTGAGAACCAGCTCCCTAAGCCACTCAGCATGCCCAACTCCCAACCCTCTGT | | | | |
| CTCGACACAGTCCAGCCCCTTTCTCCAAATCTTCTACGTTCTATAGAAACAGCCCAGCAAGGGAATTG | | | | |
| CATCTTCCTATAAGGGATGGTAATACTTTGGAAATGCATGGTGACACCTGCCAACCTGGCATTTTCAA | | | | |
| CTATGCCACAAGGCTGGGAAGGAGAAGCAAGAGTCCTCAGGCCATGGCATCACATGGTTCTAGACCAG | | | | |
| GGAGTCGCCTAAAGCAGCCGATTGGGCAGATTCCACTGGAATCTTCTCCTCCAGTCGGACTTTCTATT | | | | |
| GAAGAAGTGGAGAGGCTCAACACACCTCGCCCTAGAAACCCAAGTATCTGCAGTGCAGACCATGGGAG | | | | |
| GTCTTCTTCAGAGGAGGACTGCAGAAGGCCACTGTCTAGAACAAGGAATCCAGCGGATGGCATTCCAG | | | | |
| CTCCAGAATCCTCTTCTGATAGTGACTCCCATGAATCTTTCACTTGCTCAGAAATGGAATATGACAGG | | | | |
| GAGAAGCCAATGGTATATACTTCCAGAATGCCCAAATTATCTCAAGTCAATGAATCTGATGCAGATGA | | | | |
| TGAAGATAATTATGGAGCCAGACTGAAGCCTCGAAGGTACCACGGTCGCAGGGCCGAGGGAGGACCTG | | | | |
| TGGGCACCCAGGCAGCAGCACCAGGCACTGCTGACAACACACTGCCCATGAAGCTAGGGCAGCAAGCA | | | | |
| GGGACTTTCAACTGGGACAACCTTTTGAACTGGGGCCCTGGCTTTGGCCATTATGTAGATGTTTTTAA | | | | |
| AGATTTGGCATCTCTTCCAGAAAAAGCAGCAGCAAATGAAGAAGGCAAAGCTGGGACAACTAAACCAG | | | | |
| TCCCCAAAGATGGGGAAGCAGAACAGTATGTGTGAAGTTTATGTACTGGCACTATAAAATATAAAAAC | | | | |
| AAGAAATAATACTCAAACCATTGTAAAGTTGCTGACTAGGTTGGGTCACATTTGAAAAACAGGCCAGT | | | | |
| ATGGACTAGTGGTGGAGGGAAAACTTTAAAAATAATAACCACAATGCTGCTGAAACAGACTCACAACA | | | | |
| ACTCTTAATTTAAACATGTGTGGTTGAATTC | | | | |
| | NOV57a, CG92813-01 | SEQ ID NO: 1132 | 4961 aa | MW at 543673.9kD |
| | Protein Sequence | | | |

MDLAPDRATGRPWLPLHTLSVSQLLRVFWLLSLLPGQAWVHGAEPRQVFQVLEEQPPGTLVGTIQTRP
GFTYRLSESHALFAINSSTGALYTTSTIDRESLPSDVINLVVLSSAPTYPTEVRVLVRDLNDNAPVFP
DPSIVVTFKEDSSSGRQVILDTATDSDIGSNGVDHRSYRIIRGNEAGRFRLDINLNPSGEGAFLHLVS
KGGLDREVTPQYQLLVEVEDKGEPKRRGYLQVNVTVQDINDNPPVFGSSHYQAGVPEDAVVGSSVLQV
AAADADEGTNADIRYRLQDEGTPFQMDPETGLITVREPLDFEARRQYSLTVQAMDRGVPSLTGRAEAL
IQLLDVNDNDPVVKFRYFPATSRYASVDENAQVGTVVALLTVTDADSPAANGNISVQILGGNEQRHFE
VQSSKVPNLSLIKVASALDRERIPSYNLTVSVSDNYGAPPGAAVQARSSVASLVIFVNDINDHPPVFS
QQVYRVNLSEEAPPGSYVSGISATDGDSGLNANLRYSIVSGNGLGWFHISEHSGLVTTGSSGGLDREL
ASQIVLNISARDQGVHPKVSYAQLVVTLLDVNDEKPVFSQPEGYDVSVVENAPTGTELLMLRATDGDL
GDNGTVRFSLQEAETDRRSFRLDPVSGRLSTISSLDREEQAFYSLLVLATDLGSPPQSSMARINVSLL
DINDNSPVFYPVQYFAHIKENEPGGSYITTVSATDPDLGTNGTVKYSISAGDRSRFQVNAQSGVISTR
MALDREEKTAYQLQIVATDGGNLQSPNQAIVTITVLDTQDNPPVFSQVAYSFVVFENVALGYHVGSVS
ASTMDLNSNISYLITTGDQKGMFAINQVTGQLTTANVIDREEQSFYQLKVVASGGTVTGDTMVNITVK
DLNDNSPHFLQAIESVNVVENWQAGHSIFQAKAVDPDEGVNGMVLYSLKQNPKNLFAINEKNGTISLL
GPLDVHAGSYQIEILASDMGVPQLSSSVILTVYVHDVNDNSPVFDQLSYEVTLSESEPVNSRFFKVQA
SDKDSGANDGQLYIKSELDRELQDRYVLMVVASDRAVEPLSATVNVTVILEDVNDNRPLFNSTNYTFY
FEEEQRAGSFVGKVSAVDKDFGPNGEVRYSFEMVQPDFELHAISGEITNTHQFDRESLMRRRGTAVFS
FTVIATDQGIPQPLKDQATVHVYMKDINDNAPKFLKDFYQATISESAANLTQVLRVSASDVDEGNNGL
IHYSIIKGNEERQFAIDSTSGQVTLIGKLDYEATPAYSLVIQAVDSGTIPLNSTCTLNIDILDENDNT
PSFLKSTLFVDVLENMRIGELVSSVTATDSDSGDNVDLYYSITGTNNHGTFSISPNTGSIFLAKKLDF
ETQSLYKLNITAKDQGRPPRSSTMSVVIHVRDFNDNPPSFPPGDIFKSIVENIPIGTSVISVTAHDPD
ADINGQLSYTIIQQMPRGNHFTIDEVKGTIYTNAEIDREFANLFELTVKANDQAVPIETRRYALKNVT
ILVTDLNDNVPMFISQNALAADPSAVIGSVLTTIMAADPDEGANGEIEYEIINGDTDTFIVDRYSGDL
RVASALVPSQLIYNLIVSATDLGPERRKSTTELTIILQGLDGPVFTQPKYITILKEGEPIGTNVISIE
AASPRGSEAPVEYYIVSVRCEEKTVGRLFTIGRHTGIIQTAAILDREQGACLYLVDVYAIEKSTAFPR
TQRAEVETTLQDINDNPPVFPTDMLDLTVEENIGDGSKIMQLTAMDADEVQMLSSHTLSLVGSLVAAI
LATDDDSGVNGEITYIVNEDDEDGIFFLNPITGVFNLTRLLDYEVQQYYILTVRAEDGGGQFTTIRVY
FNILDVNDNPPIFSLNSYSTSLMENLPVGSTVLVFNVTDADMMKAEIKMFFETSENKDTTYQNLWDTF
KAVCRGKFIALNAHKRKQERSKIDTLTSQLKELEKQEQTHSKASRRQEITKIRAELKDIETQKTLQKI
NESRSWFFERINKIDRPLARLIKKKTEKNQIDAIKNDKGDITIDPTEIQTTIREYCKHLYANKLENLE
EMDKFLDTYTLPRLNQEEVESLNRPITDSETVATINSLPTKKSPGPDGFTAEFYQMITTPVFAQALYK
VEINENTLTGTDIIQVFAADGDEGTNGQVRYGIVNGNTNQEFRIDSVTGAITVAKPLDREKTPTYHLT
VQATDRGSTPRTDTSTVSIVLLDINDFVPVFELSPYSVNVPENLGTLPRTILQTASPCVRFASASKAY
FTTIPEDAPTGTDVLLVNASDADASKNAVISYRIIGGNSQFTINPSTGQIITSALLDRETKDNYTLVV
VCSDAGSPEPLSSSTSVLVTVTDVHDNPPRFQHHPYVTHIPSPTLPGSFVFAVTVTDADIGPNSELHY
SLSGRNSEKFHIDPLRGAIMAAGPLNGASEVTFSVHVKDGGSFPKTDSTTVTVRFVNKADFPKVRAKE
QTFMFPENQPVSSLVTTTTGSSLRGEPMSYYIASGNLGNTFQIDQLTGQVSISQPLDFEKIQKYVVWI
EARDGGFPPFSSYEKLDITVLDVNDNAPIFKEDPFISEILENLSPRKILTVSAMDKDSGPNGQLDYEI
VNGNMENSFSINHATGEIRSVRPLDREKVSHYVLTIKSSDKGSPSQSTSVKVMINILDENDNAPRFSQ
IFSAHVPENSPLGYTVTRVTTSDEDIGINAISRYSIMDASLPFTINPSTGDIVISRPLNPEDTDRYRI
RVSAHDSGWTVSTDVTIFVTDTNDNAPRFSRTSYYLDCPELTEIGSKVTQVFATDPDEGSNGQVFYFI
KSQSEYFRINATTGEIFNKQILKYQNVTGFSNVNINRHSFIVTSSDRGKPSLISETTVTINIVDSNDN
APQFLKSKYFTPVTKNVKVGTKLIRVTAIDDKDFGLNSEVEYFISNDNHLGKFKLDNDTGWISVASSL

[0683] Further analysis of the NOV57a protein yielded the following properties shown in Table 57C.

TABLE 57C
Protein Sequence Properties NOV57a

| | |
|---|---|
| SignalP analysis: | Cleavage site between residues 43 and 44 |
| PSORT II analysis: | |

| PSG: | a new signal peptide prediction method | |
|---|---|---|
| | N-region: | length 11; pos. chg 2; neg. chg 2 |
| | H-region: | length 14; peak value 5.01 |
| | PSG score: | 0.61 |

| | |
|---|---|
| GvH: | von Heijne's method for signal seq. recognition |
| | GvH score (threshold: −2.1): −0.05 |
| | possible cleavage site: between 42 and 43 |

>>> Seems to have a cleavable signal peptide (1 to 42)

| ALOM: | Klein et al's method for TM region allocation | | |
|---|---|---|---|
| | Init position for calculation: 43 | | |
| | Tentative number of TMS(s) for the threshold 0.5: 4 | | |
| | INTEGRAL | Likelihood = | Transmembrane 1753-1769 |
| | | −0.59 | |
| | INTEGRAL | Likelihood = | Transmembrane 2193-2209 |
| | | 0.26 | |
| | INTEGRAL | Likelihood = | Transmembrane 3837-3853 |
| | | −11.25 | |
| | INTEGRAL | Likelihood = | Transmembrane 4488-4504 |
| | | −9.08 | |

| | |
|---|---|
| PERIPHERAL | Likelihood = 1.38 (at 1566) |

| | |
|---|---|
| | ALOM score: −11.25 (number of TMSs: 4) |
| MTOP: | Prediction of membrane topology (Hartmann et al.) |
| | Center position for calculation: 21 |
| | Charge difference: −0.5 C(1.0)-N(1.5) |
| | N >= C: N-terminal side will be inside |

>>> membrane topology: type 3a

| MITDISC: | discrimination of mitochondrial targeting seq | | | |
|---|---|---|---|---|
| | R content: | 0 | Hyd Moment(75): | 8.27 |
| | Hyd Moment(95): | 10.66 | G content: | 0 |
| | D/E content: | 2 | S/T content: | 0 |

| | |
|---|---|
| | Score: −6.21 |
| Gavel: | prediction of cleavage sites for mitochondrial preseq |
| | cleavage site motif not found |

NUCDISC: discrimination of nuclear localization signals

| | |
|---|---|
| | pat4: PKRR (4) at 228 |
| | pat4: HKRK (3) at 1918 |
| | pat4: KKPK (4) at 4521 |
| | pat4: KKKK (5) at 4526 |
| | pat4: KPRR (4) at 4869 |
| | pat7: PKRRGYL (5) at 228 |
| | pat7: PERRKST (5) at 1588 |
| | pat7: PKEKKKK (5) at 4523 |
| | bipartite: KKTGQIYVSGILDRKKE at 3227 |
| | bipartite: KKAKNPKEEKKPKEKKK at 4512 |
| | content of basic residues: 8.4% |
| | NLS Score: 3.22 |
| KDEL: | ER retention motif in the C-terminus: none |

ER Membrane Retention Signals: none
SKL: peroxisomal targeting signal in the C-terminus: none
PTS2: 2nd peroxisomal targeting signal: found
KIDTLTSQL at 1926
VAC: possible vacuolar targeting motif: found
TLPI at 3349
RNA-binding motif: none
Actinin-type actin-binding motif:

type 1: none
type 2: none

NMYR: N-myristoylation pattern: none
Prenylation motif: none
memYQRL: transport motif from cell surface to Golgi: none
Tyrosines in the tail: none
Dileucine motif in the tail: none
checking 63 PROSITE DNA binding motifs: none
checking 71 PROSITE ribosomal protein motifs: none
checking 33 PROSITE prokaryotic DNA binding motifs: none

| | |
|---|---|
| NNCN: | Reinhardt's method for Cytoplasmic/Nuclear discrimination |
| | Prediction: cytoplasmic |
| | Reliability: 55.5 |
| COIL: | Lupas's algorithm to detect coiled-coil regions |
| 1912 I | 0.91 |
| 1913 A | 0.91 |
| 1914 L | 0.91 |
| 1915 N | 0.91 |
| 1916 A | 0.97 |
| 1917 H | 0.98 |
| 1918 K | 1.00 |
| 1919 R | 1.00 |
| 1920 K | 1.00 |
| 1921 Q | 1.00 |
| 1922 E | 1.00 |
| 1923 R | 1.00 |
| 1924 S | 1.00 |
| 1925 K | 1.00 |
| 1926 I | 1.00 |
| 1927 D | 1.00 |
| 1928 T | 1.00 |
| 1929 L | 1.00 |
| 1930 T | 1.00 |
| 1931 S | 1.00 |
| 1932 Q | 1.00 |
| 1933 L | 1.00 |
| 1934 K | 1.00 |
| 1935 E | 1.00 |
| 1936 L | 1.00 |
| 1937 E | 1.00 |
| 1938 K | 1.00 |
| 1939 Q | 1.00 |
| 1940 E | 1.00 |
| 1941 Q | 1.00 |
| 1942 T | 1.00 |
| 1943 H | 1.00 |
| 1944 S | 1.00 |
| 1945 K | 1.00 |
| 1946 A | 0.98 |
| 1947 S | 0.97 |
| 1948 R | 0.96 |
| 1949 R | 0.96 |
| 1950 Q | 0.96 |
| 1951 E | 0.96 |
| 1952 I | 0.92 |
| 1953 T | 0.73 |
| 1954 K | 0.59 |
| | total: 43 residues |

Final Results (k = 9/23):

```
47.8%: endoplasmic reticulum
21.7%: nuclear
13.0%: mitochondrial
  4.3%: vacuolar
  4.3%: Golgi
  4.3%: plasma membrane
  4.3%: vesicles of secretory system
```

>> prediction for CG92813-01 is end (k = 23)

[0684] A search of the NOV57a protein against the Geneseq database, a proprietary database that contains sequences published in patents and patent publication, yielded several homologous proteins shown in Table 57D.

TABLE 57D
Geneseq Results for NOV57a

| | | NOV57a | Identities/ | | |
|---|---|---|---|---|---|
| | | Residues/ | Similarities for | | |
| Geneseq | Protein/Organism/Length | Match | the Matched | | Expect |
| Identifier | [Patent #, Date] | Residues | Region | | Value |
| ABU12072 | Human NOV17a CG92813-01 protein | 1 . . . 4961 | 4892/4961 | (98%) | 0.0 |
| | SEQ ID 64 - Homo sapiens, 4903 aa. | 1 . . . 4903 | 4896/4961 | (98%) | |
| | [WO200281625-A2, 17-OCT-2002] | | | | |
| ABB59831 | Drosophila melanogaster polypeptide | 49 . . . 1878 | 748/1932 | (38%) | 0.0 |
| | SEQ ID NO 6285 - Drosophila | 71 . . . 1951 | 1066/1932 | (54%) | |
| | melanogaster, 5147 aa. | | | | |
| | [WO200171042-A2, 27-SEP-2001] | | | | |
| AAO26789 | Human cadherin (CAD) protein, SEQ | 364 . . . 3239 | 839/3033 | (27%) | 0.0 |
| | ID No 12 - Homo sapiens, 3354 aa. | 39 . . . 2911 | 1324/3033 | (42%) | |
| | [WO200299042-A2, 12-DEC-2002] | | | | |
| AAO26793 | Human cadherin (CAD) protein, SEQ | 5 . . . 1877 | 621/1950 | (31%) | 0.0 |
| | ID No 16 - Homo sapiens, 3298 aa. | 12 . . . 1883 | 925/1950 | (46%) | |
| | [WO200299042-A2, 12-DEC-2002] | | | | |
| ABB05430 | Human dachsous protein SEQ ID | 5 . . . 1877 | 621/1950 | (31%) | 0.0 |
| | NO: 2 - Homo sapiens, 3298 aa. | 12 . . . 1883 | 925/1950 | (46%) | |
| | [JP2001327295-A, 27-NOV-2001] | | | | |

[0685] In a BLAST search of public sequence databases, the NOV57a protein was found to have homology to the proteins shown in the BLASTP data in Table 57E.

TABLE 57E
Public BLASTP Results for NOV57a

| | | NOV57a | Identities/ | | |
|---|---|---|---|---|---|
| Protein | | Residues/ | Similarities for | | |
| Accession | | Match | the Matched | | Expect |
| Number | Protein/Organism/Length | Residues | Portion | | Value |
| P33450 | Cadherin-related tumor suppressor | 49 . . . 1878 | 748/1932 | (38%) | 0.0 |
| | precursor (Fat protein) - Drosophila | 71 . . . 1951 | 1066/1932 | (54%) | |
| | melanogaster (Fruit fly), 5147 aa. | | | | |
| IJFFTM | cadherin-related tumor suppressor | 49 . . . 1878 | 744/1932 | (38%) | 0.0 |
| | precursor - fruit fly (Drosophila | 71 . . . 1951 | 1065/1932 | (54%) | |
| | melanogaster), 5147 aa. | | | | |
| Q8CD68 | Hypothetical ATP/GTP-binding site | 4515 . . . 4961 | 422/448 | (94%) | 0.0 |
| | motif A - Mus musculus (Mouse), | 3 . . . 448 | 430/448 | (95%) | |
| | 448 aa. | | | | |
| Q96JQ0 | Protocadherin 16 precursor | 5 . . . 1877 | 621/1950 | (31%) | 0.0 |
| | (Cadherin 19) (Cadherin fibroblast | 12 . . . 1883 | 925/1950 | (46%) | |
| | 1) - Homo sapiens (Human), 3298 | | | | |
| | aa. | | | | |
| Q8BM82 | Hypothetical cadherin domain | 1384 . . . 1900 | 393/518 | (75%) | 0.0 |
| | containing protein - Mus musculus | 1 . . . 490 | 420/518 | (80%) | |
| | (Mouse), 575 aa. | | | | |

[0686] PFam analysis predicts that the NOV57a protein contains the domains shown in the Table 57F.

TABLE 57F
Domain Analysis of NOV57a

| | | Identities/ | | |
|---|---|---|---|---|
| Pfam | NOV57a | Similarities for | | Expect |
| Domain | Match Region | the Matched Region | | Value |
| cadherin | 47 . . . 126 | 19/107 | (18%) | 0.018 |
| | | 59/107 | (55%) | |
| cadherin | 140 . . . 241 | 35/113 | (31%) | 6.6e−15 |
| | | 77/113 | (68%) | |
| cadherin | 255 . . . 344 | 42/107 | (39%) | 4.5e−28 |
| | | 75/107 | (70%) | |
| cadherin | 363 . . . 466 | 44/113 | (39%) | 3.2e−23 |
| | | 79/113 | (70%) | |
| cadherin | 480 . . . 573 | 37/109 | (34%) | 9e−25 |
| | | 75/109 | (69%) | |
| cadherin | 588 . . . 680 | 46/108 | (43%) | 1.2e−26 |
| | | 76/108 | (70%) | |
| cadherin | 694 . . . 784 | 43/107 | (40%) | 1.5e−26 |
| | | 68/107 | (64%) | |
| cadherin | 798 . . . 884 | 33/107 | (31%) | 5.7e−18 |
| | | 66/107 | (62%) | |
| cadherin | 898 . . . 987 | 32/107 | (30%) | 7.5e−18 |
| | | 65/107 | (61%) | |
| cadherin | 1001 . . . 1071 | 24/107 | (22%) | 1.2e−08 |
| | | 58/107 | (54%) | |
| cadherin | 1085 . . . 1181 | 34/111 | (31%) | 7.6e−14 |
| | | 71/111 | (64%) | |
| cadherin | 1195 . . . 1286 | 39/107 | (36%) | 5e−27 |
| | | 76/107 | (71%) | |
| cadherin | 1300 . . . 1391 | 42/107 | (39%) | 5e−27 |
| | | 71/107 | (66%) | |
| cadherin | 1405 . . . 1500 | 38/108 | (35%) | 6.1e−19 |
| | | 73/108 | (68%) | |
| cadherin | 1506 . . . 1602 | 30/114 | (26%) | 2.3e−12 |
| | | 71/114 | (62%) | |
| cadherin | 1614 . . . 1711 | 28/112 | (25%) | 0.0069 |
| | | 63/112 | (56%) | |
| cadherin | 1754 . . . 1840 | 31/107 | (29%) | 2.4e−13 |
| | | 64/107 | (60%) | |
| cadherin | 2107 . . . 2198 | 44/107 | (41%) | 4.7e−31 |
| | | 76/107 | (71%) | |
| cadherin | 2244 . . . 2334 | 45/107 | (42%) | 2.6e−28 |
| | | 73/107 | (68%) | |
| cadherin | 2348 . . . 2436 | 33/107 | (31%) | 2.8e−12 |
| | | 66/107 | (62%) | |
| cadherin | 2449 . . . 2537 | 37/107 | (35%) | 4e−11 |
| | | 67/107 | (63%) | |
| cadherin | 2551 . . . 2641 | 36/107 | (34%) | 1.2e−25 |
| | | 72/107 | (67%) | |
| cadherin | 2654 . . . 2740 | 38/107 | (36%) | 2.7e−17 |
| | | 64/107 | (60%) | |
| cadherin | 2754 . . . 2851 | 32/116 | (28%) | 4e−16 |
| | | 75/116 | (65%) | |
| cadherin | 2865 . . . 2957 | 41/107 | (38%) | 1.26-15 |
| | | 68/107 | (64%) | |
| cadherin | 2971 . . . 3062 | 36/107 | (34%) | 3.2e−26 |
| | | 75/107 | (70%) | |
| cadherin | 3076 . . . 3164 | 36/108 | (33%) | 2.9e−21 |
| | | 67/108 | (62%) | |
| cadherin | 3180 . . . 3273 | 33/107 | (31%) | 1.7e−16 |
| | | 71/107 | (66%) | |
| cadherin | 3286 . . . 3378 | 37/107 | (35%) | 4.2e−28 |
| | | 79/107 | (74%) | |
| cadherin | 3390 . . . 3482 | 38/109 | (35%) | 7.7e−22 |
| | | 76/109 | (70%) | |
| EGF | 3743 . . . 3774 | 18/47 | (38%) | 2.2e−08 |
| | | 25/47 | (53%) | |
| EGF | 3781 . . . 3812 | 15/47 | (32%) | 9.2e−05 |
| | | 25/47 | (53%) | |
| laminin_G | 3890 . . . 4033 | 49/158 | (31%) | 6.4e−16 |
| | | 101/158 | (64%) | |
| EGF | 4148 . . . 4179 | 16/47 | (34%) | 0.014 |
| | | 24/47 | (51%) | |
| laminin_G | 4208 . . . 4322 | 46/156 | (29%) | 9e−05 |
| | | 85/156 | (54%) | |
| EGF | 4410 . . . 4442 | 16/47 | (34%) | 3.1e−06 |
| | | 26/47 | (55%) | |

### Example 58

[0687] The NOV58 clone was analyzed, and the nucleotide and encoded polypeptide sequences are shown in Table 58A.

TABLE 58A
NOV58 Sequence Analysis

| | | |
|---|---|---|
| NOV58a, CG93387-05 | SEQ ID NO:1143 | 5432 bp |
| DNA Sequence | ORF Start: ATG at 187 | ORF Stop: TAA at 3991 |

GGTGCCGAGCACTCCGGACTCTACGTGAACAACAACGGGATCATCTCCTTCCTGAAGGAGGTTTCTCA
GTTCACCCCAGTGGCCTTCCCCATTGCCAAGGACCGCTGCGTGGTGGCAGCCTTCTGGGCAGATGTGG
ACAACCGGCGTGCAGGCGACGTGTACTACCGGGAGGCCACCGACCCAGCCATGCTGCGCCGAGCCACG
GAGGACGTCAGGCACTACTTCCCCGAGCTCCTGGACTTCAATGCCACCTGGGTTTTTGTTGCCACCTG
GTACCGAGTGACCTTCTTTGGAGGCAGTTCCTCATCCCCTGTCAACACATTCCAGACTGTGCTCATCA
CAGACGGCAAGCTCTCCTTCACCATCTTCAACTATGAGTCCATCGTGTGGACCACAGGCACACACGCC
AGCAGCGGGGGCAACGCCACTGGCCTCGGGGGCATCGCAGCCCAGGCTGGCTTCAACGCAGGCGATGG
GCAGCGTTACTTCAGTATCCCCGGCTCGCGCACAGCAGACATGGCCGAGGTGGAGACCACCACCAACG
TGGGTGTGCCCGGGCGCTGGGCGTTCAGAATCGATGATGCCCAGGTGCGCGTGGGGGGCTGCGGCCAT
ACAACGTCCGTGTGCCTGGCCCTGCGCCCCTGCCTCAACGGCGGCAAGTGCATCGACGACTGCGTCAC
GGGCAACCCCTCCTACACCTGCTCCTGCCTCTCGGGCTTCACGGGGCGGAGGTGCCACCTGGACGTGA
ACGAATGTGCCTCCCAGCCCTGTCAGAATGGTGGGACCTGTACTCACGGCATCAACAGTTTCCGCTGC
CAGTGCCCGGCTGGCTTTGGGGGACCCACCTGTGAGACAGCCCAATCCCCCTGTGACACCAAAGAGTG
TCAACATGGTGGCCAGTGCCAGGTGGAGAACGGCTCTGCGGTGTGTGTGTGCCAGGCCGGATACACCG
GAGCAGCCTGCGAGATGGATGTGGACGACTGCAGCCCTGACCCCTGCCTGAATGGAGGCTCTTGTGTT
GACCTAGTGGGGAATTACACCTGCTTGTGTGCCGAGCCCTTCAAGGGACTTCGCTGTGAGACAGGAGA
CCATCCAGTGCCAGACGCCTGCCTCTCGGCCCCTTGCCACAATGGGGGCACCTGTGTGGATGCGGACC
AGGGCTACGTGTGCGAGTGCCCCGAAGGCTTCATGGGCCTGGACTGCAGGGAGAGAGTCCCCGATGAC
TGTGAGTGCCGCAACGGAGGCAGATGCCTGGGCGCCAACACCACCCTCTGCCAGTGCCCCCTGGGATT
CTTTGGGCTTCTCTGTGAATTTGAAATCACAGCCATGCCCTGCAACATGAACACACAGTGCCCAGATG
GGGGCTACTGCATGGAGCACGGCGGGAGCTACCTCTGCGTCTGCCACACCGACCACAATGCCAGCCAC
TCCCTGCCATCACCCTGCGACTCGGACCCCTGCTTCAACGGAGGCTCCTGCGATGCCCATGACGACTC
CTACACCTGCGAGTGCCCGCGCGGGTTCCACGGCAAGCACTGCGAGAAAGCCCGGCCACACCTGTGCA
GCTCAGGGCCCTGCCGGAACGGGGGCACGTGCAAGGAGGCGGGCGGCGAGTACCACTGCAGCTGCCCC
TACCGCTTCACTGGGAGGCACTGTGAGATCGGGAAGCCAGACTCGTGTGCCTCTGGCCCCTGTCACAA
CGGCGGCACCTGCTTCCACTACATTGGCAAATACAAGTGTGACTGTCCCCCAGGCTTCTCCGGGCGGC
ACTGCGAGATAGCCCCCTCCCCCTGCTTCCGGAGCCCGTGTGTGAATGGGGGCACCTGCGAGGACCGG
GACACGGATTTCTTCTGCCACTGCCAAGCAGGGTACATGGGACGCCGGTGCCAGGCAGAGGTGGACTG
CGGCCCCCCGGAGGAGGTGAAGCACGCCACACTGCGCTTCAACGGCACGCGGCTGGGCGCGGTGGCCC
TGTATGCATGTGACCGTGGCTACAGCCTGAGCGCCCCCAGCCGCATCCGGGTCTGCCAGCCACACGGT
GTCTGGAGTGAGCCTCCCCAGTGCCTTGAAATCGATGAGTGCCGGTCTCAGCCGTGCCTGCATGGGGG
CTCTTGTCAGGACCGCGTTGCTGGGTACCTGTGCCTCTGCAGCACAGGCTATGAGGGCGCCCACTGTG
AGCTGGAGAGGGATGAGTGCCGAGCTCACCCGTGCAGAAATGGAGGGTCCTGCAGGAACCTCCCAGGG
GCCTATGTCTGCCGGTGCCCTGCAGGCTTCGTTGGAGTCCACTGTGAGACAGAGGTGGACGCCTGCGA
CTCCAGCCCCTGCCAGCATGGAGGCCGGTGTGAGAGCGGCGGCGGGGCCTACCTGTGCGTCTGCCCAG
AGAGCTTCTTCGGCTACCACTGCGAGACAGTGAGTGACCCCTGCTTCTCCAGCCCCTGTGGGGGCCGT
GGCTATTGCCTGGCCAGCAACGGCTCCCACAGCTGCACCTGCAAAGTGGGCTACACGGGCGAGGACTG
CGCCAAAGAGCTCTTCCCACCGACGGCCCTCAAGATGGAGAGAGTGGAGGAGAGTGGGGTCTCTATCT
CCTGGAACCCGCCCAATGGTCCAGCCGCCAGGCAGATGCTTGATGGCTACGCGGTCACCTACGTCTCC
TCCGACGGCTCCTACCGCCGCACAGACTTTGTGGACAGGACCCGCTCCTCGCACCAGCTCCAGGCCCT
GGCGGCCGGCAGGGCCTACAACATCTCCGTCTTCTCAGTGAAGCGAAACAGTAACAACAAGAATGACA
TCAGCAGGCCTGCCGTGCTGCTGGCCCGCACGCGACCCCGCCCTGTGGAAGGCTTCGAGGTCACCAAT
GTGACGGCTAGCACCATCTCAGTGCAGTGGGCCCTGCACAGGATCCGCCATGCCACCGTCAGTGGGGT
CCGTGTGTCCATCCGCCACCCTGAGGCCCTCAGGGACCAGGCCACCGATGTGGACAGGAGTGTGGACA
GGTTCACCTTTAGGGCCCTGCTGCCTGGGAAGAGGTACACCATCCAGCTGACCACCCTCAGTGGGCTC
AGGGGAGAGGAGCACCCCACAGAGAGCCTGGCCACCGCGCCGACGCACGTGTGGACCCGGCCCCTGCC
CAGGCAGCTTGCTGGAGGCTTATGTCATCAATGTGACCACCAGCCAGAGCACCAAGAGCCGCTATGTC
CCCAACGGGAAGCTGGCGTCCTACACGGTGCGCGACCTGCTGCCGGGACGGCGGTACCAGCCCTCTGT
GATAGCAGTGCAGAGCACGGAGCTCGGGCCGCAGCAGCACCAGGGAGGACACCACCCTCGGGTGCTCA
AGAACAGACCGCCCCCGGCGCGCCTGCCGGAGCTGCGCCTGCTCAATGACCACAGCGCCCCCGAGACC
CCCACCCAGCCCCCCAGGTTCTCGGAGTTTGTGGACGGCAGAGGAAGAGTGAGCGCCAGGTTCGGTGG
CTCACCCAGCAAAGCAGCCACCGTGAGATCACAACCCACAGCCTCGGCGCAGCTCGAGAACATGGAGG
AAGCCCCCAAGCGGGTCAGCCCGGCCCTCCAGCTCCCTGAACACGGCAGCAAGGACATCGGAAACGTC
CCTGGCAACTGTTCAGAAAACCCCTGTCAGAACGGAGGCACTTGTGTGCCGGGCGCAGACGCCCACAG
CTGTGACTGCGGGCCAGGGTTCAAAGGCAGACGCTGCGAGCTCGCCTGTATAAAGGTGTCCCGCCCCT
GCACAAGGCTGTTCTCCGAGACAAAGGCCTTTCCAGTCTGGGAGGGAGGCGTCTGTCACCACGTGTAT
AAAAGAGTCTACCGAGTTCACCAAGACATCTGCTTCAAAGAGAGCTGTGAAAGCACAAGCCTCAAGAA
GACCCCAAACAGGAAACAAAGTAAGAGTCAGACACTGGAGAAATCTTAAGGATTTAAGACGTTCTTGT
TACACTCCACCAACCTCACGAGTTTCTAACACCCAGGAAGATGAGGTCTAAAAACTGGATGAAAAAGG
ACACCCTGAGAAAAGGTCCTAGCTGGAGTCAGTCCCCTCTGTGACCTCTCTCCTCAGGCCTCTAGAGG
ACAGATGGCCAGGCCTGTGCACACACCAGCCCACCCTGAGAGACCCCTCTGGGACCAACCACCTGTGA
GTCCTGCGATGCGTTTAAGCAGCCTGTGCCCTCACCCAAGCTGCAGTTCCTGAAGGTGTAGTCTGTGT
CTCTGCGGATGAGATGACAGCTCGCCATTCCCCGGAATCAGTGAGGCTGTCAGTCAGCCACGCTTCTG
CAGTATGCAGAAACCTGTTCTTAGACTCCAAAGCCAGAGAAAGAATTCTCCCTTCGAGGCCCAACAAA
TTGAGAAGGAACTGTGATGGACCACTTCCAAAACAGAGACGGGGGCAGGGGCTGAAGGGCAGAGACCA
GGTGATGTCAGAAGGAAAGCCGGGTTGCAGACACAGCCGCCCCTGCTCTGGTCCTCCAGCGTGTTTAT
GACGCTCGTGCAGGTCGACGAGCCATCCTATGGACTAGTTAACACTAAGGTGGAGTTCAGACTTTTTT
AGACAACGGCGCGACTGGCAGCCTTTCTCTATCAAGGGTCAGACGGTAAACGTTTTCAGCTTTGCAGA
CCAGAGGTCCCTGTGGCTACAGTAGCGCAGACACAGCCACAGGCATGTCATTGAATGGCTGCGGCTAT
GTTCCAATAAAAACTTATTTACAATAACAGGTGGTGGCCAAATTGGCCCATGGGCCTTATTTGGTGAA
CCCTGTTCTATGAGATCACCTAGGCTTCAGCCTTAAACAGTGGAAGCCATCCCCTGAATGACAAGTCA
CAAGGGTATCAAAGAAAGACCCCTGAATTTTCATGGAAAAAGCTATTCAGACCCCTGCTTGGAAAGCT
AAGGCACACTGCCACGAAGCAGCAAGGACGCCTTACAAGTCTCAGTGCAACAGAGATGGACACCTGGG
CTGGGCTGGACAATGTTTAAGGTTCCTTTTAGTCCATGACTCAAGTGATACTGTTTTAGGCTATCAGC
TAGTAAACACGATCTTAGACATCCCCATCTTTGTAAGCAGAACAGTACGGCACTTCACCACATCTGCT
TCCCACCATGCTTCTAAGCAGCTGTCTTCCCCCTGCTAATGTTACAACCAAAGCAGCCACCCCACCTC
CTCTCGTGTTGAGCCTCACGACCGCTGACCCAGCTGGAAAGCCAGCGCCCTGCCGCGTCACCCTGACT
CTGCTCAGAGCCAGCATTCCAGCCACAAAGAGGGCCTCCTTCCTTTCCTCTTTCATAAAAATGTTTTT
TGAAGAGTTAGAGTATATTTTAGGCTTTTTATCTTTATTAAAATTTCATGTGCATGTGTA

| | | | |
|---|---|---|---|
| NOV58a, CG93387-05 | SEQ ID NO:1144 | 1268 aa | MW at 136576.5 kD |
| Protein Sequence | | | |

MLRRATEDVRHYFPELLDFNATWVFVATWYRVTFFGGSSSSPVNTFQTVLITDGKLSFTIFNYESIVW
TTGTHASSGGNATGLGGIAAQAGFNAGDGQRYFSIPGSRTADMAEVETTTNVGVPGRWAFRIDDAQVR
VGGCGHTTSVCLALRPCLNGGKCIDDCVTGNPSYTCSCLSGFTGRRCHLDVNECASQPCQNGGTCTHG
INSFRCQCPAGFGGPTCETAQSPCDTKECQHGGQCQVENGSAVCVCQAGYTGAACEMDVDDCSPDPCL
NGGSCVDLVGNYTCLCAEPFKGLRCETGDHPVPDACLSAPCHNGGTCVDADQGYVCECPEGFMGLDCR
ERVPDDCECRNGGRCLGANTTLCQCPLGFFGLLCEFEITAMPCNMNTQCPDGGYCMEHGGSYLCVCHT
DHNASHSLPSPCDSDPCFNGGSCDAHDDSYTCECPRGFHGKHCEKARPHLCSSGPCRNGGTCKEAGGE
YHCSCPYRFTGRHCEIGKPDSCASGPCHNGGTCFHYIGKYKCDCPPGFSGRHCEIAPSPCFRSPCVNG
GTCEDRDTDFFCHCQAGYMGRRCQAEVDCGPPEEVKHATLRFNGTRLGAVALYACDRGYSLSAPSRIR
VCQPHGVWSEPPQCLEIDECRSQPCLHGGSCQDRVAGYLCLCSTGYEGAHCELERDECRAHPCRNGGS
CRNLPGAYVCRCPAGFVGVHCETEVDACDSSPCQHGGRCESGGGAYLCVCPESFFGYHCETVSDPCFS
SPCGGRGYCLASNGSHSCTCKVGYTGEDCAKELFPPTALKNERVEESGVSISWNPPNGPAARQMLDGY
AVTYVSSDGSYRRTDFVDRTRSSHQLQALAAGRAYNISVFSVKRNSNNKNDISRPAVLLARTRPRPVE
GFEVTNVTASTISVQWALHRIRHATVSGVRVSIRHPEALRDQATDVDRSVDRFTFRALLPGKRYTIQL
TTLSGLRGEEHPTESLATAPTHVWTRPLPPANLTAARVTATSAHVVWDAPTPGSLLEAYVINVTTSQS
TKSRYVPNGKLASYTVRDLLPGRRYQPSVIAVQSTELGPQQHQGGHHPRVLKNRPPPARLPELRLLND
HSAPETPTQPPRFSEFVDGRGRVSARFGGSPSKAATVRSQPTASAQLENNEEAPKRVSPALQLPEHGS
KDIGNVPGNCSENPCQNGGTCVPGADAHSCDCGPGFKGRRCELACIKVSRPCTRLFSETKAFPVWEGG
VCHHVYKRVYRVHQDICFKESCESTSLKKTPNRKQSKSQTLEKS

| | | |
|---|---|---|
| NOV58b, CG93387-01 | SEQ ID NO:1145 | 4401 bp |
| DNA Sequence | ORF Start: ATG at 187 | ORF Stop: TAA at 4051 |

GGTGCCGAGCACTCCGGACTCTACGTGAACAACAACGGGATCATCTCCTTCCTGAAGGAGGTTTCTCA
GTTCACCCCAGTGGCCTTCCCCATTGCCAAGGACCGCTGCGTGGTGGCAGCCTTCTGGGCAGATGTGC
ACAACCGGCGTGCAGGCGACGTGTACTACCGGGAGGCCACCGACCCAGCCATGCTGCGCCGAGCCACG
GAGGACGTCAGGCACTACTTCCCCGAGCTCCTGGACTTCAATGCCACCTGGGTTTTTGTTGCCACCTG
GTACCGAGTGACCTTCTTTGGAGGCAGTTCCTCATCCCCTGTCAACACATTCCAGACTGTGCTCATCA
CAGACGGCAAGCTCTCCTTCACCATCTTCAACTATGAGTCCATCGTGTGGACCACAGGCACACACGCC
AGCAGCGGGGGCAACGCCACTGGCCTCGGGGGCATCGCAGCCCAGGCTGGCTTCAACGCAGGCGATGG
GCAGCGTTACTTCAGTATCCCCGGCTCGCGCACAGCAGACATGGCCGAGGTGGAGACCACCACCAACG
TGGGTGTGCCCGGGCGCTGGGCGTTCAGAATCGATGATGCCCAGGTGCGCGTGGGGGGCTGCGGCCAT
ACAACGTCCGTGTGCCTGGCCCTGCGCCCCTGCCTCAACGGCGGCAAGTGCATCGACGACTGCGTCAC
GGGCAACCCCTCCTACACCTGCTCCTGCCTCTCGGGCTTCACGGGGCGGAGGTGCCACCTGGACGTGA
ACGAATGTGCCTCCCAGCCCTGTCAGAATGGTGGGACCTGTACTCACGGCATCAACAGTTTCCGCTGC
CAGTGCCCGGCTGGCTTTGGGGGACCCACCTGTGAGACAGCCCAATCCCCCTGTGACACCAAAGAGTG
TCAACATGGTGGCCAGTGCCAGGTGGAGAACGGCTCTGCGGTGTGTGTGTGCCAGGCCGGATACACCG
GAGCAGCCTGCGAGATGGATGTGGACGACTGCAGCCCTGACCCCTGCCTGAATGGAGGCTCTTGTGTT
GACCTAGTGGGGAATTACACCTGCTTGTGTGCCGAGCCCTTCAAGGGACTTCGCTGTGAGACAGGAGA
CCATCCAGTGCCAGACGCCTGCCTCTCGGCCCCTTGCCACAATGGGGGCACCTGTGTGGATGCGGACC
AGGGCTACGTGTGCGAGTGCCCCGAAGGCTTCATGGGCCTGGACTGCAGGGAGAGAGTCCCCGATGAC
TGTGAGTGCCGCAACGGAGGCAGATGCCTGGGCGCCAACACCACCCTCTGCCAGTGCCCCCTGGGATT
CTTTGGGCTTCTCTGTGAATTTGAAATCACAGCCATGCCCTGCAACATGAACACACAGTGCCCAGATG
GGGGCTACTGCATGGAGCACGGCGGGAGCTACCTCTGCGTCTGCCACACCGACCACAATGCCAGCCAC
TCCCTGCCATCACCCTGCGACTCGGACCCCTGCTTCAACGGAGGCTCCTGCGATGCCCATGACGACTC
CTACACCTGCGAGTGCCCGCGCGGGTTCCACGGCAAGCACTGCGAGAAAGCCCGGCCACACCTGTGCA
GCTCAGGGCCCTGCCGGAACGGGGGCACGTGCAAGGAGGCGGGCGGCGAGTACCACTGCAGCTGCCCC
TACCGCTTCACTGGGAGGCACTGTGAGATCGGGAAGCCAGACTCGTGTGCCTCTGGCCCCTGTCACAA
CGGCGGCACCTGCTTCCACTACATTGGCAAATACAAGTGTGACTGTCCCCCAGGCTTCTCCGGGCGGC
ACTGCGAGATAGCCCCCTCCCCCTGCTTCCGGAGCCCGTGTGTGAATGGGGGCACCTGCGAGGACCGG
GACACGGATTTCTTCTGCCACTGCCAAGCAGGGTACATGGGACGCCGGTGCCAGGCAGAGGTGGACTG
CGGCCCCCCGGAGGAGGTGAAGCACGCCACACTGCGCTTCAACGGCACGCGGCTGGGCGCGGTGGCCC
TGTATGCATGTGACCGTGGCTACAGCCTGAGCGCCCCCAGCCGCATCCGGGTCTGCCAGCCACACGGT
GTCTGGAGTGAGCCTCCCCAGTGCCTTGAAATCGATGAGTGCCGGTCTCAGCCGTGCCTGCATGGGGG
CTCTTGTCAGGACCGCGTTGCTGGGTACCTGTGCCTCTGCAGCACAGGCTATGAGGGCGCCCACTGTG
AGCTGGAGAGGGATGAGTGCCGAGCTCACCCGTGCAGAAATGGAGGGTCCTGCAGGAACCTCCCAGGG
CTCCAGCCCCTGCCAGCATGGAGGCCGGTGTGAGAGCGGCGGCGGGGCCTACCTGTGCGTCTGCCCAG
GCCTATGTCTGCCGGTGCCCTGCAGGCTTCGTTGGAGTCCACTGTGAGACAGAGGTGGACGCCTGCGA
AGAGCTTCTTCGGCTACCACTGCGAGACAGTGAGTGACCCCTGCTTCTCCAGCCCCTGTGGGGGCCGT
GGCTATTGCCTGGCCAGCAACGGCTCCCACAGCTGCACCTGCAAAGTGGGCTACACGGGCGAGGACTG
CGCCAAAGAGCTCTTCCCACCGACGGCCCTCAAGATGGAGAGAGTGGAGGAGAGTGGGGTCTCTATCT
CCTGGAACCCGCCCAATGGTCCAGCCGCCAGGCAGATGCTTGATGGCTACGCGGTCACCTACGTCTCC
TCCGACGGCTCCTACCGCCGCACAGACTTTGTGGACAGGACCCGCTCCTCGCACCAGCTCCAGGCCCT
GGCGGCCGGCAGGGCCTACAACATCTCCGTCTTCTCAGTGAAGCGAAACAGTAACAACAAGAATGACA
TCAGCAGGCCTGCCGTGCTGCTGGCCCGCACGCGACCCCGCCCTGTGGAAGGCTTCGAGGTCACCAAT
GTGACGGCTAGCACCATCTCAGTGCAGTGGGCCCTGCACAGGATCCGCCATGCCACCGTCAGTGGGGT
CCGTGTGTCCATCCGCCACCCTGAGGCCCTCAGGGACCAGGCCACCGATGTGGACAGGAGTGTGGACA
GGTTCACCTTTAGGGCCCTGCTGCCTGGGAAGAGGTACACCATCCAGCTGACCACCCTCAGTGGGCTC
AGGGGAGAGGAGCACCCCACAGAGAGCCTGGCCACCGCGCCGACGCACGTGTGGACCCGGCCCCTGCC
TCCAGCAAACCTGACCGCCGCCCGAGTCACTGCCACCTCTGCCCACGTGGTCTGGGATGCCCCGACTC
CAGGCAGCTTGCTGGAGGCTTATGTCATCAATGTGACCACCAGCCAGAGCACCAAGAGCCGCTATGTC
CCCAACGGGAAGCTGGCGTCCTACACGGTGCGCGACCTGCTGCCGGGACGGCGGTACCAGCCCTCTGT
GATAGCAGTGCAGAGCACGGAGCTCGGGCCGCAGCACAGCGAGCCCGCCCACCTCTACATCATCACCT
CCCCCAGGGATGGCGCTGACAGACGCTGGCACCAGGGAGGACACCACCCTCGGGTGCTCAAGAACAGA
CCGCCCCCGGCGCGCCTGCCGGAGCTGCGCCTGCTCAATGACCACAGCGCCCCCGAGACCCCCACCCA
GCCCCCCAGGTTCTCGGAGTTTGTGGACGGCAGAGGAAGAGTGAGCGCCAGGTTCGGTGGCTCACCCA
GCAAAGCAGCCACCGTGAGATCACAACCCACAGCCTCGGCGCAGCTCGAGAACATGGAGGAAGCCCCC
AAGCGGGTCAGCCCGGCCCTCCAGCTCCCTGAACACGGCAGCAAGGACATCGGAAACGTCCCTGGCAA
CTGTTCAGAAAACCCCTGTCAGAACGGAGGCACTTGTGTGCCGGGCGCAGACGCCCACAGCTGTGACT
GCGGGCCAGGGTTCAAAGGCAGACGCTGCGAGCTCGCCTGTATAAAGGTGTCCCGCCCCTGCACAAGG
CTGTTCTCCGAGACAAAGGCCTTTCCAGTCTGGGAGGGAGGCGTCTGTCACCACGTGTATAAAAGAGT
CTACCGAGTTCACCAAGACATCTGCTTCAAAGAGAGCTGTGAAAGCACAAGCCTCAAGAAGACCCCAA
ACAGGAAACAAAGTAAGAGTCAGACACTGGAGAAATCTTAAGAAAGAAGGAACAGGCAATGTAGAGAA
GCTGTCAAATGGTGGACTCCCAAACCGTTCCACCACTGCCTCAAAAAACATCTTGACCAGCAGAAGGT
GGAGCTCAATGAAGGGTCAAGAGCTCAGCGAAGGGTAACTAGGTGGAACTGAGAGAAACCACGTTCAC
AAACTGCGTAATGCGGACTTCCTGCCGCCCTGGAGACCCCTCAACTCTCTGTCCATGTAAGGCCCTTA
AAGAGATTCATAGGAACTTTGAGCATCCTTNAGATGTGAATATTGTTGGGGGCAGGATTGGGGGATAA
ATAGAAGGGAAGGCCACTCCACGAGTATCCCATGAACCTGGCCAGATCT

| | | | |
|---|---|---|---|
| NOV58b, CG93387-01 | SEQ ID NO:1146 | 1288 aa | MW at 138908.1 kD |
| Protein Sequence | | | |

MLRRATEDVRHYFPELLDFNATWVFVATWYRVTFFGGSSSSPVNTFQTVLITDGKLSFTIFNYESIVW
TTGTHASSGGNATGLGGIAAQAGFNAGDGQRYFSIPGSRTADMAEVETTTNVGVPGRWAFRIDDAQVR
VGGCGHTTSVCLALRPCLNGGKCIDDCVTGNPSYTCSCLSGFTGRRCHLDVNECASQPCQNGGTCTHG
INSFRCQCPAGFGGPTCETAQSPCDTKECQHGGQCQVENGSAVCVCQAGYTGAACEMDVDDCSPDPCL
NGGSCVDLVGNYTCLCAEPFKGLRCETGDHPVPDACLSAPCHNGGTCVDADQGYVCECPEGFMGLDCR
ERVPDDCECRNGGRCLGANTTLCQCPLGFFGLLCEFEITAMPCNMNTQCPDGGYCMEHGGSYLCVCHT
DHNASHSLPSPCDSDPCFNGGSCDAHDDSYTCECPRGFHGKHCEKARPHLCSSGPCRNGGTCKEAGGE
YHCSCPYRFTGRHCEIGKPDSCASGPCHNGGTCFHYIGKYKCDCPPGFSGRHCEIAPSPCFRSPCVNG
GTCEDRDTDFFCHCQAGYMGRRCQAEVDCGPPEEVKHATLRFNGTRLGAVALYACDRGYSLSAPSRIR
VCQPHGVWSEPPQCLEIDECRSQPCLHGGSCQDRVAGYLCLCSTGYEGAHCELERDECRAHPCRNGGS
CRNLPGAYVCRCPAGFVGVHCETEVDACDSSPCQHGGRCESGGGAYLCVCPESFFGYHCETVSDPCFS
SPCGGRGYCLASNGSHSCTCKVGYTGEDCAKELFPPTALKMERVEESGVSISWNPPNGPAARQMLDGY
AVTYVSSDGSYRRTDFVDRTRSSHQLQALAAGRAYNISVFSVKRNSNNKNDISRPAVLLARTRPRPVE
GFEVTNVTASTISVQWALHRIRHATVSGVRVSIRHPEALRDQATDVDRSVDRFTFRALLPGKRYTIQL
TTLSGLRGEEHPTESLATAPTHVWTRPLPPANLTAARVTATSAHVVWDAPTPGSLLEAYVINVTTSQS
TKSRYVPNGKLASYTVRDLLPGRRYQPSVIAVQSTELGPQHSEPAHLYIITSPRDGADRRWHQGGHHP
RVLKNRPPPARLPELRLLNDHSAPETPTQPPRFSEFVDGRGRVSARFGGSPSKAATVRSQPTASAQLE
NMEEAPKRVSPALQLPEHGSKDIGNVPGNCSENPCQNGGTCVPGADAHSCDCGPGFKGRRCELACIKV
SRPCTRLFSETKAFPVWEGGVCHHVYKRVYRVHQDICFKESCESTSLKKTPNRKQSKSQTLEKS

| | | |
|---|---|---|
| NOV58c, CG93387-02 | SEQ ID NO:1147 | 4413 bp |
| DNA Sequence | ORF Start: ATG at 181 | ORF Stop: TAG at 4405 |

GAGCACTCCGGACTCTACGTGAACAACAACGGGATCATCTCCTTCCTGAAGGAGGTTTCTCAGTTCAC
CCCAGTGGCCTTCCCCATTGCCAAGGACCGCTGCGTGGTGGCAGCCTTCTGGGCAGATGTGGACAACC
GGCGTGCAGGCGACGTGTACTACCGGGAGGCCACCGACCCAGCCATGCTGCGCCGAGCCACGGAGGAC
GTCAGGCACTACTTCCCCGAGCTCCTGGACTTCAATGCCACCTGGGTTTTTGTTGCCACCTGGTACCG
AGTGACCTTCTTTGGAGGCAGTTCCTCATCCCCTGTCAACACATTCCAGACTGTGCTCATCACAGACG
GCAAGCTCTCCTTCACCATCTTCAACTATGAGTCCATCGTGTGGACCACAGGCACACACGCCAGCAGC
GGGGGCAACGCCACTGGCCTCGGGGGCATCGCAGCCCAGGCTGGCTTCAACGCAGGCGATGGGCAGCG
TTACTTCAGTATCCCCGGCTCGCGCACAGCAGACATGGCCGAGGTGGAGACCACCACCATCGTGGTTG
TGCCCGGGCGCTGGGCGTTCATAATCGATGATGCCCAGGTGCGCGTGGGGGGCTGCGGCCATACAACG
TCCGTGTGCCTGGCCCTGCGCCCCTGCCTCAACGGCGGCAAGTGCATCGACGACTGCGTCACGGGCAA
CCCCTCCTACACCTGCTCCTGCCTCTCGGGCTTCACGGGGCGGAGGTGCCACCTGGACGTGAACGAAT
GTGCCTCCCAGCCCTGTCAGAATGGTGGGACCTGTACTCACGGCATCAACAGTTTCCGCTGCCAGTGC
CCGGCTGGCTTTGGGGGACCCACCTGTGAGACAGCCCAATCCCCCTGTGACACCAAAGAGTGTCAACA
TGGTGGCCAGTGCCAGGTGGAGAATGGCTCTGCGGTGTGTGTGTGCCAGGCCGGATACACCGGAGCAG
CCTGCGAGATGGATGTGGACGACTGCAGCCCTGACCCCTGCCTGAATGGAGGCTCTTGTGTTGACCTA
GTGGGGAATTACACCTGCTTGTGTGCCGAGCCCTTCAAGGGACTTCGCTGTGAGACAGGAGACCATCN
NCAGTGCCAGACGCCTGCCTCTCGGCCCCTTGCCACAATGGGGGCACCTGTGTGGATGCGGACCAGGG
CTACGTGTGCGAGTGCCCCGAAGGCTTCATGGGCCTGGACTGCAGGGAGAGAGTCCCCGATGACTGTG
AGTGCCGCAACGGAGGCAGATGCCTGGGCGCCAACACCACCCTCTGCCCAGTGCCCCCTGGGATTCTT
TGGGCTTCTCTGTGAATTTGAAATCACAGCCATGCCCTGCAACATGAACACACAGTGCCCAGATGGGG
GCTACTGCATGGAGCACGGCGGGAGCTACCTCTGCGTCTGCCACACCGACCACAATGCCAGCCACTCC
CTGCCATCACCCTGCGACTCGGACCCCTGCTTCAACGGAGGCTCCTGCGATGCCCATGACGACTCCTA
CACCTGCGAGTGCCCGCGCGGGTTCCACGGCAAGCACTGCGAGAAAGCCCGGCCACACCTGTGCAGCT
CAGGGCCCTGCCGGAACGGGGGCACGTGCAAGGAGGCGGGCGGCGACTACCACTGCAGCTGCCCCTAC
CGCTTCACTGGGAGGCACTGTGAGATCGGGAAGCCAGACTCGTGTGCCTCTGGCCCCTGTCACAACGG
CGGCACCTGCTTCCACTACATTGGCAAATACAAGTGTGACTGTCCCCCAGGCTTCTCCGGGCGGCACT
GCGAGATAGCCCCCTCCCCCTGCTTCCGGAGCCCGTGTGTGAATGGGGGCACCTGCGAGGACCGGGAC
ACGGATTTCTTCTGCCACTGCCAAGCAGGGTACATGGGACGCCGGTGCCAGGCAGAGGTGGACTGCGG
CCCCCCGGAGGAGGTGAAGCACGCCACACTGCGCTTCAACGGCACGCGGCTGGGCGCGGTGGCCCTGT
ATGCATGTGACCGTGGCTACAGCCTGAGCGCCCCCAGCCGCATCCGGGTCTGCCAGCCACACGGTGTC
TGGAAAATCGATGAGTGCCGGTCTCAGCCGTGCCTGCATGGGGGCTCTTGTCAGGACCGCGTTGCTGG
GTACCTGTGCCTCTGCAGCACAGGCTATGAGGGCGCCCACTGTGAGCTGGAGAGGGATGAGTGCCGAG
CTCACCCGTGCAGAAATGGAGGGTCCTGCAGGAACCTCCCAGGGGCCTATGTCTGCCGGTGCCCTGCA
GGCTTCGTTGGAGTCCACTGTGAGACAGAGGTGGACGCCTGCGACTCCAGCCCCTGCCAGCATGGAGG
CCGGTGTGAGAGCGGCGGCGGGGCCTACCTGTGCGTCTGCCCAGAGAGCTTCTTCGGCTACCACTGCG
AGACAGTGAGTGACCCCTGCTTCTCCAGCCCCTGTGGGGGCCGTGGCTATTGCCTGGCCAGCAACGGC
TCCCACAGCTGCACCTGCAAAGTGGGCTACACGGGCGAGGACTGCGCCAAAGAGCTCTTCCCACCGAC
GGCCCTCAAGATGGAGAGAGTGGAGGAGAGTGGGGTCTCTATCTCCTGGAACCCGCCCAATGGTCCAG
CCGCCAGGCAGATGCTTGATGGCTACGCGGTCACCTACGTCTCCTCCGACGGCTCCTACCGCCGCACA
GACTTTGTGGACAGGACCCGCTCCTCGCACCAGCTCCAGGCCCTGGCGGCCGGCAGGGCCTACAACAT
CTCCGTCTTCTCAGTGAAGCGAAACAGTAACAACAAGAATGACATCAGCAGGCCTGCCGTGCTGCTGG
CCCGCACGCGACCCCGCCCTGTGGAAGGCTTCGAGGTCACCAATGTGACGGCTAGCACCATCTCAGTG
CAGTGGGCCCTGCACAGGATCCGCCATGCCACCGTCAGTGGGGTCCGTGTGTCCATCCGCCACCCTGA
GGCCCTCAGGGACCAGGCCACCGATGTGGACAGGAGTGTGGACAGGTTCACCTTTAGGGCCCTGCTGC
CTGGGAAGAGGTACACCATCCAGCTGACCACCCTCAGTGGGCTCAGGGGAGAGGAGCACCCCACAGAG
AGCCTGGCCACCGCGCCGACGCACGTGTGGACCCGGCCCCTGCCTCCAGCAAACCTGACCGCCGCCCG
AGTCACTGCCACCTCTGCCCACGTGGTCTGGGATGCCCCGACTCCAGGCAGCTTGCTGGAGGCTTATG
TCATCAATGTGACCACCAGCCAGAGCACCAAGAGCCGCTATGTCCCCAACGGGAAGCTGGCGTCCTAC
ACGGTGCGCGACCTGCTGCCGGGACGGCGGTACCAGCTCTCTGTGATAGCAGTGCAGAGCACGGAGCT
CGGGCCGCAGCACAGCGAGCCCGCCCACCTCTACATCATCACCTCCCCCAGGGATGGCGCTGACAGAC
GCTGGCACCAGGGAGGACACCACCCTCGGGTGCTCAAGAACAGACCGCCCCCGGCGCGCCTGCCGGAG
CTGCGCCTGCTCAATGACCACAGCGCCCCCGAGACCCCCACCCAGCCCCCCAGGTTCTCGGAGCTTGT
GGACGGCAGAGGAAGAGTGAGCGCCAGGTTCGGTGGCTCACCCAGCAAAGCAGCCACCGTGAGATCAC
GTCCTGTCCCCTACATGATGAGCCCACCCCCACCGCCAGCGCAGTCTCCAGCCAGTGACCCCCACCCC
GACTGTGCACAAGGCGCGGGGCTCGTGGGCCGCCGGCAGCATGCACCTCCATGGCAGGAGGGGCAGCT
CGGACATCCGTGCTCCCTGAGATATAGAAGCACTCAAAAGGGTGGCCCCAGGACCATCCCGGGTGCAA
AGCAGCTGCGCCGTGTGGTCACCGCCTGGCTTCTCCTAGAACCCACAGCCTCGGCGCAGCTCGAGAAC
ATGGAGGAAGCCCCCAAGCGGGTCAGCCTGGCCCTCCAGCTCCCTGAACACGGCAGCAAGGACATCGG
AAGTTATGCAGGACCTGAACTGTCTCCTAGTCCGGGGCTCTGCCTCGTGAGGATCGAGGCCAGCACGT
CCCTGCAGGGCACCAAGCATCTGCTGAGCACCTGCAGCACACAAGCAAAGGAGCAGGGTGGAGCCTTC
ACGCTGCCGTGCCTGTGTGGACCAGTCCAGGGTGACCACGGGGTAGGTGAGGGAAAGCCTGTCTTCAC
AGACCACTCTCCAGCTGACGTCCCTGGCAACTGTTCAGAAAACCCCTGTCAGAACGGAGGCACTTGTG
TGCCGGGCGCAGACGCCCACAGCTGTGACTGCGGGCCAGGGTTCAAAGGCAGACGCTGCGAGCTCGGT
ATAAAAGAGTCTACCGAGTTCACCAAGACATCTGCTTCAAAGAGAGCTGTGAAAGCACAAGCCTCAAG
AAGACCCCAAACAGGTGCCTCTGGGGAGCAGGCCCATGCCGTGTCCTGCATGTAGNNNNNN

| | | | |
|---|---|---|---|
| NOV58c, CG93387-02 | SEQ ID NO:1148 | 1408 aa | MW at 150587.4 kD |
| Protein Sequence | | | |

MLRRATEDVRHYFPELLDFNATWVFVATWYRVTFFGGSSSSPVNTFQTVLITDGKLSFTIFNYESIVW
TTGTHASSGGNATGLGGIAAQAGFNAGDGQRYFSIPGSRTADMAEVETTTIVVVPGRWAFIIDDAQVR
VGGCGHTTSVCLALRPCLNGGKCIDDCVTGNPSYTCSCLSGFTGRRCHLDVNECASQPCQNGGTCTHG
INSFRCQCPAGFGGPTCETAQSPCDTKECQHGGQCQVENGSAVCVCQAGYTGAACEMDVDDCSPDPCL
NGGSCVDLVFNYTCLCAEPFKGLRCETGDHXQCQTPASRPLATMGAPVWMRTRATCASAPKASWAWTA
GRESPMTVSAATEADAWAPTPPSAWCPLGFFGLLCEFEITAMPCNMNTWCPDGGYCMEHGGSYLCVCH
TDHNASHSLPSPCDSDPCFNGGSCDAHDDSYTCECPRGFHGKHCEKARPHLCSSGPCRNGGTCKEAGG
EYHCSCPYRFTGRHCEIGKPDSCASGPCHNGGTCFHYIGKYKCDCPPGFSGRHCEIAPSPCFRSPCVN
GGTCEDRDTDFFCHCQAGYMGRRCQAEVDCGPPEEVKHATLRFNGTRLGAVALYACDRGYSLSAPSRI
RVCQPHGVWKIDECRSQPCLHGGSCQDRVAGYLCLCSTGYEGAHCELERDECRAHPCRNGGSCRNLPG
AYVCRCPAGFVGVHCETEVDACDSSPCQHGGRCESGGGAYLCVCPESFFGYHCETVSDPCFSSPCGGR
GYCLASNGSHSCTCKVGYTGEDCAKELFPPTALKMERVEESGVSISWNPPNGPAARQMLDGYAVTYVS
SDGSYRRTDFVDRTRSSHQLQALAAGPAYNISVFSVKRNSNNKNDISRPAVLLARTRPRPVEGFEVTN
VTASTISVQWALHRIRHATVSGVRVSIRHPEALRDQATDVDRSVDRFTFRALLPGKRYTIQLTTLSGL
RGEEHPTESLATAPTHVWTRPLPPANLTAARVTATSAHVVWDAPTPGSLLEAYVINVTTSQSTKSRYV
PNGKLASYTVRDLLPGRRYQLSVIAVQSTELGPQHSEPAHLYIITSPRDGADRRWHQGGHHPRVLKNR
PPPARLPELRLLNDHSAPETPTQPPRFSELVDGRGRVSARFGGSPSKAATVRSRPVPYMMSPPPPPAQ
SPASDPHPDCAQGAGLVGRRQHAPPWQEGQLGHPCSLRYRSTQKGGPRTIPGAKQLRRVVTAWLLLEP
TASAQLENMEEAPKRVSLALQLPEHGSKDIGSYAGPELSPSPGLCLVRIEASTSLQGTKHLLSTCSTQ
AKEQGGAFTLPCLCGPVQGDHGVGEGKPVFTDHSPADVPGNCSENPCQNGGTCVPGADAHSCDCGPGF
KGRRCELGIKESTEFTKTSASKRAVKAQASRPPQTGASGEQAHAVSCM

| | | |
|---|---|---|
| NOV58d, CG93387-03 | SEQ ID NO:1149 | 2877 bp |
| DNA Sequence | ORF Start: ATG at 6 | ORF Stop: TAA at 2868 |

GCTTCATGGGCCTGGACTGCAGGGAGAGAGTCCCCGATGACTGTGAGTGCCGCAACGGAGGCAGATGC
CTGGGCGCCAACACCACCCTCTGCCAGTGCCCCCTGGGATTCTTTGGGCTTCTCTGTGAATTTGAAAT
CACAGCCATGCCCTGCAACATGAACACACAGTGCCCAGATGGGGGCTACTGCATGGAGCACGGCGGGA
GCTACCTCTGCGTCTGCCACACCGACCACAATGCCAGCCACTCCCTGCCATCACCCTGCGACTCGGAC
CCCTGCTTCAACGGAGGCTCCTGCGATGCCCATGACGACTCCTACACCTGCGAGTGCCCGCGCGGGTT
CCACGGCAAGCACTGCGAGAAAGCCCGGCCACACCTGTGCAGCTCAGGGCCCTGCCGGAACGGGGGCA
CGTGCAAGGAGGCGGGCGGCGAGTACCACTGCAGCTGCCCCTACCGCTTCACTGGGAGGCACTGTGAG
ATCGGGAAGCCAGACTCGTGTGCCTCTGGCCCCTGTCACAACGGCGGCACCTGCTTCCACTACATTGG
CAAATACAAGTGTGACTGTCCCCCAGGCTTCTCCGGGCGGCACTGCGAGATAGCCCCCTCCCCCTGCT
TCCGGAGCCCGTGTGTGAATGGGGGCACCTGCGAGGACCGGGACACGGATTTCTTCTGCCACTGCCAA
GCAGGGTACATGGGACGCCGGTGCCAGGCAGAGGTGGACTGCGGCCCCCCGGAGGAGGTGAAGCACGC
CACACTGCGCTTCAACGGCACGCGGCTGGGCGCGGTGGCCCTGTATGCATGTGACCGTGGCTACAGCC
TGAGCGCCCCCAGCCGCATCCGGGTCTGCCAGCCACACGGTGTCTGGAGTGAGCCTCCCCAGTGCCTT
GAAATCGATGAGTGCCGGTCTCAGCCGTGCCTGCATGGGGGCTCTTGTCAGGACCGCGTTGCTGGGTA
CCTGTGCCTCTGCAGCACAGGCTATGAGGGCGCCCACTGTGAGCTGGAGAGGGATGAGTGCCGAGCTC
ACCCGTGCAGAAATGGAGGGTCCTGCAGGAACCTCCCAGGGGCCTATGTCTGCCGGTGCCCTGCAGGC
TTCGTTGGAGTCCACTGTGAGACAGAGGTGGACGCCTGCGACTCCAGCCCCTGCCAGCATGGAGGCCG
GTGTGAGAGCGGCGGCGGGGCCTACCTGTGCGTCTGCCCAGAGAGCTTCTTCGGCTACCACTGCGAGA
CAGTGAGTGACCCCTGCTTCTCCAGCCCCTGTGGGGGCCGTGGCTATTGCCTGGCCAGCAACGGCTCC
CACAGCTGCACCTGCAAAGTGGGCTACACGGGCGAGGACTGCGCCAAAGAGCTCTTCCCACCGACGGC
CCTCAAGATGGAGAGAGTGGAGGAGAGTGGGGTCTCTATCTCCTGGAACCCGCCCAATGGTCCAGCCG
CCAGGCAGATGCTTGATGGCTACGCGGTCACCTACGTCTCCTCCGACGGCTCCTACCGCCGCACAGAC
TTTGTGGACAGGACCCGCTCCTCGCACCAGCTCCAGGCCCTGGCGGCCGGCAGGGCCTACAACATCTC
CGTCTTCTCAGTGAAGCGAAACAGTAACAACAAGAATGACATCAGCAGGCCTGCCGTGCTGCTGGCCC
GCACGCGACCCCGCCCTGTGGAAGGCTTCGAGGTCACCAATGTGACGGCTAGCACCATCTCAGTGCAG
TGGGCCCTGCACAGGATCCGCCATGCCACCGTCAGTGGGGTCCGTGTGTCCATCCGCCACCCTGAGGC
CCTCAGGGACCAGGCCACCGATGTGGACAGGAGTGTGGACAGGTTCACCTTTAGGGCCCTGCTGCCTG
GGAAGAGGTACACCATCCAGCTGACCACCCTCAGTGGGCTCAGGGGAGAGGAGCACCCCACAGAGAGC
CTGGCCACCGCGCCGACGCACGTGTGGACCCGGCCCCTGCCTCCAGCAAACCTGACCGCCGCCCGAGT
CACTGCCACCTCTGCCCACGTGGTCTGGGATGCCCCGACTCCAGGCAGCTTGCTGGAGGCTTATGTCA
TCAATGTGACCACCAGCCAGAGCACCAAGAGCCGCTATGTCCCCAACGGGAAGCTGGCGTCCTACACG
GTGCGCGACCTGCTGCCGGGACGGCGGTACCAGCCCTCTGTGATAGCAGTGCAGAGCACGGAGCTCGG
GCCGCAGCACAGCGAGCCCGCCCACCTCTACATCATCACCTCCCCCAGGGATGGCGCTGACAGACGCT
GGCACCAGGGAGGACACCACCCTCGGGTGCTCAAGAACAGACCGCCCCCGGCGCGCCTGCCGGAGCTG
CGCCTGCTCAATGACCACAGCGCCCCCGAGACCCCCACCCAGCCCCCCAGGTTCTCGGAGTTTGTGGA
CGGCAGAGGAAGAGTGAGCGCCAGGTTCGGTGGCTCACCCAGCAAAGCAGCCACCGTGAGATCACAAC
CCACAGCCTCGGCGCAGCTCGAGAACATGGAGGAAGCCCCCAAGCGGGTCAGCCCGGCCCTCCAGCTC
CCTGAACACGGCAGCAAGGACATCGGAAACGTCCCTGGCAACTGTTCAGAAAACCCCTGTCAGAACGG
AGGCACTTGTGTGCCGGGCGCAGACGCCCACAGCTGTGACTGCGGGCCAGGGTTCAAAGGCAGACGCT
GCGAGCTCGCCTGTATAAAGGTGTCCCGCCCCTGCACAAGGCTGTTCTCCGAGACAAAGGCCTTTCCA
GTCTGGGAGGGAGGCGTCTGTCACCACGTGTATAAAAGAGTCTACCGAGTTCACCAAGACATCTGCTT
CAAAGAGAGCTGTGAAAGCACAAGCCTCAAGAAGACCCCAAACAGGAAACAAAGTAAGAGTCAGACAC
TGGAGAAATCTTAAGAAAGAA

| | | | |
|---|---|---|---|
| NOV58d, CG93387-03 | SEQ ID NO:1150 | 954 aa | MW at 103791.4 kD |
| Protein Sequence | | | |

MGLDCRERVPDDCECRNGGRCLGANTTLCQCPLGFFGLLCEFEITAMPCNNNTQCPDGGYCMEHGGSY
LCVCHTDHNASHSLPSPCDSDPCFNGGSCDAHDDSYTCECPRGFHGKHCEKARPHLCSSGPCRNGGTC
KEAGGEYHCSCPYRFTGRHCEIGKPDSCASGPCHNGGTCFHYIGKYKCDCPPGFSGRHCEIAPSPCFR
SPCVNGGTCEDRDTDFFCHCQAGYMGRRCQAEVDCGPPEEVKHATLRFNGTRLGAVALYACDRGYSLS
APSRIRVCQPHGVWSEPPQCLEIDECRSQPCLHGGSCQDRVAGYLCLCSTGYEGAHCELERDECRAHP
CRNGGSCRNLPGAYVCRCPAGFVGVHCETEVDACDSSPCQHGGRCESGGGAYLCVCPESFFGYHCETV
SDPCFSSPCGGRGYCLASNGSHSCTCKVGYTGEDCAKELFPPTALKMERVEESGVSISWNPPNGPAAR
QMLDGYAVTYVSSDGSYRRTDFVDRTRSSHQLQALAAGRAYNISVFSVKRNSNNKNDISRPAVLLART
RPRPVEGFEVTNVTASTISVQWALHRIRHATVSGVRVSIRHPEALRDQATDVDRSVDRFTFRALLPGK
RYTIQLTTLSGLRGEEHPTESLATAPTHVWTRPLPPANLTAARVTATSAHVVWDAPTPGSLLEAYVIN
VTTSQSTKSRYVPNGKLASYTVRDLLPGRRYQPSVIAVQSTELGPQHSEPAHLYIITSPRDGADRRWH
QGGHHPRVLKNRPPPARLPELRLLNDHSAPETPTQPPRFSEFVDGRGRVSARFGGSPSKAATVRSQPT
ASAQLENMEEAPKRVSPALQLPEHGSKDIGNVPGNCSENPCQNGGTCVPGADAHSCDCGPGFKGRRCE
LACIKVSRPCTRLFSETKAFPVWEGGVCHHVYKRVYRVHQDICFKESCESTSLKKTPNRKQS
KSQTLEKS

| | | |
|---|---|---|
| NOV58e, CG93387-04 | SEQ ID NO:1151 | j7459 bp |
| DNA Sequence | lORF Start: ATG at 182 | lORF Stop: TAA at 4046 |

GAGCACTCCGGACTCTACGTGAACAACAACGGGATCATCTCCTTCCTGAAGGAGGTTTCTCAGTTTCA
CCCCAGTGGCCTTCCCCATTGCCAAGGACCGCTGCGTGGTGGCAGCCTTCTGGGCAGATGTGGACAAC
CGGCGTGCAGGCGACGTGTACTACCGGGAGGCCACCGACCCAGCCATGCTGCGCCGAGCCACGGAGGA
CGTCAGGCACTACTTCCCCGAGCTCCTGGACTTCAATGCCACCTGGGTTTTTGTTGCCACCTGGTACC
GAGTGACCTTCTTTGGAGGCAGTTCCTCATCCCCTGTCAACACATTCCAGACTGTGCTCATCACAGAC
GGCAAGCTCTCCTTCACCATCTTCAACTATGAGTCCATCGTGTGGACCACAGGCACACACGCCAGCAG
CGGGGGCAACGCCACTGGCCTCGGGGGCATCGCAGCCCAGGCTGGCTTCAACGCAGGCGATGGGCAGC
GTTACTTCAGTATCCCCGGCTCGCGCACAGCAGACATGGCCGAGGTGGAGACCACCACCAACGTGGGT
GTGCCCGGGCGCTGGGCGTTCAGAATCGATGATGCCCAGGTGCGCGTGGGGGGCTGCGGCCATACAAC
GTCCGTGTGCCTGGCCCTGCGCCCCTGCCTCAACGGCGGCAAGTGCATCGACGACTGCGTCACGGGCA
ACCCCTCCTACACCTGCTCCTGCCTCTCGGGCTTCACGGGGCGGAGGTGCCACCTGGACGTGAACGAA
TGTGCCTCCCAGCCCTGTCAGAATGGTGGGACCTGTACTCACGGCATCAACAGTTTCCGCTGCCAGTG
CCCGGCTGGCTTTGGGGGACCCACCTGTGAGACAGCCCAATCCCCCTGTGACACCAAAGAGTGTCAAC
ATGGTGGCCAGTGCCAGGTGGAGAATGGCTCTGCGGTGTGTGTGTGCCAGGCCGGATACACCGGAGCA
GCCTGCGAGATGGATGTGGACGACTGCAGCCCTGACCCCTGCCTGAATGGAGGCTCTTGTGTTGACCT
AGTGGGGAATTACACCTGCTTGTGTGCCGAGCCCTTCAAGGGACTTCGCTGTGAGACAGGAGACCATC
CAGTGCCAGACGCCTGCCTCTCGGCCCCTTGCCACAATGGGGGCACCTGTGTGGATGCGGACCAGGGC
TACGTGTGCGAGTGCCCCGAAGGCTTCATGGGCCTGGACTGCAGGGAGAGAGTCCCCGATGACTGTGA
GTGCCGCAACGGAGGCAGATGCCTGGGCGCCAACACCACCCTCTGCCAGTGCCCCCTGGGATTCTTTG
GGCTTCTCTGTGAATTTGAAATCACAGCCATGCCCTGCAACATGAACACACAGTGCCCAGATGGGGGC
TACTGCATGGAGCACGGCGGGAGCTACCTCTGCGTCTGCCACACCGACCACAATGCCAGCCACTCCCT
GCCATCACCCTGCGACTCGGACCCCTGCTTCAACGGAGGCTCCTGCGATGCCCATGACGACTCCTACA
CCTGCGAGTGCCCGCGCGGGTTCCACGGCAAGCACTGCGAGAAAGCCCGGCCACACCTGTGCAGCTCA
GGGCCCTGCCGGAACGGGGGCACGTGCAAGGAGGCGGGCGGCGAGTACCACTGCAGCTGCCCCTACCG
CTTCACTGGGAGGCACTGTGAGATCGGGAAGCCAGACTCGTGTGCCTCTGGCCCCTGTCACAACGGCG
GCACCTGCTTCCACTACATTGGCAAATACAAGTGTGACTGTCCCCCAGGCTTCTCCGGGCGGCACTGC
GAGATAGCCCCCTCCCCCTGCTTCCGGAGCCCGTGTGTGAATGGGGGCACCTGCGAGGACCGGGACAC
GGATTTCTTCTGCCACTGCCAAGCAGGGTACATGGGACGCCGGTGCCAGGCAGAGGTGGACTGCGGCC
CCCCGGAGGAGGTGAAGCACGCCACACTGCGCTTCAACGGCACGCGGCTGGGCGCGGTGGCCCTGTAT
GCATGTGACCGTGGCTACAGCCTGAGCGCCCCCAGCCGCATCCGGGTCTGCCAGCCACACGGTGTCTG
GAGTGAGCCTCCCCAGTGCCTTGAAATCGATGAGTGCCGGTCTCAGCCGTGCCTGCATGGGGGCTCTT
GTCAGGACCGCGTTGCTGGGTACCTGTGCCTCTGCAGCACAGGCTATGAGGGCGCCCACTGTGAGCTG
GAGAGGGATGAGTGCCGAGCTCACCCGTGCAGAAATGGAGGGTCCTGCAGGAACCTCCCAGGGGCCTA
TGTCTGCCGGTGCCCTGCAGGCTTCGTTGGAGTCCACTGTGAGACAGAGGTGGACGCCTGCGACTCCA
GCCCCTGCCAGCATGGAGGCCGGTGTGAGAGCGGCGGCGGGGCCTACCTGTGCGTCTGCCCAGAGAGC
TTCTTCGGCTACCACTGCGAGACAGTGAGTGACCCCTGCTTCTCCAGCCCCTGTGGGGGCCGTGGCTA
TTGCCTGGCCAGCAACGGCTCCCACAGCTGCACCTGCAAAGTGGGCTACACGGGCGAGGACTGCGCCA
AAGAGCTCTTCCCACCGACGGCCCTCAAGATGGAGAGAGTGGAGGAGAGTGGGGTCTCTATCTCCTGG
AACCCGCCCAATGGTCCAGCCGCCAGGCAGATGCTTGATGGCTACGCGGTCACCTACGTCTCCTCCGA
CGGCTCCTACCGCCGCACAGACTTTGTGGACAGGACCCGCTCCTCGCACCAGCTCCAGGCCCTGGCGG
CCGGCAGGGCCTACAACATCTCCGTCTTCTCAGTGAAGCGAAACAGTAACAACAAGAATGACATCAGC
AGGCCTGCCGTGCTGCTGGCCCGCACGCGACCCCGCCCTGTGGAAGGCTTCGAGGTCACCAATGTGAC
GGCTAGCACCATCTCAGTGCAGTGGGCCCTGCACAGGATCCGCCATGCCACCGTCAGTGGGGTCCGTG
TGTCCATCCGCCACCCTGAGGCCCTCAGGGACCAGGCCACCGATGTGGACAGGAGTGTGGACAGGTTC
ACCTTTAGGGCCCTGCTGCCTGGGAAGAGGTACACCATCCAGCTGACCACCCTCAGTGGGCTCAGGGG
AGAGGAGCACCCCACAGAGAGCCTGGCCACCGCGCCGACGCACGTGTGGACCCGGCCCCTGCCTCCAG
CAAACCTGACCGCCGCCCGAGTCACTGCCACCTCTGCCCACGTGGTCTGGGATGCCCCGACTCCAGGC
AGCTTGCTGGAGGCTTATGTCATCAATGTGACCACCAGCCAGAGCACCAAGAGCCGCTATGTCCCCAA
CGGGAAGCTGGCGTCCTACACGGTGCGCGACCTGCTGCCGGGACGGCGGTACCAGCCCTCTGTGATAG
CAGTGCAGAGCACGGAGCTCGGGCCGCAGCACAGCGAGCCCGCCCACCTCTACATCATCACCTCCCCC
AGGGATGGCGCTGACAGACGCTGGCACCAGGGAGGACACCACCCTCGGGTGCTCAAGAACAGACCGCC
CCCGGCGCGCCTGCCGGAGCTGCGCCTGCTCAATGACCACAGCGCCCCCGAGACCCCCACCCAGCCCC
CCAGGTTCTCGGAGTTTGTGGACGGCAGAGGAAGAGTGAGCGCCAGGTTCGGTGGCTCACCCAGCAAA
GCAGCCACCGTGAGATCACAACCCACAGCCTCGGCGCAGCTCGAGAACATGGAGGAAGCCCCCAAGCG
GGTCAGCCCGGCCCTCCAGCTCCCTGAACACGGCAGCAAGGACGTCGGAAACGTCCCTGGCAACTGTT
CAGAAAACCCCTGTCAGAACGGAGGCACTTGTGTGCCGGGCGCAGACGCCCACAGCTGTGGCTGCGGG
CCAGGGTTCAAAGGCAGACGCTGCGAGCTCGCCTGTATAAAGGTGTCCCGCCCCTGCACAAGGCTGTT
CTCCGAGACAAAGGCCTTTCCAGTCTGGGAGGGAGGCGTCTGTCACCACGTGTATAAAAGAGTCTACC
GAGTTCACCAAGACATCTGCTTCAAAGAGAGCTGTGAAAGCACAAGCCTCAAGAAGACCCCAAACAGG
AAACAAAGTAAGAGTCAGACACTGGAGAAATCTTAAGGATTTAAGACGTTCTTGTTACACTCCACCAA
CCTCACGAGTTTCTAACACCCAGGAACATGACCTCTAAAAACTGGATGAAAAAGGACACCCTGAGAAA
AGGTCCTAGCTGGAGTCAGTCCCCTCTGTGACCTCTCTCCTCAGGCCTCTAGAGGACAGATGGCCAGG
CCTGTGCACACACCAGCCCACCCTGAGAGACCCCTCTGGGACCAACCACCTGTGAGTCCTGCGATGCC
TTTAAGCAGCCTGTGCCCTCACCCAAGCTGCAGTTCCTGAAGGTGTAGTCTGTGTCTCTGCGGATGAC
ATGACAGCTCGCCATTCCCCGGAATCAGTGAGGCTGTCAGTCAGCCACGCTTCTGCAGTATGCAGAAA
CCTGTTCTTAGACTCCAAAGCCAGAGAAAGAATTCTCCCTTCGAGGCCCAACAAATTGAGAAGGAACT
GTGATGGACCACTTCCAAAACAGAGACGGGGGCAGGGGCTGAAGGGCAGAGACCAGGTGATGTCAGAA
GGAAAGCCGGGTTGCAGACACAGCCGCCCCTGCTCTGGTCCTCCAGCGTGTTTATGACGCTCGTGCAG
GTCGACGAGCCATCCTATGGACTAGTTAACACTAAGGTGGAGTTCAGACTTTTTTAGACAACGGCGCC
ACTGGCAGCCTTTCTCTATCAAGGGTCAGACGGTAAACGTTTTCAGCTTTGCAGACCAGAGGTCCCTC
TGGCTACAGTAGCGCAGACACAGCCACAGGCATGTCATTGAATGGCTGCGGCTATGTTCCAATAAAAA
CTTATTTACAATAACAGGTGGTGGCCAAATTGGCCCATGGGCCTTATTTGGTGAACCCTGTTCTATGA
GATCACCTAGGCTTCAGCCTTAAACAGTGGAAGCCATCCCCTGAATGACAAGTCACAAGGGTATCAAA
GAAAGACCCCTGAATTTTCATGGAAAAAGCTATTCAGACCCCTGCTTGGAAAGCTAAGGCACACTGCC
ACGAAGCAGCAAGGACGCCTTACAAGTCTCAGTGCAACAGAGATGGACACCTGGGCTGGGCTGGACAA
TGTTTAAGGTTCCTTTTAGTCCATGACTCAAGTGATACTGTTTTAGGCTATCAGGTAGTAAACACGAT
CTTAGACATCCCCATCTTTGTAAGCAGAACAGTACGGCACTTCACCACATCTGCTTCCCACCATGCTT
CTAAGCAGCTGTCTTCCCCCTGCTAATGTTACAACCAAAGCAGCCACCCCACCTCCTCTCGTGTTGAG
CCTCACGACCGCTGACCCAGCTGGAAAGCCAGCGCCCTGCCGCGTCACCCTGACTCTGCTCAGAGCCA
GCATTCCAGCCACAAAGAGGGCCTCCTTCCTTTCCTCTTTCATAAAAATGTTTTTTGAAGAGTTAGAG
TATATTTTAGGCTTTTTATCTTTATTAAAATTTCATGTGCATGTGTCTGTGTATTCTGCAATTTGTCA
TTTTCAGAAAGAAGGAACAGGCAATTCGAGAAGTTTCACCTGTACTCCCGAGCTGTTCCCCAGGCTCC
AGACCCACTTGAGAGCAGAAGGTGGAGCTCAATGAAGGGTCTCGAGCTCAGCGAAGGGTCACTGGGTG
AACTGAGAGAAACCACGTTCACAAACGCGTACTGCGGACTTCCTGCCGCCCTGGGACCTGTCACTGTT
TGTCCATGTAAGCTACAGCATTACTAGCAGATGCTAAGATCGAGTGATATCACTGGAAAAGTAGGTGA
ATCCTACTAGGAAACTTTCTACTCCCTACTAGGACCTCAAGCCCCTCAGCCACACAGCAAATGCTAAT
ATGCTCCAGTGTTAGCTTAGAAGCCTTGTGTCAACAAGAACTGGCTCCTGAGTCCCAAGCTTGGTGCC
ACACAGCAAATGCTAATATGCTCCAGTGTTAGCTTAGAAGCCTTGTGTCAACAAGAACTGGCTCCTGA
GTCCCAAGCTTGGTGCCACACAGCAAATGCTAATATGCTCCAGTGTTAGCTTAGAAGCCTTGTGTCAA
CAAGAACTGGCTCCTGAGTCCCAAGTGCTGTCACAGGACTTGCCCATTGGGATGTTTTCCACATTAAA
TATCAAGTAAAAAGACTTCCTGGTGCTCAGGAATTACAGTTCGTTCTTGAAACATTCCAAAGAGGCCA
CCACAGCTTTTCCCATGTGGCTTCTTTTAAAAACTCAAATGGCTTCCTTGAAAATACTCAAAGTCCAC
CCAAGGAAATTAGTAATAATAGAATCAGAAAACTGTCAGGAGCATAAAGATTTCTGTATCAAAATGAA
AGAAGCAATCCTGAGTTGCTGAATTACCCATCTGCTAATGAAACCGGGATGGACTGATCATCTAACCA
AGTGCAGACTGAGGATTCTACTTAGTCCTCCGACTGGGTACAACAACAGCCTAGGTTCTAGGGAGGGT
GGCAGTGACCGGGATGCCACAATGGAAGAGAAAATGAAAACACTGGCACAGTGAAATGTCTCATTTCC
AAACAGTTTTGCCTATGGCCAAGCAAGGCAATAAAGACAAACTCTCCCTTTTCCCCATTGCGTGTGGG
CTGCCAGGTACAAGTAAGGGAATCTTTGCTGTGCCCACTGTCCTCCAGTAGAGAACCCAACAGGCAAC
GGCCCCACTCAGGTATCAGCTCACCTCCTGCACCTCCCCTTAGCAGGAACTCCTTCCACTGGCAAAGG
ACTGCCACTGCCATCTGACTCAACTGTGGCGATGTGGACGGAGTCACCGAGCTGCTTTTCTTTTGCAA
AACAAAAGTCTTTTTCTTTGCAGTCACGCTGTAAGACGAGGCTGCTGGAGAAAACAAAAGCACCTAGA
TTTCAGTGCTGAATCCCCACAATTGCATGCAGCTCACACCTACCAGGGGTATTCCAGTGCATAGGGGA
AAGGAACCCGGCTGAAAAACCAGCTCCTTATTTTTCTTTTAAATAAAATAATACGATCCTAAGTCCAT
TTACCATCTGAAGTTGTCACGAGTGAACAGTCACATTACTGTTGTGGACCAGGCCTTAGATGAGTTTC
TCAGGCTCAGCACTGACATTCTGGGCCGGATCATCCTCTCTTGTGGGACCATCCTGTGCACTGCAGGA
TGTTTCACAGCACCCCTGGCCTCTACCCACTAGAATCCTACAATCTACCAGATCCTAGGATCTAGTTG
ATCCTAGAATGCTACCAAGGAGACTTGAATTTTGGTCCCATCATCAAAAATGCCTTCTGCATCAATCC
TATGCCAGTTTCCCCTAAAAGAGGGCTAACTGGAATGTTCTAGGATGTACCAATCCTCCAGGACCCTC
TTAGAGCTCATGCCATCAGAGACAGGCCTCTACCTCAGGGATCACCCCGGCTGACATCAAATTCCTCT
TCTCTTTTCCCAACATTTCAAATTGTTCTTCGGACTCATTGAGTTCC

| | | | |
|---|---|---|---|
| NOV58e, CG93387-04 | SEQ ID NO:1152 | 1288 aa | MW at 138836.0 kD |
| Protein Sequence | | | |

MLRRATEDVRHYFPELLDFNATWVFVATWYRVTFFGGSSSSPVNTFQTVLITDGKLSFTIFNYESIVW
TTGTHASSGGNATGLGGIAAQAGFNAGDGQRYFSIPGSRTADMAEVETTTNVGVPGRWAFRIDDAQVR
VGGCGHTTSVCLALRPCLNGGKCIDDCVTGNPSYTCSCLSGFTGRRCHLDVNECASQPCQNGGTCTHG
INSFRCQCPAGFGGPTCETAQSPCDTKECQHGGQCQVENGSAVCVCQAGYTGAACEMDVDDCSPDPCL
NGGSCVDLVGNYTCLCAEPFKGLRCETGDHPVPDACLSAPCHNGGTCVDADQGYVCECPEGFMGLDCR
ERVPDDCECRNGGRCLGANTTLCQCPLGFFGLLCEFEITAMPCNMNTQCPDGGYCMEHGGSYLCVCHT
DHNASHSLPSPCDSDPCFNGGSCDAHDDSYTCECPRGFHGKHCEKARPHLCSSGPCRNGGTCKEAGGE
YHCSCPYRFTGRHCEIGKPDSCASGPCHNGGTCFHYIGKYKCDCPPGFSGRHCEIAPSPCFRSPCVNG
GTCEDRDTDFFCHCQAGYMGRRCQAEVDCGPPEEVKHATLRFNGTRLGAVALYACDRGYSLSAPSRIR
VCQPHGVWSEPPQCLEIDECRSQPCLHGGSCQDRVAGYLCLCSTGYEGAHCELERDECRAHPCRNGGS
CRNLPGAYVCRCPAGFVGVHCETEVDACDSSPCQHGGRCESGGGAYLCVCPESFFGYHCETVSDPCFS
SPCGGRGYCLASNGSHSCTCKVGYTGEDCAKELFPPTALKMERVEESGVSISWNPPNGPAARQMLDGY
AVTYVSSDGSYRRTDFVDRTRSSHQLQALAAGRAYNISVFSVKRNSNNKNDISRPAVLLARTRPRPVE
GFEVTNVTASTISVQWALHRIREATVSGVRVSIRHPEALRDQATDVDRSVDRFTFRALLPGKRYTIQL
TTLSGLRGEEHPTESLATAPTHVWTRPLPPANLTAARVTATSAHVVWDAPTPGSLLEAYVINVTTSQS
TKSRYVPNGKLASYTVRDLLPGRRYQPSVIAVQSTELGPQHSEPAHLYIITSPRDGADRRWHQGGHHP
RVLKNRPPPARLPELRLLNDHSAPETPTQPPRFSEFVDGRGRVSARFGGSPSKAATVRSQPTASAQLE
NMEEAPKRVSPALQLPEHGSKDVGNVPGNCSENPCQNGGTCVPGADAHSCGCGPGFKGRRCELACIKV
SRPCTRLFSETKAFPVWEGGVCHHVYKRVYRVHQDICFKESCESTSLKKTPNRKQSKSQTLEKS

| | | |
|---|---|---|
| NOV58f, SNP13382519 of | SEQ ID NO:1153 | 5432 bp |
| CG93387-05, DNA Sequence | ORF Start: ATG at 187 | ORF Stop: TAA at 3991 |
| | SNP Pos: 4223 | SNP Change: C to T |

GGTGCCGAGCACTCCGGACTCTACGTGAACAACAACGGGATCATCTCCTTCCTGAAGGAGGTTTCTCA
GTTCACCCCAGTGGCCTTCCCCATTGCCAAGGACCGCTGCGTGGTGGCAGCCTTCTGGGCAGATGTGG
ACAACCGGCGTGCAGGCGACGTGTACTACCGGGAGGCCACCGACCCAGCCATGCTGCGCCGAGCCACG
GAGGACGTCAGGCACTACTTCCCCGAGCTCCTGGACTTCAATGCCACCTGGGTTTTTGTTGCCACCTG
GTACCGAGTGACCTTCTTTGGAGGCAGTTCCTCATCCCCTGTCAACACATTCCAGACTGTGCTCATCA
CAGACGGCAAGCTCTCCTTCACCATCTTCAACTATGAGTCCATCGTGTGGACCACAGGCACACACGCC
AGCAGCGGGGGCAACGCCACTGGCCTCGGGGGCATCGCAGCCCAGGCTGGCTTCAACGCAGGCGATGG
GCAGCGTTACTTCAGTATCCCCGGCTCGCGCACAGCAGACATGGCCGAGGTGGAGACCACCACCAACG
TGGGTGTGCCCGGGCGCTGGGCGTTCAGAATCGATGATGCCCAGGTGCGCGTGGGGGGCTGCGGCCAT
ACAACGTCCGTGTGCCTGGCCCTGCGCCCCTGCCTCAACGGCGGCAAGTGCATCGACGACTGCGTCAC
GGGCAACCCCTCCTACACCTGCTCCTGCCTCTCGGGCTTCACGGGGCGGAGGTGCCACCTGGACGTGA
ACGAATGTGCCTCCCAGCCCTGTCAGAATGGTGGGACCTGTACTCACGGCATCAACAGTTTCCGCTGC
CAGTGCCCGGCTGGCTTTGGGGGACCCACCTGTGAGACAGCCCAATCCCCCTGTGACACCAAAGAGTG
TCAACATGGTGGCCAGTGCCAGGTGGAGAACGGCTCTGCGGTGTGTGTGTGCCAGGCCGGATACACCG
GAGCAGCCTGCGAGATGGATGTGGACGACTGCAGCCCTGACCCCTGCCTGAATGGAGGCTCTTGTGTT
GACCTAGTGGGGAATTACACCTGCTTGTGTGCCGAGCCCTTCAAGGGACTTCGCTGTGAGACAGGAGA
CCATCCAGTGCCAGACGCCTGCCTCTCGGCCCCTTGCCACAATGGGGGCACCTGTGTGGATGCGGACC
AGGGCTACGTGTGCGAGTGCCCCGAAGGCTTCATGGGCCTGGACTGCAGGGAGAGAGTCCCCGATGAC
TGTGAGTGCCGCAACGGAGGCAGATGCCTGGGCGCCAACACCACCCTCTGCCAGTGCCCCCTGGGATT
CTTTGGGCTTCTCTGTGAATTTGAAATCACAGCCATGCCCTGCAACATGAACACACAGTGCCCAGATG
GGGGCTACTGCATGGAGCACGGCGGGAGCTACCTCTGCGTCTGCCACACCGACCACAATGCCAGCCAC
TCCCTGCCATCACCCTGCGACTCGGACCCCTGCTTCAACGGAGGCTCCTGCGATGCCCATGACGACTC
CTACACCTGCGAGTGCCCGCGCGGGTTCCACGGCAAGCACTGCGAGAAAGCCCGGCCACACCTGTGCA
GCTCAGGGCCCTGCCGGAACGGGGGCACGTGCAAGGAGGCGGGCGGCGAGTACCACTGCAGCTGCCCC
TACCGCTTCACTGGGAGGCACTGTGAGATCGGGAAGCCAGACTCGTGTGCCTCTGGCCCCTGTCACAA
CGGCGGCACCTGCTTCCACTACATTGGCAAATACAAGTGTGACTGTCCCCCAGGCTTCTCCGGGCGGC
ACTGCGAGATAGCCCCCTCCCCCTGCTTCCGGAGCCCGTGTGTGAATGGGGGCACCTGCGAGGACCGG
GACACGGATTTCTTCTGCCACTGCCAAGCAGGGTACATGGGACGCCGGTGCCAGGCAGAGGTGGACTG
CGGCCCCCCGGAGGAGGTGAAGCACGCCACACTGCGCTTCAACGGCACGCGGCTGGGCGCGGTGGCCC
TGTATGCATGTGACCGTGGCTACAGCCTGAGCGCCCCCAGCCGCATCCGGGTCTGCCAGCCACACGGT
GTCTGGAGTGAGCCTCCCCAGTGCCTTGAAATCGATGAGTGCCGGTCTCAGCCGTGCCTGCATGGGGG
CTCTTGTCAGGACCGCGTTGCTGGGTACCTGTGCCTCTGCAGCACAGGCTATGAGGGCGCCCACTGTG
AGCTGGAGAGGGATGAGTGCCGAGCTCACCCGTGCAGAAATGGAGGGTCCTGCAGGAACCTCCCAGGG
GCCTATGTCTGCCGGTGCCCTGCAGGCTTCGTTGGAGTCCACTGTGAGACAGAGGTGGACGCCTGCGA
CTCCAGCCCCTGCCAGCATGGAGGCCGGTGTGAGAGCGGCGGCGGGGCCTACCTGTGCGTCTGCCCAG
AGAGCTTCTTCGGCTACCACTGCGAGACAGTGAGTGACCCCTGCTTCTCCAGCCCCTGTGGGGGCCGT
GGCTATTGCCTGGCCAGCAACGGCTCCCACAGCTGCACCTGCAAAGTGGGCTACACGGGCGAGGACTG
CGCCAAAGAGCTCTTCCCACCGACGGCCCTCAAGATGGAGAGAGTGGAGGAGAGTGGGGTCTCTATCT
CCTGGAACCCGCCCAATGGTCCAGCCGCCAGGCAGATGCTTGATGGCTACGCGGTCACCTACGTCTCC
TCCGACGGCTCCTACCGCCGCACAGACTTTGTGGACAGGACCCGCTCCTCGCACCAGCTCCAGGCCCT
GGCGGCCGGCAGGGCCTACAACATCTCCGTCTTCTCAGTGAAGCGAAACAGTAACAACAAGAATGACA
TCAGCAGGCCTGCCGTGCTGCTGGCCCGCACGCGACCCCGCCCTGTGGAAGGCTTCGAGGTCACCAAT
GTGACGGCTAGCACCATCTCAGTGCAGTGGGCCCTGCACAGGATCCGCCATGCCACCGTCAGTGGGGT
CCGTGTGTCCATCCGCCACCCTGAGGCCCTCAGGGACCAGGCCACCGATGTGGACAGGAGTGTGGACA
GGTTCACCTTTAGGGCCCTGCTGCCTGGGAAGAGGTACACCATCCAGCTGACCACCCTCAGTGGGCTC
AGGGGAGAGGAGCACCCCACAGAGAGCCTGGCCACCGCGCCGACGCACGTGTGGACCCGGCCCCTGCC
TCCAGCAAACCTGACCGCCGCCCGAGTCACTGCCACCTCTGCCCACGTGGTCTGGGATGCCCCGACTC
CAGGCAGCTTGCTGGAGGCTTATGTCATCAATGTGACCACCAGCCAGAGCACCAAGAGCCGCTATGTC
CCCAACGGGAAGCTGGCGTCCTACACGGTGCGCGACCTGCTGCCGGGACGGCGGTACCAGCCCTCTGT
GATAGCAGTGCAGAGCACGGAGCTCGGGCCGCAGCAGCACCAGGGAGGACACCACCCTCGGGTGCTCA
AGAACAGACCGCCCCCGGCGCGCCTGCCGGAGCTGCGCCTGCTCAATGACCACAGCGCCCCCGAGACC
CCCACCCAGCCCCCCAGGTTCTCGGAGTTTGTGGACGGCAGAGGAAGAGTGAGCGCCAGGTTCGGTGG
CTCACCCAGCAAAGCAGCCACCGTGAGATCACAACCCACAGCCTCGGCGCAGCTCGAGAACATGGAGG
AAGCCCCCAAGCGGGTCAGCCCGGCCCTCCAGCTCCCTGAACACGGCAGCAAGGACATCGGAAACGTC
CCTGGCAACTGTTCAGAAAACCCCTGTCAGAACGGAGGCACTTGTGTGCCGGGCGCAGACGCCCACAG
CTGTGACTGCGGGCCAGGGTTCAAAGGCAGACGCTGCGAGCTCGCCTGTATAAAGGTGTCCCGCCCCT
GCACAAGGCTGTTCTCCGAGACAAAGGCCTTTCCAGTCTGGGAGGGAGGCGTCTGTCACCACGTGTAT
AAAAGAGTCTACCGAGTTCACCAAGACATCTGCTTCAAAGAGAGCTGTGAAAGCACAAGCCTCAAGAA
GACCCCAAACAGGAAACAAAGTAAGAGTCAGACACTGGAGAAATCTTAAGGATTTAAGACGTTCTTGT
TACACTCCACCAACCTCACGAGTTTCTAACACCCAGGAAGATGAGGTCTAAAAACTGGATGAAAAAGC
ACACCCTGAGAAAAGGTCCTAGCTGGAGTCAGTCCCCTCTGTGACCTCTCTCCTCAGGCCTCTAGAGC
ACAGATGGCCAGGCCTGTGCACACACCAGCCCACCCTGAGAGACCCCTCTGGGACCAACCACCTGTGA
GTCCTGTGATGCGTTTAAGCAGCCTGTGCCCTCACCCAAGCTGCAGTTCCTGAAGGTGTAGTCTGTGT
CTCTGCGGATGAGATGACAGCTCGCCATTCCCCGGAATCAGTGAGGCTGTCAGTCAGCCACGCTTCTG
CAGTATGCAGAAACCTGTTCTTAGACTCCAAAGCCAGAGAAAGAATTCTCCCTTCGAGGCCCAACAAA
TTGAGAAGGAACTGTGATGGACCACTTCCAAAACAGAGACGGGGGCAGGGGCTGAAGGGCAGAGACCA
GGTGATGTCAGAAGGAAAGCCGGGTTGCAGACACAGCCGCCCCTGCTCTGGTCCTCCAGCGTGTTTAT
GACGCTCGTGCAGGTCGACGAGCCATCCTATGGACTAGTTAACACTAAGGTGGAGTTCAGACTTTTTT
AGACAACGGCGCGACTGGCAGCCTTTCTCTATCAAGGGTCAGACGGTAAACGTTTTCAGCTTTGCAGA
CCAGAGGTCCCTGTGGCTACAGTAGCGCAGACACAGCCACAGGCATGTCATTGAATGGCTGCGGCTAT
GTTCCAATAAAAACTTATTTACAATAACAGGTGGTGGCCAAATTGGCCCATGGGCCTTATTTGGTGAA
CCCTGTTCTATGAGATCACCTAGGCTTCAGCCTTAAACAGTGGAAGCCATCCCCTGAATGACAAGTCA
CAAGGGTATCAAAGAAAGACCCCTGAATTTTCATGGAAAAAGCTATTCAGACCCCTGCTTGGAAAGCT
AAGGCACACTGCCACGAAGCAGCAAGGACGCCTTACAAGTCTCAGTGCAACAGAGATGGACACCTGGG
CTGGGCTGGACAATGTTTAAGGTTCCTTTTAGTCCATGACTCAAGTGATACTGTTTTAGGCTATCAGG
TAGTAAACACGATCTTAGACATCCCCATCTTTGTAAGCAGAACAGTACGGCACTTCACCACATCTGCT
TCCCACCATGCTTCTAAGCAGCTGTCTTCCCCCTGCTAATGTTACAACCAAAGCAGCCACCCCACCTC
CTCTCGTGTTGAGCCTCACGACCGCTGACCCAGCTGGAAAGCCAGCGCCCTGCCGCGTCACCCTGACT
CTGCTCAGAGCCAGCATTCCAGCCACAAAGAGGGCCTCCTTCCTTTCCTCTTTCATAAAAATGTTTTT
TGAAGAGTTAGAGTATATTTTAGGCTTTTTATCTTTATTAAAATTTCATGTGCATGTGTA

| | | | |
|---|---|---|---|
| NOV58f, SNP13382519 of | SEQ ID NO:1154 | 1268 aa | MW at 136576.5 kD |
| CG93387-05, Protein Sequence | | | SNP Change: no change |

MLRRATEDVRHYFPELLDFNATWVFVATWYRVTFFGGSSSSPVNTFQTVLITDGKLSFTIFNYESIVW
TTGTHASSGGNATGLGGIAAQAGFNAGDGQRYFSIPGSRTADMAEVETTTNVGVPGRWAFRIDDAQVR
VGGCGHTTSVCIALRPCLNGGKCIDDCVTGNPSYTCSCLSGFTGRRCHLDVNECASQPCQNGGTCTHG
INSFRCQCPAGFGGPTCETAQSPCDTKECQHGGQCQVENGSAVCVCQAGYTGAACEMDVDDCSPDPCL
NGGSCVDLVGNYTCLCAEPFKGLRCETGDHPVPDACLSAPCHNGGTCVDADQGYVCECPEGFMGLDCR
ERVPDDCECRNGGRCLGANTTLCQCPLGFFGLLCEFEITAMPCNMNTQCPDGGYCMEHGGSYLCVCHT
DHNASHSLPSPCDSDPCFNGGSCDAHDDSYTCECPRGFHGKHCEKARPHLCSSGPCRNGGTCKEAGGE
YHCSCPYRFTGRHCEIGKPDSCASGPCHNGGTCFHYIGKYKCDCPPGFSGRHCEIAPSPCFRSPCVNG
GTCEDRDTDFFCHCQAGYMGRRCQAEVDCGPPEEVKHATLRFNGTRLGAVALYACDRGYSLSAPSRIR
VCQPHGVWSEPPQCLEIDECRSQPCLHGGSCQDRVAGYLCLCSTGYEGAHCELERDECRAHPCRNGGS
CRNLPGAYVCRCPAGFVGVHCETEVDACDSSPCQHGGRCESGGGAYLCVCPESFFGYHCETVSDPCFS
SPCGGRGYCLASNGSHSCTCKVGYTGEDCAKELFPPTALKMERVEESGVSISWNPPNGPAARQMLDGY
AVTYVSSDGSYRRTDFVDRTRSSHQLQALAAGRAYNISVFSVKRNSNNKNDISRPAVLLARTRPRPVE
GFEVTNVTASTISVQWALHRIRHATVSGVRVSIRHPEALRDQATDVDRSVDRFTFHALLPGKRYTIQL
TTLSGLRGEEHPTESLATAPTHVWTRPLPPANLTAARVTATSAHVVWDAPTPGSLLEAYVINVTTSQS
TKSRYVPNGKLASYTVRDLLPGRRYQPSVIAVQSTELGPQQHQGGHHPRVLKNRPPPARLPELRLLND
HSAPETPTQPPRFSEFVDGRGRVSARFGGSPSKAATVRSQPTASAQLENMEEAPKRVSPALQLPEHGS
KDIGNVPGNCSENPCQNGGTCVPGADAHSCDCGPGFKGRRCELACIKVSRPCTRLFSETKAFPVWEGG
VCHHVYKRVYRVHQDICFKESCESTSLKKTPNRKQSKSQTLEKS

[0688] A ClustalW comparison of the above protein sequences yields the following sequence alignment shown in Table 58B.

TABLE 58B
Comparison of the NOV58 protein sequences.

| | | |
|---|---|---|
| NOV58a | MLRRATEDVRHYFPELLDFNATWVFVATWYRVTFFGGSSSSPVNTFQTVLITDGKLSFTI | (SEQ ID NO:1144) |
| NOV58b | MLRRATEDVRHYFPELLDFNATWVFVATWYRVTFFGGSSSSPVNTFQTVLITDGKLSFTI | (SEQ ID NO:1146) |
| NOV58c | MLRRATEDVRHYFPELLDFNATWVFVATWYRVTFFGGSSSSPVNTFQTVLITDGKLSFTI | (SEQ ID NO:1148) |
| NOV58d | ------------------------------------------------------------ | (SEQ ID NO:1150) |
| NOV58e | MLRRATEDVRHYFPELLDFNATWVFVATWYRVTFFGGSSSSPVNTFQTVLITDGKLSFTI | (SEQ ID NO:1152) |
| NOV58a | FNYESIVWTTGTHASSGGNATGLGGIAAQAGFNAGDGQRYFSIPGSRTADMAEVETTTNV | |
| NOV58b | FNYESIVWTTGTHASSGGNATGLGGIAAQAGFNAGDGQRYFSIPGSRTADMAEVETTTNV | |
| NOV58c | FNYESIVWTTGTHASSGGNATGLGGIAAQAGFNAGDGQRYFSIPGSRTADMAEVETTTIV | |
| NOV58d | ------------------------------------------------------------ | |
| NOV58e | FNYESIVWTTGTHASSGGNATGLGGIAAQAGFNAGDGQRYFSIPGSRTADMAEVETTTNV | |
| NOV58a | GVPGRWAFRIDDAQVRVGGCGHTTSVCLALRPCLNGGKCIDDCVTGNPSYTCSCLSGFTG | |
| NOV58b | GVPGRWAFRIDDAQVRVGGCGHTTSVCLALRPCLNGGKCIDDCVTGNPSYTCSCLSGFTG | |
| NOV58c | VVPGRWAFIIDDAQVRVGGCGHTTSVCLALRPCLNGGKCIDDCVTGNPSYTCSCLSGFTG | |
| NOV58d | ------------------------------------------------------------ | |
| NOV58e | GVPGRWAFRIDDAQVRVGGCGHTTSVCLALRPCLNGGKCIDDCVTGNPSYTCSCLSGFTG | |
| NOV58a | RRCHLDVNECASQPCQNGGTCTHGINSFRCQCPAGFGGPTCETAQSPCDTKECQHGGQCQ | |
| NOV58b | RRCHLDVNECASQPCQNGGTCTHGINSFRCQCPAGFGGPTCETAQSPCDTKECQHGGQCQ | |
| NOV58c | RRCHLDVNECASQPCQNGGTCTHGINSFRCQCPAGFGGPTCETAQSPCDTKECQHGGQCQ | |
| NOV58d | ------------------------------------------------------------ | |
| NOV58e | RRCHLDVNECASQPCQNGGTCTHGINSFRCQCPAGFGGPTCETAQSPCDTKECQHGGQCQ | |
| NOV58a | VENGSAVCVCQAGYTGAACEMDVDDCSPDPCLNGGSCVDLVGNYTCLCAEPFKGLRCETG | |
| NOV58b | VENGSAVCVCQAGYTGAACEMDVDDCSPDPCLNGGSCVDLVGNYTCLCAEPFKGLRCETG | |
| NOV58c | VENGSAVCVCQAGYTGAACEMDVDDCSPDPCLNGGSCVDLVGNYTCLCAEPFKGLRCETG | |
| NOV58d | ------------------------------------------------------------ | |
| NOV58e | VENGSAVCVCQAGYTGAACEMDVDDCSPDPCLNGGSCVDLVGNYTCLCAEPFKGLRCETG | |
| NOV58a | DNPVPDACLSAPCHNGGTCVDADQGYVCE-CPEGFMGLDCRERVPDDCECRNGGRCLGAN | |
| NOV58b | DHPVPDACLSAPCHNGGTCVDADQGYVCE-CPEGFMGLDCRERVPDDCECRNGGRCLGAN | |
| NOV58c | DHXQCQTPASRPLATMGAPVWMRTRATCASAPKASWAWTAGRESPMTVSAATEADAWAPT | |
| NOV58d | -----------------------------------MGLDCRERVPDDCECRNGGRCLGAN | |
| NOV58e | DHPVPDACLSAPCHNGGTCVDADQGYVCE-CPEGFMGLDCRERVPDDCECRNGGRCLGAN | |
| NOV58a | TTLCQCPLGFFGLLCEFEITAMPCNMNTQCPDGGYCMEHGGSYLCVCHTDHNASHSLPSP | |
| NOV58b | TTLCQCPLGFFGLLCEFEITAMPCNMNTQCPDGGYCMEHGGSYLCVCHTDHNASHSLPSP | |
| NOV58c | PPSAQCPLGFFGLLCEFEITAMPCNMNTQCPDGGYCMEHGGSYLCVCHTDHNASHSLPSP | |
| NOV58d | TTLCQCPLGFFGLLCEFEITAMPCNMNTQCPDGGYCMEHGGSYLCVCHTDHNASHSLPSP | |
| NOV58e | TTLCQCPLGFFGLLCEFEITAMPCNMNTQCPDGGYCMEHGGSYLCVCHTDHNASHSLPSP | |
| NOV58a | CDSDPCFNGGSCDAHDDSYTCECPRGFHGKHCEKARPHLCSSGPCRNGGTCKEAGGEYHC | |
| NOV58b | CDSDPCFNGGSCDAHDDSYTCECPRGFHGKHCEKARPHLCSSGPCRNGGTCKEAGGEYHC | |
| NOV58c | CDSDPCFNGGSCDAHDDSYTCECPRGFHGKHCEKARPHLCSSGPCRNGGTCKEAGGEYHC | |
| NOV58d | CDSDPCFNGGSCDAHDDSYTCECPRGFHGKHCEKARPHLCSSGPCRNGGTCKEAGGEYHC | |
| NOV58e | CDSDPCFNGGSCDAHDDSYTCECPRGFHGKHCEKARPHLCSSGPCRNGGTCKEAGGEYHC | |
| NOV58a | SCPYRFTGRHCEIGKPDSCASGPCHNGGTCFHYIGKYKCDCPPGFSGRHCEIAPSPCFRS | |
| NOV58b | SCPYRFTGRHCEIGKPDSCASGPCHNGGTCFHYIGKYKCDCPPGFSGRHCEIAPSPCFRS | |
| NOV58c | SCPYRFTGRHCEIGKPDSCASGPCHNGGTCFHYIGKYKCDCPPGFSGRHCEIAPSPCFRS | |
| NOV58d | SCPYRFTGRHCEIGKPDSCASGPCHNGGTCFHYIGKYKCDCPPGFSGRHCEIAPSPCFRS | |
| NOV58e | SCPYRFTGRHCEIGKPDSCASGPCHNGGTCFHYIGKYKCDCPPGFSGRHCEIAPSPCFRS | |
| NOV58a | PCVNGGTCEDRDTDFFCHCQAGYMGRRCQAEVDCGPPEEVKHATLRFNGTRLGAVALYAC | |
| NOV58b | PCVNGGTCEDRDTDFFCHCQAGYMGRRCQAEVDCGPPEEVKHATLRFNGTRLGAVALYAC | |
| NOV58c | PCVNGGTCEDRDTDFFCHCQAGYMGRRCQAEVDCGPPEEVKHATLRFNGTRLGAVALYAC | |
| NOV58d | PCVNGGTCEDRDTDFFCHCQAGYMGRRCQAEVDCGPPEEVKHATLRFNGTRLGAVALYAC | |
| NOV58e | PCVNGGTCEDRDTDFFCHCQAGYMGRRCQAEVDCGPPEEVKHATLRFNGTRLGAVALYAC | |
| NOV58a | DRGYSLSAPSRIRVCQPHGVWSEPPQCLEIDECRSQPCLHGGSCQDRVAGYLCLCSTGYE | |
| NOV58b | DRGYSLSAPSRIRVCQPHGVWSEPPQCLEIDECRSQPCLHGGSCQDRVAGYLCLCSTGYE | |
| NOV58c | DRGYSLSAPSRIRVCQPHGVWK-------IDECRSQPCLHGGSCQDRVAGYLCLCSTGYE | |
| NOV58d | DRGYSLSAPSRIRVCQPHGVWSEPPQCLEIDECRSQPCLHGGSCQDRVAGYLCLCSTGYE | |
| NOV58e | DRGYSLSAPSRIRVCQPHGVWSEPPQCLEIDECRSQPCLHGGSCQDRVAGYLCLCSTGYE | |
| NOV58a | GAHCELERDECRAHPCRNGGSCRNLPGAYVCRCPAGFVGVHCETEVDACDSSPCQHGGRC | |
| NOV58b | GAHCELERDECRAHPCRNGGSCRNLPGAYVCRCPAGFVGVHCETEVDACDSSPCQHGGRC | |
| NOV58c | GAHCELERDECRAHPCRNGGSCRNLPGAYVCRCPAGFVGVHCETEVDACDSSPCQHGGRC | |
| NOV58d | GAHCELERDECRAHPCRNGGSCRNLPGAYVCRCPAGFVGVHCETEVDACDSSPCQHGGRC | |
| NOV58e | GAHCELERDECRAHPCRNGGSCRNLPGAYVCRCPAGFVGVHCETEVDACDSSPCQHGGRC | |
| NOV58a | ESGGGAYLCVCPESFFGYHCETVSDPCFSSPCGGRGYCLASNGSHSCTCKVGYTGEDCAK | |
| NOV58b | ESGGGAYLCVCPESFFGYHCETVSDPCFSSPCGGRGYCLASNGSHSCTCKVGYTGEDCAK | |
| NOV58c | ESGGGAYLCVCPESFFGYHCETVSDPCFSSPCGGRGYCLASNGSHSCTCKVGYTGEDCAK | |
| NOV58d | ESGGGAYLCVCPESFFGYHCETVSDPCFSSPCGGRGYCLASNGSHSCTCKVGYTGEDCAK | |
| NOV58e | ESGGGAYLCVCPESFFGYHCETVSDPCFSSPCGGRGYCLASNGSHSCTCKVGYTGEDCAK | |
| NOV58a | ELFPPTALKMERVEESGVSISWNPPNGPAARQMLDGYAVTYVSSDGSYRRTDFVDRTRSS | |
| NOV58b | ELFPPTALKMERVEESGVSISWNPPNGPAARQMLDGYAVTYVSSDGSYRRTDFVDRTRSS | |
| NOV58c | ELFPPTALKMERVEESGVSISWNPPNGPAARQMLDGYAVTYVSSDGSYRRTDFVDRTRSS | |
| NOV58d | ELFPPTALKMERVEESGVSISWNPPNGPAARQMLDGYAVTYVSSDGSYRRTDFVDRTRSS | |
| NOV58e | ELFPPTALKMERVEESGVSISWNPPNGPAARQMLDGYAVTYVSSDGSYRRTDFVDRTRSS | |
| NOV58a | HQLQALAAGRAYNISVFSVKRNSNNKNDISRPAVLLARTRPRPVEGFEVTNVTASTISVQ | |
| NOV58b | HQLQALAAGRAYNISVFSVKRNSNNKNDISRPAVLLARTRPRPVEGFEVTNVTASTISVQ | |
| NOV58c | HQLQALAAGRAYNISVFSVKRNSNNKNDISRPAVLLARTRPRPVEGFEVTNVTASTISVQ | |
| NOV58d | HQLQALAAGRAYNISVFSVKRNSNNKNDISRPAVLLARTRPRPVEGFEVTNVTASTISVQ | |
| NOV58e | HQLQALAAGRAYNISVFSVKRNSNNKNDISRPAVLLARTRPRPVEGFEVTNVTASTISVQ | |
| NOV58a | WALHRIRHATVSGVRVSIRHPEALRDQATDVDRSVDRFTFRALLPGKRYTIQLTTLSGLR | |
| NOV58b | WALHRIRHATVSGVRVSIRHPEALRDQATDVDRSVDRFTFRALLPGKRYTIQLTTLSGLR | |
| NOV58c | WALHRIRHATVSGVRVSIRHPFALRDQATDVDRSVDRFTFPALLPGKRYTIQLTTLSGLR | |
| NOV58d | WALHRIRHATVSGVRVSIRHPEALRDQATDVDRSVDRFTFRALLPGKRYTIQLTTLSGLR | |
| NOV58e | WALHRIRHATVSGVRVSIRHPEALRDQATDVDRSVDRFTFRALLPGKRYTIQLTTLSGLR | |
| NOV58a | GEEHPTESLATAPTHVWTRPLPPANLTAARVTATSAHVVWDAPTPGSLLEAYVINVTTSQ | |
| NOV58b | GEEHPTESLATAPTHVWTRPLPPANLTAARVTATSAHVVWDAPTPGSLLEAYVINVTTSQ | |
| NOV58c | GEEHPTESLATAPTHVWTRPLPPANLTAARVTATSAHVVWDAPTPGSLLEAYVINVTTSQ | |
| NOV58d | GEEHPTESLATAPTHVWTRPLPPANLTAARVTATSAHVVWDAPTPGSLLEAYVINVTTSQ | |
| NOV58e | GEEHPTESLATAPTHVWTRPLPPANLTAARVTATSAHVVWDAPTPGSLLEAYVINVTTSQ | |
| NOV58a | STKSRYVPNGKLASYTVRDLLPGRRYQPSVIAVQSTELGPQQ------------------ | |
| NOV58b | STKSRYVPNGKLASYTVRDLLPGRRYQPSVIAVQSTELGPQHSEPAHLYIITSPRDGADR | |
| NOV58c | STKSRYVPNGKLASYTVRDLLPGRRYQLSVIAVQSTELGPQHSEPAHLYIITSPRDGADR | |
| NOV58d | STKSRYVPNGKLASYTVRDLLPGRRYQPSVIAVQSTELGPQHSEPAHLYIITSPRDGADR | |
| NOV58e | STKSRYVPNGKLASYTVRDLLPGRRYQPSVIAVQSTELGPQHSEPAHLYIITSPRDGADR | |
| NOV58a | --HQGGHHPRVLKNRPPPARLPELRLLNDHSAPETPTQPPRFSEFVDGRGRVSARFGGSP | |
| NOV58b | RWHQGGHHPRVLKNRPPPARLPELRLLNDHSAPETPTQPPRFSEFVDGRGRVSARFGGSP | |
| NOV58c | RWHQGGHHPRVLKNRPPPARLPELRLLNDHSAPETPTQPPRFSELVDGRGRVSARFGGSP | |
| NOV58d | RWHQGGHHPRVLKNRPPPARLPELRLLNDHSAPETPTQPPRFSEFVDGRGRVSARFGGSP | |
| NOV58e | RWHQGGHHPRVLKNRPPPARLPELRLLNDHSAPETPTQPPRFSEFVDGRGRVSARFGGSP | |
| NOV58a | SKAATVRS---------------------------------------------------- | |
| NOV58b | SKAATVRS---------------------------------------------------- | |
| NOV58c | SKAATVRSRPVPYMMSPPPPPAQSPASDPHPDCAQGAGLVGRRQHAPPWQEGQLGHPCSL | |
| NOV58d | SKAATVRS---------------------------------------------------- | |
| NOV58e | SKAATVRS---------------------------------------------------- | |
| NOV58a | -----------------------------QPTASAQLENMEEAPKRVSPALQLPEHGSKD | |
| NOV58b | -----------------------------QPTASAQLENMEEAPKRVSPALQLPEHGSKD | |
| NOV58c | RYRSTQKGGPRTIPGAKQLRRVVTAWLLLEPTASAQLENMEEAPKRVSLALQLPEHGSKD | |
| NOV58d | -----------------------------QPTASAQLENMEEAPKRVSPALQLPEHGSKD | |
| NOV5Be | -----------------------------QPTASAQLENMEEAPKRVSPALQLPEHGSKD | |
| NOV58a | IG---------------------------------------------------------- | |
| NOV58b | IG---------------------------------------------------------- | |
| NOV58c | IGSYAGPELSPSPGLCLVRIEASTSLQGTKHLLSTCSTQAKEQGGAFTLPCLCGPVQGDH | |
| NOV58d | IG---------------------------------------------------------- | |
| NOV58e | VG---------------------------------------------------------- | |
| NOV58a | ---------------NVPGNCSENPCQNGGTCVPGADAHSCDCGPGFKGRRCELACIKVS | |
| NOV58b | ---------------NVPGNCSENPCQNGGTCVPGADAHSCDCGPGFKGRRCELACIKVS | |
| NOV58c | GVGEGKPVFTDHSPADVPGNCSENPCQNGGTCVPGADAHSCDCGPGFKGRRCELG-IKES | |
| NOV58d | ---------------NVPGNCSENPCQNGGTCVPGADAHSCDCGPGFKGRRCELACIKVS | |
| NOV58e | ---------------NVPGNCSENPCQNGGTCVPGADAHSCGCGPGFKGRRCELACIKVS | |
| NOV58a | RPCTRLFSETKAFPVWEGGVCHHVYKRVYRVHQDICFKESCESTSLKKTPNPKQSKSQTL | |
| NOV58b | RPCTRLFSETKAFPVWEGGVCHHVYKRVYRVHQDICFKESCESTSLKKTPNRKQSKSQTL | |
| NOV5Bc | TEFTKTSASKRAVKAQAS-----------RRPQTGASGEQAHAVSCM------------- | |
| NOV58d | RPCTRLFSETKAFPVWEGGVCHHVYKRVYRVHQDICFKESCESTSLKKTPNPKQSKSQTL | |
| NOV58e | RPCTRLFSETKAFPVWEGGVCHHVYKRVYRVHQDICFKESCESTSLKKTPNRKQSKSQTL | |
| NOV58a | EKS | |
| NOV58b | EKS | |
| NOV58c | --- | |
| NOV58d | EKS | |
| NOV58e | EKS | |

[0689] Further analysis of the NOV58a protein yielded the following properties shown in Table 58C.

TABLE 58C
Protein Sequence Properties NOV58a

| | |
|---|---|
| SignalP analysis: | Cleavage site between residues 41 and 42 |
| PSORT II analysis: | |

| PSG: | a new signal peptide prediction method | |
|---|---|---|
| | N-region: | length 10; pos. chg 3; neg. chg 2 |
| | H-region: | length 4; peak value −6.27 |
| | PSG score: | −10.68 |

| | |
|---|---|
| GvH: | von Heijne's method for signal seq. recognition |
| | GvH score (threshold: −2.1): −3.98 |
| | possible cleavage site: between 40 and 41 |

>>> Seems to have no N-terminal signal peptide

| ALOM: | Klein et al's method for TM region allocation | |
|---|---|---|
| | Init position for calculation: 1 | |
| | Tentative number of TMS(s) for the threshold 0.5: 0 | |
| | number of TMS(s) . . . fixed | |
| | PERIPHERAL | Likelihood = 2.12 (at 365) |

| | ALOM score: 2.12 (number of TMSs: 0) | | | |
|---|---|---|---|---|
| MITDISC: | discrimination of mitochondrial targeting seq | | | |
| | R content: | 2 | Hyd Moment(75): | 18.26 |
| | Hyd Moment(95): | 17.56 | G content: | 0 |
| | D/E content: | 2 | S/T content: | 1 |

| | |
|---|---|
| | Score: −1.90 |
| Gavel: | prediction of cleavage sites for mitochondrial preseq |
| | R-2 motif at 14 RRA\|TE |

NUCDISC: discrimination of nuclear localization signals

| | |
|---|---|
| | pat4: none |
| | pat7: PGFKGRR (3) at 1190 |
| | bipartite: none |
| | content of basic residues: 9.5% |
| | NLS Score: −0.22 |
| KDEL: | ER retention motif in the C-terminus: none |

ER Membrane Retention Signals:

XXRR-like motif in the N-terminus: LRRA
KKXX-like motif in the C-terminus: TLEK

SKL: peroxisomal targeting signal in the C-terminus: none
PTS2: 2nd peroxisomal targeting signal: none
VAC: possible vacuolar targeting motif: none
RNA-binding motif: none
Actinin-type actin-binding motif:

type 1: none
type 2: none

NMYR: N-myristoylation pattern: none
Prenylation motif: none
memYQRL: transport motif from cell surface to Golgi: none
Tyrosines in the tail: none
Dileucine motif in the tail: none
checking 63 PROSITE DNA binding motifs: none
checking 71 PROSITE ribosomal protein motifs: none
checking 33 PROSITE prokaryotic DNA binding motifs: none

| | |
|---|---|
| NNCN: | Reinhardt's method for Cytoplasmic/Nuclear |
| | discrimination |
| | Prediction: nuclear |
| | Reliability: 89 |
| COIL: | Lupas's algorithm to detect coiled-coil regions |
| | total: 0 residues |

Final Results (k = 9/23):

```
52.2%: nuclear
34.8%: mitochondrial
  8.7%: cytoplasmic
  4.3%: cytoskeletal
```

>> prediction for CG93387-05 is nuc (k = 23)

[0690] A search of the NOV58a protein against the Geneseq database, a proprietary database that contains sequences published in patents and patent publication, yielded several homologous proteins shown in Table 58D.

TABLE 58D
Geneseq Results for NOV58a

| | | NOV58a | Identities/ | | |
|---|---|---|---|---|---|
| | | Residues/ | Similarities for | | |
| Geneseq | Protein/Organism/Length | Match | the Matched | | Expect |
| Identifier | [Patent #,Date] | Residues | Region | | Value |
| AAB82249 | Human insulin-responsive sequence | 261 . . . 1268 | 1004/1028 | (97%) | 0.0 |
| | DNA binding protein-1 - Homo | 1 . . . 1028 | 1004/1028 | (97%) | |
| | sapiens, 1028 aa. [WO200132873-A1, | | | | |
| | 10-MAY-2001] | | | | |
| AAB82247 | Rat insulin-responsive sequence DNA | 271 . . . 1253 | 797/1003 | (79%) | 0.0 |
| | binding protein-1 - Rattus sp, 1008 aa. | 1 . . . 1002 | 876/1003 | (86%) | |
| | [WO200132873-A1, 10-MAY-2001] | | | | |
| AAB42900 | Human ORFX ORF2664 polypeptide | 1 . . . 627 | 592/629 | (94%) | 0.0 |
| | sequence SEQ ID NO: 5328 - Homo | 61 . . . 689 | 593/629 | (94%) | |
| | sapiens, 694 aa. [WO200058473-A2, | | | | |
| | 05-OCT-2000] | | | | |
| AAB82251 | Rat insulin-responsive sequence DNA | 780 . . . 1253 | 368/494 | (74%) | 0.0 |
| | binding protein-1 (truncated) - Rattus | 1 . . . 493 | 414/494 | (83%) | |
| | sp, 499 aa. [WO200132873-A1, 10- | | | | |
| | MAY-2001] | | | | |
| AAB82250 | Human insulin-responsive sequence | 813 . . . 1161 | 344/369 | (93%) | 0.0 |
| | DNA binding protein-1 (variant) - Homo | 1 . . . 369 | 345/369 | (93%) | |
| | sapiens, 387 aa. [WO200132873-A1, | | | | |
| | 10-MAY-2001] | | | | |

[0691] In a BLAST search of public sequence databases, the NOV58a protein was found to have homology to the proteins shown in the BLASTP data in Table 58E.

TABLE 58E
Public BLASTP Results for NOV58a

| | | NOV58a | Identities/ | | |
|---|---|---|---|---|---|
| Protein | | Residues/ | Similarities for | | |
| Accession | | Match | the Matched | | Expect |
| Number | Protein/Organism/Length | Residues | Portion | | Value |
| Q8TER0 | FLJ00133 protein - Homo sapiens | 7 . . . 1268 | 1258/1282 | (98%) | 0.0 |
| | (Human), 1282 aa (fragment). | 1 . . . 1282 | 1258/1282 | (98%) | |
| AAO41836 | Secreted protein SST3 - Mus | 1 . . . 939 | 800/939 | (85%) | 0.0 |
| | musculus (Mouse), 1065 aa. | 126 . . . 1064 | 862/939 | (91%) | |
| Q8N369 | Hypothetical protein - Homo sapiens | 666 . . . 1252 | 549/607 | (90%) | 0.0 |
| | (Human), 600 aa. | 26 . . . 599 | 551/607 | (90%) | |
| Q8TEP7 | FLJ00146 protein - Homo sapiens | 706 . . . 1268 | 498/583 | (85%) | 0.0 |
| | (Human), 522 aa (fragment). | 1 . . . 522 | 499/583 | (85%) | |
| P10079 | Fibropellin I precursor (Epidermal | 140 . . . 777 | 261/679 | (38%) | e−145 |
| | growth factor-related protein 1) | 249 . . . 895 | 339/679 | (49%) | |
| | (UEGF-1) - Strongylocentrotus | | | | |
| | purpuratus (Purple sea urchin), 1064 | | | | |
| | aa. | | | | |

[0692] PFam analysis predicts that the NOV58a protein contains the domains shown in the Table 58F.

TABLE 58F
Domain Analysis of NOV58a

| | | Identities/ | |
|---|---|---|---|
| | | Similarities for | |
| Pfam | NOV58a | the Matched | Expect |
| Domain | Match Region | Region | Value |
| EGF | 147 . . . 183 | 16/47 (34%) | 3.4e−05 |
| | | 28/47 (60%) | |
| EGF | 190 . . . 221 | 15/47 (32%) | 6.9e−08 |
| | | 28/47 (60%) | |
| EGF | 228 . . . 259 | 13/47 (28%) | 1.4e−05 |
| | | 21/47 (45%) | |
| EGF | 266 . . . 297 | 17/47 (36%) | 1.5e−09 |
| | | 26/47 (55%) | |
| EGF | 308 . . . 339 | 18/47 (38%) | 2.9e−09 |
| | | 25/47 (53%) | |
| EGF | 420 . . . 451 | 17/47 (36%) | 4.3e−07 |
| | | 25/47 (53%) | |
| EGF | 459 . . . 490 | 16/47 (34%) | 1.5e−05 |
| | | 26/47 (55%) | |
| EGF | 498 . . . 529 | 18/47 (38%) | 4.9e−09 |
| | | 29/47 (62%) | |
| EGF | 536 . . . 567 | 15/47 (32%) | 4.7e−06 |
| | | 22/47 (47%) | |
| sushi | 573 . . . 626 | 16/64 (25%) | 3.8e−05 |
| | | 36/64 (56%) | |
| EGF | 632 . . . 663 | 14/47 (30%) | 7.8e−07 |
| | | 21/47 (45%) | |
| EGF | 670 . . . 701 | 17/47 (36%) | 3.3e−07 |
| | | 23/47 (49%) | |
| EGF | 708 . . . 739 | 13/47 (28%) | 1.4e−05 |
| | | 25/47 (53%) | |
| EGF | 746 . . . 777 | 13/47 (28%) | 3.5e−05 |
| | | 26/47 (55%) | |
| fn3 | 781 . . . 862 | 24/88 (27%) | 3.9e−08 |
| | | 60/88 (68%) | |
| fn3 | 880 . . . 963 | 18/87 (21%) | 2e−09 |
| | | 62/87 (71%) | |
| fn3 | 979 . . . 1061 | 27/86 (31%) | 9.3e−08 |
| | | 58/86 (67%) | |
| EGF | 1166 . . . 1197 | 17/47 (36%) | 4.2e−08 |
| | | 28/47 (60%) | |

### Example 59

[0693] The NOV59 clone was analyzed, and the nucleotide and encoded polypeptide sequences are shown in Table 59A.

TABLE 59A
NOV59 Sequence Analysis

| | | |
|---|---|---|
| NOV59a, CG93871-01 | SEQ ID NO: 1155 | 2018 bp |
| DNA Sequence | ORF Start: ATG at 101 | ORF Stop: TAA at 1937 |

CTCCCCACGGCGCCAGGAGGAGGGGCGAGGGCCGGCAGCCCCCTCTCCCGCGCGCGGCGCAGGAGCCC
AGCCCAGCCCGGGGGACCCGCCGCCGCCGGTCATGTGGGCCGGACTGCTCCTTCGGGCCGCCTGTGTC
GCGCTCCTGCTGCCGGGGGCACCAGCCCGAGGCTACACCGGGAGGAAGCCGCCCGGGCACTTCGCGGC
CGAGAGGCGCCGACTGGGCCCCCACGTCTGCCTCTCTGGGTTTGGGAGTGGCTGCTGCCCTGGCTGGG
CGCCCTCTATGGGTGGTGGGCACTGCACCCTGCGTCTCTGCTCCTTCGGCTGTGGGAGTGGCATCTGC
ATCGCTCCCAATGTCTGCTCCTGCCAGGATGGAGAGCAAGGGGCCACCTGCCCAGAAACCCATGGACC
ATGTGGGGAGTACGGCTGTGACCTTACCTGCAACCATGGAGGCTGTCAGGAGGTGGCCCGAGTGTGCC
CCGTGGGCTTCTCGATGACGGAGACAGCTGTTGGCATCAGGTGTGACATTGACGAATGTGTAACCTCC
TCCTGCGAGGGCCACTGTGTGAACACAGAAGGTGGGTTTGTGTGCGAGTGTGGGCCGGGCATGCAGCT
GTCTGCCGACCGCCACAGCTGCCAAGACACTGACGAATGCCTAGGGACTCCCTGTCAGCAGAGATGTA
AAAACAGCATTGGCAGCTACAAGTGTTCCTGTCGAACTGGCTTCCACCTTCATGGCAACCGGCACTCC
TGTGTAGATGTAAACGAGTGTCGGAGGCCATTGGAGAGGCGAGTCTGTCACCATTCCTGCCACAACAC
CGTGGGCAGCTTCCTATGCACATGCCGACCTGGCTTCAGGCTCCGAGCTGACCGCGTGTCCTGTGAAG
CTTTCCCGAAAGCCGTGCTGGCCCCATCTGCCATCCTGCAACCCCGGCAACACCCGTCCAAGATGCTT
CTGTTGCTTCCTGAGGCCGGCCGGCCTGCCCTGTCCCCAGGACATAGCCCTCCTTCTGGGGCTCCAGG
GCCCCCAGCCGGAGTCAGGACCACCCGCCTGCCATCTCCCACCCCACGACTACCCACATCCTCCCCTT
CTGCCCCTGTGTGGCTGCTGTCCACCCTGCTGGCCACCCCAGTGCCTACTGCCTCCCTGCTGGGGAAC
CTCAGACCCCCCTCACTCCTTCAGGGGGAGGTGATGGGGACCCCTTCCTCACCCAGGGGCCCTGAGTC
CCCCCGACTGGCAGCAGGGCCCTCTCCCTGCTGGCACCTGGGAGCCATGCATGAATCAAGGAGTCGCT
GGACAGAGCCTGGGTGTTCCCAGTGCTGGTGCGAGGATGGGAAGGTGACCTGTGAAAAGGTGAGGTGT
GAAGCTGCTTGTTCCCACCCAATTCCCTCCAGAGATGGTGGGTGCTGCCCATCGTGCACAGGTTGTTT
TCACAGTGGTGTCGTCCGAGCTGAAGGGGATGTGTTTTCACCTCCCAATGAGAACTGCACCGTCTGTG
TCTGTCTGGCTGGAAACGTGTCGTGCATGTTTCGTGAGTGTCCTTTTGGCCCGTGTGAGACCCCCCAT
AAAGACAGATGCTATTTCCACGGCCGGTGGTACGCAGACGGGGCTGTGTTCAGTGGGGGTGGTGACGA
GTGTACCACCTGTGTTTGCCAGAATGGGGAGGTGGAGTGCTCCTTCATGCCCTGCCCTGAGCTGGCCT
GCCCCCGAGAAGAGTGGCGGCTGGGCCCTGGGCAGTGTTGCTTCACCTGCCAGGAGCCCACACCCTCG
ACAGGTTGCTCTCTTGACGACAACGGGGTTGAGTTTCCGATTGGACAGATCTGGTCGCCTGGTGACCC
CTGTAGATGGCTCGGTGAGCTGCAAGAGGACAGACTGTGTGGACTCCTGCCCTCACCCGATCCGGATC
CCTGGACAGTGCTGCCCAGACTGTTCAGCAGGTAATCCCCTGCCTCTGCCCCAAGCCCCCAGGGCAGG
GCATCTCAGGCATCGGGCTCCTTAAGCCCTATACAGCCTTCATCTC

| | | | |
|---|---|---|---|
| NOV59a, CG93871-01 | SEQ ID NO: 1156 | 612 aa | MW at 65156.4kD |
| Protein Sequence | | | |

MWAGLLLRAACVALLLPGAPARGYTGRKPPGHFAAERRRLGPHVCLSGFGSGCCPGWAPSMGGGHCTL
RLCSFGCGSGICIAPNVCSCQDGEQGATCPETHGPCGEYGCDLTCNHGGCQEVARVCPVGFSMTETAV
GIRCDIDECVTSSCEGHCVNTEGGFVCECGPGMQLSADRHSCQDTDECLGTPCQQRCKNSIGSYKCSC
RTGFHLHGNRHSCVDVNECRRPLERRVCHHSCHNTVGSFLCTCRPGFRLRADRVSCEAFPKAVLAPSA
ILQPRQHPSKMLLLLPEAGRPALSPGHSPPSGAPGPPAGVRTTRLPSPTPRLPTSSPSAPVWLLSTLL
ATPVPTASLLGNLRPPSLLQGEVMGTPSSPRGPESPRLAAGPSPCWHLGAMHESRSRWTEPGCSQCWC
EDGKVTCEKVRCEAACSHPIPSRDGGCCPSCTGCFHSGVVRAEGDVFSPPNENCTVCVCLAGNVSCMF
RECPFGPCETPHKDRCYFHGRWYADGAVFSGGGDECTTCVCQNGEVECSFMPCPELACPREEWRLGPG
QCCFTCQEPTPSTGCSLDDNGVEFPIGQIWSPGDPCRWLGELQEDRLCGLLPSPDPDPWTVLPRLFSR

| | | |
|---|---|---|
| NOV59b, CG93871-05 | SEQ ID NO: 1157 | 2819 bp |
| DNA Sequence | ORF Start: ATG at 5 | ORF Stop: TAA at 2807 |

GGTCATGTGGGCCGGACTGCTCCTTCGGGCCGCCTGTGTCGCGCTCCTGCTGCCGGGGGCACCAGCCC
GAGGCTACACCGGGAGGAAGCCGCCCGGGCACTTCGCGGCCGAGAGACGCCGACTGGGCCCCCACGTC
TGCCTCTCTGGGTTTGGGAGTGGCTGCTGCCCTGGCTGGGCGCCCTCTATGGGTGGTGGGCACTGCAC
CCTGCCCCTCTGCTCCCTCGGCTGTGGGAGTGGCATCTGCATCGCTCCCAATGTCTGCTCCTGCCAGG
ATGGAGAGCAAGGGGCCACCTGCCCAGAAACCCATGGACCATGTGGGGAGTACGGCTGTGACCTTACC
TGCAACCATGGAGGCTGTCAGGAGGTGGCCCGAGTGTGCCCCGTGGGCTTCTCGATGACGGAGACAGC
TGTTGGCATCAGGTGTACAGACATTGACGAATGTGTAACCTCCTCCTGCGAGGGCCACTGTGTGAACA
CAGAAGACACTGACGAATGCCTAGGGACTCCCTGTCAGCAGAGATGTAAAAACAGCATTGGCAGCTAC
AAGTGTTCCTGTCGAACTGGCTTCCACCTTCATGGCAACCGGCACTCCTGTGTAGATGTAAACGAGTG
TCGGAGGCCATTGGAGAGGCGAGTCTGTCACCATTCCTGCCACAACACCGTGGGCAGCTTCCTATGCA
CATGCCGACCTGGCTTCAGGCTCCGAGCTGACCGCGTGTCCTGTGAAGCTTTCCCGAAAGCCGTGCTG
GCCCCATCTGCCATCCTGCAACCCCGGCAACACCCGTCCAAGATGCTTCTGTTGCTTCCTGAGGCCGG
CCGGCCTGCCCTGTCCCCAGGACATAGCCCTCCTTCTGGGGCTCCAGGGCCCCCAGCCGGAGTCAGGA
CCACCCGCCTGCCATCTCCCACCCCACGACTACCCACATCCTCCCCTTCTGCCCCTGTGTGGCTGCTG
TCCACCCTGCTGGCCACCCCAGTGCCTACTGCCTCCCTGCTGGGGAACCTCAGACCCCCCTCACTCCT
TCAGGGGGAGGTGATGGGGACCCCTTCCTCACCCAGGGGCCCTGAGTCCCCCCGACTGGCAGCAGGGC
CCTCTCCCTGCTGGCACCTGGGAGCCATGCATGAATCAAGGAGTCGCTGGACAGAGCCTGGGTGTTCC
CAGTGCTGGTGCGAGGACGGGAAGGTGACCTGTGAAAAGGTGAGGTGTGAAGCTGCTTGTTCCCACCC
AATTCCCTCCAGAGATGGTGGGTGCTGCCCATCGTGCACAGGCTGTTTTCACAGTGGTGTCGTCCGAG
CTGAAGGGGATGTGTTTTCACCTCCCAATGAGAACTGCACCGTCTGTGTCTGTCTGGCTGGAAACGTG
TCCTGCATCTCTCCTGAGTGTCCTTCTGGCCCCTGTCAGACCCCCCCACAGACGGATTGCTGTACTTG
TGTTCCAGTGAGATGCTATTTCCACGGCCGGTGGTACGCAGACGGGGCTGTGTTCAGTGGGGGTGGTG
ACGAGTGTACCACCTGTGTTTGCCAGAATGGGGAGGTGGAGTGCTCCTTCATGCCCTGCCCTGAGCTG
GCCTGCCCCCGAGAAGAGTGGCGGCTGGGCCCTGGGCAGTGTTGCTTCACCTGCCAGGAGCCCACACC
CTCGACAGGCTGCTCTCTTGACGACAACGGGGTTGAGTTTCCGATTGGACAGATCTGGTCGCCTGGTG
ACCCCTGTGAGTTATGCATCTGCCAGGCAGATGGCTCGGTGAGCTGCAAGAGGACAGACTGTGTGGAC
TCCTGCCCTCACCCGATCCGGATCCCTGGACAGTGCTGCCCAGACTGTTCAGCAGGCTGCACCTACAC
AGGCAGAATCTTCTATAACAACGAGACCTTCCCGTCTGTGCTGGACCCATGTCTGAGCTGCATCTGCC
TGCTGGGCTCAGTGGCCTGTTCCCCCGTGGACTGCCCCATCACCTGTACCTACCCTTTCCACCCTGAC
GGGGAGTGCTGCCCCGTGTGCCGAGACTGCAACTACGAGGGAAGGAAGGTGGCGAATGGCCAGGTGTT
CACCTTGGATGATGAACCCTGCACCCGGTGCACGTGCCAGCTGGGAGAGGTGAGCTGTGAGAAGGTTC
CCTGCCAGCGGGCCTGTGCCGACCCTGCCCTGCTTCCTGGGGACTGCTGCTCTTCCTGTCCAGATTCC
CTGTCTCCTCTGGAAGAAAAGCAGGGGCTCTCCCCTCACGGAAATGTGGCATTCAGCAAAGCTGGTCG
GAGCCTGCATGGAGACACTGAGGCCCCTGTCAACTGTAGCTCCTGTCCTGGGCCCCCGACAGCATCAC
CCTCGAGGCCGGTGCTTCATCTCCTCCAGCTCCTTTTAAGAACGAACTTGATGAAAACACAGACTTTA
CCTACAAGCCCGGCAGGAGCTCATGGTCCACACTCACTCGCTTTGGGGCTGACAGCCACTTTCCCAGG
GGAGCCTGGGGCCTCCCCTCGACTCTCACCAGGGCCTTCGACCCCTCCAGGAGCCCCCACTCTACCTC
TAGCTTCCCCAGGGGCTCCTCAGCCACCTCCTGTGACTCCAGAGCGCTCGTTCTCAGCCTCTGGGGCC
CAGATAGTGTCCAGGTGGCCTCCTCTGCCTGGCACCCTCCTGACGGAAGCTTCAGCACTTTCCATGAT
GGACCCCAGCCCCTCGAAGACCCCCATCACCCTCCTCGGGCCTCGCGTGCTTTCTCCCACCACCTCTA
GACTCTCCACAGCCCTTGCAGCCACCACCCACCCTGGCCCCCAGCAGCCCCCAGTGGGGGCTTCTCGG
GGGGAAGAGTCCACCATGTAAGGAGGTCACT

| | | | |
|---|---|---|---|
| NOV59b, CG93871-05 | SEQ ID NO: 1158 | 934 aa | MW at 97715.0kD |
| Protein Sequence | | | |

MWAGLLLRAACVALLLPGAPARGYTGRKPPGHFAAERRRLGPRVCLSGFGSGCCPGWAPSMGGGHCTL
PLCSLGCGSGICIAPNVCSCQDGEQGATCPETHGPCGEYGCDLTCNHGGCQEVARVCPVGFSMTETAV
GIRCTDIDECVTSSCEGHCVNTEDTDECLGTPCQQRCKNSIGSYKCSCRTGFHLHGNRHSCVDVNECR
RPLERRVCHHSCHNTVGSFLCTCRPGFRLRADRVSCEAFPKAVLAPSAILQPRQHPSKMLLLLPEAGR
PALSPGHSPPSGAPGPPAGVRTTRLPSPTPRLPTSSPSAPVWLLSTLLATPVPTASLLGNLRPPSLLQ
GEVMGTPSSPRGPESPRIAAGPSPCWHLGAMHESRSRWTEPGCSQCWCEDGKVTCEKVRCEAACSHPI
PSRDGGCCPSCTGCFHSGVVRAEGDVFSPPNENCTVCVCLAGNVSCISPECPSGPCQTPPQTDCCTCV
PVRCYFHGRWYADGAVFSGGGDECTTCVCQNGEVECSFMPCPELACPRBEWRLGPGQCCFTCQEPTPS
TGCSLDDNGVEFPIGQIWSPGDPCELCICQADGSVSCKRTDCVDSCPHPIRIPGQCCPDCSAGCTYTG
RIFYNNETFPSVLDPCLSCICLLGSVACSPVDCPITCTYPFHPDGECCPVCRDCNYEGRKVANGQVFT
LDDEPCTRCTCQLGEVSCEKVPCQRACADPALLPGDCCSSCPDSLSPLEEKQGLSPHGNVAFSKAGRS
LHGDTEAPVNCSSCPGPPTASPSRPVLHLLQLLLRTNLMKTQTLPTSPAGAHGPHSLALGLTATFPGE
PGASPRLSPGPSTPPGAPTLPLASPGAPQPPPVTPERSFSASGAQIVSRWPPLPGTLLTEASALSMMD
PSPSKTPITLLGPRVLSPTTSRLSTALAATTHPGPQQPPVGASRGEESTM

| | | |
|---|---|---|
| NOV59c, 198488432 | SEQ ID NO: 1159 | 1814 bp |
| DNA Sequence | ORF Start: at 1 | ORF Stop: at 1813 |

GGTACCCGAGGCTACACCGGGAGGAAGCCGCCCGGGCACTTCGCGGCCGAGAGACGCCGACTGGGCCC
CCACGTCTGCCTCTCTGGGTTTGGGAGTGGCTGCTGCCCTGGCTGGGCGCCCTCTATGGGTGGTGGGC
ACTGCACCCTGCCCCCCTGCTCCTTCGGCTGTGGGAGTGGCATCTGCATCGCTCCCAATGTCTGCTCC
TGCCAGGATGGAGAGCAAGGGGCCACCTGCCCAGAAACCCATGGACCATGTGGGGAGTACGGCTGTGA
CCTTACCTGCAACCATGGAGGCTGTCAGGAGGTGGCCCGAGTGTGCCCCGTGGGCTTCTCGATGACGG
AGACAGCTGTTGGCATCAGGTGTACAGACATTGACGAATGTGTAACCTCCTCCTGCGAGGGCCACTGT
GTGAACACAGAAAGTGGGTTTGTGTGCGAGTGTGGGCCGGGCATGCAGCTGTCTGCCGACCGCCACAG
CTGCCAAGACACTGACGAATGCCTAGGGACTCCCTGTCAGCAGAGATGTAAAAACAGCATTGGCAGCT
ACAAGTGTTCCTGTCGAACTGGCTTCCACCTTCATGGCAACCGGCACTCCTGTGTAGATGTAAACGAG
TGTCGGAGGCCATTGGAGAGGCGAGTCTGTCACCATTCCTGCCACAACACCGTGGGCAGCTTCCTATG
CACATGCCGACCTGGCTTCAGGCTCCGAGCTGACCGCGTGTCCTGTGAAGCTTTCCCGAAAGCCGTGC
TGGCCCCATCTGCCATCCTGCAACCCCGGCAACACCCGTCCAAGATGCTTCTGTTGCTTCCTGAGGCC
GGCCGGCCTGCCCTGTCCCCAGGACATAGCCCTCCTTCTGGGGCTCCAGGGCCCCCAGCCGGAGTCAG
GACCACCCGCCTGCCATCTCCCACCCCACGACTACCCACATCCTCCCCTTCTGCCCCTGTGTGGCTGC
TGTCCACCCTGCTGGCCACCCCAGTGCCTACTGCCTCCCTGCTGGGGAACCTCAGACCCCCCTCACTC
CTTCAGGGGGAGGTGATGGGGACCCCTTCCTCACCCAGGGGCCCTGAGTCCCCCCGACTGGCAGCAGG
GCCCTCTCCCTGCTGGCACCTGGGAGCCATGTATGAATCAAGGAGTCGCTGGACAGAGCCTGGGTGTT
CCCAGTGTTGGTGCGAGGACGGGAAGGTGACCTGTGAAAAGGTGAGGTGTGAAGCTGCTTGTTCCCAC
CCAATTCCCTCCAGAGATGGTGGGTGCTGCCCATCGTGCACAGGCTGTTTTCACAGTGGTGTCGTCCG
AGCTGAAGGGGATGTGTTTTCACCTCCCAATGAGAACTGCACCGTCTGTGTCTGTCTGGCTGGAAACG
TGTCCTGCATCTCTCCTGAGTGTCCTTCTGGCCCCTGTCAGACCCCCCCACAGACGGATTGCTGTACT
TGTGTTCCAGTGAGATGCTATTTCCACGGCCGGTGGTACGCAGACGGGGCTGTGTTCAGTGGGGGTGG
TGACGAGTGTACCACCTGTGTTTGCCAGAATGGGGAGGTGGAGTGCTCCTTCATGCCCTGCCCTGAGC
TGGCCTGCCCCCGAGAAGAGTGGCGGCTGGGCCCTGGGCAGTGTTGCTTCACCTGCCAGGAGCCCACA
CCCTCGACAGGCTGCTCTCTTGACGACAACGGGGTTGAGTTTCCGATTGGACAGATCTGGTCGCCTGG
TGACCCCTGTGAGTTATGCATCTGCCAGGCAGATGGCTCGGTGAGCTGCAAGAGGACAGACTGTGTGG
ACTCCTGCCCTCACCCGATCCGGATCCCTGGACAGTGCTGCTCGAG

| | | | |
|---|---|---|---|
| NOV59c, 198488432 | SEQ ID NO: 1160 | 1604 aa | MW at 63737.5kD |
| Protein Sequence | | | |

GTRGYTGRKPPGHFAAERRRLGPHVCLSGFGSGCCPGWAPSMGGGHCTLPPCSFGCGSGICIAPNVCS
CQDGEQGATCPETHGPCGEYGCDLTCNHGGCQEVARVCPVGFSMTETAVGIRCTDIDECVTSSCEGHC
VNTESGFVCECGPGMQLSADRHSCQDTDECLGTPCQQRCKNSIGSYKCSCRTGFHLHGNRHSCVDVNE
CRRPLERRVCHHSCHNTVGSFLCTCRPGFRLRADRVSCEAFPKAVLAPSAILQPRQHPSKMLLLLPEA
GRPALSPGHSPPSGAPGPPAGVRTTRLPSPTPRLPTSSPSAPVWLLSTLLATPVPTASLLGNLRPPSL
LQGEVMGTPSSPRGPESPRLAAGPSPCWHLGAMYESRSRWTEPGCSQCWCEDGKVTCEKVRCEAACSH
PIPSRDGGCCPSCTGCFHSGVVRAEGDVFSPPNENCTVCVCLAGNVSCISPECPSGPCQTPPQTDCCT
CVPVRCYFHGRWYADGAVFSGGGDECTTCVCQNGEVECSFMPCPELACPREEWRLGPGQCCFTCQEPT
PSTGCSLDDNGVEFPIGQIWSPGDPCELCICQADGSVSCKRTDCVDSCPHPIRIPGQCCS

| | | |
|---|---|---|
| NOV59d, 198488424 | SEQ ID NO: 1161 | 1790 bp |
| DNA Sequence | ORF Start: at 1 | ORF Stop: at 1789 |

GGTACCCGAGGCTACACCGGGAGGAAGCCGCCCGGGCACTTCGCGGCCGAGAGACGCCGACTGGGCCC
CCACGTCTGCCTCTCTGGGTTTGGGAGTGGCTGCTGCCCTGGCCGGGCGCCCTCTATGGGTGGTGGGC
ACTGCACCCTGCCCCTCTGCTCCTTCGGCTGTGGGAGTGGCATCTGCATCGCTCCCAATGTCTGCTCC
TGCCAGGATGGAGAGCAAGGGGCCACCTGCCCAGAAACCCATGGACCATGTGGGGAGTACGGCTGTGA
CCTTACCTGCAACCATGGAGGCTGTCAGGAGGTGGCCCGAGTGTGCCCCGTGGGCTTCTCGATGACGG
AGACAGCTGTTGGCATCAGGTGTACAGACATTGACGAATGTGTAACCTCCTCCTGCGAGGGCCACTGT
GTGAACACAGAAGGTGGGTTTGTGTGCGAGTGTGGGCCGGGCATGCAGCTGTCTGCCGACCGCCACAG
CTGCCAAGACACTGACGAATGCCTAGGGACTCCCTGTCAGCAGAGATGTAAAAACAGCATTGGCAGCT
ACAAGTGCTCCTGTCGAACTGGCTTCCACCTTCATGGCAACCGGCACTCCTGTGTAGATGTAAACGAG
TGTCGGAGGCCATTGGAGAGGCGAGTCTGTCACCATTCCTGCCACAACACCGTGGGCAGCTTCCTATG
CACATGCCGACCTGGCTTCAGGCTCCGAGCTGACCGCGTGTCCTGTGAAGCTTTCCCGAAAGCCGTGC
TGGCCCCATCTGCCATCCTGCAACCCCGGCAACACCCGTCCAAGATGCTTCTGTTGCTTCCTGAGGCC
GGCCGGCCTGCCCTGTCCCCAGGACATAGCCCTCCTTCTGGGGCTCCAGGGCCCCCAGCCGGAGTCAG
AACCACCCGCCTGCCATCTCCCACCCCACGACTACCCACATCCTCCCCTTCTGCCCCTGTGTGGCTGC
TGTCCACCCTGCTGGCCACCCCAGTGCCTACTGCCTCCCTGCTGGGGAACCTCAGACCCCCCTCACTC
CTTCAGGGGGAGGTGATGGGGACCCCTTCCTCACCCAGGGGCCCTGAGTCCCCCCGACTGGCAGCAGG
GCCCTCTCCCTGCTGGCACCTGGGAGCGATGCATGAATCAAGGAGTCGCTGGACAGAGCCTGGGTGTT
CCCAGTGCTGGTGCGAGGACGGGAAGGTGACCTGTGAAAAGGTGAGGTGTGAAGCTGCTTGTTCCCAC
CCAATTCCCTCCAGAGATGGTGGGTGCTGCCCATCGTGCACAGGCTGTTTTCACAGTGGTGTCGTCCG
AGCTGAAGGGGATGTGTTTTCACCTCCCAATGAGAACTGCACCGTCTGTGTCTGTCTGGCTGGAAACG
TGTCCTGCATCTCTCCTGAGGGTCCTTCTGGCCCCTGTCAGACCCCCCCACAGACGGATTGCTGTACT
TGTGTTCCAGTGAGATGCTATTTCCACGGCCGGTGGTACGCAGACGGGGCTGTGTTCAGTGGGGGTGG
TGACGAGTGTACCACCTGTGTTTGCCAGAATGGGGAGGTGGAGTGCTCCTTCATGCCCTGCCCTGAGC
TGGCCTGCCCCCGAGAAGAGTGGCGGCTGGGCCCTGGGCAGTGTTGCTTCACCTGCCAGGAGCCCACA
CCCTCGACAGGCTGCTCTCTTGACGACAACGGGGTTGAGTTTCCGATTGGACAGATCTGGTCGCCTGG
TGACCCCTATGGCTCGGTGAGCTGCAAGAGGACAGACTGTGTGGACTCCTGCCCTCACCCGATCCGGA
TCCCTGGACAGTGCTGCTCGAG

| | | | |
|---|---|---|---|
| NOV59d, 198488424 | SEQ ID NO: 1162 | 596 aa | MW at 62805.5kD |
| Protein Sequence | | | |

GTRGYTGRKPPGHFAAERRRLGPHVCLSGFGSGCCPGHAPSMGGGHCTLPLCSFGCGSGICIAPNVCS
CQDGEQGATCPETHGPCGEYGCDLTCNHGGCQEVARVCPVGFSMTETAVGIRCTDIDECVTSSCEGHC
VNTEGGFVCECGPGMQLSADRHSCQDTDECLGTPCQQRCKNSIGSYKCSCRTGFHLHGNRHSCVDVNE
CRRPLERRVCHHSCHNTVGSFLCTCRPGFRLRADRVSCEAFPKAVLAPSAILQPRQHPSKMLLLLPEA
GRPALSPGHSPPSGAPGPPAGVRTTRLPSPTPRLPTSSPSAPVWLLSTLLATPVPTASLLGNLRPPSL
LQGEVMGTPSSPRGPESPRLAAGPSPCWHLGAMHESRSRWTEPGCSQCWCEDGKVTCEKVRCEAACSH
PIPSRDGGCCPSCTGCFHSGVVPAEGDVFSPPNENCTVCVCLAGNVSCISPEGPSGPCQTPPQTDCCT
CVPVRCYFHGRWYADGAVFSGGGDECTTCVCQNGEVECSFMPCPELACPREEWRLGPGQCCFTCQEPT
PSTGCSLDDNGVEFPIGQIWSPGDPYGSVSCKRTDCVDSCPHPIRIPGQCCS

| | | |
|---|---|---|
| NOV59e, 198488428 | SEQ ID NO: 1163 | 1661 bp |
| DNA Sequence | ORF Start: at 1 | ORF Stop: at 1660 |

GGTACCCGAGGCTACACCGGGAGGAAGCCGCCCGGGCACTTCGCGGCCGAGAGACGCCGACTGGGCCC
CCACGTCTGCCTCTCTGGGTTTGGGAGTGGCTGCTGCCCTGGCTGGGCGCCCTCTATGGGTGGTGGGC
ACTGCACCCTGCCCCTCTGCTCCTTCGGCTGTGGGAGTGGCATCTGCATCGCTCCCAATGTCTGCTCC
TGCCAGGATGGAGAGCAAGGGGCCACCTGCCCAGAAACCCATGGACCATGTGGGGAGTACGGCTGTGA
CCTTACCTGCAACCATGGGGGCTGTCAGGAGGTGGCCCGAGTGTGCCCCGTGGGCTTCTCGATGACGG
AGACAGCTGTTGGCATCAGGTGTACAGACATTGACGAATGTGTAACCTCCTCCTGCGAGGGCCACTGT
GTGAACACAGAAGGTGGGTTTGTGTGCGAGTGTGGGCCGGGCATGCAGCTGTCTGCCGACCGCCACAG
CTGCCAAGACACTGACGAATGCCTAGGGACTCCCTGTCAGCAGAGATGTAAAAACAGCATTGGCAGCT
ACAAGTGTTCCTGTCGAACTGGCTTCCACCTTCATGGCAACCGGCACTCCTGTGTAGCTTCCCCGAAA
GCCGTGCTGGCCCCATCTGCCATCCTGCAACCCCGGCAACACCCGTCCAAGATGCTTCTGTTGCTTCC
TGAGGCCGGCCGGCCTGCCCTGTCCCCAGGACATAGCCCTCCTTCTGGGGCTCCAGGGCCCCCAGCCG
GAGTCAGGACCACCCGCCTGCCATCTCCCACCCCACGACTACCCACATCCTCCCCTTCTGCCCCTGTG
TGGCTGCTGTCCACCCTGCTGGCCACCCCAGTGCCTACTGCCTCCCTGCTGGGGAACCTCAGACCCCC
CTCACTCCTTCAGGGGGAGGTGATGGGGACCCCTTCCTCACCCAGGGGCCCTGAGTCCCCCCGACTGG
CAGCAGGGCCCTCTCCCTGCTGGCACCTGGGAGCCATGCATGAATCAAGGAGTCGCTGGACAGAGCCT
GGGTGTTCCCAGTGCTGGTGCGAGGACGGGAAGGTGACCTGTGAAAAGGTGAGGTGTGAAGCTGCTTG
TTCCCACCCAATTCCCTCCAGAGATGGTGGGTGCTGCCCATCGTGCACAGGCTGTTTTCACAGTGGTG
TCGTCCGAGCTGAAGGGGATGTGTTTTCACCTCCCAATGAGAACTGCACCGTCTGTGTCTGTCTGGCT
GGAAACGTGTCCTGCATCTCTCCTGAGTGTCCTTCTGGCCCCTGTCAGACCCCCCCACAGACGGATTG
CTGTACTTGTGTTCCAGTGAGATGCTATTTCCACGGCCGGTGGTACGCAGACAGGGCTGTGTTCAGTG
GGGGTGGTGACGAGTGTACCACCTGTGTTTGCCAGAATGGGGAGGTGGAGTGCTCCTTCATGCCCTGC
CCTGAGCTGGCCTGCCCCCGAGAAGAGTGGCGGCTGGGCCCTGGGCAGTGTTGCTTCACCTGCCAGGA
GCCCACACCCTCGACAGGCTGCTCTCTTGACGACAACGGGGTTGAGTTTCCGATTGGACAGATCTGGT
CGCCTGGTGACCCCTATGGCTCGGTGAGCTGCAAGAGGACAGACTGTGTGGACTCCTGCCCTCACCCG
ATCCGGATCCCTGGACAGTGCTGCTCGAG

| | | | |
|---|---|---|---|
| NOV59e, 198488428 | SEQ ID NO: 1164 | 553 aa | MW at 57922.0kD |
| Protein Sequence | | | |

GTRGYTGRKPPGHFAAERRRLGPHVCLSGFGSGCCPGWAPSMGGGHCTLPLCSFGCGSGICIAPNVCS
CQDGEQGATCPETHGPCGEYGCDLTCNHGGCQEVARVCPVGFSMTETAVGIRCTDIDECVTSSCEGHC
VNTEGGFVCECGPGMQLSADRHSCQDTDECLGTPCQQRCKNSIGSYKCSCRTGFHLHGNRHSCVASPK
AVLAPSAILQPRQHPSKNLLLLPEAGRPALSPGHSPPSGAPGPPAGVRTTRLPSPTPRLPTSSPSAPV
WLLSTLLATPVPTASLLGNLRPPSLLQGEVMGTPSSPRGPESPRLAAGPSPCWHLGAMHESRSRWTEP
GCSQCWCEDGKVTCEKVRCEAACSHPIPSRDGGCCPSCTGCFHSGVVRAEGDVFSPPNENCTVCVCLA
GNVSCISPECPSGPCQTPPQTDCCTCVPVRCYFHGRWYADRAVFSGGGDECTTCVCQNGEVECSFMPC
PELACPREEWRLGPGQCCFTCQEPTPSTGCSLDDNGVEFPIGQIWSPGDPYGSVSCKRTDCVDSCPHP
IRIPGQCCS

| | | |
|---|---|---|
| NOV59f, 198488440 | SEQ ID NO: 1165 | 1814 bp |
| DNA Sequence | ORF Start: at 1 | ORF Stop: at 1813 |

GGTACCCGAGGCTACACCGGGAAGAAGCCGCCCGGGCACTTCGCGGCCGAGAGACGCCGACTGGGCCC
CCACGTCTGCCTCTCTGGGTTTGGGAGTGGCTGCTGCCCTGGCTGGGCGCCCTCTATGGGTGGTGGGC
ACTGCACCCTGCCCCTCTGCTCCTTCGGCTGTGGGAGTGGCATCTGCATCGCTCCCAATGTCTGCTCC
TGCCAGGATGGAGAGCAAGGGGCCACCTGCCCAGAAACCCATGGACCATGTGGGGAGTACGGCTGTGA
CCTTACCTGCAACCATGGAGGCTGTCAGGAGGTGGCCCGAGTGTGCCCCGTGGGCTTCTCGATGACGG
AGACAGCTGTTGGCATCAGGTGTACAGACATTGACGAATGTGTAACCTCCTCCTGCGAGGGCCACTGT
GTGAACACAGAAGGTGGGTTTGTGTGCGAGTGTGGGCCGGGCATGCAGCTGTCTGCCGACCGCCACAG
CTGCCAAGACACTGACGAATGCCTAGGGACTCCCTGTCAGCAGAGATGTAAAAACAGCATTGGCAGCT
ACAAGTGCTCCTGTCGAACTGGCTTCCACCTTCATGGCAACCGGCACTCCTGTGTAGATGTAAACGAG
TGTCGGAGGCCATTGGAGAGGCGAGTCTGTCACCATTCCTGCCACAACACCGTGGGCAGCTTCCTATG
CACATGCCGACCTGGCTTCAGGCTCCGAGCTGACCGCGTGTCCTGTGAAGCTTTCCCGAAAGCCGTGC
TGGCCCCATCTGCCATCCTGCAACCCCGGCAACACCCGTCCAAGATGCTTCTGTTGCTTCCTGAGGCC
GGCCGGCCTGCCCTGTCCCCAGGACATAGCCCTCCTTCTGGGGCTCCAGGGCCCCCAGCCGGAGTCAG
GACCACCCGCCTGCCATCTCCCACCCCACGACTACCCACATCCTCCCCTTCTGCCCCTGTGTGGCTGC
TGTCCACCCTGCTGGCCACCCCAGTGCCTACTGCCTCCCTGCTGGGGAACCTCAGACCCCCCTCACTC
CTTCAGGGGGAGGTGATGGGGACCCCTTCCTCACCCAGGGGCCCTGAGTCCCCCCGACTGGCAGCAGG
GCCCTCTCCCTGCTGGCACCTGGGAGCGATGCATGAATCAAGGAGTCGCTGGACAGAGCCTGGGTGTT
CCCAGTGCTGGTGCGAGGACGGGAAGGTGACCTGTGAAAAGGTGCGGTGTGAAGCTGCTTGTTCCCAC
CCAATTCCCTCCAGAGATGGTGGGTGCTGCCCATCGTGCACAGGCTGTTTTCACAGTGGTGTCGTCCG
AGCTGAAGGGGATGTGTTTTCACCTCCCAATGAGAACTGCACCGTCTGTGTCTGTCTGGCTGGAAACG
TGTCCTGCATCTCTCCTGAGTGTCCTTCTGGCCCCTGTCAGACCCCCCCACAGACGGATTGCTGTACT
TGTGTTCCAGTGAGATGCTATTTCCACGGCCGGTGGTACGCAGACGGGGCTGTGTTCAGTGGGGGTGG
TGACGAGTGTACCACCTGTGTTTGCCAGAATGGGGAGGTGGAGTGCTCCTTCATGCCCTGCCCTGAGC
TGGCCTGCCCCCGAGAAGAGTGGCGGCCGGGCCCTGGGCAGTGTTGCTTCACCTGCCAGGAGCCCACA
CCCTCGACAGGCTGCTCTCTTGACGACAACGGGGTTGAGTTTCCGATTGGACAGATCTGGTCGCCTGG
TGACCCCTGTGAGTTATGCATCTGCCAGGCAGATGGCTCGGTGAGCTGCAAGAGGACAGACTGTGTGG
ACTCCTGCCCTCACCCGATCCGGATCCCTGGACAGTGCTGCTCGAG

| | | | |
|---|---|---|---|
| NOV59f, 198488440 | SEQ ID NO: 1166 | 604 aa | MW at 63653.5kD |
| Proteing Sequence | | | |

GTRGYTGKKPPGHFAAERRRLGPHVCLSGFGSGCCPGWAPSMGGGHCTLPLCSFGCGSGICIAPNVCS
CQDGEQGATCPETHGPCGEYGCDLTCNHGGCQEVARVCPVGFSMTETAVGIRCTDIDECVTSSCEGHC
VNTEGGFVCECGPGMQLSADRHSCQDTDECLGTPCQQRCKNSIGSYKCSCRTGFHLHGNRHSCVDVNE
CRRPLERRVCHHSCHNTVGSFLCTCRPGFRLRADRVSCEAFPKAVLAPSAILQPRQHPSKMLLLLPEA
GRPALSPGHSPPSGAPGPPAGVRTTRLPSPTPRLPTSSPSAPVWLLSTLLATPVPTASLLGNLRPPSL
LQGEVMGTPSSPRGPESPRLAAGPSPCWHLGAMHESRSRWTEPGCSQCWCEDGKVTCEKVRCEAACSH
PIPSRDGGCCPSCTGCFHSGVVRAEGDVFSPPNENCTVCVCLAGNVSCISPECPSGPCQTPPQTDCCT
CVPVRCYFHGRWYADGAVFSGGGDECTTCVCQNGEVECSFMPCPELACPREEWRPGPGQCCFTCQEPT
PSTGCSLDDNGVEFPIGQIWSPGDPCELCICQADGSVSCKRTDCVDSCPHPIRIPGQCCS

| | | |
|---|---|---|
| NOV59g, CG93871-02 | SEQ ID NO: 1167 | 585 bp |
| DNA Sequence | ORF Start: at 7 | ORF Stop: at 580 |

GGTACCTGCTCCTTCGGCTGTGGGAGTGGCATCTGCATCGCTCCTAATGTCTGCTCCTGCCAGGATGG
AGAGCAAGGGGCCACCTGCCCAGAAACCCATGGACCATGTGGGGAGTACGGCTGTGACCTTACCTGCA
ACCATGGAGGCTGTCAGGAGGTGGCCCGAGTGTGCCCCGTGGGCTTCTCGATGACGGAGACAGCTGTT
GGCATCAGGTGTACAGACATTGACGAATGTGTAACCTCCTCCTGCGAGGGCCACTGTGTGAACACAGA
AGGTGGGTTTGTGTGCGAGTGTGGGCCGGGCATGCAGCTGTCTGCCGACCGCCACAGCTGCCAAGACA
CTGACGAATGCCTAGGGACTCCCTGTCAGCAGGGATGTAAAAACAGCATTGGCAGCTACAAGTGTTCC
TGTCGAACTGGCTTCCACCTTCATGGCAACCGGCACTCCTGTGTAGATGTAAACGAGTGTCGGAGGCC
ATTGGAGAGGCGAGTCTGTCACCATTCCTGCCACAACACCGTGGGCAGCTTCCTATGCACATGCCGAC
CTCGAGACAGGCTCCGAGCTGACCGCGTGTCCTGTCTCGAG

| | | | |
|---|---|---|---|
| NOV59g, CG93871-02 | SEQ ID NO: 1168 | 191 aa | MW at 20429.7kD |
| Protein Sequence | | | |

CSFGCGSGICIAPNVCSCQDGEQGATCPETHGPCGEYGCDLTCNHGGCQEVARVCPVGFSMTETAVGI
RCTDIDECVTSSCEGHCVNTEGGFVCECGPGMQLSADRHSCQDTDECLGTPCQQGCKNSIGSYKCSCR
TGFHLHGNRHSCVDVNECRRPLERRVCHHSCHNTVGSFLCTCRPRDRLRADRVSC

| | | |
|---|---|---|
| NOV59h, CG93871-03 | SEQ ID NO: 1169 | 2063 bp |
| DNA Sequence | ORF Start: ATG at 20 | ORF Stop: TAG at 1229 |

AGTGTTACAGTTCTTCAAGATGGTGTGTCCGGAGTTTGTTCCTTCAGATGTTCAGATGTGTCCAGAAT
TTCTTCCTTCTGGTGGGTTCGTGCTCTCACTGGCTTCAATGGGTGGTGGGCACTGCACCCTGCCCCTC
TGCTCCTTCGGCTGTGGGAGTGGCATCTGCATCGCTCCCAATGTCTGCTCCTGCCAGGATGGAGAGCA
AGGGGCCACCTGCCCAGAAACCCATGGACCATGTGGGGAGTACGGCTGTGACCTTACCTGCAACCATG
GAGGCTGTCAGGAGGTGGCCCGAGTGTGCCCCGTGGGCTTCTCGATGACGGAGACAGCTGTTGGCATC
AGGTGTACAGACATTGACGAATGTGTAACCTCCTCCTGCGAGGGCCACTGTGTGAACACAGAAGGTGG
GTTTGTGTGCGAGTGTGGGCCGGGCATGCAGCTGTCTGCCGACCGCCACAGCTGCCAAGACACTGACG
AATGCCTAGGGACTCCCTGTCAGCAGAGATGTAAAAACAGCATTGGCAGCTACAAGTGTTCCTGTCGA
ACTGGCTTCCACCTTCATGGCAACCGGCACTCCTGTGTAGATGTAAACGAGTGTCGGAGGCCATTGGA
GAGGCGAGTCTGTCACCATTCCTGCCACAACACCGTGGGCAGCTTCCTATGCACATGCCGACCTGGCT
TCAGGCTCCGAGCTGACCGCGTGTCCTGTGAAGCTTTCCCGAAAGCCGTGCTGGCCCCATCTGCCATC
CTGCAACCCCGGCAACACCCGTCCAAGATGCTTCTGTTGCTTCCTGAGGCCGGCCGGCCTGCCCTGTC
CCCAGGACATAGCCCTCCTTCTGGGGCTCCAGGGCCCCCAGCCGGAGTCAGGACCACCCGCCTGCCAT
CTCCCACCCCACGACTACCCACATCCTCCCCTTCTGCCCCTGTGTGGCTGCTGTCCACCCTGCTGGCC
ACCCCAGTGCCTACTGCCTCCCTGCTGGGGAACCTCAGACCCCCCTCACTCCTTCAGGGGGAGGTGAT
GAGGACCCCTTCCTCACCCAGGGGCCCTGAGTCCCCCCGACTGGCAGCAGGGCCCTCTCCCTGCTGGC
ACCTGGGAGCCATGCATGAATCAAGGAGTCGCTGGACAGAGCCTGGGTGTTCCCAGTGCTGGTGCGAG
GTGGGTACTAGGGGTCCCCGGAGCTTCCTTGGTCTGGGGCCTTGTGGTGGCTCTAACTCCTGCTTGTG
CTTCTAGGACGGGAAGGTGACCTGTGAAAAGGTGAGGTGTGAAGCTGCTTGTTCCCACCCAATTCCCT
CCAGAGATGGTGGGTGCTGCCCATCGTGCACAGGTGAGAGCTGGTGCCAGGGAAGGACATAGTCCTGC
CTCTTCCTTTCTCTGCACCCTCCTGCAGCCAAAAGGCTGTTCTTTAACATTAGCATACATTAGAATCT
CCTGGAGGGTTTACTAAGCCACACTTCCCTTGGCGCTGCTCCCAGAGCTTCTGATGTAGTAGGTCTGG
GATAGGGCCAGAACATGTGCGTTTTGAACAGGTTCCCAGGTGATACTGACGTGGCTGGTCTAGGGACC
ATACTTTGAGAACCACTCATTTATGCTGTAATATGCCTCAAGGGGGACTTTTCATCTTCTGGGCATCT
GTTTTCAGCTTCATTCGCTCATTTTCATTTATTCAGTCATTCATTGAGCCTCTTTAAATCCACTGTGC
AGTCCCCTTCTCTTTCCGACTCACCTTCTCACATGGGGAGGAGTAGTTGCTTTACAATTCCCCCCCTT
TTTAATCTCCCCCCCCCCATATATCGATACTTCTTTATCTTCTTCCCATTCCTGGAAGAATAGGGACC
CATATTCTTCACCAAATCCTCAACTAGAGTTTCTTCTGAACTACCTCTCCAGCCCCTCAAGGGTATTC
TGATGACAAATACAAATTCTTCTCGTTGGCACGCTGTCTCTATCGCAGAACCCCACCACTTTGGGAGT
CCAATTTTGTCTTATCACTTGAGCGGACCATTCAGGGACTGTTTGGGATACTCGGTGATAAACGTCGP
GCATTCGTCTTTCTATCTCCTCA

| | | | |
|---|---|---|---|
| NOV59h, CG93871-03 | SEQ ID NO: 1170 | 403 aa | MW at 42493.0kD |
| Protein Sequence | | | |

MVCPEFVPSDVQMCPEFLPSGGFVLSLASMGGGHCTLPLCSFGCGSGICIAPNVCSCQDGEQGATCPE
THGPCGEYGCDLTCNHGGCQEVARVCPVGFSMTETAVGIRCTDIDECVTSSCEGHCVNTEGGFVCECG
PGMQLSADRHSCQDTDECLGTPCQQRCKNSIGSYKCSCRTGFHLHGNRHSCVDVNECRRPLERRVCHH
SCHNTVGSFLCTCRPGFRLRADRVSCEAFPKAVLAPSAILQPRQHPSKMLLLLPEAGRPALSPGHSPP
SGAPGPPAGVRTTRLPSPTPRLPTSSPSAPVWLLSTLLATPVPTASLLGNLRPPSLLQGEVMRTPSSP
RGPESPRLAAGPSPCWHLGAMHESRSRWTEPGCSQCWCEVGTRGPRSFLGLGPCGGSNSCLCF

| | | |
|---|---|---|
| NOV59i, CG93871-04 | SEQ ID NO: 1171 | 1790 bp |
| DNA Sequence | ORF Start: at 1 | ORF Stop: at 1789 |

GGTACCCGAGGCTACACCGGGAGGAAGCCGCCCGGGCACTTCGCGGCCGAGAGACGCCGACTGGGCCC
CCACGTCTGCCTCTCTGGGTTTGGGAGTGGCTGCTGCCCTGGCCGGGCGCCCTCTATGGGTGGTGGGC
ACTGCACCCTGCCCCTCTGCTCCTTCGGCTGTGGGAGTGGCATCTGCATCGCTCCCAATGTCTGCTCC
TGCCAGGATGGAGAGCAAGGGGCCACCTGCCCAGAAACCCATGGACCATGTGGGGAGTACGGCTGTGA
CCTTACCTGCAACCATGGAGGCTGTCAGGAGGTGGCCCGAGTGTGCCCCGTGGGCTTCTCGATGACGG
AGACAGCTGTTGGCATCAGGTGTACAGACATTGACGAATGTGTAACCTCCTCCTGCGAGGGCCACTGT
GTGAACACAGAAGGTGGGTTTGTGTGCGAGTGTGGGCCGGGCATGCAGCTGTCTGCCGACCGCCACAG
CTGCCAAGACACTGACGAATGCCTAGGGACTCCCTGTCAGCAGAGATGTAAAAACAGCATTGGCAGCT
ACAAGTGCTCCTGTCGAACTGGCTTCCACCTTCATGGCAACCGGCACTCCTGTGTAGATGTAAACGAG
TGTCGGAGGCCATTGGAGAGGCGAGTCTGTCACCATTCCTGCCACAACACCGTGGGCAGCTTCCTATG
CACATGCCGACCTGGCTTCAGGCTCCGAGCTGACCGCGTGTCCTGTGAAGCTTTCCCGAAAGCCGTGC
TGGCCCCATCTGCCATCCTGCAACCCCGGCAACACCCGTCCAAGATGCTTCTGTTGCTTCCTGAGGCC
GGCCGGCCTGCCCTGTCCCCAGGACATAGCCCTCCTTCTGGGGCTCCAGGGCCCCCAGCCGGAGTCAG
AACCACCCGCCTGCCATCTCCCACCCCACGACTACCCACATCCTCCCCTTCTGCCCCTGTGTGGCTGC
TGTCCACCCTGCTGGCCACCCCAGTGCCTACTGCCTCCCTGCTGGGGAACCTCAGACCCCCCTCACTC
CTTCAGGGGGAGGTGATGGGGACCCCTTCCTCACCCAGGGGCCCTGAGTCCCCCCGACTGGCAGCAGG
GCCCTCTCCCTGCTGGCACCTGGGAGCGATGCATGAATCAAGGAGTCGCTGGACAGAGCCTGGGTGTT
CCCAGTGCTGGTGCGAGGACGGGAAGGTGACCTGTGAAAAGGTGAGGTGTGAAGCTGCTTGTTCCCAC
CCAATTCCCTCCAGAGATGGTGGGTGCTGCCCATCGTGCACAGGCTGTTTTCACAGTGGTGTCGTCCG
AGCTGAAGGGGATGTGTTTTCACCTCCCAATGAGAACTGCACCGTCTGTGTCTGTCTGGCTGGAAACG
TGTCCTGCATCTCTCCTGAGGGTCCTTCTGGCCCCTGTCAGACCCCCCCACAGACGGATTGCTGTACT
TGTGTTCCAGTGAGATGCTATTTCCACGGCCGGTGGTACGCAGACGGGGCTGTGTTCAGTGGGGGTGG
TGACGAGTGTACCACCTGTGTTTGCCAGAATGGGGAGGTGGAGTGCTCCTTCATGCCCTGCCCTGAGC
TGGCCTGCCCCCGAGAAGAGTGGCGGCTGGGCCCTGGGCAGTGTTGCTTCACCTGCCAGGAGCCCACA
CCCTCGACAGGCTGCTCTCTTGACGACAACGGGGTTGAGTTTCCGATTGGACAGATCTGGTCGCCTGG
TGACCCCTATGGCTCGGTGAGCTGCAAGAGGACAGACTGTGTGGACTCCTGCCCTCACCCGATCCGGA
TCCCTGGACAGTGCTGCTCGAG

| | | | |
|---|---|---|---|
| NOV59i, CG93871-04 | SEQ ID NO: 1172 | 596 aa | MW at 62805.5kD |
| Protein Sequence | | | |

GTRGYTGRKPPGHFAAERRRLGPHVCLSGFGSGCCPGRAPSMGGGHCTLPLCSFGCGSGICIAPNVCS
CQDGEQGATCPETHGPCGEYGCDLTCNHGGCQEVARVCPVGFSMTETAVGIRCTDIDECVTSSCEGHC
VNTEGGFVCECGPGMQLSADRHSCQDTDECLGTPCQQRCKNSIGSYKCSCRTGFHLHGNRHSCVDVNE
CRRPLERRVCHHSCHNTVGSFLCTCRPGFRLRADRVSCEAFPKAVLAPSAILQPRQHPSKMLLLLPEA
GRPALSPGHSPPSGAPGPPAGVRTTRLPSPTPRLPTSSPSAPVWLLSTLLATPVPTASLLGNLRPPSL
LQGEVMGTPSSPRGPESPRLAAGPSPCWHLGAMHESRSRWTEPGCSQCWCEDGKVTCEKVRCEAACSH
PIPSRDGGCCPSCTGCFHSGVVRAEGDVFSPPNENCTVCVCLAGNVSCISPEGPSGPCQTPPQTDCCT
CVPVRCYFHGRWYADGAVFSGGGDECTTCVCQNGEVECSFMPCPELACPREEWRLGPGQCCFTCQEPT
PSTGCSLDDNGVEFPIGQIWSPGDPYGSVSCKRTDCVDSCPHPIRIPGQCCS

[0694] A ClustalW comparison of the above protein sequences yields the following sequence alignment shown in Table 59B.

TABLE 59B
Comparison of the NOV59 protein sequences.

NOV59a MWAGLLLRAACVALLLPGAPARGYTGRKPPGHFAAERRRLGPNVCLSGFGSGCCPGWAPS
NOV59b MWAGLLLRAACVALLLPGAPARGYTGRKPPGHFAAERRRLGPHVCLSGFGSGCCPGWAPS
NOV59c -------------------GTRGYTGRKPPGHFAAERRRLGPHVCLSGFGSGCCPGWAPS
NOV59d -------------------GTRGYTGRKPPGHFAAERRRLGPHVCLSGFGSGCCPGRAPS
NOV59e -------------------GTRGYTGRKPPGHFAAERRRLGPHVCLSGFGSGCCPGWAPS
NOV59f -------------------GTRGYTGKKPPGHFAAERRRLGPHVCLSGFGSGCCPGWAPS
NOV59g ------------------------------------------------------------
NOV59h -------------MVCP--------------EFVPS----DVQMCPEFLPSGGFVLSLAS
NOV59i -------------------GTRGYTGRKPPGHFAAERPRLGPHVCLSGFGSGCCPGRAPS
NOV59a MGGGHCTLRLCSFGCGSGICIAPNVCSCQDGEQGATCPETHGPCGEYGCDLTCNHGGCQE
NOV59b MGGGHCTLPLCSLGCGSGICIAPNVCSCQDGEQGATCPETHGPCGEYGCDLTCNHGGCQE
NOV59c MGGGHCTLPPCSFGCGSGICIAPNVCSCQDGEQGATCPETHGPCGEYGCDLTCNHGGCQE
NOV59d MGGGHCTLPLCSFGCGSGICIAPNVCSCQDGEQGATCPETHGPCGEYGCDLTCNHGGCQE
NOV59e MGGGHCTLPLCSFGCGSGICIAPNVCSCQDGEQGATCPETHGPCGEYGCDLTCNHGGCQE
NOV59f MGGGHCTLPLCSFGCGSGICIAPNVCSCQDGEQGATCPETHGPCGEYGCDLTCNHGGCQE
NOV59g ----------CSFGCGSGICIAPNVCSCQDGEQGATCPETHGPCGEYGCDLTCNHGGCQE
NOV59h MGGGHCTLPLCSFGCGSGICIAPNVCSCQDGEQGATCPETHGPCGEYGCDLTCNHGGCQE
NOV59i MGGGHCTLPLCSFGCGSGICIAPNVCSCQDGEQGATCPETHGPCGEYGCDLTCNHGGCQE
NOV59a VARVCPVGFSMTETAVGIRC-DIDECVTSSCEGHCVNTEGGFVCECGPGMQLSADRHSCQ
NOV59b VARVCPVGFSMTETAVGIRCTDIDECVTSSCEGHCVNTE---------------------
NOV59c VARVCPVGFSMTETAVGIRCTDIDECVTSSCEGHCVNTESGFVCECGPGMQLSADRHSCQ
NOV59d VARVCPVGFSMTETAVGIRCTDIDECVTSSCEGHCVNTEGGFVCECGPGMQLSADRHSCQ
NOV59e VARVCPVGFSMTETAVGIRCTDIDECVTSSCEGHCVNTEGGFVCECGPGMQLSADRHSCQ
NOV59f VARVCPVGFSMTETAVGIRCTDIDECVTSSCEGHCVNTEGGFVCECGPGMQLSADRHSCQ
NOV59g VARVCPVGFSMTETAVGIRCTDIDECVTSSCEGHCVNTEGGFVCECGPGMQLSADRHSCQ
NOV59h VARVCPVGFSMTETAVGIRCTDIDECVTSSCEGHCVNTEGGFVCECGPGMQLSADRHSCQ
NOV59i VARVCPVGFSMTETAVGIRCTDIDECVTSSCEGHCVNTEGGFVCECGPGMQLSADRHSCQ
NOV59a DTDECLGTPCQQRCKNSIGSYKCSCRTGFHLHGNRHSCVDVNECRRPLERRVCHHSCHNT
NOV59b DTDECLGTPCQQRCKNSIGSYKCSCRTGFHLHGNRHSCVDVNECRRPLERRVCHHSCHNT
NOV59c DTDECLGTPCQQRCKNSIGSYKCSCRTGFHLHGNRHSCVDVNECRRPLERRVCHHSCHNT
NOV59d DTDECLGTPCQQRCKNSIGSYKCSCRTGFHLHGNRHSCVDVNECRRPLERRVCHHSCHNT
NOV59e DTDECLGTPCQQRCKNSIGSYKCSCRTGFHLHGNRHSCVAS-------------------
NOV59f DTDECLGTPCQQRCKNSIGSYKCSCRTGFHLHGNRHSCVDVNECRRPLERRVCHHSCHNT
NOV59g DTDECLGTPCQQGCKNSIGSYKCSCRTGFHLHGNRHSCVDVNECRRPLERRVCHHSCHNT
NOV59h DTDECLGTPCQQRCKNSIGSYKCSCRTGFHLHGNRHSCVDVNECRRPLERRVCHHSCHNT
NOV59i DTDECLGTPCQQRCKNSIGSYKCSCRTGFHLHGNRHSCVDVNECRRPLERRVCHHSCHNT
NOV59a VGSFLCTCRPGFRLRADRVSCEAFPKAVLAPSAILQPRQHPSKMLLLLPEAGRPALSPGH
NOV59b VGSFLCTCRPGFRLRADRVSCEAFPKAVLAPSAILQPRQHPSKMLLLLPEAGRPALSPGH
NOV59c VGSFLCTCRPGFRLEADRVSCEAFPKAVLAPSAILQPRQHPSKMLLLLPEAGRPALSPGH
NOV59d VGSFLCTCRPGFRLRADRVSCEAFPKAVLAPSAILQPRQHPSKMLLLLPEAGRPALSPGH
NOV59e ------------------------PKAVLAPSAILQPRQHPSKMLLLLPEAGRPALSPGH
NOV59f VGSFLCTCRPGFRLRADRVSCEAFPKAVLAPSAILQPRQHPSKMLLLLPEAGRPALSPGH
NOV59g VGSFLCTCRPRDRLRADRVSC---------------------------------------
NOV59h VGSFLCTCRPGFRLRADRVSCEAFPKAVLAPSAILQPRQHPSKMLLLLPEAGRPALSPGH
NOV59i VGSFLCTCRPGFRLRADRVSCEAFPKAVLAPSAILQPRQHPSKMLLLLPEAGRPALSPGH
NOV59a SPPSGAPGPPAGVRTTRLPSPTPRLPTSSPSAPVWLLSTLLATPVPTASLLGNLRPPSLL
NOV59b SPPSGAPGPPAGVRTTRLPSPTPRLPTSSPSAPVWLLSTLLATPVPTASLLGNLRPPSLL
NOV59c SPPSGAPGPPAGVRTTRLPSPTPRLPTSSPSAPVWLLSTLLATPVPTASLLGNLRPPSLL
NOV59d SPPSGAPGPPAGVRTTRLPSPTPRLPTSSPSAPVWLLSTLLATPVPTASLLGNLRPPSLL
NOV59e SPPSGAPGPPAGVRTTRLPSPTPRLPTSSPSAPVWLLSTLLATPVPTASLLGNLRPPSLL
NOV59f SPPSGAPGPPAGVRTTRLPSPTPRLPTSSPSAPVWLLSTLLATPVPTASLLGNLRPPSLL
NOV59g ------------------------------------------------------------
NOV59h SPPSGAPGPPAGVRTTRLPSPTPRLPTSSPSAPVWLLSTLLATPVPTASLLGNLRPPSLL
NOV59i SPPSGAPGPPAGVRTTRLPSPTPRLPTSSPSAPVWLLSTLLATPVPTASLLGNLRPPSLL
NOV59a QGEVMGTPSSPRGPESPRLAAGPSPCWHLGAMHESRSRWTEPGCSQCWCEDGKVTCEKVR
NOV59b QGEVMGTPSSPRGPESPRLAAGPSPCWHLGAMHESRSRWTEPGCSQCWCEDGKVTCEKVR
NOV59c QGEVMGTPSSPRGPESPRLAAGPSPCWHLGAMYESRSRWTEPGCSQCWCEDGKVTCEKVR
NOV59d QGEVMGTPSSPRGPESPRIAAGPSPCWHLGAMHESRSRWTEPGCSQCWCEDGKVTCEKVR
NOV59e QGEVMGTPSSPRGPESPRLAAGPSPCWHLGAMHESRSRWTEPGCSQCWCEDGKVTCEKVR
NOV59f QGEVMGTPSSPRGPESPRLAAGPSPCWHLGAMHESRSRWTEPGCSQCWCEDGKVTCEKVR
NOV59g ------------------------------------------------------------
NOV59h QGEVMRTPSSPRGPESPRLAAGPSPCWHLGAMHESRSRWTEPGCSQCWCEVG--------
NOV59i QGEVMGTPSSPRGPESPRLAAGPSPCWHLGAMHESRSRWTEPGCSQCWCEDGKVTCEKVR
NOV59a CEAACSHPIPSRDGGCCPSCTGCFHSGVVRAEGDVFSPPNENCTVCVCLAGNVSCMFREC
NOV59b CEAACSHPIPSRDGGCCPSCTGCFHSGVVPAEGDVFSPPNENCTVCVCLAGNVSCISPEC
NOV59c CEAACSHPIPSRDGGCCPSCTGCFHSGVVPAEGDVFSPPNENCTVCVCLAGNVSCISPEC
NOV59d CEAACSHPIPSRDGGCCPSCTGCFHSGVVRAEGDVFSPPNENCTVCVCLAGNVSCISPEG
NOV59e CEAACSHPIPSRDGGCCPSCTGCFHSGVVRAEGDVFSPPNENCTVCVCLAGNVSCISPEC
NOV59f CEAACSHPIPSRDGGCCPSCTGCFHSGVVRAEGDVFSPPNENCTVCVCLAGNVSCISPEC
NOV59g ------------------------------------------------------------
NOV59h ----------------------------TRGPRSFLG-----------------------
NOV59i CEAACSHPIPSRDGGCCPSCTGCFHSGVVRAEGDVFSPPNENCTVCVCLAGNVSCISPEG
NOV59a PFGPCETPHK--D------RCYFHGRWYADGAVFSGGGDECTTCVCQNGEVECSFMPCPE
NOV59b PSGPCQTPPQTDCCTCVPVRCYFHGRWYADGAVFSGGGDECTTCVCQNGEVECSFMPCPE
NOV59c PSGPCQTPPQTDCCTCVPVRCYFHGRWYADGAVFSGGGDECTTCVCQNGEVECSFMPCPE
NOV59d PSGPCQTPPQTDCCTCVPVRCYFHGRWYADGAVFSGGGDECTTCVCQNGEVECSFMPCPE
NOV59e PSGPCQTPPQTDCCTCVPVRCYFHGRWYADRAVFSGGGDECTTCVCQNGEVECSFMPCPE
NOV59f PSGPCQTPPQTDCCTCVPVRCYFHGRWYADGAVFSGGGDECTTCVCQNGEVECSFMPCPE
NOV59g ------------------------------------------------------------
NOV59h -LGPCGGSNS--C------LCF--------------------------------------
NOV59i PSGPCQTPPQTDCCTCVPVRCYFHGRWYADGAVFSGGGDECTTCVCQNGEVECSFMPCPE
NOV59a LACPREEWRLGPGQCCFTCQEPTPSTGCSLDDNGVEFPIGQIWSPGDPCR-------WLG
NOV59b LACPREEWRLGPGQCCFTCQEPTPSTGCSLDDNGVEFPIGQIWSPGDPCELCICQADGSV
NOV59c LACPREEWRLGPGQCCFTCQEPTPSTGCSLDDNGVEFPIGQTWSPGDPCELCICQADGSV
NOV59d LACPREEWRLGPGQCCFTCQEPTPSTGCSLDDNGVEFPIGQTWSPGDP--------YGSV
NOV59e LACPREEWRLGPGQCCFTCQEPTPSTGCSLDDNGVEFPIGQIWSPGD--------PYGSV
NOV59f LACPREEWRPGPGQCCFTCQEPTPSTGCSLDDNGVEFPIGQIWSPGDPCELCICQADGSV
NOV59g ------------------------------------------------------------
NOV59h ------------------------------------------------------------
NOV59i LACPREEWRLGPGQCCFTCQEPTPSTGCSLDDNGVEFPIGQIWSPGDP--------YGSV
NOV59a ELQEDRLCGLLPSPDPDPWTVLPRLFSR--------------------------------
NOV59b SCKRTDCVDSCPHPIRIPGQCCPDCSAGCTYTGRIFYNNETFPSVLDPCLSCICLLGSVA
NOV59c SCKRTDCVDSCPHPIRIPGQCCS-------------------------------------
NOV59d SCKRTDCVDSCPHPIRIPGQCCS-------------------------------------
NOV59e SCKRTDCVDSCPHPIRIPGQCCS-------------------------------------
NOV59f SCKRTDCVDSCPHPIRIPGQCCS-------------------------------------
NOV59g ------------------------------------------------------------
NOV59h ------------------------------------------------------------
NOV59i SCKRTDCVDSCPHPIRIPGQCCS-------------------------------------
NOV59a ------------------------------------------------------------
NOV59b CSPVDCPITCTYPFHPDGECCPVCRDCNYEGRKVANGQVFTLDDEPCTRCTCQLGEVSCE
NOV59c ------------------------------------------------------------
NOV59d ------------------------------------------------------------
NOV59e ------------------------------------------------------------
NOV59f ------------------------------------------------------------
NOV59g ------------------------------------------------------------
NOV59h ------------------------------------------------------------
NOV59i ------------------------------------------------------------
NOV59a ------------------------------------------------------------
NOV59b KVPCQRACADPALLPGDCCSSCPDSLSPLEEKQGLSPHGNVAFSKAGRSLHGDTEAPVNC
NOV59c ------------------------------------------------------------
NOV59d ------------------------------------------------------------
NOV59e ------------------------------------------------------------
NOV59f ------------------------------------------------------------
NOV59g ------------------------------------------------------------
NOV59h ------------------------------------------------------------
NOV59i ------------------------------------------------------------
NOV59a ------------------------------------------------------------
NOV59b SSCPGPPTASPSRPVLHLLQLLLRTNLMKTQTLPTSPAGAHGPHSLALGLTATFPGEPGA
NOV59c ------------------------------------------------------------
NOV59d ------------------------------------------------------------
NOV59e ------------------------------------------------------------
NOV59f ------------------------------------------------------------
NOV59g ------------------------------------------------------------
NOV59h ------------------------------------------------------------
NOV59i ------------------------------------------------------------
NOV59a ------------------------------------------------------------
N0V59b SPRLSPGPSTPPGAPTLPLASPGAPQPPPVTPERSFSASGAQIVSRWPPLPGTLLTEASA
NOV59c ------------------------------------------------------------
NOV59d ------------------------------------------------------------
NOV59e ------------------------------------------------------------
NOV59f ------------------------------------------------------------
NOV59g ------------------------------------------------------------
NOV59h ------------------------------------------------------------
NOV59i ------------------------------------------------------------
NOV59a -------------------------------------------------------
NOV59b LSMMDPSPSKTPITLLGPRVLSPTTSRLSTALAATTHPGPQQPPVGASRGEESTM
NOV59c -------------------------------------------------------
NOV59d -------------------------------------------------------
NOV59e -------------------------------------------------------
NOV59f -------------------------------------------------------
NOV59g -------------------------------------------------------
NOV59h -------------------------------------------------------
NOV59i -------------------------------------------------------
NOV59a (SEQ ID NO: 1156)
NOV59b (SEQ ID NO: 1158)
NOV59c (SEQ ID NO: 1160)
NOV59d (SEQ ID NO: 1162)
NOV59e (SEQ ID NO: 1164)
NOV59f (SEQ ID NO: 1166)
NOV59g (SEQ ID NO: 1168)
NOV59h (SEQ ID NO: 1170)
NOV59i (SEQ ID NO: 1172)

[0695] Further analysis of the NOV59a protein yielded the following properties shown in Table 59C.

TABLE 59C
Protein Sequence Properties NOV59a

| | |
|---|---|
| SignalP analysis: | Cleavage site between residues 22 and 23 |
| PSORT II analysis: | |

| PSG: | a new signal peptide prediction method | |
|---|---|---|
| | N-region: | length 8; pos. chg 1; neg. chg 0 |
| | H-region: | length 13; peak value 9.31 |
| | PSG score: | 4.91 |

| | |
|---|---|
| GvH: | von Heijne's method for signal seq. recognition |
| | GvH score (threshold: −2.1): 1.18 |
| | possible cleavage site: between 21 and 22 |

>>> Seems to have a cleavable signal peptide (1 to 21)

| ALOM: | Klein et al's method for TM region allocation | |
|---|---|---|
| | Init position for calculation: 22 | |
| | Tentative number of TMS(s) for the threshold 0.5: 0 | |
| | number of TMS(s) . . . fixed | |
| | PERIPHERAL | Likelihood = 1.70 (at 70) |

| | |
|---|---|
| | ALOM score: 1.70 (number of TMSs: 0) |
| MTOP: | Prediction of membrane topology (Hartmann et al.) |
| | Center position for calculation: 10 |
| | Charge difference: 0.5 C(2.5)-N(2.0) |
| | C > N: C-terminal side will be inside |

>>>Caution: Inconsistent mtop result with signal peptide

| MITDISC: | discrimination of mitochondrial targeting seq | | | |
|---|---|---|---|---|
| | R content: | 3 | Hyd Moment(75): | 9.30 |
| | Hyd Moment(95): | 7.43 | G content: | 5 |
| | D/E content: | 1 | S/T content: | 1 |

| | |
|---|---|
| | Score: −3.74 |
| Gavel: | prediction of cleavage sites for mitochondrial preseq |
| | R-2 motif at 79 LRL\|CS |

NUCDISC: discrimination of nuclear localization signals

| | |
|---|---|
| | pat4: none |
| | pat7: none |
| | bipartite: none |
| | content of basic residues: 8.3% |
| | NLS Score: −0.47 |
| KDEL: | ER retention motif in the C-terminus: none |

ER Membrane Retention Signals: none
SKL: peroxisomal targeting signal in the C-terminus: none
PTS2: 2nd peroxisomal targeting signal: none
VAC: possible vacuolar targeting motif: none
RNA-binding motif: none
Actinin-type actin-binding motif:

type 1: none
type 2: none

NMYR: N-myristoylation pattern: none
Prenylation motif: none
memYQRL: transport motif from cell surface to Golgi: none
Tyrosines in the tail: none
Dileucine motif in the tail: none
checking 63 PROSITE DNA binding motifs: none
checking 71 PROSITE ribosomal protein motifs: none
checking 33 PROSITE prokaryotic DNA binding motifs: none

| | |
|---|---|
| NNCN: | Reinhardt's method for Cytoplasmic/Nuclear |
| | discrimination |
| | Prediction: nuclear |
| | Reliability: 89 |
| COIL: | Lupas's algorithm to detect coiled-coil regions |
| | total: 0 residues |

Final Results (k = 9/23):

33.3%: extracellular, including cell wall
33.3%: mitochondrial
33.3%: nuclear

>> prediction for CG93871-01 is exc (k = 9)

[0696] A search of the NOV59a protein against the Geneseq database, a proprietary database that contains sequences published in patents and patent publication, yielded several homologous proteins shown in Table 59D.

TABLE 59D
Geneseq Results for NOV59a

| | | NOV59a | Identities/ | | |
|---|---|---|---|---|---|
| | | Residues/ | Similarities for | | |
| Geneseq | Protein/Organism/Length | Match | the Matched | | Expect |
| Identifier | [Patent #,Date] | Residues | Region | | Value |
| ABU12085 | Human NOV26a CG93871-01 protein | 1 . . . 612 | 612/612 | (100%) | 0.0 |
| | SEQ ID 90 - Homo sapiens, 612 aa. | 1 . . . 612 | 612/612 | (100%) | |
| | [WO200281625-A2, 17-OCT-2002] | | | | |
| ABU11798 | Human MDDT polypeptide SEQ ID | 381 . . . 580 | 192/208 | (92%) | e−126 |
| | 745 - Homo sapiens, 514 aa. | 1 . . . 208 | 195/208 | (93%) | |
| | [WO200279449-A2, 10-OCT-2002] | | | | |
| AAB85364 | Novel Von Willebrand/thrombosporin- | 283 . . . 490 | 201/208 | (96%) | e−124 |
| | like polypeptide - Homo sapiens, 235 | 1 . . . 208 | 203/208 | (96%) | |
| | aa. [WO200153485-A1, 26-JUL-2001] | | | | |
| AAM99920 | Human polypeptide SEQ ID NO 36 - | 388 . . . 580 | 185/201 | (92%) | e−119 |
| | Homo sapiens, 272 aa. | 5 . . . 205 | 188/201 | (93%) | |
| | [WO200155173-A2, 02-AUG-2001] | | | | |
| AAM99933 | Human polypeptide SEQ ID NO 49 - | 388 . . . 580 | 181/201 | (90%) | e−117 |
| | Homo sapiens, 212 aa. | 5 . . . 205 | 185/201 | (91%) | |
| | [WO200155173-A2, 02-AUG-2001] | | | | |

[0697] In a BLAST search of public sequence databases, the NOV59a protein was found to have homology to the proteins shown in the BLASTP data in Table 59E.

TABLE 59E
Public BLASTP Results for NOV59a

| | | NOV59a | Identities/ | |
|---|---|---|---|---|
| Protein | | Residues/ | Similarities for | |
| Accession | | Match | the Matched | Expect |
| Number | Protein/Organism/Length | Residues | Portion | Value |
| Q96DN2 | Hypothetical protein FLJ32009 - | 1 . . . 580 | 570/589 (96%) | 0.0 |
| | Homo sapiens (Human), 955 aa. | 1 . . . 589 | 573/589 (96%) | |
| AAH43473 | 1300015B04Rik protein - Mus | 1 . . . 606 | 507/615 (82%) | 0.0 |
| | musculus (Mouse), 608 aa. | 1 . . . 607 | 538/615 (87%) | |
| AAO47606 | URG11 - Homo sapiens (Human), | 283 . . . 580 | 290/306 (94%) | 0.0 |
| | 673 aa. | 1 . . . 306 | 293/306 (94%) | |
| Q8IVT0 | Similar to hypothetical protein | 1 . . . 218 | 216/219 (98%) | e−137 |
| | FLJ32009 - Homo sapiens (Human), | 19 . . . 237 | 217/219 (98%) | |
| | 237 aa (fragment). | | | |
| Q8IXK1 | C1q receptor protein precursor - | 80 . . . 375 | 104/300 (34%) | 6e−32 |
| | Homo sapiens (Human), 652 aa. | 300 . . . 566 | 134/300 (44%) | |

[0698] PFam analysis predicts that the NOV59a protein contains the domains shown in the Table 59F.

TABLE 59F
Domain Analysis of NOV59a

| | | Identities/ | |
|---|---|---|---|
| Pfam | NOV59a | Similarities for | Expect |
| Domain | Match Region | the Matched Region | Value |
| EGF | 145 . . . 178 | 16/47 (34%) | 0.0047 |
| | | 23/47 (49%) | |
| EGF | 184 . . . 217 | 12/47 (26%) | 0.012 |
| | | 25/47 (53%) | |
| TIL | 165 . . . 223 | 13/70 (19%) | 0.53 |
| | | 40/70 (57%) | |
| EGF | 223 . . . 260 | 12/48 (25%) | 0.045 |
| | | 26/48 (54%) | |
| vwc | 385 . . . 439 | 21/84 (25%) | 7.8e−08 |
| | | 40/84 (48%) | |
| vwc | 442 . . . 492 | 18/84 (21%) | 0.00017 |
| | | 39/84 (46%) | |
| vwc | 493 . . . 550 | 21/84 (25%) | 1.8e−07 |
| | | 40/84 (48%) | |

### Example 60

[0699] The NOV60 clone was analyzed, and the nucleotide and encoded polypeptide sequences are shown in Table 60A.

TABLE 60A

| NOV60 Sequence Analysis | | |
|---|---|---|
| NOV60a, CG94946-01 | SEQ ID NO: 1173 | 6224 bp |
| DNA Sequence | ORF Start: ATG at 37 | ORF Stop: TGA at 6196 |

CCGGCGCGGCCCGCGCGCTCTTCCGCCGCCTCTCGCATGCGCCATGGCCGGCCGGTCCCACCCGGGCC
CGCTGCGGGGCGGCCGCTGCTGCCTCTCCTTGTGGTGGCCGCGTGCGTCCTGCCCGGAGCCGGCGGGA
CATGCCCGGAGCGCGCGCTGGAGCGGCGCGAGGAGGAGGCGAACGTGGTGCTCACCGGGACGGTGGAG
GAGATCCTCAACGTGGACCCGGTGCAGCACACGTACTCCTGCAAGGTTCGGGTCTGGCGGTACTTGAA
GGGCAAAGACCTGGTGGCCCGGGAGAGCCTGCTGGACGGCGGCAACAAGGTGGTGATCAGCGGCTTTG
GAGACCCCCTCATCTGTGACAACCAGGTGTCCACTGGGGACACCAGGATCTTCTTTGTGAACCCTGCA
CCCCCATACCTGTGGCCAGCCCACAAGAACGAGCTGATGCTCAACTCCAGCCTCATGCGGATCACCCT
GCGGAACCTGGAGGAGGTGGAGTTCTGTGTGGAAGATAAACCCGGGACCCACTTCACTCCAGTGCCTC
CGACGCCTCCTGATGCGTGCCGGGGAATGCTGTGCGGCTTCGGCGCCGTGTGCGAGCCCAACGCGGAG
GGGCCGGGCCGGGCGTCCTGCGTCTGCAAGAAGAGCCCGTGCCCCAGCGTGGTGGCGCCTGTGTGTGG
GTCGGACGCCTCCACCTACAGCAACGAATGCGAGCTGCAGCGGGCGCAGTGCAGCCAGCAGCGCCGCA
TCCGCCTGCTCAGCCGCGGGCCGTGCGGCTCGCGGGACCCCTGCTCCAACGTGACCTGCAGCTTCGGC
AGCACCTGTGCGCGCTCGGCCGACGGGCTGACGGCCTCGTGCCTGTGCCCCGCGACCTGCCGTGGCGC
CCCCGAGGGGACCGTCTGCGGCAGCGACGGCGCCGACTACCCCGGCGAGTGCCAGCTCCTGCGCCGCG
CCTGCGCCCGCCAGGAGAATGTCTTCAAGAAGTTCGACGGCCCTTGTGACCCCTGTCAGGGCGCCCTC
CCTGACCCGAGCCGCAGCTGCCGTGTGAACCCGCGCACGCGGCGCCCTGAGATGCTCCTACGGCCCGA
GAGCTGCCCTGCCCGGCAGGCGCCAGTGTGTGGGGACGACGGAGTCACCTACGAAAACGACTGTGTCA
TGGGCCGATCGGGGGCCGCCCGGGGTCTCCTCCTGCAGAAAGTGCGCTCCGGCCAGTGCCAGGGTCGA
GACCAGTGCCCGGAGCCCTGCCGGTTCAATGCCGTGTGCCTGTCCCGCCGTGGCCGTCCCCGCTGCTC
CTGCGACCGCGTCACCTGTGACGGGGCCTACAGGCCCGTGTGTGCCCAGGACGGGCGCACGTATGACA
GTGATTGCTGGCGGCAGCAGGCTGAGTGCCGGCAGCAGCGTGCCATCCCCAGCAAGCACCAGGGCCCG
TGTGACCAGGCCCCGTCCCCATGCCTCGGGGTGCAGTGTGCATTTGGGGCGACGTGTGCTGTGAAGAA
CGGGCAGGCAGCGTGTGAATGCCTGCAGGCGTGCTCGAGCCTCTACGATCCTGTGTGCGGCAGCGACG
GCGTCACATACGGCAGCGCGTGCGAGCTGGAGGCCACGGCCTGTACCCTCGGGCGGGAGATCCAGGTG
GCGCGCAAAGGACCCTGTGACCGCTGCGGGCAGTGCCGCTTTGGAGCCCTGTGCGAGGCCGAGACCGG
GCGCTGCGTGTGCCCCTCTGAATGCGTGGCTTTGGCCCAGCCCGTGTGTGGCTCCGACGGGCACACGT
ACCCCAGCGAGTGCATGCTGCACGTGCACGCCTGCACACACCAGATCAGCCTGCACGTGGCCTCAGCT
GGACCCTGTGAGACCTGTGGAGATGCCGTGTGTGCTTTTGGGGCTGTGTGCTCCGCAGGGCAGTGTGT
GTGTCCCCGGTGTGAGCACCCCCCGCCCGGCCCCGTGTGTGGCAGCGACGGTGTCACCTACGGCAGTG
CCTGCGAGCTACGGGAAGCCGCCTGCCTCCAGCAGACACAGATCGAGGAGGCCCGGGCAGGGCCGTGC
GAGCAGGCCGAGTGCGGTTCCGGAGGCTCTGGCTCTGGGGAGGACGGTGACTGTGAGCAGGAGCTGTG
CCGGCAGCGCGGTGGCATCTGGGACGAGGACTCGGAGGACGGGCCGTGTGTCTGTGACTTCAGCTGCC
AGAGTGTCCCAGGCAGCCCGGTGTGCGGCTCAGATGGGGTCACCTACAGCACCGAGTGTGAGCTGAAG
AAGGCCAGGTGTGAGTCACAGCGAGGGCTCTACGTAGCGGCCCAGGGAGCCTGCCGAGGCCCCGCCTT
CGCCCCGCTGCCGCCTGTGGCCCCCTTACACTGTGCCCAGACGCCCTACGGCTGCTGCCAGGACAATA
TCACCGCAGCCCGGGGCGTGGGCCTGGCTGGCTGCCCCAGTGCCTGCCAGTGCAACCCCCATGGCTCT
TACGGCGGCACCTGTGACCCAGCCACAGGCCAGTGCTCCTGCCGCCCAGGTGTGGGGGGCCTCAGGTG
TGACCGCTGTGAGCCTGGCTTCTGGAACTTTCGAGGCATCGTCACCGATGGCCGGAGTGGCTGTACAC
CCTGCAGCTGTGATCCCCAAGGCGCCGTGCGGGATGACTGTGAGCAGATGACGGGGCTGTGCTCGTGT
AAGCCCGGGGTGGCTGGACCCAAGTGTGGGCAGTGTCCAGACGGCCGTGCCCTGGGCCCCGCGGGCTG
TGAAGCTGACGCTTCTGCGCCTGCGACCTGTGCGGAGATGCGCTGTGAGTTCGGTGCGCGGTGCGTGG
AGGAGTCTGGCTCAGCCCACTGTGTCTGCCCGATGCTCACCTGTCCAGAGGCCAACGCTACCAAGGTC
TGTGGGTCAGATGGAGTCACATACGGCAACGAGTGTCAGCTGAAGACCATCGCCTGCCGCCAGGGCCT
GCAAATCTCTATCCAGAGCCTGGGCCCGTGCCAGGAGGCTGTTGCTCCCAGCACTCACCCGACATCTG
CCTCCGTGACTGTGACCACCCCAGGGCTCCTCCTGAGCCAGGCACTGCCGGCCCCCCCCGGCGCCCTC
CCCCTGGCTCCCAGCAGTACCGCACACAGCCAGACCACCCCTCCGCCCTCATCGCGACCTCGGACCAC
TGCCAGCGTCCCCAGGACCACCGTGTGGCCCGTGCTGACGGTGCCCCCCACGGCACCCTCCCCTGCAC
CCAGCCTGGTGGCGTCCGCCTTTGGTGAATCTGGCAGCACTGATGGAAGCAGCGATGAGGAACTGAGC
GGGGACCAGGAGGCCAGTGGGGGTGGCTCTGGGGGGCTCGAGCCCTTGGAGGGCAGCAGCGTGGCCAC
CCCTGGGCCACCTGTCGAGAGGGCTTCCTGCTACAACTCCGCGTTGGGCTGCTGCTCTGATGGGAAGA
CGCCCTCGCTGGACGCAGAGGGCTCCAACTGCCCCGCCACCAAGGTGTTCCAGGGCGTCCTGGAGCTG
GAGGGCGTCGAGGGCCAGGAGCTGTTCTACACGCCCGAGATGGCTGACCCCAAGTCAGAACTGTTCGG
GGAGACAGCCAGGAGCATTGAGAGCACCCTGGACGACCTCTTCCGGAATTCAGACGTCAAGAAGGATT
TCCGGAGTGTCCGCTTGCGGGACCTGGGGCCCGGCAAATCCGTCCGCGCCATTGTGGATGTGCACTTT
GACCCCACCACAGCCTTCAGGGCACCCGACGTGGCCCGGGCCCTGCTCCGGCAGATCCAGGTGTCCAG
GCGCCGGTCCTTGGGGGTGAGGCGGCCGCTGCAGGAGCACGTGCGATTTATGGACTTTGACTGGTTTC
CTGCGTTTATCACGGGGGCCACGTCAGGAGCCATTGCTGCGGGAGCCACGGCCAGAGCCACCACTGCA
TCGCGCCTGCCGTCCTCTGCTGTGACCCCTCGGGCCCCGCACCCCAGTCACACAAGCCAGCCCGTTGC
CAAGACCACGGCAGCCCCCACCACACGTCGGCCCCCCACCACTGCCCCCAGCCGTGTGCCCGGACGTC
GGCCCCCGGCCCCCCAGCAGCCTCCAAAGCCCTGTGACTCACAGCCCTGCTTCCACGGGGGGACCTGC
CAGGACTGGGCATTGGGCGGGGGCTTCACCTGCAGCTGCCCGGCAGGCAGGGGAGGCGCCGTCTGTGA
GAAGGTGCTTGGCGCCCCTGTGCCGGCCTTCGAGGGCCGCTCCTTCCTGGCCTTCCCCACCCTCCGCG
CCTACCACACGCTGCGCCTGGCACTGGAATTCCGGGCGCTGGAGCCTCAGGGGCTGCTGCTGTACAAT
GGCAACGCCCGGGGCAAGGACTTCCTGGCATTGGCGCTGCTAGATGGCCGCGTGCAGCTCAGGTTTGA
CACAGGTTCGGGGCCGGCGGTGCTGACCAGTGCCGTGCCGGTAGAGCCGGGCCAGTGGCACCGCCTGG
AGCTGTCCCGGCACTGGCGCCGGGGCACCCTCTCGGTGGATGGTGAGACCCCTGTTCTGGGCGAGAGT
CCCAGTGGCACCGACGGCCTCAACCTGGACACAGACCTCTTTGTGGGCGGCGTACCCGAGGACCAGGC
TGCCGTGGCGCTGGAGCGGACCTTCGTGGGCGCCGGCCTGAGGGGGTGCATCCGTTTGCTGGACGTCA
ACAACCAGCGCCTGGAGCTTGGCATTGGGCCGGGGGCTGCCACCCGAGGCTCTGGCGTGGGCGAGTGC
GGGGACCACCCCTGCCTGCCCAACCCCTGCCATGGCGGGGCCCCATGCCAGAACCTGGAGGCTGGAAG
GTTCCATTGCCAGTGCCCGCCCGGCCGCGTCGGACCAACCTGTGCCGATGAGAAGAGCCCCTGCCAGC
CCAACCCCTGCCATGGGGCGGCGCCCTGCCGTGTGCTGCCCGAGGGTGGTGCTCAGTGCGAGTGCCCC
CTGGGGCGTGAGGGCACCTTCTGCCAGACAGCCTCGGGGCAGGACGGCTCTGGGCCCTTCCTGGCTGA
CTTCAACGGCTTCTCCCACCTGGAGCTGAGAGGCCTGCACACCATTGCACGGGACCTGGGGGAGAAGA
TGGCGCTGGAGGCCGTGTTCCTGGCACGAGGCCCCAGCGGCCTCCTGCTCTACAACGGGCAGAAGACG
GACGGCAAGGGGGACTTCGTGTCGCTGGCACTGCGGGACCGCCGCCTGGAGTTCCGCTACGACCTGGG
CAAGGGGGCAGCGGTCATCAGGAGCAGGGAGCCAGTCACCCTGGGAGCCTGGACCAGGGTCTCACTGG
AGCGAAACGGCCGCAAGGGTGCCCTGCGTGTGGGCGACGGCCCCCGTGTGTTGGGGGAGTCCCCGAAA
TCCCGCAAGGTTCCGCACACCGTCCTCAACCTGAAGGAGCCGCTCTACGTAGGGGGCGCTCCCGACTT
CAGCAAGCTGGCCCGTGCTGCTGCCGTGTCCTCTGGCTTCGACGGTGCCATCCAGCTGGTCTCCCTCG
GAGGCCGCCAGCTGCTGACCCCGGAGCACGTGCTGCGGCAGGTGGACGTCACGTCCTTTGCAGGTCAC
CCCTGCACCCGGGCCTCAGGCCACCCCTGCCTCAATGGGGCCTCCTGCGTCCCGAGGGAGGCTGCCTA
TGTGTGCCTGTGTCCCGGGGGATTCTCAGGACCGCACTGCGAGAAGGGGCTGGTGGAGAAGTCAGCGG
GGGACGTGGATACCTTGGCCTTTGACGGGCGGACCTTTGTCGAGTACCTCAACGCTGTGACCGAGAGC
GAGAAGGCACTGCAGAGCAACCACTTTGAACTGAGCCTGCGCACTGAGGCCACGCAGGGGCTGGTGCT
CTGGAGTGGCAAGGCCACGGAGCGGGCAGACTATGTGGCACTGGCCATTGTGGACGGGCACCTGCAAC
TGAGCTACAACCTGGGCTCCCAGCCCGTGGTGCTGCGTTCCACCGTGCCCGTCAACACCAACCGCTGG
TTGCGGGTCGTGGCACATAGGGAGCAGAGGGAAGGTTCCCTGCAGGTGGGCAATGAGGCCCCTGTGAC
CGGCTCCTCCCCGCTGGGCGCCACGCAGCTGGACACTGATGGAGCCCTGTGGCTTGGGGGCCTGCCGG
AGCTGCCCGTGGGCCCAGCACTGCCCAAGGCCTACGGCACAGGCTTTGTGGGCTGCTTGCGGGATGTG
GTGGTGGGCCGGCACCCGCTGCACCTGCTGGAGGACGCCGTCACCAAGCCAGAGCTGCGGCCCTGCCC
CACCCCATGAGCTGGCACCAGAGCCCCGCGCCCGCT

| | | | |
|---|---|---|---|
| NOV60a, CG94946-01 | SEQ ID NO: 1174 | 2053 aa | MW at 215628.0kD |
| Protein Sequence | | | |

MRHGRPVPPGPAAGRPLLPLLVVAACVLPGAGGTCPERALERREEEANVVLTGTVEEILNVDPVQHTY
SCKVRVWRYLKGKDLVARESLLDGGNKVVISGFGDPLICDNQVSTGDTRTFFVNPAPPYLWPAHKNEL
MLNSSLMRITLRNLEEVEFCVEDKPGTHFTPVPPTPPDACRGMLCGFGAVCEPNAEGPGRASCVCKKS
PCPSVVAPVCGSDASTYSNECELQPAQCSQQRRIRLLSRGPCGSRDPCSNVTCSFGSTCARSADGLTA
SCLCPATCRGAPEGTVCGSDGADYPGECQLLRRACARQENVFKKFDGPCDPCQGALPDPSRSCRVNPR
TRRPEMLLRPESCPARQAPVCGDDGVTYENDCVMGRSGAARGLLLQKVRSGQCQGRDQCPEPCRFNAV
CLSRRGRPRCSCDRVTCDGAYRPVCAQDGRTYDSDCWRQQAECRQQRAIPSKHQGPCDQAPSPCLGVQ
CAFGATCAVKNGQAACECLQACSSLYDPVCGSDGVTYGSACELEATACTLGREIQVARKGPCDRCGQC
RFGALCEAETGRCVCPSECVALAQPVCGSDGHTYPSECMLHVHACTHQISLHVASAGPCETCGDAVCA
FGAVCSAGQCVCPRCEHPPPGPVCGSDGVTYGSACELREAACLQQTQIEEAPAGPCEQAECGSGGSGS
GEDGDCEQELCRQRGGIWDEDSEDGPCVCDFSCQSVPGSPVCGSDGVTYSTECELKKARCESQRGLYV
AAQGACRGPAFAPLPPVAPLHCAQTPYGCCQDNITAARGVGLAGCPSACQCNPHGSYGGTCDPATGQC
SCRPGVGGLRCDRCEPGFWNFRGIVTDGRSGCTPCSCDPQGAVRDDCEQMTGLCSCKPGVAGPKCGQC
PDGRALGPAGCEADASAPATCAEMRCEFGAPCVEESGSAHCVCPMLTCPEANATKVCGSDGVTYGNEC
QLKTIACRQGLQISIQSLGPCQEAVAPSTHPTSASVTVTTPGLLLSQALPAPPGALPLAPSSTAHSQT
TPPPSSRPRTTASVPRTTVWPVLTVPPTAPSPAPSLVASAFGESGSTDGSSDEELSGDQEASGGGSGG
LEPLEGSSVATPGPPVERASCYNSALGCCSDGKTPSLDAEGSNCPATKVFQGVLELEGVEGQELFYTP
EMADPKSELFGETARSTESTLDDLFRNSDVKKDFRSVRLRDLGPGKSVRAIVDVHFDPTTAFRAPDVA
RALLRQIQVSRRRSLGVRRPLQEHVRFMDFDWFPAFITGATSGAIAAGATARATTASRLPSSAVTPRA
PHPSHTSQPVAKTTAAPTTRRPPTTAPSRVPGRRPPAPQQPPKPCDSQPCFHGGTCQDWALGGGFTCS
CPAGRGGAVCEKVLGAPVPAFEGRSFLAFPTLRAYHTLRLALEFRALEPQGLLLYNGNARGKDFLALA
LLDGRVQLRFDTGSGPAVLTSAVPVEPGQWHRLELSRHWRRGTLSVDGETPVLGESPSGTDGLNLDTD
LFVGGVPEDQAAVALERTFVGAGLRGCIRLLDVNNQRLELGIGPGAATRGSGVGECGDHPCLPNPCHG
GAPCQNLEAGRFHCQCPPGRVGPTCADEKSPCQPNPCHGAAPCRVLPEGGAQCECPLGREGTFCQTAS
GQDGSGPFLADFNGFSHLELRGLHTIARDLGEKMALEAVFLARGPSGLLLYNGQKTDGKGDFVSLALR
DRRLEFRYDLGKGAAVIRSREPVTLGAWTRVSLERNGRKGALRVGDGPRVLGESPKSRKVPHTVLNLK
EPLYVGGAPDFSKLARAAAVSSGFDGAIQLVSLGGRQLLTPEHVLRQVDVTSFAGHPCTRASGHPCLN
GASCVPREAAYVCLCPGGFSGPHCEKGLVEKSAGDVDTLAFDGRTFVEYLNAVTESEKALQSNHFELS
LRTEATQGLVLWSGKATERADYVALAIVDGHLQLSYNLGSQPVVLRSTVPVNTNRWLRVVAHREQREG
SLQVGNEAPVTGSSPLGATQLDTDGALWLGGLPELPVGPALPKAYGTGFVGCLRDVVVGRHPLHLLED
AVTKPELRPCPTP

| | | |
|---|---|---|
| NOV60b, 275631590 | SEQ ID NO: 1175 | 388 bp |
| DNA Sequence | ORF Start: at 2 | ORF Stop: end of sequence |

CACCGGATCCGCCACCAAGGTGTTCCAGGGCGTCCTGGAGCTGGAGGGCGTCGAGGGCCAGGAGCTGT
TCTACACGCCCGAGATGGCTGACCCCAAGTCAGAACTGTTCGGGGAGACAGCCAGGAGCATTGAGAGC
ACCCTGGACGACCTCTTCCGGAATTCAGACGTCAAGAAGGATTTCCGGAGTGTCCGCTTGCGGGACCT
GGGGCCCGGCAAATCCGTCCGCGCCATTGTGGATGTGCACTTTGACCCCACCACAGCCTTCAGGGCAC
CCGACGTGGCCCGGGCCCTGCTCCGGCAGATCCAGGTGTCCAGGCGCCGGTCCTTGGGGGTGAGGCGG
CCGCTGCAGGAGCACGTGCGATTTATGGACTTTGACTGGGTCGACGGC

| | | | |
|---|---|---|---|
| NOV60b, 275631590 | SEQ ID NO: 1176 | 129 aa | MW at 14652.4kD |
| Protein Sequence | | | |

TGSATKVFQGVLELEGVEGQELFYTPEMADPKSELFGETARSIESTLDDLFRNSDVKKDFRSVRLRDL
GPGKSVRAIVDVHFDPTTAFRAPDVARALLRQIQVSRRRSLGVRRPLQEHVRFMDFDWVDG

| | | |
|---|---|---|
| NOV60c, 275631564 | SEQ ID NO: 1177 | 316 bp |
| DNA Sequence | ORF Start: at 2 | ORF Stop: end of sequence |

CACCGGATCCTGCCAGTGCAACCCCCATGGCTCTTACGGCGGCACCTGTGACCCAGCCACAGGCCAGT
GCTCCTGCCGCCCAGGTGTGGGGGGCCTCAGGTGTGACCGCTGTGAGCCTGGCTTCTGGAACTTTCGA
GGCATCGTCACCGATGGCCGGAGTGGCTGTACACCCTGCAGCTGTGATCCCCAAGGCGCCGTGCGGGA
TGACTGTGAGCAGATGACGGGGCTGTGCTCGTGTAAGCCCGGGGTGGCTGGACCCAAGTGTGGGCAGT
GTCCAGACGGCCGTGCCCTGGGCCCCGCGGGCTGTGTCGACGGC

| | | | |
|---|---|---|---|
| NOV60c, 275631564 | SEQ ID NO: 1178 | 105 aa | MW at 10579.7kD |
| Protein Sequence | | | |

TGSCQCNPHGSYGGTCDPATGQCSCRPGVGGLRCDRCEPGFWNFRGIVTDGRSGCTPCSCDPQGAVRD
DCEQMTGLCSCKPGVAGPKCGQCPDGRALGPAGCVDG

| | | |
|---|---|---|
| NOV60d, CG94946-02 | SEQ ID NO: 1179 | 4760 bp |
| DNA Sequence | ORF Start: ATG at 37 | ORF Stop: TGA at 4732 |

CCGGCGCGGCCCGCGCGCTCTTCCGCCGCCTCTCGCATGCGCCATGGCCGGCCGGTCCCACCCGGGCC
CGCTGCGGGGCGGCCGCTGCTGCCTCTCCTTGTGGTGGCCGCGTGCGTCCTGCCCGGAGCCGGCGGGA
CATGCCCGGAGCGCGCGCTGGAGCGGCGCGAGGAGGAGGCGAACGTGGTGCTCACCGGGACGGTGGAG
GAGATCCTCAACGTGGACCCGGTGCAGCACACGTACTCCTGCAAGGTTCGGGTCTGGCGGTACTTGAA
GGGCAAAGACCTGGTGGCCCGGGAGAGCCTGCTGGACGGCGGCAACAAGGTGGTGATCAGCGGCTTTG
GAGACCCCCTCATCTGTGACAACCAGGTGTCCACTGGGGACACCAGGATCTTCTTTGTGAACCCTGCA
CCCCCATACCTGTGGCCAGCCCACAAGAACGAGCTGATGCTCAACTCCAGCCTCATGCGGATCACCCT
GCGGAACCTGGAGGAGGTGGAGTTCTGTGTGGAAGATAAACCCGGGACCCACTTCACTCCAGTGCCTC
CGACGCCTCCTGATGCGTGCCGGGGAATGCTGTGCGGCTTCGGCGCCGTGTGCGAGCCCAACGCGGAG
GGGCCGGGCCGGGCGTCCTGCGTCTGCAAGAAGAGCCCGTGCCCCAGCGTGGTGGCGCCTGTGTGTGG
GTCGGACGCCTCCACCTACAGCAACGAATGCGAGCTGCAGCGGGCGCAGTGCAGCCAGCAGCGCCGCA
TCCGCCTGCTCAGCCGCGGGCCGTGCGGCTCGCGGGACCCCTGCTCCAACGTGACCTGCAGCTTCGGC
AGCACCTGTGCGCGCTCGGCCGACGGGCTGACGGCCTCGTGCCTGTGCCCCGCGACCTGCCGTGGCGC
CCCCGAGGGGACCGTCTGCGGCAGCGACGGCGCCGACTACCCCGGCGAGTGCCAGCTCCTGCGCCGCG
CCTGCGCCCGCCAGGAGAATGTCTTCAAGAAGTTCGACGGCCCTTGTGACCCCTGTCAGGGCGCCCTC
CCTGACCCGAGCCGCAGCTGCCGTGTGAACCCGCGCACGCGGCGCCCTGAGATGCTCCTACGGCCCGA
GAGCTGCCCTGCCCGGCAGGCGCCAGTGTGTGGGGACGACGGAGTCACCTACGAAAACGACTGTGTCA
TGGGCCGATCGGGGGCCGCCCGGGGTCTCCTCCTGCAGAAAGTGCGCTCCGGCCAGTGCCAGGGTCGA
GACCAGTGCCCGGAGCCCTGCCGGTTCAATGCCGTGTGCCTGTCCCGCCGTGGCCGTCCCCGCTGCTC
CTGCGACCGCGTCACCTGTGACGGGGCCTACAGGCCCGTGTGTGCCCAGGACGGGCGCACGTATGACA
GTGATTGCTGGCGGCAGCAGGCTGAGTGCCGGCAGCAGCGTGCCATCCCCAGCAAGCACCAGGGCCCG
TGTGACCAGGCCCCGTCCCCATGCCTCGGGGTGCAGTGTGCATTTGGGGCGACGTGTGCTGTGAAGAA
CGGGCAGGCAGCGTGTGAATGCCTGCAGGCGTGCTCGAGCCTCTACGATCCTGTGTGCGGCAGCGACG
GCGTCACATACGGCAGCGCGTGCGAGCTGGAGGCCACGGCCTGTACCCTCGGGCGGGAGATCCAGGTG
GCGCGCAAAGGACCCTGTGACCGCTGCGGGCAGTGCCGCTTTGGAGCCCTGTGCGAGGCCGAGACCGG
GCGCTGCGTGTGCCCCTCTGAATGCGTGGCTTTGGCCCAGCCCGTGTGTGGCTCCGACGGGCACACGT
ACCCCAGCGAGTGCATGCTGCACGTGCACGCCTGCACACACCAGATCAGCCTGCACGTGGCCTCAGCT
GGACCCTGTGAGACCTGTGGAGATGCCGTGTGTGCTTTTGGGGCTGTGTGCTCCGCAGGGCAGTGTGT
GTGTCCCCGGTGTGAGCACCCCCCGCCCGGCCCCGTGTGTGGCAGCGACGGTGTCACCTACGGCAGTG
CCTGCGAGCTACGGGAAGCCGCCTGCCTCCAGCAGACACAGATCGAGGAGGCCCGGGCAGGGCCGTGC
GAGCAGGCCGAGTGCGGTTCCGGAGGCTCTGGCTCTGGGGAGGACGGTGACTGTGAGCAGGAGCTGTG
CCGGCAGCGCGGTGGCATCTGGGACGAGGACTCGGAGGACGGGCCGTGTGTCTGTGACTTCAGCTGCC
AGAGTGTCCCAGGCAGCCCGGTGTGCGGCTCAGATGGGGTCACCTACAGCACCGAGTGTGAGCTGAAG
AAGGCCAGGTGTGAGTCACAGCGAGGGCTCTACGTAGCGGCCCAGGGAGCCTGCCGAGGCCCCGCCTT
CGCCCCGCTGCCGCCTGTGGCCCCCTTACACTGTGCCCAGACGCCCTACGGCTGCTGCCAGGACAATA
TCACCGCAGCCCGGGGCGTGGGCCTGGCTGGCTGCCCCAGTGCCTGCCAGTGCAACCCCCATGGCTCT
TACGGCGGCACCTGTGACCCAGCCACAGGCCAGTGCTCCTGCCGCCCAGGTGTGGGGGGCCTCAGGTG
TGACCGCTGTGAGCCTGGCTTCTGGAACTTTCGAGGCATCGTCACCGATGGCCGGAGTGGCTGTACAC
CCTGCAGCTGTGATCCCCAAGGCGCCGTGCGGGATGACTGTGAGCAGATGACGGGGCTGTGCTCGTGT
AAGCCCGGGGTGGCTGGACCCAAGTGTGGGCAGTGTCCAGACGGCCGTGCCCTGGGCCCCGCGGGCTG
TGAAGCTGACGCTTCTGCGCCTGCGACCTGTGCGGAGATGCGCTGTGAGTTCGGTGCGCGGTGCGTGG
AGGAGTCTGGCTCAGCCCACTGTGTCTGCCCGATGCTCACCTGTCCAGAGGCCAACGCTACCAAGGTC
TGTGGGTCAGATGGAGTCACATACGGCAACGAGTGTCAGCTGAAGACCATCGCCTGCCGCCAGGGCCT
GCAAATCTCTATCCAGAGCCTGGGCCCGTGCCAGGAGGCTGTTGCTCCCAGCACTCACCCGACATCTG
CCTCCGTGACTGTGACCACCCCAGGGCTCCTCCTGAGCCAGGCACTGCCGGCCCCCCCCGGCGCCCTC
CCCCTGGCTCCCAGCAGTACCGCACACAGCCAGACCACCCCTCCGCCCTCATCGCGACCTCGGACCAC
TGCCAGCGTCCCCAGGACCACCGTGTGGCCCGTGCTGACGGTGCCCCCCACGGCACCCTCCCCTGCAC
CCAGCCTGGTGGCGTCCGCCTTTGGTGAATCTGGCAGCACTGATGGAAGCAGCGATGAGGAACTGAGC
GGGGACCAGGAGGCCAGTGGGGGTGGCTCTGGGGGGCTCGAGCCCTTGGAGGGCAGCAGCGTGGCCAC
CCCTGGGCCACCTGTCGAGAGGGCTTCCTGCTACAACCCCTGCCATGGGGCGGCGCCCTGCCGTGTGC
TGCCCGAGGGTGGTGCTCAGTGCGAGTGCCCCCTGGGGCGTGAGGGCACCTTCTGCCAGACAGCCTCG
GGGCAGGACGGCTCTGGGCCCTTCCTGGCTGACTTCAACGGCTTCTCCCACCTGGAGCTGAGAGGCCT
GCACACCATTGCACGGGACCTGGGGGAGAAGATGGCGCTGGAGGCCGTGTTCCTGGCACGAGGCCCCA
GCGGCCTCCTGCTCTACAACGGGCAGAAGACGGACGGCAAGGGGGACTTCGTGTCGCTGGCACTGCGG
GACCGCCGCCTGGAGTTCCGCTACGACCTGGGCAAGGGGGCAGCGGTCATCAGGAGCAGGGAGCCAGT
CACCCTGGGAGCCTGGACCAGGGTCTCACTGGAGCGAAACGGCCGCAAGGGTGCCCTGCGTGTGGGCG
ACGGCCCCCGTGTGTTGGGGGAGTCCCCGAAATCCCGCAAGGTTCCGCACACCGTCCTCAACCTGAAG
GAGCCGCTCTACGTAGGGGGCGCTCCCGACTTCAGCAAGCTGGCCCGTGCTGCTGCCGTGTCCTCTGG
CTTCGACGGTGCCATCCAGCTGGTCTCCCTCGGAGGCCGCCAGCTGCTGACCCCGGAGCACGTGCTGC
GGCAGGTGGACGTCACGTCCTTTGCAGGTCACCCCTGCACCCGGGCCTCAGGCCACCCCTGCCTCAAT
GGGGCCTCCTGCGTCCCGAGGGAGGCTGCCTATGTGTGCCTGTGTCCCGGGGGATTCTCAGGACCGCA
CTGCGAGAAGGGGCTGGTGGAGAAGTCAGCGGGGGACGTGGATACCTTGGCCTTTGACGGGCGGACCT
TTGTCGAGTACCTCAACGCTGTGACCGAGAGCGAGAAGGCACTGCAGAGCAACCACTTTGAACTGAGC
CTGCGCACTGAGGCCACGCAGGGGCTGGTGCTCTGGAGTGGCAAGGCCACGGAGCGGGCAGACTATGT
GGCACTGGCCATTGTGGACGGGCACCTGCAACTGAGCTACAACCTGGGCTCCCAGCCCGTGGTGCTGC
GTTCCACCGTGCCCGTCAACACCAACCGCTGGTTGCGGGTCGTGGCACATAGGGAGCAGAGGGAAGGT
TCCCTGCAGGTGGGCAATGAGGCCCCTGTGACCGGCTCCTCCCCGCTGGGCGCCACGCAGCTGGACAC
TGATGGAGCCCTGTGGCTTGGGGGCCTGCCGGAGCTGCCCGTGGGCCCAGCACTGCCCAAGGCCTACG
GCACAGGCTTTGTGGGCTGCTTGCGGGATGTGGTGGTGGGCCGGCACCCGCTGCACCTGCTGGAGGAC
GCCGTCACCAAGCCAGAGCTGCGGCCCTGCCCCACCCCATGAGCTGGCACCAGAGCCCCGCGCCCGCT

| | | | |
|---|---|---|---|
| NOV60d, CG94946-02 | SEQ ID NO: 1180 | 1565 aa | MW at 163817.1kD |
| Protein Sequence | | | |

MRHGRPVPPGPAAGRPLLPLLVVAACVLPGAGGTCPERALERREEEANVVLTGTVEEILNVDPVQHTY
SCKVRVWRYLKGKDLVARESLLDGGNKVVISGFGDPLICDNQVSTGDTRIFFVNPAPPYLWPAHKNEL
MLNSSLMRITLRNLEEVEFCVEDKPGTHFTPVPPTPPDACRGMLCGFGAVCEPNAEGPGRASCVCKKS
PCPSVVAPVCGSDASTYSNECELQRAQCSQQPRIRLLSRGPCGSRDPCSNVTCSFGSTCARSADGLTA
SCLCPATCRGAPEGTVCGSDGADYPGECQLLRRACARQENVFKKFDGPCDPCQGALPDPSRSCRVNPR
TRRPEMLLRPESCPARQAPVCGDDGVTYENDCVMGRSGAARGLLLQKVRSGQCQGRDQCPEPCRFNAV
CLSRRGRPRCSCDRVTCDGAYRPVCAQDGRTYDSDCWRQQAECRQQRAIPSKHQGPCDQAPSPCLGVQ
CAFGATCAVKNGQAACECLQACSSLYDPVCGSDGVTYGSACELEATACTLGREIQVARKGPCDRCGQC
RFGALCEAETGRCVCPSECVALAQPVCGSDGHTYPSECMLHVHACTHQISLHVASAGPCETCGDAVCA
FGAVCSAGQCVCPRCEHPPPGPVCGSDGVTYGSACELREAACLQQTQIEEARAGPCEQAECGSGGSGS
GEDGDCEQELCRQRGGIWDEDSEDGPCVCDFSCQSVPGSPVCGSDGVTYSTECELKKARCESQRGLYV
AAQGACRGPAFAPLPPVAPLHCAQTPYGCCQDNITAARGVGLAGCPSACQCNPHGSYGGTCDPATGQC
SCRPGVGGLRCDRCEPGFWNFRGIVTDGRSGCTPCSCDPQGAVRDDCEQMTGLCSCKPGVAGPKCGQC
PDGRALGPAGCEADASAPATCAEMRCEFGARCVEESGSAHCVCPMLTCPEANATKVCGSDGVTYGNEC
QLKTIACRQGLQISIQSLGPCQEAVAPSTHPTSASVTVTTPGLLLSQALPAPPGALPLAPSSTAHSQT
TPPPSSRPRTTASVPRTTVWPVLTVPPTAPSPAPSLVASAFGESGSTDGSSDEELSGDQEASGGGSGG
LEPLEGSSVATPGPPVERASCYNPCHGAAPCRVLPEGGAQCECPLGREGTFCQTASGQDGSGPFLADF
NGFSHLELRGLHTIARDLGEKMALEAVFLARGPSGLLLYNGQKTDGKGDFVSLALRDRRLEFRYDLGK
GAAVIRSREPVTLGAWTRVSLERNGRKGALRVGDGPRVLGESPKSRKVPHTTLNLKEPLYVGGAPDFS
KLARAAAVSSGFDGAIQLVSLGGRQLLTPEHVLRQVDVTSFAGHPCTRASGHPCLNGASCVPREAAYV
CLCPGGFSGPHCEKGLVEKSAGDVDTLAFDGRTFVEYLNAVTESEKALQSNHFELSLRTEATQGLVLW
SGKATERADYVALATVDGHLQLSYNLGSQPVVLRSTVPVNTNRWLRVVAHREQREGSLQVGNEAPVTG
SSPLGATQLDTDGALWLGGLPELPVGPALPKAYGTGFVGCLRDVVVGRHPLHLLEDAVTKPELRPCPT
P

| | | |
|---|---|---|
| NOV60e, CG94946-03 | SEQ ID NO: 1181 | 893 bp |
| DNA Sequence | ORF Start: ATG at 37 | ORF Stop: TGA at 865 |

CCGGCGCGGCCCGCGCGCTCTTCCGCCGCCTCTCGCATGCGCCATGGCCGGCCGGTCCCACCCGGGCC
CGCTGCGGGGCGGCCGCTGCTGCCTCTCCTTGTGGTGGCCGCGTGCGTCCTGCCCGGAGCCGGCGGGA
CATGCCCGGAGCGCGCGCTGGAGCGGCGCGAGGAGGAGGCGAACGTGGTGCTCACCGGGACGGTGGAG
GAGATCCTCAACGTGGACCCGGTGCAGCACACGTACTCCTGCAAGGTTCGGGTCTGGCGGTACTTGAA
GGGCAAAGACCTGGTGGCCCGGGAGAGCCTGCTGGACGGCGGCAACAAGGTGGTGATCAGCGGCTTTG
GAGACCCCCTCATCTGTGACAACCAGGTGTCCACTGGGGACACCAGGATCTTCTTTGTGAACCCTGCA
CCCCCATACCTGTGGCCAGCCCACAAGAACGAGCTGGTGCTCTGGAGTGGCAAGGCCACGGAGCGGGC
AGACTATGTGGCACTGGCCATTGTGGACGGGCACCTGCAACTGAGCTACAACCTGGGCTCCCAGCCCG
TGGTGCTGCGTTCCACCGTGCCCGTCAACACCAACCGCTGGTTGCGGGTCGTGGCACATAGGGAGCAG
AGGGAAGGTTCCCTGCAGGTGGGCAATGAGGCCCCTGTGACCGGCTCCTCCCCGCTGGGCGCCACGCA
GCTGGACACTGATGGAGCCCTGTGGCTTGGGGGCCTGCCGGAGCTGCCCGTGGGCCCAGCACTGCCCA
AGGCCTACGGCACAGGCTTTGTGGGCTGCTTGCGGGATGTGGTGGTGGGCCGGCACCCGCTGCACCTG
CTGGAGGACGCCGTCACCAAGCCAGAGCTGCGGCCCTGCCCCACCCCATGAGCTGGCACCAGAGCCCC
GCGCCCGCT

| | | | |
|---|---|---|---|
| NOV60e, CG94946-03 | SEQ ID NO: 1182 | 276 aa | MW at 29688.8kD |
| Protein Sequence | | | |

MRHGRPVPPGPAAGRPLLPLLVVAACVLPGAGGTCPERALERREEEANVVLTGTVEEILNVDPVQHTY
SCKVRVWRYLKGKDLVARESLLDGGNKVVISGFGDPLICDNQVSTGDTRIFFVNPAPPYLWPAHKNEL
VLWSGKATERADYVALAIVDGHLQLSYNLGSQPVVLRSTVPVNTNRWLRVVAHREQREGSLQVGNEAP
VTGSSPLGATQLDTDGALWLGGLPELPVGPALPKAYGTGFVGCLRDVVVGRHPLHLLEDAVTKPELRP
CPTP

| | | |
|---|---|---|
| NOV60f, CG94946-04 | SEQ ID NO: 1183 | 1931 bp |
| DNA Sequence | ORF Start: ATG at 37 | ORF Stop: TGA at 1903 |

CCGGCGCGGCCCGCGCGCTCTTCCGCCGCCTCTCGCATGCGCCATGGCCGGCCGGTCCCACCCGGGCC
CGCTGCGGGGCGGCCGCTGCTGCCTCTCCTTGTGGTGGCCGCGTGCGTCCTGCCCGGAGCCGGCGGGA
CATGCCCGGAGCGCGCGCTGGAGCGGCGCGAGGAGGAGGCGAACGTGGTGCTCACCGGGACGGTGGAG
GAGATCCTCAACGTGGACCCGGTGCAGCACACGTACTCCTGCAAGGTTCGGGTCTGGCGGTACTTGAA
GGGCAAAGACCTGGTGGCCCGGGAGAGCCTGCTGGACGGCGGCAACAAGGTGGTGATCAGCGGCTTTG
GAGACCCCCTCATCTGTGACAACCAGGTGTCCACTGGGGACACCAGGATCTTCTTTGTGAACCCTGCA
CCCCCATACCTGTGGCCAGCCCACAAGAACGAGCTGATGCTCAACTCCAGCCTCATGCGGATCACCCT
GCGGAACCTGGAGGAGGTGGAGTTCTGTGTGGAAGATAAACCCGGGACCCACTTCACTCCAGTGCCTC
CGACGCCTCCTGATGCGTGCCGGGGAATGCTGTGCGGCTTCGGCGCCGTGTGCGAGCCCAACGCGGAG
GGGCCGGGCCGGGCGTCCTGCGTCTGCAAGAAGAGCCCGTGCCCCAGCGTGGTGGCGCCTGTGTGTGG
GTCGGACGCCTCCACCTACAGCAACGAATGCGAGCTGCAGCGGGCGCAGTGCAGCCAGCAGCGCCGCA
TCCGCCTGCTCAGCCGCGGGCCGTGCGGCTCGCGGGACCCCTGCTCCAACGTGACCTGCAGCTTCGGC
AGCACCTGTGCGCGCTCGGCCGACGGGCTGACGGCCTCGTGCCTGTGCCCCGCGACCTGCCGTGGCGC
CCCCGAGGGGACCGTCTGCGGCAGCGACGGCGCCGACTACCCCGGCGAGTGCCAGCTCCTGCGCCGCG
CCTGCGCCCGCCAGGAGAATGTCTTCAAGAAGTTCGACGGCCCTTGTGACCCCTGTCAGGGCGCCCTC
CCTGACCCGAGCCGCAGCTGCCGTGTGAACCCGCGCACGCGGCGCCCTGAGATGCTCCTACGGCCCGA
GAGCTGCCCTGCCCGGCAGGCGCCAGTGTGTGGGGACGACGGAGTCACCTACGAAAACGACTGTGTCA
TGGGCCGATCGGGGGCCGCCCGGGGTCTCCTCCTGCAGAAAGTGCGCTCCGGCCAGTGCCAGGGTCGA
GACCAGTGCCCGGAGCCCTGCCGGTTCAATGCCGTGTGCCTGTCCCGCCGTGGCCGTCCCCGCTGCTC
CTGCGACCGCGTCACCTGTGACGGGGCCTACAGGCCCGTGTGTGCCCAGGACGGGCGCACGTATGACA
GTGATTGCTGGCGGCAGCAGGCTGAGTGCCGGCAGCAGCGTGCCATCCCCAGCAAGCACCAGGGCCCG
TGTGACCAGGCCCCGTCCCCATGCCTCGGGGTGCAGTGTGCATTTGGGGCGACGTGTGCTGTGAAGAA
CGGGCAGGCAGCGTGTGAATGCCTGCAGGCGTGCTCGAGCCTCTACGATCCTGTGTGCGGCAGCGACG
GCGTCACATACGGCAGCGCGTGCGAGCTGGAGGCCACGGCCTGTACCCTCGGGCGGGAGATCCAGGTG
GCGCGCAAAGGACCCTGTGACCGCTGCGGGCAGTGCCGCTTTGGAGCCCTGCCTGTGACCGGCTCCTC
CCCGCTGGGCGCCACGCAGCTGGACACTGATGGAGCCCTGTGGCTTGGGGGCCTGCCGGAGCTGCCCG
TGGGCCCAGCACTGCCCAAGGCCTACGGCACAGGCTTTGTGGGCTGCTTGCGGGATGTGGTGGTGGGC
CGGCACCCGCTGCACCTGCTGGAGGACGCCGTCACCAAGCCAGAGCTGCGGCCCTGCCCCACCCCATG
AGCTGGCACCAGAGCCCCGCGCCCGCT

| | | | |
|---|---|---|---|
| NOV60f, CG94946-04 | SEQ ID NO: 1184 | 622 aa | MW at 66353.9kD |
| Protein Sequence | | | |
| MRHGRPVPPGPAAGRPLLPLLVVAACVLPGAGGTCPERALERREEEAIWVLTGTVEEILNVDPVQHTY | | | |
| SCKVRVWRYLKGKDLVARESLLDGGNKVVISGFGDPLICDNQVSTGDTRIFFVNPAPPYLWPAHKNEL | | | |
| MLNSSLMRITLRNLEEVEFCVEDKPGTHFTPVPPTPPDACRGMLCGFGAVCEPNAEGPGRASCVCKKS | | | |
| PCPSVVAPVCGSDASTYSNECELQRAQCSQQRRIRLLSRGPCGSRDPCSNVTCSFGSTCARSADGLTA | | | |
| SCLCPATCRGAPEGTVCGSDGADYPGECQLLRRACARQENVFKKFDGPCDPCQGALPDPSRSCRVNPR | | | |
| TRRPEMLLRPESCPARQAPVCGDDGVTYENDCVMGRSGAARGLLLQKVRSGQCQGRDQCPEPCRFNAV | | | |
| CLSRRGRPRCSCDRVTCDGAYRPVCAQDGRTYDSDCWRQQAECRQQRAIPSKHQGPCDQAPSPCLGVQ | | | |
| CAFGATCAVKNGQAACECLQACSSLYDPVCGSDGVTYGSACELEATACTLGREIQVARKGPCDRCGQC | | | |
| RFGALPVTGSSPLGATQLDTDGALWLGGLPELPVGPALPKAYGTGFVGCLRDVVVGRHPLHLLEDAVT | | | |
| KPELRPCPTP | | | |

| | | |
|---|---|---|
| NOV60g, CG94946-05 | SEQ ID NO: 1185 | 4697 bp |
| DNA Sequence | ORF Start: ATG at 37 | ORF Stop: TGA at 4669 |

CCGGCGCGGCCCGCGCGCTCTTCCGCCGCCTCTCGCATGCGCCATGGCCGGCCGGTCCCACCCGGGCC
CGCTGCGGGGCGGCCGCTGCTGCCTCTCCTTGTGGTGGCCGCGTGCGTCCTGCCCGGAGCCGGCGGGA
CATGCCCGGAGCGCGCGCTGGAGCGGCGCGAGGAGGAGGCGAACGTGGTGCTCACCGGGACGGTGGAG
GAGATCCTCAACGTGGACCCGGTGCAGCACACGTACTCCTGCAAGGTTCGGGTCTGGCGGTACTTGAA
GGGCAAAGACCTGGTGGCCCGGGAGAGCCTGCTGGACGGCGGCAACAAGGTGGTGATCAGCGGCTTTG
GAGACCCCCTCATCTGTGACAACCAGGTGTCCACTGGGGACACCAGGATCTTCTTTGTGAACCCTGCA
CCCCCATACCTGTGGCCAGCCCACAAGAACGAGCTGATGCTCAACTCCAGCCTCATGCGGATCACCCT
GCGGAACCTGGAGGAGGTGGAGTTCTGTGTGGAAGATAAACCCGGGACCCACTTCACTCCAGTGCCTC
CGACGCCTCCTGATGCGTGCCGGGGAATGCTGTGCGGCTTCGGCGCCGTGTGCGAGCCCAACGCGGAG
GGGCCGGGCCGGGCGTCCTGCGTCTGCAAGAAGAGCCCGTGCCCCAGCGTGGTGGCGCCTGTGTGTGG
GTCGGACGCCTCCACCTACAGCAACGAATGCGAGCTGCAGCGGGCGCAGTGCAGCCAGCAGCGCCGCA
TCCGCCTGCTCAGCCGCGGGCCGTGCGGCTCGCGGGACCCCTGCTCCAACGTGACCTGCAGCTTCGGC
AGCACCTGTGCGCGCTCGGCCGACGGGCTGACGGCCTCGTGCCTGTGCCCCGCGACCTGCCGTGGCGC
CCCCGAGGGGACCGTCTGCGGCAGCGACGGCGCCGACTACCCCGGCGAGTGCCAGCTCCTGCGCCGCG
CCTGCGCCCGCCAGGAGAATGTCTTCAAGAAGTTCGACGGCCCTTGTGACCCCTGTCAGGGCGCCCTC
CCTGACCCGAGCCGCAGCTGCCGTGTGAACCCGCGCACGCGGCGCCCTGAGATGCTCCTACGCCCCGA
GAGCTGCCCTGCCCGGCAGGCGCCAGTGTGTGGGGACGACGGAGTCACCTACGAAAACGACTGTGTCA
TGGGCCGATCGGGGGCCGCCCGGGGTCTCCTCCTGCAGAAAGTGCGCTCCGGCCAGTGCCAGGGTCGA
GACCAGTGCCCGGAGCCCTGCCGGTTCAATGCCGTGTGCCTGTCCCGCCGTGGCCGTCCCCGCTGCTC
CTGCGACCGCGTCACCTGTGACGGGGCCTACAGGCCCGTGTGTGCCCAGGACGGGCGCACGTATGACA
GTGATTGCTGGCGGCAGCAGGCTGAGTGCCGGCAGCAGCGTGCCATCCCCAGCAAGCACCAGGGCCCG
TGTGACCAGGCCCCGTCCCCATGCCTCGGGGTGCAGTGTGCATTTGGGGCGACGTGTGCTGTGAAGAA
CGGGCAGGCAGCGTGTGAATGCCTGCAGGCGTGCTCGAGCCTCTACGATCCTGTGTGCGGCAGCGACG
GCGTCACATACGGCAGCGCGTGCGAGCTGGAGGCCACGGCCTGTACCCTCGGGCGGGAGATCCAGGTG
GCGCGCAAAGGACCCTGTGACCGCTGCGGGCAGTGCCGCTTTGGAGCCCTGTGCGAGGCCGAGACCGG
GCGCTGCGTGTGCCCCTCTGAATGCGTGGCTTTGGCCCAGCCCGTGTGTGGCTCCGACGGGCACACGT
ACCCCAGCGAGTGCATGCTGCACGTGCACGCCTGCACACACCAGATCAGCCTGCACGTGGCCTCAGCT
GGACCCTGTGAGACCTGTGGAGATGCCGTGTGTGCTTTTGGGGCTGTGTGCTCCGCAGGGCAGTGTGT
GTGTCCCCGGTGTGAGCACCCCCCGCCCGGCCCCGTGTGTGGCAGCGACGGTGTCACCTACGGCAGTG
CCTGCGAGCTACGGGAAGCCGCCTGCCTCCAGCAGACACAGATCGAGGAGGCCCGGGCAGGGCCGTGC
GAGCAGGCCGAGTGCGGTTCCGGAGGCTCTGGCTCTGGGGAGGACGGTGACTGTGAGCAGGAGCTGTG
CCGGCAGCGCGGTGGCATCTGGGACGAGGACTCGGAGGACGGGCCGTGTGTCTGTGACTTCAGCTGCC
AGAGTGTCCCAGGCAGCCCGGTGTGCGGCTCAGATGGGGTCACCTACAGCACCGAGTGTGAGCTGAAG
AAGGCCAGGTGTGAGTCACAGCGAGGGCTCTACGTAGCGGCCCAGGGAGCCTGCCGAGGCCCCGCCTT
CGCCCCGCTGCCGCCTGTGGCCCCCTTACACTGTGCCCAGACGCCCTACGGCTGCTGCCAGGACAATA
TCACCGCAGCCCGGGGCGTGGGCCTGGCTGGCTGCCCCAGTGCCTGCCAGTGCAACCCCCATGGCTCT
TACGGCGGCACCTGTGACCCAGCCACAGGCCAGTGCTCCTGCCGCCCAGGTGTGGGGGGCCTCAGGTG
TGACCGCTGTGAGCCTGGCTTCTGGAACTTTCGAGGCATCGTCACCGATGGCCGGAGTGGCTGTACAC
CCTGCAGCTGTGATCCCCAAGGCGCCGTGCGGGATGACTGTGAGCAGATGACGGGGCTGTGCTCGTGT
AAGCCCGGGGTGGCTGGACCCAAGTGTGGGCAGTGTCCAGACGGCCGTGCCCTGGGCCCCGCGGGCTG
TGAAGCTGACGCTTCTGCGCCTGCGACCTGTGCGGAGATGCGCTGTGAGTTCGGTGCGCGGTGCGTGG
AGGAGTCTGGCTCAGCCCACTGTGTCTGCCCGATGCTCACCTGTCCAGAGGCCAACGCTACCAAGGTC
TGTGGGTCAGATGGAGTCACATACGGCAACGAGTGTCAGCTGAAGACCATCGCCTGCCGCCAGGGCCT
GCAAATCTCTATCCAGAGCCTGGGCCCGTGCCAGGAGGCTGTTGCTCCCAGCACTCACCCGACATCTG
CCTCCGTGACTGTGACCACCCCAGGGCTCCTCCTGAGCCAGGCACTGCCGGCCCCCCCCGGCGCCCTC
CCCCTGGCTCCCAGCAGTACCGCACACAGCCAGACCACCCCTCCGCCCTCATCGCGACCTCGGACCAC
TGCCAGCGTCCCCAGGACCACCGTGTGGCCCGTGCTGACGGTGCCCCCCACGGCACCCTCCCCTGCAC
CCAGCCTGGTGGCGTCCGCCTTTGGTGAATCTGGCAGCACTGATGGAAGCAGCGATGAGGAACTGAGC
GGGGACCAGGAGGCCAGTGGGGGTGGCTCTGGGGGGCTCGAGCCCTTGGAGGGCAGCAGCGTGGCCAC
CCCTGGGCCACCTGTCGAGAGGGCTTCCTGCTACAACTCCGCGTTGGGCTGCTGCTCTGATGGGAAGA
CGCCCTCGCTGGACGCAGAGGGCTCCAACTGCCCCGCCACCAAGGTGTTCCAGGGCGTCCTGGAGCTG
GAGGGCGTCGAGGGCCAGGAGCTGTTCTACACGCCCGAGATGGCTGACCCCAAGTCAGAACTGTTCGG
GGAGACAGCCAGGAGCATTGAGAGCACCCTGGACGACCTCTTCCGGAATTCAGACGTCAAGAAGGATT
TCCGGAGTGTCCGCTTGCGGGACCTGGGGCCCGGCAAATCCGTCCGCGCCATTGTGGATGTGCACTTT
GACCCCACCACAGCCTTCAGGGCACCCGACGTGGCCCGGGCCCTGCTCCGGCAGATCCAGGTGTCCAG
GCGCCGGTCCTTGGGGGTGAGGCGGCCGCTGCAGGAGCACGTGCGATTTATGGACTTTGACTGGTTTC
CTGCGTTTATCACGGGGGCCACGTCAGGAGCCATTGCTGCGGGAGCCACGGCCAGAGCCACCACTGCA
TCGCGCCTGCCGTCCTCTGCTGTGACCCCTCGGGCCCCGCACCCCAGTCACACAAGCCAGCCCGTTGC
CAAGACCACGGCAGCCCCCACCACACGTCGGCCCCCCACCACTGCCCCCAGCCGTGTGCCCGGACGTC
GGCCCCCGGCCTCCTGCGTCCCGAGGGAGGCTGCCTATGTGTGCCTGTGTCCCGGGGGATTCTCAGGA
CCGCACTGCGAGAAGGGGCTGGTGGAGAAGTCAGCGGGGGACGTGGATACCTTGGCCTTTGACGGGCG
GACCTTTGTCGAGTACCTCAACGCTGTGACCGAGAGCGAGAAGGCACTGCAGAGCAACCACTTTGAAC
TGAGCCTGCGCACTGAGGCCACGCAGGGGCTGGTGCTCTGGAGTGGCAAGGCCACGGAGCGGGCAGAC
TATGTGGCACTGGCCATTGTGGACGGGCACCTGCAACTGAGCTACAACCTGGGCTCCCAGCCCGTGGT
GCTGCGTTCCACCGTGCCCGTCAACACCAACCGCTGGTTGCGGGTCGTGGCACATAGGGAGCAGAGGG
AAGGTTCCCTGCAGGTGGGCAATGAGGCCCCTGTGACCGGCTCCTCCCCGCTGGGCGCCACGCAGCTG
GACACTGATGGAGCCCTGTGGCTTGGGGGCCTGCCGGAGCTGCCCGTGGGCCCAGCACTGCCCAAGGC
CTACGGCACAGGCTTTGTGGGCTGCTTGCGGGATGTGGTGGTGGGCCGGCACCCGCTGCACCTGCTGG
AGGACGCCGTCACCAAGCCAGAGCTGCGGCCCTGCCCCACCCCATGA
CCGCT

| | | | |
|---|---|---|---|
| NOV60g, CG94946-05 | SEQ ID NO: 1186 | 1544 aa | MW at 162003.7kD |
| Protein Sequence | | | |

MRHGRPVPPGPAAGRPLLPLLVVAACVLPGAGGTCPERAIERREEEAINVLTGTVEEILNVDPVQHTY
SCKVRVWRYLKGKDLVARESLLDGGNKVVISGFGDPLICDNQVSTGDTRIFFVNPAPPYLWPAHKNEL
MLNSSLMRITLRNLEEVEFCVEDKPGTHFTPVPPTPPDACRGMLCGFGAVCEPNAEGPGPASCVCKKS
PCPSVVAPVCGSDASTYSNECELQRAQCSQQRRIRLLSRGPCGSRDPCSNVTCSFGSTCARSADGLTA
SCLCPATCRGAPEGTVCGSDGADYPGECQLLRRACARQENVFKKFDGPCDPCQGALPDPSRSCRVNPR
TRRPEMLLRPESCPARQAPVCGDDGVTYENDCVMGRSGAARGLLLQKVRSGQCQGRDQCPEPCRFNAV
CLSRRGRPRCSCDRVTCDGAYRPVCAQDGRTYDSDCWRQQAECRQQRAIPSKHQGPCDQAPSPCLGVQ
CAFGATCAVKNGQAACECLQACSSLYDPVCGSDGVTYGSACELEATACTLGREIQVARKGPCCRCGQC
RFGALCEAETGRCVCPSECVALAQPVCGSDGHTYPSECMLHVHACTHQISLHVASAGPCETCGDAVCA
FGAVCSAGQCVCPRCEHPPPGPVCGSDGVTYGSACELREAACLQQTQIEEARAGPCEQAECGSGGSGS
GEDGDCEQELCRQRGGIWDEDSEDGPCVCDFSCQSVPGSPVCGSDGVTYSTECELKKARCESQRGLYV
AAQGACRGPAFAPLPPVAPLHCAQTPYGCCQDNITAARGVGLAGCPSACQCNPHGSYGGTCDPATGQC
SCRPGVGGLRCDRCEPGFWNFRGIVTDGRSGCTPCSCDPQGAVRDDCEQMTGLCSCKPGVAGPKCGQC
PDGRALGPAGCEADASAPATCAEMRCEFGARCVEESGSAHCVCPMLTCPEANATKVCGSDGVTYGNEC
QLKTIACRQGLQISIQSLGPCQEAVAPSTHPTSASVTVTTPGLLLSQALPAPPGALPLAPSSTAHSQT
TPPPSSRPRTTASVPRTTVWPVLTVPPTAPSPAPSLVASAFGESGSTDGSSDEELSGDQEASGGGSGG
LEPLEGSSVATPGPPVERASCYNSALGCCSDGKTPSLDAEGSNCPATKVFQGVLELEGVEGQELFYTP
EMADPKSELFGETARSIESTLDDLFRNSDVKKDFRSVRLRDLGPGKSVRAIVDVHFDPTTAFRAPDVA
RALLRQIQVSRRRSLGVRRPLQEHVRFMDFDWFPAFITGATSGAIAAGATARATTASRLPSSAVTPRA
PHPSHTSQPVAKTTAAPTTRRPPTTAPSRVPGPRPPASCVPREAAYVCLCPGGFSGPHCEKGLVEKSA
GDVDTLAFDGRTFVEYLNAVTESEKALQSNHFELSLRTEATQGLVLWSGKATERADYVALAIVDGHLQ
LSYNLGSQPVVLRSTVPVNTNRWLRVVAHREQREGSLQVGNEAPVTGSSPLGATQLDTDGALWLGGLP
ELPVGPALPKAYGTGFVGCLRDVVVGRHPLHLLEDAVTKPELRPCPTP

| | | |
|---|---|---|
| NOV60h, CG94946-06 | SEQ ID NO: 1187 | 6494 bp |
| DNA Sequence | ORF Start: ATG at 37 | ORF Stop: TGA at 6466 |

CCGGCGCGGCCCGCGCGCTCTTCCGCCGCCTCTCGCATGCGCCATGGCCGGCCGGTCCCACCCGGGCC
CGCTGCGGGGCGGCCGCTGCTGCCTCTCCTTGTGGTGGCCGCGTGCGTCCTGCCCGGAGCCGGCGGGA
CATGCCCGGAGCGCGCGCTGGAGCGGCGCGAGGAGGAGGCGAACGTGGTGCTCACCGGGACGGTGGAG
GAGATCCTCAACGTGGACCCGGTGCAGCACACGTACTCCTGCAAGGTTCGGGTCTGGCGGTACTTGAA
GGGCAAAGACCTGGTGGCCCGGGAGAGCCTGCTGGACGGCGGCAACAAGGTGGTGATCAGCGGCTTTG
GAGACCCCCTCATCTGTGACAACCAGGTGTCCACTGGGGACACCAGGATCTTCTTTGTGAACCCTGCA
CCCCCATACCTGTGGCCAGCCCACAAGAACGAGCTGATGCTCAACTCCAGCCTCATGCGGATCACCCT
GCGGAACCTGGAGGAGGTGGAGTTCTGTGTGGAAGATAAACCCGGGACCCACTTCACTCCAGTGCCTC
CGACGCCTCCTGATGCGTGCCGGGGAATGCTGTGCGGCTTCGGCGCCGTGTGCGAGCCCAACGCGGAG
GGGCCGGGCCGGGCGTCCTGCGTCTGCAAGAAGAGCCCGTGCCCCAGCGTGGTGGCGCCTGTGTGTGG
GTCGGACGCCTCCACCTACAGCAACGAATGCGAGCTGCAGCGGGCGCAGTGCAGCCAGCAGCGCCGCA
TCCGCCTGCTCAGCCGCGGGCCGTGCGGCTCGCGGGACCCCTGCTCCAACGTGACCTGCAGCTTCGGC
AGCACCTGTGCGCGCTCGGCCGACGGGCTGACGGCCTCGTGCCTGTGCCCCGCGACCTGCCGTGGCGC
CCCCGAGGGGACCGTCTGCGGCAGCGACGGCGCCGACTACCCCGGCGAGTGCCAGCTCCTGCGCCGCG
CCTGCGCCCGCCAGGAGAATGTCTTCAAGAAGTTCGACGGCCCTTGTGACCCCTGTCAGGGCGCCCTC
CCTGACCCGAGCCGCAGCTGCCGTGTGAACCCGCGCACGCGGCGCCCTGAGATGCTCCTACGGCCCGA
GAGCTGCCCTGCCCGGCAGGCGCCAGTGTGTGGGGACGACGGAGTCACCTACGAAAACGACTGTGTCA
TGGGCCGATCGGGGGCCGCCCGGGGTCTCCTCCTGCAGAAAGTGCGCTCCGGCCAGTGCCAGGGTCGA
GACCAGTGCCCGGAGCCCTGCCGGTTCAATGCCGTGTGCCTGTCCCGCCGTGGCCGTCCCCGCTGCTC
CTGCGACCGCGTCACCTGTGACGGGGCCTACAGGCCCGTGTGTGCCCAGGACGGGCGCACGTATGACA
GTGATTGCTGGCGGCAGCAGGCTGAGTGCCGGCAGCAGCGTGCCATCCCCAGCAAGCACCAGGGCCCG
TGTGACCAGGCCCCGTCCCCATGCCTCGGGGTGCAGTGTGCATTTGGGGCGACGTGTGCTGTGAAGAA
CGGGCAGGCAGCGTGTGAATGCCTGCAGGCGTGCTCGAGCCTCTACGATCCTGTGTGCGGCAGCGACG
GCGTCACATACGGCAGCGCGTGCGAGCTGGAGGCCACGGCCTGTACCCTCGGGCGGGAGATCCAGGTG
GCGCGCAAAGGACCCTGTGACCGCTGCGGGCAGTGCCGCTTTGGAGCCCTGTGCGAGGCCGAGACCGG
GCGCTGCGTGTGCCCCTCTGAATGCGTGGCTTTGGCCCAGCCCGTGTGTGGCTCCGACGGGCACACGT
ACCCCAGCGAGTGCATGCTGCACGTGCACGCCTGCACACACCAGATCAGCCTGCACGTGGCCTCAGCT
GGACCCTGTGAGACCTGTGGAGATGCCGTGTGTGCTTTTGGGGCTGTGTGCTCCGCAGGGCAGTGTGT
GTGTCCCCGGTGTGAGCACCCCCCGCCCGGCCCCGTGTGTGGCAGCGACGGTGTCACCTACGGCAGTG
CCTGCGAGCTACGGGAAGCCGCCTGCCTCCAGCAGACACAGATCGAGGAGGCCCGGGCAGGGCCGTGC
GAGCAGGCCGAGTGCGGTTCCGGAGGCTCTGGCTCTGGGGAGGACGGTGACTGTGAGCAGGAGCTGTG
CCGGCAGCGCGGTGGCATCTGGGACGAGGACTCGGAGGACGGGCCGTGTGTCTGTGACTTCAGCTGCC
AGAGTGTCCCAGGCAGCCCGGTGTGCGGCTCAGATGGGGTCACCTACAGCACCGAGTGTGAGCTGAAG
AAGGCCAGGTGTGAGTCACAGCGAGGGCTCTACGTAGCGGCCCAGGGAGCCTGCCGAGGCCCCGCCTT
CGCCCCGCTGCCGCCTGTGGCCCCCTTACACTGTGCCCAGACGCCCTACGGCTGCTGCCAGGACAATA
TCACCGCAGCCCGGGGCGTGGGCCTGGCTGGCTGCCCCAGTGCCTGCCAGTGCAACCCCCATGGCTCT
TACGGCGGCACCTGTGACCCAGCCACAGGCCAGTGCTCCTGCCGCCCAGGTGTGGGGGGCCTCAGGTG
TGACCGCTGTGAGCCTGGCTTCTGGAACTTTCGAGGCATCGTCACCGATGGCCGGAGTGGCTGTACAC
CCTGCAGCTGTGATCCCCAAGGCGCCGTGCGGGATGACTGTGAGCAGATGACGGGGCTGTGCTCGTGT
AAGCCCGGGGTGGCTGGACCCAAGTGTGGGCAGTGTCCAGACGGCCGTGCCCTGGGCCCCGCGGGCTG
TGAAGCTGACGCTTCTGCGCCTGCGACCTGTGCGGAGATGCGCTGTGAGTTCGGTGCGCGGTGCGTGG
AGGAGTCTGGCTCAGCCCACTGTGTCTGCCCGATGCTCACCTGTCCAGAGGCCAACGCTACCAAGGTC
TGTGGGTCAGATGGAGTCACATACGGCAACGAGTGTCAGCTGAAGACCATCGCCTGCCGCCAGGGCCT
GCAAATCTCTATCCAGAGCCTGGGCCCGTGCCAGGAGGCTGTTGCTCCCAGCACTCACCCGACATCTG
CCTCCGTGACTGTGACCACCCCAGGGCTCCTCCTGAGCCAGGCACTGCCGGCCCCCCCCGGCGCCCTC
CCCCTGGCTCCCAGCAGTACCGCACACAGCCAGACCACCCCTCCGCCCTCATCGCGACCTCGGACCAC
TGCCAGCGTCCCCAGGACCACCGTGTGGCCCGTGCTGACGGTGCCCCCCACGGCACCCTCCCCTGCAC
CCAGCCTGGTGGCGTCCGCCTTTGGTGAATCTGGCAGCACTGATGGAAGCAGCGATGAGGAACTGAGC
GGGGACCAGGAGGCCAGTGGGGGTGGCTCTGGGGGGCTCGAGCCCTTGGAGGGCAGCAGCGTGGCCAC
CCCTGGGCCACCTGTCGAGAGGGCTTCCTGCTACAACTCCGCGTTGGGCTGCTGCTCTGATGGGAAGA
CGCCCTCGCTGGACGCAGAGGGCTCCAACTGCCCCGCCACCAAGGTGTTCCAGGGCGTCCTGGAGCTG
GAGGGCGTCGAGGGCCAGGAGCTGTTCTACACGCCCGAGATGGCTGACCCCAAGTCAGAACTGTTCGG
GGAGACAGCCAGGAGCATTGAGAGCACCCTGGACGACCTCTTCCGGAATTCAGACGTCAAGAAGGATT
TCCGGAGTGTCCGCTTGCGGGACCTGGGGCCCGGCAAATCCGTCCGCGCCATTGTGGATGTGCACTTT
GACCCCACCACAGCCTTCAGGGCACCCGACGTGGCCCGGGCCCTGCTCCGGCAGATCCAGGTGTCCAG
GCGCCGGTCCTTGGGGGTGAGGCGGCCGCTGCAGGAGCACGTGCGATTTATGGACTTTGACTGGTTTC
CTGCGTTTATCACGGGGGCCACGTCAGGAGCCATTGCTGCGGGAGCCACGGCCAGAGCCACCACTGCA
TCGCGCCTGCCGTCCTCTGCTGTGACCCCTCGGGCCCCGCACCCCAGTCACACAAGCCAGCCCGTTGC
CAAGACCACGGCAGCCCCCACCACACGTCGGCCCCCCACCACTGCCCCCAGCCGTGTGCCCGGACGTC
GGCCCCCGGCCCCCCAGCAGCCTCCAAAGCCCTGTGACTCACAGCCCTGCTTCCACGGGGGGACCTGC
CAGGACTGGGCATTGGGCGGGGGCTTCACCTGCAGCTGCCCGGCAGGCAGGGGAGGCGCCGTCTGTGA
GAAGGTGCTTGGCGCCCCTGTGCCGGCCTTCGAGGGCCGCTCCTTCCTGGCCTTCCCCACCCTCCGCG
CCTACCACACGCTGCGCCTGGCACTGGAATTCCGGGCGCTGGAGCCTCAGGGGCTGCTGCTGTACAAT
GGCAACGCCCGGGGCAAGGACTTCCTGGCATTGGCGCTGCTAGATGGCCGCGTGCAGCTCAGGTTTGA
CACAGGTTCGGGGCCGGCGGTGCTGACCAGTGCCGTGCCGGTAGAGCCGGGCCAGTGGCACCGCCTGG
AGCTGTCCCGGCACTGGCGCCGGGGCACCCTCTCGGTGGATGGTGAGACCCCTGTTCTGGGCGAGAGT
CCCAGTGGCACCGACGGCCTCAACCTGGACACAGACCTCTTTGTGGGCGGCGTACCCGAGGACCAGGC
TGCCGTGGCGCTGGAGCGGACCTTCGTGGGCGCCGGCCTGAGGGGGTGCATCCGTTTGCTGGACGTCA
ACAACCAGCGCCTGGAGCTTGGCATTGGGCCGGGGGCTGCCACCCGAGGCTCTGGCGTGGGCGAGTGC
GGGGACCACCCCTGCCTGCCCAACCCCTGCCATGGCGGGGCCCCATGCCAGAACCTGGAGGCTGGAAG
GTTCCATTGCCAGTGCCCGCCCGGCCGCGTCGGACCAACCTGTGCCGATGAGAAGAGCCCCTGCCAGC
CCAACCCCTGCCATGGGGCGGCGCCCTGCCGTGTGCTGCCCGAGGGTGGTGCTCAGTGCGAGTGCCCC
CTGGGGCGTGAGGGCACCTTCTGCCAGACAGCCTCGGGGCAGGACGGCTCTGGGCCCTTCCTGGCTGA
CTTCAACGGCTTCTCCCACCTGGAGCTGAGAGGCCTGCACACCATTGCACGGGACCTGGGGGAGAAGA
TGGCGCTGGAGGCCGTGTTCCTGGCACGAGGCCCCAGCGGCCTCCTGCTCTACAACGGGCAGAAGACG
GACGGCAAGGGGGACTTCGTGTCGCTGGCACTGCGGGACCGCCGCCTGGAGTTCCGCTACGACCTGGG
CAAGGGGGCAGCGGTCATCAGGAGCAGGGAGCCAGTCACCCTGGGAGCCTGGACCAGGGTCTCACTGG
AGCGAAACGGCCGCAAGGGTGCCCTGCGTGTGGGCGACGGCCCCCGTGTGTTGGGGGAGTCCCCGAAA
TCCCGCAAGGTTCCGCACACCGTCCTCAACCTGAAGGAGCCGCTCTACGTAGGGGGCGCTCCCGACTT
CAGCAAGCTGGCCCGTGCTGCTGCCGTGTCCTCTGGCTTCGACGGTGCCATCCAGCTGGTCTCCCTCG
GAGGCCGCCAGCTGCTGACCCCGGAGCACGTGCTGCGGCAGGTGGACGTCACGTCCTTTGCAGGTCAC
CCCTGCACCCGGGCCTCAGGCCACCCCTGCCTCAATGGGGCCTCCTGCGTCCCGAGGGAGGCTGCCTA
TGTGTGCCTGTGTCCCGGGGGATTCTCAGGACCGCACTGCGAGAAGGGGCTGGTGGAGAAGTCAGCGG
GGGACGTGGATACCTTGGCCTTTGACGGGCGGACCTTTGTCGAGTACCTCAACGCTGTGACCGAGAGC
GAGAAGGCACTGCAGAGCAACCACTTTGAACTGAGCCTGCGCACTGAGGCCACGCAGGGGCTGGTGCT
CTGGAGTGGCAAGGCCACGGAGCGGGCAGACTATGTGGCACTGGCCATTGTGGACGGGCACCTGCAAC
TGAGCTACAACCTGGGCTCCCAGCCCGTGGTGCTGCGTTCCACCGTGCCCGTCAACACCAACCGCTGG
TTGCGGGTCGTGGCACATAGGGAGCAGAGGGAAGGTTCCCTGCAGGTGGGCAATGAGGCCCCTGTGAC
CGGCTCCTCCCCGCTGGGCGCCACGCAGCTGGACACTGATGGAGCCCTGTGGCTTGGTGAGTGTTTTG
GGGAGACTAGAGAGGGATGCCCAAGGGTCTCAGATATCCGAGGGACAGACTCCACCCCCCAGCGCCCA
CCCTTGAGTCAGGGTGCATGTGAGCCGGCGGGCTGGGCTCTCTTCTCCCGCTGTAGCCCCTGCAGTTC
CCAGTGCTGTGGGGCCGGGAGGCGGGTGCCCAGGTGTGGGCCCCCTGCTGGTCACCTGCTCGTTGGGG
TGCCCATCAGCATCACTGAGTCACAGCCGGGTGACTCCCACTGTCTGTGCTGCAGGGGCCTGCCGGAG
CTGCCCGTGGGCCCAGCACTGCCCAAGGCCTACGGCACAGGCTTTGTGGGCTGCTTGCGGGATGTGGT
GGTGGGCCGGCACCCGCTGCACCTGCTGGAGGACGCCGTCACCAAGCCAGAGCTGCGGCCCTGCCCCA
CCCCATGAGCTGGCACCAGAGCCCCGCGCCCGCT

| | | | |
|---|---|---|---|
| NOV60h, CG94946-06 | SEQ ID NO: 1188 | 2143 aa | MW at 225054.6kD |
| Protein Sequence | | | |

MRHGRPVPPGPAAGRPLLPLLVVAACVLPGAGGTCPERALERREEEANVVLTGTVEEILNVDPVQHTY
SCKVRVWRYLKGKDLVARESLLDGGNKVVISGFGDPLICDNQVSTGDTRIFFVNPAPPYLWPAHKNEL
MLNSSLMRITLRNLEEVEFCVEDKPGTHFTPVPPTPPDACRGMLCGFGAVCEPNAEGPGRASCVCKKS
PCPSVVAPVCGSDASTYSNECELQRAQCSQQRRIRLLSRGPCGSRDPCSNVTCSFGSTCARSADGLTA
SCLCPATCRGAPEGTVCGSDGADYPGECQLLRPACARQENVFKKFDGPCDPCQGALPDPSRSCRVNPR
TRRPEMLLRPESCPARQAPVCGDDGVTYENDCVMGRSGAARGLLLQKVRSGQCQGRDQCPEPCRFNAV
CLSRRGRPRCSCDRVTCDGAYRPVCAQDGRTYDSDCWRQQAECRQQRAIPSKHQGPCDQAPSPCLGVQ
CAFGATCAVKNGQAACECLQACSSLYDPVCGSDGVTYGSACELEATACTLGREIQVARKGPCDRCGQC
RFGALCEAETGRCVCPSECVALAQPVCGSDGHTYPSECMLHVHACTHQISLHVASAGPCETCGDAVCA
FGAVCSAGQCVCPRCEHPPPGPVCGSDGVTYGSACELREAACLQQTQIEEARAGPCEQAECGSGGSGS
GEDGDCEQELCRQRGGIWDEDSEDGPCVCDFSCQSVPGSPVCGSDGVTYSTECELKKARCESQRGLYV
AAQGACRGPAFAPLPPVAPLHCAQTPYGCCQDNITAARGVGLAGCPSACQCNPHGSYGGTCDPATGQC
SCRPGVGGLRCDRCEPGFWNFRGIVTDGRSGCTPCSCDPQGAVRDDCEQMTGLCSCKPGVAGPKCGQC
PDGRALGPAGCEADASAPATCAEMRCEFGARCVEESGSAHCVCPMLTCPEANATKVCGSDGVTYGNEC
QLKTIACRQGLQISIQSLGPCQEAVAPSTHPTSASVTVTTPGLLLSQALPAPPGALPLAPSSTAHSQT
TPPPSSRPRTTASVPRTTVWPVLTVPPTAPSPAPSLVASAFGESGSTDGSSDEELSGDQEASGGGSGG
LEPLEGSSVATPGPPVERASCYNSALGCCSDGKTPSLDAEGSNCPATKVFQGVLELEGVEGQELFYTP
EMADPKSELFGETARSIESTLDDLFRNSDVKKDFRSVRLRDLGPGKSVRAIVDVHFDPTTAFRAPDVA
RALLRQIQVSRRRSLGVRRPLQENVRFMDFDWFPAFITGATSGAIAAGATARATTASRLPSSAVTPRA
PHPSHTSQPVAKTTAAPTTRRPPTTAPSRVPGRRPPAPQQPPKPCDSQPCFHGGTCQDWALGGGFTCS
CPAGRGGAVCEKVLGAPVPAFEGRSFLAFPTLRAYHTLRLALEFRALEPQGLLLYNGNARGKDFLALA
LLDGRVQLRFDTGSGPAVLTSAVPVEPGQWHRLELSRHWRRGTLSVDGETPVLGESPSGTDGLNLDTD
LFVGGVPEDQAAVALERTFVGAGLRGCIRLLDVNNQRLELGIGPGAATRGSGVGECGDHPCLPNPCHG
GAPCQNLEAGRFHCQCPPGRVGPTCADEKSPCQPNPCHGAAPCRVLPEGGAQCECPLGREGTFCQTAS
GQDGSGPFLADFNGFSHLELRGLHTIARDLGEKMALEAVFLARGPSGLLLYNGQKTDGKGDFVSLALR
DRRIEFRYDLGKGAAVIRSREPVTLGAWTRVSLERNGRKGALRVGDGPRVLGESPKSRKVPHTVLNLK
EPLYVGGAPDFSKLARAAAVSSGFDGAIQLVSLGGRQLLTPEHVLRQVDVTSFAGHPCTRASGHPCLN
GASCVPREAAYVCLCPGGFSGPHCEKGLVEKSAGDVDTLAFDGRTFVEYLNAVTESEKALQSNHFELS
LRTEATQGLVLWSGKATERADYVALAIVDGHLQLSYNLGSQPVVLRSTVPVNTNRWLRVVAHREQREG
SLQVGNEAPVTGSSPLGATQLDTDGALWLGECFGETREGCPRVSDIRGTDSTPQRPPLSQGACEPAGW
ALFSRCSPCSSQCCGAGRRVPRCGPPAGHLLVGVPISITESQPGDSHCLCCRGLPELPVGPALPKAYG
TGFVGCLRDVVVGRHPLHLLEDAVTKPELRPCPTP

| | | |
|---|---|---|
| NOV60i, CG94946-07 | SEQ ID NO: 1189 | 5688 bp |
| DNA Sequence | ORF Start: ATG at 37 | ORF Stop: TGA at 4735 |

CCGGCGCGGCCCGCGCGCTCTTCCGCCGCCTCTCGCATGCGCCATGGCCGGCCGGTCCCACCCGGGCC
CGCTGCGGGGCGGCCGCTGCTGCCTCTCCTTGTGGTGGCCGCGTGCGTCCTGCCCGGAGCCGGCGGGA
CATGCCCGGAGCGCGCGCTGGAGCGGCGCGAGGAGGAGGCGAACGTGGTGCTCACCGGGACGGTGGAG
GAGATCCTCAACGTGGACCCGGTGCAGCACACGTACTCCTGCAAGGTTCGGGTCTGGCGGTACTTGAA
GGGCAAAGACCTGGTGGCCCGGGAGAGCCTGCTGGACGGCGGCAACAAGGTGGTGATCAGCGGCTTTG
GAGACCCCCTCATCTGTGACAACCAGGTGTCCACTGGGGACACCAGGATCTTCTTTGTGAACCCTGCA
CCCCCATACCTGTGGCCAGCCCACAAGAACGAGCTGATGCTCAACTCCAGCCTCATGCGGATCACCCT
GCGGAACCTGGAGGAGGTGGAGTTCTGTGTGGAAGATAAACCCGGGACCCACTTCACTCCAGTGCCTC
CGACGCCTCCTGATGCGTGCCGGGGAATGCTGTGCGGCTTCGGCGCCGTGTGCGAGCCCAACGCGGAG
GGGCCGGGCCGGGCGTCCTGCGTCTGCAAGAAGAGCCCGTGCCCCAGCGTGGTGGCGCCTGTGTGTGG
GTCGGACGCCTCCACCTACAGCAACGAATGCGAGCTGCAGCGGGCGCAGTGCAGCCAGCAGCGCCGCA
TCCGCCTGCTCAGCCGCGGGCCGTGCGGCTCGCGGGACCCCTGCTCCAACGTGACCTGCAGCTTCGGC
AGCACCTGTGCGCGCTCGGCCGACGGGCTGACGGCCTCGTGCCTGTGCCCCGCGACCTGCCGTGGCGC
CCCCGAGGGGACCGTCTGCGGCAGCGACGGCGCCGACTACCCCGGCGAGTGCCAGCTCCTGCGCCGCG
CCTGCGCCCGCCAGGAGAATGTCTTCAAGAAGTTCGACGGCCCTTGTGACCCCTGTCAGGGCGCCCTC
CCTGACCCGAGCCGCAGCTGCCGTGTGAACCCGCGCACGCGGCGCCCTGAGATGCGCCTACGGCCCGA
GAGCTGCCCTGCCCGGCAGGCGCCAGTGTGTGGGGACGACGGAGTCACCTACGAAAACGACTGTGTCA
TGGGCCGATCGGGGGCCGCCCGGGGTCTCCTCCTGCAGAAAGTGCGCTCCGGCCAGTGCCAGGGTCGA
GACCAGTGCCCGGAGCCCTGCCGGTTCAATGCCGTGTGCCTGTCCCGCCGTGGCCGTCCCCGCTGCTC
CTGCGACCGCGTCACCTGTGACGGGGCCTACAGGCCCGTGTGTGCCCAGGACGGGCGCACGTATGACA
GTGATTGCTGGCGGCAGCAGGCTGAGTGCCGGCAGCAGCGTGCCATCCCCAGCAAGCACCAGGGCCCG
TGTGACCAGGCCCCGTCCCCATGCCTCGGGGTGCAGTGTGCATTTGGGGCGACGTGTGCTGTGAAGAA
CGGGCAGGCAGCGTGTGAATGCCTGCAGGCGTGCTCGAGCCTCTACGATCCTGTGTGCGGCAGCGACG
GCGTCACATACGGCAGCGCGTGCGAGCTGGAGGCCACGGCCTGTACCCTCGGGCGGGAGATCCAGGTG
GCGCGCAAAGGACCCTGTGACCGCTGCGGGCAGTGCCGCTTTGGAGCCCTGTGCGAGGCCGAGACCGG
GCGCTGCGTGTGCCCCTCTGAATGCGTGGCTTTGGCCCAGCCCGTGTGTGGCTCCGACGGGCACACGT
ACCCCAGCGAGTGCATGCTGCACGTGCACGCCTGCACACACCAGATCAGCCTGCACGTGGCCTCAGCT
GGACCCTGCGAGACCTGTGGAGATGCCGTGTGTGCTTTTGGGGCTGTGTGCTCCGCAGGGCAGTGTGT
GTGTCCCCGGTGTGAGCACCCCCCGCCCGGCCCCGTGTGTGGCAGCGACGGTGTCACCTACGGCAGTG
CCTGCGAGCTACGGGAAGCCGCCTGCCTCCAGCAGACACAGATCGAGGAGGCCCGGGCAGGGCCGTGC
GAGCAGGCCGAGTGCGGTTCCGGAGGCTCTGGCTCTGGGGAGGACGGTGACTGTGAGCAGGAGCTGTG
CCGGCAGCGCGGTGGCATCTGGGACGAGGACTCGGAGGACGGGCCGTGTGTCTGTGACTTCAGCTGCC
AGAGTGTCCCAGGCAGCCCGGTGTGCGGCTCAGATGGGGTCACCTACAGCACCGAGTGTGAGCTGAAG
AAGGCCAGGTGTGAGTCACAGCGAGGGCTCTACGTAGCGGCCCAGGGAGCCTGCCGAGGCCCCACCTT
CGCCCCGCTGCCGCCTGTGGCCCCCTTACACTGTGCCCAGACGCCCTACGGCTGCTGCCAGGACAATA
TCACCGCAGCCCGGGGCGTGGGCCTGGCTGGCTGCCCCAGTGCCTGCCAGTGCAACCCCCATGGCTCT
TACGGCGGCACCTGTGACCCAGCCACAGGCCAGTGCTCCTGCCGCCCAGGTGTGGGGGGCCTCAGGTG
TGACCGCTGTGAGCCTGGCTTCTGGAACTTTCGAGGCATCGTCACCGATGGCCGGAGTGGCTGTACAC
CCTGCAGCTGTGATCCCCAAGGCGCCGTGCGGGATGACTGTGAGCAGATGACGGGGCTGTGCTCGTGT
AAGCCCGGGGTGGCTGGACCCAAGTGTGGGCAGTGTCCAGACGGCCGTGCCCTGGGCCCCGCGGGCTG
TGAAGCTGACGCTTCTGCGCCTGCGACCTGTGCGGAGATGCGCTGTGAGTTCGGTGCGCGGTGCGTGG
AGGAGTCTGGCTCAGCCCACTGTGTCTGCCCGATGCTCACCTGTCCAGAGGCCAACGCTACCAAGGTC
TGTGGGTCAGATGGAGTCACATACGGCAACGAGTGTCAGCTGAAGACCATCGCCTGCCGACGGTGTCA
CCTACGCCAGGGCCTGCAAATCTCTATCCAGAGCCTGGGCCCGTGCCAGGAGGCTGTTGCTCCCAGCA
CTCACCCGACATCTGCCTCCGTGACTGTGACCACCCCAGGGCTCCTCCTGAGCCAGGCACTGCCGGCC
CCCCCCGGCGCCCTCCCCCTGGCTCCCAGCAGTACCGCACACAGCCAGACCACCCCTCCGCCCTCATC
GCGACCTCGGACCACTGCCAGCGTCCCCAGGACCACCGTGTGGCCCGTGCTGACGGTGCCCCCCACGG
CACCCTCCCCTGCACCCAGCCTGGTGGCGTCCGCCTTTGGTGAATCTGGCAGCACTGATGGAAGCAGC
GATGAGGAACTGAGCGGGGACCAGGAGGCCAGTGGGGGTGGCTCTGGGGGGCCCGAGCCCTTGGAGGG
CAGCAGCGTGGCCACCCCTGGGCCACCTGTCGAGAGGGCTTCCTGCTACAACCCCTGCCATGGGGCGG
CGCCCTGCCGTGTGCTGCCCGAGGGTGGTGCTCAGTGCGAGTGCCCCCTGGGGCGTGAGGGCACCTTC
TGCCAGACAGCCTCGGGGCAGGACGGCTCTGGGCCCTTCCTGGCTGACTTCAACGGCTTCTCCCACCT
GGAGCTGAGAGGCCTGCACACCTTTGCACGGGACCTGGGGGAGAAGATGGCGCTGGAGGTCGTGTTCC
TGGCACGAGGCCCCAGCGGCCTCCTGCTCTACAACGGGCAGAAGACGGACGGCAAGGGGGACTTCGTG
TCGCTGGCACTGCGGGACCGCCGCCTGGAGTTCCGCTACGACCTGGGCAAGGGGGCAGCGGTCATCAG
GAGCAGGGAGCCAGTCACCCTGGGAGCCTGGACCAGGGTCTCACTGGAGCGAAACGGCCGCAAGGGTG
CCCTGCGTGTGGGCGACGGCCCCCGTGTGTTGGGGGAGTCCCCGGTTCCGCACACCGTCCTCAACCTG
AAGGAGCCGCTCTACGTAGGGGGCGCTCCCGACTTCAGCAAGCTGGCCCGTGCTGCTGCCGTGTCCTC
TGGCTTCGACGGTGCCATCCAGCTGGTCTCCCTCGGAGGCCGCCAGCTGCTGACCCCGGAGCACGTGC
TGCGGCAGGTGGACGTCACGTCCTTTGCAGGTCACCCCTGCACCCGGGCCTCAGGCCACCCCTGCCTC
AATGGGGCCTCCTGCGTCCCGAGGGAGGCTGCCTATGTGTGCCTGTGTCCCGGGGGATTCTCAGGACC
GCACTGCGAGAAGGGGCTGGTGGAGAAGTCAGCGGGGGACGTGGATACCTTGGCCTTTGACGGGCGGA
CCTTTGTCGAGTACCTCAACGCTGTGACCGAGAGCGAGAAGGCACTGCAGAGCAACCACTTTGAACTG
AGCCTGCGCACTGAGGCCACGCAGGGGCTGGTGCTCTGGAGTGGCAAGGCCACGGAGCGGGCAGACTA
TGTGGCACTGGCCATTGTGGACGGGCACCTGCAACTGAGCTACAACCTGGGCTCCCAGCCCGTGGTGC
TGCGTTCCACCGTGCCCGTCAACACCAACCGCTGGTTGCGGGTCGTGGCACATAGGGAGCAGAGGGAA
GGTTCCCTGCAGGTGGGCAATGAGGCCCCTGTGACCGGCTCCTCCCCGCTGGGCGCCACGCAGCTGGA
CACTGATGGAGCCCTGTGGCTTGGGGGCCTGCCGGAGCTGCCCGTGGGCCCAGCACTGCCCAAGGCCT
ACGGCACAGGCTTTGTGGGCTGCTTGCGGGATGTGGTGGTGGGCCGGCACCCGCTGCACCTGCTGGAG
GACGCCGTCACCAAGCCAGAGCTGCGGCCCTGCCCCACCCCATGAGCTGGCACCAGAGCCCCGCGCCC
GCTGTAATTATTTTCTATTTTTGTAAACTTGTTGCTTTTTGATATGATTTTCTTGCCTGAGTGTTGGC
CGGAGGGACTGCTGGCCCGGCCTCCCTTCCGTCCAGGCAGCCGTGCTGCAGACAGACCTAGTGCTGAG
GGATGGACAGGCGAGGTGGCAGCGTGGAGGGCTCGGCGTGGATGGCAGCCTCAGGACACACACCCCTG
CCTCAAGGTGCTGAGCCCCCGCCTTGCACTGCGCCTGCCCCACGGTGTCCCCGCCGGGAAGCAGCCCC
GGCTCCTGAATCACCCTCGCTCCGTCAGGCGGGACTCGTGTCCCAAAAAGGAAGGGGCTGCTGAGGTC
TGATGGGGCCCTTCCTCCGGGTGACCCCACAGGGCCTTTCCAAGCCCCTATTTGAGCTGCTCCTTCCT
GTGTGTGCTCTGGACCCTGCCTCGGCCTCCTGCGCCAATACTGTGACTTCCAAACAATGTTACTGCTG
GGCACAGCTCTGCGTTGCTCCCGTGCTGCCTGCGCCAGCCCCAGGCTGCTGAGGAGCAGAGGCCAGAC
CAGGGCCGATCTGGGTGTCCTGACCCTCAGCTGGCCCTGCCCAGCCACCCTGGACATGACCGTATCCC
TCTGCCACACCCCAGGCCCTGCGAGGGGCTATCGAGAGGAGCTCACTGTGGGATGGGGTTGACCTCTG
CCGCCTGCCTGGGTATCTGGGCCTGGCCATGGCTGTGTTCTTCATGTGTTGATTTTATTTGACCCCTG
GAGTGGTGGGTCTCATCTTTCCCATCTCGCCTGAGAGCGGCTGAGGGCTGCCTCACTGCAAATCCTCC
CCACAGCGTCAGTGAAAGTCGTCCTTGTCTCAGAATGACCAGGGGCCAGCCAGTGTCTGACCAAGGTC
AAGGGGCAGGTGCAGAGGTGGCAGGGATGGCTCCGAAGCCAGAA

| | | | |
|---|---|---|---|
| NOV60i, CG94946-07 | SEQ ID NO: 1190 | 1566 aa | MW at 164102.4kD |
| Protein Sequence | | | |

MRHGRPVPPGPAAGRPLLPLLVVAACVLPGAGGTCPERALERREEEANVVLTGTVEEILNVDPVQHTY
SCKVRVWRYLKGKDLVARESLLDGGNKVVISGFGDPLICDNQVSTGDTRIFFVNPAPPYLWPAHKNEL
MLNSSLMRITLRNLEEVEFCVEDKPGTHFTPVPPTPPDACRGMLCGFGAVCEPNAEGPGRASCVCKKS
PCPSVVAPVCGSDASTYSNECELQRAQCSQQRRIRLLSRGPCGSRDPCSNVTCSFGSTCARSADGLTA
SCLCPATCRGAPEGTVCGSDGADYPGECQLLRRACARQENVFKKFDGPCDPCQGALPDPSRSCRVNPR
TRRPEMRLRPESCPARQAPVCGDDGVTYENDCVMGRSGAARGLLLQKVRSGQCQGRDQCPEPCRFNAV
CLSRRGRPRCSCDRVTCDGAYRPVCAQDGRTYDSDCWRQQAECRQQRAIPSKHQGPCDQAPSPCLGVQ
CAFGATCAVKNGQAACECLQACSSLYDPVCGSDGVTYGSACELEATACTLGREIQVARKGPCDRCGQC
RFGALCEAETGRCVCPSECVALAQPVCGSDGHTYPSECMLHVHACTHQISLHVASAGPCETCGDAVCA
FGAVCSAGQCVCPRCEHPPPGPVCGSDGVTYGSACELREAACLQQTQIEEARAGPCEQAECGSGGSGS
GEDGDCEQELCRQRGGIWDEDSEDGPCVCDFSCQSVPGSPVCGSDGVTYSTECELKKARCESQRGLYV
AAQGACRGPTFAPLPPVAPLHCAQTPYGCCQDNITAARGVGLAGCPSACQCNPHGSYGGTCDPATGQC
SCRPGVGGLRCDRCEPGFWNFRGIVTDGRSGCTPCSCDPQGAVRDDCEQMTGLCSCKPGVAGPKCGQC
PDGRALGPAGCEADASAPATCAEMRCEFGARCVEESGSAHCVCPMLTCPEANATKVCGSDGVTYGNEC
QLKTIACRRCHLRQGLQISIQSLGPCQEAVAPSTHPTSASVTVTTPGLLLSQALPAPPGALPLAPSST
AHSQTTPPPSSRPRTTASVPRTTVWPVLTVPPTAPSPAPSLVASAFGESGSTDGSSDEELSGDQEASG
GGSGGPEPLEGSSVATPGPPVERASCYNPCHGAAPCRVLPEGGAQCECPLGREGTFCQTASGQDGSGP
FLADFNGFSHLELRGLHTFARDLGEKMALEVVFLARGPSGLLLYNGQKTDGKGDFVSLALRDRRLEFR
YDLGKGAAVIRSREPVTLGAWTRVSLERNGRKGALRVGDGPRVLGESPVPHTVLNLKEPLYVGGAPDF
SKLARAAAVSSGFDGAIQLVSLGGRQLLTPEHVLRQVDVTSFAGHPCTRASGHPCLNGASCVPREAAY
VCLCPGGFSGPHCEKGLVEKSAGDVDTLAFDGRTFVEYLNAVTESEKALQSNHFELSLRTEATQGLVL
WSGKATERADYVALAIVDGHLQLSYNLGSQPVVLRSTVPVNTNRWLRVVAHREQREGSLQVGNEAPVT
GSSPLGATQLDTDGALWLGGLPELPVGPALPKAYGTGFVGCLRDVVVGRHPLHLLEDAVTKPELRPCP
TP

[0700] A ClustalW comparison of the above protein sequences yields the following sequence alignment shown in Table 60B.

TABLE 60B
Comparison of the NOV60 protein sequences.

NOV60a ------------------------------------------------------------
NOV60b ------------------------------------------------------------
NOV60c ------------------------------------------------------------
NOV60d ------------------------------------------------------------
NOV60e ------------------------------------------------------------
NOV60f ------------------------------------------------------------
NOV60g MRHGRPVPPGPAAGRPLLPLLVVAACVLPGAGGTCPERALERREEEAINVLTGTVEEILN
NOV60h ------------------------------------------------------------
NOV60i ------------------------------------------------------------
NOV60a ------------------------------------------------------------
NOV60b ------------------------------------------------------------
NOV60c ------------------------------------------------------------
NOV60d ------------------------------------------------------------
NOV60e ------------------------------------------------------------
NOV60f ------------------------------------------------------------
NOV60g VDPVQHTYSCKVRVWRYLKGKDLVARESLLDGGNKVVISGFGDPLICDNQVSTGDTRIFF
NOV60h ------------------------------------------------------------
NOV60i ------------------------------------------------------------
NOV60a ------------------------------------------------------------
NOV60b ------------------------------------------------------------
NOV60c ------------------------------------------------------------
NOV60d ------------------------------------------------------------
NOV60e ------------------------------------------------------------
NOV60f ------------------------------------------------------------
NOV60g VNPAPPYLWPAHKNELMLNSSLNRITLRNLEEVEFCVEDKPGTHFTPVPPTPPDACRGML
NOV60h ------------------------------------------------------------
NOV60i ------------------------------------------------------------
NOV60a ------------------------------------------------------------
NOV60b ------------------------------------------------------------
NOV60c ------------------------------------------------------------
NOV60d ------------------------------------------------------------
NOV60e ------------------------------------------------------------
NOV60f ------------------------------------------------------------
NOV60g CGFGAVCEPNAEGPGRASCVCKKSPCPSVVAPVCGSDASTYSNECELQRAQCSQQRRIRL
NOV60h ------------------------------------------------------------
NOV60i ------------------------------------------------------------
NOV60a ------------------------------------------------------------
NOV60b ------------------------------------------------------------
NOV60c ------------------------------------------------------------
NOV60d ------------------------------------------------------------
NOV60e ------------------------------------------------------------
NOV60f ------------------------------------------------------------
NOV60g LSRGPCGSRDPCSNVTCSFGSTCARSADGLTASCLCPATCRGAPEGTVCGSDGADYPGEC
NOV60h ------------------------------------------------------------
NOV60i ------------------------------------------------------------
NOV60a ------------------------------------------------------------
NOV60b ------------------------------------------------------------
NOV60c ------------------------------------------------------------
NOV60d ------------------------------------------------------------
NOV60e ------------------------------------------------------------
NOV60f ------------------------------------------------------------
NOV60g QLLRPACARQENVFKKFDGPCDPCQGALPDPSRSCRVNPRTRRPEMLLRPESCPARQAPV
NOV60h ------------------------------------------------------------
NOV60i ------------------------------------------------------------
NOV60a ------------------------------------------------------------
NOV60b ------------------------------------------------------------
NOV60c ------------------------------------------------------------
NOV60d ------------------------------------------------------------
NOV60e ------------------------------------------------------------
NOV60f ------------------------------------------------------------
NOV60g CGDDGVTYENDCVMGRSGAARGLLLQKVRSGQCQGRDQCPEPCRFNAVCLSRRGRPRCSC
NOV60h ------------------------------------------------------------
NOV60i ------------------------------------------------------------
NOV60a ------------------------------------------------------------
NOV60b ------------------------------------------------------------
NOV60c ------------------------------------------------------------
NOV60d ----------------------MRHGRPVPPGPAAGRPLLPLLVVAACVLPGAGGTCPER
NOV60e ------------------------------------------------------------
NOV60f ------------------------------------------------------------
NOV60g DRVTCDGAYRPVCAQDGRTYDSDCWRQQAECRQQRAIPSKHQGPCDQAPSPCLGVQCAFG
NOV60h ------------------------------------------------------------
NOV60i ----------------------MRHGRPVPPGPAAGRPLLPLLVVAACVLPGAGGTCPER
NOV60a ------------------------------------------------------------
NOV60b ------------------------------------------------------------
NOV60c ------------------------------------------------------------
NOV60d ALERREEEANVVLTGTVEEILNVDPVQHTYSCKVRVWRYLKGKDLVARESLLDGGNKVVI
NOV60e ------------------------------------------------------------
NOV60f ------------------------------------------------------------
NOV60g ATCAVKNGQAACECLQACSSLYDPVCGSDGVTYGSACELEATACTLGREIQVARKGPCDR
NOV60h ------------------------------------------------------------
NOV60i ALERREEEAIWVLTGTVEEILNVDPVQHTYSCKVRVWRYLKGKDLVARESLLDGGNKVVI
NOV60a ------------------------------------------------------------
NOV60b ------------------------------------------------------------
NOV60c ------------------------------------------------------------
NOV60d SGFGDPLICDNQVSTGDTRIFFVNPAPPYLWPAHKNELMLNSSLMRITLRNLEEVEFCVE
NOV60e ------------------------------------------------------------
NOV60f ------------------------------------------------------------
NOV60g CGQCRFGALCEAETGRCVCPSECVALAQPVCGSDGHTYPSECMLHVHACTHQISLHVASA
NOV60h ------------------------------------------------------------
NOV60i SGFGDPLICDNQVSTGDTRIFFVNPAPPYLWPAHKNELMLNSSLMRITLRNLEEVEFCVE
NOV60a ------------------------------------------------------------
NOV60b ------------------------------------------------------------
NOV60c ------------------------------------------------------------
NOV60d DKPGTHFTPVPPTPPDACRGMLCGFGAVCEPNAEGPGRASCVCKKSPCPSVVAPVCGSDA
NOV60e ------------------------------------------------------------
NOV60f ------------------------------------------------------------
NOV60g GPCETCGDAVCAFGAVCSAGQCVCPRCEHPPPGPVCGSDGVTYGSACELREAACLQQTQI
NOV60h ------------------------------------------------------------
NOV60i DKPGTHFTPVPPTPPDACRGMLCGFGAVCEPNAEGPGRASCVCKKSPCPSVVAPVCGSDA
NOV60a ------------------------------------------------------------
NOV60b ------------------------------------------------------------
NOV60c ------------------------------------------------------------
NOV60d STYSNECELQRAQCSQQRRIRLLSRGPCGSRDPCSNVTCSFGSTCARSADGLTASCLCPA
NOV60e ------------------------------------------------------------
NOV60f ------------------------------------------------------------
NOV60g EEARAGPCEQAECGSGGSGSGEDGDCEQELCRQRGGIWDEDSEDGPCVCDFSCQSVPGSP
NOV60h ------------------------------------------------------------
NOV60i STYSNECELQRAQCSQQRRIRLLSRGPCGSRDPCSNVTCSFGSTCARSADGLTASCLCPA
NOV60a ------------------------------------------------------------
NOV60b ------------------------------------------------------------
NOV60c ------------------------------------------------------------
NOV60d TCRGAPEGTVCGSDGADYPGECQLLREACARQENVFKKFDGPCDPCQGALPDPSRSCRVN
NOV60e ------------------------------------------------------------
NOV60f ------------------------------------------------------------
NOV60g VCGSDGVTYSTECELKKARCESQRGLYVAAQGACRGPAFAPLPPVAPLHCAQTPYGCCQD
NOV60h ------------------------------------------------------------
NOV60i TCRGAPEGTVCGSDGADYPGECQLLRRACARQENVFKKFDGPCDPCQGALPDPSRSCRVN
NOV60a ------------------------------------------------------------
NOV60b ------------------------------------------------------------
NOV60c ------------------------------------------------------------
NOV60d PRTRRPEMLLRPESCPARQAPVCGDDGVTYENDCVMGRSGAARGLLLQKVRSGQCQGRDQ
NOV60e ------------------------------------------------------------
NOV60f ------------------------------------------------------------
NOV60g NITAARGVGLAGCPSACQCNPHGSYGGTCDPATGQCSCRPGVGGLRCDRCEPGFWNFRGI
NOV60h ------------------------------------------------------------
NOV60i PRTRRPEMRLRPESCPARQAPVCGDDGVTYENDCVMGRSGAARGLLLQKVRSGQCQGRDQ
NOV60a ------------------------------------------------------------
NOV60b ------------------------------------------------------------
NOV60c ------------------------------------------------------------
NOV60d CPEPCRFNAVCLSRRGRPRCSCDRVTCDGAYRPVCAQDGRTYDSDCWRQQAECRQQRAIP
NOV60e ------------------------------------------------------------
NOV60f ------------------------------------------------------------
NOV60g VTDGRSGCTPCSCDPQGAVRDDCEQMTGLCSCKPGVAGPKCGQCPDGRALGPAGCEADAS
NOV60h ------------------------------------------------------------
NOV60i CPEPCRFNAVCLSRRGRPRCSCDRVTCDGAYRPVCAQDGRTYDSDCWRQQAECRQQRAIP
NOV60a ------------------------------------------------------------
NOV60b ------------------------------------------------------------
NOV60c ------------------------------------------------------------
NOV60d SKHQGPCDQAPSPCLGVQCAFGATCAVKNGQAACECLQACSSLYDPVCGSDGVTYGSACE
NOV60e ------------------------------------------------------------
NOV60f ------------------------------------------------------------
NOV60g APATCAEMRCEFGARCVEESGSAHCVCPMLTCPEANATKVCGSDGVTYGNECQLKTIACR
NOV60h ------------------------------------------------------------
NOV60i SKHQGPCDQAPSPCLGVQCAFGATCAVKNGQAACECLQACSSLYDPVCGSDGVTYGSACE
NOV60a ------------------------------------------------------------
NOV60b ------------------------------------------------------------
NOV60c ------------------------------------------------------------
NOV60d LEATACTLGREIQVARKGPCDRCGQCRFGALCEAETGRCVCPSECVALAQPVCGSDGHTY
NOV60e ------------------------------------------------------------
NOV60f ------------------------------------------------------------
NOV60g QGLQISIQSLGPCQEAVAPSTHPTSASVTVTTPGLLLSQALPAPPGALPLAPSSTAHSQT
NOV60h ------------------------------------------------------------
NOV60i LEATACTLGREIQVARKGPCDRCGQCRFGALCEAETGRCVCPSECVALAQPVCGSDGHTY
NOV60a --------------------------------MRHGRPVPPGPAAGRPLLPLLVVAACVL
NOV60b ------------------------------------------------------------
NOV60c ------------------------------------------------------------
NOV60d PSECMLHVHACTHQISLHVASAGPCETCGDAVCAFGAVCSAGQCVCPRCEHPPPGPVCGS
NOV60e --------------------------------MRHGRPVPPGPAAGRPLLPLLVVAACVL
NOV60f --------------------------------MRHGRPVPPGPAAGRPLLPLLVVAACVL
NOV60g TPPPSSRPRTTASVPRTTVWPVLTVPPTAPSPAPSLVASAFGESGSTDGSSDEELSGDQE
NOV60h --------------------------------MRHGRPVPPGPAAGRPLLPLLVVAACVL
NOV60i PSECMLHVHACTHQISLHVASAGPCETCGDAVCAFGAVCSAGQCVCPRCEHPPPGPVCGS
NOV60a PGAGGTCPERALERREEEANVVLTGTVEEILNVDPVQHTYSCKVRVWRYLKGKDLVARES
NOV60b --------------------------------------------------TGSATKVFQG
NOV60c ------------------------------------------------------------
NOV60d DGVTYGSACELREAACLQQTQIEEARAGPCEQAECGSGGSGSGEDGDCEQELCRQRGGIW
NOV60e PGAGGTCPERALERREEEANVVLTGTVEEILNVDPVQHTYSCKVRVWRYLKGKDLVARES
NOV60f PGAGGTCPERALERREEEANVVLTGTVEEILNVDPVQHTYSCKVRVWRYLKGKDLVARES
NOV60g ASGGGSGGLEPLEGSSVATPGPPVERASCYNSALGCCSDGKTPSLDAEGSNCPATKVFQG
NOV60h PGAGGTCPERALERREEEANVVLTGTVEEILNVDPVQHTYSCKVRVWRYLKGKDLVARES
NOV60i DGVTYGSACELREAACLQQTQIEEARAGPCEQAECGSGGSGSGEDGDCEQELCRQRGGIW
NOV60a LLDGGNKVVISGFGDPLICDNQVSTGDTRIFFVNPAPPYLWPAHKNELMLNSSLMRITLR
NOV60b VLELEGVEGQELFYTPEMADPKSELFGETARSIESTLDDLFRNSDVKKDFRSVRLRDLG-
NOV60c ------------------------------------------------------------
NOV60d DEDSEDGPCVCDFSCQSVPGSPVCGSDGVTYSTECELKKARCESQRGLYVAAQGACRGPA
NOV60e LLDGGNKVVISGFGDPLICDNQVSTGDTRIFFVNPAPPYLWPAHKNELVLWSG-------
NOV60f LLDGGNKVVISGFGDPLICDNQVSTGDTRIFFVNPAPPYLWPAHKNELMLNSSLMRITLR
NOV60g VLELEGVEGQELFYTPEMADPKSELFGETARSIESTLDDLFRNSDVKKDFRSVRLRDLG-
NOV60h LLDGGNKVVISGFGDPLICDNQVSTGDTRIFFVNPAPPYLWPAHKNELMLNSSLMRITLR
NOV60i DEDSEDGPCVCDFSCQSVPGSPVCGSDGVTYSTECELKKARCESQRGLYVAAQGACRGPT
NOV60a NLEEVEFCVEDKPGTHFTPVPPTPPDACRGMLCGFGAVCEPNAEGPGRASCVCKKSPCPS
NOV60b --------------------------------PGKSVRAIVDVHFDP-------------
NOV60c -----------------------------------TGSCQCNPHG---------------
NOV60d FAPLPPVAPLHCAQTPYGCCQDNITAARGVGLAGCPSACQCNPHG---------------
NOV60e ---------------K------------ATERADYVALAIVDGHLQ--------------
NOV60f NLEEVEFCVEDKPGTHFTPVPPTPPDACRGMLCGFGAVCEPNAEGPGRASCVCKKSPCPS
NOV60g --------------------------------PGKSVRAIVDVHFDP-------------
NOV60h NLEEVEFCVEDKPGTHFTPVPPTPPDACRGMLCGFGAVCEPNAEGPGRASCVCKKSPCPS
NOV60i FAPLPPVAPLHCAQTPYGCCQDNITAARGVGLAGCPSACQCNPHG---------------
NOV60a VVAPVCGSDASTYSNECELQRAQCSQQRRIRLLSRGPCGSRDPCSNVTCSFGSTCARSAD
NOV60b ----------TTAFRAPDVARALLRQIQVS------------------------------
NOV60c -----------SYGGTCDPATGQCS-----------------------------------
NOV60d -----------SYGGTCDPATGQCS-----------------------------------
NOV60e ----------LSYNLGSQPVVLRST-----------------------------------
NOV60f VVAPVCGSDASTYSNECELQRAQCSQQRRIRLLSRGPCGSRDPCSNVTCSFGSTCARSAD
NOV60g ----------TTAFRAPDVARALLRQIQVS------------------------------
NOV60h VVAPVCGSDASTYSNECELQRAQCSQQRRIRLLSRGPCGSRDPCSNVTCSFGSTCARSAD
NOV60i -----------SYGGTCDPATGQCS-----------------------------------
NOV60a GLTASCLCPATCRGAPEGTVCGSDGADYPGECQLLRPACARQENVFKKFDGPCDPCQGAL
NOV60b ------------RRRSLGVRRP-----------------LQEHVRFMDFDWVDG------
NOV60c -----------CRPGVGGLRCD------------------RCEPGFWNFRG---------
NOV60d -----------CRPGVGGLRCD------------------RCEPGFWNFRG---------
NOV60e -------------VPVNTNRWL------------------RVVAHREQREG---------
NOV60f GLTASCLCPATCRGAPEGTVCGSDGADYPGECQLLRRACARQENVFKKFDGPCDPCQGAL
NOV60g ------------RRRSLGVRRP-----------------LQEHVRFMDFDWFPAFITGAT
NOV60h GLTASCLCPATCRGAPEGTVCGSDGADYPGECQLLRRACARQENVFKKFDGPCDPCQGAL
NOV60i -----------CRPGVGGLRCD------------------RCEPGFWNFRG---------
NOV60a PDPSRSCRVNPRTRRPEMLLRPESCPARQAPVCGDDGVTYENDCVMGRSGAARGLLLQKV
NOV60b ------------------------------------------------------------
NOV60c -------------------------------IVTD-----------GRS-----------
NOV60d -------------------------------IVTD-----------GRS-----------
NOV60e -----------------------------SLQVGN-------------------------
NOV60f PDPSRSCRVNPRTRRPEMLLRPESCPARQAPVCGDDGVTYENDCVMGRSGAARGLLLQKV
NOV60g SGAIAAGATARATTASRLPSSAVTPRAPHPSHTSQPVAKTTAAPTTRRPPTTAPSRVPGR
NOV60h PDPSRSCRVNPRTRRPEMLLRPESCPARQAPVCGDDGVTYENDCVMGRSGAARGLLLQKV
NOV60i -------------------------------IVTD-----------GRS-----------
NOV60a RSGQCQGRDQCPEPCRFNAVCLSRRGRPRCSCDRVTCDGAYRPVCAQDGRTYDSDCWRQQ
NOV60b ------------------------------------------------------------
NOV60c -------------------------GCTPCSCD---PQGAVRDDCEQ-------------
NOV60d -------------------------GCTPCSCD---PQGAVRDDCEQ-------------
NOV60e---------------------------EAPVTGS--SPLGATQLDTDG-------------
NOV60f RSGQCQGRDQCPEPCRFNAVCLSRRGRPRCSCDRVTCDGAYRPVCAQDGRTYDSDCWRQQ
NOV60g RPPASCVPREAAYVCLCPGGFSGPHCEKGLVEKSAGDVDTLAFDGRTFVEYLNAVTESEK
NOV60h RSGQCQGRDQCPEPCRFNAVCLSRRGRPRCSCDRVTCDGAYRPVCAQDGRTYDSDCWRQQ
NOV60i -------------------------GCTPCSCD---PQGAVRDDCEQ-------------
NOV60a AECRQQRAIPSKHQGPCDQAPSPCLGVQCAFGATCAVKNGQAACECLQACSSLYDPVCGS
NOV60b ------------------------------------------------------------
NOV60c ------------------------------MTGLCSCKPG----------------VAG-
NOV60d ------------------------------MTGLCSCKPG----------------VAG-
NOV60e ---------------------------ALWLGGLPELPVG--------------------
NOV60f AECRQQRAIPSKHQGPCDQAPSPCLGVQCAFGATCAVKNGQAACECLQACSSLYDPVCGS
NOV60g ALQSNHFELSLRTEATQGLVLWSGKATERADYVALAIVDGHLQLSYNLGSQPVVLRSTVP
NOV60h AECRQQRAIPSKHQGPCDQAPSPCLGVQCAFGATCAVKNGQAACECLQACSSLYDPVCGS
NOV60i ------------------------------MTGLCSCKPG----------------VAG-
NOV60a DGVTYGSACELEATACTLGREIQVARKGPCDRCGQCRFGALCEAETGRCVCPSECVALAQ
NOV60b ------------------------------------------------------------
NOV60c ------------------------------PKCGQC------------------------
NOV60d ------------------------------PKCGQC------------------------
NOV60e ------------------------------------------------------------
NOV60f DGVTYGSACELEATACTLGREIQVARKGPCDRCGQCRF----------------------
NOV60g VNTNRWLRVVAHREQREGSLQVGNEAPVTGSSPLGATQLDTDGALWLGGLPELPVGPALP
NOV60h DGVTYGSACELEATACTLGREIQVARKGPCDRCGQCRFGALCEAETGRCVCPSECVALAQ
NOV60i ------------------------------PKCGQC------------------------
NOV60a PVCGSDGHTYPSECMLHVHACTHQISLHVASAGPCETCGDAVCAFGAVCSAGQCVCPRCE
NOV60b ------------------------------------------------------------
NOV60c ------------------------------------------------------------
NOV60d ------------------------------------------------------------
NOV60e ------------------------------------------------------------
NOV60f ------------------------------------------------------------
NOV60g KAYGTGFVGCLRDVVVGRHPLHLLEDAVTKPELRPCPTP---------------------
NOV60h PVCGSDGHTYPSECMLHVHACTHQISLHVASAGPCETCGDAVCAFGAVCSAGQCVCPRCE
NOV60i ------------------------------------------------------------
NOV60a HPPPGPVCGSDGVTYGSACELREAACLQQTQIEEARAGPCEQAECGSGGSGSGEDGDCEQ
NOV60b ------------------------------------------------------------
NOV60c ------------------------------------------------------------
NOV60d ------------------------------------------------------------
NOV60e ------------------------------------------------------------
NOV60f ------------------------------------------------------------
NOV60g ------------------------------------------------------------
NOV60h HPPPGPVCGSDGVTYGSACELREAACLQQTQIEEARAGPCEQAECGSGGSGSGEDGDCEQ
NOV60i ------------------------------------------------------------
NOV60a ELCRQRGGIWDEDSEDGPCVCDFSCQSVPGSPVCGSDGVTYSTECELKKARCESQRGLYV
NOV60b ------------------------------------------------------------
NOV60c ------------------------------------------------------------
NOV60d ------------------------------------------------------------
NOV60e ------------------------------------------------------------
NOV60f ------------------------------------------------------------
NOV60g ------------------------------------------------------------
NOV60h ELCRQRGGIWDEDSEDGPCVCDFSCQSVPGSPVCGSDGVTYSTECELKKARCESQRGLYV
NOV60i ------------------------------------------------------------
NOV60a AAQGACRGPAFAPLPPVAPLHCAQTPYGCCQDNITAARGVGLAGCPSACQCNPHGSYGGT
NOV60b ------------------------------------------------------------
NOV60c ------------------------------------------------------------
NOV60d ------------------------------------------------------------
NOV60e ------------------------------------------------------------
NOV60f ------------------------------------------------------------
NOV60g ------------------------------------------------------------
NOV60h AAQGACRGPAFAPLPPVAPLHCAQTPYGCCQDNITAARGVGLAGCPSACQCNPHGSYGGT
NOV60i ------------------------------------------------------------
NOV60a CDPATGQCSCRPGVGGLRCDRCEPGFWNFRGIVTDGRSGCTPCSCDPQGAVRDDCEQMTG
NOV60b ------------------------------------------------------------
NOV60c ------------------------------------------------------------
NOV60d ------------------------------------------------------------
NOV60e ------------------------------------------------------------
NOV60f ------------------------------------------------------------
NOV60g ------------------------------------------------------------
NOV60h CDPATGQCSCRPGVGGLRCDRCEPGFWNFRGIVTDGRSGCTPCSCDPQGAVRDDCEQMTG
NOV60i ------------------------------------------------------------
NOV60a LCSCKPGVAGPKCGQCPDGRALGPAGCEADASAPATCAEMRCEFGARCVEESGSAHCVCP
NOV60b ------------------------------------------------------------
NOV60c ------------------------------------------------------------
NOV60d ------------------------------------------------------------
NOV60e ------------------------------------------------------------
NOV60f ------------------------------------------------------------
NOV60g ------------------------------------------------------------
NOV60h LCSCKPGVAGPKCGQCPDGRALGPAGCEADASAPATCAEMRCEFGARCVEESGSAHCVCP
NOV60i ------------------------------------------------------------
NOV60a MLTCPEANATKVCGSDGVTYGNECQLKTIACRQGLQISIQSLGPCQEAVAPSTHPTSASV
NOV60b ------------------------------------------------------------
NOV60c ------------------------------------------------------------
NOV60d ------------------------------------------------------------
NOV60e ------------------------------------------------------------
NOV60f ------------------------------------------------------------
NOV60g ------------------------------------------------------------
NOV60h MLTCPEANATKVCGSDGVTYGNECQLKTIACRQGLQISIQSLGPCQEAVAPSTHPTSASV
NOV60i ------------------------------------------------------------
NOV60a TVTTPGLLLSQALPAPPGALPLAPSSTAHSQTTPPPSSRPRTTASVPRTTVWPVLTVPPT
NOV60b ------------------------------------------------------------
NOV60c ------------------------------------------------------------
NOV60d ------------------------------------------------------------
NOV60e ------------------------------------------------------------
NOV60f ------------------------------------------------------------
NOV60g ------------------------------------------------------------
NOV60h TVTTPGLLLSQALPAPPGALPLAPSSTAHSQTTPPPSSRPRTTASVPRTTVWPVLTVPPT
NOV60i ------------------------------------------------------------
NOV60a APSPAPSLVASAFGESGSTDGSSDEELSGDQEASGGGSGGLEPLEGSSVATPGPPVEEAS
NOV60b ------------------------------------------------------------
NOV60c ------------------------------------------------------------
NOV60d ------------------------------------------------------------
NOV60e ------------------------------------------------------------
NOV60f ------------------------------------------------------------
NOV60g ------------------------------------------------------------
NOV60h APSPAPSLVASAFGESGSTDGSSDEELSGDQEASGGGSGGLEPLEGSSVATPGPPVERAS
NOV60i ------------------------------------------------------------
NOV60a CYNSALGCCSDGKTPSLDAEGSNCPATKVFQGVLELEGVEGQELFYTPEMADPKSELFGE
NOV60b ------------------------------------------------------------
NOV60c ------------------------------------------------------------
NOV60d ------------------------------------------------------------
NOV60e ------------------------------------------------------------
NOV60f ------------------------------------------------------------
NOV60g ------------------------------------------------------------
NOV60h CYNSALGCCSDGKTPSLDAEGSNCPATKVFQGVLELEGVEGQELFYTPEMADPKSELFGE
NOV60i ------------------------------------------------------------
NOV60a TARSIESTLDDLFRNSDVKKDFRSVRLRDLGPGKSVEAIVDVHFDPTTAFRAPDVAEALL
NOV60b ------------------------------------------------------------
NOV60c ------------------------------------------------------------
NOV60d ------------------------------------------------------------
NOV60e ------------------------------------------------------------
NOV60f ------------------------------------------------------------
NOV60g ------------------------------------------------------------
NOV60h TARSIESTLDDLFRNSDVKKDFRSVRLRDLGPGKSVEAIVDVHFDPTTAFRAPDVARALL
NOV60i ------------------------------------------------------------
NOV60a RQIQVSRRRSLGVRRPLQEHVRFMDFDWFPAFITGATSGAIAAGATARATTASRLPSSAV
NOV60b ------------------------------------------------------------
NOV60c ------------------------------------------------------------
NOV60d ------------------------------------------------------------
NOV60e ------------------------------------------------------------
NOV60f ------------------------------------------------------------
NOV60g ------------------------------------------------------------
NOV60h RQIQVSRRRSLGVRRPLQEHVRFMDFDWFPAFITGATSGAIAAGATARATTASRLPSSAV
NOV60i ------------------------------------------------------------
NOV60a TPRAPHPSHTSQPVAKTTAAPTTRRPPTTAPSRVPGRRPPAPQQPPKPCDSQPCFHGGTC
NOV60b ------------------------------------------------------------
NOV60c ------------------------------------------------------------
NOV60d ------------------------------------------------------------
NOV60e ------------------------------------------------------------
NOV60f ------------------------------------------------------------
NOV60g ------------------------------------------------------------
NOV60h TPRAPHPSHTSQPVAXTTAAPTTRRPPTTAPSRVPGRRPPAPQQPPKPCDSQPCFHGGTC
NOV60i ------------------------------------------------------------
NOV60a QDWALGGGFTCSCPAGRGGAVCEKVLGAPVPAFEGRSFLAFPTLRAYHTLRLALEFRALE
NOV60b ------------------------------------------------------------
NOV60c ------------------------------------------------------------
NOV60d ------------------------------------------------------------
NOV60e ------------------------------------------------------------
NOV60f ------------------------------------------------------------
NOV60g ------------------------------------------------------------
NOV60h QDWALGGGFTCSCPAGRGGAVCEKVLGAPVPAFEGRSFLAFPTLRAYHTLRLALEFRALE
NOV60i ------------------------------------------------------------
NOV60a PQGLLLYNGNARGKDFLALALLDGRVQLRFDTGSGPAVLTSAVPVEPGQWHRLELSRHWR
NOV60b ------------------------------------------------------------
NOV60c ------------------------------------------------------------
NOV60d ------------------------------------------------------------
NOV60e ------------------------------------------------------------
NOV60f ------------------------------------------------------------
NOV60g ------------------------------------------------------------
NOV60h PQGLLLYNGNARGKDFLALALLDGRVQLRFDTGSGPAVLTSAVPVEPGQWHRLELSRHWR
NOV60i ------------------------------------------------------------
NOV60a RGTLSVDGETPVLGESPSGTDGLNLDTDLFVGGVPEDQAAVALERTFVGAGLRGCIRLLD
NOV60b ------------------------------------------------------------
NOV60c ------------------------------------------------------------
NOV60d ------------------------------------------------------------
NOV60e ------------------------------------------------------------
NOV60f ------------------------------------------------------------
NOV60g ------------------------------------------------------------
NOV60h RGTLSVDGETPVLGESPSGTDGLNLDTDLFVGGVPEDQAAVALERTFVGAGLRGCIRLLD
NOV60i ------------------------------------------------------------
NOV60a VNNQRLELGIGPGAATRGSGVGECGDHPCLPNPCHGGAPCQNLEAGRFHCQCPPGRVGPT
NOV60b ------------------------------------------------------------
NOV60c ------------------------------------------------------------
NOV60d ------------------------------------------------------------
NOV60e ------------------------------------------------------------
NOV60f ------------------------------------------------------------
NOV60g ------------------------------------------------------------
NOV60h VNNQRLELGIGPGAATRGSGVGECGDHPCLPNPCHGGAPCQNLEAGRFHCQCPPGRVGPT
NOV60i ------------------------------------------------------------
NOV60a CADEKSPCQPNPCHGAAPCRVLPEGGAQCECPLGREGTFCQTASGQDGSGPFLADFNGFS
NOV60b ------------------------------------------------------------
NOV60c ------------------------------------------------------------
NOV60d ------------------------------------------------------------
NOV60e ------------------------------------------------------------
NOV60f ------------------------------------------------------------
NOV60g ------------------------------------------------------------
NOV60h CADEKSPCQPNPCHGAAPCRVLPEGGAQCECPLGREGTFCQTASGQDGSGPFLADFNGFS
NOV60i ------------------------------------------------------------
NOV60a HLELRGLHTIARDLGEKMALEAVFLARGPSGLLLYNGQKTDGKGDFVSLALRDRRLEFRY
NOV60b ------------------------------------------------------------
NOV60c ------------------------------------------------------------
NOV60d ------------------------------------------------------------
NOV60e ------------------------------------------------------------
NOV60f ------------------------------------------------------------
NOV60g ------------------------------------------------------------
NOV60h HLELRGLHTIARDLGEKMALEAVFLARGPSGLLLYNGQKTDGKGDFVSLALRDRRLEFRY
NOV60i ------------------------------------------------------------
NOV60a DLGKGAAVIRSREPVTLGAWTRVSLERNGRKGALRVGDGPRVLGESPKSRKVPHTVLNLK
NOV60b ------------------------------------------------------------
NOV60c ------------------------------------------------------------
NOV60d ------------------------------------------------------------
NOV60e ------------------------------------------------------------
NOV60f ------------------------------------------------------------
NOV60g ------------------------------------------------------------
NOV60h DLGKGAAVIRSREPVTLGAWTRVSLERNGRKGALRVGDGPRVLGESPKSRKVPHTVLNLK
NOV60i ------------------------------------------------------------
NOV60a EPLYVGGAPDFSKLARAAAVSSGFDGAIQLVSLGGRQLLTPEBVLRQVDVTSFAGHPCTR
NOV60b ------------------------------------------------------------
NOV60c ------------------------------------------------------------
NOV60d ------------------------------------------------------------
NOV60e ------------------------------------------------------------
NOV60f ------------------------------------------------------------
NOV60g ------------------------------------------------------------
NOV60h EPLYVGGAPDFSKLARAAAVSSGFDGAIQLVSLGGRQLLTPEHVLRQVDVTSFAGHPCTR
NOV60i ------------------------------------------------------------
NOV60a ASGHPCLNGASCVPREAAYSICLCPGGFSGPHCEKGLVEKSAGDVDTLAFDGRTFVEYLNA
NOV60b ------------------------------------------------------------
NOV60c ------------------------------------------------------------
NOV60d ------------------------------------------------------------
NOV60e ------------------------------------------------------------
NOV60f ------------------------------------------------------------
NOV60g ------------------------------------------------------------
NOV60h ASGHPCLNGASCVPREAAYVCLCPGGFSGPHCEKGLVEKSAGDVDTLAFDGRTFVEYLNA
NOV60i ------------------------------------------------------------
NOV60a VTESEKALQSNHFELSLRTEATQGLVLWSGKATERADYVALAIVDGHLQLSYNLGSQPVV
NOV60b ------------------------------------------------------------
NOV60c ------------------------------------------------------------
NOV60d ------------------------------------------------------------
NOV60e ------------------------------------------------------------
NOV60f ------------------------------------------------------------
NOV60g ------------------------------------------------------------
NOV60h VTESEKALQSNHFELSLRTEATQGLVLWSGKATERADYVALAIVDGHLQLSYNLGSQPVV
NOV60i ------------------------------------------------------------
NOV60a LRSTVPVNTNRWLRVVAHREQREGSLQVGNEAPVTGSSPLGATQLDTDGALWL-------
NOV60b ------------------------------------------------------------
NOV60c ------------------------------------------------------------
NOV60d ------------------------------------------------------------
NOV60e ------------------------------------------------------------
NOV60f -----------------------------GALPVTGSSPLGATQLDTDGALWL-------
NOV60g ------------------------------------------------------------
NOV60h LRSTVPVNTNRWLRVVAHREQREGSLQVGNEAPVTGSSPLGATQLDTDGALWLGECFGET
NOV60i ------------------------------------------------------------
NOV60a ------------------------------------------------------------
NOV60b ------------------------------------------------------------
NOV60c ------------------------------------------------------------
NOV60d ------------------------------------------------------------
NOV60e ------------------------------------------------------------
NOV60f ------------------------------------------------------------
NOV60g ------------------------------------------------------------
NOV60h REGCPRVSDIRGTDSTPQRPPLSQGACEPAGWALFSRCSPCSSQCCGAGRRVPRCGPPAG
NOV60i ------------------------------------------------------------
NOV60a -----------------------GGLPELPVGPALPKAYGTGFVGCLRDVVVGRHPLHLL
NOV60b ------------------------------------------------------------
NOV60c -----------------------------------PDGRALGPAGCVDG-----------
NOV60d -----------------------------------PDGRALGPAGCEADASAPATCAEMR
NOV60e --------------------------------PALPKAYGTGFVGCLRDVVVGRHPLHLL
NOV60f -----------------------GGLPELPVGPALPKAYGTGFVGCLRDVVVGRHPLHLL
NOV60g ------------------------------------------------------------
NOV60h HLLVGVPISITESQPGDSHCLCCRGLPELPVGPALPKAYGTGFVGCLRDVVVGRHPLHLL
NOV60i -----------------------------------PDGRALGPAGCEADASAPATCAENR
NOV60a EDAVTKPELRPCPTP---------------------------------------------
NOV60b ------------------------------------------------------------
NOV60c ------------------------------------------------------------
NOV60d CEFGARCVEESGSAHCVCPMLTCPEANATKVCGSDGVTYGNECQLKTIACRQGLQISIQS
NOV60e EDAVTKPELRPCPTP---------------------------------------------
NOV60f EDAVTKPELRPCPTP---------------------------------------------
NOV60g ------------------------------------------------------------
NOV60h EDAVTKPELRPCPTP---------------------------------------------
NOV60i CEFGARCVEESGSAHCVCPMLTCPEANATKVCGSDGVTYGNECQLKTIACRRCHLRQGLQ
NOV60a ------------------------------------------------------------
NOV60b ------------------------------------------------------------
NOV60c ------------------------------------------------------------
NOV60d LGPCQEAVAPSTHPTSASVTVTTPGLLLSQALPAPPGALPLAPSSTAHSQTTPPPSSRPR
NOV60e ------------------------------------------------------------
NOV60f ------------------------------------------------------------
NOV60g ------------------------------------------------------------
NOV60h ------------------------------------------------------------
NOV60i ISIQSLGPCQEAVAPSTHPTSASVTVTTPGLLLSQALPAPPGALPLAPSSTAHSQTTPPP
NOV60a ------------------------------------------------------------
NOV60b ------------------------------------------------------------
NOV60c ------------------------------------------------------------
NOV60d TTASVPRTTVWPVLTVPPTAPSPAPSLVASAFGESGSTDGSSDEELSGDQEASGGGSGGL
NOV60e ------------------------------------------------------------
NOV60f ------------------------------------------------------------
NOV60g ------------------------------------------------------------
NOV60h ------------------------------------------------------------
NOV60i SSRPRTTASVPRTTVWPVLTVPPTAPSPAPSLVASAFGESGSTDGSSDEELSGDQEASGG
NOV60a ------------------------------------------------------------
NOV60b ------------------------------------------------------------
NOV60c ------------------------------------------------------------
NOV60d EPLEGSSVATPGPPVERASCYNPCHGAAPCRVLPEGGAQCECPLGREGTFCQTASGQDGS
NOV60e ------------------------------------------------------------
NOV60f ------------------------------------------------------------
NOV60g ------------------------------------------------------------
NOV60h ------------------------------------------------------------
NOV60i GSGGPEPLEGSSVATPGPPVERASCYNPCHGAAPCRVLPEGGAQCECPLGREGTFCQTAS
NOV60a ------------------------------------------------------------
NOV60b ------------------------------------------------------------
NOV60c ------------------------------------------------------------
NOV60d GPFLADFNGFSHLELRGLHTIARDLGEKMALEAVFLARGPSGLLLYNGQKTDGKGDFVSL
NOV60e ------------------------------------------------------------
NOV60f ------------------------------------------------------------
NOV60g ------------------------------------------------------------
NOV60h ------------------------------------------------------------
NOV60i GQDGSGPFLADFNGFSHLELRGLHTFARDLGEKMALEVVFLARGPSGLLLYNGQKTDGKG
NOV60a ------------------------------------------------------------
NOV60b ------------------------------------------------------------
NOV60c ------------------------------------------------------------
NOV60d ALRDRRLEFRYDLGKGAAVIRSREPVTLGAWTRVSLERNGRKGALRVGDGPRVLGESPKS
NOV60e ------------------------------------------------------------
NOV60f ------------------------------------------------------------
NOV60g ------------------------------------------------------------
NOV60h ------------------------------------------------------------
NOV60i DFVSLALRDRRLEFRYDLGKGAAVIRSREPVTLGAWTRVSLERNGRKGALRVGDGPRVLG
NOV60a ------------------------------------------------------------
NOV60b ------------------------------------------------------------
NOV60c ------------------------------------------------------------
NOV60d RKVPHTVLNLKEPLYVGGAPDFSKLAPAAAVSSGFDGAIQLVSLGGRQLLTPEHVLRQVD
NOV60e ------------------------------------------------------------
NOV60f ------------------------------------------------------------
NOV60g ------------------------------------------------------------
NOV60h ------------------------------------------------------------
NOV60i ESPVPHTVLNLKEPLYVGGAPDFSKLARAAAVSSGFDGAIQLVSLGGRQLLTPEHVLRQV
NOV60a ------------------------------------------------------------
NOV60b ------------------------------------------------------------
NOV60c ------------------------------------------------------------
NOV60d VTSFAGHPCTPASGHPCLNGASCVPREAAYVCLCPGGFSGPHCEKGLVEKSAGDVDTLAF
NOV60e ------------------------------------------------------------
NOV60f ------------------------------------------------------------
NOV60g ------------------------------------------------------------
NOV60h ------------------------------------------------------------
NOV60i DVTSFAGHPCTRASGHPCLNGASCVPREAAYVCLCPGGFSGPHCEKGLVEKSAGDVDTLA
NOV60a ------------------------------------------------------------
NOV60b ------------------------------------------------------------
NOV60c ------------------------------------------------------------
NOV60d DGRTFVEYLNAVTESEKALQSNHFELSLRTEATQGLVLWSGKATERADYVALAIVDGHLQ
NOV60e ------------------------------------------------------------
NOV60f ------------------------------------------------------------
NOV60g ------------------------------------------------------------
NOV60h ------------------------------------------------------------
NOV60i FDGRTFVEYLNAVTESEKALQSNHFELSLRTEATQGLVLWSGKATERADYVALAIVDGHL
NOV60a ------------------------------------------------------------
NOV60b ------------------------------------------------------------
NOV60c ------------------------------------------------------------
NOV60d LSYNLGSQPVVLRSTVPVNTNRWLRVVAHREQREGSLQVGNEAPVTGSSPLGATQLDTDG
NOV60e ------------------------------------------------------------
NOV60f ------------------------------------------------------------
NOV60g ------------------------------------------------------------
NOV60h ------------------------------------------------------------
NOV60i QLSYNLGSQPVVLRSTVPVNTNRWLRVVAHREQREGSLQVGNEAPVTGSSPLGATQLDTD
NOV60a ---------------------------------------------------------
NOV60b ---------------------------------------------------------
NOV60c ---------------------------------------------------------
NOV60d ALWLGGLPELPVGPALPKAYGTGFVGCLRDVVVGRHPLHLLEDAVTKPELRPCPTP-
NOV60e ---------------------------------------------------------
NOV60f ---------------------------------------------------------
NOV60g ---------------------------------------------------------
NOV60h ---------------------------------------------------------
NOV60i GALWLGGLPELPVGPALPKAYGTGFVGCLRDVVVGRHPLHLLEDAVTKPELRPCPTP
NOV60a (SEQ ID NO: 1174)
NOV60b (SEQ ID NO: 1176)
NOV60c (SEQ ID NO: 1178)
NOV60d (SEQ ID NO: 1180)
NOV60e (SEQ ID NO: 1182)
NOV60f (SEQ ID NO: 1184)
NOV60g (SEQ ID NO: 1186)
NOV60h (SEQ ID NO: 1188)
NOV60i (SEQ ID NO: 1190)

[0701] Further analysis of the NOV60a protein yielded the following properties shown in Table 60C.

TABLE 60C
Protein Sequence Properties NOV60a

| | |
|---|---|
| SignalP analysis: | Cleavage site between residues 34 and 35 |
| PSORT II analysis: | |

| PSG: | a new signal peptide prediction method | |
|---|---|---|
| | N-region: | length 5; pos. chg 2; neg. chg 0 |
| | H-region: | length 9; peak value 3.79 |
| | PSG score: | −0.61 |

| | |
|---|---|
| GvH: | von Heijne's method for signal seq. recognition |
| | GvH score (threshold: −2.1): 0.49 |
| | possible cleavage site: between 33 and 34 |

>>> Seems to have no N-terminal signal peptide

| ALOM: | Klein et al's method for TM region allocation | | |
|---|---|---|---|
| | Init position for calculation: 1 | | |
| | Tentative number of TMS(s) for the threshold 0.5: 1 | | |
| | Number of TMS(s) for threshold 0.5: 1 | | |
| | INTEGRAL | Likelihood = | Transmembrane 17-33 |
| | | −4.35 | |

| | |
|---|---|
| PERIPHERAL | Likelihood = 0.53 (at 609) |

| | |
|---|---|
| | ALOM score: −4.35 (number of TMSs: 1) |
| MTOP: | Prediction of membrane topology (Hartmann et al.) |
| | Center position for calculation: 24 |
| | Charge difference: −6.5 C(−2.0)-N(4.5) |
| | N >= C: N-terminal side will be inside |

>>> membrane topology: type 2 (cytoplasmic tail 1 to 17)

| MITDISC: | discrimination of mitochondrial targeting seg | | | |
|---|---|---|---|---|
| | R content: | 3 | Hyd Moment(75): | 2.17 |
| | Hyd Moment(95): | 10.07 | G content: | 6 |
| | D/E content: | 1 | S/T content: | 1 |

| | |
|---|---|
| | Score: −4.90 |
| Gavel: | prediction of cleavage sites for mitochondrial preseq |
| | R-2 motif at 25 GRP\|LL |

NUCDISC: discrimination of nuclear localization signals

| | |
|---|---|
| | pat4: none |
| | pat7: PRTRRPE (5) at 339 |
| | pat7: PKSRKVP (5) at 1755 |
| | bipartite: none |
| | content of basic residues: 9.5% |
| | NLS Score: 0.39 |
| KDEL: | ER retention motif in the C-terminus: none |

ER Membrane Retention Signals:

XXRR-like motif in the N-terminus: RHGR

none
SKL: peroxisomal targeting signal in the C-terminus: none
PTS2: 2nd peroxisomal targeting signal: none
VAC: possible vacuolar targeting motif: none
RNA-binding motif: none
Actinin-type actin-binding motif:

type 1: none
type 2: none

NMYR: N-myristoylation pattern: none
Prenylation motif: none
memYQRL: transport motif from cell surface to Golgi: none
Tyrosines in the tail: none
Dileucine motif in the tail: none
checking 63 PROSITE DNA binding motifs: none
checking 71 PROSITE ribosomal protein motifs: none
checking 33 PROSITE prokaryotic DNA binding motifs: none

| | |
|---|---|
| NNCN: | Reinhardt's method for Cytoplasmic/Nuclear discrimination |
| | Prediction: nuclear |
| | Reliability: 76.7 |
| COIL: | Lupas's algorithm to detect coiled-coil regions |
| | total: 0 residues |

Final Results (k = 9/23):

```
34.8%: mitochondrial
34.8%: nuclear
13.0%: cytoplasmic
  4.3%: extracellular, including cell wall
  4.3%: vacuolar
  4.3%: Golgi
  4.3%: peroxisomal
```

>> prediction for CG94946-01 is mit (k = 23)

[0702] A search of the NOV60a protein against the Geneseq database, a proprietary database that contains sequences published in patents and patent publication, yielded several homologous proteins shown in Table 60D.

TABLE 60D
Geneseq Results for NOV60a

| | | NOV60a | Identities/ | | |
|---|---|---|---|---|---|
| | Protein/Organism/Length | Residues/ | Similarities for | | |
| Geneseq | [Patent #, | Match | the Matched | | Expect |
| Identifier | Date] | Residues | Region | | Value |
| ABU52400 | Human GPCR related protein | 160 . . . 2053 | 1841/1894 | (97%) | 0.0 |
| | NOV40a - Homo sapiens, 1931 aa. | 51 . . . 1931 | 1853/1894 | (97%) | |
| | [WO200279398-A2, 10-OCT-2002] | | | | |
| ABP43859 | Human mRNA precursor - Homo | 137 . . . 1669 | 1530/1533 | (99%) | 0.0 |
| | sapiens, 1741 aa. [WO200231111- | 1 . . . 1533 | 1530/1533 | (99%) | |
| | A2, 18-APR-2002] | | | | |
| AAW26609 | Human agrin - Homo sapiens, 492 | 1591 . . . 2053 | 460/471 | (97%) | 0.0 |
| | aa. [WO9721811-A2, 19-JUN-1997] | 22 . . . 492 | 461/471 | (97%) | |
| AAB93754 | Human protein sequence SEQ ID | 583 . . . 968 | 381/386 | (98%) | 0.0 |
| | NO: 13424 - Homo sapiens, 413 aa. | 1 . . . 386 | 384/386 | (98%) | |
| | [EP1074617-A2, 07-FEB-2001] | | | | |
| AAY73993 | Human prostate tumor EST fragment | 1634 . . . 2053 | 414/420 | (98%) | 0.0 |
| | derived protein #180 - Homo sapiens, | 1 . . . 416 | 414/420 | (98%) | |
| | 416 aa. [DE19820190-A1, 04-NOV-1999] | | | | |

[0703] In a BLAST search of public sequence databases, the NOV60a protein was found to have homology to the proteins shown in the BLASTP data in Table 60E.

TABLE 60E
Public BLASTP Results for NOV60a

| | | NOV60a | | | |
|---|---|---|---|---|---|
| Protein | | Residues/ | Identities/ | | |
| Accession | | Match | Similarities for the | | Expect |
| Number | Protein/Organism/Length | Residues | Matched Portion | | Value |
| O00468 | AGRIN precursor - Homo sapiens | 24 . . . 2053 | 2022/2030 | (99%) | 0.0 |
| | (Human), 2026 aa (fragment). | 1 . . . 2026 | 2022/2030 | (99%) | |
| P25304 | Agrin precursor - Rattus | 160 . . . 2053 | 1558/1914 | (81%) | 0.0 |
| | norvegicus (Rat), 1959 aa. | 51 . . . 1959 | 1663/1914 | (86%) | |
| P31696 | Agrin precursor - Gallus gallus | 128 . . . 2050 | 1234/1970 | (62%) | 0.0 |
| | (Chicken), 1955 aa. | 1 . . . 1952 | 1479/1970 | (74%) | |
| Q90404 | Agrin - Discopyge ommata | 716 . . . 2051 | 733/1353 | (54%) | 0.0 |
| | (Electric ray), 1328 aa (fragment). | 1 . . . 1325 | 932/1353 | (68%) | |
| Q96IC1 | Hypothetical protein - Homo | 1562 . . . 2053 | 486/492 | (98%) | 0.0 |
| | sapiens (Human), 488 aa | 1 . . . 488 | 486/492 | (98%) | |
| | (fragment). | | | | |

[0704] PFam analysis predicts that the NOV60a protein contains the domains shown in the Table 60F.

TABLE 60F
Domain Analysis of NOV60a

| | | Identities/ | | |
|---|---|---|---|---|
| Pfam | NOV60a | Similarities for | | Expect |
| Domain | Match Region | the Matched Region | | Value |
| NtA | 34 . . . 161 | 125/135 | (93%) | 1.1e−111 |
| | | 128/135 | (95%) | |
| kazal | 201 . . . 246 | 25/61 | (41%) | 7.2e−18 |
| | | 36/61 | (59%) | |
| kazal | 276 . . . 321 | 21/62 | (34%) | 5.1e−13 |
| | | 33/62 | (53%) | |
| kazal | 346 . . . 393 | 18/61 | (30%) | 7.9e−12 |
| | | 33/61 | (54%) | |
| kazal | 420 . . . 465 | 21/61 | (34%) | 4.1e−16 |
| | | 38/61 | (62%) | |
| kazal | 494 . . . 538 | 24/61 | (39%) | 3.6e−19 |
| | | 38/61 | (62%) | |
| kazal | 559 . . . 603 | 19/61 | (31%) | 1.4e−18 |
| | | 38/61 | (62%) | |
| kazal | 624 . . . 668 | 26/62 | (42%) | 1.5e−17 |
| | | 37/62 | (60%) | |
| kazal | 709 . . . 754 | 24/62 | (39%) | 1.2e−16 |
| | | 40/62 | (65%) | |
| laminin_EGF | 797 . . . 848 | 28/61 | (46%) | 1.1e−20 |
| | | 46/61 | (75%) | |
| laminin_EGF | 851 . . . 895 | 21/59 | (36%) | 3.6e−11 |
| | | 37/59 | (63%) | |
| kazal | 927 . . . 973 | 25/62 | (40%) | 5.2e−18 |
| | | 41/62 | (66%) | |
| SEA | 1134 . . . 1256 | 38/132 | (29%) | 4.6e−37 |
| | | 111/132 | (84%) | |
| EGF | 1337 . . . 1370 | 16/47 | (34%) | 0.00055 |
| | | 24/47 | (51%) | |
| laminin_G | 1404 . . . 1535 | 71/155 | (46%) | 7.4e−55 |
| | | 120/155 | (77%) | |
| EGF | 1557 . . . 1589 | 16/47 | (34%) | 5.2e−06 |
| | | 27/47 | (57%) | |
| EGF | 1596 . . . 1628 | 16/47 | (34%) | 0.00021 |
| | | 25/47 | (53%) | |
| laminin_G | 1672 . . . 1807 | 70/155 | (45%) | 7e−52 |
| | | 123/155 | (79%) | |
| EGF | 1826 . . . 1860 | 14/47 | (30%) | 4.3e−07 |
| | | 25/47 | (53%) | |
| laminin_G | 1905 . . . 2036 | 59/155 | (38%) | 2e−50 |
| | | 125/155 | (81%) | |

### Example 61

[0705] The NOV61 clone was analyzed, and the nucleotide and encoded polypeptide sequences are shown in Table 61A.

TABLE 61A
NOV61 Sequence Analysis

| | | |
|---|---|---|
| NOV61a, CG96384-01 | SEQ ID NO: 1191 | 789 bp |
| DNA Sequence | ORF Start: ATG at 1 | ORF Stop: TAA at 787 |

ATGCCTTGGGTATGCCGCCCCACTGGCTGGACAAAGCGGCGCGTGGATGTGCCTGTGGGGCCTTGCCC
TGGGCATCGCTGCTGCTGCCAGCGCCCTTCACCCATGCTTCAGCATGGTGCCCATACGCACTTCCTGC
AGGAGTCTGCTGGATACCTGCAGCTGGAGCACAGGAGAGATTTCAGCTCTTCTGGGAGTAGGAAGCTC
TCCTTTGACACTCGTTCCTTAGTGTGCTTTCTGGAAGACCATGGGTTTGCTACTCAGCAAGCAGAAAT
CATTGTGTCTGCATTGGTCCAGGTACTGGAGGCCAACGTGGACATCGTCTACAAAGATATGGCCACCA
AGATGAAGCAGGAGATCGCTCTTCAGCAAATAATGTCTCAGACTGTGAATGTGAAAAACGATATGATT
ACTTTGGAGAAGAGTGAATTTTCAGCCCTCAGAGCAGATCGTGAGAAAATAAAACTCAAACTACATCA
GTTAAAACAAGTAATGGATGAAGTGATTAAAGTCCGAACAGATACTAAATTAGACTTCAACCTAGAAA
AGAGCAGAGTAAAAGAATTGTATTCGTTGAATGAAAGGAAGCTGCTGGAATTGAGAACAGAAATAGTG
ACATTGCATGCCCAGCAAGATTGGGCCGTCACCCAGAGAGATAGGAAGATAGAAACTGAGGATGCTGG
CCCCAAAACCATGCTTGAGTCATACAAGCTTGATAATATTAAATATTTAGCAGGGTCTATATTTACGT
GCCTAACAGTAGCTCTGGGATTTTATCACCTGTGGATCTAA

| | | | |
|---|---|---|---|
| NOV61a, CG96384-01 | | | |
| Protein Sequence | SEQ ID NO: 1192 | 262 aa | MW at 30251.7kD |

[sequence omitted]

| | | |
|---|---|---|
| NOV61b, 277580745 | SEQ ID NO: 1193 | 1808 bp |
| DNA Sequence | ORF Start: at 2 | ORF Stop: end of sequence |

CACCGGATCCACCATGCCTTGGGTATGCCGCCCCACTGGCTGGACAAAGCGGCGCGTGGATGTGCCTG
TGGGGCCTTGCCCTGGGCATCGCTGCTGCTGCCAGCGCCCTTCACCCATGCTTCAGCATGGTGCCTAT
ACTCACTTCCTGCAGGAGTCTGCTGGATACCTGCAGCTGGAGCACAGGAGAGATTTCAGCTCTTCTGG
GAGTAGGAAGCTCTCCTTTGACACTCGTTCCTTAGTGTGCTTTCTGGAAGACCATGGGTTTGCTACTC
AGCAAGCAGAAATCATTGTGTCTGCATTGGTCCAGGTACTGGAGGCCAACGTGGACATCGTCTACAAA
GATATGGCCACCAAGATGAAGCAGGAGATCGCTCTTCAGCAAATAATGTCTCAGACTGTGAATGTGAA
AAACGATATGATTACTTTGGAGAAGAGTGAATTTTCAGCCCTCAGAGCAGAACGTGAGAAAATAAAAC
TCAAACTACATCAGTTAAAACAAGTAATGGATGAAGTGATTAAAGTCCGAACAGATACTAAATTAGAC
TTCAACCTAGAAAAGAGCAGAGTAAAAGAATTGTATTCGTTGAATGAAAGGAAGCTGCTGGAATTGAG
AACAGAAATAGTGACATTGCATGCCCAGCAAGATTGGGCCGTCACCCAGAGAGATAGGAAGATAGAAA
CTGAGGATGCTGGCCCCAAAACCATGCTTGAGTCATACAAGCTTGATAATATTAAATATTTAGCAGGG
TCTATATTTACGTGCCTAACAGTAGCTCTGGGATTTTATCACCTGTGGATCCTCGAGGGC

| | | | |
|---|---|---|---|
| NOV61b, 277580745 | | | |
| Protein Sequence | SEQ ID NO: 1194 | 269 aa | MW at 30923.4kD |

TGSTMPWVCRPTGWTKRRVDVPVGPCPGHRCCCQRPSPMLQHGAYTHFLQESAGYLQLEHRRDFSSSG
SRKLSFDTRSLVCFLEDHGFATQQAEIIVSALVQVLEANVDIVYKDMATKMKQEIALQQIMSQTVNVK
NDMITLEKSEFSALRAEREKIKLKLHQLKQVMDEVIKVRTDTKLDFNLEKSRVKELYSLNERKLLELR
TEIVTLHAQQDWAVTQRDRKIETEDAGPKTMLESYKLDNIKYLAGSIFTCLTVALGFYHLWILEG

| | | |
|---|---|---|
| NOV61c, CG96384-02 | SEQ ID NO: 1195 | 789 bp |
| DNA Sequence | ORF Start: ATG at 1 | ORF Stop: TAA at 787 |

ATGCCTTGGGTATGCCGCCCCACTGGCTGGACAAAGCGGCGCGTGGATGTGCCTGTGGGGCCTTGCCC
TGGGCATCGCTGCTGCTGCCAGCGCCCTTCACCCATGCTTCAGCATGGTGCCCATACGCACTTCCTGC
AGGAGTCTGCTGGATACCTGCAGCTGGAGCACAGGAGAGATTTCAGCTCTTCTGGGAGTAGGAAGCTC
TCCTTTGACACTCGTTCCTTAGTGTGCTTTCTGGAAGACCATGGGTTTGCTACTCAGCAAGCAGAAAT
CATTGTGTCTGCATTGGTCCAGGTACTGGAGGCCAACGTGGACATCGTCTACAAAGATATGGCCACCA
AGATGAAGCAGGAGATCGCTCTTCAGCAAATAATGTCTCAGACTGTGAATGTGAAAAACGATATGATT
ACTTTGGAGAAGAGTGAATTTTCAGCCCTCAGAGCAGAACGTGAGAAAATAAAACTCAAACTACATCA
GTTAAAACAAGTAATGGATGAAGTGATTAAAGTCCGAACAGATACTAAATTAGACTTCAACCTAGAAA
AGAGCAGAGTAAAAGAATTGTATTCGTTGAATGAAAGGAAGCTGCTGGAATTGAGAACAGAAATAGTG
ACATTGCATGCCCAGCAAGATTGGGCCGTCACCCAGAGAGATAGGAAGATAGAAACTGAGGATGCTGG
CCCCAAAACCATGCTTGAGTCATACAAGCTTGATAATATTAAATATTTAGCAGGGTCTATATTTACGT
GCCTAACAGTAGCTCTGGGATTTTATCACCTGTGGATCTAA

| | | | |
|---|---|---|---|
| NOV61c, CG96384-02 | | | |
| Protein Sequence | SEQ ID NO: 1196 | 1262 aa | MW at 30251.7kD |

[sequence omitted]

| | | |
|---|---|---|
| NOV61d, CG96384-03 | SEQ ID NO: 1197 | 1285 bp |
| DNA Sequence | ORF Start: at 31 | ORF Stop: at 280 |

GGATCCACCATGCCTTGGGTATGCCGCCCCACTGGCTGGACAAAGCGGCGCGTGGATGTGCCTGTGGG
GCCTTGCCCTGGGCATCGCTGCTGCTGCCAGCGCCCTTCACCCATGCTTCAGCATGGTGCCTATACTC
ACTTCCTGCAGGAGTCTGCTGGATACCTGCAGCTGGAGCACAGGAGAGATTTCAGCTCTTCTGGGAGT
AGGAAGCTCTCCTTTGACACTCGTTCCTTAGTGTGCTTTCTGGAAGACCATGGGTTTGCTACTCAGCA
AGCAGAACTCGAG

| | | | |
|---|---|---|---|
| NOV61d, CG96384-03 | | | |
| Protein Sequence | SEQ ID NO: 1198 | 183 aa | MW at 9410.5kD |

TGWTKRRVDVPVGPCPGHRCCCQRPSPMLQHGAYTHFLQESAGYLQLEHRPDFSSSGSRKLSFDTRSL
VCFLEDHGFATQQAE

| | | |
|---|---|---|
| NOV61e, CG96384-04 | SEQ ID NO: 1199 | 1801 bp |
| DNA Sequence | ORF Start: at 31 | ORF Stop: at 772 |

GGATCCACCATGCCTTGGGTATGCCGCCCCACTGGCTGGACAAAGCGGCGCGTGGATGTGCCTGTGGG
GCCTTGCCCTGGGCATCGCTGCTGCTGCCAGCGCCCTTCACCCATGCTTCAGCATGGTGCCTATACTC
ACTTCCTGCAGGAGTCTGCTGGATACCTGCAGCTGGAGCACAGGAGAGATTTCAGCTCTTCTGGGAGT
AGGAAGCTCTCCTTTGACACTCGTTCCTTAGTGTGCTTTCTGGAAGACCATGGGTTTGCTACTCAGCA
AGCAGAAATCATTGTGTCTGCATTGGTCCAGGTACTGGAGGCCAACGTGGACATCGTCTACAAAGATA
TGGCCACCAAGATGAAGCAGGAGATCGCTCTTCAGCAAATAATGTCTCAGACTGTGAATGTGAAAAAC
GATATGATTACTTTGGAGAAGAGTGAATTTTCAGCCCTCAGAGCAGAACGTGAGAAAATAAAACTCAA
ACTACATCAGTTAAACAAGTAATGGATGAAGTGATTTAAAGTCCGAACAGATACTAAATTAGACTTCA
ACCTAGAAAAGAGCAGAGTAAAAGAATTGTATTCGTTGAATGAAAGGAAGCTGCTGGAATTGAGAACA
GAAATAGTGACATTGCATGCCCAGCAAGATTGGGCCGTCACCCAGAGAGATAGGAAGATAGAAACTGA
GGATGCTGGCCCCAAAACCATGCTTGAGTCATACAAGCTTGATAATATTAAATATTTAGCAGGGTCTA
TATTTACGTGCCTAACAGTAGCTCTGGGATTTTATCACCTGTGGATCCTCGAG

| | | | |
|---|---|---|---|
| NOV61e, CG96384-04 | | | |
| Protein Sequence | SEQ ID NO: 1200 | 247 aa | MW at 28377.4kD |

TGWTKRRVDVPVGPCPGHRCCCQRPSPMLQHGAYTHFLQESAGYLQLEHRRDFSSSGSRKLSFDTRSL
VCFLEDHGFATQQAEIIVSALVQVLEANVDIVYKDMATKMKQEIALQQIMSQTVNVKNDMITLEKSEF
SALRAEREKIKLKLHQLKQVMDEVIKVRTDTKLDFNLEKSRVKELYSLNERKLLELRTEIVTLHAQQD
WAVTQRDRKIETEDAGPKTMLESYKLDNIKYLAGSIFTCLTVA

[0706] A ClustalW comparison of the above protein sequences yields the following sequence alignment shown in Table 61B.

TABLE 61B
Comparison of the NOV61 protein sequences.

| | |
|---|---|
| NOV61a | ----MPWVCRPTGWTKRRVDVPVGPCPGHRCCCQRPSPMLQHGAHTHFLQESAGYLQLEH |
| NOV61b | TGSTMPWVCRPTGWTKRRVDVPVGPCPGHRCCCQRPSPMLQHGAYTHFLQESAGYLQLEH |
| NOV61c | ----MPWVCRPTGWTKRRVDVPVGPCPGHRCCCQRPSPMLQHGAHTHFLQESAGYLQLEH |
| NOV61d | -----------TGWTKRRVDVPVGPCPGHRCCCQRPSPMLQHGAYTHFLQESAGYLQLEH |
| NOV61e | -----------TGWTKRRVDVPVGPCPGHRCCCQRPSPMLQHGAYTHFLQESAGYLQLEH |
| N0V61a | RRDFSSSGSRKLSFDTRSLVCFLEDHGFATQQAEIIVSALVQVLEANVDIVYKDMATKMK |
| N0V61b | RRDFSSSGSRKLSFDTRSLVCFLEDHGFATQQAEIIVSALVQVLEANVDIVYKDMATKMK |
| N0V61c | RRDFSSSGSRKLSFDTRSLVCFLEDHGFATQQAEIIVSALVQVLEANVDIVYKDMATKMK |
| NOV61d | RRDFSSSGSRKLSFDTRSLVCFLEDHGFATQQAE-------------------------- |
| N0V61e | RRDFSSSGSRKLSFDTRSLVCFLEDHGFATQQAEIIVSALVQVLEANVDIVYKDMATKMK |
| NOV61a | QEIALQQIMSQTVNVKNDMITLEKSEFSALRAEREKIKLKLHQLKQVMDEVIKVRTDTKL |
| NOV61b | QEIALQQIMSQTVNVKNDMITLEKSEFSALRAEREKIKLKLHQLKQVMDEVIKVRTDTKL |
| NOV61c | QEIALQQIMSQTVNVKNDMITLEKSEFSALRAEREKIKLKLHQLKQVMDEVIKVRTDTKL |
| NOV61d | ------------------------------------------------------------ |
| NOV61e | QEIALQQIMSQTVNVKNDMITLEKSEFSALRAEREKIKLKLHQLKQVMDEVIKVRTDTKL |
| NOV61a | DFNLEKSRVKELYSLNERKLLELRTEIVTLHAQQDWAVTQRDRKIETEDAGPKTMLESYK |
| NOV61b | DFNLEKSRVKELYSLNERKLLELRTEIVTLHAQQDWAVTQRDRKIETEDAGPKTMLESYK |
| NOV61c | DFNLEKSRVKELYSLNERKLLELRTEIVTLHAQQDWAVTQRDRKIETEDAGPKTMLESYK |
| NOV61d | ------------------------------------------------------------ |
| NOV61e | DFNLEKSRVKELYSLNERKLLELRTEIVTLHAQQDWAVTQRDRKIETEDAGPKTMLESYK |
| NOV61a | LDNIKYLAGSIFTCLTVALGFYHLWI--- |
| NOV61b | LDNIKYLAGSIFTCLTVALGFYHLWILEG |
| NOV61c | LDNIKYLAGSTFTCLTVALGFYHLWI--- |
| NOV61d | ----------------------------- |
| NOV61e | LDNIKYLAGSIFTCLTVA----------- |
| NOV61a | (SEQ IDNO: 1192) |
| NOV61b | (SEQ IDNO: 1194) |
| NOV61c | (SEQ IDNO: 1196) |
| NOV61d | (SEQ IDNO: 1198) |
| NOV61e | (SEQ IDNO: 1200) |

[0707] Further analysis of the NOV61a protein yielded the following properties shown in Table 61C.

TABLE 61C
Protein Sequence Properties NOV61a

| | |
|---|---|
| SignalP analysis: | No Known Signal Sequence Predicted |
| PSORT II analysis: | |

| PSG: | a new signal peptide prediction method | |
|---|---|---|
| | N-region: | length 6; pos. chg 1; neg. chg 0 |
| | H-region: | length 5; peak value −14.81 |
| | PSG score: | −19.21 |

| | |
|---|---|
| GvH: | von Heijne's method for signal seq. recognition |
| | GvH score (threshold: −2.1): −11.24 |
| | possible cleavage site: between 29 and 30 |

>>> Seems to have no N-terminal signal peptide

| ALOM: | Klein et al's method for TM region allocation | | |
|---|---|---|---|
| | Init position for calculation: 1 | | |
| | Tentative number of TMS(s) for the threshold 0.5: 2 | | |
| | Number of TMS(s) for threshold 0.5: 1 | | |
| | INTEGRAL | Likelihood = | Transmembrane 91-107 |
| | | −2.13 | |

| | |
|---|---|
| PERIPHERAL | Likelihood = 11.30 (at 68) |

| | |
|---|---|
| | ALOM score: −2.13 (number of TMSs: 1) |
| MTOP: | Prediction of membrane topology (Hartmann et al.) |
| | Center position for calculation: 98 |
| | Charge difference: 1.5 C(−1.0)-N(−2.5) |
| | C > N: C-terminal side will be inside |

>>> membrane topology: type 1b (cytoplasmic tail 91 to 262)

| MITDISC: | discrimination of mitochondrial targeting seq | | | |
|---|---|---|---|---|
| | R content: | 3 | Hyd Moment(75): | 7.07 |
| | Hyd Moment(95): | 9.21 | G content: | 1 |
| | D/E content: | 1 | S/T content: | 2 |

| | |
|---|---|
| | Score: −1.63 |
| Gavel: | prediction of cleavage sites for mitochondrial preseq |
| | R-10 motif at 68 RRD FS |

NUCDISC: discrimination of nuclear localization signals

| | |
|---|---|
| | pat4: none |
| | pat7: none |
| | bipartite: none |
| | content of basic residues: 14.1% |
| | NLS Score: −0.47 |
| KDEL: | ER retention motif in the C-terminus: none |

ER Membrane Retention Signals: none
SKL: peroxisomal targeting signal in the C-terminus: none
PTS2: 2nd peroxisomal targeting signal: found
KIKLKLHQL at 152
VAC: possible vacuolar targeting motif: none
RNA-binding motif: none
Actinin-type actin-binding motif:

type 1: none
type 2: none

NMYR: N-myristoylation pattern: none
Prenylation motif: none
memYQRL: transport motif from cell surface to Golgi: none
Tyrosines in the tail: too long tail
Dileucine motif in the tail: found

LL at 196

checking 63 PROSITE DNA binding motifs: none
checking 71 PROSITE ribosomal protein motifs: none
checking 33 PROSITE prokaryotic DNA binding motifs: none

| | |
|---|---|
| NNCN: | Reinhardt's method for Cytoplasmic/Nuclear discrimination |
| | Prediction: cytoplasmic |
| | Reliability: 76.7 |
| COIL: | Lupas's algorithm to detect coiled-coil regions |
| 138 E | 0.87 |
| 139 K | 0.87 |
| 140 S | 0.87 |
| 141 E | 0.87 |
| 142 F | 0.87 |
| 143 S | 0.87 |
| 144 A | 0.87 |
| 145 L | 0.87 |
| 146 R | 0.87 |
| 147 A | 0.87 |
| 148 E | 0.87 |
| 149 R | 0.87 |
| 150 E | 0.87 |
| 151 K | 0.87 |
| 152 I | 0.87 |
| 153 K | 0.87 |
| 154 L | 0.87 |
| 155 K | 0.87 |
| 156 L | 0.87 |
| 157 H | 0.87 |
| 158 Q | 0.87 |
| 159 L | 0.87 |
| 160 K | 0.87 |
| 161 Q | 0.87 |
| 162 V | 0.87 |
| 163 M | 0.87 |
| 164 D | 0.87 |
| 165 E | 0.87 |
| 166 V | 0.86 |
| 167 I | 0.79 |
| 168 K | 0.79 |
| 169 V | 0.59 |
| 170 R | 0.59 |
| 171 T | 0.59 |
| 172 D | 0.59 |
| | total: 35 residues |

Final Results (k = 9/23):

```
34.8%: nuclear
21.7%: mitochondrial
21.7%: cytoplasmic
  8.7%: vesicles of secretory system
  4.3%: vacuolar
  4.3%: peroxisomal
  4.3%: endoplasmic reticulum
```

>> prediction for CG96384-01 is nuc (k = 23)

[0708] A search of the NOV61a protein against the Geneseq database, a proprietary database that contains sequences published in patents and patent publication, yielded several homologous proteins shown in Table 61D.

TABLE 61D
Geneseq Results for NOV61a

| | | NOV61a | Identities/ | | |
|---|---|---|---|---|---|
| | Protein/Organism/Length | Residues/ | Similarities for | | |
| Geneseq | [Patent #, | Match | the Matched | | Expect |
| Identifier | Date] | Residues | Region | | Value |
| AAM40693 | Human polypeptide SEQ ID NO 5624 - | 45 . . . 262 | 185/220 | (84%) | 2e−95 |
| | Homo sapiens, 246 aa. | 27 . . . 246 | 197/220 | (89%) | |
| | [WO200153312-A1, 26-JUL-2001] | | | | |
| AAM38907 | Human polypeptide SEQ ID NO 2052 - | 104 . . . 262 | 138/160 | (86%) | 3e−70 |
| | Homo sapiens, 160 aa. | 1 . . . 160 | 145/160 | (90%) | |
| | [WO200153312-A1, 26-JUL-2001] | | | | |
| AAG73708 | Human colon cancer antigen protein | 142 . . . 262 | 110/122 | (90%) | 9e−54 |
| | SEQ ID NO: 4472 - Homo sapiens, 129 | 8 . . . 129 | 114/122 | (93%) | |
| | aa. [WO200122920-A2, 05-APR-2001] | | | | |
| ABU53059 | Human testes-derived protein from | 59 . . . 261 | 96/204 | (47%) | 3e−48 |
| | DKFZphtes3_19f19 - Homo sapiens, | 50 . . . 253 | 138/204 | (67%) | |
| | 254 aa. [WO200112659-A2, 22-FEB-2001] | | | | |
| ABB89935 | Human polypeptide SEQ ID NO 2311 - | 59 . . . 261 | 96/204 | (47%) | 3e−48 |
| | Homo sapiens, 245 aa. | 41 . . . 244 | 138/204 | (67%) | |
| | [WO200190304-A2, 29-NOV-2001] | | | | |

[0709] In a BLAST search of public sequence databases, the NOV61a protein was found to have homology to the proteins shown in the BLASTP data in Table 61E.

TABLE 61E
Public BLASTP Results for NOV61a

| | | NOV61a | Identities/ | | |
|---|---|---|---|---|---|
| Protein | | Residues/ | Similarities for | | |
| Accession | | Match | the Matched | | Expect |
| Number | Protein/Organism/Length | Residues | Portion | | Value |
| Q96JS7 | Similar to RIKEN cDNA 6230416A05 | 45 . . . 262 | 186/220 | (84%) | 1e−96 |
| | gene - Homo sapiens (Human), 321 | 102 . . . 321 | 198/220 | (89%) | |
| | aa (fragment). | | | | |
| Q96AQ8 | Similar to RIKEN cDNA 6230416A05 | 45 . . . 262 | 185/220 | (84%) | 6e−95 |
| | gene - Homo sapiens (Human), 359 | 140 . . . 359 | 197/220 | (89%) | |
| | aa. | | | | |
| Q9NUI2 | DJ500L14.1 (Novel protein) - Homo | 45 . . . 262 | 185/220 | (84%) | 6e−95 |
| | sapiens (Human), 220 aa (fragment). | 1 . . . 220 | 197/220 | (89%) | |
| Q9CXD6 | 6230416A05Rik protein - Mus | 45 . . . 262 | 163/220 | (74%) | 3e−83 |
| | musculus (Mouse), 340 aa. | 121 . . . 340 | 188/220 | (85%) | |
| Q9GZT6 | MDS011 (MDS025) (Hypothetical | 59 . . . 261 | 96/204 | (47%) | 9e−48 |
| | protein) - Homo sapiens (Human), | 50 . . . 253 | 138/204 | (67%) | |
| | 254 aa. | | | | |

[0710] PFam analysis predicts that the NOV61a protein contains the domains shown in the Table 61F.

TABLE 61F
Domain Analysis of NOV61a

| | | | |
|---|---|---|---|
| Pfam | NOV61a | Identities/ | Expect |
| Domain | Match Region | Similarities for | Value |
| | | the Matched Region | |

### Example 62

[0711] The NOV62 clone was analyzed, and the nucleotide and encoded polypeptide sequences are shown in Table 62A.

TABLE 62A
NOV62 Sequence Analysis

| | | |
|---|---|---|
| NOV62a, CG98011-01 | SEQ ID NO: 1201 | 12631 bp |
| DNA Sequence | ORF Start: ATG at 1 | ORF Stop: TAG at 2629 |

ATGATTTACATACAAGTAATTTTTCAAGTAATGACCATTGAAAAAATGTTTTCTTTTTATTTTTTAGA
TTATTTCTCTTTATTCAGAAGCATACAGTTGTTTGCTGATTGCAAGAAGATGTTTCTGTGGCTGTTTC
TGATTTTGTCAGCCCTGATTTCTTCGACAAATGCAGATTCTGACATATCGGTGGAAATTTGCAATGTG
TGTTCCTGCGTGTCAGTTGAGAATGTGCTCTATGTCAACTGTGAGAAGGTTTCAGTCTACAGACCAAA
CAGCTAGAAACCACCTTGGTCTAATTTTTATCACCTCAATTTCCAAAATAATTTTTTAAATATTCTGT
ATCCAAATACATTCTTGAATTTTTCACATGCAGTCTCCCTGCATCTGGGGAATAATAAACTGCAGAAC
ATTGAGGGAGGAGCCTTTCTTGGGCTCAGTGCATTAAAGCAGTTGCACTTGAACAACAATGAATTAAA
GATTCTCCGAGCTGACACTTTCCTTGGCATAGAGAACTTGGAGTATCTCCAGGCTGACTACAATTTAA
TCAAGTATATTGAACTGAGGAGCCTTCAATAAGCTCCACAAACTGAAGTTCTCATTCTTTTTGACAAT
CTGATTTCATTCCTTCCTGATAATATTTTCCGATTCGCATCTTTGACCCATCTGGATATACGAGGGAA
CAGAATCCAGAAGCTCCCTTATATCGGGGTTCTGGAACACATTGGCCGTGTCGTTGAATTGCAACTGG
AACATTTACATAGGAGAAGCTATCTGTGAAACTCCCAGTGACTTATATGGAAGGCTTTTAAAAGAAAC
AGCTGGAAAATGGCTACACCACTCCCAATGGTCACACTACCCAAACATCTTTACACAGATTAGTAACT
AAACCACCAAAAACAACAAATCCTTCCAAGATCTCTGGAATCGTTGCAGGCAAAGCCCTCTCCAACCG
CAATCTCAGTCAGATTGTGTCTTACCAAACAAGGGTGCCTCCTCTAACACCTTGCCCGGCACCTTGCT
TCTGCAAAACACACCCTTCAGATTTGGGACTAAGTGTGAACTGCCAAGAGAAAAATATACAGTCTATG
TCTGAACTGATACCGAAACCTTTAAATGCGAAGAAGCTGCACGTCAATGGCAATAGCATCAAGGATGT
GGACGTATCAGACTTCACTGACTTTGAAGGACTGGATTTGCTTCATCTAGGCAGCAATCAAATTACAG
TGATTAAGGGAGACGTATTTCACAATCTCACTAATTTACGCAGGCTATATCTCAATGGCAATCAAATT
GAGAGACTCTATCCTGAAATATTTTCAGGTCTTCATAACCTGCAGTATCTGTATTTGGAATACAATTT
GATTAAGGAAATCTCAGCAGGCACCTTTGACTCCATGCCAAATTTGCAGTTACTGTACTTAAACAATA
ATCTCCTAAAGAGCCTGCCTGTTTACATCTTTTCCGGAGCACCCTTAGCTAGACTGAACCTGAGGAAC
AACAAATTCATGTACCTGCCTGTCAGTGGGGTCCTTGATCAGTTGCAATCTCTTACACAGATTGACTT
GGAGGGCAACCCATGGGACTGTACTTGTGACTTGGTGGCATTAAAGCTGTGGGTGGAGAAGTTGAGCG
ACGGGATTGTTGTGAAAGAACTGAAATGTGAGACGCCTGTTCAGTTTGCCAACATTGAACTGAAGTCC
CTCAAAAATGAAATCTTATGTCCCAAACTTTTAAATAAGCCGTCTGCACCATTCACAAGCCCTGCACC
TGCCATTACATTCACCACTCCTTTGGGTCCCATTCGAAGTCCTCCTGGTGGGCCAGTGCCTCTGTCTA
TTTTAATCTTAAGTATCTTAGTGGTCCTCATTTTAACGGTGTTTGTTGCTTTTTGCCTTCTTGTTTTT
GTCCTGCGACGCAACAAGAAACCCACAGTGAAGCACGAAGGCCTGGGGAATCCTGACTGTGGCTCCAT
GCAGCTGCAGCTAAGGAAGCATGACCACAAAACCAATAAAAAAGATGGACTGAGCACAGAAGCTTTCA
TTCCACAAACTATAGAACAGATGAGCAAGAGCCACACTTGTGGCTTGAAAGAGTCAGAAACTGGGTTC
ATGTTTTCAGATCCTCCAGGACAGAAAGTTGTTATGAGAAATGTGGCCGACAAGGAGAAAGATTTATT
ACATGTAGATACCAGGAAGAGACTGAGCACAATTGATGAGCTGGATGAATTATTCCCTAGCAGGGATT
CCAATGTGTTTATTCAGAATTTTCTTGAAAGCAAAAAGGAGTATAATAGCATAGGTGTCAGTGGCTTT
GAGATCCGCTATCCAGAAAAACAACCAGACAAAAAAAGTAAGAAGTCACTGATAGGTGGCAACCACAG
TAAAATTGTTGTGGAACAAAGGAAGAGTGAGTATTTTGAACTGAAGGCGAAACTGCAGAGTTCCCCTG
ACTACCTACAGGTCCTTGAGGAGCAAACAGCTTTGAACAAGATCTAG

| | | | |
|---|---|---|---|
| NOV62a, CG98011-01 | | | |
| Protein Sequence | SEQ ID NO: 1202 | 876 aa | MW at 99167.6kD |

MIYIQVIFQVMTIEKMFSFYFLDYFSLFRSIQLFADCKKMFLWLFLILSALISSTNADSDISVEICNV
CSCVSVENVLYVNCEKVSVYRPNQLKPPWSNFYHLNFQNNFLNILYPNTFLNFSHAVSLHLGNNKLQN
IEGGAFLGLSALKQLHLNNNELKILRADTFLGIENLEYLQADYNLIKYIERGAFNKLHKLKVLILNDN
LISFLPDNIFRFASLTHLDIRGNRIQKLPYIGVLEHIGRVVELQLEDNPWNCSCDLLPLKAWLENMPY
NIYIGEAICETPSDLYGRLLKETNKQELCPMGTGSDFDVRILPPSQLENGYTTPNGHTTQTSLHRLVT
KPPKTTNPSKISGIVAGKALSNRNLSQIVSYQTRVPPLTPCPAPCFCKTHPSDLGLSVNCQEKNIQSM
SELIPKPLNAKKLHVNGNSIKDVDVSDFTDFEGLDLLHLGSNQITVIKGDVFHNLTNLRPLYLNGNQI
ERLYPEIFSGLHNLQYLYLEYNLIKEISAGTFDSMPNLQLLYLNNNLLKSLPVYIFSGAPLAELNLRN
NKFMYLPVSGVLDQLQSLTQIDLEGNPWDCTCDLVALKLWVEKLSDGIVVKELKCETPVQFANIELKS
LKNEILCPKLLNKPSAPFTSPAPAITFTTPLGPIRSPPGGPVPLSILILSILVVLILTVFVAFCLLVF
VLRRNKKPTVKHEGLGNPDCGSMQLQLRKHDHKTAKKDGLSTEAFIPQTIEQMSKSHTCGLKESETGF
MFSDPPGQKVVMRNVADKEKDLLHVDTRKRLSTIDELDELFPSRDSNVFIQNFLESKKEYNSIGVSGF
EIRYPEKQPDKKSKKSLIGGNHSKIVVEQRKSEYFELKAXLQSSPDYLQVLEEQTALNKI

| | | |
|---|---|---|
| NOV62b, 192586956 | SEQ ID NO: 1203 | 1800 bp |
| DNA Sequence | ORF Start: at 1 | ORF Stop: end of sequence |

GGATCCGATTCTGACATATCGGTGGAAATTTGCAATGTGTGTTCCTGCGTGTCAGTTGAGAATGTGCT
CTATGTCAACTGTGAGAAGGTTTCAGTCTACAGACCAAATCAGCTGAAACCACCTTGGTCTAATTTTT
ATCACCTCAATTTCCAAAATAATTTTTTAAATATTCTGTATCCAAATACATTCTTGAATTTTTCACAT
GCAGTCTCCCTGCATCTGGGGAATAATAAACTGCAGAACATTGAGGGAGGAGCCTTTCTTGGGCTCAG
TACATTAAAGCAGTTGCACTTGAACAACAATGAATTAAAGATTCTCCGAGCTGACACTTTCCTTGGCA
TAGAGAACTTGGAGTATCTCCAGGCTGACTACAATTTAATCAAGTATATTGAACGAGGAGCCTTCAAT
AAGCTCCACAAACTGAAAGTTCTCATTCTTAATGACAATCTGATTTCATTCCTTCCTGATAATATTTT
CCGATTCGCATCTTTGACCCATCTGGATATACGAGGGAACAGAATCCAGAAGCTCCCTTATATCGGGG
TTCTGGAACACATTGGTCGTGTCGTTGAATTGCAACTGGAAGATAACCCTTGGAACTGTAGCTGTGAT
TTATTGCCCTTAAAAGCTTGGCTGGAGAACATGCCATATAACATTTACATAGGAGAAGCTATCTGTGA
AACTCCCAGTGACTTATATGGAAGGCTTTTAAAAGAAACCAACAAACAAGAGCTATGTCCCATGGGCA
CCGGCAGTGATTTTGACGTGCGCATCCTGCCTCCATCTCAGCTGGAAAATGGCTACACCACTCCCAAT
GGTCACACTACCCAAACATCTTTACACAGATTAGTAACTAAACCACCAAAAACAACAAATCCTTCCAA
GATCTCTGGAATCGTTGCAGGTAAAGCCCTCTCCAACCGCAATCTCAGTCAGATTGTGTCTTACCAAA
CAAGGGTGCCTCCTCTAACACCTTGCCCGGCACCTTGCTTCTGCAAAACACACCCTTCAGATTTGGGA
CTAAGTGTGAACTGCCAAGAGAAAAATATACAGTCTATGTCTGAACTGATACCGAAACCTTTAAATGC
GAAGAAGCTGCACGTCAATGGCAATAGCATCAAGGATGTGGACGTATCAGACTTCACTGACTTTGAAG
GACTGGATTTGCTTCATTTAGGCAGCAATCAAATTACAGTGATTAAGGGAGACGTATTTCACAATCTC
ACTAATTTACGCAGGCTATATCTCAATGGCAATCAAATTGAGAGACTCTATCCTGAAATATTTTCAGG
TCTTCATAACCTGCAGTATCTGTATTTGGAATACAATTTGATTAAGGAAATCTCAGCAGGCACCTTTG
ACTCCATGCCAAATTTGCAGTTACTGTACTTAAGCAATAATCTCCTAAAGAGCCTGCCTGTTTACATC
TTTTCCGGAGCACCCTTAGCTAGACTGAACCTGAGGAACAACATATTCATGTACCTGCCTGTCAGTGG
GGTCCTTGATCAGTTGCAATCTCTTACACAGATTGACTTGGAGGGCAGCCCATGGGACTATACTTGTG
ACTTGGTGGCATTAAAGCTGTGGGTGGAGAAGTTGAGCGACGGGATTGTTGTGAAAGAACTGAAATGT
TTTTCCGGAGCACCCTTAGCTAGACTGAACCTGAGGAACAACAAATTCATGTACCTGCCTGTCAGTGG
TTTAAATAAGCCGTCTGCACCATTCACAAGCCCTGCACCTGCCATTACATTCACCACTCCTTTGGGTC
CCATTCGAAGTCCTCCTGGTGGGCCACTCGAG

| | | | |
|---|---|---|---|
| NOV62b, 192586956 | | | |
| Protein Sequence | SEQ ID NO: 1204 | 1600 aa | MW at 67403.8kD |

GSDSDISVEICNVCSCVSVENVLYVNCEKVSVYRPNQLKPPWSNFYHLNFQNNFLNILYPNTFLNFSH
AVSLHLGNNKLQNIEGGAFLGLSTLKQLHLNNNELKILRADTFLGIENLEYLQADYNLIKYIERGAFN
KLHKLKVLILNDNLISFLPDNIFRFASLTHLDIRGNRIQKLPYIGVLEHIGRVVELQLEDNPWNCSCD
LLPLKAWLENMPYNIYIGEAICETPSDLYGRLLKETNKQELCPMGTGSDFDVRILPPSQLENGYTTPN
GHTTQTSLHRLVTKPPKTTNPSKISGIVAGKALSNRNLSQIVSYQTRVPPLTPCPAPCFCKTHPSDLG
LSVNCQEKNIQSMSELIPKPLNAKKLHVNGNSIKDVDVSDFTDFEGLDLLHLGSNQITVIKGDVFHNL
TNLRRLYLNGNQIERLYPEIFSGLHNLQYLYLEYNLIKEISAGTFDSMPNLQLLYLSNNLLKSLPVYI
FSGAPLARLNLRNNKFMYLPVSGVLDQLQSLTQIDLEGSPWDYTCDLVALKLWVEKLSDGIVVKELKC
IETPVQFTNIELKSLKEILCPKLLNKPSAPFTSPAPAITFTTPLGPIRSPPGGPLE

| | | |
|---|---|---|
| NOV62c, 191999007 | SEQ ID NO: 1205 | 1800 bp |
| DNA Sequence | ORF Start: at 1 | ORF Stop: end of sequence |

GGATCCGATTCTGACATATCGGTGGAAATTTGCAATGTGTGTTCCTGCGTGTCAGTTGAGAATGTGCT
CTATGTCAACTGTGAGAAGGTTTCAGTCTACAGACCAAATCAGCTGAAACCACCTTGGTCTAATTTTT
ATCACCTCAATTTCCAATAATTTTTTAATTTTATTCTGTATCCAAATACATTCTTGAATTTTTCACAT
GCAGTCTCCCTGCATCTGGGGAATAATAAACTGCAGAACATTGAGGGAGGAGCCTTTCTTGGGCTCAG
TGCATTAAAGCAGTTGCACTTGAACAACAATGAATTAAAGATTCTCCGAGCTGACACTTTCCCTGGCA
TAGAGAACTTGGAGTATCTCCAGGCTGACTACAATTTAATCAAGTATATTGAACGAGGAGCCTTCAAT
AAGCTCCACAAACTGAAAGTTCTCATTCTTAATGACAATCTGATTTCATTCCTTCCTGATAATATTTT
CCGATTCGCATCTTTGACCCATCTGGATATACGAGGGAACAGAATCCAGAAGCTCCCTTATATCGGGG
TTCTGGAACACATTGGCCGTGTCGTTGAATTGCAACTGGAAGATAACCCTTGGAACTGTAGCTGTGAT
TTATTGCCCTTAAAAGCTTGGCTGGAGAACATGCCATATAACATTTACATAGGAGAAGCTATCTGTGA
AACTCCCAGTGACTTATATGGAAGGCTTTTAAAAGAAACCAACAAACAAGAGCTATGTCCCATGGGCA
CCGGCAGTGATTTTGACGTGCGCATCCTGCCTCCATCTCAGCTGGAAAATGGCTACACCACTCCCAAT
GGTCACACTACCCAAACATCTTTACACAGATTAGTAACTAAACCACCAAAAACAACAAATCCTTCCAA
GATCTCTGGAATCGTTGCAGGCAAAGCCCTCTCCAACCGCAATCTCAGTCAGATTGTGTCTTACCAAA
CAAGGGTGCCTCCTCTAACACCTTGCCCGGCACCTTGCTTCTGCAAAACACACCCTTCAGATTTGGGA
CTAAGTGTGAACTGCCAAGAGAAAAATATACAGTCTATGTCTGAACTGATACCGAAACCTTTAAATGC
GAAGAAGCTGCACGTCAATGGCAATAGCATCAAGGATGTGGACGTATCAGACTTCACTGACTTTGAAG
GACTGGATTTGCTTCATTTAGGCAGCAATCAAATTACAGTGATTAAGGGAGACGTATTTCACAATCTC
ACTAATTTACGCAGGCTATATCTCAATGGCAATCAAATTGAGAGACTCTATCCTGAAATATTTTCAGG
TCTTCATAACCTGCAGTATCTGTATTTGGAATACAATTTGATTAAGGAAATCTCAGCAGGCACCTTTG
ACTCCATGCCAAATTTGCAGTTACTGTACTTAAACAATAATCTCCTAAAGAGCCTGCCTGTTTACATC
TTTTCCGGAGCACCCTTAGCTAGACTGAACCTGAGGAACAACAAATTCATGTACCTGCCTGTCAGTGG
GGTCCTTGATCAGTTGCAATCTCTTACACAGATTGACTTGGAGGGCAACCCATGGGACTGTACTTGTG
ACTTGGTGGCATTAAAGCTGTGGGTGGGGAAGTTGAGCGACGGGATTGTTGTGAAAGAACTGAAATGT
GAGACGCCTGTTCAGTTTGCCAACATTGAACTGAAGTCCCTCAAAAATGAAATCTTATGTCCCAAACT
TTTAAATAAGCCGTCTGCACCATTCACAAGCCCTGCACCTACCATTACATTCACCACTCCTTTGGGTC
CCATTCGAAGTCCTCCTGGTGGGCCACTCGAG

| | | | |
|---|---|---|---|
| NOV62c, 191999007 | | | |
| Protein Sequence | SEQ ID NO: 1206 | 600 aa | MW at 67279.7kD |

GSDSDISVEICNVCSCVSVENVLYVNCEKVSVYRPNQLKPPWSNFYHLNFQNNFLNTLYPNTFLNFSH
AVSLHLGNNKLQNIEGGAFLGLSALKQLHLNNNELKILRADTFPGIENLEYLQADYNLIKYIERGAFN
KLHKLKVLILNDNLISFLPDNIFRFASLTHLDIRGNRIQKLPYIGVLEHIGRVVELQLEDNPWNCSCD
LLPLKAWLENMPYNIYIGEAICETPSDLYGRLLKETNKQELCPMGTGSDFDVRILPPSQLENGYTTPN
GHTTQTSLHRLVTKPPKTTNPSKISGIVAGKALSNRNLSQIVSYQTRVPPLTPCPAPCFCKTHPSDLG
LSVNCQEKNIQSMSELIPKPLNAKKLHVNGNSIKDVDVSDFTDFEGLDLLHLGSNQITVIKGDVFHNL
TNLRRLYLNGNQIERLYPEIFSGLHNLQYLYLEYNLIKEISAGTFDSMPNLQLLYLNNNLLKSLPVYI
FSGAPLARLNLRNNKFMYLPVSGVLDQLQSLTQIDLEGNPWDCTCDLVALKLWVGKLSDGIVVKELKC
ETPVQFANIELKSLKNEILCPKLLNKPSAPFTSPAPTITFTTPLGPIRSPPGGPLE

| | | |
|---|---|---|
| NOV62d, CG98011-02 | SEQ ID NO: 1207 | 12654 bp |
| DNA Sequence | ORF Start: ATG at 19 | ORF Stop: TAG at 2647 |

CCATGTGTTCACTATGGTATGATTTACATACAAGTAATTTTTCAAGTAATGACCATTGAAAAAATGTT
TTCTTTTTATTTTTTAGATTATTTCTCTTTATTCAGAAGCATACAGTTGTTTGCTGATTGCAAGAAGA
TGTTTCTGTGGCTGTTTCTGATTTTGTCAGCCCTGATTTCTTCGACAAATGCAGATTCTGACATATCG
GTGGAAATTTGCAATGTGTGTTCCTGCGTGTCAGTTGAGAATGTGCTCTATGTCAACTGTGAGAAGGT
TTCAGTCTACAGACCAAATCAGCTGAAACCACCTTGGTCTAATTTTTATCACCTCAATTTCCAAAATA
ATTTTTTAAATATTCTGTATCCAAATACATTCTTGAATTTTTCACATGCAGTCTCCCTGCATCTGGGG
AATAATAAACTGCAGAACATTGAGGGAGGAGCCTTTCTTGGGCTCAGTGCATTAAAGCAGTTGCACTT
GAACAACAATGAATTAAAGATTCTCCGAGCTGACACTTTCCTTGGCATAGAGAACTTGGAGTATCTCC
AGGCTGACTACAATTTAATCAAGTATATTGAACGAGGAGCCTTCAATAAGCTCCACAAACTGAAAGTT
CTCATTCTTAATGACAATCTGATTTCATTCCTTCCTGATAATATTTTCCGATTCGCATCTTTGACCCA
TCTGGATATACGAGGGAACAGAATCCAGAAGCTCCCTTATATCGGGGTTCTGGAACACATTGGCCGTG
TCGTTGAATTGCAACTGGAAGATAACCCTTGGAACTGTAGCTGTGATTTATTGCCCTTAAAAGCTTGG
CTGGAGAACATGCCATATAACATTTACATAGGAGAAGCTATCTGTGAAACTCCCAGTGACTTATATGG
AAGGCTTTTAAAGAAACCAACAAACAAGAGCTATGATCCCATGGGCACCGGCAGTGATTTTGACGTGC
GCATCCTGCCTCCATCTCAGCTGGAAAATGGCTACACCACTCCCAATGGTCACACTACCCAAACATCT
TTACACAGATTAGTAACTAACCACCAAAAACAACAAATCACTTCCAAGATCTCTGGAATCGTTGCAGG
CAAAGCCCTCTCCAACCGCAATCTCAGTCAGATTGTGTCTTACCAAACAAGGGTGCCTCCTCTAACAC
CTTGCCCGGCACCTTGCTTCTGCAAAACACACCCTTCAGATTTGGGACTAAGTGTGAACTGCCAAGAG
AAAATATACAGTCTATGTCTGAACTGATACCGAAACCTTTAAAATGCGAAGAAGCTGCACGTCAATGG
CAATAGCATCAAGGATGTGGACGTATCAGACTTCACTGACTTTGAAGGACTGGATTTGCTTCATTTAG
GCAGCAATCAAATTACAGTGATTAAGGGAGACGTATTTCACAATCTCACTAATTTACGCAGGCTATAT
CTCAATGGCAATCAAATTGAGAGACTCTATCCTGAAATATTTTCAGGTCTTCATAACCTGCAGTATCT
GTATTTGGAATACAATTTGATTAAGGAAATCTCAGCAGGCACCTTTGACTCCATGCCAAATTTGCAGT
TACTGTACTTAAACAATAATCTCCTAAAGAGCCTGCCTGTTTACATCTTTTCCGGAGCACCCTTAGCT
AGACTGAACCTGAGGAACAACAAATTCATGTACCTGCCTGTCAGTGGGGTCCTTGATCAGTTGCAATC
TCTTACACAGATTGACTTGGAGGGCAACCCATGGGACTGTACTTGTGACTTGGTGGCATTAAAGCTGT
GGGTGGAGAAGTTGAGCGACGGGATTGTTGTGAAAGAACTGAAATGTGAGACGCCTGTTCAGTTTGCC
AACATTGAACTGAAGTCCCTCAAAAATGAAATCTTATGTCCCAAACTTTTAAATAAGCCGTCTGCACC
ATTCACAAGCCCTGCACCTGCCATTACATTCACCACTCCTTTGGGTCCCATTCGAAGTCCTCCTGGTG
GGCCAGTGCCTCTGTCTATTTTAATCTTAAGTATCTTAGTGGTCCTCATTTTAACGGTGTTTGTTGCT
TTTTGCCTTCTTGTTTTTGTCCTGCGACGCAACAAGAAACCCACAGTGAAGCACGAAGGCCTGGGGAA
TCCTGACTGTGGCTCCATGCAGCTGCAGCTAAGGAAGCATGACCACAAAACCAATAAAAAAGATGGAC
TGAGCACAGAAGCTTTCATTCCACAAACTATAGAACAGATGAGCAAGAGCCACACTTGTGGCTTGAAA
GAGTCAGAAACTGGGTTCATGTTTTCAGATCCTCCAGGACAGAAAGTTGTTATGAGAAATGTGGCCGA
CAAGGAGAAAGATTTATTACATGTAGATACCAGGAAGAGACTGAGCACAATTGATGAGCTGGATGAAT
TATTCCCTAGCAGGGATTCCAATGTGTTTATTCAGAATTTTCTTGAAAGCAAAAAGGAGTATAATAGC
ATAGGTGTCAGTGGCTTTGAGATCCGCTATCCAGAAAAACAACCAGACAAAAAAAGTAAGAAGTCACT
GATAGGTGGCAACCACAGTAAAATTGTTGTGGAACAAAGGAAGAGTGAGTATTTTGAACTGAAGGCGA
AACTGCAGAGTTCCCCTGACTACCTACAGGTCCTTGAGGAGCAAACAGCTTTGAACAAGATCTAGGTC
AT

| | | | |
|---|---|---|---|
| NOV62d, CG9801 -02 | | | |
| Protein Sequence | SEQ ID NO: 1208 | 876 aa | MW at 99167.6kD |

MIYIQVIFQVMTIEKMFSFYFLDYFSLFRSIQLFADCKKMFLWLFLILSALISSTNADSDISVEICNV
CSCVSVENVLYVNCEKVSVYRPNQLKPPWSNFYHLNFQNNFLNILYPNTFLNFSHAVSLHLGNNKLQN
IEGGAFLGLSALKQLHLNNNELKILRADTFLGIENLEYLQADYNLIKYIERGAFNKLHKLKVLILNDN
LISFLPDNIFRFASLTHLDIRGNRIQKLPYIGVLEHIGRWELQLEDNPWNCSCDLLPLKAAWLENMPY
NIYIGEAICETPSDLYGRLLKETNKQELCPMGTGSDFDVRILPPSQLENGYTTPNGHTTQTSLHRLVT
KPPKTTNPSKISGIVAGKALSNRNLSQIVSYQTRVPPLTPCPAPCFCKTHPSDLGLSVNCQEKNIQSM
SELIPKPLNAKKLHVNGNSIKDVDVSDFTDFEGLDLLHLGSNQITVIKGDVFHNLTNLRRLYLNGNQI
ERLYPEIFSGLHNLQYLYLEYNLIKEISAGTFDSMPNLQLLYLNNNLLKSLPVYIFSGAPLARLNLRN
NKFMYLPVSGVLDQLQSLTQIDLEGNPWDCTCDLVALKLWVEKLSDGIVVKELKCETPVQFANIELKS
LKNEILCPKLLNKPSAPFTSPAPAITFTTPLGPIRSPPGGPVPLSILILSILVVLILTVFVAFCLLVF
VLRRNKKPTVKHEGLGNPDCGSMQLQLRKHDHKTNKKDGLSTEAFIPQTIEQMSKSHTCGLKESETGF
MFSDPPGQKVTMRNVADKEKDLLHVDTRKRLSTIDELDELFPSRDSNVFIQNFLESKKEYNSIGVSGF
EIRYPEKQPDKKSKKSLIGGNHSKIVVEQRKSEYFELKAXLQSSPDYLQVLEEQTALNKI

| | | |
|---|---|---|
| NOV62e, CG98011-03 | SEQ ID NO: 1209 | 12469 bp |
| DNA Sequence | ORF Start: at 7 | ORF Stop: at 2464 |

GGATCCGATTCTGACATATCGGTGGAAATTTGCAATGTGTGTTCCTGCGTGTCAGTTGAGAATGTGCT
CTATGTCAACTGTGAGAAGGTTTCAGTCTACAGGCCAAATCAGCTGAAACCACCTTGGTCTAATTTTT
ATCACCTCAATTTCCAAAATAATTTTTTAAATATTCTGTATCCAAATACATTCTTGAATTTTTCACAT
GCAGTCTCCCTGCATCTGGGGAATAATAAACTGCAGAACATTGAGGGAGGAGCCTTTCTTGGGCTCAG
TGCATTAAAGCAGTTGCACTTGAACAACAATGAATTAAAGATTCTCCGAGCTGACACTTTCCTTGGCA
TAGAGAACTTGGAGTATCTCCAGGCTGACTACAATTTAATCMiGTATATTGAACGAGGAGCCTTCAAT
AAGCTCCACAAACTGAAAGTTCTCATTCTTAATGACAATCTGATTTCATTCCTTCCTGATAATATTTT
CCGATTCGCATCTTTGACCCATCTGGATATACGAGGGAACAGAATCCAGAAGCTCCCTTATATCGGGG
TTCTGGATCACATTGGCCGTGTCGTTGAATTGCAACTGGAAGATAACCCTTGGAACTGTAGCTGTGAT
TTATTGCCCTTAAAAGCTTGGCTGGAGAACATGCCATATAACATTTACATAGGAGAAGCTATCTGTGA
AACTCCCAGTGACCTATATGGAAGGCTTTTAAAAGAAACCAACAAACAAGAGCTATGTCCCATGGGCA
CCGGCAGTGATTTTGACGTGCGCATCCTGCCTCCATCTCAGCTGGAAAATGGCTACACCACTCCCAAT
GGTCACACTACCCAAACATCTTTACACAGATTAGTAACTAAACCACCAAAAACAACAAATCCTTCCAA
GATCTCTGGAATCGTTGCAGGCAAAGCCCTCTCCAACCGCAATCTCAGTCAGATTGTGTCTTACCAAA
CAAGGGTGCCTCCTCTAACACCTTGCCCGGCACCTTGCTTCTGCAAAACACACCCTTCAGATTTGGGA
CTAAGTGTGAACTGCCAAGAGAAAAATATACAGTCTATGTCTGAACTGATACCGAAACCTTTAAATGC
GAAGAAGCTGCACGTCAATGGCAATAGCATCAAGGATGTGGACGTATCAGACTTCACTGACTTTGAAG
GACTGGATTTGCTTCATTTAGGCAGCAATCAAATTACAGTGATTAAGGGAGACGTATTTCACAATCTC
ACTAATTTACGCAGGCTATATCTCAATGGCAATCAAATTGAGAGACTCTATCCTGAAATATTTTCAGG
TCTTCATAACCTGCAGTATCCGTATTTGGAATACAATTTGATTAAGGAAATCTCAGCAGGCACCTTTG
ACTCCATGCCAAATTTGCAGTTACTGTACTTAAACAATAATCTCCTAAAGAGCCTGCCTGTTTACATC
TTTTCCGGAGCACCCTTAGCTAGACTGAACCTGAGGAACAACAAATTCATGTACCTGCCTGTCAGTGG
GGTCCTTGATCAGTTGCAATCTCTTACACAGATTGACTTGGAGGGCAACCCATGGGACTGTACTTGTG
ACTTGGTGGCATTAAAGCTGTGGGTGGAGAAGTTGAGCGACGGGATTGTTGTGAAAGAACTGAAATGT
GAGACGCCTGTTCAGTTTGCCAACATTGAACTGAAGTCCCTCAAAAATGAAATCTTATGTCCCAAACT
TTTAAATAAGCCGTCTGCACCATTCACAAGCCCTGCACCTGCCATTACATTCACCACTCCTTTGGGTC
CCATTCGAAGTCCTCCTGGTGGGCCAGTGCCTCTGTCTATTTTAATCTTAAGTATCTTAGTGGTCCTC
ATTTTAACGGTGTTTGTTGCTTTTTGCCTTCTTGTTTTTGTCCTGCGACGCAACAAGAAACCCACAGT
GAAGCACGAAGGCCTGGGGAATCCTGACTGTGGCTCCATGCAGCTGCAGCTAAGGAAGCATGACCACA
AAACCAATAAAAAAGATGGACTGAGCACAGAAGCTTTCATTCCACAAACTATAGAACAGATGAGCAAG
AGCCACACTTGTGGCTTGAAAGAGTCAGAAACTGGGTTCATGTTTTCAGATCCTCCAGGACAGAAAGT
TGTTATGAGAAATGTGGCCGACAAGGAGAAAGATTTATTACATGTAGATACCAGGAAGAGACTGAGCA
CAATTGATGAGCTGGATGAATTATTCCCTAGCAGGGATTCCAATGTGTTTATTCAGAATTTTCTTGAA
AGCAAAAAGGAGTATAATAGCATAGGTGTCAGTGGCTTTGAGATCCGCTATCCAGAAAAACAACCAGA
CAAAAAAAGTAAGAAGTCACTGATAGGTGGCAACCACAGTAAAATTGTTGTGGAACAAAGGAAGAGTG
AGTATTTTGAACTGAAGGCGAAACTGCAGAGTTCCCCTGACTACCTACAGGTCCTTGAGGAGCAAACA
GCTTTGAACAAGATCCTCGAG

| | | | |
|---|---|---|---|
| NOV62e, CG98011-03 | | | |
| Protein Sequence | SEQ ID NO: 1210 | 819 aa | MW at 92291.4kD |

DSDISVEICNVCSCVSVENVLYVNCEKVSVYRPNQLKPPWSNFYHLNFQNNFLNILYPNTFLNFSHAV
SLHLGNNKLQNIEGGAFLGLSALKQLHLNNNELKILRADTFLGIENLEYLQADYNLIKYIERGAFNKL
HKLKVLILNDNLISFLPDNIFRFASLTHLDIRGNRIQKLPYIGVLEHIGRVVELQLEDNPWNCSCDLL
PLKAWLENMPYNIYIGEAICETPSDLYGRLLKETNKQELCPMGTGSDFDVRILPPSQLENGYTTPNGH
TTQTSLHRLVTKPPKTTNPSKISGIVAGKALSNRNLSQIVSYQTRVPPLTPCPAPCFCKTHPSDLGLS
VNCQEKNIQSMSELIPKPLNAKKLHVNGNSIKDVDVSDFTDFEGLDLLHLGSNQITVIKGDVFHNLTN
LRRLYLNGNQIERLYPEIFSGLHNLQYPYLEYNLIKEISAGTFDSMPNLQLLYLNNNLLKSLPVYIFS
GAPLARLNLRNNKFMYLPVSGVLDQLQSLTQIDLEGNPWDCTCDLVALKLWVEKLSDAGIWKELKCET
PVQFANIELKSLKNEILCPKLLNKPSAPFTSPAPAITFTTPLGPIRSPPGGPVPLSILILSILVVLIL
TVFVAFCLLVFVLRRNKKPTVKHEGLGNPDCGSMQLQLRKHDHKTNKKDGLSTEAFIPQTIEQMSKSH
TCGLKESETGFMFSDPPGQKVVMRNVADKEKDLLHVDTRKRLSTIDELDELFPSRDSNVFIQNFLESK
KEYNSIGVSGFEIRYPEKQPDKKSKKSLIGGNHSKIVVEQRKSEYFELKAKLQSSPDYLQVLEEQTAL
NKI

| | | |
|---|---|---|
| NOV62f, CG98011-04 | SEQ ID NO: 1211 | 1800 bp |
| DNA Sequence | ORF Start: at 7 | ORF Stop: at 1795 |

GGATCCGATTCTGACATATCGGTGGAAATTTGCAATGTGTGTTCCTGCGTGTCAGTTGAGAATGTGCT
CTATGTCAACTGTGAGAAGGTTTCAGTCTACAGACCAAATCAGCTGAAACCACCTTGGTCTAATTTTT
ATCACCTCAATTTCCAAAATAATTTTTTAAATATTCTGTATCCAAATACATTCTTGAATTTTTCACAT
GCAGTCTCCCTGCATCTGGGGAATAATAAACTGCAGAACATTGAGGGAGGAGCCTTTCTTGGGCTCAG
TGCATTAAAGCAGTTGCACTTGAACAACAATGAATTAAAGATTCTCCGAGCTGACACTTTCCCTGGCA
TAGAGAACTTGGAGTATCTCCAGGCTGACTACAATTTAATCAAGTATATTGAACGAGGAGCCTTCAAT
AAGCTCCACAAACTGAAAGTTCTCATTCTTAATGACAATCTGATTTCATTCCTTCCTGATAATATTTT
CCGATTCGCATCTTTGACCCATCTGGATATACGAGGGAACAGAATCCAGAAGCTCCCTTATATCGGGG
TTTCTGGACACATTGGCCGTGTCGTTGAATTGCAACTGGAAGATAACCCTTGGAACTGTAGCTGTGAT
TTATTGCCCTTAAAAGCTTGGCTGGAGAACATGCCATATAACATTTACATAGGAGAAGCTATCTGTGA
AACTCCCAGTGACTTATATGGAAGGCTTTTAAAAGAAACCAACAAACAAGAGCTATGTCCCATGGGCA
CCGGCAGTGATTTTGACGTGCGCATCCTGCCTCCATCTCAGCTGGAAAATGGCTACACCACTCCCAAT
GGTCACACTACCCAAACATCTTTACACAGATTAGTAACTAAACCACCAAAAACAACAAATCCTTCCAA
GATCTCTGGAATCGTTGCAGGCAAAGCCCTCTCCAACCGCAATCTCAGTCAGATTGTGTCTTACCAAA
CAAGGGTGCCTCCTCTAACACCTTGCCCGGCACCTTGCTTCTGCAAAACACACCCTTCAGATTTGGGA
CTAAGTGTGAACTGCCAAGAGAAAAATATACAGTCTATGTCTGAACTGATACCGAAACCTTTAAATGC
GATGAAGCTGCACGTCAATGGCAATAGCATCAAGGATGTGGACGTATCAGACTTCACTGACTTTGAAG
GACTGGATTTGCTTCATTTAGGCAGCAATCAAATTACAGTGATTAAGGGAGACGTATTTCACAATCTC
ACTAATTTACGCAGGCTATATCTCAATGGCAATCAAATTGAGAGACTCTATCCTGAAATATTTTCAGG
TCTTCATAACCTGCAGTATCTGTATTTGGAATACAATTTGATTAAGGAAATCTCAGCAGGCACCTTTG
ACTCCATGCCAAATTTGCAGTTACTGTACTTAAACAATAATCTCCTAAAGAGCCTGCCTGTTTACATC
TTTTCCGGAGCACCCTTAGCTAGACTGAACCTGAGGAACAACAAATTCATGTACCTGCCTGTCAGTGG
GGTCCTTGATCAGTTGCAATCTCTTACACAGATTGACTTGGAGGGCAACCCATGGGACTGTACTTGTG
ACTTGGTGGCATTAAAGCTGTGGGTGGGGAAGTTGAGCGACGGGATTGTTGTGAAAGAACTGAAATGT
GAGACGCCTGTTCAGTTTGCCAACATTGAACTGAAGTCCCTCAAAAATGAAATCTTATGTCCCAAACT
TTTAAATAAGCCGTCTGCACCATTCACAAGCCCTGCACCTACCATTACATTCACCACTCCTTTGGGTC
CCATTCGAAGTCCTCCTGGTGGGCCACTCGAG

| | | | |
|---|---|---|---|
| NOV62f, CG98011-04 | | | |
| Protein Sequence | SEQ ID NO: 1212 | 596 aa | MW at 66893.3kD |

DSDISVEICNVCSCVSVENVLYVNCEKVSVYRPNQLKPPWSNFYHLNFQNNFLNILYPNTFLNFSHAV
SLHLGNNKLQNIEGGAFLGLSALKQLHLNNNELKILRADTFPGIENLEYLQADYNLIKYIERGAFNKL
HKLKVLILNDNLISFLPDNIFRFASLTHLDIRGNRIQKLPYIGVLEHIGRWELQLEDANPWNCSCDLL
PLKWLENMPYNIYIGEAICETPSDLYGRLLKETNKQELCPMGTGSDFDVRILPPSQALENGYTTPNGH
TTQTSLHRLVTKPPKTTNPSKISGIVAGKALSNRNLSQIVSYQTRVPPLTPCPAPCFCKTHPSDLGLS
VNCQEKNIQSMSELIPKPLNAKKLHVNGNSIKDVDVSDFTDFEGLDLLHLGSNQITVIKGDVFHNLTN
LRRLYLNGNQIERLYPEIFSGLHNLQYLYLEYNLIKEISAGTFDSMPNLQLLYLNNNLLKSLPVYIFS
GAPLARLNLRNNKFMYLPVSGVLDQLQSLTQIDLEGNPWDCTCDLVALKLWVGKLSDGIVVKELKCET
PVQFANIELKSLKNEILCPKLLNKPSAPFTSPAPTITFTTPLGPIRSPPGGP

[0712] A ClustalW comparison of the above protein sequences yields the following sequence alignment shown in Table 62B.

TABLE 62B

Comparison of the NOV62 protein sequences.

| | |
|---|---|
| NOV62a | MIYIQVIFQVMTIEKMFSFYFLDYFSLFRSIQLFADCKKMFLWLFLILSALISSTNADSD |
| NOV62b | -------------------------------------------------------GSDSD |
| NOV62c | -------------------------------------------------------GSDSD |
| NOV62d | MIYIQVIFQVMTTEKMFSFYFLDYFSLFRSIQLFADCKKMFLWLFLILSALISSTNADSD |
| NOV62e | ---------------------------------------------------------DSD |
| NOV62f | ---------------------------------------------------------DSD |
| NOV62a | ISVEICNVCSCVSVENVLYVNCEKVSVYRPNQLKPPWSNFYHLNFQNNFLNILYPNTFLN |
| NOV62b | ISVEICNVCSCVSVENVLYVNCEKVSVYRPNQLKPPWSNFYHLNFQNNFLNILYPNTFLN |
| NOV62c | ISVEICNVCSCVSVENVLYVNCEKVSVYRPNQLKPPWSNFYHLNFQNNFLNILYPNTFLN |
| NOV62d | ISVEICNVCSCVSVENVLYVNCEKVSVYRPNQLKPPWSNFYHLNFQNNFLNILYPNTFLN |
| NOV62e | ISVEICNVCSCVSVENVLYVNCEKVSVYRPNQLKPPWSNFYHLNFQNNFLNILYPNTFLN |
| NOV62f | ISVEICNVCSCVSVENVLYVNCEKVSVYRPNQLKPPWSNFYHLNFQNNFLNILYPNTFLN |
| NOV62a | FSHAVSLHLGNNKLQNIEGGAFLGLSALKQLHLNNNELKILRADTFLGIENLEYLQADYN |
| NOV62b | FSHAVSLHLGNNKLQNIEGGAFLGLSTLKQLHLNNNELKILRADTFLGIENLEYLQADYN |
| NOV62c | FSHAVSLHLGNNKLQNIEGGAFLGLSALKQLHLNNNELKILRADTFPGIENLEYLQADYN |
| NOV62d | FSHAVSLHLGNNKLQNIEGGAFLGLSALKQLHLNNNELKILRADTFLGIENLEYLQADYN |
| NOV62e | FSHAVSLHLGNNKLQNIEGGAFLGLSALKQLHLNNNELKILRADTFLGIENLEYLQADYN |
| NOV62f | FSHAVSLHLGNNKLQNIEGGAFLGLSALKQLHLNNNELKILRADTFPGIENLEYLQADYN |
| NOV62a | LIKYIERGAFNKLHKLKVLILNDNLISFLPDNIFRFASLTHLDIRGNRIQKLPYIGVLEH |
| NOV62b | LIKYIERGAFNKLHKLKVLILNDNLISFLPDNIFRFASLTHLDIRGNRIQKLPYIGVLEH |
| NOV62c | LIKYIERGAFNKLHKLKVLILNDNLISFLPDNIFRFASLTHLDIRGNRIQKLPYIGVLEH |
| NOV62d | LIKYIERGAFNKLHKLKVLILNDNLISFLPDNIFRFASLTHLDIRGNRIQKLPYIGVLEH |
| NOV62e | LIKYIERGAFNKLHKLKVLILNDNLISFLPDNIFRFASLTHLDIRGNRIQKLPYIGVLEH |
| Nov62f | LIKYIERGAFNKLHKLKVLILNDNLISFLPDNIFRFASLTHLDIRGNRIQKLPYIGVLEH |
| NOV62a | IGRVVELQLEDNPWNCSCDLLPLKAWLENNPYNIYIGEAICETPSDLYGRLLKETNKQEL |
| NOV62b | IGRVVELQLEDNPWNCSCDLLPLKAWLENMPYNIYIGEAICETPSDLYGRLLKEThKQEL |
| NOV62c | IGRVVELQLEDNPWNCSCDLLPLKAWLENMPYNIYIGEAICETPSDLYGRLLKETNKQEL |
| NOV62d | IGRVVELQLEDNPWNCSCDLLPLKAWLENNPYNIYIGEAICETPSDLYGRLLKETNKQEL |
| NOV62e | IGRVVELQLEDNPWNCSCDLLPLKAWLENMPYNIYIGEAICETPSDLYGRLLKETNKQEL |
| NOV62f | IGRVVELQLEDNPWNCSCDLLPLKAWLENNPYNIYIGEAICETPSDLYGRLLKETNKQEL |
| NOV62a | CPMGTGSDFDVRILPPSQLENGYTTPNGHTTQTSLHRLVTKPPKTTNPSKISGIVAGKAL |
| NOV62b | CPMGTGSDFDVRTLPPSQLENGYTTPNGHTTQTSLHRLVTKPPKTTNPSKISGIVAGKAL |
| NOV62c | CPMGTGSDFDVRILPPSQLENGYTTPNGHTTQTSLHRLVTKPPKTTNPSKISGIVAGKAL |
| NOV62d | CPMGTGSDFDVRILPPSQLENGYTTPNGHTTQTSLHRLVTKPPKTTNPSKISGIVAGKAL |
| NOV62e | CPMGTGSDFDVRILPPSQLENGYTTPNGHTTQTSLHRLVTKPPKTTNPSKISGIVAGKAL |
| NOV62f | CPMGTGSDFDVRILPPSQLENGYTTPNGHTTQTSLHRLVTKPPKTTNPSKISGIVAGKAL |
| NOV62a | SNRNLSQIVSYQTRVPPLTPCPAPCFCKTHPSDLGLSVNCQEKNIQSMSELIPKPLNAKK |
| NOV62b | SNRNLSQIVSYQTRVPPLTPCPAPCFCKTHPSDLGLSVNCQEKNIQSMSELIPKPLNAKK |
| NOV62c | SNRNLSQIVSYQTRVPPLTPCPAPCFCKTHPSDLGLSVNCQEKNTQSMSELIPKPLNAKK |
| NOV62d | SNRNLSQIVSYQTRVPPLTPCPAPCFCKTHPSDLGLSVNCQEKNIQSMSELIPKPLNAKK |
| NOV62e | SNRNLSQIVSYQTRVPPLTPCPAPCFCKTHPSDLGLSVNCQEKNIQSMSELIPKPLNAKK |
| NOV62f | SNRNLSQIVSYQTRVPPLTPCPAPCFCKTHPSDLGLSVNCQEKNIQSMSELIPKPLNAKK |
| NOV62a | LHVNGNSIKDVDVSDFTDFEGLDLLHLGSNQITVIKGDVFHNLTNLRRLYLNGNQIERLY |
| NOV62b | LHVNGNSIKDVDVSDFTDFEGLDLLHLGSNQITVIKGDVFHNLTNLRRLYLNGNQIERLY |
| NOV62c | LHVNGNSIKDVDVSDFTDFEGLDLLHLGSNQITVIKGDVFHNLTNLRRLYLNGNQIERLY |
| NOV62d | LHVNGNSIKDVDVSDFTDFEGLDLLHLGSNQITVIKGDVFHNLTNLRRLYLNGNQIERLY |
| NOV62e | LHVNGNSIKDVDVSDFTDFEGLDLLHLGSNQITVIKGDVFHNLTNLRRLYLNGNQIERLY |
| NOV62f | LHVNGNSIKDVDVSDFTDFEGLDLLHLGSNQITVIKGDVFHNLTNLRRLYLNGNQIERLY |
| NOV62a | PEIFSGLHNLQYLYLEYNLIKEISAGTFDSMPNLQLLYLNNNLLKSLPVYIFSGAPLARL |
| NOV62b | PEIFSGLHNLQYLYLEYNLIKEISAGTFDSMPNLQLLYLSNNLLKSLPVYIFSGAPLARL |
| NOV62c | PEIFSGLHNLQYLYLEYNLIKEISAGTFDSMPNLQLLYLNNNLLKSLPVYIFSGAPLARL |
| NOV62d | PEIFSGLHNLQYLYLEYNLIKEISAGTFDSMPNLQLLYLNNNLLKSLPVYIFSGAPLARL |
| NOV62e | PEIFSGLHNLQYPYLEYNLIKEISAGTFDSMPNLQLLYLNNNLLKSLPVYIFSGAPLARL |
| NOV62f | PEIFSGLHNLQYLYLEYNLIKEISAGTFDSMPNLQLLYLNNNLLKSLPVYIFSGAPLARL |
| NOV62a | NLRNNKFMYLPVSGVLDQLQSLTQIDLEGNPWDCTCDLVALKLWVEKLSDGIVVKELKCE |
| NOV62b | NLRNNKFMYLPVSGVLDQLQSLTQIDLEGSPWDYTCDLVALKLWVEKLSDGIVVKELKCE |
| NOV62c | NLRNNKFMYLPVSGVLDQLQSLTQIDLEGNPWDCTCDLVALKLWVGKLSDGIVVKELKCE |
| NOV62d | NLRNNKFMYLPVSGVLDQLQSLTQIDLEGNPWDCTCDLVALKLWVEKLSDGIVVKELKCE |
| NOV62e | NLRNNKFMYLPVSGVLDQLQSLTQTDLEGNPWDCTCDLVALKLWVEKLSDGIVVKELKCE |
| NOV62f | NLRNNKFMYLPVSGVLDQLQSLTQIDLEGNPWDCTCDLVALKLWVGKLSDGIVVKELKCE |
| NOV62a | TPVQFANIELKSLKNEILCPKLLNKPSAPFTSPAPATTFTTPLGPIRSPPGGPVPLSILI |
| NOV62b | TPVQFTNIELKSLKNEILCPKLLNKPSAPFTSPAPATTFTTPLGPIRSPPGGPLE----- |
| NOV62c | TPVQFANIELKSLKNEILCPKLLNKPSAPFTSPAPTITFTTPLGPIRSPPGGPLE----- |
| NOV62d | TPVQFANIELKSLKNEILCPKLLNKPSAPFTSPAPAITFTTPLGPIRSPPGGPVPLSILI |
| NOV62e | TPVQFANIELKSLKNEILCPKLLNKPSAPFTSPAPAITFTTPLGPIRSPPGGPVPLSILI |
| NOV62f | TPVQFANIELKSLKNETLCPKLLNKPSAPFTSPAPTITFTTPLGPIRSPPGGP------- |
| NOV62a | LSILVVLILTVFVAFCLLVFVLRRNKKPTVKHEGLGNPDCGSMQLQLRKHDHKTNKKDGL |
| NOV62b | ------------------------------------------------------------ |
| NOV62c | ------------------------------------------------------------ |
| NOV62d | LSILVVLILTVFVAFCLLVFVLRRNKKPTVKHEGLGNPDCGSMQLQLRKHDHKTNKKDGL |
| NOV62e | LSILVVLILTVFVAFCLLVFVLRRNKKPTVKHEGLGNPDCGSMQLQLRKHDHKTNKKDGL |
| NOV62f | ------------------------------------------------------------ |
| NOV62a | STEAFIPQTIEQMSKSHTCGLKESETGFMFSDPPGQKVVMRNVADKEKDLLHVDTRKRLS |
| NOV62b | ------------------------------------------------------------ |
| NOV62c | ------------------------------------------------------------ |
| NOV62d | STEAFIPQTIEQMSKSHTCGLKESETGFMFSDPPGQKVVMRNVADKEKDLLHVDTRKRLS |
| NOV62e | STEAFIPQTIEQMSKSHTCGLKESETGFMFSDPPGQKVVMRNVADKEKDLLHVDTRKRLS |
| NOV62f | ------------------------------------------------------------ |
| NOV62a | TIDELDELFPSRDSNVPIQNFLESKKEYNSIGVSGFETRYPEKQPDKKSKKSLIGGNHSK |
| NOV62b | ------------------------------------------------------------ |
| NOV62c | ------------------------------------------------------------ |
| NOV62d | TIDELDELFPSRDSNVFIQNFLESKKEYNSIGVSGFETRYPEKQPDKKSKKSLIGGNHSK |
| NOV62e | TIDELDELFPSRDSNVFIQNFLESKKEYNSIGVSGFEIRYPEKQPDKKSKKSLIGGNHSK |
| NOV62f | ------------------------------------------------------------ |
| NOV62a | IVVEQRKSEYFELKAKLQSSPDYLQVLEEQTALNKI |
| NOV62b | ------------------------------------ |
| NOV62c | ------------------------------------ |
| NOV62d | IVVEQRKSEYFELKAKLQSSPDYLQVLEEQTALNKI |
| NOV62e | IVVEQRKSEYFELKAKLQSSPDYLQVLEEQTALNKI |
| NOV62f | ------------------------------------ |
| NOV62a | (SEQ ID NO: 1202) |
| NOV62b | (SEQ ID NO: 1204) |
| NOV62c | (SEQ ID NO: 1206) |
| NOV62d | (SEQ ID NO: 1208) |
| NOV62e | (SEQ ID NO: 1210) |
| NOV62f | (SEQ ID NO: 1212) |

[0713] Further analysis of the NOV62a protein yielded the following properties shown in Table 62C.

TABLE 62C
Protein Sequence Properties NOV62a

| | |
|---|---|
| SignalP analysis: | Cleavage site between residues 58 and 59 |
| PSORT II analysis: | |

| PSG: | a new signal peptide prediction method | |
|---|---|---|
| | N-region: | length 0; pos. chg 0; neg. chg 0 |
| | H-region: | length 13; peak value 8.16 |
| | PSG score: | 3.76 |

| | |
|---|---|
| GvH: | von Heijne's method for signal seq. recognition |
| | GvH score (threshold: −2.1): 2.51 |
| | possible cleavage site: between 57 and 58 |

>>> Seems to have a cleavable signal peptide (1 to 57)

| ALOM: | Klein et al's method for TM region allocation | | |
|---|---|---|---|
| | Init position for calculation: 58 | | |
| | Tentative number of TMS(s) for the threshold 0.5: 1 | | |
| | Number of TMS(s) for threshold 0.5: 1 | | |
| | INTEGRAL | Likelihood = | Transmembrane 663-679 |
| | | −16.61 | |

| | |
|---|---|
| PERIPHERAL | Likelihood = 2.92 (at 578) |

| | |
|---|---|
| | ALOM score: −16.61 (number of TMSs: 1) |
| MTOP: | Prediction of membrane topology (Hartmann et al.) |
| | Center position for calculation: 28 |
| | Charge difference: 1.0 C(2.0)-N(1.0) |
| | C > N: C-terminal side will be inside |

>>>Caution: Inconsistent mtop result with signal peptide
>>> membrane topology: type 1a (cytoplasmic tail 680 to 876)

| MITDISC: | discrimination of mitochondrial targeting seq | | | |
|---|---|---|---|---|
| | R content: | 0 | Hyd Moment(75): | 4.59 |
| | Hyd Moment(95): | 1.85 | G content: | 0 |
| | D/E content: | 2 | S/T content: | 2 |

| | |
|---|---|
| | Score: −7.15 |
| Gavel: | prediction of cleavage sites for mitochondrial preseq |
| | cleavage site motif not found |

NUCDISC: discrimination of nuclear localization signals

| | |
|---|---|
| | pat4: none |
| | pat7: PDKKSKK (4) at 825 |
| | bipartite: none |
| | content of basic residues: 10.4% |
| | NLS Score: −0.13 |
| KDEL: | ER retention motif in the C-terminus: none |

ER Membrane Retention Signals:

KKXX-like motif in the C-terminus: ALNK

SKL: peroxisomal targeting signal in the C-terminus: NKI
PTS2: 2nd peroxisomal targeting signal: none
VAC: possible vacuolar targeting motif: none
RNA-binding motif: none
Actinin-type actin-binding motif:

type 1: none
type 2: none

NMYR: N-myristoylation pattern: none
Prenylation motif: none
memYQRL: transport motif from cell surface to Golgi: none
Tyrosines in the tail: too long tail
Dileucine motif in the tail: found

LL at 770

checking 63 PROSITE DNA binding motifs: none
checking 71 PROSITE ribosomal protein motifs: none
checking 33 PROSITE prokaryotic DNA binding motifs: none

| | |
|---|---|
| NNCN: | Reinhardt's method for Cytoplasmic/Nuclear discrimination |
| | Prediction: cytoplasmic |
| | Reliability: 55.5 |
| COIL: | Lupas's algorithm to detect coiled-coil regions |
| | total: 0 residues |

Final Results (k = 9/23):

44.4%: endoplasmic reticulum
22.2%: Golgi
11.1%: plasma membrane
11.1%: vesicles of secretory system
11.1%: extracellular, including cell wall

>> prediction for CG98011-01 is end (k = 9)

[0714] A search of the NOV62a protein against the Geneseq database, a proprietary database that contains sequences published in patents and patent publication, yielded several homologous proteins shown in Table 62D.

TABLE 62D
Geneseq Results for NOV62a

| | | NOV62a | Identities/ | |
|---|---|---|---|---|
| | | Residues/ | Similarities for | |
| Geneseq | Protein/Organism/Length | Match | the Matched | Expect |
| Identifier | [Patent #, Date] | Residues | Region | Value |
| AAE18209 | Human MOL2 protein - Homo sapiens, | 1 . . . 876 | 876/876 (100%) | 0.0 |
| | 876 aa. [WO200206339-A2, 24-JAN-2002] | 1 . . . 876 | 876/876 (100%) | |
| AAG67510 | Amino acid sequence of a human | 11 . . . 876 | 866/866 (100%) | 0.0 |
| | secreted polypeptide - Homo sapiens, | 1 . . . 866 | 866/866 (100%) | |
| | 866 aa. [WO200166690-A2, 13-SEP-2001] | | | |
| AAE22221 | Human toll like receptor like molecule 4 | 40 . . . 876 | 837/837 (100%) | 0.0 |
| | (TLR-L4) protein - Homo sapiens, 837 | 1 . . . 837 | 837/837 (100%) | |
| | aa. [WO200220569-A2, 14-MAR-2002] | | | |
| ABJ01959 | Human IGFALS similar protein SEQ ID | 40 . . . 871 | 832/832 (100%) | 0.0 |
| | No 660 - Homo sapiens, 832 aa. | 1 . . . 832 | 832/832 (100%) | |
| | [WO200216593-A2, 28-FEB-2002] | | | |
| ABG36257 | Human peptide encoded by genome- | 24 . . . 598 | 575/575 (100%) | 0.0 |
| | derived single exon probe SEQ ID | 1 . . . 575 | 575/575 (100%) | |
| | 25922 - Homo sapiens, 575 aa. | | | |
| | [WO200186003-A2, 15-NOV-2001] | | | |

[0715] In a BLAST search of public sequence databases, the NOV62a protein was found to have homology to the proteins shown in the BLASTP data in Table 62E.

TABLE 62E
Public BLASTP Results for NOV62a

| | | NOV62a | Identities/ | |
|---|---|---|---|---|
| Protein | | Residues/ | Similarities for | |
| Accession | | Match | the Matched | Expect |
| Number | Protein/Organism/Length | Residues | Portion | Value |
| BAC67207 | Neuronal transmembrane protein | 11 . . . 876 | 840/866 (96%) | 0.0 |
| | Slitrk4 - Mus musculus (Mouse), 866 | 1 . . . 866 | 857/866 (97%) | |
| | aa. | | | |
| Q8IW52 | Similar to KIAA0848 protein - Homo | 40 . . . 876 | 837/837 (100%) | 0.0 |
| | sapiens (Human), 837 aa. | 1 . . . 837 | 837/837 (100%) | |
| Q8BWB0 | Hypothetical leucine-rich repeat | 40 . . . 876 | 814/837 (97%) | 0.0 |
| | cysteine-containing subfamily/ | 1 . . . 837 | 829/837 (98%) | |
| | cysteine-rich flanking region - Mus | | | |
| | musculus (Mouse), 837 aa. | | | |
| Q8C056 | Hypothetical leucine-rich repeat | 40 . . . 876 | 813/837 (97%) | 0.0 |
| | cysteine-containing subfamily/ | 1 . . . 837 | 828/837 (98%) | |
| | cysteine-rich flanking region - Mus | | | |
| | musculus (Mouse), 837 aa. | | | |
| Q8BYG4 | Hypothetical leucine-rich repeat | 40 . . . 821 | 761/782 (97%) | 0.0 |
| | cysteine-containing subfamily/ | 1 . . . 782 | 775/782 (98%) | |
| | cysteine-rich flanking region - Mus | | | |
| | musculus (Mouse), 782 aa (fragment). | | | |

[0716] PFam analysis predicts that the NOV62a protein contains the domains shown in the Table 62F.

TABLE 62F
Domain Analysis of NOV62a

| | | Identities/ | |
|---|---|---|---|
| | | Similarities for | |
| Pfam | NOV62a | the Matched | |
| Domain | Match Region | Region | Expect Value |
| LRR | 218 . . . 239 | 8/25 (32%) | 0.24 |
| | | 19/25 (76%) | |
| LRRCT | 252 . . . 302 | 18/54 (33%) | 9.7e−11 |
| | | 35/54 (65%) | |
| LRRNT | 380 . . . 413 | 11/36 (31%) | 0.0039 |
| | | 24/36 (67%) | |
| LRR | 441 . . . 464 | 9/25 (36%) | 0.31 |
| | | 16/25 (64%) | |
| LRR | 465 . . . 488 | 13/25 (52%) | 0.0072 |
| | | 23/25 (92%) | |
| LRR | 489 . . . 512 | 6/25 (24%) | 0.015 |
| | | 23/25 (92%) | |
| LRR | 513 . . . 536 | 12/25 (48%) | 0.03 |
| | | 19/25 (76%) | |
| LRRCT | 570 . . . 620 | 14/54 (26%) | 8.2e−06 |
| | | 35/54 (65%) | |

### Example B

### Sequencing Methodology and Identification of NOVX Clones

[0717] 1. GeneCalling™ Technology: This is a proprietary method of performing differential gene expression profiling between two or more samples developed at CuraGen and described by Shimkets, et al., “Gene expression analysis by transcript profiling coupled to a gene database query” Nature Biotechnology 17:198-803 (1999). cDNA was derived from various human samples representing multiple tissue types, normal and diseased states, physiological states, and developmental states from different donors. Samples were obtained as whole tissue, primary cells or tissue cultured primary cells or cell lines. Cells and cell lines may have been treated with biological or chemical agents that regulate gene expression, for example, growth factors, chemokines or steroids. The cDNA thus derived was then digested with up to as many as 120 pairs of restriction enzymes and pairs of linker-adaptors specific for each pair of restriction enzymes were ligated to the appropriate end. The restriction digestion generates a mixture of unique cDNA gene fragments. Limited PCR amplification is performed with primers homologous to the linker adapter sequence where one primer is biotinylated and the other is fluorescently labeled. The doubly labeled material is isolated and the fluorescently labeled single strand is resolved by capillary gel electrophoresis. A computer algorithm compares the electropherograms from an experimental and control group for each of the restriction digestions. This and additional sequence-derived information is used to predict the identity of each differentially expressed gene fragment using a variety of genetic databases. The identity of the gene fragment is confirmed by additional, gene-specific competitive PCR or by isolation and sequencing of the gene fragment.

[0718] 2. SeqCalling™ Technology: cDNA was derived from various human samples representing multiple tissue types, normal and diseased states, physiological states, and developmental states from different donors. Samples were obtained as whole tissue, primary cells or tissue cultured primary cells or cell lines. Cells and cell lines may have been treated with biological or chemical agents that regulate gene expression, for example, growth factors, chemokines or steroids. The cDNA thus derived was then sequenced using CuraGen's proprietary SeqCalling technology. Sequence traces were evaluated manually and edited for corrections if appropriate. cDNA sequences from all samples were assembled together, sometimes including public human sequences, using bioinformatic programs to produce a consensus sequence for each assembly. Each assembly is included in CuraGen Corporation's database. Sequences were included as components for assembly when the extent of identity with another component was at least 95% over 50 bp. Each assembly represents a gene or portion thereof and includes information on variants, such as splice forms single nucleotide polymorphisms (SNPs), insertions, deletions and other sequence variations.

[0719] 3. PathCalling™ Technology: The NOVX nucleic acid sequences are derived by laboratory screening of cDNA library by the two-hybrid approach. cDNA fragments covering either the full length of the DNA sequence, or part of the sequence, or both, are sequenced. In silico prediction was based on sequences available in CuraGen Corporation's proprietary sequence databases or in the public human sequence databases, and provided either the full length DNA sequence, or some portion thereof.

[0720] The laboratory screening was performed using the methods summarized below:

[0721] cDNA libraries were derived from various human samples representing multiple tissue types, normal and diseased states, physiological states, and developmental states from different donors. Samples were obtained as whole tissue, primary cells or tissue cultured primary cells or cell lines. Cells and cell lines may have been treated with biological or chemical agents that regulate gene expression, for example, growth factors, chemokines or steroids. The cDNA thus derived was then directionally cloned into the appropriate two-hybrid vector (Gal4-activation domain (Gal4-AD) fusion). Such cDNA libraries as well as commercially available cDNA libraries from Clontech (Palo Alto, Calif.) were then transferred from E. coli into a CuraGen Corporation proprietary yeast strain (disclosed in U.S. Pat. Nos. 6,057,101 and 6,083,693, incorporated herein by reference in their entireties).

[0722] Gal4-binding domain (Gal4-BD) fusions of a CuraGen Corportion proprietary library of human sequences was used to screen multiple Gal4-AD fusion cDNA libraries resulting in the selection of yeast hybrid diploids in each of which the Gal4-AD fusion contains an individual cDNA. Each sample was amplified using the polymerase chain reaction (PCR) using non-specific primers at the cDNA insert boundaries. Such PCR product was sequenced; sequence traces were evaluated manually and edited for corrections if appropriate. cDNA sequences from all samples were assembled together, sometimes including public human sequences, using bioinformatic programs to produce a consensus sequence for each assembly. Each assembly is included in CuraGen Corporation's database. Sequences were included as components for assembly when the extent of identity with another component was at least 95% over 50 bp. Each assembly represents a gene or portion thereof and includes information on variants, such as splice forms single nucleotide polymorphisms (SNPs), insertions, deletions and other sequence variations.

[0723] Physical clone: the cDNA fragment derived by the screening procedure, covering the entire open reading frame is, as a recombinant DNA, cloned into pACT2 plasmid (Clontech) used to make the cDNA library. The recombinant plasmid is inserted into the host and selected by the yeast hybrid diploid generated during the screening procedure by the mating of both CuraGen Corporation proprietary yeast strains N106′ and YULH (U.S. Pat. Nos. 6,057,101 and 6,083,693).

[0724] 4. RACE: Techniques based on the polymerase chain reaction such as rapid amplification of cDNA ends (RACE), were used to isolate or complete the predicted sequence of the cDNA of the invention. Usually multiple clones were sequenced from one or more human samples to derive the sequences for fragments. Various human tissue samples from different donors were used for the RACE reaction. The sequences derived from these procedures were included in the SeqCalling Assembly process described in preceding paragraphs.

[0725] 5. Exon Linking: The NOVX target sequences identified in the present invention were subjected to the exon linking process to confirm the sequence. PCR primers were designed by starting at the most upstream sequence available, for the forward primer, and at the most downstream sequence available for the reverse primer. In each case, the sequence was examined, walking inward from the respective termini toward the coding sequence, until a suitable sequence that is either unique or highly selective was encountered, or, in the case of the reverse primer, until the stop codon was reached. Such primers were designed based on in silico predictions for the full length cDNA, part (one or more exons) of the DNA or protein sequence of the target sequence, or by translated homology of the predicted exons to closely related human sequences from other species. These primers were then employed in PCR amplification based on the following pool of human cDNAs: adrenal gland, bone marrow, brain—amygdala, brain—cerebellum, brain—hippocampus, brain—substantia nigra, brain—thalamus, brain—whole, fetal brain, fetal kidney, fetal liver, fetal lung, heart, kidney, lymphoma - Raji, mammary gland, pancreas, pituitary gland, placenta, prostate, salivary gland, skeletal muscle, small intestine, spinal cord, spleen, stomach, testis, thyroid, trachea, uterus. Usually the resulting amplicons were gel purified, cloned and sequenced to high redundancy. The PCR product derived from exon linking was cloned into the pCR2.1 vector from Invitrogen. The resulting bacterial clone has an insert covering the entire open reading frame cloned into the pCR2.1 vector. The resulting sequences from all clones were assembled with themselves, with other fragments in CuraGen Corporation's database and with public ESTs. Fragments and ESTs were included as components for an assembly when the extent of their identity with another component of the assembly was at least 95% over 50 bp. In addition, sequence traces were evaluated manually and edited for corrections if appropriate. These procedures provide the sequence reported herein.

[0726] 6. Physical Clone: Exons were predicted by homology and the intron/exon boundaries were determined using standard genetic rules. Exons were further selected and refined by means of similarity determination using multiple BLAST (for example, tBlastN, BlastX, and BlastN) searches, and, in some instances, GeneScan and Grail. Expressed sequences from both public and proprietary databases were also added when available to further define and complete the gene sequence. The DNA sequence was then manually corrected for apparent inconsistencies thereby obtaining the sequences encoding the full-length protein.

[0727] The PCR product derived by exon linking, covering the entire open reading frame, was cloned into the pCR2.1 vector from Invitrogen to provide clones used for expression and screening purposes.

### Example C

### Quantitative Expression Analysis of Clones in Various Cells and Tissues

[0728] The quantitative expression of various clones was assessed using microfiter plates containing RNA samples from a variety of normal and pathology-derived cells, cell lines and tissues using real time quantitative PCR (RTQ PCR). RTQ PCR was performed on an Applied Biosystems ABI PRISM® 7700 or an ABI PRISM® 7900 HT Sequence Detection System. Various collections of samples are assembled on the plates, and referred to as Panel 1 (containing normal tissues and cancer cell lines), Panel 2 (containing samples derived from tissues from normal and cancer sources), Panel 3 (containing cancer cell lines), Panel 4 (containing cells and cell lines from normal tissues and cells related to inflammatory conditions), Panel 5D/5I (containing human tissues and cell lines with an enphasis on metabolic diseases), AI_comprehensive_panel (containing normal tissue and samples from autoinflammatory diseases), Panel CNSD.01 (containing samples from normal and diseased brains) and CNS_neurodegeneration_panel (containing samples from normal and Alzheimer's diseased brains).

[0729] RNA integrity from all samples is controlled for quality by visual assessment of agarose gel electropherograms using 28S and 18S ribosomal RNA staining intensity ratio as a guide (2:1 to 2.5:1 28s:18s) and the absence of low molecular weight RNAs that would be indicative of degradation products. Samples are controlled against genomic DNA contamination by RTQ PCR reactions run in the absence of reverse transcriptase using probe and primer sets designed to amplify across the span of a single exon.

[0730] First, the RNA samples were normalized to reference nucleic acids such as constitutively expressed genes (for example, □-actin and GAPDH). Normalized RNA (5 ul) was converted to cDNA and analyzed by RTQ-PCR using One Step RT-PCR Master Mix Reagents (Applied Biosystems; Catalog No. 4309169) and gene-specific primers according to the manufacturer's instructions.

[0731] In other cases, non-normalized RNA samples were converted to single strand cDNA (sscDNA) using Superscript II (Invitrogen Corporation; Catalog No. 18064-147) and random hexamers according to the manufacturer's instructions. Reactions containing up to 10 □g of total RNA were performed in a volume of 20 □l and incubated for 60 minutes at 42° C. This reaction can be scaled up to 50 □g of total RNA in a final volume of 100 □l. sscDNA samples are then normalized to reference nucleic acids as described previously, using 1×TaqMan® Universal Master mix (Applied Biosystems; catalog No. 4324020), following the manufacturer's instructions.

[0732] Probes and primers were designed for each assay according to Applied Biosystems Primer Express Software package (version I for Apple Computer's Macintosh Power PC) or a similar algorithm using the target sequence as input. Default settings were used for reaction conditions and the following parameters were set before selecting primers: primer concentration=250 nM, primer melting temperature (Tₘ) range=58°-60° C., primer optimal Tm=59° C., maximum primer difference=2° C., probe does not have 5′ G, probe Tₘ must be 10° C. greater than primer Tm, amplicon size 75 bp to 100 bp. The probes and primers selected (see below) were synthesized by Synthegen (Houston, Tex., USA). Probes were double purified by HPLC to remove uncoupled dye and evaluated by mass spectroscopy to verify coupling of reporter and quencher dyes to the 5′ and 3′ ends of the probe, respectively. Their final concentrations were: forward and reverse primers, 900 nM each, and probe, 200 nM.

[0733] PCR conditions: When working with RNA samples, normalized RNA from each tissue and each cell line was spotted in each well of either a 96 well or a 384-well PCR plate (Applied Biosystems). PCR cocktails included either a single gene specific probe and primers set, or two multiplexed probe and primers sets (a set specific for the target clone and another gene-specific set multiplexed with the target probe). PCR reactions were set up using TaqMan® One-Step RT-PCR Master Mix (Applied Biosystems, Catalog No. 4313803) following manufacturer's instructions. Reverse transcription was performed at 48° C. for 30 minutes followed by amplification/PCR cycles as follows: 95° C. 10 min, then 40 cycles of 95° C. for 15 seconds, 60° C. for 1 minute. Results were recorded as CT values (cycle at which a given sample crosses a threshold level of fluorescence) using a log scale, with the difference in RNA concentration between a given sample and the sample with the lowest CT value being represented as 2 to the power of delta CT. The percent relative expression is then obtained by taking the reciprocal of this RNA difference and multiplying by 100. CT values below 28 indicate high expression, CT values between 28 and 32 indicate moderate expression, and CT values between 32 and 35 indicate low expression. CT values above 35 reflect levels of expression that are too low to be reliably measured.

[0734] When working with sscDNA samples, normalized sscDNA was used as described previously for RNA samples. PCR reactions containing one or two sets of probe and primers were set up as described previously, using 1×TaqMan® Universal Master mix (Applied Biosystems; catalog No. 4324020), following the manufacturer's instructions. PCR amplification was performed as follows: 95° C. 10 min, then 40 cycles of 95° C. for 15 seconds, 60° C. for 1 minute. Results were analyzed and processed as described previously.

[0735] Panels 1, 1.1, 1.2, and 1.3D

[0736] The plates for Panels 1, 1.1, 1.2 and 1.3D include 2 control wells (genomic DNA control and chemistry control) and 94 wells containing cDNA from various samples. The samples in these panels are broken into 2 classes: samples derived from cultured cell lines and samples derived from primary normal tissues. The cell lines are derived from cancers of the following types: lung cancer, breast cancer, melanoma, colon cancer, prostate cancer, CNS cancer, squamous cell carcinoma, ovarian cancer, liver cancer, renal cancer, gastric cancer and pancreatic cancer. Cell lines used in these panels are widely available through the American Type Culture Collection (ATCC), a repository for cultured cell lines, and were cultured using the conditions recommended by the ATCC. The normal tissues found on these panels are comprised of samples derived from all major organ systems from single adult individuals or fetuses. These samples are derived from the following organs: adult skeletal muscle, fetal skeletal muscle, adult heart, fetal heart, adult kidney, fetal kidney, adult liver, fetal liver, adult lung, fetal lung, various regions of the brain, the spleen, bone marrow, lymph node, pancreas, salivary gland, pituitary gland, adrenal gland, spinal cord, thymus, stomach, small intestine, colon, bladder, trachea, breast, ovary, uterus, placenta, prostate, testis and adipose.

[0737] In the results for Panels 1, 1.1, 1.2 and 1.3D, the following abbreviations are used:
[0738] ca.=carcinoma,
[0739] *=established from metastasis,
[0740] met=metastasis,
[0741] s cell var=small cell variant,
[0742] non-s=non-sm=non-small,
[0743] squam=squamous,
[0744] pl. elf=pl effusion=pleural effusion,
[0745] glio=glioma,
[0746] astro=astrocytoma, and
[0747] neuro=neuroblastoma.

[0748] GENERAL_SCREENING_PANEL_V1.4, V1.5, V1.6 AND 1.7

[0749] The plates for Panels 1.4, 1.5, 1.6 and 1.7 include 2 control wells (genomic DNA control and chemistry control) and 88 to 94 wells containing cDNA from various samples. The samples in Panels 1.4, 1.5, 1.6 and 1.7 are broken into 2 classes: samples derived from cultured cell lines and samples derived from primary normal tissues. The cell lines are derived from cancers of the following types: lung cancer, breast cancer, melanoma, colon cancer, prostate cancer, CNS cancer, squamous cell carcinoma, ovarian cancer, liver cancer, renal cancer, gastric cancer and pancreatic cancer. Cell lines used in Panels 1.4, 1.5, 1.6 and 1.7 are widely available through the American Type Culture Collection (ATCC), a repository for cultured cell lines, and were cultured using the conditions recommended by the ATCC. The normal tissues found on Panels 1.4, 1.5, 1.6 and 1.7 are comprised of pools of samples derived from all major organ systems from 2 to 5 different adult individuals or fetuses. These samples are derived from the following organs: adult skeletal muscle, fetal skeletal muscle, adult heart, fetal heart, adult kidney, fetal kidney, adult liver, fetal liver, adult lung, fetal lung, various regions of the brain, the spleen, bone marrow, lymph node, pancreas, salivary gland, pituitary gland, adrenal gland, spinal cord, thymus, stomach, small intestine, colon, bladder, trachea, breast, ovary, uterus, placenta, prostate, testis and adipose. Abbreviations are as described for Panels 1, 1.1, 1.2, and 1.3D.

[0750] Panels 2D, 2.2, 2.3, and 2.4

[0751] The plates for Panels 2D, 2.2, 2.3 and 2.4 generally include 2 control wells and 94 test samples composed of RNA or cDNA isolated from human tissue procured by surgeons working in close cooperation with the National Cancer Institute's Cooperative Human Tissue Network (CHTN) or the National Disease Research Initiative (NDRI) or from Ardais or Clinomics). The tissues are derived from human malignancies and in cases where indicated many malignant tissues have “matched margins” obtained from noncancerous tissue just adjacent to the tumor. These are termed normal adjacent tissues and are denoted “NAT” in the results below. The tumor tissue and the “matched margins” are evaluated by two independent pathologists (the surgical pathologists and again by a pathologist at NDRI/CHTN/Ardais/Clinomics). Unmatched RNA samples from tissues without malignancy (normal tissues) were also obtained from Ardais or Clinomics. This analysis provides a gross histopathological assessment of tumor differentiation grade. Moreover, most samples include the original surgical pathology report that provides information regarding the clinical stage of the patient. These matched margins are taken from the tissue surrounding (i.e. immediately proximal) to the zone of surgery (designated “NAT”, for normal adjacent tissue, in Table RR). In addition, RNA and cDNA samples were obtained from various human tissues derived from autopsies performed on elderly people or sudden death victims (accidents, etc.). These tissues were ascertained to be free of disease and were purchased from various commercial sources such as Clontech (Palo Alto, Calif.), Research Genetics, and Invitrogen.

[0752] HASS Panel V 1.0

[0753] The HASS panel v 1.0 plates are comprised of 93 cDNA samples and two controls. Specifically, 81 of these samples are derived from cultured human cancer cell lines that had been subjected to serum starvation, acidosis and anoxia for different time periods as well as controls for these treatments, 3 samples of human primary cells, 9 samples of malignant brain cancer (4 medulloblastomas and 5 glioblastomas) and 2 controls. The human cancer cell lines are obtained from ATCC (American Type Culture Collection) and fall into the following tissue groups: breast cancer, prostate cancer, bladder carcinomas, pancreatic cancers and CNS cancer cell lines. These cancer cells are all cultured under standard recommended conditions. The treatments used (serum starvation, acidosis and anoxia) have been previously published in the scientific literature. The primary human cells were obtained from Clonetics (Walkersville, Md.) and were grown in the media and conditions recommended by Clonetics. The malignant brain cancer samples are obtained as part of a collaboration (Henry Ford Cancer Center) and are evaluated by a pathologist prior to CuraGen receiving the samples. RNA was prepared from these samples using the standard procedures. The genomic and chemistry control wells have been described previously.

[0754] ARDAIS Panel V 1.0

[0755] The plates for ARDAIS panel v 1.0 generally include 2 control wells and 22 test samples composed of RNA isolated from human tissue procured by surgeons working in close cooperation with Ardais Corporation. The tissues are derived from human lung malignancies (lung adenocarcinoma or lung squamous cell carcinoma) and in cases where indicated many malignant samples have “matched margins” obtained from noncancerous lung tissue just adjacent to the tumor. These matched margins are taken from the tissue surrounding (i.e. immediately proximal) to the zone of surgery (designated “NAT”, for normal adjacent tissue) in the results below. The tumor tissue and the “matched margins” are evaluated by independent pathologists (the surgical pathologists and again by a pathologist at Ardais). Unmatched malignant and non-malignant RNA samples from lungs were also obtained from Ardais. Additional information from Ardais provides a gross histopathological assessment of tumor differentiation grade and stage. Moreover, most samples include the original surgical pathology report that provides information regarding the clinical state of the patient.

[0756] ARDAIS Prostate V 1.0

[0757] The plates for ARDAIS prostate 1.0 generally include 2 control wells and 68 test samples composed of RNA isolated from human tissue procured by surgeons working in close cooperation with Ardais Corporation. The tissues are derived from human prostate malignancies and in cases where indicated malignant samples have “matched margins” obtained from noncancerous prostate tissue just adjacent to the tumor. These matched margins are taken from the tissue surrounding (i.e. immediately proximal) to the zone of surgery (designated “NAT”, for normal adjacent tissue) in the results below. The tumor tissue and the “matched margins” are evaluated by independent pathologists (the surgical pathologists and again by a pathologist at Ardais). RNA from unmatched malignant and non-malignant prostate samples were also obtained from Ardais. Additional information from Ardais provides a gross histopathological assessment of tumor differentiation grade and stage. Moreover, most samples include the original surgical pathology report that provides information regarding the clinical state of the patient.

[0758] ARDAIS Kidney V 1.0

[0759] The plates for ARDAIS kidney 1.0 generally include 2 control wells and 44 test samples composed of RNA isolated from human tissue procured by surgeons working in close cooperation with Ardais Corporation. The tissues are derived from human prostate malignancies and in cases where indicated malignant samples have “matched margins” obtained from noncancerous prostate tissue just adjacent to the tumor. These matched margins are taken from the tissue surrounding (i.e. immediately proximal) to the zone of surgery (designated “NAT”, for normal adjacent tissue) in the results below. The tumor tissue and the “matched margins” are evaluated by independent pathologists (the surgical pathologists and again by a pathologist at Ardais). RNA from unmatched malignant and non-malignant prostate samples were also obtained from Ardais. Additional information from Ardais provides a gross histopathological assessment of tumor differentiation grade and stage. Moreover, most samples include the original surgical pathology report that provides information regarding the clinical state of the patient.

[0760] Panel 3D and 3.1 and 3.2

[0761] The plates of Panel 3D, 3.1, and 3.2 are comprised of 94 cDNA samples and two control samples. Specifically, 92 of these samples are derived from cultured human cancer cell lines, 2 samples of human primary cerebellar tissue and 2 controls. The human cell lines are generally obtained from ATCC (American Type Culture Collection), NCI or the German tumor cell bank and fall into the following tissue groups: Squamous cell carcinoma of the tongue, breast cancer, prostate cancer, melanoma, epidermoid carcinoma, sarcomas, bladder carcinomas, pancreatic cancers, kidney cancers, leukemnias/lymphomas, ovarian/uterine/cervical, gastric, colon, lung and CNS cancer cell lines. In addition, there are two independent samples of cerebellum. These cells are all cultured under standard recommended conditions and RNA extracted using the standard procedures. The cell lines in panel 3D, 3.1, 3.2, 1, 1.1., 1.2, 1.3D, 1.4, 1.5, and 1.6 are of the most common cell lines used in the scientific literature.

[0762] Panels 4D, 4R, and 4.1D

[0763] Panel 4 includes samples on a 96 well plate (2 control wells, 94 test samples) composed of RNA (Panel 4R) or cDNA (Panels 4D/4.1D) isolated from various human cell lines or tissues related to inflammatory conditions. Total RNA from control normal tissues such as colon and lung (Stratagene, La Jolla, Calif.) and thymus and kidney (Clontech) was employed. Total RNA from liver tissue from cirrhosis patients and kidney from lupus patients was obtained from BioChain (Biochain Institute, Inc., Hayward, Calif.). Intestinal tissue for RNA preparation from patients diagnosed as having Crohn's disease and ulcerative colitis was obtained from the National Disease Research Interchange (NDRI) (Philadelphia, Pa.).

[0764] Astrocytes, lung fibroblasts, dermal fibroblasts, coronary artery smooth muscle cells, small airway epithelium, bronchial epithelium, microvascular dermal endothelial cells, microvascular lung endothelial cells, human pulmonary aortic endothelial cells, human umbilical vein endothelial cells were all purchased from Clonetics (Walkersville, Md.) and grown in the media supplied for these cell types by Clonetics. These primary cell types were activated with various cytokines or combinations of cytokines for 6 and/or 12-14 hours, as indicated. The following cytokines were used; IL-1 beta at approximately 1-5 ng/ml, TNF alpha at approximately 5-10 ng/ml, IFN gamma at approximately 20-50 ng/ml, IL-4 at approximately 5-10 ng/ml, IL-9 at approximately 5-10 ng/ml, IL- 13 at approximately 5-10 ng/ml. Endothelial cells were sometimes starved for various times by culture in the basal media from Clonetics with 0.1% serum.

[0765] Mononuclear cells were prepared from blood of employees at CuraGen Corporation, using Ficoll. LAK cells were prepared from these cells by culture in DMEM 5% FCS (Hyclone), 100 μM non essential amino acids (Gibco/Life Technologies, Rockville, Md.), 1 mM sodium pyruvate (Gibco), mercaptoethanol 5.5×10⁻⁵ M (Gibco), and 10 mM Hepes (Gibco) and Interleukin 2 for 4-6 days. Cells were then either activated with 10-20 ng/ml PMA and 1-2 μg/ml ionomycin, IL-12 at 5-10 ng/ml, IFN gamma at 20-50 ng/ml and IL-18 at 5-10 ng/ml for 6 hours. In some cases, mononuclear cells were cultured for 4-5 days in DMEM 5% FCS (Hyclone), 100 μM non essential amino acids (Gibco), 1 mM sodium pyruvate (Gibco), mercaptoethanol 5.5×10⁻⁵ M (Gibco), and 10 mM Hepes (Gibco) with PHA (phytohemagglutinin) or PWM (pokeweed mitogen) at approximately 5 μg/ml. Samples were taken at 24, 48 and 72 hours for RNA preparation. MLR (mixed lymphocyte reaction) samples were obtained by taking blood from two donors, isolating the mononuclear cells using Ficoll and mixing the isolated mononuclear cells 1:1 at a final concentration of approximately 2×10⁶ cells/mil in DMEM 5% FCS (Hyclone), 100 μM non essential amino acids (Gibco), 1 mM sodium pyruvate (Gibco), mercaptoethanol (5.5×10⁻⁵ M) (Gibco), and 10 mM Hepes (Gibco). The MLR was cultured and samples taken at various time points ranging from 1-7 days for RNA preparation.

[0766] Monocytes were isolated from mononuclear cells using CD14 Miltenyi Beads, +ve VS selection columns and a Vario Magnet according to the manufacturer's instructions. Monocytes were differentiated into dendritic cells by culture in DMEM 5% fetal calf serum (FCS) (Hyclone, Logan, Utah), 100 μM non essential amino acids (Gibco), 1 mM sodium pyruvate (Gibco), mercaptoethanol 5.5×10⁻⁵M (Gibco), and 10 mM Hepes (Gibco), 50 ng/ml GMCSF and 5 ng/ml IL-4 for 5-7 days. Macrophages were prepared by culture of monocytes for 5-7 days in DMEM 5% FCS (Hyclone), 100 μm non essential amino acids (Gibco), 1 mM sodium pyruvate (Gibco), mercaptoethanol 5.5×10⁻⁵ M (Gibco), 10 mM Hepes (Gibco) and 10% AB Human Serum or MCSF at approximately 50 ng/ml. Monocytes, macrophages and dendritic cells were stimulated for 6 and 12-14 hours with lipopolysaccharide (LPS) at 100 ng/ml. Dendritic cells were also stimulated with anti-CD40 monoclonal antibody (Pharmingen) at 10 μg/ml for 6 and 12-14 hours.

[0767] CD4 lymphocytes, CD8 lymphocytes and NK cells were also isolated from mononuclear cells using CD4, CD8 and CD56 Miltenyi beads, positive VS selection columns and a Vario Magnet according to the manufacturer's instructions. CD45RA and CD45RO CD4 lymphocytes were isolated by depleting mononuclear cells of CD8, CD56, CD14 and CD19 cells using CD8, CD56, CD14 and CD19 Miltenyi beads and positive selection. CD45RO beads were then used to isolate the CD45RO CD4 lymphocytes with the remaining cells being CD45RA CD4 lymphocytes. CD45RA CD4, CD45RO CD4 and CD8 lymphocytes were placed in DMEM 5% FCS (Hyclone), 100 μM non essential amino acids (Gibco), 1 mM sodium pyruvate (Gibco), mercaptoethanol 5.5×10⁻⁵ M (Gibco), and 10 mM Hepes (Gibco) and plated at 10⁶ cells/ml onto Falcon 6 well tissue culture plates that had been coated overnight with 0.5 μg/ml anti-CD28 (Pharmingen) and 3 ug/fffl anti-CD3 (OKT3, ATCC) in PBS. After 6 and 24 hours, the cells were harvested for RNA preparation. To prepare chronically activated CD8 lymphocytes, we activated the isolated CD8 lymphocytes for 4 days on anti-CD28 and anti-CD3 coated plates and then harvested the cells and expanded them in DMEM 5% FCS (Hyclone), 100 μM non essential amino acids (Gibco), 1 mM sodium pyruvate (Gibco), mercaptoethanol 5.5×10⁻⁵ M (Gibco), and 10 mM Hepes (Gibco) and EL-2. The expanded CD8 cells were then activated again with plate bound anti-CD3 and anti-CD28 for 4 days and expanded as before. RNA was isolated 6 and 24 hours after the second activation and after 4 days of the second expansion culture. The isolated NK cells were cultured in DMEM 5% FCS (Hyclone), 100 μM non essential amino acids (Gibco), 1 mM sodium pyruvate (Gibco), mercaptoethanol 5.5×10⁻⁵ M (Gibco), and 10 mM Hepes (Gibco) and IL-2 for 4-6 days before RNA was prepared.

[0768] To obtain B cells, tonsils were procured from NDRI. The tonsil was cut up with sterile dissecting scissors and then passed through a sieve. Tonsil cells were then spun down and resupended at 10⁶ cells/ml in DMEM 5% FCS (Hyclone), 100 μM non essential amino acids (Gibco), 1 mM sodium pyruvate (Gibco), mercaptoethanol 5.5×10⁻⁵ M (Gibco), and 10 mM Hepes (Gibco). To activate the cells, we used PWM at 5 μg/ml or anti-CD40 (Pharmingen) at approximately 10 μg/ml and IL-4 at 5-10 ng/ml. Cells were harvested for RNA preparation at 24,48 and 72 hours.

[0769] To prepare the primary and secondary Th1/Th2 and Tr1 cells, six-well Falcon plates were coated overnight with 10 μg/ml anti-CD28 (Pharmingen) and 2 μg/ml OKT3 (ATCC), and then washed twice with PBS. Umbilical cord blood CD4 lymphocytes (Poietic Systems, German Town, Md.) were cultured at 10⁵-10⁶ cells/ml in DMEM 5% FCS (Hyclone), 100 μM non essential amino acids (Gibco), 1 mM sodium pyruvate (Gibco), mercaptoethanol 5.5×10⁻⁵ M (Gibco), 10 mM Hepes (Gibco) and IL-2 (4 ng/ml). IL-12 (5 ng/ml) and anti-IL4 (1 □g/ml) were used to direct to Th1, while IL-4 (5 ng/ml) and anti-IFN gamma (1 □g/ml) were used to direct to Th2 and IL-10 at 5 ng/ml was used to direct to Tr1. After 4-5 days, the activated Th1, Th2 and Tr1 lymphocytes were washed once in DMEM and expanded for 4-7 days in DMEM 5% FCS (Hyclone), 100 μM non essential amino acids (Gibco), 1 mM sodium pyruvate (Gibco), mercaptoethanol 5.5×10⁻⁵ M (Gibco), 10 mM Hepes (Gibco) and IL-2 (1 ng/ml). Following this, the activated Th1, Th2 and Tr1 lymphocytes were re-stimulated for 5 days with anti-CD28/OKT3 and cytokines as described above, but with the addition of anti-CD95L (1 □g/ml) to prevent apoptosis. After 4-5 days, the Th1, Th2 and Tr1 lymphocytes were washed and then expanded again with IL-2 for 4-7 days. Activated Th1 and Tb2 lymphocytes were maintained in this way for a maximum of three cycles. RNA was prepared from primary and secondary Th1, Th2 and Tr1 after 6 and 24 hours following the second and third activations with plate bound anti-CD3 and anti-CD28 mAbs and 4 days into the second and third expansion cultures in Interleukin 2.

[0770] The following leukocyte cells lines were obtained from the ATCC: Ramos, EOL-1, KU-812. EOL cells were further differentiated by culture in 0.1 mM dbcAMP at 5×10⁵ cells/ml for 8 days, changing the media every 3 days and adjusting the cell concentration to 5×10⁵ cells/ml. For the culture of these cells, we used DMEM or RPMI (as recommended by the ATCC), with the addition of 5% FCS (Hyclone), 100 μM non essential amino acids (Gibco), 1 mM sodium pyruvate (Gibco), mercaptoethanol 5.5×10⁻⁵ M (Gibco), 10 mM Hepes (Gibco). RNA was either prepared from resting cells or cells activated with PMA at 10 ng/ml and ionomycin at 1 μg/ml for 6 and 14 hours. Keratinocyte line CCD106 and an airway epithelial tumor line NCI-H292 were also obtained from the ATCC. Both were cultured in DMEM 5% FCS (Hyclone), 100 μM non essential amino acids (Gibco), 1 mM sodium pyruvate (Gibco), mercaptoethanol 5.5×10⁻⁵ M (Gibco), and 10 mM Hepes (Gibco). CCD1106 cells were activated for 6 and 14 hours with approximately 5 ng/ml TNF alpha and 1 ng/ml IL-1 beta, while NCI-H292 cells were activated for 6 and 14 hours with the following cytokines: 5 ng/ml IL-4, 5 ng/ml IL-9, 5 ng/ml IL-13 and 25 ng/ml IFN gamma.

[0771] For these cell lines and blood cells, RNA was prepared by lysing approximately 10⁷ cells/ml using Trizol (Gibco BRL). Briefly, 1/10 volume of bromochloropropane (Molecular Research Corporation) was added to the RNA sample, vortexed and after 10 minutes at room temperature, the tubes were spun at 14,000 rpm in a Sorvall SS34 rotor. The aqueous phase was removed and placed in a 15 ml Falcon Tube. An equal volume of isopropanol was added and left at −20 degrees C. overnight. The precipitated RNA was spun down at 9,000 rpm for 15 min in a Sorvall SS34 rotor and washed in 70% ethanol. The pellet was redissolved in 300 μl of RNAse-free water and 35 μl buffer (Promega) 5 μl DTT, 7 μl RNAsin and 8 μl DNAse were added. The tube was incubated at 37 degrees C. for 30 minutes to remove contaminating genomic DNA, extracted once with phenol chloroform and re-precipitated with 1/10 volume of 3 M sodium acetate and 2 volumes of 100% ethanol. The RNA was spun down and placed in RNAse free water. RNA was stored at −80 degrees C.

[0772] AI_comprehensive Panel_v1.0

[0773] The plates for AI_comprehensive_panel_v1.0 include two control wells and 89 test samples comprised of cDNA isolated from surgical and postmortem human tissues obtained from the Backus Hospital and Clinomics (Frederick, Md.). Total RNA was extracted from tissue samples from the Backus Hospital in the Facility at CuraGen. Total RNA from other tissues was obtained from Clinomics.

[0774] Joint tissues including synovial fluid, synovium, bone and cartilage were obtained from patients undergoing total knee or hip replacement surgery at the Backus Hospital. Tissue samples were immediately snap frozen in liquid nitrogen to ensure that isolated RNA was of optimal quality and not degraded. Additional samples of osteoarthritis and rheumatoid arthritis joint tissues were obtained from Clinomics. Normal control tissues were supplied by Clinomics and were obtained during autopsy of trauma victims.

[0775] Surgical specimens of psoriatic tissues and adjacent matched tissues were provided as total RNA by Clinomics. Two male and two female patients were selected between the ages of 25 and 47. None of the patients were taking prescription drugs at the time samples were isolated.

[0776] Surgical specimens of diseased colon from patients with ulcerative colitis and Crohns disease and adjacent matched tissues were obtained from Clinomics. Bowel tissue from three female and three male Crohn's patients between the ages of 41-69 were used. Two patients were not on prescription medication while the others were taking dexamethasone, phenobarbital, or tylenol. Ulcerative colitis tissue was from three male and four female patients. Four of the patients were taking lebvid and two were on phenobarbital.

[0777] Total RNA from post mortem lung tissue from trauma victims with no disease or with emphysema, asthma or COPD was purchased from Clinomics. Emphysema patients ranged in age from 40-70 and all were smokers, this age range was chosen to focus on patients with cigarette-linked emphysema and to avoid those patients with alpha-1anti-trypsin deficiencies. Asthma patients ranged in age from 36-75, and excluded smokers to prevent those patients that could also have COPD. COPD patients ranged in age from 35-80 and included both smokers and non-smokers. Most patients were taking corticosteroids, and bronchodilators.

[0778] In the labels employed to identify tissues in the AI_comprehensive panel_v1.0 panel, the following abbreviations are used:
[0779] AI=Autoimmunity
[0780] Syn=Synovial
[0781] Normal=No apparent disease
[0782] Rep22/Rep20=individual patients
[0783] RA=Rheumatoid arthritis
   [0784] Backus=From Backus Hospital
   [0785] OA=Osteoarthritis
[0786] (SS) (BA) (MF)=Individual patients
[0787] Adj=Adjacent tissue
[0788] Match control=adjacent tissues
[0789] -M=Male
[0790] -F=Female
[0791] COPD=Chronic obstructive pulmonary disease

[0792] AI.05 Chondrosarcoma

[0793] The AI.05 chondrosarcoma plates are comprised of SW1353 cells that had been subjected to serum starvation and treatment with cytokines that are known to induce MMP (1, 3 and 13) synthesis (eg. IL1 beta). These treatments include: IL-1□ (10 ng/ml), IL-1□+ TNF-□ (50 ng/ml), IL-1□+ Oncostatin (50 ng/ml) and PMA(100 ng/ml). The SW1353 cells were obtained from the ATCC (American Type Culture Collection) and were all cultured under standard recommended conditions. The SW1353 cells were plated at 3×10⁵ cells/ml (in DMEM medium-10% FBS) in 6-well plates. The treatment was done in triplicate, for 6 and 18 h. The supernatants were collected for analysis of MMP 1, 3 and 13 production and for RNA extraction. RNA was prepared from these samples using the standard procedures.

[0794] Panels 5D and 5I

[0795] The plates for Panel 5D and 5I include two control wells and a variety of cDNAs isolated from human tissues and cell lines with an emphasis on metabolic diseases. Metabolic tissues were obtained from patients enrolled in the Gestational Diabetes study. Cells were obtained during different stages in the differentiation of adipocytes from human mesenchymal stem cells. Human pancreatic islets were also obtained.

[0796] In the Gestational Diabetes study subjects are young (18-40 years), otherwise healthy women with and without gestational diabetes undergoing routine (elective) Caesarean section. After delivery of the infant, when the surgical incisions were being repaired/closed, the obstetrician removed a small sample (<1 cc) of the exposed metabolic tissues during the closure of each surgical level. The biopsy material was rinsed in sterile saline, blotted and fast frozen within 5 minutes from the time of removal. The tissue was then flash frozen in liquid nitrogen and stored, individually, in sterile screw-top tubes and kept on dry ice for shipment to or to be picked up by CuraGen. The metabolic tissues of interest include uterine wall (smooth muscle), visceral adipose, skeletal muscle (rectus) and subcutaneous adipose. Patient descriptions are as follows:

| | |
|---|---|
| Patient 2 | Diabetic Hispanic, overweight, not on insulin |
| Patient 7-9 | Nondiabetic Caucasian and obese (BMI > 30) |
| Patient 10 | Diabetic Hispanic, overweight, on insulin |
| Patient 11 | Nondiabetic African American and overweight |
| Patient 12 | Diabetic Hispanic on insulin |

[0797] Adipocyte differentiation was induced in donor progenitor cells obtained from Osirus (a division of Clonetics/BioWhittaker) in triplicate, except for Donor 3U which had only two replicates. Scientists at Clonetics isolated, grew and differentiated human mesenchymal stem cells (HuMSCs) for CuraGen based on the published protocol found in Mark F. Pittenger, et al., Multilineage Potential of Adult Human Mesenchymal Stem Cells Science Apr. 2, 1999: 143-147. Clonetics provided Trizol lysates or frozen pellets suitable for mRNA isolation and ds cDNA production. A general description of each donor is as follows:

| | | | |
|---|---|---|---|
| Donor 2 and 3 | U | Mesenchymal | Undifferentiated Adipose |
| | | Stem cells | |
| Donor 2 and 3 | AM | Adipose | Adipose Midway Differentiated |
| Donor 2 and 3 | AD | Adipose | Adipose Differentiated |

[0798] Human cell lines were generally obtained from ATCC (American Type Culture Collection), NCI or the German tumor cell bank and fall into the following tissue groups: kidney proximal convoluted tubule, uterine smooth muscle cells, small intestine, liver HepG2 cancer cells, heart primary stromal cells, and adrenal cortical adenoma cells. These cells are all cultured under standard recommended conditions and RNA extracted using the standard procedures. All samples were processed at CuraGen to produce single stranded cDNA.

[0799] Panel 5I contains all samples previously described with the addition of pancreatic islets from a 58 year old female patient obtained from the Diabetes Research Institute at the University of Miami School of Medicine. Islet tissue was processed to total RNA at an outside source and delivered to CuraGen for addition to panel 5I.

[0800] In the labels employed to identify tissues in the 5D and 5I panels, the following abbreviations are used:
[0801] GO Adipose=Greater Omentum Adipose
[0802] SK=Skeletal Muscle
[0803] UT=Uterus
[0804] PL=Placenta
[0805] AD=Adipose Differentiated
[0806] AM=Adipose Midway Differentiated
[0807] U=Undifferentiated Stem Cells

[0808] Human Metabolic RTQ-PCR Panel

[0809] The plates for the Human Metabolic RTQ-PCR Panel include two control wells (genomic DNA control and chemistry control) and 211 cDNAs isolated from human tissues and cell lines with an emphasis on metabolic diseases. This panel is useful for establishing the tissue and cellular expression profiles for genes believed to play a role in the etiology and pathogenesis of obesity and/or diabetes and to confirm differential expression of such genes derived from other methods.

[0810] Metabolic tissues were obtained from patients enrolled in the CuraGen Gestational Diabetes study and from autopsy tissues from Type II diabetics and age, sex and race-matched control patients. One or more of the following were used to characterize the patients: body mass index [BMI=wt (kg)/ht (m²)], serum glucose, HgbA1c. Cell lines used in this panel are widely available through the American Type Culture Collection (ATCC), a repository for cultured cell lines. RNA from human Pancreatic Islets was also obtained.

[0811] In the Gestational Diabetes study, subjects are young (18-40 years), otherwise healthy women with and without gestational diabetes undergoing routine (elective) Caesarian section. After delivery of the infant, when the surgical incisions were being repaired/closed, the obstetrician removed a small sample (<1 cc) of the exposed metabolic tissues during the closure of each surgical level. The biopsy material was rinsed in sterile saline, blotted, and then flash frozen in liquid nitrogen and stored, individually, in sterile screw-top tubes and kept on dry ice for shipment to or to be picked up by CuraGen. The metabolic tissues of interest include uterine wall (smooth muscle), visceral adipose, skeletal muscle (rectus), and subcutaneous adipose. Patient descriptions are as follows:

| | |
|---|---|
| Patient 7 | Non-diabetic Caucasian and obese |
| Patient 8 | Non-diabetic Caucasian and obese |
| Patient 12 | Diabetic Caucasian with unknown BMI and on insulin |
| Patient 13 | Diabetic Caucasian, overweight, not on insulin |
| Patient 15 | Diabetic Caucasian, obese, not on insulin |
| Patient 17 | Diabetic Caucasian, normal weight, not on insulin |
| Patient 18 | Diabetic Hispanic, obese, not on insulin |
| Patient 19 | Non-diabetic Caucasian and normal weight |
| Patient 20 | Diabetic Caucasian, overweight, and on insulin |
| Patient 21 | Non-diabetic Caucasian and overweight |
| Patient 22 | Diabetic Caucasian, normal weight, on insulin |
| Patient 23 | Non-diabetic Caucasian and overweight |
| Patient 25 | Diabetic Caucasian, normal weight, not on insulin |
| Patient 26 | Diabetic Caucasian, obese, on insulin |
| Patient 27 | Diabetic Caucasian, obese, on insulin |

[0812] Total RNA was isolated from metabolic tissues of 12 Type II diabetic patients and 12 matched control patients included hypothalamus, liver, pancreas, small intestine, psoas muscle, diaphragm muscle, visceral adipose, and subcutaneous adipose. The diabetics and non-diabetics were matched for age, sex, ethnicity, and BMI where possible.

[0813] The panel also contains pancreatic islets from a 22 year old male patient (with a BMI of 35) obtained from the Diabetes Research Institute at the University of Miami School of Medicine. Islet tissue was processed to total RNA at CuraGen.

[0814] Cell lines used in this panel are widely available through the American Type Culture Collection (ATCC), a repository for cultured cell lines, and were cultured at an outside facility. The RNA was extracted at CuraGen according to CuraGen protocols. All samples were then processed at CuraGen to produce single stranded cDNA.

[0815] In the labels used to identify tissues in the Human Metabolic panel, the following abbreviations are used:

Panel CNSD.01

| | |
|---|---|
| Pl = | placenta |
| Go = | greater omentum |
| Sk = | skeletal muscle |
| Ut = | uterus |
| CC = | Caucasian |
| HI = | Hispanic |
| AA = | African American |
| AS = | Asian |
| Diab = | Type II diabetic |
| Norm = | Non-diabetic |
| Overwt = | Overweight; med BMI |
| Obese = | Hi BMI |
| Low BM = | 20-25 |
| Med BM = | 26-30 |
| Hi BMI = | Greater than 30 |
| M = | Male |
| # = | Patient identifier |
| Vis. = | Visceral |
| SubQ = | Subcutaneous |

[0816] The plates for Panel CNSD.01 include two control wells and 94 test samples comprised of cDNA isolated from postmortem human brain tissue obtained from the Harvard Brain Tissue Resource Center. Brains are removed from calvaria of donors between 4 and 24 hours after death, sectioned by neuroanatomists, and frozen at −80° C. in liquid nitrogen vapor. All brains are sectioned and examined by neuropathologists to confirm diagnoses with clear associated neuropathology.

[0817] Disease diagnoses are taken from patient records. The panel contains two brains from each of the following diagnoses: Alzheimer's disease, Parkinson's disease, Huntington's disease, Progressive Supernuclear Palsy, Depression, and “Normal controls”. Within each of these brains, the following regions are represented: cingulate gyrus, temporal pole, globus palladus, substantia nigra, Brodman Area 4 (primary motor strip), Brodman Area 7 (parietal cortex), Brodman Area 9 (prefrontal cortex), and Brodman area 17 (occipital cortex). Not all brain regions are represented in all cases; e.g., Huntington's disease is characterized in part by neurodegeneration in the globus palladus, thus this region is impossible to obtain from confirmed Huntington's cases. Likewise Parkinson's disease is characterized by degeneration of the substantia nigra making this region more difficult to obtain. Normal control brains were examined for neuropathology and found to be free of any pathology consistent with neurodegeneration.

[0818] In the labels employed to identify tissues in the CNS panel, the following abbreviations are used:
[0819] PSP=Progressive supranuclear palsy
[0820] Sub Nigra=Substantia nigra
[0821] Glob Palladus=Globus palladus
[0822] Temp Pole=Temporal pole
[0823] Cing Gyr=Cingulate gyrus
[0824] BA 4=Brodman Area 4

[0825] Panel CNS_Neurodegeneration_V1.0

[0826] The plates for Panel CNS_Neurodegeneration_V1.0 include two control wells and 47 test samples comprised of cDNA isolated from postmortem human brain tissue obtained from the Harvard Brain Tissue Resource Center (McLean Hospital) and the Human Brain and Spinal Fluid Resource Center (VA Greater Los Angeles Healthcare System). Brains are removed from calvaria of donors between 4 and 24 hours after death, sectioned by neuroanatomists, and frozen at −80° C. in liquid nitrogen vapor. All brains are sectioned and examined by neuropathologists to confirm diagnoses with clear associated neuropathology.

[0827] Disease diagnoses are taken from patient records. The panel contains six brains from Alzheimer's disease (AD) patients, and eight brains from “Normal controls” who showed no evidence of dementia prior to death. The eight normal control brains are divided into two categories: Controls with no dementia and no Alzheimer's like pathology (Controls) and controls with no dementia but evidence of severe Alzheimer's like pathology, (specifically senile plaque load rated as level 3 on a scale of 0-3; 0=no evidence of plaques, 3=severe AD senile plaque load). Within each of these brains, the following regions are represented: hippocampus, temporal cortex (Brodman Area 21), parietal cortex (Brodman area 7), and occipital cortex (Brodman area 17). These regions were chosen to encompass all levels of neurodegeneration in AD. The hippocampus is a region of early and severe neuronal loss in AD; the temporal cortex is known to show neurodegeneration in AD after the hippocampus; the parietal cortex shows moderate neuronal death in the late stages of the disease; the occipital cortex is spared in AD and therefore acts as a “control” region within AD patients. Not all brain regions are represented in all cases.

[0828] In the labels employed to identify tissues in the CNS_Neurodegeneration_V1.0 panel, the following abbreviations are used:
[0829] AD=Alzheimer's disease brain; patient was demented and showed AD-like pathology upon autopsy
[0830] Control=Control brains; patient not demented, showing no neuropathology
[0831] Control (Path)=Control brains; pateint not demented but showing sever AD-like pathology
[0832] SupTemporal Ctx=Superior Temporal Cortex
[0833] Inf Temporal Ctx=Inferior Temporal Cortex

[0834] The expression of the gene was analyzed after normalization using scaling factor. The scaling factor is calculated from the Grand mean of CT values for a panel and the Well mean which is specific to the tissue. The Grand mean is the average CT value for all wells across all runs. For example, if a panel has 50 samples and has had 100 probe/primer sets run on it, the grand mean would be the average of these 5000 CT scores. The well mean is tissue-specific. On the above described panel there would be 50 different well means, each taking the average of the 100 CT values generated for each sample on the panel from the 100 probe/primer sets.

[0835] The asumption is that across a large number of genes, all samples should have the same CT value. If a well is lower than the average across a large number of genes, it is “scaled up” by that difference or the “scaling factor”.

[0836] Scaling Factor=Grand mean−Well mean

[0837] The new CT value for the well is:

[0838] Scaled CT value=Raw CT+Scaling Factor.

Statistical Analysis of CNS_Neurodegeneration_V1.0 Data

[0839] All data were analyzed by analysis of covariance (ANCOVA). As a covariate, the average CT value (or number of rounds of PCR until signal from the well was detected) was calculated for 1000 PCR runs on different genes. This number is therefore an estimate of total cDNA quantity and quality for each sample. When RTQ PCR is run for a given gene, CT values are therefore compared to these average values to correct for differences in well loading or original RNA quality. Stats were run on data from the temporal cortex, as this regions shows sever neurodegeneration in the mid to late stages of the disease, and because the largest number of samples were available for this region giving the most statistical power. Covariates for each well corresponding to Temporal Cortex samples are listed below. The well numbers (10-25) are listed under “Order” in the table of CT values given for each gene run. For this analysis, Controls and Control (Path) cases were grouped together as the intention was to find genes associated with dementia as opposed to amyloid deposition.

Panel CNS_Neurodegeneration_V2.0

| | | |
|---|---|---|
| 10 | AD1 | 33.014 |
| 11 | AD2 | 32.309 |
| 12 | AD3 | 34.195 |
| 13 | AD4 | 32.689 |
| 14 | AD5 Inf | 30.829 |
| 15 | AD5 Sup | 31.519 |
| 16 | AD6 Inf | 31.517 |
| 17 | AD6 Sup | 31.415 |
| 18 | Con1 | 34.236 |
| 19 | Con2 | 32.352 |
| 20 | Con3 | 33.215 |
| 21 | Con4 | 33.661 |
| 22 | Con5 (Path) | 31.685 |
| 23 | Con6 (Path) | 32.187 |
| 24 | Con7 (Path) | 34.427 |
| 25 | Con8 (Path) | 32.238 |

[0840] The plates for Panel CNS_Neurodegeneration_V2.0 include two control wells and 47 test samples comprised of cDNA isolated from postmortem human brain tissue obtained from the Harvard Brain Tissue Resource Center (McLean Hospital) and the Human Brain and Spinal Fluid Resource Center (VA Greater Los Angeles Healthcare System). Brains are removed from calvaria of donors between 4 and 24 hours after death, sectioned by neuroanatomists, and frozen at −80° C. in liquid nitrogen vapor. All brains are sectioned and examined by neuropathologists to confirm diagnoses with clear associated neuropathology.

[0841] Disease diagnoses are taken from patient records. The panel contains sixteen brains from Alzheimer's disease (AD) patients, and twenty-nine brains from “Normal controls” who showed no evidence of dementia prior to death. The twenty-nine normal control brains are divided into two categories: Fourteen controls with no dementia and no Alzheimer's like pathology (Controls) and fifteen controls with no dementia but evidence of severe Alzheimer's like pathology, (specifically senile plaque load rated as level 3 on a scale of 0-3; 0=no evidence of plaques, 3=severe AD senile plaque load). Tissue from the temporal cotex (Broddmann Area 21) was selected for all samples from the Harvard Brain Tissue Resource Center; from the two sample from the Human Brain and Spinal Fluid Resource Center (samples 1 and 2) tissue from the inferior and superior temporal cortex was used; each sample on the panel represents a pool of inferior and superior temporal cortex from an individual patient. The temporal cortex was chosen as it shows a loss of neurons in the intermediate stages of the disease. Selection of a region which is affected in the early stages of Alzheimer's disease (e.g., hippocampus or entorhinal cortex) could potentially result in the examination of gene expression after vulnerable neurons are lost, and missing genes involved in the actual neurodegeneration process.

[0842] In the labels employed to identify tissues in the CNS_Neurodegeneration_V2.0 panel, the following abbreviations are used:
[0843] AD=Alzheimer's disease brain; patient was demented and showed AD-like pathology upon autopsy
[0844] Control=Control brains; patient not demented, showing no neuropathology
   [0845] AH3=Control brains; pateint not demented but showing sever AD-like pathology
[0846] Inf & Sup Temp Ctx Pool=Pool of inferior and superior temporal cortex for a given individual

[0847] A. CG50253-01: Epidermal Growth Factor

[0848] Expression of full-length physical clone CG50253-01 was assessed using the primer-probe set Ag2505, described in Table AA. Results of the RTQ-PCR runs are shown in Tables AB, AC, AD, AE, AF and AG.

TABLE AA

Probe Name Ag2505

| | | | | |
|---|---|---|---|---|
| | | | Start | SEQ ID |
| Primers | Sequences | Length | Position No | |

| | | | | |
|---|---|---|---|---|
| Forward | 5′-aaagaaggataccagggtgatg-3′ | 22 | 969 | 1213 |
| Probe | TET-5′-atgattgaaccttcaggtccaattca-3′ | 26 | 1020 | 1214 |
| Reverse | 5′-ggtaccatttccctttggtaca-3′ | 22 | 1046 | 1215 |

[0849] TABLE AB
AI_comprehensive panel_v1.0

| Tissue Name | A |
|---|---|
| 110967 COPD-F | 15.3 |
| 110980 COPD-F | 11.8 |
| 110968 COPD-M | 8.9 |
| 110977 COPD-M | 28.1 |
| 110989 Emphysema-F | 9.6 |
| 110992 Emphysema-F | 1.9 |
| 110993 Emphysema-F | 7.7 |
| 110994 Emphysema-F | 5.2 |
| 110995 Emphysema-F | 3.6 |
| 110996 Emphysema-F | 0.4 |
| 110997 Asthma-M | 4.6 |
| 111001 Asthma-F | 2.3 |
| 111002 Asthma-F | 3.5 |
| 111003 Atopic Asthma-F | 22.5 |
| 111004 Atopic Asthma-F | 10.4 |
| 111005 Atopic Asthma-F | 7.3 |
| 111006 Atopic Asthma-F | 1.6 |
| 111417 Allergy-M | 5.1 |
| 112347 Allergy-M | 1.4 |
| 112349 Normal Lung-F | 0.7 |
| 112357 Normal Lung-F | 7.1 |
| 112354 Normal Lung-M | 7.6 |
| 112374 Crohns-F | 9.0 |
| 112389 Match Control Crohns-F | 11.2 |
| 112375 Crohns-F | 10.2 |
| 112732 Match Control Crohns-F | 1.2 |
| 112725 Crohns-M | 0.9 |
| 112387 Match Control Crohns-M | 11.4 |
| 112378 Crohns-M | 1.3 |
| 112390 Match Control Crohns-M | 16.7 |
| 112726 Crohns-M | 21.8 |
| 112731 Match Control Crohns-M | 15.3 |
| 112380 Ulcer Col-F | 5.8 |
| 112734 Match Control Ulcer Col-F | 3.7 |
| 112384 Ulcer Col-F | 19.2 |
| 112737 Match Control Ulcer Col-F | 13.5 |
| 112386 Ulcer Col-F | 8.4 |
| 112738 Match Control Ulcer Col-F | 3.8 |
| 112381 Ulcer Col-M | 5.0 |
| 112735 Match Control Ulcer Col-M | 9.7 |
| 112382 Ulcer Col-M | 11.7 |
| 112394 Match Control Ulcer Col-M | 3.1 |
| 112383 Ulcer Col-M | 5.1 |
| 112736 Match Control Ulcer Col-M | 5.0 |
| 112423 Psoriasis-F | 14.0 |
| 112427 Match Control Psoriasis-F | 16.7 |
| 112418 Psoriasis-M | 14.0 |
| 112723 Match Control Psoriasis-M | 0.2 |
| 112419 Psoriasis-M | 18.2 |
| 112424 Match Control Psoriasis-M | 6.8 |
| 112420 Psoriasis-M | 13.9 |
| 112425 Match Control Psoriasis-M | 13.6 |
| 104689 (MF) OA Bone-Backus | 25.3 |
| 104690 (MF) Adj “Normal” Bone-Backus | 27.9 |
| 104691 (MF) OA Synovium-Backus | 2.9 |
| 104692 (BA) OA Cartilage-Backus | 0.0 |
| 104694 (BA) OA Bone-Backus | 5.8 |
| 104695 (BA) Adj “Normal” Bone-Backus | 14.1 |
| 104696 (BA) OA Synovium-Backus | 2.3 |
| 104700 (SS) OA Bone-Backus | 28.9 |
| 104701 (SS) Adj “Normal” Bone-Backus | 25.5 |
| 104702 (SS) OA Synovium-Backus | 11.7 |
| 117093 OA Cartilage Rep7 | 7.5 |
| 112672 OA Bone5 | 19.2 |
| 112673 OA Synovium5 | 6.4 |
| 112674 OA Synovial Fluid cells5 | 6.8 |
| 117100 OA Cartilage Rep14 | 1.9 |
| 112756 OA Bone9 | 26.4 |
| 112757 OA Synovium9 | 2.8 |
| 112758 OA Synovial Fluid Cells9 | 8.1 |
| 117125 RA Cartilage Rep2 | 14.8 |
| 113492 Bone2 RA | 84.7 |
| 113493 Synovium2 RA | 40.9 |
| 113494 Syn Fluid Cells RA | 61.1 |
| 113499 Cartilage4 RA | 90.1 |
| 113500 Bone4 RA | 100.0 |
| 113501 Synovium4 RA | 71.2 |
| 113502 Syn Fluid Cells4 RA | 48.6 |
| 113495 Cartilage3 RA | 77.9 |
| 113496 Bone3 RA | 92.0 |
| 113497 Synovium3 RA | 53.6 |
| 113498 Syn Fluid Cells3 RA | 98.6 |
| 117106 Normal Cartilage Rep20 | 3.0 |
| 113663 Bone3 Normal | 2.0 |
| 113664 Synovium3 Normal | 0.5 |
| 113665 Syn Fluid Cells3 Normal | 1.6 |
| 117107 Normal Cartilage Rep22 | 3.7 |
| 113667 Bone4 Normal | 4.3 |
| 113668 Synovium4 Normal | 9.1 |
| 113669 Syn Fluid Cells4 Normal | 6.6 |

Column A - Rel. Exp. (%) Ag2505, Run 248588456

[0850] TABLE AC
CNS_neurodegeneration_v1.0

| Tissue Name | A | B |
|---|---|---|
| AD 1 Hippo | 38.7 | 51.4 |
| AD 2 Hippo | 48.0 | 64.6 |
| AD 3 Hippo | 18.8 | 30.6 |
| AD 4 Hippo | 34.6 | 33.0 |
| AD 5 Hippo | 36.9 | 39.2 |
| AD 6 Hippo | 100.0 | 97.9 |
| Control 2 Hippo | 26.8 | 33.7 |
| Control 4 Hippo | 39.8 | 52.5 |
| Control (Path) 3 Hippo | 18.4 | 21.8 |
| AD 1 Temporal Ctx | 48.6 | 58.6 |
| AD 2 Temporal Ctx | 45.1 | 43.2 |
| AD 3 Temporal Ctx | 37.4 | 33.4 |
| AD 4 Temporal Ctx | 50.3 | 66.4 |
| AD 5 Inf Temporal Ctx | 23.0 | 26.4 |
| AD 5 Sup Temporal Ctx | 42.3 | 43.8 |
| AD 6 Inf Temporal Ctx | 88.3 | 100.0 |
| AD 6 Sup Temporal Ctx | 70.2 | 88.3 |
| Control 1 Temporal Ctx | 16.6 | 16.3 |
| Control 2 Temporal Ctx | 16.7 | 21.6 |
| Control 3 Temporal Ctx | 7.2 | 12.9 |
| Control 3 Temporal Ctx | 19.8 | 43.5 |
| Control (Path) 1 Temporal Ctx | 20.6 | 24.1 |
| Control (Path) 2 Temporal Ctx | 20.6 | 32.1 |
| Control (Path) 3 Temporal Ctx | 14.0 | 17.8 |
| Control (Path) 4 Temporal Ctx | 20.9 | 23.3 |
| AD 1 Occipital Ctx | 31.9 | 35.4 |
| AD 2 Occipital Ctx (Missing) | 5.2 | 4.8 |
| AD 3 Occipital Ctx | 16.7 | 23.5 |
| AD 4 Occipital Ctx | 39.5 | 46.3 |
| AD 5 Occipital Ctx | 24.7 | 22.8 |
| AD 6 Occipital Ctx | 59.9 | 87.7 |
| Control 1 Occipital Ctx | 19.8 | 14.9 |
| Control 2 Occipital Ctx | 26.2 | 29.9 |
| Control 3 Occipital Ctx | 15.2 | 15.7 |
| Control 4 Occipital Ctx | 34.2 | 36.6 |
| Control (Path) 1 Occipital Ctx | 25.5 | 24.1 |
| Control (Path) 2 Occipital Ctx | 15.1 | 20.3 |
| Control (Path) 3 Occipital Ctx | 9.5 | 14.2 |
| Control (Path) 4 Occipital Ctx | 30.6 | 37.6 |
| Control 1 Parietal Ctx | 13.3 | 14.0 |
| Control 2 Parietal Ctx | 46.3 | 57.8 |
| Control 3 Parietal Ctx | 10.1 | 12.9 |
| Control (Path) 1 Parietal Ctx | 24.5 | 29.5 |
| Control (Path) 2 Parietal Ctx | 28.3 | 35.6 |
| Control (Path) 3 Parietal Ctx | 12.7 | 18.9 |
| Control (Path) 4 Parietal Ctx | 28.3 | 32.5 |

Column A - Rel. Exp. (%) Ag2505, Run 208123723
Column B - Rel. Exp. (%) Ag2505, Run 224116291

[0851] TABLE AD
Panel 1.3D

| Tissue Name | A |
|---|---|
| Liver adenocarcinoma | 1.8 |
| Pancreas | 13.7 |
| Pancreatic ca. CAPAN 2 | 1.5 |
| Adrenal gland | 3.6 |
| Thyroid | 100.0 |
| Salivary gland | 4.1 |
| Pituitary gland | 37.6 |
| Brain (fetal) | 44.1 |
| Brain (whole) | 9.3 |
| Brain (amygdala) | 8.1 |
| Brain (cerebellum) | 1.8 |
| Brain (hippocampus) | 10.2 |
| Brain (substantia nigra) | 29.3 |
| Brain (thalamus) | 3.6 |
| Cerebral Cortex | 7.7 |
| Spinal cord | 15.2 |
| glio/astro U87-MG | 0.0 |
| glio/astro U-118-MG | 0.0 |
| astrocytoma SW1783 | 0.3 |
| neuro*; met SK-N-AS | 0.4 |
| astrocytoma SF-539 | 1.8 |
| astrocytoma SNB-75 | 2.7 |
| glioma SNB-19 | 0.0 |
| glioma U251 | 9.3 |
| glioma SF-295 | 0.4 |
| Heart (fetal) | 10.0 |
| Heart | 3.1 |
| Skeletal muscle (fetal) | 12.8 |
| Skeletal muscle | 20.9 |
| Bone marrow | 1.2 |
| Thymus | 6.0 |
| Spleen | 6.7 |
| Lymph node | 6.7 |
| Colorectal | 23.5 |
| Stomach | 12.0 |
| Small intestine | 54.3 |
| Colon ca. SW480 | 1.1 |
| Colon ca.* SW620(SW480 met) | 1.4 |
| Colon ca. HT29 | 7.3 |
| Colon ca. HCT-116 | 7.3 |
| Colon ca. CaCo-2 | 10.7 |
| Colon ca. tissue(ODO3866) | 8.5 |
| Colon ca. HCC-2998 | 2.9 |
| Gastric ca.* (liver met) NCI-N87 | 71.7 |
| Bladder | 14.8 |
| Trachea | 21.9 |
| Kidney | 38.2 |
| Kidney (fetal) | 27.5 |
| Renal ca. 786-0 | 0.0 |
| Renal ca. A498 | 0.2 |
| Renal ca. RXF 393 | 39.8 |
| Renal ca. ACHN | 51.1 |
| Renal ca. UO-31 | 0.2 |
| Renal ca. TK-10 | 0.0 |
| Liver | 1.4 |
| Liver (fetal) | 2.3 |
| Liver ca. (hepatoblast) HepG2 | 11.8 |
| Lung | 75.3 |
| Lung (fetal) | 54.7 |
| Lung ca. (small cell) LX-1 | 5.5 |
| Lung ca. (small cell) NCI-H69 | 5.6 |
| Lung ca. (s. cell var.) SHP-77 | 0.2 |
| Lung ca. (large cell)NCI-H460 | 1.2 |
| Lung ca. (non-sm. cell) A549 | 1.2 |
| Lung ca. (non-s. cell) NCI-H23 | 3.2 |
| Lung ca. (non-s. cell) HOP-62 | 0.0 |
| Lung ca. (non-s. cl) NCI-H522 | 0.0 |
| Lung ca. (squam.) SW 900 | 1.8 |
| Lung ca. (squam.) NCI-H596 | 14.6 |
| Mammary gland | 11.9 |
| Breast ca.* (pl. ef) MCF-7 | 89.5 |
| Breast ca.* (pl. ef) MDA-MB-231 | 0.0 |
| Breast ca.* (pl. ef) T47D | 24.7 |
| Breast ca. BT-549 | 2.3 |
| Breast ca. MDA-N | 0.0 |
| Ovary | 3.5 |
| Ovarian ca. OVCAR-3 | 6.4 |
| Ovarian ca. OVCAR-4 | 0.0 |
| Ovarian ca. OVCAR-5 | 0.0 |
| Ovarian ca. OVCAR-8 | 0.2 |
| Ovarian ca. IGROV-1 | 14.5 |
| Ovarian ca.* (ascites) SK-OV-3 | 9.3 |
| Uterus | 27.7 |
| Placenta | 2.9 |
| Prostate | 25.0 |
| Prostate ca.* (bone met)PC-3 | 0.0 |
| Testis | 2.5 |
| Melanoma Hs688(A).T | 0.0 |
| Melanoma* (met) Hs688(B).T | 0.0 |
| Melanoma UACC-62 | 0.0 |
| Melanoma M14 | 0.0 |
| Melanoma LOX IMVI | 0.0 |
| Melanoma* (met) SK-MEL-5 | 0.0 |
| Adipose | 19.3 |

Column A - Rel. Exp. (%) Ag2505, Run 165531061

[0852] TABLE AE
Panel 4D

| Tissue Name | A |
|---|---|
| Secondary Th1 act | 0.0 |
| Secondary Th2 act | 0.0 |
| Secondary Tr1 act | 0.2 |
| Secondary Th1 rest | 0.0 |
| Secondary Th2 rest | 0.3 |
| Secondary Tr1 rest | 0.0 |
| Primary Th1 act | 0.0 |
| Primary Th2 act | 0.2 |
| Primary Tr1 act | 0.1 |
| Primary Th1 rest | 0.1 |
| Primary Th2 rest | 0.0 |
| Primary Tr1 rest | 0.1 |
| CD45RA CD4 lymphocyte act | 0.0 |
| CD45RO CD4 lymphocyte act | 0.0 |
| CD8 lymphocyte act | 0.0 |
| Secondary CD8 lymphocyte rest | 0.0 |
| Secondary CD8 lymphocyte act | 0.0 |
| CD4 lymphocyte none | 0.0 |
| 2ry Th1/Th2/Tr1_anti-CD95 CH11 | 0.0 |
| LAK cells rest | 0.0 |
| LAK cells IL-2 | 0.0 |
| LAK cells IL-2 + IL-12 | 0.0 |
| LAK cells IL-2 + IFN gamma | 0.0 |
| LAK cells IL-2 + IL-18 | 0.0 |
| LAK cells PMA/ionomycin | 0.0 |
| NK Cells IL-2 rest | 0.0 |
| Two Way MLR 3 day | 0.0 |
| Two Way MLR 5 day | 0.0 |
| Two Way MLR 7 day | 0.0 |
| PBMC rest | 0.0 |
| PBMC PWM | 0.1 |
| PBMC PHA-L | 0.0 |
| Ramos (B cell) none | 0.0 |
| Ramos (B cell) ionomycin | 0.0 |
| B lymphocytes PWM | 0.2 |
| B lymphocytes CD40L and IL-4 | 0.1 |
| EOL-1 dbcAMP | 0.0 |
| EOL-1 dbcAMP PMA/ionomycin | 0.0 |
| Dendritic cells none | 0.1 |
| Dendritic cells LPS | 0.0 |
| Dendritic cells anti-CD40 | 0.0 |
| Monocytes rest | 0.0 |
| Monocytes LPS | 0.0 |
| Macrophages rest | 0.0 |
| Macrophages LPS | 0.0 |
| HUVEC none | 0.0 |
| HUVEC starved | 0.3 |
| HUVEC IL-1beta | 0.2 |
| HUVEC IFN gamma | 0.1 |
| HUVEC TNF alpha + IFN gamma | 0.0 |
| HUVEC TNF alpha + IL4 | 0.1 |
| HUVEC IL-11 | 0.0 |
| Lung Microvascular EC none | 0.0 |
| Lung Microvascular EC TNFalpha + IL-1 beta | 0.0 |
| Microvascular Dermal EC none | 0.0 |
| Microsvasular Dermal EC TNFalpha + IL-1beta | 0.2 |
| Bronchial epithelium TNFalpha + IL1beta | 2.0 |
| Small airway epithelium none | 0.5 |
| Small airway epithelium TNFalpha + IL-1beta | 19.6 |
| Coronery artery SMC rest | 0.0 |
| Coronery artery SMC TNFalpha + IL-1beta | 0.0 |
| Astrocytes rest | 2.0 |
| Astrocytes TNFalpha + IL-1beta | 2.0 |
| KU-812 (Basophil) rest | 0.0 |
| KU-812 (Basophil) PMA/ionomycin | 0.0 |
| CCD1106 (Keratinocytes) none | 0.4 |
| CCD1106 (Keratinocytes) TNFalpha + IL-1beta | 1.3 |
| Liver cirrhosis | 7.5 |
| Lupus kidney | 13.3 |
| NCI-H292 none | 21.8 |
| NCI-H292 IL-4 | 42.0 |
| NCI-H292 IL-9 | 41.8 |
| NCI-H292 IL-13 | 20.9 |
| NCI-H292 IFN gamma | 14.4 |
| HPAEC none | 0.0 |
| HPAEC TNF alpha + IL-1 beta | 0.5 |
| Lung fibroblast none | 4.5 |
| Lung fibroblast TNF alpha + IL-1 beta | 0.3 |
| Lung fibroblast IL-4 | 14.6 |
| Lung fibroblast IL-9 | 3.9 |
| Lung fibroblast IL-13 | 8.7 |
| Lung fibroblast IFN gamma | 14.9 |
| Dermal fibroblast CCD1070 rest | 0.0 |
| Dermal fibroblast CCD1070 TNF alpha | 0.0 |
| Dermal fibroblast CCD1070 IL-1 beta | 0.0 |
| Dermal fibroblast IFN gamma | 0.0 |
| Dermal fibroblast IL-4 | 0.2 |
| IBD Colitis 2 | 0.3 |
| IBD Crohn's | 9.9 |
| Colon | 41.2 |
| Lung | 61.6 |
| Thymus | 100.0 |
| Kidney | 21.3 |

Column A - Rel. Exp. (%) Ag2505, Run 164318134

[0853] TABLE AF
Panel 5 Islet

| Tissue Name | A |
|---|---|
| 97457_Patient-02go_adipose | 32.3 |
| 97476_Patient-07sk_skeletal muscle | 8.2 |
| 97477_Patient-07ut_uterus | 31.4 |
| 97478_Patient-07pl_placenta | 3.5 |
| 99167_Bayer Patient 1 | 9.5 |
| 97482_Patient-08ut_uterus | 90.1 |
| 97483_Patient-08pl_placenta | 7.4 |
| 97486_Patient-09sk_skeletal muscle | 1.4 |
| 97487_Patient-09ut_uterus | 78.5 |
| 97488_Patient-09pl_placenta | 0.6 |
| 97492_Patient-10ut_uterus | 66.0 |
| 97493_Patient-10pl_placenta | 3.1 |
| 97495_Patient-11go_adipose | 28.3 |
| 97496_Patient-11sk_skeletal muscle | 5.8 |
| 97497_Patient-11ut_uterus | 35.4 |
| 97498_Patient-11pl_placenta | 2.0 |
| 97500_Patient-12go_adipose | 35.1 |
| 97501_Patient-12sk_skeletal muscle | 9.9 |
| 97502_Patient-12ut_uterus | 100.0 |
| 97503_Patient-12pl_placenta | 4.1 |
| 94721_Donor 2 U - A_Mesenchymal Stem Cells | 0.0 |
| 94722_Donor 2 U - B_Mesenchymal Stem Cells | 0.0 |
| 94723_Donor 2 U - C_Mesenchymal Stem Cells | 0.0 |
| 94709_Donor 2 AM - A_adipose | 0.0 |
| 94710_Donor 2 AM - B_adipose | 0.0 |
| 94711_Donor 2 AM - C_adipose | 0.0 |
| 94712_Donor 2 AD - A_adipose | 0.0 |
| 94713_Donor 2 AD - B_adipose | 0.0 |
| 94714_Donor 2 AD - C_adipose | 0.0 |
| 94742_Donor 3 U - A_Mesenchymal Stem Cells | 0.0 |
| 94743_Donor 3 U - B_Mesenchymal Stem Cells | 0.0 |
| 94730_Donor 3 AM - A_adipose | 0.0 |
| 94731_Donor 3 AM - B_adipose | 0.0 |
| 94732_Donor 3 AM - C_adipose | 0.2 |
| 94733_Donor 3 AD - A_adipose | 0.0 |
| 94734_Donor 3 AD - B_adipose | 0.0 |
| 94735_Donor 3 AD - C_adipose | 0.0 |
| 77138_Liver_HepG2untreated | 21.2 |
| 73556_Heart_Cardiac stromal cells (primary) | 0.0 |
| 81735_Small Intestine | 36.9 |
| 72409_Kidney_Proximal Convoluted Tubule | 4.6 |
| 82685_Small intestine_Duodenum | 27.0 |
| 90650_Adrenal_Adrenocortical adenoma | 0.3 |
| 72410_Kidney_HRCE | 7.2 |
| 72411_Kidney_HRE | 10.7 |
| 73139_Uterus_Uterine smooth muscle cells | 0.0 |

Column A - Rel. Exp. (%) Ag2505, Run 248045752

[0854] TABLE AG
general oncology screening panel_v_2.4

| Tissue Name | A |
|---|---|
| Colon cancer 1 | 7.7 |
| Colon NAT 1 | 2.5 |
| Colon cancer 2 | 26.4 |
| Colon NAT 2 | 8.4 |
| Colon cancer 3 | 38.2 |
| Colon NAT 3 | 16.7 |
| Colon malignant cancer 4 | 69.7 |
| Colon NAT 4 | 8.7 |
| Lung cancer 1 | 7.2 |
| Lung NAT 1 | 8.0 |
| Lung cancer 2 | 26.1 |
| Lung NAT 2 | 17.4 |
| Squamous cell carcinoma 3 | 19.6 |
| Lung NAT 3 | 8.3 |
| Metastatic melanoma 1 | 14.5 |
| Melanoma 2 | 1.1 |
| Melanoma 3 | 2.5 |
| Metastatic melanoma 4 | 13.5 |
| Metastatic melanoma 5 | 12.6 |
| Bladder cancer 1 | 1.0 |
| Bladder NAT 1 | 0.0 |
| Bladder cancer 2 | 2.4 |
| Bladder NAT 2 | 0.3 |
| Bladder NAT 3 | 0.7 |
| Bladder NAT 4 | 1.5 |
| Prostate adenocarcinoma 1 | 100.0 |
| Prostate adenocarcinoma 2 | 12.9 |
| Prostate adenocarcinoma 3 | 15.1 |
| Prostate adenocarcinoma 4 | 15.9 |
| Prostate NAT 5 | 14.7 |
| Prostate adenocarcinoma 6 | 13.1 |
| Prostate adenocarcinoma 7 | 16.2 |
| Prostate adenocarcinoma 8 | 4.5 |
| Prostate adenocarcinoma 9 | 33.4 |
| Prostate NAT 10 | 7.7 |
| Kidney cancer 1 | 9.6 |
| Kidney NAT 1 | 33.4 |
| Kidney cancer 2 | 19.8 |
| Kidney NAT 2 | 64.6 |
| Kidney cancer 3 | 7.1 |
| Kidney NAT 3 | 29.7 |
| Kidney cancer 4 | 8.5 |
| Kidney NAT 4 | 7.9 |

Column A - Rel. Exp. (%) Ag2505, Run 267145080

[0855] AI_comprehensive panel_v1.0 Summary: Ag2505 Highest expression of this gene was seen in a sample derived from rheumatoid arthritis bone (CT=27). This gene displayed ubiquitous expression, but expression of this gene was higher in bone, synovium, cartilage and synovial fluid from RA patients as compared to expression in samples from OA patients, normal and diseased lung samples. Expression of this gene was downregulated in Crohn's samples as compared to the corresponding control samples. This gene encodes a putative novel adhesion molecule which is homologous to mouse POEM (preosteoblast epidermal growth factor-like repeat protein with meprin)or nephronectin. Murine nephronectin may function in multiple biological processes including development of the kidney (Miner J H. J Cell Biol 2001 Jul 23; 154(2):257-9) and bone and contribute to liver and lung fibrosis (Levine et al., 2000, Am J Pathol 2000 June; 156(6):1927-35). Therapeutic modulation of this gene or gene product is useful in the treatment of autoimmune and inflammatory diseases such as rheumatoid and osteoarthritis, Inflammatory bowel disease, COPD, asthma, psoriasis, liver and lung fibrosis.

[0856] CNS_neurodegeneration_v1.0 Summary: Ag2505 Greater expression of this gene in the temporal cortex of Alzheimer's disease patients demonstrates a functional role for this gene, an EGF homolog, in neurodegenerative disease. Alpha secretase activity, which is generally believed to be a beneficial processing alternative to beta secretase, is increased by EGF in neuronal cells. (Slack B E. C.Biochem J 1997 October 1;327 ( Pt 1):245-9) This suggests the increased expression observed here is a compensatory action in the brain to counter the mechanisms of Alzheimer's Disease. This gene or the protein encoded by this gene is a potential therapeutic agent for the treatment of Alzheimer's disease and other neurodegenerative diseases.

[0857] EGF is also known to facilitate long term potentiation (LTP) in the hippocampus, a process thought to underlie learning and memory. (Abe K Brain Res 1992 Octobter 16;593(2):335-8 ) This gene has utility in treating disorders of memory, such as neurodegenerative diseases and aging, when used alone or incombination with other growth factors such as bFGF.

[0858] In addition, EGF supports the growth and differentiation of dopaniinergic neurons, which are selectively vulnerable to loss in Parkinson's disease. (Storch A. Exp Neurol 2001 August; 170(2):317-25 ). This gene or gene product has utility in treating Parkinson's Disease.

[0859] Panel 1.3D Summary: Ag2505 Highest expression of this gene was detected in the thyroid (CT=29.3), with lower but still significant levels of expression seen in other metabolic tissues, including skeletal muscle, fetal skeletal muscle, small intestine, stomach, pancreas, adipose and fetal heart. Very low levels were also seen in heart and placenta. This gene encodes a putative novel adhesion molecule. Studies in mouse have revealed a gene (perhaps the mouse ortholog of this human gene) very homologous to this gene that is called POEM (preosteoblast epidermal growth factor-like repeat protein with meprin, A5 protein, and receptor protein-tyrosine phosphatase mu domain; Morimura N et al., J Biol Chem 2001 November 9;276(45):42172-81) or nephronectin (Brandenberger R et al., J Cell Biol 2001 July 23;154(2):447-58). POEM/nephronectin seems to be a ligand for the alpha8betal integrin as evidenced by two independent sets of published data. Integrins are known to mediate development and organogenesis. (Schwartz et al., Annu. Rev. Cell Dev. Biol. 11, 549-599, 1995; Clark and Brugge, Science 268, 233-239, 1995)Other known ligands for the alpha8beta1 integrin include fibronectin, vitronectin, tenascin, and osteopontin. Modulation of the expression or activity of this gene or gene product by protein, small molecule, or antibody therapeutics is an effective therapeutic for disorders involving alpha8beta1 integrin signaling.

[0860] Overall, this gene is expressed at a low to moderate level in the normal tissues on this panel. The brain, prostate, lung and colon cancer cell lines show a very low level of expression compared to the normal organs. This molecule is a candidate as a therapeutic inhibitor for these cancers.

[0861] Expression in the brain in the substantia nigra, hippocampus, cortex, amygdala, thalamus and spinal cord indicates a further functional role for this gene product in CNS processes mediated by these regions. Please see CNS_neurodegeneration_v1.0 for discussion of utility in the central nervous system.

[0862] Panel 4D Summary: Ag 2505 Highest expression of this transcript was found in the thymus and the lung (CTs=27-28). Consistent with this lung expression, this transcript was found in the pulmonary mucoepidermoid cell line H292 and was up-regulated upon treatment with the Th2 cytokines IL4 and IL9. This gene was also expressed at lower levels in lung fibroblasts treated with IL4. Modulation of the expression or activity of this gene or gene product by small molecule, protein or antibody therapeutics is beneficial for the treatment of inflammatory lung diseases such as asthma, emphysema and chronic obstructive pulmonary diseases. Therapeutics designed with the gene or the protein encoded for by this transcript are important for maintaining or restoring normal function of thymus during inflammation.

[0863] Panel 5 Islet Summary: Ag2505 Highest expression of this gene was detected in uterus (CT=30). Moderate expression of this gene was also seen in adipose and skeletal muscle of gestational diabetic patients both requiring and not requiring daily injections of insulin. This gene was also expressed in samples derived from a pregnant and a nondiabetic, but overweight patient. In addition, this gene was also expressed in islet beta cells (those that are insulin producing) and small intestine. Therefore, therapeutic modulation of this gene or gene product is useful in the treatment of metabolically related diseases including obesity, Type I and Type II diabetes.

[0864] general oncology screening panel_v_{—}2.4 Summary: Ag2505 Highest expression of this gene was detected in prostate cancer (CT=27.7). Moderate to low levels of expression of this gene was seen in both normal and cancer samples derived from colon, lung, prostate and kidney. Consistent with panels 2.2 and 2D, expression of this gene was downregulated in kidney cancer as compared to normal kidney. But higher expression of this gene was seen in colon cancer as compared to corresponding normal adjacent sample. Therefore, expression of this gene distinguishes between cancer and normal kidney and colon tissue. Please see panel 1.3, 1.6, 2.2 for further discussion on the utility of this gene.

[0865] B. CG50377-01 and CG50377-02 and CG50377-03 and CG50377-04 and CG50377-05 and CG50377-06: (Cub-Sushi)x Domain Containing Protein

[0866] Expression of gene CG50377-01 and variants CG50377-02, CG50377-03, CG50377-04, CG50377-05 and CG50377-06 was assessed using the primer-probe sets Ag2420 and Ag5824, described in Tables BA and BB. Results of the RTQ-PCR runs are shown in Tables BC, BD, BE and BF.

TABLE BA

Probe Name Ag2420

| | | | | |
|---|---|---|---|---|
| | | | Start | SEQ ID |
| Primers | Sequences | Length | Position | No |

| | | | | |
|---|---|---|---|---|
| Forward | 5′-ctgcacttggctggaactta-3′ | 20 | 9465 | 1216 |
| Probe | TET-5′-tttcatctcctactccaggtgtacca-3′- | 26 | 9498 | 1217 |
| | TAMRA | | | |
| Reverse | 5′-atctccacaggccctgtaat-3′ | 20 | 9525 | 1218 |

[0867] TABLE BB
Probe Name Ag5824

| | | | | |
|---|---|---|---|---|
| | | | Start | SEQ ID |
| Primers | Sequences | Length | Position | No |

| | | | | |
|---|---|---|---|---|
| Forward | 5′-ccgcttcatctctgatttctc-3′ | 21 | 2319 | 1219 |
| Probe | TET-5′-tgaaggattcaacatcaccttctcag-3′- | 26 | 2349 | 1220 |
| | TAMRA | | | |
| Reverse | 5′-acagggctccaagtcgtact-3′ | 20 | 2375 | 1221 |

[0868] TABLE BC
General_screening_panel_v1.5

| Tissue Name | A |
|---|---|
| Adipose | 0.0 |
| Melanoma* Hs688(A).T | 6.7 |
| Melanoma* Hs688(B).T | 4.6 |
| Melanoma* M14 | 0.0 |
| Melanoma* LOXIMVI | 0.0 |
| Melanoma* SK-MEL-5 | 0.0 |
| Squamous cell carcinoma SCC-4 | 0.3 |
| Testis Pool | 0.5 |
| Prostate ca.* (bone met) PC-3 | 0.0 |
| Prostate Pool | 0.1 |
| Placenta | 0.0 |
| Uterus Pool | 0.1 |
| Ovarian ca. OVCAR-3 | 0.0 |
| Ovarian ca. SK-OV-3 | 0.0 |
| Ovarian ca. OVCAR-4 | 0.0 |
| Ovarian ca. OVCAR-5 | 0.0 |
| Ovarian ca. IGROV-1 | 0.2 |
| Ovarian ca. OVCAR-8 | 0.8 |
| Ovary | 0.1 |
| Breast ca. MCF-7 | 0.0 |
| Breast ca. MDA-MB-231 | 0.0 |
| Breast ca. BT 549 | 0.0 |
| Breast ca. T47D | 0.0 |
| Breast ca. MDA-N | 0.0 |
| Breast Pool | 0.2 |
| Trachea | 0.3 |
| Lung | 0.0 |
| Fetal Lung | 0.0 |
| Lung ca. NCI-N417 | 0.0 |
| Lung ca. LX-1 | 0.0 |
| Lung ca. NCI-H146 | 0.0 |
| Lung ca. SHP-77 | 0.0 |
| Lung ca. A549 | 0.0 |
| Lung ca. NCI-H526 | 0.5 |
| Lung ca. NCI-H23 | 0.3 |
| Lung ca. NCI-H460 | 0.0 |
| Lung ca. HOP-62 | 0.1 |
| Lung ca. NCI-H522 | 0.8 |
| Liver | 0.0 |
| Fetal Liver | 0.1 |
| Liver ca. HepG2 | 0.0 |
| Kidney Pool | 0.1 |
| Fetal Kidney | 0.9 |
| Renal ca. 786-0 | 0.0 |
| Renal ca. A498 | 0.0 |
| Renal ca. ACHN | 0.0 |
| Renal ca. UO-31 | 0.0 |
| Renal ca. TK-10 | 0.0 |
| Bladder | 1.6 |
| Gastric ca. (liver met.) NCI-N87 | 0.0 |
| Gastric ca. KATO III | 0.0 |
| Colon ca. SW-948 | 0.0 |
| Colon ca. SW480 | 0.2 |
| Colon ca.* (SW480 met) SW620 | 0.0 |
| Colon ca. HT29 | 0.0 |
| Colon ca. HCT-116 | 0.0 |
| Colon ca. CaCo-2 | 0.1 |
| Colon cancer tissue | 1.0 |
| Colon ca. SW1116 | 0.0 |
| Colon ca. Colo-205 | 0.0 |
| Colon ca. SW-48 | 0.0 |
| Colon Pool | 0.1 |
| Small Intestine Pool | 0.6 |
| Stomach Pool | 0.3 |
| Bone Marrow Pool | 0.1 |
| Fetal Heart | 0.1 |
| Heart Pool | 0.1 |
| Lymph Node Pool | 0.2 |
| Fetal Skeletal Muscle | 0.3 |
| Skeletal Muscle Pool | 0.1 |
| Spleen Pool | 0.7 |
| Thymus Pool | 0.5 |
| CNS cancer (glio/astro) U87-MG | 100.0 |
| CNS cancer (glio/astro) U-118-MG | 4.6 |
| CNS cancer (neuro; met) SK-N-AS | 0.0 |
| CNS cancer (astro) SF-539 | 0.0 |
| CNS cancer (astro) SNB-75 | 1.0 |
| CNS cancer (glio) SNB-19 | 0.6 |
| CNS cancer (glio) SF-295 | 19.6 |
| Brain (Amygdala) Pool | 4.0 |
| Brain (cerebellum) | 9.5 |
| Brain (fetal) | 86.5 |
| Brain (Hippocampus) Pool | 5.4 |
| Cerebral Cortex Pool | 5.8 |
| Brain (Substantia nigra) Pool | 4.9 |
| Brain (Thalamus) Pool | 7.7 |
| Brain (whole) | 7.5 |
| Spinal Cord Pool | 3.3 |
| Adrenal Gland | 1.4 |
| Pituitary gland Pool | 0.2 |
| Salivary Gland | 0.0 |
| Thyroid (female) | 0.0 |
| Pancreatic ca. CAPAN2 | 0.0 |
| Pancreas Pool | 0.3 |

Column A - Rel. Exp. (%) Ag5824, Run 246273272

[0869] TABLE BD
Panel 1.3D

| Tissue Name | A |
|---|---|
| Liver adenocarcinoma | 0.0 |
| Pancreas | 0.9 |
| Pancreatic ca. CAPAN 2 | 0.0 |
| Adrenal gland | 1.1 |
| Thyroid | 0.2 |
| Salivary gland | 0.0 |
| Pituitary gland | 0.4 |
| Brain (fetal) | 100.0 |
| Brain (whole) | 13.6 |
| Brain (amygdala) | 27.4 |
| Brain (cerebellum) | 3.9 |
| Brain (hippocampus) | 95.3 |
| Brain (substantia nigra) | 5.0 |
| Brain (thalamus) | 7.9 |
| Cerebral Cortex | 37.6 |
| Spinal cord | 2.5 |
| glio/astro U87-MG | 50.3 |
| glio/astro U-118-MG | 2.7 |
| astrocytoma SW1783 | 10.9 |
| neuro*; met SK-N-AS | 0.0 |
| astrocytoma SF-539 | 0.0 |
| astrocytoma SNB-75 | 0.0 |
| glioma SNB-19 | 0.8 |
| glioma U251 | 1.4 |
| glioma SF-295 | 7.8 |
| Heart (fetal) | 0.0 |
| Heart | 0.2 |
| Skeletal muscle (fetal) | 1.3 |
| Skeletal muscle | 0.0 |
| Bone marrow | 0.0 |
| Thymus | 0.0 |
| Spleen | 1.2 |
| Lymph node | 0.2 |
| Colorectal | 0.0 |
| Stomach | 0.2 |
| Small intestine | 1.7 |
| Colon ca. SW480 | 0.3 |
| Colon ca.* SW620(SW480 met) | 0.0 |
| Colon ca. HT29 | 0.0 |
| Colon ca. HCT-116 | 0.0 |
| Colon ca. CaCo-2 | 0.0 |
| Colon ca. tissue(ODO3866) | 1.1 |
| Colon ca. HCC-2998 | 0.0 |
| Gastric ca.* (liver met) NCI-N87 | 0.0 |
| Bladder | 0.6 |
| Trachea | 0.2 |
| Kidney | 0.0 |
| Kidney (fetal) | 0.6 |
| Renal ca. 786-0 | 0.0 |
| Renal ca. A498 | 0.2 |
| Renal ca. RXF 393 | 0.0 |
| Renal ca. ACHN | 0.0 |
| Renal ca. UO-31 | 0.0 |
| Renal ca. TK-10 | 0.0 |
| Liver | 0.0 |
| Liver (fetal) | 0.2 |
| Liver ca. (hepatoblast) HepG2 | 0.0 |
| Lung | 0.6 |
| Lung (fetal) | 0.2 |
| Lung ca. (small cell) LX-1 | 0.0 |
| Lung ca. (small cell) NCI-H69 | 0.0 |
| Lung ca. (s. cell var.) SHP-77 | 0.0 |
| Lung ca. (large cell)NCI-H460 | 0.0 |
| Lung ca. (non-sm. cell) A549 | 0.0 |
| Lung ca. (non-s. cell) NCI-H23 | 0.0 |
| Lung ca. (non-s. cell) HOP-62 | 0.0 |
| Lung ca. (non-s. cl) NCI-H522 | 0.2 |
| Lung ca. (squam.) SW 900 | 0.0 |
| Lung ca. (squam.) NCI-H596 | 0.0 |
| Mammary gland | 0.4 |
| Breast ca.* (pl. ef) MCF-7 | 0.0 |
| Breast ca.* (pl. ef) MDA-MB-231 | 0.0 |
| Breast ca.* (pl. ef) T47D | 0.0 |
| Breast ca. BT-549 | 1.3 |
| Breast ca. MDA-N | 0.0 |
| Ovary | 0.5 |
| Ovarian ca. OVCAR-3 | 0.0 |
| Ovarian ca. OVCAR-4 | 0.0 |
| Ovarian ca. OVCAR-5 | 0.0 |
| Ovarian ca. OVCAR-8 | 0.0 |
| Ovarian ca. IGROV-1 | 0.0 |
| Ovarian ca.* (ascites) SK-OV-3 | 0.0 |
| Uterus | 0.0 |
| Placenta | 0.2 |
| Prostate | 0.4 |
| Prostate ca.* (bone met)PC-3 | 0.0 |
| Testis | 1.3 |
| Melanoma Hs688(A).T | 2.4 |
| Melanoma* (met) Hs688(B).T | 0.3 |
| Melanoma UACC-62 | 0.0 |
| Melanoma M14 | 0.0 |
| Melanoma LOX IMVI | 0.0 |
| Melanoma* (met) SK-MEL-5 | 0.0 |
| Adipose | 0.5 |

Column A - Rel. Exp. (%) Ag2420, Run 159253002

[0870] TABLE BE
Panel 4.1D

| Tissue Name | A |
|---|---|
| Secondary Th1 act | 0.0 |
| Secondary Th2 act | 0.0 |
| Secondary Tr1 act | 0.0 |
| Secondary Th1 rest | 0.0 |
| Secondary Th2 rest | 0.0 |
| Secondary Tr1 rest | 0.0 |
| Primary Th1 act | 0.0 |
| Primary Th2 act | 0.0 |
| Primary Tr1 act | 0.0 |
| Primary Th1 rest | 0.0 |
| Primary Th2 rest | 0.0 |
| Primary Tr1 rest | 0.0 |
| CD45RA CD4 lymphocyte act | 10.7 |
| CD45RO CD4 lymphocyte act | 0.0 |
| CD8 lymphocyte act | 0.0 |
| Secondary CD8 lymphocyte rest | 0.0 |
| Secondary CD8 lymphocyte act | 0.0 |
| CD4 lymphocyte none | 0.0 |
| 2ry Th1/Th2/Tr1_anti-CD95 CH11 | 0.0 |
| LAK cells rest | 0.0 |
| LAK cells IL-2 | 0.0 |
| LAK cells IL-2 + IL-12 | 0.0 |
| LAK cells IL-2 + IFN gamma | 0.0 |
| LAK cells IL-2 + IL-18 | 0.0 |
| LAK cells PMA/ionomycin | 0.0 |
| NK Cells IL-2 rest | 0.0 |
| Two Way MLR 3 day | 0.0 |
| Two Way MLR 5 day | 0.0 |
| Two Way MLR 7 day | 0.0 |
| PBMC rest | 0.0 |
| PBMC PWM | 0.0 |
| PBMC PHA-L | 0.0 |
| Ramos (B cell) none | 0.0 |
| Ramos (B cell) ionomycin | 0.0 |
| B lymphocytes PWM | 0.0 |
| B lymphocytes CD40L and IL-4 | 0.0 |
| EOL-1 dbcAMP | 0.0 |
| EOL-1 dbcAMP PMA/ionomycin | 0.0 |
| Dendritic cells none | 0.0 |
| Dendritic cells LPS | 0.0 |
| Dendritic cells anti-CD40 | 0.0 |
| Monocytes rest | 0.0 |
| Monocytes LPS | 0.0 |
| Macrophages rest | 0.0 |
| Macrophages LPS | 0.0 |
| HUVEC none | 0.0 |
| HUVEC starved | 0.0 |
| HUVEC IL-1beta | 0.0 |
| HUVEC IFN gamma | 0.0 |
| HUVEC TNF alpha + IFN gamma | 0.0 |
| HUVEC TNF alpha + IL4 | 0.0 |
| HUVEC IL-11 | 0.0 |
| Lung Microvascular EC none | 0.0 |
| Lung Microvascular EC TNFalpha + IL-1beta | 0.0 |
| Microvascular Dermal EC none | 0.0 |
| Microsvasular Dermal EC TNFalpha + IL-1beta | 0.0 |
| Bronchial epithelium TNFalpha + IL1beta | 0.7 |
| Small airway epithelium none | 1.3 |
| Small airway epithelium TNFalpha + IL-1beta | 0.0 |
| Coronery artery SMC rest | 2.4 |
| Coronery artery SMC TNFalpha + IL-1beta | 4.5 |
| Astrocytes rest | 15.7 |
| Astrocytes TNFalpha + IL-1beta | 20.6 |
| KU-812 (Basophil) rest | 0.0 |
| KU-812 (Basophil) PMA/ionomycin | 0.0 |
| CCD1106 (Keratinocytes) none | 3.6 |
| CCD1106 (Keratinocytes) TNFalpha + IL-1beta | 3.9 |
| Liver cirrhosis | 1.6 |
| NCI-H292 none | 0.0 |
| NCI-H292 IL-4 | 0.0 |
| NCI-H292 IL-9 | 0.0 |
| NCI-H292 IL-13 | 0.0 |
| NCI-H292 IFN gamma | 0.0 |
| HPAEC none | 0.0 |
| HPAEC TNF alpha + IL-1 beta | 0.0 |
| Lung fibroblast none | 75.8 |
| Lung fibroblast TNF alpha + IL-1 beta | 5.4 |
| Lung fibroblast IL-4 | 28.9 |
| Lung fibroblast IL-9 | 100.0 |
| Lung fibroblast IL-13 | 2.9 |
| Lung fibroblast IFN gamma | 45.7 |
| Dermal fibroblast CCD1070 rest | 52.1 |
| Dermal fibroblast CCD1070 TNF alpha | 39.0 |
| Dermal fibroblast CCD1070 IL-1 beta | 47.3 |
| Dermal fibroblast IFN gamma | 4.6 |
| Dermal fibroblast IL-4 | 11.8 |
| Dermal Fibroblasts rest | 26.4 |
| Neutrophils TNFa + LPS | 0.0 |
| Neutrophils rest | 0.0 |
| Colon | 0.0 |
| Lung | 0.8 |
| Thymus | 0.0 |
| Kidney | 0.0 |

Column A - Rel. Exp. (%) Ag5824, Run 246921321

[0871] TABLE BF
Panel 4D

| Tissue Name | A |
|---|---|
| Secondary Th1 act | 0.0 |
| Secondary Th2 act | 0.0 |
| Secondary Tr1 act | 0.0 |
| Secondary Th1 rest | 0.0 |
| Secondary Th2 rest | 0.0 |
| Secondary Tr1 rest | 0.0 |
| Primary Th1 act | 0.0 |
| Primary Th2 act | 0.0 |
| Primary Tr1 act | 0.0 |
| Primary Th1 rest | 0.0 |
| Primary Th2 rest | 0.0 |
| Primary Tr1 rest | 0.0 |
| CD45RA CD4 lymphocyte act | 11.3 |
| CD45RO CD4 lymphocyte act | 0.0 |
| CD8 lymphocyte act | 0.0 |
| Secondary CD8 lymphocyte rest | 0.0 |
| Secondary CD8 lymphocyte act | 0.0 |
| CD4 lymphocyte none | 0.0 |
| 2ry Th1/Th2/Tr1_anti-CD95 CH11 | 0.0 |
| LAK cells rest | 0.0 |
| LAK cells IL-2 | 0.0 |
| LAK cells IL-2 + IL-12 | 0.0 |
| LAK cells IL-2 + IFN gamma | 0.0 |
| LAK cells IL-2 + IL-18 | 0.0 |
| LAK cells PMA/ionomycin | 0.0 |
| NK Cells IL-2 rest | 0.0 |
| Two Way MLR 3 day | 0.0 |
| Two Way MLR 5 day | 0.0 |
| Two Way MLR 7 day | 0.0 |
| PBMC rest | 0.0 |
| PBMC PWM | 0.0 |
| PBMC PHA-L | 0.0 |
| Ramos (B cell) none | 0.0 |
| Ramos (B cell) ionomycin | 0.0 |
| B lymphocytes PWM | 0.0 |
| B lymphocytes CD40L and IL-4 | 0.0 |
| EOL-1 dbcAMP | 0.0 |
| EOL-1 dbcAMP PMA/ionomycin | 0.0 |
| Dendritic cells none | 0.0 |
| Dendritic cells LPS | 0.0 |
| Dendritic cells anti-CD40 | 0.0 |
| Monocytes rest | 0.0 |
| Monocytes LPS | 0.0 |
| Macrophages rest | 0.0 |
| Macrophages LPS | 0.0 |
| HUVEC none | 0.0 |
| HUVEC starved | 0.0 |
| HUVEC IL-1beta | 0.0 |
| HUVEC IFN gamma | 0.0 |
| HUVEC TNF alpha + IFN gamma | 0.0 |
| HUVEC TNF alpha + IL4 | 0.0 |
| HUVEC IL-11 | 0.0 |
| Lung Microvascular EC none | 0.0 |
| Lung Microvascular EC TNFalpha + IL-1beta | 0.0 |
| Microvascular Dermal EC none | 0.0 |
| Microsvasular Dermal EC TNFalpha + IL-1beta | 0.0 |
| Bronchial epithelium TNFalpha + IL1beta | 0.0 |
| Small airway epithelium none | 1.0 |
| Small airway epithelium TNFalpha + IL-1beta | 0.0 |
| Coronery artery SMC rest | 3.9 |
| Coronery artery SMC TNFalpha + IL-1 beta | 3.2 |
| Astrocytes rest | 100.0 |
| Astrocytes TNFalpha + IL-1beta | 32.8 |
| KU-812 (Basophil) rest | 0.0 |
| KU-812 (Basophil) PMA/ionomycin | 0.0 |
| CCD1106 (Keratinocytes) none | 0.0 |
| CCD1106 (Keratinocytes) TNFalpha + IL-1beta | 0.0 |
| Liver cirrhosis | 0.0 |
| Lupus kidney | 0.0 |
| NCI-H292 none | 0.0 |
| NCI-H292 IL-4 | 0.0 |
| NCI-H292 IL-9 | 0.0 |
| NCI-H292 IL-13 | 0.0 |
| NCI-H292 IFN gamma | 0.0 |
| HPAEC none | 0.0 |
| HPAEC TNF alpha + IL-1 beta | 0.0 |
| Lung fibroblast none | 36.3 |
| Lung fibroblast TNF alpha + IL-1 beta | 4.6 |
| Lung fibroblast IL-4 | 52.9 |
| Lung fibroblast IL-9 | 78.5 |
| Lung fibroblast IL-13 | 37.4 |
| Lung fibroblast IFN gamma | 37.6 |
| Dermal fibroblast CCD1070 rest | 63.3 |
| Dermal fibroblast CCD1070 TNF alpha | 27.0 |
| Dermal fibroblast CCD1070 IL-1 beta | 20.3 |
| Dermal fibroblast IFN gamma | 8.6 |
| Dermal fibroblast IL-4 | 4.2 |
| IBD Colitis 2 | 0.0 |
| IBD Crohn's | 0.0 |
| Colon | 0.7 |
| Lung | 0.8 |
| Thymus | 1.9 |
| Kidney | 0.0 |

Column A - Rel. Exp. (%) Ag2420, Run 159255381

[0872] General_screeningpanel_v1.5 Summary: Ag5824 Highest expression of this gene was detected in a brain cancer cell line (CT=28.2). Significant expression of this gene was also seen in two melanoma and three brain cancer cell lines. Therefore, expression of this gene detects the presence of melanoma and brain cancer. Therapeutic modulation of this gene or its protein product is useful in the treatment of these cancers.

[0873] In addition, this gene was moderately expressed in all the regions of central nervous system examined, including amygdala, hippocampus, substantia nigra, thalamus, cerebellum, cerebral cortex, and spinal cord. Therapeutic modulation of this gene or gene product is useful in the treatment of central nervous system disorders such as Alzheimer's disease, Parkinson's disease, epilepsy, multiple sclerosis, schizophrenia and depression.

[0874] Panel 1.1 Summary: Ag575 Expression of this gene was restricted to normal brain derived tissue. In addition, expression was associated with a number of samples derived from brain cancer cell lines, with highest expression seen in the brain cancer cell line U87-MG (CT=23.5). Thus, the expression of this gene distinguishes these brain derived tissues from other samples in the panel. Therapeutic modulation of this gene or gene product, through the use of antibodies, small molecule drugs or protein therapeutics is of benefit in the treatment of brain cancer.

[0875] This gene also had moderate levels of expression in a number of metabolic tissues including adrenal, pituitary, heart, and fetal skeletal muscle.

[0876] Panel 1.3D Summary: Ag2420 Expression of this gene was restricted to normal brain derived tissue, with highest expression seen in the fetal brain (CT=29.8). In addition, expression was associated with a number of samples derived from brain cancer cell lines. Thus, the expression of this gene distinguishes these brain derived tissues from other samples in the panel. Therapeutic modulation of this gene or gene product, through the use of antibodies, small molecule drugs or protein therapeutics is of benefit in the treatment of brain cancer.

[0877] This gene represents a novel protein containing CUB and sushi domains. Its expression profile was highly brain-preferential; levels in the CNS appear 10-fold greater than in other tissues. At least one brain-specific protein containing CUB and sushi domains has been linked to seizures, and shows differential expression in response to pentylentetrazole (Shimizu-Nishikawa K, Brain Res Mol Brain Res 1995 February; 28(2):201-10). This gene or its protein product is a drug target for the treatment of epilepsy or any seizure disorder.

[0878] Panel 4.1D Summary: Ag5824 Highest expression of this gene was detected in IL-9 activated lung fibroblast cells (CT=32). Significant expression of this gene was also seen in resting and activated astrocytes, lung fibroblasts and dermal fibroblasts. The expression pattern in this panel was in agreement with that seen in panel 4D. Please see panel 4D for further discussion on the utility of this gene.

[0879] Panel 4D Summary: Ag2420 This gene encodes a cub-domain and sushi-domain containing single-pass membrane protein. Highest expression of this gene was seen in resting astrocytes (CT=30.6). Significant expression of this gene was also detected in TNF-alpha+IL-1-beta-stimulated astrocytes, resting and cytokine-stimulated lung fibroblasts and dermal fibroblasts. Therefore, an isolated extracellular domain of this gene or its protein product is useful as a therapeutic protein to reduce or eliminate the symptoms of multiple sclerosis, chronic obstructive pulmonary disease, asthma, or emphysema, and psoriasis.

[0880] Agonist or antagonist antibodies that stimulate or inhibit the function of this gene or its protein product are useful as therapeutics to reduce or eliminate the symptoms of multiple sclerosis, chronic obstructive pulmonary disease, asthma, or emphysema, and psoriasis.

[0881] C. CG5038904: Interleukin-1 Receptor Related Protein Like

[0882] Expression of gene CG50389-04 was assessed using the primer-probe set Ag48 11, described in Table CA. Results of the RTQ-PCR runs are shown in Tables CB and CC.

TABLE CA
Probe Name Ag4811

| | | | | |
|---|---|---|---|---|
| | | | Start | SEQ ID |
| Primers | Sequences | Length | Position | No |

| | | | | |
|---|---|---|---|---|
| Forward | 5′-catgtctcttttcgggaacata-3′ | 22 | 918 | 1222 |
| Probe | TET-5′-cacagtaaacatcaccttcttggaagtg-3′- | 28 | 947 | 1223 |
| | TAMRA | | | |
| Reverse | 5′-gaaggccataatcttccatttt-3′ | 22 | 975 | 1224 |

[0883] TABLE CB
General_screening_panel_v1.4

| Tissue Name | A |
|---|---|
| Adipose | 4.9 |
| Melanoma* Hs688(A).T | 1.4 |
| Melanoma* Hs688(B).T | 2.9 |
| Melanoma* M14 | 0.0 |
| Melanoma* LOXIMVI | 0.0 |
| Melanoma* SK-MEL-5 | 0.0 |
| Squamous cell carcinoma SCC-4 | 45.4 |
| Testis Pool | 1.7 |
| Prostate ca.* (bone met) PC-3 | 0.0 |
| Prostate Pool | 2.7 |
| Placenta | 0.5 |
| Uterus Pool | 0.4 |
| Ovarian ca. OVCAR-3 | 1.4 |
| Ovarian ca. SK-OV-3 | 0.3 |
| Ovarian ca. OVCAR-4 | 45.1 |
| Ovarian ca. OVCAR-5 | 0.0 |
| Ovarian ca. IGROV-1 | 0.4 |
| Ovarian ca. OVCAR-8 | 25.9 |
| Ovary | 6.0 |
| Breast ca. MCF-7 | 0.0 |
| Breast ca. MDA-MB-231 | 32.1 |
| Breast ca. BT 549 | 10.9 |
| Breast ca. T47D | 1.2 |
| Breast ca. MDA-N | 0.0 |
| Breast Pool | 6.3 |
| Trachea | 8.1 |
| Lung | 0.1 |
| Fetal Lung | 5.3 |
| Lung ca. NCI-N417 | 0.0 |
| Lung ca. LX-1 | 3.9 |
| Lung ca. NCI-H146 | 0.0 |
| Lung ca. SHP-77 | 0.0 |
| Lung ca. A549 | 0.1 |
| Lung ca. NCI-H526 | 0.0 |
| Lung ca. NCI-H23 | 3.8 |
| Lung ca. NCI-H460 | 0.0 |
| Lung ca. HOP-62 | 0.1 |
| Lung ca. NCI-H522 | 0.0 |
| Liver | 1.2 |
| Fetal Liver | 4.3 |
| Liver ca. HepG2 | 0.0 |
| Kidney Pool | 3.2 |
| Fetal Kidney | 5.1 |
| Renal ca. 786-0 | 0.0 |
| Renal ca. A498 | 0.0 |
| Renal ca. ACHN | 0.0 |
| Renal ca. UO-31 | 5.3 |
| Renal ca. TK-10 | 71.7 |
| Bladder | 6.5 |
| Gastric ca. (liver met.) NCI-N87 | 100.0 |
| Gastric ca. KATO III | 24.1 |
| Colon ca. SW-948 | 2.4 |
| Colon ca. SW480 | 7.1 |
| Colon ca.* (SW480 met) SW620 | 0.5 |
| Colon ca. HT29 | 16.8 |
| Colon ca. HCT-116 | 0.0 |
| Colon ca. CaCo-2 | 0.5 |
| Colon cancer tissue | 12.1 |
| Colon ca. SW1116 | 6.9 |
| Colon ca. Colo-205 | 3.7 |
| Colon ca. SW-48 | 0.0 |
| Colon Pool | 1.6 |
| Small Intestine Pool | 1.2 |
| Stomach Pool | 7.0 |
| Bone Marrow Pool | 3.1 |
| Fetal Heart | 0.4 |
| Heart Pool | 1.3 |
| Lymph Node Pool | 2.8 |
| Fetal Skeletal Muscle | 0.6 |
| Skeletal Muscle Pool | 3.0 |
| Spleen Pool | 4.2 |
| Thymus Pool | 3.8 |
| CNS cancer (glio/astro) U87-MG | 0.2 |
| CNS cancer (glio/astro) U-118-MG | 0.8 |
| CNS cancer (neuro; met) SK-N-AS | 0.3 |
| CNS cancer (astro) SF-539 | 0.4 |
| CNS cancer (astro) SNB-75 | 4.9 |
| CNS cancer (glio) SNB-19 | 0.0 |
| CNS cancer (glio) SF-295 | 0.0 |
| Brain (Amygdala) Pool | 4.6 |
| Brain (cerebellum) | 0.4 |
| Brain (fetal) | 4.7 |
| Brain (Hippocampus) Pool | 3.0 |
| Cerebral Cortex Pool | 6.9 |
| Brain (Substantia nigra) Pool | 4.9 |
| Brain (Thalamus) Pool | 9.2 |
| Brain (whole) | 7.0 |
| Spinal Cord Pool | 0.8 |
| Adrenal Gland | 12.5 |
| Pituitary gland Pool | 0.1 |
| Salivary Gland | 2.8 |
| Thyroid (female) | 6.3 |
| Pancreatic ca. CAPAN2 | 0.0 |
| Pancreas Pool | 21.0 |

Column A - Rel. Exp. (%) Ag4811, Run 223204488

[0884] TABLE CC
Panel 4.1D

| Tissue Name | A |
|---|---|
| Secondary Th1 act | 0.0 |
| Secondary Th2 act | 0.0 |
| Secondary Tr1 act | 1.5 |
| Secondary Th1 rest | 0.0 |
| Secondary Th2 rest | 0.0 |
| Secondary Tr1 rest | 0.0 |
| Primary Th1 act | 0.9 |
| Primary Th2 act | 5.1 |
| Primary Tr1 act | 2.0 |
| Primary Th1 rest | 0.0 |
| Primary Th2 rest | 0.0 |
| Primary Tr1 rest | 0.0 |
| CD45RA CD4 lymphocyte act | 0.0 |
| CD45RO CD4 lymphocyte act | 3.3 |
| CD8 lymphocyte act | 0.7 |
| Secondary CD8 lymphocyte rest | 2.9 |
| Secondary CD8 lymphocyte act | 0.7 |
| CD4 lymphocyte none | 0.0 |
| 2ry Th1/Th2/Tr1_anti-CD95 CH11 | 0.0 |
| LAK cells rest | 3.9 |
| LAK cells IL-2 | 0.0 |
| LAK cells IL-2 + IL-12 | 0.0 |
| LAK cells IL-2 + IFN gamma | 1.2 |
| LAK cells IL-2 + IL-18 | 0.7 |
| LAK cells PMA/ionomycin | 11.1 |
| NK Cells IL-2 rest | 0.0 |
| Two Way MLR 3 day | 0.0 |
| Two Way MLR 5 day | 0.7 |
| Two Way MLR 7 day | 1.6 |
| PBMC rest | 0.0 |
| PBMC PWM | 4.8 |
| PBMC PHA-L | 0.0 |
| Ramos (B cell) none | 0.0 |
| Ramos (B cell) ionomycin | 0.0 |
| B lymphocytes PWM | 10.7 |
| B lymphocytes CD40L and IL-4 | 0.8 |
| EOL-1 dbcAMP | 0.0 |
| EOL-1 dbcAMP PMA/ionomycin | 2.7 |
| Dendritic cells none | 9.4 |
| Dendritic cells LPS | 0.6 |
| Dendritic cells anti-CD40 | 15.5 |
| Monocytes rest | 0.0 |
| Monocytes LPS | 8.8 |
| Macrophages rest | 1.6 |
| Macrophages LPS | 0.0 |
| HUVEC none | 0.0 |
| HUVEC starved | 0.0 |
| HUVEC IL-1beta | 1.7 |
| HUVEC IFN gamma | 2.3 |
| HUVEC TNF alpha + IFN gamma | 0.0 |
| HUVEC TNF alpha + IL4 | 0.0 |
| HUVEC IL-11 | 0.0 |
| Lung Microvascular EC none | 0.0 |
| Lung Microvascular EC TNFalpha + IL-1beta | 0.0 |
| Microvascular Dermal EC none | 0.0 |
| Microsvasular Dermal EC TNFalpha + IL-1beta | 0.0 |
| Bronchial epithelium TNFalpha + IL1beta | 8.5 |
| Small airway epithelium none | 11.1 |
| Small airway epithelium TNFalpha + IL-1beta | 14.9 |
| Coronery artery SMC rest | 3.1 |
| Coronery artery SMC TNFalpha + IL-1beta | 1.4 |
| Astrocytes rest | 2.2 |
| Astrocytes TNFalpha + IL-1beta | 0.0 |
| KU-812 (Basophil) rest | 0.0 |
| KU-812 (Basophil) PMA/ionomycin | 0.0 |
| CCD1106 (Keratinocytes) none | 100.0 |
| CCD1106 (Keratinocytes) TNFalpha + IL-1beta | 89.5 |
| Liver cirrhosis | 4.6 |
| NCI-H292 none | 2.4 |
| NCI-H292 IL-4 | 5.0 |
| NCI-H292 IL-9 | 1.9 |
| NCI-H292 IL-13 | 6.0 |
| NCI-H292 IFN gamma | 3.9 |
| HPAEC none | 2.4 |
| HPAEC TNF alpha + IL-1 beta | 0.0 |
| Lung fibroblast none | 26.1 |
| Lung fibroblast TNF alpha + IL-1 beta | 17.1 |
| Lung fibroblast IL-4 | 33.9 |
| Lung fibroblast IL-9 | 27.7 |
| Lung fibroblast IL-13 | 25.9 |
| Lung fibroblast IFN gamma | 52.1 |
| Dermal fibroblast CCD1070 rest | 9.8 |
| Dermal fibroblast CCD1070 TNF alpha | 5.4 |
| Dermal fibroblast CCD1070 IL-1 beta | 4.3 |
| Dermal fibroblast IFN gamma | 5.6 |
| Dermal fibroblast IL-4 | 14.9 |
| Dermal Fibroblasts rest | 7.5 |
| Neutrophils TNFa + LPS | 54.7 |
| Neutrophils rest | 0.9 |
| Colon | 0.8 |
| Lung | 4.4 |
| Thymus | 4.5 |
| Kidney | 29.9 |

Column A - Rel. Exp. (%) Ag4811, Run 223273603

[0885] General_screeningpanel_v1.4 Summary: Ag4811 The highest expression of this gene was detected in a sample derived from a gastric cancer cell line (NCI-N87) (CT=29.2). There was low to moderate expression associated with other gastric cancer cell lines, colon cancer cell lines, breast cancer cell lines, ovarian cancer cell lines and a renal cancer cell line. The expression of this gene or protein product is useful as a marker for gastric cancer, colon cancer, breast cancer, ovarian cancer or renal cancer. Therapeutic modulation of this gene or its protein product through the use of antibodies, protein therapeutics or small molecule drugs is useful in the treatment of gastric cancer, colon cancer, breast cancer, ovarian cancer or renal cancer.

[0886] This gene was also moderately expressed in a number of metabolic tissues including adipose, fetal liver, skeletal muscle, adrenal, thyroid and pancreas. Therapeutic modulation of this gene, expressed protein and/or use of antibodies, protein therapeutics or small molecule drugs targeting the gene or gene product are useful in the treatment of metabolic diseases, including obesity and Types 1 and 2 diabetes.

[0887] This gene product was expressed at low levels in the brain. This gene encodes a protein with homology to an interleukin 1 receptor-like protein. Interleukins are involved in many brain pathologies due to the pro-inflammatory action of interleukins. Inflammation is a key pathological process mediating the damage seen in many disease states including stroke, Alzheimer's disease, and spinocerebellar ataxias (J Neurosci 2001 August 1;21(15):5389-96). IL-1 receptor like protein has been shown to bind IL-18 (J Immunol 1999 May 1;162(9):5041-4), which is involved in CNS inflammation. Moreover, anti-inflammatory agents that are associated with reduced risk of Alzheimer's Disease, such as NSAIDS (Drug Saf 2001;24(11):801-11), have been shown to inhibit IL-18 expression. Therapeutic modulation of this gene, expressed protein and/or use of antibodies or small molecule drugs targeting the gene or gene product are useful in the treatment of stroke, Alzheimer's disease, and spinocerebellar ataxias and any other CNS disorder in which inflammation plays a role.

[0888] Panel 4.1D Summary: Ag 4811 The highest expression of this gene was detected in keratinocytes, regardless of their treatment. This transcript encodes a novel IL-1 receptor related protein that may have the potential to trigger novel members of the IL-1 family members as described by Debets et. al. (J Immunol 2001 August 1;167(3):1440-6; J Biol Chem 1996 February 23;271(8):3967-70). Novel IL1 receptor like molecules have been cloned and reported to lead to activation of NF-KB and IL18 production, a potent inflammatory cytokine associated with lung inflammation, IBD and psoriasis. IL1 R family members have also been shown to mediate inflammatory signals through NF-kB activation, among other signalling pathways. Therapeutic modulation of this gene, expressed protein and/or use of antibodies or small molecule drugs targeting the gene or gene product are useful in the treatment of inflammatory lung and skin diseases such as asthma, bronchitis, emphysema and psoriasis.

[0889] This gene was also expressed at moderate levels in neutrophils stimulated with TNF-a and LPS. The expression of this transcript in neutrophils demonstrates an important role of this receptor in innate immunity and in inflammation associated with neutrophil accummulation such as observed in inflammatory bowel diseases, psoriasis, asthma, chronic bronchitis and rheumatoid arthritis. Therapeutic modulation of this gene, expressed protein and/or use of antibodies or small molecule drugs targeting the gene or gene product are useful in the treatment of inflammatory disorders including inflammatory bowel diseases, psoriasis, asthma, chronic bronchitis and rheumatoid arthritis.

[0890] D. CG50389-06: Interleukin-1 Receptor Related Protein

[0891] Expression of full-length physical clone CG50389-06 was assessed using the primer-probe sets Ag4944 and Ag4945, described in Tables DA and DB. Results of the RTQ-PCR runs are shown in Table DC.

TABLE DA
Probe Name Ag4944

| | | | | |
|---|---|---|---|---|
| | | | Start | SEQ ID |
| Primers | Sequences | Length | Position | No |

| | | | | |
|---|---|---|---|---|
| Forward | 5′-cagggaagcagtacgaggttt-3′ | 21 | 1161 | 1225 |
| Probe | TET-5′-tggaggaagtgtccctaaaatcatttatcc- | 30 | 1091 | 1226 |
| | 3′-TAMRA | | | |
| Reverse | 5′-tgactctccagcatcgtaga-3′ | 20 | 990 | 1227 |

[0892] TABLE DB

Probe Name Ag4945

| | | | | |
|---|---|---|---|---|
| | | | Start | SEQ ID |
| Primers | Sequences | Length | Positon | No |

| | | | | |
|---|---|---|---|---|
| Forward | 5′-cagtgagataccacatgccg-3′ | 20 | 175 | 1228 |
| Probe | TET-5′-agctgccgcagcacacaccttgctac- | 26 | 118 | 1229 |
| | 3′-TAMRA | | | |
| Reverse | 5′-gtcatcttccagccataggtgt-3′ | 22 | 22 | 1230 |

[0893] TABLE DC
Panel 4.1D

| Tissue Name | A | B |
|---|---|---|
| Secondary Th1 act | 0.0 | 52.1 |
| Secondary Th2 act | 0.0 | 0.0 |
| Secondary Tr1 act | 0.0 | 0.0 |
| Secondary Th1 rest | 0.0 | 0.0 |
| Secondary Th2 rest | 0.0 | 32.3 |
| Secondary Tr1 rest | 0.0 | 64.2 |
| Primary Th1 act | 0.0 | 12.9 |
| Primary Th2 act | 0.0 | 18.3 |
| Primary Tr1 act | 0.0 | 0.0 |
| Primary Th1 rest | 0.0 | 0.0 |
| Primary Th2 rest | 0.0 | 0.0 |
| Primary Tr1 rest | 0.0 | 17.1 |
| CD45RA CD4 lymphocyte act | 0.0 | 34.2 |
| CD45RO CD4 lymphocyte act | 0.0 | 0.0 |
| CD8 lymphocyte act | 0.0 | 50.7 |
| Secondary CD8 lymphocyte rest | 0.0 | 20.2 |
| Secondary CD8 lymphocyte act | 0.0 | 0.0 |
| CD4 lymphocyte none | 0.0 | 0.0 |
| 2ry Th1/Th2/Tr1_anti-CD95 CH11 | 0.0 | 12.9 |
| LAK cells rest | 0.0 | 20.0 |
| LAK cells IL-2 | 0.0 | 0.0 |
| LAK cells IL-2 + IL-12 | 0.0 | 43.5 |
| LAK cells IL-2 + IFN gamma | 0.0 | 21.6 |
| LAK cells IL-2 + IL-18 | 0.0 | 49.0 |
| LAK cells PMA/ionomycin | 7.7 | 40.3 |
| NK Cells IL-2 rest | 0.0 | 61.1 |
| Two Way MLR 3 day | 0.0 | 12.4 |
| Two Way MLR 5 day | 0.0 | 11.8 |
| Two Way MLR 7 day | 0.0 | 0.0 |
| PBMC rest | 0.0 | 21.3 |
| PBMC PWM | 0.0 | 48.0 |
| PBMC PHA-L | 0.0 | 25.3 |
| Ramos (B cell) none | 0.0 | 0.0 |
| Ramos (B cell) ionomycin | 0.0 | 16.6 |
| B lymphocytes PWM | 10.0 | 35.1 |
| B lymphocytes CD40L and IL-4 | 0.0 | 0.0 |
| EOL-1 dbcAMP | 0.0 | 0.0 |
| EOL-1 dbcAMP PMA/ionomycin | 0.0 | 30.4 |
| Dendritic cells none | 6.9 | 0.0 |
| Dendritic cells LPS | 0.0 | 40.3 |
| Dendritic cells anti-CD40 | 6.2 | 0.0 |
| Monocytes rest | 0.0 | 47.6 |
| Monocytes LPS | 0.0 | 0.0 |
| Macrophages rest | 0.0 | 27.7 |
| Macrophages LPS | 0.0 | 8.9 |
| HUVEC none | 0.0 | 27.9 |
| HUVEC starved | 0.0 | 17.3 |
| HUVEC IL-1beta | 0.0 | 14.7 |
| HUVEC IFN gamma | 0.0 | 17.2 |
| HUVEC TNF alpha + IFN gamma | 0.0 | 0.0 |
| HUVEC TNF alpha + IL4 | 0.0 | 58.6 |
| HUVEC IL-11 | 0.0 | 35.1 |
| Lung Microvascular EC none | 0.0 | 0.0 |
| Lung Microvascular EC TNFalpha + IL-1beta | 0.0 | 37.9 |
| Microvascular Dermal EC none | 0.0 | 19.9 |
| Microsvasular Dermal EC TNFalpha + IL-1beta | 0.0 | 0.0 |
| Bronchial epithelium TNFalpha + IL1beta | 10.7 | 10.1 |
| Small airway epithelium none | 2.7 | 44.8 |
| Small airway epithelium TNFalpha + IL-1beta | 8.1 | 33.4 |
| Coronery artery SMC rest | 0.0 | 18.7 |
| Coronery artery SMC TNFalpha + IL-1beta | 0.0 | 34.9 |
| Astrocytes rest | 0.0 | 18.6 |
| Astrocytes TNFalpha + IL-1beta | 0.0 | 12.4 |
| KU-812 (Basophil) rest | 0.0 | 18.9 |
| KU-812 (Basophil) PMA/ionomycin | 0.0 | 0.0 |
| CCD1106 (Keratinocytes) none | 99.3 | 68.8 |
| CCD1106 (Keratinocytes) TNFalpha + IL-1beta | 100.0 | 21.6 |
| Liver cirrhosis | 0.0 | 0.0 |
| NCI-H292 none | 5.7 | 48.3 |
| NCI-H292 IL-4 | 0.0 | 19.9 |
| NCI-H292 IL-9 | 3.1 | 20.4 |
| NCI-H292 IL-13 | 8.0 | 0.0 |
| NCI-H292 IFN gamma | 3.2 | 0.0 |
| HPAEC none | 0.0 | 55.9 |
| HPAEC TNF alpha + IL-1 beta | 0.0 | 19.1 |
| Lung fibroblast none | 3.9 | 74.7 |
| Lung fibroblast TNF alpha + IL-1 beta | 10.2 | 48.3 |
| Lung fibroblast IL-4 | 19.5 | 44.8 |
| Lung fibroblast IL-9 | 31.9 | 56.6 |
| Lung fibroblast IL-13 | 23.8 | 0.0 |
| Lung fibroblast IFN gamma | 33.2 | 37.9 |
| Dermal fibroblast CCD1070 rest | 0.0 | 100.0 |
| Dermal fibroblast CCD1070 TNF alpha | 4.5 | 24.8 |
| Dermal fibroblast CCD1070 IL-1 beta | 0.0 | 23.2 |
| Dermal fibroblast IFN gamma | 0.0 | 11.8 |
| Dermal fibroblast IL-4 | 12.2 | 46.0 |
| Dermal Fibroblasts rest | 3.8 | 0.0 |
| Neutrophils TNFa + LPS | 23.5 | 51.8 |
| Neutrophils rest | 2.5 | 0.0 |
| Colon | 0.0 | 0.0 |
| Lung | 0.0 | 29.1 |
| Thymus | 0.0 | 8.9 |
| Kidney | 15.3 | 39.2 |

Column A - Rel. Exp. (%) Ag4944, Run 223598842
Column B - Rel. Exp. (%) Ag4945, Run 223625870

[0894] Panel 4.1D Summary: 4845/4944 Highest expression of the CG50389-06 transcript was seen in keratinocytes, regardless of their treatment with TNF-a plus IL-1b.

[0895] It was also found to a lesser extent in neutrophils and lung fibroblasts. This transcript encodes for a novel IL-1 receptor related protein that may have the potential to trigger novel members of the IL-1 family members as described by Debets and Parnet. (J Immunol Aug. 1, 2001; 167(3):1440-6; J Biol Chem. Feb. 23, 1996; 271(8):3967-70 ). Novel IL1 receptor like molecules have been cloned and reported to lead to activation of NF-kB and IL18 production, a potent inflammatory cytokine associated with lung inflammation, IBD and psoriasis. IL1 R family members have also been shown to mediate inflammatory signals through NF-kB activation, among other signalling pathways. Modulation of the function of this receptor by the use of protein therapeutics or antibodies prevents or reduces the severity of inflammatory processes observed in inflammatory lung and skin diseases such as asthma, bronchitis, emphysema and psoriasis.

[0896] E. CG50391-08 and CG50391-09 and CG50391-01:

[0897] Expression of gene CG50391-08 was assessed using the primer-probe sets Ag2654, Ag2726, and Ag2826, described in Tables EA, EB, and EC. Results of the RTQ-PCR runs are shown in Tables ED, EE, EF and EG.

TABLE EA
Probe Name Ag2654

| | | | | |
|---|---|---|---|---|
| Primer | Sequences | Length | Start Position | SEQ ID No |

| | | | | |
|---|---|---|---|---|
| Forward | 5′-tagaggagctgctcagcaaata-3′ | 22 | 297 | 1231 |
| Probe | TET-5′-cacaacgagtctcactcccgggt-3′-TAMRA | 23 | 323 | 1232 |
| Reverse | 5′-catgaggatctcctccttgtc-3′ | 21 | 368 | 1233 |

[0898] TABLE EB
Probe Name Ag2726

| | | | | |
|---|---|---|---|---|
| Primers | Sequences | Length | Start Position | SEQ ID No |

| | | | | |
|---|---|---|---|---|
| Forward | 5′-tagaggagctgctcagcaaata-3′ | 22 | 297 | 1234 |
| Probe | TET-5′-cacaacgagtctcactcccgggt-3′-TAMRA | 23 | 323 | 1235 |
| Reverse | 5′-catgaggatctcctccttgtc-3′ | 21 | 368 | 1236 |

[0899] TABLE EC
Probe Name Ag2826

| | | | | |
|---|---|---|---|---|
| Primers | Sequences | Length | Start Position | SEQ ID No |

| | | | | |
|---|---|---|---|---|
| Forward | 5′-ccctcttactctagcccatttg-3′ | 22 | 2108 | 1237 |
| Probe | TET-5′-tgtctgaccagcaaacattaaaacca-3′-TAMRA | 26 | 2080 | 1238 |
| Reverse | 5′-acagtccgtccctaccaataga-3′ | 22 | 2052 | 1239 |

[0900] TABLE ED
Panel 1.3D

| Tissue Name | A | B | C |
|---|---|---|---|
| Liver adenocarcinoma | 5.9 | 3.9 | 4.5 |
| Pancreas | 1.7 | 1.5 | 1.1 |
| Pancreatic ca. CAPAN 2 | 0.1 | 0.2 | 0.2 |
| Adrenal gland | 10.4 | 10.7 | 10.5 |
| Thyroid | 6.3 | 6.9 | 5.6 |
| Salivary gland | 1.0 | 2.5 | 2.6 |
| Pituitary gland | 1.8 | 1.8 | 1.4 |
| Brain (fetal) | 0.2 | 0.4 | 0.3 |
| Brain (whole) | 1.6 | 1.4 | 0.9 |
| Brain (amygdala) | 1.6 | 1.8 | 1.7 |
| Brain (cerebellum) | 0.5 | 0.8 | 0.5 |
| Brain (hippocampus) | 6.2 | 6.3 | 5.0 |
| Brain (substantia nigra) | 1.5 | 1.9 | 0.5 |
| Brain (thalamus) | 1.4 | 1.4 | 2.0 |
| Cerebral Cortex | 0.9 | 1.4 | 1.6 |
| Spinal cord | 8.3 | 6.0 | 6.0 |
| glio/astro U87-MG | 0.0 | 0.1 | 0.0 |
| glio/astro U-118-MG | 4.0 | 3.1 | 2.5 |
| astrocytoma SW1783 | 13.0 | 12.6 | 9.7 |
| neuro*; met SK-N-AS | 1.3 | 1.3 | 0.5 |
| astrocytoma SF-539 | 0.4 | 0.1 | 0.7 |
| astrocytoma SNB-75 | 5.7 | 5.8 | 4.2 |
| glioma SNB-19 | 0.2 | 0.0 | 0.0 |
| glioma U251 | 0.0 | 0.1 | 0.1 |
| glioma SF-295 | 2.4 | 2.4 | 0.8 |
| Heart (fetal) | 17.4 | 19.1 | 9.7 |
| Heart | 5.7 | 6.0 | 4.9 |
| Skeletal muscle (fetal) | 100.0 | 100.0 | 100.0 |
| Skeletal muscle | 0.6 | 0.4 | 0.6 |
| Bone marrow | 5.0 | 6.3 | 5.1 |
| Thymus | 3.6 | 2.8 | 2.4 |
| Spleen | 8.8 | 9.1 | 11.3 |
| Lymph node | 4.7 | 5.6 | 3.8 |
| Colorectal | 27.9 | 29.7 | 44.4 |
| Stomach | 8.7 | 12.9 | 12.2 |
| Small intestine | 16.6 | 8.7 | 23.3 |
| Colon ca. SW480 | 2.0 | 2.5 | 1.4 |
| Colon ca.* SW620(SW480 met) | 0.0 | 0.1 | 0.1 |
| Colon ca. HT29 | 0.3 | 0.0 | 0.2 |
| Colon ca. HCT-116 | 0.4 | 0.7 | 0.6 |
| Colon ca. CaCo-2 | 0.2 | 0.7 | 0.4 |
| Colon ca. tissue(ODO3866) | 20.0 | 24.7 | 17.2 |
| Colon ca. HCC-2998 | 0.3 | 0.6 | 0.7 |
| Gastric ca.* (liver met) NCI-N87 | 0.3 | 0.6 | 1.4 |
| Bladder | 14.2 | 17.8 | 7.9 |
| Trachea | 13.6 | 11.9 | 7.6 |
| Kidney | 1.3 | 1.6 | 1.1 |
| Kidney (fetal) | 8.1 | 9.0 | 4.7 |
| Renal ca. 786-0 | 2.4 | 4.4 | 2.4 |
| Renal ca. A498 | 4.0 | 7.2 | 4.7 |
| Renal ca. RXF 393 | 4.2 | 6.3 | 5.7 |
| Renal ca. ACHN | 79.0 | 79.0 | 38.7 |
| Renal ca. UO-31 | 15.4 | 17.0 | 6.9 |
| Renal ca. TK-10 | 0.3 | 0.3 | 0.1 |
| Liver | 1.1 | 1.0 | 0.7 |
| Liver (fetal) | 2.7 | 5.3 | 4.5 |
| Liver ca. (hepatoblast) HepG2 | 0.0 | 0.0 | 0.0 |
| Lung | 25.0 | 24.5 | 27.4 |
| Lung (fetal) | 29.1 | 26.1 | 22.2 |
| Lung ca. (small cell) LX-1 | 0.8 | 0.0 | 1.1 |
| Lung ca. (small cell) NCI-H69 | 0.4 | 0.0 | 0.8 |
| Lung ca. (s. cell var.) SHP-77 | 2.7 | 4.6 | 1.8 |
| Lung ca. (large cell) NCI-H460 | 0.1 | 0.0 | 0.0 |
| Lung ca. (non-sm. cell) A549 | 0.1 | 0.2 | 0.1 |
| Lung ca. (non-s. cell) NCI-H23 | 0.4 | 0.7 | 0.4 |
| Lung ca. (non-s. cell) HOP-62 | 0.8 | 1.6 | 0.5 |
| Lung ca. (non-s. cl) NCI-H522 | 0.1 | 0.2 | 0.0 |
| Lung ca. (squam.) SW 900 | 0.8 | 1.3 | 2.4 |
| Lung ca. (squam.) NCI-H596 | 0.1 | 0.0 | 0.5 |
| Mammary gland | 16.7 | 11.7 | 10.8 |
| Breast ca.* (pl. ef) MCF-7 | 0.9 | 0.0 | 0.1 |
| Breast ca.* (pl. ef) MDA-MB-231 | 3.3 | 5.2 | 2.9 |
| Breast ca.* (pl. ef) T47D | 1.4 | 0.5 | 2.8 |
| Breast ca. BT-549 | 2.6 | 2.4 | 2.3 |
| Breast ca. MDA-N | 0.0 | 0.0 | 0.0 |
| Ovary | 28.1 | 28.3 | 47.6 |
| Ovarian ca. OVCAR-3 | 7.0 | 7.6 | 5.5 |
| Ovarian ca. OVCAR-4 | 0.0 | 0.4 | 0.2 |
| Ovarian ca. OVCAR-5 | 2.1 | 1.4 | 1.3 |
| Ovarian ca. OVCAR-8 | 0.3 | 0.4 | 0.0 |
| Ovarian ca. IGROV-1 | 0.1 | 0.1 | 0.0 |
| Ovarian ca.* (ascites) SK-OV-3 | 0.0 | 0.1 | 0.0 |
| Uterus | 26.2 | 23.3 | 22.4 |
| Placenta | 27.4 | 29.1 | 32.5 |
| Prostate | 29.5 | 33.2 | 38.2 |
| Prostate ca.* (bone met)PC-3 | 0.1 | 0.0 | 0.1 |
| Testis | 13.4 | 12.2 | 10.5 |
| Melanoma Hs688(A).T | 47.0 | 42.0 | 20.7 |
| Melanoma* (met) Hs688(B).T | 3.6 | 4.5 | 4.2 |
| Melanoma UACC-62 | 0.0 | 0.1 | 0.1 |
| Melanoma M14 | 0.0 | 0.1 | 0.0 |
| Melanoma LOX IMVI | 2.3 | 0.0 | 0.0 |
| Melanoma* (met) SK-MEL-5 | 0.1 | 0.5 | 0.0 |
| Adipose | 81.8 | 77.9 | 44.8 |

Column A - Rel. Exp. (%) Ag2654, Run 153009856
Column B - Rel. Exp. (%) Ag2726, Run 153622446
Column C - Rel. Exp. (%) Ag2826, Run 153774039

[0901] TABLE EE
Panel 2D

| Tissue Name | A | B | C |
|---|---|---|---|
| Normal Colon | 52.1 | 75.3 | 58.2 |
| CC Well to Mod Diff (ODO3866) | 18.7 | 19.5 | 15.2 |
| CC Margin (ODO3866) | 18.4 | 18.4 | 13.2 |
| CC Gr.2 rectosigmoid | 8.2 | 10.4 | 2.8 |
| (ODO3868) | | | |
| CC Margin (ODO3868) | 9.0 | 8.2 | 2.3 |
| CC Mod Diff (ODO3920) | 8.7 | 9.2 | 3.6 |
| CC Margin (ODO3920) | 20.2 | 20.9 | 5.0 |
| CC Gr.2 ascend colon | 16.4 | 17.9 | 15.9 |
| (ODO3921) | | | |
| CC Margin (ODO3921) | 16.4 | 18.2 | 11.0 |
| CC from Partial Hepatectomy | 14.4 | 11.7 | 10.4 |
| (ODO4309) Mets | | | |
| Liver Margin (ODO4309) | 8.9 | 6.0 | 7.9 |
| Colon mets to lung (OD04451-01) | 16.5 | 12.2 | 4.5 |
| Lung Margin (OD04451-02) | 33.9 | 28.3 | 9.9 |
| Normal Prostate 6546-1 | 66.0 | 45.1 | 51.8 |
| Prostate Cancer (OD04410) | 30.4 | 30.1 | 31.9 |
| Prostate Margin (OD04410) | 75.8 | 82.9 | 67.8 |
| Prostate Cancer (OD04720-01) | 58.2 | 47.6 | 31.0 |
| Prostate Margin (OD04720-02) | 51.1 | 46.3 | 31.0 |
| Normal Lung 061010 | 16.4 | 17.9 | 20.4 |
| Lung Met to Muscle (ODO4286) | 4.5 | 2.8 | 2.5 |
| Muscle Margin (ODO4286) | 22.2 | 20.7 | 10.3 |
| Lung Malignant Cancer | 10.4 | 6.4 | 9.4 |
| (OD03126) | | | |
| Lung Margin (OD03126) | 15.8 | 16.0 | 12.7 |
| Lung Cancer (OD04404) | 16.6 | 14.1 | 11.8 |
| Lung Margin (OD04404) | 87.7 | 54.3 | 40.1 |
| Lung Cancer (OD04565) | 15.2 | 14.5 | 7.7 |
| Lung Margin (OD04565) | 17.8 | 13.8 | 3.5 |
| Lung Cancer (OD04237-01) | 5.9 | 7.2 | 11.8 |
| Lung Margin (OD04237-02) | 64.6 | 48.3 | 43.8 |
| Ocular Mel Met to Liver | 0.4 | 0.7 | 0.6 |
| (ODO4310) | | | |
| Liver Margin (ODO4310) | 12.6 | 10.6 | 9.8 |
| Melanoma Mets to Lung | 1.6 | 1.1 | 1.1 |
| (OD04321) | | | |
| Lung Margin (OD04321) | 32.8 | 33.2 | 32.8 |
| Normal Kidney | 21.0 | 17.6 | 25.7 |
| Kidney Ca, Nuclear grade 2 | 33.7 | 31.6 | 22.4 |
| (OD04338) | | | |
| Kidney Margin (OD04338) | 48.0 | 39.5 | 14.4 |
| Kidney Ca Nuclear grade 1/2 | 3.1 | 3.1 | 1.4 |
| (OD04339) | | | |
| Kidney Margin (OD04339) | 9.3 | 7.6 | 4.5 |
| Kidney Ca, Clear cell type | 27.4 | 23.7 | 17.0 |
| (OD04340) | | | |
| Kidney Margin (OD04340) | 34.9 | 28.3 | 19.1 |
| Kidney Ca, Nuclear grade 3 | 9.3 | 8.0 | 5.3 |
| (OD04348) | | | |
| Kidney Margin (OD04348) | 27.0 | 23.2 | 10.9 |
| Kidney Cancer (OD04622-01) | 12.7 | 11.6 | 6.9 |
| Kidney Margin (OD04622-03) | 8.4 | 7.4 | 4.5 |
| Kidney Cancer (OD04450-01) | 10.6 | 6.4 | 8.5 |
| Kidney Margin (OD04450-03) | 29.7 | 24.8 | 8.2 |
| Kidney Cancer 8120607 | 3.6 | 4.9 | 2.5 |
| Kidney Margin 8120608 | 12.8 | 16.5 | 6.8 |
| Kidney Cancer 8120613 | 0.4 | 0.0 | 0.1 |
| Kidney Margin 8120614 | 9.9 | 9.4 | 5.4 |
| Kidney Cancer 9010320 | 35.4 | 33.4 | 18.7 |
| Kidney Margin 9010321 | 27.5 | 24.8 | 11.3 |
| Normal Uterus | 20.4 | 24.1 | 12.9 |
| Uterus Cancer 064011 | 50.0 | 48.6 | 12.2 |
| Normal Thyroid | 11.4 | 7.2 | 10.4 |
| Thyroid Cancer 064010 | 1.6 | 2.1 | 2.5 |
| Thyroid Cancer A302152 | 13.8 | 12.5 | 3.5 |
| Thyroid Margin A302153 | 9.0 | 7.7 | 9.9 |
| Normal Breast | 33.2 | 32.5 | 14.9 |
| Breast Cancer (OD04566) | 9.9 | 8.5 | 2.1 |
| Breast Cancer (OD04590-01) | 7.5 | 9.9 | 9.6 |
| Breast Cancer Mets | 14.2 | 14.7 | 12.7 |
| (OD04590-03) | | | |
| Breast Cancer Metastasis | 2.5 | 1.8 | 2.0 |
| (OD04655-05) | | | |
| Breast Cancer 064006 | 20.7 | 19.8 | 18.4 |
| Breast Cancer 1024 | 15.4 | 16.2 | 12.9 |
| Breast Cancer 9100266 | 12.0 | 11.7 | 18.2 |
| Breast Margin 9100265 | 15.2 | 15.2 | 21.8 |
| Breast Cancer A209073 | 10.7 | 10.2 | 12.8 |
| Breast Margin A209073 | 7.7 | 11.1 | 8.2 |
| Normal Liver | 2.1 | 2.0 | 1.9 |
| Liver Cancer 064003 | 1.1 | 1.0 | 1.4 |
| Liver Cancer 1025 | 5.2 | 5.3 | 2.6 |
| Liver Cancer 1026 | 7.3 | 7.6 | 7.7 |
| Liver Cancer 6004-T | 9.3 | 11.6 | 3.4 |
| Liver Tissue 6004-N | 3.8 | 3.8 | 2.6 |
| Liver Cancer 6005-T | 10.2 | 10.7 | 8.0 |
| Liver Tissue 6005-N | 4.1 | 3.9 | 2.1 |
| Normal Bladder | 37.1 | 43.2 | 35.1 |
| Bladder Cancer 1023 | 11.3 | 9.2 | 11.2 |
| Bladder Cancer A302173 | 4.4 | 5.6 | 10.2 |
| Bladder Cancer (OD04718-01) | 28.1 | 30.6 | 27.2 |
| Bladder Normal Adjacent | 100.0 | 100.0 | 78.5 |
| (OD04718-03) | | | |
| Normal Ovary | 10.4 | 8.1 | 10.2 |
| Ovarian Cancer 064008 | 92.7 | 95.9 | 100.0 |
| Ovarian Cancer (OD04768-07) | 1.9 | 1.7 | 1.4 |
| Ovary Margin (OD04768-08) | 71.2 | 68.3 | 32.8 |
| Normal Stomach | 70.7 | 69.7 | 43.5 |
| Gastric Cancer 9060358 | 12.8 | 16.5 | 24.3 |
| Stomach Margin 9060359 | 23.7 | 25.2 | 21.2 |
| Gastric Cancer 9060395 | 25.2 | 32.5 | 32.5 |
| Stomach Margin 9060394 | 43.2 | 49.0 | 55.9 |
| Gastric Cancer 9060397 | 28.1 | 26.4 | 29.3 |
| Stomach Margin 9060396 | 8.7 | 10.2 | 9.2 |
| Gastric Cancer 064005 | 18.6 | 26.4 | 33.9 |

Column A - Rel. Exp. (%) Ag2654, Run 153009865
Column B - Rel. Exp. (%) Ag2726, Run 153622484
Column C - Rel. Exp. (%) Ag2826, Run 153774078

[0902] TABLE EF
Panel 4D

| Tissue Name | A | B | C |
|---|---|---|---|
| Secondary Th1 act | 0.3 | 0.5 | 0.0 |
| Secondary Th2 act | 0.0 | 0.0 | 0.0 |
| Secondary Tr1 act | 0.1 | 0.0 | 0.0 |
| Secondary Th1 rest | 0.0 | 0.0 | 0.0 |
| Secondary Th2 rest | 0.1 | 0.1 | 0.0 |
| Secondary Tr1 rest | 0.0 | 0.0 | 0.0 |
| Primary Th1 act | 0.1 | 0.0 | 0.0 |
| Primary Th2 act | 0.1 | 0.1 | 0.0 |
| Primary Tr1 act | 0.0 | 0.0 | 0.0 |
| Primary Th1 rest | 0.1 | 0.2 | 0.2 |
| Primary Th2 rest | 0.0 | 0.1 | 0.1 |
| Primary Tr1 rest | 0.0 | 0.0 | 0.0 |
| CD45RA CD4 lymphocyte act | 24.7 | 20.9 | 15.3 |
| CD45RO CD4 lymphocyte act | 0.2 | 0.1 | 0.1 |
| CD8 lymphocyte act | 0.0 | 0.1 | 0.0 |
| Secondary CD8 lymphocyte rest | 0.0 | 0.0 | 0.0 |
| Secondary CD8 lymphocyte act | 0.3 | 0.3 | 0.0 |
| CD4 lymphocyte none | 0.4 | 0.1 | 0.2 |
| 2ry Th1/Th2/Tr1 anti-CD95 CH11 | 0.0 | 0.2 | 0.0 |
| LAK cells rest | 1.4 | 2.7 | 2.0 |
| LAK cells IL-2 | 0.2 | 0.2 | 0.0 |
| LAK cells IL-2 + IL-12 | 0.1 | 0.3 | 0.1 |
| LAK cells IL-2 + IFN gamma | 0.4 | 0.3 | 0.2 |
| LAK cells IL-2 + IL-18 | 0.4 | 0.0 | 0.2 |
| LAK cells PMA/ionomycin | 2.2 | 1.0 | 1.0 |
| NK Cells IL-2 rest | 0.0 | 0.4 | 0.0 |
| Two Way MLR 3 day | 2.2 | 3.6 | 1.9 |
| Two Way MLR 5 day | 0.8 | 1.7 | 0.8 |
| Two Way MLR 7 day | 0.1 | 0.4 | 0.1 |
| PBMC rest | 3.0 | 3.6 | 3.9 |
| PBMC PWM | 3.8 | 3.1 | 4.1 |
| PBMC PHA-L | 4.3 | 3.6 | 5.9 |
| Ramos (B cell) none | 0.9 | 1.2 | 2.5 |
| Ramos (B cell) ionomycin | 1.0 | 1.1 | 3.5 |
| B lymphocytes PWM | 0.3 | 0.5 | 0.0 |
| B lymphocytes CD40L and IL-4 | 0.6 | 0.4 | 0.1 |
| EOL-1 dbcAMP | 0.2 | 0.1 | 0.1 |
| EOL-1 dbcAMP PMA/ionomycin | 0.0 | 0.0 | 0.1 |
| Dendritic cells none | 0.2 | 0.2 | 0.2 |
| Dendritic cells LPS | 0.4 | 0.5 | 0.3 |
| Dendritic cells anti-CD40 | 0.0 | 0.1 | 0.0 |
| Monocytes rest | 31.0 | 31.9 | 33.4 |
| Monocytes LPS | 1.4 | 2.2 | 1.3 |
| Macrophages rest | 0.1 | 0.7 | 0.6 |
| Macrophages LPS | 4.8 | 6.3 | 5.3 |
| HUVEC none | 0.0 | 0.0 | 0.0 |
| HUVEC starved | 0.3 | 0.0 | 0.0 |
| HUVEC IL-1beta | 0.0 | 0.0 | 0.0 |
| HUVEC IFN gamma | 0.1 | 0.6 | 0.1 |
| HUVEC TNF alpha + IFN gamma | 0.0 | 0.0 | 0.0 |
| HUVEC TNF alpha + IL4 | 0.0 | 0.0 | 0.0 |
| HUVEC IL-11 | 0.2 | 0.0 | 0.0 |
| Lung Microvascular EC none | 0.0 | 0.0 | 0.0 |
| Lung Microvascular EC | 0.0 | 0.1 | 0.0 |
| TNFalpha + IL-1beta | | | |
| Microvascular Dermal EC none | 1.4 | 1.6 | 1.1 |
| Microsvasular Dermal EC | 0.1 | 0.0 | 0.1 |
| TNFalpha + IL-1 beta | | | |
| Bronchial epithelium TNFalpha + | 0.0 | 0.0 | 0.1 |
| IL1beta | | | |
| Small airway epithelium none | 1.6 | 1.0 | 1.6 |
| Small airway epithelium | 2.2 | 3.5 | 6.4 |
| TNFalpha + IL-1beta | | | |
| Coronery artery SMC rest | 0.3 | 0.3 | 0.5 |
| Coronery artery SMC TNFalpha + | 0.1 | 0.4 | 0.0 |
| IL-1beta | | | |
| Astrocytes rest | 18.9 | 20.6 | 21.2 |
| Astrocytes TNFalpha + IL-1beta | 9.0 | 8.3 | 11.6 |
| KU-812 (Basophil) rest | 0.0 | 0.1 | 0.1 |
| KU-812 (Basophil) PMA/ionomycin | 0.6 | 0.0 | 0.1 |
| CCD1106 (Keratinocytes) none | 0.3 | 0.4 | 0.5 |
| CCD1106 (Keratinocytes) | 0.0 | 0.0 | 0.1 |
| TNFalpha + IL-1 beta | | | |
| Liver cirrhosis | 18.3 | 22.4 | 12.5 |
| Lupus kidney | 10.3 | 9.6 | 9.9 |
| NCI-H292 none | 0.5 | 0.3 | 1.3 |
| NCI-H292 IL-4 | 0.7 | 0.3 | 1.4 |
| NCI-H292 IL-9 | 0.5 | 0.7 | 1.9 |
| NCI-H292 IL-13 | 0.6 | 0.1 | 0.7 |
| NCI-H292 IFN gamma | 0.5 | 0.4 | 0.4 |
| HPAEC none | 0.0 | 0.0 | 0.0 |
| HPAEC TNF alpha + IL-1 beta | 0.0 | 0.4 | 0.0 |
| Lung fibroblast none | 12.0 | 12.2 | 10.4 |
| Lung fibroblast TNF alpha + IL-1 | 8.3 | 9.7 | 11.5 |
| beta | | | |
| Lung fibroblast IL-4 | 17.8 | 16.4 | 25.0 |
| Lung fibroblast IL-9 | 16.3 | 16.2 | 16.8 |
| Lung fibroblast IL-13 | 14.2 | 13.9 | 13.9 |
| Lung fibroblast IFN gamma | 29.9 | 33.0 | 40.9 |
| Dermal fibroblast CCD1070 rest | 89.5 | 100.0 | 100.0 |
| Dermal fibroblast CCD1070 TNF | 63.3 | 51.4 | 76.8 |
| alpha | | | |
| Dermal fibroblast CCD1070 IL-1 | 100.0 | 94.0 | 70.7 |
| beta | | | |
| Dermal fibroblast IFN gamma | 9.7 | 9.8 | 7.9 |
| Dermal fibroblast IL-4 | 2.8 | 1.6 | 1.8 |
| IBD Colitis 2 | 22.8 | 30.4 | 22.4 |
| IBD Crohn's | 11.2 | 14.7 | 10.4 |
| Colon | 18.2 | 22.1 | 16.6 |
| Lung | 51.8 | 46.3 | 40.6 |
| Thymus | 11.2 | 10.3 | 11.9 |
| Kidney | 10.6 | 8.7 | 8.0 |

Column A - Rel. Exp. (%) Ag2654, Run 153594146
Column B - Rel. Exp. (%) Ag2726, Run 153622627
Column C - Rel. Exp. (%) Ag2826, Run 153774117

[0903] TABLE EG
Panel 5D

| Tissue Name | A | B |
|---|---|---|
| 97457_Patient-02go_adipose | 100.0 | 74.7 |
| 97476_Patient-07sk_skeletal muscle | 37.4 | 31.9 |
| 97477_Patient-07ut_uterus | 83.5 | 95.3 |
| 97478_Patient-07pl_placenta | 22.4 | 22.5 |
| 97481_Patient-08sk_skeletal muscle | 12.2 | 8.2 |
| 97482_Patient-08ut_uterus | 46.3 | 48.6 |
| 97483_Patient-08pl_placenta | 19.5 | 22.5 |
| 97486_Patient-09sk_skeletal muscle | 5.8 | 7.5 |
| 97487_Patient-09ut_uterus | 19.9 | 18.7 |
| 97488_Patient-09pl_placenta | 13.2 | 24.8 |
| 97492_Patient-10ut_uterus | 29.7 | 19.9 |
| 97493_Patient-10pl_placenta | 31.0 | 30.4 |
| 97495_Patient-11go_adipose | 45.1 | 31.4 |
| 97496_Patient-11sk_skeletal muscle | 11.0 | 5.0 |
| 97497_Patient-11ut_uterus | 66.9 | 57.0 |
| 97498_Patient-11pl_placenta | 11.5 | 21.3 |
| 97500_Patient-12go_adipose | 62.0 | 54.7 |
| 97501_Patient-12sk_skeletal muscle | 15.5 | 25.9 |
| 97502_Patient-12ut_uterus | 90.1 | 62.0 |
| 97503_Patient-12pl_placenta | 11.6 | 11.6 |
| 94721_Donor 2 U- | 31.9 | 10.9 |
| A_Mesenchymal Stem Cells | | |
| 94722_Donor 2 U - | 15.6 | 16.6 |
| B_Mesenchymal Stem Cells | | |
| 94723_Donor 2 U - | 18.6 | 25.3 |
| C_Mesenchymal Stem Cells | | |
| 94709_Donor 2 AM - A_adipose | 81.8 | 100.0 |
| 94710_Donor 2 AM - B_adipose | 77.4 | 84.1 |
| 94711_Donor 2 AM - C_adipose | 66.4 | 33.9 |
| 94712_Donor 2 AD - A_adipose | 15.5 | 14.8 |
| 94713_Donor 2 AD - B_adipose | 16.6 | 18.8 |
| 94714_Donor 2 AD - C_adipose | 22.5 | 22.5 |
| 94742_Donor 3 U - A_Mesenchymal | 33.9 | 21.6 |
| Stem Cells | | |
| 94743_Donor 3 U - B_Mesenchymal | 27.0 | 25.2 |
| Stem Cells | | |
| 94730_Donor 3 AM - A_adipose | 75.3 | 65.1 |
| 94731_Donor 3 AM - B_adipose | 52.1 | 80.1 |
| 94732_Donor 3 AM - C_adipose | 42.0 | 35.6 |
| 94733_Donor 3 AD - A_adipose | 12.1 | 9.9 |
| 94734_Donor 3 AD - B_adipose | 0.2 | 14.5 |
| 94735_Donor 3 AD - C_adipose | 10.7 | 13.0 |
| 77138_Liver_HepG2untreated | 1.3 | 2.6 |
| 73556_Heart_Cardiac stromal cells | 0.2 | 0.0 |
| (primary) | | |
| 81735_Small Intestine | 21.0 | 27.2 |
| 72409_Kidney_Proximal Convoluted | 2.7 | 2.8 |
| Tubule | | |
| 82685_Small intestine_Duodenum | 10.2 | 13.1 |
| 90650_Adrenal_Adrenocortical | 11.0 | 15.8 |
| adenoma | | |
| 72410_Kidney_HRCE | 25.2 | 56.3 |
| 72411_Kidney_HRE | 7.6 | 7.0 |
| 73139_Uterus_Uterine smooth muscle | 1.3 | 3.1 |
| cells | | |

Column A - Rel. Exp. (%) Ag2654, Run 169270118
Column B - Rel. Exp. (%) Ag2726, Run 169315037

[0904] Panel 1.3D Summary: Ag2654/Ag2726/Ag2826 Highest expression of this gene was detected in fetal skeletal muscle (CTs=27-28.2). This gene was expressed at much higher levels in fetal when compared to adult skeletal muscle (CT=35). The relative overexpression of this gene in fetal skeletal muscle demonstrates that the gene or protein product enhances muscular growth or development in the fetus and also acts in a regenerative capacity in the adult.

[0905] Moderate to low levels of expression of this gene were also seen in tissues with - metabolic/endocrine-functions-including pancreas,- adipose, adrenal gland, thyroid, pituitary gland, skeletal muscle, heart, liver and the gastrointestinal tract. -Therapeutic modulation of the activity of this gene or gene product is useful in the treatment of endocrine/metabolically related diseases, such as obesity and diabetes.

[0906] Moderate expression of this gene was also seen in number of cell lines derived from melanoma, liver, renal, breast, lung, ovarian, and brain cancers.

[0907] Panel 2D Summary: Ag2654/Ag2726/Ag2826 Highest expression of this gene was detected in a normal bladder sample (CTs=26-27.5). Significant expression of this gene was seen in both normal and cancer samples used in this panel. Expression of this gene was higher in normal lung, bladder and breast samples as compared to their corresponding cancer samples.

[0908] Panel 4D Summary: Ag2654/Ag2726/Ag2826 Highest expression of this gene was detected in dermal fibroblasts (CTs=26.4-28). High to moderate expression of this gene was detected in dermal and lung fibroblasts, activated CD45RA CD4 lymphocyte cells, two way MLR, PBMC cells, resting monocytes, LPS treated macrophage, small airway epithelium, liver cirrhosis, lupus kidney, IBD colon, and normal tissues represented by colon, lung, thymus and kidney.

[0909] Panel 5D Summary: Ag2654/Ag2726 Highest expression of this gene was seen in adipose (CTs=30). This gene showed ubiquitous expression in this panel, with moderate expression in adipose, skeletal muscle, small intesting, uterus, placenta, kidney, and mesenchmyal stem cells.

[0910] F. CG50426-15 and CG50426-17 and CG50426-21: NEURESTIN

[0911] Expression of full-length physical clone CG50426-15 and variants CG50426-17 and CG50426-21 was assessed using the primer-probe sets Ag2679, Ag2728, Ag2975, Ag332, Ag047, and Ag47b, described in Tables FA, FB, FC, FD, FE, and FF. Results of the RTQ-PCR runs are shown in Tables FG, FH, Fl and FJ. The CG50426-15 variant only corresponds to Ag332 and Ag47b.

TABLE FA
Probe Name Ag2679

| | | | | |
|---|---|---|---|---|
| Primers | Sequences | Length | Start Position | SEQ ID No |

| | | | | |
|---|---|---|---|---|
| Forward | 5′-ttgacctcaggaacggtttac-3′ | 21 | 1136 | 1240 |
| Probe | TET-5′-ctgctgcccaggaatactttctccag-3′-TAMRA | 26 | 1172 | 1241 |
| Reverse | 5′-agtatttggagggcttcttcag-3′ | 22 | 1211 | 1242 |

[0912] TABLE FB
Probe Name Ag2728

| | | | | |
|---|---|---|---|---|
| Primers | Sequences | Length | Start Position | SEQ ID No |

| | | | | |
|---|---|---|---|---|
| Forward | 5′-ggagcttggtctcatgaccta-3′ | 21 | 4810 | 1243 |
| Probe | TET-5′-actgggctcctggccaccaagag-3′-TAMRA | 23 | 4841 | 1244 |
| Reverse | 5′-agtcgtccatcctgtttcatc-3′ | 21 | 4865 | 1245 |

[0913] TABLE FC
Probe Name Ag2975

| | | | | |
|---|---|---|---|---|
| Primers | Sequences | Length | Start Position | SEQ ID No |

| | | | | |
|---|---|---|---|---|
| Forward | 5′-ggagcttggtctcatgaccta-3′ | 21 | 4810 | 1246 |
| Probe | TET-5′-actgggctcctggccaccaagag-3′-TAMRA | 23 | 4841 | 1247 |
| Reverse | 5′-agtcgtccatcctgtttcatc-3′ | 21 | 4865 | 1248 |

[0914] TABLE FD
Probe Name Ag332

| | | | | |
|---|---|---|---|---|
| Primers | Sequences | Length | Start Position | SEQ ID No |

| | | | | |
|---|---|---|---|---|
| Forward | 5′-gctgccctgacttgtgcaa-3′ | 19 | 2211 | 1249 |
| Probe | TET-5′-tctgacccagtgtgcatctcccgtt-3′-TAMRA | 25 | 2234 | 1250 |
| Reverse | 5′-ccggtctggcagacacact-3′ | 19 | 2268 | 1251 |

[0915] TABLE FE
Probe Name Ag047

| | | | | |
|---|---|---|---|---|
| Primers | Sequences | Length | Start Position | SEQ ID No |

| | | | | |
|---|---|---|---|---|
| Forward | 5′-ccaatgacctggccacca-3′ | 18 | 987 | 1252 |
| Probe | TET-5′-ccagagtccgttcagcttcaggacagc-3′-TAMRA | 27 | 1007 | 1253 |
| Reverse | 5′-gtggcacgttgctgtttagc-3′ | 20 | 1039 | 1254 |

[0916] TABLE FF
Probe Name Ag47b

| | | | | |
|---|---|---|---|---|
| Primers | Sequences | Length | Start Position | SEQ ID No |

| | | | | |
|---|---|---|---|---|
| Forward | 5′-gaacgccggagcatacaga-3′ | 19 | 1574 | 1255 |
| Probe | TET-5′-ccaggtactgcacaaacacggcttcat-3′-TAMRA | 27 | 1605 | 1256 |
| Reverse | 5′-gatgccacaggcccaca-3′ | 17 | 1633 | 1257 |

[0917] TABLE FG
Panel 1

| Tissue Name | A | B | C | D | E |
|---|---|---|---|---|---|
| Endothelial cells | 0.0 | 0.0 | 0.0 | 0.0 | 0.0 |
| Endothelial cells (treated) | 0.0 | 0.0 | 0.0 | 0.0 | 0.0 |
| Pancreas | 0.0 | 0.3 | 0.0 | 0.0 | 0.0 |
| Pancreatic ca. CAPAN 2 | 0.0 | 0.0 | 0.0 | 0.0 | 0.0 |
| Adrenal gland | 0.0 | 1.3 | 0.2 | 0.0 | 0.0 |
| Thyroid | 0.0 | 0.4 | 100.0 | 0.1 | 0.0 |
| Salivary gland | 0.0 | 0.2 | 0.0 | 0.0 | 0.0 |
| Pituitary gland | 0.0 | 0.1 | 2.1 | 0.0 | 0.0 |
| Brain (fetal) | 0.0 | 15.0 | 3.4 | 11.0 | 21.8 |
| Brain (whole) | 95.9 | 67.8 | 3.2 | 4.5 | 32.5 |
| Brain (amygdala) | 0.0 | 8.8 | 3.8 | 8.7 | 12.2 |
| Brain (cerebellum) | 0.0 | 22.2 | 1.4 | 0.1 | 14.3 |
| Brain (hippocampus) | 0.0 | 24.7 | 3.4 | 8.7 | 15.6 |
| Brain (substantia nigra) | 3.4 | 3.6 | 1.3 | 2.3 | 3.8 |
| Brain (thalamus) | 3.5 | 4.7 | 3.3 | 5.0 | 9.1 |
| Brain (hypothalamus) | 0.0 | 0.7 | 0.2 | 0.0 | 0.0 |
| Spinal cord | 0.7 | 1.5 | 0.9 | 1.4 | 1.1 |
| glio/astro U87-MG | 0.6 | 2.6 | 1.6 | 1.7 | 3.0 |
| glio/astro U-118-MG | 0.0 | 0.6 | 0.2 | 1.1 | 0.1 |
| astrocytoma SW1783 | 33.7 | 29.5 | 9.0 | 42.9 | 36.1 |
| neuro*; met SK-N-AS | 0.0 | 0.0 | 0.0 | 0.0 | 0.0 |
| astrocytoma SF-539 | 31.0 | 36.9 | 10.3 | 68.3 | 48.3 |
| astrocytoma SNB-75 | 33.7 | 32.8 | 7.1 | 23.0 | 50.3 |
| glioma SNB-19 | 100.0 | 100.0 | 30.1 | 100.0 | 100.0 |
| glioma U251 | 49.0 | 44.1 | 16.5 | 57.8 | 41.5 |
| glioma SF-295 | 6.0 | 8.1 | 2.1 | 19.8 | 8.7 |
| Heart | 61.1 | 26.8 | 36.6 | 70.7 | 39.8 |
| Skeletal muscle | 0.0 | 0.1 | 0.2 | 0.0 | 0.0 |
| Bone marrow | 0.0 | 0.1 | 0.0 | 0.0 | 0.0 |
| Thymus | 18.7 | 18.4 | 1.1 | 2.7 | 17.2 |
| Spleen | 0.0 | 0.0 | 0.0 | 0.0 | 0.0 |
| Lymph node | 0.0 | 0.2 | 0.0 | 0.0 | 0.0 |
| Colon (ascending) | 0.5 | 0.7 | 0.7 | 0.9 | 4.5 |
| Stomach | 0.1 | 1.1 | 0.2 | 0.2 | 0.2 |
| Small intestine | 0.0 | 0.1 | 0.0 | 0.0 | 0.0 |
| Colon ca. SW480 | 0.6 | 1.0 | 1.6 | 7.0 | 1.4 |
| Colon ca.* SW620 (SW480 met) | 0.0 | 0.0 | 0.0 | 0.0 | 0.0 |
| Colon ca. HT29 | 0.0 | 0.0 | 0.0 | 0.0 | 0.0 |
| Colon ca. HCT-116 | 0.0 | 0.0 | 0.0 | 0.0 | 0.0 |
| Colon ca. CaCo-2 | 0.0 | 0.1 | 0.0 | 0.0 | 0.0 |
| Colon ca. HCT-15 | 0.0 | 0.1 | 0.2 | 0.0 | 0.0 |
| Colon ca. HCC-2998 | 0.0 | 0.0 | 0.0 | 0.0 | 0.0 |
| Gastric ca. * (liver met) NCI-N87 | 0.0 | 0.4 | 0.2 | 0.0 | 0.0 |
| Bladder | 0.3 | 1.0 | 0.2 | 0.0 | 0.1 |
| Trachea | 0.0 | 0.4 | 0.2 | 0.0 | 0.0 |
| Kidney | 0.2 | 0.9 | 0.7 | 1.2 | 1.0 |
| Kidney (fetal) | 1.3 | 3.9 | 0.8 | 3.2 | 2.7 |
| Renal ca. 786-0 | 10.6 | 11.7 | 3.4 | 7.9 | 12.2 |
| Renal ca. A498 | 0.0 | 0.1 | 0.0 | 0.0 | 0.0 |
| Renal ca. RXF 393 | 17.9 | 14.0 | 4.1 | 16.6 | 15.2 |
| Renal ca. ACHN | 0.0 | 0.0 | 0.0 | 0.0 | 0.0 |
| Renal ca. UO-31 | 0.0 | 0.2 | 0.1 | 0.0 | 0.2 |
| Renal ca. TK-10 | 0.0 | 0.0 | 0.0 | 0.0 | 0.0 |
| Liver | 0.0 | 3.2 | 0.8 | 0.9 | 1.9 |
| Liver (fetal) | 0.0 | 0.1 | 0.0 | 0.0 | 0.0 |
| Liver ca. (hepatoblast) HepG2 | 0.0 | 0.0 | 0.0 | 0.0 | 0.0 |
| Lung | 0.0 | 0.2 | 0.0 | 0.0 | 0.0 |
| Lung (fetal) | 0.0 | 0.5 | 0.0 | 0.0 | 0.0 |
| Lung ca. (small cell) LX-1 | 0.0 | 0.0 | 0.0 | 0.0 | 0.0 |
| Lung ca. (small cell) NCI-H69 | 2.0 | 3.3 | 1.4 | 5.4 | 2.9 |
| Lung ca. (s. cell var.) SHP-77 | 0.0 | 0.0 | 0.0 | 0.0 | 0.0 |
| Lung ca. (large cell)NCI-H460 | 0.0 | 0.0 | 1.3 | 0.7 | 0.3 |
| Lung ca. (non-sm. cell) A549 | 0.0 | 0.0 | 0.1 | 0.0 | 0.0 |
| Lung ca. (non-s. cell) NCI-H23 | 0.0 | 0.0 | 0.0 | 0.0 | 0.0 |
| Lung ca. (non-s. cell) HOP-62 | 5.2 | 4.7 | 3.9 | 11.3 | 6.7 |
| Lung ca. (non-s. cl) NCI-H522 | 1.7 | 3.1 | 1.5 | 2.8 | 4.8 |
| Lung ca. (squam.) SW 900 | 0.0 | 0.0 | 0.0 | 0.0 | 0.0 |
| Lung ca. (squam.) NCI-H596 | 1.3 | 2.5 | 2.0 | 4.2 | 3.0 |
| Mammary gland | 11.9 | 9.1 | 4.6 | 7.0 | 10.6 |
| Breast ca.* (pl. ef) MCF-7 | 0.0 | 0.0 | 0.0 | 0.0 | 0.0 |
| Breast ca.* (pl. ef) MDA-MB-231 | 0.0 | 0.1 | 0.0 | 0.0 | 0.0 |
| Breast ca.* (pl. ef) T47D | 11.8 | 7.5 | 7.9 | 31.6 | 31.4 |
| Breast ca. BT-549 | 0.0 | 0.0 | 4.5 | 13.8 | 28.3 |
| Breast ca. MDA-N | 0.0 | 0.1 | 0.0 | 0.0 | 0.0 |
| Ovary | 0.1 | 0.6 | 0.4 | 0.1 | 0.2 |
| Ovarian ca. OVCAR-3 | 0.0 | 0.0 | 0.0 | 0.0 | 0.0 |
| Ovarian ca. OVCAR-4 | 0.0 | 0.1 | 1.3 | 4.4 | 0.0 |
| Ovarian ca. OVCAR-5 | 73.2 | 38.2 | 14.4 | 57.0 | 36.1 |
| Ovarian ca. OVCAR-8 | 0.0 | 0.7 | 1.0 | 3.4 | 0.2 |
| Ovarian ca. IGROV-1 | 0.0 | 0.0 | 0.8 | 2.6 | 0.0 |
| Ovarian ca. (ascites) SK-OV-3 | 0.0 | 0.0 | 0.0 | 0.0 | 0.0 |
| Uterus | 0.4 | 1.2 | 0.6 | 1.7 | 2.9 |
| Placenta | 0.0 | 0.1 | 0.0 | 0.0 | 0.0 |
| Prostate | 0.9 | 1.9 | 0.7 | 1.9 | 1.7 |
| Prostate ca.* (bone met) PC-3 | 0.0 | 0.0 | 0.1 | 0.0 | 0.0 |
| Testis | 25.7 | 22.2 | 0.7 | 0.7 | 26.4 |
| Melanoma Hs688(A).T | 23.8 | 21.6 | 5.0 | 20.0 | 28.9 |
| Melanoma* (met) Hs688(B).T | 4.6 | 6.5 | 3.4 | 9.6 | 9.2 |
| Melanoma UACC-62 | 0.0 | 0.0 | 0.0 | 0.0 | 0.0 |
| Melanoma M14 | 0.0 | 0.1 | 0.0 | 0.0 | 0.0 |
| Melanoma LOX IMVI | 3.7 | 3.4 | 0.6 | 0.2 | 2.7 |
| Melanoma* (met) SK-MEL-5 | 0.0 | 0.0 | 0.0 | 0.0 | 0.0 |
| Melanoma SK-MEL-28 | 0.0 | 0.0 | 3.6 | 17.4 | 0.0 |

Column A - Rel. Exp. (%) Ag047, Run 87354354
Column B - Rel. Exp. (%) Ag047, Run 87354779
Column C - Rel. Exp. (%) Ag332, Run 97803603
Column D - Rel. Exp. (%) Ag332, Run 98747043
Column E - Rel. Exp. (%) Ag47b, Run 88164379

[0918] TABLE FH
Panel 2D

| Tissue Name | A | B | C | D |
|---|---|---|---|---|
| Normal Colon | 5.5 | 8.9 | 7.4 | 10.4 |
| CC Well to Mod Diff (ODO3866) | 1.4 | 0.2 | 0.2 | 1.3 |
| CC Margin (ODO3866) | 0.4 | 0.5 | 0.4 | 0.1 |
| CC Gr.2 rectosigmoid (ODO3868) | 0.4 | 0.1 | 1.7 | 0.2 |
| CC Margin (ODO3868) | 2.5 | 0.9 | 0.7 | 0.7 |
| CC Mod Diff (ODO3920) | 0.0 | 0.0 | 0.0 | 0.2 |
| CC Margin (ODO3920) | 0.7 | 0.9 | 1.1 | 0.3 |
| CC Gr.2 ascend colon (ODO3921) | 0.0 | 0.7 | 0.6 | 0.2 |
| CC Margin (ODO3921) | 0.2 | 0.2 | 0.6 | 0.8 |
| CC from Partial Hepatectomy | 0.6 | 0.4 | 1.1 | 1.0 |
| (ODO4309) Mets | | | | |
| Liver Margin (ODO4309) | 11.1 | 13.6 | 30.4 | 21.2 |
| Colon mets to lung (OD04451-01) | 0.0 | 0.4 | 0.1 | 0.2 |
| Lung Margin (OD04451-02) | 1.3 | 1.0 | 0.5 | 0.7 |
| Normal Prostate 6546-1 | 19.1 | 0.7 | 1.0 | 2.3 |
| Prostate Cancer (OD04410) | 5.8 | 2.9 | 4.7 | 3.4 |
| Prostate Margin (OD04410) | 4.7 | 5.7 | 7.2 | 4.9 |
| Prostate Cancer (OD04720-01) | 2.9 | 3.3 | 3.4 | 3.3 |
| Prostate Margin (OD04720-02) | 12.5 | 10.7 | 8.3 | 15.2 |
| Normal Lung 061010 | 1.5 | 2.7 | 6.8 | 5.4 |
| Lung Met to Muscle (ODO4286) | 0.3 | 0.1 | 0.0 | 0.5 |
| Muscle Margin (ODO4286) | 0.3 | 0.2 | 0.3 | 0.6 |
| Lung Malignant Cancer (OD03126) | 0.4 | 0.2 | 0.8 | 1.5 |
| Lung Margin (OD03126) | 0.4 | 1.0 | 1.2 | 0.5 |
| Lung Cancer (OD04404) | 86.5 | 100.0 | 100.0 | 100.0 |
| Lung Margin (OD04404) | 18.3 | 3.3 | 2.2 | 3.0 |
| Lung Cancer (OD04565) | 100.0 | 52.1 | 62.0 | 77.9 |
| Lung Margin (OD04565) | 0.2 | 0.1 | 0.0 | 0.6 |
| Lung Cancer (OD04237-01) | 6.3 | 1.5 | 3.2 | 3.3 |
| Lung Margin (OD04237-02) | 1.4 | 0.5 | 0.5 | 0.6 |
| Ocular Mel Met to Liver (ODO4310) | 0.4 | 0.3 | 0.5 | 0.7 |
| Liver Margin (ODO4310) | 2.3 | 1.8 | 3.5 | 2.8 |
| Melanoma Mets to Lung (OD04321) | 0.0 | 0.3 | 0.4 | 1.6 |
| Lung Margin (OD04321) | 2.1 | 2.6 | 2.2 | 3.0 |
| Normal Kidney | 6.7 | 4.9 | 8.4 | 7.0 |
| Kidney Ca, Nuclear grade 2 | 0.0 | 0.0 | 0.3 | 1.4 |
| (OD04338) | | | | |
| Kidney Margin (OD04338) | 3.5 | 1.5 | 4.1 | 3.5 |
| Kidney Ca Nuclear grade 1/2 | 0.0 | 0.1 | 0.3 | 0.7 |
| (OD04339) | | | | |
| Kidney Margin (OD04339) | 18.4 | 10.3 | 8.4 | 15.5 |
| Kidney Ca, Clear cell type | 0.0 | 0.8 | 0.7 | 1.1 |
| (OD04340) | | | | |
| Kidney Margin (OD04340) | 6.5 | 4.4 | 4.5 | 6.5 |
| Kidney Ca, Nuclear grade 3 | 90.8 | 36.1 | 54.3 | 50.3 |
| (OD04348) | | | | |
| Kidney Margin (OD04348) | 4.6 | 3.2 | 3.8 | 4.0 |
| Kidney Cancer (OD04622-01) | 2.7 | 1.8 | 4.1 | 3.5 |
| Kidney Margin (OD04622-03) | 2.0 | 0.2 | 0.3 | 1.1 |
| Kidney Cancer (OD04450-01) | 0.0 | 0.0 | 0.0 | 0.0 |
| Kidney Margin (OD04450-03) | 3.1 | 1.4 | 6.9 | 5.4 |
| Kidney Cancer 8120607 | 1.5 | 0.3 | 0.5 | 1.8 |
| Kidney Margin 8120608 | 3.4 | 0.8 | 1.3 | 2.2 |
| Kidney Cancer 8120613 | 0.4 | 0.8 | 4.3 | 2.0 |
| Kidney Margin 8120614 | 2.8 | 1.2 | 4.9 | 4.0 |
| Kidney Cancer 9010320 | 76.8 | 39.0 | 36.3 | 52.9 |
| Kidney Margin 9010321 | 10.4 | 5.1 | 4.9 | 4.3 |
| Normal Uterus | 0.0 | 0.2 | 0.3 | 0.0 |
| Uterus Cancer 064011 | 0.9 | 0.0 | 0.3 | 1.9 |
| Normal Thyroid | 0.3 | 0.0 | 0.9 | 2.2 |
| Thyroid Cancer 064010 | 0.0 | 0.0 | 0.0 | 0.0 |
| Thyroid Cancer A302152 | 1.4 | 0.1 | 0.4 | 0.0 |
| Thyroid Margin A302153 | 1.7 | 0.9 | 6.4 | 4.1 |
| Normal Breast | 20.3 | 5.7 | 13.0 | 20.9 |
| Breast Cancer (OD04566) | 0.3 | 0.1 | 0.5 | 0.3 |
| Breast Cancer (OD04590-01) | 2.4 | 2.2 | 1.1 | 1.9 |
| Breast Cancer Mets (OD04590-03) | 0.7 | 0.1 | 0.3 | 0.0 |
| Breast Cancer Metastasis | 6.9 | 3.3 | 7.7 | 9.3 |
| (OD04655-05) | | | | |
| Breast Cancer 064006 | 5.6 | 8.3 | 4.2 | 4.9 |
| Breast Cancer 1024 | 47.0 | 19.3 | 30.1 | 23.5 |
| Breast Cancer 9100266 | 14.9 | 9.3 | 15.7 | 21.8 |
| Breast Margin 9100265 | 4.6 | 1.5 | 4.4 | 8.4 |
| Breast Cancer A209073 | 48.3 | 12.9 | 28.3 | 40.9 |
| Breast Margin A209073 | 38.7 | 16.6 | 27.5 | 29.7 |
| Normal Liver | 0.2 | 0.1 | 0.0 | 0.2 |
| Liver Cancer 064003 | 11.8 | 5.6 | 4.6 | 4.5 |
| Liver Cancer 1025 | 4.5 | 1.6 | 4.2 | 2.8 |
| Liver Cancer 1026 | 6.2 | 6.7 | 9.0 | 6.4 |
| Liver Cancer 6004-T | 15.6 | 3.3 | 3.5 | 2.8 |
| Liver Tissue 6004-N | 0.1 | 0.2 | 0.2 | 0.4 |
| Liver Cancer 6005-T | 14.6 | 8.0 | 8.7 | 7.9 |
| Liver Tissue 6005-N | 6.4 | 7.0 | 5.9 | 3.2 |
| Normal Bladder | 1.3 | 0.9 | 1.6 | 0.9 |
| Bladder Cancer 1023 | 0.4 | 0.2 | 0.3 | 0.3 |
| Bladder Cancer A302173 | 7.5 | 5.3 | 12.1 | 19.8 |
| Bladder Cancer (OD04718-01) | 27.7 | 23.0 | 35.6 | 41.5 |
| Bladder Normal Adjacent | 0.4 | 0.3 | 0.6 | 0.7 |
| (OD04718-03) | | | | |
| Normal Ovary | 1.4 | 0.4 | 1.1 | 0.3 |
| Ovarian Cancer 064008 | 1.3 | 0.5 | 1.3 | 1.3 |
| Ovarian Cancer (OD04768-07) | 0.4 | 0.2 | 0.0 | 0.0 |
| Ovary Margin (OD04768-08) | 1.0 | 0.8 | 0.6 | 1.6 |
| Normal Stomach | 4.3 | 2.0 | 0.3 | 3.1 |
| Gastric Cancer 9060358 | 2.4 | 0.7 | 0.7 | 1.2 |
| Stomach Margin 9060359 | 0.0 | 0.0 | 0.7 | 4.3 |
| Gastric Cancer 9060395 | 0.9 | 2.0 | 1.9 | 2.4 |
| Stomach Margin 9060394 | 0.2 | 0.3 | 1.1 | 0.2 |
| Gastric Cancer 9060397 | 0.4 | 0.5 | 1.6 | 0.7 |
| Stomach Margin 9060396 | 0.0 | 0.1 | 0.2 | 0.2 |
| Gastric Cancer 064005 | 0.7 | 0.7 | 0.9 | 1.5 |

Column A - Rel. Exp. (%) Ag047, Run 144771648
Column B - Rel. Exp. (%) Ag047, Run 152940364
Column C - Rel. Exp. (%) Ag2679, Run 158633803
Column D - Rel. Exp. (%) Ag2728, Run 158561830

[0919] TABLE FI
Panel 3D

| Tissue Name | A |
|---|---|
| Daoy- Medulloblastoma | 0.9 |
| TE671- Medulloblastoma | 0.0 |
| D283 Med- Medulloblastoma | 0.0 |
| PFSK-1- Primitive Neuroectodermal | 0.0 |
| XF-498- CNS | 0.0 |
| SNB-78- Glioma | 100.0 |
| SF-268- Glioblastoma | 79.0 |
| T98G- Glioblastoma | 1.4 |
| SK-N-SH- Neuroblastoma (metastasis) | 2.0 |
| SF-295- Glioblastoma | 0.1 |
| Cerebellum | 4.5 |
| Cerebellum | 2.9 |
| NCI-H292- Mucoepidermoid lung carcinoma | 3.8 |
| DMS-114- Small cell lung cancer | 0.0 |
| DMS-79- Small cell lung cancer | 0.1 |
| NCI-H146- Small cell lung cancer | 0.0 |
| NCI-H526- Small cell lung cancer | 1.0 |
| NCI-N417- Small cell lung cancer | 0.0 |
| NCI-H82- Small cell lung cancer | 7.6 |
| NCI-H157- Squamous cell lung cancer (metastasis) | 0.8 |
| NCI-H1155- Large cell lung cancer | 0.0 |
| NCI-H1299- Large cell lung cancer | 0.2 |
| NCI-H727- Lung carcinoid | 0.0 |
| NCI-UMC-11- Lung carcinoid | 0.0 |
| LX-1- Small cell lung cancer | 0.0 |
| Colo-205- Colon cancer | 0.0 |
| KM12- Colon cancer | 0.0 |
| KM20L2- Colon cancer | 0.0 |
| NCI-H716- Colon cancer | 0.0 |
| SW-48- Colon adenocarcinoma | 0.0 |
| SW1116- Colon adenocarcinoma | 0.0 |
| LS 174T- Colon adenocarcinoma | 0.0 |
| SW-948- Colon adenocarcinoma | 0.0 |
| SW-480- Colon adenocarcinoma | 0.0 |
| NCI-SNU-5- Gastric carcinoma | 0.7 |
| KATO III- Gastric carcinoma | 0.0 |
| NCI-SNU-16- Gastric carcinoma | 0.2 |
| NCI-SNU-1- Gastric carcinoma | 0.0 |
| RF-1- Gastric adenocarcinoma | 0.3 |
| RF-48- Gastric adenocarcinoma | 0.1 |
| MKN-45- Gastric carcinoma | 0.0 |
| NCI-N87- Gastric carcinoma | 0.0 |
| OVCAR-5- Ovarian carcinoma | 0.0 |
| RL95-2- Uterine carcinoma | 4.0 |
| HelaS3- Cervical adenocarcinoma | 0.0 |
| Ca Ski- Cervical epidermoid carcinoma (metastasis) | 0.3 |
| ES-2- Ovarian clear cell carcinoma | 6.7 |
| Ramos- Stimulated with PMA/ionomycin 6 h | 0.0 |
| Ramos- Stimulated with PMA/ionomycin 14 h | 0.0 |
| MEG-01- Chronic myelogenous leukemia | 0.0 |
| (megokaryoblast) | |
| Raji- Burkitt's lymphoma | 0.0 |
| Daudi- Burkitt's lymphoma | 0.0 |
| U266- B-cell plasmacytoma | 0.0 |
| CA46- Burkitt's lymphoma | 0.0 |
| RL- non-Hodgkin's B-cell lymphoma | 0.0 |
| JM1- pre-B-cell lymphoma | 0.0 |
| Jurkat- T cell leukemia | 0.0 |
| TF-1- Erythroleukemia | 0.0 |
| HUT 78- T-cell lymphoma | 0.0 |
| U937- Histiocytic lymphoma | 0.0 |
| KU-812- Myelogenous leukemia | 0.0 |
| 769-P- Clear cell renal carcinoma | 0.1 |
| Caki-2- Clear cell renal carcinoma | 0.1 |
| SW 839- Clear cell renal carcinoma | 0.0 |
| Rhabdoid kidney tumor | 6.0 |
| Hs766T- Pancreatic carcinoma (LN metastasis) | 0.0 |
| CAPAN-1- Pancreatic adenocarcinoma (liver metastasis) | 0.0 |
| SU86.86- Pancreatic carcinoma (liver metastasis) | 0.1 |
| BxPC-3- Pancreatic adenocarcinoma | 0.6 |
| HPAC- Pancreatic adenocarcinoma | 0.0 |
| MIA PaCa-2- Pancreatic carcinoma | 0.0 |
| CFPAC-1- Pancreatic ductal adenocarcinoma | 0.1 |
| PANC-1- Pancreatic epithelioid ductal carcinoma | 0.0 |
| T24- Bladder carcinma (transitional cell) | 0.0 |
| 5637- Bladder carcinoma | 3.8 |
| HT-1197- Bladder carcinoma | 0.0 |
| UM-UC-3- Bladder carcinma (transitional cell) | 10.3 |
| A204- Rhabdomyosarcoma | 0.0 |
| HT-1080- Fibrosarcoma | 59.9 |
| MG-63- Osteosarcoma | 0.5 |
| SK-LMS-1- Leiomyosarcoma (vulva) | 4.2 |
| SJRH30- Rhabdomyosarcoma (met to bone marrow) | 0.3 |
| A431- Epidermoid carcinoma | 0.6 |
| WM266-4- Melanoma | 0.0 |
| DU 145- Prostate carcinoma (brain metastasis) | 0.0 |
| MDA-MB-468- Breast adenocarcinoma | 0.0 |
| SCC-4- Squamous cell carcinoma of tongue | 0.2 |
| SCC-9- Squamous cell carcinoma of tongue | 1.1 |
| SCC-15- Squamous cell carcinoma of tongue | 0.3 |
| CAL 27- Squamous cell carcinoma of tongue | 7.0 |

Column A - Rel. Exp. (%) Ag047, Run 158634002

[0920] TABLE FJ
Panel 4.1D

| Tissue Name | A | B | C |
|---|---|---|---|
| Secondary Th1 act | 0.0 | 0.0 | 0.0 |
| Secondary Th2 act | 0.0 | 0.0 | 0.1 |
| Secondary Tr1 act | 0.0 | 0.0 | 0.0 |
| Secondary Th1 rest | 0.0 | 0.0 | 0.0 |
| Secondary Th2 rest | 0.0 | 0.0 | 0.2 |
| Secondary Tr1 rest | 0.0 | 0.0 | 0.0 |
| Primary Th1 act | 0.0 | 0.0 | 0.1 |
| Primary Th2 act | 0.0 | 0.0 | 0.0 |
| Primary Tr1 act | 0.0 | 0.0 | 0.0 |
| Primary Th1 rest | 0.0 | 0.0 | 0.0 |
| Primary Th2 rest | 0.0 | 0.0 | 0.0 |
| Primary Tr1 rest | 0.0 | 0.0 | 0.0 |
| CD45RA CD4 lymphocyte act | 0.6 | 0.8 | 1.7 |
| CD45RO CD4 lymphocyte act | 0.2 | 0.0 | 0.2 |
| CD8 lymphocyte act | 0.0 | 0.0 | 0.0 |
| Secondary CD8 lymphocyte rest | 0.1 | 0.1 | 0.0 |
| Secondary CD8 lymphocyte act | 0.0 | 0.0 | 0.0 |
| CD4 lymphocyte none | 0.0 | 0.0 | 0.2 |
| 2ry Th1/Th2/Tr1_anti-CD95 CH11 | 0.0 | 0.0 | 0.0 |
| LAK cells rest | 0.0 | 0.0 | 0.0 |
| LAK cells IL-2 | 0.0 | 0.0 | 0.1 |
| LAK cells IL-2 + IL-12 | 0.0 | 0.0 | 0.0 |
| LAK cells IL-2 + IFN gamma | 0.0 | 0.0 | 0.0 |
| LAK cells IL-2 + IL-18 | 0.0 | 0.1 | 0.2 |
| LAK cells PMA/ionomycin | 0.0 | 0.0 | 0.0 |
| NK Cells IL-2 rest | 0.0 | 0.0 | 0.0 |
| Two Way MLR 3 day | 0.0 | 0.0 | 0.0 |
| Two Way MLR 5 day | 0.0 | 0.0 | 0.1 |
| Two Way MLR 7 day | 0.0 | 0.1 | 0.0 |
| PBMC rest | 0.0 | 0.0 | 0.0 |
| PBMC PWM | 0.0 | 0.0 | 0.0 |
| PBMC PHA-L | 0.0 | 0.0 | 0.0 |
| Ramos (B cell) none | 0.0 | 0.0 | 0.0 |
| Ramos (B cell) ionomycin | 0.0 | 0.0 | 0.0 |
| B lymphocytes PWM | 0.0 | 0.0 | 0.0 |
| B lymphocytes CD40L and IL-4 | 0.0 | 0.0 | 0.0 |
| EOL-1 dbcAMP | 0.0 | 0.0 | 0.0 |
| EOL-1 dbcAMP PMA/ionomycin | 0.0 | 0.0 | 0.0 |
| Dendritic cells none | 0.0 | 0.0 | 0.0 |
| Dendritic cells LPS | 0.0 | 0.0 | 0.0 |
| Dendritic cells anti-CD40 | 0.0 | 0.1 | 0.3 |
| Monocytes rest | 0.0 | 0.0 | 0.0 |
| Monocytes LPS | 0.0 | 0.0 | 0.2 |
| Macrophages rest | 0.0 | 0.0 | 0.0 |
| Macrophages LPS | 0.0 | 0.0 | 0.0 |
| HUVEC none | 0.0 | 0.0 | 0.3 |
| HUVEC starved | 0.0 | 0.4 | 0.2 |
| HUVEC IL-1beta | 0.0 | 0.0 | 0.0 |
| HUVEC IFN gamma | 0.0 | 0.0 | 0.0 |
| HUVEC TNF alpha + IFN gamma | 0.0 | 0.0 | 0.2 |
| HUVEC TNF alpha + IL4 | 0.0 | 0.0 | 0.0 |
| HUVEC IL-11 | 0.0 | 0.0 | 0.2 |
| Lung Microvascular EC none | 0.0 | 0.0 | 0.0 |
| Lung Microvascular EC TNFalpha + | 0.0 | 1.1 | 0.0 |
| IL-1beta | | | |
| Microvascular Dermal EC none | 0.0 | 0.0 | 0.0 |
| Microsvasular Dermal EC | 0.0 | 0.0 | 0.0 |
| TNFalpha + IL-1beta | | | |
| Bronchial epithelium TNFalpha + | 17.3 | 37.4 | 28.5 |
| IL1beta | | | |
| Small airway epithelium none | 40.3 | 47.6 | 49.0 |
| Small airway epithelium TNFalpha + | 100.0 | 100.0 | 100.0 |
| IL-1beta | | | |
| Coronery artery SMC rest | 0.7 | 0.8 | 0.4 |
| Coronery artery SMC TNFalpha + IL- | 0.5 | 0.6 | 1.3 |
| 1beta | | | |
| Astrocytes rest | 26.1 | 51.8 | 24.5 |
| Astrocytes TNFalpha + IL-1 beta | 24.1 | 78.5 | 42.6 |
| KU-812 (Basophil) rest | 0.0 | 0.0 | 0.0 |
| KU-812 (Basophil) PMA/ionomycin | 0.0 | 0.0 | 0.0 |
| CCD1106 (Keratinocytes) none | 52.5 | 45.1 | 90.1 |
| CCD1106 (Keratinocytes) | 14.4 | 33.7 | 20.9 |
| TNFalpha + IL-1 beta | | | |
| Liver cirrhosis | 0.3 | 0.2 | 0.2 |
| NCI-H292 none | 0.4 | 0.5 | 0.7 |
| NCI-H292 IL-4 | 9.9 | 12.6 | 19.1 |
| NCI-H292 IL-9 | 0.8 | 0.6 | 1.6 |
| NCI-H292 IL-13 | 14.0 | 10.9 | 13.2 |
| NCI-H292 IFN gamma | 0.1 | 0.9 | 0.4 |
| HPAEC none | 0.0 | 1.2 | 0.4 |
| HPAEC TNF alpha + IL-1 beta | 0.0 | 0.3 | 0.0 |
| Lung fibroblast none | 0.7 | 1.5 | 1.6 |
| Lung fibroblast TNF alpha + IL-1 | 0.2 | 0.0 | 0.7 |
| beta | | | |
| Lung fibroblast IL-4 | 0.1 | 0.1 | 0.0 |
| Lung fibroblast IL-9 | 0.2 | 0.2 | 0.1 |
| Lung fibroblast IL-13 | 0.2 | 1.3 | 0.4 |
| Lung fibroblast IFN gamma | 0.0 | 0.8 | 0.0 |
| Dermal fibroblast CCD1070 rest | 4.8 | 4.1 | 5.7 |
| Dermal fibroblast CCD1070 TNF | 1.3 | 2.2 | 2.1 |
| alpha | | | |
| Dermal fibroblast CCD1070 IL-1 beta | 1.1 | 0.8 | 1.8 |
| Dermal fibroblast IFN gamma | 3.1 | 2.4 | 3.4 |
| Dermal fibroblast IL-4 | 3.9 | 5.4 | 6.0 |
| Dermal Fibroblasts rest | 7.4 | 9.3 | 9.3 |
| Neutrophils TNFa + LPS | 0.0 | 0.6 | 0.0 |
| Neutrophils rest | 0.0 | 0.0 | 0.0 |
| Colon | 0.0 | 0.5 | 0.0 |
| Lung | 0.1 | 1.6 | 0.1 |
| Thymus | 1.6 | 9.3 | 2.3 |
| Kidney | 1.5 | 11.3 | 1.7 |

Column A - Rel. Exp. (%) Ag047, Run 264524965
Column B - Rel. Exp. (%) Ag2975, Run 171818669
Column C - Rel. Exp. (%) Ag47b, Run 263594820

[0921] Panel 1 Summary: Ag047/Ag332/Ag47b Highest expression of this gene was detected in a brain cancer cell line (CTs=23-25). There was also significant expression in clusters of samples from melanoma, ovarian cancer, breast, lung, renal colon and brain cancer lines. Expression of this gene is associated with these forms of cancer and is useful as a diagnostic marker for the presence of these cancers. Therapeutic modulation of the expression or function of these genes or gene products is useful in the treatment of ovarian, breast, lung, renal, and brain cancer and melanoma.

[0922] In addition to significant expression in brain cancer cell lines, this gene was preferentially expressed in the brain. This expression profile shows that this gene product plays a role in CNS processes. This gene encodes a homolog of a member of the neurestin farnily, Ten M2, and plays a role in neuronal regeneration. (Otaki, J. Dev Biol 1999 August 1;212(1):165-81 ) Agents that induce the expression or activity of this gene or gene product have utility as neuronal regeneration drugs and specifically for the treatment of neurodegenerative diseases, stroke, and neuronal trauma.

[0923] Among tissues with metabolic function, this gene showed consistent expression in thyroid, adult and fetal heart, liver and skeletal muscle. Thus, this gene product is an antibody target for the treatment of metabolic and endocrine disease, including obesity and Types 1 and 2 diabetes. In addition, this gene was eressed at higher levels in adult liver than in fetal liver and is be useful for differentiating between the two sources of liver tissue.

[0924] Panel 2D Summary: Ag047/Ag2679/Ag2728 Highest expression of this gene was detected in lung cancer samples (CTs=27-29). This gene was expressed at a higher level in gastric, bladder, and two samples each of lung and kidney cancer relative to the normal adjacent tissues. Expression of this gene is useful as a marker to detect the presence of these cancers. Therapeutic modulation of this gene, expressed protein and/or use of antibodies, protein therapeutics or small molecule drugs are useful in the treatment of these cancers.

[0925] Panel 3D Summary: Ag047 This gene was expressed in squamous cell carcinoma, glioma, small cell lung cancer cell lines. Expression of this gene is associated with these cancers and therapeutic modulation of this gene expressed protein and/or use of antibodies, protein therapeutics or small molecule drugs is of use in the treatment of these cancers.

[0926] Panel 4.1D Summary: Ag047/Ag047b/Ag2975 Highest expression of this gene was detected in activated small airway epithelium (CT=27-32). This gene was expressed at moderate level in small airway epithelium, astrocytes and keratinocytes. The expression of this gene in these tissues was up-regulated upon treatment with the inflammatory cytokines TNF-a and IL1. This gene encodes for a neurestin like molecule whose role in neuronal regeneration has been demonstrated. Modulation of the expression of this gene or its expressed protein is useful in the regeneration or repair mechanism of these tissues during inflammation and for the treatment of inflammatory brain and lung diseases such as bronchitis, chronic pulmonary diseases, skin and CNS inflammatory diseases, multiple sclerosis or stroke.

[0927] G. CG50646-04: Polydom Protein

[0928] Expression of gene CG50646-04 was assessed using the primer-probe sets Ag768 and Ag984, described in Tables GA and GB. Results of the RTQ-PCR runs are shown in Tables GC and GD.

TABLE GA
Probe Name Ag768

| | | | | |
|---|---|---|---|---|
| Primers | Sequences | Length | Start Position | SEQ ID No |

| | | | | |
|---|---|---|---|---|
| Forward | 5′-gggctataagtcagtcggaagt-3′ | 22 | 6772 | 1258 |
| Probe | TET-5′-cctgtatttgtctgccaagccaatcg-3′-TAMRA | 26 | 6794 | 1259 |
| Reverse | 5′-acagtcgagaggaacacacatc-3′ | 22 | 6844 | 1260 |

[0929] TABLE GB
Probe Name Ag984

| | | | | SEQ |
|---|---|---|---|---|
| | | | Start | ID |
| Primers | Sequences | Length | Position | No |
| Forward | 5′-cccgggttacactgatacct-3′ | 20 | 6755 | 1261 |
| Probe | TET-5′-tgctccagaaagccattctcaacctt-3′- | 26 | 6698 | 1262 |
| | TAMRA | | | |
| Reverse | 5′-cggtatcttgtggtgaacca-3′ | 20 | 6675 | 1263 |

[0930] TABLE GC
Panel 1.2

| Tissue Name | A |
|---|---|
| Endothelial cells | 0.0 |
| Heart (Fetal) | 0.0 |
| Pancreas | 0.0 |
| Pancreatic ca. CAPAN 2 | 0.0 |
| Adrenal Gland | 0.1 |
| Thyroid | 0.0 |
| Salivary gland | 0.0 |
| Pituitary gland | 0.0 |
| Brain (fetal) | 0.0 |
| Brain (whole) | 0.0 |
| Brain (amygdala) | 0.0 |
| Brain (cerebellum) | 0.0 |
| Brain (hippocampus) | 0.0 |
| Brain (thalamus) | 0.0 |
| Cerebral Cortex | 0.0 |
| Spinal cord | 0.0 |
| glio/astro U87-MG | 0.0 |
| glio/astro U-118-MG | 0.0 |
| astrocytoma SW1783 | 0.0 |
| neuro*; met SK-N-AS | 0.0 |
| astrocytoma SF-539 | 0.0 |
| astrocytoma SNB-75 | 0.0 |
| glioma SNB-19 | 0.0 |
| glioma U251 | 0.0 |
| glioma SF-295 | 0.0 |
| Heart | 0.1 |
| Skeletal Muscle | 0.2 |
| Bone marrow | 0.0 |
| Thymus | 0.0 |
| Spleen | 0.0 |
| Lymph node | 0.7 |
| Colorectal Tissue | 0.0 |
| Stomach | 0.0 |
| Small intestine | 0.8 |
| Colon ca. SW480 | 0.0 |
| Colon ca.* SW620 (SW480 met) | 0.0 |
| Colon ca. HT29 | 0.0 |
| Colon ca. HCT-116 | 0.0 |
| Colon ca. CaCo-2 | 0.0 |
| Colon ca. Tissue (ODO3866) | 0.0 |
| Colon ca. HCC-2998 | 0.0 |
| Gastric ca.* (liver met) NCI-N87 | 0.0 |
| Bladder | 0.0 |
| Trachea | 0.0 |
| Kidney | 0.0 |
| Kidney (fetal) | 0.0 |
| Renal ca. 786-0 | 0.0 |
| Renal ca. A498 | 0.0 |
| Renal ca. RXF 393 | 0.0 |
| Renal ca. ACHN | 0.0 |
| Renal ca. UO-31 | 0.0 |
| Renal ca. TK-10 | 0.0 |
| Liver | 0.0 |
| Liver (fetal) | 0.0 |
| Liver ca. (hepatoblast) HepG2 | 0.0 |
| Lung | 0.6 |
| Lung (fetal) | 0.0 |
| Lung ca. (small cell) LX-1 | 0.0 |
| Lung ca. (small cell) NCI-H69 | 0.0 |
| Lung ca. (s. cell var.) SHP-77 | 0.0 |
| Lung ca. (large cell)NCI-H460 | 0.0 |
| Lung ca. (non-sm. cell) A549 | 0.0 |
| Lung ca. (non-s. cell) NCI-H23 | 0.0 |
| Lung ca. (non-s. cell) HOP-62 | 0.0 |
| Lung ca. (non-s. cl) NCI-H522 | 0.0 |
| Lung ca. (squam.) SW 900 | 0.0 |
| Lung ca. (squam.) NCI-H596 | 0.0 |
| Mammary gland | 4.4 |
| Breast ca.* (pl. ef) MCF-7 | 0.0 |
| Breast ca.* (pl. ef) MDA-MB-231 | 0.0 |
| Breast ca.* (pl. ef) T47D | 0.0 |
| Breast ca. BT-549 | 0.0 |
| Breast ca. MDA-N | 0.0 |
| Ovary | 0.0 |
| Ovarian ca. OVCAR-3 | 0.0 |
| Ovarian ca. OVCAR-4 | 0.0 |
| Ovarian ca. OVCAR-5 | 0.0 |
| Ovarian ca. OVCAR-8 | 0.0 |
| Ovarian ca. IGROV-1 | 0.0 |
| Ovarian ca. (ascites) SK-OV-3 | 0.0 |
| Uterus | 0.2 |
| Placenta | 100.0 |
| Prostate | 0.0 |
| Prostate ca.* (bone met) PC-3 | 0.0 |
| Testis | 0.0 |
| Melanoma Hs688(A).T | 0.0 |
| Melanoma* (met) Hs688(B).T | 0.0 |
| Melanoma UACC-62 | 0.0 |
| Melanoma M14 | 0.0 |
| Melanoma LOX IMVI | 0.0 |
| Melanoma* (met) SK-MEL-5 | 0.0 |

Column A - Rel. Exp. (%) Ag768, Run 116422776

[0931] TABLE GD
Panel 4D

| Tissue Name | A |
|---|---|
| Secondary Th1 act | 0.0 |
| Secondary Th2 act | 0.1 |
| Secondary Tr1 act | 0.0 |
| Secondary Th1 rest | 0.1 |
| Secondary Th2 rest | 0.1 |
| Secondary Tr1 rest | 0.2 |
| Primary Th1 act | 0.0 |
| Primary Th2 act | 0.0 |
| Primary Tr1 act | 0.0 |
| Primary Th1 rest | 0.2 |
| Primary Th2 rest | 0.0 |
| Primary Tr1 rest | 0.0 |
| CD45RA CD4 lymphocyte act | 6.4 |
| CD45RO CD4 lymphocyte act | 0.1 |
| CD8 lymphocyte act | 0.0 |
| Secondary CD8 lymphocyte rest | 0.1 |
| Secondary CD8 lymphocyte act | 0.1 |
| CD4 lymphocyte none | 0.0 |
| 2ry Th1/Th2/Tr1_anti-CD95 CH11 | 0.0 |
| LAK cells rest | 0.2 |
| LAK cells IL-2 | 0.0 |
| LAK cells IL-2 + IL-12 | 0.1 |
| LAK cells IL-2 + IFN gamma | 0.3 |
| LAK cells IL-2 + IL-18 | 0.2 |
| LAK cells PMA/ionomycin | 3.5 |
| NK Cells IL-2 rest | 0.0 |
| Two Way MLR 3 day | 0.0 |
| Two Way MLR 5 day | 0.0 |
| Two Way MLR 7 day | 0.0 |
| PBMC rest | 0.0 |
| PBMC PWM | 2.5 |
| PBMC PHA-L | 0.3 |
| Ramos (B cell) none | 0.0 |
| Ramos (B cell) ionomycin | 0.1 |
| B lymphocytes PWM | 0.1 |
| B lymphocytes CD40L and IL-4 | 0.0 |
| EOL-1 dbcAMP | 0.0 |
| EOL-1 dbcAMP PMA/ionomycin | 0.0 |
| Dendritic cells none | 0.0 |
| Dendritic cells LPS | 0.2 |
| Dendritic cells anti-CD40 | 0.1 |
| Monocytes rest | 0.1 |
| Monocytes LPS | 3.1 |
| Macrophages rest | 0.1 |
| Macrophages LPS | 3.3 |
| HUVEC none | 0.0 |
| HUVEC starved | 0.2 |
| HUVEC IL-1beta | 0.2 |
| HUVEC IFN gamma | 0.3 |
| HUVEC TNF alpha + IFN gamma | 0.1 |
| HUVEC TNF alpha + IL4 | 0.1 |
| HUVEC IL-11 | 0.1 |
| Lung Microvascular EC none | 0.0 |
| Lung Microvascular EC TNFalpha + IL-1beta | 0.0 |
| Microvascular Dermal EC none | 0.1 |
| Microsvasular Dermal EC TNFalpha + IL-1beta | 0.2 |
| Bronchial epithelium TNFalpha + IL1beta | 0.2 |
| Small airway epithelium none | 2.3 |
| Small airway epithelium TNFalpha + IL-1beta | 1.3 |
| Coronery artery SMC rest | 15.1 |
| Coronery artery SMC TNFalpha + IL-1beta | 8.2 |
| Astrocytes rest | 1.8 |
| Astrocytes TNFalpha + IL-1beta | 2.4 |
| KU-812 (Basophil) rest | 0.0 |
| KU-812 (Basophil) PMA/ionomycin | 0.0 |
| CCD1106 (Keratinocytes) none | 0.4 |
| CCD1106 (Keratinocytes) TNFalpha + IL-1beta | 1.4 |
| Liver cirrhosis | 10.6 |
| Lupus kidney | 7.0 |
| NCI-H292 none | 24.1 |
| NCI-H292 IL-4 | 21.6 |
| NCI-H292 IL-9 | 30.4 |
| NCI-H292 IL-13 | 15.3 |
| NCI-H292 IFN gamma | 14.6 |
| HPAEC none | 0.4 |
| HPAEC TNF alpha + IL-1 beta | 0.0 |
| Lung fibroblast none | 31.0 |
| Lung fibroblast TNF alpha + IL-1 beta | 7.7 |
| Lung fibroblast IL-4 | 55.5 |
| Lung fibroblast IL-9 | 37.4 |
| Lung fibroblast IL-13 | 86.5 |
| Lung fibroblast IFN gamma | 100.0 |
| Dermal fibroblast CCD1070 rest | 28.9 |
| Dermal fibroblast CCD1070 TNF alpha | 23.7 |
| Dermal fibroblast CCD1070 IL-1 beta | 20.2 |
| Dermal fibroblast IFN gamma | 22.5 |
| Dermal fibroblast IL-4 | 47.0 |
| IBD Colitis 2 | 0.5 |
| IBD Crohn's | 2.0 |
| Colon | 9.2 |
| Lung | 20.3 |
| Thymus | 13.0 |
| Kidney | 6.4 |

Column A - Rel. Exp. (%) Ag768, Run 138175130

[0932] Panel 1.2 Summary: Ag768 Highest expression of this gene was seen in placenta (CT=21). This gene encodes a polydom-like protein and was also highly expressed in mammary gland, skeletal muscle. This gene may be involved in cellular adhesion (Gilges D. Biochem J 2000 November 15;352 Pt 1:49-59). Expression of this gene is useful in differentiating between placental tissues and other tissues on this panel. Modulation of this gene or its protein product is useful in reproductive and skeletal muscle physiology.

[0933] This gene was more highly expressed in fetal kidney (CT=33) than in adult kidney (CT=40). Conversely, this gene was more highly expressed in adult lung and liver (CTs=28-32) than in fetal lung and liver (CTs=38-40). Thus, expression of this gene is useful in differentiating between the adult and fetal sources of these tissues.

[0934] Panel 4D Summary: Ag768 Highest expression of this gene was seen in lung fibroblasts stimulated with IFN-gamma (CT=27.4). Significant expression was seen in many samples derived from the lung including lung fibroblasts stimulated with different cytokines, the pulmonary mucoepidermoid cell line H292 stimulated with the same cytokines, and normal lung tissue. The expression of this gene in lung cells and lung tissue shows that this gene or its protein product is involved in normal homeostasis of the lung, as well as pathological and inflammatory lung disorders, including chronic obstructive pulmonary disease, asthma, allergy and emphysema.

[0935] Significant levels of expression of this gene in dermal fibroblasts show that this gene and its protein product is involved in skin disorders, including psoriasis.

[0936] Moderate to low expression of this gene was also seen in many other cells with important immune function, including stimulated macrophages and monocytes, coronary artery smooth muscle cells, stimulated peripheral blood mononuclear cells, lymphocyte activated killer cells (LAK), astrocytes, activated CD45RA cells, and normal colon, thymus and kidney. This widespread expression demonstrates that this gene or the protein encoded by this gene is involved in other inflammatory and autoimmune conditions, including inflammatory bowel disease, rheumatoid arthritis and osteoarthritis.

[0937] H. CG5073609: CD44-Like Precursor Fell

[0938] Expression of gene CG50736-09 was assessed using the primer-probe sets Ag2742, Ag2743, Ag2744, Ag2745, Ag2746, Ag793, Ag812, Ag03 and Ag068, described in Tables HA, HB, HC, HD, HE, HF, HG, HH and HI. Results of the RTQ-PCR runs are shown in Tables HJ, HK, HL, HM, HN and HO.

TABLE HA
Probe Name Ag2742

| | | | | SEQ |
|---|---|---|---|---|
| | | | Start | ID |
| Primers | Sequences | Length | Position | No |
| Forward | 5′-ctgcaaaatcttacgactttgg-3′ | 22 | 429 | 1264 |
| Probe | TET-5′-caacaaacaatggctacatcaaatttagca-3′- | 30 | 451 | 1265 |
| | TAMRA | | | |
| Reverse | 5′-atgacactcagcaaacctgagt-3′ | 22 | 493 | 1266 |

[0939] TABLE HB
Probe Name Ag2743

| | | | | SEQ |
|---|---|---|---|---|
| | | | Start | ID |
| Primers | Sequences | Length | Position | No |
| Forward | 5′-ctgcaaaatcttacgacttgg-3′ | 22 | 429 | 1267 |
| Probe | TET-5′-caacaaacaatggctacatcaaatttagca-3′- | 30 | 451 | 1268 |
| | TAMRA | | | |
| Reverse | 5′-atgacactcagcaaacctgagt-3′ | 22 | 493 | 1269 |

[0940] TABLE HC
Probe Name Ag2744

| | | | | SEQ |
|---|---|---|---|---|
| | | | Start | ID |
| Primers | Sequences | Length | Position | No |
| Forward | 5′-ctgcaaaatcttacgactttgg-3′ | 22 | 429 | 1270 |
| Probe | TET-5′-caacaaacaatggctacatcaaatttagca-3′- | 30 | 451 | 1271 |
| | TAMRA | | | |
| Reverse | 5′-tcagcaaacctgagtcctgta-3′ | 21 | 487 | 1272 |

[0941] TABLE HD
Probe Name Ag2745

| | | | | SEQ |
|---|---|---|---|---|
| | | | Start | ID |
| Primers | Sequences | Length | Position | No |
| Forward | 5′-ctgcaaaatcttacgactttgg-3′ | 22 | 429 | 1273 |
| Probe | TET-5′-caacaaacaatggctacatcaaatttagca-3′- | 30 | 451 | 1274 |
| | TAMRA | | | |
| Reverse | 5′-atgacactcagcaaacctgagt-3′ | 22 | 493 | 1275 |

[0942] TABLE HD
Probe Name Ag2746

| | | | | SEQ |
|---|---|---|---|---|
| | | | Start | ID |
| Primers | Sequences | Length | Position | No |
| Forward | 5′-ctgcaaaatcttacgactttgg-3′ | 22 | 429 | 1276 |
| Probe | TET-5′-caacaaacaatggctacatcaaatttagca-3′- | 30 | 451 | 1277 |
| | TAMRA | | | |
| Reverse | 5′-atgacactcagcaaacctgagt-3′ | 22 | 493 | 1278 |

[0943] TABLE HF
Probe Name Ag793

| | | | | SEQ |
|---|---|---|---|---|
| | | | Start | ID |
| Primers | Sequences | Length | Position | No |
| Forward | 5′-ccaaggttttagctgtggatct-3′ | 22 | 664 | 1279 |
| Probe | TET-5′-acatccactgcctggaagaccctg-3′- | 24 | 690 | 1280 |
| | TAMRA | | | |
| Reverse | 5′-cacatttcacactcagctctga-3′ | 22 | 720 | 1281 |

[0944] TABLE HG
Probe Name Ag812

| | | | | SEQ |
|---|---|---|---|---|
| | | | Start | ID |
| Primers | Sequences | Length | Position | No |
| Forward | 5′-caggagcatttcgtgaaaga-3′ | 20 | 57 | 1282 |
| Probe | TET-5′-ttttgcacctttatctgcagcctttg-3′- | 26 | 104 | 1283 |
| | TAMRA | | | |
| Reverse | 5′-tttaacccgagcttcctcat-3′ | 20 | 130 | 1284 |

[0945] TABLE HH
Probe Name Ag03

| | | | | SEQ |
|---|---|---|---|---|
| | | | Start | ID |
| Primers | Sequences | Length | Position | No |
| Forward | 5′-ctggttgtaggttgccatggt-3′ | 21 | 1884 | 1285 |
| Probe | TET-5′-cagcttcgttggcacaggcctctc-3′- | 24 | 1858 | 1286 |
| | TAMRA | | | |
| Reverse | 5′-ccagtataagctgacctttgacaaag-3′ | 26 | 1829 | 1287 |

[0946] TABLE HI
Probe Name Ag068

| | | | | SEQ |
|---|---|---|---|---|
| | | | Start | ID |
| Primers | Sequences | Length | Position | No |
| Forward | 5′-ctggttgtaggttgccatggt-3′ | 21 | 1884 | 1288 |
| Probe | TET-5′-cagcttcgttggcacaggcctctc-3′- | 24 | 1858 | 1289 |
| | TAMRA | | | |
| Reverse | 5′-ccagtataagctgacctttgacaaag-3′ | 26 | 1829 | 1290 |

[0947] TABLE HJ
Panel 1

| Tissue Name | A | B |
|---|---|---|
| Endothelial cells | 0.0 | 0.0 |
| Endothelial cells (treated) | 0.0 | 0.0 |
| Pancreas | 0.0 | 2.3 |
| Pancreatic ca. CAPAN 2 | 0.0 | 0.0 |
| Adrenal gland | 0.5 | 1.3 |
| Thyroid | 1.8 | 2.1 |
| Salivary gland | 2.5 | 3.0 |
| Pituitary gland | 0.8 | 0.8 |
| Brain (fetal) | 0.1 | 0.4 |
| Brain (whole) | 0.3 | 0.6 |
| Brain (amygdala) | 0.1 | 0.4 |
| Brain (cerebellum) | 0.4 | 0.7 |
| Brain (hippocampus) | 0.3 | 0.9 |
| Brain (substantia nigra) | 0.1 | 0.3 |
| Brain (thalamus) | 0.1 | 0.2 |
| Brain (hypothalamus) | 0.4 | 0.5 |
| Spinal cord | 0.0 | 0.3 |
| glio/astro U87-MG | 0.0 | 0.1 |
| glio/astro U-118-MG | 0.1 | 0.2 |
| astrocytoma SW1783 | 0.0 | 0.0 |
| neuro*; met SK-N-AS | 0.0 | 0.0 |
| astrocytoma SF-539 | 0.0 | 0.1 |
| astrocytoma SNB-75 | 0.1 | 0.2 |
| glioma SNB-19 | 0.6 | 1.6 |
| glioma U251 | 0.2 | 0.9 |
| glioma SF-295 | 0.1 | 0.2 |
| Heart | 0.3 | 0.3 |
| Skeletal muscle | 0.3 | 0.4 |
| Bone marrow | 3.5 | 3.0 |
| Thymus | 0.3 | 0.2 |
| Spleen | 100.0 | 100.0 |
| Lymph node | 29.3 | 81.2 |
| Colon (ascending) | 0.8 | 1.0 |
| Stomach | 1.2 | 1.5 |
| Small intestine | 1.6 | 1.7 |
| Colon ca. SW480 | 0.0 | 0.0 |
| Colon ca.* SW620 (SW480 met) | 0.0 | 0.1 |
| Colon ca. HT29 | 0.0 | 0.1 |
| Colon ca. HCT-116 | 0.0 | 0.0 |
| Colon ca. CaCo-2 | 0.1 | 0.1 |
| Colon ca. HCT-15 | 0.1 | 0.7 |
| Colon ca. HCC-2998 | 0.0 | 0.3 |
| Gastric ca. * (liver met) NCI-N87 | 0.1 | 0.2 |
| Bladder | 1.1 | 0.2 |
| Trachea | 2.4 | 2.2 |
| Kidney | 0.1 | 0.4 |
| Kidney (fetal) | 1.0 | 1.3 |
| Renal ca. 786-0 | 0.0 | 0.0 |
| Renal ca. A498 | 0.1 | 0.5 |
| Renal ca. RXF 393 | 0.0 | 0.0 |
| Renal ca. ACHN | 0.0 | 0.0 |
| Renal ca. UO-31 | 0.0 | 0.1 |
| Renal ca. TK-10 | 0.2 | 0.9 |
| Liver | 14.2 | 12.9 |
| Liver (fetal) | 25.7 | 15.6 |
| Liver ca. (hepatoblast) HepG2 | 0.0 | 0.1 |
| Lung | 0.5 | 0.1 |
| Lung (fetal) | 4.4 | 6.2 |
| Lung ca. (small cell) LX-1 | 0.0 | 0.0 |
| Lung ca. (small cell) NCI-H69 | 0.1 | 0.4 |
| Lung ca. (s. cell var.) SHP-77 | 0.0 | 0.0 |
| Lung ca. (large cell)NCI-H460 | 0.0 | 0.0 |
| Lung ca. (non-sm. cell) A549 | 0.0 | 0.1 |
| Lung ca. (non-s. cell) NCI-H23 | 0.0 | 0.3 |
| Lung ca. (non-s. cell) HOP-62 | 0.0 | 0.1 |
| Lung ca. (non-s. cl) NCI-H522 | 0.0 | 0.0 |
| Lung ca. (squam.) SW 900 | 0.0 | 0.1 |
| Lung ca. (squam.) NCI-H596 | 0.1 | 0.3 |
| Mammary gland | 4.7 | 5.1 |
| Breast ca.* (pl. ef) MCF-7 | 0.0 | 0.2 |
| Breast ca.* (pl. ef) MDA-MB-231 | 0.1 | 0.4 |
| Breast ca.* (pl. ef) T47D | 0.1 | 0.4 |
| Breast ca. BT-549 | 0.0 | 0.0 |
| Breast ca. MDA-N | 0.1 | 0.6 |
| Ovary | 3.6 | 1.3 |
| Ovarian ca. OVCAR-3 | 0.0 | 0.1 |
| Ovarian ca. OVCAR-4 | 0.0 | 0.0 |
| Ovarian ca. OVCAR-5 | 0.1 | 0.6 |
| Ovarian ca. OVCAR-8 | 0.2 | 0.7 |
| Ovarian ca. IGROV-1 | 0.0 | 0.3 |
| Ovarian ca. (ascites) SK-OV-3 | 0.0 | 0.2 |
| Uterus | 0.2 | 0.4 |
| Placenta | 1.9 | 1.6 |
| Prostate | 0.7 | 1.0 |
| Prostate ca.* (bone met) PC-3 | 0.0 | 0.0 |
| Testis | 23.5 | 22.1 |
| Melanoma Hs688(A).T | 0.0 | 0.1 |
| Melanoma* (met) Hs688(B).T | 0.0 | 0.1 |
| Melanoma UACC-62 | 0.0 | 0.0 |
| Melanoma M14 | 0.1 | 0.5 |
| Melanoma LOX IMVI | 0.1 | 0.5 |
| Melanoma* (met) SK-MEL-5 | 0.0 | 0.0 |
| Melanoma SK-MEL-28 | 0.3 | 1.3 |

Column A - Rel. Exp. (%) Ag03, Run 87353672
Column B - Rel. Exp. (%) Ag068, Run 87361479

[0948] TABLE HK
Panel 1.2

| Tissue Name | A | B |
|---|---|---|
| Endothelial cells | 0.0 | 0.0 |
| Heart (Fetal) | 0.3 | 5.6 |
| Pancreas | 2.0 | 0.6 |
| Pancreatic ca. CAPAN 2 | 0.0 | 0.0 |
| Adrenal Gland | 0.3 | 0.9 |
| Thyroid | 2.0 | 0.7 |
| Salivary gland | 6.3 | 6.7 |
| Pituitary gland | 0.1 | 0.4 |
| Brain (fetal) | 0.1 | 0.0 |
| Brain (whole) | 1.2 | 0.1 |
| Brain (amygdala) | 0.0 | 0.1 |
| Brain (cerebellum) | 7.6 | 0.0 |
| Brain (hippocampus) | 0.1 | 0.2 |
| Brain (thalamus) | 0.0 | 0.0 |
| Cerebral Cortex | 0.1 | 0.1 |
| Spinal cord | 0.0 | 0.1 |
| glio/astro U87-MG | 0.0 | 0.0 |
| glio/astro U-118-MG | 0.0 | 0.0 |
| astrocytoma SW1783 | 0.0 | 0.0 |
| neuro*; met SK-N-AS | 0.0 | 0.0 |
| astrocytoma SF-539 | 0.0 | 0.1 |
| astrocytoma SNB-75 | 0.0 | 0.0 |
| glioma SNB-19 | 0.0 | 0.1 |
| glioma U251 | 0.0 | 0.1 |
| glioma SF-295 | 0.0 | 0.0 |
| Heart | 0.8 | 1.8 |
| Skeletal Muscle | 2.4 | 1.5 |
| Bone marrow | 2.7 | 3.5 |
| Thymus | 0.2 | 0.3 |
| Spleen | 44.8 | 44.4 |
| Lymph node | 39.2 | 51.8 |
| Colorectal Tissue | 0.0 | 0.2 |
| Stomach | 1.0 | 2.9 |
| Small intestine | 1.2 | 2.7 |
| Colon ca. SW480 | 0.0 | 0.0 |
| Colon ca.* SW620 (SW480 met) | 0.0 | 0.0 |
| Colon ca. HT29 | 0.0 | 0.1 |
| Colon ca. HCT-116 | 0.0 | 0.0 |
| Colon ca. CaCo-2 | 0.0 | 0.0 |
| Colon ca. Tissue (ODO3866) | 0.1 | 0.4 |
| Colon ca. HCC-2998 | 0.0 | 0.0 |
| Gastric ca.* (liver met) NCI-N87 | 0.0 | 0.1 |
| Bladder | 3.7 | 3.8 |
| Trachea | 1.1 | 1.9 |
| Kidney | 0.1 | 0.4 |
| Kidney (fetal) | 0.8 | 2.1 |
| Renal ca. 786-0 | 0.0 | 0.0 |
| Renal ca. A498 | 0.3 | 0.1 |
| Renal ca. RXF 393 | 0.0 | 0.0 |
| Renal ca. ACHN | 0.0 | 0.0 |
| Renal ca. UO-31 | 0.0 | 0.0 |
| Renal ca. TK-10 | 0.0 | 0.0 |
| Liver | 100.0 | 100.0 |
| Liver (fetal) | 37.9 | 58.2 |
| Liver ca. (hepatoblast) HepG2 | 0.0 | 0.0 |
| Lung | 0.4 | 0.8 |
| Lung (fetal) | 2.4 | 2.5 |
| Lung ca. (small cell) LX-1 | 0.0 | 0.0 |
| Lung ca. (small cell) NCI-H69 | 0.1 | 0.6 |
| Lung ca. (s. cell var.) SHP-77 | 0.0 | 0.0 |
| Lung ca. (large cell) NCI-H460 | 0.0 | 0.2 |
| Lung ca. (non-sm. cell) A549 | 0.1 | 0.2 |
| Lung ca. (non-s. cell) NCI-H23 | 0.0 | 0.1 |
| Lung ca. (non-s. cell) HOP-62 | 0.0 | 0.0 |
| Lung ca. (non-s. cl) NCI-H522 | 0.0 | 0.0 |
| Lung ca. (squam.) SW 900 | 0.0 | 0.0 |
| Lung ca. (squam.) NCI-H596 | 0.1 | 0.2 |
| Mammary gland | 2.9 | 2.3 |
| Breast ca.* (pl. ef) MCF-7 | 0.0 | 0.0 |
| Breast ca.* (pl. ef) MDA-MB-231 | 0.0 | 0.0 |
| Breast ca.* (pl. ef) T47D | 0.1 | 0.3 |
| Breast ca. BT-549 | 0.0 | 0.0 |
| Breast ca. MDA-N | 0.0 | 0.1 |
| Ovary | 1.4 | 4.2 |
| Ovarian ca. OVCAR-3 | 2.9 | 0.0 |
| Ovarian ca. OVCAR-4 | 4.1 | 0.0 |
| Ovarian ca. OVCAR-5 | 0.2 | 0.3 |
| Ovarian ca. OVCAR-8 | 0.0 | 0.1 |
| Ovarian ca. IGROV-1 | 0.0 | 0.0 |
| Ovarian ca. (ascites) SK-OV-3 | 0.0 | 0.0 |
| Uterus | 0.2 | 0.7 |
| Placenta | 0.8 | 0.9 |
| Prostate | 0.3 | 0.5 |
| Prostate ca.* (bone met) PC-3 | 0.0 | 0.0 |
| Testis | 12.2 | 8.4 |
| Melanoma Hs688(A).T | 0.0 | 0.0 |
| Melanoma* (met) Hs688(B).T | 0.0 | 0.1 |
| Melanoma UACC-62 | 0.0 | 0.0 |
| Melanoma M14 | 0.1 | 0.2 |
| Melanoma LOX IMVI | 0.0 | 0.0 |
| Melanoma* (met) SK-MEL-5 | 0.1 | 0.0 |

Column A - Rel. Exp. (%) Ag812, Run 118348259
Column B - Rel. Exp. (%) Ag812, Run 121953945

[0949] TABLE HL
Panel 1.3D

| Tissue Name | A | B | C | D | E |
|---|---|---|---|---|---|
| Liver adenocarcinoma | 0.0 | 0.0 | 0.0 | 0.0 | 0.0 |
| Pancreas | 0.2 | 0.4 | 0.3 | 0.2 | 0.2 |
| Pancreatic ca. CAPAN 2 | 0.0 | 0.0 | 0.0 | 0.0 | 0.0 |
| Adrenal gland | 0.2 | 0.0 | 0.0 | 0.4 | 0.2 |
| Thyroid | 0.5 | 0.6 | 1.1 | 1.4 | 0.6 |
| Salivary gland | 1.0 | 1.0 | 0.7 | 0.7 | 0.1 |
| Pituitary gland | 0.0 | 0.0 | 0.1 | 0.0 | 0.0 |
| Brain (fetal) | 0.0 | 0.0 | 0.0 | 0.0 | 0.0 |
| Brain (whole) | 0.0 | 0.0 | 0.1 | 0.0 | 0.0 |
| Brain (amygdala) | 0.0 | 0.3 | 0.1 | 0.0 | 0.0 |
| Brain (cerebellum) | 0.0 | 0.0 | 0.0 | 0.0 | 0.0 |
| Brain (hippocampus) | 0.3 | 0.0 | 0.1 | 0.0 | 0.0 |
| Brain (substantia nigra) | 0.0 | 0.0 | 0.0 | 0.0 | 0.0 |
| Brain (thalamus) | 0.0 | 0.0 | 0.0 | 0.0 | 0.0 |
| Cerebral Cortex | 0.0 | 0.0 | 0.0 | 0.1 | 0.0 |
| Spinal cord | 0.0 | 0.0 | 0.0 | 0.0 | 0.0 |
| glio/astro U87-MG | 0.0 | 0.0 | 0.0 | 0.0 | 0.0 |
| glio/astro U-118-MG | 0.0 | 0.0 | 0.0 | 0.0 | 0.0 |
| astrocytoma SW1783 | 0.0 | 0.0 | 0.0 | 0.0 | 0.0 |
| neuro*; met SK-N-AS | 0.0 | 0.0 | 0.0 | 0.0 | 0.0 |
| astrocytoma SF-539 | 0.0 | 0.0 | 0.0 | 0.0 | 0.0 |
| astrocytoma SNB-75 | 0.0 | 0.0 | 0.0 | 0.0 | 0.0 |
| glioma SNB-19 | 0.0 | 0.0 | 0.0 | 0.0 | 0.0 |
| glioma U251 | 0.0 | 0.0 | 0.0 | 0.0 | 0.0 |
| glioma SF-295 | 0.0 | 0.0 | 0.0 | 0.0 | 0.0 |
| Heart (fetal) | 1.8 | 0.7 | 2.1 | 2.1 | 1.5 |
| Heart | 0.1 | 0.2 | 0.0 | 0.1 | 0.2 |
| Skeletal muscle (fetal) | 8.5 | 6.9 | 9.3 | 9.5 | 6.8 |
| Skeletal muscle | 0.0 | 0.0 | 0.0 | 0.1 | 0.0 |
| Bone marrow | 2.6 | 2.2 | 3.3 | 2.4 | 3.1 |
| Thymus | 0.1 | 0.0 | 0.1 | 0.1 | 0.2 |
| Spleen | 100.0 | 100.0 | 100.0 | 100.0 | 100.0 |
| Lymph node | 20.7 | 17.9 | 25.5 | 26.4 | 32.8 |
| Colorectal | 1.6 | 1.1 | 0.6 | 0.7 | 0.4 |
| Stomach | 1.3 | 0.5 | 1.2 | 0.7 | 0.9 |
| Small intestine | 1.3 | 1.0 | 1.1 | 1.1 | 1.2 |
| Colon ca. SW480 | 0.0 | 0.0 | 0.0 | 0.0 | 0.0 |
| Colon ca.* SW620(SW480 met) | 0.0 | 0.0 | 0.0 | 0.0 | 0.0 |
| Colon ca. HT29 | 0.0 | 0.0 | 0.0 | 0.0 | 0.0 |
| Colon ca. HCT-116 | 0.0 | 0.0 | 0.0 | 0.0 | 0.0 |
| Colon ca. CaCo-2 | 0.0 | 0.0 | 0.0 | 0.0 | 0.0 |
| Colon ca. tissue(ODO3866) | 0.1 | 0.1 | 0.0 | 0.2 | 0.1 |
| Colon ca. HCC-2998 | 0.0 | 0.0 | 0.0 | 0.0 | 0.0 |
| Gastric ca.* (liver met) NCI-N87 | 0.0 | 0.0 | 0.0 | 0.0 | 0.1 |
| Bladder | 0.3 | 0.4 | 0.6 | 0.6 | 0.4 |
| Trachea | 1.3 | 0.7 | 1.4 | 1.2 | 1.3 |
| Kidney | 0.0 | 0.0 | 0.1 | 0.0 | 0.0 |
| Kidney (fetal) | 2.4 | 3.4 | 3.8 | 2.1 | 3.0 |
| Renal ca. 786-0 | 0.0 | 0.0 | 0.0 | 0.0 | 0.0 |
| Renal ca. A498 | 0.0 | 0.0 | 0.0 | 0.0 | 0.0 |
| Renal ca. RXF 393 | 0.0 | 0.0 | 0.0 | 0.0 | 0.0 |
| Renal ca. ACHN | 0.0 | 0.0 | 0.0 | 0.0 | 0.0 |
| Renal ca. UO-31 | 0.0 | 0.0 | 0.0 | 0.0 | 0.0 |
| Renal ca. TK-10 | 0.0 | 0.0 | 0.0 | 0.0 | 0.0 |
| Liver | 5.6 | 8.8 | 6.1 | 6.4 | 10.3 |
| Liver (fetal) | 33.4 | 33.2 | 33.9 | 33.4 | 36.6 |
| Liver ca. (hepatoblast) HepG2 | 0.0 | 0.0 | 0.0 | 0.0 | 0.0 |
| Lung | 0.6 | 0.6 | 0.6 | 0.7 | 0.2 |
| Lung (fetal) | 2.0 | 1.9 | 2.4 | 1.0 | 3.1 |
| Lung ca. (small cell) LX-1 | 0.0 | 0.0 | 0.0 | 0.0 | 0.0 |
| Lung ca. (small cell) NCI-H69 | 0.0 | 0.0 | 0.0 | 0.0 | 0.0 |
| Lung ca. (s. cell var.) SHP-77 | 0.0 | 0.0 | 0.0 | 0.0 | 0.0 |
| Lung ca. (large cell)NCI-H460 | 0.0 | 0.0 | 0.0 | 0.0 | 0.0 |
| Lung ca. (non-sm. cell) A549 | 0.0 | 0.0 | 0.0 | 0.0 | 0.0 |
| Lung ca. (non-s. cell) NCI-H23 | 0.0 | 0.0 | 0.0 | 0.0 | 0.0 |
| Lung ca. (non-s. cell) HOP-62 | 0.0 | 0.0 | 0.0 | 0.0 | 0.0 |
| Lung ca. (non-s. cl) NCI-H522 | 0.0 | 0.0 | 0.0 | 0.0 | 0.0 |
| Lung ca. (squam.) SW 900 | 0.0 | 0.0 | 0.0 | 0.0 | 0.0 |
| Lung ca. (squam.) NCI-H596 | 0.0 | 0.0 | 0.0 | 0.0 | 0.0 |
| Mammary gland | 1.6 | 1.5 | 1.1 | 1.7 | 1.5 |
| Breast ca.* (pl. ef) MCF-7 | 0.0 | 0.0 | 0.0 | 0.0 | 0.0 |
| Breast ca.* (pl. ef) MDA-MB-231 | 0.0 | 0.0 | 0.0 | 0.0 | 0.0 |
| Breast ca.* (pl. ef) T47D | 0.0 | 0.0 | 0.0 | 0.0 | 0.0 |
| Breast ca. BT-549 | 0.0 | 0.0 | 0.0 | 0.0 | 0.0 |
| Breast ca. MDA-N | 0.0 | 0.0 | 0.0 | 0.0 | 0.0 |
| Ovary | 5.0 | 5.4 | 4.5 | 6.0 | 4.6 |
| Ovarian ca. OVCAR-3 | 0.0 | 0.0 | 0.0 | 0.0 | 0.0 |
| Ovarian ca. OVCAR-4 | 0.0 | 0.0 | 0.0 | 0.0 | 0.0 |
| Ovarian ca. OVCAR-5 | 0.0 | 0.0 | 0.0 | 0.0 | 0.0 |
| Ovarian ca. OVCAR-8 | 0.0 | 0.0 | 0.0 | 0.0 | 0.0 |
| Ovarian ca. IGROV-1 | 0.0 | 0.0 | 0.0 | 0.0 | 0.0 |
| Ovarian ca.* (ascites) SK-OV-3 | 0.0 | 0.0 | 0.0 | 0.0 | 0.0 |
| Uterus | 0.2 | 0.2 | 0.5 | 0.3 | 0.1 |
| Placenta | 0.4 | 0.0 | 0.4 | 0.1 | 0.2 |
| Prostate | 0.2 | 0.1 | 0.1 | 0.1 | 0.1 |
| Prostate ca.* (bone met)PC-3 | 0.0 | 0.0 | 0.0 | 0.0 | 0.0 |
| Testis | 7.5 | 5.9 | 4.7 | 6.5 | 5.6 |
| Melanoma Hs688(A).T | 0.0 | 0.0 | 0.0 | 0.0 | 0.0 |
| Melanoma* (met) Hs688(B).T | 0.0 | 0.0 | 0.0 | 0.0 | 0.0 |
| Melanoma UACC-62 | 0.0 | 0.0 | 0.0 | 0.0 | 0.0 |
| Melanoma M14 | 0.0 | 0.0 | 0.0 | 0.0 | 0.0 |
| Melanoma LOX IMVI | 0.0 | 0.0 | 0.0 | 0.0 | 0.0 |
| Melanoma* (met) SK-MEL-5 | 0.0 | 0.0 | 0.0 | 0.0 | 0.0 |
| Adipose | 1.0 | 1.5 | 0.6 | 0.5 | 1.1 |

Column A - Rel. Exp. (%) Ag2742, Run 153641674
Column B - Rel. Exp. (%) Ag2743, Run 153658349
Column C - Rel. Exp. (%) Ag2744, Run 153670718
Column D - Rel. Exp. (%) Ag2745, Run 153664738
Column E - Rel. Exp. (%) Ag2746, Run 153675151

[0950] TABLE HM
Panel 2D

| Tissue Name | A | B | C | D | E |
|---|---|---|---|---|---|
| Normal Colon | 3.2 | 3.8 | 4.4 | 4.8 | 4.5 |
| CC Well to Mod Diff (ODO3866) | 0.1 | 0.1 | 0.1 | 0.0 | 0.0 |
| CC Margin (ODO3866) | 0.7 | 0.5 | 0.9 | 1.2 | 0.3 |
| CC Gr.2 rectosigmoid (ODO3868) | 0.2 | 0.4 | 0.2 | 0.2 | 0.1 |
| CC Margin (ODO3868) | 0.1 | 0.1 | 0.0 | 0.2 | 0.1 |
| CC Mod Diff (ODO3920) | 0.0 | 0.1 | 0.1 | 0.0 | 0.0 |
| CC Margin (ODO3920) | 1.1 | 2.0 | 3.1 | 1.0 | 1.4 |
| CC Gr.2 ascend colon (ODO3921) | 0.2 | 0.3 | 0.9 | 0.5 | 0.7 |
| CC Margin (ODO3921) | 0.7 | 0.3 | 0.9 | 1.0 | 0.2 |
| CC from Partial Hepatectomy (ODO4309) Mets | 7.6 | 8.4 | 10.2 | 9.5 | 8.8 |
| Liver Margin (ODO4309) | 100.0 | 100.0 | 100.0 | 100.0 | 100.0 |
| Colon mets to lung (OD04451-01) | 0.4 | 0.3 | 0.3 | 1.5 | 0.4 |
| Lung Margin (OD04451-02) | 0.2 | 0.1 | 0.8 | 0.2 | 0.2 |
| Normal Prostate 6546-1 | 0.4 | 0.0 | 0.2 | 0.1 | 0.1 |
| Prostate Cancer (OD04410) | 0.2 | 0.2 | 0.0 | 0.3 | 0.0 |
| Prostate Margin (OD04410) | 0.0 | 0.2 | 0.3 | 0.0 | 0.6 |
| Prostate Cancer (OD04720-01) | 0.6 | 0.1 | 0.2 | 0.2 | 0.3 |
| Prostate Margin (OD04720-02) | 0.5 | 0.5 | 0.6 | 0.3 | 0.2 |
| Normal Lung 061010 | 5.6 | 5.2 | 6.3 | 8.1 | 5.9 |
| Lung Met to Muscle (ODO4286) | 0.0 | 0.0 | 0.0 | 0.0 | 0.0 |
| Muscle Margin (ODO4286) | 0.5 | 0.0 | 0.1 | 0.2 | 0.0 |
| Lung Malignant Cancer (OD03126) | 1.0 | 1.0 | 1.3 | 0.8 | 1.0 |
| Lung Margin (OD03126) | 0.9 | 1.1 | 0.9 | 1.4 | 1.4 |
| Lung Cancer (OD04404) | 1.3 | 0.8 | 1.6 | 1.5 | 1.4 |
| Lung Margin (OD04404) | 2.0 | 2.5 | 4.3 | 3.4 | 3.2 |
| Lung Cancer (OD04565) | 0.2 | 0.1 | 0.5 | 0.0 | 0.2 |
| Lung Margin (OD04565) | 0.3 | 0.0 | 0.3 | 0.4 | 0.7 |
| Lung Cancer (OD04237-01) | 0.4 | 0.9 | 1.2 | 1.5 | 1.2 |
| Lung Margin (OD04237-02) | 5.6 | 5.4 | 7.9 | 6.3 | 5.6 |
| Ocular Mel Met to Liver (ODO4310) | 0.2 | 0.0 | 0.0 | 0.1 | 0.4 |
| Liver Margin (ODO4310) | 52.9 | 64.6 | 79.6 | 81.8 | 63.3 |
| Melanoma Mets to Lung (OD04321) | 0.0 | 0.0 | 0.0 | 0.1 | 0.3 |
| Lung Margin (OD04321) | 0.2 | 2.0 | 0.9 | 1.5 | 0.5 |
| Normal Kidney | 0.5 | 0.3 | 0.3 | 0.7 | 0.3 |
| Kidney Ca, Nuclear grade 2 (OD04338) | 0.0 | 0.1 | 0.0 | 0.0 | 0.1 |
| Kidney Margin (OD04338) | 0.0 | 0.2 | 0.5 | 0.1 | 0.3 |
| Kidney Ca Nuclear grade 1/2 (OD04339) | 0.0 | 0.0 | 0.0 | 0.0 | 0.0 |
| Kidney Margin (OD04339) | 0.0 | 0.1 | 0.1 | 0.3 | 0.1 |
| Kidney Ca, Clear cell type (OD04340) | 0.0 | 0.1 | 0.0 | 0.0 | 0.1 |
| Kidney Margin (OD04340) | 0.2 | 0.1 | 0.8 | 0.0 | 0.0 |
| Kidney Ca, Nuclear grade 3 (OD04348) | 0.0 | 0.0 | 0.2 | 0.0 | 0.1 |
| Kidney Margin (OD04348) | 0.0 | 0.1 | 0.2 | 0.1 | 0.1 |
| Kidney Cancer (OD04622-01) | 0.2 | 0.1 | 0.1 | 1.2 | 0.2 |
| Kidney Margin (OD04622-03) | 0.0 | 0.1 | 0.0 | 0.0 | 0.0 |
| Kidney Cancer (OD04450-01) | 0.0 | 0.0 | 0.0 | 0.0 | 0.0 |
| Kidney Margin (OD04450-03) | 0.1 | 0.0 | 0.1 | 0.1 | 0.1 |
| Kidney Cancer 8120607 | 0.0 | 0.0 | 0.0 | 0.0 | 0.0 |
| Kidney Margin 8120608 | 0.1 | 0.0 | 0.2 | 0.0 | 0.0 |
| Kidney Cancer 8120613 | 0.3 | 0.2 | 0.2 | 0.1 | 0.5 |
| Kidney Margin 8120614 | 0.3 | 0.1 | 0.4 | 0.3 | 0.0 |
| Kidney Cancer 9010320 | 0.0 | 0.1 | 0.1 | 0.1 | 0.2 |
| Kidney Margin 9010321 | 0.1 | 0.0 | 0.0 | 0.1 | 0.2 |
| Normal Uterus | 0.5 | 0.1 | 0.8 | 0.1 | 0.5 |
| Uterus Cancer 064011 | 0.8 | 0.7 | 1.3 | 0.4 | 0.6 |
| Normal Thyroid | 1.8 | 1.1 | 1.5 | 0.9 | 2.3 |
| Thyroid Cancer 064010 | 0.0 | 0.0 | 0.0 | 0.0 | 0.0 |
| Thyroid Cancer A302152 | 0.5 | 1.0 | 1.3 | 0.6 | 0.8 |
| Thyroid Margin A302153 | 2.3 | 2.4 | 3.5 | 3.9 | 2.4 |
| Normal Breast | 9.0 | 6.8 | 9.0 | 9.9 | 5.5 |
| Breast Cancer (OD04566) | 0.1 | 0.0 | 0.1 | 0.0 | 0.0 |
| Breast Cancer (OD04590-01) | 0.3 | 0.4 | 0.2 | 0.7 | 0.2 |
| Breast Cancer Mets (OD04590-03) | 1.7 | 2.4 | 2.5 | 2.5 | 1.4 |
| Breast Cancer Metastasis (OD04655-05) | 10.7 | 13.2 | 22.1 | 15.6 | 12.8 |
| Breast Cancer 064006 | 0.5 | 0.8 | 0.8 | 0.7 | 0.7 |
| Breast Cancer 1024 | 4.1 | 2.5 | 5.1 | 3.1 | 3.6 |
| Breast Cancer 9100266 | 0.9 | 0.2 | 0.2 | 0.2 | 0.2 |
| Breast Margin 9100265 | 0.7 | 0.4 | 1.0 | 0.7 | 1.2 |
| Breast Cancer A209073 | 1.2 | 1.2 | 1.1 | 1.9 | 0.8 |
| Breast Margin A209073 | 1.5 | 1.0 | 2.1 | 1.5 | 0.6 |
| Normal Liver | 27.5 | 27.9 | 37.4 | 42.3 | 27.2 |
| Liver Cancer 064003 | 0.8 | 0.5 | 0.3 | 0.6 | 0.5 |
| Liver Cancer 1025 | 33.7 | 36.6 | 36.6 | 39.0 | 27.5 |
| Liver Cancer 1026 | 4.6 | 3.6 | 5.7 | 5.8 | 5.2 |
| Liver Cancer 6004-T | 36.9 | 38.7 | 50.3 | 46.7 | 38.7 |
| Liver Tissue 6004-N | 1.5 | 1.0 | 1.3 | 1.3 | 1.6 |
| Liver Cancer 6005-T | 4.5 | 3.9 | 4.2 | 4.3 | 2.9 |
| Liver Tissue 6005-N | 22.2 | 24.5 | 32.8 | 27.5 | 28.7 |
| Normal Bladder | 5.3 | 3.4 | 4.8 | 4.2 | 5.5 |
| Bladder Cancer 1023 | 1.6 | 1.3 | 1.5 | 1.6 | 1.7 |
| Bladder Cancer A302173 | 0.9 | 0.4 | 1.5 | 1.0 | 0.3 |
| Bladder Cancer (OD04718-01) | 0.0 | 0.0 | 0.0 | 0.0 | 0.0 |
| Bladder Normal Adjacent (OD04718-03) | 5.2 | 6.2 | 7.8 | 6.0 | 4.1 |
| Normal Ovary | 1.6 | 3.0 | 5.4 | 3.6 | 3.6 |
| Ovarian Cancer 064008 | 0.0 | 0.1 | 0.1 | 0.6 | 0.5 |
| Ovarian Cancer (OD04768-07) | 0.0 | 0.0 | 0.0 | 0.1 | 0.0 |
| Ovary Margin (OD04768-08) | 2.3 | 1.7 | 3.1 | 2.4 | 2.6 |
| Normal Stomach | 0.9 | 0.8 | 1.7 | 0.8 | 0.8 |
| Gastric Cancer 9060358 | 0.0 | 0.4 | 0.8 | 0.4 | 0.2 |
| Stomach Margin 9060359 | 1.2 | 0.8 | 1.3 | 1.0 | 0.9 |
| Gastric Cancer 9060395 | 0.1 | 0.2 | 0.3 | 0.5 | 0.6 |
| Stomach Margin 9060394 | 0.8 | 0.6 | 1.7 | 0.7 | 0.6 |
| Gastric Cancer 9060397 | 0.1 | 0.1 | 0.1 | 0.0 | 0.0 |
| Stomach Margin 9060396 | 0.3 | 0.1 | 0.6 | 0.1 | 0.3 |
| Gastric Cancer 064005 | 0.7 | 0.6 | 0.4 | 1.1 | 0.3 |

Column A - Rel. Exp. (%) Ag2742, Run 153641758
Column B - Rel. Exp. (%) Ag2743, Run 153658357
Column C - Rel. Exp. (%) Ag2744, Run 153670751
Column D - Rel. Exp. (%) Ag2745, Run 153664739
Column E - Rel. Exp. (%) Ag2746, Run 153675220

[0951] TABLE HN
Panel 4D

| Tissue Name | A | B | C | D | E | F |
|---|---|---|---|---|---|---|
| Secondary Th1 act | 0.0 | 0.0 | 0.0 | 0.0 | 0.0 | 0.0 |
| Secondary Th2 act | 0.0 | 0.7 | 0.0 | 0.0 | 0.0 | 0.0 |
| Secondary Tr1 act | 1.7 | 0.0 | 1.9 | 0.0 | 7.5 | 2.8 |
| Secondary Th1 rest | 0.0 | 0.0 | 0.0 | 0.0 | 0.0 | 0.0 |
| Secondary Th2 rest | 0.0 | 0.0 | 0.0 | 0.0 | 0.0 | 0.0 |
| Secondary Tr1 rest | 0.0 | 0.0 | 0.0 | 0.0 | 0.0 | 2.8 |
| Primary Th1 act | 0.0 | 0.0 | 0.0 | 0.0 | 0.0 | 0.0 |
| Primary Th2 act | 1.6 | 0.0 | 0.0 | 0.0 | 0.0 | 4.8 |
| Primary Tr1 act | 0.0 | 0.0 | 0.0 | 0.0 | 0.0 | 0.0 |
| Primary Th1 rest | 0.0 | 0.0 | 0.0 | 0.0 | 0.0 | 0.0 |
| Primary Th2 rest | 0.0 | 0.0 | 0.0 | 0.0 | 0.0 | 0.0 |
| Primary Tr1 rest | 0.0 | 0.0 | 0.0 | 0.0 | 0.0 | 0.0 |
| CD45RA CD4 lymphocyte act | 0.0 | 0.0 | 0.0 | 0.0 | 0.0 | 0.0 |
| CD45RO CD4 lymphocyte act | 0.0 | 0.0 | 0.0 | 0.0 | 0.0 | 0.0 |
| CD8 lymphocyte act | 0.0 | 0.0 | 0.0 | 0.0 | 0.0 | 0.0 |
| Secondary CD8 lymphocyte rest | 0.0 | 0.0 | 0.0 | 0.0 | 0.0 | 0.0 |
| Secondary CD8 lymphocyte act | 0.7 | 0.0 | 0.0 | 7.8 | 0.0 | 1.8 |
| CD4 lymphocyte none | 0.0 | 0.0 | 0.0 | 0.0 | 0.0 | 0.0 |
| 2ry Th1/Th2/Tr1_anti-CD95 CH11 | 0.0 | 0.0 | 0.0 | 0.0 | 0.0 | 0.0 |
| LAK cells rest | 0.0 | 0.0 | 0.0 | 0.0 | 0.0 | 0.0 |
| LAK cells IL-2 | 0.0 | 0.0 | 0.0 | 0.0 | 0.0 | 4.7 |
| LAK cells IL-2 + IL-12 | 0.0 | 0.0 | 0.0 | 0.0 | 1.9 | 0.0 |
| LAK cells IL-2 + IFN gamma | 0.0 | 1.5 | 3.3 | 5.0 | 0.0 | 3.0 |
| LAK cells IL-2 + IL-18 | 0.0 | 0.0 | 2.1 | 0.0 | 0.0 | 0.0 |
| LAK cells PMA/ionomycin | 0.0 | 0.0 | 0.0 | 0.0 | 0.0 | 0.0 |
| NK Cells IL-2 rest | 0.0 | 0.0 | 0.0 | 0.0 | 0.0 | 0.0 |
| Two Way MLR 3 day | 0.0 | 0.0 | 0.0 | 0.0 | 0.0 | 0.0 |
| Two Way MLR 5 day | 0.0 | 0.0 | 0.0 | 0.0 | 0.0 | 0.0 |
| Two Way MLR 7 day | 2.0 | 0.0 | 6.4 | 0.0 | 0.0 | 11.3 |
| PBMC rest | 0.0 | 0.0 | 0.0 | 0.0 | 0.0 | 5.1 |
| PBMC PWM | 0.0 | 2.3 | 0.0 | 0.0 | 0.0 | 2.7 |
| PBMC PHA-L | 0.0 | 1.5 | 2.5 | 0.0 | 0.0 | 2.2 |
| Ramos (B cell) none | 0.0 | 0.0 | 0.0 | 0.0 | 0.0 | 0.0 |
| Ramos (B cell) ionomycin | 0.0 | 0.0 | 0.0 | 0.0 | 0.0 | 0.0 |
| B lymphocytes PWM | 0.0 | 0.0 | 0.0 | 0.0 | 0.0 | 2.0 |
| B lymphocytes CD40L and IL-4 | 0.0 | 0.0 | 0.0 | 0.0 | 0.0 | 6.0 |
| EOL-1 dbcAMP | 0.0 | 0.0 | 0.0 | 0.0 | 0.0 | 0.0 |
| EOL-1 dbcAMP PMA/ionomycin | 0.0 | 0.0 | 0.0 | 0.0 | 0.0 | 0.0 |
| Dendritic cells none | 1.4 | 2.9 | 0.0 | 0.0 | 4.9 | 0.0 |
| Dendritic cells LPS | 0.0 | 0.0 | 0.0 | 0.0 | 0.0 | 0.0 |
| Dendritic cells anti-CD40 | 0.0 | 0.0 | 3.3 | 0.0 | 0.0 | 0.0 |
| Monocytes rest | 0.0 | 0.0 | 0.0 | 0.0 | 0.0 | 0.0 |
| Monocytes LPS | 0.0 | 0.0 | 0.0 | 0.0 | 0.0 | 0.0 |
| Macrophages rest | 0.0 | 0.0 | 0.0 | 0.0 | 0.0 | 0.0 |
| Macrophages LPS | 0.0 | 0.0 | 0.0 | 2.4 | 0.0 | 0.0 |
| HUVEC none | 0.0 | 0.0 | 0.0 | 0.0 | 0.0 | 0.0 |
| HUVEC starved | 0.0 | 0.0 | 0.0 | 0.0 | 0.0 | 0.0 |
| HUVEC IL-1beta | 0.0 | 0.0 | 0.0 | 0.0 | 0.0 | 0.0 |
| HUVEC IFN gamma | 3.7 | 0.0 | 0.0 | 0.0 | 2.7 | 0.0 |
| HUVEC TNF alpha + IFN gamma | 0.0 | 0.0 | 0.0 | 0.0 | 0.0 | 0.0 |
| HUVEC TNF alpha + IL4 | 0.0 | 0.0 | 0.0 | 0.0 | 0.0 | 0.0 |
| HUVEC IL-11 | 1.4 | 0.0 | 0.0 | 0.0 | 0.0 | 2.6 |
| Lung Microvascular EC none | 1.6 | 0.0 | 2.2 | 0.0 | 0.0 | 0.0 |
| Lung Microvascular EC TNFalpha + IL-1beta | 3.1 | 2.9 | 0.0 | 0.0 | 0.0 | 0.0 |
| Microvascular Dermal EC none | 0.0 | 3.1 | 5.0 | 0.0 | 0.0 | 12.6 |
| Microsvasular Dermal EC TNFalpha + IL-1beta | 1.4 | 1.1 | 0.0 | 0.0 | 1.6 | 0.0 |
| Bronchial epithelium TNFalpha + IL1beta | 0.0 | 0.0 | 0.0 | 0.0 | 0.0 | 0.0 |
| Small airway epithelium none | 0.0 | 0.0 | 0.0 | 0.0 | 0.0 | 0.0 |
| Small airway epithelium TNFalpha + IL-1beta | 0.0 | 0.0 | 0.0 | 0.0 | 0.0 | 0.0 |
| Coronery artery SMC rest | 0.0 | 0.0 | 0.0 | 0.0 | 0.0 | 0.0 |
| Coronery artery SMC TNFalpha + IL-1beta | 0.0 | 0.0 | 0.0 | 0.0 | 0.0 | 0.0 |
| Astrocytes rest | 0.0 | 0.0 | 0.0 | 0.0 | 0.0 | 0.0 |
| Astrocytes TNFalpha + IL-1 beta | 0.0 | 0.0 | 0.0 | 0.0 | 0.0 | 0.0 |
| KU-812 (Basophil) rest | 0.0 | 0.0 | 0.0 | 0.0 | 0.0 | 0.0 |
| KU-812 (Basophil) PMA/ionomycin | 0.0 | 0.0 | 0.0 | 0.0 | 0.0 | 0.0 |
| CCD1106 (Keratinocytes) none | 0.0 | 0.0 | 0.0 | 0.0 | 0.0 | 0.0 |
| CCD1106 (Keratinocytes) TNFalpha + IL-1beta | 0.0 | 0.0 | 0.0 | 0.0 | 0.0 | 0.0 |
| Liver cirrhosis | 100.0 | 100.0 | 100.0 | 100.0 | 100.0 | 100.0 |
| Lupus kidney | 0.0 | 1.4 | 0.0 | 0.0 | 0.0 | 0.0 |
| NCI-H292 none | 0.0 | 0.0 | 0.0 | 0.0 | 0.0 | 0.0 |
| NCI-H292 IL-4 | 0.0 | 0.0 | 0.0 | 0.0 | 2.3 | 0.0 |
| NCI-H292 IL-9 | 0.0 | 0.0 | 0.0 | 0.0 | 0.0 | 0.0 |
| NCI-H292 IL-13 | 0.0 | 0.0 | 0.0 | 0.0 | 0.0 | 0.0 |
| NCI-H292 IFN gamma | 0.0 | 0.0 | 0.0 | 0.0 | 0.0 | 0.0 |
| HPAEC none | 4.8 | 1.4 | 0.0 | 0.0 | 0.0 | 3.0 |
| HPAEC TNF alpha + IL-1 beta | 0.0 | 0.0 | 0.0 | 0.0 | 0.0 | 0.0 |
| Lung fibroblast none | 0.0 | 0.0 | 0.0 | 0.0 | 0.0 | 0.0 |
| Lung fibroblast TNF alpha + IL-1 beta | 0.0 | 0.0 | 0.0 | 0.0 | 0.0 | 0.0 |
| Lung fibroblast IL-4 | 0.0 | 0.0 | 0.0 | 0.0 | 0.0 | 0.0 |
| Lung fibroblast IL-9 | 0.0 | 0.0 | 0.0 | 0.0 | 0.0 | 0.0 |
| Lung fibroblast IL-13 | 0.0 | 0.0 | 0.0 | 0.0 | 0.0 | 0.0 |
| Lung fibroblast IFN gamma | 0.0 | 0.0 | 0.0 | 0.0 | 0.0 | 0.0 |
| Dermal fibroblast CCD1070 rest | 0.0 | 0.0 | 0.0 | 0.0 | 0.0 | 0.0 |
| Dermal fibroblast CCD1070 TNF alpha | 0.0 | 0.0 | 0.0 | 0.0 | 0.0 | 0.0 |
| Dermal fibroblast CCD1070 IL-1 beta | 0.0 | 0.0 | 0.0 | 0.0 | 0.0 | 0.0 |
| Dermal fibroblast IFN gamma | 0.0 | 0.0 | 0.0 | 0.0 | 0.0 | 5.3 |
| Dermal fibroblast IL-4 | 0.0 | 0.0 | 0.0 | 0.0 | 0.0 | 0.0 |
| IBD Colitis 2 | 1.7 | 0.0 | 0.0 | 0.0 | 0.0 | 0.0 |
| IBD Crohn's | 4.5 | 1.6 | 6.7 | 6.1 | 3.3 | 3.0 |
| Colon | 5.5 | 2.1 | 23.0 | 8.3 | 4.7 | 11.1 |
| Lung | 41.5 | 26.2 | 27.7 | 39.2 | 37.1 | 49.7 |
| Thymus | 4.2 | 0.0 | 4.1 | 0.0 | 1.4 | 20.6 |
| Kidney | 4.7 | 5.2 | 8.7 | 5.9 | 6.3 | 6.7 |

Column A - Rel. Exp. (%) Ag2742, Run 153641803
Column B - Rel. Exp. (%) Ag2743, Run 153658360
Column C - Rel. Exp. (%) Ag2744, Run 153670759
Column D - Rel. Exp. (%) Ag2745, Run 153664740
Column E - Rel. Exp. (%) Ag2746, Run 153675321
Column F - Rel. Exp. (%) Ag812, Run 138175358

[0952] TABLE HO
general oncology screening panel_v_2.4

| Tissue Name | A |
|---|---|
| Colon cancer 1 | 2.9 |
| Colon NAT 1 | 3.9 |
| Colon cancer 2 | 10.2 |
| Colon NAT 2 | 5.0 |
| Colon cancer 3 | 4.8 |
| Colon NAT 3 | 10.2 |
| Colon malignant cancer 4 | 0.0 |
| Colon NAT 4 | 3.8 |
| Lung cancer 1 | 5.0 |
| Lung NAT 1 | 1.3 |
| Lung cancer 2 | 9.0 |
| Lung NAT 2 | 0.0 |
| Squamous cell carcinoma 3 | 6.1 |
| Lung NAT 3 | 0.0 |
| Metastatic melanoma 1 | 43.8 |
| Melanoma 2 | 0.5 |
| Melanoma 3 | 4.0 |
| Metastatic melanoma 4 | 82.4 |
| Metastatic melanoma 5 | 100.0 |
| Bladder cancer 1 | 1.8 |
| Bladder NAT 1 | 0.0 |
| Bladder cancer 2 | 0.7 |
| Bladder NAT 2 | 0.7 |
| Bladder NAT 3 | 0.0 |
| Bladder NAT 4 | 9.0 |
| Prostate adenocarcinoma 1 | 0.7 |
| Prostate adenocarcinoma 2 | 0.6 |
| Prostate adenocarcinoma 3 | 0.9 |
| Prostate adenocarcinoma 4 | 0.9 |
| Prostate NAT 5 | 2.3 |
| Prostate adenocarcinoma 6 | 0.0 |
| Prostate adenocarcinoma 7 | 0.0 |
| Prostate adenocarcinoma 8 | 1.0 |
| Prostate adenocarcinoma 9 | 0.7 |
| Prostate NAT 10 | 0.2 |
| Kidney cancer 1 | 1.1 |
| Kidney NAT 1 | 1.6 |
| Kidney cancer 2 | 16.2 |
| Kidney NAT 2 | 3.0 |
| Kidney cancer 3 | 4.7 |
| Kidney NAT 3 | 0.0 |
| Kidney cancer 4 | 0.0 |
| Kidney NAT 4 | 0.0 |

Column A - Rel. Exp. (%) Ag812, Run 262228032

[0953] Panel 1 Summary: Ag03/Ag068 Highest expression of this gene was detected in the spleen (CTs=21-25). This gene was more highly expressed in normal tissue than in cancer cell lines. There were however detectable levels of expression in cell lines derived from melanoma, breast, renal, ovarian, lung, gastric and colon cancers. The difference in levels of expression of this gene is useful for differentiating between these cancer cell line samples and other samples on this panel and between normal tissues and malignancies from those cancers.

[0954] There were also higher levels of expression in lung, and kidney tissue from fetal sources (CTs=25-28) when compared to levels of expression in the adult (CTs=38-31). 10 Expression of this gene or its protein product is useful for differentiating between adult and fetal lung and kidney tissue.

[0955] Among tissues with metabolic function, this gene was expressed in the liver, pituitary, thyroid, heart, skeletal muscle and adrenal gland. This demonstrates that the protein encoded by this gene is involved in the homeostasis of these tissues. Therapeutic 15 modulation of the expression or function of this gene product is effective in the treatment of metabolic disorders, including obesity and diabetes.

[0956] This gene is a homolog of Stablin-1, and was also expressed at moderate levels in all brain regions examined. Because stablin is involved in angiogenesis, the therapeutic modulation of this gene or its protein product is of benefit in the treatment of 20 stroke/cerebral ischemia/cerebral infarct.

[0957] Panel 1.2 Summary: Ag812 Highest expression of this gene was detected in the liver (CTs=25). Significant expression was also found in other metabolic tissues including fetal and adult heart, skeletal muscle, pancreas, thyroid, pituitary and adrenal gland. The high expression of this gene in the liver shows that this gene is involved in the normal homeostasis of that organ. Therapeutic modulation of the expression or function of this gene or protein product is effective in the treatment of diseases that involve the liver.

[0958] This gene also showed low to moderate expression in the brain. Please see Panel 1 for discussion of potential utility of this gene in the central nervous system.

[0959] While this gene showed a greater association for normal tissue, there were significant levels of expression in a cluster of ovarian cancer cell lines. Expression of this gene is useful for differentiating between those samples and other samples on this panel, and between normal and malignant ovarian tissue. Therapeutic modulation of the expression or function of this gene or protein product is effective in the treatment of ovarian cancer.

[0960] Panel 1.3D Summary: Ag2742, Ag2743, Ag2744, Ag2745, Ag2746 Highest expression of this gene was detected in the liver (CTs=25). Significant expression was also found in the spleen (CTs=28-29). This result was in concordance with the results from Panel 1.

[0961] This gene was expressed at higher levels in the fetal kidney and skeletal muscle (CTs=32-34) than in the comparable adult tissues (CTs=40). Thus, expression of this gene is useful for differentiating between kidney and skeletal muscle tissue from adult and fetal sources. The higher levels of expression of this gene in the fetal tissues show that this gene product is involved in the development of these organs. Therapeutic modulation of the expression or function of these genes or their protein products is effective in treating disease of these organs in the adult.

[0962] In this panel, expression this gene was exclusively associate with normal tissue samples, a preference that was also observed in panels 1 and 1.2. Absence of expression of this gene is useful in differentiating between the cancerous cell lines on this panel, and their corresponding normal tissues.

[0963] Panel 2D Summary: Ag2742/Ag2743/Ag2744/Ag2745/Ag2746 Expression of this gene was highest and almost exclusive in the liver (CTs=27-29). This result was in concordance with the results from previous panels. The low/undetectable levels of expression in cancer samples was also in agreement with the results observed in the preceding experiments. Expression of this gene or its protein product is useful for differentiating between liver tissue and other samples on this panel and as a marker for liver tissue. Therapeutic modulation of the expression or function of the gene or the protein encoded by this gene is effective in the treatment of liver cancer or other disease that involve the liver. This gene is useful as a marker for breast cancer metastasis as it shows elevated expression in a metastatic breast cancer compared to expression in the primary cancer.

[0964] Panel 4D Summary: Ag812/Ag2742/Ag2743/Ag2744/Ag2745/Ag2746 The expression of this gene appears was highest in samples from cirrhotic liver, (CTs=32-33). Low level expression was also detected in samples derived from normal lung. The presence of this gene in liver cirrhosis (a component of which involves liver inflammation and fibrosis) shows that therapeutic agents involving this gene or its protein product are useful in reducing or inhibiting the inflammation associated with fibrotic and other inflammatory diseases.

[0965] general oncology screening panel_V_{—}2.4 Summary: Ag812 Highest expression of this gene was seen in metastatic melanoma (CTs=31). Gene, protein, antibodies or small molecule therapeutics that target this gene or its protein product are useful in the treatment of melanoma.

[0966] I. CG50925-01 and CG50925-02: TENM5

[0967] Expression of gene CG50925-01 and variant CG50925-02 was assessed using the primer-probe set Ag1402 described in Table IA. Results of the RTQ-PCR runs are shown in Tables B, IC, ID, IE, IF, IG, and IH.

TABLE IA
Probe Name Ag1402

| | | | | |
|---|---|---|---|---|
| | | | Start | SEQ ID |
| Primers | Sequences | Length | Position | No |

| | | | | |
|---|---|---|---|---|
| Forward | 5′-cttacaacaccacgggactaag-3′ | 22 | 5546 | 1291 |
| Probe | TET-5′-aagagcacttccttgcctccgtaagg-3′- | 26 | 5569 | 1292 |
| | TAMRA | | | |
| Reverse | 5′-agatcaaatgattgggatggtt-3′ | 22 | 5605 | 1293 |

[0968] TABLE IB
HASS Panel v1.0

| Tissue Name | A |
|---|---|
| MCF-7 C1 | 2.4 |
| MCF-7 C2 | 4.2 |
| MCF-7 C3 | 3.6 |
| MCF-7 C4 | 4.9 |
| MCF-7 C5 | 4.2 |
| MCF-7 C6 | 5.2 |
| MCF-7 C7 | 3.3 |
| MCF-7 C9 | 3.4 |
| MCF-7 C10 | 6.7 |
| MCF-7 C11 | 0.9 |
| MCF-7 C12 | 5.2 |
| MCF-7 C13 | 1.6 |
| MCF-7 C15 | 2.6 |
| MCF-7 C16 | 6.3 |
| MCF-7 C17 | 7.5 |
| T24 D1 | 0.5 |
| T24 D2 | 2.0 |
| T24 D3 | 2.0 |
| T24 D4 | 1.8 |
| T24 D5 | 2.5 |
| T24 D6 | 2.4 |
| T24 D7 | 1.1 |
| T24 D9 | 6.6 |
| T24 D10 | 2.2 |
| T24 D11 | 2.2 |
| T24 D12 | 3.1 |
| T24 D13 | 2.0 |
| T24 D15 | 6.2 |
| T24 D16 | 1.1 |
| T24 D17 | 1.7 |
| CAPaN B1 | 2.3 |
| CAPaN B2 | 0.7 |
| CAPaN B3 | 0.3 |
| CAPaN B4 | 0.3 |
| CAPaN B5 | 1.2 |
| CAPaN B6 | 1.1 |
| CAPaN B7 | 0.4 |
| CAPaN B8 | 0.5 |
| CAPaN B9 | 0.8 |
| CAPaN B10 | 0.9 |
| CAPaN B11 | 0.8 |
| CAPaN B12 | 0.6 |
| CAPaN B13 | 0.7 |
| CAPaN B14 | 1.4 |
| CAPaN B15 | 0.4 |
| CAPaN B16 | 0.6 |
| CAPaN B17 | 1.2 |
| U87-MG F1 (B) | 1.0 |
| U87-MG F2 | 2.7 |
| U87-MG F3 | 5.6 |
| U87-MG F4 | 2.9 |
| U87-MG F5 | 6.7 |
| U87-MG F6 | 7.3 |
| U87-MG F7 | 4.5 |
| U87-MG F8 | 11.7 |
| U87-MG F9 | 3.4 |
| U87-MG F10 | 5.0 |
| U87-MG F11 | 12.9 |
| U87-MG F12 | 7.9 |
| U87-MG F13 | 9.7 |
| U87-MG F14 | 24.3 |
| U87-MG F15 | 10.7 |
| U87-MG F16 | 6.8 |
| U87-MG F17 | 11.4 |
| LnCAP A1 | 0.9 |
| LnCAP A2 | 2.0 |
| LnCAP A3 | 2.2 |
| LnCAP A4 | 2.5 |
| LnCAP A5 | 2.0 |
| LnCAP A6 | 1.8 |
| LnCAP A7 | 5.3 |
| LnCAP A8 | 5.3 |
| LnCAP A9 | 3.0 |
| LnCAP A10 | 1.8 |
| LnCAP A11 | 6.2 |
| LnCAP A12 | 0.5 |
| LnCAP A13 | 0.5 |
| LnCAP A14 | 0.8 |
| LnCAP A15 | 0.8 |
| LnCAP A16 | 1.7 |
| LnCAP A17 | 4.6 |
| Primary Astrocytes | 27.0 |
| Primary Renal Proximal Tubule Epithelial cell A2 | 0.8 |
| Primary melanocytes A5 | 100.0 |
| 126443 - 341 medullo | 0.6 |
| 126444 - 487 medullo | 28.1 |
| 126445 - 425 medullo | 1.2 |
| 126446 - 690 medullo | 8.8 |
| 126447 - 54 adult glioma | 28.1 |
| 126448 - 245 adult glioma | 76.3 |
| 126449 - 317 adult glioma | 9.5 |
| 126450 - 212 glioma | 5.9 |
| 126451 - 456 glioma | 27.0 |

Column A - Rel. Exp. (%) Ag1402, Run 318641615

[0969] TABLE IC
Human Metabolic

| Tissue Name | A |
|---|---|
| 137857_psoas-AA.M.Diab.-hi BMI-6 | 0.5 |
| 135760_psoas-HI.M.Diab.-hi BMI-21 | 1.4 |
| 134827_psoas-CC.M.Diab.-hi BMI-4 | 2.1 |
| 137860_psoas-AA.M.Diab.-med BMI-8 | 1.1 |
| 137834_psoas-CC.M.Diab.-med BMI-2 | 2.8 |
| 137828_psoas-CC.M.Diab.-med BMI-1 | 2.1 |
| 135763_psoas-HI.M.Diab.-med BMI-23 | 1.2 |
| 142740_psoas-AS.M.Diab.-low BMI-20 | 18.4 |
| 134834_psoas-AA.M.Diab.-low BMI-17 | 1.2 |
| 137850_psoas-AS.M.Norm-hi BMI-34 | 1.8 |
| 135769_psoas-HI.M.Norm-hi BMI-31 | 0.6 |
| 135766_psoas-AA.M.Norm-hi BMI-25 | 1.3 |
| 142746_psoas-AA.M.Norm-med BMI-37 | 38.2 |
| 142745_psoas-HI.M.Norm-med BMI-35 | 15.7 |
| 137855_psoas-AA.M.Norm-med BMI-47 | 0.9 |
| 137844_psoas-CC.M.Norm-med BMI-26 | 0.5 |
| 142742_psoas-CC.M.Norm-low BMI-40 | 29.9 |
| 137873_psoas-AS.M.Norm-low BMI-28 | 0.6 |
| 137853_psoas-HI.M.Norm-low BMI-41 | 0.9 |
| 135775_psoas-CC.M.Norm-low BMI-39 | 0.5 |
| 137858_diaphragm-AA.M.Diab.-hi BMI-6 | 1.6 |
| 135772_diaphragm-AS.M.Diab-hi BMI-9 | 2.1 |
| 135761_diaphragm-HI.M.Diab.-hi BMI-21 | 5.9 |
| 134828_diaphragm-CC.M.Diab.-hi BMI-4 | 1.1 |
| 137835_diaphragm-CC.M.Diab.-med BMI-2 | 1.6 |
| 135764_diaphragm-HI.M.Diab.-med BMI-23 | 1.8 |
| 134835_diaphragm-AA.M.Diab.-low BMI-17 | 1.8 |
| 142738_diaphragm-CC.M.Norm-hi BMI-29 | 2.1 |
| 139517_diaphragm-AS.M.Norm-hi BMI-34 | 3.3 |
| 137848_diaphragm-HI.M.Norm-hi BMI-31 | 0.9 |
| 137843_diaphragm-AA.M.Norm-hi BMI-25 | 1.7 |
| 137879_diaphragm-AA.M.Norm-med BMI-47 | 1.7 |
| 137872_diaphragm-CC.M.Norm-med BMI-26 | 1.2 |
| 135773_diaphragm-HI.M.Norm-med BMI-35 | 51.1 |
| 139542_diaphragm-HI.M.Norm-low BMI-41 | 1.9 |
| 137877_diaphragm-CC.M.Norm-low BMI-39 | 1.2 |
| 137874_diaphragm-AS.M.Norm-low BMI-28 | 0.9 |
| 141340_subQadipose-AA.M.Diab.-hi BMI-6 | 15.8 |
| 137836_subQadipose-HI.M.Diab.-hi BMI-21 | 2.1 |
| 135771_subQadipose-AS.M.Diab-hi BMI-9 | 4.0 |
| 141329_subQadipose-AA.M.Diab-medbmi-8 | 3.1 |
| 137862_subQadipose-CC.M.Diab.-med BMI-1 | 3.8 |
| 135762_subQadipose-HI.M.Diab.-med BMI-23 | 1.1 |
| 141338_subQadipose-AS.M.Diab.-low BMI-20 | 1.4 |
| 139547_subQadipose-HI.M.Diab.-low BMI-22 | 4.4 |
| 135757_subQadipose-CC.M.Diab.-low BMI-13 | 2.4 |
| 134832_subQadipose-AA.M.Diab.-low BMI-17 | 2.8 |
| 141332_subQadipose-HI.M.Norm-hi BMI-31 | 4.0 |
| 135767_subQadipose-CC.M.Norm-hi BMI-29 | 0.4 |
| 135765_subQadipose-AS.M.Norm-hi BMI-34 | 0.9 |
| 141339_subQadipose-HI.M.Norm-med BMI-35 | 6.0 |
| 141334_subQadipose-CC.M.Norm-med BMI-26 | 1.5 |
| 139544_subQadipose-AA.M.Norm-med BMI-47 | 3.3 |
| 137875_subQadipose-AA.M.Norm-med BMI-37 | 1.9 |
| 141331_subQadipose-AS.M.Norm-low BMI-28 | 2.1 |
| 137878_subQadipose-HI.M.Norm-low BMI-41 | 2.2 |
| 137876_subQadipose-CC.M.Norm-low BMI-39 | 2.1 |
| 137859_vis.adipose-AA.M.Diab.-hi BMI-6 | 0.7 |
| 135770_vis.adipose-AS.M.Diab-hi BMI-9 | 5.6 |
| 135759_vis.adipose-HI.M.Diab.-hi BMI-21 | 0.9 |
| 143502_vis.adipose-CC.M.Diab.-med BMI-2 | 9.8 |
| 139510_vis.adipose-AA.M.Diab.-med BMI-8 | 1.4 |
| 137861_vis.adipose-CC.M.Diab.-med-1 | 2.2 |
| 137839_vis.adipose-HI.M.Diab.-med BMI-23 | 1.5 |
| 139546_vis.adipose-HI.M.Diab.-low BMI-22 | 7.3 |
| 137831_vis.adipose-CC.M.Diab.-low BMI-13 | 1.6 |
| 139522_vis.adipose-HI.M.Norm-hi BMI-31 | 2.7 |
| 139516_vis.adipose-AS.M.Norm-hi BMI-34 | 33.9 |
| 137846_vis.adipose-CC.M.Norm-hi BMI-29 | 0.2 |
| 137841_vis.adipose-AA.M.Norm-hi BMI-25 | 0.7 |
| 139543_vis.adipose-AA.M.Norm-med BMI-47 | 20.2 |
| 139532_vis.adipose-AA.M.Norm-med BMI-37 | 2.2 |
| 139530_vis.adipose-HI.M.Norm-med BMI-35 | 1.5 |
| 139539_vis.adipose-HI.M.Norm-low BMI-41 | 2.0 |
| 139535_vis.adipose-CC.M.Norm-low BMI-40 | 13.1 |
| 137852_vis.adipose-CC.M.Norm-low BMI-39 | 2.8 |
| 135768_vis.adipose-AS.M.Norm-low BMI-28 | 0.5 |
| 141327_liver-CC.M.Diab.-hi BMI-4 | 1.1 |
| 139514_liver-HI.M.Diab.-hi BMI-21 | 2.0 |
| 139526_liver-CC.M.Diab.-med BMI-2 | 2.2 |
| 139511_liver-AA.M.Diab.-med BMI-8 | 2.0 |
| 137840_liver-HI.M.Diab.-med BMI-23 | 1.1 |
| 137827_liver-CC.M.Diab.-med BMI-1 | 0.8 |
| 137838_liver-HI.M.Diab.-low BMI-22 | 0.4 |
| 135758_liver-CC.M.Diab.-low BMI-13 | 0.6 |
| 139519_liver-CC.M.Norm-hi BMI-29 | 1.9 |
| 139518_liver-AA.M.Norm-hi BMI-25 | 1.9 |
| 137849_liver-AS.M.Norm-hi BMI-34 | 1.1 |
| 137847_liver-HI.M.Norm-hi BMI-31 | 0.5 |
| 142741_liver-AA.M.Norm-med BMI-37 | 1.8 |
| 141341_liver-HI.M.Norm-med BMI-35 | 1.1 |
| 141335_liver-CC.M.Norm-med BMI-26 | 1.3 |
| 139540_liver-HI.M.Norm-low BMI-41 | 7.1 |
| 139534_liver-CC.M.Norm-low BMI-39 | 5.8 |
| 139521_liver-AS.M.Norm-low BMI-28 | 0.8 |
| 141328_pancreas-CC.M.Diab.-hi BMI-4 | 28.9 |
| 139525_pancreas-AS.M.Diab.-hi BMI-9 | 5.1 |
| 137856_pancreas-AA.M.Diab.-hi BMI-6 | 0.3 |
| 137837_pancreas-HI.M.Diab.-hi BMI-21 | 1.3 |
| 141337_pancreas-CC.M.Diab.-med BMI-2 | 4.4 |
| 139527_pancreas-CC.M.Diab.-med BMI-1 | 7.9 |
| 139515_pancreas-HI.M.Diab.-med BMI-23 | 27.0 |
| 139512_pancreas-AA.M.Diab.-med BMI-8 | 40.3 |
| 142739_pancreas-AS.M.Diab.-low BMI-20 | 25.9 |
| 139513_pancreas-CC.M.Diab.-low BMI-13 | 16.8 |
| 142743_pancreas-AA.M.Norm-hi BMI-25 | 11.0 |
| 139523_pancreas-HI.M.Norm-hi BMI-31 | 16.7 |
| 139520_pancreas-CC.M.Norm-hi BMI-29 | 27.9 |
| 142744_pancreas-HI.M.Norm-med BMI-35 | 3.4 |
| 139545_pancreas-AA.M.Norm-med BMI-47 | 27.9 |
| 139531_pancreas-AA.M.Norm-med BMI-37 | 8.1 |
| 137871_pancreas-CC.M.Norm-med BMI-26 | 1.3 |
| 139541_pancreas-Hi.M.Norm-low BMI-41 | 16.5 |
| 139537_pancreas-CC.M.Norm-low BMI-40 | 14.7 |
| 139533_pancreas-CC.M.Norm-low BMI-39 | 2.8 |
| 137845_pancreas-AS.M.Norm-low BMI-28 | 0.9 |
| 143530_small intestine-AA.M.Diab.-hi BMI-6 | 7.7 |
| 143529_small intestine-CC.M.Diab.-hi BMI-4 | 35.1 |
| 143538_small intestine-HI.M.Diab.-med BMI-23 | 55.1 |
| 143531_small intestine-AA.M.Diab.-med BMI-8 | 44.1 |
| 143528_small intestine-CC.M.Diab.-med BMI-2 | 28.7 |
| 143537_small intestine-HI.M.Diab.-low BMI-22 | 17.6 |
| 143535_small intestine-AS.M.Diab.-low BMI-20 | 16.7 |
| 143534_small intestine-AA.M.Diab.-low BMI-17 | 0.8 |
| 143544_small intestine-AS.M.Norm-hi BMI-34 | 16.8 |
| 143543_small intestine-HI.M.Norm-hi BMI-31 | 3.7 |
| 143542_small intestine-CC.M.Norm-hi BMI-29 | 10.3 |
| 143539_small intestine-AA.M.Norm-hi BMI-25 | 31.9 |
| 143548_small intestine-AA.M.Norm-med BMI-47 | 0.0 |
| 143547_small intestine-AA.M.Norm-med BMI-37 | 24.5 |
| 143540_small intestine-CC.M.Norm-med BMI-26 | 3.9 |
| 143550_small intestine-CC.M.Norm-low BMI-40 | 1.4 |
| 143549_small intestine-CC.M.Norm-low BMI-39 | 24.0 |
| 143546_small intestine-HI.M.Norm-low BMI-41 | 4.7 |
| 143525_hypothalamus-HI.M.Diab.-hi BMI-21 | 22.8 |
| 143515_hypothalamus-CC.M.Diab.-hi BMI-4 | 8.4 |
| 143513_hypothalamus-AA.M.Diab.-hi BMI-6 | 1.5 |
| 143507_hypothalamus-AS.M.Diab.-hi BMI-9 | 1.8 |
| 143506_hypothalamus-CC.M.Diab.-med BMI-1 | 3.9 |
| 143505_hypothalamus-HI.M.Diab.-med BMI-23 | 31.0 |
| 143509_hypothalamus-AA.M.Diab.-low BMI-17 | 2.6 |
| 143508_hypothalamus-CC.M.Diab.-low BMI-13 | 2.4 |
| 143503_hypothalamus-AS.M.Diab.-low BMI-20 | 2.7 |
| 143522_hypothalamus-HI.M.Norm-hi BMI-31 | 1.5 |
| 143516_hypothalamus-AS.M.Norm-hi BMI-34 | 1.1 |
| 143511_hypothalamus-CC.M.Norm-hi BMI-29 | 2.4 |
| 143504_hypothalamus-AA.M.Norm-hi BMI-25 | 1.6 |
| 143517_hypothalamus-AA.M.Norm-med BMI-47 | 12.9 |
| 143514_hypothalamus-HI.M.Norm-med BMI-35 | 1.0 |
| 143521_hypothalamus-AS.M.Norm-low BMI-28 | 11.0 |
| 143512_hypothalamus-CC.M.Norm-low BMI-40 | 10.3 |
| 145454_Patient-25pl (CC.Diab.low BMI.no insulin) | 29.1 |
| 110916_Patient-18pl (HI.Diab.obese.no insulin) | 11.5 |
| 110913_Patient-18go (HI.Diab.obese.no insulin) | 15.7 |
| 110911_Patient-17pl (CC.Diab.low BMI.no insulin) | 6.7 |
| 110908_Patient-17go (CC.Diab.low BMI.no insulin) | 14.0 |
| 100752_Patient-15sk (CC.Diab.obese.no insulin) | 5.9 |
| 97828_Patient-13pl (CC.Diab.overwt.no insulin) | 16.6 |
| 160114_Patient 27-ut (CC.Diab.obese.insulin) | 34.4 |
| 160113_Patient 27-pl (CC.Diab.obese.insulin) | 20.2 |
| 160112_Patient 27-sk (CC.Diab.obese.insulin) | 2.9 |
| 160111_Patient 27-go (CC.Diab.obese.insulin) | 11.7 |
| 145461_Patient-26sk (CC.Diab.obese.insulin) | 4.8 |
| 145441_Patient-22sk (CC.Diab.low BMI.insulin) | 3.3 |
| 145438_Patient-22pl (CC.Diab.low BMI.insulin) | 30.6 |
| 145427_Patient-20pl (CC.Diab.overwt.insulin) | 46.7 |
| 97503_Patient-12pl (CC.Diab.unknown | 2.2 |
| BMI.insulin) | |
| 145443_Patient-23pl (CC.Non-diab.overwt) | 34.9 |
| 145435_Patient-21pl (CC.Non-diab.overwt) | 42.0 |
| 110921_Patient-19pl (CC.Non-diab.low BMI) | 16.3 |
| 110918_Patient-19go (CC.Non-diab.low BMI) | 8.5 |
| 97481_Patient-08sk (CC.Non-diab.obese) | 10.4 |
| 97478_Patient-07pl (CC.Non-diab.obese) | 9.2 |
| 160117_Human Islets-male, obese | 0.9 |
| 145474_PANC1 (pancreas carcinoma) 1 | 1.5 |
| 154911_Capan2 (pancreas adenocarcinoma) | 1.2 |
| 141190_SW579 (thyroid carcinoma) | 25.3 |
| 145489_SK-N-MC (neuroblastoma) 1 | 75.8 |
| 145495_SK-N-SH (neuroblastoma) 1 | 34.4 |
| 145498_U87 MG (glioblastoma) 2 | 1.4 |
| 145484_HEp-2 (larynx carcinoma) 1 | 2.6 |
| 145479_A549 (lung carcinoma) | 3.3 |
| 145488_A427 (lung carcinoma) 2 | 2.4 |
| 145472_FHs 738Lu (normal lung) 1 | 59.0 |
| 141187_SKW6.4 (B lymphocytes) | 0.5 |
| 154644_IM-9 (immunoglobulin secreting | 0.3 |
| lymphoblast) | |
| 154645_MOLT-4 (acute lymphoblastic leukemia | 1.3 |
| derived from peripheral blood) | |
| 154648_U-937 (histiocystic lymphoma) | 100.0 |
| 154647_Daudi (Burkitt's lymphoma) | 0.6 |
| 145494_SK-MEL-2 (melanoma) 2 | 11.7 |
| 141176_A375 (melanoma) | 2.9 |
| 154642_SW 1353 (humerus chondrosarcoma) | 13.8 |
| 141179_HT-1080 (fibrosarcoma) | 4.3 |
| 145491_MG-63 (osteosarcoma) 1 | 35.4 |
| 141186_MCF7 (breast carcinoma) | 5.3 |
| 141193_T47D (breast carcinoma) | 1.9 |
| 154641_BT-20 (breast carcinoma) | 0.8 |
| 141175_293 (kidney transformed with adenovirus | 1.3 |
| 5 DNA) | |
| 141182_HUH hepatoma 1 | 2.4 |
| 141184_HUH7 hepatoma 1 | 3.2 |
| 145478_HT1376 (bladder carcinoma) | 0.3 |
| 145481_SCaBER (bladder carcinoma) | 1.0 |
| 141192_SW620 (lymph node metastatsis, colon | 1.8 |
| carcinoma) 2 | |
| 141180_HT29 (colon carcinoma) 1 | 0.5 |
| 141188_SW480 (colon carcinoma) 1 | 0.9 |
| 154646_CAOV-3 (ovary adenocarcinoma) | 1.0 |
| 141194_HeLa (cervix carcinoma)- 2 | 2.2 |
| 145482_HeLa S3 (cervix carcinoma) 1 | 1.4 |
| 145486_DU145 (prostate carcinoma) | 1.1 |
| 154643_PC-3 (prostate adenocarcinoma) | 2.0 |
| 154649_HCT-8 (ileocecal adenocarcinoma) | 5.9 |

Column A - Rel. Exp. (%) Ag1402, Run 390904156

[0970] TABLE ID
Panel 1.2

| Tissue Name | A | B |
|---|---|---|
| Endothelial cells | 15.3 | 15.8 |
| Heart (Fetal) | 45.4 | 33.9 |
| Pancreas | 1.3 | 0.5 |
| Pancreatic ca. CAPAN 2 | 0.2 | 0.5 |
| Adrenal Gland | 22.2 | 17.7 |
| Thyroid | 1.5 | 0.5 |
| Salivary gland | 12.0 | 10.4 |
| Pituitary gland | 1.7 | 2.5 |
| Brain (fetal) | 0.2 | 0.3 |
| Brain (whole) | 1.3 | 1.6 |
| Brain (amygdala) | 3.0 | 3.0 |
| Brain (cerebellum) | 2.8 | 0.8 |
| Brain (hippocampus) | 9.5 | 9.5 |
| Brain (thalamus) | 5.8 | 5.6 |
| Cerebral Cortex | 15.4 | 12.3 |
| Spinal cord | 1.5 | 1.1 |
| glio/astro U87-MG | 1.2 | 1.4 |
| glio/astro U-118-MG | 6.7 | 7.7 |
| astrocytoma SW1783 | 1.8 | 2.3 |
| neuro*; met SK-N-AS | 32.1 | 18.9 |
| astrocytoma SF-539 | 43.5 | 30.4 |
| astrocytoma SNB-75 | 2.9 | 2.7 |
| glioma SNB-19 | 1.7 | 1.1 |
| glioma U251 | 7.0 | 5.8 |
| glioma SF-295 | 24.8 | 19.5 |
| Heart | 100.0 | 100.0 |
| Skeletal Muscle | 19.6 | 16.4 |
| Bone marrow | 1.7 | 2.2 |
| Thymus | 1.6 | 0.9 |
| Spleen | 10.2 | 7.6 |
| Lymph node | 1.4 | 1.3 |
| Colorectal Tissue | 1.6 | 4.2 |
| Stomach | 5.1 | 4.7 |
| Small intestine | 40.1 | 35.6 |
| Colon ca. SW480 | 1.2 | 0.5 |
| Colon ca.* SW620 (SW480 met) | 3.1 | 2.0 |
| Colon ca. HT29 | 0.2 | 0.2 |
| Colon ca. HCT-116 | 5.6 | 3.0 |
| Colon ca. CaCo-2 | 1.7 | 0.9 |
| Colon ca. Tissue (ODO3866) | 2.2 | 2.3 |
| Colon ca. HCC-2998 | 8.7 | 4.6 |
| Gastric ca.* (liver met) NCI-N87 | 1.2 | 1.3 |
| Bladder | 20.9 | 18.6 |
| Trachea | 1.4 | 0.8 |
| Kidney | 27.5 | 30.6 |
| Kidney (fetal) | 46.3 | 13.7 |
| Renal ca. 786-0 | 0.5 | 0.4 |
| Renal ca. A498 | 1.6 | 1.4 |
| Renal ca. RXF 393 | 2.5 | 2.3 |
| Renal ca. ACHN | 1.7 | 2.1 |
| Renal ca. UO-31 | 1.6 | 1.1 |
| Renal ca. TK-10 | 3.3 | 3.3 |
| Liver | 13.2 | 12.2 |
| Liver (fetal) | 8.3 | 6.2 |
| Liver ca. (hepatoblast) HepG2 | 2.5 | 0.8 |
| Lung | 1.5 | 1.4 |
| Lung (fetal) | 12.2 | 5.4 |
| Lung ca. (small cell) LX-1 | 3.3 | 1.9 |
| Lung ca. (small cell) NCI-H69 | 3.2 | 2.7 |
| Lung ca. (s. cell var.) SHP-77 | 0.9 | 0.5 |
| Lung ca. (large cell)NCI-H460 | 2.8 | 2.1 |
| Lung ca. (non-sm. cell) A549 | 3.1 | 1.5 |
| Lung ca. (non-s. cell) NCI-H23 | 2.3 | 3.4 |
| Lung ca. (non-s. cell) HOP-62 | 5.3 | 11.7 |
| Lung ca. (non-s. cl) NCI-H522 | 11.3 | 9.3 |
| Lung ca. (squam.) SW 900 | 1.2 | 1.1 |
| Lung ca. (squam.) NCI-H596 | 2.0 | 2.0 |
| Mammary gland | 4.2 | 29.5 |
| Breast ca.* (pl. ef) MCF-7 | 0.6 | 0.7 |
| Breast ca.* (pl. ef) MDA-MB-231 | 0.3 | 0.2 |
| Breast ca.* (pl. ef) T47D | 3.5 | 2.5 |
| Breast ca. BT-549 | 0.4 | 0.4 |
| Breast ca. MDA-N | 12.2 | 14.2 |
| Ovary | 79.6 | 54.3 |
| Ovarian ca. OVCAR-3 | 1.0 | 0.8 |
| Ovarian ca. OVCAR-4 | 1.8 | 0.0 |
| Ovarian ca. OVCAR-5 | 7.6 | 4.5 |
| Ovarian ca. OVCAR-8 | 20.4 | 12.2 |
| Ovarian ca. IGROV-1 | 1.4 | 1.1 |
| Ovarian ca. (ascites) SK-OV-3 | 14.4 | 11.2 |
| Uterus | 34.4 | 19.6 |
| Placenta | 6.7 | 4.8 |
| Prostate | 70.2 | 74.2 |
| Prostate ca.* (bone met) PC-3 | 7.9 | 8.5 |
| Testis | 1.2 | 0.6 |
| Melanoma Hs688(A).T | 15.8 | 15.3 |
| Melanoma* (met) Hs688(B).T | 33.0 | 26.6 |
| Melanoma UACC-62 | 9.9 | 8.8 |
| Melanoma M14 | 3.3 | 2.9 |
| Melanoma LOX IMVI | 0.8 | 1.0 |
| Melanoma* (met) SK-MEL-5 | 5.8 | 6.1 |

Column A - Rel. Exp. (%) Ag1402, Run 138249713
Column B - Rel. Exp. (%) Ag1402, Run 138253129

[0971] TABLE IE
Panel 2.2

| Tissue Name | A |
|---|---|
| Normal Colon | 29.9 |
| Colon cancer (OD06064) | 41.2 |
| Colon Margin (OD06064) | 34.2 |
| Colon cancer (OD06159) | 2.6 |
| Colon Margin (OD06159) | 30.1 |
| Colon cancer (OD06297-04) | 7.0 |
| Colon Margin (OD06297-05) | 36.6 |
| CC Gr.2 ascend colon (ODO3921) | 7.2 |
| CC Margin (ODO3921) | 8.7 |
| Colon cancer metastasis (OD06104) | 2.7 |
| Lung Margin (OD06104) | 14.3 |
| Colon mets to lung (OD04451-01) | 1.8 |
| Lung Margin (OD04451-02) | 17.6 |
| Normal Prostate | 86.5 |
| Prostate Cancer (OD04410) | 12.4 |
| Prostate Margin (OD04410) | 32.3 |
| Normal Ovary | 74.7 |
| Ovarian cancer (OD06283-03) | 8.5 |
| Ovarian Margin (OD06283-07) | 34.4 |
| Ovarian Cancer 064008 | 17.3 |
| Ovarian cancer (OD06145) | 17.3 |
| Ovarian Margin (OD06145) | 25.0 |
| Ovarian cancer (OD06455-03) | 6.4 |
| Ovarian Margin (OD06455-07) | 100.0 |
| Normal Lung | 18.9 |
| Invasive poor diff. lung adeno (ODO4945-01 | 7.7 |
| Lung Margin (ODO4945-03) | 20.3 |
| Lung Malignant Cancer (OD03126) | 8.8 |
| Lung Margin (OD03126) | 7.7 |
| Lung Cancer (OD05014A) | 8.8 |
| Lung Margin (OD05014B) | 29.1 |
| Lung cancer (OD06081) | 11.1 |
| Lung Margin (OD06081) | 6.5 |
| Lung Cancer (OD04237-01) | 8.7 |
| Lung Margin (OD04237-02) | 27.7 |
| Ocular Melanoma Metastasis | 3.1 |
| Ocular Melanoma Margin (Liver) | 9.3 |
| Melanoma Metastasis | 10.3 |
| Melanoma Margin (Lung) | 18.2 |
| Normal Kidney | 10.6 |
| Kidney Ca, Nuclear grade 2 (OD04338) | 24.5 |
| Kidney Margin (OD04338) | 4.9 |
| Kidney Ca Nuclear grade 1/2 (OD04339) | 5.2 |
| Kidney Margin (OD04339) | 10.7 |
| Kidney Ca, Clear cell type (OD04340) | 12.9 |
| Kidney Margin (OD04340) | 10.1 |
| Kidney Ca, Nuclear grade 3 (OD04348) | 14.6 |
| Kidney Margin (OD04348) | 32.3 |
| Kidney malignant cancer (OD06204B) | 2.2 |
| Kidney normal adjacent tissue (OD06204E) | 9.1 |
| Kidney Cancer (OD04450-01) | 2.9 |
| Kidney Margin (OD04450-03) | 7.8 |
| Kidney Cancer 8120613 | 1.2 |
| Kidney Margin 8120614 | 9.5 |
| Kidney Cancer 9010320 | 5.8 |
| Kidney Margin 9010321 | 3.7 |
| Kidney Cancer 8120607 | 16.6 |
| Kidney Margin 8120608 | 6.0 |
| Normal Uterus | 88.9 |
| Uterine Cancer 064011 | 14.3 |
| Normal Thyroid | 7.6 |
| Thyroid Cancer 064010 | 2.2 |
| Thyroid Cancer A302152 | 11.6 |
| Thyroid Margin A302153 | 3.9 |
| Normal Breast | 95.3 |
| Breast Cancer (OD04566) | 4.0 |
| Breast Cancer 1024 | 58.6 |
| Breast Cancer (OD04590-01) | 19.3 |
| Breast Cancer Mets (OD04590-03) | 22.7 |
| Breast Cancer Metastasis (OD04655-05) | 12.1 |
| Breast Cancer 064006 | 16.8 |
| Breast Cancer 9100266 | 13.9 |
| Breast Margin 9100265 | 51.4 |
| Breast Cancer A209073 | 13.8 |
| Breast Margin A2090734 | 42.0 |
| Breast cancer (OD06083) | 26.6 |
| Breast cancer node metastasis (OD06083) | 39.5 |
| Normal Liver | 16.4 |
| Liver Cancer 1026 | 11.6 |
| Liver Cancer 1025 | 13.4 |
| Liver Cancer 6004-T | 11.3 |
| Liver Tissue 6004-N | 11.8 |
| Liver Cancer 6005-T | 28.5 |
| Liver Tissue 6005-N | 23.2 |
| Liver Cancer 064003 | 4.3 |
| Normal Bladder | 12.3 |
| Bladder Cancer 1023 | 16.5 |
| Bladder Cancer A302173 | 8.9 |
| Normal Stomach | 47.0 |
| Gastric Cancer 9060397 | 5.8 |
| Stomach Margin 9060396 | 17.6 |
| Gastric Cancer 9060395 | 19.1 |
| Stomach Margin 9060394 | 50.0 |
| Gastric Cancer 064005 | 8.4 |

Column A - Rel. Exp. (%) Ag1402, Run 173860059

[0972] TABLE IF
Panel 3D

| Tissue Name | A |
|---|---|
| Daoy- Medulloblastoma | 1.9 |
| TE671- Medulloblastoma | 8.0 |
| D283 Med- Medulloblastoma | 13.0 |
| PFSK-1- Primitive Neuroectodermal | 61.1 |
| XF-498- CNS | 16.0 |
| SNB-78- Glioma | 81.8 |
| SF-268- Glioblastoma | 4.5 |
| T98G- Glioblastoma | 16.3 |
| SK-N-SH- Neuroblastoma (metastasis) | 39.2 |
| SF-295- Glioblastoma | 5.3 |
| Cerebellum | 7.7 |
| Cerebellum | 13.4 |
| NCI-H292- Mucoepidermoid lung carcinoma | 2.1 |
| DMS-114- Small cell lung cancer | 31.2 |
| DMS-79- Small cell lung cancer | 31.9 |
| NCI-H146- Small cell lung cancer | 3.1 |
| NCI-H526- Small cell lung cancer | 9.5 |
| NCI-N417- Small cell lung cancer | 0.2 |
| NCI-H82- Small cell lung cancer | 3.7 |
| NCI-H157- Squamous cell lung cancer (metastasis) | 1.4 |
| NCI-H1155- Large cell lung cancer | 9.2 |
| NCI-H1299- Large cell lung cancer | 1.5 |
| NCI-H727- Lung carcinoid | 1.5 |
| NCI-UMC-11- Lung carcinoid | 2.0 |
| LX-1- Small cell lung cancer | 1.5 |
| Colo-205- Colon cancer | 0.9 |
| KM12- Colon cancer | 0.9 |
| KM20L2- Colon cancer | 0.5 |
| NCI-H716- Colon cancer | 5.6 |
| SW-48- Colon adenocarcinoma | 0.3 |
| SW1116- Colon adenocarcinoma | 5.3 |
| LS 174T- Colon adenocarcinoma | 1.1 |
| SW-948- Colon adenocarcinoma | 0.0 |
| SW-480- Colon adenocarcinoma | 0.4 |
| NCI-SNU-5- Gastric carcinoma | 0.8 |
| KATO III- Gastric carcinoma | 2.4 |
| NCI-SNU-16- Gastric carcinoma | 0.2 |
| NCI-SNU-1- Gastric carcinoma | 1.6 |
| RF-1- Gastric adenocarcinoma | 0.5 |
| RF-48- Gastric adenocarcinoma | 0.9 |
| MKN-45- Gastric carcinoma | 0.7 |
| NCI-N87- Gastric carcinoma | 0.9 |
| OVCAR-5- Ovarian carcinoma | 1.7 |
| RL95-2- Uterine carcinoma | 6.7 |
| HelaS3- Cervical adenocarcinoma | 3.3 |
| Ca Ski- Cervical epidermoid carcinoma (metastasis) | 1.9 |
| ES-2- Ovarian clear cell carcinoma | 3.2 |
| Ramos- Stimulated with PMA/ionomycin 6 h | 0.8 |
| Ramos- Stimulated with PMA/ionomycin 14 h | 0.6 |
| MEG-01- Chronic myelogenous leukemia | 1.0 |
| (megokaryoblast) | |
| Raji- Burkitt's lymphoma | 0.1 |
| Daudi- Burkitt's lymphoma | 1.0 |
| U266- B-cell plasmacytoma | 1.0 |
| CA46- Burkitt's lymphoma | 2.0 |
| RL- non-Hodgkin's B-cell lymphoma | 0.2 |
| JM1- pre-B-cell lymphoma | 2.6 |
| Jurkat- T cell leukemia | 5.1 |
| TF-1- Erythroleukemia | 1.0 |
| HUT 78- T-cell lymphoma | 3.6 |
| U937- Histiocytic lymphoma | 100.0 |
| KU-812- Myelogenous leukemia | 1.5 |
| 769-P- Clear cell renal carcinoma | 0.7 |
| Caki-2- Clear cell renal carcinoma | 0.9 |
| SW 839- Clear cell renal carcinoma | 0.5 |
| Rhabdoid kidney tumor | 34.9 |
| Hs766T- Pancreatic carcinoma (LN metastasis) | 0.9 |
| CAPAN-1- Pancreatic adenocarcinoma (liver | 5.5 |
| metastasis) | |
| SU86.86- Pancreatic carcinoma (liver metastasis) | 1.7 |
| BxPC-3- Pancreatic adenocarcinoma | 0.8 |
| HPAC- Pancreatic adenocarcinoma | 0.2 |
| MIA PaCa-2- Pancreatic carcinoma | 0.0 |
| CFPAC-1- Pancreatic ductal adenocarcinoma | 2.1 |
| PANC-1- Pancreatic epithelioid ductal carcinoma | 0.7 |
| T24- Bladder carcinma (transitional cell) | 1.1 |
| 5637- Bladder carcinoma | 0.9 |
| HT-1197- Bladder carcinoma | 0.6 |
| UM-UC-3- Bladder carcinma (transitional cell) | 0.6 |
| A204- Rhabdomyosarcoma | 12.3 |
| HT-1080- Fibrosarcoma | 7.3 |
| MG-63- Osteosarcoma | 11.9 |
| SK-LMS-1- Leiomyosarcoma (vulva) | 5.0 |
| SJRH30- Rhabdomyosarcoma (met to bone marrow) | 2.3 |
| A431- Epidermoid carcinoma | 1.3 |
| WM266-4- Melanoma | 8.7 |
| DU 145- Prostate carcinoma (brain metastasis) | 0.0 |
| MDA-MB-468- Breast adenocarcinoma | 1.8 |
| SCC-4- Squamous cell carcinoma of tongue | 0.0 |
| SCC-9- Squamous cell carcinoma of tongue | 0.3 |
| SCC-15- Squamous cell carcinoma of tongue | 0.1 |
| CAL 27- Squamous cell carcinoma of tongue | 0.7 |

Column A - Rel. Exp. (%) Ag1402, Run 182113343

[0973] TABLE IG
Panel 4D

| Tissue Name | A | B |
|---|---|---|
| Secondary Th1 act | 0.5 | 1.0 |
| Secondary Th2 act | 0.2 | 0.4 |
| Secondary Tr1 act | 0.9 | 0.6 |
| Secondary Th1 rest | 0.3 | 0.1 |
| Secondary Th2 rest | 0.4 | 0.2 |
| Secondary Tr1 rest | 0.3 | 0.2 |
| Primary Th1 act | 1.1 | 0.8 |
| Primary Th2 act | 0.9 | 0.8 |
| Primary Tr1 act | 1.9 | 1.4 |
| Primary Th1 rest | 1.6 | 1.1 |
| Primary Th2 rest | 0.7 | 0.5 |
| Primary Tr1 rest | 1.6 | 1.2 |
| CD45RA CD4 lymphocyte act | 16.7 | 13.4 |
| CD45RO CD4 lymphocyte act | 0.5 | 0.3 |
| CD8 lymphocyte act | 0.4 | 0.3 |
| Secondary CD8 lymphocyte rest | 0.5 | 0.4 |
| Secondary CD8 lymphocyte act | 0.6 | 0.3 |
| CD4 lymphocyte none | 0.5 | 0.4 |
| 2ry Th1/Th2/Tr1_anti-CD95 CH11 | 0.6 | 0.3 |
| LAK cells rest | 0.4 | 0.4 |
| LAK cells IL-2 | 0.5 | 0.4 |
| LAK cells IL-2 + IL-12 | 0.7 | 0.5 |
| LAK cells IL-2 + IFN gamma | 0.9 | 0.5 |
| LAK cells IL-2 + IL-18 | 0.5 | 0.3 |
| LAK cells PMA/ionomycin | 0.1 | 0.1 |
| NK Cells IL-2 rest | 0.6 | 0.5 |
| Two Way MLR 3 day | 0.5 | 0.3 |
| Two Way MLR 5 day | 0.4 | 0.2 |
| Two Way MLR 7 day | 0.3 | 0.3 |
| PBMC rest | 0.9 | 0.6 |
| PBMC PWM | 1.5 | 1.2 |
| PBMC PHA-L | 2.1 | 1.5 |
| Ramos (B cell) none | 0.6 | 1.0 |
| Ramos (B cell) ionomycin | 1.1 | 0.9 |
| B lymphocytes PWM | 1.0 | 0.7 |
| B lymphocytes CD40L and IL-4 | 0.5 | 0.3 |
| EOL-1 dbcAMP | 7.0 | 6.6 |
| EOL-1 dbcAMP PMA/ionomycin | 1.0 | 0.7 |
| Dendritic cells none | 1.0 | 0.5 |
| Dendritic cells LPS | 0.1 | 0.1 |
| Dendritic cells anti-CD40 | 0.5 | 0.9 |
| Monocytes rest | 3.7 | 2.5 |
| Monocytes LPS | 4.4 | 3.7 |
| Macrophages rest | 0.2 | 0.3 |
| Macrophages LPS | 0.3 | 0.2 |
| HUVEC none | 7.6 | 5.5 |
| HUVEC starved | 13.4 | 12.4 |
| HUVEC IL-1beta | 2.6 | 2.2 |
| HUVEC IFN gamma | 20.3 | 18.2 |
| HUVEC TNF alpha + IFN gamma | 1.5 | 1.1 |
| HUVEC TNF alpha + IL4 | 2.4 | 2.4 |
| HUVEC IL-11 | 14.0 | 12.5 |
| Lung Microvascular EC none | 14.0 | 12.0 |
| Lung Microvascular EC TNFalpha + IL-1beta | 7.0 | 7.2 |
| Microvascular Dermal EC none | 39.2 | 40.1 |
| Microsvasular Dermal EC TNFalpha + IL-1beta | 14.4 | 12.4 |
| Bronchial epithelium TNFalpha + IL1beta | 0.5 | 0.5 |
| Small airway epithelium none | 2.1 | 1.5 |
| Small airway epithelium TNFalpha + IL-1beta | 0.2 | 0.3 |
| Coronery artery SMC rest | 18.7 | 17.9 |
| Coronery artery SMC TNFalpha + IL-1beta | 17.4 | 13.6 |
| Astrocytes rest | 0.5 | 0.3 |
| Astrocytes TNFalpha + IL-1beta | 0.6 | 0.6 |
| KU-812 (Basophil) rest | 0.6 | 0.4 |
| KU-812 (Basophil) PMA/ionomycin | 1.0 | 0.6 |
| CCD1106 (Keratinocytes) none | 0.1 | 0.2 |
| CCD1106 (Keratinocytes) TNFalpha + IL-1beta | 0.6 | 0.2 |
| Liver cirrhosis | 4.9 | 5.7 |
| Lupus kidney | 5.3 | 4.9 |
| NCI-H292 none | 0.6 | 0.7 |
| NCI-H292 IL-4 | 0.4 | 0.7 |
| NCI-H292 IL-9 | 1.1 | 0.7 |
| NCI-H292 IL-13 | 0.6 | 0.5 |
| NCI-H292 IFN gamma | 0.7 | 0.5 |
| HPAEC none | 12.0 | 11.7 |
| HPAEC TNF alpha + IL-1 beta | 6.2 | 5.1 |
| Lung fibroblast none | 64.6 | 66.0 |
| Lung fibroblast TNF alpha + IL-1 beta | 26.6 | 24.7 |
| Lung fibroblast IL-4 | 64.6 | 66.9 |
| Lung fibroblast IL-9 | 51.4 | 42.9 |
| Lung fibroblast IL-13 | 100.0 | 100.0 |
| Lung fibroblast IFN gamma | 84.1 | 82.4 |
| Dermal fibroblast CCD1070 rest | 71.2 | 60.7 |
| Dermal fibroblast CCD1070 TNF alpha | 41.8 | 39.0 |
| Dermal fibroblast CCD1070 IL-1 beta | 45.7 | 43.8 |
| Dermal fibroblast IFN gamma | 25.3 | 19.5 |
| Dermal fibroblast IL-4 | 45.7 | 42.0 |
| IBD Colitis 2 | 1.2 | 1.1 |
| IBD Crohn's | 2.0 | 1.6 |
| Colon | 8.4 | 8.2 |
| Lung | 29.9 | 23.7 |
| Thymus | 11.3 | 10.8 |
| Kidney | 7.1 | 5.2 |

Column A - Rel. Exp. (%) Ag1402, Run 139531667
Column B - Rel. Exp. (%) Ag1402, Run 145633378

[0974] TABLE IH
Panel 5 Islet

| Tissue Name | A |
|---|---|
| 97457_Patient-02go_adipose | 32.5 |
| 97476_Patient-07sk_skeletal muscle | 23.2 |
| 97477_Patient-07ut_uterus | 27.0 |
| 97478_Patient-07pl_placenta | 62.9 |
| 99167_Bayer Patient 1 | 6.9 |
| 97482_Patient-08ut_uterus | 45.1 |
| 97483_Patient-08pl_placenta | 55.9 |
| 97486_Patient-09sk_skeletal muscle | 6.4 |
| 97487_Patient-09ut_uterus | 68.8 |
| 97488_Patient-09pl_placenta | 42.0 |
| 97492_Patient-10ut_uterus | 100.0 |
| 97493_Patient-10pl_placenta | 51.4 |
| 97495_Patient-11go_adipose | 21.2 |
| 97496_Patient-11sk_skeletal muscle | 11.7 |
| 97497_Patient-11ut_uterus | 61.1 |
| 97498_Patient-11pl_placenta | 22.7 |
| 97500_Patient-12go_adipose | 40.6 |
| 97501_Patient-12sk_skeletal muscle | 22.2 |
| 97502_Patient-12ut_uterus | 73.2 |
| 97503_Patient-12pl_placenta | 22.8 |
| 94721_Donor 2 U - A_MesenchymalStem Cells | 51.8 |
| 94722_Donor 2 U - B_Mesenchymal Stem Cells | 40.9 |
| 94723_Donor 2 U - C_Mesenchymal Stem Cells | 37.9 |
| 94709_Donor 2 AM - A_adipose | 35.8 |
| 94710_Donor 2 AM - B_adipose | 23.3 |
| 94711_Donor 2 AM - C_adipose | 17.1 |
| 94712_Donor 2 AD - A_adipose | 49.3 |
| 94713_Donor 2 AD - B_adipose | 69.3 |
| 94714_Donor 2 AD - C_adipose | 66.9 |
| 94742_Donor 3 U - A_Mesenchymal Stem Cells | 17.0 |
| 94743_Donor 3 U - B_Mesenchymal Stem Cells | 23.5 |
| 94730_Donor 3 AM - A_adipose | 26.2 |
| 94731_Donor 3 AM - B_adipose | 16.2 |
| 94732_Donor 3 AM - C_adipose | 19.9 |
| 94733_Donor 3 AD - A_adipose | 34.4 |
| 94734_Donor 3 AD - B_adipose | 25.9 |
| 94735_Donor 3 AD - C_adipose | 34.2 |
| 77138_Liver_HepG2untreated | 19.5 |
| 73556_Heart_Cardiac stromal cells (primary) | 25.2 |
| 81735_Small Intestine | 20.6 |
| 72409_Kidney_Proximal Convoluted Tubule | 0.6 |
| 82685_Small intestine_Duodenum | 5.3 |
| 90650_Adrenal_Adrenocortical adenoma | 0.2 |
| 72410_Kidney_HRCE | 0.7 |
| 72411_Kidney_HRE | 1.8 |
| 73139_Uterus_Uterine smooth muscle cells | 45.1 |

Column A - Rel. Exp. (%) Ag1402, Run 258861208

[0975] HASS Panel v1.0 Summary: Ag1402 Highest expression of this gene was detected in primary melanocytes A5 sample (CT=27). This gene showed wide spread expression in this panel with significant expression in astrocytes, glioma and the cancer cell lines subjected to serum starvation, acidosis and anoxia for different time periods. This expression pattern demonstrates that this gene or its protein product is important for cell survival and proliferation.

[0976] Human Metabolic Summary: Ag1402 Highest expression of this gene was detected in histiocystic lymphoma cell line(CT=23.6). This gene showed a ubiquitous expression with high expression in cancer cell lines, and metabolic tissues. Please see panel 1.2 for further discussion on the utility of this gene.

[0977] Panel 1.2 Summary: Ag1402 This gene was expressed at highest levels in heart (CT=22-23), prostate, and ovarian tissue and was expressed to a lesser degree across a number of samples in Panel 1.2. This gene was expressed largely in normal tissues when compared to cultured cell lines. Expression of this gene is useful for differentiating between heart, prostate and ovarian tissue from other tissues.

[0978] Among other metabolically relevant tissues, this gene was moderately expressed in thyroid, pituitary gland, and pancreas, and was highly expressed in adrenal gland, skeletal muscle and fetal/adult liver. High expression of this gene in insulin-responsive tissues such as skeletal muscle and liver demonstrates that this gene or gene product is an effective drug target for the treatment of Type 2 diabetes. High expression in adrenal gland and heart also shows that this gene or its protein product is an antibody, protein, or small molecule target for the treatment of diseases involving these two tissues.

[0979] This gene encodes a putative leucine-rich-repeat (LRR), GPCR-like protein. In Drosophilia, the LRR region of axon guidance proteins has been shown to be critical for function, especially in axon repulsion (Battye R. J. Neurosci. 21: 4290-4298.). The leucine-rich-repeat protein encoded by this gene showed high expression across all brain regions, with expression detected in amygdala, cerebellum, hippocampus, thalamus, cerebral cortex and spinal cord, making it an excellent candidate neuronal guidance protein for axons, dendrites and/or growth cones in general. Therapeutic modulation of the levels of this gene or protein, or possible signaling via this protein, is of utility in enhancing/directing compensatory synaptogenesis and fiber growth in the CNS in response to neuronal death (stroke, head trauma), axon lesion (spinal cord injury), or neurodegeneration (Alzheimer's, Parkinson's, Huntington's, vascular dementia or any neurodegenerative disease). In addition, the this gene showed very high levels of expression in the substantia nigra, where loss of dopaminergic neurons is a hallmark of Parkinson's disease and progressive supranuclear palsy. Therapies based upon this gene or its protein product are useful in the treatment of these diseases.

[0980] This protein also contains homology to the GPCR family of receptors. Several neurotransmitter receptors are GPCRs, including the dopamine receptor family, the serotonin receptor family, the GABAB receptor, muscarinic acetylcholine receptors, and others; thus this GPCR represents a novel neurotransmitter receptor. Targeting various neurotransmitter receptors (dopamine, serotonin) has proven to be an effective therapy in psychiatric illnesses such as schizophrenia, bipolar disorder and depression. Furthermore the cerebral cortex and hippocampus are regions of the brain that are known to play critical roles in Alzheimer's disease, seizure disorders, and in the normal process of memory formation. Therapeutic modulation of this gene or its protein product is beneficial in one or more of these diseases, as is stimulation and/or blockade of the receptor coded for by the gene. Levels of this gene were high, however, in areas outside of the central nervous system (such as the heart, ovaries, and prostate), demonstrating the possibility of a wider role in intercellular signaling.

[0981] Panel 2.2 Summary: Ag1402 Among the samples on this panel, expression of this gene was highest in a sample of normal ovarian tissue adjacent to an ovarian cancer (CT=28.5). There was also a predominance of this expression pattern in a number of other matched normal tissue samples including lung, colon and kidney. Umatched normal tissue samples, such as breast, uterus, ovary and prostate also showed appreciable expression of this gene. This gene or its protein product are useful in differentiating adjacent normal tissue from corresponding malignant tissue for the above listed tissue types. The therapeutic modulation of the gene or the protein encoded by this gene is of use in the treatment of the above listed malignancies.

[0982] Panel 3D Summary: : Ag1402 Expression of this gene was highest in a sample derived from a histiocytic lymphoma cell line (CT=28.2). This gene was also highly expressed in several CNS cancer cell lines and cell lines derived from a variety of sarcomas. The expression of this gene is useful for the differentiation of cell lines derived from sarcomas and CNS cancers vs. other cell lines. Therapeutic modulation of this gene or gene product is of therapeutic benefit in the treatment of sarcomas or CNS cancers.

[0983] Panel 4D Summary: This gene was highly expressed in endothelium and fibroblasts and was selectively down regulated in these tissues by treatment with IL-1beta and TNFalpha. This gene encodes a putative LRR-containing GPCR that is down regulated in response to the proinflammatory cytokines IL-1beta and TNFalpha in endothelium and fibroblasts. The natural ligand for this GPCR is induced by treatment with TNF and IL-1 and subsequent ligand binding to this putative GPCR results in feedback inhibition. Other signaling pathways induced by TNF and IL-1 reduce the level of transcription of this gene. Antibodies, small molecule or protein therapeutics which prevent the signaling through this putative GPCR are important in the treatment of diseases such as asthma, emphysema, psoriasis, and arthritis.

[0984] Panel 5 Islet Summary: Ag1402 Highest expression of this gene was detected in the uterus of a diabetic patient on insulin (CT=28). This gene showed widespread expression in this panel. This pattern was in agreement with the expression profile in General_screening_panel_v1.2 and demonstrates a role for the gene product in cell survival and proliferation. Please see panel 1.2 for further discussion on the utility of this gene.

[0985] J. CG51027-06: Optoid Binding Protein/Cell Adhesion Molecule Precursor

[0986] Expression of full-length physical clone CG51027-06 was assessed using the primer-probe set Ag6959, described in Table JA. Results of the RTQ-PCR runs are shown in Table JB.

TABLE JA

Probe Name Ag6959

| | | | | |
|---|---|---|---|---|
| | | | Start | SEQ ID |
| Primers | Sequences | Length | Position | No |

| | | | | |
|---|---|---|---|---|
| Forward | 5′-gtctacctcattgtccacgt-3′ | 20 | 420 | 1294 |
| Probe | TET-5′-ctcgtcgcctgtgatggtgaatga-3′- | 24 | 461 | 1295 |
| | TAMRA | | | |
| Reverse | 5′-caaagcaggttcacattgc-3′ | 19 | 490 | 1296 |

[0987] TABLE JB
General_screening_panel_v1.6

| Tissue Name | A |
|---|---|
| Adipose | 0.2 |
| Melanoma* Hs688(A).T | 0.0 |
| Melanoma* Hs688(B).T | 0.1 |
| Melanoma* M14 | 0.1 |
| Melanoma* LOXIMVI | 0.0 |
| Melanoma* SK-MEL-5 | 0.3 |
| Squamous cell carcinoma SCC-4 | 0.0 |
| Testis Pool | 5.8 |
| Prostate ca.* (bone met) PC-3 | 0.0 |
| Prostate Pool | 0.2 |
| Placenta | 0.0 |
| Uterus Pool | 0.0 |
| Ovarian ca. OVCAR-3 | 0.2 |
| Ovarian ca. SK-OV-3 | 0.0 |
| Ovarian ca. OVCAR-4 | 0.0 |
| Ovarian ca. OVCAR-5 | 0.0 |
| Ovarian ca. IGROV-1 | 0.0 |
| Ovarian ca. OVCAR-8 | 0.4 |
| Ovary | 4.5 |
| Breast ca. MCF-7 | 0.0 |
| Breast ca. MDA-MB-231 | 0.0 |
| Breast ca. BT 549 | 0.1 |
| Breast ca. T47D | 0.0 |
| Breast ca. MDA-N | 0.0 |
| Breast Pool | 0.3 |
| Trachea | 0.1 |
| Lung | 0.0 |
| Fetal Lung | 1.6 |
| Lung ca. NCI-N417 | 0.0 |
| Lung ca. LX-1 | 0.0 |
| Lung ca. NCI-H146 | 0.0 |
| Lung ca. SHP-77 | 1.3 |
| Lung ca. A549 | 0.0 |
| Lung ca. NCI-H526 | 0.0 |
| Lung ca. NCI-H23 | 25.0 |
| Lung ca. NCI-H460 | 0.0 |
| Lung ca. HOP-62 | 0.1 |
| Lung ca. NCI-H522 | 21.5 |
| Liver | 0.3 |
| Fetal Liver | 1.0 |
| Liver ca. HepG2 | 0.0 |
| Kidney Pool | 0.1 |
| Fetal Kidney | 2.3 |
| Renal ca. 786-0 | 0.0 |
| Renal ca. A498 | 0.0 |
| Renal ca. ACHN | 0.0 |
| Renal ca. UO-31 | 0.1 |
| Renal ca. TK-10 | 0.0 |
| Bladder | 0.2 |
| Gastric ca. (liver met.) NCI-N87 | 0.0 |
| Gastric ca. KATO III | 0.0 |
| Colon ca. SW-948 | 0.0 |
| Colon ca. SW480 | 0.0 |
| Colon ca.* (SW480 met) SW620 | 0.0 |
| Colon ca. HT29 | 0.0 |
| Colon ca. HCT-116 | 0.0 |
| Colon ca. CaCo-2 | 0.0 |
| Colon cancer tissue | 0.6 |
| Colon ca. SW1116 | 0.0 |
| Colon ca. Colo-205 | 0.0 |
| Colon ca. SW-48 | 0.0 |
| Colon Pool | 0.2 |
| Small Intestine Pool | 0.2 |
| Stomach Pool | 0.2 |
| Bone Marrow Pool | 0.0 |
| Fetal Heart | 0.2 |
| Heart Pool | 0.0 |
| Lymph Node Pool | 0.0 |
| Fetal Skeletal Muscle | 0.0 |
| Skeletal Muscle Pool | 0.0 |
| Spleen Pool | 0.2 |
| Thymus Pool | 0.0 |
| CNS cancer (glio/astro) U87-MG | 0.0 |
| CNS cancer (glio/astro) U-118-MG | 0.0 |
| CNS cancer (neuro; met) SK-N-AS | 3.8 |
| CNS cancer (astro) SF-539 | 0.0 |
| CNS cancer (astro) SNB-75 | 0.0 |
| CNS cancer (glio) SNB-19 | 0.0 |
| CNS cancer (glio) SF-295 | 0.1 |
| Brain (Amygdala) Pool | 9.3 |
| Brain (cerebellum) | 100.0 |
| Brain (fetal) | 61.1 |
| Brain (Hippocampus) Pool | 9.2 |
| Cerebral Cortex Pool | 25.9 |
| Brain (Substantia nigra) Pool | 18.0 |
| Brain (Thalamus) Pool | 16.3 |
| Brain (whole) | 22.8 |
| Spinal Cord Pool | 18.3 |
| Adrenal Gland | 0.9 |
| Pituitary gland Pool | 0.6 |
| Salivary Gland | 0.0 |
| Thyroid (female) | 0.0 |
| Pancreatic ca. CAPAN2 | 0.0 |
| Pancreas Pool | 0.0 |

Column A - Rel. Exp. (%) Ag6959, Run 278388920

[0988] General_screeningpanel_v1.6 Summary: Ag6959 Highest expression of this gene was detected in cerebellum (CT=28.6). This gene showed a highly brain-preferential expression, and was expressed at moderate levels in all brain regions examined. This gene codes for a homolog of rat opioid-binding cell adhesion molecule (OBCAM), which is involved in axonal outgrowth (Hachisuka A, Brain Res Dev Brain Res 122(2):183-91) and may be involved in the synaptic machinery. The limited ability of the CNS to regenerate after injury is the major impediment to the treatment of stroke, spinal cord and head trauma, and neurodegenerative diseases. Modulation of this gene, expressed protein and/or use of antibodies or small molecule drug targeting this gene or gene product is useful in enhancing neuroregeneration in any or all of these clinical conditions.

[0989] Moderate expression of this gene was also seen in two lung cancer cell line. Expression of this gene is useful as marker to detect the presence of lung cancer and modulation of this gene or expressed protein is useful in the treatment of lung cancer.

[0990] K. CG51027-09: Optiod Bindin Protein/Cell Adhesion Molecule Precursor

[0991] Expression of gene CG51027-09 was assessed using the primer-probe sets Ag3090 and Ag3092, described in Tables KA and KB. Results of the RTQ-PCR runs are shown in Tables KC and KD.

TABLE KA

Probe Name Ag3090

| | | | | |
|---|---|---|---|---|
| | | | Start | SEQ ID |
| Primers | Sequences | Length | Position | No |

| | | | | |
|---|---|---|---|---|
| Forward | 5′-atgacagactgctgagcagc-3′ | 20 | 241 | 1297 |
| Probe | TET-5′-aaggcctgaaggtgcagacggag-3′- | 23 | 208 | 1298 |
| | TAMRA | | | |
| Reverse | 5′-cgttggcaaagagaagcat-3′ | 19 | 177 | 1299 |

[0992] TABLE KB
Probe Name Ag3092

| | | | | |
|---|---|---|---|---|
| | | | Start | SEQ ID |
| Primers | Sequences | Length | Position | No |

| | | | | |
|---|---|---|---|---|
| Forward | 5′-atgacagactgctgagcagc-3′ | 20 | 241 | 1300 |
| Probe | TET-5′-aaggcctgaaggtgcagacggag-3′- | 23 | 208 | 1301 |
| | TAMRA | | | |
| Reverse | 5′-cgttggcaaagagaagcat-3′ | 19 | 177 | 1302 |

[0993] TABLE KC
Panel 1.3D

| Tissue Name | A | B |
|---|---|---|
| Liver adenocarcinoma | 0.3 | 0.0 |
| Pancreas | 0.0 | 0.0 |
| Pancreatic ca. CAPAN 2 | 0.0 | 0.0 |
| Adrenal gland | 1.5 | 0.0 |
| Thyroid | 0.0 | 0.0 |
| Salivary gland | 0.0 | 0.0 |
| Pituitary gland | 3.4 | 0.2 |
| Brain (fetal) | 100.0 | 53.6 |
| Brain (whole) | 29.5 | 51.8 |
| Brain (amygdala) | 31.9 | 51.1 |
| Brain (cerebellum) | 94.0 | 71.7 |
| Brain (hippocampus) | 41.2 | 91.4 |
| Brain (substantia nigra) | 27.0 | 24.7 |
| Brain (thalamus) | 20.3 | 100.0 |
| Cerebral Cortex | 89.5 | 37.4 |
| Spinal cord | 16.4 | 7.9 |
| glio/astro U87-MG | 0.0 | 0.0 |
| glio/astro U-118-MG | 0.0 | 0.0 |
| astrocytoma SW1783 | 0.0 | 0.0 |
| neuro*; met SK-N-AS | 2.2 | 3.2 |
| astrocytoma SF-539 | 0.0 | 0.0 |
| astrocytoma SNB-75 | 1.4 | 0.0 |
| glioma SNB-19 | 0.0 | 0.2 |
| glioma U251 | 0.8 | 0.0 |
| glioma SF-295 | 0.0 | 0.1 |
| Heart (fetal) | 0.0 | 0.1 |
| Heart | 0.0 | 0.0 |
| Skeletal muscle (fetal) | 0.0 | 5.2 |
| Skeletal muscle | 0.2 | 0.0 |
| Bone marrow | 0.0 | 0.0 |
| Thymus | 0.0 | 1.6 |
| Spleen | 0.3 | 1.6 |
| Lymph node | 0.0 | 0.0 |
| Colorectal | 1.7 | 0.1 |
| Stomach | 0.0 | 0.0 |
| Small intestine | 0.5 | 0.0 |
| Colon ca. SW480 | 0.0 | 0.0 |
| Colon ca.* SW620(SW480 met) | 0.4 | 0.0 |
| Colon ca. HT29 | 0.5 | 0.1 |
| Colon ca. HCT-116 | 0.0 | 0.2 |
| Colon ca. CaCo-2 | 0.5 | 0.0 |
| Colon ca. tissue(ODO3866) | 5.8 | 0.9 |
| Colon ca. HCC-2998 | 0.7 | 1.0 |
| Gastric ca.* (liver met) NCI-N87 | 0.3 | 0.0 |
| Bladder | 0.0 | 0.0 |
| Trachea | 0.0 | 0.0 |
| Kidney | 0.0 | 0.0 |
| Kidney (fetal) | 13.3 | 4.4 |
| Renal ca. 786-0 | 0.2 | 0.0 |
| Renal ca. A498 | 0.0 | 0.1 |
| Renal ca. RXF 393 | 0.1 | 0.0 |
| Renal ca. ACHN | 0.0 | 0.0 |
| Renal ca. UO-31 | 0.0 | 0.0 |
| Renal ca. TK-10 | 0.5 | 0.0 |
| Liver | 0.0 | 0.8 |
| Liver (fetal) | 1.2 | 0.0 |
| Liver ca. (hepatoblast) HepG2 | 21.2 | 5.4 |
| Lung | 0.0 | 0.0 |
| Lung (fetal) | 1.8 | 2.1 |
| Lung ca. (small cell) LX-1 | 0.0 | 0.0 |
| Lung ca. (small cell) NCI-H69 | 0.2 | 0.0 |
| Lung ca. (s. cell var.) SHP-77 | 1.6 | 0.0 |
| Lung ca. (large cell)NCI-H460 | 0.0 | 2.0 |
| Lung ca. (non-sm. cell) A549 | 0.8 | 0.0 |
| Lung ca. (non-s. cell) NCI-H23 | 21.3 | 10.2 |
| Lung ca. (non-s. cell) HOP-62 | 0.0 | 0.0 |
| Lung ca. (non-s. cl) NCI-H522 | 27.0 | 3.7 |
| Lung ca. (squam.) SW 900 | 0.0 | 0.1 |
| Lung ca. (squam.) NCI-H596 | 0.0 | 0.0 |
| Mammary gland | 0.0 | 0.0 |
| Breast ca.* (pl. ef) MCF-7 | 0.0 | 0.0 |
| Breast ca.* (pl. ef) MDA-MB-231 | 0.5 | 0.0 |
| Breast ca.* (pl. ef) T47D | 0.0 | 0.0 |
| Breast ca. BT-549 | 0.0 | 0.1 |
| Breast ca. MDA-N | 0.4 | 0.0 |
| Ovary | 9.0 | 2.0 |
| Ovarian ca. OVCAR-3 | 0.0 | 0.0 |
| Ovarian ca. OVCAR-4 | 1.1 | 0.0 |
| Ovarian ca. OVCAR-5 | 0.4 | 0.0 |
| Ovarian ca. OVCAR-8 | 0.5 | 0.4 |
| Ovarian ca. IGROV-1 | 0.0 | 0.1 |
| Ovarian ca.* (ascites) SK-OV-3 | 0.0 | 2.6 |
| Uterus | 0.0 | 0.0 |
| Placenta | 0.0 | 0.0 |
| Prostate | 0.0 | 0.3 |
| Prostate ca.* (bone met)PC-3 | 0.2 | 0.1 |
| Testis | 5.9 | 15.0 |
| Melanoma Hs688(A).T | 0.0 | 0.0 |
| Melanoma* (met) Hs688(B).T | 0.0 | 0.0 |
| Melanoma UACC-62 | 0.0 | 0.1 |
| Melanoma M14 | 0.0 | 0.1 |
| Melanoma LOX IMVI | 0.0 | 0.0 |
| Melanoma* (met) SK-MEL-5 | 0.0 | 0.0 |
| Adipose | 3.1 | 0.8 |

Column A - Rel. Exp. (%) Ag3090, Run 167985244
Column B - Rel. Exp. (%) Ag3092, Run 165673593

[0994] TABLE KD
Panel 4D

| Tissue Name | A | B |
|---|---|---|
| Secondary Th1 act | 0.0 | 0.0 |
| Secondary Th2 act | 0.1 | 100.0 |
| Secondary Tr1 act | 0.1 | 0.0 |
| Secondary Th1 rest | 0.0 | 0.0 |
| Secondary Th2 rest | 0.0 | 0.0 |
| Secondary Tr1 rest | 0.0 | 0.0 |
| Primary Th1 act | 0.0 | 6.2 |
| Primary Th2 act | 0.0 | 0.0 |
| Primary Tr1 act | 0.0 | 0.0 |
| Primary Th1 rest | 0.0 | 0.0 |
| Primary Th2 rest | 0.0 | 0.0 |
| Primary Tr1 rest | 0.0 | 0.0 |
| CD45RA CD4 lymphocyte act | 0.0 | 2.9 |
| CD45RO CD4 lymphocyte act | 0.0 | 5.3 |
| CD8 lymphocyte act | 0.0 | 0.0 |
| Secondary CD8 lymphocyte rest | 0.0 | 0.0 |
| Secondary CD8 lymphocyte act | 0.0 | 0.0 |
| CD4 lymphocyte none | 0.0 | 0.0 |
| 2ry Th1/Th2/Tr1_anti-CD95 CH11 | 0.0 | 14.2 |
| LAK cells rest | 0.0 | 0.0 |
| LAK cells IL-2 | 0.0 | 0.0 |
| LAK cells IL-2 + IL-12 | 0.1 | 0.0 |
| LAK cells IL-2 + IFN gamma | 0.0 | 15.2 |
| LAK cells IL-2 + IL-18 | 0.0 | 0.0 |
| LAK cells PMA/ionomycin | 100.0 | 3.6 |
| NK Cells IL-2 rest | 0.0 | 0.0 |
| Two Way MLR 3 day | 0.0 | 0.0 |
| Two Way MLR 5 day | 0.0 | 0.0 |
| Two Way MLR 7 day | 0.0 | 14.6 |
| PBMC rest | 0.0 | 4.2 |
| PBMC PWM | 0.3 | 14.2 |
| PBMC PHA-L | 0.5 | 37.1 |
| Ramos (B cell) none | 0.1 | 0.0 |
| Ramos (B cell) ionomycin | 0.0 | 0.0 |
| B lymphocytes PWM | 0.2 | 2.6 |
| B lymphocytes CD40L and IL-4 | 0.0 | 0.0 |
| EOL-1 dbcAMP | 0.0 | 0.0 |
| EOL-1 dbcAMP PMA/ionomycin | 0.5 | 37.9 |
| Dendritic cells none | 0.0 | 0.0 |
| Dendritic cells LPS | 0.0 | 17.3 |
| Dendritic cells anti-CD40 | 0.0 | 0.0 |
| Monocytes rest | 0.0 | 0.0 |
| Monocytes LPS | 0.0 | 0.0 |
| Macrophages rest | 0.0 | 0.0 |
| Macrophages LPS | 0.0 | 5.0 |
| HUVEC none | 0.0 | 0.0 |
| HUVEC starved | 0.0 | 0.0 |
| HUVEC IL-1beta | 0.0 | 0.0 |
| HUVEC IFN gamma | 0.0 | 0.0 |
| HUVEC TNF alpha + IFN gamma | 0.0 | 0.0 |
| HUVEC TNF alpha + IL4 | 0.0 | 0.0 |
| HUVEC IL-11 | 0.0 | 0.0 |
| Lung Microvascular EC none | 0.0 | 0.0 |
| Lung Microvascular EC TNFalpha + IL-1beta | 0.0 | 4.9 |
| Microvascular Dermal EC none | 0.0 | 0.0 |
| Microsvasular Dermal EC TNFalpha + IL-1beta | 0.0 | 0.0 |
| Bronchial epithelium TNFalpha + IL1beta | 0.0 | 0.0 |
| Small airway epithelium none | 0.0 | 0.0 |
| Small airway epithelium TNFalpha + IL-1beta | 0.0 | 0.0 |
| Coronery artery SMC rest | 0.1 | 24.7 |
| Coronery artery SMC TNFalpha + IL-1beta | 0.0 | 0.0 |
| Astrocytes rest | 0.0 | 0.0 |
| Astrocytes TNFalpha + IL-1 beta | 0.0 | 0.0 |
| KU-812 (Basophil) rest | 0.0 | 25.9 |
| KU-812 (Basophil) PMA/ionomycin | 0.1 | 23.3 |
| CCD1106 (Keratinocytes) none | 0.0 | 0.0 |
| CCD1106 (Keratinocytes) TNFalpha + IL-1beta | 0.0 | 0.0 |
| Liver cirrhosis | 0.6 | 25.3 |
| Lupus kidney | 0.0 | 0.0 |
| NCI-H292 none | 0.0 | 0.0 |
| NCI-H292 IL-4 | 0.0 | 0.0 |
| NCI-H292 IL-9 | 0.0 | 0.0 |
| NCI-H292 IL-13 | 0.0 | 0.0 |
| NCI-H292 IFN gamma | 0.0 | 0.0 |
| HPAEC none | 0.0 | 0.0 |
| HPAEC TNF alpha + IL-1 beta | 0.0 | 2.2 |
| Lung fibroblast none | 0.0 | 0.0 |
| Lung fibroblast TNF alpha + IL-1 beta | 0.0 | 0.0 |
| Lung fibroblast IL-4 | 0.0 | 0.0 |
| Lung fibroblast IL-9 | 0.0 | 0.0 |
| Lung fibroblast IL-13 | 0.0 | 0.0 |
| Lung fibroblast IFN gamma | 0.0 | 0.0 |
| Dermal fibroblast CCD1070 rest | 0.0 | 0.0 |
| Dermal fibroblast CCD1070 TNF alpha | 0.0 | 0.0 |
| Dermal fibroblast CCD1070 IL-1 beta | 0.1 | 0.0 |
| Dermal fibroblast IFN gamma | 0.0 | 0.0 |
| Dermal fibroblast IL-4 | 0.1 | 0.0 |
| IBD Colitis 2 | 0.0 | 0.0 |
| IBD Crohn's | 0.0 | 0.0 |
| Colon | 0.5 | 52.1 |
| Lung | 0.3 | 58.2 |
| Thymus | 0.0 | 0.0 |
| Kidney | 0.0 | 0.0 |

Column A - Rel. Exp. (%) Ag3090, Run 164391872
Column B - Rel. Exp. (%) Ag3092, Run 164399701

[0995] Panel 1.3D Summary: Ag3090/Ag3092 Highest expression of this gene was detected in regions of the brain, specifically the thalamus and fetal brain (CTS=29-30). This gene showed a highly brain-preferential expression, and was expressed at high levels in all brain regions examined. The protein encoded by this gene is a homolog of opioid-binding cell adhesion molecule (OBCAM), which is involved in axonal outgrowth and in the synaptic machinery. The limited ability of the CNS to regenerate after injury is the major impediment to the treatment of stroke, spinal cord and head trauma, and neurodegenerative diseases. Selective modulation of this gene or its protein product is useful in enhancing neuroregeneration in any or all of these clinical conditions.

[0996] Panel 4D Sumnary: Ag3092 Expression of this gene was limited to a sample derived from secondary Th2 cells (CT=34.2). Therapeutic modulation of this gene or expressed protein is useful in reducing or eliminating the symptoms in patients with diseases related to the functions of Th2 cells, including asthma and allergies.

[0997] L. CG51373-08 and CG51373-10 and CG51373-11: Weakly Similar to Neural Cell Adhesion Molecule 1, Large Isoform Precursor

[0998] Expression of full-length physical clone CG51373-08 and variants CG51373-10 and CG51373-11 was assessed using the primer-probe sets Ag271 and Ag271b, described in Tables LA and LB. Results of the RTQ-PCR runs are shown in Tables LC, LD, LE, LF and LG.

TABLE LA

Probe Name Ag271

| | | | | |
|---|---|---|---|---|
| | | | Start | SEQ ID |
| Primers | Sequences | Length | Position | No |

| | | | | |
|---|---|---|---|---|
| Forward | 5′-acctggacatagggcgtgtct-3′ | 21 | 690 | 1303 |
| Probe | TET-5′-cgaagcatgaacgaagccatccctag-3′- | 26 | 656 | 1304 |
| | TAMRA | | | |
| Reverse | 5′-tcgatggaagtctccttgcc-3′ | 20 | 635 | 1305 |

[0999] TABLE LB

Probe Name Ag271b

| | | | | |
|---|---|---|---|---|
| | | | Start | SEQ ID |
| Primers | Sequences | Length | Position | No |

| | | | | |
|---|---|---|---|---|
| Forward | 5′-caccgtgagccaactgcttat-3′ | 21 | 1722 | 1306 |
| Probe | TET-5′-agacacgccctatgtccaggtccg-3′- | 24 | 1690 | 1307 |
| | TAMRA | | | |
| Reverse | 5′-ttcgttcatgcttcggcaa-3′ | 19 | 1667 | 1308 |

[1000] TABLE LC
General_screening_panel_v1.4

| Tissue Name | A | B |
|---|---|---|
| Adipose | 6.4 | 6.4 |
| Melanoma* Hs688(A).T | 29.7 | 28.1 |
| Melanoma* Hs688(B).T | 26.4 | 25.7 |
| Melanoma* M14 | 49.0 | 48.0 |
| Melanoma* LOXIMVI | 28.7 | 31.2 |
| Melanoma* SK-MEL-5 | 9.4 | 11.7 |
| Squamous cell carcinoma SCC-4 | 5.0 | 5.4 |
| Testis Pool | 1.8 | 1.6 |
| Prostate ca.* (bone met) PC-3 | 19.8 | 22.4 |
| Prostate Pool | 2.0 | 2.4 |
| Placenta | 4.5 | 7.7 |
| Uterus Pool | 2.3 | 2.7 |
| Ovarian ca. OVCAR-3 | 45.1 | 54.3 |
| Ovarian ca. SK-OV-3 | 88.9 | 87.1 |
| Ovarian ca. OVCAR-4 | 15.9 | 17.7 |
| Ovarian ca. OVCAR-5 | 29.9 | 29.1 |
| Ovarian ca. IGROV-1 | 54.0 | 50.3 |
| Ovarian ca. OVCAR-8 | 29.9 | 36.9 |
| Ovary | 11.0 | 10.4 |
| Breast ca. MCF-7 | 0.0 | 0.0 |
| Breast ca. MDA-MB-231 | 0.0 | 29.7 |
| Breast ca. BT 549 | 88.3 | 100.0 |
| Breast ca. T47D | 53.2 | 60.3 |
| Breast ca. MDA-N | 13.6 | 17.2 |
| Breast Pool | 7.6 | 9.7 |
| Trachea | 3.5 | 4.7 |
| Lung | 1.1 | 1.8 |
| Fetal Lung | 14.0 | 18.7 |
| Lung ca. NCI-N417 | 3.3 | 2.9 |
| Lung ca. LX-1 | 1.5 | 2.2 |
| Lung ca. NCI-H146 | 0.0 | 0.0 |
| Lung ca. SHP-77 | 0.1 | 0.2 |
| Lung ca. A549 | 8.0 | 9.7 |
| Lung ca. NCI-H526 | 0.9 | 0.6 |
| Lung ca. NCI-H23 | 9.0 | 10.4 |
| Lung ca. NCI-H460 | 15.0 | 19.3 |
| Lung ca. HOP-62 | 15.4 | 20.91 |
| Lung ca. NCI-H522 | 1.8 | 2.0 |
| Liver | 0.2 | 0.2 |
| Fetal Liver | 1.8 | 2.4 |
| Liver ca. HepG2 | 0.0 | 0.0 |
| Kidney Pool | 7.6 | 12.9 |
| Fetal Kidney | 10.2 | 13.8 |
| Renal ca. 786-0 | 62.9 | 77.9 |
| Renal ca. A498 | 21.8 | 22.4 |
| Renal ca. ACHN | 45.4 | 49.3 |
| Renal ca. UO-31 | 37.6 | 32.1 |
| Renal ca. TK-10 | 36.6 | 37.4 |
| Bladder | 4.0 | 6.9 |
| Gastric ca. (liver met.) NCI-N87 | 1.8 | 2.7 |
| Gastric ca. KATO III | 0.0 | 0.0 |
| Colon ca. SW-948 | 4.0 | 4.2 |
| Colon ca. SW480 | 7.5 | 9.1 |
| Colon ca.* (SW480 met) SW620 | 2.7 | 3.2 |
| Colon ca. HT29 | 1.3 | 2.3 |
| Colon ca. HCT-116 | 7.0 | 8.3 |
| Colon ca. CaCo-2 | 13.2 | 17.6 |
| Colon cancer tissue | 6.3 | 6.7 |
| Colon ca. SW1116 | 0.1 | 0.0 |
| Colon ca. Colo-205 | 0.0 | 0.0 |
| Colon ca. SW-48 | 0.5 | 0.5 |
| Colon Pool | 5.9 | 5.6 |
| Small Intestine Pool | 4.2 | 4.1 |
| Stomach Pool | 5.4 | 5.7 |
| Bone Marrow Pool | 3.0 | 3.6 |
| Fetal Heart | 1.7 | 1.7 |
| Heart Pool | 3.1 | 3.1 |
| Lymph Node Pool | 6.8 | 10.5 |
| Fetal Skeletal Muscle | 2.4 | 2.1 |
| Skeletal Muscle Pool | 1.6 | 1.4 |
| Spleen Pool | 2.9 | 3.5 |
| Thymus Pool | 5.6 | 5.8 |
| CMS cancer (glio/astro) U87-MG | 25.0 | 31.0 |
| CNS cancer (glio/astro) U-118-MG | 47.3 | 56.6 |
| CNS cancer (neuro; met) SK-N-AS | 18.8 | 23.2 |
| CNS cancer (astro) SF-539 | 36.9 | 44.8 |
| CNS cancer (astro) SNB-75 | 100.0 | 100.0 |
| CNS cancer (glio) SNB-19 | 28.7 | 57.4 |
| CNS cancer (glio) SF-295 | 64.6 | 79.6 |
| Brain (Amygdala) Pool | 0.4 | 0.3 |
| Brain (cerebellum) | 1.2 | 1.3 |
| Brain (fetal) | 6.9 | 9.0 |
| Brain (Hippocampus) Pool | 0.8 | 0.6 |
| Cerebral Cortex Pool | 0.5 | 0.5 |
| Brain (Substantia nigra) Pool | 0.6 | 0.8 |
| Brain (Thalamus) Pool | 0.9 | 0.8 |
| Brain (whole) | 1.0 | 1.1 |
| Spinal Cord Pool | 0.8 | 0.7 |
| Adrenal Gland | 6.5 | 5.7 |
| Pituitary gland Pool | 0.4 | 0.4 |
| Salivary Gland | 1.5 | 1.4 |
| Thyroid (female) | 1.8 | 1.8 |
| Pancreatic ca. CAPAN2 | 24.8 | 23.2 |
| Pancreas Pool | 7.7 | 9.0 |

Column A - Rel. Exp. (%) Ag271, Run 216607738
Column B - Rel. Exp. (%) Ag271b, Run 216607756

[1001] TABLE LD
Panel 1

| Tissue Name | A | B | C |
|---|---|---|---|
| Endothelial cells | 11.0 | 5.0 | 3.9 |
| Endothelial cells (treated) | 3.8 | 4.3 | 4.9 |
| Pancreas | 2.7 | 3.1 | 1.9 |
| Pancreatic ca. CAPAN 2 | 38.2 | 24.0 | 19.8 |
| Adrenal gland | 14.1 | 8.2 | 12.7 |
| Thyroid | 8.6 | 6.1 | 4.5 |
| Salivary gland | 3.5 | 4.1 | 3.3 |
| Pituitary gland | 9.5 | 10.2 | 7.3 |
| Brain (fetal) | 7.4 | 9.0 | 5.3 |
| Brain (whole) | 0.8 | 3.7 | 1.3 |
| Brain (amygdala) | 0.1 | 1.7 | 1.7 |
| Brain (cerebellum) | 4.8 | 10.5 | 2.3 |
| Brain (hippocampus) | 0.2 | 1.2 | 1.4 |
| Brain (substantia nigra) | 0.9 | 3.5 | 2.1 |
| Brain (thalamus) | 0.7 | 2.7 | 3.2 |
| Brain (hypothalamus) | 0.5 | 3.4 | 3.3 |
| Spinal cord | 2.1 | 4.0 | 3.6 |
| glio/astro U87-MG | 30.8 | 24.0 | 27.4 |
| glio/astro U-118-MG | 28.5 | 24.8 | 20.0 |
| astrocytoma SW1783 | 21.0 | 17.1 | 17.0 |
| neuro*; met SK-N-AS | 24.1 | 17.6 | 29.9 |
| astrocytoma SF-539 | 35.6 | 27.4 | 41.2 |
| astrocytoma SNB-75 | 56.3 | 65.1 | 32.8 |
| glioma SNB-19 | 42.6 | 53.6 | 55.9 |
| glioma U251 | 39.8 | 26.8 | 48.3 |
| glioma SF-295 | 43.2 | 33.4 | 31.9 |
| Heart | 15.2 | 4.5 | 6.8 |
| Skeletal muscle | 0.1 | 1.9 | 4.6 |
| Bone marrow | 1.1 | 1.7 | 2.1 |
| Thymus | 28.1 | 18.9 | 10.2 |
| Spleen | 2.5 | 5.1 | 3.2 |
| Lymph node | 6.8 | 6.0 | 2.0 |
| Colon (ascending) | 3.4 | 3.2 | 2.6 |
| Stomach | 11.6 | 12.0 | 3.3 |
| Small intestine | 5.9 | 8.7 | 5.5 |
| Colon ca. SW480 | 0.0 | 1.8 | 5.2 |
| Colon ca.* SW620 (SW480 met) | 1.5 | 2.4 | 3.3 |
| Colon ca. HT29 | 0.1 | 1.7 | 3.2 |
| Colon ca. HCT-116 | 13.0 | 10.4 | 8.9 |
| Colon ca. CaCo-2 | 27.9 | 21.8 | 17.3 |
| Colon ca. HCT-15 | 1.7 | 5.0 | 7.3 |
| Colon ca. HCC-2998 | 0.4 | 1.2 | 2.7 |
| Gastric ca.* (liver met) NCI-N87 | 1.1 | 3.1 | 3.5 |
| Bladder | 30.8 | 15.9 | 19.1 |
| Trachea | 7.2 | 7.0 | 4.5 |
| Kidney | 14.8 | 8.9 | 9.8 |
| Kidney (fetal) | 53.6 | 55.9 | 27.7 |
| Renal ca. 786-0 | 94.6 | 96.6 | 70.2 |
| Renal ca. A498 | 65.5 | 65.5 | 46.3 |
| Renal ca. RXF 393 | 41.8 | 27.7 | 29.1 |
| Renal ca. ACHN | 66.9 | 65.1 | 51.4 |
| Renal ca. UO-31 | 46.0 | 41.8 | 54.0 |
| Renal ca. TK-10 | 57.0 | 56.6 | 52.9 |
| Liver | 2.0 | 3.3 | 4.4 |
| Liver (fetal) | 2.0 | 2.4 | 2.9 |
| Liver ca. (hepatoblast) HepG2 | 0.0 | 0.0 | 0.0 |
| Lung | 27.9 | 8.0 | 5.0 |
| Lung (fetal) | 23.8 | 11.9 | 5.3 |
| Lung ca. (small cell) LX-1 | 0.0 | 1.4 | 3.2 |
| Lung ca. (small cell) NCI-H69 | 2.9 | 4.2 | 8.2 |
| Lung ca. (s. cell var.) SHP-77 | 0.0 | 0.4 | 0.2 |
| Lung ca. (large cell)NCI-H460 | 29.5 | 27.0 | 51.4 |
| Lung ca. (non-sm. cell) A549 | 6.6 | 7.1 | 12.2 |
| Lung ca. (non-s. cell) NCI-H23 | 6.6 | 7.1 | 17.2 |
| Lung ca. (non-s. cell) HOP-62 | 19.1 | 15.8 | 40.9 |
| Lung ca. (non-s. cl) NCI-H522 | 4.3 | 5.4 | 5.0 |
| Lung ca. (squam.) SW 900 | 15.8 | 17.1 | 19.1 |
| Lung ca. (squam.) NCI-H596 | 8.3 | 8.7 | 10.5 |
| Mammary gland | 47.6 | 45.1 | 28.9 |
| Breast ca.* (pl. ef) MCF-7 | 0.0 | 0.0 | 0.0 |
| Breast ca.* (pl. ef) MDA-MB-231 | 17.1 | 15.1 | 18.4 |
| Breast ca.* (pl. ef) T47D | 3.1 | 5.3 | 6.4 |
| Breast ca. BT-549 | 70.7 | 65.1 | 26.1 |
| Breast ca. MDA-N | 43.8 | 25.7 | 35.4 |
| Ovary | 54.0 | 39.5 | 27.9 |
| Ovarian ca. OVCAR-3 | 32.8 | 32.3 | 55.5 |
| Ovarian ca. OVCAR-4 | 39.2 | 33.0 | 46.0 |
| Ovarian ca. OVCAR-5 | 49.3 | 35.6 | 46.7 |
| Ovarian ca. OVCAR-8 | 39.5 | 20.0 | 57.4 |
| Ovarian ca. IGROV-1 | 46.0 | 48.0 | 100.0 |
| Ovarian ca. (ascites) SK-OV-3 | 53.2 | 47.6 | 68.8 |
| Uterus | 36.6 | 9.9 | 9.4 |
| Placenta | 18.2 | 23.8 | 11.7 |
| Prostate | 6.4 | 6.7 | 4.3 |
| Prostate ca.* (bone met) PC-3 | 32.8 | 37.6 | 50.3 |
| Testis | 27.7 | 23.8 | 4.7 |
| Melanoma Hs688(A).T | 21.5 | 23.0 | 13.6 |
| Melanoma* (met) Hs688(B).T | 25.3 | 25.3 | 20.3 |
| Melanoma UACC-62 | 28.1 | 23.0 | 58.2 |
| Melanoma M14 | 34.6 | 36.1 | 22.2 |
| Melanoma LOX IMVI | 100.0 | 100.0 | 12.2 |
| Melanoma* (met) SK-MEL-5 | 12.1 | 10.9 | 14.3 |
| Melanoma SK-MEL-28 | 53.6 | 79.0 | 2.5 |

Column A - Rel. Exp. (%) Ag271, Run 87588589
Column B - Rel. Exp. (%) Ag271, Run 88706798
Column C - Rel. Exp. (%) Ag271b, Run 97805788

[1002] TABLE LE
Panel 2.2

| Tissue Name | A |
|---|---|
| Normal Colon | 13.7 |
| Colon cancer (OD06064) | 45.4 |
| Colon Margin (OD06064) | 6.7 |
| Colon cancer (OD06159) | 1.7 |
| Colon Margin (OD06159) | 7.0 |
| Colon cancer (OD06297-04) | 5.3 |
| Colon Margin (OD06297-05) | 7.4 |
| CC Gr.2 ascend colon (ODO3921) | 10.5 |
| CC Margin (ODO3921) | 13.3 |
| Colon cancer metastasis (OD06104) | 1.8 |
| Lung Margin (OD06104) | 3.0 |
| Colon mets to lung (OD04451-01) | 21.0 |
| Lung Margin (OD04451-02) | 10.0 |
| Normal Prostate | 2.0 |
| Prostate Cancer (OD04410) | 3.9 |
| Prostate Margin (OD04410) | 10.3 |
| Normal Ovary | 78.5 |
| Ovarian cancer (OD06283-03) | 14.3 |
| Ovarian Margin (OD06283-07) | 16.3 |
| Ovarian Cancer 064008 | 41.8 |
| Ovarian cancer (OD06145) | 36.6 |
| Ovarian Margin (OD06145) | 33.7 |
| Ovarian cancer (OD06455-03) | 6.0 |
| Ovarian Margin (OD06455-07) | 18.7 |
| Normal Lung | 20.7 |
| Invasive poor diff. lung adeno (ODO4945-01 | 3.1 |
| Lung Margin (ODO4945-03) | 10.6 |
| Lung Malignant Cancer (OD03126) | 5.8 |
| Lung Margin (OD03126) | 10.4 |
| Lung Cancer (OD05014A) | 6.2 |
| Lung Margin (OD05014B) | 11.5 |
| Lung cancer (OD06081) | 5.3 |
| Lung Margin (OD06081) | 4.1 |
| Lung Cancer (OD04237-01) | 3.2 |
| Lung Margin (OD04237-02) | 37.9 |
| Ocular Melanoma Metastasis | 18.8 |
| Ocular Melanoma Margin (Liver) | 8.3 |
| Melanoma Metastasis | 40.1 |
| Melanoma Margin (Lung) | 13.5 |
| Normal Kidney | 16.0 |
| Kidney Ca, Nuclear grade 2 (OD04338) | 57.0 |
| Kidney Margin (OD04338) | 12.9 |
| Kidney Ca Nuclear grade 1/2 (OD04339) | 73.2 |
| Kidney Margin (OD04339) | 14.2 |
| Kidney Ca, Clear cell type (OD04340) | 20.0 |
| Kidney Margin (OD04340) | 35.1 |
| Kidney Ca, Nuclear grade 3 (OD04348) | 25.0 |
| Kidney Margin (OD04348) | 100.0 |
| Kidney malignant cancer (OD06204B) | 6.1 |
| Kidney normal adjacent tissue (OD06204E) | 12.3 |
| Kidney Cancer (OD04450-01) | 68.8 |
| Kidney Margin (OD04450-03) | 24.0 |
| Kidney Cancer 8120613 | 0.0 |
| Kidney Margin 8120614 | 11.7 |
| Kidney Cancer 9010320 | 15.5 |
| Kidney Margin 9010321 | 16.6 |
| Kidney Cancer 8120607 | 70.7 |
| Kidney Margin 8120608 | 11.4 |
| Normal Uterus | 36.6 |
| Uterine Cancer 064011 | 11.7 |
| Normal Thyroid | 1.6 |
| Thyroid Cancer 064010 | 10.2 |
| Thyroid Cancer A302152 | 9.3 |
| Thyroid Margin A302153 | 4.9 |
| Normal Breast | 31.4 |
| Breast Cancer (OD04566) | 3.1 |
| Breast Cancer 1024 | 0.0 |
| Breast Cancer (OD04590-01) | 10.2 |
| Breast Cancer Mets (OD04590-03) | 19.1 |
| Breast Cancer Metastasis (OD04655-05) | 6.0 |
| Breast Cancer 064006 | 14.2 |
| Breast Cancer 9100266 | 12.5 |
| Breast Margin 9100265 | 11.4 |
| Breast Cancer A209073 | 15.7 |
| Breast Margin A2090734 | 48.6 |
| Breast cancer (OD06083) | 14.3 |
| Breast cancer node metastasis (OD06083) | 15.6 |
| Normal Liver | 4.3 |
| Liver Cancer 1026 | 12.3 |
| Liver Cancer 1025 | 12.5 |
| Liver Cancer 6004-T | 12.4 |
| Liver Tissue 6004-N | 3.0 |
| Liver Cancer 6005-T | 21.0 |
| Liver Tissue 6005-N | 26.2 |
| Liver Cancer 064003 | 2.5 |
| Normal Bladder | 9.7 |
| Bladder Cancer 1023 | 8.4 |
| Bladder Cancer A302173 | 11.0 |
| Normal Stomach | 22.8 |
| Gastric Cancer 9060397 | 9.9 |
| Stomach Margin 9060396 | 6.6 |
| Gastric Cancer 9060395 | 11.8 |
| Stomach Margin 9060394 | 23.7 |
| Gastric Cancer 064005 | 6.1 |

Column A - Rel. Axp. (%) Ag271b, Run 175148876

[1003] TABLE LF
Panel 3D

| Tissue Name | A |
|---|---|
| Daoy- Medulloblastoma | 9.2 |
| TE671- Medulloblastoma | 3.3 |
| D283 Med- Medulloblastoma | 32.1 |
| PFSK-1- Primitive Neuroectodermal | 9.4 |
| XF-498- CNS | 42.3 |
| SNB-78- Glioma | 22.2 |
| SF-268- Glioblastoma | 17.2 |
| T98G- Glioblastoma | 32.3 |
| SK-N-SH- Neuroblastoma (metastasis) | 20.6 |
| SF-295- Glioblastoma | 12.8 |
| Cerebellum | 1.1 |
| Cerebellum | 1.2 |
| NCI-H292- Mucoepidermoid lung carcinoma | 12.6 |
| DMS-114- Small cell lung cancer | 4.1 |
| DMS-79- Small cell lung cancer | 0.3 |
| NCI-H146- Small cell lung cancer | 0.0 |
| NCI-H526- Small cell lung cancer | 2.8 |
| NCI-N417- Small cell lung cancer | 4.3 |
| NCI-H82- Small cell lung cancer | 6.5 |
| NCI-H157- Squamous cell lung cancer (metastasis) | 19.6 |
| NCI-H1155- Large cell lung cancer | 2.0 |
| NCI-H1299- Large cell lung cancer | 12.5 |
| NCI-H727- Lung carcinoid | 3.0 |
| NCI-UMC-11- Lung carcinoid | 0.0 |
| LX-1- Small cell lung cancer | 1.4 |
| Colo-205- Colon cancer | 0.0 |
| KM12- Colon cancer | 0.0 |
| KM20L2- Colon cancer | 1.5 |
| NCI-H716- Colon cancer | 0.0 |
| SW-48- Colon adenocarcinoma | 1.3 |
| SW1116- Colon adenocarcinoma | 0.0 |
| LS 174T- Colon adenocarcinoma | 0.0 |
| SW-948- Colon adenocarcinoma | 1.0 |
| SW-480- Colon adenocarcinoma | 0.4 |
| NCI-SNU-5- Gastric carcinoma | 4.5 |
| KATO III- Gastric carcinoma | 100.0 |
| NCI-SNU-16- Gastric carcinoma | 15.1 |
| NCI-SNU-1- Gastric carcinoma | 0.0 |
| RF-1- Gastric adenocarcinoma | 0.0 |
| RF-48- Gastric adenocarcinoma | 0.0 |
| MKN-45- Gastric carcinoma | 2.5 |
| NCI-N87- Gastric carcinoma | 1.9 |
| OVCAR-5- Ovarian carcinoma | 2.3 |
| RL95-2- Uterine carcinoma | 6.0 |
| HelaS3- Cervical adenocarcinoma | 4.0 |
| Ca Ski- Cervical epidermoid carcinoma (metastasis) | 11.9 |
| ES-2- Ovarian clear cell carcinoma | 8.8 |
| Ramos- Stimulated with PMA/ionomycin 6 h | 0.0 |
| Ramos- Stimulated with PMA/ionomycin 14 h | 0.0 |
| MEG-01- Chronic myelogenous leukemia (megokaryoblast) | 3.8 |
| Raji- Burkitt's lymphoma | 0.0 |
| Daudi- Burkitt's lymphoma | 0.0 |
| U266- B-cell plasmacytoma | 0.0 |
| CA46- Burkitt's lymphoma | 0.0 |
| RL- non-Hodgkin's B-cell lymphoma | 0.0 |
| JM1- pre-B-cell lymphoma | 0.0 |
| Jurkat- T cell leukemia | 5.6 |
| TF-1- Erythroleukemia | 0.0 |
| HUT 78- T-cell lymphoma | 0.3 |
| U937- Histiocytic lymphoma | 0.0 |
| KU-812- Myelogenous leukemia | 0.2 |
| 769-P- Clear cell renal carcinoma | 42.3 |
| Caki-2- Clear cell renal carcinoma | 26.6 |
| SW 839- Clear cell renal carcinoma | 30.1 |
| Rhabdoid kidney tumor | 11.5 |
| Hs766T- Pancreatic carcinoma (LN metastasis) | 23.7 |
| CAPAN-1- Pancreatic adenocarcinoma (liver metastasis) | 3.8 |
| SU86.86- Pancreatic carcinoma (liver metastasis) | 10.7 |
| BxPC-3- Pancreatic adenocarcinoma | 6.0 |
| HPAC- Pancreatic adenocarcinoma | 2.4 |
| MIA PaCa-2- Pancreatic carcinoma | 5.1 |
| CFPAC-1- Pancreatic ductal adenocarcinoma: | 26.1 |
| PANC-1- Pancreatic epithelioid ductal carcinoma | 21.2 |
| T24- Bladder carcinma (transitional cell) | 15.2 |
| 5637- Bladder carcinoma | 6.3 |
| HT-1197- Bladder carcinoma | 1.0 |
| UM-UC-3- Bladder carcinma (transitional cell) | 3.7 |
| A204- Rhabdomyosarcoma | 6.7 |
| HT-1080- Fibrosarcoma | 25.5 |
| MG-63- Osteosarcoma | 16.5 |
| SK-LMS-1- Leiomyosarcoma (vulva) | 11.2 |
| SJRH30- Rhabdomyosarcoma (met to bone marrow) | 4.7 |
| A431- Epidermoid carcinoma | 4.5 |
| WM266-4- Melanoma | 22.1 |
| DU 145- Prostate carcinoma (brain metastasis) | 1.6 |
| MDA-MB-468- Breast adenocarcinoma | 10.6 |
| SCC-4- Squamous cell carcinoma of tongue | 0.7 |
| SCC-9- Squamous cell carcinoma of tongue | 0.3 |
| SCC-15- Squamous cell carcinoma of tongue | 0.3 |
| CAL 27- Squamous cell carcinoma of tongue | 10.4 |

Column A - Rel. Exp. (%) Ag271b, Run 182114260

[1004] TABLE LG
Panel 4.1D

| Tissue Name | A |
|---|---|
| Secondary Th1 act | 0.0 |
| Secondary Th2 act | 0.4 |
| Secondary Tr1 act | 0.3 |
| Secondary Th1 rest | 0.0 |
| Secondary Th2 rest | 0.0 |
| Secondary Tr1 rest | 0.0 |
| Primary Th1 act | 0.0 |
| Primary Th2 act | 0.0 |
| Primary Tr1 act | 0.6 |
| Primary Th1 rest | 0.3 |
| Primary Th2 rest | 0.0 |
| Primary Tr1 rest | 0.0 |
| CD45RA CD4 lymphocyte act | 33.9 |
| CD45RO CD4 lymphocyte act | 0.0 |
| CD8 lymphocyte act | 0.0 |
| Secondary CD8 lymphocyte rest | 0.0 |
| Secondary CD8 lymphocyte act | 0.0 |
| CD4 lymphocyte none | 0.0 |
| 2ry Th1/Th2/Tr1_anti-CD95 CH11 | 0.0 |
| LAK cells rest | 0.1 |
| LAK cells IL-2 | 0.0 |
| LAK cells IL-2 + IL-12 | 0.0 |
| LAK cells IL-2 + IFN gamma | 0.0 |
| LAK cells IL-2 + IL-18 | 0.0 |
| LAK cells PMA/ionomycin | 0.1 |
| NK Cells IL-2 rest | 0.0 |
| Two Way MLR 3 day | 0.0 |
| Two Way MLR 5 day | 0.1 |
| Two Way MLR 7 day | 0.3 |
| PBMC rest | 0.0 |
| PBMC PWM | 0.0 |
| PBMC PHA-L | 0.0 |
| Ramos (B cell) none | 0.0 |
| Ramos (B cell) ionomycin | 0.0 |
| B lymphocytes PWM | 0.0 |
| B lymphocytes CD40L and IL-4 | 0.3 |
| EOL-1 dbcAMP | 0.3 |
| EOL-1 dbcAMP PMA/ionomycin | 0.0 |
| Dendritic cells none | 0.0 |
| Dendritic cells LPS | 0.6 |
| Dendritic cells anti-CD40 | 0.0 |
| Monocytes rest | 0.0 |
| Monocytes LPS | 0.0 |
| Macrophages rest | 0.0 |
| Macrophages LPS | 0.0 |
| HUVEC none | 18.2 |
| HUVEC starved | 27.0 |
| HUVEC IL-1 beta | 21.0 |
| HUVEC IFN gamma | 19.2 |
| HUVEC TNF alpha + IFN gamma | 26.6 |
| HUVEC TNF alpha + IL4 | 32.5 |
| HUVEC IL-11 | 11.8 |
| Lung Microvascular EC none | 43.2 |
| Lung Microvascular EC TNFalpha + IL-1beta | 34.4 |
| Microvascular Dermal EC none | 35.8 |
| Microsvasular Dermal EC TNFalpha + IL-1beta | 26.4 |
| Bronchial epithelium TNFalpha + IL1beta | 32.3 |
| Small airway epithelium none | 16.8 |
| Small airway epithelium TNFalpha + IL-1beta | 33.2 |
| Coronery artery SMC rest | 47.3 |
| Coronery artery SMC TNFalpha + IL-1beta | 51.8 |
| Astrocytes rest | 59.0 |
| Astrocytes TNFalpha + IL-1beta | 38.7 |
| KU-812 (Basophil) rest | 0.6 |
| KU-812 (Basophil) PMA/ionomycin | 1.0 |
| CCD1106 (Keratinocytes) none | 36.1 |
| CCD1106 (Keratinocytes) TNFalpha + IL-1beta | 30.6 |
| Liver cirrhosis | 4.4 |
| NCI-H292 none | 12.7 |
| NCI-H292 IL-4 | 17.3 |
| NCI-H292 IL-9 | 17.3 |
| NCI-H292 IL-13 | 17.9 |
| NCI-H292 IFN gamma | 12.8 |
| HPAEC none | 17.0 |
| HPAEC TNF alpha + IL-1 beta | 39.8 |
| Lung fibroblast none | 71.7 |
| Lung fibroblast TNF alpha + IL-1 beta | 55.5 |
| Lung fibroblast IL-4 | 66.4 |
| Lung fibroblast IL-9 | 100.0 |
| Lung fibroblast IL-13 | 52.1 |
| Lung fibroblast IFN gamma | 70.7 |
| Dermal fibroblast CCD1070 rest | 66.0 |
| Dermal fibroblast CCD1070 TNF alpha | 61.1 |
| Dermal fibroblast CCD1070 IL-1 beta | 61.6 |
| Dermal fibroblast IFN gamma | 43.2 |
| Dermal fibroblast IL-4 | 59.0 |
| Dermal Fibroblasts rest | 36.6 |
| Neutrophils TNFa + LPS | 2.0 |
| Neutrophils rest | 6.7 |
| Colon | 4.4 |
| Lung | 20.4 |
| Thymus | 11.6 |
| Kidney | 26.6 |

Column A - Rel. Exp. (%) Ag271b, Run 174261189

[1005] General_screeningpanel_v1.4 Summary: Ag271/271b Highest expression of this gene was detected in a sample derived from a brain cancer cell line (SNB-75) (CTs=24). There was substantial expression in a number of brain cancer cell lines, renal cancer cell lines, breast cancer cell lines, ovarian cancer cell lines and melanoma cell lines. The expression of this gene is useful for the differentiation of SNB-75 cells from the other samples in the panel. Therapeutic modulation of this gene or gene product, through the use of small molecule drugs, antibodies or protein therapeutics is beneficial for the treatment of brain, renal, ovarian, breast cancers or melanoma.

[1006] This gene also had moderate and widespread expression in metabolic tissues including adipose, adult and fetal heart, adult and fetal skeletal muscle, adrenal, thyroid and pancreas. This gene or gene product is an antibody, protein or small molecule target for the treatment of metabolic and endocrine disease, including obesity and Types 1 and 2 diabetes. This gene was differentially expressed in fetal (CTs=29-30) vs adult liver (CTs=33) and expression of this gene or its protein product is useful differentiate between the two sources of this tissue. The higher levels of expression in fetal liver demonstrate that this gene product is involved in the development of the liver and that this gene or gene product is useful in restoring mass or function to the adult liver.

[1007] This panel also showed low but significant levels of expression of this gene in the CNS. Please see panel 1 for a discussion of utility of this gene in the central nervous system.

[1008] Panel 1 Summary: Ag271/Ag271b Highest expression of this gene was detected in a number of cancer cell lines, including ovarian cancer, pancreatic cancer, prostate cancer, melanoma, renal carcinoma, and CNS cancers, when compared to normal controls. The data presented in panel 1 showed that this gene was expressed highly in samples derived from cancer cell lines and not highly expressed in samples derived from normal tissues. Within the normal kidney samples there was a consistent difference between adult and fetal tissues. Since cell lines and fetal tissues are more proliferative than normal tissues, this expression profile demonstrates that this gene or its protein product is involved in cell proliferation. Inhibition of expression or function of this gene or gene product is a therapeutic avenue for the treatment of cancer or other disease that involve cell proliferation. Therapeutic targeting of this gene or gene product with a monoclonal antibody, protein therapeutic or small molecule will limit or block the extent of tumor cell migration and invasion and tumor metastasis, particularly in melanomas, prostate cancers, pancreatic cancers, ovarian cancers, renal cell carcinomas and CNS cancers. This gene is also be an effective marker for the diagnosis and detection of a variety of cancers.

[1009] This gene was also expressed in all CNS tissues examined, but at lower levels than the relatively high expression in all cancer cell lines examined and fetal kidney. This further demonstrates that this gene or its gene product is involved in the cell cycle or cell proliferation because the majority of cells in the CNS are post-mitotic. This gene is useful in stem cell research or therapy in controlling the transition from stem cell to post-mitotic differentiated cell and is of benefit in any disease associated with neuron loss such as Alzheimer's, Parkinson's, or Huntington's diseases, stroke, head trauma, spinal cord trauma, or spinocerebellar ataxia.

[1010] Panel 2.2 Summary: Ag271b Highest expression of this gene was seen in normal kidney. Significant expression was also seen in kidney cancer, melanoma and colon cancer when compared to normal adjacent tissue. Expression of this gene is useful in differentiating between these samples and other samples on this panel and as a marker for these cancers. Therapeutic targeting of this gene or its protein product with a monoclonal antibody, small molecule, or protein therapeutic will limit or block the extent of tumor cell migration and invasion and tumor metastasis in these tumors.

[1011] Panel 3D Summary: Ag271b Expression of this gene was highest in a gastric cancer cell line. Expression of this gene was detected in a number of cancer cell lines, a result that is consistent with the expression in Panel 1. This gene plays a role in cell proliferation. Inhibition of the expression or function of this gene or gene product is a therapeutic avenue for the treatment of cancer or other disease that involve cell proliferation.

[1012] Panel 4.1D Summary: Ag271b This gene, which encodes the extracellular domain of an immunoglobin domain containing membrane protein, was expressed in panel 4.1D in the following resting and cytokine-activated cells and tissues: HUVEC, lung microvascular endothelial cells, small airway epithelium, coronary artery smooth muscle cells, astrocytes, lung fibroblasts, and dermal fibroblasts. This gene or its gene product is useful as a target for therapeutic antibodies, small molecules or protein drugs which antagonize the function of the Ig domain-containing protein and reduce or eliminate the symptoms in patients with inflammatory diseases and autoimmune diseases, such as multiple sclerosis, chronic obstructive pulmonary disease, asthma, emphysema, rheumatoid arthritis, or psoriasis.

[1013] M. CG51622-01: Von Ebner Minor Salivary Gland Protein

[1014] Expression of gene CG51622-01 was assessed using the primer-probe set Ag719, described in Table MA. Results of the RTQ-PCR runs are shown in Tables MB and MC.

TABLE MA

Probe Name Ag719

| | | | | |
|---|---|---|---|---|
| | | | Start | SEQ ID |
| Primers | Sequences | Length | Position | No |

| | | | | |
|---|---|---|---|---|
| Forward | 5′-ccaggctgaaggtcatcac-3′ | 19 | 260 | 1309 |
| Probe | TET-5′-ctaacatcctccagctgcaggtgaag-3′- | 26 | 281 | 1310 |
| | TAMRA | | | |
| Reverse | 5′-gactagcagctcctggtcatt-3′ | 21 | 316 | 1311 |

[1015] TABLE MB
Panel 1.2

| Tissue Name | A | B | C |
|---|---|---|---|
| Endothelial cells | 0.0 | 0.0 | 0.0 |
| Heart (Fetal) | 0.0 | 0.0 | 0.0 |
| Pancreas | 0.1 | 0.0 | 0.0 |
| Pancreatic ca. CAPAN 2 | 0.0 | 0.0 | 0.0 |
| Adrenal Gland | 0.0 | 0.0 | 0.0 |
| Thyroid | 0.1 | 0.0 | 0.0 |
| Salivary gland | 1.6 | 0.8 | 1.8 |
| Pituitary gland | 0.3 | 0.0 | 0.0 |
| Brain (fetal) | 0.0 | 0.0 | 0.0 |
| Brain (whole) | 0.0 | 0.0 | 0.0 |
| Brain (amygdala) | 0.0 | 0.0 | 0.0 |
| Brain (cerebellum) | 0.0 | 0.0 | 0.0 |
| Brain (hippocampus) | 0.0 | 0.0 | 0.0 |
| Brain (thalamus) | 0.0 | 0.0 | 0.0 |
| Cerebral Cortex | 0.0 | 0.0 | 0.0 |
| Spinal cord | 0.1 | 0.0 | 0.1 |
| glio/astro U87-MG | 0.0 | 0.0 | 0.0 |
| glio/astro U-118-MG | 0.0 | 0.0 | 0.0 |
| astrocytoma SW1783 | 0.0 | 0.0 | 0.0 |
| neuro*; met SK-N-AS | 0.0 | 0.0 | 0.0 |
| astrocytoma SF-539 | 0.0 | 0.0 | 0.0 |
| astrocytoma SNB-75 | 0.0 | 0.0 | 0.0 |
| glioma SNB-19 | 0.0 | 0.0 | 0.0 |
| glioma U251 | 0.0 | 0.0 | 0.0 |
| glioma SF-295 | 0.0 | 0.0 | 0.0 |
| Heart | 0.0 | 0.0 | 0.0 |
| Skeletal Muscle | 0.0 | 0.0 | 0.0 |
| Bone marrow | 0.0 | 0.0 | 0.0 |
| Thymus | 0.0 | 0.0 | 0.0 |
| Spleen | 0.0 | 0.0 | 0.0 |
| Lymph node | 0.3 | 0.1 | 0.2 |
| Colorectal Tissue | 0.0 | 0.0 | 0.0 |
| Stomach | 2.3 | 3.4 | 7.3 |
| Small intestine | 0.0 | 0.0 | 0.0 |
| Colon ca. SW480 | 0.0 | 0.0 | 0.0 |
| Colon ca.* SW620 (SW480 met) | 0.0 | 0.0 | 0.0 |
| Colon ca. HT29 | 0.0 | 0.0 | 0.0 |
| Colon ca. HCT-116 | 0.0 | 0.0 | 0.0 |
| Colon ca. CaCo-2 | 0.0 | 0.0 | 0.0 |
| Colon ca. Tissue (ODO3866) | 0.0 | 0.0 | 0.0 |
| Colon ca. HCC-2998 | 0.0 | 0.0 | 0.0 |
| Gastric ca.* (liver met) NCI-N87 | 0.1 | 0.0 | 0.1 |
| Bladder | 0.0 | 0.0 | 0.0 |
| Trachea | 100.0 | 100.0 | 100.0 |
| Kidney | 0.0 | 0.0 | 0.0 |
| Kidney (fetal) | 0.0 | 0.0 | 0.0 |
| Renal ca. 786-0 | 0.0 | 0.0 | 0.0 |
| Renal ca. A498 | 0.0 | 0.0 | 0.0 |
| Renal ca. RXF 393 | 0.0 | 0.0 | 0.0 |
| Renal ca. ACHN | 0.0 | 0.0 | 0.0 |
| Renal ca. UO-31 | 0.0 | 0.0 | 0.0 |
| Renal ca. TK-10 | 0.0 | 0.0 | 0.0 |
| Liver | 0.0 | 0.0 | 0.0 |
| Liver (fetal) | 0.0 | 0.0 | 0.0 |
| Liver ca. (hepatoblast) HepG2 | 0.0 | 0.0 | 0.0 |
| Lung | 5.2 | 2.3 | 4.9 |
| Lung (fetal) | 1.0 | 0.3 | 0.6 |
| Lung ca. (small cell) LX-1 | 0.0 | 0.0 | 0.0 |
| Lung ca. (small cell) NCI-H69 | 0.0 | 0.0 | 0.0 |
| Lung ca. (s. cell var.) SHP-77 | 0.0 | 0.0 | 0.0 |
| Lung ca. (large cell)NCI-H460 | 0.0 | 0.0 | 0.0 |
| Lung ca. (non-sm. cell) A549 | 0.1 | 0.0 | 0.1 |
| Lung ca. (non-s. cell) NCI-H23 | 0.0 | 0.0 | 0.0 |
| Lung ca. (non-s. cell) HOP-62 | 0.0 | 0.0 | 0.0 |
| Lung ca. (non-s. cl) NCI-H522 | 0.0 | 0.0 | 0.0 |
| Lung ca. (squam.) SW 900 | 0.3 | 0.1 | 0.4 |
| Lung ca. (squam.) NCI-H596 | 0.0 | 0.0 | 0.0 |
| Mammary gland | 0.1 | 0.0 | 0.0 |
| Breast ca.* (pl. ef) MCF-7 | 0.0 | 0.0 | 0.0 |
| Breast ca.* (pl. ef) MDA-MB-231 | 0.0 | 0.0 | 0.0 |
| Breast ca.* (pl. ef) T47D | 0.0 | 0.0 | 0.0 |
| Breast ca. BT-549 | 0.0 | 0.0 | 0.0 |
| Breast ca. MDA-N | 0.0 | 0.0 | 0.0 |
| Ovary | 0.0 | 0.0 | 0.0 |
| Ovarian ca. OVCAR-3 | 0.0 | 0.0 | 0.0 |
| Ovarian ca. OVCAR-4 | 0.0 | 0.0 | 0.0 |
| Ovarian ca. OVCAR-5 | 0.9 | 0.3 | 0.4 |
| Ovarian ca. OVCAR-8 | 0.0 | 0.0 | 0.0 |
| Ovarian ca. IGROV-1 | 0.0 | 0.0 | 0.0 |
| Ovarian ca. (ascites) SK-OV-3 | 0.0 | 0.0 | 0.0 |
| Uterus | 0.0 | 0.0 | 0.0 |
| Placenta | 0.0 | 0.0 | 0.0 |
| Prostate | 0.0 | 0.0 | 0.0 |
| Prostate ca.* (bone met) PC-3 | 0.0 | 0.0 | 0.0 |
| Testis | 0.2 | 0.0 | 0.1 |
| Melanoma Hs688(A).T | 0.0 | 0.0 | 0.0 |
| Melanoma* (met) Hs688(B).T | 0.0 | 0.0 | 0.0 |
| Melanoma UACC-62 | 0.1 | 0.0 | 0.1 |
| Melanoma M14 | 0.0 | 0.0 | 0.0 |
| Melanoma LOX IMVI | 0.0 | 0.0 | 0.0 |
| Melanoma* (met) SK-MEL-5 | 0.0 | 0.0 | 0.0 |

Column A - Rel. Exp. (%) Ag719, Run 115164487
Column B - Rel. Exp. (%) Ag719, Run 123273033
Column C - Rel. Exp. (%) Ag719, Run 124111545

[1016] TABLE MC
Panel 4D

| Tissue Name | A | B |
|---|---|---|
| Secondary Th1 act | 0.0 | 0.0 |
| Secondary Th2 act | 0.0 | 0.3 |
| Secondary Tr1 act | 0.0 | 0.0 |
| Secondary Th1 rest | 0.0 | 0.0 |
| Secondary Th2 rest | 0.0 | 0.0 |
| Secondary Tr1 rest | 0.0 | 0.0 |
| Primary Th1 act | 0.5 | 0.0 |
| Primary Th2 act | 0.5 | 0.0 |
| Primary Tr1 act | 0.0 | 0.0 |
| Primary Th1 rest | 0.3 | 0.0 |
| Primary Th2 rest | 0.0 | 0.0 |
| Primary Tr1 rest | 0.0 | 0.0 |
| CD45RA CD4 lymphocyte act | 0.0 | 0.0 |
| CD45RO CD4 lymphocyte act | 0.0 | 0.0 |
| CD8 lymphocyte act | 0.0 | 0.0 |
| Secondary CD8 lymphocyte rest | 0.0 | 0.0 |
| Secondary CD8 lymphocyte act | 0.2 | 0.0 |
| CD4 lymphocyte none | 0.0 | 0.0 |
| 2ry Th1/Th2/TM_anti-CD95 CH11 | 0.0 | 0.0 |
| LAK cells rest | 0.0 | 0.0 |
| LAK cells IL-2 | 0.2 | 0.0 |
| LAK cells IL-2 + IL-12 | 0.0 | 0.0 |
| LAK cells IL-2 + IFN gamma | 0.3 | 0.2 |
| LAK cells IL-2 + IL-18 | 0.0 | 0.0 |
| LAK cells PMA/ionomycin | 0.0 | 0.0 |
| NK Cells IL-2 rest | 0.0 | 0.0 |
| Two Way MLR 3 day | 0.0 | 0.0 |
| Two Way MLR 5 day | 0.0 | 0.0 |
| Two Way MLR 7 day | 0.0 | 0.0 |
| PBMC rest | 0.0 | 0.0 |
| PBMC PWM | 0.0 | 0.0 |
| PBMC PHA-L | 0.0 | 0.0 |
| Ramos (B cell) none | 0.0 | 0.0 |
| Ramos (B cell) ionomycin | 0.0 | 0.0 |
| B lymphocytes PWM | 0.0 | 0.0 |
| B lymphocytes CD40L and IL-4 | 0.0 | 0.0 |
| EOL-1 dbcAMP | 0.0 | 0.0 |
| EOL-1 dbcAMP PMA/ionomycin | 0.0 | 0.0 |
| Dendritic cells none | 0.0 | 0.0 |
| Dendritic cells LPS | 0.0 | 0.0 |
| Dendritic cells anti-CD40 | 0.0 | 0.0 |
| Monocytes rest | 0.0 | 0.0 |
| Monocytes LPS | 0.3 | 0.0 |
| Macrophages rest | 0.0 | 0.0 |
| Macrophages LPS | 0.0 | 0.0 |
| HUVEC none | 0.0 | 0.0 |
| HUVEC starved | 0.0 | 0.0 |
| HUVEC IL-1beta | 0.0 | 0.0 |
| HUVEC IFN gamma | 0.0 | 0.5 |
| HUVEC TNF alpha + IFN gamma | 0.5 | 0.0 |
| HUVEC TNF alpha + IL4 | 0.0 | 0.0 |
| HUVEC IL-11 | 0.0 | 0.0 |
| Lung Microvascular EC none | 0.0 | 0.0 |
| Lung Microvascular EC TNFalpha + IL-1beta | 0.0 | 0.0 |
| Microvascular Dermal EC none | 0.0 | 0.0 |
| Microsvasular Dermal EC TNFalpha + IL-1beta | 0.3 | 0.0 |
| Bronchial epithelium TNFalpha + IL1beta | 0.0 | 0.0 |
| Small airway epithelium none | 0.0 | 0.0 |
| Small airway epithelium TNFalpha + IL-1beta | 0.0 | 0.0 |
| Coronery artery SMC rest | 0.0 | 0.0 |
| Coronery artery SMC TNFalpha + IL-1beta | 0.0 | 0.0 |
| Astrocytes rest | 0.0 | 0.0 |
| Astrocytes TNFalpha + IL-1 beta | 0.5 | 0.0 |
| KU-812 (Basophil) rest | 0.0 | 0.0 |
| KU-812 (Basophil) PMA/ionomycin | 0.0 | 0.0 |
| CCD1106 (Keratinocytes) none | 0.0 | 0.0 |
| CCD1106 (Keratinocytes) TNFalpha + IL-1beta | 0.3 | 0.0 |
| Liver cirrhosis | 1.6 | 1.9 |
| Lupus kidney | 0.3 | 0.0 |
| NCI-H292 none | 88.9 | 86.5 |
| NCI-H292 IL-4 | 64.2 | 56.6 |
| NCI-H292 IL-9 | 68.8 | 55.1 |
| NCI-H292 IL-13 | 47.0 | 53.2 |
| NCI-H292 IFN gamma | 30.6 | 19.2 |
| HPAEC none | 0.0 | 0.0 |
| HPAEC TNF alpha + IL-1 beta | 0.0 | 0.0 |
| Lung fibroblast none | 0.0 | 0.0 |
| Lung fibroblast TNF alpha + IL-1 beta | 0.2 | 0.0 |
| Lung fibroblast IL-4 | 0.0 | 0.0 |
| Lung fibroblast IL-9 | 0.1 | 0.0 |
| Lung fibroblast IL-13 | 0.0 | 0.0 |
| Lung fibroblast IFN gamma | 0.0 | 0.0 |
| Dermal fibroblast CCD1070 rest | 0.0 | 0.0 |
| Dermal fibroblast CCD1070 TNF alpha | 0.0 | 0.0 |
| Dermal fibroblast CCD1070 IL-1 beta | 0.0 | 0.0 |
| Dermal fibroblast IFN gamma | 0.0 | 0.0 |
| Dermal fibroblast IL-4 | 0.0 | 0.0 |
| IBD Colitis 2 | 0.0 | 0.0 |
| IBD Crohn's | 1.3 | 0.4 |
| Colon | 0.3 | 1.4 |
| Lung | 100.0 | 100.0 |
| Thymus | 1.0 | 0.0 |
| Kidney | 0.8 | 0.8 |

Column A - Rel. Exp. (%) Ag719, Run 138167117
Column B - Rel. Exp. (%) Ag719, Run 138273090

[1017] Panel 1.2 Summary: Ag719 Highest expression of this gene was detected in the trachea (CTs=18-19). Low to moderate expression was also seen in a few cancer cell lines derived from melanoma, lung, and ovarian cancers. Low expression of this gene is also seen in stomach, pancreas, lung, mammary gland, bladder and spinal cord.

[1018] Panel 4D Summary: Ag719 Highest expression of this gene was detected in lung (CTs=28-29). Moderate expression of this gene was also seen in resting and activated NCI-H292.

[1019] N. CG51622-03: Von Ebner Minor Salivary Gland Protein

[1020] Expression of gene CG51622-03 was assessed using the primer-probe set Ag5814, described in Table NA. Results of the RTQ-PCR runs are shown in Table NB.

TABLE NA

Probe Name Ag5814

| | | | | |
|---|---|---|---|---|
| | | | Start | SEQ ID |
| Primers | Sequences | Length | Position | No |

| | | | | |
|---|---|---|---|---|
| Forward | 5′-ccaggagctgctagtcaaga-3′ | 20 | 358 | 1312 |
| Probe | TET-5′-ctggattcaacacgctctccttcctg-3′- | 26 | 396 | 1313 |
| | TAMRA | | | |
| Reverse | 5′-aggaggttcatgacctgctt-3′ | 20 | 437 | 1314 |

[1021] TABLE NB
General_screening_panel_v1.5

| Tissue Name | A |
|---|---|
| Adipose | 0.0 |
| Melanoma* Hs688(A).T | 0.0 |
| Melanoma* Hs688(B).T | 0.0 |
| Melanoma* M14 | 0.0 |
| Melanoma* LOXIMVI | 0.0 |
| Melanoma* SK-MEL-5 | 0.0 |
| Squamous cell carcinoma SCC-4 | 0.0 |
| Testis Pool | 0.2 |
| Prostate ca.* (bone met) PC-3 | 0.0 |
| Prostate Pool | 0.1 |
| Placenta | 0.0 |
| Uterus Pool | 0.0 |
| Ovarian ca. OVCAR-3 | 0.0 |
| Ovarian ca. SK-OV-3 | 0.0 |
| Ovarian ca. OVCAR-4 | 0.0 |
| Ovarian ca. OVCAR-5 | 4.2 |
| Ovarian ca. IGROV-1 | 0.0 |
| Ovarian ca. OVCAR-8 | 0.0 |
| Ovary | 9.0 |
| Breast ca. MCF-7 | 0.0 |
| Breast ca. MDA-MB-231 | 0.0 |
| Breast ca. BT 549 | 0.0 |
| Breast ca. T47D | 0.0 |
| Breast ca. MDA-N | 0.0 |
| Breast Pool | 0.0 |
| Trachea | 100.0 |
| Lung | 0.0 |
| Fetal Lung | 0.0 |
| Lung ca. NCI-N417 | 0.0 |
| Lung ca. LX-1 | 0.0 |
| Lung ca. NCI-H146 | 0.0 |
| Lung ca. SHP-77 | 0.0 |
| Lung ca. A549 | 0.1 |
| Lung ca. NCI-H526 | 0.0 |
| Lung ca. NCI-H23 | 0.0 |
| Lung ca. NCI-H460 | 0.0 |
| Lung ca. HOP-62 | 0.0 |
| Lung ca. NCI-H522 | 0.0 |
| Liver | 0.0 |
| Fetal Liver | 0.0 |
| Liver ca. HepG2 | 0.0 |
| Kidney Pool | 0.0 |
| Fetal Kidney | 0.0 |
| Renal ca. 786-0 | 0.0 |
| Renal ca. A498 | 0.0 |
| Renal ca. ACHN | 0.0 |
| Renal ca. UO-31 | 0.0 |
| Renal ca. TK-10 | 0.0 |
| Bladder | 0.0 |
| Gastric ca. (liver met.) NCI-N87 | 0.2 |
| Gastric ca. KATO III | 0.0 |
| Colon ca. SW-948 | 0.0 |
| Colon ca. SW480 | 0.0 |
| Colon ca.* (SW480 met) SW620 | 0.0 |
| Colon ca. HT29 | 0.0 |
| Colon ca. HCT-116 | 0.0 |
| Colon ca. CaCo-2 | 0.2 |
| Colon cancer tissue | 0.0 |
| Colon ca. SW1116 | 0.0 |
| Colon ca. Colo-205 | 0.0 |
| Colon ca. SW-48 | 0.0 |
| Colon Pool | 0.0 |
| Small Intestine Pool | 0.2 |
| Stomach Pool | 0.0 |
| Bone Marrow Pool | 0.0 |
| Fetal Heart | 0.0 |
| Heart Pool | 0.0 |
| Lymph Node Pool | 0.0 |
| Fetal Skeletal Muscle | 0.0 |
| Skeletal Muscle Pool | 0.0 |
| Spleen Pool | 0.0 |
| Thymus Pool | 0.0 |
| CNS cancer (glio/astro) U87-MG | 0.0 |
| CNS cancer (glio/astro) U-118-MG | 0.0 |
| CNS cancer (neuro; met) SK-N-AS | 0.0 |
| CNS cancer (astro) SF-539 | 0.0 |
| CNS cancer (astro) SNB-75 | 0.0 |
| CNS cancer (glio) SNB-19 | 0.0 |
| CNS cancer (glio) SF-295 | 0.0 |
| Brain (Amygdala) Pool | 0.0 |
| Brain (cerebellum) | 0.0 |
| Brain (fetal) | 0.0 |
| Brain (Hippocampus) Pool | 0.0 |
| Cerebral Cortex Pool | 0.0 |
| Brain (Substantia nigra) Pool | 0.0 |
| Brain (Thalamus) Pool | 0.0 |
| Brain (whole) | 0.0 |
| Spinal Cord Pool | 0.0 |
| Adrenal Gland | 0.0 |
| Pituitary gland Pool | 0.0 |
| Salivary Gland | 0.3 |
| Thyroid (female) | 0.0 |
| Pancreatic ca. CAPAN2 | 0.2 |
| Pancreas Pool | 0.0 |

Column A - Rel. Exp. (%) Ag5814, Run 244897723

[1022] General_screening_panel_v1.5 Summary: Ag5814 High levels of expression of this gene were seen in the trachea (CT=27).

[1023] O CG51622-04: Von Ebner Minor Salivary Gland Protein

[1024] Expression of gene CG51622-04 was assessed using the primer-probe set Ag5210, described in Table OA. Results of the RTQ-PCR runs are shown in Table OB.

TABLE OA

Probe Name Ag5210

| | | | | |
|---|---|---|---|---|
| | | | Start | SEQ ID |
| Primers | Sequences | Length | Position | No |

| | | | | |
|---|---|---|---|---|
| Forward | 5′-aagaagcatgagacgcagact-3′ | 21 | 87 | 1315 |
| Probe | TET-5′-caaagaactcccagtgcaggacaatg-3′- | 26 | 116 | 1316 |
| | TAMRA | | | |
| Reverse | 5′-actgtcctccactcccatgt-3′ | 20 | 165 | 1317 |

[1025] TABLE OB
General_screening_panel_v1.5

| Tissue Name | A |
|---|---|
| Adipose | 0.0 |
| Melanoma* Hs688(A).T | 0.0 |
| Melanoma* Hs688(B).T | 0.0 |
| Melanoma* M14 | 0.0 |
| Melanoma* LOXIMVI | 0.0 |
| Melanoma* SK-MEL-5 | 0.0 |
| Squamous cell carcinoma SCC-4 | 0.0 |
| Testis Pool | 2.0 |
| Prostate ca.* (bone met) PC-3 | 0.0 |
| Prostate Pool | 0.0 |
| Placenta | 0.0 |
| Uterus Pool | 0.0 |
| Ovarian ca. OVCAR-3 | 0.0 |
| Ovarian ca. SK-OV-3 | 0.0 |
| Ovarian ca. OVCAR-4 | 0.0 |
| Ovarian ca. OVCAR-5 | 7.3 |
| Ovarian ca. IGROV-1 | 0.0 |
| Ovarian ca. OVCAR-8 | 0.0 |
| Ovary | 9.9 |
| Breast ca. MCF-7 | 0.0 |
| Breast ca. MDA-MB-231 | 0.0 |
| Breast ca. BT 549 | 0.0 |
| Breast ca. T47D | 0.0 |
| Breast ca. MDA-N | 0.0 |
| Breast Pool | 0.0 |
| Trachea | 100.0 |
| Lung | 0.0 |
| Fetal Lung | 0.5 |
| Lung ca. NCI-N417 | 0.0 |
| Lung ca. LX-1 | 0.0 |
| Lung ca. NCI-H146 | 0.0 |
| Lung ca. SHP-77 | 0.0 |
| Lung ca. A549 | 0.5 |
| Lung ca. NCI-H526 | 0.5 |
| Lung ca. NCI-H23 | 0.0 |
| Lung ca. NCI-H460 | 7.7 |
| Lung ca. HOP-62 | 0.0 |
| Lung ca. NCI-H522 | 0.0 |
| Liver | 0.0 |
| Fetal Liver | 0.0 |
| Liver ca. HepG2 | 0.0 |
| Kidney Pool | 0.0 |
| Fetal Kidney | 0.0 |
| Renal ca. 786-0 | 0.0 |
| Renal ca. A498 | 0.0 |
| Renal ca. ACHN | 0.0 |
| Renal ca. UO-31 | 0.0 |
| Renal ca. TK-10 | 0.0 |
| Bladder | 0.0 |
| Gastric ca. (liver met.) NCI-N87 | 0.9 |
| Gastric ca. KATO III | 0.2 |
| Colon ca. SW-948 | 0.0 |
| Colon ca. SW480 | 0.0 |
| Colon ca.* (SW480 met) SW620 | 0.0 |
| Colon ca. HT29 | 0.0 |
| Colon ca. HCT-116 | 0.0 |
| Colon ca. CaCo-2 | 0.0 |
| Colon cancer tissue | 0.0 |
| Colon ca. SW1116 | 0.0 |
| Colon ca. Colo-205 | 0.0 |
| Colon ca. SW-48 | 0.0 |
| Colon Pool | 0.0 |
| Small Intestine Pool | 0.2 |
| Stomach Pool | 0.2 |
| Bone Marrow Pool | 1.3 |
| Fetal Heart | 0.0 |
| Heart Pool | 0.0 |
| Lymph Node Pool | 0.0 |
| Fetal Skeletal Muscle | 0.0 |
| Skeletal Muscle Pool | 0.0 |
| Spleen Pool | 0.0 |
| Thymus Pool | 0.2 |
| CNS cancer (glio/astro) U87-MG | 0.0 |
| CNS cancer (glio/astro) U-118-MG | 0.5 |
| CNS cancer (neuro; met) SK-N-AS | 0.0 |
| CNS cancer (astro) SF-539 | 0.0 |
| CNS cancer (astro) SNB-75 | 0.0 |
| CNS cancer (glio) SNB-19 | 0.0 |
| CNS cancer (glio) SF-295 | 0.0 |
| Brain (Amygdala) Pool | 0.0 |
| Brain (cerebellum) | 0.3 |
| Brain (fetal) | 0.1 |
| Brain (Hippocampus) Pool | 0.2 |
| Cerebral Cortex Pool | 0.3 |
| Brain (Substantia nigra) Pool | 0.2 |
| Brain (Thalamus) Pool | 0.0 |
| Brain (whole) | 0.9 |
| Spinal Cord Pool | 0.0 |
| Adrenal Gland | 0.0 |
| Pituitary gland Pool | 0.0 |
| Salivary Gland | 0.2 |
| Thyroid (female) | 0.0 |
| Pancreatic ca. CAPAN2 | 0.8 |
| Pancreas Pool | 0.2 |

Column A - Rel. Exp. (%) Ag5210, Run 228727456

[1026] General_screening_panel_v1.5 Summary: Ag5210 Moderate expression was seen in the trachea (CT=30).

[1027] P. CG51622-05: Von Ebner Minor Salivary Gland Protein

[1028] Expression of gene CG51622-05 was assessed using the primer-probe set Ag5103, described in Table PA. Results of the RTQ-PCR runs are shown in Tables PB, PC, PD and PE.

TABLE PA

| Probe Name Ag5103 | | | | |
|---|---|---|---|---|
| | | | Start | SEQ ID |
| Primers | Sequences | Length | Position | No |
| Forward | 5′-agtgaaaaaccagctggtgaa-3′ | 21 | 661 | 1318 |
| Probe | TET-5′-catttccctcagcattgaccgtctg-3′- | 25 | 688 | 1319 |
| | TAMRA | | | |
| Reverse | 5′-ggcaggatacagaaggtcaaa-3′ | 21 | 716 | 1320 |

[1029] TABLE PB
AI_comprehensive panel_v1.0

| Tissue Name | A |
|---|---|
| 110967 COPD-F | 0.0 |
| 110980 COPD-F | 0.0 |
| 110968 COPD-M | 0.0 |
| 110977 COPD-M | 0.0 |
| 110989 Emphysema-F | 0.0 |
| 110992 Emphysema-F | 0.6 |
| 110993 Emphysema-F | 0.0 |
| 110994 Emphysema-F | 0.0 |
| 110995 Emphysema-F | 0.0 |
| 110996 Emphysema-F | 0.0 |
| 110997 Asthma-M | 9.2 |
| 111001 Asthma-F | 0.0 |
| 111002 Asthma-F | 0.0 |
| 111003 Atopic Asthma-F | 0.0 |
| 111004 Atopic Asthma-F | 0.0 |
| 111005 Atopic Asthma-F | 0.0 |
| 111006 Atopic Asthma-F | 0.0 |
| 111417 Allergy-M | 0.0 |
| 112347 Allergy-M | 0.0 |
| 112349 Normal Lung-F | 0.0 |
| 112357 Normal Lung-F | 0.0 |
| 112354 Normal Lung-M | 0.0 |
| 112374 Crohns-F | 0.0 |
| 112389 Match Control Crohns-F | 0.0 |
| 112375 Crohns-F | 0.0 |
| 112732 Match Control Crohns-F | 0.0 |
| 112725 Crohns-M | 0.0 |
| 112387 Match Control Crohns-M | 0.0 |
| 112378 Crohns-M | 0.0 |
| 112390 Match Control Crohns-M | 0.0 |
| 112726 Crohns-M | 0.0 |
| 112731 Match Control Crohns-M | 6.3 |
| 112380 Ulcer Col-F | 0.0 |
| 112734 Match Control Ulcer Col-F | 54.0 |
| 112384 Ulcer Col-F | 0.0 |
| 112737 Match Control Ulcer Col-F | 0.0 |
| 112386 Ulcer Col-F | 0.0 |
| 112738 Match Control Ulcer Col-F | 0.0 |
| 112381 Ulcer Col-M | 0.0 |
| 112735 Match Control Ulcer Col-M | 0.0 |
| 112382 Ulcer Col-M | 0.0 |
| 112394 Match Control Ulcer Col-M | 0.0 |
| 112383 Ulcer Col-M | 0.0 |
| 112736 Match Control Ulcer Col-M | 0.0 |
| 112423 Psoriasis-F | 0.0 |
| 112427 Match Control Psoriasis-F | 0.0 |
| 112418 Psoriasis-M | 0.0 |
| 112723 Match Control Psoriasis-M | 0.0 |
| 112419 Psoriasis-M | 0.0 |
| 112424 Match Control Psoriasis-M | 0.0 |
| 112420 Psoriasis-M | 0.0 |
| 112425 Match Control Psoriasis-M | 0.0 |
| 104689 (MF) OA Bone-Backus | 0.0 |
| 104690 (MF) Adj “Normal” Bone-Backus | 0.0 |
| 104691 (MF) OA Synovium-Backus | 0.0 |
| 104692 (BA) OA Cartilage-Backus | 0.0 |
| 104694 (BA) OA Bone-Backus | 0.0 |
| 104695 (BA) Adj “Normal” Bone-Backus | 0.0 |
| 104696 (BA) OA Synovium-Backus | 0.0 |
| 104700 (SS) OA Bone-Backus | 0.0 |
| 104701 (SS) Adj “Normal” Bone-Backus | 0.0 |
| 104702 (SS) OA Synovium-Backus | 0.0 |
| 117093 OA Cartilage Rep7 | 0.0 |
| 112672 OA Bone5 | 0.0 |
| 112673 OA Synovium5 | 0.0 |
| 112674 OA Synovial Fluid cells5 | 0.0 |
| 117100 OA Cartilage Rep14 | 0.0 |
| 112756 OA Bone9 | 0.0 |
| 112757 OA Synovium9 | 0.0 |
| 112758 OA Synovial Fluid Cells9 | 0.0 |
| 117125 RA Cartilage Rep2 | 0.0 |
| 113492 Bone2 RA | 100.0 |
| 113493 Synovium2 RA | 35.6 |
| 113494 Syn Fluid Cells RA | 53.6 |
| 113499 Cartilage4 RA | 4.0 |
| 113500 Bone4 RA | 2.7 |
| 113501 Synovium4 RA | 1.0 |
| 113502 Syn Fluid Cells4 RA | 0.9 |
| 113495 Cartilage3 RA | 6.0 |
| 113496 Bone3 RA | 3.2 |
| 113497 Synovium3 RA | 4.4 |
| 113498 Syn Fluid Cells3 RA | 6.3 |
| 117106 Normal Cartilage Rep20 | 0.0 |
| 113663 Bone3 Normal | 0.0 |
| 113664 Synovium3 Normal | 0.0 |
| 113665 Syn Fluid Cells3 Normal | 0.0 |
| 117107 Normal Cartilage Rep22 | 0.0 |
| 113667 Bone4 Normal | 0.0 |
| 113668 Synovium4 Normal | 0.0 |
| 113669 Syn Fluid Cells4 Normal | 0.0 |

Column A - Rel. Exp. (%) Ag5103, Run 229314009

[1030] TABLE PC
General_screening_panel_v1.5

| Tissue Name | A |
|---|---|
| Adipose | 0.0 |
| Melanoma* Hs688(A).T | 0.0 |
| Melanoma* Hs688(B).T | 0.0 |
| Melanoma* M14 | 0.0 |
| Melanoma* LOXIMVI | 0.0 |
| Melanoma* SK-MEL-5 | 0.0 |
| Squamous cell carcinoma SCC-4 | 0.0 |
| Testis Pool | 0.0 |
| Prostate ca.* (bone met) PC-3 | 0.0 |
| Prostate Pool | 0.0 |
| Placenta | 0.0 |
| Uterus Pool | 0.0 |
| Ovarian ca. OVCAR-3 | 0.0 |
| Ovarian ca. SK-OV-3 | 0.0 |
| Ovarian ca. OVCAR-4 | 0.0 |
| Ovarian ca. OVCAR-5 | 0.5 |
| Ovarian ca. IGROV-1 | 0.0 |
| Ovarian ca. OVCAR-8 | 0.0 |
| Ovary | 3.6 |
| Breast ca. MCF-7 | 0.0 |
| Breast ca. MDA-MB-231 | 0.0 |
| Breast ca. BT 549 | 0.0 |
| Breast ca. T47D | 0.0 |
| Breast ca. MDA-N | 0.0 |
| Breast Pool | 0.0 |
| Trachea | 100.0 |
| Lung | 0.0 |
| Fetal Lung | 0.2 |
| Lung ca. NCI-N417 | 0.0 |
| Lung ca. LX-1 | 0.0 |
| Lung ca. NCI-H146 | 0.0 |
| Lung ca. SHP-77 | 0.0 |
| Lung ca. A549 | 0.0 |
| Lung ca. NCI-H526 | 0.0 |
| Lung ca. NCI-H23 | 0.0 |
| Lung ca. NCI-H460 | 0.0 |
| Lung ca. HOP-62 | 0.0 |
| Lung ca. NCI-H522 | 0.0 |
| Liver | 0.0 |
| Fetal Liver | 0.0 |
| Liver ca. HepG2 | 0.0 |
| Kidney Pool | 0.0 |
| Fetal Kidney | 0.0 |
| Renal ca. 786-0 | 0.0 |
| Renal ca. A498 | 0.0 |
| Renal ca. ACHN | 0.0 |
| Renal ca. UO-31 | 0.0 |
| Renal ca. TK-10 | 0.0 |
| Bladder | 0.0 |
| Gastric ca. (liver met.) NCI-N87 | 0.1 |
| Gastric ca. KATO III | 0.0 |
| Colon ca. SW-948 | 0.0 |
| Colon ca. SW480 | 0.0 |
| Colon ca.* (SW480 met) SW620 | 0.0 |
| Colon ca. HT29 | 0.0 |
| Colon ca. HCT-116 | 0.0 |
| Colon ca. CaCo-2 | 0.0 |
| Colon cancer tissue | 0.0 |
| Colon ca. SW1116 | 0.0 |
| Colon ca. Colo-205 | 0.0 |
| Colon ca. SW-48 | 0.0 |
| Colon Pool | 0.0 |
| Small Intestine Pool | 0.0 |
| Stomach Pool | 0.0 |
| Bone Marrow Pool | 0.1 |
| Fetal Heart | 0.0 |
| Heart Pool | 0.0 |
| Lymph Node Pool | 0.0 |
| Fetal Skeletal Muscle | 0.0 |
| Skeletal Muscle Pool | 0.0 |
| Spleen Pool | 0.0 |
| Thymus Pool | 0.0 |
| CNS cancer (glio/astro) U87-MG | 0.0 |
| CNS cancer (glio/astro) U-118-MG | 0.0 |
| CNS cancer (neuro; met) SK-N-AS | 0.0 |
| CNS cancer (astro) SF-539 | 0.0 |
| CNS cancer (astro) SNB-75 | 0.0 |
| CNS cancer (glio) SNB-19 | 0.0 |
| CNS cancer (glio) SF-295 | 0.0 |
| Brain (Amygdala) Pool | 0.0 |
| Brain (cerebellum) | 0.0 |
| Brain (fetal) | 0.0 |
| Brain (Hippocampus) Pool | 0.0 |
| Cerebral Cortex Pool | 0.0 |
| Brain (Substantia nigra) Pool | 0.0 |
| Brain (Thalamus) Pool | 0.0 |
| Brain (whole) | 0.0 |
| Spinal Cord Pool | 0.0 |
| Adrenal Gland | 0.0 |
| Pituitary gland Pool | 0.0 |
| Salivary Gland | 0.2 |
| Thyroid (female) | 0.0 |
| Pancreatic ca. CAPAN2 | 0.0 |
| Pancreas Pool | 0.0 |

Column A - Rel. Exp. (%) Ag5103, Run 228753956

[1031] TABLE PD
Panel 4.1D

| Tissue Name | A |
|---|---|
| Secondary Th1 act | 0.0 |
| Secondary Th2 act | 0.0 |
| Secondary Tr1 act | 0.0 |
| Secondary Th1 rest | 0.0 |
| Secondary Th2 rest | 0.0 |
| Secondary Tr1 rest | 0.0 |
| Primary Th1 act | 0.0 |
| Primary Th2 act | 0.0 |
| Primary Tr1 act | 0.0 |
| Primary Th1 rest | 0.0 |
| Primary Th2 rest | 0.0 |
| Primary Tr1 rest | 0.0 |
| CD45RA CD4 lymphocyte act | 0.0 |
| CD45RO CD4 lymphocyte act | 0.0 |
| CD8 lymphocyte act | 0.0 |
| Secondary CD8 lymphocyte rest | 0.0 |
| Secondary CD8 lymphocyte act | 0.0 |
| CD4 lymphocyte none | 0.0 |
| 2ry Th1/Th2/Tr1_anti-CD95 CH11 | 0.0 |
| LAK cells rest | 0.0 |
| LAK cells IL-2 | 0.0 |
| LAK cells IL-2 + IL-12 | 0.0 |
| LAK cells IL-2 + IFN gamma | 0.0 |
| LAK cells IL-2 + IL-18 | 0.0 |
| LAK cells PMA/ionomycin | 0.0 |
| NK Cells IL-2 rest | 0.0 |
| Two Way MLR 3 day | 0.0 |
| Two Way MLR 5 day | 0.0 |
| Two Way MLR 7 day | 0.0 |
| PBMC rest | 0.0 |
| PBMC PWM | 0.0 |
| PBMC PHA-L | 0.0 |
| Ramos (B cell) none | 0.0 |
| Ramos (B cell) ionomycin | 0.0 |
| B lymphocytes PWM | 0.0 |
| B lymphocytes CD40L and IL-4 | 0.0 |
| EOL-1 dbcAMP | 0.0 |
| EOL-1 dbcAMP PMA/ionomycin | 0.0 |
| Dendritic cells none | 0.0 |
| Dendritic cells LPS | 0.0 |
| Dendritic cells anti-CD40 | 0.0 |
| Monocytes rest | 0.0 |
| Monocytes LPS | 0.0 |
| Macrophages rest | 0.0 |
| Macrophages LPS | 0.0 |
| HUVEC none | 0.0 |
| HUVEC starved | 0.0 |
| HUVEC IL-1beta | 0.0 |
| HUVEC IFN gamma | 0.0 |
| HUVEC TNF alpha + IFN gamma | 0.0 |
| HUVEC TNF alpha + IL4 | 0.0 |
| HUVEC IL-11 | 0.0 |
| Lung Microvascular EC none | 0.0 |
| Lung Microvascular EC TNFalpha + IL-1beta | 0.0 |
| Microvascular Dermal EC none | 0.0 |
| Microsvasular Dermal EC TNFalpha + IL-1beta | 0.0 |
| Bronchial epithelium TNFalpha + IL1beta | 0.0 |
| Small airway epithelium none | 0.0 |
| Small airway epithelium TNFalpha + IL-1beta | 0.0 |
| Coronery artery SMC rest | 0.0 |
| Coronery artery SMC TNFalpha + IL-1beta | 0.9 |
| Astrocytes rest | 0.0 |
| Astrocytes TNFalpha + IL-1beta | 0.0 |
| KU-812 (Basophil) rest | 0.0 |
| KU-812 (Basophil) PMA/ionomycin | 0.0 |
| CCD1106 (Keratinocytes) none | 0.0 |
| CCD1106 (Keratinocytes) TNFalpha + IL-1beta | 0.0 |
| Liver cirrhosis | 0.0 |
| NCI-H292 none | 14.7 |
| NCI-H292 IL-4 | 23.0 |
| NCI-H292 IL-9 | 33.2 |
| NCI-H292 IL-13 | 13.2 |
| NCI-H292 IFN gamma | 9.6 |
| HPAEC none | 0.0 |
| HPAEC TNF alpha + IL-1 beta | 0.0 |
| Lung fibroblast none | 0.0 |
| Lung fibroblast TNF alpha + IL-1 beta | 0.0 |
| Lung fibroblast IL-4 | 0.0 |
| Lung fibroblast IL-9 | 0.0 |
| Lung fibroblast IL-13 | 0.0 |
| Lung fibroblast IFN gamma | 0.0 |
| Dermal fibroblast CCD1070 rest | 0.0 |
| Dermal fibroblast CCD1070 TNF alpha | 0.0 |
| Dermal fibroblast CCD1070 IL-1 beta | 0.0 |
| Dermal fibroblast IFN gamma | 100.0 |
| Dermal fibroblast IL-4 | 0.0 |
| Dermal Fibroblasts rest | 0.0 |
| Neutrophils TNFa + LPS | 0.0 |
| Neutrophils rest | 0.0 |
| Colon | 2.0 |
| Lung | 24.7 |
| Thymus | 0.3 |
| Kidney | 0.0 |

Column A - Rel. Exp. (%) Ag5103, Run 226160624

[1032] TABLE PE
general oncology screening panel_v_2.4

| Tissue Name | A |
|---|---|
| Colon cancer 1 | 0.0 |
| Colon cancer NAT 1 | 0.0 |
| Colon cancer 2 | 0.0 |
| Colon cancer NAT 2 | 0.0 |
| Colon cancer 3 | 0.0 |
| Colon cancer NAT 3 | 0.0 |
| Colon malignant cancer 4 | 0.0 |
| Colon normal adjacent tissue 4 | 0.0 |
| Lung cancer 1 | 6.6 |
| Lung NAT 1 | 19.8 |
| Lung cancer 2 | 0.8 |
| Lung NAT 2 | 0.0 |
| Squamous cell carcinoma 3 | 16.0 |
| Lung NAT 3 | 59.0 |
| metastatic melanoma 1 | 0.0 |
| Melanoma 2 | 0.0 |
| Melanoma 3 | 0.0 |
| metastatic melanoma 4 | 8.0 |
| metastatic melanoma 5 | 100.0 |
| Bladder cancer 1 | 0.0 |
| Bladder cancer NAT 1 | 0.0 |
| Bladder cancer 2 | 0.0 |
| Bladder cancer NAT 2 | 0.0 |
| Bladder cancer NAT 3 | 0.2 |
| Bladder cancer NAT 4 | 0.0 |
| Prostate adenocarcinoma 1 | 0.0 |
| Prostate adenocarcinoma 2 | 0.0 |
| Prostate adenocarcinoma 3 | 0.0 |
| Prostate adenocarcinoma 4 | 0.4 |
| Prostate cancer NAT 5 | 0.0 |
| Prostate adenocarcinoma 6 | 0.0 |
| Prostate adenocarcinoma 7 | 0.0 |
| Prostate adenocarcinoma 8 | 0.5 |
| Prostate adenocarcinoma 9 | 2.0 |
| Prostate cancer NAT 10 | 0.0 |
| Kidney cancer 1 | 0.0 |
| KidneyNAT 1 | 0.0 |
| Kidney cancer 2 | 0.0 |
| Kidney NAT 2 | 0.0 |
| Kidney cancer 3 | 0.0 |
| Kidney NAT 3 | 0.0 |
| Kidney cancer 4 | 0.0 |
| Kidney NAT 4 | 0.0 |

Column A- Rel. Exp. (%) Ag5103, Run259939204

[1033] AI_comprehensive panel_v1.0 Summary: Ag5103 Moderate levels of expression were seen in three RA samples, with highest expression in a bone sample from an RA patient (CT=30). Therapeutics targeting of this gene or its protein product is useful for the reduction and inhibition of the inflammation in RA.

[1034] General_screening_panel_v1.5 Summary: Ag5103 Extremely high levels of expression were seen in the trachea (CT=23).

[1035] Panel 4.1D Summary: AG5103 Highest expression of this gene was detected in IFN gamma treated dermal fibroblasts (CT=31.6). Prominent expression was also seen in a cluster of treated and untreated NCI-H292 cells, a mucoepidermoid cell line. In comparison, expression in the normal lung was relatively low. The expression of the transcript in a cell line that is often used as a model for airway epithelium (NCI-H292 cells) demonstrates that this transcript is important in the proliferation or activation of airway epithelium. Therapeutics designed with the protein encoded for by the transcript are important in the treatment of diseases which include lung airway inflammation such as asthma and COPD.

[1036] general oncology screening panel_v_{—}2.4 Summary: Ag5103 Highest expression was seen in a melanoma sample (CT=31). Prominent expression was also seen in two samples derived from normal lung tissue.

[1037] Q. CG51821-01: Sialoadhesin

[1038] Expression of gene CG51821-01 was assessed using the primer-probe set Ag274, described in Table QA. Results of the RTQ-PCR runs are shown in Tables QB, QC, QD, QE, QF and QG.

TABLE QA
Probe Name Ag274

| | | | | |
|---|---|---|---|---|
| Primers | Sequences | Length | Start Position | SEQ ID No |

| | | | | |
|---|---|---|---|---|
| Forward | 5′-cagaacagatgtattccccttggt-3′ | 24 | 4835 | 1321 |
| Probe | TET-5′-ctcagcgcctcgatgtccaccc-3′-TAMRA | 22 | 4805 | 1322 |
| Reverse | 5′-ctggcttcccccaatgc-3′ | 17 | 4783 | 1323 |

[1039] TABLE QB
AI_comprehensive panel_v1.0

| Tissue Name | A |
|---|---|
| 110967 COPD-F | 4.3 |
| 110980 COPD-F | 1.6 |
| 110968 COPD-M | 5.2 |
| 110977 COPD-M | 2.7 |
| 110989 Emphysema-F | 2.2 |
| 110992 Emphysema-F | 0.5 |
| 110993 Emphysema-F | 4.0 |
| 110994 Emphysema-F | 4.3 |
| 110995 Emphysema-F | 5.7 |
| 110996 Emphysema-F | 2.0 |
| 110997 Asthma-M | 1.6 |
| 111001 Asthma-F | 2.2 |
| 111002 Asthma-F | 4.4 |
| 111003 Atopic Asthma-F | 4.0 |
| 111004 Atopic Asthma-F | 3.6 |
| 111005 Atopic Asthma-F | 2.4 |
| 111006 Atopic Asthma-F | 0.5 |
| 111417 Allergy-M | 2.1 |
| 112347 Allergy-M | 0.1 |
| 112349 Normal Lung-F | 0.0 |
| 112357 Normal Lung-F | 8.4 |
| 112354 Normal Lung-M | 2.6 |
| 112374 Crohns-F | 4.4 |
| 112389 Match Control Crohns-F | 2.2 |
| 112375 Crohns-F | 3.9 |
| 112732 Match Control Crohns-F | 3.4 |
| 112725 Crohns-M | 0.6 |
| 112387 Match Control Crohns-M | 4.3 |
| 112378 Crohns-M | 0.2 |
| 112390 Match Control Crohns-M | 2.3 |
| 112726 Crohns-M | 3.5 |
| 112731 Match Control Crohns-M | 3.1 |
| 112380 Ulcer Col-F | 1.1 |
| 112734 Match Control Ulcer Col-F | 8.8 |
| 112384 Ulcer Col-F | 4.9 |
| 112737 Match Control Ulcer Col-F | 0.4 |
| 112386 Ulcer Col-F | 8.4 |
| 112738 Match Control Ulcer Col-F | 6.3 |
| 112381 Ulcer Col-M | 0.5 |
| 112735 Match Control Ulcer Col-M | 0.9 |
| 112382 Ulcer Col-M | 3.3 |
| 112394 Match Control Ulcer Col-M | 2.8 |
| 112383 Ulcer Col-M | 5.3 |
| 112736 Match Control Ulcer Col-M | 5.5 |
| 112423 Psoriasis-F | 2.2 |
| 112427 Match Control Psoriasis-F | 1.8 |
| 112418 Psoriasis-M | 7.8 |
| 112723 Match Control Psoriasis-M | 3.3 |
| 112419 Psoriasis-M | 4.4 |
| 112424 Match Control Psoriasis-M | 1.1 |
| 112420 Psoriasis-M | 6.2 |
| 112425 Match Control Psoriasis-M | 1.5 |
| 104689 (MF) OA Bone-Backus | 28.5 |
| 104690 (MF) Adj “Normal” Bone-Backus | 19.6 |
| 104691 (MF) OA Synovium-Backus | 100.0 |
| 104692 (BA) OA Cartilage-Backus | 0.7 |
| 104694 (BA) OA Bone-Backus | 42.3 |
| 104695 (BA) Adj “Normal” Bone-Backus | 27.4 |
| 104696 (BA) OA Synovium-Backus | 71.2 |
| 104700 (SS) OA Bone-Backus | 16.4 |
| 104701 (SS) Adj “Normal” Bone-Backus | 29.7 |
| 104702 (SS) OA Synovium-Backus | 67.8 |
| 117093 OA Cartilage Rep7 | 1.8 |
| 112672 OA Bone5 | 8.8 |
| 112673 OA Synovium5 | 3.5 |
| 112674 OA Synovial Fluid cells5 | 3.7 |
| 117100 OA Cartilage Rep14 | 1.8 |
| 112756 OA Bone9 | 2.5 |
| 112757 OA Synovium9 | 4.7 |
| 112758 OA Synovial Fluid Cells9 | 9.0 |
| 117125 RA Cartilage Rep2 | 4.6 |
| 113492 Bone2 RA | 6.6 |
| 113493 Synovium2 RA | 4.4 |
| 113494 Syn Fluid Cells RA | 5.8 |
| 113499 Cartilage4 RA | 8.3 |
| 113500 Bone4 RA | 7.9 |
| 113501 Synovium4 RA | 6.9 |
| 113502 Syn Fluid Cells4 RA | 4.1 |
| 113495 Cartilage3 RA | 5.6 |
| 113496 Bone3 RA | 5.8 |
| 113497 Synovium3 RA | 4.3 |
| 113498 Syn Fluid Cells3 RA | 9.2 |
| 117106 Normal Cartilage Rep20 | 2.0 |
| 113663 Bone3 Normal | 0.0 |
| 113664 Synovium3 Normal | 0.0 |
| 113665 Syn Fluid Cells3 Normal | 0.1 |
| 117107 Normal Cartilage Rep22 | 1.4 |
| 113667 Bone4 Normal | 2.5 |
| 113668 Synovium4 Normal | 1.4 |
| 113669 Syn Fluid Cells4 Normal | 3.1 |

Column A - Rel. Exp. (%) Ag274, Run 228157466

[1040] TABLE QC
General_screenmg_panel_v1.4

| Tissue Name | A | B |
|---|---|---|
| Adipose | 20.4 | 23.5 |
| Melanoma* Hs688(A).T | 0.0 | 0.0 |
| Melanoma* Hs688(B).T | 0.6 | 1.5 |
| Melanoma* M14 | 0.0 | 0.0 |
| Melanoma* LOXIMVI | 3.1 | 0.0 |
| Melanoma* SK-MEL-5 | 0.0 | 1.9 |
| Squamous cell carcinoma SCC-4 | 1.0 | 0.0 |
| Testis Pool | 5.7 | 7.1 |
| Prostate ca.* (bone met) PC-3 | 0.0 | 1.1 |
| Prostate Pool | 1.6 | 2.0 |
| Placenta | 45.4 | 51.4 |
| Uterus Pool | 2.2 | 1.2 |
| Ovarian ca. OVCAR-3 | 0.0 | 0.0 |
| Ovarian ca. SK-OV-3 | 0.0 | 0.8 |
| Ovarian ca. OVCAR-4 | 0.0 | 0.0 |
| Ovarian ca. OVCAR-5 | 0.0 | 2.6 |
| Ovarian ca. IGROV-1 | 0.5 | 1.0 |
| Ovarian ca. OVCAR-8 | 0.8 | 2.9 |
| Ovary | 12.8 | 9.9 |
| Breast ca. MCF-7 | 0.7 | 0.0 |
| Breast ca. MDA-MB-231 | 0.4 | 2.4 |
| Breast ca. BT 549 | 0.0 | 0.0 |
| Breast ca. T47D | 1.0 | 1.6 |
| Breast ca. MDA-N | 0.6 | 1.3 |
| Breast Pool | 8.7 | 6.1 |
| Trachea | 14.3 | 21.3 |
| Lung | 3.8 | 5.3 |
| Fetal Lung | 6.7 | 4.6 |
| Lung ca. NCI-N417 | 0.0 | 0.0 |
| Lung ca. LX-1 | 0.3 | 0.6 |
| Lung ca. NCI-H146 | 1.0 | 0.0 |
| Lung ca. SHP-77 | 0.8 | 1.0 |
| Lung ca. A549 | 1.1 | 0.0 |
| Lung ca. NCI-H526 | 0.0 | 0.0 |
| Lung ca. NCI-H23 | 0.0 | 0.0 |
| Lung ca. NCI-H460 | 0.0 | 1.1 |
| Lung ca. HOP-62 | 0.0 | 5.1 |
| Lung ca. NCI-H522 | 0.0 | 0.0 |
| Liver | 11.7 | 13.5 |
| Fetal Liver | 26.6 | 26.2 |
| Liver ca. HepG2 | 0.0 | 0.7 |
| Kidney Pool | 7.0 | 13.0 |
| Fetal Kidney | 3.1 | 3.2 |
| Renal ca. 786-0 | 0.0 | 0.0 |
| Renal ca. A498 | 0.0 | 0.0 |
| Renal ca. ACHN | 0.0 | 1.8 |
| Renal ca. UO-31 | 0.0 | 0.0 |
| Renal ca. TK-10 | 0.0 | 0.6 |
| Bladder | 100.0 | 100.0 |
| Gastric ca. (liver met.) NCI-N87 | 2.0 | 2.1 |
| Gastric ca. KATO III | 0.0 | 2.0 |
| Colon ca. SW-948 | 0.0 | 0.0 |
| Colon ca. SW480 | 1.2 | 0.3 |
| Colon ca.* (SW480 met) SW620 | 0.5 | 0.5 |
| Colon ca. HT29 | 1.3 | 0.0 |
| Colon ca. HCT-116 | 0.0 | 0.8 |
| Colon ca. CaCo-2 | 1.0 | 0.0 |
| Colon cancer tissue | 26.4 | 32.3 |
| Colon ca. SW1116 | 1.6 | 0.8 |
| Colon ca. Colo-205 | 0.0 | 0.0 |
| Colon ca. SW-48 | 0.0 | 1.3 |
| Colon Pool | 12.1 | 9.7 |
| Small Intestine Pool | 5.3 | 3.8 |
| Stomach Pool | 8.1 | 9.8 |
| Bone Marrow Pool | 4.8 | 7.9 |
| Fetal Heart | 0.4 | 1.2 |
| Heart Pool | 5.3 | 8.2 |
| Lymph Node Pool | 8.8 | 11.7 |
| Fetal Skeletal Muscle | 5.0 | 5.5 |
| Skeletal Muscle Pool | 12.2 | 13.0 |
| Spleen Pool | 29.7 | 28.1 |
| Thymus Pool | 12.6 | 10.9 |
| CMS cancer (glio/astro) U87-MG | 0.9 | 1.2 |
| CMS cancer (glio/astro) U-118-MG | 1.7 | 0.8 |
| CMS cancer (neuro; met) SK-N-AS | 0.5 | 0.0 |
| CMS cancer (astro) SF-539 | 0.0 | 0.5 |
| CMS cancer (astro) SNB-75 | 1.3 | 1.1 |
| CMS cancer (glio) SNB-19 | 0.2 | 0.0 |
| CNS cancer (glio) SF-295 | 0.1 | 0.5 |
| Brain (Amygdala) Pool | 2.6 | 2.5 |
| Brain (cerebellum) | 0.8 | 1.5 |
| Brain (fetal) | 2.3 | 3.3 |
| Brain (Hippocampus) Pool | 1.0 | 2.3 |
| Cerebral Cortex Pool | 1.2 | 0.6 |
| Brain (Substantia nigra) Pool | 1.3 | 0.0 |
| Brain (Thalamus) Pool | 1.5 | 1.5 |
| Brain (whole) | 5.7 | 4.7 |
| Spinal Cord Pool | 1.1 | 2.2 |
| Adrenal Gland | 19.1 | 29.1 |
| Pituitary gland Pool | 0.5 | 4.1 |
| Salivary Gland | 3.8 | 4.5 |
| Thyroid (female) | 6.3 | 5.4 |
| Pancreatic ca. CAPAN2 | 0.0 | 0.0 |
| Pancreas Pool | 9.3 | 9.3 |

Column A - Rel. Exp. (%) Ag274, Run 216607761
Column B - Rel. Exp. (%) Ag274, Run 220361695

[1041] TABLE QD
Panel 2D

| Tissue Name | A |
|---|---|
| Normal Colon | 23.3 |
| CC Well to Mod Diff (ODO3866) | 13.2 |
| CC Margin (ODO3866) | 10.0 |
| CC Gr.2 rectosigmoid (ODO3868) | 6.0 |
| CC Margin (ODO3868) | 6.0 |
| CC Mod Diff (ODO3920) | 3.1 |
| CC Margin (ODO3920) | 10.9 |
| CC Gr.2 ascend colon (ODO3921) | 10.2 |
| CC Margin (ODO3921) | 25.5 |
| CC from Partial Hepatectomy (ODO4309) Mets | 9.7 |
| Liver Margin (ODO4309) | 48.3 |
| Colon mets to lung (OD04451-01) | 14.4 |
| Lung Margin (OD04451-02) | 17.8 |
| Normal Prostate 6546-1 | 11.0 |
| Prostate Cancer (OD04410) | 9.7 |
| Prostate Margin (OD04410) | 4.1 |
| Prostate Cancer (OD04720-01) | 2.0 |
| Prostate Margin (OD04720-02) | 4.5 |
| Normal Lung 061010 | 66.0 |
| Lung Met to Muscle (ODO4286) | 100.0 |
| Muscle Margin (ODO4286) | 72.2 |
| Lung Malignant Cancer (OD03126) | 35.4 |
| Lung Margin (OD03126) | 68.3 |
| Lung Cancer (OD04404) | 29.5 |
| Lung Margin (OD04404) | 35.6 |
| Lung Cancer (OD04565) | 12.4 |
| Lung Margin (OD04565) | 36.1 |
| Lung Cancer (OD04237-01) | 18.6 |
| Lung Margin (OD04237-02) | 22.4 |
| Ocular Mel Met to Liver (ODO4310) | 4.2 |
| Liver Margin (ODO4310) | 24.3 |
| Melanoma Mets to Lung (OD04321) | 5.8 |
| Lung Margin (OD04321) | 29.7 |
| Normal Kidney | 12.2 |
| Kidney Ca, Nuclear grade 2 (OD04338) | 16.5 |
| Kidney Margin (OD04338) | 6.2 |
| Kidney Ca Nuclear grade 1/2 (OD04339) | 23.2 |
| Kidney Margin (OD04339) | 4.6 |
| Kidney Ca, Clear cell type (OD04340) | 11.8 |
| Kidney Margin (OD04340) | 5.8 |
| Kidney Ca, Nuclear grade 3 (OD04348) | 56.6 |
| Kidney Margin (OD04348) | 22.8 |
| Kidney Cancer (OD04622-01) | 24.0 |
| Kidney Margin (OD04622-03) | 2.6 |
| Kidney Cancer (OD04450-01) | 0.9 |
| Kidney Margin (OD04450-03) | 2.6 |
| Kidney Cancer 8120607 | 5.7 |
| Kidney Margin 8120608 | 3.6 |
| Kidney Cancer 8120613 | 5.7 |
| Kidney Margin 8120614 | 3.5 |
| Kidney Cancer 9010320 | 61.1 |
| Kidney Margin 9010321 | 24.1 |
| Normal Uterus | 5.4 |
| Uterus Cancer 064011 | 5.1 |
| Normal Thyroid | 5.9 |
| Thyroid Cancer 064010 | 3.1 |
| Thyroid Cancer A302152 | 3.3 |
| Thyroid Margin A302153 | 13.5 |
| Normal Breast | 13.2 |
| Breast Cancer (OD04566) | 40.9 |
| Breast Cancer (OD04590-01) | 29.5 |
| Breast Cancer Mets (OD04590-03) | 26.1 |
| Breast Cancer Metastasis (OD04655-05) | 31.9 |
| Breast Cancer 064006 | 16.0 |
| Breast Cancer 1024 | 11.3 |
| Breast Cancer 9100266 | 3.7 |
| Breast Margin 9100265 | 4.7 |
| Breast Cancer A209073 | 5.7 |
| Breast Margin A209073 | 1.5 |
| Normal Liver | 8.4 |
| Liver Cancer 064003 | 8.4 |
| Liver Cancer 1025 | 25.3 |
| Liver Cancer 1026 | 6.4 |
| Liver Cancer 6004-T | 40.1 |
| Liver Tissue 6004-N | 17.8 |
| Liver Cancer 6005-T | 10.2 |
| Liver Tissue 6005-N | 18.6 |
| Normal Bladder | 60.7 |
| Bladder Cancer 1023 | 5.1 |
| Bladder Cancer A302173 | 18.6 |
| Bladder Cancer (OD04718-01) | 28.5 |
| Bladder Normal Adjacent (OD04718-03) | 48.6 |
| Normal Ovary | 0.0 |
| Ovarian Cancer 064008 | 16.2 |
| Ovarian Cancer (OD04768-07) | 16.4 |
| Ovary Margin (OD04768-08) | 19.2 |
| Normal Stomach | 6.4 |
| Gastric Cancer 9060358 | 2.0 |
| Stomach Margin 9060359 | 5.1 |
| Gastric Cancer 9060395 | 8.4 |
| Stomach Margin 9060394 | 10.2 |
| Gastric Cancer 9060397 | 17.4 |
| Stomach Margin 9060396 | 5.3 |
| Gastric Cancer 064005 | 14.7 |

Column A - Rel. Exp. (%) Ag274, Run 170849611

[1042] TABLE QE
Panel 3D

| Tissue Name | A |
|---|---|
| Daoy- Medulloblastoma | 14.7 |
| TE671- Medulloblastoma | 51.1 |
| D283 Med- Medulloblastoma | 0.0 |
| PFSK-1- Primitive Neuroectodermal | 0.0 |
| XF-498- CNS | 0.0 |
| SNB-78- Glioma | 10.5 |
| SF-268- Glioblastoma | 0.0 |
| T98G- Glioblastoma | 10.2 |
| SK-N-SH- Neuroblastoma (metastasis) | 10.4 |
| SF-295- Glioblastoma | 0.0 |
| Cerebellum | 22.7 |
| Cerebellum | 9.0 |
| NCI-H292- Mucoepidermoid lung carcinoma | 0.0 |
| DMS-114- Small cell lung cancer | 6.4 |
| DMS-79- Small cell lung cancer | 32.8 |
| NCI-H146- Small cell lung cancer | 0.0 |
| NCI-H526- Small cell lung cancer | 11.3 |
| NCI-N417- Small cell lung cancer | 0.0 |
| NCI-H82- Small cell lung cancer | 5.0 |
| NCI-H157- Squamous cell lung cancer (metastasis) | 0.0 |
| NCI-H1155- Large cell lung cancer | 25.2 |
| NCI-H1299- Large cell lung cancer | 0.0 |
| NCI-H727- Lung carcinoid | 0.0 |
| NCI-UMC-11- Lung carcinoid | 11.5 |
| LX-1- Small cell lung cancer | 49.7 |
| Colo-205- Colon cancer | 0.0 |
| KM12- Colon cancer | 22.7 |
| KM20L2- Colon cancer | 0.0 |
| NCI-H716- Colon cancer | 0.0 |
| SW-48- Colon adenocarcinoma | 9.7 |
| SW1116- Colon adenocarcinoma | 6.1 |
| LS 174T- Colon adenocarcinoma | 0.0 |
| SW-948- Colon adenocarcinoma | 7.5 |
| SW-480- Colon adenocarcinoma | 0.0 |
| NCI-SNU-5- Gastric carcinoma | 0.0 |
| KATO III- Gastric carcinoma | 66.0 |
| NCI-SNU-16- Gastric carcinoma | 0.0 |
| NCI-SNU-1- Gastric carcinoma | 6.3 |
| RF-1- Gastric adenocarcinoma | 5.5 |
| RF-48- Gastric adenocarcinoma | 10.4 |
| MKN-45- Gastric carcinoma | 0.0 |
| NCI-N87- Gastric carcinoma | 11.1 |
| OVCAR-5- Ovarian carcinoma | 8.8 |
| RL95-2- Uterine carcinoma | 0.0 |
| HelaS3- Cervical adenocarcinoma | 3.4 |
| Ca Ski- Cervical epidermoid carcinoma (metastasis) | 4.2 |
| ES-2- Ovarian clear cell carcinoma | 9.7 |
| Ramos- Stimulated with PMA/ionomycin 6 h | 5.6 |
| Ramos- Stimulated with PMA/ionomycin 14 h | 100.0 |
| MEG-01- Chronic myelogenous leukemia | 11.3 |
| (megokaryoblast) | |
| Raji- Burkitt's lymphoma | 5.4 |
| Daudi- Burkitt's lymphoma | 5.1 |
| U266- B-cell plasmacytoma | 7.4 |
| CA46- Burkitt's lymphoma | 0.0 |
| RL- non-Hodgkin's B-cell lymphoma | 0.0 |
| JM1- pre-B-cell lymphoma | 0.0 |
| Jurkat- T cell leukemia | 0.0 |
| TF-1- Erythroleukemia | 0.0 |
| HUT 78- T-cell lymphoma | 14.9 |
| U937- Histiocytic lymphoma | 9.1 |
| KU-812- Myelogenous leukemia | 39.5 |
| 769-P- Clear cell renal carcinoma | 6.0 |
| Caki-2- Clear cell renal carcinoma | 9.7 |
| SW 839- Clear cell renal carcinoma | 16.4 |
| Rhabdoid kidney tumor | 6.7 |
| Hs766T- Pancreatic carcinoma (LN metastasis) | 0.0 |
| CAPAN-1- Pancreatic adenocarcinoma (liver metastasis) | 11.3 |
| SU86.86- Pancreatic carcinoma (liver metastasis) | 0.0 |
| BxPC-3- Pancreatic adenocarcinoma | 0.0 |
| HPAC- Pancreatic adenocarcinoma | 0.0 |
| MIA PaCa-2- Pancreatic carcinoma | 4.5 |
| CFPAC-1- Pancreatic ductal adenocarcinoma | 7.4 |
| PANC-1 - Pancreatic epithelioid ductal carcinoma | 58.6 |
| T24- Bladder carcinma (transitional cell) | 0.0 |
| 5637- Bladder carcinoma | 11.1 |
| HT-1197- Bladder carcinoma | 0.0 |
| UM-UC-3- Bladder carcinma (transitional cell) | 10.8 |
| A204- Rhabdomyosarcoma | 0.0 |
| HT-1080- Fibrosarcoma | 0.0 |
| MG-63- Osteosarcoma | 9.9 |
| SK-LMS-1- Leiomyosarcoma (vulva) | 0.0 |
| SJRH30- Rhabdomyosarcoma (met to bone marrow) | 3.8 |
| A431- Epidermoid carcinoma | 0.0 |
| WM266-4- Melanoma | 0.0 |
| DU 145- Prostate carcinoma (brain metastasis) | 5.5 |
| MDA-MB-468- Breast adenocarcinoma | 10.8 |
| SCC-4- Squamous cell carcinoma of tongue | 0.0 |
| SCC-9- Squamous cell carcinoma of tongue | 0.0 |
| SCC-15- Squamous cell carcinoma of tongue | 0.0 |
| CAL 27- Squamous cell carcinoma of tongue | 0.0 |

Column A - Rel. Exp. (%) Ag274, Run 170745273

[1043] TABLE QF
Panel 4D

| Tissue Name | A | B |
|---|---|---|
| Secondary Th1 act | 0.0 | 0.0 |
| Secondary Th2 act | 0.4 | 0.1 |
| Secondary Tr1 act | 0.2 | 0.2 |
| Secondary Th1 rest | 0.0 | 0.0 |
| Secondary Th2 rest | 0.9 | 0.0 |
| Secondary Tr1 rest | 0.3 | 0.0 |
| Primary Th1 act | 0.4 | 0.0 |
| Primary Th2 act | 0.3 | 0.3 |
| Primary Tr1 act | 0.0 | 0.0 |
| Primary Th1 rest | 0.4 | 0.5 |
| Primary Th2 rest | 0.6 | 0.1 |
| Primary Tr1 rest | 0.0 | 0.3 |
| CD45RA CD4 lymphocyte act | 0.3 | 0.2 |
| CD45RO CD4 lymphocyte act | 0.0 | 0.0 |
| CD8 lymphocyte act | 0.0 | 0.0 |
| Secondary CD8 lymphocyte rest | 0.7 | 0.0 |
| Secondary CD8 lymphocyte act | 0.0 | 0.0 |
| CD4 lymphocyte none | 0.0 | 0.8 |
| 2ry Th1/Th2/Tr1_anti-CD95 CH11 | 0.3 | 0.0 |
| LAK cells rest | 13.3 | 12.6 |
| LAK cells IL-2 | 0.5 | 0.4 |
| LAK cells IL-2 + IL-12 | 0.5 | 1.6 |
| LAK cells IL-2 + IFN gamma | 0.8 | 0.4 |
| LAK cells IL-2 + IL-18 | 0.5 | 0.4 |
| LAK cells PMA/ionomycin | 5.4 | 6.9 |
| NK Cells IL-2 rest | 0.5 | 0.1 |
| Two Way MLR 3 day | 44.4 | 38.7 |
| Two Way MLR 5 day | 8.0 | 6.9 |
| Two Way MLR 7 day | 0.4 | 0.5 |
| PBMC rest | 1.4 | 1.7 |
| PBMC PWM | 0.7 | 0.5 |
| PBMC PHA-L | 2.6 | 3.2 |
| Ramos (B cell) none | 0.0 | 0.3 |
| Ramos (B cell) ionomycin | 0.0 | 0.7 |
| B lymphocytes PWM | 0.0 | 0.0 |
| B lymphocytes CD40L and IL-4 | 0.3 | 0.6 |
| EOL-1 dbcAMP | 0.2 | 0.4 |
| EOL-1 dbcAMP PMA/ionomycin | 0.0 | 0.3 |
| Dendritic cells none | 7.9 | 6.4 |
| Dendritic cells LPS | 32.1 | 31.6 |
| Dendritic cells anti-CD40 | 3.8 | 3.6 |
| Monocytes rest | 7.9 | 8.4 |
| Monocytes LPS | 100.0 | 100.0 |
| Macrophages rest | 3.6 | 3.5 |
| Macrophages LPS | 95.3 | 88.3 |
| HUVEC none | 0.2 | 0.0 |
| HUVEC starved | 0.4 | 0.3 |
| HUVEC IL-1beta | 0.5 | 0.0 |
| HUVEC IFN gamma | 0.0 | 0.1 |
| HUVEC TNF alpha + IFN gamma | 0.3 | 0.1 |
| HUVEC TNF alpha + IL4 | 0.0 | 0.2 |
| HUVEC IL-11 | 0.2 | 0.0 |
| Lung Microvascular EC none | 0.0 | 0.3 |
| Lung Microvascular EC TNFalpha + IL-1beta | 0.0 | 0.3 |
| Microvascular Dermal EC none | 0.0 | 0.0 |
| Microsvasular Dermal EC TNFalpha + IL-1beta | 0.0 | 0.2 |
| Bronchial epithelium TNFalpha + IL1beta | 0.0 | 0.3 |
| Small airway epithelium none | 0.0 | 0.0 |
| Small airway epithelium TNFalpha + IL-1beta | 0.0 | 0.1 |
| Coronery artery SMC rest | 0.2 | 0.0 |
| Coronery artery SMC TNFalpha + IL-1beta | 0.0 | 0.0 |
| Astrocytes rest | 0.0 | 0.0 |
| Astrocytes TNFalpha + IL-1beta | 1.0 | 0.3 |
| KU-812 (Basophil) rest | 0.0 | 0.0 |
| KU-812 (Basophil) PMA/ionomycin | 0.4 | 0.1 |
| CCD1106 (Keratinocytes) none | 0.4 | 0.0 |
| CCD1106 (Keratinocytes) TNFalpha + IL-1beta | 0.3 | 0.9 |
| Liver cirrhosis | 2.3 | 1.5 |
| Lupus kidney | 1.8 | 0.8 |
| NCI-H292 none | 0.0 | 0.4 |
| NCI-H292 IL-4 | 0.3 | 0.2 |
| NCI-H292 IL-9 | 0.0 | 0.0 |
| NCI-H292 IL-13 | 0.0 | 0.2 |
| NCI-H292 IFN gamma | 0.0 | 0.0 |
| HPAEC none | 0.3 | 0.0 |
| HPAEC TNF alpha + IL-1 beta | 0.0 | 0.0 |
| Lung fibroblast none | 0.3 | 0.0 |
| Lung fibroblast TNF alpha + IL-1 beta | 0.3 | 0.0 |
| Lung fibroblast IL-4 | 0.4 | 0.4 |
| Lung fibroblast IL-9 | 0.0 | 0.0 |
| Lung fibroblast IL-13 | 0.0 | 0.0 |
| Lung fibroblast IFN gamma | 0.0 | 0.3 |
| Dermal fibroblast CCD1070 rest | 0.7 | 0.2 |
| Dermal fibroblast CCD1070 TNF alpha | 0.4 | 0.0 |
| Dermal fibroblast CCD1070 IL-1 beta | 0.0 | 0.1 |
| Dermal fibroblast IFN gamma | 0.0 | 0.0 |
| Dermal fibroblast IL-4 | 0.4 | 0.2 |
| IBD Colitis 2 | 0.0 | 0.2 |
| IBD Crohn's | 0.6 | 0.7 |
| Colon | 4.1 | 4.1 |
| Lung | 7.5 | 8.0 |
| Thymus | 0.9 | 0.1 |
| Kidney | 4.8 | 3.0 |

Column A - Rel. Exp. (%) Ag274, Run 164533655
Column B - Rel. Exp. (%) Ag274, Run 164534874

[1044] TABLE QG
Panel 5D

| Tissue Name | A |
|---|---|
| 97457_Patient-02go_adipose | 100.0 |
| 97476_Patient-07sk_skeletal muscle | 18.9 |
| 97477_Patient-07ut_uterus | 15.2 |
| 97478_Patient-07pl_placenta | 28.9 |
| 97481_Patient-08sk_skeletal muscle | 17.1 |
| 97482_Patient-08ut_uterus | 7.4 |
| 97483_Patient-08pl_placenta | 25.9 |
| 97486_Patient-09sk_skeletal muscle | 22.1 |
| 97487_Patient-09ut_uterus | 13.7 |
| 97488_Patient-09pl_placenta | 6.7 |
| 97492_Patient-10ut_uterus | 23.0 |
| 97493_Patient-10pl_placenta | 16.5 |
| 97495_Patient-11go_adipose | 26.1 |
| 97496_Patient-11sk_skeletal muscle | 11.1 |
| 97497_Patient-11ut_uterus | 9.4 |
| 97498_Patient-11pl_placenta | 14.7 |
| 97500_Patient-12go_adipose | 25.0 |
| 97501_Patient-12sk_skeletal muscle | 7.0 |
| 97502_Patient-12ut_uterus | 37.9 |
| 97503_Patient-12pl_placenta | 9.5 |
| 94721_Donor 2 U - A_Mesenchymal Stem Cells | 6.5 |
| 94722_Donor 2 U - B_Mesenchymal Stem Cells | 0.0 |
| 94723_Donor 2 U - C_Mesenchymal Stem Cells | 0.0 |
| 94709_Donor 2 AM - A_adipose | 0.0 |
| 94710_Donor 2 AM - B_adipose | 10.3 |
| 94711_Donor 2 AM - C_adipose | 3.6 |
| 94712_Donor 2 AD - A_adipose | 0.0 |
| 94713_Donor 2 AD - B_adipose | 3.4 |
| 94714_Donor 2 AD - C_adipose | 0.0 |
| 94742_Donor 3 U - A_Mesenchymal Stem Cells | 6.3 |
| 94743_Donor 3 U - B_Mesenchymal Stem Cells | 7.4 |
| 94730_Donor 3 AM - A_adipose | 3.0 |
| 94731_Donor 3 AM - B_adipose | 10.2 |
| 94732_Donor 3 AM - C_adipose | 6.9 |
| 94733_Donor 3 AD - A_adipose | 1.6 |
| 94734_Donor 3 AD - B_adipose | 9.0 |
| 94735_Donor 3 AD - C_adipose | 6.6 |
| 77138_Liver_HepG2untreated | 7.4 |
| 73556_Heart_Cardiac stromal cells (primary) | 0.0 |
| 81735_Small Intestine | 22.1 |
| 72409_Kidney_Proximal Convoluted Tubule | 3.2 |
| 82685_Small intestine_Duodenum | 11.4 |
| 90650_Adrenal_Adrenocortical adenoma | 15.4 |
| 72410_Kidney_HRCE | 10.2 |
| 72411_Kidney_HRE | 2.9 |
| 73139_Uterus_Uterine smooth muscle cells | 3.2 |

Column A - Rel. Exp. (%) Ag274, Run 255179442

[1045] AI_comprehensive panel_v1.0 Summary: Ag274 Highest expression of this gene was detected in synovium of an osteooarthritis (OA) patient (CT=28.6). This gene showed a higher level of expression in the bone and synovium samples from OA patients relative to samples from rheumatoid arthritis patients and normal tissues. This gene encodes sialoadhesin (CD169), a lectin that binds to alpha-2,6-linked, sialic acid residues. It has been previously reported that expression of sialoadhesin is highly induced in synovial macrophages from patients with rheumatoid arthritis and in animal models of arthritis (Hartnell, A. Blood 97: 288-296; Dijkstra, C. D. Scand. J. Immunol. 26:5132). The expression profile in this panel confirmed expression of this gene in rheumatoid tissue and also demonstrated an upregulation in synovial tissue from OA patients. Modulation of this gene, expressed protein and/or use of antibodies or small molecule drug targeting the gene or gene product is useful in the treatment of osteoarthritis.

[1046] Low expression of this gene was also seen in samples from COPD lung, emphysema, atopic asthma, asthma, Crohn's disease (normal matched control and diseased), ulcerative colitis(normal matched control and diseased), and psoriasis (normal matched control and diseased). Therapeutic modulation of this gene or gene product is useful for the amelioration of symptoms/conditions associated with autoimmune and inflammatory disorders including psoriasis, asthma, inflammatory bowel disease, and rheumatoid arthritis.

[1047] General_screening₁₃ panel_v1.4 Summary: Ag274 Highest expression of this gene was detected in bladder (CTs=27-29). Expression of this gene was mainly associated with normal tissues in this panel. Among tissues with metabolic or endocrine function, this gene was expressed at moderate levels in pancreas, adipose, adrenal gland, thyroid, pituitary gland, skeletal muscle, heart, liver and the gastrointestinal tract. Therapeutic modulation of this gene or expressed protein is useful in the treatment of endocrine/metabolically related diseases, such as obesity and diabetes.

[1048] This gene was expressed at low levels in all regions of the central nervous system examined, including amygdala, hippocampus, substantia nigra, thalamus, cerebellum, cerebral cortex, and spinal cord. Therapeutic modulation of this gene product is useful in the treatment of central nervous system disorders such as Alzheimer's disease, Parkinson's disease, epilepsy, multiple sclerosis, schizophrenia and depression.

[1049] Significant expression of this gene was also seen in a colon cancer cell line. Modulation of this gene or encoded protein is useful in the treatment of colon cancer.

[1050] Panel 2D Summary: Ag274 Highest expression of this gene was detected in muscle cancer metastasized from lung (CT=29). Moderate expression of this gene was also seen in normal and cancer samples from colon, lung, kidney, liver, prostate, bladder, ovary and stomach. Therapeutic modulation of this gene or expressed protein is useful in the treatment of these cancers.

[1051] Panel 3D Summary: Ag274 Expression of this gene was highest in the Ramos cell line stimulated with PMA and ionomycin for 16 hrs, followed by lower expression in cell lines derived from gastric carcinoma and pancreatic ductal carcinoma, and lower still in small cell lung carcinoma, medulloblastoma and myelogenous leukemia.

[1052] Panel 4D Summary: Ag274 Highest expression of this gene was detected in LPS treated monocytes (CTs=27). The expression of this gene was limited to LPS activated monocytes, macrophages and related cell types or derived from monocytes (dendritic cells). The putative sialoadhesin encoded by this gene directs monocyte extravasation into tissues, and acts as a cell:cell interaction molecule. Modulation of this gene, expressed protein and/or use of antibodies is useful for blocking monocyte extravasation and reducing or inhibiting inflammation associated with asthma, psoriasis, emphysema, arthritis, and other inflammatory diseases.

[1053] Panel 5D Summary: Ag274 Highest expression of this gene was detected in adipose of a diabetic patient (CT=31). Significant expression of this gene was also seen in skeletal muscle and placenta from obese and/or diabetic patients. Therapeutic modulation of this gene or expressed protein is useful in the treatment of metabolic/endocrine diseases such as obesity and diabetes.

[1054] R. CG51992-05: CTCL Tumor Antigens E57-1

[1055] Expression of gene CG51992-05 was assessed using the primer-probe sets Ag1920, Ag2775, Ag2776, and Ag5232, described in Tables RA, RB, RC, and RD. Results of the RTQ-PCR runs are shown in Tables RE, RF, RG, and RH.

TABLE RA
Probe Name Ag1920

| | | | | |
|---|---|---|---|---|
| Primers | Sequences | Length | Start Position | SEQ ID No |

| | | | | |
|---|---|---|---|---|
| Forward | 5′-gctcctggagaatggaaatc-3′ | 20 | 902 | 1324 |
| Probe | TET-5′-tccctctgaagatcctggcaactttt-3′-TAMRA | 26 | 876 | 1325 |
| Reverse | 5′-caagctactgcaactcaaatcc-3′ | 22 | 839 | 1326 |

[1056] TABLE RB
Probe Name Ag2775

| | | | | |
|---|---|---|---|---|
| Primers | Sequences | Length | Start Position | SEQ ID No |

| | | | | |
|---|---|---|---|---|
| Forward | 5′-caggatcttcagagggagattt-3′ | 22 | 885 | 1327 |
| Probe | TET-5′-ctccaggagcagatctctcatctgca-3′-TAMRA | 26 | 912 | 1328 |
| Reverse | 5′-atgttgggagtgaatcacaaac-3′ | 22 | 938 | 1329 |

[1057] TABLE RC
Probe Name Ag2776

| | | | | |
|---|---|---|---|---|
| Primers | Sequences | Length | Start Position | SEQ ID No |

| | | | | |
|---|---|---|---|---|
| Forward | 5′-aaatgtcatcttcttgcaaagc-3′ | 22 | 1333 | 1330 |
| Probe | TET-5′-tccatttaaataatggcattttgcca-3′-TAMRA | 26 | 1289 | 1331 |
| Reverse | 5′-cagcccaagtttcatgttaaaa-3′ | 22 | 1267 | 1332 |

[1058] TABLE RD
Probe Name Ag5232

| | | | | |
|---|---|---|---|---|
| Primers | Sequences | Length | Start Position | SEQ ID No |

| | | | | |
|---|---|---|---|---|
| Forward | 5′-ctagatgcaaagctgcaagc-3′ | 20 | 531 | 1333 |
| Probe | TET-5′-aagcaggagcagcagctctgagaaac-3′-TAMRA | 26 | 559 | 1334 |
| Reverse | 5′-cttcttcagattgcgtttgg-3′ | 20 | 611 | 1335 |

[1059] TABLE RE
General_screening_panel_v1.5

| Tissue Name | A |
|---|---|
| Adipose | 3.7 |
| Melanoma* Hs688(A).T | 0.0 |
| Melanoma* Hs688(B).T | 1.6 |
| Melanoma* M14 | 0.2 |
| Melanoma* LOXIMVI | 0.0 |
| Melanoma* SK-MEL-5 | 0.0 |
| Squamous cell carcinoma SCC-4 | 3.1 |
| Testis Pool | 7.9 |
| Prostate ca.* (bone met) PC-3 | 3.9 |
| Prostate Pool | 4.1 |
| Placenta | 1.4 |
| Uterus Pool | 1.3 |
| Ovarian ca. OVCAR-3 | 1.5 |
| Ovarian ca. SK-OV-3 | 28.9 |
| Ovarian ca. OVCAR-4 | 0.3 |
| Ovarian ca. OVCAR-5 | 2.9 |
| Ovarian ca. IGROV-1 | 0.0 |
| Ovarian ca. OVCAR-8 | 0.1 |
| Ovary | 9.4 |
| Breast ca. MCF-7 | 0.1 |
| Breast ca. MDA-MB-231 | 11.4 |
| Breast ca. BT 549 | 71.7 |
| Breast ca. T47D | 0.0 |
| Breast ca. MDA-N | 0.0 |
| Breast Pool | 4.0 |
| Trachea | 3.2 |
| Lung | 5.1 |
| Fetal Lung | 100.0 |
| Lung ca. NCI-N417 | 0.0 |
| Lung ca. LX-1 | 2.2 |
| Lung ca. NCI-H146 | 0.0 |
| Lung ca. SHP-77 | 0.0 |
| Lung ca. A549 | 11.3 |
| Lung ca. NCI-H526 | 0.0 |
| Lung ca. NCI-H23 | 1.5 |
| Lung ca. NCI-H460 | 94.0 |
| Lung ca. HOP-62 | 1.2 |
| Lung ca. NCI-H522 | 0.0 |
| Liver | 0.0 |
| Fetal Liver | 20.9 |
| Liver ca. HepG2 | 19.8 |
| Kidney Pool | 6.0 |
| Fetal Kidney | 12.9 |
| Renal ca. 786-0 | 3.0 |
| Renal ca. A498 | 1.6 |
| Renal ca. ACHN | 1.0 |
| Renal ca. UO-31 | 8.4 |
| Renal ca. TK-10 | 7.6 |
| Bladder | 38.4 |
| Gastric ca. (liver met.) NCI-N87 | 4.4 |
| Gastric ca. KATO III | 53.2 |
| Colon ca. SW-948 | 17.9 |
| Colon ca. SW480 | 1.2 |
| Colon ca.* (SW480 met) SW620 | 0.1 |
| Colon ca. HT29 | 1.3 |
| Colon ca. HCT-116 | 7.3 |
| Colon ca. CaCo-2 | 7.5 |
| Colon cancer tissue | 7.0 |
| Colon ca. SW1116 | 0.8 |
| Colon ca. Colo-205 | 0.6 |
| Colon ca. SW-48 | 1.0 |
| Colon Pool | 1.8 |
| Small Intestine Pool | 2.5 |
| Stomach Pool | 4.1 |
| Bone Marrow Pool | 3.4 |
| Fetal Heart | 1.7 |
| Heart Pool | 7.2 |
| Lymph Node Pool | 6.2 |
| Fetal Skeletal Muscle | 0.0 |
| Skeletal Muscle Pool | 11.8 |
| Spleen Pool | 15.0 |
| Thymus Pool | 2.2 |
| CNS cancer (glio/astro) U87-MG | 0.0 |
| CNS cancer (glio/astro) U-118-MG | 0.0 |
| CNS cancer (neuro; met) SK-N-AS | 0.1 |
| CNS cancer (astro) SF-539 | 0.0 |
| CNS cancer (astro) SNB-75 | 0.3 |
| CNS cancer (glio) SNB-19 | 0.0 |
| CNS cancer (glio) SF-295 | 0.0 |
| Brain (Amygdala) Pool | 1.8 |
| Brain (cerebellum) | 1.0 |
| Brain (fetal) | 0.4 |
| Brain (Hippocampus) Pool | 0.3 |
| Cerebral Cortex Pool | 3.1 |
| Brain (Substantia nigra) Pool | 0.8 |
| Brain (Thalamus) Pool | 2.3 |
| Brain (whole) | 0.1 |
| Spinal Cord Pool | 2.1 |
| Adrenal Gland | 1.5 |
| Pituitary gland Pool | 3.2 |
| Salivary Gland | 0.4 |
| Thyroid (female) | 0.2 |
| Pancreatic ca. CAPAN2 | 1.6 |
| Pancreas Pool | 9.9 |

Column A - Rel. Exp. (%) Ag5232, Run 229385253

[1060] TABLE RF
Panel 1.3D

| Tissue Name | A | B |
|---|---|---|
| Liver adenocarcinoma | 1.9 | 3.8 |
| Pancreas | 1.2 | 0.8 |
| Pancreatic ca. CAPAN 2 | 1.4 | 0.9 |
| Adrenal gland | 4.0 | 10.7 |
| Thyroid | 3.3 | 2.6 |
| Salivary gland | 2.3 | 2.2 |
| Pituitary gland | 14.7 | 11.8 |
| Brain (fetal) | 0.2 | 0.0 |
| Brain (whole) | 10.4 | 9.7 |
| Brain (amygdala) | 5.5 | 3.7 |
| Brain (cerebellum) | 0.2 | 0.7 |
| Brain (hippocampus) | 19.5 | 30.1 |
| Brain (substantia nigra) | 2.0 | 1.8 |
| Brain (thalamus) | 8.8 | 13.4 |
| Cerebral Cortex | 20.0 | 14.3 |
| Spinal cord | 3.5 | 3.7 |
| glio/astro U87-MG | 0.5 | 0.0 |
| glio/astro U-118-MG | 0.0 | 0.0 |
| astrocytoma SW1783 | 0.2 | 0.0 |
| neuro*; met SK-N-AS | 0.6 | 0.0 |
| astrocytoma SF-539 | 0.0 | 0.0 |
| astrocytoma SNB-75 | 10.3 | 4.8 |
| glioma SNB-19 | 0.0 | 0.0 |
| glioma U251 | 0.3 | 0.0 |
| glioma SF-295 | 0.2 | 0.0 |
| Heart (fetal) | 1.7 | 1.0 |
| Heart | 8.9 | 11.2 |
| Skeletal muscle (fetal) | 2.7 | 0.7 |
| Skeletal muscle | 1.7 | 2.0 |
| Bone marrow | 2.7 | 3.9 |
| Thymus | 0.0 | 0.0 |
| Spleen | 16.3 | 9.2 |
| Lymph node | 4.3 | 4.1 |
| Colorectal | 42.0 | 12.5 |
| Stomach | 29.9 | 7.1 |
| Small intestine | 38.4 | 40.6 |
| Colon ca. SW480 | 1.2 | 0.0 |
| Colon ca.* SW620(SW480 met) | 0.0 | 0.0 |
| Colon ca. HT29 | 4.7 | 0.5 |
| Colon ca. HCT-116 | 5.3 | 3.5 |
| Colon ca. CaCo-2 | 10.7 | 4.7 |
| Colon ca. tissue(ODO3866) | 6.3 | 3.5 |
| Colon ca. HCC-2998 | 5.6 | 4.7 |
| Gastric ca.* (liver met) NCI-N87 | 7.7 | 3.3 |
| Bladder | 22.1 | 21.5 |
| Trachea | 15.3 | 4.4 |
| Kidney | 2.2 | 4.0 |
| Kidney (fetal) | 8.4 | 14.9 |
| Renal ca. 786-0 | 7.6 | 2.5 |
| Renal ca. A498 | 10.7 | 4.3 |
| Renal ca. RXF 393 | 2.1 | 0.0 |
| Renal ca. ACHN | 0.9 | 0.0 |
| Renal ca. UO-31 | 5.3 | 0.0 |
| Renal ca. TK-10 | 4.5 | 1.8 |
| Liver | 5.3 | 9.5 |
| Liver (fetal) | 21.8 | 39.0 |
| Liver ca. (hepatoblast) HepG2 | 19.5 | 9.7 |
| Lung | 38.7 | 53.6 |
| Lung (fetal) | 100.0 | 100.0 |
| Lung ca. (small cell) LX-1 | 2.8 | 2.3 |
| Lung ca. (small cell) NCI-H69 | 0.0 | 0.0 |
| Lung ca. (s. cell var.) SHP-77 | 0.0 | 0.0 |
| Lung ca. (large cell)NCI-H460 | 75.3 | 38.4 |
| Lung ca. (non-sm. cell) A549 | 12.2 | 10.0 |
| Lung ca. (non-s. cell) NCI-H23 | 2.3 | 2.3 |
| Lung ca. (non-s. cell) HOP-62 | 2.2 | 0.6 |
| Lung ca. (non-s. cl) NCI-H522 | 0.0 | 0.0 |
| Lung ca. (squam.) SW 900 | 9.3 | 12.0 |
| Lung ca. (squam.) NCI-H596 | 0.0 | 0.0 |
| Mammary gland | 3.8 | 1.9 |
| Breast ca.* (pl. ef) MCF-7 | 0.0 | 0.0 |
| Breast ca.* (pl. ef) MDA-MB-231 | 15.5 | 10.4 |
| Breast ca.* (pl. ef) T47D | 0.0 | 0.0 |
| Breast ca. BT-549 | 10.2 | 6.2 |
| Breast ca. MDA-N | 0.0 | 0.0 |
| Ovary | 13.1 | 7.7 |
| Ovarian ca. OVCAR-3 | 1.7 | 0.6 |
| Ovarian ca. OVCAR-4 | 0.1 | 0.0 |
| Ovarian ca. OVCAR-5 | 7.3 | 1.2 |
| Ovarian ca. OVCAR-8 | 2.4 | 0.0 |
| Ovarian ca. IGROV-1 | 0.0 | 0.0 |
| Ovarian ca.* (ascites) SK-OV-3 | 9.7 | 4.0 |
| Uterus | 9.6 | 6.3 |
| Placenta | 34.2 | 37.6 |
| Prostate | 12.9 | 12.6 |
| Prostate ca.* (bone met)PC-3 | 1.2 | 0.8 |
| Testis | 39.5 | 13.0 |
| Melanoma Hs688(A).T | 0.0 | 0.0 |
| Melanoma* (met) Hs688(B).T | 0.3 | 0.0 |
| Melanoma UACC-62 | 0.0 | 0.0 |
| Melanoma M14 | 0.0 | 0.0 |
| Melanoma LOX IMVI | 0.0 | 0.0 |
| Melanoma* (met) SK-MEL-5 | 0.0 | 0.0 |
| Adipose | 3.9 | 3.4 |

Column A - Rel. Exp. (%) Ag2775, Run 153780557
Column B - Rel. Exp. (%) Ag2776, Run 153792445

[1061] TABLE RG
Panel 2D

| Tissue Name | A | B |
|---|---|---|
| Normal Colon | 94.0 | 62.4 |
| CC Well to Mod Diff (ODO3866) | 5.0 | 3.1 |
| CC Margin (ODO3866) | 21.6 | 18.8 |
| CC Gr.2 rectosigmoid (ODO3868) | 4.5 | 2.0 |
| CC Margin (ODO3868) | 1.4 | 1.2 |
| CC Mod Diff (ODO3920) | 8.2 | 4.9 |
| CC Margin (ODO3920) | 34.4 | 28.5 |
| CC Gr.2 ascend colon (ODO3921) | 20.0 | 17.7 |
| CC Margin (ODO3921) | 12.2 | 10.2 |
| CC from Partial Hepatectomy | 11.3 | 4.8 |
| (ODO4309) Mets | | |
| Liver Margin (ODO4309) | 10.2 | 5.6 |
| Colon mets to lung (OD04451-01) | 4.7 | 0.8 |
| Lung Margin (OD04451-02) | 14.2 | 6.4 |
| Normal Prostate 6546-1 | 7.6 | 5.4 |
| Prostate Cancer (OD04410) | 2.9 | 2.7 |
| Prostate Margin (OD04410) | 7.0 | 3.4 |
| Prostate Cancer (OD04720-01) | 7.0 | 4.0 |
| Prostate Margin (OD04720-02) | 8.1 | 6.5 |
| Normal Lung 061010 | 44.1 | 45.4 |
| Lung Met to Muscle (ODO4286) | 4.3 | 5.2 |
| Muscle Margin (ODO4286) | 1.5 | 0.6 |
| Lung Malignant Cancer (OD03126) | 12.3 | 5.6 |
| Lung Margin (OD03126) | 33.7 | 13.8 |
| Lung Cancer (OD04404) | 4.1 | 0.9 |
| Lung Margin (OD04404) | 11.5 | 3.0 |
| Lung Cancer (OD04565) | 2.9 | 0.6 |
| Lung Margin (OD04565) | 19.6 | 3.7 |
| Lung Cancer (OD04237-01) | 6.8 | 3.4 |
| Lung Margin (OD04237-02) | 22.4 | 9.3 |
| Ocular Mel Met to Liver (ODO4310) | 11.3 | 5.8 |
| Liver Margin (ODO4310) | 10.4 | 6.0 |
| Melanoma Mets to Lung (OD04321) | 0.3 | 0.0 |
| Lung Margin (OD04321) | 27.9 | 31.6 |
| Normal Kidney | 7.0 | 3.6 |
| Kidney Ca, Nuclear grade 2 (OD04338) | 1.7 | 0.4 |
| Kidney Margin (OD04338) | 6.0 | 0.5 |
| Kidney Ca Nuclear grade 1/2 (OD04339) | 4.7 | 0.4 |
| Kidney Margin (OD04339) | 11.4 | 1.8 |
| Kidney Ca, Clear cell type (OD04340) | 0.9 | 0.0 |
| Kidney Margin (OD04340) | 10.6 | 3.5 |
| Kidney Ca, Nuclear grade 3 (OD04348) | 0.6 | 0.2 |
| Kidney Margin (OD04348) | 6.4 | 1.6 |
| Kidney Cancer (OD04622-01) | 0.0 | 0.0 |
| Kidney Margin (OD04622-03) | 0.9 | 0.2 |
| Kidney Cancer (OD04450-01) | 4.1 | 1.5 |
| Kidney Margin (OD04450-03) | 5.6 | 1.6 |
| Kidney Cancer 8120607 | 0.0 | 0.0 |
| Kidney Margin 8120608 | 0.1 | 0.0 |
| Kidney Cancer 8120613 | 1.3 | 0.2 |
| Kidney Margin 8120614 | 0.3 | 0.0 |
| Kidney Cancer 9010320 | 1.5 | 0.0 |
| Kidney Margin 9010321 | 1.0 | 0.0 |
| Normal Uterus | 1.8 | 0.8 |
| Uterus Cancer 064011 | 4.6 | 1.4 |
| Normal Thyroid | 3.6 | 1.6 |
| Thyroid Cancer 064010 | 1.7 | 1.1 |
| Thyroid Cancer A302152 | 0.1 | 0.2 |
| Thyroid Margin A302153 | 2.9 | 1.1 |
| Normal Breast | 2.8 | 1.2 |
| Breast Cancer (OD04566) | 2.9 | 0.2 |
| Breast Cancer (OD04590-01) | 1.5 | 0.5 |
| Breast Cancer Mets (OD04590-03) | 4.8 | 1.5 |
| Breast Cancer Metastasis | 0.7 | 0.4 |
| (OD04655-05) | | |
| Breast Cancer 064006 | 2.9 | 1.4 |
| Breast Cancer 1024 | 0.4 | 0.0 |
| Breast Cancer 9100266 | 0.4 | 0.0 |
| Breast Margin 9100265 | 0.1 | 0.2 |
| Breast Cancer A209073 | 1.4 | 0.8 |
| Breast Margin A209073 | 1.5 | 1.0 |
| Normal Liver | 7.7 | 1.7 |
| Liver Cancer 064003 | 8.7 | 6.6 |
| Liver Cancer 1025 | 3.3 | 0.8 |
| Liver Cancer 1026 | 0.8 | 0.3 |
| Liver Cancer 6004-T | 3.8 | 0.7 |
| Liver Tissue 6004-N | 4.7 | 0.7 |
| Liver Cancer 6005-T | 0.8 | 0.2 |
| Liver Tissue 6005-N | 0.4 | 0.3 |
| Normal Bladder | 33.7 | 27.2 |
| Bladder Cancer 1023 | 5.1 | 3.1 |
| Bladder Cancer A302173 | 1.3 | 0.6 |
| Bladder Cancer (OD04718-01) | 12.2 | 9.6 |
| Bladder Normal Adjacent (OD04718-03) | 0.6 | 0.5 |
| Normal Ovary | 2.0 | 1.5 |
| Ovarian Cancer 064008 | 5.8 | 4.0 |
| Ovarian Cancer (OD04768-07) | 0.1 | 0.0 |
| Ovary Margin (OD04768-08) | 0.2 | 0.1 |
| Normal Stomach | 25.9 | 12.3 |
| Gastric Cancer 9060358 | 1.5 | 0.9 |
| Stomach Margin 9060359 | 4.2 | 6.3 |
| Gastric Cancer 9060395 | 14.6 | 9.8 |
| Stomach Margin 9060394 | 8.7 | 12.4 |
| Gastric Cancer 9060397 | 10.9 | 13.5 |
| Stomach Margin 9060396 | 4.8 | 3.3 |
| Gastric Cancer 064005 | 100.0 | 100.0 |

Column A - Rel. Exp. (%) Ag2775, Run 153780568
Column B - Rel. Exp. (%) Ag2776, Run 153792446

[1062] TABLE RH
Panel 4D

| Tissue Name | A | B | C |
|---|---|---|---|
| Secondary Th1 act | 0.0 | 0.0 | 0.0 |
| Secondary Th2 act | 0.4 | 0.0 | 0.6 |
| Secondary Tr1 act | 0.0 | 0.0 | 0.5 |
| Secondary Th1 rest | 0.2 | 0.0 | 0.0 |
| Secondary Th2 rest | 0.0 | 0.0 | 0.2 |
| Secondary Tr1 rest | 0.0 | 0.0 | 0.0 |
| Primary Th1 act | 0.0 | 0.0 | 0.0 |
| Primary Th2 act | 0.0 | 0.0 | 0.2 |
| Primary Tr1 act | 0.2 | 0.2 | 0.0 |
| Primary Th1 rest | 0.0 | 0.1 | 0.0 |
| Primary Th2 rest | 0.0 | 0.0 | 0.2 |
| Primary Tr1 rest | 0.1 | 0.0 | 0.0 |
| CD45RA CD4 lymphocyte act | 0.3 | 0.8 | 0.3 |
| CD45RO CD4 lymphocyte act | 0.0 | 0.0 | 0.3 |
| CD8 lymphocyte act | 0.3 | 0.0 | 0.0 |
| Secondary CD8 lymphocyte rest | 0.0 | 0.0 | 0.0 |
| Secondary CD8 lymphocyte act | 0.0 | 0.0 | 0.2 |
| CD4 lymphocyte none | 0.0 | 0.2 | 0.0 |
| 2ry Th1/Th2/Tr1_anti-CD95 CH11 | 0.0 | 0.0 | 0.3 |
| LAK cells rest | 0.0 | 0.1 | 0.8 |
| LAK cells IL-2 | 0.7 | 0.0 | 0.0 |
| LAK cells IL-2 + IL-12 | 0.2 | 0.4 | 0.0 |
| LAK cells IL-2 + IFN gamma | 0.9 | 0.4 | 0.9 |
| LAK cells IL-2 + IL-18 | 1.0 | 0.0 | 0.6 |
| LAK cells PMA/ionomycin | 0.6 | 0.0 | 0.0 |
| NK Cells IL-2 rest | 0.0 | 0.0 | 0.0 |
| Two Way MLR 3 day | 0.2 | 0.4 | 0.4 |
| Two Way MLR 5 day | 0.0 | 0.0 | 0.0 |
| Two Way MLR 7 day | 0.0 | 0.0 | 0.0 |
| PBMC rest | 0.0 | 0.0 | 0.0 |
| PBMC PWM | 0.6 | 0.0 | 0.7 |
| PBMC PHA-L | 0.0 | 0.4 | 0.0 |
| Ramos (B cell) none | 0.0 | 0.0 | 0.0 |
| Ramos (B cell) ionomycin | 0.0 | 0.0 | 0.0 |
| B lymphocytes PWM | 0.6 | 0.4 | 0.6 |
| B lymphocytes CD40L and IL-4 | 0.0 | 0.0 | 0.0 |
| EOL-1 dbcAMP | 0.2 | 0.0 | 0.0 |
| EOL-1 dbcAMP PMA/ionomycin | 0.0 | 0.0 | 0.0 |
| Dendritic cells none | 0.0 | 0.0 | 0.0 |
| Dendritic cells LPS | 0.4 | 0.0 | 0.0 |
| Dendritic cells anti-CD40 | 0.0 | 0.0 | 0.0 |
| Monocytes rest | 0.0 | 0.0 | 0.0 |
| Monocytes LPS | 0.5 | 0.0 | 0.0 |
| Macrophages rest I | 0.0 | 0.4 | 0.0 |
| Macrophages LPS | 0.0 | 0.0 | 0.0 |
| HUVEC none | 10.8 | 8.4 | 5.8 |
| HUVEC starved | 20.7 | 12.9 | 7.1 |
| HUVEC IL-1 beta | 5.6 | 5.6 | 2.3 |
| HUVEC IFN gamma | 22.1 | 19.9 | 8.2 |
| HUVEC TNF alpha + IFN gamma | 8.4 | 8.8 | 9.2 |
| HUVEC TNF alpha + IL4 | 5.3 | 5.4 | 3.4 |
| HUVEC IL-11 | 2.8 | 3.1 | 2.1 |
| Lung Microvascular EC none | 25.5 | 11.7 | 15.1 |
| Lung Microvascular EC | 12.4 | 10.2 | 9.3 |
| TNFalpha + IL-1beta | | | |
| Microvascular Dermal EC none | 23.3 | 16.5 | 28.5 |
| Microsvasular Dermal EC | 12.4 | 9.4 | 9.9 |
| TNFalpha + IL-1beta | | | |
| Bronchial epithelium TNFalpha + | 18.7 | 2.9 | 2.3 |
| IL1beta | | | |
| Small airway epithelium none | 9.5 | 6.2 | 8.1 |
| Small airway epithelium | 82.4 | 67.4 | 31.2 |
| TNFalpha + IL-1 beta | | | |
| Coronery artery SMC rest | 20.0 | 10.7 | 4.6 |
| Coronery artery SMC TNFalpha + | 10.7 | 10.6 | 2.6 |
| IL-1beta | | | |
| Astrocytes rest | 0.4 | 0.7 | 0.9 |
| Astrocytes TNFalpha + IL-1beta | 2.3 | 1.8 | 1.4 |
| KU-812 (Basophil) rest | 0.9 | 0.3 | 0.4 |
| KU-812 (Basophil) PMA/ionomycin | 4.5 | 4.5 | 2.9 |
| CCD1106 (Keratinocytes) none | 9.0 | 6.6 | 7.6 |
| CCD1106 (Keratinocytes) | 4.6 | 0.8 | 2.6 |
| TNFalpha + IL-1beta | | | |
| Liver cirrhosis | 9.0 | 12.1 | 5.7 |
| Lupus kidney | 1.4 | 1.6 | 0.9 |
| NCI-H292 none | 36.3 | 29.5 | 27.9 |
| NCI-H292 IL-4 | 76.8 | 77.4 | 60.3 |
| NCI-H292 IL-9 | 72.7 | 67.4 | 39.2 |
| NCI-H292 IL-13 | 35.1 | 34.2 | 12.9 |
| NCI-H292 IFN gamma | 100.0 | 100.0 | 59.9 |
| HPAEC none | 5.3 | 3.7 | 2.7 |
| HPAEC TNF alpha + IL-1 beta | 4.8 | 4.2 | 4.3 |
| Lung fibroblast none | 13.2 | 8.7 | 4.9 |
| Lung fibroblast TNF alpha + IL-1 | 30.8 | 28.9 | 20.9 |
| beta | | | |
| Lung fibroblast IL-4 | 22.4 | 18.7 | 13.8 |
| Lung fibroblast IL-9 | 12.4 | 9.2 | 11.6 |
| Lung fibroblast IL-13 | 11.4 | 8.0 | 13.9 |
| Lung fibroblast IFN gamma | 88.9 | 78.5 | 97.3 |
| Dermal fibroblast CCD1070 rest | 2.3 | 3.3 | 2.6 |
| Dermal fibroblast CCD1070 TNF alpha | 3.6 | 3.3 | 3.2 |
| Dermal fibroblast CCD1070 IL-1 beta | 0.8 | 0.8 | 0.5 |
| Dermal fibroblast IFN gamma | 0.2 | 0.2 | 0.0 |
| Dermal fibroblast IL-4 | 0.7 | 0.0 | 0.0 |
| IBD Colitis 2 | 0.2 | 1.4 | 0.0 |
| IBD Crohn's | 9.8 | 17.6 | 10.5 |
| Colon | 83.5 | 72.2 | 100.0 |
| Lung | 40.3 | 27.4 | 44.4 |
| Thymus | 21.6 | 18.4 | 23.8 |
| Kidney | 2.2 | 2.1 | 1.7 |

Column A - Rel. Exp. (%) Ag1920, Run 158535362
Column B - Rel. Exp. (%) Ag2775, Run 153780789
Column C - Rel. Exp. (%) Ag2776, Run 153792447

[1063] General_screening₁₃ panel_v1.5 Summary: Ag5232 Highest expression was seen in fetal lung (CT=29.3), with moderate levels of expression also seen in breast, ovarian, lung and gastric cancer cell lines.

[1064] Panel 1.3D Summary: Ag2775/Ag2776 Expression of this gene was highest in fetal lung. This gene was expressed at higher levels in normal tissues than in the cancer cell lines. Significant expression of this gene was seen throughout the brain as well as in liver, small intestine, placenta, and bladder.

[1065] Panel 2D Summary: Ag2775/Ag2776 Expression of this gene was highest in a gastric cancer sample. Expression of this gene was lower in lung and kidney tumors when compared to the matched normal adjacent tissue. These results were consistent with what is observed in Panel 1.3D. Targeting of this gene or gene product through the use of protein, antibody, or small molecule therapeutics is beneficial in the treatment of lung and kidney cancer.

[1066] Panel 4D Summary: Ag1920/Ag2775/Ag2776 Expression of this gene was highest in lung cells, including in lung fibroblasts, small airway epithelium and the NCI-H292 cell line, a human airway epithelial cell line that produces mucins. These results were consistent with what is observed in Panels 1.3D and 2D. The expression of this gene in cells derived from or within the lung shows that this gene is involved in normal conditions as well as pathological and inflammatory lung disorders that include chronic obstructive pulmonary disease, asthma, allergy and emphysema.

[1067] Moderate expression of this gene was also seen in colon and thymus.

[1068] S. CG52171-04: Hematopoietic PBX-interacting Protein

[1069] Expression of gene CG52171-04 was assessed using the primer-probe set Ag2779, described in Table SA. Results of the RTQ-PCR runs are shown in Tables SB, SC, SD, SE and SF.

TABLE SA
Probe Name Ag2779

| | | | | |
|---|---|---|---|---|
| Primers | Sequences | Length | Start Position | SEQ ID No |

| | | | | |
|---|---|---|---|---|
| Forward | 5′-caacagacaggtgatgatgatg-3′ | 22 | 2097 | 1336 |
| Probe | TET-5′-tgactttgaggacttcatcttcagcca-3′-TAMRA | 27 | 2126 | 1337 |
| Reverse | 5′-cagtgctttgtctccaaagaag-3′ | 22 | 2153 | 1338 |

[1070] TABLE SB
AI_comprehensive panel_v1.0

| Tissue Name | A |
|---|---|
| 110967 COPD-F | 32.8 |
| 110980 COPD-F | 28.7 |
| 110968 COPD-M | 45.4 |
| 110977 COPD-M | 70.7 |
| 110989 Emphysema-F | 73.7 |
| 110992 Emphysema-F | 25.7 |
| 110993 Emphysema-F | 27.2 |
| 110994 Emphysema-F | 14.9 |
| 110995 Emphysema-F | 43.5 |
| 110996 Emphysema-F | 10.7 |
| 110997 Asthma-M | 8.7 |
| 111001 Asthma-F | 25.0 |
| 111002 Asthma-F | 33.9 |
| 111003 Atopic Asthma-F | 27.2 |
| 111004 Atopic Asthma-F | 43.8 |
| 111005 Atopic Asthma-F | 27.4 |
| 111006 Atopic Asthma-F | 7.3 |
| 111417 Allergy-M | 1.2 |
| 112347 Allergy-M | 2.9 |
| 112349 Normal Lung-F | 2.4 |
| 112357 Normal Lung-F | 100.0 |
| 112354 Normal Lung-M | 32.1 |
| 112374 Crohns-F | 24.1 |
| 112389 Match Control Crohns-F | 17.7 |
| 112375 Crohns-F | 25.9 |
| 112732 Match Control Crohns-F | 39.5 |
| 112725 Crohns-M | 3.0 |
| 112387 Match Control Crohns-M | 31.6 |
| 112378 Crohns-M | 2.3 |
| 112390 Match Control Crohns-M | 45.7 |
| 112726 Crohns-M | 45.4 |
| 112731 Match Control Crohns-M | 29.5 |
| 112380 Ulcer Col-F | 27.4 |
| 112734 Match Control Ulcer Col-F | 57.8 |
| 112384 Ulcer Col-F | 35.4 |
| 112737 Match Control Ulcer Col-F | 11.6 |
| 112386 Ulcer Col-F | 19.3 |
| 112738 Match Control Ulcer Col-F | 13.3 |
| 112381 Ulcer Col-M | 3.0 |
| 112735 Match Control Ulcer Col-M | 11.0 |
| 112382 Ulcer Col-M | 14.8 |
| 112394 Match Control Ulcer Col-M | 8.5 |
| 112383 Ulcer Col-M | 26.1 |
| 112736 Match Control Ulcer Col-M | 9.9 |
| 112423 Psoriasis-F | 18.3 |
| 112427 Match Control Psoriasis-F | 71.7 |
| 112418 Psoriasis-M | 28.1 |
| 112723 Match Control Psoriasis-M | 35.6 |
| 112419 Psoriasis-M | 45.1 |
| 112424 Match Control Psoriasis-M | 15.7 |
| 112420 Psoriasis-M | 62.0 |
| 112425 Match Control Psoriasis-M | 40.1 |
| 104689 (MF) OA Bone-Backus | 31.2 |
| 104690 (MF) Adj “Normal” Bone-Backus | 21.0 |
| 104691 (MF) OA Synovium-Backus | 41.5 |
| 104692 (BA) OA Cartilage-Backus | 64.2 |
| 104694 (BA) OA Bone-Backus | 28.5 |
| 104695 (BA) Adj “Normal” Bone-Backus | 35.1 |
| 104696 (BA) OA Synovium-Backus | 28.7 |
| 104700 (SS) OA Bone-Backus | 18.8 |
| 104701 (SS) Adj “Normal” Bone-Backus | 29.5 |
| 104702 (SS) OA Synovium-Backus | 62.9 |
| 117093 OA Cartilage Rep7 | 46.7 |
| 112672 OA Bone5 | 74.7 |
| 112673 OA Synovium5 | 28.9 |
| 112674 OA Synovial Fluid cells5 | 28.5 |
| 117100 OA Cartilage Rep14 | 20.7 |
| 112756 OA Bone9 | 16.3 |
| 112757 OA Synovium9 | 45.1 |
| 112758 OA Synovial Fluid Cells9 | 14.4 |
| 117125 RA Cartilage Rep2 | 77.9 |
| 113492 Bone2 RA | 24.8 |
| 113493 Synovium2 RA | 8.1 |
| 113494 Syn Fluid Cells RA | 14.3 |
| 113499 Cartilage4 RA | 18.3 |
| 113500 Bone4 RA | 22.5 |
| 113501 Synovium4 RA | 14.1 |
| 113502 Syn Fluid Cells4 RA | 10.7 |
| 113495 Cartilage3 RA | 17.0 |
| 113496 Bone3 RA | 19.8 |
| 113497 Synovium3 RA | 11.9 |
| 113498 Syn Fluid Cells3 RA | 28.1 |
| 117106 Normal Cartilage Rep20 | 50.0 |
| 113663 Bone3 Normal | 3.3 |
| 113664 Synovium3 Normal | 1.1 |
| 113665 Syn Fluid Cells3 Normal | 2.0 |
| 117107 Normal Cartilage Rep22 | 6.4 |
| 113667 Bone4 Normal | 21.6 |
| 113668 Synovium4 Normal | 24.8 |
| 113669 Syn Fluid Cells4 Normal | 48.6 |

Column A - Rel. Exp. (%) Ag2779, Run 249247310

[1071] TABLE SC
Panel 1.3D

| Tissue Name | A |
|---|---|
| Liver adenocarcinoma | 3.5 |
| Pancreas | 1.2 |
| Pancreatic ca. CAPAN 2 | 0.3 |
| Adrenal gland | 3.7 |
| Thyroid | 12.1 |
| Salivary gland | 2.1 |
| Pituitary gland | 14.9 |
| Brain (fetal) | 0.6 |
| Brain (whole) | 4.0 |
| Brain (amygdala) | 7.0 |
| Brain (cerebellum) | 2.1 |
| Brain (hippocampus) | 11.0 |
| Brain (substantia nigra) | 2.5 |
| Brain (thalamus) | 6.4 |
| Cerebral Cortex | 10.0 |
| Spinal cord | 17.2 |
| glio/astro U87-MG | 2.8 |
| glio/astro U-118-MG | 1.6 |
| astrocytoma SW1783 | 2.9 |
| neuro*; met SK-N-AS | 2.2 |
| astrocytoma SF-539 | 3.3 |
| astrocytoma SNB-75 | 2.6 |
| glioma SNB-19 | 3.2 |
| glioma U251 | 2.5 |
| glioma SF-295 | 4.6 |
| Heart (fetal) | 15.8 |
| Heart | 4.1 |
| Skeletal muscle (fetal) | 100.0 |
| Skeletal muscle | 24.8 |
| Bone marrow | 1.7 |
| Thymus | 30.8 |
| Spleen | 11.3 |
| Lymph node | 5.9 |
| Colorectal | 8.5 |
| Stomach | 4.2 |
| Small intestine | 7.7 |
| Colon ca. SW480 | 0.5 |
| Colon ca.* SW620(SW480 met) | 0.4 |
| Colon ca. HT29 | 1.5 |
| Colon ca. HCT-116 | 0.3 |
| Colon ca. CaCo-2 | 3.0 |
| Colon ca. tissue(ODO3866) | 2.8 |
| Colon ca. HCC-2998 | 0.9 |
| Gastric ca.* (liver met) NCI-N87 | 1.6 |
| Bladder | 3.3 |
| Trachea | 11.8 |
| Kidney | 9.2 |
| Kidney (fetal) | 6.4 |
| Renal ca. 786-0 | 1.8 |
| Renal ca. A498 | 3.3 |
| Renal ca. RXF 393 | 1.6 |
| Renal ca. ACHN | 2.2 |
| Renal ca. UO-31 | 1.2 |
| Renal ca. TK-10 | 1.0 |
| Liver | 1.0 |
| Liver (fetal) | 2.7 |
| Liver ca. (hepatoblast) HepG2 | 1.4 |
| Lung | 6.4 |
| Lung (fetal) | 4.9 |
| Lung ca. (small cell) LX-1 | 0.4 |
| Lung ca. (small cell) NCI-H69 | 0.2 |
| Lung ca. (s. cell var.) SHP-77 | 1.6 |
| Lung ca. (large cell)NCI-H460 | 0.6 |
| Lung ca. (non-sm. cell) A549 | 0.6 |
| Lung ca. (non-s. cell) NCI-H23 | 4.8 |
| Lung ca. (non-s. cell) HOP-62 | 4.3 |
| Lung ca. (non-s. cl) NCI-H522 | 0.5 |
| Lung ca. (squam.) SW 900 | 3.5 |
| Lung ca. (squam.) NCI-H596 | 0.2 |
| Mammary gland | 5.1 |
| Breast ca.* (pl. ef) MCF-7 | 3.3 |
| Breast ca.* (pl. ef) MDA-MB-231 | 0.9 |
| Breast ca.* (pl. ef) T47D | 3.2 |
| Breast ca. BT-549 | 2.2 |
| Breast ca. MDA-N | 0.5 |
| Ovary | 40.1 |
| Ovarian ca. OVCAR-3 | 2.5 |
| Ovarian ca. OVCAR-4 | 0.4 |
| Ovarian ca. OVCAR-5 | 1.7 |
| Ovarian ca. OVCAR-8 | 1.3 |
| Ovarian ca. IGROV-1 | 1.1 |
| Ovarian ca.* (ascites) SK-OV-3 | 0.5 |
| Uterus | 4.6 |
| Placenta | 5.1 |
| Prostate | 5.4 |
| Prostate ca.* (bone met)PC-3 | 1.6 |
| Testis | 8.6 |
| Melanoma Hs688(A).T | 1.5 |
| Melanoma* (met) Hs688(B).T | 2.3 |
| Melanoma UACC-62 | 0.8 |
| Melanoma M14 | 0.4 |
| Melanoma LOX IMVI | 0.1 |
| Melanoma* (met) SK-MEL-5 | 1.3 |
| Adipose | 6.4 |

Column A - Rel. Exp. (%) Ag2779, Run 164024255

[1072] TABLE SD
Panel 2D

| Tissue Name | A |
|---|---|
| Normal Colon | 33.4 |
| CC Well to Mod Diff (ODO3866) | 4.2 |
| CC Margin (ODO3866) | 10.7 |
| CC Gr.2 rectosigmoid (ODO3868) | 6.0 |
| CC Margin (ODO3868) | 7.5 |
| CC Mod Diff (ODO3920) | 5.8 |
| CC Margin (ODO3920) | 18.2 |
| CC Gr.2 ascend colon (ODO3921) | 15.9 |
| CC Margin (ODO3921) | 9.9 |
| CC from Partial Hepatectomy (ODO4309) Mets | 22.4 |
| Liver Margin (ODO4309) | 9.9 |
| Colon mets to lung (OD04451-01) | 15.1 |
| Lung Margin (OD04451-02) | 11.7 |
| Normal Prostate 6546-1 | 100.0 |
| Prostate Cancer (OD04410) | 14.0 |
| Prostate Margin (OD04410) | 30.8 |
| Prostate Cancer (OD04720-01) | 25.0 |
| Prostate Margin (OD04720-02) | 28.9 |
| Normal Lung 061010 | 30.6 |
| Lung Met to Muscle (ODO4286) | 12.2 |
| Muscle Margin (ODO4286) | 52.9 |
| Lung Malignant Cancer (OD03126) | 71.2 |
| Lung Margin (OD03126) | 23.0 |
| Lung Cancer (OD04404) | 11.9 |
| Lung Margin (OD04404) | 22.8 |
| Lung Cancer (OD04565) | 17.8 |
| Lung Margin (OD04565) | 15.4 |
| Lung Cancer (OD04237-01) | 24.0 |
| Lung Margin (OD04237-02) | 16.0 |
| Ocular Mel Met to Liver (ODO4310) | 13.8 |
| Liver Margin (ODO4310) | 9.8 |
| Melanoma Mets to Lung (OD04321) | 4.4 |
| Lung Margin (OD04321) | 25.9 |
| Normal Kidney | 31.6 |
| Kidney Ca, Nuclear grade 2 (OD04338) | 53.2 |
| Kidney Margin (OD04338) | 23.8 |
| Kidney Ca Nuclear grade 1/2 (OD04339) | 52.1 |
| Kidney Margin (OD04339) | 32.8 |
| Kidney Ca, Clear cell type (OD04340) | 40.6 |
| Kidney Margin (OD04340) | 33.7 |
| Kidney Ca, Nuclear grade 3 (OD04348) | 10.7 |
| Kidney Margin (OD04348) | 16.0 |
| Kidney Cancer (OD04622-01) | 32.5 |
| Kidney Margin (OD04622-03) | 10.9 |
| Kidney Cancer (OD04450-01) | 27.5 |
| Kidney Margin (OD04450-03) | 25.0 |
| Kidney Cancer 8120607 | 17.4 |
| Kidney Margin 8120608 | 23.3 |
| Kidney Cancer 8120613 | 47.3 |
| Kidney Margin 8120614 | 15.6 |
| Kidney Cancer 9010320 | 15.2 |
| Kidney Margin 9010321 | 32.1 |
| Normal Uterus | 13.5 |
| Uterus Cancer 064011 | 21.2 |
| Normal Thyroid | 41.2 |
| Thyroid Cancer 064010 | 20.0 |
| Thyroid Cancer A302152 | 71.2 |
| Thyroid Margin A302153 | 32.5 |
| Normal Breast | 28.7 |
| Breast Cancer (OD04566) | 7.3 |
| Breast Cancer (OD04590-01) | 17.9 |
| Breast Cancer Mets (OD04590-03) | 27.5 |
| Breast Cancer Metastasis (OD04655-05) | 20.7 |
| Breast Cancer 064006 | 22.7 |
| Breast Cancer 1024 | 29.5 |
| Breast Cancer 9100266 | 32.5 |
| Breast Margin 9100265 | 17.9 |
| Breast Cancer A209073 | 21.8 |
| Breast Margin A209073 | 11.5 |
| Normal Liver | 6.5 |
| Liver Cancer 064003 | 6.3 |
| Liver Cancer 1025 | 8.1 |
| Liver Cancer 1026 | 13.6 |
| Liver Cancer 6004-T | 7.0 |
| Liver Tissue 6004-N | 12.2 |
| Liver Cancer 6005-T | 10.6 |
| Liver Tissue 6005-N | 4.0 |
| Normal Bladder | 15.4 |
| Bladder Cancer 1023 | 6.6 |
| Bladder Cancer A302173 | 4.9 |
| Bladder Cancer (OD04718-01) | 11.2 |
| Bladder Normal Adjacent (OD04718-03) | 28.5 |
| Normal Ovary | 32.1 |
| Ovarian Cancer 064008 | 26.8 |
| Ovarian Cancer (OD04768-07) | 37.4 |
| Ovary Margin (OD04768-08) | 16.7 |
| Normal Stomach | 35.6 |
| Gastric Cancer 9060358 | 9.1 |
| Stomach Margin 9060359 | 24.8 |
| Gastric Cancer 9060395 | 28.3 |
| Stomach Margin 9060394 | 26.4 |
| Gastric Cancer 9060397 | 15.8 |
| Stomach Margin 9060396 | 10.6 |
| Gastric Cancer 064005 | 21.0 |

Column A - Rel. Exp. (%) Ag2779, Run 162555295

[1073] TABLE SE
Panel 4D

| Tissue Name | A |
|---|---|
| Secondary Th1 act | 13.4 |
| Secondary Th2 act | 8.4 |
| Secondary Tr1 act | 11.0 |
| Secondary Th1 rest | 37.1 |
| Secondary Th2 rest | 49.0 |
| Secondary Tr1 rest | 49.3 |
| Primary Th1 act | 4.7 |
| Primary Th2 act | 1.9 |
| Primary Tr1 act | 9.0 |
| Primary Th1 rest | 91.4 |
| Primary Th2 rest | 81.8 |
| Primary Tr1 rest | 35.6 |
| CD45RA CD4 lymphocyte act | 4.1 |
| CD45RO CD4 lymphocyte act | 15.6 |
| CD8 lymphocyte act | 11.9 |
| Secondary CD8 lymphocyte rest | 9.7 |
| Secondary CD8 lymphocyte act | 8.6 |
| CD4 lymphocyte none | 49.0 |
| 2ry Th1/Th2/Tr1_anti-CD95 CH11 | 89.5 |
| LAK cells rest | 17.3 |
| LAK cells IL-2 | 36.1 |
| LAK cells IL-2 + IL-12 | 17.1 |
| LAK cells IL-2 + IFN gamma | 28.7 |
| LAK cells IL-2 + IL-18 | 23.5 |
| LAK cells PMA/ionomycin | 4.9 |
| NK Cells IL-2 rest | 26.2 |
| Two Way MLR 3 day | 31.9 |
| Two Way MLR 5 day | 15.4 |
| Two Way MLR 7 day | 27.4 |
| PBMC rest | 39.8 |
| PBMC PWM | 29.5 |
| PBMC PHA-L | 16.5 |
| Ramos (B cell) none | 5.8 |
| Ramos (B cell) ionomycin | 14.1 |
| B lymphocytes PWM | 25.9 |
| B lymphocytes CD40L and IL-4 | 36.1 |
| EOL-1 dbcAMP | 9.8 |
| EOL-1 dbcAMP PMA/ionomycin | 4.7 |
| Dendritic cells none | 12.1 |
| Dendritic cells LPS | 9.9 |
| Dendritic cells anti-CD40 | 9.0 |
| Monocytes rest | 12.9 |
| Monocytes LPS | 3.7 |
| Macrophages rest | 10.2 |
| Macrophages LPS | 5.5 |
| HUVEC none | 17.1 |
| HUVEC starved | 29.3 |
| HUVEC IL-1beta | 4.3 |
| HUVEC IFN gamma | 23.0 |
| HUVEC TNF alpha + IFN gamma | 4.2 |
| HUVEC TNF alpha + IL4 | 7.1 |
| HUVEC IL-11 | 18.4 |
| Lung Microvascular EC none | 18.2 |
| Lung Microvascular EC TNFalpha + IL-1beta | 15.1 |
| Microvascular Dermal EC none | 29.5 |
| Microsvasular Dermal EC TNFalpha + IL-1beta | 9.4 |
| Bronchial epithelium TNFalpha + IL1beta | 20.4 |
| Small airway epithelium none | 5.0 |
| Small airway epithelium TNFalpha + IL-1beta | 21.0 |
| Coronery artery SMC rest | 24.3 |
| Coronery artery SMC TNFalpha + IL-1beta | 18.3 |
| Astrocytes rest | 34.2 |
| Astrocytes TNFalpha + IL-1beta | 29.1 |
| KU-812 (Basophil) rest | 5.8 |
| KU-812 (Basophil) PMA/ionomycin | 10.5 |
| CCD1106 (Keratinocytes) none | 4.7 |
| CCD1106 (Keratinocytes) TNFalpha + IL-1beta | 4.3 |
| Liver cirrhosis | 7.6 |
| Lupus kidney | 11.5 |
| NCI-H292 none | 15.3 |
| NCI-H292 IL-4 | 8.9 |
| NCI-H292 IL-9 | 11.0 |
| NCI-H292 IL-13 | 6.3 |
| NCI-H292 IFN gamma | 6.0 |
| HPAEC none | 26.2 |
| HPAEC TNF alpha + IL-1 beta | 11.5 |
| Lung fibroblast none | 27.4 |
| Lung fibroblast TNF alpha + IL-1 beta | 66.0 |
| Lung fibroblast IL-4 | 25.2 |
| Lung fibroblast IL-9 | 22.4 |
| Lung fibroblast IL-13 | 18.3 |
| Lung fibroblast IFN gamma | 34.9 |
| Dermal fibroblast CCD1070 rest | 8.8 |
| Dermal fibroblast CCD1070 TNF alpha | 49.3 |
| Dermal fibroblast CCD1070 IL-1 beta | 4.9 |
| Dermal fibroblast IFN gamma | 4.9 |
| Dermal fibroblast IL-4 | 11.2 |
| IBD Colitis 2 | 5.1 |
| IBD Crohn's | 11.1 |
| Colon | 42.6 |
| Lung | 26.8 |
| Thymus | 41.5 |
| Kidney | 100.0 |

Column A - Rel. Exp. (%) Ag2779, Run 162188258

[1074] TABLE SF
Panel 5D

| Tissue Name | A |
|---|---|
| 97457_Patient-02go_adipose | 30.1 |
| 97476_Patient-07sk_skeletal muscle | 13.8 |
| 97477_Patient-07ut_uterus | 31.0 |
| 97478_Patient-07pl_placenta | 17.4 |
| 97481_Patient-08sk_skeletal muscle | 38.7 |
| 97482_Patient-08ut_uterus | 45.4 |
| 97483_Patient-08pl_placenta | 16.0 |
| 97486_Patient-09sk_skeletal muscle | 7.4 |
| 97487_Patient-09ut_uterus | 19.8 |
| 97488_Patient-09pl_placenta | 16.7 |
| 97492_Patient-10ut_uterus | 66.4 |
| 97493_Patient-10pl_placenta | 46.3 |
| 97495_Patient-11go_adipose | 7.2 |
| 97496_Patient-11sk_skeletal muscle | 12.4 |
| 97497_Patient-11ut_uterus | 68.3 |
| 97498_Patient-11pl_placenta | 26.4 |
| 97500_Patient-12go_adipose | 35.8 |
| 97501_Patient-12sk_skeletal muscle | 78.5 |
| 97502_Patient-12ut_uterus | 100.0 |
| 97503_Patient-12pl_placenta | 21.5 |
| 94721_Donor 2 U - A_Mesenchymal Stem Cells | 23.3 |
| 94722_Donor 2 U - B_Mesenchymal Stem Cells | 28.1 |
| 94723_Donor 2 U - C_Mesenchymal Stem Cells | 20.0 |
| 94709_Donor 2 AM - A_adipose | 16.0 |
| 94710_Donor 2 AM - B_adipose | 15.1 |
| 94711_Donor 2 AM - C_adipose | 7.9 |
| 94712_Donor 2 AD - A_adipose | 32.1 |
| 94713_Donor 2 AD - B_adipose | 40.1 |
| 94714_Donor 2 AD - C_adipose | 35.1 |
| 94742_Donor 3 U - A_Mesenchymal Stem Cells | 10.1 |
| 94743_Donor 3 U - B_Mesenchymal Stem Cells | 14.1 |
| 94730_Donor 3 AM - A_adipose | 13.5 |
| 94731_Donor 3 AM - B_adipose | 8.8 |
| 94732_Donor 3 AM - C_adipose | 5.2 |
| 94733_Donor 3 AD - A_adipose | 26.6 |
| 94734_Donor 3 AD - B_adipose | 17.4 |
| 94735_Donor 3 AD - C_adipose | 26.1 |
| 77138_Liver_HepG2untreated | 25.0 |
| 73556_Heart_Cardiac stromal cells (primary) | 7.3 |
| 81735_Small Intestine | 55.5 |
| 72409_Kidney_Proximal Convoluted Tubule | 4.2 |
| 82685_Small intestine_Duodenum | 21.2 |
| 90650_Adrenal_Adrenocortical adenoma | 30.1 |
| 72410_Kidney_HRCE | 25.7 |
| 72411_Kidney_HRE | 14.3 |
| 73139_Uterus_Uterine smooth muscle cells | 14.7 |

Column A - Rel. Exp. (%) Ag2779, Run 255179443

[1075] AI_comprehensive panel_v1.0 Summary: Ag2779 Highest expression of this gene was detected in normal lung (CT=27). Moderate levels of expression of this gene were detected in samples derived from osteoarthritic (OA) bone and normal adjacent bone as well as OA cartilage, OA synovium and OA synovial fluid samples. Moderate to low levels of expression were also detected in cartilage, bone, synovium and synovial fluid samples from rheumatoid arthritis patients as well as in samples derived from normal lung samples, COPD lung, emphysema, atopic asthma, asthma, allergy, Crohn's disease (normal matched control and diseased), ulcerative colitis(normal matched control and diseased), and psoriasis (normal matched control and diseased). Therapeutic modulation of this gene or gene product is useful for the amelioration of symptoms/conditions associated with autoimmune and inflammatory disorders including psoriasis, allergy, asthma, inflammatory bowel disease, rheumatoid arthritis and osteoarthritis.

[1076] Panel 1.3D Summary: Ag2779 Highest expression was seen in fetal skeletal muscle (CT=25). Prominent expression was seen in normal tissues including ovary and bone marrow.

[1077] Panel 2D Summary: Ag2779 Highest expression was seen in prostate (CT=23.5). High levels of expression were seen in most of the samples on this panel, showing that this gene or its protein product plays a role in cell growth and/or proliferation.

[1078] Panel 4D Summary: Ag2779 Highest expression was seen in the kidney (CT=26.7). In addition, this gene was more highly expressed in resting T cells (Th1, Th2, Tr1) than in activated T cells. Thus, this gene is be involved in T lymphocyte function. Therapeutics targeting this gene or its protein product are useful for the stimulation of their activity and act as anti-inflammatory therapeutic for T cell-mediated autoimmune and inflammatory diseases.

[1079] Panel SD Summary: Ag2779 Highest expression was seen in normal uterus (CT=27), with prominent expression in normal adipose and placenta. This strong expression in normal tissues was in agreement with the results in Panel 1.3D.

[1080] T. CG52979-03 and CG52988-02 and CG52988-03: GAGE

[1081] Expression of gene CG52979-03, variant CG52988-02 and full-length physical clone CG52988-03 was assessed using the primer-probe sets Ag436b, and Ag436, described in Tables TA and TB. Results of the RTQ-PCR runs are shown in Tables TC, TD, TE, TF, TG and TH.

TABLE TA
Probe Name Ag436b

| | | | | |
|---|---|---|---|---|
| Primers | Sequences | Length | Start Position | SEQ ID No |

| | | | | |
|---|---|---|---|---|
| Forward | 5′-gagcctggagatggtcctga-3′ | 20 | 184 | 1339 |
| Probe | TET-5′-agatcaaaagtgggcataataccctccctga-3′-TAMRA | 31 | 151 | 1340 |
| Reverse | 5′-atcacctgcttccagcactttagt-3′ | 24 | 126 | 1341 |

[1082] TABLE TB
Probe Name Ag436

| | | | | |
|---|---|---|---|---|
| Primers | Sequences | Length | Start Position | SEQ ID No |

| | | | | |
|---|---|---|---|---|
| Forward | 5′-gcctggagatggtcctgatg-3′ | 20 | 182 | 1342 |
| Probe | TET-5′-tgagatcaaaagtgggcataataccctccct-3′-TAMRA | 31 | 149 | 1343 |
| Reverse | 5′-catcacctgcttccagcactt-3′ | 21 | 125 | 1344 |

[1083] TABLE TC
Panel 1

| Tissue Name | A |
|---|---|
| Endothelial cells | 0.0 |
| Endothelial cells (treated) | 0.0 |
| Pancreas | 1.6 |
| Pancreatic ca. CAPAN 2 | 0.0 |
| Adrenal gland | 0.4 |
| Thyroid | 0.0 |
| Salivary gland | 0.1 |
| Pituitary gland | 0.0 |
| Brain (fetal) | 0.0 |
| Brain (whole) | 0.0 |
| Brain (amygdala) | 0.0 |
| Brain (cerebellum) | 0.0 |
| Brain (hippocampus) | 0.1 |
| Brain (substantia nigra) | 0.1 |
| Brain (thalamus) | 0.0 |
| Brain (hypothalamus) | 0.4 |
| Spinal cord | 0.3 |
| glio/astro U87-MG | 0.0 |
| glio/astro U-118-MG | 0.9 |
| astrocytoma SW1783 | 0.0 |
| neuro*; met SK-N-AS | 0.3 |
| astrocytoma SF-539 | 0.0 |
| astrocytoma SNB-75 | 0.0 |
| glioma SNB-19 | 0.1 |
| glioma U251 | 0.1 |
| glioma SF-295 | 4.5 |
| Heart | 0.1 |
| Skeletal muscle | 0.0 |
| Bone marrow | 6.1 |
| Thymus | 1.0 |
| Spleen | 0.8 |
| Lymph node | 1.4 |
| Colon (ascending) | 3.3 |
| Stomach | 0.3 |
| Small intestine | 0.2 |
| Colon ca. SW480 | 0.1 |
| Colon ca.* SW620 (SW480 met) | 0.1 |
| Colon ca. HT29 | 0.0 |
| Colon ca. HCT-116 | 0.1 |
| Colon ca. CaCo-2 | 0.0 |
| Colon ca. HCT-15 | 0.2 |
| Colon ca. HCC-2998 | 0.2 |
| Gastric ca.* (liver met) NCI-N87 | 0.2 |
| Bladder | 0.0 |
| Trachea | 0.2 |
| Kidney | 0.2 |
| Kidney (fetal) | 0.3 |
| Renal ca. 786-0 | 0.0 |
| Renal ca. A498 | 0.0 |
| Renal ca. RXF 393 | 0.0 |
| Renal ca. ACHN | 0.0 |
| Renal ca. UO-31 | 0.0 |
| Renal ca. TK-10 | 0.0 |
| Liver | 0.4 |
| Liver (fetal) | 4.6 |
| Liver ca. (hepatoblast) HepG2 | 0.3 |
| Lung | 0.0 |
| Lung (fetal) | 0.0 |
| Lung ca. (small cell) LX-1 | 1.3 |
| Lung ca. (small cell) NCI-H69 | 0.8 |
| Lung ca. (s. cell var.) SHP-77 | 0.0 |
| Lung ca. (large cell)NCI-H460 | 1.0 |
| Lung ca. (non-sm. cell) A549 | 0.5 |
| Lung ca. (non-s. cell) NCI-H23 | 1.0 |
| Lung ca. (non-s. cell) HOP-62 | 0.2 |
| Lung ca. (non-s. cl) NCI-H522 | 0.3 |
| Lung ca. (squam.) SW 900 | 0.0 |
| Lung ca. (squam.) NCI-H596 | 0.2 |
| Mammary gland | 1.3 |
| Breast ca.* (pl. ef) MCF-7 | 0.0 |
| Breast ca.* (pl. ef) MDA-MB-231 | 0.5 |
| Breast ca.* (pl. ef) T47D | 0.5 |
| Breast ca. BT-549 | 0.0 |
| Breast ca. MDA-N | 100.0 |
| Ovary | 0.0 |
| Ovarian ca. OVCAR-3 | 1.3 |
| Ovarian ca. OVCAR-4 | 0.0 |
| Ovarian ca. OVCAR-5 | 0.0 |
| Ovarian ca. OVCAR-8 | 3.5 |
| Ovarian ca. IGROV-1 | 0.0 |
| Ovarian ca. (ascites) SK-OV-3 | 0.0 |
| Uterus | 0.1 |
| Placenta | 13.3 |
| Prostate | 0.4 |
| Prostate ca.* (bone met) PC-3 | 0.9 |
| Testis | 79.0 |
| Melanoma Hs688(A).T | 0.0 |
| Melanoma* (met) Hs688(B).T | 0.0 |
| Melanoma UACC-62 | 0.0 |
| Melanoma M14 | 0.1 |
| Melanoma LOX IMVI | 0.0 |
| Melanoma* (met) SK-MEL-5 | 0.0 |
| Melanoma SK-MEL-28 | 8.7 |

Column A - Rel. Exp. (%) Ag436, Run 109664430

[1084] TABLE TD
Panel 1.1

| Tissue Name | A | B |
|---|---|---|
| Adrenal gland | 0.0 | 0.0 |
| Bladder | 0.1 | 0.0 |
| Brain (amygdala) | 0.0 | 0.0 |
| Brain (cerebellum) | 0.4 | 0.0 |
| Brain (hippocampus) | 0.0 | 0.0 |
| Brain (substantia nigra) | 0.4 | 0.0 |
| Brain (thalamus) | 0.0 | 0.0 |
| Cerebral Cortex | 0.0 | 0.0 |
| Brain (fetal) | 0.0 | 0.0 |
| Brain (whole) | 0.4 | 0.0 |
| glio/astro U-118-MG | 0.8 | 0.1 |
| astrocytoma SF-539 | 0.0 | 0.0 |
| astrocytoma SNB-75 | 0.0 | 0.0 |
| astrocytoma SW1783 | 0.0 | 0.0 |
| glioma U251 | 0.1 | 0.0 |
| glioma SF-295 | 3.3 | 4.2 |
| glioma SNB-19 | 0.2 | 0.0 |
| glio/astro U87-MG | 0.0 | 0.0 |
| neuro*; met SK-N-AS | 0.2 | 0.0 |
| Mammary gland | 0.1 | 0.0 |
| Breast ca. BT-549 | 0.0 | 0.0 |
| Breast ca. MDA-N | 100.0 | 100.0 |
| Breast ca.* (pl. ef) T47D | 0.4 | 0.0 |
| Breast ca.* (pl. ef) MCF-7 | 0.0 | 0.0 |
| Breast ca.* (pl. ef) MDA-MB-231 | 0.0 | 0.0 |
| Small intestine | 0.3 | 0.0 |
| Colorectal | 0.0 | 0.0 |
| Colon ca. HT29 | 0.3 | 0.0 |
| Colon ca. CaCo-2 | 0.1 | 0.0 |
| Colon ca. HCT-15 | 0.1 | 0.0 |
| Colon ca. HCT-116 | 0.1 | 0.0 |
| Colon ca. HCC-2998 | 0.2 | 0.0 |
| Colon ca. SW480 | 0.1 | 0.0 |
| Colon ca.* SW620 (SW480 met) | 0.4 | 0.0 |
| Stomach | 0.4 | 0.0 |
| Gastric ca. (liver met) NCI-N87 | 0.4 | 0.0 |
| Heart | 0.0 | 0.0 |
| Skeletal muscle (Fetal) | 0.0 | 0.0 |
| Skeletal muscle | 0.0 | 0.0 |
| Endothelial cells | 0.0 | 0.0 |
| Heart (Fetal) | 0.0 | 0.0 |
| Kidney | 0.3 | 0.0 |
| Kidney (fetal) | 0.2 | 0.0 |
| Renal ca. 786-0 | 0.0 | 0.0 |
| Renal ca. A498 | 0.0 | 0.0 |
| Renal ca. ACHN | 0.0 | 0.0 |
| Renal ca. TK-10 | 0.0 | 0.0 |
| Renal ca. UO-31 | 0.0 | 0.0 |
| Renal ca. RXF 393 | 0.0 | 0.0 |
| Liver | 0.6 | 0.0 |
| Liver (fetal) | 1.5 | 1.7 |
| Liver ca. (hepatoblast) HepG2 | 0.2 | 0.0 |
| Lung | 0.0 | 0.0 |
| Lung (fetal) | 0.3 | 0.0 |
| Lung ca. (non-s. cell) HOP-62 | 0.4 | 0.2 |
| Lung ca. (large cell)NCI-H460 | 0.3 | 0.0 |
| Lung ca. (non-s. cell) NCI-H23 | 0.4 | 0.0 |
| Lung ca. (non-s. cl) NCI-H522 | 1.0 | 0.3 |
| Lung ca. (non-sm. cell) A549 | 0.2 | 0.0 |
| Lung ca. (s. cell var.) SHP-77 | 0.2 | 0.0 |
| Lung ca. (small cell) LX-1 | 2.3 | 0.0 |
| Lung ca. (small cell) NCI-H69 | 0.9 | 0.0 |
| Lung ca. (squam.) SW 900 | 0.0 | 0.0 |
| Lung ca. (squam.) NCI-H596 | 0.2 | 0.0 |
| Lymph node | 0.4 | 0.0 |
| Spleen | 0.2 | 0.0 |
| Thymus | 0.4 | 0.0 |
| Ovary | 0.0 | 0.0 |
| Ovarian ca. IGROV-1 | 0.1 | 0.0 |
| Ovarian ca. OVCAR-3 | 0.9 | 0.3 |
| Ovarian ca. OVCAR-4 | 0.0 | 0.0 |
| Ovarian ca. OVCAR-5 | 0.4 | 0.0 |
| Ovarian ca. OVCAR-8 | 0.9 | 0.2 |
| Ovarian ca.* (ascites) SK-OV-3 | 0.0 | 0.0 |
| Pancreas | 2.4 | 5.1 |
| Pancreatic ca. CAPAN 2 | 0.0 | 0.0 |
| Pituitary gland | 0.2 | 0.0 |
| Placenta | 4.2 | 3.8 |
| Prostate | 0.5 | 0.0 |
| Prostate ca.* (bone met) PC-3 | 0.3 | 0.0 |
| Salivary gland | 0.2 | 0.0 |
| Trachea | 0.0 | 0.0 |
| Spinal cord | 0.2 | 0.0 |
| Testis | 44.4 | 28.7 |
| Thyroid | 0.0 | 0.0 |
| Uterus | 0.0 | 0.0 |
| Melanoma M14 | 0.2 | 0.0 |
| Melanoma LOX IMVI | 0.0 | 0.0 |
| Melanoma UACC-62 | 0.0 | 0.0 |
| Melanoma SK-MEL-28 | 0.1 | 0.0 |
| Melanoma* (met) SK-MEL-5 | 0.0 | 0.0 |
| Melanoma Hs688(A).T | 0.0 | 0.0 |
| Melanoma* (met) Hs688(B).T | 0.0 | 0.0 |

Column A - Rel. Exp. (%) Ag436, Run 109665004
Column B - Rel. Exp. (%) Ag436b, Run 111165634

[1085] TABLE TE
Panel 1.3D

| Tissue Name | A |
|---|---|
| Liver adenocarcinoma | 2.5 |
| Pancreas | 0.8 |
| Pancreatic ca. CAPAN 2 | 0.0 |
| Adrenal gland | 0.0 |
| Thyroid | 0.5 |
| Salivary gland | 0.0 |
| Pituitary gland | 0.6 |
| Brain (fetal) | 3.5 |
| Brain (whole) | 1.6 |
| Brain (amygdala) | 0.0 |
| Brain (cerebellum) | 2.2 |
| Brain (hippocampus) | 2.9 |
| Brain (substantia nigra) | 2.1 |
| Brain (thalamus) | 0.7 |
| Cerebral Cortex | 1.4 |
| Spinal cord | 0.0 |
| glio/astro U87-MG | 1.0 |
| glio/astro U-118-MG | 5.1 |
| astrocytoma SW1783 | 4.3 |
| neuro*; met SK-N-AS | 0.7 |
| astrocytoma SF-539 | 0.0 |
| astrocytoma SNB-75 | 0.0 |
| glioma SNB-19 | 0.8 |
| glioma U251 | 0.3 |
| glioma SF-295 | 5.6 |
| Heart (fetal) | 0.8 |
| Heart | 0.0 |
| Skeletal muscle (fetal) | 0.0 |
| Skeletal muscle | 0.0 |
| Bone marrow | 16.7 |
| Thymus | 0.7 |
| Spleen | 1.4 |
| Lymph node | 3.7 |
| Colorectal | 1.1 |
| Stomach | 1.1 |
| Small intestine | 1.3 |
| Colon ca. SW480 | 0.7 |
| Colon ca.* SW620(SW480 met) | 1.0 |
| Colon ca. HT29 | 2.0 |
| Colon ca. HCT-116 | 0.0 |
| Colon ca. CaCo-2 | 0.7 |
| Colon ca. tissue(ODO3866) | 0.0 |
| Colon ca. HCC-2998 | 0.7 |
| Gastric ca.* (liver met) NCI-N87 | 0.0 |
| Bladder | 0.0 |
| Trachea | 0.0 |
| Kidney | 0.8 |
| Kidney (fetal) | 3.3 |
| Renal ca. 786-0 | 1.0 |
| Renal ca. A498 | 1.0 |
| Renal ca. RXF 393 | 1.7 |
| Renal ca. ACHN | 0.0 |
| Renal ca. UO-31 | 0.0 |
| Renal ca. TK-10 | 0.0 |
| Liver | 2.2 |
| Liver (fetal) | 11.6 |
| Liver ca. (hepatoblast) HepG2 | 0.0 |
| Lung | 2.7 |
| Lung (fetal) | 4.0 |
| Lung ca. (small cell) LX-1 | 2.5 |
| Lung ca. (small cell) NCI-H69 | 0.0 |
| Lung ca. (s. cell var.) SHP-77 | 0.0 |
| Lung ca. (large cell)NCI-H460 | 0.0 |
| Lung ca. (non-sm. cell) A549 | 8.4 |
| Lung ca. (non-s. cell) NCI-H23 | 2.8 |
| Lung ca. (non-s. cell) HOP-62 | 0.9 |
| Lung ca. (non-s. cl) NCI-H522 | 0.0 |
| Lung ca. (squam.) SW 900 | 1.0 |
| Lung ca. (squam.) NCI-H596 | 0.0 |
| Mammary gland | 0.0 |
| Breast ca.* (pl. ef) MCF-7 | 0.0 |
| Breast ca.* (pl. ef) MDA-MB-231 | 1.7 |
| Breast ca.* (pl. ef) T47D | 0.0 |
| Breast ca. BT-549 | 0.0 |
| Breast ca. MDA-N | 76.8 |
| Ovary | 0.0 |
| Ovarian ca. OVCAR-3 | 3.1 |
| Ovarian ca. OVCAR-4 | 0.0 |
| Ovarian ca. OVCAR-5 | 0.8 |
| Ovarian ca. OVCAR-8 | 2.5 |
| Ovarian ca. IGROV-1 | 0.9 |
| Ovarian ca.* (ascites) SK-OV-3 | 1.7 |
| Uterus | 0.0 |
| Placenta | 6.3 |
| Prostate | 1.3 |
| Prostate ca.* (bone met)PC-3 | 1.7 |
| Testis | 100.0 |
| Melanoma Hs688(A).T | 0.0 |
| Melanoma* (met) Hs688(B).T | 0.9 |
| Melanoma UACC-62 | 0.0 |
| Melanoma M14 | 0.0 |
| Melanoma LOX IMVI | 0.0 |
| Melanoma* (met) SK-MEL-5 | 2.0 |
| Adipose | 2.5 |

Column A - Rel. Exp. (%) Ag436, Run 153954656

[1086] TABLE TF
Panel 2D

| Tissue Name | A |
|---|---|
| Normal Colon | 0.0 |
| CC Well to Mod Diff (ODO3866) | 0.9 |
| CC Margin (ODO3866) | 0.9 |
| CC Gr.2 rectosigmoid (ODO3868) | 0.0 |
| CC Margin (ODO3868) | 0.8 |
| CC Mod Diff (ODO3920) | 0.5 |
| CC Margin (ODO3920) | 0.4 |
| CC Gr.2 ascend colon (ODO3921) | 0.9 |
| CC Margin (ODO3921) | 0.5 |
| CC from Partial Hepatectomy (ODO4309) Mets | 1.7 |
| Liver Margin (ODO4309) | 0.8 |
| Colon mets to lung (OD04451-01) | 0.8 |
| Lung Margin (OD04451-02) | 0.0 |
| Normal Prostate 6546-1 | 1.4 |
| Prostate Cancer (OD04410) | 1.5 |
| Prostate Margin (OD04410) | 0.3 |
| Prostate Cancer (OD04720-01) | 1.6 |
| Prostate Margin (OD04720-02) | 1.0 |
| Normal Lung 061010 | 1.4 |
| Lung Met to Muscle (ODO4286) | 0.6 |
| Muscle Margin (ODO4286) | 0.7 |
| Lung Malignant Cancer (OD03126) | 0.0 |
| Lung Margin (OD03126) | 0.6 |
| Lung Cancer (OD04404) | 0.0 |
| Lung Margin (OD04404) | 0.0 |
| Lung Cancer (OD04565) | 0.6 |
| Lung Margin (OD04565) | 0.7 |
| Lung Cancer (OD04237-01) | 0.9 |
| Lung Margin (OD04237-02) | 0.2 |
| Ocular Mel Met to Liver (ODO4310) | 0.0 |
| Liver Margin (ODO4310) | 0.2 |
| Melanoma Mets to Lung (OD04321) | 0.6 |
| Lung Margin (OD04321) | 0.4 |
| Normal Kidney | 1.0 |
| Kidney Ca, Nuclear grade 2 (OD04338) | 0.2 |
| Kidney Margin (OD04338) | 2.0 |
| Kidney Ca Nuclear grade 1/2 (OD04339) | 0.4 |
| Kidney Margin (OD04339) | 0.6 |
| Kidney Ca, Clear cell type (OD04340) | 0.4 |
| Kidney Margin (OD04340) | 0.2 |
| Kidney Ca, Nuclear grade 3 (OD04348) | 0.3 |
| Kidney Margin (OD04348) | 0.0 |
| Kidney Cancer (OD04622-01) | 0.3 |
| Kidney Margin (OD04622-03) | 0.0 |
| Kidney Cancer (OD04450-01) | 0.0 |
| Kidney Margin (OD04450-03) | 0.5 |
| Kidney Cancer 8120607 | 0.0 |
| Kidney Margin 8120608 | 0.2 |
| Kidney Cancer 8120613 | 0.2 |
| Kidney Margin 8120614 | 0.0 |
| Kidney Cancer 9010320 | 56.6 |
| Kidney Margin 9010321 | 0.0 |
| Normal Uterus | 0.0 |
| Uterus Cancer 064011 | 0.7 |
| Normal Thyroid | 0.4 |
| Thyroid Cancer 064010 | 0.0 |
| Thyroid Cancer A302152 | 0.3 |
| Thyroid Margin A302153 | 0.3 |
| Normal Breast | 0.4 |
| Breast Cancer (OD04566) | 1.3 |
| Breast Cancer (OD04590-01) | 1.1 |
| Breast Cancer Mets (OD04590-03) | 2.7 |
| Breast Cancer Metastasis (OD04655-05) | 3.5 |
| Breast Cancer 064006 | 37.9 |
| Breast Cancer 1024 | 1.1 |
| Breast Cancer 9100266 | 0.4 |
| Breast Margin 9100265 | 0.4 |
| Breast Cancer A209073 | 1.0 |
| Breast Margin A209073 | 0.9 |
| Normal Liver | 0.0 |
| Liver Cancer 064003 | 0.3 |
| Liver Cancer 1025 | 0.0 |
| Liver Cancer 1026 | 0.0 |
| Liver Cancer 6004-T | 0.2 |
| Liver Tissue 6004-N | 1.0 |
| Liver Cancer 6005-T | 0.2 |
| Liver Tissue 6005-N | 0.6 |
| Normal Bladder | 0.3 |
| Bladder Cancer 1023 | 0.0 |
| Bladder Cancer A302173 | 100.0 |
| Bladder Cancer (OD04718-01) | 2.8 |
| Bladder Normal Adjacent (OD04718-03) | 0.6 |
| Normal Ovary | 0.0 |
| Ovarian Cancer 064008 | 1.0 |
| Ovarian Cancer (OD04768-07) | 2.1 |
| Ovary Margin (OD04768-08) | 0.6 |
| Normal Stomach | 0.9 |
| Gastric Cancer 9060358 | 0.3 |
| Stomach Margin 9060359 | 0.8 |
| Gastric Cancer 9060395 | 0.5 |
| Stomach Margin 9060394 | 0.0 |
| Gastric Cancer 9060397 | 1.4 |
| Stomach Margin 9060396 | 0.0 |
| Gastric Cancer 064005 | 0.3 |

Column A - Rel. Exp. (%) Ag436, Run 153954657

[1087] TABLE TG
Panel 3D

| Tissue Name | A |
|---|---|
| Daoy- Medulloblastoma | 0.0 |
| TE671- Medulloblastoma | 0.0 |
| D283 Med- Medulloblastoma | 0.1 |
| PFSK-1- Primitive Neuroectodermal | 0.0 |
| XF-498- CNS | 0.2 |
| SNB-78- Glioma | 0.0 |
| SF-268- Glioblastoma | 0.0 |
| T98G- Glioblastoma | 0.1 |
| SK-N-SH- Neuroblastoma (metastasis) | 0.5 |
| SF-295- Glioblastoma | 0.5 |
| Cerebellum | 0.2 |
| Cerebellum | 0.0 |
| NCI-H292- Mucoepidermoid lung carcinoma | 0.0 |
| DMS-114- Small cell lung cancer | 0.0 |
| DMS-79- Small cell lung cancer | 0.0 |
| NCI-H146- Small cell lung cancer | 16.0 |
| NCI-H526- Small cell lung cancer | 0.1 |
| NCI-N417- Small cell lung cancer | 0.0 |
| NCI-H82- Small cell lung cancer | 0.0 |
| NCI-H157- Squamous cell lung cancer (metastasis) | 0.0 |
| NCI-H1155- Large cell lung cancer | 0.0 |
| NCI-H1299- Large cell lung cancer | 7.6 |
| NCI-H727- Lung carcinoid | 0.1 |
| NCI-UMC-11- Lung carcinoid | 0.1 |
| LX-1- Small cell lung cancer | 0.0 |
| Colo-205- Colon cancer | 0.1 |
| KM12- Colon cancer | 0.0 |
| KM20L2- Colon cancer | 0.0 |
| NCI-H716- Colon cancer | 0.0 |
| SW-48- Colon adenocarcinoma | 0.0 |
| SW1116- Colon adenocarcinoma | 0.0 |
| LS 174T- Colon adenocarcinoma | 0.1 |
| SW-948- Colon adenocarcinoma | 0.0 |
| SW-480- Colon adenocarcinoma | 0.0 |
| NCI-SNU-5- Gastric carcinoma | 0.0 |
| KATO III- Gastric carcinoma | 0.0 |
| NCI-SNU-16- Gastric carcinoma | 0.0 |
| NCI-SNU-1- Gastric carcinoma | 0.0 |
| RF-1- Gastric adenocarcinoma | 0.0 |
| RF-48- Gastric adenocarcinoma | 0.0 |
| MKN-45- Gastric carcinoma | 0.0 |
| NCI-N87- Gastric carcinoma | 0.0 |
| OVCAR-5- Ovarian carcinoma | 0.0 |
| RL95-2- Uterine carcinoma | 0.0 |
| HelaS3- Cervical adenocarcinoma | 0.0 |
| Ca Ski- Cervical epidermoid carcinoma (metastasis) | 0.0 |
| ES-2- Ovarian clear cell carcinoma | 0.0 |
| Ramos- Stimulated with PMA/ionomycin 6 h | 0.1 |
| Ramos- Stimulated with PMA/ionomycin 14 h | 0.0 |
| MEG-01- Chronic myelogenous leukemia | 0.1 |
| (megokaryoblast) | |
| Raji- Burkitt's lymphoma | 0.0 |
| Daudi- Burkitt's lymphoma | 0.0 |
| U266- B-cell plasmacytoma | 100.0 |
| CA46- Burkitt's lymphoma | 0.0 |
| RL- non-Hodgkin's B-cell lymphoma | 0.0 |
| JM1- pre-B-cell lymphoma | 0.0 |
| Jurkat- T cell leukemia | 0.0 |
| TF-1- Erythroleukemia | 0.0 |
| HUT 78- T-cell lymphoma | 0.0 |
| U937- Histiocytic lymphoma | 0.0 |
| KU-812- Myelogenous leukemia | 0.5 |
| 769-P- Clear cell renal carcinoma | 0.0 |
| Caki-2- Clear cell renal carcinoma | 0.0 |
| SW 839- Clear cell renal carcinoma | 0.0 |
| Rhabdoid kidney tumor | 0.0 |
| Hs766T- Pancreatic carcinoma (LN metastasis) | 0.0 |
| CAPAN-1- Pancreatic adenocarcinoma (liver | 0.0 |
| metastasis) | |
| SU86.86- Pancreatic carcinoma (liver | 0.0 |
| metastasis) | |
| BxPC-3- Pancreatic adenocarcinoma | 0.0 |
| HPAC- Pancreatic adenocarcinoma | 0.0 |
| MIA PaCa-2- Pancreatic carcinoma | 0.0 |
| CFPAC-1- Pancreatic ductal adenocarcinoma | 0.1 |
| PANC-1- Pancreatic epithelioid ductal | 0.0 |
| carcinoma | |
| T24- Bladder carcinma (transitional cell) | 0.0 |
| 5637- Bladder carcinoma | 0.0 |
| HT-1197- Bladder carcinoma | 0.0 |
| UM-UC-3- Bladder carcinma (transitional cell) | 0.0 |
| A204- Rhabdomyosarcoma | 0.1 |
| HT-1080- Fibrosarcoma | 0.0 |
| MG-63- Osteosarcoma | 0.0 |
| SK-LMS-1- Leiomyosarcoma (vulva) | 0.0 |
| SJRH30- Rhabdomyosarcoma (met to bone marrow) | 0.0 |
| A431- Epidermoid carcinoma | 0.0 |
| WM266-4- Melanoma | 0.0 |
| DU 145- Prostate carcinoma (brain metastasis) | 0.1 |
| MDA-MB-468- Breast adenocarcinoma | 0.1 |
| SCC-4- Squamous cell carcinoma of tongue | 0.0 |
| SCC-9- Squamous cell carcinoma of tongue | 0.0 |
| SCC-15- Squamous cell carcinoma of tongue | 0.1 |
| CAL 27- Squamous cell carcinoma of tongue | 0.0 |

Column A - Rel. Exp. (%) Ag436, Run 168238445

[1088] TABLE TH
Panel 4D

| Tissue Name | A |
|---|---|
| Secondary Th1 act | 0.0 |
| Secondary Th2 act | 0.0 |
| Secondary Tr1 act | 18.6 |
| Secondary Th1 rest | 22.7 |
| Secondary Th2 rest | 22.5 |
| Secondary Tr1 rest | 6.8 |
| Primary Th1 act | 19.5 |
| Primary Th2 act | 22.1 |
| Primary Tr1 act | 35.8 |
| Primary Th1 rest | 47.6 |
| Primary Th2 rest | 62.0 |
| Primary Tr1 rest | 12.9 |
| CD45RA CD4 lymphocyte act | 16.8 |
| CD45RO CD4 lymphocyte act | 29.9 |
| CD8 lymphocyte act | 43.2 |
| Secondary CD8 lymphocyte rest | 9.9 |
| Secondary CD8 lymphocyte act | 34.4 |
| CD4 lymphocyte none | 24.5 |
| 2ry Th1/Th2/Tr1_anti-CD95 CH11 | 26.8 |
| LAK cells rest | 30.4 |
| LAK cells IL-2 | 41.2 |
| LAK cells IL-2 + IL-12 | 8.5 |
| LAK cells IL-2 + IFN gamma | 44.8 |
| LAK cells IL-2 + IL-18 | 40.9 |
| LAK cells PMA/ionomycin | 0.0 |
| NK Cells IL-2 rest | 27.0 |
| Two Way MLR 3 day | 34.2 |
| Two Way MLR 5 day | 9.3 |
| Two Way MLR 7 day | 33.0 |
| PBMC rest | 0.0 |
| PBMC PWM | 62.4 |
| PBMC PHA-L | 54.0 |
| Ramos (B cell) none | 0.0 |
| Ramos (B cell) ionomycin | 17.6 |
| B lymphocytes PWM | 11.5 |
| B lymphocytes CD40L and IL-4 | 10.6 |
| EOL-1 dbcAMP | 6.2 |
| EOL-1 dbcAMP PMA/ionomycin | 0.0 |
| Dendritic cells none | 8.4 |
| Dendritic cells LPS | 11.1 |
| Dendritic cells anti-CD40 | 7.6 |
| Monocytes rest | 0.0 |
| Monocytes LPS | 9.3 |
| Macrophages rest | 9.3 |
| Macrophages LPS | 0.0 |
| HUVEC none | 0.0 |
| HUVEC starved | 10.2 |
| HUVEC IL-1beta | 19.1 |
| HUVEC IFN gamma | 0.0 |
| HUVEC TNF alpha + IFN gamma | 6.8 |
| HUVEC TNF alpha + IL4 | 0.0 |
| HUVEC IL-11 | 0.0 |
| Lung Microvascular EC none | 19.3 |
| Lung Microvascular EC TNFalpha + IL-1beta | 31.0 |
| Microvascular Dermal EC none | 0.0 |
| Microsvasular Dermal EC TNFalpha + IL-1beta | 0.0 |
| Bronchial epithelium TNFalpha + IL1beta | 0.0 |
| Small airway epithelium none | 0.0 |
| Small airway epithelium TNFalpha + IL-1beta | 18.2 |
| Coronery artery SMC rest | 0.0 |
| Coronery artery SMC TNFalpha + IL-1beta | 0.0 |
| Astrocytes rest | 0.0 |
| Astrocytes TNFalpha + IL-1beta | 0.0 |
| KU-812 (Basophil) rest | 89.5 |
| KU-812 (Basophil) PMA/ionomycin | 95.3 |
| CCD1106 (Keratinocytes) none | 5.8 |
| CCD1106 (Keratinocytes) TNFalpha + IL-1beta | 0.0 |
| Liver cirrhosis | 35.6 |
| Lupus kidney | 0.0 |
| NCI-H292 none | 8.9 |
| NCI-H292 IL-4 | 22.5 |
| NCI-H292 IL-9 | 39.0 |
| NCI-H292 IL-13 | 0.0 |
| NCI-H292 IFN gamma | 16.6 |
| HPAEC none | 0.0 |
| HPAEC TNF alpha + IL-1 beta | 0.0 |
| Lung fibroblast none | 21.2 |
| Lung fibroblast TNF alpha + IL-1 beta | 27.5 |
| Lung fibroblast IL-4 | 0.0 |
| Lung fibroblast IL-9 | 11.4 |
| Lung fibroblast IL-13 | 0.0 |
| Lung fibroblast IFN gamma | 20.0 |
| Dermal fibroblast CCD1070 rest | 4.2 |
| Dermal fibroblast CCD1070 TNF alpha | 41.2 |
| Dermal fibroblast CCD1070 IL-1 beta | 11.3 |
| Dermal fibroblast IFN gamma | 0.0 |
| Dermal fibroblast IL-4 | 0.0 |
| IBD Colitis 2 | 10.1 |
| IBD Crohn's | 0.0 |
| Colon | 33.0 |
| Lung | 0.0 |
| Thymus | 28.7 |
| Kidney | 100.0 |

Column A - Rel. Exp. (%) Ag436, Run 153954658

[1089] Panel 1 Summary: Ag436 Expression of this gene was highest in a breast cancer cell line, showing that this gene plays a role in the development and/or progression of breast cancer. This gene was also expressed at fairly high levels in pancreas, and testis. Expression in pancreas demonstrates that this gene or gene product is involved in metabolic diseases such as diabetes and obesity.

[1090] Panel 1.1 Summary: Ag436b The expression of this gene was highest in testes and one breast cancer cell line. Expression of this gene is useful as a unique and specific marker for normal testis tissue. Therapeutic modulation of this gene or gene product through the use of protein, antibody, or small molecule therapeutics is useful as a therapeutic for breast cancer.

[1091] Panel 1.3D Summary: Ag436 The expression of this gene was highest in testis and one breast cancer cell line.

[1092] Panel 2D Summary: Ag436 The expression of this gene in panel 2D was restricted to one bladder cancer, one kidney cancer and one breast cancer. The expression detected in breast cancer was also in agreement with the results observed for panel 1.3D.

[1093] Thus, therapeutic modulation of this gene or its protein product is useful in the treatment breast, bladder or kidney cancer.

[1094] Panel 3D Summary: Ag436 Expression of this gene in panel 3D was restricted to one sample of a plasmacytoma cell line and two lung cancer cell lines. Thus, therapeutic modulation of this gene or gene product is useful in the treatment of plasmacytoma or lung cancer.

[1095] Panel 4D Summary: Ag436 This gene was expressed in the kidney and in the KU-812 basophil cell line. Basophils are found in the kidney and may give rise to the signal observed in this tissue (Maekawa, K. FEBS Lett 1994 January 10;337(2):200-6). Therefore, therapeutics targeting this gene or its protein product are useful for the detection of basophils in a variety of tissues.

[1096] U. CG52988-04 and CG52988-06 and CG52988-07: GAGE

[1097] Expression of full-length physical clones CG52988-04, CG52988-06, and CG52988-07 was assessed using the primer-probe sets Ag437 and Ag7222, described in Tables UA and UB. Results of the RTQ-PCR runs are shown in Tables UC and UD.

TABLE UA
Probe Name Ag437

| | | | | |
|---|---|---|---|---|
| Primers | Sequences | Length | Start Position | SEQ ID No |

| | | | | |
|---|---|---|---|---|
| Forward | 5′-tcttcccagccagttggatct-3′ | 21 | 260 | 1345 |
| Probe | TET-5′-tcctcagtgggctcctggacaatca-3′-TAMRA | 25 | 234 | 1346 |
| Reverse | 5′-cagttggtggttcctcttcttga-3′ | 23 | 205 | 1347 |

[1098] TABLE UB
Probe Name Ag7222

| | | | | |
|---|---|---|---|---|
| Primers | Sequences | Length | Start Position | SEQ ID No |

| | | | | |
|---|---|---|---|---|
| Forward | 5′-ttgcacctagtggggagatc-3′ | 20 | 173 | 1348 |
| Probe | TET-5′-acctgccgttcaagggcctgac-3′-TAMRA | 22 | 137 | 1349 |
| Reverse | 5′-cagagccagttcctgttgaa-3′ | 20 | 107 | 1350 |

[1099] TABLE UC
General_screening_panel_v1.7

| Tissue Name | A |
|---|---|
| Adipose | 1.4 |
| HUVEC | 0.3 |
| Melanoma* Hs688(A).T | 0.0 |
| Melanoma* Hs688(B).T | 0.8 |
| Melanoma (met) SK-MEL-5 | 0.0 |
| Testis | 98.6 |
| Prostate ca. (bone met) PC-3 | 0.0 |
| Prostate ca. DU145 | 0.3 |
| Prostate pool | 0.0 |
| Uterus pool | 0.0 |
| Ovarian ca. OVCAR-3 | 0.3 |
| Ovarian ca. (ascites) SK-OV-3 | 0.0 |
| Ovarian ca. OVCAR-4 | 0.2 |
| Ovarian ca. OVCAR-5 | 1.5 |
| Ovarian ca. IGROV-1 | 0.7 |
| Ovarian ca. OVCAR-8 | 2.1 |
| Ovary | 0.9 |
| Breast ca. MCF-7 | 0.0 |
| Breast ca. MDA-MB-231 | 6.4 |
| Breast ca. BT-549 | 0.3 |
| Breast ca. T47D | 0.1 |
| Breast pool | 0.0 |
| Trachea | 2.6 |
| Lung | 1.6 |
| Fetal Lung | 2.5 |
| Lung ca. NCI-N417 | 0.0 |
| Lung ca. LX-1 | 0.0 |
| Lung ca. NCI-H146 | 100.0 |
| Lung ca. SHP-77 | 0.7 |
| Lung ca. NCI-H23 | 2.4 |
| Lung ca. NCI-H460 | 1.2 |
| Lung ca. HOP-62 | 2.0 |
| Lung ca. NCI-H522 | 0.6 |
| Lung ca. DMS-114 | 0.0 |
| Liver | 0.0 |
| Fetal Liver | 5.1 |
| Kidney pool | 1.1 |
| Fetal Kidney | 0.9 |
| Renal ca. 786-0 | 0.5 |
| Renal ca. A498 | 0.5 |
| Renal ca. ACHN | 0.6 |
| Renal ca. UO-31 | 0.0 |
| Renal ca. TK-10 | 0.3 |
| Bladder | 1.9 |
| Gastric ca. (liver met.) NCI-N87 | 0.0 |
| Stomach | 0.0 |
| Colon ca. SW-948 | 0.3 |
| Colon ca. SW480 | 0.6 |
| Colon ca. (SW480 met) SW620 | 2.4 |
| Colon ca. HT29 | 0.0 |
| Colon ca. HCT-116 | 2.1 |
| Colon cancer tissue | 0.0 |
| Colon ca. SW1116 | 0.8 |
| Colon ca. Colo-205 | 0.6 |
| Colon ca. SW-48 | 0.0 |
| Colon | 0.9 |
| Small Intestine | 0.3 |
| Fetal Heart | 0.3 |
| Heart | 0.0 |
| Lymph Node pool 1 | 0.0 |
| Lymph Node pool 2 | 2.9 |
| Fetal Skeletal Muscle | 1.1 |
| Skeletal Muscle pool | 0.2 |
| Skeletal Muscle | 0.3 |
| Spleen | 1.6 |
| Thymus | 0.9 |
| CNS cancer (glio/astro) SF-268 | 0.0 |
| CNS cancer (glio/astro) T98G | 0.0 |
| CNS cancer (neuro; met) SK-N-AS | 1.3 |
| CNS cancer (astro) SF-539 | 0.0 |
| CNS cancer (astro) SNB-75 | 0.3 |
| CNS cancer (glio) SNB-19 | 0.9 |
| CNS cancer (glio) SF-295 | 6.8 |
| Brain (Amygdala) | 0.3 |
| Brain (Cerebellum) | 1.2 |
| Brain (Fetal) | 1.0 |
| Brain (Hippocampus) | 0.3 |
| Cerebral Cortex pool | 0.5 |
| Brain (Substantia nigra) | 0.0 |
| Brain (Thalamus) | 0.2 |
| Brain (Whole) | 2.1 |
| Spinal Cord | 0.4 |
| Adrenal Gland | 0.4 |
| Pituitary Gland | 0.2 |
| Salivary Gland | 0.0 |
| Thyroid | 0.9 |
| Pancreatic ca. PANC-1 | 0.0 |
| Pancreas pool | 0.4 |

Column A - Rel. Exp. (%) Ag7222, Run 318040952

[1100] TABLE UD
Panel 4D

| Tissue Name | A |
|---|---|
| Secondary Th1 act | 21.9 |
| Secondary Th2 act | 23.5 |
| Secondary Tr1 act | 17.3 |
| Secondary Th1 rest | 13.6 |
| Secondary Th2 rest | 7.7 |
| Secondary Tr1 rest | 13.6 |
| Primary Th1 act | 33.2 |
| Primary Th2 act | 19.5 |
| Primary Tr1 act | 15.7 |
| Primary Th1 rest | 43.5 |
| Primary Th2 rest | 22.7 |
| Primary Tr1 rest | 19.9 |
| CD45RA CD4 lymphocyte act | 18.8 |
| CD45RO CD4 lymphocyte act | 48.6 |
| CD8 lymphocyte act | 69.3 |
| Secondary CD8 lymphocyte rest | 30.6 |
| Secondary CD8 lymphocyte act | 42.9 |
| CD4 lymphocyte none | 30.4 |
| 2ry Th1/Th2/Tr1_anti-CD95 CH11 | 12.7 |
| LAK cells rest | 9.6 |
| LAK cells IL-2 | 20.4 |
| LAK cells IL-2 + IL-12 | 0.8 |
| LAK cells IL-2 + IFN gamma | 42.3 |
| LAK cells IL-2 + IL-18 | 18.2 |
| LAK cells PMA/ionomycin | 19.5 |
| NK Cells IL-2 rest | 17.2 |
| Two Way MLR 3 day | 26.2 |
| Two Way MLR 5 day | 11.3 |
| Two Way MLR 7 day | 5.5 |
| PBMC rest | 18.0 |
| PBMC PWM | 41.5 |
| PBMC PHA-L | 24.3 |
| Ramos (B cell) none | 0.0 |
| Ramos (B cell) ionomycin | 10.2 |
| B lymphocytes PWM | 81.2 |
| B lymphocytes CD40L and IL-4 | 20.3 |
| EOL-1 dbcAMP | 0.0 |
| EOL-1 dbcAMP PMA/ionomycin | 0.0 |
| Dendritic cells none | 10.4 |
| Dendritic cells LPS | 6.3 |
| Dendritic cells anti-CD40 | 0.0 |
| Monocytes rest | 8.7 |
| Monocytes LPS | 4.4 |
| Macrophages rest | 5.4 |
| Macrophages LPS | 11.3 |
| HUVEC none | 0.0 |
| HUVEC starved | 10.4 |
| HUVEC IL-1beta | 5.1 |
| HUVEC IFN gamma | 6.3 |
| HUVEC TNF alpha + IFN gamma | 14.9 |
| HUVEC TNF alpha + IL4 | 0.0 |
| HUVEC IL-11 | 0.0 |
| Lung Microvascular EC none | 4.8 |
| Lung Microvascular EC TNFalpha + IL-1beta | 0.0 |
| Microvascular Dermal EC none | 9.5 |
| Microsvasular Dermal EC TNFalpha + IL-1beta | 0.0 |
| Bronchial epithelium TNFalpha + IL1beta | 31.0 |
| Small airway epithelium none | 12.2 |
| Small airway epithelium TNFalpha + IL-1beta | 12.3 |
| Coronery artery SMC rest | 7.0 |
| Coronery artery SMC TNFalpha + IL-1beta | 25.2 |
| Astrocytes rest | 0.0 |
| Astrocytes TNFalpha + IL-1beta | 14.8 |
| KU-812 (Basophil) rest | 62.0 |
| KU-812 (Basophil) PMA/ionomycin | 100.0 |
| CCD1106 (Keratinocytes) none | 6.0 |
| CCD1106 (Keratinocytes) TNFalpha + IL-1beta | 20.2 |
| Liver cirrhosis | 20.7 |
| Lupus kidney | 15.7 |
| NCI-H292 none | 26.1 |
| NCI-H292 IL-4 | 12.2 |
| NCI-H292 IL-9 | 6.1 |
| NCI-H292 IL-13 | 19.6 |
| NCI-H292 IFN gamma | 15.8 |
| HPAEC none | 5.4 |
| HPAEC TNF alpha + IL-1 beta | 0.0 |
| Lung fibroblast none | 0.0 |
| Lung fibroblast TNF alpha + IL-1 beta | 12.4 |
| Lung fibroblast IL-4 | 17.6 |
| Lung fibroblast IL-9 | 23.2 |
| Lung fibroblast IL-13 | 14.5 |
| Lung fibroblast IFN gamma | 12.9 |
| Dermal fibroblast CCD1070 rest | 7.0 |
| Dermal fibroblast CCD1070 TNF alpha | 26.4 |
| Dermal fibroblast CCD1070 IL-1 beta | 2.3 |
| Dermal fibroblast IFN gamma | 0.0 |
| Dermal fibroblast IL-4 | 11.0 |
| IBD Colitis 2 | 12.2 |
| IBD Crohn's | 16.4 |
| Colon | 18.7 |
| Lung | 12.2 |
| Thymus | 12.3 |
| Kidney | 37.6 |

Column A - Rel. Exp. (%) Ag437, Run 145778415

[1101] General_screening₁₃ panel_v1.7 Summary: Ag7222 Highest expression of this gene was seen in the testis and a lung cancer cell line sample (CTs=27). Thus, therapeutics targeting this gene or its protein product are useful in the treatment of male infertility or lung cancer.

[1102] Panel 4D Summary: Ag437 Highest expression was seen in the basophil cell line, KU-812 (CTs=33). Basophils release histamines and other biological modifiers in reponse to allergens and play an important role in the pathology of asthma and hypersensitivity reactions. Therefore, therapeutics designed against the protein encoded by this gene are useful for the reduction or inhibition of inflammation by blocking basophil function in these diseases. In addition, these cells are a reasonable model for the inflammatory cells that take part in various inflammatory lung and bowel diseases, such as asthma, Crohn's disease, and ulcerative colitis. Therefore, therapeutics that modulate the function of this gene or gene product are useful for the reduction or elimination of the symptoms of patients suffering from asthma, Crohn's disease, and ulcerative colitis.

[1103] V. CG5344903: Butyrophilin Like Receptor

[1104] Expression of gene CG53449-03 was assessed using the primer-probe sets Ag2030 and Ag8336, described in Tables VA and VB. Results of the RTQ-PCR runs are shown in Tables VC and VD.

TABLE VA
Probe Name Ag2030

| | | | | SEQ |
|---|---|---|---|---|
| | | | Start | ID |
| Primers | Sequences | Length | Position | No |
| Forward | 5′-ctgcgtttctgatctgaaaact-3′ | 22 | 997 | 1351 |
| Probe | TET-5′-acccatagaaaagctccccaggaggt-3′- | 26 | 1022 | 1352 |
| | TAMRA | | | |
| Reverse | 5′-ccaccacactcttccttgtaaa-3′ | 22 | 1067 | 1353 |

[1105] TABLE VB
Probe Name Ag8336

| | | | | SEQ |
|---|---|---|---|---|
| | | | Start | ID |
| Primers | Sequences | Length | Position | No |
| Forward | 5′-cattgttggactgaagattttctt-3′ | 24 | 844 | 1354 |
| Probe | TET-5′-ctccaaattccagtggaaaatccagg-3′- | 26 | 868 | 1355 |
| | TAMRA | | | |
| Reverse | 5′-cctgtccgtgctttcttctc-3′ | 20 | 907 | 1356 |

[1106] TABLE VC
Panel 1.3D

| Tissue Name | A |
|---|---|
| Liver adenocarcinoma | 0.0 |
| Pancreas | 3.3 |
| Pancreatic ca. CAPAN 2 | 0.0 |
| Adrenal gland | 0.0 |
| Thyroid | 3.8 |
| Salivary gland | 0.3 |
| Pituitary gland | 0.0 |
| Brain (fetal) | 0.0 |
| Brain (whole) | 0.0 |
| Brain (amygdala) | 0.3 |
| Brain (cerebellum) | 0.0 |
| Brain (hippocampus) | 0.0 |
| Brain (substantia nigra) | 0.0 |
| Brain (thalamus) | 0.3 |
| Cerebral Cortex | 0.0 |
| Spinal cord | 3.2 |
| glio/astro U87-MG | 0.0 |
| glio/astro U-118-MG | 0.0 |
| astrocytoma SW1783 | 0.0 |
| neuro*; met SK-N-AS | 0.0 |
| astrocytoma SF-539 | 0.0 |
| astrocytoma SNB-75 | 0.0 |
| glioma SNB-19 | 0.0 |
| glioma U251 | 0.0 |
| glioma SF-295 | 0.9 |
| Heart (fetal) | 0.0 |
| Heart | 0.0 |
| Skeletal muscle (fetal) | 0.0 |
| Skeletal muscle | 0.0 |
| Bone marrow | 30.6 |
| Thymus | 0.0 |
| Spleen | 3.0 |
| Lymph node | 4.3 |
| Colorectal | 73.7 |
| Stomach | 15.7 |
| Small intestine | 100.0 |
| Colon ca. SW480 | 0.0 |
| Colon ca.* SW620(SW480 met) | 0.0 |
| Colon ca. HT29 | 0.0 |
| Colon ca. HCT-116 | 0.0 |
| Colon ca. CaCo-2 | 40.1 |
| Colon ca. tissue(ODO3866) | 1.9 |
| Colon ca. HCC-2998 | 8.1 |
| Gastric ca.* (liver met) NCI-N87 | 0.0 |
| Bladder | 10.7 |
| Trachea | 1.6 |
| Kidney | 0.0 |
| Kidney (fetal) | 6.5 |
| Renal ca. 786-0 | 0.0 |
| Renal ca. A498 | 0.0 |
| Renal ca. RXF 393 | 0.0 |
| Renal ca. ACHN | 0.0 |
| Renal ca. UO-31 | 0.0 |
| Renal ca. TK-10 | 0.0 |
| Liver | 0.0 |
| Liver (fetal) | 1.6 |
| Liver ca. (hepatoblast) HepG2 | 0.0 |
| Lung | 27.9 |
| Lung (fetal) | 12.4 |
| Lung ca. (small cell) LX-1 | 0.4 |
| Lung ca. (small cell) NCI-H69 | 0.0 |
| Lung ca. (s. cell var.) SHP-77 | 0.0 |
| Lung ca. (large cell)NCI-H460 | 7.6 |
| Lung ca. (non-sm. cell) A549 | 1.2 |
| Lung ca. (non-s. cell) NCI-H23 | 0.0 |
| Lung ca. (non-s. cell) HOP-62 | 0.0 |
| Lung ca. (non-s. cl) NCI-H522 | 0.0 |
| Lung ca. (squam.) SW 900 | 0.0 |
| Lung ca. (squam.) NCI-H596 | 0.0 |
| Mammary gland | 0.0 |
| Breast ca.* (pl. ef) MCF-7 | 0.0 |
| Breast ca.* (pl. ef) MDA-MB-231 | 0.0 |
| Breast ca.* (pl. ef) T47D | 0.0 |
| Breast ca. BT-549 | 0.0 |
| Breast ca. MDA-N | 0.0 |
| Ovary | 0.0 |
| Ovarian ca. OVCAR-3 | 0.0 |
| Ovarian ca. OVCAR-4 | 0.0 |
| Ovarian ca. OVCAR-5 | 1.0 |
| Ovarian ca. OVCAR-8 | 0.0 |
| Ovarian ca. IGROV-1 | 0.0 |
| Ovarian ca.* (ascites) SK-OV-3 | 0.0 |
| Uterus | 0.8 |
| Placenta | 0.0 |
| Prostate | 0.0 |
| Prostate ca.* (bone met)PC-3 | 0.0 |
| Testis | 15.8 |
| Melanoma Hs688(A).T | 0.0 |
| Melanoma* (met) Hs688(B).T | 0.0 |
| Melanoma UACC-62 | 0.0 |
| Melanoma M14 | 0.0 |
| Melanoma LOX IMVI | 0.0 |
| Melanoma* (met) SK-MEL-5 | 0.0 |
| Adipose | 1.8 |

Column A - Rel. Exp. (%) Ag2030, Run 165618974

[1107] TABLE VD
Panel 4.1D

| Tissue Name | A | B |
|---|---|---|
| Secondary Th1 act | 2.3 | 0.0 |
| Secondary Th2 act | 0.8 | 0.0 |
| Secondary Tr1 act | 0.0 | 0.0 |
| Secondary Th1 rest | 0.0 | 0.0 |
| Secondary Th2 rest | 0.0 | 0.0 |
| Secondary Tr1 rest | 0.0 | 0.0 |
| Primary Th1 act | 0.0 | 0.0 |
| Primary Th2 act | 0.0 | 0.0 |
| Primary Tr1 act | 1.7 | 0.0 |
| Primary Th1 rest | 0.0 | 0.0 |
| Primary Th2 rest | 0.0 | 0.0 |
| Primary Tr1 rest | 0.0 | 0.0 |
| CD45RA CD4 lymphocyte act | 0.0 | 0.0 |
| CD45RO CD4 lymphocyte act | 2.3 | 3.6 |
| CD8 lymphocyte act | 1.2 | 0.0 |
| Secondary CD8 lymphocyte rest | 0.0 | 0.0 |
| Secondary CD8 lymphocyte act | 1.4 | 0.0 |
| CD4 lymphocyte none | 0.0 | 0.0 |
| 2ry Th1/Th2/Tr1_anti-CD95 CH11 | 0.0 | 0.0 |
| LAK cells rest | 0.0 | 0.0 |
| LAK cells IL-2 | 0.0 | 0.0 |
| LAK cells IL-2 + IL-12 | 0.0 | 0.0 |
| LAK cells IL-2 + IFN gamma | 0.0 | 0.0 |
| LAK cells IL-2 + IL-18 | 0.0 | 0.0 |
| LAK cells PMA/ionomycin | 0.0 | 0.0 |
| NK Cells IL-2 rest | 0.0 | 0.0 |
| Two Way MLR 3 day | 0.0 | 0.0 |
| Two Way MLR 5 day | 0.0 | 0.0 |
| Two Way MLR 7 day | 0.0 | 0.0 |
| PBMC rest | 0.0 | 0.0 |
| PBMC PWM | 1.1 | 0.0 |
| PBMC PHA-L | 0.0 | 0.0 |
| Ramos (B cell) none | 0.0 | 0.0 |
| Ramos (B cell) ionomycin | 0.0 | 0.0 |
| B lymphocytes PWM | 4.7 | 0.0 |
| B lymphocytes CD40L and IL-4 | 0.0 | 0.0 |
| EOL-1 dbcAMP | 0.0 | 0.0 |
| EOL-1 dbcAMP PMA/ionomycin | 0.0 | 0.0 |
| Dendritic cells none | 0.0 | 0.0 |
| Dendritic cells LPS | 0.0 | 0.0 |
| Dendritic cells anti-CD40 | 0.0 | 0.0 |
| Monocytes rest | 0.0 | 0.0 |
| Monocytes LPS | 0.0 | 0.0 |
| Macrophages rest | 0.0 | 0.0 |
| Macrophages LPS | 0.0 | 0.0 |
| HUVEC none | 0.0 | 0.0 |
| HUVEC starved | 0.0 | 0.0 |
| HUVEC IL-1beta | 0.0 | 0.0 |
| HUVEC IFN gamma | 0.0 | 0.0 |
| HUVEC TNF alpha + IFN gamma | 0.0 | 0.0 |
| HUVEC TNF alpha + IL4 | 0.0 | 0.0 |
| HUVEC IL-11 | 0.0 | 0.0 |
| Lung Microvascular EC none | 0.0 | 0.0 |
| Lung Microvascular EC TNFalpha + IL-1beta | 0.0 | 0.0 |
| Microvascular Dermal EC none | 0.0 | 0.0 |
| Microsvasular Dermal EC TNFalpha + IL-1beta | 0.0 | 0.0 |
| Bronchial epithelium TNFalpha + IL1beta | 0.0 | 0.0 |
| Small airway epithelium none | 0.0 | 0.0 |
| Small airway epithelium TNFalpha + IL-1beta | 0.0 | 0.0 |
| Coronery artery SMC rest | 0.0 | 0.0 |
| Coronery artery SMC TNFalpha + IL-1beta | 0.0 | 0.0 |
| Astrocytes rest | 0.0 | 0.0 |
| Astrocytes TNFalpha + IL-1beta | 0.0 | 0.0 |
| KU-812 (Basophil) rest | 0.0 | 0.0 |
| KU-812 (Basophil) PMA/ionomycin | 0.0 | 0.0 |
| CCD1106 (Keratinocytes) none | 0.0 | 0.0 |
| CCD1106 (Keratinocytes) TNFalpha + IL-1beta | 0.0 | 0.0 |
| Liver cirrhosis | 12.9 | 1.3 |
| NCI-H292 none | 0.0 | 3.7 |
| NCI-H292 IL-4 | 0.0 | 0.0 |
| NCI-H292 IL-9 | 0.0 | 0.0 |
| NCI-H292 IL-13 | 0.0 | 0.0 |
| NCI-H292 IFN gamma | 0.0 | 0.0 |
| HPAEC none | 0.0 | 0.0 |
| HPAEC TNF alpha + IL-1 beta | 0.0 | 0.0 |
| Lung fibroblast none | 0.0 | 0.0 |
| Lung fibroblast TNF alpha + IL-1 beta | 0.0 | 0.0 |
| Lung fibroblast IL-4 | 0.0 | 0.0 |
| Lung fibroblast IL-9 | 0.0 | 0.0 |
| Lung fibroblast IL-13 | 0.0 | 0.0 |
| Lung fibroblast IFN gamma | 0.0 | 0.0 |
| Dermal fibroblast CCD1070 rest | 0.0 | 0.0 |
| Dermal fibroblast CCD1070 TNF alpha | 0.7 | 0.0 |
| Dermal fibroblast CCD1070 IL-1 beta | 0.0 | 0.0 |
| Dermal fibroblast IFN gamma | 0.0 | 0.0 |
| Dermal fibroblast IL-4 | 0.0 | 0.0 |
| Dermal Fibroblasts rest | 0.0 | 0.0 |
| Neutrophils TNFa + LPS | 23.2 | 11.6 |
| Neutrophils rest | 84.1 | 100.0 |
| Colon | 100.0 | 5.7 |
| Lung | 2.4 | 0.0 |
| Thymus | 0.0 | 0.0 |
| Kidney | 0.8 | 0.0 |

Column A - Rel. Exp. (%) Ag2030, Run 306413257
Column B - Rel. Exp. (%) Ag8336, Run 343540037

[1108] Panel 1.3D Summary: Ag2030 This gene was most prominently expressed in gastrointestinal tissues. Expression of this gene was highest in colon and small intestine (CT=31) and was also significantly expressed in stomach tissue. Therapeutic modulation of this gene or its protein product is useful as a marker of gastrointestinal tissue, and specifically of small intestine, stomach or colorectal tissue.

[1109] Panel 4.1D Summary: Ag2030/Ag8336 Expression of this gene was limited to colon and neutrophils (CTs=30-34). Expression of this gene was down-regulated in activated neutrophils. This expression profile demonstrated that the encoded protein reduces activation of these inflammatory cells and is useful as a protein therapeutic to eliminate the symptoms in patients with Crohn's disease, ulcerative colitis, multiple sclerosis, chronic obstructive pulmonary disease, asthma, emphysema, rheumatoid arthritis, lupus erythematosus, or psoriasis. In addition, small molecule or antibodies targeting this gene or gene product are effective in increasing the immune response in patients with AIDS or other immunodeficiencies.

[1110] W. CG53449-04: B7/Butyrophilin Like Receptor

[1111] Expression of gene CG53449-04 was assessed using the primer-probe sets Ag2030, Ag6640 and Ag7598, described in Tables WA, WB and WC. Results of the RTQ-PCR runs are shown in Tables WD, WE, WF, WG, WH and WI.

TABLE WA
Probe Name Ag2030

| | | | | SEQ |
|---|---|---|---|---|
| | | | Start | ID |
| Primers | Sequences | Length | Position | No |
| Forward | 5′-ctgcgtttctgatctgaaaact-3′ | 22 | 1185 | 1357 |
| Probe | TET-5′-acccatagaaaagctccccaggaggt-3′- | 26 | 1210 | 1358 |
| | TAMRA | | | |
| Reverse | 5′-ccaccacactcttccttgtaaa-3′ | 22 | 1255 | 1359 |

[1112] TABLE WB
Probe Name Ag6640

| | | | | SEQ |
|---|---|---|---|---|
| | | | Start | ID |
| Primers | Sequences | Length | Position | No |
| Forward | 5′-gtgtaagcgagagagagaagcat-3′ | 23 | 938 | 1360 |
| Probe | TET-5′-atctctgatcctgtccctgctggaac-3′- | 26 | 981 | 1361 |
| | TAMRA | | | |
| Reverse | 5′-tagaagaagagaagcagctggat-3′ | 23 | 1015 | 1362 |

[1113] TABLE WC
Probe Name Ag7598

| | | | | SEQ |
|---|---|---|---|---|
| | | | Start | ID |
| Primers | Sequences | Length | Position | No |
| Forward | 5′-tgctcccacatccagct-3′ | 17 | 1006 | 1363 |
| Probe | TET-5′-ttcttctagtcctagcctccagggg-3′- | 25 | 1030 | 1364 |
| | TAMRA | | | |
| Reverse | 5′-gctttcttctccagtccagttc-3′ | 22 | 1084 | 1365 |

[1114] TABLE WD
AI_comprehensive panel_v1.0

| Tissue Name | A |
|---|---|
| 110967 COPD-F | 13.5 |
| 110980 COPD-F | 25.5 |
| 110968 COPD-M | 15.1 |
| 110977 COPD-M | 42.0 |
| 110989 Emphysema-F | 6.3 |
| 110992 Emphysema-F | 0.0 |
| 110993 Emphysema-F | 6.7 |
| 110994 Emphysema-F | 2.0 |
| 110995 Emphysema-F | 1.0 |
| 110996 Emphysema-F | 0.0 |
| 110997 Asthma-M | 1.6 |
| 111001 Asthma-F | 6.0 |
| 111002 Asthma-F | 4.0 |
| 111003 Atopic Asthma-F | 3.5 |
| 111004 Atopic Asthma-F | 3.4 |
| 111005 Atopic Asthma-F | 4.5 |
| 111006 Atopic Asthma-F | 0.0 |
| 111417 Allergy-M | 4.5 |
| 112347 Allergy-M | 0.4 |
| 112349 Normal Lung-F | 0.4 |
| 112357 Normal Lung-F | 8.9 |
| 112354 Normal Lung-M | 4.8 |
| 112374 Crohns-F | 4.2 |
| 112389 Match Control Crohns-F | 7.2 |
| 112375 Crohns-F | 1.9 |
| 112732 Match Control Crohns-F | 3.9 |
| 112725 Crohns-M | 3.5 |
| 112387 Match Control Crohns-M | 0.3 |
| 112378 Crohns-M | 1.2 |
| 112390 Match Control Crohns-M | 24.5 |
| 112726 Crohns-M | 2.0 |
| 112731 Match Control Crohns-M | 4.5 |
| 112380 Ulcer Col-F | 7.2 |
| 112734 Match Control Ulcer Col-F | 15.7 |
| 112384 Ulcer Col-F | 13.1 |
| 112737 Match Control Ulcer Col-F | 3.1 |
| 112386 Ulcer Col-F | 5.6 |
| 112738 Match Control Ulcer Col-F | 19.9 |
| 112381 Ulcer Col-M | 0.3 |
| 112735 Match Control Ulcer Col-M | 0.0 |
| 112382 Ulcer Col-M | 18.7 |
| 112394 Match Control Ulcer Col-M | 3.4 |
| 112383 Ulcer Col-M | 2.6 |
| 112736 Match Control Ulcer Col-M | 6.2 |
| 112423 Psoriasis-F | 12.3 |
| 112427 Match Control Psoriasis-F | 25.2 |
| 112418 Psoriasis-M | 26.8 |
| 112723 Match Control Psoriasis-M | 2.9 |
| 112419 Psoriasis-M | 18.3 |
| 112424 Match Control Psoriasis-M | 11.7 |
| 112420 Psoriasis-M | 32.8 |
| 112425 Match Control Psoriasis-M | 14.2 |
| 104689 (MF) OA Bone-Backus | 24.5 |
| 104690 (MF) Adj “Normal” Bone-Backus | 38.4 |
| 104691 (MF) OA Synovium-Backus | 6.4 |
| 104692 (BA) OA Cartilage-Backus | 0.0 |
| 104694 (BA) OA Bone-Backus | 6.0 |
| 104695 (BA) Adj “Normal” Bone-Backus | 37.4 |
| 104696 (BA) OA Synovium-Backus | 3.4 |
| 104700 (SS) OA Bone-Backus | 88.3 |
| 104701 (SS) Adj “Normal” Bone-Backus | 30.4 |
| 104702 (SS) OA Synovium-Backus | 28.3 |
| 117093 OA Cartilage Rep7 | 15.2 |
| 112672 OA Bone5 | 13.4 |
| 112673 OA Synovium5 | 7.5 |
| 112674 OA Synovial Fluid cells5 | 6.0 |
| 117100 OA Cartilage Rep14 | 4.5 |
| 112756 OA Bone9 | 14.2 |
| 112757 OA Synovium9 | 24.1 |
| 112758 OA Synovial Fluid Cells9 | 37.9 |
| 117125 RA Cartilage Rep2 | 10.6 |
| 113492 Bone2 RA | 100.0 |
| 113493 Synovium2 RA | 47.0 |
| 113494 Syn Fluid Cells RA | 68.3 |
| 113499 Cartilage4 RA | 67.8 |
| 113500 Bone4 RA | 81.2 |
| 113501 Synovium4 RA | 64.2 |
| 113502 Syn Fluid Cells4 RA | 51.1 |
| 113495 Cartilage3 RA | 68.8 |
| 113496 Bone3 RA | 66.9 |
| 113497 Synovium3 RA | 52.5 |
| 113498 Syn Fluid Cells3 RA | 85.9 |
| 117106 Normal Cartilage Rep20 | 1.1 |
| 113663 Bone3 Normal | 0.0 |
| 113664 Synovium3 Normal | 0.0 |
| 113665 Syn Fluid Cells3 Normal | 0.0 |
| 117107 Normal Cartilage Rep22 | 7.9 |
| 113667 Bone4 Normal | 5.1 |
| 113668 Synovium4 Normal | 3.4 |
| 113669 Syn Fluid Cells4 Normal | 3.7 |

Column A - Rel. Exp. (%) Ag6640, Run 296559279

[1115] TABLE WE
General_screening_panel_v1.6

| Tissue Name | A |
|---|---|
| Adipose | 11.0 |
| Melanoma* Hs688(A).T | 0.0 |
| Melanoma* Hs688(B).T | 0.0 |
| Melanoma* M14 | 0.0 |
| Melanoma* LOXIMVI | 0.0 |
| Melanoma* SK-MEL-5 | 0.0 |
| Squamous cell carcinoma SCC-4 | 0.0 |
| Testis Pool | 16.5 |
| Prostate ca.* (bone met) PC-3 | 0.1 |
| Prostate Pool | 1.4 |
| Placenta | 0.9 |
| Uterus Pool | 0.3 |
| Ovarian ca. OVCAR-3 | 0.2 |
| Ovarian ca. SK-OV-3 | 0.0 |
| Ovarian ca. OVCAR-4 | 0.0 |
| Ovarian ca. OVCAR-5 | 3.8 |
| Ovarian ca. IGROV-1 | 0.0 |
| Ovarian ca. OVCAR-8 | 0.0 |
| Ovary | 2.9 |
| Breast ca. MCF-7 | 0.0 |
| Breast ca. MDA-MB-231 | 0.0 |
| Breast ca. BT 549 | 0.0 |
| Breast ca. T47D | 0.0 |
| Breast ca. MDA-N | 0.0 |
| Breast Pool | 2.5 |
| Trachea | 1.2 |
| Lung | 0.1 |
| Fetal Lung | 17.8 |
| Lung ca. NCI-N417 | 0.0 |
| Lung ca. LX-1 | 14.9 |
| Lung ca. NCI-H146 | 0.0 |
| Lung ca. SHP-77 | 0.2 |
| Lung ca. A549 | 1.3 |
| Lung ca. NCI-H526 | 0.0 |
| Lung ca. NCI-H23 | 1.1 |
| Lung ca. NCI-H460 | 1.1 |
| Lung ca. HOP-62 | 0.0 |
| Lung ca. NCI-H522 | 0.0 |
| Liver | 0.0 |
| Fetal Liver | 1.3 |
| Liver ca. HepG2 | 0.0 |
| Kidney Pool | 5.6 |
| Fetal Kidney | 10.3 |
| Renal ca. 786-0 | 0.0 |
| Renal ca. A498 | 0.0 |
| Renal ca. ACHN | 0.0 |
| Renal ca. UO-31 | 0.0 |
| Renal ca. TK-10 | 0.0 |
| Bladder | 13.0 |
| Gastric ca. (liver met.) NCI-N87 | 0.3 |
| Gastric ca. KATO III | 0.6 |
| Colon ca. SW-948 | 1.4 |
| Colon ca. SW480 | 0.8 |
| Colon ca.* (SW480 met) SW620 | 0.1 |
| Colon ca. HT29 | 0.4 |
| Colon ca. HCT-116 | 0.0 |
| Colon ca. CaCo-2 | 100.0 |
| Colon cancer tissue | 9.3 |
| Colon ca. SW1116 | 0.0 |
| Colon ca. Colo-205 | 7.0 |
| Colon ca. SW-48 | 26.2 |
| Colon Pool | 1.3 |
| Small Intestine Pool | 2.3 |
| Stomach Pool | 1.6 |
| Bone Marrow Pool | 0.6 |
| Fetal Heart | 2.1 |
| Heart Pool | 2.1 |
| Lymph Node Pool | 2.1 |
| Fetal Skeletal Muscle | 4.5 |
| Skeletal Muscle Pool | 0.0 |
| Spleen Pool | 8.2 |
| Thymus Pool | 1.7 |
| CNS cancer (glio/astro) U87-MG | 0.0 |
| CNS cancer (glio/astro) U-118-MG | 8.4 |
| CNS cancer (neuro; met) SK-N-AS | 0.0 |
| CNS cancer (astro) SF-539 | 0.0 |
| CNS cancer (astro) SNB-75 | 0.0 |
| CNS cancer (glio) SNB-19 | 0.0 |
| CNS cancer (glio) SF-295 | 0.3 |
| Brain (Amygdala) Pool | 0.0 |
| Brain (cerebellum) | 0.4 |
| Brain (fetal) | 0.3 |
| Brain (Hippocampus) Pool | 0.8 |
| Cerebral Cortex Pool | 3.8 |
| Brain (Substantia nigra) Pool | 0.0 |
| Brain (Thalamus) Pool | 0.0 |
| Brain (whole) | 1.0 |
| Spinal Cord Pool | 0.4 |
| Adrenal Gland | 1.6 |
| Pituitary gland Pool | 0.0 |
| Salivary Gland | 0.7 |
| Thyroid (female) | 0.3 |
| Pancreatic ca. CAPAN2 | 0.0 |
| Pancreas Pool | 6.0 |

Column A - Rel. Exp. (%) Ag6640, Run 277241469

[1116] TABLE WF
PGI1.0

| Tissue Name | A |
|---|---|
| 162191_Normal Lung 1 (IBS) | 4.6 |
| 162570_Normal Lung 4 (Aastrand) | 2.0 |
| 160468_MD lung | 2.9 |
| 156629_MD Lung 13 | 1.6 |
| 162571 _Normal Lung 3 (Aastrand) | 0.7 |
| 162186_Fibrosis Lung 1 (Genomic | 26.4 |
| Collaborative) | |
| 162187_Fibrosis Lung 2 (Genomic | 31.6 |
| Collaborative) | |
| 151281_Fibrosis lung 11(Ardais) | 45.1 |
| 162190_Asthma Lung 4 (Genomic | 45.7 |
| Collaborative) | |
| 160467_Asthma Lung 13 (MD) | 2.1 |
| 137027_Emphysema Lung 1 (Ardais) | 6.0 |
| 137028_Emphysema Lung 2 (Ardais) | 5.7 |
| 137040_Emphysema Lung 3 (Ardais) | 7.0 |
| 137041_Emphysema Lung 4 (Ardais) | 14.1 |
| 137043_Emphysema Lung 5 (Ardais) | 7.5 |
| 142817_Emphysema Lung 6 (Ardais) | 20.4 |
| 142818_Emphysema Lung 7 (Ardais) | 19.3 |
| 142819_Emphysema Lung 8 (Ardais) | 10.4 |
| 142820_Emphysema Lung 9 (Ardais) | 1.8 |
| 142821_Emphysema Lung 10 (Ardais) | 12.6 |
| 162185_Emphysema Lung 12 (Ardais) | 13.9 |
| 162184_Emphysema Lung 13 (Ardais) | 5.3 |
| 162183_Emphysema Lung 14 (Ardais) | 28.5 |
| 162188_Emphysema Lung 15 (Genomic | 20.2 |
| Collaborative) | |
| 162177_NAT UC Colon 1(Ardais) | 100.0 |
| 162176_UC Colon 1(Ardais) | 59.9 |
| 162179_NAT UC Colon 2(Ardais) | 65.5 |
| 162178_UC Colon 2(Ardais) | 8.1 |
| 162181_NAT UC Colon 3(Ardais) | 63.7 |
| 162180_UC Colon 3(Ardais) | 5.2 |
| 162182_NAT UC Colon 4 (Ardais) | 100.0 |
| 137042_UC Colon 1108 | 4.2 |
| 137029_UC Colon 8215 | 8.1 |
| 137031_UC Colon 8217 | 5.6 |
| 137036_UC Colon 1137 | 22.2 |
| 137038_UC Colon 1491 | 13.4 |
| 137039_UC Colon 1546 | 27.0 |
| 162594_NAT Crohn's 47751 (NDRI) | 3.7 |
| 162593_Crohn's 47751 (NDRI) | 0.5 |

Column A - Rel. Exp. (%) Ag6640, Run 376378448

[1117] TABLE WG
Panel 1.3D

| Tissue Name | A |
|---|---|
| Liver adenocarcinoma | 0.0 |
| Pancreas | 3.3 |
| Pancreatic ca. CAPAN 2 | 0.0 |
| Adrenal gland | 0.0 |
| Thyroid | 3.8 |
| Salivary gland | 0.3 |
| Pituitary gland | 0.0 |
| Brain (fetal) | 0.0 |
| Brain (whole) | 0.0 |
| Brain (amygdala) | 0.3 |
| Brain (cerebellum) | 0.0 |
| Brain (hippocampus) | 0.0 |
| Brain (substantia nigra) | 0.0 |
| Brain (thalamus) | 0.3 |
| Cerebral Cortex | 0.0 |
| Spinal cord | 3.2 |
| glio/astro U87-MG | 0.0 |
| glio/astro U-118-MG | 0.0 |
| astrocytoma SW1783 | 0.0 |
| neuro*; met SK-N-AS | 0.0 |
| astrocytoma SF-539 | 0.0 |
| astrocytoma SNB-75 | 0.0 |
| glioma SNB-19 | 0.0 |
| glioma U251 | 0.0 |
| glioma SF-295 | 0.9 |
| Heart (fetal) | 0.0 |
| Heart | 0.0 |
| Skeletal muscle (fetal) | 0.0 |
| Skeletal muscle | 0.0 |
| Bone marrow | 30.6 |
| Thymus | 0.0 |
| Spleen | 3.0 |
| Lymph node | 4.3 |
| Colorectal | 73.7 |
| Stomach | 15.7 |
| Small intestine | 100.0 |
| Colon ca. SW480 | 0.0 |
| Colon ca.* SW620(SW480 met) | 0.0 |
| Colon ca. HT29 | 0.0 |
| Colon ca. HCT-116 | 0.0 |
| Colon ca. CaCo-2 | 40.1 |
| Colon ca. tissue(ODO3866) | 1.9 |
| Colon ca. HCC-2998 | 8.1 |
| Gastric ca.* (liver met) NCI-N87 | 0.0 |
| Bladder | 10.7 |
| Trachea | 1.6 |
| Kidney | 0.0 |
| Kidney (fetal) | 6.5 |
| Renal ca. 786-0 | 0.0 |
| Renal ca. A498 | 0.0 |
| Renal ca. RXF 393 | 0.0 |
| Renal ca. ACHN | 0.0 |
| Renal ca. UO-31 | 0.0 |
| Renal ca. TK-10 | 0.0 |
| Liver | 0.0 |
| Liver (fetal) | 1.6 |
| Liver ca. (hepatoblast) HepG2 | 0.0 |
| Lung | 27.9 |
| Lung (fetal) | 12.4 |
| Lung ca. (small cell) LX-1 | 0.4 |
| Lung ca. (small cell) NCI-H69 | 0.0 |
| Lung ca. (s. cell var.) SHP-77 | 0.0 |
| Lung ca. (large cell)NCI-H460 | 7.6 |
| Lung ca. (non-sm. cell) A549 | 1.2 |
| Lung ca. (non-s. cell) NCI-H23 | 0.0 |
| Lung ca. (non-s. cell) HOP-62 | 0.0 |
| Lung ca. (non-s. cl) NCI-H522 | 0.0 |
| Lung ca. (squam.) SW 900 | 0.0 |
| Lung ca. (squam.) NCI-H596 | 0.0 |
| Mammary gland | 0.0 |
| Breast ca.* (pl. ef) MCF-7 | 0.0 |
| Breast ca.* (pl. ef) MDA-MB-231 | 0.0 |
| Breast ca.* (pl. ef) T47D | 0.0 |
| Breast ca. BT-549 | 0.0 |
| Breast ca. MDA-N | 0.0 |
| Ovary | 0.0 |
| Ovarian ca. OVCAR-3 | 0.0 |
| Ovarian ca. OVCAR-4 | 0.0 |
| Ovarian ca. OVCAR-5 | 1.0 |
| Ovarian ca. OVCAR-8 | 0.0 |
| Ovarian ca. IGROV-1 | 0.0 |
| Ovarian ca.* (ascites) SK-OV-3 | 0.0 |
| Uterus | 0.8 |
| Placenta | 0.0 |
| Prostate | 0.0 |
| Prostate ca.* (bone met)PC-3 | 0.0 |
| Testis | 15.8 |
| Melanoma Hs688(A).T | 0.0 |
| Melanoma* (met) Hs688(B).T | 0.0 |
| Melanoma UACC-62 | 0.0 |
| Melanoma M14 | 0.0 |
| Melanoma LOX IMVI | 0.0 |
| Melanoma* (met) SK-MEL-5 | 0.0 |
| Adipose | 1.8 |

Column A - Rel. Exp. (%) Ag2030, Run 165618974

[1118] TABLE WH
Panel 4.1D

| Tissue Name | A | B | C | D |
|---|---|---|---|---|
| Secondary Th1 act | 2.3 | 0.0 | 0.0 | 0.0 |
| Secondary Th2 act | 0.8 | 0.0 | 0.0 | 0.0 |
| Secondary Tr1 act | 0.0 | 0.0 | 0.0 | 0.0 |
| Secondary Th1 rest | 0.0 | 0.0 | 0.0 | 0.0 |
| Secondary Th2 rest | 0.0 | 0.0 | 0.0 | 0.0 |
| Secondary Tr1 rest | 0.0 | 0.0 | 0.0 | 0.0 |
| Primary Th1 act | 0.0 | 0.0 | 0.0 | 0.0 |
| Primary Th2 act | 0.0 | 0.0 | 0.0 | 0.0 |
| Primary Tr1 act | 1.7 | 0.0 | 0.0 | 1.6 |
| Primary Th1 rest | 0.0 | 0.0 | 0.0 | 0.0 |
| Primary Th2 rest | 0.0 | 0.0 | 0.0 | 0.0 |
| Primary Tr1 rest | 0.0 | 0.0 | 0.0 | 0.0 |
| CD45RA CD4 lymphocyte act | 0.0 | 0.9 | 0.0 | 0.0 |
| CD45RO CD4 lymphocyte act | 2.3 | 3.0 | 4.0 | 9.5 |
| CD8 lymphocyte act | 1.2 | 0.0 | 0.7 | 0.0 |
| Secondary CD8 lymphocyte rest | 0.0 | 0.0 | 0.0 | 0.0 |
| Secondary CD8 lymphocyte act | 1.4 | 0.7 | 0.0 | 0.0 |
| CD4 lymphocyte none | 0.0 | 0.0 | 0.0 | 0.0 |
| 2ry Th1/Th2/Tr1_anti-CD95 CH11 | 0.0 | 0.0 | 0.9 | 0.0 |
| LAK cells rest | 0.0 | 0.0 | 1.5 | 0.0 |
| LAK cells IL-2 | 0.0 | 0.0 | 0.0 | 0.0 |
| LAK cells IL-2 + IL-12 | 0.0 | 0.0 | 0.0 | 0.0 |
| LAK cells IL-2 + IFN gamma | 0.0 | 0.0 | 0.0 | 0.0 |
| LAK cells IL-2 + IL-18 | 0.0 | 0.0 | 0.0 | 0.0 |
| LAK cells PMA/ionomycin | 0.0 | 0.0 | 0.0 | 0.0 |
| NK Cells IL-2 rest | 0.0 | 0.0 | 0.0 | 0.0 |
| Two Way MLR 3 day | 0.0 | 0.0 | 0.0 | 0.0 |
| Two Way MLR 5 day | 0.0 | 0.0 | 1.1 | 0.0 |
| Two Way MLR 7 day | 0.0 | 1.5 | 0.0 | 0.0 |
| PBMC rest | 0.0 | 0.0 | 0.0 | 0.0 |
| PBMC PWM | 1.1 | 0.0 | 0.5 | 0.0 |
| PBMC PHA-L | 0.0 | 0.0 | 0.5 | 0.0 |
| Ramos (B cell) none | 0.0 | 0.0 | 0.0 | 0.0 |
| Ramos (B cell) ionomycin | 0.0 | 0.0 | 0.0 | 0.0 |
| B lymphocytes PWM | 4.7 | 2.8 | 2.7 | 1.5 |
| B lymphocytes CD40L and IL-4 | 0.0 | 2.3 | 0.0 | 0.0 |
| EOL-1 dbcAMP | 0.0 | 0.0 | 0.0 | 0.0 |
| EOL-1 dbcAMP PMA/ionomycin | 0.0 | 0.0 | 0.0 | 0.0 |
| Dendritic cells none | 0.0 | 0.0 | 0.0 | 0.0 |
| Dendritic cells LPS | 0.0 | 0.0 | 0.0 | 0.0 |
| Dendritic cells anti-CD40 | 0.0 | 0.0 | 0.0 | 0.0 |
| Monocytes rest | 0.0 | 0.0 | 0.3 | 0.0 |
| Monocytes LPS | 0.0 | 0.0 | 0.0 | 0.0 |
| Macrophages rest | 0.0 | 0.0 | 0.0 | 0.0 |
| Macrophages LPS | 0.0 | 0.0 | 0.0 | 0.0 |
| HUVEC none | 0.0 | 0.0 | 0.0 | 0.0 |
| HUVEC starved | 0.0 | 0.0 | 0.0 | 0.0 |
| HUVEC IL-1 beta | 0.0 | 0.0 | 0.0 | 0.0 |
| HUVEC IFN gamma | 0.0 | 0.0 | 0.0 | 0.0 |
| HUVEC TNF alpha + IFN gamma | 0.0 | 0.0 | 0.0 | 0.0 |
| HUVEC TNF alpha + IL4 | 0.0 | 0.0 | 0.0 | 0.0 |
| HUVEC IL-11 | 0.0 | 0.0 | 0.0 | 0.0 |
| Lung Microvascular EC none | 0.0 | 0.0 | 0.0 | 1.7 |
| Lung Microvascular EC | 0.0 | 0.0 | 0.0 | 0.0 |
| TNFalpha + IL-1beta | | | | |
| Microvascular Dermal EC none | 0.0 | 0.0 | 1.1 | 0.0 |
| Microsvasular Dermal EC | 0.0 | 0.0 | 0.0 | 0.0 |
| TNFalpha + IL-1beta | | | | |
| Bronchial epithelium | 0.0 | 0.0 | 0.0 | 0.0 |
| TNFalpha + IL1beta | | | | |
| Small airway epithelium none | 0.0 | 0.0 | 0.0 | 0.0 |
| Small airway epithelium | 0.0 | 0.0 | 0.0 | 0.0 |
| TNFalpha + IL-1beta | | | | |
| Coronery artery SMC rest | 0.0 | 0.0 | 0.0 | 0.0 |
| Coronery artery SMC | 0.0 | 0.0 | 0.0 | 0.0 |
| TNFalpha + IL-1beta | | | | |
| Astrocytes rest | 0.0 | 0.0 | 0.0 | 0.0 |
| Astrocytes TNFalpha + IL-1beta | 0.0 | 0.0 | 0.0 | 0.0 |
| KU-812 (Basophil) rest | 0.0 | 0.0 | 0.9 | 0.0 |
| KU-812 (Basophil) PMA/ionomycin | 0.0 | 0.0 | 0.0 | 0.0 |
| CCD1106 (Keratinocytes) none | 0.0 | 0.0 | 0.0 | 0.0 |
| CCD1106 (Keratinocytes) | 0.0 | 0.0 | 0.0 | 0.0 |
| TNFalpha + IL-1beta | | | | |
| Liver cirrhosis | 12.9 | 2.8 | 6.0 | 0.0 |
| NCI-H292 none | 0.0 | 2.4 | 0.0 | 0.0 |
| NCI-H292 IL-4 | 0.0 | 2.4 | 0.0 | 1.7 |
| NCI-H292 IL-9 | 0.0 | 1.1 | 3.7 | 1.3 |
| NCI-H292 IL-13 | 0.0 | 0.0 | 1.6 | 1.6 |
| NCI-H292 IFN gamma | 0.0 | 0.0 | 0.0 | 0.0 |
| HPAEC none | 0.0 | 0.0 | 0.0 | 0.0 |
| HPAEC TNF alpha + IL-1 beta | 0.0 | 0.0 | 0.0 | 0.0 |
| Lung fibroblast none | 0.0 | 0.0 | 0.0 | 0.0 |
| Lung fibroblast TNF alpha + IL-1 beta | 0.0 | 0.0 | 0.0 | 0.0 |
| Lung fibroblast IL-4 | 0.0 | 0.0 | 0.0 | 0.0 |
| Lung fibroblast IL-9 | 0.0 | 0.0 | 0.0 | 0.0 |
| Lung fibroblast IL-13 | 0.0 | 0.0 | 0.0 | 0.0 |
| Lung fibroblast IFN gamma | 0.0 | 0.0 | 0.0 | 0.0 |
| Dermal fibroblast CCD1070 rest | 0.0 | 0.0 | 0.0 | 0.0 |
| Dermal fibroblast CCD1070 TNF alpha | 0.7 | 0.0 | 0.0 | 0.0 |
| Dermal fibroblast CCD1070 IL-1 beta | 0.0 | 0.0 | 0.0 | 0.0 |
| Dermal fibroblast IFN gamma | 0.0 | 0.0 | 1.1 | 0.0 |
| Dermal fibroblast IL-4 | 0.0 | 0.0 | 0.0 | 0.0 |
| Dermal Fibroblasts rest | 0.0 | 0.0 | 0.0 | 0.0 |
| Neutrophils TNFa + LPS | 23.2 | 31.0 | 20.6 | 38.4 |
| Neutrophils rest | 84.1 | 100.0 | 100.0 | 100.0 |
| Colon | 100.0 | 23.8 | 25.5 | 40.3 |
| Lung | 2.4 | 0.0 | 0.7 | 0.0 |
| Thymus | 0.0 | 0.8 | 0.0 | 0.0 |
| Kidney | 0.8 | 3.0 | 1.3 | 0.0 |

Column A - Rel. Exp. (%) Ag2030, Run 306413257
Column B - Rel. Exp. (%) Ag6640, Run 274991372
Column C - Rel. Exp. (%) Ag6640, Run 296907633
Column D - Rel. Exp. (%) Ag7598, Run 310594484

[1119] TABLE WI
Panel 4D

| Tissue Name | A |
|---|---|
| Secondary Th1 act | 0.1 |
| Secondary Th2 act | 0.0 |
| Secondary Tr1 act | 0.0 |
| Secondary Th1 rest | 0.0 |
| Secondary Th2 rest | 0.0 |
| Secondary Tr1 rest | 0.0 |
| Primary Th1 act | 0.0 |
| Primary Th2 act | 0.1 |
| Primary Tr1 act | 0.1 |
| Primary Th1 rest | 0.1 |
| Primary Th2 rest | 0.1 |
| Primary Tr1 rest | 0.0 |
| CD45RA CD4 lymphocyte act | 0.0 |
| CD45RO CD4 lymphocyte act | 0.0 |
| CD8 lymphocyte act | 0.1 |
| Secondary CD8 lymphocyte rest | 0.0 |
| Secondary CD8 lymphocyte act | 0.2 |
| CD4 lymphocyte none | 0.0 |
| 2ry Th1/Th2/Tr1_anti-CD95 CH11 | 0.1 |
| LAK cells rest | 0.1 |
| LAK cells IL-2 | 0.0 |
| LAK cells IL-2 + IL-12 | 0.0 |
| LAK cells IL-2 + IFN gamma | 0.0 |
| LAK cells IL-2 + IL-18 | 0.0 |
| LAK cells PMA/ionomycin | 0.1 |
| NK Cells IL-2 rest | 0.0 |
| Two Way MLR 3 day | 0.0 |
| Two Way MLR 5 day | 0.0 |
| Two Way MLR 7 day | 0.0 |
| PBMC rest | 0.0 |
| PBMC PWM | 0.3 |
| PBMC PHA-L | 0.1 |
| Ramos (B cell) none | 0.0 |
| Ramos (B cell) ionomycin | 0.1 |
| B lymphocytes PWM | 2.5 |
| B lymphocytes CD40L and IL-4 | 0.1 |
| EOL-1 dbcAMP | 0.0 |
| EOL-1 dbcAMP PMA/ionomycin | 0.0 |
| Dendritic cells none | 0.0 |
| Dendritic cells LPS | 0.0 |
| Dendritic cells anti-CD40 | 0.0 |
| Monocytes rest | 0.0 |
| Monocytes LPS | 0.0 |
| Macrophages rest | 0.0 |
| Macrophages LPS | 0.0 |
| HUVEC none | 0.0 |
| HUVEC starved | 0.0 |
| HUVEC IL-1 beta | 0.0 |
| HUVEC IFN gamma | 0.0 |
| HUVEC TNF alpha + IFN gamma | 0.1 |
| HUVEC TNF alpha + IL4 | 0.0 |
| HUVEC IL-11 | 0.0 |
| Lung Microvascular EC none | 0.0 |
| Lung Microvascular EC TNFalpha + IL-1beta | 0.0 |
| Microvascular Dermal EC none | 0.1 |
| Microsvasular Dermal EC TNFalpha + IL-1beta | 0.0 |
| Bronchial epithelium TNFalpha + IL1beta | 0.0 |
| Small airway epithelium none | 0.0 |
| Small airway epithelium TNFalpha + IL-1beta | 0.0 |
| Coronery artery SMC rest | 0.0 |
| Coronery artery SMC TNFalpha + IL-1beta | 0.0 |
| Astrocytes rest | 0.0 |
| Astrocytes TNFalpha + IL-1beta | 0.0 |
| KU-812 (Basophil) rest | 0.0 |
| KU-812 (Basophil) PMA/ionomycin | 0.0 |
| CCD1106 (Keratinocytes) none | 0.0 |
| CCD1106 (Keratinocytes) TNFalpha + IL-1beta | 0.0 |
| Liver cirrhosis | 0.6 |
| Lupus kidney | 0.0 |
| NCI-H292 none | 0.1 |
| NCI-H292 IL-4 | 0.0 |
| NCI-H292 IL-9 | 0.0 |
| NCI-H292 IL-13 | 0.0 |
| NCI-H292 IFN gamma | 0.0 |
| HPAEC none | 0.0 |
| HPAEC TNF alpha + IL-1 beta | 0.0 |
| Lung fibroblast none | 0.0 |
| Lung fibroblast TNF alpha + IL-1 beta | 0.0 |
| Lung fibroblast IL-4 | 0.0 |
| Lung fibroblast IL-9 | 0.0 |
| Lung fibroblast IL-13 | 0.0 |
| Lung fibroblast IFN gamma | 0.0 |
| Dermal fibroblast CCD1070 rest | 0.0 |
| Dermal fibroblast CCD1070 TNF alpha | 0.1 |
| Dermal fibroblast CCD1070 IL-1 beta | 0.0 |
| Dermal fibroblast IFN gamma | 0.0 |
| Dermal fibroblast IL-4 | 0.0 |
| IBD Colitis 2 | 0.0 |
| IBD Crohn's | 5.3 |
| Colon | 100.0 |
| Lung | 0.5 |
| Thymus | 0.5 |
| Kidney | 0.0 |

Column A - Rel. Exp. (%) Ag2030, Run 161379401

[1120] AI_comprehensive panel_v1.0 Summary: Ag6640 Highest expression of this gene was detected in rheumatoid arthritis bone (CT=31). This gene was expressed at higher levels in rheumatoid arthritis (RA) tissues and osteoarthritis (OA) bone. In addition, significant expression of this gene was also seen in COPD lung, and psoriasis samples. This gene encodes a homolog of butyrophilin like receptor and is a member of the B7 family. B7 family members are costimulatory molecules, which are necessary for optimal activation of T lymphocytes after T cell receptor (TCR) engagement. The most extensively studied costimulatory molecules are B7-1 (CD80) and B7-2 (CD86). Interaction of CD28 on T cells with either B7-1 or B7-2 augments T cell activation and promotes T cell survival (Chambers, C. A. & Allison, J. P., 1997, Curr. Opin. Immunol. 9, 396-404). In contrast, binding of B7-1 or B7-2 with cytotoxic T lymphocyte antigen 4 (CTLA-4), a homolog of CD28, inhibits the T cell response by delivering a putative negative signal. Therapeutic modulation of this gene, expressed protein and/or use of antibodies or small molecule drug targeting the gene or gene product is effective in the treatment of psoriases, osteoarthritis and rheumatoid arthritis.

[1121] General_screening₁₃ panel_v1.6 Summary: Significant expression of this gene was seen in colon cancer cell lines, a lung cancer and a brain cancer cell lines. Therefore, expression of this gene is useful as a diagnostic marker and therapeutic modulation of this gene, expressed protein, and/or use of antibodies or small molecule drug targeting this gene or gene product is useful in the treatment of colon, lung and brain cancers.

[1122] Low expression of this gene was also seen in metabolic tissues including adipose, pancrease, and fetal skeletal muscle. Therefore, modulation of this gene or gene product is useful in the treatment of metabolic disorders such as diabetes and obesity.

[1123] Low expression of this gene was also seen fetal lung. Expression of this gene was higher in fetal (CTs=32-34) relative to adult lung and skeletal muscle (CTs=40). The relative overexpression of this gene in fetal tissue shows that the protein product enhances lung and skeletal muscle growth or development in the fetus and also acts in a regenerative capacity in the adult. Therapeutic modulation of this gene or the protein encoded by this gene is useful in the treatment of lung and skeletal muscle related diseases.

[1124] PGI1.0 Summary: Ag6640 Highest expression of this gene was detected in normal adjacent colon tissue from a ulcerative colitis patient (CT=26.4). Significant expression of this gene was also detected in normal adjacent and ulcerative colitis tissue samples. Expression of this gene was higher in normal relative to diseased tissue. Modulation of this gene and/or its expressed protein is useful in the treatment of ulcerative colitis.

[1125] In addition, high to moderate expression of this gene was also detected in fibrosis, asthma and emphyzema lung. Therapeutic modulation of this gene, expressed protein is useful in the treatment of fibrosis, asthma and emphysema.

[1126] Panel 1.3D Summary: Ag2030 This gene was most prominently expressed in gastrointestinal tissues. Expression of this gene was highest in colon and small intestine (CT=31) and was also significantly expressed in stomach tissue. Expression of this gene is useful as a marker of gastrointestinal tissue, and specifically of small intestine, stomach or colorectal tissue.

[1127] Panel 4.1D Summary: Ag2030/Ag6640/Ag7598 Expression of this gene was limited to colon and neutrophils (CTs=30-34). Expression of this gene was down-regulated in activated neutrophils. This expression profile demonstrates that the encoded protein reduces activation of these inflammatory cells and is useful as a protein therapeutic to eliminate the symptoms in patients with Crohn's disease, ulcerative colitis, multiple sclerosis, chronic obstructive pulmonary disease, asthma, emphysema, rheumatoid arthritis, lupus erythematosus, or psoriasis. In addition, small molecule or antibodies targeting this gene or gene product are effective in increasing the immune response in patients with AIDS or other immunodeficiencies.

[1128] Panel 4D Summary: Ag2030 The gene expression on this panel was limited essentially to normal colon. These results were consistent with what is observed in Panel 1.3D. This gene was not expressed or was expressed only at low levels in IBD colitis and Crohn's disease. Therefore, this gene is useful as a marker to distinguish normal colon from diseased colon. This gene encodes a protein with homology to the butyrophilin-like receptor. The butyrophilin-like membrane proteins are similar to the B7 family of co-stimulatory factors. B7 proteins are expressed on many cell types and function in the process of antigen presentation to T lymphocytes in the stimulation of the immune response. Recently identified B7 family members have included inhibitory proteins that reduced the activation of T lymphocytes upon cell-cell interaction. This gene or gene product is useful for the modulation of the functions associated with antigen presentation to T cells. Replacement of this gene product by gene therapy or use of the isolated extracellular domain of the gene protein is of use as a therapeutic in the treatment of IBD colitis and Crohn's disease.

[1129] X. CG53908-01: Netrin Receptor Unc5h1

[1130] Expression of full-length physical clone CG53908-01 was assessed using the primer-probe sets Ag1395 and Ag8392, described in Tables XA and XB. Results of the RTQ-PCR runs are shown in Tables XC, XD, XE, XF, XG, XH, XL XJ, and XK.

TABLE XA
Probe Name Ag1395

| | | | | SEQ |
|---|---|---|---|---|
| | | | Start | ID |
| Primers | Sequences | Length | Position | No |
| Forward | 5′-ctgcacttcaaggacagttacc-3′ | 22 | 2184 | 1366 |
| Probe | TET-5′-ctatccatccacgatgtgcccagct-3′- | 25 | 2217 | 1367 |
| | TAMRA | | | |
| Reverse | 5′-tgacaaggagcttactcttcca-3′ | 22 | 2247 | 1368 |

[1131] TABLE XB
Probe Name Ag8392

| | | | | SEQ |
|---|---|---|---|---|
| | | | Start | ID |
| Primers | Sequences | Length | Position | No |
| Forward | 5′-ccctctatgtgggcctcat-3′ | 19 | 1168 | 1369 |
| Probe | TET-5′-tgcttgtcctcatcctcgtttattgc-3′- | 26 | 1216 | 1370 |
| | TAMRA | | | |
| Reverse | 5′-tccagcccctccttcttc-3′ | 18 | 1244 | 1371 |

[1132] TABLE XC
Ardais Breast1.0

| Tissue Name | A | B |
|---|---|---|
| 97739_Breast cancer (CHTN20676) | 0.6 | 0.2 |
| 105689_Breast cancer 2B | 0.0 | 0.1 |
| 111297_Breast cancer metastasis (9369)* | 23.0 | 17.8 |
| 145848_Breast cancer (9B6) | 8.7 | 6.0 |
| 145859_Breast cancer (9EC) | 1.0 | 0.6 |
| 153632_Breast cancer (D39) | 1.0 | 0.2 |
| 153643_Breast cancer (D44) | 6.0 | 2.6 |
| 164672_Breast cancer (7464) | 9.1 | 4.5 |
| 164681_Breast cancer (5787) | 6.8 | 3.3 |
| 97748_Breast cancer (CHTN20931) | 9.3 | 0.1 |
| 105690_Breast NAT 2A | 1.7 | 0.6 |
| 111302_Breast NAT (6314) | 1.8 | 1.2 |
| 145850_Breast cancer (9C7) | 2.8 | 0.8 |
| 149844_Breast cancer (24178) | 3.3 | 2.6 |
| 153633_Breast cancer (D3A) | 72.7 | 34.4 |
| 153644_Breast cancer (D45) | 1.2 | 0.8 |
| 164673_Breast cancer (8452) | 2.9 | 2.6 |
| 164682_Breast cancer (6342)* | 2.1 | 1.5 |
| 97751_Breast cancer (CHTN21053) | 3.5 | 3.2 |
| 105694_Breast NAT | 15.8 | 10.6 |
| 116417_Breast cancer (3367)* | 1.8 | 1.5 |
| 145852_Breast cancer (A1A) | 1.0 | 0.4 |
| 151097_Breast cancer (CHTN24298) | 0.9 | 0.3 |
| 153634_Breast cancer (D3B) | 1.0 | 0.5 |
| 155797_Breast cancer (EA6) | 81.2 | 67.8 |
| 164674_Breast cancer (8811) | 2.8 | 2.4 |
| 164683_Breast cancer (6470) | 100.0 | 100.0 |
| 97763_Breast cancer (OD06083) | 3.7 | 2.4 |
| 108830_Breast cancer metastasis | 1.1 | 0.4 |
| (OD06855)* | | |
| 116418_Breast cancer (3378)* | 2.4 | 1.7 |
| 145853_Breast cancer (9F3) | 1.6 | 0.7 |
| 153432_Breast cancer (CHTN24652) | 15.6 | 6.2 |
| 153635_Breast cancer (D3C) | 0.6 | 0.4 |
| 164667_Breast cancer (5785) | 1.6 | 12.2 |
| 164676_Breast cancer (5070) | 1.5 | 0.6 |
| 164684_Breast cancer (6509) | 8.8 | 3.5 |
| 97764_Breast cancer node | 4.4 | 4.8 |
| metastasis (OD06083) | | |
| 108847_Breast cancer | 2.8 | 1.2 |
| 116421_Breast cancer (6314) | 0.1 | 0.0 |
| 145854_Breast cancer (9B8) | 1.2 | 0.4 |
| 153627_Breast cancer (D34) | 5.8 | 3.6 |
| 153636_Breast cancer (D3D) | 7.8 | 4.9 |
| 164668_Breast cancer (6314) | 0.5 | 0.2 |
| 164677_Breast cancer (5272) | 21.6 | 17.3 |
| 164685_Breast cancer (0170) | 80.1 | 50.7 |
| 98857_Breast cancer (OD06397-12) | 2.3 | 1.2 |
| 111288_Breast NAT (3367) | 14.6 | 6.2 |
| 116424_Breast cancer 4B* | 0.2 | 0.2 |
| 153628_Breast cancer (D35) | 18.9 | 11.7 |
| 153637_Breast cancer (D3E) | 1.3 | 0.9 |
| 164669_Breast cancer (6992) | 16.0 | 9.6 |
| 164678_Breast cancer (5297) | 50.0 | 42.6 |
| 164686_Breast cancer (0732) | 0.8 | 0.5 |
| 105687_Breast cancer 1B | 0.1 | 0.1 |
| 111289_Breast cancer 3B* | 8.2 | 5.7 |
| 116425_Breast NAT 4A | 0.3 | 0.3 |
| 145857_Breast cancer (9F0) | 8.8 | 8.0 |
| 153630_Breast cancer (D37) | 2.0 | 2.0 |
| 153638_Breast cancer (D3F) | 11.0 | 10.0 |
| 164670_Breast cancer (7078) | 1.7 | 2.7 |
| 164679_Breast cancer (5486) | 15.8 | 13.9 |
| 164687_Breast cancer (5881) | 11.2 | 4.0 |
| 105688_Breast NAT 1A | 0.2 | 0.1 |
| 111290_Breast NAT 3A* | 4.2 | 6.8 |
| 145846_Breast cancer (9B7) | 7.1 | 9.6 |
| 145858_Breast cancer (9B4) | 0.9 | 1.4 |
| 153631_Breast cancer (D38) | 0.3 | 0.2 |
| 153639_Breast cancer (D40) | 66.0 | 29.3 |
| 164671_Breast cancer (7082) | 62.4 | 50.0 |
| 164680_Breast cancer (5705) | 1.7 | 1.3 |
| 164688_Breast cancer (7222) | 1.5 | 0.5 |

Column A - Rel. Exp. (%) Ag1395, Run 399018961
Column B - Rel. Exp. (%) Ag8392, Run 398657263

[1133] TABLE XD
Ardais Panel 1.1

| Tissue Name | A | B |
|---|---|---|
| Lung adenocarcinoma SI A | 15.6 | 8.7 |
| Lung adenocarcinoma SI B | 22.2 | 75.3 |
| Lung adenocarcinoma SI B NAT | 100.0 | 70.7 |
| Lung adenocarcinoma SI C | 1.6 | 3.4 |
| Lung adenocarcinoma SI C NAT | 98.6 | 100.0 |
| Lung adenocarcinoma SII A | 11.7 | 14.5 |
| Lung adenocarcinoma SII A NAT | 58.6 | 76.3 |
| Lung adenocarcinoma SII C NAT | 62.4 | 55.5 |
| Lung adenocarcinoma SIII A | 41.5 | 42.9 |
| Lung adenocarcinoma SIII B | 32.1 | 33.7 |
| Lung adenocarcinoma SIII C | 16.8 | 25.2 |
| Lung SCC SI A | 27.9 | 74.7 |
| Lung SCC SI B NAT | 77.4 | 33.4 |
| Lung SCC SI C | 23.3 | 31.0 |
| Lung SCC SI C NAT | 71.2 | 82.9 |
| Lung SCC SI D | 40.6 | 62.4 |
| Lung SCC SI D NAT | 32.5 | 59.9 |
| Lung SCC SII A | 15.4 | 60.3 |
| Lung SCC SII B | 7.0 | 11.7 |
| Lung SCC SIII A | 11.5 | 11.5 |
| Lung SCC SIII A NAT | 29.1 | 13.4 |

Column A - Rel. Exp. (%) Ag1395, Run 332737494
Column B - Rel. Exp. (%) Ag8392, Run 369781003

[1134] TABLE XE
Ardais Prostate 1.0

| Tissue Name | A | B |
|---|---|---|
| 145904_Prostate cancer(9E2) | 100.0 | 100.0 |
| 149776_Prostate cancer(ADS) | 17.4 | 20.0 |
| 151135_Prostate NAT(B87) | 0.4 | 0.2 |
| 151143_Prostate NAT(B8A) | 0.3 | 0.2 |
| 153653_Prostate cancer(D4E) | 0.7 | 0.7 |
| 153661_Prostate cancer(D56) | 1.2 | 0.7 |
| 153669_Prostate NAT(D5E) | 1.2 | 0.6 |
| 153677_Prostate NAT(D66) | 0.2 | 0.1 |
| 153685_Prostate NAT(D6E) | 0.2 | 0.1 |
| 145905_Prostate NAT(A0C) | 1.0 | 0.7 |
| 151128_Prostate cancer(B8C) | 0.6 | 0.9 |
| 151136_Prostate cancer(B8B) | 3.3 | 2.1 |
| 151144_Prostate cancer(B8F) | 0.4 | 0.2 |
| 153654_Prostate cancer(D4F) | 4.5 | 3.8 |
| 153662_Prostate cancer(D57) | 0.2 | 0.0 |
| 153670_Prostate NAT(D5F) | 1.1 | 0.6 |
| 153678_Prostate NAT(D67) | 0.3 | 0.1 |
| 153686_Prostate NAT(D6F) | 0.2 | 0.2 |
| 145906_Prostate NAT(A09) | 0.4 | 0.3 |
| 151129_Prostate NAT(B93) | 0.7 | 0.6 |
| 151137_Prostate NAT(B86) | 0.3 | 0.4 |
| 151145_Prostate NAT(B91) | 0.4 | 0.3 |
| 153655_Prostate cancer(D50) | 0.7 | 0.4 |
| 153663_Prostate cancer(D58) | 0.1 | 0.0 |
| 153671_Prostate NAT(D60) | 0.2 | 0.6 |
| 153679_Prostate NAT(D68) | 0.2 | 0.2 |
| 153687_Prostate NAT(D70) | 0.4 | 0.3 |
| 145907_Prostate cancer(A0A) | 0.4 | 0.3 |
| 151130_Prostate cancer(B90) | 1.4 | 1.1 |
| 151138_Prostate cancer(B8D) | 11.6 | 11.3 |
| 153648_Prostate cancer(D49) | 2.1 | 1.8 |
| 153656_Prostate cancer(D51) | 0.4 | 0.1 |
| 153664_Prostate cancer(D59) | 1.2 | 0.9 |
| 153672_Prostate NAT(D61) | 0.3 | 0.7 |
| 153680_Prostate NAT(D69) | 0.3 | 0.3 |
| 155799_Prostate cancer(EA8) | 2.6 | 3.8 |
| 145909_Prostate cancer(9E7) | 3.1 | 4.4 |
| 151131_Prostate NAT(B85) | 1.2 | 0.6 |
| 151139_Prostate NAT(B8E) | 0.4 | 0.3 |
| 153649_Prostate cancer(D4A) | 0.7 | 0.4 |
| 153657_Prostate cancer(D52) | 0.6 | 0.2 |
| 153665_Prostate cancer(D5A) | 34.6 | 25.7 |
| 153673_Prostate NAT(D62) | 0.6 | 0.3 |
| 153681_Prostate NAT(D6A) | 0.2 | 0.1 |
| 145910_Prostate NAT(9C3) | 1.0 | 0.4 |
| 151132_Prostate cancer(B88) | 12.9 | 7.4 |
| 151140_Prostate cancer(B95) | 0.8 | 0.4 |
| 153650_Prostate cancer(D4B) | 3.7 | 3.1 |
| 153658_Prostate cancer(D53) | 1.2 | 0.4 |
| 153666_Prostate cancer(D5B) | 15.7 | 14.3 |
| 153674_Prostate NAT(D63) | 1.1 | 0.3 |
| 153682_Prostate NAT(D6B) | 0.9 | 0.6 |
| 149773_Prostate NAT(AD8) | 0.0 | 0.0 |
| 151133_Prostate NAT(B94) | 0.5 | 0.4 |
| 151141_Prostate NAT(B96) | 1.1 | 0.8 |
| 153651_Prostate cancer(D4C) | 11.1 | 9.7 |
| 153659_Prostate cancer(D54) | 3.5 | 3.0 |
| 153667_Prostate cancer(D5C) | 0.6 | 0.3 |
| 153675_Prostate NAT(D64) | 1.2 | 0.4 |
| 153683_Prostate NAT(D6C) | 0.8 | 0.3 |
| 149774_Prostate cancer(AD7) | 0.9 | 1.1 |
| 151134_Prostate cancer(B92) | 0.4 | 0.2 |
| 151142_Prostate cancer(B89) | 40.9 | 40.9 |
| 153652_Prostate cancer(D4D) | 0.6 | 0.3 |
| 153660_Prostate cancer(D55) | 12.8 | 11.5 |
| 153668_Prostate NAT(D5D) | 0.4 | 0.3 |
| 153676_Prostate NAT(D65) | 0.7 | 0.4 |
| 153684_Prostate NAT(D6D) | 0.3 | 0.2 |

Column A - Rel. Exp. (%) Ag1395, Run 379587273
Column B - Rel. Exp. (%) Ag8392, Run 369780997

[1135] TABLE XF
General_screening_panel_v1.6

| Tissue Name | A |
|---|---|
| Adipose | 0.5 |
| Melanoma* Hs688(A).T | 0.0 |
| Melanoma* Hs688(B).T | 0.0 |
| Melanoma* M14 | 0.0 |
| Melanoma* LOXIMVI | 0.3 |
| Melanoma* SK-MEL-5 | 0.4 |
| Squamous cell carcinoma SCC-4 | 1.5 |
| Testis Pool | 1.3 |
| Prostate ca.* (bone met) PC-3 | 0.0 |
| Prostate Pool | 0.2 |
| Placenta | 0.1 |
| Uterus Pool | 0.2 |
| Ovarian ca. OVCAR-3 | 0.1 |
| Ovarian ca. SK-OV-3 | 1.3 |
| Ovarian ca. OVCAR-4 | 1.0 |
| Ovarian ca. OVCAR-5 | 39.8 |
| Ovarian ca. IGROV-1 | 21.0 |
| Ovarian ca. OVCAR-8 | 3.4 |
| Ovary | 0.5 |
| Breast ca. MCF-7 | 1.6 |
| Breast ca. MDA-MB-231 | 0.1 |
| Breast ca. BT 549 | 0.1 |
| Breast ca. T47D | 0.4 |
| Breast ca. MDA-N | 0.0 |
| Breast Pool | 0.6 |
| Trachea | 0.8 |
| Lung | 0.0 |
| Fetal Lung | 0.8 |
| Lung ca. NCI-N417 | 7.9 |
| Lung ca. LX-1 | 0.0 |
| Lung ca. NCI-H146 | 1.3 |
| Lung ca. SHP-77 | 6.2 |
| Lung ca. A549 | 0.2 |
| Lung ca. NCI-H526 | 3.0 |
| Lung ca. NCI-H23 | 1.6 |
| Lung ca. NCI-H460 | 0.5 |
| Lung ca. HOP-62 | 0.0 |
| Lung ca. NCI-H522 | 17.9 |
| Liver | 0.0 |
| Fetal Liver | 0.3 |
| Liver ca. HepG2 | 0.0 |
| Kidney Pool | 0.4 |
| Fetal Kidney | 0.2 |
| Renal ca. 786-0 | 1.4 |
| Renal ca. A498 | 21.6 |
| Renal ca. ACHN | 6.2 |
| Renal ca. UO-31 | 0.6 |
| Renal ca. TK-10 | 10.9 |
| Bladder | 1.2 |
| Gastric ca. (liver met.) NCI-N87 | 0.0 |
| Gastric ca. KATO III | 0.0 |
| Colon ca. SW-948 | 0.0 |
| Colon ca. SW480 | 6.6 |
| Colon ca.* (SW480 met) SW620 | 0.8 |
| Colon ca. HT29 | 0.3 |
| Colon ca. HCT-116 | 15.5 |
| Colon ca. CaCo-2 | 0.6 |
| Colon cancer tissue | 0.6 |
| Colon ca. SW1116 | 4.0 |
| Colon ca. Colo-205 | 0.1 |
| Colon ca. SW-48 | 0.0 |
| Colon Pool | 0.8 |
| Small Intestine Pool | 0.4 |
| Stomach Pool | 0.5 |
| Bone Marrow Pool | 0.2 |
| Fetal Heart | 0.2 |
| Heart Pool | 0.1 |
| Lymph Node Pool | 0.8 |
| Fetal Skeletal Muscle | 0.8 |
| Skeletal Muscle Pool | 0.1 |
| Spleen Pool | 1.0 |
| Thymus Pool | 1.5 |
| CNS cancer (glio/astro) U87-MG | 0.0 |
| CNS cancer (glio/astro) U-118-MG | 0.1 |
| CNS cancer (neuro; met) SK-N-AS | 2.5 |
| CNS cancer (astro) SF-539 | 0.0 |
| CNS cancer (astro) SNB-75 | 0.9 |
| CNS cancer (glio) SNB-19 | 19.5 |
| CNS cancer (glio) SF-295 | 0.7 |
| Brain (Amygdala) Pool | 38.4 |
| Brain (cerebellum) | 100.0 |
| Brain (fetal) | 62.4 |
| Brain (Hippocampus) Pool | 36.9 |
| Cerebral Cortex Pool | 72.2 |
| Brain (Substantia nigra) Pool | 48.0 |
| Brain (Thalamus) Pool | 46.7 |
| Brain (whole) | 72.2 |
| Spinal Cord Pool | 3.2 |
| Adrenal Gland | 11.3 |
| Pituitary gland Pool | 2.8 |
| Salivary Gland | 0.5 |
| Thyroid (female) | 0.1 |
| Pancreatic ca. CAPAN2 | 1.0 |
| Pancreas Pool | 0.3 |

Column A - Rel. Exp. (%) Ag1395, Run 277226632

[1136] TABLE XG
HASS Panel v1.0

| Tissue Name | A |
|---|---|
| MCF-7 C1 | 7.5 |
| MCF-7 C2 | 7.1 |
| MCF-7 C3 | 4.0 |
| MCF-7 C4 | 12.5 |
| MCF-7 C5 | 9.1 |
| MCF-7 C6 | 12.5 |
| MCF-7 C7 | 5.2 |
| MCF-7 C9 | 5.0 |
| MCF-7 C10 | 8.2 |
| MCF-7 C11 | 1.2 |
| MCF-7 C12 | 5.1 |
| MCF-7 C13 | 2.1 |
| MCF-7 C15 | 3.6 |
| MCF-7 C16 | 13.9 |
| MCF-7 C17 | 8.9 |
| T24 D1 | 0.1 |
| T24 D2 | 0.1 |
| T24 D3 | 0.1 |
| T24 D4 | 0.4 |
| T24 D5 | 0.2 |
| T24 D6 | 0.1 |
| T24 D7 | 0.2 |
| T24 D9 | 0.1 |
| T24 D10 | 0.0 |
| T24 D11 | 0.1 |
| T24 D12 | 0.0 |
| T24 D13 | 0.2 |
| T24 D15 | 0.1 |
| T24 D16 | 0.0 |
| T24 D17 | 0.1 |
| CAPaN B1 | 13.0 |
| CAPaN B2 | 11.6 |
| CAPaN B3 | 5.0 |
| CAPaN B4 | 12.7 |
| CAPaN B5 | 18.4 |
| CAPaN B6 | 11.2 |
| CAPaN B7 | 3.8 |
| CAPaN B8 | 3.7 |
| CAPaN B9 | 7.5 |
| CAPaN B10 | 20.0 |
| CAPaN B11 | 26.8 |
| CAPaN B12 | 14.6 |
| CAPaN B13 | 5.1 |
| CAPaN B14 | 5.9 |
| CAPaN B15 | 8.0 |
| CAPaN B16 | 13.8 |
| CAPaN B17 | 13.7 |
| U87-MG F1 (B) | 0.0 |
| U87-MG F2 | 0.0 |
| U87-MG F3 | 0.1 |
| U87-MG F4 | 0.0 |
| U87-MG F5 | 0.0 |
| U87-MG F6 | 0.1 |
| U87-MG F7 | 0.0 |
| U87-MG F8 | 0.1 |
| U87-MG F9 | 0.1 |
| U87-MG F10 | 0.0 |
| U87-MG F11 | 0.0 |
| U87-MG F12 | 0.0 |
| U87-MG F13 | 0.0 |
| U87-MG F14 | 0.0 |
| U87-MG F15 | 0.0 |
| U87-MG F16 | 0.0 |
| U87-MG F17 | 0.1 |
| LnCAP A1 | 0.9 |
| LnCAP A2 | 0.5 |
| LnCAP A3 | 0.9 |
| LnCAP A4 | 1.0 |
| LnCAP A5 | 1.2 |
| LnCAP A6 | 0.4 |
| LnCAP A7 | 0.7 |
| LnCAP A8 | 1.2 |
| LnCAP A9 | 1.1 |
| LnCAP A10 | 1.0 |
| LnCAP A11 | 1.6 |
| LnCAP A12 | 0.0 |
| LnCAP A13 | 0.4 |
| LnCAP A14 | 1.2 |
| LnCAP A15 | 0.3 |
| LnCAP A16 | 1.1 |
| LnCAP A17 | 1.3 |
| Primary Astrocytes | 0.2 |
| Primary Renal Proximal Tubule Epithelial cell A2 | 1.5 |
| Primary melanocytes A5 | 0.0 |
| 126443 - 341 medullo | 0.0 |
| 126444 - 487 medullo | 0.5 |
| 126445 - 425 medullo | 0.0 |
| 126446 - 690 medullo | 100.0 |
| 126447 - 54 adult glioma | 0.8 |
| 126448 - 245 adult glioma | 0.1 |
| 126449 - 317 adult glioma | 0.1 |
| 126450 - 212 glioma | 0.0 |
| 126451 - 456 glioma | 0.1 |

Column A - Rel. Exp. (%) Ag1395, Run 268623664

[1137] TABLE XG
Panel 2D

| Tissue Name | A | B |
|---|---|---|
| Normal Colon | 4.2 | 1.9 |
| CC Well to Mod Diff (ODO3866) | 0.7 | 1.8 |
| CC Margin (ODO3866) | 0.0 | 1.0 |
| CC Gr.2 rectosigmoid (ODO3868) | 0.0 | 1.1 |
| CC Margin (ODO3868) | 0.0 | 0.0 |
| CC Mod Diff (ODO3920) | 0.0 | 1.2 |
| CC Margin (ODO3920) | 0.0 | 0.8 |
| CC Gr.2 ascend colon (ODO3921) | 0.9 | 2.3 |
| CC Margin (ODO3921) | 0.0 | 0.4 |
| CC from Partial Hepatectomy | 0.7 | 0.2 |
| (ODO4309) Mets | | |
| Liver Margin (ODO4309) | 0.0 | 0.9 |
| Colon mets to lung (OD04451-01) | 0.0 | 2.3 |
| Lung Margin (OD04451-02) | 0.8 | 0.0 |
| Normal Prostate 6546-1 | 9.0 | 8.2 |
| Prostate Cancer (OD04410) | 0.0 | 3.5 |
| Prostate Margin (OD04410) | 2.0 | 1.7 |
| Prostate Cancer (OD04720-01) | 0.8 | 1.7 |
| Prostate Margin (OD04720-02) | 0.0 | 1.5 |
| Normal Lung 061010 | 3.1 | 10.9 |
| Lung Met to Muscle (ODO4286) | 4.4 | 4.1 |
| Muscle Margin (ODO4286) | 0.0 | 0.5 |
| Lung Malignant Cancer (OD03126) | 2.2 | 2.5 |
| Lung Margin (OD03126) | 3.2 | 4.6 |
| Lung Cancer (OD04404) | 2.4 | 1.1 |
| Lung Margin (OD04404) | 3.3 | 4.2 |
| Lung Cancer (OD04565) | 0.0 | 1.6 |
| Lung Margin (OD04565) | 1.7 | 1.7 |
| Lung Cancer (OD04237-01) | 0.8 | 4.5 |
| Lung Margin (OD04237-02) | 3.8 | 7.1 |
| Ocular Mel Met to Liver (ODO4310) | 0.0 | 0.0 |
| Liver Margin (ODO4310) | 6.2 | 2.1 |
| Melanoma Mets to Lung (OD04321) | 0.8 | 0.0 |
| Lung Margin (OD04321) | 3.8 | 5.3 |
| Normal Kidney | 0.8 | 1.6 |
| Kidney Ca, Nuclear grade 2 (OD04338) | 1.2 | 2.8 |
| Kidney Margin (OD04338) | 0.0 | 1.8 |
| Kidney Ca Nuclear grade 1/2 | 5.9 | 5.4 |
| (OD04339) | | |
| Kidney Margin (OD04339) | 0.0 | 0.0 |
| Kidney Ca, Clear cell type (OD04340) | 1.3 | 7.4 |
| Kidney Margin (OD04340) | 0.0 | 0.3 |
| Kidney Ca, Nuclear grade 3 (OD04348) | 0.0 | 2.1 |
| Kidney Margin (OD04348) | 0.8 | 0.8 |
| Kidney Cancer (OD04622-01) | 2.2 | 4.0 |
| Kidney Margin (OD04622-03) | 0.7 | 0.4 |
| Kidney Cancer (OD04450-01) | 0.0 | 0.4 |
| Kidney Margin (OD04450-03) | 0.0 | 0.0 |
| Kidney Cancer 8120607 | 27.9 | 60.3 |
| Kidney Margin 8120608 | 0.8 | 2.1 |
| Kidney Cancer 8120613 | 0.8 | 1.7 |
| Kidney Margin 8120614 | 0.7 | 0.7 |
| Kidney Cancer 9010320 | 4.7 | 6.3 |
| Kidney Margin 9010321 | 0.0 | 2.7 |
| Normal Uterus | 0.0 | 2.2 |
| Uterus Cancer 064011 | 0.0 | 8.9 |
| Normal Thyroid | 8.7 | 1.2 |
| Thyroid Cancer 064010 | 0.0 | 0.0 |
| Thyroid Cancer A302152 | 0.0 | 2.5 |
| Thyroid Margin A302153 | 1.1 | 0.8 |
| Normal Breast | 2.8 | 4.1 |
| Breast Cancer (OD04566) | 0.0 | 1.8 |
| Breast Cancer (OD04590-01) | 28.3 | 27.4 |
| Breast Cancer Mets (OD04590-03) | 13.3 | 14.2 |
| Breast Cancer Metastasis (OD04655-05) | 37.9 | 100.0 |
| Breast Cancer 064006 | 12.0 | 19.2 |
| Breast Cancer 1024 | 33.9 | 25.2 |
| Breast Cancer 9100266 | 6.7 | 7.6 |
| Breast Margin 9100265 | 0.5 | 9.2 |
| Breast Cancer A209073 | 3.7 | 6.8 |
| Breast Margin A209073 | 0.7 | 0.0 |
| Normal Liver | 0.0 | 2.6 |
| Liver Cancer 064003 | 0.0 | 1.3 |
| Liver Cancer 1025 | 0.4 | 2.0 |
| Liver Cancer 1026 | 0.0 | 1.6 |
| Liver Cancer 6004-T | 1.6 | 3.3 |
| Liver Tissue 6004-N | 1.4 | 0.7 |
| Liver Cancer 6005-T | 0.8 | 0.8 |
| Liver Tissue 6005-N | 0.0 | 0.0 |
| Normal Bladder | 3.5 | 3.8 |
| Bladder Cancer 1023 | 0.8 | 0.5 |
| Bladder Cancer A302173 | 3.2 | 1.1 |
| Bladder Cancer (OD04718-01) | 3.8 | 2.3 |
| Bladder Normal Adjacent (OD04718-03) | 5.2 | 7.4 |
| Normal Ovary | 3.0 | 2.9 |
| Ovarian Cancer 064008 | 3.2 | 2.9 |
| Ovarian Cancer (OD04768-07) | 3.5 | 4.6 |
| Ovary Margin (OD04768-08) | 0.9 | 2.2 |
| Normal Stomach | 2.7 | 3.7 |
| Gastric Cancer 9060358 | 0.4 | 0.2 |
| Stomach Margin 9060359 | 4.3 | 1.3 |
| Gastric Cancer 9060395 | 3.0 | 1.2 |
| Stomach Margin 9060394 | 2.5 | 1.0 |
| Gastric Cancer 9060397 | 100.0 | 48.0 |
| Stomach Margin 9060396 | 1.0 | 2.2 |
| Gastric Cancer 064005 | 4.9 | 6.7 |

Column A - Rel. Exp. (%) Ag1395, Run 145711201
Column B - Rel. Exp. (%) Ag1395, Run 162599933

[1138] TABLE XI
Panel 3D

| Tissue Name | A |
|---|---|
| Daoy- Medulloblastoma | 0.0 |
| TE671- Medulloblastoma | 0.6 |
| D283 Med- Medulloblastoma | 0.5 |
| PFSK-1- Primitive Neuroectodermal | 0.0 |
| XF-498- CNS | 0.6 |
| SNB-78- Glioma | 0.0 |
| SF-268- Glioblastoma | 0.0 |
| T98G- Glioblastoma | 6.5 |
| SK-N-SH- Neuroblastoma (metastasis) | 10.3 |
| SF-295- Glioblastoma | 0.8 |
| Cerebellum | 46.0 |
| Cerebellum | 41.5 |
| NCI-H292- Mucoepidermoid lung carcinoma | 0.4 |
| DMS-114- Small cell lung cancer | 9.0 |
| DMS-79- Small cell lung cancer | 100.0 |
| NCI-H146- Small cell lung cancer | 4.2 |
| NCI-H526- Small cell lung cancer | 16.5 |
| NCI-N417- Small cell lung cancer | 22.8 |
| NCI-H82- Small cell lung cancer | 9.5 |
| NCI-H157- Squamous cell lung cancer (metastasis) | 0.0 |
| NCI-H1155- Large cell lung cancer | 27.7 |
| NCI-H1299- Large cell lung cancer | 0.0 |
| NCI-H727- Lung carcinoid | 14.5 |
| NCI-UMC-11- Lung carcinoid | 22.1 |
| LX-1- Small cell lung cancer | 0.2 |
| Colo-205- Colon cancer | 0.2 |
| KM12- Colon cancer | 0.0 |
| KM20L2- Colon cancer | 0.2 |
| NCI-H716- Colon cancer | 0.4 |
| SW-48- Colon adenocarcinoma | 0.0 |
| SW1116- Colon adenocarcinoma | 7.2 |
| LS 174T- Colon adenocarcinoma | 0.9 |
| SW-948- Colon adenocarcinoma | 0.0 |
| SW-480- Colon adenocarcinoma | 0.0 |
| NCI-SNU-5- Gastric carcinoma | 3.5 |
| KATO III- Gastric carcinoma | 0.3 |
| NCI-SNU-16- Gastric carcinoma | 2.1 |
| NCI-SNU-1- Gastric carcinoma | 0.0 |
| RF-1- Gastric adenocarcinoma | 0.0 |
| RF-48- Gastric adenocarcinoma | 0.0 |
| MKN-45- Gastric carcinoma | 2.9 |
| NCI-N87- Gastric carcinoma | 0.0 |
| OVCAR-5- Ovarian carcinoma | 11.2 |
| RL95-2- Uterine carcinoma | 0.0 |
| HelaS3- Cervical adenocarcinoma | 0.0 |
| Ca Ski- Cervical epidermoid carcinoma | 0.0 |
| (metastasis) | |
| ES-2- Ovarian clear cell carcinoma | 0.2 |
| Ramos- Stimulated with PMA/ionomycin 6 h | 0.0 |
| Ramos- Stimulated with PMA/ionomycin 14 h | 0.0 |
| MEG-01- Chronic myelogenous leukemia | 0.0 |
| (megokaryoblast) | |
| Raji- Burkitt's lymphoma | 0.0 |
| Daudi- Burkitt's lymphoma | 0.0 |
| U266- B-cell plasmacytoma | 0.0 |
| CA46- Burkitt's lymphoma | 0.0 |
| RL- non-Hodgkin's B-cell lymphoma | 0.0 |
| JM1- pre-B-cell lymphoma | 0.0 |
| Jurkat- T cell leukemia | 0.0 |
| TF-1- Erythroleukemia | 0.0 |
| HUT 78- T-cell lymphoma | 0.0 |
| U937- Histiocytic lymphoma | 5.3 |
| KU-812- Myelogenous leukemia | 0.0 |
| 769-P- Clear cell renal carcinoma | 6.3 |
| Caki-2- Clear cell renal carcinoma | 15.8 |
| SW 839- Clear cell renal carcinoma | 5.9 |
| Rhabdoid kidney tumor | 1.2 |
| Hs766T- Pancreatic carcinoma (LN | 0.0 |
| metastasis) | |
| CAPAN-1- Pancreatic adenocarcinoma (liver | 27.7 |
| metastasis) | |
| SU86.86- Pancreatic carcinoma (liver | 11.0 |
| metastasis) | |
| BxPC-3- Pancreatic adenocarcinoma | 0.0 |
| HPAC- Pancreatic adenocarcinoma | 0.0 |
| MIA PaCa-2- Pancreatic carcinoma | 0.0 |
| CFPAC-1- Pancreatic ductal adenocarcinoma | 2.8 |
| PANC-1- Pancreatic epithelioid ductal | 0.2 |
| carcinoma | |
| T24- Bladder carcinma (transitional cell) | 0.0 |
| 5637- Bladder carcinoma | 0.2 |
| HT-1197- Bladder carcinoma | 0.0 |
| UM-UC-3- Bladder carcinma (transitional cell) | 0.3 |
| A204- Rhabdomyosarcoma | 1.0 |
| HT-1080- Fibrosarcoma | 0.0 |
| MG-63- Osteosarcoma | 0.2 |
| SK-LMS-1- Leiomyosarcoma (vulva) | 0.0 |
| SJRH30- Rhabdomyosarcoma (met to bone | 0.1 |
| marrow) | |
| A431- Epidermoid carcinoma | 0.0 |
| WM266-4- Melanoma | 0.0 |
| DU 145- Prostate carcinoma (brain | 0.0 |
| metastasis) | |
| MDA-MB-468- Breast adenocarcinoma | 9.2 |
| SCC-4- Squamous cell carcinoma of tongue | 0.0 |
| SCC-9- Squamous cell carcinoma of tongue | 0.0 |
| SCC-15- Squamous cell carcinoma of tongue | 0.0 |
| CAL 27- Squamous cell carcinoma of tongue | 4.0 |

Column A - Rel. Exp. (%) Ag1395, Run 163477780

[1139] TABLE XJ
Panel 4D

| Tissue Name | A | B |
|---|---|---|
| Secondary Th1 act | 0.0 | 1.5 |
| Secondary Th2 act | 0.0 | 0.0 |
| Secondary Tr1 act | 0.0 | 0.0 |
| Secondary Th1 rest | 0.0 | 0.0 |
| Secondary Th2 rest | 0.0 | 0.0 |
| Secondary Tr1 rest | 0.0 | 0.0 |
| Primary Th1 act | 0.0 | 0.0 |
| Primary Th2 act | 0.0 | 0.0 |
| Primary Tr1 act | 1.6 | 0.0 |
| Primary Th1 rest | 1.7 | 0.0 |
| Primary Th2 rest | 0.0 | 0.0 |
| Primary Tr1 rest | 1.3 | 0.0 |
| CD45RA CD4 lymphocyte act | 0.0 | 0.7 |
| CD45RO CD4 lymphocyte act | 1.2 | 0.0 |
| CD8 lymphocyte act | 0.0 | 0.0 |
| Secondary CD8 lymphocyte rest | 1.2 | 0.0 |
| Secondary CD8 lymphocyte act | 0.0 | 0.0 |
| CD4 lymphocyte none | 0.0 | 0.0 |
| 2ry Th1/Th2/Tr1_anti-CD95 CH11 | 1.6 | 0.0 |
| LAK cells rest | 41.8 | 49.7 |
| LAK cells IL-2 | 0.0 | 0.0 |
| LAK cells IL-2 + IL-12 | 0.0 | 0.0 |
| LAK cells IL-2 + IFN gamma | 4.2 | 2.9 |
| LAK cells IL-2 + IL-18 | 2.7 | 1.5 |
| LAK cells PMA/ionomycin | 63.3 | 100.0 |
| NK Cells IL-2 rest | 0.0 | 0.0 |
| Two Way MLR 3 day | 21.8 | 16.7 |
| Two Way MLR 5 day | 4.6 | 2.2 |
| Two Way MLR 7 day | 5.0 | 2.5 |
| PBMC rest | 3.6 | 9.5 |
| PBMC PWM | 0.0 | 97.9 |
| PBMC PHA-L | 2.9 | 2.7 |
| Ramos (B cell) none | 0.0 | 0.0 |
| Ramos (B cell) ionomycin | 0.0 | 0.0 |
| B lymphocytes PWM | 13.8 | 0.0 |
| B lymphocytes CD40L and IL-4 | 0.0 | 0.0 |
| EOL-1 dbcAMP | 0.0 | 4.4 |
| EOL-1 dbcAMP PMA/ionomycin | 0.0 | 1.3 |
| Dendritic cells none | 31.9 | 34.4 |
| Dendritic cells LPS | 36.3 | 23.3 |
| Dendritic cells anti-CD40 | 39.8 | 40.3 |
| Monocytes rest | 55.9 | 58.6 |
| Monocytes LPS | 13.3 | 11.3 |
| Macrophages rest | 93.3 | 96.6 |
| Macrophages LPS | 38.7 | 28.3 |
| HUVEC none | 0.0 | 4.0 |
| HUVEC starved | 2.6 | 0.0 |
| HUVEC IL-1beta | 0.0 | 1.4 |
| HUVEC IFN gamma | 1.5 | 6.3 |
| HUVEC TNF alpha + IFN gamma | 0.0 | 0.0 |
| HUVEC TNF alpha + IL4 | 0.0 | 0.0 |
| HUVEC IL-11 | 1.4 | 0.0 |
| Lung Microvascular EC none | 0.0 | 1.4 |
| Lung Microvascular EC TNFalpha + IL-1beta | 0.0 | 0.7 |
| Microvascular Dermal EC none | 11.0 | 5.5 |
| Microsvasular Dermal EC TNFalpha + IL-1beta | 7.6 | 17.4 |
| Bronchial epithelium TNFalpha + IL1beta | 0.0 | 0.0 |
| Small airway epithelium none | 0.0 | 0.0 |
| Small airway epithelium TNFalpha + IL-1beta | 1.1 | 1.9 |
| Coronery artery SMC rest | 0.0 | 0.0 |
| Coronery artery SMC TNFalpha + IL-1beta | 0.0 | 0.0 |
| Astrocytes rest | 1.5 | 0.0 |
| Astrocytes TNFalpha + IL-1beta | 0.0 | 1.2 |
| KU-812 (Basophil) rest | 0.0 | 0.0 |
| KU-812 (Basophil) PMA/ionomycin | 0.0 | 2.6 |
| CCD1106 (Keratinocytes) none | 0.0 | 1.1 |
| CCD1106 (Keratinocytes) TNFalpha + IL-1beta | 12.5 | 12.3 |
| Liver cirrhosis | 23.8 | 21.0 |
| Lupus kidney | 3.0 | 2.0 |
| NCI-H292 none | 1.1 | 5.8 |
| NCI-H292 IL-4 | 2.1 | 6.4 |
| NCI-H292 IL-9 | 3.8 | 0.0 |
| NCI-H292 IL-13 | 0.0 | 4.2 |
| NCI-H292 IFN gamma | 7.1 | 7.1 |
| HPAEC none | 10.4 | 13.4 |
| HPAEC TNF alpha + IL-1 beta | 0.0 | 0.0 |
| Lung fibroblast none | 0.0 | 0.0 |
| Lung fibroblast TNF alpha + IL-1 beta | 0.0 | 0.0 |
| Lung fibroblast IL-4 | 0.0 | 0.0 |
| Lung fibroblast IL-9 | 0.0 | 5.5 |
| Lung fibroblast IL-13 | 1.3 | 0.0 |
| Lung fibroblast IFN gamma | 0.0 | 0.0 |
| Dermal fibroblast CCD1070 rest | 0.0 | 0.0 |
| Dermal fibroblast CCD1070 TNF alpha | 0.0 | 0.0 |
| Dermal fibroblast CCD1070 IL-1 beta | 0.0 | 5.6 |
| Dermal fibroblast IFN gamma | 0.0 | 0.0 |
| Dermal fibroblast IL-4 | 0.0 | 0.0 |
| IBD Colitis 2 | 0.0 | 1.5 |
| IBD Crohn's | 1.4 | 0.0 |
| Colon | 21.3 | 19.2 |
| Lung | 100.0 | 95.3 |
| Thymus | 6.9 | 1.2 |
| Kidney | 8.8 | 3.8 |

Column A - Rel. Exp. (%) Ag1395, Run 140112952
Column B - Rel. Exp. (%) Ag1395, Run 142259379

[1140] TABLE XK
Panel 5 Islet

| Tissue Name | A |
|---|---|
| 97457_Patient-02go_adipose | 15.1 |
| 97476_Patient-07sk_skeletal muscle | 0.0 |
| 97477_Patient-07ut_uterus | 3.9 |
| 97478_Patient-07pl_placenta | 0.0 |
| 99167_Bayer Patient 1 | 62.0 |
| 97482_Patient-08ut_uterus | 8.2 |
| 97483_Patient-08pl_placenta | 0.0 |
| 97486_Patient-09sk_skeletal muscle | 0.0 |
| 97487_Patient-09ut_uterus | 3.7 |
| 97488_Patient-09pl_placenta | 0.0 |
| 97492_Patient-10ut_uterus | 9.7 |
| 97493_Patient-10pl_placenta | 0.0 |
| 97495_Patient-11go_adipose | 17.2 |
| 97496_Patient-11sk_skeletal muscle | 0.0 |
| 97497_Patient-11ut_uterus | 14.7 |
| 97498_Patient-11pl_placenta | 0.0 |
| 97500_Patient-12go_adipose | 19.6 |
| 97501_Patient-12sk_skeletal muscle | 0.0 |
| 97502_Patient-12ut_uterus | 27.0 |
| 97503_Patient-12pl_placenta | 1.6 |
| 94721_Donor 2 U - A_Mesenchymal Stem Cells | 0.0 |
| 94722_Donor 2 U - B_Mesenchymal Stem Cells | 0.0 |
| 94723_Donor 2 U - C_Mesenchymal Stem Cells | 0.0 |
| 94709_Donor 2 AM - A_adipose | 0.0 |
| 94710_Donor 2 AM - B_adipose | 0.0 |
| 94711_Donor 2 AM - C_adipose | 0.0 |
| 94712_Donor 2 AD - A_adipose | 0.0 |
| 94713_Donor 2 AD - B_adipose | 0.0 |
| 94714_Donor 2 AD - C_adipose | 0.0 |
| 94742_Donor 3 U - A_Mesenchymal Stem Cells | 0.0 |
| 94743_Donor 3 U - B_Mesenchymal Stem Cells | 0.0 |
| 94730_Donor 3 AM - A_adipose | 0.0 |
| 94731_Donor 3 AM - B_adipose | 0.0 |
| 94732_Donor 3 AM - C_adipose | 0.0 |
| 94733_Donor 3 AD - A_adipose | 0.0 |
| 94734_Donor 3 AD - B_adipose | 0.0 |
| 94735_Donor 3 AD - C_adipose | 0.0 |
| 77138_Liver_HepG2 untreated | 0.0 |
| 73556_Heart_Cardiac stromal cells (primary) | 3.2 |
| 81735_Small Intestine | 5.4 |
| 72409_Kidney_Proximal Convoluted Tubule | 28.1 |
| 82685_Small intestine_Duodenum | 0.0 |
| 90650_Adrenal_Adrenocortical adenoma | 0.0 |
| 72410_Kidney_HRCE | 42.6 |
| 72411_Kidney_HRE | 100.0 |
| 73139_Uterus_Uterine smooth muscle cells | 0.0 |

Column A - Rel. Exp. (%) Ag1395, Run 267095054

[1141] Ardais Breast1.0 Summary: Ag1395/Ag8392 Highest expression of this gene was detected in abreast cancer sample (CTs=25-27). Moderate to high levels of expression of this gene were seen in normal and cancer samples from breast. Expression of this gene was higher in a number of cancer samples. Therefore, therapeutic modulation of this gene, expressed protein and/or use of antibodies or small molecule targeting this gene or gene product is useful in the treatment of breast cancer.

[1142] Ardais Panel 1.1 Summary: Ag1395/Ag8392 Highest expression of this gene was detected in normal adjacent lung tissue (CTs=29-30). Moderate to high levels of expression of this gene were seen in normal and cancer samples from lung. Expression of this gene was higher in a number of normal adjacent tissues. Therefore, therapeutic modulation of this gene, expressed protein and/or use of antibodies or small molecule targeting this gene or gene product is useful in the treatment of lung cancer.

[1143] Ardais Prostate 1.0 Summary: Ag1395/Ag8392 Highest expression of this gene was detected in a prostate cancer sample (CTs=25). Moderate to high levels of expression of this gene were seen in normal and cancer samples from prostate. Expression of this gene was higher in a number of prostate cancer samples. Therefore, therapeutic modulation of this gene, expressed protein and/or use of antibodies or small molecule targeting this gene or gene product is useful in the treatment of prostate cancer.

[1144] General_screening₁₃ panel_v1.6 Summary: Ag1395 Highest expression of this gene was detected in cerebellum (CT=26). This gene showed a brain preferential expression, with high expression of this gene seen in all the regions of the brain examined including amygdala, cerebellum, hippocampus, cerebral cortex pool, substantia nigra, and thalamus. This gene encodes an UNC5H1 receptor, an ortholog of Caenorhabditis elegans UNC5, which is essential for dorsal guidance of pioneer axons and for the movement of cells away from the netrin ligand (Ackerman, S. L. Nature 386: 838-842). The family of Netrin ligands, netrin-1-2-3 and β-netrin, key regulators of neuronal cell migration and axonal guidance bind to the DCC (deleted in colorectal cancer) family and the UNC5 family (UNC5H1, UNC5H2 and UNC5H3). The DCC family of proteins is implicated in axon attraction and those of the UNC5 family in axon repulsion. Mice homozygous for the spontaneous rostral cerebellar malformation mutation (rcm(s)) homolog of UNC-5 exhibit cerebellar and midbrain defects as a result of abnormalities in the postnatal cerebellar neuronal migration. Modulation of the expression of this gene, expressed protein and/or use of antibodies/small molecule targeting this gene or gene product is useful in the treatment of cerbellar malformation and other brain related disorders including Alzheimer's disease, Parkinson's disease, epilepsy, multiple sclerosis, schizophrenia and depression.

[1145] Significant expression of this gene was also seen in a number of cancer cell lines derived from pancreatic, lung, brain, colon, renal, and ovarian cancers. UNC5 receptors have been shown to create cellular states of dependence on their respective ligands by inhibiting apoptosis in the presence of ligand, but inducing apoptosis when unoccupied by ligand. UNC5H proteins are caspase substrates in vitro and caspase cleavage is required for cell death induction (Llambi F. EMBO J 20(11):2715-22). Based on the known role of these genes in cell migration and the expression of this gene cancer tissues and cell lines, including the metastatic cancer cell lines SW620 and SK-N-AS, the most likely mechanism for this gene is to increase the metastatic potential of tumor cells. When induced in endothelial cells, this gene will have a role in tumor induced endo cell migration and cell survival. The two roles might be interrelated as it is known that cells need to resist anoikis to survive during migration. Therefore, modulation of this gene, expressed protein and/or use of antibodies or small molecule targeting this gene or gene product is useful in the treatment of pancreatic, lung, brain, colon, renal, and ovarian cancers.

[1146] HASS Panel v1.0 Summary: Ag1395 Highest expression of this gene was detected in medullablastoma sample (CT=26.5). Low expression of this gene was also seen in a glioma sample. Therefore, therapeutic modulation of this gene or expressed protein is useful in the treatment of glioma and medulloblastoma.

[1147] In addition, significant expression of this gene was seen in samples from breast cancer MCF7 and pancreatic cancer CaPaN cell lines. The expression of this gene was not significantly changed by oxygen deprivation, acidic or a serum starved environment in the these two cell lines in this panel.

[1148] Panel 2D Summary: Ag1395 Highest expression of this gene was detected in a gastric cancer and metastatic breast cancer samples (CTs=29-31). Moderate to low levels of expression of this gene were also seen in number of kidney, breast and gastric cancer samples. Therefore, expression of this gene is useful as a marker to detect the presence of these cancers and therapeutic modulation of this gene, expressed protein and/or use of antibodies or small molecule is useful in the treatment of breast, kidney and gastric cancers.

[1149] Panel 3D Summary: Ag1395 Highest expression of this gene was detected in a lung cancer cell line (CT=28.8). Moderate to low levels of expression of this gene were detected in cancer cell lines derived from metastatic neuroblastoma, glioblastoma, lung, gastric, colon, lymphoma, renal, pancreatic, breast and tongue cancers. Therefore, therapeutic modulation of this gene and/or expressed protein is useful in the treatment of these cancers.

[1150] Panel 4D Summary: Ag1395 Highest expression of this gene was detected in lung and PMA/ionomycin activated LAK cells (CTs=31). Moderate to low levels of expression of this gene were also seen in resting LAK cells, resting and activated dendritic cells, monocytes and macrophages, activated keratinocytes, liver cirrhosis and normal colon tissues. Expression of this gene in monocytes, LAK, macrophage and dendritic cells demonstrates that the expressed protein is important in differentiation and activation of these cell types. Therefore, regulating the expression of this gene or expressed protein will alter the types and levels of monocytic cells regulated by cytokine and chemokine production and T cell activation. Therapeutics modulation of this gene, encoded protein and/or use of antibodies or small molecule targeting this gene or gene product is useful in the treatment of liver cirrhosis, asthma, emphysema, inflammatory bowel disease, arthritis and psoriasis.

[1151] Panel 5 Islet Summary: Ag1395 Expression of this gene was limited to the kidney on this panel (CT=33.9). Therefore, modulation of this gene and/or expressed protein is useful in the treatment of kidney related disorders including systemic lupus erythematosus and glomerulonephritis.

[1152] Y. CG53944-02: Novel Membrane Protein

[1153] Expression of full-length physical clone CG53944-02 was assessed using the primer-probe sets Ag2639, Ag2640, and Ag2641, described in Tables YA, YB, and YC. Results of the RTQ-PCR runs are shown in Tables YD, YE, YF and YG.

TABLE YA
Probe Name Ag2639

| | | | | SEQ |
|---|---|---|---|---|
| | | | Start | ID |
| Primers | Sequences | Length | Position | No |
| Forward | 5′-ctcatcctcagcaacaacca-3′ | 20 | 406 | 1372 |
| Probe | TET-5′-cctggatgattgtgccgagacact-3′- | 24 | 450 | 1373 |
| | TAMRA | | | |
| Reverse | 5′-taggagaggtcgaggtcctc-3′ | 20 | 475 | 1374 |

[1154] TABLE YB
Probe Name Ag2640

| | | | | SEQ |
|---|---|---|---|---|
| | | | Start | ID |
| Primers | Sequences | Length | Position | No |
| Forward | 5′-ctcatcctcagcaacaacca-3′ | 20 | 406 | 1375 |
| Probe | TET-5′-cctggatgattgtgccgagacact-3′- | 24 | 450 | 1376 |
| | TAMRA | | | |
| Reverse | 5′-tgtaggagaggtcgaggtcc-3′ | 20 | 477 | 1377 |

[1155] TABLE YC
Probe Name Ag2641

| | | | | SEQ |
|---|---|---|---|---|
| | | | Start | ID |
| Primers | Sequences | Length | Position | No |
| Forward | 5′-ctcatcctcagcaacaacca-3′ | 20 | 406 | 1378 |
| Probe | TET-5′-cctggatgattgtgccgagacact-3′- | 24 | 450 | 1379 |
| | TAMRA | | | |
| Reverse | 5′-tgtaggagaggtcgaggtcc-3′ | 20 | 477 | 1380 |

[1156] TABLE YD
CNS_neurodegeneration_v1.0

| Tissue Name | A |
|---|---|
| AD 1 Hippo | 55.5 |
| AD 2 Hippo | 79.0 |
| AD 3 Hippo | 35.8 |
| AD 4 Hippo | 63.3 |
| AD 5 hippo | 85.3 |
| AD 6 Hippo | 54.7 |
| Control 2 Hippo | 65.1 |
| Control 4 Hippo | 50.7 |
| Control (Path) 3 Hippo | 41.8 |
| AD 1 Temporal Ctx | 37.4 |
| AD 2 Temporal Ctx | 68.8 |
| AD 3 Temporal Ctx | 52.5 |
| AD 4 Temporal Ctx | 45.7 |
| AD 5 Inf Temporal Ctx | 63.7 |
| AD 5 Sup Temporal Ctx | 49.3 |
| AD 6 Inf Temporal Ctx | 58.6 |
| AD 6 Sup Temporal Ctx | 49.0 |
| Control 1 Temporal Ctx | 59.0 |
| Control 2 Temporal Ctx | 100.0 |
| Control 3 Temporal Ctx | 71.2 |
| Control 4 Temporal Ctx | 67.8 |
| Control (Path) 1 Temporal Ctx | 57.8 |
| Control (Path) 2 Temporal Ctx | 45.4 |
| Control (Path) 3 Temporal Ctx | 57.8 |
| Control (Path) 4 Temporal Ctx | 75.3 |
| AD 1 Occipital Ctx | 27.5 |
| AD 2 Occipital Ctx (Missing) | 2.0 |
| AD 3 Occipital Ctx | 36.3 |
| AD 4 Occipital Ctx | 32.5 |
| AD 5 Occipital Ctx | 37.4 |
| AD 6 Occipital Ctx | 49.7 |
| Control 1 Occipital Ctx | 55.1 |
| Control 2 Occipital Ctx | 92.0 |
| Control 3 Occipital Ctx | 57.8 |
| Control 4 Occipital Ctx | 46.3 |
| Control (Path) 1 Occipital Ctx | 69.7 |
| Control (Path) 2 Occipital Ctx | 63.3 |
| Control (Path) 3 Occipital Ctx | 51.8 |
| Control (Path) 4 Occipital Ctx | 82.9 |
| Control 1 Parietal Ctx | 39.5 |
| Control 2 Parietal Ctx | 54.3 |
| Control 3 Parietal Ctx | 67.4 |
| Control (Path) 1 Parietal Ctx | 84.7 |
| Control (Path) 2 Parietal Ctx | 56.6 |
| Control (Path) 3 Parietal Ctx | 47.0 |
| Control (Path) 4 Parietal Ctx | 79.6 |

Column A - Rel. Exp. (%) Ag2641, Run 206954924

[1157] TABLE YE
Panel 1.3D

| Tissue Name | A |
|---|---|
| Liver adenocarcinoma | 17.1 |
| Pancreas | 2.7 |
| Pancreatic ca. CAPAN 2 | 3.9 |
| Adrenal gland | 4.4 |
| Thyroid | 5.9 |
| Salivary gland | 7.0 |
| Pituitary gland | 16.5 |
| Brain (fetal) | 12.4 |
| Brain (whole) | 12.4 |
| Brain (amygdala) | 31.0 |
| Brain (cerebellum) | 11.2 |
| Brain (hippocampus) | 100.0 |
| Brain (substantia nigra) | 3.6 |
| Brain (thalamus) | 19.3 |
| Cerebral Cortex | 24.1 |
| Spinal cord | 5.9 |
| glio/astro U87-MG | 12.9 |
| glio/astro U-118-MG | 17.1 |
| astrocytoma SW1783 | 10.4 |
| neuro*; met SK-N-AS | 27.7 |
| astrocytoma SF-539 | 9.9 |
| astrocytoma SNB-75 | 19.9 |
| glioma SNB-19 | 11.2 |
| glioma U251 | 2.2 |
| glioma SF-295 | 11.2 |
| Heart (fetal) | 5.4 |
| Heart | 1.0 |
| Skeletal muscle (fetal) | 15.3 |
| Skeletal muscle | 1.5 |
| Bone marrow | 1.2 |
| Thymus | 2.2 |
| Spleen | 7.4 |
| Lymph node | 2.4 |
| Colorectal | 1.5 |
| Stomach | 7.1 |
| Small intestine | 12.8 |
| Colon ca. SW480 | 7.4 |
| Colon ca.* SW620(SW480 met) | 3.0 |
| Colon ca. HT29 | 2.5 |
| Colon ca. HCT-116 | 5.9 |
| Colon ca. CaCo-2 | 5.0 |
| Colon ca. tissue(ODO3866) | 6.7 |
| Colon ca. HCC-2998 | 23.2 |
| Gastric ca.* (liver met) NCI-N87 | 9.9 |
| Bladder | 1.2 |
| Trachea | 12.6 |
| Kidney | 1.2 |
| Kidney (fetal) | 4.0 |
| Renal ca. 786-0 | 1.9 |
| Renal ca. A498 | 15.2 |
| Renal ca. RXF 393 | 1.4 |
| Renal ca. ACHN | 2.9 |
| Renal ca. UO-31 | 3.4 |
| Renal ca. TK-10 | 1.6 |
| Liver | 2.9 |
| Liver (fetal) | 2.3 |
| Liver ca. (hepatoblast) HepG2 | 5.3 |
| Lung | 7.3 |
| Lung (fetal) | 5.1 |
| Lung ca. (small cell) LX-1 | 1.5 |
| Lung ca. (small cell) NCI-H69 | 9.2 |
| Lung ca. (s. cell var.) SHP-77 | 7.3 |
| Lung ca. (large cell)NCI-H460 | 3.3 |
| Lung ca. (non-sm. cell) A549 | 18.0 |
| Lung ca. (non-s. cell) NCI-H23 | 7.0 |
| Lung ca. (non-s. cell) HOP-62 | 7.3 |
| Lung ca. (non-s. cl) NCI-H522 | 4.4 |
| Lung ca. (squam.) SW 900 | 4.4 |
| Lung ca. (squam.) NCI-H596 | 0.6 |
| Mammary gland | 9.5 |
| Breast ca.* (pl. ef) MCF-7 | 6.3 |
| Breast ca.* (pl. ef) MDA-MB-231 | 48.3 |
| Breast ca.* (pl. ef) T47D | 0.7 |
| Breast ca. BT-549 | 13.9 |
| Breast ca. MDA-N | 8.5 |
| Ovary | 10.4 |
| Ovarian ca. OVCAR-3 | 7.2 |
| Ovarian ca. OVCAR-4 | 1.7 |
| Ovarian ca. OVCAR-5 | 3.6 |
| Ovarian ca. OVCAR-8 | 3.7 |
| Ovarian ca. IGROV-1 | 2.5 |
| Ovarian ca.* (ascites) SK-OV-3 | 3.5 |
| Uterus | 14.6 |
| Placenta | 3.4 |
| Prostate | 5.7 |
| Prostate ca.* (bone met)PC-3 | 5.6 |
| Testis | 10.2 |
| Melanoma Hs688(A).T | 5.3 |
| Melanoma* (met) Hs688(B).T | 3.1 |
| Melanoma UACC-62 | 2.0 |
| Melanoma M14 | 2.8 |
| Melanoma LOX IMVI | 15.0 |
| Melanoma* (met) SK-MEL-5 | 3.1 |
| Adipose | 2.0 |

Column A - Rel. Exp. (%) Ag2639, Run 157543474

[1158] TABLE YF
Panel 2D

| Tissue Name | A |
|---|---|
| Normal Colon | 43.5 |
| CC Well to Mod Diff (ODO3866) | 30.4 |
| CC Margin (ODO3866) | 18.8 |
| CC Gr.2 rectosigmoid (ODO3868) | 9.1 |
| CC Margin (ODO3868) | 3.6 |
| CC Mod Diff (ODO3920) | 22.8 |
| CC Margin (ODO3920) | 11.0 |
| CC Gr.2 ascend colon (ODO3921) | 40.1 |
| CC Margin (ODO3921) | 28.5 |
| CC from Partial Hepatectomy (ODO4309) Mets | 5.8 |
| Liver Margin (ODO4309) | 14.2 |
| Colon mets to lung (OD04451-01) | 15.8 |
| Lung Margin (OD04451-02) | 7.3 |
| Normal Prostate 6546-1 | 17.0 |
| Prostate Cancer (OD04410) | 53.2 |
| Prostate Margin (OD04410) | 35.4 |
| Prostate Cancer (OD04720-01) | 31.4 |
| Prostate Margin (OD04720-02) | 36.9 |
| Normal Lung 061010 | 29.1 |
| Lung Met to Muscle (ODO4286) | 8.7 |
| Muscle Margin (ODO4286) | 25.5 |
| Lung Malignant Cancer (OD03126) | 44.1 |
| Lung Margin (OD03126) | 23.3 |
| Lung Cancer (OD04404) | 33.2 |
| Lung Margin (OD04404) | 15.4 |
| Lung Cancer (OD04565) | 15.1 |
| Lung Margin (OD04565) | 6.0 |
| Lung Cancer (OD04237-01) | 14.8 |
| Lung Margin (OD04237-02) | 15.6 |
| Ocular Mel Met to Liver (ODO4310) | 13.5 |
| Liver Margin (ODO4310) | 17.6 |
| Melanoma Mets to Lung (OD04321) | 41.8 |
| Lung Margin (OD04321) | 28.3 |
| Normal Kidney | 43.2 |
| Kidney Ca, Nuclear grade 2 (OD04338) | 45.1 |
| Kidney Margin (OD04338) | 53.2 |
| Kidney Ca Nuclear grade 1/2 (OD04339) | 33.0 |
| Kidney Margin (OD04339) | 45.1 |
| Kidney Ca, Clear cell type (OD04340) | 15.3 |
| Kidney Margin (OD04340) | 36.3 |
| Kidney Ca, Nuclear grade 3 (OD04348) | 17.9 |
| Kidney Margin (OD04348) | 26.2 |
| Kidney Cancer (OD04622-01) | 42.9 |
| Kidney Margin (OD04622-03) | 15.3 |
| Kidney Cancer (OD04450-01) | 20.6 |
| Kidney Margin (OD04450-03) | 24.5 |
| Kidney Cancer 8120607 | 44.1 |
| Kidney Margin 8120608 | 34.4 |
| Kidney Cancer 8120613 | 39.0 |
| Kidney Margin 8120614 | 39.8 |
| Kidney Cancer 9010320 | 24.8 |
| Kidney Margin 9010321 | 41.5 |
| Normal Uterus | 12.7 |
| Uterus Cancer 064011 | 39.8 |
| Normal Thyroid | 23.3 |
| Thyroid Cancer 064010 | 21.3 |
| Thyroid Cancer A302152 | 11.3 |
| Thyroid Margin A302153 | 30.6 |
| Normal Breast | 45.1 |
| Breast Cancer (OD04566) | 16.6 |
| Breast Cancer (OD04590-01) | 81.8 |
| Breast Cancer Mets (OD04590-03) | 100.0 |
| Breast Cancer Metastasis (OD04655-05) | 72.7 |
| Breast Cancer 064006 | 16.3 |
| Breast Cancer 1024 | 44.8 |
| Breast Cancer 9100266 | 28.1 |
| Breast Margin 9100265 | 13.2 |
| Breast Cancer A209073 | 44.1 |
| Breast Margin A209073 | 24.1 |
| Normal Liver | 13.7 |
| Liver Cancer 064003 | 15.1 |
| Liver Cancer 1025 | 14.3 |
| Liver Cancer 1026 | 23.2 |
| Liver Cancer 6004-T | 16.2 |
| Liver Tissue 6004-N | 7.2 |
| Liver Cancer 6005-T | 36.9 |
| Liver Tissue 6005-N | 10.8 |
| Normal Bladder | 23.7 |
| Bladder Cancer 1023 | 19.9 |
| Bladder Cancer A302173 | 12.4 |
| Bladder Cancer (OD04718-01) | 38.2 |
| Bladder Normal Adjacent (OD04718-03) | 11.8 |
| Normal Ovary | 38.2 |
| Ovarian Cancer 064008 | 59.9 |
| Ovarian Cancer (OD04768-07) | 38.7 |
| Ovary Margin (OD04768-08) | 9.9 |
| Normal Stomach | 18.9 |
| Gastric Cancer 9060358 | 5.2 |
| Stomach Margin 9060359 | 25.5 |
| Gastric Cancer 9060395 | 28.5 |
| Stomach Margin 9060394 | 17.0 |
| Gastric Cancer 9060397 | 49.7 |
| Stomach Margin 9060396 | 22.8 |
| Gastric Cancer 064005 | 18.3 |

Column A - Rel. Exp. (%) Ag2640, Run 157543604

[1159] TABLE YG
Panel 4D

| Tissue Name | A |
|---|---|
| Secondary Th1 act | 72.7 |
| Secondary Th2 act | 75.3 |
| Secondary Tr1 act | 52.9 |
| Secondary Th1 rest | 36.6 |
| Secondary Th2 rest | 45.7 |
| Secondary Tr1 rest | 57.0 |
| Primary Th1 act | 34.9 |
| Primary Th2 act | 31.6 |
| Primary Tr1 act | 32.5 |
| Primary Th1 rest | 90.8 |
| Primary Th2 rest | 50.3 |
| Primary Tr1 rest | 25.9 |
| CD45RA CD4 lymphocyte act | 79.6 |
| CD45RO CD4 lymphocyte act | 53.6 |
| CD8 lymphocyte act | 49.3 |
| Secondary CD8 lymphocyte rest | 78.5 |
| Secondary CD8 lymphocyte act | 14.0 |
| CD4 lymphocyte none | 25.3 |
| 2ry Th1/Th2/Tr1_anti-CD95 CH11 | 26.1 |
| LAK cells rest | 26.1 |
| LAK cells IL-2 | 40.1 |
| LAK cells IL-2 + IL-12 | 47.0 |
| LAK cells IL-2 + IFN gamma | 49.7 |
| LAK cells IL-2 + IL-18 | 49.0 |
| LAK cells PMA/ionomycin | 14.8 |
| NK Cells IL-2 rest | 38.7 |
| Two Way MLR 3 day | 58.2 |
| Two Way MLR 5 day | 19.8 |
| Two Way MLR 7 day | 12.9 |
| PBMC rest | 23.2 |
| PBMC PWM | 89.5 |
| PBMC PHA-L | 35.4 |
| Ramos (B cell) none | 24.1 |
| Ramos (B cell) ionomycin | 93.3 |
| B lymphocytes PWM | 40.6 |
| B lymphocytes CD40L and IL-4 | 14.8 |
| EOL-1 dbcAMP | 100.0 |
| EOL-1 dbcAMP PMA/ionomycin | 81.2 |
| Dendritic cells none | 5.5 |
| Dendritic cells LPS | 0.0 |
| Dendritic cells anti-CD40 | 6.0 |
| Monocytes rest | 3.1 |
| Monocytes LPS | 4.6 |
| Macrophages rest | 11.0 |
| Macrophages LPS | 1.6 |
| HUVEC none | 63.7 |
| HUVEC starved | 48.6 |
| HUVEC IL-1beta | 0.0 |
| HUVEC IFN gamma | 96.6 |
| HUVEC TNF alpha + IFN gamma | 51.4 |
| HUVEC TNF alpha + IL4 | 93.3 |
| HUVEC IL-11 | 57.4 |
| Lung Microvascular EC none | 87.7 |
| Lung Microvascular EC TNFalpha + IL-1beta | 82.9 |
| Microvascular Dermal EC none | 71.2 |
| Microsvasular Dermal EC TNFalpha + IL-1beta | 43.5 |
| Bronchial epithelium TNFalpha + IL1beta | 95.9 |
| Small airway epithelium none | 25.7 |
| Small airway epithelium TNFalpha + IL-1beta | 82.4 |
| Coronery artery SMC rest | 53.6 |
| Coronery artery SMC TNFalpha + IL-1beta | 81.2 |
| Astrocytes rest | 57.8 |
| Astrocytes TNFalpha + IL-1beta | 41.5 |
| KU-812 (Basophil) rest | 25.7 |
| KU-812 (Basophil) PMA/ionomycin | 30.8 |
| CCD1106 (Keratinocytes) none | 54.3 |
| CCD1106 (Keratinocytes) TNFalpha + IL-1beta | 69.3 |
| Liver cirrhosis | 23.3 |
| Lupus kidney | 2.9 |
| NCI-H292 none | 36.1 |
| NCI-H292 IL-4 | 67.8 |
| NCI-H292 IL-9 | 62.0 |
| NCI-H292 IL-13 | 90.1 |
| NCI-H292 IFN gamma | 82.4 |
| HPAEC none | 49.3 |
| HPAEC TNF alpha + IL-1beta | 45.7 |
| Lung fibroblast none | 44.8 |
| Lung fibroblast TNF alpha + IL-1 beta | 35.6 |
| Lung fibroblast IL-4 | 69.3 |
| Lung fibroblast IL-9 | 43.8 |
| Lung fibroblast IL-13 | 45.1 |
| Lung fibroblast IFN gamma | 52.5 |
| Dermal fibroblast CCD1070 rest | 66.9 |
| Dermal fibroblast CCD1070 TNF alpha | 54.3 |
| Dermal fibroblast CCD1070 IL-1 beta | 71.2 |
| Dermal fibroblast IFN gamma | 84.1 |
| Dermal fibroblast IL-4 | 58.2 |
| IBD Colitis 2 | 3.1 |
| IBD Crohn's | 2.6 |
| Colon | 77.9 |
| Lung | 35.1 |
| Thymus | 41.2 |
| Kidney | 23.3 |

Column A - Rel. Exp. (%) Ag2641, Run 157543823

[1160] CNS_neurodegeneration_v1.0 Summary: Ag2641 This panel confirmed the expression of this gene at low levels in the brain in an independent group of individuals. This gene was found to be down-regulated in the temporal cortex of Alzheimer's disease patients patients when compared with non-demented controls (p=0.0003 when analyzed by Ancova, estimate of total cDNA loaded per well used asa covariate). Therefore, up-regulation of this gene or its protein product, or treatment with specific agonists for this receptor is of use in reversing the dementia, memory loss, and neuronal death associated with this disease.

[1161] Panel 1.3D Summary: Ag2639 Highest expression was seen in the hippocampus (CT=26.3). In addition, high to moderate levels of expression were seen in all regions of the CNS examined, including amygdala, hippocampus, substantia nigra, thalamus, and hypothalamus. This expression shows that therapeutic modulation of the expression or function of this gene is useful in the treatment of neurologic disorders, such as Alzheimer's disease, Parkinson's disease, schizophrenia, multiple sclerosis, stroke and epilepsy.

[1162] Panel 2D Summary: Ag2640 Highest expression was seen in a breast metastasis sample (CT=28.4), with moderate expression throughout this panel. This widespread expression demonstrates that this gene or gene product plays in cell growth and/or proliferation.

[1163] Panel 4D Summary: Ag2641 Highest expression was seen in an eosinophil cell line (CT=30). This gene was also expressed at moderate levels in a wide range of cell types of significance in the immune response in health and disease. These cells included members of the T-cell, B-cell, endothelial cell, macrophage/monocyte, and peripheral blood mononuclear cell family, as well as epithelial and fibroblast cell types from lung and skin, and normal tissues represented by colon, lung, thymus and kidney. This ubiquitous pattern of expression demonstrates that this gene product is involved in homeostatic processes for these and other cell types and tissues. This pattern was in agreement with the expression profile in Panel 2D and also shows a role for the gene or gene product in cell survival and proliferation. Therefore, modulation of the gene or its protein product with a functional therapeutic is useful for the alteration of functions associated with these cell types and for the improvement of the symptoms of patients suffering from autoimmune and inflammatory diseases such as asthma, allergies, inflammatory bowel disease, lupus erythematosus, psoriasis, rheumatoid arthritis, and osteoarthritis.

[1164] Z. CG5430804: Serpin

[1165] Expression of full-length physical clone CG54308-04 was assessed using the primer-probe sets Ag548 and Ag7880, described in Tables ZA and ZB. Results of the RTQ-PCR runs are shown in Tables ZC, ZD, ZE, ZF, and ZG.

TABLE ZA
Probe Name Ag548

| | | | | SEQ |
|---|---|---|---|---|
| | | | Start | ID |
| Primers | Sequences | Length | Position | No |
| Forward | 5′-tggagcagctcagaaaacatgt-3′ | 22 | 910 | 1381 |
| Probe | TET-5′-agaatcggtggtcctgtccttcccc-3′- | 25 | 936 | 1382 |
| | TAMRA | | | |
| Reverse | 5′-catagctgtcttccagggtgaac-3′ | 23 | 963 | 1383 |

[1166] TABLE ZB
Probe Name Ag7880

| | | | | SEQ |
|---|---|---|---|---|
| | | | Start | ID |
| Primers | Sequences | Length | Position | No |
| Forward | 5′-tccagaggctctgtcgtttt-3′ | 20 | 277 | 1384 |
| Probe | TET-5′-tccagagagctgtcagccagcacttt-3′- | 26 | 241 | 1385 |
| | TAMRA | | | |
| Reverse | 5′-gaacctgacccttgtctgaaa-3′ | 21 | 208 | 1386 |

[1167] TABLE ZC
General_screening_panel_v1.7

| Tissue Name | A |
|---|---|
| Adipose | 63.3 |
| HUVEC | 0.0 |
| Melanoma* Hs688(A).T | 0.0 |
| Melanoma* Hs688(B).T | 18.3 |
| Melanoma (met) SK-MEL-5 | 0.0 |
| Testis | 7.9 |
| Prostate ca. (bone met) PC-3 | 0.0 |
| Prostate ca. DU145 | 0.0 |
| Prostate pool | 0.0 |
| Uterus pool | 100.0 |
| Ovarian ca. OVCAR-3 | 0.0 |
| Ovarian ca. (ascites) SK-OV-3 | 0.0 |
| Ovarian ca. OVCAR-4 | 0.0 |
| Ovarian ca. OVCAR-5 | 8.1 |
| Ovarian ca. IGROV-1 | 0.0 |
| Ovarian ca. OVCAR-8 | 0.0 |
| Ovary | 0.0 |
| Breast ca. MCF-7 | 0.0 |
| Breast ca. MDA-MB-231 | 0.0 |
| Breast ca. BT-549 | 0.0 |
| Breast ca. T47D | 0.0 |
| Breast pool | 0.0 |
| Trachea | 12.1 |
| Lung | 0.0 |
| Fetal Lung | 0.0 |
| Lung ca. NCI-N417 | 0.0 |
| Lung ca. LX-1 | 0.0 |
| Lung ca. NCI-H146 | 0.0 |
| Lung ca. SHP-77 | 0.0 |
| Lung ca. NCI-H23 | 0.0 |
| Lung ca. NCI-H460 | 0.0 |
| Lung ca. HOP-62 | 0.0 |
| Lung ca. NCI-H522 | 0.0 |
| Lung ca. DMS-114 | 0.0 |
| Liver | 0.0 |
| Fetal Liver | 0.0 |
| Kidney pool | 0.1 |
| Fetal Kidney | 0.0 |
| Renal ca. 786-0 | 0.0 |
| Renal ca. A498 | 0.0 |
| Renal ca. ACHN | 0.0 |
| Renal ca. UO-31 | 0.0 |
| Renal ca. TK-10 | 0.0 |
| Bladder | 0.0 |
| Gastric ca. (liver met.) NCI-N87 | 0.0 |
| Stomach | 0.0 |
| Colon ca. SW-948 | 0.0 |
| Colon ca. SW480 | 0.0 |
| Colon ca. (SW480 met) SW620 | 0.0 |
| Colon ca. HT29 | 0.0 |
| Colon ca. HCT-116 | 0.0 |
| Colon cancer tissue | 0.0 |
| Colon ca. SW1116 | 0.0 |
| Colon ca. Colo-205 | 0.0 |
| Colon ca. SW-48 | 0.0 |
| Colon | 0.0 |
| Small Intestine | 0.0 |
| Fetal Heart | 0.0 |
| Heart | 0.0 |
| Lymph Node pool 1 | 0.0 |
| Lymph Node pool 2 | 0.0 |
| Fetal Skeletal Muscle | 6.7 |
| Skeletal Muscle pool | 0.0 |
| Skeletal Muscle | 0.0 |
| Spleen | 0.0 |
| Thymus | 7.5 |
| CNS cancer (glio/astro) SF-268 | 0.0 |
| CNS cancer (glio/astro) T98G | 0.0 |
| CNS cancer (neuro; met) SK-N-AS | 0.0 |
| CNS cancer (astro) SF-539 | 0.0 |
| CNS cancer (astro) SNB-75 | 0.0 |
| CNS cancer (glio) SNB-19 | 0.0 |
| CNS cancer (glio) SF-295 | 0.0 |
| Brain (Amygdala) | 0.0 |
| Brain (Cerebellum) | 0.0 |
| Brain (Fetal) | 0.0 |
| Brain (Hippocampus) | 0.0 |
| Cerebral Cortex pool | 0.0 |
| Brain (Substantia nigra) | 0.0 |
| Brain (Thalamus) | 0.0 |
| Brain (Whole) | 0.0 |
| Spinal Cord | 0.0 |
| Adrenal Gland | 0.0 |
| Pituitary Gland | 0.0 |
| Salivary Gland | 0.0 |
| Thyroid | 0.0 |
| Pancreatic ca. PANC-1 | 0.0 |
| Pancreas pool | 0.0 |

Column A - Rel. Exp. (%) Ag7880, Run 319066287

[1168] TABLE ZD
Panel 1.2

| Tissue Name | A |
|---|---|
| Endothelial cells | 0.0 |
| Heart (Fetal) | 0.0 |
| Pancreas | 0.0 |
| Pancreatic ca. CAPAN 2 | 0.0 |
| Adrenal Gland | 0.0 |
| Thyroid | 0.0 |
| Salivary gland | 0.0 |
| Pituitary gland | 0.0 |
| Brain (fetal) | 0.0 |
| Brain (whole) | 0.0 |
| Brain (amygdala) | 0.0 |
| Brain (cerebellum) | 0.0 |
| Brain (hippocampus) | 0.0 |
| Brain (thalamus) | 0.0 |
| Cerebral Cortex | 0.0 |
| Spinal cord | 0.0 |
| glio/astro U87-MG | 0.0 |
| glio/astro U-118-MG | 0.0 |
| astrocytoma SW1783 | 0.0 |
| neuro*; met SK-N-AS | 0.0 |
| astrocytoma SF-539 | 0.0 |
| astrocytoma SNB-75 | 0.0 |
| glioma SNB-19 | 0.0 |
| glioma U251 | 0.0 |
| glioma SF-295 | 0.0 |
| Heart | 0.0 |
| Skeletal Muscle | 0.0 |
| Bone marrow | 0.0 |
| Thymus | 100.0 |
| Spleen | 0.0 |
| Lymph node | 0.0 |
| Colorectal Tissue | 0.0 |
| Stomach | 0.0 |
| Small intestine | 0.0 |
| Colon ca. SW480 | 0.0 |
| Colon ca.* SW620 (SW480 met) | 0.0 |
| Colon ca. HT29 | 0.0 |
| Colon ca. HCT-116 | 0.0 |
| Colon ca. CaCo-2 | 0.0 |
| Colon ca. Tissue (ODO3866) | 0.0 |
| Colon ca. HCC-2998 | 0.0 |
| Gastric ca.* (liver met) NCI-N87 | 0.0 |
| Bladder | 0.0 |
| Trachea | 0.0 |
| Kidney | 0.0 |
| Kidney (fetal) | 0.0 |
| Renal ca. 786-0 | 0.0 |
| Renal ca. A498 | 0.0 |
| Renal ca. RXF 393 | 0.0 |
| Renal ca. ACHN | 0.0 |
| Renal ca. UO-31 | 0.0 |
| Renal ca. TK-10 | 0.0 |
| Liver | 0.0 |
| Liver (fetal) | 0.0 |
| Liver ca. (hepatoblast) HepG2 | 0.0 |
| Lung | 0.0 |
| Lung (fetal) | 0.0 |
| Lung ca. (small cell) LX-1 | 0.0 |
| Lung ca. (small cell) NCI-H69 | 0.0 |
| Lung ca. (s. cell var.) SHP-77 | 0.0 |
| Lung ca. (large cell)NCI-H460 | 0.0 |
| Lung ca. (non-sm. cell) A549 | 0.0 |
| Lung ca. (non-s. cell) NCI-H23 | 0.0 |
| Lung ca. (non-s. cell) HOP-62 | 0.0 |
| Lung ca. (non-s. cl) NCI-H522 | 0.0 |
| Lung ca. (squam.) SW 900 | 0.0 |
| Lung ca. (squam.) NCI-H596 | 0.0 |
| Mammary gland | 0.0 |
| Breast ca.* (pl. ef) MCF-7 | 0.0 |
| Breast ca.* (pl. ef) MDA-MB-231 | 0.0 |
| Breast ca.* (pl. ef) T47D | 0.0 |
| Breast ca. BT-549 | 0.0 |
| Breast ca. MDA-N | 0.0 |
| Ovary | 0.0 |
| Ovarian ca. OVCAR-3 | 0.0 |
| Ovarian ca. OVCAR-4 | 0.0 |
| Ovarian ca. OVCAR-5 | 0.0 |
| Ovarian ca. OVCAR-8 | 0.0 |
| Ovarian ca. IGROV-1 | 0.0 |
| Ovarian ca. (ascites) SK-OV-3 | 0.0 |
| Uterus | 0.0 |
| Placenta | 0.0 |
| Prostate | 0.0 |
| Prostate ca.* (bone met) PC-3 | 0.0 |
| Testis | 2.6 |
| Melanoma Hs688(A).T | 0.0 |
| Melanoma* (met) Hs688(B).T | 0.0 |
| Melanoma UACC-62 | 0.0 |
| Melanoma M14 | 0.0 |
| Melanoma LOX IMVI | 0.0 |
| Melanoma* (met) SK-MEL-5 | 0.0 |

Column A - Rel. Exp. (%) Ag548, Run 122671023

[1169] TABLE ZE
Panel 1.3D

| Tissue Name | A |
|---|---|
| Liver adenocarcinoma | 0.0 |
| Pancreas | 0.0 |
| Pancreatic ca. CAPAN 2 | 0.0 |
| Adrenal gland | 17.4 |
| Thyroid | 0.0 |
| Salivary gland | 0.0 |
| Pituitary gland | 0.0 |
| Brain (fetal) | 0.0 |
| Brain (whole) | 21.3 |
| Brain (amygdala) | 0.0 |
| Brain (cerebellum) | 0.0 |
| Brain (hippocampus) | 0.0 |
| Brain (substantia nigra) | 0.0 |
| Brain (thalamus) | 0.0 |
| Cerebral Cortex | 0.0 |
| Spinal cord | 0.0 |
| glio/astro U87-MG | 0.0 |
| glio/astro U-118-MG | 0.0 |
| astrocytoma SW1783 | 0.0 |
| neuro*; met SK-N-AS | 0.0 |
| astrocytoma SF-539 | 0.0 |
| astrocytoma SNB-75 | 0.0 |
| glioma SNB-19 | 0.0 |
| glioma U251 | 0.0 |
| glioma SF-295 | 0.0 |
| Heart (fetal) | 0.0 |
| Heart | 0.0 |
| Skeletal muscle (fetal) | 2.1 |
| Skeletal muscle | 0.0 |
| Bone marrow | 0.0 |
| Thymus | 100.0 |
| Spleen | 0.0 |
| Lymph node | 0.0 |
| Colorectal | 9.7 |
| Stomach | 0.0 |
| Small intestine | 0.0 |
| Colon ca. SW480 | 0.0 |
| Colon ca.* SW620(SW480 met) | 0.0 |
| Colon ca. HT29 | 0.0 |
| Colon ca. HCT-116 | 0.0 |
| Colon ca. CaCo-2 | 0.0 |
| Colon ca. tissue(ODO3866) | 0.0 |
| Colon ca. HCC-2998 | 0.0 |
| Gastric ca.* (liver met) NCI-N87 | 0.0 |
| Bladder | 0.0 |
| Trachea | 0.0 |
| Kidney | 0.0 |
| Kidney (fetal) | 0.0 |
| Renal ca. 786-0 | 2.9 |
| Renal ca. A498 | 0.0 |
| Renal ca. RXF 393 | 0.0 |
| Renal ca. ACHN | 0.0 |
| Renal ca. UO-31 | 0.0 |
| Renal ca. TK-10 | 0.0 |
| Liver | 0.0 |
| Liver (fetal) | 0.0 |
| Liver ca. (hepatoblast) HepG2 | 0.0 |
| Lung | 11.3 |
| Lung (fetal) | 0.0 |
| Lung ca. (small cell) LX-1 | 0.0 |
| Lung ca. (small cell) NCI-H69 | 0.0 |
| Lung ca. (s. cell var.) SHP-77 | 0.0 |
| Lung ca. (large cell)NCI-H460 | 0.0 |
| Lung ca. (non-sm. cell) A549 | 0.0 |
| Lung ca. (non-s. cell) NCI-H23 | 0.0 |
| Lung ca. (non-s. cell) HOP-62 | 0.0 |
| Lung ca. (non-s. cl) NCI-H522 | 0.0 |
| Lung ca. (squam.) SW 900 | 0.0 |
| Lung ca. (squam.) NCI-H596 | 14.0 |
| Mammary gland | 23.7 |
| Breast ca.* (pl. ef) MCF-7 | 0.0 |
| Breast ca.* (pl. ef) MDA-MB-231 | 0.0 |
| Breast ca.* (pl. ef) T47D | 11.5 |
| Breast ca. BT-549 | 0.0 |
| Breast ca. MDA-N | 22.8 |
| Ovary | 0.0 |
| Ovarian ca. OVCAR-3 | 0.0 |
| Ovarian ca. OVCAR-4 | 0.0 |
| Ovarian ca. OVCAR-5 | 0.0 |
| Ovarian ca. OVCAR-8 | 0.0 |
| Ovarian ca. IGROV-1 | 0.0 |
| Ovarian ca.* (ascites) SK-OV-3 | 0.0 |
| Uterus | 0.0 |
| Placenta | 0.0 |
| Prostate | 5.3 |
| Prostate ca.* (bone met)PC-3 | 12.8 |
| Testis | 22.1 |
| Melanoma Hs688(A).T | 11.0 |
| Melanoma* (met) Hs688(B).T | 10.6 |
| Melanoma UACC-62 | 0.0 |
| Melanoma M14 | 0.0 |
| Melanoma LOX IMVI | 0.0 |
| Melanoma* (met) SK-MEL-5 | 0.0 |
| Adipose | 0.0 |

Column A - Rel. Exp. (%) Ag548, Run 167658585

[1170] TABLE ZF
Panel 2D

| Tissue Name | A | B |
|---|---|---|
| Normal Colon | 0.0 | 0.0 |
| CC Well to Mod Diff (ODO3866) | 5.6 | 4.6 |
| CC Margin (ODO3866) | 3.3 | 3.1 |
| CC Gr.2 rectosigmoid (ODO3868) | 0.0 | 0.0 |
| CC Margin (ODO3868) | 0.0 | 0.0 |
| CC Mod Diff (ODO3920) | 0.0 | 0.0 |
| CC Margin (ODO3920) | 0.0 | 0.0 |
| CC Gr.2 ascend colon (ODO3921) | 0.0 | 0.0 |
| CC Margin (ODO3921) | 6.3 | 0.0 |
| CC from Partial Hepatectomy | 0.0 | 0.0 |
| (ODO4309) Mets | | |
| Liver Margin (ODO4309) | 0.0 | 0.0 |
| Colon mets to lung (OD04451-01) | 4.6 | 2.4 |
| Lung Margin (OD04451-02) | 2.9 | 0.0 |
| Normal Prostate 6546-1 | 2.5 | 6.1 |
| Prostate Cancer (OD04410) | 0.0 | 0.0 |
| Prostate Margin (OD04410) | 3.1 | 0.0 |
| Prostate Cancer (OD04720-01) | 4.5 | 0.0 |
| Prostate Margin (OD04720-02) | 0.0 | 0.0 |
| Normal Lung 061010 | 6.6 | 0.0 |
| Lung Met to Muscle (ODO4286) | 12.9 | 3.7 |
| Muscle Margin (ODO4286) | 2.8 | 0.0 |
| Lung Malignant Cancer (OD03126) | 2.8 | 0.0 |
| Lung Margin (OD03126) | 3.0 | 0.0 |
| Lung Cancer (OD04404) | 0.0 | 0.0 |
| Lung Margin (OD04404) | 0.0 | 0.0 |
| Lung Cancer (OD04565) | 17.3 | 6.1 |
| Lung Margin (OD04565) | 1.4 | 0.0 |
| Lung Cancer (OD04237-01) | 0.0 | 0.0 |
| Lung Margin (OD04237-02) | 2.9 | 0.0 |
| Ocular Mel Met to Liver (ODO4310) | 5.1 | 0.0 |
| Liver Margin (ODO4310) | 0.0 | 2.0 |
| Melanoma Mets to Lung (OD04321) | 0.0 | 0.0 |
| Lung Margin (OD04321) | 0.0 | 0.0 |
| Normal Kidney | 0.0 | 0.0 |
| Kidney Ca, Nuclear grade 2 (OD04338) | 0.0 | 0.0 |
| Kidney Margin (OD04338) | 0.0 | 1.0 |
| Kidney Ca Nuclear grade 1/2 (OD04339) | 0.0 | 0.0 |
| Kidney Margin (OD04339) | 0.0 | 0.0 |
| Kidney Ca, Clear cell type (OD04340) | 0.0 | 2.8 |
| Kidney Margin (OD04340) | 0.0 | 0.0 |
| Kidney Ca, Nuclear grade 3 (OD04348) | 0.0 | 0.0 |
| Kidney Margin (OD04348) | 0.0 | 0.0 |
| Kidney Cancer (OD04622-01) | 0.0 | 0.0 |
| Kidney Margin (OD04622-03) | 4.6 | 3.8 |
| Kidney Cancer (OD04450-01) | 0.0 | 4.5 |
| Kidney Margin (OD04450-03) | 0.0 | 2.3 |
| Kidney Cancer 8120607 | 0.0 | 0.0 |
| Kidney Margin 8120608 | 0.0 | 0.0 |
| Kidney Cancer 8120613 | 1.6 | 2.6 |
| Kidney Margin 8120614 | 0.0 | 0.0 |
| Kidney Cancer 9010320 | 0.0 | 0.0 |
| Kidney Margin 9010321 | 0.0 | 0.0 |
| Normal Uterus | 0.0 | 8.8 |
| Uterus Cancer 064011 | 0.0 | 0.0 |
| Normal Thyroid | 2.8 | 2.7 |
| Thyroid Cancer 064010 | 0.0 | 4.5 |
| Thyroid Cancer A302152 | 1.8 | 0.0 |
| Thyroid Margin A302153 | 0.0 | 0.0 |
| Normal Breast | 2.5 | 0.0 |
| Breast Cancer (OD04566) | 2.3 | 0.0 |
| Breast Cancer (OD04590-01) | 0.0 | 0.0 |
| Breast Cancer Mets (OD04590-03) | 0.0 | 0.0 |
| Breast Cancer Metastasis (OD04655-05) | 0.0 | 0.0 |
| Breast Cancer 064006 | 0.0 | 0.0 |
| Breast Cancer 1024 | 5.8 | 0.0 |
| Breast Cancer 9100266 | 0.0 | 0.0 |
| Breast Margin 9100265 | 0.0 | 0.0 |
| Breast Cancer A209073 | 9.5 | 0.0 |
| Breast Margin A209073 | 0.0 | 0.0 |
| Normal Liver | 0.0 | 3.0 |
| Liver Cancer 064003 | 0.0 | 2.7 |
| Liver Cancer 1025 | 0.0 | 0.0 |
| Liver Cancer 1026 | 0.0 | 0.0 |
| Liver Cancer 6004-T | 0.0 | 0.0 |
| Liver Tissue 6004-N | 8.4 | 4.5 |
| Liver Cancer 6005-T | 0.0 | 0.0 |
| Liver Tissue 6005-N | 0.0 | 0.0 |
| Normal Bladder | 0.0 | 2.8 |
| Bladder Cancer 1023 | 0.0 | 5.0 |
| Bladder Cancer A302173 | 100.0 | 100.0 |
| Bladder Cancer (OD04718-01) | 0.0 | 0.0 |
| Bladder Normal Adjacent (OD04718-03) | 0.0 | 4.4 |
| Normal Ovary | 0.0 | 0.0 |
| Ovarian Cancer 064008 | 0.0 | 0.0 |
| Ovarian Cancer (OD04768-07) | 0.0 | 0.0 |
| Ovary Margin (OD04768-08) | 0.0 | 0.0 |
| Normal Stomach | 0.0 | 0.0 |
| Gastric Cancer 9060358 | 0.0 | 0.0 |
| Stomach Margin 9060359 | 0.0 | 0.0 |
| Gastric Cancer 9060395 | 0.0 | 0.0 |
| Stomach Margin 9060394 | 0.0 | 0.0 |
| Gastric Cancer 9060397 | 0.0 | 0.0 |
| Stomach Margin 9060396 | 0.0 | 0.0 |
| Gastric Cancer 064005 | 1.5 | 6.7 |

Column A - Rel. Exp. (%) Ag548, Run 145364354
Column B - Rel. Exp. (%) Ag548, Run 145506152

[1171] TABLE ZG
Panel 4D

| Tissue Name | A | B | C |
|---|---|---|---|
| Secondary Th1 act | 0.0 | 3.1 | 0.0 |
| Secondary Th2 act | 0.0 | 0.0 | 4.9 |
| Secondary Tr1 act | 0.0 | 0.0 | 0.0 |
| Secondary Th1 rest | 0.0 | 0.0 | 0.0 |
| Secondary Th2 rest | 0.0 | 0.0 | 0.0 |
| Secondary Tr1 rest | 0.0 | 7.1 | 0.0 |
| Primary Th1 act | 0.0 | 0.0 | 0.0 |
| Primary Th2 act | 0.0 | 1.1 | 0.0 |
| Primary Tr1 act | 0.0 | 0.0 | 0.0 |
| Primary Th1 rest | 0.0 | 0.0 | 0.0 |
| Primary Th2 rest | 0.0 | 0.0 | 0.0 |
| Primary Tr1 rest | 0.0 | 0.0 | 5.3 |
| CD45RA CD4 lymphocyte act | 0.0 | 0.0 | 0.0 |
| CD45RO CD4 lymphocyte act | 0.0 | 0.0 | 0.0 |
| CD8 lymphocyte act | 0.0 | 0.0 | 0.0 |
| Secondary CD8 lymphocyte rest | 0.0 | 0.0 | 0.0 |
| Secondary CD8 lymphocyte act | 0.0 | 0.0 | 0.0 |
| CD4 lymphocyte none | 0.0 | 0.0 | 0.0 |
| 2ry Th1/Th2/Tr1_anti-CD95 CH11 | 0.0 | 0.0 | 0.0 |
| LAK cells rest | 0.0 | 0.0 | 0.0 |
| LAK cells IL-2 | 5.8 | 0.0 | 0.0 |
| LAK cells IL-2 + IL-12 | 0.0 | 0.0 | 0.0 |
| LAK cells IL-2 + IFN gamma | 0.0 | 0.0 | 0.0 |
| LAK cells IL-2 + IL-18 | 0.0 | 0.0 | 0.0 |
| LAK cells PMA/ionomycin | 0.0 | 0.0 | 0.0 |
| NK Cells IL-2 rest | 0.0 | 0.0 | 0.0 |
| Two Way MLR 3 day | 0.0 | 3.3 | 0.0 |
| Two Way MLR 5 day | 0.0 | 0.0 | 0.0 |
| Two Way MLR 7 day | 0.0 | 0.0 | 0.0 |
| PBMC rest | 0.0 | 0.0 | 0.0 |
| PBMC PWM | 0.0 | 0.0 | 0.0 |
| PBMC PHA-L | 0.0 | 0.0 | 0.0 |
| Ramos (B cell) none | 0.0 | 0.0 | 0.0 |
| Ramos (B cell) ionomycin | 0.0 | 0.0 | 0.0 |
| B lymphocytes PWM | 0.0 | 0.0 | 0.0 |
| B lymphocytes CD40L and IL-4 | 0.0 | 0.0 | 0.0 |
| EOL-1 dbcAMP | 0.0 | 0.0 | 0.0 |
| EOL-1 dbcAMP PMA/ionomycin | 0.0 | 0.0 | 0.0 |
| Dendritic cells none | 3.5 | 0.0 | 0.0 |
| Dendritic cells LPS | 0.0 | 0.0 | 5.4 |
| Dendritic cells anti-CD40 | 0.0 | 0.0 | 0.0 |
| Monocytes rest | 0.0 | 0.0 | 0.0 |
| Monocytes LPS | 0.0 | 0.0 | 0.0 |
| Macrophages rest | 4.5 | 0.0 | 0.0 |
| Macrophages LPS | 2.4 | 8.0 | 0.0 |
| HUVEC none | 0.0 | 0.0 | 0.0 |
| HUVEC starved | 0.0 | 0.0 | 0.0 |
| HUVEC IL-1beta | 0.0 | 0.0 | 0.0 |
| HUVEC IFN gamma | 0.0 | 0.0 | 0.0 |
| HUVEC TNF alpha + IFN gamma | 0.0 | 0.0 | 0.0 |
| HUVEC TNF alpha + IL4 | 0.0 | 0.0 | 0.0 |
| HUVEC IL-11 | 0.0 | 0.0 | 0.0 |
| Lung Microvascular EC none | 0.0 | 2.9 | 0.0 |
| Lung Microvascular EC TNFalpha + | 0.0 | 0.0 | 0.0 |
| IL-1beta | | | |
| Microvascular Dermal EC none | 0.0 | 0.0 | 0.0 |
| Microsvasular Dermal EC | 0.0 | 0.0 | 0.0 |
| TNFalpha + IL-1beta | | | |
| Bronchial epithelium TNFalpha + | 6.5 | 0.0 | 0.0 |
| IL1beta | | | |
| Small airway epithelium none | 13.4 | 13.6 | 8.8 |
| Small airway epithelium TNFalpha + | 100.0 | 73.2 | 95.9 |
| IL-1beta | | | |
| Coronery artery SMC rest | 0.0 | 0.0 | 0.0 |
| Coronery artery SMC TNFalpha + | 0.0 | 0.0 | 0.0 |
| IL-1beta | | | |
| Astrocytes rest | 0.0 | 0.0 | 0.0 |
| Astrocytes TNFalpha + IL-1beta | 0.0 | 0.0 | 5.5 |
| KU-812 (Basophil) rest | 0.0 | 0.0 | 0.0 |
| KU-812 (Basophil) PMA/ionomycin | 0.0 | 0.0 | 0.0 |
| CCD1106 (Keratinocytes) none | 0.0 | 3.4 | 0.0 |
| CCD1106 (Keratinocytes) TNFalpha + | 4.3 | 2.4 | 0.0 |
| IL-1beta | | | |
| Liver cirrhosis | 22.5 | 21.0 | 4.1 |
| Lupus kidney | 0.0 | 0.0 | 0.0 |
| NCI-H292 none | 6.2 | 7.7 | 22.7 |
| NCI-H292 IL-4 | 4.2 | 0.0 | 23.0 |
| NCI-H292 IL-9 | 3.7 | 11.4 | 9.0 |
| NCI-H292 IL-13 | 17.0 | 13.2 | 17.1 |
| NCI-H292 IFN gamma | 0.0 | 2.3 | 13.0 |
| HPAEC none | 0.0 | 0.0 | 0.0 |
| HPAEC TNF alpha + IL-1 beta | 8.4 | 0.0 | 0.0 |
| Lung fibroblast none | 6.8 | 0.0 | 0.0 |
| Lung fibroblast TNF alpha + | 0.0 | 0.0 | 6.6 |
| IL-1 beta | | | |
| Lung fibroblast IL-4 | 0.0 | 0.0 | 0.0 |
| Lung fibroblast IL-9 | 0.0 | 0.0 | 0.0 |
| Lung fibroblast IL-13 | 0.0 | 0.0 | 0.0 |
| Lung fibroblast IFN gamma | 0.0 | 0.0 | 0.0 |
| Dermal fibroblast CCD1070 rest | 0.0 | 2.8 | 0.0 |
| Dermal fibroblast CCD1070 TNF alpha | 0.0 | 2.0 | 0.0 |
| Dermal fibroblast CCD1070 IL-1 beta | 0.0 | 0.0 | 6.3 |
| Dermal fibroblast IFN gamma | 0.0 | 0.0 | 0.0 |
| Dermal fibroblast IL-4 | 0.0 | 0.0 | 0.0 |
| IBD Colitis 2 | 3.5 | 2.5 | 19.9 |
| IBD Crohn's | 0.0 | 13.3 | 0.0 |
| Colon | 0.0 | 0.0 | 0.0 |
| Lung | 0.0 | 0.0 | 0.0 |
| Thymus | 0.0 | 0.0 | 0.0 |
| Kidney | 87.1 | 100.0 | 100.0 |

Column A - Rel. Exp. (%) Ag548, Run 145909057
Column B - Rel. Exp. (%) Ag548, Run 145928351
Column C - Rel. Exp. (%) Ag548, Run 164886875

[1172] General_screening₁₃ panel_v1.7 Summary: Ag7880 Prominent expressin of this gene was seen in uterus and adipose (CTs=30).

[1173] Panel 1.2 Summary: Ag548 This gene was expressed at a very low level in this panel. The highest level of expression was seen in thymus (CT=34.33). Thus, expression of this gene is useful as a marker to differentiate thymus tissues from other samples on this panel.

[1174] Panel 1.3D Summary: Ag548 This gene was expressed at a very low level in this panel. The highest level of expression was seen in thymus (CT=34.33). Thus, expression of this gene is useful as a marker to differentiate thymus tissues from other samples on this panel.

[1175] Panel 2D Summary: Ag548 The highest level of expression in this panel was detected in a bladder cancer sample (CTs=30). Thus, expression of the gene or its protein product is useful as a marker to differentiate between normal and cancerous bladder tissue and therapeutic modulation of the gene product using antibodies , chimeric molecules or small molecule inhibitors is effective in the treatment of bladder cancer.

[1176] Panel 4D Summary: Ag548 This transcript was induced in small airway epithelium activated with TNFalpha+IL-1beta and was present in normal kidney. The transcript encodes a putative serpin like molecule (serine proteinase inhibitor). Serpins participate in multiple biological processes and mutations that alter serpin function can result in pulmonary dysfunction including asthma and emphysema. Therapies designed with the protein encoded for by this transcript are important for the treatment of lung disorders such as asthma and emphysema.

[1177] AA. CG54764-02: CALGIZZARIN

[1178] Expression of gene CG54764-02 was assessed using the primer-probe sets Ag1212 and Ag1528, described in Tables AAA and AAB. Results of the RTQ-PCR runs are shown in Tables AAC, AAD, AAE, AAF, and AAG.

TABLE AAA
Probe Name Ag1212

| | | | | SEQ |
|---|---|---|---|---|
| | | | Start | ID |
| Primers | Sequences | Length | Position | No |
| Forward | 5′-gaccataacagctgcaaactct-3′ | 22 | 103 | 1387 |
| Probe | TET-5′-ttcatgaacactgtactggttgcctt-3′- | 26 | 145 | 1388 |
| | TAMRA | | | |
| Reverse | 5′-agcccttctggttctttgtg-3′ | 20 | 171 | 1389 |

[1179] TABLE AAB
Probe Name Ag1528

| | | | | SEQ |
|---|---|---|---|---|
| | | | Start | ID |
| Primers | Sequences | Length | Position | No |
| Forward | 5′-gaccataacagctgcaaactct-3′ | 22 | 103 | 1390 |
| Probe | TET-5′-tgaacactgtactggttgccttcaca-3′- | 26 | 149 | 1391 |
| | TAMRA | | | |
| Reverse | 5′-ccagagcccttctggttct-3′ | 19 | 176 | 1392 |

[1180] TABLE AAC
CNS_neurodegeneration_v1.0

| Tissue Name | A |
|---|---|
| AD 1 Hippo | 15.9 |
| AD 2 Hippo | 18.7 |
| AD 3 Hippo | 10.6 |
| AD 4 Hippo | 24.5 |
| AD 5 Hippo | 92.0 |
| AD 6 Hippo | 13.4 |
| Control 2 Hippo | 6.8 |
| Control 4 Hippo | 8.7 |
| Control (Path) 3 Hippo | 6.6 |
| AD 1 Temporal Ctx | 30.8 |
| AD 2 Temporal Ctx | 39.8 |
| AD 3 Temporal Ctx | 40.9 |
| AD 4 Temporal Ctx | 54.0 |
| AD 5 Inf Temporal Ctx | 51.8 |
| AD 5 Sup Temporal Ctx | 33.0 |
| AD 6 Inf Temporal Ctx | 27.2 |
| AD 6 Sup Temporal Ctx | 57.8 |
| Control 1 Temporal Ctx | 21.6 |
| Control 2 Temporal Ctx | 9.2 |
| Control 3 Temporal Ctx | 44.4 |
| Control 3 Temporal Ctx | 19.5 |
| Control (Path) 1 Temporal Ctx | 54.3 |
| Control (Path) 2 Temporal Ctx | 74.2 |
| Control (Path) 3 Temporal Ctx | 9.1 |
| Control (Path) 4 Temporal Ctx | 75.3 |
| AD 1 Occipital Ctx | 31.0 |
| AD 2 Occipital Ctx (Missing) | 2.8 |
| AD 3 Occipital Ctx | 20.6 |
| AD 4 Occipital Ctx | 55.1 |
| AD 5 Occipital Ctx | 16.5 |
| AD 6 Occipital Ctx | 27.5 |
| Control 1 Occipital Ctx | 7.8 |
| Control 2 Occipital Ctx | 17.1 |
| Control 3 Occipital Ctx | 36.6 |
| Control 4 Occipital Ctx | 8.4 |
| Control (Path) 1 Occipital Ctx | 68.8 |
| Control (Path) 2 Occipital Ctx | 43.5 |
| Control (Path) 3 Occipital Ctx | 0.3 |
| Control (Path) 4 Occipital Ctx | 100.0 |
| Control 1 Parietal Ctx | 23.2 |
| Control 2 Parietal Ctx | 38.2 |
| Control 3 Parietal Ctx | 17.9 |
| Control (Path) 1 Parietal Ctx | 42.9 |
| Control (Path) 2 Parietal Ctx | 50.7 |
| Control (Path) 3 Parietal Ctx | 5.7 |
| Control (Path) 4 Parietal Ctx | 84.7 |

Column A - Rel. Exp. (%) Ag1212, Run 206992259

[1181] TABLE AAD
Panel 1.3D

| Tissue Name | A | B | C |
|---|---|---|---|
| Liver adenocarcinoma | 17.1 | 16.2 | 11.8 |
| Pancreas | 0.0 | 0.0 | 0.0 |
| Pancreatic ca. CAPAN 2 | 3.9 | 0.6 | 2.3 |
| Adrenal gland | 0.0 | 0.0 | 0.0 |
| Thyroid | 0.0 | 0.0 | 0.0 |
| Salivary gland | 0.0 | 0.0 | 1.4 |
| Pituitary gland | 9.8 | 11.1 | 4.5 |
| Brain (fetal) | 100.0 | 32.5 | 25.9 |
| Brain (whole) | 80.1 | 23.7 | 36.6 |
| Brain (amygdala) | 29.5 | 27.0 | 46.3 |
| Brain (cerebellum) | 99.3 | 17.3 | 18.9 |
| Brain (hippocampus) | 64.6 | 32.1 | 100.0 |
| Brain (substantia nigra) | 10.2 | 0.0 | 4.0 |
| Brain (thalamus) | 27.2 | 17.0 | 24.7 |
| Cerebral Cortex | 30.8 | 100.0 | 66.0 |
| Spinal cord | 2.6 | 0.6 | 1.2 |
| glio/astro U87-MG | 38.4 | 49.3 | 17.6 |
| glio/astro U-118-MG | 12.9 | 8.8 | 3.7 |
| astrocytoma SW1783 | 8.4 | 7.3 | 9.7 |
| neuro*; met SK-N-AS | 1.4 | 4.8 | 5.6 |
| astrocytoma SF-539 | 10.2 | 7.4 | 8.0 |
| astrocytoma SNB-75 | 9.0 | 14.6 | 9.0 |
| glioma SNB-19 | 0.0 | 0.8 | 1.5 |
| glioma U251 | 13.7 | 7.1 | 4.4 |
| glioma SF-295 | 2.2 | 0.0 | 0.0 |
| Heart (fetal) | 0.0 | 0.0 | 0.0 |
| Heart | 1.6 | 0.0 | 0.0 |
| Skeletal muscle (fetal) | 3.1 | 1.4 | 5.3 |
| Skeletal muscle | 0.0 | 0.0 | 0.0 |
| Bone marrow | 0.0 | 0.0 | 0.0 |
| Thymus | 0.0 | 0.0 | 0.0 |
| Spleen | 0.0 | 0.0 | 0.0 |
| Lymph node | 0.0 | 0.0 | 0.0 |
| Colorectal | 0.0 | 0.9 | 2.7 |
| Stomach | 0.0 | 0.5 | 1.3 |
| Small intestine | 7.2 | 0.0 | 1.4 |
| Colon ca. SW480 | 0.0 | 0.0 | 1.2 |
| Colon ca.* SW620(SW480 met) | 0.0 | 1.1 | 0.0 |
| Colon ca. HT29 | 0.0 | 1.1 | 0.0 |
| Colon ca. HCT-116 | 0.0 | 0.0 | 0.0 |
| Colon ca. CaCo-2 | 0.0 | 0.0 | 0.0 |
| Colon ca. tissue(ODO3866) | 0.0 | 2.8 | 1.2 |
| Colon ca. HCC-2998 | 0.0 | 0.0 | 0.0 |
| Gastric ca.* (liver met) NCI-N87 | 0.0 | 0.0 | 0.0 |
| Bladder | 4.6 | 4.4 | 2.7 |
| Trachea | 0.0 | 3.5 | 1.2 |
| Kidney | 0.0 | 0.0 | 0.0 |
| Kidney (fetal) | 0.0 | 1.2 | 0.0 |
| Renal ca. 786-0 | 0.0 | 0.0 | 0.0 |
| Renal ca. A498 | 6.7 | 12.2 | 6.7 |
| Renal ca. RXF 393 | 0.0 | 0.0 | 0.0 |
| Renal ca. ACHN | 0.0 | 0.0 | 0.0 |
| Renal ca. UO-31 | 7.3 | 6.6 | 2.1 |
| Renal ca. TK-10 | 0.0 | 0.0 | 0.0 |
| Liver | 3.1 | 1.0 | 0.0 |
| Liver (fetal) | 0.0 | 0.0 | 0.0 |
| Liver ca. (hepatoblast) HepG2 | 0.0 | 0.0 | 0.0 |
| Lung | 0.0 | 0.0 | 0.0 |
| Lung (fetal) | 0.0 | 0.0 | 0.0 |
| Lung ca. (small cell) LX-1 | 0.0 | 0.0 | 0.0 |
| Lung ca. (small cell) NCI-H69 | 1.8 | 9.4 | 6.1 |
| Lung ca. (s. cell var.) SHP-77 | 2.1 | 0.0 | 0.0 |
| Lung ca. (large cell)NCI-H460 | 0.0 | 0.0 | 0.0 |
| Lung ca. (non-sm. cell) A549 | 0.0 | 3.5 | 4.2 |
| Lung ca. (non-s. cell) NCI-H23 | 2.5 | 0.0 | 0.0 |
| Lung ca. (non-s. cell) HOP-62 | 15.4 | 13.7 | 4.2 |
| Lung ca. (non-s. cl) NCI-H522 | 3.6 | 12.5 | 9.3 |
| Lung ca. (squam.) SW 900 | 0.0 | 0.0 | 0.0 |
| Lung ca. (squam.) NCI-H596 | 21.3 | 20.9 | 21.0 |
| Mammary gland | 5.1 | 7.4 | 0.0 |
| Breast ca.* (pl. ef) MCF-7 | 0.0 | 0.0 | 0.0 |
| Breast ca.* (pl. ef) MDA-MB-231 | 0.0 | 0.0 | 0.0 |
| Breast ca.* (pl. ef) T47D | 0.0 | 2.0 | 0.0 |
| Breast ca. BT-549 | 0.0 | 0.8 | 1.2 |
| Breast ca. MDA-N | 0.0 | 32.1 | 18.0 |
| Ovary | 0.0 | 0.0 | 0.0 |
| Ovarian ca. OVCAR-3 | 40.1 | 37.4 | 18.6 |
| Ovarian ca. OVCAR-4 | 0.0 | 0.0 | 2.6 |
| Ovarian ca. OVCAR-5 | 5.4 | 0.0 | 1.3 |
| Ovarian ca. OVCAR-8 | 4.4 | 1.2 | 4.3 |
| Ovarian ca. IGROV-1 | 0.0 | 1.1 | 0.0 |
| Ovarian ca.* (ascites) SK-OV-3 | 0.0 | 15.5 | 8.1 |
| Uterus | 0.0 | 0.0 | 0.0 |
| Placenta | 0.0 | 2.2 | 0.0 |
| Prostate | 2.6 | 0.0 | 0.0 |
| Prostate ca.* (bone met)PC-3 | 10.1 | 1.1 | 0.7 |
| Testis | 3.0 | 1.4 | 4.1 |
| Melanoma Hs688(A).T | 6.2 | 37.6 | 12.8 |
| Melanoma* (met) Hs688(B).T | 18.8 | 54.7 | 14.0 |
| Melanoma UACC-62 | 10.3 | 1.0 | 1.2 |
| Melanoma M14 | 85.3 | 9.6 | 26.4 |
| Melanoma LOX IMVI | 23.2 | 34.9 | 57.0 |
| Melanoma* (met) SK-MEL-5 | 9.6 | 0.0 | 14.6 |
| Adipose | 2.0 | 3.7 | 2.4 |

Column A - Rel. Exp. (%) Ag1212, Run 165519986
Column B - Rel. Exp. (%) Ag1528, Run 147327845
Column C - Rel. Exp. (%) Ag1528, Run 148390885

[1182] TABLE AAE
Panel 2D

| Tissue Name | A | B |
|---|---|---|
| Normal Colon | 7.4 | 8.5 |
| CC Well to Mod Diff (ODO3866) | 3.9 | 2.3 |
| CC Margin (ODO3866) | 0.0 | 2.7 |
| CC Gr.2 rectosigmoid (ODO3868) | 0.0 | 4.7 |
| CC Margin (ODO3868) | 0.0 | 0.0 |
| CC Mod Diff (ODO3920) | 0.0 | 0.0 |
| CC Margin (ODO3920) | 0.0 | 1.2 |
| CC Gr.2 ascend colon (ODO3921) | 0.0 | 0.0 |
| CC Margin (ODO3921) | 1.9 | 1.3 |
| CC from Partial Hepatectomy | 0.0 | 2.4 |
| (ODO4309) Mets | | |
| Liver Margin (ODO4309) | 0.0 | 1.3 |
| Colon mets to lung (OD04451-01) | 0.0 | 1.1 |
| Lung Margin (OD04451-02) | 0.0 | 0.0 |
| Normal Prostate 6546-1 | 0.0 | 1.2 |
| Prostate Cancer (OD04410) | 0.0 | 0.0 |
| Prostate Margin (OD04410) | 4.1 | 0.0 |
| Prostate Cancer (OD04720-01) | 4.0 | 0.0 |
| Prostate Margin (OD04720-02) | 0.0 | 1.1 |
| Normal Lung 061010 | 0.0 | 3.9 |
| Lung Met to Muscle (ODO4286) | 0.0 | 2.6 |
| Muscle Margin (ODO4286) | 8.7 | 0.0 |
| Lung Malignant Cancer (OD03126) | 0.0 | 0.0 |
| Lung Margin (OD03126) | 0.0 | 0.5 |
| Lung Cancer (OD04404) | 8.0 | 21.9 |
| Lung Margin (OD04404) | 0.0 | 0.0 |
| Lung Cancer (OD04565) | 3.2 | 1.0 |
| Lung Margin (OD04565) | 1.8 | 1.2 |
| Lung Cancer (OD04237-01) | 9.0 | 4.4 |
| Lung Margin (OD04237-02) | 0.0 | 0.0 |
| Ocular Mel Met to Liver (ODO4310) | 0.0 | 0.0 |
| Liver Margin (ODO4310) | 0.0 | 0.0 |
| Melanoma Mets to Lung (OD04321) | 10.7 | 9.5 |
| Lung Margin (OD04321) | 0.0 | 0.0 |
| Normal Kidney | 10.4 | 4.8 |
| Kidney Ca, Nuclear grade 2 (OD04338) | 0.0 | 0.0 |
| Kidney Margin (OD04338) | 0.0 | 0.0 |
| Kidney Ca Nuclear grade 1/2 (OD04339) | 0.0 | 0.0 |
| Kidney Margin (OD04339) | 0.0 | 0.0 |
| Kidney Ca, Clear cell type (OD04340) | 0.0 | 0.0 |
| Kidney Margin (OD04340) | 0.0 | 0.0 |
| Kidney Ca, Nuclear grade 3 (OD04348) | 0.0 | 1.1 |
| Kidney Margin (OD04348) | 3.4 | 0.6 |
| Kidney Cancer (OD04622-01) | 0.0 | 1.1 |
| Kidney Margin (OD04622-03) | 0.0 | 0.0 |
| Kidney Cancer (OD04450-01) | 0.0 | 0.0 |
| Kidney Margin (OD04450-03) | 0.0 | 6.7 |
| Kidney Cancer 8120607 | 0.0 | 0.0 |
| Kidney Margin 8120608 | 0.0 | 0.0 |
| Kidney Cancer 8120613 | 0.0 | 0.0 |
| Kidney Margin 8120614 | 1.2 | 0.5 |
| Kidney Cancer 9010320 | 0.5 | 1.1 |
| Kidney Margin 9010321 | 0.0 | 0.0 |
| Normal Uterus | 0.0 | 0.6 |
| Uterus Cancer 064011 | 0.0 | 0.0 |
| Normal Thyroid | 1.8 | 0.0 |
| Thyroid Cancer 064010 | 0.0 | 0.0 |
| Thyroid Cancer A302152 | 5.0 | 0.0 |
| Thyroid Margin A302153 | 0.0 | 0.0 |
| Normal Breast | 10.5 | 5.3 |
| Breast Cancer (OD04566) | 2.1 | 4.3 |
| Breast Cancer (OD04590-01) | 1.3 | 1.0 |
| Breast Cancer Mets (OD04590-03) | 0.0 | 0.0 |
| Breast Cancer Metastasis (OD04655-05) | 0.0 | 0.0 |
| Breast Cancer 064006 | 17.3 | 8.7 |
| Breast Cancer 1024 | 10.1 | 11.7 |
| Breast Cancer 9100266 | 0.0 | 1.0 |
| Breast Margin 9100265 | 11.0 | 1.9 |
| Breast Cancer A209073 | 9.1 | 5.2 |
| Breast Margin A209073 | 17.0 | 19.8 |
| Normal Liver | 0.0 | 0.0 |
| Liver Cancer 064003 | 1.8 | 1.1 |
| Liver Cancer 1025 | 1.9 | 1.1 |
| Liver Cancer 1026 | 0.0 | 0.0 |
| Liver Cancer 6004-T | 0.0 | 0.0 |
| Liver Tissue 6004-N | 3.6 | 1.7 |
| Liver Cancer 6005-T | 0.0 | 0.0 |
| Liver Tissue 6005-N | 0.0 | 0.0 |
| Normal Bladder | 4.2 | 2.4 |
| Bladder Cancer 1023 | 0.0 | 4.3 |
| Bladder Cancer A302173 | 100.0 | 100.0 |
| Bladder Cancer (OD04718-01) | 1.7 | 12.4 |
| Bladder Normal Adjacent (OD04718-03) | 1.9 | 0.9 |
| Normal Ovary | 0.0 | 0.0 |
| Ovarian Cancer 064008 | 0.0 | 9.4 |
| Ovarian Cancer (OD04768-07) | 0.0 | 0.0 |
| Ovary Margin (OD04768-08) | 0.0 | 0.0 |
| Normal Stomach | 0.0 | 0.9 |
| Gastric Cancer 9060358 | 0.0 | 0.8 |
| Stomach Margin 9060359 | 0.0 | 0.0 |
| Gastric Cancer 9060395 | 1.3 | 0.0 |
| Stomach Margin 9060394 | 0.0 | 0.0 |
| Gastric Cancer 9060397 | 0.0 | 0.0 |
| Stomach Margin 9060396 | 0.0 | 0.0 |
| Gastric Cancer 064005 | 0.0 | 2.6 |

Column A - Rel. Exp. (%) Ag1528, Run 145158111
Column B - Rel. Exp. (%) Ag1528, Run 147327848

[1183] TABLE AAF
Panel 3D

| Tissue Name | A |
|---|---|
| Daoy- Medulloblastoma | 2.6 |
| TE671- Medulloblastoma | 0.0 |
| D283 Med- Medulloblastoma | 0.0 |
| PFSK-1- Primitive Neuroectodermal | 10.6 |
| XF-498- CNS | 81.8 |
| SNB-78- Glioma | 8.8 |
| SF-268- Glioblastoma | 11.9 |
| T98G- Glioblastoma | 1.8 |
| SK-N-SH- Neuroblastoma (metastasis) | 27.7 |
| SF-295- Glioblastoma | 0.0 |
| Cerebellum | 84.7 |
| Cerebellum | 7.1 |
| NCI-H292- Mucoepidermoid lung carcinoma | 1.0 |
| DMS-114- Small cell lung cancer | 0.0 |
| DMS-79- Small cell lung cancer | 38.4 |
| NCI-H146- Small cell lung cancer | 0.0 |
| NCI-H526- Small cell lung cancer | 24.5 |
| NCI-N417- Small cell lung cancer | 9.4 |
| NCI-H82- Small cell lung cancer | 20.0 |
| NCI-H157- Squamous cell lung cancer | 39.2 |
| (metastasis) | |
| NCI-H1155- Large cell lung cancer | 0.0 |
| NCI-H1299- Large cell lung cancer | 60.7 |
| NCI-H727- Lung carcinoid | 0.0 |
| NCI-UMC-11- Lung carcinoid | 0.0 |
| LX-1- Small cell lung cancer | 0.0 |
| Colo-205- Colon cancer | 0.0 |
| KM12- Colon cancer | 5.8 |
| KM20L2- Colon cancer | 0.0 |
| NCI-H716- Colon cancer | 0.0 |
| SW-48- Colon adenocarcinoma | 0.0 |
| SW1116- Colon adenocarcinoma | 0.0 |
| LS 174T- Colon adenocarcinoma | 0.0 |
| SW-948- Colon adenocarcinoma | 2.2 |
| SW-480- Colon adenocarcinoma | 0.0 |
| NCI-SNU-5- Gastric carcinoma | 2.0 |
| KATO III- Gastric carcinoma | 68.8 |
| NCI-SNU-16- Gastric carcinoma | 0.0 |
| NCI-SNU-1- Gastric carcinoma | 13.8 |
| RF-1- Gastric adenocarcinoma | 0.0 |
| RF-48- Gastric adenocarcinoma | 0.0 |
| MKN-45- Gastric carcinoma | 0.0 |
| NCI-N87- Gastric carcinoma | 0.0 |
| OVCAR-5- Ovarian carcinoma | 0.0 |
| RL95-2- Uterine carcinoma | 0.0 |
| HelaS3- Cervical adenocarcinoma | 0.0 |
| Ca Ski- Cervical epidermoid carcinoma | 40.6 |
| (metastasis) | |
| ES-2- Ovarian clear cell carcinoma | 29.7 |
| Ramos- Stimulated with PMA/ionomycin 6 h | 4.5 |
| Ramos- Stimulated with PMA/ionomycin 14 h | 9.4 |
| MEG-01- Chronic myelogenous leukemia | 1.9 |
| (megokaryoblast) | |
| Raji- Burkitt's lymphoma | 9.8 |
| Daudi- Burkitt's lymphoma | 100.0 |
| U266- B-cell plasmacytoma | 0.0 |
| CA46- Burkitt's lymphoma | 2.0 |
| RL- non-Hodgkin's B-cell lymphoma | 0.0 |
| JM1- pre-B-cell lymphoma | 0.0 |
| Jurkat- T cell leukemia | 0.0 |
| TF-1- Erythroleukemia | 1.6 |
| HUT 78- T-cell lymphoma | 0.0 |
| U937- Histiocytic lymphoma | 0.0 |
| KU-812- Myelogenous leukemia | 0.0 |
| 769-P- Clear cell renal carcinoma | 0.0 |
| Caki-2- Clear cell renal carcinoma | 0.0 |
| SW 839- Clear cell renal carcinoma | 0.0 |
| Rhabdoid kidney tumor | 0.0 |
| Hs766T- Pancreatic carcinoma (LN | 30.8 |
| metastasis) | |
| CAPAN-1- Pancreatic adenocarcinoma (liver | 6.8 |
| metastasis) | |
| SU86.86- Pancreatic carcinoma (liver | 50.7 |
| metastasis) | |
| BxPC-3- Pancreatic adenocarcinoma | 26.8 |
| HPAC- Pancreatic adenocarcinoma | 4.4 |
| MIA PaCa-2- Pancreatic carcinoma | 10.2 |
| CFPAC-1- Pancreatic ductal adenocarcinoma | 3.8 |
| PANC-1- Pancreatic epithelioid ductal | 12.7 |
| carcinoma | |
| T24- Bladder carcinma (transitional cell) | 33.4 |
| 5637- Bladder carcinoma | 24.1 |
| HT-1197- Bladder carcinoma | 19.9 |
| UM-UC-3- Bladder carcinma (transitional cell) | 5.1 |
| A204- Rhabdomyosarcoma | 0.0 |
| HT-1080- Fibrosarcoma | 95.3 |
| MG-63- Osteosarcoma | 0.0 |
| SK-LMS-1- Leiomyosarcoma (vulva) | 35.8 |
| SJRH30- Rhabdomyosarcoma (met to bone | 13.6 |
| marrow) | |
| A431- Epidermoid carcinoma | 0.0 |
| WM266-4- Melanoma | 12.3 |
| DU 145- Prostate carcinoma (brain | 0.0 |
| metastasis) | |
| MDA-MB-468- Breast adenocarcinoma | 5.1 |
| SCC-4- Squamous cell carcinoma of tongue | 0.0 |
| SCC-9- Squamous cell carcinoma of tongue | 0.0 |
| SCC-15- Squamous cell carcinoma of tongue | 0.0 |
| CAL 27- Squamous cell carcinoma of tongue | 0.0 |

Column A - Rel. Exp. (%) Ag1212, Run 164038901

[1184] TABLE AAG
Panel 4D

| Tissue Name | A | B | C | D |
|---|---|---|---|---|
| Secondary Th1 act | 0.1 | 0.0 | 0.0 | 0.0 |
| Secondary Th2 act | 0.0 | 0.0 | 0.0 | 0.0 |
| Secondary Tr1 act | 0.0 | 0.1 | 0.0 | 0.0 |
| Secondary Th1 rest | 0.0 | 0.0 | 0.0 | 0.0 |
| Secondary Th2 rest | 0.0 | 0.0 | 0.0 | 0.0 |
| Secondary Tr1 rest | 0.0 | 0.0 | 0.0 | 0.1 |
| Primary Th1 act | 0.0 | 0.0 | 0.0 | 0.0 |
| Primary Th2 act | 0.0 | 0.0 | 0.0 | 0.0 |
| Primary Tr1 act | 0.0 | 0.0 | 0.0 | 0.0 |
| Primary Th1 rest | 0.0 | 0.0 | 0.0 | 0.0 |
| Primary Th2 rest | 0.0 | 0.0 | 0.0 | 0.0 |
| Primary Tr1 rest | 0.0 | 0.0 | 0.0 | 0.0 |
| CD45RA CD4 lymphocyte act | 0.7 | 0.6 | 0.8 | 0.8 |
| CD45RO CD4 lymphocyte act | 0.0 | 0.0 | 0.0 | 0.0 |
| CD8 lymphocyte act | 0.0 | 0.0 | 0.0 | 0.0 |
| Secondary CD8 lymphocyte rest | 0.0 | 0.0 | 0.0 | 0.0 |
| Secondary CD8 lymphocyte act | 0.0 | 0.0 | 0.0 | 0.9 |
| CD4 lymphocyte none | 0.0 | 0.0 | 0.0 | 0.0 |
| 2ry Th1/Th2/Tr1_anti-CD95 CH11 | 0.0 | 0.0 | 0.0 | 0.0 |
| LAK cells rest | 0.0 | 0.0 | 0.0 | 0.0 |
| LAK cells IL-2 | 0.0 | 0.0 | 0.1 | 0.0 |
| LAK cells IL-2 + IL-12 | 0.2 | 0.0 | 0.0 | 0.1 |
| LAK cells IL-2 + IFN gamma | 0.0 | 0.2 | 0.0 | 0.0 |
| LAK cells IL-2 + IL-18 | 0.0 | 0.0 | 0.0 | 0.0 |
| LAK cells PMA/ionomycin | 0.0 | 0.0 | 0.0 | 0.0 |
| NK Cells IL-2 rest | 0.0 | 0.0 | 0.0 | 0.0 |
| Two Way MLR 3 day | 0.0 | 0.0 | 0.0 | 0.0 |
| Two Way MLR 5 day | 0.0 | 0.0 | 0.0 | 0.0 |
| Two Way MLR 7 day | 0.0 | 0.0 | 0.0 | 0.0 |
| PBMC rest | 0.0 | 0.0 | 0.0 | 0.0 |
| PBMC PWM | 0.0 | 1.1 | 0.2 | 0.0 |
| PBMC PHA-L | 0.0 | 0.0 | 0.0 | 0.1 |
| Ramos (B cell) none | 42.6 | 21.0 | 19.2 | 21.6 |
| Ramos (B cell) ionomycin | 100.0 | 100.0 | 100.0 | 100.0 |
| B lymphocytes PWM | 0.3 | 0.5 | 0.5 | 0.2 |
| B lymphocytes CD40L and IL-4 | 3.1 | 4.0 | 4.8 | 7.2 |
| EOL-1 dbcAMP | 0.0 | 0.0 | 0.0 | 0.0 |
| EOL-1 dbcAMP PMA/ionomycin | 0.0 | 0.0 | 0.0 | 0.0 |
| Dendritic cells none | 0.2 | 0.1 | 0.1 | 0.2 |
| Dendritic cells LPS | 0.0 | 0.0 | 0.0 | 0.0 |
| Dendritic cells anti-CD40 | 0.1 | 0.0 | 0.0 | 0.0 |
| Monocytes rest | 0.1 | 0.0 | 0.0 | 0.0 |
| Monocytes LPS | 0.1 | 0.0 | 0.0 | 0.0 |
| Macrophages rest | 0.9 | 0.0 | 0.0 | 0.0 |
| Macrophages LPS | 0.1 | 0.0 | 0.0 | 6.0 |
| HUVEC none | 3.8 | 4.0 | 3.8 | 2.9 |
| HUVEC starved | 6.7 | 5.1 | 6.3 | 5.0 |
| HUVEC IL-1beta | 2.3 | 1.3 | 2.8 | 1.0 |
| HUVEC IFN gamma | 2.2 | 2.0 | 2.2 | 1.3 |
| HUVEC TNF alpha + IFN gamma | 0.3 | 0.6 | 0.9 | 0.8 |
| HUVEC TNF alpha + IL4 | 1.0 | 1.3 | 2.3 | 1.4 |
| HUVEC IL-11 | 2.1 | 1.9 | 3.0 | 2.6 |
| Lung Microvascular EC none | 6.8 | 5.1 | 4.0 | 3.9 |
| Lung Microvascular EC TNFalpha + | 1.9 | 2.0 | 3.6 | 9.8 |
| IL-1beta | | | | |
| Microvascular Dermal EC none | 8.4 | 6.0 | 4.6 | 7.2 |
| Microsvasular Dermal EC TNFalpha + | 1.6 | 3.5 | 2.5 | 3.6 |
| IL-1beta | | | | |
| Bronchial epithelium TNFalpha + | 1.6 | 0.0 | 0.5 | 0.0 |
| IL1beta | | | | |
| Small airway epithelium none | 0.2 | 0.5 | 0.2 | 0.3 |
| Small airway epithelium TNFalpha + | 2.8 | 1.9 | 1.8 | 2.2 |
| IL-1beta | | | | |
| Coronery artery SMC rest | 1.7 | 1.6 | 1.2 | 0.5 |
| Coronery artery SMC TNFalpha + | 0.6 | 0.9 | 1.0 | 0.2 |
| IL-1beta | | | | |
| Astrocytes rest | 0.9 | 2.0 | 0.6 | 0.8 |
| Astrocytes TNFalpha + IL-1beta | 0.7 | 0.2 | 0.5 | 0.7 |
| KU-812 (Basophil) rest | 0.1 | 0.0 | 0.0 | 0.0 |
| KU-812 (Basophil) PMA/ionomycin | 0.0 | 0.0 | 0.0 | 0.0 |
| CCD1106 (Keratinocytes) none | 3.0 | 4.5 | 4.1 | 3.5 |
| CCD1106 (Keratinocytes) TNFalpha + | 11.7 | 0.7 | 1.0 | 0.4 |
| IL-1beta | | | | |
| Liver cirrhosis | 1.5 | 1.0 | 0.7 | 0.1 |
| Lupus kidney | 0.0 | 0.0 | 0.0 | 0.0 |
| NCI-H292 none | 0.0 | 0.1 | 0.0 | 0.0 |
| NCI-H292 IL-4 | 0.5 | 2.3 | 0.3 | 0.2 |
| NCI-H292 IL-9 | 0.1 | 0.1 | 0.2 | 0.3 |
| NCI-H292 IL-13 | 0.2 | 0.7 | 0.2 | 0.0 |
| NCI-H292 IFN gamma | 0.0 | 0.1 | 0.0 | 0.1 |
| HPAEC none | 7.6 | 8.7 | 8.2 | 7.5 |
| HPAEC TNF alpha + IL-1 beta | 2.0 | 2.7 | 3.0 | 2.0 |
| Lung fibroblast none | 0.3 | 0.2 | 0.0 | 0.2 |
| Lung fibroblast TNF alpha + | 0.0 | 0.1 | 0.0 | 0.0 |
| IL-1 beta | | | | |
| Lung fibroblast IL-4 | 0.1 | 0.3 | 0.5 | 0.1 |
| Lung fibroblast IL-9 | 0.3 | 1.0 | 0.6 | 0.1 |
| Lung fibroblast IL-13 | 1.4 | 0.7 | 0.1 | 0.3 |
| Lung fibroblast IFN gamma | 0.0 | 0.4 | 0.2 | 0.3 |
| Dermal fibroblast CCD1070 rest | 11.4 | 8.8 | 8.7 | 4.9 |
| Dermal fibroblast CCD1070 TNF alpha | 6.7 | 8.1 | 9.2 | 8.5 |
| Dermal fibroblast CCD1070 IL-1 beta | 4.5 | 2.1 | 2.5 | 4.7 |
| Dermal fibroblast IFN gamma | 0.8 | 1.4 | 1.0 | 0.1 |
| Dermal fibroblast IL-4 | 1.0 | 1.1 | 1.3 | 1.4 |
| IBD Colitis 2 | 0.0 | 0.1 | 0.1 | 0.2 |
| IBD Crohn's | 0.2 | 0.0 | 0.0 | 0.0 |
| Colon | 0.0 | 0.0 | 0.1 | 0.0 |
| Lung | 0.0 | 0.1 | 0.0 | 0.0 |
| Thymus | 0.5 | 0.3 | 0.2 | 0.4 |
| Kidney | 0.1 | 0.1 | 0.0 | 0.0 |

Column A - Rel. Exp. (%) Ag1212, Run 140407622
Column B - Rel. Exp. (%) Ag1528, Run 147327849
Column C - Rel. Exp. (%) Ag1528, Run 148106604
Column D - Rel. Exp. (%) Ag1528, Run 162699795

[1185] CNS_neurodegeneration_v1.0 Summary: Ag1212 Highest expression of this gene, a homolog of calgizzarin, was seen in the hippocampus of a patient with Alzheimer's disease. The gene was also expressed in numerous regions associated with Alzheimer's neurodegeneration including the hippocampus, cortex and amygdala, as seen below in Panels 1.2 and 1.3D. Calgizzarin (S100C, S100A11) accumulation in the nucleus is associated with cellular senescence, which may be critical in aging and age-related disorders such as Alzheimer's disease. Agents that bind S100C are cardioprotective and have been proven useful in extending life. Agents that block the action or nuclear localization of this gene or gene product are useful in the treatment of Alzheimer's disease and are effective in prolonging lifespan.

[1186] Panel 1.3D Summary: Ag1212/Ag1528 Highest expression of this gene was detected in the cortex, the fetal brain, and the hippocampus (CTs=31-33), with moderate expression across many regions of the brain. In addition, a substantial number of samples derived from melanoma and brain cancer cell lines showed expression of this gene. Thus, the expression of this gene is useful as a marker to distinguish melanoma cell lines, brain cancer cell lines and brain tissue from other samples in the panel. Therapeutic modulation of this gene or gene product, through the use of small molecule drugs, antibodies or protein therapeutics, is of benefit in the treatment of melanoma or brain cancer.

[1187] Panel 2D Summary: Ag1528 Highest expression of this gene was observed in bladder cancer (CTs=31), with significant over-expression in the bladder cancer samples when compared to expression in the normal adjacent tissue. There was also substantial expression in a cluster of samples derived from breast tissue. Expression of this gene is useful as a marker to distinguish bladder cancer and breast tissue from other samples in the panel. Therapeutic modulation of the expression of this gene or this gene product, through the use of small molecule drugs, antibodies or protein therapeutics is of use in the treatment of bladder cancer or breast disease.

[1188] Panel 3D Summary: Ag1212 Highest expression of this gene was seen in a cell line derived from a lymphoma cell line (Daudi) (CT=31.2). Low but significant expression was also seen in cell lines derived from brain cancer and lung cancer, as is seen in Panel 1.3D.

[1189] Panel 4D Summary: Ag1212/Ag1528 Highest expression of this gene was seen in ionomycin treated Ramos B cells (CTs=26-28). Lower levels of expression were also seen in dermal fibroblasts, HUVEC endothelial cells, and keratinocytes. The expression in keratinocytes of this gene product, a homolog of calgizzarin, is consistent with Robinson (J. Biol. Chem. 272: 12035.) Therapeutic modulation of the expression or function of this gene or gene product, through the use antibodies or protein therapeutics, is beneficial in the treatment of disease states associated with hyperactivation of keratinocytes. Higher expression of the gene product in a B cell line compared to the expression in a primary B cell line shows a role for the protein encoded by this gene in cell growth and/or differentiation. Therapeutic modulation of the expression or function of this gene product, through the use antibodies is beneficial in the treatment of B cell lymphomas.

[1190] AB. CG55033-01 and CG55033-04 and CG55033-05: LRR Domain Containing Protein

[1191] Expression of gene CG55033-01 and variants CG55033-04 and CG55033-05 was assessed using the primer-probe sets Ag1094, Ag6719 and Ag6725, described in Tables ABA, ABB and ABC. Results of the RTQ-PCR runs are shown in Tables ABE, ABF, ABG and ABH. Please note that Ag6725 is specific for the CG55033-04 and CG55033-05 variants only.

TABLE ABA
Probe Name Ag1094

| | | | | SEQ |
|---|---|---|---|---|
| | | | Start | ID |
| Primers | Sequences | Length | Position | No |
| Forward | 5′-atggactggaaaacctggaa-3′ | 20 | 398 | 1393 |
| Probe | TET-5′-tcctgcaagcagataacaattttatcaca-3′- | 29 | 419 | 1394 |
| | TAMRA | | | |
| Reverse | 5′-tgctaaaggcacttggttca-3′ | 20 | 453 | 1395 |

[1192] TABLE ABB
Probe Name Ag6719

| | | | | SEQ |
|---|---|---|---|---|
| | | | Start | ID |
| Primers | Sequences | Length | Position | No |
| Forward | 5′-ggaaaatcattcaccactcaca-3′ | 22 | 1575 | 1396 |
| Probe | TET-5′-acaaaaccacgaaccaatcaacagaa-3′- | 26 | 1613 | 1397 |
| | TAMRA | | | |
| Reverse | 5′-tctgtacaatgagctggcatct-3′ | 22 | 1653 | 1398 |

[1193] TABLE ABC
Probe Name Ag6725

| | | | | |
|---|---|---|---|---|
| | | | | SEQ |
| | | | Start | ID |
| Primers | Sequences | Length | Position | No |

| | | | | |
|---|---|---|---|---|
| Forward | 5′-gaagctgtggattcatctctttt-3′ | 23 | 3 | 1399 |
| Probe | TET-5′-catctctccttgcctgtatatctttacactcc- | 32 | 29 | 1400 |
| | TAMRA | | | |
| Reverse | 5′-ggatgagagcactggagtttg-3′ | 21 | 61 | 1401 |

[1194] TABLE ABD
Ardais Panel v.1.0

| Tissue Name | A |
|---|---|
| 136799_Lung cancer(362) | 0.1 |
| 136800_Lung NAT(363) | 4.8 |
| 136813_Lung cancer(372) | 37.4 |
| 136814_Lung NAT(373) | 2.8 |
| 136815_Lung cancer(374) | 19.9 |
| 136816_Lung NAT(375) | 4.3 |
| 136791_Lung cancer(35A) | 0.5 |
| 136795_Lung cancer(35E) | 100.0 |
| 136797_Lung cancer(360) | 0.2 |
| 136794_Lung NAT(35D) | 5.0 |
| 136818_Lung NAT(377) | 5.4 |
| 136787_lung cancer(356) | 0.2 |
| 136788_Lung NAT(357) | 0.7 |
| 136804_Lung cancer(369) | 1.1 |
| 136805_Lung NAT(36A) | 2.5 |
| 136806_Lung cancer(36B) | 18.2 |
| 136807_Lung NAT(36C) | 2.4 |
| 136789_lung cancer(358) | 0.7 |
| 136802_Lung cancer(365) | 0.1 |
| 136803_Lung cancer(368) | 1.1 |
| 136811_Lung cancer(370) | 4.5 |
| 136810_Lung NAT(36F) | 32.1 |

Column A - Rel. Exp. (%) Ag1094, Run 263147830

[1195] TABLE ABE
General_screening_panel_v1.6

| Tissue Name | A |
|---|---|
| Adipose | 0.7 |
| Melanoma* Hs688(A).T | 0.0 |
| Melanoma* Hs688(B).T | 0.0 |
| Melanoma* M14 | 0.0 |
| Melanoma* LOXIMVI | 0.0 |
| Melanoma* SK-MEL-5 | 0.6 |
| Squamous cell carcinoma SCC-4 | 7.4 |
| Testis Pool | 0.5 |
| Prostate ca.* (bone met) PC-3 | 28.1 |
| Prostate Pool | 6.2 |
| Placenta | 0.0 |
| Uterus Pool | 0.3 |
| Ovarian ca. OVCAR-3 | 0.4 |
| Ovarian ca. SK-OV-3 | 0.4 |
| Ovarian ca. OVCAR-4 | 0.0 |
| Ovarian ca. OVCAR-5 | 10.3 |
| Ovarian ca. IGROV-1 | 10.2 |
| Ovarian ca. OVCAR-8 | 1.0 |
| Ovary | 0.0 |
| Breast ca. MCF-7 | 0.8 |
| Breast ca. MDA-MB-231 | 0.0 |
| Breast ca. BT 549 | 0.9 |
| Breast ca. T47D | 0.0 |
| Breast ca. MDA-N | 0.0 |
| Breast Pool | 1.2 |
| Trachea | 4.6 |
| Lung | 0.0 |
| Fetal Lung | 14.4 |
| Lung ca. NCI-N417 | 0.0 |
| Lung ca. LX-1 | 0.0 |
| Lung ca. NCI-H146 | 16.8 |
| Lung ca. SHP-77 | 100.0 |
| Lung ca. A549 | 2.7 |
| Lung ca. NCI-H526 | 0.0 |
| Lung ca. NCI-H23 | 12.9 |
| Lung ca. NCI-H460 | 0.0 |
| Lung ca. HOP-62 | 3.2 |
| Lung ca. NCI-H522 | 0.1 |
| Liver | 0.0 |
| Fetal Liver | 2.7 |
| Liver ca. HepG2 | 0.0 |
| Kidney Pool | 0.4 |
| Fetal Kidney | 7.8 |
| Renal ca. 786-0 | 0.0 |
| Renal ca. A498 | 0.5 |
| Renal ca. ACHN | 0.0 |
| Renal ca. UO-31 | 0.0 |
| Renal ca. TK-10 | 0.0 |
| Bladder | 0.1 |
| Gastric ca. (liver met.) NCI-N87 | 9.5 |
| Gastric ca. KATO III | 9.5 |
| Colon ca. SW-948 | 1.0 |
| Colon ca. SW480 | 0.0 |
| Colon ca.* (SW480 met) SW620 | 0.4 |
| Colon ca. HT29 | 15.5 |
| Colon ca. HCT-116 | 0.0 |
| Colon ca. CaCo-2 | 0.0 |
| Colon cancer tissue | 0.0 |
| Colon ca. SW1116 | 0.0 |
| Colon ca. Colo-205 | 0.0 |
| Colon ca. SW-48 | 0.0 |
| Colon Pool | 1.0 |
| Small Intestine Pool | 0.9 |
| Stomach Pool | 1.1 |
| Bone Marrow Pool | 0.6 |
| Fetal Heart | 0.9 |
| Heart Pool | 0.2 |
| Lymph Node Pool | 0.5 |
| Fetal Skeletal Muscle | 0.6 |
| Skeletal Muscle Pool | 0.0 |
| Spleen Pool | 0.0 |
| Thymus Pool | 1.5 |
| CNS cancer (glio/astro) U87-MG | 0.2 |
| CNS cancer (glio/astro) U-118-MG | 0.7 |
| CNS cancer (neuro; met) SK-N-AS | 18.0 |
| CNS cancer (astro) SF-539 | 0.0 |
| CNS cancer (astro) SNB-75 | 6.3 |
| CNS cancer (glio) SNB-19 | 7.4 |
| CNS cancer (glio) SF-295 | 68.3 |
| Brain (Amygdala) Pool | 0.6 |
| Brain (cerebellum) | 0.2 |
| Brain (fetal) | 0.7 |
| Brain (Hippocampus) Pool | 0.3 |
| Cerebral Cortex Pool | 0.1 |
| Brain (Substantia nigra) Pool | 0.1 |
| Brain (Thalamus) Pool | 0.8 |
| Brain (whole) | 0.1 |
| Spinal Cord Pool | 0.3 |
| Adrenal Gland | 0.0 |
| Pituitary gland Pool | 0.0 |
| Salivary Gland | 0.5 |
| Thyroid (female) | 0.0 |
| Pancreatic ca. CAPAN2 | 0.0 |
| Pancreas Pool | 0.0 |

Column A - Rel. Exp. (%) Ag6719, Run 277223815

[1196] TABLE ABF
Panel 2D

| Tissue Name | A | B |
|---|---|---|
| Normal Colon | 12.4 | 11.4 |
| CC Well to Mod Diff (ODO3866) | 0.1 | 0.0 |
| CC Margin (ODO3866) | 1.0 | 1.5 |
| CC Gr.2 rectosigmoid (ODO3868) | 0.3 | 0.1 |
| CC Margin (ODO3868) | 0.4 | 0.2 |
| CC Mod Diff (ODO3920) | 0.1 | 0.1 |
| CC Margin (ODO3920) | 0.8 | 0.8 |
| CC Gr.2 ascend colon (ODO3921) | 2.4 | 2.2 |
| CC Margin (ODO3921) | 2.0 | 1.9 |
| CC from Partial Hepatectomy | 0.0 | 0.0 |
| (ODO4309) Mets | | |
| Liver Margin (ODO4309) | 0.2 | 0.3 |
| Colon mets to lung (OD04451-01) | 0.1 | 0.1 |
| Lung Margin (OD04451-02) | 0.9 | 0.6 |
| Normal Prostate 6546-1 | 2.7 | 3.0 |
| Prostate Cancer (OD04410) | 1.5 | 1.4 |
| Prostate Margin (OD04410) | 6.5 | 8.0 |
| Prostate Cancer (OD04720-01) | 5.9 | 6.1 |
| Prostate Margin (OD04720-02) | 14.1 | 12.6 |
| Normal Lung 061010 | 3.3 | 3.5 |
| Lung Met to Muscle (ODO4286) | 0.2 | 0.2 |
| Muscle Margin (ODO4286) | 0.0 | 0.0 |
| Lung Malignant Cancer (OD03126) | 7.9 | 6.0 |
| Lung Margin (OD03126) | 1.8 | 2.5 |
| Lung Cancer (OD04404) | 24.8 | 21.6 |
| Lung Margin (OD04404) | 1.8 | 1.7 |
| Lung Cancer (OD04565) | 0.7 | 1.2 |
| Lung Margin (OD04565) | 0.5 | 0.7 |
| Lung Cancer (OD04237-01) | 13.5 | 12.5 |
| Lung Margin (OD04237-02) | 1.4 | 1.0 |
| Ocular Mel Met to Liver (ODO4310) | 0.0 | 0.0 |
| Liver Margin (ODO4310) | 0.2 | 0.4 |
| Melanoma Mets to Lung (OD04321) | 0.4 | 0.2 |
| Lung Margin (OD04321) | 2.5 | 1.2 |
| Normal Kidney | 0.2 | 0.1 |
| Kidney Ca, Nuclear grade 2 (OD04338) | 0.0 | 0.0 |
| Kidney Margin (OD04338) | 0.2 | 0.2 |
| Kidney Ca Nuclear grade 1/2 (OD04339) | 0.0 | 0.0 |
| Kidney Margin (OD04339) | 0.1 | 0.0 |
| Kidney Ca, Clear cell type (OD04340) | 0.1 | 0.2 |
| Kidney Margin (OD04340) | 0.1 | 0.2 |
| Kidney Ca, Nuclear grade 3 (OD04348) | 0.0 | 0.0 |
| Kidney Margin (OD04348) | 0.0 | 0.1 |
| Kidney Cancer (OD04622-01) | 0.4 | 0.4 |
| Kidney Margin (OD04622-03) | 0.0 | 0.0 |
| Kidney Cancer (OD04450-01) | 0.0 | 0.0 |
| Kidney Margin (OD04450-03) | 0.0 | 0.1 |
| Kidney Cancer 8120607 | 0.4 | 0.3 |
| Kidney Margin 8120608 | 0.0 | 0.0 |
| Kidney Cancer 8120613 | 0.0 | 0.0 |
| Kidney Margin 8120614 | 0.0 | 0.0 |
| Kidney Cancer 9010320 | 0.1 | 0.0 |
| Kidney Margin 9010321 | 0.0 | 0.0 |
| Normal Uterus | 0.1 | 0.0 |
| Uterus Cancer 064011 | 0.5 | 0.6 |
| Normal Thyroid | 0.5 | 0.4 |
| Thyroid Cancer 064010 | 0.0 | 0.1 |
| Thyroid Cancer A302152 | 0.1 | 0.1 |
| Thyroid Margin A302153 | 0.2 | 0.1 |
| Normal Breast | 5.5 | 5.6 |
| Breast Cancer (OD04566) | 0.5 | 0.7 |
| Breast Cancer (OD04590-01) | 3.0 | 3.9 |
| Breast Cancer Mets (OD04590-03) | 1.4 | 1.7 |
| Breast Cancer Metastasis (OD04655-05) | 100.0 | 100.0 |
| Breast Cancer 064006 | 1.7 | 2.0 |
| Breast Cancer 1024 | 0.8 | 0.8 |
| Breast Cancer 9100266 | 3.5 | 4.1 |
| Breast Margin 9100265 | 3.5 | 4.2 |
| Breast Cancer A209073 | 0.7 | 0.7 |
| Breast Margin A209073 | 1.1 | 1.3 |
| Normal Liver | 2.0 | 1.7 |
| Liver Cancer 064003 | 0.0 | 0.1 |
| Liver Cancer 1025 | 0.3 | 0.3 |
| Liver Cancer 1026 | 0.0 | 0.0 |
| Liver Cancer 6004-T | 0.3 | 0.1 |
| Liver Tissue 6004-N | 0.0 | 0.1 |
| Liver Cancer 6005-T | 0.0 | 0.0 |
| Liver Tissue 6005-N | 0.1 | 0.1 |
| Normal Bladder | 0.2 | 0.1 |
| Bladder Cancer 1023 | 3.0 | 3.1 |
| Bladder Cancer A302173 | 1.0 | 0.8 |
| Bladder Cancer (OD04718-01) | 0.0 | 0.1 |
| Bladder Normal Adjacent (OD04718-03) | 4.1 | 3.4 |
| Normal Ovary | 0.1 | 0.0 |
| Ovarian Cancer 064008 | 1.6 | 1.4 |
| Ovarian Cancer (OD04768-07) | 0.0 | 0.0 |
| Ovary Margin (OD04768-08) | 0.1 | 0.0 |
| Normal Stomach | 1.0 | 1.7 |
| Gastric Cancer 9060358 | 0.2 | 0.2 |
| Stomach Margin 9060359 | 0.1 | 0.2 |
| Gastric Cancer 9060395 | 0.4 | 0.7 |
| Stomach Margin 9060394 | 0.4 | 0.4 |
| Gastric Cancer 9060397 | 0.1 | 0.3 |
| Stomach Margin 9060396 | 0.1 | 0.2 |
| Gastric Cancer 064005 | 1.0 | 1.3 |

Column A - Rel. Exp. (%) Ag1094, Run 148015599
Column B - Rel. Exp. (%) Ag1094, Run 148572893

[1197] TABLE ABG
Panel 3D

| Tissue Name | A |
|---|---|
| Daoy- Medulloblastoma | 0.0 |
| TE671- Medulloblastoma | 0.2 |
| D283 Med- Medulloblastoma | 0.2 |
| PFSK-1- Primitive Neuroectodermal | 1.6 |
| XF-498- CNS | 30.4 |
| SNB-78- Glioma | 0.7 |
| SF-268- Glioblastoma | 0.0 |
| T98G- Glioblastoma | 3.3 |
| SK-N-SH- Neuroblastoma (metastasis) | 22.4 |
| SF-295- Glioblastoma | 27.2 |
| Cerebellum | 6.7 |
| Cerebellum | 0.0 |
| NCI-H292- Mucoepidermoid lung carcinoma | 21.9 |
| DMS-114- Small cell lung cancer | 2.4 |
| DMS-79- Small cell lung cancer | 0.0 |
| NCI-H146- Small cell lung cancer | 100.0 |
| NCI-H526- Small cell lung cancer | 0.0 |
| NCI-N417- Small cell lung cancer | 0.0 |
| NCI-H82- Small cell lung cancer | 0.3 |
| NCI-H157- Squamous cell lung cancer (metastasis) | 0.0 |
| NCI-H1155- Large cell lung cancer | 65.1 |
| NCI-H1299- Large cell lung cancer | 0.0 |
| NCI-H727- Lung carcinoid | 13.8 |
| NCI-UMC-11- Lung carcinoid | 28.7 |
| LX-1- Small cell lung cancer | 0.7 |
| Colo-205- Colon cancer | 0.0 |
| KM12- Colon cancer | 0.1 |
| KM20L2- Colon cancer | 7.3 |
| NCI-H716- Colon cancer | 80.1 |
| SW-48- Colon adenocarcinoma | 0.3 |
| SW1116- Colon adenocarcinoma | 0.0 |
| LS 174T- Colon adenocarcinoma | 0.0 |
| SW-948- Colon adenocarcinoma | 0.6 |
| SW-480- Colon adenocarcinoma | 0.0 |
| NCI-SNU-5- Gastric carcinoma | 0.0 |
| KATO III- Gastric carcinoma | 0.0 |
| NCI-SNU-16- Gastric carcinoma | 1.7 |
| NCI-SNU-1- Gastric carcinoma | 0.0 |
| RF-1- Gastric adenocarcinoma | 0.0 |
| RF-48- Gastric adenocarcinoma | 0.0 |
| MKN-45- Gastric carcinoma | 0.1 |
| NCI-N87- Gastric carcinoma | 2.4 |
| OVCAR-5- Ovarian carcinoma | 0.0 |
| RL95-2- Uterine carcinoma | 2.8 |
| HelaS3- Cervical adenocarcinoma | 0.2 |
| Ca Ski- Cervical epidermoid carcinoma | 0.1 |
| (metastasis) | |
| ES-2- Ovarian clear cell carcinoma | 0.0 |
| Ramos- Stimulated with PMA/ionomycin 6 h | 0.1 |
| Ramos- Stimulated with PMA/ionomycin 14 h | 0.0 |
| MEG-01- Chronic myelogenous leukemia | 1.7 |
| (megokaryoblast) | |
| Raji- Burkitt's lymphoma | 0.0 |
| Daudi- Burkitt's lymphoma | 0.0 |
| U266- B-cell plasmacytoma | 0.2 |
| CA46- Burkitt's lymphoma | 0.0 |
| RL- non-Hodgkin's B-cell lymphoma | 0.1 |
| JM1- pre-B-cell lymphoma | 0.0 |
| Jurkat- T cell leukemia | 0.0 |
| TF-1- Erythroleukemia | 2.1 |
| HUT 78- T-cell lymphoma | 0.0 |
| U937- Histiocytic lymphoma | 0.0 |
| KU-812- Myelogenous leukemia | 8.2 |
| 769-P- Clear cell renal carcinoma | 0.0 |
| Caki-2- Clear cell renal carcinoma | 0.3 |
| SW 839- Clear cell renal carcinoma | 0.0 |
| Rhabdoid kidney tumor | 0.0 |
| Hs766T- Pancreatic carcinoma (LN metastasis) | 4.9 |
| CAPAN-1- Pancreatic adenocarcinoma (liver | 0.3 |
| metastasis) | |
| SU86.86- Pancreatic carcinoma (liver metastasis) | 1.5 |
| BxPC-3- Pancreatic adenocarcinoma | 23.7 |
| HPAC- Pancreatic adenocarcinoma | 76.8 |
| MIA PaCa-2- Pancreatic carcinoma | 0.5 |
| CFPAC-1- Pancreatic ductal adenocarcinoma | 0.5 |
| PANC-1- Pancreatic epithelioid ductal carcinoma | 6.9 |
| T24- Bladder carcinma (transitional cell) | 4.1 |
| 5637- Bladder carcinoma | 1.0 |
| HT-1197- Bladder carcinoma | 2.4 |
| UM-UC-3- Bladder carcinma (transitional cell) | 0.0 |
| A204- Rhabdomyosarcoma | 0.3 |
| HT-1080- Fibrosarcoma | 0.2 |
| MG-63- Osteosarcoma | 0.2 |
| SK-LMS-1- Leiomyosarcoma (vulva) | 0.0 |
| SJRH30- Rhabdomyosarcoma (met to bone marrow) | 0.2 |
| A431- Epidermoid carcinoma | 0.0 |
| WM266-4- Melanoma | 0.4 |
| DU 145- Prostate carcinoma (brain metastasis) | 0.0 |
| MDA-MB-468- Breast adenocarcinoma | 1.3 |
| SCC-4- Squamous cell carcinoma of tongue | 0.2 |
| SCC-9- Squamous cell carcinoma of tongue | 0.0 |
| SCC-15- Squamous cell carcinoma of tongue | 0.3 |
| CAL 27- Squamous cell carcinoma of tongue | 1.6 |

Column A - Rel. Exp. (%) Ag1094, Run 165022642

[1198] TABLE ABH
Panel 4.1D

| Tissue Name | A | B |
|---|---|---|
| Secondary Th1 act | 0.0 | 0.0 |
| Secondary Th2 act | 0.0 | 0.0 |
| Secondary Tr1 act | 0.0 | 0.0 |
| Secondary Th1 rest | 0.0 | 0.0 |
| Secondary Th2 rest | 0.0 | 0.0 |
| Secondary Tr1 rest | 0.0 | 0.0 |
| Primary Th1 act | 0.0 | 0.0 |
| Primary Th2 act | 0.0 | 0.0 |
| Primary Tr1 act | 0.0 | 0.0 |
| Primary Th1 rest | 0.0 | 0.0 |
| Primary Th2 rest | 0.0 | 0.0 |
| Primary Tr1 rest | 0.0 | 0.0 |
| CD45RA CD4 lymphocyte act | 0.0 | 0.0 |
| CD45RO CD4 lymphocyte act | 0.0 | 0.0 |
| CD8 lymphocyte act | 0.0 | 0.0 |
| Secondary CD8 lymphocyte rest | 0.0 | 0.0 |
| Secondary CD8 lymphocyte act | 0.0 | 0.0 |
| CD4 lymphocyte none | 0.0 | 0.0 |
| 2ry Th1/Th2/Tr1_anti-CD95 CH11 | 0.0 | 0.0 |
| LAK cells rest | 0.0 | 0.0 |
| LAK cells IL-2 | 0.0 | 0.0 |
| LAK cells IL-2 + IL-12 | 0.0 | 0.0 |
| LAK cells IL-2 + IFN gamma | 0.0 | 0.0 |
| LAK cells IL-2 + IL-18 | 0.0 | 0.0 |
| LAK cells PMA/ionomycin | 0.0 | 0.0 |
| NK Cells IL-2 rest | 0.0 | 0.0 |
| Two Way MLR 3 day | 0.8 | 0.0 |
| Two Way MLR 5 day | 0.0 | 0.0 |
| Two Way MLR 7 day | 0.0 | 0.0 |
| PBMC rest | 0.0 | 0.0 |
| PBMC PWM | 0.0 | 0.0 |
| PBMC PHA-L | 0.0 | 0.0 |
| Ramos (B cell) none | 0.0 | 0.0 |
| Ramos (B cell) ionomycin | 0.6 | 0.5 |
| B lymphocytes PWM | 0.0 | 0.0 |
| B lymphocytes CD40L and IL-4 | 0.0 | 0.0 |
| EOL-1 dbcAMP | 0.0 | 0.0 |
| EOL-1 dbcAMP PMA/ionomycin | 0.0 | 0.0 |
| Dendritic cells none | 0.0 | 0.0 |
| Dendritic cells LPS | 0.0 | 0.0 |
| Dendritic cells anti-CD40 | 0.0 | 0.0 |
| Monocytes rest | 0.0 | 0.0 |
| Monocytes LPS | 0.0 | 0.0 |
| Macrophages rest | 0.0 | 0.0 |
| Macrophages LPS | 0.0 | 0.0 |
| HUVEC none | 0.0 | 0.0 |
| HUVEC starved | 0.0 | 0.0 |
| HUVEC IL-1beta | 0.0 | 0.0 |
| HUVEC IFN gamma | 0.0 | 0.0 |
| HUVEC TNF alpha + IFN gamma | 0.0 | 0.0 |
| HUVEC TNF alpha + IL4 | 0.0 | 0.0 |
| HUVEC IL-11 | 0.0 | 0.0 |
| Lung Microvascular EC none | 0.0 | 0.0 |
| Lung Microvascular EC TNFalpha + IL-1beta | 0.0 | 0.0 |
| Microvascular Dermal EC none | 0.0 | 0.0 |
| Microsvasular Dermal EC TNFalpha + IL-1beta | 0.0 | 0.0 |
| Bronchial epithelium TNFalpha + IL1beta | 2.3 | 4.0 |
| Small airway epithelium none | 3.7 | 3.2 |
| Small airway epithelium TNFalpha + IL-1beta | 2.5 | 1.2 |
| Coronery artery SMC rest | 0.0 | 0.0 |
| Coronery artery SMC TNFalpha + IL-1beta | 0.0 | 0.0 |
| Astrocytes rest | 1.9 | 2.5 |
| Astrocytes TNFalpha + IL-1beta | 0.0 | 0.0 |
| KU-812 (Basophil) rest | 11.3 | 1.7 |
| KU-812 (Basophil) PMA/ionomycin | 61.1 | 100.0 |
| CCD1106 (Keratinocytes) none | 100.0 | 71.7 |
| CCD1106 (Keratinocytes) TNFalpha + IL-1beta | 7.6 | 4.0 |
| Liver cirrhosis | 0.8 | 0.2 |
| NCI-H292 none | 7.2 | 6.4 |
| NCI-H292 IL-4 | 4.6 | 6.8 |
| NCI-H292 IL-9 | 25.0 | 8.4 |
| NCI-H292 IL-13 | 9.7 | 7.8 |
| NCI-H292 IFN gamma | 2.8 | 1.9 |
| HPAEC none | 0.0 | 0.0 |
| HPAEC TNF alpha + IL-1 beta | 0.0 | 0.0 |
| Lung fibroblast none | 85.3 | 53.6 |
| Lung fibroblast TNF alpha + IL-1 beta | 35.1 | 31.0 |
| Lung fibroblast IL-4 | 20.7 | 7.8 |
| Lung fibroblast IL-9 | 2.8 | 7.3 |
| Lung fibroblast IL-13 | 11.4 | 3.0 |
| Lung fibroblast IFN gamma | 52.1 | 38.2 |
| Dermal fibroblast CCD1070 rest | 0.3 | 0.0 |
| Dermal fibroblast CCD1070 TNF alpha | 0.0 | 1.0 |
| Dermal fibroblast CCD1070 IL-1 beta | 0.0 | 0.0 |
| Dermal fibroblast IFN gamma | 0.0 | 0.0 |
| Dermal fibroblast IL-4 | 0.0 | 0.0 |
| Dermal Fibroblasts rest | 0.0 | 0.0 |
| Neutrophils TNFa + LPS | 0.0 | 0.0 |
| Neutrophils rest | 0.0 | 0.0 |
| Colon | 1.5 | 0.5 |
| Lung | 1.1 | 0.7 |
| Thymus | 1.4 | 0.0 |
| Kidney | 1.6 | 0.0 |

Column A - Rel. Exp. (%) Ag6719, Run 276596890
Column B - Rel. Exp. (%) Ag6725, Run 276846995

[1199] Ardais Panel v.1.0 Summary: Ag1094 Highest expression of this gene was seen in a lung cancer sample (CT=23.5). High to moderate expression of this gene was seen in a number of normal and cancerous samples from lung. Expression of this gene was higher in four cancer samples compared to normal lung samples. Expression of this gene is useful as a marker to detect the presence of lung cancer and therapeutic modulation of this gene or its protein product is useful in the treatment of lung cancer.

[1200] General_screening₁₃ panel_v1.6 Summary: Ag6719 Highest expression of this gene was seen in a lung cancer SHP-77 cell line (CT=26.6). High expression of this gene was mainly seen in cancer cell lines derived from brain, lung, colon, gastric, ovarian and prostate cancers. Expression was higher in these cell lines compared to the normal tissues. Expression of this gene is useful as a marker to detect the presence of these cancers and also, therapeutic modulation of this gene or its protein product is useful in the treatment of brain, lung, colon, gastric, ovarian and prostate cancers.

[1201] Low expression of this gene was also seen in fetal lung, fetal kidney, and fetal heart. Expression was higher in these fetal tissues compared to expression in the corresponding adult tissues. This gene plays a role in early development of these tissue. Therapeutic modulation of this gene or its protein product is useful in the treatment of diseases related to development of these tissues.

[1202] This gene encodes a novel insulin-like growth factor binding protein acid labile subunit. Low expression of this gene was also seen in fetal brain and thalamus. Therefore, therapeutic modulation of this gene or gene product is useful in the treatment of neurological disorders related to thalamus and brain development. Insulin-like growth factor (IGF) has neuroprotective effects, and is currently under investigation as a biopharmaceutical for the treatment of amyotropic lateral sclerosis (Mewar R. J. Neurosci. Res 50:721-728, PMID: 9418960; Corse A. M., Neurobiol. Dis. 6:335-346). In serum, IGF is bound to both IGF-binding protein (IGFBP) and the acid labile subunit (IGFBP-ALS). In the brain, glia produce IGFBP; however the IGFBP-ALS has not been detected in the CNS. This gene represents the CNS equivalent of IGFBP-ALS. Because of the neuroprotective effects of IGF, therapeutic modulation of this gene or its protein product is useful in treating diseases in which neuronal death/degeneration occur such as amyotropic lateral sclerosis, multiple sclerosis, Alzheimer's disease, Parkinson's disease, Huntington's disease, spinocerebellar ataxia, or CNS injury such as stroke, head or spinal cord trauma.

[1203] Panel 2D Summary: Ag1094 Expression of this gene was highest in a metastatic breast cancer sample (CT=26-27). In addition, several other breast cancer and lung cancer samples showed increased expression when compared to their normal adjacent margin samples. This result was consistent with the results in the Ardais panel, and Panel 1.6 that both showed higher expression of this gene in cell lines and lung cancer tissue. Expression of this gene is useful as a marker to distinguish breast cancer or lung cancer tissue from their normal counterparts and is of diagnostic value. Therapeutic modulation of the this gene or its gene product, through the use of small molecule drugs or antibodies, is of benefit for treatment of breast or lung cancer.

[1204] Panel 3D Summary: Ag1094 Expression of this gene was highest in a small cell lung cancer cell line (CT=28.5). In addition, there was significant expression of this gene in other lung cancer cell lines as well as in several brain cancer and pancreatic cancer cell lines. These results were consistent with what is observed in the other panels. Expression of this gene is useful as a marker to distinguish lung, breast or pancreas cancer cell line samples from other tissues. Therapeutic modulation of this gene or gene product, through the use of small molecule drugs or antibodies, is of benefit for treatment of lung, breast or pancreatic cancer.

[1205] Panel 4.1D Summary: Ag6719/Ag6725 Highest expression of this gene was seen in activated basophils and resting keratinocytes (CTs=30-31). Significant expression of this gene was also seen in resting basophils, activated keratinocytes, activated NCI-H292, resting and activated lung fibroblasts. This expression pattern is in agreement with that seen in panel 4D. Please see panel 4D for further discussion on the utility of this gene. The protein encoded by this transcript is a homolog of insulin-like growth factor binding protein acid labile subunit, a component of the systemic insulin-like growth factor-binding protein (IGFBP) complex. This gene plays an important role in the biology of circulating IGFs. IGFs are involved in a wide array of cellular processes such as proliferation, prevention of apoptosis, and differentiation. This gene is a suitable target for a small molecule, antibody, or protein therapeutic to modulate locally the mitogenic effect of IGF and as a treatment of emphysema, COPD, or skin related disease.

[1206] AC. CG55117-04: Prominin-like Protein 1 Precursor

[1207] Expression of gene CG55117-04 was assessed using the primer-probe set Ag819, described in Table ACA. Results of the RTQ-PCR runs are shown in Tables ACB, ACC, ACD, ACE and ACF.

TABLE ACA
Probe Name Ag819

| | | | | SEQ |
|---|---|---|---|---|
| | | | Start | ID |
| Primers | Sequences | Length | Position | No |
| Forward | 5′-ggtccaacagggctatcaat-3′ | 20 | 1077 | 1402 |
| Probe | TET-5′-ccaaaccacgactgtcgtagcaggta-3′- | 26 | 1128 | 1403 |
| | TAMRA | | | |
| Reverse | 5′-tggaattcaagacccttttga-3′ | 21 | 1154 | 1404 |

[1208] TABLE ACB
HASS Panel v1.0

| Tissue Name | A |
|---|---|
| MCF-7 C1 | 0.0 |
| MCF-7 C2 | 0.0 |
| MCF-7 C3 | 0.0 |
| MCF-7 C4 | 0.0 |
| MCF-7 C5 | 0.1 |
| MCF-7 C6 | 0.0 |
| MCF-7 C7 | 0.0 |
| MCF-7 C9 | 0.0 |
| MCF-7 C10 | 0.0 |
| MCF-7 C11 | 0.0 |
| MCF-7 C12 | 0.1 |
| MCF-7 C13 | 0.0 |
| MCF-7 C15 | 0.0 |
| MCF-7 C16 | 0.0 |
| MCF-7 C17 | 0.0 |
| T24 D1 | 0.0 |
| T24 D2 | 0.0 |
| T24 D3 | 0.1 |
| T24 D4 | 0.1 |
| T24 D5 | 0.1 |
| T24 D6 | 0.0 |
| T24 D7 | 0.0 |
| T24 D9 | 0.0 |
| T24 D10 | 0.0 |
| T24 D11 | 0.0 |
| T24 D12 | 0.0 |
| T24 D13 | 0.0 |
| T24 D15 | 0.0 |
| T24 D16 | 0.0 |
| T24 D17 | 0.0 |
| CAPaN B1 | 66.9 |
| CAPaN B2 | 50.7 |
| CAPaN B3 | 11.8 |
| CAPaN B4 | 42.3 |
| CAPaN B5 | 45.4 |
| CAPaN B6 | 73.7 |
| CAPaN B7 | 27.7 |
| CAPaN B8 | 17.6 |
| CAPaN B9 | 67.4 |
| CAPaN B10 | 100.0 |
| CAPaN B11 | 53.2 |
| CAPaN B12 | 55.9 |
| CAPaN B13 | 28.7 |
| CAPaN B14 | 15.3 |
| CAPaN B15 | 39.0 |
| CAPaN B16 | 44.8 |
| CAPaN B17 | 36.9 |
| U87-MG F1 (B) | 0.1 |
| U87-MG F2 | 0.0 |
| U87-MG F3 | 0.0 |
| U87-MG F4 | 0.0 |
| U87-MG F5 | 0.1 |
| U87-MG F6 | 0.0 |
| U87-MG F7 | 0.3 |
| U87-MG F8 | 0.2 |
| U87-MG F9 | 0.3 |
| U87-MG F10 | 0.1 |
| U87-MG F11 | 0.0 |
| U87-MG F12 | 0.0 |
| U87-MG F13 | 0.7 |
| U87-MG F14 | 0.0 |
| U87-MG F15 | 0.5 |
| U87-MG F16 | 0.1 |
| U87-MG F17 | 0.1 |
| LnCAP A1 | 0.0 |
| LnCAP A2 | 0.0 |
| LnCAP A3 | 0.0 |
| LnCAP A4 | 0.0 |
| LnCAP A5 | 0.1 |
| LnCAP A6 | 0.1 |
| LnCAP A7 | 0.0 |
| LnCAP A8 | 0.1 |
| LnCAP A9 | 0.0 |
| LnCAP A10 | 0.0 |
| LnCAP A11 | 0.0 |
| LnCAP A12 | 0.0 |
| LnCAP A13 | 0.0 |
| LnCAP A14 | 0.0 |
| LnCAP A15 | 0.0 |
| LnCAP A16 | 0.0 |
| LnCAP A17 | 0.0 |
| Primary Astrocytes | 37.6 |
| Primary Renal Proximal Tubule Epithelial cell A2 | 38.2 |
| Primary melanocytes A5 | 0.1 |
| 126443 - 341 medullo | 0.4 |
| 126444 - 487 medullo | 4.8 |
| 126445 - 425 medullo | 0.0 |
| 126446 - 690 medullo | 1.8 |
| 126447 - 54 adult glioma | 0.0 |
| 126448 - 245 adult glioma | 1.5 |
| 126449 - 317 adult glioma | 10.7 |
| 126450 - 212 glioma | 5.9 |
| 126451 - 456 glioma | 60.7 |

Column A - Rel. Exp. (%) Ag819, Run 268362651

[1209] TABLE ACC
Panel 1.2

| Tissue Name | A | B |
|---|---|---|
| Endothelial cells | 0.0 | 0.0 |
| Heart (Fetal) | 0.4 | 0.8 |
| Pancreas | 43.8 | 48.3 |
| Pancreatic ca. CAPAN 2 | 8.1 | 17.9 |
| Adrenal Gland | 0.2 | 0.2 |
| Thyroid | 11.8 | 12.9 |
| Salivary gland | 63.3 | 63.7 |
| Pituitary gland | 0.9 | 0.5 |
| Brain (fetal) | 37.1 | 41.5 |
| Brain (whole) | 4.6 | 6.3 |
| Brain (amygdala) | 1.5 | 2.3 |
| Brain (cerebellum) | 0.9 | 1.5 |
| Brain (hippocampus) | 3.4 | 4.0 |
| Brain (thalamus) | 1.9 | 2.6 |
| Cerebral Cortex | 1.2 | 2.7 |
| Spinal cord | 1.2 | 1.9 |
| glio/astro U87-MG | 0.0 | 0.0 |
| glio/astro U-118-MG | 0.0 | 0.0 |
| astrocytoma SW1783 | 0.0 | 0.0 |
| neuro*; met SK-N-AS | 0.3 | 0.1 |
| astrocytoma SF-539 | 0.0 | 0.0 |
| astrocytoma SNB-75 | 0.0 | 0.0 |
| glioma SNB-19 | 0.0 | 0.1 |
| glioma U251 | 0.0 | 0.1 |
| glioma SF-295 | 0.0 | 0.0 |
| Heart | 8.1 | 9.5 |
| Skeletal Muscle | 2.6 | 3.7 |
| Bone marrow | 0.6 | 1.2 |
| Thymus | 0.0 | 0.1 |
| Spleen | 0.5 | 0.0 |
| Lymph node | 1.4 | 0.2 |
| Colorectal Tissue | 0.3 | 1.8 |
| Stomach | 10.7 | 23.3 |
| Small intestine | 10.4 | 18.9 |
| Colon ca. SW480 | 0.0 | 0.0 |
| Colon ca.* SW620 (SW480 met) | 9.0 | 11.7 |
| Colon ca. HT29 | 32.5 | 40.9 |
| Colon ca. HCT-116 | 5.9 | 7.9 |
| Colon ca. CaCo-2 | 100.0 | 100.0 |
| Colon ca. Tissue (ODO3866) | 4.7 | 5.4 |
| Colon ca. HCC-2998 | 2.5 | 3.0 |
| Gastric ca.* (liver met) NCI-N87 | 0.0 | 0.2 |
| Bladder | 39.2 | 49.7 |
| Trachea | 29.7 | 34.4 |
| Kidney | 27.4 | 25.7 |
| Kidney (fetal) | 17.7 | 19.1 |
| Renal ca. 786-0 | 0.0 | 0.0 |
| Renal ca. A498 | 0.0 | 0.1 |
| Renal ca. RXF 393 | 0.0 | 0.0 |
| Renal ca. ACHN | 0.0 | 0.0 |
| Renal ca. UO-31 | 1.0 | 1.6 |
| Renal ca. TK-10 | 0.0 | 0.0 |
| Liver | 8.0 | 3.3 |
| Liver (fetal) | 2.8 | 2.7 |
| Liver ca. (hepatoblast) HepG2 | 12.8 | 20.2 |
| Lung | 5.7 | 4.2 |
| Lung (fetal) | 9.5 | 7.4 |
| Lung ca. (small cell) LX-1 | 39.0 | 33.4 |
| Lung ca. (small cell) NCI-H69 | 7.4 | 10.5 |
| Lung ca. (s. cell var.) SHP-77 | 0.5 | 0.6 |
| Lung ca. (large cell)NCI-H460 | 0.0 | 0.0 |
| Lung ca. (non-sm. cell) A549 | 0.0 | 0.1 |
| Lung ca. (non-s. cell) NCI-H23 | 0.0 | 0.0 |
| Lung ca. (non-s. cell) HOP-62 | 0.1 | 0.2 |
| Lung ca. (non-s. cl) NCI-H522 | 0.0 | 0.1 |
| Lung ca. (squam.) SW 900 | 0.6 | 0.8 |
| Lung ca. (squam.) NCI-H596 | 14.6 | 22.1 |
| Mammary gland | 33.0 | 46.3 |
| Breast ca.* (pl. ef) MCF-7 | 0.0 | 0.0 |
| Breast ca.* (pl. ef) MDA-MB-231 | 0.0 | 0.0 |
| Breast ca.* (pl. ef) T47D | 0.8 | 1.3 |
| Breast ca. BT-549 | 0.0 | 0.0 |
| Breast ca. MDA-N | 0.4 | 0.6 |
| Ovary | 4.6 | 0.2 |
| Ovarian ca. OVCAR-3 | 3.3 | 4.0 |
| Ovarian ca. OVCAR-4 | 27.9 | 54.0 |
| Ovarian ca. OVCAR-5 | 37.4 | 51.1 |
| Ovarian ca. OVCAR-8 | 0.0 | 0.1 |
| Ovarian ca. IGROV-1 | 3.2 | 5.5 |
| Ovarian ca. (ascites) SK-OV-3 | 0.0 | 0.0 |
| Uterus | 1.4 | 1.2 |
| Placenta | 23.2 | 22.5 |
| Prostate | 2.6 | 2.7 |
| Prostate ca.* (bone met) PC-3 | 0.0 | 0.0 |
| Testis | 19.8 | 21.9 |
| Melanoma Hs688(A).T | 1.7 | 0.0 |
| Melanoma* (met) Hs688(B).T | 0.7 | 0.0 |
| Melanoma UACC-62 | 1.8 | 1.7 |
| Melanoma M14 | 0.1 | 0.2 |
| Melanoma LOX IMVI | 0.0 | 0.0 |
| Melanoma* (met) SK-MEL-5 | 0.5 | 1.0 |

Column A - Rel. Exp. (%) Ag819, Run 118349021
Column B - Rel. Exp. (%) Ag819, Run 120989791

[1210] TABLE ACD
Panel 2D

| Tissue Name | A | B |
|---|---|---|
| Normal Colon | 17.0 | 20.7 |
| CC Well to Mod Diff (ODO3866) | 0.9 | 5.3 |
| CC Margin (ODO3866) | 9.5 | 6.0 |
| CC Gr.2 rectosigmoid (ODO3868) | 5.8 | 3.9 |
| CC Margin (ODO3868) | 0.0 | 0.2 |
| CC Mod Diff (ODO3920) | 0.7 | 0.9 |
| CC Margin (ODO3920) | 2.8 | 2.1 |
| CC Gr.2 ascend colon (ODO3921) | 26.2 | 37.4 |
| CC Margin (ODO3921) | 4.4 | 7.0 |
| CC from Partial Hepatectomy | 13.1 | 20.4 |
| (ODO4309) Mets | | |
| Liver Margin (ODO4309) | 0.1 | 0.2 |
| Colon mets to lung (OD04451-01) | 8.5 | 6.2 |
| Lung Margin (OD04451-02) | 2.1 | 1.7 |
| Normal Prostate 6546-1 | 1.2 | 0.3 |
| Prostate Cancer (OD04410) | 0.5 | 0.7 |
| Prostate Margin (OD04410) | 0.8 | 0.6 |
| Prostate Cancer (OD04720-01) | 0.4 | 0.4 |
| Prostate Margin (OD04720-02) | 2.0 | 2.0 |
| Normal Lung 061010 | 4.6 | 4.7 |
| Lung Met to Muscle (ODO4286) | 0.0 | 0.0 |
| Muscle Margin (ODO4286) | 0.2 | 0.3 |
| Lung Malignant Cancer (OD03126) | 8.7 | 6.5 |
| Lung Margin (OD03126) | 1.4 | 1.6 |
| Lung Cancer (OD04404) | 0.1 | 0.2 |
| Lung Margin (OD04404) | 3.1 | 1.2 |
| Lung Cancer (OD04565) | 0.2 | 0.1 |
| Lung Margin (OD04565) | 1.0 | 0.9 |
| Lung Cancer (OD04237-01) | 100.0 | 74.7 |
| Lung Margin (OD04237-02) | 1.7 | 1.5 |
| Ocular Mel Met to Liver (ODO4310) | 0.1 | 0.3 |
| Liver Margin (ODO4310) | 0.6 | 0.2 |
| Melanoma Mets to Lung (OD04321) | 14.8 | 12.2 |
| Lung Margin (OD04321) | 1.7 | 1.5 |
| Normal Kidney | 23.2 | 17.4 |
| Kidney Ca, Nuclear grade 2 (OD04338) | 4.2 | 5.1 |
| Kidney Margin (OD04338) | 8.0 | 11.3 |
| Kidney Ca Nuclear grade 1/2 (OD04339) | 65.5 | 69.3 |
| Kidney Margin (OD04339) | 6.7 | 6.0 |
| Kidney Ca, Clear cell type (OD04340) | 0.1 | 0.1 |
| Kidney Margin (OD04340) | 13.8 | 12.0 |
| Kidney Ca, Nuclear grade 3 (OD04348) | 0.0 | 0.0 |
| Kidney Margin (OD04348) | 9.2 | 6.3 |
| Kidney Cancer (OD04622-01) | 0.7 | 0.4 |
| Kidney Margin (OD04622-03) | 1.1 | 1.2 |
| Kidney Cancer (OD04450-01) | 32.5 | 24.5 |
| Kidney Margin (OD04450-03) | 22.1 | 16.0 |
| Kidney Cancer 8120607 | 4.4 | 4.2 |
| Kidney Margin 8120608 | 3.9 | 2.0 |
| Kidney Cancer 8120613 | 0.1 | 0.0 |
| Kidney Margin 8120614 | 1.2 | 0.8 |
| Kidney Cancer 9010320 | 7.7 | 8.0 |
| Kidney Margin 9010321 | 7.8 | 6.0 |
| Normal Uterus | 0.0 | 0.0 |
| Uterus Cancer 064011 | 24.1 | 18.8 |
| Normal Thyroid | 4.7 | 2.4 |
| Thyroid Cancer 064010 | 4.0 | 2.2 |
| Thyroid Cancer A302152 | 0.1 | 0.0 |
| Thyroid Margin A302153 | 2.9 | 2.7 |
| Normal Breast | 16.6 | 7.4 |
| Breast Cancer (OD04566) | 0.6 | 0.4 |
| Breast Cancer (OD04590-01) | 0.8 | 0.5 |
| Breast Cancer Mets (OD04590-03) | 0.0 | 0.0 |
| Breast Cancer Metastasis (OD04655-05) | 0.1 | 0.0 |
| Breast Cancer 064006 | 15.7 | 11.7 |
| Breast Cancer 1024 | 12.1 | 11.6 |
| Breast Cancer 9100266 | 1.2 | 0.6 |
| Breast Margin 9100265 | 3.0 | 2.0 |
| Breast Cancer A209073 | 6.5 | 4.6 |
| Breast Margin A209073 | 25.0 | 9.0 |
| Normal Liver | 0.6 | 0.5 |
| Liver Cancer 064003 | 0.0 | 0.0 |
| Liver Cancer 1025 | 0.2 | 0.3 |
| Liver Cancer 1026 | 0.2 | 0.1 |
| Liver Cancer 6004-T | 0.2 | 0.1 |
| Liver Tissue 6004-N | 1.6 | 1.7 |
| Liver Cancer 6005-T | 0.1 | 0.2 |
| Liver Tissue 6005-N | 0.0 | 0.2 |
| Normal Bladder | 14.8 | 18.7 |
| Bladder Cancer 1023 | 6.9 | 6.4 |
| Bladder Cancer A302173 | 0.2 | 0.1 |
| Bladder Cancer (OD04718-01) | 0.1 | 0.1 |
| Bladder Normal Adjacent (OD04718-03) | 0.2 | 0.4 |
| Normal Ovary | 0.1 | 0.0 |
| Ovarian Cancer 064008 | 68.8 | 100.0 |
| Ovarian Cancer (OD04768-07) | 0.5 | 1.0 |
| Ovary Margin (OD04768-08) | 0.0 | 0.1 |
| Normal Stomach | 5.0 | 4.5 |
| Gastric Cancer 9060358 | 2.5 | 2.6 |
| Stomach Margin 9060359 | 5.6 | 7.0 |
| Gastric Cancer 9060395 | 1.7 | 1.3 |
| Stomach Margin 9060394 | 3.4 | 6.4 |
| Gastric Cancer 9060397 | 26.1 | 39.8 |
| Stomach Margin 9060396 | 2.7 | 2.7 |
| Gastric Cancer 064005 | 15.5 | 22.1 |

Column A - Rel. Exp. (%) Ag819, Run 144794769
Column B - Rel. Exp. (%) Ag819, Run 146791894

[1211] TABLE ACE
Panel 3D

| Tissue Name | A |
|---|---|
| Daoy- Medulloblastoma | 0.9 |
| TE671- Medulloblastoma | 1.1 |
| D283 Med- Medulloblastoma | 100.0 |
| PFSK-1- Primitive Neuroectodermal | 0.0 |
| XF-498- CNS | 0.1 |
| SNB-78- Glioma | 0.0 |
| SF-268- Glioblastoma | 0.0 |
| T98G- Glioblastoma | 0.0 |
| SK-N-SH- Neuroblastoma (metastasis) | 0.0 |
| SF-295- Glioblastoma | 0.0 |
| Cerebellum | 0.8 |
| Cerebellum | 0.2 |
| NCI-H292- Mucoepidermoid lung carcinoma | 0.0 |
| DMS-114- Small cell lung cancer | 0.1 |
| DMS-79- Small cell lung cancer | 9.9 |
| NCI-H146- Small cell lung cancer | 1.2 |
| NCI-H526- Small cell lung cancer | 0.0 |
| NCI-N417- Small cell lung cancer | 0.0 |
| NCI-H82- Small cell lung cancer | 28.5 |
| NCI-H157- Squamous cell lung cancer (metastasis) | 0.0 |
| NCI-H1155- Large cell lung cancer | 3.4 |
| NCI-H1299- Large cell lung cancer | 0.0 |
| NCI-H727- Lung carcinoid | 0.4 |
| NCI-UMC-11- Lung carcinoid | 10.4 |
| LX-1- Small cell lung cancer | 27.9 |
| Colo-205- Colon cancer | 3.0 |
| KM12- Colon cancer | 3.3 |
| KM20L2- Colon cancer | 1.2 |
| NCI-H716- Colon cancer | 0.0 |
| SW-48- Colon adenocarcinoma | 7.3 |
| SW1116- Colon adenocarcinoma | 3.7 |
| LS 174T- Colon adenocarcinoma | 0.2 |
| SW-948- Colon adenocarcinoma | 0.0 |
| SW-480- Colon adenocarcinoma | 3.1 |
| NCI-SNU-5- Gastric carcinoma | 0.0 |
| KATO III- Gastric carcinoma | 0.0 |
| NCI-SNU-16- Gastric carcinoma | 0.0 |
| NCI-SNU-1- Gastric carcinoma | 26.6 |
| RF-1- Gastric adenocarcinoma | 0.0 |
| RF-48- Gastric adenocarcinoma | 0.1 |
| MKN-45- Gastric carcinoma | 0.0 |
| NCI-N87- Gastric carcinoma | 0.0 |
| OVCAR-5- Ovarian carcinoma | 0.0 |
| RL95-2- Uterine carcinoma | 0.0 |
| HelaS3- Cervical adenocarcinoma | 0.0 |
| Ca Ski- Cervical epidermoid carcinoma (metastasis) | 0.0 |
| ES-2- Ovarian clear cell carcinoma | 0.0 |
| Ramos- Stimulated with PMA/ionomycin 6 h | 0.0 |
| Ramos- Stimulated with PMA/ionomycin 14 h | 0.0 |
| MEG-01- Chronic myelogenous leukemia (megokaryoblast) | 0.0 |
| Raji- Burkitt's lymphoma | 0.0 |
| Daudi- Burkitt's lymphoma | 0.0 |
| U266- B-cell plasmacytoma | 0.0 |
| CA46- Burkitt's lymphoma | 0.0 |
| RL- non-Hodgkin's B-cell lymphoma | 0.0 |
| JM1- pre-B-cell lymphoma | 0.0 |
| Jurkat- T cell leukemia | 0.0 |
| TF-1- Erythroleukemia | 0.0 |
| HUT 78- T-cell lymphoma | 0.0 |
| U937- Histiocytic lymphoma | 0.0 |
| KU-812- Myelogenous leukemia | 0.0 |
| 769-P- Clear cell renal carcinoma | 0.0 |
| Caki-2- Clear cell renal carcinoma | 0.0 |
| SW 839- Clear cell renal carcinoma | 0.0 |
| Rhabdoid kidney tumor | 0.0 |
| Hs766T- Pancreatic carcinoma (LN metastasis) | 0.0 |
| CAPAN-1- Pancreatic adenocarcinoma (liver metastasis) | 9.0 |
| SU86.86- Pancreatic carcinoma (liver metastasis) | 17.6 |
| BxPC-3- Pancreatic adenocarcinoma | 0.0 |
| HPAC- Pancreatic adenocarcinoma | 1.7 |
| MIA PaCa-2- Pancreatic carcinoma | 0.0 |
| CFPAC-1- Pancreatic ductal adenocarcinoma | 58.2 |
| PANC-1- Pancreatic epithelioid ductal carcinoma | 0.0 |
| T24- Bladder carcinoma (transitional cell) | 0.0 |
| 5637- Bladder carcinoma | 0.0 |
| HT-1197- Bladder carcinoma | 0.0 |
| UM-UC-3- Bladder carcinoma (transitional cell) | 0.0 |
| A204- Rhabdomyosarcoma | 0.0 |
| HT-1080- Fibrosarcoma | 0.0 |
| MG-63- Osteosarcoma | 0.0 |
| SK-LMS-1- Leiomyosarcoma (vulva) | 0.0 |
| SJRH30- Rhabdomyosarcoma (met to bone marrow) | 2.5 |
| A431- Epidermoid carcinoma | 0.0 |
| WM266-4- Melanoma | 0.2 |
| DU 145- Prostate carcinoma (brain metastasis) | 0.0 |
| MDA-MB-468- Breast adenocarcinoma | 11.2 |
| SCC-4- Squamous cell carcinoma of tongue | 0.0 |
| SCC-9- Squamous cell carcinoma of tongue | 0.0 |
| SCC-15- Squamous cell carcinoma of tongue | 0.0 |
| CAL 27- Squamous cell carcinoma of tongue | 0.0 |

Column A - Rel. Exp. (%) Ag819, Run 172133330

[1212] TABLE ACF
Panel 5 Islet

| Tissue Name | A |
|---|---|
| 97457_Patient-02go_adipose | 0.0 |
| 97476_Patient-07sk_skeletal muscle | 0.5 |
| 97477_Patient-07ut_uterus | 0.0 |
| 97478_Patient-07pl_placenta | 12.4 |
| 99167_Bayer Patient 1 | 7.9 |
| 97482_Patient-08ut_uterus | 0.4 |
| 97483_Patient-08pl_placenta | 20.9 |
| 97486_Patient-09sk_skeletal muscle | 0.0 |
| 97487_Patient-09ut_uterus | 0.0 |
| 97488_Patient-09pl_placenta | 11.0 |
| 97492_Patient-10ut_uterus | 8.1 |
| 97493_Patient-10pl_placenta | 47.0 |
| 97495_Patient-11go_adipose | 0.0 |
| 97496_Patient-11sk_skeletal muscle | 1.2 |
| 97497_Patient-11ut_uterus | 1.5 |
| 97498_Patient-11pl_placenta | 5.4 |
| 97500_Patient-12go_adipose | 0.0 |
| 97501_Patient-12sk_skeletal muscle | 1.1 |
| 97502_Patient-12ut_uterus | 0.0 |
| 97503_Patient-12pl_placenta | 11.7 |
| 94721_Donor 2 U - A_Mesenchymal Stem Cells | 0.0 |
| 94722_Donor 2 U - B_Mesenchymal Stem Cells | 0.0 |
| 94723_Donor 2 U - C_Mesenchymal Stem Cells | 0.0 |
| 94709_Donor 2 AM - A_adipose | 0.0 |
| 94710_Donor 2 AM - B_adipose | 0.0 |
| 94711_Donor 2 AM - C_adipose | 0.0 |
| 94712_Donor 2 AD - A_adipose | 0.0 |
| 94713_Donor 2 AD - B_adipose | 0.3 |
| 94714_Donor 2 AD - C_adipose | 0.0 |
| 94742_Donor 3 U - A_Mesenchymal Stem Cells | 0.0 |
| 94743_Donor 3 U - B_Mesenchymal Stem Cells | 0.0 |
| 94730_Donor 3 AM - A_adipose | 0.0 |
| 94731_Donor 3 AM - B_adipose | 0.0 |
| 94732_Donor 3 AM - C_adipose | 0.0 |
| 94733_Donor 3 AD - A_adipose | 0.0 |
| 94734_Donor 3 AD - B_adipose | 0.0 |
| 94735_Donor 3 AD - C_adipose | 0.0 |
| 77138_Liver_HepG2untreated | 100.0 |
| 73556_Heart_Cardiac stromal cells (primary) | 0.0 |
| 81735_Small Intestine | 38.2 |
| 72409_Kidney_Proximal Convoluted Tubule | 4.9 |
| 82685_Small intestine_Duodenum | 1.0 |
| 90650_Adrenal_Adrenocortical adenoma | 0.0 |
| 72410_Kidney_HRCE | 39.5 |
| 72411_Kidney_HRE | 97.9 |
| 73139_Uterus_Uterine smooth muscle cells | 0.0 |

Column A - Rel. Exp. (%) Ag819, Run 229431867

[1213] HASS Panel v1.0 Summary: Ag819 Highest expression of this gene was detected in the pancreatic cancer CaPaN cell lines subjected to acidosis (CT=27.9). Moderate levels of expression of this gene were seen in control and in CaPaN cells subjected to environmental stress. The expression of this gene was not significantly changed by oxygen deprivation, acidic or a serum starved environment in these cells. However, moderate to low expression was also shown in astrocytes, Renal Proximal Tubule Epithelial cell A2, ⅘ glioma and 2/4 medulloblastoma tissue samples in this panel. Therapeutic modulation of this gene, expressed protein and/or use of antibodies or small molecule drugs is useful in the treatment of pancreatic and brain cancers.

[1214] Panel 1.2 Summary: Ag819 The expression of this gene was highest in a colon cancer cell line (CaCo-2)(CTs=25). In addition, significant expression of this gene wais also seen in colon, ovarian, lung, pancreatic and a renal cancer cell lines. The expression of this gene is useful as a marker to detect the presence of these cancers and therapeutic modulation of this gene, expressed protein and/or use of antibodies or small molecule drug is useful in the treatment of these cancers.

[1215] Among tissues with metabolic function, this gene had moderate levels of expression in pancreas, adrenal gland, thyroid, pituitary gland, skeletal muscle, and adult and fetal liver. Modulation of this gene and/or expressed protein is useful in the treatment of diseases of the metabolic-endocrine axis, including obesity and Types 1 and 2 diabetes. In addition, this gene was differentially expressed in adult (CT value=28) vs fetal heart (CT value=32-33), and targeting this gene or gene product with small molecule, antibody, or protein therapeutics is of use in the treatment of heart related disorders.

[1216] This gene also showed moderate to low expression in all CNS regions examined, with highest expression in the fetal brain (greater than 10-fold) demonstrating a role in neurodevelopment. This gene codes for a Prominin like protein. Prominin plays a role in the formation of lipid membrane protrusions, their lipid content and membrane to membrane interactions; all critical for synapse formation. The expression of this gene in the developing brain shows a role in synaptogenesis for this molecule. Compensatory synaptogenesis has been shown to occur in the adult brain, especially in response to brain injury or neuronal loss. Therapeutic modulation of this gene and/or expressed protein is useful in the treatment of neurological disorders including stroke, head trauma, spinal cord trauma, Alzheimer's, Parkinson's or Huntington's diseases, multiple sclerosis, or ALS.

[1217] Panel 2D Summary: Ag819 Highest expression of this gene was detected in samples derived from an ovarian cancer and a lung cancer (CTs=26). Significant expression of this gene was seen in a number of cancer samples including a kidney cancer, two colon cancers and two gastric cancers. The expression of this gene is useful as a marker to detect the presence of ovarian or lung cancers. Therapeutic modulation of this gene, expressed protein and/or use of antibodies or small molecule drugs is of benefit in the treatment of ovarian, lung, kidney, colon or gastric cancers.

[1218] Panel 3D Summary: Ag819 The expression of this gene was highest in a sample derived from a brain cancer (meduloblastoma) cell line (D283 cells)(CT=28.3). Significant expression of this gene was also seen in several cell lines derived from lung, gastric and pancreatic cancers. Expression of this gene is useful as a marker to detect these cancers and therapeutic modulation of this gene, expressed protein, and/or use of antibodies or small molecule drugs targeting this gene or gene product is useful in the treatment of lung, brain, pancreatic or gastric cancers.

[1219] Panel 5 Islet Summary: Ag819 Highest expression of this gene was detected in liver cancer HepG2 cell line (CT=31). Low levels of expression of this gene are also seen in islets cells (Bayer patient 1), small intestine, kidney and placenta. Therefore, modulation of this gene and/or expressed protein is useful in treatment of metabolic diseases including obesity and type II diabetes.

[1220] AD. CG55193-04: PV1 Protein

[1221] Expression of gene CG55193-04 was assessed using the primer-probe sets Ag1537 and Ag4932, described in Tables ADA and ADB. Results of the RTQ-PCR runs are shown in Tables ADD, ADE, ADF, ADG, ADH and ADI.

TABLE ADA
Probe Name Ag1537

| | | | | SEQ |
|---|---|---|---|---|
| | | | Start | ID |
| Primers | Sequences | Length | Position | No |
| Forward | 5′-aaggagctggaagagaagaaga-3′ | 22 | 1087 | 1405 |
| Probe | TET-5′-atcagaaactcagccctggacacctg-3′- | 26 | 1141 | 1406 |
| | TAMRA | | | |
| Reverse | 5′-gctgcgacttggtcttgat-3′ | 19 | 1168 | 1407 |

[1222] TABLE ADB
Probe Name Ag4932

| | | | | SEQ |
|---|---|---|---|---|
| | | | Start | ID |
| Primers | Sequences | Length | Position | No |
| Forward | 5′-aatgcagagatcaattcaagga-3′ | 22 | 425 | 1408 |
| Probe | TET-5′-aacaagagctgcgatgccttgctctt-3′- | 26 | 451 | 1409 |
| | TAMRA | | | |
| Reverse | 5′-tcttcaccttctgattcagcat-3′ | 22 | 478 | 1410 |

[1223] TABLE ADC
Ardais Kidney 1.0

| Tissue Name | A |
|---|---|
| Kidney cancer(10A8) | 2.3 |
| Kidney NAT(10A9) | 6.9 |
| Kidney cancer(10AA) | 100.0 |
| Kidney NAT(10AB) | 7.4 |
| Kidney cancer(10AC) | 25.7 |
| Kidney NAT(10AD) | 5.3 |
| Kidney cancer(10B6) | 8.7 |
| Kidney NAT(10B7) | 4.5 |
| Kidney cancer(10B8) | 2.2 |
| Kidney NAT(10B9) | 10.6 |
| Kidney cancer(10BC) | 2.0 |
| Kidney NAT(10BD) | 20.2 |
| Kidney cancer(10BE) | 23.5 |
| Kidney NAT(10BF) | 9.7 |
| Kidney cancer(10C2) | 1.1 |
| Kidney NAT(10C3) | 9.1 |
| Kidney cancer(10C4) | 14.4 |
| Kidney NAT(10C5) | 9.4 |
| Kidney cancer(10B4) | 2.2 |
| Kidney cancer(10C8) | 14.5 |
| Kidney cancer(10D0) | 60.3 |
| Kidney cancer(10C0) | 1.2 |
| Kidney cancer(10C6) | 3.3 |
| Kidney cancer(10C9) | 1.5 |
| Kidney cancer(10D1) | 85.3 |
| Kidney cancer(10CA) | 0.8 |
| Kidney cancer(10D2) | 55.1 |
| Kidney cancer(10CB) | 6.4 |
| Kidney cancer(10D4) | 22.1 |
| Kidney cancer(10CD) | 73.2 |
| Kidney cancer(10D5) | 7.4 |
| Kidney cancer(10CE) | 63.3 |
| Kidney cancer(10D6) | 38.2 |
| Kidney cancer(10CF) | 22.8 |
| Kidney cancer(10D8) | 25.7 |
| Kidney cancer(10CC) | 28.1 |
| Kidney cancer(10D3) | 12.0 |
| Kidney NAT(10D9) | 7.4 |
| Kidney NAT(10DB) | 7.2 |
| Kidney NAT(10DC) | 10.8 |
| Kidney NAT(10DD) | 12.9 |
| Kidney NAT(10DE) | 20.7 |
| Kidney NAT(10B1) | 7.5 |
| Kidney NAT(10DA) | 7.5 |

Column A - Rel. Exp. (%) Ag1537, Run 385860665

[1224] TABLE ADD
Ardais Panel v.1.0

| Tissue Name | A |
|---|---|
| 136799_Lung cancer(362) | 23.8 |
| 136800_Lung NAT(363) | 15.6 |
| 136813_Lung cancer(372) | 45.4 |
| 136814_Lung NAT(373) | 14.4 |
| 136815_Lung cancer(374) | 39.2 |
| 136816_Lung NAT(375) | 100.0 |
| 136791_Lung cancer(35A) | 22.5 |
| 136795_Lung cancer(35E) | 35.4 |
| 136797_Lung cancer(360) | 22.4 |
| 136794_lung NAT(35D) | 14.3 |
| 136818_Lung NAT(377) | 33.0 |
| 136787_lung cancer(356) | 8.1 |
| 136788_lung NAT(357) | 52.5 |
| 136806_Lung cancer(36B) | 35.6 |
| 136807_Lung NAT(36C) | 18.8 |
| 136789_lung cancer(358) | 65.1 |
| 136802_Lung cancer(365) | 49.3 |
| 136803_Lung cancer(368) | 24.5 |
| 136804_Lung cancer(369) | 38.2 |
| 136811_Lung cancer(370) | 14.9 |
| 136810_Lung NAT(36F) | 31.4 |

Column A - Rel. Exp. (%) Ag1537, Run 267680189

[1225] TABLE ADE
General_screening_panel_v1.5

| Tissue Name | A |
|---|---|
| Adipose | 0.0 |
| Melanoma* Hs688(A).T | 0.0 |
| Melanoma* Hs688(B).T | 0.0 |
| Melanoma* M14 | 0.0 |
| Melanoma* LOXIMVI | 0.0 |
| Melanoma* SK-MEL-5 | 0.0 |
| Squamous cell carcinoma SCC-4 | 0.0 |
| Testis Pool | 10.7 |
| Prostate ca.* (bone met) PC-3 | 0.0 |
| Prostate Pool | 14.7 |
| Placenta | 42.6 |
| Uterus Pool | 53.6 |
| Ovarian ca. OVCAR-3 | 0.0 |
| Ovarian ca. SK-OV-3 | 0.0 |
| Ovarian ca. OVCAR-4 | 0.0 |
| Ovarian ca. OVCAR-5 | 0.2 |
| Ovarian ca. IGROV-1 | 0.0 |
| Ovarian ca. OVCAR-8 | 0.1 |
| Ovary | 11.1 |
| Breast ca. MCF-7 | 0.0 |
| Breast ca. MDA-MB-231 | 0.0 |
| Breast ca. BT 549 | 0.0 |
| Breast ca. T47D | 0.0 |
| Breast ca. MDA-N | 0.0 |
| Breast Pool | 62.4 |
| Trachea | 47.3 |
| Lung | 4.3 |
| Fetal Lung | 17.2 |
| Lung ca. NCI-N417 | 0.0 |
| Lung ca. LX-1 | 0.0 |
| Lung ca. NCI-H146 | 0.0 |
| Lung ca. SHP-77 | 0.0 |
| Lung ca. A549 | 0.0 |
| Lung ca. NCI-H526 | 0.0 |
| Lung ca. NCI-H23 | 0.0 |
| Lung ca. NCI-H460 | 0.0 |
| Lung ca. HOP-62 | 0.0 |
| Lung ca. NCI-H522 | 0.0 |
| Liver | 1.2 |
| Fetal Liver | 44.1 |
| Liver ca. HepG2 | 0.0 |
| Kidney Pool | 55.1 |
| Fetal Kidney | 73.2 |
| Renal ca. 786-0 | 0.0 |
| Renal ca. A498 | 0.1 |
| Renal ca. ACHN | 0.0 |
| Renal ca. UO-31 | 0.0 |
| Renal ca. TK-10 | 0.0 |
| Bladder | 86.5 |
| Gastric ca. (liver met.) NCI-N87 | 4.5 |
| Gastric ca. KATO III | 0.0 |
| Colon ca. SW-948 | 0.0 |
| Colon ca. SW480 | 0.0 |
| Colon ca.* (SW480 met) SW620 | 0.0 |
| Colon ca. HT29 | 0.0 |
| Colon ca. HCT-116 | 0.0 |
| Colon ca. CaCo-2 | 0.0 |
| Colon cancer tissue | 51.1 |
| Colon ca. SW1116 | 0.0 |
| Colon ca. Colo-205 | 0.0 |
| Colon ca. SW-48 | 0.0 |
| Colon Pool | 89.5 |
| Small Intestine Pool | 11.7 |
| Stomach Pool | 37.9 |
| Bone Marrow Pool | 46.0 |
| Fetal Heart | 15.1 |
| Heart Pool | 22.2 |
| Lymph Node Pool | 66.9 |
| Fetal Skeletal Muscle | 23.2 |
| Skeletal Muscle Pool | 32.5 |
| Spleen Pool | 100.0 |
| Thymus Pool | 30.6 |
| CNS cancer (glio/astro) U87-MG | 0.0 |
| CNS cancer (glio/astro) U-118-MG | 0.1 |
| CNS cancer (neuro; met) SK-N-AS | 0.1 |
| CNS cancer (astro) SF-539 | 0.0 |
| CNS cancer (astro) SNB-75 | 0.0 |
| CNS cancer (glio) SNB-19 | 0.0 |
| CNS cancer (glio) SF-295 | 0.7 |
| Brain (Amygdala) Pool | 1.0 |
| Brain (cerebellum) | 2.0 |
| Brain (fetal) | 2.6 |
| Brain (Hippocampus) Pool | 2.1 |
| Cerebral Cortex Pool | 1.3 |
| Brain (Substantia nigra) Pool | 1.5 |
| Brain (Thalamus) Pool | 2.5 |
| Brain (whole) | 3.8 |
| Spinal Cord Pool | 1.9 |
| Adrenal Gland | 55.1 |
| Pituitary gland Pool | 10.3 |
| Salivary Gland | 20.7 |
| Thyroid (female) | 70.7 |
| Pancreatic ca. CAPAN2 | 0.0 |
| Pancreas Pool | 53.6 |

Column A - Rel. Exp. (%) Ag4932, Run 228843451

[1226] TABLE ADF
Oncology_cell_line_screening_panel_v3.2

| Tissue Name | A |
|---|---|
| 94905_Daoy_Medulloblastoma/Cerebellum_sscDNA | 0.0 |
| 94906_TE671_Medulloblastom/Cerebellum_sscDNA | 0.0 |
| 94907_D283 | 0.0 |
| Med_Medulloblastoma/Cerebellum_sscDNA | |
| 94908_PFSK-1_Primitive | 0.5 |
| Neuroectodermal/Cerebellum_sscDNA | |
| 94909_XF-498_CNS_sscDNA | 0.0 |
| 94910_SNB-78_CNS/glioma_sscDNA | 0.0 |
| 94911_SF-268_CNS/glioblastoma_sscDNA | 0.0 |
| 94912_T98G_Glioblastoma_sscDNA | 0.0 |
| 96776_SK-N-SH_Neuroblastoma (metastasis)_sscDNA | 0.0 |
| 94913_SF-295_CNS/glioblastoma_sscDNA | 0.0 |
| 132565_NT2 pool_sscDNA | 0.1 |
| 94914_Cerebellum_sscDNA | 0.2 |
| 96777_Cerebellum_sscDNA | 0.3 |
| 94916_NCI-H292_Mucoepidermoid lung carcinoma_sscDNA | 0.0 |
| 94917_DMS-114_Small cell lung cancer_sscDNA | 0.0 |
| 94918_DMS-79_Small cell lung | 0.0 |
| cancer/neuroendocrine_sscDNA | |
| 94919_NCI-H146_Small cell | 0.0 |
| lung cancer/neuroendocrine_sscDNA | |
| 94920_NCI-H526_Small cell | 0.0 |
| lung cancer/neuroendocrine_sscDNA | |
| 94921_NCI-N417_Small cell | 0.0 |
| lung cancer/neuroendocrine_sscDNA | |
| 94923_NCI-H82_Small cell lung | 0.0 |
| cancer/neuroendocrine_sscDNA | |
| 94924_NCI-H157_Squamous cell lung cancer | 0.0 |
| (metastasis)_sscDNA | |
| 94925_NCI-H1155_Large cell lung | 0.0 |
| cancer/neuroendocrine_sscDNA | |
| 94926_NCI-H1299_Large cell lung | 0.0 |
| cancer/neuroendocrine_sscDNA | |
| 94927_NCI-H727_Lung carcinoid_sscDNA | 0.0 |
| 94928_NCI-UMC-11_Lung carcinoid_sscDNA | 0.0 |
| 94929_LX-1_Small cell lung cancer_sscDNA | 0.0 |
| 94930_Colo-205_Colon cancer_sscDNA | 0.0 |
| 94931_KM12_Colon cancer_sscDNA | 0.0 |
| 94932_KM20L2_Colon cancer_sscDNA | 0.0 |
| 94933_NCI-H716_Colon cancer_sscDNA | 0.0 |
| 94935_SW-48_Colon adenocarcinoma_sscDNA | 0.0 |
| 94936_SW1116_Colon | 0.0 |
| adenocarcinoma_sscDNA | |
| 94937_LS 174T_Colon adenocarcinoma_sscDNA | 0.0 |
| 94938_SW-948_Colon adenocarcinoma_sscDNA | 0.0 |
| 94939_SW-480_Colon adenocarcinoma_sscDNA | 0.0 |
| 94940_NCI-SNU-5_Gastric carcinoma_sscDNA | 0.0 |
| 112197_KATO III_Stomach_sscDNA | 0.0 |
| 94943_NCI-SNU-16_Gastric carcinoma_sscDNA | 0.0 |
| 94944_NCI-SNU-1_Gastric carcinoma_sscDNA | 0.0 |
| 94946_RF-1_Gastric adenocarcinoma_sscDNA | 0.0 |
| 94947_RF-48_Gastric adenocarcinoma_sscDNA | 0.1 |
| 96778_MKN-45_Gastric carcinoma_sscDNA | 0.0 |
| 94949_NCI-N87_Gastric carcinoma_sscDNA | 0.0 |
| 94951_OVCAR-5_Ovarian carcinoma_sscDNA | 0.0 |
| 94952_RL95-2_Uterine carcinoma_sscDNA | 0.0 |
| 94953_HelaS3_Cervical adenocarcinoma_sscDNA | 0.0 |
| 94954_Ca Ski_Cervical epidermoid carcinoma | 0.2 |
| (metastasis)_sscDNA | |
| 94955_ES-2_Ovarian clear cell carcinoma_sscDNA | 0.0 |
| 94957_Ramos/6 h stim_Stimulated with PMA/ionomycin | 0.0 |
| 6 h_sscDNA | |
| 94958_Ramos/14 h stim_Stimulated with PMA/ionomycin | 0.0 |
| 14 h_sscDNA | |
| 94962_MEG-01_Chronic myelogenous leukemia | 0.7 |
| (megokaryoblast)_sscDNA | |
| 94963_Raji_Burkitt's lymphoma_sscDNA | 0.0 |
| 94964_Daudi_Burkitt's lymphoma_sscDNA | 0.8 |
| 94965_U266_B-cell plasmacytoma/myeloma_sscDNA | 1.3 |
| 94968_CA46_Burkitt's lymphoma_sscDNA | 0.2 |
| 94970_RL_non-Hodgkin's B-cell lymphoma_sscDNA | 0.0 |
| 94972_JM1_pre-B-cell lymphoma/leukemia_sscDNA | 0.0 |
| 94973_Jurkat_T cell leukemia_sscDNA | 0.0 |
| 94974_TF-1_Erythroleukemia_sscDNA | 100.0 |
| 94975_HUT 78_T-cell lymphoma_sscDNA | 0.0 |
| 94977_U937_Histiocytic lymphoma_sscDNA | 0.0 |
| 94980_KU-812_Myelogenous leukemia_sscDNA | 28.9 |
| 94981_769-P_Clear cell renal carcinoma_sscDNA | 0.1 |
| 94983_Caki-2_Clear cell renal carcinoma_sscDNA | 0.0 |
| 94984_SW 839_Clear cell renal carcinoma_sscDNA | 0.0 |
| 94986_G401_Wilms' tumor_sscDNA | 0.0 |
| 126768_293 cells_sscDNA | 0.0 |
| 94987_Hs766T_Pancreatic carcinoma (LN | 0.6 |
| metastasis)_sscDNA | |
| 94988_CAPAN-1_Pancreatic adenocarcinoma (liver | 0.0 |
| metastasis)_sscDNA | |
| 94989_SU86.86_Pancreatic carcinoma (liver | 0.0 |
| metastasis)_sscDNA | |
| 94990_BxPC-3_Pancreatic adenocarcinoma_sscDNA | 0.0 |
| 94991_HPAC_Pancreatic adenocarcinoma_sscDNA | 0.0 |
| 94992_MIA PaCa-2_Pancreatic carcinoma_sscDNA | 0.0 |
| 94993_CFPAC-1_Pancreatic ductal | 0.1 |
| adenocarcinoma_sscDNA | |
| 94994_PANC-1_Pancreatic epithelioid ductal | 0.0 |
| carcinoma_sscDNA | |
| 94996_T24_Bladder carcinoma (transitional | 0.1 |
| cell)_sscDNA | |
| 94997_5637_Bladder carcinoma_sscDNA | 0.0 |
| 94998_HT-1197_Bladder carcinoma_sscDNA | 0.0 |
| 94999_UM-UC-3_Bladder carcinoma (transitional | 0.0 |
| cell)_sscDNA | |
| 95000_A204_Rhabdomyosarcoma_sscDNA | 0.0 |
| 95001_HT-1080_Fibrosarcoma_sscDNA | 0.0 |
| 95002_MG-63_Osteosarcoma (bone)_sscDNA | 0.0 |
| 95003_SK-LMS-1_Leiomyosarcoma (vulva)_sscDNA | 0.2 |
| 95004_SJRH30_Rhabdomyosarcoma (met to bone | 0.0 |
| marrow)_sscDNA | |
| 95005_A431_Epidermoid carcinoma_sscDNA | 0.0 |
| 95007_WM266-4_Melanoma_sscDNA | 0.0 |
| 112195_DU 145_Prostate_sscDNA | 0.0 |
| 95012_MDA-MB-468_Breast adenocarcinoma_sscDNA | 0.0 |
| 112196_SSC-4_Tongue_sscDNA | 0.0 |
| 112194_SSC-9_Tongue_sscDNA | 0.0 |
| 112191_SSC-15_Tongue_sscDNA | 0.0 |
| 95017_CAL 27_Squamous cell carcinoma of | 0.0 |
| tongue_sscDNA | |

Column A - Rel. Exp. (%) Ag1537, Run 267177741

[1227] TABLE ADG
Panel 2D

| Tissue Name | A |
|---|---|
| Normal Colon | 12.3 |
| CC Well to Mod Diff (ODO3866) | 10.7 |
| CC Margin (ODO3866) | 12.2 |
| CC Gr.2 rectosigmoid (ODO3868) | 3.2 |
| CC Margin (ODO3868) | 0.8 |
| CC Mod Diff (ODO3920) | 3.4 |
| CC Margin (ODO3920) | 2.2 |
| CC Gr.2 ascend colon (ODO3921) | 13.4 |
| CC Margin (ODO3921) | 5.8 |
| CC from Partial Hepatectomy (ODO4309) Mets | 9.6 |
| Liver Margin (ODO4309) | 0.6 |
| Colon mets to lung (OD04451-01) | 5.5 |
| Lung Margin (OD04451-02) | 0.8 |
| Normal Prostate 6546-1 | 14.1 |
| Prostate Cancer (OD04410) | 8.8 |
| Prostate Margin (OD04410) | 6.9 |
| Prostate Cancer (OD04720-01) | 3.1 |
| Prostate Margin (OD04720-02) | 10.3 |
| Normal Lung 061010 | 11.8 |
| Lung Met to Muscle (ODO4286) | 6.4 |
| Muscle Margin (ODO4286) | 9.9 |
| Lung Malignant Cancer (OD03126) | 19.3 |
| Lung Margin (OD03126) | 3.3 |
| Lung Cancer (OD04404) | 5.2 |
| Lung Margin (OD04404) | 25.3 |
| Lung Cancer (OD04565) | 3.4 |
| Lung Margin (OD04565) | 3.1 |
| Lung Cancer (OD04237-01) | 11.0 |
| Lung Margin (OD04237-02) | 18.2 |
| Ocular Mel Met to Liver (ODO4310) | 0.7 |
| Liver Margin (ODO4310) | 1.7 |
| Melanoma Mets to Lung (OD04321) | 3.9 |
| Lung Margin (OD04321) | 3.7 |
| Normal Kidney | 40.6 |
| Kidney Ca, Nuclear grade 2 (OD04338) | 5.7 |
| Kidney Margin (OD04338) | 11.1 |
| Kidney Ca Nuclear grade 1/2 (OD04339) | 2.5 |
| Kidney Margin (OD04339) | 17.6 |
| Kidney Ca, Clear cell type (OD04340) | 100.0 |
| Kidney Margin (OD04340) | 22.7 |
| Kidney Ca, Nuclear grade 3 (OD04348) | 55.1 |
| Kidney Margin (OD04348) | 19.9 |
| Kidney Cancer (OD04622-01) | 25.0 |
| Kidney Margin (OD04622-03) | 7.4 |
| Kidney Cancer (OD04450-01) | 1.3 |
| Kidney Margin (OD04450-03) | 9.2 |
| Kidney Cancer 8120607 | 9.2 |
| Kidney Margin 8120608 | 23.5 |
| Kidney Cancer 8120613 | 21.5 |
| Kidney Margin 8120614 | 12.3 |
| Kidney Cancer 9010320 | 34.4 |
| Kidney Margin 9010321 | 27.7 |
| Normal Uterus | 9.3 |
| Uterus Cancer 064011 | 6.4 |
| Normal Thyroid | 84.1 |
| Thyroid Cancer 064010 | 20.6 |
| Thyroid Cancer A302152 | 15.2 |
| Thyroid Margin A302153 | 21.3 |
| Normal Breast | 22.1 |
| Breast Cancer (OD04566) | 8.4 |
| Breast Cancer (OD04590-01) | 21.0 |
| Breast Cancer Mets (OD04590-03) | 27.7 |
| Breast Cancer Metastasis (OD04655-05) | 9.1 |
| Breast Cancer 064006 | 10.1 |
| Breast Cancer 1024 | 7.1 |
| Breast Cancer 9100266 | 10.4 |
| Breast Margin 9100265 | 7.4 |
| Breast Cancer A209073 | 27.4 |
| Breast Margin A209073 | 8.7 |
| Normal Liver | 1.1 |
| Liver Cancer 064003 | 6.5 |
| Liver Cancer 1025 | 0.7 |
| Liver Cancer 1026 | 8.1 |
| Liver Cancer 6004-T | 1.9 |
| Liver Tissue 6004-N | 3.6 |
| Liver Cancer 6005-T | 9.3 |
| Liver Tissue 6005-N | 0.6 |
| Normal Bladder | 14.1 |
| Bladder Cancer 1023 | 4.5 |
| Bladder Cancer A302173 | 3.6 |
| Bladder Cancer (OD04718-01) | 7.4 |
| Bladder Normal Adjacent (OD04718-03) | 15.2 |
| Normal Ovary | 1.4 |
| Ovarian Cancer 064008 | 6.5 |
| Ovarian Cancer (OD04768-07) | 1.6 |
| Ovary Margin (OD04768-08) | 9.2 |
| Normal Stomach | 13.5 |
| Gastric Cancer 9060358 | 2.8 |
| Stomach Margin 9060359 | 12.6 |
| Gastric Cancer 9060395 | 20.6 |
| Stomach Margin 9060394 | 7.5 |
| Gastric Cancer 9060397 | 10.0 |
| Stomach Margin 9060396 | 3.2 |
| Gastric Cancer 064005 | 6.7 |

Column A - Rel. Exp. (%) Ag1537, Run 145017308

[1228] TABLE ADH
Panel 4.1D

| Tissue Name | A |
|---|---|
| Secondary Th1 act | 0.1 |
| Secondary Th2 act | 0.4 |
| Secondary Tr1 act | 0.1 |
| Secondary Th1 rest | 0.1 |
| Secondary Th2 rest | 0.0 |
| Secondary Tr1 rest | 0.0 |
| Primary Th1 act | 0.0 |
| Primary Th2 act | 0.0 |
| Primary Tr1 act | 0.0 |
| Primary Th1 rest | 0.0 |
| Primary Th2 rest | 0.0 |
| Primary Tr1 rest | 0.0 |
| CD45RA CD4 lymphocyte act | 1.2 |
| CD45RO CD4 lymphocyte act | 0.2 |
| CD8 lymphocyte act | 0.1 |
| Secondary CD8 lymphocyte rest | 0.4 |
| Secondary CD8 lymphocyte act | 0.0 |
| CD4 lymphocyte none | 0.3 |
| 2ry Th1/Th2/Tr1_anti-CD95 CH11 | 0.0 |
| LAK cells rest | 0.1 |
| LAK cells IL-2 | 0.1 |
| LAK cells IL-2 + IL-12 | 0.2 |
| LAK cells IL-2 + IFN gamma | 0.5 |
| LAK cells IL-2 + IL-18 | 0.2 |
| LAK cells PMA/ionomycin | 0.2 |
| NK Cells IL-2 rest | 0.2 |
| Two Way MLR 3 day | 2.7 |
| Two Way MLR 5 day | 1.3 |
| Two Way MLR 7 day | 0.1 |
| PBMC rest | 0.0 |
| PBMC PWM | 0.0 |
| PBMC PHA-L | 0.0 |
| Ramos (B cell) none | 0.0 |
| Ramos (B cell) ionomycin | 0.1 |
| B lymphocytes PWM | 0.0 |
| B lymphocytes CD40L and IL-4 | 0.5 |
| EOL-1 dbcAMP | 0.0 |
| EOL-1 dbcAMP PMA/ionomycin | 0.1 |
| Dendritic cells none | 0.1 |
| Dendritic cells LPS | 1.7 |
| Dendritic cells anti-CD40 | 0.9 |
| Monocytes rest | 0.6 |
| Monocytes LPS | 0.1 |
| Macrophages rest | 0.0 |
| Macrophages LPS | 0.1 |
| HUVEC none | 1.9 |
| HUVEC starved | 8.4 |
| HUVEC IL-1beta | 5.6 |
| HUVEC IFN gamma | 40.6 |
| HUVEC TNF alpha + IFN gamma | 4.6 |
| HUVEC TNF alpha + IL4 | 5.0 |
| HUVEC IL-11 | 8.7 |
| Lung Microvascular EC none | 66.4 |
| Lung Microvascular EC TNFalpha + IL-1beta | 30.4 |
| Microvascular Dermal EC none | 43.5 |
| Microsvasular Dermal EC TNFalpha + IL-1beta | 17.0 |
| Bronchial epithelium TNFalpha + IL1beta | 0.3 |
| Small airway epithelium none | 0.0 |
| Small airway epithelium TNFalpha + IL-1beta | 0.0 |
| Coronery artery SMC rest | 0.0 |
| Coronery artery SMC TNFalpha + IL-1beta | 1.1 |
| Astrocytes rest | 0.0 |
| Astrocytes TNFalpha + IL-1beta | 0.2 |
| KU-812 (Basophil) rest | 27.0 |
| KU-812 (Basophil) PMA/ionomycin | 28.3 |
| CCD1106 (Keratinocytes) none | 0.0 |
| CCD1106 (Keratinocytes) TNFalpha + IL-1beta | 0.0 |
| Liver cirrhosis | 20.6 |
| NCI-H292 none | 0.0 |
| NCI-H292 IL-4 | 0.0 |
| NCI-H292 IL-9 | 0.0 |
| NCI-H292 IL-13 | 0.1 |
| NCI-H292 IFN gamma | 0.0 |
| HPAEC none | 1.8 |
| HPAEC TNF alpha + IL-1 beta | 1.5 |
| Lung fibroblast none | 0.4 |
| Lung fibroblast TNF alpha + IL-1 beta | 0.6 |
| Lung fibroblast IL-4 | 0.2 |
| Lung fibroblast IL-9 | 0.0 |
| Lung fibroblast IL-13 | 0.4 |
| Lung fibroblast IFN gamma | 0.2 |
| Dermal fibroblast CCD1070 rest | 0.0 |
| Dermal fibroblast CCD1070 TNF alpha | 0.0 |
| Dermal fibroblast CCD1070 IL-1 beta | 0.0 |
| Dermal fibroblast IFN gamma | 1.1 |
| Dermal fibroblast IL-4 | 0.4 |
| Dermal Fibroblasts rest | 0.7 |
| Neutrophils TNFa + LPS | 0.4 |
| Neutrophils rest | 0.3 |
| Colon | 19.3 |
| Lung | 100.0 |
| Thymus | 48.0 |
| Kidney | 68.8 |

Column A - Rel. Exp. (%) Ag4932, Run 223597251

[1229] TABLE ADI
general oncology screening panel_v_2.4

| Tissue Name | A |
|---|---|
| Colon cancer 1 | 11.4 |
| Colon cancer NAT 1 | 9.4 |
| Colon cancer 2 | 4.1 |
| Colon cancer NAT 2 | 4.1 |
| Colon cancer 3 | 10.4 |
| Colon cancer NAT 3 | 7.6 |
| Colon malignant cancer 4 | 9.7 |
| Colon normal adjacent tissue 4 | 3.4 |
| Lung cancer 1 | 4.8 |
| Lung NAT 1 | 0.7 |
| Lung cancer 2 | 5.6 |
| Lung NAT 2 | 0.1 |
| Squamous cell carcinoma 3 | 5.4 |
| Lung NAT 3 | 0.7 |
| metastatic melanoma 1 | 1.5 |
| Melanoma 2 | 4.0 |
| Melanoma 3 | 3.8 |
| metastatic melanoma 4 | 2.2 |
| metastatic melanoma 5 | 4.6 |
| Bladder cancer 1 | 1.0 |
| Bladder cancer NAT 1 | 0.0 |
| Bladder cancer 2 | 4.4 |
| Bladder cancer NAT 2 | 0.6 |
| Bladder cancer NAT 3 | 0.8 |
| Bladder cancer NAT 4 | 4.2 |
| Prostate adenocarcinoma 1 | 2.1 |
| Prostate adenocarcinoma 2 | 1.2 |
| Prostate adenocarcinoma 3 | 2.1 |
| Prostate adenocarcinoma 4 | 6.0 |
| Prostate cancer NAT 5 | 3.0 |
| Prostate adenocarcinoma 6 | 1.3 |
| Prostate adenocarcinoma 7 | 1.2 |
| Prostate adenocarcinoma 8 | 1.2 |
| Prostate adenocarcinoma 9 | 4.8 |
| Prostate cancer NAT 10 | 0.6 |
| Kidney cancer 1 | 90.1 |
| Kidney NAT 1 | 5.0 |
| Kidney cancer 2 | 60.3 |
| Kidney NAT 2 | 9.8 |
| Kidney cancer 3 | 30.8 |
| Kidney NAT 3 | 5.4 |
| Kidney cancer 4 | 100.0 |
| Kidney NAT 4 | 6.7 |

Column A - Rel. Exp. (%) Ag1537, Run 266930996

[1230] Ardais Kidney 1.0 Summary: Ag1537 Highest expression was seen in a kidney cancer sample (CT=21.3). In addition, this gene was more highly expressed in kidney cancer than in the corresponding normal adjacent tissue. Expression of this gene is useful as a marker of these cancers. Therapeutic modulation of the expression or function of this gene or gene product is useful in the treatment of kidney cancer.

[1231] Ardais Panel v.1.0 Summary: Ag1537 Highest expression of this gene was detected in a normal lung sample (CT=26.7). High to moderate levels of expression are seen in both malignant and normal lung samples. Therapeutic modulation of the PV1 protein (PLVAP) encoded by this gene is useful in the treatment of certain subtypes of lung cancer.

[1232] General_screening₁₃ panel_v1.5 Summary: Ag4932 Highest expression of this gene was detected in the spleen (CT=26). High levels of expression of this gene were also detected in tissues with metabolic/endocrine functions including pancreas, adipose, adrenal gland, thyroid, pituitary gland, skeletal muscle, heart, liver and the gastrointestinal tract. The PV-1-like protein is a plasma membrane protein with an extracellular domain that is an antibody target for the treatment of endocrine/metabolically related diseases, such as obesity and diabetes.

[1233] Moderate levels of expression of this gene were also seen in all regions of the central nervous system examined, including amygdala, hippocampus, substantia nigra, thalamus, cerebellum, cerebral cortex, and spinal cord. Therapeutic modulation of this gene or gene product is useful in the treatment of central nervous system disorders such as Alzheimer's disease, Parkinson's disease, epilepsy, multiple sclerosis, schizophrenia and depression.

[1234] In addition, this gene also showed high expression in colon cancer tissue, with moderate levels of expression in a gastric NCI-N87 cell line. Therapeutic modulation of this gene is useful in the treatment of colon and gastric cancers.

[1235] Oncology₁₃ cell₁₃ line_screening₁₃ panel_v3.2 Summary: Ag1537 Highest expression of this gene was detected in TF-1 erythroleukemia cells (CT=28.6). Moderate levels of expression of this gene are restricted to erythroleukemia and myelogenous leukemia. Expression of this gene is useful as a marker to distinguish these leukemia samples from other samples in the panel and also, as marker to detect the presence of these leukemia. Therapeutic modulation of this gene or its protein product is useful in the treatment of erythroleukemia and myelogenous leukemia.

[1236] Panel 2D Summary: Ag1537 Expression of this gene was highest in a kidney cancer (OD04340) sample (CT=25). This gene was widely expressed across this panel with high to moderate expression in both normal and adjacent cancer tissue. This gene was more highly expressed in kidney cancer tissue than in adjacent normal tissue, consistent with expression pattern seen in panel 2.4. This gene is useful as a marker to distinguish kidney cancers from normal kidney tissue. Therapeutic modulation of this gene or its protein product, through the use of small molecule drugs or antibodies, is of benefit in the treatment of kidney cancer.

[1237] Panel 4.1D Summary: Ag4932 Highest expression of this gene was detected in the lung (CT=28.5). Moderate levels of expression of this gene were also seen in endothelial cells, basophils and normal tissues represented by colon, thymus and kidney. This gene codes for a variant of PV-1, a component of the endothelial fenestral and stomatal diaphragms. Antibodies raised against the PV-1 encoded by this gene are useful in preventing transendothelial trafficking of inflammatory cells to different tissues sites and as a treatment of inflammatory diseases including delayed type hypersensitivity, asthma, emphysema, rheumatoid arthritis and IBD.

[1238] Moderate levels of expression of this gene were also seen in liver cirrhosis samples. Therefore, targeting this gene or its protein product with protein therapeutics, antibodies or small molecule therapeutics is useful as a treatment to reduce or inhibit fibrosis that occurs in liver cirrhosis.

[1239] general oncology screening panel_v_{—}2.4 Summary: Ag1537/Ag760 Highest expression of this gene was seen in a kidney cancer sample (CTs=22.6-25). Significant expression of this gene was seen in melanoma, colon, lung, prostate, bladder and kidney cancer as well as normal tissue samples. Expression of this gene was higher in kidney cancer as compared to corresponding normal control samples. Expression of this gene is useful as a marker to distinguish kidney cancer from normal tissue and also as a marker to detect kidney cancer. Therapeutic modulation of this gene or its protein product through the use of antibodies, protein therapeutics or small molecule drug is useful in the treatment of melanoma, kidney, colon, lung and prostate cancers.

[1240] AE. CG5525607: Apolipoprotein E Receptor 2

[1241] Expression of gene CG55256-07 was assessed using the primer-probe set Ag6829, described in Table AEA. Results of the RTQ-PCR runs are shown in Tables AEB and AEC.

TABLE AEA
Probe Name Ag6829

| | | | Start | SEQ ID |
|---|---|---|---|---|
| Primers | Sequences | Length | Position | No |
| Forward | 5′-aggacatgctgtggatgaag-3′ | 20 | 3987 | 1411 |
| Probe | TET-5′-tcacatctcttatttctcttttcccctt-3′- | 28 | 4031 | 1412 |
| | TAMRA | | | |
| Reverse | 5′-ccccacataaaggaaatggt-3′ | 20 | 4066 | 1413 |

[1242] TABLE AEB
General_screening_panel_v1.7

| Tissue Name | A |
|---|---|
| Adipose | 1.5 |
| HUVEC | 3.6 |
| Melanoma* Hs688(A).T | 0.0 |
| Melanoma* Hs688(B).T | 4.5 |
| Melanoma (met) SK-MEL-5 | 5.7 |
| Testis | 4.8 |
| Prostate ca. (bone met) PC-3 | 0.0 |
| Prostate ca. DU145 | 5.0 |
| Prostate pool | 0.1 |
| Uterus pool | 0.0 |
| Ovarian ca. OVCAR-3 | 1.9 |
| Ovarian ca. (ascites) SK-OV-3 | 0.1 |
| Ovarian ca. OVCAR-4 | 13.3 |
| Ovarian ca. OVCAR-5 | 13.2 |
| Ovarian ca. IGROV-1 | 29.9 |
| Ovarian ca. OVCAR-8 | 13.9 |
| Ovary | 0.4 |
| Breast ca. MCF-7 | 3.2 |
| Breast ca. MDA-MB-231 | 12.7 |
| Breast ca. BT-549 | 3.2 |
| Breast ca. T47D | 1.5 |
| Breast pool | 0.0 |
| Trachea | 1.4 |
| Lung | 1.3 |
| Fetal Lung | 1.4 |
| Lung ca. NCI-N417 | 2.2 |
| Lung ca. LX-1 | 1.9 |
| Lung ca. NCI-H146 | 3.8 |
| Lung ca. SHP-77 | 40.9 |
| Lung ca. NCI-H23 | 8.1 |
| Lung ca. NCI-H460 | 46.3 |
| Lung ca. HOP-62 | 15.3 |
| Lung ca. NCI-H522 | 9.2 |
| Lung ca. DMS-114 | 1.4 |
| Liver | 0.0 |
| Fetal Liver | 0.1 |
| Kidney pool | 0.8 |
| Fetal Kidney | 0.1 |
| Renal ca. 786-0 | 15.6 |
| Renal ca. A498 | 1.0 |
| Renal ca. ACHN | 4.2 |
| Renal ca. UO-31 | 1.1 |
| Renal ca. TK-10 | 7.6 |
| Bladder | 0.2 |
| Gastric ca. (liver met.) NCI-N87 | 1.3 |
| Stomach | 0.0 |
| Colon ca. SW-948 | 2.6 |
| Colon ca. SW480 | 1.1 |
| Colon ca. (SW480 met) SW620 | 14.4 |
| Colon ca. HT29 | 100.0 |
| Colon ca. HCT-116 | 30.6 |
| Colon cancer tissue | 0.0 |
| Colon ca. SW1116 | 7.6 |
| Colon ca. Colo-205 | 4.4 |
| Colon ca. SW-48 | 1.8 |
| Colon | 0.1 |
| Small Intestine | 0.0 |
| Fetal Heart | 0.0 |
| Heart | 0.0 |
| Lymph Node pool 1 | 0.0 |
| Lymph Node pool 2 | 3.3 |
| Fetal Skeletal Muscle | 0.1 |
| Skeletal Muscle pool | 0.0 |
| Skeletal Muscle | 0.0 |
| Spleen | 0.2 |
| Thymus | 0.1 |
| CNS cancer (glio/astro) SF-268 | 3.0 |
| CNS cancer (glio/astro) T98G | 5.7 |
| CNS cancer (neuro; met) SK-N-AS | 0.6 |
| CNS cancer (astro) SF-539 | 10.5 |
| CNS cancer (astro) SNB-75 | 9.3 |
| CNS cancer (glio) SNB-19 | 23.0 |
| CNS cancer (glio) SF-295 | 3.1 |
| Brain (Amygdala) | 3.4 |
| Brain (Cerebellum) | 4.5 |
| Brain (Fetal) | 24.0 |
| Brain (Hippocampus) | 1.9 |
| Cerebral Cortex pool | 2.5 |
| Brain (Substantia nigra) | 1.2 |
| Brain (Thalamus) | 3.3 |
| Brain (Whole) | 21.9 |
| Spinal Cord | 0.5 |
| Adrenal Gland | 0.3 |
| Pituitary Gland | 2.4 |
| Salivary Gland | 0.1 |
| Thyroid | 13.9 |
| Pancreatic ca. PANC-1 | 1.2 |
| Pancreas pool | 0.1 |

Column A - Rel. Exp. (%) Ag6829, Run 318350033

[1243] TABLE AEC
Panel 5 Islet

| Tissue Name | A |
|---|---|
| 97457_Patient-02go_adipose | 0.0 |
| 97476_Patient-07sk_skeletal muscle | 0.0 |
| 97477_Patient-07ut_uterus | 0.0 |
| 97478_Patient-07pl_placenta | 21.2 |
| 99167_Bayer Patient 1 | 2.4 |
| 97482_Patient-08ut_uterus | 0.0 |
| 97483_Patient-08pl_placenta | 10.7 |
| 97486_Patient-09sk_skeletal muscle | 0.0 |
| 97487_Patient-09ut_uterus | 0.0 |
| 97488_Patient-09pl_placenta | 12.2 |
| 97492_Patient-10ut_uterus | 0.0 |
| 97493_Patient-10pl_placenta | 63.7 |
| 97495_Patient-11go_adipose | 0.0 |
| 97496_Patient-11sk_skeletal muscle | 0.0 |
| 97497_Patient-11ut_uterus | 4.3 |
| 97498_Patient-11pl_placenta | 15.9 |
| 97500_Patient-12go_adipose | 0.0 |
| 97501_Patient-12sk_skeletal muscle | 2.9 |
| 97502_Patient-12ut_uterus | 5.4 |
| 97503_Patient-12pl_placenta | 62.4 |
| 94721_Donor 2 U - A_Mesenchymal Stem Cells | 7.4 |
| 94722_Donor 2 U - B_Mesenchymal Stem Cells | 5.9 |
| 94723_Donor 2 U - C_Mesenchymal Stem Cells | 6.7 |
| 94709_Donor 2 AM - A_adipose | 11.9 |
| 94710_Donor 2 AM - B_adipose | 5.0 |
| 94711_Donor 2 AM - C_adipose | 4.5 |
| 94712_Donor 2 AD - A_adipose | 7.5 |
| 94713_Donor 2 AD - B_adipose | 17.6 |
| 94714_Donor 2 AD - C_adipose | 8.4 |
| 94742_Donor 3 U - A_Mesenchymal Stem Cells | 0.0 |
| 94743_Donor 3 U - B_Mesenchymal Stem Cells | 0.0 |
| 94730_Donor 3 AM - A_adipose | 19.8 |
| 94731_Donor 3 AM - B_adipose | 37.9 |
| 94732_Donor 3 AM - C_adipose | 29.9 |
| 94733_Donor 3 AD - A_adipose | 32.5 |
| 94734_Donor 3 AD - B_adipose | 17.2 |
| 94735_Donor 3 AD - C_adipose | 18.9 |
| 77138_Liver_HepG2untreated | 100.0 |
| 73556_Heart_Cardiac stromal cells (primary) | 4.9 |
| 81735_Small Intestine | 2.6 |
| 72409_Kidney_Proximal Convoluted Tubule | 29.5 |
| 82685_Small intestine_Duodenum | 0.0 |
| 90650_Adrenal_Adrenocortical adenoma | 0.0 |
| 72410_Kidney_HRCE | 67.8 |
| 72411_Kidney_HRE | 37.6 |
| 73139_Uterus_Uterine smooth muscle cells | 15.7 |

Column A - Rel. Exp. (%) Ag6829, Run 279524965

[1244] General_screening₁₃ panel₁₃ v1.7 Summary: Ag6829 Highest expression was seen in a colon cancer cell line (CT=28). Prominent levels of expression were seen in clusters of cell lines derived from brain, colon, lung and ovarian cancer cell lines. Targeting this gene or its protein product is useful in the treatment of these cancers.

[1245] Panel 5 Islet Summary: Ag6829 Low but significant levels of expression were seen in a liver cell line (CT=34).

[1246] AF. CG5525610: Apolipoprotein E Receptor 2

[1247] Expression of full-length physical clone CG55256-10 was assessed using the primer-probe set Ag7103, described in Table AFA. Results of the RTQ-PCR runs are shown in Table AFB.

TABLE AFA
Probe Name Ag7103

| | | | Start | SEQ ID |
|---|---|---|---|---|
| Primers | Sequences | Length | Position | No |
| Forward | 5′-cccagcttctctgcacca-3′ | 18 | 778 | 1414 |
| Probe | TET-5′-cctcggactcatcggagccatca-3′- | 23 | 818 | 1415 |
| | TAMRA | | | |
| Reverse | 5′-cggcgaggaggagtgtc-3′ | 17 | 842 | 1416 |

[1248] TABLE AFB
General_screening_panel_v1.7

| Tissue Name | A |
|---|---|
| Adipose | 1.2 |
| HUVEC | 4.6 |
| Melanoma* Hs688(A).T | 0.0 |
| Melanoma* Hs688(B).T | 6.3 |
| Melanoma (met) SK-MEL-5 | 7.8 |
| Testis | 9.2 |
| Prostate ca. (bone met) PC-3 | 0.0 |
| Prostate ca. DU145 | 13.7 |
| Prostate pool | 0.1 |
| Uterus pool | 0.1 |
| Ovarian ca. OVCAR-3 | 0.9 |
| Ovarian ca. (ascites) SK-OV-3 | 0.7 |
| Ovarian ca. OVCAR-4 | 11.0 |
| Ovarian ca. OVCAR-5 | 10.4 |
| Ovarian ca. IGROV-1 | 19.6 |
| Ovarian ca. OVCAR-8 | 8.6 |
| Ovary | 0.5 |
| Breast ca. MCF-7 | 6.0 |
| Breast ca. MDA-MB-231 | 12.2 |
| Breast ca. BT-549 | 4.9 |
| Breast ca. T47D | 3.6 |
| Breast pool | 0.1 |
| Trachea | 1.3 |
| Lung | 1.0 |
| Fetal Lung | 1.3 |
| Lung ca. NCI-N417 | 7.2 |
| Lung ca. LX-1 | 6.7 |
| Lung ca. NCI-H146 | 5.9 |
| Lung ca. SHP-77 | 18.7 |
| Lung ca. NCI-H23 | 7.9 |
| Lung ca. NCI-H460 | 26.4 |
| Lung ca. HOP-62 | 9.9 |
| Lung ca. NCI-H522 | 7.1 |
| Lung ca. DMS-114 | 2.5 |
| Liver | 0.0 |
| Fetal Liver | 0.2 |
| Kidney pool | 0.5 |
| Fetal Kidney | 0.3 |
| Renal ca. 786-0 | 11.0 |
| Renal ca. A498 | 3.2 |
| Renal ca. ACHN | 4.3 |
| Renal ca. UO-31 | 1.7 |
| Renal ca. TK-10 | 9.9 |
| Bladder | 0.5 |
| Gastric ca. (liver met.) NCI-N87 | 2.6 |
| Stomach | 0.1 |
| Colon ca. SW-948 | 2.7 |
| Colon ca. SW480 | 4.9 |
| Colon ca. (SW480 met) SW620 | 15.5 |
| Colon ca. HT29 | 64.6 |
| Colon ca. HCT-116 | 24.0 |
| Colon cancer tissue | 0.2 |
| Colon ca. SW1116 | 19.1 |
| Colon ca. Colo-205 | 8.2 |
| Colon ca. SW-48 | 3.6 |
| Colon | 0.3 |
| Small Intestine | 0.0 |
| Fetal Heart | 0.1 |
| Heart | 0.1 |
| Lymph Node pool 1 | 0.1 |
| Lymph Node pool 2 | 2.2 |
| Fetal Skeletal Muscle | 0.3 |
| Skeletal Muscle pool | 0.0 |
| Skeletal Muscle | 0.1 |
| Spleen | 0.3 |
| Thymus | 0.5 |
| CNS cancer (glio/astro) SF-268 | 5.3 |
| CNS cancer (glio/astro) T98G | 8.4 |
| CNS cancer (neuro; met) SK-N-AS | 100.0 |
| CNS cancer (astro) SF-539 | 9.7 |
| CNS cancer (astro) SNB-75 | 10.2 |
| CNS cancer (glio) SNB-19 | 18.4 |
| CNS cancer (glio) SF-295 | 6.8 |
| Brain (Amygdala) | 5.0 |
| Brain (Cerebellum) | 11.3 |
| Brain (Fetal) | 27.5 |
| Brain (Hippocampus) | 3.6 |
| Cerebral Cortex pool | 3.3 |
| Brain (Substantia nigra) | 3.0 |
| Brain (Thalamus) | 3.6 |
| Brain (Whole) | 22.5 |
| Spinal Cord | 0.8 |
| Adrenal Gland | 0.7 |
| Pituitary Gland | 4.3 |
| Salivary Gland | 0.1 |
| Thyroid | 11.9 |
| Pancreatic ca. PANC-1 | 3.1 |
| Pancreas pool | 0.2 |

Column A - Rel. Exp. (%) Ag7103, Run 318037113

[1249] General_screening₁₃ panel_v1.7 Summary: Ag7103 Highest expression was seen in a brain cancer cell line (CT=21), with high levels of expression seen in all the cancer cell line samples on this panel. This gene or gene product is involved in cell growth and/or proliferation. Targeting this gene or gene product is useful in the treatment of cancers, including breast, brain, ovarian, colon, renal, brain, prostate and melanoma cancers.

[1250] AG. CG5577601: Mechanical Stress Induced Protein

[1251] Expression of gene CG55776-01 was assessed using the primer-probe sets Ag1489 and Ag4335, described in Tables AGA and AGB. Results of the RTQ-PCR runs are shown in Tables AGC, AGD, AGE, AGF, AGG and AGH.

TABLE AGA
Probe Name Ag1489

| | | | Start | SEQ ID |
|---|---|---|---|---|
| Primers | Sequences | Length | Position | No |
| Forward | 5′-cacagcattgaattgctctgt-3′ | 21 | 7049 | 1417 |
| Probe | TET-5′-tctggattttaccaaatggcacacga-3′- | 26 | 7096 | 1418 |
| | TAMRA | | | |
| Reverse | 5′-gataactttgtggtccattgga-3′ | 22 | 7125 | 1419 |

[1252] TABLE AGB
Probe Name Ag4335

| | | | Start | SEQ ID |
|---|---|---|---|---|
| Primers | Sequences | Length | Position | No |
| Forward | 5′-cacctgaagaacccacagatt-3′ | 21 | 2593 | 1420 |
| Probe | TET-5′-tgctattaaaactacagccatgtcaaaga-3′- | 29 | 2627 | 1421 |
| | TAMRA | | | |
| Reverse | 5′-gcttgacatggttgggtttat-3′ | 21 | 2658 | 1422 |

[1253] TABLE AGC
AI_comprehensive panel_v1.0

| Tissue Name | A |
|---|---|
| 110967 COPD-F | 1.8 |
| 110980 COPD-F | 12.1 |
| 110968 COPD-M | 2.7 |
| 110977 COPD-M | 0.0 |
| 110989 Emphysema-F | 4.9 |
| 110992 Emphysema-F | 5.7 |
| 110993 Emphysema-F | 3.3 |
| 110994 Emphysema-F | 1.7 |
| 110995 Emphysema-F | 5.2 |
| 110996 Emphysema-F | 3.1 |
| 110997 Asthma-M | 0.5 |
| 111001 Asthma-F | 2.2 |
| 111002 Asthma-F | 2.3 |
| 111003 Atopic Asthma-F | 2.3 |
| 111004 Atopic Asthma-F | 6.1 |
| 111005 Atopic Asthma-F | 2.6 |
| 111006 Atopic Asthma-F | 0.4 |
| 111417 Allergy-M | 3.4 |
| 112347 Allergy-M | 0.1 |
| 112349 Normal Lung-F | 0.2 |
| 112357 Normal Lung-F | 100.0 |
| 112354 Normal Lung-M | 59.0 |
| 112374 Crohns-F | 7.3 |
| 112389 Match Control Crohns-F | 0.5 |
| 112375 Crohns-F | 4.4 |
| 112732 Match Control Crohns-F | 6.1 |
| 112725 Crohns-M | 0.9 |
| 112387 Match Control Crohns-M | 2.5 |
| 112378 Crohns-M | 0.4 |
| 112390 Match Control Crohns-M | 7.5 |
| 112726 Crohns-M | 2.3 |
| 112731 Match Control Crohns-M | 4.7 |
| 112380 Ulcer Col-F | 2.4 |
| 112734 Match Control Ulcer Col-F | 24.1 |
| 112384 Ulcer Col-F | 4.6 |
| 112737 Match Control Ulcer Col-F | 1.6 |
| 112386 Ulcer Col-F | 1.7 |
| 112738 Match Control Ulcer Col-F | 3.2 |
| 112381 Ulcer Col-M | 0.8 |
| 112735 Match Control Ulcer Col-M | 3.8 |
| 112382 Ulcer Col-M | 1.0 |
| 112394 Match Control Ulcer Col-M | 1.9 |
| 112383 Ulcer Col-M | 4.0 |
| 112736 Match Control Ulcer Col-M | 0.6 |
| 112423 Psoriasis-F | 8.9 |
| 112427 Match Control Psoriasis-F | 28.5 |
| 112418 Psoriasis-M | 2.1 |
| 112723 Match Control Psoriasis-M | 6.9 |
| 112419 Psoriasis-M | 4.2 |
| 112424 Match Control Psoriasis-M | 4.4 |
| 112420 Psoriasis-M | 5.4 |
| 112425 Match Control Psoriasis-M | 33.2 |
| 104689 (MF) OA Bone-Backus | 9.0 |
| 104690 (MF) Adj “Normal” Bone-Backus | 8.1 |
| 104691 (MF) OA Synovium-Backus | 54.0 |
| 104692 (BA) OA Cartilage-Backus | 0.3 |
| 104694 (BA) OA Bone-Backus | 20.3 |
| 104695 (BA) Adj “Normal” Bone-Backus | 3.1 |
| 104696 (BA) OA Synovium-Backus | 26.4 |
| 104700 (SS) OA Bone-Backus | 2.8 |
| 104701 (SS) Adj “Normal” Bone-Backus | 8.6 |
| 104702 (SS) OA Synovium-Backus | 14.7 |
| 117093 OA Cartilage Rep7 | 2.1 |
| 112672 OA Bone5 | 11.9 |
| 112673 OA Synovium5 | 5.8 |
| 112674 OA Synovial Fluid cells5 | 6.4 |
| 117100 OA Cartilage Rep14 | 0.7 |
| 112756 OA Bone9 | 2.8 |
| 112757 OA Synovium9 | 0.8 |
| 112758 OA Synovial Fluid Cells9 | 6.1 |
| 117125 RA Cartilage Rep2 | 3.4 |
| 113492 Bone2 RA | 40.3 |
| 113493 Synovium2 RA | 15.8 |
| 113494 Syn Fluid Cells RA | 25.2 |
| 113499 Cartilage4 RA | 33.9 |
| 113500 Bone4 RA | 42.6 |
| 113501 Synovium4 RA | 26.6 |
| 113502 Syn Fluid Cells4 RA | 20.0 |
| 113495 Cartilage3 RA | 27.2 |
| 113496 Bone3 RA | 32.8 |
| 113497 Synovium3 RA | 19.3 |
| 113498 Syn Fluid Cells3 RA | 39.5 |
| 117106 Normal Cartilage Rep20 | 0.0 |
| 113663 Bone3 Normal | 0.7 |
| 113664 Synovium3 Normal | 0.1 |
| 113665 Syn Fluid Cells3 Normal | 0.3 |
| 117107 Normal Cartilage Rep22 | 2.2 |
| 113667 Bone4 Normal | 4.1 |
| 113668 Synovium4 Normal | 4.8 |
| 113669 Syn Fluid Cells4 Normal | 5.8 |

Column A - Rel. Exp. (%) Ag1489, Run 226203351

[1254] TABLE AGD
Ardais Panel 1.1

| Tissue Name | A |
|---|---|
| Lung adenocarcinoma SI A | 2.0 |
| Lung adenocarcinoma SI B | 4.2 |
| Lung adenocarcinoma SI B NAT | 78.5 |
| Lung adenocarcinoma SI C | 0.1 |
| Lung adenocarcinoma SI C NAT | 52.1 |
| Lung adenocarcinoma SII A | 1.6 |
| Lung adenocarcinoma SII A NAT | 69.7 |
| Lung adenocarcinoma SII C NAT | 100.0 |
| Lung adenocarcinoma SIII A | 2.3 |
| Lung adenocarcinoma SIII B | 1.6 |
| Lung adenocarcinoma SIII C | 0.0 |
| Lung SCC SI A | 1.3 |
| Lung SCC SI B NAT | 61.6 |
| Lung SCC SI C | 14.5 |
| Lung SCC SI C NAT | 23.0 |
| Lung SCC SI D | 11.8 |
| Lung SCC SI D NAT | 16.6 |
| Lung SCC SII A | 79.6 |
| Lung SCC SII B | 0.7 |
| Lung SCC SIII A | 0.9 |
| Lung SCC SIII A NAT | 18.2 |

Column A - Rel. Exp. (%) Ag1489, Run 312115281

[1255] TABLE AGE
General_screening_panel_v1.4

| Tissue Name | A |
|---|---|
| Adipose | 4.7 |
| Melanoma* Hs688(A).T | 0.2 |
| Melanoma* Hs688(B).T | 0.4 |
| Melanoma* M14 | 0.1 |
| Melanoma* LOXIMVI | 0.1 |
| Melanoma* SK-MEL-5 | 0.2 |
| Squamous cell carcinoma SCC-4 | 0.3 |
| Testis Pool | 1.5 |
| Prostate ca.* (bone met) PC-3 | 0.3 |
| Prostate Pool | 0.2 |
| Placenta | 0.1 |
| Uterus Pool | 1.5 |
| Ovarian ca. OVCAR-3 | 1.1 |
| Ovarian ca. SK-OV-3 | 0.0 |
| Ovarian ca. OVCAR-4 | 0.0 |
| Ovarian ca. OVCAR-5 | 0.2 |
| Ovarian ca. IGROV-1 | 0.0 |
| Ovarian ca. OVCAR-8 | 0.1 |
| Ovary | 3.8 |
| Breast ca. MCF-7 | 0.7 |
| Breast ca. MDA-MB-231 | 0.1 |
| Breast ca. BT 549 | 0.2 |
| Breast ca. T47D | 0.3 |
| Breast ca. MDA-N | 0.0 |
| Breast Pool | 2.1 |
| Trachea | 7.0 |
| Lung | 8.5 |
| Fetal Lung | 100.0 |
| Lung ca. NCI-N417 | 0.0 |
| Lung ca. LX-1 | 0.0 |
| Lung ca. NCI-H146 | 10.7 |
| Lung ca. SHP-77 | 0.1 |
| Lung ca. A549 | 3.3 |
| Lung ca. NCI-H526 | 0.2 |
| Lung ca. NCI-H23 | 3.3 |
| Lung ca. NCI-H460 | 0.1 |
| Lung ca. HOP-62 | 2.6 |
| Lung ca. NCI-H522 | 0.0 |
| Liver | 0.1 |
| Fetal Liver | 0.6 |
| Liver ca. HepG2 | 0.0 |
| Kidney Pool | 8.0 |
| Fetal Kidney | 1.6 |
| Renal ca. 786-0 | 0.3 |
| Renal ca. A498 | 0.2 |
| Renal ca. ACHN | 0.0 |
| Renal ca. UO-31 | 0.0 |
| Renal ca. TK-10 | 0.0 |
| Bladder | 0.5 |
| Gastric ca. (liver met.) NCI-N87 | 0.2 |
| Gastric ca. KATO III | 0.0 |
| Colon ca. SW-948 | 0.0 |
| Colon ca. SW480 | 0.1 |
| Colon ca.* (SW480 met) SW620 | 0.0 |
| Colon ca. HT29 | 1.8 |
| Colon ca. HCT-116 | 0.1 |
| Colon ca. CaCo-2 | 3.8 |
| Colon cancer tissue | 0.3 |
| Colon ca. SW1116 | 0.0 |
| Colon ca. Colo-205 | 0.0 |
| Colon ca. SW-48 | 0.0 |
| Colon Pool | 2.0 |
| Small Intestine Pool | 4.2 |
| Stomach Pool | 1.5 |
| Bone Marrow Pool | 1.1 |
| Fetal Heart | 4.9 |
| Heart Pool | 2.7 |
| Lymph Node Pool | 2.2 |
| Fetal Skeletal Muscle | 8.2 |
| Skeletal Muscle Pool | 0.3 |
| Spleen Pool | 2.2 |
| Thymus Pool | 2.1 |
| CNS cancer (glio/astro) U87-MG | 0.3 |
| CNS cancer (glio/astro) U-118-MG | 0.4 |
| CNS cancer (neuro; met) SK-N-AS | 0.0 |
| CNS cancer (astro) SF-539 | 3.9 |
| CNS cancer (astro) SNB-75 | 10.0 |
| CNS cancer (glio) SNB-19 | 0.0 |
| CNS cancer (glio) SF-295 | 4.0 |
| Brain (Amygdala) Pool | 0.5 |
| Brain (cerebellum) | 0.3 |
| Brain (fetal) | 0.4 |
| Brain (Hippocampus) Pool | 1.6 |
| Cerebral Cortex Pool | 1.1 |
| Brain (Substantia nigra) Pool | 0.5 |
| Brain (Thalamus) Pool | 1.4 |
| Brain (whole) | 0.6 |
| Spinal Cord Pool | 0.7 |
| Adrenal Gland | 3.8 |
| Pituitary gland Pool | 3.0 |
| Salivary Gland | 1.7 |
| Thyroid (female) | 1.0 |
| Pancreatic ca. CAPAN2 | 0.0 |
| Pancreas Pool | 2.4 |

Column A - Rel. Exp. (%) Ag4335, Run 222550589

[1256] TABLE AGF
Panel 2D

| Tissue Name | A | B |
|---|---|---|
| Normal Colon | 24.0 | 17.2 |
| CC Well to Mod Diff (ODO3866) | 1.4 | 0.4 |
| CC Margin (ODO3866) | 4.6 | 3.6 |
| CC Gr.2 rectosigmoid (ODO3868) | 0.4 | 0.7 |
| CC Margin (ODO3868) | 3.4 | 1.1 |
| CC Mod Diff (ODO3920) | 0.0 | 0.1 |
| CC Margin (ODO3920) | 5.0 | 4.7 |
| CC Gr.2 ascend colon (ODO3921) | 1.0 | 0.5 |
| CC Margin (ODO3921) | 4.1 | 5.0 |
| CC from Partial Hepatectomy | 2.2 | 0.9 |
| (ODO4309) Mets | | |
| Liver Margin (ODO4309) | 3.2 | 2.0 |
| Colon mets to lung (OD04451-01) | 0.4 | 0.7 |
| Lung Margin (OD04451-02) | 6.0 | 5.2 |
| Normal Prostate 6546-1 | 1.1 | 0.9 |
| Prostate Cancer (OD04410) | 1.4 | 0.6 |
| Prostate Margin (OD04410) | 0.2 | 0.7 |
| Prostate Cancer (OD04720-01) | 0.9 | 0.6 |
| Prostate Margin (OD04720-02) | 1.0 | 1.0 |
| Normal Lung 061010 | 100.0 | 100.0 |
| Lung Met to Muscle (ODO4286) | 0.8 | 1.0 |
| Muscle Margin (ODO4286) | 2.0 | 1.3 |
| Lung Malignant Cancer (OD03126) | 11.1 | 8.4 |
| Lung Margin (OD03126) | 64.2 | 51.8 |
| Lung Cancer (OD04404) | 6.6 | 5.1 |
| Lung Margin (OD04404) | 37.4 | 31.9 |
| Lung Cancer (OD04565) | 1.8 | 1.3 |
| Lung Margin (OD04565) | 19.3 | 20.6 |
| Lung Cancer (OD04237-01) | 2.0 | 2.2 |
| Lung Margin (OD04237-02) | 42.3 | 37.6 |
| Ocular Mel Met to Liver (ODO4310) | 0.0 | 0.2 |
| Liver Margin (ODO4310) | 2.3 | 0.5 |
| Melanoma Mets to Lung (OD04321) | 1.9 | 1.8 |
| Lung Margin (OD04321) | 49.0 | 37.9 |
| Normal Kidney | 5.4 | 4.8 |
| Kidney Ca, Nuclear grade 2 (OD04338) | 0.4 | 0.6 |
| Kidney Margin (OD04338) | 3.2 | 2.1 |
| Kidney Ca Nuclear grade 1/2 (OD04339) | 0.7 | 0.3 |
| Kidney Margin (OD04339) | 1.2 | 0.2 |
| Kidney Ca, Clear cell type (OD04340) | 0.4 | 0.4 |
| Kidney Margin (OD04340) | 5.1 | 4.2 |
| Kidney Ca, Nuclear grade 3 (OD04348) | 0.3 | 0.1 |
| Kidney Margin (OD04348) | 2.4 | 1.6 |
| Kidney Cancer (OD04622-01) | 0.1 | 0.2 |
| Kidney Margin (OD04622-03) | 0.0 | 0.1 |
| Kidney Cancer (OD04450-01) | 0.0 | 0.0 |
| Kidney Margin (OD04450-03) | 1.9 | 1.1 |
| Kidney Cancer 8120607 | 0.0 | 0.0 |
| Kidney Margin 8120608 | 0.1 | 0.0 |
| Kidney Cancer 8120613 | 0.0 | 0.0 |
| Kidney Margin 8120614 | 0.1 | 0.1 |
| Kidney Cancer 9010320 | 1.1 | 1.0 |
| Kidney Margin 9010321 | 0.1 | 0.2 |
| Normal Uterus | 3.1 | 2.3 |
| Uterus Cancer 064011 | 24.5 | 18.8 |
| Normal Thyroid | 10.4 | 9.0 |
| Thyroid Cancer 064010 | 0.3 | 0.0 |
| Thyroid Cancer A302152 | 0.5 | 0.5 |
| Thyroid Margin A302153 | 14.5 | 9.2 |
| Normal Breast | 32.1 | 31.9 |
| Breast Cancer (OD04566) | 0.5 | 0.4 |
| Breast Cancer (OD04590-01) | 9.3 | 4.4 |
| Breast Cancer Mets (OD04590-03) | 9.7 | 5.9 |
| Breast Cancer Metastasis (OD04655-05) | 8.2 | 5.8 |
| Breast Cancer 064006 | 8.4 | 5.3 |
| Breast Cancer 1024 | 9.6 | 9.2 |
| Breast Cancer 9100266 | 1.7 | 2.2 |
| Breast Margin 9100265 | 10.7 | 9.6 |
| Breast Cancer A209073 | 11.0 | 10.2 |
| Breast Margin A209073 | 13.6 | 12.5 |
| Normal Liver | 2.2 | 1.9 |
| Liver Cancer 064003 | 0.6 | 0.4 |
| Liver Cancer 1025 | 0.6 | 0.2 |
| Liver Cancer 1026 | 0.0 | 0.1 |
| Liver Cancer 6004-T | 0.9 | 0.3 |
| Liver Tissue 6004-N | 0.2 | 0.2 |
| Liver Cancer 6005-T | 0.0 | 0.2 |
| Liver Tissue 6005-N | 0.0 | 0.0 |
| Normal Bladder | 2.4 | 0.5 |
| Bladder Cancer 1023 | 0.5 | 0.9 |
| Bladder Cancer A302173 | 33.4 | 31.4 |
| Bladder Cancer (OD04718-01) | 0.4 | 0.0 |
| Bladder Normal Adjacent (OD04718-03) | 17.4 | 17.6 |
| Normal Ovary | 22.4 | 14.9 |
| Ovarian Cancer 064008 | 7.1 | 4.4 |
| Ovarian Cancer (OD04768-07) | 2.1 | 1.8 |
| Ovary Margin (OD04768-08) | 1.2 | 1.8 |
| Normal Stomach | 6.4 | 4.4 |
| Gastric Cancer 9060358 | 3.1 | 1.4 |
| Stomach Margin 9060359 | 1.3 | 2.3 |
| Gastric Cancer 9060395 | 2.4 | 4.5 |
| Stomach Margin 9060394 | 5.3 | 3.4 |
| Gastric Cancer 9060397 | 0.3 | 0.7 |
| Stomach Margin 9060396 | 0.7 | 0.1 |
| Gastric Cancer 064005 | 6.8 | 4.4 |

Column A - Rel. Exp. (%) Ag1489, Run 152799815
Column B - Rel. Exp. (%) Ag1489, Run 152799848

[1257] TABLE AGG
Panel 4.1D

| Tissue Name | A |
|---|---|
| Secondary Th1 act | 0.0 |
| Secondary Th2 act | 0.0 |
| Secondary Tr1 act | 0.0 |
| Secondary Th1 rest | 0.0 |
| Secondary Th2 rest | 0.0 |
| Secondary Tr1 rest | 0.0 |
| Primary Th1 act | 0.0 |
| Primary Th2 act | 0.0 |
| Primary Tr1 act | 0.0 |
| Primary Th1 rest | 0.0 |
| Primary Th2 rest | 0.0 |
| Primary Tr1 rest | 0.0 |
| CD45RA CD4 lymphocyte act | 0.6 |
| CD45RO CD4 lymphocyte act | 0.0 |
| CD8 lymphocyte act | 0.0 |
| Secondary CD8 lymphocyte rest | 1.2 |
| Secondary CD8 lymphocyte act | 0.0 |
| CD4 lymphocyte none | 0.0 |
| 2ry Th1/Th2/Tr1_anti-CD95 CH11 | 0.0 |
| LAK cells rest | 1.5 |
| LAK cells IL-2 | 0.0 |
| LAK cells IL-2 + IL-12 | 0.0 |
| LAK cells IL-2 + IFN gamma | 0.0 |
| LAK cells IL-2 + IL-18 | 0.9 |
| LAK cells PMA/ionomycin | 0.0 |
| NK Cells IL-2 rest | 0.3 |
| Two Way MLR 3 day | 1.7 |
| Two Way MLR 5 day | 0.5 |
| Two Way MLR 7 day | 0.0 |
| PBMC rest | 0.0 |
| PBMC PWM | 0.5 |
| PBMC PHA-L | 0.0 |
| Ramos (B cell) none | 0.7 |
| Ramos (B cell) ionomycin | 0.0 |
| B lymphocytes PWM | 0.0 |
| B lymphocytes CD40L and IL-4 | 0.8 |
| EOL-1 dbcAMP | 34.2 |
| EOL-1 dbcAMP PMA/ionomycin | 18.6 |
| Dendritic cells none | 11.9 |
| Dendritic cells LPS | 0.7 |
| Dendritic cells anti-CD40 | 2.7 |
| Monocytes rest | 1.4 |
| Monocytes LPS | 0.0 |
| Macrophages rest | 2.8 |
| Macrophages LPS | 1.1 |
| HUVEC none | 0.0 |
| HUVEC starved | 0.0 |
| HUVEC IL-1beta | 0.0 |
| HUVEC IFN gamma | 0.9 |
| HUVEC TNF alpha + IFN gamma | 0.0 |
| HUVEC TNF alpha + IL4 | 0.5 |
| HUVEC IL-11 | 0.0 |
| Lung Microvascular EC none | 1.1 |
| Lung Microvascular EC TNFalpha + IL-1beta | 0.0 |
| Microvascular Dermal EC none | 0.0 |
| Microsvasular Dermal EC TNFalpha + IL-1beta | 0.0 |
| Bronchial epithelium TNFalpha + IL1beta | 0.0 |
| Small airway epithelium none | 0.6 |
| Small airway epithelium TNFalpha + IL-1beta | 0.7 |
| Coronery artery SMC rest | 1.9 |
| Coronery artery SMC TNFalpha + IL-1beta | 1.6 |
| Astrocytes rest | 0.0 |
| Astrocytes TNFalpha + IL-1beta | 0.0 |
| KU-812 (Basophil) rest | 48.6 |
| KU-812 (Basophil) PMA/ionomycin | 26.1 |
| CCD1106 (Keratinocytes) none | 0.0 |
| CCD1106 (Keratinocytes) TNFalpha + IL-1beta | 0.0 |
| Liver cirrhosis | 6.0 |
| NCI-H292 none | 0.7 |
| NCI-H292 IL-4 | 0.0 |
| NCI-H292 IL-9 | 0.7 |
| NCI-H292 IL-13 | 0.4 |
| NCI-H292 IFN gamma | 1.7 |
| HPAEC none | 0.0 |
| HPAEC TNF alpha + IL-1 beta | 0.0 |
| Lung fibroblast none | 26.8 |
| Lung fibroblast TNF alpha + IL-1 beta | 2.0 |
| Lung fibroblast IL-4 | 20.3 |
| Lung fibroblast IL-9 | 26.2 |
| Lung fibroblast IL-13 | 37.4 |
| Lung fibroblast IFN gamma | 44.1 |
| Dermal fibroblast CCD1070 rest | 3.0 |
| Dermal fibroblast CCD1070 TNF alpha | 0.7 |
| Dermal fibroblast CCD1070 IL-1 beta | 2.2 |
| Dermal fibroblast IFN gamma | 12.8 |
| Dermal fibroblast IL-4 | 48.3 |
| Dermal Fibroblasts rest | 17.9 |
| Neutrophils TNFa + LPS | 0.0 |
| Neutrophils rest | 0.7 |
| Colon | 10.7 |
| Lung | 100.0 |
| Thymus | 27.9 |
| Kidney | 10.0 |

Column A - Rel. Exp. (%) Ag4335, Run 184793354

[1258] TABLE AGH
Panel 5D

| Tissue Name | A |
|---|---|
| 97457_Patient-02go_adipose | 100.0 |
| 97476_Patient-07sk_skeletal muscle | 23.3 |
| 97477_Patient-07ut_uterus | 8.7 |
| 97478_Patient-07pl_placenta | 7.9 |
| 97481_Patient-08sk_skeletal muscle | 54.7 |
| 97482_Patient-08ut_uterus | 1.4 |
| 97483_Patient-08pl_placenta | 12.1 |
| 97486_Patient-09sk_skeletal muscle | 3.3 |
| 97487_Patient-09ut_uterus | 28.7 |
| 97488_Patient-09pl_placenta | 2.6 |
| 97492_Patient-10ut_uterus | 8.4 |
| 97493_Patient-10pl_placenta | 9.5 |
| 97495_Patient-11go_adipose | 39.5 |
| 97496_Patient-11sk_skeletal muscle | 4.4 |
| 97497_Patient-11ut_uterus | 11.1 |
| 97498_Patient-11pl_placenta | 4.9 |
| 97500_Patient-12go_adipose | 24.0 |
| 97501_Patient-12sk_skeletal muscle | 6.0 |
| 97502_Patient-12ut_uterus | 2.6 |
| 97503_Patient-12pl_placenta | 2.9 |
| 94721_Donor 2 U - A_Mesenchymal Stem Cells | 2.0 |
| 94722_Donor 2 U - B_Mesenchymal Stem Cells | 0.7 |
| 94723_Donor 2 U - C_Mesenchymal Stem Cells | 1.7 |
| 94709_Donor 2 AM - A_adipose | 2.0 |
| 94710_Donor 2 AM - B_adipose | 2.1 |
| 94711_Donor 2 AM - C_adipose | 0.3 |
| 94712_Donor 2 AD - A_adipose | 2.8 |
| 94713_Donor 2 AD - B_adipose | 3.4 |
| 94714_Donor 2 AD - C_adipose | 4.5 |
| 94742_Donor 3 U - A_Mesenchymal Stem Cells | 0.2 |
| 94743_Donor 3 U - B_Mesenchymal Stem Cells | 1.1 |
| 94730_Donor 3 AM - A_adipose | 4.2 |
| 94731_Donor 3 AM - B_adipose | 2.0 |
| 94732_Donor 3 AM - C_adipose | 1.8 |
| 94733_Donor 3 AD - A_adipose | 0.5 |
| 94734_Donor 3 AD - B_adipose | 0.3 |
| 94735_Donor 3 AD - C_adipose | 0.2 |
| 77138_Liver_HepG2untreated | 0.5 |
| 73556_Heart_Cardiac stromal cells (primary) | 0.0 |
| 81735_Small Intestine | 49.3 |
| 72409_Kidney_Proximal Convoluted Tubule | 0.6 |
| 82685_Small intestine_Duodenum | 5.2 |
| 90650_Adrenal_Adrenocortical adenoma | 5.3 |
| 72410_Kidney_HRCE | 0.0 |
| 72411_Kidney_HRE | 0.8 |
| 73139_Uterus_Uterine smooth muscle cells | 4.5 |

Column A - Rel. Exp. (%) Ag4335, Run 258657707

[1259] AI_comprehensive panel₁₃ v1.0 Summary: Ag1489 Expression of this transcript was induced in most rheumatoid arthritis (RA) tissues and in synovium and bone tissues from osteoarthritis (OA) patients. This gene was also highly and consistently expressed in normal lung in 2 out of 3 normal lungs tissues on this panel and in panels 1.4 and 4.1. The expression in diseased lung was reduced or absent. These data show that lung expression of the protein encoded for by this transcript serves an important function that is lost in disease states, but that OA/RA promotes the expression of this gene in the joint. Therapies designed with the protein encoded by this transcript are important for the treatment of OA/RA and lung diseases such as chronic pulmonary obstructive disease, emphysema, allergy and asthma.

[1260] Ardais Panel 1.1 Summary: Ag1489 Highest expression is detected in normal adjacent lung tissue sample (CT=25). This gene is expressed at higher levels in normal tissue relative to the cancer samples. This expression profile is in agreement with results in panel 2D. This gene codes for a protein containing ig and leucine rich repeat regions and is similar to adlican. Members of this family are integral basement membrane proteins with a variety of functions, including matrix assembly and organization, regulation of cell growth, adhesion and migration. The LRR domain in particular is thought to play an important role in these processes (Hocking A M, Shinomura T, McQuillan D J., 1998, Leucine-rich repeat glycoproteins of the extracellular matrix. Matrix Biol. 17(1):1-19). The expression profile of this gene indicates an important role in lung biology and therefore modulation of this gene, expressed protein and/or use of agonists will be useful in the treatment of lung cancer.

[1261] General_screening₁₃ panel_v1.4 Summary: Ag4335 Highest expression of this gene was seen in fetal lung (CT=25.4), with overall expression associated with normal tissues. Expression of this gene was higher in fetal lung relative to adult lung (CT=29) and in fetal skeletal muscle (CT=29) relative to adult skeletal muscle (CT=33). This gene or expressed protein is involved in the development and homeostasis of these organs. Therapeutic modulation of this gene and/or expressed protein is useful in the treatment of lung and skeletal muscle related diseases.

[1262] This gene was also expressed at significant levels in a variety of metabolic tissues including adipose, adult and fetal liver, adult and fetal heart, pituitary, thyroid and pancreas. Modulation of this gene and/or expressed protein is useful in the treatment of metabolic disorders, including obesity and diabetes.

[1263] Moderate to low expression of this gene was also seen in all the regions of brain examined including amygdala, hippocampus, substantia nigra, thalamus, cerebellum, cerebral cortex, and spinal cord. Therapeutic modulation of this gene or gene product is useful in the treatment of central nervous system disorders such as Alzheimer's disease, Parkinson's disease, epilepsy, multiple sclerosis, schizophrenia and depression.

[1264] Panel 2D Summary: Ag1489 Highest expression of this gene was detected in normal lung (CTs=27.8). This gene showed higher expression in all the normal adjacent lung, kidney and colon tissues relative to cancer samples. Modulation of this gene, expressed protein and/or use of antibodies or agonists targeting this gene or its protein product are useful in the treatment of these cancers.

[1265] Panel 4.1D Summary: Ag4335 Highest expression of this gene was detected in normal lung (CT=31). This gene was also expressed in lung fibroblasts, EOL-1 cells and basophils. Expression of the gene was downregulated by TNF-alpha and IL1-beta in lung fibroblasts. Based on the expression profile in this panel as well as that in the A/I panel, therapeutics designed with the encoded protein are useful in the treatment of chronic obstructive pulmonary disease, emphysema, allergy and asthma.

[1266] Panel 5D Summary: Ag4335 Highest expression of this gene was detected in adipose tissue from a diabetic patient (CT=30.8). Significant expression of this gene was also seen in skeletal muscle, adipose, uterus, placenta and small intestine. Modulation of this gene or its expressed protein is useful in the treatment of metabolic diseases such as obesity and diabetes.

[1267] AH. CG5578401 and CG5578403: Nephrin-like

[1268] Expression of gene CG55784-03 and variant CG55784-01 was assessed using the primer-probe sets Ag2844 and Ag6457, described in Tables AHA and AHB. Results of the RTQ-PCR runs are shown in Tables AHC, AHD and AHE. Please note that the probe and primer set Ag6457 is specific to the CG55784-03 only.

TABLE AHA
Probe Name Ag2844

| | | | Start | SEQ ID |
|---|---|---|---|---|
| Primers | Sequences | Length | Position | No |
| Forward | 5′-ctttccactgctctgcaaag-3′ | 20 | 1053 | 1423 |
| Probe | TET-5′-aacccagctgtcacccagtacaggtg-3′- | 26 | 1076 | 1424 |
| | TAMRA | | | |
| Reverse | 5′-gtcctgtacacctctccagatg-3′ | 22 | 1131 | 1425 |

[1269] TABLE AHB
Probe Name Ag6457

| | | | Start | SEQ ID |
|---|---|---|---|---|
| Primers | Sequences | Length | Position | No |
| Forward | 5′-cgacttccagaccatctacaact-3′ | 23 | 1723 | 1426 |
| Probe | TET-5′-cttcggctccgacactgagatcatc-3′- | 25 | 1762 | 1427 |
| | TAMRA | | | |
| Reverse | 5′-ggcacagactcttgctcctt-3′ | 20 | 1793 | 1428 |

[1270] TABLE AHC
General_screening_panel_v1.6

| Tissue Name | A |
|---|---|
| Adipose | 0.0 |
| Melanoma* Hs688(A).T | 13.6 |
| Melanoma* Hs688(B).T | 15.9 |
| Melanoma* M14 | 0.2 |
| Melanoma* LOXIMVI | 0.0 |
| Melanoma* SK-MEL-5 | 0.0 |
| Squamous cell carcinoma SCC-4 | 0.3 |
| Testis Pool | 0.0 |
| Prostate ca.* (bone met) PC-3 | 0.0 |
| Prostate Pool | 0.8 |
| Placenta | 0.4 |
| Uterus Pool | 0.4 |
| Ovarian ca. OVCAR-3 | 0.0 |
| Ovarian ca. SK-OV-3 | 0.0 |
| Ovarian ca. OVCAR-4 | 0.0 |
| Ovarian ca. OVCAR-5 | 1.7 |
| Ovarian ca. IGROV-1 | 1.7 |
| Ovarian ca. OVCAR-8 | 1.8 |
| Ovary | 0.7 |
| Breast ca. MCF-7 | 0.0 |
| Breast ca. MDA-MB-231 | 0.0 |
| Breast ca. BT 549 | 0.0 |
| Breast ca. T47D | 0.0 |
| Breast ca. MDA-N | 0.0 |
| Breast Pool | 0.0 |
| Trachea | 2.0 |
| Lung | 0.4 |
| Fetal Lung | 5.4 |
| Lung ca. NCI-N417 | 0.0 |
| Lung ca. LX-1 | 0.0 |
| Lung ca. NCI-H146 | 3.7 |
| Lung ca. SHP-77 | 0.0 |
| Lung ca. A549 | 9.0 |
| Lung ca. NCI-H526 | 1.1 |
| Lung ca. NCI-H23 | 0.0 |
| Lung ca. NCI-H460 | 0.1 |
| Lung ca. HOP-62 | 0.5 |
| Lung ca. NCI-H522 | 0.0 |
| Liver | 0.0 |
| Fetal Liver | 0.0 |
| Liver ca. HepG2 | 0.0 |
| Kidney Pool | 0.0 |
| Fetal Kidney | 0.1 |
| Renal ca. 786-0 | 0.0 |
| Renal ca. A498 | 3.2 |
| Renal ca. ACHN | 35.8 |
| Renal ca. UO-31 | 0.0 |
| Renal ca. TK-10 | 0.0 |
| Bladder | 0.4 |
| Gastric ca. (liver met.) NCI-N87 | 0.0 |
| Gastric ca. KATO III | 2.4 |
| Colon ca. SW-948 | 0.0 |
| Colon ca. SW480 | 0.0 |
| Colon ca.* (SW480 met) SW620 | 0.0 |
| Colon ca. HT29 | 0.0 |
| Colon ca. HCT-116 | 0.0 |
| Colon ca. CaCo-2 | 0.0 |
| Colon cancer tissue | 0.0 |
| Colon ca. SW1116 | 0.0 |
| Colon ca. Colo-205 | 0.0 |
| Colon ca. SW-48 | 0.0 |
| Colon Pool | 0.4 |
| Small Intestine Pool | 1.4 |
| Stomach Pool | 0.0 |
| Bone Marrow Pool | 0.3 |
| Fetal Heart | 1.5 |
| Heart Pool | 0.5 |
| Lymph Node Pool | 1.0 |
| Fetal Skeletal Muscle | 0.0 |
| Skeletal Muscle Pool | 0.0 |
| Spleen Pool | 1.1 |
| Thymus Pool | 0.4 |
| CNS cancer (glio/astro) U87-MG | 0.0 |
| CNS cancer (glio/astro) U-118-MG | 8.0 |
| CNS cancer (neuro; met) SK-N-AS | 2.9 |
| CNS cancer (astro) SF-539 | 0.0 |
| CNS cancer (astro) SNB-75 | 0.8 |
| CNS cancer (glio) SNB-19 | 4.0 |
| CNS cancer (glio) SF-295 | 0.7 |
| Brain (Amygdala) Pool | 32.3 |
| Brain (cerebellum) | 100.0 |
| Brain (fetal) | 41.2 |
| Brain (Hippocampus) Pool | 29.3 |
| Cerebral Cortex Pool | 35.8 |
| Brain (Substantia nigra) Pool | 25.5 |
| Brain (Thalamus) Pool | 56.3 |
| Brain (whole) | 79.0 |
| Spinal Cord Pool | 16.8 |
| Adrenal Gland | 2.0 |
| Pituitary gland Pool | 0.0 |
| Salivary Gland | 1.6 |
| Thyroid (female) | 0.0 |
| Pancreatic ca. CAPAN2 | 0.0 |
| Pancreas Pool | 0.4 |

Column A - Rel. Exp. (%) Ag6457, Run 277250272

[1271] TABLE AHD
Panel 4.1D

| Tissue Name | A |
|---|---|
| Secondary Th1 act | 0.0 |
| Secondary Th2 act | 0.0 |
| Secondary Tr1 act | 0.0 |
| Secondary Th1 rest | 0.0 |
| Secondary Th2 rest | 0.0 |
| Secondary Tr1 rest | 0.0 |
| Primary Th1 act | 0.0 |
| Primary Th2 act | 0.0 |
| Primary Tr1 act | 0.0 |
| Primary Th1 rest | 0.0 |
| Primary Th2 rest | 0.0 |
| Primary Tr1 rest | 0.0 |
| CD45RA CD4 lymphocyte act | 74.7 |
| CD45RO CD4 lymphocyte act | 0.3 |
| CD8 lymphocyte act | 0.0 |
| Secondary CD8 lymphocyte rest | 0.0 |
| Secondary CD8 lymphocyte act | 0.0 |
| CD4 lymphocyte none | 0.0 |
| 2ry Th1/Th2/Tr1_anti-CD95 CH11 | 0.0 |
| LAK cells rest | 0.0 |
| LAK cells IL-2 | 0.0 |
| LAK cells IL-2 + IL-12 | 0.0 |
| LAK cells IL-2 + IFN gamma | 0.0 |
| LAK cells IL-2 + IL-18 | 0.0 |
| LAK cells PMA/ionomycin | 0.0 |
| NK Cells IL-2 rest | 0.0 |
| Two Way MLR 3 day | 0.0 |
| Two Way MLR 5 day | 0.0 |
| Two Way MLR 7 day | 0.0 |
| PBMC rest | 0.0 |
| PBMC PWM | 0.0 |
| PBMC PHA-L | 0.0 |
| Ramos (B cell) none | 0.0 |
| Ramos (B cell) ionomycin | 0.0 |
| B lymphocytes PWM | 0.0 |
| B lymphocytes CD40L and IL-4 | 2.4 |
| EOL-1 dbcAMP | 0.0 |
| EOL-1 dbcAMP PMA/ionomycin | 0.0 |
| Dendritic cells none | 0.0 |
| Dendritic cells LPS | 0.0 |
| Dendritic cells anti-CD40 | 0.0 |
| Monocytes rest | 0.0 |
| Monocytes LPS | 0.0 |
| Macrophages rest | 0.0 |
| Macrophages LPS | 0.0 |
| HUVEC none | 0.0 |
| HUVEC starved | 0.0 |
| HUVEC IL-1beta | 0.0 |
| HUVEC IFN gamma | 0.0 |
| HUVEC TNF alpha + IFN gamma | 0.0 |
| HUVEC TNF alpha + IL4 | 0.0 |
| HUVEC IL-11 | 0.0 |
| Lung Microvascular EC none | 0.0 |
| Lung Microvascular EC TNFalpha + IL-1beta | 0.0 |
| Microvascular Dermal EC none | 0.0 |
| Microsvasular Dermal EC TNFalpha + IL-1beta | 0.0 |
| Bronchial epithelium TNFalpha + IL1beta | 0.0 |
| Small airway epithelium none | 0.0 |
| Small airway epithelium TNFalpha + IL-1beta | 0.0 |
| Coronery artery SMC rest | 4.4 |
| Coronery artery SMC TNFalpha + IL-1beta | 14.1 |
| Astrocytes rest | 2.9 |
| Astrocytes TNFalpha + IL-1beta | 5.2 |
| KU-812 (Basophil) rest | 0.0 |
| KU-812 (Basophil) PMA/ionomycin | 0.0 |
| CCD1106 (Keratinocytes) none | 0.0 |
| CCD1106 (Keratinocytes) TNFalpha + IL-1beta | 0.0 |
| Liver cirrhosis | 0.0 |
| NCI-H292 none | 10.2 |
| NCI-H292 IL-4 | 10.2 |
| NCI-H292 IL-9 | 0.0 |
| NCI-H292 IL-13 | 14.3 |
| NCI-H292 IFN gamma | 0.0 |
| HPAEC none | 0.0 |
| HPAEC TNF alpha + IL-1 beta | 0.0 |
| Lung fibroblast none | 11.5 |
| Lung fibroblast TNF alpha + IL-1 beta | 6.6 |
| Lung fibroblast IL-4 | 20.9 |
| Lung fibroblast IL-9 | 5.1 |
| Lung fibroblast IL-13 | 5.3 |
| Lung fibroblast IFN gamma | 23.2 |
| Dermal fibroblast CCD1070 rest | 100.0 |
| Dermal fibroblast CCD1070 TNF alpha | 59.5 |
| Dermal fibroblast CCD1070 IL-1 beta | 59.0 |
| Dermal fibroblast IFN gamma | 2.9 |
| Dermal fibroblast IL-4 | 9.3 |
| Dermal Fibroblasts rest | 7.5 |
| Neutrophils TNFa + LPS | 0.0 |
| Neutrophils rest | 0.0 |
| Colon | 2.8 |
| Lung | 0.0 |
| Thymus | 0.0 |
| Kidney | 0.0 |

Column A - Rel. Exp.(%) Ag6457, Run 269261799

[1272] TABLE AHE
Panel 4D

| Tissue Name | A |
|---|---|
| Secondary Th1 act | 0.0 |
| Secondary Th2 act | 0.0 |
| Secondary Tr1 act | 0.0 |
| Secondary Th1 rest | 0.0 |
| Secondary Th2 rest | 0.0 |
| Secondary Tr1 rest | 0.0 |
| Primary Th1 act | 0.0 |
| Primary Th2 act | 0.0 |
| Primary Tr1 act | 0.0 |
| Primary Th1 rest | 0.0 |
| Primary Th2 rest | 0.0 |
| Primary Tr1 rest | 0.0 |
| CD45RA CD4 lymphocyte act | 43.5 |
| CD45RO CD4 lymphocyte act | 0.0 |
| CD8 lymphocyte act | 0.0 |
| Secondary CD8 lymphocyte rest | 0.0 |
| Secondary CD8 lymphocyte act | 0.0 |
| CD4 lymphocyte none | 0.0 |
| 2ry Th1/Th2/Tr1_anti-CD95 CH11 | 0.0 |
| LAK cells rest | 0.0 |
| LAK cells IL-2 | 0.0 |
| LAK cells IL-2 + IL-12 | 0.0 |
| LAK cells IL-2 + IFN gamma | 0.0 |
| LAK cells IL-2 + IL-18 | 0.0 |
| LAK cells PMA/ionomycin | 0.0 |
| NK Cells IL-2 rest | 0.0 |
| Two Way MLR 3 day | 0.0 |
| Two Way MLR 5 day | 0.0 |
| Two Way MLR 7 day | 0.0 |
| PBMC rest | 0.0 |
| PBMC PWM | 0.0 |
| PBMC PHA-L | 0.0 |
| Ramos (B cell) none | 0.0 |
| Ramos (B cell) ionomycin | 0.0 |
| B lymphocytes PWM | 0.0 |
| B lymphocytes CD40L and IL-4 | 0.0 |
| EOL-1 dbcAMP | 0.0 |
| EOL-1 dbcAMP PMA/ionomycin | 0.0 |
| Dendritic cells none | 0.0 |
| Dendritic cells LPS | 0.0 |
| Dendritic cells anti-CD40 | 0.0 |
| Monocytes rest | 0.0 |
| Monocytes LPS | 0.0 |
| Macrophages rest | 0.0 |
| Macrophages LPS | 0.0 |
| HUVEC none | 0.0 |
| HUVEC starved | 0.0 |
| HUVEC IL-1beta | 0.0 |
| HUVEC IFN gamma | 0.0 |
| HUVEC TNF alpha + IFN gamma | 0.0 |
| HUVEC TNF alpha + IL4 | 0.0 |
| HUVEC IL-11 | 0.0 |
| Lung Microvascular EC none | 0.0 |
| Lung Microvascular EC TNFalpha + IL-1beta | 0.0 |
| Microvascular Dermal EC none | 0.0 |
| Microsvasular Dermal EC TNFalpha + IL-1beta | 0.0 |
| Bronchial epithelium TNFalpha + IL1beta | 0.0 |
| Small airway epithelium none | 0.0 |
| Small airway epithelium TNFalpha + IL-1beta | 0.0 |
| Coronery artery SMC rest | 1.7 |
| Coronery artery SMC TNFalpha + IL-1beta | 5.1 |
| Astrocytes rest | 2.0 |
| Astrocytes TNFalpha + IL-1beta | 3.7 |
| KU-812 (Basophil) rest | 0.0 |
| KU-812 (Basophil) PMA/ionomycin | 0.0 |
| CCD1106 (Keratinocytes) none | 0.0 |
| CCD1106 (Keratinocytes) TNFalpha + IL-1beta | 0.0 |
| Liver cirrhosis | 0.3 |
| Lupus kidney | 0.0 |
| NCI-H292 none | 1.8 |
| NCI-H292 IL-4 | 27.2 |
| NCI-H292 IL-9 | 3.7 |
| NCI-H292 IL-13 | 17.8 |
| NCI-H292 IFN gamma | 0.0 |
| HPAEC none | 0.0 |
| HPAEC TNF alpha + IL-1 beta | 0.0 |
| Lung fibroblast none | 4.3 |
| Lung fibroblast TNF alpha + IL-1 beta | 3.4 |
| Lung fibroblast IL-4 | 12.5 |
| Lung fibroblast IL-9 | 2.6 |
| Lung fibroblast IL-13 | 5.3 |
| Lung fibroblast IFN gamma | 5.2 |
| Dermal fibroblast CCD1070 rest | 90.1 |
| Dermal fibroblast CCD1070 TNF alpha | 100.0 |
| Dermal fibroblast CCD1070 IL-1 beta | 39.8 |
| Dermal fibroblast IFN gamma | 1.6 |
| Dermal fibroblast IL-4 | 4.5 |
| IBD Colitis 2 | 0.0 |
| IBD Crohn's | 0.2 |
| Colon | 1.3 |
| Lung | 0.0 |
| Thymus | 0.4 |
| Kidney | 0.5 |

Column A - Rel. Exp.(%) Ag2844, Run 164299480

[1273] General_screening₁₃ panel_v1.6 Summary: Ag6457 This probe/primer set was specific for the CG55784-03 gene variant. Expression of this gene was highest in cerebellum (CT=29.5). Highly brain-preferential expression of the CG55784-03 gene demonstrates a specific role for this gene product in the brain. This gene encodes a protein that is homologous to a neural cell adhesion molecule (NCAM). NCAM related proteins, such as Nr-CAM, play a critical role in neurite extension (Sakurai et al., J Cell Biol 2001 154:1259-73). Eintroduction of ligands specific for this gene product, such as contactin, in directed brain regions have utility in fostering focal neurite outgrowth and in therapeutically countering neurite degeneration of neurodegenerative diseases such as Alzheimer's, ataxias, and Parkinson's disease.

[1274] In addition, the expression of this gene was relatively high in the normal brain samples compared to the cancer cell lines derived from brain cancer. Expression of this gene is useful as a marker to differentiate between normal and cancerous tissue. There were also significantly higher levels of expression in renal cancer cell lines compared to a normal kidney sample. Expression of this gene is also useful as a marker in renal cancer.

[1275] Panel 4.1D Summary: Ag6457 This probe/primer set is specific for the CG55784-03 gene variant. Expression of this gene was highest in dermal fibroblasts (CT=31.8) and was relatively treatment independent. This gene was also expressed in CD45RA (naive) T cells. Therapeutic modulation of this gene or its protein product is useful in the treatment of psoriasis or diseases mediated by activated T cells.

[1276] Panel 4D Summary: Ag2844 This transcript was induced in IL-4 and IL-13 treated NCI-H292 cells, expressed constitutively in a dermal fibroblast cell line and was slightly induced by IL-4 in lung fibroblasts. CD45RA (naive) T cells also expressed the transcript. The transcript encodes a NCAM-like molecule. Based on the expression pattern of the transcript, the homology to NCAM protein, and the regulation of transcript expression by IL-4 and IL-13, therapeutics designed with the protein encoded for by this transcript are important in the treatment of asthma and COPD.

[1277] AI. CG55790-01 and CG55790-02: B7-H2B

[1278] Expression of gene CG55790-02 and variant CG55790-01 was assessed using the primer-probe sets Ag1845, Ag2589, Ag2621, Ag2915, and Ag8156, described in Tables AIA, AIB, AIC, AID, and AIE. Results of the RTQ-PCR runs are shown in Tables AIF, AIG, AIH, AII, All and AIKPlease note that only the probe and primer sets Ag2589, Ag2621, and Ag2915 correspond to the CG55790-01 variant.

TABLE AIA
Probe Name Ag1845

| | | | Start | SEQ ID |
|---|---|---|---|---|
| Primers | Sequences | Length | Position | No |
| Forward | 5′-catcacgtgtgagctcacagt-3′ | 21 | 7434 | 1429 |
| Probe | TET-5′-cttccacatggtgcactgctgct-3′-TAMRA | 23 | 7393 | 1430 |
| Reverse | 5′-agaatttgcagacacagcaatt-3′ | 22 | 7366 | 1431 |

[1279] TABLE AIB
Probe Name Ag2589

| | | | Start | SEQ ID |
|---|---|---|---|---|
| Primers | Sequences | Length | Position | No |
| Forward | 5′-gagctcaccttcacgtgtacat-3′ | 22 | 460 | 1432 |
| Probe | TET-5′-ctaccccaggcccaacgtgtactg-3′- | 24 | 492 | 1433 |
| | TAMRA | | | |
| Reverse | 5′-gctgttgtccgtcttattgatc-3′ | 22 | 516 | 1434 |

[1280] TABLE AIC
Probe Name Ag2621

| | | | Start | SEQ ID |
|---|---|---|---|---|
| Primers | Sequences | Length | Position | No |
| Forward | 5′-gagctcaccttcacgtgtacat-3′ | 22 | 460 | 1435 |
| Probe | TET-5′-ctaccccaggcccaacgtgtactg-3′- | 24 | 492 | 1436 |
| | TAMRA | | | |
| Reverse | 5′-gctgttgtccgtcttattgatc-3′ | 22 | 516 | 1437 |

[1281] TABLE AID
Probe Name Ag2915

| | | | Start | SEQ ID |
|---|---|---|---|---|
| Primers | Sequences | Length | Position | No |
| Forward | 5′-gagctcaccttcacgtgtacat-3′ | 22 | 460 | 1438 |
| Probe | TET-5′-ctaccccaggcccaacgtgtactg-3′- | 24 | 492 | 1439 |
| | TAMRA | | | |
| Reverse | 5′-gctgttgtccgtcttattgatc-3′ | 22 | 516 | 1440 |

[1282] TABLE AIE
Probe Name Ag8156

| | | | | |
|---|---|---|---|---|
| | | | Start | SEQ ID |
| Primers | Sequences | Length | Position | No |

| | | | | |
|---|---|---|---|---|
| Forward | 5′-tgccagctgtctttcagagt-3′ | 20 | 955 | 1441 |
| Probe | TET-5′-ctttcaaaaggcaaaagtcccttgcc-3′- | 26 | 984 | 1439 |
| | TAMRA | | | |
| Reverse | 5′-gcgtctccaggaacaacagt-3′ | 20 | 1017 | 1443 |

[1283] TABLE AIF
AI_comprehensive panel_v1.0

| Tissue Name | A |
|---|---|
| 110967 COPD-F | 8.5 |
| 110980 COPD-F | 4.8 |
| 110968 COPD-M | 6.7 |
| 110977 COPD-M | 8.5 |
| 110989 Emphysema-F | 12.9 |
| 110992 Emphysema-F | 7.5 |
| 110993 Emphysema-F | 8.5 |
| 110994 Emphysema-F | 3.0 |
| 110995 Emphysema-F | 14.9 |
| 110996 Emphysema-F | 1.6 |
| 110997 Asthma-M | 14.1 |
| 111001 Asthma-F | 7.9 |
| 111002 Asthma-F | 12.6 |
| 111003 Atopic Asthma-F | 13.4 |
| 111004 Atopic Asthma-F | 16.5 |
| 111005 Atopic Asthma-F | 7.7 |
| 111006 Atopic Asthma-F | 0.9 |
| 111417 Allergy-M | 6.3 |
| 112347 Allergy-M | 1.7 |
| 112349 Normal Lung-F | 0.5 |
| 112357 Normal Lung-F | 1.7 |
| 112354 Normal Lung-M | 2.9 |
| 112374 Crohns-F | 3.3 |
| 112389 Match Control Crohns-F | 17.9 |
| 112375 Crohns-F | 1.8 |
| 112732 Match Control Crohns-F | 39.5 |
| 112725 Crohns-M | 1.7 |
| 112387 Match Control Crohns-M | 4.6 |
| 112378 Crohns-M | 0.7 |
| 112390 Match Control Crohns-M | 12.1 |
| 112726 Crohns-M | 10.1 |
| 112731 Match Control Crohns-M | 18.9 |
| 112380 Ulcer Col-F | 9.6 |
| 112734 Match Control Ulcer Col-F | 100.0 |
| 112384 Ulcer Col-F | 17.1 |
| 112737 Match Control Ulcer Col-F | 13.5 |
| 112386 Ulcer Col-F | 1.8 |
| 112738 Match Control Ulcer Col-F | 1.4 |
| 112381 Ulcer Col-M | 7.3 |
| 112735 Match Control Ulcer Col-M | 7.2 |
| 112382 Ulcer Col-M | 12.5 |
| 112394 Match Control Ulcer Col-M | 2.3 |
| 112383 Ulcer Col-M | 6.3 |
| 112736 Match Control Ulcer Col-M | 13.0 |
| 112423 Psoriasis-F | 7.1 |
| 112427 Match Control Psoriasis-F | 14.5 |
| 112418 Psoriasis-M | 6.6 |
| 112723 Match Control Psoriasis-M | 1.0 |
| 112419 Psoriasis-M | 9.9 |
| 112424 Match Control Psoriasis-M | 10.7 |
| 112420 Psoriasis-M | 21.5 |
| 112425 Match Control Psoriasis-M | 13.8 |
| 104689 (MF) OA Bone-Backus | 17.1 |
| 104690 (MF) Adj “Normal” Bone-Backus | 6.8 |
| 104691 (MF) OA Synovium-Backus | 14.6 |
| 104692 (BA) OA Cartilage-Backus | 0.4 |
| 104694 (BA) OA Bone-Backus | 13.3 |
| 104695 (BA) Adj “Normal” Bone-Backus | 9.3 |
| 104696 (BA) OA Synovium-Backus | 7.9 |
| 104700 (SS) OA Bone-Backus | 7.5 |
| 104701 (SS) Adj “Normal” Bone-Backus | 7.7 |
| 104702 (SS) OA Synovium-Backus | 24.5 |
| 117093 OA Cartilage Rep7 | 7.7 |
| 112672 OA Bone5 | 6.2 |
| 112673 OA Synovium5 | 1.1 |
| 112674 OA Synovial Fluid cells5 | 2.6 |
| 117100 OA Cartilage Rep14 | 4.3 |
| 112756 OA Bone9 | 14.6 |
| 112757 OA Synovium9 | 7.1 |
| 112758 OA Synovial Fluid Cells9 | 4.2 |
| 117125 RA Cartilage Rep2 | 4.7 |
| 113492 Bone2 RA | 4.8 |
| 113493 Synovium2 RA | 3.6 |
| 113494 Syn Fluid Cells RA | 7.5 |
| 113499 Cartilage4 RA | 9.6 |
| 113500 Bone4 RA | 10.7 |
| 113501 Synovium4 RA | 6.9 |
| 113502 Syn Fluid Cells4 RA | 5.4 |
| 113495 Cartilage3 RA | 4.0 |
| 113496 Bone3 RA | 7.2 |
| 113497 Synovium3 RA | 4.4 |
| 113498 Syn Fluid Cells3 RA | 6.2 |
| 117106 Normal Cartilage Rep20 | 7.3 |
| 113663 Bone3 Normal | 0.2 |
| 113664 Synovium3 Normal | 0.0 |
| 113665 Syn Fluid Cells3 Normal | 0.4 |
| 117107 Normal Cartilage Rep22 | 3.0 |
| 113667 Bone4 Normal | 4.3 |
| 113668 Synovium4 Normal | 2.7 |
| 113669 Syn Fluid Cells4 Normal | 7.0 |

Column A - Rel. Exp.(%) Ag1845, Run 217699370

[1284] TABLE AIG
CNS_neurodegeneration_v1.0

| Tissue Name | A | B | C | D | E | F |
|---|---|---|---|---|---|---|
| AD 1 Hippo | 37.6 | 19.1 | 26.4 | 26.1 | 42.3 | 37.9 |
| AD 2 Hippo | 26.4 | 11.1 | 26.6 | 21.2 | 27.0 | 33.4 |
| AD 3 Hippo | 39.5 | 15.6 | 24.1 | 15.1 | 20.4 | 32.3 |
| AD 4 Hippo | 24.3 | 10.6 | 16.8 | 10.7 | 20.9 | 28.5 |
| AD 5 Hippo | 29.5 | 23.8 | 26.2 | 22.7 | 32.3 | 28.3 |
| AD 6 Hippo | 62.0 | 45.4 | 57.4 | 45.1 | 56.3 | 75.8 |
| Control 2 Hippo | 57.4 | 22.4 | 45.7 | 29.1 | 41.5 | 50.7 |
| Control 4 Hippo | 22.8 | 10.9 | 27.4 | 20.4 | 24.5 | 25.3 |
| Control (Path) 3 Hippo | 22.7 | 100.0 | 14.6 | 12.3 | 14.7 | 12.5 |
| AD 1 Temporal Ctx | 48.0 | 27.2 | 33.9 | 27.9 | 33.7 | 44.8 |
| AD 2 Temporal Ctx | 39.0 | 30.1 | 25.2 | 21.5 | 33.7 | 29.9 |
| AD 3 Temporal Ctx | 42.3 | 19.8 | 19.5 | 14.8 | 13.4 | 16.3 |
| AD 4 Temporal Ctx | 35.1 | 14.7 | 24.3 | 22.7 | 33.7 | 26.2 |
| AD 5 Inf Temporal Ctx | 70.2 | 28.3 | 50.3 | 45.4 | 63.7 | 60.3 |
| AD 5 Sup Temporal Ctx | 48.6 | 17.8 | 37.4 | 32.1 | 45.1 | 35.1 |
| AD 6 Inf Temporal Ctx | 100.0 | 19.6 | 100.0 | 100.0 | 100.0 | 100.0 |
| AD 6 Sup Temporal Ctx | 57.4 | 27.0 | 47.3 | 33.4 | 49.0 | 59.9 |
| Control 1 Temporal Ctx | 11.8 | 9.7 | 14.8 | 8.8 | 14.2 | 14.0 |
| Control 2 Temporal Ctx | 33.7 | 23.0 | 30.8 | 26.8 | 11.3 | 45.4 |
| Control 3 Temporal Ctx | 20.6 | 15.9 | 18.6 | 13.7 | 17.2 | 18.8 |
| Control 3 Temporal Ctx | 21.9 | 4.5 | 14.9 | 12.5 | 26.6 | 23.7 |
| Control (Path) 1 | 27.2 | 26.1 | 27.5 | 19.6 | 28.5 | 31.4 |
| Temporal Ctx | | | | | | |
| Control (Path) 2 | 16.7 | 7.2 | 18.3 | 16.5 | 17.7 | 23.2 |
| Temporal Ctx | | | | | | |
| Control (Path) 3 | 23.2 | 12.4 | 7.9 | 6.0 | 7.2 | 10.8 |
| Temporal Ctx | | | | | | |
| Control (Path) 4 | 17.4 | 35.4 | 15.1 | 12.9 | 17.3 | 19.6 |
| Temporal Ctx | | | | | | |
| AD 1 Occipital Ctx | 30.4 | 9.2 | 22.2 | 14.5 | 25.0 | 23.3 |
| AD 2 Occipital Ctx | 1.3 | 26.1 | 1.9 | 14.8 | 2.5 | 1.5 |
| (Missing) | | | | | | |
| AD 3 Occipital Ctx | 26.8 | 16.0 | 17.3 | 14.6 | 23.0 | 20.9 |
| AD 4 Occipital Ctx | 45.1 | 13.0 | 27.9 | 22.5 | 27.2 | 0.1 |
| AD 5 Occipital Ctx | 33.0 | 57.8 | 27.5 | 31.2 | 27.9 | 32.1 |
| AD 6 Occipital Ctx | 47.3 | 22.7 | 36.6 | 19.3 | 40.6 | 44.1 |
| Control 1 Occipital Ctx | 27.5 | 16.2 | 16.4 | 11.3 | 12.8 | 16.5 |
| Control 2 Occipital Ctx | 39.8 | 15.1 | 28.3 | 29.3 | 42.0 | 42.3 |
| Control 3 Occipital Ctx | 20.7 | 16.0 | 18.7 | 13.0 | 18.6 | 16.4 |
| Control 4 Occipital Ctx | 35.1 | 23.5 | 17.6 | 19.6 | 24.3 | 22.5 |
| Control (Path) 1 | 47.0 | 23.3 | 44.4 | 35.8 | 47.0 | 51.8 |
| Occipital Ctx | | | | | | |
| Control (Path) 2 | 18.3 | 32.5 | 21.9 | 17.6 | 31.4 | 23.8 |
| Occipital Ctx | | | | | | |
| Control (Path) 3 | 23.8 | 8.2 | 12.6 | 15.2 | 12.2 | 22.5 |
| Occipital Ctx | | | | | | |
| Control (Path) 4 | 22.8 | 14.6 | 20.9 | 17.8 | 21.0 | 23.2 |
| Occipital Ctx | | | | | | |
| Control 1 Parietal Ctx | 34.6 | 13.6 | 25.0 | 20.7 | 22.5 | 28.3 |
| Control 2 Parietal Ctx | 48.0 | 18.0 | 36.9 | 25.3 | 35.4 | 40.1 |
| Control 3 Parietal Ctx | 37.6 | 30.6 | 26.4 | 20.3 | 31.4 | 24.1 |
| Control (Path) 1 | 29.5 | 11.9 | 28.7 | 23.3 | 28.7 | 31.9 |
| Parietal Ctx | | | | | | |
| Control (Path) 2 | 24.5 | 21.8 | 19.8 | 17.3 | 29.9 | 28.3 |
| Parietal Ctx | | | | | | |
| Control (Path) 3 | 15.6 | 17.6 | 13.2 | 9.0 | 8.4 | 16.8 |
| Parietal Ctx | | | | | | |
| Control (Path) 4 | 23.8 | 11.7 | 22.7 | 21.0 | 23.0 | 22.5 |
| Parietal Ctx | | | | | | |

Column A - Rel. Exp. (%) Ag1845, Run 207807655
Column B - Rel. Exp. (%) Ag1845, Run 224079124
Column C - Rel. Exp. (%) Ag2589, Run 208776915
Column D - Rel. Exp. (%) Ag2621, Run 208393684
Column E - Rel. Exp. (%) Ag2915, Run 209735956
Column F - Rel. Exp. (%) Ag2915, Run 266906552

[1285] TABLE AIH
Panel 1.3D

| Tissue Name | A | B | C | D | E |
|---|---|---|---|---|---|
| Liver adenocarcinoma | 3.9 | 4.7 | 23.8 | 17.6 | 22.8 |
| Pancreas | 0.9 | 0.3 | 0.8 | 1.6 | 2.3 |
| Pancreatic ca. CAPAN 2 | 0.0 | 0.0 | 2.6 | 0.5 | 1.0 |
| Adrenal gland | 1.6 | 2.1 | 3.7 | 3.2 | 1.9 |
| Thyroid | 2.2 | 2.9 | 4.2 | 5.3 | 3.3 |
| Salivary gland | 2.0 | 3.1 | 6.3 | 4.0 | 4.2 |
| Pituitary gland | 0.9 | 1.1 | 2.0 | 2.0 | 1.4 |
| Brain (fetal) | 0.2 | 0.9 | 4.6 | 6.0 | 3.3 |
| Brain (whole) | 31.2 | 31.4 | 90.8 | 90.8 | 77.4 |
| Brain (amygdala) | 28.5 | 24.7 | 34.9 | 31.4 | 34.4 |
| Brain (cerebellum) | 3.0 | 1.5 | 21.6 | 18.6 | 20.7 |
| Brain (hippocampus) | 100.0 | 100.0 | 39.2 | 29.9 | 27.7 |
| Brain (substantia nigra) | 26.1 | 21.3 | 86.5 | 60.7 | 67.8 |
| Brain (thalamus) | 29.9 | 31.0 | 89.5 | 49.7 | 59.0 |
| Cerebral Cortex | 20.0 | 16.4 | 46.3 | 33.2 | 38.4 |
| Spinal cord | 15.0 | 12.7 | 29.9 | 20.2 | 31.0 |
| glio/astro U87-MG | 2.6 | 3.5 | 18.7 | 13.3 | 18.9 |
| glio/astro U-118-MG | 1.3 | 0.3 | 0.6 | 1.6 | 1.6 |
| astrocytoma SW 1783 | 0.0 | 0.1 | 1.5 | 1.0 | 0.3 |
| neuro*; met SK-N-AS | 0.0 | 0.0 | 0.0 | 0.0 | 0.0 |
| astrocytoma SF-539 | 5.5 | 4.2 | 28.9 | 15.3 | 21.8 |
| astrocytoma SNB-75 | 1.9 | 1.3 | 10.7 | 5.4 | 5.5 |
| glioma SNB-19 | 0.6 | 1.6 | 2.4 | 1.7 | 3.6 |
| glioma U251 | 0.4 | 0.9 | 10.0 | 7.1 | 5.0 |
| glioma SF-295 | 11.3 | 12.1 | 24.1 | 17.1 | 25.5 |
| Heart (fetal) | 12.9 | 8.2 | 29.3 | 24.5 | 31.4 |
| Heart | 1.9 | 2.0 | 12.8 | 8.5 | 12.2 |
| Skeletal muscle (fetal) | 54.7 | 48.6 | 30.6 | 34.9 | 36.1 |
| Skeletal muscle | 1.0 | 0.6 | 3.1 | 4.4 | 3.2 |
| Bone marrow | 3.2 | 2.6 | 3.3 | 3.5 | 3.6 |
| Thymus | 4.9 | 5.3 | 10.2 | 11.1 | 11.3 |
| Spleen | 15.9 | 15.8 | 11.2 | 10.7 | 15.3 |
| Lymph node | 11.4 | 11.0 | 27.0 | 29.5 | 28.7 |
| Colorectal | 4.5 | 6.5 | 9.5 | 8.1 | 7.5 |
| Stomach | 9.2 | 8.5 | 9.5 | 8.2 | 9.7 |
| Small intestine | 5.7 | 6.4 | 6.8 | 4.6 | 5.7 |
| Colon ca. SW480 | 2.0 | 4.7 | 7.3 | 6.3 | 7.9 |
| Colon ca.* SW620(SW480 met) | 0.8 | 2.1 | 12.2 | 26.4 | 19.2 |
| Colon ca. HT29 | 0.3 | 0.4 | 5.2 | 4.2 | 4.3 |
| Colon ca. HCT-116 | 4.9 | 6.5 | 12.2 | 14.7 | 14.2 |
| Colon ca. CaCo-2 | 15.1 | 12.4 | 30.8 | 28.5 | 29.7 |
| Colon ca. tissue(ODO3866) | 5.9 | 5.6 | 17.3 | 24.3 | 19.3 |
| Colon ca. HCC-2998 | 5.0 | 9.9 | 30.8 | 31.9 | 35.8 |
| Gastric ca.* (liver met) NCI-N87 | 3.3 | 6.0 | 6.1 | 7.4 | 6.2 |
| Bladder | 2.1 | 1.9 | 14.3 | 9.7 | 15.7 |
| Trachea | 9.7 | 5.7 | 3.0 | 2.3 | 2.3 |
| Kidney | 5.5 | 3.9 | 24.0 | 23.2 | 21.9 |
| Kidney (fetal) | 11.8 | 14.4 | 100.0 | 100.0 | 85.9 |
| Renal ca. 786-0 | 6.5 | 5.2 | 27.4 | 28.3 | 33.2 |
| Renal ca. A498 | 8.2 | 9.6 | 19.3 | 21.5 | 21.8 |
| Renal ca. RXF 393 | 3.5 | 3.6 | 50.0 | 55.9 | 48.6 |
| Renal ca. ACHN | 3.2 | 4.7 | 8.7 | 7.6 | 9.2 |
| Renal ca. UO-31 | 3.0 | 50.0 | 3.3 | 4.2 | 4.2 |
| Renal ca. TK-10 | 4.4 | 4.9 | 18.0 | 13.7 | 15.5 |
| Liver | 3.2 | 1.2 | 5.6 | 4.4 | 8.0 |
| Liver (fetal) | 2.7 | 2.5 | 1.9 | 5.6 | 2.6 |
| Liver ca. (hepatoblast) HepG2 | 1.9 | 3.0 | 10.8 | 8.7 | 9.6 |
| Lung | 7.5 | 7.7 | 12.8 | 13.9 | 17.0 |
| Lung (fetal) | 7.0 | 8.2 | 13.3 | 6.8 | 5.0 |
| Lung ca. (small cell) LX-1 | 2.6 | 2.3 | 9.0 | 6.1 | 9.6 |
| Lung ca. (small cell) NCI-H69 | 0.7 | 0.3 | 1.5 | 1.0 | 0.5 |
| Lung ca. (s. cell var.) SHP-77 | 0.2 | 0.0 | 0.0 | 0.0 | 0.5 |
| Lung ca. (large cell)NCI-H460 | 0.5 | 1.1 | 0.6 | 0.0 | 0.7 |
| Lung ca. (non-sm. cell) A549 | 0.3 | 0.2 | 4.0 | 4.0 | 5.7 |
| Lung ca. (non-s. cell) NCI-H23 | 4.0 | 3.3 | 8.4 | 6.6 | 7.8 |
| Lung ca. (non-s. cell) HOP-62 | 1.5 | 1.7 | 1.5 | 2.4 | 3.3 |
| Lung ca. (non-s. cl) NCI-H522 | 4.0 | 8.4 | 13.4 | 12.3 | 12.0 |
| Lung ca. (squam.) SW 900 | 2.0 | 0.4 | 5.9 | 5.8 | 4.6 |
| Lung ca. (squam.) NCI-H596 | 0.0 | 0.0 | 0.0 | 0.4 | 1.1 |
| Mammary gland | 12.3 | 7.6 | 32.1 | 26.2 | 32.1 |
| Breast ca.* (pl. ef) MCF-7 | 15.3 | 10.5 | 76.3 | 79.0 | 100.0 |
| Breast ca.* (pl. ef) MDA-MB-231 | 1.8 | 2.0 | 6.2 | 6.7 | 6.5 |
| Breast ca.* (pl. ef) T47D | 4.5 | 6.4 | 35.8 | 31.9 | 37.4 |
| Breast ca. BT-549 | 0.9 | 1.4 | 9.1 | 6.3 | 6.2 |
| Breast ca. MDA-N | 0.6 | 0.9 | 2.9 | 4.3 | 6.5 |
| Ovary | 2.2 | 4.0 | 5.0 | 6.3 | 6.3 |
| Ovarian ca. OVCAR-3 | 8.7 | 6.9 | 26.2 | 31.6 | 41.2 |
| Ovarian ca. OVCAR-4 | 1.6 | 1.9 | 23.8 | 11.5 | 20.2 |
| Ovarian ca. OVCAR-5 | 1.9 | 2.6 | 20.7 | 17.6 | 14.7 |
| Ovarian ca. OVCAR-8 | 0.9 | 1.8 | 2.5 | 2.7 | 1.3 |
| Ovarian ca. IGROV-1 | 1.9 | 1.0 | 10.7 | 8.1 | 9.9 |
| Ovarian ca.* (ascites) SK-OV-3 | 0.5 | 1.2 | 16.7 | 12.0 | 10.7 |
| Uterus | 1.9 | 3.4 | 2.4 | 4.2 | 4.1 |
| Placenta | 1.6 | 1.6 | 1.8 | 1.5 | 1.4 |
| Prostate | 7.6 | 3.2 | 4.6 | 2.9 | 3.8 |
| Prostate ca.* (bone met)PC-3 | 6.5 | 7.0 | 19.9 | 17.2 | 19.3 |
| Testis | 4.0 | 3.3 | 3.0 | 1.0 | 1.9 |
| Melanoma Hs688(A).T | 0.0 | 0.0 | 0.0 | 0.0 | 0.0 |
| Melanoma* (met) Hs688(B).T | 0.0 | 0.0 | 0.0 | 0.0 | 0.0 |
| Melanoma UACC-62 | 0.2 | 0.2 | 1.0 | 3.6 | 3.8 |
| Melanoma M14 | 0.0 | 0.0 | 0.0 | 0.0 | 0.0 |
| Melanoma LOX IMVI | 0.5 | 0.4 | 0.0 | 0.0 | 0.0 |
| Melanoma* (met) SK-MEL-5 | 1.1 | 0.2 | 1.3 | 2.2 | 2.4 |
| Adipose | 9.7 | 11.0 | 32.8 | 29.9 | 31.4 |

Column A - Rel. Exp. (%) Ag1845, Run 148648438
Column B - Rel. Exp. (%) Ag1845, Run 149951496
Column C - Rel. Exp. (%) Ag2589, Run 167660070
Column D - Rel. Exp. (%) Ag2621, Run 167644903
Column E - Rel. Exp. (%) Ag2915, Run 167646705

[1286] TABLE AII
Panel 2D

| Tissue Name | A | B |
|---|---|---|
| Normal Colon | 35.1 | 24.5 |
| CC Well to Mod Diff (ODO3866) | 19.3 | 16.6 |
| CC Margin (ODO3866) | 9.4 | 11.9 |
| CC Gr.2 rectosigmoid (ODO3868) | 14.0 | 11.7 |
| CC Margin (ODO3868) | 1.4 | 1.9 |
| CC Mod Diff (ODO3920) | 9.6 | 7.1 |
| CC Margin (ODO3920) | 6.1 | 8.0 |
| CC Gr.2 ascend colon (ODO3921) | 58.2 | 47.6 |
| CC Margin (ODO3921) | 16.3 | 8.2 |
| CC from Partial Hepatectomy | 28.5 | 22.5 |
| (ODO4309) Mets | | |
| Liver Margin (ODO4309) | 18.4 | 8.1 |
| Colon mets to lung (OD04451-01) | 12.0 | 15.7 |
| Lung Margin (OD04451-02) | 6.5 | 3.9 |
| Normal Prostate 6546-1 | 23.2 | 17.3 |
| Prostate Cancer (OD04410) | 29.5 | 12.6 |
| Prostate Margin (OD04410) | 18.3 | 12.7 |
| Prostate Cancer (OD04720-01) | 39.0 | 28.9 |
| Prostate Margin (OD04720-02) | 32.8 | 32.3 |
| Normal Lung 061010 | 47.3 | 42.9 |
| Lung Met to Muscle (ODO4286) | 16.5 | 19.6 |
| Muscle Margin (ODO4286) | 3.5 | 4.5 |
| Lung Malignant Cancer (OD03126) | 25.3 | 26.2 |
| Lung Margin (OD03126) | 9.5 | 12.3 |
| Lung Cancer (OD04404) | 19.8 | 13.9 |
| Lung Margin (OD04404) | 12.3 | 10.1 |
| Lung Cancer (OD04565) | 4.8 | 3.8 |
| Lung Margin (OD04565) | 13.7 | 8.3 |
| Lung Cancer (OD04237-01) | 11.0 | 9.9 |
| Lung Margin (OD04237-02) | 21.0 | 23.0 |
| Ocular Mel Met to Liver (ODO4310) | 4.9 | 3.5 |
| Liver Margin (ODO4310) | 5.2 | 4.0 |
| Melanoma Mets to Lung (OD04321) | 1.3 | 3.5 |
| Lung Margin (OD04321) | 18.2 | 23.7 |
| Normal Kidney | 65.5 | 50.3 |
| Kidney Ca, Nuclear grade 2 (OD04338) | 49.0 | 36.1 |
| Kidney Margin (OD04338) | 48.3 | 33.2 |
| Kidney Ca Nuclear grade 1/2 (OD04339) | 19.8 | 14.0 |
| Kidney Margin (OD04339) | 81.8 | 65.1 |
| Kidney Ca, Clear cell type (OD04340) | 100.0 | 100.0 |
| Kidney Margin (OD04340) | 82.4 | 66.0 |
| Kidney Ca, Nuclear grade 3 (OD04348) | 9.9 | 9.9 |
| Kidney Margin (OD04348) | 45.1 | 42.6 |
| Kidney Cancer (OD04622-01) | 24.3 | 14.2 |
| Kidney Margin (OD04622-03) | 9.4 | 10.0 |
| Kidney Cancer (OD04450-01) | 6.5 | 6.2 |
| Kidney Margin (OD04450-03) | 22.4 | 33.0 |
| Kidney Cancer 8120607 | 33.4 | 24.5 |
| Kidney Margin 8120608 | 44.4 | 28.3 |
| Kidney Cancer 8120613 | 30.4 | 17.8 |
| Kidney Margin 8120614 | 62.9 | 51.8 |
| Kidney Cancer 9010320 | 36.3 | 26.4 |
| Kidney Margin 9010321 | 46.7 | 38.2 |
| Normal Uterus | 2.1 | 3.8 |
| Uterus Cancer 064011 | 17.8 | 14.5 |
| Normal Thyroid | 8.7 | 5.0 |
| Thyroid Cancer 064010 | 10.2 | 8.9 |
| Thyroid Cancer A302152 | 2.9 | 4.5 |
| Thyroid Margin A302153 | 10.3 | 7.3 |
| Normal Breast | 18.0 | 17.1 |
| Breast Cancer (OD04566) | 15.7 | 11.5 |
| Breast Cancer (OD04590-01) | 42.6 | 49.7 |
| Breast Cancer Mets (OD04590-03) | 42.6 | 31.2 |
| Breast Cancer Metastasis (OD04655-05) | 33.4 | 23.3 |
| Breast Cancer 064006 | 15.6 | 15.3 |
| Breast Cancer 1024 | 64.2 | 49.0 |
| Breast Cancer 9100266 | 12.1 | 12.2 |
| Breast Margin 9100265 | 17.7 | 20.0 |
| Breast Cancer A209073 | 27.5 | 33.2 |
| Breast Margin A209073 | 22.8 | 27.7 |
| Normal Liver | 14.4 | 8.1 |
| Liver Cancer 064003 | 4.9 | 4.1 |
| Liver Cancer 1025 | 9.3 | 8.3 |
| Liver Cancer 1026 | 8.4 | 8.8 |
| Liver Cancer 6004-T | 10.2 | 11.9 |
| Liver Tissue 6004-N | 2.5 | 2.0 |
| Liver Cancer 6005-T | 7.3 | 6.2 |
| Liver Tissue 6005-N | 2.9 | 3.2 |
| Normal Bladder | 17.3 | 15.2 |
| Bladder Cancer 1023 | 11.0 | 12.3 |
| Bladder Cancer A302173 | 46.3 | 47.0 |
| Bladder Cancer (OD04718-01) | 65.1 | 42.3 |
| Bladder Normal Adjacent (OD04718-03) | 11.6 | 6.7 |
| Normal Ovary | 2.9 | 2.3 |
| Ovarian Cancer 064008 | 32.5 | 28.1 |
| Ovarian Cancer (OD04768-07) | 9.3 | 8.0 |
| Ovary Margin (OD04768-08) | 8.8 | 6.3 |
| Normal Stomach | 15.4 | 16.3 |
| Gastric Cancer 9060358 | 10.4 | 4.0 |
| Stomach Margin 9060359 | 15.6 | 20.6 |
| Gastric Cancer 9060395 | 25.9 | 26.4 |
| Stomach Margin 9060394 | 35.8 | 29.9 |
| Gastric Cancer 9060397 | 79.0 | 64.2 |
| Stomach Margin 9060396 | 10.9 | 8.4 |
| Gastric Cancer 064005 | 23.8 | 27.5 |

Column A - Rel. Exp. (%) Ag1845, Run 148648439
Column B - Rel. Exp. (%) Ag1845, Run 149957753

[1287] TABLE AIJ
Panel 4.1D

| Tissue Name | A |
|---|---|
| Secondary Th1 act | 6.4 |
| Secondary Th2 act | 3.5 |
| Secondary Tr1 act | 0.6 |
| Secondary Th1 rest | 0.0 |
| Secondary Th2 rest | 0.0 |
| Secondary Tr1 rest | 0.0 |
| Primary Th1 act | 0.8 |
| Primary Th2 act | 6.3 |
| Primary Tr1 act | 5.1 |
| Primary Th1 rest | 0.0 |
| Primary Th2 rest | 0.0 |
| Primary Tr1 rest | 0.0 |
| CD45RA CD4 lymphocyte act | 2.6 |
| CD45RO CD4 lymphocyte act | 2.1 |
| CD8 lymphocyte act | 0.0 |
| Secondary CD8 lymphocyte rest | 0.0 |
| Secondary CD8 lymphocyte act | 0.8 |
| CD4 lymphocyte none | 0.4 |
| 2ry Th1/Th2/Tr1_anti-CD95 CH11 | 0.7 |
| LAK cells rest | 0.9 |
| LAK cells IL-2 | 0.0 |
| LAK cells IL-2 + IL-12 | 0.0 |
| LAK cells IL-2 + IFN gamma | 0.0 |
| LAK cells IL-2 + IL-18 | 0.2 |
| LAK cells PMA/ionomycin | 1.2 |
| NK Cells IL-2 rest | 0.4 |
| Two Way MLR 3 day | 2.1 |
| Two Way MLR 5 day | 0.2 |
| Two Way MLR 7 day | 0.8 |
| PBMC rest | 2.2 |
| PBMC PWM | 1.3 |
| PBMC PHA-L | 0.0 |
| Ramos (B cell) none | 6.3 |
| Ramos (B cell) ionomycin | 7.8 |
| B lymphocytes PWM | 0.3 |
| B lymphocytes CD40L and IL-4 | 3.1 |
| EOL-1 dbcAMP | 36.3 |
| EOL-1 dbcAMP PMA/ionomycin | 47.0 |
| Dendritic cells none | 9.2 |
| Dendritic cells LPS | 2.8 |
| Dendritic cells anti-CD40 | 0.4 |
| Monocytes rest | 0.4 |
| Monocytes LPS | 5.5 |
| Macrophages rest | 1.4 |
| Macrophages LPS | 2.7 |
| HUVEC none | 0.3 |
| HUVEC starved | 1.0 |
| HUVEC IL-1beta | 2.2 |
| HUVEC IFN gamma | 1.2 |
| HUVEC INF alpha + IFN gamma | 2.8 |
| HUVEC TNF alpha + IL4 | 2.9 |
| HUVEC IL-11 | 0.0 |
| Lung Microvascular EC none | 1.3 |
| Lung Microvascular EC TNFalpha + IL-1beta | 11.8 |
| Microvascular Dermal EC none | 0.0 |
| Microsvasular Dermal EC TNFalpha + IL-1beta | 4.0 |
| Bronchial epithelium TNFalpha + IL1beta | 0.3 |
| Small airway epithelium none | 0.0 |
| Small airway epithelium TNFalpha + IL-1beta | 1.0 |
| Coronery artery SMC rest | 0.7 |
| Coronery artery SMC TNFalpha + IL-1beta | 1.2 |
| Astrocytes rest | 0.0 |
| Astrocytes TNFalpha + IL-1beta | 14.0 |
| KU-812 (Basophil) rest | 2.5 |
| KU-812 (Basophil) PMA/ionomycin | 1.3 |
| CCD1106 (Keratinocytes) none | 0.0 |
| CCD1106 (Keratinocytes) TNFalpha + IL-1beta | 0.2 |
| Liver cirrhosis | 0.4 |
| NCI-H292 none | 0.2 |
| NCI-H292 IL-4 | 0.5 |
| NCI-H292 IL-9 | 0.2 |
| NCI-H292 IL-13 | 0.8 |
| NCI-H292 IFN gamma | 0.5 |
| HPAEC none | 0.7 |
| HPAEC TNF alpha + IL-1 beta | 100.0 |
| Lung fibroblast none | 0.0 |
| Lung fibroblast TNF alpha + IL-1 beta | 0.0 |
| Lung fibroblast IL-4 | 0.0 |
| Lung fibroblast IL-9 | 0.0 |
| Lung fibroblast IL-13 | 0.0 |
| Lung fibroblast IFN gamma | 0.0 |
| Dermal fibroblast CCD1070 rest | 0.0 |
| Dermal fibroblast CCD1070 TNF alpha | 6.4 |
| Dermal fibroblast CCD1070 IL-1 beta | 0.6 |
| Dermal fibroblast IFN gamma | 0.0 |
| Dermal fibroblast IL-4 | 0.0 |
| Dermal Fibroblasts rest | 0.0 |
| Neutrophils TNFa + LPS | 0.9 |
| Neutrophils rest | 0.0 |
| Colon | 0.0 |
| Lung | 0.0 |
| Thymus | 1.0 |
| Kidney | 2.7 |

Column A - Rel. Exp.(%) Ag8156, Run 319806134

[1288] TABLE AIK
general oncology screening panel_v_2.4

| Tissue Name | A |
|---|---|
| Colon cancer 1 | 26.6 |
| Colon NAT 1 | 5.8 |
| Colon cancer 2 | 7.1 |
| Colon NAT 2 | 3.6 |
| Colon cancer 3 | 26.6 |
| Colon NAT 3 | 7.3 |
| Colon malignant cancer 4 | 23.8 |
| Colon NAT 4 | 1.5 |
| Lung cancer 1 | 5.8 |
| Lung NAT 1 | 1.3 |
| Lung cancer 2 | 42.6 |
| Lung NAT 2 | 1.7 |
| Squamous cell carcinoma 3 | 10.0 |
| Lung NAT 3 | 0.6 |
| Metastatic melanoma 1 | 3.1 |
| Melanoma 2 | 6.4 |
| Melanoma 3 | 3.3 |
| Metastatic melanoma 4 | 4.6 |
| Metastatic melanoma 5 | 6.0 |
| Bladder cancer 1 | 0.3 |
| Bladder NAT 1 | 0.0 |
| Bladder cancer 2 | 0.8 |
| Bladder NAT 2 | 0.2 |
| Bladder NAT 3 | 0.3 |
| Bladder NAT 4 | 3.8 |
| Prostate adenocarcinoma 1 | 4.4 |
| Prostate adenocarcinoma 2 | 0.9 |
| Prostate adenocarcinoma 3 | 3.4 |
| Prostate adenocarcinoma 4 | 8.0 |
| Prostate NAT 5 | 2.2 |
| Prostate adenocarcinoma 6 | 0.8 |
| Prostate adenocarcinoma 7 | 2.9 |
| Prostate adenocarcinoma 8 | 0.4 |
| Prostate adenocarcinoma 9 | 12.4 |
| Prostate NAT 10 | 0.4 |
| Kidney cancer 1 | 24.0 |
| Kidney NAT 1 | 9.6 |
| Kidney cancer 2 | 100.0 |
| Kidney NAT 2 | 13.5 |
| Kidney cancer 3 | 31.0 |
| Kidney NAT 3 | 11.8 |
| Kidney cancer 4 | 27.0 |
| Kidney NAT 4 | 13.7 |

Column A - Rel. Exp. (%)Ag2915, Run 260443054

[1289] AI_comprehensive panel_v1.0 Summary: Ag1845 This transcript was expressed at low levels in many different disease tissues. In comparison, normal lung and joint tissues expressed none or extremely low levels of this transcript. Since this transcript was expressed in monocytes, and matched control tissues contain these inflammatory cells (psoriasis, Crohn's and ulcerative colitis), this transcript is detected at these sites. This transcript encodes B7-H2, which has been shown to be important in antigen presentation. It is a ligand for ICOS and serves as a costimulatory molecule. Therapeutics designed with the transcript are useful for the reduction or inhibition of antigen presentation and in the treatment of diseases such as asthma, IBD, psoriasis and arthritis in which T cells are chronically stimulated.

[1290] CNS_neurodegeneration_v1.0 Summary: Ag1845/Ag2589/Ag2621/Ag2915 The expression of this gene was up-regulated in the temporal cortex of Alzheimer's disease patients when compared to non-demented controls. This difference was apparent when the data were analyzed via ANCOVA, using overall RNA quality and/or quantity as a covariate. The up-regulation of this gene was most apparent in the variant detected by Ag1845. The temporal cortex is a region that shows degeneration at the mid-stages of this disease. Thus, the phenomenon of neurodegeneration was captured in this region, as opposed to the hippocampus and entorhinal cortex where a large number of neurons are already lost by the time of death in AD. Furthermore, in the occipital cortex (where neurodegeneration does not occur in Alzheimer's) this gene was not found to be up-regulated in the same patients. Taken together, these data demonstrate that this gene is useful as a marker of Alzheimer's-like neurodegeneration, and is involved in the process of neurodegeneration. This gene is a form of the B7 protein (B7-H2B), which plays a role in inflammation. Neuroinflammation has been implicated in AD, to the extent that long-term usage of anti-inflammatory agents has been correlated with a reduced incidence of Alzheimer's in retrospective studies. This gene therefore represents an excellent drug target for the treatment of Alzheimer's disease, and any other neuroinflammatory condition.

[1291] Panel 1.3D Summary: Ag1845/Ag2589/Ag2621/Ag2915 Highest expression of this gene was seen in the brain, fetal kidney, and a breast cancer cell line. Higher levels of expression were also consistently seen in fetal skeletal muscle (CTs=29-30), when compared to expression in adult skeletal muscle (CTs=33-35). Thus, expression of this gene is useful as a marker to differentiate between the adult and fetal sources of this tissue. The relative overexpression of this gene in fetal sekeltal muscle shows that the protein product enhances muscle growth or development in the fetus and also acts in a regenerative capacity in the adult. Therapeutic modulation of the protein encoded by this gene is useful in the treatment of lung related diseases.

[1292] This gene product was also moderately expressed in pancreas, adrenal, thyroid, pituitary, adult and fetal liver, adult and fetal heart, and adipose. Based on its expression profile in metabolic tissues, this gene product is useful in the diagnosis and/or treatment of metabolic disease, including obesity and diabetes.

[1293] Panel 2D Summary: Ag1845 The expression of this gene was highest in a sample derived from a kidney cancer (CTs=28). There was substantial expression associated with other samples derived from kidney tissue, bladder cancer and breast cancer. The expression of this gene is useful as a marker to distinguish this kidney cancer sample from other samples in the panel. Therapeutic modulation of this gene, through the use of small molecule drugs, protein therapeutics or antibodies is beneficial for the treatment of kidney cancer, breast cancer or bladder cancer.

[1294] Panel 4.1D Summary: Ag8156 Highest expression of this gene was detected in TNF alpha+IL-1 beta activated HPAEC cells (CT=30.9). Low expression of this gene was also seen in activated lung microvascular endothelial cells. Expression of this gene was very low or undetectable in resting endothelial cells. Low expression of this gene was also seen in activated astrocytes, eosinophils, Ramos B cells, and activated primary Th2 and secondary Th1 cells. This gene codes for B7-H2B gene. B7-H2 is a recently cloned costimulatory ligand that belongs to B7 family. B7-H2 binds to ICOS, an inducible costimulatory receptor expressed on activated, but not resting T cells. (Wang S, Blood 2000 October 15;96(8):2808-13) Interaction of B7-H2 and ICOS in the presence of the TCR stimuli results in an augmented proliferative responses and cytokine production. The data show that circumstances B7-H2 more effectively costimulates Th2 responses. The B7-H2/ICOS pathway plays an important role in antibody response and germinal center formation. (Tesciuba. J Immunol 2001 August 15;167(4):1996-2003) Thus, B7-H2 is useful in the generation of therapeutics for diseases with antibody-mediated and Th2-mediated pathogenesis. Also, antibodies and small molecules that antagonize the function of the B7-H2B protein are useful for the reduction or elimination of the symptoms in patients with autoimmune and inflammatory diseases that involve endothelial cells, such as lupus erythematosus, asthma, emphysema, Crohn's disease, ulcerative colitis, rheumatoid arthritis, osteoarthritis, and psoriasis.

[1295] general oncology screening panel_v_{—}2.4 Summary: Ag2915 Highest expression of this gene was detected in a kidney cancer sample (CT=28.2). Moderate to low expression of this gene was also seen in cancer and normal samples derived from kidney, colon, metastatic melanoma, prostate and lung. Expression of this gene was higher in cancer samples. Therefore, expression of this gene is useful as a diagnostic marker to detect the presence of these cancers. Therapeutic modulation of this gene or its protein product through the use of antibodies or small molecule drug is useful in the treatment of kidney, colon, metastatic melanoma, prostate and lung cancers.

[1296] AJ. CG55906-01: S3-12

[1297] Expression of gene CG55906-01 was assessed using the primer-probe sets Ag2840 and Ag6179, described in Tables AJA and AJB. Results of the RTQ-PCR runs are shown in Tables AJC, AMD, AME, AJF and AJG.

TABLE AJA
Probe Name Ag2840

| | | | | |
|---|---|---|---|---|
| | | | Start | SEQ ID |
| Primers | Sequences | Length | Position | No |

| | | | | |
|---|---|---|---|---|
| Forward | 5′-tctatggtcatgggtacgaaag-3′ | 22 | 1190 | 1444 |
| Probe | TET-5′-acacgatgtccactgggctcacag-3′- | 24 | 1212 | 1445 |
| | TAMRA | | | |
| Reverse | 5′-gttgtgttcagcccagtttg-3′ | 20 | 1265 | 1446 |

[1298] TABLE AJB
Probe Name Ag6179

| | | | | |
|---|---|---|---|---|
| | | | Start | SEQ ID |
| Primers | Sequences | Length | Position | No |

| | | | | |
|---|---|---|---|---|
| Forward | 5′-ttctcactatgtctgctcca-3′ | 20 | 123 | 1447 |
| Probe | TET-5′-atgcagaccctgggcagcttct-3′-TAMRA | 22 | 194 | 1448 |
| Reverse | 5′-ttccgggcagagctgaa-3′ | 17 | 233 | 1449 |

[1299] TABLE AJC
General_screening_panel_v1.5

| Tissue Name | A |
|---|---|
| Adipose | 73.7 |
| Melanoma* Hs688(A).T | 0.0 |
| Melanoma* Hs688(B).T | 0.0 |
| Melanoma* M14 | 0.0 |
| Melanoma* LOXIMVI | 0.2 |
| Melanoma* SK-MEL-5 | 0.0 |
| Squamous cell carcinoma SCC-4 | 0.0 |
| Testis Pool | 0.9 |
| Prostate ca.* (bone met) PC-3 | 5.1 |
| Prostate Pool | 2.6 |
| Placenta | 0.1 |
| Uterus Pool | 1.3 |
| Ovarian ca. OVCAR-3 | 0.3 |
| Ovarian ca. SK-OV-3 | 0.0 |
| Ovarian ca. OVCAR-4 | 0.0 |
| Ovarian ca. OVCAR-5 | 3.4 |
| Ovarian ca. IGROV-1 | 0.1 |
| Ovarian ca. OVCAR-8 | 0.3 |
| Ovary | 0.7 |
| Breast ca. MCF-7 | 0.1 |
| Breast ca. MDA-MB-231 | 0.0 |
| Breast ca. BT 549 | 0.0 |
| Breast ca. T47D | 0.0 |
| Breast ca. MDA-N | 0.0 |
| Breast Pool | 6.7 |
| Trachea | 5.0 |
| Lung | 0.2 |
| Fetal Lung | 0.1 |
| Lung ca. NCI-N417 | 0.0 |
| Lung ca. LX-1 | 0.1 |
| Lung ca. NCI-H146 | 0.0 |
| Lung ca. SHP-77 | 0.1 |
| Lung ca. A549 | 0.0 |
| Lung ca. NCI-H526 | 0.0 |
| Lung ca. NCI-H23 | 0.1 |
| Lung ca. NCI-H460 | 0.0 |
| Lung ca. HOP-62 | 0.0 |
| Lung ca. NCI-H522 | 0.0 |
| Liver | 0.8 |
| Fetal Liver | 0.9 |
| Liver ca. HepG2 | 1.4 |
| Kidney Pool | 13.7 |
| Fetal Kidney | 0.1 |
| Renal ca. 786-0 | 0.0 |
| Renal ca. A498 | 0.0 |
| Renal ca. ACHN | 0.0 |
| Renal ca. UO-31 | 0.0 |
| Renal ca. TK-10 | 1.0 |
| Bladder | 6.5 |
| Gastric ca. (liver met.) NCI-N87 | 1.7 |
| Gastric ca. KATO III | 0.3 |
| Colon ca. SW-948 | 0.1 |
| Colon ca. SW480 | 0.0 |
| Colon ca.* (SW480 met) SW620 | 0.0 |
| Colon ca. HT29 | 0.8 |
| Colon ca. HCT-116 | 0.4 |
| Colon ca. CaCo-2 | 0.1 |
| Colon cancer tissue | 17.6 |
| Colon ca. SW1116 | 0.0 |
| Colon ca. Colo-205 | 0.0 |
| Colon ca. SW-48 | 0.0 |
| Colon Pool | 7.7 |
| Small Intestine Pool | 6.1 |
| Stomach Pool | 3.7 |
| Bone Marrow Pool | 1.7 |
| Fetal Heart | 0.8 |
| Heart Pool | 7.9 |
| Lymph Node Pool | 9.1 |
| Fetal Skeletal Muscle | 2.5 |
| Skeletal Muscle Pool | 100.0 |
| Spleen Pool | 0.0 |
| Thymus Pool | 5.9 |
| CNS cancer (glio/astro) U87-MG | 0.0 |
| CNS cancer (glio/astro) U-118-MG | 0.1 |
| CNS cancer (neuro; met) SK-N-AS | 0.0 |
| CNS cancer (astro) SF-539 | 0.0 |
| CNS cancer (astro) SNB-75 | 0.0 |
| CNS cancer (glio) SNB-19 | 0.0 |
| CNS cancer (glio) SF-295 | 0.3 |
| Brain (Amygdala) Pool | 0.8 |
| Brain (cerebellum) | 0.7 |
| Brain (fetal) | 0.1 |
| Brain (Hippocampus) Pool | 0.8 |
| Cerebral Cortex Pool | 0.5 |
| Brain (Substantia nigra) Pool | 0.9 |
| Brain (Thalamus) Pool | 0.8 |
| Brain (whole) | 0.2 |
| Spinal Cord Pool | 3.5 |
| Adrenal Gland | 3.7 |
| Pituitary gland Pool | 0.0 |
| Salivary Gland | 1.8 |
| Thyroid (female) | 0.5 |
| Pancreatic ca. CAPAN2 | 1.0 |
| Pancreas Pool | 1.8 |

Column A - Rel. Exp.(%) Ag6179, Run 256555247

[1300] TABLE AJD
Panel 2D

| Tissue Name | A |
|---|---|
| Normal Colon | 41.8 |
| CC Well to Mod Diff (ODO3866) | 4.3 |
| CC Margin (ODO3866) | 6.9 |
| CC Gr.2 rectosigmoid (ODO3868) | 1.1 |
| CC Margin (ODO3868) | 4.5 |
| CC Mod Diff (ODO3920) | 0.0 |
| CC Margin (ODO3920) | 0.0 |
| CC Gr.2 ascend colon (ODO3921) | 0.4 |
| CC Margin (ODO3921) | 2.5 |
| CC from Partial Hepatectomy (ODO4309) | 0.2 |
| Mets | |
| Liver Margin (ODO4309) | 1.8 |
| Colon mets to lung (OD04451-01) | 0.1 |
| Lung Margin (OD04451-02) | 0.1 |
| Normal Prostate 6546-1 | 0.9 |
| Prostate Cancer (OD04410) | 1.2 |
| Prostate Margin (OD04410) | 3.2 |
| Prostate Cancer (OD04720-01) | 0.8 |
| Prostate Margin (OD04720-02) | 1.9 |
| Normal Lung 061010 | 1.4 |
| Lung Met to Muscle (ODO4286) | 0.5 |
| Muscle Margin (ODO4286) | 16.4 |
| Lung Malignant Cancer (OD03126) | 0.1 |
| Lung Margin (OD03126) | 0.4 |
| Lung Cancer (OD04404) | 0.3 |
| Lung Margin (OD04404) | 0.3 |
| Lung Cancer (OD04565) | 0.0 |
| Lung Margin (OD04565) | 0.2 |
| Lung Cancer (OD04237-01) | 0.0 |
| Lung Margin (OD04237-02) | 0.1 |
| Ocular Mel Met to Liver (ODO4310) | 0.4 |
| Liver Margin (ODO4310) | 2.6 |
| Melanoma Mets to Lung (OD04321) | 0.0 |
| Lung Margin (OD04321) | 0.2 |
| Normal Kidney | 3.1 |
| Kidney Ca, Nuclear grade 2 (OD04338) | 0.0 |
| Kidney Margin (OD04338) | 0.0 |
| Kidney Ca Nuclear grade 1/2 (OD04339) | 0.2 |
| Kidney Margin (OD04339) | 1.1 |
| Kidney Ca, Clear cell type (OD04340) | 0.3 |
| Kidney Margin (OD04340) | 1.8 |
| Kidney Ca, Nuclear grade 3 (OD04348) | 0.0 |
| Kidney Margin (OD04348) | 1.3 |
| Kidney Cancer (OD04622-01) | 0.0 |
| Kidney Margin (OD04622-03) | 0.0 |
| Kidney Cancer (OD04450-01) | 0.1 |
| Kidney Margin (OD04450-03) | 1.2 |
| Kidney Cancer 8120607 | 0.1 |
| Kidney Margin 8120608 | 0.2 |
| Kidney Cancer 8120613 | 0.7 |
| Kidney Margin 8120614 | 2.0 |
| Kidney Cancer 9010320 | 8.4 |
| Kidney Margin 9010321 | 2.0 |
| Normal Uterus | 2.4 |
| Uterus Cancer 064011 | 4.4 |
| Normal Thyroid | 2.3 |
| Thyroid Cancer 064010 | 0.0 |
| Thyroid Cancer A302152 | 0.4 |
| Thyroid Margin A302153 | 0.5 |
| Normal Breast | 80.7 |
| Breast Cancer (OD04566) | 1.5 |
| Breast Cancer (OD04590-01) | 21.0 |
| Breast Cancer Mets (OD04590-03) | 100.0 |
| Breast Cancer Metastasis (OD04655-05) | 13.3 |
| Breast Cancer 064006 | 0.9 |
| Breast Cancer 1024 | 5.8 |
| Breast Cancer 9100266 | 3.2 |
| Breast Margin 9100265 | 5.9 |
| Breast Cancer A209073 | 2.0 |
| Breast Margin A209073 | 7.9 |
| Normal Liver | 3.3 |
| Liver Cancer 064003 | 2.2 |
| Liver Cancer 1025 | 6.0 |
| Liver Cancer 1026 | 2.0 |
| Liver Cancer 6004-T | 7.5 |
| Liver Tissue 6004-N | 2.2 |
| Liver Cancer 6005-T | 1.8 |
| Liver Tissue 6005-N | 0.3 |
| Normal Bladder | 6.0 |
| Bladder Cancer 1023 | 0.7 |
| Bladder Cancer A302173 | 0.4 |
| Bladder Cancer (OD04718-01) | 0.1 |
| Bladder Normal Adjacent (OD04718-03) | 11.7 |
| Normal Ovary | 0.8 |
| Ovarian Cancer 064008 | 1.1 |
| Ovarian Cancer (OD04768-07) | 0.7 |
| Ovary Margin (OD04768-08) | 2.9 |
| Normal Stomach | 15.1 |
| Gastric Cancer 9060358 | 6.4 |
| Stomach Margin 9060359 | 2.0 |
| Gastric Cancer 9060395 | 8.8 |
| Stomach Margin 9060394 | 8.4 |
| Gastric Cancer 9060397 | 0.9 |
| Stomach Margin 9060396 | 3.1 |
| Gastric Cancer 064005 | 5.3 |

Column A - Rel. Exp.(%) Ag2840, Run 161922469

[1301] TABLE AJE
Panel 3D

| Tissue Name | A |
|---|---|
| Daoy- Medulloblastoma | 22.1 |
| TE671- Medulloblastoma | 10.1 |
| D283 Med- Medulloblastoma | 2.3 |
| PFSK-1- Primitive Neuroectodermal | 6.2 |
| XF-498- CNS | 8.4 |
| SNB-78- Glioma | 5.0 |
| SF-268- Glioblastoma | 1.4 |
| T98G- Glioblastoma | 0.0 |
| SK-N-SH- Neuroblastoma (metastasis) | 2.7 |
| SF-295- Glioblastoma | 2.9 |
| Cerebellum | 3.4 |
| Cerebellum | 38.2 |
| NCI-H292- Mucoepidermoid lung | 0.0 |
| carcinoma | |
| DMS-114- Small cell lung cancer | 0.0 |
| DMS-79- Small cell lung cancer | 100.0 |
| NCI-H146- Small cell lung cancer | 0.0 |
| NCI-H526- Small cell lung cancer | 9.6 |
| NCI-N417- Small cell lung cancer | 0.0 |
| NCI-H82- Small cell lung cancer | 3.3 |
| NCI-H157- Squamous cell lung cancer | 0.0 |
| (metastasis) | |
| NCI-H1155- Large cell lung cancer | 20.6 |
| NCI-H1299- Large cell lung cancer | 9.2 |
| NCI-H727- Lung carcinoid | 0.0 |
| NCI-UMC-11- Lung carcinoid | 0.0 |
| LX-1- Small cell lung cancer | 7.9 |
| Colo-205- Colon cancer | 0.0 |
| KM12- Colon cancer | 0.0 |
| KM20L2- Colon cancer | 2.9 |
| NCI-H716- Colon cancer | 0.0 |
| SW-48- Colon adenocarcinoma | 0.0 |
| SW1116- Colon adenocarcinoma | 0.0 |
| LS 174T- Colon adenocarcinoma | 0.0 |
| SW-948- Colon adenocarcinoma | 0.0 |
| SW-480- Colon adenocarcinoma | 3.8 |
| NCI-SNU-5- Gastric carcinoma | 2.1 |
| KATO III- Gastric carcinoma | 12.0 |
| NCI-SNU-16- Gastric carcinoma | 5.8 |
| NCI-SNU-1- Gastric carcinoma | 2.6 |
| RF-1- Gastric adenocarcinoma | 0.0 |
| RF-48- Gastric adenocarcinoma | 7.2 |
| MKN-45- Gastric carcinoma | 96.6 |
| NCI-N87- Gastric carcinoma | 10.0 |
| OVCAR-5- Ovarian carcinoma | 3.7 |
| RL95-2- Uterine carcinoma | 7.2 |
| HelaS3- Cervical adenocarcinoma | 0.0 |
| Ca Ski- Cervical epidermoid carcinoma | 7.6 |
| (metastasis) | |
| ES-2- Ovarian clear cell carcinoma | 0.0 |
| Ramos- Stimulated with PMA/ionomycin 6 h | 0.0 |
| Ramos- Stimulated with PMA/ionomycin 14 h | 0.0 |
| MEG-01- Chronic myelogenous leukemia | 0.0 |
| (megokaryoblast) | |
| Raji- Burkitt's lymphoma | 0.0 |
| Daudi- Burkitt's lymphoma | 0.0 |
| U266- B-cell plasmacytoma | 10.4 |
| CA46- Burkitt's lymphoma | 0.0 |
| RL- non-Hodgkin's B-cell lymphoma | 5.9 |
| JM1- pre-B-cell lymphoma | 7.8 |
| Jurkat- T cell leukemia | 2.7 |
| TF-1- Erythroleukemia | 5.0 |
| HUT 78- T-cell lymphoma | 0.0 |
| U937- Histiocytic lymphoma | 11.0 |
| KU-812- Myelogenous leukemia | 31.0 |
| 769-P- Clear cell renal carcinoma | 6.1 |
| Caki-2- Clear cell renal carcinoma | 3.0 |
| SW 839- Clear cell renal carcinoma | 0.0 |
| Rhabdoid kidney tumor | 3.7 |
| Hs766T- Pancreatic carcinoma (LN | 9.8 |
| metastasis) | |
| CAPAN-1- Pancreatic adenocarcinoma (liver | 0.0 |
| metastasis) | |
| SU86.86- Pancreatic carcinoma (liver | 5.0 |
| metastasis) | |
| BxPC-3- Pancreatic adenocarcinoma | 13.0 |
| HPAC- Pancreatic adenocarcinoma | 20.7 |
| MIA PaCa-2- Pancreatic carcinoma | 4.2 |
| CFPAC-1- Pancreatic ductal adenocarcinoma | 13.9 |
| PANC-1- Pancreatic epithelioid ductal | 69.7 |
| carcinoma | |
| T24- Bladder carcinma (transitional cell) | 0.0 |
| 5637- Bladder carcinoma | 0.0 |
| HT-1197- Bladder carcinoma | 6.4 |
| UM-UC-3- Bladder carcinma (transitional cell) | 2.4 |
| A204- Rhabdomyosarcoma | 12.5 |
| HT-1080- Fibrosarcoma | 12.1 |
| MG-63- Osteosarcoma | 0.0 |
| SK-LMS-1- Leiomyosarcoma (vulva) | 16.7 |
| SJRH30- Rhabdomyosarcoma (met to bone | 5.7 |
| marrow) | |
| A431- Epidermoid carcinoma | 0.0 |
| WM266-4- Melanoma | 0.0 |
| DU 145- Prostate carcinoma (brain | 0.0 |
| metastasis) | |
| MDA-MB-468- Breast adenocarcinoma | 11.4 |
| SCC-4- Squamous cell carcinoma of tongue | 0.0 |
| SCC-9- Squamous cell carcinoma of tongue | 0.0 |
| SCC-15- Squamous cell carcinoma of tongue | 0.0 |
| CAL 27- Squamous cell carcinoma of tongue | 0.0 |

Column A - Rel. Exp.(%) Ag2840, Run 170190088

[1302] TABLE AJF
Panel 4.1D

| Tissue Name | A |
|---|---|
| Secondary Th1 act | 6.4 |
| Secondary Th2 act | 2.0 |
| Secondary Tr1 act | 4.0 |
| Secondary Th1 rest | 4.4 |
| Secondary Th2 rest | 13.9 |
| Secondary Tr1 rest | 8.2 |
| Primary Th1 act | 3.0 |
| Primary Th2 act | 9.6 |
| Primary Tr1 act | 1.6 |
| Primary Th1 rest | 3.2 |
| Primary Th2 rest | 5.6 |
| Primary Tr1 rest | 6.4 |
| CD45RA CD4 lymphocyte act | 6.0 |
| CD45RO CD4 lymphocyte act | 6.2 |
| CD8 lymphocyte act | 6.4 |
| Secondary CD8 lymphocyte rest | 2.4 |
| Secondary CD8 lymphocyte act | 0.0 |
| CD4 lymphocyte none | 12.5 |
| 2ry Th1/Th2/Tr1_anti-CD95 CH11 | 11.3 |
| LAK cells rest | 7.6 |
| LAK cells IL-2 | 4.2 |
| LAK cells IL-2 + IL-12 | 1.9 |
| LAK cells IL-2 + IFN gamma | 2.7 |
| LAK cells IL-2 + IL-18 | 6.6 |
| LAK cells PMA/ionomycin | 0.0 |
| NK Cells IL-2 rest | 3.4 |
| Two Way MLR 3 day | 6.7 |
| Two Way MLR 5 day | 5.8 |
| Two Way MLR 7 day | 8.5 |
| PBMC rest | 9.3 |
| PBMC PWM | 1.0 |
| PBMC PHA-L | 3.2 |
| Ramos (B cell) none | 1.9 |
| Ramos (B cell) ionomycin | 3.0 |
| B lymphocytes PWM | 1.0 |
| B lymphocytes CD40L and IL-4 | 9.4 |
| EOL-1 dbcAMP | 0.8 |
| EOL-1 dbcAMP PMA/ionomycin | 6.0 |
| Dendritic cells none | 0.9 |
| Dendritic cells LPS | 0.0 |
| Dendritic cells anti-CD40 | 3.1 |
| Monocytes rest | 13.8 |
| Monocytes LPS | 4.9 |
| Macrophages rest | 2.1 |
| Macrophages LPS | 0.9 |
| HUVEC none | 6.3 |
| HUVEC starved | 7.9 |
| HUVEC IL-1beta | 0.9 |
| HUVEC IFN gamma | 4.0 |
| HUVEC TNF alpha + IFN gamma | 0.0 |
| HUVEC TNF alpha + IL4 | 5.4 |
| HUVEC IL-11 | 3.8 |
| Lung Microvascular EC none | 8.4 |
| Lung Microvascular EC TNFalpha + IL-1beta | 4.0 |
| Microvascular Dermal EC none | 4.5 |
| Microsvasular Dermal EC TNFalpha + IL-1beta | 0.0 |
| Bronchial epithelium TNFalpha + IL1beta | 10.4 |
| Small airway epithelium none | 5.9 |
| Small airway epithelium TNFalpha + IL-1beta | 8.5 |
| Coronery artery SMC rest | 0.0 |
| Coronery artery SMC TNFalpha + IL-1beta | 1.0 |
| Astrocytes rest | 0.0 |
| Astrocytes TNFalpha + IL-1beta | 1.4 |
| KU-812 (Basophil) rest | 8.4 |
| KU-812 (Basophil) PMA/ionomycin | 6.1 |
| CCD1106 (Keratinocytes) none | 6.7 |
| CCD1106 (Keratinocytes) TNFalpha + IL-1beta | 1.8 |
| Liver cirrhosis | 63.3 |
| NCI-H292 none | 0.0 |
| NCI-H292 IL-4 | 0.0 |
| NCI-H292 IL-9 | 0.0 |
| NCI-H292 IL-13 | 0.0 |
| NCI-H292 IFN gamma | 0.0 |
| HPAEC none | 0.0 |
| HPAEC TNF alpha + IL-1 beta | 3.3 |
| Lung fibroblast none | 29.5 |
| Lung fibroblast TNF alpha + IL-1 beta | 8.2 |
| Lung fibroblast IL-4 | 7.9 |
| Lung fibroblast IL-9 | 10.3 |
| Lung fibroblast IL-13 | 4.2 |
| Lung fibroblast IFN gamma | 9.1 |
| Dermal fibroblast CCD1070 rest | 2.3 |
| Dermal fibroblast CCD1070 TNF alpha | 9.2 |
| Dermal fibroblast CCD1070 IL-1beta | 4.9 |
| Dermal fibroblast IFN gamma | 1.0 |
| Dermal fibroblast IL-4 | 8.1 |
| Dermal Fibroblasts rest | 4.2 |
| Neutrophils TNFa + LPS | 25.0 |
| Neutrophils rest | 66.9 |
| Colon | 100.0 |
| Lung | 3.8 |
| Thymus | 24.5 |
| Kidney | 32.1 |

Column A - Rel. Exp.(%) Ag2840, Run 204964146

[1303] TABLE AJG
Panel 5 Islet

| Tissue Name | A |
|---|---|
| 97457_Patient-02go_adipose | 100.0 |
| 97476_Patient-07sk_skeletal muscle | 22.8 |
| 97477_Patient-07ut_uterus | 13.8 |
| 97478_Patient-07pl_placenta | 0.0 |
| 99167_Bayer Patient 1 | 1.0 |
| 97482_Patient-08ut_uterus | 6.1 |
| 97483_Patient-08pl_placenta | 0.0 |
| 97486_Patient-09sk_skeletal muscle | 2.3 |
| 97487_Patient-09ut_uterus | 5.5 |
| 97488_Patient-09pl_placenta | 0.0 |
| 97492_Patient-10ut_uterus | 4.4 |
| 97493_Patient-10pl_placenta | 0.0 |
| 97495_Patient-11go_adipose | 24.3 |
| 97496_Patient-11sk_skeletal muscle | 13.0 |
| 97497_Patient-11ut_uterus | 11.7 |
| 97498_Patient-11pl_placenta | 0.0 |
| 97500_Patient-12go_adipose | 78.5 |
| 97501_Patient-12sk_skeletal muscle | 63.3 |
| 97502_Patient-12ut_uterus | 13.0 |
| 97503_Patient-12pl_placenta | 0.0 |
| 94721_Donor 2 U - A_Mesenchymal | 0.0 |
| Stem Cells | |
| 94722_Donor 2 U - B_Mesenchymal | 0.0 |
| Stem Cells | |
| 94723_Donor 2 U - C_Mesenchymal | 0.0 |
| Stem Cells | |
| 94709_Donor 2 AM - A_adipose | 18.9 |
| 94710_Donor 2 AM - B_adipose | 12.5 |
| 94711_Donor 2 AM - C_adipose | 15.2 |
| 94712_Donor 2 AD - A_adipose | 25.2 |
| 94713_Donor 2 AD - B_adipose | 30.4 |
| 94714_Donor 2 AD - C_adipose | 42.3 |
| 94742_Donor 3 U - A_Mesenchymal Stem | 0.0 |
| Cells | |
| 94743_Donor 3 U - B_Mesenchymal Stem | 0.0 |
| Cells | |
| 94730_Donor 3 AM - A_adipose | 12.6 |
| 94731_Donor 3 AM - B_adipose | 7.9 |
| 94732_Donor 3 AM - C_adipose | 11.0 |
| 94733_Donor 3 AD - A_adipose | 26.8 |
| 94734_Donor 3 AD - B_adipose | 18.0 |
| 94735_Donor 3 AD - C_adipose | 17.1 |
| 77138_Liver_HepG2untreated | 0.3 |
| 73556_Heart_Cardiac stromal cells | 0.0 |
| (primary) | |
| 81735_Small Intestine | 12.9 |
| 72409_Kidney_Proximal Convoluted Tubule | 0.0 |
| 82685_Small intestine_Duodenum | 1.0 |
| 90650_Adrenal_Adrenocortical adenoma | 0.0 |
| 72410_Kidney_HRCE | 0.0 |
| 72411_Kidney_HRE | 0.0 |
| 73139_Uterus_Uterine smooth muscle cells | 0.0 |

Column A - Rel. Exp.(%) Ag6179, Run 256791278

[1304] General_screening_panel_v1.5 Summary: Ag6179 Highest expression of this gene was detected in skeletal muscle (CT=28.6). Moderate levels of expression of this gene are also seen in adipose, colon, small intestine and heart. This gene codes for a homolog of mouse S3-12 protein. S3-12 is a purported adipose cell membrane-associated protein that is upregulated during adipocyte differentiation. Due to its weak homology with adipophilins, this gene is involved in lipid uptake. Inhibiting its action by an antibody is useful for reducing the potential white adipose mass by limiting lipid uptake and inhibiting adipocyte differentiation. Its expression in skeletal muscle shows that it can function similarly in muscle tissue as well, in terms of lipid uptake. Since excess lipid storage in muscle is associated with insulin resistance, antibody inhibition of this gene product is useful as a treatment for the prevention of obesity-associated insulin resistance.

[1305] Furthermore, this gene product was also moderately expressed in a variety of metabolic tissues, including adrenal gland, heart, colon and small intestine. Thus, modulation of this gene or expressed protein is useful as marker for the treatment of metabolic disease, including Types 1 and 2 diabetes, and obesity.

[1306] In addition, moderate but significant expression in the spinal cordshows that the protein encoded by this gene plays a role in lipid processing in the central nervous system. LDLR has been implicated in the development of Alzheimer's disease. Therefore, modulation of this gene or gene product is useful in the treatment of Alzheimer's Disease.

[1307] Panel 2D Summary: Ag2840 This gene was moderately expressed in all tissue samples this panel, with highest expression in a metastatic breast cancer sample (CT=24.5). This gene showed higher expression in normal kidney, prostate, colon and bladder samples relative to the corresponding adjacent tumor sample. Expression of this gene is useful as a marker to differentiate between normal and cancerous tissues. Therapeutic modulation of this gene, expressed protein and/or use of agonists targeting this gene or gene product is useful in the treatment of kidney, prostate, colon and bladder cancers.

[1308] Panel 3D Summary: Ag2840 This gene showed low levels of expression in cancer cell lines, with highest expression in a gastric cancer MKN-45 cell line (CT=32). Significant expression was seen in cancer cell lines derived from lung cancer, pancreatic cancer and a leukemia. Therapeutic modulation of this gene, expressed protein and/or use of antibodies or small molecule drug targeting this gene or gene product is useful in the treatment of these cancers.

[1309] Panel 4.1D Summary: Ag2840 This transcript is expressed in colon and in resting neutrophils (CTs=31-33). Thus, the transcript or the protein it encodes is useful as a marker to detect colon tissue and neutrophils. Therapeutics modulation of this gene, expressed protein and/or use of antibodies or small molecule targeting this gene or gene product are useful in the treatment of autoimmune and inflammatory diseases such as asthma, allergies, inflammatory bowel disease including Crohn's and Colitis, lupus erythematosus, psoriasis, rheumatoid arthritis, and osteoarthritis.

[1310] Panel 5 Islet Summary: Ag6179 Highest expression of this gene was detected in adipose tissue from a diabetic patient. Significant expression of this gene was also seen in midway and fully differentiated adipose tissue. This gene was moderately expressed in clinical specimens of adipose, skeletal muscle and uterus.

[1311] AK. CG5590602 and CG5590604 and CG5590605: Human Ortholog of Mouse S3-12

[1312] Expression of full-length physical clone CG55906-02 and variants CG55906-04 and CG55906-05 was assessed using the primer-probe sets Ag2840, Ag5976 and Ag6345, described in Tables AKA, AKB and AKC. Results of the RTQ-PCR runs are shown in Tables AKD, AKE, AKF, AKG and AKH. Please note that only the probe and primer set Ag6345 corresponds to CG55906-02 and only probe and primer sets Ag5976 and Ag6345 correspond to CG55906-05.

TABLE AKA
Probe Name Ag2840

| | | | | |
|---|---|---|---|---|
| | | | Start | SEQ ID |
| Primers | Sequences | Length | Position | No |

| | | | | |
|---|---|---|---|---|
| Forward | 5′-tctatggtcatgggtacgaaag-3′ | 22 | 1183 | 1450 |
| Probe | TET-5′-acacgatgtccactgggctcacag-3′- | 24 | 1205 | 1451 |
| | TAMRA | | | |
| Reverse | 5′-gttgtgttcagcccagtttg-3′ | 20 | 1258 | 1452 |

[1313] TABLE AKB
Probe Name Ag5976

| | | | | |
|---|---|---|---|---|
| | | | Start | SEQ ID |
| Primers | Sequences | Length | Position | No |

| | | | | |
|---|---|---|---|---|
| Forward | 5′-caacttcggaaaagcagat-3′ | 20 | 244 | 1453 |
| Probe | TET-5′-ctggacatcttggaacacaccaggtc-3′- | 26 | 280 | 1454 |
| | TAMRA | | | |
| Reverse | 5′-ggaggacacggcatcct-3′ | 17 | 311 | 1455 |

[1314] TABLE AKC
Probe Name Ag6345

| | | | | |
|---|---|---|---|---|
| | | | Start | SEQ ID |
| Primers | Sequences | Length | Position | No |

| | | | | |
|---|---|---|---|---|
| Forward | 5′-aacgcacatagctcggcga-3′ | 19 | 112 | 1456 |
| Probe | TET-5′-tgaccccacaggagcgcctgct-3′-TAMRA | 22 | 147 | 1457 |
| Reverse | 5′-aaggttgcagctccttctccgt-3′ | 22 | 229 | 1458 |

[1315] TABLE AKD
General_screening_panel_v1.5

| Tissue Name | A | B |
|---|---|---|
| Adipose | 100.0 | 0.0 |
| Melanoma* Hs688(A).T | 0.0 | 0.0 |
| Melanoma* Hs688(B).T | 0.0 | 0.0 |
| Melanoma* M14 | 0.0 | 0.0 |
| Melanoma* LOXIMVI | 0.0 | 0.0 |
| Melanoma* SK-MEL-5 | 0.0 | 0.0 |
| Squamous cell carcinoma SCC-4 | 0.0 | 0.0 |
| Testis Pool | 0.6 | 1.6 |
| Prostate ca.* (bone met) PC-3 | 3.2 | 3.6 |
| Prostate Pool | 1.4 | 1.3 |
| Placenta | 0.0 | 0.0 |
| Uterus Pool | 2.8 | 0.9 |
| Ovarian ca. OVCAR-3 | 0.0 | 3.0 |
| Ovarian ca. SK-OV-3 | 0.0 | 0.0 |
| Ovarian ca. OVCAR-4 | 0.1 | 0.0 |
| Ovarian ca. OVCAR-5 | 4.3 | 7.9 |
| Ovarian ca. IGROV-1 | 0.0 | 0.0 |
| Ovarian ca. OVCAR-8 | 0.0 | 0.0 |
| Ovary | 0.5 | 0.7 |
| Breast ca. MCF-7 | 0.3 | 0.0 |
| Breast ca. MDA-MB-231 | 0.0 | 0.0 |
| Breast ca. BT 549 | 0.0 | 0.0 |
| Breast ca. T47D | 0.0 | 0.0 |
| Breast ca. MDA-N | 0.0 | 0.0 |
| Breast Pool | 8.2 | 6.7 |
| Trachea | 7.3 | 1.5 |
| Lung | 0.3 | 0.0 |
| Fetal Lung | 0.4 | 0.9 |
| Lung ca. NCI-N417 | 0.0 | 0.0 |
| Lung ca. LX-1 | 0.1 | 0.0 |
| Lung ca. NCI-H146 | 0.0 | 0.0 |
| Lung ca. SHP-77 | 0.0 | 0.0 |
| Lung ca. A549 | 0.0 | 0.0 |
| Lung ca. NCI-H526 | 0.0 | 0.0 |
| Lung ca. NCI-H23 | 0.0 | 0.0 |
| Lung ca. NCI-H460 | 0.0 | 0.0 |
| Lung ca. HOP-62 | 0.0 | 0.0 |
| Lung ca. NCI-H522 | 0.0 | 0.0 |
| Liver | 0.7 | 0.0 |
| Fetal Liver | 1.2 | 1.7 |
| Liver ca. HepG2 | 2.0 | 1.2 |
| Kidney Pool | 15.5 | 41.8 |
| Fetal Kidney | 0.1 | 0.0 |
| Renal ca. 786-0 | 0.0 | 0.0 |
| Renal ca. A498 | 0.0 | 0.0 |
| Renal ca. ACHN | 0.0 | 0.0 |
| Renal ca. UO-31 | 0.0 | 0.0 |
| Renal ca. TK-10 | 0.3 | 0.0 |
| Bladder | 3.4 | 0.0 |
| Gastric ca. (liver met.) NCI-N87 | 2.2 | 3.9 |
| Gastric ca. KATO III | 0.1 | 1.7 |
| Colon ca. SW-948 | 0.0 | 0.0 |
| Colon ca. SW480 | 0.0 | 0.0 |
| Colon ca.* (SW480 met) SW620 | 0.0 | 0.0 |
| Colon ca. HT29 | 1.9 | 1.4 |
| Colon ca. HCT-116 | 0.0 | 0.0 |
| Colon ca. CaCo-2 | 0.3 | 0.0 |
| Colon cancer tissue | 15.4 | 15.5 |
| Colon ca. SW1116 | 0.0 | 0.0 |
| Colon ca. Colo-205 | 0.0 | 0.0 |
| Colon ca. SW-48 | 0.0 | 0.0 |
| Colon Pool | 9.4 | 7.0 |
| Small Intestine Pool | 4.8 | 1.4 |
| Stomach Pool | 6.1 | 6.0 |
| Bone Marrow Pool | 3.8 | 2.6 |
| Fetal Heart | 0.2 | 0.0 |
| Heart Pool | 12.2 | 5.0 |
| Lymph Node Pool | 10.4 | 13.9 |
| Fetal Skeletal Muscle | 2.0 | 0.0 |
| Skeletal Muscle Pool | 54.7 | 100.0 |
| Spleen Pool | 0.0 | 0.0 |
| Thymus Pool | 6.2 | 5.5 |
| CNS cancer (glio/astro) U87-MG | 0.0 | 0.0 |
| CNS cancer (glio/astro) U-118-MG | 0.0 | 0.0 |
| CNS cancer (neuro; met) SK-N-AS | 0.0 | 0.3 |
| CNS cancer (astro) SF-539 | 0.0 | 0.0 |
| CNS cancer (astro) SNB-75 | 0.0 | 0.0 |
| CNS cancer (glio) SNB-19 | 0.0 | 0.0 |
| CNS cancer (glio) SF-295 | 0.5 | 0.0 |
| Brain (Amygdala) Pool | 0.5 | 2.7 |
| Brain (cerebellum) | 0.4 | 0.0 |
| Brain (fetal) | 0.3 | 0.0 |
| Brain (Hippocampus) Pool | 0.0 | 2.4 |
| Cerebral Cortex Pool | 1.0 | 1.1 |
| Brain (Substantia nigra) Pool | 0.6 | 0.9 |
| Brain (Thalamus) Pool | 0.9 | 0.0 |
| Brain (whole) | 0.4 | 0.0 |
| Spinal Cord Pool | 2.5 | 2.9 |
| Adrenal Gland | 4.2 | 1.6 |
| Pituitary gland Pool | 0.4 | 0.0 |
| Salivary Gland | 3.0 | 3.1 |
| Thyroid (female) | 0.6 | 0.0 |
| Pancreatic ca. CAPAN2 | 1.6 | 0.6 |
| Pancreas Pool | 8.5 | 18.2 |

Column A - Rel. Exp. (%) Ag5976, Run 248204740
Column B - Rel. Exp. (%) Ag6345, Run 259476291

[1316] TABLE AKE
Panel 2D

| Tissue Name | A |
|---|---|
| Normal Colon | 41.8 |
| CC Well to Mod Diff (ODO3866) | 4.3 |
| CC Margin (ODO3866) | 6.9 |
| CC Gr.2 rectosigmoid (ODO3868) | 1.1 |
| CC Margin (ODO3868) | 4.5 |
| CC Mod Diff (ODO3920) | 0.0 |
| CC Margin (ODO3920) | 0.0 |
| CC Gr.2 ascend colon (ODO3921) | 0.4 |
| CC Margin (ODO3921) | 2.5 |
| CC from Partial Hepatectomy (ODO4309) Mets | 0.2 |
| Liver Margin (ODO4309) | 1.8 |
| Colon mets to lung (OD04451-01) | 0.1 |
| Lung Margin (OD04451-02) | 0.1 |
| Normal Prostate 6546-1 | 0.9 |
| Prostate Cancer (OD04410) | 1.2 |
| Prostate Margin (OD04410) | 3.2 |
| Prostate Cancer (OD04720-01) | 0.8 |
| Prostate Margin (OD04720-02) | 1.9 |
| Normal Lung 061010 | 1.4 |
| Lung Met to Muscle (ODO4286) | 0.5 |
| Muscle Margin (ODO4286) | 16.4 |
| Lung Malignant Cancer (OD03126) | 0.1 |
| Lung Margin (OD03126) | 0.4 |
| Lung Cancer (OD04404) | 0.3 |
| Lung Margin (OD04404) | 0.3 |
| Lung Cancer (OD04565) | 0.0 |
| Lung Margin (OD04565) | 0.2 |
| Lung Cancer (OD04237-01) | 0.0 |
| Lung Margin (OD04237-02) | 0.1 |
| Ocular Mel Met to Liver (ODO4310) | 0.4 |
| Liver Margin (ODO4310) | 2.6 |
| Melanoma Mets to Lung (OD04321) | 0.0 |
| Lung Margin (OD04321) | 0.2 |
| Normal Kidney | 3.1 |
| Kidney Ca, Nuclear grade 2 (OD04338) | 0.0 |
| Kidney Margin (OD04338) | 0.0 |
| Kidney Ca Nuclear grade 1/2 (OD04339) | 0.2 |
| Kidney Margin (OD04339) | 1.1 |
| Kidney Ca, Clear cell type (OD04340) | 0.3 |
| Kidney Margin (OD04340) | 1.8 |
| Kidney Ca, Nuclear grade 3 (OD04348) | 0.0 |
| Kidney Margin (OD04348) | 1.3 |
| Kidney Cancer (OD04622-01) | 0.0 |
| Kidney Margin (OD04622-03) | 0.0 |
| Kidney Cancer (OD04450-01) | 0.1 |
| Kidney Margin (OD04450-03) | 1.2 |
| Kidney Cancer 8120607 | 0.10 |
| Kidney Margin 8120608 | 0.2 |
| Kidney Cancer 8120613 | 0.7 |
| Kidney Margin 8120614 | 2.0 |
| Kidney Cancer 9010320 | 8.4 |
| Kidney Margin 9010321 | 2.0 |
| Normal Uterus | 2.4 |
| Uterus Cancer 064011 | 4.4 |
| Normal Thyroid | 2.3 |
| Thyroid Cancer 064010 | 0.0 |
| Thyroid Cancer A302152 | 0.4 |
| Thyroid Margin A302153 | 0.5 |
| Normal Breast | 80.7 |
| Breast Cancer (OD04566) | 1.5 |
| Breast Cancer (OD04590-01) | 21.0 |
| Breast Cancer Mets (OD04590-03) | 100.0 |
| Breast Cancer Metastasis (OD04655-05) | 13.3 |
| Breast Cancer 064006 | 0.9 |
| Breast Cancer 1024 | 5.8 |
| Breast Cancer 9100266 | 3.2 |
| Breast Margin 9100265 | 5.9 |
| Breast Cancer A209073 | 2.0 |
| Breast Margin A209073 | 7.9 |
| Normal Liver | 3.3 |
| Liver Cancer 064003 | 2.2 |
| Liver Cancer 1025 | 6.0 |
| Liver Cancer 1026 | 2.0 |
| Liver Cancer 6004-T | 7.5 |
| Liver Tissue 6004-N | 2.2 |
| Liver Cancer 6005-T | 1.8 |
| Liver Tissue 6005-N | 0.3 |
| Normal Bladder | 6.0 |
| Bladder Cancer 1023 | 0.7 |
| Bladder Cancer A302173 | 0.4 |
| Bladder Cancer (OD04718-01) | 0.1 |
| Bladder Normal Adjacent (OD04718-03) | 11.7 |
| Normal Ovary | 0.8 |
| Ovarian Cancer 064008 | 1.1 |
| Ovarian Cancer (OD04768-07) | 0.7 |
| Ovary Margin (OD04768-08) | 2.9 |
| Normal Stomach | 15.1 |
| Gastric Cancer 9060358 | 6.4 |
| Stomach Margin 9060359 | 2.0 |
| Gastric Cancer 9060395 | 8.8 |
| Stomach Margin 9060394 | 8.4 |
| Gastric Cancer 9060397 | 0.9 |
| Stomach Margin 9060396 | 3.1 |
| Gastric Cancer 064005 | 5.3 |

Column A - Rel. Exp. (%) Ag2840, Run 161922469

[1317] TABLE AKF
Panel 3D

| Tissue Name | A |
|---|---|
| Daoy- Medulloblastoma | 22.1 |
| TE671- Medulloblastoma | 10.1 |
| D283 Med- Medulloblastoma | 2.3 |
| PFSK-1- Primitive Neuroectodermal | 6.2 |
| XF-498- CNS | 8.4 |
| SNB-78- Glioma | 5.0 |
| SF-268- Glioblastoma | 1.4 |
| T98G- Glioblastoma | 0.0 |
| SK-N-SH- Neuroblastoma (metastasis) | 2.7 |
| SF-295- Glioblastoma | 2.9 |
| Cerebellum | 3.4 |
| Cerebellum | 38.2 |
| NCI-H292- Mucoepidermoid lung carcinoma | 0.0 |
| DMS-114- Small cell lung cancer | 0.0 |
| DMS-79- Small cell lung cancer | 100.0 |
| NCI-H146- Small cell lung cancer | 0.0 |
| NCI-H526- Small cell lung cancer | 9.6 |
| NCI-N417- Small cell lung cancer | 0.0 |
| NCI-H82- Small cell lung cancer | 3.3 |
| NCI-H157- Squamous cell lung cancer (metastasis) | 0.0 |
| NCI-H1155- Large cell lung cancer | 20.6 |
| NCI-H1299- Large cell lung cancer | 9.2 |
| NCI-H727- Lung carcinoid | 0.0 |
| NCI-UMC-11- Lung carcinoid | 0.0 |
| LX-1- Small cell lung cancer | 7.9 |
| Colo-205- Colon cancer | 0.0 |
| KM12- Colon cancer | 0.0 |
| KM20L2- Colon cancer | 2.9 |
| NCI-H716- Colon cancer | 0.0 |
| SW-48- Colon adenocarcinoma | 0.0 |
| SW1116- Colon adenocarcinoma | 0.0 |
| LS 174T- Colon adenocarcinoma | 0.0 |
| SW-948- Colon adenocarcinoma | 0.0 |
| SW-480- Colon adenocarcinoma | 3.8 |
| NCI-SNU-5- Gastric carcinoma | 2.1 |
| KATO III- Gastric carcinoma | 12.0 |
| NCI-SNU-16- Gastric carcinoma | 5.8 |
| NCI-SNU-1- Gastric carcinoma | 2.6 |
| RF-1- Gastric adenocarcinoma | 0.0 |
| RF-48- Gastric adenocarcinoma | 7.2 |
| MKN-45- Gastric carcinoma | 96.6 |
| NCI-N87- Gastric carcinoma | 10.0 |
| OVCAR-5- Ovarian carcinoma | 3.7 |
| RL95-2- Uterine carcinoma | 7.2 |
| HelaS3- Cervical adenocarcinoma | 0.0 |
| Ca Ski- Cervical epidermoid carcinoma (metastasis) | 7.6 |
| ES-2- Ovarian clear cell carcinoma | 0.0 |
| Ramos- Stimulated with PMA/ionomycin 6 h | 0.0 |
| Ramos- Stimulated with PMA/ionomycin 14 h | 0.0 |
| MEG-01- Chronic myelogenous leukemia (megokaryoblast) | 0.0 |
| Raji- Burkitt's lymphoma | 0.0 |
| Daudi- Burkitt's lymphoma | 0.0 |
| U266- B-cell plasmacytoma | 10.4 |
| CA46- Burkitt's lymphoma | 0.0 |
| RL- non-Hodgkin's B-cell lymphoma | 5.9 |
| JM1- pre-B-cell lymphoma | 7.8 |
| Jurkat- T cell leukemia | 2.7 |
| TF-1- Erythroleukemia | 5.0 |
| HUT 78- T-cell lymphoma | 0.0 |
| U937- Histiocytic lymphoma | 11.0 |
| KU-812- Myelogenous leukemia | 31.0 |
| 769-P- Clear cell renal carcinoma | 6.1 |
| Caki-2- Clear cell renal carcinoma | 3.0 |
| SW 839- Clear cell renal carcinoma | 0.0 |
| Rhabdoid kidney tumor | 3.7 |
| Hs766T- Pancreatic carcinoma (LN metastasis) | 9.8 |
| CAPAN-1- Pancreatic adenocarcinoma (liver metastasis) | 0.0 |
| SU86.86- Pancreatic carcinoma (liver metastasis) | 5.0 |
| BxPC-3- Pancreatic adenocarcinoma | 13.0 |
| HPAC- Pancreatic adenocarcinoma | 20.7 |
| MIA PaCa-2- Pancreatic carcinoma | 4.2 |
| CFPAC-1- Pancreatic ductal adenocarcinoma | 13.9 |
| PANC-1- Pancreatic epithelioid ductal carcinoma | 69.7 |
| T24- Bladder carcinma (transitional cell) | 0.0 |
| 5637- Bladder carcinoma | 0.0 |
| HT-1197- Bladder carcinoma | 6.4 |
| UM-UC-3- Bladder carcinma (transitional cell) | 2.4 |
| A204- Rhabdomyosarcoma | 12.5 |
| HT-1080- Fibrosarcoma | 12.1 |
| MG-63- Osteosarcoma | 0.0 |
| SK-LMS-1- Leiomyosarcoma (vulva) | 16.7 |
| SJRH30- Rhabdomyosarcoma (met to bone marrow) | 5.7 |
| A431- Epidermoid carcinoma | 0.0 |
| WM266-4- Melanoma | 0.0 |
| DU 145- Prostate carcinoma (brain metastasis) | 0.0 |
| MDA-MB-468- Breast adenocarcinoma | 11.4 |
| SCC-4- Squamous cell carcinoma of tongue | 0.0 |
| SCC-9- Squamous cell carcinoma of tongue | 0.0 |
| SCC-15- Squamous cell carcinoma of tongue | 0.0 |
| CAL 27- Squamous cell carcinoma of tongue | 0.0 |

Column A - Rel. Exp. (%) Ag2840, Run 170190088

[1318] TABLE AKG
Panel 4.1D

| Tissue Name | A | B |
|---|---|---|
| Secondary Th1 act | 6.4 | 0.0 |
| Secondary Th2 act | 2.0 | 0.0 |
| Secondary Tr1 act | 4.0 | 0.0 |
| Secondary Th1 rest | 4.4 | 0.0 |
| Secondary Th2 rest | 13.9 | 0.0 |
| Secondary Tr1 rest | 8.2 | 0.0 |
| Primary Th1 act | 3.0 | 0.0 |
| Primary Th2 act | 9.6 | 0.0 |
| Primary Tr1 act | 1.6 | 0.0 |
| Primary Th1 rest | 3.2 | 0.0 |
| Primary Th2 rest | 5.6 | 0.0 |
| Primary Tr1 rest | 6.4 | 0.0 |
| CD45RA CD4 lymphocyte act | 6.0 | 0.0 |
| CD45RO CD4 lymphocyte act | 6.2 | 0.0 |
| CD8 lymphocyte act | 6.4 | 0.0 |
| Secondary CD8 lymphocyte rest | 2.4 | 0.0 |
| Secondary CD8 lymphocyte act | 0.0 | 0.0 |
| CD4 lymphocyte none | 12.5 | 0.0 |
| 2ry Th1/Th2/Tr1_anti-CD95 CH11 | 11.3 | 0.0 |
| LAK cells rest | 7.6 | 0.0 |
| LAK cells IL-2 | 4.2 | 0.0 |
| LAK cells IL-2 + IL-12 | 1.9 | 0.0 |
| LAK cells IL-2 + IFN gamma | 2.7 | 0.0 |
| LAK cells IL-2 + IL-18 | 6.6 | 0.0 |
| LAK cells PMA/ionomycin | 0.0 | 0.0 |
| NK Cells IL-2 rest | 3.4 | 0.0 |
| Two Way MLR 3 day | 6.7 | 0.0 |
| Two Way MLR 5 day | 5.8 | 0.0 |
| Two Way MLR 7 day | 8.5 | 0.0 |
| PBMC rest | 9.3 | 0.0 |
| PBMC PWM | 1.0 | 0.0 |
| PBMC PHA-L | 3.2 | 0.0 |
| Ramos (B cell) none | 1.9 | 0.0 |
| Ramos (B cell) ionomycin | 3.0 | 0.0 |
| B lymphocytes PWM | 1.0 | 0.0 |
| B lymphocytes CD40L and IL-4 | 9.4 | 0.0 |
| EOL-1 dbcAMP | 0.8 | 0.0 |
| EOL-1 dbcAMP PMA/ionomycin | 6.0 | 0.0 |
| Dendritic cells none | 0.9 | 0.0 |
| Dendritic cells LPS | 0.0 | 0.0 |
| Dendritic cells anti-CD40 | 3.1 | 0.0 |
| Monocytes rest | 13.8 | 0.0 |
| Monocytes LPS | 4.9 | 0.0 |
| Macrophages rest | 2.1 | 0.0 |
| Macrophages LPS | 0.9 | 0.0 |
| HUVEC none | 6.3 | 0.0 |
| HUVEC starved | 7.9 | 0.0 |
| HUVEC IL-1beta | 0.9 | 0.0 |
| HUVEC IFN gamma | 4.0 | 0.0 |
| HUVEC TNF alpha + IFN gamma | 0.0 | 0.0 |
| HUVEC TNF alpha + IL4 | 5.4 | 0.0 |
| HUVEC IL-11 | 3.8 | 0.0 |
| Lung Microvascular EC none | 8.4 | 0.0 |
| Lung Microvascular EC TNFalpha + IL-1beta | 4.0 | 0.0 |
| Microvascular Dermal EC none | 4.5 | 0.0 |
| Microsvasular Dermal EC TNFalpha + IL-1beta | 0.0 | 0.0 |
| Bronchial epithelium TNFalpha + IL1beta | 10.4 | 0.0 |
| Small airway epithelium none | 5.9 | 0.0 |
| Small airway epithelium TNFalpha + IL-1beta | 8.5 | 0.0 |
| Coronery artery SMC rest | 0.0 | 0.0 |
| Coronery artery SMC TNFalpha + IL-1beta | 1.0 | 0.0 |
| Astrocytes rest | 0.0 | 0.0 |
| Astrocytes TNFalpha + IL-1beta | 1.4 | 0.0 |
| KU-812 (Basophil) rest | 8.4 | 20.0 |
| KU-812 (Basophil) PMA/ionomycin | 6.1 | 0.0 |
| CCD1106 (Keratinocytes) none | 6.7 | 0.0 |
| CCD1106 (Keratinocytes) TNFalpha + IL-1beta | 1.8 | 0.0 |
| Liver cirrhosis | 63.3 | 0.0 |
| NCI-H292 none | 0.0 | 0.0 |
| NCI-H292 IL-4 | 0.0 | 56.3 |
| NCI-H292 IL-9 | 0.0 | 65.5 |
| NCI-H292 IL-13 | 0.0 | 48.6 |
| NCI-H292 IFN gamma | 0.0 | 24.3 |
| HPAEC none | 0.0 | 0.0 |
| HPAEC TNF alpha + IL-1 beta | 3.3 | 0.0 |
| Lung fibroblast none | 29.5 | 100.0 |
| Lung fibroblast TNF alpha + IL-1 beta | 8.2 | 0.0 |
| Lung fibroblast IL-4 | 7.9 | 0.0 |
| Lung fibroblast IL-9 | 10.3 | 0.0 |
| Lung fibroblast IL-13 | 4.2 | 0.0 |
| Lung fibroblast IFN gamma | 9.1 | 0.0 |
| Dermal fibroblast CCD1070 rest | 2.3 | 0.0 |
| Dermal fibroblast CCD1070 TNF alpha | 9.2 | 0.0 |
| Dermal fibroblast CCD1070 IL-1 beta | 4.9 | 0.0 |
| Dermal fibroblast IFN gamma | 1.0 | 0.0 |
| Dermal fibroblast IL-4 | 8.1 | 0.0 |
| Dermal Fibroblasts rest | 4.2 | 0.0 |
| Neutrophils TNFa + LPS | 25.0 | 0.0 |
| Neutrophils rest | 66.9 | 18.7 |
| Colon | 100.0 | 54.7 |
| Lung | 3.8 | 0.0 |
| Thymus | 24.5 | 46.7 |
| Kidney | 32.1 | 0.0 |

Column A - Rel. Exp. (%) Ag2840, Run 204964146
Column B - Rel. Exp. (%) Ag5976, Run 248122612

[1319] TABLE AKH
Panel 5D

| Tissue Name | A |
|---|---|
| 97457_Patient-02go_adipose | 63.3 |
| 97476_Patient-07sk_skeletal muscle | 15.8 |
| 97477_Patient-07ut_uterus | 8.8 |
| 97478_Patient-07pl_placenta | 0.0 |
| 97481_Patient-08sk_skeletal muscle | 15.7 |
| 97482_Patient-08ut_uterus | 8.4 |
| 97483_Patient-08pl_placenta | 0.0 |
| 97486_Patient-09sk_skeletal muscle | 1.4 |
| 97487_Patient-09ut_uterus | 5.5 |
| 97488_Patient-09pl_placenta | 0.0 |
| 97492_Patient-10ut_uterus | 4.6 |
| 97493_Patient-10pl_placenta | 0.3 |
| 97495_Patient-11go_adipose | 0.0 |
| 97496_Patient-11sk_skeletal muscle | 0.0 |
| 97497_Patient-11ut_uterus | 0.0 |
| 97498_Patient-11pl_placenta | 0.0 |
| 97500_Patient-12go_adipose | 48.0 |
| 97501_Patient-12sk_skeletal muscle | 100.0 |
| 97502_Patient-12ut_uterus | 18.7 |
| 97503_Patient-12pl_placenta | 0.0 |
| 94721_Donor 2 U - A_Mesenchymal Stem Cells | 0.0 |
| 94722_Donor 2 U - B_Mesenchymal Stem Cells | 0.2 |
| 94723_Donor 2 U - C_Mesenchymal Stem Cells | 0.0 |
| 94709_Donor 2 AM - A_adipose | 24.1 |
| 94710_Donor 2 AM - B_adipose | 7.9 |
| 94711_Donor 2 AM - C_adipose | 4.5 |
| 94712_Donor 2 AD - A_adipose | 18.3 |
| 94713_Donor 2 AD - B_adipose | 24.1 |
| 94714_Donor 2 AD - C_adipose | 23.5 |
| 94742_Donor 3 U - A_Mesenchymal Stem Cells | 0.0 |
| 94743_Donor 3 U - B_Mesenchymal Stem Cells | 0.0 |
| 94730_Donor 3 AM - A_adipose | 0.0 |
| 94731_Donor 3 AM - B_adipose | 0.0 |
| 94732_Donor 3 AM - C_adipose | 0.1 |
| 94733_Donor 3 AD - A_adipose | 0.0 |
| 94734_Donor 3 AD - B_adipose | 0.0 |
| 94735_Donor 3 AD - C_adipose | 0.0 |
| 77138_Liver_HepG2untreated | 1.1 |
| 73556_Heart_Cardiac stromal cells (primary) | 0.0 |
| 81735_Small Intestine | 16.8 |
| 72409_Kidney_Proximal Convoluted Tubule | 0.0 |
| 82685_Small intestine_Duodenum | 0.7 |
| 90650_Adrenal_Adrenocortical adenoma | 0.1 |
| 72410_Kidney_HRCE | 0.0 |
| 72411_Kidney_HRE | 0.0 |
| 73139_Uterus_Uterine smooth muscle cells | 0.2 |

Column A - Rel. Exp. (%) Ag2840, Run 169270970

[1320] General_screening_panel_v1.5 Summary: Ag5976 Highest expression of this gene was detected in adipose (CT=29). Moderate levels of expression of this gene was also seen in skeletal muscle, colon, small intestine, adrenal gland and heart. This gene codes for a homolog of mouse S3-12 protein. S3-12 is an adipose cell membrane-associated protein upregulated during adipocyte differentiation. Due to its weak homology with adipophilins, it is involved in lipid uptake. Inhibiting its action by an antibody will reduce potential white adipose mass by limiting lipid uptake and thereby inhibit adipocyte differentiation. Its expression in skeletal muscle indicates that it functions similarly in muscle tissue as well, in terms of lipid uptake. Since excess lipid storage in muscle is associated with insulin resistance, antibody inhibition of this gene product is useful as a treatment for the prevention of obesity-associated insulin resistance.

[1321] Furthermore, modulation of this gene or expressed protein is useful for the treatment of metabolic disease, including Types 1 and 2 diabetes, and obesity.

[1322] Low expression of this gene was also seen in colon cancer tissue and cancer cell lines derived from ovarian and prostate cancers.

[1323] Low levels of expression in the spinal cord show that the protein encoded by this gene plays a role in lipid processing in the central nervous system. Modulation of this gene or gene product is useful in the treatment of spinal cord related disorders.

[1324] Ag6345 Highest expression of this gene was detected in adipose and skeletal muscle (CTs=31). Significant expression of this gene was also seen in pancreas, and kidney.

[1325] Panel 2D Summary: Ag2840 This gene was moderately expressed in all tissue samples this panel, with highest expression in metastatic breast cancer (CT=24.5). This gene showed higher expression in normal kidney, prostate, colon and bladder samples relative to the corresponding adjacent tumor sample. Expression of this gene is useful to differentiate between normal and cancerous tissues. Therapeutic modulation of this gene, expressed protein and/or use of agonists targeting this gene or gene product is useful in the treatment of kidney, prostate, colon and bladder cancers.

[1326] Panel 3D Summary: Ag2840 This gene showed low levels of expression in the cancer cell lines, with highest expression in the gastric cancer MKN-45 cell line (CT=32). Significant expression was seen in cancer cell lines derived from lung cancer, pancreatic cancer and a leukemia. Therapeutic modulation of this gene, expressed protein and/or use of antibodies or small molecule drug targeting this gene or gene product is useful in the treatment of these cancers.

[1327] Panel 4.1D Summary: Ag2840 This transcript was expressed in colon and in resting neutrophils (CTs=31-33). The transcript or the protein it encodes are isefi; as markers to detect colon tissue and neutrophils. Therapeutics modulation of this gene, expressed protein and/or use of antibodies or small molecule targeting this gene or gene product is useful in the treatment of autoimmune and inflammatory diseases such as asthma, allergies, inflammatory bowel disease including Crohn's and Colitis, lupus erythematosus, psoriasis, rheumatoid arthritis, and osteoarthritis.

[1328] Panel 5D Summary: Ag2840 This gene was moderately expressed in clinical specimens of adipose, skeletal muscle and uterus. This confirms expression of this gene in tissues with metabolic function. Please see Panel 1.5D for discussion of utility of this gene in metabolic disease.

[1329] AL. CG5590801: Integrin A and FG GAP Domain Protein

[1330] Expression of full-length physical clone CG55908-01 was assessed using the primer-probe sets Ag6400, Ag6446, Ag6449 and Ag6964, described in Tables ALA, ALB, ALC and ALD. Results of the RTQ-PCR runs are shown in Table ALE.

TABLE ALA
Probe Name Ag6400

| | | | | |
|---|---|---|---|---|
| | | | Start | SEQ ID |
| Primers | Sequences | Length | Position | No |

| | | | | |
|---|---|---|---|---|
| Forward | 5′-gagctgatatgcaaaaggaaag-3′ | 22 | 300 | 1459 |
| Probe | TET-5′-ctgactcccaaccactggttctcctt-3′- | 26 | 323 | 1460 |
| | TAMRA | | | |
| Reverse | 5′-gggcgcagtcaacaatct-3′ | 18 | 375 | 1461 |

[1331] TABLE ALB
Probe Name Ag6446

| | | | | |
|---|---|---|---|---|
| | | | Start | SEQ ID |
| Primers | Sequences | Length | Position | No |

| | | | | |
|---|---|---|---|---|
| Forward | 5′-gcttcttccatcggagca-3′ | 18 | 726 | 1462 |
| Probe | TET-5′-caactatcaccgggcctgtctggc-3′- | 24 | 766 | 1463 |
| | TAMRA | | | |
| Reverse | 5′-catggctgaaggctgca-3′ | 17 | 792 | 1464 |

[1332] TABLE ALC
Probe Name Ag6449

| | | | | |
|---|---|---|---|---|
| | | | Start | SEQ ID |
| Primers | Sequences | Length | Position | No |

| | | | | |
|---|---|---|---|---|
| Forward | 5′-gagtcagtgttcggagcca-3′ | 19 | 342 | 1465 |
| Probe | TET-5′-ctgcccactctacagctttgaccgc-3′- | 25 | 421 | 1466 |
| | TAMRA | | | |
| Reverse | 5′-cccagacatgcagcacag-3′ | 18 | 450 | 1467 |

[1333] TABLE ALD
Probe Name Ag6964

| | | | | |
|---|---|---|---|---|
| | | | Start | SEQ ID |
| Primers | Sequences | Length | Position | No |

| | | | | |
|---|---|---|---|---|
| Forward | 5′-ggccccagacatgca-3′ | 15 | 456 | 1468 |
| Probe | TET-5′-actctacagctttgacccgcgcgg-3′-TAMRA | 23 | 427 | 1469 |
| Reverse | 5′-gccaactgtgtggtgttca-3′ | 19 | 401 | 1470 |

[1334] TABLE ALE
General_screening_panel_v1.6

| Tissue Name | A | B | C | D |
|---|---|---|---|---|
| Adipose | 0.0 | 1.7 | 0.0 | 18.8 |
| Melanoma* Hs688(A).T | 0.0 | 0.1 | 0.0 | 0.7 |
| Melanoma* Hs688(B).T | 0.0 | 0.1 | 0.0 | 2.4 |
| Melanoma* M14 | 0.0 | 0.1 | 0.0 | 0.7 |
| Melanoma* LOXIMVI | 0.0 | 0.1 | 0.0 | 0.1 |
| Melanoma* SK-MEL-5 | 0.0 | 6.8 | 0.0 | 15.9 |
| Squamous cell carcinoma SCC-4 | 0.0 | 0.0 | 0.0 | 0.1 |
| Testis Pool | 0.0 | 5.8 | 0.0 | 9.9 |
| Prostate ca.* (bone met) PC-3 | 0.0 | 7.7 | 0.0 | 4.3 |
| Prostate Pool | 0.0 | 1.9 | 0.0 | 10.0 |
| Placenta | 0.0 | 0.9 | 0.0 | 0.4 |
| Uterus Pool | 0.0 | 0.3 | 0.0 | 4.1 |
| Ovarian ca. OVCAR-3 | 0.0 | 4.8 | 0.0 | 4.0 |
| Ovarian ca. SK-OV-3 | 0.0 | 2.5 | 0.0 | 1.7 |
| Ovarian ca. OVCAR-4 | 0.0 | 0.5 | 0.0 | 0.5 |
| Ovarian ca. OVCAR-5 | 0.0 | 15.6 | 0.0 | 7.9 |
| Ovarian ca. IGROV-1 | 22.2 | 5.4 | 79.0 | 75.8 |
| Ovarian ca. OVCAR-8 | 0.0 | 4.2 | 0.0 | 16.7 |
| Ovary | 0.0 | 0.2 | 0.0 | 2.4 |
| Breast ca. MCF-7 | 0.0 | 0.9 | 0.0 | 0.5 |
| Breast ca. MDA-MB-231 | 0.0 | 0.2 | 0.0 | 0.3 |
| Breast ca. BT 549 | 0.0 | 0.2 | 0.0 | 0.4 |
| Breast ca. T47D | 0.0 | 0.7 | 0.0 | 0.5 |
| Breast ca. MDA-N | 0.0 | 0.0 | 10.2 | 0.8 |
| Breast Pool | 0.0 | 2.0 | 0.0 | 16.7 |
| Trachea | 0.0 | 0.5 | 0.0 | 5.6 |
| Lung | 0.0 | 0.5 | 0.0 | 5.1 |
| Fetal Lung | 0.0 | 0.5 | 0.0 | 6.1 |
| Lung ca. NCI-N417 | 0.0 | 0.4 | 0.0 | 2.3 |
| Lung ca. LX-1 | 0.0 | 100.0 | 0.0 | 44.1 |
| Lung ca. NCI-H146 | 0.0 | 0.1 | 0.0 | 0.1 |
| Lung ca. SHP-77 | 0.0 | 0.1 | 0.0 | 3.8 |
| Lung ca. A549 | 0.0 | 14.3 | 0.0 | 4.7 |
| Lung ca. NCI-H526 | 0.0 | 0.0 | 0.0 | 0.5 |
| Lung ca. NCI-H23 | 0.0 | 15.9 | 0.0 | 10.3 |
| Lung ca. NCI-H460 | 0.0 | 0.1 | 0.0 | 0.3 |
| Lung ca. HOP-62 | 0.0 | 0.2 | 0.0 | 0.7 |
| Lung ca. NCI-H522 | 0.0 | 27.7 | 0.0 | 8.9 |
| Liver | 0.0 | 5.3 | 0.0 | 2.0 |
| Fetal Liver | 0.0 | 23.0 | 0.0 | 8.2 |
| Liver ca. HepG2 | 0.0 | 7.3 | 0.0 | 2.4 |
| Kidney Pool | 21.9 | 5.3 | 0.0 | 32.8 |
| Fetal Kidney | 0.0 | 20.2 | 0.0 | 11.5 |
| Renal ca. 786-0 | 0.0 | 1.7 | 0.0 | 0.9 |
| Renal ca. A498 | 0.0 | 23.0 | 0.0 | 8.5 |
| Renal ca. ACHN | 0.0 | 3.8 | 0.0 | 2.5 |
| Renal ca. UO-31 | 0.0 | 0.7 | 0.0 | 0.3 |
| Renal ca. TK-10 | 0.0 | 6.4 | 0.0 | 4.6 |
| Bladder | 0.0 | 3.2 | 0.0 | 6.7 |
| Gastric ca. (liver met.) NCI-N87 | 0.0 | 17.8 | 0.0 | 6.7 |
| Gastric ca. KATO III | 0.0 | 1.3 | 0.0 | 0.9 |
| Colon ca. SW-948 | 0.0 | 6.1 | 0.0 | 1.2 |
| Colon ca. SW480 | 21.6 | 39.0 | 0.0 | 33.7 |
| Colon ca.* (SW480 met) SW620 | 0.0 | 71.2 | 0.0 | 25.0 |
| Colon ca. HT29 | 0.0 | 3.5 | 0.0 | 0.3 |
| Colon ca. HCT-116 | 0.0 | 6.4 | 0.0 | 4.3 |
| Colon ca. CaCo-2 | 12.2 | 78.5 | 0.0 | 38.2 |
| Colon cancer tissue | 0.0 | 21.9 | 0.0 | 20.4 |
| Colon ca. SW1116 | 0.0 | 19.5 | 0.0 | 6.0 |
| Colon ca. Colo-205 | 0.0 | 3.0 | 0.0 | 0.8 |
| Colon ca. SW-48 | 0.0 | 4.2 | 0.0 | 2.6 |
| Colon Pool | 0.0 | 3.1 | 5.1 | 20.6 |
| Small Intestine Pool | 0.0 | 2.5 | 0.0 | 10.4 |
| Stomach Pool | 0.0 | 1.1 | 0.0 | 10.7 |
| Bone Marrow Pool | 0.0 | 1.1 | 0.0 | 12.5 |
| Fetal Heart | 0.0 | 2.7 | 0.0 | 20.7 |
| Heart Pool | 0.0 | 3.4 | 0.0 | 26.1 |
| Lymph Node Pool | 0.0 | 2.8 | 0.0 | 24.7 |
| Fetal Skeletal Muscle | 0.0 | 57.0 | 0.0 | 50.7 |
| Skeletal Muscle Pool | 0.0 | 24.3 | 0.0 | 32.3 |
| Spleen Pool | 0.0 | 2.6 | 0.0 | 3.1 |
| Thymus Pool | 0.0 | 1.4 | 0.0 | 7.0 |
| CNS cancer (glio/astro) U87-MG | 0.0 | 6.3 | 0.0 | 14.1 |
| CNS cancer (glio/astro) U-118-MG | 0.0 | 5.1 | 0.0 | 5.8 |
| CNS cancer (neuro; met) SK-N-AS | 0.0 | 3.9 | 0.0 | 2.6 |
| CNS cancer (astro) SF-539 | 0.0 | 0.3 | 0.0 | 0.1 |
| CNS cancer (astro) SNB-75 | 0.0 | 2.4 | 0.0 | 9.7 |
| CNS cancer (glio) SNB-19 | 0.0 | 5.2 | 100.0 | 100.0 |
| CNS cancer (glio) SF-295 | 0.0 | 14.9 | 0.0 | 14.8 |
| Brain (Amygdala) Pool | 0.0 | 1.1 | 0.0 | 5.3 |
| Brain (cerebellum) | 0.0 | 1.4 | 0.0 | 9.7 |
| Brain (fetal) | 0.0 | 1.1 | 0.0 | 6.4 |
| Brain (Hippocampus) Pool | 0.0 | 2.0 | 0.0 | 10.2 |
| Cerebral Cortex Pool | 0.0 | 2.0 | 0.0 | 8.7 |
| Brain (Substantia nigra) Pool | 0.0 | 1.1 | 0.0 | 9.3 |
| Brain (Thalamus) Pool | 0.0 | 3.2 | 0.0 | 8.7 |
| Brain (whole) | 0.0 | 1.9 | 0.0 | 8.7 |
| Spinal Cord Pool | 100.0 | 2.9 | 0.0 | 9.0 |
| Adrenal Gland | 0.0 | 0.7 | 0.0 | 4.1 |
| Pituitary gland Pool | 0.0 | 0.4 | 0.0 | 0.5 |
| Salivary Gland | 0.0 | 0.2 | 0.0 | 1.0 |
| Thyroid (female) | 0.0 | 0.8 | 0.0 | 2.3 |
| Pancreatic ca. CAPAN2 | 0.0 | 4.6 | 0.0 | 2.2 |
| Pancreas Pool | 0.0 | 2.6 | 0.0 | 2.3 |

Column A - Rel. Exp. (%) Ag6400, Run 277248363
Column B - Rel. Exp. (%) Ag6446, Run 277250179
Column C - Rel. Exp. (%) Ag6449, Run 277250185
Column D - Rel. Exp. (%) Ag6964, Run 278388946

[1335] General_screening_panel_v1.6 Summary: Highest expression of this gene was detected in an ovarian cancer IGROV-1 cell line and a brain cancer SNB-19 cell line (CTs=25-33.7). Moderate to low levels of expression of this gene are also seen in all the regions of central nervous system, tissues with metabolic/endocrine functions, and number of cancer cell lines.

[1336] AM. CG56110-03: B7 H1

[1337] Expression of full-length physical clone CG56110-03 was assessed using the primer-probe set Ag1544, described in Table AMA. Results of the RTQ-PCR runs are shown in Tables AMB, AMC and AMD.

TABLE AMA
Probe Name Ag1544

| | | | | |
|---|---|---|---|---|
| | | | | SEQ |
| | | | Start | ID |
| Primers | Sequences | Length | Position | No |

| | | | | |
|---|---|---|---|---|
| Forward | 5′-tctggacaagcagtgaccat-3′ | 20 | 497 | 1471 |
| Probe | TET-5′-accaccaccaattccaagagagagga-3′- | 26 | 538 | 1472 |
| | TAMRA | | | |
| Reverse | 5′-ttctcagtgtgctggtcaca-3′ | 120 | 576 | 1473 |

[1338] TABLE AMB
Panel 1.3D

| Tissue Name | A |
|---|---|
| Liver adenocarcinoma | 3.6 |
| Pancreas | 2.9 |
| Pancreatic ca. CAPAN 2 | 5.0 |
| Adrenal gland | 2.4 |
| Thyroid | 2.3 |
| Salivary gland | 1.7 |
| Pituitary gland | 6.3 |
| Brain (fetal) | 1.8 |
| Brain (whole) | 3.5 |
| Brain (amygdala) | 2.8 |
| Brain (cerebellum) | 1.7 |
| Brain (hippocampus) | 4.5 |
| Brain (substantia nigra) | 2.7 |
| Brain (thalamus) | 4.4 |
| Cerebral Cortex | 10.4 |
| Spinal cord | 2.0 |
| glio/astro U87-MG | 25.5 |
| glio/astro U-118-MG | 8.2 |
| astrocytoma SW1783 | 7.9 |
| neuro*; met SK-N-AS | 9.2 |
| astrocytoma SF-539 | 6.3 |
| astrocytoma SNB-75 | 37.9 |
| glioma SNB-19 | 12.3 |
| glioma U251 | 14.7 |
| glioma SF-295 | 6.0 |
| Heart (fetal) | 9.0 |
| Heart | 5.4 |
| Skeletal muscle (fetal) | 6.2 |
| Skeletal muscle | 1.9 |
| Bone marrow | 3.2 |
| Thymus | 13.4 |
| Spleen | 14.0 |
| Lymph node | 27.0 |
| Colorectal | 1.5 |
| Stomach | 3.4 |
| Small intestine | 2.7 |
| Colon ca. SW480 | 2.2 |
| Colon ca.* SW620(SW480 met) | 0.8 |
| Colon ca. HT29 | 1.6 |
| Colon ca. HCT-116 | 2.6 |
| Colon ca. CaCo-2 | 0.6 |
| Colon ca. tissue(ODO3866) | 6.6 |
| Colon ca. HCC-2998 | 4.5 |
| Gastric ca.* (liver met) NCI-N87 | 100.0 |
| Bladder | 6.7 |
| Trachea | 10.9 |
| Kidney | 0.8 |
| Kidney (fetal) | 5.5 |
| Renal ca. 786-0 | 10.0 |
| Renal ca. A498 | 17.8 |
| Renal ca. RXF 393 | 11.0 |
| Renal ca. ACHN | 6.9 |
| Renal ca. UO-31 | 14.4 |
| Renal ca. TK-10 | 0.2 |
| Liver | 2.2 |
| Liver (fetal) | 5.8 |
| Liver ca. (hepatoblast) HepG2 | 0.1 |
| Lung | 27.9 |
| Lung (fetal) | 14.0 |
| Lung ca. (small cell) LX-1 | 3.4 |
| Lung ca. (small cell) NCI-H69 | 0.2 |
| Lung ca. (s. cell var.) SHP-77 | 3.0 |
| Lung ca. (large cell)NCI-H460 | 9.7 |
| Lung ca. (non-sm. cell) A549 | 0.8 |
| Lung ca. (non-s. cell) NCI-H23 | 1.3 |
| Lung ca. (non-s. cell) HOP-62 | 19.3 |
| Lung ca. (non-s. cl) NCI-H522 | 0.0 |
| Lung ca. (squam.) SW 900 | 33.2 |
| Lung ca. (squam.) NCI-H596 | 0.0 |
| Mammary gland | 5.6 |
| Breast ca.* (pl. ef) MCF-7 | 0.0 |
| Breast ca.* (pl. ef) MDA-MB-231 | 62.0 |
| Breast ca.* (pl. ef) T47D | 0.0 |
| Breast ca. BT-549 | 11.1 |
| Breast ca. MDA-N | 5.9 |
| Ovary | 3.5 |
| Ovarian ca. OVCAR-3 | 1.7 |
| Ovarian ca. OVCAR-4 | 0.1 |
| Ovarian ca. OVCAR-5 | 5.9 |
| Ovarian ca. OVCAR-8 | 3.6 |
| Ovarian ca. IGROV-1 | 0.0 |
| Ovarian ca.* (ascites) SK-OV-3 | 0.6 |
| Uterus | 2.7 |
| Placenta | 59.0 |
| Prostate | 1.7 |
| Prostate ca.* (bone met)PC-3 | 3.1 |
| Testis | 3.7 |
| Melanoma Hs688(A).T | 15.1 |
| Melanoma* (met) Hs688(B).T | 9.7 |
| Melanoma UACC-62 | 1.4 |
| Melanoma M14 | 0.1 |
| Melanoma LOX IMVI | 17.8 |
| Melanoma* (met) SK-MEL-5 | 7.4 |
| Adipose | 5.1 |

Column A - Rel. Exp. (%) Ag1544, Run 146169090

[1339] TABLE AMC
Panel 2D

| Tissue Name | A | B |
|---|---|---|
| Normal Colon | 15.7 | 2.5 |
| CC Well to Mod Diff (ODO3866) | 5.1 | 0.8 |
| CC Margin (ODO3866) | 3.8 | 0.5 |
| CC Gr.2 rectosigmoid (ODO3868) | 3.3 | 1.2 |
| CC Margin (ODO3868) | 0.0 | 0.1 |
| CC Mod Diff (ODO3920) | 2.6 | 1.8 |
| CC Margin (ODO3920) | 3.0 | 2.2 |
| CC Gr.2 ascend colon (ODO3921) | 6.7 | 4.0 |
| CC Margin (ODO3921) | 1.6 | 0.9 |
| CC from Partial Hepatectomy | 6.0 | 5.4 |
| (ODO4309) Mets | | |
| Liver Margin (ODO4309) | 9.8 | 4.7 |
| Colon mets to lung (OD04451-01) | 7.3 | 7.2 |
| Lung Margin (OD04451-02) | 13.6 | 2.4 |
| Normal Prostate 6546-1 | 3.5 | 2.2 |
| Prostate Cancer (OD04410) | 5.1 | 3.7 |
| Prostate Margin (OD04410) | 4.5 | 8.0 |
| Prostate Cancer (OD04720-01) | 6.3 | 7.1 |
| Prostate Margin (OD04720-02) | 8.1 | 11.5 |
| Normal Lung 061010 | 34.2 | 49.0 |
| Lung Met to Muscle (ODO4286) | 25.7 | 58.2 |
| Muscle Margin (ODO4286) | 5.7 | 4.9 |
| Lung Malignant Cancer (OD03126) | 13.9 | 25.7 |
| Lung Margin (OD03126) | 39.0 | 32.3 |
| Lung Cancer (OD04404) | 27.4 | 15.1 |
| Lung Margin (OD04404) | 25.0 | 4.9 |
| Lung Cancer (OD04565) | 6.2 | 5.8 |
| Lung Margin (OD04565) | 12.9 | 17.1 |
| Lung Cancer (OD04237-01) | 27.5 | 17.6 |
| Lung Margin (OD04237-02) | 100.0 | 28.9 |
| Ocular Mel Met to Liver (ODO4310) | 3.3 | 3.9 |
| Liver Margin (ODO4310) | 5.0 | 5.6 |
| Melanoma Mets to Lung (OD04321) | 5.5 | 3.7 |
| Lung Margin (OD04321) | 35.8 | 32.1 |
| Normal Kidney | 12.1 | 4.8 |
| Kidney Ca, Nuclear grade 2 (OD04338) | 12.7 | 11.9 |
| Kidney Margin (OD04338) | 6.7 | 2.6 |
| Kidney Ca Nuclear grade 1/2 (OD04339) | 14.7 | 9.2 |
| Kidney Margin (OD04339) | 6.6 | 3.2 |
| Kidney Ca, Clear cell type (OD04340) | 7.3 | 9.4 |
| Kidney Margin (OD04340) | 8.2 | 5.1 |
| Kidney Ca, Nuclear grade 3 (OD04348) | 6.7 | 8.1 |
| Kidney Margin (OD04348) | 17.9 | 18.9 |
| Kidney Cancer (OD04622-01) | 7.5 | 15.9 |
| Kidney Margin (OD04622-03) | 1.9 | 0.7 |
| Kidney Cancer (OD04450-01) | 1.7 | 2.3 |
| Kidney Margin (OD04450-03) | 6.5 | 5.9 |
| Kidney Cancer 8120607 | 4.5 | 2.5 |
| Kidney Margin 8120608 | 0.7 | 0.8 |
| Kidney Cancer 8120613 | 1.2 | 1.7 |
| Kidney Margin 8120614 | 0.0 | 0.3 |
| Kidney Cancer 9010320 | 4.7 | 1.2 |
| Kidney Margin 9010321 | 2.1 | 0.7 |
| Normal Uterus | 2.7 | 1.6 |
| Uterus Cancer 064011 | 6.0 | 6.3 |
| Normal Thyroid | 7.3 | 4.5 |
| Thyroid Cancer 064010 | 36.3 | 29.9 |
| Thyroid Cancer A302152 | 11.6 | 13.8 |
| Thyroid Margin A302153 | 15.7 | 9.9 |
| Normal Breast | 5.2 | 3.9 |
| Breast Cancer (OD04566) | 5.0 | 3.3 |
| Breast Cancer (OD04590-01) | 8.6 | 2.3 |
| Breast Cancer Mets (OD04590-03) | 6.7 | 7.2 |
| Breast Cancer Metastasis (OD04655-05) | 6.6 | 5.6 |
| Breast Cancer 064006 | 15.3 | 11.2 |
| Breast Cancer 1024 | 1.9 | 0.9 |
| Breast Cancer 9100266 | 3.1 | 3.5 |
| Breast Margin 9100265 | 2.4 | 1.9 |
| Breast Cancer A209073 | 5.1 | 7.2 |
| Breast Margin A209073 | 5.4 | 1.2 |
| Normal Liver | 6.0 | 4.3 |
| Liver Cancer 064003 | 4.7 | 1.1 |
| Liver Cancer 1025 | 1.8 | 1.5 |
| Liver Cancer 1026 | 0.0 | 0.5 |
| Liver Cancer 6004-T | 4.3 | 1.1 |
| Liver Tissue 6004-N | 4.2 | 1.3 |
| Liver Cancer 6005-T | 0.5 | 0.4 |
| Liver Tissue 6005-N | 1.6 | 1.0 |
| Normal Bladder | 11.3 | 12.7 |
| Bladder Cancer 1023 | 1.8 | 1.3 |
| Bladder Cancer A302173 | 50.0 | 16.7 |
| Bladder Cancer (OD04718-01) | 96.6 | 100.0 |
| Bladder Normal Adjacent (OD04718-03) | 11.1 | 4.6 |
| Normal Ovary | 0.3 | 0.4 |
| Ovarian Cancer 064008 | 7.4 | 3.4 |
| Ovarian Cancer (OD04768-07) | 23.0 | 0.4 |
| Ovary Margin (OD04768-08) | 5.5 | 2.0 |
| Normal Stomach | 5.2 | 2.1 |
| Gastric Cancer 9060358 | 1.8 | 0.4 |
| Stomach Margin 9060359 | 2.3 | 1.3 |
| Gastric Cancer 9060395 | 5.9 | 2.0 |
| Stomach Margin 9060394 | 5.0 | 1.9 |
| Gastric Cancer 9060397 | 6.0 | 2.6 |
| Stomach Margin 9060396 | 2.1 | 1.5 |
| Gastric Cancer 064005 | 10.9 | 10.4 |

Column A - Rel. Exp. (%) Ag1544, Run 145030196
Column B - Rel. Exp. (%) Ag1544, Run 145361330

[1340] TABLE AMD
Panel 4.1D

| Tissue Name | A |
|---|---|
| Secondary Th1 act | 7.9 |
| Secondary Th2 act | 11.7 |
| Secondary Tr1 act | 7.3 |
| Secondary Th1 rest | 0.8 |
| Secondary Th2 rest | 1.2 |
| Secondary Tr1 rest | 1.1 |
| Primary Th1 act | 6.7 |
| Primary Th2 act | 4.5 |
| Primary Tr1 act | 5.9 |
| Primary Th1 rest | 0.4 |
| Primary Th2 rest | 0.3 |
| Primary Tr1 rest | 0.3 |
| CD45RA CD4 lymphocyte act | 5.8 |
| CD45RO CD4 lymphocyte act | 6.5 |
| CD8 lymphocyte act | 2.5 |
| Secondary CD8 lymphocyte rest | 5.9 |
| Secondary CD8 lymphocyte act | 0.7 |
| CD4 lymphocyte none | 0.4 |
| 2ry Th1/Th2/Tr1_anti-CD95 CH11 | 1.7 |
| LAK cells rest | 23.8 |
| LAK cells IL-2 | 2.0 |
| LAK cells IL-2 + IL-12 | 3.1 |
| LAK cells IL-2 + IFN gamma | 5.6 |
| LAK cells IL-2 + IL-18 | 6.6 |
| LAK cells PMA/ionomycin | 77.9 |
| NK Cells IL-2 rest | 1.5 |
| Two Way MLR 3 day | 21.6 |
| Two Way MLR 5 day | 18.9 |
| Two Way MLR 7 day | 5.1 |
| PBMC rest | 0.3 |
| PBMC PWM | 11.5 |
| PBMC PHA-L | 8.4 |
| Ramos (B cell) none | 0.2 |
| Ramos (B cell) ionomycin | 0.3 |
| B lymphocytes PWM | 2.8 |
| B lymphocytes CD40L and IL-4 | 1.2 |
| EOL-1 dbcAMP | 0.1 |
| EOL-1 dbcAMP PMA/ionomycin | 0.2 |
| Dendritic cells none | 19.9 |
| Dendritic cells LPS | 58.2 |
| Dendritic cells anti-CD40 | 12.6 |
| Monocytes rest | 0.1 |
| Monocytes LPS | 100.0 |
| Macrophages rest | 4.6 |
| Macrophages LPS | 32.3 |
| HUVEC none | 2.0 |
| HUVEC starved | 3.2 |
| HUVEC IL-1beta | 4.0 |
| HUVEC IFN gamma | 18.4 |
| HUVEC TNF alpha + IFN gamma | 19.5 |
| HUVEC TNF alpha + IL4 | 2.8 |
| HUVEC IL-11 | 2.0 |
| Lung Microvascular EC none | 7.5 |
| Lung Microvascular EC TNFalpha + IL-1beta | 3.5 |
| Microvascular Dermal EC none | 5.2 |
| Microsvasular Dermal EC TNFalpha + IL-1beta | 1.4 |
| Bronchial epithelium TNFalpha + IL1beta | 1.1 |
| Small airway epithelium none | 0.7 |
| Small airway epithelium TNFalpha + IL-1beta | 2.3 |
| Coronery artery SMC rest | 1.4 |
| Coronery artery SMC TNFalpha + IL-1beta | 1.8 |
| Astrocytes rest | 3.3 |
| Astrocytes TNFalpha + IL-1beta | 5.8 |
| KU-812 (Basophil) rest | 0.0 |
| KU-812 (Basophil) PMA/ionomycin | 0.3 |
| CCD1106 (Keratinocytes) none | 5.4 |
| CCD1106 (Keratinocytes) TNFalpha + IL-1beta | 19.9 |
| Liver cirrhosis | 0.2 |
| NCI-H292 none | 0.8 |
| NCI-H292 IL-4 | 1.4 |
| NCI-H292 IL-9 | 1.0 |
| NCI-H292 IL-13 | 1.6 |
| NCI-H292 IFN gamma | 4.2 |
| HPAEC none | 2.4 |
| HPAEC TNF alpha + IL-1 beta | 4.7 |
| Lung fibroblast none | 0.8 |
| Lung fibroblast TNF alpha + IL-1 beta | 1.6 |
| Lung fibroblast IL-4 | 1.5 |
| Lung fibroblast IL-9 | 1.7 |
| Lung fibroblast IL-13 | 1.1 |
| Lung fibroblast IFN gamma | 15.0 |
| Dermal fibroblast CCD1070 rest | 2.8 |
| Dermal fibroblast CCD1070 TNF alpha | 4.9 |
| Dermal fibroblast CCD1070 IL-1 beta | 4.0 |
| Dermal fibroblast IFN gamma | 3.7 |
| Dermal fibroblast IL-4 | 0.7 |
| Dermal Fibroblasts rest | 0.2 |
| Neutrophils TNFa + LPS | 0.4 |
| Neutrophils rest | 0.6 |
| Colon | 0.2 |
| Lung | 0.6 |
| Thymus | 4.5 |
| Kidney | 0.5 |

Column A - Rel. Exp. (%) Ag1544, Run 209988812

[1341] Panel 1.3D Summary: Ag1544 The expression of this gene was highest in a sample derived from a gastric cancer cell line (NCI-H87) (CT=27.3). There was substantial expression found in lung cancer cell lines, a breast cancer cell line and placental tissue. The expression of this gene is useful as a marker to distinguish NCI-H87 cells from other samples in the panel. Therapeutic modulation of this gene or its protein product, through the use of small molecule drugs, antibodies or protein therapeutics is beneficial in the treatment of lung cancer or breast cancer.

[1342] Panel 2D Summary: Ag1544 The expression of this gene was highest expression associated with bladder cancer tissue and lung tissue derived samples. The expression of this gene is useful as a marker to distinguish between these samples and the rest of the samples in the panel. Therapeutic modulation of this gene, through the use of small molecule drugs, antibodies or protein therapeutics are beneficial in the treatment of bladder or lung cancer.

[1343] Panel 4.1D Summary: Ag1544 This transcript was expressed in LAK cells, and induced in LAK cells activated with PMA/ionomycin, dendritic cells treated with LPS, monocytes treated with LPS, Gamma interferon treated HUEC cells and keratinocytes treated with TNFalpha and IL-1beta. This transcript encodes a smaller isoform of B7-H1, an antigen presentation co-receptor. B7-H1 binds to PD-1 ligand on T cells, resulting in T cell activation and production of IL-10. Antibody or other types of therapeutics designed with B7-H1 are useful for blocking T cell activation and for the treatment of T cell-mediated diseases such as asthma, psoriasis, IBD and arthritis. Alternatively, agonistic therapeutics designed with this protein are useful for adjuvant or immuno-modulatory treatments.

[1344] AN. CG56110-07: B7-H1

[1345] Expression of full-length physical clone CG56110-07 was assessed using the primer-probe set Ag5282, described in Table ANA. Results of the RTQ-PCR runs are shown in Tables ANB and ANC.

TABLE ANA
Probe Name Ag5282

| | | | | SEQ |
|---|---|---|---|---|
| | | | Start | ID |
| Primers | Sequences | Length | Position | No |
| Forward | 5′-tcaagtcctgagtggagattagat-3′ | 24 | 491 | 1474 |
| Probe | TET-5′-tggtcatcccagaactacctctggca-3′- | 26 | 540 | 1475 |
| | TAMRA | | | |
| Reverse | 5′-cccagaattaccaagtgagtcct-3′ | 23 | 581 | 1476 |

[1346] TABLE ANB
General_screening_panel_v1.5

| Tissue Name | A |
|---|---|
| Adipose | 0.0 |
| Melanoma* Hs688(A).T | 0.0 |
| Melanoma* Hs688(B).T | 5.1 |
| Melanoma* M14 | 0.6 |
| Melanoma* LOXIMVI | 23.0 |
| Melanoma* SK-MEL-5 | 3.6 |
| Squamous cell carcinoma SCC-4 | 10.9 |
| Testis Pool | 0.0 |
| Prostate ca.* (bone met) PC-3 | 0.0 |
| Prostate Pool | 1.2 |
| Placenta | 2.8 |
| Uterus Pool | 2.8 |
| Ovarian ca. OVCAR-3 | 2.7 |
| Ovarian ca. SK-OV-3 | 0.0 |
| Ovarian ca. OVCAR-4 | 0.0 |
| Ovarian ca. OVCAR-5 | 6.1 |
| Ovarian ca. IGROV-1 | 5.4 |
| Ovarian ca. OVCAR-8 | 1.3 |
| Ovary | 0.0 |
| Breast ca. MCF-7 | 0.0 |
| Breast ca. MDA-MB-231 | 31.2 |
| Breast ca. BT 549 | 3.6 |
| Breast ca. T47D | 0.0 |
| Breast ca. MDA-N | 3.7 |
| Breast Pool | 0.5 |
| Trachea | 1.1 |
| Lung | 1.2 |
| Fetal Lung | 1.3 |
| Lung ca. NCI-N417 | 0.0 |
| Lung ca. LX-1 | 2.7 |
| Lung ca. NCI-H146 | 0.0 |
| Lung ca. SHP-77 | 0.0 |
| Lung ca. A549 | 0.0 |
| Lung ca. NCI-H526 | 0.0 |
| Lung ca. NCI-H23 | 0.8 |
| Lung ca. NCI-H460 | 1.4 |
| Lung ca. HOP-62 | 13.1 |
| Lung ca. NCI-H522 | 0.0 |
| Liver | 0.0 |
| Fetal Liver | 0.0 |
| Liver ca. HepG2 | 0.0 |
| Kidney Pool | 3.1 |
| Fetal Kidney | 0.0 |
| Renal ca. 786-0 | 5.1 |
| Renal ca. A498 | 2.1 |
| Renal ca. ACHN | 1.3 |
| Renal ca. UO-31 | 6.8 |
| Renal ca. TK-10 | 0.7 |
| Bladder | 4.0 |
| Gastric ca. (liver met.) NCI-N87 | 100.0 |
| Gastric ca. KATO III | 4.2 |
| Colon ca. SW-948 | 0.0 |
| Colon ca. SW480 | 2.2 |
| Colon ca.* (SW480 met) SW620 | 0.0 |
| Colon ca. HT29 | 0.0 |
| Colon ca. HCT-116 | 3.6 |
| Colon ca. CaCo-2 | 0.0 |
| Colon cancer tissue | 1.8 |
| Colon ca. SW1116 | 0.0 |
| Colon ca. Colo-205 | 0.0 |
| Colon ca. SW-48 | 0.0 |
| Colon Pool | 4.8 |
| Small Intestine Pool | 4.3 |
| Stomach Pool | 0.0 |
| Bone Marrow Pool | 0.9 |
| Fetal Heart | 3.9 |
| Heart Pool | 2.3 |
| Lymph Node Pool | 0.0 |
| Fetal Skeletal Muscle | 1.2 |
| Skeletal Muscle Pool | 3.1 |
| Spleen Pool | 3.9 |
| Thymus Pool | 3.9 |
| CNS cancer (glio/astro) U87-MG | 21.9 |
| CNS cancer (glio/astro) U-118-MG | 3.5 |
| CNS cancer (neuro; met) SK-N-AS | 1.4 |
| CNS cancer (astro) SF-539 | 0.0 |
| CNS cancer (astro) SNB-75 | 2.5 |
| CNS cancer (glio) SNB-19 | 8.7 |
| CNS cancer (glio) SF-295 | 3.6 |
| Brain (Amygdala) Pool | 0.0 |
| Brain (cerebellum) | 1.3 |
| Brain (fetal) | 0.0 |
| Brain (Hippocampus) Pool | 0.0 |
| Cerebral Cortex Pool | 2.1 |
| Brain (Substantia nigra) Pool | 0.0 |
| Brain (Thalamus) Pool | 0.9 |
| Brain (whole) | 0.0 |
| Spinal Cord Pool | 1.4 |
| Adrenal Gland | 2.2 |
| Pituitary gland Pool | 0.0 |
| Salivary Gland | 0.0 |
| Thyroid (female) | 2.5 |
| Pancreatic ca. CAPAN2 | 12.3 |
| Pancreas Pool | 1.8 |

Column A - Rel. Exp. (%) Ag5282, Run 230565189

[1347] TABLE ANC
Panel 4.1D

| Tissue Name | A |
|---|---|
| Secondary Th1 act | 5.6 |
| Secondary Th2 act | 18.6 |
| Secondary Tr1 act | 4.9 |
| Secondary Th1 rest | 0.0 |
| Secondary Th2 rest | 0.3 |
| Secondary Tr1 rest | 0.9 |
| Primary Th1 act | 4.6 |
| Primary Th2 act | 4.1 |
| Primary Tr1 act | 9.7 |
| Primary Th1 rest | 0.0 |
| Primary Th2 rest | 0.8 |
| Primary Tr1 rest | 0.0 |
| CD45RA CD4 lymphocyte act | 9.8 |
| CD45RO CD4 lymphocyte act | 13.1 |
| CD8 lymphocyte act | 0.0 |
| Secondary CD8 lymphocyte rest | 6.7 |
| Secondary CD8 lymphocyte act | 0.8 |
| CD4 lymphocyte none | 0.0 |
| 2ry Th1/Th2/Tr1_anti-CD95 CH11 | 0.0 |
| LAK cells rest | 14.0 |
| LAK cells IL-2 | 0.0 |
| LAK cells IL-2 + IL-12 | 1.9 |
| LAK cells IL-2 + IFN gamma | 1.7 |
| LAK cells IL-2 + IL-18 | 3.0 |
| LAK cells PMA/ionomycin | 76.3 |
| NK Cells IL-2 rest | 1.0 |
| Two Way MLR 3 day | 9.4 |
| Two Way MLR 5 day | 4.0 |
| Two Way MLR 7 day | 0.7 |
| PBMC rest | 0.0 |
| PBMC PWM | 6.1 |
| PBMC PHA-L | 6.1 |
| Ramos (B cell) none | 0.0 |
| Ramos (B cell) ionomycin | 0.0 |
| B lymphocytes PWM | 3.6 |
| B lymphocytes CD40L and IL-4 | 0.0 |
| EOL-1 dbcAMP | 0.0 |
| EOL-1 dbcAMP PMA/ionomycin | 0.0 |
| Dendritic cells none | 10.2 |
| Dendritic cells LPS | 36.1 |
| Dendritic cells anti-CD40 | 4.8 |
| Monocytes rest | 0.0 |
| Monocytes LPS | 100.0 |
| Macrophages rest | 2.6 |
| Macrophages LPS | 5.0 |
| HUVEC none | 2.2 |
| HUVEC starved | 3.8 |
| HUVEC IL-1beta | 1.7 |
| HUVEC IFN gamma | 25.5 |
| HUVEC TNF alpha + IFN gamma | 13.9 |
| HUVEC TNF alpha + IL4 | 2.0 |
| HUVEC IL-11 | 0.0 |
| Lung Microvascular EC none | 9.9 |
| Lung Microvascular EC TNFalpha + IL-1beta | 0.0 |
| Microvascular Dermal EC none | 0.8 |
| Microsvasular Dermal EC TNFalpha + IL-1beta | 0.3 |
| Bronchial epithelium TNFalpha + IL1beta | 0.3 |
| Small airway epithelium none | 2.3 |
| Small airway epithelium TNFalpha + IL-1beta | 2.2 |
| Coronery artery SMC rest | 1.0 |
| Coronery artery SMC TNFalpha + IL-1beta | 1.9 |
| Astrocytes rest | 1.8 |
| Astrocytes TNFalpha + IL-1beta | 5.3 |
| KU-812 (Basophil) rest | 0.0 |
| KU-812 (Basophil) PMA/ionomycin | 1.0 |
| CCD1106 (Keratinocytes) none | 5.5 |
| CCD1106 (Keratinocytes) TNFalpha + IL-1beta | 18.8 |
| Liver cirrhosis | 0.0 |
| NCI-H292 none | 0.0 |
| NCI-H292 IL-4 | 1.0 |
| NCI-H292 IL-9 | 1.0 |
| NCI-H292 IL-13 | 1.5 |
| NCI-H292 IFN gamma | 8.8 |
| HPAEC none | 0.9 |
| HPAEC TNF alpha + IL-1 beta | 6.0 |
| Lung fibroblast none | 0.0 |
| Lung fibroblast TNF alpha + IL-1 beta | 1.0 |
| Lung fibroblast IL-4 | 2.3 |
| Lung fibroblast IL-9 | 1.6 |
| Lung fibroblast IL-13 | 0.0 |
| Lung fibroblast IFN gamma | 17.0 |
| Dermal fibroblast CCD1070 rest | 6.6 |
| Dermal fibroblast CCD1070 TNF alpha | 9.4 |
| Dermal fibroblast CCD1070 IL-1 beta | 5.3 |
| Dermal fibroblast IFN gamma | 2.8 |
| Dermal fibroblast IL-4 | 0.0 |
| Dermal Fibroblasts rest | 0.0 |
| Neutrophils TNFa + LPS | 0.9 |
| Neutrophils rest | 0.0 |
| Colon | 0.0 |
| Lung | 0.0 |
| Thymus | 0.0 |
| Kidney | 0.0 |

Column A - Rel. Exp. (%) Ag5282, Run 230510202

[1348] General_screening_panel_v1.5 Summary: Ag5282 The expression of this gene was highest in a sample derived from a gastric cancer cell line (NCI-H87) (CT=31).

[1349] There was relatively low expression in the remaining samples of panel 1.5. The expression of this gene is useful as a marker to distinguish NCI-H87 cells from other samples in the panel.

[1350] In addition, low expression of this gene was also seen in number of cancer cell lines derived from melanoma, pancreatic, gastric, renal, squamous cell carcinoma and lung cancers. Therapeutic modulation of this gene or its protein product is useful in the treatment of these cancers.

[1351] Panel 4.1D Summary: Ag5282 This transcript was not expressed in the normal tissue samples on this panel. The transcript was expressed in LAK cells, and induced in LAK cells activated with PMA/ionomycin, dendritic cells treated with LPS, monocytes treated with LPS, Gamma interferon treated HUVEC cells and keratinocytes treated with TNFalpha and IL-1beta. This transcript encodes a smaller isoform of B7-H1, an antigen presentation co-receptor. B7-H1 binds to PD-1 ligand on T cells and resulting in T cell activation and production of IL-10. Antibody or other types of therapeutics designed with B7-H1 are useful for blocking T cell activation and in the treatment of T cell-mediated diseases such as asthma, psoriasis, IBD and arthritis. Alternatively, agonistic therapeutics designed with this protein are useful for adjuvant like properties.

[1352] AO. CG56449-09: MEGF6/NOTCH like Isoform 7

[1353] Expression of gene CG56449-09 was assessed using the primer-probe sets Ag1153, Ag1937, Ag422 and Ag252 and, described in Tables AOA, AOB, AOC, and AOD. Results of the RTQ-PCR runs are shown in Tables AOE, AOF, and AOG.

TABLE AOA
Probe Name Ag1513

| | | | | SEQ |
|---|---|---|---|---|
| | | | Start | ID |
| Primers | Sequences | Length | Position | No |
| Forward | 5′-acacacgctcacagagaagttt-3′ | 22 | 1521 | 1477 |
| Probe | TET-5′-ctggatgactcctttggccatgact-3′- | 25 | 1549 | 1478 |
| | TAMRA | | | |
| Reverse | 5′-ctgcagtcatcacaggtcaag-3′ | 21 | 1578 | 1479 |

[1354] TABLE AOB
Probe Name Ag1937

| | | | | SEQ |
|---|---|---|---|---|
| | | | Start | ID |
| Primers | Sequences | Length | Position | No |
| Forward | 5′-ctgcagtcatcacaggtcaag-3′ | 21 | 1578 | 1480 |
| Probe | TET-5′-ccaaaggagtcatccaggcagacaaa-3′- | 26 | 1540 | 1481 |
| | TAMRA | | | |
| Reverse | 5′-gaacacacgctcacagagaag-3′ | 21 | 1519 1482 | |

[1355] TABLE AOC
Probe Name Ag422

| | | | | SEQ |
|---|---|---|---|---|
| | | | Start | ID |
| Primers | Sequences | Length | Position | No |
| Forward | 5′-tgaacaccccaggctcctac-3′ | 20 | 545 | 1483 |
| Probe | TET-5′-cggcttccggctccacactgac-3′- | 22 | 582 | 1484 |
| | TAMRA | | | |
| Reverse | 5′-taatggccaggcaggtcct-3′ | 19 | 607 | 1485 |

[1356] TABLE AOD
Probe Name Ag252

| | | | | SEQ |
|---|---|---|---|---|
| | | | Start | ID |
| Primers | Sequences | Length | Position | No |
| Forward | 5′-gagctgccgcaactcttcc-3′ | 19 | 1453 | 1486 |
| Probe | TET-5′-cgcaactctgcctcttcctcatcgg-3′- | 25 | 1490 | 1487 |
| | TAMRA | | | |
| Reverse | 5′-gacaaacttctctgtgagcgtgtg-3′ | 24 | 1522 | 1488 |

[1357] TABLE AOE
Panel 1.3D

| Tissue Name | A |
|---|---|
| Liver adenocarcinoma | 13.9 |
| Pancreas | 4.7 |
| Pancreatic ca. CAPAN 2 | 4.1 |
| Adrenal gland | 6.7 |
| Thyroid | 5.1 |
| Salivary gland | 13.6 |
| Pituitary gland | 5.5 |
| Brain (fetal) | 28.5 |
| Brain (whole) | 43.8 |
| Brain (amygdala) | 32.3 |
| Brain (cerebellum) | 42.9 |
| Brain (hippocampus) | 44.1 |
| Brain (substantia nigra) | 4.1 |
| Brain (thalamus) | 14.8 |
| Cerebral Cortex | 25.5 |
| Spinal cord | 2.6 |
| glio/astro U87-MG | 2.0 |
| glio/astro U-118-MG | 10.2 |
| astrocytoma SW1783 | 10.6 |
| neuro*; met SK-N-AS | 1.7 |
| astrocytoma SF-539 | 4.9 |
| astrocytoma SNB-75 | 10.1 |
| glioma SNB-19 | 6.6 |
| glioma U251 | 8.4 |
| glioma SF-295 | 1.4 |
| Heart (fetal) | 11.8 |
| Heart | 7.6 |
| Skeletal muscle (fetal) | 7.4 |
| Skeletal muscle | 0.0 |
| Bone marrow | 1.8 |
| Thymus | 12.1 |
| Spleen | 0.0 |
| Lymph node | 15.7 |
| Colorectal | 0.0 |
| Stomach | 4.9 |
| Small intestine | 13.7 |
| Colon ca. SW480 | 12.0 |
| Colon ca.* SW620(SW480 met) | 2.9 |
| Colon ca. HT29 | 2.3 |
| Colon ca. HCT-116 | 2.9 |
| Colon ca. CaCo-2 | 2.9 |
| Colon ca. tissue(ODO3866) | 2.9 |
| Colon ca. HCC-2998 | 2.8 |
| Gastric ca.* (liver met) NCI-N87 | 12.9 |
| Bladder | 4.1 |
| Trachea | 34.2 |
| Kidney | 4.7 |
| Kidney (fetal) | 22.8 |
| Renal ca. 786-0 | 0.0 |
| Renal ca. A498 | 19.5 |
| Renal ca. RXF 393 | 53.2 |
| Renal ca. ACHN | 2.4 |
| Renal ca. UO-31 | 1.4 |
| Renal ca. TK-10 | 1.4 |
| Liver | 3.2 |
| Liver (fetal) | 1.4 |
| Liver ca. (hepatoblast) HepG2 | 100.0 |
| Lung | 6.3 |
| Lung (fetal) | 10.2 |
| Lung ca. (small cell) LX-1 | 2.8 |
| Lung ca. (small cell) NCI-H69 | 64.2 |
| Lung ca. (s. cell var.) SHP-77 | 5.9 |
| Lung ca. (large cell)NCI-H460 | 6.4 |
| Lung ca. (non-sm. cell) A549 | 3.3 |
| Lung ca. (non-s. cell) NCI-H23 | 21.6 |
| Lung ca. (non-s. cell) HOP-62 | 11.9 |
| Lung ca. (non-s. cl) NCI-H522 | 40.9 |
| Lung ca. (squam.) SW 900 | 1.7 |
| Lung ca. (squam.) NCI-H596 | 23.3 |
| Mammary gland | 6.9 |
| Breast ca.* (pl. ef) MCF-7 | 6.8 |
| Breast ca.* (pl. ef) MDA-MB-231 | 47.0 |
| Breast ca.* (pl. ef) T47D | 0.0 |
| Breast ca. BT-549 | 22.4 |
| Breast ca. MDA-N | 3.1 |
| Ovary | 0.6 |
| Ovarian ca. OVCAR-3 | 7.1 |
| Ovarian ca. OVCAR-4 | 9.5 |
| Ovarian ca. OVCAR-5 | 2.2 |
| Ovarian ca. OVCAR-8 | 20.6 |
| Ovarian ca. IGROV-1 | 0.0 |
| Ovarian ca.* (ascites) SK-OV-3 | 9.7 |
| Uterus | 6.1 |
| Placenta | 4.9 |
| Prostate | 21.2 |
| Prostate ca.* (bone met)PC-3 | 15.7 |
| Testis | 5.0 |
| Melanoma Hs688(A).T | 1.6 |
| Melanoma* (met) Hs688(B).T | 4.9 |
| Melanoma UACC-62 | 2.7 |
| Melanoma M14 | 3.2 |
| Melanoma LOX IMVI | 3.0 |
| Melanoma* (met) SK-MEL-5 | 1.3 |
| Adipose | 0.0 |

Column A - Rel. Exp. (%) Ag252, Run 165628866

[1358] TABLE AOF
Panel 2D

| Tissue Name | A |
|---|---|
| Normal Colon | 11.3 |
| CC Well to Mod Diff (ODO3866) | 11.0 |
| CC Margin (ODO3866) | 1.6 |
| CC Gr.2 rectosigmoid (ODO3868) | 9.7 |
| CC Margin (ODO3868) | 2.5 |
| CC Mod Diff (ODO3920) | 20.9 |
| CC Margin (ODO3920) | 3.0 |
| CC Gr.2 ascend colon (ODO3921) | 3.2 |
| CC Margin (ODO3921) | 1.8 |
| CC from Partial Hepatectomy (ODO4309) Mets | 18.7 |
| Liver Margin (ODO4309) | 2.3 |
| Colon mets to lung (OD04451-01) | 14.0 |
| Lung Margin (OD04451-02) | 17.1 |
| Normal Prostate 6546-1 | 20.6 |
| Prostate Cancer (OD04410) | 30.1 |
| Prostate Margin (OD04410) | 18.4 |
| Prostate Cancer (OD04720-01) | 36.9 |
| Prostate Margin (OD04720-02) | 24.0 |
| Normal Lung 061010 | 15.3 |
| Lung Met to Muscle (ODO4286) | 1.5 |
| Muscle Margin (ODO4286) | 11.1 |
| Lung Malignant Cancer (OD03126) | 23.5 |
| Lung Margin (OD03126) | 19.5 |
| Lung Cancer (OD04404) | 10.5 |
| Lung Margin (OD04404) | 53.2 |
| Lung Cancer (OD04565) | 12.9 |
| Lung Margin (OD04565) | 23.8 |
| Lung Cancer (OD04237-01) | 4.9 |
| Lung Margin (OD04237-02) | 32.5 |
| Ocular Mel Met to Liver (ODO4310) | 2.0 |
| Liver Margin (ODO4310) | 5.4 |
| Melanoma Mets to Lung (OD04321) | 0.7 |
| Lung Margin (OD04321) | 24.5 |
| Normal Kidney | 8.3 |
| Kidney Ca, Nuclear grade 2 (OD04338) | 22.5 |
| Kidney Margin (OD04338) | 4.1 |
| Kidney Ca Nuclear grade 1/2 (OD04339) | 10.9 |
| Kidney Margin (OD04339) | 6.5 |
| Kidney Ca, Clear cell type (OD04340) | 26.8 |
| Kidney Margin (OD04340) | 10.4 |
| Kidney Ca, Nuclear grade 3 (OD04348) | 3.7 |
| Kidney Margin (OD04348) | 6.0 |
| Kidney Cancer (OD04622-01) | 100.0 |
| Kidney Margin (OD04622-03) | 6.5 |
| Kidney Cancer (OD04450-01) | 4.5 |
| Kidney Margin (OD04450-03) | 7.4 |
| Kidney Cancer 8120607 | 3.5 |
| Kidney Margin 8120608 | 8.7 |
| Kidney Cancer 8120613 | 1.2 |
| Kidney Margin 8120614 | 6.1 |
| Kidney Cancer 9010320 | 12.5 |
| Kidney Margin 9010321 | 9.9 |
| Normal Uterus | 18.9 |
| Uterus Cancer 064011 | 15.6 |
| Normal Thyroid | 3.3 |
| Thyroid Cancer 064010 | 6.9 |
| Thyroid Cancer A302152 | 10.9 |
| Thyroid Margin A302153 | 5.7 |
| Normal Breast | 42.3 |
| Breast Cancer (OD04566) | 26.6 |
| Breast Cancer (OD04590-01) | 21.8 |
| Breast Cancer Mets (OD04590-03) | 36.3 |
| Breast Cancer Metastasis (OD04655-05) | 14.9 |
| Breast Cancer 064006 | 21.5 |
| Breast Cancer 1024 | 42.0 |
| Breast Cancer 9100266 | 11.0 |
| Breast Margin 9100265 | 10.8 |
| Breast Cancer A209073 | 14.9 |
| Breast Margin A209073 | 13.0 |
| Normal Liver | 6.4 |
| Liver Cancer 064003 | 0.0 |
| Liver Cancer 1025 | 1.1 |
| Liver Cancer 1026 | 19.6 |
| Liver Cancer 6004-T | 10.0 |
| Liver Tissue 6004-N | 6.0 |
| Liver Cancer 6005-T | 15.3 |
| Liver Tissue 6005-N | 3.3 |
| Normal Bladder | 19.2 |
| Bladder Cancer 1023 | 5.6 |
| Bladder Cancer A302173 | 3.4 |
| Bladder Cancer (OD04718-01) | 7.6 |
| Bladder Normal Adjacent (OD04718-03) | 9.3 |
| Normal Ovary | 2.4 |
| Ovarian Cancer 064008 | 11.8 |
| Ovarian Cancer (OD04768-07) | 2.9 |
| Ovary Margin (OD04768-08) | 31.4 |
| Normal Stomach | 5.6 |
| Gastric Cancer 9060358 | 0.0 |
| Stomach Margin 9060359 | 1.9 |
| Gastric Cancer 9060395 | 5.9 |
| Stomach Margin 9060394 | 2.4 |
| Gastric Cancer 9060397 | 18.6 |
| Stomach Margin 9060396 | 2.8 |
| Gastric Cancer 064005 | 1.5 |

Column A - Rel. Exp. (%) Ag252, Run 144791435

[1359] TABLE AOG
Panel 4D

| Tissue Name | A | B | C |
|---|---|---|---|
| Secondary Th1 act | 0.7 | 0.0 | 0.0 |
| Secondary Th2 act | 0.8 | 0.0 | 0.0 |
| Secondary Tr1 act | 0.5 | 0.0 | 4.0 |
| Secondary Th1 rest | 1.7 | 0.0 | 5.6 |
| Secondary Th2 rest | 14.0 | 10.0 | 15.2 |
| Secondary Tr1 rest | 6.2 | 0.0 | 5.7 |
| Primary Th1 act | 1.9 | 2.1 | 1.1 |
| Primary Th2 act | 2.1 | 2.3 | 9.9 |
| Primary Tr1 act | 0.2 | 0.6 | 4.5 |
| Primary Th1 rest | 16.3 | 10.0 | 15.7 |
| Primary Th2 rest | 7.4 | 9.1 | 21.9 |
| Primary Tr1 rest | 11.6 | 11.0 | 13.9 |
| CD45RA CD4 lymphocyte act | 13.7 | 9.4 | 16.6 |
| CD45RO CD4 lymphocyte act | 1.1 | 0.6 | 3.1 |
| CD8 lymphocyte act | 1.5 | 0.9 | 1.1 |
| Secondary CD8 lymphocyte rest | 4.0 | 3.3 | 5.0 |
| Secondary CD8 lymphocyte act | 0.0 | 0.0 | 0.0 |
| CD4 lymphocyte none | 19.8 | 18.6 | 30.8 |
| 2ry Th1/Th2/Tr1_anti-CD95 CH11 | 6.2 | 4.1 | 19.9 |
| LAK cells rest | 8.4 | 8.7 | 17.4 |
| LAK cells IL-2 | 1.6 | 6.2 | 5.8 |
| LAK cells IL-2 + IL-12 | 4.3 | 4.0 | 8.4 |
| LAK cells IL-2 + IFN gamma | 1.0 | 8.1 | 4.1 |
| LAK cells IL-2 + IL-18 | 1.3 | 8.3 | 1.3 |
| LAK cells PMA/ionomycin | 2.6 | 1.2 | 2.5 |
| NK Cells IL-2 rest | 1.2 | 4.8 | 6.8 |
| Two Way MLR 3 day | 8.1 | 13.5 | 3.7 |
| Two Way MLR 5 day | 1.3 | 5.0 | 1.4 |
| Two Way MLR 7 day | 1.0 | 2.0 | 2.6 |
| PBMC rest | 3.0 | 3.7 | 7.8 |
| PBMC PWM | 5.2 | 2.3 | 3.6 |
| PBMC PHA-L | 1.0 | 1.9 | 2.6 |
| Ramos (B cell) none | 0.0 | 0.0 | 0.0 |
| Ramos (B cell) ionomycin | 0.0 | 0.0 | 0.0 |
| B lymphocytes PWM | 1.1 | 1.4 | 1.4 |
| B lymphocytes CD40L and IL-4 | 2.1 | 3.7 | 8.1 |
| EOL-1 dbcAMP | 4.7 | 3.4 | 4.3 |
| EOL-1 dbcAMP PMA/ionomycin | 3.6 | 1.3 | 10.7 |
| Dendritic cells none | 1.7 | 1.9 | 3.3 |
| Dendritic cells LPS | 0.0 | 0.0 | 1.2 |
| Dendritic cells anti-CD40 | 1.6 | 0.6 | 1.8 |
| Monocytes rest | 5.0 | 4.8 | 6.3 |
| Monocytes LPS | 0.4 | 0.6 | 1.4 |
| Macrophages rest | 12.3 | 9.0 | 13.8 |
| Macrophages LPS | 0.5 | 0.6 | 0.0 |
| HUVEC none | 4.2 | 22.5 | 15.6 |
| HUVEC starved | 17.3 | 22.7 | 17.1 |
| HUVEC IL-1beta | 2.9 | 2.0 | 3.5 |
| HUVEC IFN gamma | 27.2 | 18.4 | 25.9 |
| HUVEC TNF alpha + IFN gamma | 8.5 | 9.9 | 2.0 |
| HUVEC TNF alpha + IL4 | 7.9 | 5.9 | 13.7 |
| HUVEC IL-11 | 15.6 | 15.9 | 17.8 |
| Lung Microvascular EC none | 27.7 | 25.7 | 23.8 |
| Lung Microvascular EC TNFalpha + | 24.0 | 22.5 | 19.1 |
| IL-1beta | | | |
| Microvascular Dermal EC none | 14.2 | 15.9 | 17.4 |
| Microsvasular Dermal EC TNFalpha + | 8.2 | 9.4 | 25.3 |
| IL-1beta | | | |
| Bronchial epithelium TNFalpha + | 4.0 | 2.2 | 1.3 |
| IL1beta | | | |
| Small airway epithelium none | 1.9 | 1.6 | 1.5 |
| Small airway epithelium TNFalpha + | 0.5 | 6.4 | 2.6 |
| IL-1beta | | | |
| Coronery artery SMC rest | 23.2 | 29.7 | 33.9 |
| Coronery artery SMC TNFalpha + | 33.4 | 19.5 | 13.5 |
| IL-1beta | | | |
| Astrocytes rest | 0.0 | 26.6 | 17.2 |
| Astrocytes TNFalpha + IL-1beta | 100.0 | 100.0 | 100.0 |
| KU-812 (Basophil) rest | 0.6 | 0.0 | 0.0 |
| KU-812 (Basophil) PMA/ionomycin | 0.0 | 0.5 | 0.0 |
| CCD1106 (Keratinocytes) none | 1.9 | 0.6 | 3.5 |
| CCD1106 (Keratinocytes) TNFalpha + | 0.5 | 2.1 | 3.8 |
| IL-1beta | | | |
| Liver cirrhosis | 9.1 | 12.2 | 13.0 |
| Lupus kidney | 3.0 | 2.6 | 3.8 |
| NCI-H292 none | 30.1 | 41.8 | 25.7 |
| NCI-H292 IL-4 | 16.8 | 35.1 | 16.5 |
| NCI-H292 IL-9 | 21.9 | 28.5 | 32.8 |
| NCI-H292 IL-13 | 37.6 | 28.1 | 33.7 |
| NCI-H292 IFN gamma | 20.3 | 23.5 | 22.5 |
| HPAEC none | 36.1 | 23.5 | 31.6 |
| HPAEC TNF alpha + IL-1 beta | 22.7 | 11.1 | 24.5 |
| Lung fibroblast none | 10.7 | 15.0 | 14.4 |
| Lung fibroblast TNF alpha + IL-1 beta | 1.9 | 2.6 | 1.2 |
| Lung fibroblast IL-4 | 11.0 | 9.7 | 7.7 |
| Lung fibroblast IL-9 | 11.3 | 9.3 | 13.2 |
| Lung fibroblast IL-13 | 7.3 | 4.5 | 17.4 |
| Lung fibroblast IFN gamma | 7.1 | 10.6 | 9.4 |
| Dermal fibroblast CCD1070 rest | 33.2 | 51.4 | 45.4 |
| Dermal fibroblast CCD1070 TNF | 24.0 | 31.9 | 21.3 |
| alpha | | | |
| Dermal fibroblast CCD1070 IL-1 | 34.6 | 34.4 | 46.3 |
| beta | | | |
| Dermal fibroblast IFN gamma | 30.6 | 27.0 | 32.3 |
| Dermal fibroblast IL-4 | 34.4 | 29.7 | 33.9 |
| IBD Colitis 2 | 1.7 | 1.4 | 3.0 |
| IBD Crohn's | 0.7 | 0.0 | 1.3 |
| Colon | 12.9 | 9.2 | 25.0 |
| Lung | 25.7 | 55.5 | 42.9 |
| Thymus | 12.2 | 18.0 | 18.3 |
| Kidney | 26.8 | 39.2 | 25.3 |

Column A - Rel. Exp. (%) Ag1513, Run 163478079
Column B - Rel. Exp. (%) Ag1937, Run 161702009
Column C - Rel. Exp. (%) Ag422, Run 138056654

[1360] Panel 1.3D Summary: Ag252 Highest levels of expression of this gene were seen in a liver cell line HepG2(CT=30.27). Based on expression in this panel, this gene is involved in brain, colon, renal, lung, ovarian and prostate cancer as well as melanomas. Thus, expression of this is useful as a diagnostic marker for the presence of these cancers. Therapeutic inhibition using antibodies, protein therapeutics or small molecule drugs are of use in the treatment of these cancers.

[1361] This gene product also showed low but significant levels of expression in pancreas, adrenal, thyroid, pituitary, adult and fetal heart, and adult and fetal liver. This gene or its protein product is important for the pathogenesis, diagnosis, and/or treatment of metabolic and endocrine diseases, including obesity and Types 1 and 2 diabetes. Furthermore, this gene was more highly expressed in fetal (CT=34) skeletal muscle when compared to expression in the adult (CT=40) and is useful for the differentiation of the fetal and adult sources of this tissue.

[1362] In addition, this gene was expressed at moderate levels in the CNS. This gene encodes a mouse epidermal growth factor homolog, and increases axonal or dendritic outgrowth and synaptogenesis. This gene is of use in the treatment of clinical conditions associated with neuron loss such as head or spinal cord trauma, stroke, or any neurodegenerative disease.

[1363] Panel 2D Summary: Ag252 This gene was expressed at low levels in all the samples on this panel, with highest expression in a kidney cancer sample (CT=31.1). Gastric, liver and colon cancers expressed this gene at a higher level than the normal adjacent tissue from these organs. There was increased expression in normal lung and ovarian tissue when compared to the adjacent tumor samples. These data show that the expression of this gene is associated with gastric, liver and colon cancer and thus, therapeutic modulation of this gene product is of use in the treatment of these cancers. Conversely, absence of expression is associated with ovarian and lung cancer and is of use as a diagnostic marker for the presence of these cancers. Therapeutic modulation of this gene is of use in the treatment of these cancers.

[1364] Panel 4D Summary: This transcript was expressed at low levels in T cells, fibroblasts, endothelium, smooth muscle cells and T cells regardless of treatment. The transcript was also expressed in normal colon, lung and thymus. However, TNFalpha and IL-1beta induce the expression of the transcript in astrocytes. The trancritpt encodes a Notch like protein which functions in astrocyte differentiation and activation. (Colombatti Glia 2001 September; 35(3):224-33). Therapeutic regulation of this transcript or the design of therapeutics with the encoded protein is important in the treatment of multiple scelrosis or other inflammtory diseases of the CNS.

[1365] AP. CG5659401: Claudin-19 Like

[1366] Expression of gene CG56594-01 was assessed using the primer-probe set Ag2957, described in Table APA. Results of the RTQ-PCR runs are shown in Tables APB, APC and APD.

TABLE APA
Probe Name Ag2957

| | | | | SEQ |
|---|---|---|---|---|
| | | | Start | ID |
| Primers | Sequences | Length | Position | No |
| Forward | 5′-caggcctctgcactttgac-3′ | 19 | 438 | 1489 |
| Probe | TET-5′-ctgtctcgtggtatgccaccctggt-3′- | 25 | 459 | 1490 |
| | TAMRA | | | |
| Reverse | 5′-ccaaattctgggttgaagaact-3′ | 22 | 492 | 1491 |

[1367] TABLE APB
General_screening_panel_v1.4

| Tissue Name | A |
|---|---|
| Adipose | 1.8 |
| Melanoma* Hs688(A).T | 0.0 |
| Melanoma* Hs688(B).T | 0.0 |
| Melanoma* M14 | 0.0 |
| Melanoma* LOXIMVI | 0.0 |
| Melanoma* SK-MEL-5 | 0.0 |
| Squamous cell carcinoma SCC-4 | 0.0 |
| Testis Pool | 0.0 |
| Prostate ca.* (bone met) PC-3 | 0.0 |
| Prostate Pool | 0.0 |
| Placenta | 41.5 |
| Uterus Pool | 0.0 |
| Ovarian ca. OVCAR-3 | 0.0 |
| Ovarian ca. SK-OV-3 | 2.7 |
| Ovarian ca. OVCAR-4 | 0.0 |
| Ovarian ca. OVCAR-5 | 0.0 |
| Ovarian ca. IGROV-1 | 0.0 |
| Ovarian ca. OVCAR-8 | 0.0 |
| Ovary | 0.0 |
| Breast ca. MCF-7 | 0.0 |
| Breast ca. MDA-MB-231 | 0.0 |
| Breast ca. BT 549 | 1.7 |
| Breast ca. T47D | 0.0 |
| Breast ca. MDA-N | 0.0 |
| Breast Pool | 0.0 |
| Trachea | 2.8 |
| Lung | 2.9 |
| Fetal Lung | 24.5 |
| Lung ca. NCI-N417 | 0.0 |
| Lung ca. LX-1 | 0.9 |
| Lung ca. NCI-H146 | 0.0 |
| Lung ca. SHP-77 | 0.0 |
| Lung ca. A549 | 0.0 |
| Lung ca. NCI-H526 | 6.0 |
| Lung ca. NCI-H23 | 0.0 |
| Lung ca. NCI-H460 | 0.0 |
| Lung ca. HOP-62 | 0.0 |
| Lung ca. NCI-H522 | 0.0 |
| Liver | 0.0 |
| Fetal Liver | 31.4 |
| Liver ca. HepG2 | 7.6 |
| Kidney Pool | 1.7 |
| Fetal Kidney | 100.0 |
| Renal ca. 786-0 | 0.0 |
| Renal ca. A498 | 0.0 |
| Renal ca. ACHN | 0.0 |
| Renal ca. UO-31 | 0.0 |
| Renal ca. TK-10 | 6.0 |
| Bladder | 0.0 |
| Gastric ca. (liver met.) NCI-N87 | 0.0 |
| Gastric ca. KATO III | 0.0 |
| Colon ca. SW-948 | 0.0 |
| Colon ca. SW480 | 0.0 |
| Colon ca.* (SW480 met) SW620 | 4.6 |
| Colon ca. HT29 | 0.0 |
| Colon ca. HCT-116 | 0.0 |
| Colon ca. CaCo-2 | 24.8 |
| Colon cancer tissue | 1.4 |
| Colon ca. SW1116 | 0.0 |
| Colon ca. Colo-205 | 0.0 |
| Colon ca. SW-48 | 0.0 |
| Colon Pool | 0.0 |
| Small Intestine Pool | 0.0 |
| Stomach Pool | 0.0 |
| Bone Marrow Pool | 0.0 |
| Fetal Heart | 0.0 |
| Heart Pool | 0.0 |
| Lymph Node Pool | 0.0 |
| Fetal Skeletal Muscle | 8.0 |
| Skeletal Muscle Pool | 0.0 |
| Spleen Pool | 0.0 |
| Thymus Pool | 3.0 |
| CNS cancer (glio/astro) U87-MG | 0.0 |
| CNS cancer (glio/astro) U-118-MG | 0.0 |
| CNS cancer (neuro; met) SK-N-AS | 0.0 |
| CNS cancer (astro) SF-539 | 0.0 |
| CNS cancer (astro) SNB-75 | 0.0 |
| CNS cancer (glio) SNB-19 | 0.0 |
| CNS cancer (glio) SF-295 | 0.0 |
| Brain (Amygdala) Pool | 0.0 |
| Brain (cerebellum) | 0.0 |
| Brain (fetal) | 1.7 |
| Brain (Hippocampus) Pool | 4.7 |
| Cerebral Cortex Pool | 0.0 |
| Brain (Substantia nigra) Pool | 0.0 |
| Brain (Thalamus) Pool | 0.0 |
| Brain (whole) | 0.0 |
| Spinal Cord Pool | 22.4 |
| Adrenal Gland | 0.0 |
| Pituitary gland Pool | 0.0 |
| Salivary Gland | 0.0 |
| Thyroid (female) | 0.0 |
| Pancreatic ca. CAPAN2 | 2.0 |
| Pancreas Pool | 0.0 |

Column A - Rel. Exp. (%) Ag2957, Run 216861284

[1368] TABLE APC
Panel 2D

| Tissue Name | A |
|---|---|
| Normal Colon | 0.0 |
| CC Well to Mod Diff (ODO3866) | 1.0 |
| CC Margin (ODO3866) | 0.0 |
| CC Gr.2 rectosigmoid (ODO3868) | 13.6 |
| CC Margin (ODO3868) | 1.9 |
| CC Mod Diff (ODO3920) | 0.0 |
| CC Margin (ODO3920) | 0.0 |
| CC Gr.2 ascend colon (ODO3921) | 0.0 |
| CC Margin (ODO3921) | 1.2 |
| CC from Partial Hepatectomy (ODO4309) | 0.0 |
| Mets | |
| Liver Margin (ODO4309) | 0.0 |
| Colon mets to lung (OD04451-01) | 0.0 |
| Lung Margin (OD04451-02) | 0.0 |
| Normal Prostate 6546-1 | 1.3 |
| Prostate Cancer (OD04410) | 0.0 |
| Prostate Margin (OD04410) | 2.6 |
| Prostate Cancer (OD04720-01) | 0.0 |
| Prostate Margin (OD04720-02) | 0.0 |
| Normal Lung 061010 | 0.0 |
| Lung Met to Muscle (ODO4286) | 0.0 |
| Muscle Margin (ODO4286) | 0.0 |
| Lung Malignant Cancer (OD03126) | 0.0 |
| Lung Margin (OD03126) | 0.0 |
| Lung Cancer (OD04404) | 0.0 |
| Lung Margin (OD04404) | 0.0 |
| Lung Cancer (OD04565) | 0.0 |
| Lung Margin (OD04565) | 0.0 |
| Lung Cancer (OD04237-01) | 0.0 |
| Lung Margin (OD04237-02) | 0.0 |
| Ocular Mel Met to Liver (ODO4310) | 0.0 |
| Liver Margin (ODO4310) | 1.4 |
| Melanoma Mets to Lung (OD04321) | 0.0 |
| Lung Margin (OD04321) | 0.0 |
| Normal Kidney | 85.3 |
| Kidney Ca, Nuclear grade 2 (OD04338) | 6.2 |
| Kidney Margin (OD04338) | 32.3 |
| Kidney Ca Nuclear grade 1/2 (OD04339) | 13.5 |
| Kidney Margin (OD04339) | 92.0 |
| Kidney Ca, Clear cell type (OD04340) | 9.7 |
| Kidney Margin (OD04340) | 87.7 |
| Kidney Ca, Nuclear grade 3 (OD04348) | 0.0 |
| Kidney Margin (OD04348) | 100.0 |
| Kidney Cancer (OD04622-01) | 0.0 |
| Kidney Margin (OD04622-03) | 50.3 |
| Kidney Cancer (OD04450-01) | 0.0 |
| Kidney Margin (OD04450-03) | 58.6 |
| Kidney Cancer 8120607 | 0.0 |
| Kidney Margin 8120608 | 68.8 |
| Kidney Cancer 8120613 | 0.0 |
| Kidney Margin 8120614 | 24.3 |
| Kidney Cancer 9010320 | 3.4 |
| Kidney Margin 9010321 | 85.9 |
| Normal Uterus | 0.0 |
| Uterus Cancer 064011 | 1.6 |
| Normal Thyroid | 0.0 |
| Thyroid Cancer 064010 | 0.0 |
| Thyroid Cancer A302152 | 0.0 |
| Thyroid Margin A302153 | 0.0 |
| Normal Breast | 3.3 |
| Breast Cancer (OD04566) | 0.0 |
| Breast Cancer (OD04590-01) | 3.0 |
| Breast Cancer Mets (OD04590-03) | 0.0 |
| Breast Cancer Metastasis (OD04655-05) | 0.0 |
| Breast Cancer 064006 | 0.0 |
| Breast Cancer 1024 | 9.5 |
| Breast Cancer 9100266 | 3.3 |
| Breast Margin 9100265 | 5.4 |
| Breast Cancer A209073 | 4.1 |
| Breast Margin A209073 | 4.9 |
| Normal Liver | 0.0 |
| Liver Cancer 064003 | 0.0 |
| Liver Cancer 1025 | 0.0 |
| Liver Cancer 1026 | 0.0 |
| Liver Cancer 6004-T | 0.0 |
| Liver Tissue 6004-N | 12.4 |
| Liver Cancer 6005-T | 5.7 |
| Liver Tissue 6005-N | 0.0 |
| Normal Bladder | 0.0 |
| Bladder Cancer 1023 | 0.0 |
| Bladder Cancer A302173 | 0.0 |
| Bladder Cancer (OD04718-01) | 0.0 |
| Bladder Normal Adjacent (OD04718-03) | 0.0 |
| Normal Ovary | 0.0 |
| Ovarian Cancer 064008 | 0.0 |
| Ovarian Cancer (OD04768-07) | 28.7 |
| Ovary Margin (OD04768-08) | 0.0 |
| Normal Stomach | 0.0 |
| Gastric Cancer 9060358 | 0.0 |
| Stomach Margin 9060359 | 0.0 |
| Gastric Cancer 9060395 | 0.0 |
| Stomach Margin 9060394 | 0.0 |
| Gastric Cancer 9060397 | 0.0 |
| Stomach Margin 9060396 | 0.0 |
| Gastric Cancer 064005 | 0.0 |

Column A - Rel. Exp. (%) Ag2957, Run 170858345

[1369] TABLE APD
Panel 4D

| Tissue Name | A |
|---|---|
| Secondary Th1 act | 0.0 |
| Secondary Th2 act | 0.8 |
| Secondary Tr1 act | 0.0 |
| Secondary Th1 rest | 0.0 |
| Secondary Th2 rest | 0.0 |
| Secondary Tr1 rest | 0.0 |
| Primary Th1 act | 0.0 |
| Primary Th2 act | 0.0 |
| Primary Tr1 act | 0.0 |
| Primary Th1 rest | 0.0 |
| Primary Th2 rest | 0.0 |
| Primary Tr1 rest | 0.0 |
| CD45RA CD4 lymphocyte act | 0.0 |
| CD45RO CD4 lymphocyte act | 0.0 |
| CD8 lymphocyte act | 0.0 |
| Secondary CD8 lymphocyte rest | 0.0 |
| Secondary CD8 lymphocyte act | 0.0 |
| CD4 lymphocyte none | 0.0 |
| 2ry Th1/Th2/Tr1_anti-CD95 CH11 | 0.0 |
| LAK cells rest | 0.0 |
| LAK cells IL-2 | 0.0 |
| LAK cells IL-2 + IL-12 | 0.0 |
| LAK cells IL-2 + IFN gamma | 0.0 |
| LAK cells IL-2 + IL-18 | 0.0 |
| LAK cells PMA/ionomycin | 0.0 |
| NK Cells IL-2 rest | 0.0 |
| Two Way MLR 3 day | 0.0 |
| Two Way MLR 5 day | 0.0 |
| Two Way MLR 7 day | 0.0 |
| PBMC rest | 0.0 |
| PBMC PWM | 0.0 |
| PBMC PHA-L | 0.0 |
| Ramos (B cell) none | 0.0 |
| Ramos (B cell) ionomycin | 0.0 |
| B lymphocytes PWM | 0.0 |
| B lymphocytes CD40L and IL-4 | 0.0 |
| EOL-1 dbcAMP | 0.0 |
| EOL-1 dbcAMP PMA/ionomycin | 0.0 |
| Dendritic cells none | 0.0 |
| Dendritic cells LPS | 0.0 |
| Dendritic cells anti-CD40 | 0.0 |
| Monocytes rest | 0.0 |
| Monocytes LPS | 0.0 |
| Macrophages rest | 0.0 |
| Macrophages LPS | 0.0 |
| HUVEC none | 0.0 |
| HUVEC starved | 0.0 |
| HUVEC IL-1beta | 0.0 |
| HUVEC IFN gamma | 0.0 |
| HUVEC TNF alpha + IFN gamma | 0.0 |
| HUVEC TNF alpha + IL4 | 0.0 |
| HUVEC IL-11 | 0.0 |
| Lung Microvascular EC none | 0.0 |
| Lung Microvascular EC TNFalpha + IL-1beta | 0.0 |
| Microvascular Dermal EC none | 0.0 |
| Microsvasular Dermal EC TNFalpha + IL-1beta | 0.0 |
| Bronchial epithelium TNFalpha + IL1beta | 0.0 |
| Small airway epithelium none | 0.0 |
| Small airway epithelium TNFalpha + IL-1beta | 0.0 |
| Coronery artery SMC rest | 0.0 |
| Coronery artery SMC TNFalpha + IL-1beta | 0.0 |
| Astrocytes rest | 0.0 |
| Astrocytes TNFalpha + IL-1beta | 0.0 |
| KU-812 (Basophil) rest | 0.0 |
| KU-812 (Basophil) PMA/ionomycin | 0.0 |
| CCD1106 (Keratinocytes) none | 0.0 |
| CCD1106 (Keratinocytes) TNFalpha + IL-1beta | 0.0 |
| Liver cirrhosis | 1.7 |
| Lupus kidney | 5.8 |
| NCI-H292 none | 0.0 |
| NCI-H292 IL-4 | 0.0 |
| NCI-H292 IL-9 | 0.0 |
| NCI-H292 IL-13 | 0.0 |
| NCI-H292 IFN gamma | 0.0 |
| HPAEC none | 0.0 |
| HPAEC TNF alpha + IL-1 beta | 0.0 |
| Lung fibroblast none | 0.0 |
| Lung fibroblast TNF alpha + IL-1 beta | 0.0 |
| Lung fibroblast IL-4 | 0.0 |
| Lung fibroblast IL-9 | 0.0 |
| Lung fibroblast IL-13 | 0.0 |
| Lung fibroblast IFN gamma | 0.0 |
| Dermal fibroblast CCD1070 rest | 0.0 |
| Dermal fibroblast CCD1070 TNF alpha | 0.0 |
| Dermal fibroblast CCD1070 IL-1 beta | 0.0 |
| Dermal fibroblast IFN gamma | 0.0 |
| Dermal fibroblast IL-4 | 0.0 |
| IBD Colitis 2 | 0.0 |
| IBD Crohn's | 0.0 |
| Colon | 2.3 |
| Lung | 0.0 |
| Thymus | 100.0 |
| Kidney | 7.6 |

Column A - Rel. Exp. (%) Ag2957, Run 164306319

[1370] General_screening_panel_v1.4 Summary: Ag2957 Expression of this gene was restricted to placenta, fetal kidney and liver. Thus, expression of this gene is useful as a marker to differentiate between these samples and other samples on this panel. This gene shows no or very low expression in the cancer cell lines used in this panel and absence of expression of this gene or its protein product is useful as a diagnostic marker for cancer. This gene encodes a putative claudin. Claudins are components of tight junction strands. This specific pattern of expression indicates that this gene product is involved in the formation of TJ strands in these tissues.

[1371] Panel 2D Summary: Ag2957 This gene was consistently expressed in the normal kidney samples (CTs=32-33) but not in the adjacent kidney tumors on this panel. Thus, absence of expression of this is useful as a diagnostic marker for kidney cancer. Therapeutic modulation of the function or expression of this gene is useful as a treatment for this cancer.

[1372] Panel 4D Summary: Ag2957 The expression of this transcript was restricted to the thymus (CT=32.1) but not in T cells. Expression of this transcript is useful as a marker for this tissue.

[1373] AQ. CG5665308: Ficolin 1 Precursor

[1374] Expression of gene CG56653-08 was assessed using the primer-probe sets Ag1446, Ag4934 and Ag5886, described in Tables AQA, AQB and AQC. Results of the RTQ-PCR runs are shown in Tables AQD, AQE and AQF.

TABLE AQA
Probe Name Ag1446

| | | | | SEQ |
|---|---|---|---|---|
| | | | Start | ID |
| Primers | Sequences | Length | Position | No |
| Forward | 5′-cgctgtcctgctagtcttgtt-3′ | 21 | 37 | 1492 |
| Probe | TET-5′-atatcaagaacctgcctgcccaggct-3′- | 26 | 63 | 1493 |
| | TAMRA | | | |
| Reverse | 5′-ccttcacctctggacatgtg-3′ | 20 | 94 | 1494 |

[1375] TABLE AQB
Probe Name Ag4934

| | | | | SEQ |
|---|---|---|---|---|
| | | | Start | ID |
| Primers | Sequences | Length | Position | No |
| Forward | 5′-cgctgtcctgctagtcttgtt-3′ | 21 | 37 | 1495 |
| Probe | TET-5′-atatcaagaacctgcctgcccaggct-3′- | 26 | 63 | 1496 |
| | TAMRA | | | |
| Reverse | 5′-ccttcacctctggacatgtg-3′ | 20 | 94 | 1497 |

[1376] TABLE AQC
3Probe Name Ag5886

| | | | | SEQ |
|---|---|---|---|---|
| | | | Start | ID |
| Primers | Sequences | Length | Position | No |
| Forward | 5′-tggcccgttagagaattacc-3′ | 20 | 734 | 1498 |
| Probe | TET-5′-acaaaggctcccagtaccagcttgta-3′- | 26 | 695 | 1499 |
| | TAMRA | | | |
| Reverse | 5′-caaatcattcaaggtggctg-3′ | 20 | 661 | 1500 |

[1377] TABLE AQD
AI_comprehensive panel_v1.0

| Tissue Name | A | B | C |
|---|---|---|---|
| 110967 COPD-F | 3.3 | 1.4 | 0.0 |
| 110980 COPD-F | 4.8 | 1.0 | 1.8 |
| 110968 COPD-M | 3.5 | 0.5 | 1.9 |
| 110977 COPD-M | 14.9 | 6.3 | 5.4 |
| 110989 Emphysema-F | 7.4 | 2.8 | 4.4 |
| 110992 Emphysema-F | 3.6 | 2.2 | 0.2 |
| 110993 Emphysema-F | 6.0 | 1.9 | 0.4 |
| 110994 Emphysema-F | 3.3 | 1.6 | 0.2 |
| 110995 Emphysema-F | 4.3 | 2.1 | 3.3 |
| 110996 Emphysema-F | 1.6 | 1.2 | 0.7 |
| 110997 Asthma-M | 7.6 | 2.6 | 0.6 |
| 111001 Asthma-F | 15.6 | 8.3 | 9.0 |
| 111002 Asthma-F | 20.3 | 6.7 | 6.4 |
| 111003 Atopic Asthma-F | 10.7 | 3.7 | 2.6 |
| 111004 Atopic Asthma-F | 7.2 | 0.0 | 1.7 |
| 111005 Atopic Asthma-F | 3.7 | 1.0 | 1.8 |
| 111006 Atopic Asthma-F | 0.0 | 0.0 | 0.3 |
| 111417 Allergy-M | 4.1 | 1.7 | 1.5 |
| 112347 Allergy-M | 0.4 | 0.0 | 0.2 |
| 112349 Normal Lung-F | 0.5 | 0.0 | 0.1 |
| 112357 Normal Lung-F | 6.7 | 2.8 | 2.2 |
| 112354 Normal Lung-M | 0.5 | 0.4 | 0.6 |
| 112374 Crohns-F | 2.7 | 0.0 | 0.4 |
| 112389 Match Control Crohns-F | 3.5 | 1.7 | 2.4 |
| 112375 Crohns-F | 0.0 | 0.2 | 1.3 |
| 112732 Match Control Crohns-F | 10.2 | 2.8 | 3.2 |
| 112725 Crohns-M | 11.0 | 2.4 | 2.3 |
| 112387 Match Control Crohns-M | 4.9 | 2.3 | 2.7 |
| 112378 Crohns-M | 0.0 | 0.3 | 0.2 |
| 112390 Match Control Crohns-M | 0.8 | 0.3 | 0.6 |
| 112726 Crohns-M | 5.1 | 2.2 | 2.1 |
| 112731 Match Control Crohns-M | 3.1 | 3.3 | 2.1 |
| 112380 Ulcer Col-F | 1.8 | 0.5 | 0.3 |
| 112734 Match Control Ulcer Col-F | 40.6 | 19.1 | 9.7 |
| 112384 Ulcer Col-F | 10.7 | 3.8 | 4.8 |
| 112737 Match Control Ulcer Col-F | 2.0 | 1.5 | 2.0 |
| 112386 Ulcer Col-F | 4.0 | 2.5 | 4.2 |
| 112738 Match Control Ulcer Col-F | 54.3 | 12.0 | 7.7 |
| 112381 Ulcer Col-M | 0.0 | 0.0 | 0.9 |
| 112735 Match Control Ulcer Col-M | 3.4 | 1.8 | 4.3 |
| 112382 Ulcer Col-M | 4.9 | 1.0 | 1.8 |
| 112394 Match Control Ulcer Col-M | 3.7 | 1.4 | 1.9 |
| 112383 Ulcer Col-M | 11.2 | 3.0 | 3.3 |
| 112736 Match Control Ulcer Col-M | 4.6 | 0.5 | 0.7 |
| 112423 Psoriasis-F | 23.3 | 11.7 | 12.9 |
| 112427 Match Control Psoriasis-F | 11.0 | 2.1 | 4.1 |
| 112418 Psoriasis-M | 2.9 | 1.1 | 2.6 |
| 112723 Match Control Psoriasis-M | 0.9 | 0.4 | 0.2 |
| 112419 Psoriasis-M | 5.5 | 2.6 | 3.9 |
| 112424 Match Control Psoriasis-M | 1.8 | 0.9 | 1.5 |
| 112420 Psoriasis-M | 10.2 | 3.3 | 9.2 |
| 112425 Match Control Psoriasis-M | 5.6 | 1.8 | 2.6 |
| 104689 (MF) OA Bone-Backus | 62.0 | 20.3 | 19.9 |
| 104690 (MF) Adj “Normal” | 23.7 | 6.0 | 8.7 |
| Bone-Backus | | | |
| 104691 (MF) OA Synovium-Backus | 10.2 | 5.2 | 3.6 |
| 104692 (BA) OA Cartilage-Backus | 0.8 | 0.0 | 0.3 |
| 104694 (BA) OA Bone-Backus | 49.0 | 16.0 | 11.3 |
| 104695 (BA) Adj “Normal” | 19.9 | 7.9 | 5.1 |
| Bone-Backus | | | |
| 104696 (BA) OA Synovium-Backus | 16.3 | 5.2 | 5.1 |
| 104700 (SS) OA Bone-Backus | 100.0 | 100.0 | 100.0 |
| 104701 (SS) Adj “Normal” | 29.7 | 7.0 | 8.7 |
| Bone-Backus | | | |
| 104702 (SS) OA Synovium-Backus | 27.7 | 9.3 | 11.0 |
| 117093 OA Cartilage Rep7 | 3.3 | 0.0 | 0.8 |
| 112672 OA Bone5 | 23.3 | 5.1 | 10.2 |
| 112673 OA Synovium5 | 7.1 | 2.6 | 2.9 |
| 112674 OA Synovial Fluid cells5 | 9.1 | 3.7 | 4.3 |
| 117100 OA Cartilage Rep14 | 2.4 | 1.3 | 1.5 |
| 112756 OA Bone9 | 3.9 | 0.7 | 0.7 |
| 112757 OA Synovium9 | 2.3 | 2.7 | 0.9 |
| 112758 OA Synovial Fluid Cells9 | 14.3 | 3.6 | 7.3 |
| 117125 RA Cartilage Rep2 | 3.6 | 1.0 | 1.6 |
| 113492 Bone2 RA | 45.4 | 11.2 | 28.7 |
| 113493 Synovium2 RA | 13.9 | 3.5 | 11.8 |
| 113494 Syn Fluid Cells RA | 29.7 | 10.7 | 16.6 |
| 113499 Cartilage4 RA | 14.9 | 6.8 | 10.7 |
| 113500 Bone4 RA | 16.0 | 5.4 | 11.8 |
| 113501 Synovium4 RA | 11.7 | 5.2 | 13.3 |
| 113502 Syn Fluid Cells4 RA | 7.7 | 4.2 | 6.6 |
| 113495 Cartilage3 RA | 26.6 | 12.5 | 16.5 |
| 113496 Bone3 RA | 34.6 | 8.5 | 16.3 |
| 113497 Synovium3 RA | 15.4 | 6.4 | 9.0 |
| 113498 Syn Fluid Cells3 RA | 33.7 | 12.8 | 23.3 |
| 117106 Normal Cartilage Rep20 | 0.5 | 0.6 | 0.9 |
| 113663 Bone3 Normal | 0.0 | 0.3 | 0.2 |
| 113664 Synovium3 Normal | 0.0 | 0.0 | 0.0 |
| 113665 Syn Fluid Cells3 Normal | 0.8 | 0.0 | 0.0 |
| 117107 Normal Cartilage Rep22 | 2.4 | 1.4 | 2.1 |
| 113667 Bone4 Normal | 0.8 | 0.5 | 0.7 |
| 113668 Synovium4 Normal | 0.6 | 0.9 | 0.2 |
| 113669 Syn Fluid Cells4 Normal | 2.4 | 0.4 | 1.0 |

Column A - Rel. Exp. (%) Ag1446, Run 211195015
Column B - Rel. Exp. (%) Ag1446, Run 212650184
Column C - Rel. Exp. (%) Ag5886, Run 256261777

[1378] TABLE AQE
General_screening_panel_v1.5

| Tissue Name | A | B |
|---|---|---|
| Adipose | 48.6 | 48.6 |
| Melanoma* Hs688(A).T | 0.0 | 0.0 |
| Melanoma* Hs688(B).T | 0.0 | 0.0 |
| Melanoma* M14 | 0.0 | 0.0 |
| Melanoma* LOXIMVI | 0.0 | 0.0 |
| Melanoma* SK-MEL-5 | 4.8 | 0.0 |
| Squamous cell carcinoma SCC-4 | 0.0 | 0.0 |
| Testis Pool | 1.4 | 1.3 |
| Prostate ca.* (bone met) PC-3 | 0.0 | 0.0 |
| Prostate Pool | 9.3 | 5.6 |
| Placenta | 26.8 | 15.1 |
| Uterus Pool | 12.4 | 4.9 |
| Ovarian ca. OVCAR-3 | 0.0 | 0.0 |
| Ovarian ca. SK-OV-3 | 0.0 | 0.0 |
| Ovarian ca. OVCAR-4 | 0.0 | 0.0 |
| Ovarian ca. OVCAR-5 | 0.0 | 0.0 |
| Ovarian ca. IGROV-1 | 0.0 | 0.0 |
| Ovarian ca. OVCAR-8 | 0.0 | 0.0 |
| Ovary | 4.6 | 6.3 |
| Breast ca. MCF-7 | 0.0 | 0.0 |
| Breast ca. MDA-MB-231 | 0.0 | 0.0 |
| Breast ca. BT 549 | 0.0 | 0.0 |
| Breast ca. T47D | 0.0 | 0.0 |
| Breast ca. MDA-N | 0.0 | 0.0 |
| Breast Pool | 25.3 | 15.9 |
| Trachea | 24.3 | 10.7 |
| Lung | 0.7 | 0.7 |
| Fetal Lung | 100.0 | 100.0 |
| Lung ca. NCI-N417 | 0.0 | 0.0 |
| Lung ca. LX-1 | 0.0 | 0.0 |
| Lung ca. NCI-H146 | 0.0 | 0.0 |
| Lung ca. SHP-77 | 0.0 | 0.0 |
| Lung ca. A549 | 0.0 | 0.0 |
| Lung ca. NCI-H526 | 0.0 | 0.0 |
| Lung ca. NCI-H23 | 0.0 | 0.0 |
| Lung ca. NCI-H460 | 0.0 | 0.0 |
| Lung ca. HOP-62 | 0.0 | 0.0 |
| Lung ca. NCI-H522 | 0.0 | 0.0 |
| Liver | 2.2 | 3.3 |
| Fetal Liver | 28.5 | 12.6 |
| Liver ca. HepG2 | 0.0 | 0.0 |
| Kidney Pool | 18.6 | 7.9 |
| Fetal Kidney | 7.5 | 9.5 |
| Renal ca. 786-0 | 0.0 | 0.0 |
| Renal ca. A498 | 0.0 | 0.0 |
| Renal ca. ACHN | 0.0 | 0.0 |
| Renal ca. UO-31 | 0.0 | 0.0 |
| Renal ca. TK-10 | 0.0 | 0.0 |
| Bladder | 6.4 | 4.0 |
| Gastric ca. (liver met.) NCI-N87 | 0.0 | 0.0 |
| Gastric ca. KATO III | 0.0 | 0.0 |
| Colon ca. SW-948 | 0.0 | 0.0 |
| Colon ca. SW480 | 0.0 | 0.0 |
| Colon ca.* (SW480 met) SW620 | 0.0 | 0.0 |
| Colon ca. HT29 | 0.0 | 0.0 |
| Colon ca. HCT-116 | 0.0 | 0.0 |
| Colon ca. CaCo-2 | 0.0 | 0.0 |
| Colon cancer tissue | 35.6 | 14.9 |
| Colon ca. SW1116 | 0.0 | 0.0 |
| Colon ca. Colo-205 | 0.0 | 0.0 |
| Colon ca. SW-48 | 0.0 | 0.0 |
| Colon Pool | 68.8 | 34.4 |
| Small Intestine Pool | 9.4 | 3.8 |
| Stomach Pool | 7.5 | 4.8 |
| Bone Marrow Pool | 8.5 | 8.4 |
| Fetal Heart | 5.4 | 13.2 |
| Heart Pool | 9.9 | 3.4 |
| Lymph Node Pool | 8.9 | 9.5 |
| Fetal Skeletal Muscle | 7.2 | 12.6 |
| Skeletal Muscle Pool | 17.4 | 5.2 |
| Spleen Pool | 84.7 | 60.7 |
| Thymus Pool | 16.8 | 6.0 |
| CNS cancer (glio/astro) U87-MG | 0.0 | 0.0 |
| CNS cancer (glio/astro) U-118-MG | 0.0 | 0.0 |
| CNS cancer (neuro; met) SK-N-AS | 0.0 | 0.0 |
| CNS cancer (astro) SF-539 | 0.0 | 0.0 |
| CNS cancer (astro) SNB-75 | 0.0 | 0.0 |
| CNS cancer (glio) SNB-19 | 0.0 | 0.0 |
| CNS cancer (glio) SF-295 | 0.0 | 0.1 |
| Brain (Amygdala) Pool | 1.8 | 0.2 |
| Brain (cerebellum) | 1.4 | 1.1 |
| Brain (fetal) | 3.6 | 1.1 |
| Brain (Hippocampus) Pool | 2.0 | 0.8 |
| Cerebral Cortex Pool | 1.9 | 0.5 |
| Brain (Substantia nigra) Pool | 1.7 | 0.9 |
| Brain (Thalamus) Pool | 1.4 | 0.9 |
| Brain (whole) | 3.7 | 2.7 |
| Spinal Cord Pool | 3.1 | 0.6 |
| Adrenal Gland | 6.0 | 4.1 |
| Pituitary gland Pool | 0.7 | 0.7 |
| Salivary Gland | 5.9 | 2.7 |
| Thyroid (female) | 15.0 | 5.5 |
| Pancreatic ca. CAPAN2 | 0.0 | 0.0 |
| Pancreas Pool | 27.9 | 9.7 |

Column A - Rel. Exp. (%) Ag4934, Run 228843453
Column B - Rel. Exp. (%) Ag5886, Run 247756990

[1379] TABLE AQF
Panel 4.1D

| Tissue Name | A | B |
|---|---|---|
| Secondary Th1 act | 0.0 | 0.0 |
| Secondary Th2 act | 0.0 | 0.0 |
| Secondary Tr1 act | 0.0 | 0.0 |
| Secondary Th1 rest | 0.0 | 0.0 |
| Secondary Th2 rest | 0.0 | 0.0 |
| Secondary Tr1 rest | 0.0 | 0.0 |
| Primary Th1 act | 0.0 | 0.0 |
| Primary Th2 act | 0.0 | 0.0 |
| Primary Tr1 act | 0.0 | 0.0 |
| Primary Th1 rest | 0.0 | 0.0 |
| Primary Th2 rest | 0.0 | 0.0 |
| Primary Tr1 rest | 0.0 | 0.0 |
| CD45RA CD4 lymphocyte act | 0.0 | 0.0 |
| CD45RO CD4 lymphocyte act | 0.0 | 0.0 |
| CD8 lymphocyte act | 0.0 | 0.0 |
| Secondary CD8 lymphocyte rest | 0.0 | 0.0 |
| Secondary CD8 lymphocyte act | 0.0 | 0.0 |
| CD4 lymphocyte none | 0.5 | 0.3 |
| 2ry Th1/Th2/Tr1_anti-CD95 CH11 | 0.0 | 0.0 |
| LAK cells rest | 6.9 | 21.5 |
| LAK cells IL-2 | 0.0 | 0.0 |
| LAK cells IL-2 + IL-12 | 0.0 | 0.0 |
| LAK cells IL-2 + IFN gamma | 0.0 | 0.0 |
| LAK cells IL-2 + IL-18 | 0.0 | 0.0 |
| LAK cells PMA/ionomycin | 8.2 | 66.0 |
| NK Cells IL-2 rest | 0.0 | 0.0 |
| Two Way MLR 3 day | 1.0 | 1.7 |
| Two Way MLR 5 day | 0.1 | 0.0 |
| Two Way MLR 7 day | 0.0 | 0.0 |
| PBMC rest | 19.2 | 24.0 |
| PBMC PWM | 0.0 | 0.0 |
| PBMC PHA-L | 0.0 | 0.0 |
| Ramos (B cell) none | 0.0 | 0.0 |
| Ramos (B cell) ionomycin | 0.0 | 0.0 |
| B lymphocytes PWM | 0.0 | 0.0 |
| B lymphocytes CD40L and IL-4 | 0.0 | 0.1 |
| EOL-1 dbcAMP | 3.5 | 14.9 |
| EOL-1 dbcAMP PMA/ionomycin | 0.5 | 0.2 |
| Dendritic cells none | 1.0 | 4.5 |
| Dendritic cells LPS | 0.1 | 0.0 |
| Dendritic cells anti-CD40 | 0.6 | 0.1 |
| Monocytes rest | 100.0 | 100.0 |
| Monocytes LPS | 4.8 | 15.6 |
| Macrophages rest | 4.1 | 5.0 |
| Macrophages LPS | 1.8 | 2.3 |
| HUVEC none | 0.0 | 0.0 |
| HUVEC starved | 0.0 | 0.0 |
| HUVEC IL-1beta | 0.0 | 0.0 |
| HUVEC IFN gamma | 0.0 | 0.0 |
| HUVEC TNF alpha + IFN gamma | 0.0 | 0.0 |
| HUVEC TNF alpha + IL4 | 0.0 | 0.0 |
| HUVEC IL-11 | 0.0 | 0.0 |
| Lung Microvascular EC none | 0.0 | 0.0 |
| Lung Microvascular EC TNFalpha + IL-1beta | 0.0 | 0.0 |
| Microvascular Dermal EC none | 0.0 | 0.0 |
| Microsvasular Dermal EC TNFalpha + IL-1beta | 0.0 | 0.0 |
| Bronchial epithelium TNFalpha + IL1beta | 0.0 | 0.0 |
| Small airway epithelium none | 0.0 | 0.0 |
| Small airway epithelium TNFalpha + IL-1beta | 0.0 | 0.0 |
| Coronery artery SMC rest | 0.0 | 0.0 |
| Coronery artery SMC TNFalpha + IL-1beta | 0.0 | 0.0 |
| Astrocytes rest | 0.0 | 0.0 |
| Astrocytes TNFalpha + IL-1beta | 0.0 | 0.0 |
| KU-812 (Basophil) rest | 0.0 | 0.0 |
| KU-812 (Basophil) PMA/ionomycin | 0.0 | 0.0 |
| CCD1106 (Keratinocytes) none | 0.0 | 0.0 |
| CCD1106 (Keratinocytes) TNFalpha + IL-1beta | 0.0 | 0.0 |
| Liver cirrhosis | 0.2 | 0.8 |
| NCI-H292 none | 0.0 | 0.0 |
| NCI-H292 IL-4 | 0.0 | 0.0 |
| NCI-H292 IL-9 | 0.0 | 0.0 |
| NCI-H292 IL-13 | 0.0 | 0.0 |
| NCI-H292 IFN gamma | 0.0 | 0.0 |
| HPAEC none | 0.0 | 0.0 |
| HPAEC TNF alpha + IL-1 beta | 0.0 | 0.0 |
| Lung fibroblast none | 0.0 | 0.0 |
| Lung fibroblast TNF alpha + IL-1 beta | 0.0 | 0.0 |
| Lung fibroblast IL-4 | 0.0 | 0.0 |
| Lung fibroblast IL-9 | 0.0 | 0.0 |
| Lung fibroblast IL-13 | 0.0 | 0.0 |
| Lung fibroblast IFN gamma | 0.0 | 0.0 |
| Dermal fibroblast CCD1070 rest | 0.0 | 0.0 |
| Dermal fibroblast CCD1070 TNF alpha | 0.0 | 0.0 |
| Dermal fibroblast CCD1070 IL-1 beta | 0.1 | 0.0 |
| Dermal fibroblast IFN gamma | 0.1 | 0.0 |
| Dermal fibroblast IL-4 | 0.3 | 0.0 |
| Dermal Fibroblasts rest | 0.1 | 0.0 |
| Neutrophils TNFa + LPS | 1.8 | 14.0 |
| Neutrophils rest | 3.8 | 47.3 |
| Colon | 0.0 | 0.0 |
| Lung | 0.3 | 0.2 |
| Thymus | 0.2 | 0.1 |
| Kidney | 0.1 | 0.2 |

Column A - Rel. Exp. (%) Ag4934, Run 223597255
Column B - Rel. Exp. (%) Ag5886, Run 256523048

[1380] AI_comprehensive panel_v1.0 Summary: Ag1446/Ag5886 Highest expression of this gene was seen in a bone sample from an OA patient (CTs=27-30.4). Moderate to high expression of this gene wass mainly seen in bone, synovium, synovial fluid and cartilage of OA and RA patients. Expression of this gene was low to undetectable in normal bone. Moderate to low expression was also found in colon, asthma, atopic asthma, emphysema, COPD and psoriasis samples. Ficolins are multimeric lectins that are capable of binding to bacteria and extracellular matrix proteins [Ohashi T. J Biol Chem 1997 May 30;272(22):14220-6]. Ficolin has been reported to function as a monocyte cell surface molecule that is important for binding to bacteria, elastin and for monocyte adhesion [Lu J, Immunobiology 1998 August;199(2):190-9]. This expression proves that ficolin is useful in alleviating inflammation in joints and other sites of inflammation. This gene functions as a protein therapeutic to reduce inflammation in osteoarthritis and rheumatoid arthritis. Ficolin also a role in the inflammation of joints in patients suffering from osteoarthritis (OA) and/or rheumatoid arthritis (RA). Antibodies against proteins encoded by this gene are useful for the prevention of tissue destruction mediated by ficolin activity during osteoarthritis and arthritis.

[1381] General_screening_panel_v1.5 Summary: Ag4934/Ag5886 Highest expression of this gene was detected in the fetal lung (CTs=27-31.5). Expression of this gene was also higher in fetal lung and fetal liver (CTs=27-33) than in their adult counterparts (CTs=32-38). Expression of this gene is useful as a marker to distinguish fetal from adult lung and liver. The relative overexpression of this gene in fetal tissue shows that the protein product enhances lung and liver growth or development in the fetus and also acts in a regenerative capacity in the adult. Therapeutic modulation of the protein encoded by this gene is useful in treatment of liver related diseases. Low but significant levels of expression was detected in tissues with metabolic/endocrine functions including adipose, heart, skeletal muscle, thyroid, pancreas and gastrointestinal tracts. Modulation of this gene or gene product is a treatment for metabolic or endocrine disease including obesity and Types 1 and 2 diabetes.

[1382] Low expression of this gene was also seen in some regions of central nervous system including whole and fetal brain, cerebellum, hipocampus, substantia nigra, thalamus and spinal cord. Therapeutic modulation of this gene or gene product is useful in the treatment of central nervous system disorders such as Alzheimer's disease, Parkinson's disease, epilepsy, multiple sclerosis, schizophrenia and depression.

[1383] Panel 4.1D Summary: Ag4934/Ag5886 This gene was highly and selectively expressed in resting monocytes and to a lesser extent in macrophages and granulocytes (neutrophils and EOL cell line). This gene encodes a putative ficolin 1 precursor. Ficolin functions as a monocyte cell surface molecule that is important for binding to bacteria, elastin and monocyte adhesion. Protein therapeutics, antibodies, or small molecules designed with the protein encoded by this transcript are useful as opsinins to target and eliminate bacteria by complement-mediated destruction. These proteins are also important for the treatment of bacterial septicemia. In addition, ficolins may have the ability to bind to elastins. Elastins are functionally important for lung alveolar development and inactivation of these proteins can lead to emphysema-like disease. Therefore, antibodies, small molecules or protein therapeutics that target this gene or its protein product are useful for the prevention of tissue destruction mediated by ficolin activity during emphysema, asthma and arthritis.

[1384] AR. CG56806-01: Heparan Sulfate 6-Sulfotransferase 3 Like Gene

[1385] Expression of gene CG56806-01 was assessed using the primer-probe set Ag3024, described in Table ARA. Results of the RTQ-PCR runs are shown in Tables ARB, ARC, ARD, ARE and ARF.

TABLE ARA
Probe Name Ag3024

| | | | | SEQ |
|---|---|---|---|---|
| | | | Start | ID |
| Primers | Sequences | Length | Position | No |
| Forward | 5′-ggtgggctgctataacttgact-3′ | 22 | 1033 | 1501 |
| Probe | TET-5′-tgaaagaaacaccatcctgttgcaga-3′- | 26 | 1069 | 1502 |
| | TAMRA | | | |
| Reverse | 5′-tgttcttcaggttgttctttgc-3′ | 22 | 1097 | 1503 |

[1386] TABLE ARB
AI_comprehensive panel_v1.0

| Tissue Name | A |
|---|---|
| 110967 COPD-F | 10.6 |
| 110980 COPD-F | 9.5 |
| 110968 COPD-M | 10.8 |
| 110977 COPD-M | 16.7 |
| 110989 Emphysema-F | 44.8 |
| 110992 Emphysema-F | 3.8 |
| 110993 Emphysema-F | 2.6 |
| 110994 Emphysema-F | 1.0 |
| 110995 Emphysema-F | 9.0 |
| 110996 Emphysema-F | 1.3 |
| 110997 Asthma-M | 1.0 |
| 111001 Asthma-F | 33.4 |
| 111002 Asthma-F | 37.9 |
| 111003 Atopic Asthma-F | 41.5 |
| 111004 Atopic Asthma-F | 21.2 |
| 111005 Atopic Asthma-F | 39.0 |
| 111006 Atopic Asthma-F | 8.5 |
| 111417 Allergy-M | 26.6 |
| 112347 Allergy-M | 8.6 |
| 112349 Normal Lung-F | 9.2 |
| 112357 Normal Lung-F | 0.6 |
| 112354 Normal Lung-M | 1.3 |
| 112374 Crohns-F | 4.0 |
| 112389 Match Control Crohns-F | 1.3 |
| 112375 Crohns-F | 4.5 |
| 112732 Match Control Crohns-F | 0.0 |
| 112725 Crohns-M | 9.9 |
| 112387 Match Control Crohns-M | 15.3 |
| 112378 Crohns-M | 9.7 |
| 112390 Match Control Crohns-M | 23.7 |
| 112726 Crohns-M | 2.9 |
| 112731 Match Control Crohns-M | 1.4 |
| 112380 Ulcer Col-F | 8.7 |
| 112734 Match Control Ulcer Col-F | 0.7 |
| 112384 Ulcer Col-F | 25.3 |
| 112737 Match Control Ulcer Col-F | 3.0 |
| 112386 Ulcer Col-F | 3.3 |
| 112738 Match Control Ulcer Col-F | 0.6 |
| 112381 Ulcer Col-M | 1.8 |
| 112735 Match Control Ulcer Col-M | 32.8 |
| 112382 Ulcer Col-M | 1.5 |
| 112394 Match Control Ulcer Col-M | 1.8 |
| 112383 Ulcer Col-M | 6.3 |
| 112736 Match Control Ulcer Col-M | 1.1 |
| 112423 Psoriasis-F | 12.7 |
| 112427 Match Control Psoriasis-F | 37.1 |
| 112418 Psoriasis-M | 6.1 |
| 112723 Match Control Psoriasis-M | 0.0 |
| 112419 Psoriasis-M | 16.6 |
| 112424 Match Control Psoriasis-M | 17.8 |
| 112420 Psoriasis-M | 100.0 |
| 112425 Match Control Psoriasis-M | 26.2 |
| 104689 (MF) OA Bone-Backus | 0.0 |
| 104690 (MF) Adj “Normal” Bone-Backus | 0.4 |
| 104691 (MF) OA Synovium-Backus | 3.0 |
| 104692 (BA) OA Cartilage-Backus | 1.0 |
| 104694 (BA) OA Bone-Backus | 0.0 |
| 104695 (BA) Adj “Normal” Bone-Backus | 0.6 |
| 104696 (BA) OA Synovium-Backus | 0.5 |
| 104700 (SS) OA Bone-Backus | 0.2 |
| 104701 (SS) Adj “Normal” Bone-Backus | 0.3 |
| 104702 (SS) OA Synovium-Backus | 4.5 |
| 117093 OA Cartilage Rep7 | 42.0 |
| 112672 OA Bone5 | 18.4 |
| 112673 OA Synovium5 | 8.0 |
| 112674 OA Synovial Fluid cells5 | 2.4 |
| 117100 OA Cartilage Rep14 | 5.5 |
| 112756 OA Bone9 | 3.5 |
| 112757 OA Synovium9 | 2.1 |
| 112758 OA Synovial Fluid Cells9 | 11.9 |
| 117125 RA Cartilage Rep2 | 2.5 |
| 113492 Bone2 RA | 1.7 |
| 113493 Synovium2 RA | 0.0 |
| 113494 Syn Fluid Cells RA | 1.6 |
| 113499 Cartilage4 RA | 0.4 |
| 113500 Bone4 RA | 1.3 |
| 113501 Synovium4 RA | 0.0 |
| 113502 Syn Fluid Cells4 RA | 0.2 |
| 113495 Cartilage3 RA | 0.2 |
| 113496 Bone3 RA | 0.6 |
| 113497 Synovium3 RA | 0.9 |
| 113498 Syn Fluid Cells3 RA | 0.6 |
| 117106 Normal Cartilage Rep20 | 14.1 |
| 113663 Bone3 Normal | 8.5 |
| 113664 Synovium3 Normal | 4.0 |
| 113665 Syn Fluid Cells3 Normal | 5.7 |
| 117107 Normal Cartilage Rep22 | 13.8 |
| 113667 Bone4 Normal | 17.2 |
| 113668 Synovium4 Normal | 14.7 |
| 113669 Syn Fluid Cells4 Normal | 7.6 |

Column A - Rel. Exp. (%) Ag3024, Run 248122026

[1387] TABLE ARC
Panel 1.3D

| Tissue Name | A |
|---|---|
| Liver adenocarcinoma | 0.4 |
| Pancreas | 0.0 |
| Pancreatic ca. CAPAN 2 | 0.0 |
| Adrenal gland | 2.6 |
| Thyroid | 0.7 |
| Salivary gland | 0.0 |
| Pituitary gland | 2.0 |
| Brain (fetal) | 11.0 |
| Brain (whole) | 54.7 |
| Brain (amygdala) | 27.2 |
| Brain (cerebellum) | 12.9 |
| Brain (hippocampus) | 36.3 |
| Brain (substantia nigra) | 5.7 |
| Brain (thalamus) | 64.2 |
| Cerebral Cortex | 100.0 |
| Spinal cord | 3.8 |
| glio/astro U87-MG | 0.0 |
| glio/astro U-118-MG | 14.7 |
| astrocytoma SW1783 | 1.7 |
| neuro*; met SK-N-AS | 0.0 |
| astrocytoma SF-539 | 0.0 |
| astrocytoma SNB-75 | 6.0 |
| glioma SNB-19 | 0.6 |
| glioma U251 | 0.0 |
| glioma SF-295 | 0.0 |
| Heart (fetal) | 0.0 |
| Heart | 0.6 |
| Skeletal muscle (fetal) | 1.9 |
| Skeletal muscle | 0.4 |
| Bone marrow | 0.0 |
| Thymus | 0.0 |
| Spleen | 0.7 |
| Lymph node | 0.0 |
| Colorectal | 0.8 |
| Stomach | 6.9 |
| Small intestine | 1.4 |
| Colon ca. SW480 | 0.0 |
| Colon ca.* SW620(SW480 met) | 0.0 |
| Colon ca. HT29 | 0.0 |
| Colon ca. HCT-116 | 0.0 |
| Colon ca. CaCo-2 | 0.0 |
| Colon ca. tissue(ODO3866) | 1.0 |
| Colon ca. HCC-2998 | 0.0 |
| Gastric ca.* (liver met) NCI-N87 | 0.4 |
| Bladder | 0.7 |
| Trachea | 2.4 |
| Kidney | 0.6 |
| Kidney (fetal) | 0.2 |
| Renal ca. 786-0 | 0.0 |
| Renal ca. A498 | 2.4 |
| Renal ca. RXF 393 | 0.0 |
| Renal ca. ACHN | 0.0 |
| Renal ca. UO-31 | 0.0 |
| Renal ca. TK-10 | 0.0 |
| Liver | 0.7 |
| Liver (fetal) | 0.0 |
| Liver ca. (hepatoblast) HepG2 | 0.0 |
| Lung | 0.0 |
| Lung (fetal) | 0.0 |
| Lung ca. (small cell) LX-1 | 0.0 |
| Lung ca. (small cell) NCI-H69 | 0.0 |
| Lung ca. (s. cell var.) SHP-77 | 0.0 |
| Lung ca. (large cell)NCI-H460 | 0.0 |
| Lung ca. (non-sm. cell) A549 | 0.2 |
| Lung ca. (non-s. cell) NCI-H23 | 0.0 |
| Lung ca. (non-s. cell) HOP-62 | 0.6 |
| Lung ca. (non-s. cl) NCI-H522 | 0.0 |
| Lung ca. (squam.) SW 900 | 2.1 |
| Lung ca. (squam.) NCI-H596 | 0.0 |
| Mammary gland | 0.4 |
| Breast ca.* (pl. ef) MCF-7 | 11.0 |
| Breast ca.* (pl. ef) MDA-MB-231 | 0.9 |
| Breast ca.* (pl. ef) T47D | 2.3 |
| Breast ca. BT-549 | 1.0 |
| Breast ca. MDA-N | 0.0 |
| Ovary | 0.0 |
| Ovarian ca. OVCAR-3 | 0.0 |
| Ovarian ca. OVCAR-4 | 0.0 |
| Ovarian ca. OVCAR-5 | 0.2 |
| Ovarian ca. OVCAR-8 | 0.0 |
| Ovarian ca. IGROV-1 | 0.0 |
| Ovarian ca.* (ascites) SK-OV-3 | 0.0 |
| Uterus | 2.2 |
| Placenta | 0.0 |
| Prostate | 0.4 |
| Prostate ca.* (bone met)PC-3 | 0.0 |
| Testis | 1.7 |
| Melanoma Hs688(A).T | 0.0 |
| Melanoma* (met) Hs688(B).T | 0.0 |
| Melanoma UACC-62 | 0.2 |
| Melanoma M14 | 0.0 |
| Melanoma LOX IMVI | 0.0 |
| Melanoma* (met) SK-MEL-5 | 0.0 |
| Adipose | 0.0 |

Column A - Rel. Exp. (%) Ag3024, Run 165517896

[1388] TABLE ARD
Panel 2D

| Tissue Name | A |
|---|---|
| Normal Colon | 4.7 |
| CC Well to Mod Diff (ODO3866) | 5.0 |
| CC Margin (ODO3866) | 3.1 |
| CC Gr.2 rectosigmoid (ODO3868) | 0.0 |
| CC Margin (ODO3868) | 0.3 |
| CC Mod Diff (ODO3920) | 0.0 |
| CC Margin (ODO3920) | 0.5 |
| CC Gr.2 ascend colon (ODO3921) | 3.1 |
| CC Margin (ODO3921) | 2.1 |
| CC from Partial Hepatectomy (ODO4309) Mets | 1.8 |
| Liver Margin (ODO4309) | 0.0 |
| Colon mets to lung (OD04451-01) | 0.0 |
| Lung Margin (OD04451-02) | 0.0 |
| Normal Prostate 6546-1 | 3.7 |
| Prostate Cancer (OD04410) | 5.2 |
| Prostate Margin (OD04410) | 5.4 |
| Prostate Cancer (OD04720-01) | 11.9 |
| Prostate Margin (OD04720-02) | 6.4 |
| Normal Lung 061010 | 0.0 |
| Lung Met to Muscle (ODO4286) | 0.6 |
| Muscle Margin (ODO4286) | 1.0 |
| Lung Malignant Cancer (OD03126) | 0.0 |
| Lung Margin (OD03126) | 1.6 |
| Lung Cancer (OD04404) | 0.0 |
| Lung Margin (OD04404) | 1.0 |
| Lung Cancer (OD04565) | 0.0 |
| Lung Margin (OD04565) | 0.0 |
| Lung Cancer (OD04237-01) | 8.4 |
| Lung Margin (OD04237-02) | 0.0 |
| Ocular Mel Met to Liver (ODO4310) | 2.5 |
| Liver Margin (ODO4310) | 0.0 |
| Melanoma Mets to Lung (OD04321) | 0.4 |
| Lung Margin (OD04321) | 0.5 |
| Normal Kidney | 23.7 |
| Kidney Ca, Nuclear grade 2 (OD04338) | 1.2 |
| Kidney Margin (OD04338) | 10.6 |
| Kidney Ca Nuclear grade 1/2 (OD04339) | 0.0 |
| Kidney Margin (OD04339) | 7.7 |
| Kidney Ca, Clear cell type (OD04340) | 9.3 |
| Kidney Margin (OD04340) | 17.2 |
| Kidney Ca, Nuclear grade 3 (OD04348) | 2.3 |
| Kidney Margin (OD04348) | 5.1 |
| Kidney Cancer (OD04622-01) | 0.0 |
| Kidney Margin (OD04622-03) | 2.8 |
| Kidney Cancer (OD04450-01) | 0.0 |
| Kidney Margin (OD04450-03) | 17.8 |
| Kidney Cancer 8120607 | 1.7 |
| Kidney Margin 8120608 | 1.3 |
| Kidney Cancer 8120613 | 100.0 |
| Kidney Margin 8120614 | 5.3 |
| Kidney Cancer 9010320 | 0.8 |
| Kidney Margin 9010321 | 6.3 |
| Normal Uterus | 0.7 |
| Uterus Cancer 064011 | 9.4 |
| Normal Thyroid | 5.7 |
| Thyroid Cancer 064010 | 0.3 |
| Thyroid Cancer A302152 | 2.0 |
| Thyroid Margin A302153 | 23.5 |
| Normal Breast | 7.9 |
| Breast Cancer (OD04566) | 7.4 |
| Breast Cancer (OD04590-01) | 0.0 |
| Breast Cancer Mets (OD04590-03) | 3.6 |
| Breast Cancer Metastasis (OD04655-05) | 3.8 |
| Breast Cancer 064006 | 7.1 |
| Breast Cancer 1024 | 6.2 |
| Breast Cancer 9100266 | 27.7 |
| Breast Margin 9100265 | 4.3 |
| Breast Cancer A209073 | 30.8 |
| Breast Margin A209073 | 3.0 |
| Normal Liver | 1.3 |
| Liver Cancer 064003 | 0.4 |
| Liver Cancer 1025 | 0.0 |
| Liver Cancer 1026 | 0.0 |
| Liver Cancer 6004-T | 0.0 |
| Liver Tissue 6004-N | 1.1 |
| Liver Cancer 6005-T | 0.0 |
| Liver Tissue 6005-N | 0.0 |
| Normal Bladder | 2.8 |
| Bladder Cancer 1023 | 0.0 |
| Bladder Cancer A302173 | 2.2 |
| Bladder Cancer (OD04718-01) | 0.7 |
| Bladder Normal Adjacent (OD04718-03) | 0.4 |
| Normal Ovary | 0.0 |
| Ovarian Cancer 064008 | 1.4 |
| Ovarian Cancer (OD04768-07) | 0.0 |
| Ovary Margin (OD04768-08) | 3.3 |
| Normal Stomach | 17.8 |
| Gastric Cancer 9060358 | 1.0 |
| Stomach Margin 9060359 | 13.6 |
| Gastric Cancer 9060395 | 7.5 |
| Stomach Margin 9060394 | 4.1 |
| Gastric Cancer 9060397 | 13.4 |
| Stomach Margin 9060396 | 6.7 |
| Gastric Cancer 064005 | 1.2 |

Column A - Rel. Exp. (%) Ag3024, Run 163577593

[1389] TABLE ARE
Panel 3D

| Tissue Name | A |
|---|---|
| Daoy- Medulloblastoma | 1.6 |
| TE671- Medulloblastoma | 0.0 |
| D283 Med- Medulloblastoma | 0.0 |
| PFSK-1- Primitive Neuroectodermal | 0.0 |
| XF-498- CNS | 0.6 |
| SNB-78- Glioma | 0.0 |
| SF-268- Glioblastoma | 0.4 |
| T98G- Glioblastoma | 14.1 |
| SK-N-SH- Neuroblastoma (metastasis) | 0.2 |
| SF-295- Glioblastoma | 0.4 |
| Cerebellum | 15.3 |
| Cerebellum | 5.4 |
| NCI-H292- Mucoepidermoid lung carcinoma | 0.0 |
| DMS-114- Small cell lung cancer | 0.0 |
| DMS-79- Small cell lung cancer | 3.3 |
| NCI-H146- Small cell lung cancer | 0.0 |
| NCI-H526- Small cell lung cancer | 57.4 |
| NCI-N417- Small cell lung cancer | 14.4 |
| NCI-H82- Small cell lung cancer | 0.0 |
| NCI-H157- Squamous cell lung cancer | 0.0 |
| (metastasis) | |
| NCI-H1155- Large cell lung cancer | 2.9 |
| NCI-H1299- Large cell lung cancer | 0.3 |
| NCI-H727- Lung carcinoid | 15.9 |
| NCI-UMC-11- Lung carcinoid | 1.2 |
| LX-1- Small cell lung cancer | 0.0 |
| Colo-205- Colon cancer | 0.0 |
| KM12- Colon cancer | 0.0 |
| KM20L2- Colon cancer | 0.0 |
| NCI-H716- Colon cancer | 100.0 |
| SW-48- Colon adenocarcinoma | 0.0 |
| SW1116- Colon adenocarcinoma | 0.0 |
| LS 174T- Colon adenocarcinoma | 0.0 |
| SW-948- Colon adenocarcinoma | 0.0 |
| SW-480- Colon adenocarcinoma | 1.1 |
| NCI-SNU-5- Gastric carcinoma | 0.0 |
| KATO III- Gastric carcinoma | 0.0 |
| NCI-SNU-16- Gastric carcinoma | 0.4 |
| NCI-SNU-1- Gastric carcinoma | 0.0 |
| RF-1- Gastric adenocarcinoma | 0.0 |
| RF-48- Gastric adenocarcinoma | 0.0 |
| MKN-45- Gastric carcinoma | 0.0 |
| NCI-N87- Gastric carcinoma | 0.0 |
| OVCAR-5- Ovarian carcinoma | 0.0 |
| RL95-2- Uterine carcinoma | 0.2 |
| HelaS3- Cervical adenocarcinoma | 0.0 |
| Ca Ski- Cervical epidermoid carcinoma | 0.0 |
| (metastasis) | |
| ES-2- Ovarian clear cell carcinoma | 0.3 |
| Ramos- Stimulated with PMA/ionomycin 6 h | 0.0 |
| Ramos- Stimulated with PMA/ionomycin 14 h | 0.0 |
| MEG-01- Chronic myelogenous leukemia | 0.6 |
| (megokaryoblast) | |
| Raji- Burkitt's lymphoma | 0.0 |
| Daudi- Burkitt's lymphoma | 0.0 |
| U266- B-cell plasmacytoma | 0.0 |
| CA46- Burkitt's lymphoma | 0.0 |
| RL- non-Hodgkin's B-cell lymphoma | 0.0 |
| JM1- pre-B-cell lymphoma | 0.0 |
| Jurkat- T cell leukemia | 0.2 |
| TF-1- Erythroleukemia | 0.0 |
| HUT 78- T-cell lymphoma | 0.0 |
| U937- Histiocytic lymphoma | 0.0 |
| KU-812- Myelogenous leukemia | 0.0 |
| 769-P- Clear cell renal carcinoma | 0.0 |
| Caki-2- Clear cell renal carcinoma | 32.8 |
| SW 839- Clear cell renal carcinoma | 0.2 |
| Rhabdoid kidney tumor | 0.0 |
| Hs766T- Pancreatic carcinoma (LN | 0.0 |
| metastasis) | |
| CAPAN-1- Pancreatic adenocarcinoma (liver | 0.0 |
| metastasis) | |
| SU86.86- Pancreatic carcinoma (liver | 1.5 |
| metastasis) | |
| BxPC-3- Pancreatic adenocarcinoma | 0.0 |
| HPAC- Pancreatic adenocarcinoma | 0.3 |
| MIA PaCa-2- Pancreatic carcinoma | 0.0 |
| CFPAC-1- Pancreatic ductal adenocarcinoma | 0.0 |
| PANC-1- Pancreatic epithelioid ductal | 0.8 |
| carcinoma | |
| T24- Bladder carcinma (transitional cell) | 0.0 |
| 5637- Bladder carcinoma | 0.0 |
| HT-1197- Bladder carcinoma | 0.0 |
| UM-UC-3- Bladder carcinma (transitional cell) | 0.0 |
| A204- Rhabdomyosarcoma | 0.0 |
| HT-1080- Fibrosarcoma | 0.3 |
| MG-63- Osteosarcoma | 0.0 |
| SK-LMS-1- Leiomyosarcoma (vulva) | 4.6 |
| SJRH30- Rhabdomyosarcoma (met to bone marrow) | 0.2 |
| A431- Epidermoid carcinoma | 0.0 |
| WM266-4- Melanoma | 0.0 |
| DU 145- Prostate carcinoma (brain | 0.0 |
| metastasis) | |
| MDA-MB-468- Breast adenocarcinoma | 1.3 |
| SCC-4- Squamous cell carcinoma of tongue | 0.0 |
| SCC-9- Squamous cell carcinoma of tongue | 0.0 |
| SCC-15- Squamous cell carcinoma of tongue | 0.0 |
| CAL 27- Squamous cell carcinoma of tongue | 0.0 |

Column A - Rel. Exp. (%) Ag3024, Run 164886426

[1390] TABLE ARF
Panel 4D

| Tissue Name | A |
|---|---|
| Secondary Th1 act | 0.0 |
| Secondary Th2 act | 0.0 |
| Secondary Tr1 act | 0.0 |
| Secondary Th1 rest | 0.0 |
| Secondary Th2 rest | 4.4 |
| Secondary Tr1 rest | 0.0 |
| Primary Th1 act | 0.0 |
| Primary Th2 act | 0.0 |
| Primary Tr1 act | 0.0 |
| Primary Th1 rest | 0.0 |
| Primary Th2 rest | 0.0 |
| Primary Tr1 rest | 0.0 |
| CD45RA CD4 lymphocyte act | 0.0 |
| CD45RO CD4 lymphocyte act | 0.0 |
| CD8 lymphocyte act | 0.0 |
| Secondary CD8 lymphocyte rest | 0.0 |
| Secondary CD8 lymphocyte act | 0.0 |
| CD4 lymphocyte none | 0.0 |
| 2ry Th1/Th2/Tr1_anti-CD95 CH11 | 0.0 |
| LAK cells rest | 0.0 |
| LAK cells IL-2 | 0.0 |
| LAK cells IL-2 + IL-12 | 0.0 |
| LAK cells IL-2 + IFN gamma | 0.0 |
| LAK cells IL-2 + IL-18 | 0.0 |
| LAK cells PMA/ionomycin | 0.0 |
| NK Cells IL-2 rest | 0.0 |
| Two Way MLR 3 day | 0.0 |
| Two Way MLR 5 day | 0.0 |
| Two Way MLR 7 day | 0.0 |
| PBMC rest | 0.0 |
| PBMC PWM | 0.0 |
| PBMC PHA-L | 0.0 |
| Ramos (B cell) none | 0.0 |
| Ramos (B cell) ionomycin | 4.7 |
| B lymphocytes PWM | 0.0 |
| B lymphocytes CD40L and IL-4 | 0.0 |
| EOL-1 dbcAMP | 0.0 |
| EOL-1 dbcAMP PMA/ionomycin | 0.0 |
| Dendritic cells none | 0.0 |
| Dendritic cells LPS | 0.0 |
| Dendritic cells anti-CD40 | 0.0 |
| Monocytes rest | 0.0 |
| Monocytes LPS | 0.0 |
| Macrophages rest | 0.0 |
| Macrophages LPS | 5.3 |
| HUVEC none | 24.7 |
| HUVEC starved | 11.8 |
| HUVEC IL-1beta | 0.0 |
| HUVEC IFN gamma | 31.4 |
| HUVEC TNF alpha + IFN gamma | 14.9 |
| HUVEC TNF alpha + IL4 | 8.8 |
| HUVEC IL-11 | 11.4 |
| Lung Microvascular EC none | 10.1 |
| Lung Microvascular EC TNFalpha + IL-1beta | 8.7 |
| Microvascular Dermal EC none | 11.3 |
| Microsvasular Dermal EC TNFalpha + IL-1beta | 3.0 |
| Bronchial epithelium TNFalpha + IL1beta | 5.3 |
| Small airway epithelium none | 3.7 |
| Small airway epithelium TNFalpha + IL-1beta | 66.0 |
| Coronery artery SMC rest | 21.0 |
| Coronery artery SMC TNFalpha + IL-1beta | 10.4 |
| Astrocytes rest | 0.0 |
| Astrocytes TNFalpha + IL-1beta | 0.0 |
| KU-812 (Basophil) rest | 0.0 |
| KU-812 (Basophil) PMA/ionomycin | 0.0 |
| CCD1106 (Keratinocytes) none | 0.0 |
| CCD1106 (Keratinocytes) TNFalpha + IL-1beta | 0.0 |
| Liver cirrhosis | 17.7 |
| Lupus kidney | 5.6 |
| NCI-H292 none | 3.2 |
| NCI-H292 IL-4 | 0.0 |
| NCI-H292 IL-9 | 10.4 |
| NCI-H292 IL-13 | 0.0 |
| NCI-H292 IFN gamma | 0.0 |
| HPAEC none | 6.3 |
| HPAEC TNF alpha + IL-1 beta | 3.2 |
| Lung fibroblast none | 0.0 |
| Lung fibroblast TNF alpha + IL-1 beta | 0.0 |
| Lung fibroblast IL-4 | 0.0 |
| Lung fibroblast IL-9 | 0.0 |
| Lung fibroblast IL-13 | 0.0 |
| Lung fibroblast IFN gamma | 0.0 |
| Dermal fibroblast CCD1070 rest | 0.0 |
| Dermal fibroblast CCD1070 TNF alpha | 0.0 |
| Dermal fibroblast CCD1070 IL-1 beta | 4.1 |
| Dermal fibroblast IFN gamma | 6.1 |
| Dermal fibroblast IL-4 | 8.7 |
| IBD Colitis 2 | 0.0 |
| IBD Crohn's | 7.7 |
| Colon | 24.1 |
| Lung | 14.5 |
| Thymus | 100.0 |
| Kidney | 0.0 |

Column A - Rel. Exp. (%) Ag3024, Run 162427416

[1391] AI_comprehensive panel_v1.0 Summary: Ag3024 This gene was found at low but significant levels in lung tissue from COPD, emphysema and asthma patients. This expression was consistent with panel 4D which showed expression in small airway epithelium. Therefore, this gene is useful as a marker or a target for lung inflammatory diseases.

[1392] Panel 1.3D Summary: Ag3024 Expression of this gene, a heparin sulfate proteoglycan homolog, was highly brain preferential and plays a role for this gene product in CNS processes. Heparin sulfate proteoglycans (HSPGs) are a component of amyloid plaques in Alzheimer's disease. The interaction of apoE with HSPGs has also been implicated in the pathogenesis of Alzheimer's disease and plays a role in neuronal repair. apoE has an HSPG-binding site highly complementary to heparan sulfates rich in N- and O-sulfo groups. (Libeu C P, E. J Biol Chem 2001 October 19;276(42):39138-44). Enzymes that influence the structure of HSPGs, such as the protein product of this gene, will influence protein agregation and the functional processes underlying Alzheimer's disease. Agents that target and modulate the activity of this gene or gene product are effective in the treatment of neurodegenerative diseases including Alzheimer's disease. This gene was also expressed in breast and brain cancer cell lines at low but significant levels. The expression of this gene is of use as a marker for breast and brain cancer. Therapeutic inhibition of the activity of the product of this gene, through the use of antibodies or small molecule drugs, is useful in the therapy of brain and breast cancer.

[1393] Panel 2D Summary: Ag3024 This gene was expressed at low but significant levels in most of the samples on this panel, with highest expression in a kidney cancer sample (CT=30.6). Significant levels of expression were also seen in samples derived from breast and gastric cancer samples. Expression of this gene is of use as a marker for breast and gastric cancer. Therapeutic inhibition of the activity of the product of this gene or gene product, through the use of antibodies or small molecule drugs, is of use in the therapy of breast and gastric cancer.

[1394] Panel 3D Summary: Ag3024 This gene was expressed at low but significant levels in cell lines from a renal carcinoma, colon cancer, glioblastoma and three lung cancer lines. Thus, this gene is useful as a marker as well as a target for inhibition of these cancers.

[1395] Panel 4D Summary: Ag3024 This gene, a heparin Sulfate 6-Sulfotransferase 3 homolog, was expressed at low but significant levels in thymus and small airway epithelium treated with TNFalpha+IL-1beta (CTs=34). The gene product is of use as a marker for thymus or activated small airway epithelium.

[1396] AS. CG56904-01: Secreted LRR (Leucine-rich Repeat) Protein

[1397] Expression of gene CG56904-01 was assessed using the primer-probe sets Ag3048, and Ag6717, described in Tables ASA and ASB. Results of the RTQ-PCR runs are shown in Tables ASC, ASD, ASE, ASF, and ASG.

TABLE ASA
Probe Name Ag3048

| | | | | SEQ |
|---|---|---|---|---|
| | | | Start | ID |
| Primers | Sequences | Length | Position | No |
| Forward | 5′-cacaaccagctgacagacagt-3′ | 21 | 490 | 1504 |
| Probe | TET-5′-ccaccaccttcagcaagctgcatag-3′- | 25 | 521 | 1505 |
| Reverse | 5′-gggagagatccaggtattcaag-3′ | 22 | 547 | 1506 |

[1398] TABLE ASB
Probe Name Ag6717

| | | | | SEQ |
|---|---|---|---|---|
| | | | Start | ID |
| Primers | Sequences | Length | Position | No |
| Forward | 5′-gctcacaacaagaacaatctc-3 | 21 | 406 | 1507 |
| Probe | TET-5′-aaggtgccccgaggagc-3′-TAMRA | 17 | 433 | 1508 |
| Reverse | 5′-cacggagttgagtctgg-3′ | 17 | 459 | 1509 |

[1399] TABLE ASC
AI_comprehensive panel_v1.0

| Tissue Name | A |
|---|---|
| 110967 COPD-F | 0.0 |
| 110980 COPD-F | 0.7 |
| 110968 COPD-M | 1.0 |
| 110977 COPD-M | 0.8 |
| 110989 Emphysema-F | 0.8 |
| 110992 Emphysema-F | 6.3 |
| 110993 Emphysema-F | 0.3 |
| 110994 Emphysema-F | 0.0 |
| 110995 Emphysema-F | 12.7 |
| 110996 Emphysema-F | 6.6 |
| 110997 Asthma-M | 2.6 |
| 111001 Asthma-F | 0.4 |
| 111002 Asthma-F | 1.9 |
| 111003 Atopic Asthma-F | 1.6 |
| 111004 Atopic Asthma-F | 5.2 |
| 111005 Atopic Asthma-F | 2.8 |
| 111006 Atopic Asthma-F | 0.3 |
| 111417 Allergy-M | 0.4 |
| 112347 Allergy-M | 0.0 |
| 112349 Normal Lung-F | 0.0 |
| 112357 Normal Lung-F | 8.5 |
| 112354 Normal Lung-M | 0.9 |
| 112374 Crohns-F | 4.0 |
| 112389 Match Control Crohns-F | 17.3 |
| 112375 Crohns-F | 4.2 |
| 112732 Match Control Crohns-F | 1.1 |
| 112725 Crohns-M | 0.0 |
| 112387 Match Control Crohns-M | 3.6 |
| 112378 Crohns-M | 0.0 |
| 112390 Match Control Crohns-M | 0.5 |
| 112726 Crohns-M | 0.0 |
| 112731 Match Control Crohns-M | 1.4 |
| 112380 Ulcer Col-F | 0.9 |
| 112734 Match Control Ulcer Col-F | 4.9 |
| 112384 Ulcer Col-F | 6.8 |
| 112737 Match Control Ulcer Col-F | 0.7 |
| 112386 Ulcer Col-F | 7.0 |
| 112738 Match Control Ulcer Col-F | 5.1 |
| 112381 Ulcer Col-M | 0.0 |
| 112735 Match Control Ulcer Col-M | 0.0 |
| 112382 Ulcer Col-M | 11.8 |
| 112394 Match Control Ulcer Col-M | 1.6 |
| 112383 Ulcer Col-M | 30.8 |
| 112736 Match Control Ulcer Col-M | 6.3 |
| 112423 Psoriasis-F | 0.7 |
| 112427 Match Control Psoriasis-F | 1.4 |
| 112418 Psoriasis-M | 0.6 |
| 112723 Match Control Psoriasis-M | 4.8 |
| 112419 Psoriasis-M | 0.9 |
| 112424 Match Control Psoriasis-M | 0.9 |
| 112420 Psoriasis-M | 6.4 |
| 112425 Match Control Psoriasis-M | 0.4 |
| 104689 (MF) OA Bone-Backus | 54.7 |
| 104690 (MF) Adj “Normal” Bone-Backus | 23.3 |
| 104691 (MF) OA Synovium-Backus | 5.3 |
| 104692 (BA) OA Cartilage-Backus | 0.0 |
| 104694 (BA) OA Bone-Backus | 100.0 |
| 104695 (BA) Adj “Normal” Bone-Backus | 80.1 |
| 104696 (BA) OA Synovium-Backus | 27.4 |
| 104700 (SS) OA Bone-Backus | 21.6 |
| 104701 (SS) Adj “Normal” Bone-Backus | 90.8 |
| 104702 (SS) OA Synovium-Backus | 76.3 |
| 117093 OA Cartilage Rep7 | 7.9 |
| 112672 OA Bone5 | 0.7 |
| 112673 OA Synovium5 | 0.4 |
| 112674 OA Synovial Fluid cells5 | 0.0 |
| 117100 OA Cartilage Rep14 | 0.0 |
| 112756 OA Bone9 | 8.6 |
| 112757 OA Synovium9 | 0.7 |
| 112758 OA Synovial Fluid Cells9 | 3.8 |
| 117125 RA Cartilage Rep2 | 0.5 |
| 113492 Bone2 RA | 3.7 |
| 113493 Synovium2 RA | 1.2 |
| 113494 Syn Fluid Cells RA | 1.9 |
| 113499 Cartilage4 RA | 1.4 |
| 113500 Bone4 RA | 3.1 |
| 113501 Synovium4 RA | 2.4 |
| 113502 Syn Fluid Cells4 RA | 1.2 |
| 113495 Cartilage3 RA | 2.0 |
| 113496 Bone3 RA | 2.0 |
| 113497 Synovium3 RA | 1.7 |
| 113498 Syn Fluid Cells3 RA | 2.5 |
| 117106 Normal Cartilage Rep20 | 0.4 |
| 113663 Bone3 Normal | 0.0 |
| 113664 Synovium3 Normal | 0.0 |
| 113665 Syn Fluid Cells3 Normal | 0.0 |
| 117107 Normal Cartilage Rep22 | 0.0 |
| 113667 Bone4 Normal | 0.4 |
| 113668 Synovium4 Normal | 0.5 |
| 113669 Syn Fluid Cells4 Normal | 1.0 |

Column A - Rel. Exp. (%) Ag6717, Run 283839606

[1400] TABLE ASD
Panel 1.3D

| Tissue Name | A |
|---|---|
| Liver adenocarcinoma | 2.0 |
| Pancreas | 0.0 |
| Pancreatic ca. CAPAN 2 | 0.3 |
| Adrenal gland | 0.0 |
| Thyroid | 0.5 |
| Salivary gland | 0.6 |
| Pituitary gland | 0.5 |
| Brain (fetal) | 0.9 |
| Brain (whole) | 2.4 |
| Brain (amygdala) | 2.9 |
| Brain (cerebellum) | 7.0 |
| Brain (hippocampus) | 2.1 |
| Brain (substantia nigra) | 4.5 |
| Brain (thalamus) | 4.6 |
| Cerebral Cortex | 1.0 |
| Spinal cord | 7.6 |
| glio/astro U87-MG | 2.8 |
| glio/astro U-118-MG | 5.9 |
| astrocytoma SW1783 | 2.7 |
| neuro*; met SK-N-AS | 1.1 |
| astrocytoma SF-539 | 100.0 |
| astrocytoma SNB-75 | 41.2 |
| glioma SNB-19 | 0.4 |
| glioma U251 | 6.7 |
| glioma SF-295 | 7.3 |
| Heart (fetal) | 5.1 |
| Heart | 1.3 |
| Skeletal muscle (fetal) | 4.7 |
| Skeletal muscle | 2.6 |
| Bone marrow | 0.9 |
| Thymus | 0.9 |
| Spleen | 0.3 |
| Lymph node | 0.0 |
| Colorectal | 2.9 |
| Stomach | 0.8 |
| Small intestine | 1.0 |
| Colon ca. SW480 | 0.8 |
| Colon ca.* SW620(SW480 met) | 1.9 |
| Colon ca. HT29 | 0.3 |
| Colon ca. HCT-116 | 0.0 |
| Colon ca. CaCo-2 | 0.2 |
| Colon ca. tissue(ODO3866) | 13.2 |
| Colon ca. HCC-2998 | 4.1 |
| Gastric ca.* (liver met) NCI-N87 | 1.5 |
| Bladder | 3.0 |
| Trachea | 3.7 |
| Kidney | 0.0 |
| Kidney (fetal) | 0.6 |
| Renal ca. 786-0 | 3.8 |
| Renal ca. A498 | 17.7 |
| Renal ca. RXF 393 | 12.5 |
| Renal ca. ACHN | 0.1 |
| Renal ca. UO-31 | 1.1 |
| Renal ca. TK-10 | 0.5 |
| Liver | 0.0 |
| Liver (fetal) | 0.0 |
| Liver ca. (hepatoblast) HepG2 | 0.2 |
| Lung | 1.4 |
| Lung (fetal) | 7.1 |
| Lung ca. (small cell) LX-1 | 0.2 |
| Lung ca. (small cell) NCI-H69 | 0.0 |
| Lung ca. (s. cell var.) SHP-77 | 0.9 |
| Lung ca. (large cell)NCI-H460 | 0.0 |
| Lung ca. (non-sm. cell) A549 | 0.0 |
| Lung ca. (non-s. cell) NCI-H23 | 0.4 |
| Lung ca. (non-s. cell) HOP-62 | 41.2 |
| Lung ca. (non-s. cl) NCI-H522 | 1.6 |
| Lung ca. (squam.) SW 900 | 0.0 |
| Lung ca. (squam.) NCI-H596 | 0.0 |
| Mammary gland | 15.9 |
| Breast ca.* (pl. ef) MCF-7 | 3.5 |
| Breast ca.* (pl. ef) MDA-MB-231 | 2.0 |
| Breast ca.* (pl. ef) T47D | 0.3 |
| Breast ca. BT-549 | 0.0 |
| Breast ca. MDA-N | 0.3 |
| Ovary | 3.8 |
| Ovarian ca. OVCAR-3 | 0.2 |
| Ovarian ca. OVCAR-4 | 0.2 |
| Ovarian ca. OVCAR-5 | 4.3 |
| Ovarian ca. OVCAR-8 | 0.8 |
| Ovarian ca. IGROV-1 | 0.0 |
| Ovarian ca.* (ascites) SK-OV-3 | 1.5 |
| Uterus | 0.6 |
| Placenta | 0.9 |
| Prostate | 3.0 |
| Prostate ca.* (bone met)PC-3 | 1.7 |
| Testis | 3.9 |
| Melanoma Hs688(A).T | 32.8 |
| Melanoma* (met) Hs688(B).T | 31.4 |
| Melanoma UACC-62 | 1.8 |
| Melanoma M14 | 0.0 |
| Melanoma LOX IMVI | 0.0 |
| Melanoma* (met) SK-MEL-5 | 0.0 |
| Adipose | 4.3 |

Column A - Rel. Exp. (%) Ag3048, Run 168017062

[1401] TABLE ASE
Panel 2D

| Tissue Name | A |
|---|---|
| Normal Colon | 4.7 |
| CC Well to Mod Diff (ODO3866) | 12.0 |
| CC Margin (ODO3866) | 1.5 |
| CC Gr.2 rectosigmoid (ODO3868) | 10.1 |
| CC Margin (ODO3868) | 0.8 |
| CC Mod Diff (ODO3920) | 8.4 |
| CC Margin (ODO3920) | 2.6 |
| CC Gr.2 ascend colon (ODO3921) | 13.6 |
| CC Margin (ODO3921) | 2.1 |
| CC from Partial Hepatectomy (ODO4309) Mets | 3.1 |
| Liver Margin (ODO4309) | 0.1 |
| Colon mets to lung (OD04451-01) | 3.3 |
| Lung Margin (OD04451-02) | 1.1 |
| Normal Prostate 6546-1 | 4.1 |
| Prostate Cancer (OD04410) | 19.8 |
| Prostate Margin (OD04410) | 4.5 |
| Prostate Cancer (OD04720-01) | 9.7 |
| Prostate Margin (OD04720-02) | 7.5 |
| Normal Lung 061010 | 3.3 |
| Lung Met to Muscle (ODO4286) | 24.5 |
| Muscle Margin (ODO4286) | 1.7 |
| Lung Malignant Cancer (OD03126) | 11.6 |
| Lung Margin (OD03126) | 3.1 |
| Lung Cancer (OD04404) | 22.2 |
| Lung Margin (OD04404) | 7.2 |
| Lung Cancer (OD04565) | 36.1 |
| Lung Margin (OD04565) | 2.0 |
| Lung Cancer (OD04237-01) | 12.6 |
| Lung Margin (OD04237-02) | 6.7 |
| Ocular Mel Met to Liver (ODO4310) | 0.0 |
| Liver Margin (ODO4310) | 0.4 |
| Melanoma Mets to Lung (OD04321) | 0.0 |
| Lung Margin (OD04321) | 1.7 |
| Normal Kidney | 0.8 |
| Kidney Ca, Nuclear grade 2 (OD04338) | 0.3 |
| Kidney Margin (OD04338) | 1.5 |
| Kidney Ca Nuclear grade 1/2 (OD04339) | 0.2 |
| Kidney Margin (OD04339) | 0.9 |
| Kidney Ca, Clear cell type (OD04340) | 0.4 |
| Kidney Margin (OD04340) | 1.0 |
| Kidney Ca, Nuclear grade 3 (OD04348) | 10.3 |
| Kidney Margin (OD04348) | 0.4 |
| Kidney Cancer (OD04622-01) | 34.4 |
| Kidney Margin (OD04622-03) | 0.2 |
| Kidney Cancer (OD04450-01) | 0.0 |
| Kidney Margin (OD04450-03) | 0.2 |
| Kidney Cancer 8120607 | 9.0 |
| Kidney Margin 8120608 | 0.5 |
| Kidney Cancer 8120613 | 0.1 |
| Kidney Margin 8120614 | 0.4 |
| Kidney Cancer 9010320 | 13.1 |
| Kidney Margin 9010321 | 0.9 |
| Normal Uterus | 0.5 |
| Uterus Cancer 064011 | 1.0 |
| Normal Thyroid | 3.3 |
| Thyroid Cancer 064010 | 0.7 |
| Thyroid Cancer A302152 | 4.5 |
| Thyroid Margin A302153 | 0.8 |
| Normal Breast | 20.0 |
| Breast Cancer (OD04566) | 6.5 |
| Breast Cancer (OD04590-01) | 10.4 |
| Breast Cancer Mets (OD04590-03) | 11.4 |
| Breast Cancer Metastasis (OD04655-05) | 1.0 |
| Breast Cancer 064006 | 23.2 |
| Breast Cancer 1024 | 25.7 |
| Breast Cancer 9100266 | 16.4 |
| Breast Margin 9100265 | 24.0 |
| Breast Cancer A209073 | 32.3 |
| Breast Margin A209073 | 33.2 |
| Normal Liver | 0.0 |
| Liver Cancer 064003 | 0.0 |
| Liver Cancer 1025 | 0.0 |
| Liver Cancer 1026 | 4.2 |
| Liver Cancer 6004-T | 0.0 |
| Liver Tissue 6004-N | 2.9 |
| Liver Cancer 6005-T | 2.2 |
| Liver Tissue 6005-N | 0.0 |
| Normal Bladder | 23.8 |
| Bladder Cancer 1023 | 11.8 |
| Bladder Cancer A302173 | 7.2 |
| Bladder Cancer (OD04718-01) | 12.7 |
| Bladder Normal Adjacent (OD04718-03) | 4.9 |
| Normal Ovary | 3.5 |
| Ovarian Cancer 064008 | 100.0 |
| Ovarian Cancer (OD04768-07) | 2.5 |
| Ovary Margin (OD04768-08) | 8.1 |
| Normal Stomach | 1.5 |
| Gastric Cancer 9060358 | 0.5 |
| Stomach Margin 9060359 | 0.8 |
| Gastric Cancer 9060395 | 7.5 |
| Stomach Margin 9060394 | 1.9 |
| Gastric Cancer 9060397 | 27.0 |
| Stomach Margin 9060396 | 1.5 |
| Gastric Cancer 064005 | 3.3 |

Column A - Rel. Exp. (%) Ag3048, Run 170858352

[1402] TABLE ASF
Panel 3D

| Tissue Name | A |
|---|---|
| Daoy- Medulloblastoma | 6.5 |
| TE671- Medulloblastoma | 0.0 |
| D283 Med- Medulloblastoma | 0.0 |
| PFSK-1- Primitive Neuroectodermal | 18.0 |
| XF-498- CNS | 1.4 |
| SNB-78- Glioma | 100.0 |
| SF-268- Glioblastoma | 0.0 |
| T98G- Glioblastoma | 24.1 |
| SK-N-SH- Neuroblastoma (metastasis) | 32.3 |
| SF-295- Glioblastoma | 2.0 |
| Cerebellum | 3.0 |
| Cerebellum | 4.2 |
| NCI-H292- Mucoepidermoid lung carcinoma | 38.4 |
| DMS-114- Small cell lung cancer | 1.7 |
| DMS-79- Small cell lung cancer | 3.0 |
| NCI-H146- Small cell lung cancer | 3.3 |
| NCI-H526- Small cell lung cancer | 0.0 |
| NCI-N417- Small cell lung cancer | 0.0 |
| NCI-H82- Small cell lung cancer | 0.0 |
| NCI-H157- Squamous cell lung cancer | 1.4 |
| (metastasis) | |
| NCI-H1155- Large cell lung cancer | 1.8 |
| NCI-H1299- Large cell lung cancer | 2.8 |
| NCI-H727- Lung carcinoid | 0.0 |
| NCI-UMC-11- Lung carcinoid | 0.0 |
| LX-1- Small cell lung cancer | 0.0 |
| Colo-205- Colon cancer | 7.3 |
| KM12- Colon cancer | 1.6 |
| KM20L2- Colon cancer | 0.0 |
| NCI-H716- Colon cancer | 0.0 |
| SW-48- Colon adenocarcinoma | 0.6 |
| SW1116- Colon adenocarcinoma | 0.8 |
| LS 174T- Colon adenocarcinoma | 2.5 |
| SW-948- Colon adenocarcinoma | 0.0 |
| SW-480- Colon adenocarcinoma | 2.7 |
| NCI-SNU-5- Gastric carcinoma | 1.6 |
| KATO III- Gastric carcinoma | 1.8 |
| NCI-SNU-16- Gastric carcinoma | 1.4 |
| NCI-SNU-1- Gastric carcinoma | 0.0 |
| RF-1- Gastric adenocarcinoma | 0.0 |
| RF-48- Gastric adenocarcinoma | 0.9 |
| MKN-45- Gastric carcinoma | 5.6 |
| NCI-N87- Gastric carcinoma | 2.3 |
| OVCAR-5- Ovarian carcinoma | 4.8 |
| RL95-2- Uterine carcinoma | 0.0 |
| HelaS3- Cervical adenocarcinoma | 0.0 |
| Ca Ski- Cervical epidermoid carcinoma | 0.0 |
| (metastasis) | |
| ES-2- Ovarian clear cell carcinoma | 0.0 |
| Ramos- Stimulated with PMA/ionomycin 6 h | 0.0 |
| Ramos- Stimulated with PMA/ionomycin 14 h | 0.0 |
| MEG-01- Chronic myelogenous leukemia | 2.6 |
| (megokaryoblast) | |
| Raji- Burkitt's lymphoma | 0.0 |
| Daudi- Burkitt's lymphoma | 0.0 |
| U266- B-cell plasmacytoma | 0.0 |
| CA46- Burkitt's lymphoma | 0.0 |
| RL- non-Hodgkin's B-cell lymphoma | 0.0 |
| JM1- pre-B-cell lymphoma | 0.0 |
| Jurkat- T cell leukemia | 0.0 |
| TF-1- Erythroleukemia | 2.3 |
| HUT 78- T-cell lymphoma | 0.0 |
| U937- Histiocytic lymphoma | 0.7 |
| KU-812- Myelogenous leukemia | 0.0 |
| 769-P- Clear cell renal carcinoma | 0.0 |
| Caki-2- Clear cell renal carcinoma | 2.5 |
| SW 839- Clear cell renal carcinoma | 0.0 |
| Rhabdoid kidney tumor | 2.3 |
| Hs766T- Pancreatic carcinoma (LN | 1.5 |
| metastasis) | |
| CAPAN-1- Pancreatic adenocarcinoma (liver | 0.0 |
| metastasis) | |
| SU86.86- Pancreatic carcinoma (liver | 0.8 |
| metastasis) | |
| BxPC-3- Pancreatic adenocarcinoma | 0.7 |
| HPAC- Pancreatic adenocarcinoma | 0.0 |
| MIA PaCa-2- Pancreatic carcinoma | 0.7 |
| CFPAC-1- Pancreatic ductal adenocarcinoma | 1.7 |
| PANC-1- Pancreatic epithelioid ductal | 6.7 |
| carcinoma | |
| T24- Bladder carcinma (transitional cell) | 6.1 |
| 5637- Bladder carcinoma | 2.1 |
| HT-1197- Bladder carcinoma | 1.7 |
| UM-UC-3- Bladder carcinma (transitional cell) | 0.7 |
| A204- Rhabdomyosarcoma | 5.4 |
| HT-1080- Fibrosarcoma | 11.7 |
| MG-63- Osteosarcoma | 0.0 |
| SK-LMS-1- Leiomyosarcoma (vulva) | 7.5 |
| SJRH30- Rhabdomyosarcoma (met to bone | 0.0 |
| marrow) | |
| A431- Epidermoid carcinoma | 5.1 |
| WM266-4- Melanoma | 16.6 |
| DU 145- Prostate carcinoma (brain | 0.0 |
| metastasis) | |
| MDA-MB-468- Breast adenocarcinoma | 2.5 |
| SCC-4- Squamous cell carcinoma of tongue | 0.0 |
| SCC-9- Squamous cell carcinoma of tongue | 0.0 |
| SCC-15- Squamous cell carcinoma of tongue | 0.6 |
| CAL 27- Squamous cell carcinoma of tongue | 0.5 |

Column A - Rel. Exp. (%) Ag3048, Run 172133336

[1403] TABLE ASG
Panel 4D

| | |
|---|---|
| Monocytes LPS | 0.0 |
| Macrophages rest | 1.9 |
| Macrophages LPS | 1.3 |
| HUVEC none | 0.0 |
| HUVEC starved | 2.9 |
| Colon | 2.0 |
| Lung | 36.1 |
| Thymus | 0.6 |
| Kidney | 1.7 |

[1404] AI_comprehensive panel_v1.0 Summary: Ag6717 Prominent expression was seen in bone and synovium samples from osteoarthritis patients, with highest expression in an OA bone sample (CT=31). Thus, targeting this gene or its protein product is useful in the treatment of osteoarthritis.

[1405] Panel 1.3D Summary: Ag3048 The expression of this gene was highest in a sample derived from a brain cancer cell line (SF-539) (CT=29.4). There was substantial expression associated with samples derived from another brain cancer cell line, two melanoma cell lines and a lung cancer cell line. The expression of this gene is useful as a marker to distinguish SF-539 cells from other samples in the panel. Therapeutic modulation of this gene, through the use of small molecule drugs, protein therapeuitcs or antibodies is of benefit in treatment of brain or lung cancer or melanoma.

[1406] This gene, a leucine-rich repeat homolog, was expressed at low levels in the CNS. The leucine-rich repeat region proteins have been implicated in axonal guidance. This gene has therapeutic utility in the treatment of any CNS disorder involving neuronal loss, specfically by guiding/enhancing compensatory synaptogenesis and fiber outgrowth, including such clinical conditions as Alzheimer's, Parkinson's, or Huntington's diseases, stroke, head and spinal cord trauma, vascular dementia or spinocerebellar ataxia.

[1407] Panel 2D Summary: Ag3048 The expression of this gene was highest in a sample derived from an ovarian cancer (CT=29). There was substantial expression associated with lung cancer, prostate cancer and colon cancer samples. Of note is the differential expression in the lung, colon and prostate cancer samples compared to their respective normal adjacent tissue. The expression of this gene is useful as a marker to distinguish this ovarian cancer sample from other samples in the panel. The expression of this gene or its protein product is useful as a marker to distinguish colon, prostate or lung cancer samples from their normal adjacent tissue. Therapeutic modulation of this gene or its protein product, through the use of small molecule drugs, protein therapeutics or antibodies is benefical in the treatment of ovarian, lung, prostate or colon cancer.

[1408] Panel 3D Sumunary: Ag3048 The expression of this gene was highest in a sample derived from a brain cancer cell line (SNB-78) (CT=30.2). There was substantial expression associated with other brain cancer cell line samples and a lung cancer cell line sample. The expression of this gene is useful as a marker to distinguish SNB-78 cells from other samples in the panel. Therapeutic modulation of this gene or its protein product, through the use of small molecule drugs, protein therapeutics or antibodies is useful in the treatment of brain or lung cancer.

[1409] Panel 4D Summary: Ag3048 This gene, a secreted leucine-rich repeat (LRR) protein, was expressed selectively at moderate levels (CT range 29-31) in several resting and cytokine-activated epithelial and connective tissue cells of lung and skin. This gene product is useful as a therapeutic protein as well as a target for therapeutic antibodies and small molecules, for the reduction or elimination of the symptoms in patients with chronic obstructive pulmonary disease, asthma, emphysema, or psoriasis.

[1410] AT. CG56904-04: LRR Protein

[1411] Expression of gene CG56904-04 was assessed using the primer-probe set Ag3048, described in Table ATA. Results of the RTQ-PCR runs are shown in Tables ATB, ATC, ATD and ATE.

TABLE ATA
Probe Name Ag3048

| | | | | SEQ |
|---|---|---|---|---|
| | | | Start | ID |
| Primers | Sequences | Length | Position | No |
| Forward | 5′-cacaaccagctgacagacagt-3′ | 21 | 724 | 1510 |
| Probe | TET-5′-ccaccaccttcagcaagctgcatag-3′- | 25 | 755 | 1511 |
| | TAMRA | | | |
| Reverse | 5′-gggagagatccaggtattcaag-3′ | 22 | 781 | 1512 |

[1412] TABLE ATB
Panel 1.3D

| Tissue Name | A |
|---|---|
| Liver adenocarcinoma | 2.0 |
| Pancreas | 0.0 |
| Pancreatic ca. CAPAN 2 | 0.3 |
| Adrenal gland | 0.0 |
| Thyroid | 0.5 |
| Salivary gland | 0.6 |
| Pituitary gland | 0.5 |
| Brain (fetal) | 0.9 |
| Brain (whole) | 2.4 |
| Brain (amygdala) | 2.9 |
| Brain (cerebellum) | 7.0 |
| Brain (hippocampus) | 2.1 |
| Brain (substantia nigra) | 4.5 |
| Brain (thalamus) | 4.6 |
| Cerebral Cortex | 1.0 |
| Spinal cord | 7.6 |
| glio/astro U87-MG | 2.8 |
| glio/astro U-118-MG | 5.9 |
| astrocytoma SW1783 | 2.7 |
| neuro*; met SK-N-AS | 1.1 |
| astrocytoma SF-539 | 100.0 |
| astrocytoma SNB-75 | 41.2 |
| glioma SNB-19 | 0.4 |
| glioma U251 | 6.7 |
| glioma SF-295 | 7.3 |
| Heart (fetal) | 5.1 |
| Heart | 1.3 |
| Skeletal muscle (fetal) | 4.7 |
| Skeletal muscle | 2.6 |
| Bone marrow | 0.9 |
| Thymus | 0.9 |
| Spleen | 0.3 |
| Lymph node | 0.0 |
| Colorectal | 2.9 |
| Stomach | 0.8 |
| Small intestine | 1.0 |
| Colon ca. SW480 | 0.8 |
| Colon ca.* SW620(SW480 met) | 1.9 |
| Colon ca. HT29 | 0.3 |
| Colon ca. HCT-116 | 0.0 |
| Colon ca. CaCo-2 | 0.2 |
| Colon ca. tissue(ODO3866) | 13.2 |
| Colon ca. HCC-2998 | 4.1 |
| Gastric ca.* (liver met) NCI-N87 | 1.5 |
| Bladder | 3.0 |
| Trachea | 3.7 |
| Kidney | 0.0 |
| Kidney (fetal) | 0.6 |
| Renal ca. 786-0 | 3.8 |
| Renal ca. A498 | 17.7 |
| Renal ca. RXF 393 | 12.5 |
| Renal ca. ACHN | 0.1 |
| Renal ca. UO-31 | 1.1 |
| Renal ca. TK-10 | 0.5 |
| Liver | 0.0 |
| Liver (fetal) | 0.0 |
| Liver ca. (hepatoblast) HepG2 | 0.2 |
| Lung | 1.4 |
| Lung (fetal) | 7.1 |
| Lung ca. (small cell) LX-1 | 0.2 |
| Lung ca. (small cell) NCI-H69 | 0.0 |
| Lung ca. (s. cell var.) SHP-77 | 0.9 |
| Lung ca. (large cell)NCI-H460 | 0.0 |
| Lung ca. (non-sm. cell) A549 | 0.0 |
| Lung ca. (non-s. cell) NCI-H23 | 0.4 |
| Lung ca. (non-s. cell) HOP-62 | 41.2 |
| Lung ca. (non-s. cl) NCI-H522 | 1.6 |
| Lung ca. (squam.) SW 900 | 0.0 |
| Lung ca. (squam.) NCI-H596 | 0.0 |
| Mammary gland | 15.9 |
| Breast ca.* (pl. ef) MCF-7 | 3.5 |
| Breast ca.* (pl. ef) MDA-MB-231 | 2.0 |
| Breast ca.* (pl. ef) T47D | 0.3 |
| Breast ca. BT-549 | 0.0 |
| Breast ca. MDA-N | 0.3 |
| Ovary | 3.8 |
| Ovarian ca. OVCAR-3 | 0.2 |
| Ovarian ca. OVCAR-4 | 0.2 |
| Ovarian ca. OVCAR-5 | 4.3 |
| Ovarian ca. OVCAR-8 | 0.8 |
| Ovarian ca. IGROV-1 | 0.0 |
| Ovarian ca.* (ascites) SK-OV-3 | 1.5 |
| Uterus | 0.6 |
| Placenta | 0.9 |
| Prostate | 3.0 |
| Prostate ca.* (bone met)PC-3 | 1.7 |
| Testis | 3.9 |
| Melanoma Hs688(A).T | 32.8 |
| Melanoma* (met) Hs688(B).T | 31.4 |
| Melanoma UACC-62 | 1.8 |
| Melanoma M14 | 0.0 |
| Melanoma LOX IMVI | 0.0 |
| Melanoma* (met) SK-MEL-5 | 0.0 |
| Adipose | 4.3 |

Column A - Rel. Exp. (%) Ag3048, Run 168017062

[1413] TABLE ATC
Panel 2D

| Tissue Name | A |
|---|---|
| Normal Colon | 4.7 |
| CC Well to Mod Diff (ODO3866) | 12.0 |
| CC Margin (ODO3866) | 1.5 |
| CC Gr.2 rectosigmoid (ODO3868) | 10.1 |
| CC Margin (ODO3868) | 0.8 |
| CC Mod Diff (ODO3920) | 8.4 |
| CC Margin (ODO3920) | 2.6 |
| CC Gr.2 ascend colon (ODO3921) | 13.6 |
| CC Margin (ODO3921) | 2.1 |
| CC from Partial Hepatectomy (ODO4309) Mets | 3.1 |
| Liver Margin (ODO4309) | 0.1 |
| Colon mets to lung (OD04451-01) | 3.3 |
| Lung Margin (OD04451-02) | 1.1 |
| Normal Prostate 6546-1 | 4.1 |
| Prostate Cancer (OD04410) | 19.8 |
| Prostate Margin (OD04410) | 4.5 |
| Prostate Cancer (OD04720-01) | 9.7 |
| Prostate Margin (OD04720-02) | 7.5 |
| Normal Lung 061010 | 3.3 |
| Lung Met to Muscle (ODO4286) | 24.5 |
| Muscle Margin (ODO4286) | 1.7 |
| Lung Malignant Cancer (OD03126) | 11.6 |
| Lung Margin (OD03126) | 3.1 |
| Lung Cancer (OD04404) | 22.2 |
| Lung Margin (OD04404) | 7.2 |
| Lung Cancer (OD04565) | 36.1 |
| Lung Margin (OD04565) | 2.0 |
| Lung Cancer (OD04237-01) | 12.6 |
| Lung Margin (OD04237-02) | 6.7 |
| Ocular Mel Met to Liver (ODO4310) | 0.0 |
| Liver Margin (ODO4310) | 0.4 |
| Melanoma Mets to Lung (OD04321) | 0.0 |
| Lung Margin (OD04321) | 1.7 |
| Normal Kidney | 0.8 |
| Kidney Ca, Nuclear grade 2 (OD04338) | 0.3 |
| Kidney Margin (OD04338) | 1.5 |
| Kidney Ca Nuclear grade 1/2 (OD04339) | 0.2 |
| Kidney Margin (OD04339) | 0.9 |
| Kidney Ca, Clear cell type (OD04340) | 0.4 |
| Kidney Margin (OD04340) | 1.0 |
| Kidney Ca, Nuclear grade 3 (OD04348) | 10.3 |
| Kidney Margin (OD04348) | 0.4 |
| Kidney Cancer (OD04622-01) | 34.4 |
| Kidney Margin (OD04622-03) | 0.2 |
| Kidney Cancer (OD04450-01) | 0.0 |
| Kidney Margin (OD04450-03) | 0.2 |
| Kidney Cancer 8120607 | 9.0 |
| Kidney Margin 8120608 | 0.5 |
| Kidney Cancer 8120613 | 0.1 |
| Kidney Margin 8120614 | 0.4 |
| Kidney Cancer 9010320 | 13.1 |
| Kidney Margin 9010321 | 0.9 |
| Normal Uterus | 0.5 |
| Uterus Cancer 064011 | 1.0 |
| Normal Thyroid | 3.3 |
| Thyroid Cancer 064010 | 0.7 |
| Thyroid Cancer A302152 | 4.5 |
| Thyroid Margin A302153 | 0.8 |
| Normal Breast | 20.0 |
| Breast Cancer (OD04566) | 6.5 |
| Breast Cancer (OD04590-01) | 10.4 |
| Breast Cancer Mets (OD04590-03) | 11.4 |
| Breast Cancer Metastasis (OD04655-05) | 1.0 |
| Breast Cancer 064006 | 23.2 |
| Breast Cancer 1024 | 25.7 |
| Breast Cancer 9100266 | 16.4 |
| Breast Margin 9100265 | 24.0 |
| Breast Cancer A209073 | 32.3 |
| Breast Margin A209073 | 33.2 |
| Normal Liver | 0.0 |
| Liver Cancer 064003 | 0.0 |
| Liver Cancer 1025 | 0.0 |
| Liver Cancer 1026 | 4.2 |
| Liver Cancer 6004-T | 0.0 |
| Liver Tissue 6004-N | 2.9 |
| Liver Cancer 6005-T | 2.2 |
| Liver Tissue 6005-N | 0.0 |
| Normal Bladder | 23.8 |
| Bladder Cancer 1023 | 11.8 |
| Bladder Cancer A302173 | 7.2 |
| Bladder Cancer (OD04718-01) | 12.7 |
| Bladder Normal Adjacent (OD04718-03) | 4.9 |
| Normal Ovary | 3.5 |
| Ovarian Cancer 064008 | 100.0 |
| Ovarian Cancer (OD04768-07) | 2.5 |
| Ovary Margin (OD04768-08) | 8.1 |
| Normal Stomach | 1.5 |
| Gastric Cancer 9060358 | 0.5 |
| Stomach Margin 9060359 | 0.8 |
| Gastric Cancer 9060395 | 7.5 |
| Stomach Margin 9060394 | 1.9 |
| Gastric Cancer 9060397 | 27.0 |
| Stomach Margin 9060396 | 1.5 |
| Gastric Cancer 064005 | 3.3 |

Column A - Rel. Exp. (%) Ag3048, Run 170858352

[1414] TABLE ATD
Panel 3D

| Tissue Name | A |
|---|---|
| Daoy- Medulloblastoma | 6.5 |
| TE671- Medulloblastoma | 0.0 |
| D283 Med- Medulloblastoma | 0.0 |
| PFSK-1- Primitive Neuroectodermal | 18.0 |
| XF-498- CNS | 1.4 |
| SNB-78- Glioma | 100.0 |
| SF-268- Glioblastoma | 0.0 |
| T98G- Glioblastoma | 24.1 |
| SK-N-SH- Neuroblastoma (metastasis) | 32.3 |
| SF-295- Glioblastoma | 2.0 |
| Cerebellum | 3.0 |
| Cerebellum | 4.2 |
| NCI-H292- Mucoepidermoid lung | 38.4 |
| carcinoma | |
| DMS-114- Small cell lung cancer | 1.7 |
| DMS-79- Small cell lung cancer | 3.0 |
| NCI-H146- Small cell lung cancer | 3.3 |
| NCI-H526- Small cell lung cancer | 0.0 |
| NCI-N417- Small cell lung cancer | 0.0 |
| NCI-H82- Small cell lung cancer | 0.0 |
| NCI-H157- Squamous cell lung cancer | 1.4 |
| (metastasis) | |
| NCI-H1155- Large cell lung cancer | 1.8 |
| NCI-H1299- Large cell lung cancer | 2.8 |
| NCI-H727- Lung carcinoid | 0.0 |
| NCI-UMC-11- Lung carcinoid | 0.0 |
| LX-1- Small cell lung cancer | 0.0 |
| Colo-205- Colon cancer | 7.3 |
| KM12- Colon cancer | 1.6 |
| KM20L2- Colon cancer | 0.0 |
| NCI-H716- Colon cancer | 0.0 |
| SW-48- Colon adenocarcinoma | 0.6 |
| SW1116- Colon adenocarcinoma | 0.8 |
| LS 174T- Colon adenocarcinoma | 2.5 |
| SW-948- Colon adenocarcinoma | 0.0 |
| SW-480- Colon adenocarcinoma | 2.7 |
| NCI-SNU-5- Gastric carcinoma | 1.6 |
| KATO III- Gastric carcinoma | 1.8 |
| NCI-SNU-16- Gastric carcinoma | 1.4 |
| NCI-SNU-1- Gastric carcinoma | 0.0 |
| RF-1- Gastric adenocarcinoma | 0.0 |
| RF-48- Gastric adenocarcinoma | 0.9 |
| MKN-45- Gastric carcinoma | 5.6 |
| NCI-N87- Gastric carcinoma | 2.3 |
| OVCAR-5- Ovarian carcinoma | 4.8 |
| RL95-2- Uterine carcinoma | 0.0 |
| HelaS3- Cervical adenocarcinoma | 0.0 |
| Ca Ski- Cervical epidermoid carcinoma | 0.0 |
| (metastasis) | |
| ES-2- Ovarian clear cell carcinoma | 0.0 |
| Ramos- Stimulated with PMA/ionomycin 6 h | 0.0 |
| Ramos- Stimulated with PMA/ionomycin 14 h | 0.0 |
| MEG-01- Chronic myelogenous leukemia | 2.6 |
| (megokaryoblast) | |
| Raji- Burkitt's lymphoma | 0.0 |
| Daudi- Burkitt's lymphoma | 0.0 |
| U266- B-cell plasmacytoma | 0.0 |
| CA46- Burkitt's lymphoma | 0.0 |
| RL- non-Hodgkin's B-cell lymphoma | 0.0 |
| JM1- pre-B-cell lymphoma | 0.0 |
| Jurkat- T cell leukemia | 0.0 |
| TF-1- Erythroleukemia | 2.3 |
| HUT 78- T-cell lymphoma | 0.0 |
| U937- Histiocytic lymphoma | 0.7 |
| KU-812- Myelogenous leukemia | 0.0 |
| 769-P- Clear cell renal carcinoma | 0.0 |
| Caki-2- Clear cell renal carcinoma | 2.5 |
| SW 839- Clear cell renal carcinoma | 0.0 |
| Rhabdoid kidney tumor | 2.3 |
| Hs766T- Pancreatic carcinoma (LN | 1.5 |
| metastasis) | |
| CAPAN-1- Pancreatic adenocarcinoma (liver | 0.0 |
| metastasis) | |
| SU86.86- Pancreatic carcinoma (liver | 0.8 |
| metastasis) | |
| BxPC-3- Pancreatic adenocarcinoma | 0.7 |
| HPAC- Pancreatic adenocarcinoma | 0.0 |
| MIA PaCa-2- Pancreatic carcinoma | 0.7 |
| CFPAC-1- Pancreatic ductal adenocarcinoma | 1.7 |
| PANC-1- Pancreatic epithelioid ductal | 6.7 |
| carcinoma | |
| T24- Bladder carcinma (transitional cell) | 6.1 |
| 5637- Bladder carcinoma | 2.1 |
| HT-1197- Bladder carcinoma | 1.7 |
| UM-UC-3- Bladder carcinma (transitional cell) | 0.7 |
| A204- Rhabdomyosarcoma | 5.4 |
| HT-1080- Fibrosarcoma | 11.7 |
| MG-63- Osteosarcoma | 0.0 |
| SK-LMS-1- Leiomyosarcoma (vulva) | 7.5 |
| SJRH30- Rhabdomyosarcoma (met to bone | 0.0 |
| marrow) | |
| A431- Epidermoid carcinoma | 5.1 |
| WM266-4- Melanoma | 16.6 |
| DU 145- Prostate carcinoma (brain | 0.0 |
| metastasis) | |
| MDA-MB-468- Breast adenocarcinoma | 2.5 |
| SCC-4- Squamous cell carcinoma of tongue | 0.0 |
| SCC-9- Squamous cell carcinoma of tongue | 0.0 |
| SCC-15- Squamous cell carcinoma of tongue | 0.6 |
| CAL 27- Squamous cell carcinoma of tongue | 0.5 |

Column A - Rel. Exp. (%) Ag3048, Run 172133336

[1415] TABLE ATE
Panel 4D

| Tissue Name | A |
|---|---|
| Secondary Th1 act | 0.4 |
| Secondary Th2 act | 0.0 |
| Secondary Tr1 act | 0.6 |
| Secondary Th1 rest | 0.0 |
| Secondary Th2 rest | 0.0 |
| Secondary Tr1 rest | 0.0 |
| Primary Th1 act | 0.0 |
| Primary Th2 act | 0.0 |
| Primary Tr1 act | 0.0 |
| Primary Th1 rest | 0.0 |
| Primary Th2 rest | 0.9 |
| Primary Tr1 rest | 0.6 |
| CD45RA CD4 lymphocyte act | 8.6 |
| CD45RO CD4 lymphocyte act | 0.0 |
| CD8 lymphocyte act | 0.0 |
| Secondary CD8 lymphocyte rest | 0.6 |
| Secondary CD8 lymphocyte act | 0.6 |
| CD4 lymphocyte none | 0.5 |
| 2ry Th1/Th2/Tr1_anti-CD95 CH11 | 1.3 |
| LAK cells rest | 0.0 |
| LAK cells IL-2 | 0.0 |
| LAK cells IL-2 + IL-12 | 0.0 |
| LAK cells IL-2 + IFN gamma | 0.0 |
| LAK cells IL-2 + IL-18 | 0.0 |
| LAK cells PMA/ionomycin | 0.0 |
| NK Cells IL-2 rest | 0.0 |
| Two Way MLR 3 day | 0.0 |
| Two Way MLR 5 day | 0.0 |
| Two Way MLR 7 day | 0.8 |
| PBMC rest | 0.8 |
| PBMC PWM | 0.0 |
| PBMC PHA-L | 2.2 |
| Ramos (B cell) none | 0.0 |
| Ramos (B cell) ionomycin | 0.8 |
| B lymphocytes PWM | 1.0 |
| B lymphocytes CD40L and IL-4 | 0.0 |
| EOL-1 dbcAMP | 0.0 |
| EOL-1 dbcAMP PMA/ionomycin | 0.0 |
| Dendritic cells none | 1.8 |
| Dendritic cells LPS | 1.7 |
| Dendritic cells anti-CD40 | 6.8 |
| Monocytes rest | 1.2 |
| Monocytes LPS | 0.0 |
| Macrophages rest | 1.9 |
| Macrophages LPS | 1.3 |
| HUVEC none | 0.0 |
| HUVEC starved | 2.9 |
| HUVEC IL-1beta | 0.0 |
| HUVEC IFN gamma | 1.9 |
| HUVEC TNF alpha + IFN gamma | 0.0 |
| HUVEC TNF alpha + IL4 | 1.2 |
| HUVEC IL-11 | 0.3 |
| Lung Microvascular EC none | 3.9 |
| Lung Microvascular EC TNFalpha + IL-1beta | 1.2 |
| Microvascular Dermal EC none | 0.6 |
| Microsvasular Dermal EC TNFalpha + IL-1beta | 1.4 |
| Bronchial epithelium TNFalpha + IL1beta | 28.7 |
| Small airway epithelium none | 39.2 |
| Small airway epithelium TNFalpha + IL-1beta | 84.7 |
| Coronery artery SMC rest | 17.9 |
| Coronery artery SMC TNFalpha + IL-1beta | 5.5 |
| Astrocytes rest | 6.1 |
| Astrocytes TNFalpha + IL-1beta | 5.5 |
| KU-812 (Basophil) rest | 0.7 |
| KU-812 (Basophil) PMA/ionomycin | 3.8 |
| CCD1106 (Keratinocytes) none | 79.0 |
| CCD1106 (Keratinocytes) TNFalpha + IL-1beta | 97.3 |
| Liver cirrhosis | 4.3 |
| Lupus kidney | 3.4 |
| NCI-H292 none | 87.1 |
| NCI-H292 IL-4 | 77.4 |
| NCI-H292 IL-9 | 82.9 |
| NCI-H292 IL-13 | 54.0 |
| NCI-H292 IFN gamma | 49.3 |
| HPAEC none | 0.7 |
| HPAEC TNF alpha + IL-1 beta | 0.0 |
| Lung fibroblast none | 35.1 |
| Lung fibroblast TNF alpha + IL-1 beta | 7.0 |
| Lung fibroblast IL-4 | 46.0 |
| Lung fibroblast IL-9 | 38.7 |
| Lung fibroblast IL-13 | 26.8 |
| Lung fibroblast IFN gamma | 68.8 |
| Dermal fibroblast CCD1070 rest | 100.0 |
| Dermal fibroblast CCD1070 TNF alpha | 59.9 |
| Dermal fibroblast CCD1070 IL-1 beta | 39.8 |
| Dermal fibroblast IFN gamma | 17.0 |
| Dermal fibroblast IL-4 | 30.6 |
| IBD Colitis 2 | 0.0 |
| IBD Crohn's | 0.7 |
| Colon | 2.0 |
| Lung | 36.1 |
| Thymus | 0.6 |
| Kidney | 1.7 |

Column A - Rel. Exp. (%) Ag3048, Run 164315038

[1416] Panel 1.3D Summary: Ag3048 The expression of this gene was highest in a sample derived from a brain cancer cell line (SF-539) (CT=29.4). There was substantial expression associated with samples derived from another brain cancer cell line, two melanoma cell lines and a lung cancer cell line. The expression of this gene is useful as a marker to distinguish SF-539 cells from other samples in the panel. Therapeutic modulation of this gene, through the use of small molecule drugs, protein therapeuitcs or antibodies is of benefit in treatment of brain or lung cancer or melanoma.

[1417] This gene, a leucine-rich repeat homolog, was expressed at low levels in the CNS. The leucine-rich repeat region proteins have been implicated in axonal guidance. This gene has therapeutic utility in the treatment of any CNS disorder involving neuronal loss, specfically by guiding/enhancing compensatory synaptogenesis and fiber outgrowth, including such clinical conditions as Alzheimer's, Parkinson's, or Huntington's diseases, stroke, head and spinal cord trauma, vascular dementia or spinocerebellar ataxia.

[1418] Panel 2D Summary: Ag3048 The expression of this gene was highest in a sample derived from an ovarian cancer (CT=29). There was substantial expression associated with lung cancer, prostate cancer and colon cancer samples. Of note is the differential expression in the lung, colon and prostate cancer samples compared to their respective normal adjacent tissue. The expression of this gene is useful as a marker to distinguish this ovarian cancer sample from other samples in the panel. The expression of this gene or its protein product is useful as a marker to distinguish colon, prostate or lung cancer samples from their normal adjacent tissue. Therapeutic modulation of this gene or its protein product, through the use of small molecule drugs, protein therapeutics or antibodies is benefical in the treatment of ovarian, lung, prostate or colon cancer.

[1419] Panel 3D Summary: Ag3048 The expression of this gene was highest in a sample derived from a brain cancer cell line (SNB-78) (CT=30.2). There was substantial expression associated with other brain cancer cell line samples and a lung cancer cell line sample. The expression of this gene is useful as a marker to distinguish SNB-78 cells from other samples in the panel. Therapeutic modulation of this gene or its protein product, through the use of small molecule drugs, protein therapeutics or antibodies is useftil in the treatment of brain or lung cancer.

[1420] Panel 4D Summary: Ag3048 This gene, a secreted leucine-rich repeat (LRR) protein, was expressed selectively at moderate levels (CT range 29-31) in several resting and cytokine-activated epithelial and connective tissue cells of lung and skin. This gene product is useful as a therapeutic protein as well as a target for therapeutic antibodies and small molecules, for the reduction or elimination of the symptoms in patients with chronic obstructive pulmonary disease, asthma, emphysema, or psoriasis.

[1421] AU. CG56914-01: Thrombospondin

[1422] Expression of gene CG56914-01 was assessed using the primer-probe sets Ag3108 and Ag3899, described in Tables AUA and AUB. Results of the RTQ-PCR runs are shown in Tables AUC, AUD, AUE, AUF, AUG.

TABLE AUA
Probe Name Ag3108

| | | | | SEQ |
|---|---|---|---|---|
| | | | Start | ID |
| Primers | Sequences | Length | Position | No |
| Forward | 5′-attccattgcccaaattaaca-3′ | 21 | 703 | 1513 |
| Probe | TET-5′-ccttcaataacaatattattccagccca-3′- | 28 | 728 | 1514 |
| | TAMRA | | | |
| Reverse | 5′-actgtgtccattcacactgtca-3′ | 22 | 759 | 1515 |

[1423] TABLE AUB
Probe Name Ag3899

| | | | | SEQ |
|---|---|---|---|---|
| | | | Start | ID |
| Primers | Sequences | Length | Position | No |
| Forward | 5′-ccattgcccaaattaacatg-3′ | 20 | 706 | 1516 |
| Probe | TET-5′-ccttcaataacaatattattccagccca-3′- | 28 | 728 | 1517 |
| | TAMRA | | | |
| Reverse | 5′-actgtgtccattcacactgtca-3′ | 22 | 759 | 1518 |

[1424] TABLE AUC
General_screening_panel_v_1.4

| Tissue Name | A |
|---|---|
| Adipose | 1.0 |
| Melanoma* Hs688(A).T | 33.9 |
| Melanoma* Hs688(B).T | 8.4 |
| Melanoma* M14 | 12.9 |
| Melanoma* LOXIMVI | 0.1 |
| Melanoma* SK-MEL-5 | 58.6 |
| Squamous cell carcinoma SCC-4 | 0.0 |
| Testis Pool | 0.6 |
| Prostate ca.* (bone met) PC-3 | 0.2 |
| Prostate Pool | 0.4 |
| Placenta | 0.1 |
| Uterus Pool | 0.1 |
| Ovarian ca. OVCAR-3 | 0.4 |
| Ovarian ca. SK-OV-3 | 0.1 |
| Ovarian ca. OVCAR-4 | 0.1 |
| Ovarian ca. OVCAR-5 | 0.2 |
| Ovarian ca. IGROV-1 | 0.1 |
| Ovarian ca. OVCAR-8 | 0.1 |
| Ovary | 3.6 |
| Breast ca. MCF-7 | 0.5 |
| Breast ca. MDA-MB-231 | 0.1 |
| Breast ca. BT 549 | 2.6 |
| Breast ca. T47D | 0.2 |
| Breast ca. MDA-N | 2.2 |
| Breast Pool | 0.1 |
| Trachea | 1.0 |
| Lung | 0.0 |
| Fetal Lung | 5.6 |
| Lung ca. NCI-N417 | 0.0 |
| Lung ca. LX-1 | 0.0 |
| Lung ca. NCI-H146 | 0.0 |
| Lung ca. SHP-77 | 0.0 |
| Lung ca. A549 | 0.0 |
| Lung ca. NCI-H526 | 0.0 |
| Lung ca. NCI-H23 | 0.3 |
| Lung ca. NCI-H460 | 0.1 |
| Lung ca. HOP-62 | 0.6 |
| Lung ca. NCI-H522 | 0.0 |
| Liver | 0.0 |
| Fetal Liver | 1.3 |
| Liver ca. HepG2 | 0.0 |
| Kidney Pool | 0.2 |
| Fetal Kidney | 1.4 |
| Renal ca. 786-0 | 0.2 |
| Renal ca. A498 | 0.0 |
| Renal ca. ACHN | 0.0 |
| Renal ca. UO-31 | 4.6 |
| Renal ca. TK-10 | 0.0 |
| Bladder | 0.6 |
| Gastric ca. (liver met.) NCI-N87 | 0.0 |
| Gastric ca. KATO III | 0.0 |
| Colon ca. SW-948 | 0.0 |
| Colon ca. SW480 | 0.0 |
| Colon ca.* (SW480 met) SW620 | 0.0 |
| Colon ca. HT29 | 0.0 |
| Colon ca. HCT-116 | 0.0 |
| Colon ca. CaCo-2 | 0.0 |
| Colon cancer tissue | 1.2 |
| Colon ca. SW1116 | 0.0 |
| Colon ca. Colo-205 | 0.0 |
| Colon ca. SW-48 | 0.0 |
| Colon Pool | 0.2 |
| Small Intestine Pool | 0.2 |
| Stomach Pool | 0.1 |
| Bone Marrow Pool | 0.2 |
| Fetal Heart | 1.0 |
| Heart Pool | 0.3 |
| Lymph Node Pool | 0.4 |
| Fetal Skeletal Muscle | 0.1 |
| Skeletal Muscle Pool | 0.2 |
| Spleen Pool | 1.1 |
| Thymus Pool | 0.6 |
| CNS cancer (glio/astro) U87-MG | 0.8 |
| CNS cancer (glio/astro) U-118-MG | 3.0 |
| CNS cancer (neuro; met) SK-N-AS | 0.0 |
| CNS cancer (astro) SF-539 | 18.8 |
| CNS cancer (astro) SNB-75 | 100.0 |
| CNS cancer (glio) SNB-19 | 0.0 |
| CNS cancer (glio) SF-295 | 0.8 |
| Brain (Amygdala) Pool | 0.0 |
| Brain (cerebellum) | 0.0 |
| Brain (fetal) | 0.0 |
| Brain (Hippocampus) Pool | 0.0 |
| Cerebral Cortex Pool | 0.0 |
| Brain (Substantia nigra) Pool | 0.0 |
| Brain (Thalamus) Pool | 0.0 |
| Brain (whole) | 0.0 |
| Spinal Cord Pool | 0.1 |
| Adrenal Gland | 0.1 |
| Pituitary gland Pool | 0.1 |
| Salivary Gland | 0.2 |
| Thyroid (female) | 0.1 |
| Pancreatic ca. CAPAN2 | 0.0 |
| Pancreas Pool | 0.4 |

Column A - Rel. Exp. (%) Ag3899, Run 219166475

[1425] TABLE AUD
HASS Panel v1.0

| Tissue Name | A |
|---|---|
| MCF-7 C1 | 43.8 |
| MCF-7 C2 | 51.4 |
| MCF-7 C3 | 11.2 |
| MCF-7 C4 | 72.2 |
| MCF-7 C5 | 11.0 |
| MCF-7 C6 | 43.8 |
| MCF-7 C7 | 18.8 |
| MCF-7 C9 | 17.3 |
| MCF-7 C10 | 100.0 |
| MCF-7 C11 | 3.2 |
| MCF-7 C12 | 22.1 |
| MCF-7 C13 | 26.4 |
| MCF-7 C15 | 10.4 |
| MCF-7 C16 | 45.1 |
| MCF-7 C17 | 22.2 |
| T24 D1 | 0.0 |
| T24 D2 | 0.0 |
| T24 D3 | 0.0 |
| T24 D4 | 0.0 |
| T24 D5 | 0.1 |
| T24 D6 | 0.0 |
| T24 D7 | 0.0 |
| T24 D9 | 0.0 |
| T24 D10 | 0.0 |
| T24 D11 | 0.0 |
| T24 D12 | 0.0 |
| T24 D13 | 0.0 |
| T24 D15 | 0.0 |
| T24 D16 | 0.0 |
| T24 D17 | 0.0 |
| CAPaN B1 | 0.0 |
| CAPaN B2 | 0.0 |
| CAPaN B3 | 0.0 |
| CAPaN B4 | 0.0 |
| CAPaN B5 | 0.0 |
| CAPaN B6 | 0.0 |
| CAPaN B7 | 0.0 |
| CAPaN B8 | 0.0 |
| CAPaN B9 | 0.0 |
| CAPaN B10 | 0.0 |
| CAPaN B11 | 0.0 |
| CAPaN B12 | 0.0 |
| CAPaN B13 | 0.0 |
| CAPaN B14 | 0.0 |
| CAPaN B15 | 0.0 |
| CAPaN B16 | 0.0 |
| CAPaN B17 | 0.0 |
| U87-MG F1 (B) | 0.2 |
| U87-MG F2 | 0.1 |
| U87-MG F3 | 0.8 |
| U87-MG F4 | 0.4 |
| U87-MG F5 | 3.5 |
| U87-MG F6 | 1.5 |
| U87-MG F7 | 0.6 |
| U87-MG F8 | 1.6 |
| U87-MG F9 | 0.0 |
| U87-MG F10 | 2.2 |
| U87-MG F11 | 3.1 |
| U87-MG F12 | 1.8 |
| U87-MG F13 | 0.7 |
| U87-MG F14 | 1.1 |
| U87-MG F15 | 0.7 |
| U87-MG F16 | 1.4 |
| U87-MG F17 | 1.8 |
| LnCAP A1 | 0.0 |
| LnCAP A2 | 0.0 |
| LnCAP A3 | 0.0 |
| LnCAP A4 | 0.0 |
| LnCAP A5 | 0.0 |
| LnCAP A6 | 0.0 |
| LnCAP A7 | 0.0 |
| LnCAP A8 | 0.0 |
| LnCAP A9 | 0.0 |
| LnCAP A10 | 0.0 |
| LnCAP A11 | 0.0 |
| LnCAP A12 | 0.0 |
| LnCAP A13 | 0.0 |
| LnCAP A14 | 0.0 |
| LnCAP A15 | 0.0 |
| LnCAP A16 | 0.0 |
| LnCAP A17 | 0.0 |
| Primary Astrocytes | 4.9 |
| Primary Renal Proximal Tubule Epithelial cell A2 | 0.3 |
| Primary melanocytes A5 | 0.4 |
| 126443 - 341 medullo | 0.0 |
| 126444 - 487 medullo | 0.0 |
| 126445 - 425 medullo | 2.7 |
| 126446 - 690 medullo | 0.5 |
| 126447 - 54 adult glioma | 0.2 |
| 126448 - 245 adult glioma | 38.4 |
| 126449 - 317 adult glioma | 0.0 |
| 126450 - 212 glioma | 0.0 |
| 126451 - 456 glioma | 0.3 |

Column A - Rel. Exp. (%) Ag3108, Run 268623842

[1426] TABLE AUE
Panel 2.1

| Tissue Name | A |
|---|---|
| Normal Colon | 0.7 |
| Colon cancer (OD06064) | 1.3 |
| Colon cancer margin (OD06064) | 0.0 |
| Colon cancer (OD06159) | 0.5 |
| Colon cancer margin (OD06159) | 1.8 |
| Colon cancer (OD06298-08) | 1.6 |
| Colon cancer margin (OD06298-018) | 0.3 |
| Colon Cancer Gr.2 ascend colon (ODO3921) | 1.6 |
| Colon Cancer margin (ODO3921) | 4.6 |
| Colon cancer metastasis (OD06104) | 2.1 |
| Lung margin (OD06104) | 2.8 |
| Colon mets to lung (OD04451-01) | 4.5 |
| Lung margin (OD04451-02) | 10.7 |
| Normal Prostate | 0.8 |
| Prostate Cancer (OD04410) | 0.7 |
| Prostate margin (OD04410) | 13.6 |
| Normal Lung | 34.2 |
| Invasive poor diff. lung adeno 1 (ODO4945-01) | 9.2 |
| Lung margin (ODO4945-03) | 6.2 |
| Lung Malignant Cancer (OD03126) | 11.1 |
| Lung margin (OD03126) | 34.9 |
| Lung Cancer (OD05014A) | 25.2 |
| Lung margin (OD05014B) | 5.6 |
| Lung Cancer (OD04237-01) | 1.5 |
| Lung margin (OD04237-02) | 63.3 |
| Ocular Mel Met to Liver (ODO4310) | 24.3 |
| Liver margin (ODO4310) | 7.6 |
| Melanoma Mets to Lung (OD04321) | 100.0 |
| Lung margin (OD04321) | 20.2 |
| Normal Kidney | 3.6 |
| Kidney Ca, Nuclear grade 2 (OD04338) | 6.9 |
| Kidney margin (OD04338) | 2.1 |
| Kidney Ca Nuclear grade 1/2 (OD04339) | 1.1 |
| Kidney margin (OD04339) | 0.2 |
| Kidney Ca, Clear cell type (OD04340) | 8.8 |
| Kidney margin (OD04340) | 4.5 |
| Kidney Ca, Nuclear grade 3 (OD04348) | 1.3 |
| Kidney margin (OD04348) | 1.8 |
| Kidney Cancer (OD04450-01) | 0.6 |
| Kidney margin (OD04450-03) | 4.6 |
| Kidney Cancer 8120613 | 0.3 |
| Kidney margin 8120614 | 0.5 |
| Kidney Cancer 9010320 | 0.9 |
| Kidney margin 9010321 | 9.5 |
| Kidney Cancer 8120607 | 0.6 |
| Kidney margin 8120608 | 0.7 |
| Normal Uterus | 1.7 |
| Uterus Cancer | 1.2 |
| Normal Thyroid | 0.1 |
| Thyroid Cancer | 0.9 |
| Thyroid Cancer A302152 | 1.2 |
| Thyroid margin A302153 | 0.9 |
| Normal Breast | 12.4 |
| Breast Cancer | 0.9 |
| Breast Cancer | 4.3 |
| Breast Cancer (OD04590-01) | 0.6 |
| Breast Cancer Mets (OD04590-03) | 6.6 |
| Breast Cancer Metastasis | 2.1 |
| Breast Cancer | 3.3 |
| Breast Cancer 9100266 | 4.6 |
| Breast margin 9100265 | 1.5 |
| Breast Cancer A209073 | 2.5 |
| Breast margin A2090734 | 9.9 |
| Normal Liver | 4.2 |
| Liver Cancer 1026 | 1.8 |
| Liver Cancer 1025 | 6.1 |
| Liver Cancer 6004-T | 3.5 |
| Liver Tissue 6004-N | 0.8 |
| Liver Cancer 6005-T | 14.2 |
| Liver Tissue 6005-N | 14.8 |
| Liver Cancer | 1.4 |
| Normal Bladder | 1.7 |
| Bladder Cancer | 1.8 |
| Bladder Cancer | 2.4 |
| Normal Ovary | 7.7 |
| Ovarian Cancer | 13.6 |
| Ovarian cancer (OD06145) | 0.6 |
| Ovarian cancer margin (OD06145) | 2.2 |
| Normal Stomach | 4.1 |
| Gastric Cancer 9060397 | 1.2 |
| Stomach margin 9060396 | 0.5 |
| Gastric Cancer 9060395 | 7.4 |
| Stomach margin 9060394 | 2.6 |
| Gastric Cancer 064005 | 4.3 |

Column A - Rel. Exp. (%) Ag3108, Run 170686074

[1427] TABLE AUF
Panel 4.1D

| Tissue Name | A |
|---|---|
| Secondary Th1 act | 0.0 |
| Secondary Th2 act | 0.0 |
| Secondary Tr1 act | 0.0 |
| Secondary Th1 rest | 0.0 |
| Secondary Th2 rest | 0.0 |
| Secondary Tr1 rest | 0.0 |
| Primary Th1 act | 0.0 |
| Primary Th2 act | 0.0 |
| Primary Tr1 act | 0.0 |
| Primary Th1 rest | 0.0 |
| Primary Th2 rest | 0.0 |
| Primary Tr1 rest | 0.0 |
| CD45RA CD4 lymphocyte act | 0.3 |
| CD45RO CD4 lymphocyte act | 0.0 |
| CD8 lymphocyte act | 0.0 |
| Secondary CD8 lymphocyte rest | 0.0 |
| Secondary CD8 lymphocyte act | 0.0 |
| CD4 lymphocyte none | 0.0 |
| 2ry Th1/Th2/Tr1_anti-CD95 CH11 | 0.0 |
| LAK cells rest | 0.0 |
| LAK cells IL-2 | 0.0 |
| LAK cells IL-2 + IL-12 | 0.0 |
| LAK cells IL-2 + IFN gamma | 0.0 |
| LAK cells IL-2 + IL-18 | 0.0 |
| LAK cells PMA/ionomycin | 0.0 |
| NK Cells IL-2 rest | 0.0 |
| Two Way MLR 3 day | 0.0 |
| Two Way MLR 5 day | 0.0 |
| Two Way MLR 7 day | 0.0 |
| PBMC rest | 0.0 |
| PBMC PWM | 0.0 |
| PBMC PHA-L | 0.0 |
| Ramos (B cell) none | 0.0 |
| Ramos (B cell) ionomycin | 0.0 |
| B lymphocytes PWM | 0.0 |
| B lymphocytes CD40L and IL-4 | 0.0 |
| EOL-1 dbcAMP | 0.0 |
| EOL-1 dbcAMP PMA/ionomycin | 0.0 |
| Dendritic cells none | 0.0 |
| Dendritic cells LPS | 0.0 |
| Dendritic cells anti-CD40 | 0.0 |
| Monocytes rest | 0.0 |
| Monocytes LPS | 0.0 |
| Macrophages rest | 0.0 |
| Macrophages LPS | 0.0 |
| HUVEC none | 3.2 |
| HUVEC starved | 8.1 |
| HUVEC IL-1beta | 4.1 |
| HUVEC IFN gamma | 15.8 |
| HUVEC TNF alpha + IFN gamma | 1.0 |
| HUVEC TNF alpha + IL4 | 2.9 |
| HUVEC IL-11 | 4.2 |
| Lung Microvascular EC none | 1.5 |
| Lung Microvascular EC TNFalpha + IL-1beta | 0.0 |
| Microvascular Dermal EC none | 0.0 |
| Microsvasular Dermal EC TNFalpha + IL-1beta | 0.0 |
| Bronchial epithelium TNFalpha + IL1beta | 0.4 |
| Small airway epithelium none | 0.0 |
| Small airway epithelium TNFalpha + IL-1beta | 0.0 |
| Coronery artery SMC rest | 8.5 |
| Coronery artery SMC TNFalpha + IL-1beta | 1.8 |
| Astrocytes rest | 0.0 |
| Astrocytes TNFalpha + IL-1beta | 0.5 |
| KU-812 (Basophil) rest | 1.0 |
| KU-812 (Basophil) PMA/ionomycin | 8.0 |
| CCD1106 (Keratinocytes) none | 0.0 |
| CCD1106 (Keratinocytes) TNFalpha + IL-1beta | 0.0 |
| Liver cirrhosis | 7.6 |
| NCI-H292 none | 0.0 |
| NCI-H292 IL-4 | 0.0 |
| NCI-H292 IL-9 | 0.0 |
| NCI-H292 IL-13 | 0.0 |
| NCI-H292 IFN gamma | 0.0 |
| HPAEC none | 17.9 |
| HPAEC TNF alpha + IL-1 beta | 11.3 |
| Lung fibroblast none | 3.4 |
| Lung fibroblast TNF alpha + IL-1 beta | 2.7 |
| Lung fibroblast IL-4 | 4.4 |
| Lung fibroblast IL-9 | 2.2 |
| Lung fibroblast IL-13 | 3.9 |
| Lung fibroblast IFN gamma | 7.2 |
| Dermal fibroblast CCD1070 rest | 5.5 |
| Dermal fibroblast CCD1070 TNF alpha | 1.9 |
| Dermal fibroblast CCD1070 IL-1 beta | 1.5 |
| Dermal fibroblast IFN gamma | 29.5 |
| Dermal fibroblast IL-4 | 75.8 |
| Dermal Fibroblasts rest | 21.5 |
| Neutrophils TNFa + LPS | 0.0 |
| Neutrophils rest | 0.0 |
| Colon | 2.0 |
| Lung | 100.0 |
| Thymus | 0.5 |
| Kidney | 3.4 |

Column A - Rel. Exp. (%) Ag3899, Run 170120166

[1428] TABLE AUG
general oncology screening panel_v_2.4

| Tissue Name | A | B |
|---|---|---|
| Colon cancer 1 | 13.9 | 10.8 |
| Colon NAT 1 | 7.3 | 4.5 |
| Colon cancer 2 | 2.3 | 5.2 |
| Colon NAT 2 | 1.1 | 0.8 |
| Colon cancer 3 | 14.1 | 11.7 |
| Colon NAT 3 | 16.6 | 4.2 |
| Colon malignant cancer 4 | 14.1 | 9.9 |
| Colon NAT 4 | 0.3 | 0.3 |
| Lung cancer 1 | 8.2 | 18.3 |
| Lung NAT 1 | 0.0 | 0.4 |
| Lung cancer 2 | 96.6 | 47.0 |
| Lung NAT 2 | 1.4 | 2.4 |
| Squamous cell carcinoma 3 | 50.0 | 22.2 |
| Lung NAT 3 | 0.6 | 0.7 |
| Metastatic melanoma 1 | 1.5 | 3.7 |
| Melanoma 2 | 0.0 | 0.2 |
| Melanoma 3 | 0.0 | 0.5 |
| Metastatic melanoma 4 | 100.0 | 100.0 |
| Metastatic melanoma 5 | 95.3 | 47.3 |
| Bladder cancer 1 | 0.0 | 0.0 |
| Bladder NAT 1 | 0.0 | 0.0 |
| Bladder cancer 2 | 0.0 | 0.2 |
| Bladder NAT 2 | 0.0 | 0.0 |
| Bladder NAT 3 | 0.0 | 0.0 |
| Bladder NAT 4 | 1.3 | 1.1 |
| Prostate adenocarcinoma 1 | 1.2 | 7.2 |
| Prostate adenocarcinoma 2 | 0.3 | 0.9 |
| Prostate adenocarcinoma 3 | 1.3 | 0.8 |
| Prostate adenocarcinoma 4 | 11.8 | 5.8 |
| Prostate NAT 5 | 5.7 | 1.7 |
| Prostate adenocarcinoma 6 | 0.3 | 0.8 |
| Prostate adenocarcinoma 7 | 1.0 | 1.6 |
| Prostate adenocarcinoma 8 | 0.4 | 0.7 |
| Prostate adenocarcinoma 9 | 23.3 | 41.5 |
| Prostate NAT 10 | 0.0 | 0.0 |
| Kidney cancer 1 | 48.3 | 7.0 |
| Kidney NAT 1 | 4.5 | 1.8 |
| Kidney cancer 2 | 40.6 | 29.5 |
| Kidney NAT 2 | 9.0 | 11.3 |
| Kidney cancer 3 | 25.3 | 11.5 |
| Kidney NAT 3 | 1.5 | 2.7 |
| Kidney cancer 4 | 40.1 | 11.2 |
| Kidney NAT 4 | 2.3 | 1.3 |

Column A - Rel. Exp. (%) Ag3108, Run 259737911
Column B - Rel. Exp. (%) Ag3899, Run 268143635

[1429] General_screening_panel_v1.4 Summary: Ag3899 Highest expression of this gene was detected in an astrocytoma SNB-75 cell line (CT=23.8). High levels of expression of this gene are also seen in a cluster of brain and melanoma cancer cell lines. Expression of this gene is useful as a marker to distinguish these samples from other samples in the panel and also as marker for detection of these cancers. Therapeutic modulation of the activity of this gene or its protein product, through the use of small molecule drugs, protein therapeutics or antibodies, is beneficial in the treatment of these cancers.

[1430] Among tissues with metabolic or endocrine function, this gene was expressed at low to moderate levels in pancreas, adipose, adrenal gland, thyroid, pituitary gland, skeletal muscle, heart, liver and the gastrointestinal tract. Therapeutic modulation of the activity of this gene or its gene product is useful in the treatment of endocrine/metabolically related diseases, such as obesity and diabetes.

[1431] This gene was expressed at much higher levels in fetal liver (CT=30) and lung (CTs=27.9) when compared to corresponding adult liver (CT=35) and lung (CT=36.8). Expression of this gene or ists protein product is of use as a marker to distinguish these fetal tissues from the corresponding adult tissues.

[1432] HASS Panel v1.0 Summary: Ag3108 This gene was expressed by MCF-7 cells and a glioma sample on this panel. Expression of this gene was serum-dependent in MCF-7 cells. Expression is regulated by cytokines and extracellular molecules found in serum. Modulation of this gene, through the use of small molecule drugs, protein therapeutics or antibodies is of benefit in the treatment of glioma.

[1433] Panel 2.1 Summary: Ag3108 Highest expression of this gene was detected in a melanoma metastasis sample (CT=29). Expression of this gene was higher in normal liver when compared to adjancent cancerous tissue and in metastasic breast cancer tissue (OD04590-03) (CT=33) as compared to primary breast cancer (OD04590-01) (CT=36.7). Expression of this gene is useful as a marker for cancer metastasis. Therapeutic modulation of the expression or function of this gene or gene product is useful in the treatment of lung, breast and melanoma cancers.

[1434] Panel 4.1D Summary: Ag3108 Highest expression of this gene was seen in lung (CT=28.6). Significant expression of this gene was also seen in HPAEC cells, HUVEC cells, lung fibroblast, TNFalpha+IL1 beta treated bronchial epithelium and dermal fibroblasts. Antibody, protein therapeutics or small molecule therapies designed with the protein encoded for by this gene are important in the treatment of inflammatory lung disorders such as chronic obstructive pulmonary disease, asthma, allergy and emphysema and skin disorders including psoriasis.

[1435] In addition, low expression of this gene was also seen in kidney and colon. Antibody, protein therapeutics or small molecule therapies designed with the protein encoded by this gene are important in the treatment of inflammatory or autoimmune diseases that affect the kidney, including lupus and glomerulonephritis, as well as, inflammatory bowel diseases such as Crohns.

[1436] Expression of this gene was stimulated in PMA/ionomycin treated basophils (CT=30) as compared to resting basophils (CT=36). Basophils release histamines and other biological modifiers in reponse to allergens and play an important role in the pathology of asthma and hypersensitivity reactions. Therapeutics designed against the protein encoded by this gene are useful for the reduction or inhibition of inflammation by blocking basophil function in these diseases. These cells are a reasonable model for the inflammatory cells that take part in various inflammatory lung and bowel diseases, such as asthma, Crohn's disease, and ulcerative colitis. Therapeutics that modulate the function of this gene or gene product are useful for the reduction or elimination of the symptoms of patients suffering from asthma, Crohn's disease, and ulcerative colitis.

[1437] general oncology screening panel_V_{—}2.4 Summary: Ag3108/Ag3960 Highest expression of this gene was seen in a metastatic melanoma sample (CTs=30-31). Expression of this gene was higher in kidney and lung cancer when compared to normal adjacent tissue samples. Expression of this gene is useful as a marker to differentiate these samples from other samples on this panel and as a marker for these cancers. Therapeutic modulation of the expression or function of this gene or gene product is of use in the treatment of these cancers.

[1438] AV. CG56959-02: Synaptotagmin X

[1439] Expression of full-length physical clone CG56959-02 was assessed using the primer-probe set Ag1557, described in Table AVA. Results of the RTQ-PCR runs are shown in Tables AVB, AVC, AVD and AVE.

TABLE AVA
Probe Name Ag1557

| | | | | SEQ |
|---|---|---|---|---|
| | | | Start | ID |
| Primers | Sequences | Length | Position | No |
| Forward | 5′-gcgtgcacagaaagactttaaa-3′ | 22 | 698 | 1519 |
| Probe | TET-5′-tgatgaaacttttcaatttcctgtagca-3′- | 28 | 661 | 1520 |
| | TAMRA | | | |
| Reverse | 5′-tgaaatgtagttttcggttgct-3′ | 22 | 627 | 1521 |

[1440] TABLE AVB
AI_comprehensive panel_v1.0

| Tissue Name | A |
|---|---|
| 110967 COPD-F | 0.0 |
| 110980 COPD-F | 0.0 |
| 110968 COPD-M | 0.0 |
| 110977 COPD-M | 0.0 |
| 110989 Emphysema-F | 0.0 |
| 110992 Emphysema-F | 0.0 |
| 110993 Emphysema-F | 0.0 |
| 110994 Emphysema-F | 0.0 |
| 110995 Emphysema-F | 0.8 |
| 110996 Emphysema-F | 0.0 |
| 110997 Asthma-M | 2.6 |
| 111001 Asthma-F | 0.0 |
| 111002 Asthma-F | 0.0 |
| 111003 Atopic Asthma-F | 0.0 |
| 111004 Atopic Asthma-F | 0.0 |
| 111005 Atopic Asthma-F | 0.0 |
| 111006 Atopic Asthma-F | 0.0 |
| 111417 Allergy-M | 0.0 |
| 112347 Allergy-M | 2.4 |
| 112349 Normal Lung-F | 2.4 |
| 112357 Normal Lung-F | 2.1 |
| 112354 Normal Lung-M | 0.0 |
| 112374 Crohns-F | 23.8 |
| 112389 Match Control Crohns-F | 7.0 |
| 112375 Crohns-F | 32.1 |
| 112732 Match Control Crohns-F | 0.0 |
| 112725 Crohns-M | 11.7 |
| 112387 Match Control Crohns-M | 0.0 |
| 112378 Crohns-M | 5.0 |
| 112390 Match Control Crohns-M | 1.3 |
| 112726 Crohns-M | 26.1 |
| 112731 Match Control Crohns-M | 67.8 |
| 112380 Ulcer Col-F | 0.0 |
| 112734 Match Control Ulcer Col-F | 0.0 |
| 112384 Ulcer Col-F | 1.1 |
| 112737 Match Control Ulcer Col-F | 12.9 |
| 112386 Ulcer Col-F | 0.0 |
| 112738 Match Control Ulcer Col-F | 0.9 |
| 112381 Ulcer Col-M | 9.4 |
| 112735 Match Control Ulcer Col-M | 62.4 |
| 112382 Ulcer Col-M | 4.5 |
| 112394 Match Control Ulcer Col-M | 0.0 |
| 112383 Ulcer Col-M | 0.7 |
| 112736 Match Control Ulcer Col-M | 2.1 |
| 112423 Psoriasis-F | 1.6 |
| 112427 Match Control Psoriasis-F | 2.7 |
| 112418 Psoriasis-M | 0.0 |
| 112723 Match Control Psoriasis-M | 4.4 |
| 112419 Psoriasis-M | 5.8 |
| 112424 Match Control Psoriasis-M | 2.3 |
| 112420 Psoriasis-M | 1.3 |
| 112425 Match Control Psoriasis-M | 0.0 |
| 104689 (MF) OA Bone-Backus | 0.0 |
| 104690 (MF) Adj “Normal” Bone-Backus | 0.8 |
| 104691 (MF) OA Synovium-Backus | 0.0 |
| 104692 (BA) OA Cartilage-Backus | 0.0 |
| 104694 (BA) OA Bone-Backus | 0.8 |
| 104695 (BA) Adj “Normal” Bone-Backus | 0.0 |
| 104696 (BA) OA Synovium-Backus | 1.1 |
| 104700 (SS) OA Bone-Backus | 0.0 |
| 104701 (SS) Adj “Normal” Bone-Backus | 0.0 |
| 104702 (SS) OA Synovium-Backus | 0.9 |
| 117093 OA Cartilage Rep7 | 0.0 |
| 112672 OA Bone5 | 9.4 |
| 112673 OA Synovium5 | 0.9 |
| 112674 OA Synovial Fluid cells5 | 2.8 |
| 117100 OA Cartilage Rep14 | 0.0 |
| 112756 OA Bone9 | 100.0 |
| 112757 OA Synovium9 | 0.0 |
| 112758 OA Synovial Fluid Cells9 | 0.0 |
| 117125 RA Cartilage Rep2 | 0.0 |
| 113492 Bone2 RA | 0.0 |
| 113493 Synovium2 RA | 0.0 |
| 113494 Syn Fluid Cells RA | 0.6 |
| 113499 Cartilage4 RA | 0.0 |
| 113500 Bone4 RA | 0.0 |
| 113501 Synovium4 RA | 1.6 |
| 113502 Syn Fluid Cells4 RA | 0.0 |
| 113495 Cartilage3 RA | 1.6 |
| 113496 Bone3 RA | 0.0 |
| 113497 Synovium3 RA | 2.1 |
| 113498 Syn Fluid Cells3 RA | 0.0 |
| 117106 Normal Cartilage Rep20 | 0.0 |
| 113663 Bone3 Normal | 6.5 |
| 113664 Synovium3 Normal | 1.4 |
| 113665 Syn Fluid Cells3 Normal | 5.8 |
| 117107 Normal Cartilage Rep22 | 0.0 |
| 113667 Bone4 Normal | 0.0 |
| 113668 Synovium4 Normal | 0.0 |
| 113669 Syn Fluid Cells4 Normal | 0.0 |

Column A - Rel. Exp. (%) Ag1557, Run 257809393

[1441] TABLE AVC
Panel 1.3D

| Tissue Name | A | B |
|---|---|---|
| Liver adenocarcinoma | 0.0 | 0.0 |
| Pancreas | 0.0 | 4.9 |
| Pancreatic ca. CAPAN 2 | 0.0 | 0.0 |
| Adrenal gland | 2.0 | 0.0 |
| Thyroid | 0.0 | 0.0 |
| Salivary gland | 0.0 | 0.0 |
| Pituitary gland | 68.3 | 60.7 |
| Brain (fetal) | 0.0 | 0.0 |
| Brain (whole) | 43.8 | 34.6 |
| Brain (amygdala) | 8.9 | 13.8 |
| Brain (cerebellum) | 0.0 | 0.0 |
| Brain (hippocampus) | 35.6 | 70.7 |
| Brain (substantia nigra) | 2.1 | 0.0 |
| Brain (thalamus) | 6.8 | 18.9 |
| Cerebral Cortex | 98.6 | 100.0 |
| Spinal cord | 21.5 | 13.2 |
| glio/astro U87-MG | 0.0 | 0.0 |
| glio/astro U-118-MG | 0.0 | 0.0 |
| astrocytoma SW1783 | 0.0 | 0.0 |
| neuro*; met SK-N-AS | 0.0 | 0.0 |
| astrocytoma SF-539 | 0.0 | 0.0 |
| astrocytoma SNB-75 | 10.3 | 12.4 |
| glioma SNB-19 | 0.0 | 0.0 |
| glioma U251 | 1.6 | 0.0 |
| glioma SF-295 | 0.0 | 0.0 |
| Heart (fetal) | 1.6 | 0.0 |
| Heart | 0.0 | 0.0 |
| Skeletal muscle (fetal) | 0.0 | 0.0 |
| Skeletal muscle | 0.0 | 0.0 |
| Bone marrow | 0.0 | 0.0 |
| Thymus | 0.0 | 0.0 |
| Spleen | 0.0 | 0.0 |
| Lymph node | 0.0 | 0.0 |
| Colorectal | 5.6 | 9.7 |
| Stomach | 15.5 | 12.9 |
| Small intestine | 22.2 | 50.3 |
| Colon ca. SW480 | 0.0 | 0.0 |
| Colon ca.* SW620(SW480 met) | 0.0 | 0.0 |
| Colon ca. HT29 | 0.0 | 0.0 |
| Colon ca. HCT-116 | 0.0 | 0.0 |
| Colon ca. CaCo-2 | 3.7 | 2.4 |
| Colon ca. tissue(ODO3866) | 0.0 | 0.0 |
| Colon ca. HCC-2998 | 0.0 | 0.0 |
| Gastric ca.* (liver met) NCI-N87 | 0.0 | 0.0 |
| Bladder | 0.0 | 7.8 |
| Trachea | 2.6 | 3.8 |
| Kidney | 2.4 | 18.4 |
| Kidney (fetal) | 0.0 | 7.7 |
| Renal ca. 786-0 | 2.3 | 0.0 |
| Renal ca. A498 | 0.0 | 0.0 |
| Renal ca. RXF 393 | 0.0 | 0.0 |
| Renal ca. ACHN | 0.0 | 0.0 |
| Renal ca. UO-31 | 0.0 | 0.0 |
| Renal ca. TK-10 | 0.0 | 0.0 |
| Liver | 1.8 | 8.0 |
| Liver (fetal) | 0.0 | 0.0 |
| Liver ca. (hepatoblast) HepG2 | 0.0 | 0.0 |
| Lung | 0.0 | 0.0 |
| Lung (fetal) | 0.0 | 0.0 |
| Lung ca. (small cell) LX-1 | 0.0 | 0.0 |
| Lung ca. (small cell) NCI-H69 | 0.0 | 0.0 |
| Lung ca. (s. cell var.) SHP-77 | 0.0 | 0.0 |
| Lung ca. (large cell)NCI-H460 | 0.0 | 0.0 |
| Lung ca. (non-sm. cell) A549 | 0.0 | 0.0 |
| Lung ca. (non-s. cell) NCI-H23 | 0.0 | 0.0 |
| Lung ca. (non-s. cell) HOP-62 | 0.0 | 0.0 |
| Lung ca. (non-s. cl) NCI-H522 | 1.9 | 5.9 |
| Lung ca. (squam.) SW 900 | 5.3 | 0.0 |
| Lung ca. (squam.) NCI-H596 | 0.0 | 0.0 |
| Mammary gland | 0.0 | 0.0 |
| Breast ca.* (pl. ef) MCF-7 | 100.0 | 62.0 |
| Breast ca.* (pl. ef) MDA-MB-231 | 0.0 | 0.0 |
| Breast ca.* (pl. ef) T47D | 0.0 | 0.0 |
| Breast ca. BT-549 | 3.5 | 0.0 |
| Breast ca. MDA-N | 0.0 | 0.0 |
| Ovary | 0.0 | 9.7 |
| Ovarian ca. OVCAR-3 | 41.5 | 23.7 |
| Ovarian ca. OVCAR-4 | 0.0 | 0.0 |
| Ovarian ca. OVCAR-5 | 0.0 | 0.0 |
| Ovarian ca. OVCAR-8 | 0.0 | 0.0 |
| Ovarian ca. IGROV-1 | 0.0 | 0.0 |
| Ovarian ca.* (ascites) SK-OV-3 | 0.0 | 0.0 |
| Uterus | 4.2 | 4.6 |
| Placenta | 0.0 | 0.0 |
| Prostate | 7.2 | 11.2 |
| Prostate ca.* (bone met)PC-3 | 0.0 | 0.0 |
| Testis | 13.3 | 11.1 |
| Melanoma Hs688(A).T | 0.0 | 0.0 |
| Melanoma* (met) Hs688(B).T | 0.0 | 0.0 |
| Melanoma UACC-62 | 0.0 | 0.0 |
| Melanoma M14 | 0.0 | 0.0 |
| Melanoma LOX IMVI | 0.0 | 0.0 |
| Melanoma* (met) SK-MEL-5 | 0.0 | 0.0 |
| Adipose | 0.0 | 0.0 |

Column A - Rel. Exp. (%) Ag1557, Run 146380320
Column B - Rel. Exp. (%) Ag1557, Run 149871705

[1442] TABLE AVD
Panel 2D

| Tissue Name | A | B |
|---|---|---|
| Normal Colon | 22.5 | 51.4 |
| CC Well to Mod Diff (ODO3866) | 0.0 | 2.1 |
| CC Margin (ODO3866) | 9.0 | 17.6 |
| CC Gr.2 rectosigmoid (ODO3868) | 0.0 | 0.0 |
| CC Margin (ODO3868) | 3.7 | 10.3 |
| CC Mod Diff (ODO3920) | 0.0 | 0.0 |
| CC Margin (ODO3920) | 6.8 | 15.6 |
| CC Gr.2 ascend colon (ODO3921) | 9.6 | 11.8 |
| CC Margin (ODO3921) | 4.6 | 6.3 |
| CC from Partial Hepatectomy | 0.0 | 1.2 |
| (ODO4309) Mets | | |
| Liver Margin (ODO4309) | 2.3 | 1.2 |
| Colon mets to lung (OD04451-01) | 0.0 | 2.1 |
| Lung Margin (OD04451-02) | 0.0 | 0.0 |
| Normal Prostate 6546-1 | 8.2 | 8.2 |
| Prostate Cancer (OD04410) | 2.3 | 5.8 |
| Prostate Margin (OD04410) | 13.8 | 16.6 |
| Prostate Cancer (OD04720-01) | 7.2 | 14.9 |
| Prostate Margin (OD04720-02) | 54.0 | 60.3 |
| Normal Lung 061010 | 4.3 | 0.0 |
| Lung Met to Muscle (ODO4286) | 0.0 | 2.6 |
| Muscle Margin (ODO4286) | 0.0 | 0.0 |
| Lung Malignant Cancer (OD03126) | 0.0 | 0.0 |
| Lung Margin (OD03126) | 2.0 | 2.4 |
| Lung Cancer (OD04404) | 0.0 | 0.0 |
| Lung Margin (OD04404) | 0.0 | 0.0 |
| Lung Cancer (OD04565) | 0.0 | 0.0 |
| Lung Margin (OD04565) | 0.0 | 0.0 |
| Lung Cancer (OD04237-01) | 51.1 | 51.1 |
| Lung Margin (OD04237-02) | 0.0 | 1.4 |
| Ocular Mel Met to Liver (ODO4310) | 0.0 | 0.0 |
| Liver Margin (ODO4310) | 3.5 | 6.3 |
| Melanoma Mets to Lung (OD04321) | 0.0 | 0.0 |
| Lung Margin (OD04321) | 0.0 | 2.7 |
| Normal Kidney | 87.7 | 76.8 |
| Kidney Ca, Nuclear grade 2 (OD04338) | 4.7 | 8.8 |
| Kidney Margin (OD04338) | 18.9 | 19.2 |
| Kidney Ca Nuclear grade 1/2 (OD04339) | 14.7 | 14.6 |
| Kidney Margin (OD04339) | 14.5 | 13.3 |
| Kidney Ca, Clear cell type (OD04340) | 0.0 | 0.0 |
| Kidney Margin (OD04340) | 21.0 | 15.0 |
| Kidney Ca, Nuclear grade 3 (OD04348) | 0.0 | 0.0 |
| Kidney Margin (OD04348) | 13.1 | 22.4 |
| Kidney Cancer (OD04622-01) | 0.0 | 0.0 |
| Kidney Margin (OD04622-03) | 3.0 | 9.4 |
| Kidney Cancer (OD04450-01) | 0.0 | 0.0 |
| Kidney Margin (OD04450-03) | 20.4 | 31.4 |
| Kidney Cancer 8120607 | 3.7 | 7.7 |
| Kidney Margin 8120608 | 1.8 | 3.0 |
| Kidney Cancer 8120613 | 100.0 | 100.0 |
| Kidney Margin 8120614 | 2.0 | 1.4 |
| Kidney Cancer 9010320 | 3.0 | 5.0 |
| Kidney Margin 9010321 | 2.3 | 1.5 |
| Normal Uterus | 0.0 | 0.0 |
| Uterus Cancer 064011 | 0.0 | 0.0 |
| Normal Thyroid | 0.0 | 0.0 |
| Thyroid Cancer 064010 | 1.0 | 0.0 |
| Thyroid Cancer A302152 | 0.0 | 0.0 |
| Thyroid Margin A302153 | 0.0 | 0.0 |
| Normal Breast | 2.1 | 0.0 |
| Breast Cancer (OD04566) | 0.0 | 0.0 |
| Breast Cancer (OD04590-01) | 0.0 | 0.0 |
| Breast Cancer Mets (OD04590-03) | 1.4 | 0.0 |
| Breast Cancer Metastasis (OD04655-05) | 1.9 | 2.1 |
| Breast Cancer 064006 | 41.2 | 0.0 |
| Breast Cancer 1024 | 0.0 | 0.0 |
| Breast Cancer 9100266 | 1.3 | 0.8 |
| Breast Margin 9100265 | 0.0 | 0.0 |
| Breast Cancer A209073 | 8.0 | 8.3 |
| Breast Margin A209073 | 1.6 | 1.3 |
| Normal Liver | 8.5 | 15.0 |
| Liver Cancer 064003 | 1.5 | 2.3 |
| Liver Cancer 1025 | 3.4 | 6.4 |
| Liver Cancer 1026 | 0.0 | 1.7 |
| Liver Cancer 6004-T | 7.1 | 2.0 |
| Liver Tissue 6004-N | 0.0 | 0.0 |
| Liver Cancer 6005-T | 0.0 | 2.0 |
| Liver Tissue 6005-N | 1.5 | 4.9 |
| Normal Bladder | 1.9 | 4.5 |
| Bladder Cancer 1023 | 14.0 | 19.6 |
| Bladder Cancer A302173 | 2.9 | 9.4 |
| Bladder Cancer (OD04718-01) | 50.7 | 74.2 |
| Bladder Normal Adjacent (OD04718-03) | 0.0 | 0.0 |
| Normal Ovary | 1.5 | 2.6 |
| Ovarian Cancer 064008 | 1.2 | 0.0 |
| Ovarian Cancer (OD04768-07) | 0.0 | 0.0 |
| Ovary Margin (OD04768-08) | 0.0 | 0.0 |
| Normal Stomach | 13.8 | 15.3 |
| Gastric Cancer 9060358 | 1.6 | 0.0 |
| Stomach Margin 9060359 | 6.7 | 8.4 |
| Gastric Cancer 9060395 | 1.4 | 1.2 |
| Stomach Margin 9060394 | 2.5 | 9.0 |
| Gastric Cancer 9060397 | 0.0 | 0.0 |
| Stomach Margin 9060396 | 0.0 | 0.0 |
| Gastric Cancer 064005 | 2.1 | 8.0 |

Column A - Rel. Exp. (%) Ag1557, Run 148394031
Column B - Rel. Exp. (%) Ag1557, Run 149871817

[1443] TABLE AVE
Panel 4D

| Tissue Name | A |
|---|---|
| Secondary Th1 act | 0.0 |
| Secondary Th2 act | 0.0 |
| Secondary Tr1 act | 0.0 |
| Secondary Th1 rest | 0.0 |
| Secondary Th2 rest | 0.0 |
| Secondary Tr1 rest | 0.0 |
| Primary Th1 act | 0.0 |
| Primary Th2 act | 0.0 |
| Primary Tr1 act | 0.0 |
| Primary Th1 rest | 0.0 |
| Primary Th2 rest | 0.0 |
| Primary Tr1 rest | 0.0 |
| CD45RA CD4 lymphocyte act | 0.0 |
| CD45RO CD4 lymphocyte act | 0.0 |
| CD8 lymphocyte act | 0.0 |
| Secondary CD8 lymphocyte rest | 0.0 |
| Secondary CD8 lymphocyte act | 0.0 |
| CD4 lymphocyte none | 0.0 |
| 2ry Th1/Th2/Tr1_anti-CD95 CH11 | 0.0 |
| LAK cells rest | 0.0 |
| LAK cells IL-2 | 1.8 |
| LAK cells IL-2 + IL-12 | 0.0 |
| LAK cells IL-2 + IFN gamma | 0.0 |
| LAK cells IL-2 + IL-18 | 0.0 |
| LAK cells PMA/ionomycin | 0.0 |
| NK Cells IL-2 rest | 0.0 |
| Two Way MLR 3 day | 0.0 |
| Two Way MLR 5 day | 0.0 |
| Two Way MLR 7 day | 0.0 |
| PBMC rest | 0.0 |
| PBMC PWM | 0.0 |
| PBMC PHA-L | 0.0 |
| Ramos (B cell) none | 0.0 |
| Ramos (B cell) ionomycin | 0.0 |
| B lymphocytes PWM | 0.0 |
| B lymphocytes CD40L and IL-4 | 0.0 |
| EOL-1 dbcAMP | 0.0 |
| EOL-1 dbcAMP PMA/ionomycin | 0.0 |
| Dendritic cells none | 0.0 |
| Dendritic cells LPS | 0.0 |
| Dendritic cells anti-CD40 | 0.0 |
| Monocytes rest | 0.0 |
| Monocytes LPS | 0.0 |
| Macrophages rest | 0.0 |
| Macrophages LPS | 0.0 |
| HUVEC none | 0.0 |
| HUVEC starved | 0.0 |
| HUVEC IL-1beta | 0.0 |
| HUVEC IFN gamma | 0.0 |
| HUVEC TNF alpha + IFN gamma | 0.0 |
| HUVEC TNF alpha + IL4 | 0.0 |
| HUVEC IL-11 | 0.0 |
| Lung Microvascular EC none | 3.6 |
| Lung Microvascular EC TNFalpha + IL-1beta | 0.0 |
| Microvascular Dermal EC none | 2.7 |
| Microsvasular Dermal EC TNFalpha + IL-1beta | 0.0 |
| Bronchial epithelium TNFalpha + IL1beta | 0.0 |
| Small airway epithelium none | 3.6 |
| Small airway epithelium TNFalpha + IL-1beta | 0.0 |
| Coronery artery SMC rest | 0.0 |
| Coronery artery SMC TNFalpha + IL-1beta | 0.0 |
| Astrocytes rest | 0.0 |
| Astrocytes TNFalpha + IL-1beta | 0.0 |
| KU-812 (Basophil) rest | 0.0 |
| KU-812 (Basophil) PMA/ionomycin | 0.0 |
| CCD1106 (Keratinocytes) none | 0.0 |
| CCD1106 (Keratinocytes) TNFalpha + IL-1beta | 0.0 |
| Liver cirrhosis | 5.2 |
| Lupus kidney | 1.9 |
| NCI-H292 none | 1.6 |
| NCI-H292 IL-4 | 1.6 |
| NCI-H292 IL-9 | 0.0 |
| NCI-H292 IL-13 | 0.0 |
| NCI-H292 IFN gamma | 0.0 |
| HPAEC none | 0.0 |
| HPAEC TNF alpha + IL-1 beta | 0.0 |
| Lung fibroblast none | 0.0 |
| Lung fibroblast TNF alpha + IL-1 beta | 0.0 |
| Lung fibroblast IL-4 | 0.0 |
| Lung fibroblast IL-9 | 0.0 |
| Lung fibroblast IL-13 | 0.0 |
| Lung fibroblast IFN gamma | 0.0 |
| Dermal fibroblast CCD1070 rest | 0.0 |
| Dermal fibroblast CCD1070 TNF alpha | 0.0 |
| Dermal fibroblast CCD1070 IL-1 beta | 0.0 |
| Dermal fibroblast IFN gamma | 0.0 |
| Dermal fibroblast IL-4 | 0.0 |
| IBD Colitis 2 | 7.3 |
| IBD Crohn's | 4.0 |
| Colon | 28.1 |
| Lung | 2.0 |
| Thymus | 100.0 |
| Kidney | 0.0 |

Column A - Rel. Exp. (%) Ag1557, Run 149871968

[1444] AI_comprehensive panel_v1.0 Summary: Ag1557 Low but significant expression was seen in an OA bone sample (CT=32). Prominent expression was also detected in ulcerative colitis and Crohn's samples as well as adjacent normal tissue samples.

[1445] Panel 1.3D Summary: Ag1557 Highest expression of this gene was detected in a breast cancer cell line and the cerebral cortex (CTs=33-34.6). Expression of this gene is of use as a marker for breast cancer. This gene was also expressed at moderate levels in the pituitary gland. The protein encoded by this gene is homologous to synaptotagmin and is important in the pituitary secretory pathway. This gene product or antibodies or small molecules that target this gene product are useful in the treatment of disease in this tissue.

[1446] Panel 2D Summary: Ag1557 Increased expression of this gene was seen in a single kidney sample (CTs=33), lung cancer sample and bladder cancer sample compared to the expression in the normal adjacent tissues showing that expression of this gene or gene product is of use as a marker to distinguish cancer from normal adjacent tissue. Therapeutic inhibition of this gene activity, through the use of small molecule drugs, protein therapeutics or antibodies, is of utility in the treatment of lung, bladder and kidney cancers.

[1447] Panel 4D Summary: Ag1557 This gene was expressed at a moderate level (CT=33.39) in thymus (Panel 4D). Small molecule drugs, protein therapeutics, or antibodies that inhibit the function of this synaptotagmin-like protein are useful for the reduction or elimination of the symptoms of autoimmune or inflammatory diseases that depend on the T cells that develop in the thymus, such as asthma, allergies, inflammatory bowel disease, lupus erythematosus, or rheumatoid arthritis.

[1448] AW. CG57111-01: Protocadherin

[1449] Expression of gene CG571 11-01 was assessed using the primer-probe sets Ag1096 and Ag3242, described in Tables AWA and AWB. Results of the RTQ-PCR runs are shown in Tables AWC, AWD, AWE, and AWF.

TABLE AWA
Probe Name Ag1096

| | | | | SEQ |
|---|---|---|---|---|
| | | | Start | ID |
| Primers | Sequences | Length | Position | No |
| Forward | 5′-actttggaagaggcattgct-3′ | 20 | 2403 | 1522 |
| Probe | TET-5′-cagacagattatgggctccatcgctt-3′- | 26 | 2424 | 1523 |
| | TAMRA | | | |
| Reverse | 5′-ctcgggataaccatgatcact-3′ | 21 | 2463 | 1524 |

[1450] TABLE AWB
Probe Name Ag3242

| | | | | SEQ |
|---|---|---|---|---|
| | | | Start | ID |
| Primers | Sequences | Length | Position | No |
| Forward | 5′-gggaccaatgctcaaattactt-3′ | 22 | 1038 | 1525 |
| Probe | TET-5′-tcagaaagttccacaagcatctaagga-3′- | 27 | 1070 | 1526 |
| | TAMRA | | | |
| Reverse | 5′-atgactccagtgttttcatcca-3′ | 22 | 1108 | 1527 |

[1451] TABLE AWC
AI_comprehensive panel_v1.0

| Tissue Name | A |
|---|---|
| 110967 COPD-F | 28.9 |
| 110980 COPD-F | 6.7 |
| 110968 COPD-M | 19.9 |
| 110977 COPD-M | 8.4 |
| 110989 Emphysema-F | 49.3 |
| 110992 Emphysema-F | 22.8 |
| 110993 Emphysema-F | 31.0 |
| 110994 Emphysema-F | 12.7 |
| 110995 Emphysema-F | 25.5 |
| 110996 Emphysema-F | 15.8 |
| 110997 Asthma-M | 7.5 |
| 111001 Asthma-F | 30.4 |
| 111002 Asthma-F | 45.4 |
| 111003 Atopic Asthma-F | 45.1 |
| 111004 Atopic Asthma-F | 22.4 |
| 111005 Atopic Asthma-F | 25.3 |
| 111006 Atopic Asthma-F | 13.9 |
| 111417 Allergy-M | 15.1 |
| 112347 Allergy-M | 5.0 |
| 112349 Normal Lung-F | 1.9 |
| 112357 Normal Lung-F | 5.1 |
| 112354 Normal Lung-M | 11.6 |
| 112374 Crohns-F | 32.5 |
| 112389 Match Control Crohns-F | 14.4 |
| 112375 Crohns-F | 36.1 |
| 112732 Match Control Crohns-F | 0.0 |
| 112725 Crohns-M | 45.4 |
| 112387 Match Control Crohns-M | 18.3 |
| 112378 Crohns-M | 3.8 |
| 112390 Match Control Crohns-M | 22.4 |
| 112726 Crohns-M | 45.7 |
| 112731 Match Control Crohns-M | 12.6 |
| 112380 Ulcer Col-F | 28.3 |
| 112734 Match Control Ulcer Col-F | 0.8 |
| 112384 Ulcer Col-F | 100.0 |
| 112737 Match Control Ulcer Col-F | 28.1 |
| 112386 Ulcer Col-F | 25.5 |
| 112738 Match Control Ulcer Col-F | 2.1 |
| 112381 Ulcer Col-M | 2.3 |
| 112735 Match Control Ulcer Col-M | 53.6 |
| 112382 Ulcer Col-M | 15.3 |
| 112394 Match Control Ulcer Col-M | 10.2 |
| 112383 Ulcer Col-M | 45.4 |
| 112736 Match Control Ulcer Col-M | 4.0 |
| 112423 Psoriasis-F | 90.1 |
| 112427 Match Control Psoriasis-F | 55.9 |
| 112418 Psoriasis-M | 25.7 |
| 112723 Match Control Psoriasis-M | 0.0 |
| 112419 Psoriasis-M | 66.0 |
| 112424 Match Control Psoriasis-M | 42.0 |
| 112420 Psoriasis-M | 44.4 |
| 112425 Match Control Psoriasis-M | 24.3 |
| 104689 (MF) OA Bone-Backus | 81.2 |
| 104690 (MF) Adj “Normal” Bone-Backus | 16.6 |
| 104691 (MF) OA Synovium-Backus | 1.5 |
| 104692 (BA) OA Cartilage-Backus | 7.4 |
| 104694 (BA) OA Bone-Backus | 56.3 |
| 104695 (BA) Adj “Normal” Bone-Backus | 31.6 |
| 104696 (BA) OA Synovium-Backus | 0.0 |
| 104700 (SS) OA Bone-Backus | 63.7 |
| 104701 (SS) Adj “Normal” Bone-Backus | 63.3 |
| 104702 (SS) OA Synovium-Backus | 6.1 |
| 117093 OA Cartilage Rep7 | 16.3 |
| 112672 OA Bone5 | 13.2 |
| 112673 OA Synovium5 | 5.4 |
| 112674 OA Synovial Fluid cells5 | 7.7 |
| 117100 OA Cartilage Rep14 | 4.5 |
| 112756 OA Bone9 | 17.1 |
| 112757 OA Synovium9 | 21.8 |
| 112758 OA Synovial Fluid Cells9 | 13.3 |
| 117125 RA Cartilage Rep2 | 28.1 |
| 113492 Bone2 RA | 34.2 |
| 113493 Synovium2 RA | 8.9 |
| 113494 Syn Fluid Cells RA | 25.7 |
| 113499 Cartilage4 RA | 45.1 |
| 113500 Bone4 RA | 47.3 |
| 113501 Synovium4 RA | 42.6 |
| 113502 Syn Fluid Cells4 RA | 25.5 |
| 113495 Cartilage3 RA | 33.7 |
| 113496 Bone3 RA | 38.7 |
| 113497 Synovium3 RA | 18.2 |
| 113498 Syn Fluid Cells3 RA | 30.8 |
| 117106 Normal Cartilage Rep20 | 0.0 |
| 113663 Bone3 Normal | 2.8 |
| 113664 Synovium3 Normal | 0.0 |
| 113665 Syn Fluid Cells3 Normal | 2.9 |
| 117107 Normal Cartilage Rep22 | 10.5 |
| 113667 Bone4 Normal | 17.2 |
| 113668 Synovium4 Normal | 17.0 |
| 113669 Syn Fluid Cells4 Normal | 36.3 |

Column A - Rel. Exp. (%) Ag3242, Run 253058919

[1452] TABLE AWD
Panel 1.3D

| Tissue Name | A |
|---|---|
| Liver adenocarcinoma | 0.0 |
| Pancreas | 1.0 |
| Pancreatic ca. CAPAN 2 | 0.0 |
| Adrenal gland | 0.3 |
| Thyroid | 0.0 |
| Salivary gland | 0.6 |
| Pituitary gland | 4.8 |
| Brain (fetal) | 11.8 |
| Brain (whole) | 40.6 |
| Brain (amygdala) | 31.6 |
| Brain (cerebellum) | 3.0 |
| Brain (hippocampus) | 76.3 |
| Brain (substantia nigra) | 2.1 |
| Brain (thalamus) | 6.3 |
| Cerebral Cortex | 27.7 |
| Spinal cord | 7.7 |
| glio/astro U87-MG | 0.6 |
| glio/astro U-118-MG | 0.5 |
| astrocytoma SW1783 | 0.0 |
| neuro*; met SK-N-AS | 7.5 |
| astrocytoma SF-539 | 0.0 |
| astrocytoma SNB-75 | 8.4 |
| glioma SNB-19 | 3.0 |
| glioma U251 | 66.4 |
| glioma SF-295 | 0.6 |
| Heart (fetal) | 3.7 |
| Heart | 1.7 |
| Skeletal muscle (fetal) | 6.9 |
| Skeletal muscle | 1.9 |
| Bone marrow | 0.0 |
| Thymus | 0.4 |
| Spleen | 0.0 |
| Lymph node | 0.0 |
| Colorectal | 3.5 |
| Stomach | 2.5 |
| Small intestine | 7.2 |
| Colon ca. SW480 | 0.0 |
| Colon ca.* SW620(SW480 met) | 0.0 |
| Colon ca. HT29 | 0.0 |
| Colon ca. HCT-116 | 0.0 |
| Colon ca. CaCo-2 | 0.0 |
| Colon ca. tissue(ODO3866) | 0.0 |
| Colon ca. HCC-2998 | 2.1 |
| Gastric ca.* (liver met) NCI-N87 | 0.0 |
| Bladder | 0.0 |
| Trachea | 9.0 |
| Kidney | 1.5 |
| Kidney (fetal) | 2.7 |
| Renal ca. 786-0 | 0.0 |
| Renal ca. A498 | 0.0 |
| Renal ca. RXF 393 | 0.4 |
| Renal ca. ACHN | 100.0 |
| Renal ca. UO-31 | 0.0 |
| Renal ca. TK-10 | 1.1 |
| Liver | 1.0 |
| Liver (fetal) | 0.0 |
| Liver ca. (hepatoblast) HepG2 | 0.0 |
| Lung | 4.8 |
| Lung (fetal) | 2.2 |
| Lung ca. (small cell) LX-1 | 3.7 |
| Lung ca. (small cell) NCI-H69 | 0.0 |
| Lung ca. (s. cell var.) SHP-77 | 16.0 |
| Lung ca. (large cell)NCI-H460 | 46.0 |
| Lung ca. (non-sm. cell) A549 | 0.0 |
| Lung ca. (non-s. cell) NCI-H23 | 8.0 |
| Lung ca. (non-s. cell) HOP-62 | 13.6 |
| Lung ca. (non-s. cl) NCI-H522 | 0.0 |
| Lung ca. (squam.) SW 900 | 18.8 |
| Lung ca. (squam.) NCI-H596 | 0.0 |
| Mammary gland | 1.4 |
| Breast ca.* (pl. ef) MCF-7 | 0.0 |
| Breast ca.* (pl. ef) MDA-MB-231 | 0.0 |
| Breast ca.* (pl. ef) T47D | 1.4 |
| Breast ca. BT-549 | 1.6 |
| Breast ca. MDA-N | 0.0 |
| Ovary | 1.5 |
| Ovarian ca. OVCAR-3 | 1.4 |
| Ovarian ca. OVCAR-4 | 0.0 |
| Ovarian ca. OVCAR-5 | 24.8 |
| Ovarian ca. OVCAR-8 | 0.6 |
| Ovarian ca. IGROV-1 | 0.0 |
| Ovarian ca.* (ascites) SK-OV-3 | 5.4 |
| Uterus | 15.5 |
| Placenta | 1.1 |
| Prostate | 1.4 |
| Prostate ca.* (bone met)PC-3 | 0.4 |
| Testis | 2.3 |
| Melanoma Hs688(A).T | 0.0 |
| Melanoma* (met) Hs688(B).T | 0.0 |
| Melanoma UACC-62 | 0.0 |
| Melanoma M14 | 1.6 |
| Melanoma LOX IMVI | 0.0 |
| Melanoma* (met) SK-MEL-5 | 58.6 |
| Adipose | 1.5 |

Column A - Rel. Exp. (%) Ag3242, Run 165524415

[1453] TABLE AWE
Panel 2.2

| Tissue Name | A |
|---|---|
| Normal Colon | 4.4 |
| Colon cancer (OD06064) | 1.8 |
| Colon Margin (OD06064) | 8.9 |
| Colon cancer (OD06159) | 2.0 |
| Colon Margin (OD06159) | 7.1 |
| Colon cancer (OD06297-04) | 2.4 |
| Colon Margin (OD06297-05) | 2.2 |
| CC Gr.2 ascend colon (ODO3921) | 0.9 |
| CC Margin (ODO3921) | 3.8 |
| Colon cancer metastasis (OD06104) | 0.7 |
| Lung Margin (OD06104) | 0.0 |
| Colon mets to lung (OD04451-01) | 1.7 |
| Lung Margin (OD04451-02) | 10.1 |
| Normal Prostate | 0.4 |
| Prostate Cancer (OD04410) | 0.3 |
| Prostate Margin (OD04410) | 0.0 |
| Normal Ovary | 0.0 |
| Ovarian cancer (OD06283-03) | 0.0 |
| Ovarian Margin (OD06283-07) | 0.0 |
| Ovarian Cancer 064008 | 1.9 |
| Ovarian cancer (OD06145) | 0.0 |
| Ovarian Margin (OD06145) | 0.0 |
| Ovarian cancer (OD06455-03) | 0.0 |
| Ovarian Margin (OD06455-07) | 1.2 |
| Normal Lung | 2.3 |
| Invasive poor diff. lung adeno (ODO4945-01 | 1.1 |
| Lung Margin (ODO4945-03) | 1.6 |
| Lung Malignant Cancer (OD03126) | 0.7 |
| Lung Margin (OD03126) | 1.2 |
| Lung Cancer (OD05014A) | 1.2 |
| Lung Margin (OD05014B) | 4.4 |
| Lung cancer (OD06081) | 0.8 |
| Lung Margin (OD06081) | 2.8 |
| Lung Cancer (OD04237-01) | 0.0 |
| Lung Margin (OD04237-02) | 6.0 |
| Ocular Melanoma Metastasis | 100.0 |
| Ocular Melanoma Margin (Liver) | 0.7 |
| Melanoma Metastasis | 1.2 |
| Melanoma Margin (Lung) | 4.9 |
| Normal Kidney | 0.0 |
| Kidney Ca, Nuclear grade 2 (OD04338) | 1.3 |
| Kidney Margin (OD04338) | 0.4 |
| Kidney Ca Nuclear grade 1/2 (OD04339) | 0.6 |
| Kidney Margin (OD04339) | 1.6 |
| Kidney Ca, Clear cell type (OD04340) | 0.0 |
| Kidney Margin (OD04340) | 1.1 |
| Kidney Ca, Nuclear grade 3 (OD04348) | 0.0 |
| Kidney Margin (OD04348) | 1.0 |
| Kidney malignant cancer (OD06204B) | 0.4 |
| Kidney normal adjacent tissue (OD06204E) | 1.8 |
| Kidney Cancer (OD04450-01) | 2.3 |
| Kidney Margin (OD04450-03) | 0.9 |
| Kidney Cancer 8120613 | 0.0 |
| Kidney Margin 8120614 | 0.4 |
| Kidney Cancer 9010320 | 1.4 |
| Kidney Margin 9010321 | 1.3 |
| Kidney Cancer 8120607 | 0.8 |
| Kidney Margin 8120608 | 0.2 |
| Normal Uterus | 5.3 |
| Uterine Cancer 064011 | 0.5 |
| Normal Thyroid | 0.0 |
| Thyroid Cancer 064010 | 0.7 |
| Thyroid Cancer A302152 | 0.9 |
| Thyroid Margin A302153 | 0.0 |
| Normal Breast | 0.6 |
| Breast Cancer (OD04566) | 0.0 |
| Breast Cancer 1024 | 2.1 |
| Breast Cancer (OD04590-01) | 0.0 |
| Breast Cancer Mets (OD04590-03) | 0.0 |
| Breast Cancer Metastasis (OD04655-05) | 0.4 |
| Breast Cancer 064006 | 0.7 |
| Breast Cancer 9100266 | 0.7 |
| Breast Margin 9100265 | 0.2 |
| Breast Cancer A209073 | 0.0 |
| Breast Margin A2090734 | 0.0 |
| Breast cancer (OD06083) | 0.4 |
| Breast cancer node metastasis (OD06083) | 0.9 |
| Normal Liver | 1.3 |
| Liver Cancer 1026 | 0.3 |
| Liver Cancer 1025 | 0.0 |
| Liver Cancer 6004-T | 0.0 |
| Liver Tissue 6004-N | 0.0 |
| Liver Cancer 6005-T | 2.7 |
| Liver Tissue 6005-N | 3.3 |
| Liver Cancer 064003 | 7.1 |
| Normal Bladder | 0.0 |
| Bladder Cancer 1023 | 0.0 |
| Bladder Cancer A302173 | 0.3 |
| Normal Stomach | 5.8 |
| Gastric Cancer 9060397 | 0.0 |
| Stomach Margin 9060396 | 2.6 |
| Gastric Cancer 9060395 | 2.2 |
| Stomach Margin 9060394 | 3.4 |
| Gastric Cancer 064005 | 0.3 |

Column A - Rel. Exp. (%) Ag3242, Run 174443348

[1454] TABLE AWF
Panel 4D

| Tissue Name | A | B |
|---|---|---|
| Secondary Th1 act | 0.0 | 0.0 |
| Secondary Th2 act | 0.0 | 0.0 |
| Secondary Tr1 act | 0.0 | 0.0 |
| Secondary Th1 rest | 0.0 | 0.0 |
| Secondary Th2 rest | 0.0 | 0.0 |
| Secondary Tr1 rest | 0.0 | 0.0 |
| Primary Th1 act | 0.0 | 0.0 |
| Primary Th2 act | 0.0 | 0.0 |
| Primary Tr1 act | 0.0 | 0.0 |
| Primary Th1 rest | 0.0 | 0.0 |
| Primary Th2 rest | 0.0 | 0.0 |
| Primary Tr1 rest | 0.0 | 0.0 |
| CD45RA CD4 lymphocyte act | 0.0 | 0.0 |
| CD45RO CD4 lymphocyte act | 0.0 | 0.0 |
| CD8 lymphocyte act | 1.3 | 0.0 |
| Secondary CD8 lymphocyte rest | 0.7 | 0.0 |
| Secondary CD8 lymphocyte act | 0.0 | 0.0 |
| CD4 lymphocyte none | 0.0 | 0.0 |
| 2ry Th1/Th2/Tr1_anti-CD95 CH11 | 0.0 | 0.0 |
| LAK cells rest | 0.0 | 0.0 |
| LAK cells IL-2 | 0.0 | 0.0 |
| LAK cells IL-2 + IL-12 | 0.0 | 0.0 |
| LAK cells IL-2 + IFN gamma | 0.8 | 0.0 |
| LAK cells IL-2 + IL-18 | 0.0 | 0.0 |
| LAK cells PMA/ionomycin | 0.0 | 0.0 |
| NK Cells IL-2 rest | 0.8 | 0.0 |
| Two Way MLR 3 day | 0.0 | 0.0 |
| Two Way MLR 5 day | 0.0 | 0.0 |
| Two Way MLR 7 day | 1.5 | 0.0 |
| PBMC rest | 0.0 | 0.0 |
| PBMC PWM | 0.0 | 0.0 |
| PBMC PHA-L | 0.0 | 0.0 |
| Ramos (B cell) none | 0.0 | 0.0 |
| Ramos (B cell) ionomycin | 0.0 | 0.0 |
| B lymphocytes PWM | 0.0 | 0.0 |
| B lymphocytes CD40L and IL-4 | 0.0 | 0.0 |
| EOL-1 dbcAMP | 0.0 | 0.0 |
| EOL-1 dbcAMP PMA/ionomycin | 0.0 | 0.0 |
| Dendritic cells none | 0.0 | 0.0 |
| Dendritic cells LPS | 0.0 | 0.0 |
| Dendritic cells anti-CD40 | 0.0 | 0.0 |
| Monocytes rest | 0.0 | 0.0 |
| Monocytes LPS | 1.7 | 0.0 |
| Macrophages rest | 0.0 | 0.0 |
| Macrophages LPS | 0.0 | 0.0 |
| HUVEC none | 0.0 | 0.0 |
| HUVEC starved | 0.0 | 0.0 |
| HUVEC IL-1beta | 0.0 | 0.0 |
| HUVEC IFN gamma | 0.4 | 0.0 |
| HUVEC TNF alpha + IFN gamma | 0.0 | 0.0 |
| HUVEC TNF alpha + IL4 | 2.0 | 0.0 |
| HUVEC IL-11 | 0.0 | 0.0 |
| Lung Microvascular EC none | 0.0 | 0.0 |
| Lung Microvascular EC TNFalpha + | 0.0 | 0.0 |
| IL-1beta | | |
| Microvascular Dermal EC none | 0.0 | 0.0 |
| Microsvasular Dermal EC TNFalpha + | 0.0 | 0.0 |
| IL-1beta | | |
| Bronchial epithelium TNFalpha + IL1beta | 0.0 | 0.0 |
| Small airway epithelium none | 0.0 | 0.0 |
| Small airway epithelium TNFalpha + | 6.5 | 11.7 |
| IL-1beta | | |
| Coronery artery SMC rest | 0.7 | 0.0 |
| Coronery artery SMC TNFalpha + IL-1beta | 0.0 | 0.0 |
| Astrocytes rest | 13.9 | 16.8 |
| Astrocytes TNFalpha + IL-1beta | 3.6 | 5.3 |
| KU-812 (Basophil) rest | 0.9 | 1.0 |
| KU-812 (Basophil) PMA/ionomycin | 100.0 | 100.0 |
| CCD1106 (Keratinocytes) none | 0.0 | 0.0 |
| CCD1106 (Keratinocytes) TNFalpha + | 0.0 | 0.0 |
| IL-1beta | | |
| Liver cirrhosis | 1.9 | 3.8 |
| Lupus kidney | 1.3 | 1.4 |
| NCI-H292 none | 42.9 | 48.0 |
| NCI-H292 IL-4 | 14.7 | 14.8 |
| NCI-H292 IL-9 | 40.6 | 36.6 |
| NCI-H292 IL-13 | 12.2 | 7.4 |
| NCI-H292 IFN gamma | 16.8 | 10.9 |
| HPAEC none | 0.0 | 0.0 |
| HPAEC TNF alpha + IL-1 beta | 0.0 | 0.0 |
| Lung fibroblast none | 0.0 | 1.7 |
| Lung fibroblast TNF alpha + IL-1 beta | 0.0 | 0.0 |
| Lung fibroblast IL-4 | 1.7 | 0.0 |
| Lung fibroblast IL-9 | 0.0 | 0.0 |
| Lung fibroblast IL-13 | 0.7 | 0.0 |
| Lung fibroblast IFN gamma | 0.0 | 0.0 |
| Dermal fibroblast CCD1070 rest | 0.0 | 0.0 |
| Dermal fibroblast CCD1070 TNF alpha | 0.0 | 0.0 |
| Dermal fibroblast CCD1070 IL-1 beta | 0.9 | 0.0 |
| Dermal fibroblast IFN gamma | 0.0 | 0.0 |
| Dermal fibroblast IL-4 | 0.0 | 0.0 |
| IBD Colitis 2 | 0.8 | 2.6 |
| IBD Crohn's | 0.0 | 2.0 |
| Colon | 28.1 | 23.2 |
| Lung | 34.9 | 51.4 |
| Thymus | 35.1 | 28.3 |
| Kidney | 8.2 | 7.4 |

Column A - Rel. Exp. (%) Ag1096, Run 160353275
Column B - Rel. Exp. (%) Ag3242, Run 164390548

[1455] AI_comprehensive panel_v1.0 Summary: Ag3242 Expression of this gene was ubiquitous in this panel, with high expression in samples derived from patients suffering from ulcerative colitis, Crohns disease and psoriasis (CTs=33). Significant expression was also seen in samples derived from synovium, cartilage and bone of rheumatoid arthritis. Antibody or small molecule therapies designed with the protein encoded for by this gene are useful in the treatment of inflammatory bowel diseases and rheumatoid arthritis.

[1456] Panel 1.3D Summary: Ag3242 Highest expression of the CG57448-01 gene was seen in a renal cancer cell line (CT=31.1). Significant expression was also seen in cell lines derived from ovarian cancer, lung cancer, brain cancer and melanoma. Expression of this gene is useful as a marker to differentiate between these samples and other samples on this panel and as a diagnostic marker for the presence of these cancers. This gene encodes a protein that is homologous to cadherin, a cell-adhesion molecule.

[1457] Therapeutic modulation of the expression or function of this gene or gene prduct is effective in the treatment of lung, renal and melanoma cancers.

[1458] Expression of the this gene was also high in many regions of the brain, including the amygdala, thalamus, cerebellum, and cerebral cortex, with highest expression in the hippocampus. Expression was also detected in the spinal cord. Cadherins can act as axon guidance and cell adhesion proteins, specifically during development and in the response to injury (Ranscht B. (2000) Int. J. Dev. Neurosci. 18: 643-651.). Manipulation of levels of this protein are of use in inducing a compensatory synaptogenic response to neuronal death in Alzheimer's disease, Parkinson's disease, Huntington's disease, spinocerebellar ataxia, progressive supranuclear palsy, ALS, head trauma, stroke, or any other disease/condition associated with neuronal loss.

[1459] Among tissues with metabolic function, this gene was moderately expressed in pituitary gland, adrenal gland, thyroid, pancreas, skeletal muscle, and liver, reflecting the widespread role of cadherins in cell-cell adhesion. This expression shows that this gene product plays a role in normal metabolic and neuroendocrine function and that dysregulated expression of this gene contributes to metabolic diseases (such as obesity and diabetes) or neuroendocrine disorders.

[1460] Panel 2.2 Summary: Ag3242 Highest expression of this gene was seen inma sample derived from an ocular melanoma metastasis (CT=29). Thus, expression of this gene is useful as a marker to differentiate between this sample and other samples on this panel.

[1461] Panel 4D Summary: Ag1096/Ag3242 Highest expression of this gene was detected in the basophil cell line (KU-812) treated with PMA/ionomycin (CTs=30-32). Significant expression was also seen in a cluster of treated and untreated samples derived from the muco-epidermoid cell line NCI-H292. Thus, this gene, which encodes a cadherin homolog, was expressed in both a cell line that is often used as a model of airway epithelium (NCI-H292) and a cell line that is a reasonable model for the inflammatory cells that contribute to various inflammatory lung diseases. Therapeutic modulation of this gene or gene prodcut may is useful to reduce or eliminate the symptoms of patients suffering from pathological and inflammatory lung disorders, including chronic obstructive pulmonary disease, asthma, allergy and emphysema.

[1462] Low but significant levels of expression were also seen in the samples derived from normal colon, kidney, lung and thymus. Therapeutic modulation of the expression or function of this gene or gene product is important for maintaining or restoring normal function to this organs during inflammation.

[1463] AX. CG5740905 and CG57409-07: Protein Containing MAM and Ig Domains

[1464] Expression of gene CG57409-05 and full length physical clone CG57409-07 was assessed using the primer-probe sets Ag5267 and Ag6188, described in Tables AXA and AXB. Results of the RTQ-PCR runs are shown in Tables AXC, AXD and AXE.

TABLE AXA
Probe Name Ag5267

| | | | | SEQ |
|---|---|---|---|---|
| | | | Start | ID |
| Primers | Sequences | Length | Position | No |
| Forward | 5′-gcggtcccggaaca-3′ | 14 | 1166 | 1528 |
| Probe | TET-5′-cacgcctggtctctcagtggca-3′-TAMRA | 22 | 1197 | 1529 |
| Reverse | 5′-gcctgctgccacacatt-3′ | 17 | 1227 | 1530 |

[1465] TABLE AXB
Probe Name Ag6188

| | | | | SEQ |
|---|---|---|---|---|
| | | | Start | ID |
| Primers | Sequences | Length | Position | No |
| Forward | 5′-ataaagtggtggtgatgcc-3′ | 19 | 1381 | 1531 |
| Probe | TET-5′-agtggagccccctgccagtc-3′-TAMRA | 20 | 1404 | 1532 |
| Reverse | 5′-gaggaagatggccatg-3′ | 16 | 1445 | 1533 |

[1466] TABLE AXC
General_screening_panel_v1.5

| Tissue Name | A |
|---|---|
| Adipose | 1.5 |
| Melanoma* Hs688(A).T | 4.4 |
| Melanoma* Hs688(B).T | 7.7 |
| Melanoma* M14 | 0.2 |
| Melanoma* LOXIMVI | 0.3 |
| Melanoma* SK-MEL-5 | 9.2 |
| Squamous cell carcinoma SCC-4 | 0.0 |
| Testis Pool | 0.7 |
| Prostate ca.* (bone met) PC-3 | 0.0 |
| Prostate Pool | 2.0 |
| Placenta | 0.0 |
| Uterus Pool | 2.1 |
| Ovarian ca. OVCAR-3 | 0.4 |
| Ovarian ca. SK-OV-3 | 7.0 |
| Ovarian ca. OVCAR-4 | 1.8 |
| Ovarian ca. OVCAR-5 | 2.2 |
| Ovarian ca. IGROV-1 | 0.5 |
| Ovarian ca. OVCAR-8 | 0.7 |
| Ovary | 4.3 |
| Breast ca. MCF-7 | 0.0 |
| Breast ca. MDA-MB-231 | 3.5 |
| Breast ca. BT 549 | 7.5 |
| Breast ca. T47D | 2.5 |
| Breast ca. MDA-N | 2.6 |
| Breast Pool | 5.7 |
| Trachea | 0.5 |
| Lung | 2.5 |
| Fetal Lung | 4.3 |
| Lungca. NCI-N417 | 0.6 |
| Lung ca. LX-1 | 3.6 |
| Lung ca. NCI-H146 | 0.0 |
| Lung ca. SHP-77 | 0.3 |
| Lung ca. A549 | 2.6 |
| Lung ca. NCI-H526 | 0.2 |
| Lung ca. NCI-H23 | 0.1 |
| Lung ca. NCI-H460 | 0.2 |
| Lung ca. HOP-62 | 1.3 |
| Lung ca. NCI-H522 | 19.3 |
| Liver | 0.1 |
| Fetal Liver | 0.3 |
| Liver ca. HepG2 | 0.0 |
| Kidney Pool | 13.3 |
| Fetal Kidney | 1.2 |
| Renal ca. 786-0 | 0.3 |
| Renal ca. A498 | 5.2 |
| Renal ca. ACHN | 6.1 |
| Renal ca. UO-31 | 2.5 |
| Renal ca. TK-10 | 3.4 |
| Bladder | 1.0 |
| Gastric ca. (liver met.) NCI-N87 | 0.0 |
| Gastric ca. KATO III | 0.0 |
| Colon ca. SW-948 | 0.0 |
| Colon ca. SW480 | 3.5 |
| Colon ca.* (SW480 met) SW620 | 0.3 |
| Colon ca. HT29 | 0.0 |
| Colon ca. HCT-116 | 2.6 |
| Colon ca. CaCo-2 | 0.1 |
| Colon cancer tissue | 0.9 |
| Colon ca. SW1116 | 0.2 |
| Colon ca. Colo-205 | 0.0 |
| Colon ca. SW-48 | 0.0 |
| Colon Pool | 7.3 |
| Small Intestine Pool | 8.7 |
| Stomach Pool | 2.5 |
| Bone Marrow Pool | 3.6 |
| Fetal Heart | 1.5 |
| Heart Pool | 3.5 |
| Lymph Node Pool | 6.2 |
| Fetal Skeletal Muscle | 4.9 |
| Skeletal Muscle Pool | 1.0 |
| Spleen Pool | 2.1 |
| Thymus Pool | 2.9 |
| CNS cancer (glio/astro) U87-MG | 1.3 |
| CNS cancer (glio/astro) U-118-MG | 7.2 |
| CNS cancer (neuro; met) SK-N-AS | 0.3 |
| CNS cancer (astro) SF-539 | 0.6 |
| CNS cancer (astro) SNB-75 | 27.0 |
| CNS cancer (glio) SNB-19 | 0.5 |
| CNS cancer (glio) SF-295 | 4.2 |
| Brain (Amygdala) Pool | 2.3 |
| Brain (cerebellum) | 100.0 |
| Brain (fetal) | 34.4 |
| Brain (Hippocampus) Pool | 3.0 |
| Cerebral Cortex Pool | 3.5 |
| Brain (Substantia nigra) Pool | 3.2 |
| Brain (Thalamus) Pool | 2.7 |
| Brain (whole) | 5.1 |
| Spinal Cord Pool | 5.4 |
| Adrenal Gland | 4.0 |
| Pituitary gland Pool | 2.0 |
| Salivary Gland | 0.2 |
| Thyroid (female) | 0.3 |
| Pancreatic ca. CAPAN2 | 0.0 |
| Pancreas Pool | 2.5 |

Column A - Rel. Exp. (%) Ag6188, Run 257761488

[1467] TABLE AXD
Panel 4.1D

| Tissue Name | A |
|---|---|
| Secondary Th1 act | 0.0 |
| Secondary Th2 act | 4.3 |
| Secondary Tr1 act | 3.4 |
| Secondary Th1 rest | 0.6 |
| Secondary Th2 rest | 2.1 |
| Secondary Tr1 rest | 0.8 |
| Primary Th1 act | 0.0 |
| Primary Th2 act | 0.6 |
| Primary Tr1 act | 0.8 |
| Primary Th1 rest | 0.2 |
| Primary Th2 rest | 0.3 |
| Primary Tr1 rest | 0.2 |
| CD45RA CD4 lymphocyte act | 1.6 |
| CD45RO CD4 lymphocyte act | 3.4 |
| CD8 lymphocyte act | 0.4 |
| Secondary CD8 lymphocyte rest | 0.1 |
| Secondary CD8 lymphocyte act | 0.2 |
| CD4 lymphocyte none | 0.9 |
| 2ry Th1/Th2/Tr1_anti-CD95 CH11 | 1.8 |
| LAK cells rest | 6.2 |
| LAK cells IL-2 | 3.3 |
| LAK cells IL-2 + IL-12 | 1.2 |
| LAK cells IL-2 + IFN gamma | 0.7 |
| LAK cells IL-2 + IL-18 | 0.6 |
| LAK cells PMA/ionomycin | 41.8 |
| NK Cells IL-2 rest | 9.0 |
| Two Way MLR 3 day | 2.9 |
| Two Way MLR 5 day | 3.5 |
| Two Way MLR 7 day | 2.7 |
| PBMC rest | 0.3 |
| PBMC PWM | 0.0 |
| PBMC PHA-L | 1.2 |
| Ramos (B cell) none | 0.0 |
| Ramos (B cell) ionomycin | 0.0 |
| B lymphocytes PWM | 0.7 |
| B lymphocytes CD40L and IL-4 | 7.6 |
| EOL-1 dbcAMP | 7.7 |
| EOL-1 dbcAMP PMA/ionomycin | 100.0 |
| Dendritic cells none | 0.5 |
| Dendritic cells LPS | 0.4 |
| Dendritic cells anti-CD40 | 0.4 |
| Monocytes rest | 0.0 |
| Monocytes LPS | 3.0 |
| Macrophages rest | 0.0 |
| Macrophages LPS | 0.7 |
| HUVEC none | 0.7 |
| HUVEC starved | 1.2 |
| HUVEC IL-1beta | 1.4 |
| HUVEC IFN gamma | 4.8 |
| HUVEC TNF alpha + IFN gamma | 3.8 |
| HUVEC TNF alpha + IL4 | 0.4 |
| HUVEC IL-11 | 0.4 |
| Lung Microvascular EC none | 0.0 |
| Lung Microvascular EC TNFalpha + IL-1beta | 0.4 |
| Microvascular Dermal EC none | 0.0 |
| Microsvasular Dermal EC TNFalpha + IL-1beta | 0.2 |
| Bronchial epithelium TNFalpha + IL1beta | 0.7 |
| Small airway epithelium none | 0.2 |
| Small airway epithelium TNFalpha + IL-1beta | 1.6 |
| Coronery artery SMC rest | 0.9 |
| Coronery artery SMC TNFalpha + IL-1beta | 1.9 |
| Astrocytes rest | 8.8 |
| Astrocytes TNFalpha + IL-1beta | 11.0 |
| KU-812 (Basophil) rest | 1.4 |
| KU-812 (Basophil) PMA/ionomycin | 9.3 |
| CCD1106 (Keratinocytes) none | 4.8 |
| CCD1106 (Keratinocytes) TNFalpha + IL-1beta | 1.2 |
| Liver cirrhosis | 2.0 |
| NCI-H292 none | 0.4 |
| NCI-H292 IL-4 | 1.8 |
| NCI-H292 IL-9 | 1.4 |
| NCI-H292 IL-13 | 2.8 |
| NCI-H292 IFN gamma | 5.6 |
| HPAEC none | 0.2 |
| HPAEC TNF alpha + IL-1 beta | 4.9 |
| Lung fibroblast none | 46.7 |
| Lung fibroblast TNF alpha + IL-1 beta | 9.7 |
| Lung fibroblast IL-4 | 23.5 |
| Lung fibroblast IL-9 | 32.5 |
| Lung fibroblast IL-13 | 18.6 |
| Lung fibroblast IFN gamma | 73.7 |
| Dermal fibroblast CCD1070 rest | 1.8 |
| Dermal fibroblast CCD1070 TNF alpha | 0.3 |
| Dermal fibroblast CCD1070 IL-1 beta | 2.0 |
| Dermal fibroblast IFN gamma | 11.7 |
| Dermal fibroblast IL-4 | 4.0 |
| Dermal Fibroblasts rest | 10.1 |
| Neutrophils TNFa + LPS | 0.0 |
| Neutrophils rest | 0.7 |
| Colon | 0.6 |
| Lung | 0.7 |
| Thymus | 1.1 |
| Kidney | 2.4 |

Column A - Rel. Exp. (%) Ag5267, Run 230510063

[1468] TABLE AXE
general oncology screening panel_v_2.4

| Tissue Name | A |
|---|---|
| Colon cancer 1 | 6.4 |
| Colon cancer NAT 1 | 0.0 |
| Colon cancer 2 | 2.7 |
| Colon cancer NAT 2 | 3.9 |
| Colon cancer 3 | 7.0 |
| Colon cancer NAT 3 | 11.5 |
| Colon malignant cancer 4 | 5.5 |
| Colon normal adjacent tissue 4 | 3.7 |
| Lung cancer 1 | 7.7 |
| Lung NAT 1 | 0.5 |
| Lung cancer 2 | 12.3 |
| Lung NAT 2 | 3.2 |
| Squamous cell carcinoma 3 | 48.6 |
| Lung NAT 3 | 4.5 |
| metastatic melanoma 1 | 52.1 |
| Melanoma 2 | 23.8 |
| Melanoma 3 | 3.4 |
| metastatic melanoma 4 | 97.9 |
| metastatic melanoma 5 | 100.0 |
| Bladder cancer 1 | 4.5 |
| Bladder cancer NAT 1 | 0.0 |
| Bladder cancer 2 | 19.5 |
| Bladder cancer NAT 2 | 1.4 |
| Bladder cancer NAT 3 | 0.0 |
| Bladder cancer NAT 4 | 20.9 |
| Prostate adenocarcinoma 1 | 69.3 |
| Prostate adenocarcinoma 2 | 6.5 |
| Prostate adenocarcinoma 3 | 17.7 |
| Prostate adenocarcinoma 4 | 11.7 |
| Prostate cancer NAT 5 | 5.0 |
| Prostate adenocarcinoma 6 | 13.4 |
| Prostate adenocarcinoma 7 | 10.3 |
| Prostate adenocarcinoma 8 | 11.3 |
| Prostate adenocarcinoma 9 | 93.3 |
| Prostate cancer NAT 10 | 1.4 |
| Kidney cancer 1 | 14.8 |
| KidneyNAT 1 | 2.9 |
| Kidney cancer 2 | 16.4 |
| Kidney NAT 2 | 12.2 |
| Kidney cancer 3 | 18.4 |
| Kidney NAT 3 | 5.3 |
| Kidney cancer 4 | 2.8 |
| Kidney NAT 4 | 2.1 |

Column A - Rel. Exp. (%) Ag6188, Run 264979750

[1469] General_screening_panel_v1.5 Summary: Ag6188 Significant expression of this gene was seen in the brain. Expression of this gene is useful as a marker to differentiate between brain derived samples and other samples on this panel.

[1470] Among tissues with metabolic function, this gene was expressed at moderate to low levels in pituitary, adipose, adrenal gland, pancreas, thyroid, and adult and fetal skeletal muscle, heart, and liver. This widespread expression among these tissues shows that this gene product plays a role in normal neuroendocrine and metabolic function and that disregulated expression of this gene contributes to neuroendocrine disorders or metabolic diseases, such as obesity and diabetes.

[1471] Panel 4.1D Summary: Ag5267 This transcript was expressed in LAK cells and treatment of the LAK cells with PMA and ionomycin upregulated the expression of this transcript. This transcript was also induced in activated EOL cells and in fibroblasts. This gene encodes a putative NCAM, a type of cell surface protein often involved in cellular interaction, adhesion and signaling. Therapeutics designed with the protein encoded for this transcript are important in the treatment of diseases such as asthma, emphysema, psoriasis and arthritis.

[1472] general oncology screening panel_V_{—}2.4 Summary: Ag6188 Highest expression of this gene was seen in two melanoma samples (CTs=31). Prominent expression was seen in a squamous cell carcinoma sample and two prostate adenocarcinoma samples. Targeting this gene or its protein product is useful in the treatment of these cancers.

[1473] AY. CG57448-01: Protocadherin 10

[1474] Expression of gene CG57448-01 was assessed using the primer-probe sets Ag1096, and Ag3242, described in Tables AYA and AYB. Results of the RTQ-PCR runs are shown in Tables AYC, AYD, AYE, AYF, and AYG.

TABLE AYA
Probe Name Ag1096

| | | | | SEQ |
|---|---|---|---|---|
| | | | Start | ID |
| Primers | Sequences | Length | Position | No |
| Forward | 5′-actttggaagaggcattgct-3′ | 20 | 2455 | 1534 |
| Probe | TET-5′-cagacagattatgggctccatcgctt-3′- | 26 | 2476 | 1535 |
| | TAMRA | | | |
| Reverse | 5′-ctcgggataaccatgatcact-3′ | 21 | 2515 | 1536 |

[1475] TABLE AYB
Probe Name Ag3242

| | | | | |
|---|---|---|---|---|
| | | | | SEQ |
| | | | Start | ID |
| Primers | Sequences | Length | Position | No |

| | | | | |
|---|---|---|---|---|
| Forward | 5′-gggaccaatgctcaaattactt-3′ | 22 | 1090 | 1537 |
| Probe | TET-5′-tcagaaagttccacaagcatctaagga-3′- | 27 | 1122 | 1538 |
| | TAMRA | | | |
| Reverse | 5′-atgactccagtgttttcatcca-3′ | 22 | 1160 | 1539 |

[1476] TABLE AYC
AI_comprehensive panel_v1.0

| Tissue Name | A |
|---|---|
| 110967 COPD-F | 28.9 |
| 110980 COPD-F | 6.7 |
| 110968 COPD-M | 19.9 |
| 110977 COPD-M | 8.4 |
| 110989 Emphysema-F | 49.3 |
| 110992 Emphysema-F | 22.8 |
| 110993 Emphysema-F | 31.0 |
| 110994 Emphysema-F | 12.7 |
| 110995 Emphysema-F | 25.5 |
| 110996 Emphysema-F | 15.8 |
| 110997 Asthma-M | 7.5 |
| 111001 Asthma-F | 30.4 |
| 111002 Asthma-F | 45.4 |
| 111003 Atopic Asthma-F | 45.1 |
| 111004 Atopic Asthma-F | 22.4 |
| 111005 Atopic Asthma-F | 25.3 |
| 111006 Atopic Asthma-F | 13.9 |
| 111417 Allergy-M | 15.1 |
| 112347 Allergy-M | 5.0 |
| 112349 Normal Lung-F | 1.9 |
| 112357 Normal Lung-F | 5.1 |
| 112354 Normal Lung-M | 11.6 |
| 112374 Crohns-F | 32.5 |
| 112389 Match Control Crohns-F | 14.4 |
| 112375 Crohns-F | 36.1 |
| 112732 Match Control Crohns-F | 0.0 |
| 112725 Crohns-M | 45.4 |
| 112387 Match Control Crohns-M | 18.3 |
| 112378 Crohns-M | 3.8 |
| 112390 Match Control Crohns-M | 22.4 |
| 112726 Crohns-M | 45.7 |
| 112731 Match Control Crohns-M | 12.6 |
| 112380 Ulcer Col-F | 28.3 |
| 112734 Match Control Ulcer Col-F | 0.8 |
| 112384 Ulcer Col-F | 100.0 |
| 112737 Match Control Ulcer Col-F | 28.1 |
| 112386 Ulcer Col-F | 25.5 |
| 112738 Match Control Ulcer Col-F | 2.1 |
| 112381 Ulcer Col-M | 2.3 |
| 112735 Match Control Ulcer Col-M | 53.6 |
| 112382 Ulcer Col-M | 15.3 |
| 112394 Match Control Ulcer Col-M | 10.2 |
| 112383 Ulcer Col-M | 45.4 |
| 112736 Match Control Ulcer Col-M | 4.0 |
| 112423 Psoriasis-F | 90.1 |
| 112427 Match Control Psoriasis-F | 55.9 |
| 112418 Psoriasis-M | 25.7 |
| 112723 Match Control Psoriasis-M | 0.0 |
| 112419 Psoriasis-M | 66.0 |
| 112424 Match Control Psoriasis-M | 42.0 |
| 112420 Psoriasis-M | 44.4 |
| 112425 Match Control Psoriasis-M | 24.3 |
| 104689 (MF) OA Bone-Backus | 81.2 |
| 104690 (MF) Adj “Normal” Bone-Backus | 16.6 |
| 104691 (MF) OA Synovium-Backus | 1.5 |
| 104692 (BA) OA Cartilage-Backus | 7.4 |
| 104694 (BA) OA Bone-Backus | 56.3 |
| 104695 (BA) Adj “Normal” Bone-Backus | 31.6 |
| 104696 (BA) OA Synovium-Backus | 0.0 |
| 104700 (SS) OA Bone-Backus | 63.7 |
| 104701 (SS) Adj “Normal” Bone-Backus | 63.3 |
| 104702 (SS) OA Synovium-Backus | 6.1 |
| 117093 OA Cartilage Rep7 | 16.3 |
| 112672 OA Bone5 | 13.2 |
| 112673 OA Synovium5 | 5.4 |
| 112674 OA Synovial Fluid cells5 | 7.7 |
| 117100 OA Cartilage Rep14 | 4.5 |
| 112756 OA Bone9 | 17.1 |
| 112757 OA Synovium9 | 21.8 |
| 112758 OA Synovial Fluid Cells9 | 13.3 |
| 117125 RA Cartilage Rep2 | 28.1 |
| 113492 Bone2 RA | 34.2 |
| 113493 Synovium2 RA | 8.9 |
| 113494 Syn Fluid Cells RA | 25.7 |
| 113499 Cartilage4 RA | 45.1 |
| 113500 Bone4 RA | 47.3 |
| 113501 Synovium4 RA | 42.6 |
| 113502 Syn Fluid Cells4 RA | 25.5 |
| 113495 Cartilage3 RA | 33.7 |
| 113496 Bone3 RA | 38.7 |
| 113497 Synovium3 RA | 18.2 |
| 113498 Syn Fluid Cells3 RA | 30.8 |
| 117106 Normal Cartilage Rep20 | 0.0 |
| 113663 Bone3 Normal | 2.8 |
| 113664 Synovium3 Normal | 0.0 |
| 113665 Syn Fluid Cells3 Normal | 2.9 |
| 117107 Normal Cartilage Rep22 | 10.5 |
| 113667 Bone4 Normal | 17.2 |
| 113668 Synovium4 Normal | 17.0 |
| 113669 Syn Fluid Cells4 Normal | 36.3 |

Column A - Rel. Exp. (%) Ag3242, Run 253058919

[1477] TABLE AYD
CNS_neurodegeneration_v1.0

| Tissue Name | A | B |
|---|---|---|
| AD 1 Hippo | 74.2 | 45.4 |
| AD 2 Hippo | 18.8 | 27.5 |
| AD 3 Hippo | 32.3 | 19.5 |
| AD 4 Hippo | 6.8 | 6.3 |
| AD 5 Hippo | 39.2 | 30.8 |
| AD 6 Hippo | 100.0 | 100.0 |
| Control 2 Hippo | 89.5 | 61.6 |
| Control 4 Hippo | 13.6 | 10.1 |
| Control (Path) 3 Hippo | 17.6 | 3.8 |
| AD 1 Temporal Ctx | 8.2 | 6.2 |
| AD 2 Temporal Ctx | 19.8 | 11.8 |
| AD 3 Temporal Ctx | 9.9 | 4.0 |
| AD 4 Temporal Ctx | 12.1 | 6.3 |
| AD 5 Inf Temporal Ctx | 59.5 | 47.3 |
| AD 5 Sup Temporal Ctx | 72.7 | 67.8 |
| AD 6 Inf Temporal Ctx | 12.9 | 12.9 |
| AD 6 Sup Temporal Ctx | 14.6 | 12.2 |
| Control 1 Temporal Ctx | 7.5 | 8.5 |
| Control 2 Temporal Ctx | 34.4 | 35.1 |
| Control 3 Temporal Ctx | 13.9 | 10.8 |
| Control 3 Temporal Ctx | 5.2 | 2.9 |
| Control (Path) 1 Temporal Ctx | 38.7 | 32.8 |
| Control (Path) 2 Temporal Ctx | 25.7 | 18.3 |
| Control (Path) 3 Temporal Ctx | 4.1 | 6.0 |
| Control (Path) 4 Temporal Ctx | 18.4 | 7.6 |
| AD 1 Occipital Ctx | 14.8 | 7.0 |
| AD 2 Occipital Ctx (Missing) | 0.6 | 1.9 |
| AD 3 Occipital Ctx | 23.2 | 11.5 |
| AD 4 Occipital Ctx | 12.8 | 8.4 |
| AD 5 Occipital Ctx | 34.6 | 23.3 |
| AD 6 Occipital Ctx | 10.7 | 2.1 |
| Control 1 Occipital Ctx | 4.0 | 1.6 |
| Control 2 Occipital Ctx | 20.6 | 23.5 |
| Control 3 Occipital Ctx | 6.7 | 7.7 |
| Control 4 Occipital Ctx | 5.1 | 2.8 |
| Control (Path) 1 Occipital Ctx | 30.4 | 26.4 |
| Control (Path) 2 Occipital Ctx | 6.5 | 1.9 |
| Control (Path) 3 Occipital Ctx | 4.4 | 2.6 |
| Control (Path) 4 Occipital Ctx | 7.1 | 3.2 |
| Control 1 Parietal Ctx | 4.6 | 4.8 |
| Control 2 Parietal Ctx | 27.0 | 24.3 |
| Control 3 Parietal Ctx | 14.5 | 14.0 |
| Control (Path) 1 Parietal Ctx | 40.3 | 40.3 |
| Control (Path) 2 Parietal Ctx | 17.2 | 7.8 |
| Control (Path) 3 Parietal Ctx | 7.0 | 2.7 |
| Control (Path) 4 Parietal Ctx | 21.8 | 20.0 |

Column A - Rel. Exp. (%) Ag1096, Run 206231465
Column B - Rel. Exp. (%) Ag3242, Run 206533581

[1478] TABLE AYE
Panel 1.3D

| Tissue Name | A |
|---|---|
| Liver adenocarcinoma | 0.0 |
| Pancreas | 1.0 |
| Pancreatic ca. CAPAN 2 | 0.0 |
| Adrenal gland | 0.3 |
| Thyroid | 0.0 |
| Salivary gland | 0.6 |
| Pituitary gland | 4.8 |
| Brain (fetal) | 11.8 |
| Brain (whole) | 40.6 |
| Brain (amygdala) | 31.6 |
| Brain (cerebellum) | 3.0 |
| Brain (hippocampus) | 76.3 |
| Brain (substantia nigra) | 2.1 |
| Brain (thalamus) | 6.3 |
| Cerebral Cortex | 27.7 |
| Spinal cord | 7.7 |
| glio/astro U87-MG | 0.6 |
| glio/astro U-118-MG | 0.5 |
| astrocytoma SW1783 | 0.0 |
| neuro*; met SK-N-AS | 7.5 |
| astrocytoma SF-539 | 0.0 |
| astrocytoma SNB-75 | 8.4 |
| glioma SNB-19 | 3.0 |
| glioma U251 | 66.4 |
| glioma SF-295 | 0.6 |
| Heart (fetal) | 3.7 |
| Heart | 1.7 |
| Skeletal muscle (fetal) | 6.9 |
| Skeletal muscle | 1.9 |
| Bone marrow | 0.0 |
| Thymus | 0.4 |
| Spleen | 0.0 |
| Lymph node | 0.0 |
| Colorectal | 3.5 |
| Stomach | 2.5 |
| Small intestine | 7.2 |
| Colon ca. SW480 | 0.0 |
| Colon ca.* SW620(SW480 met) | 0.0 |
| Colon ca. HT29 | 0.0 |
| Colon ca. HCT-116 | 0.0 |
| Colon ca. CaCo-2 | 0.0 |
| Colon ca. tissue(ODO3866) | 0.0 |
| Colon ca. HCC-2998 | 2.1 |
| Gastric ca.* (liver met) NCI-N87 | 0.0 |
| Bladder | 0.0 |
| Trachea | 9.0 |
| Kidney | 1.5 |
| Kidney (fetal) | 2.7 |
| Renal ca. 786-0 | 0.0 |
| Renal ca. A498 | 0.0 |
| Renal ca. RXF 393 | 0.4 |
| Renal ca. ACHN | 100.0 |
| Renal ca. UO-31 | 0.0 |
| Renal ca. TK-10 | 1.1 |
| Liver | 1.0 |
| Liver (fetal) | 0.0 |
| Liver ca. (hepatoblast) HepG2 | 0.0 |
| Lung | 4.8 |
| Lung (fetal) | 2.2 |
| Lung ca. (small cell) LX-1 | 3.7 |
| Lung ca. (small cell) NCI-H69 | 0.0 |
| Lung ca. (s. cell var.) SHP-77 | 16.0 |
| Lung ca. (large cell)NCI-H460 | 46.0 |
| Lung ca. (non-sm. cell) A549 | 0.0 |
| Lung ca. (non-s. cell) NCI-H23 | 8.0 |
| Lung ca. (non-s. cell) HOP-62 | 13.6 |
| Lung ca. (non-s. cl) NCI-H522 | 0.0 |
| Lung ca. (squam.) SW 900 | 18.8 |
| Lung ca. (squam.) NCI-H596 | 0.0 |
| Mammary gland | 1.4 |
| Breast ca.* (pl. ef) MCF-7 | 0.0 |
| Breast ca.* (pl. ef) MDA-MB-231 | 0.0 |
| Breast ca.* (pl. ef) T47D | 1.4 |
| Breast ca. BT-549 | 1.6 |
| Breast ca. MDA-N | 0.0 |
| Ovary | 1.5 |
| Ovarian ca. OVCAR-3 | 1.4 |
| Ovarian ca. OVCAR-4 | 0.0 |
| Ovarian ca. OVCAR-5 | 24.8 |
| Ovarian ca. OVCAR-8 | 0.6 |
| Ovarian ca. IGROV-1 | 0.0 |
| Ovarian ca.* (ascites) SK-OV-3 | 5.4 |
| Uterus | 15.5 |
| Placenta | 1.1 |
| Prostate | 1.4 |
| Prostate ca.* (bone met)PC-3 | 0.4 |
| Testis | 2.3 |
| Melanoma Hs688(A).T | 0.0 |
| Melanoma* (met) Hs688(B).T | 0.0 |
| Melanoma UACC-62 | 0.0 |
| Melanoma M14 | 1.6 |
| Melanoma LOX IMVI | 0.0 |
| Melanoma* (met) SK-MEL-5 | 58.6 |
| Adipose | 1.5 |

Column A - Rel. Exp. (%) Ag3242, Run 165524415

[1479] TABLE AYF
Panel 2.2

| Tissue Name | A |
|---|---|
| Normal Colon | 4.4 |
| Colon cancer (OD06064) | 1.8 |
| Colon Margin (OD06064) | 8.9 |
| Colon cancer (OD06159) | 2.0 |
| Colon Margin (OD06159) | 7.1 |
| Colon cancer (OD06297-04) | 2.4 |
| Colon Margin (OD06297-05) | 2.2 |
| CC Gr.2 ascend colon (ODO3921) | 0.9 |
| CC Margin (ODO3921) | 3.8 |
| Colon cancer metastasis (OD06104) | 0.7 |
| Lung Margin (OD06104) | 0.0 |
| Colon mets to lung (OD04451-01) | 1.7 |
| Lung Margin (OD04451-02) | 10.1 |
| Normal Prostate | 0.4 |
| Prostate Cancer (OD04410) | 0.3 |
| Prostate Margin (OD04410) | 0.0 |
| Normal Ovary | 0.0 |
| Ovarian cancer (OD06283-03) | 0.0 |
| Ovarian Margin (OD06283-07) | 0.0 |
| Ovarian Cancer 064008 | 1.9 |
| Ovarian cancer (OD06145) | 0.0 |
| Ovarian Margin (OD06145) | 0.0 |
| Ovarian cancer (OD06455-03) | 0.0 |
| Ovarian Margin (OD06455-07) | 1.2 |
| Normal Lung | 2.3 |
| Invasive poor diff. lung adeno (ODO4945-01 | 1.1 |
| Lung Margin (ODO4945-03) | 1.6 |
| Lung Malignant Cancer (OD03126) | 0.7 |
| Lung Margin (OD03126) | 1.2 |
| Lung Cancer (OD05014A) | 1.2 |
| Lung Margin (OD05014B) | 4.4 |
| Lung cancer (OD06081) | 0.8 |
| Lung Margin (OD06081) | 2.8 |
| Lung Cancer (OD04237-01) | 0.0 |
| Lung Margin (OD04237-02) | 6.0 |
| Ocular Melanoma Metastasis | 100.0 |
| Ocular Melanoma Margin (Liver) | 0.7 |
| Melanoma Metastasis | 1.2 |
| Melanoma Margin (Lung) | 4.9 |
| Normal Kidney | 0.0 |
| Kidney Ca, Nuclear grade 2 (OD04338) | 1.3 |
| Kidney Margin (OD04338) | 0.4 |
| Kidney Ca Nuclear grade 1/2 (OD04339) | 0.6 |
| Kidney Margin (OD04339) | 1.6 |
| Kidney Ca, Clear cell type (OD04340) | 0.0 |
| Kidney Margin (OD04340) | 1.1 |
| Kidney Ca, Nuclear grade 3 (OD04348) | 0.0 |
| Kidney Margin (OD04348) | 1.0 |
| Kidney malignant cancer (OD06204B) | 0.4 |
| Kidney normal adjacent tissue (OD06204E) | 1.8 |
| Kidney Cancer (OD04450-01) | 2.3 |
| Kidney Margin (OD04450-03) | 0.9 |
| Kidney Cancer 8120613 | 0.0 |
| Kidney Margin 8120614 | 0.4 |
| Kidney Cancer 9010320 | 1.4 |
| Kidney Margin 9010321 | 1.3 |
| Kidney Cancer 8120607 | 0.8 |
| Kidney Margin 8120608 | 0.2 |
| Normal Uterus | 5.3 |
| Uterine Cancer 064011 | 0.5 |
| Normal Thyroid | 0.0 |
| Thyroid Cancer 064010 | 0.7 |
| Thyroid Cancer A302152 | 0.9 |
| Thyroid Margin A302153 | 0.0 |
| Normal Breast | 0.6 |
| Breast Cancer (OD04566) | 0.0 |
| Breast Cancer 1024 | 2.1 |
| Breast Cancer (OD04590-01) | 0.0 |
| Breast Cancer Mets (OD04590-03) | 0.0 |
| Breast Cancer Metastasis (OD04655-05) | 0.4 |
| Breast Cancer 064006 | 0.7 |
| Breast Cancer 9100266 | 0.7 |
| Breast Margin 9100265 | 0.2 |
| Breast Cancer A209073 | 0.0 |
| Breast Margin A2090734 | 0.0 |
| Breast cancer (OD06083) | 0.4 |
| Breast cancer node metastasis (OD06083) | 0.9 |
| Normal Liver | 1.3 |
| Liver Cancer 1026 | 0.3 |
| Liver Cancer 1025 | 0.0 |
| Liver Cancer 6004-T | 0.0 |
| Liver Tissue 6004-N | 0.0 |
| Liver Cancer 6005-T | 2.7 |
| Liver Tissue 6005-N | 3.3 |
| Liver Cancer 064003 | 7.1 |
| Normal Bladder | 0.0 |
| Bladder Cancer 1023 | 0.0 |
| Bladder Cancer A302173 | 0.3 |
| Normal Stomach | 5.8 |
| Gastric Cancer 9060397 | 0.0 |
| Stomach Margin 9060396 | 2.6 |
| Gastric Cancer 9060395 | 2.2 |
| Stomach Margin 9060394 | 3.4 |
| Gastric Cancer 064005 | 0.3 |

Column A - Rel. Exp. (%) Ag3242, Run 174443348

[1480] TABLE AYG
Panel 4D

| Tissue Name | A | B |
|---|---|---|
| Secondary Th1 act | 0.0 | 0.0 |
| Secondary Th2 act | 0.0 | 0.0 |
| Secondary Tr1 act | 0.0 | 0.0 |
| Secondary Th1 rest | 0.0 | 0.0 |
| Secondary Th2 rest | 0.0 | 0.0 |
| Secondary Tr1 rest | 0.0 | 0.0 |
| Primary Th1 act | 0.0 | 0.0 |
| Primary Th2 act | 0.0 | 0.0 |
| Primary Tr1 act | 0.0 | 0.0 |
| Primary Th1 rest | 0.0 | 0.0 |
| Primary Th2 rest | 0.0 | 0.0 |
| Primary Tr1 rest | 0.0 | 0.0 |
| CD45RA CD4 lymphocyte act | 0.0 | 0.0 |
| CD45RO CD4 lymphocyte act | 0.0 | 0.0 |
| CD8 lymphocyte act | 1.3 | 0.0 |
| Secondary CD8 lymphocyte rest | 0.7 | 0.0 |
| Secondary CD8 lymphocyte act | 0.0 | 0.0 |
| CD4 lymphocyte none | 0.0 | 0.0 |
| 2ry Th1/Th2/Tr1_anti-CD95 CH11 | 0.0 | 0.0 |
| LAK cells rest | 0.0 | 0.0 |
| LAK cells IL-2 | 0.0 | 0.0 |
| LAK cells IL-2 + IL-12 | 0.0 | 0.0 |
| LAK cells IL-2 + IFN gamma | 0.8 | 0.0 |
| LAK cells IL-2 + IL-18 | 0.0 | 0.0 |
| LAK cells PMA/ionomycin | 0.0 | 0.0 |
| NK Cells IL-2 rest | 0.8 | 0.0 |
| Two Way MLR 3 day | 0.0 | 0.0 |
| Two Way MLR 5 day | 0.0 | 0.0 |
| Two Way MLR 7 day | 1.5 | 0.0 |
| PBMC rest | 0.0 | 0.0 |
| PBMC PWM | 0.0 | 0.0 |
| PBMC PHA-L | 0.0 | 0.0 |
| Ramos (B cell) none | 0.0 | 0.0 |
| Ramos (B cell) ionomycin | 0.0 | 0.0 |
| B lymphocytes PWM | 0.0 | 0.0 |
| B lymphocytes CD40L and IL-4 | 0.0 | 0.0 |
| EOL-1 dbcAMP | 0.0 | 0.0 |
| EOL-1 dbcAMP PMA/ionomycin | 0.0 | 0.0 |
| Dendritic cells none | 0.0 | 0.0 |
| Dendritic cells LPS | 0.0 | 0.0 |
| Dendritic cells anti-CD40 | 0.0 | 0.0 |
| Monocytes rest | 0.0 | 0.0 |
| Monocytes LPS | 1.7 | 0.0 |
| Macrophages rest | 0.0 | 0.0 |
| Macrophages LPS | 0.0 | 0.0 |
| HUVEC none | 0.0 | 0.0 |
| HUVEC starved | 0.0 | 0.0 |
| HUVEC IL-1beta | 0.0 | 0.0 |
| HUVEC IFN gamma | 0.4 | 0.0 |
| HUVEC TNF alpha + IFN gamma | 0.0 | 0.0 |
| HUVEC TNF alpha + IL4 | 2.0 | 0.0 |
| HUVEC IL-11 | 0.0 | 0.0 |
| Lung Microvascular EC none | 0.0 | 0.0 |
| Lung Microvascular EC TNFalpha + | 0.0 | 0.0 |
| IL-1beta | | |
| Microvascular Dermal EC none | 0.0 | 0.0 |
| Microsvasular Dermal EC TNFalpha + | 0.0 | 0.0 |
| IL-1beta | | |
| Bronchial epithelium TNFalpha + IL1beta | 0.0 | 0.0 |
| Small airway epithelium none | 0.0 | 0.0 |
| Small airway epithelium TNFalpha + | 6.5 | 11.7 |
| IL-1beta | | |
| Coronery artery SMC rest | 0.7 | 0.0 |
| Coronery artery SMC TNFalpha + IL-1beta | 0.0 | 0.0 |
| Astrocytes rest | 13.9 | 16.8 |
| Astrocytes TNFalpha + IL-1beta | 3.6 | 5.3 |
| KU-812 (Basophil) rest | 0.9 | 1.0 |
| KU-812 (Basophil) PMA/ionomycin | 100.0 | 100.0 |
| CCD1106 (Keratinocytes) none | 0.0 | 0.0 |
| CCD1106 (Keratinocytes) TNFalpha + | 0.0 | 0.0 |
| IL-1beta | | |
| Liver cirrhosis | 1.9 | 3.8 |
| Lupus kidney | 1.3 | 1.4 |
| NCI-H292 none | 42.9 | 48.0 |
| NCI-H292 IL-4 | 14.7 | 14.8 |
| NCI-H292 IL-9 | 40.6 | 36.6 |
| NCI-H292 IL-13 | 12.2 | 7.4 |
| NCI-H292 IFN gamma | 16.8 | 10.9 |
| HPAEC none | 0.0 | 0.0 |
| HPAEC TNF alpha + IL-1 beta | 0.0 | 0.0 |
| Lung fibroblast none | 0.0 | 1.7 |
| Lung fibroblast TNF alpha + IL-1 beta | 0.0 | 0.0 |
| Lung fibroblast IL-4 | 1.7 | 0.0 |
| Lung fibroblast IL-9 | 0.0 | 0.0 |
| Lung fibroblast IL-13 | 0.7 | 0.0 |
| Lung fibroblast IFN gamma | 0.0 | 0.0 |
| Dermal fibroblast CCD1070 rest | 0.0 | 0.0 |
| Dermal fibroblast CCD1070 TNF alpha | 0.0 | 0.0 |
| Dermal fibroblast CCD1070 IL-1 beta | 0.9 | 0.0 |
| Dermal fibroblast IFN gamma | 0.0 | 0.0 |
| Dermal fibroblast IL-4 | 0.0 | 0.0 |
| IBD Colitis 2 | 0.8 | 2.6 |
| IBD Crohn's | 0.0 | 2.0 |
| Colon | 28.1 | 23.2 |
| Lung | 34.9 | 51.4 |
| Thymus | 35.1 | 28.3 |
| Kidney | 8.2 | 7.4 |

Column A - Rel. Exp. (%) Ag1096, Run 160353275
Column B - Pel. Exp. (%) Ag3242, Run 164390548

[1481] AI_comprehensive panel_v1.0 Summary: Ag3242 Expression of this gene was ubiquitous in this panel, with high expression in samples derived from patients suffering from ulcerative colitis, Crohns disease and psoriasis (CTs=33). Significant expression was also seen in samples derived from synovium, cartilage and bone of rheumatoid arthritis. Antibody or small molecule therapies designed with the protein encoded for by this gene are useful in the treatment of inflammatory bowel diseases and rheumatoid arthritis.

[1482] Panel 1.3D Summary: Ag3242 Highest expression of the CG57448-01 gene was seen in a renal cancer cell line (CT=31.1). Significant expression was also seen in cell lines derived from ovarian cancer, lung cancer, brain cancer and melanoma. Expression of this gene is useful as a marker to differentiate between these samples and other samples on this panel and as a diagnostic marker for the presence of these cancers. This gene encodes a protein that is homologous to cadherin, a cell-adhesion molecule. Therapeutic modulation of the expression or function of this gene or gene prduct is effective in the treatment of lung, renal and melanoma cancers.

[1483] Expression of the this gene was also high in many regions of the brain, including the amygdala, thalamus, cerebellum, and cerebral cortex, with highest expression in the hippocampus. Expression was also detected in the spinal cord. Cadherins can act as axon guidance and cell adhesion proteins, specifically during development and in the response to injury (Ranscht B. (2000) Int. J. Dev. Neurosci. 18: 643-651.). Manipulation of levels of this protein are of use in inducing a compensatory synaptogenic response to neuronal death in Alzheimer's disease, Parkinson's disease, Huntington's disease, spinocerebellar ataxia, progressive supranuclear palsy, ALS, head trauma, stroke, or any other disease/condition associated with neuronal loss.

[1484] Among tissues with metabolic function, this gene was moderately expressed in pituitary gland, adrenal gland, thyroid, pancreas, skeletal muscle, and liver, reflecting the widespread role of cadherins in cell-cell adhesion. This expression shows that this gene product plays a role in normal metabolic and neuroendocrine function and that dysregulated expression of this gene contributes to metabolic diseases (such as obesity and diabetes) or neuroendocrine disorders.

[1485] Panel 2.2 Summary: Ag3242 Highest expression of this gene was seen in a sample derived from an ocular melanoma metastasis (CT=29). Thus, expression of this gene is useful as a marker to differentiate between this sample and other samples on this panel.

[1486] Panel 4D Summary: Ag1096/Ag3242 Highest expression of this gene was detected in the basophil cell line (KU-812) treated with PMA/ionomycin (CTs=30-32).

[1487] Significant expression was also seen in a cluster of treated and untreated samples derived from the muco-epidermoid cell line NCI-H292. Thus, this gene, which encodes a cadherin homolog, was expressed in both a cell line that is often used as a model of airway epithelium (NCI-H292) and a cell line that is a reasonable model for the inflammatory cells that contribute to various inflammatory lung diseases. Therapeutic modulation of this gene or gene prodcut may is useful to reduce or eliminate the symptoms of patients suffering from pathological and inflammatory lung disorders, including chronic obstructive pulmonary disease, asthma, allergy and emphysema.

[1488] Low but significant levels of expression were also seen in the samples derived from normal colon, kidney, lung and thymus. Therapeutic modulation of the expression or function of this gene or gene product is important for maintaining or restoring normal function to this organs during inflammation.

[1489] AZ. CG58567-01: Protocadherin

[1490] Expression of gene CG58567-01 was assessed using the primer-probe set Ag2897, described in Table AZA. Results of the RTQ-PCR runs are shown in Tables AZB, AZC, AZD, AZE and AZF.

TABLE AZA
Probe Name Ag2897

| | | | | SEQ |
|---|---|---|---|---|
| | | | Start | ID |
| Primers | Sequences | Length | Position | No |
| Forward | 5′-tgacaggggatattcatgctaa-3′ | 22 | 1565 | `1540 |
| Probe | TET-5′-tggcaataaatactgcctcacagtcca-3′- | 27 | 1608 | 1541 |
| | TAMRA | | | |
| Reverse | 5′-agttgcatcacctttgtctttg-3′ | 22 | 1638 | 1542 |

[1491] TABLE AZB
AI_comprehensive panel_v1.0

| Tissue Name | A |
|---|---|
| 110967 COPD-F | 4.7 |
| 110980 COPD-F | 22.5 |
| 110968 COPD-M | 8.5 |
| 110977 COPD-M | 51.8 |
| 110989 Emphysema-F | 51.8 |
| 110992 Emphysema-F | 5.0 |
| 110993 Emphysema-F | 5.6 |
| 110994 Emphysema-F | 3.3 |
| 110995 Emphysema-F | 13.2 |
| 110996 Emphysema-F | 0.6 |
| 110997 Asthma-M | 1.4 |
| 111001 Asthma-F | 8.1 |
| 111002 Asthma-F | 12.5 |
| 111003 Atopic Asthma-F | 12.8 |
| 111004 Atopic Asthma-F | 12.3 |
| 111005 Atopic Asthma-F | 6.1 |
| 111006 Atopic Asthma-F | 3.7 |
| 111417 Allergy-M | 7.7 |
| 112347 Allergy-M | 0.8 |
| 112349 Normal Lung-F | 0.8 |
| 112357 Normal Lung-F | 20.2 |
| 112354 Normal Lung-M | 2.1 |
| 112374 Crohns-F | 4.7 |
| 112389 Match Control Crohns-F | 2.1 |
| 112375 Crohns-F | 6.7 |
| 112732 Match Control Crohns-F | 2.2 |
| 112725 Crohns-M | 18.9 |
| 112387 Match Control Crohns-M | 11.2 |
| 112378 Crohns-M | 1.3 |
| 112390 Match Control Crohns-M | 62.4 |
| 112726 Crohns-M | 9.6 |
| 112731 Match Control Crohns-M | 16.0 |
| 112380 Ulcer Col-F | 21.2 |
| 112734 Match Control Ulcer Col-F | 4.5 |
| 112384 Ulcer Col-F | 17.3 |
| 112737 Match Control Ulcer Col-F | 5.2 |
| 112386 Ulcer Col-F | 5.3 |
| 112738 Match Control Ulcer Col-F | 2.7 |
| 112381 Ulcer Col-M | 0.3 |
| 112735 Match Control Ulcer Col-M | 23.7 |
| 112382 Ulcer Col-M | 5.8 |
| 112394 Match Control Ulcer Col-M | 6.5 |
| 112383 Ulcer Col-M | 1.6 |
| 112736 Match Control Ulcer Col-M | 1.3 |
| 112423 Psoriasis-F | 7.9 |
| 112427 Match Control Psoriasis-F | 100.0 |
| 112418 Psoriasis-M | 2.8 |
| 112723 Match Control Psoriasis-M | 14.3 |
| 112419 Psoriasis-M | 10.7 |
| 112424 Match Control Psoriasis-M | 8.7 |
| 112420 Psoriasis-M | 40.1 |
| 112425 Match Control Psoriasis-M | 65.1 |
| 104689 (MF) OA Bone-Backus | 1.7 |
| 104690 (MF) Adj “Normal” Bone-Backus | 4.5 |
| 104691 (MF) OA Synovium-Backus | 9.5 |
| 104692 (BA) OA Cartilage-Backus | 3.1 |
| 104694 (BA) OA Bone-Backus | 1.3 |
| 104695 (BA) Adj “Normal” Bone-Backus | 1.8 |
| 104696 (BA) OA Synovium-Backus | 5.0 |
| 104700 (SS) OA Bone-Backus | 5.2 |
| 104701 (SS) Adj “Normal” Bone-Backus | 7.0 |
| 104702 (SS) OA Synovium-Backus | 12.7 |
| 117093 OA Cartilage Rep7 | 15.1 |
| 112672 OA Bone5 | 15.9 |
| 112673 OA Synovium5 | 8.2 |
| 112674 OA Synovia Fluid cells5 | 7.9 |
| 117100 OA Cartilage Rep14 | 1.3 |
| 112756 OA Bone9 | 0.8 |
| 112757 OA Synovium9 | 0.4 |
| 112758 OA Synovial Fluid Cells9 | 10.2 |
| 117125 RA Cartilage Rep2 | 6.5 |
| 113492 Bone2 RA | 2.2 |
| 113493 Synovium2 RA | 0.2 |
| 113494 Syn Fluid Cells RA | 2.0 |
| 113499 Cartilage4 RA | 1.6 |
| 113500 Bone4 RA | 1.3 |
| 113501 Synovium4 RA | 1.9 |
| 113502 Syn Fluid Cells4 RA | 1.0 |
| 113495 Cartilage3 RA | 1.1 |
| 113496 Bone3 RA | 1.4 |
| 113497 Synovium3 RA | 0.2 |
| 113498 Syn Fluid Cells3 RA | 1.2 |
| 117106 Normal Cartilage Rep20 | 0.3 |
| 113663 Bone3 Normal | 2.8 |
| 113664 Synovium3 Normal | 0.2 |
| 113665 Syn Fluid Cells3 Normal | 1.3 |
| 117107 Normal Cartilage Rep22 | 9.2 |
| 113667 Bone4 Normal | 9.5 |
| 113668 Synovium4 Normal | 6.1 |
| 113669 Syn Fluid Cells4 Normal | 10.2 |

Column A - Rel. Exp. (%) Ag2897, Run 229662505

[1492] TABLE AZC
Panel 1.3D

| Tissue Name | A | B |
|---|---|---|
| Liver adenocarcinoma | 0.0 | 0.0 |
| Pancreas | 1.4 | 2.4 |
| Pancreatic ca. CAPAN 2 | 0.0 | 0.0 |
| Adrenal gland | 1.4 | 0.0 |
| Thyroid | 0.0 | 0.0 |
| Salivary gland | 0.0 | 0.0 |
| Pituitary gland | 4.1 | 9.0 |
| Brain (fetal) | 7.1 | 17.8 |
| Brain (whole) | 21.0 | 59.0 |
| Brain (amygdala) | 24.7 | 37.9 |
| Brain (cerebellum) | 5.6 | 28.5 |
| Brain (hippocampus) | 25.2 | 25.3 |
| Brain (substantia nigra) | 0.9 | 17.1 |
| Brain (thalamus) | 4.1 | 23.0 |
| Cerebral Cortex | 100.0 | 22.2 |
| Spinal cord | 68.8 | 100.0 |
| glio/astro U87-MG | 54.3 | 10.4 |
| glio/astro U-118-MG | 1.5 | 20.4 |
| astrocytoma SW 1783 | 16.3 | 0.0 |
| neuro*; met SK-N-AS | 0.0 | 0.0 |
| astrocytoma SF-539 | 0.0 | 4.3 |
| astrocytoma SNB-75 | 18.4 | 28.7 |
| glioma SNB-19 | 0.0 | 2.6 |
| glioma U251 | 3.1 | 27.0 |
| glioma SF-295 | 4.8 | 2.2 |
| Heart (fetal) | 0.0 | 0.0 |
| Heart | 1.4 | 0.0 |
| Skeletal muscle (fetal) | 77.4 | 0.0 |
| Skeletal muscle | 1.1 | 14.1 |
| Bone marrow | 0.0 | 2.5 |
| Thymus | 2.1 | 2.4 |
| Spleen | 0.0 | 4.4 |
| Lymph node | 0.0 | 4.8 |
| Colorectal | 10.7 | 0.0 |
| Stomach | 8.7 | 64.6 |
| Small intestine | 7.2 | 18.9 |
| Colon ca. SW480 | 0.0 | 0.0 |
| Colon ca.* SW620(SW480 met) | 0.0 | 0.0 |
| Colon ca. HT29 | 0.0 | 0.0 |
| Colon ca. HCT-116 | 0.0 | 0.0 |
| Colon ca. CaCo-2 | 0.0 | 0.0 |
| Colon ca. tissue(ODO3866) | 1.7 | 8.1 |
| Colon ca. HCC-2998 | 0.0 | 0.0 |
| Gastric ca.* (liver met) NCI-N87 | 10.3 | 7.7 |
| Bladder | 14.2 | 29.3 |
| Trachea | 4.1 | 0.0 |
| Kidney | 0.0 | 0.0 |
| Kidney (fetal) | 2.8 | 2.4 |
| Renal ca. 786-0 | 0.9 | 3.3 |
| Renal ca. A498 | 13.9 | 23.7 |
| Renal ca. RXF 393 | 0.0 | 0.0 |
| Renal ca. ACHN | 0.0 | 0.0 |
| Renal ca. UO-31 | 0.0 | 0.0 |
| Renal ca. TK-10 | 0.0 | 0.0 |
| Liver | 0.0 | 2.9 |
| Liver (fetal) | 0.4 | 0.0 |
| Liver ca. (hepatoblast) HepG2 | 0.0 | 0.0 |
| Lung | 1.4 | 0.0 |
| Lung (fetal) | 6.8 | 11.0 |
| Lung ca. (small cell) LX-1 | 0.0 | 0.0 |
| Lung ca. (small cell) NCI-H69 | 0.0 | 4.1 |
| Lung ca. (s. cell var.) SHP-77 | 1.0 | 0.0 |
| Lung ca. (large cell)NCI-H460 | 0.0 | 0.0 |
| Lung ca. (non-sm. cell) A549 | 0.0 | 0.0 |
| Lung ca. (non-s. cell) NCI-H23 | 0.0 | 3.0 |
| Lung ca. (non-s. cell) HOP-62 | 0.6 | 7.5 |
| Lung ca. (non-s. cl) NCI-H522 | 0.0 | 0.0 |
| Lung ca. (squam.) SW 900 | 4.6 | 8.6 |
| Lung ca. (squam.) NCI-H596 | 0.0 | 0.0 |
| Mammary gland | 7.9 | 17.1 |
| Breast ca.* (pl. ef) MCF-7 | 0.0 | 0.0 |
| Breast ca.* (pl. ef) MDA-MB-231 | 0.0 | 14.5 |
| Breast ca.* (pl. ef) T47D | 0.0 | 0.0 |
| Breast ca. BT-549 | 0.0 | 12.2 |
| Breast ca. MDA-N | 0.0 | 0.0 |
| Ovary | 12.1 | 6.1 |
| Ovarian ca. OVCAR-3 | 3.8 | 12.1 |
| Ovarian ca. OVCAR-4 | 0.0 | 0.0 |
| Ovarian ca. OVCAR-5 | 32.5 | 25.5 |
| Ovarian ca. OVCAR-8 | 1.9 | 0.0 |
| Ovarian ca. IGROV-1 | 0.0 | 0.0 |
| Ovarian ca.* (ascites) SK-OV-3 | 0.0 | 0.0 |
| Uterus | 12.4 | 66.4 |
| Placenta | 0.0 | 2.3 |
| Prostate | 0.0 | 0.0 |
| Prostate ca.* (bone met)PC-3 | 0.0 | 0.0 |
| Testis | 56.3 | 68.8 |
| Melanoma Hs688(A).T | 1.3 | 8.2 |
| Melanoma* (met) Hs688(B).T | 2.5 | 4.8 |
| Melanoma UACC-62 | 1.5 | 2.8 |
| Melanoma M14 | 0.0 | 0.0 |
| Melanoma LOX IMVI | 0.0 | 0.0 |
| Melanoma* (met) SK-MEL-5 | 0.0 | 0.0 |
| Adipose | 7.2 | 0.0 |

Column A - Rel. Exp. (%) Ag2897, Run 161905860
Column B - Rel. Exp. (%) Ag2897, Run 165518166

[1493] TABLE AZD
Panel 2D

| Tissue Name | A | B |
|---|---|---|
| Normal Colon | 83.5 | 90.1 |
| CC Well to Mod Diff (ODO3866) | 0.0 | 7.2 |
| CC Margin (ODO3866) | 16.0 | 16.6 |
| CC Gr.2 rectosigmoid (ODO3868) | 0.0 | 0.0 |
| CC Margin (ODO3868) | 6.3 | 3.6 |
| CC Mod Diff (ODO3920) | 0.9 | 2.1 |
| CC Margin (ODO3920) | 19.1 | 11.7 |
| CC Gr.2 ascend colon (ODO3921) | 8.8 | 9.2 |
| CC Margin (ODO3921) | 6.9 | 7.5 |
| CC from Partial Hepatectomy | 0.9 | 3.3 |
| (ODO4309) Mets | | |
| Liver Margin (ODO4309) | 0.7 | 2.0 |
| Colon mets to lung (OD04451-01) | 0.0 | 0.0 |
| Lung Margin (OD04451-02) | 1.9 | 1.0 |
| Normal Prostate 6546-1 | 3.9 | 10.7 |
| Prostate Cancer (OD04410) | 17.3 | 11.6 |
| Prostate Margin (OD04410) | 25.0 | 15.5 |
| Prostate Cancer (OD04720-01) | 28.3 | 11.7 |
| Prostate Margin (OD04720-02) | 29.9 | 20.4 |
| Normal Lung 061010 | 16.2 | 15.1 |
| Lung Met to Muscle (ODO4286) | 1.2 | 0.0 |
| Muscle Margin (ODO4286) | 8.2 | 1.6 |
| Lung Malignant Cancer (OD03126) | 7.0 | 2.2 |
| Lung Margin (OD03126) | 2.3 | 3.0 |
| Lung Cancer (OD04404) | 8.2 | 3.1 |
| Lung Margin (OD04404) | 11.1 | 10.2 |
| Lung Cancer (OD04565) | 0.0 | 0.9 |
| Lung Margin (OD04565) | 1.9 | 5.0 |
| Lung Cancer (OD04237-01) | 95.3 | 55.9 |
| Lung Margin (OD04237-02) | 4.0 | 2.3 |
| Ocular Mel Met to Liver (ODO4310) | 0.0 | 0.0 |
| Liver Margin (ODO4310) | 2.7 | 0.8 |
| Melanoma Mets to Lung (OD04321) | 0.0 | 1.7 |
| Lung Margin (OD04321) | 10.1 | 6.6 |
| Normal Kidney | 14.8 | 16.4 |
| Kidney Ca, Nuclear grade 2 (OD04338) | 93.3 | 100.0 |
| Kidney Margin (OD04338) | 14.3 | 2.0 |
| Kidney Ca Nuclear grade 1/2 (OD04339) | 5.0 | 2.0 |
| Kidney Margin (OD04339) | 4.1 | 3.0 |
| Kidney Ca, Clear cell type (OD04340) | 27.0 | 17.4 |
| Kidney Margin (OD04340) | 6.4 | 12.7 |
| Kidney Ca, Nuclear grade 3 (OD04348) | 1.9 | 2.1 |
| Kidney Margin (OD04348) | 4.7 | 6.2 |
| Kidney Cancer (OD04622-01) | 50.0 | 38.4 |
| Kidney Margin (OD04622-03) | 4.2 | 0.0 |
| Kidney Cancer (OD04450-01) | 2.6 | 3.6 |
| Kidney Margin (OD04450-03) | 14.2 | 10.5 |
| Kidney Cancer 8120607 | 1.9 | 0.0 |
| Kidney Margin 8120608 | 1.3 | 0.9 |
| Kidney Cancer 8120613 | 1.4 | 1.6 |
| Kidney Margin 8120614 | 0.9 | 1.5 |
| Kidney Cancer 9010320 | 21.6 | 16.0 |
| Kidney Margin 9010321 | 1.9 | 0.5 |
| Normal Uterus | 9.5 | 10.9 |
| Uterus Cancer 064011 | 68.3 | 71.2 |
| Normal Thyroid | 3.3 | 0.8 |
| Thyroid Cancer 064010 | 2.0 | 6.9 |
| Thyroid Cancer A302152 | 8.9 | 12.2 |
| Thyroid Margin A302153 | 1.0 | 0.7 |
| Normal Breast | 15.9 | 15.3 |
| Breast Cancer (OD04566) | 4.3 | 6.3 |
| Breast Cancer (OD04590-01) | 7.3 | 2.8 |
| Breast Cancer Mets (OD04590-03) | 9.4 | 4.8 |
| Breast Cancer Metastasis (OD04655-05) | 3.6 | 0.9 |
| Breast Cancer 064006 | 8.4 | 11.6 |
| Breast Cancer 1024 | 2.6 | 4.3 |
| Breast Cancer 9100266 | 1.9 | 2.0 |
| Breast Margin 9100265 | 7.4 | 5.4 |
| Breast Cancer A209073 | 20.0 | 13.6 |
| Breast Margin A209073 | 5.0 | 12.0 |
| Normal Liver | 0.9 | 1.0 |
| Liver Cancer 064003 | 0.0 | 0.0 |
| Liver Cancer 1025 | 2.4 | 0.0 |
| Liver Cancer 1026 | 0.0 | 0.0 |
| Liver Cancer 6004-T | 0.0 | 1.0 |
| Liver Tissue 6004-N | 0.0 | 0.0 |
| Liver Cancer 6005-T | 0.0 | 0.0 |
| Liver Tissue 6005-N | 0.0 | 0.0 |
| Normal Bladder | 18.0 | 13.8 |
| Bladder Cancer 1023 | 1.0 | 0.7 |
| Bladder Cancer A302173 | 10.9 | 2.6 |
| Bladder Cancer (OD04718-01) | 0.0 | 1.9 |
| Bladder Normal Adjacent (OD04718-03) | 33.2 | 31.0 |
| Normal Ovary | 0.0 | 4.8 |
| Ovarian Cancer 064008 | 100.0 | 62.0 |
| Ovarian Cancer (OD04768-07) | 49.7 | 38.7 |
| Ovary Margin (OD04768-08) | 6.3 | 2.5 |
| Normal Stomach | 28.1 | 18.7 |
| Gastric Cancer 9060358 | 11.0 | 14.1 |
| Stomach Margin 9060359 | 15.9 | 29.7 |
| Gastric Cancer 9060395 | 15.0 | 6.8 |
| Stomach Margin 9060394 | 26.6 | 26.4 |
| Gastric Cancer 9060397 | 2.7 | 1.7 |
| Stomach Margin 9060396 | 28.1 | 33.0 |
| Gastric Cancer 064005 | 27.7 | 33.4 |

Column A - Pel. Exp. (%) Ag2897, Run 161905861
Column B - Rel. Exp. (%) Ag2897, Run 164997312

[1494] TABLE AZE
Panel 3D

| Tissue Name | A |
|---|---|
| Daoy- Medulloblastoma | 0.0 |
| TE671- Medulloblastoma | 0.0 |
| D283 Med- Medulloblastoma | 0.0 |
| PFSK-1- Primitive Neuroectodermal | 0.0 |
| XF-498- CNS | 0.6 |
| SNB-78- Glioma | 6.0 |
| SF-268- Glioblastoma | 0.0 |
| T98G- Glioblastoma | 0.0 |
| SK-N-SH- Neuroblastoma (metastasis) | 0.0 |
| SF-295- Glioblastoma | 0.0 |
| Cerebellum | 7.1 |
| Cerebellum | 0.0 |
| NCI-H292- Mucoepidermoid lung carcinoma | 0.0 |
| DMS-114- Small cell lung cancer | 0.0 |
| DMS-79- Small cell lung cancer | 0.8 |
| NCI-H146- Small cell lung cancer | 1.3 |
| NCI-H526- Small cell lung cancer | 100.0 |
| NCI-N417- Small cell lung cancer | 0.0 |
| NCI-H82- Small cell lung cancer | 0.0 |
| NCI-H157- Squamous cell lung cancer (metastasis) | 0.0 |
| NCI-H1155- Large cell lung cancer | 3.2 |
| NCI-H1299- Large cell lung cancer | 1.9 |
| NCI-H727- Lung carcinoid | 0.0 |
| NCI-UMC-11- Lung carcinoid | 2.1 |
| LX-1- Small cell lung cancer | 0.0 |
| Colo-205- Colon cancer | 0.0 |
| KM12- Colon cancer | 2.6 |
| KM20L2- Colon cancer | 0.0 |
| NCI-H716- Colon cancer | 31.0 |
| SW-48- Colon adenocarcinoma | 0.0 |
| SW1116- Colon adenocarcinoma | 0.0 |
| LS 174T- Colon adenocarcinoma | 0.0 |
| SW-948- Colon adenocarcinoma | 0.0 |
| SW-480- Colon adenocarcinoma | 1.5 |
| NCI-SNU-5- Gastric carcinoma | 0.0 |
| KATO III- Gastric carcinoma | 0.0 |
| NCI-SNU-16- Gastric carcinoma | 0.8 |
| NCI-SNU-1- Gastric carcinoma | 0.0 |
| RF-1- Gastric adenocarcinoma | 0.0 |
| RF-48- Gastric adenocarcinoma | 0.8 |
| MKN-45- Gastric carcinoma | 0.0 |
| NCI-N87- Gastric carcinoma | 0.3 |
| OVCAR-5- Ovarian carcinoma | 0.0 |
| RL95-2- Uterine carcinoma | 0.0 |
| HelaS3- Cervical adenocarcinoma | 0.0 |
| Ca Ski- Cervical epidermoid carcinoma (metastasis) | 0.0 |
| ES-2- Ovarian clear cell carcinoma | 0.8 |
| Ramos- Stimulated with PMA/ionomycin 6 h | 0.0 |
| Ramos- Stimulated with PMA/ionomycin 14 h | 0.0 |
| MEG-01- Chronic myelogenous leukemia | 0.0 |
| (megokaryoblast) | |
| Raji- Burkitt's lymphoma | 0.0 |
| Daudi- Burkitt's lymphoma | 0.0 |
| U266- B-cell plasmacytoma | 0.0 |
| CA46- Burkitt's lymphoma | 0.0 |
| RL- non-Hodgkin's B-cell lymphoma | 0.0 |
| JM1- pre-B-cell lymphoma | 0.0 |
| Jurkat- T cell leukemia | 0.0 |
| TF-1- Erythroleukemia | 0.0 |
| HUT 78- T-cell lymphoma | 0.0 |
| U937- Histiocytic lymphoma | 0.0 |
| KU-812- Myelogenous leukemia | 0.0 |
| 769-P- Clear cell renal carcinoma | 0.0 |
| Caki-2- Clear cell renal carcinoma | 0.9 |
| SW 839- Clear cell renal carcinoma | 0.0 |
| Rhabdoid kidney tumor | 0.0 |
| Hs766T- Pancreatic carcinoma (LN metastasis) | 0.0 |
| CAPAN-1- Pancreatic adenocarcinoma (liver | 0.0 |
| metastasis) | |
| SU86.86- Pancreatic carcinoma (liver metastasis) | 0.6 |
| BxPC-3- Pancreatic adenocarcinoma | 0.0 |
| HPAC- Pancreatic adenocarcinoma | 0.0 |
| MIA PaCa-2- Pancreatic carcinoma | 0.0 |
| CFPAC-1- Pancreatic ductal adenocarcinoma | 0.4 |
| PANC-1- Pancreatic epithelioid ductal carcinoma | 0.0 |
| T24- Bladder carcinma (transitional cell) | 0.0 |
| 5637- Bladder carcinoma | 0.0 |
| HT-1197- Bladder carcinoma | 0.0 |
| UM-UC-3- Bladder carcinma (transitional cell) | 0.0 |
| A204- Rhabdomyosarcoma | 0.0 |
| HT-1080- Fibrosarcoma | 0.8 |
| MG-63- Osteosarcoma | 0.0 |
| SK-LMS-1- Leiomyosarcoma (vulva) | 0.0 |
| SJRH30- Rhabdomyosarcoma (met to bone marrow) | 0.0 |
| A431- Epidermoid carcinoma | 0.0 |
| WM266-4- Melanoma | 1.2 |
| DU 145- Prostate carcinoma (brain metastasis) | 0.0 |
| MDA-MB-468- Breast adenocarcinoma | 0.8 |
| SCC-4- Squamous cell carcinoma of tongue | 0.0 |
| SCC-9- Squamous cell carcinoma of tongue | 0.0 |
| SCC-15- Squamous cell carcinoma of tongue | 0.0 |
| CAL 27- Squamous cell carcinoma of tongue | 0.0 |

Column A - Rel. Exp. (%) Ag2897, Run 164629841

[1495] TABLE AZF
Panel 4D

| Tissue Name | A | B |
|---|---|---|
| Secondary Th1 act | 0.0 | 0.0 |
| Secondary Th2 act | 0.0 | 0.0 |
| Secondary Tr1 act | 0.0 | 0.0 |
| Secondary Th1 rest | 0.0 | 0.0 |
| Secondary Th2 rest | 0.0 | 0.0 |
| Secondary Tr1 rest | 0.0 | 0.0 |
| Primary Th1 act | 0.0 | 0.0 |
| Primary Th2 act | 0.0 | 0.0 |
| Primary Tr1 act | 0.0 | 0.0 |
| Primary Th1 rest | 9.3 | 20.7 |
| Primary Th2 rest | 0.0 | 9.0 |
| Primary Tr1 rest | 9.8 | 0.0 |
| CD45RA CD4 lymphocyte act | 0.0 | 0.0 |
| CD45RO CD4 lymphocyte act | 0.0 | 0.0 |
| CD8 lymphocyte act | 0.0 | 0.0 |
| Secondary CD8 lymphocyte rest | 0.0 | 0.0 |
| Secondary CD8 lymphocyte act | 0.0 | 0.0 |
| CD4 lymphocyte none | 0.0 | 0.0 |
| 2ry Th1/Th2/Tr1_anti-CD95 CH11 | 0.0 | 0.0 |
| LAK cells rest | 10.9 | 0.0 |
| LAK cells IL-2 | 0.0 | 0.0 |
| LAK cells IL-2 + IL-12 | 0.0 | 0.0 |
| LAK cells IL-2 + IFN gamma | 0.0 | 0.0 |
| LAK cells IL-2 + IL-18 | 0.0 | 0.0 |
| LAK cells PMA/ionomycin | 0.0 | 0.0 |
| NK Cells IL-2 rest | 0.0 | 0.0 |
| Two Way MLR 3 day | 0.0 | 9.3 |
| Two Way MLR 5 day | 0.0 | 0.0 |
| Two Way MLR 7 day | 0.0 | 0.0 |
| PBMC rest | 0.0 | 0.0 |
| PBMC PWM | 0.0 | 0.0 |
| PBMC PHA-L | 8.9 | 0.0 |
| Ramos (B cell) none | 0.0 | 0.0 |
| Ramos (B cell) ionomycin | 0.0 | 0.0 |
| B lymphocytes PWM | 0.0 | 0.0 |
| B lymphocytes CD40L and IL-4 | 0.0 | 0.0 |
| EOL-1 dbcAMP | 0.0 | 0.0 |
| EOL-1 dbcAMP PMA/ionomycin | 0.0 | 0.0 |
| Dendritic cells none | 0.0 | 0.0 |
| Dendritic cells LPS | 0.0 | 0.0 |
| Dendritic cells anti-CD40 | 0.0 | 0.0 |
| Monocytes rest | 0.0 | 0.0 |
| Monocytes LPS | 0.0 | 0.0 |
| Macrophages rest | 0.0 | 0.0 |
| Macrophages LPS | 0.0 | 0.0 |
| HUVEC none | 0.0 | 0.0 |
| HUVEC starved | 0.0 | 0.0 |
| HUVEC IL-1beta | 0.0 | 0.0 |
| HUVEC IFN gamma | 0.0 | 0.0 |
| HUVEC TNF alpha + IFN gamma | 0.0 | 0.0 |
| HUVEC TNF alpha + IL4 | 0.0 | 0.0 |
| HUVEC IL-11 | 0.0 | 0.0 |
| Lung Microvascular EC none | 0.0 | 0.0 |
| Lung Microvascular EC TNFalpha + | 7.9 | 22.8 |
| IL-1beta | | |
| Microvascular Dermal EC none | 0.0 | 0.0 |
| Microsvasular Dermal EC TNFalpha + | 16.2 | 0.0 |
| IL-1beta | | |
| Bronchial epithelium TNFalpha + IL1beta | 4.4 | 0.0 |
| Small airway epithelium none | 10.4 | 9.7 |
| Small airway epithelium TNFalpha + | 100.0 | 75.8 |
| IL-1beta | | |
| Coronery artery SMC rest | 0.0 | 9.9 |
| Coronery artery SMC TNFalpha + IL-1beta | 16.8 | 9.0 |
| Astrocytes rest | 40.6 | 0.0 |
| Astrocytes TNFalpha + IL-1beta | 56.6 | 100.0 |
| KU-812 (Basophil) rest | 0.0 | 0.0 |
| KU-812 (Basophil) PMA/ionomycin | 0.0 | 0.0 |
| CCD1106 (Keratinocytes) none | 0.0 | 0.0 |
| CCD1106 (Keratinocytes) TNFalpha + | 0.0 | 0.0 |
| IL-1beta | | |
| Liver cirrhosis | 17.2 | 8.2 |
| Lupus kidney | 8.4 | 9.6 |
| NCI-H292 none | 0.0 | 0.0 |
| NCI-H292 IL-4 | 0.0 | 0.0 |
| NCI-H292 IL-9 | 0.0 | 0.0 |
| NCI-H292 IL-13 | 0.0 | 0.0 |
| NCI-H292 IFN gamma | 0.0 | 0.0 |
| HPAEC none | 0.0 | 0.0 |
| HPAEC TNF alpha + IL-1 beta | 0.0 | 0.0 |
| Lung fibroblast none | 0.0 | 0.0 |
| Lung fibroblast TNF alpha + IL-1 beta | 0.0 | 18.8 |
| Lung fibroblast IL-4 | 0.0 | 17.7 |
| Lung fibroblast IL-9 | 0.0 | 0.0 |
| Lung fibroblast IL-13 | 0.0 | 0.0 |
| Lung fibroblast IFN gamma | 0.0 | 0.0 |
| Dermal fibroblast CCD1070 rest | 18.7 | 5.1 |
| Dermal fibroblast CCD1070 TNF alpha | 45.4 | 29.5 |
| Dermal fibroblast CCD1070 IL-1 beta | 33.7 | 85.9 |
| Dermal fibroblast IFN gamma | 0.0 | 0.0 |
| Dermal fibroblast IL-4 | 0.0 | 8.4 |
| IBD Colitis 2 | 0.0 | 9.9 |
| IBD Crohn's | 7.7 | 0.0 |
| Colon | 62.4 | 39.2 |
| Lung | 9.9 | 22.1 |
| Thymus | 27.7 | 35.8 |
| Kidney | 18.9 | 20.6 |

Column A - Rel. Exp. (%) Ag2897, Run 161905862
Column B - Rel. Exp. (%) Ag2897, Run 163586314

[1496] AI_comprehensive panel_v1.0 Summary: Ag2897 Highest expression of this gene was detected in a normal tissue sample adjacent to a psoriasis sample (CT=30). This expression was down-regulated in the corresponding psoriasis sample (CT=33). Expression of this gene is useful as a marker to distinguish between these samples. The expression of this gene was up-regulated in lung from emphysema and COPD patients, consistent with its expression in “stressed” small airway epithelium, lung fibroblasts and lung endothelium (treated with TNF-a and IL-1). Therapeutic modulation of the expression of this gene or its protein and/or signaling via this protein by antibodies, small moleculesvor protein therapeutics is useful for the inhibition of inflammation in lung tissue due to asthma, emphysema and other COPD type diseases

[1497] Panel 1.3D Summary: Ag2897 Highest expression of this gene, a protocadherin homolog, was detected in the spinal cord and the cerebral cortex (CTs=31.5). Low levels of expression were also seen in other regions of the brain including the amygdala and the hippocampus. The cadherins have been shown to be critical for CNS development, specifically for the guidance of axons, dendrites and/or growth cones in general. Therapeutic modulation of the levels of this protein, or possible signaling via this protein are of utility in enhancing/directing compensatory synaptogenesis and fiber growth in the CNS in response to neuronal death (stroke, head trauma), axon lesion (spinal cord injury), or neurodegeneration (Alzheimer's, Parkinson's, Huntington's, vascular dementia or any neurodegenerative disease). Since protocadherins play an important role in synaptogenesis, this gene product is also involved in depression, schizophrenia, both of which involve synaptogeneisis. Because this cadherin shows highest expression in the cerebellum, this is also an excellent candidate for the spinocerebellar ataxias as well.

[1498] Significant levels of expression were also seen in cell lines derived from ovarian, renal and brain cancers. Thus, expression of this gene or gene product is useful as a marker to differentiate between these samples and other samples on this panel and as a marker to detect the presence of these cancers. Therapeutic modulation of the expression or function of this gene or gene product is effective in the treatment of ovarian, renal and brain cancers.

[1499] Panel 2D Summary: Ag2897 Highest expression of this gene was detected in ovarian and kidney cancers (CTs=30.5). Significant levels of expression were also seen in lung and uterine cancers. Higher levels of expression were seen in these cancers than in the corresponding normal adjacent tissues. Therapeutic targeting of this gene or gene product with a small molecule drug, protein therapeutic, or human monoclonal antibody is useful for limiting or blocking the extent of tumor cell migration and invasion, preferably in kidney, lung, uterine and ovarian tumor tumors.

[1500] Panel 3D Summary: Ag2897 Highest expression of this gene was seen in a lung cancer cell line (CT=30. 1). Expression of this gene or gene product is useful as a marker to differentiate between this sample and other samples on this panel.

[1501] Panel 4D Summary: Ag2897 This gene highly was up-regulated in small airway epithelium and astrocytes stimulated with TNF-alpha and IL-1 beta (CTs=33-34). Other tissues in the lung also up regulated the expression of this gene including lung microvascular endothelium and lung fibroblasts in response to TNF alpha or the Th2 elaborated cytokine IL-4. This demonstrates that this molecule is expressed as a result of inflammation, particularly during asthma since TNFalpha and IL-4 may play important roles in the pathology of this disease. Based on the expression profile of this transcript and the types of cytokines which induce it, antibodies, protein therapeutics or small molecule drugs that target this gene or gene product are useful for inhibiting inflammation in lung tissue due to asthma, emphysema and other COPD type diseases.

[1502] BA. CG59534-03: Ovostatin

[1503] Expression of gene CG59534-03 was assessed using the primer-probe set

[1504] Ag7218, described in Table BAA. Results of the RTQ-PCR runs are shown in Table BAB.

TABLE BAA
Probe Name Ag7218

| | | | | SEQ |
|---|---|---|---|---|
| | | | Start | ID |
| Primers | Sequences | Length | Position | No |
| Forward | 5′-ctacaggaagtgcagcacaac-3′ | 21 | 294 | 1543 |
| Probe | TET-5′-agccagctgaaggcctacctttcctt-3′- | 26 | 336 | 1544 |
| | TAMRA | | | |
| Reverse | 5′-gttgttcaaactcagatctaacacttct-3′ | 28 | 362 | 1545 |

[1505] TABLE BAB
Panel 4.1D

| Tissue Name | A |
|---|---|
| Secondary Th1 act | 31.6 |
| Secondary Th2 act | 27.4 |
| Secondary Tr1 act | 14.4 |
| Secondary Th1 rest | 7.4 |
| Secondary Th2 rest | 6.6 |
| Secondary Tr1 rest | 6.0 |
| Primary Th1 act | 9.0 |
| Primary Th2 act | 40.1 |
| Primary Tr1 act | 39.8 |
| Primary Th1 rest | 3.9 |
| Primary Th2 rest | 1.6 |
| Primary Tr1 rest | 0.0 |
| CD45RA CD4 lymphocyte act | 31.4 |
| CD45RO CD4 lymphocyte act | 39.8 |
| CD8 lymphocyte act | 24.0 |
| Secondary CD8 lymphocyte rest | 90.8 |
| Secondary CD8 lymphocyte act | 9.5 |
| CD4 lymphocyte none | 7.5 |
| 2ry Th1/Th2/Tr1_anti-CD95 CH11 | 11.7 |
| LAK cells rest | 20.0 |
| LAK cells IL-2 | 6.0 |
| LAK cells IL-2 + IL-12 | 3.6 |
| LAK cells IL-2 + IFN gamma | 26.6 |
| LAK cells IL-2 + IL-18 | 10.4 |
| LAK cells PMA/ionomycin | 52.1 |
| NK Cells IL-2 rest | 52.9 |
| Two Way MLR 3 day | 12.2 |
| Two Way MLR 5 day | 9.6 |
| Two Way MLR 7 day | 11.9 |
| PBMC rest | 2.5 |
| PBMC PWM | 21.8 |
| PBMC PHA-L | 18.8 |
| Ramos (B cell) none | 54.7 |
| Ramos (B cell) ionomycin | 79.6 |
| B lymphocytes PWM | 13.9 |
| B lymphocytes CD40L and IL-4 | 16.5 |
| EOL-1 dbcAMP | 0.0 |
| EOL-1 dbcAMP PMA/ionomycin | 1.3 |
| Dendritic cells none | 5.9 |
| Dendritic cells LPS | 0.7 |
| Dendritic cells anti-CD40 | 1.3 |
| Monocytes rest | 0.0 |
| Monocytes LPS | 5.7 |
| Macrophages rest | 1.1 |
| Macrophages LPS | 0.0 |
| HUVEC none | 17.1 |
| HUVEC starved | 45.1 |
| HUVEC IL-1beta | 45.7 |
| HUVEC IFN gamma | 26.8 |
| HUVEC TNF alpha + IFN gamma | 12.0 |
| HUVEC TNF alpha + IL4 | 26.4 |
| HUVEC IL-11 | 27.0 |
| Lung Microvascular EC none | 28.5 |
| Lung Microvascular EC TNFalpha + IL-1beta | 15.5 |
| Microvascular Dermal EC none | 8.2 |
| Microsvasular Dermal EC TNFalpha + IL-1beta | 6.9 |
| Bronchial epithelium TNFalpha + IL1beta | 12.9 |
| Small airway epithelium none | 5.1 |
| Small airway epithelium TNFalpha + IL-1beta | 10.5 |
| Coronery artery SMC rest | 15.8 |
| Coronery artery SMC TNFalpha + IL-1beta | 29.3 |
| Astrocytes rest | 15.2 |
| Astrocytes TNFalpha + IL-1beta | 17.2 |
| KU-812 (Basophil) rest | 5.8 |
| KU-812 (Basophil) PMA/ionomycin | 11.7 |
| CCD1106 (Keratinocytes) none | 15.5 |
| CCD1106 (Keratinocytes) TNFalpha + IL-1beta | 8.0 |
| Liver cirrhosis | 8.0 |
| NCI-H292 none | 2.7 |
| NCI-H292 IL-4 | 2.0 |
| NCI-H292 IL-9 | 8.9 |
| NCI-H292 IL-13 | 2.0 |
| NCI-H292 IFN gamma | 5.3 |
| HPAEC none | 21.5 |
| HPAEC TNF alpha + IL-1 beta | 100.0 |
| Lung fibroblast none | 77.9 |
| Lung fibroblast TNF alpha + IL-1 beta | 93.3 |
| Lung fibroblast IL-4 | 33.4 |
| Lung fibroblast IL-9 | 62.4 |
| Lung fibroblast IL-13 | 40.9 |
| Lung fibroblast IFN gamma | 54.7 |
| Dermal fibroblast CCD1070 rest | 8.0 |
| Dermal fibroblast CCD1070 TNF alpha | 29.3 |
| Dermal fibroblast CCD1070 IL-1 beta | 76.3 |
| Dermal fibroblast IFN gamma | 7.0 |
| Dermal fibroblast IL-4 | 26.1 |
| Dermal Fibroblasts rest | 15.8 |
| Neutrophils TNFa + LPS | 0.0 |
| Neutrophils rest | 2.9 |
| Colon | 3.6 |
| Lung | 6.3 |
| Thymus | 4.7 |
| Kidney | 13.7 |

Column A - Rel. Exp. (%) Ag7218, Run 288211130

[1506] Panel 4.1D Summary: Ag7218 Highest expression of this gene was seen in human pulmonary artery endothelial cells (CT=32). Detectable levels of expression were also seen in clusters of lung and dermal fibroblasts as well as in activated T cells. Therefore, targeting this gene or its protein product is useful for the reduction or elimination of the inflammation in lung, skin, and T cell mediated inflammatory and autoimmune diseases.

[1507] BB. CG59584-02 and CG59584-03: Ovastatin

[1508] Expression of gene CG59584-03 was assessed using the primer-probe set Ag1282, described in Table BBA. Results of the RTQ-PCR runs are shown in Tables BBB, BBC, BBD, BBE, BBF, and BBG.

TABLE BBA
Probe Name Ag1282

| | | | | SEQ |
|---|---|---|---|---|
| | | | Start | ID |
| Primers | Sequences | Length | Position | No |
| Forward | 5′-ttcgcaataaatccagtatggt-3′ | 22 | 4510 | 1546 |
| Probe | TET-5′-tgctatcaggatttactccaaccatgtca-3′- | 29 | 4549 | 1547 |
| | TAMRA | | | |
| Reverse | 5′-ttgttttcaagctcttcaatgg-3′ | 22 | 4579 | 1548 |

[1509] TABLE BBB
General_screening_panel_v1.4

| Tissue Name | A |
|---|---|
| Adipose | 0.5 |
| Melanoma* Hs688(A).T | 0.0 |
| Melanoma* Hs688(B).T | 0.0 |
| Melanoma* M14 | 100.0 |
| Melanoma* LOXIMVI | 0.9 |
| Melanoma* SK-MEL-5 | 11.2 |
| Squamous cell carcinoma SCC-4 | 0.0 |
| Testis Pool | 5.3 |
| Prostate ca.* (bone met) PC-3 | 0.0 |
| Prostate Pool | 0.3 |
| Placenta | 0.4 |
| Uterus Pool | 0.2 |
| Ovarian ca. OVCAR-3 | 2.1 |
| Ovarian ca. SK-OV-3 | 0.7 |
| Ovarian ca. OVCAR-4 | 0.2 |
| Ovarian ca. OVCAR-5 | 0.8 |
| Ovarian ca. IGROV-1 | 0.2 |
| Ovarian ca. OVCAR-8 | 0.1 |
| Ovary | 0.6 |
| Breast ca. MCF-7 | 0.3 |
| Breast ca. MDA-MB-231 | 0.6 |
| Breast ca. BT 549 | 0.9 |
| Breast ca. T47D | 0.8 |
| Breast ca. MDA-N | 45.1 |
| Breast Pool | 0.7 |
| Trachea | 0.5 |
| Lung | 0.3 |
| Fetal Lung | 4.9 |
| Lung ca. NCI-N417 | 0.0 |
| Lung ca. LX-1 | 1.6 |
| Lung ca. NCI-H146 | 2.3 |
| Lung ca. SHP-77 | 1.1 |
| Lung ca. A549 | 1.1 |
| Lung ca. NCI-H526 | 0.4 |
| Lung ca. NCI-H23 | 2.8 |
| Lung ca. NCI-H460 | 0.1 |
| Lung ca. HOP-62 | 0.7 |
| Lung ca. NCI-H522 | 2.0 |
| Liver | 0.0 |
| Fetal Liver | 0.9 |
| Liver ca. HepG2 | 0.3 |
| Kidney Pool | 1.0 |
| Fetal Kidney | 3.6 |
| Renal ca. 786-0 | 0.6 |
| Renal ca. A498 | 0.0 |
| Renal ca. ACHN | 0.6 |
| Renal ca. UO-31 | 0.1 |
| Renal ca. TK-10 | 1.1 |
| Bladder | 0.4 |
| Gastric ca. (liver met.) NCI-N87 | 1.7 |
| Gastric ca. KATO III | 1.2 |
| Colon ca. SW-948 | 0.0 |
| Colon ca. SW480 | 3.3 |
| Colon ca.* (SW480 met) SW620 | 1.5 |
| Colon ca. HT29 | 0.4 |
| Colon ca. HCT-116 | 2.5 |
| Colon ca. CaCo-2 | 0.6 |
| Colon cancer tissue | 0.5 |
| Colon ca. SW1116 | 0.0 |
| Colon ca. Colo-205 | 0.1 |
| Colon ca. SW-48 | 0.0 |
| Colon Pool | 0.5 |
| Small Intestine Pool | 1.4 |
| Stomach Pool | 0.2 |
| Bone Marrow Pool | 0.2 |
| Fetal Heart | 1.6 |
| Heart Pool | 0.2 |
| Lymph Node Pool | 0.4 |
| Fetal Skeletal Muscle | 1.6 |
| Skeletal Muscle Pool | 0.1 |
| Spleen Pool | 0.8 |
| Thymus Pool | 2.5 |
| CNS cancer (glio/astro) U87-MG | 0.4 |
| CNS cancer (glio/astro) U-118-MG | 0.3 |
| CNS cancer (neuro; met) SK-N-AS | 0.5 |
| CNS cancer (astro) SF-539 | 0.1 |
| CNS cancer (astro) SNB-75 | 9.0 |
| CNS cancer (glio) SNB-19 | 0.2 |
| CNS cancer (glio) SF-295 | 0.7 |
| Brain (Amygdala) Pool | 0.9 |
| Brain (cerebellum) | 0.6 |
| Brain (fetal) | 2.9 |
| Brain (Hippocampus) Pool | 1.0 |
| Cerebral Cortex Pool | 1.1 |
| Brain (Substantia nigra) Pool | 0.8 |
| Brain (Thalamus) Pool | 1.1 |
| Brain (whole) | 0.8 |
| Spinal Cord Pool | 0.5 |
| Adrenal Gland | 0.1 |
| Pituitary gland Pool | 0.1 |
| Salivary Gland | 0.1 |
| Thyroid (female) | 0.1 |
| Pancreatic ca. CAPAN2 | 1.3 |
| Pancreas Pool | 0.9 |

Column A - Rel. Exp. (%) Ag1282, Run 216588406

[1510] TABLE BBC
Panel 1.3D

| Tissue Name | A |
|---|---|
| Liver adenocarcinoma | 9.2 |
| Pancreas | 0.5 |
| Pancreatic ca. CAPAN 2 | 1.3 |
| Adrenal gland | 0.3 |
| Thyroid | 0.3 |
| Salivary gland | 0.1 |
| Pituitary gland | 0.3 |
| Brain (fetal) | 11.1 |
| Brain (whole) | 0.7 |
| Brain (amygdala) | 1.1 |
| Brain (cerebellum) | 0.3 |
| Brain (hippocampus) | 1.5 |
| Brain (substantia nigra) | 2.3 |
| Brain (thalamus) | 2.4 |
| Cerebral Cortex | 1.0 |
| Spinal cord | 0.7 |
| glio/astro U87-MG | 0.4 |
| glio/astro U-118-MG | 0.4 |
| astrocytoma SW1783 | 0.4 |
| neuro*; met SK-N-AS | 0.7 |
| astrocytoma SF-539 | 0.3 |
| astrocytoma SNB-75 | 7.8 |
| glioma SNB-19 | 0.2 |
| glioma U251 | 1.2 |
| glioma SF-295 | 0.6 |
| Heart (fetal) | 5.1 |
| Heart | 0.7 |
| Skeletal muscle (fetal) | 3.3 |
| Skeletal muscle | 0.5 |
| Bone marrow | 3.9 |
| Thymus | 15.9 |
| Spleen | 1.2 |
| Lymph node | 4.6 |
| Colorectal | 2.5 |
| Stomach | 0.6 |
| Small intestine | 1.8 |
| Colon ca. SW480 | 2.8 |
| Colon ca.* SW620(SW480 met) | 5.3 |
| Colon ca. HT29 | 0.3 |
| Colon ca. HCT-116 | 1.6 |
| Colon ca. CaCo-2 | 0.8 |
| Colon ca. tissue(ODO3866) | 0.2 |
| Colon ca. HCC-2998 | 3.1 |
| Gastric ca.* (liver met) NCI-N87 | 1.9 |
| Bladder | 0.9 |
| Trachea | 0.3 |
| Kidney | 0.4 |
| Kidney (fetal) | 4.9 |
| Renal ca. 786-0 | 0.3 |
| Renal ca. A498 | 1.9 |
| Renal ca. RXF 393 | 0.1 |
| Renal ca. ACHN | 0.8 |
| Renal ca. UO-31 | 0.4 |
| Renal ca. TK-10 | 2.1 |
| Liver | 0.2 |
| Liver (fetal) | 1.4 |
| Liver ca. (hepatoblast) HepG2 | 0.7 |
| Lung | 0.5 |
| Lung (fetal) | 8.0 |
| Lung ca. (small cell) LX-1 | 1.3 |
| Lung ca. (small cell) NCI-H69 | 13.2 |
| Lung ca. (s. cell var.) SHP-77 | 5.9 |
| Lung ca. (large cell)NCI-H460 | 0.1 |
| Lung ca. (non-sm. cell) A549 | 0.3 |
| Lung ca. (non-s. cell) NCI-H23 | 2.4 |
| Lung ca. (non-s. cell) HOP-62 | 1.4 |
| Lung ca. (non-s. cl) NCI-H522 | 2.6 |
| Lung ca. (squam.) SW 900 | 2.5 |
| Lung ca. (squam.) NCI-H596 | 49.7 |
| Mammary gland | 2.5 |
| Breast ca.* (pl. ef) MCF-7 | 0.5 |
| Breast ca.* (pl. ef) MDA-MB-231 | 0.8 |
| Breast ca.* (pl. ef) T47D | 0.3 |
| Breast ca. BT-549 | 0.1 |
| Breast ca. MDA-N | 100.0 |
| Ovary | 1.3 |
| Ovarian ca. OVCAR-3 | 2.6 |
| Ovarian ca. OVCAR-4 | 0.1 |
| Ovarian ca. OVCAR-5 | 2.7 |
| Ovarian ca. OVCAR-8 | 0.1 |
| Ovarian ca. IGROV-1 | 0.6 |
| Ovarian ca.* (ascites) SK-OV-3 | 1.3 |
| Uterus | 1.4 |
| Placenta | 0.2 |
| Prostate | 0.5 |
| Prostate ca.* (bone met)PC-3 | 0.0 |
| Testis | 17.4 |
| Melanoma Hs688(A).T | 0.0 |
| Melanoma* (met) Hs688(B).T | 0.0 |
| Melanoma UACC-62 | 2.8 |
| Melanoma M14 | 79.6 |
| Melanoma LOX IMVI | 2.1 |
| Melanoma* (met) SK-MEL-5 | 9.9 |
| Adipose | 1.9 |

Column A - Rel. Exp. (%) Ag1282, Run 167614616

[1511] TABLE BBD
Panel 2D

| Tissue Name | A |
|---|---|
| Normal Colon | 3.3 |
| CC Well to Mod Diff (ODO3866) | 0.4 |
| CC Margin (ODO3866) | 0.4 |
| CC Gr.2 rectosigmoid (ODO3868) | 1.3 |
| CC Margin (ODO3868) | 0.1 |
| CC Mod Diff (ODO3920) | 3.6 |
| CC Margin (ODO3920) | 0.8 |
| CC Gr.2 ascend colon (ODO3921) | 0.9 |
| CC Margin (ODO3921) | 0.4 |
| CC from Partial Hepatectomy (ODO4309) Mets | 0.9 |
| Liver Margin (ODO4309) | 0.2 |
| Colon mets to lung (OD04451-01) | 0.2 |
| Lung Margin (OD04451-02) | 0.2 |
| Normal Prostate 6546-1 | 1.8 |
| Prostate Cancer (OD04410) | 0.8 |
| Prostate Margin (OD04410) | 1.1 |
| Prostate Cancer (OD04720-01) | 0.7 |
| Prostate Margin (OD04720-02) | 1.6 |
| Normal Lung 061010 | 2.6 |
| Lung Met to Muscle (ODO4286) | 0.3 |
| Muscle Margin (ODO4286) | 0.2 |
| Lung Malignant Cancer (OD03126) | 0.9 |
| Lung Margin (OD03126) | 0.7 |
| Lung Cancer (OD04404) | 0.5 |
| Lung Margin (OD04404) | 0.6 |
| Lung Cancer (OD04565) | 0.8 |
| Lung Margin (OD04565) | 0.4 |
| Lung Cancer (OD04237-01) | 25.5 |
| Lung Margin (OD04237-02) | 0.7 |
| Ocular Mel Met to Liver (ODO4310) | 100.0 |
| Liver Margin (ODO4310) | 0.4 |
| Melanoma Mets to Lung (OD04321) | 21.8 |
| Lung Margin (OD04321) | 0.5 |
| Normal Kidney | 0.5 |
| Kidney Ca, Nuclear grade 2 (OD04338) | 0.4 |
| Kidney Margin (OD04338) | 0.7 |
| Kidney Ca Nuclear grade 1/2 (OD04339) | 0.2 |
| Kidney Margin (OD04339) | 0.1 |
| Kidney Ca, Clear cell type (OD04340) | 0.8 |
| Kidney Margin (OD04340) | 0.6 |
| Kidney Ca, Nuclear grade 3 (OD04348) | 0.5 |
| Kidney Margin (OD04348) | 0.2 |
| Kidney Cancer (OD04622-01) | 0.3 |
| Kidney Margin (OD04622-03) | 0.0 |
| Kidney Cancer (OD04450-01) | 0.1 |
| Kidney Margin (OD04450-03) | 0.1 |
| Kidney Cancer 8120607 | 0.0 |
| Kidney Margin 8120608 | 0.0 |
| Kidney Cancer 8120613 | 0.1 |
| Kidney Margin 8120614 | 0.1 |
| Kidney Cancer 9010320 | 0.1 |
| Kidney Margin 9010321 | 0.1 |
| Normal Uterus | 0.3 |
| Uterus Cancer 064011 | 2.5 |
| Normal Thyroid | 0.4 |
| Thyroid Cancer 064010 | 0.3 |
| Thyroid Cancer A302152 | 0.2 |
| Thyroid Margin A302153 | 0.4 |
| Normal Breast | 1.8 |
| Breast Cancer (OD04566) | 1.6 |
| Breast Cancer (OD04590-01) | 0.7 |
| Breast Cancer Mets (OD04590-03) | 2.3 |
| Breast Cancer Metastasis (OD04655-05) | 0.7 |
| Breast Cancer 064006 | 0.8 |
| Breast Cancer 1024 | 1.2 |
| Breast Cancer 9100266 | 0.9 |
| Breast Margin 9100265 | 0.5 |
| Breast Cancer A209073 | 1.6 |
| Breast Margin A209073 | 1.5 |
| Normal Liver | 0.1 |
| Liver Cancer 064003 | 0.3 |
| Liver Cancer 1025 | 0.1 |
| Liver Cancer 1026 | 0.1 |
| Liver Cancer 6004-T | 0.0 |
| Liver Tissue 6004-N | 0.9 |
| Liver Cancer 6005-T | 0.3 |
| Liver Tissue 6005-N | 0.0 |
| Normal Bladder | 1.1 |
| Bladder Cancer 1023 | 0.2 |
| Bladder Cancer A302173 | 6.5 |
| Bladder Cancer (OD04718-01) | 1.4 |
| Bladder Normal Adjacent (OD04718-03) | 0.7 |
| Normal Ovary | 0.8 |
| Ovarian Cancer 064008 | 2.9 |
| Ovarian Cancer (OD04768-07) | 3.8 |
| Ovary Margin (OD04768-08) | 0.2 |
| Normal Stomach | 1.2 |
| Gastric Cancer 9060358 | 0.8 |
| Stomach Margin 9060359 | 0.7 |
| Gastric Cancer 9060395 | 0.8 |
| Stomach Margin 9060394 | 0.2 |
| Gastric Cancer 9060397 | 0.5 |
| Stomach Margin 9060396 | 0.2 |
| Gastric Cancer 064005 | 2.5 |

Column A - Rel. Exp. (%) Ag1282, Run 170849610

[1512] TABLE BBE
Panel 4.1D

| Tissue Name | A |
|---|---|
| Secondary Th1 act | 12.0 |
| Secondary Th2 act | 19.3 |
| Secondary Tr1 act | 21.6 |
| Secondary Th1 rest | 7.5 |
| Secondary Th2 rest | 12.1 |
| Secondary Tr1 rest | 9.6 |
| Primary Th1 act | 20.0 |
| Primary Th2 act | 19.6 |
| Primary Tr1 act | 24.3 |
| Primary Th1 rest | 23.8 |
| Primary Th2 rest | 16.3 |
| Primary Tr1 rest | 54.0 |
| CD45RA CD4 lymphocyte act | 7.6 |
| CD45RO CD4 lymphocyte act | 0.0 |
| CD8 lymphocyte act | 23.3 |
| Secondary CD8 lymphocyte rest | 9.3 |
| Secondary CD8 lymphocyte act | 16.4 |
| CD4 lymphocyte none | 3.6 |
| 2ry Th1/Th2/Tr1_anti-CD95 CH11 | 23.7 |
| LAK cells rest | 7.9 |
| LAK cells IL-2 | 26.8 |
| LAK cells IL-2 + IL-12 | 5.5 |
| LAK cells IL-2 + IFN gamma | 10.8 |
| LAK cells IL-2 + IL-18 | 14.0 |
| LAK cells PMA/ionomycin | 1.5 |
| NK Cells IL-2 rest | 29.1 |
| Two Way MLR 3 day | 8.0 |
| Two Way MLR 5 day | 7.0 |
| Two Way MLR 7 day | 9.6 |
| PBMC rest | 0.3 |
| PBMC PWM | 4.0 |
| PBMC PHA-L | 12.7 |
| Ramos (B cell) none | 8.2 |
| Ramos (B cell) ionomycin | 11.5 |
| B lymphocytes PWM | 10.7 |
| B lymphocytes CD40L and IL-4 | 35.6 |
| EOL-1 dbcAMP | 9.2 |
| EOL-1 dbcAMP PMA/ionomycin | 10.3 |
| Dendritic cells none | 1.2 |
| Dendritic cells LPS | 0.7 |
| Dendritic cells anti-CD40 | 0.3 |
| Monocytes rest | 1.1 |
| Monocytes LPS | 2.4 |
| Macrophages rest | 2.2 |
| Macrophages LPS | 0.1 |
| HUVEC none | 1.1 |
| HUVEC starved | 3.6 |
| HUVEC IL-1beta | 2.6 |
| HUVEC IFN gamma | 2.6 |
| HUVEC TNF alpha + IFN gamma | 1.4 |
| HUVEC TNF alpha + IL4 | 3.1 |
| HUVEC IL-11 | 3.4 |
| Lung Microvascular EC none | 6.4 |
| Lung Microvascular EC TNFalpha + IL-1beta | 9.5 |
| Microvascular Dermal EC none | 10.4 |
| Microsvasular Dermal EC TNFalpha + IL-1beta | 10.2 |
| Bronchial epithelium TNFalpha + IL1beta | 3.4 |
| Small airway epithelium none | 0.0 |
| Small airway epithelium TNFalpha + IL-1beta | 2.7 |
| Coronery artery SMC rest | 0.3 |
| Coronery artery SMC TNFalpha + IL-1beta | 0.1 |
| Astrocytes rest | 1.1 |
| Astrocytes TNFalpha + IL-1beta | 2.4 |
| KU-812 (Basophil) rest | 14.5 |
| KU-812 (Basophil) PMA/ionomycin | 9.4 |
| CCD1106 (Keratinocytes) none | 4.6 |
| CCD1106 (Keratinocytes) TNFalpha + IL-1beta | 2.4 |
| Liver cirrhosis | 2.2 |
| NCI-H292 none | 10.6 |
| NCI-H292 IL-4 | 18.2 |
| NCI-H292 IL-9 | 24.5 |
| NCI-H292 IL-13 | 14.8 |
| NCI-H292 IFN gamma | 11.1 |
| HPAEC none | 3.3 |
| HPAEC TNF alpha + IL-1 beta | 5.3 |
| Lung fibroblast none | 1.1 |
| Lung fibroblast TNF alpha + IL-1 beta | 0.6 |
| Lung fibroblast IL-4 | 0.0 |
| Lung fibroblast IL-9 | 0.3 |
| Lung fibroblast IL-13 | 0.0 |
| Lung fibroblast IFN gamma | 0.0 |
| Dermal fibroblast CCD1070 rest | 5.4 |
| Dermal fibroblast CCD1070 TNF alpha | 24.3 |
| Dermal fibroblast CCD1070 IL-1 beta | 5.0 |
| Dermal fibroblast IFN gamma | 0.3 |
| Dermal fibroblast IL-4 | 1.6 |
| Dermal Fibroblasts rest | 0.8 |
| Neutrophils TNFa + LPS | 0.3 |
| Neutrophils rest | 0.6 |
| Colon | 8.4 |
| Lung | 5.1 |
| Thymus | 100.0 |
| Kidney | 1.3 |

Column A - Rel. Exp. (%) Ag1282, Run 169828985

[1513] TABLE BBF
Panel 5 Islet

| Tissue Name | A |
|---|---|
| 97457_Patient-02go_adipose | 42.6 |
| 97476_Patient-07sk_skeletal muscle | 37.9 |
| 97477_Patient-07ut_uterus | 15.8 |
| 97478_Patient-07pl_placenta | 85.9 |
| 99167_Bayer Patient 1 | 6.5 |
| 97482_Patient-08ut_uterus | 13.4 |
| 97483_Patient-08pl_placenta | 17.4 |
| 97486_Patient-09sk_skeletal muscle | 8.4 |
| 97487_Patient-09ut_uterus | 47.6 |
| 97488_Patient-09pl_placenta | 60.3 |
| 97492_Patient-10ut_uterus | 27.5 |
| 97493_Patient-10pl_placenta | 48.3 |
| 97495_Patient-11go_adipose | 27.5 |
| 97496_Patient-11sk_skeletal muscle | 2.9 |
| 97497_Patient-11ut_uterus | 29.7 |
| 97498_Patient-11pl_placenta | 11.8 |
| 97500_Patient-12go_adipose | 45.1 |
| 97501_Patient-12sk_skeletal muscle | 24.7 |
| 97502_Patient-12ut_uterus | 44.1 |
| 97503_Patient-12pl_placenta | 8.1 |
| 94721_Donor 2 U - A_Mesenchymal Stem Cells | 1.2 |
| 94722_Donor 2 U - B_Mesenchymal Stem Cells | 5.4 |
| 94723_Donor 2 U - C_Mesenchymal Stem Cells | 1.5 |
| 94709_Donor 2 AM - A_adipose | 11.9 |
| 94710_Donor 2 AM - B_adipose | 1.5 |
| 94711_Donor 2 AM - C_adipose | 1.5 |
| 94712_Donor 2 AD - A_adipose | 0.0 |
| 94713_Donor 2 AD - B_adipose | 1.5 |
| 94714_Donor 2 AD - C_adipose | 11.1 |
| 94742_Donor 3 U - A_Mesenchymal Stem Cells | 0.0 |
| 94743_Donor 3 U - B_Mesenchymal Stem Cells | 5.6 |
| 94730_Donor 3 AM - A_adipose | 0.0 |
| 94731_Donor 3 AM - B_adipose | 1.7 |
| 94732_Donor 3 AM - C_adipose | 3.9 |
| 94733_Donor 3 AD - A_adipose | 1.6 |
| 94734_Donor 3 AD - B_adipose | 1.8 |
| 94735_Donor 3 AD - C_adipose | 3.0 |
| 77138_Liver_HepG2untreated | 55.5 |
| 73556_Heart_Cardiac stromal cells (primary) | 85.3 |
| 81735_Small Intestine | 100.0 |
| 72409_Kidney_Proximal Convoluted Tubule | 23.7 |
| 82685_Small intestine_Duodenum | 31.4 |
| 90650_Adrenal_Adrenocortical adenoma | 0.0 |
| 72410_Kidney_HRCE | 22.8 |
| 72411_Kidney_HRE | 27.5 |
| 73139_Uterus_Uterine smooth muscle cells | 3.6 |

Column A - Rel. Exp. (%) Ag1282, Run 255155568

[1514] TABLE BBG
general oncology screening panel_v_2.4

| Tissue Name | A |
|---|---|
| Colon cancer 1 | 7.9 |
| Colon NAT 1 | 3.5 |
| Colon cancer 2 | 4.9 |
| Colon NAT 2 | 2.1 |
| Colon cancer 3 | 1.5 |
| Colon NAT 3 | 3.8 |
| Colon malignant cancer 4 | 18.7 |
| Colon NAT 4 | 4.0 |
| Lung cancer 1 | 7.1 |
| Lung NAT 1 | 2.5 |
| Lung cancer 2 | 100.0 |
| Lung NAT 2 | 1.6 |
| Squamous cell carcinoma 3 | 33.2 |
| Lung NAT 3 | 1.2 |
| Metastatic melanoma 1 | 22.8 |
| Melanoma 2 | 2.0 |
| Melanoma 3 | 5.7 |
| Metastatic melanoma 4 | 34.4 |
| Metastatic melanoma 5 | 62.9 |
| Bladder cancer 1 | 2.0 |
| Bladder NAT 1 | 0.0 |
| Bladder cancer 2 | 6.0 |
| Bladder NAT 2 | 1.2 |
| Bladder NAT 3 | 0.5 |
| Bladder NAT 4 | 8.1 |
| Prostate adenocarcinoma 1 | 56.6 |
| Prostate adenocarcinoma 2 | 2.1 |
| Prostate adenocarcinoma 3 | 4.3 |
| Prostate adenocarcinoma 4 | 4.1 |
| Prostate NAT 5 | 2.0 |
| Prostate adenocarcinoma 6 | 2.2 |
| Prostate adenocarcinoma 7 | 4.8 |
| Prostate adenocarcinoma 8 | 0.7 |
| Prostate adenocarcinoma 9 | 21.8 |
| Prostate NAT 10 | 0.8 |
| Kidney cancer 1 | 15.0 |
| Kidney NAT 1 | 3.1 |
| Kidney cancer 2 | 49.0 |
| Kidney NAT 2 | 2.9 |
| Kidney cancer 3 | 11.0 |
| Kidney NAT 3 | 1.9 |
| Kidney cancer 4 | 5.6 |
| Kidney NAT 4 | 0.2 |

Column A - Rel. Exp. (%) Ag1282, Run 267211473

[1515] General_screening_panel_v1.4 Summary: Ag1282 Highest expression of this gene was seen in a melanoma cell line. In addition, significantly higher levels of expression were seen in a breast cancer cell line. Thus, expression of this is useful as a marker to differentiate between these samples and other samples on this panel and as a marker to detect the presence of melanoma and breast cancer. Furthermore, therapeutic modulation of the expression or function of this gene or gene product is effective in the treatment of melanoma and breast cancers.

[1516] Among tissues with metabolic function, this gene was expressed at moderate levels in pituitary, adipose, adrenal gland, pancreas, thyroid, and adult and fetal skeletal muscle, heart, and liver. This widespread expression among these tissues shows that this gene product plays a role in normal neuroendocrine and metabolic function and that disregulated expression of this gene contributes to neuroendocrine disorders or metabolic diseases, such as obesity and diabetes.

[1517] In addition, this gene was expressed at much higher levels in fetal lung, liver and skeletal muscle tissue (CTs=27-29) when compared to expression in the adult counterpart (CTs=30-32). Thus, expression of this gene is useful as a marker to differentiate between the fetal and adult source of these tissue.

[1518] This molecule is a novel ovostatin that was also expressed at moderate levels in the all regions of the CNS examined. This gene or gene product is a target for the treatment of neurologic diseases.

[1519] HASS Panel v1.0 Summary: High levels of expression were detected in samples derived from a glioblastoma and a medulloblastoma.

[1520] Panel 1.3D Summary: Ag1282 Expression of this gene was consistent with expression in Panel 1.4. The expression of this gene was highest in a sample derived from a breast cancer cell line (MDA-N) (CT=26.9). In addition, there was expression in other samples derived from lung cancer cell lines and melanoma cell lines. Thus, the expression of this gene is useful as a marker to distinguish MDA-N cells from other samples in the panel. This gene encodes a novel ovostatin. Ovostatins are protease inhibitors that have been shown to support the growth of tumor cells in the absence of serum. They have also been shown to mediate accelerated fibroblast growth, collagen deposition and capillary formation. Thus, therapeutic targeting of this gene product is useful for blocking the uncontrolled growth of cancer cells related to the action of this gene, especially in those cancer types like lung, breast and melanoma tumors where the gene is overexpressed in the tumor compared to the normal adjacent tissue.

[1521] Panel 2D Summary: Ag1282 Highest expression of this gene was seen in a sample derived from an ocular melanoma metastasis to the liver (CT=27). In addition, there was expression in other samples derived from lung cancers. Thus, expression of this gene is useful as a marker to distinguish liver cancer cells from other samples in the panel. Moreover, therapeutic modulation of this gene, through the use of small molecule drugs, protein therapeutics or antibodies is of benefit in the treatment of liver or lung cancer.

[1522] Panel 4.1D Summary: Ag1282 This gene, an ovostatin-like protein, is related to ovostatin, a known inhibitor of proteinases of all four mechanistic classes, (serine proteinases, cysteine proteinases, aspartyl proteinases, and metalloproteinases) (Saxena I, Cell Mol Life Sci 1997 January;53(1):13-23; Ofuji Y, Periodontal Clin Investig 1992 Fall;14(2):13-22). Highest expression of the gene was seen in the thymus and kidney (CTs=28-29). In addition, moderate to low levels of expression were seen in most of the samples on this panel. This gene or its protein product is useful as a therapeutic protein for the reduction of various proteolytic activities involved in inflammatory and autoimmune diseases such as, but not limited to, Crohn's disease, ulcerative colitis, multiple sclerosis, chronic obstructive pulmonary disease, asthma, emphysema, rheumatoid arthritis, lupus erythematosus, or psoriasis, wound healing, and infection.

[1523] Panel 5 Islet Summary: Ag1282 Highest expression of this gene was seen in the small intestine (CT=28), with moderate to low levels of expression seen in metabolic tissues, including adipose, placenta, and skeletal muscle. Thus, targeting this gene or its protein product is useful in the treatment of metabolic disease, including obesity and type II diabetes.

[1524] general oncology screening panel_v_{—}2.4 Summary: Ag1282 Highest expression of this gene was seen in a lung cancer sample (CT=28). In addition, this gene was more highly expressed in lung and kidney cancer than in the corresponding normal adjacent tissue. Thus, therapeutic modulation of the expression or function of this gene product is useful in the treatment of lung and kidney cancer.

[1525] BC. CG59841-01: Novel Human Agrin

[1526] Expression of gene CG59841-01 was assessed using the primer-probe set Ag3605, described in Table BCA. Results of the RTQ-PCR runs are shown in Tables BCB, BCC, BCD and BCE.

TABLE BCA
Probe Name Ag3605

| | | | | SEQ |
|---|---|---|---|---|
| | | | Start | ID |
| Primers | Sequences | Length | Position | No |
| Forward | 5′-gaccccaagtcagaactgttc-3′ | 21 | 3174 | 1549 |
| Probe | TET-5′-attgagagcaccctggacgacctctt-3′- | 26 | 3213 | 1550 |
| | TAMRA | | | |
| Reverse | 5′-gaaatccttcttgacgtctgaa-3′ | 22 | 3245 | 1551 |

[1527] TABLE BCB
General_screening_panel_v1.4

| Tissue Name | A |
|---|---|
| Adipose | 1.4 |
| Melanoma* Hs688(A).T | 2.6 |
| Melanoma* Hs688(B).T | 4.6 |
| Melanoma* M14 | 6.7 |
| Melanoma* LOXIMVI | 4.8 |
| Melanoma* SK-MEL-5 | 2.6 |
| Squamous cell carcinoma SCC-4 | 9.0 |
| Testis Pool | 1.3 |
| Prostate ca.* (bone met) PC-3 | 21.0 |
| Prostate Pool | 0.9 |
| Placenta | 0.9 |
| Uterus Pool | 0.4 |
| Ovarian ca. OVCAR-3 | 77.4 |
| Ovarian ca. SK-OV-3 | 42.0 |
| Ovarian ca. OVCAR-4 | 9.5 |
| Ovarian ca. OVCAR-5 | 39.2 |
| Ovarian ca. IGROV-1 | 22.1 |
| Ovarian ca. OVCAR-8 | 18.0 |
| Ovary | 1.5 |
| Breast ca. MCF-7 | 7.7 |
| Breast ca. MDA-MB-231 | 22.7 |
| Breast ca. BT 549 | 13.2 |
| Breast ca. T47D | 100.0 |
| Breast ca. MDA-N | 4.8 |
| Breast Pool | 1.6 |
| Trachea | 2.8 |
| Lung | 0.2 |
| Fetal Lung | 11.4 |
| Lung ca. NCI-N417 | 1.4 |
| Lung ca. LX-1 | 10.5 |
| Lung ca. NCI-H146 | 0.1 |
| Lung ca. SHP-77 | 1.1 |
| Lung ca. A549 | 15.6 |
| Lung ca. NCI-H526 | 5.4 |
| Lung ca. NCI-H23 | 18.9 |
| Lung ca. NCI-H460 | 11.5 |
| Lung ca. HOP-62 | 23.7 |
| Lung ca. NCI-H522 | 1.8 |
| Liver | 0.5 |
| Fetal Liver | 0.8 |
| Liver ca. HepG2 | 15.5 |
| Kidney Pool | 1.5 |
| Fetal Kidney | 5.8 |
| Renal ca. 786-0 | 46.3 |
| Renal ca. A498 | 13.8 |
| Renal ca. ACHN | 14.3 |
| Renal ca. UO-31 | 41.5 |
| Renal ca. TK-10 | 19.3 |
| Bladder | 8.4 |
| Gastric ca. (liver met.) NCI-N87 | 87.7 |
| Gastric ca. KATO III | 17.8 |
| Colon ca. SW-948 | 9.2 |
| Colon ca. SW480 | 25.0 |
| Colon ca.* (SW480 met) SW620 | 5.0 |
| Colon ca. HT29 | 26.8 |
| Colon ca. HCT-116 | 4.9 |
| Colon ca. CaCo-2 | 13.6 |
| Colon cancer tissue | 10.2 |
| Colon ca. SW1116 | 5.1 |
| Colon ca. Colo-205 | 1.8 |
| Colon ca. SW-48 | 1.2 |
| Colon Pool | 1.9 |
| Small Intestine Pool | 0.6 |
| Stomach Pool | 1.5 |
| Bone Marrow Pool | 0.6 |
| Fetal Heart | 1.4 |
| Heart Pool | 0.7 |
| Lymph Node Pool | 2.1 |
| Fetal Skeletal Muscle | 0.9 |
| Skeletal Muscle Pool | 0.4 |
| Spleen Pool | 0.7 |
| Thymus Pool | 1.8 |
| CNS cancer (glio/astro) U87-MG | 5.9 |
| CNS cancer (glio/astro) U-118-MG | 11.7 |
| CNS cancer (neuro; met) SK-N-AS | 1.2 |
| CNS cancer (astro) SF-539 | 6.7 |
| CNS cancer (astro) SNB-75 | 22.8 |
| CNS cancer (glio) SNB-19 | 25.0 |
| CNS cancer (glio) SF-295 | 35.1 |
| Brain (Amygdala) Pool | 1.7 |
| Brain (cerebellum) | 1.4 |
| Brain (fetal) | 7.0 |
| Brain (Hippocampus) Pool | 1.6 |
| Cerebral Cortex Pool | 1.9 |
| Brain (Substantia nigra) Pool | 2.8 |
| Brain (Thalamus) Pool | 2.7 |
| Brain (whole) | 3.4 |
| Spinal Cord Pool | 1.8 |
| Adrenal Gland | 0.2 |
| Pituitary gland Pool | 0.3 |
| Salivary Gland | 1.1 |
| Thyroid (female) | 3.3 |
| Pancreatic ca. CAPAN2 | 23.7 |
| Pancreas Pool | 3.0 |

Column A - Rel. Exp. (%) Ag3605, Run 213406184

[1528] TABLE BCC
Panel 2.2

| Tissue Name | A |
|---|---|
| Normal Colon | 4.7 |
| Colon cancer (OD06064) | 6.3 |
| Colon Margin (OD06064) | 2.3 |
| Colon cancer (OD06159) | 2.1 |
| Colon Margin (OD06159) | 1.8 |
| Colon cancer (OD06297-04) | 2.0 |
| Colon Margin (OD06297-05) | 3.0 |
| CC Gr.2 ascend colon (ODO3921) | 3.6 |
| CC Margin (ODO3921) | 1.3 |
| Colon cancer metastasis (OD06104) | 1.1 |
| Lung Margin (OD06104) | 1.0 |
| Colon mets to lung (OD04451-01) | 4.5 |
| Lung Margin (OD04451-02) | 6.7 |
| Normal Prostate | 2.1 |
| Prostate Cancer (OD04410) | 3.9 |
| Prostate Margin (OD04410) | 3.4 |
| Normal Ovary | 7.6 |
| Ovarian cancer (OD06283-03) | 27.9 |
| Ovarian Margin (OD06283-07) | 2.0 |
| Ovarian Cancer 064008 | 16.0 |
| Ovarian cancer (OD06145) | 10.1 |
| Ovarian Margin (OD06145) | 8.2 |
| Ovarian cancer (OD06455-03) | 28.9 |
| Ovarian Margin (OD06455-07) | 1.9 |
| Normal Lung | 2.9 |
| Invasive poor diff. lung adeno (ODO4945-01 | 9.4 |
| Lung Margin (ODO4945-03) | 7.9 |
| Lung Malignant Cancer (OD03126) | 7.5 |
| Lung Margin (OD03126) | 7.0 |
| Lung Cancer (OD05014A) | 17.0 |
| Lung Margin (OD05014B) | 11.7 |
| Lung cancer (OD06081) | 12.2 |
| Lung Margin (OD06081) | 2.4 |
| Lung Cancer (OD04237-01) | 1.8 |
| Lung Margin (OD04237-02) | 16.2 |
| Ocular Melanoma Metastasis | 8.4 |
| Ocular Melanoma Margin (Liver) | 2.9 |
| Melanoma Metastasis | 4.0 |
| Melanoma Margin (Lung) | 3.8 |
| Normal Kidney | 10.9 |
| Kidney Ca, Nuclear grade 2 (OD04338) | 35.4 |
| Kidney Margin (OD04338) | 20.4 |
| Kidney Ca Nuclear grade 1/2 (OD04339) | 52.9 |
| Kidney Margin (OD04339) | 16.6 |
| Kidney Ca, Clear cell type (OD04340) | 16.6 |
| Kidney Margin (OD04340) | 7.4 |
| Kidney Ca, Nuclear grade 3 (OD04348) | 11.2 |
| Kidney Margin (OD04348) | 100.0 |
| Kidney malignant cancer (OD06204B) | 21.6 |
| Kidney normal adjacent tissue (OD06204E) | 23.2 |
| Kidney Cancer (OD04450-01) | 53.2 |
| Kidney Margin (OD04450-03) | 21.3 |
| Kidney Cancer 8120613 | 1.1 |
| Kidney Margin 8120614 | 14.1 |
| Kidney Cancer 9010320 | 20.3 |
| Kidney Margin 9010321 | 15.0 |
| Kidney Cancer 8120607 | 71.7 |
| Kidney Margin 8120608 | 12.2 |
| Normal Uterus | 7.3 |
| Uterine Cancer 064011 | 6.9 |
| Normal Thyroid | 4.3 |
| Thyroid Cancer 064010 | 27.0 |
| Thyroid Cancer A302152 | 19.1 |
| Thyroid Margin A302153 | 8.1 |
| Normal Breast | 14.0 |
| Breast Cancer (OD04566) | 13.4 |
| Breast Cancer 1024 | 35.1 |
| Breast Cancer (OD04590-01) | 31.6 |
| Breast Cancer Mets (OD04590-03) | 8.7 |
| Breast Cancer Metastasis (OD04655-05) | 13.3 |
| Breast Cancer 064006 | 21.5 |
| Breast Cancer 9100266 | 17.7 |
| Breast Margin 9100265 | 16.5 |
| Breast Cancer A209073 | 13.2 |
| Breast Margin A2090734 | 35.4 |
| Breast cancer (OD06083) | 24.5 |
| Breast cancer node metastasis (OD06083) | 21.5 |
| Normal Liver | 5.0 |
| Liver Cancer 1026 | 15.5 |
| Liver Cancer 1025 | 12.2 |
| Liver Cancer 6004-T | 7.8 |
| Liver Tissue 6004-N | 6.1 |
| Liver Cancer 6005-T | 25.0 |
| Liver Tissue 6005-N | 12.4 |
| Liver Cancer 064003 | 12.9 |
| Normal Bladder | 14.2 |
| Bladder Cancer 1023 | 9.5 |
| Bladder Cancer A302173 | 12.2 |
| Normal Stomach | 8.7 |
| Gastric Cancer 9060397 | 8.9 |
| Stomach Margin 9060396 | 7.4 |
| Gastric Cancer 9060395 | 7.0 |
| Stomach Margin 9060394 | 7.5 |
| Gastric Cancer 064005 | 6.9 |

Column A - Rel. Exp. (%) Ag3605, Run 173764229

[1529] TABLE BCD
Panel 4.1D

| Tissue Name | A |
|---|---|
| Secondary Th1 act | 1.0 |
| Secondary Th2 act | 5.1 |
| Secondary Tr1 act | 2.5 |
| Secondary Th1 rest | 0.0 |
| Secondary Th2 rest | 0.4 |
| Secondary Tr1 rest | 0.4 |
| Primary Th1 act | 3.6 |
| Primary Th2 act | 1.1 |
| Primary Tr1 act | 3.4 |
| Primary Th1 rest | 0.9 |
| Primary Th2 rest | 0.5 |
| Primary Tr1 rest | 0.2 |
| CD45RA CD4 lymphocyte act | 43.5 |
| CD45RO CD4 lymphocyte act | 5.0 |
| CD8 lymphocyte act | 3.9 |
| Secondary CD8 lymphocyte rest | 3.7 |
| Secondary CD8 lymphocyte act | 3.3 |
| CD4 lymphocyte none | 0.3 |
| 2ry Th1/Th2/Tr1_anti-CD95 CH11 | 0.3 |
| LAK cells rest | 5.0 |
| LAK cells IL-2 | 2.8 |
| LAK cells IL-2 + IL-12 | 1.4 |
| LAK cells IL-2 + IFN gamma | 2.3 |
| LAK cells IL-2 + IL-18 | 2.9 |
| LAK cells PMA/ionomycin | 6.8 |
| NK Cells IL-2 rest | 1.6 |
| Two Way MLR 3 day | 10.7 |
| Two Way MLR 5 day | 6.5 |
| Two Way MLR 7 day | 4.3 |
| PBMC rest | 0.0 |
| PBMC PWM | 5.0 |
| PBMC PHA-L | 5.5 |
| Ramos (B cell) none | 0.4 |
| Ramos (B cell) ionomycin | 0.2 |
| B lymphocytes PWM | 2.4 |
| B lymphocytes CD40L and IL-4 | 1.5 |
| EOL-1 dbcAMP | 3.4 |
| EOL-1 dbcAMP PMA/ionomycin | 18.3 |
| Dendritic cells none | 14.8 |
| Dendritic cells LPS | 48.3 |
| Dendritic cells anti-CD40 | 9.7 |
| Monocytes rest | 0.9 |
| Monocytes LPS | 66.4 |
| Macrophages rest | 16.2 |
| Macrophages LPS | 54.7 |
| HUVEC none | 9.3 |
| HUVEC starved | 14.4 |
| HUVEC IL-1beta | 15.6 |
| HUVEC IFN gamma | 12.9 |
| HUVEC TNF alpha + IFN gamma | 37.6 |
| HUVEC TNF alpha + IL4 | 31.4 |
| HUVEC IL-11 | 14.9 |
| Lung Microvascular EC none | 79.0 |
| Lung Microvascular EC TNFalpha + IL-1beta | 100.0 |
| Microvascular Dermal EC none | 49.7 |
| Microsvasular Dermal EC TNFalpha + IL-1beta | 56.6 |
| Bronchial epithelium TNFalpha + IL1beta | 78.5 |
| Small airway epithelium none | 31.0 |
| Small airway epithelium TNFalpha + IL-1beta | 81.8 |
| Coronery artery SMC rest | 17.2 |
| Coronery artery SMC TNFalpha + IL-1beta | 22.2 |
| Astrocytes rest | 80.1 |
| Astrocytes TNFalpha + IL-1beta | 82.9 |
| KU-812 (Basophil) rest | 2.6 |
| KU-812 (Basophil) PMA/ionomycin | 0.6 |
| CCD1106 (Keratinocytes) none | 70.7 |
| CCD1106 (Keratinocytes) TNFalpha + IL-1beta | 77.4 |
| Liver cirrhosis | 13.2 |
| NCI-H292 none | 57.8 |
| NCI-H292 IL-4 | 62.4 |
| NCI-H292 IL-9 | 61.6 |
| NCI-H292 IL-13 | 53.6 |
| NCI-H292 IFN gamma | 67.4 |
| HPAEC none | 21.5 |
| HPAEC TNF alpha + IL-1 beta | 37.6 |
| Lung fibroblast none | 22.4 |
| Lung fibroblast TNF alpha + IL-1 beta | 71.2 |
| Lung fibroblast IL-4 | 16.2 |
| Lung fibroblast IL-9 | 31.9 |
| Lung fibroblast IL-13 | 18.7 |
| Lung fibroblast IFN gamma | 23.0 |
| Dermal fibroblast CCD1070 rest | 15.9 |
| Dermal fibroblast CCD1070 TNF alpha | 15.9 |
| Dermal fibroblast CCD1070 IL-1 beta | 17.2 |
| Dermal fibroblast IFN gamma | 7.2 |
| Dermal fibroblast IL-4 | 7.2 |
| Dermal Fibroblasts rest | 4.3 |
| Neutrophils TNFa + LPS | 0.0 |
| Neutrophils rest | 0.2 |
| Colon | 7.0 |
| Lung | 23.3 |
| Thymus | 5.8 |
| Kidney | 23.2 |

Column A - Rel. Exp. (%) Ag3605, Run 169943454

[1530] TABLE BCE
general oncology screening panel_v_2.4

| Tissue Name | A |
|---|---|
| Colon cancer 1 | 11.6 |
| Colon cancer NAT 1 | 5.3 |
| Colon cancer 2 | 18.6 |
| Colon cancer NAT 2 | 3.2 |
| Colon cancer 3 | 22.2 |
| Colon cancer NAT 3 | 7.7 |
| Colon malignant cancer 4 | 23.5 |
| Colon normal adjacent tissue 4 | 2.0 |
| Lung cancer 1 | 57.0 |
| Lung NAT 1 | 3.1 |
| Lung cancer 2 | 100.0 |
| Lung NAT 2 | 3.9 |
| Squamous cell carcinoma 3 | 41.2 |
| Lung NAT 3 | 1.7 |
| metastatic melanoma 1 | 5.4 |
| Melanoma 2 | 3.2 |
| Melanoma 3 | 3.7 |
| metastatic melanoma 4 | 12.5 |
| metastatic melanoma 5 | 7.9 |
| Bladder cancer 1 | 0.5 |
| Bladder cancer NAT 1 | 0.0 |
| Bladder cancer 2 | 6.0 |
| Bladder cancer NAT 2 | 0.2 |
| Bladder cancer NAT 3 | 1.7 |
| Bladder cancer NAT 4 | 1.8 |
| Prostate adenocarcinoma 1 | 2.4 |
| Prostate adenocarcinoma 2 | 2.6 |
| Prostate adenocarcinoma 3 | 5.2 |
| Prostate adenocarcinoma 4 | 21.9 |
| Prostate cancer NAT 5 | 5.4 |
| Prostate adenocarcinoma 6 | 4.4 |
| Prostate adenocarcinoma 7 | 3.8 |
| Prostate adenocarcinoma 8 | 1.8 |
| Prostate adenocarcinoma 9 | 10.7 |
| Prostate cancer NAT 10 | 0.7 |
| Kidney cancer 1 | 38.7 |
| Kidney NAT 1 | 20.6 |
| Kidney cancer 2 | 66.4 |
| Kidney NAT 2 | 39.8 |
| Kidney cancer 3 | 64.6 |
| Kidney NAT 3 | 19.6 |
| Kidney cancer 4 | 16.4 |
| Kidney NAT 4 | 15.6 |

Column A - Rel. Exp. (%) Ag3605, Run 260268655

[1531] General_screening_panel_v1.4 Summary: Ag3605 Expression of this gene was highest in a breast cancer cell line (CT=25.2). Expression of this gene was primarily associated with cancer cell lines rather than with normal tissues and was upregulated in pancreatic, CNS, colon, gastric, renal, lung, breast, ovarian, and prostate cancer cell lines when compared to their respective normal tissues. Thus, therapeutic modulation of the activity of this gene or its protein product, using small molecule drugs, antibodies or protein therapeutics, is of benefit in the treatment of these types of cancers.

[1532] In addition, this gene was expressed at moderate levels in all regions of the central nervous system examined, including amygdala, hippocampus, substantia nigra, thalamus, cerebellum, cerebral cortex, and spinal cord. This gene encodes a protein with homology to agrin, a neuronal aggregating factor that induces the aggregation of acetylcholine receptors and other postsynaptic proteins on muscle fibers and is crucial for the formation of the neuromuscular junction. Arin plays an important role in defining neuronal responses to excitatory neurotransmitters both in vitro and in vivo (Hilgenberg LG, Mol Cell Neurosci 2002 January;19(1):97-110; Bixby J L,. J Neurobiol 2002 February 5;50(2):164-79). This gene expression in the central nervous system was consistent with the hypothesis that this protein functions as agrin. Therefore, this gene plays a role in central nervous system disorders such as Alzheimer's disease, Parkinson's disease, epilepsy, multiple sclerosis, schizophrenia and depression.

[1533] Among tissues with metabolic or endocrine function, this gene was expressed at moderate levels in pancreas, adipose, thyroid, and the gastrointestinal tract and at low levels in adrenal gland, pituitary gland, skeletal muscle, heart, and liver. Therefore, therapeutic modulation of the activity of this gene is useful in the treatment of endocrine/metabolically related diseases, such as obesity and diabetes.

[1534] Panel 2.2 Summary: Ag3605 Expression of this gene was highest in a sample of normal kidney (CT=27.4). In addition, expression of this gene was upregulated in a number of ovarian and renal cancers when compared to the matched control margins. Expression of this gene is useful as a marker for ovarian and renal carcinoma. Therapeutic modulation of the activity of this gene or its protein product, using small molecule drugs, antibodies or protein therapeutics, is of benefit in the treatment of renal and ovarian cancer.

[1535] Panel 4.1D Summary: Ag3605 Expression of this gene was highest in lung microvascular endothelial cells, microvascular dermal endothelial cells, mucoepidermoid cell line NCI-H292, astrocytes, and keratinocytes. Therefore, small molecule drug, antibody or protein therapeutics designed against the protein encoded by this gene is useful for the reduction or inhibition of inflammation in asthma, emphysema, allergy, psoriasis, muscular dystrophy and multiple sclerosis.

[1536] general oncology screening panel_V_{—}2.4 Summary: Ag3605 Highest expression of this gene was seen in lung cancer (CT=26.8). Higher levels of expression were seen in lung and kidney cancers when compared to expression in normal adjacent tissue. Expression of this gene is useful as a marker of lung and kidney cancers. Therapeutic modulation of the expression or function of this gene product is useful in the treatment of lung and kidney cancers.

[1537] BD. CG59905-01 and CG59905-02: Sushi Containing Membrane Protein

[1538] Expression of gene CG59905-01 and variant CG59905-02 was assessed using the primer-probe set Ag2443, described in Table BDA. Results of the RTQ-PCR runs are

TABLE BDA
Probe Name Ag2443

| | | | | SEQ |
|---|---|---|---|---|
| | | | Start | ID |
| Primers | Sequences | Length | Position | No |
| Forward | 5′-cagtttgggaccgacttca-3′ | 19 | 652 | 1552 |
| Probe | TET-5′-caagactgtgagctatcagtgtaaccca-3′- | 28 | 678 | 1553 |
| | TAMRA | | | |
| Reverse | 5′-tgactgcttccatgacatagc-3′ | 21 | 707 | 1554 |

[1539] TABLE BDB
Panel 1.3D

| Tissue Name | A |
|---|---|
| Liver adenocarcinoma | 16.6 |
| Pancreas 1 | 0.0 |
| Pancreatic ca. CAPAN 2 | 0.0 |
| Adrenal gland | 1.5 |
| Thyroid | 0.0 |
| Salivary gland | 0.0 |
| Pituitary gland | 2.2 |
| Brain (fetal) | 51.4 |
| Brain (whole) | 92.0 |
| Brain (amygdala) | 52.1 |
| Brain (cerebellum) | 47.6 |
| Brain (hippocampus) | 78.5 |
| Brain (substantia nigra) | 8.0 |
| Brain (thalamus) | 12.9 |
| Cerebral Cortex | 100.0 |
| Spinal cord | 6.5 |
| glio/astro U87-MG | 0.0 |
| glio/astro U-118-MG | 0.0 |
| astrocytoma SW1783 | 0.0 |
| neuro*; met SK-N-AS | 0.0 |
| astrocytoma SF-539 | 0.0 |
| astrocytoma SNB-75 | 0.0 |
| glioma SNB-19 | 0.6 |
| glioma U251 | 29.9 |
| glioma SF-295 | 1.9 |
| Heart (fetal) | 0.0 |
| Heart | 0.0 |
| Skeletal muscle (fetal) | 6.2 |
| Skeletal muscle | 0.8 |
| Bone marrow | 0.0 |
| Thymus | 0.0 |
| Spleen | 5.4 |
| Lymph node | 0.5 |
| Colorectal | 0.7 |
| Stomach | 0.0 |
| Small intestine | 1.5 |
| Colon ca. SW480 | 0.0 |
| Colon ca.* SW620(SW480 met) | 0.0 |
| Colon ca. HT29 | 0.0 |
| Colon ca. HCT-116 | 0.0 |
| Colon ca. CaCo-2 | 0.0 |
| Colon ca. tissue(ODO3866) | 0.0 |
| Colon ca. HCC-2998 | 0.0 |
| Gastric ca.* (liver met) NCI-N87 | 0.0 |
| Bladder | 1.2 |
| Trachea | 2.0 |
| Kidney | 4.1 |
| Kidney (fetal) | 2.5 |
| Renal ca. 786-0 | 0.0 |
| Renal ca. A498 | 0.0 |
| Renal ca. RXF 393 | 0.0 |
| Renal ca. ACHN | 0.0 |
| Renal ca. UO-31 | 0.0 |
| Renal ca. TK-10 | 0.0 |
| Liver | 0.0 |
| Liver (fetal) | 0.0 |
| Liver ca. (hepatoblast) HepG2 | 0.0 |
| Lung | 0.0 |
| Lung (fetal) | 1.4 |
| Lung ca. (small cell) LX-1 | 0.0 |
| Lung ca. (small cell) NCI-H69 | 0.0 |
| Lung ca. (s. cell var.) SHP-77 | 16.8 |
| Lung ca. (large cell)NCI-H460 | 1.6 |
| Lung ca. (non-sm. cell) A549 | 0.0 |
| Lung ca. (non-s. cell) NCI-H23 | 11.2 |
| Lung ca. (non-s. cell) HOP-62 | 0.0 |
| Lung ca. (non-s. cl) NCI-H522 | 0.0 |
| Lung ca. (squam.) SW 900 | 0.0 |
| Lung ca. (squam.) NCI-H596 | 4.8 |
| Mammary gland | 2.1 |
| Breast ca.* (pl. ef) MCF-7 | 0.0 |
| Breast ca.* (pl. ef) MDA-MB-231 | 0.0 |
| Breast ca.* (pl. ef) T47D | 10.9 |
| Breast ca. BT-549 | 0.0 |
| Breast ca. MDA-N | 9.3 |
| Ovary | 1.1 |
| Ovarian ca. OVCAR-3 | 11.5 |
| Ovarian ca. OVCAR-4 | 0.0 |
| Ovarian ca. OVCAR-5 | 0.0 |
| Ovarian ca. OVCAR-8 | 0.0 |
| Ovarian ca. IGROV-1 | 0.0 |
| Ovarian ca.* (ascites) SK-OV-3 | 0.8 |
| Uterus | 2.8 |
| Placenta | 2.9 |
| Prostate | 0.9 |
| Prostate ca.* (bone met)PC-3 | 0.0 |
| Testis | 20.9 |
| Melanoma Hs688(A).T | 0.0 |
| Melanoma* (met) Hs688(B).T | 0.6 |
| Melanoma UACC-62 | 19.5 |
| Melanoma M14 | 15.1 |
| Melanoma LOX IMVI | 0.7 |
| Melanoma* (met) SK-MEL-5 | 7.3 |
| Adipose | 0.4 |

Column A - Rel. Exp. (%) Ag2443, Run 165517738

[1540] TABLE BDC
Panel 2D

| Tissue Name | A |
|---|---|
| Normal Colon | 12.6 |
| CC Well to Mod Diff (ODO3866) | 1.2 |
| CC Margin (ODO3866) | 2.9 |
| CC Gr.2 rectosigmoid (ODO3868) | 1.9 |
| CC Margin (ODO3868) | 3.2 |
| CC Mod Diff (ODO3920) | 1.5 |
| CC Margin (ODO3920) | 2.6 |
| CC Gr.2 ascend colon (ODO3921) | 9.3 |
| CC Margin (ODO3921) | 2.9 |
| CC from Partial Hepatectomy (ODO4309) Mets | 0.0 |
| Liver Margin (ODO4309) | 0.0 |
| Colon mets to lung (OD04451-01) | 2.5 |
| Lung Margin (OD04451-02) | 18.0 |
| Normal Prostate 6546-1 | 4.2 |
| Prostate Cancer (OD04410) | 0.0 |
| Prostate Margin (OD04410) | 5.3 |
| Prostate Cancer (OD04720-01) | 6.0 |
| Prostate Margin (OD04720-02) | 4.5 |
| Normal Lung 061010 | 29.9 |
| Lung Met to Muscle (ODO4286) | 2.4 |
| Muscle Margin (ODO4286) | 3.1 |
| Lung Malignant Cancer (OD03126) | 12.2 |
| Lung Margin (OD03126) | 20.4 |
| Lung Cancer (OD04404) | 3.0 |
| Lung Margin (OD04404) | 30.1 |
| Lung Cancer (OD04565) | 0.8 |
| Lung Margin (OD04565) | 9.0 |
| Lung Cancer (OD04237-01) | 7.8 |
| Lung Margin (OD04237-02) | 3.1 |
| Ocular Mel Met to Liver (ODO4310) | 3.2 |
| Liver Margin (ODO4310) | 1.1 |
| Melanoma Mets to Lung (OD04321) | 0.0 |
| Lung Margin (OD04321) | 17.2 |
| Normal Kidney | 100.0 |
| Kidney Ca, Nuclear grade 2 (OD04338) | 0.0 |
| Kidney Margin (OD04338) | 16.8 |
| Kidney Ca Nuclear grade 1/2 (OD04339) | 6.3 |
| Kidney Margin (OD04339) | 59.0 |
| Kidney Ca, Clear cell type (OD04340) | 10.7 |
| Kidney Margin (OD04340) | 38.4 |
| Kidney Ca, Nuclear grade 3 (OD04348) | 0.8 |
| Kidney Margin (OD04348) | 18.4 |
| Kidney Cancer (OD04622-01) | 1.8 |
| Kidney Margin (OD04622-03) | 8.9 |
| Kidney Cancer (OD04450-01) | 1.6 |
| Kidney Margin (OD04450-03) | 21.3 |
| Kidney Cancer 8120607 | 0.0 |
| Kidney Margin 8120608 | 37.1 |
| Kidney Cancer 8120613 | 0.0 |
| Kidney Margin 8120614 | 31.6 |
| Kidney Cancer 9010320 | 4.2 |
| Kidney Margin 9010321 | 62.9 |
| Normal Uterus | 1.4 |
| Uterus Cancer 064011 | 19.6 |
| Normal Thyroid | 0.6 |
| Thyroid Cancer 064010 | 6.6 |
| Thyroid Cancer A302152 | 0.0 |
| Thyroid Margin A302153 | 1.9 |
| Normal Breast | 22.2 |
| Breast Cancer (OD04566) | 0.8 |
| Breast Cancer (OD04590-01) | 2.6 |
| Breast Cancer Mets (OD04590-03) | 2.0 |
| Breast Cancer Metastasis (OD04655-05) | 2.9 |
| Breast Cancer 064006 | 4.3 |
| Breast Cancer 1024 | 6.5 |
| Breast Cancer 9100266 | 6.5 |
| Breast Margin 9100265 | 15.7 |
| Breast Cancer A209073 | 10.7 |
| Breast Margin A209073 | 31.4 |
| Normal Liver | 0.0 |
| Liver Cancer 064003 | 26.6 |
| Liver Cancer 1025 | 0.0 |
| Liver Cancer 1026 | 0.0 |
| Liver Cancer 6004-T | 0.0 |
| Liver Tissue 6004-N | 29.1 |
| Liver Cancer 6005-T | 0.0 |
| Liver Tissue 6005-N | 0.0 |
| Normal Bladder | 0.4 |
| Bladder Cancer 1023 | 0.0 |
| Bladder Cancer A302173 | 39.0 |
| Bladder Cancer (OD04718-01) | 0.0 |
| Bladder Normal Adjacent (OD04718-03) | 4.5 |
| Normal Ovary | 2.6 |
| Ovarian Cancer 064008 | 0.0 |
| Ovarian Cancer (OD04768-07) | 0.0 |
| Ovary Margin (OD04768-08) | 0.0 |
| Normal Stomach | 2.2 |
| Gastric Cancer 9060358 | 0.0 |
| Stomach Margin 9060359 | 1.3 |
| Gastric Cancer 9060395 | 4.6 |
| Stomach Margin 9060394 | 5.3 |
| Gastric Cancer 9060397 | 2.5 |
| Stomach Margin 9060396 | 0.8 |
| Gastric Cancer 064005 | 0.0 |

Column A - Rel. Exp. (%) Ag2443, Run 164988396

[1541] TABLE BDD
Panel 4D

| Tissue Name | A |
|---|---|
| Secondary Th1 act | 0.0 |
| Secondary Th2 act | 0.0 |
| Secondary Tr1 act | 0.0 |
| Secondary Th1 rest | 0.0 |
| Secondary Th2 rest | 0.0 |
| Secondary Tr1 rest | 0.0 |
| Primary Th1 act | 0.0 |
| Primary Th2 act | 0.0 |
| Primary Tr1 act | 0.0 |
| Primary Th1 rest | 0.0 |
| Primary Th2 rest | 0.0 |
| Primary Tr1 rest | 0.0 |
| CD45RA CD4 lymphocyte act | 0.0 |
| CD45RO CD4 lymphocyte act | 0.0 |
| CD8 lymphocyte act | 0.0 |
| Secondary CD8 lymphocyte rest | 0.0 |
| Secondary CD8 lymphocyte act | 0.0 |
| CD4 lymphocyte none | 0.0 |
| 2ry Th1/Th2/Tr1_anti-CD95 CH11 | 0.0 |
| LAK cells rest | 0.0 |
| LAK cells IL-2 | 0.0 |
| LAK cells IL-2 + IL-12 | 0.0 |
| LAK cells IL-2 + IFN gamma | 0.0 |
| LAK cells IL-2 + IL-18 | 0.0 |
| LAK cells PMA/ionomycin | 0.0 |
| NK Cells IL-2 rest | 0.0 |
| Two Way MLR 3 day | 0.0 |
| Two Way MLR 5 day | 0.0 |
| Two Way MLR 7 day | 0.0 |
| PBMC rest | 0.1 |
| PBMC PWM | 0.0 |
| PBMC PHA-L | 0.0 |
| Ramos (B cell) none | 35.6 |
| Ramos (B cell) ionomycin | 100.0 |
| B lymphocytes PWM | 0.0 |
| B lymphocytes CD40L and IL-4 | 0.0 |
| EOL-1 dbcAMP | 0.5 |
| EOL-1 dbcAMP PMA/ionomycin | 0.0 |
| Dendritic cells none | 0.2 |
| Dendritic cells LPS | 0.0 |
| Dendritic cells anti-CD40 | 0.0 |
| Monocytes rest | 0.1 |
| Monocytes LPS | 0.0 |
| Macrophages rest | 0.0 |
| Macrophages LPS | 0.0 |
| HUVEC none | 0.0 |
| HUVEC starved | 0.0 |
| HUVEC IL-1beta | 0.0 |
| HUVEC IFN gamma | 0.0 |
| HUVEC TNF alpha + IFN gamma | 0.0 |
| HUVEC TNF alpha + IL4 | 0.0 |
| HUVEC IL-11 | 0.0 |
| Lung Microvascular EC none | 0.0 |
| Lung Microvascular EC TNFalpha + IL-1beta | 0.0 |
| Microvascular Dermal EC none | 0.0 |
| Microsvasular Dermal EC TNFalpha + IL-1beta | 0.0 |
| Bronchial epithelium TNFalpha + IL1beta | 0.0 |
| Small airway epithelium none | 0.0 |
| Small airway epithelium TNFalpha + IL-1beta | 0.0 |
| Coronery artery SMC rest | 0.0 |
| Coronery artery SMC TNFalpha + IL-1beta | 0.0 |
| Astrocytes rest | 0.0 |
| Astrocytes TNFalpha + IL-1beta | 0.0 |
| KU-812 (Basophil) rest | 0.7 |
| KU-812 (Basophil) PMA/ionomycin | 0.4 |
| CCD1106 (Keratinocytes) none | 0.0 |
| CCD1106 (Keratinocytes) TNFalpha + IL-1beta | 0.0 |
| Liver cirrhosis | 0.2 |
| Lupus kidney | 0.1 |
| NCI-H292 none | 0.0 |
| NCI-H292 IL-4 | 0.0 |
| NCI-H292 IL-9 | 0.0 |
| NCI-H292 IL-13 | 0.0 |
| NCI-H292 IFN gamma | 0.0 |
| HPAEC none | 0.2 |
| HPAEC TNF alpha + IL-1 beta | 0.1 |
| Lung fibroblast none | 0.0 |
| Lung fibroblast TNF alpha + IL-1 beta | 0.0 |
| Lung fibroblast IL-4 | 0.0 |
| Lung fibroblast IL-9 | 0.0 |
| Lung fibroblast IL-13 | 0.0 |
| Lung fibroblast IFN gamma | 0.0 |
| Dermal fibroblast CCD1070 rest | 0.0 |
| Dermal fibroblast CCD1070 TNF alpha | 0.0 |
| Dermal fibroblast CCD1070 IL-1 beta | 0.0 |
| Dermal fibroblast IFN gamma | 0.0 |
| Dermal fibroblast IL-4 | 0.0 |
| IBD Colitis 2 | 0.0 |
| IBD Crohn's | 0.0 |
| Colon | 0.1 |
| Lung | 0.1 |
| Thymus | 2.5 |
| Kidney | 0.1 |

Column A - Rel. Exp. (%) Ag2443, Run 164337611

[1542] Panel 1.3D Summary: Ag2443 Highest expression of this gene was detected in the cerebral cortex (CT=30.9). In addition, high expression of this gene was observed exclusively in all the brain regions (CTs=31). Expression of this gene is useful as a marker to distinguish these brain samples from other samples used in this panel. Low but significant expression was also seen in spinal cord region. Therefore, therapeutic modulation of the function or activity of this gene or its protein product, through the use of small molecule drugs, protein therapeutics or antibodies, is beneficial in the treatment of central nervous system disorders such as Alzheimer's disease, Parkinson's disease, epilepsy, multiple sclerosis, schizophrenia and depression.

[1543] This gene encodes a variant of cub and sushi multiple domains 1 protein (CSMD1). A related protein, SEZ-6, has recently been shown to be associated with neuronal bursting activity of seizures (Shimizu-Nishikawa K, Brain Res Mol Brain Res 28(2):201-10). Thus, the protein encoded by this gene also plays a role in neuronal siezures.

[1544] In addition, low to moderate expression of this gene was seen in melanoma, ovarian cancer OVCAR-3, breast cancer, lung cancer, liver adenocarcinoma and glioma U25 1 cell lines. Therapeutic modulation of the activity of this gene or its protein product, through the use of small molecule drugs, or antibodies, is beneficial in the treatment of these cancers.

[1545] Significant expression was also detected in fetal skeletal muscle.

[1546] Panel 2D Summary: Ag2443 Highest expression of this gene was detected in a kidney sample (CT=31). Expression of this gene was down-regulated in kidney and lung cancer. In addition, there was substantial expression in other samples derived from bladder cancer, liver cancer, uterine cancer, breast cancer, kidney cancer and lung cancer. This gene encodes a variant of cub and sushi multiple domains 1 protein (CSMD1). Recently, CSMD1 has been shown to be a candidate for tumor suppressor of multiple types of cancer (Sun PC. Genomics 75(1-3):17-25). Therefore, therapeutic modulation of the activity of this gene or its protein product, through the use of small molecule drugs, or antibodies, is beneficial in the treatment of bladder, liver, uterine, breast, kidney and lung cancers.

[1547] Panel 4D Summary: Ag2443 Highest expression of this gene was seen in Ramos B cells (CTs=26-27). Expression of this gene is useful as a marker to distinguish these samples from other samples in this panel. In addition, expression of this gene in B cells shows that this gene is involved in rheumatic disease including rheumatoid arthritis, lupus, osteoarthritis, and hyperproliferative B cell disorders.

[1548] Low but significant expression of this gene was also detected in thymus. Drugs that inhibit the function of this protein are useful in the regulation of T cell development in the thymus and for the reduction or elimination of the symptoms of T cell mediated autoimmune or inflammatory diseases, including asthma, allergies, inflammatory bowel disease, lupus erythematosus, or rheumatoid arthritis. Small molecule or antibody therapeutics designed against this putative protein are useful for the disruption of T cell development in the thymus and as immunosuppresants for tissue transplant.

[1549] BE. CG9271501: KIAA0918

[1550] Expression of gene CG92715-01 was assessed using the primer-probe set Ag2502, described in Table BEA. Results of the RTQ-PCR runs are shown in Tables BEB, BEC, BED and BEE.

TABLE BEA
Probe Name Ag2502

| | | | | SEQ |
|---|---|---|---|---|
| | | | Start | ID |
| Primers | Sequences | Length | Position | No |
| Forward | 5′-ggagtaaccacttcacctcctt-3′ | 22 | 1632 | 1555 |
| Probe | TET-5′-ccagctgaagtcactcatccaaatcg-3′- | 26 | 1675 | 1556 |
| | TAMRA | | | |
| Reverse | 5′-aggtacaatcccaaggattgtc-3′ | 22 | 1709 | 1557 |

[1551] TABLE BEB
Panel 1.3D

| Tissue Name | A |
|---|---|
| Liver adenocarcinoma | 4.5 |
| Pancreas | 1.1 |
| Pancreatic ca. CAPAN 2 | 14.9 |
| Adrenal gland | 0.8 |
| Thyroid | 10.1 |
| Salivary gland | 17.3 |
| Pituitary gland | 2.9 |
| Brain (fetal) | 76.3 |
| Brain (whole) | 95.3 |
| Brain (amygdala) | 80.1 |
| Brain (cerebellum) | 61.1 |
| Brain (hippocampus) | 100.0 |
| Brain (substantia nigra) | 16.2 |
| Brain (thalamus) | 25.0 |
| Cerebral Cortex | 92.0 |
| Spinal cord | 20.0 |
| glio/astro U87-MG | 24.7 |
| glio/astro U-118-MG | 22.4 |
| astrocytoma SW1783 | 0.2 |
| neuro*; met SK-N-AS | 42.3 |
| astrocytoma SF-539 | 0.0 |
| astrocytoma SNB-75 | 3.6 |
| glioma SNB-19 | 2.5 |
| glioma U251 | 19.5 |
| glioma SF-295 | 0.0 |
| Heart (fetal) | 1.3 |
| Heart | 0.8 |
| Skeletal muscle (fetal) | 8.2 |
| Skeletal muscle | 0.0 |
| Bone marrow | 0.0 |
| Thymus | 0.7 |
| Spleen | 0.5 |
| Lymph node | 0.3 |
| Colorectal | 0.7 |
| Stomach | 3.1 |
| Small intestine | 2.4 |
| Colon ca. SW480 | 0.2 |
| Colon ca.* SW620(SW480 met) | 1.4 |
| Colon ca. HT29 | 0.0 |
| Colon ca. HCT-116 | 0.0 |
| Colon ca. CaCo-2 | 0.0 |
| Colon ca. tissue(ODO3866) | 0.0 |
| Colon ca. HCC-2998 | 4.8 |
| Gastric ca.* (liver met) NCI-N87 | 0.2 |
| Bladder | 2.6 |
| Trachea | 4.1 |
| Kidney | 0.6 |
| Kidney (fetal) | 1.3 |
| Renal ca. 786-0 | 31.2 |
| Renal ca. A498 | 4.4 |
| Renal ca. RXF 393 | 0.0 |
| Renal ca. ACHN | 1.7 |
| Renal ca. UO-31 | 4.2 |
| Renal ca. TK-10 | 5.8 |
| Liver | 0.0 |
| Liver (fetal) | 0.0 |
| Liver ca. (hepatoblast) HepG2 | 0.0 |
| Lung | 0.3 |
| Lung (fetal) | 2.1 |
| Lung ca. (small cell) LX-1 | 2.1 |
| Lung ca. (small cell) NCI-H69 | 4.8 |
| Lung ca. (s. cell var.) SHP-77 | 30.6 |
| Lung ca. (large cell)NCI-H460 | 21.2 |
| Lung ca. (non-sm. cell) A549 | 2.3 |
| Lung ca. (non-s. cell) NCI-H23 | 36.1 |
| Lung ca. (non-s. cell) HOP-62 | 10.8 |
| Lung ca. (non-s. cl) NCI-H522 | 0.3 |
| Lung ca. (squam.) SW 900 | 3.2 |
| Lung ca. (squam.) NCI-H596 | 23.2 |
| Mammary gland | 1.5 |
| Breast ca.* (pl. ef) MCF-7 | 0.0 |
| Breast ca.* (pl. ef) MDA-MB-231 | 0.0 |
| Breast ca.* (pl. ef) T47D | 4.9 |
| Breast ca. BT-549 | 14.2 |
| Breast ca. MDA-N | 1.4 |
| Ovary | 3.6 |
| Ovarian ca. OVCAR-3 | 12.9 |
| Ovarian ca. OVCAR-4 | 4.1 |
| Ovarian ca. OVCAR-5 | 0.0 |
| Ovarian ca. OVCAR-8 | 11.7 |
| Ovarian ca. IGROV-1 | 0.0 |
| Ovarian ca.* (ascites) SK-OV-3 | 1.6 |
| Uterus | 0.0 |
| Placenta | 0.0 |
| Prostate | 1.2 |
| Prostate ca.* (bone met)PC-3 | 0.6 |
| Testis | 0.8 |
| Melanoma Hs688(A).T | 0.0 |
| Melanoma* (met) Hs688(B).T | 0.0 |
| Melanoma UACC-62 | 1.1 |
| Melanoma M14 | 2.7 |
| Melanoma LOX IMVI | 0.8 |
| Melanoma* (met) SK-MEL-5 | 2.3 |
| Adipose | 1.3 |

Column A - Rel. Exp. (%) Ag2502, Run 165518160

[1552] TABLE BEC
Panel 2D

| Tissue Name | A | B |
|---|---|---|
| Normal Colon | 7.1 | 9.9 |
| CC Well to Mod Diff (ODO3866) | 0.0 | 0.1 |
| CC Margin (ODO3866) | 0.7 | 0.3 |
| CC Gr.2 rectosigmoid (ODO3868) | 0.3 | 0.0 |
| CC Margin (ODO3868) | 0.4 | 0.8 |
| CC Mod Diff (ODO3920) | 10.5 | 11.1 |
| CC Margin (ODO3920) | 1.0 | 1.5 |
| CC Gr.2 ascend colon (ODO3921) | 2.8 | 1.3 |
| CC Margin (ODO3921) | 0.1 | 0.2 |
| CC from Partial Hepatectomy | 0.0 | 0.0 |
| (ODO4309) Mets | | |
| Liver Margin (ODO4309) | 0.1 | 0.1 |
| Colon mets to lung (OD04451-01) | 0.9 | 1.3 |
| Lung Margin (OD04451-02) | 0.9 | 0.4 |
| Normal Prostate 6546-1 | 13.8 | 7.2 |
| Prostate Cancer (OD04410) | 19.1 | 15.9 |
| Prostate Margin (OD04410) | 7.0 | 8.5 |
| Prostate Cancer (OD04720-01) | 33.2 | 34.9 |
| Prostate Margin (OD04720-02) | 43.5 | 56.6 |
| Normal Lung 061010 | 2.8 | 3.0 |
| Lung Met to Muscle (ODO4286) | 15.8 | 14.3 |
| Muscle Margin (ODO4286) | 0.5 | 0.6 |
| Lung Malignant Cancer (OD03126) | 0.9 | 0.7 |
| Lung Margin (OD03126) | 1.2 | 1.9 |
| Lung Cancer (OD04404) | 0.3 | 0.3 |
| Lung Margin (OD04404) | 0.4 | 0.5 |
| Lung Cancer (OD04565) | 0.1 | 0.5 |
| Lung Margin (OD04565) | 0.3 | 1.0 |
| Lung Cancer (OD04237-01) | 1.7 | 1.7 |
| Lung Margin (OD04237-02) | 0.1 | 0.0 |
| Ocular Mel Met to Liver (ODO4310) | 0.0 | 0.0 |
| Liver Margin (ODO4310) | 0.2 | 0.0 |
| Melanoma Mets to Lung (OD04321) | 0.0 | 0.1 |
| Lung Margin (OD04321) | 0.4 | 0.6 |
| Normal Kidney | 2.3 | 1.9 |
| Kidney Ca, Nuclear grade 2 (OD04338) | 2.8 | 2.9 |
| Kidney Margin (OD04338) | 0.4 | 0.3 |
| Kidney Ca Nuclear grade 1/2 (OD04339) | 0.4 | 0.3 |
| Kidney Margin (OD04339) | 0.4 | 0.9 |
| Kidney Ca, Clear cell type (OD04340) | 27.4 | 33.2 |
| Kidney Margin (OD04340) | 0.2 | 0.3 |
| Kidney Ca, Nuclear grade 3 (OD04348) | 3.0 | 3.0 |
| Kidney Margin (OD04348) | 0.4 | 0.0 |
| Kidney Cancer (OD04622-01) | 100.0 | 100.0 |
| Kidney Margin (OD04622-03) | 0.0 | 0.5 |
| Kidney Cancer (OD04450-01) | 0.1 | 0.8 |
| Kidney Margin (OD04450-03) | 0.8 | 0.7 |
| Kidney Cancer 8120607 | 4.7 | 3.7 |
| Kidney Margin 8120608 | 0.1 | 0.1 |
| Kidney Cancer 8120613 | 0.0 | 0.1 |
| Kidney Margin 8120614 | 0.2 | 0.6 |
| Kidney Cancer 9010320 | 1.4 | 2.1 |
| Kidney Margin 9010321 | 0.6 | 0.2 |
| Normal Uterus | 0.1 | 0.1 |
| Uterus Cancer 064011 | 0.3 | 0.7 |
| Normal Thyroid | 14.5 | 13.5 |
| Thyroid Cancer 064010 | 0.4 | 0.3 |
| Thyroid Cancer A302152 | 0.2 | 0.6 |
| Thyroid Margin A302153 | 14.9 | 12.4 |
| Normal Breast | 1.7 | 2.6 |
| Breast Cancer (OD04566) | 0.1 | 0.2 |
| Breast Cancer (OD04590-01) | 5.5 | 5.1 |
| Breast Cancer Mets (OD04590-03) | 4.2 | 2.6 |
| Breast Cancer Metastasis (OD04655-05) | 1.0 | 0.9 |
| Breast Cancer 064006 | 1.3 | 0.4 |
| Breast Cancer 1024 | 2.1 | 1.1 |
| Breast Cancer 9100266 | 0.1 | 0.1 |
| Breast Margin 9100265 | 2.5 | 2.5 |
| Breast Cancer A209073 | 2.4 | 0.6 |
| Breast Margin A209073 | 3.7 | 3.3 |
| Normal Liver | 0.0 | 0.1 |
| Liver Cancer 064003 | 0.6 | 1.2 |
| Liver Cancer 1025 | 0.0 | 0.0 |
| Liver Cancer 1026 | 0.0 | 0.1 |
| Liver Cancer 6004-T | 0.0 | 0.0 |
| Liver Tissue 6004-N | 0.3 | 0.2 |
| Liver Cancer 6005-T | 0.1 | 0.0 |
| Liver Tissue 6005-N | 0.0 | 0.0 |
| Normal Bladder | 6.5 | 4.0 |
| Bladder Cancer 1023 | 0.0 | 0.3 |
| Bladder Cancer A302173 | 24.0 | 23.5 |
| Bladder Cancer (OD04718-01) | 0.0 | 0.0 |
| Bladder Normal Adjacent (OD04718-03) | 0.1 | 0.1 |
| Normal Ovary | 2.1 | 3.9 |
| Ovarian Cancer 064008 | 4.9 | 6.3 |
| Ovarian Cancer (OD04768-07) | 10.4 | 7.8 |
| Ovary Margin (OD04768-08) | 0.4 | 0.2 |
| Normal Stomach | 6.2 | 5.2 |
| Gastric Cancer 9060358 | 3.1 | 7.5 |
| Stomach Margin 9060359 | 1.3 | 0.8 |
| Gastric Cancer 9060395 | 4.7 | 4.3 |
| Stomach Margin 9060394 | 1.5 | 1.3 |
| Gastric Cancer 9060397 | 1.4 | 1.2 |
| Stomach Margin 9060396 | 0.2 | 0.2 |
| Gastric Cancer 064005 | 4.7 | 3.0 |

Column A - Rel. Exp. (%) Ag2502, Run 162319639
Column B - Rel. Exp. (%) Ag2502, Run 164993363

[1553] TABLE BED
Panel 3D

| Tissue Name | A |
|---|---|
| Daoy- Medulloblastoma | 1.6 |
| TE671- Medulloblastoma | 41.8 |
| D283 Med- Medulloblastoma | 63.7 |
| PFSK-1- Primitive Neuroectodermal | 0.0 |
| XF-498- CNS | 22.8 |
| SNB-78- Glioma | 11.8 |
| SF-268- Glioblastoma | 5.1 |
| T98G- Glioblastoma | 0.0 |
| SK-N-SH- Neuroblastoma (metastasis) | 0.0 |
| SF-295- Glioblastoma | 0.8 |
| Cerebellum | 79.0 |
| Cerebellum | 26.4 |
| NCI-H292- Mucoepidermoid lung carcinoma | 1.5 |
| DMS-114- Small cell lung cancer | 13.2 |
| DMS-79- Small cell lung cancer | 0.0 |
| NCI-H146- Small cell lung cancer | 28.5 |
| NCI-H526- Small cell lung cancer | 3.1 |
| NCI-N417- Small cell lung cancer | 46.3 |
| NCI-H82- Small cell lung cancer | 87.1 |
| NCI-H157- Squamous cell lung cancer (metastasis) | 100.0 |
| NCI-H1155- Large cell lung cancer | 35.6 |
| NCI-H1299- Large cell lung cancer | 16.5 |
| NCI-H727- Lung carcinoid | 0.0 |
| NCI-UMC-11- Lung carcinoid | 53.2 |
| LX-1- Small cell lung cancer | 1.2 |
| Colo-205- Colon cancer | 5.9 |
| KM12- Colon cancer | 0.0 |
| KM20L2- Colon cancer | 0.0 |
| NCI-H716- Colon cancer | 0.0 |
| SW-48- Colon adenocarcinoma | 0.0 |
| SW1116- Colon adenocarcinoma | 0.0 |
| LS 174T- Colon adenocarcinoma | 0.0 |
| SW-948- Colon adenocarcinoma | 0.0 |
| SW-480- Colon adenocarcinoma | 0.0 |
| NCI-SNU-5- Gastric carcinoma | 0.0 |
| KATO III- Gastric carcinoma | 0.0 |
| NCI-SNU-16- Gastric carcinoma | 6.7 |
| NCI-SNU-1- Gastric carcinoma | 0.0 |
| RF-1- Gastric adenocarcinoma | 2.4 |
| RF-48- Gastric adenocarcinoma | 2.6 |
| MKN-45- Gastric carcinoma | 0.0 |
| NCI-N87- Gastric carcinoma | 0.0 |
| OVCAR-5- Ovarian carcinoma | 0.0 |
| RL95-2- Uterine carcinoma | 1.7 |
| HelaS3- Cervical adenocarcinoma | 14.6 |
| Ca Ski- Cervical epidermoid carcinoma (metastasis) | 1.2 |
| ES-2- Ovarian clear cell carcinoma | 22.5 |
| Ramos- Stimulated with PMA/ionomycin 6 h | 0.0 |
| Ramos- Stimulated with PMA/ionomycin 14 h | 0.0 |
| MEG-01- Chronic myelogenous leukemia | 13.8 |
| (megokaryoblast) | |
| Raji- Burkitt's lymphoma | 0.0 |
| Daudi- Burkitt's lymphoma | 0.0 |
| U266- B-cell plasmacytoma | 8.5 |
| CA46- Burkitt's lymphoma | 6.3 |
| RL- non-Hodgkin's B-cell lymphoma | 0.0 |
| JM1- pre-B-cell lymphoma | 0.0 |
| Jurkat- T cell leukemia | 0.0 |
| TF-1- Erythroleukemia | 11.8 |
| HUT 78- T-cell lymphoma | 0.0 |
| U937- Histiocytic lymphoma | 0.0 |
| KU-812- Myelogenous leukemia | 0.3 |
| 769-P- Clear cell renal carcinoma | 9.5 |
| Caki-2- Clear cell renal carcinoma | 3.1 |
| SW 839- Clear cell renal carcinoma | 12.5 |
| Rhabdoid kidney tumor | 12.6 |
| Hs766T- Pancreatic carcinoma (LN metastasis) | 0.0 |
| CAPAN-1- Pancreatic adenocarcinoma (liver | 0.0 |
| metastasis) | |
| SU86.86- Pancreatic carcinoma (liver metastasis) | 2.4 |
| BxPC-3- Pancreatic adenocarcinoma | 0.0 |
| HPAC- Pancreatic adenocarcinoma | 0.0 |
| MIA PaCa-2- Pancreatic carcinoma | 0.7 |
| CFPAC-1- Pancreatic ductal adenocarcinoma | 0.4 |
| PANC-1- Pancreatic epithelioid ductal carcinoma | 1.3 |
| T24- Bladder carcinma (transitional cell) | 0.0 |
| 5637- Bladder carcinoma | 7.7 |
| HT-1197- Bladder carcinoma | 0.0 |
| UM-UC-3- Bladder carcinma (transitional cell) | 3.1 |
| A204- Rhabdomyosarcoma | 0.0 |
| HT-1080- Fibrosarcoma | 2.6 |
| MG-63- Osteosarcoma | 4.6 |
| SK-LMS-1- Leiomyosarcoma (vulva) | 0.3 |
| SJRH30- Rhabdomyosarcoma (met to bone marrow) | 22.8 |
| A431- Epidermoid carcinoma | 0.0 |
| WM266-4- Melanoma | 15.8 |
| DU 145- Prostate carcinoma (brain metastasis) | 0.0 |
| MDA-MB-468- Breast adenocarcinoma | 0.3 |
| SCC-4- Squamous cell carcinoma of tongue | 0.0 |
| SCC-9- Squamous cell carcinoma of tongue | 0.0 |
| SCC-15- Squamous cell carcinoma of tongue | 0.0 |
| CAL 27- Squamous cell carcinoma of tongue | 0.0 |

Column A - Rel. Exp. (%) Ag2502, Run 164629448

[1554] TABLE BEE
Panel 4D

| Tissue Name | A |
|---|---|
| Secondary Th1 act | 1.6 |
| Secondary Th2 act | 0.0 |
| Secondary Tr1 act | 0.0 |
| Secondary Th1 rest | 0.0 |
| Secondary Th2 rest | 0.0 |
| Secondary Tr1 rest | 0.0 |
| Primary Th1 act | 0.0 |
| Primary Th2 act | 0.0 |
| Primary Tr1 act | 0.0 |
| Primary Th1 rest | 0.0 |
| Primary Th2 rest | 0.0 |
| Primary Tr1 rest | 1.8 |
| CD45RA CD4 lymphocyte act | 0.0 |
| CD45RO CD4 lymphocyte act | 0.0 |
| CD8 lymphocyte act | 0.0 |
| Secondary CD8 lymphocyte rest | 0.0 |
| Secondary CD8 lymphocyte act | 0.0 |
| CD4 lymphocyte none | 3.1 |
| 2ry Th1/Th2/Tr1_anti-CD95 CH11 | 1.1 |
| LAK cells rest | 4.1 |
| LAK cells IL-2 | 6.6 |
| LAK cells IL-2 + IL-12 | 0.0 |
| LAK cells IL-2 + IFN gamma | 2.4 |
| LAK cells IL-2 + IL-18 | 4.4 |
| LAK cells PMA/ionomycin | 0.0 |
| NK Cells IL-2 rest | 2.4 |
| Two Way MLR 3 day | 0.0 |
| Two Way MLR 5 day | 0.0 |
| Two Way MLR 7 day | 0.0 |
| PBMC rest | 7.8 |
| PBMC PWM | 6.7 |
| PBMC PHA-L | 0.0 |
| Ramos (B cell) none | 6.6 |
| Ramos (B cell) ionomycin | 8.8 |
| B lymphocytes PWM | 0.0 |
| B lymphocytes CD40L and IL-4 | 0.0 |
| EOL-1 dbcAMP | 100.0 |
| EOL-1 dbcAMP PMA/ionomycin | 18.2 |
| Dendritic cells none | 0.0 |
| Dendritic cells LPS | 0.0 |
| Dendritic cells anti-CD40 | 0.0 |
| Monocytes rest | 3.5 |
| Monocytes LPS | 0.0 |
| Macrophages rest | 0.0 |
| Macrophages LPS | 0.0 |
| HUVEC none | 0.0 |
| HUVEC starved | 23.3 |
| HUVEC IL-1beta | 3.5 |
| HUVEC IFN gamma | 0.0 |
| HUVEC TNF alpha + IFN gamma | 0.0 |
| HUVEC TNF alpha + IL4 | 0.0 |
| HUVEC IL-11 | 3.7 |
| Lung Microvascular EC none | 2.8 |
| Lung Microvascular EC TNFalpha + IL-1beta | 0.0 |
| Microvascular Dermal EC none | 0.0 |
| Microsvasular Dermal EG TNFalpha + IL-1beta | 0.0 |
| Bronchial epithelium TNFalpha + IL1beta | 9.7 |
| Small airway epithelium none | 23.0 |
| Small airway epithelium TNFalpha + IL-1beta | 0.0 |
| Coronery artery SMC rest | 0.0 |
| Coronery artery SMC TNFalpha + IL-1beta | 0.0 |
| Astrocytes rest | 21.6 |
| Astrocytes TNFalpha + IL-1 beta | 4.1 |
| KU-812 (Basophil) rest | 0.0 |
| KU-812 (Basophil) PMA/ionomycin | 46.3 |
| CCD1106 (Keratinocytes) none | 2.5 |
| CCD1106 (Keratinocytes) TNFalpha + IL-1beta | 6.9 |
| Liver cirrhosis | 16.6 |
| Lupus kidney | 2.6 |
| NCI-H292 none | 57.8 |
| NCI-H292 IL-4 | 26.8 |
| NCI-H292 IL-9 | 54.3 |
| NCI-H292 IL-13 | 24.0 |
| NCI-H292 IFN gamma | 20.7 |
| HPAEC none | 0.0 |
| HPAEC TNF alpha + IL-1 beta | 0.0 |
| Lung fibroblast none | 5.8 |
| Lung fibroblast TNF alpha + IL-1 beta | 0.0 |
| Lung fibroblast IL-4 | 31.4 |
| Lung fibroblast IL-9 | 7.6 |
| Lung fibroblast IL-13 | 3.0 |
| Lung fibroblast IFN gamma | 5.3 |
| Dermal fibroblast CCD1070 rest | 9.5 |
| Dermal fibroblast CCD1070 TNF alpha | 0.0 |
| Dermal fibroblast CCD1070 IL-1 beta | 0.0 |
| Dermal fibroblast IFN gamma | 0.0 |
| Dermal fibroblast IL-4 | 0.0 |
| IBD Colitis 2 | 6.0 |
| IBD Crohn's | 1.3 |
| Colon | 31.4 |
| Lung | 56.3 |
| Thymus | 25.3 |
| Kidney | 12.2 |

Column A - Rel. Exp. (%) Ag2502, Run 162293442

[1555] Panel 1.3D Summary: Ag2502 Highest expression of this gene was seen in the cerebral cortex (CT=27). In addition, low levels of expression were seen in all CNS regions examined in this panel. This gene encodes a leucine-rich repeat protein. Leucine rich repeats (LRR) mediate reversible protein-protein interactions and have diverse cellular functions, including cellular adhesion and signaling. Several of these proteins, such as connectin, slit, chaoptin, and Toll have pivotal roles in neuronal development in Drosophila and play significant but distinct roles in neural development and in the adult nervous system of humans (Battye R. J. Neurosci. 21: 4290-4298). In Drosophilia, the LRR region of axon guidance proteins are critical for their function , especially in axon repulsion. Since the leucine-rich-repeat protein encoded by this gene was highly expressed in the cerebral cortex, it is a candidate neuronal guidance protein for axons, dendrites and/or growth cones in general. (Itoh A. Brain Res. Mol. Brain Res. 62: 175-186.) Therapeutic modulation of the levels of this protein, or signaling via this protein, are of utility in enhancing/directing compensatory synaptogenesis and fiber growth in the CNS in response to neuronal death (stroke, head trauma), axon lesion (spinal cord injury), or neurodegeneration (Alzheimer's, Parkinson's, Huntington's, vascular dementia or any neurodegenerative disease).

[1556] Moderate levels of expression were also seen in cell lines derived from ovarian cancer, lung cancer, and brain cancer. Therapeutic modulation of the expression or function of this gene or gene product is an effective treatment of these cancers.

[1557] Among metabolically relevant tissues, this gene was expressed in fetal skeletal muscle, thyroid, and pituitary gland. Therapeutic modulation of this gene or gene product is useful in the treatment of metabolic diseases such as obesity and diabetes, as well as neuroendocrine disorders. Glycoprotein hormones influence the development and function of the ovary, testis and thyroid by binding to specific high-affinity receptors. (Jiang X. Structure 3: 1341-1353). The extracellular domains of these receptors are members of the leucine-rich repeat (LRR) protein superfamily and are responsible for the high-affinity binding.

[1558] Panel 2D Summary: Ag2502 Highest expression of this gene was seen in kidney cancer (CTs=27.7). In addition, expression was significantly higher in the kidney cancer samples when compared to expression in samples from the normal adjacent tissue. There was also moderate to low expression in bladder, gastric, colon and ovarian cancers. Expression of this gene is useful as a marker to differentiate the kidney cancer samples from other samples on this panel and as a marker for kidney cancer. Therapeutic targeting of this gene or its protein product with a human monoclonal antibody, small molecule, or protein therapeutic is useful for limiting or blocking the extent of tumor cell migration, invasion, and metastasis, specifically in kidney, ovarian, bladder, gastric, and colon tumors.

[1559] Panel 3D Summary: Ag2502 Highest expression of this gene was seen in a lung cancer cell line (CT=28). Moderate levels of expression were seen in a cluster of lung and brain cancer cell lines. Prominent expression was also seen in cerebellum, in agreement with expression seen in Panel 1.3D. Low, but significant expression was also seen in kidney cancer and ovarian cancer cell lines. Expression of this gene is useful as a marker to differentiate lung and brain cancer cell lines and normal brain from other samples on this panel and as a marker for lung and brain cancer. Moderate expression of this gene was also seen in melanoma, rhabdomyosarcoma, osteosarcoma, renal and bladder carcinoma, lymphoma, ovarian and cervical cancer and gastric cancer cell lines. Therapeutic modulation of the expression or function of this gene is useful for the treatment of these cancers.

[1560] Panel 4D Summary: Ag2502 Ag2502 Highest expression of this gene was seen in eosinophils (CT=32). Higher levels of gene expression were observed in the eosinophil cell line EOL-1 under resting conditions over the levels in EOL-1 cells stimulated by phorbol ester and ionomycin (CT=34.4). Thus, this gene is involved in eosinophil function. Antibodies raised against this protein that stimulate its activity are useful in the reduction of eosinophil activation and as therapeutic antibodies for the treatment of asthma and allergy and as an anti-inflammatory therapeutics for T cell-mediated autoimmune and inflammatory diseases. Low but significant levels of expression were also seen in a cluster of treated and untreated NCI-H292 mucoepidermoid cells adn in normal colon, lung and thymus. This pattern of restricted expression shows that this gene or gene product is involved in the normal homeostasis of these tissues and/or pathological/inflammatory conditions of the lung.

[1561] BF. CG92813-01: Cadherin-related Tumor Suppressor Precursor (FAT)

[1562] Expression of gene CG92813-01 was assessed using the primer-probe sets Ag1413, Ag1515, Ag3085, Ag740 and Ag3819, described in Tables BFA, BFB, BFC, BFD, and BFE. Results of the RTQ-PCR runs are shown in Tables BFF, BFG, BFH and BFI.

TABLE BFA
Probe Name Ag1413

| | | | | SEQ |
|---|---|---|---|---|
| | | | Start | ID |
| Primers | Sequences | Length | Position | No |
| Forward | 5′-aggattctggtgttcctcaaat-3′ | 22 | 10908 | 1558 |
| Probe | TET-5′-tcttccacaggaactgtgcatatcaca-3′- | 27 | 10931 | 1559 |
| | TAMRA | | | |
| Reverse | 5′-cgagactgtgaaggattgtcat-3′ | 22 | 10971 | 1560 |

[1563] TABLE BFB
Probe Name Ag1515

| | | | | SEQ |
|---|---|---|---|---|
| | | | Start | ID |
| Primers | Sequences | Length | Position | No |
| Forward | 5′-ggatggttccatatcagtgaac-3′ | 22 | 2078 | 1561 |
| Probe | TET-5′-ctcgtgaccactgggtcctctgg-3′-TAMRA | 23 | 2108 | 1562 |
| Reverse | 5′-agaacaatctgggaagcaagtt-3′ | 22 | 2145 | 1563 |

[1564] TABLE BFC
Probe Name Ag3085

| | | | | SEQ |
|---|---|---|---|---|
| | | | Start | ID |
| Primers | Sequences | Length | Position | No |
| Forward | 5′-cttcacctgtagctgccca-3′ | 19 | 13801 | 1564 |
| Probe | TET-5′-acacgggaaggacctgtgagatggt-3′- | 25 | 13827 | 1565 |
| | TAMRA | | | |
| Reverse | 5′-acagaggacgccaagacag-3′ | 19 | 13858 | 1566 |

[1565] TABLE BFD
Probe Name Ag740

| | | | | SEQ |
|---|---|---|---|---|
| | | | Start | ID |
| Primers | Sequences | Length | Position | No |
| Forward | 5′-gagggatattgtcagggtcatc-3′ | 22 | 14126 | 1567 |
| Probe | TET-5′-aaaagcaacgttctcacttccctttt-3′- | 26 | 14100 | 1568 |
| | TAMRA | | | |
| Reverse | 5′-aaatcccaaagaggagaagaaa-3′ | 22 | 14062 | 1569 |

[1566] TABLE BFE
Probe Name Ag3819

| | | | | SEQ |
|---|---|---|---|---|
| | | | Start | ID |
| Primers | Sequences | Length | Position | No |
| Forward | 5′-agtcatcaatggctcgcata-3′ | 20 | 2523 | 1570 |
| Probe | TET-5′-tcttctggatataaatgataacagccctg-3′- | 29 | 2551 | 1571 |
| | TAMRA | | | |
| Reverse | 5′-aagtattggaccgggtagaaga-3′ | 22 | 2580 | 1572 |

[1567] TABLE BFF
General_screening_panel_v1.4

| Tissue Name | A | B |
|---|---|---|
| Adipose | 11.3 | 5.8 |
| Melanoma* Hs688(A).T | 84.1 | 68.8 |
| Melanoma* Hs688(B).T | 29.7 | 20.7 |
| Melanoma* M14 | 0.0 | 0.0 |
| Melanoma* LOXIMVI | 17.7 | 14.6 |
| Melanoma* SK-MEL-5 | 0.7 | 1.2 |
| Squamous cell carcinoma SCC-4 | 2.2 | 2.2 |
| Testis Pool | 4.5 | 4.1 |
| Prostate ca.* (bone met) PC-3 | 5.0 | 3.5 |
| Prostate Pool | 10.6 | 7.7 |
| Placenta | 2.5 | 3.7 |
| Uterus Pool | 4.6 | 5.8 |
| Ovarian ca. OVCAR-3 | 3.6 | 2.9 |
| Ovarian ca. SK-OV-3 | 46.0 | 7.7 |
| Ovarian ca. OVCAR-4 | 10.4 | 7.9 |
| Ovarian ca. OVCAR-5 | 5.8 | 3.7 |
| Ovarian ca. IGROV-1 | 1.8 | 1.5 |
| Ovarian ca. OVCAR-8 | 3.7 | 3.3 |
| Ovary | 25.2 | 13.6 |
| Breast ca. MCF-7 | 0.4 | 0.2 |
| Breast ca. MDA-MB-231 | 54.3 | 40.1 |
| Breast ca. BT 549 | 32.5 | 28.7 |
| Breast ca. T47D | 7.2 | 5.6 |
| Breast ca. MDA-N | 0.1 | 0.1 |
| Breast Pool | 48.6 | 15.9 |
| Trachea | 8.8 | 11.3 |
| Lung | 6.0 | 5.9 |
| Fetal Lung | 70.7 | 59.5 |
| Lung ca. NCI-N417 | 42.9 | 0.3 |
| Lung ca. LX-1 | 0.0 | 0.0 |
| Lung ca. NCI-H146 | 0.5 | 0.2 |
| Lung ca. SHP-77 | 2.8 | 2.5 |
| Lung ca. A549 | 1.4 | 1.7 |
| Lung ca. NCI-H526 | 0.0 | 0.0 |
| Lung ca. NCI-H23 | 100.0 | 100.0 |
| Lung ca. NCI-H460 | 44.1 | 6.5 |
| Lung ca. HOP-62 | 29.9 | 20.6 |
| Lung ca. NCI-H522 | 1.1 | 1.6 |
| Liver | 1.4 | 0.6 |
| Fetal Liver | 16.7 | 13.5 |
| Liver ca. HepG2 | 0.4 | 0.6 |
| Kidney Pool | 35.8 | 24.7 |
| Fetal Kidney | 48.6 | 25.7 |
| Renal ca. 786-0 | 37.6 | 30.8 |
| Renal ca. A498 | 7.6 | 6.0 |
| Renal ca. ACHN | 5.6 | 3.4 |
| Renal ca. UO-31 | 37.4 | 22.7 |
| Renal ca. TK-10 | 6.4 | 4.6 |
| Bladder | 6.4 | 4.5 |
| Gastric ca. (liver met.) NCI-N87 | 0.9 | 0.5 |
| Gastric ca. KATO III | 0.0 | 0.0 |
| Colon ca. SW-948 | 0.0 | 0.0 |
| Colon ca. SW480 | 0.0 | 0.0 |
| Colon ca.* (SW480 met) SW620 | 0.0 | 0.0 |
| Colon ca. HT29 | 0.0 | 0.0 |
| Colon ca. HCT-116 | 1.3 | 1.2 |
| Colon ca. CaCo-2 | 0.1 | 0.0 |
| Colon cancer tissue | 7.4 | 4.0 |
| Colon ca. SW1116 | 0.0 | 0.0 |
| Colon ca. Colo-205 | 42.3 | 0.0 |
| Colon ca. SW-48 | 0.0 | 0.0 |
| Colon Pool | 14.9 | 11.9 |
| Small Intestine Pool | 17.8 | 16.6 |
| Stomach Pool | 48.0 | 15.0 |
| Bone Marrow Pool | 6.3 | 7.2 |
| Fetal Heart | 12.7 | 8.0 |
| Heart Pool | 7.9 | 6.8 |
| Lymph Node Pool | 21.6 | 19.1 |
| Fetal Skeletal Muscle | 9.7 | 11.2 |
| Skeletal Muscle Pool | 5.0 | 3.9 |
| Spleen Pool | 14.8 | 16.3 |
| Thymus Pool | 16.3 | 16.2 |
| CMS cancer (glio/astro) U87-MG | 6.4 | 6.1 |
| CNS cancer (glio/astro) U-118-MG | 48.0 | 14.8 |
| CNS cancer (neuro; met) SK-N-AS | 50.0 | 28.3 |
| CNS cancer (astro) SF-539 | 22.7 | 16.5 |
| CNS cancer (astro) SNB-75 | 38.7 | 38.7 |
| CNS cancer (glio) SNB-19 | 2.7 | 2.4 |
| CNS cancer (glio) SF-295 | 27.9 | 16.8 |
| Brain (Amygdala) Pool | 7.1 | 4.1 |
| Brain (cerebellum) | 0.7 | 0.5 |
| Brain (fetal) | 75.3 | 52.5 |
| Brain (Hippocampus) Pool | 7.9 | 6.2 |
| Cerebral Cortex Pool | 4.7 | 4.2 |
| Brain (Substantia nigra) Pool | 4.4 | 3.2 |
| Brain (Thalamus) Pool | 9.0 | 5.4 |
| Brain (whole) | 44.4 | 4.1 |
| Spinal Cord Pool | 6.8 | 4.5 |
| Adrenal Gland | 2.3 | 2.1 |
| Pituitary gland Pool | 1.2 | 0.9 |
| Salivary Gland | 0.9 | 0.8 |
| Thyroid (female) | 7.8 | 4.7 |
| Pancreatic ca. CAPAN2 | 5.3 | 4.5 |
| Pancreas Pool | 20.2 | 14.0 |

Column A - Rel. Exp. (%) Ag1413, Run 213323517
Column B - Rel. Exp. (%) Ag3819, Run 218713598

[1568] TABLE BFG
Panel 2D

| Tissue Name | A | B |
|---|---|---|
| Normal Colon | 68.3 | 100.0 |
| CC Well to Mod Diff (ODO3866) | 6.3 | 5.0 |
| CC Margin (ODO3866) | 7.9 | 25.7 |
| CC Gr.2 rectosigmoid (ODO3868) | 4.6 | 12.6 |
| CC Margin (ODO3868) | 11.0 | 38.2 |
| CC Mod Diff (ODO3920) | 1.4 | 9.7 |
| CC Margin (ODO3920) | 12.1 | 54.3 |
| CC Gr.2 ascend colon (ODO3921) | 20.3 | 61.6 |
| CC Margin (ODO3921) | 10.9 | 12.9 |
| CC from Partial Hepatectomy (ODO4309) Mets | 4.9 | 3.3 |
| Liver Margin (ODO4309) | 10.4 | 9.0 |
| Colon mets to lung (OD04451-01) | 2.9 | 1.4 |
| Lung Margin (OD04451-02) | 10.2 | 11.5 |
| Normal Prostate 6546-1 | 2.7 | 5.1 |
| Prostate Cancer (OD04410) | 18.4 | 12.2 |
| Prostate Margin (OD04410) | 36.1 | 44.4 |
| Prostate Cancer (OD04720-01) | 17.3 | 28.9 |
| Prostate Margin (OD04720-02) | 28.5 | 39.5 |
| Normal Lung 061010 | 48.0 | 38.4 |
| Lung Met to Muscle (ODO4286) | 3.6 | 3.0 |
| Muscle Margin (ODO4286) | 5.9 | 3.5 |
| Lung Malignant Cancer (OD03126) | 11.7 | 9.7 |
| Lung Margin (OD03126) | 40.3 | 24.7 |
| Lung Cancer (OD04404) | 18.0 | 2.7 |
| Lung Margin (OD04404) | 32.8 | 9.0 |
| Lung Cancer (OD04565) | 2.9 | 2.7 |
| Lung Margin (OD04565) | 8.0 | 10.2 |
| Lung Cancer (OD04237-01) | 4.5 | 4.0 |
| Lung Margin (OD04237-02) | 31.4 | 17.9 |
| Ocular Mel Met to Liver (ODO4310) | 0.9 | 0.3 |
| Liver Margin (ODO4310) | 8.1 | 10.8 |
| Melanoma Mets to Lung (OD04321) | 2.8 | 1.5 |
| Lung Margin (OD04321) | 33.9 | 19.2 |
| Normal Kidney | 100.0 | 28.5 |
| Kidney Ca, Nuclear grade 2 (OD04338) | 14.1 | 9.8 |
| Kidney Margin (OD04338) | 24.0 | 7.1 |
| Kidney Ca Nuclear grade 1/2 (OD04339) | 14.3 | 6.7 |
| Kidney Margin (OD04339) | 22.8 | 4.5 |
| Kidney Ca, Clear cell type (OD04340) | 53.2 | 16.0 |
| Kidney Margin (OD04340) | 26.6 | 10.5 |
| Kidney Ca, Nuclear grade 3 (OD04348) | 8.9 | 3.6 |
| Kidney Margin (OD04348) | 14.1 | 10.0 |
| Kidney Cancer (OD04622-01) | 27.4 | 27.4 |
| Kidney Margin (OD04622-03) | 3.5 | 4.4 |
| Kidney Cancer (OD04450-01) | 8.4 | 2.6 |
| Kidney Margin (OD04450-03) | 23.8 | 7.5 |
| Kidney Cancer 8120607 | 1.3 | 0.4 |
| Kidney Margin 8120608 | 2.9 | 1.0 |
| Kidney Cancer 8120613 | 0.2 | 0.5 |
| Kidney Margin 8120614 | 6.3 | 2.0 |
| Kidney Cancer 9010320 | 23.0 | 2.4 |
| Kidney Margin 9010321 | 11.7 | 1.7 |
| Normal Uterus | 13.8 | 4.6 |
| Uterus Cancer 064011 | 17.8 | 9.3 |
| Normal Thyroid | 13.6 | 10.4 |
| Thyroid Cancer 064010 | 12.9 | 6.4 |
| Thyroid Cancer A302152 | 8.1 | 5.4 |
| Thyroid Margin A302153 | 29.1 | 11.0 |
| Normal Breast | 21.0 | 13.5 |
| Breast Cancer (OD04566) | 1.8 | 1.2 |
| Breast Cancer (OD04590-01) | 17.3 | 1.1 |
| Breast Cancer Mets (OD04590-03) | 23.3 | 3.7 |
| Breast Cancer Metastasis (OD04655-05) | 4.2 | 0.8 |
| Breast Cancer 064006 | 5.2 | 3.9 |
| Breast Cancer 1024 | 12.8 | 1.8 |
| Breast Cancer 9100266 | 3.9 | 1.7 |
| Breast Margin 9100265 | 10.2 | 5.0 |
| Breast Cancer A209073 | 12.2 | 10.1 |
| Breast Margin A209073 | 11.7 | 9.0 |
| Normal Liver | 7.1 | 4.4 |
| Liver Cancer 064003 | 10.3 | 8.0 |
| Liver Cancer 1025 | 5.0 | 5.1 |
| Liver Cancer 1026 | 3.0 | 1.5 |
| Liver Cancer 6004-T | 5.4 | 0.7 |
| Liver Tissue 6004-N | 1.4 | 0.3 |
| Liver Cancer 6005-T | 5.2 | 0.5 |
| Liver Tissue 6005-N | 3.3 | 3.5 |
| Normal Bladder | 7.1 | 7.7 |
| Bladder Cancer 1023 | 1.0 | 4.1 |
| Bladder Cancer A302173 | 3.0 | 3.6 |
| Bladder Cancer (OD04718-01) | 6.0 | 4.4 |
| Bladder Normal Adjacent (OD04718-03) | 27.5 | 25.2 |
| Normal Ovary | 6.7 | 4.8 |
| Ovarian Cancer 064008 | 27.0 | 21.9 |
| Ovarian Cancer (OD04768-07) | 0.7 | 0.2 |
| Ovary Margin (OD04768-08) | 12.4 | 6.7 |
| Normal Stomach | 27.4 | 12.3 |
| Gastric Cancer 9060358 | 6.9 | 2.1 |
| Stomach Margin 9060359 | 7.2 | 10.9 |
| Gastric Cancer 9060395 | 29.9 | 21.0 |
| Stomach Margin 9060394 | 13.7 | 16.3 |
| Gastric Cancer 9060397 | 23.2 | 18.3 |
| Stomach Margin 9060396 | 3.7 | 2.6 |
| Gastric Cancer 064005 | 18.3 | 26.8 |

Column A - Rel. Exp. (%) Ag1413, Run 169477489
Column B - Rel. Exp. (%) Ag740, Run 169590466

[1569] TABLE BFH
Panel 4.1D

| Tissue Name | A | B | C |
|---|---|---|---|
| Secondary Th1 act | 0.0 | 0.1 | 0.0 |
| Secondary Th2 act | 0.0 | 0.0 | 0.0 |
| Secondary Tr1 act | 0.0 | 0.1 | 0.0 |
| Secondary Th1 rest | 0.0 | 0.1 | 0.0 |
| Secondary Th2 rest | 0.2 | 0.0 | 0.0 |
| Secondary Tr1 rest | 0.0 | 0.1 | 0.0 |
| Primary Th1 act | 0.0 | 0.0 | 0.0 |
| Primary Th2 act | 0.0 | 0.0 | 0.0 |
| Primary Tr1 act | 0.0 | 0.0 | 0.0 |
| Primary Th1 rest | 0.0 | 0.0 | 0.0 |
| Primary Th2 rest | 0.0 | 0.0 | 0.0 |
| Primary Tr1 rest | 0.0 | 0.0 | 0.0 |
| CD45RA CD4 lymphocyte act | 3.4 | 4.1 | 3.0 |
| CD45RO CD4 lymphocyte act | 0.0 | 0.0 | 0.0 |
| CD8 lymphocyte act | 0.0 | 0.0 | 0.0 |
| Secondary CD8 lymphocyte rest | 0.0 | 0.0 | 0.0 |
| Secondary CD8 lymphocyte act | 0.0 | 0.0 | 0.0 |
| CD4 lymphocyte none | 0.2 | 0.1 | 0.0 |
| 2ry Th1/Th2/TM anti-CD95 CH11 | 0.1 | 0.0 | 0.0 |
| LAK cells rest | 0.3 | 0.0 | 0.0 |
| LAK cells IL-2 | 0.5 | 0.5 | 0.0 |
| LAK cells IL-2 + IL-12 | 0.0 | 0.1 | 0.0 |
| LAK cells IL-2 + IFN gamma | 0.1 | 0.3 | 0.0 |
| LAK cells IL-2 + IL-18 | 0.5 | 0.2 | 0.0 |
| LAK cells PMA/ionomycin | 0.1 | 0.1 | 0.0 |
| NK Cells IL-2 rest | 3.3 | 2.4 | 2.2 |
| Two Way MLR 3 day | 0.7 | 0.3 | 0.0 |
| Two Way MLR 5 day | 0.0 | 0.1 | 0.0 |
| Two Way MLR 7 day | 0.0 | 0.0 | 0.0 |
| PBMC rest | 0.2 | 0.2 | 0.0 |
| PBMC PWM | 0.1 | 0.0 | 0.0 |
| PBMC PHA-L | 0.1 | 0.0 | 0.0 |
| Ramos (B cell) none | 0.0 | 0.0 | 0.0 |
| Ramos (B cell) ionomycin | 0.0 | 0.0 | 0.0 |
| B lymphocytes PWM | 0.0 | 0.0 | 0.0 |
| B lymphocytes CD40L and IL-4 | 0.0 | 0.2 | 0.0 |
| EOL-1 dbcAMP | 0.0 | 0.0 | 0.0 |
| EOL-1 dbcAMP PMA/ionomycin | 0.0 | 0.0 | 0.0 |
| Dendritic cells none | 0.0 | 0.0 | 0.0 |
| Dendritic cells LPS | 0.0 | 0.0 | 0.0 |
| Dendritic cells anti-CD40 | 0.2 | 0.0 | 0.0 |
| Monocytes rest | 0.0 | 0.0 | 0.0 |
| Monocytes LPS | 0.0 | 0.0 | 0.0 |
| Macrophages rest | 0.0 | 0.0 | 0.0 |
| Macrophages LPS | 0.0 | 0.0 | 0.0 |
| HUVEC none | 16.2 | 17.9 | 19.5 |
| HUVEC starved | 37.1 | 38.7 | 49.0 |
| HUVEC IL-1beta | 21.3 | 24.5 | 21.2 |
| HUVEC IFN gamma | 100.0 | 100.0 | 100.0 |
| HUVEC TNF alpha + IFN gamma | 10.0 | 19.2 | 11.8 |
| HUVEC TNF alpha + IL4 | 4.0 | 5.2 | 3.1 |
| HUVEC IL-11 | 22.5 | 29.5 | 28.1 |
| Lung Microvascular EC none | 48.6 | 91.4 | 59.5 |
| Lung Microvascular EC | 12.5 | 18.8 | 8.6 |
| TNFalpha + IL-1beta | | | |
| Microvascular Dermal EC none | 62.9 | 58.6 | 62.4 |
| Microsvasular Dermal EC | 8.8 | 9.9 | 9.7 |
| TNFalpha + IL-1beta | | | |
| Bronchial epithelium TNFalpha + | 3.8 | 4.2 | 2.7 |
| IL1beta | | | |
| Small airway epithelium none | 1.8 | 2.1 | 1.2 |
| Small airway epithelium | 3.4 | 1.9 | 2.5 |
| TNFalpha + IL-1beta | | | |
| Coronery artery SMC rest | 4.2 | 3.4 | 4.4 |
| Coronery artery SMC TNFalpha + | 2.0 | 3.3 | 4.1 |
| IL-1beta | | | |
| Astrocytes rest | 7.0 | 6.3 | 6.0 |
| Astrocytes TNFalpha + IL-1beta | 3.7 | 4.2 | 6.5 |
| KU-812 (Basophil) rest | 1.1 | 1.5 | 2.0 |
| KU-812 (Basophil) PMA/ionomycin | 4.2 | 3.9 | 4.9 |
| CCD1106 (Keratinocytes) none | 1.0 | 3.0 | 1.7 |
| CCD1106 (Keratinocytes) | 1.6 | 1.3 | 0.0 |
| TNFalpha + IL-1beta | | | |
| Liver cirrhosis | 4.5 | 7.0 | 6.4 |
| NCI-H292 none | 0.3 | 0.9 | 1.1 |
| NCI-H292 IL-4 | 0.9 | 1.3 | 2.3 |
| NCI-H292 IL-9 | 2.0 | 2.9 | 2.8 |
| NCI-H292 IL-13 | 1.1 | 1.0 | 1.5 |
| NCI-H292 IFN gamma | 2.6 | 2.3 | 4.2 |
| HPAEC none | 27.0 | 41.5 | 52.9 |
| HPAEC TNF alpha + IL-1 beta | 6.0 | 7.0 | 4.0 |
| Lung fibroblast none | 10.2 | 14.4 | 6.7 |
| Lung fibroblast TNF alpha + IL-1 | 11.6 | 10.8 | 8.9 |
| beta | | | |
| Lung fibroblast IL-4 | 9.1 | 13.9 | 4.2 |
| Lung fibroblast IL-9 | 17.3 | 26.4 | 12.2 |
| Lung fibroblast IL-13 | 6.3 | 13.2 | 5.4 |
| Lung fibroblast IFN gamma | 11.2 | 9.4 | 6.6 |
| Dermal fibroblast CCD1070 rest | 11.1 | 15.9 | 23.2 |
| Dermal fibroblast CCD1070 TNF alpha | 4.6 | 6.3 | 6.3 |
| Dermal fibroblast CCD1070 IL-1 beta | 2.1 | 3.4 | 5.9 |
| Dermal fibroblast IFN gamma | 6.9 | 8.4 | 4.7 |
| Dermal fibroblast IL-4 | 15.5 | 17.2 | 21.8 |
| Dermal Fibroblasts rest | 17.6 | 14.0 | 12.8 |
| Neutrophils TNFa + LPS | 0.0 | 0.0 | 0.0 |
| Neutrophils rest | 0.0 | 0.0 | 0.0 |
| Colon | 6.0 | 5.2 | 5.5 |
| Lung | 17.1 | 15.1 | 25.3 |
| Thymus | 3.6 | 2.6 | 5.3 |
| Kidney | 11.4 | 12.1 | 14.9 |

Column A - Rel. Exp. (%) Ag1413, Run 169827815
Column B - Rel. Exp. (%) Ag3819, Run 170127253
Column C - Rel. Exp. (%) Ag740, Run 169827863

[1570] TABLE BFI
Panel 4D

| Tissue Name | A | B |
|---|---|---|
| Secondary Th1 act | 0.0 | 0.0 |
| Secondary Th2 act | 0.0 | 0.0 |
| Secondary Tr1 act | 0.0 | 0.2 |
| Secondary Th1 rest | 0.1 | 0.0 |
| Secondary Th2 rest | 0.0 | 0.0 |
| Secondary Tr1 rest | 0.0 | 0.2 |
| Primary Th1 act | 0.0 | 0.0 |
| Primary Th2 act | 0.0 | 0.0 |
| Primary Tr1 act | 0.0 | 0.0 |
| Primary Th1 rest | 0.0 | 0.0 |
| Primary Th2 rest | 0.0 | 0.0 |
| Primary Tr1 rest | 0.0 | 0.0 |
| CD45RA CD4 lymphocyte act | 3.8 | 4.6 |
| CD45RO CD4 lymphocyte act | 0.0 | 0.3 |
| CD8 lymphocyte act | 0.1 | 0.0 |
| Secondary CD8 lymphocyte rest | 0.0 | 0.0 |
| Secondary CD8 lymphocyte act | 0.0 | 0.0 |
| CD4 lymphocyte none | 0.0 | 0.0 |
| 2ry Th1/Th2/Tr1_anti-CD95 CH11 | 0.1 | 0.0 |
| LAK cells rest | 0.3 | 0.1 |
| LAK cells IL-2 | 0.5 | 0.4 |
| LAK cells IL-2 + IL-12 | 0.3 | 0.2 |
| LAK cells IL-2 + IFN gamma | 0.4 | 0.4 |
| LAK cells IL-2 + IL-18 | 0.5 | 0.0 |
| LAK cells PMA/ionomycin | 0.0 | 0.4 |
| NK Cells IL-2 rest | 2.2 | 1.8 |
| Two Way MLR 3 day | 0.4 | 0.5 |
| Two Way MLR 5 day | 0.1 | 0.1 |
| Two Way MLR 7 day | 0.1 | 0.0 |
| PBMC rest | 0.4 | 0.6 |
| PBMC PWM | 0.4 | 0.0 |
| PBMC PHA-L | 0.1 | 0.1 |
| Ramos (B cell) none | 0.0 | 0.0 |
| Ramos (B cell) ionomycin | 0.0 | 0.0 |
| B lymphocytes PWM | 0.0 | 0.0 |
| B lymphocytes CD40L and IL-4 | 0.1 | 0.0 |
| EOL-1 dbcAMP | 0.0 | 0.0 |
| EOL-1 dbcAMP PMA/ionomycin | 0.0 | 0.0 |
| Dendritic cells none | 0.0 | 0.0 |
| Dendritic cells LPS | 0.0 | 0.0 |
| Dendritic cells anti-CD40 | 0.0 | 0.0 |
| Monocytes rest | 0.0 | 0.0 |
| Monocytes LPS | 0.0 | 0.0 |
| Macrophages rest | 0.0 | 0.1 |
| Macrophages LPS | 0.0 | 0.0 |
| HUVEC none | 22.8 | 30.4 |
| HUVEC starved | 97.9 | 88.9 |
| HUVEC IL-1 beta | 17.8 | 8.5 |
| HUVEC IFN gamma | 100.0 | 100.0 |
| HUVEC TNF alpha + IFN gamma | 18.2 | 16.2 |
| HUVEC TNF alpha + IL4 | 5.4 | 4.2 |
| HUVEC IL-11 | 31.4 | 35.1 |
| Lung Microvascular EC none | 50.3 | 50.7 |
| Lung Microvascular EC TNFalpha + IL- | 9.0 | 6.8 |
| 1beta | | |
| Microvascular Dermal EC none | 71.7 | 83.5 |
| Microsvasular Dermal EC TNFalpha + IL- | 16.2 | 14.1 |
| 1beta | | |
| Bronchial epithelium TNFalpha + IL1beta | 6.7 | 5.6 |
| Small airway epithelium none | 2.0 | 2.1 |
| Small airway epithelium TNFalpha + IL- | 12.9 | 8.8 |
| 1beta | | |
| Coronery artery SMC rest | 5.4 | 4.8 |
| Coronery artery SMC TNFalpha + IL- | 2.2 | 2.6 |
| 1beta | | |
| Astrocytes rest | 5.1 | 8.9 |
| Astrocytes TNFalpha + IL-1beta | 5.8 | 5.8 |
| KU-812 (Basophil) rest | 1.2 | 0.7 |
| KU-812 (Basophil) PMA/ionomycin | 6.7 | 4.7 |
| CCD1106 (Keratinocytes) none | 2.0 | 4.4 |
| CCD1106 (Keratinocytes) TNFalpha + IL- | 1.1 | 0.7 |
| 1beta | | |
| Liver cirrhosis | 4.8 | 4.9 |
| Lupus kidney | 1.9 | 4.7 |
| NCI-H292 none | 2.1 | 1.5 |
| NCI-H292 IL-4 | 3.1 | 2.3 |
| NCI-H292 IL-9 | 3.7 | 3.1 |
| NCI-H292 IL-13 | 1.5 | 1.7 |
| NCI-H292 IFN gamma | 3.6 | 1.6 |
| HPAEC none | 29.3 | 40.1 |
| HPAEC TNF alpha + IL-1 beta | 4.5 | 5.3 |
| Lung fibroblast none | 12.7 | 19.1 |
| Lung fibroblast TNF alpha + IL-1 beta | 10.0 | 15.3 |
| Lung fibroblast IL-4 | 16.4 | 20.2 |
| Lung fibroblast IL-9 | 19.1 | 21.5 |
| Lung fibroblast IL-13 | 7.5 | 14.5 |
| Lung fibroblast IFN gamma | 17.2 | 19.6 |
| Dermal fibroblast CCD1070 rest | 30.6 | 27.0 |
| Dermal fibroblast CCD1070 TNF alpha | 8.4 | 10.1 |
| Dermal fibroblast CCD1070 IL-1 beta | 6.5 | 8.5 |
| Dermal fibroblast IFN gamma | 7.0 | 11.0 |
| Dermal fibroblast IL-4 | 17.6 | 15.7 |
| IBD Colitis 2 | 0.5 | 2.2 |
| IBD Crohn's | 1.8 | 3.0 |
| Colon | 14.6 | 15.6 |
| Lung | 17.9 | 21.0 |
| Thymus | 22.1 | 22.2 |
| Kidney | 6.7 | 5.2 |

Column A - Rel. Exp. (%) Ag1515, Run 163478545
Column B - Rel. Exp. (%) Ag3085, Run 164682194

[1571] General_screening_panel_v1.4 Summary: Ag1413/Ag3819 Highest expression of this gene was seen in a lung cancer cell line NCI-H23 sample (CT=26-28). High to moderate levels of expression of this gene were also seen in a cluster of CNS cancer, renal cancer, lung cancer, breast cancer, ovarian cancer and melanoma cell lines. Therefore, therapeutic modulation of the activity of this gene or its protein product, through the use of small molecule drugs, protein therapeutics or antibodies, is beneficial in the treatment of lung cancer or ovarian cancer. This gene encodes a cadherin-related tumor suppressor precursor. E-cadherin, a related protein is used as a prognostic marker for breast cancer detection (Barshack I, J Clin Pathol 54(9):684-8). Expression of this gene is useful as a diagnostic marker in the above mentioned cancers.

[1572] Among tissues with metabolic or endocrine function, this gene was expressed at high to moderate levels in pancreas, adipose, adrenal gland, thyroid, pituitary gland, skeletal muscle, heart, liver and the gastrointestinal tract. Therapeutic modulation of the activity of this gene is useful in the treatment of endocrine/metabolically related diseases, such as obesity and diabetes. In addition, E cadherin, a related protein is shown to be reduced in small intestinal mucosa of coeliac sprue disease (Barshak et. al), a sample not used in this panel. Therapeutic modulation of the activity or function of this gene or gene product is useful in the treatment of coelic sprue disease.

[1573] In addition, this gene was expressed at low to moderate levels in all regions of the central nervous system examined, including amygdala, hippocampus, substantia nigra, thalamus, cerebellum, cerebral cortex, and spinal cord. This gene product is a transmembrane glycoproteins belonging to the cadherin superfamily of molecules, which are involved in many biological processes such as cell adhesion, cytoskeletal organization and morphogenesis. Cadherins can act as axon guidance and cell adhesion proteins, specifically during development and in the response to injury (Ranscht B. Int. J. Dev. Neurosci. 18: 643-651.). Therefore, manipulation of levels of this protein are of use in inducing a compensatory synaptogenic response to neuronal death in Alzheimer's disease, Parkinson's disease, Huntington's disease, spinocerebellar ataxia, progressive supranuclear palsy, ALS, head trauma, stroke, or any other disease/condition associated with neuronal loss.

[1574] Panel 2D Summary: Ag1413/Ag740 Highest expression of this gene wass detected in samples from normal kidney and colon (CTs=29-30), with significant expression of this gene in both normal and cancer tissues. Expression of this gene was higher in control margin samples of colon (ODO3920), liver (OD04310), and ovary (OD04768-08) as compared to their corresponding cancer tissue. Please see Panel 1.4 for a discussion of the potential utility of this gene.

[1575] Panel 4.1D Summary: Ag1413/Ag3819/Ag740 Highest expression of this gene was detected in IFN gamma treated HUVEC cells (CTs=25-27). High to moderate expression of this gene was seen in treated and untreated HUVEC, lung microvascular EC, microvascular dermal EC, Bronchial epithelium, small airway epithelium, NCI-H292, HPAEC, lung fibroblasts, and dermal fibroblasts. The expression of this gene in cells derived from or within the lung shows that this gene is involved in normal conditions as well as pathological and inflammatory lung disorders that include chronic obstructive pulmonary disease, asthma, allergy and emphysema.

[1576] In addition, high expression of thisgene was also detected in normal tissues represented by colon, lung, thymus and kidney. Therapeutic modulation of the activity of the protein encoded by this gene is useful in the treatment of inflammatory disease affecting these tissues such as inflammatory bowel disease, chronic obstructive pulmonary disease, asthma, allergy, emphysema, lupus and glomerulonephritis.

[1577] Panel 4D Summary: Ag1515/Ag3085 Highest expression of this gene was detected in IFN gamma treated HUVEC cells (CT=25-27). In addition, high to moderate expression of this gene was seen in treated and untreated HVEC, lung microvascular EC, microvascular dermal EC, Bronchial epithelium, small airway epithelium, NCI-H292, HPAEC, lung fibroblasts, and dermal fibroblasts. The expression of this gene in cells derived from or within the lung shows that this gene is involved in normal conditions as well as pathological and inflammatory lung disorders that include chronic obstructive pulmonary disease, asthma, allergy and emphysema.

[1578] Expression of this gene was higher in untreated HPAEC (CTs=27-28) as compared to TNF alpha+IL-1 beta treated cells (CTs=30-31). Thus, expression of this gene is useful as a marker to distinguish the treated from untreated HIPAEC samples.

[1579] In addition, high levels of expression of this gene were also detected in normal tissues represented by colon, lung, thymus and kidney. Expression of this gene is lower in colon samples from patients with IBD colitis and Crohn's disease relative CTs=31-33) to normal colon (CTs=28-29). Therefore, therapeutic modulation of the activity or function of this gene or the protein encoded by this gene is useful in the treatment of inflammatory bowel disease.

[1580] BG. CG93387-05: Fibropellin I Precursor

[1581] Expression of gene CG93387-05 was assessed using the primer-probe sets Agl 143, Ag1921, and Ag3082, described in Tables BGA, BGB, and BGC. Results of the RTQ-PCR runs are shown in Tables BGD, BGE, and BGF.

TABLE BGA
Probe Name Ag1143

| | | | | |
|---|---|---|---|---|
| | | | | SEQ |
| | | | Start | ID |
| Primers | Sequences | Length | Position | No |

| | | | | |
|---|---|---|---|---|
| Forward | 5′-gagatggatgtggacgactg-3′ | 20 | 964 | 1573 |
| Probe | TET-5′-cctgaatggaggctcttgtgttgacc-3′- | 26 | 999 | 1574 |
| | TAMRA | | | |
| Reverse | 5′-acaagcaggtgtaattcccc-3′ | 20 | 1029 | 1575 |

[1582] TABLE BGB
Probe Name Ag1921

| | | | | SEQ |
|---|---|---|---|---|
| | | | Start | ID |
| Primers | Sequences | Length | Position | No |
| Forward | 5′-acacattccagactgtgctcat-3′ | 22 | 317 | 1576 |
| Probe | TET-5′-acggcaagctctccttcaccatctt-3′- | 25 | 344 | 1577 |
| | TAMRA | | | |
| Reverse | 5′-tccacacgatggactcatagtt-3′ | 22 | 370 | 1578 |

[1583] TABLE BGC
Probe Name Ag3082

| | | | | SEQ |
|---|---|---|---|---|
| | | | Start | ID |
| Primers | Sequences | Length | Position | No |
| Forward | 5′-cagacgcagaggtagctcc-3′ | 19 | 1385 | 1579 |
| Probe | TET-5′-catctgggcactgtgtgttcatgttg-3′- | 26 | 1335 | 1580 |
| | TAMRA | | | |
| Reverse | 5′-atttgaaatcacagccatgc-3′ | 20 | 1311 | 1581 |

[1584] TABLE BGD
Panel 1.3D

| Tissue Name | A |
|---|---|
| Liver adenocarcinoma | 31.2 |
| Pancreas | 2.5 |
| Pancreatic ca. CAPAN 2 | 0.2 |
| Adrenal gland | 12.3 |
| Thyroid | 19.5 |
| Salivary gland | 2.3 |
| Pituitary gland | 10.2 |
| Brain (fetal) | 2.1 |
| Brain (whole) | 10.8 |
| Brain (amygdala) | 12.3 |
| Brain (cerebellum) | 21.0 |
| Brain (hippocampus) | 21.8 |
| Brain (substantia nigra) | 3.9 |
| Brain (thalamus) | 8.7 |
| Cerebral Cortex | 8.7 |
| Spinal cord | 12.8 |
| glio/astro U87-MG | 3.0 |
| glio/astro U-118-MG | 100.0 |
| astrocytoma SW1783 | 6.9 |
| neuro*; met SK-N-AS | 3.1 |
| astrocytoma SF-539 | 12.6 |
| astrocytoma SNB-75 | 25.9 |
| glioma SNB-19 | 8.9 |
| glioma U251 | 4.9 |
| glioma SF-295 | 33.7 |
| Heart (Fetal) | 1.6 |
| Heart | 5.8 |
| Skeletal muscle (Fetal) | 5.8 |
| Skeletal muscle | 14.3 |
| Bone marrow | 1.0 |
| Thymus | 5.1 |
| Spleen | 22.5 |
| Lymph node | 28.5 |
| Colorectal | 3.6 |
| Stomach | 11.8 |
| Small intestine | 14.5 |
| Colon ca. SW480 | 0.8 |
| Colon ca.* SW620 (SW480 met) | 0.3 |
| Colon ca. HT29 | 0.0 |
| Colon ca. HCT-116 | 1.1 |
| Colon ca. CaCo-2 | 0.0 |
| CC Well to Mod Diff (ODO3866) | 3.1 |
| Colon ca. HCC-2998 | 0.4 |
| Gastric ca. (liver met) NCI-N87 | 3.5 |
| Bladder | 8.8 |
| Trachea | 7.5 |
| Kidney | 3.5 |
| Kidney (fetal) | 3.4 |
| Renal ca. 786-0 | 0.2 |
| Renal ca. A498 | 12.4 |
| Renal ca. RXF 393 | 0.0 |
| Renal ca. ACHN | 0.0 |
| Renal ca. UO-31 | 0.2 |
| Renal ca. TK-10 | 0.1 |
| Liver | 2.4 |
| Liver (fetal) | 1.6 |
| Liver ca. (hepatoblast) HepG2 | 0.0 |
| Lung | 9.0 |
| Lung (fetal) | 6.4 |
| Lung ca. (small cell) LX-1 | 2.9 |
| Lung ca. (small cell) NCI-H69 | 0.3 |
| Lung ca. (s. cell var.) SHP-77 | 4.0 |
| Lung ca. (large cell)NCI-H460 | 4.4 |
| Lung ca. (non-sm. cell) A549 | 1.3 |
| Lung ca. (non-s. cell) NCI-H23 | 2.9 |
| Lung ca. (non-s. cell) HOP-62 | 2.7 |
| Lung ca. (non-s. cl) NCI-H522 | 0.0 |
| Lung ca. (squam.) SW 900 | 6.0 |
| Lung ca. (squam.) NCI-H596 | 0.8 |
| Mammary gland | 12.5 |
| Breast ca.* (pl. ef) MCF-7 | 0.3 |
| Breast ca.* (pl. ef) MDA-MB-231 | 1.7 |
| Breast ca.* (pl. ef) T47D | 1.0 |
| Breast ca. BT-549 | 15.1 |
| Breast ca. MDA-N | 0.5 |
| Ovary | 13.4 |
| Ovarian ca. OVCAR-3 | 1.1 |
| Ovarian ca. OVCAR-4 | 0.0 |
| Ovarian ca. OVCAR-5 | 12.2 |
| Ovarian ca. OVCAR-8 | 0.5 |
| Ovarian ca. IGROV-1 | 0.0 |
| Ovarian ca. (ascites) SK-OV-3 | 7.2 |
| Uterus | 32.8 |
| Placenta | 1.1 |
| Prostate | 12.4 |
| Prostate ca.* (bone met) PC-3 | 0.0 |
| Testis | 8.1 |
| Melanoma Hs688(A).T | 2.6 |
| Melanoma* (met) Hs688(B).T | 0.9 |
| Melanoma UACC-62 | 4.8 |
| Melanoma M14 | 17.8 |
| Melanoma LOX IMVI | 0.2 |
| Melanoma* (met) SK-MEL-5 | 0.2 |
| Adipose | 17.2 |

Column A - Rel. Exp. (%) Ag3082, Run 165673172

[1585] TABLE BGE
Panel 2.2

| Tissue Name | A |
|---|---|
| Normal Colon | 20.3 |
| Colon cancer (OD06064) | 8.5 |
| Colon Margin (OD06064) | 6.4 |
| Colon cancer (OD06159) | 1.4 |
| Colon Margin (OD06159) | 9.6 |
| Colon cancer (OD06297-04) | 1.1 |
| Colon Margin (OD06297-05) | 5.7 |
| CC Gr.2 ascend colon (ODO3921) | 5.9 |
| CC Margin (ODO3921) | 2.9 |
| Colon cancer metastasis (OD06104) | 1.3 |
| Lung Margin (OD06104) | 0.8 |
| Colon mets to lung (OD04451-01) | 17.3 |
| Lung Margin (OD04451-02) | 17.2 |
| Normal Prostate | 20.3 |
| Prostate Cancer (OD04410) | 13.1 |
| Prostate Margin (OD04410) | 10.1 |
| Normal Ovary | 52.5 |
| Ovarian cancer (OD06283-03) | 8.6 |
| Ovarian Margin (OD06283-07) | 13.1 |
| Ovarian Cancer | 23.2 |
| Ovarian cancer (OD06145) | 6.4 |
| Ovarian Margin (OD06145) | 52.5 |
| Ovarian cancer (OD06455-03) | 13.6 |
| Ovarian Margin (OD06455-07) | 33.2 |
| Normal Lung | 19.6 |
| Invasive poor diff. lung adeno (ODO4945-01 | 7.7 |
| Lung Margin (ODO4945-03) | 48.3 |
| Lung Malignant Cancer (OD03126) | 11.0 |
| Lung Margin (OD03126) | 6.5 |
| Lung Cancer (OD05014A) | 11.8 |
| Lung Margin (OD05014B) | 49.0 |
| Lung cancer (OD06081) | 17.6 |
| Lung Margin (OD06081) | 37.9 |
| Lung Cancer (OD04237-01) | 1.2 |
| Lung Margin (OD04237-02) | 23.7 |
| Ocular Mel Met to Liver (ODO4310) | 44.1 |
| Liver Margin (ODO4310) | 14.9 |
| Melanoma Metastasis | 0.0 |
| Lung Margin (OD04321) | 16.3 |
| Normal Kidney | 9.8 |
| Kidney Ca, Nuclear grade 2 (OD04338) | 26.6 |
| Kidney Margin (OD04338) | 1.6 |
| Kidney Ca Nuclear grade 1/2 (OD04339) | 20.2 |
| Kidney Margin (OD04339) | 10.2 |
| Kidney Ca, Clear cell type (OD04340) | 20.9 |
| Kidney Margin (OD04340) | 13.3 |
| Kidney Ca, Nuclear grade 3 (OD04348) | 4.4 |
| Kidney Margin (OD04348) | 54.0 |
| Kidney malignant cancer (OD06204B) | 0.6 |
| Kidney normal adjacent tissue (OD06204E) | 8.5 |
| Kidney Cancer (OD04450-01) | 0.5 |
| Kidney Margin (OD04450-03) | 16.4 |
| Kidney Cancer 8120613 | 0.0 |
| Kidney Margin 8120614 | 11.0 |
| Kidney Cancer 9010320 | 1.5 |
| Kidney Margin 9010321 | 7.1 |
| Kidney Cancer 8120607 | 6.3 |
| Kidney Margin 8120608 | 5.9 |
| Normal Uterus | 52.1 |
| Uterine Cancer 064011 | 37.6 |
| Normal Thyroid | 10.2 |
| Thyroid Cancer | 4.0 |
| Thyroid Cancer A302152 | 21.0 |
| Thyroid Margin A302153 | 29.5 |
| Normal Breast | 52.1 |
| Breast Cancer | 2.7 |
| Breast Cancer | 43.5 |
| Breast Cancer (OD04590-01) | 59.5 |
| Breast Cancer Mets (OD04590-03) | 35.4 |
| Breast Cancer Metastasis | 44.1 |
| Breast Cancer | 17.9 |
| Breast Cancer 9100266 | 16.6 |
| Breast Margin 9100265 | 26.1 |
| Breast Cancer A209073 | 9.8 |
| Breast Margin A209073 | 28.3 |
| Breast cancer (OD06083) | 63.7 |
| Breast cancer node metastasis (OD06083) | 100.0 |
| Normal Liver | 39.8 |
| Liver Cancer 1026 | 17.2 |
| Liver Cancer 1025 | 40.3 |
| Liver Cancer 6004-T | 33.7 |
| Liver Tissue 6004-N | 2.2 |
| Liver Cancer 6005-T | 42.3 |
| Liver Tissue 6005-N | 44.8 |
| Liver Cancer | 4.2 |
| Normal Bladder | 17.6 |
| Bladder Cancer | 8.4 |
| Bladder Cancer | 3.2 |
| Normal Stomach | 25.2 |
| Gastric Cancer 9060397 | 0.7 |
| Stomach Margin 9060396 | 4.7 |
| Gastric Cancer 9060395 | 8.1 |
| Stomach Margin 9060394 | 12.2 |
| Gastric Cancer 064005 | 7.2 |

Column A - Rel. Exp. (%) Ag3082, Run 174284798

[1586] TABLE BGF
Panel 4D

| Tissue Name | A | B | C |
|---|---|---|---|
| Secondary Th1 act | 1.3 | 0.0 | 1.4 |
| Secondary Th2 act | 6.3 | 0.5 | 5.8 |
| Secondary Tr1 act | 5.5 | 0.7 | 3.8 |
| Secondary Th1 rest | 6.3 | 1.9 | 12.8 |
| Secondary Th2 rest | 17.0 | 2.0 | 19.2 |
| Secondary Tr1 rest | 12.9 | 0.8 | 18.8 |
| Primary Th1 act | 0.9 | 0.0 | 0.8 |
| Primary Th2 act | 0.7 | 0.0 | 2.3 |
| Primary Tr1 act | 1.5 | 0.1 | 2.3 |
| Primary Th1 rest | 21.0 | 5.8 | 50.7 |
| Primary Th2 rest | 32.5 | 7.5 | 0.0 |
| Primary Tr1 rest | 2.3 | 0.3 | 6.3 |
| CD45RA CD4 lymphocyte act | 2.5 | 1.4 | 2.3 |
| CD45RO CD4 lymphocyte act | 2.7 | 1.1 | 1.8 |
| CD8 lymphocyte act | 2.1 | 0.6 | 2.9 |
| Secondary CD8 | 2.9 | 0.5 | 4.2 |
| lymphocyte rest | | | |
| Secondary CD8 | 5.4 | 0.0 | 3.1 |
| lymphocyte act | | | |
| CD4 lymphocyte none | 11.7 | 3.7 | 10.8 |
| 2ry Th1/Th2/Tr1 anti- | 27.5 | 1.3 | 27.0 |
| CD95 CH11 | | | |
| LAK cells rest | 4.5 | 1.1 | 4.4 |
| LAK cells IL-2 | 6.8 | 3.7 | 11.3 |
| LAK cells IL-2 + IL-12 | 1.8 | 0.3 | 2.8 |
| LAK cells IL-2 + IFN | 3.2 | 1.1 | 6.4 |
| gamma | | | |
| LAK cells IL-2 + IL-18 | 1.7 | 0.5 | 7.6 |
| LAK cells PMA/ionomycin | 1.6 | 0.1 | 1.1 |
| NK Cells IL-2 rest | 2.2 | 0.8 | 3.2 |
| Two Way MLR 3 day | 5.6 | 2.3 | 6.0 |
| Two Way MLR 5 day | 1.1 | 0.4 | 1.4 |
| Two Way MLR 7 day | 0.9 | 0.5 | 1.4 |
| PBMC rest | 7.1 | 1.7 | 4.6 |
| PBMC PWM | 0.9 | 1.0 | 3.8 |
| PBMC PHA-L | 3.0 | 0.4 | 2.6 |
| Ramos (B cell) none | 0.0 | 0.0 | 0.0 |
| Ramos (B cell) ionomycin | 0.0 | 0.0 | 0.2 |
| B lymphocytes PWM | 5.3 | 2.0 | 22.8 |
| B lymphocytes CD40L | 18.0 | 3.6 | 57.8 |
| and IL-4 | | | |
| EOL-1 dbcAMP | 0.0 | 0.1 | 0.2 |
| EOL-1 dbcAMP PMA/ionomycin | 0.0 | 0.0 | 0.0 |
| Dendritic cells none | 3.3 | 4.2 | 5.1 |
| Dendritic cells LPS | 0.8 | 1.5 | 1.3 |
| Dendritic cells anti-CD40 | 4.3 | 4.6 | 5.4 |
| Monocytes rest | 2.4 | 8.6 | 6.3 |
| Monocytes LPS | 0.0 | 0.2 | 1.0 |
| Macrophages rest | 1.8 | 2.9 | 1.7 |
| Macrophages LPS | 0.7 | 0.5 | 0.5 |
| HUVEC none | 6.2 | 12.1 | 10.4 |
| HUVEC starved | 4.4 | 11.9 | 12.9 |
| HUVEC IL-1beta | 0.9 | 1.6 | 3.3 |
| HUVEC IFN gamma | 23.0 | 13.6 | 13.6 |
| HUVEC TNF alpha + IFN gamma | 2.1 | 3.5 | 7.5 |
| HUVEC TNF alpha + IL4 | 6.2 | 4.2 | 3.2 |
| HUVEC IL-11 | 12.1 | 8.7 | 8.1 |
| Lung Microvascular EC none | 27.7 | 24.3 | 21.5 |
| Lung Microvascular EC TNFalpha + | 8.7 | 14.5 | 16.6 |
| IL-1beta | | | |
| Microvascular Dermal EC none | 19.5 | 19.3 | 20.3 |
| Microsvasular Dermal EC | 10.1 | 11.3 | 10.3 |
| TNFalpha + IL-1beta | | | |
| Bronchial epithelium TNFalpha + | 0.3 | 0.4 | 1.0 |
| IL1beta | | | |
| Small airway epithelium none | 2.0 | 4.9 | 2.6 |
| Small airway epithelium TNFalpha + | 0.7 | 0.2 | 2.1 |
| IL-1beta | | | |
| Coronery artery SMC rest | 0.7 | 3.6 | 2.9 |
| Coronery artery SMC TNFalpha + | 6.7 | 1.4 | 3.7 |
| IL-1beta | | | |
| Astrocytes rest | 3.7 | 3.0 | 3.7 |
| Astrocytes TNFalpha + IL-1beta | 3.7 | 3.4 | 4.0 |
| KU-812 (Basophil) rest | 0.0 | 0.0 | 0.0 |
| KU-812 (Basophil) PMA/ionomycin | 0.0 | 0.1 | 0.1 |
| CCD1106 (Keratinocytes) none | 0.0 | 0.0 | 0.1 |
| 93580 CCD1106 (Keratinocytes) | 0.0 | 0.0 | 0.2 |
| TNFa and IFNg | | | |
| Liver cirrhosis | 3.5 | 4.5 | 5.9 |
| Lupus kidney | 15.0 | 6.1 | 10.2 |
| NCI-H292 none | 0.4 | 1.6 | 3.5 |
| NCI-H292 IL-4 | 0.6 | 1.3 | 3.4 |
| NCI-H292 IL-9 | 1.0 | 2.2 | 3.0 |
| NCI-H292 IL-13 | 3.5 | 0.4 | 0.8 |
| NCI-H292 IFN gamma | 2.3 | 1.0 | 1.3 |
| HPAEC none | 58.6 | 32.5 | 32.1 |
| HPAEC TNF alpha + IL-1 beta | 18.6 | 16.8 | 22.4 |
| Lung fibroblast none | 78.5 | 79.6 | 90.1 |
| Lung fibroblast TNF alpha + IL-1 | 20.0 | 18.0 | 24.0 |
| beta | | | |
| Lung fibroblast IL-4 | 48.3 | 100.0 | 100.0 |
| Lung fibroblast IL-9 | 35.4 | 56.6 | 49.7 |
| Lung fibroblast IL-13 | 100.0 | 64.2 | 77.4 |
| Lung fibroblast IFN gamma | 56.6 | 96.6 | 82.4 |
| Dermal fibroblast CCD1070 rest | 5.7 | 9.3 | 17.2 |
| Dermal fibroblast CCD1070 TNF | 11.3 | 6.0 | 25.5 |
| alpha | | | |
| Dermal fibroblast CCD1070 IL-1 | 20.3 | 4.0 | 6.5 |
| beta | | | |
| Dermal fibroblast IFN gamma | 30.8 | 9.2 | 18.7 |
| Dermal fibroblast IL-4 | 35.1 | 17.8 | 26.4 |
| IBD Colitis 2 | 4.1 | 2.8 | 5.5 |
| IBD Crohn's | 1.7 | 1.4 | 2.2 |
| Colon | 6.2 | 7.4 | 8.5 |
| Lung | 13.9 | 19.1 | 20.3 |
| Thymus | 25.2 | 16.4 | 14.7 |
| Kidney | 13.8 | 8.6 | 31.0 |

Column A - Rel. Exp. (%) Ag1143, Run 139943479
Column B - Rel. Exp. (%) Ag1921, Run 164629443
Column C - Rel. Exp. (%) Ag3082, Run 164681898

[1587] Panel 1.3D Summary: Ag3082 Highest expression of this gene was seen in a brain cancer cell line (CT=27.3). Significant levels of expression were also seen in a cluster of samples derived from ovarian, breast, melanoma and brain cancer cell lines. Thus, expression of this gene is useful as a marker to differentiate between the brain cancer samples and other samples on this panel and as a marker to detect the presence of these cancers. This gene encodes a protein that is homologous to an epidermal growth factor related protein (fibropellin like). Fibropellins are a family of extracellular sea urchin matrix proteins that have been implicated in cell adhestion. Therefore, therapeutic modulation of the expression or function of this gene is useful in the treatment of ovarian, breast, melanoma and brain cancers.

[1588] Among tissues with metabolic function, this gene was expressed at moderate to low levels in pituitary, adipose, adrenal gland, pancreas, thyroid, and adult and fetal skeletal muscle, heart, and liver. This widespread expression among these tissues shows that this gene product plays a role in normal neuroendocrine and metabolic and that disregulated expression of this gene contributes to neuroendocrine disorders or metabolic diseases, such as obesity and diabetes.

[1589] Moderate to low levels of expression were also seen in all regions of the CNS examined, including pituitary, amygdala, thalamus, substantia nigra, cerebral cortex, and hippocampus. Therefore, therapeutic modulation of the expression or function of this gene is useful in the treatment of neurologic disorders, such as Alzheimer's disease, Parkinson's disease, schizophrenia, multiple sclerosis, stroke and epilepsy.

[1590] Panel 2.2 Summary: Ag3082 Highest expression of this gene was seen in a breast cancer metastasis (CT=28.3). Significant levels of expression were also seen in a cluster of breast cancer samples. Conversely, expression was higher in normal ovary and lung tissue when compared to expression in the normal adjacent tissue. Thus, therapeutic modulation of the expression or function of this gene is effective in the treatment of breast, ovarian and lung cancers.

[1591] Panel 4D Summary: Agl 143/Ag1921/Ag3082 Highest expression of this gene was detected in treated lung fibroblasts (CTs=27-29). Moderate levels of expression were also seen in treated dermal fibroblasts, and lung and dermal microvasculature, and HUVECs. Thus, expression of this gene is useful as a marker of fibroblasts or vasculature. The protein encoded by the transcript plays an important role in the normal homeostasis of these tissues. Therefore, therapeutics designed with this gene or gene product are important for maintaining or restoring normal function to these organs during inflammation associated with asthma, psoriasis, and emphysema.

[1592] BH. CG93871-01 and CG93871-05: Weakly Similar to Fibulin-1

[1593] Expression of gene CG93871-05 and variant CG93871-01 was assessed using the primer-probe sets Ag1294b, Ag746, and Ag4726, described in Tables BHA, BHB, and BHC. Results of the RTQ-PCR runs are shown in Tables BHD, BHE, BHF, BHG, and BHH. Please note that the probe and primer set Ag4726 is specific to the CG93871-05 variant only.

TABLE BHA
Probe Name Ag1294b

| | | | | SEQ |
|---|---|---|---|---|
| | | | Start | ID |
| Primers | Sequences | Length | Position | No |
| Forward | 5′-cattggcagctacaagtgttc-3′ | 21 | 532 | 1582 |
| Probe | TET-5′-ctgtcgaactggcttccaccttcat-3′- | 25 | 553 | 1583 |
| | TAMRA | | | |
| Reverse | 5′-cctccgacactcgtttacatc-3′ | 21 | 599 | 1584 |

[1594] TABLE BHB
Probe Name Ag746

| | | | | SEQ |
|---|---|---|---|---|
| | | | Start | ID |
| Primers | Sequences | Length | Position | No |
| Forward | 5′-gcattggcagctacaagtgt-3′ | 20 | 531 | 1585 |
| Probe | TET-5′-ctgtcgaactggcttccaccttcat-3′- | 25 | 553 | 1586 |
| | TAMRA | | | |
| Reverse | 5′-cctccgacactcgtttacatc-3′ | 21 | 599 | 1587 |

[1595] TABLE BHC
Probe Name Ag4726

| | | | | SEQ |
|---|---|---|---|---|
| | | | Start | ID |
| Primers | Sequences | Length | Position | No |
| Forward | 5′-gtgtctgtctggctggaaac-3′ | 20 | 1338 | 1588 |
| Probe | TET-5′-tgcatctctcctgagtgtccttctgg-3′- | 26 | 1364 | 1589 |
| | TAMRA | | | |
| Reverse | 5′-acaagtacagcaatccgtctgt-3′ | 22 | 1408 | 1590 |

[1596] TABLE BHD
AI_comprehensive panel_v1.0

| Tissue Name | A |
|---|---|
| 110967 COPD-F | 6.6 |
| 110980 COPD-F | 16.6 |
| 110968 COPD-M | 3.9 |
| 110977 COPD-M | 31.6 |
| 110989 Emphysema-F | 45.1 |
| 110992 Emphysema-F | 7.2 |
| 110993 Emphysema-F | 5.8 |
| 110994 Emphysema-F | 3.3 |
| 110995 Emphysema-F | 2.0 |
| 110996 Emphysema-F | 3.1 |
| 110997 Asthma-M | 3.7 |
| 111001 Asthma-F | 2.8 |
| 111002 Asthma-F | 5.3 |
| 111003 Atopic Asthma-F | 6.1 |
| 111004 Atopic Asthma-F | 3.4 |
| 111005 Atopic Asthma-F | 3.9 |
| 111006 Atopic Asthma-F | 2.4 |
| 111417 Allergy-M | 6.6 |
| 112347 Allergy-M | 3.3 |
| 112349 Normal Lung-F | 3.2 |
| 112357 Normal Lung-F | 100.0 |
| 112354 Normal Lung-M | 58.6 |
| 112374 Crohns-F | 7.5 |
| 112389 Match Control Crohns-F | 3.5 |
| 112375 Crohns-F | 5.1 |
| 112732 Match Control Crohns-F | 0.5 |
| 112725 Crohns-M | 10.6 |
| 112387 Match Control Crohns-M | 3.5 |
| 112378 Crohns-M | 1.7 |
| 112390 Match Control Crohns-M | 55.5 |
| 112726 Crohns-M | 3.6 |
| 112731 Match Control Crohns-M | 13.9 |
| 112380 Ulcer Col-F | 13.7 |
| 112734 Match Control Ulcer Col-F | 5.6 |
| 112384 Ulcer Col-F | 3.9 |
| 112737 Match Control Ulcer Col-F | 3.3 |
| 112386 Ulcer Col-F | 0.0 |
| 112738 Match Control Ulcer Col-F | 0.0 |
| 112381 Ulcer Col-M | 4.2 |
| 112735 Match Control Ulcer Col-M | 18.2 |
| 112382 Ulcer Col-M | 4.2 |
| 112394 Match Control Ulcer Col-M | 0.0 |
| 112383 Ulcer Col-M | 12.2 |
| 112736 Match Control Ulcer Col-M | 2.0 |
| 112423 Psoriasis-F | 3.9 |
| 112427 Match Control Psoriasis-F | 30.8 |
| 112418 Psoriasis-M | 4.6 |
| 112723 Match Control Psoriasis-M | 23.8 |
| 112419 Psoriasis-M | 2.7 |
| 112424 Match Control Psoriasis-M | 1.9 |
| 112420 Psoriasis-M | 4.9 |
| 112425 Match Control Psoriasis-M | 25.9 |
| 104689 (MF) OA Bone-Backus | 12.9 |
| 104690 (MF) Adj “Normal” Bone-Backus | 3.7 |
| 104691 (MF) OA Synovium-Backus | 6.9 |
| 104692 (BA) OA Cartilage-Backus | 21.3 |
| 104694 (BA) OA Bone-Backus | 6.6 |
| 104695 (BA) Adj “Normal” Bone-Backus | 2.3 |
| 104696 (BA) OA Synovium-Backus | 5.7 |
| 104700 (SS) OA Bone-Backus | 6.2 |
| 104701 (SS) Adj “Normal” Bone-Backus | 3.8 |
| 104702 (SS) OA Synovium-Backus | 15.4 |
| 117093 OA Cartilage Rep7 | 18.0 |
| 112672 OA Bone5 | 90.1 |
| 112673 OA Synovium5 | 63.7 |
| 112674 OA Synovial Fluid cells5 | 32.3 |
| 117100 OA Cartilage Rep14 | 3.3 |
| 112756 OA Bone9 | 7.0 |
| 112757 OA Synovium9 | 12.2 |
| 112758 OA Synovial Fluid Cells9 | 3.9 |
| 117125 RA Cartilage Rep2 | 4.6 |
| 113492 Bone2 RA | 2.4 |
| 113493 Synovium2 RA | 1.1 |
| 113494 Syn Fluid Cells RA | 1.4 |
| 113499 Cartilage4 RA | 1.4 |
| 113500 Bone4 RA | 0.5 |
| 113501 Synovium4 RA | 1.7 |
| 113502 Syn Fluid Cells4 RA | 1.8 |
| 113495 Cartilage3 RA | 1.6 |
| 113496 Bone3 RA | 1.1 |
| 113497 Synovium3 RA | 0.0 |
| 113498 Syn Fluid Cells3 RA | 0.6 |
| 117106 Normal Cartilage Rep20 | 4.5 |
| 113663 Bone3 Normal | 6.7 |
| 113664 Synovium3 Normal | 1.2 |
| 113665 Syn Fluid Cells3 Normal | 0.9 |
| 117107 Normal Cartilage Rep22 | 1.3 |
| 113667 Bone4 Normal | 11.8 |
| 113668 Synovium4 Normal | 12.0 |
| 113669 Syn Fluid Cells4 Normal | 10.7 |

Column A - Rel. Exp. (%) Ag1294b, Run 249007981

[1597] TABLE BHE
General_screening_panel_v1.4

| Tissue Name | A |
|---|---|
| Adipose | 3.3 |
| Melanoma* Hs688(A).T | 2.7 |
| Melanoma* Hs688(B).T | 2.7 |
| Melanoma* M14 | 4.8 |
| Melanoma* LOXIMVI | 0.1 |
| Melanoma* SK-MEL-5 | 0.4 |
| Squamous cell carcinoma SCC-4 | 0.2 |
| Testis Pool | 4.3 |
| Prostate ca.* (bone met) PC-3 | 1.6 |
| Prostate Pool | 0.5 |
| Placenta | 7.7 |
| Uterus Pool | 0.1 |
| Ovarian ca. OVCAR-3 | 0.7 |
| Ovarian ca. SK-OV-3 | 0.6 |
| Ovarian ca. OVCAR-4 | 0.3 |
| Ovarian ca. OVCAR-5 | 1.1 |
| Ovarian ca. IGROV-1 | 1.4 |
| Ovarian ca. OVCAR-8 | 0.7 |
| Ovary | 5.0 |
| Breast ca. MCF-7 | 0.4 |
| Breast ca. MDA-MB-231 | 0.5 |
| Breast ca. BT 549 | 0.7 |
| Breast ca. T47D | 4.2 |
| Breast ca. MDA-N | 0.2 |
| Breast Pool | 0.8 |
| Trachea | 1.3 |
| Lung | 5.5 |
| Fetal Lung | 1.8 |
| Lung ca. NCI-N417 | 3.6 |
| Lung ca. LX-1 | 0.7 |
| Lung ca. NCI-H146 | 0.8 |
| Lung ca. SHP-77 | 0.3 |
| Lung ca. A549 | 0.8 |
| Lung ca. NCI-H526 | 2.1 |
| Lung ca. NCI-H23 | 0.8 |
| Lung ca. NCI-H460 | 1.2 |
| Lung ca. HOP-62 | 0.5 |
| Lung ca. NCI-H522 | 20.2 |
| Liver | 11.6 |
| Fetal Liver | 61.1 |
| Liver ca. HepG2 | 100.0 |
| Kidney Pool | 6.7 |
| Fetal Kidney | 2.0 |
| Renal ca. 786-0 | 1.7 |
| Renal ca. A498 | 1.3 |
| Renal ca. ACHN | 2.5 |
| Renal ca. UO-31 | 10.6 |
| Renal ca. TK-10 | 41.8 |
| Bladder | 1.8 |
| Gastric ca. (liver met.) NCI-N87 | 2.0 |
| Gastric ca. KATO III | 0.6 |
| Colon ca. SW-948 | 0.6 |
| Colon ca. SW480 | 0.7 |
| Colon ca.* (SW480 met) SW620 | 12.8 |
| Colon ca. HT29 | 0.1 |
| Colon ca. HCT-116 | 3.7 |
| Colon ca. CaCo-2 | 31.9 |
| Colon cancer tissue | 7.9 |
| Colon ca. SW1116 | 1.0 |
| Colon ca. Colo-205 | 0.0 |
| Colon ca. SW-48 | 0.0 |
| Colon Pool | 1.0 |
| Small Intestine Pool | 4.9 |
| Stomach Pool | 3.4 |
| Bone Marrow Pool | 0.0 |
| Fetal Heart | 0.7 |
| Heart Pool | 0.7 |
| Lymph Node Pool | 2.6 |
| Fetal Skeletal Muscle | 1.6 |
| Skeletal Muscle Pool | 1.0 |
| Spleen Pool | 0.4 |
| Thymus Pool | 7.9 |
| CNS cancer (glio/astro) U87-MG | 6.4 |
| CNS cancer (glio/astro) U-118-MG | 1.6 |
| CNS cancer (neuro; met) SK-N-AS | 4.4 |
| CNS cancer (astro) SF-539 | 0.2 |
| CNS cancer (astro) SNB-75 | 4.4 |
| CNS cancer (glio) SNB-19 | 1.1 |
| CNS cancer (glio) SF-295 | 5.1 |
| Brain (Amygdala) Pool | 2.5 |
| Brain (cerebellum) | 7.3 |
| Brain (fetal) | 12.2 |
| Brain (Hippocampus) Pool | 1.9 |
| Cerebral Cortex Pool | 2.6 |
| Brain (Substantia nigra) Pool | 2.1 |
| Brain (Thalamus) Pool | 3.9 |
| Brain (whole) | 8.5 |
| Spinal Cord Pool | 1.9 |
| Adrenal Gland | 2.6 |
| Pituitary gland Pool | 0.6 |
| Salivary Gland | 0.9 |
| Thyroid (female) | 1.8 |
| Pancreatic ca. CAPAN2 | 0.0 |
| Pancreas Pool | 1.1 |

Column A - Rel. Exp. (%) Ag4726, Run 222842378

[1598] TABLE BHF
Panel 1.2

| Tissue Name | A | B |
|---|---|---|
| Endothelial cells | 12.3 | 5.9 |
| Heart (Fetal) | 0.0 | 0.0 |
| Pancreas | 0.0 | 0.0 |
| Pancreatic ca. CAPAN 2 | 0.0 | 0.0 |
| Adrenal gland | 0.0 | 0.2 |
| Thyroid | 0.1 | 0.0 |
| Salivary gland | 0.0 | 0.0 |
| Pituitary gland | 0.2 | 0.1 |
| Brain (fetal) | 2.4 | 16.0 |
| Brain (whole) | 0.0 | 0.3 |
| Brain (amygdala) | 0.0 | 0.0 |
| Brain (cerebellum) | 0.0 | 0.0 |
| Brain (hippocampus) | 0.0 | 0.0 |
| Brain (thalamus) | 0.0 | 0.0 |
| Cerebral Cortex | 0.0 | 0.0 |
| Spinal cord | 0.0 | 0.0 |
| glio/astro U87-MG | 0.0 | 0.0 |
| glio/astro U-118-MG | 0.0 | 0.0 |
| astrocytoma SW1783 | 0.0 | 0.0 |
| neuro*; met SK-N-AS | 0.0 | 0.2 |
| astrocytoma SF-539 | 0.0 | 0.0 |
| astrocytoma SNB-75 | 0.0 | 0.0 |
| glioma SNB-19 | 0.0 | 0.0 |
| glioma U251 | 0.0 | 0.0 |
| glioma SF-295 | 0.0 | 0.0 |
| Heart | 0.0 | 0.0 |
| Skeletal muscle | 0.0 | 0.0 |
| Bone marrow | 0.0 | 0.0 |
| Thymus | 1.2 | 2.8 |
| Spleen | 0.0 | 0.0 |
| Lymph node | 0.0 | 0.0 |
| Colorectal | 0.0 | 0.0 |
| Stomach | 0.0 | 0.0 |
| Small intestine | 0.0 | 0.0 |
| Colon ca. SW480 | 0.0 | 0.0 |
| Colon ca.* SW620 (SW480 met) | 1.1 | 1.9 |
| Colon ca. HT29 | 0.0 | 0.0 |
| Colon ca. HCT-116 | 0.0 | 0.0 |
| Colon ca. CaCo-2 | 46.3 | 56.6 |
| CC Well to Mod Diff (ODO3866) | 0.0 | 0.0 |
| Colon ca. HCC-2998 | 0.0 | 0.0 |
| Gastric ca. (liver met) NCI-N87 | 0.0 | 0.0 |
| Bladder | 0.0 | 0.0 |
| Trachea | 0.0 | 0.0 |
| Kidney | 0.0 | 0.0 |
| Kidney (fetal) | 0.1 | 0.9 |
| Renal ca. 786-0 | 0.0 | 0.0 |
| Renal ca. A498 | 0.0 | 0.0 |
| Renal ca. RXF 393 | 0.0 | 0.0 |
| Renal ca. ACHN | 0.0 | 0.0 |
| Renal ca. UO-31 | 0.0 | 0.0 |
| Renal ca. TK-10 | 0.0 | 0.0 |
| Liver | 32.8 | 53.2 |
| Liver (fetal) | 72.7 | 100.0 |
| Liver ca. (hepatoblast) HepG2 | 100.0 | 94.0 |
| Lung | 0.0 | 0.0 |
| Lung (fetal) | 0.0 | 0.0 |
| Lung ca. (small cell) LX-1 | 0.0 | 0.0 |
| Lung ca. (small cell) NCI-H69 | 0.0 | 0.0 |
| Lung ca. (s. cell var.) SHP-77 | 0.0 | 0.0 |
| Lung ca. (large cell) NCI-H460 | 0.0 | 0.0 |
| Lung ca. (non-sm. cell) A549 | 0.0 | 0.0 |
| Lung ca. (non-s. cell) NCI-H23 | 0.0 | 0.0 |
| Lung ca. (non-s. cell) HOP-62 | 0.0 | 0.0 |
| Lung ca. (non-s. cl) NCI-H522 | 63.7 | 90.1 |
| Lung ca. (squam.) SW 900 | 0.0 | 0.0 |
| Lung ca. (squam.) NCI-H596 | 0.0 | 0.0 |
| Mammary gland | 0.7 | 3.6 |
| Breast ca.* (pl. ef) MCF-7 | 0.0 | 0.0 |
| Breast ca.* (pl. ef) MDA-MB-231 | 0.0 | 0.0 |
| Breast ca.* (pl. ef) T47D | 0.0 | 0.0 |
| Breast ca. BT-549 | 0.0 | 0.0 |
| Breast ca. MDA-N | 0.0 | 0.0 |
| Ovary | 0.5 | 11.7 |
| Ovarian ca. OVCAR-3 | 0.0 | 0.0 |
| Ovarian ca. OVCAR-4 | 0.0 | 0.0 |
| Ovarian ca. OVCAR-5 | 0.0 | 0.0 |
| Ovarian ca. OVCAR-8 | 0.0 | 0.0 |
| Ovarian ca. IGROV-1 | 0.0 | 0.0 |
| Ovarian ca. (ascites) SK-OV-3 | 0.0 | 0.0 |
| Uterus | 0.0 | 0.0 |
| Placenta | 34.4 | 39.5 |
| Prostate | 0.0 | 0.0 |
| Prostate ca.* (bone met) PC-3 | 0.0 | 0.0 |
| Testis | 1.0 | 3.5 |
| Melanoma Hs688(A).T | 0.0 | 0.0 |
| Melanoma* (met) Hs688(B).T | 0.0 | 0.0 |
| Melanoma UACC-62 | 0.0 | 0.0 |
| Melanoma M14 | 0.0 | 0.0 |
| Melanoma LOX IMVI | 0.0 | 0.0 |
| Melanoma* (met) SK-MEL-5 | 0.0 | 0.0 |

Column A - Rel. Exp. (%) Ag746, Run 115163442
Column B - Rel. Exp. (%) Ag746, Run 119442272

[1599] TABLE BHG
Panel 2D

| Tissue Name | A | B |
|---|---|---|
| Normal Colon | 18.3 | 21.8 |
| CC Well to Mod Diff (ODO3866) | 16.5 | 23.7 |
| CC Margin (ODO3866) | 3.1 | 0.0 |
| CC Gr.2 rectosigmoid (ODO3868) | 0.0 | 0.8 |
| CC Margin (ODO3868) | 0.5 | 2.0 |
| CC Mod Diff (ODO3920) | 1.2 | 2.3 |
| CC Margin (ODO3920) | 1.3 | 2.6 |
| CC Gr.2 ascend colon (ODO3921) | 3.4 | 4.4 |
| CC Margin (ODO3921) | 1.3 | 0.0 |
| CC from Partial Hepatectomy | 8.4 | 1.9 |
| (ODO4309) Mets | | |
| Liver Margin (ODO4309) | 49.7 | 41.5 |
| Colon mets to lung (OD04451-01) | 0.3 | 5.3 |
| Lung Margin (OD04451-02) | 0.0 | 1.8 |
| Normal Prostate 6546-1 | 9.1 | 12.1 |
| Prostate Cancer (OD04410) | 2.0 | 9.7 |
| Prostate Margin (OD04410) | 16.8 | 20.3 |
| Prostate Cancer (OD04720-01) | 13.5 | 14.4 |
| Prostate Margin (OD04720-02) | 14.0 | 22.4 |
| Normal Lung | 6.8 | 11.7 |
| Lung Met to Muscle (ODO4286) | 1.8 | 0.7 |
| Muscle Margin (ODO4286) | 11.5 | 13.1 |
| Lung Malignant Cancer (OD03126) | 1.5 | 6.0 |
| Lung Margin (OD03126) | 4.8 | 2.4 |
| Lung Cancer (OD04404) | 4.2 | 2.3 |
| Lung Margin (OD04404) | 9.0 | 10.4 |
| Lung Cancer (OD04565) | 0.3 | 0.0 |
| Lung Margin (OD04565) | 0.4 | 0.3 |
| Lung Cancer (OD04237-01) | 10.7 | 11.1 |
| Lung Margin (OD04237-02) | 4.9 | 5.4 |
| Ocular Mel Met to Liver (ODO4310) | 10.5 | 11.9 |
| Liver Margin (ODO4310) | 22.4 | 32.8 |
| Melanoma Metastasis | 0.0 | 0.0 |
| Lung Margin (OD04321) | 0.6 | 0.0 |
| Normal Kidney | 5.3 | 5.3 |
| Kidney Ca, Nuclear grade 2 (OD04338) | 39.8 | 43.8 |
| Kidney Margin (OD04338) | 4.8 | 6.4 |
| Kidney Ca Nuclear grade 1/2 | 3.0 | 0.3 |
| (OD04339) | | |
| Kidney Margin (OD04339) | 5.4 | 10.0 |
| Kidney Ca, Clear cell type (OD04340) | 18.2 | 19.2 |
| Kidney Margin (OD04340) | 9.0 | 10.4 |
| Kidney Ca, Nuclear grade 3 (OD04348) | 5.2 | 8.3 |
| Kidney Margin (OD04348) | 6.9 | 4.7 |
| Kidney Cancer (OD04622-01) | 41.8 | 45.4 |
| Kidney Margin (OD04622-03) | 1.9 | 1.4 |
| Kidney Cancer (OD04450-01) | 9.2 | 6.2 |
| Kidney Margin (OD04450-03) | 10.2 | 9.0 |
| Kidney Cancer 8120607 | 2.2 | 1.7 |
| Kidney Margin 8120608 | 6.5 | 6.4 |
| Kidney Cancer 8120613 | 2.2 | 0.7 |
| Kidney Margin 8120614 | 6.3 | 3.0 |
| Kidney Cancer 9010320 | 10.9 | 16.5 |
| Kidney Margin 9010321 | 9.0 | 11.3 |
| Normal Uterus | 4.3 | 6.3 |
| Uterine Cancer 064011 | 13.4 | 17.7 |
| Normal Thyroid | 9.1 | 14.9 |
| Thyroid Cancer | 6.4 | 5.9 |
| Thyroid Cancer A302152 | 4.4 | 5.1 |
| Thyroid Margin A302153 | 12.0 | 22.1 |
| Normal Breast | 9.9 | 14.3 |
| Breast Cancer | 0.4 | 0.2 |
| Breast Cancer (OD04590-01) | 5.3 | 3.9 |
| Breast Cancer Mets (OD04590-03) | 4.0 | 10.4 |
| Breast Cancer Metastasis | 7.2 | 4.4 |
| Breast Cancer | 5.2 | 3.3 |
| Breast Cancer | 12.1 | 18.6 |
| Breast Cancer 9100266 | 2.7 | 5.3 |
| Breast Margin 9100265 | 5.0 | 5.8 |
| Breast Cancer A209073 | 0.5 | 1.8 |
| Breast Margin A209073 | 1.7 | 0.4 |
| Normal Liver | 39.5 | 47.0 |
| Liver Cancer | 4.2 | 0.6 |
| Liver Cancer 1025 | 66.4 | 74.2 |
| Liver Cancer 1026 | 36.1 | 42.6 |
| Liver Cancer 6004-T | 100.0 | 100.0 |
| Liver Tissue 6004-N | 22.8 | 34.4 |
| Liver Cancer 6005-T | 39.2 | 35.4 |
| Liver Tissue 6005-N | 33.2 | 38.2 |
| Normal Bladder | 6.6 | 4.9 |
| Bladder Cancer | 1.0 | 4.8 |
| Bladder Cancer | 2.6 | 0.7 |
| Bladder Cancer (OD04718-01) | 0.0 | 0.7 |
| Bladder Normal Adjacent | 3.5 | 14.4 |
| (OD04718-03) | | |
| Normal Ovary | 50.7 | 47.3 |
| Ovarian Cancer | 10.2 | 7.4 |
| Ovarian Cancer (OD04768-07) | 73.7 | 80.7 |
| Ovary Margin (OD04768-08) | 2.6 | 0.8 |
| Normal Stomach | 2.9 | 2.9 |
| Gastric Cancer 9060358 | 0.0 | 1.1 |
| Stomach Margin 9060359 | 2.4 | 0.3 |
| Gastric Cancer 9060395 | 0.5 | 1.1 |
| Stomach Margin 9060394 | 5.2 | 2.0 |
| Gastric Cancer 9060397 | 3.4 | 7.0 |
| Stomach Margin 9060396 | 1.4 | 0.0 |
| Gastric Cancer 064005 | 1.3 | 6.0 |

Column A - Rel. Exp. (%) Ag746, Run 147127131
Column B - Rel. Exp. (%) Ag746, Run 148019631

[1600] TABLE BHH
Panel 4D

| Tissue Name | A | B |
|---|---|---|
| Secondary Th1 act | 10.9 | 7.7 |
| Secondary Th2 act | 6.4 | 8.0 |
| Secondary Tr1 act | 11.3 | 9.3 |
| Secondary Th1 rest | 3.4 | 2.7 |
| Secondary Th2 rest | 1.5 | 2.5 |
| Secondary Tr1 rest | 1.4 | 2.0 |
| Primary Th1 act | 48.0 | 46.0 |
| Primary Th2 act | 38.7 | 27.7 |
| Primary Tr1 act | 72.2 | 55.5 |
| Primary Th1 rest | 3.1 | 2.3 |
| Primary Th2 rest | 1.0 | 0.8 |
| Primary Tr1 rest | 1.1 | 0.5 |
| CD45RA CD4 lymphocyte act | 2.9 | 1.8 |
| CD45RO CD4 lymphocyte act | 18.6 | 12.2 |
| CD8 lymphocyte act | 17.8 | 6.8 |
| Secondary CD8 lymphocyte rest | 6.8 | 6.0 |
| Secondary CD8 lymphocyte act | 5.5 | 4.1 |
| CD4 lymphocyte none | 0.0 | 0.2 |
| 2ry Th1/Th2/Tr1 anti-CD95 | 2.9 | 3.1 |
| CH11 | | |
| LAK cells rest | 1.4 | 0.3 |
| LAK cells IL-2 | 3.8 | 2.2 |
| LAK cells IL-2 + IL-12 | 3.0 | 0.8 |
| LAK cells IL-2 + IFN gamma | 2.0 | 1.7 |
| LAK cells IL-2 + IL-18 | 0.5 | 0.2 |
| LAK cells PMA/ionomycin | 0.7 | 1.3 |
| NK Cells IL-2 rest | 0.7 | 0.7 |
| Two Way MLR 3 day | 1.1 | 2.5 |
| Two Way MLR 5 day | 2.5 | 2.8 |
| Two Way MLR 7 day | 4.5 | 5.0 |
| PBMC rest | 0.0 | 0.0 |
| PBMC PWM | 41.8 | 29.1 |
| PBMC PHA-L | 34.4 | 21.8 |
| Ramos (B cell) none | 4.7 | 2.4 |
| Ramos (B cell) ionomycin | 9.2 | 5.8 |
| B lymphocytes PWM | 51.8 | 51.4 |
| B lymphocytes CD40L and IL-4 | 10.2 | 12.3 |
| EOL-1 dbcAMP | 0.3 | 0.2 |
| EOL-1 dbcAMP | 0.4 | 1.8 |
| PMA/ionomycin | | |
| Dendritic cells none | 6.7 | 3.8 |
| Dendritic cells LPS | 4.7 | 3.1 |
| Dendritic cells anti-CD40 | 6.0 | 5.6 |
| Monocytes rest | 0.0 | 0.0 |
| Monocytes LPS | 0.7 | 0.8 |
| Macrophages rest | 19.8 | 9.9 |
| Macrophages LPS | 0.7 | 0.5 |
| HUVEC none | 9.3 | 10.2 |
| HUVEC starved | 19.2 | 13.1 |
| HUVEC IL-1beta | 4.1 | 1.7 |
| HUVEC IFN gamma | 21.0 | 13.7 |
| HUVEC TNF alpha + IFN gamma | 2.8 | 0.6 |
| HUVEC TNF alpha + IL4 | 30.8 | 25.7 |
| HUVEC IL-11 | 11.6 | 7.3 |
| Lung Microvascular EC none | 24.1 | 20.0 |
| Lung Microvascular EC TNFalpha + IL- | 8.0 | 12.2 |
| 1beta | | |
| Microvascular Dermal EC none | 64.6 | 45.7 |
| Microsvasular Dermal EC TNFalpha + IL- | 18.4 | 11.7 |
| 1beta | | |
| Bronchial epithelium | 5.2 | 5.4 |
| TNFalpha + IL1beta | | |
| Small airway epithelium none | 4.0 | 3.2 |
| Small airway epithelium TNFalpha + IL- | 8.2 | 4.5 |
| 1beta | | |
| Coronery artery SMC rest | 5.8 | 6.3 |
| Coronery artery SMC | 4.5 | 5.1 |
| TNFalpha + IL-1beta | | |
| Astrocytes rest | 0.8 | 0.5 |
| Astrocytes TNFalpha + IL-1beta | 3.6 | 1.9 |
| KU-812 (Basophil) rest | 16.0 | 11.1 |
| KU-812 (Basophil) PMA/ionomycin | 12.3 | 9.5 |
| CCD1106 (Keratinocytes) none | 0.0 | 0.5 |
| 93580 CCD1106 (Keratinocytes) TNFa and | 0.7 | 0.4 |
| IFNg | | |
| Liver cirrhosis | 8.4 | 3.8 |
| Lupus kidney | 2.0 | 3.2 |
| NCI-H292 none | 21.9 | 25.7 |
| NCI-H292 IL-4 | 15.7 | 12.3 |
| NCI-H292 IL-9 | 20.6 | 14.7 |
| NCI-H292 IL-13 | 8.3 | 5.7 |
| NCI-H292 IFN gamma | 5.1 | 8.2 |
| HPAEC none | 18.7 | 23.8 |
| HPAEC TNF alpha + IL-1 beta | 11.9 | 12.9 |
| Lung fibroblast none | 15.7 | 13.5 |
| Lung fibroblast TNF alpha + IL-1 beta | 6.9 | 4.7 |
| Lung fibroblast IL-4 | 25.0 | 16.6 |
| Lung fibroblast IL-9 | 14.7 | 15.8 |
| Lung fibroblast IL-13 | 40.3 | 32.5 |
| Lung fibroblast IFN gamma | 15.4 | 17.4 |
| Dermal fibroblast CCD1070 rest | 0.5 | 0.9 |
| Dermal fibroblast CCD1070 TNF alpha | 0.9 | 0.8 |
| Dermal fibroblast CCD1070 IL-1 beta | 0.6 | 0.6 |
| Dermal fibroblast IFN gamma | 32.1 | 18.4 |
| Dermal fibroblast IL-4 | 100.0 | 100.0 |
| IBD Colitis 2 | 0.0 | 0.0 |
| IBD Crohn's | 0.3 | 0.8 |
| Colon | 1.4 | 0.5 |
| Lung | 0.5 | 0.8 |
| Thymus | 2.9 | 4.3 |
| Kidney | 65.5 | 47.3 |

Column A - Rel. Exp. (%) Ag1294b, Run 138944262
Column B - Rel. Exp. (%) Ag1294b, Run 139408252

[1601] AI_comprehensive panel_v1.0 Summary: Ag1294b Expression of this gene in this panel confirmed expression of this gene in cells involved in the immune response. Highest expression of this gene was seen in normal lung (CT=30.5). Please see Panel 4D for discussion of utility of this gene in inflammation.

[1602] General_screeningpanel_v1.4 Summary: Ag4726 Highest expression of this gene was seen in a liver cancer cell line (CTs=30), with moderate levels of expression seen in fetal and adult liver, and cell lines derived from colon, renal and lung cancers. Thus, expression of this gene is useful as a marker to differentiate liver derived tissue from other samples on this panel.

[1603] Panel 1.2 Summary: Ag746 Highest expression of this gene was detected in a liver cancer cell line (CTs=27). High levels of expression were also seen in fetal and adult liver tissue, a colon cancer cell line and a lung cancer cell line. Thus, expression of this gene is useful as a marker to differentiate liver derived samples, the colon cancer cell line and the lung cancer cell line from other samples on this panel. Expression of this gene is also useful as a diagnostic marker to detect the presence of colon and lung cancers.

[1604] Moderate expression was also seen in the fetal brain, placenta, and endothelial cells.

[1605] Panel 2D Summary: Ag746 Highest expression of this gene was detected in a liver cancer sample (CTs=31). The prominent expression in liver derived tissue was consistent with the results in Panel 1.2. Moderate levels of expression were also evident in samples from ovarian cancer and kidney cancer. Expression of this gene was higher in these cancers than in the normal adjacent tissue. Thus, expression of this gene is useful as a marker to differentiate between liver derived samples and other samples on this panel and as a marker to detect the presence of liver, kidney, and ovarian cancer. Therapeutic modulation of the expression or function of this gene or its protein product is useful in the treatment of liver, kidney, and ovarian cancers.

[1606] Panel 4D Summary: Ag1294b Highest expression of this gene was detected in IL-4 treated dermal fibroblasts (CTs=30). In addition, this gene was expressed at moderate levels in IFN gamma stimulated dermal fibroblasts, activated lung fibroblasts, HPAECs, lung and dermal microvasculature, activated small airway and bronchial epithelium, activated NCI-H292 cells, acutely activated T cells, and activated B cells.

[1607] Based on these levels of expression in T cells, activated B cells and cells in lung and skin, therapeutics that block the function of this gene product are useful as therapeutics that reduce or eliminate the symptoms in patients with autoimmune and inflammatory diseases in which activated B cells present antigens in the generation of the aberrant immune response and in treating T-cell mediated diseases, including Crohn's disease, ulcerative colitis, multiple sclerosis, chronic obstructive pulmonary disease, asthma, allergy, emphysema, rheumatoid arthritis, or psoriasis.

[1608] BE. CG94946-01: Agrin Precursor

[1609] Expression of gene CG94946-01 was assessed using the primer-probe sets Ag3605 and Ag3974, described in Tables BIA and BIB. Results of the RTQ-PCR runs are shown in Tables BIC, BID, BIE and BIF.

TABLE BIA
Probe Name Ag36O5

| | | | | |
|---|---|---|---|---|
| | +HL,6 | | | SEQ |
| | | | Start | ID |
| Primers | Sequences | Length | Position | No |

| | | | | |
|---|---|---|---|---|
| Forward | 5′-gaccccaagtcagaactgttc-3′ | 21 | 3514 | 1591 |
| Probe | TET-5′-attgagagcaccctggacgacctctt-3′- | 26 | 3553 | 1592 |
| | TAMRA | | | |
| Reverse | 5′-gaaatccttcttgacgtctgaa-3′ | 22 | 3585 | 1593 |

[1610] TABLE BIB
Probe Name Ag3974

| | +HL,6 | | | SEQ |
|---|---|---|---|---|
| | | | Start | ID |
| Primers | Sequences | Length | Position | No |
| Forward | 5′-gacaccaggatcttctttgtga-3′ | 22 | 379 | 1594 |
| Probe | TET-5′-catacctgtggccagcccacaag-3′-TAMRA | 23 | 413 | 1595 |
| Reverse | 5′-gagttgagcatcagctcgtt-3′ | 20 | 436 | 1596 |

[1611] TABLE BIC
General_screening_panel_v1.4

| Tissue Name | A | B |
|---|---|---|
| Adipose | 1.4 | 1.5 |
| Melanoma* Hs688(A).T | 2.6 | 3.2 |
| Melanoma* Hs688(B).T | 4.6 | 4.2 |
| Melanoma* M14 | 6.7 | 6.4 |
| Melanoma* LOXIMVI | 4.8 | 4.0 |
| Melanoma* SK-MEL-5 | 2.6 | 4.2 |
| Squamous cell carcinoma SCC-4 | 9.0 | 8.4 |
| Testis Pool | 1.3 | 1.1 |
| Prostate ca.* (bone met) PC-3 | 21.0 | 24.8 |
| Prostate Pool | 0.9 | 0.8 |
| Placenta | 0.9 | 1.3 |
| Uterus Pool | 0.4 | 0.4 |
| Ovarian ca. OVCAR-3 | 77.4 | 66.9 |
| Ovarian ca. SK-OV-3 | 42.0 | 36.3 |
| Ovarian ca. OVCAR-4 | 9.5 | 12.7 |
| Ovarian ca. OVCAR-5 | 39.2 | 44.4 |
| Ovarian ca. IGROV-1 | 22.1 | 27.7 |
| Ovarian ca. OVCAR-8 | 18.0 | 14.9 |
| Ovary | 1.5 | 1.9 |
| Breast ca. MCF-7 | 7.7 | 9.7 |
| Breast ca. MDA-MB-231 | 22.7 | 31.2 |
| Breast ca. BT 549 | 13.2 | 10.1 |
| Breast ca. T47D | 100.0 | 100.0 |
| Breast ca. MDA-N | 4.8 | 4.2 |
| Breast Pool | 1.6 | 1.6 |
| Trachea | 2.8 | 2.6 |
| Lung | 0.2 | 0.1 |
| Fetal Lung | 11.4 | 8.3 |
| Lung ca. NCI-N417 | 1.4 | 0.7 |
| Lung ca. LX-1 | 10.5 | 11.0 |
| Lung ca. NCI-H146 | 0.1 | 0.1 |
| Lung ca. SHP-77 | 1.1 | 0.8 |
| Lung ca. A549 | 15.6 | 10.4 |
| Lung ca. NCI-H526 | 5.4 | 1.6 |
| Lung ca. NCI-H23 | 18.9 | 20.6 |
| Lung ca. NCI-H460 | 11.5 | 9.3 |
| Lung ca. HOP-62 | 23.7 | 23.0 |
| Lung ca. NCI-H522 | 1.8 | 2.3 |
| Liver | 0.5 | 0.6 |
| Fetal Liver | 0.8 | 1.4 |
| Liver ca. HepG2 | 15.5 | 12.6 |
| Kidney Pool | 1.5 | 2.5 |
| Fetal Kidney | 5.8 | 4.6 |
| Renal ca. 786-0 | 46.3 | 39.5 |
| Renal ca. A498 | 13.8 | 7.9 |
| Renal ca. ACHN | 14.3 | 15.9 |
| Renal ca. UO-31 | 41.5 | 38.7 |
| Renal ca. TK-10 | 19.3 | 16.4 |
| Bladder | 8.4 | 9.0 |
| Gastric ca. (liver met.) NCI-N87 | 87.7 | 80.7 |
| Gastric ca. KATO III | 17.8 | 17.7 |
| Colon ca. SW-948 | 9.2 | 7.8 |
| Colon ca. SW480 | 25.0 | 32.3 |
| Colon ca.* (SW480 met) SW620 | 5.0 | 4.6 |
| Colon ca. HT29 | 26.8 | 30.6 |
| Colon ca. HCT-116 | 4.9 | 5.8 |
| Colon ca. CaCo-2 | 13.6 | 10.4 |
| Colon cancer tissue | 10.2 | 10.0 |
| Colon ca. SW1116 | 5.1 | 3.6 |
| Colon ca. Colo-205 | 1.8 | 1.5 |
| Colon ca. SW-48 | 1.2 | 0.7 |
| Colon Pool | 1.9 | 1.3 |
| Small Intestine Pool | 0.6 | 1.0 |
| Stomach Pool | 1.5 | 1.2 |
| Bone Marrow Pool | 0.6 | 0.5 |
| Fetal Heart | 1.4 | 1.0 |
| Heart Pool | 0.7 | 0.8 |
| Lymph Node Pool | 2.1 | 2.0 |
| Fetal Skeletal Muscle | 0.9 | 0.5 |
| Skeletal Muscle Pool | 0.4 | 0.5 |
| Spleen Pool | 0.7 | 0.7 |
| Thymus Pool | 1.8 | 2.2 |
| CNS cancer (glio/astro) U87-MG | 5.9 | 6.0 |
| CNS cancer (glio/astro) U-118-MG | 11.7 | 11.2 |
| CNS cancer (neuro; met) SK-N-AS | 1.2 | 0.9 |
| CNS cancer (astro) SF-539 | 6.7 | 5.0 |
| CNS cancer (astro) SNB-75 | 22.8 | 32.3 |
| CNS cancer (glio) SNB-19 | 25.0 | 20.2 |
| CNS cancer (glio) SF-295 | 35.1 | 38.2 |
| Brain (Amygdala) Pool | 1.7 | 1.3 |
| Brain (cerebellum) | 1.4 | 1.0 |
| Brain (fetal) | 7.0 | 2.8 |
| Brain (Hippocampus) Pool | 1.6 | 0.9 |
| Cerebral Cortex Pool | 1.9 | 0.9 |
| Brain (Substantia nigra) Pool | 2.8 | 1.7 |
| Brain (Thalamus) Pool | 2.7 | 1.6 |
| Brain (whole) | 3.4 | 1.1 |
| Spinal Cord Pool | 1.8 | 1.4 |
| Adrenal Gland | 0.2 | 0.4 |
| Pituitary gland Pool | 0.3 | 0.2 |
| Salivary Gland | 1.1 | 1.3 |
| Thyroid (female) | 3.3 | 3.7 |
| Pancreatic ca. CAPAN2 | 23.7 | 27.7 |
| Pancreas Pool | 3.0 | 4.1 |

Column A - Rel. Exp. (%) Ag3605, Run 213406184
Column B - Rel. Exp. (%) Ag3974, Run 217508632

[1612] TABLE BID
Panel 2.2

| Tissue Name | A |
|---|---|
| Normal Colon | 4.7 |
| Colon cancer (OD06064) | 6.3 |
| Colon Margin (OD06064) | 2.3 |
| Colon cancer (OD06159) | 2.1 |
| Colon Margin (OD06159) | 1.8 |
| Colon cancer (OD06297-04) | 2.0 |
| Colon Margin (OD06297-05) | 3.0 |
| CC Gr.2 ascend colon (ODO3921) | 3.6 |
| CC Margin (ODO3921) | 1.3 |
| Colon cancer metastasis (OD06104) | 1.1 |
| Lung Margin (OD06104) | 1.0 |
| Colon mets to lung (OD04451-01) | 4.5 |
| Lung Margin (OD04451-02) | 6.7 |
| Normal Prostate | 2.1 |
| Prostate Cancer (OD04410) | 3.9 |
| Prostate Margin (OD04410) | 3.4 |
| Normal Ovary | 7.6 |
| Ovarian cancer (OD06283-03) | 27.9 |
| Ovarian Margin (OD06283-07) | 2.0 |
| Ovarian Cancer | 16.0 |
| Ovarian cancer (OD06145) | 10.1 |
| Ovarian Margin (OD06145) | 8.2 |
| Ovarian cancer (OD06455-03) | 28.9 |
| Ovarian Margin (OD06455-07) | 1.9 |
| Normal Lung | 2.9 |
| Invasive poor diff. lung adeno (ODO4945-01 | 9.4 |
| Lung Margin (ODO4945-03) | 7.9 |
| Lung Malignant Cancer (OD03126) | 7.5 |
| Lung Margin (OD03126) | 7.0 |
| Lung Cancer (OD05014A) | 17.0 |
| Lung Margin (OD05014B) | 11.7 |
| Lung cancer (OD06081) | 12.2 |
| Lung Margin (OD06081) | 2.4 |
| Lung Cancer (OD04237-01) | 1.8 |
| Lung Margin (OD04237-02) | 16.2 |
| Ocular Mel Met to Liver (ODO4310) | 8.4 |
| Liver Margin (ODO4310) | 2.9 |
| Melanoma Metastasis | 4.0 |
| Lung Margin (OD04321) | 3.8 |
| Normal Kidney | 10.9 |
| Kidney Ca, Nuclear grade 2 (OD04338) | 35.4 |
| Kidney Margin (OD04338) | 20.4 |
| Kidney Ca Nuclear grade 1/2 (OD04339) | 52.9 |
| Kidney Margin (OD04339) | 16.6 |
| Kidney Ca, Clear cell type (OD04340) | 16.6 |
| Kidney Margin (OD04340) | 7.4 |
| Kidney Ca, Nuclear grade 3 (OD04348) | 11.2 |
| Kidney Margin (OD04348) | 100.0 |
| Kidney malignant cancer (OD06204B) | 21.6 |
| Kidney normal adjacent tissue (OD06204E) | 23.2 |
| Kidney Cancer (OD04450-01) | 53.2 |
| Kidney Margin (OD04450-03) | 21.3 |
| Kidney Cancer 8120613 | 1.1 |
| Kidney Margin 8120614 | 14.1 |
| Kidney Cancer 9010320 | 20.3 |
| Kidney Margin 9010321 | 15.0 |
| Kidney Cancer 8120607 | 71.7 |
| Kidney Margin 8120608 | 12.2 |
| Normal Uterus | 7.3 |
| Uterine Cancer 064011 | 6.9 |
| Normal Thyroid | 4.3 |
| Thyroid Cancer | 27.0 |
| Thyroid Cancer A302152 | 19.1 |
| Thyroid Margin A302153 | 8.1 |
| Normal Breast | 14.0 |
| Breast Cancer | 13.4 |
| Breast Cancer | 35.1 |
| Breast Cancer (OD04590-01) | 31.6 |
| Breast Cancer Mets (OD04590-03) | 8.7 |
| Breast Cancer Metastasis | 13.3 |
| Breast Cancer | 21.5 |
| Breast Cancer 9100266 | 17.7 |
| Breast Margin 9100265 | 16.5 |
| Breast Cancer A209073 | 13.2 |
| Breast Margin A209073 | 35.4 |
| Breast cancer (OD06083) | 24.5 |
| Breast cancer node metastasis (OD06083) | 21.5 |
| Normal Liver | 5.0 |
| Liver Cancer 1026 | 15.5 |
| Liver Cancer 1025 | 12.2 |
| Liver Cancer 6004-T | 7.8 |
| Liver Tissue 6004-N | 6.1 |
| Liver Cancer 6005-T | 25.0 |
| Liver Tissue 6005-N | 12.4 |
| Liver Cancer | 12.9 |
| Normal Bladder | 14.2 |
| Bladder Cancer | 9.5 |
| Bladder Cancer | 12.2 |
| Normal Stomach | 8.7 |
| Gastric Cancer 9060397 | 8.9 |
| Stomach Margin 9060396 | 7.4 |
| Gastric Cancer 9060395 | 7.0 |
| Stomach Margin 9060394 | 7.5 |
| Gastric Cancer 064005 | 6.9 |

Column A - Rel. Exp. (%) Ag3605, Run 173764229

[1613] TABLE BIE
Panel 4.1D

| Tissue Name | A | B |
|---|---|---|
| Secondary Th1 act | 1.0 | 1.2 |
| Secondary Th2 act | 5.1 | 8.0 |
| Secondary Tr1 act | 2.5 | 3.5 |
| Secondary Th1 rest | 0.0 | 0.7 |
| Secondary Th2 rest | 0.4 | 0.2 |
| Secondary Tr1 rest | 0.4 | 1.2 |
| Primary Th1 act | 3.6 | 3.2 |
| Primary Th2 act | 1.1 | 2.0 |
| Primary Tr1 act | 3.4 | 2.9 |
| Primary Th1 rest | 0.9 | 0.4 |
| Primary Th2 rest | 0.5 | 0.2 |
| Primary Tr1 rest | 0.2 | 0.3 |
| CD45RA CD4 lymphocyte act | 43.5 | 22.7 |
| CD45RO CD4 lymphocyte act | 5.0 | 5.5 |
| CD8 lymphocyte act | 3.9 | 3.3 |
| Secondary CD8 lymphocyte rest | 3.7 | 3.3 |
| Secondary CD8 lymphocyte act | 3.3 | 3.5 |
| CD4 lymphocyte none | 0.3 | 0.1 |
| 2ry Th1/Th2/Tr1 anti-CD95 CH11 | 0.3 | 0.4 |
| LAK cells rest | 5.0 | 6.4 |
| LAK cells IL-2 | 2.8 | 1.7 |
| LAK cells IL-2 + IL-12 | 1.4 | 1.8 |
| LAK cells IL-2 + IFN gamma | 2.3 | 1.1 |
| LAK cells IL-2 + IL-18 | 2.9 | 1.6 |
| LAK cells PMA/ionomycin | 6.8 | 4.6 |
| NK Cells IL-2 rest | 1.6 | 1.9 |
| Two Way MLR 3 day | 10.7 | 12.4 |
| Two Way MLR 5 day | 6.5 | 5.3 |
| Two Way MLR 7 day | 4.3 | 4.0 |
| PBMC rest | 0.0 | 0.6 |
| PBMC PWM | 5.0 | 4.9 |
| PBMC PHA-L | 5.5 | 3.4 |
| Ramos (B cell) none | 0.4 | 0.4 |
| Ramos (B cell) ionomycin | 0.2 | 0.2 |
| B lymphocytes PWM | 2.4 | 3.0 |
| B lymphocytes CD40L and IL-4 | 1.5 | 3.7 |
| EOL-1 dbcAMP | 3.4 | 3.1 |
| EOL-1 dbcAMP PMA/ionomycin | 18.3 | 8.0 |
| Dendritic cells none | 14.8 | 9.0 |
| Dendritic cells LPS | 48.3 | 32.8 |
| Dendritic cells anti-CD40 | 9.7 | 8.8 |
| Monocytes rest | 0.9 | 1.4 |
| Monocytes LPS | 66.4 | 81.2 |
| Macrophages rest | 16.2 | 9.7 |
| Macrophages LPS | 54.7 | 43.8 |
| HUVEC none | 9.3 | 12.6 |
| HUVEC starved | 14.4 | 25.2 |
| HUVEC IL-1beta | 15.6 | 18.9 |
| HUVEC IFN gamma | 12.9 | 16.7 |
| HUVEC TNF alpha + IFN gamma | 37.6 | 34.9 |
| HUVEC TNF alpha + IL4 | 31.4 | 31.4 |
| HUVEC IL-11 | 14.9 | 13.9 |
| Lung Microvascular EC none | 79.0 | 100.0 |
| Lung Microvascular EC TNFalpha + IL- | 100.0 | 97.9 |
| 1beta | | |
| Microvascular Dermal EC none | 49.7 | 48.3 |
| Microsvasular Dermal EC TNFalpha + IL- | 56.6 | 47.0 |
| 1beta | | |
| Bronchial epithelium TNFalpha + IL1beta | 78.5 | 90.1 |
| Small airway epithelium none | 31.0 | 32.5 |
| Small airway epithelium TNFalpha + IL- | 81.8 | 93.3 |
| 1beta | | |
| Coronery artery SMC rest | 17.2 | 28.5 |
| Coronery artery SMC TNFalpha + IL-1beta | 22.2 | 28.7 |
| Astrocytes rest | 80.1 | 55.1 |
| Astrocytes TNFalpha + IL-1beta | 82.9 | 66.4 |
| KU-812 (Basophil) rest | 2.6 | 1.9 |
| KU-812 (Basophil) PMA/ionomycin | 0.6 | 2.8 |
| CCD1106 (Keratinocytes) none | 70.7 | 82.4 |
| CCD1106 (Keratinocytes) TNFalpha + IL- | 77.4 | 72.7 |
| 1beta | | |
| Liver cirrhosis | 13.2 | 14.4 |
| NCI-H292 none | 57.8 | 54.0 |
| NCI-H292 IL-4 | 62.4 | 78.5 |
| NCI-H292 IL-9 | 61.6 | 79.6 |
| NCI-H292 IL-13 | 53.6 | 59.9 |
| NCI-H292 IFN gamma | 67.4 | 71.7 |
| HPAEC none | 21.5 | 21.3 |
| HPAEC TNF alpha + IL-1 beta | 37.6 | 45.4 |
| Lung fibroblast none | 22.4 | 29.3 |
| Lung fibroblast TNF alpha + IL-1 beta | 71.2 | 87.7 |
| Lung fibroblast IL-4 | 16.2 | 23.3 |
| Lung fibroblast IL-9 | 31.9 | 30.4 |
| Lung fibroblast IL-13 | 18.7 | 36.6 |
| Lung fibroblast IFN gamma | 23.0 | 29.7 |
| Dermal fibroblast CCD1070 rest | 15.9 | 27.2 |
| Dermal fibroblast CCD1070 TNF alpha | 15.9 | 20.6 |
| Dermal fibroblast CCD1070 IL-1 beta | 17.2 | 22.4 |
| Dermal fibroblast IFN gamma | 7.2 | 10.3 |
| Dermal fibroblast IL-4 | 7.2 | 8.0 |
| Dermal Fibroblasts rest | 4.3 | 6.3 |
| Neutrophils TNFa + LPS | 0.0 | 0.9 |
| Neutrophils rest | 0.2 | 1.0 |
| Colon | 7.0 | 5.8 |
| Lung | 23.3 | 23.3 |
| Thymus | 5.8 | 7.3 |
| Kidney | 23.2 | 33.2 |

Column A - Rel. Exp. (%) Ag3605, Run 169943454
Column B - Rel. Exp. (%) Ag3974, Run 170739806

[1614] TABLE BIF
general oncology screening panel_v_2.4

| Tissue Name | A |
|---|---|
| Colon cancer 1 | 11.6 |
| CC Margin (ODO3921) | 5.3 |
| Colon cancer 2 | 18.6 |
| Colon NAT 2 | 3.2 |
| Colon cancer 3 | 22.2 |
| Colon NAT 3 | 7.7 |
| Colon malignant cancer 4 | 23.5 |
| Colon NAT 4 | 2.0 |
| Lung cancer 1 | 57.0 |
| Lung NAT 1 | 3.1 |
| Lung cancer 2 | 100.0 |
| Lung NAT 2 | 3.9 |
| Squamous cell carcinoma 3 | 41.2 |
| Lung NAT 3 | 1.7 |
| Metastatic melanoma 1 | 5.4 |
| Melanoma 2 | 3.2 |
| Melanoma 3 | 3.7 |
| Metastatic melanoma 4 | 12.5 |
| Metastatic melanoma 5 | 7.9 |
| Bladder cancer 1 | 0.5 |
| Bladder NAT 1 | 0.0 |
| Bladder cancer 2 | 6.0 |
| Bladder NAT 2 | 0.2 |
| Bladder NAT 3 | 1.7 |
| Bladder NAT 4 | 1.8 |
| Prostate adenocarcinoma 1 | 2.4 |
| Prostate adenocarcinoma 2 | 2.6 |
| Prostate adenocarcinoma 3 | 5.2 |
| Prostate adenocarcinoma 4 | 21.9 |
| Prostate NAT 5 | 5.4 |
| Prostate adenocarcinoma 6 | 4.4 |
| Prostate adenocarcinoma 7 | 3.8 |
| Prostate adenocarcinoma 8 | 1.8 |
| Prostate adenocarcinoma 9 | 10.7 |
| Prostate NAT 10 | 0.7 |
| Kidney cancer 1 | 38.7 |
| Kidney NAT 1 | 20.6 |
| Kidney cancer 2 | 66.4 |
| Kidney NAT 2 | 39.8 |
| Kidney cancer 3 | 64.6 |
| Kidney NAT 3 | 19.6 |
| Kidney cancer 4 | 16.4 |
| Kidney NAT 4 | 15.6 |

Column A - Rel. Exp. (%) Ag3605, Run 260268655

[1615] General_screening_panel_v1.4 Summary: Ag3605/Ag3974 The expression of this gene was highest in a sample derived from a breast cancer cell line (T47D) (CTs=22.5-25.3). In addition, there was substantial expression in other samples derived from breast cancer cell lines, ovarian cancer cell lines, kidney cancer cell lines, lung cancer cell lines, colon cancer cell lines and brain cancer cell lines. Thus, the expression of this gene is useful as a marker to distinguish T47D cells from other samples in the panel. Therapeutic modulation of this gene or its protein product through the use of small molecule drugs, protein therapeutics, or antibodies is of benefit in the treatment of breast, ovarian, kidney, lung, colon or brain cancer.

[1616] Among metabolic tissues, this gene had low-to-moderate levels of expression in adrenal, pituitary, adult and fetal heart, adult and fetal liver, adult and fetal skeletal muscle, and adipose. This gene product had high levels of expression (CT values=27) in pancreas and thyroid. Thus, this gene product is important for the pathogenesis, diagnosis, and/or treatment of metabolic and endocrine diseases, including obesity, Types 1 and 2 diabetes and thyroidopathies. Decreased glomerular expression of agrin has been observed in diabetic nephropathy and supports this use of this gene or gene product. (Yard B A, Exp Nephrol 2001;9(3):214-22 ).

[1617] In addition, this gene was expressed at moderate levels in all regions of the central nervous system examined, including amygdala, hippocampus, substantia nigra, thalamus, cerebellum, cerebral cortex, and spinal cord. This gene encodes a protein with homology to agrin, a neuronal aggregating factor that induces the aggregation of acetylcholine receptors and other postsynaptic proteins on muscle fibers and is crucial for the formation of the neuromuscular junction. Agrin also plays an important role in defining neuronal responses to excitatory neurotransmitters both in vitro and in vivo (Hilgenberg L G, Mol Cell Neurosci 2002 January; 19(1):97-110 and Bixby J L, J Neurobiol 2002 February 5;50(2):164-79). The gene expression in the central nervous system is consistent the use of the protein and its function as an agrin. This gene plays a role in central nervous system disorders such as Alzheimer's disease, Parkinson's disease, epilepsy, multiple sclerosis, schizophrenia and depression.

[1618] Agrin has also been implicated in the formation of senile plaques in Alzheimer's disease and in the acetylcholine synapse/neuromuscular junction (van Horssen J, Acta Neuropathol (Berl) 2001 December;102(6):604-14). In addition, an agrin minigene rescued dystrophic symptoms in a mouse model of muscular dystrophy (Moll J, Nature. 2001 September 20;413(6853):302-7). Therefore, this gene or gene product is useful as a treatment or cure for congenital muscular dystrophies. Furthermore, this gene product is also an excellent drug target in AD or in any disease involving the neuromuscular junction or the acetylcholine system.

[1619] Panel 2.2 Summary: Ag3605 Expression of this gene was highest in a sample of normal kidney (CT=27.4). In addition, expression of this gene was upregulated in a number of ovarian and renal cancers when compared to the matched control margins.

[1620] Thus, expression of this gene is useful as a marker for ovarian and renal carcinoma. Furthermore, therapeutic modulation of the activity of this gene or its protein product, using small molecule drugs, antibodies or protein therapeutics, is of benefit in the treatment of renal and ovarian cancer.

[1621] Panel 4.1D Summary: Ag3605/Ag3974 Highest expression of this gene was highest in lung microvascular endothelial cells (CTs=27.3-28.5), microvascular dermal endothelial cells, mucoepidermoid cell line NCI-H292, astrocytes, and keratinocytes.

[1622] This gene encodes a protein with homology to agrin. Agrin, an aggregating protein crucial for formation of the neuromuscular junction, is important for T cell signaling in the immune system (Khan AA, Science 2001 June 1;292(5522):1681-6). In addition, agrin has been identified as a potential disease target for autoimmune disorders at the neuromuscularjunction, including multiple sclerosis (Liyanage Y, Muscle Nerve 2002 January;25(1):4-16). Therefore, small molecule drug, antibody or protein therapeutics that target this gene or the protein encoded by the gene is useful for the reduction or inhibition of inflammation in asthma, emphysema, allergy, psoriasis, muscular dystrophy and multiple sclerosis.

[1623] general oncology screening panel_V_{—}2.4 Summary: Ag3605 Highest expression of this gene was seen in a lung cancer sample (CT=26.8). In addition, higher levels of expression were seen in lung and kidney cancers when compared to expression in normal adjacent tissue. Thus, expression of this gene is useful as a marker of lung and kidney cancers. Therapeutic modulation of the expression or function of this gene or gene product is useful in the treatment of lung and kidney cancers.

[1624] BJ. CG9638401: Novel Plasma Membrane Protein

[1625] Expression of gene CG96384-01 was assessed using the primer-probe set Ag4093, described in Table BJA. Results of the RTQ-PCR run are shown in Table BJB.

TABLE BJA
Probe Name Ag4093

| | | | | |
|---|---|---|---|---|
| | +HL,6 | | | SEQ |
| | | | Start | ID |
| Primers | Sequences | Length | Position | No |

| | | | | |
|---|---|---|---|---|
| Forward | 5′-agctggagcacaggagagat-3′ | 20 | 158 | 1597 |
| Probe | TET-5′-ggaagctctcctttgacactcgttcc-3′- | 26 | 197 | 1598 |
| | TAMRA | | | |
| Reverse | 5′-acccatggtcttccagaaag-3′ | 20 | 231 | 1599 |

[1626] TABLE BJB
Panel 4.1D

| Tissue Name | A |
|---|---|
| Secondary Th1 act | 55.1 |
| Secondary Th2 act | 87.7 |
| Secondary Tr1 act | 82.9 |
| Secondary Th1 rest | 30.4 |
| Secondary Th2 rest | 43.2 |
| Secondary Tr1 rest | 38.7 |
| Primary Th1 act | 57.4 |
| Primary Th2 act | 100.0 |
| Primary Tr1 act | 62.0 |
| Primary Th1 rest | 28.3 |
| Primary Th2 rest | 21.5 |
| Primary Tr1 rest | 42.0 |
| CD45RA CD4 lymphocyte act | 40.9 |
| CD45RO CD4 lymphocyte act | 84.1 |
| CD8 lymphocyte act | 70.2 |
| Secondary CD8 lymphocyte rest | 56.6 |
| Secondary CD8 lymphocyte act | 26.6 |
| CD4 lymphocyte none | 36.1 |
| 2ry Th1/Th2/Tr1 anti-CD95 CH11 | 67.4 |
| LAK cells rest | 38.2 |
| LAK cells IL-2 | 46.0 |
| LAK cells IL-2 + IL-12 | 42.3 |
| LAK cells IL-2 + IFN gamma | 25.7 |
| LAK cells IL-2 + IL-18 | 35.4 |
| LAK cells PMA/ionomycin | 47.0 |
| NK Cells IL-2 rest | 74.7 |
| Two Way MLR 3 day | 36.3 |
| Two Way MLR 5 day | 19.6 |
| Two Way MLR 7 day | 58.6 |
| PBMC rest | 26.1 |
| PBMC PWM | 10.9 |
| PBMC PHA-L | 42.9 |
| Ramos (B cell) none | 18.9 |
| Ramos (B cell) ionomycin | 6.1 |
| B lymphocytes PWM | 27.7 |
| B lymphocytes CD40L and IL-4 | 48.0 |
| EOL-1 dbcAMP | 21.2 |
| EOL-1 dbcAMP PMA/ionomycin | 31.4 |
| Dendritic cells none | 17.4 |
| Dendritic cells LPS | 10.7 |
| Dendritic cells anti-CD40 | 16.7 |
| Monocytes rest | 29.5 |
| Monocytes LPS | 28.3 |
| Macrophages rest | 13.9 |
| Macrophages LPS | 7.6 |
| HUVEC none | 14.8 |
| HUVEC starved | 36.6 |
| HUVEC IL-1beta | 18.8 |
| HUVEC IFN gamma | 23.3 |
| HUVEC TNF alpha + IFN gamma | 11.3 |
| HUVEC TNF alpha + IL4 | 20.7 |
| HUVEC IL-11 | 12.2 |
| Lung Microvascular EC none | 21.0 |
| Lung Microvascular EC TNFalpha + IL-1beta | 15.3 |
| Microvascular Dermal EC none | 12.6 |
| Microsvasular Dermal EC TNFalpha + IL-1beta | 15.8 |
| Bronchial epithelium TNFalpha + IL1beta | 16.8 |
| Small airway epithelium none | 9.3 |
| Small airway epithelium TNFalpha + IL-1beta | 14.2 |
| Coronery artery SMC rest | 8.9 |
| Coronery artery SMC TNFalpha + IL-1 beta | 7.3 |
| Astrocytes rest | 9.8 |
| Astrocytes TNFalpha + IL-1beta | 8.2 |
| KU-812 (Basophil) rest | 11.4 |
| KU-812 (Basophil) PMA/ionomycin | 18.3 |
| CCD1106 (Keratinocytes) none | 13.2 |
| CCD1106 (Keratinocytes) TNFalpha + IL-1beta | 17.3 |
| Liver cirrhosis | 9.7 |
| NCI-H292 none | 15.8 |
| NCI-H292 IL-4 | 32.5 |
| NCI-H292 IL-9 | 33.2 |
| NCI-H292 IL-13 | 45.1 |
| NCI-H292 IFN gamma | 12.8 |
| HPAEC none | 24.3 |
| HPAEC TNF alpha + IL-1 beta | 36.6 |
| Lung fibroblast none | 18.7 |
| Lung fibroblast TNF alpha + IL-1 beta | 2.9 |
| Lung fibroblast IL-4 | 6.4 |
| Lung fibroblast IL-9 | 17.4 |
| Lung fibroblast IL-13 | 15.5 |
| Lung fibroblast IFN gamma | 14.9 |
| Dermal fibroblast CCD1070 rest | 17.9 |
| Dermal fibroblast CCD1070 TNF alpha | 67.8 |
| Dermal fibroblast CCD1070 IL-1 beta | 15.2 |
| Dermal fibroblast IFN gamma | 9.7 |
| Dermal fibroblast IL-4 | 44.1 |
| Dermal Fibroblasts rest | 16.6 |
| Neutrophils TNFa + LPS | 2.4 |
| Neutrophils rest | 19.6 |
| Colon | 8.1 |
| Lung | 8.7 |
| Thymus | 84.1 |
| Kidney | 55.9 |

Column A - Rel. Exp. (%) Ag4093, Run 172383903

[1627] Panel 4.1D Summary: Ag4093 This gene was widely expressed in this panel, with highest expression in primary activated Th2 cells (CT=32.7). This gene was also expressed. at high to moderate levels in a wide range of cell types of significance in the immune response in health and disease. These cells include members of the T-cell, B-cell, endothelial cell, monocyte, and peripheral blood mononuclear cell families, as well as dermal fibroblasts and normal tissues represented from thymus and kidney. This pattern of expression shows that this gene product is involved in homeostatic processes for these and other cell types and tissues. Therefore, modulation of the gene or gene product with a functional therapeutic is useful in the alteration of functions associated with these cell types and in the treatment of the symptoms of patients suffering from autoimmune and inflammatory diseases such as asthma, allergies, inflammatory bowel disease, lupus erythematosus, psoriasis, rheumatoid arthritis, and osteoarthritis.

[1628] BK. CG98011-01: Insulin-like Growth Factor Binding Protein

[1629] Expression of gene CG9801 1-01 was assessed using the primer-probe set Ag2120, described in Table BKA. Results of the RTQ-PCR runs are shown in Tables BKB, BKC, BKD and BKE.

TABLE BKA
Probe Name Ag2120

| | | | | |
|---|---|---|---|---|
| | +HL,6 | | | SEQ |
| | | | Start | ID |
| Primers | Sequences | Length | Position | No |

| | | | | |
|---|---|---|---|---|
| Forward | 5′-gctgattgcaagaagatgtttc-3′ | 22 | 103 | 1600 |
| Probe | TET-5′-ttttgtcagccctgatttcttcgaca-3′- | 26 | 140 | 1601 |
| Reverse | 5′-ccgatatgtcagaatctgcatt-3′ | 22 | 166 | 1602 |

[1630] TABLE BKB
Panel 1.3D

| Tissue Name | A | B |
|---|---|---|
| Liver adenocarcinoma | 0.5 | 0.1 |
| Pancreas | 0.3 | 0.2 |
| Pancreatic ca. CAPAN 2 | 1.0 | 1.1 |
| Adrenal gland | 12.8 | 10.8 |
| Thyroid | 2.1 | 1.3 |
| Salivary gland | 0.6 | 1.1 |
| Pituitary gland | 0.6 | 0.3 |
| Brain (fetal) | 7.9 | 8.8 |
| Brain (whole) | 26.8 | 23.8 |
| Brain (amygdala) | 27.5 | 17.8 |
| Brain (cerebellum) | 17.4 | 19.2 |
| Brain (hippocampus) | 64.6 | 58.6 |
| Brain (substantia nigra) | 2.2 | 3.5 |
| Brain (thalamus) | 3.6 | 3.0 |
| Cerebral Cortex | 100.0 | 100.0 |
| Spinal cord | 0.5 | 1.2 |
| glio/astro U87-MG | 0.8 | 0.5 |
| glio/astro U-118-MG | 3.2 | 4.7 |
| astrocytoma SW1783 | 0.7 | 0.8 |
| neuro*; met SK-N-AS | 0.4 | 0.2 |
| astrocytoma SF-539 | 0.4 | 0.3 |
| astrocytoma SNB-75 | 0.5 | 0.2 |
| glioma SNB-19 | 0.4 | 1.2 |
| glioma U251 | 1.6 | 1.3 |
| glioma SF-295 | 1.9 | 0.8 |
| Heart (Fetal) | 3.3 | 2.2 |
| Heart | 0.3 | 0.6 |
| Skeletal muscle (Fetal) | 6.8 | 9.3 |
| Skeletal muscle | 3.4 | 4.0 |
| Bone marrow | 0.9 | 1.6 |
| Thymus | 0.9 | 0.5 |
| Spleen | 0.4 | 0.1 |
| Lymph node | 1.2 | 0.6 |
| Colorectal | 1.6 | 1.1 |
| Stomach | 1.0 | 0.2 |
| Small intestine | 0.2 | 2.0 |
| Colon ca. SW480 | 0.8 | 1.6 |
| Colon ca.* SW620 (SW480 met) | 0.0 | 1.4 |
| Colon ca. HT29 | 0.2 | 0.5 |
| Colon ca. HCT-116 | 0.3 | 0.2 |
| Colon ca. CaCo-2 | 0.6 | 0.0 |
| CC Well to Mod Diff (ODO3866) | 1.5 | 0.5 |
| Colon ca. HCC-2998 | 0.6 | 0.3 |
| Gastric ca. (liver met) NCI-N87 | 0.5 | 1.2 |
| Bladder | 1.8 | 1.0 |
| Trachea | 0.6 | 1.3 |
| Kidney | 1.3 | 2.5 |
| Kidney (fetal) | 1.7 | 4.0 |
| Renal ca. 786-0 | 3.8 | 3.7 |
| Renal ca. A498 | 2.6 | 3.0 |
| Renal ca. RXF 393 | 2.2 | 2.3 |
| Renal ca. ACHN | 1.1 | 0.8 |
| Renal ca. UO-31 | 0.5 | 1.2 |
| Renal ca. TK-10 | 3.7 | 3.6 |
| Liver | 0.8 | 0.0 |
| Liver (fetal) | 0.2 | 0.1 |
| Liver ca. (hepatoblast) HepG2 | 0.7 | 0.8 |
| Lung | 0.2 | 0.7 |
| Lung (fetal) | 0.4 | 0.6 |
| Lung ca. (small cell) LX-1 | 1.2 | 0.1 |
| Lung ca. (small cell) NCI-H69 | 44.8 | 40.9 |
| Lung ca. (s. cell var.) SHP-77 | 5.6 | 5.2 |
| Lung ca. (large cell)NCI-H460 | 54.3 | 74.2 |
| Lung ca. (non-sm. cell) A549 | 0.5 | 0.0 |
| Lung ca. (non-s. cell) NCI-H23 | 1.5 | 2.0 |
| Lung ca. (non-s. cell) HOP-62 | 7.0 | 5.3 |
| Lung ca. (non-s. cl) NCI-H522 | 1.1 | 0.0 |
| Lung ca. (squam.) SW 900 | 0.3 | 0.8 |
| Lung ca. (squam.) NCI-H596 | 8.4 | 11.1 |
| Mammary gland | 2.4 | 2.0 |
| Breast ca.* (pl. ef) MCF-7 | 1.0 | 0.7 |
| Breast ca.* (pl. ef) MDA-MB-231 | 0.0 | 0.0 |
| Breast ca.* (pl. ef) T47D | 17.3 | 18.7 |
| Breast ca. BT-549 | 4.2 | 4.7 |
| Breast ca. MDA-N | 9.3 | 9.9 |
| Ovary | 12.4 | 9.9 |
| Ovarian ca. OVCAR-3 | 0.1 | 0.0 |
| Ovarian ca. OVCAR-4 | 0.5 | 2.7 |
| Ovarian ca. OVCAR-5 | 0.9 | 0.9 |
| Ovarian ca. OVCAR-8 | 2.1 | 4.0 |
| Ovarian ca. IGROV-1 | 0.4 | 0.3 |
| Ovarian ca. (ascites) SK-OV-3 | 0.8 | 0.1 |
| Uterus | 1.2 | 0.7 |
| Placenta | 1.8 | 0.1 |
| Prostate | 0.5 | 0.6 |
| Prostate ca.* (bone met) PC-3 | 3.1 | 2.2 |
| Testis | 1.2 | 1.3 |
| Melanoma Hs688(A).T | 0.8 | 0.9 |
| Melanoma* (met) Hs688(B).T | 1.2 | 2.7 |
| Melanoma UACC-62 | 0.7 | 0.7 |
| Melanoma M14 | 4.0 | 5.5 |
| Melanoma LOX IMVI | 1.6 | 0.3 |
| Melanoma* (met) SK-MEL-5 | 4.2 | 3.7 |
| Adipose | 3.1 | 1.9 |

Column A - Rel. Exp. (%) Ag2120, Run 149975625
Column B - Rel. Exp. (%) Ag2120, Run 150253839

[1631] TABLE BKC
Panel 2D

| Tissue Name | A | B |
|---|---|---|
| Normal Colon | 7.3 | 7.4 |
| CC Well to Mod Diff (ODO3866) | 4.3 | 7.9 |
| CC Margin (ODO3866) | 1.7 | 2.9 |
| CC Gr.2 rectosigmoid (ODO3868) | 2.3 | 1.5 |
| CC Margin (ODO3868) | 1.7 | 3.8 |
| CC Mod Diff (ODO3920) | 0.2 | 0.9 |
| CC Margin (ODO3920) | 0.1 | 2.5 |
| CC Gr.2 ascend colon (ODO3921) | 0.5 | 0.4 |
| CC Margin (ODO3921) | 5.8 | 6.4 |
| CC from Partial Hepatectomy | 6.1 | 8.7 |
| (ODO4309) Mets | | |
| Liver Margin (ODO4309) | 4.0 | 2.2 |
| Colon mets to lung (OD04451-01) | 0.0 | 0.3 |
| Lung Margin (OD04451-02) | 2.9 | 3.9 |
| Normal Prostate 6546-1 | 3.0 | 7.8 |
| Prostate Cancer (OD04410) | 8.5 | 9.0 |
| Prostate Margin (OD04410) | 23.5 | 21.5 |
| Prostate Cancer (OD04720-01) | 7.3 | 7.1 |
| Prostate Margin (OD04720-02) | 1.7 | 11.3 |
| Normal Lung | 9.2 | 7.2 |
| Lung Met to Muscle (ODO4286) | 0.7 | 0.7 |
| Muscle Margin (ODO4286) | 11.3 | 12.5 |
| Lung Malignant Cancer (OD03126) | 7.9 | 4.7 |
| Lung Margin (OD03126) | 6.4 | 7.5 |
| Lung Cancer (OD04404) | 3.0 | 3.8 |
| Lung Margin (OD04404) | 2.6 | 2.8 |
| Lung Cancer (OD04565) | 1.8 | 3.4 |
| Lung Margin (OD04565) | 3.6 | 2.8 |
| Lung Cancer (OD04237-01) | 22.5 | 17.3 |
| Lung Margin (OD04237-02) | 3.5 | 4.5 |
| Ocular Mel Met to Liver (ODO4310) | 2.1 | 4.1 |
| Liver Margin (ODO4310) | 1.2 | 1.2 |
| Melanoma Metastasis | 2.5 | 1.7 |
| Lung Margin (OD04321) | 5.3 | 3.3 |
| Normal Kidney | 93.3 | 100.0 |
| Kidney Ca, Nuclear grade 2 (OD04338) | 55.9 | 92.7 |
| Kidney Margin (OD04338) | 37.9 | 36.6 |
| Kidney Ca Nuclear grade 1/2 (OD04339) | 67.4 | 76.3 |
| Kidney Margin (OD04339) | 25.3 | 33.2 |
| Kidney Ca, Clear cell type (OD04340) | 52.5 | 43.5 |
| Kidney Margin (OD04340) | 0.0 | 35.6 |
| Kidney Ca, Nuclear grade 3 (OD04348) | 5.0 | 7.6 |
| Kidney Margin (OD04348) | 20.7 | 26.6 |
| Kidney Cancer (OD04622-01) | 9.3 | 7.3 |
| Kidney Margin (OD04622-03) | 7.1 | 10.2 |
| Kidney Cancer (OD04450-01) | 27.0 | 29.3 |
| Kidney Margin (OD04450-03) | 34.2 | 33.7 |
| Kidney Cancer 8120607 | 4.1 | 3.3 |
| Kidney Margin 8120608 | 9.2 | 12.8 |
| Kidney Cancer 8120613 | 2.2 | 3.3 |
| Kidney Margin 8120614 | 7.3 | 14.9 |
| Kidney Cancer 9010320 | 22.4 | 26.4 |
| Kidney Margin 9010321 | 18.3 | 26.8 |
| Normal Uterus | 9.6 | 8.6 |
| Uterine Cancer 064011 | 2.7 | 2.6 |
| Normal Thyroid | 5.1 | 5.3 |
| Thyroid Cancer | 39.2 | 44.1 |
| Thyroid Cancer A302152 | 30.8 | 24.5 |
| Thyroid Margin A302153 | 3.3 | 3.6 |
| Normal Breast | 5.0 | 4.5 |
| Breast Cancer | 0.8 | 1.7 |
| Breast Cancer (OD04590-01) | 9.7 | 7.6 |
| Breast Cancer Mets (OD04590-03) | 26.1 | 33.4 |
| Breast Cancer Metastasis | 3.4 | 4.1 |
| Breast Cancer | 3.3 | 4.4 |
| Breast Cancer | 7.2 | 8.3 |
| Breast Cancer 9100266 | 3.1 | 3.7 |
| Breast Margin 9100265 | 3.3 | 3.9 |
| Breast Cancer A209073 | 8.2 | 8.9 |
| Breast Margin A209073 | 16.2 | 11.6 |
| Normal Liver | 1.4 | 0.9 |
| Liver Cancer | 1.8 | 5.1 |
| Liver Cancer 1025 | 1.3 | 2.0 |
| Liver Cancer 1026 | 3.4 | 2.4 |
| Liver Cancer 6004-T | 1.6 | 0.4 |
| Liver Tissue 6004-N | 1.3 | 1.0 |
| Liver Cancer 6005-T | 0.0 | 6.5 |
| Liver Tissue 6005-N | 1.6 | 0.3 |
| Normal Bladder | 3.4 | 9.5 |
| Bladder Cancer | 10.7 | 6.5 |
| Bladder Cancer | 1.8 | 2.1 |
| Bladder Cancer (OD04718-01) | 1.7 | 5.2 |
| Bladder Normal Adjacent (OD04718-03) | 4.2 | 6.3 |
| Normal Ovary | 9.5 | 7.4 |
| Ovarian Cancer | 100.0 | 95.3 |
| Ovarian Cancer (OD04768-07) | 4.6 | 7.6 |
| Ovary Margin (OD04768-08) | 7.3 | 5.7 |
| Normal Stomach | 1.7 | 3.8 |
| Gastric Cancer 9060358 | 2.1 | 0.5 |
| Stomach Margin 9060359 | 1.6 | 3.1 |
| Gastric Cancer 9060395 | 3.3 | 3.1 |
| Stomach Margin 9060394 | 2.2 | 3.3 |
| Gastric Cancer 9060397 | 11.0 | 14.5 |
| Stomach Margin 9060396 | 2.8 | 4.3 |
| Gastric Cancer 064005 | 2.2 | 6.5 |

Column A - Rel. Exp. (%) Ag2120, Run 149975659
Column B - Rel. Exp. (%) Ag2120, Run 150010138

[1632] TABLE BKD
Panel 4D

| Tissue Name | A |
|---|---|
| Secondary Th1 act | 0.4 |
| Secondary Th2 act | 0.8 |
| Secondary Tr1 act | 3.1 |
| Secondary Th1 rest | 3.4 |
| Secondary Th2 rest | 1.5 |
| Secondary Tr1 rest | 1.5 |
| Primary Th1 act | 0.3 |
| Primary Th2 act | 0.8 |
| Primary Tr1 act | 0.4 |
| Primary Th1 rest | 3.1 |
| Primary Th2 rest | 5.5 |
| Primary Tr1 rest | 0.6 |
| CD45RA CD4 lymphocyte act | 1.3 |
| CD45RO CD4 lymphocyte act | 2.4 |
| CD8 lymphocyte act | 2.2 |
| Secondary CD8 lymphocyte rest | 4.8 |
| Secondary CD8 lymphocyte act | 2.4 |
| CD4 lymphocyte none | 0.9 |
| 2ry Th1/Th2/Tr1 anti-CD95 CH11 | 0.7 |
| LAK cells rest | 7.2 |
| LAK cells IL-2 | 0.4 |
| LAK cells IL-2 + IL-12 | 2.8 |
| LAK cells IL-2 + IFN gamma | 7.7 |
| LAK cells IL-2 + IL-18 | 4.1 |
| LAK cells PMA/ionomycin | 3.2 |
| NK Cells IL-2 rest | 2.3 |
| Two Way MLR 3 day | 2.7 |
| Two Way MLR 5 day | 4.0 |
| Two Way MLR 7 day | 5.2 |
| PBMC rest | 6.4 |
| PBMC PWM | 5.2 |
| PBMC PHA-L | 1.8 |
| Ramos (B cell) none | 3.9 |
| Ramos (B cell) ionomycin | 1.6 |
| B lymphocytes PWM | 0.0 |
| B lymphocytes CD40L and IL-4 | 3.2 |
| EOL-1 dbcAMP | 67.4 |
| EOL-1 dbcAMP PMA/ionomycin | 56.6 |
| Dendritic cells none | 6.0 |
| Dendritic cells LPS | 15.5 |
| Dendritic cells anti-CD40 | 13.5 |
| Monocytes rest | 46.0 |
| Monocytes LPS | 4.9 |
| Macrophages rest | 47.3 |
| Macrophages LPS | 24.8 |
| HUVEC none | 10.2 |
| HUVEC starved | 23.8 |
| HUVEC IL-1beta | 11.2 |
| HUVEC IFN gamma | 10.1 |
| HUVEC TNF alpha + IFN gamma | 4.1 |
| HUVEC TNF alpha + IL4 | 13.2 |
| HUVEC IL-11 | 8.1 |
| Lung Microvascular EC none | 3.2 |
| Lung Microvascular EC TNFalpha + IL-1beta | 2.4 |
| Microvascular Dermal EC none | 0.0 |
| Microsvasular Dermal EC TNFalpha + IL-1beta | 0.0 |
| Bronchial epithelium TNFalpha + IL1beta | 3.1 |
| Small airway epithelium none | 5.4 |
| Small airway epithelium TNFalpha + IL-1beta | 3.0 |
| Coronery artery SMC rest | 35.6 |
| Coronery artery SMC TNFalpha + IL-1beta | 39.0 |
| Astrocytes rest | 1.1 |
| Astrocytes TNFalpha + IL-1beta | 0.9 |
| KU-812 (Basophil) rest | 0.5 |
| KU-812 (Basophil) PMA/ionomycin | 2.0 |
| CCD1106 (Keratinocytes) none | 0.9 |
| CCD1106 (Keratinocytes) TNFalpha + IL-1beta | 2.6 |
| Liver cirrhosis | 5.5 |
| Lupus kidney | 9.3 |
| NCI-H292 none | 2.0 |
| NCI-H292 IL-4 | 5.3 |
| NCI-H292 IL-9 | 3.8 |
| NCI-H292 IL-13 | 1.3 |
| NCI-H292 IFN gamma | 3.4 |
| HPAEC none | 9.0 |
| HPAEC TNF alpha + IL-1 beta | 15.4 |
| Lung fibroblast none | 1.7 |
| Lung fibroblast TNF alpha + IL-1 beta | 0.0 |
| Lung fibroblast IL-4 | 2.8 |
| Lung fibroblast IL-9 | 1.6 |
| Lung fibroblast IL-13 | 1.0 |
| Lung fibroblast IFN gamma | 1.4 |
| Dermal fibroblast CCD1070 rest | 0.6 |
| Dermal fibroblast CCD1070 TNF alpha | 2.3 |
| Dermal fibroblast CCD1070 IL-1 beta | 5.4 |
| Dermal fibroblast IFN gamma | 0.5 |
| Dermal fibroblast IL-4 | 3.0 |
| IBD Colitis 2 | 5.8 |
| IBD Crohn's | 4.2 |
| Colon | 5.8 |
| Lung | 7.0 |
| Thymus | 100.0 |
| Kidney | 18.2 |

Column A - Rel. Exp. (%) Ag2120, Run 149975626

[1633] TABLE BKE
Panel CNS_1

| Tissue Name | A |
|---|---|
| BA4 Control | 46.3 |
| BA4 Control2 | 42.9 |
| BA4 Alzheimer's2 | 5.1 |
| BA4 Parkinson's | 38.4 |
| BA4 Parkinson's2 | 100.0 |
| BA4 Huntington's | 53.6 |
| BA4 Huntington's2 | 4.3 |
| BA4 PSP | 4.5 |
| BA4 PSP2 | 14.1 |
| BA4 Depression | 11.8 |
| BA4 Depression2 | 3.5 |
| BA7 Control | 45.4 |
| BA7 Control2 | 37.9 |
| BA7 Alzheimer's2 | 8.5 |
| BA7 Parkinson's | 11.7 |
| BA7 Parkinson's2 | 54.3 |
| BA7 Huntington's | 41.2 |
| BA7 Huntington's2 | 34.2 |
| BA7 PSP | 36.1 |
| BA7 PSP2 | 21.2 |
| BA7 Depression | 4.5 |
| BA9 Control | 18.0 |
| BA9 Control2 | 76.3 |
| BA9 Alzheimer's | 8.0 |
| BA9 Alzheimer's2 | 4.6 |
| BA9 Parkinson's | 28.7 |
| BA9 Parkinson's2 | 55.5 |
| BA9 Huntington's | 34.2 |
| BA9 Huntington's2 | 4.7 |
| BA9 PSP | 11.6 |
| BA9 PSP2 | 3.8 |
| BA9 Depression | 5.0 |
| BA9 Depression2 | 3.2 |
| BA17 Control | 36.9 |
| BA17 Control2 | 62.0 |
| BA17 Alzheimer's2 | 2.9 |
| BA17 Parkinson's | 13.4 |
| BA17 Parkinson's2 | 61.1 |
| BA17 Huntington's | 27.9 |
| BA17 Huntington's2 | 8.4 |
| BA17 Depression | 2.3 |
| BA17 Depression2 | 10.1 |
| BA17 PSP | 20.0 |
| BA17 PSP2 | 10.5 |
| Sub Nigra Control | 10.6 |
| Sub Nigra Control2 | 29.1 |
| Sub Nigra Alzheimer's2 | 5.8 |
| Sub Nigra Parkinson's2 | 20.6 |
| Sub Nigra Huntington's | 21.5 |
| Sub Nigra Huntington's2 | 14.7 |
| Sub Nigra PSP2 | 3.6 |
| Sub Nigra Depression | 3.2 |
| Sub Nigra Depression2 | 2.4 |
| Glob Palladus Control | 1.8 |
| Glob Palladus Control2 | 7.8 |
| Glob Palladus Alzheimer's | 6.4 |
| Glob Palladus Alzheimer's2 | 2.5 |
| Glob Palladus Parkinson's | 34.4 |
| Glob Palladus Parkinson's2 | 3.1 |
| Glob Palladus PSP | 5.2 |
| Glob Palladus PSP2 | 0.0 |
| Glob Palladus Depression | 3.7 |
| Temp Pole Control | 11.0 |
| Temp Pole Control2 | 40.1 |
| Temp Pole Alzheimer's | 2.7 |
| Temp Pole Alzheimer's2 | 3.4 |
| Temp Pole Parkinson's | 13.9 |
| Temp Pole Parkinson's2 | 20.7 |
| Temp Pole Huntington's | 27.5 |
| Temp Pole PSP | 2.5 |
| Temp Pole PSP2 | 3.7 |
| Temp Pole Depression2 | 1.8 |
| Cing Gyr Control | 70.7 |
| Cing Gyr Control2 | 23.8 |
| Cing Gyr Alzheimer's | 13.8 |
| Cing Gyr Alzheimer's2 | 7.7 |
| Cing Gyr Parkinson's | 13.2 |
| Cing Gyr Parkinson's2 | 23.0 |
| Cing Gyr Huntington's | 40.3 |
| Cing Gyr Huntington's2 | 12.9 |
| Cing Gyr PSP | 7.6 |
| Cing Gyr PSP2 | 5.6 |
| Cing Gyr Depression | 4.1 |
| Cing Gyr Depression2 | 4.6 |

Column A - Rel. Exp. (%) Ag2120, Run 171649389

[1634] Panel 1.3D Summary: Ag2120 Expression of this gene was highest in the cerebral cortex (CT value=29). Moderate expression was detected in all other regions of the brain except thalamus and substantia nigra, demonstrating that this gene is associated with normal brain homeostasis. This protein showed a brain-preferential expression, see write-up on Panel CNS.01 for discussion of utility. In addition, expression of this gene was down-regulated in CNS cancer cell lines. Over-expression of this gene was also detected in several lung cancer cell lines relative to normal control. Therefore, this gene is useful for the detection or treatment of CNS and lung cancers.

[1635] Panel 2D Summary: Ag2120 Expression of this gene in panel 2D revealed an association of expression in thyroid, breast and kidney cancers when compared to their respective normal adjacent tissues. Thus, therapeutic modulation of this gene with inhibitory monoclonal antibodies and/or small molecule therapeutics is useful in treatment of these diseases. In addition, the SC98428706_EXT gene might be useful as a marker for thyroid, breast and kidney cancers.

[1636] Panel 4D Summary: Ag 2120 This gene showed highest expression levels in the thymus. (CT value=31). The transcript was also expressed in eosinophils, monocytes, macrophages and coronary artery. It was down regulated in LPS-treated monocytes and to a lesser degree in LPS treated macrophages. Therefore, protein therapeutics (agonists or antagonists) designed against the protein encoded for by this transcript are useful for reducing the inflammatory process observed in asthma, emphysema, osteoarthritis and sepsis.

[1637] Panel CNS_{—}1 Summary: Ag2120 Insulin and insulin-like growth factors belong to a family of polypeptides essential for proper regulation of physiologic processes such as energy metabolism, cell proliferation, development, and differentiation. The insulin-like growth factors bind to IGF with high affinity and compete with the IGF receptor for IGF binding. Transgenic mice over expressing insulin-like growth factor binding proteins (IGFBPs) tend to show brain developmental abnormalities, suggesting a role for these proteins in neurodevelopment. Furthermore, treatment with glycosaminoglycans (which increases muscle re-innervation after motor neuron death) upregulates serum levels of both IGF and IGFBP. Thus, the novel IGFBP encoded by this gene is useful in the treatment of diseases such as ALS, multiple sclerosis, and peripheral nerve injury on the basis of its homology to other established IGFBPS. The expression profile of this gene shows that it is expressed preferentially in the brain, with highest levels in the cerebral cortex and hippocampus, two regions that are known to degenerate in Alzheimer's disease. Examination of the expression profile on Panel CNS.01 showed that most regions of both control and diseased brains express this protein; however the levels were decreased in the motor cortex in progressive supranuclear palsy and depression. Thus, this protein is of use in the treatment of Alzheimer's disease, progressive supranuclear palsy, and depression.

### Example D

### CG56008, NOV53

### DETAILED DESCRIPTION

[1638] The present invention is based in part on the discovery that reducing the amount of LIV-1 mRNA present in tumor derived cells results in strongly reduced cell growth. The expression of this gene in tumor-derived cells was first defined using RTQPCR analysis.

[1639] The RTQPCR analysis of panel 1.3d reveals that this gene has a restricted high expression in 5 breast cancer cell lines, with the highest expression in MCF-7 breast cancer cells. This gene is present in normal tissues at low levels (FIG. 1). The specific high expression in breast cancer cell lines indicates a role in breast cancer progression. This is further supported by the analysis of panel 2d that reveals how LIV-1 is upregulated specifically in breast cancers, comparing to the normal adjacent tissues (FIG. 2). Based upon its profile, the expression of this gene could be of use as a marker for the presence of breast cancer in a subject, specifically in a subject blood. In addition, down-regulation of the activity of this gene, through the use of antibodies or antisense oligonucleotide, might be of use in the treatment of breast cancer.

[1640] The expression profiles of this gene on our RTQPCR panels indicate that this gene may be involved in regulating cancer cell proliferation and oncogenesis. To confirm whether LIV-1 expression is required for cell growth, we used antisense technology to examine the effect of decreasing LIV-1 gene expression on breast cancer cell proliferation. This technology has been used to asses the biological/therapeutic effect of reducing (knockdown) the expression of a gene (see Tamm et al., Lancet 2001 August 11;358(9280):489-97 for a review of the current use of this technology in the biomedical field)

[1641] As shown in FIG. 4, transfection of LIV-1 antisense oligonucleotide AS4 at 400 nM concentration inhibited T47D breast carcinoma cell growth more than 50% (P=0.000189), whereas transfection of scramble antisense control had little effect on cell growth. We observed less inhibitory effect with LIV-1 antisense oligo AS4 transfection in Ovcar4 cells in which the expression of LIV-1 is much lower (P=0.138366) (FIG. 5). Knockdown of LIV-1 transcripts by antisense oligonucleotides was validated by RTQPCR. As shown in FIG. 6, transfection of antisense oligo AS4 resulted in 50% knockdown of LWV-1 expression at the mRNA level.

[1642] Therefore, our results suggested that LIV-1 expression is involved in cell proliferation. The inhibition of the activity of this gene through the use of antibodies or antisense oligonucleotides, mnight be of use in the treatment of breast cancer.

### Example D1

### Expression Analysis of LIV-1 in Various Tissues

RTOPCR Probe/Primer Information for LIV-1

[1643] RTQPCR Probe/Primers Set Ag2169

(SEQ ID NO: 1603)

Ag 2169 (F):
5′-CCCGAAAAGGCTTTATGTATTC-3′

(SEQ ID NO: 1604)

Ag 2169 (R):
5′-TGTCAGTAGCTTTGATGCATTG-3′

(SEQ ID NO: 1605)

Ag 2169 (P):
FAM-5′-CAGAAACACAAATGAAAATCCTCAGGA-3′-TAMRA

[1644] TABLE D1
RTQPCR results for Panel 1.3d.

| | Rel. Expr., % | Rel. Expr., % |
|---|---|---|
| | 1.3dtm3016f_{—} | 1.3Dtm3183f_{—} |
| Tissue Name | ag2169 | ag2169 |
| Liver adenocarcinoma | 1.8 | 2 |
| Pancreas | 1 | 0.4 |
| Pancreatic ca. CAPAN 2 | 1 | 1 |
| Adrenal gland | 0.8 | 0.6 |
| Thyroid | 2 | 0.9 |
| Salivary gland | 1.2 | 0.8 |
| Pituitary gland | 3.1 | 2.2 |
| Brain (fetal) | 2.2 | 1.7 |
| Brain (whole) | 2.6 | 2.1 |
| Brain (amygdala) | 2 | 1.1 |
| Brain (cerebellum) | 1.4 | 0.9 |
| Brain (hippocampus) | 6.1 | 4.4 |
| Brain (substantia nigra) | 0.5 | 0.8 |
| Brain (thalamus) | 2.5 | 2 |
| Cerebral Cortex | 2.8 | 3.1 |
| Spinal cord | 1.6 | 1.4 |
| glio/astro U87-MG | 1.2 | 0.8 |
| glio/astro U-118-MG | 12 | 9.3 |
| astro SW1783 | 2.8 | 3 |
| neuro; met SK-N-AS | 10.7 | 6.7 |
| astro SF-539 | 1.7 | 1.5 |
| astro SNB-75 | 2.8 | 3.8 |
| glio SNB-19 | 1 | 0.9 |
| glio U251 | 0.8 | 0.8 |
| glio SF-295 | 3.4 | 3 |
| Heart (fetal) | 0.4 | 0.5 |
| Heart | 0.2 | 0.1 |
| Fetal Skeletal | 1.2 | 1.4 |
| Skeletal muscle | 0.2 | 0.2 |
| Bone marrow | 0.4 | 0.2 |
| Thymus | 0.3 | 0.3 |
| Spleen | 1.1 | 0.8 |
| Lymph node | 0.8 | 0.5 |
| Colorectal | 0.3 | 0.2 |
| Stomach | 1.5 | 0.8 |
| Small intestine | 0.9 | 0.5 |
| Colon SW480 | 1.6 | 1.2 |
| Colon SW620(SW480 met) | 0.7 | 0.5 |
| Colon HT29 | 0.8 | 0.6 |
| Colon HCT-116 | 4.2 | 3.1 |
| Colon CaCo-2 | 0.9 | 1.1 |
| Colon Ca tissue(ODO3866) | 1.3 | 1.2 |
| Colon HCC-2998 | 2.1 | 1.6 |
| Gastric(liver met) NCI-N87 | 2 | 1.6 |
| Bladder | 1 | 0.6 |
| Trachea | 1.6 | 1.6 |
| Kidney | 0.5 | 0.5 |
| Kidney (fetal) | 1.1 | 0.8 |
| Renal 786-0 | 2.6 | 1.7 |
| Renal A498 | 4.2 | 3.2 |
| Renal RXF 393 | 1.2 | 0.8 |
| Renal ACHN | 2.6 | 2.7 |
| Renal UO-31 | 3.3 | 2.4 |
| Renal TK-10 | 2 | 1.5 |
| Liver | 0.1 | 0 |
| Liver (fetal) | 0.5 | 0.3 |
| Liver (hepatoblast) HepG2 | 1.5 | 1.3 |
| Lung | 0.8 | 0.6 |
| Lung (fetal) | 1.5 | 1.5 |
| Lung (small cell) LX-1 | 1 | 0.7 |
| Lung (small cell) NCI-H69 | 10 | 6.3 |
| Lung (s. cell var.) SHP-77 | 3.9 | 4.9 |
| Lung (large cell)NCI-H460 | 1.3 | 1.2 |
| Lung (non-sm. cell) A549 | 0.9 | 0.6 |
| Lung (non-s. cell) NCI-H23 | 5.4 | 0 |
| Lung (non-s. cell) HOP-62 | 1.8 | 2 |
| Lung (non-s. cl) NCI-H522 | 1.8 | 1.2 |
| Lung (squam.) SW 900 | 1.2 | 0.8 |
| Lung (squam.) NCI-H596 | 3.1 | 3 |
| Mammary gland | 11.7 | 10.4 |
| Breast (pl. ef) MCF-7 | 100 | 100 |
| Breast (pl.ef) MDA-MB-231 | 2.5 | 2.1 |
| Breast (pl.ef) T47D | 5.7 | 3.3 |
| Breast BT-549 | 4.5 | 3.6 |
| Breast MDA-N | 2.6 | 2.8 |
| Ovary | 2 | 1.3 |
| Ovarian OVCAR-3 | 2.2 | 2 |
| Ovarian OVCAR-4 | 0.3 | 0.2 |
| Ovarian OVCAR-5 | 0.6 | 0.5 |
| Ovarian OVCAR-8 | 1.6 | 0.9 |
| Ovarian IGROV-1 | 0.8 | 0.5 |
| Ovarian (ascites) SK-OV-3 | 4 | 3.2 |
| Uterus | 1.1 | 0.8 |
| Plancenta | 3.4 | 2.1 |
| Prostate | 5.5 | 4.6 |
| Prostate (bone met)PC-3 | 2 | 1.3 |
| Testis | 1.9 | 1.6 |
| Melanoma Hs688(A).T | 4.8 | 4.8 |
| Melanoma (met) Hs688(B).T | 6.2 | 5.2 |
| Melanoma UACC-62 | 0.3 | 0.3 |
| Melanoma M14 | 2.8 | 2.6 |
| Melanoma LOX IMVI | 0.6 | 0.4 |
| Melanoma (met) SK-MEL-5 | 7.1 | 5.1 |
| Adipose | 1.2 | 0.8 |

[1645] TABLE D2
RTQPCR results for Panel 2d.

| | Rel. Expr., % | Rel. Expr., % |
|---|---|---|
| Tissue Name | 2Dtm2969f_ag2169 | 2dtm3017f_ag2169 |
| Normal Colon | 3.2 | 3.1 |
| CCa 1 | 0.6 | 0.5 |
| CCa 1 Margin | 0.2 | 0.4 |
| CCa 2 | 0.1 | 0.2 |
| CCa 2 Margin | 0.2 | 0.1 |
| CCa 3 | 0.2 | 0.2 |
| CCa 3 Margin | 0.3 | 0.2 |
| CCa 4 | 1 | 1.1 |
| CCa 4 Margin | 0.3 | 0.4 |
| CCa 5 Metastasis | 1.6 | 1.8 |
| CCa 5 Margin (Liver) | 0.5 | 0.4 |
| CCa 6 Metastatsis | 0.2 | 0.2 |
| CCa 6 Margin (Lung) | 0.4 | 0.3 |
| Normal Prostate | 7.7 | 7.9 |
| PCa 1 | 15.1 | 18.7 |
| PCa 1 Margin | 7.4 | 7.9 |
| PCa 2 | 3.4 | 4 |
| PCa 2 Margin | 6.7 | 7.3 |
| Normal Lung | 1.4 | 1.6 |
| LCa 1 Metastasis | 1.4 | 1.5 |
| LCa 1 Margin (muscle) | 0.7 | 0.7 |
| LCa 2 | 1.7 | 2 |
| LCa 2 Margin | 1.1 | 1.3 |
| LCa 3 | 2 | 2.6 |
| LCa 3 Margin | 1 | 1.2 |
| LCa 4 | 1 | 1.1 |
| LCa 4 Margin | 0.5 | 0.5 |
| LCa 5 | 3.1 | 3.4 |
| LCa 5 Margin | 0.9 | 1 |
| Ocular Melanoma Metastasis | 3.7 | 4.1 |
| Liver Margin | 0.2 | 0.4 |
| Melanoma Metastasis | 3.5 | 4 |
| Lung Margin | 0.9 | 1.4 |
| Normal Kidney | 2.5 | 3.1 |
| RCC 1 | 2.8 | 2.8 |
| RCC 1 Margin | 1.8 | 1.9 |
| RCC 2 | 0.7 | 0.6 |
| RCC 2 Margin | 1.4 | 1.4 |
| RCC 3 | 2.5 | 3.1 |
| RCC 3 Margin | 1.8 | 1.9 |
| RCC 4 | 1 | 0.9 |
| RCC 4 Margin | 1.5 | 1.7 |
| RCC 5 | 0.9 | 0.9 |
| RCC 5 Margin | 0.2 | 0.1 |
| RCC 6 | 1.1 | 1 |
| RCC 6 Margin | 1.4 | 1.5 |
| RCC 7 | 0.5 | 0.4 |
| RCC 7 Margin | 0.3 | 0.2 |
| RCC 8 | 0.4 | 0.4 |
| RCC 8 Margin | 0.2 | 0.2 |
| RCC 9 | 0.8 | 0.9 |
| RCC 9 Margin | 0.5 | 0.6 |
| Normal Uterus | 0 | 0.4 |
| UtCa | 1.8 | 1.9 |
| Normal Thyroid | 1.4 | 1.8 |
| ThyCa 1 | 1.7 | 1.9 |
| ThyCa 2 | 0.9 | 0.9 |
| ThyCa 2 Margin | 1.5 | 1.5 |
| Normal Breast | 3.9 | 4.9 |
| BCa 1 | 19.8 | 26.2 |
| BCa 2 | 46.7 | 45.7 |
| BCa 3 Metastasis | 43.2 | 57.8 |
| BCa 4 Metastasis | 100 | 100 |
| BCa 5 | 2.4 | 2.7 |
| BCa 6 | 2.5 | 2.3 |
| BCa 7 | 41.2 | 45.7 |
| BCa 7 Margin | 5 | 5.7 |
| BCa 8 | 4 | 5.4 |
| BCa 8 Margin | 4.1 | 6.8 |
| Normal Liver | 0.2 | 0.3 |
| HCC 1 | 0.2 | 0.2 |
| HCC 2 | 0.2 | 0.1 |
| HCC 3 | 0.3 | 0.2 |
| HCC 4 | 0.2 | 0.2 |
| HCC 4 Margin | 0.5 | 0.5 |
| HCC 5 | 0.2 | 0.2 |
| HCC 5 Margin | 0 | 0 |
| Normal Bladder | 1.5 | 1.4 |
| TCC 1 | 0.3 | 0.2 |
| TCC 2 | 1.7 | 1.8 |
| TCC 3 | 3 | 3.3 |
| TCC 3 Margin | 2.9 | 1.4 |
| Normal Ovary | 0.3 | 0.3 |
| OVCa 1 | 3.3 | 3 |
| OVCa 2 | 3.1 | 3.1 |
| OVCa 2 Margin | 0.4 | 0.5 |
| Normal Stomach | 0.5 | 0.5 |
| GaCa 1 | 0.2 | 0.2 |
| GaCa 1 Margin | 0.4 | 0.4 |
| GaCa 2 | 0.8 | 0.7 |
| GaCa 2 Margin | 0.5 | 0.5 |
| GaCa 3 | 1 | 0.9 |
| GaCa 3 Margin | 0.1 | 0.1 |
| GaCa 4 | 1 | 0.8 |

### Example D2

### Antisense knockdown of LIV-1 mRNA in High-expressing and Low-expressing Tumor-derived Cell Lines

[1646] Five oligonucleotides were designed and synthesized as mixed-backbone oligonucleotides containing modified phosphorothioate segments at 5′ and 3′ ends and 2′-O-methyl RNA oligoribonucleotide segments located in the middle. The purity of the oligonucleotides was confirmed by Masspectrophometry. The oligonucleotide sequences for LIV-1 are: ASI: 5′ GATCCAGGCTCTGTCACTCAC 3′ (SEQ ID NO: 1606) (complementary to the sequence located in 5′ UTR of LIV-1). AS2: 5′ ATTATGGGATCAGCGTTC 3′ (SEQ ID NO: 1607) (complementary to the sequence surrounding ATG start codon). AS3: 5′ AGGCTTAAGATGACCACTRG 3′ (complementary to the sequence 3′ next to AS2). AS4: 5′ GTGGTGCTCGTIFCGAACAGT 3′ (SEQ ID NO: 1608) (complementary to the sequence in the middle of SLPI ORF). AS5: 5° CTGGGTCTTAGTCCGTGGCA 3′ (SEQ ID NO: 1609) (complementary to the sequence flanking the 3′ stop codon). 10,000 cells were seeded in each well of 96 well plate in compelete medium 24 hr before transfection to reach 50% confluency on the day of transfection. Oligonucleotides were diluted with Optimen to 100 and 400 nM, and mixed with Oligofectamine (Invitrogen) according to manufecture's instructions. Cells were washed with serum-free medium. The oligo and lipisome mixture were then added to cells. After 4 hr incubation period, serum were added back to cells. Readout assays were performed 24 and 48 hr after transfection. CellTiter 96Aqueous Non-Radioactive Cell Porliferation Assay Kit from Promega was used to determine the number of viable cells in proliferation assay. Briefly, 20 μl of combined MTS/PMS solution were diluted with 100 μl complete medium, and added to each well of the 96 well plate. After 1 hr incubation at 37° C., the absorbance at 490 nm was recorded using an ELISA plate reader.

[1647] FIG. 2. Antisense Knockdown of LIV-1 Inhibits T47D Cell Growth.

[1648] Breast cancer cell line T47D were transfected with 5 LIV-1 antisense oligonucleotides either individually or in the combinations as indicated. 72 hr after transfection, MTS assay was performed. The experiment was repeated twice with similar results. The representative data is shown. Asterisk indicates statistically significant difference on Student's 2-samples t test assuming unequal variances. P value for knockdown with AS4 comparing to scramble control at 400 nM is 0.000189.

[1649] FIG. 3. Antisense Knockdown of LIV-1 Onhibits Ovcar-4 Cell Growth.

[1650] Ovarian cancer cell line Ovcar4 were transfected with LWV-1 antisense oligonucleotides either individually or in the combinations as indicated. 72 hr after transfection, MTS assay was performed. Asterisk indicates statistically significant difference on Student's 2-samples t test assuming unequal variances. P value for knockdown with AS4 comparing to scramble control at 400 nM is 0.138366.

[1651] FIG. 4. RTOPCR Validation of Knockdown of LIV-1 Expression at mRNA Level in T47D Breast Cancer Cell Line.

[1652] T47D cells were transfected with LIV-1 antisense oligonucleotides in the combinations as indicated. 24 hr after transfection, cells were lysed in cell lysis buffer, and total RNA was isolated using RNAeasy kit from Qiagen. After DNAse digestion, cDNA was synthesized using Superscript II reverse transcriptase (BRL). RTQ-PCR analysis was performed according to the standard RTQPCR operation procedures.

### Other Embodiments

[1653] Although particular embodiments are disclosed herein in detail, this is done by way of example for purposes of illustration only, and is not intended to be limiting with respect to the scope of the appended claims, which follow. In particular, it is contemplated by the inventors that various substitutions, alterations, and modifications will be made to the invention without departing from the spirit and scope of the invention as defined by the claims. The choice of nucleic acid starting material, clone of interest, or library type is believed to be a matter of routine for a person of ordinary skill in the art with knowledge of the embodiments described herein. Other aspects, advantages, and modifications considered to be within the scope of the following claims. The claims presented are representative of the inventions disclosed herein. Other, unclaimed inventions are also contemplated. Applicants reserve the right to pursue such inventions in later claims.

What is claimed is:

1. An isolated polypeptide comprising the mature form of an amino acid sequenced selected from the group consisting of SEQ ID NO:2n, wherein n is an integer between 1 and 606.

2. An isolated polypeptide comprising an amino acid sequence selected from the group consisting of SEQ ID NO:2n, wherein n is an integer between 1 and 606.

3. An isolated polypeptide comprising an amino acid sequence which is at least 95% identical to an amino acid sequence selected from the group consisting of SEQ ID NO:2n, wherein n is an integer between 1 and 606.

4. An isolated polypeptide, wherein the polypeptide comprises an amino acid sequence comprising one or more conservative substitutions in the amino acid sequence selected from the group consisting of SEQ ID NO:2n, wherein n is an integer between 1 and 606.

5. The polypeptide of claim 1 wherein said polypeptide is naturally occurring.

6. A composition comprising the polypeptide of claim 1 and a carrier.

7. A kit comprising, in one or more containers, the composition of claim 6.

8. The use of a therapeutic in the manufacture of a medicament for treating a syndrome associated with a human disease, the disease selected from a pathology associated with the polypeptide of claim 1, wherein the therapeutic comprises the polypeptide of claim 1.

9. A method for determining the presence or amount of the polypeptide of claim 1 in a sample, the method comprising:
(a) providing said sample;
(b) introducing said sample to an antibody that binds immunospecifically to the polypeptide; and
(c) determining the presence or amount of antibody bound to said polypeptide,
thereby determining the presence or amount of polypeptide in said sample.

10. A method for determining the presence of or predisposition to a disease associated with altered levels of expression of the polypeptide of claim 1 in a first mammalian subject, the method comprising:
a) measuring the level of expression of the polypeptide in a sample from the first mammalian subject; and
b) comparing the expression of said polypeptide in the sample of step (a) to the expression of the polypeptide present in a control sample from a second mammalian subject known not to have, or not to be predisposed to, said disease,
wherein an alteration in the level of expression of the polypeptide in the first subject as compared to the control sample indicates the presence of or predisposition to said disease.

11. A method of identifying an agent that binds to the polypeptide of claim 1, the method comprising:
(a) introducing said polypeptide to said agent; and
(b) determining whether said agent binds to said polypeptide.

12. The method of claim 11 wherein the agent is a cellular receptor or a downstream effector.

13. A method for identifying a potential therapeutic agent for use in treatment of a pathology, wherein the pathology is related to aberrant expression or aberrant physiological interactions of the polypeptide of claim 1, the method comprising:
(a) providing a cell expressing the polypeptide of claim 1 and having a property or function ascribable to the polypeptide;
(b) contacting the cell with a composition comprising a candidate substance; and
(c) determining whether the substance alters the property or function ascribable to the polypeptide;
whereby, if an alteration observed in the presence of the substance is not observed when the cell is contacted with a composition in the absence of the substance, the substance is identified as a potential therapeutic agent.

14. A method for screening for a modulator of activity of or of latency or predisposition to a pathology associated with the polypeptide of claim 1, said method comprising:
(a) administering a test compound to a test animal at increased risk for a pathology associated with the polypeptide of claim 1, wherein said test animal recombinantly expresses the polypeptide of claim 1;
(b) measuring the activity of said polypeptide in said test animal after administering the compound of step (a); and
(c) comparing the activity of said polypeptide in said test animal with the activity of said polypeptide. in a control animal not administered said polypeptide, wherein a change in the activity of said polypeptide in said test animal relative to said control animal indicates the test compound is a modulator activity of or latency or predisposition to, a pathology associated with the polypeptide of claim 1.

15. The method of claim 14, wherein said test animal is a recombinant test animal that expresses a test protein transgene or expresses said transgene under the control of a promoter at an increased level relative to a wild-type test animal, and wherein said promoter is not the native gene promoter of said transgene.

16. A method for modulating the activity of the polypeptide of claim 1, the method comprising contacting a cell sample expressing the polypeptide of claim 1 with a compound that binds to said polypeptide in an amount sufficient to modulate the activity of the polypeptide.

17. A method of treating or preventing a pathology associated with the polypeptide of claim 1, the method comprising administering the polypeptide of claim 1 to a subject in which such treatment or prevention is desired in an amount sufficient to treat or prevent the pathology in the subject.

18. The method of claim 17, wherein the subject is a human.

19. A method of treating a pathological state in a mammal, the method comprising administering to the mammal a polypeptide in an amount that is sufficient to alleviate the pathological state, wherein the polypeptide is a polypeptide having an amino acid sequence at least 95% identical to a polypeptide comprising the amino acid sequence selected from the group consisting of SEQ ID NO:2n, wherein n is an integer between 1 and 606 or a biologically active fragment thereof.

20. An isolated nucleic acid molecule comprising a nucleic acid sequence selected from the group consisting of SEQ ID NO:2n−1, wherein n is an integer between 1 and 606.

21. The nucleic acid molecule of claim 20, wherein the nucleic acid molecule is naturally occurring.

22. A nucleic acid molecule, wherein the nucleic acid molecule differs by a single nucleotide from a nucleic acid sequence selected from the group consisting of SEQ ID NO: 2n−1, wherein n is an integer between 1 and 606.

23. An isolated nucleic acid molecule encoding the mature form of a polypeptide having an amino acid sequence selected from the group consisting of SEQ ID NO:2n, wherein n is an integer between 1 and 606.

24. An isolated nucleic acid molecule comprising a nucleic acid selected from the group consisting of 2n−1, wherein n is an integer between 1 and 606.

25. The nucleic acid molecule of claim 20, wherein said nucleic acid molecule hybridizes under stringent conditions to the nucleofide sequence selected from the group consisting of SEQ ID NO: 2n−1, wherein n is an integer between 1 and 606, or a complement of said nucleotide sequence.

26. A vector comprising the nucleic acid molecule of claim 20.

27. The vector of claim 26, further comprising a promoter operably linked to said nucleic acid molecule.

28. A cell comprising the vector of claim 26.

29. An antibody that immunospecifically binds to the polypeptide of claim 1.

30. The antibody of claim 29, wherein the antibody is a monoclonal antibody.

31. The antibody of claim 29, wherein the antibody is a humanized antibody.

32. A method for determining the presence or amount of the nucleic acid molecule of claim 20 in a sample, the method comprising:
(a) providing said sample;
(b) introducing said sample to a probe that binds to said nucleic acid molecule; and
(c) determining the presence or amount of said probe bound to said nucleic acid molecule,
thereby determining the presence or amount of the nucleic acid molecule in said sample.

33. The method of claim 32 wherein presence or amount of the nucleic acid molecule is used as a marker for cell or tissue type.

34. The method of claim 33 wherein the cell or tissue type is cancerous.

35. A method for determining the presence of or predisposition to a disease associated with altered levels of expression of the nucleic acid molecule of claim 20 in a first mammalian subject, the method comprising:
a) measuring the level of expression of the nucleic acid in a sample from the first mammalian subject; and
b) comparing the level of expression of said nucleic acid in the sample of step (a) to the level of expression of the nucleic acid present in a control sample from a second mammalian subject known not to have or not be predisposed to, the disease;
wherein an alteration in the level of expression of the nucleic acid in the first subject as compared to the control sample indicates the presence of or predisposition to the disease.

36. A method of producing the polypeptide of claim 1, the method comprising culturing a cell under conditions that lead to expression of the polypeptide, wherein said cell comprises a vector comprising an isolated nucleic acid molecule comprising a nucleic acid sequence selected from the group consisting of SEQ ID NO:2n−1, wherein n is an integer between 1 and 606.

37. The method of claim 36 wherein the cell is a bacterial cell.

38. The method of claim 36 wherein the cell is an insect cell.

39. The method of claim 36 wherein the cell is a yeast cell.

40. The method of claim 36 wherein the cell is a mammalian cell.

41. A method of producing the polypeptide of claim 2, the method comprising culturing a cell under conditions that lead to expression of the polypeptide, wherein said cell comprises a vector comprising an isolated nucleic acid molecule comprising a nucleic acid sequence selected from the group consisting of SEQ ID NO:2n−1, wherein n is an integer between 1 and 606.

42. The method of claim 41 wherein the cell is a bacterial cell.

43. The method of claim 41 wherein the cell is an insect cell.

44. The method of claim 41 wherein the cell is a yeast cell.

45. The method of claim 41 wherein the cell is a mammalian cell.

The application's sequence listing, which the Patent Office published only in electronic form, follows.

SEQUENCE LISTING (1609 sequences)

SEQ ID NO: 1 - DNA, 4494 bp, Homo sapiens
  CDS (59)..(1393)
cgagagcgggagtgagcgagcgagcgagttgccgagcgcgccccgtccctcgcgcgcgatgctcccctggacggcgctcggcctggccctgagcttgcggctggcgctggcgcggagcggcgcagagcgcggtccaccagcatcagccccccgaggggacctgatgttcctgctggacagctcagccagcgtctctcactacgagttctcccgggttcgggagtttgtggggcagctggtggctccactgcccctgggcaccggggccctgcgtgccagtctggtgcacgtgggcagtcggccatacaccgagttccccttcggccagcacagctcgggtgaggctgcccaggatgcggtgcgtgcttctgcccagcgcatgggtgacacccacactggcctggcgctggtctatgccaaggaacagctgtttgctgaagcatcaggtgcccggccaggggtgcccaaagtgctggtgtgggtgacagatggcggctccagcgaccctgtgggcccccccatgcaggagctcaaggacctgggcgtcaccgtgttcattgtcagcaccggccgaggcaacttcctggagctgtcagccgctgcctcagcccctgccgagaagcacctgcactttgtggacgtggatgacctgcacatcattgtccaagagctgaggggctccattctcgacgcgatgcggccgcagcagctccatgccacggagatcacgtccagcggcttccgcctggcctggccacccctgctgaccgcagactcgggctactatgtgctggagctggtgcccagcgcccagccgggggctgcaagacgccagcagctgccagggaacgccacggactggatctgggccggcctcgacccggacacggactacgacgtggcgctagtgcctgagtccaacgtgcgcctcctgaggccccagatcctgcgggtgcgcacgcggcccggtgaggcagggccgggggcttcgggcccggagtcgggggctgggccggcccccacgcagctcgccgccctccccgccccagaggaggccgggccagagcgcatcgtcatctcccacgcccggccgcgcagcctccgcgtgagttgggccccagcgctgggctcagccgcggcgctcggctaccacgtgcagttcgggccgctgcggggcggggaggcgcagcgggtggaggtgcccgcgggccgcaactgcaccacgctgcagggcctggcgccgggcaccgcctacctggtgaccgtgaccgccgccttccgctcgggccgcgagagcgcgctgtccgccaaggcctgcacgcccgacggcccgcgcccgcgcccacgccccgtgccccgcgccccgaccccggggaccgccagccgtgagccgtaagccggcgtccccgcccagccgagagggccggcgcctacctgagggcccctgtgtcccgaacccggagcggaggcgcccaacccggcagacgggtgcaggcccggcctttccccacgcggactccgcgcgaccccggccctctccctgcggccgcagggcttccccgcctggcgcctgccctccagggctggggcctcgcctggcgggaccccgcagcagccccggccccatccccgcccagagccgggcgtcgtgtgggtccgtgggtgataattgagagcgtcagacccaggactgttcagggaggagccccggtcagactcccacgtgtgaagaccgggccccaagtggcaagggctggcctggggcgggcagcttgggtcctggacgttgataggaagcggaaggggaatcgcgggaagctggcccaggtcaggtccgcaaaggcttctgaagaagaggaagggcgagtaggggcacctggacgctgatggtggccaggatgctcagctggccaggagggcagcacctgctggggacggtggccctgccttcatgcccaggacaccagctgggtccagctagcagccactgggaatcagaggaatggggcagagctgggcattcaggaccttgaggacaggtgaccccacccgcccaccgccactatcaggccccgggaccgcactgacaggaaaccttccgtcgtgagggagcacttcccaggggccgcagggacgacactctccagggaggccccagcaaccacaccatcttcttgctgtgagaggtctcaccccgggctacctcctgtcactactcactgccctggggtccgtgggcaagttgcccagggtgggggtgcctagccaggtgcagtccccgccccgcctagtcctcggcgtcacgcaatgctcacctcgcctcttccccactaacatcccagactttaaaattcagtaaatcagatgtacaccgagcctgcagtctcgctaggatgctttactcctccacaaacagcagccgccgacaggacagcttgtgaacgtctccgccttttggggtgtccggggagaggaggtggagctgtcccctcccagtgtcaggcctccttggtcctcatgtgcaccttttattcagagagcttgggcccccttcctttggagctgggcccagggcaggtggctggaatgcagaggacaagggggctggggcctctgcagggccattcccaccgcagtctctgccacggcccggagccctgggcccagggccacgcgggctccctctgctggcaaagccacaccctgcaccgcatggggtccactgcccctttccccacgtggactctgcgtgaccccaggaactgcagcattgaggtggtctcagtccctccctcaggtctggtgggcattgtgccaggggccaccttcgggacagctggccttggcaccgtctcccaagaacccagctctgtgcatcccgtggccccaccagaaacccaaggccacaccgcccaccagctgggtgtggtcaccattcatggagggccggctggggccaggctcaccacgcagagtttgccctccggtgtgatgatgcatgagacacagtaggcccccctgcctgtgtgtgcagggggtgtctgtgggggggccctgctggctggactttgggtttctcctgagctccccttagcccccaagtcaggccacggaggcctgagtaggacccatgggctgtgtgtgtcactgcaggtggcgtgctcacaactgcactgctggtcggcaggtggccagggttgcaggcccgggcctcgggccccacctcctctggaggggtaggatctccttcgtgcagcccctgccccctaccctgttctccggagtgttggcagatctgagcccacggtcacgtgagaggagatgcctcttgcacactgagcccaggcccagctcacggagcaccctgcaggtggcagcggggcaccaggggctcattcctggtggcctcagtggcttctgtggacgactcagactcacatgagaagctgggaggagctccagctctgcaatcccgagagggcagagcgggggccctggccacaaccctgctccccacatacccgtctggcagaggctctgcctcccctctgcccatctctgcacaccaaggctgagcacagcacaaggcctcacggagagggtgaaaaggcactgccgtctccatctcagtgccaaggaatgcccctttcagaagccctcgtctgagaagtgctgccccttatgtagccccaggcattttaaaatctttgaatctgcaccaagtctcagaacagctctggccccggagtgctccgtccaggccgctgtgaaccggctgtccccgcgtctcctccacctcccctgacacaatcctggccccgactcagtccacccagggtgcagtgcagaggctgatacccgccaggacttccttgccaagggcccggccacgtcacaaggccactgcacgcttttcgacatgcacctggaaatcgggaagggccatgctgcagttgcttctagttgagacgagaagagcgacaaggttgtgatccacgtggcaggtgttcagaaggctgggggcgggcagcgctggggagagccctgggtacttcgaggagaccccgaagggaggctgctcccacacctgcgccagtttccaccctctctgtgagcagggctgcggtcacctcccacatctgaagagaaccaacctgaggatttcacgctggctgcgtgccagaccagtccctgacaggttgtgcgaggcccttcgctggacagcccattgctggccactggacggagaggcagagggggctgaaattcgggcccatgcctctgtgagcgatgacggagcaacagctctccagcacgtgaagctctccagacagctgttcgtgagaagccagacagaggcctggggtctcagtccagatttctggggagtggggtgtccaagcgtgggccacgctgctgggagccacctagggaagcaggtcgcctgtttctatagtgacggtaataaaccaagtcaattttctataaaaaaaa

SEQ ID NO: 2 - protein, 445 aa, Homo sapiens
MLPWTALGLALSLRLALARSGAERGPPASAPRGDLMFLLDSSASVSHYEFSRVREFVGQLVAPLPLGTGALRASLVHVGSRPYTEFPFGQHSSGEAAQDAVRASAQRMGDTHTGLALVYAKEQLFAEASGARPGVPKVLVWVTDGGSSDPVGPPMQELKDLGVTVFIVSTGRGNFLELSAAASAPAEKHLHFVDVDDLHIIVQELRGSILDAMRPQQLHATEITSSGFRLAWPPLLTADSGYYVLELVPSAQPGAARRQQLPGNATDWIWAGLDPDTDYDVALVPESNVRLLRPQILRVRTRPGEAGPGASGPESGAGPAPTQLAALPAPEEAGPERIVISHARPRSLRVSWAPALGSAAALGYHVQFGPLRGGEAQRVEVPAGRNCTTLQGLAPGTAYLVTVTAAFRSGRESALSAKACTPDGPRPRPRPVPRAPTPGTASREP

SEQ ID NO: 3 - DNA, 3462 bp, Homo sapiens
  CDS (2)..(3442)
gatggggccagaacggacaggggccgcgccgctgccgctgctgctggtgttagcgctcagtcaaggcattttaaattgttgtttggcctacaatgttggtctcccagaagcaaaaatattttccggtccttcaagtgaacagtttggctatgcagtgcagcagtttataaatccaaaaggcaactggttactggttggttcaccctggagtggctttcctgagaaccgaatgggagatgtgtataaatgtcctgttgacctatccactgccacatgtgaaaaactaaatttgcaaacttcaacaagcattccaaatgttactgagatgaaaaccaacatgagcctcggcttgatcctcaccaggaacatgggaactggaggttttctcacatgtggtcctctgtgggcacagcaatgtgggaatcagtattacacaacgggtgtgtgttctgacatcagtcctgattttcagctctcagccagcttctcacctgcaactcagccctgcccttccctcatagatgttgtggttgtgtgtgatgaatcaaatagtatttatccttgggatgcagtaaagaattttttggaaaaatttgtacaaggcctggatataggccccacaaagacacaggtggggttaattcagtatgccaataatccaagagttgtgtttaacttgaacacatataaaaccaaagaagaaatgattgtagcaacatcccagacatcccaatatggtggggacctcacaaacacattcggagcaattcaatatgcaagaaaatatgcttattcagcagcttctggtgggcgacgaagtgctacgaaagtaatggtagttgtaactgacggtgaatcacatgatggttcaatgttgaaagctgtgattgatcaatgcaaccatgacaatatactgaggtttggcatagcagttcttgggtacttaaacagaaacgcccttgatactaaaaatttaataaaagaaataaaagcaatcgctagtattccaacagaaagatactttttcaatgtgtctgatgaagcagctctactagaaaaggctgggacattaggagaacaaattttcagcattgaaggtactgttcaaggaggagacaactttcagatggaaatgtcacaagtgggattcagtgcagattactcttctcaaaatgatattctgatgctgggtgcagtgggagcttttggctggagtgggaccattgtccagaagacatctcatggccatttgatctttcctaaacaagcctttgaccaaattctgcaggacagaaatcacagttcatatttaggttactctgtggctgcaatttctactggagaaagcactcactttgttgctggtgctcctcgggcaaattataccggccagatagtgctatatagtgtgaatgagaatggcaatatcacggttattcaggctcaccgaggtgaccagattggctcctattttggtagtgtgctgtgttcagttgatgtggataaagacaccattacagacgtgctcttggtaggtgcaccaatgtacatgagtgacctaaagaaagaggaaggaagagtctacctgtttactatcaaagagggcattttgggtcagcaccaatttcttgaaggccccgagggcattgaaaacactcgatttggttcagcaattgcagctctttcagacatcaacatggatggctttaatgatgtgattgttggttcaccactagaaaatcagaattctggagctgtatacatttacaatggtcatcagggcactatccgcacaaagtattcccagaaaatcttgggatccgatggagcctttaggagccatctccagtactttgggaggtccttggatggctatggagatttaaatggggattccatcaccgatgtgtctattggtgcctttggacaagtggttcaactctggtcacaaagtattgctgatgtagctatagaagcttcattcacaccagaaaaaatcactttggtcaacaagaatgctcagataattctcaaactctgcttcagtgcaaagttcagacctactaagcaaaacaatcaagtggccattgtatataacatcacacttgatgcagatggattttcatccagagtaacctccagggggttatttaaagaaaacaatgaaaggtgcctgcagaagaatatggtagtaaatcaagcacagagttgccccgagcacatcatttatatacaggagccctctgatgttgtcaactctttggatttgcgtgtggacatcagtctggaaaaccctggcactagccctgcccttgaagcctattctgagactgccaaggtcttcagtattcctttccacaaagactgtggtgaggacggactttgcatttctgatctagtcctagatgtccgacaaataccagctgctcaagaacaaccctttattgtcagcaaccaaaacaaaaggttaacattttcagtaacgctgaaaaataaaagggaaagtgcatacaacactggaattgttgttgatttttcagaaaacttgttttttgcatcattctccctgccggttgatgggacagaagtaacatgccaggtggctgcatctcagaagtctgttgcctgcgatgtaggctaccctgctttaaagagagaacaacaggtgacttttactattaactttgacttcaatcttcaaaaccttcagaatcaggcgtctctcagtttccaggccttaagtgaaagccaagaagaaaacaaggctgataatttggtcaacctcaaaattcctctcctgtatgatgctgaaattcacttaacaaaggtaacaacaggaagtgttccagtaagcatggcaactgtaatcatccacatccctcagtataccaaagaaaagaacccactgatgtacctaactggggtgcaaacagacaaggctggtgacatcagttgtaatgcagatatcaatccactgaaaataggacaaacatcttcttctgtatctttcaaaagtgaaaatttcaggcacaccaaagaattgaactgcagaactgcttcctgtagtaatgttacctgctggttgaaagacgttcacatgaaaggagaatactttgttaatgtgactaccagaatttggaacgggactttcgcatcatcaacgttccagacagtacagctaacggcagctgcagaaatcaacacctataaccctgagatatatgtgattgaagataacactgttacgattcccctgatgataatgaaacctgatgagaaagccgaagtaccaacaggagttataataggaagtataattgctggaatccttttgctgttagctctggttgcaattttatggaagctcggcttcttcaaaagaaaatatgaaaagatgaccaaaaatccagatgagattgatgagaccacagagctcagtagctgaaccagcagacctacctg

SEQ ID NO: 4 - protein, 1147 aa, Homo sapiens
MGPERTGAAPLPLLLVLALSQGILNCCLAYNVGLPEAKIFSGPSSEQFGYAVQQFINPKGNWLLVGSPWSGFPENRMGDVYKCPVDLSTATCEKLNLQTSTSIPNVTEMKTNMSLGLILTRNMGTGGFLTCGPLWAQQCGNQYYTTGVCSDISPDFQLSASFSPATQPCPSLIDVVVVCDESNSIYPWDAVKNFLEKFVQGLDIGPTKTQVGLIQYANNPRVVFNLNTYKTKEEMIVATSQTSQYGGDLTNTFGAIQYARKYAYSAASGGRRSATKVMVVVTDGESHDGSMLKAVIDQCNHDNILRFGIAVLGYLNRNALDTKNLIKEIKAIASIPTERYFFNVSDEAALLEKAGTLGEQIFSIEGTVQGGDNFQMEMSQVGFSADYSSQNDILMLGAVGAFGWSGTIVQKTSHGHLIFPKQAFDQILQDRNHSSYLGYSVAAISTGESTHFVAGAPRANYTGQIVLYSVNENGNITVIQAHRGDQIGSYFGSVLCSVDVDKDTITDVLLVGAPMYMSDLKKEEGRVYLFTIKEGILGQHQFLEGPEGIENTRFGSAIAALSDINMDGFNDVIVGSPLENQNSGAVYIYNGHQGTIRTKYSQKILGSDGAFRSHLQYFGRSLDGYGDLNGDSITDVSIGAFGQVVQLWSQSIADVAIEASFTPEKITLVNKNAQIILKLCFSAKFRPTKQNNQVAIVYNITLDADGFSSRVTSRGLFKENNERCLQKNMVVNQAQSCPEHIIYIQEPSDVVNSLDLRVDISLENPGTSPALEAYSETAKVFSIPFHKDCGEDGLCISDLVLDVRQIPAAQEQPFIVSNQNKRLTFSVTLKNKRESAYNTGIVVDFSENLFFASFSLPVDGTEVTCQVAASQKSVACDVGYPALKREQQVTFTINFDFNLQNLQNQASLSFQALSESQEENKADNLVNLKIPLLYDAEIHLTKVTTGSVPVSMATVIIHIPQYTKEKNPLMYLTGVQTDKAGDISCNADINPLKIGQTSSSVSFKSENFRHTKELNCRTASCSNVTCWLKDVHMKGEYFVNVTTRIWNGTFASSTFQTVQLTAAAEINTYNPEIYVIEDNTVTIPLMIMKPDEKAEVPTGVIIGSIIAGILLLLALVAILWKLGFFKRKYEKMTKNPDEIDETTELSS

SEQ ID NO: 5 - DNA, 1882 bp, Homo sapiens
  CDS (243)..(1850)
ggacactgacatggactgaaggagtagaaaagaagggagcgggagggggctccgggcgccgcgcagcagacctactccggccgcgcgcctcgccgctgtcctccgggagcggcagcagtagcccgggcggcgagggctgggggttcctcgagactctcagaggggcgcctcccatcggcgcccaccaccccaacctgttcctcgcgcgccactgcgctgcgccccaggacccgctgcccaacatggattttctcctggcgctggtgctggtatcctcgctctacctgcaggcggccgccgagttcgacgggaggtggcccaggcaaatagtgtcatcgattggcctatgtcgttatggtgggaggattgactgctgctggggctgggctcgccagtcttggggacagtgtcagcctgtgtgccaaccacgatgcaaacatggtgaatgtatcgggccaaacaagtgcaagtgtcatcctggttatgctggaaaaacctgtaatcaagatctaaatgagtgtggcctgaagccccggccctgtaagcacaggtgcatgaacacttacggcagctacaagtgctactgtctcaacggatatatgctcatgccggatggttcctgctcaagtgccctgacctgctccatggcaaactgtcagtatggctgtgatgttgttaaaggacaaatacggtgccagtgcccatcccctggcctgcagctggctcctgatgggaggacctgtgtagatgttgatgaatgtgctacaggaagagcctcctgccctagatttaggcaatgtgtcaacacttttgggagctacatctgcaagtgtcataaaggcttcgatctcatgtatattggaggcaaatatcaatgtcatgacatagacgaatgctcacttggtcagtatcagtgcagcagctttgctcgatgttataacatacgtgggtcctacaagtgcaaatgtaaagaaggataccagggtgatggactgacttgtgtgtatatcccaaaagttatgattgaaccttcaggtccaattcatgtaccaaagggaaatggtaccattttaaagggtgacacaggaaataataattggattcctgatgttggaagtacttggtggcctccgaagacaccatatattcctcctatcattaccaacaggcctacttctaagccaacaacaagacctacaccaaagccaacaccaattcctactccaccaccaccaccacccctgccaacagagctcagaacacctctaccacctacaaccccagaaaggccaaccaccggactgacaactatagcaccagctgccagtacacctccaggagggattacagttgacaacagggtacagacagaccctcagaaacccagaggagatgtgttcagtgttctggtacacagttgtaattttgaccatggactttgtggatggatcagggagaaagacaatgacttgcactgggaaccaatcagggacccagcaggtggacaatatctgacagtgtcggcagccaaagccccagggggaaaagctgcacgcttggtgctacctctcggccgcctcatgcattcaggggacctgtgcctgtcattcaggcacaaggtgacggggctgcactctggcacactccaggtgtttgtgagaaaacacggtgcccacggagcagccctgtggggaagaaatggtggccatggctggaggcaaacacagatcaccttgcgaggggctgacatcaagagcgtcgtcttcaaaggtgaaaaaaggcgtggtcacactggggagattggattagatgatgtgagcttgaaaaaaggccactgctctgaagaacgctaacaactccagaactaacaatgaactcctaa

SEQ ID NO: 6 - protein, 536 aa, Homo sapiens
MDFLLALVLVSSLYLQAAAEFDGRWPRQIVSSIGLCRYGGRIDCCWGWARQSWGQCQPVCQPRCKHGECIGPNKCKCHPGYAGKTCNQDLNECGLKPRPCKHRCMNTYGSYKCYCLNGYMLMPDGSCSSALTCSMANCQYGCDVVKGQIRCQCPSPGLQLAPDGRTCVDVDECATGRASCPRFRQCVNTFGSYICKCHKGFDLMYIGGKYQCHDIDECSLGQYQCSSFARCYNIRGSYKCKCKEGYQGDGLTCVYIPKVMIEPSGPIHVPKGNGTILKGDTGNNNWIPDVGSTWWPPKTPYIPPIITNRPTSKPTTRPTPKPTPIPTPPPPPPLPTELRTPLPPTTPERPTTGLTTIAPAASTPPGGITVDNRVQTDPQKPRGDVFSVLVHSCNFDHGLCGWIREKDNDLHWEPIRDPAGGQYLTVSAAKAPGGKAARLVLPLGRLMHSGDLCLSFRHKVTGLHSGTLQVFVRKHGAHGAALWGRNGGHGWRQTQITLRGADIKSVVFKGEKRRGHTGEIGLDDVSLKKGHCSEER

SEQ ID NO: 7 - DNA, 1765 bp, Homo sapiens
  CDS (2)..(1765)
caccggatccatggattttctcctggcgctggtgctggtatcctcgctctacctgcaggcggccgccgagttcgacgggaggtggcccaggcaaatagtgtcatcgattggcctatgtcgttatggtgggaggattgactgctgctggggctgggctcgccagtcttggggacagtgtcagcctttctacgtcttaaggcagagaatagccaggataaggtgccagctcaaagctgtgtgccaaccacgatgcaaacatggtgaatgtatcgggccaaacaagtgcaagtgtcatcctggttatgctggaaaaacctgtaatcaagatctaaatgagtgtggcctgaagccccggccctgtaagcacaggtgcatgaacacttacggcagctacaagtgctactgtctcaacggatatatgctcatgccggatggttcctgctcaagtgccctgacctgctccatggcaaactgtcagtatggctgtgatgttgttaaaggacaaatacggtgccagtgcccatcccctggcctgcagctggctcctgatgggaggacctgtgtagatgttgatgaatgtgctacaggaagagcctcctgccctagatttaggcaatgtgtcaacacttttgggagctacatctgcaagtgtcataaaggcttcgatctcatgtatattggaggcaaatatcaatgtcatgacatagacgaatgctcacttggtcagtatcagtgcagcagctttgctcgatgttataacgtacgtgggtcctacaagtgcaaatgtaaagaaggataccagggtgatggactgacttgtgtgtatatcccaaaagttatgattgaaccttcaggtccaattcatgtaccaaagggaaatggtaccattttaaagggtgacacaggaaataataattggattcctgatgttggaagtacttggtggcctccgaagacaccatatattcctcctatcattaccaacaggcctacttctaagccaacaacaagacctacaccaaagccaacaccaattcctactccaccaccaccaccacccctgccaacagagctcagaacacctctaccacctacaaccccagaaaggccaaccaccggactgacaactatagcaccagctgccagtacacctccaggagggattacagttgacaacagggtacagacagaccctcagaaacccagaggagatgtgttcattccacggcaaccttcaaatgacttgtttgaaatatttgaaatagaaagaggagtcagtgcagacgatgaagcaaaggatgatccaggtgttctggtacacagttgtaattttgaccatggactttgtggatggatcagggagaaagacaatgacttgcactgggaaccaatcagggacccagcaggtggacaatatctgacagtgtcggcagccaaagccccagggggaaaagctgcacgcttggtgctacctctcggccgcctcatgcattcaggggacctgtgcctgtcattcaggcacaaggtgacggggctgcactctggcacactccaggtgtttgtgagaaaacacggtgcccacggagcagccctgtggggaagaaatggtggccatggctggaggcaaacacagatcaccttgcgaggggctgacatcaagagcgtcgtcttcaaaggtgaaaaaaggcgtggtcacactggggagattggattagatgatgtgagcttgaaaaaaggccactgctctgaagaacgcgtcgacggc

SEQ ID NO: 8 - protein, 588 aa, Homo sapiens
TGSMDFLLALVLVSSLYLQAAAEFDGRWPRQIVSSIGLCRYGGRIDCCWGWARQSWGQCQPFYVLRQRIARIRCQLKAVCQPRCKHGECIGPNKCKCHPGYAGKTCNQDLNECGLKPRPCKHRCMNTYGSYKCYCLNGYMLMPDGSCSSALTCSMANCQYGCDVVKGQIRCQCPSPGLQLAPDGRTCVDVDECATGRASCPRFRQCVNTFGSYICKCHKGFDLMYIGGKYQCHDIDECSLGQYQCSSFARCYNVRGSYKCKCKEGYQGDGLTCVYIPKVMIEPSGPIHVPKGNGTILKGDTGNNNWIPDVGSTWWPPKTPYIPPIITNRPTSKPTTRPTPKPTPIPTPPPPPPLPTELRTPLPPTTPERPTTGLTTIAPAASTPPGGITVDNRVQTDPQKPRGDVFIPRQPSNDLFEIFEIERGVSADDEAKDDPGVLVHSCNFDHGLCGWIREKDNDLHWEPIRDPAGGQYLTVSAAKAPGGKAARLVLPLGRLMHSGDLCLSFRHKVTGLHSGTLQVFVRKHGAHGAALWGRNGGHGWRQTQITLRGADIKSVVFKGEKRRGHTGEIGLDDVSLKKGHCSEERVDG

SEQ ID NO: 9 - DNA, 1627 bp, Homo sapiens
  CDS (2)..(1627)
caccggatccatggattttctcctggcgctggtgctggtatcctcgctctacctgcaggcggccgccgagttcgacgggaggtggcccaggcaaatagtgtcatcgattggcctatgtcgttatggtgggaggattgactgctgctggggctgggctcgccagtcttggggacagtgtcagcctgtgtgccaaccacgatgcaaacatggtgaatgtatcgggccaaacaagtgcaagtgtcatcctggttatgctggaaaaacctgtaatcaagatctaaatgagtgtggcctgaagccccggccctgtaagcacaggtgcatgaacacttacggcagctacaagtgctactgtctcaacggatatatgctcatgccggatggttcctgctcaagtgccctgacctgctccatggcaaactgtcagtatggctgtgatgttgttaaaggacaaatacggtgccagtgcccatcccctggcctgcacctggctcctgatgggaggacctgtgtagatgttgatgaatgtgctacaggaagagcctcctgccctagatttaggcaatgtgtcaacacttttgggagctacatctgcaagtgtcataaaggcttcgatctcatgtatattggaggcaaatatcaatgtcatgacatagacgaatgctcacttggtcagtatcagtgcagcagctttgctcgatgttataacgtacgtgggtcctacaagtgcaaatgtaaagaaggataccagggtgatggactgacttgtgtgtatatcccaaaagttatgattgaaccttcaggtccaattcatgtaccaaagggaaatggtaccattttaaagggtgacacaggaaataataattggattcctgatgttggaagtacttggtggcctccgaagacaccatatattcctcctatcattaccaacaggcctacttctaagccaacaacaagacctacaccaaagccaacaccaattcctactccaccaccaccaccacccctgccaacagagctcagaacacctctaccacctacaaccccagaaaggccaaccaccggactgacaactatagcaccagctgccagtacacctccaggagggattacagttgacaacagggtacagacagaccctcagaaacccagaggagatgtgttcagtgttctggtacacagttgtaattttgaccatggactttgtggatggatcagggagaaagacaatgacttgcactgggaaccaatcagggacccagcaggtggacaatatctgacagtgtcggcagccaaagccccagggggaaaagctgcacgcttggtgctacctctcggccgcctcatgcattcaggggacctgtgcctgtcattcaggcacaaggtgacggggctgcactctggcacactccaggtgtttgtgagaaaacacggtgcccacggagcagccctgtggggaagaaatggtggccatggctggaggcaaacacagatcaccttgcgaggggctgacatcaagagcgtcgtcttcaaaggtgaaaaaaggcgtggtcacactggggagattggattagatgatgtgagcttgaaaaaaggccactgctctgaagaacgcgtcgacggc

SEQ ID NO: 10 - protein, 542 aa, Homo sapiens
TGSMDFLLALVLVSSLYLQAAAEFDGRWPRQIVSSIGLCRYGGRIDCCWGWARQSWGQCQPVCQPRCKHGECIGPNKCKCHPGYAGKTCNQDLNECGLKPRPCKHRCMNTYGSYKCYCLNGYMLMPDGSCSSALTCSMANCQYGCDVVKGQIRCQCPSPGLHLAPDGRTCVDVDECATGRASCPRFRQCVNTFGSYICKCHKGFDLMYIGGKYQCHDIDECSLGQYQCSSFARCYNVRGSYKCKCKEGYQGDGLTCVYIPKVMIEPSGPIHVPKGNGTILKGDTGNNNWIPDVGSTWWPPKTPYIPPIITNRPTSKPTTRPTPKPTPIPTPPPPPPLPTELRTPLPPTTPERPTTGLTTIAPAASTPPGGITVDNRVQTDPQKPRGDVFSVLVHSCNFDHGLCGWIREKDNDLHWEPIRDPAGGQYLTVSAAKAPGGKAARLVLPLGRLMHSGDLCLSFRHKVTGLHSGTLQVFVRKHGAHGAALWGRNGGHGWRQTQITLRGADIKSVVFKGEKRRGHTGEIGLDDVSLKKGHCSEERVDG

SEQ ID NO: 11 - DNA, 1765 bp, Homo sapiens
  CDS (2)..(1765)
caccggatccatggattttctcctggcgctggtgctggtatcctcgctctacctgcaggcggccgccgagttcgacgggaggtggcccaggcaaatagtgtcatcgattggcctatgtcgttatggtgggaggattgactgctgctggggctgggctcgccagtcttggggacagtgtcagcctttctacgtcttaaggcagagaatagccaggataaggtgccagctcaaagctgtgtgccaaccacgatgcaaacatggtgaatgtatcgggccaaacaagtgcaagtgtcatcctggttatgctggaaaaacctgtaatcaagatctaaatgagtgtggcctgaagccccggccctgtaagcacaggtgcatgaacacttacggcagctacaagtgctactgtctcaacggatatatgctcatgccggatggttcctgctcaagtgccctgacctgctccatggcaaactgtcagtatggctgtgatgttgttaaaggacaaatacggtgccagtgcccatcccctggcctgcacctggctcctgatgggaggacctgtgtagatgttgatgaatgtgctacaggaagagcctcctgccctagatttaggcaatgtgtcaacacttttgggagctacatctgcaagtgtcataaaggcttcgatctcatgtatattggaggcaaatatcaatgtcatgacatagacgaatgctcacttggtcagtatcagtgcagcagctttgctcgatgttataacgtacgtgggtcctacaagtgcaaatgtaaagaaggataccagggtgatggactgacttgtgtgtatatcccaaaagttatgattgaaccttcaggtccaattcatgtaccaaagggaaatggtaccattttaaagggtgacacaggaaataataattggattcctgatgttggaagtacttggtggcctccgaagacaccatatattcctcctatcattaccaacaggcctacttctaagccaacaacaagacctacaccaaagccaacaccaattcctactccaccaccaccaccacccctgccaacagagctcagaacacctctaccacctacaaccccagaaaggccaaccaccggactgacaactatagcaccagctgccagtacacctccaggagggattacagttgacaacagggtacagacagaccctcagaaacccagaggagatgtgttcattccacggcaaccttcaaatgacttgtttgaaatatttgaaatagaaagaggagtcagtgcagacgatgaagcaaaggatgatccaggtgttctggtacacagttgtaattttgaccatggactttgtggatggatcagggagaaagacaatgacttgcactgggaaccaatcagggacccagcaggtggacaatatctgacagtgtcggcagccaaagccccagggggaaaagctgcacgcttggtgctacctctcggccgcctcatgcattcaggggacctgtgcctgtcattcaggcacaaggtgacggggctgcactctggcacactccaggtgtttgtgagaaaacacggtgcccacggagcagccctgtggggaagaaatggtggccatggctggaggcaaacacagatcaccttgcgaggggctgacatcaagagcgtcgtcttcaaaggtgaaaaaaggcgtggtcacactggggagattggattagatgatgtgagcttgaaaaaaggccactgctctgaagaacgcgtcgacggc

SEQ ID NO: 12 - protein, 588 aa, Homo sapiens
TGSMDFLLALVLVSSLYLQAAAEFDGRWPRQIVSSIGLCRYGGRIDCCWGWARQSWGQCQPFYVLRQRIARIRCQLKAVCQPRCKHGECIGPNKCKCHPGYAGKTCNQDLNECGLKPRPCKHRCMNTYGSYKCYCLNGYMLMPDGSCSSALTCSMANCQYGCDVVKGQIRCQCPSPGLHLAPDGRTCVDVDECATGRASCPRFRQCVNTFGSYICKCHKGFDLMYIGGKYQCHDIDECSLGQYQCSSFARCYNVRGSYKCKCKEGYQGDGLTCVYIPKVMIEPSGPIHVPKGNGTILKGDTGNNNWIPDVGSTWWPPKTPYIPPIITNRPTSKPTTRPTPKPTPIPTPPPPPPLPTELRTPLPPTTPERPTTGLTTIAPAASTPPGGITVDNRVQTDPQKPRGDVFIPRQPSNDLFEIFEIERGVSADDEAKDDPGVLVHSCNFDHGLCGWIREKDNDLHWEPIRDPAGGQYLTVSAAKAPGGKAARLVLPLGRLMHSGDLCLSFRHKVTGLHSGTLQVFVRKHGAHGAALWGRNGGHGWRQTQITLRGADIKSVVFKGEKRRGHTGEIGLDDVSLKKGHCSEERVDG

SEQ ID NO: 13 - DNA, 1657 bp, Homo sapiens
  CDS (2)..(1657)
caccggatccgagttcgacgggaggtggcccaggcaaatagtgtcatcgattggcctatgtcgttatggtgggaggattgactgctgctggggctgggctcgccagtcttggggacagtgtcagcctgtgtgccaaccacgatgcaaacatggtgaatgtatcgggccaaacaagtgcaagtgtcatcctggttatgctggaaaaacctgtaatcaagatctaaatgagtgtggcctgaagccccggccctgtaagcacaggtgcatgaacacttacggcagctacaagtgctactgtctcaacggatatatgctcatgccggatggttcctgctcaagtgccctgacctgctccatggcaaactgtcagtatggctgtgatgttgttaaaggacaaatacggtgccagtgcccatcccctggcctgcacctggctcctgatgggaggacctgtgtagatgttgatgaatgtgctacaggaagagcctcctgccctagatttaggcaatgtgtcaacacttttgggagctacatctgcaagtgtcataaaggcttcgatctcatgtatattggaggcaaatatcaatgtcatgacatagacgaatgctcacttggtcagtatcagtgcagcagctttgctcgatgttataacgtacgtgggtcctacaagtgcaaatgtaaagaaggataccagggtgatggactgacttgtgtgtatatcccaaaagttatgattgaaccttcaggtccaattcatgtaccaaagggaaatggtaccattttaaagggtgacacaggaaataataattggattcctgatgttggaagtacttggtggcctccgaagacaccatatattcctcctatcattaccaacaggcctacttctaagccaacaacaagacctacaccaaagccaacaccaattcctactccaccaccaccaccacccctgccaacagagctcagaacacctctaccacctacaaccccagaaaggccaaccaccggactgacaactatagcaccagctgccagtacacctccaggagggattacagttgacaacagggtacagacagaccctcagaaacccagaggagatgtgttcattccacggcaaccttcaaatgacttgtttgaaatatttgaaatagaaagaggagtcagtgcagacgatgaagcaaaggatgatccaggtgttctggtacacagttgtaattttgaccatggactttgtggatggatcagggagaaagacaatgacttgcactgggaaccaatcagggacccagcaggtggacaatatctgacagtgtcggcagccaaagccccagggggaaaagctgcacgcttggtgctacctctcggccgcctcatgcattcaggggacctgtgcctgtcattcaggcacaaggtgacggggctgcactctggcacactccaggtgtttgtgagaaaacacggtgcccacggagcagccctgtggggaagaaatggtggccatggctggaggcaaacacagatcaccttgcgaggggctgacatcaagagcgtcgtcttcaaaggtgaaaaaaggcgtggtcacactggggagattggattagatgatgtgagcttgaaaaaaggccactgctctgaagaacgcgtcgacggc

SEQ ID NO: 14 - protein, 552 aa, Homo sapiens
TGSEFDGRWPRQIVSSIGLCRYGGRIDCCWGWARQSWGQCQPVCQPRCKHGECIGPNKCKCHPGYAGKTCNQDLNECGLKPRPCKHRCMNTYGSYKCYCLNGYMLMPDGSCSSALTCSMANCQYGCDVVKGQIRCQCPSPGLHLAPDGRTCVDVDECATGRASCPRFRQCVNTFGSYICKCHKGFDLMYIGGKYQCHDIDECSLGQYQCSSFARCYNVRGSYKCKCKEGYQGDGLTCVYIPKVMIEPSGPIHVPKGNGTILKGDTGNNNWIPDVGSTWWPPKTPYIPPIITNRPTSKPTTRPTPKPTPIPTPPPPPPLPTELRTPLPPTTPERPTTGLTTIAPAASTPPGGITVDNRVQTDPQKPRGDVFIPRQPSNDLFEIFEIERGVSADDEAKDDPGVLVHSCNFDHGLCGWIREKDNDLHWEPIRDPAGGQYLTVSAAKAPGGKAARLVLPLGRLMHSGDLCLSFRHKVTGLHSGTLQVFVRKHGAHGAALWGRNGGHGWRQTQITLRGADIKSVVFKGEKRRGHTGEIGLDDVSLKKGHCSEERVDG

SEQ ID NO: 15 - DNA, 1717 bp, Homo sapiens
  CDS (2)..(1717)
caccggatccatggattttctcctggcgctggtgctggtatcctcgctctacctgcaggcggccgccgagttcgacgggagtaggtggcccaggcaaatagtgtcatcgattggcctatgtcgttatggtgggaggattgactgctgctggggctgggctcgccagtcttggggacagtgtcagcctgtgtgccaaccacgatgcaaacatggtgaatgtatcgggccaaacaagtgcaagtgtcatcctggttatgctggaaaaacctgtaatcaagatctaaatgagtgtggcctgaagccccggccctgtaagcacaggtgcatgaacacttacggcagctacaagtgctactgtctcaacggatatatgctcatgccggatggttcctgctcaagtgccctgacctgctccatggcaaactgtcagtatggctgtgatgttgttaaaggacaaatacggtgccagtgcccatcccctggcctgcacctggctcctgatgggaggacctgtgtagatgttgatgaatgtgctacaggaagagcctcctgccctagatttaggcaatgtgtcaacacttttgggagctacatctgcaagtgtcataaaggcttcgatctcatgtatattggaggcaaatatcaatgtcatgacatagacgaatgctcacttggtcagtatcagtgcagcagctttgctcgatgttataacgtacgtgggtcctacaagtgcaaatgtaaagaaggataccagggtgatggactgacttgtgtgtatatcccaaaagttatgattgaaccttcaggtccaattcatgtaccaaagggaaatggtaccattttaaagggtgacacaggaaataataattggattcctgatgttggaagtacttggtggcctccgaagacaccatatattcctcctatcattaccaacaggcctacttctaagccaacaacaagacctacaccaaagccaacaccaattcctactccaccaccaccaccacccctgccaacagagctcagaacacctctaccacctacaaccccagaaaggccaaccaccggactgacaactatagcaccagctgccagtacacctccaggagggattacagttgacaacagggtacagacagaccctcagaaacccagaggagatgtgttcattccacggcaaccttcaaatgacttgtttgaaatatttgaaatagaaagaggagtcagtgcagacgatgaagcaaaggatgatccaggtgttctggtacacagttgtaattttgaccatggactttgtggatggatcagggagaaagacaatgacttgcactgggaaccaatcagggacccagcaggtggacaatatctgacagtgtcggcagccaaagccccagggggaaaagctgcacgcttggtgctacctctcggccgcctcatgcattcaggggacctgtgcctgtcattcaggcacaaggtgacggggctgcactctggcacactccaggtgtttgtgagaaaacacggtgcccacggagcagccctgtggggaagaaatggtggccatggctggaggcaaacacagatcaccttgcgaggggctgacatcaagagcgtcgtcttcaaaggtgaaaaaaggcgtggtcacactggggagattggattagatgatgtgagcttgaaaaaaggccactgctctgaagaacgcgtcgacggc

SEQ ID NO: 16 - protein, 572 aa, Homo sapiens
TGSMDFLLALVLVSSLYLQAAAEFDGSRWPRQIVSSIGLCRYGGRIDCCWGWARQSWGQCQPVCQPRCKHGECIGPNKCKCHPGYAGKTCNQDLNECGLKPRPCKHRCMNTYGSYKCYCLNGYMLMPDGSCSSALTCSMANCQYGCDVVKGQIRCQCPSPGLHLAPDGRTCVDVDECATGRASCPRFRQCVNTFGSYICKCHKGFDLMYIGGKYQCHDIDECSLGQYQCSSFARCYNVRGSYKCKCKEGYQGDGLTCVYIPKVMIEPSGPIHVPKGNGTILKGDTGNNNWIPDVGSTWWPPKTPYIPPIITNRPTSKPTTRPTPKPTPIPTPPPPPPLPTELRTPLPPTTPERPTTGLTTIAPAASTPPGGITVDNRVQTDPQKPRGDVFIPRQPSNDLFEIFEIERGVSADDEAKDDPGVLVHSCNFDHGLCGWIREKDNDLHWEPIRDPAGGQYLTVSAAKAPGGKAARLVLPLGRLMHSGDLCLSFRHKVTGLHSGTLQVFVRKHGAHGAALWGRNGGHGWRQTQITLRGADIKSVVFKGEKRRGHTGEIGLDDVSLKKGHCSEERVDG

SEQ ID NO: 17 - DNA, 613 bp, Homo sapiens
  CDS (2)..(613)
caccggatcctgtcagcctgtgtgccaaccacgatgcaaacatggtgaatgtatcgggccaaacaagtgcaagtgtcatcctggttatgctggaaaaacctgtaatcaagatctaaatgagtgtggcctgaagccccggccctgtaagcacaggtgcatgaacacttacggcagctacaagtgctactgtctcaacggatatatgctcatgccggatggttcctgctcaagtgccctgacctgctccatggcaaactgtcagtatggctgtgatgttgttaaaggacaaatacggtgccagtgcccatcccctggcctgcagctggctcctgatgggaggacctgtgtagatgttgatgaatgtgctacaggaagagcctcctgccctagatttaggcaatgtgtcaacacttttgggagctacatctgcaagtgtcataaaggcttcgatctcatgtatattggaggcaaatatcaatgtcatgacatagacgaatgctcacttggtcagtatcagtgcagcagctttgctcgatgttataacgtacgtgggtcctacaagtgcaaatgtaaagaaggataccagggtgatggactgacttgtgtcgacggc

SEQ ID NO: 18 - protein, 204 aa, Homo sapiens
TGSCQPVCQPRCKHGECIGPNKCKCHPGYAGKTCNQDLNECGLKPRPCKHRCMNTYGSYKCYCLNGYMLMPDGSCSSALTCSMANCQYGCDVVKGQIRCQCPSPGLQLAPDGRTCVDVDECATGRASCPRFRQCVNTFGSYICKCHKGFDLMYIGGKYQCHDIDECSLGQYQCSSFARCYNVRGSYKCKCKEGYQGDGLTCVDG

SEQ ID NO: 19 - DNA, 613 bp, Homo sapiens
  CDS (2)..(613)
caccggatcctgtcagcctgtgtgccaaccacgatgcaaacatggtgaatgtatcgggccaaacaagtgcaagtgtcatcctggttatgctggaaaaacctgtaatcaagatctaaatgagtgtggcctgaagccccggccctgtaagcacaggtgcatgaacacttacggcagctacaagtgctactgtctcaacggatatatgctcatgccggatggttcctgctcaagtgccctgacctgctccatggcaaactgtcagtatggctgtgatgttgttaaaggacaaatacggtgccagtgcccatcccctggcctgcacctggctcctgatgggaggacctgtgtagatgttgatgaatgtgctacaggaagagcctcctgccctagatttaggcaatgtgtcaacacttttgggagctacatctgcaagtgtcataaaggcttcgatctcatgtatattggaggcaaatatcaatgtcatgacatagacgaatgctcacttggtcagtatcagtgcagcagctttgctcgatgttataacgtacgtgggtcctacaagtgcaaatgtaaagaaggataccagggtgatggactgacttgtgtcgacggc

SEQ ID NO: 20 - protein, 204 aa, Homo sapiens
TGSCQPVCQPRCKHGECIGPNKCKCHPGYAGKTCNQDLNECGLKPRPCKHRCMNTYGSYKCYCLNGYMLMPDGSCSSALTCSMANCQYGCDVVKGQIRCQCPSPGLHLAPDGRTCVDVDECATGRASCPRFRQCVNTFGSYICKCHKGFDLMYIGGKYQCHDIDECSLGQYQCSSFARCYNVRGSYKCKCKEGYQGDGLTCVDG

SEQ ID NO: 21 - DNA, 1882 bp, Homo sapiens
  CDS (243)..(1850)
ggacactgacatggactgaaggagtagaaaagaagggagcgggagggggctccgggcgccgcacagcagacctactccggccgcgcgcctcgccgctgtcctccgggagcggcagcagtagcccgggcggcgagggctgggggttcctcgagactctcagaggggcgcctcccatcggcgcccaccaccccaacctgttcctcgcgcgccactgcgctgcgccccaggacccgctgcccaacatggattttctcctggcgctggtgctggtatcctcgctctacctgcaggcggccgccgagttcgacgggaggtggcccaggcaaatagtgtcatcgattggcctatgtcgttatggtgggaggattgactgctgctggggctgggctcgccagtcttggggacagtgtcagcctgtgtgccaaccacgatgcaaacatggtgaatgtatcgggccaaacaagtgcaagtgtcatcctggttatgctggaaaaacctgtaatcaagatctaaatgagtgtggcctgaagccccggccctgtaagcacaggtgcatgaacacttacggcagctacaagtgctactgtctcaacggatatatgctcatgccggatggttcctgctcaagtgccctgacctgctccatggcaaactgtcagtatggctgtgatgttgttaaaggacaaatacggtgccagtgcccatcccctggcctgcagctggctcctgatgggaggacctgtgtagatgttgatgaatgtgctacaggaagagcctcctgccctagatttaggcaatgtgtcaacacttttgggagctacatctgcaagtgtcataaaggcttcgatctcatgtatattggaggcaaatatcaatgtcatgacatagacgaatgctcacttggtcagtatcagtgcagcagctttgctcgatgttataacatacgtgggtcctacaagtgcaaatgtaaagaaggataccagggtgatggactgacttgtgtgtatatcccaaaagttatgattgaaccttcaggtccaattcatgtaccaaagggaaatggtaccattttaaagggtgacacaggaaataataattggattcctgatgttggaagtacttggtggcctccgaagacaccatatattcctcctatcattaccaacaggcctacttctaagccaacaacaagacctacaccaaagccaacaccaattcctactccaccaccaccaccacccctgccaacagagctcagaacacctctaccacctacaaccccagaaaggccaaccaccggactgacaactatagcaccagctgccagtacacctccaggagggattacagttgacaacagggtacagacagaccctcagaaacccagaggagatgtgttcagtgttctggtacacagttgtaattttgaccatggactttgtggatggatcagggagaaagacaatgacttgcactgggaaccaatcagggacccagcaggtggacaatatctgacagtgtcggcagccaaagccccagggggaaaagctgcacgcttggtgctacctctcggccgcctcatgcattcaggggacctgtgcctgtcattcaggcacaaggtgacggggctgcactctggcacactccaggtgtttgtgagaaaacacggtgcccacggagcagccctgtggggaagaaatggtggccatggctggaggcaaacacagatcaccttgcgaggggctgacatcaagagcgtcgtcttcaaaggtgaaaaaaggcgtggtcacactggggagattggattagatgatgtgagcttgaaaaaaggccactgctctgaagaacgctaacaactccagaactaacaatgaactcctaa

SEQ ID NO: 22 - protein, 536 aa, Homo sapiens; identical to SEQ ID NO: 6

SEQ ID NO: 23 - DNA, 1882 bp, Homo sapiens
  CDS (243)..(1850)
ggacactgacatggactgaaggagtagaaaagaagggagcgggagggggctccgggcgccgcgcagcagacctactccggccgcgcgcctcgccgctgtcctccgggagcggcagcagtagcccgggcggcgagggctgggggttcctcgagactctcagaggggcgcctcccatcggcgcccaccaccccaacctgttcctcgcgcgccactgcgctgcgccccgggacccgctgcccaacatggattttctcctggcgctggtgctggtatcctcgctctacctgcaggcggccgccgagttcgacgggaggtggcccaggcaaatagtgtcatcgattggcctatgtcgttatggtgggaggattgactgctgctggggctgggctcgccagtcttggggacagtgtcagcctgtgtgccaaccacgatgcaaacatggtgaatgtatcgggccaaacaagtgcaagtgtcatcctggttatgctggaaaaacctgtaatcaagatctaaatgagtgtggcctgaagccccggccctgtaagcacaggtgcatgaacacttacggcagctacaagtgctactgtctcaacggatatatgctcatgccggatggttcctgctcaagtgccctgacctgctccatggcaaactgtcagtatggctgtgatgttgttaaaggacaaatacggtgccagtgcccatcccctggcctgcagctggctcctgatgggaggacctgtgtagatgttgatgaatgtgctacaggaagagcctcctgccctagatttaggcaatgtgtcaacacttttgggagctacatctgcaagtgtcataaaggcttcgatctcatgtatattggaggcaaatatcaatgtcatgacatagacgaatgctcacttggtcagtatcagtgcagcagctttgctcgatgttataacatacgtgggtcctacaagtgcaaatgtaaagaaggataccagggtgatggactgacttgtgtgtatatcccaaaagttatgattgaaccttcaggtccaattcatgtaccaaagggaaatggtaccattttaaagggtgacacaggaaataataattggattcctgatgttggaagtacttggtggcctccgaagacaccatatattcctcctatcattaccaacaggcctacttctaagccaacaacaagacctacaccaaagccaacaccaattcctactccaccaccaccaccacccctgccaacagagctcagaacacctctaccacctacaaccccagaaaggccaaccaccggactgacaactatagcaccagctgccagtacacctccaggagggattacagttgacaacagggtacagacagaccctcagaaacccagaggagatgtgttcagtgttctggtacacagttgtaattttgaccatggactttgtggatggatcagggagaaagacaatgacttgcactgggaaccaatcagggacccagcaggtggacaatatctgacagtgtcggcagccaaagccccagggggaaaagctgcacgcttggtgctacctctcggccgcctcatgcattcaggggacctgtgcctgtcattcaggcacaaggtgacggggctgcactctggcacactccaggtgtttgtgagaaaacacggtgcccacggagcagccctgtggggaagaaatggtggccatggctggaggcaaacacagatcaccttgcgaggggctgacatcaagagcgtcgtcttcaaaggtgaaaaaaggcgtggtcacactggggagattggattagatgatgtgagcttgaaaaaaggccactgctctgaagaacgctaacaactccagaactaacaatgaactcctaa

SEQ ID NO: 24 - protein, 536 aa, Homo sapiens; identical to SEQ ID NO: 6

SEQ ID NO: 25 - DNA, 1882 bp, Homo sapiens
  CDS (243)..(1850)
ggacactgacatggactgaaggagtagaaaagaagggagcgggagggggctccgggcgccgcgcagcagacctactccggccgcgcgcctcgccgctgtcctccgggagcggcagcagtagcccgggcggcgagggctgggggttcctcgagactctcagaggggcgcctcccatcggcgcccaccaccccaacctgttcctcgcgcgccactgcgctgcgccccaggacccgctgcccaacatggattttctcctggcgctggtgctggtatcctcgctctacctgcaggcggccgccgagttcgacgggaggtggcccaggcaaatagtgtcatcgattggcctatgtcgttatggtgggaggattgactgctgctggggctgggctcgccagtcttggggacagtgtcagcctgtgtgccaaccacgatgcaaacatggtgaatgtatcgggccaaacaagtgcaagtgtcatcctggttatgctggaaaaacctgtaatcaagatctaaatgagtgtggcctgaagccccggccctgtaagcacaggtgcatgaacacttacggcagctacaagtgctactgtctcaacggatatatgctcatgccggatggttcctgctcaagtgccctgacctgctccatggcaaactgtcagtatggctgtgatgttgttaaaggacaaatacggtgccagtgcccatcccctggcctgcacctggctcctgatgggaggacctgtgtagatgttgatgaatgtgctacaggaagagcctcctgccctagatttaggcaatgtgtcaacacttttgggagctacatctgcaagtgtcataaaggcttcgatctcatgtatattggaggcaaatatcaatgtcatgacatagacgaatgctcacttggtcagtatcagtgcagcagctttgctcgatgttataacatacgtgggtcctacaagtgcaaatgtaaagaaggataccagggtgatggactgacttgtgtgtatatcccaaaagttatgattgaaccttcaggtccaattcatgtaccaaagggaaatggtaccattttaaagggtgacacaggaaataataattggattcctgatgttggaagtacttggtggcctccgaagacaccatatattcctcctatcattaccaacaggcctacttctaagccaacaacaagacctacaccaaagccaacaccaattcctactccaccaccaccaccacccctgccaacagagctcagaacacctctaccacctacaaccccagaaaggccaaccaccggactgacaactatagcaccagctgccagtacacctccaggagggattacagttgacaacagggtacagacagaccctcagaaacccagaggagatgtgttcagtgttctggtacacagttgtaattttgaccatggactttgtggatggatcagggagaaagacaatgacttgcactgggaaccaatcagggacccagcaggtggacaatatctgacagtgtcggcagccaaagccccagggggaaaagctgcacgcttggtgctacctctcggccgcctcatgcattcaggggacctgtgcctgtcattcaggcacaaggtgacggggctgcactctggcacactccaggtgtttgtgagaaaacacggtgcccacggagcagccctgtggggaagaaatggtggccatggctggaggcaaacacagatcaccttgcgaggggctgacatcaagagcgtcgtcttcaaaggtgaaaaaaggcgtggtcacactggggagattggattagatgatgtgagcttgaaaaaaggccactgctctgaagaacgctaacaactccagaactaacaatgaactcctaa

SEQ ID NO: 26 - protein, 536 aa, Homo sapiens
MDFLLALVLVSSLYLQAAAEFDGRWPRQIVSSIGLCRYGGRIDCCWGWARQSWGQCQPVCQPRCKHGECIGPNKCKCHPGYAGKTCNQDLNECGLKPRPCKHRCMNTYGSYKCYCLNGYMLMPDGSCSSALTCSMANCQYGCDVVKGQIRCQCPSPGLHLAPDGRTCVDVDECATGRASCPRFRQCVNTFGSYICKCHKGFDLMYIGGKYQCHDIDECSLGQYQCSSFARCYNIRGSYKCKCKEGYQGDGLTCVYIPKVMIEPSGPIHVPKGNGTILKGDTGNNNWIPDVGSTWWPPKTPYIPPIITNRPTSKPTTRPTPKPTPIPTPPPPPPLPTELRTPLPPTTPERPTTGLTTIAPAASTPPGGITVDNRVQTDPQKPRGDVFSVLVHSCNFDHGLCGWIREKDNDLHWEPIRDPAGGQYLTVSAAKAPGGKAARLVLPLGRLMHSGDLCLSFRHKVTGLHSGTLQVFVRKHGAHGAALWGRNGGHGWRQTQITLRGADIKSVVFKGEKRRGHTGEIGLDDVSLKKGHCSEER

SEQ ID NO: 27 - DNA, 1882 bp, Homo sapiens
  CDS (243)..(1850)
ggacactgacatggactgaaggagtagaaaagaagggagcgggagggggctccgggcgccgcgcagcagacctactccggccgcgcgcctcgccgctgtcctccgggagcggcagcagtagcccgggcggcgagggctgggggttcctcgagactctcagaggggcgcctcccatcggcgcccaccaccccaacctgttcctcgcgcgccactgcgctgcgccccaggacccgctgcccaacatggattttctcctggcgctggtgctggtatcctcgctctacctgcaggcggccgccgagttcgacgggaggtggcccaggcaaatagtgtcatcgattggcctatgtcgttatggtgggaggattgactgctgctggggctgggctcgccagtcttggggacagtgtcagcctgtgtgccaaccacgatgcaaacatggtgaatgtatcgggccaaacaagtgcaagtgtcatcctggttatgctggaaaaacctgtaatcaagatctaaatgagtgtggcctgaagccccggccctgtaagcacaggtgcatgaacacttacggcagctacaagtgctactgtctcaacggatatatgctcatgccggatggttcctgctcaagtgccctgacctgctccatggcaaactgtcagtatggctgtgatgttgttaaaggacaaatacggtgccagtgcccatcccctggcctgcagctggctcctgatgggaggacctgtgtagatattgatgaatgtgctacaggaagagcctcctgccctagatttaggcaatgtgtcaacacttttgggagctacatctgcaagtgtcataaaggcttcgatctcatgtatattggaggcaaatatcaatgtcatgacatagacgaatgctcacttggtcagtatcagtgcagcagctttgctcgatgttataacatacgtgggtcctacaagtgcaaatgtaaagaaggataccagggtgatggactgacttgtgtgtatatcccaaaagttatgattgaaccttcaggtccaattcatgtaccaaagggaaatggtaccattttaaagggtgacacaggaaataataattggattcctgatgttggaagtacttggtggcctccgaagacaccatatattcctcctatcattaccaacaggcctacttctaagccaacaacaagacctacaccaaagccaacaccaattcctactccaccaccaccaccacccctgccaacagagctcagaacacctctaccacctacaaccccagaaaggccaaccaccggactgacaactatagcaccagctgccagtacacctccaggagggattacagttgacaacagggtacagacagaccctcagaaacccagaggagatgtgttcagtgttctggtacacagttgtaattttgaccatggactttgtggatggatcagggagaaagacaatgacttgcactgggaaccaatcagggacccagcaggtggacaatatctgacagtgtcggcagccaaagccccagggggaaaagctgcacgcttggtgctacctctcggccgcctcatgcattcaggggacctgtgcctgtcattcaggcacaaggtgacggggctgcactctggcacactccaggtgtttgtgagaaaacacggtgcccacggagcagccctgtggggaagaaatggtggccatggctggaggcaaacacagatcaccttgcgaggggctgacatcaagagcgtcgtcttcaaaggtgaaaaaaggcgtggtcacactggggagattggattagatgatgtgagcttgaaaaaaggccactgctctgaagaacgctaacaactccagaactaacaatgaactcctaa

SEQ ID NO: 28 - protein, 536 aa, Homo sapiens
MDFLLALVLVSSLYLQAAAEFDGRWPRQIVSSIGLCRYGGRIDCCWGWARQSWGQCQPVCQPRCKHGECIGPNKCKCHPGYAGKTCNQDLNECGLKPRPCKHRCMNTYGSYKCYCLNGYMLMPDGSCSSALTCSMANCQYGCDVVKGQIRCQCPSPGLQLAPDGRTCVDIDECATGRASCPRFRQCVNTFGSYICKCHKGFDLMYIGGKYQCHDIDECSLGQYQCSSFARCYNIRGSYKCKCKEGYQGDGLTCVYIPKVMIEPSGPIHVPKGNGTILKGDTGNNNWIPDVGSTWWPPKTPYIPPIITNRPTSKPTTRPTPKPTPIPTPPPPPPLPTELRTPLPPTTPERPTTGLTTIAPAASTPPGGITVDNRVQTDPQKPRGDVFSVLVHSCNFDHGLCGWIREKDNDLHWEPIRDPAGGQYLTVSAAKAPGGKAARLVLPLGRLMHSGDLCLSFRHKVTGLHSGTLQVFVRKHGAHGAALWGRNGGHGWRQTQITLRGADIKSVVFKGEKRRGHTGEIGLDDVSLKKGHCSEER

SEQ ID NO: 29 - DNA, 1882 bp, Homo sapiens
  CDS (243)..(1850)
ggacactgacatggactgaaggagtagaaaagaagggagcgggagggggctccgggcgccgcgcagcagacctactccggccgcgcgcctcgccgctgtcctccgggagcggcagcagtagcccgggcggcgagggctgggggttcctcgagactctcagaggggcgcctcccatcggcgcccaccaccccaacctgttcctcgcgcgccactgcgctgcgccccaggacccgctgcccaacatggattttctcctggcgctggtgctggtatcctcgctctacctgcaggcggccgccgagttcgacgggaggtggcccaggcaaatagtgtcatcgattggcctatgtcgttatggtgggaggattgactgctgctggggctgggctcgccagtcttggggacagtgtcagcctgtgtgccaaccacgatgcaaacatggtgaatgtatcgggccaaacaagtgcaagtgtcatcctggttatgctggaaaaacctgtaatcaagatctaaatgagtgtggcctgaagccccggccctgtaagcacaggtgcatgaacacttacggcagctacaagtgctactgtctcaacggatatatgctcatgccggatggttcctgctcaagtgccctgacctgctccatggcaaactgtcagtatggctgtgatgttgttaaaggacaaatacggtgccagtgcccatcccctggcctgcagctggctcctgatgggaggacctgtgtagatgttgatgaatgtgctacaggaagagcctcctgccctagatttaggcaatgtgtcaacacttttgggagctacatctgcaagtgtcataaaggcttcgatctcatgtatattggaggcaaatatcaatgtcatgacatagacgaatgctcacttggtcagtatcagtgcagcagctttgctcgatgttataacgtacgtgggtcctacaagtgcaaatgtaaagaaggataccagggtgatggactgacttgtgtgtatatcccaaaagttatgattgaaccttcaggtccaattcatgtaccaaagggaaatggtaccattttaaagggtgacacaggaaataataattggattcctgatgttggaagtacttggtggcctccgaagacaccatatattcctcctatcattaccaacaggcctacttctaagccaacaacaagacctacaccaaagccaacaccaattcctactccaccaccaccaccacccctgccaacagagctcagaacacctctaccacctacaaccccagaaaggccaaccaccggactgacaactatagcaccagctgccagtacacctccaggagggattacagttgacaacagggtacagacagaccctcagaaacccagaggagatgtgttcagtgttctggtacacagttgtaattttgaccatggactttgtggatggatcagggagaaagacaatgacttgcactgggaaccaatcagggacccagcaggtggacaatatctgacagtgtcggcagccaaagccccagggggaaaagctgcacgcttggtgctacctctcggccgcctcatgcattcaggggacctgtgcctgtcattcaggcacaaggtgacggggctgcactctggcacactccaggtgtttgtgagaaaacacggtgcccacggagcagccctgtggggaagaaatggtggccatggctggaggcaaacacagatcaccttgcgaggggctgacatcaagagcgtcgtcttcaaaggtgaaaaaaggcgtggtcacactggggagattggattagatgatgtgagcttgaaaaaaggccactgctctgaagaacgctaacaactccagaactaacaatgaactcctaa

SEQ ID NO: 30 - protein, 536 aa, Homo sapiens [sequence omitted]

SEQ ID NO: 31 - DNA, 10655 bp, Homo sapiens
  CDS (1)..(10638)
ggccagaactgcacgttccaactgcacggtcccaatgggacagttgagagcccagggttcccatatggctaccccaattacgccaactgcacgtggaccatcaccgcggaagagcagcacagaatccagcttgtgttccagtcctttgccctggaagaggactttgatgtcctgtcggtgtttgatggtccaccccagccagagaatctgcgtacgaggctcacaggctttcagctgccagccaccattgttagtgcagccaccaccctctctctgcgcctcatcagcgactatgcagtcagtgcccaaggcttccacgccacctatgaagttctccccagccacacatgtgggaacccagggaggctgcccaatggcatccagcagggttcaaccttcaacctcggtgacaaggtccgctacagctgcaaccttggcttcttcctggagggccacgccgtgctcacctgccacgctggctctgagaacagcgccacgtgggacttccccctgccttcctgcagagctgatgatgcctgtggtgggaccctgcggggccagagtggcatcatctccagcccccacttcccctcggagtaccataacaatgccgactgcacatggaccatcctggctgagctgggggacaccatcgccctggtgtttattgacttccagctggaggatggttacgactttctggaagtcactgggacagaaggctcctccctctggttcaccggagccagcctcccagcccccgttatcagcagcaagaactggctgcgactgcacttcacatcggatggcaaccaccggcagcgcggattcagtgcccaataccaagtcaagaagcaaattgagttgaagtctcgaggtgtgaagctgatgcccagcaaagacaacagccagaagacgtctgtggtaactcaggttggtgtgtcccaaggacataatatgtgtccagaccctggcatacccgaaaggggcaaaagactaggctcggatttcaggttaggatccagcgtccagttcacctgcaacgagggctatgacctgcaagggtccaagcggatcacctgtatgaaagtgagcgacatgtttgcggcctggagcgaccacaggccagtctgccgagcccgcatgtgtgatgcccaccttcgaggcccctcgggcatcatcacctcccccaatttccccattcagtatgacaacaatgcacactgtgtgtggatcatcacagcactcaacccctccaaggtaatcaagctcgcctttgaggagtttgatttggagaggggctatgacaccctgacggtcggtgatggtggtcaggatggggaccagaagacagttctctacatgctgacaggtacatcggtcccggatctcattgtcagcaccaatcatcaaatgtggctcctcttccagactgatggcagtggcagttccctgggattcaaggcttcttatgaagagatcgagcagggcagttgcggtgaccctggcatacctgcatatggccggagggaaggctcccggtttcgccacggtgacacactcaagtttgagtgccagcccgcctttgagctggtgggacagaaggcaatcacatgccaaaagaataaccaatggtcggctaagaagccaggctgcgtgtgttcctgcttcttcaacttcaccagcccgtctggggttgtcctgtctcccaactacccagaggactatggcaaccacctccactgtgtctggctcatcctggccaggcctgagagccgcatccacctggccttcaacgacattgacgtggagcctcagtttgatttcctggtcatcaaggatggggccaccgccgaggcgcccgtcctgggcaccttctcaggaaaccagcttccctcctccatcacaagcagtggccacgtggcccgtctcgagttccagactgaccactccacagggaagaggggcttcaacatcacttttaccagtgagtcctccaacgagtgcccggatcctggcgttccagtaaatggcaaacggtttggggacagcctccagctgggcagctccatctccttcctctgtgatgaaggcttccttgggactcagggctcagagaccatcacctgcgtcctgaaggagggcagcgtggtctggaacagcgctgtgctgcggtgtgaagctccctgtggtggtcacctgacttcgcccagcggcaccatcctctctccgggctggcctggcttctacaaggatgccttgagctgtgcctgggtgattgaggcccagccaggctaccccatcaaaatcaccttcgacaggttcaaaaccgaggtcaactatgacaccctggaagtacgcgatgggcggacttactcagcgcccttgatcggggtttaccacgggacccaggttccccagttcctcatcagcaccagcaactacctctacctcctcttctctaccgacaagagtcactcggacatcggcttccagctccgctatgaggctataacactgcagtcagaccactgtctggatccaggaatcccagtaaatggacagcgtcatgggaatgacttctacgtgggcgcgctggtgaccttcagctgtgactcgggctacacattaagtgacggggagcctctggagtgtgagcccaacttccagtggagccgggccctgcccagttgtgaagctctctgtggtggcttcattcaaggctccagtgggaccatcttgtcgccaggtttccctgacttctaccccaacaacttgaactgcacctggattatcgaaacatctcatggcaagggtgtgttcttcactttccacaccttccacctggaaagtggccatgactacctcctcatcactgagaacggcagcttcacccagcccctgaggcagctaactggatctcggctgccagctcccatcagcgctgggctctatggcaacttcactgcccaggtccgcttcatctctgatttctccatgtcatatgaaggattcaacatcaccttctcagagtacgacttggagccctgtgaggagcccgaggtcccagcctacagcatccggaagggcttgcagtttggcgtgggcgacaccttgaccttctcctgcttccccgggtaccgtctggagggcaccgcccgcatcacgtgcctggggggcagacggcgcctgtggagctcgcctctgccaaggtgtgttgctgagtgtgggaattcagtcacaggcactcagggtactttgctgtcccccaactttcctgtgaactacaataacaatcatgaatgcatctactccatccagacccagccagggaagggaattcagctgaaagccagggcattcgaactctccgaaggagatgtcctcaaggtttatgatggcaacaacaactccgcccgtttgctgggagtttttagccattctgagatgatgggggtgactttgaacagcacatccagcagtctgtggcttgatttcatcactgatgctgaaaacaccagcaagggctttgaactgcacttttccagttttgaactcatcaaatgtgaggacccaggaacccccaagtttggctacaaggttcatgatgaaggtcattttgcagggagctccgtgtccttcagctgtgaccctggatacagcctgcggggtagtgaggagctgctgtgtctgagtggagagcgccggacctgggaccggcctctgcccacctgtgtcgccgagtgtggagggacagtgagaggagaggtgtcggggcaggtgctgtcacccgggtatccagctccctatgaacacaatctcaactgcatctggaccatcgaagcagaggccggctgcaccattgggctacacttcctggtgtttgacacagaggaggttcacgacgtgctgcgcatctgggatgggcctgtggagagcggggttctgctgaaggagctgagtggcccggccctgcccaaggacctgcatagcaccttcaactcggtcgtcctgcagttcagcactgacttcttcaccagcaagcagggctttgccattcaattttcaggttccacagcaacgtcctgcaatgaccctgggatcccgcagaatgggagtcggagtggtgacagttgggaagccggcgactccacagtgttccagtgtgaccctggctacgcgctgcagggaagtgcagagatcagctgtgtgaagatcgagaacaggttcttctggcagcccagcccgccaacatgcatcgctccctgcgggggagacctgacaggaccatctggagtcatcctctcaccaaattacccagaaccctacccgccaggcaaggagtgtgactggaaagtgaccgtctcaccagactacgtcatcgccctggtattgttccccagctttaacctggagcctggctatgacttcctccatatctacgacggacgggactctctcagccctctcataggaagcttctatggctcccagctcccaggccgcattgaaagcagcagcaacagcctcttcctcgccttccgcagcgatgcatctgtgagcaatgctggcttcgtcattgacttcccagaaaacccgcgggagtcatgttttgatcctggttccatcaagaacggcacacgggtggggtccgacctgaagctgggctcctccgtcacctactactgccacgggggctacgaagttgagggcacctcgaccctgagctgcatcctggggcctgatgggaagcccgtgtggaacaatccccggccagtctgcacagccccctgtgggggacagtatgtgggttcggacggagtggtcttgtcccccaactacccccagaactacaccagtggacagatctgcttgtattttgttactgtgcccaaggactatggtgtggtgtttggccagttcgccttctttcacacggccctcaacgacgtggtggaggttcacgacggccacagccagcactcgcggctcctcagctccctctcgggctcccatacaggtgaatcactgcccttggccacctccaatcaagttctcattaagttcagcgccaaaggcctcgcaccagccagaggcttccactttgtctaccaagcggttcctcgaaccagcgccacgcagtgcagctctgtgccggaaccccgctatggcaagaggctgggcagtgacttctcggtgggggccatcgtccgcttcgaatgcaactccggctatgccctgcaggggtcgccagagatcgagtgcctccctgtgcctggggccttggcccaatggaatgtctcagcgcccacgtgtgtggtgccgtgtggaggcaacctcacagagcgcaggggcaccatcctgtcccctggcttcccagagccgtacctcaacagcctcaactgtgtgtggaagatcgtggtccccgaaggcgctggcatccagatccaagttgtcagttttgtgacagagcagaactgggactcgctggaagtatttgatggtgcagataacactgtaaccatgctggggagtttctcaggaacaaccgtgcctgcccttctgaacagcacctccaaccagctctaccttcatttctactcagatatcagcgtatctgcagctggcttccacttggagtacaaaacggtgggcctgagcagttgtccggaacctgctgtgcccagtaacggggtgaagactggcgagcgctacttggtgaatgatgtggtgtctttccagtgtgagccgggatatgccctccagggccacgcccacatctcctgcatgcccggaacagtgcggcgatggaactaccctcctccactctgtattgcacagtgtgggggaacagtggaggagatggagggggtgatcctgagccccggcttcccaggcaactaccccagtaacatggactgctcctggaaaatagcactgcccgtgggctttggagctcacatccagttcctgaacttctccaccgagcccaaccacgactacatagaaatccggaatggcccctatgagaccagccgcatgatgggaagattcagtggaagcgagcttccaagctccctcctctccacgtcccacgagaccaccgtgtatttccacagcgaccactcccagaatcggccaggattcaagctggagtatcaggcctatgaacttcaagagtgcccagacccagagccctttgccaatggcattgtgaggggagctggctacaacgtgggacaatcagtgaccttcgagtgcctcccggggtatcaattgactggccaccctgtcctcacgtgtcaacatggcaccaaccggaactgggaccaccccctgcccaagtgtgaagtcccttgtggcgggaacatcacttcttccaacggcactgtgtactccccggggttccctagcccgtactccagctcccaggactgtgtctggctgatcaccgtgcccattggccatggcgtccgcctcaacctcagcctgctgcagacagagccctctggagatttcatcaccatctgggatgggccacagcaaacagcaccacggctcggcgtcttcacccggagcatggccaagaaaacagtgcagagttcatccaaccaggtcctgctcaagttccaccgtgatgcagccacaggggggatcttcgccatagctttctccgcttatccactcaccaaatgccctcctcccaccatcctccccaacgccgaagtcgtcacagagaatgaagaattcaatataggtgacatcgtacgctacagatgcctccctggctttaccttagtggggaatgaaattctgacctgcaaacttggaacctacctgcagtttgaaggaccacccccgatatgtgaagtgcactgtccaacaaatgagcttctgacagactccacaggcgtgatcctgagccagagctaccctggaagctatccccagttccagacctgctcttggctggtgagagtggagcccgactataacatctccctcacagtggagtacttcctcagcgagaagcaatatgatgagtttgagatttttgatggtccatcaggacagagtcctctgctgaaagccctcagtgggaattactcagctcccctgattgtcaccagctcaagcaactctgtgtacctgcgttggtcatctgatcacgcctacaatcggaagggcttcaagatccgctattcagccccttactgcagcctgcccagggctccactccatggcttcatcctaggccagaccagcacccagcccgggggctccatccactttggctgcaacgccggctaccgcctggtgggacacagcatggccatctgtacccggcacccccagggctaccacctgtggagcgaagccatccctctctgtcaagctctttcctgtgggcttcctgaggcccccaagaatggaatggtgtttggcaaggagtacacagtgggaaccaaggccatgtacagctgcagtgaaggctaccacctccaggcaggcgctgaggccactgcagagtgtctggacacaggcctatggagcaaccgcaatgtcccaccacagtgtgtccctgtgacttgtcctgatgtcagtagcatcagcgtggagcatggccgatggaggcttatctttgagacacagtatcagttccaggcccagctgatgctcatctgtgaccctggctactactatactggccaaagggtcatccgctgtcaggccaatggcaaatggagcctcggggactctacgcccacctgccgaatcatctcctgtggagagctcccgattccccccaatggccaccgcatcggaacactgtctgtctacggggcaacagccatcttctcctgcaattccggatacacactggtgggctccagggtgcgtgagtgcatggccaatgggctctggagtggctctgaagtccgctgccttgctggacactgtgggactcctgagcccattgtcaacggacacatcaatggggagaactacagctaccggggcagtgtggtgtaccaatgcaatgctggcttccgcctgatcggcatgtctgtgcgcatctgccagcaggatcatcactggtcgggcaagacccctttctgtgtgccaattacctgtggacacccaggcaaccctgtcaacggcctcactcagggtaaccagtttaacctcaacgatgtggtcaagtttgtttgcaaccctgggtatatggctgagggggctgctaggtcccaatgcctggccagcgggcaatggagtgacatgctgcccacctgcagaatcatcaactgtacagatcctggacaccaagaaaatagtgttcgtcaggtccacgccagcggcccgcacaggttcagcttcggcaccactgtgtcttaccggtgcaaccacggcttctacctcctgggcaccccagtgctcagctgccagggagatggcacatgggaccgtccccgcccccagtgtctcctggtgtcctgtggccatccgggctccccgcctcactcccagatgtctggagacagttatactgtgggagcagtggtgcggtacagctgcatcggcaagcgtactctggtgggaaacagcacccgcatgtgtgggctggatggacactggactggctccctccctcactgctcaggaaccagcgtgggagtttgcggtgaccctgggatcccggctcatggcatccgtttgggggacagctttgatccaggcactgtgatgcgcttcagctgtgaagctggccacgtgctccggggatcgtcagagcgcacctgtcaagccaatggctcgtggagcggctcgcagcctgagtgtggagtgatctcttgtgggaaccctgggactccaagtaatgcccgagttgtgttcagtgatggcctggttttctccagctctatcgtctatgagtgccgggaaggatactacgccacaggcctgctcagccgtcactgctcggtcaatggtacctggacaggcagtgaccctgagtgcctcgtcataaactgtggtgaccctgggattccagccaatggccttcggctgggcaatgacttcaggtacaacaaaactgtgacatatcagtgtgtccctggctatatgatggagtcacatagagtatctgtgctgagctgcaccaaggaccggacatggaatggaaccaagcccgtctgcaaagctctcatgtgcaagccacctccgctcatccccaatgggaaggtggtggggtctgacttcatgtggggctcaagtgtgacttatgcctgcctggaggggtaccagctctccctgcccgcggtgttcacctgtgagggaaatgggtcctggaccggagagctgcctcagtgtttccctgtgttctgcggggatcctggtgtcccgtcccgtgggaggagagaggaccgaggcttctcctacaggtcatctgtctccttctcctgccatccccctctggtgctggtgggctctccacgcaggttttgccagtcagatgggacatggagtggcacccagcccagctgcatagatccgaccctgaccacgtgtgcggaccctggtgtgccacagtttgggatacagaacaattctcagggctaccaggttggaagcacagtcctcttccgttgtcaaaaaggctacctgcttcagggctccaccaccaggacctgcctcccaaacctgacctggagtggaaccccacctgactgtgtcccccaccactgcaggcagccagagacgccaacgcatgccaacgtcggggccctggatttgccctccatgggctacacgctcatctactcctgccaggagggcttctccctcaagggtggctccgagcaccgcacctgcaaggcggatggcagctggacaggcaagccgcccatctgcctggaggtccggcccaatgggagacccatcaacactgcccgggagccaccgctcacccaagccttgattcctggggatgtttttgccaagaattccctgtggaaaggggcctatgaataccaggggaagaagcagccagccatgctcagagtgactggcttccaagttgccaacagcaaggtcaatgccaccatgatcgaccacagtggcgtggagctgcacttggctggaacttacaagaaagaagattttcatctcctactccaggtgtaccagattacagggcctgtggagatctttatgaataagttcaaagatgatcactgggctttagatggccatgtctcgtcagagtcctccggagccaccttcatctaccaaggctctgtcaagggccaaggctttgggcagttcggctttcaaagactggacctcaggctgctggagtcagaccccgagtccattggccgccactttgcttccaacagcagctcagtggcagccgcgatcctggtgcctttcatcgccctcattattgcgggcttcgtgctctatctctacaagcacaggagaagacccaaagttcctttcaatggctatgctggccacgagaacaccaatgttcgggccacatttgagaacccaatgtacgaccgcaacatccagcccacagacatcatggccagcgaggcggagttcacagtcagcacagtgtgcacagcagtatagccacccggcctggc

SEQ ID NO: 32 - protein, 3546 aa, Homo sapiens
GQNCTFQLHGPNGTVESPGFPYGYPNYANCTWTITAEEQHRIQLVFQSFALEEDFDVLSVFDGPPQPENLRTRLTGFQLPATIVSAATTLSLRLISDYAVSAQGFHATYEVLPSHTCGNPGRLPNGIQQGSTFNLGDKVRYSCNLGFFLEGHAVLTCHAGSENSATWDFPLPSCRADDACGGTLRGQSGIISSPHFPSEYHNNADCTWTILAELGDTIALVFIDFQLEDGYDFLEVTGTEGSSLWFTGASLPAPVISSKNWLRLHFTSDGNHRQRGFSAQYQVKKQIELKSRGVKLMPSKDNSQKTSVVTQVGVSQGHNMCPDPGIPERGKRLGSDFRLGSSVQFTCNEGYDLQGSKRITCMKVSDMFAAWSDHRPVCRARMCDAHLRGPSGIITSPNFPIQYDNNAHCVWIITALNPSKVIKLAFEEFDLERGYDTLTVGDGGQDGDQKTVLYMLTGTSVPDLIVSTNHQMWLLFQTDGSGSSLGFKASYEEIEQGSCGDPGIPAYGRREGSRFRHGDTLKFECQPAFELVGQKAITCQKNNQWSAKKPGCVCSCFFNFTSPSGVVLSPNYPEDYGNHLHCVWLILARPESRIHLAFNDIDVEPQFDFLVIKDGATAEAPVLGTFSGNQLPSSITSSGHVARLEFQTDHSTGKRGFNITFTSESSNECPDPGVPVNGKRFGDSLQLGSSISFLCDEGFLGTQGSETITCVLKEGSVVWNSAVLRCEAPCGGHLTSPSGTILSPGWPGFYKDALSCAWVIEAQPGYPIKITFDRFKTEVNYDTLEVRDGRTYSAPLIGVYHGTQVPQFLISTSNYLYLLFSTDKSHSDIGFQLRYEAITLQSDHCLDPGIPVNGQRHGNDFYVGALVTFSCDSGYTLSDGEPLECEPNFQWSRALPSCEALCGGFIQGSSGTILSPGFPDFYPNNLNCTWIIETSHGKGVFFTFHTFHLESGHDYLLITENGSFTQPLRQLTGSRLPAPISAGLYGNFTAQVRFISDFSMSYEGFNITFSEYDLEPCEEPEVPAYSIRKGLQFGVGDTLTFSCFPGYRLEGTARITCLGGRRRLWSSPLPRCVAECGNSVTGTQGTLLSPNFPVNYNNNHECIYSIQTQPGKGIQLKARAFELSEGDVLKVYDGNNNSARLLGVFSHSEMMGVTLNSTSSSLWLDFITDAENTSKGFELHFSSFELIKCEDPGTPKFGYKVHDEGHFAGSSVSFSCDPGYSLRGSEELLCLSGERRTWDRPLPTCVAECGGTVRGEVSGQVLSPGYPAPYEHNLNCIWTIEAEAGCTIGLHFLVFDTEEVHDVLRIWDGPVESGVLLKELSGPALPKDLHSTFNSVVLQFSTDFFTSKQGFAIQFSGSTATSCNDPGIPQNGSRSGDSWEAGDSTVFQCDPGYALQGSAEISCVKIENRFFWQPSPPTCIAPCGGDLTGPSGVILSPNYPEPYPPGKECDWKVTVSPDYVIALVLFPSFNLEPGYDFLHIYDGRDSLSPLIGSFYGSQLPGRIESSSNSLFLAFRSDASVSNAGFVIDFPENPRESCFDPGSIKNGTRVGSDLKLGSSVTYYCHGGYEVEGTSTLSCILGPDGKPVWNNPRPVCTAPCGGQYVGSDGVVLSPNYPQNYTSGQICLYFVTVPKDYGVVFGQFAFFHTALNDVVEVHDGHSQHSRLLSSLSGSHTGESLPLATSNQVLIKFSAKGLAPARGFHFVYQAVPRTSATQCSSVPEPRYGKRLGSDFSVGAIVRFECNSGYALQGSPEIECLPVPGALAQWNVSAPTCVVPCGGNLTERRGTILSPGFPEPYLNSLNCVWKIVVPEGAGIQIQVVSFVTEQNWDSLEVFDGADNTVTMLGSFSGTTVPALLNSTSNQLYLHFYSDISVSAAGFHLEYKTVGLSSCPEPAVPSNGVKTGERYLVNDVVSFQCEPGYALQGHAHISCMPGTVRRWNYPPPLCIAQCGGTVEEMEGVILSPGFPGNYPSNMDCSWKIALPVGFGAHIQFLNFSTEPNHDYIEIRNGPYETSRMMGRFSGSELPSSLLSTSHETTVYFHSDHSQNRPGFKLEYQAYELQECPDPEPFANGIVRGAGYNVGQSVTFECLPGYQLTGHPVLTCQHGTNRNWDHPLPKCEVPCGGNITSSNGTVYSPGFPSPYSSSQDCVWLITVPIGHGVRLNLSLLQTEPSGDFITIWDGPQQTAPRLGVFTRSMAKKTVQSSSNQVLLKFHRDAATGGIFAIAFSAYPLTKCPPPTILPNAEVVTENEEFNIGDIVRYRCLPGFTLVGNEILTCKLGTYLQFEGPPPICEVHCPTNELLTDSTGVILSQSYPGSYPQFQTCSWLVRVEPDYNISLTVEYFLSEKQYDEFEIFDGPSGQSPLLKALSGNYSAPLIVTSSSNSVYLRWSSDHAYNRKGFKIRYSAPYCSLPRAPLHGFILGQTSTQPGGSIHFGCNAGYRLVGHSMAICTRHPQGYHLWSEAIPLCQALSCGLPEAPKNGMVFGKEYTVGTKAMYSCSEGYHLQAGAEATAECLDTGLWSNRNVPPQCVPVTCPDVSSISVEHGRWRLIFETQYQFQAQLMLICDPGYYYTGQRVIRCQANGKWSLGDSTPTCRIISCGELPIPPNGHRIGTLSVYGATAIFSCNSGYTLVGSRVRECMANGLWSGSEVRCLAGHCGTPEPIVNGHINGENYSYRGSVVYQCNAGFRLIGMSVRICQQDHHWSGKTPFCVPITCGHPGNPVNGLTQGNQFNLNDVVKFVCNPGYMAEGAARSQCLASGQWSDMLPTCRIINCTDPGHQENSVRQVHASGPHRFSFGTTVSYRCNHGFYLLGTPVLSCQGDGTWDRPRPQCLLVSCGHPGSPPHSQMSGDSYTVGAVVRYSCIGKRTLVGNSTRMCGLDGHWTGSLPHCSGTSVGVCGDPGIPAHGIRLGDSFDPGTVMRFSCEAGHVLRGSSERTCQANGSWSGSQPECGVISCGNPGTPSNARVVFSDGLVFSSSIVYECREGYYATGLLSRHCSVNGTWTGSDPECLVINCGDPGIPANGLRLGNDFRYNKTVTYQCVPGYMMESHRVSVLSCTKDRTWNGTKPVCKALMCKPPPLIPNGKVVGSDFMWGSSVTYACLEGYQLSLPAVFTCEGNGSWTGELPQCFPVFCGDPGVPSRGRREDRGFSYRSSVSFSCHPPLVLVGSPRRFCQSDGTWSGTQPSCIDPTLTTCADPGVPQFGIQNNSQGYQVGSTVLFRCQKGYLLQGSTTRTCLPNLTWSGTPPDCVPHHCRQPETPTHANVGALDLPSMGYTLIYSCQEGFSLKGGSEHRTCKADGSWTGKPPICLEVRPNGRPINTAREPPLTQALIPGDVFAKNSLWKGAYEYQGKKQPAMLRVTGFQVANSKVNATMIDHSGVELHLAGTYKKEDFHLLLQVYQITGPVEIFMNKFKDDHWALDGHVSSESSGATFIYQGSVKGQGFGQFGFQRLDLRLLESDPESIGRHFASNSSSVAAAILVPFIALIIAGFVLYLYKHRRRPKVPFNGYAGHENTNVRATFENPMYDRNIQPTDIMASEAEFTVSTVCTAV

SEQ ID NO: 33 - DNA, 10136 bp, Homo sapiens
  CDS (1)..(9312)
atggcgggcgcccctccccccgccttgctgctgccttgcagtttgatctcagactgctgtgctagcaatcagcgacactccgtgggcgtaggaccctccgagctagtcaagaagcaaattgagttgaagtctcgaggtgtgaagctgatgcccagcaaagacaacagccagaagacgtctgtgttaactcaggttggtgtgtcccaaggacataatatgtgtccagaccctggcatacccgaaaggggcaaaagactaggctcggatttcaggttaggatccagcgtccagttcacctgcaacgagggctatgacctgcaagggtccaagcggatcacctgtatgaaagtgagcgacatgtttgcggcctggagcgaccacaggccagtctgccgagcccgcatgtgtgatgcccaccttcgaggcccctcgggcatcatcacctcccccaatttccccattcagtatgacaacaatgcacactgtgtgtggatcatcacagcactcaacccctccaaggtgatcaagctcgcctttgaggagtttgatttggagaggggctatgacaccctgacggtcggtgatggtggtcaggatggggaccagaagacagttctctacatgtctcaaaatgcctgcagtgacagccctcacaccccaggctctcgcatcccagagagcatgtctggggacatctggaggcagaaatggactgtacttgagatctgtcgtgacattagcagttcagatgcaaggtcaggttcagtgaggaagtctccaaagacttctaatgctgtggaacttgttgctcctgggacagagatcgagcagggcagttgcggtgaccctggcatacctgcatatggccggagggaaggctcccggtttcaccacggtgacacactcaagtttgagtgccagcccgcctttgagctggtgggacagaaggcaatcacatgccaaaagaataaccaatggtcggctaagaagccaggctgcgtgttctcctgcttcttcaacttcaccagcccgtctggggttgtcctgtctcccaactacccagaggactatggcaaccacctccactgtgtctggctcatcctggccaggcctgagagccgcatccacctggccttcaacgacattgacgtggagcctcagtttgatttcctggtcatcaaggatggggccaccgccgaggcgcccgtcctgggcaccttctcaggaaaccagcttccctcctccatcacaagcagtggccacgtggcccgtctcgagttccagactgaccactccacagggaagaggggcttcaacatcacttttaccaccttccgacacaacgagtgcccggatcctggcgttccagtaaatggcaaacggtttggggacagcctccagctgggcagctccatctccttcctctgtgatgaaggcttccttgggactcagggctcagagaccatcacctgcgtcctgaaggagggcagcgtggtctggaacagcgctgtgctgcggtgtgaagctccctgtggtggtcacctgacttcgcccagcggcaccatcctctctccgggctggcctggcttctacaaggatgccttgagctgtgcctgggtgattgaggcccagccaggctaccccatcaaaatcaccttcgacagattcaaaaccgaggtcaactatgacaccctggaagtacgcgatgggcggacttactcagcgcccttgatcggggtttaccacgggacccaggttccccagttcctcatcagcaccagcaactacctctacctcctcttctctaccgacaagagtcactcggacatcggcttccagctccgctatgagactataacactgcagtcagaccactgtctggatccaggaatcccagtaaatggacagcgtcatgggaatgacttctacgtgggcgcgctggtgaccttcagctgtgactcgggctacacattaagtgacggggagcctctggagtgtgagcccaacttccagtggagccgggccctgcccagttgtgaagctctctgtggtggcttcattcaaggctccagtgggaccatcttgtcgccagggttccctgacttctaccccaacaacttgaactgcacctggattatcgaaacatctcatggcaagggtgtgttcttcactttccacaccttccacctggaaagtggccatgactacctcctcatcactgagaacggcagcttcacccagcccctgaggcagctaactggatctcggctgccagctcccatcagcgctgggctctatggcaacttcactgcccaggtccgcttcatctctgatttctccatgtcatatgaaggattcaacatcaccttctcagagtacgacttggagccctgtgaggagcccgaggtcccagcctacagcatccggaagggcttgcagtttggcgtgggcgacaccttgaccttctcctgcttccccgggtaccgtctggagggcaccgcccgcatcacgtgcctggggggcagacggcgcctgtggagctcgcctctgccaaggtgtgttgctgagtgtgggaattcagtcacaggcactcagggtactttgctgtcccccaactttcctgtgaactacaataacaatcatgaatgcatctactccatccagacccagccagggaagggaattcagctgaaagccagggcattcgaactctccgaaggagatgtcctcaaggtttatgatggcaacaacaactccgcccgtttgctgggagtttttagccattctgagatgatgggggtgactttgaacagcacatccagcagtctgtggcttgatttcatcactgatgctgaaaacaccagcaagggctttgaactgcacttttccagctttgaactcatcaaatgtgaggacccaggaacccccaagtttggctacaaggttcatgatgaaggtcattttgcagggagctccgtgtccttcagctgtgaccctggatacagcctgcggggtagtgaggagctgctgtgtctgagtggagagcgccggacctgggaccggcctctgcccacctgtgtcgccgagtgtggagggacagtgagaggagaggtgtcggggcaggtgctgtcacccgggtatccagctccctatgaacacaatctcaactgcatctggaccatcgaagcagaggccggctgcaccattgggctacacttcctggtgtttgacacagaggaggttcacgacgtgctgcgcatctgggatgggcctgtggagagcggggttctgctgaaggagctgagtggcccggccctgcccaaggacctgcatagcaccttcaactcggtcgtcctgcagttcagcactgacttcttcaccagcaagcagggctttgccattcaattttcagtgtccacagcaacgtcctgcaatgaccctgggatcccgcagaatgggagtcggagtggtgacagttgggaagccggcgactccacagtgttccagtgtgaccctggctacgcgctgcagggaagtgcagagatcagctgtgtgaagatcgagaacaggttcttctggcagcccagcccgccaacatgcatcgctccctgcgggggagacctgacaggaccatctggagtcatcctctcaccaaattacccagaaccctacccgccaggcaaggagtgtgactggaaagtgaccgtctcaccagactacgtcatcgccctggtatttaacatctttaacctggagcctggctatgacttcctccatatctacgacggacgggactctctcagccctctcataggaagcttctatggctcccagctcccaggccgcattgaaagcagcagcaacagcctcttcctcgccttccgcagcgatgcatctgtgagcaatgctggcttcgtcattgactatacagaaaacccgcgggagtcatgttttgatcctggttccatcaagaacggcacacgggtggggtccgacctgaagctgggctcctccgtcacctactactgccacgggggctacgaagttgagggcacctcgaccctgagctgcatcctggggcctgatgggaagcccgtgtggaacaatccccggccagtctgcacagccccctgtgggggacagtatgtgggttcggacggagtggtcttgtcccccaactacccccagaactacaccagtggacagatctgcttgtattttgttactgtgcccaaggactatgtggtgtttggccagttcgccttctttcacacggccctcaacgacgtggtggaggttcacgacggccacagccagcactcgcggctcctcagctccctctcgggctcccatacaggagaatcactgcccttggccacctccaatcaagttctcattaagttcagcgccaaaggcctcgcaccagccagaggcttccactttgtctaccaagcggttcctcgaaccagcgccacgcagtgcagctctgtgccggaaccccgctatggcaagaggctgggcagtgacttctcggtgggggccatcgtccgcttcgaatgcaactccggctatgccctgcaggggtcgccagagatcgagtgcctccctgtgcctggggccttggcccaatggaatgtctcagcgcccacgtgtgtggtgccgtgtggaggcaacctcacagagcgcaggggcaccatcctgtcccctggcttcccagagccgtacctcaacagcctcaactgtgtgtggaagatcgtggtccccgaaggcgctggcatccagatccaagttgtcagttttgtgacagagcagaactgggactcgctggaagtatttgatggtgcagataacactgtaaccatgctggggagtttctcaggaacaaccgtgcctgcccttctgaacagcacctccaaccagctctaccttcatttctactcagatatcagcgtatctgcagctggcttccacttggagtacaaaacggtgggcctgagcagttgtccggaacctgctgtgcccagtaacggggtgaagactggcgagcgctacttggtgaatgatgtggtgtctttccagtgtgagccgggatatgccctccagggccacgcccacatctcctgcatgcccggaacagtgcggcgatggaactaccctcctccactctgtattgcacagtgtgggggaacagtggaggagatggagggggtgatcctgagccccggcttcccaggcaactaccccagtaacatggactgctcctggaaaatagcactgcccgtgggctttggagctcacatccagttcctgaacttctccaccgagcccaaccacgactacatagaaatccggaatggcccctatgagaccagccgcatgatgggaagattcagtggaagcgagcttccaagctccctcctctccacgtcccacgagaccaccgtgtatttccacagcgaccactcccagaatcggccaggattcaagctggagtatcaggcctatgaacttcaagagtgcccagacccagagccctttgccaatggcattgtgaggggagctggctacaacgtgggacaatcagtgaccttcgagtgcctcccggggtatcaattgactggccaccctgtcctcacgtgtcaacatggcaccaaccggaactgggaccaccccctgcccaagtgtgaagtcccttgtggcgggaacatcacttcttccaacggcactgtgtactccccggggttccctagcccgtactccagctcccaggactgtgtctggctgatcaccgtgcccattggccatggcgtccgcctcaacctcagcctgctgcagacagagccctctggagatttcatcaccatctgggatgggccacagcaaacagcaccacggctcggcgtcttcacccggagcatggccaagaaaacagtgcagagttcatccaaccaggtcctgctcaagttccaccgtgatgcagccacaggggggatcttcgccatagctttctccgcttatccactcaccaaatgccctcctcccaccatcctccccaacgccgaagtcgtcacagagaatgaagaattcaatataggtgacatcgtacgctacagatgcctccctggctttaccttagtggggaatgaaattctgacctgcaaacttggaacctacctgcagtttgaaggaccacccccgatatgtgaagtgcactgtccaacaaatgagcttctgacagactccacaggcgtgatcctgagccagagctaccctggaagctatccccagttccagacctgctcttggctggtgagagtggagcccgactataacatctccctcacagtggagtacttcctcagcgagaagcaatatgatgagtttgagatttttgatggtccatcaggacagagtcctctgctgaaagccctcagtgggaattactcagctcccctgattgtcaccagctcaagcaactctgtgtacctgcgttggtcatctgatcacgcctacaatcggaagggcttcaagatccgctattcagccccttactgcagcctgcccagggctccactccatggcttcatcctaggccagaccagcacccagcccgggggctccatccactttggctgcaacgccggctaccgcctggtgggacacagcatggccatctgtacccggcacccccagggctaccacctgtggagcgaagccatccctctctgtcaagctctttcctgtgggcttcctgaggcccccaagaatggaatggtgtttggcaaggagtacacagtgggaaccaaggccgtgtacagctgcagtgaaggctaccacctccaggcaggcgctgaggccactgcagagtgtctggacacaggcctatggagcaaccgcaatgtcccaccacagtgtgtccctgtgacttgtcctgatgtcagtagcatcagcgtggagcatggccgatggaggcttatctttgagacacagtatcagttccaggcccagctgatgctcatctgtgaccctggctactactatactggccaaagggtcatccgctgtcaggccaatggcaaatggagcctcggggactctacgcccacctgccgaatcatctcctgtggagagctcccgattccccccaatggccaccgcatcggaacactgtctgtctacggggcaacagccatcttctcctgcaattccggatacacactggtgggctccagggtgcgtgagtgcatggccaatgggctctggagtggctctgaagtccgctgccttgctggacactgtgggactcctgagcccattgtcaacggacacatcaatggggagaactacagctaccggggcagtgtggtgtaccaatgcaatgctggcttccgcctgatcggcatgtctgtgcgcatctgccagcaggatcatcactggtcgggcaagacccctttctgtgtgccaattacctgtggacacccaggcaaccctgtcaacggcctcactcagggtaaccagtttaacctcaacgatgtggtcaagtttgtttgcaaccctgggtatatggctgagggggctgctaggtcccaatgcctggccagcgggcaatggagtgacatgctgcccacctgcagaatcatcaactgtacagatcctggacaccaagaaaatagtgttcgtcaggtccacgccagcggcccgcacaggttcagcttcggcaccactgtgtcttaccggtgcaaccacggcttctacctcctgggcaccccagtgctcagctgccagggagatggcacatgggaccgtccccgcccccagtgtctcttggtgtcctgtggccatccgggctccccgcctcactcccagatgtctggagacagttatactgtgggagcagtggtgcggtacagctgcatcggcaagcgtactctggtgggaaacagcacccgcatgtgtgggctggatggacactggactggctccctccctcactgctcaggaaccagcgtgggagtttgcggtgaccctgggatcccggctcatggcatccgtttgggggacagctttgatccaggcactgtgatgcgcttcagctgtgaagctggccacgtgctccggggatcgtcagagcgcacctgtcaagccaatggctcgtggagcggctcgcagcctgagtgtggagtgatctcttgtgggaaccctgggactccaagtaatgcccgagttgtgttcagtgatggcctggttttctccagctctatcgtctatgagtgccgggaaggatactacgccacaggcctgctcagccgtcactgctcggtcaatggtacctggacaggcagtgaccctgagtgcctcgtcataaactgtggtgaccctgggattccagccaatggccttcggctgggcaatgacttcaggtacaacaaaactgtgacatatcagtgtgtccctggctatatgatggagtcacatagagtatctgtgctgagctgcaccaaggaccggacatggaatggaaccaagcccgtctgcaaagctctcatgtgcaagccacctccgctcatccccaatgggaaggtggtggggtctgacttcatgtggggctcaagtgtgacttatgcctgcctggaggggtaccagctctccctgcccgcggtgttcacctgtgagggaaatgggtcctggaccggagagctgcctcagtgtttccctgtgttctgcggggatcctggtgtcccgtcccgtgggaggagagaggaccgaggcttctcctacaggtcatctgtctccttctcctgccatccccctctggtgctggtgggctctccacgcaggttttgccagtcagatgggacatggagtggcacccagcccagctgcatagatccgaccctgaccacgtgtgcggaccctggtgtgccacagtttgggatacagaacaattctcagggctaccaggttggaagcacagtcctcttccgttgtcaaaaaggctacctgcttcagggctccaccaccaggacctgcctcccaaacctgacctggagtggaaccccacctgactgtgtcccccaccactgcaggcagccagagacgccaacgcatgccaacgtcggggccctggatttgccctccatgggctacacgctcattactcctgccaggagggcttctccctcaagggtggctccgagcaccgcacctgcaaggcggatggcagctggacaggcaagccgcccatctgcctggaggtccggcccagtgggagacccatcaacactgcccgggagccaccgctcacccaagccttgattcctggggatgtttttgccaagaattccctgtggaaaggggcctatgaataccaggggaagaagcagccagccatgctcagagtgactggcttccaagttgccaacagcaaggtcaatgccaccatgatcgaccacagtggcgtggagctgcacttggctggaacttacaagaaagaagattttcatctcctactccaggtgtaccagattacagggcctgtggagatctttatgaataagttcaaagatgatcactgggctttagatggccatgtctcgtcagagtcctccggagccaccttcatctaccaaggctctgtcaagggccaaggctttgggcagttcggctttcaaagactggacctcaggctgctggagtcagaccccgagtccattggccgccactttgcttccaacagcagctcagtggcagccgcgatcctggtgcctttcatcgccctcattattgcgggcttcgtgctctatctctacaagcacaggagaagacccaaagttcctttcaatggctatgctggccacgagaacaccaatgttcgggccacatttgagaacccaatgtacgaccgcaacatccagcccacagacatcatggccagcgaggcggagttcacagtcagcacagtgtgcacagcagtatagccacccggcctggccgctttttttgctaggttgaactggtactccagcagccgccgaagctggactgtactgctgccatctcagctcactgcaacctccctgcctgattcccctgcctcagcctgccgagtgcctgcgattgcaggcgcgcaccgccac

SEQ ID NO: 34 - protein, 3104 aa, Homo sapiens
MAGAPPPALLLPCSLISDCCASNQRHSVGVGPSELVKKQIELKSRGVKLMPSKDNSQKTSVLTQVGVSQGHNMCPDPGIPERGKRLGSDFRLGSSVQFTCNEGYDLQGSKRITCMKVSDMFAAWSDHRPVCRARMCDAHLRGPSGIITSPNFPIQYDNNAHCVWIITALNPSKVIKLAFEEFDLERGYDTLTVGDGGQDGDQKTVLYMSQNACSDSPHTPGSRIPESMSGDIWRQKWTVLEICRDISSSDARSGSVRKSPKTSNAVELVAPGTEIEQGSCGDPGIPAYGRREGSRFHHGDTLKFECQPAFELVGQKAITCQKNNQWSAKKPGCVFSCFFNFTSPSGVVLSPNYPEDYGNHLHCVWLILARPESRIHLAFNDIDVEPQFDFLVIKDGATAEAPVLGTFSGNQLPSSITSSGHVARLEFQTDHSTGKRGFNITFTTFRHNECPDPGVPVNGKRFGDSLQLGSSISFLCDEGFLGTQGSETITCVLKEGSVVWNSAVLRCEAPCGGHLTSPSGTILSPGWPGFYKDALSCAWVIEAQPGYPIKITFDRFKTEVNYDTLEVRDGRTYSAPLIGVYHGTQVPQFLISTSNYLYLLFSTDKSHSDIGFQLRYETITLQSDHCLDPGIPVNGQRHGNDFYVGALVTFSCDSGYTLSDGEPLECEPNFQWSRALPSCEALCGGFIQGSSGTILSPGFPDFYPNNLNCTWIIETSHGKGVFFTFHTFHLESGHDYLLITENGSFTQPLRQLTGSRLPAPISAGLYGNFTAQVRFISDFSMSYEGFNITFSEYDLEPCEEPEVPAYSIRKGLQFGVGDTLTFSCFPGYRLEGTARITCLGGRRRLWSSPLPRCVAECGNSVTGTQGTLLSPNFPVNYNNNHECIYSIQTQPGKGIQLKARAFELSEGDVLKVYDGNNNSARLLGVFSHSEMMGVTLNSTSSSLWLDFITDAENTSKGFELHFSSFELIKCEDPGTPKFGYKVHDEGHFAGSSVSFSCDPGYSLRGSEELLCLSGERRTWDRPLPTCVAECGGTVRGEVSGQVLSPGYPAPYEHNLNCIWTIEAEAGCTIGLHFLVFDTEEVHDVLRIWDGPVESGVLLKELSGPALPKDLHSTFNSVVLQFSTDFFTSKQGFAIQFSVSTATSCNDPGIPQNGSRSGDSWEAGDSTVFQCDPGYALQGSAEISCVKIENRFFWQPSPPTCIAPCGGDLTGPSGVILSPNYPEPYPPGKECDWKVTVSPDYVIALVFNIFNLEPGYDFLHIYDGRDSLSPLIGSFYGSQLPGRIESSSNSLFLAFRSDASVSNAGFVIDYTENPRESCFDPGSIKNGTRVGSDLKLGSSVTYYCHGGYEVEGTSTLSCILGPDGKPVWNNPRPVCTAPCGGQYVGSDGVVLSPNYPQNYTSGQICLYFVTVPKDYVVFGQFAFFHTALNDVVEVHDGHSQHSRLLSSLSGSHTGESLPLATSNQVLIKFSAKGLAPARGFHFVYQAVPRTSATQCSSVPEPRYGKRLGSDFSVGAIVRFECNSGYALQGSPEIECLPVPGALAQWNVSAPTCVVPCGGNLTERRGTILSPGFPEPYLNSLNCVWKIVVPEGAGIQIQVVSFVTEQNWDSLEVFDGADNTVTMLGSFSGTTVPALLNSTSNQLYLHFYSDISVSAAGFHLEYKTVGLSSCPEPAVPSNGVKTGERYLVNDVVSFQCEPGYALQGHAHISCMPGTVRRWNYPPPLCIAQCGGTVEEMEGVILSPGFPGNYPSNMDCSWKIALPVGFGAHIQFLNFSTEPNHDYIEIRNGPYETSRMMGRFSGSELPSSLLSTSHETTVYFHSDHSQNRPGFKLEYQAYELQECPDPEPFANGIVRGAGYNVGQSVTFECLPGYQLTGHPVLTCQHGTNRNWDHPLPKCEVPCGGNITSSNGTVYSPGFPSPYSSSQDCVWLITVPIGHGVRLNLSLLQTEPSGDFITIWDGPQQTAPRLGVFTRSMAKKTVQSSSNQVLLKFHRDAATGGIFAIAFSAYPLTKCPPPTILPNAEVVTENEEFNIGDIVRYRCLPGFTLVGNEILTCKLGTYLQFEGPPPICEVHCPTNELLTDSTGVILSQSYPGSYPQFQTCSWLVRVEPDYNISLTVEYFLSEKQYDEFEIFDGPSGQSPLLKALSGNYSAPLIVTSSSNSVYLRWSSDHAYNRKGFKIRYSAPYCSLPRAPLHGFILGQTSTQPGGSIHFGCNAGYRLVGHSMAICTRHPQGYHLWSEAIPLCQALSCGLPEAPKNGMVFGKEYTVGTKAVYSCSEGYHLQAGAEATAECLDTGLWSNRNVPPQCVPVTCPDVSSISVEHGRWRLIFETQYQFQAQLMLICDPGYYYTGQRVIRCQANGKWSLGDSTPTCRIISCGELPIPPNGHRIGTLSVYGATAIFSCNSGYTLVGSRVRECMANGLWSGSEVRCLAGHCGTPEPIVNGHINGENYSYRGSVVYQCNAGFRLIGMSVRICQQDHHWSGKTPFCVPITCGHPGNPVNGLTQGNQFNLNDVVKFVCNPGYMAEGAARSQCLASGQWSDMLPTCRIINCTDPGHQENSVRQVHASGPHRFSFGTTVSYRCNHGFYLLGTPVLSCQGDGTWDRPRPQCLLVSCGHPGSPPHSQMSGDSYTVGAVVRYSCIGKRTLVGNSTRMCGLDGHWTGSLPHCSGTSVGVCGDPGIPAHGIRLGDSFDPGTVMRFSCEAGHVLRGSSERTCQANGSWSGSQPECGVISCGNPGTPSNARVVFSDGLVFSSSIVYECREGYYATGLLSRHCSVNGTWTGSDPECLVINCGDPGIPANGLRLGNDFRYNKTVTYQCVPGYMMESHRVSVLSCTKDRTWNGTKPVCKALMCKPPPLIPNGKVVGSDFMWGSSVTYACLEGYQLSLPAVFTCEGNGSWTGELPQCFPVFCGDPGVPSRGRREDRGFSYRSSVSFSCHPPLVLVGSPRRFCQSDGTWSGTQPSCIDPTLTTCADPGVPQFGIQNNSQGYQVGSTVLFRCQKGYLLQGSTTRTCLPNLTWSGTPPDCVPHHCRQPETPTHANVGALDLPSMGYTLITPARRASPSRVAPSTAPARRMAAGQASRPSAWRSGPVGDPSTLPGSHRSPKP

SEQ ID NO: 35 - DNA, 8010 bp, Homo sapiens
  CDS (1)..(8007)
atggcgggcgcccctccccccgccttgctgctgccttgcagtttgatctcagactgctgtgctagcaatcagcgacactccgtgggcgtaggaccctccgagctagtcaagaagcaaattgagttgaagtctcgaggtgtgaagctgatgcccagcaaagacaacagccagaagacgtctgtgttaactcaggttggtgtgtcccaaggacataatatgtgtccagaccctggcatacccgaaaggggcaaaagactaggctcggatttcaggttaggatccagcgtccagttcacctgcaacgagggctatgacctgcaagggtccaagcggatcacctgtatgaaagtgagcgacatgtttgcggcctggagcgaccacaggccagtctgccgagcccgcatgtgtgatgcccaccttcgaggcccctcgggcatcatcacctcccccaatttccccattcagtatgacaacaatgcacactgtgtgtggatcatcacagcactcaacccctccaaggtgatcaagctcgcctttgaggagtttgatttggagaggggctatgacaccctgacggtcggtgatggtggtcaggatggggaccagaagacagttctctacatgtctcaaaatgcctgcagtgacagccctcacaccccaggctctcgcatcccagagagcatgtctggggacatctggaggcagaaatggactgtacttgagatctgtcgtgacattagcagttcagatgcaaggtcaggttcagtgaggaagtctccaaagacttctaatgctgtggaacttgttgctcctgggacagagatcgagcagggcagttgcggtgaccctggcatacctgcatatggccggagggaaggctcccggtttcaccacggtgacacactcaagtttgagtgccagcccgcctttgagctggtgggacagaaggcaatcacatgccaaaagaataaccaatggtcggctaagaagccaggctgcgtgttctcctgcttcttcaacttcaccagcccgtctggggttgtcctgtctcccaactacccagaggactatggcaaccacctccactgtgtctggctcatcctggccaggcctgagagccgcatccacctggccttcaacgacattgacgtggagcctcagtttgatttcctggtcatcaaggatggggccaccgccgaggcgcccgtcctgggcaccttctcaggaaaccagcttccctcctccatcacaagcagtggccacgtggcccgtctcgagttccagactgaccactccacagggaagaggggcttcaacatcacttttaccaccttccgacacaacgagtgcccggatcctggcgttccagtaaatggcaaacggtttggggacagcctccagctgggcagctccatctccttcctctgtgatgaaggcttccttgggactcagggctcagagaccatcacctgcgtcctgaaggagggcagcgtggtctggaacagcgctgtgctgcggtgtgaagctccctgtggtggtcacctgacttcgcccagcggcaccatcctctctccgggctggcctggcttctacaaggatgccttgagctgtgcctgggtgattgaggcccagccaggctaccccatcaaaatcaccttcgacagattcaaaaccgaggtcaactatgacaccctggaagtacgcgatgggcggacttactcagcgcccttgatcggggtttaccacgggacccaggttccccagttcctcatcagcaccagcaactacctctacctcctcttctctaccgacaagagtcactcggacatcggcttccagctccgctatgagactataacactgcagtcagaccactgtctggatccaggaatcccagtaaatggacagcgtcatgggaatgacttctacgtgggcgcgctggtgaccttcagctgtgactcgggctacacattaagtgacggggagcctctggagtgtgagcccaacttccagtggagccgggccctgcccagttgtgaagctctctgtggtggcttcattcaaggctccagtgggaccatcttgtcgccagggttccctgacttctaccccaacaacttgaactgcacctggattatcgaaacatctcatggcaagggtgtgttcttcactttccacaccttccacctggaaagtggccatgactacctcctcatcactgagaacggcagcttcacccagcccctgaggcagctaactggatctcggctgccagctcccatcagcgctgggctctatggcaacttcactgcccaggtccgcttcatctctgatttctccatgtcatatgaaggattcaacatcaccttctcagagtacgacttggagccctgtgaggagcccgaggtcccagcctacagcatccggaagggcttgcagtttggcgtgggcgacaccttgaccttctcctgcttccccgggtaccgtctggagggcaccgcccgcatcacgtgcctggggggcagacggcgcctgtggagctcgcctctgccaaggtgtgttgctgagtgtgggaattcagtcacaggcactcagggtactttgctgtcccccaactttcctgtgaactacaataacaatcatgaatgcatctactccatccagacccagccagggaagggaattcagctgaaagccagggcattcgaactctccgaaggagatgtcctcaaggtttatgatggcaacaacaactccgcccgtttgctgggagtttttagccattctgagatgatgggggtgactttgaacagcacatccagcagtctgtggcttgatttcatcactgatgctgaaaacaccagcaagggctttgaactgcacttttccagctttgaactcatcaaatgtgaggacccaggaacccccaagtttggctacaaggttcatgatgaaggtcattttgcagggagctccgtgtccttcagctgtgaccctggatacagcctgcggggtagtgaggagctgctgtgtctgagtggagagcgccggacctgggaccggcctctgcccacctgtgtcgccgagtgtggagggacagtgagaggagaggtgtcggggcaggtgctgtcacccgggtatccagctccctatgaacacaatctcaactgcatctggaccatcgaagcagaggccggctgcaccattgggctacacttcctggtgtttgacacagaggaggttcacgacgtgctgcgcatctgggatgggcctgtggagagcggggttctgctgaaggagctgagtggcccggccctgcccaaggacctgcatagcaccttcaactcggtcgtcctgcagttcagcactgacttcttcaccagcaagcagggctttgccattcaattttcagtgtccacagcaacgtcctgcaatgaccctgggatcccgcagaatgggagtcggagtggtgacagttgggaagccggcgactccacagtgttccagtgtgaccctggctacgcgctgcagggaagtgcagagatcagctgtgtgaagatcgagaacaggttcttctggcagcccagcccgccaacatgcatcgctccctgcgggggagacctgacaggaccatctggagtcatcctctcaccaaattacccagaaccctacccgccaggcaaggagtgtgactggaaagtgaccgtctcaccagactacgtcatcgccctggtatttaacatctttaacctggagcctggctatgacttcctccatatctacgacggacgggactctctcagccctctcataggaagcttctatggctcccagctcccaggccgcattgaaagcagcagcaacagcctcttcctcgccttccgcagcgatgcatctgtgagcaatgctggcttcgtcattgactatacagaaaacccgcgggagtcatgttttgatcctggttccatcaagaacggcacacgggtggggtccgacctgaagctgggctcctccgtcacctactactgccacgggggctacgaagttgagggcacctcgaccctgagctgcatcctggggcctgatgggaagcccgtgtggaacaatccccggccagtctgcacagccccctgtgggggacagtatgtgggttcggacggagtggtcttgtcccccaactacccccagaactacaccagtggacagatctgcttgtattttgttactgtgcccaaggactatgtggtgtttggccagttcgccttctttcacacggccctcaacgacgtggtggaggttcacgacggccacagccagcactcgcggctcctcagctccctctcgggctcccatacaggagaatcactgcccttggccacctccaatcaagttctcattaagttcagcgccaaaggcctcgcaccagccagaggcttccactttgtctaccaagcggttcctcgaaccagcgccacgcagtgcagctctgtgccggaaccccgctatggcaagaggctgggcagtgacttctcggtgggggccatcgtccgcttcgaatgcaactccggctatgccctgcaggggtcgccagagatcgagtgcctccctgtgcctggggccttggcccaatggaatgtctcagcgcccacgtgtgtggtgccgtgtggaggcaacctcacagagcgcaggggcaccatcctgtcccctggcttcccagagccgtacctcaacagcctcaactgtgtgtggaagatcgtggtccccgaaggcgctggcatccagatccaagttgtcagttttgtgacagagcagaactgggactcgctggaagtatttgatggtgcagataacactgtaaccatgctggggagtttctcaggaacaaccgtgcctgcccttctgaacagcacctccaaccagctctaccttcatttctactcagatatcagcgtatctgcagctggcttccacttggagtacaaaacggtgggcctgagcagttgtccggaacctgctgtgcccagtaacggggtgaagactggcgagcgctacttggtgaatgatgtggtgtctttccagtgtgagccgggatatgccctccagggccacgcccacatctcctgcatgcccggaacagtgcggcgatggaactaccctcctccactctgtattgcacagtgtgggggaacagtggaggagatggagggggtgatcctgagccccggcttcccaggcaactaccccagtaacatggactgctcctggaaaatagcactgcccgtgggctttggagctcacatccagttcctgaacttctccaccgagcccaaccacgactacatagaaatccggaatggcccctatgagaccagccgcatgatgggaagattcagtggaagcgagcttccaagctccctcctctccacgtcccacgagaccaccgtgtatttccacagcgaccactcccagaatcggccaggattcaagctggagtatcaggcctatgaacttcaagagtgcccagacccagagccctttgccaatggcattgtgaggggagctggctacaacgtgggacaatcagtgaccttcgagtgcctcccggggtatcaattgactggccaccctgtcctcacgtgtcaacatggcaccaaccggaactgggaccaccccctgcccaagtgtgaagtcccttgtggcgggaacatcacttcttccaacggcactgtgtactccccggggttccctagcccgtactccagctcccaggactgtgtctggctgatcaccgtgcccattggccatggcgtccgcctcaacctcagcctgctgcagacagagccctctggagatttcatcaccatctgggatgggccacagcaaacagcaccacggctcggcgtcttcacccggagcatggccaagaaaacagtgcagagttcatccaaccaggtcctgctcaagttccaccgtgatgcagccacaggggggatcttcgccatagctttctccgcttatccactcaccaaatgccctcctcccaccatcctccccaacgccgaagtcgtcacagagaatgaagaattcaatataggtgacatcgtacgctacagatgcctccctggctttaccttagtggggaatgaaattctgacctgcaaacttggaacctacctgcagtttgaaggaccacccccgatatgtgaagtgcactgtccaacaaatgagcttctgacagactccacaggcgtgatcctgagccagagctaccctggaagctatccccagttccagacctgctcttggctggtgagagtggagcccgactataacatctccctcacagtggagtacttcctcagcgagaagcaatatgatgagtttgagatttttgatggtccatcaggacagagtcctctgctgaaagccctcagtgggaattactcagctcccctgattgtcaccagctcaagcaactctgtgtacctgcgttggtcatctgatcacgcctacaatcggaagggcttcaagatccgctattcagccccttactgcagcctgcccagggctccactccatggcttcatcctaggccagaccagcacccagcccgggggctccatccactttggctgcaacgccggctaccgcctggtgggacacagcatggccatctgtacccggcacccccagggctaccacctgtggagcgaagccatccctctctgtcaagctctttcctgtgggcttcctgaggcccccaagaatggaatggtgtttggcaaggagtacacagtgggaaccaaggccatgtacagctgcagtgaaggctaccacctccaggcaggcgctgaggccactgcagagtgtctggacacaggcctatggagcaaccgcaatgtcccaccacagtgtgtccgtgagtcctcgggcaatggaggcgggtctgtgacttgtcctgatgtcagtagcatcagcgtggagcatggccgatggaggcttatctttgagacacagtatcagttccaggcccagctgatgctcatctgtgaccctggctactactatactggccaaagggtcatccgctgtcaggccaatggcaaatggagcctcggggactctacgcccacctgccgaatcatctcctgtggagagctcccgattccccccaatggccaccgcatcggaacactgtctgtctacggggcaacagccatcttctcctgcaattccggatacacactggtgggctccagggtgcgtgagtgcatggccaatgggctctggagtggctctgaagtccgctgccttgccactcagaccaagctccactccattttctataagctcctcttcgatgtactctcttccccatccctcaccaaagctggacactgtgggactcctgagcccattgtcaacggacacatcaatggggagaactacagctaccggggcagtgtggtgtaccaatgcaatgctggcttccgcctgatcggcatgtctgtgcgcatctgccagcaggatcatcactggtcgggcaagacccctttctgtgtgcatgttaagcagcagttgctgctgctgctgctgctgttgtgtgatgatgatgatgatgaagatgatggtagtggtgcaattacctgtggacacccaggcaaccctgtcaacggcctcactcagggtaaccagtttaacctcaacgatgtggtcaagtttgtttgcaaccctgggtatatggctgagggggctgctaggtcccaatgcctggccagcgggcaatggagtgacatgctgcccacctgcagaatcatcaactgtacagatcctggacaccaagaaaatagtgttcgtcaggtccacgccagcggcccgcacaggttcagcttcggcaccactgtgtcttaccggtgcaaccacggcttctacctcctgggcaccccagtgctcagctgccagggagatggcacatgggaccgtccccgcccccagtgtctctgtaagtag

SEQ ID NO: 36 - protein, 2669 aa, Homo sapiens
MAGAPPPALLLPCSLISDCCASNQRHSVGVGPSELVKKQIELKSRGVKLMPSKDNSQKTSVLTQVGVSQGHNMCPDPGIPERGKRLGSDFRLGSSVQFTCNEGYDLQGSKRITCMKVSDMFAAWSDHRPVCRARMCDAHLRGPSGIITSPNFPIQYDNNAHCVWIITALNPSKVIKLAFEEFDLERGYDTLTVGDGGQDGDQKTVLYMSQNACSDSPHTPGSRIPESMSGDIWRQKWTVLEICRDISSSDARSGSVRKSPKTSNAVELVAPGTEIEQGSCGDPGIPAYGRREGSRFHHGDTLKFECQPAFELVGQKAITCQKNNQWSAKKPGCVFSCFFNFTSPSGVVLSPNYPEDYGNHLHCVWLILARPESRIHLAFNDIDVEPQFDFLVIKDGATAEAPVLGTFSGNQLPSSITSSGHVARLEFQTDHSTGKRGFNITFTTFRHNECPDPGVPVNGKRFGDSLQLGSSISFLCDEGFLGTQGSETITCVLKEGSVVWNSAVLRCEAPCGGHLTSPSGTILSPGWPGFYKDALSCAWVIEAQPGYPIKITFDRFKTEVNYDTLEVRDGRTYSAPLIGVYHGTQVPQFLISTSNYLYLLFSTDKSHSDIGFQLRYETITLQSDHCLDPGIPVNGQRHGNDFYVGALVTFSCDSGYTLSDGEPLECEPNFQWSRALPSCEALCGGFIQGSSGTILSPGFPDFYPNNLNCTWIIETSHGKGVFFTFHTFHLESGHDYLLITENGSFTQPLRQLTGSRLPAPISAGLYGNFTAQVRFISDFSMSYEGFNITFSEYDLEPCEEPEVPAYSIRKGLQFGVGDTLTFSCFPGYRLEGTARITCLGGRRRLWSSPLPRCVAECGNSVTGTQGTLLSPNFPVNYNNNHECIYSIQTQPGKGIQLKARAFELSEGDVLKVYDGNNNSARLLGVFSHSEMMGVTLNSTSSSLWLDFITDAENTSKGFELHFSSFELIKCEDPGTPKFGYKVHDEGHFAGSSVSFSCDPGYSLRGSEELLCLSGERRTWDRPLPTCVAECGGTVRGEVSGQVLSPGYPAPYEHNLNCIWTIEAEAGCTIGLHFLVFDTEEVHDVLRIWDGPVESGVLLKELSGPALPKDLHSTFNSVVLQFSTDFFTSKQGFAIQFSVSTATSCNDPGIPQNGSRSGDSWEAGDSTVFQCDPGYALQGSAEISCVKIENRFFWQPSPPTCIAPCGGDLTGPSGVILSPNYPEPYPPGKECDWKVTVSPDYVIALVFNIFNLEPGYDFLHIYDGRDSLSPLIGSFYGSQLPGRIESSSNSLFLAFRSDASVSNAGFVIDYTENPRESCFDPGSIKNGTRVGSDLKLGSSVTYYCHGGYEVEGTSTLSCILGPDGKPVWNNPRPVCTAPCGGQYVGSDGVVLSPNYPQNYTSGQICLYFVTVPKDYVVFGQFAFFHTALNDVVEVHDGHSQHSRLLSSLSGSHTGESLPLATSNQVLIKFSAKGLAPARGFHFVYQAVPRTSATQCSSVPEPRYGKRLGSDFSVGAIVRFECNSGYALQGSPEIECLPVPGALAQWNVSAPTCVVPCGGNLTERRGTILSPGFPEPYLNSLNCVWKIVVPEGAGIQIQVVSFVTEQNWDSLEVFDGADNTVTMLGSFSGTTVPALLNSTSNQLYLHFYSDISVSAAGFHLEYKTVGLSSCPEPAVPSNGVKTGERYLVNDVVSFQCEPGYALQGHAHISCMPGTVRRWNYPPPLCIAQCGGTVEEMEGVILSPGFPGNYPSNMDCSWKIALPVGFGAHIQFLNFSTEPNHDYIEIRNGPYETSRMMGRFSGSELPSSLLSTSHETTVYFHSDHSQNRPGFKLEYQAYELQECPDPEPFANGIVRGAGYNVGQSVTFECLPGYQLTGHPVLTCQHGTNRNWDHPLPKCEVPCGGNITSSNGTVYSPGFPSPYSSSQDCVWLITVPIGHGVRLNLSLLQTEPSGDFITIWDGPQQTAPRLGVFTRSMAKKTVQSSSNQVLLKFHRDAATGGIFAIAFSAYPLTKCPPPTILPNAEVVTENEEFNIGDIVRYRCLPGFTLVGNEILTCKLGTYLQFEGPPPICEVHCPTNELLTDSTGVILSQSYPGSYPQFQTCSWLVRVEPDYNISLTVEYFLSEKQYDEFEIFDGPSGQSPLLKALSGNYSAPLIVTSSSNSVYLRWSSDHAYNRKGFKIRYSAPYCSLPRAPLHGFILGQTSTQPGGSIHFGCNAGYRLVGHSMAICTRHPQGYHLWSEAIPLCQALSCGLPEAPKNGMVFGKEYTVGTKAMYSCSEGYHLQAGAEATAECLDTGLWSNRNVPPQCVRESSGNGGGSVTCPDVSSISVEHGRWRLIFETQYQFQAQLMLICDPGYYYTGQRVIRCQANGKWSLGDSTPTCRIISCGELPIPPNGHRIGTLSVYGATAIFSCNSGYTLVGSRVRECMANGLWSGSEVRCLATQTKLHSIFYKLLFDVLSSPSLTKAGHCGTPEPIVNGHINGENYSYRGSVVYQCNAGFRLIGMSVRICQQDHHWSGKTPFCVHVKQQLLLLLLLLCDDDDDEDDGSGAITCGHPGNPVNGLTQGNQFNLNDVVKFVCNPGYMAEGAARSQCLASGQWSDMLPTCRIINCTDPGHQENSVRQVHASGPHRFSFGTTVSYRCNHGFYLLGTPVLSCQGDGTWDRPRPQCLCK

SEQ ID NO: 37 - DNA, 9951 bp, Homo sapiens
  CDS (1)..(7836)
atggcgggcgcccctccccccgccttgctgctgccttgcagtttgatctcagactgctgtgctagcaatcagcgacactccgtgggcgtaggaccctccgagctagtcaagaagcaaattgagttgaagtctcgaggtgtgaagctgatgcccagcaaagacaacagccagaagacgtctgtgttaactcaggttggtgtgtcccaaggacataatatgtgtccagaccctggcatacccgaaaggggcaaaagactaggctcggatttcaggttaggatccagcgtccagttcacctgcaacgagggctatgacctgcaagggtccaagcggatcacctgtatgaaagtgagcgacatgtttgcggcctggagcgaccacaggccagtctgccgagcccgcatgtgtgatgcccaccttcgaggcccctcgggcatcatcacctcccccaatttccccattcagtatgacaacaatgcacactgtgtgtggatcatcacagcactcaacccctccaaggtgatcaagctcgcctttgaggagtttgatttggagaggggctatgacaccctgacggtcggtgatggtggtcaggatggggaccagaagacagttctctacatgtctcaaaatgcctgcagtgacagccctcacaccccaggctctcgcatcccagagagcatgtctggggacatctggaggcagaaatggactgtacttgagatctgtcgtgacattagcagttcagatgcaaggtcaggttcagtgaggaagtctccaaagacttctaatgctgtggaacttgttgctcctgggacagagatcgagcagggcagttgcggtgaccctggcatacctgcatatggccggagggaaggctcccggtttcaccacggtgacacactcaagtttgagtgccagcccgcctttgagctggtgggacagaaggcaatcacatgccaaaagaataaccaatggtcggctaagaagccaggctgcgtgttctcctgcttcttcaacttcaccagcccgtctggggttgtcctgtctcccaactacccagaggactatggcaaccacctccactgtgtctggctcatcctggccaggcctgagagccgcatccacctggccttcaacgacattgacgtggagcctcagtttgatttcctggtcatcaaggatggggccaccgccgaggcgcccgtcctgggcaccttctcaggaaaccagcttccctcctccatcacaagcagtggccacgtggcccgtctcgagttccagactgaccactccacagggaagaggggcttcaacatcacttttaccaccttccgacacaacgagtgcccggatcctggcgttccagtaaatggcaaacggtttggggacagcctccagctgggcagctccatctccttcctctgtgatgaaggcttccttgggactcagggctcagagaccatcacctgcgtcctgaaggagggcagcgtggtctggaacagcgctgtgctgcggtgtgaagctccctgtggtggtcacctgacttcgcccagcggcaccatcctctctccgggctggcctggcttctacaaggatgccttgagctgtgcctgggtgattgaggcccagccaggctaccccatcaaaatcaccttcgacagattcaaaaccgaggtcaactatgacaccctggaagtacgcgatgggcggacttactcagcgcccttgatcggggtttaccacgggacccaggttccccagttcctcatcagcaccagcaactacctctacctcctcttctctaccgacaagagtcactcggacatcggcttccagctccgctatgagactataacactgcagtcagaccactgtctggatccaggaatcccagtaaatggacagcgtcatgggaatgacttctacgtgggcgcgctggtgaccttcagctgtgactcgggctacacattaagtgacggggagcctctggagtgtgagcccaacttccagtggagccgggccctgcccagttgtgaagctctctgtggtggcttcattcaaggctccagtgggaccatcttgtcgccagggttccctgacttctaccccaacaacttgaactgcacctggattatcgaaacatctcatggcaagggtgtgttcttcactttccacaccttccacctggaaagtggccatgactacctcctcatcactgagaacggcagcttcacccagcccctgaggcagctaactggatctcggctgccagctcccatcagcgctgggctctatggcaacttcactgcccaggtccgcttcatctctgatttctccatgtcatatgaaggattcaacatcaccttctcagagtacgacttggagccctgtgaggagcccgaggtcccagcctacagcatccggaagggcttgcagtttggcgtgggcgacaccttgaccttctcctgcttccccgggtaccgtctggagggcaccgcccgcatcacgtgcctggggggcagacggcgcctgtggagctcgcctctgccaaggtgtgttgctgagtgtgggaattcagtcacaggcactcagggtactttgctgtcccccaactttcctgtgaactacaataacaatcatgaatgcatctactccatccagacccagccagggaagggaattcagctgaaagccagggcattcgaactctccgaaggagatgtcctcaaggtttatgatggcaacaacaactccgcccgtttgctgggagtttttagccattctgagatgatgggggtgactttgaacagcacatccagcagtctgtggcttgatttcatcactgatgctgaaaacaccagcaagggctttgaactgcacttttccagctttgaactcatcaaatgtgaggacccaggaacccccaagtttggctacaaggttcatgatgaaggtcattttgcagggagctccgtgtccttcagctgtgaccctggatacagcctgcggggtagtgaggagctgctgtgtctgagtggagagcgccggacctgggaccggcctctgcccacctgtgtcgccgagtgtggagggacagtgagaggagaggtgtcggggcaggtgctgtcacccgggtatccagctccctatgaacacaatctcaactgcatctggaccatcgaagcagaggccggctgcaccattgggctacacttcctggtgtttgacacagaggaggttcacgacgtgctgcgcatctgggatgggcctgtggagagcggggttctgctgaaggagctgagtggcccggccctgcccaaggacctgcatagcaccttcaactcggtcgtcctgcagttcagcactgacttcttcaccagcaagcagggctttgccattcaattttcagtgtccacagcaacgtcctgcaatgaccctgggatcccgcagaatgggagtcggagtggtgacagttgggaagccggcgactccacagtgttccagtgtgaccctggctacgcgctgcagggaagtgcagagatcagctgtgtgaagatcgagaacaggttcttctggcagcccagcccgccaacatgcatcgctccctgcgggggagacctgacaggaccatctggagtcatcctctcaccaaattacccagaaccctacccgccaggcaaggagtgtgactggaaagtgaccgtctcaccagactacgtcatcgccctggtatttaacatctttaacctggagcctggctatgacttcctccatatctacgacggacgggactctctcagccctctcataggaagcttctatggctcccagctcccaggccgcattgaaagcagcagcaacagcctcttcctcgccttccgcagcgatgcatctgtgagcaatgctggcttcgtcattgactatacagaaaacccgcgggagtcatgttttgatcctggttccatcaagaacggcacacgggtggggtccgacctgaagctgggctcctccgtcacctactactgccacgggggctacgaagttgagggcacctcgaccctgagctgcatcctggggcctgatgggaagcccgtgtggaacaatccccggccagtctgcacagccccctgtgggggacagtatgtgggttcggacggagtggtcttgtcccccaactacccccagaactacaccagtggacagatctgcttgtattttgttactgtgcccaaggactatgtggtgtttggccagttcgccttctttcacacggccctcaacgacgtggtggaggttcacgacggccacagccagcactcgcggctcctcagctccctctcgggctcccatacaggagaatcactgcccttggccacctccaatcaagttctcattaagttcagcgccaaaggcctcgcaccagccagaggcttccactttgtctaccaagcggttcctcgaaccagcgccacgcagtgcagctctgtgccggaaccccgctatggcaagaggctgggcagtgacttctcggtgggggccatcgtccgcttcgaatgcaactccggctatgccctgcaggggtcgccagagatcgagtgcctccctgtgcctggggccttggcccaatggaatgtctcagcgcccacgtgtgtggtgccgtgtggaggcaacctcacagagcgcaggggcaccatcctgtcccctggcttcccagagccgtacctcaacagcctcaactgtgtgtggaagatcgtggtccccgaaggcgctggcatccagatccaagttgtcagttttgtgacagagcagaactgggactcgctggaagtatttgatggtgcagataacactgtaaccatgctggggagtttctcaggaacaaccgtgcctgcccttctgaacagcacctccaaccagctctaccttcatttctactcagatatcagcgtatctgcagctggcttccacttggagtacaaaacggtgggcctgagcagttgtccggaacctgctgtgcccagtaacggggtgaagactggcgagcgctacttggtgaatgatgtggtgtctttccagtgtgagccgggatatgccctccagggccacgcccacatctcctgcatgcccggaacagtgcggcgatggaactaccctcctccactctgtattgcacagtgtgggggaacagtggaggagatggagggggtgatcctgagccccggcttcccaggcaactaccccagtaacatggactgctcctggaaaatagcactgcccgtgggctttggagctcacatccagttcctgaacttctccaccgagcccaaccacgactacatagaaatccggaatggcccctatgagaccagccgcatgatgggaagattcagtggaagcgagcttccaagctccctcctctccacgtcccacgagaccaccgtgtatttccacagcgaccactcccagaatcggccaggattcaagctggagtatcaggcctatgaacttcaagagtgcccagacccagagccctttgccaatggcattgtgaggggagctggctacaacgtgggacaatcagtgaccttcgagtgcctcccggggtatcaattgactggccaccctgtcctcacgtgtcaacatggcaccaaccggaactgggaccaccccctgcccaagtgtgaagtcccttgtggcgggaacatcacttcttccaacggcactgtgtactccccggggttccctagcccgtactccagctcccaggactgtgtctggctgatcaccgtgcccattggccatggcgtccgcctcaacctcagcctgctgcagacagagccctctggagatttcatcaccatctgggatgggccacagcaaacagcaccacggctcggcgtcttcacccggagcatggccaagaaaacagtgcagagttcatccaaccaggtcctgctcaagttccaccgtgatgcagccacaggggggatcttcgccatagctttctccgcttatccactcaccaaatgccctcctcccaccatcctccccaacgccgaagtcgtcacagagaatgaagaattcaatataggtgacatcgtacgctacagatgcctccctggctttaccttagtggggaatgaaattctgacctgcaaacttggaacctacctgcagtttgaaggaccacccccgatatgtgaagtgcactgtccaacaaatgagcttctgacagactccacaggcgtgatcctgagccagagctaccctggaagctatccccagttccagacctgctcttggctggtgagagtggagcccgactataacatctccctcacagtggagtacttcctcagcgagaagcaatatgatgagtttgagatttttgatggtccatcaggacagagtcctctgctgaaagccctcagtgggaattactcagctcccctgattgtcaccagctcaagcaactctgtgtacctgcgttggtcatctgatcacgcctacaatcggaagggcttcaagatccgctattcagctctttcctgtgggcttcctgaggcccccaagaatggaatggtgtttggcaaggagtacacagtgggaaccaaggccatgtacagctgcagtgaaggctaccacctccaggcaggcgctgaggccactgcagagtgtctggacacaggcctatggagcaaccgcaatgtcccaccacagtgtgtccctgtgacttgtcctgatgtcagtagcatcagcgtggagcatggccgatggaggcttatctttgagacacagtatcagttccaggcccagctgatgctcatctgtgaccctggctactactatactggccaaagggtcatccgctgtcaggccaatggcaaatggagcctcggggactctacgcccacctgccgaatcatctcctgtggagagctcccgattccccccaatggccaccgcatcggaacactgtctgtctacggggcaacagccatcttctcctgcaattccggatacacactggtgggctccagggtgcgtgagtgcatggccaatgggctctggagtggctctgaagtccgctgccttgctggacactgtgggactcctgagcccattgtcaacggacacatcaatggggagaactacagctaccggggcagtgtggtgtaccaatgcaatgctggcttccgcctgatcggcatgtctgtgcgcatctgccagcaggatcatcactggtcgggcaagacccctttctgtcaattacctgtggacacccaggcaaccctgtcaacggcctcactcagggtaaccagtttaacctcaacgatgtggtcaagtttgtttgcaaccctgggtatatggctgagggggctgctaggtcccaatgcctggccagcgggcaatggagtgacatgctgcccacctgcagaatcatcaactgtacagatcctggacaccaagaaaatagtgttcgtcaggtccacgccagcggcccgcacaggttcagcttcggcaccactgtgtcttaccggtgcaaccacggcttctacctcctgggcaccccagtgctcagctgccagggagatggcacatgggaccgtccccgcccccagtgtctctgtaagtagtggtgtcctgtggccatccgggctccccgcctcactcccagatgtctggagacagttatactgtgggagcagtggtgcggtacagctgcatcggcaagcgtactctggtgggaaacagcacccgcatgtgtgggctggatggacactggactggctccctccctcactgctcaggaaccagcgtgggagtttgcggtgaccctgggatcccggctcatggcatccgtttgggggacagctttgatccaggcactgtgatgcgcttcagctgtgaagctggccacgtgctccggggatcgtcagagcgcacctgtcaagccaatggctcgtggagcggctcgcagcctgagtgtggagtgatctcttgtgggaaccctgggactccaagtaatgcccgagttgtgttcagtgatggcctggttttctccagctctatcgtctatgagtgccgggaaggatactacgccacaggcctgctcagccgtcactgctcggtcaatggtacctggacaggcagtgaccctgagtgcctcgtcataaactgtggtgaccctgggattccagccaatggccttcggctgggcaatgacttcaggtacaacaaaactgtgacatatcagtgtgtccctggctatatgatggagtcacatagagtatctgtgctgagctgcaccaaggaccggacatggaatggaaccaagcccgtctgcaaagctctcatgtgcaagccacctccgctcatccccaatgggaaggtggtggggtctgacttcatgtggggctcaagtgtgacttatgcctgcctggaggggtaccagctctccctgcccgcggtgttcacctgtgagggaaatgggtcctggaccggagagctgcctcagtgtttccctgtgttctgcggggatcctggtgtcccgtcccgtgggaggagagaggaccgaggcttctcctacaggtcatctgtctccttctcctgccatccccctctggtgctggtgggctctccacgcaggttttgccagtcagatgggacatggagtggcacccagcccagctgcatagatccgaccctgaccacgtgtgcggaccctggtgtgccacagtttgggatacagaacaattctcagggctaccaggttggaagcacagtcctcttccgttgtcaaaaaggctacctgcttcagggctccaccaccaggacctgcctcccaaacctgacctggagtggaaccccacctgactgtgtcccccaccactgcaggcagccagagacgccaacgcatgccaacgtcggggccctggatttgccctccatgggctacacgctcattactcctgccaggagggcttctccctcaagggtggctccgagcaccgcacctgcaaggcggatggcagctggacaggcaagccgcccatctgcctggaggtccggcccagtgggagacccatcaacactgcccgggagccaccgctcacccaagccttgattcctggggatgtttttgccaagaattccctgtggaaaggggcctatgaataccaggggaagaagcagccagccatgctcagagtgactggcttccaagttgccaacagcaaggtcaatgccaccatgatcgaccacagtggcgtggagctgcacttggctggaacttacaagaaagaagattttcatctcctactccaggtgtaccagattacagggcctgtggagatctttatgaataagttcaaagatgatcactgggctttagatggccatgtctcgtcagagtcctccggagccaccttcatctaccaaggctctgtcaagggccaaggctttgggcagttcggctttcaaagactggacctcaggctgctggagtcagaccccgagtccattggccgccactttgcttccaacagcagctcagtggcagccgcgatcctggtgcctttcatcgccctcattattgcgggcttcgtgctctatctctacaagcacaggagaagacccaaagttcctttcaatggctatgctggccacgagaacaccaatgttcgggccacatttgagaacccaatgtacgaccgcaacatccagcccacagacatcatggccagcgaggcggagttcacagtcagcacagtgtgcacagcagtatagccacccggcctggccgctttttttgctaggttgaactggtactccagcagccgccgaagctggactgtactgctgccatctcagctcactgcaacctccctgcctgattcccctgcctcagcctgccgagtgcctgcgattgcaggcgcgcaccgccac

SEQ ID NO: 38 - protein, 2612 aa, Homo sapiens
MAGAPPPALLLPCSLISDCCASNQRHSVGVGPSELVKKQIELKSRGVKLMPSKDNSQKTSVLTQVGVSQGHNMCPDPGIPERGKRLGSDFRLGSSVQFTCNEGYDLQGSKRITCMKVSDMFAAWSDHRPVCRARMCDAHLRGPSGIITSPNFPIQYDNNAHCVWIITALNPSKVIKLAFEEFDLERGYDTLTVGDGGQDGDQKTVLYMSQNACSDSPHTPGSRIPESMSGDIWRQKWTVLEICRDISSSDARSGSVRKSPKTSNAVELVAPGTEIEQGSCGDPGIPAYGRREGSRFHHGDTLKFECQPAFELVGQKAITCQKNNQWSAKKPGCVFSCFFNFTSPSGVVLSPNYPEDYGNHLHCVWLILARPESRIHLAFNDIDVEPQFDFLVIKDGATAEAPVLGTFSGNQLPSSITSSGHVARLEFQTDHSTGKRGFNITFTTFRHNECPDPGVPVNGKRFGDSLQLGSSISFLCDEGFLGTQGSETITCVLKEGSVVWNSAVLRCEAPCGGHLTSPSGTILSPGWPGFYKDALSCAWVIEAQPGYPIKITFDRFKTEVNYDTLEVRDGRTYSAPLIGVYHGTQVPQFLISTSNYLYLLFSTDKSHSDIGFQLRYETITLQSDHCLDPGIPVNGQRHGNDFYVGALVTFSCDSGYTLSDGEPLECEPNFQWSRALPSCEALCGGFIQGSSGTILSPGFPDFYPNNLNCTWIIETSHGKGVFFTFHTFHLESGHDYLLITENGSFTQPLRQLTGSRLPAPISAGLYGNFTAQVRFISDFSMSYEGFNITFSEYDLEPCEEPEVPAYSIRKGLQFGVGDTLTFSCFPGYRLEGTARITCLGGRRRLWSSPLPRCVAECGNSVTGTQGTLLSPNFPVNYNNNHECIYSIQTQPGKGIQLKARAFELSEGDVLKVYDGNNNSARLLGVFSHSEMMGVTLNSTSSSLWLDFITDAENTSKGFELHFSSFELIKCEDPGTPKFGYKVHDEGHFAGSSVSFSCDPGYSLRGSEELLCLSGERRTWDRPLPTCVAECGGTVRGEVSGQVLSPGYPAPYEHNLNCIWTIEAEAGCTIGLHFLVFDTEEVHDVLRIWDGPVESGVLLKELSGPALPKDLHSTFNSVVLQFSTDFFTSKQGFAIQFSVSTATSCNDPGIPQNGSRSGDSWEAGDSTVFQCDPGYALQGSAEISCVKIENRFFWQPSPPTCIAPCGGDLTGPSGVILSPNYPEPYPPGKECDWKVTVSPDYVIALVFNIFNLEPGYDFLHIYDGRDSLSPLIGSFYGSQLPGRIESSSNSLFLAFRSDASVSNAGFVIDYTENPRESCFDPGSIKNGTRVGSDLKLGSSVTYYCHGGYEVEGTSTLSCILGPDGKPVWNNPRPVCTAPCGGQYVGSDGVVLSPNYPQNYTSGQICLYFVTVPKDYVVFGQFAFFHTALNDVVEVHDGHSQHSRLLSSLSGSHTGESLPLATSNQVLIKFSAKGLAPARGFHFVYQAVPRTSATQCSSVPEPRYGKRLGSDFSVGAIVRFECNSGYALQGSPEIECLPVPGALAQWNVSAPTCVVPCGGNLTERRGTILSPGFPEPYLNSLNCVWKIVVPEGAGIQIQVVSFVTEQNWDSLEVFDGADNTVTMLGSFSGTTVPALLNSTSNQLYLHFYSDISVSAAGFHLEYKTVGLSSCPEPAVPSNGVKTGERYLVNDVVSFQCEPGYALQGHAHISCMPGTVRRWNYPPPLCIAQCGGTVEEMEGVILSPGFPGNYPSNMDCSWKIALPVGFGAHIQFLNFSTEPNHDYIEIRNGPYETSRMMGRFSGSELPSSLLSTSHETTVYFHSDHSQNRPGFKLEYQAYELQECPDPEPFANGIVRGAGYNVGQSVTFECLPGYQLTGHPVLTCQHGTNRNWDHPLPKCEVPCGGNITSSNGTVYSPGFPSPYSSSQDCVWLITVPIGHGVRLNLSLLQTEPSGDFITIWDGPQQTAPRLGVFTRSMAKKTVQSSSNQVLLKFHRDAATGGIFAIAFSAYPLTKCPPPTILPNAEVVTENEEFNIGDIVRYRCLPGFTLVGNEILTCKLGTYLQFEGPPPICEVHCPTNELLTDSTGVILSQSYPGSYPQFQTCSWLVRVEPDYNISLTVEYFLSEKQYDEFEIFDGPSGQSPLLKALSGNYSAPLIVTSSSNSVYLRWSSDHAYNRKGFKIRYSALSCGLPEAPKNGMVFGKEYTVGTKAMYSCSEGYHLQAGAEATAECLDTGLWSNRNVPPQCVPVTCPDVSSISVEHGRWRLIFETQYQFQAQLMLICDPGYYYTGQRVIRCQANGKWSLGDSTPTCRIISCGELPIPPNGHRIGTLSVYGATAIFSCNSGYTLVGSRVRECMANGLWSGSEVRCLAGHCGTPEPIVNGHINGENYSYRGSVVYQCNAGFRLIGMSVRICQQDHHWSGKTPFCQLPVDTQATLSTASLRVTSLTSTMWSSLFATLGIWLRGLLGPNAWPAGNGVTCCPPAESSTVQILDTKKIVFVRSTPAARTGSASAPLCLTGATTASTSWAPQCSAAREMAHGTVPAPSVSVSSGVLWPSGLPASLPDVWRQLYCGSSGAVQLHRQAYSGGKQHPHVWAGWTLDWLPPSLLRNQRGSLR

SEQ ID NO: 39 - DNA, 10466 bp, Homo sapiens
  CDS (1)..(10449)
ggccagaactgcacgttccaactgcacggtcccaatgggacagttgagagcccagggttcccatatggctaccccaattacgccaactgcacgtggaccatcaccgcggaagagcagcacagaatccagcttgtgttccagtcctttgccctggaagaggactttgatgtcctgtcggtgtttgatggtccaccccagccagagaatctgcgtacgaggctcacaggctttcagctgccagccaccattgttagtgcagccaccaccctctctctgcgcctcatcagcgactatgcagtcagtgcccaaggcttccacgccacctatgaagttctccccagccacacatgtgggaacccagggaggctgcccaatggcatccagcagggttcaaccttcaacctcggtgacaaggtccgctacagctgcaaccttggcttcttcctggagggccacgccgtgctcacctgccacgctggctctgagaacagcgccacgtgggacttccccctgccttcctgcagagctgatgatgcctgtggtgggaccctgcggggccagagtggcatcatctccagcccccacttcccctcggagtaccataacaatgccgactgcacatggaccatcctggctgagctgggggacaccatcgccctggtgtttattgacttccagctggaggatggttacgactttctggaagtcactgggacagaaggctcctccctctggttcaccggagccagcctcccagcccccgttatcagcagcaagaactggctgcgactgcacttcacatcggatggcaaccaccggcagcgcggattcagtgcccaataccaagtcaagaagcaaattgagttgaagtctcgaggtgtgaagctgatgcccagcaaagacaacagccagaagacgtctgtggtaactcaggttggtgtgtcccaaggacataatatgtgtccagaccctggcatacccgaaaggggcaaaagactaggctcggatttcaggttaggatccagcgtccagttcacctgcaacgagggctatgacctgcaagggtccaagcggatcacctgtatgaaagtgagcgacatgtttgcggcctggagcgaccacaggccagtctgccgagcccgcatgtgtgatgcccaccttcgaggcccctcgggcatcatcacctcccccaatttccccattcagtatgacaacaatgcacactgtgtgtggatcatcacagcactcaacccctccaaggtaatcaagctcgcctttgaggagtttgatttggagaggggctatgacaccctgacggtcggtgatggtggtcaggatggggaccagaagacagttctctacatgctgacaggtacatcggtcccggatctcattgtcagcaccaatcatcaaatgtggctcctcttccagactgatggcagtggcagttccctgggattcaaggcttcttatgaagagatcgagcagggcagttgcggtgaccctggcatacctgcatatggccggagggaaggctcccggtttcgccacggtgacacactcaagtttgagtgccagcccgcctttgagctggtgggacagaaggcaatcacatgccaaaagaataaccaatggtcggctaagaagccaggctgcgtgtgttcctgcttcttcaacttcaccagcccgtctggggttgtcctgtctcccaactacccagaggactatggcaaccacctccactgtgtctggctcatcctggccaggcctgagagccgcatccacctggccttcaacgacattgacgtggagcctcagtttgatttcctggtcatcaaggatggggccaccgccgaggcgcccgtcctgggcaccttctcaggaaaccagcttccctcctccatcacaagcagtggccacgtggcccgtctcgagttccagactgaccactccacagggaagaggggcttcaacatcacttttaccagtgagtcctccaacgagtgcccggatcctggcgttccagtaaatggcaaacggtttggggacagcctccagctgggcagctccatctccttcctctgtgatgaaggcttccttgggactcagggctcagagaccatcacctgcgtcctgaaggagggcagcgtggtctggaacagcgctgtgctgcggtgtgaagctccctgtggtggtcacctgacttcgcccagcggcaccatcctctctccgggctggcctggcttctacaaggatgccttgagctgtgcctgggtgattgaggcccagccaggctaccccatcaaaatcaccttcgacaggttcaaaaccgaggtcaactatgacaccctggaagtacgcgatgggcggacttactcagcgcccttgatcggggtttaccacgggacccaggttccccagttcctcatcagcaccagcaactacctctacctcctcttctctaccgacaagagtcactcggacatcggcttccagctccgctatgaggctataacactgcagtcagaccactgtctggatccaggaatcccagtaaatggacagcgtcatgggaatgacttctacgtgggcgcgctggtgaccttcagctgtgactcgggctacacattaagtgacggggagcctctggagtgtgagcccaacttccagtggagccgggccctgcccagttgtgaagctctctgtggtggcttcattcaaggctccagtgggaccatcttgtcgccaggtttccctgacttctaccccaacaacttgaactgcacctggattatcgaaacatctcatggcaagggtgtgttcttcactttccacaccttccacctggaaagtggccatgactacctcctcatcactgagaacggcagcttcacccagcccctgaggcagctaactggatctcggctgccagctcccatcagcgctgggctctatggcaacttcactgcccaggtccgcttcatctctgatttctccatgtcatatgaaggattcaacatcaccttctcagagtacgacttggagccctgtgaggagcccgaggtcccagcctacagcatccggaagggcttgcagtttggcgtgggcgacaccttgaccttctcctgcttccccgggtaccgtctggagggcaccgcccgcatcacgtgcctggggggcagacggcgcctgtggagctcgcctctgccaaggtgtgttgctgagtgtgggaattcagtcacaggcactcagggtactttgctgtcccccaactttcctgtgaactacaataacaatcatgaatgcatctactccatccagacccagccagggaagggaattcagctgaaagccagggcattcgaactctccgaaggagatgtcctcaaggtttatgatggcaacaacaactccgcccgtttgctgggagtttttagccattctgagatgatgggggtgactttgaacagcacatccagcagtctgtggcttgatttcatcactgatgctgaaaacaccagcaagggctttgaactgcacttttccagttttgaactcatcaaatgtgaggacccaggaacccccaagtttggctacaaggttcatgatgaaggtcattttgcagggagctccgtgtccttcagctgtgaccctggatacagcctgcggggtagtgaggagctgctgtgtctgagtggagagcgccggacctgggaccggcctctgcccacctgtgtcgccgagtgtggagggacagtgagaggagaggtgtcggggcaggtgctgtcacccgggtatccagctccctatgaacacaatctcaactgcatctggaccatcgaagcagaggccggctgcaccattgggctacacttcctggtgtttgacacagaggaggttcacgacgtgctgcgcatctgggatgggcctgtggagagcggggttctgctgaaggagctgagtggcccggccctgcccaaggacctgcatagcaccttcaactcggtcgtcctgcagttcagcactgacttcttcaccagcaagcagggctttgccattcaattttcaggttccacagcaacgtcctgcaatgaccctgggatcccgcagaatgggagtcggagtggtgacagttgggaagccggcgactccacagtgttccagtgtgaccctggctacgcgctgcagggaagtgcagagatcagctgtgtgaagatcgagaacaggttcttctggcagcccagcccgccaacatgcatcgctccctgcgggggagacctgacaggaccatctggagtcatcctctcaccaaattacccagaaccctacccgccaggcaaggagtgtgactggaaagtgaccgtctcaccagactacgtcatcgccctggtattgttccccagctttaacctggagcctggctatgacttcctccatatctacgacggacgggactctctcagccctctcataggaagcttctatggctcccagctcccaggccgcattgaaagcagcagcaacagcctcttcctcgccttccgcagcgatgcatctgtgagcaatgctggcttcgtcattgacttcccagaaaacccgcgggagtcatgttttgatcctggttccatcaagaacggcacacgggtggggtccgacctgaagctgggctcctccgtcacctactactgccacgggggctacgaagttgagggcacctcgaccctgagctgcatcctggggcctgatgggaagcccgtgtggaacaatccccggccagtctgcacagccccctgtgggggacagtatgtgggttcggacggagtggtcttgtcccccaactacccccagaactacaccagtggacagatctgcttgtattttgttactgtgcccaaggactatggtgtggtgtttggccagttcgccttctttcacacggccctcaacgacgtggtggaggttcacgacggccacagccagcactcgcggctcctcagctccctctcgggctcccatacaggtgaatcactgcccttggccacctccaatcaagttctcattaagttcagcgccaaaggcctcgcaccagccagaggcttccactttgtctaccaagcggttcctcgaaccagcgccacgcagtgcagctctgtgccggaaccccgctatggcaagaggctgggcagtgacttctcggtgggggccatcgtccgcttcgaatgcaactccggctatgccctgcaggggtcgccagagatcgagtgcctccctgtgcctggggccttggcccaatggaatgtctcagcgcccacgtgtgtggtgccgtgtggaggcaacctcacagagcgcaggggcaccatcctgtcccctggcttcccagagccgtacctcaacagcctcaactgtgtgtggaagatcgtggtccccgaaggcgctggcatccagatccaagttgtcagttttgtgacagagcagaactgggactcgctggaagtatttgatggtgcagataacactgtaaccatgctggggagtttctcaggaacaaccgtgcctgcccttctgaacagcacctccaaccagctctaccttcatttctactcagatatcagcgtatctgcagctggcttccacttggagtacaaaacggtgggcctgagcagttgtccggaacctgctgtgcccagtaacggggtgaagactggcgagcgctacttggtgaatgatgtggtgtctttccagtgtgagccgggatatgccctccagggccacgcccacatctcctgcatgcccggaacagtgcggcgatggaactaccctcctccactctgtattgcacagtgtgggggaacagtggaggagatggagggggtgatcctgagccccggcttcccaggcaactaccccagtaacatggactgctcctggaaaatagcactgcccgtgggctttggagctcacatccagttcctgaacttctccaccgagcccaaccacgactacatagaaatccggaatggcccctatgagaccagccgcatgatgggaagattcagtggaagcgagcttccaagctccctcctctccacgtcccacgagaccaccgtgtatttccacagcgaccactcccagaatcggccaggattcaagctggagtatcaggcctatgaacttcaagagtgcccagacccagagccctttgccaatggcattgtgaggggagctggctacaacgtgggacaatcagtgaccttcgagtgcctcccggggtatcaattgactggccaccctgtcctcacgtgtcaacatggcaccaaccggaactgggaccaccccctgcccaagtgtgaagtcccttgtggcgggaacatcacttcttccaacggcactgtgtactccccggggttccctagcccgtactccagctcccaggactgtgtctggctgatcaccgtgcccattggccatggcgtccgcctcaacctcagcctgctgcagacagagccctctggagatttcatcaccatctgggatgggccacagcaaacagcaccacggctcggcgtcttcacccggagcatggccaagaaaacagtgcagagttcatccaaccaggtcctgctcaagttccaccgtgatgcagccacaggggggatcttcgccatagctttctccgcttatccactcaccaaatgccctcctcccaccatcctccccaacgccgaagtcgtcacagagaatgaagaattcaatataggtgacatcgtacgctacagatgcctccctggctttaccttagtggggaatgaaattctgacctgcaaacttggaacctacctgcagtttgaaggaccacccccgatatgtgaagtgcactgtccaacaaatgagcttctgacagactccacaggcgtgatcctgagccagagctaccctggaagctatccccagttccagacctgctcttggctggtgagagtggagcccgactataacatctccctcacagtggagtacttcctcagcgagaagcaatatgatgagtttgagatttttgatggtccatcaggacagagtcctctgctgaaagccctcagtgggaattactcagctcccctgattgtcaccagctcaagcaactctgtgtacctgcgttggtcatctgatcacgcctacaatcggaagggcttcaagatccgctattcagccctttcctgtgggcttcctgaggcccccaagaatggaatggtgtttggcaaggagtacacagtgggaaccaaggccatgtacagctgcagtgaaggctaccacctccaggcaggcgctgaggccactgcagagtgtctggacacaggcctatggagcaaccgcaatgtcccaccacagtgtgtccctgtgacttgtcctgatgtcagtagcatcagcgtggagcatggccgatggaggcttatctttgagacacagtatcagttccaggcccagctgatgctcatctgtgaccctggctactactatactggccaaagggtcatccgctgtcaggccaatggcaaatggagcctcggggactctacgcccacctgccgaatcatctcctgtggagagctcccgattccccccaatggccaccgcatcggaacactgtctgtctacggggcaacagccatcttctcctgcaattccggatacacactggtgggctccagggtgcgtgagtgcatggccaatgggctctggagtggctctgaagtccgctgccttgctggacactgtgggactcctgagcccattgtcaacggacacatcaatggggagaactacagctaccggggcagtgtggtgtaccaatgcaatgctggcttccgcctgatcggcatgtctgtgcgcatctgccagcaggatcatcactggtcgggcaagacccctttctgtgtgccaattacctgtggacacccaggcaaccctgtcaacggcctcactcagggtaaccagtttaacctcaacgatgtggtcaagtttgtttgcaaccctgggtatatggctgagggggctgctaggtcccaatgcctggccagcgggcaatggagtgacatgctgcccacctgcagaatcatcaactgtacagatcctggacaccaagaaaatagtgttcgtcaggtccacgccagcggcccgcacaggttcagcttcggcaccactgtgtcttaccggtgcaaccacggcttctacctcctgggcaccccagtgctcagctgccagggagatggcacatgggaccgtccccgcccccagtgtctcctggtgtcctgtggccatccgggctccccgcctcactcccagatgtctggagacagttatactgtgggagcagtggtgcggtacagctgcatcggcaagcgtactctggtgggaaacagcacccgcatgtgtgggctggatggacactggactggctccctccctcactgctcaggaaccagcgtgggagtttgcggtgaccctgggatcccggctcatggcatccgtttgggggacagctttgatccaggcactgtgatgcgcttcagctgtgaagctggccacgtgctccggggatcgtcagagcgcacctgtcaagccaatggctcgtggagcggctcgcagcctgagtgtggagtgatctcttgtgggaaccctgggactccaagtaatgcccgagttgtgttcagtgatggcctggttttctccagctctatcgtctatgagtgccgggaaggatactacgccacaggcctgctcagccgtcactgctcggtcaatggtacctggacaggcagtgaccctgagtgcctcgtcataaactgtggtgaccctgggattccagccaatggccttcggctgggcaatgacttcaggtacaacaaaactgtgacatatcagtgtgtccctggctatatgatggagtcacatagagtatctgtgctgagctgcaccaaggaccggacatggaatggaaccaagcccgtctgcaaagctctcatgtgcaagccacctccgctcatccccaatgggaaggtggtggggtctgacttcatgtggggctcaagtgtgacttatgcctgcctggaggggtaccagctctccctgcccgcggtgttcacctgtgagggaaatgggtcctggaccggagagctgcctcagtgtttccctgtgttctgcggggatcctggtgtcccgtcccgtgggaggagagaggaccgaggcttctcctacaggtcatctgtctccttctcctgccatccccctctggtgctggtgggctctccacgcaggttttgccagtcagatgggacatggagtggcacccagcccagctgcatagatccgaccctgaccacgtgtgcggaccctggtgtgccacagtttgggatacagaacaattctcagggctaccaggttggaagcacagtcctcttccgttgtcaaaaaggctacctgcttcagggctccaccaccaggacctgcctcccaaacctgacctggagtggaaccccacctgactgtgtcccccaccactgcaggcagccagagacgccaacgcatgccaacgtcggggccctggatttgccctccatgggctacacgctcatctactcctgccaggagggcttctccctcaagggtggctccgagcaccgcacctgcaaggcggatggcagctggacaggcaagccgcccatctgcctggaggtccggcccaatgggagacccatcaacactgcccgggagccaccgctcacccaagccttgattcctggggatgtttttgccaagaattccctgtggaaaggggcctatgaataccaggggaagaagcagccagccatgctcagagtgactggcttccaagttgccaacagcaaggtcaatgccaccatgatcgaccacagtggcgtggagctgcacttggctggaacttacaagaaagaagattttcatctcctactccaggtgtaccagattacagggcctgtggagatctttatgaataagttcaaagatgatcactgggctttagatggccatgtctcgtcagagtcctccggagccaccttcatctaccaaggctctgtcaagggccaaggctttgggcagttcggctttcaaagactggacctcaggctgctggagtcagaccccgagtccattggccgccactttgcttccaacagcagctcagtggcagccgcgatcctggtgcctttcatcgccctcattattgcgggcttcgtgctctatctctacaagcacaggagaagacccaaagttcctttcaatggctatgctggccacgagaacaccaatgttcgggccacatttgagaacccaatgtacgaccgcaacatccagcccacagacatcatggccagcgaggcggagttcacagtcagcacagtgtgcacagcagtatagccacccggcctggc

SEQ ID NO: 40 - protein, 3483 aa, Homo sapiens
GQNCTFQLHGPNGTVESPGFPYGYPNYANCTWTITAEEQHRIQLVFQSFALEEDFDVLSVFDGPPQPENLRTRLTGFQLPATIVSAATTLSLRLISDYAVSAQGFHATYEVLPSHTCGNPGRLPNGIQQGSTFNLGDKVRYSCNLGFFLEGHAVLTCHAGSENSATWDFPLPSCRADDACGGTLRGQSGIISSPHFPSEYHNNADCTWTILAELGDTIALVFIDFQLEDGYDFLEVTGTEGSSLWFTGASLPAPVISSKNWLRLHFTSDGNHRQRGFSAQYQVKKQIELKSRGVKLMPSKDNSQKTSVVTQVGVSQGHNMCPDPGIPERGKRLGSDFRLGSSVQFTCNEGYDLQGSKRITCMKVSDMFAAWSDHRPVCRARMCDAHLRGPSGIITSPNFPIQYDNNAHCVWIITALNPSKVIKLAFEEFDLERGYDTLTVGDGGQDGDQKTVLYMLTGTSVPDLIVSTNHQMWLLFQTDGSGSSLGFKASYEEIEQGSCGDPGIPAYGRREGSRFRHGDTLKFECQPAFELVGQKAITCQKNNQWSAKKPGCVCSCFFNFTSPSGVVLSPNYPEDYGNHLHCVWLILARPESRIHLAFNDIDVEPQFDFLVIKDGATAEAPVLGTFSGNQLPSSITSSGHVARLEFQTDHSTGKRGFNITFTSESSNECPDPGVPVNGKRFGDSLQLGSSISFLCDEGFLGTQGSETITCVLKEGSVVWNSAVLRCEAPCGGHLTSPSGTILSPGWPGFYKDALSCAWVIEAQPGYPIKITFDRFKTEVNYDTLEVRDGRTYSAPLIGVYHGTQVPQFLISTSNYLYLLFSTDKSHSDIGFQLRYEAITLQSDHCLDPGIPVNGQRHGNDFYVGALVTFSCDSGYTLSDGEPLECEPNFQWSRALPSCEALCGGFIQGSSGTILSPGFPDFYPNNLNCTWIIETSHGKGVFFTFHTFHLESGHDYLLITENGSFTQPLRQLTGSRLPAPISAGLYGNFTAQVRFISDFSMSYEGFNITFSEYDLEPCEEPEVPAYSIRKGLQFGVGDTLTFSCFPGYRLEGTARITCLGGRRRLWSSPLPRCVAECGNSVTGTQGTLLSPNFPVNYNNNHECIYSIQTQPGKGIQLKARAFELSEGDVLKVYDGNNNSARLLGVFSHSEMMGVTLNSTSSSLWLDFITDAENTSKGFELHFSSFELIKCEDPGTPKFGYKVHDEGHFAGSSVSFSCDPGYSLRGSEELLCLSGERRTWDRPLPTCVAECGGTVRGEVSGQVLSPGYPAPYEHNLNCIWTIEAEAGCTIGLHFLVFDTEEVHDVLRIWDGPVESGVLLKELSGPALPKDLHSTFNSVVLQFSTDFFTSKQGFAIQFSGSTATSCNDPGIPQNGSRSGDSWEAGDSTVFQCDPGYALQGSAEISCVKIENRFFWQPSPPTCIAPCGGDLTGPSGVILSPNYPEPYPPGKECDWKVTVSPDYVIALVLFPSFNLEPGYDFLHIYDGRDSLSPLIGSFYGSQLPGRIESSSNSLFLAFRSDASVSNAGFVIDFPENPRESCFDPGSIKNGTRVGSDLKLGSSVTYYCHGGYEVEGTSTLSCILGPDGKPVWNNPRPVCTAPCGGQYVGSDGVVLSPNYPQNYTSGQICLYFVTVPKDYGVVFGQFAFFHTALNDVVEVHDGHSQHSRLLSSLSGSHTGESLPLATSNQVLIKFSAKGLAPARGFHFVYQAVPRTSATQCSSVPEPRYGKRLGSDFSVGAIVRFECNSGYALQGSPEIECLPVPGALAQWNVSAPTCVVPCGGNLTERRGTILSPGFPEPYLNSLNCVWKIVVPEGAGIQIQVVSFVTEQNWDSLEVFDGADNTVTMLGSFSGTTVPALLNSTSNQLYLHFYSDISVSAAGFHLEYKTVGLSSCPEPAVPSNGVKTGERYLVNDVVSFQCEPGYALQGHAHISCMPGTVRRWNYPPPLCIAQCGGTVEEMEGVILSPGFPGNYPSNMDCSWKIALPVGFGAHIQFLNFSTEPNHDYIEIRNGPYETSRMMGRFSGSELPSSLLSTSHETTVYFHSDHSQNRPGFKLEYQAYELQECPDPEPFANGIVRGAGYNVGQSVTFECLPGYQLTGHPVLTCQHGTNRNWDHPLPKCEVPCGGNITSSNGTVYSPGFPSPYSSSQDCVWLITVPIGHGVRLNLSLLQTEPSGDFITIWDGPQQTAPRLGVFTRSMAKKTVQSSSNQVLLKFHRDAATGGIFAIAFSAYPLTKCPPPTILPNAEVVTENEEFNIGDIVRYRCLPGFTLVGNEILTCKLGTYLQFEGPPPICEVHCPTNELLTDSTGVILSQSYPGSYPQFQTCSWLVRVEPDYNISLTVEYFLSEKQYDEFEIFDGPSGQSPLLKALSGNYSAPLIVTSSSNSVYLRWSSDHAYNRKGFKIRYSALSCGLPEAPKNGMVFGKEYTVGTKAMYSCSEGYHLQAGAEATAECLDTGLWSNRNVPPQCVPVTCPDVSSISVEHGRWRLIFETQYQFQAQLMLICDPGYYYTGQRVIRCQANGKWSLGDSTPTCRIISCGELPIPPNGHRIGTLSVYGATAIFSCNSGYTLVGSRVRECMANGLWSGSEVRCLAGHCGTPEPIVNGHINGENYSYRGSVVYQCNAGFRLIGMSVRICQQDHHWSGKTPFCVPITCGHPGNPVNGLTQGNQFNLNDVVKFVCNPGYMAEGAARSQCLASGQWSDMLPTCRIINCTDPGHQENSVRQVHASGPHRFSFGTTVSYRCNHGFYLLGTPVLSCQGDGTWDRPRPQCLLVSCGHPGSPPHSQMSGDSYTVGAVVRYSCIGKRTLVGNSTRMCGLDGHWTGSLPHCSGTSVGVCGDPGIPAHGIRLGDSFDPGTVMRFSCEAGHVLRGSSERTCQANGSWSGSQPECGVISCGNPGTPSNARVVFSDGLVFSSSIVYECREGYYATGLLSRHCSVNGTWTGSDPECLVINCGDPGIPANGLRLGNDFRYNKTVTYQCVPGYMMESHRVSVLSCTKDRTWNGTKPVCKALMCKPPPLIPNGKVVGSDFMWGSSVTYACLEGYQLSLPAVFTCEGNGSWTGELPQCFPVFCGDPGVPSRGRREDRGFSYRSSVSFSCHPPLVLVGSPRRFCQSDGTWSGTQPSCIDPTLTTCADPGVPQFGIQNNSQGYQVGSTVLFRCQKGYLLQGSTTRTCLPNLTWSGTPPDCVPHHCRQPETPTHANVGALDLPSMGYTLIYSCQEGFSLKGGSEHRTCKADGSWTGKPPICLEVRPNGRPINTAREPPLTQALIPGDVFAKNSLWKGAYEYQGKKQPAMLRVTGFQVANSKVNATMIDHSGVELHLAGTYKKEDFHLLLQVYQITGPVEIFMNKFKDDHWALDGHVSSESSGATFIYQGSVKGQGFGQFGFQRLDLRLLESDPESIGRHFASNSSSVAAAILVPFIALIIAGFVLYLYKHRRRPKVPFNGYAGHENTNVRATFENPMYDRNIQPTDIMASEAEFTVSTVCTAV

SEQ ID NO: 41 - DNA, 12901 bp, Homo sapiens
  CDS (889)..(10278)
ggccagaactgcacgttccaactgcacggtcccaatgggacagttgagagcccagggttcccatatggctaccccaattacgccaactgcacgtggaccatcaccgcggaagagcagcacagaatccagcttgtgttccagtcctttgccctggaagaggactttgatgtcctgtcggtgtttgatggtccaccccagccagagaatctgcgtacgaggctcacaggctttcagctgccagccaccattgttagtgcagccaccaccctctctctgcgcctcatcagcgactatgcagtcagtgcccaaggcttccacgccacctatgaagttctccccagccacacatgtgggaacccagggaggctgcccaatggcatccagcagggttcaaccttcaacctcggtgacaaggtccgctacagctgcaaccttggcttcttcctggagggccacgccgtgctcacctgccacgctggctctgagaacagcgccacgtgggacttccccctgccttcctgcagagctgatgatgcctgtggtgggaccctgcggggccagagtggcatcatctccagcccccacttcccctcggagtaccataacaatgccgactgcacatggaccatcctggctgagctgggggacaccatcgccctggtgtttattgacttccagctggaggatggttacgactttctggaagtcactgggacagaaggctcctccctctggttcaccggagccagcctcccagcccccgttatcagcagcaagaactggctgcgactgcacttcacatcggatggcaaccaccggcagcgcggattcagtgcccaataccaagtcaagaagcaaattgagttgaagtctcgaggtgtgaagctgatgcccagcaaagacaacagccagaagacgtctgtggtaactcaggttggtgtgtcccaaggacataatatgtgtccagaccctggcatacccgaaaggggcaaaagactaggctcggatttcaggttaggatccagcgtccagttcacctgcaacgagggctatgacctgcaagggtccaagcggatcacctgtatgaaagtgagcgacatgtttgcggcctggagcgaccacaggccagtctgccgagcccgcatgtgtgatgcccaccttcgaggcccctcgggcatcatcacctcccccaatttccccattcagtatgacaacaatgcacactgtgtgtggatcatcacagcactcaacccctccaaggtaatcaagctcgcctttgaggagtttgatttggagaggggctatgacaccctgacggtcggtgatggtggtcaggatggggaccagaagacagttctctacatgctgacaggtacatcggtcccggatctcattgtcagcaccaatcatcaaatgtggctcctcttccagactgatggcagtggcagttccctgggattcaaggcttcttatgaagagatcgagcagggcagttgcggtgaccctggcatacctgcatatggccggagggaaggctcccggtttcgccacggtgacacactcaagtttgagtgccagcccgcctttgagctggtgggacagaaggcaatcacatgccaaaagaataaccaatggtcggctaagaagccaggctgcgtgtgttcctgcttcttcaacttcaccagcccgtctggggttgtcctgtctcccaactacccagaggactatggcaaccacctccactgtgtctggctcatcctggccaggcctgagagccgcatccacctggccttcaacgacattgacgtggagcctcagtttgatttcctggtcatcaaggatggggccaccgccgaggcgcccgtcctgggcaccttctcaggaaaccagcttccctcctccatcacaagcagtggccacgtggcccgtctcgagttccagactgaccactccacagggaagaggggcttcaacatcacttttaccagtgagtcctccaacgagtgcccggatcctggcgttccagtaaatggcaaacggtttggggacagcctccagctgggcagctccatctccttcctctgtgatgaaggcttccttgggactcagggctcagagaccatcacctgcgtcctgaaggagggcagcgtggtctggaacagcgctgtgctgcggtgtgaagctccctgtggtggtcacctgacttcgcccagcggcaccatcctctctccgggctggcctggcttctacaaggatgccttgagctgtgcctgggtgattgaggcccagccaggctaccccatcaaaatcaccttcgacaggttcaaaaccgaggtcaactatgacaccctggaagtacgcgatgggcggacttactcagcgcccttgatcggggtttaccacgggacccaggttccccagttcctcatcagcaccagcaactacctctacctcctcttctctaccgacaagagtcactcggacatcggcttccagctccgctatgaggctataacactgcagtcagaccactgtctggatccaggaatcccagtaaatggacagcgtcatgggaatgacttctacgtgggcgcgctggtgaccttcagctgtgactcgggctacacattaagtgacggggagcctctggagtgtgagcccaacttccagtggagccgggccctgcccagttgtgaagctctctgtggtggcttcattcaaggctccagtgggaccatcttgtcgccaggtttccctgacttctaccccaacaacttgaactgcacctggattatcgaaacatctcatggcaagggtgtgttcttcactttccacaccttccacctggaaagtggccatgactacctcctcatcactgagaacggcagcttcacccagcccctgaggcagctaactggatctcggctgccagctcccatcagcgctgggctctatggcaacttcactgcccaggtccgcttcatctctgatttctccatgtcatatgaaggattcaacatcaccttctcagagtacgacttggagccctgtgaggagcccgaggtcccagcctacagcatccggaagggcttgcagtttggcgtgggcgacaccttgaccttctcctgcttccccgggtaccgtctggagggcaccgcccgcatcacgtgcctggggggcagacggcgcctgtggagctcgcctctgccaaggtgtgttgctgagtgtgggaattcagtcacaggcactcagggtactttgctgtcccccaactttcctgtgaactacaataacaatcatgaatgcatctactccatccagacccagccagggaagggaattcagctgaaagccagggcattcgaactctccgaaggagatgtcctcaaggtttatgatggcaacaacaactccgcccgtttgctgggagtttttagccattctgagatgatgggggtgactttgaacagcacatccagcagtctgtggcttgatttcatcactgatgctgaaaacaccagcaagggctttgaactgcacttttccagttttgaactcatcaaatgtgaggacccaggaacccccaagtttggctacaaggttcatgatgaaggtcattttgcagggagctccgtgtccttcagctgtgaccctggatacagcctgcggggtagtgaggagctgctgtgtctgagtggagagcgccggacctgggaccggcctctgcccacctgtgtcgccgagtgtggagggacagtgagaggagaggtgtcggggcaggtgctgtcacccgggtatccagctccctatgaacacaatctcaactgcatctggaccatcgaagcagaggccggctgcaccattgggctacacttcctggtgtttgacacagaggaggttcacgacgtgctgcgcatctgggatgggcctgtggagagcggggttctgctgaaggagctgagtggcccggccctgcccaaggacctgcatagcaccttcaactcggtcgtcctgcagttcagcactgacttcttcaccagcaagcagggctttgccattcaattttcaggttccacagcaacgtcctgcaatgaccctgggatcccgcagaatgggagtcggagtggtgacagttgggaagccggcgactccacagtgttccagtgtgaccctggctacgcgctgcagggaagtgcagagatcagctgtgtgaagatcgagaacaggttcttctggcagcccagcccgccaacatgcatcgctccctgcgggggagacctgacaggaccatctggagtcatcctctcaccaaattacccagaaccctacccgccaggcaaggagtgtgactggaaagtgaccgtctcaccagactacgtcatcgccctggtattgttccccagctttaacctggagcctggctatgacttcctccatatctacgacggacgggactctctcagccctctcataggaagcttctatggctcccagctcccaggccgcattgaaagcagcagcaacagcctcttcctcgccttccgcagcgatgcatctgtgagcaatgctggcttcgtcattgacttcccagaaaacccgcgggagtcatgttttgatcctggttccatcaagaacggcacacgggtggggtccgacctgaagctgggctcctccgtcacctactactgccacgggggctacgaagttgagggcacctcgaccctgagctgcatcctggggcctgatgggaagcccgtgtggaacaatccccggccagtctgcacagccccctgtgggggacagtatgtgggttcggacggagtggtcttgtcccccaactacccccagaactacaccagtggacagatctgcttgtattttgttactgtgcccaaggactatggtgtggtgtttggccagttcgccttctttcacacggccctcaacgacgtggtggaggttcacgacggccacagccagcactcgcggctcctcagctccctctcgggctcccatacaggtggagaatcactgcccttggccacctccaatcaagttctcattaagttcagcgccaaaggcctcgcaccagccagaggcttccactttgtctaccaagcggttcctcgaaccagcgccacgcagtgcagctctgtgccggaaccccgctatggcaagaggctgggcagtgacttctcggtgggggccatcgtccgcttcgaatgcaactccggctatgccctgcaggggtcgccagagatcgagtgcctccctgtgcctggggccttggcccaatggaatgtctcagcgcccacgtgtgtggtgccgtgtggaggcaacctcacagagcgcaggggcaccatcctgtcccctggcttcccagagccgtacctcaacagcctcaactgtgtgtggaagatcgtggtccccgaaggcgctggcatccagatccaagttgtcagttttgtgacagagcagaactgggactcgctggaagtatttgatggtgcagataacactgtaaccatgctggggagtttctcaggaacaaccgtgcctgcccttctgaacagcacctccaaccagctctaccttcatttctactcagatatcagcgtatctgcagctggcttccacttggagtacaaaacggtgggcctgagcagttgtccggaacctgctgtgcccagtaacggggtgaagactggcgagcgctacttggtgaatgatgtggtgtctttccagtgtgagccgggatatgccctccagggccacgcccacatctcctgcatgcccggaacagtgcggcgatggaactaccctcctccactctgtattgcacagtgtgggggaacagtggaggagatggagggggtgatcctgagccccggcttcccaggcaactaccccagtaacatggactgctcctggaaaatagcactgcccgtgggctttggagctcacatccagttcctgaacttctccaccgagcccaaccacgactacatagaaatccggaatggcccctatgagaccagccgcatgatgggaagattcagtggaagcgagcttccaagctccctcctctccacgtcccacgagaccaccgtgtatttccacagcgaccactcccagaatcggccaggattcaagctggagtatcaggcctatgaacttcaagagtgcccagacccagagccctttgccaatggcattgtgaggggagctggctacaacgtgggacaatcagtgaccttcgagtgcctcccggggtatcaattgactggccaccctgtcctcacgtgtcaacatggcaccaaccggaactgggaccaccccctgcccaagtgtgaagtcccttgtggcgggaacatcacttcttccaacggcactgtgtactccccggggttccctagcccgtactccagctcccaggactgtgtctggctgatcaccgtgcccattggccatggcgtccgcctcaacctcagcctgctgcagacagagccctctggagatttcatcaccatctgggatgggccacagcaaacagcaccacggctcggcgtcttcacccggagcatggccaagaaaacagtgcagagttcatccaaccaggtcctgctcaagttccaccgtgatgcagccacaggggggatcttcgccatagctttctccgcttatccactcaccaaatgccctcctcccaccatcctccccaacgccgaagtcgtcacagagaatgaagaattcaatataggtgacatcgtacgctacagatgcctccctggctttaccttagtggggaatgaaattctgacctgcaaacttggaacctacctgcagtttgaaggaccacccccgatatgtgaagtgcactgtccaacaaatgagcttctgacagactccacaggcgtgatcctgagccagagctaccctggaagctatccccagttccagacctgctcttggctggtgagagtggagcccgactataacatctccctcacagtggagtacttcctcagcgagaagcaatatgatgagtttgagatttttgatggtccatcaggacagagtcctctgctgaaagccctcagtgggaattactcagctcccctgattgtcaccagctcaagcaactctgtgtacctgcgttggtcatctgatcacgcctacaatcggaagggcttcaagatccgctattcagccccttactgcagcctgcccagggctccactccatggcttcatcctaggccagaccagcacccagcccgggggctccatccactttggctgcaacgccggctaccgcctggtgggacacagcatggccatctgtacccggcacccccagggctaccacctgtggagcgaagccatccctctctgtcaagctctttcctgtgggcttcctgaggcccccaagaatggaatggtgtttggcaaggagtacacagtgggaaccaaggccatgtacagctgcagtgaaggctaccacctccaggcaggcgctgaggccactgcagagtgtctggacacaggcctatggagcaaccgcaatgtcccaccacagtgtgtccctgtgacttgtcctgatgtcagtagcatcagcgtggagcatggccgatggaggcttatctttgagacacagtatcagttccaggcccagctgatgctcatctgtgaccctggctactactatactggccaaagggtcatccgctgtcaggccaatggcaaatggagcctcggggactctacgcccacctgccgaatcatctcctgtggagagctcccgattccccccaatggccaccgcatcggaacactgtctgtctacggggcaacagccatcttctcctgcaattccggatacacactggtgggctccagggtgcgtgagtgcatggccaatgggctctggagtggctctgaagtccgctgccttgctggacactgtgggactcctgagcccattgtcaacggacacatcaatggggagaactacagctaccggggcagtgtggtgtaccaatgcaatgctggcttccgcctgatcggcatgtctgtgcgcatctgccagcaggatcatcactggtcgggcaagacccctttctgtgtgctggtgtcctgtggccatccgggctccccgcctcactcccagatgtctggagacagttatactgtgggagcagtggtgcggtacagctgcatcggcaagcgtactctggtgggaaacagcacccgcatgtgtgggctggatggacactggactggctccctccctcactgctcaggaaccagcgtgggagtttgcggtgaccctgggatcccggctcatggcatccgtttgggggacagctttgatccaggcactgtgatgcgcttcagctgtgaagctggccacgtgctccggggatcgtcagagcgcacctgtcaagccaatggctcgtggagcggctcgcagcctgagtgtggagtgatctcttgtgggaaccctgggactccaagtaatgcccgagttgtgttcagtgatggcctggttttctccagctctatcgtctatgagtgccgggaaggatactacgccacaggcctgctcagccgtcactgctcggtcaatggtacctggacaggcagtgaccctgagtgcctcgtcataaactgtggtgaccctgggattccagccaatggccttcggctgggcaatgacttcaggtacaacaaaactgtgacatatcagtgtgtccctggctatatgatggagtcacatagagtatctgtgctgagctgcaccaaggaccggacatggaatggaaccaagcccgtctgcaaagctctcatgtgcaagccacctccgctcatccccaatgggaaggtggtggggtctgacttcatgtggggctcaagtgtgacttatgcctgcctggaggggtaccagctctccctgcccgcggtgttcacctgtgagggaaatgggtcctggaccggagagctgcctcagtgtttccctgtgttctgcggggatcctggtgtcccgtcccgtgggaggagagaggaccgaggcttctcctacaggtcatctgtctccttctcctgccatccccctctggtgctggtgggctctccacgcaggttttgccagtcagatgggacatggagtggcacccagcccagctgcatagatccgaccctgaccacgtgtgcggaccctggtgtgccacagtttgggatacagaacaattctcagggctaccaggttggaagcacagtcctcttccgttgtcaaaaaggctacctgcttcagggctccaccaccaggacctgcctcccaaacctgacctggagtggaaccccacctgactgtgtcccccaccactgcaggcagccagagacgccaacgcatgccaacgtcggggccctggatttgccctccatgggctacacgctcatctactcctgccaggagggcttctccctcaagggtggctccgagcaccgcacctgcaaggcggatggcagctggacaggcaagccgcccatctgcctggaggtccggcccaatgggagacccatcaacactgcccgggagccaccgctcacccaagccttgattcctggggatgtttttgccaagaattccctgtggaaaggggcctatgaataccaggggaagaagcagccagccatgctcagagtgactggcttccaagttgccaacagcaaggtcaatgccaccatgatcgaccacagtggcgtggagctgcacttggctggaacttacaagaaagaagattttcatctcctactccaggtgtaccagattacagggcctgtggagatctttatgaataagttcaaagatgatcactgggctttagatggccatgtctcgtcagagtcctccggagccaccttcatctaccaaggctctgtcaagggccaaggctttgggcagttcggctttcaaagactggacctcaggctgctggagtcagaccccgagtccattggccgccactttgcttccaacagcagctcagtggcagccgcgatcctggtgcctttcatcgccctcattattgcgggcttcgtgctctatctctacaagcacaggagaagacccaaagttcctttcaatggctatgctggccacgagaacaccaatgttcgggccacatttgagaacccaatgtacgaccgcaacatccagcccacagacatcatggccagcgaggcggagttcacagtcagcacagtgtgcacagcagtatagccacccggcctggccgccaccaccgccaccgagagccccgcctccagcagccgttccccagggggcaggaagtaggctcccctgagcacagtgcccagtgcccatcttcgttcgtctccttgcctgtgtctgctactgctgggactcaggccctcgccctgccgccatctatgccagttaccctggagaggactcctgccgtgtcctgaaaaggcagaaaaggaagaggggctgcagacagaggaagaaagtttatggatttaaaatagcaaagcaacttgtggatctgtgtgtgtgtgtgtgtgtgtgtgtatgggcctgatcacacacaaacacacacacctctccttcattcacgtcctatggaagagaccataaaggcttcaaaactagaagtgcgcatgaaggatgcttcatgccctgttccccacacagagaagagatgaagagggggaggtacggtcagctttcaaaacaatatgccccccgcccatcccatgtgtgaggacatggtgactcggtgactgtaacagtaggacacatcccatcatgcggtcagagtgcagaaacccggtcagcgtgcagaaaccagctgtctgctgatgaacggcccatctgcacagcggcagcaaggattaccccaagggcaggaaaaaagtctttggaaatagattgaaaatcagtttctttatttttttcaaacactgttttattgagttctaaacccagtggattaaaaagtcatttgggtcctgggaagcactgggaaagaagggagagccggggaggatagggcaggagtctggccaggagcccaaggtcaagtctggctgtcaactgacaaagagaagagaagacaagtctgtggcccagacagggtgccaagtctgggggcagcagcagggtccttgagagaacaggggagcaagcctgccccagtacccaaaaaacaatggctatcatgtactggggttattctctgtgcctgacactttacctatagtatttctagtctgcacaataacaccaaaatgtaggatttgttattcccctttgacagatgagaaaacagaagcctgcaaaggtaaagacagagttaggaagtgtggagtcagaatgcaaacccagatcagtctgccccaaagtccactacaccagctgccagaaaccctgttctagaaggggcagctaagaagggaggagccgatgaaactctacagtagcactgtggccaggtctggaaagccaggcaagacacctgtgtgtcctatctgggttctgctgtctccgcgtaggcagcttcggggcaaggattcaactccccaggcctcccacggttggtgctggctccttggctcccagcagccgctgaccatagccagcaaaagacctggcaggtcctgaatcaaaacaacagagtggctgaaagtcacacctctccagctccttgcgagtgggtttgattgattttgacagctatatcatgcttgggtcgttcatgaattccatgagaattgttgggaagttcatgagtttaggaatcaaagtatagcatttagggccactttctctgtcctcgggaaggcccccacaagcttaagcccctgtatacgtgtgacatgctggcctcagagattcatgtcacatattgaaatagcaaatagaaatgtgcaggagcggagggacagcgacacctggttcttaagcaaattctagattggaacaattagaagatctgactgatgttaagagtggccagaggaaagtgagaggcgtccatttccagcagacacaatggaggctgacagaggcaggagcctacccctggccacaccacctctgggacacggcacccccctgggcctggagggagagggccaatccagacacactcacactctcatctctttccttggctggaaacaagtgcaggaagctcccctcccaatttcttatgctcccttcccccttacactcctctccttcgactgctcccttcccccttcttatgcccctctcagaccacccagcggatgcctattcccgccccccacccctcccctgcgtctccttgtaaagttccatgagatgctcgaggagcacctgctggtggggcacccagcactctgctgggcatcaccctccgcacccctgacatttctctccacctccagaggcttggaagggaacagggcagatgaggcccttcacccaccatctacgccatatacccatcaccatcccatgaggaaaaaaaaaaaagtaaaacaaagacaaaaaaaatcttttgtacagagatatatttttattatacaaagtttgtacagtaccaaaaaagaaaaaaaaaaggtgtaaatttttttttcattattgtaggtaaacggtagtggaagccttttttgtaaatgtaataaaatgtataaatatggttttcagaaaacatcaagtgctgtaaatatgtaatctacacaccttcttggcttgtctgcagtatatacatttaatttatctgtctctgtatatgaggcttccccctggggtcctgcattatggtactttcctgaatttgaaagcaattttaaattttttgaattcaaataaaatataaatttttgcattg

SEQ ID NO: 42 - protein, 3130 aa, Homo sapiens
MPSKDNSQKTSVVTQVGVSQGHNMCPDPGIPERGKRLGSDFRLGSSVQFTCNEGYDLQGSKRITCMKVSDMFAAWSDHRPVCRARMCDAHLRGPSGIITSPNFPIQYDNNAHCVWIITALNPSKVIKLAFEEFDLERGYDTLTVGDGGQDGDQKTVLYMLTGTSVPDLIVSTNHQMWLLFQTDGSGSSLGFKASYEEIEQGSCGDPGIPAYGRREGSRFRHGDTLKFECQPAFELVGQKAITCQKNNQWSAKKPGCVCSCFFNFTSPSGVVLSPNYPEDYGNHLHCVWLILARPESRIHLAFNDIDVEPQFDFLVIKDGATAEAPVLGTFSGNQLPSSITSSGHVARLEFQTDHSTGKRGFNITFTSESSNECPDPGVPVNGKRFGDSLQLGSSISFLCDEGFLGTQGSETITCVLKEGSVVWNSAVLRCEAPCGGHLTSPSGTILSPGWPGFYKDALSCAWVIEAQPGYPIKITFDRFKTEVNYDTLEVRDGRTYSAPLIGVYHGTQVPQFLISTSNYLYLLFSTDKSHSDIGFQLRYEAITLQSDHCLDPGIPVNGQRHGNDFYVGALVTFSCDSGYTLSDGEPLECEPNFQWSRALPSCEALCGGFIQGSSGTILSPGFPDFYPNNLNCTWIIETSHGKGVFFTFHTFHLESGHDYLLITENGSFTQPLRQLTGSRLPAPISAGLYGNFTAQVRFISDFSMSYEGFNITFSEYDLEPCEEPEVPAYSIRKGLQFGVGDTLTFSCFPGYRLEGTARITCLGGRRRLWSSPLPRCVAECGNSVTGTQGTLLSPNFPVNYNNNHECIYSIQTQPGKGIQLKARAFELSEGDVLKVYDGNNNSARLLGVFSHSEMMGVTLNSTSSSLWLDFITDAENTSKGFELHFSSFELIKCEDPGTPKFGYKVHDEGHFAGSSVSFSCDPGYSLRGSEELLCLSGERRTWDRPLPTCVAECGGTVRGEVSGQVLSPGYPAPYEHNLNCIWTIEAEAGCTIGLHFLVFDTEEVHDVLRIWDGPVESGVLLKELSGPALPKDLHSTFNSVVLQFSTDFFTSKQGFAIQFSGSTATSCNDPGIPQNGSRSGDSWEAGDSTVFQCDPGYALQGSAEISCVKIENRFFWQPSPPTCIAPCGGDLTGPSGVILSPNYPEPYPPGKECDWKVTVSPDYVIALVLFPSFNLEPGYDFLHIYDGRDSLSPLIGSFYGSQLPGRIESSSNSLFLAFRSDASVSNAGFVIDFPENPRESCFDPGSIKNGTRVGSDLKLGSSVTYYCHGGYEVEGTSTLSCILGPDGKPVWNNPRPVCTAPCGGQYVGSDGVVLSPNYPQNYTSGQICLYFVTVPKDYGVVFGQFAFFHTALNDVVEVHDGHSQHSRLLSSLSGSHTGGESLPLATSNQVLIKFSAKGLAPARGFHFVYQAVPRTSATQCSSVPEPRYGKRLGSDFSVGAIVRFECNSGYALQGSPEIECLPVPGALAQWNVSAPTCVVPCGGNLTERRGTILSPGFPEPYLNSLNCVWKIVVPEGAGIQIQVVSFVTEQNWDSLEVFDGADNTVTMLGSFSGTTVPALLNSTSNQLYLHFYSDISVSAAGFHLEYKTVGLSSCPEPAVPSNGVKTGERYLVNDVVSFQCEPGYALQGHAHISCMPGTVRRWNYPPPLCIAQCGGTVEEMEGVILSPGFPGNYPSNMDCSWKIALPVGFGAHIQFLNFSTEPNHDYIEIRNGPYETSRMMGRFSGSELPSSLLSTSHETTVYFHSDHSQNRPGFKLEYQAYELQECPDPEPFANGIVRGAGYNVGQSVTFECLPGYQLTGHPVLTCQHGTNRNWDHPLPKCEVPCGGNITSSNGTVYSPGFPSPYSSSQDCVWLITVPIGHGVRLNLSLLQTEPSGDFITIWDGPQQTAPRLGVFTRSMAKKTVQSSSNQVLLKFHRDAATGGIFAIAFSAYPLTKCPPPTILPNAEVVTENEEFNIGDIVRYRCLPGFTLVGNEILTCKLGTYLQFEGPPPICEVHCPTNELLTDSTGVILSQSYPGSYPQFQTCSWLVRVEPDYNISLTVEYFLSEKQYDEFEIFDGPSGQSPLLKALSGNYSAPLIVTSSSNSVYLRWSSDHAYNRKGFKIRYSAPYCSLPRAPLHGFILGQTSTQPGGSIHFGCNAGYRLVGHSMAICTRHPQGYHLWSEAIPLCQALSCGLPEAPKNGMVFGKEYTVGTKAMYSCSEGYHLQAGAEATAECLDTGLWSNRNVPPQCVPVTCPDVSSISVEHGRWRLIFETQYQFQAQLMLICDPGYYYTGQRVIRCQANGKWSLGDSTPTCRIISCGELPIPPNGHRIGTLSVYGATAIFSCNSGYTLVGSRVRECMANGLWSGSEVRCLAGHCGTPEPIVNGHINGENYSYRGSVVYQCNAGFRLIGMSVRICQQDHHWSGKTPFCVLVSCGHPGSPPHSQMSGDSYTVGAVVRYSCIGKRTLVGNSTRMCGLDGHWTGSLPHCSGTSVGVCGDPGIPAHGIRLGDSFDPGTVMRFSCEAGHVLRGSSERTCQANGSWSGSQPECGVISCGNPGTPSNARVVFSDGLVFSSSIVYECREGYYATGLLSRHCSVNGTWTGSDPECLVINCGDPGIPANGLRLGNDFRYNKTVTYQCVPGYMMESHRVSVLSCTKDRTWNGTKPVCKALMCKPPPLIPNGKVVGSDFMWGSSVTYACLEGYQLSLPAVFTCEGNGSWTGELPQCFPVFCGDPGVPSRGRREDRGFSYRSSVSFSCHPPLVLVGSPRRFCQSDGTWSGTQPSCIDPTLTTCADPGVPQFGIQNNSQGYQVGSTVLFRCQKGYLLQGSTTRTCLPNLTWSGTPPDCVPHHCRQPETPTHANVGALDLPSMGYTLIYSCQEGFSLKGGSEHRTCKADGSWTGKPPICLEVRPNGRPINTAREPPLTQALIPGDVFAKNSLWKGAYEYQGKKQPAMLRVTGFQVANSKVNATMIDHSGVELHLAGTYKKEDFHLLLQVYQITGPVEIFMNKFKDDHWALDGHVSSESSGATFIYQGSVKGQGFGQFGFQRLDLRLLESDPESIGRHFASNSSSVAAAILVPFIALIIAGFVLYLYKHRRRPKVPFNGYAGHENTNVRATFENPMYDRNIQPTDIMASEAEFTVSTVCTAV

SEQ ID NO: 43 - DNA, 2329 bp, Homo sapiens
  CDS (1)..(2328)
aagcttgagtgcccagacccagagccctttgccaatggcattgtgaggggagctggctacaacgtgggacaatcagtgaccttcgagtgcctcccggggtatcaattgactggccaccctgtcctcacgtgtcaacatggcaccaaccggaactgggaccactccctgcccaagtgtgaagtcccttgtggcgggaacatcacttcttccaacggcactgtgtactccccggggttccctagcccgtactccagctcccaggactgtgtctggctgatcaccgtgcccattggccatggcgtccgcctcaacctcagcctgctgcagacagagccctctggagatttcatcaccatctgggatgggccacagcaaacagcaccacggctcggcgtcttcacccggagcatggccaagaaaacagtgcagagttcatccaaccaggtcctgctcaagttccaccgtgatgcagccacaggggggatcttcgccatagctttctccgcttatccactcaccaaatgccctcctcccaccatcctccccaacgccgaagtcgtcacagagaatgaagaattcaatataggtgacatcgtacgctacagatgcctccctggctttaccttagtggggaatgaaattcttacctgcaaacttggaacctacctgcagtttgaaggaccacccccgatatgtgaagtgcactgtccaacaaatgagcttctgacagactccacaggcgtgatcctgagccagagctaccctggaagctatccccagttccagacctgctcttggctggtgagagtggagcccgactataacatctccctcacagtggagtacttcctcagcgagaagcaatatgatgagtttgagatttttgatggtccatcaggacagagtcctctgctgaaagccctcagtgggaattactcagctcccctgattgtcaccagctcaagcaactctgtgtacctgcgttggtcatctgatcacgcctacaatcggaagggcttcaagatccgctattcagccccttactgcagcctgcccagggctccactccatggcttcatcctaggccagaccagcacccagcccgggggctccatccactttggctgcaacgccggctaccgcctggtgggacacagcatggccatctgtacccggcacccccagggctaccacctgtggagcgaagccatccctctctgtcaagctctttcctgtgggcttcctgaggcccccaagaatggaatggtgtttggcaaggagtacacagtgggaaccaaggccatgtacagctgcagtgaaggctaccacctccaggcaggcgctgaggccactgcagagtgtctggacacaggcctatggagcaaccgcaatgtcccaccacagtgtgtccctgtgacttgtcctgatgtcagtagcatcagcgtggagcatggccgatggaggcttatctttgagacacagtatcagttccaggcccagctgatgctcatctgtgaccctggctactactatactggccaaagggtcatccgctgtcaggccaatggcaaatggagcctcggggactctacgcccacctgccgaatcatctcctgtggagagctcccgattccccccaatggccaccgcatcggaacactgtctgtctacggggcaacagccatcttctcctgcaattccggatacacactggtgggctccagggtgcgtgagtgcatggccaatgggctctggagtggctctgaagtccgctgccttgctggacactgtgggactcctgagcccattgtcaacggacacatcaatggggagaactacagctaccggggcagtgtggtgtaccaatgcaatgctggcttccgcctgatcggcatgtctgtgcgcatctgccagcaggatcatcactggtcgggcaagacccctttctgtgtgccaattacctgtggacacccaggcaaccctgtcaacggcctcacccagggtaaccagtttaacctcaacgatgtggtcaagtttgtttgcaaccctgggtatatggctgagggggctgctaggtcccaatgcctggccagcgggcagtggagtgacatgctgcccacctgcagaatcatcaactgtacagatcctggacaccaagaaaatagtgttcgtcaggtccacgccagcggcccgcacaggttcagcttcggcaccactgtgtcttaccggtgcaaccacggcttctacctcctgggcaccccagtgctcagctgccagggagatggcacatgggaccgtccccgcccccagtgtctctgtaaggtcgacc

SEQ ID NO: 44 - protein, 776 aa, Homo sapiens
KLECPDPEPFANGIVRGAGYNVGQSVTFECLPGYQLTGHPVLTCQHGTNRNWDHSLPKCEVPCGGNITSSNGTVYSPGFPSPYSSSQDCVWLITVPIGHGVRLNLSLLQTEPSGDFITIWDGPQQTAPRLGVFTRSMAKKTVQSSSNQVLLKFHRDAATGGIFAIAFSAYPLTKCPPPTILPNAEVVTENEEFNIGDIVRYRCLPGFTLVGNEILTCKLGTYLQFEGPPPICEVHCPTNELLTDSTGVILSQSYPGSYPQFQTCSWLVRVEPDYNISLTVEYFLSEKQYDEFEIFDGPSGQSPLLKALSGNYSAPLIVTSSSNSVYLRWSSDHAYNRKGFKIRYSAPYCSLPRAPLHGFILGQTSTQPGGSIHFGCNAGYRLVGHSMAICTRHPQGYHLWSEAIPLCQALSCGLPEAPKNGMVFGKEYTVGTKAMYSCSEGYHLQAGAEATAECLDTGLWSNRNVPPQCVPVTCPDVSSISVEHGRWRLIFETQYQFQAQLMLICDPGYYYTGQRVIRCQANGKWSLGDSTPTCRIISCGELPIPPNGHRIGTLSVYGATAIFSCNSGYTLVGSRVRECMANGLWSGSEVRCLAGHCGTPEPIVNGHINGENYSYRGSVVYQCNAGFRLIGMSVRICQQDHHWSGKTPFCVPITCGHPGNPVNGLTQGNQFNLNDVVKFVCNPGYMAEGAARSQCLASGQWSDMLPTCRIINCTDPGHQENSVRQVHASGPHRFSFGTTVSYRCNHGFYLLGTPVLSCQGDGTWDRPRPQCLCKVD

SEQ ID NO: 45 - DNA, 2328 bp, Homo sapiens
  CDS (1)..(2328)
aagcttgagtgcccagacccagagccctttgccaatggcattgtgaggggagctggctacaacgtgggacaatcagtgaccttcgagtgcctcccggggtatcaattgactggccaccctgtcctcacgtgtcaacatggcaccaaccggaactgggaccaccccctgcccaagtgtgaagtcccttgtggcgggaacatcacttcttccaacggcactgtgtactccccggggttccctagcccgtactccagctcccaggactgtgtctggctgatcaccgtgcccattggccatggcgtccgcctcaacctcagcctgctgcagacagagccctctggagatttcatcaccatctgggatgggccacagcaaacagcaccacggctcggcgtcttcacccggagcatggccaagaaaacagtgcagagttcatccaaccaggtcctgctcaagttccaccgtgatgcagccacaggggggatcttcgccatagctttctccgcttatccactcaccaaatgccctcctcccaccatcctccccaacgccgaagtcgtcacagagaatgaagaattcaatataggtgacatcgtacgctacagatgcctccctggctttaccttagtggggaatgaaattctgacctgcaaacttggaacctacctgcagtttgaaggaccacccccgatatgtgaagtgcactgtccaacaaatgagcttctgacagactccacaggcgtgatcctgagccagagctaccctggaagctatccccagttccagacctgctcttggctggtgagagtggagcccgactataacatctccctcacagtggagtacttcctcagcgagaagcaatatgatgagtttgagatttttgatggtccatcaggacagagtcctctgctgaaagccctcagtgggaattactcagctcccctgattgtcaccagctcaagcaactctgtgtacctgcgttggtcatctgatcacgcctacaatcggaagggcttcaagatccgctattcagccccttactgcagcctgcccagggctccactccatggcttcatcctaggccagaccagcacccagcccgggggctccatccactttggctgcaacgccggctaccgcctggtgggacacagcatggccatctgtacccggcacccccagggctaccacctgtggagcgaagccatccctctctgtcaagctctttcctgtgggcttcctgaggcccccaagaatggaatggtgtttggcaaggagtacacagtgggaaccaaggccgtgtacagctgcagtgaaggctaccacctccaggcaggcgctgaggccactgcagagtgtctggacacaggcctatggagcaaccgcaatgtcccaccacagtgtgtccctgtgacttgtcctgatgtcagtagcatcagcgtggagcatggccgatggaggcttatctttgagacacagtatcagttccaggcccagctgatgctcatctgtgaccctggctactactatactggccaaagggtcatccgctgtcaggccaatggcaaatggagcctcggggactctacgcccacctgccgaatcatctcctgtggagagctcccgattccccccaatggccaccgcatcggaacactgtctgtctacggggcaacagccatcttctcctgcaattccggatacacactggtgggctccagggtgcgtgagtgcatggccaatgggctctggagtggctctgaagtccgctgccttgctggacactgtgggactcctgagcccattgtcaacggacacatcaatggggagaactacagctaccggggcagtgtggtgtaccaatgcaatgctggcttccgcctgatcggcatgtctgtgcgcatctgccagcaggatcatcactggtcgggcaagacccctttctgtgtgccaattacctgtggacacccaggcaaccctgtcaacggcctcactcagggtaaccagtttaacctcaacgatgtggtcaagtttgtttgcaaccctgggtatatggctgagggggctgctaggtcccaatgcctggccagcgggcaatggagtgacatgctgcccacctgcagaatcatcaactgtacagatcctggacaccaagaaaatagtgttcgtcaggtccacgccagcggcccgcacaggttcagcttcggcaccactgtgtcttaccggtgcaaccacggcttctacctcctgggcaccccagtgctcagctgccagggagatggcacatgggaccgtccccgcccccagtgtctctgtaaggtcgac

SEQ ID NO: 46 - protein, 776 aa, Homo sapiens
KLECPDPEPFANGIVRGAGYNVGQSVTFECLPGYQLTGHPVLTCQHGTNRNWDHPLPKCEVPCGGNITSSNGTVYSPGFPSPYSSSQDCVWLITVPIGHGVRLNLSLLQTEPSGDFITIWDGPQQTAPRLGVFTRSMAKKTVQSSSNQVLLKFHRDAATGGIFAIAFSAYPLTKCPPPTILPNAEVVTENEEFNIGDIVRYRCLPGFTLVGNEILTCKLGTYLQFEGPPPICEVHCPTNELLTDSTGVILSQSYPGSYPQFQTCSWLVRVEPDYNISLTVEYFLSEKQYDEFEIFDGPSGQSPLLKALSGNYSAPLIVTSSSNSVYLRWSSDHAYNRKGFKIRYSAPYCSLPRAPLHGFILGQTSTQPGGSIHFGCNAGYRLVGHSMAICTRHPQGYHLWSEAIPLCQALSCGLPEAPKNGMVFGKEYTVGTKAVYSCSEGYHLQAGAEATAECLDTGLWSNRNVPPQCVPVTCPDVSSISVEHGRWRLIFETQYQFQAQLMLICDPGYYYTGQRVIRCQANGKWSLGDSTPTCRIISCGELPIPPNGHRIGTLSVYGATAIFSCNSGYTLVGSRVRECMANGLWSGSEVRCLAGHCGTPEPIVNGHINGENYSYRGSVVYQCNAGFRLIGMSVRICQQDHHWSGKTPFCVPITCGHPGNPVNGLTQGNQFNLNDVVKFVCNPGYMAEGAARSQCLASGQWSDMLPTCRIINCTDPGHQENSVRQVHASGPHRFSFGTTVSYRCNHGFYLLGTPVLSCQGDGTWDRPRPQCLCKVD

SEQ ID NO: 47 - DNA, 2139 bp, Homo sapiens
  CDS (1)..(2139)
aagcttgagtgcccagacccagagccctttgccaatggcattgtgaggggagctggctacaacgtgggacaatcagtgaccttcgagtgcctcccggggtatcaattgactggccaccctgtcctcacgtgtcaacatggcaccaaccggaactgggaccaccccctgcccaagtgtgaagtcccttgtggcgggaacatcacttcttccaacggcactgtgtactccccggggttccctagcccgtactccagctcccaggactgtgtctggctgatcaccgtgcccattggccatggcgtccgcctcaacctcagcctgctgcagacagagccctctggagatttcatcaccatctgggatgggccacagcaaacagcaccacggctcggcgtcttcacccggagcatggccaagaaaacagtgcagagttcatccaaccaggtcctgctcaagttccaccgtgatgcagccacaggggggatcttcgccatagctttctccgcttatccactcaccaaatgccctcctcccaccatcctccccaacgccgaagtcgtcacagagaatgaagaattcaatataggtgacatcgtacgctacagatgcctccctggctttaccttagtggggaatgaaattctgacctgcaaacttggaacctacctgcagtttgaaggaccacccccgatatgtgaagtgcactgtccaacaaatgagcttctgacagactccacaggcgtgatcctgagccagagctaccctggaagctatccccagttccagacctgctcttggctggtgagagtggagcccgactataacatctccctcacagtggagtacttcctcagcgagaagcaatatgatgagtttgagatttttgatggtccatcaggacagagtcctctgctgaaagccctcagtgggaattactcagctcccctgattgtcaccagctcaagcaactctgtgtacctgcgttggtcatctgatcacgcctacaatcggaagggcttcaagatccgctattcagctctttcctgtgggcttcctgaggcccccaagaatggaatggtgtttggcaaggagtacacagtgggaaccaaggccatgtacagctgcagtgaaggctaccacctccaggcaggcgctgaggccactgcagagtgtctggacacaggcctatggagcaaccgcaatgtcccaccacagtgtgtccctgtgacttgtcctgatgtcagtagcatcagcgtggagcatggccgatggaggcctatctttgagacacagtatcagttccaggcccagctgatgctcatctgtgaccctggctactactatactggccaaagggtcatccgctgtcaggccaatggcaaatggagcctcggggactctacgcccacctgccgaatcatctcctgtggagagctcccgattccccccaatggccaccgcatcggaacactgtctgtctacggggcaacagccatcttctcctgcaattccggatacacactggtgggctccagggtgcgtgagtgcatggccaatgggctctggagtggctctgaagtccgctgccttgctggacactgtgggactcctgagcccattgtcaacggacacatcaatggggagaactacagctaccggggcagtgtggtgtaccaatgcaatgctggcttccgcctgatcggcatgtctgtgcgcatctgccagcaggatcatcactggtcgggcaagacccctttctgtgtgccaattacctgtggacacccaggcaaccctgtcaacggcctcactcagggtaaccagtttaacctcaacgatgtggtcaagtttgtttgcaaccctgggtatatggctgagggggctgctaggtcccaatgcctggccagcgggcaatggagtgacatgctgcccacctgcagaatcatcaactgtacagatcctggacaccaagaaaatagtgttcgtcaggtccacgccagcggcccgcacaggttcagcttcggcaccactgtgtcttaccggtgcaaccacggcttctacctcctgggcaccccagtgctcagctgccagggagatggcacatgggaccgtccccgcccccagtgtctctgtaaggtcgac

SEQ ID NO: 48 - protein, 713 aa, Homo sapiens
KLECPDPEPFANGIVRGAGYNVGQSVTFECLPGYQLTGHPVLTCQHGTNRNWDHPLPKCEVPCGGNITSSNGTVYSPGFPSPYSSSQDCVWLITVPIGHGVRLNLSLLQTEPSGDFITIWDGPQQTAPRLGVFTRSMAKKTVQSSSNQVLLKFHRDAATGGIFAIAFSAYPLTKCPPPTILPNAEVVTENEEFNIGDIVRYRCLPGFTLVGNEILTCKLGTYLQFEGPPPICEVHCPTNELLTDSTGVILSQSYPGSYPQFQTCSWLVRVEPDYNISLTVEYFLSEKQYDEFEIFDGPSGQSPLLKALSGNYSAPLIVTSSSNSVYLRWSSDHAYNRKGFKIRYSALSCGLPEAPKNGMVFGKEYTVGTKAMYSCSEGYHLQAGAEATAECLDTGLWSNRNVPPQCVPVTCPDVSSISVEHGRWRPIFETQYQFQAQLMLICDPGYYYTGQRVIRCQANGKWSLGDSTPTCRIISCGELPIPPNGHRIGTLSVYGATAIFSCNSGYTLVGSRVRECMANGLWSGSEVRCLAGHCGTPEPIVNGHINGENYSYRGSVVYQCNAGFRLIGMSVRICQQDHHWSGKTPFCVPITCGHPGNPVNGLTQGNQFNLNDVVKFVCNPGYMAEGAARSQCLASGQWSDMLPTCRIINCTDPGHQENSVRQVHASGPHRFSFGTTVSYRCNHGFYLLGTPVLSCQGDGTWDRPRPQCLCKVD

SEQ ID NO: 49 - DNA, 2607 bp, Homo sapiens
  CDS (1)..(2607)
aagctttcatgttttgatcctggttccatcaagaacggcacacgggtggggtccgacctgaagctgggctcctccgtcacctactactgccacgggggctacgaagttgagggcacctcgaccctgagctgcatcctggggcctgatgggaagcccgtgtggaacaatccccggccagtctgcacagccccctgtgggggacagtatgtgggttcggacggagtggtcttgtcccccaactacccccagaactacaccagtggacagatctgcttgtattttgttactgtgcccaaggactatgtggtgtttggccagttcgccttctttcacacggccctcaacgacgtggtggaggttcacgacggccacagccagcactcgcggctcctcagctccctctcgggctcccatacaggagaatcactgcccttggccacctccaatcaagttctcattaagttcagcgccaaaggcctcgcaccagccagaggcttccactttgtctaccaagcggttcctcgaaccagcgccacgcagtgcagctctgtgccggaaccccgctatggcaagaggctgggcagtgacttctcggtgggggccatcgtccgcttcgaatgcaactccggctatgccctgcaggggtcgccagagatcgagtgcctccctgtgcctggggccttggcccaatggaatgtctcagcgcccacgtgtgtggtgccgtgtggaggcaacctcacagagcgcaggggcaccatcctgtcccctggcttcccagagccgtacctcaacagcctcaactgtgtgtggaagatcgtggtccccgaaggcgctggcatccagatccaagttgtcagttttgtgacagagcagaactgggactcgctggaagtatttgatggtgcagataacactgtaaccatgctggggagtttctcaggaacaaccgtgcctgcccttctgaacagcacctccaaccagctctaccttcatttctactcagatatcagcgtatctgcagctggcttccacttggagtacaaaacggtgggcctgagcagttgtccggaacctgctgtgcccagtaacggggtgaagactggcgagcgctacttggtgaatgatgtggtgtctttccagtgtgagccgggatatgccctccagggccacgcccacatctcctgcatgcccggaacagtgcggcgatggaactaccctcctccactctgtattgcacagtgtgggggaacagtggaggagatggagggggtgatcctgagccccggcttcccaggcaactaccccagtaacatggactgctcctggaaaatagcactgcccgtgggctttggagctcacatccagttcctgaacttctccaccgagcccaaccacgactacatagaaatccggaatggcccctatgagaccagccgcatgatgggaagattcagtggaagcgagcttccaagctccctcctctccacgtcccacgagaccaccgtgtatttccacagcgaccactcccagaatcggccaggattcaagctggagtatcaggcctatgaacttcaagagtgcccagacccagagccctttgccaatggcattgtgaggggagctggctacaacgtgggacaatcagtgaccttcgagtgcctcccggggtatcaattgactggccaccctgtcctcacgtgtcaacatggcaccaaccggaactgggaccaccccctgcccaagtgtgaagtcccttgtggcgggaacatcacttcttccaacggcactgtgtactccccggggttccctagcccgtactccagctcccaggactgtgtctggctgatcaccgtgcccattggccatggcgtccgcctcaacctcagcctgctgcagacagagccctctggagatttcatcaccatctgggatgggccacagcaaacagcaccacggctcggcgtcttcacccggagcatggccaagaaaacagtgcagagttcatccaaccaggtcctgctcaagttccaccgtgatgcagccacaggggggatcttcgccatagctttctccgcttatccactcaccaaatgccctcctcccaccatcctccccaacgccgaagtcgtcacagagaatgaagaattcaatataggtgacatcgtacgctacagatgcctccctggctttaccttagtggggaatgaaattctgacctgcaaacttggaacctacctgcagtttgaaggaccacccccgatatgtgaagtgcactgtccaacaaatgagcttctgacagactccacaggcgtgatcctgagccagagctaccctggaagctatccccagttccagacctgctcttggctggtgagagtggagcccgactataacatctccctcacagtggagtacttcctcagcgagaagcaatatgatgagtttgagatttttgatggtccatcaggacagagtcctctgctgaaagccctcagtgggaattactcagctcccctgattgtcaccagctcaagcaactctgtgtacctgcgttggtcatctgatcacgcctacaatcggaagggcttcaagatccgctatgtcgac

SEQ ID NO: 50 - protein, 869 aa, Homo sapiens
KLSCFDPGSIKNGTRVGSDLKLGSSVTYYCHGGYEVEGTSTLSCILGPDGKPVWNNPRPVCTAPCGGQYVGSDGVVLSPNYPQNYTSGQICLYFVTVPKDYVVFGQFAFFHTALNDVVEVHDGHSQHSRLLSSLSGSHTGESLPLATSNQVLIKFSAKGLAPARGFHFVYQAVPRTSATQCSSVPEPRYGKRLGSDFSVGAIVRFECNSGYALQGSPEIECLPVPGALAQWNVSAPTCVVPCGGNLTERRGTILSPGFPEPYLNSLNCVWKIVVPEGAGIQIQVVSFVTEQNWDSLEVFDGADNTVTMLGSFSGTTVPALLNSTSNQLYLHFYSDISVSAAGFHLEYKTVGLSSCPEPAVPSNGVKTGERYLVNDVVSFQCEPGYALQGHAHISCMPGTVRRWNYPPPLCIAQCGGTVEEMEGVILSPGFPGNYPSNMDCSWKIALPVGFGAHIQFLNFSTEPNHDYIEIRNGPYETSRMMGRFSGSELPSSLLSTSHETTVYFHSDHSQNRPGFKLEYQAYELQECPDPEPFANGIVRGAGYNVGQSVTFECLPGYQLTGHPVLTCQHGTNRNWDHPLPKCEVPCGGNITSSNGTVYSPGFPSPYSSSQDCVWLITVPIGHGVRLNLSLLQTEPSGDFITIWDGPQQTAPRLGVFTRSMAKKTVQSSSNQVLLKFHRDAATGGIFAIAFSAYPLTKCPPPTILPNAEVVTENEEFNIGDIVRYRCLPGFTLVGNEILTCKLGTYLQFEGPPPICEVHCPTNELLTDSTGVILSQSYPGSYPQFQTCSWLVRVEPDYNISLTVEYFLSEKQYDEFEIFDGPSGQSPLLKALSGNYSAPLIVTSSSNSVYLRWSSDHAYNRKGFKIRYVD

SEQ ID NO: 51 - DNA, 300 bp, Homo sapiens
  CDS (2)..(298)
aaagtcatctgtctccttctcctgccatccccctctggtgctggtgggctctccacgcaggttttgccagtcagatgggacatggagtggcacccagcccagctgcatagatccgaccctgaccacgtgtgcggaccctggtgtgccacagtttgggatacagaacaattctcagggctaccaggttggaagcacagtcctcttccgttgtcaaaaaggctacctgcttcagggctccaccaccaggacctgcctcccaaacctgacctggagtggaaccccacctgactgtgtgcccca

SEQ ID NO: 52 - protein, 99 aa, Homo sapiens
KSSVSFSCHPPLVLVGSPRRFCQSDGTWSGTQPSCIDPTLTTCADPGVPQFGIQNNSQGYQVGSTVLFRCQKGYLLQGSTTRTCLPNLTWSGTPPDCVP

SEQ ID NO: 53 - DNA, 1792 bp, Homo sapiens
  CDS (1)..(1791)
gctgagggggctgctaggtcccaatgcctggccagcgggcagtggagtgacatgctgcccacctgcagaatcatcaactgtacagatcctggacaccaagaaaatagtgttcgtcaggtccacgccagcggcccgcacaggttcagcttcggcaccactgtgtcttaccggtgcaaccacggcttctacctcctgggcaccccagtgctcagctgccagggagatggcacatgggaccgtccccgcccccagtgtctcttggtgtcctgtggccatccgggctccccgcctcactcccagatgtctggagacagttatactgtgggagcagtggtgcggtacagctgcatcggcaagcgtactctggtgggaaacagcacccgcatgtgtgggctggatggacactggactggctccctccctcactgctcaggaaccagcgtgggagtttgcggtgaccctgggatcccggctcatggcatccgtttgggggacagctttgatccaggcactgtgatgcgcttcagctgtgaagctggccacgtgctccggggatcgtcagagcgcacctgtcaagccaatggctcgtggagcggctcgcagcctgagtgtggagtgatctcttgtgggaaccctgggactccaagtaatgcccgagttgtgttcagtgatggcctggttttctccagctctatcgtctatgagtgccgggaaggatactacgccacaggcctgctcagccgtcactgctcggtcaatggtacctggacaggcagtgaccctgagtgcctcgtcataaactgtggtgaccctgggattccagccaatggccttcggctgggcaatgacttcaggtacaacaaaactgtgacatatcagtgtgtccctggctatatgatggagtcacatagagtatctgtgctgagctgcaccaaggaccggacatggaatggaaccaagcccgtctgcaaagctctcatgtgcaagccacctccgctcatccccaatgggaaggtggtggggtctgacttcatgtggggctcaagtgtgacttatgcctgcctggaggggtaccagctctccctgcccgcggtgttcacctgtgagggaaatgggtcctggaccggagagctgcctcagtgtttccctgtgttctgcggggatcctggtgtcccgtcccgtgggaggagagaggaccgaggcttctcctacaggtcatctgtctccttctcctgccatccccctctggtgctggtgggctctccacgcaggttttgccagtcagatgggacatggagtggcacccagcccagctgcatagatccgaccctgaccacgtgtgcggaccctggtgtgccacagtttgggatacagaacaattctcagggctaccaggttggaagcacagtcctcttccgttgtcaaaaaggctacctgcttcagggctccaccaccaggacctgcctcccaaacctgacctggagtggaaccccacctgactgtgtcccccaccactgcaggcagccagagacgccaacgcatgccaacgtcggggccctggatttgccctccatgggctacacgctcatctactcctgccaggagggcttctccctcaagggtggctccgagcaccgcacctgcaaggcggatggcagctggacaggcaagccgcccatctgcctggaggtccggcccagtgggagacccatcaacattgcccgggagccaccgctcacccaagccttgattcctggggatgtttttgccaagaattccctgtggaaagggg

SEQ ID NO: 54 - protein, 597 aa, Homo sapiens
AEGAARSQCLASGQWSDMLPTCRIINCTDPGHQENSVRQVHASGPHRFSFGTTVSYRCNHGFYLLGTPVLSCQGDGTWDRPRPQCLLVSCGHPGSPPHSQMSGDSYTVGAVVRYSCIGKRTLVGNSTRMCGLDGHWTGSLPHCSGTSVGVCGDPGIPAHGIRLGDSFDPGTVMRFSCEAGHVLRGSSERTCQANGSWSGSQPECGVISCGNPGTPSNARVVFSDGLVFSSSIVYECREGYYATGLLSRHCSVNGTWTGSDPECLVINCGDPGIPANGLRLGNDFRYNKTVTYQCVPGYMMESHRVSVLSCTKDRTWNGTKPVCKALMCKPPPLIPNGKVVGSDFMWGSSVTYACLEGYQLSLPAVFTCEGNGSWTGELPQCFPVFCGDPGVPSRGRREDRGFSYRSSVSFSCHPPLVLVGSPRRFCQSDGTWSGTQPSCIDPTLTTCADPGVPQFGIQNNSQGYQVGSTVLFRCQKGYLLQGSTTRTCLPNLTWSGTPPDCVPHHCRQPETPTHANVGALDLPSMGYTLIYSCQEGFSLKGGSEHRTCKADGSWTGKPPICLEVRPSGRPINIAREPPLTQALIPGDVFAKNSLWKG

SEQ ID NO: 55 - DNA, 1135 bp, Homo sapiens
  CDS (510)..(1043)
ttaagaaccaggtgtcgctgtccctccgctcctgcacatttctatttggtatttcaatatgtgacatgaatcttgaggccagcatgtcacacgtatacaggggcttaagcttgtgggggccttcccgaggacagagaaagtggccctaaatgctatactttgattcctaaactcatgaacttcccaacaattctcatggaattcatgaacgacccaagcatgatgggacatggagtggcacccagcccagctgcatagatccgaccctgaccacgtgtgcggaccctggtgtgccacagtttgggatacagaacaattctcagggctaccaggttggaagcacagtcctcttccgttgtcaaaaaggctacctgcttcagggctccaccaccaggacctgcctcccaaacctgacctggagtggaaccccacctgactgtgtcccccaccactgcaggcagccagagacgccaacgcatgccaacgtcggggccctggatttgccctccatgggctacacgctcatctactcctgccaggagggcttctccctcaagggtggctccgagcaccgcacctgcaaggcggatggcagctggacaggcaagccgcccatctgcctggaggtccggcccagtgggagacccatcaacactgcccgggagccaccgctcacccaagccttgattcctggggatgtttttgccaagaattccctgtggaaaggggcctatgaataccaggggaagaagcagccagccatgctcagagtgactggcttccaagttgccaacagcaaggtcaatgccaccatgatcgaccacagtggcgtggagctgcacttggctggaacttacaagaaagaagattttcatctcctactccaggtgtaccagattacagggcctgtggagatctttatgaataagttcaaagatgatcactgggctttagatggccatgtaagttcagcaaactcacctcctcccctgactcccagatcactggcagggaagaggaggacaaaagggtgtgcaaacccctaggatcaatctggcaacttgggaggaggttttctgtggggccctgcctaggagcagcaagaggatcctcatctgctaatgaaataggcaaa

SEQ ID NO: 56 - protein, 178 aa, Homo sapiens
MGYTLIYSCQEGFSLKGGSEHRTCKADGSWTGKPPICLEVRPSGRPINTAREPPLTQALIPGDVFAKNSLWKGAYEYQGKKQPAMLRVTGFQVANSKVNATMIDHSGVELHLAGTYKKEDFHLLLQVYQITGPVEIFMNKFKDDHWALDGHVSSANSPPPLTPRSLAGKRRTKGCANP

SEQ ID NO: 57 - DNA, 3905 bp, Homo sapiens
  CDS (427)..(3078)
  misc_feature (1501)..(1501): Wherein n may be a, c, g or t
  misc_feature (1502)..(1502): Wherein n may be a, c, g or t
  misc_feature (3903)..(3903): Wherein n may be a, c, g or t
  misc_feature (3904)..(3904): Wherein n may be a, c, g or t
  misc_feature (1501)..(1503): Wherein Xaa may be any naturally occurring amino acid
ggatttgagagcctgaacttagccatacaccagatctacctttggaccgcaaaagggacccagtgcttcatgaagctggttttttttgttttgttttgttttttttccgttgttttgtttcggctttaccaacctgactgggtgtttttcaatatccaccattcagactttcctcaacagcagaggatgtggcagtggcaaagacaaggggatggggggagacgaaagggaaaggggcctgcatgaaagaccatgtctgtcttcctgctggtgccagttccctgaacctcatcttgttgttcagccccttactgcagcctgcccagggctccactccatggcttcatcctaggccagaccagcacccagcccgggggctccatccactttggctgcaacgccggctaccgcctggtgggacacagcatggccatctgtacccggcacccccagggctaccacctgtggagcgaagccatccctctctgtcaagctctttcctgtgggcttcctgaggcccccaagaatggaatggtgtttggcaaggagtacacagtgggaaccaaggccgtgtacagctgcagtgaaggctaccacctccaggcaggcgctgaggccactgcagagtgtctggacacaggcctatggagcaaccgcaatgtcccaccacagtgtgtccctgtgacttgtcctgatgtcagtagcatcagcgtggagcatggccgatggaggcttatctttgagacacagtatcagttccaggcccagctgatgctcatctgtgaccctggctactactatactggccaaagggtcatccgctgtcaggccaatggcaaatggagcctcggggactctacgcccacctgccgaatcatctcctgtggagagctcccgattccccccaatggccaccgcatcggaacactgtctgtctacggggcaacagccatcttctcctgcaattccggatacacactggtgggctccagggtgcgtgagtgcatggccaatgggctctggagtggctctgaagtccgctgccttgctggacactgtgggactcctgagcccattgtcaacggacacatcaatggggagaactacagctaccggggcagtgtggtgtaccaatgcaatgctggcttccgcctgatcggcatgtctgtgcgcatctgccagcaggatcatcactggtcgggcaagacccctttctgtgtgccaattacctgtggacacccaggcaaccctgtcaacggcctcactcagggtaaccagtttaacctcaacgatgtggtcaagtttgtttgcaaccctgggtatatggctgagggggctgctaggtcccaatgcctggccagcgggcaatggagtgacatgctgcccacctgcagaatcatcaactgtacagatcctggacaccaagaaaatagtgttcgtcaggtccacgccagcggcccgcacaggttcagcttcggcaccactgtgtcttaccggtgcnnaaccacggcttctacctcctgggcaaccccagtgctcagctgccagggagatggcacatgggaccgtccccgcccccagtgtctcttggtgtcctgtggccatccgggctccccgcctcactcccagatgtctggagacagttatactgtgggagcagtggtgcggtacagctgcatcggcaagcgtactctggtgggaaacagcacccgcatgtgtgggctggatggacactggactggctccctccctcactgctcaggaaccagcgtgggagtttgcggtgaccctgggatcccggctcatggcatccgtttgggggacagctttgatccaggcactgtgatgcgcttcagctgtgaagctggccacgtgctccggggatcgtcagagcgcacctgtcaagccaatggctcgtggagcggctcgcagcctgagtgtggagtgatctcttgtgggaaccctgggactccaagtaatgcccgagttgtgttcagtgatggcctggttttctccagctctatcgtctatgagtgccgggaaggatactacgccacaggcctgctcagccgtcactgctcggtcaatggtacctggacaggcagtgaccctgagtgcctcgtcataaactgtggtgaccctgggattccagccaatggccttcggctgggcaatgacttcaggtacaacaaaactgtgacatatcagtgtgtccctggctatatgatggagtcacatagagtatctgtgctgagctgcaccaaggaccggacatggaatggaaccaagcccgtctgcaaagctctcatgtgcaagccacctccgctcatccccaatgggaaggtggtggggtctgacttcatgtggggctcaagtgtgacttatgcctgcctggaggggtaccagctctccctgcccgcggtgttcacctgtgagggaaatgggtcctggaccggagagctgcctcagtgtttccctgtgttctgcggggatcctggtgtcccgtcccgtgggaggagagaggaccgaggcttctcctacaggtcatctgtctccttctcctgccatccccctctggtgctggtgggctctccacgcaggttttgccagtcagatgggacatggagtggcacccagcccagctgcatagatccgaccctgaccacgtgtgcggaccctggtgtgccacagtttgggatacagaacaattctcagggctaccaggttggaagcacagtcctcttccgttgtcaaaaaggctacctgcttcagggctccaccaccaggacctgcctcccaaacctgacctggagtggaaccccacctgactgtgtcccccaccactgcaggcagccagagacgccaacgcatgccaacgtcggggccctggatttgccctccatgggctacacgctcattactcctgccaggagggcttctccctcaagggtggctccgagcaccgcacctgcaaggcggatggcagctggacaggcaagccgcccatctgcctggcagaggtccggcccagtgggagacccatcaacactgcccgggagccaccgctcacccaagccttgattcctggggatgtttttgccaagaattccctgtggaaaggggcctatgaataccaggggaagaagcagccagccatgctcagagtgactggcttccaagttgccaacagcaaggtcaatgccaccatgatcgaccacagtggcgtggagctgcacttggctggaacttacaagaaagaagattttcatctcctactccaggtgtaccagattacagggcctgtggagatctttatgaataagttcaaagatgatcactgggctttagatggccatgtctcgtcagagtcctccggagccaccttcatctaccaaggctctgtcaagggccaaggctttgggcagttcggctttcaaagactggacctcaggctgctggagtcagaccccgagtccattggccgccactttgcttccaacagcagctcagtggcagccgcgatcctggtgcctttcatcgccctcattattgcgggcttcgtgctctatctctacaagcacaggagaagacccaaagttcctttcaatggctatgctggccacgagaacaccaatgttcgggccacatttgagaacccaatgtacgaccgcaacatccagcccacagacatcatggccagcgaggcggagttcacagtcagcacagtgtgcacagcagtatagccacccggcctggccgctttttttgctaggttgaactggtactccagcagccgccgaagctggactgtactgctgccatctcagctcactgcaacctccctgcctgattcccctgcctcagcctgccgagtgcctgcgattgcaggcgcgcaccgccacnnt

SEQ ID NO: 58 - protein, 884 aa, Homo sapiens
  misc_feature (359)..(359): Wherein Xaa may be any naturally occurring amino acid
MAICTRHPQGYHLWSEAIPLCQALSCGLPEAPKNGMVFGKEYTVGTKAVYSCSEGYHLQAGAEATAECLDTGLWSNRNVPPQCVPVTCPDVSSISVEHGRWRLIFETQYQFQAQLMLICDPGYYYTGQRVIRCQANGKWSLGDSTPTCRIISCGELPIPPNGHRIGTLSVYGATAIFSCNSGYTLVGSRVRECMANGLWSGSEVRCLAGHCGTPEPIVNGHINGENYSYRGSVVYQCNAGFRLIGMSVRICQQDHHWSGKTPFCVPITCGHPGNPVNGLTQGNQFNLNDVVKFVCNPGYMAEGAARSQCLASGQWSDMLPTCRIINCTDPGHQENSVRQVHASGPHRFSFGTTVSYRCXTTASTSWATPVLSCQGDGTWDRPRPQCLLVSCGHPGSPPHSQMSGDSYTVGAVVRYSCIGKRTLVGNSTRMCGLDGHWTGSLPHCSGTSVGVCGDPGIPAHGIRLGDSFDPGTVMRFSCEAGHVLRGSSERTCQANGSWSGSQPECGVISCGNPGTPSNARVVFSDGLVFSSSIVYECREGYYATGLLSRHCSVNGTWTGSDPECLVINCGDPGIPANGLRLGNDFRYNKTVTYQCVPGYMMESHRVSVLSCTKDRTWNGTKPVCKALMCKPPPLIPNGKVVGSDFMWGSSVTYACLEGYQLSLPAVFTCEGNGSWTGELPQCFPVFCGDPGVPSRGRREDRGFSYRSSVSFSCHPPLVLVGSPRRFCQSDGTWSGTQPSCIDPTLTTCADPGVPQFGIQNNSQGYQVGSTVLFRCQKGYLLQGSTTRTCLPNLTWSGTPPDCVPHHCRQPETPTHANVGALDLPSMGYTLITPARRASPSRVAPSTAPARRMAAGQASRPSAWQRSGPVGDPSTLPGSHRSPKP

SEQ ID NO: 59 - DNA, 3896 bp, Homo sapiens
  CDS (427)..(3072)
ggatttgagagcctgaacttagccatacaccagatctacctttggaccgcaaaagggacccagtgcttcatgaagctggttttttttgttttgttttgttttttttccgttgttttgtttcggctttaccaacctgactgggtgtttttcaatatccaccattcagactttcctcaacagcagaggatgtggcagtggcaaagacaaggggatggggggagacgaaagggaaaggggcctgcatgaaagaccatgtctgtcttcctgctggtgccagttccctgaacctcatcttgttgttcagccccttactgcagcctgcccagggctccactccatggcttcatcctaggccagaccagcacccagcccgggggctccatccactttggctgcaacgccggctaccgcctggtgggacacagcatggccatctgtacccggcacccccagggctaccacctgtggagcgaagccatccctctctgtcaagctctttcctgtgggcttcctgaggcccccaagaatggaatggtgtttggcaaggagtacacagtgggaaccaaggccgtgtacagctgcagtgaaggctaccacctccaggcaggcgctgaggccactgcagagtgtctggacacaggcctatggagcaaccgcaatgtcccaccacagtgtgtccctgtgacttgtcctgatgtcagtagcatcagcgtggagcatggccgatggaggcttatctttgagacacagtatcagttccaggcccagctgatgctcatctgtgaccctggctactactatactggccaaagggtcatccgctgtcaggccaatggcaaatggagcctcggggactctacgcccacctgccgaatcatctcctgtggagagctcccgattccccccaatggccaccgcatcggaacactgtctgtctacggggcaacagccatcttctcctgcaattccggatacacactggtgggctccagggtgcgtgagtgcatggccaatgggctctggagtggctctgaagtccgctgccttgctggacactgtgggactcctgagcccattgtcaacggacacatcaatggggagaactacagctaccggggcagtgtggtgtaccaatgcaatgctggcttccgcctgatcggcatgtctgtgcgcatctgccagcaggatcatcactggtcgggcaagacccctttctgtgtgccaattacctgtggacacccaggcaaccctgtcaacggcctcactcagggtaaccagtttaacctcaacgatgtggtcaagtttgtttgcaaccctgggtatatggctgagggggctgctaggtcccaatgcctggccagcgggcaatggagtgacatgctgcccacctgcagaatcatcaactgtacagatcctggacaccaagaaaatagtgttcgtcaggtccacgccagcggcccgcacaggttcagcttcggcaccactgtgtcttaccggtgcaaccacggcttctacctcctgggcaccccagtgctcagctgccagggagatggcacatgggaccgtccccgcccccagtgtctcttggtgtcctgtggccatccgggctccccgcctcactcccagatgtctggagacagttatactgtgggagcagtggtgcggtacagctgcatcggcaagcgtactctggtgggaaacagcacccgcatgtgtgggctggatggacactggactggctccctccctcactgctcaggaaccagcgtgggagtttgcggtgaccctgggatcccggctcatggcatccgtttgggggacagctttgatccaggcactgtgatgcgcttcagctgtgaagctggccacgtgctccggggatcgtcagagcgcacctgtcaagccaatggctcgtggagcggctcgcagcctgagtgtggagtgatctcttgtgggaaccctgggactccaagtaatgcccgagttgtgttcagtgatggcctggttttctccagctctatcgtctatgagtgccgggaaggatactacgccacaggcctgctcagccgtcactgctcggtcaatggtacctggacaggcagtgaccctgagtgcctcgtcataaactgtggtgaccctgggattccagccaatggccttcggctgggcaatgacttcaggtacaacaaaactgtgacatatcagtgtgtccctggctatatgatggagtcacatagagtatctgtgctgagctgcaccaaggaccggacatggaatggaaccaagcccgtctgcaaagctctcatgtgcaagccacctccgctcatccccaatgggaaggtggtggggtctgacttcatgtggggctcaagtgtgacttatgcctgcctggaggggtaccagctctccctgcccgcggtgttcacctgtgagggaaatgggtcctggaccggagagctgcctcagtgtttccctgtgttctgcggggatcctggtgtcccgtcccgtgggaggagagaggaccgaggcttctcctacaggtcatctgtctccttctcctgccatccccctctggtgctggtgggctctccacgcaggttttgccagtcagatgggacatggagtggcacccagcccagctgcatagatccgaccctgaccacgtgtgcggaccctggtgtgccacagtttgggatacagaacaattctcagggctaccaggttggaagcacagtcctcttccgttgtcaaaaaggctacctgcttcagggctccaccaccaggacctgcctcccaaacctgacctggagtggaaccccacctgactgtgtcccccaccactgcaggcagccagagacgccaacgcatgccaacgtcggggccctggatttgccctccatgggctacacgctcattactcctgccaggagggcttctccctcaagggtggctccgagcaccgcacctgcaaggcggatggcagctggacaggcaagccgcccatctgcctggaggtccggcccagtgggagacccatcaacactgcccgggagccaccgctcacccaagccttgattcctggggatgtttttgccaagaattccctgtggaaaggggcctatgaataccaggggaagaagcagccagccatgctcagagtgactggcttccaagttgccaacagcaaggtcaatgccaccatgatcgaccacagtggcgtggagctgcacttggctggaacttacaagaaagaagattttcatctcctactccaggtgtaccagattacagggcctgtggagatctttatgaataagttcaaagatgatcactgggctttagatggccatgtctcgtcagagtcctccggagccaccttcatctaccaaggctctgtcaagggccaaggctttgggcagttcggctttcaaagactggacctcaggctgctggagtcagaccccgagtccattggccgccactttgcttccaacagcagctcagtggcagccgcgatcctggtgcctttcatcgccctcattattgcgggcttcgtgctctatctctacaagcacaggagaagacccaaagttcctttcaatggctatgctggccacgagaacaccaatgttcgggccacatttgagaacccaatgtacgaccgcaacatccagcccacagacatcatggccagcgaggcggagttcacagtcagcacagtgtgcacagcagtatagccacccggcctggccgctttttttgctaggttgaactggtactccagcagccgccgaagctggactgtactgctgccatctcagctcactgcaacctccctgcctgattcccctgcctcagcctgccgagtgcctgcgattgcaggcgcgcaccgccac

SEQ ID NO: 60 - protein, 882 aa, Homo sapiens
MAICTRHPQGYHLWSEAIPLCQALSCGLPEAPKNGMVFGKEYTVGTKAVYSCSEGYHLQAGAEATAECLDTGLWSNRNVPPQCVPVTCPDVSSISVEHGRWRLIFETQYQFQAQLMLICDPGYYYTGQRVIRCQANGKWSLGDSTPTCRIISCGELPIPPNGHRIGTLSVYGATAIFSCNSGYTLVGSRVRECMANGLWSGSEVRCLAGHCGTPEPIVNGHINGENYSYRGSVVYQCNAGFRLIGMSVRICQQDHHWSGKTPFCVPITCGHPGNPVNGLTQGNQFNLNDVVKFVCNPGYMAEGAARSQCLASGQWSDMLPTCRIINCTDPGHQENSVRQVHASGPHRFSFGTTVSYRCNHGFYLLGTPVLSCQGDGTWDRPRPQCLLVSCGHPGSPPHSQMSGDSYTVGAVVRYSCIGKRTLVGNSTRMCGLDGHWTGSLPHCSGTSVGVCGDPGIPAHGIRLGDSFDPGTVMRFSCEAGHVLRGSSERTCQANGSWSGSQPECGVISCGNPGTPSNARVVFSDGLVFSSSIVYECREGYYATGLLSRHCSVNGTWTGSDPECLVINCGDPGIPANGLRLGNDFRYNKTVTYQCVPGYMMESHRVSVLSCTKDRTWNGTKPVCKALMCKPPPLIPNGKVVGSDFMWGSSVTYACLEGYQLSLPAVFTCEGNGSWTGELPQCFPVFCGDPGVPSRGRREDRGFSYRSSVSFSCHPPLVLVGSPRRFCQSDGTWSGTQPSCIDPTLTTCADPGVPQFGIQNNSQGYQVGSTVLFRCQKGYLLQGSTTRTCLPNLTWSGTPPDCVPHHCRQPETPTHANVGALDLPSMGYTLITPARRASPSRVAPSTAPARRMAAGQASRPSAWRSGPVGDPSTLPGSHRSPKP

SEQ ID NO: 61 - DNA, 10136 bp, Homo sapiens
  CDS (1)..(9312)
atggcgggcgcccctccccccgccttgctgctgccttgcagtttgatctcagactgctgtgctagcaatcagcgacactccgtgggcgtaggaccctccgagctagtcaagaagcaaattgagttgaagtctcgaggtgtgaagctgatgcccagcaaagacaacagccagaagacgtctgtgttaactcaggttggtgtgtcccaaggacataatatgtgtccagaccctggcatacccgaaaggggcaaaagactaggctcggatttcaggttaggatccagcgtccagttcacctgcaacgagggctatgacctgcaagggtccaagcggatcacctgtatgaaagtgagcgacatgtttgcggcctggagcgaccacaggccagtctgccgagcccgcatgtgtgatgcccaccttcgaggcccctcgggcatcatcacctcccccaatttccccattcagtatgacaacaatgcacactgtgtgtggatcatcacagcactcaacccctccaaggtgatcaagctcgcctttgaggagtttgatttggagaggggctatgacaccctgacggtcggtgatggtggtcaggatggggaccagaagacagttctctacatgtctcaaaatgcctgcagtgacagccctcacaccccaggctctcgcatcccagagagcatgtctggggacatctggaggcagaaatggactgtacttgagatctgtcgtgacattagcagttcagatgcaaggtcaggttcagtgaggaagtctccaaagacttctaatgctgtggaacttgttgctcctgggacagagatcgagcagggcagttgcggtgaccctggcatacctgcatatggccggagggaaggctcccggtttcaccacggtgacacactcaagtttgagtgccagcccgcctttgagctggtgggacagaaggcaatcacatgccaaaagaataaccaatggtcggctaagaagccaggctgcgtgttctcctgcttcttcaacttcaccagcccgtctggggttgtcctgtctcccaactacccagaggactatggcaaccacctccactgtgtctggctcatcctggccaggcctgagagccgcatccacctggccttcaacgacattgacgtggagcctcagtttgatttcctggtcatcaaggatggggccaccgccgaggcgcccgtcctgggcaccttctcaggaaaccagcttccctcctccatcacaagcagtggccacgtggcccgtctcgagttccagactgaccactccacagggaagaggggcttcaacatcacttttaccaccttccgacacaacgagtgcccggatcctggcgttccagtaaatggcaaacggtttggggacagcctccagctgggcagctccatctccttcctctgtgatgaaggcttccttgggactcagggctcagagaccatcacctgcgtcctgaaggagggcagcgtggtctggaacagcgctgtgctgcggtgtgaagctccctgtggtggtcacctgacttcgcccagcggcaccatcctctctccgggctggcctggcttctacaaggatgccttgagctgtgcctgggtgattgaggcccagccaggctaccccatcaaaatcaccttcgacagattcaaaaccgaggtcaactatgacaccctggaagtacgcgatgggcggacttactcagcgcccttgatcggggtttaccacgggacccaggttccccagttcctcatcagcaccagcaactacctctacctcctcttctctaccgacaagagtcactcggacatcggcttccagctccgctatgagactataacactgcagtcagaccactgtctggatccaggaatcccagtaaatggacagcgtcatgggaatgacttctacgtgggcgcgctggtgaccttcagctgtgactcgggctacacattaagtgacggggagcctctggagtgtgagcccaacttccagtggagccgggccctgcccagttgtgaagctctctgtggtggcttcattcaaggctccagtgggaccatcttgtcgccagggttccctgacttctaccccaacaacttgaactgcacctggattatcgaaacatctcatggcaagggtgtgttcttcactttccacaccttccacctggaaagtggccatgactacctcctcatcactgagaacggcagcttcacccagcccctgaggcagctaactggatctcggctgccagctcccatcagcgctgggctctatggcaacttcactgcccaggtccgcttcatctctgatttctccatgtcatatgaaggattcaacatcaccttctcagagtacgacttggagccctgtgaggagcccgaggtcccagcctacagcatccggaagggcttgcagtttggcgtgggcgacaccttgaccttctcctgcttccccgggtaccgtctggagggcaccgcccgcatcacgtgcctggggggcagacggcgcctgtggagctcgcctctgccaaggtgtgttgctgagtgtgggaattcagtcacaggcactcagggtactttgctgtcccccaactttcctgtgaactacaataacaatcatgaatgcatctactccatccagacccagccagggaagggaattcagctgaaagccagggcattcgaactctccgaaggagatgtcctcaaggtttatgatggcaacaacaactccgcccgtttgctgggagtttttagccattctgagatgatgggggtgactttgaacagcacatccagcagtctgtggcttgatttcatcactgatgctgaaaacaccagcaagggctttgaactgcacttttccagctttgaactcatcaaatgtgaggacccaggaacccccaagtttggctacaaggttcatgatgaaggtcattttgcagggagctccgtgtccttcagctgtgaccctggatacagcctgcggggtagtgaggagctgctgtgtctgagtggagagcgccggacctgggaccggcctctgcccacctgtgtcgccgagtgtggagggacagtgagaggagaggtgtcgggacaggtgctgtcacccgggtatccagctccctatgaacacaatctcaactgcatctggaccatcgaagcagaggccggctgcaccattgggctacacttcctggtgtttgacacagaggaggttcacgacgtgctgcgcatctgggatgggcctgtggagagcggggttctgctgaaggagctgagtggcccggccctgcccaaggacctgcatagcaccttcaactcggtcgtcctgcagttcagcactgacttcttcaccagcaagcagggctttgccattcaattttcagtgtccacagcaacgtcctgcaatgaccctgggatcccgcagaatgggagtcggagtggtgacagttgggaagccggcgactccacagtgttccagtgtgaccctggctacgcgctgcagggaagtgcagagatcagctgtgtgaagatcgagaacaggttcttctggcagcccagcccgccaacatgcatcgctccctgcgggggagacctgacaggaccatctggagtcatcctctcaccaaattacccagaaccctacccgccaggcaaggagtgtgactggaaagtgaccgtctcaccagactacgtcatcgccctggtatttaacatctttaacctggagcctggctatgacttcctccatatctacgacggacgggactctctcagccctctcataggaagcttctatggctcccagctcccaggccgcattgaaagcagcagcaacagcctcttcctcgccttccgcagcgatgcatctgtgagcaatgctggcttcgtcattgactatacagaaaacccgcgggagtcatgttttgatcctggttccatcaagaacggcacacgggtggggtccgacctgaagctgggctcctccgtcacctactactgccacgggggctacgaagttgagggcacctcgaccctgagctgcatcctggggcctgatgggaagcccgtgtggaacaatccccggccagtctgcacagccccctgtgggggacagtatgtgggttcggacggagtggtcttgtcccccaactacccccagaactacaccagtggacagatctgcttgtattttgttactgtgcccaaggactatgtggtgtttggccagttcgccttctttcacacggccctcaacgacgtggtggaggttcacgacggccacagccagcactcgcggctcctcagctccctctcgggctcccatacaggagaatcactgcccttggccacctccaatcaagttctcattaagttcagcgccaaaggcctcgcaccagccagaggcttccactttgtctaccaagcggttcctcgaaccagcgccacgcagtgcagctctgtgccggaaccccgctatggcaagaggctgggcagtgacttctcggtgggggccatcgtccgcttcgaatgcaactccggctatgccctgcaggggtcgccagagatcgagtgcctccctgtgcctggggccttggcccaatggaatgtctcagcgcccacgtgtgtggtgccgtgtggaggcaacctcacagagcgcaggggcaccatcctgtcccctggcttcccagagccgtacctcaacagcctcaactgtgtgtggaagatcgtggtccccgaaggcgctggcatccagatccaagttgtcagttttgtgacagagcagaactgggactcgctggaagtatttgatggtgcagataacactgtaaccatgctggggagtttctcaggaacaaccgtgcctgcccttctgaacagcacctccaaccagctctaccttcatttctactcagatatcagcgtatctgcagctggcttccacttggagtacaaaacggtgggcctgagcagttgtccggaacctgctgtgcccagtaacggggtgaagactggcgagcgctacttggtgaatgatgtggtgtctttccagtgtgagccgggatatgccctccagggccacgcccacatctcctgcatgcccggaacagtgcggcgatggaactaccctcctccactctgtattgcacagtgtgggggaacagtggaggagatggagggggtgatcctgagccccggcttcccaggcaactaccccagtaacatggactgctcctggaaaatagcactgcccgtgggctttggagctcacatccagttcctgaacttctccaccgagcccaaccacgactacatagaaatccggaatggcccctatgagaccagccgcatgatgggaagattcagtggaagcgagcttccaagctccctcctctccacgtcccacgagaccaccgtgtatttccacagcgaccactcccagaatcggccaggattcaagctggagtatcaggcctatgaacttcaagagtgcccagacccagagccctttgccaatggcattgtgaggggagctggctacaacgtgggacaatcagtgaccttcgagtgcctcccggggtatcaattgactggccaccctgtcctcacgtgtcaacatggcaccaaccggaactgggaccaccccctgcccaagtgtgaagtcccttgtggcgggaacatcacttcttccaacggcactgtgtactccccggggttccctagcccgtactccagctcccaggactgtgtctggctgatcaccgtgcccattggccatggcgtccgcctcaacctcagcctgctgcagacagagccctctggagatttcatcaccatctgggatgggccacagcaaacagcaccacggctcggcgtcttcacccggagcatggccaagaaaacagtgcagagttcatccaaccaggtcctgctcaagttccaccgtgatgcagccacaggggggatcttcgccatagctttctccgcttatccactcaccaaatgccctcctcccaccatcctccccaacgccgaagtcgtcacagagaatgaagaattcaatataggtgacatcgtacgctacagatgcctccctggctttaccttagtggggaatgaaattctgacctgcaaacttggaacctacctgcagtttgaaggaccacccccgatatgtgaagtgcactgtccaacaaatgagcttctgacagactccacaggcgtgatcctgagccagagctaccctggaagctatccccagttccagacctgctcttggctggtgagagtggagcccgactataacatctccctcacagtggagtacttcctcagcgagaagcaatatgatgagtttgagatttttgatggtccatcaggacagagtcctctgctgaaagccctcagtgggaattactcagctcccctgattgtcaccagctcaagcaactctgtgtacctgcgttggtcatctgatcacgcctacaatcggaagggcttcaagatccgctattcagccccttactgcagcctgcccagggctccactccatggcttcatcctaggccagaccagcacccagcccgggggctccatccactttggctgcaacgccggctaccgcctggtgggacacagcatggccatctgtacccggcacccccagggctaccacctgtggagcgaagccatccctctctgtcaagctctttcctgtgggcttcctgaggcccccaagaatggaatggtgtttggcaaggagtacacagtgggaaccaaggccgtgtacagctgcagtgaaggctaccacctccaggcaggcgctgaggccactgcagagtgtctggacacaggcctatggagcaaccgcaatgtcccaccacagtgtgtccctgtgacttgtcctgatgtcagtagcatcagcgtggagcatggccgatggaggcttatctttgagacacagtatcagttccaggcccagctgatgctcatctgtgaccctggctactactatactggccaaagggtcatccgctgtcaggccaatggcaaatggagcctcggggactctacgcccacctgccgaatcatctcctgtggagagctcccgattccccccaatggccaccgcatcggaacactgtctgtctacggggcaacagccatcttctcctgcaattccggatacacactggtgggctccagggtgcgtgagtgcatggccaatgggctctggagtggctctgaagtccgctgccttgctggacactgtgggactcctgagcccattgtcaacggacacatcaatggggagaactacagctaccggggcagtgtggtgtaccaatgcaatgctggcttccgcctgatcggcatgtctgtgcgcatctgccagcaggatcatcactggtcgggcaagacccctttctgtgtgccaattacctgtggacacccaggcaaccctgtcaacggcctcactcagggtaaccagtttaacctcaacgatgtggtcaagtttgtttgcaaccctgggtatatggctgagggggctgctaggtcccaatgcctggccagcgggcaatggagtgacatgctgcccacctgcagaatcatcaactgtacagatcctggacaccaagaaaatagtgttcgtcaggtccacgccagcggcccgcacaggttcagcttcggcaccactgtgtcttaccggtgcaaccacggcttctacctcctgggcaccccagtgctcagctgccagggagatggcacatgggaccgtccccgcccccagtgtctcttggtgtcctgtggccatccgggctccccgcctcactcccagatgtctggagacagttatactgtgggagcagtggtgcggtacagctgcatcggcaagcgtactctggtgggaaacagcacccgcatgtgtgggctggatggacactggactggctccctccctcactgctcaggaaccagcgtgggagtttgcggtgaccctgggatcccggctcatggcatccgtttgggggacagctttgatccaggcactgtgatgcgcttcagctgtgaagctggccacgtgctccggggatcgtcagagcgcacctgtcaagccaatggctcgtggagcggctcgcagcctgagtgtggagtgatctcttgtgggaaccctgggactccaagtaatgcccgagttgtgttcagtgatggcctggttttctccagctctatcgtctatgagtgccgggaaggatactacgccacaggcctgctcagccgtcactgctcggtcaatggtacctggacaggcagtgaccctgagtgcctcgtcataaactgtggtgaccctgggattccagccaatggccttcggctgggcaatgacttcaggtacaacaaaactgtgacatatcagtgtgtccctggctatatgatggagtcacatagagtatctgtgctgagctgcaccaaggaccggacatggaatggaaccaagcccgtctgcaaagctctcatgtgcaagccacctccgctcatccccaatgggaaggtggtggggtctgacttcatgtggggctcaagtgtgacttatgcctgcctggaggggtaccagctctccctgcccgcggtgttcacctgtgagggaaatgggtcctggaccggagagctgcctcagtgtttccctgtgttctgcggggatcctggtgtcccgtcccgtgggaggagagaggaccgaggcttctcctacaggtcatctgtctccttctcctgccatccccctctggtgctggtgggctctccacgcaggttttgccagtcagatgggacatggagtggcacccagcccagctgcatagatccgaccctgaccacgtgtgcggaccctggtgtgccacagtttgggatacagaacaattctcagggctaccaggttggaagcacagtcctcttccgttgtcaaaaaggctacctgcttcagggctccaccaccaggacctgcctcccaaacctgacctggagtggaaccccacctgactgtgtcccccaccactgcaggcagccagagacgccaacgcatgccaacgtcggggccctggatttgccctccatgggctacacgctcattactcctgccaggagggcttctccctcaagggtggctccgagcaccgcacctgcaaggcggatggcagctggacaggcaagccgcccatctgcctggaggtccggcccagtgggagacccatcaacactgcccgggagccaccgctcacccaagccttgattcctggggatgtttttgccaagaattccctgtggaaaggggcctatgaataccaggggaagaagcagccagccatgctcagagtgactggcttccaagttgccaacagcaaggtcaatgccaccatgatcgaccacagtggcgtggagctgcacttggctggaacttacaagaaagaagattttcatctcctactccaggtgtaccagattacagggcctgtggagatctttatgaataagttcaaagatgatcactgggctttagatggccatgtctcgtcagagtcctccggagccaccttcatctaccaaggctctgtcaagggccaaggctttgggcagttcggctttcaaagactggacctcaggctgctggagtcagaccccgagtccattggccgccactttgcttccaacagcagctcagtggcagccgcgatcctggtgcctttcatcgccctcattattgcgggcttcgtgctctatctctacaagcacaggagaagacccaaagttcctttcaatggctatgctggccacgagaacaccaatgttcgggccacatttgagaacccaatgtacgaccgcaacatccagcccacagacatcatggccagcgaggcggagttcacagtcagcacagtgtgcacagcagtatagccacccggcctggccgctttttttgctaggttgaactggtactccagcagccgccgaagctggactgtactgctgccatctcagctcactgcaacctccctgcctgattcccctgcctcagcctgccgagtgcctgcgattgcaggcgcgcaccgccac

SEQ ID NO: 62 - protein, 3104 aa, Homo sapiens; identical to SEQ ID NO: 34

SEQ ID NO: 63 - DNA, 10136 bp, Homo sapiens
  CDS (1)..(9312)
atggcgggcgcccctccccccgccttgctgctgccttgcagtttgatctcagactgctgtgctagcaatcagcgacactccgtgggcgtaggaccctccgagctagtcaagaagcaaattgagttgaagtctcgaggtgtgaagctgatgcccagcaaagacaacagccagaagacgtctgtgttaactcaggttggtgtgtcccaaggacataatatgtgtccagaccctggcatacccgaaaggggcaaaagactaggctcggatttcaggttaggatccagcgtccagttcacctgcaacgagggctatgacctgcaagggtccaagcggatcacctgtatgaaagtgagcgacatgtttgcggcctggagcgaccacaggccagtctgccgagcccgcatgtgtgatgcccaccttcgaggcccctcgggcatcatcacctcccccaatttccccattcagtatgacaacaatgcacactgtgtgtggatcatcacagcactcaacccctccaaggtgatcaagctcgcctttgaggagtttgatttggagaggggctatgacaccctgacggtcggtgatggtggtcaggatggggaccagaagacagttctctacatgtctcaaaatgcctgcagtgacagccctcacaccccaggctctcgcatcccagagagcatgtctggggacatctggaggcagaaatggactgtacttgagatctgtcgtgacattagcagttcagatgcaaggtcaggttcagtgaggaagtctccaaagacttctaatgctgtggaacttgttgctcctgggacagagatcgagcagggcagttgcggtgaccctggcatacctgcatatggccggagggaaggctcccggtttcaccacggtgacacactcaagtttgagtgccagcccgcctttgagctggtgggacagaaggcaatcacatgccaaaagaataaccaatggtcggctaagaagccaggctgcgtgttctcctgcttcttcaacttcaccagcccgtctggggttgtcctgtctcccaactacccagaggactatggcaaccacctccactgtgtctggctcatcctggccaggcctgagagccgcatccacctggccttcaacgacattgacgtggagcctcagtttgatttcctggtcatcaaggatggggccaccgccgaggcgcccgtcctgggcaccttctcaggaaaccagcttccctcctccatcacaagcagtggccacgtggcccgtctcgagttccagactgaccactccacagggaagaggggcttcaacatcacttttaccaccttccgacacaacgagtgcccggatcctggcgttccagtaaatggcaaacggtttggggacagcctccagctgggcagctccatctccttcctctgtgatgaaggcttccttgggactcagggctcagagaccatcacctgcgtcctgaaggagggcagcgtggtctggaacagcgctgtgctgcggtgtgaagctccctgtggtggtcacctgacttcgcccagcggcaccatcctctctccgggctggcctggcttctacaaggatgccttgagctgtgcctgggtgattgaggcccagccaggctaccccatcaaaatcaccttcgacagattcaaaaccgaggtcaactatgacaccctggaagtacgcgatgggcggacttactcagcgcccttgatcggggtttaccacgggacccaggttccccagttcctcatcagcaccagcaactacctctacctcctcttctctaccgacaagagtcactcggacatcggcttccagctccgctatgagactataacactgcagtcagaccactgtctggatccaggaatcccagtaaatggacagcgtcatgggaatgacttctacgtgggcgcgctggtgaccttcagctgtgactcgggctacacattaagtgacggggagcctctggagtgtgagcccaacttccagtggagccgggccctgcccagttgtgaagctctctgtggtggcttcattcaaggctccagtgggaccatcttgtcgccagggttccctgacttctaccccaacaacttgaactgcacctggattatcgaaacatctcatggcaagggtgtgttcttcactttccacaccttccacctggaaagtggccatgactacctcctcatcactgagaacggcagcttcacccagcccctgaggcagctaactggatctcggctgccagctcccatcagcgctgggctctatggcaacttcactgcccaggtccgcttcatctctgatttctccatgtcatatgaaggattcaacatcaccttctcagagtacgacttggagccctgtgaggagcccgaggtcccagcctacagcatccggaagggcttgcagtttggcgtgggcgacaccttgaccttctcctgcttccccgggtaccgtctggagggcaccgcccgcatcacgtgcctggggggcagacggcgcctgtggagctcgcctctgccaaggtgtgttgctgagtgtgggaattcagtcacaggcactcagggtactttgctgtcccccaactttcctgtgaactacaataacaatcatgaatgcatctactccatccagacccagccagggaagggaattcagctgaaagccagggcattcgaactctccgaaggagatgtcctcaaggtttatgatggcaacaacaactccgcccgtttgctgggagtttttagccattctgagatgatgggggtgactttgaacagcacatccagcagtctgtggcttgatttcatcactgatgctgaaaacaccagcaagggctttgaactgcacttttccagctttgaactcatcaaatgtgaggacccaggaacccccaagtttggctacaaggttcatgatgaaggtcattttgcagggagctccgtgtccttcagctgtgaccctggatacagcctgcggggtagtgaggagctgctgtgtctgagtggagagcgccggacctgggaccggcctctgcccacctgtgtcgccgagtgtggagggacagtgagaggagaggtgtcggggcaggtgctgtcacccgggtatccagctccctatgaacacaatctcaactgcatctggaccatcgaagcagaggccggctgcaccattgggctacacttcctggtgtttgacacagaggaggttcacgacgtgctgcgcatctgggatgggcctgtggagagcggggttctgctgaaggagctgagtggcccggccctgcccaaggacctgcatagcaccttcaactcggtcgtcctgcagttcagcactgacttcttcaccagcaagcagggctttgccattcaattttcagtgtccacagcaacgtcctgcaatgaccctgggatcccgcagaatgggagtcggagtggtgacagttgggaagccggcgactccacagtgttccagtgtgaccctggctacgcgctgcagggaagtgcagagatcagctgtgtgaagatcgagaacaggttcttctggcagcccagcccgccaacatgcatcgctccctgcgggggagacctgacaggaccatctggagtcatcctctcaccaaattacccagaaccctacccgccaggcaaggagtgtgactggaaagtgaccgtctcaccagactacgtcatcgccctggtatttaacatctttaacctggagcctggctatgacttcctccatatctacgacggacgggactctctcagccctctcataggaagcttctatggctcccagctcccaggccgcattgaaagcagcagcaacagcctcttcctcgccttccgcagcgatgcatctgtgagcaatgctggcttcgtcattgactatacagaaaacccgcgggagtcatgttttgatcctggttccatcaagaacggcacacgggtggggtccgacctgaagctgggctcctccgtcacctactactgccacgggggctacgaagttgagggcacctcgaccctgagctgcatcctggggcctgatgggaagcccgtgtggaacaatccccggccagtctgcacagccccctgtgggggacagtatgtgggttcggacggagtggtcttgtcccccaactacccccagaactacaccagtggacagatctgcttgtattttgttactgtgcccaaggactatgtggtgtttggccagttcgccttctttcacacggccctcaacgacgtggtggaggttcacgacggccacagccagcactcgcggctcctcagctccctctcgggctcccatacaggagaatcactgcccttggccacctccaatcaagttctcattaagttcagcgccaaaggcctcgcaccagccggaggcttccactttgtctaccaagcggttcctcgaaccagcgccacgcagtgcagctctgtgccggaaccccgctatggcaagaggctgggcagtgacttctcggtgggggccatcgtccgcttcgaatgcaactccggctatgccctgcaggggtcgccagagatcgagtgcctccctgtgcctggggccttggcccaatggaatgtctcagcgcccacgtgtgtggtgccgtgtggaggcaacctcacagagcgcaggggcaccatcctgtcccctggcttcccagagccgtacctcaacagcctcaactgtgtgtggaagatcgtggtccccgaaggcgctggcatccagatccaagttgtcagttttgtgacagagcagaactgggactcgctggaagtatttgatggtgcagataacactgtaaccatgctggggagtttctcaggaacaaccgtgcctgcccttctgaacagcacctccaaccagctctaccttcatttctactcagatatcagcgtatctgcagctggcttccacttggagtacaaaacggtgggcctgagcagttgtccggaacctgctgtgcccagtaacggggtgaagactggcgagcgctacttggtgaatgatgtggtgtctttccagtgtgagccgggatatgccctccagggccacgcccacatctcctgcatgcccggaacagtgcggcgatggaactaccctcctccactctgtattgcacagtgtgggggaacagtggaggagatggagggggtgatcctgagccccggcttcccaggcaactaccccagtaacatggactgctcctggaaaatagcactgcccgtgggctttggagctcacatccagttcctgaacttctccaccgagcccaaccacgactacatagaaatccggaatggcccctatgagaccagccgcatgatgggaagattcagtggaagcgagcttccaagctccctcctctccacgtcccacgagaccaccgtgtatttccacagcgaccactcccagaatcggccaggattcaagctggagtatcaggcctatgaacttcaagagtgcccagacccagagccctttgccaatggcattgtgaggggagctggctacaacgtgggacaatcagtgaccttcgagtgcctcccggggtatcaattgactggccaccctgtcctcacgtgtcaacatggcaccaaccggaactgggaccaccccctgcccaagtgtgaagtcccttgtggcgggaacatcacttcttccaacggcactgtgtactccccggggttccctagcccgtactccagctcccaggactgtgtctggctgatcaccgtgcccattggccatggcgtccgcctcaacctcagcctgctgcagacagagccctctggagatttcatcaccatctgggatgggccacagcaaacagcaccacggctcggcgtcttcacccggagcatggccaagaaaacagtgcagagttcatccaaccaggtcctgctcaagttccaccgtgatgcagccacaggggggatcttcgccatagctttctccgcttatccactcaccaaatgccctcctcccaccatcctccccaacgccgaagtcgtcacagagaatgaagaattcaatataggtgacatcgtacgctacagatgcctccctggctttaccttagtggggaatgaaattctgacctgcaaacttggaacctacctgcagtttgaaggaccacccccgatatgtgaagtgcactgtccaacaaatgagcttctgacagactccacaggcgtgatcctgagccagagctaccctggaagctatccccagttccagacctgctcttggctggtgagagtggagcccgactataacatctccctcacagtggagtacttcctcagcgagaagcaatatgatgagtttgagatttttgatggtccatcaggacagagtcctctgctgaaagccctcagtgggaattactcagctcccctgattgtcaccagctcaagcaactctgtgtacctgcgttggtcatctgatcacgcctacaatcggaagggcttcaagatccgctattcagccccttactgcagcctgcccagggctccactccatggcttcatcctaggccagaccagcacccagcccgggggctccatccactttggctgcaacgccggctaccgcctggtgggacacagcatggccatctgtacccggcacccccagggctaccacctgtggagcgaagccatccctctctgtcaagctctttcctgtgggcttcctgaggcccccaagaatggaatggtgtttggcaaggagtacacagtgggaaccaaggccgtgtacagctgcagtgaaggctaccacctccaggcaggcgctgaggccactgcagagtgtctggacacaggcctatggagcaaccgcaatgtcccaccacagtgtgtccctgtgacttgtcctgatgtcagtagcatcagcgtggagcatggccgatggaggcttatctttgagacacagtatcagttccaggcccagctgatgctcatctgtgaccctggctactactatactggccaaagggtcatccgctgtcaggccaatggcaaatggagcctcggggactctacgcccacctgccgaatcatctcctgtggagagctcccgattccccccaatggccaccgcatcggaacactgtctgtctacggggcaacagccatcttctcctgcaattccggatacacactggtgggctccagggtgcgtgagtgcatggccaatgggctctggagtggctctgaagtccgctgccttgctggacactgtgggactcctgagcccattgtcaacggacacatcaatggggagaactacagctaccggggcagtgtggtgtaccaatgcaatgctggcttccgcctgatcggcatgtctgtgcgcatctgccagcaggatcatcactggtcgggcaagacccctttctgtgtgccaattacctgtggacacccaggcaaccctgtcaacggcctcactcagggtaaccagtttaacctcaacgatgtggtcaagtttgtttgcaaccctgggtatatggctgagggggctgctaggtcccaatgcctggccagcgggcaatggagtgacatgctgcccacctgcagaatcatcaactgtacagatcctggacaccaagaaaatagtgttcgtcaggtccacgccagcggcccgcacaggttcagcttcggcaccactgtgtcttaccggtgcaaccacggcttctacctcctgggcaccccagtgctcagctgccagggagatggcacatgggaccgtccccgcccccagtgtctcttggtgtcctgtggccatccgggctccccgcctcactcccagatgtctggagacagttatactgtgggagcagtggtgcggtacagctgcatcggcaagcgtactctggtgggaaacagcacccgcatgtgtgggctggatggacactggactggctccctccctcactgctcaggaaccagcgtgggagtttgcggtgaccctgggatcccggctcatggcatccgtttgggggacagctttgatccaggcactgtgatgcgcttcagctgtgaagctggccacgtgctccggggatcgtcagagcgcacctgtcaagccaatggctcgtggagcggctcgcagcctgagtgtggagtgatctcttgtgggaaccctgggactccaagtaatgcccgagttgtgttcagtgatggcctggttttctccagctctatcgtctatgagtgccgggaaggatactacgccacaggcctgctcagccgtcactgctcggtcaatggtacctggacaggcagtgaccctgagtgcctcgtcataaactgtggtgaccctgggattccagccaatggccttcggctgggcaatgacttcaggtacaacaaaactgtgacatatcagtgtgtccctggctatatgatggagtcacatagagtatctgtgctgagctgcaccaaggaccggacatggaatggaaccaagcccgtctgcaaagctctcatgtgcaagccacctccgctcatccccaatgggaaggtggtggggtctgacttcatgtggggctcaagtgtgacttatgcctgcctggaggggtaccagctctccctgcccgcggtgttcacctgtgagggaaatgggtcctggaccggagagctgcctcagtgtttccctgtgttctgcggggatcctggtgtcccgtcccgtgggaggagagaggaccgaggcttctcctacaggtcatctgtctccttctcctgccatccccctctggtgctggtgggctctccacgcaggttttgccagtcagatgggacatggagtggcacccagcccagctgcatagatccgaccctgaccacgtgtgcggaccctggtgtgccacagtttgggatacagaacaattctcagggctaccaggttggaagcacagtcctcttccgttgtcaaaaaggctacctgcttcagggctccaccaccaggacctgcctcccaaacctgacctggagtggaaccccacctgactgtgtcccccaccactgcaggcagccagagacgccaacgcatgccaacgtcggggccctggatttgccctccatgggctacacgctcattactcctgccaggagggcttctccctcaagggtggctccgagcaccgcacctgcaaggcggatggcagctggacaggcaagccgcccatctgcctggaggtccggcccagtgggagacccatcaacactgcccgggagccaccgctcacccaagccttgattcctggggatgtttttgccaagaattccctgtggaaaggggcctatgaataccaggggaagaagcagccagccatgctcagagtgactggcttccaagttgccaacagcaaggtcaatgccaccatgatcgaccacagtggcgtggagctgcacttggctggaacttacaagaaagaagattttcatctcctactccaggtgtaccagattacagggcctgtggagatctttatgaataagttcaaagatgatcactgggctttagatggccatgtctcgtcagagtcctccggagccaccttcatctaccaaggctctgtcaagggccaaggctttgggcagttcggctttcaaagactggacctcaggctgctggagtcagaccccgagtccattggccgccactttgcttccaacagcagctcagtggcagccgcgatcctggtgcctttcatcgccctcattattgcgggcttcgtgctctatctctacaagcacaggagaagacccaaagttcctttcaatggctatgctggccacgagaacaccaatgttcgggccacatttgagaacccaatgtacgaccgcaacatccagcccacagacatcatggccagcgaggcggagttcacagtcagcacagtgtgcacagcagtatagccacccggcctggccgctttttttgctaggttgaactggtactccagcagccgccgaagctggactgtactgctgccatctcagctcactgcaacctccctgcctgattcccctgcctcagcctgccgagtgcctgcgattgcaggcgcgcaccgccac

SEQ ID NO: 64 - protein, 3104 aa, Homo sapiens
MAGAPPPALLLPCSLISDCCASNQRHSVGVGPSELVKKQIELKSRGVKLMPSKDNSQKTSVLTQVGVSQGHNMCPDPGIPERGKRLGSDFRLGSSVQFTCNEGYDLQGSKRITCMKVSDMFAAWSDHRPVCRARMCDAHLRGPSGIITSPNFPIQYDNNAHCVWIITALNPSKVIKLAFEEFDLERGYDTLTVGDGGQDGDQKTVLYMSQNACSDSPHTPGSRIPESMSGDIWRQKWTVLEICRDISSSDARSGSVRKSPKTSNAVELVAPGTEIEQGSCGDPGIPAYGRREGSRFHHGDTLKFECQPAFELVGQKAITCQKNNQWSAKKPGCVFSCFFNFTSPSGVVLSPNYPEDYGNHLHCVWLILARPESRIHLAFNDIDVEPQFDFLVIKDGATAEAPVLGTFSGNQLPSSITSSGHVARLEFQTDHSTGKRGFNITFTTFRHNECPDPGVPVNGKRFGDSLQLGSSISFLCDEGFLGTQGSETITCVLKEGSVVWNSAVLRCEAPCGGHLTSPSGTILSPGWPGFYKDALSCAWVIEAQPGYPIKITFDRFKTEVNYDTLEVRDGRTYSAPLIGVYHGTQVPQFLISTSNYLYLLFSTDKSHSDIGFQLRYETITLQSDHCLDPGIPVNGQRHGNDFYVGALVTFSCDSGYTLSDGEPLECEPNFQWSRALPSCEALCGGFIQGSSGTILSPGFPDFYPNNLNCTWIIETSHGKGVFFTFHTFHLESGHDYLLITENGSFTQPLRQLTGSRLPAPISAGLYGNFTAQVRFISDFSMSYEGFNITFSEYDLEPCEEPEVPAYSIRKGLQFGVGDTLTFSCFPGYRLEGTARITCLGGRRRLWSSPLPRCVAECGNSVTGTQGTLLSPNFPVNYNNNHECIYSIQTQPGKGIQLKARAFELSEGDVLKVYDGNNNSARLLGVFSHSEMMGVTLNSTSSSLWLDFITDAENTSKGFELHFSSFELIKCEDPGTPKFGYKVHDEGHFAGSSVSFSCDPGYSLRGSEELLCLSGERRTWDRPLPTCVAECGGTVRGEVSGQVLSPGYPAPYEHNLNCIWTIEAEAGCTIGLHFLVFDTEEVHDVLRIWDGPVESGVLLKELSGPALPKDLHSTFNSVVLQFSTDFFTSKQGFAIQFSVSTATSCNDPGIPQNGSRSGDSWEAGDSTVFQCDPGYALQGSAEISCVKIENRFFWQPSPPTCIAPCGGDLTGPSGVILSPNYPEPYPPGKECDWKVTVSPDYVIALVFNIFNLEPGYDFLHIYDGRDSLSPLIGSFYGSQLPGRIESSSNSLFLAFRSDASVSNAGFVIDYTENPRESCFDPGSIKNGTRVGSDLKLGSSVTYYCHGGYEVEGTSTLSCILGPDGKPVWNNPRPVCTAPCGGQYVGSDGVVLSPNYPQNYTSGQICLYFVTVPKDYVVFGQFAFFHTALNDVVEVHDGHSQHSRLLSSLSGSHTGESLPLATSNQVLIKFSAKGLAPAGGFHFVYQAVPRTSATQCSSVPEPRYGKRLGSDFSVGAIVRFECNSGYALQGSPEIECLPVPGALAQWNVSAPTCVVPCGGNLTERRGTILSPGFPEPYLNSLNCVWKIVVPEGAGIQIQVVSFVTEQNWDSLEVFDGADNTVTMLGSFSGTTVPALLNSTSNQLYLHFYSDISVSAAGFHLEYKTVGLSSCPEPAVPSNGVKTGERYLVNDVVSFQCEPGYALQGHAHISCMPGTVRRWNYPPPLCIAQCGGTVEEMEGVILSPGFPGNYPSNMDCSWKIALPVGFGAHIQFLNFSTEPNHDYIEIRNGPYETSRMMGRFSGSELPSSLLSTSHETTVYFHSDHSQNRPGFKLEYQAYELQECPDPEPFANGIVRGAGYNVGQSVTFECLPGYQLTGHPVLTCQHGTNRNWDHPLPKCEVPCGGNITSSNGTVYSPGFPSPYSSSQDCVWLITVPIGHGVRLNLSLLQTEPSGDFITIWDGPQQTAPRLGVFTRSMAKKTVQSSSNQVLLKFHRDAATGGIFAIAFSAYPLTKCPPPTILPNAEVVTENEEFNIGDIVRYRCLPGFTLVGNEILTCKLGTYLQFEGPPPICEVHCPTNELLTDSTGVILSQSYPGSYPQFQTCSWLVRVEPDYNISLTVEYFLSEKQYDEFEIFDGPSGQSPLLKALSGNYSAPLIVTSSSNSVYLRWSSDHAYNRKGFKIRYSAPYCSLPRAPLHGFILGQTSTQPGGSIHFGCNAGYRLVGHSMAICTRHPQGYHLWSEAIPLCQALSCGLPEAPKNGMVFGKEYTVGTKAVYSCSEGYHLQAGAEATAECLDTGLWSNRNVPPQCVPVTCPDVSSISVEHGRWRLIFETQYQFQAQLMLICDPGYYYTGQRVIRCQANGKWSLGDSTPTCRIISCGELPIPPNGHRIGTLSVYGATAIFSCNSGYTLVGSRVRECMANGLWSGSEVRCLAGHCGTPEPIVNGHINGENYSYRGSVVYQCNAGFRLIGMSVRICQQDHHWSGKTPFCVPITCGHPGNPVNGLTQGNQFNLNDVVKFVCNPGYMAEGAARSQCLASGQWSDMLPTCRIINCTDPGHQENSVRQVHASGPHRFSFGTTVSYRCNHGFYLLGTPVLSCQGDGTWDRPRPQCLLVSCGHPGSPPHSQMSGDSYTVGAVVRYSCIGKRTLVGNSTRMCGLDGHWTGSLPHCSGTSVGVCGDPGIPAHGIRLGDSFDPGTVMRFSCEAGHVLRGSSERTCQANGSWSGSQPECGVISCGNPGTPSNARVVFSDGLVFSSSIVYECREGYYATGLLSRHCSVNGTWTGSDPECLVINCGDPGIPANGLRLGNDFRYNKTVTYQCVPGYMMESHRVSVLSCTKDRTWNGTKPVCKALMCKPPPLIPNGKVVGSDFMWGSSVTYACLEGYQLSLPAVFTCEGNGSWTGELPQCFPVFCGDPGVPSRGRREDRGFSYRSSVSFSCHPPLVLVGSPRRFCQSDGTWSGTQPSCIDPTLTTCADPGVPQFGIQNNSQGYQVGSTVLFRCQKGYLLQGSTTRTCLPNLTWSGTPPDCVPHHCRQPETPTHANVGALDLPSMGYTLITPARRASPSRVAPSTAPARRMAAGQASRPSAWRSGPVGDPSTLPGSHRSPKP

SEQ ID NO: 65 - DNA, 1897 bp, Homo sapiens
  CDS (51)..(1784)
gaattccgcccgcccacggcggcggggaaatacctaggcatggaagtggcatgacagggctcgtgtccctgtcatattttccactctccacgaggtcctgcgcgcttcaatcctgcaggcagcccggtttggggatgtggtccttgctgctctgcgggttgtccatcgcccttccactgtctgtcacagcagatggatgcaaggacatttttatgaaaaatgagatactttcagcaagccagccttttgcttttaattgtacattccctcccataacatctggggaagtcagtgtaacatggtataaaaattctagcaaaatcccagtgtccaaaatcatacagtctagaattcaccaggacgagacttggattttgtttctccccatggaatggggggactcaggagtctaccaatgtgttataaagggtagagacagctgtcatagaatacatgtaaacctaactgtttttgaaaaacattggtgtgacacttccataggtggtttaccaaatttatcagatgagtacaagcaaatattacatcttggaaaagatgatagtctcacatgtcatctgcacttcccgaagagttgtgttttgggtccaataaagtggtataaagactgtaacgagattaaaggggagcggttcactgttttggaaaccaggcttttggtgagcaatgtctcggcagaggacagagggaactacgcgtgtcaagccatactgacacactcagggaagcagtacgaggttttaaatggcatcactgtgagcattagtaccactctgattgtggactgcaatgtaacagacaccaaggataatacaaatctacgatgctggagagtcaataacactttggtggatgattactatgatgaatccaaacgaatcagagaaggggtggaaacccatgtctcttttcgggaacataatttgtacacagtaaacatcaccttcttggaagtgaaaatggaagattatggccttcctttcatgtgccacgctggagtgtcaacagcatacattatattacagctcccagctccggattttcgagcttacttgataggagggcttatcgccttggtggctgtggctgtgtctgttgtgtacatatacaacatttttaagatcgacattgttctttggtatcgaagtgccttccattctacagagaccatagtagatgggaagctgtatgacgcctatgtcttataccccaagccccacaaggaaagccagaggcatgccgtggatgccctggtgttgaatatcctgcccgaggtgttggagagacaatgtggatataagttgtttatattcggcagagatgaattccctggacaagccgtggccaatgtcatcgatgaaaacgttaagctgtgcaggaggctgattgtcattgtggtccccgaatcgctgggctttggcctgttgaagaacctgtcagaagaacaaatcgcggtctacagtgccctgatccaggacgggatgaaggttattctcgttgagctggagaaaatcgaggactacacagtcatgccagagtcaattcagtacatcaaacagaagcatggtgccatccggtggcatggggacttcacggagcagtcacagtgtatgaagaccaagttttggaagacagtgagataccacatgccacccagaaggtgtcggccgtttcctccggtccagctgctgcagcacacaccttgctgccgcaccgcaggcccagaactaggctcaagaagaaagaagtgtactctcacgactggctaagacttgctggactgacacctatggctggaagatgacttgttttgctccatgtctcctcattcctacacctattttctgctgcaggatgaggctagggttagcattctaga

SEQ ID NO: 66 - protein, 578 aa, Homo sapiens
MTGLVSLSYFPLSTRSCALQSCRQPGLGMWSLLLCGLSIALPLSVTADGCKDIFMKNEILSASQPFAFNCTFPPITSGEVSVTWYKNSSKIPVSKIIQSRIHQDETWILFLPMEWGDSGVYQCVIKGRDSCHRIHVNLTVFEKHWCDTSIGGLPNLSDEYKQILHLGKDDSLTCHLHFPKSCVLGPIKWYKDCNEIKGERFTVLETRLLVSNVSAEDRGNYACQAILTHSGKQYEVLNGITVSISTTLIVDCNVTDTKDNTNLRCWRVNNTLVDDYYDESKRIREGVETHVSFREHNLYTVNITFLEVKMEDYGLPFMCHAGVSTAYIILQLPAPDFRAYLIGGLIALVAVAVSVVYIYNIFKIDIVLWYRSAFHSTETIVDGKLYDAYVLYPKPHKESQRHAVDALVLNILPEVLERQCGYKLFIFGRDEFPGQAVANVIDENVKLCRRLIVIVVPESLGFGLLKNLSEEQIAVYSALIQDGMKVILVELEKIEDYTVMPESIQYIKQKHGAIRWHGDFTEQSQCMKTKFWKTVRYHMPPRRCRPFPPVQLLQHTPCCRTAGPELGSRRKKCTLTTG

SEQ ID NO: 67 - DNA, 1802 bp, Homo sapiens
  CDS (471)..(1742)
gggatgtggtccttgctgctctgcgggttgtccatcgcccttccactgtctgtcacagcaggtacgttccgtgtgtcctccgttcccagaggctgcccgagtccacaggctcctggcctgtcattgggagcccccggggatcgcgtcagcccgagcgcggctccttcccctccccagaccgccaggcggagttccgcggaagaggaaacagagaaccaccagctccacgtgctcggatgctcagccctgaatgtcgcctttgagcttggagatggatgcaaggacatttttatgaaaaatgagatactttcagcaagccagccttttgcttttaattgtacattccctcccataacatctggggaagtcagtgtaacatggtataaaaattctagcaaaatcccagtgtccaaaatcatacagtctagaattcaccaggacgagacttggattttgtttctccccatggaatggggggactcaggagtctaccaatgtgttataaagactgtaacgagattaaaggggagcggttcactgttttggaaaccaggcttttggtgagcaatgtctcggcagaggacagagggaactacgcgtgtcaagccatactgacacactcagggaagcagtacgaggttttaaatggcatcactgtgagcattacagaaagagctggatatggaggaagtgtccctaaaatcatttatccaaaaaatcattcaattgaagtacagcttggtaccactctgattgtggactgcaatgtaacagacaccaaggataatacaaatctacgatgctggagagtcaataacactttggtggatgattactatgatgaatccaaacgaatcagagaaggggtggaaacccatgcctcttttcgggaacataatttgtacacagtaaacatcaccttcttggaagtgaaaatggaagattatggccttcctttcgtgtgccacgctggagtgtccacagcatacattatattacagctcccagctccggattttcgagcttacttgataggagggcttatcgccttggtggctgtggctgtgtctgttgtgtacatatacaacatttttaagatcgacattgttctttggtaccgaagtgccttccattctacagagaccatagtagatgggaagctgtatgacgcctatgtcttataccccaagccccacaaggaaagccagaggcatgccgtggatgccctggtgttgaatatcctgcccgaggtgttggagagacaatgtggatataagttgtttatattcggcagagatgaattccttggacaagccgtggccaatgtcatcgatgaaaacgttaagctgtgcaggaggctgattgtcattgtggtccccgaatcgctgggctttggcctgttgaagaacctgtcagaagaacaaatcgcggtctacagtgccctgatccaggacgggatgaaggttattctcattgagctggagaaaatcgaggactacacagtcatgccagagtcaattcagtacatcaaacagaagcatggtgccatccggtggcatggggacttcacggagcagtcacagtgtatgaagaccaagttttggaagacagtgagataccacatgccgcccagaaggtgtcggccgtttcctccggtccagctgccgcagcacacaccttgctaccgcaccgcaggcccagaactaggctcaagaagaaagaagtgtactctcacgactggctaagacttgctggactgacacctatggctggaagatgacttgttttgctccatgtctcct

SEQ ID NO: 68 - protein, 424 aa, Homo sapiens
MGGLRSLPMCYKDCNEIKGERFTVLETRLLVSNVSAEDRGNYACQAILTHSGKQYEVLNGITVSITERAGYGGSVPKIIYPKNHSIEVQLGTTLIVDCNVTDTKDNTNLRCWRVNNTLVDDYYDESKRIREGVETHASFREHNLYTVNITFLEVKMEDYGLPFVCHAGVSTAYIILQLPAPDFRAYLIGGLIALVAVAVSVVYIYNIFKIDIVLWYRSAFHSTETIVDGKLYDAYVLYPKPHKESQRHAVDALVLNILPEVLERQCGYKLFIFGRDEFLGQAVANVIDENVKLCRRLIVIVVPESLGFGLLKNLSEEQIAVYSALIQDGMKVILIELEKIEDYTVMPESIQYIKQKHGAIRWHGDFTEQSQCMKTKFWKTVRYHMPPRRCRPFPPVQLPQHTPCYRTAGPELGSRRKKCTLTTG

SEQ ID NO: 69 - DNA, 891 bp, Homo sapiens
  CDS (1)..(891)
ggatccgatggatgcaaggacatttttatgaaaaatgagatactttcagcaagccagccttttgcttttaattgtacattccctcccataacatctggggaagtcagtgtaacatggtataaaaattctagcaaaatcccagtgtccaaaatcatacagtctagaattcaccaggacgagacttggattttgtttctccccatggaatggggggactcaggagtctaccaatgtgttataaagggtagagacagctgtcatagaatacatgtaaacctaactgtttttgaaaaacattggtgtgacacttccataggtggtttaccaaatttatcagatgagtacaagcaaatattacatcttggaaaagatgatagtctcacatgtcatctgcacttcccgaagagttgtgttttgggtccaataaagtggtataaggactgtaacgagattaaaggggagcggttcactgttttggaaaccaggcttttggtgagcaatgtctcggcagaggacagagggaactacgcgtgtcaagccatactgacacactcagggaagcagtacgaggttttaaatggcatcactgtgagcattagtaccactctgattgtggactgcaatgtaacagacaccaaggataatacaaatctacgatgctggagagtcaataacactttggtggatgattactatgatgaatccaaacgaatcagagaaggggtggaaacccatgtctcttttcgggaacataatttgtacacagtaaacatcaccttcttggaagtgaaaatggaagattatggccttcctttcatgtgccacgctggagtgtccacagcatacattatattacagctcccagctccggattttcgagcttacctcgag

SEQ ID NO: 70 - protein, 297 aa, Homo sapiens
GSDGCKDIFMKNEILSASQPFAFNCTFPPITSGEVSVTWYKNSSKIPVSKIIQSRIHQDETWILFLPMEWGDSGVYQCVIKGRDSCHRIHVNLTVFEKHWCDTSIGGLPNLSDEYKQILHLGKDDSLTCHLHFPKSCVLGPIKWYKDCNEIKGERFTVLETRLLVSNVSAEDRGNYACQAILTHSGKQYEVLNGITVSISTTLIVDCNVTDTKDNTNLRCWRVNNTLVDDYYDESKRIREGVETHVSFREHNLYTVNITFLEVKMEDYGLPFMCHAGVSTAYIILQLPAPDFRAYLE

SEQ ID NO: 71 - DNA, 1769 bp, Homo sapiens
  CDS (45)..(476)
cgcccgcccacggcggcggggaaatacctaggcatggaagtggcatgacagggctcgtgtccctgtcatattttccactctccacgaggtcctgcgcgcttcaatcctgcaggcagcccggtttggggatgtggtccttgctgctctgcgggttgtccatcgcccttccactgtctgtcacagcagatggatgcaaggacatttttatgaaaaatgagatactttcagcaagccagccttttgcttttaattgtacattccctcccataacatctggggaagtcagtgtaacatggtataaaaattctagcaaaatcccagtgtccaaaatcatacagtctagaattcaccaggacgagacttggattttgtttctccccatggaatggggggactcaggagtctaccaatgtgttataaagactgtaacgagattaaaggggagcggttcactgttttggaaaccaggcttttggtgagcaatgtctcggcagaggacagagggaactacgcgtgtcaagccatactgacacactcagggaagcagtacgaggttttaaatggcatcactgtgagcattacagaaagagctggatatggaggaagtgtccctaaaatcatttatccaaaaaatcattcaattgaagtacagcttggtaccactctgattgtggactgcaatgtaacagacaccaaggataatacaaatctacgatgctggagagtcaataacactttggtggatgattactatgatgaatccaaacgaatcagagaaggggtggaaacccatgtctcttttcgggaacataatttgtacacagtaaacatcaccttcttggaagtgaaaatggaagattatggccttcctttcatgtgccacgctggagtgtccacagcatacattatattacagctcccagctccggattttcgagcttacttgataggagggcttatcgccttggtggctgtggctgtgtctgttgtgtacatatacaacatttttaagatcgacattgttctttggtatcgaagtgccttccattctacagagaccatagtagatgggaagctgtatgacgcctatgtcttataccccaagccccacaaggaaagccagaggcatgccgtggatgccctggtgttgaatatcctgcccgaggtgttggagagacaatgtggatataagttgtttatattcggcagagatgaattccctggacaagccgtggccaatgtcatcgatgaaaacgttaagctgtgcaggaggctgattgtcattgtggtccccgaatcgctgggctttggcctgttgaagaacctgtcagaagaacaaatcgcggtctacagtgccctgatccaggacgggatgaaggttattctcattgagctggagaaaatcgaggactacacagtcatgccagagtcaattcagtacatcaaacagaagcatggtgccatccggtggcatggggacttcacggagcagtcacagtgtatgaagaccaagttttggaagacagtgagataccacatgccgcccagaaggtgtcggccgtttctccggtccacgtgccgcagcacacacctctgtaccgcaccgcaggcccagaactaggctcaagaagaaagaagtgtactctcacgactggctaagacttgctggactgacacctatggctggaagatgacttgttttgctccatgtctcctcattcctacacctattttctgctgcaggatgaggctagggttagcattctaga

SEQ ID NO: 72 - protein, 144 aa, Homo sapiens
MTGLVSLSYFPLSTRSCALQSCRQPGLGMWSLLLCGLSIALPLSVTADGCKDIFMKNEILSASQPFAFNCTFPPITSGEVSVTWYKNSSKIPVSKIIQSRIHQDETWILFLPMEWGDSGVYQCVIKTVTRLKGSGSLFWKPGFW

SEQ ID NO: 73 - DNA, 1769 bp, Homo sapiens; identical to SEQ ID NO: 71
  CDS (386)..(1618)

SEQ ID NO: 74 - protein, 411 aa, Homo sapiens
MGGLRSLPMCYKDCNEIKGERFTVLETRLLVSNVSAEDRGNYACQAILTHSGKQYEVLNGITVSITERAGYGGSVPKIIYPKNHSIEVQLGTTLIVDCNVTDTKDNTNLRCWRVNNTLVDDYYDESKRIREGVETHVSFREHNLYTVNITFLEVKMEDYGLPFMCHAGVSTAYIILQLPAPDFRAYLIGGLIALVAVAVSVVYIYNIFKIDIVLWYRSAFHSTETIVDGKLYDAYVLYPKPHKESQRHAVDALVLNILPEVLERQCGYKLFIFGRDEFPGQAVANVIDENVKLCRRLIVIVVPESLGFGLLKNLSEEQIAVYSALIQDGMKVILIELEKIEDYTVMPESIQYIKQKHGAIRWHGDFTEQSQCMKTKFWKTVRYHMPPRRCRPFLRSTCRSTHLCTAPQAQN

SEQ ID NO: 75 - DNA, 1827 bp, Homo sapiens
  CDS (65)..(1714)
gtcatattttccactctccacgaggtcctgcgcgcttcaatcctgcaggcagcccggtttggggatgtggtccttgctgctctgcgggttgtccatcgcccttccactgtctgtcacagcagatggatgcaaggacatttttatgaaaaatgagatactttcagcaagccagccttttgcttttaattgtacattccctcccataacatctggggaagtcagtgtaacatggtataaaaattctagcaaaatcccagtgtccaaaatcatacagtctagaattcaccaggacgagacttggattttgtttctccccatggaatggggggactcaggagtctaccaatgtgttataaagggtagagacagctgtcatagaatacatgtaaacctaactgtttttgaaaaacattggtgtgacacttccataggtggtttaccaaatttatcagatgagtacaagcaaatattacatcttggaaaagatgatagtctcacatgtcatctgcacttcccgaagagttgtgttttgggtccaataaagtggtataaagactgtaacgagattaaaggggagcggttcactgttttggaaaccaggcttttggtgagcaatgtctcggcagaggacagagggaactacgcgtgtcaagccatactgacacactcagggaagcagtacgaggttttaaatggcatcactgtgagcattagtaccactctgattgtggactgcaatgtaacagacaccaaggataatacaaatctacgatgctggagagtcaataacactttggtggatgattactatgatgaatccaaacgaatcagagaaggggtggaaacccatgtctcttttcgggaacataatttgtacacagtaaacatcaccttcttggaagtgaaaatggaagattatggccttcctttcatgtgccacgctggagtgtcaacagcatacattatattacagctcccagctccggattttcgagcttacttgataggagggcttatcgccttggtggctgtggctgtgtctgttgtgtacatatacaacatttttaagatcgacattgttctttggtatcgaagtgccttccattctacagagaccatagtagatgggaagctgtatgacgcctatgtcttataccccaagccccacaaggaaagccagaggcatgccgtggatgccctggtgttgaatatcctgcccgaggtgttggagagacaatgtggatataagttgtttatattcggcagagatgaattccctggacaagccgtggccaatgtcatcgatgaaaacgttaagctgtgcaggaggctgattgtcattgtggtccccgaatcgctgggctttggcctgttgaagaacctgtcagaagaacaaatcgcggtctacagtgccctgatccaggacgggatgaaggttattctcgttgagctggagaaaatcgaggactacacagtcatgccagagtcaattcagtacatcaaacagaagcatggtgccatccggtggcatggggacttcacggagcagtcacagtgtatgaagaccaagttttggaagacagtgagataccacatgccacccagaaggtgtcggccgtttcctccggtccagctgctgcagcacacaccttgctgccgcaccgcaggcccagaactaggctcaagaagaaagaagtgtactctcacgactggctaagacttgctggactgacacctatggctggaagatgacttgttttgctccatgtctcctcattcctacacctattttctgctgcaggatgaggctagggttagcattctaga

SEQ ID NO: 76 - protein, 550 aa, Homo sapiens
MWSLLLCGLSIALPLSVTADGCKDIFMKNEILSASQPFAFNCTFPPITSGEVSVTWYKNSSKIPVSKIIQSRIHQDETWILFLPMEWGDSGVYQCVIKGRDSCHRIHVNLTVFEKHWCDTSIGGLPNLSDEYKQILHLGKDDSLTCHLHFPKSCVLGPIKWYKDCNEIKGERFTVLETRLLVSNVSAEDRGNYACQAILTHSGKQYEVLNGITVSISTTLIVDCNVTDTKDNTNLRCWRVNNTLVDDYYDESKRIREGVETHVSFREHNLYTVNITFLEVKMEDYGLPFMCHAGVSTAYIILQLPAPDFRAYLIGGLIALVAVAVSVVYIYNIFKIDIVLWYRSAFHSTETIVDGKLYDAYVLYPKPHKESQRHAVDALVLNILPEVLERQCGYKLFIFGRDEFPGQAVANVIDENVKLCRRLIVIVVPESLGFGLLKNLSEEQIAVYSALIQDGMKVILVELEKIEDYTVMPESIQYIKQKHGAIRWHGDFTEQSQCMKTKFWKTVRYHMPPRRCRPFPPVQLLQHTPCCRTAGPELGSRRKKCTLTTG

SEQ ID NO: 77 - DNA, 1829 bp, Homo sapiens
  CDS (42)..(1766)
ggtcctgcgcgcttcaatcctgcaggcagcccggtttggggatgtggtccttgcagctctgcgggttgtccatcgcccttccactgtctgtcacagcagatggatgcaaggacatttttatgaaaaatgagatactttcagcaagccagccttttgcttttaattgtacattccctcccataacatctggggaggtcagtgtaacatggtataaaaattctagcaaaatcccagtgtccaaaatcatacagtctagaattcaccaggacgagacttggattttgtttctccccatggaatggggggactcaggagtctaccaatgtgttataaagggtagagacagctgtcatagaatacatgtaaacctaactgtttttgaaaaacattggtgtgacacttccataggtggtttaccaaatttatcagatgagtacaagcaaatattacatcttggaaaagatgatagtctcacatgtcatctgcacttcccgaagagttgtgttttgggtccaataaagtggtataaggactgtaacgagattaaaggggagcggttcactgttttggaaaccaggcttttggtgagcaatgtctcggcagaggacagagggaactacgcgtgtcaagccatactgacacactcagggaagcagtacgaggttttaaatggcatcactgtgagcattacagaaagagctggatatggaggaagtgtccctaaaatcatttatccaaaaaatcattcaattgaagtacagcttggtaccactctgattgtggactgcaatgtaacagacaccaaggataatacaaatctacgatgctggagagtcaataacactttggtggatgattactatgatgaatccaaacgaatcagagaaggggtggaaacccatgtctcttttcgggaacataatttgtacacagtaaacatcaccttcttggaagtgaaaatggaagattatggccttcctttcatgtgccacgctggagtgtccacagcatacattatattacagctcccagctccggattttcgagcttacttgataggagggcttatcgccttggtggctgtggctgtgtctgttgtgtacatatacaacatttttaagatcgacattgttctttggtaccgaagtgccttccattctacagagaccatagtagatgggaagctgtatgacgcctatgtcttataccccaagccccacaaggaaagccagaggcatgccgtggatgccctggtgttgaatatcctgcccgaggtgttggagagacaatgtggatataagttgtttatattcggcagagatgaattccctggacaagccgtggccaatgtcatcgatgaaaacgttaagctgtgcaggaggctgattgtcattgtggtccccgaatcgctgggctttggcctgttgaagaacctgtcagaagaacaaatcgcggtctacagtgccctgatccaggacgggatgaaggttattctcattgagctggagaaaatcgaggactacacagtcatgccagagtcaattcagtacatcaaacagaagcatggtgccatccggtggcatggggacttcacggagcagtcacagtgtatgaagaccaagttttggaagacagtgagataccacatgccgcccagaaggtgtcggccgtttcctccggtccagctgccgcagcacacaccttgctaccgcaccgcaggcccagaactaggctcaagaagaaagaagtgtactctcacgactggctaagacttgctggactgacacctatggctggaagatgacttgttttgctccatgtctcctcat

SEQ ID NO: 78 - protein, 575 aa, Homo sapiens
MWSLQLCGLSIALPLSVTADGCKDIFMKNEILSASQPFAFNCTFPPITSGEVSVTWYKNSSKIPVSKIIQSRIHQDETWILFLPMEWGDSGVYQCVIKGRDSCHRIHVNLTVFEKHWCDTSIGGLPNLSDEYKQILHLGKDDSLTCHLHFPKSCVLGPIKWYKDCNEIKGERFTVLETRLLVSNVSAEDRGNYACQAILTHSGKQYEVLNGITVSITERAGYGGSVPKIIYPKNHSIEVQLGTTLIVDCNVTDTKDNTNLRCWRVNNTLVDDYYDESKRIREGVETHVSFREHNLYTVNITFLEVKMEDYGLPFMCHAGVSTAYIILQLPAPDFRAYLIGGLIALVAVAVSVVYIYNIFKIDIVLWYRSAFHSTETIVDGKLYDAYVLYPKPHKESQRHAVDALVLNILPEVLERQCGYKLFIFGRDEFPGQAVANVIDENVKLCRRLIVIVVPESLGFGLLKNLSEEQIAVYSALIQDGMKVILIELEKIEDYTVMPESIQYIKQKHGAIRWHGDFTEQSQCMKTKFWKTVRYHMPPRRCRPFPPVQLPQHTPCYRTAGPELGSRRKKCTLTTG

SEQ ID NO: 79 - DNA, 1897 bp, Homo sapiens
  CDS (51)..(1784)
gaattccgcccgcccacggcggcggggaaatacctaggcatggaagtggcatgacagggctcgtgtccctgtcatattttccactctccacgaggtcctgcgcgcttcaatcctgcaggcagcccggtttggggatgtggtccttgctgctctgcgggttgtccatcgcccttccactgtctgtcacagcagatggatgcaaggacatttttatgaaaaatgagatactttcagcaagccagccttttgcttttaattgtacattccctcccataacatctggggaagtcagtgtaacatggtataaaaattctagcaaaatcccagtgtccaaaatcatacagtctagaattcaccaggacgagacttggattttgtttctccccatggaatggggggactcaggagtctaccaatgtgttataaagggtagagacagctgtcatagaatacatgtaaacctaactgtttttgaaaaacattggtgtgacacttccataggtggtttaccaaatttatcagatgagtacaagcaaatattacatcttggaaaagatgatagtctcacatgtcatctgcacttcccgaagagttgtgttttgggtccaataaagtggtataaagactgtaacgagattaaaggggagcggttcactgttttggaaaccaggcttttggtgagcaatgtctcggcagaggacagagggaactacgcgtgtcaagccatactgacacactcagggaagcagtacgaggttttaaatggcatcactgtgagcattagtaccactctgattgtggactgcaatgtaacagacaccaaggataatacaaatctacgatgctggagagtcaataacactttggtggatgattactatgatgaatccaaacgaatcagagaaggggtggaaacccatgtctcttttcgggaacataatttgtacacagtaaacatcaccttcttggaagtgaaaatggaagattatggccttcctttcatgtgccacgctggagtgtcaacagcatacattatattacagctcccagctccggattttcgagcttacttgataggagggcttatcgccttggtggctgtggctgtgtctgttgtgtacatatacaacatttttaagatcgacattgttctttggtaccgaagtgccttccattctacagagaccatagtagatgggaagctgtatgacgcctatgtcttataccccaagccccacaaggaaagccagaggcatgccgtggatgccctggtgttgaatatcctgcccgaggtgttggagagacaatgtggatataagttgtttatattcggcagagatgaattccctggacaagccgtggccaatgtcatcgatgaaaacgttaagctgtgcaggaggctgattgtcattgtggtccccgaatcgctgggctttggcctgttgaagaacctgtcagaagaacaaatcgcggtctacagtgccctgatccaggacgggatgaaggttattctcgttgagctggagaaaatcgaggactacacagtcatgccagagtcaattcagtacatcaaacagaagcatggtgccatccggtggcatggggacttcacggagcagtcacagtgtatgaagaccaagttttggaagacagtgagataccacatgccacccagaaggtgtcggccgtttcctccggtccagctgctgcagcacacaccttgctgccgcaccgcaggcccagaactaggctcaagaagaaagaagtgtactctcacgactggctaagacttgctggactgacacctatggctggaagatgacttgttttgctccatgtctcctcattcctacacctattttctgctgcaggatgaggctagggttagcattctaga

SEQ ID NO: 80 - protein, 578 aa, Homo sapiens; identical to SEQ ID NO: 66

SEQ ID NO: 81 - DNA, 2268 bp, Homo sapiens
  CDS (206)..(1564)
ctctgactgctcctattgagctgtctgctcgctgtgcccgctgtgcctgctgtgcccgcgctgtcgccgctgctaccgcgtctactggacgcgggagacgccagcgagctggtgattggagccctgcggagagctcaagcgcccagctctgcccgaggagcccaggctgccccgtgagtcccatagttgctgcaggagtggagccatgagctgcgtcctgggtggtgtcatccccttggggctgctgttcctggtctgcggatcccaaggctacctcctgcccaacgtcactctcttagaggagctgctcagcaaataccagcacaacgagtctcactcccgggtccgcagagccatccccagggaggacaaggaggagatcctcatgctgcacaacaagcttcggggccaggtgcagcctcaggcctccaacatggagtacatgacctgggatgacgaactggagaagtctgctgcagcgtgggccagtcagtgcatctgggagcacgggcccaccagtctgctggtgtccatcgggcagaacctgggcgctcactggggcagaatagtttgggtcaccaccaacaagatcggttgtgctgtgaacacctgccggaagatgactgtctggggagaagtttgggagaacgcggtctactttgtctgcaattattctccaaaggggaactggattggagaagccccctacaagaatggccggccctgctctgagtgcccacccagctatggaggcagctgcaggaacaacttgtgttaccgagaagaaacctacactccaaaacctgaaacggacgagatgaatgaggtggaaacggctcccattcctgaagaaaaccatgtttggctccaaccgagggtgatgagacccaccaagcccaagaaaacctctgcggtcaactacatgacccaagtcgtcagatgtgacaccaagatgaaggacaggtgcaaagggtccacgtgtaacaggtaccagtgcccagcaggctgcctgaaccacaaggcgaagatctttggaagtctgttctatgaaagctcgtctagcatatgccgcgccgccatccactacgggatcctggatgacaagggaggcctggtggatatcaccaggaacgggaaggtccccttcttcgtgaagtctgagagacacggcgtgcagtccctcagcaaatacaaaccttccagctcattcatggtgtcaaaagtgaaagtgcaggatttggactgctacacgaccgttgctcagctgtgcccgtttgaaaagccagcaactcactgcccaagaatccattgtccggcacactgcaaagacgaaccttcctactgggctccggtgtttggaaccaacatctatgcagatacctcaagcatctgcaagacagccgtgcacgcgggagtcatcagcaacgagagtgggggtgacgtggacgtgatgcccgtggataaaaagaagacctacgtgggctcgctcaggaatggagttcagtctgaaagcctggggactcctcgggatggaaaggccttccggatctttgctgtcaggcagtgaatttccagcaccaggggagaaggggcgtcttcaggagggcttcggggttttgcttttatttttattttgtcattgcggggtatatggagagtcaggaaacttcctttgactgatgttcagtgtccatcactttgtggcctgtgggtgaggtgacatctcatcccctcactgaagcaacagcatcccaaggtgctcagccggactccctggtgcctgatcctgctggggcccgggggtctccatctggacgtcctctctcctttagagatctgagctgtctcttaaaggggacagttgcccaaaatgttccttgctatgtgttcttctgttggtggaggaagttgatttcaacctccctgccaaaagaacaaaccatttgaagctcacaattgtgaagcattcacggcgtcggaagaggccttttgagcaagcgccaatgagtttcaggaatgaagtagaaggtagttatttaaaaataaaaaacacagtccgtccctaccaatagaggaaaatggttttaatgtttgctggtcagacagacaaatgggctagagtaagagggctgcgggtatgagagaccccggctccgccctggcacgtgtccttgctggcggcccgccacaggcccccttcaatggccgcattcaggatggctctatacacagcagtgctggtttatgtaaagttcagcagtcacttca

SEQ ID NO: 82 - protein, 453 aa, Homo sapiens
MSCVLGGVIPLGLLFLVCGSQGYLLPNVTLLEELLSKYQHNESHSRVRRAIPREDKEEILMLHNKLRGQVQPQASNMEYMTWDDELEKSAAAWASQCIWEHGPTSLLVSIGQNLGAHWGRIVWVTTNKIGCAVNTCRKMTVWGEVWENAVYFVCNYSPKGNWIGEAPYKNGRPCSECPPSYGGSCRNNLCYREETYTPKPETDEMNEVETAPIPEENHVWLQPRVMRPTKPKKTSAVNYMTQVVRCDTKMKDRCKGSTCNRYQCPAGCLNHKAKIFGSLFYESSSSICRAAIHYGILDDKGGLVDITRNGKVPFFVKSERHGVQSLSKYKPSSSFMVSKVKVQDLDCYTTVAQLCPFEKPATHCPRIHCPAHCKDEPSYWAPVFGTNIYADTSSICKTAVHAGVISNESGGDVDVMPVDKKKTYVGSLRNGVQSESLGTPRDGKAFRIFAVRQ

SEQ ID NO: 83 - DNA, 2280 bp, Homo sapiens
  CDS (206)..(1576)
ctctgactgctcctattgagctgtctgctcgctgtgcccgctgtgcctgctgtgcccgcgctgtcgccgctgctaccgcgtctactggacgcgggagacgccagcgagctggtgattggagccctgcggagagctcaagcgcccagctctgcccgaggagcccaggctgccccgtgagtcccatagttgctgcaggagtggagccatgagctgcgtcctgggtggtgtcatccccttggggctgctgttcctggtctgcggatcccaaggctacctcctgcccaacgtcactctcttagaggagctgctcagcaaataccagcacaacgagtctcactcccgggtccgcagagccatccccagggaggacaaggaggagatcctcatgctgcacaacaagcttcggggccaggtgcagcctcaggcctccaacatggagtacatgtatcgctctccggggttccatgtgcagtcctggtatgacgaggtgaaggactacacctacccctacccgagcgagtgcaacccctggtgtccagagaggtgctcggggcctatgtgcacgcactacacacagatagtttgggccaccaccaacaagatcggttgtgctgtgaacacctgccggaagatgactgtctggggagaagtttgggagaacgcggtctactttgtctgcaattattctccaaaggggaactggattggagaagccccctacaagaatggccggccctgctctgagtgcccacccagctatggaggcagctgcaggaacaacttgtgttaccgagaagaaacctacactccaaaacctgaaacggacgagatgaatgaggtggaaacggctcccattcctgaagaaaaccatgtttggctccaaccgagggtgatgagacccaccaagcccaagaaaacctctgcggtcaactacatgacccaagtcgtcagatgtgacaccaagatgaaggacaggtgcaaagggtccacgtgtaacaggtaccagtgcccagcaggctgcctgaaccacaaggcgaagatctttggaactctgttctatgaaagctcgtctagcatatgccgcgccgccatccactacgggatcctggatgacaagggaggcctggtggatatcaccaggaacgggaaggtccccttcttcgtgaagtctgagagacacggcgtgcagtccctcagcaaatacaaaccttccagctcattcatggtgtcaaaagtgaaagtgcaggatttggactgctacacgaccgttgctcagctgtgcccgtttgaaaagccagcaactcactgcccaagaatccattgtccggcacactgcaaagacgaaccttcctactgggctccggtgtttggaaccaacatctatgcagatacctcaagcatctgcaagacagccgtgcacgcgggagtcatcagcaacgagagtgggggtgacgtggacgtgatgcccgtggataaaaagaagacctacgtgggctcgctcaggaatggagttcagtctgaaagcctggggactcctcgggatggaaaggccttccggatctttgctgtcaggcagtgaatttccagcaccaggggagaaggggcgtcttcaggagggcttcggggttttgcttttatttttattttgtcattgcggggtatatggagagtcaggaaacttcctttgactgatgttcagtgtccatcactttgtggcctgtgggtgaggtgacatctcatcccctcactgaagcaacagcatcccaaggtgctcagccggactccctggtgcctgatcctgctggggcccgggggtctccatctggacgtcctctctcctttagagatctgagctgtctcttaaaggggacagttgcccaaaatgttccttgctatgtgttcttctgttggtggaggaagttgatttcaacctccctgccaaaagaacaaaccatttgaagctcacaattgtgaagcattcacggcgtcggaagaggccttttgagcaagcgccaatgagtttcaggaatgaagtagaaggtagttatttaaaaataaaaaacacagtccgtccctaccaatagaggaaaatggttttaatgtttgctggtcagacagacaaatgggctagagtaagagggctgcgggtatgagagaccccggctccgccctggcacgtgtccttgctggcggcccgccacaggcccccttcaatggccgcattcaggatggctctatacacagcagtgctggtttatgtaaagttcagcagtcacttca

SEQ ID NO: 84 - protein, 457 aa, Homo sapiens
MSCVLGGVIPLGLLFLVCGSQGYLLPNVTLLEELLSKYQHNESHSRVRRAIPREDKEEILMLHNKLRGQVQPQASNMEYMYRSPGFHVQSWYDEVKDYTYPYPSECNPWCPERCSGPMCTHYTQIVWATTNKIGCAVNTCRKMTVWGEVWENAVYFVCNYSPKGNWIGEAPYKNGRPCSECPPSYGGSCRNNLCYREETYTPKPETDEMNEVETAPIPEENHVWLQPRVMRPTKPKKTSAVNYMTQVVRCDTKMKDRCKGSTCNRYQCPAGCLNHKAKIFGTLFYESSSSICRAAIHYGILDDKGGLVDITRNGKVPFFVKSERHGVQSLSKYKPSSSFMVSKVKVQDLDCYTTVAQLCPFEKPATHCPRIHCPAHCKDEPSYWAPVFGTNIYADTSSICKTAVHAGVISNESGGDVDVMPVDKKKTYVGSLRNGVQSESLGTPRDGKAFRIFAVRQ

SEQ ID NO: 85 - DNA, 2106 bp, Homo sapiens
  CDS (206)..(1402)
ctctgactgctcctattgagctgtctgctcgctgtgcccgctgtgcctgctgtgcccgcgctgtcgccgctgctaccgcgtctactggacgcgggagacgccagcgagctggtgattggagccctgcggagagctcaagcgcccagctctgcccgaggagcccaggctgccccgtgagtcccatagttgctgcaggagtggagccatgagctgcgtcctgggtggtgtcatccccttggggctgctgttcctggtctgcggatcccaaggctacctcctgcccaacgtcactctcttagaggagctgctcagcaaataccagcacaacgagtctcactcccgggtccgcagagccatccccagggaggacaaggaggagatcctcatgctgcacaacaagcttcggggccaggtgcagcctcaggcctccaacatggagtacatgacctgggatgacgaactggagaagtctgctgcagcgtgggccagtcagtgcatctgggagcacgggcccaccagtctgctggtgtccatcgggcagaacctgggcgctcactggggcagggggaactggattggagaagccccctacaagaatggccggccctgctctgagtgcccacccagctatggaggcagctgcaggaacaacttgtgttaccgagaagaaacctacactccaaaacctgaaacggacgagatgaatgaggtggaaacggctcccattcctgaagaaaaccatgtttggctccaaccgagggtgatgagacccaccaagcccaagaaaacctctgcggtcaactacatgacccaagtcgtcagatgtgacaccaagatgaaggacaggtgcaaagggtccacgtgtaacaggtaccagtgcccagcaggctgcctgaaccacaaggcgaagatctttggaagtctgttctatgaaagctcgtctagcatatgccgcgccgccatccactacgggatcctggatgacaagggaggcctggtggatatcaccaggaacgggaaggtccccttcttcgtgaagtctgagagacacggcgtgcagtccctcgtgcaggatttggactgctacacgaccgttgctcagctgtgcccgtttgaaaagccagcaactcactgcccaagaatccattgtccggcacactgcaaagacgaaccttcctactgggctccggtgtttggaaccaacatctatgcagatacctcaagcatctgcaagacagccgtgcacgcgggagtcatcagcaacgagagtgggggtgacgtggacgtgatgcccgtggataaaaagaagacctacgtgggctcgctcaggaatggagttcagtctgaaagcctggggactcctcgggatggaaaggccttccggatctttgctgtcaggcagtgaatttccagcaccaggggagaaggggcgtcttcaggagggcttcggggttttgcttttatttttattttgtcattgcggggtatatggagagtcaggaaacttcctttgactgatgttcagtgtccatcactttgtggcctgtgggtgaggtgacatctcatcccctcactgaagcaacagcatcccaaggtgctcagccggactccctggtgcctgatcctgctggggcccgggggtctccatctggacgtcctctctcctttagagatctgagctgtctcttaaaggggacagttgcccaaaatgttccttgctatgtgttcttctgttggtggaggaagttgatttcaacctccctgccaaaagaacaaaccatttgaagctcacaattgtgaagcattcacggcgtcggaagaggccttttgagcaagcgccaatgagtttcaggaatgaagtagaaggtagttatttaaaaataaaaaacacagtccgtccctaccaatagaggaaaatggttttaatgtttgctggtcagacagacaaatgggctagagtaagagggctgcgggtatgagagaccccggctccgccctggcacgtgtccttgctggcggcccgccacaggcccccttcaatggccgcattcaggatggctctatacacagcagtgctggtttatgtaaagttcagcagtcacttca

SEQ ID NO: 86 - protein, 399 aa, Homo sapiens
MSCVLGGVIPLGLLFLVCGSQGYLLPNVTLLEELLSKYQHNESHSRVRRAIPREDKEEILMLHNKLRGQVQPQASNMEYMTWDDELEKSAAAWASQCIWEHGPTSLLVSIGQNLGAHWGRGNWIGEAPYKNGRPCSECPPSYGGSCRNNLCYREETYTPKPETDEMNEVETAPIPEENHVWLQPRVMRPTKPKKTSAVNYMTQVVRCDTKMKDRCKGSTCNRYQCPAGCLNHKAKIFGSLFYESSSSICRAAIHYGILDDKGGLVDITRNGKVPFFVKSERHGVQSLVQDLDCYTTVAQLCPFEKPATHCPRIHCPAHCKDEPSYWAPVFGTNIYADTSSICKTAVHAGVISNESGGDVDVMPVDKKKTYVGSLRNGVQSESLGTPRDGKAFRIFAVRQ

SEQ ID NO: 87 - DNA, 2305 bp, Homo sapiens
  CDS (453)..(1601)
ctctgactgctcctattgagctgtctgctcgctgtgcccgctgtgcctgctgtgcccgcgctgtcgccgctgctaccgcgtctactggacgcgggagacgccagcgagctggtgattggagccctgcggagagctcaagcgcccagctctgcccgaggagcccaggctgccccgtgagtcccatagttgctacaggagtggagccatgagctgcgtcctgggtggtgtcatccccttggggctgctgttcctggtccgcggatcccaaggctacctcctgcccaacgtcactctcttagaggagctgctcagcaaataccagcacaacgagtctcactcccgggtccgcagagccatccccagggaggacaaggaggagatcctcatgctgcacaacaagcttcggggccaggtgcagcctcaggcctccaacatggagtacatgacctgggatgacgaactggggcaggtatcgctctccggggttccatgtgcagtcctggtatgacgaggtgaaggactacacctacccctacccgagcgagtgcaacccctggtgtccagagaggtgctcggggcctatgtgcacgcactacacacagatagtttgggccaccaccaacaagatcggttgtgctgtgaacacctgccggaagatgactgtctggggagaagtttgggagaacgcggtctactttgtctgcaattattctccaaaggggaactggattggagaagccccctacaagaatggccggccctgctctgagtgcccacccagctatggaggcagctgcaggaacaacttgtgttaccgagaagaaacctacactccaaaacctgaaacggacgagatgaatgaggtggaaacggctcccattcctgaagaaaaccatgtttggctccaaccgagggtgatgagacccaccaagcccaagaaaacctctgcggtcaactacatgacccaagtcgtcagatgtgacaccaagatgaaggacaggtgcaaagggtccacgtgtaacaggtaccagtgcccagcaggctgcctgaaccacaaggcgaagatctttggaactctgttctatgaaagctcgtctagcatatgccgcgccgccatccactacgggatcctggatgacaagggaggcctggtggatatcaccaggaacgggaaggtccccttcttcgtgaagtctgagagacacggcgtgcagtccctcagcaaatacaaaccttccagctcattcatggtgtcaaaagtgaaagtgcaggatttggactgctacacgaccgttgctcagctgtgcccgtttgaaaagccagcaactcactgcccaagaatccattgtccggcacactgcaaagacgaaccttcctactgggctccggtgtttggaaccaacatctatgcagatacctcaagcatctgcaagacagccgtgcacgcgggagtcatcagcaacgagagtgggggtgacgtggacgtgatgcccgtggataaaaagaagacctacgtgggctcgctcaggaatggagttcagtctgaaagcctggggactcctcgggatggaaaggccttccggatctttgctgtcaggcagtgaatttccagcaccaggggagaaggggcgtcttcaggagggcttcggggttttgcttttatttttattttgtcattgcggggtatatggagagtcaggaaacttcctttgactgatgttcagtgtccatcactttgtggcctgtgggtgaggtgacatctcatcccctcactgaagcaacagcatcccaaggtgctcagccggactccctggtgcctgatcctgctggggcccgggggtctccatctggacgtcctctctcctttagagatctgagctgtctcttaaaggggacagttgcccaaaatgttccttgctatgtgttcttctgttggtggaggaagttgatttcaacctccctgccaaaagaacaaaccatttgaagctcacaattgtgaagcattcacggcgtcggaagaggccttttgagcaagcgccaatgagtttcaggaatgaagtagaaggtagttatttaaaaataaaaaacacagtccgtccctaccaatagaggaaaatggttttaatgtttgctggtcagacagacaaatgggctagagtaagagggctgcgggtatgagagaccccggctccgccctggcacgtgtccttgctggcggcccgccacaggcccccttcaatggccgcattcaggatggctctatacacagcagtgctggtttatgtaaagttcagcagtcacttca

SEQ ID NO: 88 - protein, 383 aa, Homo sapiens
MTNWGRYRSPGFHVQSWYDEVKDYTYPYPSECNPWCPERCSGPMCTHYTQIVWATTNKIGCAVNTCRKMTVWGEVWENAVYFVCNYSPKGNWIGEAPYKNGRPCSECPPSYGGSCRNNLCYREETYTPKPETDEMNEVETAPIPEENHVWLQPRVMRPTKPKKTSAVNYMTQVVRCDTKMKDRCKGSTCNRYQCPAGCLNHKAKIFGTLFYESSSSICRAAIHYGILDDKGGLVDITRNGKVPFFVKSERHGVQSLSKYKPSSSFMVSKVKVQDLDCYTTVAQLCPFEKPATHCPRIHCPAHCKDEPSYWAPVFGTNIYADTSSICKTAVHAGVISNESGGDVDVMPVDKKKTYVGSLRNGVQSESLGTPRDGKAFRIFAVRQ

SEQ ID NO: 89 - DNA, 1669 bp, Homo sapiens
  CDS (205)..(1635)
tctgactgctcctattgagctgtctgctcgctgtgcccgctgtgcctgctgtgcccgcgctgtcgccgctgctaccgcgtctactggacgcgggagacgccagcgagctggtgattggagccctgcggagagctcaagcgcccagctctgcccgaggagcccaggctgccccgtgagtcccatagttgctgcaggagtggagccatgagctgcgtcctgggtggtgtcatccccttggggctgctgttcctggtctgcggatcccaaggctacctcctgcccaacgtcactctcttagaggagctgctcagcaaataccagcacaacgagtctcactcccgggtccgcagagccatccccagggaggacaaggaggagatcctcatgctgcacaacaagcttcggggccaggtgcagcctcaggcctccaacatggagtacatgacctgggatgacgaactggagaagtctgctgcagcgtgggccagtcagtgcatctgggagcacgggcccaccggtctgctggtgtccatcgggcagaacctgggcgctcactggggcaggtatcgctctccggggttccatgtgcagtcctggtatgacgaggtgaaggactacacctacccctacccgagcgagtgcaacccctggtgtccagagaggtgctcggggcctatgtgcacgcactacacacagatagtttgggccaccaccaacaagatcggttgtgctgtgaacacctgccggaagatgactgtctggggagaagtttgggagaacgcggtctactttgtctgcaattattctccaaaggggaactggattggagaagccccctacaagaatggccggccctgctctcagtgcccacccagctatggaggcagctgcaggaacaacttgtgttaccgagaagaaacctacactccaaaacctgaaacggacgagatgaatgaggtggaaacggctcccattcctgaagaaaaccatgtttggctccaaccgagggtgatgagacccaccaagcccaagaaaacctcttcggtcaactacatgacccaagtcgtcttatgtgacaccaagatgaaggacaggtgcaaagggtccacgtgtaacaggtaccagtgcccagcaggctgcctgaaccacaaggcgaagatctttggaactctgttctatgaaagctcgtctagcatatgccgcgccgccatccactacgggatcctggatgacaagggaggcctggtggatatcaccaggaacgggaaggtccccttcttcgtgaagtctgagagacacggcgtgcagtccctcagcaaatacaaaccttccagctcattcatggtgtcaaaagtgaaagtgcaggatttggactgctacacgaccgttgctcagctgtgcccgtttgaaaagccagcaactcactgcccaagaatccattgtccggcacactgcaaagacgaaccttcctactgggctccggtgtttggaaccaacatctatgcagatacctcaagcatctgcaagacagccgtgcacgcgggagtcatcagcaacgagagtgggggtgacgtggacgtgatgcccgtggataaaaagaagacctacacctgcccggcagccgctcgagccctatagtgtaaaccgattcgcagcacactggcgccgt

SEQ ID NO: 90 - protein, 477 aa, Homo sapiens
MSCVLGGVIPLGLLFLVCGSQGYLLPNVTLLEELLSKYQHNESHSRVRRAIPREDKEEILMLHNKLRGQVQPQASNMEYMTWDDELEKSAAAWASQCIWEHGPTGLLVSIGQNLGAHWGRYRSPGFHVQSWYDEVKDYTYPYPSECNPWCPERCSGPMCTHYTQIVWATTNKIGCAVNTCRKMTVWGEVWENAVYFVCNYSPKGNWIGEAPYKNGRPCSQCPPSYGGSCRNNLCYREETYTPKPETDEMNEVETAPIPEENHVWLQPRVMRPTKPKKTSSVNYMTQVVLCDTKMKDRCKGSTCNRYQCPAGCLNHKAKIFGTLFYESSSSICRAAIHYGILDDKGGLVDITRNGKVPFFVKSERHGVQSLSKYKPSSSFMVSKVKVQDLDCYTTVAQLCPFEKPATHCPRIHCPAHCKDEPSYWAPVFGTNIYADTSSICKTAVHAGVISNESGGDVDVMPVDKKKTYTCPAAARAL

SEQ ID NO: 91 - DNA, 2400 bp, Homo sapiens
  CDS (206)..(1696)
ctctgactgctcctattgagctgtctgctcgctgtgcccgctgtgcctgctgtgcccgcgctgtcgccgctgctaccgcgtctactggacgcgggagacgccagcgagctggtgattggagccctgcggagagctcaagcgcccagctctgcccgaggagcccaggctgccccgtgagtcccatagttgctgcaggagtggagccatgagctgcgtcctgggtggtgtcatccccttggggctgctgttcctggtccgcggatcccaaggctacctcctgcccaacgtcactctcttagaggagctgctcagcaaataccagcacaacgagtctcactcccgggtccgcagagccatccccagggaggacaaggaggagatcctcatgctgcacaacaagcttcggggccaggtgcagcctcaggcctccaacatggagtacatgacctgggatgacgaactggagaagtctgctgcagcgtgggccagtcagtgcatctgggagcacgggcccaccggtctgctggtgtccatcgggcagaacctgggcgctcactggggcaggtatcgctctccggggttccatgtgcagtcctggtatgacgaggtgaaggactacacctacccctacccgagcgagtgcaacccctggtgtccagagaggtgctcggggcctatgtgcacgcactacacacagatagtttgggccaccaccaacaagatcggttgtgctgtgaacacctgccggaagatgactgtctggggagaagtttgggagaacgcggtctactttgtctgcaattattctccaaaggggaactggattggagaagccccctacaagaatggccggccctgctctgagtgcccacccagctatggaggcagctgcaggaacaacttgtgttaccgagaagaaacctacactccaaaacctgaaacggacgagatgaatgaggtggaaacggctcccattcctgaagaaaaccatgtttggctccaaccgagggtgatgagacccaccaagcccaagaaaacctctgcggtcaactacatgacccaagtcgtcagatgtgacaccaagatgaaggacaggtgcaaagggtccacgtgtaacaggtaccagtgcccagcaggctgcctgaaccacaaggcgaagatctttggaagtctgttctatgaaagctcgtctagcatatgccgcgccgccatccactacgggatcctggatgacaagggaggcctggtggatatcaccaggaacgggaaggtccccttcttcgtgaagtctgagagacacggcgtgcagtccctcagcaaatacaaaccttccagctcattcatggtgtcaaaagtgaaagtgcaggatttggactgctacacgaccgttgctcagctgtgcccgtttgaaaagccagcaactcactgcccaagaatccattgtccggcacactgcaaagacgaaccttcctactgggctccggtgtttggaaccaacatctatgcagatacctcaagcatctgcaagacagccgtgcacgcgggagtcatcagcaacgagagtgggggtgacgtggacgtgatgcccgtggataaaaagaagacctacgtgggctcgctcaggaatggagttcagtctgaaagcctggggactcctcgggatggaaaggccttccggatctttgctgtcaggcagtgaatttccagcaccaggggagaaggggcgtcttcaggagggcttcggggttttgcttttatttttattttgtcattgcggggtatatggagagtcaggaaacttcctttgactgatgttcagtgtccatcactttgtggcctgtgggtgaggtgacatctcatcccctcactgaagcaacagcatcccaaggtgctcagccggactccctggtgcctgatcctgctggggcccgggggtctccatctggacgtcctctctcctttagagatctgagctgtctcttaaaggggacagttgcccaaaatgttccttgctatgtgttcttctgttggtggaggaagttgatttcaacctccctgccaaaagaacaaaccatttgaagctcacaattgtgaagcattcacggcgtcggaagaggccttttgagcaagcgccaatgagtttcaggaatgaagtagaaggtagttatttaaaaataaaaaacacagtccgtccctaccaatagaggaaaatggttttaatgtttgctggtcagacagacaaatgggctagagtaagagggctgcgggtatgagagaccccggctccgccctggcacgtgtccttgctggcggcccgccacaggcccccttcaatggccgcattcaggatggctctatacacagcagtgctggtttatgtaaagttcagcagtcacttca

SEQ ID NO: 92 - protein, 497 aa, Homo sapiens
MSCVLGGVIPLGLLFLVRGSQGYLLPNVTLLEELLSKYQHNESHSRVRRAIPREDKEEILMLHNKLRGQVQPQASNMEYMTWDDELEKSAAAWASQCIWEHGPTGLLVSIGQNLGAHWGRYRSPGFHVQSWYDEVKDYTYPYPSECNPWCPERCSGPMCTHYTQIVWATTNKIGCAVNTCRKMTVWGEVWENAVYFVCNYSPKGNWIGEAPYKNGRPCSECPPSYGGSCRNNLCYREETYTPKPETDEMNEVETAPIPEENHVWLQPRVMRPTKPKKTSAVNYMTQVVRCDTKMKDRCKGSTCNRYQCPAGCLNHKAKIFGSLFYESSSSICRAAIHYGILDDKGGLVDITRNGKVPFFVKSERHGVQSLSKYKPSSSFMVSKVKVQDLDCYTTVAQLCPFEKPATHCPRIHCPAHCKDEPSYWAPVFGTNIYADTSSICKTAVHAGVISNESGGDVDVMPVDKKKTYVGSLRNGVQSESLGTPRDGKAFRIFAVRQ

SEQ ID NO: 93 - DNA, 2403 bp, Homo sapiens
  CDS (206)..(1699)
ctctgactgctcctattgagctgtctgctcgctgtgcccgctgtgcctgctgtgcccgcgctgtcgccgctgctaccgcgtctactggacgcgggagacgccagcgagctggtgattggagccctgcggagagctcaagcgcccagctctgcccgaggagcccaggctgccccgtgagtcccatagttgctgcaggagtggagccatgagctgcgtcctgggtggtgtcatccccttggggctgctgttcctggtccgcggatcccaaggctacctcctgcccaacgtcactctcttagaggagctgctcagcaaataccagcacaacgagtctcactcccgggtccgcagagccatccccagggaggacaaggaggagatcctcatgctgcacaacaagcttcggggccaggtgcagcctcaggcctccaacatggagtacatgacctgggatgacgaactggagaagtctgctgcagcgtgggccagtcagtgcatctgggagcacgggcccaccagtctgctggtgtccatcgggcagaacctgggcgctcactggggcaggaggtatcgctctccggggttccatgtgcagtcctggtatgacgaggtgaaggactacacctacccctacccgagcgagtgcaacccctggtgtccagagaggtgctcggggcctatgtgcacgcactacacacagatagtttgggccaccaccaacaagatcggttgtgctgtgaacacctgccggaagatgactgtctggggagaagtttgggagaacgcggtctactttgtctgcaattattctccaaaggggaactggattggagaagccccctacaagaatggccggccctgctctgagtgcccacccagctatggaggcagctgcaggaacaacttgtgttaccgagaagaaacctacactccaaaacctgaaacggacgagatgaatgaggtggaaacggctcccattcctgaagaaaaccatgtttggctccaaccgagggtgatgagacccaccaagcccaagaaaacctctgcggtcaactacatgacccaagtcgtcagatgtgacaccaagatgaaggacaggtgcaaagggtccacgtgtaacaggtaccagtgcccagcaggctgcctgaaccacaaggcgaagatctttggaagtctgttctatgaaagctcgtctagcatatgccgcgccgccatccactacgggatcctggatgacaagggaggcctggtggatatcaccaggaacgggaaggtccccttcttcgtgaagtctgagagacacggcgtgcagtccctcagcaaatacaaaccttccagctcattcatggtgtcaaaagtgaaagtgcaggatttggactgctacacgaccgttgctcagctgtgcccgtttgaaaagccagcaactcactgcccaagaatccattgtccggcacactgcaaagacgaaccttcctactgggctccggtgtttggaaccaacatctatgcagatacctcaagcatctgcaagacagccgtgcacgcgggagtcatcagcaacgagagtgggggtgacgtggacgtgatgcccgtggataaaaagaagacctacgtgggctcgctcaggaatggagttcagtctgaaagcctggggactcctcgggatggaaaggccttccggatctttgctgtcaggcagtgaatttccagcaccaggggagaaggggcgtcttcaggagggcttcggggttttgcttttatttttattttgtcattgcggggtatatggagagtcaggaaacttcctttgactgatgttcagtgtccatcactttgtggcctgtgggtgaggtgacatctcatcccctcactgaagcaacagcatcccaaggtgctcagccggactccctggtgcctgatcctgctggggcccgggggtctccatctggacgtcctctctcctttagagatctgagctgtctcttaaaggggacagttgcccaaaatgttccttgctatgtgttcttctgttggtggaggaagttgatttcaacctccctgccaaaagaacaaaccatttgaagctcacaattgtgaagcattcacggcgtcggaagaggccttttgagcaagcgccaatgagtttcaggaatgaagtagaaggtagttatttaaaaataaaaaacacagtccgtccctaccaatagaggaaaatggttttaatgtttgctggtcagacagacaaatgggctagagtaagagggctgcgggtatgagagaccccggctccgccctggcacgtgtccttgctggcggcccgccacaggcccccttcaatggccgcattcaggatggctctatacacagcagtgctggtttatgtaaagttcagcagtcacttca

SEQ ID NO: 94 - protein, 498 aa, Homo sapiens
MSCVLGGVIPLGLLFLVRGSQGYLLPNVTLLEELLSKYQHNESHSRVRRAIPREDKEEILMLHNKLRGQVQPQASNMEYMTWDDELEKSAAAWASQCIWEHGPTSLLVSIGQNLGAHWGRRYRSPGFHVQSWYDEVKDYTYPYPSECNPWCPERCSGPMCTHYTQIVWATTNKIGCAVNTCRKMTVWGEVWENAVYFVCNYSPKGNWIGEAPYKNGRPCSECPPSYGGSCRNNLCYREETYTPKPETDEMNEVETAPIPEENHVWLQPRVMRPTKPKKTSAVNYMTQVVRCDTKMKDRCKGSTCNRYQCPAGCLNHKAKIFGSLFYESSSSICRAAIHYGILDDKGGLVDITRNGKVPFFVKSERHGVQSLSKYKPSSSFMVSKVKVQDLDCYTTVAQLCPFEKPATHCPRIHCPAHCKDEPSYWAPVFGTNIYADTSSICKTAVHAGVISNESGGDVDVMPVDKKKTYVGSLRNGVQSESLGTPRDGKAFRIFAVRQ

SEQ ID NO: 95 - DNA, 2412 bp, Homo sapiens
  CDS (206)..(1708)
ctctgactgctcctattgagctgtctgctcgctgtgcccgctgtgcctgctgtgcccgcgctgtcgccgctgctaccgcgtctactggacgcgggagacgccagcgagctggtgattggagccctgcggagagctcaagcgcccagctctgcccgaggagcccaggctgccccgtgagtcccatagttgctgcaggagtggagccatgagctgcgtcctgggtggtgtcatccccttggggctgctgttcctggtccgcggatcccaaggctacctcctgcccaacgtcactctcttagaggagctgctcagcaaataccagcacaacgagtctcactcccgggtccgcagagccatccccagggaggacaaggaggagatcctcatgctgcacaacaagcttcggggccaggtgcagcctcaggcctccaacatggagtacatgacctgggatgacgaactggagaagtctgctgcagcgtgggccagtcagtgcatctgggagcacgggcccaccggtctgctggtgtccatcgggcagaacctgggcgctcactggggcaggtatcgctctccggggttccatgtgcagtcctggtatgacgaggtgaaggactacacctacccctacccgagcgagtgcaacccctggtgtccagagaggtgctcggggcccatgtgcacgcactacacacaggtaactcagatagtttgggccaccaccaacaagatcggttgtgctgtgaacacctgccggaagatgactgtctggggagaagtttgggagaacgcggtctactttgtctgcaattattctccaaagagggggaactggattggagaagccccctacaagaatggccggccctgctctgagtgcccacccagctatggaggcagctgcaggaacaacttgtgttaccgagaagaaacctacactccaaaacctgaaacggacgagatgaatgaggtggaaacggctcccattcctgaagaaaaccatgtttggctccaaccgagggtgatgagacccaccaagcccaagaaaacctctgcggtcaactacatgacccaagtcgtcagatgtgacaccaagatgaaggacaggtgcaaagggtccacgtgtaacaggtaccagtgcccagcaggctgcctgaaccacaaggcgaagatctttggaagtctgttctatgaaagctcgtctagcatatgccgcgccgccatccactacgggatcctggatgacaagggaggcctggtggatatcaccaggaacgggaaggtccccttcttcgtgaagtctgagagacacggcgtgcagtccctcagcaaatacaaaccttccagctcattcatggtgtcaaaagtgaaagtgcaggatttggactgctacacgaccgttgctcagctgtgcccgtttgaaaagccagcaactcactgcccaagaatccattgtccggcacactgcaaagacgaaccttcctactgggctccggtgtttggaaccaacatctatgcagatacctcaagcatctgcaagacagccgtgcacgcgggagtcatcagcaacgagagtgggggtgacgtggacgtgatgcccgtggataaaaagaagacctacgtgggctcgctcaggaatggagttcagtctgaaagcctggggactcctcgggatggaaaggccttccggatctttgctgtcaggcagtgaatttccagcaccaggggagaaggggcgtcttcaggagggcttcggggttttgcttttatttttattttgtcattgcggggtatatggagagtcaggaaacttcctttgactgatgttcagtgtccatcactttgtggcctgtgggtgaggtgacatctcatcccctcactgaagcaacagcatcccaaggtgctcagccggactccctggtgcctgatcctgctggggcccgggggtctccatctggacgtcctctctcctttagagatctgagctgtctcttaaaggggacagttgcccaaaatgttccttgctatgtgttcttctgttggtggaggaagttgatttcaacctccctgccaaaagaacaaaccatttgaagctcacaattgtgaagcattcacggcgtcggaagaggccttttgagcaagcgccaatgagtttcaggaatgaagtagaaggtagttatttaaaaataaaaaacacagtccgtccctaccaatagaggaaaatggttttaatgtttgctggtcagacagacaaatgggctagagtaagagggctgcgggtatgagagaccccggctccgccctggcacgtgtccttgctggcggcccgccacaggcccccttcaatggccgcattcaggatggctctatacacagcagtgctggtttatgtaaagttcagcagtcacttca

SEQ ID NO: 96 - protein, 501 aa, Homo sapiens
MSCVLGGVIPLGLLFLVRGSQGYLLPNVTLLEELLSKYQHNESHSRVRRAIPREDKEEILMLHNKLRGQVQPQASNMEYMTWDDELEKSAAAWASQCIWEHGPTGLLVSIGQNLGAHWGRYRSPGFHVQSWYDEVKDYTYPYPSECNPWCPERCSGPMCTHYTQVTQIVWATTNKIGCAVNTCRKMTVWGEVWENAVYFVCNYSPKRGNWIGEAPYKNGRPCSECPPSYGGSCRNNLCYREETYTPKPETDEMNEVETAPIPEENHVWLQPRVMRPTKPKKTSAVNYMTQVVRCDTKMKDRCKGSTCNRYQCPAGCLNHKAKIFGSLFYESSSSICRAAIHYGILDDKGGLVDITRNGKVPFFVKSERHGVQSLSKYKPSSSFMVSKVKVQDLDCYTTVAQLCPFEKPATHCPRIHCPAHCKDEPSYWAPVFGTNIYADTSSICKTAVHAGVISNESGGDVDVMPVDKKKTYVGSLRNGVQSESLGTPRDGKAFRIFAVRQ

SEQ ID NO: 97 - DNA, 1425 bp, Homo sapiens
  CDS (1)..(1425)
tacctcctgcccaacgtcactctcttagaggagctgctcagcaaataccagcacaacgagtctcactcccgggtccgcagagccatccccagggaggacaaggaggagatcctcatgctgcacaacaagcttcggggccaggtgcagcctcaggcctccaacatggagtacatgacctgggatgacgaactggagaagtctgctgcagcgtgggccagtcagtgcatctgggagcacgggcccaccggtctgctggtgtccatcgggcagaacctgggcgctcactggggcaggtatcgctctccggggttccatgtgcagtcctggtatgacgaggtgaaggactacacctacccctacccgagcgagtgcaacccctggtgtccagagaggtgctcggggcctatgtgcacgcactacacacagatagtttgggccaccaccaacaagatcggttgtgctgtgaacacctgccggaagatgactgtctggggagaagtttgggagaacgcggtctactttgtctgcaattattctccaaaggggaactggattggagaagccccctacaagaatggccggccctgctctgagtgcccacccagctatggaggcagctgcaggaacaacttgtgttaccgagaagaaacctacactccaaaacctgaaacggacgagatgaatgaggtggaaacggctcccattcctgaagaaaaccatgtttggctccaaccgagggtgatgagacccaccaagcccaagaaaacctctgcggtcaactacatgacccaagtcgtcagatgtgacaccaagatgaaggacaggtgcaaagggtccacgtgtaacaggtaccagtgcccagcaggctgcctgaaccacaaggcgaagatctttggaactctgttctatgaaagctcgtctagcatatgccgcgccgccatccactacgggatcctggatgacaagggaggcctggtggatatcaccaggaacgggaaggtccccttcttcgtgaagtctgagagacacggcgtgcagtccctcagcaaatacaaaccttccagctcattcatggtgtcaaaagtgaaagtgcaggatttggactgctacacgaccgttgctcagctgtgcccgtttgaaaagccagcaactcactgcccaagaatccattgtccggcacactgcaaagacgaaccttcctactgggctccggtgtttggaaccaacatctatgcagatacctcaagcatctgcaagacagctgtgcacgcgggagtcatcagcaacgagagtgggggtgacgtggacgtgatgcccgtggataaaaagaagacctacgtgggctcgctcaggaatggagttcagtctgaaagcctggggactcctcgggatggaaaggccttccggatctttgctgtcaggcag

SEQ ID NO: 98 - protein, 475 aa, Homo sapiens
YLLPNVTLLEELLSKYQHNESHSRVRRAIPREDKEEILMLHNKLRGQVQPQASNMEYMTWDDELEKSAAAWASQCIWEHGPTGLLVSIGQNLGAHWGRYRSPGFHVQSWYDEVKDYTYPYPSECNPWCPERCSGPMCTHYTQIVWATTNKIGCAVNTCRKMTVWGEVWENAVYFVCNYSPKGNWIGEAPYKNGRPCSECPPSYGGSCRNNLCYREETYTPKPETDEMNEVETAPIPEENHVWLQPRVMRPTKPKKTSAVNYMTQVVRCDTKMKDRCKGSTCNRYQCPAGCLNHKAKIFGTLFYESSSSICRAAIHYGILDDKGGLVDITRNGKVPFFVKSERHGVQSLSKYKPSSSFMVSKVKVQDLDCYTTVAQLCPFEKPATHCPRIHCPAHCKDEPSYWAPVFGTNIYADTSSICKTAVHAGVISNESGGDVDVMPVDKKKTYVGSLRNGVQSESLGTPRDGKAFRIFAVRQ

SEQ ID NO: 99 - DNA, 2272 bp, Homo sapiens
  CDS (216)..(1706)
  misc_feature (165)..(165): Wherein n may be a, c, g or t
cccagggcgtctccggctgctcccattgagctgtctgctcgctgtgcccgctgtgcctgctgtgcccgcgctgtcgccgctgctaccgcgtctgctggacgcgggagacgccagcgagctggtgattggagccctgcggagagctcaagcgcccagctctgcccnaggagcccaggctgccccgtgagtcccatagttgctgcaggagtggagccatgagctgcgtcctgggtggtgtcatccccttggggctgctgttcctggtctgcggatcccaaggctacctcctgcccaacgtcactctcttagaggagctgctcagcaaataccagcacaacgagtctcactcccgggtccgcagagccatccccagggaggacaaggaggagatcctcatgctgcacaacaagcttcggggccaggtgcagcctcaggcctccaacatggagtacatgacctgggatgacgaactggagaagtctgctgcagcgtgggccagtcagtgcatctgggagcacgggcccaccagtctgctggtgtccatcgggcagaacctgggcgctcactggggcaggtatcgctctccggggttccatgtgcagtcctggtatgacgaggtgaaggactacacctacccctacccgagcgagtgcaacccctggtgtccagagaggtgctcggggcctatgtgcacgcactacacacagatagtttgggccaccaccaacaagatcggttgtgctgtgaacacctgccggaagatgactgtctggggagaagtttgggagaacgcggtctactttgtctgcaattattctccaaaggggaactggattggagaagccccctacaagaatggccggccctgctctgagtgcccacccagctatggaggcagctgcaggaacaacttgtgttaccgagaagaaacctacactccaaaacctgaaacggacgagatgaatgaggtggaaacggctcccattcctgaagaaaaccatgtttggctccaaccgagggtgatgagacccaccaagcccaagaaaacctctgcggtcaactacatgacccaagtcgtcagatgtgacaccaagatgaaggacaggtgcaaagggtccacgtgtaacaggtaccagtgcccagcaggctgcctgaaccacaaggcgaagatctttggaagtctgttctatgaaagctcgtctagcatatgccgcgccgccatccactacgggatcctggatgacaagggaggcctggtggatatcaccaggaacgggaaggtccccttcttcgtgaagtctgagagacacggcgtgcagtccctcagcaaatacaaaccttccagctcattcatggtgtcaaaagtgaaagtgcaggatttggactgctacacgaccgttgctcagctgtgcccgtttgaaaagccagcaactcactgcccaagaatccattgtccggcacactgcaaagacgaaccttcctactgggctccggtgtttggaaccaacatctatgcagatacctcaagcatctgcaagacagctgtgcacgcgggagtcatcagcaacgagagtgggggtgacgtggacgtgatgcccgtggataaaaagaagacctacgtgggctcgctcaggaatggagttcagtctgaaagcctggggactcctcgggatggaaaggccttccggatctttgctgtcaggcagtgaatttccagcaccaggggagaaggggcgtcttcaggagggcttcggggttttgcttttatttttattttgtcattgcggggtatatggagagtcaggaaacttcctttgactgatgttcagtgtccatcactttgtggcctgtgggtgaggtgacatctcatcccctcactgaagcaacagcatcccaaggtgctcagccggactccctggtgcctgatcctgctggggcctgggggtctccatctggacgtcctctctcctttagagatctgagctgtctcttaaaggggacagttgcccaaaatgttccttgctatgtgttcttctgttggtggaggaagttgatttcaacccccctgccaaaagaacaaaccatttgaagctcacaattgtgaagcattcacggcgtcggaagaggccttttgagcaagcgccaatgagtttcaggaatgaagtagaaggtagttatttaaaaataaaaaacacagtccgtccctaccaatagaggaaaatggttttaatgtttgctggtcagacagacaaatgggctagagtaagaaggc

SEQ ID NO: 100 - protein, 497 aa, Homo sapiens [sequence omitted]

SEQ ID NO: 101 - DNA, 1612 bp, Homo sapiens
  CDS (31)..(1521)
gagtcccatagttgctgcaggagtggagccatgagctgcgtcctgggtggtgtcatccccttggggctgctgttcctggtctgcggatcccaaggctacctcctgcccaacgtcactctcttagaggagctgctcagcaaataccagcacaacgagtctcactcccgggtccgcagagccatccccagggaggacaaggaggagatcctcatgctgcacaacaagcttcggggccaggtgcagcctcaggcctccaacatggagtacatgacctgggatgacgaactggagaagtctgctgcagcgtgggccagtcagtgcatctgggagcacgggcccaccagtctgctggtgtccatcgggcagaacctgggcgctcactggggcaggtatcgctctccggggttccatgtgcagtcctggtatgacgaggtgaaggactacacctacccctacccgagcgagtgcaacccctggtgtccagagaggtgctcggggcccatgtgcacgcactacacacagatagtttgggccaccaccaacaagatcggttgtgctgtgaacacctgccggaagatgactgtctggggagaagtttgggagaacgcggtctactttgtctgcaattattctccaaaggggaactggattggagaagccccctacaagaatggccggccctgctctgagtgcccacccagctatggaggcagctgcaggaacaacttgtgttaccgagaagaaacctacactccaaaacctgaaacggacgagatgaatgaggtgggaacggctcccattcctgaagaaaaccatgtttggctccaaccgagggtgatgagacccaccaagcccaagaaaacctctgcggtcaactacatgacccaagtcgtcagatgtgacaccaagatgaaggacaggtgcaaagggtccacgtgtaacaggtaccagtgcccagcaggctgcctgaaccacaaggcgaagatctttggaactctgttctatgaaagctcgtctagcatatgccgcgccgccatccactacgggatcctggatgacaagggaggcctggtggatatcaccaggaacgggaaggtccccttcttcgtgaagtctgagagacacggcgtgcagtccctcagcaaatacaaaccttccagctcattcatggtgtcaaaagtgaaagtgcaggatttggactgctacacgaccgttgctcagctgtgcccgtttgaaaagccagcaactcactgcccaagaatccattgtccggcacactgcaaagacgaaccttcctactgggctccggtgtttggaaccaacatctatgcagatacctcaagcatctgcaagacagccgtgcacgcgggagtcatcagcaacgagagtgggggtgacgtggacgtgatgcccgtggataaaaagaagacctacgtgggctcgctcaggaatggagttcagtctgaaagcctggggactcctcgggatggaaaggccttccggatctttgctgtcaggcagtgaatttccagcaccaggggagaaggggcgtcttcaggagggcttcggggttttgcttttatttttattttgtcattgcggggtataggag

SEQ ID NO: 102 - protein, 497 aa, Homo sapiens
MSCVLGGVIPLGLLFLVCGSQGYLLPNVTLLEELLSKYQHNESHSRVRRAIPREDKEEILMLHNKLRGQVQPQASNMEYMTWDDELEKSAAAWASQCIWEHGPTSLLVSIGQNLGAHWGRYRSPGFHVQSWYDEVKDYTYPYPSECNPWCPERCSGPMCTHYTQIVWATTNKIGCAVNTCRKMTVWGEVWENAVYFVCNYSPKGNWIGEAPYKNGRPCSECPPSYGGSCRNNLCYREETYTPKPETDEMNEVGTAPIPEENHVWLQPRVMRPTKPKKTSAVNYMTQVVRCDTKMKDRCKGSTCNRYQCPAGCLNHKAKIFGTLFYESSSSICRAAIHYGILDDKGGLVDITRNGKVPFFVKSERHGVQSLSKYKPSSSFMVSKVKVQDLDCYTTVAQLCPFEKPATHCPRIHCPAHCKDEPSYWAPVFGTNIYADTSSICKTAVHAGVISNESGGDVDVMPVDKKKTYVGSLRNGVQSESLGTPRDGKAFRIFAVRQ

SEQ ID NO: 103 - DNA, 2268 bp, Homo sapiens
  CDS (206)..(1564)
ctctgactgctcctattgagctgtctgctcgctgtgcccgctgtgcctgctgtgcccgcgctgtcgccgctgctaccgcgtctactggacgcgggagacgccagcgagctggtgattggagccctgcggagagctcaagcgcccagctctgcccgaggagcccaggctgccccgtgagtcccatagttgctgcaggagtggagccatgagctgcgtcctgggtggtgtcatccccttggggctgctgttcctggtctgcggatcccaaggctacctcctgcccaacgtcactctcttagaggagctgctcagcaaataccagcacaacgagtctcactcccgggtccgcagagccatccccagggaggacaaggaggagatcctcatgctgcgcaacaagcttcggggccaggtgcagcctcaggcctccaacatggagtacatgacctgggatgacgaactggagaagtctgctgcagcgtgggccagtcagtgcatctgggagcacgggcccaccagtctgctggtgtccatcgggcagaacctgggcgctcactggggcagaatagtttgggtcaccaccaacaagatcggttgtgctgtgaacacctgccggaagatgactgtctggggagaagtttgggagaacgcggtctactttgtctgcaattattctccaaaggggaactggattggagaagccccctacaagaatggccggccctgctctgagtgcccacccagctatggaggcagctgcaggaacaacttgtgttaccgagaagaaacctacactccaaaacctgaaacggacgagatgaatgaggtggaaacggctcccattcctgaagaaaaccatgtttggctccaaccgagggtgatgagacccaccaagcccaagaaaacctctgcggtcaactacatgacccaagtcgtcagatgtgacaccaagatgaaggacaggtgcaaagggtccacgtgtaacaggtaccagtgcccagcaggctgcctgaaccacaaggcgaagatctttggaagtctgttctatgaaagctcgtctagcatatgccgcgccgccatccactacgggatcctggatgacaagggaggcctggtggatatcaccaggaacgggaaggtccccttcttcgtgaagtctgagagacacggcgtgcagtccctcagcaaatacaaaccttccagctcattcatggtgtcaaaagtgaaagtgcaggatttggactgctacacgaccgttgctcagctgtgcccgtttgaaaagccagcaactcactgcccaagaatccattgtccggcacactgcaaagacgaaccttcctactgggctccggtgtttggaaccaacatctatgcagatacctcaagcatctgcaagacagccgtgcacgcgggagtcatcagcaacgagagtgggggtgacgtggacgtgatgcccgtggataaaaagaagacctacgtgggctcgctcaggaatggagttcagtctgaaagcctggggactcctcgggatggaaaggccttccggatctttgctgtcaggcagtgaatttccagcaccaggggagaaggggcgtcttcaggagggcttcggggttttgcttttatttttattttgtcattgcggggtatatggagagtcaggaaacttcctttgactgatgttcagtgtccatcactttgtggcctgtgggtgaggtgacatctcatcccctcactgaagcaacagcatcccaaggtgctcagccggactccctggtgcctgatcctgctggggcccgggggtctccatctggacgtcctctctcctttagagatctgagctgtctcttaaaggggacagttgcccaaaatgttccttgctatgtgttcttctgttggtggaggaagttgatttcaacctccctgccaaaagaacaaaccatttgaagctcacaattgtgaagcattcacggcgtcggaagaggccttttgagcaagcgccaatgagtttcaggaatgaagtagaaggtagttatttaaaaataaaaaacacagtccgtccctaccaatagaggaaaatggttttaatgtttgctggtcagacagacaaatgggctagagtaagagggctgcgggtatgagagaccccggctccgccctggcacgtgtccttgctggcggcccgccacaggcccccttcaatggccgcattcaggatggctctatacacagcagtgctggtttatgtaaagttcagcagtcacttca

SEQ ID NO: 104 - protein, 453 aa, Homo sapiens
MSCVLGGVIPLGLLFLVCGSQGYLLPNVTLLEELLSKYQHNESHSRVRRAIPREDKEEILMLRNKLRGQVQPQASNMEYMTWDDELEKSAAAWASQCIWEHGPTSLLVSIGQNLGAHWGRIVWVTTNKIGCAVNTCRKMTVWGEVWENAVYFVCNYSPKGNWIGEAPYKNGRPCSECPPSYGGSCRNNLCYREETYTPKPETDEMNEVETAPIPEENHVWLQPRVMRPTKPKKTSAVNYMTQVVRCDTKMKDRCKGSTCNRYQCPAGCLNHKAKIFGSLFYESSSSICRAAIHYGILDDKGGLVDITRNGKVPFFVKSERHGVQSLSKYKPSSSFMVSKVKVQDLDCYTTVAQLCPFEKPATHCPRIHCPAHCKDEPSYWAPVFGTNIYADTSSICKTAVHAGVISNESGGDVDVMPVDKKKTYVGSLRNGVQSESLGTPRDGKAFRIFAVRQ

SEQ ID NO: 105 - DNA, 2268 bp, Homo sapiens
  CDS (206)..(1564)
ctctgactgctcctattgagctgtctgctcgctgtgcccgctgtgcctgctgtgcccgcgctgtcgccgctgctaccgcgtctactggacgcgggagacgccagcgagctggtgattggagccctgcggagagctcaagcgcccagctctgcccgaggagcccaggctgccccgtgagtcccatagttgctgcaggagtggagccatgagctgcgtcctgggtggtgtcatccccttggggctgctgttcctggtctgcggatcccaaggctacctcctgcccaacgtcactctcttagaggagctgctcagcaaataccagcacaacgagtctcactcccgggtccgcagagccatccccagggaggacaaggaggagatcctcatgctgcacaacaagcttcggggccaggtgcagcctcaggcctccaacatggagtacatgacctgggatgacgaactggagaagtctgctgtagcgtgggccagtcagtgcatctgggagcacgggcccaccagtctgctggtgtccatcgggcagaacctgggcgctcactggggcagaatagtttgggtcaccaccaacaagatcggttgtgctgtgaacacctgccggaagatgactgtctggggagaagtttgggagaacgcggtctactttgtctgcaattattctccaaaggggaactggattggagaagccccctacaagaatggccggccctgctctgagtgcccacccagctatggaggcagctgcaggaacaacttgtgttaccgagaagaaacctacactccaaaacctgaaacggacgagatgaatgaggtggaaacggctcccattcctgaagaaaaccatgtttggctccaaccgagggtgatgagacccaccaagcccaagaaaacctctgcggtcaactacatgacccaagtcgtcagatgtgacaccaagatgaaggacaggtgcaaagggtccacgtgtaacaggtaccagtgcccagcaggctgcctgaaccacaaggcgaagatctttggaagtctgttctatgaaagctcgtctagcatatgccgcgccgccatccactacgggatcctggatgacaagggaggcctggtggatatcaccaggaacgggaaggtccccttcttcgtgaagtctgagagacacggcgtgcagtccctcagcaaatacaaaccttccagctcattcatggtgtcaaaagtgaaagtgcaggatttggactgctacacgaccgttgctcagctgtgcccgtttgaaaagccagcaactcactgcccaagaatccattgtccggcacactgcaaagacgaaccttcctactgggctccggtgtttggaaccaacatctatgcagatacctcaagcatctgcaagacagccgtgcacgcgggagtcatcagcaacgagagtgggggtgacgtggacgtgatgcccgtggataaaaagaagacctacgtgggctcgctcaggaatggagttcagtctgaaagcctggggactcctcgggatggaaaggccttccggatctttgctgtcaggcagtgaatttccagcaccaggggagaaggggcgtcttcaggagggcttcggggttttgcttttatttttattttgtcattgcggggtatatggagagtcaggaaacttcctttgactgatgttcagtgtccatcactttgtggcctgtgggtgaggtgacatctcatcccctcactgaagcaacagcatcccaaggtgctcagccggactccctggtgcctgatcctgctggggcccgggggtctccatctggacgtcctctctcctttagagatctgagctgtctcttaaaggggacagttgcccaaaatgttccttgctatgtgttcttctgttggtggaggaagttgatttcaacctccctgccaaaagaacaaaccatttgaagctcacaattgtgaagcattcacggcgtcggaagaggccttttgagcaagcgccaatgagtttcaggaatgaagtagaaggtagttatttaaaaataaaaaacacagtccgtccctaccaatagaggaaaatggttttaatgtttgctggtcagacagacaaatgggctagagtaagagggctgcgggtatgagagaccccggctccgccctggcacgtgtccttgctggcggcccgccacaggcccccttcaatggccgcattcaggatggctctatacacagcagtgctggtttatgtaaagttcagcagtcacttca

SEQ ID NO: 106 - protein, 453 aa, Homo sapiens
MSCVLGGVIPLGLLFLVCGSQGYLLPNVTLLEELLSKYQHNESHSRVRRAIPREDKEEILMLHNKLRGQVQPQASNMEYMTWDDELEKSAVAWASQCIWEHGPTSLLVSIGQNLGAHWGRIVWVTTNKIGCAVNTCRKMTVWGEVWENAVYFVCNYSPKGNWIGEAPYKNGRPCSECPPSYGGSCRNNLCYREETYTPKPETDEMNEVETAPIPEENHVWLQPRVMRPTKPKKTSAVNYMTQVVRCDTKMKDRCKGSTCNRYQCPAGCLNHKAKIFGSLFYESSSSICRAAIHYGILDDKGGLVDITRNGKVPFFVKSERHGVQSLSKYKPSSSFMVSKVKVQDLDCYTTVAQLCPFEKPATHCPRIHCPAHCKDEPSYWAPVFGTNIYADTSSICKTAVHAGVISNESGGDVDVMPVDKKKTYVGSLRNGVQSESLGTPRDGKAFRIFAVRQ

SEQ ID NO: 107 - DNA, 2268 bp, Homo sapiens
  CDS (206)..(1564)
ctctgactgctcctattgagctgtctgctcgctgtgcccgctgtgcctgctgtgcccgcgctgtcgccgctgctaccgcgtctactggacgcgggagacgccagcgagctggtgattggagccctgcggagagctcaagcgcccagctctgcccgaggagcccaggctgccccgtgagtcccatagttgctgcaggagtggagccatgagctgcgtcctgggtggtgtcatccccttggggctgctgttcctggtctgcggatcccaaggctacctcctgcccaacgtcactctcttagaggagctgctcagcaaataccagcacaacgagtctcactcccgggtccgcagagccatccccagggaggacaaggaggagatcctcatgctgcacaacaagcttcggggccaggtgcagcctcaggcctccaacatggagtacatgacctgggatgacgaactggagaagtctgctgcagcgtgggccagtcagtgcatctgggagcacgggcccaccagtctgctggtgtccatcgggcagaacctgggcgctcactggggcagaatagtttgggtcaccaccaacaagatcggttgtgctgtgaacacctgccggaagatgactgtctggggagaagtttgggagaacgcggtctactttgtctgcaattattctccaaaggggaactggattggagaagccccctacaagaatggccggccctgctctgagtgcccacccagctatggaggcagctgcaggaacaacttgtgttaccgagaagaaacctacactctaaaacctgaaacggacgagatgaatgaggtggaaacggctcccattcctgaagaaaaccatgtttggctccaaccgagggtgatgagacccaccaagcccaagaaaacctctgcggtcaactacatgacccaagtcgtcagatgtgacaccaagatgaaggacaggtgcaaagggtccacgtgtaacaggtaccagtgcccagcaggctgcctgaaccacaaggcgaagatctttggaagtctgttctatgaaagctcgtctagcatatgccgcgccgccatccactacgggatcctggatgacaagggaggcctggtggatatcaccaggaacgggaaggtccccttcttcgtgaagtctgagagacacggcgtgcagtccctcagcaaatacaaaccttccagctcattcatggtgtcaaaagtgaaagtgcaggatttggactgctacacgaccgttgctcagctgtgcccgtttgaaaagccagcaactcactgcccaagaatccattgtccggcacactgcaaagacgaaccttcctactgggctccggtgtttggaaccaacatctatgcagatacctcaagcatctgcaagacagccgtgcacgcgggagtcatcagcaacgagagtgggggtgacgtggacgtgatgcccgtggataaaaagaagacctacgtgggctcgctcaggaatggagttcagtctgaaagcctggggactcctcgggatggaaaggccttccggatctttgctgtcaggcagtgaatttccagcaccaggggagaaggggcgtcttcaggagggcttcggggttttgcttttatttttattttgtcattgcggggtatatggagagtcaggaaacttcctttgactgatgttcagtgtccatcactttgtggcctgtgggtgaggtgacatctcatcccctcactgaagcaacagcatcccaaggtgctcagccggactccctggtgcctgatcctgctggggcccgggggtctccatctggacgtcctctctcctttagagatctgagctgtctcttaaaggggacagttgcccaaaatgttccttgctatgtgttcttctgttggtggaggaagttgatttcaacctccctgccaaaagaacaaaccatttgaagctcacaattgtgaagcattcacggcgtcggaagaggccttttgagcaagcgccaatgagtttcaggaatgaagtagaaggtagttatttaaaaataaaaaacacagtccgtccctaccaatagaggaaaatggttttaatgtttgctggtcagacagacaaatgggctagagtaagagggctgcgggtatgagagaccccggctccgccctggcacgtgtccttgctggcggcccgccacaggcccccttcaatggccgcattcaggatggctctatacacagcagtgctggtttatgtaaagttcagcagtcacttca

SEQ ID NO: 108 - protein, 453 aa, Homo sapiens
MSCVLGGVIPLGLLFLVCGSQGYLLPNVTLLEELLSKYQHNESHSRVRRAIPREDKEEILMLHNKLRGQVQPQASNMEYMTWDDELEKSAAAWASQCIWEHGPTSLLVSIGQNLGAHWGRIVWVTTNKIGCAVNTCRKMTVWGEVWENAVYFVCNYSPKGNWIGEAPYKNGRPCSECPPSYGGSCRNNLCYREETYTLKPETDEMNEVETAPIPEENHVWLQPRVMRPTKPKKTSAVNYMTQVVRCDTKMKDRCKGSTCNRYQCPAGCLNHKAKIFGSLFYESSSSICRAAIHYGILDDKGGLVDITRNGKVPFFVKSERHGVQSLSKYKPSSSFMVSKVKVQDLDCYTTVAQLCPFEKPATHCPRIHCPAHCKDEPSYWAPVFGTNIYADTSSICKTAVHAGVISNESGGDVDVMPVDKKKTYVGSLRNGVQSESLGTPRDGKAFRIFAVRQ

SEQ ID NO: 109 - DNA, 2268 bp, Homo sapiens
  CDS (206)..(1564)
ctctgactgctcctattgagctgtctgctcgctgtgcccgctgtgcctgctgtgcccgcgctgtcgccgctgctaccgcgtctactggacgcgggagacgccagcgagctggtgattggagccctgcggagagctcaagcgcccagctctgcccgaggagcccaggctgccccgtgagtcccatagttgctgcaggagtggagccatgagctgcgtcctgggtggtgtcatccccttggggctgctgttcctggtctgcggatcccaaggctacctcctgcccaacgtcactctcttagaggagctgctcagcaaataccagcacaacgagtctcactcccgggtccgcagagccatccccagggaggacaaggaggagatcctcatgctgcacaacaagcttcggggccaggtgcagcctcaggcctccaacatggagtacatgacctgggatgacgaactggagaagtctgctgcagcgtgggccagtcagtgcatctgggagcacgggcccaccagtctgctggtgtccatcgggcagaacctgggcgctcactggggcagaatagtttgggtcaccaccaacaagatcggttgtgctgtgaacacctgccggaagatgactgtctggggagaagtttgggagaacgcggtctactttgtctgcaattattctccaaaggggaactggattggagaagccccctacaagaatggccggccctgctctgagtgcccacccagctatggaggcagctgcaggaacaacttgtgttaccgagaagaaacctacactccaaaacctgaaacggacgggatgaatgaggtggaaacggctcccattcctgaagaaaaccatgtttggctccaaccgagggtgatgagacccaccaagcccaagaaaacctctgcggtcaactacatgacccaagtcgtcagatgtgacaccaagatgaaggacaggtgcaaagggtccacgtgtaacaggtaccagtgcccagcaggctgcctgaaccacaaggcgaagatctttggaagtctgttctatgaaagctcgtctagcatatgccgcgccgccatccactacgggatcctggatgacaagggaggcctggtggatatcaccaggaacgggaaggtccccttcttcgtgaagtctgagagacacggcgtgcagtccctcagcaaatacaaaccttccagctcattcatggtgtcaaaagtgaaagtgcaggatttggactgctacacgaccgttgctcagctgtgcccgtttgaaaagccagcaactcactgcccaagaatccattgtccggcacactgcaaagacgaaccttcctactgggctccggtgtttggaaccaacatctatgcagatacctcaagcatctgcaagacagccgtgcacgcgggagtcatcagcaacgagagtgggggtgacgtggacgtgatgcccgtggataaaaagaagacctacgtgggctcgctcaggaatggagttcagtctgaaagcctggggactcctcgggatggaaaggccttccggatctttgctgtcaggcagtgaatttccagcaccaggggagaaggggcgtcttcaggagggcttcggggttttgcttttatttttattttgtcattgcggggtatatggagagtcaggaaacttcctttgactgatgttcagtgtccatcactttgtggcctgtgggtgaggtgacatctcatcccctcactgaagcaacagcatcccaaggtgctcagccggactccctggtgcctgatcctgctggggcccgggggtctccatctggacgtcctctctcctttagagatctgagctgtctcttaaaggggacagttgcccaaaatgttccttgctatgtgttcttctgttggtggaggaagttgatttcaacctccctgccaaaagaacaaaccatttgaagctcacaattgtgaagcattcacggcgtcggaagaggccttttgagcaagcgccaatgagtttcaggaatgaagtagaaggtagttatttaaaaataaaaaacacagtccgtccctaccaatagaggaaaatggttttaatgtttgctggtcagacagacaaatgggctagagtaagagggctgcgggtatgagagaccccggctccgccctggcacgtgtccttgctggcggcccgccacaggcccccttcaatggccgcattcaggatggctctatacacagcagtgctggtttatgtaaagttcagcagtcacttca

SEQ ID NO: 110 - protein, 453 aa, Homo sapiens
MSCVLGGVIPLGLLFLVCGSQGYLLPNVTLLEELLSKYQHNESHSRVRRAIPREDKEEILMLHNKLRGQVQPQASNMEYMTWDDELEKSAAAWASQCIWEHGPTSLLVSIGQNLGAHWGRIVWVTTNKIGCAVNTCRKMTVWGEVWENAVYFVCNYSPKGNWIGEAPYKNGRPCSECPPSYGGSCRNNLCYREETYTPKPETDGMNEVETAPIPEENHVWLQPRVMRPTKPKKTSAVNYMTQVVRCDTKMKDRCKGSTCNRYQCPAGCLNHKAKIFGSLFYESSSSICRAAIHYGILDDKGGLVDITRNGKVPFFVKSERHGVQSLSKYKPSSSFMVSKVKVQDLDCYTTVAQLCPFEKPATHCPRIHCPAHCKDEPSYWAPVFGTNIYADTSSICKTAVHAGVISNESGGDVDVMPVDKKKTYVGSLRNGVQSESLGTPRDGKAFRIFAVRQ

SEQ ID NO: 111 - DNA, 2268 bp, Homo sapiens
  CDS (206)..(1564)
ctctgactgctcctattgagctgtctgctcgctgtgcccgctgtgcctgctgtgcccgcgctgtcgccgctgctaccgcgtctactggacgcgggagacgccagcgagctggtgattggagccctgcggagagctcaagcgcccagctctgcccgaggagcccaggctgccccgtgagtcccatagttgctgcaggagtggagccatgagctgcgtcctgggtggtgtcatccccttggggctgctgttcctggtctgcggatcccaaggctacctcctgcccaacgtcactctcttagaggagctgctcagcaaataccagcacaacgagtctcactcccgggtccgcagagccatccccagggaggacaaggaggagatcctcatgctgcacaacaagcttcggggccaggtgcagcctcaggcctccaacatggagtacatgacctgggatgacgaactggagaagtctgctgcagcgtgggccagtcagtgcatctgggagcacgggcccaccagtctgctggtgtccatcgggcagaacctgggcgctcactggggcagaatagtttgggtcaccaccaacaagatcggttgtgctgtgaacacctgccggaagatgactgtctggggagaagtttgggagaacgcggtctactttgtctgcaattattctccaaaggggaactggattggagaagccccctacaagaatggccggccctgctctgagtgcccacccagctatggaggcagctgcaggaacaacttgtgttaccgagaagaaacctacactccaaaacctgaaacggacgagatgaatgaggtggaaacggctcccattcctgaagaaaaccatgtttggctccaaccgagggtgatgagacccaccaagcccaagaaaacctctgcggtcaactacatgacccaagtcgtcagatgtgacaccaagatgaaggacaggtgcaaagggtccacgtgtaacaggtaccagtgcccagcaggctgcctgaaccacaaggcgaagatctttggaagtctgttctatgaaagctcgtctagcatatgccgcgccgccatccactacgggatcctggatgacaagggaggcctggtggatatcaccaggaacgggaaggtccccttcttcgtgaagtctgagagacacggcgtgcagtccctcagcaaatacaaaccttccagctcattcatggtgtcaaaagtgaaagtgcaggatttggactgctacacgaccgttgctcagctgtgcccgtttgaaaagccagcaactcactgcccaagaatccattgtccggcacactgcaaagacgaaccttcctactgggctccggtgtttggaaccaacatctatgcagatacctcaagcatctgcaagacagctgtgcacgcgggagtcatcagcaacgagagtgggggtgacgtggacgtgatgcccgtggataaaaagaagacctacgtgggctcgctcaggaatggagttcagtctgaaagcctggggactcctcgggatggaaaggccttccggatctttgctgtcaggcagtgaatttccagcaccaggggagaaggggcgtcttcaggagggcttcggggttttgcttttatttttattttgtcattgcggggtatatggagagtcaggaaacttcctttgactgatgttcagtgtccatcactttgtggcctgtgggtgaggtgacatctcatcccctcactgaagcaacagcatcccaaggtgctcagccggactccctggtgcctgatcctgctggggcccgggggtctccatctggacgtcctctctcctttagagatctgagctgtctcttaaaggggacagttgcccaaaatgttccttgctatgtgttcttctgttggtggaggaagttgatttcaacctccctgccaaaagaacaaaccatttgaagctcacaattgtgaagcattcacggcgtcggaagaggccttttgagcaagcgccaatgagtttcaggaatgaagtagaaggtagttatttaaaaataaaaaacacagtccgtccctaccaatagaggaaaatggttttaatgtttgctggtcagacagacaaatgggctagagtaagagggctgcgggtatgagagaccccggctccgccctggcacgtgtccttgctggcggcccgccacaggcccccttcaatggccgcattcaggatggctctatacacagcagtgctggtttatgtaaagttcagcagtcacttca

SEQ ID NO: 112 - protein, 453 aa, Homo sapiens; identical to SEQ ID NO: 82

SEQ ID NO: 113 - DNA, 8160 bp, Homo sapiens
  CDS (122)..(8107)
gggagttggaaccagcattagatgagttgacaaaaatgcagtttcaggtggcaaagtgacaagtgccaaaactcaggcctgacttttctgaaaacatcagcattctgccatatctggaataatggatgtaaaggaccggcgacaccgctctttgaccagaggacgctgtggcaaagagtgtcgctacacaagctcctctctggacagtgaggactgccgggtgcccacacagaaatcctacagctccagtgagactctgaaggcctatgaccatgacagcaggatgcactatggaaaccgagtcacagacctcatccaccgggagtcagatgagtttcctagacaaggaaccaacttcacccttgccgaactgggcatctgtgagccctccccacaccgaagcggctactgctccgacatggggatccttcaccagggctactcccttagcacagggtctgacgccgactccgacaccgagggagggatgtctccagaacacgccatcagactgtggggcagagggataaaatccaggcgcagttccggcctgtccagtcgtgaaaactcggcccttaccctgactgactctgacaacgaaaacaaatcagatgatgagaacggtcgtcccattccacctacatcctcgcctagtctcctcccatctgctcagctgcctagctcccataatcctccaccagttagctgccagatgccattgctagacagcaacacctcccatcaaatcatggacaccaaccctgatgaggaattctcccccaattcatacctgctcagagcatgctcagggccccagcaagcctccagcagtggccctccgaaccaccacagccagtcgactctgaggccccctctcccaccccctcacaaccacacgctgtcccatcaccactcgtccgccaactccctcaacaggaactcactgaccaatcggcggagtcagatccacgccccggccccagcgcccaatgacctggccaccacaccagagtccgttcagcttcaggacagctgggtgctaaacagcaacgtgccactggagacccggcacttcctcttcaagacctcctcggggagcacacccttgttcagcagctcttccccgggataccctttgacctcaggaacggtttacacgcccccgccccgcctgctgcccaggaatactttctccaggaaggctttcaagctgaagaagccctccaaatactgcagctggaaatgtgctgccctctccgccattgccgcggccctcctcttggctattttgctggcgtatttcatagtgccctggtcgttgaaaaacagcagcatagacagtggtgaagcagaagttggtcggcgggtaacacaagaagtcccaccaggggtgttttggaggtcacaaattcacatcagtcagccccagttcttaaagttcaacatctccctcgggaaggacgctctctttggtgtttacataagaagaggacttccaccatctcatgcccagtatgacttcatggaacgtctggacgggaaggagaagtggagtgtggttgagtctcccagggaacgccggagcatacagaccttggttcagaatgaagccgtgtttgtgcagtacctggatgtgggcctgtggcatctggccttctacaatgatggaaaagacaaagagatggtttccttcaatactgttgtcctagattcagtgcaggactgtccacgtaactgccatgggaatggtgaatgtgtgtccggggtgtgtcactgtttcccaggatttctaggagcagactgtgctaaagctgcctgccctgtcctgtgcagtgggaatggacaatattctaaagggacgtgccagtgctacagcggctggaaaggtgcagagtgcgacgtgcccatgaatcagtgcatcgatccttcctgcgggggccacggctcctgcattgatgggaactgtgtctgctctgctggctacaaaggcgagcactgtgaggaagttgattgcttggatcccacctgctccagccacggagtctgtgtgaatggagaatgcctgtgcagccctggctggggtggtctgaactgtgagctggcgagggtccagtgcccagaccagtgcagtgggcatggcacgtacctgcctgacacgggcctctgcagctgcgatcccaactggatgggtcccgactgctctgttgatggctgccctgacttgtgcaacggtaacgggagatgcacactgggtcagaacagctggcagtgtgtctgccagaccggctggagagggcccggatgcaacgttgccatggaaacttcctgtgctgataacaaggataatgagggagatggcctggtggattgtttggaccctgactgctgcctgcagtcagcctgtcagaacagcctgctctgccgggggtcccgggacccactggacatcattcagcagggccagacggattggcccgcagtgaagtccttctatgaccgtatcaagctcttggcaggcaaggatagcacccacatcattcctggagagaaccctttcaacagcagcttggtttctctcatccgaggccaagtagtaactacagatggaactcccctggtcggtgtgaacgtgtcttttgtcaagtacccaaaatacggctacaccatcacccgccaggatggcacgttcgacctgatcgcaaatggaggtgcttccttgactctacactttgagcgagccccgttcatgagccaggagcgcactgtgtggctgccgtggaacagcttttacgccatggacaccctggtgatgaagaccgaggagaactccatccccagctgtgacctcagtggctttgtccggcctgatccaatcatcatctcctccccactgtccaccttctttagtgctgcccctgggcagaatcccatcgtgcctgagacccaggttcttcatgaagaaatcgagctccctggttccaatgtgaaacttcgctatctgagctctagaactgcagggtacaagtcactgctgaagatcaccatgacccagtccacagtgcccctgaacctcattagggttcacctgatggtggctgtcgaggggcatctcttccagaagtcattccaggcttctcccaacctggcctccaccttcatctgggacaagacagatgcgtatggccaaagggtgtatggactctcagatgctgttgtgtctgtcgggtttgaatatgagacctgtcccagtctaattctctgggagaaaaggacagccctccttcagggattcgagctggacccctccaacctcggtggctggtccctagacaaacaccacatcctcaatgttaaaagtggaatcctacacaaaggcactggggaaaaccagttcctgacccagcagcctgccatcatcaccagcatcatgggcaatggtcgccgccggagcatttcctgtcccagctgcaacggccttgctgaaggcaacaagctgctggccccagtggctctggctgttggaatcgatgggagcctctatgtgggtgacttcaattacatccgacgcatctttccctctcgaaatgtgaccagcatcttggagttacgaaataaagagtttaaacatagcaacaacccagcacacaagtactacttggcagtggaccccgtgtccggctcgctctacgtgtccgacaccaacagcaggagaatctaccgcgtcaagtctctgagtggaaccaaagacctggctgggaattcggaagttgtggcagggacgggagagcagtgtctaccctttgatgaagcccgctgcggggatggagggaaggccatagatgcaaccctgatgagcccgagaggtattgcagtagacaagaatgggctcatgtactttgtcgatgccaccatgatccggaaggttgaccagaatggaatcatctccaccctgctgggctccaatgacctcactgccgtccggccgctgagctgtgattccagcatggatgtagcccaggttcgtctggagtggccaacagaccttgctgtcaatcccatggataactccttgtatgttctagagaacaatgtcatccttcgaatcaccgagaaccaccaagtcagcatcattgcgggacgccccatgcactgccaagttcctggcattgactactcactcagcaaactagccattcactctgccctggagtcagccagtgccattgccatttctcacactggggtcctctacatcactgagacagatgagaagaagattaaccgtctacgccaggtaacaaccaacggggagatctgccttttagctggggcagcctcggactgcgactgcaaaaacgatgtcaattgcaactgctattcaggagatgatgcctacgcgactgatgccatcttgaattccccatcatccttagctgtagctccagatggtaccatttacattgcagaccttggaaatattcggatcagggcggtcagcaagaacaagcctgttcttaatgccttcaaccagtatgaggctgcatcccccggagagcaggagttatatgttttcaacgctgatggcatccaccaatacactgtgagcctggtgacaggggagtacttgtacaatttcacatatagtactgacaatgatgtcactgaattgattgacaataatgggaattccctgaagatccgtcgggacagcagtggcatgccccgtcacctgctcatgcctgacaaccagatcatcaccctcaccgtgggcaccaatggaggcctcaaagtcgtgtccacacagaacctggagcttggtctcatgacctatgatggcaacactgggctcctggccaccaagagcgatgaaacaggatggacgactttctatgactatgaccacgaaggccgcctgaccaacgtgacgcgccccacgggggtggtaaccagtctgcaccgggaaatggagaaatctattaccattgacattgagaactccaaccgtgatgatgacgtcactgtcatcaccaacctctcttcagtagaggcctcctacacagtggtacaagatcaagttcggaacagctaccagctctgtaataatggtaccctgagggtgatgtatgctaatgggatgggtatcagcttccacagcgagccccatgtcctagcgggcaccatcacccccaccattggacgctgcaacatctccctgcctatggagaatggcttaaactccattgagtggcgcctaagaaaggaacagattaaaggcaaagtcaccatctttggcaggaagctccgggtccatggaagaaatctcttgtccattgactatgatcgaaatattcggactgaaaagatctatgatgaccaccggaagttcaccctgaggatcatttatgaccaggtgggccgccccttcctctggctgcccagcagcgggctggcagctgtcaacgtgtcatacttcttcaatgggcgcctggctgggcttcagcgtggggccatgagcgagaggacagacatcgacaagcaaggccgcatcgtgtcccgcatgttcgctgacgggaaagtgtggagctactcctaccttgacaagtccatggtcctcctgcttcagagccaacgtcagtatatatttgagtatgactcctctgaccgcctccttgccgtcaccatgcccagcgtggcccggcacagcatgtccacacacacctccatcggctacatccgtaatatttacaacccgcctgaaagcaatgcttcggtcatctttgactacagtgatgacggccgcatcctgaagacctcctttttgggcaccggacgccaggtgttctacaagtatgggaaactctccaagttatcagagattgtctacgacagtaccgccgtcaccttcgggtatgacgagaccactggtgtcttgaagatggtcaacctccaaagtgggggcttctcctgcaccatcaggtaccggaagattggccccctggtggacaagcagatctacaggttctccgaggaaggcatggtcaatgccaggtttgactacacctatcatgacaacagcttccgcatcgcaagcatcaagcccgtcataagtgagactcccctccccgttgacctctaccgctatgatgagatttctggcaaggtggaacactttggtaagtttggagtcatctattatgacatcaaccagatcatcaccactgccgtgatgaccctcagcaaacacttcgacacccatgggcggatcaaggaggtccagtatgagatgttccggtccctcatgtactggatgacggtgcaatatgacagcatgggcagggtgatcaagagggagctaaaactggggccctatgccaataccacgaagtacacctatgactacgatggggacgggcagctccagagcgtggccgtcaatgaccgcccgacctggcgctacagctatgaccttaatgggaatctccacttactgaacccaggcaacagtgtgcgcctcatgcccttgcgctatgacctccgggatcggataaccagactcggggatgtgcagtacaaaattgacgacgatggctatctgtgccagagagggtctgacatcttcgaatacaattccaagggcctcctaacaagagcctacaacaaggccagcgggtggagtgtccagtaccgctatgatggcgtaggacggcgggcttcctacaagaccaacctgggccaccacctgcagtacttctactctgacctccacaacccgacgcgcatcacccatgtctacaatcactccaactcggagattacctcactgtactacgacctccagggccacctctttgccatggagagcagcagtggggaggagtactatgttgcctctgataacacagggactcctctggctgtgttcagcatcaacggcctcatgatcaaacagctgcagtacacggcctatggggagatttattatgactccaaccccgacttccagatggtcattggcttccatgggggactctatgaccccctgaccaagctggtccacttcactcagcgtgattatgatgtgctggcaggacgatggacctccccagactataccatgtggaaaaacgtgggcaaggagccggccccctttaacctgtatatgttcaagagcaacaatcctctcagcagtgagctagatttgaagaactacgtgacagatgtgaaaagctggcttgtgatgtttggatttcagcttagcaacatcattcctggcttcccgagagccaaaatgtatttcgtgcctcctccctatgaattgtcagagagtcaagcaagtgagaatggacagctcattacaggtgtccaacagacaacagagagacataaccaggccttcatggctctggaaggacaggtcattactaaaaagctccacgccagcatccgagagaaagcaggtcactggtttgccaccaccacgcccatcattggcaaaggcatcatgtttgccatcaaagaagggcgggtgaccacgggcgtgtccagcatcgccagcgaagatagccgcaaggtggcatctgtgctgaacaacgcctactacctggacaagatgcactacagcatcgagggcaaggacacccactactttgtgaagattggctcagccgatggcgacctggtcacactaggcaccaccatcggccgcaaggtgctagagagcggggtgaacgtgaccgtgtcccagcccacgctgctggtcaacggcaggactcgaaggttcacgaacattgagttccagtactccacgctgctgctcagcatccgctatggcctcacccccgacaccctggacgaagagaaggcccgcgtcctggaccaggcgagacagagggccctgggcacggcctgggccaaggagcagcagaaagccagggacgggagagaggggagccgcctgtggactgagggcgagaagcagcagcttctgagcaccgggcgcgtgcaagggtacgagggatattacgtgcttcccgtggagcaatacccagagcttgcagacagtagcagcaacatccagtttttaagacagaatgagatgggaaagaggtaacaaaataatctgctgccattccttgtctgaatggctcagcaggagtaact

SEQ ID NO: 114 - protein, 2662 aa, Homo sapiens
MDVKDRRHRSLTRGRCGKECRYTSSSLDSEDCRVPTQKSYSSSETLKAYDHDSRMHYGNRVTDLIHRESDEFPRQGTNFTLAELGICEPSPHRSGYCSDMGILHQGYSLSTGSDADSDTEGGMSPEHAIRLWGRGIKSRRSSGLSSRENSALTLTDSDNENKSDDENGRPIPPTSSPSLLPSAQLPSSHNPPPVSCQMPLLDSNTSHQIMDTNPDEEFSPNSYLLRACSGPQQASSSGPPNHHSQSTLRPPLPPPHNHTLSHHHSSANSLNRNSLTNRRSQIHAPAPAPNDLATTPESVQLQDSWVLNSNVPLETRHFLFKTSSGSTPLFSSSSPGYPLTSGTVYTPPPRLLPRNTFSRKAFKLKKPSKYCSWKCAALSAIAAALLLAILLAYFIVPWSLKNSSIDSGEAEVGRRVTQEVPPGVFWRSQIHISQPQFLKFNISLGKDALFGVYIRRGLPPSHAQYDFMERLDGKEKWSVVESPRERRSIQTLVQNEAVFVQYLDVGLWHLAFYNDGKDKEMVSFNTVVLDSVQDCPRNCHGNGECVSGVCHCFPGFLGADCAKAACPVLCSGNGQYSKGTCQCYSGWKGAECDVPMNQCIDPSCGGHGSCIDGNCVCSAGYKGEHCEEVDCLDPTCSSHGVCVNGECLCSPGWGGLNCELARVQCPDQCSGHGTYLPDTGLCSCDPNWMGPDCSVDGCPDLCNGNGRCTLGQNSWQCVCQTGWRGPGCNVAMETSCADNKDNEGDGLVDCLDPDCCLQSACQNSLLCRGSRDPLDIIQQGQTDWPAVKSFYDRIKLLAGKDSTHIIPGENPFNSSLVSLIRGQVVTTDGTPLVGVNVSFVKYPKYGYTITRQDGTFDLIANGGASLTLHFERAPFMSQERTVWLPWNSFYAMDTLVMKTEENSIPSCDLSGFVRPDPIIISSPLSTFFSAAPGQNPIVPETQVLHEEIELPGSNVKLRYLSSRTAGYKSLLKITMTQSTVPLNLIRVHLMVAVEGHLFQKSFQASPNLASTFIWDKTDAYGQRVYGLSDAVVSVGFEYETCPSLILWEKRTALLQGFELDPSNLGGWSLDKHHILNVKSGILHKGTGENQFLTQQPAIITSIMGNGRRRSISCPSCNGLAEGNKLLAPVALAVGIDGSLYVGDFNYIRRIFPSRNVTSILELRNKEFKHSNNPAHKYYLAVDPVSGSLYVSDTNSRRIYRVKSLSGTKDLAGNSEVVAGTGEQCLPFDEARCGDGGKAIDATLMSPRGIAVDKNGLMYFVDATMIRKVDQNGIISTLLGSNDLTAVRPLSCDSSMDVAQVRLEWPTDLAVNPMDNSLYVLENNVILRITENHQVSIIAGRPMHCQVPGIDYSLSKLAIHSALESASAIAISHTGVLYITETDEKKINRLRQVTTNGEICLLAGAASDCDCKNDVNCNCYSGDDAYATDAILNSPSSLAVAPDGTIYIADLGNIRIRAVSKNKPVLNAFNQYEAASPGEQELYVFNADGIHQYTVSLVTGEYLYNFTYSTDNDVTELIDNNGNSLKIRRDSSGMPRHLLMPDNQIITLTVGTNGGLKVVSTQNLELGLMTYDGNTGLLATKSDETGWTTFYDYDHEGRLTNVTRPTGVVTSLHREMEKSITIDIENSNRDDDVTVITNLSSVEASYTVVQDQVRNSYQLCNNGTLRVMYANGMGISFHSEPHVLAGTITPTIGRCNISLPMENGLNSIEWRLRKEQIKGKVTIFGRKLRVHGRNLLSIDYDRNIRTEKIYDDHRKFTLRIIYDQVGRPFLWLPSSGLAAVNVSYFFNGRLAGLQRGAMSERTDIDKQGRIVSRMFADGKVWSYSYLDKSMVLLLQSQRQYIFEYDSSDRLLAVTMPSVARHSMSTHTSIGYIRNIYNPPESNASVIFDYSDDGRILKTSFLGTGRQVFYKYGKLSKLSEIVYDSTAVTFGYDETTGVLKMVNLQSGGFSCTIRYRKIGPLVDKQIYRFSEEGMVNARFDYTYHDNSFRIASIKPVISETPLPVDLYRYDEISGKVEHFGKFGVIYYDINQIITTAVMTLSKHFDTHGRIKEVQYEMFRSLMYWMTVQYDSMGRVIKRELKLGPYANTTKYTYDYDGDGQLQSVAVNDRPTWRYSYDLNGNLHLLNPGNSVRLMPLRYDLRDRITRLGDVQYKIDDDGYLCQRGSDIFEYNSKGLLTRAYNKASGWSVQYRYDGVGRRASYKTNLGHHLQYFYSDLHNPTRITHVYNHSNSEITSLYYDLQGHLFAMESSSGEEYYVASDNTGTPLAVFSINGLMIKQLQYTAYGEIYYDSNPDFQMVIGFHGGLYDPLTKLVHFTQRDYDVLAGRWTSPDYTMWKNVGKEPAPFNLYMFKSNNPLSSELDLKNYVTDVKSWLVMFGFQLSNIIPGFPRAKMYFVPPPYELSESQASENGQLITGVQQTTERHNQAFMALEGQVITKKLHASIREKAGHWFATTTPIIGKGIMFAIKEGRVTTGVSSIASEDSRKVASVLNNAYYLDKMHYSIEGKDTHYFVKIGSADGDLVTLGTTIGRKVLESGVNVTVSQPTLLVNGRTRRFTNIEFQYSTLLLSIRYGLTPDTLDEEKARVLDQARQRALGTAWAKEQQKARDGREGSRLWTEGEKQQLLSTGRVQGYEGYYVLPVEQYPELADSSSNIQFLRQNEMGKR

SEQ ID NO: 115 - DNA, 9852 bp, Homo sapiens
  CDS (210)..(8504)
ccagcattagatgagttgacaaaaatgcagtttcagctctgaaggtctgaaagattctgctgcaactaaagctctgaagattctgctacaactatgacatccattttctcccacttcagacaggatgaatacaaggtggcaaagtgacaagtgccaaaactcaggcctgactttcctgaaaacatcagcattctgccatatctggaataatggatgtaaaggaccggcgacaccgctctttgaccagaggacgctgtggcaaagagtgtcgctacacaagctcctctctggacagtgaggactgccgggtgcccacacagaaatcctacagctccagtgagactctgaaggcctatgaccatgacagcaggatgcactatggaaaccgagtcacagacctcatccaccgggagtcagatgagtttcctagacaaggaaccaacttcacccttgccgaactgggcatctgtgagccctccccacaccgaagcggctactgctccgacatggggatccttcaccagggctactcccttagcacagggtctgacgccgactccgacaccgagggagggatgtctccagaacacgccatcagactgtggggcagagggataaaatccaggcgcagttccggcctgtccagtcgtgaaaactcggcccttaccctgactgactctgacaacgaaaacaaatcagatgatgagaacggtcgtcccattccacctacatcctcgcctagtctcctcccatctgctcagctgcctagctcccataatcctccaccagttagctgccagatgccattgctagacagcaacacctcccatcaaatcatggacaccaaccctgatgaggaattctcccccaattcatacctgctcagagcatgctcagggccccagcaagcctccagcagtggccctccgaaccaccacagccagtcgactctgaggccccctctcccaccccctcacaaccacacgctgtcccatcaccactcgtccgccaactccctcaacaggaactcactgaccaatcggcggagtcagatccacgccccggccccagcgcccaatgacctggccaccacaccagagtccgttcagcttcaggacagctgggtgctaaacagcaacgtgccactggagacccggcacttcctcttcaagacctcctcggggagcacacccttgttcagcagctcttccccgggataccctttgacctcaggaacggtttacacgcccccgccccgcctgctgcccaggaatactttctccaggaaggctttcaagctgaagaagccctccaaatactgcagctggaaatgtgctgccctctccgccattgccgcggccctcctcttggctattttgctggcgtatttcatagcaatgcatctgctcggactcaattggcaactccagcctgcagatgggcacacctttaacaatgggataaggaccggcttaccaggaaacgatgatgtggcaacaatgccatctggaggcaaagtgccctggtcgttgaaaaacagcagcatagacagtggtgaagcagaagttggtcggcgggtaacacaagaagtcccaccaggggtgttttggaggtcacaaattcacatcagtcagccccagttcttaaagttcaacatctccctcgggaaggacgctctctttggtgtttacataagaagaggacttccaccatctcatgcccagtatgacttcatggaacgtctggacgggaaggagaagtggagtgtggttgagtctcccagggaacgccggagcatacagaccttggttcagaatgaagccgtgtttgtgcagtacctggatgtgggcctgtggcatctggccttctacaatgatggaaaagacaaagagatggtttccttcaatactgttgtcctagattcagtgcaggactgtccacgtaactgccatgggaatggtgaatgtgtgtccggggtgtgtcactgtttcccaggatttctaggagcagactgtgctaaagctgcctgccctgtcctgtgcagtgggaatggacaatattctaaagggacgtgccagtgctacagcggctggaaaggtgcagagtgcgacgtgcccatgaatcagtgcatcgatccttcctgcgggggccacggctcctgcattgatgggaactgtgtctgctctgctggctacaaaggcgagcactgtgaggaagttgattgcttggatcccacctgctccagccacggagtctgtgtgaatggagaatgcctgtgcagccctggctggggtggtctgaactgtgagctggcgagggtccagtgcccagaccagtgcagtgggcatggcacgtacctgcctgacacgggcctctgcagctgcgatcccaactggatgggtcccgactgctctgttgaagtgtgctcagtagactgtggcactcacggcgtctgcatcgggggagcctgccgctgtgaagagggctggacaggcgcagcgtgtgaccagcgcgtgtgccacccccgctgcattgagcatgggacctgtaaagatggcaaatgtgaatgccgagagggctggaatggtgaacactgcaccattgatggctgccctgacttgtgcaacggtaacgggagatgcacactgggtcagaacagctggcagtgtgtctgccagaccggctggagagggcccggatgcaacgttgccatggaaacttcctgtgctgataacaaggataatgagggagatggcctggtggattgtttggaccctgactgctgcctgcagtcagcctgtcagaacagcctgctctgccgggggtcccgggacccactggacatcattcagcagggccagacggattggcccgcagtgaagtccttctatgaccgtatcaagctcttggcaggcaaggatagcacccacatcattcctggagagaaccctttcaacagcagcttggtttctctcatccgaggccaagtagtaactacagatggaactcccctggtcggtgtgaacgtgtcttttgtcaagtacccaaaatacggctacaccatcacccgccaggatggcacgttcgacctgatcgcaaatggaggtgcttccttgactctacactttgagcgagccccgttcatgagccaggagcgcactgtgtggctgccgtggaacagcttttacgccatggacaccctggtgatgaagaccgaggagaactccatccccagctgtgacctcagtggctttgtccggcctgatccaatcatcatctcctccccactgtccaccttctttagtgctgcccctgggcagaatcccatcgtgcctgagacccaggttcttcatgaagaaatcgagctccctggttccaatgtgaaacttcgctatctgagctctagaactgcagggtacaagtcactgctgaagatcaccatgacccagtccacagtgcccctgaacctcattagggttcacctgatggtggctgtcgaggggcatctcttccagaagtcattccaggcttctcccaacctggcctccaccttcatctgggacaagacagatgcgtatggccaaagggtgtatggactctcagatgctgttgtgtctgtcgggtttgaatatgagacctgtcccagtctaattctctgggagaaaaggacagccctccttcagggattcgagctggacccctccaacctcggtggctggtccctagacaaacaccacatcctcaatgttaaaagtggaatcctacacaaaggcactggggaaaaccagttcctgacccagcagcctgccatcatcaccagcatcatgggcaatggtcgccgccggagcatttcctgtcccagctgcaacggccttgctgaaggcaacaagctgctggccccagtggctctggctgttggaatcgatgggagcctctatgtgggtgacttcaattacatccgacgcatctttccctctcgaaatgtgaccagcatcttggagttacgaaataaagagtttaaacatagcaacaacccagcacacaagtactacttggcagtggaccccgtgtccggctcgctctacgtgtccgacaccaacagcaggagaatctaccgcgtcaagtctctgagtggaaccaaagacctggctgggaattcggaagttgtggcagggacgggagagcagtgtctaccctttgatgaagcccgctgcggggatggagggaaggccatagatgcaaccctgatgagcccgagaggtattgcagtagacaagaatgggctcatgtactttgtcgatgccaccatgatccggaaggttgaccagaatggaatcatctccaccctgctgggctccaatgacctcactgccgtccggccgctgagctgtgattccagcatggatgtagcccaggttcgtctggagtggccaacagaccttgctgtcaatcccatggataactccttgtatgttctagagaacaatgtcatccttcgaatcaccgagaaccaccaagtcagcatcattgcgggacgccccatgcactgccaagttcctggcattgactactcactcagcaaactagccattcactctgccctggagtcagccagtgccattgccatttctcacactggggtcctctacatcactgagacagatgagaagaagattaaccgtctacgccaggtaacaaccaacggggagatctgccttttagctggggcagcctcggactgcgactgcaaaaacgatgtcaattgcaactgctattcaggagatgatgcctacgcgactgatgccatcttgaattccccatcatccttagctgtagctccagatggtaccatttacattgcagaccttggaaatattcggatcagggcggtcagcaagaacaagcctgttcttaatgccttcaaccagtatgaggctgcatcccccggagagcaggagttatatgttttcaacgctgatggcatccaccaatacactgtgagcctggtgacaggggagtacttgtacaatttcacatatagtactgacaatgatgtcactgaattgattgacaataatgggaattccctgaagatccgtcgggacagcagtggcatgccccgtcacctgctcatgcctgacaaccagatcatcaccctcaccgtgggcaccaatggaggcctcaaagtcgtgtccacacagaacctggagcttggtctcatgacctatgatggcaacactgggctcctggccaccaagagcgatgaaacaggatggacgactttctatgactatgaccacgaaggccgcctgaccaacgtgacgcgccccacgggggtggtaaccagtctgcaccgggaaatggagaaatctattaccattgacattgagaactccaaccgtgatgatgacgtcactgtcatcaccaacctctcttcagtagaggcctcctacacagtggtacaagatcaagttcggaacagctaccagctctgtaataatggtaccctgagggtgatgtatgctaatgggatgggtatcagcttccacagcgagccccatgtcctagcgggcaccatcacccccaccattggacgctgcaacatctccctgcctatggagaatggcttaaactccattgagtggcgcctaagaaaggaacagattaaaggcaaagtcaccatctttggcaggaagctccgggtccatggaagaaatctcttgtccattgactatgatcgaaatattcggactgaaaagatctatgatgaccaccggaagttcaccctgaggatcatttatgaccaggtgggccgccccttcctctggctgcccagcagcgggctggcagctgtcaacgtgtcatacttcttcaatgggcgcctggctgggcttcagcgtggggccatgagcgagaggacagacatcgacaagcaaggccgcatcgtgtcccgcatgttcgctgacgggaaagtgtggagctactcctaccttgacaagtccatggtcctcctgcttcagagccaacgtcagtatatatttgagtatgactcctctgaccgcctccttgccgtcaccatgcccagcgtggcccggcacagcatgtccacacacacctccatcggctacatccgtaatatttacaacccgcctgaaagcaatgcttcggtcatctttgactacagtgatgacggccgcatcctgaagacctcctttttgggcaccggacgccaggtgttctacaagtatgggaaactctccaagttatcagagattgtctacgacagtaccgccgtcaccttcgggtatgacgagaccactggtgtcttgaagatggtcaacctccaaagtgggggcttctcctgcaccatcaggtaccggaagattggccccctggtggacaagcagatctacaggttctccgaggaaggcatggtcaatgccaggtttgactacacctatcatgacaacagcttccgcatcgcaagcatcaagcccgtcataagtgagactcccctccccgttgacctctaccgctatgatgagatttctggcaaggtggaacactttggtaagtttggagtcatctattatgacatcaaccagatcatcaccactgccgtgatgaccctcagcaaacacttcgacacccatgggcggatcaaggaggtccagtatgagatgttccggtccctcatgtactggatgacggtgcaatatgacagcatgggcagggtgatcaagagggagctaaaactggggccctatgccaataccacgaagtacacctatgactacgatggggacgggcagctccagagcgtggccgtcaatgaccgcccgacctggcgctacagctatgaccttaatgggaatctccacttactgaacccaggcaacagtgtgcgcctcatgcccttgcgctatgacctccgggatcggataaccagactcggggatgtgcagtacaaaattgacgacgatggctatctgtgccagagagggtctgacatcttcgaatacaattccaagggcctcctaacaagagcctacaacaaggccagcgggtggagtgtccagtaccgctatgatggcgtaggacggcgggcttcctacaagaccaacctgggccaccacctgcagtacttctactctgacctccacaacccgacgcgcatcacccatgtctacaatcactccaactcggagattacctcactgtactacgacctccagggccacctctttgccatggagagcagcagtggggaggagtactatgttgcctctgataacacagggactcctctggctgtgttcagcatcaacggcctcatgatcaaacagctgcagtacacggcctatggggagatttattatgactccaaccccgacttccagatggtcattggcttccatgggggactctatgaccccctgaccaagctggtccacttcactcagcgtgattatgatgtgctggcaggacgatggacctccccagactataccatgtggaaaaacgtgggcaaggagccggccccctttaacctgtatatgttcaagagcaacaatcctctcagcagtgagctagatttgaagaactacgtgacagatgtgaaaagctggcttgtgatgtttggatttcagcttagcaacatcattcctggcttcccgagagccaaaatgtatttcgtgcctcctccctatgaattgtcagagagtcaagcaagtgagaatggacagctcattacaggtgtccaacagacaacagagagacataaccaggccttcatggctctggaaggacaggtcattactaaaaagctccacgccagcatccgagagaaagcaggtcactggtttgccaccaccacgcccatcattggcaaaggcatcatgtttgccatcaaagaagggcgggtgaccacgggcgtgtccagcatcgccagcgaagatagccgcaaggtggcatctgtgctgaacaacgcctactacctggacaagatgcactacagcatcgagggcaaggacacccactactttgtgaagattggctcagccgatggcgacctggtcacactaggcaccaccatcggccgcaaggtgctagagagcggggtgaacgtgaccgtgtcccagcccacgctgctggtcaacggcaggactcgaaggttcacgaacattgagttccagtactccacgctgctgctcagcatccgctatggcctcacccccgacaccctggacgaagagaaggcccgcgtcctggaccaggcgagacagagggccctgggcacggcctgggccaaggagcagcagaaagccagggacgggagagaggggagccgcctgtggactgagggcgagaagcagcagcttctgagcaccgggcgcgtgcaagggtacgagggatattacgtgcttcccgtggagcaatacccagagcttgcagacagtagcagcaacatccagtttttaagacagaatgagatgggaaagaggtaacaaaataatctgctgccattccttgtctgaatggctcagcaggagtaactgttatctcctctcctaaggagatgaagacctaacaggggcactgcggctgggctgctttaggagaccaagtggcaagaaagctcacattttttgagttcaaatgctactgtccaagcgagaagtccctcatcctgaagtagactaaagcccggctgaaaattccgaggaaaacaaaacaaacgaatgaatgaacagacacacacaatgttccaagttcccctaaaatatgacccacttgttctgggtctacgcagaaaagagacgcaaagtgtccaaaaggaacaaaagaacaaaaacgaataagcaaagaagaaaacaaacaaaaacaaaacaaaacaaacacacggaccgataaacaaagaagcgaagataagaaagaaggcctcatatccaattacctcactcattcacatgtgagcgacacgcagacatccgcgagggccagcgtcaccagaccagctgcgggacaaaccactcagactgcttgtaggacaaatacttctgacattttcgtttaagcaaatacaggtgcatttaaaacacgactttgggggtgatttgtgtgtagcgcctggggaggggggataaaagaggaggagtgagcactggaaatactttttaaagaaaaaaaaacatgagggaataaaagaaattcctatcaaaaatcaaagtgaaataataccatccagcacttaactctcaggtcccaactaagtctggcctgagctaatttatttgagcgcagagtgtaaaatttaattcaaaatggtggctataatcactacagataaatttcatactcttttgtctttggagattccattgtggacagtaatacgcagttacagggtgtagtctgtttagattccgtagttcgtgggtatcagtttcggtagaggtgcagcatcgtgacacttttgctaacaggtaccacttctgatcaccctgtacatacatgagccgaaaggcacaatcactgtttcagatttaaaattattagtgtgtttgtttggtccagaaactgagacaatcacatgacagtcaccacgaggagagaaaatttaaaaaataaaaataaaaacaaaaaaaattttaaaaattaaaaaaacaaaaataaagtctaataagaactttggtacaggaacttttttgtaatatacatgtatgaattgttcatcgagtttttatattaattttaatttgctgctaagcaaagactagggacaggcaaagataatttatggcaaagtgtttaaattgtttatacataaataaagtctctaaaactcctgtg

SEQ ID NO: 116 - protein, 2765 aa, Homo sapiens
MDVKDRRHRSLTRGRCGKECRYTSSSLDSEDCRVPTQKSYSSSETLKAYDHDSRMHYGNRVTDLIHRESDEFPRQGTNFTLAELGICEPSPHRSGYCSDMGILHQGYSLSTGSDADSDTEGGMSPEHAIRLWGRGIKSRRSSGLSSRENSALTLTDSDNENKSDDENGRPIPPTSSPSLLPSAQLPSSHNPPPVSCQMPLLDSNTSHQIMDTNPDEEFSPNSYLLRACSGPQQASSSGPPNHHSQSTLRPPLPPPHNHTLSHHHSSANSLNRNSLTNRRSQIHAPAPAPNDLATTPESVQLQDSWVLNSNVPLETRHFLFKTSSGSTPLFSSSSPGYPLTSGTVYTPPPRLLPRNTFSRKAFKLKKPSKYCSWKCAALSAIAAALLLAILLAYFIAMHLLGLNWQLQPADGHTFNNGIRTGLPGNDDVATMPSGGKVPWSLKNSSIDSGEAEVGRRVTQEVPPGVFWRSQIHISQPQFLKFNISLGKDALFGVYIRRGLPPSHAQYDFMERLDGKEKWSVVESPRERRSIQTLVQNEAVFVQYLDVGLWHLAFYNDGKDKEMVSFNTVVLDSVQDCPRNCHGNGECVSGVCHCFPGFLGADCAKAACPVLCSGNGQYSKGTCQCYSGWKGAECDVPMNQCIDPSCGGHGSCIDGNCVCSAGYKGEHCEEVDCLDPTCSSHGVCVNGECLCSPGWGGLNCELARVQCPDQCSGHGTYLPDTGLCSCDPNWMGPDCSVEVCSVDCGTHGVCIGGACRCEEGWTGAACDQRVCHPRCIEHGTCKDGKCECREGWNGEHCTIDGCPDLCNGNGRCTLGQNSWQCVCQTGWRGPGCNVAMETSCADNKDNEGDGLVDCLDPDCCLQSACQNSLLCRGSRDPLDIIQQGQTDWPAVKSFYDRIKLLAGKDSTHIIPGENPFNSSLVSLIRGQVVTTDGTPLVGVNVSFVKYPKYGYTITRQDGTFDLIANGGASLTLHFERAPFMSQERTVWLPWNSFYAMDTLVMKTEENSIPSCDLSGFVRPDPIIISSPLSTFFSAAPGQNPIVPETQVLHEEIELPGSNVKLRYLSSRTAGYKSLLKITMTQSTVPLNLIRVHLMVAVEGHLFQKSFQASPNLASTFIWDKTDAYGQRVYGLSDAVVSVGFEYETCPSLILWEKRTALLQGFELDPSNLGGWSLDKHHILNVKSGILHKGTGENQFLTQQPAIITSIMGNGRRRSISCPSCNGLAEGNKLLAPVALAVGIDGSLYVGDFNYIRRIFPSRNVTSILELRNKEFKHSNNPAHKYYLAVDPVSGSLYVSDTNSRRIYRVKSLSGTKDLAGNSEVVAGTGEQCLPFDEARCGDGGKAIDATLMSPRGIAVDKNGLMYFVDATMIRKVDQNGIISTLLGSNDLTAVRPLSCDSSMDVAQVRLEWPTDLAVNPMDNSLYVLENNVILRITENHQVSIIAGRPMHCQVPGIDYSLSKLAIHSALESASAIAISHTGVLYITETDEKKINRLRQVTTNGEICLLAGAASDCDCKNDVNCNCYSGDDAYATDAILNSPSSLAVAPDGTIYIADLGNIRIRAVSKNKPVLNAFNQYEAASPGEQELYVFNADGIHQYTVSLVTGEYLYNFTYSTDNDVTELIDNNGNSLKIRRDSSGMPRHLLMPDNQIITLTVGTNGGLKVVSTQNLELGLMTYDGNTGLLATKSDETGWTTFYDYDHEGRLTNVTRPTGVVTSLHREMEKSITIDIENSNRDDDVTVITNLSSVEASYTVVQDQVRNSYQLCNNGTLRVMYANGMGISFHSEPHVLAGTITPTIGRCNISLPMENGLNSIEWRLRKEQIKGKVTIFGRKLRVHGRNLLSIDYDRNIRTEKIYDDHRKFTLRIIYDQVGRPFLWLPSSGLAAVNVSYFFNGRLAGLQRGAMSERTDIDKQGRIVSRMFADGKVWSYSYLDKSMVLLLQSQRQYIFEYDSSDRLLAVTMPSVARHSMSTHTSIGYIRNIYNPPESNASVIFDYSDDGRILKTSFLGTGRQVFYKYGKLSKLSEIVYDSTAVTFGYDETTGVLKMVNLQSGGFSCTIRYRKIGPLVDKQIYRFSEEGMVNARFDYTYHDNSFRIASIKPVISETPLPVDLYRYDEISGKVEHFGKFGVIYYDINQIITTAVMTLSKHFDTHGRIKEVQYEMFRSLMYWMTVQYDSMGRVIKRELKLGPYANTTKYTYDYDGDGQLQSVAVNDRPTWRYSYDLNGNLHLLNPGNSVRLMPLRYDLRDRITRLGDVQYKIDDDGYLCQRGSDIFEYNSKGLLTRAYNKASGWSVQYRYDGVGRRASYKTNLGHHLQYFYSDLHNPTRITHVYNHSNSEITSLYYDLQGHLFAMESSSGEEYYVASDNTGTPLAVFSINGLMIKQLQYTAYGEIYYDSNPDFQMVIGFHGGLYDPLTKLVHFTQRDYDVLAGRWTSPDYTMWKNVGKEPAPFNLYMFKSNNPLSSELDLKNYVTDVKSWLVMFGFQLSNIIPGFPRAKMYFVPPPYELSESQASENGQLITGVQQTTERHNQAFMALEGQVITKKLHASIREKAGHWFATTTPIIGKGIMFAIKEGRVTTGVSSIASEDSRKVASVLNNAYYLDKMHYSIEGKDTHYFVKIGSADGDLVTLGTTIGRKVLESGVNVTVSQPTLLVNGRTRRFTNIEFQYSTLLLSIRYGLTPDTLDEEKARVLDQARQRALGTAWAKEQQKARDGREGSRLWTEGEKQQLLSTGRVQGYEGYYVLPVEQYPELADSSSNIQFLRQNEMGKR

SEQ ID NO: 117 - DNA, 2478 bp, Homo sapiens
  CDS (1)..(2478)
aaaaacagcagcatagacagtggtgaagcagaagttggtcggcgggtaacacaagaagtcccaccaggggtgttttggaggtcacaaattcacatcagtcagccccagttcttaaagttcaacatctccctcgggaaggacgctctctttggtgtttacataagaagaggacttccaccatctcatgcccagtatgacttcatggaacgtctggacgggaaggagaagtggagtgtggttgagtctcccagggaacgccggagcatacagaccttggttcagaatgaagccgtgtttgtgcagtacctggatgtgggcctgtggcatctggccttctacaatgatggaaaagacaaagagatggtttccttcaatactgttgtcctagattcagtgcaggactgtccacgtaactgccatgggaatggtgaatgtgtgtccggggtgtgtcactgtttcccaggatttctaggagcagactgtgctaaagctgcctgccctgtcctgtgcagtgggaatggacaatattctaaagggacgtgccagtgctacagcggctggaaaggtgcagagtgcgacgtgcccatgaatcagtgcatcgatccttcctgcgggggccacggctcctgcattgatgggaactgtgtctgctctgctggctacaaaggcgagcactgtgaggaagttgattgcttggatcccacctgctccagccacggagtctgtgtgaatggagaatgcctgtgcagccctggctggggtggtctgaactgtgagctggcgagggtccagtgcccagaccagtgcagtgggcatggcacgtacctgcctgacacgggcctctgcagctgcgatcccaactggatgggtcccgactgctctgttgaagtgtgctcagtagactgtggcactcacggcgtctgcatcgggggagcctgccgctgtgaagagggctggacaggcgcagcgtgtgaccagcgcgtgtgccacccccgctgcattgagcacgggacctgtaaagatggcaaatgtgaatgccgagagggctggaatggtgaacactgcaccattggtaggcaaacggcaggcaccgaaacagatggctgccctgacttgtgcaacggtaacgggagatgcacactgggtcagaacagctggcagtgtgtctgccagaccggctggagagggcccggatgcaacgttgccatggaaacttcctgtgctgataacaaggataatgagggagatggcctggtggattgtttggaccctgactgctgcctgcagtcagcctgtcagaacagcctgctctgccgggggtcccgggacccactggacatcattcagcagggccagacggattggcccgcagtgaagtccttctatgaccgtatcaagctcttggcaggcaaggatagcacccacatcattcctggagagaaccctttcaacagcagcttggtttctctcatccgaggccaagtagtaactacagatggaactcccctggtcggtgtgaacgtgtcttttgtcaagtacccaaaatacggctacaccatcacccgccaggatggcacgttcgacctgatcgcaaatggaggtgcttccttgactctacactttgagcgagccccgttcatgagccaggagcgcactgtgtggctgccgtggaacagcttttacgccatggacaccctggtgatgaagaccgaggagaactccatccccagctgtgacctcagtggctttgtccggcctgatccaatcatcatctcctccccactgtccaccttctttagtgctgcccctgggcagaatcccatcgtgcctgagacccaggttcttcatgaagaaatcgagctccctggttccaatgtgaaacttcgctatctgagctctagaactgcagggtacaagtcactgctgaagatcaccatgacccagtccacagtgcccctgaacctcattagggttcacctgatggtggctgtcgaggggcatctcttccagaagtcattccaggcttctcccaacctggcctccaccttcatctgggacaagacagatgcgtatggccaaagggtgtatggactctcagatgctgttgtgtctgtcgggtttgaatatgagacctgtcccagtctaattctctgggagaaaaggacagccctccttcagggattcgagctggacccctccaacctcggtggctggtccctagacaaacaccacatcctcaatgttaaaagtggaatcctacacaaaggcactggggaaaaccagttcctgacccagcagcctgccatcatcaccagcatcatgggcaatggtcgccgccggagcatttcctgtcccagctgcaacggccttgctgaaggcaacaagctgctggccccagtggctctggctgttggaatcgatgggagcctctatgtgggtgacttcaattacatccgacgcatctttccctctcgaaat

SEQ ID NO: 118 - protein, 826 aa, Homo sapiens
KNSSIDSGEAEVGRRVTQEVPPGVFWRSQIHISQPQFLKFNISLGKDALFGVYIRRGLPPSHAQYDFMERLDGKEKWSVVESPRERRSIQTLVQNEAVFVQYLDVGLWHLAFYNDGKDKEMVSFNTVVLDSVQDCPRNCHGNGECVSGVCHCFPGFLGADCAKAACPVLCSGNGQYSKGTCQCYSGWKGAECDVPMNQCIDPSCGGHGSCIDGNCVCSAGYKGEHCEEVDCLDPTCSSHGVCVNGECLCSPGWGGLNCELARVQCPDQCSGHGTYLPDTGLCSCDPNWMGPDCSVEVCSVDCGTHGVCIGGACRCEEGWTGAACDQRVCHPRCIEHGTCKDGKCECREGWNGEHCTIGRQTAGTETDGCPDLCNGNGRCTLGQNSWQCVCQTGWRGPGCNVAMETSCADNKDNEGDGLVDCLDPDCCLQSACQNSLLCRGSRDPLDIIQQGQTDWPAVKSFYDRIKLLAGKDSTHIIPGENPFNSSLVSLIRGQVVTTDGTPLVGVNVSFVKYPKYGYTITRQDGTFDLIANGGASLTLHFERAPFMSQERTVWLPWNSFYAMDTLVMKTEENSIPSCDLSGFVRPDPIIISSPLSTFFSAAPGQNPIVPETQVLHEEIELPGSNVKLRYLSSRTAGYKSLLKITMTQSTVPLNLIRVHLMVAVEGHLFQKSFQASPNLASTFIWDKTDAYGQRVYGLSDAVVSVGFEYETCPSLILWEKRTALLQGFELDPSNLGGWSLDKHHILNVKSGILHKGTGENQFLTQQPAIITSIMGNGRRRSISCPSCNGLAEGNKLLAPVALAVGIDGSLYVGDFNYIRRIFPSRN

SEQ ID NO: 119 - DNA, 2497 bp, Homo sapiens
  CDS (2)..(2497)
caccaagcttaaaaacagcagcatagacagtggtgaagcagaagttggtcggcgggtaacacaagaagtcccaccaggggtgttttggaggtcacaaattcacatcagtcagccccagttcttaaagttcaacatctccctcgggaaggacgctctctttggtgtttacataagaagaggacttccaccatctcatgcccagtatgacttcatggaacgtctggacgggaaggagaagtggagtgtggttgagtctcccagggaacgccggagcatacagaccttggttcagaatgaagccgtgtttgtgcagtacctggatgtgggcctgtggcatctggccttctacaatgatggaaaagacaaagagatggtttccttcaatactgttgtcctagattcagtgcaggactgtccacgtaactgccatgggaatggtgaatgtgtgtccggggtgtgtcactgtttcccaggatttctaggagcagactgtgctaaagctgcctgccctgtcctgtgcagtgggaatggacaatattctaaagggacgtgccagtgctacagcggctggaaaggtgcagagtgcgacgtgcccatgaatcagtgcatcgatccttcctgcgggggccacggctcctgcattgatgggaactgtgtctgctctgctggctacaaaggcgagcactgtgaggaagttgattgcttggatcccacctgctccagccacggagtctgtgtgaatggagaatgcctgtgcagccctggctggggtggtctgaactgtgagctggcgagggtccagtgcccagaccagtgcagtgggcatggcacgtacctgcctgacacgggcctctgcagctgcgatcccaactggatgggtcccgactgctctgttgaagtgtgctcagtagactgtggcactcacggcgtctgcatcgggggagcctgccgctgtgaagagggctggacaggcgcagcgtgtgaccagcgcgtgtgccacccccgctgcattgagcacgggacctgtaaagatggcaaatgtgaatgccgagagggctggaatggtgaacactgcaccattggtaggcaaacggcaggcaccgaaacagatggctgccctgacttgtgcaacggtaacgggagatgcacactgggtcagaacagctggcagtgtgtctgccagaccggctggagagggcccggatgcaacgttgccatggaaacttcctgtgctgataacaaggataatgagggagatggcctggtggattgtttggaccctgactgctgcctgcagtcagcctgtcagaacagcctgctctgccgggggtcccgggacccactggacatcattcagcagggccagacggattggcccgcagtgaagtccttctatgaccgtatcaagctcttggcaggcaaggatagcacccacatcattcctggagagaaccctttcaacagcagcttggtttctctcatccgaggccaagtagtaactacagatggaactcccctggtcggtgtgaacgtgtcttttgtcaagtacccaaaatacggctacaccatcacccgccaggatggcacgttcgacctgatcgcaaatggaggtgcttccttgactctacactttgagcgagccccgttcatgagccaggagcgcactgtgtggctgccgtggaacagcttttacgccatggacaccctggtgatgaagaccgaggagaactccatccccagctgtgacctcagtggctttgtccggcctgatccaatcatcatctcctccccactgtccaccttctttagtgctgcccctgggcagaatcccatcgtgcctgagacccaggttcttcatgaagaaatcgagctccctggttccaatgtgaaacttcgctatctgagctctagaactgcagggtacaagtcactgctgaagatcaccatgacccagtccacagtgcccctgaacctcattagggttcacctgatggtggctgtcgaggggcatctcttccagaagtcattccaggcttctcccaacctggcctacaccttcatctgggacaagacagatgcgtatggccaaagggtgtatggactctcagatgctgttgtgtctgtcgggtttgaatatgagacctgtcccagtctaattctctgggagaaaaggacagccctccttcagggattcgagctggacccctccaacctcggtggctggtccctagacaaacaccacatcctcaatgttaaaagtggaatcctacacaaaggcactggggaaaaccagttcctgacccagcagcctgccatcatcaccagcatcatgggcaatggtcgccgccggagcatttcctgtcccagctgcaacggccttgctgaaggcaacaagctgctggccccagtggctctggctgttggaatcgatgggagcctctatgtgggtgacttcaattacatccgacgcatctttccctctcgaaatctcgagggc

SEQ ID NO: 120 - protein, 832 aa, Homo sapiens
TKLKNSSIDSGEAEVGRRVTQEVPPGVFWRSQIHISQPQFLKFNISLGKDALFGVYIRRGLPPSHAQYDFMERLDGKEKWSVVESPRERRSIQTLVQNEAVFVQYLDVGLWHLAFYNDGKDKEMVSFNTVVLDSVQDCPRNCHGNGECVSGVCHCFPGFLGADCAKAACPVLCSGNGQYSKGTCQCYSGWKGAECDVPMNQCIDPSCGGHGSCIDGNCVCSAGYKGEHCEEVDCLDPTCSSHGVCVNGECLCSPGWGGLNCELARVQCPDQCSGHGTYLPDTGLCSCDPNWMGPDCSVEVCSVDCGTHGVCIGGACRCEEGWTGAACDQRVCHPRCIEHGTCKDGKCECREGWNGEHCTIGRQTAGTETDGCPDLCNGNGRCTLGQNSWQCVCQTGWRGPGCNVAMETSCADNKDNEGDGLVDCLDPDCCLQSACQNSLLCRGSRDPLDIIQQGQTDWPAVKSFYDRIKLLAGKDSTHIIPGENPFNSSLVSLIRGQVVTTDGTPLVGVNVSFVKYPKYGYTITRQDGTFDLIANGGASLTLHFERAPFMSQERTVWLPWNSFYAMDTLVMKTEENSIPSCDLSGFVRPDPIIISSPLSTFFSAAPGQNPIVPETQVLHEEIELPGSNVKLRYLSSRTAGYKSLLKITMTQSTVPLNLIRVHLMVAVEGHLFQKSFQASPNLAYTFIWDKTDAYGQRVYGLSDAVVSVGFEYETCPSLILWEKRTALLQGFELDPSNLGGWSLDKHHILNVKSGILHKGTGENQFLTQQPAIITSIMGNGRRRSISCPSCNGLAEGNKLLAPVALAVGIDGSLYVGDFNYIRRIFPSRNLEG

SEQ ID NO: 121 - DNA, 2470 bp, Homo sapiens
  CDS (2)..(2470)
caccaagcttaaaaacagcagcatagacagtggtgaagcagaagttggtcggcgggtaacacaagaagtcccaccaggggtgttttggaggtcacaaattcacatcagtcagccccagttcttaaagttcaacatctccctcgggaaggacgctctctttggtgtttacataagaagaggacttccaccatctcatgcccagtatgacttcatggaacgtctggacgggaaggagaagtggagtgtggttgagtctcccagggaacgccggagcatacagaccttggttcagaatgaagccgtgtttgtgcagtacctggatgtgggcctgtggcatctggccttctacaatgatggaaaagacaaagagatggtttccttcaatactgttgtcctagattcagtgcaggactgtccacgtaactgccatgggaatggtgaatgtgtgtccggggtgtgtcactgtttcccaggatttctaggagcagactgtgctaaagctgcctgccctgtcctgtgcagtgggaatggacaatattctaaagggacgtgccagtgctacagcggctggaaaggtgcagagtgcgacgtgcccatgaatcagtgcatcgatccttcctgcgggggccacggctcctgcattgatgggaactgtgtctgctctgctggctacaaaggcgagcactgtgaggaagttgattgcttggatcccacctgctccagccacggagtctgtgtgaatggagaatgcctgtgcagccctggctggggtggtctgaactgtgagctggcgagggtccagtgcccagaccagtgcagtgggcatggcacgtacctgcctgacacgggcctctgcagctgcgatcccaactggatgggtcccgactgctctgttgaagtgtgctcagtagactgtggcactcacggcgtctgcatcgggggagcctgccgctgtgaagagggctggacaggcgcagcgtgtgaccagcgcgtgtgccacccccgctgcattgagcacgggacctgtaaagatggcaaatgtgaatgccgagagggctggaatggtgaacactgcaccattgatggctgccctgacttgtgcaacggtaacgggagatgcacactgggtcagaacagctggcagtgtgtctgccagaccggctggagagggcccggatgcaacgttgccatggaaacttcctgtgctgataacaaggataatgagggagatggcctggtggattgtttggaccctgactgctgcctgcagtcagcctgtcagaacagcctgctctgccgggggtcccgggacccactggacatcattcagcagggccagacggattggcccgcagtgaagtccttctatgaccgtatcaagctcttggcaggcaaggatagcacccacatcattcctggagagaaccctttcaacagcagcttggtttctctcatccgaggccaagtagtaactacagatggaactcccctggtcggtgtgaacgtgtcttttgtcaagtacccaaaatacggctacaccatcacccgccaggatggcacgttcgacctgatcgcaaatggaggtgcttccttgactctacactttgagcgagccccgttcatgagccaggagcgcactgtgtggctgccgtggaacagcttttacgccatggacaccctggtgatgaagaccgaggagaactccatccccagctgtgacctcagtggctttgtccggcctgatccaatcatcatctcctccccactgtccaccttctttagtgctgcccctgggcagaatcccatcgtgcctgagacccaggttcttcatgaagaaatcgagctccctggttccaatgtgaaacttcgctatctgagctctagaactgcagggtacaagtcactgctgaagatcaccatgacccagtccacagtgcccctgaacctcattagggttcacctgatggtggctgtcgaggggcatctcttccagaagtcattccaggcttctcccaacctggcctacaccttcatctgggacaagacagatgcgtatggccaaagggtgtatggactctcagatgctgttgtgtctgtcgggtttgaatatgagacctgtcccagtctaattctctgggagaaaaggacagccctccttcagggattcgagctggacccctccaacctcggtggctggtccctagacaaacaccacatcctcaatgttaaaagtggaatcctacacaaaggcactggggaaaaccagttcctgacccagcagcctgccatcatcaccagcatcatgggcaatggtcgccgccggagcatttcctgtcccagctgcaacggccttgctgaaggcaacaagctgctggccccagtggctctggctgttggaatcgatgggagcctctatgtgggtgacttcaattacatccgacgcatctttccctctcgaaatctcgagggc

SEQ ID NO: 122 - protein, 823 aa, Homo sapiens
TKLKNSSIDSGEAEVGRRVTQEVPPGVFWRSQIHISQPQFLKFNISLGKDALFGVYIRRGLPPSHAQYDFMERLDGKEKWSVVESPRERRSIQTLVQNEAVFVQYLDVGLWHLAFYNDGKDKEMVSFNTVVLDSVQDCPRNCHGNGECVSGVCHCFPGFLGADCAKAACPVLCSGNGQYSKGTCQCYSGWKGAECDVPMNQCIDPSCGGHGSCIDGNCVCSAGYKGEHCEEVDCLDPTCSSHGVCVNGECLCSPGWGGLNCELARVQCPDQCSGHGTYLPDTGLCSCDPNWMGPDCSVEVCSVDCGTHGVCIGGACRCEEGWTGAACDQRVCHPRCIEHGTCKDGKCECREGWNGEHCTIDGCPDLCNGNGRCTLGQNSWQCVCQTGWRGPGCNVAMETSCADNKDNEGDGLVDCLDPDCCLQSACQNSLLCRGSRDPLDIIQQGQTDWPAVKSFYDRIKLLAGKDSTHIIPGENPFNSSLVSLIRGQVVTTDGTPLVGVNVSFVKYPKYGYTITRQDGTFDLIANGGASLTLHFERAPFMSQERTVWLPWNSFYAMDTLVMKTEENSIPSCDLSGFVRPDPIIISSPLSTFFSAAPGQNPIVPETQVLHEEIELPGSNVKLRYLSSRTAGYKSLLKITMTQSTVPLNLIRVHLMVAVEGHLFQKSFQASPNLAYTFIWDKTDAYGQRVYGLSDAVVSVGFEYETCPSLILWEKRTALLQGFELDPSNLGGWSLDKHHILNVKSGILHKGTGENQFLTQQPAIITSIMGNGRRRSISCPSCNGLAEGNKLLAPVALAVGIDGSLYVGDFNYIRRIFPSRNLEG

SEQ ID NO: 123 - DNA, 2470 bp, Homo sapiens
  CDS (2)..(2470)
caccaagcttaaaaacagcagcatagacagtggtgaagcagaagttggtcggcgggtaacacaagaagtcccaccaggggtgttttggaggtcacaaattcacatcagtcagccccagttcttaaagttcaacatctccctcgggaaggacgctctctttggtgtttacataagaagaggacttccaccatctcatgcccagtatgacttcatggaacgtctggacgggaaggagaagtggagtgtggttgagtctcccagggaacgccggagcatacagaccttggttcagaatgaagccgtgtttgtgcagtacctggatgtgggcctgtggcatctggccttctacaatgatggaaaagacaaagagatggtttccttcaatactgttgtcctagattcagtgcaggactgtccacgtaactgccatgggaatggtgaatgtgtgtccggggtgtgtcactgtttcccaggatttctaggagcagactgtgctaaagctgcctgccctgtcctgtgcagtgggaatggacaatattctaaagggacgtgccagtgctacagcggctggaaaggtgcagagtgcgacgtgcccatgaatcagtgcatcgatccttcctgcgggggccacggctcctgcattgatgggaactgtgtctgctctgctggctacaaaggcgagcactgtgaggaagttgattgcttggatcccacctgctccagccacggagtctgtgtgaatggagaatgcctgtgcagccctggctggggtggtctgaactgtgagctggcgagggtccagtgcccagaccagtgcagtgggcatggcacgtacctgcctgacacaggcctctgcagctgcgatcccaactggatgggtcccgactgctctgttgaagtgtgctcagtagactgtggcactcacggcgtctgcatcgggggagcctgccgctgtgaagagggctggacaggcgcagcgtgtgaccagcgcgtgtgccacccccgctgcattgagcatgggacctgtaaagatggcaaatgtgaatgccgagagggctggaatggtgaacactgcaccattgatggctgccctgacttgtgcaacggtaacgggagatgcacactgggtcagaacagctggcagtgtgtctgccagaccggctggagagggcccggatgcaacgttgccatggaaacttcctgtgctgataacaaggataatgagggagatggcctggtggattgtttggaccctgactgctgcctgcagtcagcctgtcagaacagcctgctctgccgggggtcccgggacccactggacatcattcagcagggccagacggattggcccgcagtgaagtccttctatgaccgtatcaagctcttggcaggcaaggatagcacccacatcattcctggagagaaccctttcaacagcagcttggtttctctcatccgaggccaagtagtaactacagatggaactcccctggtcggtgtgaacgtgtcttttgtcaagtacccaaaatacggctacaccatcacccgccaggatggcacgttcgacctgatcgcaaatggaggtgcttccttgactctacactttgagcgagccccgttcatgagccaggagcgcactgtgtggctgccgtggaacagcttttacgccatggacaccctggtgatgaagaccgaggagaactccatccccagctgtgacctcagtggctttgtccggcctgatccaatcatcatctcctccccactgtccaccttctttagtgctgcccctgggcagaatcccatcgtgcctgagacccaggttcttcatgaagaaatcgagctccctggttccaatgtgaaacttcgctatctgagctctagaactgcagggtacaagtcactgctgaagatcaccatgacccagtccacagtgcccctgaacctcattagggttcacctgatggtggctgtcgaggggcatctcttccagaagtcattccaggcttctcccaacctggcctacaccttcatctgggacaagacagatgcgtatggccaaagggtgtatggactctcagatgctgttgtgtctgtcgggtttgaatatgagacctgtcccagtctaattctctgggagaaaaggacagccctccttcagggattcgagctggacccctccaacctcggtggctggtccctagacaaacaccacatcctcaatgttaaaagtggaatcctacacaaaggcactggggaaaaccagttcctgacccagcagcctgccatcatcaccagcatcatgggcaatggtcgccgccggagcatttcctgtcccagctgcaacggccttgctgaaggcaacaagctgctggccccagtggctctggctgttggaatcgatgggagcctctatgtgggtgacttcaattacatccgacgcatctttccctctcgaaatctcgagggc

SEQ ID NO: 124 - protein, 823 aa, Homo sapiens; identical to SEQ ID NO: 122

SEQ ID NO: 125 - DNA, 2284 bp, Homo sapiens
  CDS (2)..(2284)
caccaagcttaaaaacagcagcatagacagtggtgaagcagaagttggtcggcgggtaacacaagaagtcccaccaggggtgttttggaggtcacaaattcacatcagtcagccccagttcttaaagttcaacatctccctcgggaaggacgctctctttggtgtttacataagaagaggacttccaccatctcatgcccagtatgacttcatggaacgtctggacgggaaggagaagtggagtgtggttgagtctcccagggaacgccggagcatacagaccttggttcagaatgaagccgtgtttgtgcagtacctggatgtgggcctgtggcatctggccttctacaatgatggaaaagacaaagagatggtttccttcaatactgttgtcctagattcagtgcaggactgtccacgtaactgccatgggaatggtgaatgtgtgtccggggtgtgtcactgtttcccaggatttctaggagcagactgtgctaaagctgcctgccctgtcctgtgcagtgggaatggacaatattctaaagggacgtgccagtgctacagcggctggaaaggtgcagagtgcgacgtgcccatgaatcagtgcatcgatccttcctgcgggggccacggctcctgcattgatgggaactgtgtctgctctgctggctacaaaggcgagcactgtgaggaagttgattgcttggatcccacctgctccagccacggagtctgtgtgaatggagaatgcctgtgcagccctggctggggtggtctgaactgtgagctggcgagggtccagtgcccagaccagtgcagtgggcatggcacgtacctgcctgacacgggcctctgcagctgcgatcccaactggatgggtcccgactgctctgttgatggctgccctgacttgtgcaacggtaacgggagatgcacactgggtcagaacagctggcagtgtgtctgccagaccggctggagagggcccggatgcaacgttgccatggaaacttcctgtgctgataacaaggataatgagggagatggcctggtggattgtttggaccctgactgctgcctgcagtcagcctgtcagaacagcctgctctgccgggggtcccgggacccactggacatcattcagcagggccagacggattggcccgcagtgaagtccttctatgaccgtatcaagctcttggcaggcaaggatagcacccacatcattcctggagagaaccctttcaacagcagcttggtttctctcatccgaggccaagtagtaactacagatggaactcccctggtcggtgtgaacgtgtcttttgtcaagtacccaaaatacggctacaccatcacccgccaggatggcacgttcgacctgatcgcaaatggaggtgcttccttgactctacactttgagcgagccccgttcatgagccaggagcgcactgtgtggctgccgtggaacagcttttacgccatggacaccctggtgatgaagaccgaggagaactccatccccagctgtgacctcagtggctttgtccggcctgatccaatcatcatctcctccccactgtccaccttctttagtgctgcccctgggcagaatcccatcgtgcctgagacccaggttcttcatgaagaaatcgagctccctggttccaatgtgaaacttcgctatctgagctctagaactgcagggtacaagtcactgctgaagatcaccatgacccagtccacagtgcccctgaacctcattagggttcacctgatggtggctgtcgaggggcatctcttccagaagtcattccaggcttctcccaacctggcctacaccttcatctgggacaagacagatgcgtatggccaaagggtgtatggactctcagatgctgttgtgtctgtcgggtttgaatatgagacctgtcccagtctaattctctgggagaaaaggacagccctccttcagggattcgagctggacccctccaacctcggtggctggtccctagacaaacaccacatcctcaatgttaaaagtggaatcctacacaaaggcactggggaaaaccagttcctgacccagcagcctgccatcatcaccagcatcatgggcaatggtcgccgccggagcatttcctgtcccagctgcaacggccttgctgaaggcaacaagctgctggccccagtggctctggctgttggaatcgatgggagcctctatgtgggtgacttcaattacatccgacgcatctttccctctcgaaatctcgagggc

SEQ ID NO: 126 - protein, 761 aa, Homo sapiens
TKLKNSSIDSGEAEVGRRVTQEVPPGVFWRSQIHISQPQFLKFNISLGKDALFGVYIRRGLPPSHAQYDFMERLDGKEKWSVVESPRERRSIQTLVQNEAVFVQYLDVGLWHLAFYNDGKDKEMVSFNTVVLDSVQDCPRNCHGNGECVSGVCHCFPGFLGADCAKAACPVLCSGNGQYSKGTCQCYSGWKGAECDVPMNQCIDPSCGGHGSCIDGNCVCSAGYKGEHCEEVDCLDPTCSSHGVCVNGECLCSPGWGGLNCELARVQCPDQCSGHGTYLPDTGLCSCDPNWMGPDCSVDGCPDLCNGNGRCTLGQNSWQCVCQTGWRGPGCNVAMETSCADNKDNEGDGLVDCLDPDCCLQSACQNSLLCRGSRDPLDIIQQGQTDWPAVKSFYDRIKLLAGKDSTHIIPGENPFNSSLVSLIRGQVVTTDGTPLVGVNVSFVKYPKYGYTITRQDGTFDLIANGGASLTLHFERAPFMSQERTVWLPWNSFYAMDTLVMKTEENSIPSCDLSGFVRPDPIIISSPLSTFFSAAPGQNPIVPETQVLHEEIELPGSNVKLRYLSSRTAGYKSLLKITMTQSTVPLNLIRVHLMVAVEGHLFQKSFQASPNLAYTFIWDKTDAYGQRVYGLSDAVVSVGFEYETCPSLILWEKRTALLQGFELDPSNLGGWSLDKHHILNVKSGILHKGTGENQFLTQQPAIITSIMGNGRRRSISCPSCNGLAEGNKLLAPVALAVGIDGSLYVGDFNYIRRIFPSRNLEG

SEQ ID NO: 127 - DNA, 1431 bp, Homo sapiens
  CDS (69)..(1211)
  misc_feature (1303)..(1303): Wherein n may be a, c, g or t
aaaaaaggcggggggtggacttagcagtgtaatttgagaccggtggtaaggattggagcgagctagagatgctgcacgctgctaacaagggaaggaagccttcagctgaggcaggtcgtcccattccacctacatcctcgcctagtctcctcccatctgctcagctgcctagctcccataatcctccaccagttagctgccagatgccattgctagacagcaacacctcccatcaaatcatggacaccaaccctgatgaggaattctcccccaattcatacctgctcagagcatgctcagggccccagcaagcctccagcagtggccctccgaaccaccacagccagtcgactctgaggccccctctcccaccccctcacaaccacacgctgtcccatcaccactcgtccgccaactccctcaacaggaactcactgaccaatcggcggagtcagatccacgccccggccccagcgcccaatgacctggccaccacaccagagtccgttcagcttcaggacagctgggtgctaaacagcaacgtgccactggagacccggcacttcctcttcaagacctcctcggggagcacacccttgttcagcagctcttccccgggataccctttgacctcaggaacggtttacacgcccccgccccgcctgctgcccaggaatactttctccaggaaggctttcaagctgaagaagccctccaaatactgcagctggaaatgtgctgccctctccgccattgccgcggccctcctcttggctattttgctggcgtatttcatagtgccctggtcgttgaaaaacagcagcatagacagtggtgaagcagaagttggtcggcgggtaacacaagaagtcccaccaggggtgttttggaggtcacaaattcacatcagtcagccccagttcttaaagttcaacatctccctcgggaaggacgctctctttggtgtttacataagaagaggacttccaccatctcatgcccagtatgacttcatggaacgtctggacgggaaggagaagtggagtgtggttgagtctcccagggaacgccggagcatacagaccttggttcagaatgaagccgtgtttgtgcagtacctggatgtgggcctgtggcatctggccttctacaatgatggaaaagacaaagagatggtttccttcaatactgttgtcctagatgggaccatctagttgcagaaaaacaagctcagggcgcccactgatttgacattatgattcagtgcaggactgtccacgtaactgccatgggaatggtgaantgtgtgtccggggtgtgtcactgtttcccaggatttctaggagcagactgtgctaaagaccttcctgccttgactttctgcaagacaatcattaataaagctgctctgtaaatactaaaaaaaaaaca

SEQ ID NO: 128 - protein, 381 aa, Homo sapiens
MLHAANKGRKPSAEAGRPIPPTSSPSLLPSAQLPSSHNPPPVSCQMPLLDSNTSHQIMDTNPDEEFSPNSYLLRACSGPQQASSSGPPNHHSQSTLRPPLPPPHNHTLSHHHSSANSLNRNSLTNRRSQIHAPAPAPNDLATTPESVQLQDSWVLNSNVPLETRHFLFKTSSGSTPLFSSSSPGYPLTSGTVYTPPPRLLPRNTFSRKAFKLKKPSKYCSWKCAALSAIAAALLLAILLAYFIVPWSLKNSSIDSGEAEVGRRVTQEVPPGVFWRSQIHISQPQFLKFNISLGKDALFGVYIRRGLPPSHAQYDFMERLDGKEKWSVVESPRERRSIQTLVQNEAVFVQYLDVGLWHLAFYNDGKDKEMVSFNTVVLDGTI

SEQ ID NO: 129 - DNA, 1447 bp, Homo sapiens
  CDS (277)..(1446)
gctccaaagcgagctgggaccgaagactctaggctaagttatctatgtagatggtgtcagggagcgaagctactgaccgagctgctgttacatccagctttttaattgcctaagcggtctggggcttgcttcgtcatttggctttgctgtggagcactcctgtaaagccagctgaattgtacatcgaagatccacccttttggtggcaaagtgacaagtgccaaaactcaggcctgacttttctgaaaacatcagcattctgccatatctggaataatggatgtaaaggaccggcgacaccgctctttgaccagaggacgctgtggcaaagagtgtcgctacacaagctcctctctggacagtgaggactgccgggtgcccacacagaaatcctacagctccagtgagactctgaaggcctatgaccatgacagcaggatgcactatggaaaccgagtcacagacctcatccaccgggagtcagatgagtttcctagacaaggaaccaacttcacccttgccgaactgggcatctgtgagccctccccacaccgaagcggctactgctccgacatggggatccttcaccagggctactcccttagcacagggtctgacgccgactccgacaccgagggagggatgtctccagaacacgccatcagactgtggggcagagggataaaatccaggcgcagttccggcctgtccagtcgtgaaaactcggcccttaccctgactgactctgacaacgaaaacaaatcagatgatgagaacggtcgtcccattccacctacatcctcgcctagtctcctcccatctgctcagctgcctagctcccataatcctccaccagttagctgccagatgccattgctagacagcaacacctcccatcaaatcatggacaccaaccctgatgaggaattctcccccaattcatacctgctcagagcatgctcagggccccagcaagcctccagcagtggccctccgaaccaccacagccagtcgactctgaggccccctctcccaccccctcacaaccacacgctgtcccatcaccactcgtccgccaactccctcaacaggaactcactgaccaatcggcggagtcagatccacgccccggccccagcgcccaatgacctggccaccacaccagagtccgttcagcttcaggacagctgggtgctaaacagcaacgtgccactggagacccggcacttcctcttcaagacctcctcggggagcacacccttgttcagcagctcttccccgggataccctttgacctcaggaacggtttacacgcccccgccccgcctgctgcccaggaatactttctccaggaaggctttcaagctgaagaagccctccaaatactgcagctggaaatgtgctgccctctccgccattgccgcggccctcctcttggctattttgc

SEQ ID NO: 130 - protein, 390 aa, Homo sapiens
MDVKDRRHRSLTRGRCGKECRYTSSSLDSEDCRVPTQKSYSSSETLKAYDHDSRMHYGNRVTDLIHRESDEFPRQGTNFTLAELGICEPSPHRSGYCSDMGILHQGYSLSTGSDADSDTEGGMSPEHAIRLWGRGIKSRRSSGLSSRENSALTLTDSDNENKSDDENGRPIPPTSSPSLLPSAQLPSSHNPPPVSCQMPLLDSNTSHQIMDTNPDEEFSPNSYLLRACSGPQQASSSGPPNHHSQSTLRPPLPPPHNHTLSHHHSSANSLNRNSLTNRRSQIHAPAPAPNDLATTPESVQLQDSWVLNSNVPLETRHFLFKTSSGSTPLFSSSSPGYPLTSGTVYTPPPRLLPRNTFSRKAFKLKKPSKYCSWKCAALSAIAAALLLAIL

SEQ ID NO: 131 - DNA, 4888 bp, Homo sapiens
  CDS (247)..(1839)
tactcactatagggctcgagcggccgcccgggcaggtccagcattagatgagttgacaaaaatgcagtttcagctctgaaggtctgaaagattctgctgcaactaaagctctgaagattctgctacaactatgacatccattttctcccacttcagacaggatgaatacaaggtggcaaagtgacaagtgccaaaactcaggcctgactttcctgaaaacatcagcattctgccatatctggaataatggatgtaaaggaccggcgacaccgctctttgaccagaggacgctgtggcaaagagtgtcgctacacaagctcctctctggacagtgaggactgccgggtgcccacacagaaatcctacagctccagtgagactctgaaggcctatgaccatgacagcaggatgcactatggaaaccgagtcacagacctcatccaccgggagtcagatgagtttcctagacaaggaaccaacttcacccttgccgaactgggcatctgtgagccctccccacaccgaagcggctactgctccgacatggggatccttcaccagggctactcccttagcacagggtctgacgccgactccgacaccgagggagggatgtctccagaacacgccatcagactgtggggcagagggataaaatccaggcgcagttccggcctgtccagtcgtgaaaactcggcccttaccctgactgactctgacaacgaaaacaaatcagatgatgagaacggtcgtcccattccacctacatcctcgcctagtctcctcccatctgctcagctgcctagctcccataatcctccaccagttagctgccagatgccattgctagacagcaacacctcccatcaaatcatggacaccaaccctgatgaggaattctcccccaattcatacctgctcagagcatgctcagggccccagcaagcctccagcagtggccctccgaaccaccacagccagtcgactctgaggccccctctcccaccccctcacaaccacacgctgtcccatcaccactcgtccgccaactccctcaacaggaactcactgaccaatcggcggagtcagatccacgccccggccccagcgcccaatgacctggccaccacaccagagtccgttcagcttcaggacagctgggtgctaaacagcaacgtgccactggagacccggcacttcctcttcaagacctcctcggggagcacacccttgttcagcagctcttccccgggataccctttgacctcaggaacggtttacacgcccccgccccgcctgctgcccaggaatactttctccaggaaggctttcaagctgaagaagccctccaaatactgcagctggaaatgtgctgccctctccgccattgccgcggccctcctcttggctattttgctggcgtatttcatagtgccctggtcgttgaaaaacagcagcatagacagtggtgaagcagaagttggtcggcgggtaacacaagaagtcccaccaggggtgttttggaggtcacaaattcacatcagtcagccccagttcttaaagttcaacatctccctcgggaaggacgctctctttggtgtttacataagaagaggacttccaccatctcatgcccagtatgacttcatggaacgtctggacgggaaggagaagtggagtgtggttgagtctcccagggaacgccggagcatacagaccttggttcagaatgaagccgtgtttgtgcagtacctggatgtgggcctgtggcatctggccttctacaatgatggaaaagacaaagagatggtttccttcaatactgttgtcctagatagctgaggtagccggctctggcctcggctagcccagaaaggggctcccacagtgcagcagcgggctgaagggctcctcaagcgtggccagagtgggcgctgaggccgaggaggcaccgagagcgagcgagggctgcaaggtctgccagcacgctgtcacttctcactattttgattggtattgtgtccggaattggtgggttcttggtctcactgacttcaagaatgaagccacggaccctcgcgttacatccagctttttaattgcctaagcggtctggggcttgcttcgtcatttggctttgctgtggagcactcctgtaaagccagctgaattgtacatcgaagatccacccttttggtggcaaagtgacaagtgccaaaactcaggcctgacttttctgaaaacatcagcattctgccatatctggaataatggatgtaaaggaccggcgacaccgctctttgaccagaggacgctgtggcaaagagtgtcgctacacaagctcctctctggacagtgaggactgccgggtgcccacacagaaatcctacagctccagtgagactctgaaggcctatgaccatgacagcaggatgcactatggaaaccgagtcacagacctcatccaccgggagtcagatgagtttcctagacaaggaaccaacttcacccttgccgaactgggcatctgtgagccctccccacaccgaagcggctactgctccgacatggggatccttcaccagggctactcccttagcacagggtctgacgccgactccgacaccgagggagggatgtctccagaacacgccatcagactgtggggcagagggataaaatccaggcgcagttccggcctgtccagtcgtgaaaactcggcccttaccctgactgactctgacaacgaaaacaaatcagatgatgagaacggtcgtcccattccacctacatcctcgcctagtctcctcccatctgctcagctgcctagctcccataatcctccaccagttagctgccagatgccattgctagacagcaacacctcccatcaaatcatggacaccaaccctgatgaggaattctcccccaattcatacctgctcagagcatgctcagggccccagcaagcctccagcagtggccctccgaaccaccacagccagtcgactctgaggccccctctcccaccccctcacaaccacacgctgtcccatcaccactcgtccgccaactccctcaacaggaactcactgaccaatcggcggagtcagatccacgccccggccccagcgcccaatgacctggccaccacaccagagtccgttcagcttcaggacagctgggtgctaaacagcaacgtgccactggagacccggcacttcctcttcaagacctcctcggggagcacacccttgttcagcagctcttccccgggataccctttgacctcaggaacggtttacacgcccccgccccgcctgctgcccaggaatactttctccaggaaggctttcaagctgaagaagccctccaaatactgcagctggaaatgtgctgccctctccgccattgccgcggccctcctcttggctattttgcgctccaaagcgagctgggaccgaagactctaggctaagttatctatgtagatggtgtcagggagcgaagctactgaccgagctgctgttacatccagctttttaattgcctaagcggtctggggcttgcttcgtcatttggctttgctgtggagcactcctgtaaagccagctgaattgtacatcgaagatccacccttttggtggcaaagtgacaagtgccaaaactcaggcctgacttttctgaaaacatcagcattctgccatatctggaataatggatgtaaaggaccggcgacaccgctctttgaccagaggacgctgtggcaaagagtgtcgctacacaagctcctctctggacagtgaggactgccgggtgcccacacagaaatcctacagctccagtgagactctgaaggcctatgaccatgacagcaggatgcactatggaaaccgagtcacagacctcatccaccgggagtcagatgagtttcctagacaaggaaccaacttcacccttgccgaactgggcatctgtgagccctccccacaccgaagcggctactgctccgacatggggatccttcaccagggctactcccttagcacagggtctgacgccgactccgacaccgagggagggatgtctccagaacacgccatcagactgtggggcagagggataaaatccaggcgcagttccggcctgtccagtcgtgaaaactcggcccttaccctgactgactctgacaacgaaaacaaatcagatgatgagaacggtcgtcccattccacctacatcctcgcctagtctcctcccatctgctcagctgcctagctcccataatcctccaccagttagctgccagatgccattgctagacagcaacacctcccatcaaatcatggacaccaaccctgatgaggaattctcccccaattcatacctgctcagagcatgctcagggccccagcaagcctccagcagtggccctccgaaccaccacagccagtcgactctgaggccccctctcccaccccctcacaaccacacgctgtcccatcaccactcgtccgccaactccctcaacaggaactcactgaccaatcggcggagtcagatccacgccccggccccagcgcccaatgacctggccaccacaccagagtccgttcagcttcaggacagctgggtgctaaacagcaacgtgccactggagacccggcacttcctcttcaagacctcctcggggagcacacccttgttcagcagctcttccccgggataccctttgacctcaggaacggtttacacgcccccgccccgcctgctgcccaggaatactttctccaggaaggctttcaagctgaagaagccctccaaatactgcagctggaaatgtgctgccctctccgccattgccgcggccctcctcttggctattttgc

SEQ ID NO: 132 - protein, 531 aa, Homo sapiens
MDVKDRRHRSLTRGRCGKECRYTSSSLDSEDCRVPTQKSYSSSETLKAYDHDSRMHYGNRVTDLIHRESDEFPRQGTNFTLAELGICEPSPHRSGYCSDMGILHQGYSLSTGSDADSDTEGGMSPEHAIRLWGRGIKSRRSSGLSSRENSALTLTDSDNENKSDDENGRPIPPTSSPSLLPSAQLPSSHNPPPVSCQMPLLDSNTSHQIMDTNPDEEFSPNSYLLRACSGPQQASSSGPPNHHSQSTLRPPLPPPHNHTLSHHHSSANSLNRNSLTNRRSQIHAPAPAPNDLATTPESVQLQDSWVLNSNVPLETRHFLFKTSSGSTPLFSSSSPGYPLTSGTVYTPPPRLLPRNTFSRKAFKLKKPSKYCSWKCAALSAIAAALLLAILLAYFIVPWSLKNSSIDSGEAEVGRRVTQEVPPGVFWRSQIHISQPQFLKFNISLGKDALFGVYIRRGLPPSHAQYDFMERLDGKEKWSVVESPRERRSIQTLVQNEAVFVQYLDVGLWHLAFYNDGKDKEMVSFNTVVLDS

SEQ ID NO: 133 - DNA, 1605 bp, Homo sapiens
  CDS (435)..(1604)
agctgaggtagccggctctggcctcggctagcccagaaaggggctcccacagtgcagcagcgggctgaagggctcctcaagcgtggccagagtgggcgctgaggccgaggaggcaccgagagcgagcgagggctgcaaggtctgccagcacgctgtcacttctcactattttgattggtattgtgtccggaattggtgggttcttggtctcactgacttcaagaatgaagccacggaccctcgcgttacatccagctttttaattgcctaagcggtctggggcttgcttcgtcatttggctttgctgtggagcactcctgtaaagccagctgaattgtacatcgaagatccacccttttggtggcaaagtgacaagtgccaaaactcaggcctgacttttctgaaaacatcagcattctgccatatctggaataatggatgtaaaggaccggcgacaccgctctttgaccagaggacgctgtggcaaagagtgtcgctacacaagctcctctctggacagtgaggactgccgggtgcccacacagaaatcctacagctccagtgagactctgaaggcctatgaccatgacagcaggatgcactatggaaaccgagtcacagacctcatccaccgggagtcagatgagtttcctagacaaggaaccaacttcacccttgccgaactgggcatctgtgagccctccccacaccgaagcggctactgctccgacatggggatccttcaccagggctactcccttagcacagggtctgacgccgactccgacaccgagggagggatgtctccagaacacgccatcagactgtggggcagagggataaaatccaggcgcagttccggcctgtccagtcgtgaaaactcggcccttaccctgactgactctgacaacgaaaacaaatcagatgatgagaacggtcgtcccattccacctacatcctcgcctagtctcctcccatctgctcagctgcctagctcccataatcctccaccagttagctgccagatgccattgctagacagcaacacctcccatcaaatcatggacaccaaccctgatgaggaattctcccccaattcatacctgctcagagcatgctcagggccccagcaagcctccagcagtggccctccgaaccaccacagccagtcgactctgaggccccctctcccaccccctcacaaccacacgctgtcccatcaccactcgtccgccaactccctcaacaggaactcactgaccaatcggcggagtcagatccacgccccggccccagcgcccaatgacctggccaccacaccagagtccgttcagcttcaggacagctgggtgctaaacagcaacgtgccactggagacccggcacttcctcttcaagacctcctcggggagcacacccttgttcagcagctcttccccgggataccctttgacctcaggaacggtttacacgcccccgccccgcctgctgcccaggaatactttctccaggaaggctttcaagctgaagaagccctccaaatactgcagctggaaatgtgctgccctctccgccattgccgcggccctcctcttggctattttgc

SEQ ID NO: 134 - protein, 390 aa, Homo sapiens; identical to SEQ ID NO: 130

SEQ ID NO: 135 - DNA, 9668 bp, Homo sapiens
  CDS (122)..(8320)
gggagttggaaccagcattagatgagttgacaaaaatgcagtttcaggtggcaaagtgacaagtgccaaaactcaggcctgacttttctgaaaacatcagcattctgccatatctggaataatggatgtaaaggaccggcgacaccgctctttgaccagaggacgctgtggcaaagagtgtcgctacacaagctcctctctggacagtgaggactgccgggtgcccacacagaaatcctacagctccagtgagactctgaaggcctatgaccatgacagcaggatgcactatggaaaccgagtcacagacctcatccaccgggagtcagatgagtttcctagacaaggaaccaacttcacccttgccgaactgggcatctgtgagccctccccacaccgaagcggctactgctccgacatggggatccttcaccagggctactcccttagcacagggtctgacgccgactccgacaccgagggagggatgtctccagaacacgccatcagactgtggggcagagggataaaatccaggcgcagttccggcctgtccagtcgtgaaaactcggcccttaccctgactgactctgacaacgaaaacaaatcagatgatgagaacggtcgtcccattccacctacatcctcgcctagtctcctcccatctgctcagctgcctagctcccataatcctccaccagttagctgccagatgccattgctagacagcaacacctcccatcaaatcatggacaccaaccctgatgaggaattctcccccaattcatacctgctcagagcatgctcagggccccagcaagcctccagcagtggccctccgaaccaccacagccagtcgactctgaggccccctctcccaccccctcacaaccacacgctgtcccatcaccactcgtccgccaactccctcaacaggaactcactgaccaatcggcggagtcagatccacgccccggccccagcgcccaatgacctggccaccacaccagagtccgttcagcttcaggacagctgggtgctaaacagcaacgtgccactggagacccggcacttcctcttcaagacctcctcggggagcacacccttgttcagcagctcttccccgggataccctttgacctcaggaacggtttacacgcccccgccccgcctgctgcccaggaatactttctccaggaaggctttcaagctgaagaagccctccaaatactgcagctggaaatgtgctgccctctccgccattgccgcggccctcctcttggctattttgctggcgtatttcatagtgccctggtcgttgaaaaacagcagcatagacagtggtgaagcagaagttggtcggcgggtaacacaagaagtcccaccaggggtgttttggaggtcacaaattcacatcagtcagccccagttcttaaagttcaacatctccctcgggaaggacgctctctttggtgtttacataagaagaggacttccaccatctcatgcccagtatgacttcatggaacgtctggacgggaaggagaagtggagtgtggttgagtctcccagggaacgccggagcatacagaccttggttcagaatgaagccgtgtttgtgcagtacctggatgtgggcctgtggcatctggccttctacaatgatggaaaagacaaagagatggtttccttcaatactgttgtcctagattcagtgcaggactgtccacgtaactgccatgggaatggtgaatgtgtgtccggggtgtgtcactgtttcccaggatttctaggagcagactgtgctaaagctgcctgccctgtcctgtgcagtgggaatggacaatattctaaagggacgtgccagtgctacagcggctggaaaggtgcagagtgcgacgtgcccatgaatcagtgcatcgatccttcctgcgggggccacggctcctgcattgatgggaactgtgtctgctctgctggctacaaaggcgagcactgtgaggaagttgattgcttggatcccacctgctccagccacggagtctgtgtgaatggagaatgcctgtgcagccctggctggggtggtctgaactgtgagctggcgagggtccagtgcccagaccagtgcagtgggcatggcacgtacctgcctgacacgggcctctgcagctgcgatcccaactggatgggtcccgactgctctgttgaagtgtgctcagtagactgtggcactcacggcgtctgcatcgggggagcctgccgctgtgaagagggctggacaggcgcagcgtgtgaccagcgcgtgtgccacccccgctgcattgagcacgggacctgtaaagatggcaaatgtgaatgccgagagggctggaatggtgaacactgcaccattggtaggcaaacggcaggcaccgaaacagatggctgccctgacttgtgcaacggtaacgggagatgcacactgggtcagaacagctggcagtgtgtctgccagaccggctggagagggcccggatgcaacgttgccatggaaacttcctgtgctgataacaaggataatgagggagatggcctggtggattgtttggaccctgactgctgcctgcagtcagcctgtcagaacagcctgctctgccgggggtcccgggacccactggacatcattcagcagggccagacggattggcccgcagtgaagtccttctatgaccgtatcaagctcttggcaggcaaggatagcacccacatcattcctggagagaaccctttcaacagcagcttggtttctctcatccgaggccaagtagtaactacagatggaactcccctggtcggtgtgaacgtgtcttttgtcaagtacccaaaatacggctacaccatcacccgccaggatggcacgttcgacctgatcgcaaatggaggtgcttccttgactctacactttgagcgagccccgttcatgagccaggagcgcactgtgtggctgccgtggaacagcttttacgccatggacaccctggtgatgaagaccgaggagaactccatccccagctgtgacctcagtggctttgtccggcctgatccaatcatcatctcctccccactgtccaccttctttagtgctgcccctgggcagaatcccatcgtgcctgagacccaggttcttcatgaagaaatcgagctccctggttccaatgtgaaacttcgctatctgagctctagaactgcagggtacaagtcactgctgaagatcaccatgacccagtccacagtgcccctgaacctcattagggttcacctgatggtggctgtcgaggggcatctcttccagaagtcattccaggcttctcccaacctggcctccaccttcatctgggacaagacagatgcgtatggccaaagggtgtatggactctcagatgctgttgtgtctgtcgggtttgaatatgagacctgtcccagtctaattctctgggagaaaaggacagccctccttcagggattcgagctggacccctccaacctcggtggctggtccctagacaaacaccacatcctcaatgttaaaagtggaatcctacacaaaggcactggggaaaaccagttcctgacccagcagcctgccatcatcaccagcatcatgggcaatggtcgccgccggagcatttcctgtcccagctgcaacggccttgctgaaggcaacaagctgctggccccagtggctctggctgttggaatcgatgggagcctctatgtgggtgacttcaattacatccgacgcatctttccctctcgaaatgtgaccagcatcttggagttacgaaataaagagtttaaacatagcaacaacccagcacacaagtactacttggcagtggaccccgtgtccggctcgctctacgtgtccgacaccaacagcaggagaatctaccgcgtcaagtctctgagtggaaccaaagacctggctgggaattcggaagttgtggcagggacgggagagcagtgtctaccctttgatgaagcccgctgcggggatggagggaaggccatagatgcaaccctgatgagcccgagaggtattgcagtagacaagaatgggctcatgtactttgtcgatgccaccatgatccggaaggttgaccagaatggaatcatctccaccctgctgggctccaatgacctcactgccgtccggccgctgagctgtgattccagcatggatgtagcccaggttcgtctggagtggccaacagaccttgctgtcaatcccatggataactccttgtatgttctagagaacaatgtcatccttcgaatcaccgagaaccaccaagtcagcatcattgcgggacgccccatgcactgccaagttcctggcattgactactcactcagcaaactagccattcactctgccctggagtcagccagtgccattgccatttctcacactggggtcctctacatcactgagacagatgagaagaagattaaccgtctacgccaggtaacaaccaacggggagatctgccttttagctggggcagcctcggactgcgactgcaaaaacgatgtcaattgcaactgctattcaggagatgatgcctacgcgactgatgccatcttgaattccccatcatccttagctgtagctccagatggtaccatttacattgcagaccttggaaatattcggatcagggcggtcagcaagaacaagcctgttcttaatgccttcaaccagtatgaggctgcatcccccggagagcaggagttatatgttttcaacgctgatggcatccaccaatacactgtgagcctggtgacaggggagtacttgtacaatttcacatatagtactgacaatgatgtcactgaattgattgacaataatgggaattccctgaagatccgtcgggacagcagtggcatgccccgtcacctgctcatgcctgacaaccagatcatcaccctcaccgtgggcaccaatggaggcctcaaagtcgtgtccacacagaacctggagcttggtctcatgacctatgatggcaacactgggctcctggccaccaagagcgatgaaacaggatggacgactttctatgactatgaccacgaaggccgcctgaccaacgtgacgcgccccacgggggtggtaaccagtctgcaccgggaaatggagaaatctattaccattgacattgagaactccaaccgtgatgatgacgtcactgtcatcaccaacctctcttcagtagaggcctcctacacagtggtacaagatcaagttcggaacagctaccagctctgtaataatggtaccctgagggtgatgtatgctaatgggatgggtatcagcttccacagcgagccccatgtcctagcgggcaccatcacccccaccattggacgctgcaacatctccctgcctatggagaatggcttaaactccattgagtggcgcctaagaaaggaacagattaaaggcaaagtcaccatctttggcaggaagctccgggtccatggaagaaatctcttgtccattgactatgatcgaaatattcggactgaaaagatctatgatgaccaccggaagttcaccctgaggatcatttatgaccaggtgggccgccccttcctctggctgcccagcagcgggctggcagctgtcaacgtgtcatacttcttcaatgggcgcctggctgggcttcagcgtggggccatgagcgagaggacagacatcgacaagcaaggccgcatcgtgtcccgcatgttcgctgacgggaaagtgtggagctactcctaccttgacaagtccatggtcctcctgcttcagagccaacgtcagtatatatttgagtatgactcctctgaccgcctccttgccgtcaccatgcccagcgtggcccggcacagcatgtccacacacacctccatcggctacatccgtaatatttacaacccgcctgaaagcaatgcttcggtcatctttgactacagtgatgacggccgcatcctgaagacctcctttttgggcaccggacgccaggtgttctacaagtatgggaaactctccaagttatcagagattgtctacgacagtaccgccgtcaccttcgggtatgacgagaccactggtgtcttgaagatggtcaacctccaaagtgggggcttctcctgcaccatcaggtaccggaagattggccccctggtggacaagcagatctacaggttctccgaggaaggcatggtcaatgccaggtttgactacacctatcatgacaacagcttccgcatcgcaagcatcaagcccgtcataagtgagactcccctccccgttgacctctaccgctatgatgagatttctggcaaggtggaacactttggtaagtttggagtcatctattatgacatcaaccagatcatcaccactgccgtgatgaccctcagcaaacacttcgacacccatgggcggatcaaggaggtccagtatgagatgttccggtccctcatgtactggatgacggtgcaatatgacagcatgggcagggtgatcaagagggagctaaaactggggccctatgccaataccacgaagtacacctatgactacgatggggacgggcagctccagagcgtggccgtcaatgaccgcccgacctggcgctacagctatgaccttaatgggaatctccacttactgaacccaggcaacagtgtgcgcctcatgcccttgcgctatgacctccgggatcggataaccagactcggggatgtgcagtacaaaattgacgacgatggctatctgtgccagagagggtctgacatcttcgaatacaattccaagggcctcctaacaagagcctacaacaaggccagcgggtggagtgtccagtaccgctatgatggcgtaggacggcgggcttcctacaagaccaacctgggccaccacctgcagtacttctactctgacctccacaacccgacgcgcatcacccatgtctacaatcactccaactcggagattacctcactgtactacgacctccagggccacctctttgccatggagagcagcagtggggaggagtactatgttgcctctgataacacagggactcctctggctgtgttcagcatcaacggcctcatgatcaaacagctgcagtacacggcctatggggagatttattatgactccaaccccgacttccagatggtcattggcttccatgggggactctatgaccccctgaccaagctggtccacttcactcagcgtgattatgatgtgctggcaggacgatggacctccccagactataccatgtggaaaaacgtgggcaaggagccggccccctttaacctgtatatgttcaagagcaacaatcctctcagcagtgagctagatttgaagaactacgtgacagatgtgaaaagctggcttgtgatgtttggatttcagcttagcaacatcattcctggcttcccgagagccaaaatgtatttcgtgcctcctccctatgaattgtcagagagtcaagcaagtgagaatggacagctcattacaggtgtccaacagacaacagagagacataaccaggccttcatggctctggaaggacaggtcattactaaaaagctccacgccagcatccgagagaaagcaggtcactggtttgccaccaccacgcccatcattggcaaaggcatcatgtttgccatcaaagaagggcgggtgaccacgggcgtgtccagcatcgccagcgaagatagccgcaaggtggcatctgtgctgaacaacgcctactacctggacaagatgcactacagcatcgagggcaaggacacccactactttgtgaagattggctcagccgatggcgacctggtcacactaggcaccaccatcggccgcaaggtgctagagagcggggtgaacgtgaccgtgtcccagcccacgctgctggtcaacggcaggactcgaaggttcacgaacattgagttccagtactccacgctgctgctcagcatccgctatggcctcacccccgacaccctggacgaagagaaggcccgcgtcctggaccaggcgagacagagggccctgggcacggcctgggccaaggagcagcagaaagccagggacgggagagaggggagccgcctgtggactgagggcgagaagcagcagcttctgagcaccgggcgcgtgcaagggtacgagggatattacgtgcttcccgtggagcaatacccagagcttgcagacagtagcagcaacatccagtttttaagacagaatgagatgggaaagaggtaacaaaataatctgctgccattccttgtctgaatggctcagcaggagtaactgttatctcctctcctaaggagatgaagacctaacaggggcactgcggctgggctgctttaggagaccaagtggcaagaaagctcacattttttgagttcaaatgctactgtccaagcgagaagtccctcatcctgaagtagactaaagcccggctgaaaattccgaggaaaacaaaacaaacgaatgaatgaacagacacacacaatgttccaagttcccctaaaatatgacccacttgttctgggtctacgcagaaaagagacgcaaagtgtccaaaaggaacaaaagaacaaaaacgaataagcaaagaagaaaacaaacaaaaacaaaacaaaacaaacacacggaccgataaacaaagaagcgaagataagaaagaaggcctcatatccaattacctcactcattcacatgtgagcgacacgcagacatccgcgagggccagcgtcaccagaccagctgcgggacaaaccactcagactgcttgtaggacaaatacttctgacattttcgtttaagcaaatacaggtgcatttaaaacacgactttgggggtgatttgtgtgtagcgcctggggaggggggataaaagaggaggagtgagcactggaaatactttttaaagaaaaaaaaacatgagggaataaaagaaattcctatcaaaaatcaaagtgaaataataccatccagcacttaactctcaggtcccaactaagtctggcctgagctaatttatttgagcgcagagtgtaaaatttaattcaaaatggtggctataatcactacagataaatttcatactcttttgtctttggagattccattgtggacagtaatacgcagttacagggtgtagtctgtttagattccgtagttcgtgggtatcagtttcggtagaggtgcagcatcgtgacacttttgctaacaggtaccacttctgatcaccctgtacatacatgagccgaaaggcacaatcactgtttcagatttaaaattattagtgtgtttgtttggtccagaaactgagacaatcacatgacagtcaccacgaggagagaaaatttaaaaaataaaaataaaaacaaaaaaaattttaaaaattaaaaaaacaaaaataaagtctaataagaactttggtacaggaacttttttgtaatatacatgtatgaattgttcatcgagtttttatattaattttaatttgctgctaagcaaagactagggacaggcaaagataatttatggcaaagtgtttaaattgtttatacataaataaagtctctaaaactcctgtg

SEQ ID NO: 136 - protein, 2733 aa, Homo sapiens
MDVKDRRHRSLTRGRCGKECRYTSSSLDSEDCRVPTQKSYSSSETLKAYDHDSRMHYGNRVTDLIHRESDEFPRQGTNFTLAELGICEPSPHRSGYCSDMGILHQGYSLSTGSDADSDTEGGMSPEHAIRLWGRGIKSRRSSGLSSRENSALTLTDSDNENKSDDENGRPIPPTSSPSLLPSAQLPSSHNPPPVSCQMPLLDSNTSHQIMDTNPDEEFSPNSYLLRACSGPQQASSSGPPNHHSQSTLRPPLPPPHNHTLSHHHSSANSLNRNSLTNRRSQIHAPAPAPNDLATTPESVQLQDSWVLNSNVPLETRHFLFKTSSGSTPLFSSSSPGYPLTSGTVYTPPPRLLPRNTFSRKAFKLKKPSKYCSWKCAALSAIAAALLLAILLAYFIVPWSLKNSSIDSGEAEVGRRVTQEVPPGVFWRSQIHISQPQFLKFNISLGKDALFGVYIRRGLPPSHAQYDFMERLDGKEKWSVVESPRERRSIQTLVQNEAVFVQYLDVGLWHLAFYNDGKDKEMVSFNTVVLDSVQDCPRNCHGNGECVSGVCHCFPGFLGADCAKAACPVLCSGNGQYSKGTCQCYSGWKGAECDVPMNQCIDPSCGGHGSCIDGNCVCSAGYKGEHCEEVDCLDPTCSSHGVCVNGECLCSPGWGGLNCELARVQCPDQCSGHGTYLPDTGLCSCDPNWMGPDCSVEVCSVDCGTHGVCIGGACRCEEGWTGAACDQRVCHPRCIEHGTCKDGKCECREGWNGEHCTIGRQTAGTETDGCPDLCNGNGRCTLGQNSWQCVCQTGWRGPGCNVAMETSCADNKDNEGDGLVDCLDPDCCLQSACQNSLLCRGSRDPLDIIQQGQTDWPAVKSFYDRIKLLAGKDSTHIIPGENPFNSSLVSLIRGQVVTTDGTPLVGVNVSFVKYPKYGYTITRQDGTFDLIANGGASLTLHFERAPFMSQERTVWLPWNSFYAMDTLVMKTEENSIPSCDLSGFVRPDPIIISSPLSTFFSAAPGQNPIVPETQVLHEEIELPGSNVKLRYLSSRTAGYKSLLKITMTQSTVPLNLIRVHLMVAVEGHLFQKSFQASPNLASTFIWDKTDAYGQRVYGLSDAVVSVGFEYETCPSLILWEKRTALLQGFELDPSNLGGWSLDKHHILNVKSGILHKGTGENQFLTQQPAIITSIMGNGRRRSISCPSCNGLAEGNKLLAPVALAVGIDGSLYVGDFNYIRRIFPSRNVTSILELRNKEFKHSNNPAHKYYLAVDPVSGSLYVSDTNSRRIYRVKSLSGTKDLAGNSEVVAGTGEQCLPFDEARCGDGGKAIDATLMSPRGIAVDKNGLMYFVDATMIRKVDQNGIISTLLGSNDLTAVRPLSCDSSMDVAQVRLEWPTDLAVNPMDNSLYVLENNVILRITENHQVSIIAGRPMHCQVPGIDYSLSKLAIHSALESASAIAISHTGVLYITETDEKKINRLRQVTTNGEICLLAGAASDCDCKNDVNCNCYSGDDAYATDAILNSPSSLAVAPDGTIYIADLGNIRIRAVSKNKPVLNAFNQYEAASPGEQELYVFNADGIHQYTVSLVTGEYLYNFTYSTDNDVTELIDNNGNSLKIRRDSSGMPRHLLMPDNQIITLTVGTNGGLKVVSTQNLELGLMTYDGNTGLLATKSDETGWTTFYDYDHEGRLTNVTRPTGVVTSLHREMEKSITIDIENSNRDDDVTVITNLSSVEASYTVVQDQVRNSYQLCNNGTLRVMYANGMGISFHSEPHVLAGTITPTIGRCNISLPMENGLNSIEWRLRKEQIKGKVTIFGRKLRVHGRNLLSIDYDRNIRTEKIYDDHRKFTLRIIYDQVGRPFLWLPSSGLAAVNVSYFFNGRLAGLQRGAMSERTDIDKQGRIVSRMFADGKVWSYSYLDKSMVLLLQSQRQYIFEYDSSDRLLAVTMPSVARHSMSTHTSIGYIRNIYNPPESNASVIFDYSDDGRILKTSFLGTGRQVFYKYGKLSKLSEIVYDSTAVTFGYDETTGVLKMVNLQSGGFSCTIRYRKIGPLVDKQIYRFSEEGMVNARFDYTYHDNSFRIASIKPVISETPLPVDLYRYDEISGKVEHFGKFGVIYYDINQIITTAVMTLSKHFDTHGRIKEVQYEMFRSLMYWMTVQYDSMGRVIKRELKLGPYANTTKYTYDYDGDGQLQSVAVNDRPTWRYSYDLNGNLHLLNPGNSVRLMPLRYDLRDRITRLGDVQYKIDDDGYLCQRGSDIFEYNSKGLLTRAYNKASGWSVQYRYDGVGRRASYKTNLGHHLQYFYSDLHNPTRITHVYNHSNSEITSLYYDLQGHLFAMESSSGEEYYVASDNTGTPLAVFSINGLMIKQLQYTAYGEIYYDSNPDFQMVIGFHGGLYDPLTKLVHFTQRDYDVLAGRWTSPDYTMWKNVGKEPAPFNLYMFKSNNPLSSELDLKNYVTDVKSWLVMFGFQLSNIIPGFPRAKMYFVPPPYELSESQASENGQLITGVQQTTERHNQAFMALEGQVITKKLHASIREKAGHWFATTTPIIGKGIMFAIKEGRVTTGVSSIASEDSRKVASVLNNAYYLDKMHYSIEGKDTHYFVKIGSADGDLVTLGTTIGRKVLESGVNVTVSQPTLLVNGRTRRFTNIEFQYSTLLLSIRYGLTPDTLDEEKARVLDQARQRALGTAWAKEQQKARDGREGSRLWTEGEKQQLLSTGRVQGYEGYYVLPVEQYPELADSSSNIQFLRQNEMGKR

SEQ ID NO: 137 - DNA, 1920 bp, Homo sapiens
  CDS (180)..(1919)
ccagcattagatgagttgacaaaaatgcagtttcagctctgaaggtctgaaagattctgctgcaactaaagctctgaagattctgctacaactatgacatccattttctcccacttcagacaggatgaatacaaggtggcaaagtgacaagtgccaaaactcaggcctgactttcctgaaaacatcagcattctgccatatctggaataatggatgtaaaggaccggcgacaccgctctttgaccagaggacgctgtggcaaagagtgtcgctacacaagctcctctctggacagtgaggactgccgggtgcccacacagaaatcctacagctccagtgagactctgaaggcctatgaccatgacagcaggatgcactatggaaaccgagtcacagacctcatccaccgggagtcagatgagtttcctagacaaggaaccaacttcacccttgccgaactgggcatctgtgagccctccccacaccgaagcggctactgctccgacatggggatccttcaccagggctactcccttagcacagggtctgacgccgactccgacaccgagggagggatgtctccagaacacgccatcagactgtggggcagagggataaaatccaggcgcagttccggcctgtccagtcgtgaaaactcggcccttaccctgactgactctgacaacgaaaacaaatcagatgatgagaacggtcgtcccattccacctacatcctcgcctagtctcctcccatctgctcagctgcctagctcccataatcctccaccagttagctgccagatgccattgctagacagcaacacctcccatcaaatcatggacaccaaccctgatgaggaattctcccccaattcatacctgctcagagcatgctcagggccccagcaagcctccagcagtggccctccgaaccaccacagccagtcgactctgaggccccctctcccaccccctcacaaccacacgctgtcccatcaccactcgtccgccaactccctcaacaggaactcactgaccaatcggcggagtcagatccacgccccggccccagcgcccaatgacctggccaccacaccagagtccgttcagcttcaggacagctgggtgctaaacagcaacgtgccactggagacccggcacttcctcttcaagacctcctcggggagcacacccttgttcagcagctcttccccgggataccctttgacctcaggaacggtttacacgcccccgccccgcctgctgcccaggaatactttctccaggaaggctttcaagctgaagaagccctccaaatactgcagctggaaatgtgctgccctctccgccattgccgcggccctcctcttggctattttgctggcgtatttcatagtgccctggtcgttgaaaaacagcagcatagacagtggtgaagcagaagttggtcggcgggtaacacaagaagtcccaccaggggtgttttggaggtcacaaattcacatcagtcagccccagttcttaaagttcaacatctccctcgggaaggacgctctctttggtgtttacataagaagaggacttccaccatctcatgcccagtatgacttcatggaacgtctggacgggaaggagaagtggagtgtggttgagtctcccagggaacgccggagcatacagaccttggttcagaatgaagccgtgtttgtgcagtacctggatgtgggcctgtggcatctggccttctacaatgatggaaaagacaaagagatggtttccttcaatactgttgtcctagattcagtgcaggactgtccacgtaactgccatgggaatggtgaatgtgtgtccggggtgtgtcactgtttcccaggatttctaggagcagactgtgctaaaggtatgtgccgccacttccctg

SEQ ID NO: 138 - protein, 580 aa, Homo sapiens
KHQHSAISGIMDVKDRRHRSLTRGRCGKECRYTSSSLDSEDCRVPTQKSYSSSETLKAYDHDSRMHYGNRVTDLIHRESDEFPRQGTNFTLAELGICEPSPHRSGYCSDMGILHQGYSLSTGSDADSDTEGGMSPEHAIRLWGRGIKSRRSSGLSSRENSALTLTDSDNENKSDDENGRPIPPTSSPSLLPSAQLPSSHNPPPVSCQMPLLDSNTSHQIMDTNPDEEFSPNSYLLRACSGPQQASSSGPPNHHSQSTLRPPLPPPHNHTLSHHHSSANSLNRNSLTNRRSQIHAPAPAPNDLATTPESVQLQDSWVLNSNVPLETRHFLFKTSSGSTPLFSSSSPGYPLTSGTVYTPPPRLLPRNTFSRKAFKLKKPSKYCSWKCAALSAIAAALLLAILLAYFIVPWSLKNSSIDSGEAEVGRRVTQEVPPGVFWRSQIHISQPQFLKFNISLGKDALFGVYIRRGLPPSHAQYDFMERLDGKEKWSVVESPRERRSIQTLVQNEAVFVQYLDVGLWHLAFYNDGKDKEMVSFNTVVLDSVQDCPRNCHGNGECVSGVCHCFPGFLGADCAKGMCRHFP

SEQ ID NO: 139 - DNA, 1447 bp, Homo sapiens; identical to SEQ ID NO: 129
  CDS (247)..(1446)

SEQ ID NO: 140 - protein, 400 aa, Homo sapiens
KHQHSAISGIMDVKDRRHRSLTRGRCGKECRYTSSSLDSEDCRVPTQKSYSSSETLKAYDHDSRMHYGNRVTDLIHRESDEFPRQGTNFTLAELGICEPSPHRSGYCSDMGILHQGYSLSTGSDADSDTEGGMSPEHAIRLWGRGIKSRRSSGLSSRENSALTLTDSDNENKSDDENGRPIPPTSSPSLLPSAQLPSSHNPPPVSCQMPLLDSNTSHQIMDTNPDEEFSPNSYLLRACSGPQQASSSGPPNHHSQSTLRPPLPPPHNHTLSHHHSSANSLNRNSLTNRRSQIHAPAPAPNDLATTPESVQLQDSWVLNSNVPLETRHFLFKTSSGSTPLFSSSSPGYPLTSGTVYTPPPRLLPRNTFSRKAFKLKKPSKYCSWKCAALSAIAAALLLAIL

SEQ ID NO: 141 - DNA, 9823 bp, Homo sapiens
  CDS (277)..(8475)
gctccaaagcgagctgggaccgaagactctaggctaagttatctatgtagatggtgtcagggagcgaagctactgaccgagctgctgttacatccagctttttaattgcctaagcggtctggggcttgcttcgtcatttggctttgctgtggagcactcctgtaaagccagctgaattgtacatcgaagatccacccttttggtggcaaagtgacaagtgccaaaactcaggcctgacttttctgaaaacatcagcattctgccatatctggaataatggatgtaaaggaccggcgacaccgctctttgaccagaggacgctgtggcaaagagtgtcgctacacaagctcctctctggacagtgaggactgccgggtgcccacacagaaatcctacagctccagtgagactctgaaggcctatgaccatgacagcaggatgcactatggaaaccgagtcacagacctcatccaccgggagtcagatgagtttcctagacaaggaaccaacttcacccttgccgaactgggcatctgtgagccctccccacaccgaagcggctactgctccgacatggggatccttcaccagggctactcccttagcacagggtctgacgccgactccgacaccgagggagggatgtctccagaacacgccatcagactgtggggcagagggataaaatccaggcgcagttccggcctgtccagtcgtgaaaactcggcccttaccctgactgactctgacaacgaaaacaaatcagatgatgagaacggtcgtcccattccacctacatcctcgcctagtctcctcccatctgctcagctgcctagctcccataatcctccaccagttagctgccagatgccattgctagacagcaacacctcccatcaaatcatggacaccaaccctgatgaggaattctcccccaattcatacctgctcagagcatgctcagggccccagcaagcctccagcagtggccctccgaaccaccacagccagtcgactctgaggccccctctcccaccccctcacaaccacacgctgtcccatcaccactcgtccgccaactccctcaacaggaactcactgaccaatcggcggagtcagatccacgccccggccccagcgcccaatgacctggccaccacaccagagtccgttcagcttcaggacagctgggtgctaaacagcaacgtgccactggagacccggcacttcctcttcaagacctcctcggggagcacacccttgttcagcagctcttccccgggataccctttgacctcaggaacggtttacacgcccccgccccgcctgctgcccaggaatactttctccaggaaggctttcaagctgaagaagccctccaaatactgcagctggaaatgtgctgccctctccgccattgccgcggccctcctcttggctattttgctggcgtatttcatagtgccctggtcgttgaaaaacagcagcatagacagtggtgaagcagaagttggtcggcgggtaacacaagaagtcccaccaggggtgttttggaggtcacaaattcacatcagtcagccccagttcttaaagttcaacatctccctcgggaaggacgctctctttggtgtttacataagaagaggacttccaccatctcatgcccagtatgacttcatggaacgtctggacgggaaggagaagtggagtgtggttgagtctcccagggaacgccggagcatacagaccttggttcagaatgaagccgtgtttgtgcagtacctggatgtgggcctgtggcatctggccttctacaatgatggaaaagacaaagagatggtttccttcaatactgttgtcctagattcagtgcaggactgtccacgtaactgccatgggaatggtgaatgtgtgtccggggtgtgtcactgtttcccaggatttctaggagcagactgtgctaaagctgcctgccctgtcctgtgcagtgggaatggacaatattctaaagggacgtgccagtgctacagcggctggaaaggtgcagagtgcgacgtgcccatgaatcagtgcatcgatccttcctgcgggggccacggctcctgcattgatgggaactgtgtctgctctgctggctacaaaggcgagcactgtgaggaagttgattgcttggatcccacctgctccagccacggagtctgtgtgaatggagaatgcctgtgcagccctggctggggtggtctgaactgtgagctggcgagggtccagtgcccagaccagtgcagtgggcatggcacgtacctgcctgacacgggcctctgcagctgcgatcccaactggatgggtcccgactgctctgttgaagtgtgctcagtagactgtggcactcacggcgtctgcatcgggggagcctgccgctgtgaagagggctggacaggcgcagcgtgtgaccagcgcgtgtgccacccccgctgcattgagcacgggacctgtaaagatggcaaatgtgaatgccgagagggctggaatggtgaacactgcaccattggtaggcaaacggcaggcaccgaaacagatggctgccctgacttgtgcaacggtaacgggagatgcacactgggtcagaacagctggcagtgtgtctgccagaccggctggagagggcccggatgcaacgttgccatggaaacttcctgtgctgataacaaggataatgagggagatggcctggtggattgtttggaccctgactgctgcctgcagtcagcctgtcagaacagcctgctctgccgggggtcccgggacccactggacatcattcagcagggccagacggattggcccgcagtgaagtccttctatgaccgtatcaagctcttggcaggcaaggatagcacccacatcattcctggagagaaccctttcaacagcagcttggtttctctcatccgaggccaagtagtaactacagatggaactcccctggtcggtgtgaacgtgtcttttgtcaagtacccaaaatacggctacaccatcacccgccaggatggcacgttcgacctgatcgcaaatggaggtgcttccttgactctacactttgagcgagccccgttcatgagccaggagcgcactgtgtggctgccgtggaacagcttttacgccatggacaccctggtgatgaagaccgaggagaactccatccccagctgtgacctcagtggctttgtccggcctgatccaatcatcatctcctccccactgtccaccttctttagtgctgcccctgggcagaatcccatcgtgcctgagacccaggttcttcatgaagaaatcgagctccctggttccaatgtgaaacttcgctatctgagctctagaactgcagggtacaagtcactgctgaagatcaccatgacccagtccacagtgcccctgaacctcattagggttcacctgatggtggctgtcgaggggcatctcttccagaagtcattccaggcttctcccaacctggcctccaccttcatctgggacaagacagatgcgtatggccaaagggtgtatggactctcagatgctgttgtgtctgtcgggtttgaatatgagacctgtcccagtctaattctctgggagaaaaggacagccctccttcagggattcgagctggacccctccaacctcggtggctggtccctagacaaacaccacatcctcaatgttaaaagtggaatcctacacaaaggcactggggaaaaccagttcctgacccagcagcctgccatcatcaccagcatcatgggcaatggtcgccgccggagcatttcctgtcccagctgcaacggccttgctgaaggcaacaagctgctggccccagtggctctggctgttggaatcgatgggagcctctatgtgggtgacttcaattacatccgacgcatctttccctctcgaaatgtgaccagcatcttggagttacgaaataaagagtttaaacatagcaacaacccagcacacaagtactacttggcagtggaccccgtgtccggctcgctctacgtgtccgacaccaacagcaggagaatctaccgcgtcaagtctctgagtggaaccaaagacctggctgggaattcggaagttgtggcagggacgggagagcagtgtctaccctttgatgaagcccgctgcggggatggagggaaggccatagatgcaaccctgatgagcccgagaggtattgcagtagacaagaatgggctcatgtactttgtcgatgccaccatgatccggaaggttgaccagaatggaatcatctccaccctgctgggctccaatgacctcactgccgtccggccgctgagctgtgattccagcatggatgtagcccaggttcgtctggagtggccaacagaccttgctgtcaatcccatggataactccttgtatgttctagagaacaatgtcatccttcgaatcaccgagaaccaccaagtcagcatcattgcgggacgccccatgcactgccaagttcctggcattgactactcactcagcaaactagccattcactctgccctggagtcagccagtgccattgccatttctcacactggggtcctctacatcactgagacagatgagaagaagattaaccgtctacgccaggtaacaaccaacggggagatctgccttttagctggggcagcctcggactgcgactgcaaaaacgatgtcaattgcaactgctattcaggagatgatgcctacgcgactgatgccatcttgaattccccatcatccttagctgtagctccagatggtaccatttacattgcagaccttggaaatattcggatcagggcggtcagcaagaacaagcctgttcttaatgccttcaaccagtatgaggctgcatcccccggagagcaggagttatatgttttcaacgctgatggcatccaccaatacactgtgagcctggtgacaggggagtacttgtacaatttcacatatagtactgacaatgatgtcactgaattgattgacaataatgggaattccctgaagatccgtcgggacagcagtggcatgccccgtcacctgctcatgcctgacaaccagatcatcaccctcaccgtgggcaccaatggaggcctcaaagtcgtgtccacacagaacctggagcttggtctcatgacctatgatggcaacactgggctcctggccaccaagagcgatgaaacaggatggacgactttctatgactatgaccacgaaggccgcctgaccaacgtgacgcgccccacgggggtggtaaccagtctgcaccgggaaatggagaaatctattaccattgacattgagaactccaaccgtgatgatgacgtcactgtcatcaccaacctctcttcagtagaggcctcctacacagtggtacaagatcaagttcggaacagctaccagctctgtaataatggtaccctgagggtgatgtatgctaatgggatgggtatcagcttccacagcgagccccatgtcctagcgggcaccatcacccccaccattggacgctgcaacatctccctgcctatggagaatggcttaaactccattgagtggcgcctaagaaaggaacagattaaaggcaaagtcaccatctttggcaggaagctccgggtccatggaagaaatctcttgtccattgactatgatcgaaatattcggactgaaaagatctatgatgaccaccggaagttcaccctgaggatcatttatgaccaggtgggccgccccttcctctggctgcccagcagcgggctggcagctgtcaacgtgtcatacttcttcaatgggcgcctggctgggcttcagcgtggggccatgagcgagaggacagacatcgacaagcaaggccgcatcgtgtcccgcatgttcgctgacgggaaagtgtggagctactcctaccttgacaagtccatggtcctcctgcttcagagccaacgtcagtatatatttgagtatgactcctctgaccgcctccttgccgtcaccatgcccagcgtggcccggcacagcatgtccacacacacctccatcggctacatccgtaatatttacaacccgcctgaaagcaatgcttcggtcatctttgactacagtgatgacggccgcatcctgaagacctcctttttgggcaccggacgccaggtgttctacaagtatgggaaactctccaagttatcagagattgtctacgacagtaccgccgtcaccttcgggtatgacgagaccactggtgtcttgaagatggtcaacctccaaagtgggggcttctcctgcaccatcaggtaccggaagattggccccctggtggacaagcagatctacaggttctccgaggaaggcatggtcaatgccaggtttgactacacctatcatgacaacagcttccgcatcgcaagcatcaagcccgtcataagtgagactcccctccccgttgacctctaccgctatgatgagatttctggcaaggtggaacactttggtaagtttggagtcatctattatgacatcaaccagatcatcaccactgccgtgatgaccctcagcaaacacttcgacacccatgggcggatcaaggaggtccagtatgagatgttccggtccctcatgtactggatgacggtgcaatatgacagcatgggcagggtgatcaagagggagctaaaactggggccctatgccaataccacgaagtacacctatgactacgatggggacgggcagctccagagcgtggccgtcaatgaccgcccgacctggcgctacagctatgaccttaatgggaatctccacttactgaacccaggcaacagtgtgcgcctcatgcccttgcgctatgacctccgggatcggataaccagactcggggatgtgcagtacaaaattgacgacgatggctatctgtgccagagagggtctgacatcttcgaatacaattccaagggcctcctaacaagagcctacaacaaggccagcgggtggagtgtccagtaccgctatgatggcgtaggacggcgggcttcctacaagaccaacctgggccaccacctgcagtacttctactctgacctccacaacccgacgcgcatcacccatgtctacaatcactccaactcggagattacctcactgtactacgacctccagggccacctctttgccatggagagcagcagtggggaggagtactatgttgcctctgataacacagggactcctctggctgtgttcagcatcaacggcctcatgatcaaacagctgcagtacacggcctatggggagatttattatgactccaaccccgacttccagatggtcattggcttccatgggggactctatgaccccctgaccaagctggtccacttcactcagcgtgattatgatgtgctggcaggacgatggacctccccagactataccatgtggaaaaacgtgggcaaggagccggccccctttaacctgtatatgttcaagagcaacaatcctctcagcagtgagctagatttgaagaactacgtgacagatgtgaaaagctggcttgtgatgtttggatttcagcttagcaacatcattcctggcttcccgagagccaaaatgtatttcgtgcctcctccctatgaattgtcagagagtcaagcaagtgagaatggacagctcattacaggtgtccaacagacaacagagagacataaccaggccttcatggctctggaaggacaggtcattactaaaaagctccacgccagcatccgagagaaagcaggtcactggtttgccaccaccacgcccatcattggcaaaggcatcatgtttgccatcaaagaagggcgggtgaccacgggcgtgtccagcatcgccagcgaagatagccgcaaggtggcatctgtgctgaacaacgcctactacctggacaagatgcactacagcatcgagggcaaggacacccactactttgtgaagattggctcagccgatggcgacctggtcacactaggcaccaccatcggccgcaaggtgctagagagcggggtgaacgtgaccgtgtcccagcccacgctgctggtcaacggcaggactcgaaggttcacgaacattgagttccagtactccacgctgctgctcagcatccgctatggcctcacccccgacaccctggacgaagagaaggcccgcgtcctggaccaggcgagacagagggccctgggcacggcctgggccaaggagcagcagaaagccagggacgggagagaggggagccgcctgtggactgagggcgagaagcagcagcttctgagcaccgggcgcgtgcaagggtacgagggatattacgtgcttcccgtggagcaatacccagagcttgcagacagtagcagcaacatccagtttttaagacagaatgagatgggaaagaggtaacaaaataatctgctgccattccttgtctgaatggctcagcaggagtaactgttatctcctctcctaaggagatgaagacctaacaggggcactgcggctgggctgctttaggagaccaagtggcaagaaagctcacattttttgagttcaaatgctactgtccaagcgagaagtccctcatcctgaagtagactaaagcccggctgaaaattccgaggaaaacaaaacaaacgaatgaatgaacagacacacacaatgttccaagttcccctaaaatatgacccacttgttctgggtctacgcagaaaagagacgcaaagtgtccaaaaggaacaaaagaacaaaaacgaataagcaaagaagaaaacaaacaaaaacaaaacaaaacaaacacacggaccgataaacaaagaagcgaagataagaaagaaggcctcatatccaattacctcactcattcacatgtgagcgacacgcagacatccgcgagggccagcgtcaccagaccagctgcgggacaaaccactcagactgcttgtaggacaaatacttctgacattttcgtttaagcaaatacaggtgcatttaaaacacgactttgggggtgatttgtgtgtagcgcctggggaggggggataaaagaggaggagtgagcactggaaatactttttaaagaaaaaaaaacatgagggaataaaagaaattcctatcaaaaatcaaagtgaaataataccatccagcacttaactctcaggtcccaactaagtctggcctgagctaatttatttgagcgcagagtgtaaaatttaattcaaaatggtggctataatcactacagataaatttcatactcttttgtctttggagattccattgtggacagtaatacgcagttacagggtgtagtctgtttagattccgtagttcgtgggtatcagtttcggtagaggtgcagcatcgtgacacttttgctaacaggtaccacttctgatcaccctgtacatacatgagccgaaaggcacaatcactgtttcagatttaaaattattagtgtgtttgtttggtccagaaactgagacaatcacatgacagtcaccacgaggagagaaaatttaaaaaataaaaataaaaacaaaaaaaattttaaaaattaaaaaaacaaaaataaagtctaataagaactttggtacaggaacttttttgtaatatacatgtatgaattgttcatcgagtttttatattaattttaatttgctgctaagcaaagactagggacaggcaaagataatttatggcaaagtgtttaaattgtttatacataaataaagtctctaaaactcctgtg

SEQ ID NO: 142 - protein, 2733 aa, Homo sapiens; identical to SEQ ID NO: 136

SEQ ID NO: 143 - DNA, 1920 bp, Homo sapiens
  CDS (180)..(1919)
ccagcattagatgagttgacaaaaatgcagtttcagctctgaaggtctgaaagattctgctgcaactaaagctctgaagattctgctacaactatgacatccattttctcccacttcagacaggatgaatacaaggtggcaaagtgacaagtgccaaaactcaggcctgactttcctgaaaacatcagcattctgccatatctggaataatggatgtaaaggaccggcgacaccgctctttgaccagaggacgctgtggcaaagagtgtcgctacacaagctcctctctggacagtgaggactgccgggtgcccacacagaaatcctacagctccagtgagactctgaaggcctatgaccatgacagcaggatgcactatggaaaccgagtcacagacctcatccaccgggagtcagatgagtttcctagacaaggaaccaacttcacccttgccgaactgggcatctgtgagccctccccacaccgaagcggctactgctccgacatggggatccttcaccagggctactcccttagcacagggtctgacgccgactccgacaccgagggagggatgtctccagaacacgccatcagactgtggggcagagggataaaatccaggcgcagttccggcctgtccagtcgtgaaaactcggcccttaccctgactgactctgacaacgaaaacaaatcagatgatgagaacggtcgtcccattccacctacatcctcgcctagtctcctcccatctgctcagctgcctagctcccataatcctccaccagttagctgccagatgccattgctagacagcaacacctcccatcaaatcatggacaccaaccctgatgaggaattctcccccaattcatacctgctcagagcatgctcagggccccagcaagcctccagcagtggccctccgaaccaccacagccagtcgactctgaggccccctctcccaccccctcacaaccacacgctgtcccatcaccactcgtccgccaactccctcaacaggaactcactgaccaatcggcggagtcagatccacgccccggccccagcgcccaatgacctggccaccacaccagagtccgttcagcttcaggacagctgggtgctaaacagcaacgtgccactggagacccggcacttcctcttcaagacctcctcggggagcacacccttgttcagcagctcttccccgggataccctttgacctcaggaacggtttacacgcccccgccccgcctgctgcccaggaatactttctccaggaaggctttcaagctgaagaagccctccaaatactgcagctggaaatgtgctgccctctccgccattgccgcggccctcctcttggctattttgctggcgtatttcatagtgccctggtcgttgaaaaacagcagcatagacagtggtgaagcagaagttggtcggcgggtaacacaagaagtcccaccaggggtgttttggaggtcacaaattcacatcagtcagccccagttcttaaagttcaacatctccctcgggaaggacgctctctttggtgtttacataagaagaggacttccaccatctcatgcccagtatgacttcatggaacgtctggacgggaaggagaagtggagtgtggttgagtctcccagggaacgccggagcatacagaccttggttcagaatgaagccgtgtttgtgcagtacctggatgtgggcctgtggcatctggccttctacaatgatggaaaagacaaagagatggtttccttcaatactgttgtcctagattcagtgcaggactgtccacgtaactgccatgggaatggtgaatgtgtgtccggggtgtgtcactgtttcccaggatttctaggagcagactgtgctaaagctgcctgccctgtcctgtgca

SEQ ID NO: 144 - protein, 580 aa, Homo sapiens
KHQHSAISGIMDVKDRRHRSLTRGRCGKECRYTSSSLDSEDCRVPTQKSYSSSETLKAYDHDSRMHYGNRVTDLIHRESDEFPRQGTNFTLAELGICEPSPHRSGYCSDMGILHQGYSLSTGSDADSDTEGGMSPEHAIRLWGRGIKSRRSSGLSSRENSALTLTDSDNENKSDDENGRPIPPTSSPSLLPSAQLPSSHNPPPVSCQMPLLDSNTSHQIMDTNPDEEFSPNSYLLRACSGPQQASSSGPPNHHSQSTLRPPLPPPHNHTLSHHHSSANSLNRNSLTNRRSQIHAPAPAPNDLATTPESVQLQDSWVLNSNVPLETRHFLFKTSSGSTPLFSSSSPGYPLTSGTVYTPPPRLLPRNTFSRKAFKLKKPSKYCSWKCAALSAIAAALLLAILLAYFIVPWSLKNSSIDSGEAEVGRRVTQEVPPGVFWRSQIHISQPQFLKFNISLGKDALFGVYIRRGLPPSHAQYDFMERLDGKEKWSVVESPRERRSIQTLVQNEAVFVQYLDVGLWHLAFYNDGKDKEMVSFNTVVLDSVQDCPRNCHGNGECVSGVCHCFPGFLGADCAKAACPVLC

SEQ ID NO: 145 - DNA, 9756 bp, Homo sapiens
  CDS (210)..(8408)
ccagcattagatgagttgacaaaaatgcagtttcagctctgaaggtctgaaagattctgctgcaactaaagctctgaagattctgctacaactatgacatccattttctcccacttcagacaggatgaatacaaggtggcaaagtgacaagtgccaaaactcaggcctgacttttctgaaaacatcagcattctgccatatctggaataatggatgtaaaggaccggcgacaccgctctttgaccagaggacgctgtggcaaagagtgtcgctacacaagctcctctctggacagtgaggactgccgggtgcccacacagaaatcctacagctccagtgagactctgaaggcctatgaccatgacagcaggatgcactatggaaaccgagtcacagacctcatccaccgggagtcagatgagtttcctagacaaggaaccaacttcacccttgccgaactgggcatctgtgagccctccccacaccgaagcggctactgctccgacatggggatccttcaccagggctactcccttagcacagggtctgacgccgactccgacaccgagggagggatgtctccagaacacgccatcagactgtggggcagagggataaaatccaggcgcagttccggcctgtccagtcgtgaaaactcggcccttaccctgactgactctgacaacgaaaacaaatcagatgatgagaacggtcgtcccattccacctacatcctcgcctagtctcctcccatctgctcagctgcctagctcccataatcctccaccagttagctgccagatgccattgctagacagcaacacctcccatcaaatcatggacaccaaccctgatgaggaattctcccccaattcatacctgctcagagcatgctcagggccccagcaagcctccagcagtggccctccgaaccaccacagccagtcgactctgaggccccctctcccaccccctcacaaccacacgctgtcccatcaccactcgtccgccaactccctcaacaggaactcactgaccaatcggcggagtcagatccacgccccggccccagcgcccaatgacctggccaccacaccagagtccgttcagcttcaggacagctgggtgctaaacagcaacgtgccactggagacccggcacttcctcttcaagacctcctcggggagcacacccttgttcagcagctcttccccgggataccctttgacctcaggaacggtttacacgcccccgccccgcctgctgcccaggaatactttctccaggaaggctttcaagctgaagaagccctccaaatactgcagctggaaatgtgctgccctctccgccattgccgcggccctcctcttggctattttgctggcgtatttcatagtgccctggtcgttgaaaaacagcagcatagacagtggtgaagcagaagttggtcggcgggtaacacaagaagtcccaccaggggtgttttggaggtcacaaattcacatcagtcagccccagttcttaaagttcaacatctccctcgggaaggacgctctctttggtgtttacataagaagaggacttccaccatctcatgcccagtatgacttcatggaacgtctggacgggaaggagaagtggagtgtggttgagtctcccagggaacgccggagcatacagaccttggttcagaatgaagccgtgtttgtgcagtacctggatgtgggcctgtggcatctggccttctacaatgatggaaaagacaaagagatggtttccttcaatactgttgtcctagattcagtgcaggactgtccacgtaactgccatgggaatggtgaatgtgtgtccggggtgtgtcactgtttcccaggatttctaggagcagactgtgctaaagctgcctgccctgtcctgtgcagtgggaatggacaatattctaaagggacgtgccagtgctacagcggctggaaaggtgcagagtgcgacgtgcccatgaatcagtgcatcgatccttcctgcgggggccacggctcctgcattgatgggaactgtgtctgctctgctggctacaaaggcgagcactgtgaggaagttgattgcttggatcccacctgctccagccacggagtctgtgtgaatggagaatgcctgtgcagccctggctggggtggtctgaactgtgagctggcgagggtccagtgcccagaccagtgcagtgggcatggcacgtacctgcctgacacgggcctctgcagctgcgatcccaactggatgggtcccgactgctctgttgaagtgtgctcagtagactgtggcactcacggcgtctgcatcgggggagcctgccgctgtgaagagggctggacaggcgcagcgtgtgaccagcgcgtgtgccacccccgctgcattgagcacgggacctgtaaagatggcaaatgtgaatgccgagagggctggaatggtgaacactgcaccattggtaggcaaacggcaggcaccgaaacagatggctgccctgacttgtgcaacggtaacgggagatgcacactgggtcagaacagctggcagtgtgtctgccagaccggctggagagggcccggatgcaacgttgccatggaaacttcctgtgctgataacaaggataatgagggagatggcctggtggattgtttggaccctgactgctgcctgcagtcagcctgtcagaacagcctgctctgccgggggtcccgggacccactggacatcattcagcagggccagacggattggcccgcagtgaagtccttctatgaccgtatcaagctcttggcaggcaaggatagcacccacatcattcctggagagaaccctttcaacagcagcttggtttctctcatccgaggccaagtagtaactacagatggaactcccctggtcggtgtgaacgtgtcttttgtcaagtacccaaaatacggctacaccatcacccgccaggatggcacgttcgacctgatcgcaaatggaggtgcttccttgactctacactttgagcgagccccgttcatgagccaggagcgcactgtgtggctgccgtggaacagcttttacgccatggacaccctggtgatgaagaccgaggagaactccatccccagctgtgacctcagtggctttgtccggcctgatccaatcatcatctcctccccactgtccaccttctttagtgctgcccctgggcagaatcccatcgtgcctgagacccaggttcttcatgaagaaatcgagctccctggttccaatgtgaaacttcgctatctgagctctagaactgcagggtacaagtcactgctgaagatcaccatgacccagtccacagtgcccctgaacctcattagggttcacctgatggtggctgtcgaggggcatctcttccagaagtcattccaggcttctcccaacctggcctccaccttcatctgggacaagacagatgcgtatggccaaagggtgtatggactctcagatgctgttgtgtctgtcgggtttgaatatgagacctgtcccagtctaattctctgggagaaaaggacagccctccttcagggattcgagctggacccctccaacctcggtggctggtccctagacaaacaccacatcctcaatgttaaaagtggaatcctacacaaaggcactggggaaaaccagttcctgacccagcagcctgccatcatcaccagcatcatgggcaatggtcgccgccggagcatttcctgtcccagctgcaacggccttgctgaaggcaacaagctgctggccccagtggctctggctgttggaatcgatgggagcctctatgtgggtgacttcaattacatccgacgcatctttccctctcgaaatgtgaccagcatcttggagttacgaaataaagagtttaaacatagcaacaacccagcacacaagtactacttggcagtggaccccgtgtccggctcgctctacgtgtccgacaccaacagcaggagaatctaccgcgtcaagtctctgagtggaaccaaagacctggctgggaattcggaagttgtggcagggacgggagagcagtgtctaccctttgatgaagcccgctgcggggatggagggaaggccatagatgcaaccctgatgagcccgagaggtattgcagtagacaagaatgggctcatgtactttgtcgatgccaccatgatccggaaggttgaccagaatggaatcatctccaccctgctgggctccaatgacctcactgccgtccggccgctgagctgtgattccagcatggatgtagcccaggttcgtctggagtggccaacagaccttgctgtcaatcccatggataactccttgtatgttctagagaacaatgtcatccttcgaatcaccgagaaccaccaagtcagcatcattgcgggacgccccatgcactgccaagttcctggcattgactactcactcagcaaactagccattcactctgccctggagtcagccagtgccattgccatttctcacactggggtcctctacatcactgagacagatgagaagaagattaaccgtctacgccaggtaacaaccaacggggagatctgccttttagctggggcagcctcggactgcgactgcaaaaacgatgtcaattgcaactgctattcaggagatgatgcctacgcgactgatgccatcttgaattccccatcatccttagctgtagctccagatggtaccatttacattgcagaccttggaaatattcggatcagggcggtcagcaagaacaagcctgttcttaatgccttcaaccagtatgaggctgcatcccccggagagcaggagttatatgttttcaacgctgatggcatccaccaatacactgtgagcctggtgacaggggagtacttgtacaatttcacatatagtactgacaatgatgtcactgaattgattgacaataatgggaattccctgaagatccgtcgggacagcagtggcatgccccgtcacctgctcatgcctgacaaccagatcatcaccctcaccgtgggcaccaatggaggcctcaaagtcgtgtccacacagaacctggagcttggtctcatgacctatgatggcaacactgggctcctggccaccaagagcgatgaaacaggatggacgactttctatgactatgaccacgaaggccgcctgaccaacgtgacgcgccccacgggggtggtaaccagtctgcaccgggaaatggagaaatctattaccattgacattgagaactccaaccgtgatgatgacgtcactgtcatcaccaacctctcttcagtagaggcctcctacacagtggtacaagatcaagttcggaacagctaccagctctgtaataatggtaccctgagggtgatgtatgctaatgggatgggtatcagcttccacagcgagccccatgtcctagcgggcaccatcacccccaccattggacgctgcaacatctccctgcctatggagaatggcttaaactccattgagtggcgcctaagaaaggaacagattaaaggcaaagtcaccatctttggcaggaagctccgggtccatggaagaaatctcttgtccattgactatgatcgaaatattcggactgaaaagatctatgatgaccaccggaagttcaccctgaggatcatttatgaccaggtgggccgccccttcctctggctgcccagcagcgggctggcagctgtcaacgtgtcatacttcttcaatgggcgcctggctgggcttcagcgtggggccatgagcgagaggacagacatcgacaagcaaggccgcatcgtgtcccgcatgttcgctgacgggaaagtgtggagctactcctaccttgacaagtccatggtcctcctgcttcagagccaacgtcagtatatatttgagtatgactcctctgaccgcctccttgccgtcaccatgcccagcgtggcccggcacagcatgtccacacacacctccatcggctacatccgtaatatttacaacccgcctgaaagcaatgcttcggtcatctttgactacagtgatgacggccgcatcctgaagacctcctttttgggcaccggacgccaggtgttctacaagtatgggaaactctccaagttatcagagattgtctacgacagtaccgccgtcaccttcgggtatgacgagaccactggtgtcttgaagatggtcaacctccaaagtgggggcttctcctgcaccatcaggtaccggaagattggccccctggtggacaagcagatctacaggttctccgaggaaggcatggtcaatgccaggtttgactacacctatcatgacaacagcttccgcatcgcaagcatcaagcccgtcataagtgagactcccctccccgttgacctctaccgctatgatgagatttctggcaaggtggaacactttggtaagtttggagtcatctattatgacatcaaccagatcatcaccactgccgtgatgaccctcagcaaacacttcgacacccatgggcggatcaaggaggtccagtatgagatgttccggtccctcatgtactggatgacggtgcaatatgacagcatgggcagggtgatcaagagggagctaaaactggggccctatgccaataccacgaagtacacctatgactacgatggggacgggcagctccagagcgtggccgtcaatgaccgcccgacctggcgctacagctatgaccttaatgggaatctccacttactgaacccaggcaacagtgtgcgcctcatgcccttgcgctatgacctccgggatcggataaccagactcggggatgtgcagtacaaaattgacgacgatggctatctgtgccagagagggtctgacatcttcgaatacaattccaagggcctcctaacaagagcctacaacaaggccagcgggtggagtgtccagtaccgctatgatggcgtaggacggcgggcttcctacaagaccaacctgggccaccacctgcagtacttctactctgacctccacaacccgacgcgcatcacccatgtctacaatcactccaactcggagattacctcactgtactacgacctccagggccacctctttgccatggagagcagcagtggggaggagtactatgttgcctctgataacacagggactcctctggctgtgttcagcatcaacggcctcatgatcaaacagctgcagtacacggcctatggggagatttattatgactccaaccccgacttccagatggtcattggcttccatgggggactctatgaccccctgaccaagctggtccacttcactcagcgtgattatgatgtgctggcaggacgatggacctccccagactataccatgtggaaaaacgtgggcaaggagccggccccctttaacctgtatatgttcaagagcaacaatcctctcagcagtgagctagatttgaagaactacgtgacagatgtgaaaagctggcttgtgatgtttggatttcagcttagcaacatcattcctggcttcccgagagccaaaatgtatttcgtgcctcctccctatgaattgtcagagagtcaagcaagtgagaatggacagctcattacaggtgtccaacagacaacagagagacataaccaggccttcatggctctggaaggacaggtcattactaaaaagctccacgccagcatccgagagaaagcaggtcactggtttgccaccaccacgcccatcattggcaaaggcatcatgtttgccatcaaagaagggcgggtgaccacgggcgtgtccagcatcgccagcgaagatagccgcaaggtggcatctgtgctgaacaacgcctactacctggacaagatgcactacagcatcgagggcaaggacacccactactttgtgaagattggctcagccgatggcgacctggtcacactaggcaccaccatcggccgcaaggtgctagagagcggggtgaacgtgaccgtgtcccagcccacgctgctggtcaacggcaggactcgaaggttcacgaacattgagttccagtactccacgctgctgctcagcatccgctatggcctcacccccgacaccctggacgaagagaaggcccgcgtcctggaccaggcgagacagagggccctgggcacggcctgggccaaggagcagcagaaagccagggacgggagagaggggagccgcctgtggactgagggcgagaagcagcagcttctgagcaccgggcgcgtgcaagggtacgagggatattacgtgcttcccgtggagcaatacccagagcttgcagacagtagcagcaacatccagtttttaagacagaatgagatgggaaagaggtaacaaaataatctgctgccattccttgtctgaatggctcagcaggagtaactgttatctcctctcctaaggagatgaagacctaacaggggcactgcggctgggctgctttaggagaccaagtggcaagaaagctcacattttttgagttcaaatgctactgtccaagcgagaagtccctcatcctgaagtagactaaagcccggctgaaaattccgaggaaaacaaaacaaacgaatgaatgaacagacacacacaatgttccaagttcccctaaaatatgacccacttgttctgggtctacgcagaaaagagacgcaaagtgtccaaaaggaacaaaagaacaaaaacgaataagcaaagaagaaaacaaacaaaaacaaaacaaaacaaacacacggaccgataaacaaagaagcgaagataagaaagaaggcctcatatccaattacctcactcattcacatgtgagcgacacgcagacatccgcgagggccagcgtcaccagaccagctgcgggacaaaccactcagactgcttgtaggacaaatacttctgacattttcgtttaagcaaatacaggtgcatttaaaacacgactttgggggtgatttgtgtgtagcgcctggggaggggggataaaagaggaggagtgagcactggaaatactttttaaagaaaaaaaaacatgagggaataaaagaaattcctatcaaaaatcaaagtgaaataataccatccagcacttaactctcaggtcccaactaagtctggcctgagctaatttatttgagcgcagagtgtaaaatttaattcaaaatggtggctataatcactacagataaatttcatactcttttgtctttggagattccattgtggacagtaatacgcagttacagggtgtagtctgtttagattccgtagttcgtgggtatcagtttcggtagaggtgcagcatcgtgacacttttgctaacaggtaccacttctgatcaccctgtacatacatgagccgaaaggcacaatcactgtttcagatttaaaattattagtgtgtttgtttggtccagaaactgagacaatcacatgacagtcaccacgaggagagaaaatttaaaaaataaaaataaaaacaaaaaaaattttaaaaattaaaaaaacaaaaataaagtctaataagaactttggtacaggaacttttttgtaatatacatgtatgaattgttcatcgagtttttatattaattttaatttgctgctaagcaaagactagggacaggcaaagataatttatggcaaagtgtttaaattgtttatacataaataaagtctctaaaactcctgtg

SEQ ID NO: 146 - protein, 2733 aa, Homo sapiens; identical to SEQ ID NO: 136

SEQ ID NO: 147 - DNA, 9729 bp, Homo sapiens
  CDS (210)..(8381)
ccagcattagatgagttgacaaaaatgcagtttcagctctgaaggtctgaaagattctgctgcaactaaagctctgaagattctgctacaactatgacatccattttctcccacttcagacaggatgaatacaaggtggcaaagtgacaagtgccaaaactcaggcctgactttcctgaaaacatcagcattctgccatatctggaataatggatgtaaaggaccggcgacaccgctctttgaccagaggacgctgtggcaaagagtgtcgctacacaagctcctctctggacagtgaggactgccgggtgcccacacagaaatcctacagctccagtgagactctgaaggcctatgaccatgacagcaggatgcactatggaaaccgagtcacagacctcatccaccgggagtcagatgagtttcctagacaaggaaccaacttcacccttgccgaactgggcatctgtgagccctccccacaccgaagcggctactgctccgacatggggatccttcaccagggctactcccttagcacagggtctgacgccgactccgacaccgagggagggatgtctccagaacacgccatcagactgtggggcagagggataaaatccaggcgcagttccggcctgtccagtcgtgaaaactcggcccttaccctgactgactctgacaacgaaaacaaatcagatgatgagaacggtcgtcccattccacctacatcctcgcctagtctcctcccatctgctcagctgcctagctcccataatcctccaccagttagctgccagatgccattgctagacagcaacacctcccatcaaatcatggacaccaaccctgatgaggaattctcccccaattcatacctgctcagagcatgctcagggccccagcaagcctccagcagtggccctccgaaccaccacagccagtcgactctgaggccccctctcccaccccctcacaaccacacgctgtcccatcaccactcgtccgccaactccctcaacaggaactcactgaccaatcggcggagtcagatccacgccccggccccagcgcccaatgacctggccaccacaccagagtccgttcagcttcaggacagctgggtgctaaacagcaacgtgccactggagacccggcacttcctcttcaagacctcctcggggagcacacccttgttcagcagctcttccccgggataccctttgacctcaggaacggtttacacgcccccgccccgcctgctgcccaggaatactttctccaggaaggctttcaagctgaagaagccctccaaatactgcagctggaaatgtgctgccctctccgccattgccgcggccctcctcttggctattttgctggcgtatttcatagtgccctggtcgttgaaaaacagcagcatagacagtggtgaagcagaagttggtcggcgggtaacacaagaagtcccaccaggggtgttttggaggtcacaaattcacatcagtcagccccagttcttaaagttcaacatctccctcgggaaggacgctctctttggtgtttacataagaagaggacttccaccatctcatgcccagtatgacttcatggaacgtctggacgggaaggagaagtggagtgtggttgagtctcccagggaacgccggagcatacagaccttggttcagaatgaagccgtgtttgtgcagtacctggatgtgggcctgtggcatctggccttctacaatgatggaaaagacaaagagatggtttccttcaatactgttgtcctagattcagtgcaggactgtccacgtaactgccatgggaatggtgaatgtgtgtccggggtgtgtcactgtttcccaggatttctaggagcagactgtgctaaagctgcctgccctgtcctgtgcagtgggaatggacaatattctaaagggacgtgccagtgctacagcggctggaaaggtgcagagtgcgacgtgcccatgaatcagtgcatcgatccttcctgcgggggccacggctcctgcattgatgggaactgtgtctgctctgctggctacaaaggcgagcactgtgaggaagttgattgcttggatcccacctgctccagccacggagtctgtgtgaatggagaatgcctgtgcagccctggctggggtggtctgaactgtgagctggcgagggtccagtgcccagaccagtgcagtgggcatggcacgtacctgcctgacacgggcctctgcagctgcgatcccaactggatgggtcccgactgctctgttgaagtgtgctcagtagactgtggcactcacggcgtctgcatcgggggagcctgccgctgtgaagagggctggacaggcgcagcgtgtgaccagcgcgtgtgccacccccgctgcattgagcatgggacctgtaaagatggcaaatgtgaatgccgagagggctggaatggtgaacactgcaccattgatggctgccctgacttgtgcaacggtaacgggagatgcacactgggtcagaacagctggcagtgtgtctgccagaccggctggagagggcccggatgcaacgttgccatggaaacttcctgtgctgataacaaggataatgagggagatggcctggtggattgtttggaccctgactgctgcctgcagtcagcctgtcagaacagcctgctctgccgggggtcccgggacccactggacatcattcagcagggccagacggattggcccgcagtgaagtccttctatgaccgtatcaagctcttggcaggcaaggatagcacccacatcattcctggagagaaccctttcaacagcagcttggtttctctcatccgaggccaagtagtaactacagatggaactcccctggtcggtgtgaacgtgtcttttgtcaagtacccaaaatacggctacaccatcacccgccaggatggcacgttcgacctgatcgcaaatggaggtgcttccttgactctacactttgagcgagccccgttcatgagccaggagcgcactgtgtggctgccgtggaacagcttttacgccatggacaccctggtgatgaagaccgaggagaactccatccccagctgtgacctcagtggctttgtccggcctgatccaatcatcatctcctccccactgtccaccttctttagtgctgcccctgggcagaatcccatcgtgcctgagacccaggttcttcatgaagaaatcgagctccctggttccaatgtgaaacttcgctatctgagctctagaactgcagggtacaagtcactgctgaagatcaccatgacccagtccacagtgcccctgaacctcattagggttcacctgatggtggctgtcgaggggcatctcttccagaagtcattccaggcttctcccaacctggcctccaccttcatctgggacaagacagatgcgtatggccaaagggtgtatggactctcagatgctgttgtgtctgtcgggtttgaatatgagacctgtcccagtctaattctctgggagaaaaggacagccctccttcagggattcgagctggacccctccaacctcggtggctggtccctagacaaacaccacatcctcaatgttaaaagtggaatcctacacaaaggcactggggaaaaccagttcctgacccagcagcctgccatcatcaccagcatcatgggcaatggtcgccgccggagcatttcctgtcccagctgcaacggccttgctgaaggcaacaagctgctggccccagtggctctggctgttggaatcgatgggagcctctatgtgggtgacttcaattacatccgacgcatctttccctctcgaaatgtgaccagcatcttggagttacgaaataaagagtttaaacatagcaacaacccagcacacaagtactacttggcagtggaccccgtgtccggctcgctctacgtgtccgacaccaacagcaggagaatctaccgcgtcaagtctctgagtggaaccaaagacctggctgggaattcggaagttgtggcagggacgggagagcagtgtctaccctttgatgaagcccgctgcggggatggagggaaggccatagatgcaaccctgatgagcccgagaggtattgcagtagacaagaatgggctcatgtactttgtcgatgccaccatgatccggaaggttgaccagaatggaatcatctccaccctgctgggctccaatgacctcactgccgtccggccgctgagctgtgattccagcatggatgtagcccaggttcgtctggagtggccaacagaccttgctgtcaatcccatggataactccttgtatgttctagagaacaatgtcatccttcgaatcaccgagaaccaccaagtcagcatcattgcgggacgccccatgcactgccaagttcctggcattgactactcactcagcaaactagccattcactctgccctggagtcagccagtgccattgccatttctcacactggggtcctctacatcactgagacagatgagaagaagattaaccgtctacgccaggtaacaaccaacggggagatctgccttttagctggggcagcctcggactgcgactgcaaaaacgatgtcaattgcaactgctattcaggagatgatgcctacgcgactgatgccatcttgaattccccatcatccttagctgtagctccagatggtaccatttacattgcagaccttggaaatattcggatcagggcggtcagcaagaacaagcctgttcttaatgccttcaaccagtatgaggctgcatcccccggagagcaggagttatatgttttcaacgctgatggcatccaccaatacactgtgagcctggtgacaggggagtacttgtacaatttcacatatagtactgacaatgatgtcactgaattgattgacaataatgggaattccctgaagatccgtcgggacagcagtggcatgccccgtcacctgctcatgcctgacaaccagatcatcaccctcaccgtgggcaccaatggaggcctcaaagtcgtgtccacacagaacctggagcttggtctcatgacctatgatggcaacactgggctcctggccaccaagagcgatgaaacaggatggacgactttctatgactatgaccacgaaggccgcctgaccaacgtgacgcgccccacgggggtggtaaccagtctgcaccgggaaatggagaaatctattaccattgacattgagaactccaaccgtgatgatgacgtcactgtcatcaccaacctctcttcagtagaggcctcctacacagtggtacaagatcaagttcggaacagctaccagctctgtaataatggtaccctgagggtgatgtatgctaatgggatgggtatcagcttccacagcgagccccatgtcctagcgggcaccatcacccccaccattggacgctgcaacatctccctgcctatggagaatggcttaaactccattgagtggcgcctaagaaaggaacagattaaaggcaaagtcaccatctttggcaggaagctccgggtccatggaagaaatctcttgtccattgactatgatcgaaatattcggactgaaaagatctatgatgaccaccggaagttcaccctgaggatcatttatgaccaggtgggccgccccttcctctggctgcccagcagcgggctggcagctgtcaacgtgtcatacttcttcaatgggcgcctggctgggcttcagcgtggggccatgagcgagaggacagacatcgacaagcaaggccgcatcgtgtcccgcatgttcgctgacgggaaagtgtggagctactcctaccttgacaagtccatggtcctcctgcttcagagccaacgtcagtatatatttgagtatgactcctctgaccgcctccttgccgtcaccatgcccagcgtggcccggcacagcatgtccacacacacctccatcggctacatccgtaatatttacaacccgcctgaaagcaatgcttcggtcatctttgactacagtgatgacggccgcatcctgaagacctcctttttgggcaccggacgccaggtgttctacaagtatgggaaactctccaagttatcagagattgtctacgacagtaccgccgtcaccttcgggtatgacgagaccactggtgtcttgaagatggtcaacctccaaagtgggggcttctcctgcaccatcaggtaccggaagattggccccctggtggacaagcagatctacaggttctccgaggaaggcatggtcaatgccaggtttgactacacctatcatgacaacagcttccgcatcgcaagcatcaagcccgtcataagtgagactcccctccccgttgacctctaccgctatgatgagatttctggcaaggtggaacactttggtaagtttggagtcatctattatgacatcaaccagatcatcaccactgccgtgatgaccctcagcaaacacttcgacacccatgggcggatcaaggaggtccagtatgagatgttccggtccctcatgtactggatgacggtgcaatatgacagcatgggcagggtgatcaagagggagctaaaactggggccctatgccaataccacgaagtacacctatgactacgatggggacgggcagctccagagcgtggccgtcaatgaccgcccgacctggcgctacagctatgaccttaatgggaatctccacttactgaacccaggcaacagtgtgcgcctcatgcccttgcgctatgacctccgggatcggataaccagactcggggatgtgcagtacaaaattgacgacgatggctatctgtgccagagagggtctgacatcttcgaatacaattccaagggcctcctaacaagagcctacaacaaggccagcgggtggagtgtccagtaccgctatgatggcgtaggacggcgggcttcctacaagaccaacctgggccaccacctgcagtacttctactctgacctccacaacccgacgcgcatcacccatgtctacaatcactccaactcggagattacctcactgtactacgacctccagggccacctctttgccatggagagcagcagtggggaggagtactatgttgcctctgataacacagggactcctctggctgtgttcagcatcaacggcctcatgatcaaacagctgcagtacacggcctatggggagatttattatgactccaaccccgacttccagatggtcattggcttccatgggggactctatgaccccctgaccaagctggtccacttcactcagcgtgattatgatgtgctggcaggacgatggacctccccagactataccatgtggaaaaacgtgggcaaggagccggccccctttaacctgtatatgttcaagagcaacaatcctctcagcagtgagctagatttgaagaactacgtgacagatgtgaaaagctggcttgtgatgtttggatttcagcttagcaacatcattcctggcttcccgagagccaaaatgtatttcgtgcctcctccctatgaattgtcagagagtcaagcaagtgagaatggacagctcattacaggtgtccaacagacaacagagagacataaccaggccttcatggctctggaaggacaggtcattactaaaaagctccacgccagcatccgagagaaagcaggtcactggtttgccaccaccacgcccatcattggcaaaggcatcatgtttgccatcaaagaagggcgggtgaccacgggcgtgtccagcatcgccagcgaagatagccgcaaggtggcatctgtgctgaacaacgcctactacctggacaagatgcactacagcatcgagggcaaggacacccactactttgtgaagattggctcagccgatggcgacctggtcacactaggcaccaccatcggccgcaaggtgctagagagcggggtgaacgtgaccgtgtcccagcccacgctgctggtcaacggcaggactcgaaggttcacgaacattgagttccagtactccacgctgctgctcagcatccgctatggcctcacccccgacaccctggacgaagagaaggcccgcgtcctggaccaggcgagacagagggccctgggcacggcctgggccaaggagcagcagaaagccagggacgggagagaggggagccgcctgtggactgagggcgagaagcagcagcttctgagcaccgggcgcgtgcaagggtacgagggatattacgtgcttcccgtggagcaatacccagagcttgcagacagtagcagcaacatccagtttttaagacagaatgagatgggaaagaggtaacaaaataatctgctgccattccttgtctgaatggctcagcaggagtaactgttatctcctctcctaaggagatgaagacctaacaggggcactgcggctgggctgctttaggagaccaagtggcaagaaagctcacattttttgagttcaaatgctactgtccaagcgagaagtccctcatcctgaagtagactaaagcccggctgaaaattccgaggaaaacaaaacaaacgaatgaatgaacagacacacacaatgttccaagttcccctaaaatatgacccacttgttctgggtctacgcagaaaagagacgcaaagtgtccaaaaggaacaaaagaacaaaaacgaataagcaaagaagaaaacaaacaaaaacaaaacaaaacaaacacacggaccgataaacaaagaagcgaagataagaaagaaggcctcatatccaattacctcactcattcacatgtgagcgacacgcagacatccgcgagggccagcgtcaccagaccagctgcgggacaaaccactcagactgcttgtaggacaaatacttctgacattttcgtttaagcaaatacaggtgcatttaaaacacgactttgggggtgatttgtgtgtagcgcctggggaggggggataaaagaggaggagtgagcactggaaatactttttaaagaaaaaaaaacatgagggaataaaagaaattcctatcaaaaatcaaagtgaaataataccatccagcacttaactctcaggtcccaactaagtctggcctgagctaatttatttgagcgcagagtgtaaaatttaattcaaaatggtggctataatcactacagataaatttcatactcttttgtctttggagattccattgtggacagtaatacgcagttacagggtgtagtctgtttagattccgtagttcgtgggtatcagtttcggtagaggtgcagcatcgtgacacttttgctaacaggtaccacttctgatcaccctgtacatacatgagccgaaaggcacaatcactgtttcagatttaaaattattagtgtgtttgtttggtccagaaactgagacaatcacatgacagtcaccacgaggagagaaaatttaaaaaataaaaataaaaacaaaaaaaattttaaaaattaaaaaaacaaaaataaagtctaataagaactttggtacaggaacttttttgtaatatacatgtatgaattgttcatcgagtttttatattaattttaatttgctgctaagcaaagactagggacaggcaaagataatttatggcaaagtgtttaaattgtttatacataaataaagtctctaaaactcctgtg

SEQ ID NO: 148 - protein, 2724 aa, Homo sapiens
MDVKDRRHRSLTRGRCGKECRYTSSSLDSEDCRVPTQKSYSSSETLKAYDHDSRMHYGNRVTDLIHRESDEFPRQGTNFTLAELGICEPSPHRSGYCSDMGILHQGYSLSTGSDADSDTEGGMSPEHAIRLWGRGIKSRRSSGLSSRENSALTLTDSDNENKSDDENGRPIPPTSSPSLLPSAQLPSSHNPPPVSCQMPLLDSNTSHQIMDTNPDEEFSPNSYLLRACSGPQQASSSGPPNHHSQSTLRPPLPPPHNHTLSHHHSSANSLNRNSLTNRRSQIHAPAPAPNDLATTPESVQLQDSWVLNSNVPLETRHFLFKTSSGSTPLFSSSSPGYPLTSGTVYTPPPRLLPRNTFSRKAFKLKKPSKYCSWKCAALSAIAAALLLAILLAYFIVPWSLKNSSIDSGEAEVGRRVTQEVPPGVFWRSQIHISQPQFLKFNISLGKDALFGVYIRRGLPPSHAQYDFMERLDGKEKWSVVESPRERRSIQTLVQNEAVFVQYLDVGLWHLAFYNDGKDKEMVSFNTVVLDSVQDCPRNCHGNGECVSGVCHCFPGFLGADCAKAACPVLCSGNGQYSKGTCQCYSGWKGAECDVPMNQCIDPSCGGHGSCIDGNCVCSAGYKGEHCEEVDCLDPTCSSHGVCVNGECLCSPGWGGLNCELARVQCPDQCSGHGTYLPDTGLCSCDPNWMGPDCSVEVCSVDCGTHGVCIGGACRCEEGWTGAACDQRVCHPRCIEHGTCKDGKCECREGWNGEHCTIDGCPDLCNGNGRCTLGQNSWQCVCQTGWRGPGCNVAMETSCADNKDNEGDGLVDCLDPDCCLQSACQNSLLCRGSRDPLDIIQQGQTDWPAVKSFYDRIKLLAGKDSTHIIPGENPFNSSLVSLIRGQVVTTDGTPLVGVNVSFVKYPKYGYTITRQDGTFDLIANGGASLTLHFERAPFMSQERTVWLPWNSFYAMDTLVMKTEENSIPSCDLSGFVRPDPIIISSPLSTFFSAAPGQNPIVPETQVLHEEIELPGSNVKLRYLSSRTAGYKSLLKITMTQSTVPLNLIRVHLMVAVEGHLFQKSFQASPNLASTFIWDKTDAYGQRVYGLSDAVVSVGFEYETCPSLILWEKRTALLQGFELDPSNLGGWSLDKHHILNVKSGILHKGTGENQFLTQQPAIITSIMGNGRRRSISCPSCNGLAEGNKLLAPVALAVGIDGSLYVGDFNYIRRIFPSRNVTSILELRNKEFKHSNNPAHKYYLAVDPVSGSLYVSDTNSRRIYRVKSLSGTKDLAGNSEVVAGTGEQCLPFDEARCGDGGKAIDATLMSPRGIAVDKNGLMYFVDATMIRKVDQNGIISTLLGSNDLTAVRPLSCDSSMDVAQVRLEWPTDLAVNPMDNSLYVLENNVILRITENHQVSIIAGRPMHCQVPGIDYSLSKLAIHSALESASAIAISHTGVLYITETDEKKINRLRQVTTNGEICLLAGAASDCDCKNDVNCNCYSGDDAYATDAILNSPSSLAVAPDGTIYIADLGNIRIRAVSKNKPVLNAFNQYEAASPGEQELYVFNADGIHQYTVSLVTGEYLYNFTYSTDNDVTELIDNNGNSLKIRRDSSGMPRHLLMPDNQIITLTVGTNGGLKVVSTQNLELGLMTYDGNTGLLATKSDETGWTTFYDYDHEGRLTNVTRPTGVVTSLHREMEKSITIDIENSNRDDDVTVITNLSSVEASYTVVQDQVRNSYQLCNNGTLRVMYANGMGISFHSEPHVLAGTITPTIGRCNISLPMENGLNSIEWRLRKEQIKGKVTIFGRKLRVHGRNLLSIDYDRNIRTEKIYDDHRKFTLRIIYDQVGRPFLWLPSSGLAAVNVSYFFNGRLAGLQRGAMSERTDIDKQGRIVSRMFADGKVWSYSYLDKSMVLLLQSQRQYIFEYDSSDRLLAVTMPSVARHSMSTHTSIGYIRNIYNPPESNASVIFDYSDDGRILKTSFLGTGRQVFYKYGKLSKLSEIVYDSTAVTFGYDETTGVLKMVNLQSGGFSCTIRYRKIGPLVDKQIYRFSEEGMVNARFDYTYHDNSFRIASIKPVISETPLPVDLYRYDEISGKVEHFGKFGVIYYDINQIITTAVMTLSKHFDTHGRIKEVQYEMFRSLMYWMTVQYDSMGRVIKRELKLGPYANTTKYTYDYDGDGQLQSVAVNDRPTWRYSYDLNGNLHLLNPGNSVRLMPLRYDLRDRITRLGDVQYKIDDDGYLCQRGSDIFEYNSKGLLTRAYNKASGWSVQYRYDGVGRRASYKTNLGHHLQYFYSDLHNPTRITHVYNHSNSEITSLYYDLQGHLFAMESSSGEEYYVASDNTGTPLAVFSINGLMIKQLQYTAYGEIYYDSNPDFQMVIGFHGGLYDPLTKLVHFTQRDYDVLAGRWTSPDYTMWKNVGKEPAPFNLYMFKSNNPLSSELDLKNYVTDVKSWLVMFGFQLSNIIPGFPRAKMYFVPPPYELSESQASENGQLITGVQQTTERHNQAFMALEGQVITKKLHASIREKAGHWFATTTPIIGKGIMFAIKEGRVTTGVSSIASEDSRKVASVLNNAYYLDKMHYSIEGKDTHYFVKIGSADGDLVTLGTTIGRKVLESGVNVTVSQPTLLVNGRTRRFTNIEFQYSTLLLSIRYGLTPDTLDEEKARVLDQARQRALGTAWAKEQQKARDGREGSRLWTEGEKQQLLSTGRVQGYEGYYVLPVEQYPELADSSSNIQFLRQNEMGKR

SEQ ID NO: 149 - DNA, 9826 bp, Homo sapiens
  CDS (280)..(8478)
tttaaatcctcataccttaaaggagatgtgtatataagggagttggaaccagcattagatgagttgacaaaaatgcagtttcagttctagaggtctgggaagtccaagaacaaggtgctggcagattggattccccgtgagggctttcttcctggcttgaagttggctgctttcctgctgagacttctcatggcagagactgagggtggcaaagtgacaagtgccaaaactcaggcctgacttttctgaaaacatcagcattctgccatatctggaataatggatgtaaaggaccggcgacaccgctctttgaccagaggacgctgtggcaaagagtgtcgctacacaagctcctctctggacagtgaggactgccgggtgcccacacagaaatcctacagctccagtgagactctgaaggcctatgaccatgacagcaggatgcactatggaaaccgagtcacagacctcatccaccgggagtcagatgagtttcctagacaaggaaccaacttcacccttgccgaactgggcatctgtgagccctccccacaccgaagcggctactgctccgacatggggatccttcaccagggctactcccttagcacagggtctgacgccgactccgacaccgagggagggatgtctccagaacacgccatcagactgtggggcagagggataaaatccaggcgcagttccggcctgtccagtcgtgaaaactcggcccttaccctgactgactctgacaacgaaaacaaatcagatgatgagaacggtcgtcccattccacctacatcctcgcctagtctcctcccatctgctcagctgcctagctcccataatcctccaccagttagctgccagatgccattgctagacagcaacacctcccatcaaatcatggacaccaaccctgatgaggaattctcccccaattcatacctgctcagagcatgctcagggccccagcaagcctccagcagtggccctccgaaccaccacagccagtcgactctgaggccccctctcccaccccctcacaaccacacgctgtcccatcaccactcgtccgccaactccctcaacaggaactcactgaccaatcggcggagtcagatccacgccccggccccagcgcccaatgacctggccaccacaccagagtccgttcagcttcaggacagctgggtgctaaacagcaacgtgccactggagacccggcacttcctcttcaagacctcctcggggagcacacccttgttcagcagctcttccccgggataccctttgacctcaggaacggtttacacgcccccgccccgcctgctgcccaggaatactttctccaggaaggctttcaagctgaagaagccctccaaatactgcagctggaaatgtgctgccctctccgccattgccgcggccctcctcttggctattttgctggcgtatttcatagtgccctggtcgttgaaaaacagcagcatagacagtggtgaagcagaagttggtcggcgggtaacacaagaagtcccaccaggggtgttttggaggtcacaaattcacatcagtcagccccagttcttaaagttcaacatctccctcgggaaggacgctctctttggtgtttacataagaagaggacttccaccatctcatgcccagtatgacttcatggaacgtctggacgggaaggagaagtggagtgtggttgagtctcccagggaacgccggagcatacagaccttggttcagaatgaagccgtgtttgtgcagtacctggatgtgggcctgtggcatctggccttctacaatgatggaaaagacaaagagatggtttccttcaatactgttgtcctagattcagtgcaggactgtccacgtaactgccatgggaatggtgaatgtgtgtccggggtgtgtcactgtttcccaggatttctaggagcagactgtgctaaagctgcctgccctgtcctgtgcagtgggaatggacaatattctaaagggacgtgccagtgctacagcggctggaaaggtgcagagtgcgacgtgcccatgaatcagtgcatcgatccttcctgcgggggccacggctcctgcattgatgggaactgtgtctgctctgctggctacaaaggcgagcactgtgaggaagttgattgcttggatcccacctgctccagccacggagtctgtgtgaatggagaatgcctgtgcagccctggctggggtggtctgaactgtgagctggcgagggtccagtgcccagaccagtgcagtgggcatggcacgtacctgcctgacacgggcctctgcagctgcgatcccaactggatgggtcccgactgctctgttgaagtgtgctcagtagactgtggcactcacggcgtctgcatcgggggagcctgccgctgtgaagagggctggacaggcgcagcgtgtgaccagcgcgtgtgccacccccgctgcattgagcacgggacctgtaaagatggcaaatgtgaatgccgagagggctggaatggtgaacactgcaccattggtaggcaaacggcaggcaccgaaacagatggctgccctgacttgtgcaacggtaacgggagatgcacactgggtcagaacagctggcagtgtgtctgccagaccggctggagagggcccggatgcaacgttgccatggaaacttcctgtgctgataacaaggataatgagggagatggcctggtggattgtttggaccctgactgctgcctgcagtcagcctgtcagaacagcctgctctgccgggggtcccgggacccactggacatcattcagcagggccagacggattggcccgcagtgaagtccttctatgaccgtatcaagctcttggcaggcaaggatagcacccacatcattcctggagagaaccctttcaacagcagcttggtttctctcatccgaggccaagtagtaactacagatggaactcccctggtcggtgtgaacgtgtcttttgtcaagtacccaaaatacggctacaccatcacccgccaggatggcacgttcgacctgatcgcaaatggaggtgcttccttgactctacactttgagcgagccccgttcatgagccaggagcgcactgtgtggctgccgtggaacagcttttacgccatggacaccctggtgatgaagaccgaggagaactccatccccagctgtgacctcagtggctttgtccggcctgatccaatcatcatctcctccccactgtccaccttctttagtgctgcccctgggcagaatcccatcgtgcctgagacccaggttcttcatgaagaaatcgagctccctggttccaatgtgaaacttcgctatctgagctctagaactgcagggtacaagtcactgctgaagatcaccatgacccagtccacagtgcccctgaacctcattagggttcacctgatggtggctgtcgaggggcatctcttccagaagtcattccaggcttctcccaacctggcctccaccttcatctgggacaagacagatgcgtatggccaaagggtgtatggactctcagatgctgttgtgtctgtcgggtttgaatatgagacctgtcccagtctaattctctgggagaaaaggacagccctccttcagggattcgagctggacccctccaacctcggtggctggtccctagacaaacaccacatcctcaatgttaaaagtggaatcctacacaaaggcactggggaaaaccagttcctgacccagcagcctgccatcatcaccagcatcatgggcaatggtcgccgccggagcatttcctgtcccagctgcaacggccttgctgaaggcaacaagctgctggccccagtggctctggctgttggaatcgatgggagcctctatgtgggtgacttcaattacatccgacgcatctttccctctcgaaatgtgaccagcatcttggagttacgaaataaagagtttaaacatagcaacaacccagcacacaagtactacttggcagtggaccccgtgtccggctcgctctacgtgtccgacaccaacagcaggagaatctaccgcgtcaagtctctgagtggaaccaaagacctggctgggaattcggaagttgtggcagggacgggagagcagtgtctaccctttgatgaagcccgctgcggggatggagggaaggccatagatgcaaccctgatgagcccgagaggtattgcagtagacaagaatgggctcatgtactttgtcgatgccaccatgatccggaaggttgaccagaatggaatcatctccaccctgctgggctccaatgacctcactgccgtccggccgctgagctgtgattccagcatggatgtagcccaggttcgtctggagtggccaacagaccttgctgtcaatcccatggataactccttgtatgttctagagaacaatgtcatccttcgaatcaccgagaaccaccaagtcagcatcattgcgggacgccccatgcactgccaagttcctggcattgactactcactcagcaaactagccattcactctgccctggagtcagccagtgccattgccatttctcacactggggtcctctacatcactgagacagatgagaagaagattaaccgtctacgccaggtaacaaccaacggggagatctgccttttagctggggcagcctcggactgcgactgcaaaaacgatgtcaattgcaactgctattcaggagatgatgcctacgcgactgatgccatcttgaattccccatcatccttagctgtagctccagatggtaccatttacattgcagaccttggaaatattcggatcagggcggtcagcaagaacaagcctgttcttaatgccttcaaccagtatgaggctgcatcccccggagagcaggagttatatgttttcaacgctgatggcatccaccaatacactgtgagcctggtgacaggggagtacttgtacaatttcacatatagtactgacaatgatgtcactgaattgattgacaataatgggaattccctgaagatccgtcgggacagcagtggcatgccccgtcacctgctcatgcctgacaaccagatcatcaccctcaccgtgggcaccaatggaggcctcaaagtcgtgtccacacagaacctggagcttggtctcatgacctatgatggcaacactgggctcctggccaccaagagcgatgaaacaggatggacgactttctatgactatgaccacgaaggccgcctgaccaacgtgacgcgccccacgggggtggtaaccagtctgcaccgggaaatggagaaatctattaccattgacattgagaactccaaccgtgatgatgacgtcactgtcatcaccaacctctcttcagtagaggcctcctacacagtggtacaagatcaagttcggaacagctaccagctctgtaataatggtaccctgagggtgatgtatgctaatgggatgggtatcagcttccacagcgagccccatgtcctagcgggcaccatcacccccaccattggacgctgcaacatctccctgcctatggagaatggcttaaactccattgagtggcgcctaagaaaggaacagattaaaggcaaagtcaccatctttggcaggaagctccgggtccatggaagaaatctcttgtccattgactatgatcgaaatattcggactgaaaagatctatgatgaccaccggaagttcaccctgaggatcatttatgaccaggtgggccgccccttcctctggctgcccagcagcgggctggcagctgtcaacgtgtcatacttcttcaatgggcgcctggctgggcttcagcgtggggccatgagcgagaggacagacatcgacaagcaaggccgcatcgtgtcccgcatgttcgctgacgggaaagtgtggagctactcctaccttgacaagtccatggtcctcctgcttcagagccaacgtcagtatatatttgagtatgactcctctgaccgcctccttgccgtcaccatgcccagcgtggcccggcacagcatgtccacacacacctccatcggctacatccgtaatatttacaacccgcctgaaagcaatgcttcggtcatctttgactacagtgatgacggccgcatcctgaagacctcctttttgggcaccggacgccaggtgttctacaagtatgggaaactctccaagttatcagagattgtctacgacagtaccgccgtcaccttcgggtatgacgagaccactggtgtcttgaagatggtcaacctccaaagtgggggcttctcctgcaccatcaggtaccggaagattggccccctggtggacaagcagatctacaggttctccgaggaaggcatggtcaatgccaggtttgactacacctatcatgacaacagcttccgcatcgcaagcatcaagcccgtcataagtgagactcccctccccgttgacctctaccgctatgatgagatttctggcaaggtggaacactttggtaagtttggagtcatctattatgacatcaaccagatcatcaccactgccgtgatgaccctcagcaaacacttcgacacccatgggcggatcaaggaggtccagtatgagatgttccggtccctcatgtactggatgacggtgcaatatgacagcatgggcagggtgatcaagagggagctaaaactggggccctatgccaataccacgaagtacacctatgactacgatggggacgggcagctccagagcgtggccgtcaatgaccgcccgacctggcgctacagctatgaccttaatgggaatctccacttactgaacccaggcaacagtgtgcgcctcatgcccttgcgctatgacctccgggatcggataaccagactcggggatgtgcagtacaaaattgacgacgatggctatctgtgccagagagggtctgacatcttcgaatacaattccaagggcctcctaacaagagcctacaacaaggccagcgggtggagtgtccagtaccgctatgatggcgtaggacggcgggcttcctacaagaccaacctgggccaccacctgcagtacttctactctgacctccacaacccgacgcgcatcacccatgtctacaatcactccaactcggagattacctcactgtactacgacctccagggccacctctttgccatggagagcagcagtggggaggagtactatgttgcctctgataacacagggactcctctggctgtgttcagcatcaacggcctcatgatcaaacagctgcagtacacggcctatggggagatttattatgactccaaccccgacttccagatggtcattggcttccatgggggactctatgaccccctgaccaagctggtccacttcactcagcgtgattatgatgtgctggcaggacgatggacctccccagactataccatgtggaaaaacgtgggcaaggagccggccccctttaacctgtatatgttcaagagcaacaatcctctcagcagtgagctagatttgaagaactacgtgacagatgtgaaaagctggcttgtgatgtttggatttcagcttagcaacatcattcctggcttcccgagagccaaaatgtatttcgtgcctcctccctatgaattgtcagagagtcaagcaagtgagaatggacagctcattacaggtgtccaacagacaacagagagacataaccaggccttcatggctctggaaggacaggtcattactaaaaagctccacgccagcatccgagagaaagcaggtcactggtttgccaccaccacgcccatcattggcaaaggcatcatgtttgccatcaaagaagggcgggtgaccacgggcgtgtccagcatcgccagcgaagatagccgcaaggtggcatctgtgctgaacaacgcctactacctggacaagatgcactacagcatcgagggcaaggacacccactactttgtgaagattggctcagccgatggcgacctggtcacactaggcaccaccatcggccgcaaggtgctagagagcggggtgaacgtgaccgtgtcccagcccacgctgctggtcaacggcaggactcgaaggttcacgaacattgagttccagtactccacgctgctgctcagcatccgctatggcctcacccccgacaccctggacgaagagaaggcccgcgtcctggaccaggcgagacagagggccctgggcacggcctgggccaaggagcagcagaaagccagggacgggagagaggggagccgcctgtggactgagggcgagaagcagcagcttctgagcaccgggcgcgtgcaagggtacgagggatattacgtgcttcccgtggagcaatacccagagcttgcagacagtagcagcaacatccagtttttaagacagaatgagatgggaaagaggtaacaaaataatctgctgccattccttgtctgaatggctcagcaggagtaactgttatctcctctcctaaggagatgaagacctaacaggggcactgcggctgggctgctttaggagaccaagtggcaagaaagctcacattttttgagttcaaatgctactgtccaagcgagaagtccctcatcctgaagtagactaaagcccggctgaaaattccgaggaaaacaaaacaaacgaatgaatgaacagacacacacaatgttccaagttcccctaaaatatgacccacttgttctgggtctacgcagaaaagagacgcaaagtgtccaaaaggaacaaaagaacaaaaacgaataagcaaagaagaaaacaaacaaaaacaaaacaaaacaaacacacggaccgataaacaaagaagcgaagataagaaagaaggcctcatatccaattacctcactcattcacatgtgagcgacacgcagacatccgcgagggccagcgtcaccagaccagctgcgggacaaaccactcagactgcttgtaggacaaatacttctgacattttcgtttaagcaaatacaggtgcatttaaaacacgactttgggggtgatttgtgtgtagcgcctggggaggggggataaaagaggaggagtgagcactggaaatactttttaaagaaaaaaaaacatgagggaataaaagaaattcctatcaaaaatcaaagtgaaataataccatccagcacttaactctcaggtcccaactaagtctggcctgagctaatttatttgagcgcagagtgtaaaatttaattcaaaatggtggctataatcactacagataaatttcatactcttttgtctttggagattccattgtggacagtaatacgcagttacagggtgtagtctgtttagattccgtagttcgtgggtatcagtttcggtagaggtgcagcatcgtgacacttttgctaacaggtaccacttctgatcaccctgtacatacatgagccgaaaggcacaatcactgtttcagatttaaaattattagtgtgtttgtttggtccagaaactgagacaatcacatgacagtcaccacgaggagagaaaatttaaaaaataaaaataaaaacaaaaaaaattttaaaaattaaaaaaacaaaaataaagtctaataagaactttggtacaggaacttttttgtaatatacatgtatgaattgttcatcgagtttttatattaattttaatttgctgctaagcaaagactagggacaggcaaagataatttatggcaaagtgtttaaattgtttatacataaataaagtctctaaaactcctgtg

SEQ ID NO: 150 - protein, 2733 aa, Homo sapiens; identical to SEQ ID NO: 136

SEQ ID NO: 151 - DNA, 1605 bp, Homo sapiens; identical to SEQ ID NO: 133
  CDS (405)..(1604)

SEQ ID NO: 152 - protein, 400 aa, Homo sapiens; identical to SEQ ID NO: 140

SEQ ID NO: 153 - DNA, 9823 bp, Homo sapiens; identical to SEQ ID NO: 141
  CDS (277)..(8475)

SEQ ID NO: 154 - protein, 2733 aa, Homo sapiens; identical to SEQ ID NO: 136

SEQ ID NO: 155 - DNA, 2478 bp, Homo sapiens
  CDS (1)..(2478)
aaaaacagcagcatagacagtggtgaagcagaagttggtcggcgggtaacacaagaagtcccaccaggggtgttttggaggtcacaaattcacatcagtcagccccagttcttaaagttcaacatctccctcgggaaggacgctctctttggtgtttacataagaagaggacttccaccatctcatgcccagtatgacttcatggaacgtctggacgggaaggagaagtggagtgtggttgagtctcccagggaacgccggagcatacagaccttggttcagaatgaagccgtgtttgtgcagtacctggatgtgggcctgtggcatctggccttctacaatgatggaaaagacaaagagatggtttccttcaatactgttgtcctagattcagtgcaggactgtccacgtaactgccatgggaatggtgaatgtgtgtccggggtgtgtcactgtttcccaggatttctaggagcagactgtgctaaagctgcctgccctgtcctgtgcagtgggaatggacaatattctaaagggacgtgccagtgctacagcggctggaaaggtgcagagtgcgacgtgcccatgaatcagtgcatcgatccttcctgcgggggccacggctcctgcattgatgggaactgtgtctgctctgctggctacaaaggcgagcactgtgaggaagttgattgcttggatcccacctgctccagccacggagtctgtgtgaatggagaatgcctgtgcagccctggctggggtggtctgaactgtgagctggcgagggtccagtgcccagaccagtgcagtgggcatggcacgtacctgcctgacacgggcctctgcagctgcgatcccaactggatgggtcccgactgctctgttgaagtgtgctcagtagactgtggcactcacggcgtctgcatcgggggagcctgccgctgtgaagagggctggacaggcgcagcgtgtgaccagcgcgtgtgccacccccgctgcattgagcatgggacctgtaaagatggcaaatgtgaatgccgagagggctggaatggtgaacactgcaccattggtaggcaaacggcaggcaccgaaacagatggctgccctgacttgtgcaacggtaacgggagatgcacactgggtcagaacagctggcagtgtgtctgccagaccggctggagagggcccggatgcaacgttgccatggaaacttcctgtgctgataacaaggataatgagggagatggcctggtggattgtttggaccctgactgctgcctgcagtcagcctgtcagaacagcctgctctgccgggggtcccgggacccactggacatcattcagcagggccagacggattggcccgcagtgaagtccttctatgaccgtatcaagctcttggcaggcaaggatagcacccacatcattcctggagagaaccctttcaacagcagcttggtttctctcatccgaggccaagtagtaactacagatggaactcccctggtcggtgtgaacgtgtcttttgtcaagtacccaaaatacggctacaccatcacccgccaggatggcacgttcgacctgatcgcaaatggaggtgcttccttgactctacactttgagcgagccccgttcatgagccaggagcgcactgtgtggctgccgtggaacagcttttacgccatggacaccctggtgatgaagaccgaggagaactccatccccagctgtgacctcagtggctttgtccggcctgatccaatcatcatctcctccccactgtccaccttctttagtgctgcccctgggcagaatcccatcgtgcctgagacccaggttcttcatgaagaaatcgagctccctggttccaatgtgaaacttcgctatctgagctctagaactgcagggtacaagtcactgctgaagatcaccatgacccagtccacagtgcccctgaacctcattagggttcacctgatggtggctgtcgaggggcatctcttccagaagtcattccaggcttctcccaacctggcctacaccttcatctgggacaagacagatgcgtatggccaaagggtgtatggactctcagatgctgttgtgtctgtcgggtttgaatatgagacctgtcccagtctaattctctgggagaaaaggacagccctccttcagggattcgagctggacccctccaacctcggtggctggtccctagacaaacaccacatcctcaatgttaaaagtggaatcctacacaaaggcactggggaaaaccagttcctgacccagcagcctgccatcatcaccagcatcatgggcaatggtcgtcgccggagcatttcttgtcccagctgcaacggcctcgctgaaggcaacaagctgctggccccagtggctctggctgttggaatcgatgggagcctctatgtgggtgacttcaattacatccgacgcatctttccctctcgaaat

SEQ ID NO: 156 - protein, 826 aa, Homo sapiens
KNSSIDSGEAEVGRRVTQEVPPGVFWRSQIHISQPQFLKFNISLGKDALFGVYIRRGLPPSHAQYDFMERLDGKEKWSVVESPRERRSIQTLVQNEAVFVQYLDVGLWHLAFYNDGKDKEMVSFNTVVLDSVQDCPRNCHGNGECVSGVCHCFPGFLGADCAKAACPVLCSGNGQYSKGTCQCYSGWKGAECDVPMNQCIDPSCGGHGSCIDGNCVCSAGYKGEHCEEVDCLDPTCSSHGVCVNGECLCSPGWGGLNCELARVQCPDQCSGHGTYLPDTGLCSCDPNWMGPDCSVEVCSVDCGTHGVCIGGACRCEEGWTGAACDQRVCHPRCIEHGTCKDGKCECREGWNGEHCTIGRQTAGTETDGCPDLCNGNGRCTLGQNSWQCVCQTGWRGPGCNVAMETSCADNKDNEGDGLVDCLDPDCCLQSACQNSLLCRGSRDPLDIIQQGQTDWPAVKSFYDRIKLLAGKDSTHIIPGENPFNSSLVSLIRGQVVTTDGTPLVGVNVSFVKYPKYGYTITRQDGTFDLIANGGASLTLHFERAPFMSQERTVWLPWNSFYAMDTLVMKTEENSIPSCDLSGFVRPDPIIISSPLSTFFSAAPGQNPIVPETQVLHEEIELPGSNVKLRYLSSRTAGYKSLLKITMTQSTVPLNLIRVHLMVAVEGHLFQKSFQASPNLAYTFIWDKTDAYGQRVYGLSDAVVSVGFEYETCPSLILWEKRTALLQGFELDPSNLGGWSLDKHHILNVKSGILHKGTGENQFLTQQPAIITSIMGNGRRRSISCPSCNGLAEGNKLLAPVALAVGIDGSLYVGDFNYIRRIFPSRN

SEQ ID NO: 157 - DNA, 57 bp, Homo sapiens
  CDS (1)..(57)
gacacgggcctctgcagctgcgatcccaactggatgggtcccgactgctctgttgaa

SEQ ID NO: 158 - protein, 19 aa, Homo sapiens
DTGLCSCDPNWMGPDCSVE

SEQ ID NO: 159 - DNA, 54 bp, Homo sapiens
  CDS (1)..(54)
gaccgtatcaagctcttggcaggcaaggatagcacccacatcattcctggagag

SEQ ID NO: 160 - protein, 18 aa, Homo sapiens
DRIKLLAGKDSTHIIPGE

SEQ ID NO: 161 - DNA, 60 bp, Homo sapiens
  CDS (1)..(60)
tctgctggctacaaaggcgagcactgtgaggaagttgattgcttggatcccacctgctcc

SEQ ID NO: 162 - protein, 20 aa, Homo sapiens
SAGYKGEHCEEVDCLDPTCS

SEQ ID NO: 163 - DNA, 540 bp, Homo sapiens
  CDS (1)..(540)
aacagcagcatagacagtggtgaagcagaagttggtcggcgggtaacacaagaagtcccaccaggggtgttttggaggtcacaaattcacatcagtcagccccagttcttaaagttcaacatctccctcgggaaggacgctctctttggtgtttacataagaagaggacttccaccatctcatgcccagtatgacttcatggaacgtctggacgggaaggagaagtggagtgtggttgagtctcccagggaacgccggagcatacagaccttggttcagaatgaagccgtgtttgtgcagtacctggatgtgggcctgtggcatctggccttctacaatgatggaaaagacaaagagatggtttccttcaatactgttgtcctagatgattcagtgcaggactgtccacgtaactgccatgggaatggtgaatgtgtgtccggggtgtgtcactgtttcccaggatttctaggagcagactgtgctaaagaccttcctgccttgactttctgcaagacaatcattaataaagctgctctg

SEQ ID NO: 164 - protein, 180 aa, Homo sapiens
NSSIDSGEAEVGRRVTQEVPPGVFWRSQIHISQPQFLKFNISLGKDALFGVYIRRGLPPSHAQYDFMERLDGKEKWSVVESPRERRSIQTLVQNEAVFVQYLDVGLWHLAFYNDGKDKEMVSFNTVVLDDSVQDCPRNCHGNGECVSGVCHCFPGFLGADCAKDLPALTFCKTIINKAAL

SEQ ID NO: 165 - DNA, 2497 bp, Homo sapiens; identical to SEQ ID NO: 119
  CDS (11)..(2488)

SEQ ID NO: 166 - protein, 826 aa, Homo sapiens; identical to SEQ ID NO: 156

SEQ ID NO: 167 - DNA, 8575 bp, Homo sapiens
  CDS (199)..(8475)
taaagtacctgtcatcttgacaagtggcggagcggaggagtcaaggattataaatgatcacagccaggtccagctcgccccgtgattgggctctcccgcgatctgcaccgggggaagcgcatgagaggccaatgagacttgaaccctgagcctaagttgtcaccagcaggactgatgtgcacacagaaggaatgaagtatggatgtgaaagaacgcaggccttactgctccctgaccaagagcagacgagagaaggaacggcgctacacaaattcctccgcagacaatgaggagtgccgggtacccacacagaagtcctacagttccagcgagacattgaaagcttttgatcatgattcctcgcggctgctttacggcaacagagtgaaggatttggttcacagagaagcagacgagttcactagacaaagcaggatgcactatggaaaccgagtcacagacctcatccaccgggagtcagatgagtttcctagacaaggtatccttcaccagggctactcccttagcacagggtctgacgccgactccgacaccgagggagggatgtctccagaacacgccatcagactgtggggcagagggataaaatccaggcgcagttccggcctgtccagtcgtgaaaactcggcccttaccctgactgactctgacaacgaaaacaaatcagatgatgagaacggtcgtcccattccacgtacatcctcgcgtagtctcctcccatttgttcagctgcctagctcccataatcctccaccagttagctgccagatgccattgctagacagcaacacctcccatcaaatcatggacaccaaccctgatgaggaattctcccccaattcatacctgctcagagcatgctcagggccccagcaagcctccagcagtggtcctccgaaccaccacagccagtcgactctgaggccccctctcccaccccctcacaaccacacgctgtcccatcaccactcgtccgccaactccctcaacaggaactcactgaccaatcggcggagtcagatccacgccccggccccagcgcccaatgacctggccaccacaccagagtccgttcagcttcaggacagctgggtgctaaacagcaacgtgccactggagacccggcacttcctcttcaagacctcctcggggagcacacccttgttcagcagctcttccccgggataccctttgacctcaggaacggtttacacgcccccgccccgcctgctgcccaggaatactttctccaggaaggctttcaagctgaagaagccctccaaatactgcagctggaaatgtgctgccctctccgccattgccgcggccctcctcttggctattttgctggcgtatttcgcagcaatgcatctgctcggactcaattggcaactccagcctgcagatgggcacacctttaacaatgggataaggaccggcttaccaggaaacgatgatgtggcaacaatgccatctggaggcaaagtgccctggtcgttgaaaaacagcagcatagacagtggtgaagcagaagttggtcggcgggtaacacaagaagtcccaccaggggtgttttggaggtcacaaattcacatcagtcagccccagttcttaaagttcaacatctccctcgggaaggacgctctctttggtgtttacataagaagaggacttccaccatctcatgcccagtatgacttcatggaacgtctggacgggaaggagaagtggagtgtggttgagtctcccagggaacgccggagcatacagaccttggttcagaatgaagccgtgtttgtgcagtacctggatgtgggcctgtggcatctggccttctacaatgatggaaaagacaaagagatggtttccttcaatactgttgtcctagattcagtgcaggactgtccacgtaactgccatgggaatggtgaatgtgtgtccggggtgtgtcactgtttcccaggatttctaggagcagactgtgctaaagctgcctgccctgtcctgtgcagtgggaatggacaatattctaaagggacgtgccagtgctacagcggctggaaaggtgcagagtgcgacgtgcccatgaatcagtgcatcgatccttcctgcgggggccacggctcctgcattgatgggaactgtgtctgctctgctggctacaaaggcgagcactgtgaggaagttgattgcttggatcccacctgctccagccacggagtctgtgtgaatggagaatgcctgtgcagccctggctggggtggtctgaactgtgagctggcgagggtccagtgcccagaccagtgcagtgggcatggcacgtacctgcctgacacgggcctctgcagctgcgatcccaactggatgggtcccgactgctctgttgtgtgctcagtagactgtggcactcacggcgtctgcatcgggggagcctgccgctgtgaagagggctggacaggcgcagcgtgtgaccagcgcgtgtgccacccccgctgcattgagcacgggacctgtaaagatggcaaatgtgaatgccgagagggctggaatggtgaacactgcaccattgatggctgccctgacttgtgcaacggtaacgggagatgcacactgggtcagaacagctggcagtgtgtctgccagaccggctggagagggcccggatgcaacgttgccatggaaacttcctgtgctgataacaaggataatgagggagatggactcattgactgcatggatcccgattgctgcctacagagttcctgccagaatcagccctattgtcggggactgccggatcctcaggacatcattagccaaagccttcaatcgccttctcagcaagctgccaaatccttttatgatcgaatcagtttccttataggatctgatagcacccatgttatacctggagaaagtcctttcaatagcttggtttctctcatccgaggccaagtagtaactacagatggaactcccctggtcggtgtgaacgtgtcttttgtcaagtacccaaaatacggctacaccatcacccgccaggatggcacgtactccctctccaggttcgacctgatcgcaaatggaggtgcttccttgactctacactttgagcgagccccgttcatgagccaggagcgcactgtgtggctgccgtggaacagcttttacgccatggacaccctggtgatgaagaccgaggagaactccatccccagttgtgacctcagtggtttttgtcggcttgatcccatcatcatctcctcccctctgtccactttctttagtgctgcccctgggcagaatcccatcgtgcctgagacccaggtacttcatgaagaaatcgagctccctggttccaatgtgaaacttcgctatctgagctctagaactgcagggtacaagtcactgctgaagatcaccatgacccagtccacagtgcccctgaacctcattagggttcacctgatggtggctgtcgaggggcatctcttccagaagtcattccaggcttctcccaacctggcctacaccttcatctgggacaagacagatgcgtatggccaaagggtgtatggactctcagatgctgttggtatgttttggtttcaaaggacagccctccttcagggattcgagctggacccctccaacctcggtggctggtccctagacaaacaccacatcctcaatgttaaaagtggtatcctacacaaaggcactggggaaaaccagttcctgacccagcagcctgccatcatcaccagcatcatgggcaatggtcgccgccggagcatttcctgtcccagctgcaacggccttgctgaaggcaacaagctgctggccccagtggctctggctgttggaatcgatgggagcctctatgtgggtgacttcaattacatccgacgcatctttccctctcgaaatgtgaccagcatcttggagttacggagaaataaagagtttaaacatagcaacaacccagcacacaagtactacttggcagtggaccccgtgtccggctcgctctacgtgtccgacaccaacagcaggagaatctaccgcgtcaagtctctgagtggaaccaaagacctggctgggaattcggaagttgtggcagggacgggagagcagtgtctaccctttgatgaagcccgctgcggggatggagggaaggccatagatgcaaccctgatgagcccgagaggtattgcagtagacaagaatgggctcatgtactttgtcgatgccaccatgatccggaaggttgaccagaatggaatcatctccaccctgctgggctccaatgacctcactgccgtccggccgctgagctgtgattccagcatggatgtagcccaagttcgtctggagtggccaacagaccttgctgtcaatcccatggataactccttgtatgttctagagaacaatgtcatccttcgaatcaccgagaaccaccaagtcagcatcattgcgggacgccccatgcactgccaagttcctggcattgactactcactcagcaaactagccattcactctgccctggagtcagccagtgccattgccatttctcacactggggtcctctacatcactgagacagatgagaagaagattaaccgtctacgccaggtaacaaccaacggggagatctgccttttagctggggcagcctcggactgcgactgcaaaaacgatgtcaattgcaactgctattcaggagatgatgcctacgcgactgatgccatcttgaattccccatcatccttagctgtagctccagatggtaccatttacattgcagaccttggaaatattcggatcagggcggtcagcaagaacaagcctgttcttaatgccttcaaccagtatgaggctgcatcccccggagagcaggagttatatgttttcaacgctgatggcatccaccaatacactgtgagcctggtgacaggggagtacttgtacaatttcacatatagtactgacaatgatgtcactgaattgattgacaataatgggaattccctgaagatccgtcgggacagcagtggcatgccccgtcacctgctcatgcctgacaaccagatcatcaccctcaccgtgggcaccaatggaggcctcaaagtcgtgtccacacagaacctggagcttggtctcatgacctatgatggcaacactgggctcctggccaccaagagcgatgaaacaggatggacgactttctatagctatgaccacgaaggccgcctgaccaacgtgacgcgccccacgggggtggtaaccagtctgcaccgggaaatggagaaatctattaccattgacattgagaactccaaccgtgatgatgacgtcactgtcatcaccaacctctcttcagtagaggcctcctacacagtggtacaagatcaagttcggaacagctaccagctctgtaataatggtaccctgagggtgatgtatgctaatgggatgggtatcagcttccacagcgagccccatgtcctagcgggcaccatcacccccaccattggacgctgcaacatctccctgcctatggagaatggcttaaactccattgagtggcgcctaagaaaggaacagattaaaggcaaagtcaccatctttggcaggaagctcgaggtccatggaagaaatctcttgtccattgactatgatcgaaatattcggactgaaaagatctatgatgaccaccggaagttcaccctgaggatcatttatgaccaggtgggccgccccttcctctggctgcccagcagcgggctggcagctgtcaacgtgtcatacttcttcaatgggcgcctggctgggcttcagcgtggggccatgagcgagaggacagacatcgacaagcaaggccgcatcgtgtcccgcatgttcgctgacgggaaagtgtggagctactcctaccttgacaagatggtcctcctgcttcagagccaacgtcagtatatatttgagtatgactcctctgaccgcctccttgccgtcaccatgcccagcgtggcccggcacagcatgtccacacacacctccatcggctacatccgtaatatttacaacccgcctgaaagcaatgcttcggtcatctttgactacagtgatgacggccgcatcctgaagacctcctttttgggcaccggacgccaggtgttctacaagtatgggaaactctccaagttatcagagattgtctacgacagtaccgccgtcaccttcgggtatgacgagaccactggtgtcttgaagatggtcaacctccaaagtgggggcttctcctgcaccatcaggtaccggaagattggccccctggtggacaagcagatctacaggttctccgaggaaggcatggtcaatgccaggtttgactacacctatcatgacaacagcttccgcatcgcaagcatcaagcccgtcataagtgagactcccctccccgttgacctctaccgctatgatgagatttctggcaaggtggaacactttggtaagtttggagtcatctattatgacatcaaccagatcatcaccactgccgtgatgaccctcagcaaacacttcgacacccatgggcggatcaaggaggtccagtatgagatgttccggtccctcatgtactggatgacggtgcaatatgacagcatgggcagggtgatcaagagggagctaaaactggggccctatgccaataccacgaagtacacctatgactacgatggggacgggcagctccagagcgtgccggccgtcaatgaccgcccgacctggcgctacagctatgaccttaatgggaatctccacttactgaacccaggcaacagtgtgcgcctcatgcccttgcgctatgacctccgggatcggataaccagactcggggatgtgcagtacaaaattgacgacgatggctatctgtgccagagagggtctgacatcttcgaatacaattccaagggcctcctaacaagagcctacaacaaggccagcgggtggagtgtccagtaccgctatgatggcgtaggacggcgggcttcctacaagaccaacctgggccaccacctgcagtacttctactctgacctccacaacccgacgcgcatcacccatgtctacaatcactccaactcggagattacctcactgtactacgacctccagggccacctctttgccatggagagcagcagtggggaggagtactatgttgcctctgataacacagggactcctctggctgtgttcagcatcaacggcctcatgatcaaacagctgcagtacacggcctatggggagatttattatgactccaaccccgacttccagatggtcattggcttccatgggggactctatgaccccctgaccaagctggtccacttcactcagcgtgattatgatgtgctggcaggacgatggacctccccagactataccatgtggaaaaacgtgggcaaggagccggccccctttaacctgtatatgttcaagagcaacaatcctctcagcagtgagctagatttgaagaactacgtgacagatgtgaaaagctggcttgtgatgtttggatttcagcttagcaacatcattcctggcttcccgagagccaaaatgtatttcgtgcctcctccctatgaattgtcagagagtcaagcaagtgagaatggacagctcatcacaggtgcccaccagacaacagagagacataaccaggctttcatggctctggaaggacaggtcattactaaaaagctccacgccagcatccgagagaaagcaggtcattggtttgccaccaccacgcccatcattggcaaaggcatcatgtttgccatcaaagaagggcgggtgaccacgggcgtgtccagcatcgccagcgaagatagccgcaaggtggcatctgtgctgaacaacgcctactacctggacaagatgcactacagcatcgagggcaaggacacccactactttgtgaagattggctcagccgatggcgacctggtcacactaggcaccaccatcggccgcaaggtgctagagagcggggtgaacgtgaccgtgtcccagcccacgctgctggtcaacggcaggactcgaaggttcacgaacattgagttccagtactccacgctgctgctcagcatccgctatggcctcacccccgacaccctggacgaagagaaggcccgcgtcctggaccaggcgagacagagggccctgggcacggcctgggccaaggagcagcagaaagccagggacgggagagaggggagccgcctgtggactgagggcgagaagcagcagcttctgagcaccgggcgcgtgcaagggtacgagggatattacgtgcttcccgtggagcaatacccagagcttgcagacagtagcagcaacatccagtttttaagacagaatgagatgggaaagaggtaacaaaataatctgctgccattccttgtctgaatggctcagcaggagtaactgttatctcctctcctaaggagatgaagacctaacaggggcactgcgg

SEQ ID NO: 168 - protein, 2759 aa, Homo sapiens
MDVKERRPYCSLTKSRREKERRYTNSSADNEECRVPTQKSYSSSETLKAFDHDSSRLLYGNRVKDLVHREADEFTRQSRMHYGNRVTDLIHRESDEFPRQGILHQGYSLSTGSDADSDTEGGMSPEHAIRLWGRGIKSRRSSGLSSRENSALTLTDSDNENKSDDENGRPIPRTSSRSLLPFVQLPSSHNPPPVSCQMPLLDSNTSHQIMDTNPDEEFSPNSYLLRACSGPQQASSSGPPNHHSQSTLRPPLPPPHNHTLSHHHSSANSLNRNSLTNRRSQIHAPAPAPNDLATTPESVQLQDSWVLNSNVPLETRHFLFKTSSGSTPLFSSSSPGYPLTSGTVYTPPPRLLPRNTFSRKAFKLKKPSKYCSWKCAALSAIAAALLLAILLAYFAAMHLLGLNWQLQPADGHTFNNGIRTGLPGNDDVATMPSGGKVPWSLKNSSIDSGEAEVGRRVTQEVPPGVFWRSQIHISQPQFLKFNISLGKDALFGVYIRRGLPPSHAQYDFMERLDGKEKWSVVESPRERRSIQTLVQNEAVFVQYLDVGLWHLAFYNDGKDKEMVSFNTVVLDSVQDCPRNCHGNGECVSGVCHCFPGFLGADCAKAACPVLCSGNGQYSKGTCQCYSGWKGAECDVPMNQCIDPSCGGHGSCIDGNCVCSAGYKGEHCEEVDCLDPTCSSHGVCVNGECLCSPGWGGLNCELARVQCPDQCSGHGTYLPDTGLCSCDPNWMGPDCSVVCSVDCGTHGVCIGGACRCEEGWTGAACDQRVCHPRCIEHGTCKDGKCECREGWNGEHCTIDGCPDLCNGNGRCTLGQNSWQCVCQTGWRGPGCNVAMETSCADNKDNEGDGLIDCMDPDCCLQSSCQNQPYCRGLPDPQDIISQSLQSPSQQAAKSFYDRISFLIGSDSTHVIPGESPFNSLVSLIRGQVVTTDGTPLVGVNVSFVKYPKYGYTITRQDGTYSLSRFDLIANGGASLTLHFERAPFMSQERTVWLPWNSFYAMDTLVMKTEENSIPSCDLSGFCRLDPIIISSPLSTFFSAAPGQNPIVPETQVLHEEIELPGSNVKLRYLSSRTAGYKSLLKITMTQSTVPLNLIRVHLMVAVEGHLFQKSFQASPNLAYTFIWDKTDAYGQRVYGLSDAVGMFWFQRTALLQGFELDPSNLGGWSLDKHHILNVKSGILHKGTGENQFLTQQPAIITSIMGNGRRRSISCPSCNGLAEGNKLLAPVALAVGIDGSLYVGDFNYIRRIFPSRNVTSILELRRNKEFKHSNNPAHKYYLAVDPVSGSLYVSDTNSRRIYRVKSLSGTKDLAGNSEVVAGTGEQCLPFDEARCGDGGKAIDATLMSPRGIAVDKNGLMYFVDATMIRKVDQNGIISTLLGSNDLTAVRPLSCDSSMDVAQVRLEWPTDLAVNPMDNSLYVLENNVILRITENHQVSIIAGRPMHCQVPGIDYSLSKLAIHSALESASAIAISHTGVLYITETDEKKINRLRQVTTNGEICLLAGAASDCDCKNDVNCNCYSGDDAYATDAILNSPSSLAVAPDGTIYIADLGNIRIRAVSKNKPVLNAFNQYEAASPGEQELYVFNADGIHQYTVSLVTGEYLYNFTYSTDNDVTELIDNNGNSLKIRRDSSGMPRHLLMPDNQIITLTVGTNGGLKVVSTQNLELGLMTYDGNTGLLATKSDETGWTTFYSYDHEGRLTNVTRPTGVVTSLHREMEKSITIDIENSNRDDDVTVITNLSSVEASYTVVQDQVRNSYQLCNNGTLRVMYANGMGISFHSEPHVLAGTITPTIGRCNISLPMENGLNSIEWRLRKEQIKGKVTIFGRKLEVHGRNLLSIDYDRNIRTEKIYDDHRKFTLRIIYDQVGRPFLWLPSSGLAAVNVSYFFNGRLAGLQRGAMSERTDIDKQGRIVSRMFADGKVWSYSYLDKMVLLLQSQRQYIFEYDSSDRLLAVTMPSVARHSMSTHTSIGYIRNIYNPPESNASVIFDYSDDGRILKTSFLGTGRQVFYKYGKLSKLSEIVYDSTAVTFGYDETTGVLKMVNLQSGGFSCTIRYRKIGPLVDKQIYRFSEEGMVNARFDYTYHDNSFRIASIKPVISETPLPVDLYRYDEISGKVEHFGKFGVIYYDINQIITTAVMTLSKHFDTHGRIKEVQYEMFRSLMYWMTVQYDSMGRVIKRELKLGPYANTTKYTYDYDGDGQLQSVPAVNDRPTWRYSYDLNGNLHLLNPGNSVRLMPLRYDLRDRITRLGDVQYKIDDDGYLCQRGSDIFEYNSKGLLTRAYNKASGWSVQYRYDGVGRRASYKTNLGHHLQYFYSDLHNPTRITHVYNHSNSEITSLYYDLQGHLFAMESSSGEEYYVASDNTGTPLAVFSINGLMIKQLQYTAYGEIYYDSNPDFQMVIGFHGGLYDPLTKLVHFTQRDYDVLAGRWTSPDYTMWKNVGKEPAPFNLYMFKSNNPLSSELDLKNYVTDVKSWLVMFGFQLSNIIPGFPRAKMYFVPPPYELSESQASENGQLITGAHQTTERHNQAFMALEGQVITKKLHASIREKAGHWFATTTPIIGKGIMFAIKEGRVTTGVSSIASEDSRKVASVLNNAYYLDKMHYSIEGKDTHYFVKIGSADGDLVTLGTTIGRKVLESGVNVTVSQPTLLVNGRTRRFTNIEFQYSTLLLSIRYGLTPDTLDEEKARVLDQARQRALGTAWAKEQQKARDGREGSRLWTEGEKQQLLSTGRVQGYEGYYVLPVEQYPELADSSSNIQFLRQNEMGKR

SEQ ID NO: 169 - DNA, 6999 bp, Homo sapiens
  CDS (1)..(6999)
aaaaacagcagcatagacagtggtgaagcagaagttggtcggcgggtaacacaagaagtcccaccaggggtgttttggaggtcacaaattcacatcagtcagccccagttcttaaagttcaacatctccctcgggaaggacgctctctttggtgtttacataagaagaggacttccaccatctcatgcccagtatgacttcatggaacgtctggacgggaaggagaagtggagtgtggttgagtctcccagggaacgccggagcatacagaccttggttcagaatgaagccgtgtttgtgcagtacctggatgtgggcctgtggcatctggccttctacaatgatggaaaagacaaagagatggtttccttcaatactgttgtcctagattcagtgcaggactgtccacgtaactgccatgggaatggtgaatgtgtgtccggggtgtgtcactgtttcccaggatttctaggagcagactgtgctaaagctgcctgccctgtcctgtgcagtgggaatggacaatattctaaagggacgtgccagtgctacagcggctggaaaggtgcagagtgcgacgtgcccatgaatcagtgcatcgatccttcctgcgggggccacggctcctgcattgatgggaactgtgtctgctctgctggctacaaaggcgagcactgtgaggaagttgattgcttggatcccacctgctccagccacggagtctgtgtgaatggagaatgcctgtgcagccctggctggggtggtctgaactgtgagctggcgagggtccagtgcccagaccagtgcagtgggcatggcacgtacctgcctgacacgggcctctgcagctgcgatcccaactggatgggtcccgactgctctgttgaagtgtgctcagtagactgtggcactcacggcgtctgcatcgggggagcctgccgctgtgaagagggctggacaggcgcagcgtgtgaccagcgcgtgtgccacccccgctgcattgagcacgggacctgtaaagatggcaaatgtgaatgccgagagggctggaatggtgaacactgcaccattggtaggcaaacggcaggcaccgaaacagatggctgccctgacttgtgcaacggtaacgggagatgcacactgggtcagaacagctggcagtgtgtctgccagaccggctggagagggcccggatgcaacgttgccatggaaacttcctgtgctgataacaaggataatgagggagatggcctggtggattgtttggaccctgactgctgcctgcagtcagcctgtcagaacagcctgctctgccgggggtcccgggacccactggacatcattcagcagggccagacggattggcccgcagtgaagtccttctatgaccgtatcaagctcttggcaggcaaggatagcacccacatcattcctggagagaaccctttcaacagcagcttggtttctctcatccgaggccaagtagtaactacagatggaactcccctggtcggtgtgaacgtgtcttttgtcaagtacccaaaatacggctacaccatcacccgccaggatggcacgttcgacctgatcgcaaatggaggtgcttccttgactctacactttgagcgagccccgttcatgagccaggagcgcactgtgtggctgccgtggaacagcttttacgccatggacaccctggtgatgaagaccgaggagaactccatccccagctgtgacctcagtggctttgtccggcctgatccaatcatcatctcctccccactgtccaccttctttagtgctgcccctgggcagaatcccatcgtgcctgagacccaggttcttcatgaagaaatcgagctccctggttccaatgtgaaacttcgctatctgagctctagaactgcagggtacaagtcactgctgaagatcaccatgacccagtccacagtgcccctgaacctcattagggttcacctgatggtggctgtcgaggggcatctcttccagaagtcattccaggcttctcccaacctggcctccaccttcatctgggacaagacagatgcgtatggccaaagggtgtatggactctcagatgctgttgtgtctgtcgggtttgaatatgagacctgtcccagtctaattctctgggagaaaaggacagccctccttcagggattcgagctggacccctccaacctcggtggctggtccctagacaaacaccacatcctcaatgttaaaagtggaatcctacacaaaggcactggggaaaaccagttcctgacccagcagcctgccatcatcaccagcatcatgggcaatggtcgccgccggagcatttcctgtcccagctgcaacggccttgctgaaggcaacaagctgctggccccagtggctctggctgttggaatcgatgggagcctctatgtgggtgacttcaattacatccgacgcatctttccctctcgaaatgtgaccagcatcttggagttacgaaataaagagtttaaacatagcaacaacccagcacacaagtactacttggcagtggaccccgtgtccggctcgctctacgtgtccgacaccaacagcaggagaatctaccgcgtcaagtctctgagtggaaccaaagacctggctgggaattcggaagttgtggcagggacgggagagcagtgtctaccctttgatgaagcccgctgcggggatggagggaaggccatagatgcaaccctgatgagcccgagaggtattgcagtagacaagaatgggctcatgtactttgtcgatgccaccatgatccggaaggttgaccagaatggaatcatctccaccctgctgggctccaatgacctcactgccgtccggccgctgagctgtgattccagcatggatgtagcccaggttcgtctggagtggccaacagaccttgctgtcaatcccatggataactccttgtatgttctagagaacaatgtcatccttcgaatcaccgagaaccaccaagtcagcatcattgcgggacgccccatgcactgccaagttcctggcattgactactcactcagcaaactagccattcactctgccctggagtcagccagtgccattgccatttctcacactggggtcctctacatcactgagacagatgagaagaagattaaccgtctacgccaggtaacaaccaacggggagatctgccttttagctggggcagcctcggactgcgactgcaaaaacgatgtcaattgcaactgctattcaggagatgatgcctacgcgactgatgccatcttgaattccccatcatccttagctgtagctccagatggtaccatttacattgcagaccttggaaatattcggatcagggcggtcagcaagaacaagcctgttcttaatgccttcaaccagtatgaggctgcatcccccggagagcaggagttatatgttttcaacgctgatggcatccaccaatacactgtgagcctggtgacaggggagtacttgtacaatttcacatatagtactgacaatgatgtcactgaattgattgacaataatgggaattccctgaagatccgtcgggacagcagtggcatgccccgtcacctgctcatgcctgacaaccagatcatcaccctcaccgtgggcaccaatggaggcctcaaagtcgtgtccacacagaacctggagcttggtctcatgacctatgatggcaacactgggctcctggccaccaagagcgatgaaacaggatggacgactttctatgactatgaccacgaaggccgcctgaccaacgtgacgcgccccacgggggtggtaaccagtctgcaccgggaaatggagaaatctattaccattgacattgagaactccaaccgtgatgatgacgtcactgtcatcaccaacctctcttcagtagaggcctcctacacagtggtacaagatcaagttcggaacagctaccagctctgtaataatggtaccctgagggtgatgtatgctaatgggatgggtatcagcttccacagcgagccccatgtcctagcgggcaccatcacccccaccattggacgctgcaacatctccctgcctatggagaatggcttaaactccattgagtggcgcctaagaaaggaacagattaaaggcaaagtcaccatctttggcaggaagctccgggtccatggaagaaatctcttgtccattgactatgatcgaaatattcggactgaaaagatctatgatgaccaccggaagttcaccctgaggatcatttatgaccaggtgggccgccccttcctctggctgcccagcagcgggctggcagctgtcaacgtgtcatacttcttcaatgggcgcctggctgggcttcagcgtggggccatgagcgagaggacagacatcgacaagcaaggccgcatcgtgtcccgcatgttcgctgacgggaaagtgtggagctactcctaccttgacaagtccatggtcctcctgcttcagagccaacgtcagtatatatttgagtatgactcctctgaccgcctccttgccgtcaccatgcccagcgtggcccggcacagcatgtccacacacacctccatcggctacatccgtaatatttacaacccgcctgaaagcaatgcttcggtcatctttgactacagtgatgacggccgcatcctgaagacctcctttttgggcaccggacgccaggtgttctacaagtatgggaaactctccaagttatcagagattgtctacgacagtaccgccgtcaccttcgggtatgacgagaccactggtgtcttgaagatggtcaacctccaaagtgggggcttctcctgcaccatcaggtaccggaagattggccccctggtggacaagcagatctacaggttctccgaggaaggcatggtcaatgccaggtttgactacacctatcatgacaacagcttccgcatcgcaagcatcaagcccgtcataagtgagactcccctccccgttgacctctaccgctatgatgagatttctggcaaggtggaacactttggtaagtttggagtcatctattatgacatcaaccagatcatcaccactgccgtgatgaccctcagcaaacacttcgacacccatgggcggatcaaggaggtccagtatgagatgttccggtccctcatgtactggatgacggtgcaatatgacagcatgggcagggtgatcaagagggagctaaaactggggccctatgccaataccacgaagtacacctatgactacgatggggacgggcagctccagagcgtggccgtcaatgaccgcccgacctggcgctacagctatgaccttaatgggaatctccacttactgaacccaggcaacagtgtgcgcctcatgcccttgcgctatgacctccgggatcggataaccagactcggggatgtgcagtacaaaattgacgacgatggctatctgtgccagagagggtctgacatcttcgaatacaattccaagggcctcctaacaagagcctacaacaaggccagcgggtggagtgtccagtaccgctatgatggcgtaggacggcgggcttcctacaagaccaacctgggccaccacctgcagtacttctactctgacctccacaacccgacgcgcatcacccatgtctacaatcactccaactcggagattacctcactgtactacgacctccagggccacctctttgccatggagagcagcagtggggaggagtactatgttgcctctgataacacagggactcctctggctgtgttcagcatcaacggcctcatgatcaaacagctgcagtacacggcctatggggagatttattatgactccaaccccgacttccagatggtcattggcttccatgggggactctatgaccccctgaccaagctggtccacttcactcagcgtgattatgatgtgctggcaggacgatggacctccccagactataccatgtggaaaaacgtgggcaaggagccggccccctttaacctgtatatgttcaagagcaacaatcctctcagcagtgagctagatttgaagaactacgtgacagatgtgaaaagctggcttgtgatgtttggatttcagcttagcaacatcattcctggcttcccgagagccaaaatgtatttcgtgcctcctccctatgaattgtcagagagtcaagcaagtgagaatggacagctcattacaggtgtccaacagacaacagagagacataaccaggccttcatggctctggaaggacaggtcattactaaaaagctccacgccagcatccgagagaaagcaggtcactggtttgccaccaccacgcccatcattggcaaaggcatcatgtttgccatcaaagaagggcgggtgaccacgggcgtgtccagcatcgccagcgaagatagccgcaaggtggcatctgtgctgaacaacgcctactacctggacaagatgcactacagcatcgagggcaaggacacccactactttgtgaagattggctcagccgatggcgacctggtcacactaggcaccaccatcggccgcaaggtgctagagagcggggtgaacgtgaccgtgtcccagcccacgctgctggtcaacggcaggactcgaaggttcacgaacattgagttccagtactccacgctgctgctcagcatccgctatggcctcacccccgacaccctggacgaagagaaggcccgcgtcctggaccaggcgagacagagggccctgggcacggcctgggccaaggagcagcagaaagccagggacgggagagaggggagccgcctgtggactgagggcgagaagcagcagcttctgagcaccgggcgcgtgcaagggtacgagggatattacgtgcttcccgtggagcaatacccagagcttgcagacagtagcagcaacatccagtttttaagacagaatgagatgggaaagagg

SEQ ID NO: 170 - protein, 2333 aa, Homo sapiens
KNSSIDSGEAEVGRRVTQEVPPGVFWRSQIHISQPQFLKFNISLGKDALFGVYIRRGLPPSHAQYDFMERLDGKEKWSVVESPRERRSIQTLVQNEAVFVQYLDVGLWHLAFYNDGKDKEMVSFNTVVLDSVQDCPRNCHGNGECVSGVCHCFPGFLGADCAKAACPVLCSGNGQYSKGTCQCYSGWKGAECDVPMNQCIDPSCGGHGSCIDGNCVCSAGYKGEHCEEVDCLDPTCSSHGVCVNGECLCSPGWGGLNCELARVQCPDQCSGHGTYLPDTGLCSCDPNWMGPDCSVEVCSVDCGTHGVCIGGACRCEEGWTGAACDQRVCHPRCIEHGTCKDGKCECREGWNGEHCTIGRQTAGTETDGCPDLCNGNGRCTLGQNSWQCVCQTGWRGPGCNVAMETSCADNKDNEGDGLVDCLDPDCCLQSACQNSLLCRGSRDPLDIIQQGQTDWPAVKSFYDRIKLLAGKDSTHIIPGENPFNSSLVSLIRGQVVTTDGTPLVGVNVSFVKYPKYGYTITRQDGTFDLIANGGASLTLHFERAPFMSQERTVWLPWNSFYAMDTLVMKTEENSIPSCDLSGFVRPDPIIISSPLSTFFSAAPGQNPIVPETQVLHEEIELPGSNVKLRYLSSRTAGYKSLLKITMTQSTVPLNLIRVHLMVAVEGHLFQKSFQASPNLASTFIWDKTDAYGQRVYGLSDAVVSVGFEYETCPSLILWEKRTALLQGFELDPSNLGGWSLDKHHILNVKSGILHKGTGENQFLTQQPAIITSIMGNGRRRSISCPSCNGLAEGNKLLAPVALAVGIDGSLYVGDFNYIRRIFPSRNVTSILELRNKEFKHSNNPAHKYYLAVDPVSGSLYVSDTNSRRIYRVKSLSGTKDLAGNSEVVAGTGEQCLPFDEARCGDGGKAIDATLMSPRGIAVDKNGLMYFVDATMIRKVDQNGIISTLLGSNDLTAVRPLSCDSSMDVAQVRLEWPTDLAVNPMDNSLYVLENNVILRITENHQVSIIAGRPMHCQVPGIDYSLSKLAIHSALESASAIAISHTGVLYITETDEKKINRLRQVTTNGEICLLAGAASDCDCKNDVNCNCYSGDDAYATDAILNSPSSLAVAPDGTIYIADLGNIRIRAVSKNKPVLNAFNQYEAASPGEQELYVFNADGIHQYTVSLVTGEYLYNFTYSTDNDVTELIDNNGNSLKIRRDSSGMPRHLLMPDNQIITLTVGTNGGLKVVSTQNLELGLMTYDGNTGLLATKSDETGWTTFYDYDHEGRLTNVTRPTGVVTSLHREMEKSITIDIENSNRDDDVTVITNLSSVEASYTVVQDQVRNSYQLCNNGTLRVMYANGMGISFHSEPHVLAGTITPTIGRCNISLPMENGLNSIEWRLRKEQIKGKVTIFGRKLRVHGRNLLSIDYDRNIRTEKIYDDHRKFTLRIIYDQVGRPFLWLPSSGLAAVNVSYFFNGRLAGLQRGAMSERTDIDKQGRIVSRMFADGKVWSYSYLDKSMVLLLQSQRQYIFEYDSSDRLLAVTMPSVARHSMSTHTSIGYIRNIYNPPESNASVIFDYSDDGRILKTSFLGTGRQVFYKYGKLSKLSEIVYDSTAVTFGYDETTGVLKMVNLQSGGFSCTIRYRKIGPLVDKQIYRFSEEGMVNARFDYTYHDNSFRIASIKPVISETPLPVDLYRYDEISGKVEHFGKFGVIYYDINQIITTAVMTLSKHFDTHGRIKEVQYEMFRSLMYWMTVQYDSMGRVIKRELKLGPYANTTKYTYDYDGDGQLQSVAVNDRPTWRYSYDLNGNLHLLNPGNSVRLMPLRYDLRDRITRLGDVQYKIDDDGYLCQRGSDIFEYNSKGLLTRAYNKASGWSVQYRYDGVGRRASYKTNLGHHLQYFYSDLHNPTRITHVYNHSNSEITSLYYDLQGHLFAMESSSGEEYYVASDNTGTPLAVFSINGLMIKQLQYTAYGEIYYDSNPDFQMVIGFHGGLYDPLTKLVHFTQRDYDVLAGRWTSPDYTMWKNVGKEPAPFNLYMFKSNNPLSSELDLKNYVTDVKSWLVMFGFQLSNIIPGFPRAKMYFVPPPYELSESQASENGQLITGVQQTTERHNQAFMALEGQVITKKLHASIREKAGHWFATTTPIIGKGIMFAIKEGRVTTGVSSIASEDSRKVASVLNNAYYLDKMHYSIEGKDTHYFVKIGSADGDLVTLGTTIGRKVLESGVNVTVSQPTLLVNGRTRRFTNIEFQYSTLLLSIRYGLTPDTLDEEKARVLDQARQRALGTAWAKEQQKARDGREGSRLWTEGEKQQLLSTGRVQGYEGYYVLPVEQYPELADSSSNIQFLRQNEMGKR

SEQ ID NO: 171 - DNA, 2478 bp, Homo sapiens
  CDS (1)..(2478)
aaaaacagcagcatagacagtggtgaagcagaagttggtcggcgggtaacacaagaagtcccaccaggggtgttttggaggtcacaaattcacatcagtcagccccagttcttaaagttcaacatctccctcgggaaggacgctctctttggtgtttacataagaagaggacttccaccatctcatgcccagtatgacttcatggaacgtctggacgggaaggagaagtggagtgtggttgagtctcccagggaacgccggagcatacagaccttggttcagaatgaagccgtgtttgtgcagtacctggatgtgggcctgtggcatctggccttctacaatgatggaaaagacaaagagatggtttccttcaatactgttgtcctagattcagtgcaggactgtccacgtaactgccatgggaatggtgaatgtgtgtccggggtgtgtcactgtttcccaggatttctaggagcagactgtgctaaagctgcctgccctgtcctgtgcagtgggaatggacaatattctaaagggacgtgccagtgctacagcggctggaaaggtgcagagtgcgacgtgcccatgaatcagtgcatcgatccttcctgcgggggccacggctcctgcattgatgggaactgtgtctgctctgctggctacaaaggcgagcactgtgaggaagttgattgcttggatcccacctgctccagccacggagtctgtgtgaatggagaatgcctgtgcagccctggctggggtggtctgaactgtgagctggcgagggtccagtgcccaaaccagtgcagtgggcatggcacgtacctgcctgacacgggcctctgcagctgcgatcccaactggatgggtcccgactgctctgttgaagtgtgctcagtagactgtggcactcacggcgtctgcatcgggggagcctgccgctgtgaagagggctggacaggcgcagcgtgtgaccagcgcgtgtgccacccccgctgcattgagcacgggacctgtaaagatggcaaatgtgaatgccgagagggctggaatggtgaacactgcaccattggtaggcaaacggcaggcaccgaaacagatggctgccctgacttgtgcaacggtaacgggagatgcacactgggtcagaacagctggcagtgtgtctgccagaccggctggagagggcccggatgcaacgttgccatggaaacttcctgtgctgataacaaggataatgagggagatggcctggtggattgtttggaccctgactgctgcctgcagtcagcctgtcagaacagcctgctctgccgggggtcccgggacccactggacatcattcagcagggccagacggattggcccgcagtgaagtccttctatgaccgtatcaagctcttggcaggcaaggatagcacccacatcattcctggagagaaccctttcaacagcagcttggtttctctcatccgaggccaagtagtaactacagatggaactcccctggtcggtgtgaacgtgtcttttgtcaagtacccaaaatacggctacaccatcacccgccaggatggcacgttcgacctgatcgcaaatggaggtgcttccttgactctacactttgagcgagccccgttcatgagccaggagcgcactgtgtggctgccgtggaacagcttttacgccatggacaccctggtgatgaagaccgaggagaactccatccccagctgtgacctcagtggctttgtccggcctgatccaatcatcatctcctccccactgtccaccttctttagtgctgcccctgggcagaatcccatcgtgcctgagacccaggttcttcatgaagaaatcgagctccctggttccaatgtgaaacttcgctatctgagctctagaactgcagggtacaagtcactgctgaagatcaccatgacccagtccacagtgcccctgaacctcattagggttcacctgatggtggctgtcgaggggcatctcttccagaagtcattccaggcttctcccaacctggcctccaccttcatctgggacaagacagatgcgtatggccaaagggtgtatggactctcagatgctgttgtgtctgtcgggtttgaatatgagacctgtcccagtctaattctctgggagaaaaggacagccctccttcagggattcgagctggacccctccaacctcggtggctggtccctagacaaacaccacatcctcaatgttaaaagtggaatcctacacaaaggcactggggaaaaccagttcctgacccagcagcctgccatcatcaccagcatcatgggcaatggtcgccgccggagcatttcctgtcccagctgcaacggccttgctgaaggcaacaagctgctggccccagtggctctggctgttggaatcgatgggagcctctatgtgggtgacttcaattacatccgacgcatctttccctctcgaaat

SEQ ID NO: 172 - protein, 826 aa, Homo sapiens
KNSSIDSGEAEVGRRVTQEVPPGVFWRSQIHISQPQFLKFNISLGKDALFGVYIRRGLPPSHAQYDFMERLDGKEKWSVVESPRERRSIQTLVQNEAVFVQYLDVGLWHLAFYNDGKDKEMVSFNTVVLDSVQDCPRNCHGNGECVSGVCHCFPGFLGADCAKAACPVLCSGNGQYSKGTCQCYSGWKGAECDVPMNQCIDPSCGGHGSCIDGNCVCSAGYKGEHCEEVDCLDPTCSSHGVCVNGECLCSPGWGGLNCELARVQCPNQCSGHGTYLPDTGLCSCDPNWMGPDCSVEVCSVDCGTHGVCIGGACRCEEGWTGAACDQRVCHPRCIEHGTCKDGKCECREGWNGEHCTIGRQTAGTETDGCPDLCNGNGRCTLGQNSWQCVCQTGWRGPGCNVAMETSCADNKDNEGDGLVDCLDPDCCLQSACQNSLLCRGSRDPLDIIQQGQTDWPAVKSFYDRIKLLAGKDSTHIIPGENPFNSSLVSLIRGQVVTTDGTPLVGVNVSFVKYPKYGYTITRQDGTFDLIANGGASLTLHFERAPFMSQERTVWLPWNSFYAMDTLVMKTEENSIPSCDLSGFVRPDPIIISSPLSTFFSAAPGQNPIVPETQVLHEEIELPGSNVKLRYLSSRTAGYKSLLKITMTQSTVPLNLIRVHLMVAVEGHLFQKSFQASPNLASTFIWDKTDAYGQRVYGLSDAVVSVGFEYETCPSLILWEKRTALLQGFELDPSNLGGWSLDKHHILNVKSGILHKGTGENQFLTQQPAIITSIMGNGRRRSISCPSCNGLAEGNKLLAPVALAVGIDGSLYVGDFNYIRRIFPSRN

SEQ ID NO: 173 - DNA, 2478 bp, Homo sapiens
  CDS (1)..(2478)
aaaaacagcagcatagacagtggtgaagcagaagttggtcggcgggtaacacaagaagtcccaccaggggtgttttggaggtcacaaattcacatcagtcagccccagttcttaaagttcaacatctccctcgggaaggacgctctctttggtgtttacataagaagaggacttccaccatctcatgcccagtatgacttcatggaacgtctggacgggaaggagaagtggagtgtggttgagtctcccagggaacgccggagcatacagaccttggttcagaatgaagccgtgtttgtgcagtacctggatgtgggcctgtggcatctggccttctacaatgatggaaaagacaaagagatggtttccttcaatactgttgtcctagattcagtgcaggactgtccacgtaactgccatgggaatggtgaatgtgtgtccggggtgtgtcactgtttcccaggatttctaggagcagactgtgctaaagctgcctgccctgtcctgtgcagtgggaatggacaatattctaaagggacgtgccagtgctacagcggctggaaaggtgcagagtgcgacgtgcccatgaatcagtgcatcgatccttcctgcgggggccacggctcctgcattgatgggaactgtgtctgctctgctggctacaaaggcgagcactgtgaggaagttgattgcttggatcccacctgctccagccacggagtctgtgtgaatggagaatgcctgtgcagccctggctggggtggtctgaactgtgagctggcgagggtccagtgcccagaccagtgcagtgggcatggcacgtacctgcctgacacgggcctctgcagctgcgatcccaactggatgggtcccgactgctctgttgaagtgtgctcagtagactgtggcactcacggcgtctgcatcgggggagcctgccgctgtgaagagggctggacaggcgcagcgtgtgaccagcgcgtgtgccacccccgctgcattgagcacgggacctgtaaagatggcaaatgtgaatgccgagagggctggaatggtgaacactgcaccattggtaggcaaacggcaggcaccgaaacagatggctgccctgacttgtgcaacggtaacgggagatgcacactgggtcagaacagctggcagtgtgtctgccagaccggctggagagggcccggatgcaacgttgccatggaaacttcctgtgctgataacaaggataatgagggagatggcctggtggattgtttggaccctgactgctgcctgcagtcagcctgtcagaacagcctgctctgccgggggtcccgggacccactggacatcattcagcagggccagacggattggcccgcagtgaagtccttctatgaccgtatcaagctcttggcaggcaaggatagcacccacatcattcctggagagaaccctttcaacagcagcttggtttctctcatccgaggccaagtagtaactacagatggaactcccctggtcggtgtgaacgtgtcttttgtcaagtacccaaaatacggctacaccatcacccgccaggatggcacgttcgacctgatcgcaaatggaggtgcttccttgactctacactttgagcgagccccgttcatgagccaggagcgcactgtgtggctgccgtggaacagcttttacgccatggacaccctggtgatgaagaccgaggagaactccatccccagctgtgacctcagtggctttgcccggcctgatccaatcatcatctcctccccactgtccaccttctttagtgctgcccctgggcagaatcccatcgtgcctgagacccaggttcttcatgaagaaatcgagctccctggttccaatgtgaaacttcgctatctgagctctagaactgcagggtacaagtcactgctgaagatcaccatgacccagtccacagtgcccctgaacctcattagggttcacctgatggtggctgtcgaggggcatctcttccagaagtcattccaggcttctcccaacctggcctccaccttcatctgggacaagacagatgcgtatggccaaagggtgtatggactctcagatgctgttgtgtctgtcgggtttgaatatgagacctgtcccagtctaattctctgggagaaaaggacagccctccttcagggattcgagctggacccctccaacctcggtggctggtccctagacaaacaccacatcctcaatgttaaaagtggaatcctacacaaaggcactggggaaaaccagttcctgacccagcagcctgccatcatcaccagcatcatgggcaatggtcgccgccggagcatttcctgtcccagctgcaacggccttgctgaaggcaacaagctgctggccccagtggctctggctgttggaatcgatgggagcctctatgtgggtgacttcaattacatccgacgcatctttccctctcgaaat

SEQ ID NO: 174 - protein, 826 aa, Homo sapiens
KNSSIDSGEAEVGRRVTQEVPPGVFWRSQIHISQPQFLKFNISLGKDALFGVYIRRGLPPSHAQYDFMERLDGKEKWSVVESPRERRSIQTLVQNEAVFVQYLDVGLWHLAFYNDGKDKEMVSFNTVVLDSVQDCPRNCHGNGECVSGVCHCFPGFLGADCAKAACPVLCSGNGQYSKGTCQCYSGWKGAECDVPMNQCIDPSCGGHGSCIDGNCVCSAGYKGEHCEEVDCLDPTCSSHGVCVNGECLCSPGWGGLNCELARVQCPDQCSGHGTYLPDTGLCSCDPNWMGPDCSVEVCSVDCGTHGVCIGGACRCEEGWTGAACDQRVCHPRCIEHGTCKDGKCECREGWNGEHCTIGRQTAGTETDGCPDLCNGNGRCTLGQNSWQCVCQTGWRGPGCNVAMETSCADNKDNEGDGLVDCLDPDCCLQSACQNSLLCRGSRDPLDIIQQGQTDWPAVKSFYDRIKLLAGKDSTHIIPGENPFNSSLVSLIRGQVVTTDGTPLVGVNVSFVKYPKYGYTITRQDGTFDLIANGGASLTLHFERAPFMSQERTVWLPWNSFYAMDTLVMKTEENSIPSCDLSGFARPDPIIISSPLSTFFSAAPGQNPIVPETQVLHEEIELPGSNVKLRYLSSRTAGYKSLLKITMTQSTVPLNLIRVHLMVAVEGHLFQKSFQASPNLASTFIWDKTDAYGQRVYGLSDAVVSVGFEYETCPSLILWEKRTALLQGFELDPSNLGGWSLDKHHILNVKSGILHKGTGENQFLTQQPAIITSIMGNGRRRSISCPSCNGLAEGNKLLAPVALAVGIDGSLYVGDFNYIRRIFPSRN

SEQ ID NO: 175 - DNA, 2478 bp, Homo sapiens
  CDS (1)..(2478)
aaaaacagcagcatagacagtggtgaagcagaagttggtcggcgggtaacacaagaagtcccaccaggggtgttttggaggtcacaaattcacatcagtcagccccagttcttaaagttcaacatctccctcgggaaggacgctctctttggtgtttacataagaagaggacttccaccatctcatgcccagtatgacttcatggaacgtctggacgggaaggagaagtggagtgtggttgagtctcccagggaacgccggagcatacagaccttggttcagaatgaagccgtgtttgtgcagtacctggatgtgggcctgtggcatctggccttctacaatgatggaaaagacaaagagatggtttccttcaatactgttgtcctagattcagtgcaggactgtccacgtaactgccatgggaatggtgaatgtgtgtccggggtgtgtcactgtttcccaggatttctaggagcagactgtgctaaagctgcctgccctgtcctgtgcagtgggaatggacaatattctaaagggacgtgccagtgctacagcggctggaaaggtgcagagtgcgacgtgcccatgaatcagtgcatcgatccttcctgcgggggccacggctcctgcattgatgggaactgtgtctgctctgctggctacaaaggcgagcactgtgaggaagttgattgcttggatcccacctgctccagccacggagtctgtgtgaatggagaatgcctgtgcagccctggctggggtggtctgaactgtgagctggcgagggtccagtgcccagaccagtgcagtgggcatggcacgtacctgcctgacacgggcctctgcagctgcgatcccaactggatgggtcccgactgctctgttgaagtgtgctcagtagactgtggcactcacggcgtctgcatcgggggagcctgccgctgtgaagagggctggacaggcgcagcgtgtgaccagcgcgtgtgccacccccgctgcattgagcacgggacctgtaaagatggcaaatgtgaatgccgagagggctggaatggtgaacactgcaccattggtaggcaaacggcaggcaccgaaacagatggctgccctgacttgtgcaacggtaacgggagatgcacactgggtcagaacagctggcagtgtgtctgccagaccggctggagagggcccggatgcaacgttgccatggaaacttcctgtgctgataacaaggataatgagggagatggcctggtggattgtttggaccctgactgctgcctgcagtcagcctgtcagaacagcctgctctgccgggggtcccgggacccactggacatcattcagcagggccagacggattggcccgcagtgaagtccttctatgaccgtatcaagctcttggcaggcaaggatagcacccacatcattcctggagagaaccctttcaacagcagcttggtttctctcatccgaggccaagtagtaactacagatggaactcccctggtcggtgtgaacgtgtcttttgtcaagtacccaaaatacggctacaccatcacccgccaggatggcacgttcgacctgatcgcaaatggaggtgcttccttgactctacactttgagcgagccccgttcatgagccaggagcgcactgtgtggctgccgtggaacagcttttacgccatggacaccctggtgatgaagaccgaggagaactccatccccagctgtgacctcagtggctttgtccggcctgatccaatcatcatctcctccccactgtccaccttctttagtgctgcccctgggcagaatcccatcgtgcctgagacccaggttcttcatgaagaaatcgagctccctggttccaatgtgaaacttcgctatctgagctctagaactgcagggtacaagtcactgctgaagatcaccatgacccagtccacagtgcccctgaacctcattagggttcacctgatggtggctgtcgaggggcatctcttccagaagtcattccaggcttctcccaacctggcctccaccttcatctgggacaagacagatgcgtatggccaaagggtgtatggactctcagatgctgttgtgtctgtcgggtttgaatatgagacctgtcccagtctaattctctgggagaaaaggacagccctccttcagggattcgagctggacccctccaacctcggtggctggtccctagacaaacaccacatcctcaatgttaaaagtggaatcctacacaaaggcactggggaaaaccagttcctgacccagcagcctgccatcatcaccagcatcataggcaatggtcgccgccggagcatttcctgtcccagctgcaacggccttgctgaaggcaacaagctgctggccccagtggctctggctgttggaatcgatgggagcctctatgtgggtgacttcaattacatccgacgcatctttccctctcgaaat

SEQ ID NO: 176 - protein, 826 aa, Homo sapiens
KNSSIDSGEAEVGRRVTQEVPPGVFWRSQIHISQPQFLKFNISLGKDALFGVYIRRGLPPSHAQYDFMERLDGKEKWSVVESPRERRSIQTLVQNEAVFVQYLDVGLWHLAFYNDGKDKEMVSFNTVVLDSVQDCPRNCHGNGECVSGVCHCFPGFLGADCAKAACPVLCSGNGQYSKGTCQCYSGWKGAECDVPMNQCIDPSCGGHGSCIDGNCVCSAGYKGEHCEEVDCLDPTCSSHGVCVNGECLCSPGWGGLNCELARVQCPDQCSGHGTYLPDTGLCSCDPNWMGPDCSVEVCSVDCGTHGVCIGGACRCEEGWTGAACDQRVCHPRCIEHGTCKDGKCECREGWNGEHCTIGRQTAGTETDGCPDLCNGNGRCTLGQNSWQCVCQTGWRGPGCNVAMETSCADNKDNEGDGLVDCLDPDCCLQSACQNSLLCRGSRDPLDIIQQGQTDWPAVKSFYDRIKLLAGKDSTHIIPGENPFNSSLVSLIRGQVVTTDGTPLVGVNVSFVKYPKYGYTITRQDGTFDLIANGGASLTLHFERAPFMSQERTVWLPWNSFYAMDTLVMKTEENSIPSCDLSGFVRPDPIIISSPLSTFFSAAPGQNPIVPETQVLHEEIELPGSNVKLRYLSSRTAGYKSLLKITMTQSTVPLNLIRVHLMVAVEGHLFQKSFQASPNLASTFIWDKTDAYGQRVYGLSDAVVSVGFEYETCPSLILWEKRTALLQGFELDPSNLGGWSLDKHHILNVKSGILHKGTGENQFLTQQPAIITSIIGNGRRRSISCPSCNGLAEGNKLLAPVALAVGIDGSLYVGDFNYIRRIFPSRN

(The sequence listing continues in the following parts.)
